(19) United States
(12) Patent Application Publication
(10) Pub. No.: US 2004/0072264 A1
(43) Pub. Date: Apr. 15, 2004

(54) Novel compositions and methods for cancer

(76) Inventors: David W. Morris, Davis, CA (US); Eric K. Engelhard, Davis, CA (US)

Correspondence Address: Shantanu Basu, Morrison & Foerster LLP, 755 Page Mill Road, Palo Alto, CA, 94304-1018, US

(21) Appl. No.: 10/052,482

(22) Filed: Nov. 8, 2001

Related U.S. Application Data
(63) Continuation-in-part of application No. 09/747,377, filed on Dec. 22, 2000.
(63) Continuation-in-part of application No. 09/798,586, filed on Mar. 2, 2001.

(51) Int. Cl. G01N 33/574; C12N 9/00; C07H 21/04; C12P 21/02

(52) U.S. Cl. 435/7.23; 536/23.2; 435/325; 435/320.1; 435/183

(57) ABSTRACT

The present invention relates to novel sequences for use in diagnosis and treatment of carcinomas, especially lymphoma carcinomas. In addition, the present invention describes the use of novel compositions for use in screening methods.

[0001] The present application is a continuing application of U.S. Ser. No. 09/747,377, filed Dec. 22, 2000 and Ser. No. 09/798,586, filed Mar. 2, 2001, both of which are expressly incorporated herein by reference.

### FIELD OF THE INVENTION

[0002] The present invention relates to novel sequences for use in diagnosis and treatment of cancer, especially carcinomas, as well as the use of the novel compositions in screening methods.

### BACKGROUND OF THE INVENTION

[0003] Oncogenes are genes that can cause cancer. Carcinogenesis can occur by a wide variety of mechanisms, including infection of cells by viruses containing oncogenes, activation of protooncogenes in the host genome, and mutations of protooncogenes and tumor suppressor genes.

[0004] There are a number of viruses known to be involved in human cancer as well as in animal cancer. Of particular interest here are viruses that do not contain oncogenes themselves; these are slow-transforming retroviruses. They induce tumors by integrating into the host genome and affecting neighboring protooncogenes in a variety of ways, including promoter insertion, enhancer insertion, and/or truncation of a protooncogene or tumor suppressor gene. The analysis of sequences at or near the insertion sites led to the identification of a number of new protooncogenes.

[0005] With respect to lymphoma and leukemia, murine leukemia retrovirus (MuLV), such as SL3-3 or Akv, is a potent inducer of tumors when inoculated into susceptible newborn mice, or when carried in the germline. A number of sequences have been identified as relevant in the induction of lymphoma and leukemia by analyzing the insertion sites; see Sorensen et al., J. of Virology 74:2161 (2000); Hansen et al., Genome Res. 10(2):237-43 (2000); Sorensen et al., J. Virology 70:4063 (1996); Sorensen et al., J. Virology 67:7118 (1993); Joosten et al., Virology 268:308 (2000); and Li et al., Nature Genetics 23:348 (1999); all of which are expressly incorporated by reference herein.

[0006] Accordingly, it is an object of the invention to provide sequences involved in cancer and in particular in oncogenesis.

### SUMMARY OF THE INVENTION

[0007] In accordance with the objects outlined above, the present invention provides methods for screening for compositions which modulate carcinomas, especially lymphoma and leukemia. Also provided herein are methods of inhibiting proliferation of a cell, preferably a lymphoma cell. Methods of treatment of carcinomas, including diagnosis, are also provided herein.

[0008] In one aspect, a method of screening drug candidates comprises providing a cell that expresses a carcinoma associated (CA) gene or fragments thereof. Preferred embodiments of CA genes are genes which are differentially expressed in cancer cells, preferably lymphatic, breast, prostate or epithelial cells, compared to other cells. Preferred embodiments of CA genes used in the methods herein include, but are not limited to the nucleic acids selected from Tables 1-40. The method further includes adding a drug candidate to the cell and determining the effect of the drug candidate on the expression of the CA gene.

[0009] In one embodiment, the method of screening drug candidates includes comparing the level of expression in the absence of the drug candidate to the level of expression in the presence of the drug candidate.

[0010] Also provided herein is a method of screening for a bioactive agent capable of binding to a CA protein (CAP), the method comprising combining the CAP and a candidate bioactive agent, and determining the binding of the candidate agent to the CAP.

[0011] Further provided herein is a method for screening for a bioactive agent capable of modulating the 2@ activity of a CAP. In one embodiment, the method comprises combining the CAP and a candidate bioactive agent, and determining the effect of the candidate agent on the bioactivity of the CAP.

[0012] Also provided is a method of evaluating the effect of a candidate carcinoma drug comprising administering the drug to a patient and removing a cell sample from the patient. The expression profile of the cell is then determined. This method may further comprise comparing the expression profile of the patient to an expression profile of a heathy individual.

[0013] In a further aspect, a method for inhibiting the activity of an CA protein is provided. In one embodiment, the method comprises administering to a patient an inhibitor of a CA protein preferably selected from the group consisting of the sequences outlined in Tables 1-40 or their complements.

[0014] A method of neutralizing the effect of a CA protein, preferably a protein encoded by a nucleic acid selected from the group of sequences outlined in Tables 1-40, is also provided. Preferably, the method comprises contacting an agent specific for said protein with said protein in an amount sufficient to effect neutralization.

[0015] Moreover, provided herein is a biochip comprising a nucleic acid segment which encodes a CA protein, preferably selected from the sequences outlined in Tables 1-40.

[0016] Also provided herein is a method for diagnosing or determining the propensity to carcinomas, especially lymphoma or leukemia by sequencing at least one carcinoma or lymphoma gene of an individual. In yet another aspect of the invention, a method is provided for determining carcinoma including lymphoma and leukemia gene copy number in an individual.

[0017] Novel sequences are also provided herein. Other aspects of the invention will become apparent to the skilled artisan by the following description of the invention.

### DETAILED DESCRIPTION OF THE INVENTION

[0018] The present invention is directed to a number of sequences associated with carcinomas, especially lymphoma, breast cancer or prostate cancer. The relatively tight linkage between clonally-integrated proviruses and protooncogenes forms “provirus tagging”, in which slow-transforming retroviruses that act by an insertion mutation mechanism are used to isolate protooncogenes. In some models, uninfected animals have low cancer rates, and infected animals have high cancer rates. It is known that many of the retroviruses involved do not carry transduced host protooncogenes or pathogenic trans-acting viral genes, and thus the cancer incidence must therefor be a direct consequence of proviral integration effects into host protooncogenes. Since proviral integration is random, rare integrants will “activate” host protooncogenes that provide a selective growth advantage, and these rare events result in new proviruses at clonal stoichiometries in tumors.

[0019] The use of oncogenic retroviruses, whose sequences insert into the genome of the host organism resulting in carcinoma, allows the identification of host sequences involved in carcinoma. These sequences may then be used in a number of different ways, including diagnosis, prognosis, screening for modulators (including both agonists and antagonists), antibody generation (for immunotherapy and imaging), etc. However, as will be appreciated by those in the art, oncogenes that are identified in one type of cancer such as lymphoma or leukemia have a strong likelihood of being involved in other types of cancers as well. Thus, while the sequences outlined herein are initially identified as correlated with lymphoma, they can also be found in other types of cancers as well, outlined below.

[0020] Accordingly, the present invention provides nucleic acid and protein sequences that are associated with carcinoma, herein termed “carcinoma associated” or “CA” sequences. In a preferred embodiment, the present invention provides nulcleic acid and protein sequences that are associated with carcinomas which originate in lymphatic tissue, herein termed “lymphoma associated”, “leukemia associated” or “LA” sequences.

[0021] Suitable cancers which can be diagnosed or screened for using the methods of the present invention include cancers classified by site or by histological type. Cancers classified by site include cancer of the oral cavity and pharynx (lip, tongue, salivary gland, floor of mouth, gum and other mouth, nasopharynx, tonsil, oropharynx, hypopharynx, other oral/pharynx); cancers of the digestive system (esophagus; stomach; small intestine; colon and rectum; anus, anal canal, and anorectum; liver; intrahepatic bile duct; gallbladder; other biliary; pancreas; retroperitoneum; peritoneum, omentum, and mesentery; other digestive); cancers of the respiratory system (nasal cavity, middle ear, and sinuses; larynx; lung and bronchus; pleura; trachea, mediastinum, and other respiratory); cancers of the mesothelioma; bones and joints; and soft tissue, including heart; skin cancers, including melanomas and other non-epithelial skin cancers; Kaposi's sarcoma and breast cancer; cancer of the female genital system (cervix uteri; corpus uteri; uterus, nos; ovary; vagina; vulva; and other female genital); cancers of the male genital system (prostate gland; testis; penis; and other male genital); cancers of the urinary system (urinary bladder; kidney and renal pelvis; ureter; and other urinary); cancers of the eye and orbit; cancers of the brain and nervous system (brain; and other nervous system); cancers of the endocrine system (thyroid gland and other endocrine, including thymus); cancers of the lymphomas (hodgkin's disease and non-hodgkin's lymphoma), multiple myeloma, and leukemias (lymphocytic leukemia; myeloid leukemia; monocytic leukemia; and other leukemias).

[0022] Other cancers, classified by histological type, that may be associated with the sequences of the invention include, but are not limited to, Neoplasm, malignant; Carcinoma, NOS; Carcinoma, undifferentiated, NOS; Giant and spindle cell carcinoma; Small cell carcinoma, NOS; Papillary carcinoma, NOS; Squamous cell carcinoma, NOS; Lymphoepithelial carcinoma; Basal cell carcinoma, NOS; Pilomatrix carcinoma; Transitional cell carcinoma, NOS; Papillary transitional cell carcinoma; Adenocarcinoma, NOS; Gastrinoma, malignant; Cholangiocarcinoma; Hepatocellular carcinoma, NOS; Combined hepatocellular carcinoma and cholangiocarcinoma; Trabecular adenocarcinoma; Adenoid cystic carcinoma; Adenocarcinoma in adenomatous polyp; Adenocarcinoma, familial polyposis coli; Solid carcinoma, NOS; Carcinoid tumor, malignant; Branchiolo-alveolar adenocarcinoma; Papillary adenocarcinoma, NOS; Chromophobe carcinoma; Acidophil carcinoma; Oxyphilic adenocarcinoma; Basophil carcinoma; Clear cell adenocarcinoma, NOS; Granular cell carcinoma; Follicular adenocarcinoma, NOS; Papillary and follicular adenocarcinoma; Nonencapsulating sclerosing carcinoma; Adrenal cortical carcinoma; Endometroid carcinoma; Skin appendage carcinoma; Apocrine adenocarcinoma; Sebaceous adenocarcinoma; Ceruminous adenocarcinoma; Mucoepidermoid carcinoma; Cystadenocarcinoma, NOS; Papillary cystadenocarcinoma, NOS; Papillary serous cystadenocarcinoma; Mucinous cystadenocarcinoma, NOS; Mucinous adenocarcinoma; Signet ring cell carcinoma; Infiltrating duct carcinoma; Medullary carcinoma, NOS; Lobular carcinoma; Inflammatory carcinoma; Paget's disease, mammary; Acinar cell carcinoma; Adenosquamous carcinoma; Adenocarcinoma w/ squamous metaplasia; Thymoma, malignant; Ovarian stromal tumor, malignant; Thecoma, malignant; Granulosa cell tumor, malignant; Androblastoma, malignant; Sertoli cell carcinoma; Leydig cell tumor, malignant; Lipid cell tumor, malignant; Paraganglioma, malignant; Extra-mammary paraganglioma, malignant; Pheochromocytoma; Glomangiosarcoma; Malignant melanoma, NOS; Amelanotic melanoma; Superficial spreading melanoma; Malig melanoma in giant pigmented nevus; Epithelioid cell melanoma; Blue nevus, malignant; Sarcoma, NOS; Fibrosarcoma, NOS; Fibrous histiocytoma, malignant; Myxosarcoma; Liposarcoma, NOS; Leiomyosarcoma, NOS; Rhabdomyosarcoma, NOS; Embryonal rhabdomyosarcoma; Alveolar rhabdomyosarcoma; Stromal sarcoma, NOS; Mixed tumor, malignant, NOS; Mullerian mixed tumor; Nephroblastoma; Hepatoblastoma; Carcinosarcoma, NOS; Mesenchymoma, malignant; Brenner tumor, malignant; Phyllodes tumor, malignant; Synovial sarcoma, NOS; Mesothelioma, malignant; Dysgerminoma; Embryonal carcinoma, NOS; Teratoma, malignant, NOS; Struma ovarii, malignant; Choriocarcinoma; Mesonephroma, malignant; Hemangiosarcoma; Hemangioendothelioma, malignant; Kaposi's sarcoma; Hemangiopericytoma, malignant; Lymphangiosarcoma; Osteosarcoma, NOS; Juxtacortical osteosarcoma; Chondrosarcoma, NOS; Chondroblastoma, malignant; Mesenchymal chondrosarcoma; Giant cell tumor of bone; Ewing's sarcoma; Odontogenic tumor, malignant; Ameloblastic odontosarcoma; Ameloblastoma, malignant; Ameloblastic fibrosarcoma; Pinealoma, malignant; Chordoma; Glioma, malignant; Ependymoma, NOS; Astrocytoma, NOS; Protoplasmic astrocytoma; Fibrillary astrocytoma; Astroblastoma; Glioblastoma, NOS; Oligodendroglioma, NOS; Oligodendroblastoma; Primitive neuroectodermal; Cerebellar sarcoma, NOS; Ganglioneuroblastoma; Neuroblastoma, NOS; Retinoblastoma, NOS; Olfactory neurogenic tumor; Meningioma, malignant; Neurofibrosarcoma; Neurilemmoma, malignant; Granular cell tumor, malignant; Malignant lymphoma, NOS; Hodgkin's disease, NOS; Hodgkin's; paragranuloma, NOS; Malignant lymphoma, small lymphocytic; Malignant lymphoma, large cell, diffuse; Malignant lymphoma, follicular, NOS; Mycosis fungoides; Other specified non-Hodgkin's lymphomas; Malignant histiocytosis; Multiple myeloma; Mast cell sarcoma; Immunoproliferative small intestinal disease; Leukemia, NOS; Lymphoid leukemia, NOS; Plasma cell leukemia; Erythroleukemia; Lymphosarcoma cell leukemia; Myeloid leukemia, NOS; Basophilic leukemia; Eosinophilic leukemia; Monocytic leukemia, NOS; Mast cell leukemia; Megakaryoblastic leukemia; Myeloid sarcoma; and Hairy cell leukemia.

[0023] In addition, the genes may be involved in other diseases, such as but not limited to diseases associated with aging or neurodegenerative diseases.

[0024] Association in this context means that the nucleotide or protein sequences are either differentially expressed, activated, inactivated or altered in carcinomas as compared to normal tissue. As outlined below, CA sequences include those that are up-regulated (i.e. expressed at a higher level), as well as those that are down-regulated (i.e. expressed at a lower level), in carcinomas. CA sequences also include sequences which have been altered (i.e., truncated sequences or sequences with substitutions, deletions or insertions, including point mutations) and show either the same expression profile or an altered profile. In a preferred embodiment, the CA sequences are from humans; however, as will be appreciated by those in the art, CA sequences from other organisms may be useful in animal models of disease and drug evaluation; thus, other CA sequences are provided, from vertebrates, including mammals, including rodents (rats, mice, hamsters, guinea pigs, etc.), primates, farm animals (including sheep, goats, pigs, cows, horses, etc). In some cases, prokaryotic CA sequences may be useful. CA sequences from other organisms may be obtained using the techniques outlined below.

[0025] CA sequences can include both nucleic acid and amino acid sequences. In a preferred embodiment, the CA sequences are recombinant nucleic acids. By the term “recombinant nucleic acid” herein is meant nucleic acid, originally formed in vitro, in general, by the manipulation of nucleic acid by polymerases and endonucleases, in a form not normally found in nature. Thus an isolated nucleic acid, in a linear form, or an expression vector formed in vitro by ligating DNA molecules that are not normally joined, are both considered recombinant for the purposes of this invention. It is understood that once a recombinant nucleic acid is made and reintroduced into a host cell or organism, it will replicate non-recombinantly, i.e. using the in vivo cellular machinery of the host cell rather than in vitro manipulations; however, such nucleic acids, once produced recombinantly, although subsequently replicated non-recombinantly, are still considered recombinant for the purposes of the invention.

[0026] Similarly, a “recombinant protein” is a protein made using recombinant techniques, i.e. through the expression of a recombinant nucleic acid as depicted above. A recombinant protein is distinguished from naturally occurring protein by at least one or more characteristics. For example, the protein may be isolated or purified away from some or all of the proteins and compounds with which it is normally associated in its wild type host, and thus may be substantially pure. For example, an isolated protein is unaccompanied by at least some of the material with which it is normally associated in its natural state, preferably constituting at least about 0.5%, more preferably at least about 5% by weight of the total protein in a given sample. A substantially pure protein comprises at least about 75% by weight of the total protein, with at least about 80% being preferred, and at least about 90% being particularly preferred. The definition includes the production of an CA protein from one organism in a different organism or host cell. Alternatively, the protein may be made at a significantly higher concentration than is normally seen, through the use of an inducible promoter or high expression promoter, such that the protein is made at increased concentration levels. Alternatively, the protein may be in a form not normally found in nature, as in the addition of an epitope tag or amino acid substitutions, insertions and deletions, as discussed below.

[0027] In a preferred embodiment, the CA sequences are nucleic acids. As will be appreciated by those in the art and is more fully outlined below, CA sequences are useful in a variety of applications, including diagnostic applications, which will detect naturally occurring nucleic acids, as well as screening applications; for example, biochips comprising nucleic acid probes to the CA sequences can be generated. In the broadest sense, then, by “nucleic acid” or “oligonucleotide” or grammatical equivalents herein means at least two nucleotides covalently linked together. A nucleic acid of the present invention will generally contain phosphodiester bonds, although in some cases, as outlined below (for example in antisense applications or when a candidate agent is a nucleic acid), nucleic acid analogs may be used that have alternate backbones, comprising, for example, phosphoramidate (Beaucage et al., Tetrahedron 49(10):1925 (1993) and references therein; Letsinger, J. Org. Chem. 35:3800 (1970); Sprinzl et al., Eur. J. Biochem. 81:579 (1977); Letsinger et al., Nucl. Acids Res. 14:3487 (1986); Sawai et al, Chem. Lett. 805,(1984), Letsinger et al., J. Am. Chem. Soc. 110:4470 (1988); and Pauwels et al., Chemica Scripta 26:141 91986)), phosphorothioate (Mag et al., Nucleic Acids Res. 19:1437 (1991); and U.S. Pat. No. 5,644,048), phosphorodithioate (Briu et al., J. Am. Chem. Soc. 111:2321 (1989), O-methylphophoroamidite linkages (see Eckstein, Oligonucleotides and by Analogues: A Practical Approach, Oxford University Press), and peptide nucleic acid backbones and linkages (see Egholm, J. Am. Chem. Soc. 114:1895 (1992); Meier et al., Chem. Int. Ed. Engl. 31:1008 (1992); Nielsen, Nature, 365:566 (1993); Carlsson et al., Nature 380:207 (1996), all of which are incorporated by reference). Other analog nucleic acids include those with positive backbones (Denpcy et al., Proc. Natl. Acad. Sci. USA 92:6097 (1995); non-ionic backbones (U.S. Pat. Nos. 5,386,023, 5,637,684, 5,602,240, 5,216,141 and 4,469,863; Kiedrowshi et al., Angew. Chem. Intl. Ed. English 30:423 (1991); Letsinger et al., J. Am. Chem. Soc. 110:4470 (1988); Letsinger et al., Nucleoside & Nucleotide 13:1597 (1994); Chapters 2 and 3, ASC Symposium Series 580, “Carbohydrate Modifications in Antisense Research”, Ed. Y. S. Sanghui and P. Dan Cook; Mesmaeker et al., Bioorganic & Medicinal Chem. Lett. 4:395 (1994); Jeffs et al., J. Biomolecular NMR 34:17 (1994); Tetrahedron Lett. 37:743 (1996)) and non-ribose backbones, including those described in U.S. Pat. Nos. 5,235,033 and 5,034,506, and Chapters 6 and 7, ASC Symposium Series 580, “Carbohydrate Modifications in Antisense Research”, Ed. Y. S. Sanghui and P. Dan Cook. Nucleic acids containing one or more carbocyclic sugars are also included within one definition of nucleic acids (see Jenkins et al., Chem. Soc. Rev. (1995) pp169-176). Several nucleic acid analogs are described in Rawls, C & E News Jun. 2, 1997 page 35. All of these references are hereby expressly incorporated by reference. These modifications of the ribose-phosphate backbone may be done for a variety of reasons, for example to increase the stability and half-life of such molecules in physiological environments for use in anti-sense applications or as probes on a biochip.

[0028] As will be appreciated by those in the art, all of these nucleic acid analogs may find use in the present invention. In addition, mixtures of naturally occurring nucleic acids and analogs can be made; alternatively, mixtures of different nucleic acid analogs, and mixtures of naturally occurring nucleic acids and analogs may be made.

[0029] The nucleic acids may be single stranded or double stranded, as specified, or contain portions of both double stranded or single stranded sequence. As will be appreciated by those in the art, the depiction of a single strand “Watson” also defines the sequence of the other strand “Crick”; thus the sequences described herein also includes the complement of the sequence. The nucleic acid may be DNA, both genomic and cDNA, RNA or a hybrid, where the nucleic acid contains any combination of deoxyribo- and ribo-nucleotides, and any combination of bases, including uracil, adenine, thymine, cytosine, guanine, inosine, xanthine hypoxanthine, isocytosine, isoguanine, etc. As used herein, the term “nucleoside” includes nucleotides and nucleoside and nucleotide analogs, and modified nucleosides such as amino modified nucleosides. In addition, “nucleoside” includes non-naturally occurring analog structures. Thus for example the individual units of a peptide nucleic acid, each containing a base, are referred to herein as a nucleoside.

[0030] An CA sequence can be initially identified by substantial nucleic acid and/or amino acid sequence homology to the CA sequences outlined herein. Such homology can be based upon the overall nucleic acid or amino acid sequence, and is generally determined as outlined below, using either homology programs or hybridization conditions.

[0031] The CA sequences of the invention were initially identified as described herein; basically, infection of mice with murine leukemia viruses (MLV) resulted in lymphoma, although many of these sequences will also be involved in other cancers as is generally outlined herein.

[0032] The CA sequences outlined herein comprise the insertion sites for the virus. In general, the retrovirus can cause carcinomas in three basic ways: first of all, by inserting upstream of a normally silent host gene and activating it (e.g. promoter insertion); secondly, by truncating a host gene that leads to oncogenesis; or by enhancing the transcription of a neighboring gene. For example, retrovirus enhancers, including SL3-3, are known to act on genes up to approximately 200 kilobases of the insertion site.

[0033] In a preferred embodiment, CA sequences are those that are up-regulated in carcinomas; that is, the expression of these genes is higher in carcinoma tissue as compared to normal tissue of the same differentiation stage. “Up-regulation” as used herein means at least about 50%, more preferably at least about 100%, more preferably at least about 150%, more preferably, at least about 200%, with from 300 to at least 1000% being especially preferred.

[0034] In a preferred embodiment, CA sequences are those that are down-regulated in carcinomas; that is, the expression of these genes is lower in carcinoma tissue as compared to normal I tissue of the same differentiation stage. “Down-regulation” as used herein means at least about 50%, more preferably at least about 100%, more preferably at least about 150%, more preferably, at least about 200%, with from 300 to at least 1000% being especially preferred.

[0035] In a preferred embodiment, CA sequences are those that are altered but show either the same expression profile or an altered profile as compared to normal lymphoid tissue of the same differentiation stage. “Altered CA sequences” as used herein refers to sequences which are truncated, contain insertions or contain point mutations.

[0036] CA proteins of the present invention may be classified as secreted proteins, transmembrane proteins or intracellular proteins.

[0037] In a preferred embodiment the CA protein is an intracellular protein. Intracellular proteins may be found in the cytoplasm and/or in the nucleus. Intracellular proteins are involved in all aspects of cellular function and replication (including, for example, signaling pathways); aberrant expression of such proteins results in unregulated or disregulated cellular processes. For example, many intracellular proteins have enzymatic activity such as protein kinase activity, protein phosphatase activity, protease activity, nucleotide cyclase activity, polymerase activity and the like. Intracellular proteins also serve as docking proteins that are involved in organizing complexes of proteins, or targeting proteins to various subcellular localizations, and are involved in maintaining the structural integrity of organelles.

[0038] An increasingly appreciated concept in characterizing intracellular proteins is the presence in the proteins of one or more motifs for which defined functions have been attributed. In addition to the highly conserved sequences found in the enzymatic domain of proteins, highly conserved sequences have been identified in proteins that are involved in protein-protein interaction. For example, Src-213 homology-2 (SH2) domains bind tyrosine-phosphorylated targets in a sequence dependent manner. PTB domains, which are distinct from SH2 domains, also bind tyrosine phosphorylated targets. SH3 domains bind to proline-rich targets. In addition, PH domains, tetratricopeptide repeats and WD domains to name only a few, have been shown to mediate protein-protein interactions. Some of these may also be involved in binding to phospholipids or other second messengers. As will be appreciated by one of ordinary skill in the art, these motifs can be identified on the basis of primary sequence; thus, an analysis of the sequence of proteins may provide insight into both the enzymatic potential of the molecule and/or molecules with which the protein may associate.

[0039] In a preferred embodiment, the CA sequences are transmembrane proteins. Transmembrane proteins are molecules that span the phospholipid bilayer of a cell. They may have an intracellular domain, an extracellular domain, or both. The intracellular domains of such proteins may have a number of functions including those already described for intracellular proteins. For example, the intracellular domain may have enzymatic activity and/or may serve as a binding site for additional proteins. Frequently the intracellular domain of transmembrane proteins serves both roles. For example certain receptor tyrosine kinases have both protein kinase activity and SH2 domains. In addition, autophosphorylation of tyrosines on the receptor molecule itself, creates binding sites for additional SH2 domain containing proteins.

[0040] Transmembrane proteins may contain from one to many transmembrane domains. For example, receptor tyrosine kinases, certain cytokine receptors, receptor guanylyl cyclases and receptor serine/threonine protein kinases contain a single transmembrane domain. However, various other proteins including channels and adenylyl cyclases contain numerous transmembrane domains. Many important cell surface receptors are classified as “seven transmembrane domain” proteins, as they contain 7 membrane spanning regions. Important transmembrane protein receptors include, but are not limited to insulin receptor, insulin-like growth factor receptor, human growth hormone receptor, glucose transporters, transferrin receptor, epidermal growth factor receptor, low density lipoprotein receptor, epidermal growth factor receptor, leptin receptor, interleukin receptors, e.g. IL-1 receptor, IL-2 receptor, etc.

[0041] Characteristics of transmembrane domains include approximately 20 consecutive hydrophobic amino acids that may be followed by charged amino acids. Therefore, upon analysis of the amino acid sequence of a particular protein, the localization and number of transmembrane domains within the protein may be predicted.

[0042] The extracellular domains of transmembrane proteins are diverse; however, conserved motifs are found repeatedly among various extracellular domains. Conserved structure and/or functions have been ascribed to different extracellular motifs. For example, cytokine receptors are characterized by a cluster of cysteines and a WSXWS (W=tryptophan, S=serine, X=any amino acid) motif. Immunoglobulin-like domains are highly conserved. Mucin-like domains may be involved in cell adhesion and leucine-rich repeats participate in protein-protein interactions.

[0043] Many extracellular domains are involved in binding to other molecules. In one aspect, extracellular domains are receptors. Factors that bind the receptor domain include circulating ligands, which may be peptides, proteins, or small molecules such as adenosine and the like. For example, growth factors such as EGF, FGF and PDGF are circulating growth factors that bind to their cognate receptors to initiate a variety of cellular responses. Other factors include cytokines, mitogenic factors, neurotrophic factors and the like. Extracellular domains also bind to cell-associated molecules. In this respect, they mediate cell-cell interactions. Cell-associated ligands can be tethered to the cell for example via a glycosylphosphatidylinositol (GPI) anchor, or may themselves be transmembrane proteins. Extracellular domains also associate with the extracellular matrix and contribute to the maintenance of the cell structure.

[0044] CA proteins that are transmembrane are particularly preferred in the present invention as they are good targets for immunotherapeutics, as are described herein. In addition, as outlined below, transmembrane proteins can be also useful in imaging modalities.

[0045] It will also be appreciated by those in the art that a transmembrane protein can be made soluble by removing transmembrane sequences, for example through recombinant methods. Furthermore, transmembrane proteins that have been made soluble can be made to be secreted through recombinant means by adding an appropriate signal sequence.

[0046] In a preferred embodiment, the CA proteins are secreted proteins; the secretion of which can be either constitutive or regulated. These proteins have a signal peptide or signal sequence that targets the molecule to the secretory pathway. Secreted proteins are involved in numerous physiological events; by virtue of their circulating nature, they serve to transmit signals to various other cell types. The secreted protein may function in an autocrine manner (acting on the cell that secreted the factor), a paracrine manner (acting on cells in close proximity to the cell that secreted the factor) or an endocrine manner (acting on cells at a distance). Thus secreted molecules find use in modulating or altering numerous aspects of physiology. CA proteins that are secreted proteins are particularly preferred in the present invention as they serve as good targets for diagnostic markers, for example for blood tests.

[0047] An CA sequence is initially identified by substantial nucleic acid and/or amino acid sequence homology to the CA sequences outlined herein. Such homology can be based upon the overall nucleic acid or amino acid sequence, and is generally determined as outlined below, using either homology programs or hybridization conditions.

[0048] As used herein, a nucleic acid is a “CA nucleic acid” if the overall homology of the nucleic acid sequence to one of the nucleic acids of Tables 1-40 is preferably greater than about 75%, more preferably greater than about 80%, even more preferably greater than about 85% and most preferably greater than 90%. In some embodiments the homology will be as high as about 93 to 95 or 98%. In a preferred embodiment, the sequences which are used to determine sequence identity or similarity are selected from those of the nucleic acids of Tables 1-40. In another embodiment, the sequences are naturally occurring allelic variants of the sequences of the nucleic acids of Tables 1-40. In another embodiment, the sequences are sequence variants as further described herein.

[0049] Homology in this context means sequence similarity or identity, with identity being preferred. A preferred comparison for homology purposes is to compare the sequence containing sequencing errors to the correct sequence. This homology will be determined using standard techniques known in the art, including, but not limited to, the local homology algorithm of Smith & Waterman, Adv. Appl. Math. 2:482 (1981), by the homology alignment algorithm of Needleman & Wunsch, J. Mol. Biol. 48:443 (1970), by the search for similarity method of Pearson & Lipman, PNAS USA 85:2444 (1988), by computerized implementations of these algorithms (GAP, BESTFIT, FASTA, and TFASTA in the Wisconsin Genetics Software Package, Genetics Computer Group, 575 Science Drive, Madison, Wis.), the Best Fit sequence program described by Devereux et al., Nucl. Acid Res. 12:387-395 (1984), preferably using the default settings, or by inspection.

[0050] One example of a useful algorithm is PILEUP. PILEUP creates a multiple sequence alignment from a group of related sequences using progressive, pairwise alignments. It can also plot a tree showing the clustering relationships used to create the alignment. PILEUP uses a simplification of the progressive alignment method of Feng & Doolittle, J. Mol. Evol. 35:351-360 (1987); the method is similar to that described by Higgins & Sharp CABIOS 5:151-153 (1989). Useful PILEUP parameters including a default gap weight of 3.00, a default gap length weight of 0.10, and weighted end gaps.

[0051] Another example of a useful algorithm is the BLAST algorithm, described in Altschul et al., J. Mol. Biol. 215, 403-410, (1990) and Karlin et al., PNAS USA 90:5873-5787 (1993). A particularly useful BLAST program is the WU-BLAST-2 program which was obtained from Altschul et al., Methods in Enzymology, 266: 460-480 (1996); http://blast.wustl]. WU-BLAST-2 uses several search parameters, most of which are set to the default values. The adjustable parameters are set with the following values: overlap span=1, overlap fraction=0.125, word threshold (T)=11. The HSP S and HSP S2 parameters are dynamic values and are established by the program itself depending upon the composition of the particular sequence and composition of the particular database against which the sequence of interest is being searched; however, the values may be adjusted to increase sensitivity. A % amino acid sequence identity value is determined by the number of matching identical residues divided by the total number of residues of the “longer” sequence in the aligned region. The “longer” sequence is the one having the most actual residues in the aligned region (gaps introduced by WU-Blast-2 to maximize the alignment score are ignored).

[0052] Thus, “percent (%) nucleic acid sequence identity” is defined as the percentage of nucleotide residues in a candidate sequence that are identical with the nucleotide residues of the nucleic acids of Tables 1-40. A preferred method utilizes the BLASTN module of WU-BLAST-2 set to the default parameters, with overlap span and overlap fraction set to 1 and 0.125, respectively.

[0053] The alignment may include the introduction of gaps in the sequences to be aligned. In addition, for sequences which contain either more or fewer nucleotides than those of the nucleic acids of Tables 1-40, it is understood that the percentage of homology will be determined based on the number of homologous nucleosides in relation to the total number of nucleosides. Thus, for example, homology of sequences shorter than those of the sequences identified herein and as discussed below, will be determined using the number of nucleosides in the shorter sequence.

[0054] In one embodiment, the nucleic acid homology is determined through hybridization studies. Thus, for example, nucleic acids which hybridize under high stringency to the nucleic acids identified in the figures, or their complements, are considered CA sequences. High stringency conditions are known in the art; see for example Maniatis et al., Molecular Cloning: A Laboratory Manual, 2d Edition, 1989, 2% and Short Protocols in Molecular Biology, ed. Ausubel, et al., both of which are hereby incorporated by reference. Stringent conditions are sequence-dependent and will be different in different circumstances. Longer sequences hybridize specifically at higher temperatures. An extensive guide to the hybridization of nucleic acids is found in Tijssen, Techniques in Biochemistry and Molecular Biology—Hybridization with Nucleic Acid Probes, “Overview of principles of hybridization and the strategy of nucleic acid assays” (1993). Generally, stringent conditions are selected to be about 5-10° C. lower than the thermal melting point (Tm) for the specific sequence at a defined ionic strength pH. The Tm is the temperature (under defined ionic strength, pH and nucleic acid concentration) at which 50% of the probes complementary to the target hybridize to the target sequence at equilibrium (as the target sequences are present in excess, at Tm, 50% of the probes are occupied at equilibrium). Stringent conditions will be those in which the salt concentration is less than about 1.0 M sodium ion, typically about 0.01 to 1.0 M sodium ion concentration (or other salts) at pH 7.0 to 8.3 and the temperature is at least about 30° C. for short probes (e.g. 10 to 50 nucleotides) and at least about 60° C. for long probes (e.g. greater than 50 nucleotides). Stringent conditions may also be achieved with the addition of destabilizing agents such as formamide.

[0055] In another embodiment, less stringent hybridization conditions are used; for example, moderate or low stringency conditions may be used, as are known in the art; see Maniatis and Ausubel, supra, and Tijssen, supra.

[0056] In addition, the CA nucleic acid sequences of the invention are fragments of larger genes, i.e. they are nucleic acid segments. Alternatively, the CA nucleic acid sequences can serve as indicators of oncogene position, for example, the CA sequence may be an enhancer that activates a protooncogene. “Genes” in this context includes coding regions, non-coding regions, and mixtures of coding and non-coding regions. Accordingly, as will be appreciated by those in the art, using the sequences provided herein, additional sequences of the CA genes can be obtained, using techniques well known in the art for cloning either longer sequences or the full length sequences; see Maniatis et al., and Ausubel, et al., supra, hereby expressly incorporated by reference. In general, this is done using PCR, for example, kinetic PCR.

[0057] Once the CA nucleic acid is identified, it can be cloned and, if necessary, its constituent parts recombined to form the entire CA nucleic acid. Once isolated from its natural source, e.g., contained within a plasmid or other vector or excised therefrom as a linear nucleic acid segment, the recombinant CA nucleic acid can be further used as a probe to identify and isolate other CA nucleic acids, for example additional coding regions. It can also be used as a “precursor” nucleic acid to make modified or variant CA nucleic acids and proteins.

[0058] The CA nucleic acids of the present invention are used in several ways. In a first embodiment, nucleic acid probes to the CA nucleic acids are made and attached to biochips to be used in screening and diagnostic methods, as outlined below, or for administration, for example for gene therapy and/or antisense applications. Alternatively, the CA nucleic acids that include coding regions of CA proteins can be put into expression vectors for the expression of CA proteins, again either for screening purposes or for administration to a patient.

[0059] In a preferred embodiment, nucleic acid probes to CA nucleic acids (both the nucleic acid sequences outlined in the figures and/or the complements thereof) are made. The nucleic acid probes attached to the biochip are designed to be substantially complementary to the CA nucleic acids, i.e. the target sequence (either the target sequence of the sample or to other probe sequences, for example in sandwich assays), such that hybridization of the target sequence and the probes of the present invention occurs. As outlined below, this complementarity need not be perfect; there may be any number of base pair mismatches which will interfere with hybridization between the target sequence and the single stranded nucleic acids of the present invention. However, if the number of mutations is so great that no hybridization can occur under even the least stringent of hybridization conditions, the sequence is not a complementary target sequence. Thus, by “substantially complementary” herein is meant that the probes are sufficiently complementary to the target sequences to hybridize under normal reaction conditions, particularly high stringency conditions, as outlined herein.

[0060] A nucleic acid probe is generally single stranded but can be partially single and partially double stranded. The strandedness of the probe is dictated by the structure, composition, and properties of the target sequence. In general, the nucleic acid probes range from about 8 to about 100 bases long, with from about 10 to about 80 bases being preferred, and from about 30 to about 50 bases being particularly preferred. That is, generally whole genes are not used. In some embodiments, much longer nucleic acids can be used, up to hundreds of bases.

[0061] In a preferred embodiment, more than one probe per sequence is used, with either overlapping probes or probes to different sections of the target being used. That is, two, three, four or more probes, with three being preferred, are used to build in a redundancy for a particular target. The probes can be overlapping (i.e. have some sequence in common), or separate.

[0062] As will be appreciated by those in the art, nucleic acids can be attached or immobilized to a solid support in a wide variety of ways. By “immobilized” and grammatical equivalents herein is meant the association or binding between the nucleic acid probe and the solid support is sufficient to be stable under the conditions of binding, washing, analysis, and removal as outlined below. The binding can be covalent or non-covalent. By “non-covalent binding” and grammatical equivalents herein is meant one or more of either electrostatic, hydrophilic, and hydrophobic interactions. Included in non-covalent binding is the covalent attachment of a molecule, such as, streptavidin to the support and the non-covalent binding of the biotinylated probe to the streptavidin. By “covalent binding” and grammatical equivalents herein is meant that the two moieties, the solid support and the probe, are attached by at least one bond, including sigma bonds, pi bonds and coordination bonds. Covalent bonds can be formed directly between the probe and the solid support or can be formed by a cross linker or by inclusion of a specific reactive group on either the solid support or the probe or both molecules. Immobilization may also involve a combination of covalent and non-covalent interactions.

[0063] In general, the probes are attached to the biochip in a wide variety of ways, as will be appreciated by those in the art. As described herein, the nucleic acids can either be synthesized first, with subsequent attachment to the biochip, or can be directly synthesized on the biochip.

[0064] The biochip comprises a suitable solid substrate. By “substrate” or “solid support” or other grammatical equivalents herein is meant any material that can be modified to contain discrete individual sites appropriate for the attachment or association of the nucleic acid probes and is amenable to at least one detection method. As will be appreciated by those in the art, the number of possible substrates are very large, and include, but are not limited to, glass and modified or functionalized glass, plastics (including acrylics, polystyrene and copolymers of styrene and other materials, polypropylene, polyethylene, polybutylene, polyurethanes, Teflon™, etc.), polysaccharides, nylon or nitrocellulose, resins, silica or silica-based materials including silicon and modified silicon, carbon, metals, inorganic glasses, etc. In general, the substrates allow optical detection and do not appreciably fluoresce.

[0065] In a preferred embodiment, the surface of the biochip and the probe may be derivatized with chemical functional groups for subsequent attachment of the two. Thus, for example, the biochip is derivatized with a chemical functional group including, but not limited to, amino groups, carboxy groups, oxo groups and thiol groups, with amino groups being particularly preferred. Using these functional groups, the probes can be attached using functional groups on the probes. For example, nucleic acids containing amino groups can be attached to surfaces comprising amino groups, for example using linkers as are known in the art; for example, homo-or hetero-bifunctional linkers as are well known (see 1994 Pierce Chemical Company catalog, technical section on cross-linkers, pages 155-200, incorporated herein by reference). In addition, in some cases, additional linkers, such as alkyl groups (including substituted and heteroalkyl groups) may be used.

[0066] In this embodiment, the oligonucleotides are synthesized as is known in the art, and then attached to the surface of the solid support. As will be appreciated by those skilled in the art, either the 5′ or 3′ terminus may be attached to the solid support, or attachment may be via an internal nucleoside.

[0067] In an additional embodiment, the immobilization to the solid support may be very strong, yet non-covalent. For example, biotinylated oligonucleotides can be made, which bind to surfaces covalently coated with streptavidin, resulting in attachment.

[0068] Alternatively, the oligonucleotides may be synthesized on the surface, as is known in the art. For example, photoactivation techniques utilizing photopolymerization compounds and techniques are used. In a preferred embodiment, the nucleic acids can be synthesized in situ, using well known photolithographic techniques, such as those described in WO 95/25116; WO 95/35505; U.S. Pat. Nos. 5,700,637 and 5,445,934; and references cited within, all of which are expressly incorporated by reference; these methods of attachment form the basis of the Affymetrix GeneChip technology.

[0069] In addition to the solid-phase technology represented by biochip arrays, gene expression can also be quantified using liquid-phase arrays. One such system is kinetic polymerase chain reaction (PCR). Kinetic PCR allows for the simultaneous amplification and quantification of specific nucleic acid sequences. The specificity is derived from synthetic oligonucleotide primers designed to preferentially adhere to single-stranded nucleic acid sequences bracketing the target site. This pair of oligonucleotide primers form specific, non-covalently bound complexes on each strand of the target sequence. These complexes facilitate in vitro transcription of double-stranded DNA in opposite orientations. Temperature cycling of the reaction mixture creates a continuous cycle of primer binding, transcription, and re-melting of the nucleic acid to individual strands. The result is an exponential increase of the target dsDNA product. This product can be quantified in real time either through the use of an intercalating dye or a sequence specific probe. SYBR® Greene I, is an example of an intercalating dye, that preferentially binds to dsDNA resulting in a concomitant increase in the fluorescent signal. Sequence specific probes, such as used with TaqMan® technology, consist of a fluorochrome and a quenching molecule covalently bound to opposite ends of an oligonucleotide. The probe is designed to selectively bind the target DNA sequence between the two primers. When the DNA strands are synthesized during the PCR reaction, the fluorochrome is cleaved from the probe by the exonuclease activity of the polymerase resulting in signal dequenching. The probe signaling method can be more specific than the intercalating dye method, but in each case, signal strength is proportional to the dsDNA product produced. Each type of quantification method can be used in multi-well liquid phase arrays with each well representing primers and/or probes specific to nucleic acid sequences of interest. When used with messenger RNA preparations of tissues or cell lines, and an array of probe/primer reactions can simultaneously quantify the expression of multiple gene products of interest. See Germer, S., et al., Genome Res. 10:258-266 (2000); Heid, C. A., et al., Genome Res. 6, 986-994 (1996).

[0070] In a preferred embodiment, CA nucleic acids encoding CA proteins are used to make a variety of expression vectors to express CA proteins which can then be used in screening assays, as described below. The expression vectors may be either self-replicating extrachromosomal vectors or vectors which integrate into a host genome. Generally, these expression vectors include transcriptional and translational regulatory nucleic acid operably linked to the nucleic acid encoding the CA protein. The term “control sequences” refers to DNA sequences necessary for the expression of an operably linked coding sequence in a particular host organism. The control sequences that are suitable for prokaryotes, for example, include a promoter, optionally an operator sequence, and a ribosome binding site. Eukaryotic cells are known to utilize promoters, polyadenylation signals, and enhancers.

[0071] Nucleic acid is “operably linked” when it is placed into a functional relationship with another nucleic acid sequence. For example, DNA for a presequence or secretory leader is operably linked to DNA for a polypeptide if it is expressed as a preprotein that participates in the secretion of the polypeptide; a promoter or enhancer is operably linked to a coding sequence if it affects the transcription of the sequence; or a ribosome binding site is operably linked to a coding sequence if it is positioned so as to facilitate translation. Generally, “operably linked” means that the DNA sequences being linked are contiguous, and, in the case of a secretory leader, contiguous and in reading phase. However, enhancers do not have to be contiguous. Linking is accomplished by ligation at convenient restriction sites. If such sites do not exist, synthetic oligonucleotide adaptors or linkers are used in accordance with conventional practice. The transcriptional and translational regulatory nucleic acid will generally be appropriate to the host cell used to express the CA protein; for example, transcriptional and translational regulatory nucleic acid sequences from Bacillus are preferably used to express the CA protein in Bacillus. Numerous types of appropriate expression vectors, and suitable regulatory sequences are known in the art for a variety of host cells.

[0072] In general, the transcriptional and translational regulatory sequences may include, but are not limited to, promoter sequences, ribosomal binding sites, transcriptional start and stop sequences, translational start and stop sequences, and enhancer or activator sequences. In a preferred embodiment, the regulatory sequences include a promoter and transcriptional start and stop sequences.

[0073] Promoter sequences encode either constitutive or inducible promoters. The promoters may be either naturally occurring promoters or hybrid promoters. Hybrid promoters, which combine elements of more than one promoter, are also known in the art, and are useful in the present invention.

[0074] In addition, the expression vector may comprise additional elements. For example, the expression vector may have two replication systems, thus allowing it to be maintained in two organisms, for example in mammalian or insect cells for expression and in a procaryotic host for cloning and amplification. Furthermore, for integrating expression vectors, the expression vector contains at least one sequence homologous to the host cell genome, and preferably two homologous sequences which flank the expression construct. The integrating vector may be directed to a specific locus in the host cell by selecting the appropriate homologous sequence for inclusion in the vector. Constructs for integrating vectors are well known in the art.

[0075] In addition, in a preferred embodiment, the expression vector contains a selectable marker gene to allow the selection of transformed host cells. Selection genes are well known in the art and will vary with the host cell used.

[0076] The CA proteins of the present invention are produced by culturing a host cell transformed with an expression vector containing nucleic acid encoding an CA protein, under the appropriate conditions to induce or cause expression of the CA protein. The conditions appropriate for CA protein expression will vary with the choice of the expression vector and the host cell, and will be easily ascertained by one skilled in the art through routine experimentation. For example, the use of constitutive promoters in the expression vector will require optimizing the growth and proliferation of the host cell, while the use of an inducible promoter requires the appropriate growth conditions for induction. In addition, in some embodiments, the timing of the harvest is important. For example, the baculoviral systems used in insect cell expression are lytic viruses, and thus harvest time selection can be crucial for product yield.

[0077] Appropriate host cells include yeast, bacteria, archaebacteria, fungi, and insect, plant and animal cells, including mammalian cells. Of particular interest are Drosophila melanogaster cells, Saccharomyces cerevisiae and other yeasts, E. coli, Bacillus subtilis, Sf9 cells, C129 cells, 293 cells, Neurospora, BHK, CHO, COS, HeLa cells, THP1 cell line (a macrophage cell line) and human cells and cell lines.

[0078] In a preferred embodiment, the CA proteins are expressed in mammalian cells. Mammalian expression systems are also known in the art, and include retroviral systems. A preferred expression vector system is a retroviral vector system such as is generally described in PCT/US97/01019 and PCT/US97/01048, both of which are hereby expressly incorporated by reference. Of particular use as mammalian promoters are the promoters from mammalian viral genes, since the viral genes are often highly expressed and have a broad host range. Examples include the SV40 early promoter, mouse mammary tumor virus LTR promoter, adenovirus major late promoter, herpes simplex virus promoter, and the CMV promoter. Typically, transcription termination and polyadenylation sequences recognized by mammalian cells are regulatory regions located 3′ to the translation stop codon and thus, together with the promoter elements, flank the coding sequence. Examples of transcription terminator and polyadenlytion signals include those derived form SV40.

[0079] The methods of introducing exogenous nucleic acid into mammalian hosts, as well as other hosts, is well known in the art, and will vary with the host cell used. Techniques include dextran-mediated transfection, calcium phosphate precipitation, polybrene mediated transfection, protoplast fusion, electroporation, viral infection, encapsulation of the polynucleotide(s) in liposomes, and direct microinjection of the DNA into nuclei.

[0080] In a preferred embodiment, CA proteins are expressed in bacterial systems. Bacterial expression systems are well known in the art. Promoters from bacteriophage may also be used and are known in the art. In addition, synthetic promoters and hybrid promoters are also useful; for example, the tac promoter is a hybrid of the trp and lac promoter sequences. Furthermore, a bacterial promoter can include naturally occurring promoters of non-bacterial origin that have the ability to bind bacterial RNA polymerase and initiate transcription. In addition to a functioning promoter sequence, an efficient ribosome binding site is desirable. The expression vector may also include a signal peptide sequence that provides for secretion of the CA protein in bacteria. The protein is either secreted into the growth media (gram-positive bacteria) or into the periplasmic space, located between the inner and outer membrane of the cell (gram-negative bacteria). The bacterial expression vector may also include a selectable marker gene to allow for the selection of bacterial strains that have been transformed. Suitable selection genes include genes which render the bacteria resistant to drugs such as ampicillin, chloramphenicol, erythromycin, kanamycin, neomycin and tetracycline. Selectable markers also include biosynthetic genes, such as those in the histidine, tryptophan and leucine biosynthetic pathways. These components are assembled into expression vectors. Expression vectors for bacteria are well known in the art, and include vectors for Bacillus subtilis, E. coli, Streptococcus cremoris, and Streptococcus lividans, among others. The bacterial expression vectors are transformed into bacterial host cells using techniques well known in the art, such as calcium chloride treatment, electroporation, and others.

[0081] In one embodiment, CA proteins are produced in insect cells. Expression vectors for the transformation of insect cells, and in particular, baculovirus-based expression vectors, are well known in the art.

[0082] In a preferred embodiment, CA protein is produced in yeast cells. Yeast expression systems are well known in the art, and include expression vectors for Saccharomyces cerevisiae, Candida albicans and C. maltosa, Hansenula polymorpha, Kluyveromyces fragilis and K. lactis, Pichia guilledimondii and P. pastoris, Schizosaccharomyces pombe, and Yarrowia lipolytica.

[0083] The CA protein may also be made as a fusion protein, using techniques well known in the art. Thus, for example, for the creation of monoclonal antibodies. If the desired epitope is small, the CA protein may be fused to a carrier protein to form an immunogen. Alternatively, the CA protein may be made as a fusion protein to increase expression, or for other reasons. For example, when the CA protein is an CA peptide, the nucleic acid encoding the peptide may be linked to other nucleic acid for expression purposes.

[0084] In one embodiment, the CA nucleic acids, proteins and antibodies of the invention are labeled. By “labeled” herein is meant that a compound has at least one element, isotope or chemical compound attached to enable the detection of the compound. In general, labels fall into three classes: a) isotopic labels, which may be radioactive or heavy isotopes; b) immune labels, which may be antibodies or X antigens; and c) colored or fluorescent dyes. The labels may be incorporated into the CA nucleic acids, proteins and antibodies at any position. For example, the label should be capable of producing, either directly or indirectly, a detectable signal. The detectable moiety may be a radioisotope, such as ³H, ¹⁴C, ³²P, ³⁵S, or ¹²⁵I, a fluorescent or chemiluminescent compound, such as fluorescein isothiocyanate, rhodamine, or luciferin, or an enzyme, such as alkaline phosphatase, beta-galactosidase or horseradish peroxidase. Any method known in the art for conjugating the antibody to the label may be employed, including those methods described by Hunter et al., Nature, 144:945 (1962); David et al., Biochemistry, 13:1014 (1974); Pain et al., J. Immunol. Meth., 40:219 (1981); and Nygren, J. Histochem. and Cytochem., 30:407 (1982).

[0085] Accordingly, the present invention also provides CA protein sequences. An CA protein of the present invention may be identified in several ways. “Protein” in this sense includes proteins, polypeptides, and peptides. As will be appreciated by those in the art, the nucleic acid sequences of the invention can be used to generate protein sequences. There are a variety of ways to do this, including cloning the entire gene and verifying its frame and amino acid sequence, or by comparing it to known sequences to search for homology to provide a frame, assuming the CA protein has homology to some protein in the database being used. Generally, the nucleic acid sequences are input into a program that will search all three frames for homology. This is done in a preferred embodiment using the following NCBI Advanced BLAST parameters. The program is blastx or blastn. The database is nr. The input data is as “Sequence in FASTA format”. The organism list is “none”. The “expect” is 10; the filter is default. The “descriptions” is 500, the “alignments” is 500, and the “alignment view” is pairwise. The “query Genetic Codes” is standard (1). The matrix is BLOSUM62; gap existence cost is 11, per residue gap cost is 1; and the lambda ratio is 0.85 default. This results in the generation of a putative protein sequence.

[0086] Also included within one embodiment of CA proteins are amino acid variants of the naturally occurring sequences, as determined herein. Preferably, the variants are preferably greater than about 75% homologous to the wild-type sequence, more preferably greater than about 80%, even more preferably greater than about 85% and most preferably greater than 90%. In some embodiments the homology will be as high as about 93 to 95 or 98%. As for nucleic acids, homology in this context means sequence similarity or identity, with identity being preferred. This homology will be determined using standard techniques known in the art as are outlined above for the nucleic acid homologies.

[0087] CA proteins of the present invention may be shorter or longer than the wild type amino acid sequences. Thus, in a preferred embodiment, included within the definition of CA proteins are portions or fragments of the wild type sequences herein. In addition, as outlined above, the CA nucleic acids of the invention may be used to obtain additional coding regions, and thus additional protein sequence, using techniques known in the art.

[0088] In a preferred embodiment, the CA proteins are derivative or variant CA proteins as compared to the wild-type sequence. That is, as outlined more fully below, the derivative CA peptide will contain at least one amino acid substitution, deletion or insertion, with amino acid substitutions being particularly preferred. The amino acid substitution, insertion or deletion may occur at any residue within the CA peptide.

[0089] Also included in an embodiment of CA proteins of the present invention are amino acid sequence variants. These variants fall into one or more of three classes: substitutional, insertional or deletional JEW variants. These variants ordinarily are prepared by site specific mutagenesis of nucleotides in the DNA encoding the CA protein, using cassette or PCR mutagenesis or other techniques well known in the art, to produce DNA encoding the variant, and thereafter expressing the DNA in recombinant cell culture as outlined above. However, variant CA protein fragments having up to about 100-150 residues may be prepared by in vitro synthesis using established techniques. Amino acid sequence variants are characterized by the predetermined nature of the variation, a feature that sets them apart from naturally occurring allelic or interspecies variation of the CA protein amino acid sequence. The variants typically exhibit the same qualitative biological activity as the naturally occurring analogue, although variants can also be selected which have modified characteristics as will be more fully outlined below.

[0090] While the site or region for introducing an amino acid sequence variation is predetermined, the mutation per se need not be predetermined. For example, in order to optimize the performance of a mutation at a given site, random mutagenesis may be conducted at the target codon or region and the expressed CA variants screened for the optimal combination of desired activity. Techniques for making substitution mutations at predetermined sites in DNA having a known sequence are well known, for example, M13 primer mutagenesis and LAR mutagenesis. Screening of the mutants is done using assays of CA protein activities.

[0091] Amino acid substitutions are typically of single residues; insertions usually will be on the order of from about 1 to 20 amino acids, although considerably larger insertions may be tolerated. Deletions range from about 1 to about 20 residues, although in some cases deletions may be much larger.

[0092] Substitutions, deletions, insertions or any combination thereof may be used to arrive at a final derivative. Generally these changes are done on a few amino acids to minimize the alteration of the molecule. However, larger changes may be tolerated in certain circumstances. When small alterations in the characteristics of the CA protein are desired, substitutions are generally made in accordance with the following chart:

CHART I

| Original Residue | Exemplary Substitutions |
|---|---|
| Ala | Ser |
| Arg | Lys |
| Asn | Gln, His |
| Asp | Glu |
| Cys | Ser |
| Gln | Asn |
| Glu | Asp |
| Gly | Pro |
| His | Asn, Gln |
| Ile | Leu, Val |
| Leu | Ile, Val |
| Lys | Arg, Gln, Glu |
| Met | Leu, Ile |
| Phe | Met, Leu, Tyr |
| Ser | Thr |
| Thr | Ser |
| Trp | Tyr |
| Tyr | Trp, Phe |
| Val | Ile, Leu |

[0093] Substantial changes in function or immunological identity are made by selecting substitutions that are less conservative than those shown in Chart 1. For example, substitutions may be made which more significantly affect: the structure of the polypeptide backbone in the area of the alteration, for example the alpha-helical or beta-sheet structure; the charge or hydrophobicity of the molecule at the target site; or the bulk of the side chain. The substitutions which in general are expected to produce the greatest changes in the polypeptide's properties are those in which (a) a hydrophilic residue, e.g. seryl or threonyl is substituted for (or by) a hydrophobic residue, e.g. leucyl, isoleucyl, phenylalanyl, valyl or alanyl; (b) a cysteine or proline is substituted for (or by) any other residue; (c) a residue having an electropositive side chain, e.g. lysyl, arginyl, or histidyl, is substituted for (or by) an electronegative residue, e.g. glutamyl or aspartyl; or (d) a residue having a bulky side chain, e.g. phenylalanine, is substituted for (or by) one not having a side chain, e.g. glycine.

[0094] The variants typically exhibit the same qualitative biological activity and will elicit the same immune response as the naturally-occurring analogue, although variants also are selected to modify the characteristics of the CA proteins as needed. Alternatively, the variant may be designed such that the biological activity of the CA protein is altered. For example, glycosylation sites may be altered or removed, dominant negative mutations created, etc.

[0095] Covalent modifications of CA polypeptides are included within the scope of this invention, for example for use in screening. One type of covalent modification includes reacting targeted amino acid residues of an CA polypeptide with an organic derivatizing agent that is capable of reacting with selected side chains or the N-or C-terminal residues of an CA polypeptide. Derivatization with bifunctional agents is useful, for instance, for crosslinking CA polypeptides to a water-insoluble support matrix or surface for use in the method for purifying anti-CA antibodies or screening assays, as is more fully described below. Commonly used crosslinking agents include, e.g., 1 ,1-bis(diazoacetyl)-2-phenylethane, glutaraldehyde, N-hydroxysuccinimide esters, for example, esters with 4-azidosalicylic acid, homobifunctional imidoesters, including disuccinimidyl esters such as 3,3′-dithiobis(succinimidylpropionate), bifunctional maleimides such as bis-N-maleimido-1,8-octane and agents such as methyl-3-[(p-azidophenyl)dithio]propioimidate.

[0096] Other modifications include deamidation of glutaminyl and asparaginyl residues to the corresponding glutamyl and aspartyl residues, respectively, hydroxylation of proline and lysine, phosphorylation of hydroxyl groups of seryl, threonyl or tyrosyl residues, methylation of the a-amino groups of lysine, arginine, and histidine side chains [T. E. Creighton, Proteins: Structure and Molecular Properties, W. H. Freeman & Co., San Francisco, pp. 79-86 (1983)], acetylation of the N-terminal amine, and amidation of any C-terminal carboxyl group.

[0097] Another type of covalent modification of the CA polypeptide included within the scope of this invention comprises altering the native glycosylation pattern of the polypeptide. “Altering the native glycosylation pattern” is intended for purposes herein to mean deleting one or more carbohydrate moieties found in native sequence CA polypeptide, and/or adding one or more glycosylation sites that are not present in the native sequence CA polypeptide.

[0098] Addition of glycosylation sites to CA polypeptides may be accomplished by altering the amino acid sequence thereof. The alteration may be made, for example, by the addition of, or substitution by, one or more serine or threonine residues to the native sequence CA polypeptide (for O-linked glycosylation sites). The CA amino acid sequence may optionally be altered through changes at the DNA level, particularly by mutating the DNA encoding the CA polypeptide at preselected bases such that codons are generated that will translate into the desired amino acids.

[0099] Another means of increasing the number of carbohydrate moieties on the CA polypeptide is by chemical or enzymatic coupling of glycosides to the polypeptide. Such methods are described in the art, e.g., in WO 87/05330 published Sep. 11, 1987, and in Aplin and Wriston, LA Crit. Rev. Biochem., pp. 259-306 (1981).

[0100] Removal of carbohydrate moieties present on the CA polypeptide may be accomplished chemically or enzymatically or by mutational substitution of codons encoding for amino acid residues that serve as targets for glycosylation. Chemical deglycosylation techniques are known in the art and described, for instance, by Hakimuddin, et al., Arch. Biochem. Biophys., 259:52 (1987) and by Edge et al., Anal. Biochem., 118:131 (1981). Enzymatic cleavage of carbohydrate moieties on polypeptides can be achieved by the use of a variety of endo-and exo-glycosidases as described by Thotakura et al., Meth. Enzymol., 138:350 (1987).

[0101] Another type of covalent modification of CA comprises linking the CA polypeptide to one of a variety of nonproteinaceous polymers, e.g., polyethylene glycol, polypropylene glycol, or polyoxyalkylenes, in the manner set forth in U.S. Pat. Nos. 4,640,835; 4,496,689; 4,301,144; 4,670,417; 4,791,192 or 4,179,337.

[0102] CA polypeptides of the present invention may also be modified in a way to form chimeric molecules comprising an CA polypeptide fused to another, heterologous polypeptide or amino acid sequence. In one embodiment, such a chimeric molecule comprises a fusion of an CA polypeptide with a tag polypeptide which provides an epitope to which an anti-tag antibody can selectively bind. The epitope tag is generally placed at the amino-or carboxyl-terminus of the CA polypeptide, although internal fusions may also be tolerated in some instances. The presence of such epitope-tagged forms of an CA polypeptide can be detected using an antibody against the tag polypeptide. Also, provision of the epitope tag enables the CA polypeptide to be readily purified by affinity purification using an anti-tag antibody or another type of affinity matrix that binds to the epitope tag. In an alternative embodiment, the chimeric molecule may comprise a fusion of an CA polypeptide with an immunoglobulin or a particular region of an immunoglobulin. For a bivalent form of the chimeric molecule, such a fusion could be to the Fc region of an IgG molecule.

[0103] Various tag polypeptides and their respective antibodies are well known in the art. Examples include poly-histidine (poly-his) or poly-histidine-glycine (poly-his-gly) tags; the flu HA tag polypeptide and its antibody 12CA5 [Field et al., Mol. Cell. Biol., 8:2159-2165 (1988)]; the c-myc tag and the 8F9, 3C7, 6E10, G4, B7 and 9E10 antibodies thereto [Evan et al., Molecular and Cellular Biology, 5:3610-3616 (1985)]; and the Herpes Simplex virus glycoprotein D (gD) tag and its antibody [Paborsky et al., Protein Engineering, 3(6):547-553 (1990)]. Other tag polypeptides include the Flag-peptide [Hopp et al., BioTechnology, 6:1204-1210 (1988)]; the KT3 epitope peptide [Martin et al., Science, 255:192-194 (1992)]; tubulin epitope peptide [Skinner et al., J. Biol. Chem., 266:15163-15166 (1991)]; and the T7 gene 10 protein peptide tag [Lutz-Freyermuth et al., Proc. Natl. Acad. Sci. USA, 87:6393-6397 (1990)].

[0104] Also included with the definition of CA protein in one embodiment are other CA proteins of the CA family, and CA proteins from other organisms, which are cloned and expressed as outlined below. Thus, probe or degenerate polymerase chain reaction (PCR) primer sequences may be used to find other related CA proteins from humans or other organisms. As will be appreciated by those in the art, particularly useful probe and/or PCR primer sequences include the unique areas of the CA nucleic acid sequence. As is generally known in the art, preferred PCR primers are from about 15 to about 35 nucleotides in length, with from about 20 to about 30 being preferred, and may contain inosine as needed. The conditions for the PCR reaction are well known in the art.

[0105] In addition, as is outlined herein, CA proteins can be made that are longer than those encoded by the nucleic acids of the figures, for example, by the elucidation of additional sequences, the addition of epitope or purification tags, the addition of other fusion sequences, etc.

[0106] CA proteins may also be identified as being encoded by CA nucleic acids. Thus, CA proteins are encoded by nucleic acids that will hybridize to the sequences of the sequence listings, or their complements, as outlined herein.

[0107] In a preferred embodiment, the invention provides CA antibodies. In a preferred embodiment, when the CA protein is to be used to generate antibodies, for example for immunotherapy, the CA protein should share at least one epitope or determinant with the full length protein. By “epitope” or “determinant” herein is meant a portion of a protein which will generate and/or bind an antibody or T-cell receptor in the context of MHC. Thus, in most instances, antibodies made to a smaller CA protein will be able to bind to the full length protein. In a preferred embodiment, the epitope is unique; that is, antibodies generated to a unique epitope show little or no cross-reactivity.

[0108] In one embodiment, the term “antibody” includes antibody fragments, as are known in the art, including Fab, Fab₂, single chain antibodies (Fv for example), chimeric antibodies, etc., either produced by the modification of whole antibodies or those synthesized de novo using recombinant DNA technologies.

[0109] Methods of preparing polyclonal antibodies are known to the skilled artisan. Polyclonal antibodies can be raised in a mammal, for example, by one or more injections of an immunizing agent and, if desired, an adjuvant. Typically, the immunizing agent and/or adjuvant will be injected in the mammal by multiple subcutaneous or intraperitoneal injections. The immunizing agent may include a protein encoded by a nucleic acid of the figures or fragment thereof or a fusion protein thereof. It may be useful to conjugate the immunizing agent to a protein known to be immunogenic in the mammal being immunized. Examples of such immunogenic proteins include but are not limited to keyhole limpet hemocyanin, serum albumin, bovine thyroglobulin, and soybean trypsin inhibitor. Examples of adjuvants which may be employed include Freund's complete adjuvant and MPL-TDM adjuvant (monophosphoryl Lipid A, synthetic trehalose dicorynomycolate). The immunization protocol may be selected by one skilled in the art without undue experimentation.

[0110] The antibodies may, alternatively, be monoclonal antibodies. Monoclonal antibodies may be prepared using hybridoma methods, such as those described by Kohler and Milstein, Nature, 256:495 (1975). In a hybridoma method, a mouse, hamster, or other appropriate host animal, is typically immunized with an immunizing agent to elicit lymphocytes that produce or are capable of producing antibodies that will specifically bind to the immunizing agent. Alternatively, the lymphocytes may be immunized in vitro. The immunizing agent will typically include a polypeptide encoded by a nucleic acid of Tables 1-40, or fragment thereof or a fusion protein thereof. Generally, either peripheral blood lymphocytes (“PBLs”) are used if cells of human origin are desired, or spleen cells or lymph node cells are used if non-human mammalian sources are desired. The lymphocytes are then fused with an immortalized cell line using a suitable fusing agent, such as polyethylene glycol, to form a hybridoma cell [Goding, Monoclonal Antibodies: Principles and Practice, Academic Press, (1986) pp. 59-103]. Immortalized cell lines are usually transformed mammalian cells, particularly myeloma cells of rodent, bovine and human origin. Usually, rat or mouse myeloma cell lines are employed. The hybridoma cells may be cultured in a suitable culture medium that preferably contains one or more substances that inhibit the growth or survival of the unfused, immortalized cells. For example, if the parental cells lack the enzyme hypoxanthine guanine phosphoribosyl transferase (HGPRT or HPRT), the culture medium for the hybridomas typically will include hypoxanthine, aminopterin, and thymidine (“HAT medium”), which substances prevent the growth of HGPRT-deficient cells.

[0111] In one embodiment, the antibodies are bispecific antibodies. Bispecific antibodies are monoclonal, preferably human or humanized, antibodies that have binding specificities for at least two different antigens. In the present case, one of the binding specificities is for a protein encoded by a nucleic acid of Tables 1-40, or a fragment thereof, the other one is for any other antigen, and preferably for a cell-surface protein or receptor or receptor subunit, preferably one that is tumor specific.

[0112] In a preferred embodiment, the antibodies to CA are capable of reducing or eliminating the biological function of CA, as is described below. That is, the addition of anti-CA antibodies (either polyclonal or preferably monoclonal) to CA (or cells containing CA) may reduce or eliminate the CA activity. Generally, at least a 25% decrease in activity is preferred, with at least about 50% being particularly preferred and about a 95-100% decrease being especially preferred.

[0113] In a preferred embodiment the antibodies to the CA proteins are humanized antibodies. Humanized forms of non-human (e.g., murine) antibodies are chimeric molecules of immunoglobulins, immunoglobulin chains or fragments thereof (such as Fv, Fab, Fab′, F(ab′)₂ or other antigen binding subsequences of antibodies) which contain minimal sequence derived from non-human immunoglobulin. Humanized antibodies include human immunoglobulins (recipient antibody) in which residues form a complementary determining region (CDR) of the recipient are replaced by residues from a CDR of a non-human species (donor antibody) such as mouse, rat or rabbit having the desired specificity, affinity and capacity. In some instances, Fv framework residues of the human immunoglobulin are replaced by corresponding non-human residues. Humanized antibodies may also comprise residues which are found neither in the recipient antibody nor in the imported CDR or framework sequences. In general, the humanized antibody will comprise substantially all of at least one, and typically two, variable domains, in which all or substantially all of the CDR regions correspond to those of a non-human immunoglobulin and all or substantially all of the framework residues (FR) regions are those of a human immunoglobulin consensus sequence. The humanized antibody optimally also will comprise at least a portion of an immunoglobulin constant region (Fc), typically that of a human immunoglobulin [Jones et al., Nature, 321:522-525 (1986); Riechmann et al., Nature, 332:323-329 (1988); and Presta, Curr. Op. Struct. Biol., 2:593-596 (1992)].

[0114] Methods for humanizing non-human antibodies are well known in the art. Generally, a humanized antibody has one or more amino acid residues introduced into it from a source which is non-human.

[0115] These non-human amino acid residues are often referred to as import residues, which are typically taken from an import variable domain. Humanization can be essentially performed following the method of Winter and co-workers [Jones et al., Nature, 321:522-525 (1986); Riechmann et al., Nature, 332:323-327 (1988); Verhoeyen et al., Science, 239:1534-1536 (1988)], by substituting rodent CDRs or CDR sequences for the corresponding sequences of a human antibody. Accordingly, such humanized antibodies are chimeric antibodies (U.S. Pat. No. 4,816,567), wherein substantially less than an intact human variable domain has been substituted by the corresponding sequence from a non-human species. In practice, humanized antibodies are typically human antibodies in which some CDR residues and possibly some FR residues are substituted by residues from analogous sites in rodent antibodies.

[0116] Human antibodies can also be produced using various techniques known in the art, including phage display libraries [Hoogenboom and Winter, J. Mol. Biol., 227:381 (1991); Marks et al., J. Mol. Biol., 222:581 (1991)]. The techniques of Cole et al. and Boerner et al. are also available for the preparation of human monoclonal antibodies [Cole et al., Monoclonal Antibodies and Cancer Therapy, Alan R. Liss, p. 77 (1985) and Boerner et al., J. Immunol., 147(1):86-95 (1991)]. Similarly, human antibodies can be made by introducing human immunoglobulin loci into transgenic animals, e.g., mice in which the endogenous immunoglobulin genes have been partially or completely inactivated. Upon challenge, human antibody production is observed, which closely resembles that seen in humans in all respects, including gene rearrangement, assembly, and antibody repertoire. This approach is described, for example, in U.S. Pat. Nos. 5,545,807; 5,545,806; 5,569,825; 5,625,126; 5,633,425; 5,661,016, and in the following scientific publications: Marks et al., Bio/Technology 10, 779-783 (1992); Lonberg et al., Nature 368 856-859 (1994); Morrison, Nature 368, 812-13 (1994); Fishwild et al., Nature Biotechnology 14, 845-51 (1996); Neuberger, Nature Biotechnology 14, 826 (1996); Lonberg and Huszar, Intern. Rev. Immunol. 13 65-93 (1995).

[0117] By immunotherapy is meant treatment of a carcinoma with an antibody raised against an CA protein. As used herein, immunotherapy can be passive or active. Passive immunotherapy as defined herein is the passive transfer of antibody to a recipient (patient). Active immunization is the induction of antibody and/or T-cell responses in a recipient (patient). Induction of an immune response is the result of providing the recipient with an antigen to which antibodies are raised. As appreciated by one of ordinary skill in the art, the antigen may be provided by injecting a polypeptide against which antibodies are desired to be raised into a recipient, or contacting the recipient with a nucleic acid capable of expressing the antigen and under conditions for expression of the antigen.

[0118] In a preferred embodiment, oncogenes which encode secreted growth factors may be inhibited by raising antibodies against CA proteins that are secreted proteins as described above. Without being bound by theory, antibodies used for treatment, bind and prevent the secreted protein from binding to its receptor, thereby inactivating the secreted CA protein.

[0119] In another preferred embodiment, the CA protein to which antibodies are raised is a transmembrane protein. Without being bound by theory, antibodies used for treatment, bind the extracellular domain of the CA protein and prevent it from binding to other proteins, such as circulating ligands or cell-associated molecules. The antibody may cause down-regulation of the transmembrane CA protein. As will be appreciated by one of ordinary skill in the art, the antibody may be a competitive, non-competitive or uncompetitive inhibitor of protein binding to the extracellular domain of the CA protein. The antibody is also an antagonist of the CA protein. Further, the antibody prevents activation of the transmembrane CA protein. In one aspect, when the antibody prevents the binding of other molecules to the CA protein, the antibody prevents growth of the cell. The antibody may also sensitize the cell to cytotoxic agents, including, but not limited to TNF-α, TNF-β, IL-1, INF-γ and IL-2, or chemotherapeutic agents including 5FU, vinblastine, actinomycin D, cisplatin, methotrexate, and the like. In some instances the antibody belongs to a sub-type that activates serum complement when complexed with the transmembrane protein thereby mediating cytotoxicity. Thus, carcinomas may be treated by administering to a patient antibodies directed against the transmembrane CA protein.

[0120] In another preferred embodiment, the antibody is conjugated to a therapeutic moiety. In one aspect the therapeutic moiety is a small molecule that modulates the activity of the CA protein. In another aspect the therapeutic moiety modulates the activity of molecules associated with or in close proximity to the CA protein. The therapeutic moiety may inhibit enzymatic activity such as protease or protein kinase activity associated with carcinoma.

[0121] In a preferred embodiment, the therapeutic moiety may also be a cytotoxic agent. In this method, targeting the cytotoxic agent to tumor tissue or cells, results in a reduction in the number of afflicted cells, thereby reducing symptoms associated with carcinomas, including lymphoma. Cytotoxic agents are numerous and varied and include, but are not limited to, cytotoxic drugs or toxins or active fragments of such toxins. Suitable toxins and their corresponding fragments include diphtheria A chain, exotoxin A chain, ricin A chain, abrin A chain, curcin, crotin, phenomycin, enomycin and the like. Cytotoxic agents also include radiochemicals made by conjugating radioisotopes to antibodies raised against CA proteins, or binding of a radionuclide to a chelating agent that has been covalently attached to the antibody. Targeting the therapeutic moiety to transmembrane CA proteins not only serves to increase the local concentration of therapeutic moiety in the carcinoma of interest, i.e., lymphoma, but also serves to reduce deleterious side effects that may be associated with the therapeutic moiety.

[0122] In another preferred embodiment, the CA protein against which the antibodies are raised is an intracellular protein. In this case, the antibody may be conjugated to a protein which facilitates entry into the cell. In one case, the antibody enters the cell by endocytosis. In another embodiment, a nucleic acid encoding the antibody is administered to the individual or cell. Moreover, wherein the CA protein can be targeted within a cell, i.e., the nucleus, an antibody thereto contains a signal for that target localization, i.e., a nuclear localization signal.

[0123] The CA antibodies of the invention specifically bind to CA proteins. By “specifically bind” herein is meant that the antibodies bind to the protein with a binding constant in the range of at least 10⁻⁴-10⁻⁶ M⁻¹, with a preferred range being 10⁻⁷-10⁻⁹ M⁻¹.

[0124] In a preferred embodiment, the CA protein is purified or isolated after expression. CA proteins may be isolated or purified in a variety of ways known to those skilled in the art depending on what other components are present in the sample. Standard purification methods include electrophoretic, molecular, immunological and chromatographic techniques, including ion exchange, hydrophobic, affinity, and reverse-phase HPLC chromatography, and chromatofocusing. For example, the CA protein may be purified using a standard anti-CA antibody column. Ultrafiltration and diafiltration techniques, in conjunction with protein concentration, are also useful. For general guidance in suitable purification techniques, see Scopes, R., Protein Purification, Springer-Verlag, NY (1982). The degree of purification necessary will vary depending on the use of the CA protein. In some instances no purification will be necessary.

[0125] Once expressed and purified if necessary, the CA proteins and nucleic acids are useful in a number of applications.

[0126] In one aspect, the expression levels of genes are determined for different cellular states in the carcinoma phenotype; that is, the expression levels of genes in normal tissue and in carcinoma tissue (and in some cases, for varying severities of lymphoma that relate to prognosis, as outlined below) are evaluated to provide expression profiles. An expression profile of a particular cell state or point of development is essentially a “fingerprint” of the state; while two states may have any particular gene similarly expressed, the evaluation of a number of genes simultaneously allows the generation of a gene expression profile that is unique to the state of the cell. By comparing expression profiles of cells in different states, information regarding which genes are important (including both up- and down-regulation of genes) in each of these states is obtained. Then, diagnosis may be done or confirmed: does tissue from a particular patient have the gene expression profile of normal or carcinoma tissue.

[0127] “Differential expression,” or grammatical equivalents as used herein, refers to both qualitative as well as quantitative differences in the genes temporal and/or cellular expression patterns within and among the cells. Thus, a differentially expressed gene can qualitatively have its expression altered, including an activation or inactivation, in, for example, normal versus carcinoma tissue. That is, genes may be turned on or turned off in a particular state, relative to another state. As is apparent to the skilled hi artisan, any comparison of two or more states can be made. Such a qualitatively regulated gene will exhibit an expression pattern within a state or cell type which is detectable by standard techniques in one such state or cell type, but is not detectable in both. Alternatively, the determination is quantitative in that expression is increased or decreased; that is, the expression of the gene is either upregulated, resulting in an increased amount of transcript, or downregulated, resulting in a decreased amount of transcript. The degree to which expression differs need only be large enough to quantify via standard characterization techniques as outlined below, such as by use of Affymetrix GeneChip® expression arrays, Lockhart, Nature Biotechnology, 14:1675-1680 (1996), hereby expressly incorporated by reference. Other techniques include, but are not limited to, quantitative reverse transcriptase PCR, Northern analysis and RNase protection. As outlined above, preferably the change in expression (i.e. upregulation or downregulation) is at least about 50%, more preferably at least about 100%, more preferably at least about 150%, more preferably, at least about 200%, with from 300 to at least 1000% being especially preferred.

[0128] As will be appreciated by those in the art, this may be done by evaluation at either the gene transcript, or the protein level; that is, the amount of gene expression may be monitored using nucleic acid probes to the DNA or RNA equivalent of the gene transcript, and the quantification of gene expression levels, or, alternatively, the final gene product itself (protein) can be monitored, for example through the use of antibodies to the CA protein and standard immunoassays (ELISAs, etc.) or other techniques, including mass spectroscopy assays, 2D gel electrophoresis assays, etc. Thus, the proteins corresponding to CA genes, i.e. those identified as being important in a particular carcinoma phenotype, i.e., lymphoma, can be evaluated in a diagnostic test specific for that carcinoma.

[0129] In a preferred embodiment, gene expression monitoring is done and a number of genes, i.e. an expression profile, is monitored simultaneously, although multiple protein expression monitoring can be done as well. Similarly, these assays may be done on an individual basis as well.

[0130] In this embodiment, the CA nucleic acid probes may be attached to biochips as outlined herein for the detection and quantification of CA sequences in a particular cell. The assays are done as is known in the art. As will be appreciated by those in the art, any number of different CA sequences may be used as probes, with single sequence assays being used in some cases, and a plurality of the sequences described herein being used in other embodiments. In addition, while solid-phase assays are described, any number of solution based assays may be done as well.

[0131] In a preferred embodiment, both solid and solution based assays may be used to detect CA sequences that are up-regulated or down-regulated in carcinomas as compared to normal tissue. In instances where the CA sequence has been altered but shows the same expression profile or an altered expression profile, the protein will be detected as outlined herein.

[0132] In a preferred embodiment nucleic acids encoding the CA protein are detected. Although DNA or RNA encoding the CA protein may be detected, of particular interest are methods wherein the mRNA encoding a CA protein is detected. The presence of mRNA in a sample is an indication that the CA gene has been transcribed to form the mRNA, and suggests that the protein is expressed. Probes to detect the mRNA can be any nucleotide/deoxynucleotide probe that is complementary to and base pairs with the mRNA and includes but is not limited to oligonucleotides, cDNA or RNA. Probes also should contain a detectable label, as defined herein. In one method the mRNA is detected after immobilizing the nucleic acid to be examined on a solid support such as nylon membranes and hybridizing the probe with the sample. Following washing to remove the non-specifically bound probe, the label is detected. In another method detection of the mRNA is performed in situ. In this method permeabilized cells or tissue samples are contacted with a detectably labeled nucleic acid probe for sufficient time to allow the probe to hybridize with the target mRNA. Following washing to remove the non-specifically bound probe, the label is detected. For example a digoxygenin labeled riboprobe (RNA probe) that is complementary to the mRNA encoding a CA protein is detected by binding the digoxygenin with an anti-digoxygenin secondary antibody and developed with nitro blue tetrazolium and 5-bromo-4-chloro-3-indoyl phosphate.

[0133] In a preferred embodiment, any of the three classes of proteins as described herein (secreted, transmembrane or intracellular proteins) are used in diagnostic assays. The CA proteins, antibodies, nucleic acids, modified proteins and cells containing CA sequences are used in diagnostic assays. This can be done on an individual gene or corresponding polypeptide level, or as sets of assays.

[0134] As described and defined herein, CA proteins find use as markers of carcinomas, including lymphomas such as, but not limited to, Hodgkin's and non-Hodgkin lymphoma. Detection of these proteins in putative carcinoma tissue or patients allows for a determination or diagnosis of the type of carcinoma. Numerous methods known to those of ordinary skill in the art find use in detecting carcinomas. In one embodiment, antibodies are used to detect CA proteins. A preferred method separates proteins from a sample or patient by electrophoresis on a gel (typically a denaturing and reducing protein gel, but may be any other type of gel including isoelectric focusing gels and the like). Following separation of proteins, the CA protein is detected by immunoblotting with antibodies raised against the CA protein. Methods of immunoblotting are well known to those of ordinary skill in the art.

[0135] In another preferred method, antibodies to the CA protein find use in in situ imaging techniques. In this method cells are contacted with from one to many antibodies to the CA protein(s). Following washing to remove non-specific antibody binding, the presence of the antibody or antibodies is detected. In one embodiment the antibody is detected by incubating with a secondary antibody that contains a detectable label. In another method the primary antibody to the CA protein(s) contains a detectable label. In another preferred embodiment each one of multiple primary antibodies contains a distinct and detectable label. This method finds particular use in simultaneous screening for a plurality of CA proteins. As will be appreciated by one of ordinary skill in the art, numerous other histological imaging techniques are useful in the invention.

[0136] In a preferred embodiment the label is detected in a fluorometer which has the ability to detect and distinguish emissions of different wavelengths. In addition, a fluorescence activated cell sorter (FACS) can be used in the method.

[0137] In another preferred embodiment, antibodies find use in diagnosing carcinomas from blood samples. As previously described, certain CA proteins are secreted/circulating molecules. Blood samples, therefore, are useful as samples to be probed or tested for the presence of secreted CA proteins. Antibodies can be used to detect the CA proteins by any of the previously described immunoassay techniques including ELISA, immunoblotting (Western blotting), immunoprecipitation, BIACORE technology and the like, as will be appreciated by one of ordinary skill in the art.

[0138] In a preferred embodiment, in situ hybridization of labeled CA nucleic acid probes to tissue arrays is done. For example, arrays of tissue samples, including CA tissue and/or normal tissue, are made. In situ hybridization as is known in the art can then be done.

[0139] It is understood that when comparing the expression fingerprints between an individual and a standard, the skilled artisan can make a diagnosis as well as a prognosis. It is further understood that the genes which indicate the diagnosis may differ from those which indicate the prognosis.

[0140] In a preferred embodiment, the CA proteins, antibodies, nucleic acids, modified proteins and cells containing CA sequences are used in prognosis assays. As above, gene expression profiles can be generated that correlate to carcinoma, especially lymphoma, severity, in terms of long term prognosis. Again, this may be done on either a protein or gene level, with the use of genes being preferred. As above, the CA probes are attached to biochips for the detection and quantification of CA sequences in a tissue or patient. The assays proceed as outlined for diagnosis.

[0141] In a preferred embodiment, any of the CA sequences as described herein are used in drug screening assays. The CA proteins, antibodies, nucleic acids, modified proteins and cells containing CA sequences are used in drug screening assays or by evaluating the effect of drug candidates on a “gene expression profile” or expression profile of polypeptides. In one embodiment, the expression profiles are used, preferably in conjunction with high throughput screening techniques to allow monitoring for expression profile genes after treatment with a candidate agent, Zlokarnik, et al., Science 279, 84-8 (1998), Heid, et al., Genome Res., 6:986-994 (1996).

[0142] In a preferred embodiment, the CA proteins, antibodies, nucleic acids, modified proteins and cells containing the native or modified CA proteins are used in screening assays. That is, the present invention provides novel methods for screening for compositions which modulate the carcinoma phenotype. As above, this can be done by screening for modulators of gene expression or for modulators of protein activity. Similarly, this may be done on an individual gene or protein level or by evaluating the effect of drug candidates on a “gene expression profile”. In a preferred embodiment, the expression profiles are used, preferably in conjunction with high throughput screening techniques to allow monitoring for expression profile genes after treatment with a candidate agent, see Zlokarnik, supra.

[0143] Having identified the CA genes herein, a variety of assays to evaluate the effects of agents on gene expression may be executed. In a preferred embodiment, assays may be run on an individual gene or protein level. That is, having identified a particular gene as aberrantly regulated in carcinoma, candidate bioactive agents may be screened to modulate the genes response. “Modulation” thus includes both an increase and a decrease in gene expression or activity. The preferred amount of modulation will depend on the original change of the gene expression in normal versus tumor tissue, with changes of at least 10%, preferably 50%, more preferably 100-300%, and in some embodiments 300-1000% or greater. Thus, if a gene exhibits a 4 fold increase in tumor compared to normal tissue, a decrease of about four fold is desired; a 10 fold decrease in tumor compared to normal tissue gives a 10 fold increase in expression for a candidate agent is desired, etc. Alternatively, where the CA sequence has been altered but shows the same expression profile or an altered expression profile, the protein will be detected as outlined herein.

[0144] As will be appreciated by those in the art, this may be done by evaluation at either the gene or the protein level; that is, the amount of gene expression may be monitored using nucleic acid probes and the quantification of gene expression levels, or, alternatively, the level of the gene product itself can be monitored, for example through the use of antibodies to the CA protein and standard immunoassays. Alternatively, binding and bioactivity assays with the protein may be done as outlined below.

[0145] In a preferred embodiment, gene expression monitoring is done and a number of genes, i.e. an expression profile, is monitored simultaneously, although multiple protein expression monitoring can be done as well.

[0146] In this embodiment, the CA nucleic acid probes are attached to biochips as outlined herein for the detection and quantification of CA sequences in a particular cell. The assays are further described below.

[0147] Generally, in a preferred embodiment, a candidate bioactive agent is added to the cells prior to analysis. Moreover, screens are provided to identify a candidate bioactive agent which modulates a particular type of carcinoma, modulates CA proteins, binds to a CA protein, or interferes between the binding of a CA protein and an antibody.

[0148] The term “candidate bioactive agent” or “drug candidate” or grammatical equivalents as used herein describes any molecule, e.g., protein, oligopeptide, small organic or inorganic molecule, polysaccharide, polynucleotide, etc., to be tested for bioactive agents that are capable of directly or indirectly altering either the carcinoma phenotype, binding to and/or modulating the bioactivity of an CA protein, or the expression of a CA sequence, including both nucleic acid sequences and protein sequences. In a particularly preferred embodiment, the candidate agent suppresses a CA phenotype, for example to a normal tissue fingerprint. Similarly, the candidate agent preferably suppresses a severe CA phenotype. Generally a plurality of assay mixtures are run in parallel with different agent concentrations to obtain a differential response to the various concentrations. Typically, one of these concentrations serves as a negative control, i.e., at zero concentration or below the level of detection.

[0149] In one aspect, a candidate agent will neutralize the effect of an CA protein. By “neutralize” is meant that activity of a protein is either inhibited or counter acted against so as to have substantially no effect on a cell.

[0150] Candidate agents encompass numerous chemical classes, though typically they are organic or inorganic molecules, preferably small organic compounds having a molecular weight of more than 100 and less than about 2,500 daltons. Preferred small molecules are less than 2000, or less than 1500 or less than 1000 or less than 500 D. Candidate agents comprise functional groups necessary for structural interaction with proteins, particularly hydrogen bonding, and typically include at least an amine, carbonyl, hydroxyl or carboxyl group, preferably at least two of the functional chemical groups.

[0151] The candidate agents often comprise cyclical carbon or heterocyclic structures and/or aromatic or polyaromatic structures substituted with one or more of the above functional groups. Candidate agents are also found among biomolecules including peptides, saccharides, fatty acids, steroids, purines, pyrimidines, derivatives, structural analogs or combinations thereof. Particularly preferred are peptides.

[0152] Candidate agents are obtained from a wide variety of sources including libraries of synthetic or natural compounds. For example, numerous means are available for random and directed synthesis of a wide variety of organic compounds and biomolecules, including expression of randomized oligonucleotides. Alternatively, libraries of natural compounds in the form of bacterial, fungal, plant and animal extracts are available or readily produced. Additionally, natural or synthetically produced libraries and compounds are readily modified through conventional chemical, physical and biochemical means. Known pharmacological agents may be subjected to directed or random chemical modifications, such as acylation, alkylation, esterification, amidification to produce structural analogs.

[0153] In a preferred embodiment, the candidate bioactive agents are proteins. By “protein” herein is meant at least two covalently attached amino acids, which includes proteins, polypeptides, oligopeptides and peptides. The protein may be made up of naturally occurring amino acids and peptide bonds, or synthetic peptidomimetic structures. Thus “amino acid”, or “peptide residue”, as used herein means both naturally occurring and synthetic amino acids. For example, homo-phenylalanine, citrulline and noreleucine are considered amino acids for the purposes of the invention. “Amino acid” also includes imino acid residues such as proline and hydroxyproline. The side chains may be in either the (R) or the (S) configuration. In the preferred embodiment, the amino acids are in the (S) or L-configuration.

[0154] If non-naturally occurring side chains are used, non-amino acid substituents may be used, for example to prevent or retard in vivo degradations. In a preferred embodiment, the candidate bioactive agents are naturally occurring proteins or fragments of naturally occurring proteins. Thus, for example, cellular extracts containing proteins, or random or directed digests of proteinaceous cellular extracts, may be used. In this way libraries of procaryotic and eucaryotic proteins may be made for screening in the methods of the invention. Particularly preferred in this embodiment are libraries of bacterial, fungal, viral, and mammalian proteins, with the latter being preferred, and human proteins being especially preferred.

[0155] In a preferred embodiment, the candidate bioactive agents are peptides of from about 5 to about 30 amino acids, with from about 5 to about 20 amino acids being preferred, and from about 7 to about 15 being particularly preferred. The peptides may be digests of naturally occurring proteins as is outlined above, random peptides, or “biased” random peptides. By “randomized” or grammatical equivalents herein is meant that each nucleic acid and peptide consists of essentially random nucleotides and amino acids, respectively. Since generally these random peptides (or nucleic acids, discussed below) are chemically synthesized, they may incorporate any nucleotide or amino acid at any position. The synthetic process can be designed to generate randomized proteins or nucleic acids, to allow the formation of all or most of the possible combinations over the length of the sequence, thus forming a library of randomized candidate bioactive proteinaceous agents.

[0156] In one embodiment, the library is fully randomized, with no sequence preferences or constants at any position. In a preferred embodiment, the library is biased. That is, some positions within the sequence are either held constant, or are selected from a limited number of possibilities. For example, in a preferred embodiment, the nucleotides or amino acid residues are randomized within a defined class, for example, of hydrophobic amino acids, hydrophilic residues, sterically biased (either small or large) residues, towards the creation of nucleic acid binding domains, the creation of cysteines, for cross-linking, prolines for SH-3 domains, serines, threonines, tyrosines or histidines for phosphorylation sites, etc., or to purines, etc.

[0157] In a preferred embodiment, the candidate bioactive agents are nucleic acids, as defined above.

[0158] As described above generally for proteins, nucleic acid candidate bioactive agents may be naturally occurring nucleic acids, random nucleic acids, or “biased” random nucleic acids. For example, digests of procaryotic or eucaryotic genomes may be used as is outlined above for proteins.

[0159] In a preferred embodiment, the candidate bioactive agents are organic chemical moieties, a wide variety of which are available in the literature.

[0160] In assays for altering the expression profile of one or more CA genes, after the candidate agent has been added and the cells allowed to incubate for some period of time, the sample containing the target sequences to be analyzed is added to the biochip. If required, the target sequence is prepared using known techniques. For example, the sample may be treated to lyse the cells, using known lysis buffers, electroporation, etc., with purification and/or amplification such as PCR occurring as needed, as will be appreciated by those in the art. For example, an in vitro transcription with labels covalently attached to the nucleosides is done. Generally, the nucleic acids are labeled with a label as defined herein, with biotin-FITC or PE, cy3 and cy5 being particularly preferred.

[0161] In a preferred embodiment, the target sequence is labeled with, for example, a fluorescent, chemiluminescent, chemical, or radioactive signal, to provide a means of detecting the target sequence's specific binding to a probe. The label also can be an enzyme, such as, alkaline phosphatase or horseradish peroxidase, which when provided with an appropriate substrate produces a product that can be detected. Alternatively, the label can be a labeled compound or small molecule, such as an enzyme inhibitor, that binds but is not catalyzed or altered by the enzyme. The label also can be a moiety or compound, such as, an epitope tag or biotin which specifically binds to streptavidin.

[0162] For the example of biotin, the streptavidin is labeled as described above, thereby, providing a detectable signal for the bound target sequence. As known in the art, unbound labeled streptavidin is removed prior to analysis.

[0163] As will be appreciated by those in the art, these assays can be direct hybridization assays or can comprise “sandwich assays”, which include the use of multiple probes, as is generally outlined in U.S. Pat. Nos. 5,681,702, 5,597,909, 5,545,730, 5,594,117, 5,591,584, 5,571,670, 5,580,731, 5,571,670, 5,591,584, 5,624,802, 5,635,352, 5,594,118, 5,359,100, 5,124,246 and 5,681,697, all of which are hereby incorporated by reference. In this embodiment, in general, the target nucleic acid is prepared as outlined above, and then added to the biochip comprising a plurality of nucleic acid probes, under conditions that allow the formation of a hybridization complex.

[0164] A variety of hybridization conditions may be used in the present invention, including high, moderate and low stringency conditions as outlined above. The assays are generally run under stringency conditions which allows formation of the label probe hybridization complex only in the presence of target. Stringency can be controlled by altering a step parameter that is a thermodynamic variable, including, but not limited to, temperature, formamide concentration, salt concentration, chaotropic salt concentration pH, organic solvent concentration, etc.

[0165] These parameters may also be used to control non-specific binding, as is generally outlined in U.S. Pat. No. 5,681,697. Thus it may be desirable to perform certain steps at higher stringency conditions to reduce non-specific binding.

[0166] The reactions outlined herein may be accomplished in a variety of ways, as will be appreciated by those in the art. Components of the reaction may be added simultaneously, or sequentially, in any order, with preferred embodiments outlined below. In addition, the reaction may include a variety of other reagents may be included in the assays. These include reagents like salts, buffers, neutral proteins, e.g. albumin, detergents, etc which may be used to facilitate optimal hybridization and detection, and/or reduce non-specific or background interactions. Also reagents that otherwise improve the efficiency of the assay, such as protease inhibitors, nuclease inhibitors, anti-microbial agents, etc., may be used, depending on the sample preparation methods and purity of the target. In addition, either solid phase or solution based (i.e., kinetic PCR) assays may be used.

[0167] Once the assay is run, the data is analyzed to determine the expression levels, and changes in expression levels as between states, of individual genes, forming a gene expression profile.

[0168] In a preferred embodiment, as for the diagnosis and prognosis applications, having identified the differentially expressed gene(s) or mutated gene(s) important in any one state, screens can be run to alter the expression of the genes individually. That is, screening for modulation of regulation of expression of a single gene can be done. Thus, for example, particularly in the case of target genes whose presence or absence is unique between two states, screening is done for modulators of the target gene expression.

[0169] In addition, screens can be done for novel genes that are induced in response to a candidate agent. After identifying a candidate agent based upon its ability to suppress a CA expression pattern leading to a normal expression pattern, or modulate a single CA gene expression profile so as to mimic the expression of the gene from normal tissue, a screen as described above can be performed to identify genes that are specifically modulated in response to the agent. Comparing expression profiles between normal tissue and agent treated CA tissue reveals genes that are not expressed in normal tissue or CA tissue, but are expressed in agent treated tissue. These agent specific sequences can be identified and used by any of the methods described herein for CA genes or proteins. In particular these sequences and the proteins they encode find use in marking or identifying agent treated cells. In addition, antibodies can be raised against the agent induced proteins and used to target novel therapeutics to the treated CA tissue sample.

[0170] Thus, in one embodiment, a candidate agent is administered to a population of CA cells, that thus has an associated CA expression profile. By “administration” or “contacting” herein is meant that the candidate agent is added to the cells in such a manner as to allow the agent to act upon the cell, whether by uptake and intracellular action, or by action at the cell surface. In some embodiments, nucleic acid encoding a proteinaceous candidate agent (i.e. a peptide) may be put into a viral construct such as a retroviral construct and added to the cell, such that expression of the peptide agent is accomplished; see PCT US97/01019, hereby expressly incorporated by reference.

[0171] Once the candidate agent has been administered to the cells, the cells can be washed if desired and are allowed to incubate under preferably physiological conditions for some period of time. The cells are then harvested and a new gene expression profile is generated, as outlined herein.

[0172] Thus, for example, CA tissue may be screened for agents that reduce or suppress the CA phenotype. A change in at least one gene of the expression profile indicates that the agent has an effect on CA activity. By defining such a signature for the CA phenotype, screens for new drugs that alter the phenotype can be devised. With this approach, the drug target need not be known and need not be represented in the original expression screening platform, nor does the level of transcript for the target protein need to change.

[0173] In a preferred embodiment, as outlined above, screens may be done on individual genes and gene products (proteins). That is, having identified a particular differentially expressed gene as important in a particular state, screening of modulators of either the expression of the gene or the gene product itself can be done. The gene products of differentially expressed genes are sometimes referred to herein as “CA proteins” or an “CAP”. The CAP may be a fragment, or alternatively, be the full length protein to the fragment encoded by the nucleic acids of Tables 1-40. Preferably, the CAP is a fragment. In another embodiment, the sequences are sequence variants as further described herein.

[0174] Preferably, the CAP is a fragment of approximately 14 to 24 amino acids long. More preferably the fragment is a soluble fragment. Preferably, the fragment includes a non-transmembrane region. In a preferred embodiment, the fragment has an N-terminal Cys to aid in solubility. In one embodiment, the c-terminus of the fragment is kept as a free acid and the n-terminus is a free amine to aid in coupling, i.e., to cysteine.

[0175] In one embodiment the CA proteins are conjugated to an immunogenic agent as discussed herein. In one embodiment the CA protein is conjugated to BSA.

[0176] In a preferred embodiment, screening is done to alter the biological function of the expression product of the CA gene. Again, having identified the importance of a gene in a particular state, screening for agents that bind and/or modulate the biological activity of the gene product can be run as is more fully outlined below.

[0177] In a preferred embodiment, screens are designed to first find candidate agents that can bind to CA proteins, and then these agents may be used in assays that evaluate the ability of the candidate agent to modulate the CAP activity and the carcinoma phenotype. Thus, as will be appreciated by those in the art, there are a number of different assays which may be run; binding assays and activity assays.

[0178] In a preferred embodiment, binding assays are done. In general, purified or isolated gene product is used; that is, the gene products of one or more CA nucleic acids are made. In general, this is done as is known in the art. For example, antibodies are generated to the protein gene products, and standard immunoassays are run to determine the amount of protein present. Alternatively, cells comprising the CA proteins can be used in the assays.

[0179] Thus, in a preferred embodiment, the methods comprise combining a CA protein and a candidate bioactive agent, and determining the binding of the candidate agent to the CA protein. Preferred embodiments utilize the human or mouse CA protein, although other mammalian proteins may also be used, for example for the development of animal models of human disease. In some embodiments, as outlined herein, variant or derivative CA proteins may be used.

[0180] Generally, in a preferred embodiment of the methods herein, the CA protein or the candidate agent is non-diffusably bound to an insoluble support having isolated sample receiving areas (e.g. a microtiter plate, an array, etc.). The insoluble supports may be made of any composition to which the A/ compositions can be bound, is readily separated from soluble material, and is otherwise compatible with the overall method of screening. The surface of such supports may be solid or porous and of any convenient shape. Examples of suitable insoluble supports include microtiter plates, arrays, membranes and beads. These are typically made of glass, plastic (e.g., polystyrene), polysaccharides, nylon or nitrocellulose, Teflon™, etc. Microtiter plates and arrays are especially convenient because a large number of assays can be carried out simultaneously, using small amounts of reagents and samples. The particular manner of binding of the composition is not crucial so long as it is compatible with the reagents and overall methods of the invention, maintains the activity of the composition and is nondiffusable. Preferred methods of binding include the use of antibodies (which do not sterically block either the ligand binding site or activation sequence when the protein is bound to the support), direct binding to “sticky” or ionic supports, chemical crosslinking, the synthesis of the protein or agent on the surface, etc. Following binding of the protein or agent, excess unbound material is removed by washing. The sample receiving areas may then be blocked through incubation with bovine serum albumin (BSA), casein or other innocuous protein or other moiety.

[0181] In a preferred embodiment, the CA protein is bound to the support, and a candidate bioactive agent is added to the assay. Alternatively, the candidate agent is bound to the support and the CA protein is added. Novel binding agents include specific antibodies, non-natural binding agents identified in screens of chemical libraries, peptide analogs, etc. Of particular interest are screening assays for agents that have a low toxicity for human cells. A wide variety of assays may be used for this purpose, including labeled in vitro protein-protein binding assays, electrophoretic mobility shift assays, immunoassays for protein binding, functional assays (phosphorylation assays, etc.) and the like.

[0182] The determination of the binding of the candidate bioactive agent to the CA protein may be done in a number of ways. In a preferred embodiment, the candidate bioactive agent is labeled, and binding determined directly. For example, this may be done by attaching all or a portion of the CA protein to a solid support, adding a labeled candidate agent (for example a fluorescent label), washing off excess reagent, and determining whether the label is present on the solid support. Various blocking and washing steps may be utilized as is known in the art.

[0183] By “labeled” herein is meant that the compound is either directly or indirectly labeled with a label which provides a detectable signal, e.g. radioisotope, fluorescers, enzyme, antibodies, particles such as magnetic particles, chemiluminescers, or specific binding molecules, etc. Specific binding molecules include pairs, such as biotin and streptavidin, digoxin and antidigoxin etc. For the specific binding members, the complementary member would normally be labeled with a molecule which provides for detection, in accordance with known procedures, as outlined above. The label can directly or indirectly provide a detectable signal.

[0184] In some embodiments, only one of the components is labeled. For example, the proteins (or proteinaceous candidate agents) may be labeled at tyrosine positions using ¹²⁵I, or with fluorophores. Alternatively, more than one component may be labeled with different labels; using ¹²⁵I for the proteins, for example, and a fluorophor for the candidate agents.

[0185] In a preferred embodiment, the binding of the candidate bioactive agent is determined through the use of competitive binding assays. In this embodiment, the competitor is a binding moiety known to bind to the target molecule (i.e. CA protein), such as an antibody, peptide, binding partner, ligand, etc. Under certain circumstances, there may be competitive binding as between the bioactive agent and the binding moiety, with the binding moiety displacing the bioactive agent.

[0186] In one embodiment, the candidate bioactive agent is labeled. Either the candidate bioactive agent, or the competitor, or both, is added first to the protein for a time sufficient to allow binding, if present.

[0187] Incubations may be performed at any temperature which facilitates optimal activity, typically between 4 and 40° C. Incubation periods are selected for optimum activity, but may also be optimized to facilitate rapid high through put screening. Typically between 0.1 and 1 hour will be sufficient. Excess reagent is generally removed or washed away. The second component is then added, and the presence or absence of the labeled component is followed, to indicate binding.

[0188] In a preferred embodiment, the competitor is added first, followed by the candidate bioactive agent. Displacement of the competitor is an indication that the candidate bioactive agent is binding to the CA protein and thus is capable of binding to, and potentially modulating, the activity of the CA protein. In this embodiment, either component can be labeled. Thus, for example, if the competitor is labeled, the presence of label in the wash solution indicates displacement by the agent. Alternatively, if the candidate bioactive agent is labeled, the presence of the label on the support indicates displacement.

[0189] In an alternative embodiment, the candidate bioactive agent is added first, with incubation and washing, followed by the competitor. The absence of binding by the competitor may indicate that the bioactive agent is bound to the CA protein with a higher affinity. Thus, if the candidate bioactive agent is labeled, the presence of the label on the support, coupled with a lack of competitor binding, may indicate that the candidate agent is capable of binding to the CA protein.

[0190] In a preferred embodiment, the methods comprise differential screening to identity bioactive agents that are capable of modulating the activity of the CA proteins. In this embodiment, the methods comprise combining a CA protein and a competitor in a first sample. A second sample comprises a candidate bioactive agent, a CA protein and a competitor. The binding of the competitor is determined for both samples, and a change, or difference in binding between the two samples indicates the presence of an agent capable of binding to the CA protein and potentially modulating its activity. That is, if the binding of the competitor is different in the second sample relative to the first sample, the agent is capable of binding to the CA protein.

[0191] Alternatively, a preferred embodiment utilizes differential screening to identify drug candidates that bind to the native CA protein, but cannot bind to modified CA proteins. The structure of the CA protein may be modeled, and used in rational drug design to synthesize agents that interact with that site. Drug candidates that affect CA bioactivity are also identified by screening drugs for the ability to either enhance or reduce the activity of the protein.

[0192] Positive controls and negative controls may be used in the assays. Preferably all control and test samples are performed in at least triplicate to obtain statistically significant results. Incubation of all samples is for a time sufficient for the binding of the agent to the protein. Following incubation, all samples are washed free of non-specifically bound material and the amount of bound, generally labeled agent determined. For example, where a radiolabel is employed, the samples may be counted in a scintillation counter to determine the amount of bound compound.

[0193] A variety of other reagents may be included in the screening assays. These include reagents like salts, neutral proteins, e.g. albumin, detergents, etc which may be used to facilitate optimal protein-protein binding and/or reduce non-specific or background interactions. Also reagents that otherwise improve the efficiency of the assay, such as protease inhibitors, nuclease inhibitors, anti-microbial agents, etc., may be used. The mixture of components may be added in any order that provides for the requisite binding.

[0194] Screening for agents that modulate the activity of CA proteins may also be done. In a preferred embodiment, methods for screening for a bioactive agent capable of modulating the activity of CA proteins comprise the steps of adding a candidate bioactive agent to a sample of CA proteins, as above, and determining an alteration in the biological activity of CA proteins. “Modulating the activity of an CA protein” includes an increase in activity, a decrease in activity, or a change in the type or kind of activity present. Thus, in this embodiment, the candidate agent should both bind to CA proteins (although this may not be necessary), and alter its biological or biochemical activity as defined herein. The methods include both in vitro screening methods, as are generally outlined above, and in vivo screening of cells for alterations in the presence, distribution, activity or amount of CA proteins.

[0195] Thus, in this embodiment, the methods comprise combining a CA sample and a candidate bioactive agent, and evaluating the effect on CA activity. By “CA activity” or grammatical equivalents herein is meant one of the CA protein's biological activities, including, but not limited to, its role in tumorigenesis, including cell division, preferably in lymphatic tissue, cell proliferation, tumor growth and transformation of cells. In one embodiment, CA activity includes activation of or by a protein encoded by a nucleic acid of Tables 1-40. An inhibitor of CA activity is the inhibition of any one or more CA activities.

[0196] In a preferred embodiment, the activity of the CA protein is increased; in another preferred embodiment, the activity of the CA protein is decreased. Thus, bioactive agents that are antagonists are preferred in some embodiments, and bioactive agents that are agonists may be preferred in other embodiments.

[0197] In a preferred embodiment, the invention provides methods for screening for bioactive agents capable of modulating the activity of a CA protein. The methods comprise adding a candidate bioactive agent, as defined above, to a cell comprising CA proteins. Preferred cell types include almost any cell. The cells contain a recombinant nucleic acid that encodes a CA protein. In a preferred embodiment, a library of candidate agents are tested on a plurality of cells.

[0198] In one aspect, the assays are evaluated in the presence or absence or previous or subsequent exposure of physiological signals, for example hormones, antibodies, peptides, antigens, cytokines, growth factors, action potentials, pharmacological agents including chemotherapeutics, radiation, carcinogenics, or other cells (i.e. cell-cell contacts). In another example, the determinations are determined at different stages of the cell cycle process.

[0199] In this way, bioactive agents are identified. Compounds with pharmacological activity are able to enhance or interfere with the activity of the CA protein.

[0200] In one embodiment, a method of inhibiting carcinoma cancer cell division, is provided. The method comprises administration of a carcinoma cancer inhibitor.

[0201] In a preferred embodiment, a method of inhibiting lymphoma carcinoma cell division is provided comprising administration of a lymphoma carcinoma inhibitor.

[0202] In another embodiment, a method of inhibiting tumor growth is provided. The method comprises administration of a carcinoma cancer inhibitor. In a particularly preferred embodiment, a method of inhibiting tumor growth in lymphatic tissue is provided comprising administration of a lymphoma inhibitor.

[0203] In a further embodiment, methods of treating cells or individuals with cancer are provided. The method comprises administration of a carcinoma cancer inhibitor. Preferably, the carcinoma is a lymphoma carcinoma.

[0204] In one embodiment, a carcinoma cancer inhibitor is an antibody as discussed above. In another embodiment, the carcinoma cancer inhibitor is an antisense molecule. Antisense molecules as used herein include antisense or sense oligonucleotides comprising a singe-stranded nucleic acid sequence (either RNA or DNA) capable of binding to target mRNA (sense) or DNA (antisense) sequences for carcinoma cancer molecules. Antisense or sense oligonucleotides, according to the present invention, comprise a fragment generally at least about 14 nucleotides, preferably from about 14 to 30 nucleotides. The ability to derive an antisense or a sense oligonucleotide, based upon a cDNA sequence encoding a given protein is described in, for example, Stein and Cohen, Cancer Res. 48:2659, (1988) and van der Krol et al., BioTechniques 6:958, (1988).

[0205] Antisense molecules may be introduced into a cell containing the target nucleotide sequence by formation of a conjugate with a ligand binding molecule, as described in WO 91/04753. Suitable ligand binding molecules include, but are not limited to, cell surface receptors, growth factors, other cytokines, or other ligands that bind to cell surface receptors. Preferably, conjugation of the ligand binding molecule does not substantially interfere with the ability of the ligand binding molecule to bind to its corresponding molecule or receptor, or block entry of the sense or antisense oligonucleotide or its conjugated version into the cell. Alternatively, a sense or an antisense oligonucleotide may be introduced into a cell containing the target nucleic acid sequence by formation of an oligonucleotide-lipid complex, as described in WO 90/10448. It is understood that the use of antisense molecules or knock out and knock in models may also be used in screening assays as discussed above, in addition to methods of treatment.

[0206] The compounds having the desired pharmacological activity may be administered in a physiologically acceptable carrier to a host, as previously described. The agents may be administered in a variety of ways, orally, parenterally e.g., subcutaneously, intraperitoneally, intravascularly, etc. Depending upon the manner of introduction, the compounds may be formulated in a variety of ways. The concentration of therapeutically active compound in the formulation may vary from about 0.1-100% wgt/vol. The agents may be administered alone or in combination with other treatments, i.e., radiation.

[0207] The pharmaceutical compositions can be prepared in various forms, such as granules, tablets, pills, suppositories, capsules, suspensions, salves, lotions and the like. Pharmaceutical grade organic or inorganic carriers and/or diluents suitable for oral and topical use can be used to make up compositions containing the therapeutically-active compounds. Diluents known to the art include aqueous media, vegetable and animal oils and fats. Stabilizing agents, wetting and emulsifying agents, salts for varying the osmotic pressure or buffers for securing an adequate pH value, and skin penetration enhancers can be used as auxiliary agents.

[0208] Without being bound by theory, it appears that the various CA sequences are important in carcinomas. Accordingly, disorders based on mutant or variant CA genes may be determined. In one embodiment, the invention provides methods for identifying cells containing variant CA genes comprising determining all or part of the sequence of at least one endogenous CA genes in a cell. As will be appreciated by those in the art, this may be done using any number of sequencing techniques. In a preferred embodiment, the invention provides methods of identifying the CA genotype of an individual comprising determining all or part of the sequence of at least one CA gene of the individual. This is generally done in at least one tissue of the individual, and may include the evaluation of a number of tissues or different samples of the same tissue. The method may include comparing the sequence of the sequenced CA gene to a known CA gene, i.e., a wild-type gene. As will be appreciated by those in the art, alterations in the sequence of some oncogenes can be an indication of either the presence of the disease, or propensity to develop the disease, or prognosis evaluations.

[0209] The sequence of all or part of the CA gene can then be compared to the sequence of a known CA gene to determine if any differences exist. This can be done using any number of known homology programs, such as Bestfit, etc. In a preferred embodiment, the presence of a difference in the sequence between the CA gene of the patient and the known CA gene is indicative of a disease state or a propensity for a disease state, as outlined herein.

[0210] In a preferred embodiment, the CA genes are used as probes to determine the number of copies of the CA gene in the genome. For example, some cancers exhibit chromosomal deletions or insertions, resulting in an alteration in the copy number of a gene.

[0211] In another preferred embodiment CA genes are used as probes to determine the chromosomal location of the CA genes. Information such as chromosomal location finds use in providing a diagnosis or prognosis in particular when chromosomal abnormalities such as translocations, and the like are identified in CA gene loci.

[0212] Thus, in one embodiment, methods of modulating CA in cells or organisms are provided. In one embodiment, the methods comprise administering to a cell an anti-CA antibody that reduces or eliminates the biological activity of an endogenous CA protein. Alternatively, the methods comprise administering to a cell or organism a recombinant nucleic acid encoding a CA protein. As will be appreciated by those in the art, this may be accomplished in any number of ways. In a preferred embodiment, for example when the CA sequence is down-regulated in carcinoma, the activity of the CA gene is increased by increasing the amount of CA in the cell, for example by overexpressing the art endogenous CA or by administering a gene encoding the CA sequence, using known gene-therapy techniques, for example. In a preferred embodiment, the gene therapy techniques include the incorporation of the exogenous gene using enhanced homologous recombination (EHR), for example as described in PCT/US93/03868, hereby incorporated by reference in its entirety. Alternatively, for example when the CA sequence is up-regulated in carcinoma, the activity of the endogenous CA gene is decreased, for example by the administration of a CA antisense nucleic acid.

[0213] In one embodiment, the CA proteins of the present invention may be used to generate polyclonal and monoclonal antibodies to CA proteins, which are useful as described herein. Similarly, the CA proteins can be coupled, using standard technology, to affinity chromatography columns. These columns may then be used to purify CA antibodies. In a preferred embodiment, the antibodies are generated to epitopes unique to a CA protein; that is, the antibodies show little or no cross-reactivity to other proteins. These antibodies find use in a number of applications. For example, the CA antibodies may be coupled to standard affinity chromatography columns and used to purify CA proteins. The antibodies may also be used as blocking polypeptides, as outlined above, since they will specifically bind to the CA protein.

[0214] In one embodiment, a therapeutically effective dose of a CA or modulator thereof is administered to a patient. By “therapeutically effective dose” herein is meant a dose that produces the effects for which it is administered. The exact dose will depend on the purpose of the treatment, and will be ascertainable by one skilled in the art using known techniques. As is known in the art, adjustments for CA degradation, systemic versus localized delivery, and rate of new protease synthesis, as well as the age, body weight, general health, sex, diet, time of administration, drug interaction and the severity of the condition may be necessary, and will be ascertainable with routine experimentation by those skilled in the art.

[0215] A “patient” for the purposes of the present invention includes both humans and other animals, particularly mammals, and organisms. Thus the methods are applicable to both human therapy and veterinary applications. In the preferred embodiment the patient is a mammal, and in the most preferred embodiment the patient is human.

[0216] The administration of the CA proteins and modulators of the present invention can be done in a variety of ways as discussed above, including, but not limited to, orally, subcutaneously, intravenously, intranasally, transdermally, intraperitoneally, intramuscularly, intrapulmonary, vaginally, rectally, or intraocularly. In some instances, for example, in the treatment of wounds and inflammation, the CA proteins and modulators may be directly applied as a solution or spray.

[0217] The pharmaceutical compositions of the present invention comprise a CA protein in a form suitable for administration to a patient. In the preferred embodiment, the pharmaceutical compositions are in a water soluble form, such as being present as pharmaceutically acceptable salts, which is meant to include both acid and base addition salts. “Pharmaceutically acceptable acid addition salt” refers to those salts that retain the biological effectiveness of the free bases and that are not biologically or otherwise undesirable, formed with inorganic acids such as hydrochloric acid, hydrobromic acid, sulfuric acid, nitric acid, phosphoric acid and the like, and organic acids such as acetic acid, propionic acid, glycolic acid, pyruvic acid, oxalic acid, maleic acid, malonic acid, succinic acid, fumaric acid, tartaric acid, citric acid, benzoic acid, cinnamic acid, mandelic acid, methanesulfonic acid, ethanesulfonic acid, p-toluenesulfonic acid, salicylic acid and the like. “Pharmaceutically acceptable base addition salts” include those derived from inorganic bases such as sodium, potassium, lithium, ammonium, calcium, magnesium, iron, zinc, copper, manganese, aluminum salts and the like. Particularly preferred are the ammonium, potassium, sodium, calcium, and magnesium salts. Salts derived from pharmaceutically acceptable organic non-toxic bases include salts of primary, secondary, and tertiary amines, substituted amines including naturally occurring substituted amines, cyclic amines and basic ion exchange resins, such as isopropylamine, trimethylamine, diethylamine, triethylamine, tripropylamine, and ethanolamine.

[0218] The pharmaceutical compositions may also include one or more of the following: carrier proteins such as serum albumin; buffers; fillers such as microcrystalline cellulose, lactose, corn and other starches; binding agents; sweeteners and other flavoring agents; coloring agents; and polyethylene glycol. Additives are well known in the art, and are used in a variety of formulations.

[0219] In a preferred embodiment, CA proteins and modulators are administered as therapeutic agents, and can be formulated as outlined above. Similarly, CA genes (including both the full-length sequence, partial sequences, or regulatory sequences of the CA coding regions) can be administered in gene therapy applications, as is known in the art. These CA genes can include antisense applications, either as gene therapy (i.e. for incorporation into the genome) or as antisense compositions, as will be appreciated by those in the art.

[0220] In a preferred embodiment, CA genes are administered as DNA vaccines, either single genes or combinations of CA genes. Naked DNA vaccines are generally known in the art. Brower, Nature Biotechnology, 16:1304-1305 (1998).

[0221] In one embodiment, CA genes of the present invention are used as DNA vaccines. Methods for the use of genes as DNA vaccines are well known to one of ordinary skill in the art, and include placing a CA gene or portion of a CA gene under the control of a promoter for expression in a patient with carcinoma. The CA gene used for DNA vaccines can encode full-length CA proteins, but more preferably encodes portions of the CA proteins including peptides derived from the CA protein. In a preferred embodiment a patient is immunized with a DNA vaccine comprising a plurality of nucleotide sequences derived from a CA gene. Similarly, it is possible to immunize a patient with a plurality of CA genes or portions thereof as defined herein. Without being bound by theory, expression of the polypeptide encoded by the DNA vaccine, cytotoxic T-cells, helper T-cells and antibodies are induced which recognize and destroy or eliminate cells expressing CA proteins.

[0222] In a preferred embodiment, the DNA vaccines include a gene encoding an adjuvant molecule with the DNA vaccine. Such adjuvant molecules include cytokines that increase the immunogenic response to the CA polypeptide encoded by the DNA vaccine. Additional or alternative adjuvants are known to those of ordinary skill in the art and find use in the invention.

[0223] In another preferred embodiment CA genes find use in generating animal models of carcinomas, particularly lymphoma carcinomas. As is appreciated by one of ordinary skill in the art, when the CA gene identified is repressed or diminished in CA tissue, gene therapy technology wherein antisense RNA directed to the CA gene will also diminish or repress expression of the gene. An animal generated as such serves as an animal model of CA that finds use in screening bioactive drug candidates. Similarly, gene knockout technology, for example as a result of homologous recombination with an appropriate gene targeting vector, will result in the absence of the CA protein. When desired, tissue-specific expression or knockout of the CA protein may be necessary.

[0224] It is also possible that the CA protein is overexpressed in carcinoma. As such, transgenic animals can be generated that overexpress the CA protein. Depending on the desired expression level, promoters of various strengths can be employed to express the transgene. Also, the number of copies of the integrated transgene can be determined and compared for a determination of the expression level of the transgene. Animals generated by such methods find use as animal models of CA and are additionally useful in screening for bioactive molecules to treat carcinoma.

[0225] The CA nucleic acid sequences of the invention are depicted in Tables 1-40. The sequences in each Table include genomic sequence, mRNA and coding sequences for both mouse and human. The different sequences are assigned the following SEQ ID Nos:

TABLE 1

(mouse gene: Myc; human gene MYC)
Mouse genomic sequence (SEQ ID NO:1)
Mouse mRNA sequence (SEQ ID NO:2)
Mouse coding sequence (SEQ ID NO:3)
Human genomic sequence (SEQ ID NO:4)
Human mRNA sequence (SEQ ID NO:5)
Human coding sequence (SEQ ID NO:6)

[0226] TABLE 2

(mouse gene Bach2; human gene BACH2)
Mouse genomic sequence (SEQ ID NO:7)
Mouse mRNA sequence (SEQ ID NO:8)
Mouse coding sequence (SEQ ID NO:9)
Human genomic sequence (SEQ ID NO:10)
Human mRNA sequence (SEQ ID NO:11)
Human coding sequence (SEQ ID NO:12)

[0227] TABLE 3

(mouse gene Wnt1; human gene WNT1)
Mouse genomic sequence (SEQ ID NO:13)
Mouse mRNA sequence (SEQ ID NO:14)
Mouse coding sequence (SEQ ID NO:15)
Human genomic sequence (SEQ ID NO:16)
Human mRNA sequence (SEQ ID NO:17)
Human coding sequence (SEQ ID NO:18)

[0228] TABLE 4

(mouse gene Rasgrp1; human gene: RASGRP1)
Mouse genomic sequence (SEQ ID NO:19)
Mouse mRNA sequence (SEQ ID NO:20)
Mouse coding sequence (SEQ ID NO:21)
Human genomic sequence (SEQ ID NO:22)
Human mRNA sequence (SEQ ID NO:23)
Human coding sequence (SEQ ID NO:24)

[0229] TABLE 5

(mouse gene: Nmyc1; human gene: MYCN)
Mouse genomic sequence (SEQ ID NO:25)
Mouse mRNA sequence (SEQ ID NO:26)
Mouse coding sequence (SEQ ID NO:27)
Human genomic sequence (SEQ ID NO:28)
Human mRNA sequence (SEQ ID NO:29)
Human coding sequence (SEQ ID NO:30)

[0230] TABLE 6

(mouse gene: Myb; human gene: MYB)
Mouse genomic sequence (SEQ ID NO:31)
Mouse mRNA sequence (SEQ ID NO:32)
Mouse coding sequence (SEQ ID NO:33)
Human genomic sequence (SEQ ID NO:34)
Human mRNA sequence (SEQ ID NO:35)
Human coding sequence (SEQ ID NO:36)

[0231] TABLE 7

(mouse gene: Sox4; human gene: SOX4)
Mouse genomic sequence (SEQ ID NO:37)
Mouse mRNA sequence (SEQ ID NO:38)
Mouse coding sequence (SEQ ID NO:39)
Human genomic sequence (SEQ ID NO:40)
Human mRNA sequence (SEQ ID NO:41)
Human coding sequence (SEQ ID NO:42)

[0232] TABLE 8

(mouse gene: Tcof1; human gene: TCOF1)
Mouse genomic sequence (SEQ ID NO:43)
Mouse mRNA sequence (SEQ ID NO:44)
Mouse coding sequence (SEQ ID NO:45)
Human genomic sequence (SEQ ID NO:46)
Human mRNA sequence (SEQ ID NO:47)
Human coding sequence (SEQ ID NO:48)

[0233] TABLE 9

(mouse gene: Pim1; human gene: PIM1)
Mouse genomic sequence (SEQ ID NO:49)
Mouse mRNA sequence (SEQ ID NO:50)
Mouse coding sequence (SEQ ID NO:51)
Human genomic sequence (SEQ ID NO:52)
Human mRNA sequence (SEQ ID NO:53)
Human coding sequence (SEQ ID NO:54)

[0234] TABLE 10

(mouse gene: Wnt3a; human gene: WNT3A)
Mouse genomic sequence (SEQ ID NO: 55)
Mouse mRNA sequence (SEQ ID NO: 56)
Mouse coding sequence (SEQ ID NO: 57)
Human genomic sequence (SEQ ID NO: 58)
Human mRNA sequence (SEQ ID NO: 59)
Human coding sequence (SEQ ID NO: 60)

[0235] TABLE 11

(mouse gene: Ly6e; human gene LY6E)
Mouse genomic sequence (SEQ ID NO: 61)
Mouse mRNA sequence (SEQ ID NO: 62)
Mouse coding sequence (SEQ ID NO: 63)
Human genomic sequence (SEQ ID NO: 64)
Human mRNA sequence (SEQ ID NO: 65)
Human coding sequence (SEQ ID NO: 66)

[0236] TABLE 12

(mouse gene: Rasa2; human gene RASA2)
Mouse genomic sequence (SEQ ID NO: 67)
Mouse mRNA sequence (SEQ ID NO: 68)
Mouse coding sequence (SEQ ID NO: 69)
Human genomic sequence (SEQ ID NO: 70)
Human mRNA sequence (SEQ ID NO: 71)
Human coding sequence (SEQ ID NO: 72)

[0237] TABLE 13

(mouse gene: Gata1; human gene GATA1)
Mouse genomic sequence (SEQ ID NO: 73)
Mouse mRNA sequence (SEQ ID NO: 74)
Mouse coding sequence (SEQ ID NO: 75)
Human genomic sequence (SEQ ID NO: 76)
Human mRNA sequence (SEQ ID NO: 77)
Human coding sequence (SEQ ID NO: 78)

[0238] TABLE 14

(mouse gene: Fkbp5; human gene FKBP5)
Mouse genomic sequence (SEQ ID NO: 79)
Mouse mRNA sequence (SEQ ID NO: 80)
Mouse coding sequence (SEQ ID NO: 81)
Human genomic sequence (SEQ ID NO: 82)
Human mRNA sequence (SEQ ID NO: 83)
Human coding sequence (SEQ ID NO: 84)

[0239] TABLE 15

(mouse gene: Rel; human gene REL)
Mouse genomic sequence (SEQ ID NO: 85)
Mouse mRNA sequence (SEQ ID NO: 86)
Mouse coding sequence (SEQ ID NO: 87)
Human genomic sequence (SEQ ID NO: 88)
Human mRNA sequence (SEQ ID NO: 89)
Human coding sequence (SEQ ID NO: 90)

[0240] TABLE 16

(mouse gene: Icsbp; human gene ICSBP1)
Mouse genomic sequence (SEQ ID NO: 91)
Mouse mRNA sequence (SEQ ID NO: 92)
Mouse coding sequence (SEQ ID NO: 93)
Human genomic sequence (SEQ ID NO: 94)
Human mRNA sequence (SEQ ID NO: 95)
Human coding sequence (SEQ ID NO: 96)

[0241] TABLE 17

(mouse gene: Bmi1; human gene BMI1)
Mouse genomic sequence (SEQ ID NO: 97)
Mouse mRNA sequence (SEQ ID NO: 98)
Mouse coding sequence (SEQ ID NO: 99)
Human genomic sequence (SEQ ID NO: 100)
Human mRNA sequence (SEQ ID NO: 101)
Human coding sequence (SEQ ID NO: 102)

[0242] TABLE 18

(mouse gene: Runx1; human gene RUNX1)
Mouse genomic sequence (SEQ ID NO: 103)
Mouse mRNA sequence (SEQ ID NO: 104)
Mouse coding sequence (SEQ ID NO: 105)
Human genomic sequence (SEQ ID NO: 106)
Human mRNA sequence (SEQ ID NO: 107)
Human coding sequence (SEQ ID NO: 108)

[0243] TABLE 19

(mouse gene: Il2ra; human gene IL2RA)
Mouse genomic sequence (SEQ ID NO: 109)
Mouse mRNA sequence (SEQ ID NO: 110)
Mouse coding sequence (SEQ ID NO: 111)
Human genomic sequence (SEQ ID NO: 112)
Human mRNA sequence (SEQ ID NO: 113)
Human coding sequence (SEQ ID NO: 114)

[0244] TABLE 20

(mouse gene: Nfkb1; human gene NFKB1)
Mouse genomic sequence (SEQ ID NO: 115)
Mouse mRNA sequence (SEQ ID NO: 116)
Mouse coding sequence (SEQ ID NO: 117)
Human genomic sequence (SEQ ID NO: 118)
Human mRNA sequence (SEQ ID NO: 119)
Human coding sequence (SEQ ID NO: 120)

[0245] TABLE 21

(mouse gene: Fyn; human gene FYN)
Mouse genomic sequence (SEQ ID NO: 121)
Mouse mRNA sequence (SEQ ID NO: 122)
Mouse coding sequence (SEQ ID NO: 123)
Human genomic sequence (SEQ ID NO: 124)
Human mRNA sequence (SEQ ID NO: 125)
Human coding sequence (SEQ ID NO: 126)

[0246] TABLE 22

(mouse gene: Nfkbil1; human gene NFKBIL1)
Mouse genomic sequence (SEQ ID NO: 127)
Mouse mRNA sequence (SEQ ID NO: 128)
Mouse coding sequence (SEQ ID NO: 129)
Human genomic sequence (SEQ ID NO: 130)
Human mRNA sequence (SEQ ID NO: 131)
Human coding sequence (SEQ ID NO: 132)

[0247] TABLE 23

(mouse gene: Flt3; human gene FLT3)
Mouse genomic sequence (SEQ ID NO: 133)
Mouse mRNA sequence (SEQ ID NO: 134)
Mouse coding sequence (SEQ ID NO: 135)
Human genomic sequence (SEQ ID NO: 136)
Human mRNA sequence (SEQ ID NO: 137)
Human coding sequence (SEQ ID NO: 138)

[0248] TABLE 24

(mouse gene: Dntt; human gene DNTT)
Mouse genomic sequence (SEQ ID NO: 139)
Mouse mRNA sequence (SEQ ID NO: 140)
Mouse coding sequence (SEQ ID NO: 141)
Human genomic sequence (SEQ ID NO: 142)
Human mRNA sequence (SEQ ID NO: 143)
Human coding sequence (SEQ ID NO: 144)

[0249] TABLE 25

(mouse gene: Znfn1a1; human gene ZNFN1A1)
Mouse genomic sequence (SEQ ID NO: 145)
Mouse mRNA sequence (SEQ ID NO: 146)
Mouse coding sequence (SEQ ID NO: 147)
Human genomic sequence (SEQ ID NO: 148)
Human mRNA sequence (SEQ ID NO: 149)
Human coding sequence (SEQ ID NO: 150)

[0250] TABLE 26

(mouse gene: Tbx21; human gene TBX21)
Mouse genomic sequence (SEQ ID NO: 151)
Mouse mRNA sequence (SEQ ID NO: 152)
Mouse coding sequence (SEQ ID NO: 153)
Human genomic sequence (SEQ ID NO: 154)
Human mRNA sequence (SEQ ID NO: 155)
Human coding sequence (SEQ ID NO: 156)

[0251] TABLE 27

(mouse gene: Stat5b; human gene STAT5B)
Mouse genomic sequence (SEQ ID NO: 157)
Mouse mRNA sequence (SEQ ID NO: 158)
Mouse coding sequence (SEQ ID NO: 159)
Human genomic sequence (SEQ ID NO: 160)
Human mRNA sequence (SEQ ID NO: 161)
Human coding sequence (SEQ ID NO: 162)

[0252] TABLE 28

(mouse gene: Sema4d; human gene SEMA4D)
Mouse genomic sequence (SEQ ID NO: 163)
Mouse mRNA sequence (SEQ ID NO: 164)
Mouse coding sequence (SEQ ID NO: 165)
Human genomic sequence (SEQ ID NO: 166)
Human mRNA sequence (SEQ ID NO: 167)
Human coding sequence (SEQ ID NO: 168)

[0253] TABLE 29

(mouse gene: Mdm2; human gene MDM2)
Mouse genomic sequence (SEQ ID NO: 169)
Mouse mRNA sequence (SEQ ID NO: 170)
Mouse coding sequence (SEQ ID NO: 171)
Human genomic sequence (SEQ ID NO: 172)
Human mRNA sequence (SEQ ID NO: 173)
Human coding sequence (SEQ ID NO: 174)

[0254] TABLE 30
(mouse gene: Prlr; human gene PRLR)

| | |
|---|---|
| Mouse genomic sequence | (SEQ ID NO: 175) |
| Mouse mRNA sequence | (SEQ ID NO: 176) |
| Mouse coding sequence | (SEQ ID NO: 177) |
| Human genomic sequence | (SEQ ID NO: 178) |
| Human mRNA sequence | (SEQ ID NO: 179) |
| Human coding sequence | (SEQ ID NO: 180) |

[0255] TABLE 31
(mouse gene: Top1; human gene TOP1)

| | |
|---|---|
| Mouse genomic sequence | (SEQ ID NO: 181) |
| Mouse mRNA sequence | (SEQ ID NO: 182) |
| Mouse coding sequence | (SEQ ID NO: 183) |
| Human genomic sequence | (SEQ ID NO: 184) |
| Human mRNA sequence | (SEQ ID NO: 185) |
| Human coding sequence | (SEQ ID NO: 186) |

[0256] TABLE 32
(mouse gene: Dusp10; human gene DUSP10)

| | |
|---|---|
| Mouse genomic sequence | (SEQ ID NO: 187) |
| Mouse mRNA sequence | (SEQ ID NO: 188) |
| Mouse coding sequence | (SEQ ID NO: 189) |
| Human genomic sequence | (SEQ ID NO: 190) |
| Human mRNA sequence | (SEQ ID NO: 191) |
| Human coding sequence | (SEQ ID NO: 192) |

[0257] TABLE 33
(mouse gene: Fli1; human gene FLI1)

| | |
|---|---|
| Mouse genomic sequence | (SEQ ID NO: 193) |
| Mouse mRNA sequence | (SEQ ID NO: 194) |
| Mouse coding sequence | (SEQ ID NO: 195) |
| Human genomic sequence | (SEQ ID NO: 196) |
| Human mRNA sequence | (SEQ ID NO: 197) |
| Human coding sequence | (SEQ ID NO: 198) |

[0258] TABLE 34
(mouse gene: Tk2; human gene TK2)

| | |
|---|---|
| Mouse genomic sequence | (SEQ ID NO: 199) |
| Mouse mRNA sequence | (SEQ ID NO: 200) |
| Mouse coding sequence | (SEQ ID NO: 201) |
| Human genomic sequence | (SEQ ID NO: 202) |
| Human mRNA sequence | (SEQ ID NO: 203) |
| Human coding sequence | (SEQ ID NO: 204) |

[0259] TABLE 35
(mouse gene: Nupr1)

| | |
|---|---|
| Mouse genomic sequence | (SEQ ID NO: 205) |
| Mouse mRNA sequence | (SEQ ID NO: 206) |
| Mouse coding sequence | (SEQ ID NO: 207) |

[0260] TABLE 36
(mouse gene: Zfhx1b; human gene ZFHX1B)

| | |
|---|---|
| Mouse genomic sequence | (SEQ ID NO: 208) |
| Mouse mRNA sequence | (SEQ ID NO: 209) |
| Mouse coding sequence | (SEQ ID NO: 210) |
| Human genomic sequence | (SEQ ID NO: 211) |
| Human mRNA sequence | (SEQ ID NO: 212) |
| Human coding sequence | (SEQ ID NO: 213) |

[0261] TABLE 37
(mouse gene: Vdac1; human gene VDAC1)

| | |
|---|---|
| Mouse genomic sequence | (SEQ ID NO: 214) |
| Mouse mRNA sequence | (SEQ ID NO: 215) |
| Mouse coding sequence | (SEQ ID NO: 216) |
| Human genomic sequence | (SEQ ID NO: 217) |
| Human mRNA sequence | (SEQ ID NO: 218) |
| Human coding sequence | (SEQ ID NO: 219) |

[0262] TABLE 38
(mouse gene: Nfatc1; human gene NFATC1)

| | |
|---|---|
| Mouse genomic sequence | (SEQ ID NO: 220) |
| Mouse mRNA sequence | (SEQ ID NO: 221) |
| Mouse coding sequence | (SEQ ID NO: 222) |
| Human genomic sequence | (SEQ ID NO: 223) |
| Human mRNA sequence | (SEQ ID NO: 224) |
| Human coding sequence | (SEQ ID NO: 225) |

[0263] TABLE 39
(mouse gene: Syk; human gene SYK)

| | |
|---|---|
| Mouse genomic sequence | (SEQ ID NO: 226) |
| Mouse mRNA sequence | (SEQ ID NO: 227) |
| Mouse coding sequence | (SEQ ID NO: 228) |
| Human genomic sequence | (SEQ ID NO: 229) |
| Human mRNA sequence | (SEQ ID NO: 230) |
| Human coding sequence | (SEQ ID NO: 231) |

[0264] TABLE 40

(mouse gene: Gnb1; human gene GNB1)
Mouse genomic sequence (SEQ ID NO: 232)
Mouse mRNA sequence (SEQ ID NO: 232)
Mouse coding sequence (SEQ ID NO: 234)
Human genomic sequence (SEQ ID NO: 235)
Human mRNA sequence (SEQ ID NO: 236)
Human coding sequence (SEQ ID NO: 237).

[0265] TABLE 1

MOUSE NOMENCLATURE
ICSGNM Nyc
Celera mCG1625
HUMAN NOMENCLATURE
HGNC MYC
Calera hCG1791915
MOUSE SEQUENCE—GENOMIC
CTTCCTTCTCCCTTCACTGAAACTGAACTGACCTTGGGATGGCGAAACCCCCACTTCATGGCACCCACTCTAAAAGATGGCTGTTGGTCAAACA
GCCTAGCAAGCTCTAAACCAGGTACTCTGCACCTGCCCTCTGACGCCCTGGGATTATATCGCAGACCGTAAGAACAGGAATGACATAATTAAAA
CCAGCCTCAGAAGCTGCTGAAGGCATTAGAACTAAAGCCCAGAAAAGCAACAAACTGTTACCATCAAAGCGTGAAAGAGGAAACGGTTAATCTT
TTCAAGGGAAGTGAAGCAACTCGGAAGGCCATAGGAATCCACATCACCTGAACTGCAGACCAAGCCTTGGAACTGGGGCTTTCAAGCTACATCT
GCTACTCACACCTTTGACCTCTCTGGGTGAATTGTTTTCTTACTAGTCACCAATGTTTTCAAACCTGGATTTTCACACTCCCTCGAATGCCTGG
AAGGGCTGCTACCAGCGGACCTATATTGCAGGGCCACCAACTGCCAGGTTCTGAGCCACAGCTCTTAGCTAGGACCAAGCAAATGGTCCCCAGT
GTGTTACAGTCTCCTGTCCTCCAAAGTGAGTTCCTCAGATGCACTCCTTTCCAATCCTNNNNNNNNNNNNNNNNNNNNGATTTTCCTGTGGGCA
CATCAGCTTCCTATGCTGAAAAAAACAGAGAGTAGTAGAAAGGGAAAGCCTAATCAAGCCTGCAGCTGAGAGATTGCCCTGTGCCACAACCCCC
AAGTCCACCCCCTTATAGGACACCACCTTAGTCATTCAGGGAAAGCCTTAATGGATTGCCTTGATTCGCCTTGATTCCATAATCTAATTGACCA
TCAGTAGAGCAAGCTGCACCAACTCCTATCGTAAATGAAGACAGGGGTGAGACTGGAAGCGTCAGATACTGGAAAATCTGAGATTCTCTCCCTT
GGTTTCTCATCTTCATCAGTTTCAACCAAAAAAGAAGGAAGCTTTAACCACGACTCCTTGTTTTTGTCAAAAGAATATGCTAAAGTACACATTC
CCATTATTGCTCATGAGACCTTGTTCATATGTCACCAAGAATATTCACTGGTATATGTTTGTTCATACCTTCTTAAACATAATTTAAGATTTCT
TTATTTGATGTATGTGTTTTGCTTGCATAAGGTATATGTACCACGTGTGTGCTTGTACCTGCACAGGTCAGGACAAGGTTTCAGTTTCCCTGGA
TTGATGACTGTGAACTATCATGTGTATGCTGTGAACTGAACTAAGGTCCTCTGTGGAAGCAACAACTGTTCTTAACTGATGATCCATCTCTCCA
GCTTCCGCTCAGAAATTTTCACACTTAAAGAAATAAGGGCTGGCTGGTGAGATGGCTCAGCGCTTAAGAGCACCGACTGCTCTTCCAAACGTCC
TGCGTTCAAATCCCAGCAACCACAAAGAAATAAGGGCAGGGGCTAGAGAGATGGCTCAGCAGTTAAGAGCACTGACTCCTCTTCCAGAGGTCCT
GAGCTCAATTCCCAGCAACCACATGGTGGTTCACAACCATCTCTAATGTGATCTGATGTCCTTTTCTGATATGTCTGAAGACAGCTAAATTTTA
CTCATATACATAAAATAAAGAATTCTTTAGAAAGAGAGAAAGGAAGGAGGCAAGGGAGGAAGGAAGGGAGAGAGAGAGAGAAAGAACGGAAGGG
AGGGAGGGAGGGAGGGAGGGAGGGAGGNNNNNNNNNNNNNNNNNNNNNNNNNNNNNNNNNNNNNNNNNNNNNNNNNNNNNNNNNNNNNNNNNNN
NNNNNNNNNNNNNNNNNNNNNNNNNNNNNNNNNNNNNNNNNNNNNNNNNNNNNNNNNNNNNNNNNNNNNNNNNNNNNNNNNNNNNNNNNNNNNN
NNNNNNNNNNNNNNNNNNNNNNNNNNNNNNNNNNNNNNNNNNNNNNNNNNNNNNNNNNNNNNNNNNNNNNNNNNNNNNNNNNNNNNNNNNNNNN
NNNNNNNNNNNNNNNNNNNNNNNNNNNNNNNNNNNNNNNNNNNNNNNNNNNNNNNNNNNNNNNNNNNNNNNNNNNNNNNNNNNNNNNNNNNNNN
NNNNNNNNNNNNNNNNNNNNNNNNNNNNNNNNNNNNNNNNNNNNNNNNNNNNNNNNNNNNNNNNNNNNNNNNNNNNNNNNNNNNNNNNNNNNNN
NNNNNNNNNNNNNNNNNNNNNNNNNNNNNNNNNNNNNNNNNNNNNNNNNNNNNNNNNNNNNNNNNNNNNNNNNNNNNNNNNNNNNNNNNNNNNN
NNNNNNNNNNNNNNNNNNNNNNNNNNNNNNNNNNNNNNNNNNNNNNNNNNNNNNNNNNNNNNNNNNNNNNNNNNNNNNNNNNNNNNNNNNNNNN
NNNNNNNNNNNNNNNNNNNNNNNNNNNNNNNNNNNNNNNNNNNNNNNNNNNNNNNNNNNNNNNNNNNNNNNNNNNNNNNNNNNNNNNNNNNNNN
NNNNNNNNNNNNNNNNNNNNNNNNNNNNNNNNNNNNNNNNNNNNNNNNNNNNNNNNNNNNNNNNNNNNNNNNNNNNNNNNNNNNNNNNNNNNNN
NNNNNNNNNNNNNNNNNNNNNNNNNNNNNNNNNNNNNNNNNNNNNNNNNNNNNNNNNNNNNNNNNNNNNNNNNNNNNNNNNNNNNNNNNNNNNN
NNNNNNNNNNNNNNNNNNNNNNNNNNNNNNNNNNNNNNNNNNNNNNNNNNNNNNNNNNNNNNNNNNNNNNNNNNNNNNNNNNNNNNNNNNNNNN
NCCCTCCTCCTAGCTTTCTGAAGCCAGTCTTCTCCGGTTTGCCTTCAGAACAAGATGTAAAACTCTCAGCTCCTTTAGCTCCATGCCCGGACTG
GATGCTGCCACACTTCCTGCCTTGATGATAATGAACTGAACCTCTGAGCCTGTAATCCAGCCCCAATTAAACATTGTCCTTTATAAGAGTTGCC
TTGCTCATGATGTCTCCTCACAGCAATGGAAACCCTAACTAAGACAGCAAGTTTAGCAGTAAATGGGGTGGCAGAGACAGGGTGATAGCAGGAA
ATACTTTGACATAGCTAGTGAGACAGCAGGTAATGACAGTAGCCAAACCAGCCTGATAAACAAACAGCTAGCCCAGAATGCATAGCACAGCAGC
AAAAACATTGGAGAACTGGCTCAATGACAAAGTGGAAGCAGGAAAGGCAATTCCTAAATGTTGTCATCTGATCACCATATCTGCACACTGAAGC
ACACACACACACAAATAAACAACACTTTAAAGAAATAAATATTACATGATGATTGCAACAACCACAGGCCATCGGAAAAGAAAGAGGAAAAAAA
ATCAATGGAGCAAAGAGACCAGGCTGCACACACAGGAGCAACATCAGGAGACCCAAATTCACCCAAATGTTCTCAATGTCAGCATGTTTGCATC
TAGGTCCCAACACTCTAAGGGGATTGGCAGGATCCCTGACCCCGACTCACTAAATACCAATAGGAAGCCCCAACCCCCACCACCTATAACAACC
TCAAATATCTCCTCCTGTTGGTCAATGTCCCGTGGAAGCAACATTACCTCTAGTTGAGAGGTACTGATCTCTAGAATCCAAAAGTGTGAGCATT
TCCAGAAGCTTTCCCAGCAAGCAACAAAAAAGACATGGTCTCACGGTCACCGGTTGTGGGGAAGATAGCTTGAGTGCCTTTAGGGAGGTTCATT
CAATGATAAACTCCACATACAGTAGTCAGGAGGGAAATGGAGAACGTGAAACTGAGAGCAAGCAAGGCTGAGCTGCACTCAAAATTCTACCTAC
AGAAGTCAAGAGCTGTGACCCATAGTTTGGGGTCTGTTCTAGCCAATAAGAGGCACAGGCTACTATTGCACTCGCTTCTAAATGAAAGTCAAAG
ATTACGGACAGAAAAAAAGGAAGAAAAAAAAGTAAAAAAGAAAGCAAGACCCGTCATGCACCTCCTCCCCAGTCACCTTTACCCCGACTCAGCA
AGGGTCCATCATGGAGACAGATGCCGCCCAAAAGGACCATCACAAAGGCCGGCCAGTGAACAAAAGTGCAAGATTGACTTGGGTTTGCCATTTA
CAGAACAATAAACGAAGCCTTTGAAGCACTCTTAAACAAAAGAGCCATTTGTCTATGCTGGTGGCTACAAAGGAGAACAGGATTGCAGCAGAGG
ACTAAGAAAAGAAAGAGAAAATGCCAAACTGAGATGTGCCTGGACTTTACCGGGTCCTGCCCAGAGACCTTATATGCCAGGACCTAAGATCTAA
AAGCCACTGGCTAAGAAAACAATCAAATATGCTTAATGCAATACAGGCAATGTAGGTTCTTGGCTATTGTGTTAAAAATATCTACTAATTTTTT
TTCCTTGTCAGCTGCTTTAATTTATGCAGTATGGGAAGGGATCACATCGGAAAACACAAGGGAAGAACAGAAAAGAAACACCGTACATTTTCAA
ATGCACAAAGATCTCATGCACTGCCTTCTGTTTCTGTGCCTATGAATTAGTGATGCTAAATTTTATCTTATTTTCTTCCCTGGTGGGGGGGGGG
GGGACGGCGGGGAGGGTGACTGTGTTCCTCTCTGTGGTGGCATAGCTGCCATTTACATGCCTGTGAGGTCCTCTTTTCCTTTAGCATGCCATGG
CTAGCTTGGTTTTTAATCTAACAGCGCTTCTTTCCAAATGATGTTTCTGCGGCAGACAGCTATTTATCATTGTCTTTGCTCTCGTCACTTCCCG
ACAGGACTCGTGAGAACTGAAGTAATTTTGAAATCGTAGCCCGTCCTTAGGGTCTCCTGCTTCTCTCCCGAGTAGGAGCTAGGTTTTTGATCCA
GTTTGTGTGGATTTAGTGACTGTTTTTATACATGGAAGGTTAGCTCAGTGGTGATGGTTGGGGGGGGGGGCTCTTTGAAGCATGCAGAAAAGAG
ATTCAAGAACATTGGGGGATGTTATCTAGTGGTTTTCTCCTTGTTGTTACAAGAGTGACTTTGGAGAAGAGGGGTATACTTTGGCTCAGAGTTT
GACGGAAAAATCTGGGATGGAAGAAGTCATTGTGGGAGCAGCTGGAAGCTTTGTCACTTCGGGAGCCTTGTCATACTCTAGCCAAAGTTAGCAA
GCAGGTTGGAGGGTGGGGAGACAGATTCTGGAGTTTGGCGCTTCTGTTTTATACCTTCTCTACCCACATTGTGAATAGACCTGACCCCTGGCTT
GACACAGATCACATTACTGTGAGTAGGTCTTCCTTCTACACATATACCTCTCTAGAAATACCCTCATAGGTAACACCAGATCTGCATCTCCTAA
GTGATCAAGTCGACAATCAGAACTAACCATCATAGGCAGGGCTGCAACACACCTTGAATCCCGTGACTTAAGAGGCAAACACAGGTGGCTCTCT
GAGTTCAAGGCCTGCCTGGTCTACAGAGTTTCAGGACAGTCAGGGAAACCCTACCTTGAAAAACAAAAAACAAAAAACAAAAAACAAAAAAAAA
GAAAAGAAAAGAAACACCCAAATTAAGCGTCTCAAGGATGACCGTTCTTGGTATGTTATTCACACCACATATTTGGACCTCCCCTCTTGTGTCT
TTGCAAACTAAGATCTTCGGCCGACTTGTTCATTCTAGCTGGGAATATACAGTTCAGTGACTGAATGAATCCTGACCACAAATGACGCCCTGTT
TCAATACTGAGCACACCTTCCTCTCCTTCCCATAACAGCCCTTTCTTTCTGGAGGTCTTCCTTTTTTTCTTAAAAATGTAAGAGCATCATGACT
GTTAGTATGAGACAGTGAGGTTCTGGGCACTGTGATTCTTAGTTTTTCATACTGTAAGAGGGAATGTACTCTCTGCCATCGGGACACCCAGTGG
AACTGCTCACCTGGAGTCTTGCCTCCACGAAGACTAGGATCTTCTGGAAAGCTGTGTGCTTTGGACATCTAACTCACATCCAGCAATAGCTCCC
AGAAAAGGACCTCAGAGTTACAACGTTCCAGAGGAACAAAACAGTGGGACATCTTCCACCATCTTCCAAAAGGAAACCTCAGAACAGAACAAGC
AACCTTTGTCCTTAGTAACCTTGTCCACAGACGCACGCATCGCTGTCATCCCAACACTGGCAAGTCCAACGCAAGCGAACAGCAAGTTCAAAAC
TAGCTTCAACTCGCTCCATAGTGAGCCCCTATCTCAAAACATCACCCGCTAACTATGTAGCTCAGAGACAAAGCCCTTGTCCAGTGTTTGAAAC
ACTCTCGATTTGATTCCCAACAATAAAAACAACAACATACACTCAGATACTCACACACACACACACACACACACACACACACACACACCCAACT
CCTTAAACACTAAAATTTAGTGTACGTAGAGTGGCACAGGAAACTCTAATTCCAGCACTACAAACCCTGAACCAGTTTTTATTTTAGTTAGAAG
CCATCCTAGGCTACCTTCTCAACAAGAACATTCCAATCACTACACTTTATTGACAAGATTATAAACTTGTGGCTTTCCTGTCCTTTTTAAAGTA
TTTTTTAAAATTTATTTTACAATGAAGTGGTACCCTTTCATTTCCTAATATGTAAAATGGGGATGTCCCCTACCTTCCTGTTACTTAAAAGCAA
CACCCCGGGTGATGTCATCAGGCTGGGGTACAGTACGGGCAAGTCCCCAAACCACAGGCTATTCCGCTACCTGGGTTCCCACACCTACACTGGA
CCGGCATGATTTGGACGTAAGATCTTAAAATAATCCATAATTACACCTTTTCAAAAAGGACCTTTTGAGGGTCAGCTCTACCCACTGTCATATC
TGTTGGTGCTGTCCTCTGTTTAGCGAGAGGCAGACACAAAGCGGGTGTGCGCAACCTCTAAGAGAGTAATAGTAAAGAGACAAGCCTAGGAAAT
CTTCCCCAAGAGGCCTTTTGGGGAAGGCTATCCCCCCTTCCGTGGATGTTGAATACCTTGCCTGTTGCTCAGATGCAGTCAAGCATCTGATGAT
GCTTGAGGCATGATGCTGAGACCACTGTGTAGGTTGGTACAAATTCCCTTTCTATTATACCCACCCTTATGCAGTTATTTGGGTTTAAATTTTC
AACGTTTTAAAAAAAAAAAAAAAAGTATTGCCGGGCAATAGTGACGCAGGCCTTTAATCCCAGCACTCGAAAGACAGAGGGCAGCCACATCTCT
GAGTTTGAGACCAACCTGGATCGTCTAACGCCTTGA&CTCAAGAGATCTATCCACCAGCTTGTATCCCATTTAATTGAGTGATTTGTTTGCTCT
CTCTCTCTCCCGCTCCCCCTCTCTCCCCCCTCTCCCTCCCCTTTTTCAGTTCTTTATTTATATTTGAATATTATCTCTCTCTCAGATGTGTACT
TGGTGACGGTCTTTTCTACAAAGGATTATCTCTTTCATGACACGCCATTTATTAATCTGCTTGTCCCTCGACCTTCTCTACAGTAGCGTCACCT
GATCCTCTAGCTTCTCCATCCCAGATGATTGGGATTCAAGGCATTCATCACCACGCCTACCTAAAATTCCAACCTTTTAATAAAATGGCTCTCT
AAAATATTTTGGCAAAGGAATCTCACTCTTTCTCTTCACTAATATAGTTCAACCACCCAATTCGTAAGCAGTCGGGCTGAGGGTGAGCATCCTT
AAGAACATAAAAGCAAAATTTGGAGGCTCAAGATTCAGTTTAGTTGCTAGAGGGCTCACATAGCATGCCCTCCCCACCCGGGATTCCATTCTCA
TTTATCGAGGCATAAGGCCAGGTGTGGTGGCATATGTGCTGGCATCCATAAGATCTTTTATAAACAAGAGGAAGAGGAAAAACAGTTATACAAA
ACTAATAAAACTGTGTGAGTTTCAGGCTAGCAAAGAATACTCCTGAGAATCTCTCTCAAAAAAAAAACCCCAAAATAATAATAATGATAATAAT
GATAATAATAATAATAATAATAAAACAAGGCAATAATAAGCTAATGCTCCTGCCTTGCATTCTGACTCCTTTTGCCCAGTAAAATTCAATGCTC
TGCTTTGACACGTCCAGCTTACAACACGACAAAGGTGTGAGACATCGGTGCTAAAACTTGTTCTATTGCCTTTCCGTTTCTGTTAGATCTCCTT
CACTTGTATACCTGTGACTCATTCATTTTCCCCATCCACAACTAGGGCTCTCTTTTGGGTGACTCTCAGAAAGTAGGCATCGGTTCATCTACTC
CCCCTCTTTGCAACTGAATAGCCACCTCTGAACCATTTTTTTCTCTAGTAATTTCTCTTCCTTTGCCTCCTTTGCAGCCTAAAAGAGTCATTTA
AAGGATGACCGGAAGCTTGTCTTAGGCAAGGAAGCATCTTCCCAGAACCTGCAAACCCTCCAGCCCTGCCCCCATCCCACCTCCGCCCTCGTTG
GCTTCGCAACGCTGTGGTCTCTGTGGCCAGTAGAGGGCACACTTACTTTACTTTCACAAATCCGAGAGCCACAACCCGGGTGGTGGGGGGTGAG
GGGGCGGGGAAAGAGTCTCTGCAGCAAAACGCAGACTAGGGATTGGTGGCTCTTGGTGTTTGAGGCAAAATCCTAGAGGCTGTAGTCATTTTCC
AATCCTTAAAGCTGAATTGTGCAATGAGCTCGATGAAGGAAGATACTATCATTCAACAGCTGAATCCTAAATTGCAAACTCAGTGGCTAATAAC
AACTTTGAACAATGAGCACCTTATACACGCTACTGTATTTTCTTTTCTTTCTTTTTTTTTTTTTTTTTTTTTTTTAAACCGGGTAGCAGTGAGA
GAGGTTTCTTTAAGTGCCTTGGGGCGACGAGTCCGGAATAAGAAGACTTCTTTGGGTTTTAAAGTGTAGGATAAGCAAATCCCGAGGGAATATC
CATTATATAATAAATCTAGAACCAATGCACAGAGCAAAAGACTCATGTTTCTGGTTGGTTAATAAGCTAGATTATCGTGTATATATAAAGTGTG
TATGTATACGTTTGGGGATTGTACAGAATGCACAGCGTAGTATTCAGGAAAAAGGAAACTGGGAAATTAATGTATAAATTAAAATCAGCTTTTA
ATTAGCTTAACACACACATACGAAGGCAAAAATGTAACGTTACTTTGATCTGATCAGGGCCGACTTTTTTTTTTAACTGCATAATTACGATTCC
AGTAATAAAAGGGGAAAGCTTGGGTTTGTCCTGGGAGGAAGGGGTTAACGGTTTTCTTTATTCTAGGGTCTCTGCAGGCTCCCCAGATCTGGGT
TGGCAATTCACTCCTCCCCCTTTCTGGGAAGTCCGGGTTTTCCCCAACCCCCCAATTCATGGCATATTCTCGCGTCTAGCGCCTTGATTTTCCC
CACCCCAGCTCCTAAACCAGAGTCTGCTGCAAACTGGCTCCACACGGGCAAAGAGGATTTGCCTCTTGTGAAAACCGACTGTGGCCCTCGAACT
GTGTGGAGGTGTATGGGGGTGTAGACCGGCAGATACTCCTCCCGGAGGAGCCGGGTAGAGCGCACCCGCCGCCACTTTACTGGACTGCGCAGGG
ACACCTACAGGGGAAACAGCCGCCTCCACACCACCCGCCGGGTGGAAGTCCGAACCGGAGGTGCTGGAGTGTNNNNNNNNNNNNNNNNNNNNTG
ACGCGGTCCAGGGTACATGGCGTATTGTGTGGAGCGAGGCACCTCTTCCACCTGCGGTGACTGATATACGCAGGGCAAGAACACAGTTCAGCCG
AGCGCTGCGCCCGAACAACCGTACAGAAAGGGAAAGGACTAGCGCGCGAGCAAGAGAAAATGGTCGGGCGCGCAGTTAATTCATGCTGCGCTAT
TACTGTTTACACCCCGCAGCCGGAGTACTGGGCTGCGGCGCTGACGCTCCTCCTCCTCTTTCCCCGGCTCCCCACTAGCCCCCCTCCCGAGTTC
CCAAAGCAGACGGCGGCCAAGCGACACCAGCAAAAAAAAATAGAGAGAGGTGGGGAAGGGAGAAAGAGAGATTCTCTGGCTAATCCCCGCCCAC
CCGCCCTTTATATTCCGGGGGTCTGCGCGGCCGAGGACCCCTGGGCTGCGCTGCTCTCAGCTGCCGGGTCCGACTCGCCTCACTCAGCTCCCCT
CCTGCCTCCTGAAGGGCAGGGCTTCGCCGACGCTTCGCGGGAAAAAGAAGGGAGGGGAGGGATCCTGAGTCGCAGTATAAAAGAAGCTTTTCGC
GCGTTTTTTTCTGACTCGCTGTAGTAATTCCAGCGAGAGACAGAGGGAGTGAGCGGACGGTTGGAAGAGCCGTGTGTGCAGAGCCGCGCTCCGG
GCCGACCTAAGAACCCAGCTCTGCAGTCAGAGCGGCTTTCCCTCCCAGCCTGCCGCCCACTCTCCCCAACCCTGCGACTGACCCAACATCAGCG
GCCGCAACCCTCGCCGCCGCTGGCAAACTTTGCCCATTGCACCGCGCAGACACTTCTCACTCGAACTTACAATCTGCGACCCACGACACGACTC
CCCAGGCTCCGGGGAGGGAATTTTTGTCTATTTGGGGACAGTGTTCTCTGCCTCTGCCCGCGATCAGCTCTCCTGAAAAGAGCTCCTCGAGCTG
TTTGAAGGCTGGATTTCCTTTGGGCGTTGGAAACCCCGGTAAGCACAGATCTGGTGGTCTTTCCCTGTGTTCTTTCTGCGTCTTGAATGTAGCG
GCCGGTTAGGACAGTCTTTCTTCCATTCCTGTGCTTTTGACACTTTTCTCAAGAGTAGTTGGGCTACGCTCGGGTACATCTCAGTCGGGGTAGA
GCGACTTGTCAAGATGACAGAGGAAAGGGGAAGGGAAAAACCGGGATGCATTTTGAAGCGGGGTTCCCGAGGTTACTATGGGCTGACGCTGACC
CGGCCGGTTGGACATTCTTGCTTTGCTACATTAATTGATATGTGTCCTTTGAGGGGTCAAACCGGGAGGTCGCTTCGTGGTGGCCAAAGAAAGC
CCTTGGAATCCTGAGGTCTTTGGAGAAGGGATTACCTTTTGCGTTTGGGAGCGAGAAGGCTCCGTAGCTTCTGACTTACCAGTCTCTGAGAGGC
CATTTAAATTTCAGCTTGGTGCATTTCTGACAGCCTGGGACCGACACGGAGGTGCGTCCCGCCCGCCAATCCCCGGCGGCGATCGCAACCCGTC
CCTGAGCCTTTTAAGAAGTTGCTATTTTGGCTTTAAAAATAGTGATCGTAGTAAAATTTAAGCCTGACCCCCGCGGCACTAGGACTTGATGTTG
GGCTAGCGCAGTGAGGAGAAGCAAAATTGGGACAGGGATGTGACCGATTCGTTGACTTGCGGGAAACCAGAGGGAATCCTCACATTCCTACTTG
GGATCCGCGGGTATCCCTCGCGCCCCTGAATTCCTAGGAAGACTGCGCTGAGTCGTGATCTGACCGGTTCCGTAACAGCTGCTACCCTCGCCGC
GGAGAGGGAAGACGCCCTGCACCCAGTGCTGAATCGCTGCACGGTCTCTGGTGCAGTGGCGTCGCGGTTTAGAGTGTAGAAGGGAGGTGTCTCT
TATTATTTGACACCCCCTCCCCTTTTATTTCGACACGCTTGTCATAGCCGGAGACTGAGCTCTCTCCTCCAAGTCAGCAATCGGAAACAAAAGC
CGGCAAAGGAAGGAAGGGGGCGCGCTGGGGGTGGAGAAAGAGGAGGGCGGAGAGGGGCGCCGCCGCCGGCTCCGTAGGAGCGCGGCGACGCCGC
GAATAGGGACTCGGACCCGGTCGGCGCCGCAGAGACCCGGCACACGGGAGGGGGCCGAGCGACGCGGCGCCTCTCGCCTTTCTCCTTCAGGTGG
CGCAAAACTTTGCGCCTCGGCTCTTAGCAGACTGTATTCCCTACAGTCGCCTCCCTCAGCCTCTGAAGCCAAGGCCGATGGCGATTCCTGGGCG
TCTGCACGGCTAAGTCCCTGCTCGAAGGAGGCGGGGACTCGGAGCAGCTGCTAGTCCGACGACCGTCACTGATAGTAGGGAGTAAAAGAGTGCA
TGCCTCCCCCCCAACCACACACACACACACACACACACACACACACACACACACACACACACTTGGAAGTACAGCACGCTGAAAGCGGAGTGGT
TCAGGATTGGGGTACGCGCTGCCCCAGGTTTCCGCACCAACCAGAGCTGGATAACTCTAGACTTGCTTCCCTTGCTGTGCCCCCTCCAGCAGAC
AGCCACCACGATGCCCCTCAACGTGAACTTCACCAACAGGAACTATCACCTCGACTACGACTCCGTACAGCCCTATTTCATCTGCGACGAGGAA
GAGAATTTCTATCACCAGCAACAGCAGAGCGAGCTGCAGCCGCCCGCGCCCAGTGACGATATCTGCAAGAAATTCGAGCTGCTTCCCACCCCGC
CCCTGTCCCCGAGCCGCCGCTCCGGGCTCTGCTCTCCATCCTATGTTGCGGTCGCTACGTCCTTCTCCCCAAGGGAAGACGATGACGGCGGCGG
TGGCAACTTCTCCACCGCCGATCAGCTGGAGATGATGACCGAGTTACTTGGAGGAGACATGGTGAACCAGAGCTTCATCTGCGATCCTGACGAC
GAGACCTTCATCAAGAACATCATCATCCAGGACTGTATGTGGAGCGGTTTCTCAGCCCCTCCCAAGCTGGTCTCGGAGAAGCTGCCCTCCTACC
AGGCTGCGCGCAAAGACAGCACCAGCCTGAGCCCCGCCCGCGGGCACAGCGTCTGCTCCACCTCCAGCCTGTACCTGCAGGACCTCACCGCCGC
CGCGTCCGAGTGCATTGACCCCTCAGTGGTCTTTCCCTACCCGCTCAACGACAGCAGCTCGCCCAAATCCTGTAGCTCGTCCGATTCCACGGCC
TTCTCTCCTTCCTCGGACTCGCTGCTGTCCTCCGAGTCCTCCCCACGGGCCAGCCCTGAGCCGCTAGTGCTGCATGAGGAGACACCGCCCACCA
CCAGCACCGACTCTGGTAAGCTACCCCATTCACAGCAGGGTAGGAAGCCAGAGGTTGGATGGACCTCCTTCTCCACCACTCATTGGCATTAATT
CAATTGGCCTCCGGGGCTCCCCCTTTCTTTCCCTTCTGTCTAAGAGCTCTTCATCCCTGGATTCCCGTGNNNNNNNNNNNNNNNNNNNNNNNNN
NNNNNNNNNNNNNNNNNNNNNNNNNNNNNNNNNNNNNNNNNNNNNNNNNNNNNNNNNNNNNNNNNNNNNNNNNNNNNNNNNNNNNNNNNNNNNN
NNNNNNNNNNNNNNNNNNNNNNNNNNNNNNNNNNNNNNNNNNNNNNNNNNNNNNNNNNNNNNNNNNNNNNNNNNNNNNNNNNNNNNNNNNNNNN
NNNNNNNNNNNNNNNNNNNNNNNNNNNNNNNNNNNNNNNNNTCACGAATTTCATTTGGGTTTTTAAATCTTCTCGCTTATCTTTCAGCTCCATC
CACTCCCTTTACCCCTCCTAAGCATTTTAATTACCCTGGGAAGGGTGTGAATGAGGATAAAGCAACTGATCTGGAGGGGGGTGAATTACCTGCT
TCTTTTCTTGACTGCCAGAAGAATATTTGAATTTAATGCATACGTTTGTCTAAGACCCAAGAGAACCAATGACAGAAGCTGGGACAGGCTTTAT
AGCCTTACAGCCAGGCACTAGTGAAAGTTCCTAAAGAATTGAAGAGCTGGGCTCTTTTGGGTGTTTTGTTTTGCTTTGTTTTTTCGTCCTCTTT
TGAACACTTCAAACCAATTCTGTTCAATTTGGACTTCTCCCCCCGTCCCAACACTCCCCCAACACCAGCACCTTTGGCAAAGCTGCAAGAACTT
TTTTTTTTTTTTTTTTTTTTTAATTGTGCTTCCAGTAAAATAGGGAGTTCCTAAAGTcATAGCAAGAGATTTGCAGCTATCGCTCACGGGAGCT
GAAAGGTTCTCGGTAAAGTCCCTTAAAAATAGGAGGTGCTTGGGAAATGTGCTTTGCTTTGGCTGTGTCTGAAGCCTCATTAAATCTTAGGTAA
GAATTGGCAAGGATACCATATCCTGGTACATGGTAATTTTCTCACCTCTCCCCTAACCCTGTTCTGCCTTTCTGGCAGAAGGCAACATGGTGTC
TGGATCTGATTCTTACTTTCTTCCCTTTCCAACTTGGTATTTGGATAGCATCGGTCAAATCCTATGTATAGCCTCCGGGATTCAGGAGGCGTGG
CTAACTGTGATCTTCCACTTCCTCCCTTACAGAAGAAGAGCAAGAACATCAGCAACAAATTGATGTGGTGTCTGTGGAGAAGAGGCAAACCCCT
GCCAAGAGGTCGGAGTCGGGCTCATCTCCATCCCGAGCCCACAGCAAACCTCCGCACAGCCCACTGGTCCTCAAGAGGTGCCACGTCTCCACTC
ACCAGCACAACTACGCCGCACCCCCCTCCACAAGGAAGGACTATCCAGCTGCCAAGAGGGCCAAGTTGGACAGTGGCAGGGTCCTGAAGCAGAT
CAGCAACAACCGCAAGTGCTCCAGCCCCAGGTCCTCAGACACGGAGGAAAACGACAAGAGGCGGACACACAACGTCTTCGAACGTCAGAGGAGG
AACGACCTCAAGCGCAGCTTTTTTGCCCTGCGTGACCAGATCCCTGAATTGGAAAACAACGAAAAGGCCCCCAACCTAGTGATCCTCAAAAAAG
CCACCGCCTACATCCTGTCCATTCAAGCAGACGACCACAAGCTCACCTCTGAAAAGGACTTATTCAGGAAACGACGAGAACAGTTGAAACACAA
ACTCGAACAGCTTCGAAACTCTGGTGCATAAACTGACCTAACTCGAGGAGGACCTCGAATCTCTCGTGAGAGTAAGGAGAACGGTTCCTTCTCA
CAGAACTGATGCCCTGGAATTAAAATGCATGCTCAAAGCCTAACCTCACAACCTTGGCTGGGGCTTTGGGACTGTAACCTTCAGCCATAATTTT
AACTGCCTCAAACTTAAATAGTATAAAACAACTTTTTTTTATGCTTCCCATCTTTTTTCTTTTTCCTTTTAACAGATTTGTATTTAATTGTTTT
TTTAAAAAAATCTTAAAATCTATCCAATTTTCCCATGTAAATAGGGCCTTGAAATGTAAATAACTTTAATAAAACGTTTATAACAGTTACAAAA
GATTTTAAGACATGTACCATAATTTTTTTTATTTAAAGACATTTTCATTTTTAAAGTTGATTTTTTTCTATTGTTTTTAGAAAAAAATAAAATA
ATTGGAAAAAATACAATTGGGCCAACTTGTGTTTTCTTTTTCCTCTTCCTCAAACTTCCTTTCCTCAATTACAGATTAAAAGAATTTGACCATT
TTCACAGGGTACGTTTACAAATATGGGAAGGGGTTATCATTGTTAAAATGGGGCTGGGGGTCCTCAGGATTTCTAAGTTGTCTACAGGATGCTT
TCTGTGGATAGTAATAAAAACCAGAGCTGTTAGTTAGGAATGGGCAAAAGGCAAGTGAGAAGGCTAGATGCAGGGAAGGGAAAAGCAAGAGGTT
AAAGATAACAGCTAAATATACAGGAGGAAGAGATGGCAGAATCTCCTACAGTTAACCGAAGCCATTCCCTGGTTCACCTCAACGCAAGGACTCT
GCCCTGCCAAAGAACTGGTGAGGGGAGGGAGAGAGAACCACCCTTTGTTCCTTGCCTCTTGCTCCCAGGTGATAGTCCCTTCACATCAGTATCT
CCTATGCTTCTGAAAAAAACAGAGGAACAGCATTACCACTGCTAAGTTGATCCTGCTTTTCCAAACAAGGACATACAAAGGTTCAGAGGGTTGC
AGAGCTTAATGGGTACCAACACAACAAAAATAACCCAGGGCCCCTGTCTTCAAAACAAGCCTTGCTGCCTTGCTTAGTTGGGTGTGCTTCCGCT
GGTTAGGGGTCTGAGAATGAGCGCTACAGGCTCCATTAGGAGCTTTGACAGAGTGCCACGAAAGAGGTACTATGATCTCTTTATACCTAGTACA
GGTAGAAACAGACATGAAATAACCCATCCATGCACCCAGGGGATTCAAAACCACTTTATCCTTAGTGCATCCAGGAGGAAGATCCTAGCTACGA
ACGACAGGGCAGGAGTCATTAAAGCTTCACTACTCAAGAACTGGTAGACTTCAGTTCCCCTCCTTCTTTGTGGATTGGGGGGTTGGGGTGGAGG
GTGTTGTGTGTACTCACAGGCACATAGCTCACTCCTACCTTACCCACTTACTTTTTAACATCAGATCCCTGCTTGCTCCTGGCAACAACCCAGT
TTAGAAGTGCTACTGGTCAGATCATAAAATAAAACCTTGTTTTACATGAGTCATTATTTTAGAAATTGCAAGCTCGCCTTCCTCCCAAGCACTT
TCACACACTCATGACACACGCTCATCAATGGCCCATGAGAAAGCCTTTTGGAACAGGTATCTTATTAATTATAAGCCTCTGAAAAGCCACAATC
CAAACCAGAAACTGAAACATGTACGTAAAGTCCAGGGAGAAAGGTACCCTAAATGTCCTAAATGACCCCATTGTCTCAGAGAAGGTCTCTACCA
TCCTGGAGTGTCTTTGGGACTTTAATTCACCATCATTCATAAACCAATAAGTAATTACTATCTTTGACACCCCCCCCCCATGATCTATTGAAGC
GTTTAACATTTAGTTTTTGATCTTATTTTTGGCTCTTTTAGACTCACCCTCAGCTTCAAACTGTTACACCCTCTATCCTACATTCAAAAGAAAA
CACAAACCCCAGTAGTAGTTTGAAATACTTTGAGTAGTTCAAAGGATTAGCAAAACGCCCGAGCACGGGGTGCTCTTAAATAGTTCGCTCTTTT
TCCCCTTTGTGACCCTAGGCTGGAGTGCAGCCCTGGGGTGACTCACTTCAGACCTGGGAAGGTGTTAGGTTGAATCACTCAGTCCAGGCAAGCC
CAAAGAATAGAGGAAAGCATTCCTCATTAGGAAAACAACTCCTGTTCCAAATGATCAGGAAACAAGTTTAGAGATTCAGATTTGGCTGTGGGGA
TGGAATCGAAGTATCACAGCTCCCTATCTGGGCACTTCTCAGCTTTACCAAGCCAGGGAATCGTCTGAAAACAGGACATCGGCCAGCTTCCTTC
CAGAAAGTCAGGCTGATCTTGACCATAACACAGGAAGGCTCTCCCAGCCAATCTGCAGTCCCAGGGGTCTGCAACATTGTGCAATCAAATTTAT
AGATAACAATCACGATGAGGGGTGAAGTGGGACGAGCTTTCAGCTTGGTCTGGGATATACAAGAATTACCTACTCTCTTCTGTTGTTCACCCAT
GACACTGGAACTCAGTTTCCCCGAGAGGATCCCTGGGATGGTGCTCTTCAGGATAAACTGAGTGAGGAGGAAGTGTGACTTTATCCTATCATTC
GGGGACAACACTAAAAAGCAATCAATTACACTTTAAGTTGAACAAAAGTTTCACAATACCAGGATAGTGCTTCAGTCATCCAAAGCTTGAACAC
GTATGTAGAGTCTTCTGCTGTTCTTTAAGATGGACTTTGGCACTAACCTTGGAAAAGAGGGCCAAAAAACCCACCCCCCAAAAACAAACAGAAC
AAAAAACGTGAGGGGATTTTCTCTGGTTTGTTTACAATAAGAGATGAGTCACAATAATGATTTTTTTTTTTTTTTTTAGCATGACTGCTAAGGA
ACCCTGAAGCATTTCTTCCCAACAAAAACTAATCTTTAGGTTATAACATGCTGGAAGATGAGCTTCAAGCCTGTCTATAAATACATCACTGGGT
ATCTTCAGGGAACAAACTCTTCACTTAAGGTTAGAGACCATCCTGGATCGATTTCAAGAACAGAGGTTTATTTTAAACAATCAACCCTGCGCTA
GAGATGTCGTTCAGTGATAAGACACTTGTCTAGCATGTATAAGGACCCATGCTTGACACCACAGGAATAAATAAAACCAAAAATGAGGTTCCTA
CTCATTCCCCAAACTTTAGCAATTTTGGTGGTGGTGGTGGTGGTGGTTCGACGTCTTTCCAGAGAAATCCAACAAACATGCCAATTTAGGGAAA
CATCTAGCTCTAGCGACTTTGCCAAACTGGTGTGAGTTGACTCAATGACTGAGTGGATTTCCTTTTTCGGTTTTACTTCACTCAATATTGGTCT
ACACTAAGCTCTTTAGGAAGACAGGGTTGAGAGAGGAACAAGTGTTAATGGGATGTAGATCCTCTGAGGCTGAAAGGAATGTCCTTTGTCTCTA
AACAATGCCGAGGGGCTCAGGAACACTCTCTTCCAGTCTTCACCCCACCATCTCATTAAAGGCTAAACTCTCCAGTTCCGCTCTATATGCCTAG
GAAAGAGGAGCTTTGGGGAAAGCTCTGTCAGAATATACCTGCTTTCTGCAGGGGGCGGGAGGACCCGCACAAACAACTCAGCTGGAGAACAATT
GTTAGATGTGACAATACTGAAGTTTGTACACAGACATGTGAAATTGCTGGCCTGAAGTCACATAAGCACTAACTAACGATAATAGCAATTAATG
TTTACTGTGTGCTAAAAGTTTGACATACATTATCTCCTTTTATTCCCAAAGCAACCCCCTATACACACACACACCTCCTTTTTGGTTTTGGTTT
TACTTTTTAAATTTTACTATTAAATTTTAAATATGTTTTTTTTTTAAATTTACTGCACTAGAGAGGGAACCTAGAACCTCCTGCATGCAAGGTA
AGTGATCAATCCGTGAGTCACATCTCTATACAGATTGTAGGTTGTTTCACCAAAAGTATTAGGGCATTTCCTACAGAGTGGTCGAAGTTCGAGT
CCTGGGAACATGGAATAAGGATGGAATCCAGTAAGTCTTGAGAAGAAGCTAAAGGAGAAAATCTCAGCAGCAGATGGCAGGGAAGCAAAAGAAG
AAGGAGAGCTAAAACCAACAAGCTAAAACCAAAAACGCTTGCTATTTGAACTGTGCCTAAGGTAGCACGAAGTACAGCAAGGATCCACTGGCTT
AGTGAGGGAATCCTTCTCTAGGCCTCTCCTATCCACTTCCCCTTCCACCCACTATCCTCCTACTCCTTCATCTCCTAGAGACAACTGCCCATAG
GTAGTTAATTAGCTGTCCCACCACCCAACTCTCCTGCAGTACTTTGGTTCTGTTTATTTGTTTTGGCAATAGGATCTCATTAGGCAGGCCATAC
TGGCCTCAAACTCTGGAATTTCTTCCCTCAGCCTCTTAAGTGTTCTGTTGGGATTACCACTTTGGGACACTTATTCTCCAGCTTTCATGCAGGG
CTTTATTCAGGAATTTCCACTGTGTGATTCTACGATGCAAATACTAGTTCTCATTCCCTGAGGGTTTAATTGTTGTTGTTGTTTCGTTAGTTGC
TTGGTTTTGGGTTTTGTTCATTGGGTTGGTTTGGGTTGGTTTTGGTTTTTCAAAACAGGGTTTCTCTGTGTCTGAGAACCATTGTCTTTTCTAC
CACTGCAAACCCAACCATCTTTTCAAACCACTGGTAAGCCAAGTCCTTTCTGGATTAAGTCTGAAGCCATTCTCCACTCCTATTCGATACACTT
ACTACCTACCACAAACACGGCACCCTGGCAGCCTCAATGCCAGTTTTGGCCTTCTCCTTGTATGCTTGCAGACCACTTGTCTTCATCATCAGAT
CAACCCCTTGAAGAATGGAAGTTCATTGGTCTTGCTTAATCATGCCTGACAAGAAAGTGCAATTCACTAATTCTGTAAACATCTAAGTGAAGGG
CTCTTTGATGGGCTCAATGGTGCATCAGACCTGAGTAAGGGGTGGAGTAGAAGCAAAGTTGTTTCAAGTTGCATAGCGAGAAAGGTCAAGGAAA
GAGATGGGGGTTCATCAGGTGAAGGGAAGGATTTTGATTACACTTGCTTTGCTAGATTTGGTTTTTCAGCTGAAAAGACAGCAAGCCTAATTCA
TTTCCATGATAGTAGGCTAGACTTGAGAGGGAAAGAACTGCTGACACAAAAGGAGGGGAATTGTACTGACTCGTTTTGTGTGTGTGTGTGTGTG
AGTGTGTGTGTGTGTGTGTGTGTGTGTGTGTGTGTGTGTGAACTTGACACAAGCTCGAGTTATCACAGAGCCTCACTTCGGGAAAAGCCTCCGT
GAGATCCAGCTGTAAGGCATTTTCTCAATTAGTGGTGAAGGAGGGCCTATGTGGGTGGTGCCATCCCTGGGCTGGTAGTCTTGAGTTCTCTAAG
AGAGCAAGCTGAGCAAGCCAGGGGAAGCAAGCCAGTAAGTAACATCCTTCCAAGACCTCTGCATCAGCTCCTGCTTCCTGACCTGCTTGAGTTC
CAGTCCTGACTTCCTTTGCTAATGAACAGCAGTGTGTAAGTGGACAGTGAATAATCCTTTTCTTTCCCAACTTGCTTTTTGCACATGATGTTTT
GTGCAGGAATATAAACCCTGACTAAGACAAGAATCAAAGTGTCTAGTCACGTCAGTTACTGCACCGGTACGTAGCTTTGTTTTGCTTGCTTGAT
GTCTGGAGCCCTCTCTTACCTGCGTATGCCTAAACAAATGAAAAAAGAATATGTTCCCCCTACTTAGGTAACTATTCTTCCAGGTGGTGATGTC
ACTGGCCAAGCTGTTCTCCCTTGGCTTCCCACAGCTCTCTTCCTATACCAGATACCATGTCCATCTTTACACAAATGACTCTAAACCTCTTCTC
TCCACAGACACCTTCAATCCACATGAGATAAAGCCTCCACATTTTGTAGCTCTGGCTGACCTGGAACTCACTATGCAGACCAGCCTTGCATTGA
ACTTTCAGAAATCTGCCTATATCTTTCTTAGAAGTGCTAGGACTAAAGGCATACACCACATTTAGTCCTGCTAAACTTCTTTTTTTGTTTTTTT
GGTTTTTTCGAGACAGGGTTTCTCTGTGTAGCCCTGGCTGTCCTGGAACTCACTCTGTAGACCAGGCTGGCCTCAAACTTACAAATCCACCTGT
CTCTGCCTCCCAAGTGCTGAGATTAAAGATGTGTGGTACTACTGCTTAGACTGACACACAAAATATTGTTGAAGCCAGTGAGATAAAGCTCACC
TTCAATCTCAGAGGTAGGCCAGGCAGACTTTTGTGAGTTCTGGCCCAGCCAGAGCTTCATATGAAAAGTAATAATAATGATAATAATAATAATA
ATTTTAATAAACAAATGGGTGTATGAAAGAGTAAATGTGCACATATTTCTGGCATCTGTTTTAAGATTCTACTTCCTTAGGCTGTCAGTCATTC
TCACCCCATTCAACCCTTTGCTCTGCACTGTGATTGACAAATCTTCTCTCCCTCTGGTGACTACCTAATTCATCCCAGACAGCATCAGCCTTGG
CAACAACTTCTCTATGCAGGGACTGTAAGTTCCAGACAACAGAAACTCTGTTCCAATTCACAAAATCAACTAGGAAAGGAGAAGAGACAGAGGA
CAGAGGAAAGGAAGGAAGAAGGGAGAAAAGGAGGGAGGGAGGGAGCGAGGGAGGGAAAATGTCAATTTATGCAACTGTTTCATGATTCATCCAA
CGATCCTCTCTGATTCTTTTTTCCTTGTTGTTGTTTTTGTTTTTTCGACACAGGGTTTCTCTGTATAGCCCTGACTGTCCTGGAACTCACTTTC
TAGACCAGGCTGGCCTCGAACTCAGAAACCCACCTGCCTCTGCCTCCCAAGTGCTGGGATTAAAGATGTGTGCCACCACGCCCAGCTAAACCTC
TTCCTTCTAGCCAGAAGAACACAGCAGAAAGAACTATGATCAGTCTTCTGGAACCATGTGCTTACCCTTAAACCACACAATTCACTTGGTTCCC
AGGACCACACTCCTCCTGCAAAAGTTGGAACCCTGTCATTCTCAGCTTCTGAGGCAAAGGCAAGACCTATCCAAGATAAAAAACCAACAACAAC
AAAAAAGTCAATATAAGAAAAGAAAAAAATGTTCTCTAGATACATTCTGGGTAGTGATGGTTCTCACTGTTCAGAGATATAAGAAAACACCAGA
TGCTTAAAACCCTGACTCTTGAGAACAACTTTTGATAAGAGACACTCCTTTTTTTAAAATTTTATTTATTTATTTATTTACTTACTTATTATAT
GGTAAGTACACTGGTAGCTGTCTTCAGACACTCCAGAAGAGACTATCAGATCTCATTACAGATGGTTGTGAGCCACCATGTGGTTGCTGGCATT
TGAACTCAGGATCTTTGGAAGAACAGTCAGTGCTCTTAACCACTGAGCTATCTTACCCAGCCCCCCACCCACCCCCCCAACCCCCTTAAGAGAG
ATTCGAATGGTCCATCTTAGAGGTATTGAAATTGAGTCTGAAGTGGGAGGCCTAGGGGCTGTTTTGAGCCAACTCAGCCCAGGTGATTTGCAGT
GAGGTGGGAATTCCAAGGGCAAACAAGCATCAGCAAAAGCTATACCCCTCTACCACAGATTTGCAGAGAATTCAGATGGGAGGCCTGTTCCAGC
CATTGCTCAGTAAGTAAGCAAGAGTCTAGCTACCTCTTCATCTCCCTCCTTCTACCACACCATTAAGTCCCTCCAGGCCATCAGCCTCAATGAT
TCTTTCTTTTTTTTTTTTTAATTAGGTATTTTCCTCATTTACATTTCCAATGCTATCCCAAAAGTCCCCCATACCCTCCCCCTCCACTCCAACT
TTTTGGCCCTGTTGTTCCCCGCCTCAATGCTTCTTGGCTCTATCCATGTCTCCTTGCCCACTTTCCTTCTGCCAACCGATATTCTTTACCTGGG
ACTCTCTAGCAGATGCCAACTCCCTGTCTCTCATCTGGTTTCCTCAAAGGTAGAAAAATGGTCTCCCAAATAAGCCCGATCAGTTTACTCCCTG
GCGTAGGAGAACTTGATGATTCATGTGCTCTGCTTCTAAAATACAGATCTGTGGGCCTGGTAGTGCAGATGTTAATCCCAACTACTCTACTTGG
GAGGCCTAGGGAATGGACTCCATGTTCAAGGTCTGCCTGGACAGCAAGATGAGTGCTGGGGAAGCCAGAGAAAATGAGTAAAACTTTCTCAAAA
GTAAACCATTATAAAAACAAACAAACAAAGCTCCAGAGAACTCGGGAGATGATTGGCTGGTTAAGAGTACTTGCTCTTCTGCATGGGACCCAAG
TTCAGTTCCTAGAAGCCGAGTAGCTTGCACCTTCAATTATGGCCCCCTCTTCTGTTTTCTCAGGACCAGGTGCACACAGTGCATATAACATACA
TGTAAGCAAAATACTCACACACATAAAATTAAAAATAAATAAATCTTTCAGGCAAAACTGACCTGGGATATAGCTCAAGGATAGAGGATTTGCA
TGGGATGCTAGCAGCCCTGACTTCCATCTACAGTCCAGAAAGACAAGTAAATCAGAAATGCCTTTGAGGGACTGAAGAGATGATTCAGAGGTTA
AGAGCACTGGCTGCTCTTCCAGAAGACCTGGGTTCAATTCCTAGTACCTGCATGAGAGCTGACTCCAGTTCCAGGGAATCTGACCCTATCACTC
AGACACTGTTCTTGTCATCTGCACACGGGATGATCACACACATATCATTTCACATGTGGGGATACTGAGAATGAGAGTCAGCAGGTAACTGTCT
CAACTTCAACTAAGCAGGGCAGTTTGTTAGCAGGGATGGAATCTGGATTCTTATTGCCCCCCAGCTTCTTCACTTCCTGCTGCCTCTCTACAAC
CACACCATATTGAAATTACCTTCTTCCCTCTCTTGCTTCCGCACTCAAACTCGTCCTCAATCTAGCTCGCTACCTGACCTCATTCTCTCCTATC
AGATGGATGACTTGCTGTCCTCCTCGGTCATCTCCCGTGTTTAGCAAGACAGGGTATAGAGTTTTAAATGAGTGTAGGCAGAGTGCATGAATCA
TCACACTTTTAGGCAGAGTGCATGAATCATCAGACTTTCCTACGCCAGGGAGTAAACTGAGCACGCATATTTTGGAGACCACTTCTCTACTCCT
AGGGTCAGAAGAGCCTGCAGATGATCTACTCAAAGCAATTTTATCTGCCATTCTGTTGAGTAGTGAGGCAAAGATCATGTTACCTGCAACGGGG
CCAATCTTTGCCTCTGTTTTTGAAGTCTCTCGACAAGTAGCCGTCTTCCTGCGCTGGGGATATGATTAAGCAGTACAACATGCACATAATTTCA
TCAGGCTAACATACAGC1CTTCAGAGATCACCCTACTTATTTATGACACAATTGTTTTAAGACATCAGGTATTCAAGGAGATAAGATTCCTTCT
CTTGCTTTCCTGGTACCCAGAATGATCTCCTAAACCACAAGTAATTGGCACAGAGATGGATCTTCCAAACTGACCCACATCTACACAGATCTTA
TCTTCATACCCAAGAACTCCCCAGTCAATGGATATTTGGGGCATTTGCTATGCACACAGACGTCAGTGTGGAATAACCGTACTCCAGCACTTAG
TAGAAAGGATGTATACTGAACGAGTATTTACAAATAATTAACCAGATTATTTTCAGGGCACAAATTAGTGGAGCAAGGATTGCAGAGTTACATG
AACATCTGATAGCATTGCGGTTCAGGGAAAGTTCCCAGCCAGGGTACAGAGGATGGTGATGAAGAAAGCATGCTCAATATCTTGAGGCGCTGCT
ATGAGAGAGAATGAAACTCTCTAGCGGAACTGAAAGCATACAAGGATGTAAAGAATACGAAGAGCAAAAGGACTTCAACCCTTGGATGAGACAC
AGGGTGATCCAATACCCGGTGACCTGCAGGGACTCAGGCCCAGTGGTTATGATGCCAACCTACCCACAGTCGTGAGTATCATCCACTGGGAAGT
CACAGTACTGAAAACCAACACACTTAACTTGCCTGTGCTGCTGTGAACGTCCATTCAATGAGGGTCAGGAAGCTCAAATAAGATAATCGCAAAT
ACTGAGTGGTTCTGAGAGGAATGCAACCATGAAAAAAAAAGTGCTGACACTTGCAGAATGTTTATGTTTCTAATGCTGGGCTAAGTACTTCACC
TCGATTATTTCACCAATTCCTCCTCCTCCTCTCCCTGTTCTCCCTTCTCCTCCTCTTCTTCCTGTTCTTCCTCCTCCTCTTCCTCTTCTTCCAA
AGATTCATGTGTATCAAGGTATTCTCAA
MOUSE SEQUENCE—mRNA
GATTGGGGTACCCGCTGCGCCAGGTTTCCGCACCAACCAGAGCTGGATAACTCTAGACTTGCTTCCCTTGCTGTGCCCCCTCCAGCAGACAGCC
ACGACGATGCCCCTCAACGTGAACTTCACCAACAGGAACTATGACCTCGACTACGACTCCGTACAGCCCTATTTCATCTGCGACGAGGAAGAGA
ATTTCTATCACCAGCAACAGCAGAGCGAGCTGCAGCCGCCCGCGCCCAGTGAGGATATCTGGAAGAAATTCGAGCTGCTTCCCACCCCGCCCCT
GTCCCCGAGCCGCCGCTCCGGGCTCTGCTCTCCATCCTATGTTGCGGTCGCTACGTCCTTCTCCCCAAGGGAAGACGATGACGGCGGCGGTGGC
AACTTCTCCACCGCCGATCAGCTCGACATGATGACCGAGTTACTTGGAGGAGACATGGTGAACCAGAGCTTCATCTGCGATCCTGACGACGAGA
CCTTCATCAAGAACATCATCATCCAGGACTGTATGTGGAGCGGTTTCTCAGCCGCTGCCAAGCTGGTCTCGGAGAAGCTGGCCTCCTACCAGGC
TGCGCGCAAAGACAGCACCAGCCTGAGCCCCGCCCCCGGGCACAGCGTCTGCTCCACCTCCAGCCTGTACCTGCAGGACCTCACCGCCGCCGCC
TCCGAGTGCATTGACCCCTCAGTCGTCTTTCCCTACCCGCTCAACGACAGCAGCTCGCCCAAATCCTGTACCTCGTCCGATTCCACGGCCTTCT
CTCCTTCCTCGGACTCGCTGCTGTCCTCCGAGTCCTCCCCACGGGCCAGCCCTCAGCCCCTAGTGCTGCATGAGGAGACACCCCCCACCACCAG
CAGCGACTCTGAAGAAGAGCAAGAAGATGAGGAAGAAATTGATGTGGTGTCTGTGGAGAAGAGGCAAACCCCTGCCAAGAGGTCGGAGTCGGGC
TCATCTCCATCCCGAGGCCACAGCAAACCTCCGCACAGCCCACTGGTCCTCAAGAGGTGCCACGTCTCCACTCACCAGCACAACTACGCCGCAC
CCCCCTCCACAAGGAAGGACTATCCAGCTGCCAAGACGGCCAAGTTGGACAGTGGCAGGGTCCTGAAGCAGATCAGCAACAACCGCAAGTGCTC
CAGCCCCAGGTCCTCAGACACGGAGGAAAACGACAAGAGGCGGACACACAACGTCTTGGAACGTCACAGGAGGAACGAGCTGAAGCGCAGCTTT
TTTGCCCTGCGTGACCAGATCCCTGAATTGGAAAACAACGAAAAGGCCCCCAAGGTAGTGATCCTCAAAAAAGCCACCGCCTACATCCTGTCCA
TTCAAGCAGACGAGCACAAGCTCACCTCTGAAAAGGACTTATTGAGGAAACGACGAGAACAGTTGAAACACAAACTCGAACAGCTTCGAAACTC
TGGTGCATAAACTGACCTAACTCGAGGAGGAGCTGGAATCTCTCGTGAGAGTAAGGAGAACGGTTCCTTCTGACAGAACTGATGCGCTGGAATT
AAAATGCATGCTCAAAGCCTAACCTCACAACCTTGGCTGGGGCTTTGGGACTGTAAGCTTCAGCCATAATTTTAACTGCCTCAAACTTAAATAG
TATAAAAGAACTTTTTTTTATGCTTCCCATCTTTTTTCTTTTTCCTTTTAACAGATTTGTATTTAATTGTTTTTTTAAAAAAATCTTAAAATCT
ATCCAATTTTCCCATGTAAATAGGGCCTTGAATGTAATAACTTTAATAACGTTTATAACAGTTAAAAAAAAAAAAAAAAAAAAAAAAAAAAAAA
AAAAAAAAAAAAA
MOUSE SEQUENCE—CODING
ATGCCCCTCAACGTGAACTTCACCAACAGGAACTATGACCTCGACTACGACTCCGTACAGCCCTATTTCATCTGCGACGAGGAAGAGAATTTCT
ATCACCAGCAACAGCAGAGCGAGCTGCAGCCGCCCGCGCCCAGTGAGGATATCTGGAAGAAATTCGAGCTGCTTCCCACCCCGCCCCTGTCCCC
GAGCCGCCGCTCCGGGCTCTGCTCTCCATCCTATGTTGCGGTCGCTACGTCCTTCTCCCCAAGGGAAGACGATGACGGCGGCGGTGGCAACTTC
TCCACCGCCGATCAGCTGGAGATGATGACCGAGTTACTTGGAGGAGACATGGTGAACCAGAGCTTCATCTGCGATCCTGACGACGAGACCTTCA
TCAAGAACATCATCATCCAGGACTGTATGTGGAGCGGTTTCTCAGCCGCTGCCAAGCTTGTCTCGGAGAAGCTGGCCTCCTACCAGGCTGCGCG
CAAAGACAGCACCAGCCTGAGCCCCGCCCGCGGGCACACCGTCTGCTCCACCTCCAGCCTGTACCTGCAGGACCTCACCGCCGCCGCGTCCGAG
TGCATTGACCCCTCAGTGGTCTTTCCCTACCCGCTCAACGACAGCAGCTCCCCCAAATCCTGTACCTCGTCCGATTCCACGGCCTTCTCTCCTT
CCTCGGACTCGCTGCTGTCCTCCGAGTCCTCCCCACGGGCCAGCCCTGAGCCCCTAGTGCTGCATGAGGAGACACCGCCCACCACCAGCAGCGA
CTCTGAAGAAGAGCAAGAAGATGAGGAAGAAATTGATGTGGTGTCTGTGGAGAAGAGGCAAACCCCTGCCAAGAGGTCGGAGTCGGGCTCATCT
CCATCCCGAGGCCACAGCAAACCTCCGCACAGCCCACTGGTCCTCAAGAGGTGCCACGTCTCCACTCACCAGCACAACTACGCCGCACCCCCCT
CCACAAGGAAGGACTATCCAGCTGCCAAGAGGGCCAAGTTGGACAGTGGCAGGGTCCTGAAGCAGATCAGCAACAACCGCAAGTGCTCCAGCCC
CAGGTCCTCAGACACGGAGGAAAACGACAAGAGCCCGACACACAACGTCTTGGAACGTCAGAGGAGGAACCAGCTGAAGCGCAGCTTTTTTCCC
CTGCGTGACCAGATCCCTGAATTGGAAAACAACGAAAAGGCCCCCAAGGTAGTGATCCTCAAAAAAGCCACCGCCTACATCCTGTCCATTCAAG
CAGACGAGCACAAGCTCACCTCTGAAAAGGACTTATTGAGGAAACGACGAGAACAGTTGAAACACAAACTCGAACAGCTTCGAAACTCTGGTGC
ATAA
HUMAN SEQUENCE—GENOMIC
ACTCCCACCACACCTATTCAACATAGTATTGGATTCCCTGGCCAGAACAATTAGGCATGAGAGAGAAACAACAGGCATCCAAACAAGAAGAGAG
AAGGTCAAATTATCCCTGTTTGCAGACAATATGATTCTGCATCTAGAAAACTCCATAGCCTCTGCCCCGAAACTCCTTGAGTTGATAATCAACT
TCAGCAAAGTTTCAGGATACAAGATCAATGTACAAAAATTAGTAGCACTCCTATACACTAACATCACCCAAGCCAAGAGGCAAATCAGGAACAC
AATCCCATTCACAATTGCCACAAAATAATAAAAAGCTTAGGAATACAGTTAACTAGCGAGGTGAAAGATCTCTACTATGAGAATTAAAAAACAC
TCTTCAAAGAAATCAGAGATGACCCAAACAATTGGAAGAACATTCCATGTTCATGGAAGGGAAGAATCAATATTGGTAAACTGGCCATACACCT
CAAAACAATTTACAGATTCAATTTTATTCCTATCAAACTACCAATGACATTCTACACAGAAATGGAAATAACTACTCAAAAATTCATATGGAGC
TAATAAAAGAGTCTAAATACACAAGCCAATCCTAGGCAAAAAGAGCAAAGCTGAAGGAATCACATTGACCAACTTCAAATTGTACTACAAGGAT
GTAGTAATCAAAACAGCATGGAACTGATACCAAAACAGACACATAGACCAATGGAACAAAATAGTGAGCACAGAAATAAAGCCACATACCTACA
ACCATTGGATCTTTGACAAATCTGACAGAAACAAGCAAGAGGGAAAAGACTCCCTATTAAATTAATGGTGCTGTGATTACTGGTTAGCCATATG
AAGAAAACTCAAACTAGACTTATGCCATATATAAAATCCATATGCCGGAAAGCTGAGGCAGGAGAATCACTTGAACCCGGGAGGTGGAGGTTGC
AGTCAGCCGAGATCACACTACTGCACTGCAGCCTAGCGACAGAGTGAGACTCCGTTGCAAAAATAAATAAATAAATAAATAAATAAATAAATAA
ATAAATATCAACTCAAGGTGGATTAAAGACCAAAATGTAAAACTCTAAAACTATAAAAACCCTGGAAGATACCCTAGGAAATACCATTTTGGAC
ATAGGAGCTGACAACGATTTTTTGAAAAAAACACCAAAAGCAAAAGTTGACAAATAAGACCTAATTAAACTAAAGAACTTCTGCACAGCAAAAG
AAACTATCAACAGAGTAAATAGGCAACCTGCAGAATGGAGGAAAATATTGACAAACTATATATGTGACAAAGGCCTAATATACAAAATCTACGA
GGAACTTAAACATACAAGGAAAAATCAAACAACCCACCTCACTAAAAAGTGGGAAAAGGACATAAACCGACACGTTTCAAAAGAAGACATACAA
GCATATACATACAAGCCAACAAGCATATGAAAAAATGCTCATCATGACTAATCATTAGAGAAATGCAAATCAAAGCAGCAATAAGATACCATCT
CACACTAGTCAGAATAGCTATTATTAAAAAGTTAAAAAATCACAGATGCTGGTGAGGTTGTGGACAAAAGGGAACGCTTATACACTGCTGGTGG
GAGTGTAAATTAGTTCAACCATTGTGGAAAGCAGTGTGGTGATTCCTCAAGTAATTAAAAACAGAACTACCATTTGACCCAGCAATCCCACTAC
TGGATATAAACCCAAATAAATATAAATCTTTCCACCACGAAAACACATGCAAGCATGTGTTCATTGTAGCTCTATTCACAATAGCAAAGGCATG
AAATCAGCCTAAATGCTCAACTACTGCAGACTGGATAAAGAAAATGTGGTACATACACACGATGCAATACTAAGCATCCATTAAAAAAAAAAAA
GAAATCATGTCCTTTTCAGGAACATGAATCGAATCAGAGGCCATTATCCTTAGCAAACTACCACAGGAACAGAAAACCAAACCTATGTTTTCAC
TTATAATTGGGAGCTAAATAATGATAACCCATGGGCAGAAAGAGGCCTCACACTGTGAGGCCTGCGTGAAGGAGGAGGATGGGAGGAGAAAGAA
CTCCAGGGGAAAAAAACTTCGGGTACTGTGCTTAGTACCCAGACAGCAAAATAATCTGTACACATTGATGGGACGTATCTCAAAATAATAAGAG
CTATCTATGACAAACACACAGCCAATATCATACTGAATGGGCAAAAACTGGAAGCATTCCCTTTGAAAACTGGCACAAGACAAGGATGCCTTCT
CTCACCACTCCTATTCAACATAGTGTTGGAAGTTCTGGCCAGGGCAATCAGGCAGGAGAAAGAAATAAAGGGTATTCAATTAGGAAAAGAGGAA
GTCAAATTGTCCTTGTTTGCAGATGACATGATTGTATATTTAGAAAACCCCATCGTCTCAGCCCCAAATATCCTTAAGCTGATAAGCAACTTCA
GCAAAGTCTCAGGATACAAAATCAATGTGCAAAAATCGCAAGCATTCTTATACAACAATAACAGACAGAGAGCCAAATCCTGAGTGAACTCCCA
TTCACAATTGCTTCAAAGAGAATAAAATACCTAGGAATCCAACTTACAAGGGATGTGAAGGACCTCTTCAAGGAGAACTACAAAACACTGTTCA
ATGAAATAAAAGACGACACAAACAAATGGAAGAACATTCCATGCTCGTGAATAGGAAGAATCAATATCGTGAAAACGGCCATATTGCCCAAGGT
AATTTATAGATTCAATGCCATCCCCATCAAGCTACCAATGACTTTCTTCACAGAATTGGAAATAACTACTTTAAAGTTCATATGGAACCAAAAG
AGAGCCCGCATTGCCAAGTCAATCCTAAGCCAAAAGAACAAAGCTGGAGGCATCACGCTACCTGACTTCAAACTATACTACAAGGCTACAGTAA
CCAAAACAGCATGGTACTGGTACCAAAACAGAGATATAGACCAAAGGAAGAGAACAGAGCCCTCAGAAATAATGCTGCATATCTACAACCATCT
TACCTTTGACAAACCTGACAAAACCAAGAAATGGGGAAAGGATTCCCTATTTAATAAATGGTGTTGGAAAACTGGCTAGCCATATGTACAAAGC
TGAAACTGGGTCCCTTCCTTACACCTTATACAAAAATTAATTCAAGATGGATTAAAGACTTAAATGTTAGACCTGAAACCATAAAAACCCTAGA
AGAAAACCTAGGCAATACCACTCAGGACATAGGCATGAGCAAGGACTTCATGTCAAAAACACCAAAAGCAATGGCGACAAAAGCCAAAATTGAC
AAATGGGATCTAATTAAACTAAAGAGCTTCTGCACAGCAAAAGAAACTACCATCAGAGTGAACAGGCAACCTAAAGAATGGGAGAAAATTTTTG
CAATCTACTCATCTGACAAAGGGCTAATATCCAGAATCTACAATGAACTCAAACAAATTTACAAGAAAAAAACAAACAACCCCATCAAAAAGTG
GGTGAAGGATATGAACAGACACTTCTCAGAAGAAGATATTTATGCAGCCAAAAGACACATGAAAAAATGCTCATCATCACTGGCCATCAGAGAA
ATGCAAATCAAAACCACAATGAGATACCATTTCACACCAGTTAGAATGGTGATCATTAAAATGTCAGGAAACAACAGGTGCTGGAGAGGATGTG
GAGAAACAGGAACACTTTTACGCTGTTGGTGGGACTGCAAACAAGTTCAACCATTGTGGAAGTCAGTGTGGCGATTCCTCAGGGATCTAGAACT
AGAAATACCATTTGACCCAGCCATCCCATTACTGGGTATATACCCAAAAGATTGTAAGTCATGCTGCTATAAAGACATGTGCGCACGTATGTTT
ATTGCGGCACTATTCACAATAGCAAAGACTTGGAACCAACTGAAATGTCCATCAATGATAGACTGGATTAAGAAAATGTGGCACATATACACCA
TGGAATACTATGCAGCCATAAAAAATGATGACTTCATGTCCTTTGTAGGGACATGGATGAAGCTGGAAACCATCATTCTCAGCACACTATCTCA
AGGACAAAAAACCATACACCACATGTTCTCACTCATAGGTGAGAATTAAACAATGAGAACAGATGGACACAGGAAGGGAAACATCACACACCGG
GGCCTGTTGTGGGGTAGGGGGAGCGGGCATGGATAGGATTAGGAGATATATCTAATATTAAATGACGAATTAATCAGTGCCCCACACCAACATG
GCACATGTATACATATGTAACAAACCTGCACATTGTCCACATATACCCTAAAACTTAAAGTATAATAAAAAAAATCTGTACACTAAAACTCCAA
GTCATGACTTTACCCATATAAAAAACCTGAACCTAAAATAAAAGTTAAAATATTCAAATATAAATAAGTAAATAAATAAAATGACAAACCCATG
GCTAACATCATGTTGAATAAGGAAAAGTTGAATGCTTTTTTTTCTAAAATCCAGGAGAAGACAAGGATGTCCATTCTCTCTTCTACTCAACATG
GTACTCGGAGTCTTAGGTAGAACAATTACACAACAGAATCAAATAAAGGTCATTCAAATTGCACACCAGCAACTCCTTTTCTGCAGTAACATGA
TCTTATACGTATAAAACCCTATACACTCAACCAAACAAAAATAACTGGTAGTATTGATAAATCAATTCACTAAAACTTCAAGTTACAAATTTAA
TGTACAATAATTAGTAGTGTTTCTACACAGCAACAGCAAACTATCTGAAAAAGAAATCAAGAAATCTATCTCTTTTACAATAGCTACAAAAATT
TCAAAAAATTTCAAAAAATACCTAGAAATAAATTTAACCAACGACGTGAAAGATCTCTACAGTAAAAAATAATAAAATATCGATGAAAGAAATT
GAAGAGGATACTAATAAATGTAAAGTTAACCCATGCTCATAGATTTGTAGAGTTAATGTTGTTAAAATGTCCATACTACCCAAACCAATGTACA
GATACAATGCAATCTCTATCAAAATACTAAGGACTTTCCTCACAGAAGTAAAATATATATATTTTTTAATATATAAAATGTATATATAAATATA
ATATATAATATGAATATTATATATGATTATAATATTATATGATTATATACTATTAATATTATTAATAATATATATTATTATATATATTATATAT
ATTATTATATATTGTATATAAATATATATTATATACTATATTATTATATATTGTATATAAATATATATTATATATACTATATATTTATATACTA
TATATATAGTGTATATATATATTTATATAGTATATATAATATATACACTATATATTTATATAGTATGTATATATATATACTATATATAATACAT
AAAATATATATACATATATAGTATATATATGAAATATATATATACTAAATTTGCACAGAACCACATGATTCCAAACAGCCAAAGCAATCTGGAG
CACAAAGAACAAAGCTAGATGCATTACACTACCTGGCTTTTAAATTTTCTACAAAGCAATAGTAAACAAAATAGCATAGTACTAACATGAAAAC
AGATCCATAGACTGATGGAGGAGAATAGAGACCCCAAAAATGAATCCATACAATTATACCCAACTAGTTTTTCACATATCTACCAAGAAAACAC
ATTGGGGAATGGAAAGTCTCTGCAATAAATGGTGCTGGATAAACTGAATATCCACAAGCAGAAGAAAGAAACTAGCTGCTTCTCTCTCCCAACA
TATAAAAATCAACTCAAAATGGATTAAAGACTTGAATATAAAACATGAAACTAAGAAGATCCTTGAAGAAAACACAGGCGAAACAATTCATGAT
ATTGGTCTGGGAAAGAATTTTTCAAATAAGACCTCAAAAGCACAAACAACCAAAGCTAAAATAGATGAATGGGATAATATCAAGCCAAAAAGCT
TTTACATCTTAAAGGAAACAACAGAATGAAGAAATGACCTACAGAATGAAGAAATATTCACATACTATCCATCTGACAAGAGCTTAATATCAAA
CTATGTAATCAATGCAAGCAACTCAATAGGAAACACACAAATAATCCAATCAAAACTTGGGCAAAGGATTCGAATAGATATTTCTTAAAACGAC
TCACACAAATGGGCACCAAGTATATCAAAAAAGGCTCAACATCACTAAGAACCAGGGAAATGCAAATCAACACCACAGTGACCTATCCACTCAT
CCCAGTTAGAATAGTTATTATTTAAAAAAATAAAATAAAAAGACAAGAAAATGGCCAGTCATGGTGGCTCATGCCTGTAATCCCAGCATTTTGG
AGGCCAAGGAGGGCAGATCACTTAATGCCAGGAGTTCAAGAACAGCCTGCCCAACCTGACGAAACCCCATCTCTACTAAAAATACAAAAAATTA
GCTGGGCATTGTGGCACATGCCTGTGGTCCCAGCTACTCAGGAGGCTGAGGCACGAGAATTGCTTGAACTGCGGACGCAGAGGTTGCAGTGAGC
TGAGTTCGCACCACTGCACTCCAGCCTGGGTGCCAGAGCAAGGATCTGCCAAAAAAAAAAAAAAAAAAAAAAAAAAAAAGACAAGAAATAACAT
ATGCTGGTAAGGATGTGGAGAAAAGTGAACTCTTATACAATGCTATACACTTGGTGTACTACTATATTATCCAGCAATCCCACTGCTGGATCCC
CCTCCCCCCCAAAAATGAAATCAACATATCAAAGAGTTCAGATCCCCATGTTTATTGCAACACTATTTGCAATAGCCAAAATATGGAATCAACT
TAAGTGCTCATCAACAGATGAAACAGGAATGAAAATATGGTATATATACACAATGGAATGCTATTCAATCTTTAAAAAAGAATGAAACCCTCAA
AAAGTGGGTGAAGGACATGAACAGACACTTCTCAAAAGAAGACATTTATGCAGCCAAAAAACACATGAAAAAATGCTCACCATCACTGGCCATC
AGAGAAATGCAAATCAAAACCACAATGAGATACCATCTCACACCAGTTAGAATGGCAATCATTAAAAAGTCAGGAAACAACAGGTGCTGGAGAG
GATGTGGAGAAATAGGAACACTTTTACACTGTTGGAGGGACTGTAAACTAGTTCAACCATTGTGGAAGTCAGTGTGGCGATTCCTCAGGGATCT
ACAACTAGAAATACCATTTGACACAGCCATCCCATTACTGGGTATATACCCAAAGGACTATAAATCATGCTGCTATAAAGACACATGCACACGT
ATGTTTATTGCGGCACTATTCACAATAGCAAAGACTTGGAACCAACCCAAATGTCCAACAATGATAGACCGGATTAAGAAAATGTGACACATAT
ACACCATGGACTACTATGCAGCCATAAAAAATGATGAGTTCATGTCTTTGGAGGGACATGGATCAAATTGCAACTCATCATTCTCACTAAACTA
TCGCAAGAACAAAAAACCAAACACCACATGTTCTCACTCATAGGTGGGAATTGAACAATGAGAACACATGGACACAGGAAGGAGAACATCACAC
TCTGGGGACTCTTCTGGGGTGGGGGGAGGGGGGAGGGATAGCTTTAGGAGATATACCTAATGCTAAATGACAAGTTAATGGGTGCAGCACACCA
GCATGGCACATGTATACATATGTAACTAACCTGCACATTGTGCACATGTACCCTAAAACTAAAAGTATAATAATAATAATAAAAAAGTAAAAAT
GATTAAGGACTATAATAGGATAAGAACTCTAGGAAGATGATAAAGTATGCCCAAAAGAAAGCAATGCTATAATAAAAACAAAATAAAACAAAAC
AACAACAACAAAAAGAATGAAACCCTGTCATTTGCAACAATGTGCACAAACCTAGACGACTTTATCTTAAGTCAAATAAACCAAGCACACAACG
AGAACTACCACATGATCTCAGGCATATGTGGCATCTAAAAAAGTTGACCTCAAAGAGAGTTTAGTAGTGGCTATCGGAAACTGAGGAGAGTAGT
TGCGAGGGGGAGGGGAACAGGTTGCTCAACAGCTACAAATTTACACTTATATAGGACAAATAATTTCTGATAATCGACTGCACAGTACCTTCAG
TCTAGTCAACAATAATGTATTGTGTACTTTAAAATAGTTAGACGAGACGATTTTGGACGTTCTCACCACCAAGAAATGACAAATGTTTCAGCTG
ATACACATATGCTAATTATGCTGATTTGATCATTACACAATATATATGTATCAAAACATCACACTGTATCCCATTAATATGTACAATTATACAT
CAATTTAAAACAAAATAAAATGTATTTTATAAAAATTTTAAAACTTCAACCAGCAAGTTTGAATCTCCTATTCCCAGTTTTGGTCAGCCCTACA
GTGTATACCAACCAGGCTGGCCTGGGCCTGCTGTTAGAGGAAAGAAAGAAACATCTGGACTTGGAATGAACAGATCTGGAAGGAATCCTAAATT
TTCCAATAAAGTCTCTGTATTCCTTTCATCCTGGTCCCTACCCACGAAGCAGTCTAGAGCAGATGATCCTTTTCTAAGAACAGCAACATTCAGT
AAACAAACTTCCTTACTAATGTCTGTGGATCAAGAGATGGTGAGGAAAGTAGAATCAGTGATATTTTTGAATCAATTATCAGAAGGCCACCATG
CTATTGCTCAGTAATATTAGATGCCCATGGACAGTAAGATTCATCGATGGTCCGTCTTTATTATTAGGTCATTACTGAGTGGCTTTTGCAATAA
AATACACCATTGGCAGAATAAAAATATTCTCTAATGCAAAAACATAGCATGGATTGTTTTTAAGGGGCACAATAGTGTGCTTGATCAGACTGGA
ATAGCAACATTGTAATCTGAAAAAAGCTCAACAGTCGTCAGCCATATTCAAAAGCCCCAAGAGGAGAGTCAACAGTCAGATCCATCAGAGTTGA
GAGGTTGCCACAACTTATGTAATGACGTCTCCACGCCATGAAACACATGTGTCAGCTTTTGTCAGGAGTCACAGATCTGGCATGCAGCAGCAGA
TTCTGCATTAGATATATAAAGTCAGGCCCAATCATCCCCTTGATTAGTTAGTCTCATCAGAGAATGAGCCCTTCCCATCGGTCTGTATATGAGG
AATCCAGGCAGTTCACTAAGTAGTCAAGATTTGTTTCCACATGCGGTCCCAAAGAAGTCTTTAATCTGACAGACTAGTTTTCCAAGTGGCATAC
CAAAAGGCTGGACCATTGGTAGTGTCCCAAGAATTGGGTTCTGACCATTGAGCAGAGAAACCAAGTCCTCTTTTTATTTCTGCATAGCTGGTTC
AGACGCTGAACAGACACAGGAGCCAGTGAACACCATCAGTTTTCAGCTTAGCCAATCCTTCACTGAGGCAAGCCCAGATATTTGGGCAAACCTC
TGTAAACAGGGTCCAATTGAACTAGTAGTGTTGTTTCAAGCATCAGAATAAAAGGTTAAGTTTCCCCCAGAGAGACAGTTGCCACTCTTACATA
TAAAGCAGAGATGCAGAAGAAATTCCAGTTGATGCCATCGCCCACCCACCAACCCACCCCCGCATTTCCGCCCTGAGACTAGGATCCCAGCGCC
AGGGACCCAGACCCTGGGATTGATCGCACAGAGCCGTGATCCGCAGAGTGCGCCGCGGATGAGACGGAATCTCGGGGCCACTCGAGAGCTTCGC
GCAGGAACCATGCATCCATTGTCCATCGTGACTGCATCTCCAGCAGCTATTTGGCCTGGGAACAGCTGTAGAGAGCGGGGAGCGACTGGCTCGC
CACTGGCGCGCCCTGGCGGAACCCGCCCAAGGTGCCCTCCTCCCCACACTGCCCTCCCAGCCTCGAAGACGGCAATCCAGCCCCCACTCCTCCC
TGGACTCTGGGCAAGGCCAAGACTCAGGCCTCCTCCAGATTTGAGAACCCAAACAACTCAGAGGGTGACGAAATTGACCTTGTGACAGCAAAGA
AAAGGCAGATTGGGTTTACAGAAGTCGATCACCATCATGGTTCGAGTAGACCGTCTGAACCCCTCCATCAAACACTTCCATACCTCCATCCACC
AGCAACAACACAACTGCGCTGCCCATATTTCTCCAGAAAGCTGCTCCCAAGAAGAGGCTCCAGAGAGAGGTCTCCAAGAACAGCTTCTGCAGCG
AGATGCTCCAGGGGAAACGGAAGATGAGGAGGATGAGGGGATTGTGAGCCCCTCACCTATAGATAGCAAGGCTGCCCAGTGCTGCCAGTTCTGA
CACTGAGGATGTGACCAAGAGGAAGGGCCACAGCTTCCTGCAGCACAAGAGGTGGAATGACCTGCCCGTTCTCACTTCTTGGCCCTGAGCGACC
AGGTACCCACCTTGGCCAGCTGCTCTAAGGTCCCCACGGTAGTGATCCTAAGCAAGGCCTTGGGATACTTGCAAGACCTGGCGTGAACCGAGAA
AAAGATGTCTATGGAGAAAACGCAGCTCCAACGCCAGCAACAGCAATTGCAGAAATGAATTGCGTACCTCAGTGGCTACTAACTGACCAAAAAG
CCTGACTGTTCTATCTTACAAAGACACAAGTTTATTTTTTCACCTCCCCTTCCCCTTTAGTAATTTTCACATTTTGGTTATGACGGCACAGTCT
TTGCAGTAGGTCCCAGAATGCATTGCAGCCAGTACACACAGAATAAGGGCTTGCATTCTTGGAAACCTTGAAACCCAGCTCTTTCTCTCCCCTG
ACTCATGCTGTGTCTTCTCTGGCGCCTTTGGCTTCTCAGCAGATACCTCACTGAGGAGATTTGGGGTCTGTTTACCTCACTAGCTCCGAAGAAA
AGGCTGACAGATACTATGCAACAGGTGGTGTATGTTGTCCGGCACTCCAGCCTGCATGAAATCTCACACTCCGCGTGAGCCTTAGACTAGGAAA
GAATGCTCCCTCGTATCTCTGGGGTGATGCTAGAATCCTCCCTGGTATGTCTGGGGTCATGCAAGGACAGCTGGGCCTGGACAGCACTCTCGCT
GTGGCTTTTTTTTCCAGGAGACACACAAGCTGTCTTGGGTGATGACAAGCTTGAAGATTTGATCAACATGACCATTGCTTCACTGTCAGACACT
TTACAGTATCTGAGGAGTTGGAAACCTTTAACGTATATATTGTGATATTAGCTGACACCTCTCCTTCCAGTTTCAATGCTGAGACCCTGAGAAC
ATTTAAAGAGCTTGCACTCTAGGTTCGTTGTCTCAGAGCTCTCTGGGCCTTCTCTGATGAAGGGACCTTTCTGTCCTCATGAGAGACTTTTGTT
TCATTTTGCCTTTGTTGTGCAATGGGCTTTACAGCATCCTTTCCCACAGGTTAGAAATGTTTCCCCAAGTTACAGGGAAGTGGGGATCCTAGCC
TGGCGCCTGAGGAAATCTTCGAGTCCTGGCTCCTCAACTTCTTCCCTGTCCGAGTCGCACTTGACCCCACCCATCTTATAATCTCTTCTCAAGC
CAGATGTAAGTCACCTCAGAAGGGAGAACTGTACCGCTTCCTCTTTTCCATGAAGCTCTCATCTCAATCTTTGACTGATGAGTGTGAAATTCTA
CCGGAACCATGCAAACACGTCCACCTTGGGCATCTCCAAGGAACTTCTGGGGTCTGCAGCATACTTGGCTCCCTACCACCCTCCCATGAGTCAT
ATTTCTTTTCCAGAAGGTGGACTTGCTTCCTGGTATGTTTTAAAGGAGCCTGCAGGAGCTCTGCTTAGCCAATCATGATGGATTTTTGCCCCAG
CTGGACTCTGCATGTCCAAGGAGAATCCAGGTACAGCCTCCATTCCGGGAAAGACATCCAGCCCAGCAGTTGTCATGTGGGTAACCTCAGGAAC
CCCTAACCCTGTCCTGGAAAAAGGACAAGCCCCTCCAGAACTCTGCCCAAAATAGCAGGTGCTTGATGGTTCTGAATTTGGAAACCGATGGCGC
GTGATAAGTACTATCTGTGGCTCTGGAAAACCAGCTGCTACATTCAAATCTATTTTCCATAATGGTTTCTTTCTGAGGTTGCTTCGTGGCCTCA
GAGAATCCCAGAGGATGTTTTGAAATAGCCTCTCTACCCTTCAGGAGCATGGTAGTTTACAGGAACCAACTGACTTCTGGAACTGTCTATGGAC
GGAGAACAGCCCAGGTGTAGGTTACTAATGTCCTACATGAATAGCTTGGTTTTATAAGCTGCTGTTGGCTATTATGTTCGGGCAGTCTTTTTAA
TATATTGTATTTTTGTACGCATTTTGCAAAGTGGAGTTAACTGTTTTGTAAAAGAAAAAAAAGAAACCCTTGCGTCCTTCTTCTGTTTCAAGGG
TCTGATTTATTTGGAAAGGCAAGTTTATCTGAAATTTTGTATTATTGATTGCCCAATTTTAAAATGTTCCCTTCTGGGACATCTTGACAAAAAA
TATTTCTCAAACATGAAGAAAATAAATATAATAAAAAAGAAATGTCTGTCGGATCAGATGACTGTTCTTGATTTTACCGTTTCCATTTCATAAG
CCAAGCTTATTGACCCCTTCCTACCTGCTAGTCATTGAGTCTGAGTTGACCAACTCAAAGATGGAAATATCGAGCCAGATGGTAACAAATTCTC
CATGAATCGATTGTTCAGTTTTGACAGAATCCCAATTGCAAGCCATTAGCTGCTTTTCAAAAGGGATGTACCCTGTAGCCATATTAGCGAGGCA
ACAAGTCCAGTTCCCCAAGGGATCTCTCTGGGTGTTGACTGCTTCCCCTTGCCAGGTGCCCCCATCGGCAAAATCATCAGTTACACAGATTTGT
CCTCTATGTAATATTCAACCAGTTGATTCAGCTTCTGAGCCTCTTTTTCGGTGGCAGGTTGTATGAAGAGACGTCAATTTTTTCCTGTTACAGC
GATCTAATGTTGTGAATTTGCCTGCTTAGTCCCAAGAGATTACTTGGCAAGCAGGCCCCTGTATTTGGGAGCATAAATCAGCCACCCTTGCTGA
CAGATATGTAATAACACTGCATTGAGGACCCTTGAGACTGAGACTTCTAGCCGGCCAGCTGACACAATTATTATGTATATAGTGAAAATATTGA
ACATTAGAAGGTAGAGACACTAATGCTAAATCCTGAGCCAACCACTGCTGACAAATCTCATTGGAGTTTGTTCCACTAACACTTCCCTCTACCT
CTGTCTCTCTGTGATGGGGATCACTTTATATGAGACCTGTAGAATGAGAAATTACAAGCATATGACCCATCAAATCCTGCCATTTATAAGTAGA
AGCAACAAGAACAGTTTATTCAACTTTCCCAAAGGCGTCCCTGTACAAAGTCATATTGGCTTCCAAACCCCACTGTGAACCATGCCCAAACCCC
AACAATTGCTTTTCTGGACTTTTTTCCCTTAAATGAACTCAGACCTAGAGTTCACTACAGCAATTTCAGGCGTTACACCAACAGCTGTTAGGGG
ATTTCCCTATGTCCAGGCCAGAATGTAGGGATTGCAGGGGAGTCTTGGGATGAGGCGAGGGGTGGGGACTGTAAGCCTTTTTTGTAATCCCTCT
GGCTCTTTGCCCCAGCTTGTATGCTAAATCCTCTCCTGTGTACCTCCATTTGTGCAGAACTGTAAGGGCTCAGGGATTCTTCCATTCTGTCCCT
TGATTTCCCCAGCAGCTCTGCTCCACAGTCTTGGTGCTTTCATCTACCTCATACCTATTACCCCTTCCCTCCACTCCCCAGAAAATCAGATAAG
ATAGTGTCATGGGAGATTATATGTAACAGTTCTGTGAACATGTGAGTCCGTCCCTTTCCTGAAGTACCCTACCATGCATATGCCTTTTAGTCTG
TCTTGAGGACAGAGAGACTTCTGGCTCACCACTAATCATCTTTCTTCTTATAGCACCTGAAGTGAGAAAAGGAAGAGAACCAGGACTTAGGAAA
TGCAGAGAGAGAGAGAGAAAACACTCTGTCTATACTAGTAAGCAAGGCATGTTTGCATTTGGTTTCCAGTAGCCAGCAGTGTGGTTCAACCAAA
CAAACTTCAGATGGTTTTTTTTCCACTGAAAACTCTATATCTTCACTGCTGACGCCACTTATTCAGGTTTGGCAAGTCATTGACTCAGCACCAT
GACATCATCCCTTCTTCCTCCCATGCAGAGGAGAGTCAACAACAACCAAACCATGATTCAAACAGCTTGGTTTAATTCTGCATCCTGCCCCTCA
GCTTCATTAATAGGTAGGAGAGTGAGTGGGGAACGGCCTTTAATGCACTTAGTGCCAATCCATTCGGGAAAAAGCATTTGCTCTCCAATCCCGA
GGAGTCTTCTCATATCCCCTAACCAGGCCAGTGAAGCACCCTTGTTTTATCACTTTCCAGAATGCTATGTTTCATCTTCATTACCAAAATTGGC
AAGAAATGTGAAGAGTTTGAGACTGTACCCTACTTGCAAGCTCACAAACTAGCATACCTCAGTTTCACAGATGTTGGCAGAATATATGAGATTC
TTGGGTCAGAGTTTGTTTTGGTTCATGTTTGCATTAATTCCCCTTGCCCTCTGCCCCAAATCACACAGGAGAAATGAGGAGCAGCCAGTCAAAT
GTTGACATACAAGTATTCTTCAAACTATAGTTAGAGACAAAAGCTGTTACAATAAATCTACAAAGGCCATGGACAATTATCTCAACAATATCTC
ACCATTGTTTCTCCACTATCTTGGCTTCTGACAAAGTTTGCCATTAAGTATGTGTGTTGATTTTCTCGATATCAGGGCTGAGCAAGGAAAAAGT
CATGACCATTAGATGGCAGTAGCACACAACATGCTTTATTTGGTTGGCCCTTTGAAACGTTTCAGGAGAGTGGAACTTCCCTCACAGCAGGAGA
CCTTCCAGAGGCAGCAGCAAGAGGCCACCACCCACAACACGAAGACTTCAACGCAACTTCCAAACGAGAGAAGAATTGGACACGAGGCTCATCT
GTCTATGGGATCTTACTCAGCAGCCAGCTGTCGACTCTCTGTGTCAGAGAGTTCCCATGGGCATCAGAGGCTTGGGGCTTTTGTCCAGCCCCAG
AGTATGTCCTATCTACGCCTAGCACATCCTCTGTCTCGTTTTACACAGCGTCCAATGTGGGTGGGTTCTAAAGGGCCAAAAATGTGCTTACTCG
GGGCCATATTTAAAGCAATTGGGTGTGTAAACATTTGATTTTAGTTCCAATCAGCTTTGACCTAATGGTCTTAGCTGTCTCTGAATATAGGGAA
CAAGATACAAGGCACCATCTAAAGATATTAATCCACTTATTTAACAGTCCATGCCTTGGCCCCATGTTGTTTTACAATCTAAGTTGTATGCTAT
TTCATGGAGTCTCAGTTGGGAGCCAGCGATGAAGCATCCTCAAGACCCAGAATGCTATAACGCTACAAATTACGATTTTAAAAGCCAGTTCTCA
GCCAATCTGCCCACTTGGGCAGCCAGTAGAATAAATTTGAAAGGAGACAATTTTGTTTTGACCAGTCCGTTTAGTCAATAGAGTGGCATTTATA
TCCCCTTTGGTACATCACCCCACCTATCTGTAAAACTTGGTGTTATCTACGCACATGCAGGAAGATAATTTTAGCAACCACACAGCCCCTGTGC
CCTGTGACCCCTCCAGCAGCCTGACCTAGGGCTATGCAGTTATCTCACACCATGGCCACTAAAGTACAGTGAGATTCAGCAAAGAGTTTCAGTC
CTTGGGCTGTTTATCTAATTTCTGTGGGTAATTCCTGCAACATGGCTATGTGTTTCTCTTAATTGTGGTGTGCTGTTCCACACATATGCTGTTC
CTACTGCCTCCAAAATTAGTGATCCTAGGGAAGTTAGTACCATGAGGAACTATTTGGAAAGCTCATTTGTGACATTGGGGACTCACATCTAGTG
TGGTTTGGTGGCCGAAAGTACTTGAGGGAGGGGGTTCCACTGTTGAATAAAATTCTACTGGAATTTTGCACCAATCCCAAGTGCAGGAAATATT
CTTCACGGTTGCATGAGGAGAAGATTGTCATAGGGAAGCCATCTGATTCCTTTACAGGACCTCCAGGCTCCCTCTGCTGCCTGTATTCTCTGTG
TTCCACTGAAGGGAAGTTCACATGGCTTTGTGAAGTTCCAGAAGTTCCAGGTTGTGTTAATAGGAGCAGAAAATCGTATACTCAAACAAGCTTG
TGTTATCCACCTTGCATTCAGCACCTGGGTTAACTAAATTTGTCGTGGGCTCAGCCCACCATTGTCTATACATTTATGTGAGATAAGCCTCTGG
ATAAGGTTGTTCAATGTCAATCGTTAGGCGAATCGGCTCATCTAAATAAGTCAGCTATATCATGCAGCGTTGCCAGGAAAGAAGTATTACACTA
TGTTTTCTAMXATCAGGTTGGCAGAAGCAAACCCTGCATTAGCTTAGATTTACCATCTTATATGTTGCTGTGGCTAAGGCTATAGGCACGTTTG
GTGTAGTCGGCAATTGCATGTTCCTCCTTGCTGTGACTGTTGTGTGTTGTGCTTGAGTTTCCTGTTGATTGCCAATAATAAATAGCATTGATGT
GTTCCCATCAGTGTCCGATAGGTTTTGCAGCTGTTATTGGCAGTCCAACAAGAACGTTGTTAGTCTAGCCACACACCAAATTAGATTCTGAATT
ATGAGGCACTCGCATATGAGTGAACAAAACAGGTAAACCAAGTATTTTTTAAAAAAATAGATATCAGCTGGGCACAGTGGCTCATGCCTGAAAT
CCCAGCACTTTGGGAGGCCGAAGTGGGCAGATCACGAGGTCAGGAGTTCCAGACCAGCCTGGCCAATATGGTGAAACCCCGTCTCTACTAAAAA
TACGAAAAAAAAAAAAAGATTACCCGGGTGTGGTGGCATGCTCCTGTAGTCCCAGCTACTTGGGGGCTGAGGCAGGAGAATCACTTCAACCCAG
GACGCAGAGGTTTCAGTGAGCCGAGATCACGTTACTGCACTCCAGCCTGGGCGACAGATCCAGACTCTGTCTCAAAAAAAAAAAAAAAAAAAAA
TATCAATTGTATCAAGGCATAGGTCCCTTTTATGTTCCCTTGTATTGCAACATTATTGTGTTTCAGTGGGGGACCAAAAGCTTTATGGACTCCA
TTTTAGCGGAAACTTTCATAGGGAAGAGGTTTGTATACCTTTAATAACCTCAGGAGTGGCCCCTTGGGAGGTGGCAGTGTGACTACACCAATAA
ATTTCCTCCCAAGTACTCATGGACATAAAGTGTCTACTGAGACACTGGAGACTACTAGAGGGGGACGGGGGAGGGGAGCAAGGGTTGAAAAACA
AACTGTTGGGTACTATGCTCAATACCTGGGTGATGGGATCATTTGTACCCCAAACCTCAGCATCATGCAATATACCCAGGTAACAAACCTGCAC
ATGTGCCCAATGAATCTAAAATAAAAGTTGAAAAAGAAATGACAAGGCATAAAAATGTTTTAATGAAGATGAAAACATTCCTCCCAAGTTAGTT
TCATTACATGTCTTCTCATTATCGTTTATGTCTTCTGTAGGTTTGGAGTGTGTATGGATTTTTAAGGAGCCCTCAGAAAAGTAACATTGGGCAA
CAACTGCCCTCAAATAGTTTCTAAGTTTTTAATAACTGTGGTTTTGGACAAATTTCACAATAGCTATAAGCAAATAGTTATCAATGTGGGTGGA
GAAACTCCCATGCAAACACTAGTTAGATTTCTCCCTGAGATCAAATATGTTTCTTGTAAGAACTGTCTGTGCTGTGACACCACGAGCTATGAGT
TGTTCACTGTGGGTAGCCAGCATTGCAATTGCTGTAGAGTTCACTTCCATTGAGTGTTATGTAAAACTTGCAGTTAGTATATTAAGATTAGGTT
AGGGAAGAATTCCCAAGCTGGTTGTTTTGTGTGTGTGTGTGTGTCTGTGATTTTTTTTTTAACAAATCTCTTGGCCCAGGTAATGTCATGTAGT
ATGCATTGCCTTAGAAGCCAAAAATTGTAAAGGTATACACTGTGGGTGTCCATTGCACTTATTATAATTCCAGGGATAAGAAAAAGCTATCATT
TTATCTATGCAATCCCGTAATGGCTTGTGCGTATTGTATCTGGATTATAGTATTAATAACAACACCAATCACAAGCATCCTGGTTGTAATATTT
GCTGCATACTATCTCTGGGCATTCCTTAAACGAGGCTCAATAGATAGTGGCCCATTGCTCCATTTGTTTAATCGCACATGAGTTAATAATAGTG
GGTATCATCTGATGTGAAGGAAAAGGCGGCCCACAGAGCTTAGAAGGCATCTATGAGTCACAAGTGAAATTGTACAATCTGACTTAGCTGGAAG
GATGTTACTAAGTCGTACTACAGAGAGGAGGAGAAGTGCTAACCTCAGTGCTGATGTCTGTGGACTCACCCAGTGAAATCGGAGCATGGTTCCC
TTTGTTCCCAGTCTGACCTATGTTGGGTGTCCCTGTGGTGTGTATGAGGCATGCTGTTTCCATACATACTCTGCCACCAGTAGGGTGTGGATTA
CCAGGGATAGGGTGATCCACCAATCGAGGTATAATTGACATTGGTGAAGGTAGGAACTTTCTCAGGTAAGGAAAGGGCAGAACAACAGCATAGG
CATAAATCTTCGACGTCATTTGCAGCCAGCAGTAGGGAATCTGATTGTCCTCTGGGAGTCACCCAAATGGTGTTACCAGATACAAGGGTTGTTG
GTTCAATCTCCTGGGTGTCCGGAGCAGGTCAAGGTTTGTTCCATAGTGCCCTTAGTGGAGCAAAGTACATGGGCAGAAAATGAGAATGCTTCCC
TCTCCAGATAGTGGTGGGTGGTTTGCTAGTTTTATGCTCGGTAATGACCAAACTAAGACTGAGAATGCACCCAGAGTGAGTGGTCCATGCCAGA
TCCTTGTCAGGATTGAGAGGAGAAAAAAATAGCCAGGCTCTGGATTTTCTATGAGGCAGAAGGAACAGGTAAAAGAACCAAGTTCCTTTGCTGT
GGGCAGTCACTTCAGGGCCCCCATGTTCGTGAATACTGGTAAATCATGTTGTGTCCAGTGGGTACATACATTACCAGAGCTTGCAGCATCTCTG
TTGGTGGTCTCCTCATTTGCTGTGAATTAAAATATGGTGCATTTATGCCAGAGAGGTATGGATTTAATGTAAGCATGACTATGGGCAGTATTTT
TCGCTACGGGGAATGCTATTGTCCTGCATGTTCTTTCAATATCCCTTGAFTTTAAAAGCCCATTGTGTCATTCTGTGACACCTACTACTGTAGG
ACCAGAGAATAAATGAGAAATCCAAGCAGTGTTCTTTGGTAATGCCTATGGTTGAATCTTCTTTGCAGACAAGTGAGAGTCTTGATCTGACTGG
ATAACTTTGTGTAACTTTTGTACTCCCAAAGGCCATACAAACTATTTTATCAGTTCCTCAATAACATTAGCAGAGCTTGGTGCCTTTCGTGCGT
AAGCCAAGAGTAAGCCTGTGTAGGAATTACTACATTGTTGTGGCATATGTAATAGTTCCTGCTGCTTCAGAGAGGGGCCCAATAAAATTGACTG
GATTTGCCAGCTCTGATATAGCCCTTCTCCTGTGCAGTAGGTCCAAGTCTCTAGATTTCTGGTCTATGGTACCCTCCCTAACAGCTTCATGTAA
ATGTCTCTCTGCTGGGTCTATTTCTCATTAACAGTTGATTTTCATGGTCTCATGATGCCCAAATGCCCTGACCTCTCCTTTATAGGGTCAACGG
TAGCTCTTACCAAAGTTCTGCTGTCTCCCTTCTTTTCAAAAGGATTAACTACTTTGGTACTTTAGCTAGTTTGTCAGTTTCCAGGTTGTATTGT
TTGCTGTGAGCTGAGGTATGGTGTACAAAGATGTGCAGAGTGGAGGCCAATGTGCTGATATTTTCCCCCACATCTCCTTACCCCAAATCTGTCA
GCCTTGTATGTTCCAGCCCTGATTTTGTCCAAGTCCCAACCCAATAGCCTATTAGCCACTGACCAGGAGTTGCCAAAAATGTGAAACTTAGTAA
AATGTTTGTCGAACGCCTTCTCTATTTCTAGGGGTGTTGCACACAGCCTGGCCCATTGGCCACTTTCGCCCATCCCCATATGGAAGTTGGAGTA
TTTGAATAAGGGTAGTACGCTGTTGCTGTCCTTTATCTGACTCCCTTATACCCTGTCCTCACTCCATTGCTAAAGAAAAACATTAATTTTCTTC
TTATGAAAGTGCTGGCCATACTCCCTCCATTCCCCAATGAGCAAGAGCCAGGGGCATTTCCAGGGGTTTTGGCAAGTTAACCTCACTGACAGAG
TATGTGGCCATTTCCTCACACAGTAGTGACACTCCAGGAGGGCCAGGTGTAGTTCAATCCTGTAGATACCATTTTCATTTTAATAAAGAAGCTT
CTGTTGCTGATCCAATTTTATGGGCAGCTCTGTCCATTACCCAGGGCATAACAGGAATCTCGGTCCATAGGGTAATTTTCTCTGCCCCACCAGG
GCTTCAGTTTTGATAAGTGCCCCATATGCTGCCAGTGGGTGTCTGTCTAGTGAATACTTTAGGCTGAGGCTGAGAGCTACTTACACCAAAAGCC
CATGGGTAGGCATTTACCTCTCCATTTCGTCCAGAGGCTCCAGGAAGCAAATTTGGGAGCAGTGGAAACTTATAATTGCAAGTCTTGTCCTTGG
GAGCACTAGAGGGAGAGCCAAAGTATTAGCCTCCTTTAGCTCAACCAGTGACTGTAGATGTTCAGGTCCCTACTGAAAAAAGGAAGCTTTACAG
GTGTCTCGATAGACAATTCAGCAAGGGTCAGCAAATATTGGAGGTGAGGAAGGCATTGTGCTATAATTCCTAATGAATGTTGCGGGTTCTTTAC
TGATGTGAGCGGTTTAAGCATGAGGAGCTTGTCTTTTATCAGATTGGAAATAGTCTGAACACTATTTCTCTCCTGTCAAAGTGTAGAGATCTTA
TTCCTAGATTTAGACTGCCCTTAGGAATCGGCTCAGATAATGGGCCAGCGTTTGTGGCTGACTTGGTACAGAAAACAGCAAAGGTATTGAGGAT
CACATGGAAACTGCATGCTGCCTACCGACCGCAAAGTTCTGGAAAGGTGACCGAGTCTGGATCAAAGACTGAAACATAGCCCCTTTGCATGCAC
GGTGGGAAGGACCCCAGCCCATCATCCTGACCACTCTCACTGCTGTGAAGGTAGAAGGAATCCCGGCCTGGATCCACCTCAGCAGTGTAAAACC
TGCAGCCCCTGAAACTTAGGAGGCAAGACCAAGACCGGATAACTCAGGCCGTGCTCCGCCTGTCAGATAGTAAATCCCAGGTGATGTACCTGCT
GTCAGCAGATCTAGGCTTTCTTCTTGGACACCTTATACCCACAGTCCTCCAGGTGCCAAAGTAGGGCATCCGTTCCCTTGGCAAACCCGACTCC
TGTGGGGTGTCCTAGCAGAAGGTCCTCGACGTACTGGAGCAACACGCACCCTGGGTCTCTGGCAGGAAACTTCTGGAAGTCCCGAACCAATGTT
TCCTCGAAGAGATGGTGGGGGAGTTCTTGAACCTTTGGGGAAGGCGGGTTCAACTGTACTGAGTGGTGACACCCGACCCCAGATCTTCCCACTG
AAAGGCAAACAGTTTCTGGCTCTCAGGGGCTAGTCTGATGCTAAAGAAAGAGTCTTTCAAGTCCAAGCAGGTGAACCAGCTGTCCTCAGCTGAC
AGCAACCCTAACAACATGTACACTTAGGCACTGTTGGATGTAAACTCACTGTAGCTTGATTAACCAAGCACAAGTCCTGTACTGGCCTGTAGTC
CTTGGTCCTTGGCTTGGGAACAGGCAGGAGGAAAGTGTAGTATTCTGAGGTCTCAACAGGCAGGAGTGGAAAAACACCCTTCCGAGTTCCTAGT
GTAGCCTTCAAATTTTACAGACTTATACCTTACATGGTGTAATTGCCAATCCACTCTCAGTGAGAGGTGCTTTACTGAGGGTTGTGATCAACTG
TGAAACAGAGTCTTGGTCACGTTCTGCGAGGAGGATGTCACCGATATAATGCCAAAGCATAGTTTCTGGTCAAATTGAGGGGCAGGTGTCTATC
TCCTGTTGGCAATCACTCTCCAATTGGAGGGCTATTAAGTATCCCCCAAAAAGCTAGCATCACAATGAAGATGAGGGGAAACAAATACCCCAAA
AGCAAGTGGGTAAAGGCGTACTATTGACTCTCAAAGGTCGAAGTGAAATGTGTTTGACTCAACTGTGAAATTTTTACTAAACAGAACATGTTAG
CCAAGTCTACAACTCCAGATTCAAATTCTGGTGGCTTTAGATGCCCTGGATTAATATAAACTTACCACTGATGTTTTGAATGACACCCATTAAC
GCAACAATGTCCTATACAGGTGCTCTAATAAAGGAAACAGCCCTGCTGAACTCTCTATGGTCTATAGTCTCCACTGATTACTAGTGTCTCTTAG
GGCAGGCCATATGGGGAATTGATAGGTGAGGTAGTAGGAGTCAGTGTTCCTTGTTTATCTATGTCACCTGTGACAGGCCATAATCCTTCAGTGT
CCTGCTTCAGCTTCTGCTGTGGTATATGAACCACCTGAACCAGGAGGGGCAGGTTAACTGGTTCCCTCCGCGAAGTGCCCACCAGTAGCATAAA
AACCTTAGTCTTATGTCATGAGTTTATCTGCGGCCTCAGGAGGTCTCTTCCAATAATGGGGAAATGGATAATCTTGGAGGGGAGGCAAGCAGGA
CAGAAGCATATTTTTAGCAAAACTGAGCCAATTTTAATAGTTAAGAGGGGAATTATCCCTTTAATTAATCCCTTTAATTAACCCCCTTCCAAGC
AGGTAGCCTACTTGCCAGGAGGGGGTTCCTTTTAAAGCATGTGTGTGTGTTGGCATTAGGGAGATTTGGGCACCCCTGACTGACAGAGTTAGCC
AGTGTTGTTTGTCAGTGCCCAAGCCACAGTTAATATGGTGAAAGGGCAACTGTCTGTCAGAACCGGCCTTCCGACACTGCAGGATCCCTGTGTG
ACAGAAGATTCTTACCCATTTGGCAAGCATCAGAGACAGGTGTGGAAGATAAGGTTACCTCCAAAGCGAAAGCCAGCTGGGCTGGGAGGGGGTC
GTAATCTAACCCTAGTAAGTATTGCAATTGCTCCAAACATTCACCAGAGATCATCCAATTTGGGACCTTCTTGTGCCTTAGGGTCTAACATAAC
CTCTTTTCGTCATCTCGTGGTTGATGCATACATCGGATCCTGGCCACAGGTGGTTTGTTTGGCCCAGGAGGGGCAGCCTGACTGGTGATAGTAA
CTTTGATTTAGGCCAGGTAGGGTATTATACTGTTACCACGCAGCACCTGACTCTGAGTTTATCTTTCATCAGTTTCTATTAAATCCAGTGCAGC
TATGGTCTCTTGAATTGTTTTAGCAGTAGCCACCATGCCCAGTAAAGAAGATTTTCCCAGGAGCCCCGCCCCCCGAGGAACAATTGAGTGGACT
CAGGACTCAATTCAGACTCCTCCAGTCTTGTCAAGTCATCCTGCCCCACCTCATTTCTTGCCTCCACTCCAACATGTCCAACTGGTGGAGGAGA
TGTTTGGCCTTGGCTAACCTTTTCCCTGGACAGTCTTCCCAGGCCATTATGAGGTCTAATGGTGGGCAGTCTTCTAATCCACAAAAATACACAT
CAGCAATAAAGATGTGAACAGAGGTCCAATGTGGCTTCTTCCCAAATTCTGCTCTAATTATACAGGTTCCTTTAGTGGGGACACAATTTTTCCA
TCATGTACTATCGCTCCTAATTGTTTAATTTCATTCCCCATTAGGTGGAATCAGTTCCCTGCCAGATGCATTCTGTAGAGCCAAGCAGCCCCTT
GTTTATTTGGTTCTTGGCCTGGGTACTTAAGGAGAGACTGGCGCTCGGGTAAGACAGAGGATAGGACTCCTCCTCTGAGCAGGAACAGACCCTT
CCTTCTTGGCTCTCCCTTTTTTTCTTTTCCATTTTTATTACTTTCTGGGTGGCTACAGGCAAAGCAGAGGGTAAGTTTTCCCAGTCCCTACCGT
GCTGACACTGTGCTGCCTTTTCTTCTGGAGAGCACCTATTCTCCTCTCCAGGGACCTCTTGTCCAAACTGTCTCTCCCAAGAGTTTGGGCTCTT
ACCTCTTCTCCAGGTGCCATCCTCGTGATAAATTACTGCCAGCAAGGTCAGCACATGCCTCATGGTTAGGAATCCTTCTTCGACCTGACAGCAA
CCTCCTCTAGCGTTCCCGGAGGGGTAGGAATATAAATTTCTTTGCCTTCAGTCACTTTAAGTACCACTCTAGCTAGCTCAGTCCAAAGGTTGAG
ATATTAATATCCCTCTGGAGAGGGGATAGCATGATGACAACTGCAACATCATAATTGAGTGTAACAACAGTAGAGGCATGCTACCTGCTTGCAA
ACGCCTTTCCACCAGCTGCCCTTAGGAGACCACCCTTGGCCTGATGTCTCTGCCTTATTGGCTCATTTACTTGCCTATCTGTCTCCGGGGAGGA
GCAAATCCTCACATCTCAGACTACCCCAAATCCTCAACCCAGCCACAGGGAGCACTTCCCACCATAGCCTGTTATGCAGTCCAGGGTGGTTCAC
CCTTATTCCAGAGGCATGCACTCCCTCTCCTTTTCTATTCACGTACACAGGTGCACAATCTCCAATGTCAACTGAGGGGGGGACCCAGGTAAGT
GCCCTGACCTCCTTCCCAAGTACCTTGGCATCTAACACCCCAAAAGTCAGTTCTAGTGGTGTCGGTTCACTCAACTACTGGTGCTACCTCTGGG
CCAGCTCAATGAGGTATAGAAGGAGACTGCAAAAAGTATATTGTTGCGGTACAGCAATGAGCGATGCTAAGCAAAACTGCTACAGAGGCATTCT
AAATGTAGAGTCTGAGCACTTAAGGCTGCCTAGGACTGATTTTTCAATTGATTGTCCTACTGACTGGGTAGACGCTATGCCAATTTCTTGTTCA
CGAAAATCCCATCCTCCTCACCACTTGTGGTGAGTTCCAAGATTTCTCGGCTGATCAATGAAGAAGACATGACCACGAGGTGGCAGTAGCGCCC
AAAAACATTTTTTTTTTTTTTTGAGAAGGGAGAAGGAGTCTCACTCTCTTCTCCAAGCTGGAATACAGTCCCCCAACCTCTGCTCACTGCAACC
TCCGCCTCCCGGGCTCAAGTGATTCTCCAGCCTCAGCCTCCGAAGTAGCTGCGATTACAGGCTCCCGCCACAATGGCGGGCTAATTTTTGTATT
TTTTAGTAGAGACGAGGTTTCACCCTATTGGCCAGGCTGGTCTCAAACAGCTGACCTCAGGTGATCCACCCGCCTCCGCCTTCCAAAGTGCTCA
GATTACAGGTGTGAGCCACCGCGCCCAGCCAAGAAGCTTTTTATTTCGGCGGTGCTTTGACAGGTTGCCAGAAAGGGGAGGTCTCTCACATCAG
ACCTTCCAGACCCACCACCAGAGGGCCACTGAGCAGAAGGGGAACAAGGCAAGGTAACTCCTGGGGTAGACGAGAATAGGAGAGGGCCTTATGT
GTCTGGGCGATATGACTCAGCAGCAGGAGAGGGAGTCTCTGGGTCAGAGGGTTCTGGAGGCAAGCACTGGCATGGGGTCTTTTATAGCCCCTGT
GTTTTCTTTAAATGTGGCTACCACATGTCAGTGCAGTTTTGTGGGCCATGCAAGGCAGGCAAGCCCTAAGTGGCTACACATATGCTTACTTGAG
CTATATTTAAAGCAATTGCATATGTGAAAAATTCGAGTTTGGCGTTGGCAGGCTTTCTGCCTGCTGTGAGGAAGTATAATGGCAATATAAAGGC
TAATATATGGAGGTCATCTTTAACCCACTGATATAATAACATGCCACTTACTCACCCACTCTGATTAATCCGACTAGCATGCTCTGAGATAAAA
TCCATTCAATCTGTACTGTCAACAGTACTCTAAGCAGCAAGGTGACATCAATCTCCAACGTTAACCCGAACTTAAAACCTTAAGCGCACACGTA
CAATACTACTGCTCCTGAGTTTTTATCTAAGAGAAATGAAAGCATAGGTCCACATAAAGACTTGTATCTGAATGTTTATAGCAGCTTCAATTGT
GCTAGTGAAAAACTGGAAACAATCCAAATTACCATACAATGAAATACTATACTATGACAAATAGTAATGAACTATTGATAGAAATAACAGCATG
GCTGAATCTGAAAATAACTACGCTGATTTTAAGAAGACAAAAAAGAGTATACAGTGTATAATTCTATTTATATAAAATTCTATAAAGCACAAAC
TAATCTATAGTGAGAGAAAGTAGATCAGTGGTTGCCTAGGGACAGCGATGGGATGGGGATGGGTAGCCAGGGAAGCAACATAAACGGGCATGAG
AAAGCCTTAGGAGGTGATGAAAATGATCGTCATTTTGAATGTCGTAAGGGCTTATGATTATTGCTAAGGAGTTATGCTTATAAAATATAAATAA
TTTGTATTTTATAAATTATATAAATTACATATAATTTCATTTAGTTTTAAATTTAAGGAATGGCAATATGTCTTGCATCAAAGAACCCTCAAAA
CAACACCTTAAGTACTGCAAAGTCTTTGACGATGTATTTGCCAGTTAACTTATCTTTAAACATCAATAATAAATAAAAATGGTCAAGACTTATT
TGTTTCTATGTGTTTATTTTAGTGTGCTATTGCTTTTTCACATTCTGGGTCATATTTTGAAAGTATTATTTCACATTGTGTAAATGTATTTTTT
TTTCACTATTAGTAAAGAGCATCTCAACTAAGGTCCTACTTTCTACTTTGATGGTATAGGAGCATGTTTGACTCAGATATGAACCACTTGTGGA
CAGAGTTATGGGTGAGAAATCTGATATTTAAGGAACACTCTGGATTAGTTTCCACTGGTGAGAAAATAAAAAAGTGATGAGCACTTTTTCCAAA
TACCACGTGATGAATCAAGTACTCAAACATGCTAACTCCATTTAGACTATTCTATTACCAAAATATTCCAATCAATGCCTGTGGACAGTTTGTA
AACTGTCATTCCCAATGCCTCCTCATTCTTCAAGTTCCCACTGAAAGGTCTCATAGCTTATCAGACCTTTGGGGGAAGTGCTTTTTTTTTTTAA
TTAAAAGTTAACTCATGTGCAGGGCAGAGTGAGGCAAAATGCAGCCAGTGGTTAGGACCTAAAGACCTCTCCTTCACCTGGCCCTTGAGAGTTT
GAGAGAAGCTCAGGAAGAAAAGCCAACCATCTGACTCCAGTGGGCTTTGAAGCACTGCTCTTGCATCTGTACATGTGGCATAAATGATGTGAAA
ACCATTAACTCTGCTGCTGATCCAGCTGCAGCGAAAAGCATTTCCTCTGATCAACGTCAACATCTGGCTGGTGGACCTCATTTTGCACCAGGTC
CTGATCGATGACCTGAGCCTGAGTCCACAGTTCACCTGATGGAGAACTCAGAGTCAAATCCCAGCCCCAAGTGAGGCTCTCTGACTGCTGCTTG
AGGGCCTAGGGACCACACCCCTGGAGTCAGGAGGGCAGAGCTGAGGATGACAGTGGAATGGCCACAAGGTAAAGATACATGTCAATATTCTATC
TCCATTAGGTCACATGGATGAAAGGCAAGAGAAAAGTAGCATATACATTTTTGAGAAGTTAAAGCTGATACGACACAAAGATGGTTGATTGTTC
TACAGACGTGGAAGGCAGGGGCTTAGGTCCTGTAAAGTCCCCCACTGAGCAAATAACTGAGACAGTACTTCCTAGTGATGCATTCTGCTGTCAA
ACAGTGTGAAATTTTCCTGGAGAAGGCTCAGGCCATCAGTCCCTGGTCCATCTTCTGGCCCCACAGACATGCTGATCGAACACCCTCCACAGGG
AGAGCATTGCACAAGTGATTCCCTTTTTAGAAATTCTTCTAAGCCAGTCAGAAGAAGACAAGCTTGCAGATGGAAGGGAATCAGAACCTGGGCA
ATATCTTGTAGTGGCCGAGCTATCCCTGTGTGTGGTTTGGAGTGTTTTCACTAAGACAAAACAGTGGCAGAAAGAAAAACCCTACACCCATACA
AACTTTGAGGGAATACTGGAGCTTATTGTAACAGACACTGGTCATGCTATGAAATTTTATTACCTTTTCTGGAGGGGTCGCAGGGCTTTGTGTT
TGGGCTGCTTTCCGTGGTCCACTAATTGTCAAGCTTGCCAAAAGTGTGACAGAATCACGGAATTACCCTTGGCAGAAACGCAGAATTACTCCTA
ACCTCTACTCTCATCCTCCACCTGGACCAGACAGAGAAACAACTTCTTGAGTTTTCAGAAACTACCAAATCTTGGCTCTAGCTCCGCATCCTTG
GCCAGACCATGGAAGCTTGGGGTGAGGGACACGGTGAACAAAAACTGCATCCTCGAGCTGCTCGCACTTCCTCTTTCCCTCTTTCGTCTTGTCT
GTGGGGTCAGAGGTTACCAGGCAGGCGTCACTAAGGTTGTCAGTGGGAGCATGTGAGCCCTAGTGGGTTCCTCCCAGGCAGCTCAACATGGGAG
CCTCCCAATTCCCCTTTCTCCTGCAAGGAAAGATACCACAGCTGTGTCATTCTCCTTCAGAGACTGCAGATTGGAGGTCTGTTTTTCCACAAAA
CCTAGTTCTAAGACATTTCTAGCAAGTGAGACTGACTCATTGGAAGTCTAGTGGTGACAGCTACCCATGGGGCAGGCTTAAATAGCGACTCCTC
CTTGTAGTGAACGAATTTCAGATTTCACACAAGAAGGGCAAAACCATGGGCTATTTTCTCCCATGAATTTTTGCCTATTTTGGGCCCTAAATCA
AATTGAGAAAAGTGTGACTAAAACACTCAAACTGCCAATATAGTTAGAGATATACACTTTGTGAGACTAACTCGGGAATCTACTGCCCTGCTTC
TGCAAGGATAAGGCTCTGTAAGGCATGACTTGAAATGAAATCCAAGCACCTTTTATCTGTTTAACTCTGGTGCAGGAGAACAGAGCAGCATTTA
AGGTATAAATTAAATTAGTCTATTCCTGAAGAGAACATTTGCTACTCACATTTATGGTGGAAGATGCAATCTCACAACACAACAAAGCTCTCCT
TGTCAGTGGAGCAGGCCAATACTGGGTAGGGCTAGACTATAGGGCTCACAGGCTCTATGCCCTAAGCTACTGATGCCCCTTTGTGCCAGAGGCT
GGGTTTTGCAACAAACTCAGTTCAGGTCTGGGAACACTGGGCCCACCGAGAATCCTAAATAGTCAACTAAAATCCCTGAAATACCCAGGCCTGT
TTCTTTAATCATTAGTATTGTTTGCATACCTTTAGGAGGTACAAGCGCAGTTTTGTTACATGGTTATATTACCCACTGGTGAAGTGTAGGCTTA
CCAAAGCAAAAACAGGGTGGTAGATAATCTCCCTTGTGCAATCAACAACTATAACCCTGGCAGGTAGGCTGCCTACTATTCATACTGACTACAG
AGACCCTGGACTCCTCTAACCTGATAAAGGATATGAAGCCAGTTATCTATTTATTACCTCTTAGCTCCAAATTCACCAGTCAATATATATTCTT
CGATAATAGAGGGATTCTTTAAGCATCTCTCCTTTAAAGTAGCATCAAACAGCACGATGTTACACTTACTTAATAGAGGGCTCTGGAGGGACAG
ACATTGAAAAAGGAAGGGTACTTCTATGATTTCTGCCTCTCAGAGGTGTGGAGCTAAGCACATTCAGGATGCTTTCTCCCAGGCCTGGGCCCAG
AACAACTGTCCCTCAGTAAACCTGCAGTCCTGGTGTGCCCTGATGATCAGCTTCTTGTGGCCCTCTTGATAGGGACATCCTGTACTCCAAGTCA
TCTGCCCACTGCTTCCCTCTGCTCACTTGCTCCGCAGCCACACACACACACACACACACACACACACACACACACACACGACCAGGTTCATGTA
GTCCTTTCAATACTGCAGCCCTCTCAACACCGAGCCCCCACCCTGATCCTCTGCAAGGGGCATTGTTTACTCCAGCCCTCCAACTGAGACAGGA
CTCCCAACCCCTACTTCACACCACATACTAGGCACCAGCTATGGCTTGTCCACACTACCATGCTCCAAAGGGTGCCTTCTTGCTTCCTCTGCGA
CCGTAGACCAGTTCTGCCTCTGTACACCACCTTAGGTACTGGCAAACCAGTGGAACTTCTCTGCCATCCACTACGTTCTTCTCCAATTAGGTAT
AAAATCCATCCTTGGGGAGAAGCTTTCATTCTAAGCTTGTCTTTCCTTGGGTACTCTCTCCCAGCCCCACAAAACCCCACATAGAGTTGTCTTG
TATCCTATACAAGATCTTTTATCATCGCTTAATGATTCTTTATATTAAATTTTCCCCTTCTAGATCACTGTGTGCTTTCTATCTCCTGATTGGA
TCCATATTGCTGCAGAACACAACATCTACAGCAAGCATCATTCTTAATGGAGAATCACTGAAAGCTTTCTCTTCAAGAGCTACATCAAGTAAGG
ATATCCACTATCACCACTTCTATGCAATAGTTTACTGGCGGTAGGGGCGGGGTCCCAGGCAGACCAGTAGGGCAAGAAAAACCAATAAGATATT
TGGAAAGGAAGAAGAAAGACTGGAACTATTTTCAGATGATATGACAGTGTATATAAAATTCTACAAAGTATTACAGACAAATTATTAGAATCGA
TAGAAGAGTTTATATGCTTATAGGATAAAATCTTAACGAACAAAAGCCAATTGTATGCTATTTAGAGCTATAAATTTAGACAATAAAAATTTCA
AACATATGATTTGCAAAATATTAAATGCCTAGGATAAAAAAGTTGCCTTGTGGGAAAAATATAAAATAATATTTGGGCAAATTAAAGGTGATCT
TATTAACAGAAGAGATAGACCATAACCACGAATCGAACATTCAATATTGAGAAGTCAAATCTAAAATATCAGCACAATTCAAATTAGAACCCCA
AACTAGCTGTTGGTTGAAGTTTTTACGATTAGTTTATAATTTAAATGGAATTGAAATGGACCAAAAGTAGCCAAGACACTTTTGAAGAGCAAGG
TAGAATTCATTTGCCTAATCCAAATATCAGAATTGACTATGGATCTGTAGTAATTAAGACAGTGTGGTATTTCAAACAGACAAGTGCTTAATAC
AGAGTATAGAACTAGCCCACATATGTGTAGATACTTCATTTATGGCACTGTAAATCAACTGGCAAAAGGCAGACTTTTCAATAAGTGGTTCACT
GAGAAAACTGGATATTCACTTACTTACATACATATATACATAAATGGAACTCTACTTAACACAATACACAAACATCAATTGCAGGTGGATTAAG
ACCTGACTATGAAGGACAATAGCAGACATATTTTAGAAGAAAATATAGAGAATGCTTTCATGGTCCAGGGTTCCTTAAAACAGAAAAGATTTCT
TAAAACAAAAAAGCACTAACCATCAGGAAAAGAATGATGAAATTGACTATATTATAATTAATAGCTTCTGTTCACAAACCGGAGCACAAACCAA
GTGAATATACAAACAGAGCAAGGGAGTATTTTGGCCGCAGGTGTGGAAGAGTATTTAAAATATTTAACAGACTCATTAAGTCAGTATCAGATGA
ACAATAAAATAGAAACGTGGGTTAAAAGAGGTAAATTTGAATAGGCCTTCCTCAAAATAGAAACTCCAAAAGGCTCATTAACACAAAAATGTGC
TAAAGCTTAATAGTAATTTGGATATTGCCCACCAGTAGACCGGCAAAATTTAAATTCGGGCAATACTTGGTGTAGGTGAACATGTGCATCAGTA
AGGACTCTCTATGCTGCTGGTGGGATTGACAACTCTCCCAATCACTACAGAGAACAATTTGGCATCATCTAGTAAACCTGAGGATATCCATTCC
CTATGGCCCTGTGATTCTATTCTTGGATATATACCCTAGAGAGATTTTTACACGTGTCCCATTAGAATGTGCAAGAATGTTCACAATAAATCAT
TGAAAAGTAGAAGCAATCCTAATCTCCATCTGCTGTAGAATGGAGTGGAATAATCATACAATAATCACTTTGCTATAAGCATATGCTGGAAAGA
CAGTCGATGGAGACAAAGGATCTACTTACTTATAGCTATTATGAACAACATGGACGAGTCTCTCAAGTATAATACAGAGTGAAAAAAGCAAGCT
ATAAAAGGAAGCATGCCGTATGATTCCACTTATACAACTTCATATCAACTCTATTGTTTAGGGATGCGTACAAAAGTGATAAAGCTATAAAGGA
AAGCAGTGAAATGATTATTACAAAGTCGCAGCAATTACTATATCTATATAGGAGAGAGTGGTTTGTGACTGGAAGCAGTACAGCAGCTGTATTC
TGGGAGCTTGGCAGTGGTCTATTGCTTGACCTTGGTCCTGGTTAAGTAGGTGTCTGCTTTTGTAAAATAATCTAAACTATACAGATACGTTATA
TGCACTCTTCTAATTTCAGATTTGAAAAGTGCTTCCTCCAGAAAAAGTAATAGAAAGAAAAGTATGTGGAGTAGAAATTTTGATGAGGTTCGAA
TAGTTATGGTTGAAAAACTTGATTTTCAAGAGACCAAGTGTCCACTGTTATTAAAAGAGGGCGAGAGAGCTGGGAGTATTTAAACAACAGGTTA
CACCCCCCCACCCCCACCACCACCAATCTGTTCATCACTCTAAGCCTTCTCATCTCACATATTTCACGCTATATTTGTGTCAATTCCAAACTCA
TTCGTGACAGACAAATTGGAGGATTGTCGTCATCATTAATAAGGACATTAGGCACCAAAGGCCCAGCAAGACTGGGCCACCACACTTAAATGTG
AGCAGGTACACCGGGGCGAGTGGACACAATCGTCTGTGCACATTACTTGGCAGAGTCCATTGAGTGACTGAGGGTTTAACCTTAACACATTTAA
CTGGAACTCCTGCCCAGAGAATGTGCTCGAGAATGCAGAATAAACTGAGCAATGCCCTCATTGTGCTATGAGAGTGGACATGAAGTTTATCATG
GTACAACCGATCGTCGAACGGCAAAGAGTTGGTTTACGTTGTCCACTGTATAGGGAGAAGCCACGGGCGGGTTGGGTTTTTTTCCACATTTCAG
TATAAATTGTTTCATCCTCCACACTTTGCATTTCTACGCTGAAGAGTGCTAATCTGTTTTGGCCGCATCTCTCACTCATTCTAATCTCTGTTAT
CAGCAGACAAAAATTGAACTATGTGGCAAATTGTACCGAGCACTTTGCTCAAGACAATTGTGAGTATGGAAGTTGTCCCGCGCAGACGTGGGAA
GGGGAAGGGCAATTTCCGCAGAAATGCCAGCACTATGGTGGTTTAATGCTGACACAGAGACAGTTTTTTCTCTCAGGAATTGTCTTTCATCCAT
CAATCCAGCCAGGTAGCCAGCCAATAAACAAATTTTAACACACAAAAAGTATGAAGCAACATGTCTAACACTGGGAGGGGCTGGCGTGTGTTTA
TTTGGGTATATACAATCAGTCACGGATTAAAATTGCTTTTACCACATAGATACCTAGGTGTTCCACAGCATTATTGAACAAGATGTCGTCATTT
CCCCATTACTTCACAACACCTCCTTAATTACTTATATTAATTGTAGAATATATTTATGCATACCAGGCTCTACCTCTGGGCTTTCTATTCCCTT
CCAGAGACCCAGTACCAGAATATTTAAATCACTGTGGCGTTGAATACATTTTAATATCTGATAGGGCCAGTTTCTGCGCATTGCACATTTTTTT
TTCCCCTTTCAGGAACGTGTTCACGCCCGCGGCAGGGGGCGGGATCGCGCCTCCTCCTCGGCTCTGGTTCCAGCCGAGCCTCTCGGACGCAGAG
ATGGAAATCCCGAAGCTGCTCCCGGCTCGCGGGACACTACAGGGCGGCGGCGGCGGCGGTATCCCCGCGCGTCGCGCCCGAGTCCACCGAGGCC
CTGACTCGCCGGCTGGCCACGTCCCCACGCGCCGCCTCCTGCTGCCCCGCGGCCCCCAAGATGGCGGGCGCGCGCCGCGGCGCGAGGAGGCCAG
CACGGCATCACGCGGCCCTGGCCCAAGCCTGTTCGCGCCGAGGCCCCATCAACCTAGCGGCGCCGGCGACGACTTCTTCCTGGTGCTGCTTGAC
CCGGTGGGTGGCGACGTGGAGACCGCGGGCTCCGGTCAGCCCGCAGGGCCTGTGTTGAGGGAGGAGGCCAAGGCGGGCCCGGGGCTCCAGGGGG
ACGAGAGCGGCGCGAACCCCGCCGGCTGCTCTGCGCAGGGCCCCCACTGCCTGTCCGCGGTTCCCACTCCGGCCCCGATCTCCGCCCCCGGCCC
CGCCGCGGCCTTCGCCGGCACAGTCACTATCCACAACCAGCACCTGCTGTTGCGCTTTGAGAACGGCGTCCTCACCCTGGCCACCCCCCCACCA
CACGCCTGGGAGCCAGGGGCCGCTCCTGCCCAGCAGCCCAGGTGTCTGATCGCGCCCCAAGCTGGGTTCCCGCAAGCCGCGCACCCGGGTGACT
GCCCAGAGCTGCCGTCCGACCTCCTGCTAGCCGACCCCGCAGAACCCGCGCCTGCTCCGGCGCCCCAGGAGGACGCGGAGGCCCTGGCCGCCGC
CCTGGGCCCCCGCGGACTGCTGGGCTCTGGTCCAGGCGTGGTGCTGTACCTGTGCCCCGAGGCGCTGTGCGGGCAAACCTTCGCCAAGAAGCAC
CAGCTGAAGATGCACCTGCTGACGCACAGCAGCAGCCAGGCCCAGAGGCCCTTCAAATGCCCCCTGGGTGGCTGCGGCTGGACCTTCACCACCT
CTTACAAGCTCAAGAGGCACCTGCAGTCGCACGATAAACTGCGGCCCTTCGCCTGCCCTGCGGAGGGCTGTGGCAAGAGCTTCACCACCGTGTA
CAACCTCAAGGCGCACATGAAGGGCCATGAGCAGGAGAACTCGTTCAAATGTGAGGTGTGCGAGGAGAGCTTCCCCACGCAGGCCAAACTCGGC
GCCCACCAGCGCAGCCACTTCGAACCCGAGAGGCCTTACCAGTGCCCGTTTTCTGGCTGCAAGAAGACATTTATCACACTGAGTCCTCTGTTTT
CCCATAACCGCGCCCATTTCAGGGAACAGGAACTGTTTTCCTGCTCTTTCCCTGGCTGCAGCAAGCAATATGACAAGGCTTGTAGGCTGAAAAT
TCACCTGCGGAGTCACACCGGCGAGAGACCTTTCCTTTGTGACTTTGATGGCTGTGGCTGGAACTTCACCAGCATGTGCAAACTCTTAAGGCAC
AAAAGGAAGCACGACGATGACCGGAGGTTCATGTGCCCTGTGGAAGGCTGTGGCAAATCTTTCACGAGGGCCGAACATCTGAAAGGCCACAGCA
TTACCCACCTGGGCACAAAGCCTTTCGTGTGTCCTGTGGCAGGCTGCTGTGCCAGGTTCTCTGCTCGCAGTAGCCTCTACATTCACTCCAAGAA
ACACCTGCAGGATGTGGACACTTGGAAAAGCCGTTGCCCCATCTCCTCTTGTAATAAACTCTTCACATCCAAGCACAGCATGAAGACGCACATG
GTTAAAAGGCATAAGGTGGGCCACGATCTCTTAGCTCAGCTAGAAGCAGCAAATTCTCTCACACCCACCAGTGAACTTACCAGCCAGAGACAGA
ATGATCTCAGTGATGCAGAGATAGTGTCTCTCTTCTCTGATGTACCTGACAGTACTTCTGCTGCATTGCTGGACACAGCATTGGTGAACTCTGG
AATCTTGACTATTCATGTGGCTTCTGTGACCTCCACTCTGGCAGGGCACCTCCCTGCTAATAATAATAATTCCGTAGGGCAGCCTCTGCACCCT
CCGTCCTTGATGGCCACCAGCGACCCTCCTCAAAGTCTGGATACCTCTCTCTTTTTTGGAACGGCGGCCACTGGTTTTCAGCAGAGCTCCTTAA
ATATGGATGAGGTCTCAAGTGTAAGTGTGGGGCCATTCGCATCTCTGGACTCTTTGCCCATCAAAAACTCCAGTCCAGACCCTCACGCTTTGAC
ACCCAGCAGTAAGCTAACAGTGGACACAGATACTCTGACTCCTTCGACCACCCTTTGTGAAAACAGTCTCTCACAACTACTGACACCAACCAAA
GCGGAGTGGAACGTACATCCTAACTCTGACTTCTTTGGACAGGAGGGAGAAACCCAGTTTGGATTCCCCAATGCAGCAGGAAACCATGGTTCTC
AGAAAGAAAGAAATCTTATCACTGTGACTGGCAGCTCATTTTTGGTATGAAGCAACTCTATTCATTCCTTGCCATGTGGCTAACTTTTATTACA
GTCAATTTTGAGGATATTCTGGACTAAATATTTAAGTGCAGTCATTTCTTTTTGGTTTGCAAAAAGAGCACAGCCCTGGACTATGAGTTTGGAG
ATCTAAATTCTGATCTTGAGTCTGGAACTGACAAGTTGTGTGACCCTCAGCAAGTCACTTAACCTATCTGAGCCTTAATTTCCTTATTTATAAA
TTGTSGTGGTTTCAACACATTGCTCATAACGTCTTTTCAGTTTTGTTTTCTTTTGTTTTGTGATTTTGTGCTTTTTCTTGAAAATTTTCGGGCA
TTTTGCAATTATTATTGTTTGTACTTGTAATCAGAAGCGGTTTGAGCCCTGTAGCACTAAATAATGAAAGATTGAGGAACTGGTGTTTTACATT
AAAAATTTAATGGAAATTTTACACAGTACGAAAATCTAATCATACAGCTCAAAAAAAAASACCTAAAAATAGGAGTTGGTTCTTCTTAGCTGTT
TATCCTTCTAACCTTTTTTTTAAATGATGAAGGTATGTTTTTGTTGTGGAAAATACAACGGCTTTTGTTATCACTCACACCCAGAGTGAAATGT
TTGCTTTGTCGTTTTGAAGAAGTTGGCCTTTAATAAGTTATTTAGTCTCTCTTAGCCTCAGTTTTCTATCTGTAAAATGGTCATAGCAATGTGA
ACATATGTGTTACATCCTAGACTTATTTTTCTACCCCAGTAGGTTGTATTGAAAGCAAAATGTTATATGTGTTTCAGCATGTTTTGGTGAATCT
TCATTCCCTTTCCTGCCCCTTGTTTTCCCTCCTCAAAGGGGAGAAATTAGCACAAATTAGTATCAGGATTGTGCAGGAAATAAACATTTGTGAA
CCTTAAGAAAGAGGAAAAGGAAGTTATTTCTTCAACAGATTAAGGATTTTTCTACACACAGTTCTTTTGTGGCATTGGCCACATCTCCATTAGA
CCAATTTGATAGTATCTTCGGTCTGCATTCAAAGCCAGCTCATGCAATGAGTATTCAGCCTATTCTTCCAAGACAATCTGGACATAGACCAGAG
CGACATTTTTCTCCCCTCTGTGCCCTAGAGAGCTCATTGCTGGCTTACTCTTAGASTTCAAATGAGAGGGTTTTG
HUMAN SEQUENCE—mRNA
CTGCTCGCGGCCGCCACCGCCGGGCCCCGGCCGTCCCTGGCTCCCCTCCTGCCTCGAGAAGGGCAGGGCTTCTCAGAGGCTTGGCGGGAAAAAA
GAACGGACCGAGGGATCGCCCTGAGTATAAAAGCCGCTTTTCCGGGCTTTATCTAACTCGCTGTAGTAATTCCACCGAGAGGCAGAGGGAGCCA
CCGGGCGGCCGCCTAGGGTGGAAGAGCCGGGCGAGCAGAGCTCCGCTGCGGGCGTCCTGGGAAGGGAGATCCGGACCGAATAGGGGGCTTCGCC
TCTGGCCCAGCCCTCCCGCTTGATCCCCCAGGCCAGCGGTCCGCAACCCTTGCCGCATCCACGAAACTTTGCCCATAGGAGCGGGCCGGGACTT
TGCACTGGAACTTACAACACCCGACCAAGGACCCGACTCTCCCGACCCGGGGAGCCTATTCTCCCCATTTGCGGACACTTCCCCGCCGCTGCCA
GGACCCGCTTCTCTGAAAGGCTCTCCTTGCAGCTGCTTAGACGCTGGATTTTTTTCGGGTAGTGGAAAACCAGCAGCCTCCCGCGACGATGCCC
CTCAACGTTAGCTTCACCAACAGCAACTATCACCTCGACTACGACTCCGTGCAGCCGTATTTCTACTGCGACGAGGACGACTACTTCTACCAGC
AGCACCACCAGAGCGACCTGCAGCCCCCGCCGCCCAGCGAGCATATCTGGAAGAAATTCGAGCTGCTGCCCACCCCGCCCCTGTCCCCTAGCCC
CCGCTCCGGGCTCTGCTCGCCCTCCTACGTTGCGGTCACACCCTTCTCCCTTCGGGGAGACAACGACGGCGGTGGCGGGAGCTTCTCCACGGCC
GACCAGCTGGAGATGGTGACCGAGCTGCTGGGAGGAGACATGGTGAACCAGAGTTTCATCTGCGACCCGGACGACGAGACCTTCATCAAAAACA
TCATCATCCAGGACTGTATGTGGAGCGGCTTCTCGGCCGCCGCCAAGCTCGTCTCAGAGAAGCTGGCCTCCTACCAGGCTGCGCGCAAAGACAG
CGGCAGCCCGAACCCCGCCCGCGGCCACAGCGTCTGCTCCACCTCCAGCTTGTACCTGCAGGATCTGAGCGCCGCCGCCTCACAGTGCATCGAC
CCCTCGGTGGTCTTCCCCTACCCTCTCAACGACAGCAGCTCGCCCAAGTCCTGCGCCTCGCAAGACTCCAGCGCCTTCTCTCCGTCCTCGAATT
CTCTGCTCTCCTCGACGGAGTCCTCCCCGCAGGGCAGCCCCGAGCCCCTGGTGCTCCATGAGGAGACACCGCCCACCACCAGCAGCGACTCTGA
GGACGAACAAGAAGATCAGGAAGAAATCGATGTTGTTTCTGTGGAAAAGAGGCAGGCTCCTGGCAAAAGGTCAGAGTCTGGATCACCTTCTGCT
CGAGGCCACAGCAAACCTCCTCACAGCCCACTGGTCCTCAAGAGGTGCCACGTCTCCACACATCAGCACAACTACGCAGCGCCTCCCTCCACTC
GGAAGGACTATCCTGCTGCCAAGAGGGTCAAGTTGGACAGTGTCAGAGTCCTGAGACAGATCAGCAACAACCGAAAATGCACCAGCCCCAGGTC
CTCGGACACCGAGGAGAATGTCAkGAGGCGAACACACAACGTCTTGGAGCGCCAGAGGAGGAACGAGCTAAAACGGAGCTTTTTTGCCCTGCGT
GACCAGATCCCGGAGTTGGAAAACAATGAAAAGGCCCCCAAGGTAGTTATCCTTAAAAAAGCCACAGCATACATCCTGTCCGTCCAAGCAGAGG
AGCAAAAGCTCATTTCTGAAGAGGACTTGTTGCGGAAACGACGAGAACAGTTGAAACACAAACTTGAACAGCTACGGAACTCTTGTGCGTAAGG
AAAAGTAAGGAAAACGATTCCTTCTAACAGAAATGTCCTGAGCAATCACCTATGAACTTGTTTCAAATGCATGATCAAATGCAACCTCACAACC
TTGGCTGAGTCTTGAGACTGAAAGATTTAGCCATAATGTAAACTGCCTCAAATTGGACTTTGGGCATAAAAGAACTTTTTTATGCTTACCATCT
TTTTTTTTTCTTTAACAGATTTGTTTTTAAGAATTGTTTTTAAAAAATTTTAA
HUMAN SEQUENCE—CODING
ATGCCCCTCAACGTTAGCTTCACCAACAGGAACTATGACCTCGACTACGACTCGGTGCAGCCGTATTTCTACTGCGACGAGGAGGAGAACTTCT
ACCAGCAGCAGCAGCAGAGCGAGCTGCAGCCCCCGGCGCCCAGCGAGGATATCTGGAAGAAATTCGAGCTGCTGCCCACCCCGCCCCTGTCCCC
TAGCCGCCGCTCCGGGCTCTGCTCGCCCTCCTACGTTGCGGTCACACCCTTCTCCCTTCGGGGAGACAACGACGGCGGTGGCGGGAGCTTCTCC
ACGGCCGACCAGCTGGAGATGGTGACCGAGCTGCTGGGAGGAGACATGGTGAACCAGAGTTTCATCTGCGACCCGGACGACGAGACCTTCATCA
AAAACATCATCATCCAGGACTGTATGTGGAGCGGCTTCTCGGCCGCCGCCAAGCTCGTCTCAGAGAAGCTGGCCTCCTACCAGGCTGCGCGCAA
AGACAGCGGCAGCCCGAACCCCGCCCGCGGCCACAGCGTCTGCTCCACCTCCAGCTTGTACCTGCAGGATCTGAGCGCCGCCGCCTCAGAGTGC
ATCGACCCCTCGGTGGTCTTCCCCTACCCTCTCAACGACAGCAGCTCGCCCAAGTCCTGCGCCTCGCAAGACTCCAGCGCCTTCTCTCCGTCCT
CGGATTCTCTGCTCTCCTCGACGGAGTCCTCCCCGCAGGGCAGCCCCGATCCCCTGGTGCTCCATGAGGAGACACCGCCCACCACCAGCAGCGA
CTCTGAGGAGGAACAAGAAGATGAGGAAGAAATCGATGTTGTTTCTGTGGAAAAGAGGCAGGCTCCTGGCAAAAGGTCAGAGTCTGGATCACCT
TCTGCTGGAGGCCACAGCAAACCTCCTCACAGCCCACTGGTCCTCAAGAGGTGCCACGTCTCCACACATCAGCACAACTACGCAGCGCCTCCCT
CCACTCGGAAGGACTATCCTGCTGCCAAGAGGGTCAAGTTGGACAGTGTCAGAGTCCTGAGACACATCAGCAACAACCGAAAATGCACCAGCCC
CAGGTCCTCGGACACCGAGGAGAATGTCAAGAGGCGAACACACAACGTCTTGGAGCGCCACAGGAGCAACGAGCTAAAACGGAGCTTTTTTGCC
CTGCGTGACCAGATCCCGGAGTTGGAAAACAATGAAAAGGCCCCCAAGGTAGTTATCCTTAAAAAAGCCACAGCATACATCCTGTCCGTCCAAG
CAGAGGAGCAAAAGCTCATTTCTGAAGAGGACTTGTTGCGGAAACGACGAGAACAGTTGAAACACAAACTTGAACAGCTACGGAACTCTTGTGC
GTAA

[0266] TABLE 2

MOUSE NOMENCLATURE
ICSGNM Bach2
Celera mCG12764
HUMAN NOMENCLATURE
HGNC BACH2
Celera hCC33075
MOUSE SEQUENCE—GENOMIC
GTGCGCTCAAGATAGAGACCAGCTACACAGCAAGTTCCAGGTCGGTGTGGGCATGAAACACTGTCTCCAAAGCCACAGGAGACAAAGGGGGGGG
GAACAACAGGTAAGGGTGACCATGTAAAAATTAAAAACTTCTGTGCTTTTAAAGAAGACCATTAAGAAAGTAAAAAAGACAAACCTTATTCATG
AGATAAAATATGTGCAACTTGCATATCTAACAAAGGTTTAGTATCTAGGCTATATAAGTAATTTTTGTAATTCAACACTCTTAAAGCAAATAAC
TCAATAACAAGCAAAGAATTAAAACATTTTCCAGAAAATATGTACATGAAACGACACTCGACATCATTAAACATTAGAAAATATAGATTACAGT
CATAATGAGATGTCACCTTACCCCCAGTGAGATCAACGTCCGAAAGACTACCACAATGCCTGTGGGGGTGTGGAGACCCTACTGATGGATTGTA
AAAGAGTACTATCATGGGAAGCGTTTTGAGCAGTTGTTCAAAATGTTAAAGAATCAGTGTATATCCCAGTACACTAACCAAGGTTCTCCAGAGA
AATAGAAGGGTGTGTGTGTGTGTGTGTGTGTGTGTGTAAGAAAGACTCGAGAATAAACGAGAATAAATGTGTTTTGAGGAACTGGTTCACATGT
TTATTGTGGAGGGCAATATTATCACTTGGACAGGATCTAGGATCATTTGTGAGACAAGTCTATGGGTCTACCTGTGGGGATTGTATAGATTAGG
TTAGCTTCTGGCCAGGCATGTGAAGGATTATCTTGATAGCTTTAATTGAGGTGGGAAGACTCACCCCAAGTATGGGCGGACACATTCCCTGGGC
TTGGTGTCCTGGACTGCATAAAGGGACAGAGGGGGGGTGGCGGGGGGGCGGGGGGGGGAGTAATCTGCACACCAACAGTCACCATTCTGTTTCC
CCACTTCAAATGCAGTATGGCCAGCTCAAACCTACCATGACAGACTGGATCCTTGAACTGTGAACCAAAATGAACCCTTTGAGCCTTAGGTTGC
TTAAGGGCTCCATGTGTGTGTGTGTTAATTTTTTTCCAAGGAAGGAGTCATCAGGTTGTAAAAGGACCTTTGATAGGAGAAATGTTAAAACATT
ATTTAGAGTGCCAGGCTAATTTTCTGGCCGTGTGATACATTGCACTAAGTGGTAGGAAGATTTTATCACAGCAACAGGAAAAGTGTTGAGAAAA
TTAAGACAATATGGAAGCTAACAAGTCTAAACTCTGTTTAGACTCTAAAGGCAGACAGTCTGCTCTCCCTCAGAAAGGCCTTCAGCCGATTGAA
TGAATCCCCCTTGTATTCTAGACAGTAATTTGCTTTACTTAAAGACTACATTAGTAAATGCTAAGCCCATCTTGCTTCAAGAGCAGAAACCCTA
GTGTGGACTGAATAAAGATTGCCTCACTCAGTGGTCAGAGTGAGCAGATGGCATACTCCCAAGAAGCAACATAGGAAAGACTAAATGATTTTTT
TTCTTTTTAAGAGCAGAAAATGTAAAACTTAAATTCAGAGCCCGGCGTGGTCGCGCACGCCTTTGATCCCAGCACTCGGGAGGCAGAGACAAGT
GGATTTCTGAGTTCGAGGCCTGGTCTACAAAGTGAGTTCCAGGACAGCCAGGACTATACAGAGAAACCCTGTCTCGAAAAATAAAACAAAACCA
AAACAAAAGACCAAAAAACCCTTAAATTCAAAGGGGGGGAGCGTTGTTACTATTGTTTGTTTGTTTGTTGTTTGTTTTTAATTTGGTTTACGTT
TTTCAGTGATGTAAGTGGTGCAAAGAATCAATGTCAGCAAAAAAACAACAACAAAACAACAGGAAGTTAAGTTGGATCTAAGATGACTGTAGCG
CCTACAGAACATCAGCTAGACCAACACAGCAGAGACTGACCAGAGGAGCGGGTGTTCCCAACACTGTCAGCTAACTTGGTGCAGCCATGTTAAC
AATAGGATTGACCAGAAGCCAGGTGGCGATGTCCCTAAAGCCAAACCAGTGCTGAGGCAAACAGCACCAGAGGAAATCACCCCGAGATGCCCGG
GGCCTTAGTGCCAGTGCTGGGGCCTGGGAACAACATGAACTCTAGTTCTTCTACAGATTTTAATCTGGAGTTCACAGATGCATAGAGGACCCCT
AATACACTTGAAAAGGTCCTTGAACCTTTGATTACCACATGGAGCAGTTTTGTGTGTGTTAATTTTTTTCCAAGGAAGGAGTCATCAGGTTGTA
AAAGGACCTTTGATAGGAGAAATGTTAAAACATTATTTAGAGTGCCAGGCTAATTTTCTGGCCGTGTGATACATTGCACTAAGTGGTCTGGCAC
TCCCAAGTCTTGGACTAAAAATGAATTCTTAGTGCATGATCTCACTGCCTGCAGGGCAGTTTGATTCTGCCCTGGCATTTGATGGGACTTGTTA
GAGGATTCGGAAAGGCAGGATGTTGGTACGTTTGAGGCCATTAAACCAAGAAGGAAGAAAAATATATTGTGGAGTTGAATTAAATGCTGAATGG
CTAAGGACATTTTTTATGGTCTTTGTCAACACTCGGAAGGAAACCCTGCTTAGAAACAAGTGAGTGACAAACCAGCTCCGTCTAGATGCAGCAT
GTTGGGTAAACAAGTCGTCTTTCCAAGAAACGCCGCTTCAGTCATGCTTTGATAGTGGAGACCGGGAGGGCTGGGATGCTTGTGTCTGTCATTA
TAACTAGTATATGACCTAGAAAAGCATCCAAAGGTCCTTTTCCATATGGAGACCAGAGTTCCTACAGCTCTGGTGTCAAATGTGGAAAACAAAT
GAAGGGTGTGTCCTGGAGGCCCTGATCTATAGGAGAGATTCTATATAAAATGAGGCACAGCCCTCAAAGTGCCTCTCTCTCCAGGCCCTTGCTT
TAAGTCTTATTTTTGGTCTTGATCATTAATTCCCATTACAGTAGATGGACAGTGGTGATGGTTGCTCAACCAGAAATGTACTTAATGACCACTA
AACTGTTTATCTAAAATGATGAAAATGGCCAATTATAAACTCTGGATACTTTATTATGACAAAAACATAGGATAATACAGAGTGGCGACGGTCC
ACTTATCTTATGTGAGAAGATTTCTGTGCAGGAGAACTAAGCGTTCAGAATCTTGTCAGTGGCCAGTCTCACCCAGAGAGATCCTGAGCGCCCT
GCCAGCCAGGGAAGAAGAGAAAAAGGACAGGCCAATTTCTGTGTCAGTAGGAATAATGAGCCAGGTGAGAAATCACAGATGATAAATAAAGTAG
AGACGAGGATGGGTAGATTGATGTGAGATGTAAGGTGAAGATAGAACTGACAGCCTGTACTGAGGGCCTAGCCAGCAGTGAGGAGCAAAGATGG
TTCGTGGTTTTTTCTGCTGGAGCAGTTGGGTCCACGGTAGCATCTTCTGTTGACATGCTGCCTCATGCCTCTCTTACCTGCCGCTCGCCTCACT
TGTCTTTAAGGGCTCTCCGCATGACTTCCTGTAGCCTTTCCTTGCTTTAGCTGCCATCCTTGTGTGGCCCCACAGGGTCAGCTCAGAAACTTGT
GAGTGTGCGATCCGGATGCTCAACTGTGTTGCCTGGATGGCACGAAGCAAGCCAGTCTGCAGATGAGACTGAGAGGCTGTGTGGCTCTCAAGAA
AGGGTCAGAACTGTGCAGGATCTCTGTTGGCTTCTAGAAGAAAGATAGCAGAGGTCTTAGAAGACTGCAAATCTTAGGAGGAGGCAGAAAGATC
TCTACAACTTGACCAAGTACTGAAGCTAGGAGGAAGAGTTAAGGCATTGTTGATGACCATCCAAGATCCAAGAAGAAACATTCTTCATGAAGTT
GACAGAAGCCCCTAAGAGGTATGCCTGCTTGCAGCCCACAGTGAACTTGATGTCTGGCTGTGTGATATAGTATCCTTGAAGTCACGTGGGCACT
AATACCCCGATGCCATTTGAGAACCGACTCTGCGGATGTTTTCTGGGTGGGCGTTGCCAGGGCTGATGATCCTCTCTAGAGGCTGGATTTCAGG
ATGAGATTGCTATTATGGGTTTTCCCTGTGATACTCAGCAACCATGGACCATATGCTTACAGTTACTCCTCGAGGGAACTCTGACAAGATGATG
ATACTGCTTTTTCAAAAGAAACTACAACAGAAGGGGAAGTGGGGGGACACACCTCTAAGTTGTAATGTGCTTCACAACGCATGAGCACTAACAA
ACTAAGCAGTCGGCTTGTGTACAAACTGCCATGGCATCTGCTGCTTTGCCACCTTGCTTTGCTGTTTTACTGAGTACACAGAAAAAGTGAACAC
CATTTTTTTGAGGAGGGGAACGTACTCTCTGACTGGTAGTGAATATCAGTGTTGTGTAGGAAAGAGGTGGCTGCTTCCTTGGGTGAGCCTGGGT
AGTCCCTTTGTCCAGCGGTGTGCCCTTAGGTAAGGCACTTTGAGTGTCCGAGCCAAGGTTCTTTTATCCTCCAAGTGGGCTAATAACACTGAAA
ATCCCTAGCTCAGTCCCTAATAGAAGTTTTCAGTAAAGGAAAATCACGGTAGTAATACAGACGCTGTACCCACAGACTGGTGTCTGTTAGTTAC
AGAGTCAATGAAAGTCTAGGAATTAGTTCAGATTAGCTAGTTTTCACTCATTTGTTTTTGGTTACTTCTCCTTTTCTTATAACTCTTTTTTCCA
AATCGCTTGGTGACAAATAGTTCAGGTTGCAACCTCTTTTAGGATAGGATAGATAACATCTGAATTTTGCTATATCTGGGAACATAAACACCGT
CCTTGGTTGTTAGACAGAGTGAATTCAGGCTCAGGAAGAGAAGGACCGATGGTCTGAGCACTGTATCCCAGAAACTGCATTCCAGCTACAGTTC
CACAGACAGAACAACTAGGTCCCTGCACCTGAAACATGTAAATGGCATCTCCCTAGGGTATGTGCCTGTTCGTGTGCACCTGTGTGTGTGCTGG
TGGTTGTCTGTGTTGTATGTGTCTCTCTCTGTCTCTGTGTGTGTGTTCAATCTTAATTCACTTTCTCCATCTTATTGAAGTGCCTTTATCTCTT
CCCCCTTTTTGCTCTGTGATAGCACAGGGCACATTTCCTTGTGTTGCTTTCCCAGGGCAGTAGAAGACACAAGAGCCCCAAGATTTGCAACCCA
AACATCTCCAATCCACATCATAAGTGGATGTCTAAATTCTGTCTGAAAGATAATTTTTAAATTCATATTTATAGATTCCAAAATTTAATGCCAA
GTGAACCCATTACTTGTTAAAGCTTTTCTGGCCACAAAATCGTGTCCACATTTAGTCCTTCTTGGTATGAGTAAGGACTTTAGAACCACTGTCA
GTAAATCTATAGCTAATATTTTGGCAGAACATTTGAACTTGATCTTGCTTAGTAGCAAATAATCTCTAAATGTTTTTATTTTTGGAATTGAACT
TTTTGTTTTCCGATCACTGTCCATTCTCTAGGCACTCAATCCAGAAGTGGGGAATGCCCCTGTGTAAATGGGGATTCGTCTCAGTATTAGCCCT
AAAAACCAGTAAGCTGGTTTTGGACAGAAGTGGTAGCCTGAACCTAGAAAACTCACCTTGACCTCTCTGTGCAGCATCTCTGCTGAGAAAACTG
TTGCTGATTTGTAGAGAGCATCCACCACTTCAGGAGATAACATTGATAAAGGAGAGAGAAGGAGAAACTTTTAATCCCACAGCCAAGGGGTGCC
ACCGTGCATGGTTGTTAGCGTGCATTCAGGCTCAGCACAGACATGGACCGATGCTCTGAATACTTTATTTTCTATCCTTTGTGTTACCCCACAT
CCTGCGAAGGTGGGAAGGAGCAATTAGGGAAGCAATTTAATCTCAGGAAGACACCAGAGAATCAGTGCTGGGAGTGAGAGGAGCCCTGAGCTAC
CTCTCTGTCTTGAAGAAGTGATTCTGCTCGTATGAGATCTATGTGTGGGTGAAAATGCCTCCACCTGCCGTCTCCTGGGGGAAGTAGCTCATCA
CATCCTCTTAAGCCCACTAACACCAGCTCAGCTAGGAGTTAAGCTGTCGGCGATAAAGAACGCAATCAGCCTTCCCTATACAACTTTCCAGAAA
ACCCAATCGTTTCGCAGCTAATTGGTACAAATGTTCCCTTGCCCCCTGTTTACAGCTGGAGACCCTCTTGAACATTTTTATGTAATTAAACACC
ATTTACTCTTCCTACCTTAAAAATGCAGGTCCTGCCGACTCTTTCTTTTAAGTAAATTTAAGATTACGCAAGAGGGAATTATAGACAGATAATT
TCCCACATTTCCACTACACTACTTTATTTGGAAATGAATGAATAGAAACCACTCACACGTCTACTTCTGCAGTTCCCCCTCCTTCTCTTAACAG
TAACTATGAAGAAAGGAAAAGGCGGTGTTGTCATGCTTGGTGTAGCTGTACCACAGCACATCACCCACTGTTTCCTGAGAACTGTCCACTGAGC
CACTCTGTGTGTGGAGTCTTTGGAAATCAATCTTGTTAGAAAATCCACTCCAGGCAGGAAGCGTCCAGCACTCCTGTATTCACCGTTGTTTCTA
ACAGGCCAGGAGTTCAGAGCGCTTACTGGCTGAATGGGGGTGATATGTGCTATCCTGTGGGCCACTGGGCCTCGAAGACCTCCAAAAGAGCAGT
GTCCTATGGTTGTGTTGTCCGCTATCCATGTTTAGCTATTTAAATTTCACTTAACTTAAAATCAATTGCTCATTCTTAGCAGGTAGACTCTAGG
TACTGGGTCGCCACACTGAGGCTGCTGTGCTGTCCTCTCCTCTGCTGTGAATGCTGAGGTCCCCATTATCATAGAAACCTAAATTACTGGCCCC
AAGATTTTTAAGAGCATCCCTTGTGACTATAGCATATAGTTAACACAAAAATCCTATTTACCAACCTGCTTGACACTAGTGGTCAAATACCAAT
CAGATTGCTAGCAAGACACCATCCAGCAGTATGAATTTGTTTCACTATACCAGTTGGTGAAATAATCAAGCACCAGAGTTAACAGACGCTCGGT
GCTCTAACCTCTTCACTATCTGCTCAGGCTATTTCCCTAAGGTTCTCCGGCCCTTCTTCAGTCATCCTAAAGTGAGGAAGCCAATGACCTGGAG
GGTCACAACACTGCAGGCCACATTGGTGGCTGGTGCTCTAGGTGTCATGGTGCCTTGACTTTGAGAAGGGGACACTTTCTAAGCGTCATTCTGT
ACGCTCACATACCACTGTCATGGCCATCACCCAAATGACAGAACTATCAGCTTCAACAAGACCTCAGACATCATCATCTCATGACCCAACAGAG
TCACTCAGCTAGTTTGTGACCAACTGAGAAATACAACACTTAGTCTGGTATTTATTTATTCACTCATCTATTGGCTACCTCTTTCTGTGTCTAC
TGTAAAATGGGGATTATTAACCTTAATGCCTGGCAACATTGTTAATAAAAAGCAAGATGTTTCTCAACCTTAAATGTATGTCTTATAATTTGAA
AAATCCCCCCAAAATCCCCACATATTCACATATATTCATATACATATTTTTTCCACCTCATTTAATCCTAAGAAGAACCTGTGTGAAGAGTTAG
GCTCAGAGGCAGAGCACCTGTCCCACATAAGGAAGCCACTGTGACACAGAGGGCTGTGTCTCTCCGGACTTAGGAACAATAATCTCTTGTAAAT
GTACGCCAATACAACCATGTGGCATTGCTAGCTTTGCGCCTGTGGCATTTTGCACTTCAGGAGTTAGCGATGTTCGAAGTTATGGCTTTGCTCG
AGTGGTGCATTTTTTCTTTTTTACACTTTGATAATCTGCCAGTTGCACAGACTTTGGTTCGGCATGGGCGGCTTTGAAGTATATTTTTAAAATG
AGAGAATCCAGATTTGTAATTAGCTTTGCAAATGCTAGTTGTACAGTTTCAGCATCCGAGGAGCTCCTGCTAATGTCCCTGTTCCTAGTGGCAG
CTCTGTGTGATTTTTTTTTTATTCCCTCTCCCTCCCCCAAGCAATTAGGAGAAACAAAGTCTGCTCTCTGAGGATCACTTCCTCACCTCTTCAT
TTGTATAAACTATGAGCTTGGTGACCTCACCCAATTAACGATATACCTGATTGCAACAAAGGACAAACCTTTATAAGCCACTCTACCCTCTTAG
GCTCCTAATTCAGGACNNNANNNNNNNNNNNNNNNNNNNNNNNNNNNNNNNNNNNNNNNNNNNNNNNNNNNNNNNNNNNNNNNNNNNNNNNNNN
NNNNNNNNNNNNNNNNNNNNNNNNNNNNNNNNNNNNNNNNNNNNNNNNNNNNNNNNNNNNNNNNNNNNNNNNNNNNNNNNNNNNNNNNNNNNNN
NNNNNNNNNNNNNNNNNNNNNNNNNNNNNNNNNNNNNNNNNNNNNNNNNNNNNNNNNNNNNNNNNNNNNNNNNNNNNNNNATGTGTATGTATGT
GTCTATGTATATACATACACCATGTACACATCGAATAGCATTTAGTGAAAAAAGAGACCATGAATTTCAGGATTTTGGAGGGGTATCCGGAAGC
CTTTGGAGGAAGGAAAAAGAAGGAAGAAATGTAGTTATAATATCCAAAAATCTTTAAATAATTTTTTAGAGAACAAAAGAAGAACCGTGGTTCT
GCATCCAAAGTACCCAGGTTCAGTTCCCAGCACCTACTTGGAGGCTCCCAACTGTCTATAACTCCAGTCTCAGGGGATCTGACACCATCTTTTG
GCTTACGCAGGCACTATATACAGGAGGGCTGCATGCACATGGTGCATTGTTATACATTCAAACAAACACTCATACACATAAAGTAAAAATATAT
AAAATCTCAAAAAAAAAACCCTAAACAAAAACTTGTGAGGACATGCTTCAAGCTCACATCACCAACGTGGTCGCTTGTTACCTTTCTAGAGACC
CAAGAAATGCTCAGAAACTCAGGCAGCCTGACACTCACGTCACCCTCCGTGTGTCGCTTGCACTGACAATGAAGGAAAACAACTGATAAGTCCT
CATTTGAGAAAAACAATTCAAGTGTTTCTATGAAATATTATAATACTACAGGGATTCAAAACTGTGTTTTCATTAACTGTAGCAACATTGCGAC
ATGTTCTCTCTTATGTAACTCATATTTAATTTCATATTTAATAATTAAATAAAAACCCTCTATGTTTGTGTACCAAAAGAATACTGGTCCACAA
TCCAATTTTAAATCCAACACCTTTCAGGGTGTGGAGTCTGTGTCCGTGTGCGTGCATGTGCACATGTGTTCATGTGCATGCATGTACATGTGTG
TATCCAACCCCAGAAGTTACACTGAATGGGCAGTGAGCTTCAACAACAAAATATCCTTAGTCATTTATTGGTCAAAGTTACCACTGTTCATTAT
TTTTTTTCCTTTACTCTTTACCTGTTTTTATGTGCTCTACAACAAACATTAACTCATTATCAGAGAAGAGGAAATAAATATGTCTAATCTTATG
AATCAAAATTTTATCTGAGGACTTAAGGTTACCTTAAAGCCAACAACAACCTTGTCTGACTTGAAAATAAACACTTTGGACCCATAGATGTCAG
CCAGAATTCACAAGTTAATCTAGAACCTCTTTTACTTAAGACCACCACTTCGCCCTCCATACTGGCGCGTTTGAATTTGATCAAGAACGCCTTC
TGAGATGCAGCCGGAGAGATCGGGGTGACTGGATCATACCCACATCCAAGCTGTGGGGGTTCAAGTGAACACCTGATAAGGGAAGCTTGTCTGC
AGGGAACGCCTGCAGAGGAGGTCTTCTGCCCGAATAGAGCCTACATATTGGTACCTAGGGGCGATTGTCTTACTCTCGCCTTGTAGTTCGTTGA
AGAGAAACACTAGAACCACTGTCGAGTACTGTGTTGTTCTCAAAGTTGAGTAGAGTTTCTGAGGCAGCAGGCAGGACATTCACGGTGTGCAACA
CTCATCCACTAACGAACGGGCTTTCCCTTCCGCTCTAGGTGGACACTCACTGATCTATCACAAGATTGCCTCACTGAGTTTGGGGGTCCATGTC
TGAATGGATTGCTGTAGCCTTCTCATCTCTTCCTCTGCCCAGTTCCCAGCATCCTAAGACTCGAAGCCAGGACAGGACCTGGGGAAATTATATG
TAAGTTTTTACTAAGATTTCTTTTCTTTAACCCAACAAGGCTCAGTGTGAGGCAGTCATGCCAATAATCCAAGCACACAAAAGTTAACTTTCTT
TTAAGAAAGTGTCATGAGAAATGTAAATTAAGCAACAAACAAGGGCTGGAATCCCACTGTTAGTACTTCCTTACCTCAGTGGTTCTTATTGTCA
GCTTGCATCAGAGTCACACTGGCTGTTTTGAGCCAAAAGATCTGGTGTCAGCCAGCAATCTGCTTTACTAACATTTTCCAAGTGATGCTGATGT
CAGTCCCCCAAGGCCCTCACTTTGAGAATCACCACTTTAACATAACTGTGTTAGAGGAGTGAATGGCAAAGGCGGCAATCTATATGCTTTAATA
TTGAATACATTAAGAGGTAGAACCTGTACTTACCTCATTGACACATACCTCAGAAAACAGCTCTAGGGTCTGCACGCCCGCTTCAGCTCACAAG
TCCAGTGGTTACCACGCGCCAGCATTCCTCCTACACTGCTGGCCACTCTTTGCCTTGGACTTTAGGAGGTCAGAGTAACGGTGCAGCTGTTAGC
TTGAGGGAGTGGCCACAGTCCCTTGACAAGTGTGCACACCATGTTTGATGTCAAAAGGAGAATCCGTGGCTCCTTTGCAAAGTGAATCTTCATA
GTACCATCCCTCCCTGGTACACTGAAATGTAATTTCATTTACAAAAGACACATCAGGGGAGGTACACCTCCAGTAAACAGTCGCTGAGCAAGGC
TCGGTTTTTATGGATTTCCAGAGCCTCAGTCCTGCCTTACTTTGAGGTCAGCTCATTACCATGTTAGCTTCCAAAAGTCTAACTACTTAACCTA
AGACAGTTTACCCTGCACTGATTCAAACCCATCAACAGTTTGGCTAAGTAAATCCTCACTTGGATAAGGTCACCGCACATACAGATGTACATAC
ATGCTTGTGAGCATGCTCTGTTTCCAAGCCAATGTAGACATTTAAAGTATTTTTCTTTCATTTCATTAAATAAATGCGAATATAAAATAGTAAT
GCTGATACTGTCCTGTCTAGGAAACATCCAAGAAATTGCTGGGCATTTTAAATTTGTGGTAAGGCACTACAGTTTATAACGTTTTTCTTGGATG
TGGTGAATGTTGTCATGCAAAGTAGCACTTGGCATTTGCAATTCTTTTATTATCATCATCGTCGTTATTATTTTAATTGAGAATGGCCGCTGTC
GATACAGTATTTGCCACCCAGCTATGTTATCCTAGATGAAATAGGCCAGACATACTTAGTGCTGTTGCTCATAGGAGGTACCTGGGGTTGTCAG
ACTCACACAGTCCATAGCGACAATAGTGGCTGCCAGCAGGAGGGCAGAGGAGTCGGGTGTATTTTTCAATGGGTACAGTCTCTGAGCTGGAAAG
GTTATATTTTGGTAGAAGGTGGTGATGTTGGTTACACAGCAATGTATATGTTCTAAAGTCTCTTATGTTACAGTCTAACATAATTTTTTTAAAG
CATAATAGCAGAACTCAGTCTTCCTTTCAAGAATGCTGGTCCTTGGCAGCAAAGTCACACTTTGAGAGGCTGCGGTGCCATCGTACACCGCACT
CTCATTGTGCTACTTTTTGTTTTCAATATTTTTTTTTACTTATTTTACATCCTGATCACACCCCCCCCTTCTCTTCTCCCAGTCCCACCCATAC
AAATCCGTCCCCCCATTTCCCCCTTCCCCTTATCCTCAGAGAAGCAGAGCTCCCTTGGGTGCCCTATCCTCGGACATCTATTCCCAGCAGCACA
AGGCACATCCCCTCCTACCGAGGCCCAACCAGCCAGTTCAAGTAGAGGGAATGTCCCATCGCAGGGGACACAGACCCAGACAGCCCCCTCTCCA
CTTGTTAGAGGACCCATATGAAGATCAACTAGGTCCAGTCCCTGATGTTTGGCTATGGGTCTCTGCCTCTGCTTCTATCCGCTGCTGGGTAAAG
CCTCTCAGGAGACAGTCATGCTAGGTGGCTCTCTGTAAGCCTAGCAGAGGATCATACTCTCAGGGGCTGGCATGCCCACATGAGATGGCTCTCA
GTCATTGGTTGGCTGTTCCCTCAGTCTCTGCCCCATCTTTATCCCTGCACATCTTATAGGCAAGACAGATTTTGAGTTGAAGGCTTTGTGGGTG
ACTTGATGTCCCCCTCCCACCTCTGGAAGTCCTGCCTGGCTATAGGAGGTGACCAGTTTAGTCTCTACATCCCCTGCTAGTAGGAATCTCAGCT
AGGGTGAACCCATACACTCCCCATATCCTTTCCCACTCCAAGCTTCCAAACAGTCCCAGAGATGCCCTCCCCCATGATTTCCATTCTCACTCCC
ACCCCTCTACTGTCCTCCTCCCTTCCCACACCTCATCTCCATGCCATCTCCATTCTCTCTCTCACCCCATCTCCCACCCAGTTCCCTCTCTCCA
TCCACATTTCATAACTATTTAGTTTCCCCTTCTGAGTGAGATTGGTGCATCCTCCCTTGGGACCTCCCTATTACTCTGAGTTGTAGCATAGTTA
TCCTGTACTTTATAGCTAATATCCACTTATACGTGAGTGTATGCCGTAAGTGTTTTGTCATAAGTGGGTCAGGGCTACCTTACTCAAGATGATA
TTCTCAAGTTTCTTCCATTTGCCTGCACAACTCATGATGTCTTTGCTCTTAATAGCAGAATAGTATTCCATTGTGTGATGTGTAAGTTGTTTCC
AGCTTCTGACTACTATGAATAAAGCTGCTAAGGACGTACTTGAACAAGTGTCTTTGTGGAATGGTGGAGCCCCTTTTGGGTATATACGTAGGAG
TGGTATACCTAGATCTTATATAGAGCTATTCCCACTTTTCTGACAAACTGCCAAATTGATTTCCAAAGCGCTTGTAAAAGTTTGCACTCCCACC
AGCAATGGAGGTGTGTTCTCCTTGTTCCACATCCTCACCAGCACATGCTGTGGCTTGGGGTTTTGATCTTGGCCATTCTGACGGGTGTAAGATG
GAATCTCAGGGTCATTTCGATTTGCGTTTTCCTAATGACTAAGGAAGCTGAGCATTTCTTTAGGTGCTTCTCAGACATTAAAGATTCCTCTGTT
GAAAATTCTCTGTCTAGCTCTGTACCCCATTTTTAATTGGGTTATTTGCTTTCTTCGTTTCTAATTTCTTGAGTTCTTTATGTACTTTGGATAT
TAACCCTCTGTCAGAATTAGACTTCGTAAAGATTCTTTflTAATCTGGTGACTGCCGCTTTGTCCTATTGGTGGTCTTTGTAGCCTTACAGAAG
CTTTTCAGTCTCATGAGGTCTCAGCAATTGTTGACTTAGTGCCTGAGCCATTGCTGCTCTGTTCAGGAAGTGTACTCCTCTACTAATATGTTCA
AGGCTATTCCCACTTTCTGCATTAGATTCAGCATATCCAGTTTTATATTGAGGTCTTTCATCCACTTGCACTTGAGTTTTGTGCAGGGTAAATA
TGGGTCTATTTGCAGACAGCCTTCCTCTACATGCAGACAGCCAGCTAGACCAGCACCATTGTTGAAGATACTTTCTTTTTCCCAATGTATGGTT
TTGCCTTCTTTGTCAAAAATCAAGTGTCCATAAGTGTGTGCGTTTATTTCTGAGTCTTCAATTCTATTCCACTGATCACCCTGTCTATTTCTAT
ACCAATACCATGCAGTGTTTATTATTATCCCTTTGAAATACAGCTCGAGATCAGGGATGGTGGCATGTGTGTTTCAGGAATAATCTGTAAGCTG
TGATATAACTGCTCCCAGGAGTGATGTCTAAACTAACTAACCCTGTGGGCCTGTAGATTTAGCCTCTGCGGTCATTGGAGACCATCACACATTT
TGGAGTCACTTCTGTTGATAGTTTTTAGAAAAATGTTTGATTTGATCATTTATAATAGACTCAGATCCCAATTATATTCTATTCATGGAACCAT
CAAATTAATTTTTTGTATACATGATAGTAGTTCAGGGGATGTGATGTTGGCAGCACGGGAATATACGTTGATATATTAATCACAACCTCCAGAG
GTTTTCCCCCAATCTCCAAATAAGCTGAGCTGGAGCGCACCGTAAAGTTCCTACCAAGTAATAACCTTAGCCGCCTAAATGCGTTACCAGTTTA
CTCTGACTCTCCAAGCGGCTGAGTGCTAGAGAAGTGGCTTTGTGGCTGCACCTGTCACTAGTGAAATGACACTTCTCACTATTACACCGCAATT
CAGGGTTCCCTTTTGTGGGTTCTTGGTCTCATThATAAAAAGATGCTAAAATGCACTCGGCGCCAGCAAGGTGGCTCAGCAGTTAAAGTAACCT
GACAACTTCAATTTGGTCCCTAGAACCTCCATGGTGGAAGCGAAGAACTGAGTCCTGAAAGTTGCCCTCTGACCTCCACACCTGTACCATGGCA
CGCGTTCATGAGCATGTGTATACACACACACACACACACACACACACACACACACACACACACACACTTGCACGCACACGGATTTTTTTTAAAG
AACAGATTCAGAAGGAAACTCAATGATCATTTTATTAGAGTTTCAGAGAAAAACAACTGGGTAGGCAAGCTATAGATCTCAGAAGCCGCTGGCA
CGACGACATCGAGAACAAGAGAGAAACCCAGGCCATTTTAAGATGCATAAAAGCCTCCATCTTGACCATTGCCATTGCGTGGCACCAGGGTGTA
GGGAATAGCATAGATAGTGAAACTGTCTGGAAGGTCAGTGAGCATTCTCCACACAGTGAGTGAACTGGGAGGAAATGCCCCAAGGTGTTGCACT
GCAGGCACACAGCCCTTTAGAGGCCATTTCACAGCACACACCTCCCTTGTGTCTACTTTACACACTTTTTTTTATTTTTAATTTTTTTTTTTGC
ACATGTTCTCTTTGTTAGATGAAACCCACGTCGAGAAAGGCTTCCAATCTTTCTGTGCCAACTGGCTTCATTCATATCTTAATCTTGGTAAAGC
AATTTTAGCATATATTCGCTTACCAGATTGCCTCACCCTCACATTAATGGTGAAGTGGCAACTTGCCCTTCTAGGAACCCCCATTCATCACAAG
AGCGCCTGCTATCTCCCACACTGGTGGCATACACTGCAGAGAATGGCTGTGTTGAGATGTGTCACTGCTCTTCTCCCCCAGGACAGCATCTGTG
ACGCTCTACAAACCAGTGGGTTTATCGAAGCCCCTGTGCGTTGTAGATTAGAAACTGTTGTGTCTAGATTTTTCCCGTATTCTACCCTTAGTTG
ACACCAAATCAGATAATTACATGAGTCTTATGTATTAACTGTTGTAATTTCTAGAAAAAAGTCAGAATCCAAAAATAATTGTCTCCTTGTGGCA
AAGCACAGCTCACTTCGGCGTATACCTTCTTGAAAAAGTAAACTCATGCATGGTTCACTTAACAACAGCTTTGCTCTGAGACCGCCAGTTTATC
CTGTGGTCCTCAGTGTGCACTCACACAGCCCACGCACACTGAATAATGTCATCTTCTGGAACTGCTCTCAATTCTCATTAGATCCGTGTTATCC
TACATAATCGTCAAAGCCACATAAAAGAATAAACGCAAATGTTCCCTCTAATCTAGCCACAAAGATACAACTCACCTACATCAGGTGCTTTTGT
GTGTCCTTCCAAACTGTTTTTATCCAAGAATTCTAACTTCATAAGCCATCCTCTCCACTGATTTGTACTGAAGATCTTGGGGGCACTTGGAAAT
AGCAGCACTAACCACACATCATCTTACAGGACGAAGAACTCCTCTTTCACGTCTTCCCTCCAGGTTCCATTACTCAGCTTTTACACAAGACACA
TGTGGACCTCCCAGTATCCTTATCTAGAGGATGCTTCTGATAGCCCTCATTCTCAACCCTACATTCGATTTAAAAACCATATTGCACGGACTTG
CAAAGCCTTTGCAGCTCCTGGGATCATAAAAGAAAGATTGGCTCTGTACAGATGATTTTAGTGTTAGCTCCACTCGCTAGGTCTGGTTACTTTG
AAAGTCATACTTAATGCACAATAAGCCAAATTGATGGGTATGGGGAAGGCTGACTTAGCTCAGTATTATCCACAATCTAGACAACACACCCTCC
AGTAAAACTCTAATTCCATCCAAGTGCCTGCCTTCTCTTGTTCTGATCCAAAGCTTTCCCTCAGCTTTTCCTTCTAGTTCCCCTCCCAACCTCA
AAAGCAGTGTCTGTTCAGAGCGCTGGGCTCTGGTGTGCGGCTCTCTTACTGCCCTGTGAAGTGGTTTCCACTTAAGGGTTGGGGTGACGCCTCA
CACTTAGACAGGGTTAAGCAGGTTCTAAAACACGCAAAGAAAGACCAGGTGTGACTTTAGGGGTTGCTTAAGCCTCCAGACTAGTACCATCCAC
AGTCCTTACCTTAGAATAGGTATTTAGTAAGCAGCTGCTGCATGCAGTTGGCGTTACAAAATGGGTCTTTGGAAATTTTTACCTTTCCGTGTAT
AAGACAATAACTTCCTTGAAAGCGAAGACTTATTTGCATCCCTTCAAATCCTGTGTCCTTCGTGGAACATAAACTCTATATAGCTTCATGTGAA
TATTTCTGTGGCAATCAGGTGGTCACGGAACCAATGCTTACATTCCACTGGGTCTTTTTTTACTATCTGCACCCAGCAATTGATGGCACTTAAG
TAAATATCCTCAATTGTGTTTGACATCCGATTGGGTACAGGTGTAGGGACAGGGCAGACAGTACCTCGATCCTCCCTGGTGAAGGAGTTGCTAA
TACTGACGAGACTTGCCTCCTTCGTTTTCGATTTGGTTGCTTCACTTCACTGAGTCACAGCACCTGCCACTTAGGATGGCCACACGGCTAAGCC
AGAAACCTTCCTTCAGATTGCTGGTGACATTATATATGAATCTCTGGTGACATTCTCGGCTGACATTTGTCGCCTGATCTCAAGTGCTTGCTAA
AAGTGAGTTAGCTTTGTCATTGACACGGAGACTAACTTTCTCTAACCCAGACTAGTGAAAACTGAATTGTGCCTCACCACACGAAGGTTTTGCT
TTCACTGTGCCCAGACCCTCCCATCTCTCACAGCACAGTCATTTTGTGTCTGATTTGGGGGCGGTGTGGTTGTTTCTCAGTGGTGTGTGACCCA
CTTTTTCATAATACTTCATTCCATGTGTTTTTACAACACAAGTCAGAAGCTGACGAGAGTGGACTGAAGCCCCAGGAGCATCTTCTGAGGCTTT
CTCGCAAGCTCTAGAACCACATTCTAAGAAGAAGGTCTTAGCCCTGCAGGGTGTGCGTCCCCTACCAGAGAGTGATGGGCCAGTTCCTCTAGTT
TCTGGATAATGAGCCAGTGCACAGGTAACGATGCCTTTCTCACGGTTGATTTCTTTTGTGTCCCAATTATTTTACCAAATTAGACCTTTAAAAA
TACTAGCCACTTACCTGCATAGCTTCTCTGTTGGGATGGGGAGGGGCTCAGGAGAGTACACATTTTCATTGATACTTTGAGACCTTAGTAACTT
TTCCTTAAGAATCTGAAGGAATCAAAAACTTATCTCTGTTTTCTGTGTGCCCCTAGCAGACGTCCTCTCTGATCGTTGGTTGTTTCGGTTTGGT
TCTACTGCTTGTTGTTGTACTTGTCTGCCAGCGTCAGATACCTCACTCCGCTGTGACATCTGGGTGATAGTTAAACCTTGATTAGCTTCTGCCT
GGGGTATGGGCAACCTGTGGCGAGAGCAGACAGAAAGCTTCAAAGAAGAGAACGGCTAATGAGGGTCCGATGTGTCTTGCTAGACACTGGCTAC
TGCAGGCTGGAAGCAGACAGAAGCCAAGTGCTATTGGCTTATGTTTGGCAAAAACCATTCCTCAACACCTGTTTATAACTTTATGTTTCTGACA
TCACAGCTGTTAACCAGACGATTCTTTTAAATATCGTCGTTTCAAAACAAAATGTTGAAGGTGTCACCTCTCCTAATGTCACTTATCCTGATTC
ACAGGACAGTTTTTGGTGAACATTTATTTACCAGGGTCTGTCTGGCTTGTGGCAGTATCATCTGCACACTGGACTGCATACCACCTTAAGATGT
GGAGCATGCCCAGAGATAAGTCAACCTTGTTTTCCATCAAAGTCCTGAGACACAAAAACAATGAAAGTACAAACAGTGACTGGAAAAAGTGTCA
CACACTTGAGCCACTTTGCATCCCTTGTTAGGACAAACCCTGGGCTGGGTTTTTACATTCGTGAAGCTGTGCCGTAGGTGCATCAGTGTGGGAG
GTTCAGAAAGAGTAGCGGTTAGAATAAGATTTTCCATTTATTGCCCTTTCTCCATGGCTAAAAATAAGATTCATACAAATCAGAATGTGTAGTG
CAAGCAAAATCATTCTGTTAATTCTGATGACTGGCCTGCCCACATCTTTGCATCTGTCTGTTAAGTGGTCCATTACGAAATAAATGTCTCTGTT
TAAATAGCAAAGGCAACCTAGGTTTTTTTTGTTGTTGTTTTAATTCTATTTCTCTACACATGATAGTCTGTCATTTTTCCTCTTCTAAACGAAG
AAAGTCATAATTCACACATACACGAATTGTGTTGGTGACTGAAGTGGTGAGATCCTTGGCTGTGTCTAAAAAGTACTCCCCTCCTTTGAAAGGT
CAATTTACGGTGTCCATCTTCAAGGCTTATTGCTAGAAAGTTATCTCTCATGAGCCCATACAGTGGTGAGGAGAGAGGGTCACTTAGCTGTATT
GGAAACTCCATGAGAACATCATCCAGTGCACACCCGTCCTCCACCGAGCTCCATCAGCACAGATGTTGGGAGGAGCAGTTGACCAAGTGAAAAC
TTCCCTTCATCTGGCTTCAGAGTCTCCTGCAACCACAGTAAGTGATAATGTCTCCATTTGTGGCTAGACGAAACACCAAAGAGAAGTGTCGGCA
GTCTTCACAGGGAAATTTGTACCTCAGTGATCCCAGCATTGATGCTGTCCCATCGCACCGACTGAAGAGCGGTGGCATTTCCACAGCTGTGTCT
GCAAGCGCACCGAGCCTTTCAGTTTGATGCGGTCCATGAGGTAGATGAGTCAGGATGCCCTCTTCACGATGCATCCTTCAAAGGCAGTCATTCA
GAAGCCTTATCAATGGGAGCGGCAAATCGCACTCCTCTGACTGTGACGGTCCCCGTGTGCCGCAGCTGAAGCAGGAGCGGTGGGAGACGACAGA
CCCCTGCACAAAGCTTAGCCGGGAGACCCACGCACCTGGGCCCATCCACTTCTCCTCCTAGACCTCAGCATCCTTATCTGGAAATGAGAAAAGG
TGCAGTACCTGCCCCGACGGGTGTCTGTGGGATTTCATCAGCTAATGATGTAAGATACAGAGCCAAAGCTGTGCGCAGTGCGCTGTCCGCGTGC
GGCTGCTCATTCATGTTCCCTCCTGCATCTCGAAGGTGTGCTGGAGCACGGCAGAGCATCCGAGGTTCTCCCCTATGTGTACAGTAGAAATTTT
AGGATTTAATACACAAAGGCTCAGCCTCTGGGTCTTCATTCCTCACTTAGAAGGTGAGAGCATTTATAGAGCACTTTCTTTTTCTTTTCTTTTT
CTTTTCTTTTTTTCATAGCCTGCTAATGCTGCCTGTCAGGTGATTTTACTTTCTAATGACATCGACATGGTGTGCAGCCCTTCCTTTGTAGATT
ACCACCGAGCATATTAGGCTATTTTTATCCGCACACTATGCTTTTCATTTAAACCCTAGTATTTCAGTTCTAACATCTGTGCGTGTTAGCTGTA
GTACCTCCTCGTGTACATTAGGCGAGCGGCTGCGCTAATGCTGTAATCAAGCCAGCTTTTAAATATTTCAGGTAGGAACTAGCAAAATCTCAGG
AGCAATTAGCTTCCATTGTAGTTTCCCTCCCTAGCGAAAACATTGCCTACGCAGTGCTGATCCATCATCAGGGTGACCAACGCTAACAGGCAGA
AGACAGTCAGCACTGCGTTCATTAGTTTTTGTTAATTATTTTCTGTTTCATGTATATGTGCCCTTCTCTGTCTTTTTCCTCCCAACAAGGTTTT
CTATTACAAGTTAAATATTATTTTATAATCTAAGGGCATAGCTATAAGCAGCACATAGCTCGTGGTCACCCTTTCGAAGCCTTGGGGTTCGACA
GTGAGAGTTCAGACTAGACGTTGCTTCAGCCTCCTCTGTGACCTTCTGGGATGCGGTTCTCATTCATCAAATTAAGAGAGAAATTGTGACACTA
CCTTGACTTTGCCTCACCTCGCGCGCGATGAAAGTGATGAATGGGACCAATAAACACACAAGTTACAGCACAGCCCAGAAGCAGCCAGGGTTCA
CTGTGAGCAGGGAACGGATTTTAACTGCAGACTCCCTTTTCATGTTCATTCTGCCATCCTACCTACCAAGGCTGATTGTAGCATACATATTAAG
GTCAGCAGATTTTCTGGGTTTCAGTGTTAGGACCTGGCAGTCTGTAGTGAAGACAGACATTCCTCAGGTTAAGGACCAAGATGGTTTGCCTTTT
CTTACAGCCATATCTCATCCCCCACATTGTATCCAGGCTGTGCTTTATATGCGTTCTCTCTCTCTCTCTCTCTCTCTCTCTCTCTCTCAAGAAA
ATCCTTTTCTTAAGAGATTCTTCTTAAGAAGAATCCTTTTCCTCAGAGAAAATCCTTCCAGGTGACTTTCAGAGTTCCTGGCATTACAGTGCAT
GCATGCACAGGCACACACGCACAGGTACACATGCGCACACTGGCACACAGTGGCACACACATGCACACACTGGCACGCACACCATTACCTTTGC
CAGCCTCACTGCACTTTGCCACTGAAGCGTCTATGAGAATTATAGACTGGAGAAGGTGATAAATTAAACTCTGGCTGTGATTTCCTACCTCACC
TTTGGGGGGGATGACAAAGGATCTGAAATTCATCCGGTTGATACACTCTACTTCTTCGTATGTAACAGTGGTTTTAACCTGTCCTTCATGTGCA
GTTTGAGGGTAGTGGCCAGGCTGGGCCCATTATTCCTTTCCTTCAATAATATAAAGAATTTGCAATCGAGATTACACTAATCATGTATTTTAAG
TGCATGTCCGCATTGGTAGTTTAGTCCTCTCAGTCATGAAATGCTTTGGAGTTTATTTCTAATGGGTAAATGCTCAGAAAAACTGAAATTTTCA
ATAAGATTGACATTTGGAGTAAGAAATATAAATCTAATCAGAGCATTTCAACCAAGGCTTGTAATTAGGGCTCAATACAGTAAATTTATACATG
CTCGCTGCAGAAGGGCACGGCGGAAGGTGAAATTGCATGCTCTTCTGTGAAGGAGCGACGAAGGCCAATGTATCAGTGTCAGGCCGTGACACCA
GAGTATAAATGACACTGTCACCAAGTGCTGCACTGCGTACCAAGGGAATTCCACTCGAGTAAATTACATTACTTAGACAGACCTGAAGGCACCG
TGCTGGAATGAGTGCAGAAAAGGAGAAGTCTGTCACCACAAAGCTGAGAACGTTGCCATATAGCCAACTGCAGGATGCACAGCGCTGGCTGTGT
GGGACCTGGAAGGGACAATCTTCCGCTCTGTTGTTAGCTTATAGACGTGACACATATGTACAGTTGACCTAGAGAATGGGTATAAGCTGATTTC
TGTGATCTGGTCAGCATTGGGTTTCCCTTATTATTTACAGTTGGGTGGCAATAGGGGGTCAGTGTACATTTGCCATTCTTTCTTTTTCTCTGTT
GTGAGAATCTAACCCCTGCCCCCTCGGTAGCACTGTTCACCTCATTTCCAGCCCCACTGTCATAAAACACATGGTCGCCATGGTCAGGTGGAAT
GTGTCTGTAATCCCACCTACTGGAGAGACAGAGGCAGGAGGATTGCATAAGAACTCTTTTTCTCACACTGTGTCTTTCTGAGAGTTGATCTGTC
TTAGCGTTTCTGGGCAGGAACTGGGAGAAGACATGAAACATCAGTGATGACGCCATCTCCTCTCCTCACTTACTGAAACATGCGCTGGTCTCCT
TTTGTCTGGCTGCCATGCCAGTCAGTCCCTGAAGAAGCCAATCACACGGACTCTAGAATCAGTCACTCACTCCTTGGCTAGGAAGTAAATTCTC
CCAGAGAGAGTAGTCTGAAACATCAGGGTGGCTTTCTCAGCCATGTGTCACACCTTATCCTTCTTGAGACACCCCTAAACAGCCTCTTGGGGGA
CACGCTGCATGGAGAACATGGACTCTGCAGGTTATCTCCACACGGGTTACATGGCACGTGTTCCGCCATCTTCCTAACACAGGGCACATTGGAC
ATCAGAGGTGGCACTCAGGCTTCAGTTTTAGTCTTTCCAAAATAATGCTCTGTCACAGCTGGAATTTCATCTGCGTTTTGTGCCTCTATAGACT
TTATTCATTTAATCATGGGATTTAGGAAAGCCACCTTACTTGGAAAACTAGGTTTGAGGGCAGGAGAAGAGAAAATGACATATTTTCTAATTTA
TTTAAGTATACCCACCTTTAAATTACTTCAAGACCCTCTGGTGCAGCTCAGAGGTAGAGTGCTTACGCAGGACATGCAAGGCCCTAGGTTCCAT
CCCCACTAATGCATAGGTATGGGTGTCAGTCTGGGATTCTGAACTGACATCTGCGTAAAAGCTTCACACGGTGTCCATCTGAAGCCTGAGCTCA
CTGAGCGCTTACTCATCAGCCGTGGCAAGTCAGCCTCGCCTGCACTGGCATGTCCCCGTTTCCATCGCATTTCACTTGTGTCCTCCACAACATC
AGTAGGGGAATTGTATCTGTGTCTTGGTGTTTACTACAAAGTTACTACGTGACGTTTTTCCCCTGGCTTCTCCATGACAGCCTGCTACCCGAAC
TACAGCTCTGAGCTCCTGTGAGCTGAACCCTGGTGAAAGAGCTTTGACAGCATCTAAAATGTTTGGAGCCTCCCTCCATTCTGAAGAGCCTCCT
TTGTTCCAACTGCCCTACCAGTGTTGTTGTTGTTGTTGTTCTTCTTCTTGTTCTTCTTCTTCTTCTTCTTCTTCTTCTTCCTCCTCCTCCTCCT
CCTCCTCCTCCTCTTCCTCCTCCTCCTTCTTCTTCTTGCGTCCAAATTGGAAAGGGAGCAGCGGGCTCTCCTAAGGAGGAACGGGTCTGTGGAG
GATTGCGAGCACTCATTCAGAAGCTATTCTTAGTTCCCAGAACTATAACGAGGCTGGGCTTTTTGTCCTGCTCAACCTCCATTAAGGAACGATC
CCTCTACCTGCCACCTGATTCTGTTTTCCCCAAGGACGCCTGGTGTTTTCTTCCCTCATATTCTGAATCGACTGGCTTCTGAGTCAGGCGCATC
TTGCAAGGCAGTGAGTCCTGTTGCCGTGATGGCTCACCTACTCCTCAGCTGTCCTCTGAAGTCTGCATTAGCAGCGCTTGCTGCAGACCTGGAT
TCATCGTCAGAAGTCAGCCTGTCCACGGCAGCAACTTACCCACATTGTCACGCCAGTGTTGGCAGCTGACCACTGCTGCCTTGCACTGCTGTGT
TCCTGGGCTCCCACTCCTGCAGATGAGAAAAAGAATGCAAACAACACAGTCCCCCACCAGAGCCCATAGCCATGTTCCAGAGGACAGTGAAGTC
ATTGTTCAGAGGTGACCTAAGGACGAAAGCATTTAAACAATAAGCCCTCTTGTGAGATGTGGTGAACTATGCACTGCAGACATTGTGAAGTCCT
CTGTCTCGGCGAAGGCAGTTTCTGCACGGGTTTCAATACCTTCTTGACACCCATTTAGCAGACGAAAGTCACTTGTCTCACAATAGCATCCAAG
CAGTTTCTGTCCTAAGGAACGCTAAACTGTGTTCCTTTATATAAAATACACACTGTAATTTATAGAAATCACAGTCCTCCATTGAATTGCAGTC
CCCTCCCCCTCCCCTCCTTACCTGAAGTAGAAACTCCATCTGTTTGGTAAAAGCCTTCTTTCTTTGAATTTTCTTTTTATATTTTGTGTGTGTG
TGTCTGTGTCTGTCTGTTGTCCACACACATGCACATGTCACTGAACACGTATACCGAGGTCACAACACAACTTGCAGGAGTCAGTTGTGTCCTT
CTCCTGTATGTCATGGGGATTGAACTCACATTGTTAGGCCTCCTACCAGGCCCCATATTGAGCAGCTCGCCCACCCCTCTTCATTCTTTGAATA
ATATTTATTTCTTCCAAATGAAAAAAGGGATCCCTTCGGTTGCTTAGATTCCTAATGAGGCTCTGAGGCTTGATAATAATCCTCGGAACACCTT
GTCACTGTTGAAGCATGGGAAAAGAGGAGCCCTGCTTTGAATTTAGTTTCGTTTGCATTCATTTAATTTAATATTTTTTGGTTTTGTTTTTGCA
TTGAGCCTTTAAGGGAGGCTTGGTATATAGACATATACCCTTGTTAGCTCACACCAGTATCTCTGGCAGAACCCTGGAATTGTTTCCGTTTTGA
TGTTGAATATATGACTTTCCGTGATGGTGCAGGGCGCGGTGCATATGTTGACTGGCCAGAGGTGTTCTGTCACGATATAAATGTAGGATTAAAC
TATTAAAATTGCCAATTTGATGTGTTTGCAGATCACTGTATACAGCACCATTGCAGAATCCTCCTAATTGAAGAAATGTTTCATCTCTATCTCT
GTTGACAGGAAGGATCGCCTCCTGATAATTGCTTTGCTTAAGTGTCTGATAATATGCCAGGAGTGAGCGCATTCTGTGTTAGGTCATCTTTAAT
TATGCATCTACCACCTGTCAGCTCTAAATCAGGATCAGATCAGATCCTTGCAGAGTCACTTTGGGGAGGGTCGGAGAGAAGCCAAGGTGATCTC
TTTGAGAAACAACAGAAATAGCAGTAAACATTTCTCATCACCTGAAAGCGCCTCGGGGGCATGGCTCATGAGGCACCAGCCACTGGCACATCTG
AGAAAATCCGAAATCTCACCCAAGCAAGATAAATTACCTCGCAGACAAATTACGGAGAGCTTGGAAGTGCCCCCTCCCTCCCTCCCTCCCTCCC
GCCCGCCATCTGTCGCACTTCCTTTTTATTCTTTCTCATCCTTGTAAAGGAGCCAGGGAGAACCTCAGACACATTTTTATAAGCTACGTGAGCA
CAGGAAATATGATAATGATGTTAGATTTCATACATTTGGGGGATTTTTTTTTCAGTAGTTAGTTGGCTTTTTTTAGAAGGACAAATGTGGGTTG
GAAGAAATGCTTGCTACCCTCTGTCACCTTTTAGTAGTTTTAGTCTCACTTTTCAGGGCTGTTTGGGACTTTCTGGAGGGATGTTTACCGTTCT
TTACCGAAAGTTCTGTTCCCTCCACTAAGAGGTGTTTTTCTCTGTTCACCTGTCAGAGGCTTAAAGCCAGAGTGAACACACGTTCACTCTTTCA
TATAACACGTGGGCTTCACTGACTGCACACGGGCAGGCAGAGAAGGGGCAGGCGGAGAAGGGGCAGGCGCAGGGAAATGACTGAACATGCTTTA
TCCCATTGTGCAGCTCTCAGAACACAAAGCGGACGCTCCAAGCCTGACGTTCTCCAAGCTGGGGGGGTGGGGGCAACGCTCCTGACATGGCTTT
GCCTTTGACCCACTTTTGGAAAATCCTGAATTTCTCTATGTCAGATCCAGCTGAATAGAGGGACAGGACCGCCATAAAACTGGACCTCCAGCCC
CACAGAGCATTGGGTTATGACTCTGAATCCCTCTTCACCACCATCCAGTGCCTAAGGTGACGTTTACTGCAGTCGGCATGCATCCAGGTAGCAC
AGAGTAGGTCTGACACTCACTCTCCGCTCCAGCGTTTGTCACTTAGTGTGCAATTGCACAAGTAAAAGTTACACAGGACTGTCAGCTCCACACA
GCGCAGACTTCTCTCAGAACTGACTGCAACGTGCCCATGCCCGACAGAAGAAGATCCCAAAGTTAAGTCCAGGAGAACCGAGAGAACGAACCAA
CAAGTAAAAGCAGTGCCACCATATTTTCTCATCCCCGCTCGTCTTTGCCAAACCCTTTCCATCTGCCTGGGAACATTGTCTGCTCTCTCCACCT
GCCTGACTCCTATTTTGAATGTTATCTCCTCTAAGAAGCATCTTTAAATTTATTCTTTTATAATTTTATACATGTATATAGTGTTCTTTGCTCA
ACTGCCCTCCCTCCCCAGTTAACCCTCTCTTAATGCCTTCTCCCATCACCAAATCCCTTCTTCTCCTCAGGCCCCCCTCCTGCTTTCATGCTTT
TCTGTGCGTGTAAGACGCACTGCATTTAATTAGAGGTGAACATGAGTCAGGTCATTTGCTTGCACAAGAGCAGTGTGCCAGGCTCATTCACAGA
GGAATATGATTGCCATCTCTCTGTATCCTTTAGCTTATTACATCTCCTTTGAGAGTGGCGAGGCCTTATGAGCCTCTCTCGGATCCATGATGGA
GAACTAACTGGTGGGCCCAGCTCTACGAGGGCAGCCACTGCTGCTTTGAGTCCATAGGTGCGATGGCCATGTCCTGTCCCCTAGACAACACCTA
TAGTACTCTTGGCATCTTCCAACTCTTACTTTCTTTCTGCTTCCTCTTTCTTGGCATTCTCTGGGCTTCAGAGGCATTGATACACATCTCCCAC
TTAGCTGAACATTCAACAATCACTCGTTCTCAGCACATTGACCAGTGATGCGTCCCTGCGTTAACTGTCACCCATGTGAATAGAAGCTTCTCTG
AACAAGGCTTAGAGCAACGCTAATCTGTGGATGTAAACATAAATCTTCCGAGTTCAGTTTGAACAGCCAGGTGTGGTGACACACGCCTTTAATC
CCAGCACTCGGGAGGCAGAGGCAGGCATATTTCTGAGTTCGAGGCTAGCCTGGTCTACAAAGTGAGTTCCAGGACTGCCAGGGCTATACAGAGA
AATCCTGTCTCGAAAAACAAAAACAAAAACAAACAAACAAACAAACAAAACCATGCAGTTTGACACTGTGCTCAGTTAGCAAAGAAAGTTCCCC
TACTCGGTCTATGACTGCCATAATCATGGAGTTTGATGAGGTTTGTAGAACTAAGTATGAATTCCTCCTACAGGGAGGCACTCAAACCCAATCA
GAAAGTACCTCGCTATCCCTAAAACAATTACACCACTGTTGCAATGGTGGGCATATCTTGCCTAGCATGTTGGTAATATAGTTCAGAGGTTCAC
AGTTAGGTAAGACCAGTGGTCACTTTCTTCCCCTGGCAGCACTCTACTAGCCAGCACGAAGGAAGCTTCCACTTCAGTTCCAGCTGGATTTCTC
TCTGTTTTTGCAATCAAAATGTGTCATGTCCTCAGCAATAGGGTCGAACCATCTGCTTCTGGTGGGCACCCAACAGGAATGACAAGGGCCCCAG
GGATCCCTCTGATCAACAACTAAGGAAGTACCCTATACCTCCCACTGGGGTTTTGTCTAATAACCAATGTCTTAATCAACATATTGTTTTCTTC
CTCCTGCCCATCACCAACTCCCTAGCAGACTGCTTGTCTGGCTTTATCAGAGTTGGTCATAGTATTCTACAAAGTATCCTTTATCGAGTTTTCT
CTGGCGAAAAGAAGATACCATCTTAACTGTGACCAGGAAGCTCCAGAGACCAAGCAGTAATATCTGGTCCACAGTCCTCAGGTTACACTAAGGA
TATTATGACCATACATTAGAGAGGGACATACACACATGTGAGCGCTACATGCAGTGCACAGTGCAGGGATGAAGGACTGCGCCTGGGGAAGAGG
GAGAGGACGGAAGCCACAGTGGCTGTGTTTAGATAAATGACAGACTTGCTTAAGAGATGGGCATCATACAGAGGAGATTTTCGGTTAGAACATG
ATTGGTTTGCTTGTAAAGCTAGCCTACTCTGGAACCGATGACTTTCTTTGGTAACAGTGGCTCTCGTTTCTAGAAAGAGAGTTTATCTTTTAGG
GTTTCTATGGGGTTTGAGAATATAAATTTCTGGGCTCTGCGGGAGACACAAATCAGATAACCTAACACTGCTAAGATGGAGTGTCCCTGTTCCA
TGCAGCCTCCCAGCCGGGATGGAACACACTCCTGACTTCCATGTTGTATCACTTTGTCTAAAACATATCCATCCACAAGCTGCAGGCTAGAGGT
TGGGATGTGATGGAAGACTTCCTTTCCCGATGAGGGTACTGTGAGACAGATCAGCACTCAATCCAGCCACAGTGCGCATGCCTCCTGCCTCCTT
GCTCGATCGGACTGAGAGCAGCTCCTCAACACTTGAACCCTCCATTCTGTCCAGGAAAATACACACACTATTGTTCACCTCCTGGGAGTTGCCA
TGAGGGTTAATGAACTCCCTGAAGGGGCCACCTCAGAACCCATCTGTCACCAGTACAGTGGACACAAGAACTCCTGTCTGTAGGGATTGCCGTG
ATGAAACAGTGTCATGTAGAAAAGTCCCCAGCTTGGAGATGGATAAGGCCCTCCTGGTTCAGTCCTCAGCCCTACAGAGGAAGAACAAGAGACT
CCCAGCTGCATACCCGCTGCAGAGTAGGTTCCTGGGAGTGTTGGCTTCTGGGAACAGAGGTGTTCCCAGCATTCCCTGGGACCTGCCAGTGACC
TGCAGTGTGCGGCCTCTCTGCTGCTACCTGTTATCTCAGCCCAGCACTGGCCACATCTCTCCTCCTTCACTCCTTCCCTCTCTACTTCCATCTC
ATCCCAATCCTTCTTTCTTTATTTCTCTGACTTCTCTCTTGGCCGCGTCTTCTTTCCGTGTAAGATTGTTCTGATGACCCCAGCATGTCAAATG
ACTCTCGGTAACTCTTTTATTCTATTGTATTAATTTTTTAATTGAATGTATAATCAAACCTGGGTCCTCTAGAGGGGCAGCAAGTCCTCTTAAC
CACTGAGCCATGGCTCCACCCCCTACATATTTGTCTTATTTTGCATGGTTATGTGTGTGTGTGTCCTTTCTCTCTCTCTCTCTCTCTCTCTCTC
TCTCTCTCTCTGTGTGTGTGTCTGTCTCTGTCTCTCTCTCCCTCTCTCCCTCCCTCCCTCCCTCCCTCCCTCCCTCCTTCNNNNNNNNNNNNNN
NNNNNNCCTCCCTCCCTCCCTCCCTCCCTCCTTCCCTTCGTCCCTTCCTCCCTCCTTCTAACTCCCCTCACCCCTCTCTCCATGGGGGTGGGGT
GTTGTAGGTGTGCATGCGGAGGTCAGAGGAGAACTCAGCGGAACCTGGAGCTAGAACTAAGGTCGCCAGGCTCAGCAGCAGGCATCTTTGTACA
CTGAACCATCTTCAAGCCAACGTTTTTAGTCTAAGCAAGAGGTTTTTTGTAGCTTTGCAACGAGGGAAGAAGATGAATCTTTTCATGTTCCTCT
AGACTGCCTTCAGTTCTTTTTTCCCCCTGTGTTGACATTTTCCCCTTCTCTCATCCCCTCACCCTGTAGTCATTAACTTGCCAGACACTCAGCC
ATGGATTGTCTTTATGACGTTGCTCAACTTAGGAGCGTGTCATTCACAGAGAACCTAACCCATATATTAACTCAGGCACAGCAAATTGCTAAAT
ACATGCCTGTAAGTCAAGAGCTTCAGGATGACAATCCAACCACTCCTATTGGAAGGGGGTCACTGAAACAGACTGGCAGTGGGCAAGGGAGGGT
GAGTTTCTGCCACAGAACTGAGCTGGGGCAGAACACTGCCCTCTGGACACATACAGGCGCCCCAGCAGAGCATTTCCCAGGACGTGATGGCGAG
GCCCCAGTCTAACAGGAAGTCAGTGGGCTCCTGCCAGCCTCCACTTGTTCAGTCCTTCTCCACAACTTGAGCATCCACACCACGGCTCATTCCT
CCTCCTAGTCCCACTGGAATCCCTCTTACTCCTCCCACGGCCTAGTTCAGTAAATGTCAGAGTAGCTACAAAAGATGAGCGCTGCATTAGATAC
AGTGCCCAATGGATACGTGAGACCAGATCCACACATGCCCTACAAGTGTTGAAGAGCATCAGTACATGTGGAAATCGGAGCAGCATCTAGTGGG
AATCATGAAGTACCCTGATCCACGTGTCTGTGCATGCATCAGGAATGGTGCAAGAGAAGCCACACAGAGTCTCCCGACACAGAGTCTCGCGACA
TGCAGCTCTTCAAAGCTTTTGTTACTAGTCTATGCTACATTTTATTTAAGAATGTTACTTTAAATTTACAATCATTTTTAAACTCTGAATCAGA
AGGTGGTATTGGTTCTCAGAAAGGAAGACAGCGATCTATTTTCCCAACTCTTGGAACATGATGTTCCTTTGGGAGCCAGTGCCCTGATGAGAAG
CCCAGGGCTCTAGGTCCTGAGGTCATTACCCACACCTTATGACTCAGTGTCCCCCACACCCCAGTCTCAACACCTCTGTGAGTGGTGAAGGAAA
GAGTCCTGCCTTCTGTATAGCCCTGGGCTTTGCCAGCAACCTCGTGAGAAGAGATGTCTAGGAAAACACACAGAAAGCAGGGTTGCTGCATGTA
TGTAGAATCTCACTACAGAATCTAAAGCTTCGTGCTTCTCAGAACATTCACGTGTTTGTAAAAGCTTCATGCAACACTTGAGGTCAGTTGCTGT
GTGCAGTCTAGTCAGCCACCAAATCCATGTAGAAGAGGCTTTTGTTTGGCCTCTTTAAAAGAGAAGTAACTGCTGATTTTTCTCAAAATGTTCT
GACCTTTGTCTTGTTCACAGATATTCATTTTCTTGTTTGGTGTTTTTGTTTGTTTGTTCTTCCTAAGCTGGTGCAAAGGCACCCAAGCTTTCAG
TTGTCACTCTTCTTCCATTTGCTGCTCTCGCCTGAAAGAGTCACCACAATGCTTATAAAGGCCTTTCAGAGTTCAGTCCCCACCTTCAAGCAGA
GGACTCAGACAGATTCAGATAGCTGTGCCGTGCGTGCAGGTGGTAGGTTCCAATGTACTTGGGGCTATGGGCATACTTGGTAGCGATAACAACA
TTTTATAAAGAACAATAAGATGCCCCAGGTGTTGTCTTAGTGTGTATATCTTTGTATCTGCCTTGTCCTCCTATTCTATGCCAGGTCCCTTGAC
AGCAGGGGCTTCCTGGTTCCGCCCTGTGTTCTGTGGTGCCTTAGCAAATCGATGCTTAAACAAATATGTTCTGTACCAAGCTTAACTTTTATCT
TAAAAATAGCATAACAGTTTTTTAATGTATTTCATTTCATAGAAAAGCAGAGCCTGGATACTTTGCAGTATTTTTTTAAGTCTTGGCAGGGGAA
ATGCTAAGTCATGAAAAGTTCTCAATCATTGTAGAAAAAGTGATTTTGTTTATGCTTTGACACAACAGGAATGCAGAATTTTTCAAAGAACCTT
GGCGATCACTTGCTTAGATTCTCTCGTGTAGCCGTAGTACCGAGAACTATGCCTGACATTTAAAGGAGGCCTAATAGATATTTGTTGGGTGTTG
CAGAGATGGCTCAGAGGCCAAACCCATCTCTCACCAAGCCTCACAATCTGAGCTCAGCCCCAGTCCACAGCTACTAGAAGGAAAGAATCGACTC
CCTCAAGTTGCCCTCTGACCTCCAGACACTTACCAAGACACGCATGTATAAAATGTAATGATAATTTTTTTTTATAAAATACATTTGTTGGATC
ACTGAGTAAACAGCTAGTGAGCTGCTCCTGTGTGCTAAGTACCACATGTTAAATTCTGGAGACTGAAATAATAAATAATGGATTTGCATACATA
CCCCAGTACTTTCTCCCTACCCAAGAATCAATGTAGGAGACTAGTGACCCCTCTAGCCATCCTCATTCAGTGTGAGAAGGCAATCAAGATAATC
CAGAAATTTTATTTTTGTTGTGTGAGTGTTGTTAACCAGATATCATGGTTATCACTTCTAATCCCATAAGAAAGTAGAAGGCTGAGGTAGAAGG
GTTACACGTTCAAGACCAGCCTTGGCTACTTAGCAAGACTATGTTTTAAAGGTCCAGTGGCTGTGGACCTCAGTATAAGAGGACTTTTATCTCA
GTATAAGAGGACTTGCTTCCCGAATACAAAACCCTGAATTTGATCCTCACCACTGCCCAAAGAAAGCAGAAAATGTTATATCGTGTCCCTGAAA
CAAGGAGAAACAAACAGTCGGCTTATGTCACTCTCCTCTTACGCCTGTCTTACTAACCTTTGTCCCAAGTTGTTTCATTTTCTGGGCAAAACGC
GATCAGGATTCCCCCAAGATACAAATGGTGCTAAAGGTAGCATGCAAAAGCTACACCTCAGACTTCCAGGCCTAGGAACTCCCAGGTAAGTTAG
TCAGGCTCTCTAGATGAACAGAGTTAATAGATCTTACGGGGCATCTATCAGATCAGCTTCCACAATGTGGACTGAACGGTCCAAAGTTGACGCT
AAGCATTCTGGCAAGGCACTTCTACAGGAAACTAATGAGATGGGGCTGAGCTGCGACAAAGACGTGGTCAACAGCAGGGAACTACAGTCAGATA
GTTTAGCCTTGGGAGTAAACGTATAATTGACCCCTCCCTCTTTCTCTCTCACCCTTTCCCTTACTAATGTTTTGGGGTTTCTCTCTGCAGCCTG
TGGTTTGACAGCTTCGTTCCCTAGCTGTTCTCACACACTATGTCTTTACCCTTGCCGCTCAACCAACTGGCACCCTTGGCAGGCTGCCTCTCCC
TCCTGAAAGATCTTCCCTAACCTCCCCCCTTGCAGACAGACTTTCTAAAATGTGATCATTTAGCCCCTAACCCTGAGCTTACGCTCATTCTTAG
TGGGTTGCACAGGCTCCCTTAATACAGATGTGTTCTTATTCTCTGGTGCTCTCGCCAGGGGCACCGCTGCATCCATCTCTCATCTCTCCCAGTC
TGTTAGAAGGGTGTGTGTGTGTGTGTGTGTGTGTGTGTGTGTGATCTCTCTCCTGAACACTGGTGTGCATAGTGTGTACCTGTCACATAAGTGG
CATACAACAGAGTAAATAAGTTCAGTGTAGTTAAACACAGGACCTCGCCATGGCTCCAGGCTGTCCCCTGCCTCCCTTGCATTGTCCCCCACAG
CAGCCAGTGCTGTCACCATCCTGACACCGTAGGCATTACCTCATTCCTGTCCTCCTGGCATCAACCTCCCCTGCCTCCACATACTCCACATGCC
ACCACCGTGTGATCCGTAGAAATCTCATCCTGATCACATCATAGCTGTCATTAGTGACTCCTTCCCCTACTCTGGAGCACACTCCAGTCTCCCT
CACTGTCTCTCATCAGGCATGTGCAGACACATTAAACTCCACAGATGGCTCTGCCCTCCATCCGTGATGCCCATCCATCAGCACCCCCTTTCTG
GAGTGGCCTGATCTTCTTTCCACACTTGTCAGACTCCTCCTAGATGCTTTGTCACAGCCTAACACTGTTCTCACCCCCGCCCCACCCACTACAT
CCACCGTGACTGTCCACCCTGGGCCGGGAATGCCTGCACACAAAGCAGAGGTGTTTTGGAGAGATTGACATAAACCTCTTCTTTGGAACCTACC
TTAGTCTCGTTTAATTTCTCAAGAAAACACTTGGCTTGTAAAGTTCTGTTTATTCTACCTCATGCATTCTGACATATAACCATATATTGCCTTC
TGTTGTTATGTGAGTGTCTCCCATGCCTGTGGCCTGCTTTCACTGTCGATCCCTGGGTGTCTGATACCAGCGTCATCAGCTGCTCTTTGCTGCC
TAGCAAGATACCCCCAGACTCCGTGGCTTAGGACAGAGGCTATTTATTATTTTTTATGGTTTCTGTGGTCCACTGGACAGTTCTCGTTTCCACA
ACCTTCAGCTGCACTGAATCACCCGGGATAGATGTGGGTGAACAGTGACCCACAGCTGCCACCGCTTCGGTGTTTACAAACAAAAGAAAACAAA
CAAAAACGTACTGGAACTCAGCCACACCATACTGCCAGCACTGCCTTTACCTTGTGACAGCAGAGGCAAGTCAGTGTAGTGGAGATCACCACAT
GGCCTACATGTGTGCTGTTTGCTCCCTCAAGGAGACATTTACTAAACTAGAAAACCTTGCCGAGCCCTGCTCTGGGATGGCCAGGTGGAAAGCG
CCTTACCTGGGGCAGCTTGTCTTTCTCTGTGGTCTCTCAGCGCCAGGGGACTGGCCTGGTGGTTTGTATATAGCATAGCAGCAGAGCGCAAGGA
CCTGATATACCTCCATAAGCCTCTGCCTCCCAAGTGCTGGGGTTAAAGGCATGCGCCACCATTGTGTGCAGAAAATGTCCTTGACGTTGGCCTC
CCCAGATATTTCTAGGCCTGAAGACTGCTTCCCTACAAAGACGGGTCCTACCCAGATTATCTAAACCTGTTTGCTAGATCCAGCTGTATAGTAT
AAACCCTGCCTCCTTGCTTATCCGTGTGTAATAATTTCCACCTCTCTGCTGAGCTGTATGCAATAATTAGGAATCTCTGTCCAACTTAAAAGAC
CGACATGGTGAGCTTCCAGGGTGTTTTCATTTCTCCATCAGAGGGCCCAGACCACCTGAGGGCGGAAGAAACAACTTTTCTCAGTGTCCATGTG
TCAGCTGCCTCTCTTTTCCTCATTTCCTCACCTTCCCAGTCACGCCCATCCCTCGAACTCTGATAGCATGGCATGGCTCTTTGGGGAGAAGAAA
TTCAGGAATAGTATTGTGTAACTACTATGTGCCAGGAACAGCCTGTAGATGCGGTGATGGGCAGGGTACACCTACAGCCTGACTCGGCTTTCTG
TCGTTGTCATCCAGTTGGGAAATGAGAGTTCTCTAAAATCCTTTCAAGGAATCCTTCAGGAAGGAGCTATAGCATAGCTATATAACTCCATGGC
GATATGTGATGGCTGGTTGTCAACTTGATTAGATTAGTAAGCACATGAGAGACTAGTAAAGTGAACCTCTTTCTGCCTACATCTTTGGAGATGT
TTGCAGACATGGACCATGAGGTCTCTGACCTAGTCAGTGGTTTAGTCCATTGATACATTCTAAGTCTCAACAGATTAATGGAGGTTCTTGGCAC
TTCCTGGCTGCTGACAGGAACCACGCCATCTAGGAAATGCTCTATGGGACTGTCTTGCCCTGGTCCCTTTCTGAATTCCTCCTCTGTTTTCTGA
ATGCTGTCATATAACCTCTACCGCCATGCCCCTCTCCTCCATGATGAGTTAGAACTTCTGAACTCGGGAGCTAAAATGAACCTTTCCTGCTTTA
AGTCGTTTCTGTCAGGCATTTTGGTTTAGCTACAACTAGCTAACCCAGTCTGCCATATTCACCCTCCCCGACCTCACACAATTATCTGAGCTTT
TCAGATGCTGTGTCTTGAGGCTCTTTCTTGCTGGTCGCCTGACACATTTTCAACCAGATCACCGTTTCATCAGGACACCAGTAACTCGGAAGTC
TCATTCACTAGATTGACTCCCTCAGGTTTCTCCTGTGGTTGTAACGCTCTACTCCATGCATTCAGATTAATCCATGCCTGCCTTATTCCCCCTG
TGGATACACAATATTCCCCTTCTCCACATGTCTGGTGACATCCTACCCCTCTGATGAAGCAGCCTCAAGTACCACTCACCCGTGCTGGTTCCCT
GGTTGTTCCTCCAGCGAGCTCTTTCTTCCTCTCCTCTCACAGGCCTCGGAGTTTGGAGTGTGATGCAAATGGGGTGTAGCACACACTGCTGTTG
TCTTAGCGTTTAGACTGCACGCCAGGTCATGATTCACTTTAACGTCCTTCTGAATTCCTTTAACAGGGGAGACGTCTAGAAAAGTCTTGGCTTC
GTTGCTGAGGCTGGAGCTCAGGTTGCGGGAAGCAATCATGATCTGCTGATCTGTACCCCAGTTCCACTTTATGAATAATGGACAACTGATTGGC
ATGACTCCCATTTCCAAACCTTCGTCTTATTTCCAAGACTTCATTGGGTTAAATGTATTTCATACTCATTAATAAAGAAAAAATTGCTGCATAT
AAGCCATCAATTATATAGTGTATCTGAAACTATGTTTCCTAGCACTAGAATATAGATTATTAAGTCTAATTCAGATGGATATAGGTGACTCAAT
ATATTTTCAAAACATTCAAATATACCTGTCATTACAATCTCAAAACAGCTGTGGTACAAAGGTTGGTACATGGTAGTATCCTCATCTTACAAAG
AAAAAAAGTTTAACTTAAAAGAAACTATAATACTTGTACAGAATTAAGTAAATATATTTTTGTTTATATTAAATTAATAAATATATATATTATA
TACGATATATACTCAAAGTGTAGGCGTCTAGCCTTATGATTGAGACAAAGCTTCCTTTCTAAAATCACCTGTGGATATCAAAACCTCAGCTCTA
AGATTGGTATCAAAACTGATCTTATTTATAAATTGCTATGCACATCAACTGGACCTTCAGTTTGTCTTCCTGGCTACTCATCCCGGTATTACTT
GTATAACATAATGTGATGTGGTATTACATGCAGCTCAGGAGAGATTAGAATGATTATTGGGTACATATGTTTTCCCGGGGATGTAATTAGGCAG
ATTCTCACACCCTCATCAAGAGATTTCCCCACCATCATTAATCTCAAAATAATAGAAGGCTTTCTACATCCAACATTACTTGAAGATTTGTAGA
CGCATCCTCTAGAGTGGACATTTAGGGGGAAAAAAAGGCTTTGTGTGAAGTTTGGGTATTTGTTATACTTTAAAAACGAACATGCACACTTTGG
CATATGTAACTATTAGACTGATGTTCTGAGGATAGATCTGCATACCATTAGTTGTATTTTTGTTTTACATAGTTTGCTAGGTGGAAGGAAGGGG
CTTTCAAGTTGAGGAGGCTCTCCAAACTGCAGCATCTCGAATGTGTTGATATCTACAACAACCAATGTAAAGAAGAAAAGATTTGAGTTAGCAT
ATGGATGTGGCAAGTTTTCCTACATAGTCCCAGATTTCACTGATGCAGGAACCATGGTGATGCAGGGCATCATGGCAATGCAGCAGCCTGTAAC
AGAAACTTCCTACTTCATGCTACTCAGGAAGTGGGAGTGGAGATGGGATGCAGGAGTAAGAGACAGCACCTAAGAGCACACCTACAGTGATTCT
TCTTCTTGCACGCCCTATCTTCTACAGTCCCCCAACCTCCCAAAATAGTGCCACCTTATGGTTATAGTTACTTTTGTGTCTCTGTGCTGTGATA
CCATGACCAGGGCAACTGACAGAAGAAACAGTTTATTGAGGCATTTTATTTTCAGATAGTGAGCCCATGGCCATTATGGAGGGGAGCATGCCAA
CAGGCAGGCAAGCATAGTGCTGGGGCAATAGCTGAGAGCTTATATCCTGTTCTGTGAGGCAGCATGGGGCCAGAGACGGAGACACAGAGAGAAG
GAGGAAGGGGAAGAGGGAGAGAGGGAGGGAAGGAGGGGAGGAGGGGAGGAGGGAGGGAGGGAACCAACTGGAAATGGTGTTCTGAAACCTCAAA
GTCTGTGCCTCTGGTGACACATCTCCTCTAACAAAGCCACAACTTCCAGTCTTTCCAAAACAGGCCCAACAGCCTGAGCCCAAGCATTCAAATG
TATGAGCCTACGAGGGTCCTTCTCATTCAAACCACTACACTAACCTTCTTCTAAAACAAAACAAAACAAAAATCCCAGACTTTTGGGCCACATT
CACATATATTCTATGGCTTTACCACTGTTTGCTGTGATACAGGTAGTTTGAAGCTAAGTTATATTAGACCTCATGAGATTTAACTAACCGGTCC
TTGTATAATATACGTGTCCTGGCCTTTCTGTCTTGTAGATCATACGGATGACAGATTCTGTGTTACTGTCTTTTTACAATAATTTTTTTTCATT
TATTCTTTGATAACTTCATACATGAVTACAGTGTATCTTCCTTATAACCAATCAAAATCCTCCTTCCCACTCACTTCAGAATCCCCAAATACTT
CTTCTCCCTTTTACCTTCATGTTCTCTTTTTTATTTTTTTTTTTTTTATTTTTTTTTTATTTTTTTTTTTAGGATTTTATACATTGACTTGTGA
TTATCTTCACCTTCCCTACCCCAACTTTTCCTCGATCCAGCCCCGGTCTCTTCCCACTGACTTTGTTTCTTTTTTTCTCCACCAATGCCAATTT
GTGCTGCTCAAATATTCATGTATATATGGCCTTCCACTGGAGCATGATTAACTTATCAGGGGCTGCACTCTTAGAGAAAACTGACCCTGTTGTT
TTGTTGATTTTTTTCAATAATGTTTTTCTTTCTTATTACTCTCCTGTTTAACTATTATTCTAGCATGGTTACTTGGTCCTGTCATCTCAGGGAT
AAATTTTTTTTTTTCTATTTAGTTTGAAGCATTCCTTCACATGTCTACTGTGGAGCTGACAATGGTTATACATTTCTTTCATCTGTTTTCACTA
TGGAAAGTTTATATTTTCTATCATATTTTCCTCCTGATAGACAGCTTTGCTGGGTATAATAATCTAGGTTATATCTTTCAGGGCTCAAAAAACA
CCATCCCACGCCTTTCTGAATTTTAGAGTCTTGGTTGAATGGCAGGCTGTAATTCTGATGGCCTGAGTTCATGTAAGACTTAGCATTTCTTGTC
ACTTTCAATATACTTCCTTTGTTCTACATACTTACTGTCTTAATTAAAATAAGACTAAGAAGGTTCTTTTCTGATTTTCTCTGTTTGGTCCTAA
ATGCCTCCCATATCAGGTTGACATCTTTTCCTAAAAAGGGGAAATTTTCAATTATGATTCTGTTGAAAACATTTTTATGTCTTTAGAACAAGAT
TATTCTTCTATGCCTATGACTGTAGGCTCAGTATTTTCAGAGTGCTGCACATACCGTGAAACTCTTTGACGTCTGTTCTTATCTAATTGTGCCA
TCCCTCCACTTTCTTTTCCAGCTCAGAAAATCTGTGATTTTCCTTGACCCATTTTATTAGTGAGACTTTCCACAGAACTTTTTATTGGTTATGT
TTTTAATTTCCATCATTTCAAGAAGTTTTCCATCACTGTCTTTGTTTTCATAGTTCCTCTTCCGTATCTTCCACTGTGGTCTTTATTGCACACA
GTTGGTCATTTGTGTGCTTAGTCAGGAGCTTATTTCCTTTCATTTCTTGAACAATAATTCTTAACCCTGTCTAGGGTTTCATCTGAATCACTCT
CACTAGACGCTGTTACTCAAAAGTTAGTTGTTCTGGAGAAGTTATAGTGACATGATTTTTGTGTTTTTTCTTATTACTATTTTGGGAGTCACAT
ATCTGGCATTATCTTGTTGCTTGCGGTTTTTTCTTGCATTGGATATATTCTTTCATTTGAAGTGTTTGCAGAACTCAATGGGTGCTTGAATTGG
TAACGTGGGGTATGTTGTTTAGAAATTACTTAAGTCCGCGAACTAGGCGCTGCTACAACTTATATCTCATCTCTGTGTAGACTATTAACTGCAA
GAACAACCACGGATTCTGGGTATTGCCTCTAGATGTAAATGTTGTATTATCCAAATAACAAAAGCAATTCCTTTAACTTTAATAACTTTTGGAA
AATGAACAACCAAAGATAATATGAAGTATAGTTTGATTTTAGTTGATAAGGTTGGAATTGAGAGGGAAGGAGAGTGGGTGAGGCTCAAGACAAG
ATCAAAGGACAGTGGCAGAAATGTCGAGGTGATGCAGTAGCTGACAAGCCACCGTTGAAACAGTACCAGGGTCCACAGATATTAGAGATTGATA
AAGCTACGAAAGGGCCAGCCTGAGCTACAGAACAAGTCCTACAACAGTCACGACTACACAGACAAACCCTGTCTCAAAAAACCAACATAAAAGA
ACCATGGAAGTCTTTAATTAAGTGGTACAAAGAGGAGAACAAATGACAGAAAGAAGGAAAGTTGTCAAAATAAAAGGAATAAAATGAGATACAA
GTGAAAGGCATGGTAGTGTCTCATGTTAGCCTGAGTAAAGAAACACATAGCAATCTTAAAGTCTAACTGAGCAATATACCACAAATCCAAAACC
ATCATAAGATGTATATGCAAGGGTATAAAGGGTAATAAATAATATAAAATGAGCTGGGCAGTGGTGGCACACACCTTTAATCCCAGCACTCGGG
AGGCAGAGGCAGGTGGATTTCTGAGTTTGAGGCCAGCCTGGTCTACAAAGTGAGTTCCAGGACAGCCAGGGCTACACAGAGAAACCCTGTCTCA
AAAAAACCAAGAGAGAGGGGGGTGGAGAGAGACAGAGAAGCAGGGGATAGGGTGCTGGAGCAGTGGTTAAGAGCACTGGCTGTTCTTCCAAAAG
ACGCGCCTTCAAGTCAAGCACCCACATGGCAGCTCACAACCATCTATAACACCAGTACCAGGAGATCCAGTGACTTCTTCTGGCCTGTATGGCC
ACCAGGCACATGCAAGCTGCATAGACATGCATGGAGCCAAATCATCCATGCACATAAACTAAAAATAAATTGTAAGGTCCAAACGGGTCAAGGA
TGCTGGGAGAAAACAGCTCGCAGAATCAACTAAGCAGGCCTTATAGGAGCTCACAGAGACTGAAGGCCCAATCACGGTGCCTGCATGGGTCTCT
GCTAAGTCCTCTGCAGATGTTATGATTGTTTGCTTCGTGTTTTGTGGAGTAACACTGGGAGGCCGTCTCTCTGACTATTTTGCCTGCTCTCCAA
ACCCTTCTCCTTCTACTGAGTTGCCTCATCCAGCCTTACTATGAGGGTTTGCGCCTAGTTTTATTGCAACTTGTTATCCTGCATTCGGTTCATA
TCCCTGGGAGCCCTGGTTGGTTGGTTGGTTGGTTGGTTGCTTGGTTTTAAAGAAAGTGGATAAGAAGTGGATGTTGTGGGGGGAGTAGAGAGGA
GAGGGAGATGACAGGAGTGGAGGGCGAGGAAACTGCAGTTGACATGTATTATATGAGAGAATGAATAAATCAATGAATGATCTTTGGGGGGGGG
GGTTCGACACAGGGTTTCTCTGTGTAGCTCTGGCTGCCCTGGAGCTTACTCTGTAGACCAGGCTGGCCTCGAACTCAGAAATCCGCCTGCCTCT
GCCTCCCCAAAGTGAAAAGTAAAACTAAAAGTAAAAGAATACGTATGGGGTGAGTTGCAGGTACACCTGTGCTGAGTTCAGAGGTGAAGTTCTT
AGTCAAAGTAGCTCTGGCAAGTTGCAAATGCTGCAGTGTGGGCAGAGGAACCTGTGAGCCATTAATCTCTGTGACTTCTGTGTTCTCTGTGGTT
CTGTTATTGGGGAAGGGGAGGCTGTAAGTCCTTGCCTGGTCGCTTGGCACTCCTCTGTGGGCTCTGTTGGTCCTACAGGCTGATGTGTGTGAGG
AGCAGAATTTTCCCTCCAGTTTCTCCCGCTCTCTCTAAGCAGCTGAATTCAGCAGTGTTGTGCCAATCAAGAGGGCTCGAAGATGGGTCTCCAT
GGGGCACTTCTTAAGGGCTCGAATGTGTGGCACTTTCAAGAATGTTGGCACTGAAAATACCCGGTGTCTCTTCTACATAGTCACTTTTTCTCTT
TGTTAAGTCTTTCCCATTTTCATAAAAAATCTCTTTTTTTTTCTTGATATTATACTATATTACAACATTCCTCCATTCCTTTTTCTCCCTCTGA
ATCGTCCCATATACCTCTTCCAAATCTTTCTTTAAATTCATGATCTCTTCTTCACTAATTTATTATTGCATATATGTATACATATACATATATT
TCTAAATATACACATTACTAAATGTAACCTGTGTGGTCTATCTAATGTTACTTGTATGTGTATTTTCAGGCCTGACTTTAGTCTCCCACTCCTA
ATGTTCTCACTTCCCCATAGTTTGTTCTGTAGGGCTGAGGCTTGTGCGCTTTTCCCGGTCCATCTTAGCATCTCCATTGGTACTACCCTTGTTC
GGTTCATGGTTAGGCAGACCTGTTGGGGAGACGAGATGAGTATAGCTTCTGACATTGCTAGGAGACATAACTTCTGCCACCTTCTCTCGCCACC
ATGATACTCTACCTTACTCAGACTACAAATGGTAGTTCTCAAAATTATGCACTGAAACCATATGCCAAAATATCTATCTCTTTAAATTATTCCT
CCCAGGAGTATTCCACAGTCTGATTATCACACTAATTTATTTTTATTTATATCCTGAAGTGCTGCCTTCCCCCTCCTTCGCCCTGTGTTTTCAT
CCTTTTCTCCCAGATTCACTCTGTGTACAGCCACTAATACGAGTTTTTCCTAAGTAGTGATCAAGTGTCACTCCCATGAGTGCTCAGTGTCCTA
AACTGGCTGTACCCTACGGTTCCAACTGATGCAAAGAAAATCTCATCTTCTAGGATACTTCACTGGTTACAACCTTTACACTCTTAAAGATCAC
CAAGTATGGAAACAAAATGCCATAAATCAAAACCAGCAAAAACAACAAATGATATATATGTTCATTATCCCCTACCTACCAAGGATGCTATATG
CTTGAATTAACAAATTAAGAAATAAGAATAGTTCTGCATTTAAAATTTAAGTTTAAGATGGAATATTAAAAAAATAAACAGGAAGCAATGAGCT
ATCAGATCACCAGCCATCTTTCAATATCAAAGAGAAATGTTCTAATACTGAAAACAGTAATTATCGATAACTACTGTGGATGCCCTCACTTGTA
ATGAGTAAATTAGTAAAATGGAAGATTAAACTACAACAGATTTATACAGTGACACACAAACAGACAAATGAAGCTAAAGAAAAAAGCTCCTAGA
TATATCAGGCATCGTCTAAAGCCTGGTTGAGCCCACCCATCTCCCAGATACAACGTGAAGCAGAGTGCTCTCAGTGGTGGTCCATACTGCTGCT
GGAGAGTTCCCTAAGGTGAGAAATGTTTATTGCCTTTACACTCAGCCTGAAGACCCTCAAATGCTACATTTCAGAAAGACTAGGGGAGAGTAGA
GAAATGGCTGAAAANNNNNNNNNNNNNNNNNNNNNNNNNNNNNNNNNNNNNNNNNNNNNNNNNNNNNNNNNNNNNNNNNNNNNNNNNNNNNNNN
NNNNNNNNNNNNNNNNNNNNNNNNNNNNNNNNNNNNNNNNNNNNNNNNNNNNNNNNNNNNNNNNNNNNNNNNNNNNNNNNNNNNNNNNNNNNNN
NNNNNNNNNNNNNNNNNNNNNNNNNNNNNNNNNNNNNNNNNNNNNNNNNNNNNNNNNNNNNNNNNNNNNNNNNNNNNNNNNNNNNNNNNNNNNN
NNNNNNAGTAAGAATAATACCTTAAACTTCCAAAAGCATTGTTTTAGATTTATTTTAAGTGTAAGAGTGTTTTGTCTGTCCTGTCTGGTGTATG
TATGTGCACTACATGCATGCCTCTGACCTGGTGCTGGCAGAGGCCAGAAGTGGCCACTGGATCCTGTGAAACTAGACTTCCAGATGCTGTGAGT
CCAGTCCTCTGCAAAGTCAACACTGCTGTTAACCACAGTTGTCTCGCCAGCTCCTTGAGACATACTTTTAAAGTTAACAATGGAAGAAGATGTA
AAATCATTTTTTAAAAAATCAGAGGAAATAAAAAGCAGAAGTACATTTGTAGAAAACAAATGTGATTATATTAACAATCCCAAAATATATAAAT
GACATCCATAAATCACAACATACATAAATTATAAAAGAAATGAATAGATTTCTAACTAAGACAAATGCATTGAGATTAGCGGGTTTTGGTTTTT
TGTTTGCTTTGTGTTTTTTTTTTTTTCCTCAGAAAATTTCGTTGACTGTAGTGTCAGGTGGTGATGAGCTGAACAAGAAGTAGTCAGAATTTCT
TAGCTAGCAGTAGTATCTTAGCTGTGTGTCTTGGGGACAGGTTTTTCTAACATGCACTGAGAAAAGTCATAAGTAAAGGGGTGCAAATCATTCC
AGCAAAGACTAATCAAAAAGAATCTAGAATTGTGTTATTTTTTAAGTCATCAAAATAATTTATAATAGTTAAATGCCTCTTAAATACACATGAT
ATCTTCTGAAGCTAAAAGTAATATGCACTCAACCAGTTTCTTAAATCTATTTGGAAACATTAAACATGATAAAAGTAAAAAAAAAAAATCTCTT
ATGAAGTCCTCTATGAAAGGAAATTGTGACAGGTTCCTGATTAGACAGAAACCATTCCATCTCCAAGGGAGAATACTCAGTGTAACTGTGGCTT
CCTAGAATGAATTGGGTAGTGTTCATTCTGTTTCTATTTTGTGGAATAGTTTGAAGAGTATTGGTAGTAGGTCTTCTTTGAAGGCCTGTTAGAA
TTCTACACTAAACCCATTTGGTCCTGGGCTTTGTGTGCTTGGGAAACTTAATCACTGCTTGTATTTCTTTAAGCATTATGGGACAGTTTAGATG
GCTTATCTGATCCTGATTTAACTTTGTTATTTGGTATCTGTCTAGAAAATTGTCCATTTCATCCAGATTTTTCAGTTTTATTGAGTATAAGCTT
TTGTAGTAGGATCTGAGGATTTTTTGAATTTCCTAGTTTCTGTTGTTACATCTCCCTTTTCATTTCTAAATGTATTAATTTGGATACTGTCTCT
GTGGCCTCTGGTTAGTCTGAGTAAGGGTTCATCTAGCTTGTTGATTTTTCTCAAAGAACCAGCTCCTGGTTTTGTTGATTCTTTATATAGTTCT
TTTCATTTCTATTTGGTTGACTTCAGCCCCCAGTATGATTATTTTCTGCTGTCTTCGGTGTATTTGCTTCTTTTTGTTCTAGAGCTTTCAGGTG
TGCTGTCAGGCTGCTAGTGTGTACTCTCTCCAGTTTTTTTTTTTTTTTTTTTTTTTTTTCGACGCACTCAGTGCTGAGTTTTCCTCTTACCACT
GCTTTCATTGTTTCCCATAACTTTGGGTATGTTGTGCCTTCATTTTCATTAAATTCTACGAAGTCTTTAATTTCTTTATTTCTTCCTTGTCCAA
GTTAACATTAAGTAGAGTGTTGTTCAGCTTTCATGTGTATGTGGGTTTTCTGTTGTTTTTCTTGTTATCCAAGACTGGCTTTACTCCGTGGTCA
TCTGACAGGATGCATGCCATTATTTCAGTCTTCTTGTATCTGTTCAGGCCTGTTTTGTGACCAGTAATATGGTCAGTTTTGGAGAAGGTACCAT
GAGGTGCTGAGAAGAAGGTATATCCTTTTTTTTTTTTAGGATAAAATGTTCTATAGATATCTGTTAAATCCATTTTGTCCATAACTTATGTTAG
TTTCACTGTGTCTTTGTTTAGTTTCTGTTTCCATGATCTGTTCATTGCTGAGGGTGCCTGTTGAAGTCTCCAATTGTTATTACTGTGTGAGGTA
CAATGTGTGCTTTGAGCTTCAGTAAAGTTCCTTTTATGAATGTGTGTGCCCTTCCATTTGGAGCACAGATGTTCAGAATTGAGAGTTCTCCTTG
GTAGATTTCTCCATTGATGAGTATGAAGTGTCCTTCCTTACCTTTTTGATAACTTTTGGTTGAAAGTTGCTTTTATTCGATATTAGAATAGCTG
CTCCAGCTTGTTTCTTCAGACCGTTTGCTTGGAAAATTGTTGTCCAATGTTTTATTCTGAGGTAATGCCTGTTTTTGTCACTGAGGTGCATTTC
CTGTATGAAGCAAAATGTTGGGTCCTGTTTATGTATCCAGTCTGTTATTCTATTTCTTTTTATTGGAGAATTAAATCCACTGATATTAAGAAAT
ATTAAAGAATAGTTATTGTTGCTTCCTCTTATTTGTGATGTTATTTTTATATTTCTGTGGTTATCTTCTTTTGGGTTTGTTAAAAGAAGATTAC
TTTCTAAGTTTTTCTAGGGTGTAGTTTCCCTCCTTGTGTTCGTGTTTTCCCTTTATTATCCTTTGTAGGGTTGGATTTCTGGAAAGATATTGTG
TCCATTTGTTTTTGTCATTGAATATCTTAGTTTCTCCATCTATGGTAATTGAGAGTTTTGCTGCGTATAGTAGCCTGGGCTGACATTTGTGTTC
TCTTAGGGTTTGTATGACATCTTCCCAGGATCTTCTAGCTTTCATAGTCTCTGGTGAGAAGTCTGATAGGACTGCCTTTATATGTTACTTGACC
TTTTTCCCTTACTGCTTTTAATATTCTTTCTTTCTTTTGTGCATTTGGTGTTTTGATTATTATGTGTCAGGAGGAATTTCTTTTCTGGTCCACT
CTATTTGGAATTCTCTAGGCCTCTTATATGTTTATGGGTATCTCTTTCTTTAGGTTACAGAAGTTTTCTTCTATAATTTTGCTGAAGATATTTA
CTGGCCCTTTAAGTTAGGAATCTTCACTCTATTCTATACCTATTATCCTTAGGTTTACTCTTCTCATTTTGTCCTGGATTTTCTGGATGTTTTG
GGTTAGGACCTTTTTGCATTTTGCATTTTCTTTGACTGTTGTGTCAATGTTTTCTATCGTATCTTCTGGACCTGAGATTCTCTCTTCTATCTCT
TATATTCTGTTCGTCATGTTTGCATCAATGACTCCTGATCTCTTTCCTAGGTTTTCTAACTCCAGGGTTGTCTCCCTTTGTGATAGTTTTGTTC
AATTCCTTCACCTGTTTGGTTGTTTTCCTGCAATTTTTTAAGATATTTTTGTCTTTCCTCTTTAAGGGCTTCAAGCTGTTTATCTGTATTCTCC
TATACTTCTTTAAAGGAGTTATTTATGTCTTTGTTAAAGTCCTCTCTCATCATCATGAGATATGATTTTAAATCAGAGTCCTGCTTTTCTGAGG
TATCCACGCCTCACTGTGGTGGCAGAACTGGGTTCTGATAATGCCAAGTAGCCTTCGTTTCTGTTGCTTATGTTATTGCCCTTGCCTTTAGACA
TCTGGTTATCTCTCGTGTTAGCTGGTCTTGCTGTCTCTGACTGTGGCTTGTCCTTCCTGCAAGCCTGTCTATCAGAACTCCTGCGACACCAGTT
CTCTCTGGGAGGAATTTGGGTATGGACAGCTGTGGTACAAGGTCAGCTCTGGGGTGCAGACAGAAACTGCAAGGATCCTGTCCCCAGCTGCTCC
TTGCTTCCTATGTCCTGAACCCTCTGGGCAGGTCCCAGGAATTTGAGCAGAAGTGGTGGTCTTACCTGTGCTCACAGGCATGTCCGAACTCCTG
GGAGACTAGCTCTTTCCCAAGGGTATATAGATATGGAGTGCCATGGCACATGATCTAGAATTCCTTTATTGATACGAGTCAAAATACACTCAAA
GACAAAAGGCGTTGTAAGGCTAGAACTCTTACATATGGCTTGAAATATATAAAATGTTAAAACTACACATGACATTGGAAATCTATACTATTTC
TAAAATGGCCTCAATATATGTAAAACAAAAATTAATAAAACTTTAGTGAAATTTCACATATTTCTTTAACGTATCACTTGATGGCGCAACAAGA
AGTAATAAACATGGAATTTAAAATGGTAGCAGAAGACATTTTTTTTTCATAGACACAGGAAACTGCACCAAGCACCTAGAATATGCAGATCCAC
TCTGCATGGAGGAATTATTAAAAAAAAAAAAAAAAAGTTGACCTCACACTAAATGCAAAACTGGTCTCAACAGATTTCCACGAATCACAATTAA
GATAATCATATATTTTTTAAAGATTTATTTATTTACATATATGAGTACACTGTAGCTGTACACATGGTTCTGACCCTTCATGTGGTTGTTGGGC
TCCAGTCAACCCCAATTGCTCTGATCAGCCCCCCTTGCTCCAACCCAAAGATTTATTTATTATTATAAATAAGTACACTGTAGTTGTCTTCAGA
TGCACCAGAACAGGGCATCAAGTCTCATTACGGATGGTTGTGAGCCACCATATAGTGCTGGGATTTGAACTCAGGACCTTCAGACGAGTAGTCA
GTGCTCTTACCTGCTGAGCCATCTATATTTTATGACAATTAAGTTACCATTCAATAACCATACAGTCAGCCCCCTCCCAAGTTCCCCTTAAATG
TGGAAATTTTCAAACATTTCTGAGTAAATCACTAAAACCGAAATTTTTAAATACTTAGAACTCAATCGTCATGAAAATAGTACATTTCAGAACT
TGAACGATGCAGCAGAAGTTAGATGTGATAAGCTGTGGGGCAGTAGAGGGCAGGATGAGGCGAAAACAGTAGGCAGGAGTGACATTGGCAGTAA
AGATGCTGTCTAGTGAATCTACACATCCCAGAAGATGCTTCTGTGGATAGGCTCATGGTACAGGGATCAACCAGACTTTTTTTTTTTTGTAACA
AGATCATATGTCTGGCTTTGTAGGTGACACTGTCACCACTGCTCAGCCTTGCCACCACAGTATGAAAGCAGCCATGTGATGTATAAATGACTGA
GTATCGTTCTGGTCTAATAGTTCCATATATAAACTAGCAATCGACCATACTTACTATTCAGACTATGATTTCCCAGTTCTTGAACTAGTTATAT
GTCTAAAACTGACCGTAAATGATGGGAAATTTGAATAAGATTGCTGGATATAAGATCAGTATACAAAAACAATTGCCTTTTCATTTGTCAGTAT
CATGGAAAAGTAACTTTTTAAGAAGTGGTCACTGAGCCAGTGGTACTTGGCTATAATTTTACCACTGCAGAGGCAAGATGGTCATGTGATTTAA
AAACTAGCCTAGACTACATAAAAAGAATCTACCTTAAAAAATGCTTAGGGTTGATAGTCACAACAAAAATAAGTAATAACTGTACTAATGTTCA
GAGTCTAAAGAAACTAAAACAATTAATTGATCTGCTTCAAACCAGTAGTTCTCAAAAGTTTGATTTCCAGATCCTTCTATGCTCTAAAAACAGC
TGAGAAGTCATAAGATCTCTTACTTAATTGGGCTTTATCAATCCGTAGTCATAAGACATTTAAGTCAGCTACTAATTTTTAAAAATAATGAATC
TGCTATACACTAAATGTTTGACACATCTTTATGAAGTAAATTGCACTTTCAATTTAATTGATGAAAATGTTTTTATATTTTTTCCAGCTCTCTT
TAATGACAGCATAAATAAAGGCACTGGAGTCCTGAAGCTCTTTCAATGTTGAATCTGCTGTGCTCTGTAGTTTTACTTTTATTATATGAAAAAA
CCTATGTCTTGACCTGCAGCTAGAGAAAGCGACCACACTTTAATAGCTCCCCAGTTTCCAAACAATGGAAGGTATCTCTTCTTTGATACTTTAT
CAGTCTTTGGCAGGTCATAACTAAGAAGGTAGTTGCAATATGGGACCTAAAACTGTATCGCTGAGCTTGTCATGTTCCATCATATTAAAATTCA
TTGTTCTGCCTGACACCCTTGGATGCATCTTTTATCCAAGGATGGTTGTGTGAAGGCAGTTGACTATTTGGAAAAGGCTGGGTTGCCGAGTTAA
GTACCTCTTCAAAATGATGATACTGTTTTATGTCAAATTTTTCACTTATTAACATGATCTTCACGCGGAAAAAAGCTTTCAAGTTCCGACAAAC
TGTCAAGCTAACAGTAGCAAATGTACACTTACCAAAACTCTGAATTTCATTTGAAAGCTTAAATTTTATCATTGGCAGCAAATACTGTCACCTG
TTTTTCCTGAAGTCACAAATCTCACTCACCTTGTTCACTGTCAACAAAGTATCTGCCAAATCCCCACGTCTGGATAACCTCAGTTTGTCAGCCG
TTCTTCCTAGTAAAAAAAAAAAAAAAAAAAAAATCACATTATGTGGGAGAAAATGTGTCCTAAGCATGTTAAACTTACAATTTGCCTGAGCACA
GTGGCATCCTCCTTTAAGCCCTTTAATTCTAGCAGAGGCAATGGGAACTTGTGAGTTCAACCCAGCCTGGTCTACATAGTTTCAGGCTACCCAA
GTTACATAGTGAGACCTTGTCTCAAAATTAATTAATTAATAATTAATTATTAGTAAAAATATTAAGATAAACTTACAGTTCAAACCACCCCACA
AATGCTCTTCCATGAGCTAACAGTCATATTTCAATGTGCAGTGATACTGTACATTGCACACAACATTAAGATGTTAAGTACTCGAGTGTCTTCA
GAGAAATAACAGTTTCATGGATGAACACGGACATTTTTTATTAAACTAATAAAATTTATTTAAAAATACACAACTTAGCATTAACATTTTTAAG
TCATCAAAATAATTTATAATAGTTAAATGCCTCTTAAATGCATGTGACATCTTCTGAAACTAAAAGTAATATGCACTCAACCACTTTTTAGAAT
CTGTTTGTAACATTAAACATGATCGAGGTAGAAAAAAAAATCTCTTATGAAGTCCTCTAAGAAAGGAAATTGTGACAGGTTCCTGATTAGACAG
AAATCATTCCATCTCCAAGGGAAAATATGCAGTGTAACTGTGGCTTCATAGACTATATTGGGTAGTGTTCATTCTGTTTCTATTTTGTGGAATA
GTTTGAAGAGTATTGGTAGTAGGTCTTTTTTGAAGGTCTGATAGAATTCTCCACCAAATCCATCTGATCCTGCGCTCTTTTTGATTGGGAGACT
TTTAATGACTGCTTCTATTTCTTTAGTGGTTATCGCACTGTTTAGATAGTTTCTCTGATCCTGTTTTAACTTTGGCACATGGTATCTGTCTAGA
AAATTGTCAATTTCATCCAGATTTTCCAGTTTTGTTGAGTATAAGCTTTAGTAGGATATGAGGATTTTTTTAATTTCCTCAGTTTCTGTTGTTG
TGTCTCCCTTTTCATTTCTAATTTTGTTAATTCGGATAATGTCTCTGTGTCCTCTAGTTCGTCTGCCTAAGGGTTTATCTATCTTCTTGATTTT
TCTCAAAGAACCAGCTCCTAGTTTTGTTAATTCTTTGTATAGTTCTTTTTGTTTCTGTTTGGTTGATTTCAGCCCTGAGTTTGATTATTTCCTT
CCATCTACTCCTTGAGTGTATTTACTTCTTTTTTTTTTTCTAGAGCTTTCAGGTGTGCTGTCAACCTGCTTCAGCATGCTCTCTCCGACACACT
CGGAGCTATGGGTTTTCCTCTTAGGACTGCTCTCATTGTGTCCCATAAGTTTTGGTATAATGTGTTTTCGTTTTCATTAAATTCTAAAAGTTTT
TAATTTCTTTATTTCTTCATTGAGCAAGTTATCATTGAGTACAGCGTTGTTCAGCTTCCATGTGTATGTGTGCTTTCCCTTGTTTTCTTGGTAT
TGAAGACCGGCTTTACTCCATGGTGATCTCATAGGATGCATGGGATTATTTCAATCTTCTTGTATCTGTTGAGGCCTGTTTTGTAACCAATAAT
ATGGTCAGTTTTGCAGAAGGTACCATGAGGTGCTGCGAAGAAGGTACATTCATTTTGCTTTAGGATGAAATGTTCTATAAATAATCTGCTAAAC
CCTTTAGCTTCTTAACTTCTATTAGTTTCACTGTGTCTCTGTTTAGTTTCTGTTTTCATAATCTGTCCATTGCTGAGAGTGGCGTCTTCAAGTC
TCCTACTATTATTCTGTCGGCTGCAATGTGTGCTTTGAGCTTAAGTTTCTCTTATGCATCTGTGTTTCCTTGCATTTGGAGCACAGATCTTCAG
AATTGAGAGTTCATTTTCGTAGATTTTTCCTTTGACTAGTATGAAGTGTCCTTCCTTATCTTTTTTGATAACTTTTGGTTGAAAGTTGTTTTTA
TTAGATACTACAATGGCTACTCCACCTTGTTTCTTGGGACCATTTGCTTGGAAAACTCTTGTCCAATGTTTTACTCTGAGGTAGTGTCTGCCTT
TCTCACTCAGGTGCATTTCCTATATGAAGCAAAGTGCTGGATCCAGTTTACATATCCAGTTGGTTAGTCTATGTCTTTTGTGGGGGAATTGAGC
CCATTGATATTAAGAGATATTAGAGAAAAGTAATTGTTACTGCCTCTTATTTTTGTTGTTAGAGGTGGAATTATGTTTGTGTGGCTTTCTTCTT
TTGGGTTTGTTGAAAGATTACTTTCTTGCTTTTTCTAAAGTGTAGTTTCCCTCCTTGTGTTGGTGTTTTACAACTTTGTAGGGCTGGGTTTATG
GAAAGAGATTGTGTAAATTTGGTTTTGTCATGGAATATCTTGGTTTCTCCATCTATGGTAATTGAGAGTTGTGCTGGGTATAGTAGCCTGGGCT
GGCATTTGTGTTCTCTTAGGGTCTGTATAATCTCCCCAGGATCTTCTACCTTTTATAGTCTCTGGTGATGAGTGTAGTGTAATTCTGAGAGCAT
TGCCTTTATATTGACCTTTTCCCCTTACTGTTTTTAATATTCTTTCTTTGTTTTGTGCATTTGGTGTTTTGATTATTATGTGTCCGGAGGAATT
TCTTTTCAGGTTTAGTCTATTTGGAATTCTGTAGGCGTCTTGTATGTTCATGGGCATCTCTTTCTTTAGGTTAGAGAGGTTTTCTTCTATAATT
TTGCTGAAGATATTTACCGGCCCTTTAAGTTGGCAATGTTTGCTCTCTTCTATACCTTTTAACCTTAGGTTTCATTTTCTCATTGTGTCATGGA
TTTCCTGGATGTTTTTGGGTTAGGAGAGTTTTGCTTTTTGTGTTTTGACTGTTGTGTCAATGTTTTCTATGGTATCTTCTGCACCTGAGATTCT
CTCTTCTATTTCTTGTATTCTGTTGGTGATGCTTGCATCTATCGCTCCTGATCTCTTTCCTAGGTTCTCTATCTCCAGGGTTGTCTCCCTTTGT
GATTTCTTTATTGTTTCTATTTCCATTTTTAGATGCTGAATGGTTTTGTTCCATTCTTTCACCTGTTTGGTTATGTTTTCCTGCAATTCTCTAA
GAGATTTTTGTGTTTCCCCTTTAAGGGCTTCAAGCTCTTTTACCTATGCTCTCCTGTATTTCTTTAAGGGAGTTATTTATGTCCTTCTTAAAGA
CCTATATCATCATCATAAGAAATGATTTTTAGATCCAGATCTTGCTTTTCCAGTGTGATGTTGTTCCAGGACTTCCTATGGTGGAAGAATTGGA
TTCTGATAATGCCACGTAACCTTGGTTTCTGTTCATTGTGTCCTCATGCTTACCTCCTGCCATCTGCTTGTTGCTAGTGCTACCTTCCCTCATT
ATATCTGACTGGAGCCTCTCCTTCCTGTGATCCTGGTTGTGTCAGAACTCCTCAGAGTCCAGCTTTCTCTGGCATCCTGTCATTCTGGCATCCT
GGGATCCTGGGATCCTGGCATCCTGAGATCCTGCGTATGTCAGAGCTCCCATTAGTCAAACTACCTCTGGGACCCTGATATCCTGGTGTGGCCA
AGCTCCTCCGATCATGTCATCCTGCGATCTTGGTCATGTTAGAGGCCCTGAGAGTGGAGCTTCCTCTGGGTGTTGTACGAGTCGCTATGGAGTT
TGCGACCAATGTCTGAACAAGTACATTTTAAAGTAAAACTCATGTCTTTATGTTTTGCTGATGAGTGTGTCCTCGTAAAGAACTCACACAGTTT
GGTGCCATACCAGCTTCCTGCTGACGCACCAGACTTTTACCAACCATTGTGTTTGCAGCCTTGGTGGAAATGCCAATGCTGTGGAATAGTCATT
AAGCTTCTTTGTATTGCAAGGTGAGCATCAGTACTGTGAAAAATAAACTACAAAATTCAAACCCTTTGAGACACTGACATGATAACACAAGAAC
AAAAGTCCATACCAAGTCCAAAGTCCCAGTCACAGTCTAGAAGCACAGGGGATATTGTACGGAATGAAGCCAGGTGTCAGGAGCCATGGCTGGG
CGGTTATGAGCACTAGCTGCTCTTCCACAGGTTCCTGGTTTAATTCCCAGCACCCAAATGTTGATCACAACTCCCCATAACTCTAGTTCCAGGG
CATATGATGCCCATGTCTCACCTCCTCGAGCACCTGAAACACACATGGTGCACATACATACATGCATACAGTCCAAATACTCATACATGTAAAA
ATAATTTACCTTCAGGTTATATATGCATGAGGTATATATGAGACATAAATTATCTTTCTTCAGACTTAGGTCCTGTCCCAAGACAGCTCATTAT
GTACTTGCAAGTATTCCAAACTCTCAAGCAGTCTAAAATCTCAAATTCTCTTGGTCCCTAGGATTTTGCATAAGTGATACTTGACATGTAGTAT
CAAAATAGTATTCGTTTAACTCGCATTCTGAACAAGCAAACAATCCTACAGATACACATACATCCTTTGTCAGAAAGTCCTGTGTTTCTTCCTA
TGTGTCACTTGGTTCTACACGAATGTTTAGACAGGCGTCATCTCTAGTCCTCCGCTGACTTTCTTTTGTGTCACCCTATTCTGTCTTTATGGTA
GAACTTGGGACTATTGAGTAGTTTACTGTTCATTTGCTTGCGTGTTTATTGTCTGTCTCAAGACCTGACATATGACTCTGTCCTAGTCAGCACA
GTAACTGTTTCTGAAACCTAAAGCACTCGGTAAGTGTCCATGGGTTAGTTAAGTCAGGTTGAAGTGACACATAAGGATCAGCTCTTCAGCATTT
CACTTTCGGAGAGGTTCATGGCTACAAATAGCTAGTTTTACTCATTCTGGCTTCTCTAGATAACAACACAGGGAACCTTTGATCTCAGTGCCTT
CCAGCATTGACTCTGTCCCACCAGGATCCTCGAGTTCCATATTATTTAACGGGGGTTACAGAAAAAGCACCTGACCGACAACCTCTGTTTCCAG
TATGAAGAGCTAGTGAGTGTTCTGTTCTAGAACTGAATTCACACCCTTCAGCTTCCTCCCAGGCGAAATAGGGAAGAGATGCATGCATACCGAG
CCACTACCAATGACAGCTCTCGGTGCCAAAGTTGCAGCAGCTCCCTGCCAAATGATCAGGCAGTAGTCATTCAGAAAGTGTTTGTTACAGGGAT
TTTTTTTTCAGAATTAAAATTCAAACTGAAGTTGCAACAAATGAGCAGCAGATTTTTCAGAATTAATTTTTTGTACATTTTAGAAACGTTTGCT
TCAGTCTTCAATTCCCGAGAAACCATTGTATCTATTCAGTCTTTCGCACAGAAGTTCTCAGGATCTTTCCTAAGAACTGGCAATGAGATTCATA
GTTCATTCCCCCCAAAAAATGTATGTTTATGCTTGAGAACTTGTGACTGATTATCGTCTCCGTTTAAAGACAGTGGACCAAACCCTCGTCTCAG
CTTTTCTCCCCTTAACTTTATAGCATAGAAAATCTGTAGTGGGATGCCTGGGAGTCAGGTGGAAGCCAACACTAGAATGTGGGATGTCCATCCA
ACCACTCACTGCCTAGGGGAAGCTGTGTTTGTTTCTGGTGTTCAGTATTTGAAATCTTTAACAGCAAGAATAGATGTAGACAGCCACTCTAGGA
TTCTGTGTTCACCCTGAGTTCTCTAACTCAAACTCAACGTCAGTGCCCAGCCAAGTTTGACTTCTGACCGCATTTCTAGGGAAACTCAGAGCTA
GCTTACCTACAAGAGATAACGGTGTCATTTCTGAAAGTTACACTGCTGTCTATTTCCACACGTATCATTTAGCTTAACTTGGCTTTAGTTACAC
TGTAAACTTGCCTGGGAATGTCAAAAGTGGTGAGTGTTGCAGCCAGACCCAAGTTTTAAAAAAATGAATGGAGCACTCTAAGGTTCTCCACTCT
ATCAAGGAAGCCATACAACTGGGAGCAGCGGCAACAAGTGATATTGAAAACTAAAGTTCAAAGGATGCGGTTCCAGCTGCAGAATAGCACTGCC
GCTGAGTCCTGGGTGGGGAGGGAGCAATGCCTTTGGACTGGTGTTTACAGCCTCGGCTTCCCAAGAATGAGCTGTACACGGGCCAGAGTAGTTG
AAGCTCGGGTTAGACTCTTAACAGCTTCGACAAAGGAAGTGCCTATGCTGCACAGAGCAGACTCACACACACGACACCCACACACAAGCACCTC
TCTCTCATTAACTTTCTCGACACAACCTAAGTCTGTGGAAATGAACCGCTCATTGGTTAACGTCCAAGCTAGGCCTCTGCCAATACCTGCTCAG
GCTTCCATTTCATTGTTGTTATAGTGTCAAAACATCACAGTCTCCCCTTCCACATGGGAAGTGAGGTATTTGAGGTATGTAAAGGAACCATCTA
ATGTGCTGGTCTTTACAACCCTTTCTGCTCCCTGTTCCCTAGAGGGCATCTTTGCACTGTGGACATCCCCCATCAGTAAGACAAGGCCCATAGC
TGGTGATATGCATGTAATAGACATGTGGGAATGTCCTGAGGCTCACTGTCTCCCATTCCTCCCCCAACCCTAGAGAACACTCACCATCGACAGT
CATCTCTGTAGCCCCTCAGGCTCTTACTCGCAGCTAATGCTCATTCTAAGTCAACATTTTACCTCCTTGAGGTATGGATAGAACACTTTGGAAG
GCTCCAGATAATCAAACTTCATCATCGGGTCGTCGGTGGTCATTTTGACAACTACACAGGGATGCAGTAGGGTTTCTGTGATGCTGGGGAGCAG
AAATGAGCCAAGTCACCATGCCTTTAGAGAAAAGAGGCCTAGAAGACTACAGAAATGGAGATCCGACAAATCAAAAGCGGCTCGAGCCATTAAA
CATAAGGCAATTCTAACGCCTGTGATTAGAACAAAAAATAGTCGTCTGCGAAACTATATGTTTTTGAGAGAAATACTAATTGCAAAATGTGTGG
GGAAGAAAACTTCACAGAGGCGGTTCTGTCAATGTCATCTTCTCATTGTGCCTTTAATGCCGTTATATGGGCCTATGGGCCTGAGAAGCTAGTG
TTTGGGTGATACAGTATTTGAAATGATTTAAGAAAACATCGCAAAACCCTGCTTTTGATTTCTAAGAAATCCAGCTTGGACGTCTCGGCTTCCA
CAAAACAGGAGTGTATAGCAAGTCCTACTATTTTGGTGGAAGGATGTGTGCCTGTTTCCTCAGGAGAAAGGATGACACACTACACATAAAATGC
CCAAGATGTTGAAATTGTACTCTACCCCCTTCTTGATTTCAAACACGTTGTGCACATGGTTCATCTCATTTCTTCCCGAGACTCACTCTGGTGA
TCTCTGCCTCCCCCTACACACTTACAAGATGTTCACTGGGAGAAGTGCTTAGCTACAAAGCTGCCTAAAGTAAGCTGCGGTACCCCACAGGTAC
AGGGCAGCTGCTCCAGACACCTCCTGTGGGCAGTTCTGAGGCCAAAGGGGAAAAAAATCTAAATGGACCATCTCTGCAGGAAGAAAATAAAATT
CTTTGTATTCTCCTTCCTGAACGTCTTTCTCTTATGTCCAATTTCTGATAGACTCCAATTATATCAACTTGTCGACCTCCTCCTTCCTGCCTAC
ATACTTGCTTATTCATTCACCCAGGCCACGTGAGCTCGCTCCCAGCATCATCTCATCCAGTTGTGTGGGTTTTAAATCATCTCTAGACTCAACG
CTCCCACTTTACCTCTCTAGAATTAACCCTGTCCCCTGGTCCTTTTGATCCCTTCCTAGGGCCATCCATGCGATGTTGAGTCTGAGCACACCTC
CTCTCACTCCCAAACCCGAGCCTCTCCCTGGGGTTTCCCGTTCACCAAAGCCACCCCCGGCCATCTGGTCACTTACTTGGAACTTCTCAGAGCC
ATCATTAACTCTATTCCTTTACTTCCTCCACCTACTCATTAGCACATCTTACCAGTCGCACTTTCTAAGCACTTGTGGAACCCGGCCACTTTGC
CATCTTTTTTGCTGTTTCCTCCCTCTTCTGATCCATCAGCTAGACCGTTTGCTAATACTACCCAGGAGCTTCCACCATGCCTCCCTGCCAGCCC
ATTCCACTTAAACATCAAAGTGATCATTTTGAAGCATAAATGAAATCCTATACAACTCACCCACTATTGTTATACATAGACTTCAGACTACTCG
CAAACCTCCACCTACCCTGCCAGCGCTTCACCTTTGTAACCCTCTCTGTCCATGACCTCCAGCCACTCTGGAAGGTTAGCATAGTGTCAAGCCT
GCTCATTCTATAAAGTTGTTGAACAAGCCACTTATTTTGCTCTCTGAAATCTACATGGTCTGCTCACTCGAGTCACACAGAATCTGCTCAAGGG
ACTTACTGTGACCAAGATGCCAAATGCAAGACCCCATCCCGAGTTCATCCACTCTCTTCTCATGCCTACACTTTTCTCTCTATCACATTCTGCT
GGGAAACTGTCTGTATATTGATGTTTCTCCTCAGGGTAAGTGCTCCCTGAGACATGTTCCCTCGCTTTGTTCCTGCTGCATGCCCAGGTACCTA
GACGAAAGTATCACATAAGACATGGAATGTTGGAGACAGCCAGTATTCACTGAATGCCCATCTTTGTTGTAGGTGTTCTGATACAGTAAAAGAA
ACCACAAGCAAAATGGGATTCTGCCCTAGGGAACTCACCCCTTCGGTGCCACAGACAGACAAGTACGCATCTCTGTCGTTCTGTGGCTGGGTAG
TGTAGCTCCAGCTTGAAACCCCCAACTGTGCCCGCAGGAATCGGAAAGGTAGCCAGAAAGAGCTGACATTTGAGATTATTCCTGACAGATGAGC
AAGTGTTTTCAAGGTAGAGGAGAGTGGGAAGGACACTTCAGGTGTGGAAGTGGCAGGTGCAGCACCGTGGCACTCTGATAGATAACATTCAATG
GACCGCGAATGTGACCAGCTTATGAGAGAGCTCAAAGATGTGAGTGCTTGAGTCAGCTACCAGAAAGCAACAACTTACTTTATTCTTGGCGCTG
AACGTGCTCCTTCGAATTTTCCCTTTTACTAAGCAGTGCCCGTTCAGATGATTACTCATGCCGCAGTTCTCAGAGTCATCCTTGTATTTTCATT
CTCTTACACTCCACGTCTAGTCTGCCAGCTACACACCATCAGCCCTGCCTTCCAAATAGGTGCCACGCCCAGCCTCTGCTCGCCAAGCTTATAT
GAATGTCTGACCCCAAGCTGCACCGTAGCTAACACTTCCAGGCAAGCCTCCCTGCTTCTCTTATGACCTTCATGGCCCCATTCCAGTCAAAAGC
CAGCACTGTCATTGTCAACTGCTCTTAACTTAAAACTCGAGGACCAACGGGCATGGATCAACTACGTGGGTGCCTAGAAAAGAGTCTCTGTGTG
TGTTGGGGGTGCACTTGAGAGAGAGACAAAAAGACAGACTCTGCATATCAAAGTCTGTGTCTTGTATATCTATATGTCTTCTTTCCTTCCCCTC
CCCTCCTTCCATTTCTTCTCCTTCTCCTCCCCCTCCTCTTCAACCCTCTCCCACACCACCATTCTCCTCCTCACCTTCCTCCTCTTCACCTTCT
CACCCTTACCATANNNNNNNNNNNNNNNNNNNNNNNNNNNNNNNNNNNNNNNNNNNNNNNNNNNNNNNNNNNNNNNNNNNNNNNNNNNNNNNNN
NNNNNNNNNNNNNNNNNNNNNNNNNNNNNNNNNNNNNNNNNNNNNNNNNNNNNNNNNNNNNNNNNNNNNNNNNNNNNNNNNNNNNNNNNNNNNN
NNNNNNNNNNNNNNNNNNNNNNNNNNNNNNNNNNNNNNNNNNNNNNNNNNNNNNNNNNNNNNNNNNNNNNNNNNNNNNNNNNNNNNNNNNNNNN
NNNNNNNNNNNNNNNNNNNNNNNNNNNNNNNNNNNNNNNNNNNNNNNNNNNNNNNNNNNNNNNNNNNNNNNNNNNTTTCCTTCCTTCCCCTCCT
CCCACTTTTCCCTACTCTCCCCACTGGCCACCATCAGATAGGAATCCTTGTTTCACTTCCAACACGTGTCCACTGGCCGTGATGTCACACCTCA
CACAGAGACAATCGAGCTAAGTGATTGTAGACTGAATCTCTTGAAAATGTCAGCCAAAATATATCTTCCCTCCTTTCGCTTGTTTTATCTTAAG
TATTTTCTTCACAGTGACAGAGATACAACTAATATTATAAATGCAAAGAGCATGTCGTTTTTAAAAAAAAAATCAAAATAAGCAGAAAACTTTA
GCTTACTTGATCAATAAAAATCAGGGAAGTGCATTTTGATATATAATGTGGTTGCTTAAAACGAATCATGAAGTCCATTTCACTCAGATTTCTA
TAAATAAAATTTTAAAACATAATGAAATACATTCTTTTATGAGAATATGTAATTCAGCCCTCTGAAGTTTAAAGAGAAAGTCTATAAGATTGAC
CACTGTGGGAAAACATGGTTTGTTCTTTTTCTCACCTCCGAGACAAAAAGCCTCATAGAGGCAGCTTACAGGAATAAGAGTTGTGTCAGCTTGT
CGCTTCTGAGGACACTGGTCCGTCACAGTGGCAGCCTTGGAGGATGCGAAGTTGCCACTGCCAGTGTGGGACACGCACGCTTCTGTCTGTACCA
GGAGTTGAAGCACAGCTTATCCACATCTGGAAGATGAGAAACCAGAGTGTTAGAAGGTTAGAACCTTCGAAGCTGACCCTAAGCATCTCGTGTC
TACCAGCTAGTTCACAGTCCCTCCCAAATGCTGCACAGCCTCCAAXACAAAGCCTTCAATGAGGCACCGCGAGTTCACATGCAAACCCACCAAC
CTCCCAAAACACAGCACCACCTGTGCGCCATCCGTTCACATGGAAGACTTAAAATCACCAATGGAACTTCAAGCTTGTACCAGAGTTATAAGAA
CAGTGTCATGGGCAGATGGATTTTATTTCAGGAGTAAAGGATGTTACAATAGAAAAGTTTTAATATAATCTATCACACTAAAATCTACCTTATA
ATTTACTAAGTTTATCTTTTATACCAAACACTATACTGCTTTTATCAATTCTTTAAACGTACAGATATAATCCAGTGTCCACTTTTCATCAAAA
TGTCTTTAAAATTAAAAGTGATCCTTCCTTAACACAACAATGTGGCATAGGGGTAGGATCTCACTATGTACCTCAGGCTGGCCTTGAACTTGGA
ATGCTCCCCCTTTGACTACTGAGGCTGGGCTTAAAGACTTGTGCCATCACACCCCGCTGGTGTAAGTTCACCATTATTCTGAATAATTTTGTCC
ACACAGGGCAAAAGAAGGAAATTAGAAAGAAGGAAAAAGAATCCAAAGGCAGGGGTTAAGCTGACATGTTTTATTTGTATAGGGTATGAGTTGC
TTCAATTTCATGCTCATTTCTATGAAGCAACTAAAATGTAGTATAACAAAACTCAAGCAATGAGTTTATAGAATGAGTATCCTTTGTGTGTGTG
ATTAATTGTTGATTTGAAGATTTAATGAAATAAAAGCATCCTATTTACAACAGCAGGAAGTTCAAATCTCAGTTATAAATCTCAATATGCTATG
TGTATAAGAATTGAATTTAAGAATCTTTAAAGCTCGGTGTGGTGGCGCATGCCTTTAATCCCAGCAGTTGGGAGGCAGAGGCACGCGGATTTCT
GAGTTTGAGGCCAGCCTGGTCTACATAGTGAGTTCCAGGACAGCGAGGGCTATATAGATAATCCCTGTCTCCAAAAACCAAAAACCAAAAACCA
AAAAAAAAAAAAAAAAAAGAATCTTTAATACATATGTGTATGTATCTATGAATGTATGTGAATAAAAATTTTAAACTCTCTAAGATACAGAAGT
AAAAACAAAAATGTAAATAAATGGAAAGGCAATCCCTATTTTTAAATACGGAATTTCATTAGTATAAGTTTAAAACAATCCTAGTAAAAATACA
AGTAAAAAGACTTTTATAAACAAACAAAATGGTGCCTAATCAATGTGGCAACAAATTTAATCAAGAATACTCCAGGAAAGGTGAAAATTATGAT
TTAGATATTAAAATGTATTATATTTGAATAAGGGCACTAATAGACAAATTACTGGTGTAGAAATAGCCTCAATTTTATTTTAAATTTTAATCTA
CATTGGGAGGTTCTCATGTCAGTAATATAAACCTGAGATGATCAATAATTTGTGCTGGGACAACCAAATAGCTGTCAAGGGGAAATCCGCTTGA
CAGTTTCATTTTATTGCAAAATAAAATCTAACTAAATTCAAGAATTTACGAGGAAATTGTTAATATCTACAGGTGCAGCCGACCTTCCAAAGTA
CAATAGAAAATCCAAAAGCTGTAAAGAAAAGAATCATAAAATGAATTCAGTTCCATAAAAATTACACACTTGAGAGGCAGATAAATACAACTTC
CAAAGGCAAGTGACAAAGTAGACAGAACATTTCTGCAACTAATCTATATAAAATTTTTTAAAAACCTAACTCCCCAACCAATAAAGAACCTTTA
TAAGGAACTAAGAAAAAAAATGGCTGTGCAATAGAAAAAAATGTAAGGTTATGCCGGGCGGTGGAGGCACACTTTTAATCCTAGTACTTGGGAG
GCAGAGGCAGGCAGATCTTCAAGTTCAAAGCCAGTCTAGTCAGCCTAGTCTATGGAGTGAGTTCTAGGGCACCCAGAGCTACACTGAGTCACCC
TGTCAGTTTTAAACAACAGAAGAACACACCCACAGAGTCAACTAATCAGCGCTCCCAGGGCCCACAGAGACTGAACTGACAGTCACGGAGCCTG
CATGGGGACTGCGTCCGAGCTGGGGTTGTTTAGCTTGGGCTTTTGTGGGAGTGAGGGGAGTCTTTGACTCTGTGGCCTGCTCTTGGGACCCTTT
TCCTCCTGGGTTGCCTCAGCCAGCCTTGAAATGAGGGTTTGAGTCTAGTCTTACTGCATGTTGTTATTCCAAGTTTGGTTATCACTAGGAGGCC
TGCTCTTCCTGAAGGAAAAAGGAAGAACAGTGGATCTGGGAAAGAGGACAGGGGGACCTGGAAGGAGTGCAAGGAGGAAGGCTGCGGTTGGGAT
GTGTCTTAAAGAGTAAGTCTTAAAAGCAGAAGGTTATTTTCAGTTTACACGAAATATAAACAACGCCTTAGGAGCATACAAAATATAATCAGCT
CACTTATGAAAAATGAATGCAAATCAAATCTATAACACACAATTTTAACAGGAAGATGTTTTCATAGTTTAACAATATGATCTATTACCAAGAC
TATCGATAAAGGAGTACTGATAAATACCACTACTGCTGCCTCAAGTATAATTCTTATTCTCTCAAAGAACAGTTTGGCAGTATCAGAACTCTAA
AAGCAGTCTCCAAAGTATATCCCAAGATGTCACATACACCTGAGACAGGAAATAGCGACAGACCTTGCACGCCAGTCTCTTTCCCCCCTAAGTC
ACCGTCTCACTGACTAGCTCAGTCTGGCCTAGACTCACCAGCCTCCTCTATCGGGCTCCCAACCACACACCGGCTCACCTGTCTCTGTTTCCAT
CTTAAACATTTATCACACACTGTGGCCTGAACTTGTGTCCTGAGGTGTGATAGTAAAGGTGATACGCATGTCTTCATCCTTCCCAGGTTCATTG
ACACAATATTCCTTTTTTACCATGGATCTTAGCAACCTCAGTATATGAGTTCTTTATCTCACCAAGAATTCCCACTTTTTCACTTAAACACTTG
AAGTTTCTTTATACTATTCTGAAAAGCTATCAGTTTTAAAAAAAAGTCGGCTACATAGTTATATAGTGGAATTACATAAAACAGGAAGGAACCT
TCATTCATTCATTCATTCATTCATTCATTTTTGCTTACTCACTTCACATCCCGCTCACTGCCTGCCTCTCAGTCACCACCTCCCACAATTCTCG
CCCCGCCCCTTCCCCTTCTCATCTGAGCAGGTGGGCCCCCGGGTGTACCCCCACTCTGGTACTTCAAGTCTCTCTGAGGCTTAGGTACATCCTC
TCCCACTGAAACCAGACAAAGCAACTCAGCTACAAGAACATATTCCACATACAGGCAACAGCTTTTGAGATACCCTCCCCTGCTCCCATTGTTC
CAGAACCTCATGAAAACCAACCTGCACATCTGCTATGTATGTGAGGGGAGGCCTACGTCCAGCCCATGTATGTTCTTTGATTCGTGGCTCAGTC
TCTGAGACCCCCAAGGGTCCAGGTTACTTAACTCTGTTCGTCTTCCTGTGGAGTTCCTATCCCTATAGGAGTCCGAAATCCTGGAACGACTCTT
TTACCCATGGAATGATACTCAAATTTTATATATATAATAAATTTTATAAATTTATACATATTTATACATATGTGTGTGTGTACGTGTTTGAATA
TGTGTACATATGTATACAGACACACATACGTGCATATGAGTGTGAAGCCCAGAGGATAACTTCCATGGCTTCCTCAATCATCACCATATTATTT
TTTTTTGAGGCAGCGTTTTTCGCTGACCTACAACTTGCTGACTTTGCTACTCTAGCCAGGCACCAGTCCCCAGGGACTCTTGTGTTTCTCCCTC
CTCAGCCCTGGGATTGCAGCATACATCACTACAGCTGGCTTCTTTACATGGNNNNNNNNNNNNNNNNNNNNNNNNNNNNNNNNNNCAAGGTGGA
AATATATATGAATCAATGAATGTGAATGAGAATTAAAGTGCATATCCAGGTGCACATCTCTATCCATATATATGGAGACCAAACAACAGCATTG
GTTATCCTTTCTCAGCACTATCCCTGGCCACCTTCCTCCTGTACCCACCACGGTCCCTCACTGCCCTAGAACTTGCCATCTAGGTCTGTCTACC
AAGCCCCAAGCTTCTGCCTGTCTGCCTCTCCAGTCCTGGGATTCTAAACACACACCACCATACCTGAACTCAGGTCCTCACACACTTCACCAGA
TGATCTGTCTCTCCAGCTCACAGGTAGCGACATTTTAGAGCTCCTTTTTTTTTTTTTAATCTTACTGTACATTTATAATTGTACATAGTAATGG
GTTTCATTGTGATGTTTCCATGAAAGCCTTTAACACAATTTGATCATGTCGAGTCCTTCATAATCCTTCGTTGGCCTTCCTTCTCCTAATCCCC
TTTTCTCTTCCTGGAAACCCACCTCCTCCTTTCATGTCTTTTCCTCTAAATTCCATAATGAAACAAAACGTGATATTTATCTTTATGAGCCTCG
CTTTATATTACTTAATATGATATTATCTAGTACTGTCTGTTTCCCAAAGCACTTCATTGTCGATGGGTGGTTGGGTCAATGGCTGGGTAGATGG
ATGGATGGATAGATGGATCGATGGATGGATGGATCGATGGATGGATGGATGTCACAATTCTGTATACCTTTGGAGACTACATAGTCTGATTCTC
AGTTGAGGGCAAATGTGAATAGTGCCACAATAAGAGTTGCTATGCAAAGTATTCTGACTTCGACTTCTTTCACTCTATATCCAGCAATGCCATA
GCTAGATTCGTAATCTTGGTGTGTTTTAAATGAATGTCTATTCTGATTTCCATCCTATCTATCCTGGCTTCTATTCCAACTAGCAGTGGACACG
GGCTTCTTTTCCTGTGCTGTTATTTGTCGTTCTCTGTTATCTTCGTGGCAGCCATTCTCACTCGGGGAGATGAAATCTCAGTGAAGTTTGATTT
ATATATTTTCTGTGGTTAAAGATGCTGGACATATCTATTGCTTATTAGTATTTCTTCTTTAAAAATGTATCTGTTCAGCTGACTTGACCACGTA
TTGGTTGCATCACATGTTCTTTGTATTTTCTGGATACCAATCCGCTGTTAGATGAATACTTGGAGGTTTTCTCCATTTGTTGTAAGCTATGGCT
TCACTCCGCTAATGGTTTCCTTTGTTGTGCAGAAGCTTTTCAATATCATACAATCCCAGTTGCCAGTTCTTGCCCTTATTTCCTGAGCTACAGG
CGGCCTATTTTAAAAAACAATAATCACTACCTGTGCCTGTGAGCTCGAGTGTATTTCCCTGTTTTCCTATAAAAGTTGTAAAATCTCAGCTCTC
TAGCTACGACTGTTTTGAGCTGATTTCCGTTGCTTCAGTCTTCTACCTGCTCACGTCCACACGTTGAGCAAGATGCTCATTCTTCACGATGCTG
TGTTGTCACCTTGTTGGGAACGAGATGGCTGTGTCCACGTGGGTTTGTTTCTCTGTTCTTTCTCATGGTTTCCATTCTGTTCCTGCAGTAAAAT
ATCCTGAACAAAAGCAATTCAGGGGAGGGAAGCTGTCTGTCATTGAGGTTTTGAAGGGAAGGTGCACTCAAGGGGCTTTCTTACCTGGGCAGTA
ATTCAGCTGGCGGAAAACATGAGCCTAATGTGTTAATACCATGGCTGAATTCAAAGGGGGGAAAATGAGTTTCTCCTCTCCTTGCGGAGCCTCC
ATCATGATTTATGGTTCTGTAAAGTAGGGGGTGCTTCACAGAAACTGTTTCTCTTCATTGTACAGAAGCAGTGTTGTGAAGATGGGCTTTTAAA
AGCCTCCTTGTTTCTCCGGCTAATGCTGAGGAACTTACATGGCCCCATCTCTCCCTGGGCAGCAGTGTGCATTTGTTTTTGATTCACAGGTCAG
CAGGTTTAAAAACATGTGCAGGGTGTGGTGTGTGGCTTCCCATTGGTTATGCATCCATCTCACCCATGAGGTATAATTAATCTCATAGTTCTCA
CCACCATCGGCGTTGTTTTTCTAATTTAATGAAATAATTATCATGTTGTCCCCAGCTTACTCTGTGTGTGGCATGTTGTGGGTGCTCAAGGAGT
ATATCTCAACGGACAGAATTGAAAAAGGAGTTAGCTACTGTAGCCATGTTGAAATTCAACCCTTACAGTCACATTAATCTCTGTTAGGCTAAGA
GCAGTGGCTGACATTGGTGGTGGAATAACTGGGATGGGACACAGAGAATCCTTGAGGAGTGGTGGTCATATTCTGTGATTTGGTAAGGTGTGGA
TTTCACACATATATTCATTTATCAAAACTCAATGGCTTTTTCCACTCAAGATTCATAAAATGTGCTATATGTGTTGTTGTCTCAAGAAAAAAAA
TCCATCAATCAGTCTTAATTTCTAGTACATATTATGCCTCCTGAAATATTTATGGAAGAGTGTGCTCATTTCTGCAATCAGCTTTGCTCTGCAC
TCAAAAAATAATGGATGAGGACATGGGATCCTAGAGATGTGTAAAGAAATGTGTGTTAACTGCAGATTCTAAACAGAGAGTATGTATGGATTGG
ATGTTCCTTATCCAAAATTCTACAGACCAGAGTATTTCAGACTTTATTTTTAATTTTGGAGTATTTGCATATGCTTAGTGAGCTGTTAGATATG
AGATTCCACTGTAACAATTCATTTGTTTCCTGCATGGTTCAGGATATTTGATCATACTGTGAACCCCAAGATTGTGTTGTTTAATGAAAAAAAT
CTGTTTCTAGTTGTGGTATGTCTCAGCACTTAGCACACACCTTTAATTCAAAACAATAAGGTACAGTTAGTTTGTAGAAGGAACTGCCCATGTT
TGAAAGTGATGTCTAATTGAGCGGCAGACAAAGTGACTAATCAGAGAAAGATTTGACAGAATAAGTCAGAGGTAGTATATACCCAAGTCTCAAG
AGAAAAGAGAGGAAGGCCAACCTACTTTAAGTGGCAGCATGCAAAGACTAGGACAGGGGCCAGTTTACCAGCAGAGTTTTACAGACATCGTTGC
AGGGAGAGAACAAGCTAGGCACAGGTGAAGACAGAAGGAGTCAGAAGATGAGAACATATTCCCATAGTTTGAGGCCAGTCAGAACAATTCGGTG
AGAAGTGAAAGAAGCCAGTTTGAATCAGTCAACTTGGAGACGAGTTTTGAGCCAGAACAGCTGAGTTGAACCAGCCAGCCAAAGTTCAGAAAGA
ACTAGGAAGTGTGAGCTTATTCAGCAGTGACTCTCATAGGCTGAAATTATTCTAAGCCTAGATAAGATTTTATGGATGCTAGAACCTTCCAGGA
CTAGGCCTACGTTAGCAGACAGAGCCAGTAAGCCTCGGAGACATTTACTACAAGGAAATAAATGTTACTTTCGCACATGCGTAGTTTACATATA
TAGACAAAAGTCACTTCATCATAATTATTATTTTATACATGAAACGAACTGTCATGGTATCCAGTTTTCTTTTTGTGGTGACATATCAGCACTA
AATATGTTTTAGAGTTTGAGGATTTCATTTTTTCAGATTACGGAACAACTTGTAGTTGTTAGCTTTAATATTATGTGAGTGTTTTTATAAACTT
GAAACCTTTTTTTTAAGGGGAGCAGGGGGAGAGGAGACGGAATAGGGGATTTTTCAGACGGAAAACTAGGAAAGCCAATAACATTTGAAATGTA
AATAAAGAAAATTACTAATAAAAAATATTTGTTTATTTATTTATTTATTTATTATATGTAAATACATTGTAGCTGTCCTCAGACACCCCAGAAG
AGGACATCAGATCTCCTTACAGATGGTTGTGAGCCACCATGTGGTCGCTGGGAATTGAACTCAGCACCTTTGCAAGAGCAGTCAGTGCTCTTAA
CCACTGAGCCATCTCTCCAGCCCCGTACACTTGAAATCTTAAATAATTTTTCTAAAAATCAAAGGGCAAAACCACTCATGACCTTGCAAATATG
ACACCAAAGTCCACTTGACATTTTTTACCCACATTCTTCACGTTTTCACATCTGCTCCTTGAAACAGAAACATCATCATTTGCTACAGACACCC
TGGTGAACCCAGCAGTAGATCTTTATGATCTATAGAGGGCCCCTTTTACTGGGGGTGAGGATTTGAAAGACAATTTTAAAAGGACAGACGAACT
TTATACTTAGCGTGGCGACATACAGGATAGTCTTCTGCATCACCACTAAAAACAGTTCTCCGTCTTATAATCATGTGCATGCCAGAGAGTAACC
ATTTTTATTGTCACCTAAGCAAGACCTGAAGAACTACCATTCTGTGATATTGTCAGAAAATGGCTACCTCTACCTACACCCGGTTGTGTACATA
ACTCCCTTATAGAAATGACGTGGAAGTTACCAAGCTCAAGTGCAGGGCAGAACTGTCTCCACGTGCTTATTCGTACCTTTCCTCTTGGTGTATT
TTTCCCTCGTGCAATATAGTAGAAAGCTAAACCCAGACACATGTGCACCCCTCTTGTAGTTACCAAATCCCTCTGTGATCTTGTGGGCATTGCT
TACTACCTTTGGGTATAACTTTCCACAATCTTTAAGCAAGTTGATTGAGTCAGATCATCTGCAGTCCCTTCTACCATTGGGCTGCACCTGCTGT
AGTGAAATCTTGAACCCATACCCTTGGCATAAGATGAGGAGCCCCTGGTCCCATCCAGATGAGATACAGATCTACAAGAGACTCATTTACATAC
TGCTTAAATACTCACTTTTAGTCAAAGTCAGTCTTCCTTCTGCTTTTCCTTACTATCTGAACAGCCAGAAAGCAAGATGTATTCTAAACCTCTA
CTAAGAGTATCAAGAAAAAAGAACAAAGAAGAAAGGGAGTTGAAGAAGTGAAACTGTACATTTGGTTCTCTTACACAAATCCATGTGACAATTC
TCTTACGCTGCTGTGAATTTACACGGCATTACGCTGCTCTGTCAATTTACAGCCAGAGTCTTTGCCTTCTCAGTGTGGAATGGAACTCAAAGGC
ATGAGTGGTTTGGTCTATCACAGTGTTCAAACCACTCAGAGCCATTAGCTGGGTAAACTTTCACCTCTTCGTGTACCATTTGCTCAACTGTGCT
CCAAAAATCAGAGTTTCAACTTCTACTGAATATGTCCTTGGCTTACTGTAATTACCCAAGGCTGGTTACATGACACACATATATTTGGATTCAT
AGTCACACAGTGTACATTATAGTCCAGATGTGGTTGTATCCACCAGTCTTTATTGTAGTGTACATGCATGTTTGCATATTCGGGTATGGACTCC
TATGTATTGTGTCCATTTGATTAGCTGTAAACTGGATGTCAGTAGTCGACCTCCTTAACTAAAGAGAGAAGCTAATTACCAAGGACTTGACTTT
ACTAATGTACTCACGCTGAAGATGTGTTAGGTGTTAGGTGAGATCATGGACAAGCCATCTGATTTGGTCCATTATTATATTTTCAATTATCTTT
CATATTCAAACAGAGACATTAATATAGCTGAGGATCACATAGCAAATTACCACAGCTCTCTAACCCTTTAAATTGCTAATACTGTTGTAATCTG
TAATTATAGAAATCAGTGTCAGAATTGTGGCAGTGCATAATTATCTTCCTGATACTTTATTGCTGAATGAATTATTAATCAGAATCAGTCTTGT
ATAGTATTTGCAGCAACGCACAAGAATAATGTATAATTAAATTTCATTATTCTGATTTTTGTGTTAATGTTTTATCATGTTGTAATTGATAATT
AATTGGCCAAAACTCATACAGTACTTGGAAGTTTCAGGTGGCTGGGAAATGTTCAGTGTGCTGAGTTCATTAACTAAGCAGTAATCATTCTGCA
AAGACCAAGGGATCTTGTCCAAGCTATGTGAGAGAGTGCTTAAAAGTGGTGTCTTAAGCTTGAGCTTTTCACATTTCCTTTAAAAAAAAAAAAA
GCAATAACTGTGAGCATGTACAAATGATGAAGACATCTTGATAGCTTTCAGATTGGGTCAATTTTAAGTAATCAAACATAGGTTGAGAATGTCA
GACTAATACAGTCGGTAATTTGGTATGCCTCTCTATATCTCAATTTCCATCCTATTCTAATTAAACCATCCTTCTCCACATTACTATAGTGTGA
GGAAAAGTGCCACGGCCATAGACCTAAGAGCTCTTTCCTCCTGGTCTTGGTGAGTATAACACATCACATAGCACATCCTTGTAAGGAAAGTCTG
GTTTCATCTTTCCCTATTGTTCAAAACACTATATGCCCCCCTCCTCACAGACACATAGATTTAGACTCTGAAAGGATTATGAACTTCTCCTTGA
CTGGCATTCTAAGCAGCAATTCCTGGAGTGAGTTTCTTTTAGAATCCTTTGCAGCCTAGGTAACCAGGAAAAGCGCAGAATCTAAGAATGCCTT
TCACCCAGCCTGATTCCTATTGAAAAGATGCATTGTTGCGCATTTTGTGGACTGTGCTCTTTGATTCGATTTTTAAGAGGCCAAGGAATCTTTT
TCGTTTTCAAAGTATCTGCTTTAGAAACATACAATTTTTCTCTTAAGCAGGTGAGCCTGTTTTTACATTCTGAGGAATTCTGAAACATTGTATT
AGACAATGTTCACAGTCCATGCTTATTTACGTATTTATTTATTTATTGTCTTTTTCTGAGCAGATTAGAAAACCATGGCGGGGAGCAACAAAGG
GGTTAGGGGACTGTTTCTGAGATTCCTGAACAAATTTGCCTCGACATTCCCAACAACCTCTCAACTGGCTTATTTTTGTGAGTTGCACTTGCTT
CTGATGCCTTCCACTCCCATTTACTCAAGAGGAATCTGTCATCGGACCACAGGAAAAACGCACTTGCTAGATGCTCTTCATTGATCTTATTCAT
CTTGCAATAAACATCAGCAGCAATCCTCAAATCATCTCCTCTCCACTCCACGTACTCCACAGCCATCTTGATCCCAGGGTACCCACAATTCCAA
GGCATCACCCCACTAAGCTTCCTCACACTAACCCCCTTCTGAACTCTCAGCTGACGACCTCTGCCGCTGTCACCTTCTAAAAGCCAGTCCTGTT
GAGTTTGAGGTGTAAGTCTGTGTTTATAAACAGGCGGGGTCAGAGTCATCTTTCATATGCAGAAATAAGGAAGGTATTGACAAAATAGAACAGC
TAAACCATATTCTACAAGGATCCACCTTGTGTGCAAACAGCGGATAGAAAACGCTCTTTGGTTCATGAGTAGTTGAGTCCTTCCCTTTATGTGA
CTTTGTATGACTTTAAAATAGGAAGAAATCTGGAGTATGCAAGCCAGACACTGGAGACACTGGGGACAACTCACTGAGCAGGCAGTATATGAAC
AAAGACCTGAAGTTGATTAGAGACTAAGCAATCACTTTCATCCCGAGGCAGCCTCTCAGGAGACAACACGTTCTCTTCATCTCACATATGAGGA
GACTCGGAGAATGTACACAACCTGCTCAGACCACCCAGCCCTAGGAATTCCCAGTAGGTTTGGAGGGGAGGCGAGGAGGGCAGCCACTTCAGAT
CAACTGTTAATGGGGGTAAAATGCAGATTTCTAACCACAGTAGTTACACTAAATGCACATATGCAACTTGAGAACTATTATCATTCAAAGAGAT
AGGAAATTAACTACACAGTCTGAGGTGGGCAGGAGGCACTGCCTCAATTAAGAACTACAGGTTACAAAAATATAAGCCACTGTCAATCTGGGAA
TGAAGCGTCGATTTTAAAAGTTGGGATGATACAAAAACTAACTTTATTCATTACTTACTAGGTATTGAATGAGTCAACTCATGAACTAATGACC
AAATGTGCAATGCCTTAATCCTCACAACCCTAGCTCTTTATTACACCAGTTTTAAAGAGTTGGGCGGAAGGAGGCAGAGAAGGCTAAAAGACAT
GTCTGAGGTTCAGCAATAAGTGAGAAACAGGACTCAAATCCAAGCAGTCTGCCTCCACCCTGCGCCCATCACCATTGCGTTCCTCTACCCCATG
TGCAAGCTGTACTTAGTGAGCCCTGCATTCCTGCTCAGGTCCATGTCCAGGCGCCGTGCATGCTTGTGTGTTAAGTCCTTCCCTCTGAATGGCA
TCTCAATGCAGATGAGACACCCTTACCCAGAGTTTCCATGGTTTTCTGAGATCACAGCCTGATCAGCATTCAGATTCAGGCAGGCACGCCCCAG
AGAAAGCACACACATCTCTACTCATGAAAGAAGAGTCAGATGTATATAAATCCAGTGGAGGGAAAGCAGTGCAAGTCTGTCCCAGAGAGGAATA
TGCAAGGCACGTCCGTGTAACAAATAGGAAGCGGTGAATGTCTTAGGAAACCTTATTAGATAACCATCTCCGAGAGTTCCCCAACTACCAGGCA
CTCCCTTTAACATCAGAGAGAAGTAGATCAGCAGTTACATGTCCATAAGAGAAGACTTTCTTGGTCTAATTGTGTAGATTTAGCCAATCCGTGA
TGAGTGTGGTTCCTGAGTGCTTCATTCAGAGTGCTCACTCTTAGATCCATTGCCTTCTGTGACCTTCATGGTCCCAGGGGGACGCTGTGGAAGG
CAGGCTATAGTGATGTCATGGCCACAGCTGCCAAGAAGCATGGGAGCCCACACTTTGTGCCATCCTTGCAGCCTTAAGCAAATTGGCTTTTACC
CACGTTAAAGCGAAAAATCCAAGCAAATGAAACAAATGCCTTTTGTTCTTCATATGATCTCCATCGACCTCCATATGACAAGTCCTCCGTGTCT
ACAGAATTACAAACGTATGCACTGTGCAAATAATTGTTTCTCATGATGATAGTTTGGGACGGAAGATGTAGCTCAGTGATGGGGCAGTTCCCTA
GCATCGGATCCCAGTACCACAAAGAAAAAATTAGTGTTTATTTGAGCACTTACTACAAAAGTAAGTAGCATCCTAAATACTCTATTCTTAGAGA
CAACAAGTGTTACAGAAGCCAATTAATGTGCCAGCATCTGTCATCTAAGAATTAGACAAGCAGGAATCAAATGGTAACCGTCTGTGTACGGAAG
GAAGGAGAACCGGCAAGTGGGTGCTCTGTGGACTCAGGAAACTAAGCCGCCTCTTACTGCCAGCCCACCCAAACAGTTTTGAGTTACTCATTCC
TGACCGTTCAGGAAAAAGAGTATTTTCTACCCCTGGAACACAGCAAATTTTGACTTTTTGTAAAGGGTAAGAGAATAGGGCTAGGAAGATGGCT
CACTGGCTAAGAGCAGTCACTGCTCTCGCAGACGATCTTGGGTTTGATTCCCAGGACCCACCTCAGGTGCTCATAACTGGTTGTAACTGCAGTT
CCAGGGCCATCAAACCTTACCCCCGTGAGCAAGGTGCACATAAATTCATGTAAGCAAACACACGTAAACATAAATATTTCTAAAGGCTCCTTTC
TTTCATACAGTTTCCCTTACCCAGAAGACACTCTGTAAGGCAGAAACGTGTGAGTTCTGCGGCACCGCACCTTTATTCCAATAGCATGCTCTGG
GTGGTGAAGCATCTGTGTCACATTTGGTAATCCCTACTCGAAGATGCTGCCAGGGAACCCTCCACGCCCACGGTTTCCCCACCCCCGCTTTGCT
GACCTCTGCTTTTCCCGTGCTCTTTCCAGAGACTTTCGCCTCTGCTAATCTCCTCCCTCCTCGGTTGGCCTCCAGTACGGCGGCAGATGGTCCA
AGTCCTTGTATTACTGAATGTGAGATTAACAAACTGCTGGCCCATCCTCACCTTGCGAGTTTAATCACTTTTAAGTAGAACAGAGAAAGGAAGT
AAGGGAGGCAGACATCTGTAGAAATCCACAAGCCTTTCTCAGAATACCTGAGCTTTGATTCGCTGCTGCCTGGTTTGGTATGCTGTGCTTTTAT
TTCCTTAGTTACCAGGGGAGTCAGGTGCAGTCTGAGCCTCTTCCATCCTGCTTGCATTCCTGCAGAGAAGATGTTTCAGAACAACACGGATCCA
CAGGACCCAATGGGTTGGGGGTGGGGGGTGGGGGTGGGGACAAGTTCTCATTTCTTCAGAACCTCCTCGTGGGCCAAAGGGGTGGTTCAGCAGG
AAATGAACTTGCCTTGCAAACCTGAGGACCCATTAAACTCGTGATCCCACAAACGAAAGAGGGAACTGATTCTCGAAGGTTGTCCATTGGCTTC
CACATGCTCACACGCATGCTCACATGAAGGTTGTCCATTCACTCCCACATCCTTACACGCATGCTCACACGCCATACACACTAATACTATTTAT
CAGTTACATCAGAACAAACATGTGAAGAACCTGTATTTCTGCAGCCTTTGCAACTGTGACTCTGCTTTCTTTCCCCCTGTAAGCTATGTGCCCT
CTTGGGAGCCTGGGAGAGCATCAGCAGCAATCATAAGAGTGAAGAGTCACCTAGCCGCAGATGCTCTTTGTGTAAGGCAGACCTTTCCCCTGAC
TGTGTCTCTCCAGGTGGACCTGCACACAAAGCAGGGCTTAGCTTCAGTGATGCAGTCTCCCGCATCCTAATCATAGCCAGTCGGATCTCCCTTT
GGGAAGTTTCACGTAGTAGCACATGTAGGCGATACTAACCTGTGCTAGCCACAGTGACATTGCTAATACTGCCTCTGAAATCCGCATGCAAACT
TCAGTCTAGTATTGTCACTTGCCTGATGCCTAAACTTTTGTTAATTACCATAGCAAATCACTTGAAACAGACTCAATAAAAACAAAATTATTTT
TAATTATAGCATATGAGTGTTCTGCTCTCGACGCTGTCCTGGTCCCTCCCCTTTATTTTCTCTCCTCTTCTCCAATATCTGGCTCCCCGACACA
TCTAAAGCCCTCTTAGAACTGAGTTTAGTTTCTCTCTTCTATCTTAGGGCTGACAATCATGATGAACCTAAAATTACCCAGAATTAGAATTACA
GTGCCCCTTTTCCACATTTGACTCTCTGTTGTCTTTTCTTAATCTTTGATTCTGTTGTGAGTTTTTTTTGACTCGGTTCTTTTTTTGAGAGAGA
ATAATTTCTGCCACATTCTGCCAACTCCCCTCCCACCCGATGGGGTCGGTCTGCGGAGGAGAAGTGAGCCCCAGTTGAGCCCACCGCTCAGTAC
AGGTCTGCAGCGCCTTCTATTAAAATGTAAAGTGATCCGTTGAGTCAGCCTCCCTCTGGTTTGACTCAGACGCTTTATGGTGCACTTTGCATGT
CATTTCTCTGTAATCATTTCCCCATGGAGAAGGGTGTCTGATAGAATCCAGGCAAGACTCAACATTGCTCTGAGTCAAATGGATCTTTTATTCT
TTTAGTATTAACCCTTATCTCTCAGTTTCCCATCCTCGAATTTTCCCTCAAGGAACCTTAATGAAGTAAACAGGCCTCAGCACCCTCATTTAGC
TTCCTAACCACTGTTCTCAGATTCTTCTCACGTTAACAGTGGGAAGCTCCGGGGGAATAGTCTGTGGTAGAAGGGGACATTGAGAGAGAATATT
CACACAGATGCCCTCATAAACAAAAATGTAGAAAAGAGATGACATTTCTCTGTCCTCTAAGACGCAGCTCCTAATGGGAAGCAGAAAATCAGCT
ATGAGAAATGAATATAAATGGAGATGGAAGAAGTGACACCAGAGACAAACCGAATGTGACAATTTGGAAAAGAAAGGTGACCAATAGCAGAAAA
TGGCCTGACCCAGAAGAATAGACACTGTCACCTGTGCCCTCAGATTGGTGGGGTGGGGGGGAGCGACGCAGCTTTGCCACAAAAGAACAACAGA
GGAGCAGGGACGGAAAGAGAGATGGAGAGAGAGAGAGAGAGAGAGAGAGAGAGAGAAGGCACGCCATCAGAACAGAAGAACAAGGTAGACAGCC
GCTTCCCCTGTTGTGTCCCTTCCCAGTTCCACAGTCCTCTCCCTCCATTGTCCTCTGTTGCCCCAGCCATCACTGACTGCGACCACTCATGTTG
GACTGCCTGGCATAAAGACTCTTTCACATGACAATTTCTTTCTCTCTCTTTCTTCCTTTCTTTGTTTCTTTCTTTCTTTTTTTGTTTTTGTTTT
TGTTTTTTCGAGACAAGGTTTCTCTGTGTAGCCCTGGCTGTCCTGGAACTCACTCTGTAGACCAGGCTGGCCTTGAACTCAGAAATCCGCCTGC
CTCTGCCTCCCGAGTGCTGGGATTAAAAGCGTGCGCCACCATTCCCGGCCACAGGCCAATTTCAATGCTGCATTCATTTGAGAGTCGTAGTTTA
CGCCCCATCTTACTGTTCAGTTCAAGCTGTGGCCTTCTCCCTGCCTCCTAAGCAGCATCACTTCACCTGGGGTAACTACAGAAGGAAGAGACAA
GCAGCACCTCTTACGTGAAGCACTGAGTCCAGCCTGCCTCCCAGAGCCGATTGAGGTGGGAAGACGTGTTCCTCCGTCCTACTGAGCTTTGTGC
TTTGCTAGATGTGAAATTGGCTTCTGAGTCACCTTTTCTTTCGACTGACTTGTTTATAGACGGGGAGGGTCACAGCCTTACTGAGAATCTTTCT
CTCTTCAGCTCGCTCCAGATACATAGTAGCATTTTCCATCCAACCAGTTACATTGTTGTTGATACATCAACCTTTCTTTTAACAACTGTGGTTA
GAAATGCTTGCTTCGACCCGGGGCGTGGTGCTTTTAATCCCAGCACTCAGCAGCCAGAGGCAGGTGGATTTCTGAGTTTGAGGCCAGCCTGGTT
TACAAAGTGACTTCCACAACAGCCAGGCCTATACAGAGAAACCCTGTCTAGAAAAAAACCAAAAAAAAACGAGAAAAAAAAAAATAAAAAAGCT
TGTTAAAAGACTTTTCCAAAAGTAATACTTTCATAGAAACACAGATATTCTAACTAGGAATACTTTGAGTTCACCTGTTTCTTCTTGCTACAAA
TAAGAAAATGGAGATGCAGAAACTGATTCGCTTTTGTGAGAGAGGAAAGCATGGGATCTCTGAAAATAACTTACAGTGGGACAGATGCTGCGCT
CCTGGTGATCCTAGCGCTTCAATATGTCAATCAGTTGGGAATACAGATAACTTTACTCAGTAATACTGTCTATCATAGGTGTTTATCATTTGTT
CATTTTTAGTACAATAATAGAATTGTGGTATCATGTTTTATGTCTATTATAATTATATATATATTATATTGCAATTTTTACATTGCTTCTGTGG
ACTGACATTCAGTGTTAGGTTTGTGACGTCAATCTGCATGCTACATATGGCTCTAATTCCCTCTTATTCCATGTATAAATAAATAAATACTGTA
TACCTCAGTGCTACTTACAGGCATTGCATTGTTTCTACTAGAGGCTTATTATAAATAATGCTGCCGTGAATATCCTTATTCAGTGTTCCACTTT
GGAACCTGGGAGAATCTCTACTGTAACCTAAGAATGGAATTGCACGGGATAACCCATGCATGCCTTCAACCTCGCTAGATAATGCAAGTTGTTT
CTAGAGATACTAAGACAAGTCTCATCAACAAGCAAGAACTCCTGTTGCTTCAGCAACAATATTAAATTTAATATTGTCAGATTTTCTACTTCTT
TCCAAGCTGGTGGTTATGGACTGTCTTTAATACTTTATTATCTTTAGCCAGATTCATTACAGTTTGCCCTAGCATCATATTATATTTTCCAGAT
CAGTGTCTTTGTCAGCTTCTGCTTCTTCACTCAGATTATTTTAAATATGAAAAGTTAGAATGAGTCGCCATTTTCTCATTGGATACTTTGGAGT
TTAGATCTTTTTTTTTTTTTTAATTTTCATCTGTGCAAATGAATAAATGAAACAACCACCACAGATGCAGAGCTTCTCGTGACTGCTCTGTGTT
CAAATCTGGGTGTACTTCTCAACTGTGAAAGTAAAAAAAACCATTGTCGCAAAGGTCCTAGTCAATCCAAGTTCCTCCTGAAAGGTCAAGGAAA
ATGGACTTTTATACTGAACTAGGGAACCTTTGAGAACTCTGAACCACTTGATGATACAATTGCAATAGCTCCAGTCTTACCACTGCCCTTAAAT
TTCAGTTCCCTTGGCGCTAAGCAGGAGGCAGACAGATGCGGGCTTTGAGGAAGTAAATCAGAGAAACCTTTTAGCTGATCCACGCCAGGCCCTC
CCTCTAGCTCTCTAAGGCACTAGGGACATTAAGCACTCAATGTTTGCATTAGGAAAGACTGAAGCTTTCTACTTTCAGTGAGAAGTTTGATGTG
CTTAGAAACAGTTTCCACACCACACTAACACCGACTCTGACTCCGTTTGAATACCTCTCTGCACTCACGAGTCTCTATAGACATGCTAACTTCC
TCCTCTAAAAACTAACTCTTACGAATTTATAGTAAATAACTTTTTAAATGCTTGATAAGAGCAGAAATTCACTCGGCAATTACTAAATAATTTA
GCATCTGATTCACAGAAGTGTTTACTTAATGCACTGTTTCTGGGAGCGGTCTGCGGCGCACCGAGTGAAGTGGTTTATAATTTACTCCTTTTCT
TCACCCGCAAGGCATATTAATTTTTTTTCATCCCAACCATTCTAGACATGACAGGTTGTCTGTAAAATTTAACATTCTACTTTTTTTGTGAATT
GCCGCTTTTCTGATTCCCCACTGTGGATTTTTTAACTTTCTGAATTATACTTTTAACAGAGGAACTGTTAGACACTTCACTATCTGAATATGAT
TCAGTAATGAATGAAGAGCGGGTAAGCTCACAACTGAGTCTGCATTCATTAATACGGCATGCTTGACTGACAAGAGTGTGGCCTCCGTAGCTGC
TTTTGAGGGGATGAGCATGCTATCATAATATAGTAGTAATTAGCTTCTCCTGCCGAACCATATGAGCAAATGATTGGGGTGTGTGTGTTGTGCA
CATGTGCAGCTGGGGTTTTTGGCATGCAAGAAGAATGAGATCAGCCAAAACCCAAACCAGAGCCTTTGGAAAGCTCCCTCACAATCTGACTTCA
GCTAATGTCTACATACTTTAACACATTGTCTACTGCTTAGGGTAAAGCCTGGCTGTCAGACTCCTGCGTGCTATTCTGGGATCCCTGCTCCGCG
CGCGCACTGTGAAGTGTTTCATTCTTAGATCCTGTGATCCCTGCTGCTTTGTTGCATTACGTGCCAAGCGTTGCTTAATTAACATTAGGAACGA
ACGAAGGAGAAATAGAAAGCAGGGTGCTCGCTCCTGCAAGGGAGGAAGAGCCGAAGGCAGATGAGAGTTCACAGAACACACGTGATGAGGCCGG
ATGAAACGGCTGCACGAATAGCGTGCCATTGTGCTTGAAGAGACCCGGGGAGGGGTGGATACAGTCAGACATGTAAAGAACAAGAGAAAGCCAA
TTGGACAACTACAGCAGAAAGAACTATCCAAGAATCAGGTAACAGCATCCAGAAAAGTCACTAAATAAAGGTCTAGCAATCGTTTCCTGATAAT
GGATTTCAGGGTTTGCCTTGTGTGCGGGTTAGCTTTTATGTCAGCCTGACACAGGCTACACTCCTTTTGGAAGAAAATACCTCAATTGAGAAAA
TGTCCCCATCAGACTGCCCTGTGAGCGAGCCTGTGAGGCATTTTCTTCATTGATGAGATGTGGATAGCCCCATCCTTCATGGGTAGAGAGACCC
CTGAATGGGTGATCCCAGGTGCTATAATAAAGCAGGCTGAGCAAGCCATAAGGACCAAGCCAGTAAGTACCACCCCTCCATGGCCTCTGCATCA
GCTCCTGCTTCTAGGTTCCTGTCCTGACCTTTTCTCAGTGATAAACTGATGTGGAAATACAATTGAGATAACCCCTTTCTTCCTTCAGCTGCTT
TCTTCTCGGTGTTTTATCGCAGCAATGACTAAGACACCTACCATGTGGAAGACCCTGGGTTCATTCCCCAGCACCACCCAAAATAGATTTCAGT
TTCTACTGTTTGCTGAACAGAATTAATATTCTTTAAATGTCTTCAAATCTTAATTGATGGCTTAGCCAGAAGAGCAGATATCCTTGCGAATCTG
ACTTTTATAACATTCTTCGCCAACTGAGACTCCATATATGGCCCTATCCTCTCTTTTCAAAAGCCAGTTCTCTTAGGAAAAGGCTGGGTCCTCG
AGACTCTCCCTTATTCCCCACCTGTCTCGGAGCTCTGCAGCCTTGCCTGAATCCTGGAATATGGTAATCCAGTCTCTGCCTTGTTTTGCCAACT
ATTAACTTCCTCGTGGGACATGATTCTTGTCCTCCTCTCCAAAGTGGTTAGGACCTCAGTCAGGTCTCAGTGGAATCTCAGCTGAATTTCCCTG
GTGACATATCTGCAGTTCATATTTGCTTGCTCAGGCGATGTTCCCAGAACGGACCCTCCAGGTTAAGGTGAAGCCACCAACAGCGTGACTTCTC
CATGTTGCTCCCAGAAGCCCTTCACACTTGGGTCCCCATGTCCTACAAGGAACTTAGTTCAAGAAAGTTACTGCCCTATCAAGGAATATCGCGG
TGCATCCTGACAGGAGTTCCTAATTTGGGCTCTGCAGAGCAGGAGACTGGAATCCTGCTTTCTCCCCCAACCCTAGAGAAACCTTTGTACATTG
TCTACTTCATTTCTTAGAACCACCTCTTCAGAGACAACTTTTTATTTGATGCAACTTCTGCGACAATTAAACTGCACTCATAAATTGTCTTCAA
AGGGCCTAATTAACATAATTTCTGTCAACTAGAAGGTAACAACCCACCCTCTAAATCACTTGGCTCAATTTCCCTCACAGCCTCCTGAGGGTTT
TAGAGCTGTGAGATCCCAGCTGGACTTGTGGTCCTTGCTTCACATTTTGTCATCCTCGATTCAGATACAAAGTGAAGCAGCAGTTTGTCCACAT
CCACAGAGCGGGTCAGTGCCACAGCCGAAGCAGAGGCCACTGCTCTCTCCGCCGCACCTCAGTTTCATTGCTCTCTGGGCTATCAACCCTTCCA
TATTTCACTTCATTTATGGCCTTCTGTTCTTCAAACCAAAACTCTGTCTCAGTACAGTTACAATGATAATAGATTGCCCATAACAATATTTGAA
AAATGGCACACTTTATTAATCCCTTCTTCTGATGACGTTAGTGTGTCAGCCATCTATTTTTTTAGAACATTAGTTGCTCAACCAGGTTTTCAGT
GTTGCCTCGTACATATGAACTGTTACATTTTTTTAACTCAATACATTGTGTAGACTAATAGAAAAATCAAATGTGATAGGACCAGAGGTAATAA
TTTGAGAGTGGAGAAGTCAGGATTGAGACTGTATGGTAGACACAAAAATTCTGGAAACATTCCAAGGAAGTGGAGGCTAATTAGAAGACAATAG
AGAGGCTCAGCAGCTAACAACACTTGCTGCTCTTAAGACAGCACCTGAGTTTGATTCCCAGCACCCATGACAGTGGTGCATAACTGCATCTTAC
TCTAACTCCAGGAGTTCCAATGCCCCTTTCCTGTTCTCTGTGGGTACCTGCATTTGTGTGCAAATGTCTTAGTTAGGGTTTCAATTCATCCAAC
AAAACCACCAAGACCAAAAAGCAAGTTGGGGAGGAAAAGGATCATTTAGTTTACACTTTCACCCTGTAGTCCATCTTCAAAGGAAGTTAGGATA
TGAACTCAAACAGGACAGGTACCTGGAGACAGGACCATGGACGGCTGCTGCTTACTGGCTGGCTGGCTGTGGCTTGCTCGGCCTGCTTTCTTAC
AGAACCCAGAGTCACCAGCACAGGGATGGCACCACCACAATAGGCTGGACCCTCCCCCATCAATTACTAAAGGAAATGCCCTACATCTGGATCT
TATGGAGCCATTTTCTCAATTGACCTTCCCTCCTTTCAGATAACTCTAGCTTGTATCAAGTTGACATAAAAGTAGCCAGGATACCATATGCAGG
AATACACACATATACATAATTTAAAATAAAATAAATCTTTTTCAAAGAAAGGCAGTTTAAAAAAAAAAAAGAACTTGCGTTCTTTAACTCAGTA
ATAAAGAATTTACTAGCAATTTTCTAGAGCTAGACACCAAGAGACCTTGACTTTATTCCATGTCTTAGGACTGTTTTGTATGAATTCTGTCAGT
TATAATGTTATTCTTCGGATTTCACAGATTGTACATAAACAACTTTACAAATACTTCGTTTTTATTTGAATGCCAAAGAACTAATGTGTTTTCC
TCACAAAAACTTTTTGTAATTAGATTCTGAAAAAAACACCACTTATAGCAGAGCATAGTTTACACTGTACTGTTAGCAGTGTGGTACGTTTTGC
TTGTAAAGTACTAGAGAAATCATAACTAATAAATTGAGTGCCGCTGAGATCACTGGAGTGGGCAGGTCAGGGTGCTTCCCTTGCCCACCCTGGA
GAGGACTGGCACCTGTTAGTTGTCCTCTGACCTCCACTCTAAGCAATGGCACATTCTCTCGCACACATGCACACACACAATAAACAAATGTTTA
AAACCTCTCTTAAAAAATAAATTCAGATATTTTGCTTCTAGCCAAACTTGAGCAATGAGTATTTTTTTTTGCATGTAAAATATGTTTTATTGTT
CTTCAAAAGGGTTCAGGGTTTGGTTGTAAATCAGGCTGCACACCTTCCGTCAGTCTAACCTCTCTCACAAGTCAAACTGGCTTCAGTTAGCAAT
ACTTCATTAAATCCAAAAGAAAAAGAGTTTTAATTTTGAGGGGAGGAAAAAAAAAGTCCAGTTCTCAGAACAATTAACATTATTAGGGTTGCTT
TATTCTCCTTCACACACCCTTCTCCCCAGAACCAAGAATGACACTATCTCAGGCAGGCTGATCCTGGTGCACACCTGCATGTGCAGACCCCATG
GCAGCTATTGTGCTCATGAACAAATACACACACACACACCAAAATTCTAGCATGTCAAGTGGAAAAGGTTTAAGTGGTATTGATCAAAACCCTT
GAGGAGTCAACAGTTAACCTAACTTTTAGGTAAGAAGTTTGATCTTGAGTCTTTGTGAAAGAAGCATCTATTGCCATGCTCTGAAGTAAAAATT
TCTGGATTATATCATCATCATCATTTTTCAACTTTAACATTCTAGGAACAGTGTCAAAACCATTATTTTTCATTTTCTGGGATGAGGCAGGAAG
GTATTTGCATTThGTTAAAAATCAAAACAATAGCATCAACAGTAAGCAGGCAACTCAGAAAGCCACCAACATCTGGGTATTATTAATGAGATGT
CATCCATCCTACTGGCTTGACAACACCCAGCAGTGAGTATTTTATTTACACTTCCACCTGAATAACTACTAAGATAAAGTATGAAGTAAGGCTT
TTGAATACCTTCGAGGCCTGAGCACATAGCTCAGTTGGCAAGTAAATGGCATGTGGGTGATAAGACCTGAGCTTGATCTGCGGAACCTGTGTTA
AACGCTCTGTGATGGCTGCAGATGCGGTTCAGCTGCCAAACAGCTCTGCTGACCAGCACGThCAGAACATTAGGCTTGGTTCCTGCGCTACGTA
AAATTAGCTGTGGCATCGACTGCCTGTAATCCAAGCACTTGGCAGGCCAGGGCAGAAGGAGCAAAAGCCTGTTATATATACATAAGAGAATTAA
CCAAAAAAGGCAACCAAGGTGGTCCATGCTTGTCTTCTCAGTGCTGGGTATACAGAAACAAGCAAACCCTGGGGCCCACTGGCCAGACAAATCA
GTGCTCTCTAGGACAGTGGGCAGGGCGGGGAAGAGGAGACAGACAGACACACGCACATGTTTGACTCCTTATGAACAACACTTGAGGTTGTCTT
CTGGCCTCTATAAGCATGAACACACACATTAATGACATTTCACATTACATATTAGGTGGCAACGAATAGGAGTCCCCCAAAGACACTAAAGGCT
CTAGCCCCAGAACACTGCTTTGCGAGTTTCCACACCATGGAGCAAAAGAAAACAAGGCATTTTGACGCTGTCAAGTGGACAGAGCTCAGTATTT
GGATACATGGTTGTGGCCAGACAGAAAATAGGAGGGGGGGGGGGCAGAGAACAGAGAGCCCCAGAGGTTCCACAAAATCTCCCTTCAGTGTTCT
TCAGAGAACTGATGAGCACAAGTGTGCAAAGAGGCATCTCAAACATCTCAAACTCTTCTGTGCAGATAGAACTTAGTGCTTGGAAAGTCTGGGG
TCAGTGCCTGTTCCTCATCGCCCCAGATTTAACCAGACATGAAGTACAGTGCTCACAGATGTCATTGATACATAGTGACGAATAAGGCTCCCGA
GACTACATGTTCTTCTTCATACAATCTCGAATGCACAATCTGAAAGGGTCAAGCTGCTTCCCAGAACCTTATCCCTGTCTTGCAACAAAGCTTA
GAACTGTGTGTCATAACCCAAAATATCCATCATAAAAATTGAGTCCAAAATGTAACTGACAGTGTCTGGCATCTGGCCAAGTATGTCCAATAAT
TAAAAGAAAGGAGCGTTGTAGTGGGGGGATCTGAGCCAGAACCCATACACATACCGAATACCATGCAGTAGTGATTGTGATTTTCATGTCAACT
CGGAAGCTTAAAATTTTTAAGCAGAGACATAGAAGACACTGTAAAACACCCATGTTCGACTTCTTTATCAATCCCTGACGTCACAATGACATAA
AAACTGCATTGCCTTTGAAAAAGATGAATCGCAGAGTAGACATTGCTGAAATGGAGACCGTCCAGGCTGGAAAAAGCAGAGCCATGTTTGAATG
AGCACGGTGGTTTAGAACTCTAGACAArTTCTTATCAGCAAGTCTTGGGCTGTCCTAAGCAAAAGAGTACATGAGACAGCAAAAATATTTGGCA
GAAACAGTTGAGAAAATGATGGCTGGAGTGTCATCAGGTGTGAAAGCTCCCACAGACCCAGACACAGGAAGGAGAGGACATCAGTGCTCACCAT
AATCACACTGCTTGGAAGAGGGAGGGGTACACTTGGAAGTAAAGGAAGGCTTAAGCAAAGGGGAAAGGAGGAACAGAACTAAAGGTGCCAGGCC
ACGCCCTCTCNNNNNNNNNNNNNNNNNNNNNNNNNNNNNNNNNNNNNNNNNNNNNNNNNNNNNNNNNNNNNNNNNNNNNNNNNNNNNNNNNNNN
NNNNNANNNNNNNNNNNNNNNNNNNNNNNNNNNNNNNNNNNNNNNNNNNNNNNNNNNNNNNNNNNNNNNNNNNNNNNNNNNNNNNNNNNNNNNN
NNNNNNNNNNNNNNNNNNNNNNNNNNNNNNNNNNNNNNNNNNNNATGAGGCAACCGAATGTTTTAATTTACAGACAGCATAATCTTCACCGTAG
AAAACAAAAGGCTATAAGAACTTATAAGCAAGTTACGCACGCTTCCAGGACACGGAGTTGTTTCTTGGTGCTAGGTAACTCAGTGATACAACAC
GTGCCTAGAATTCCAGCAAGAGGCCCTGACTTAGATCTCCAGCACTCAAAAAGAAAGTATTTATATATTAACAATGAATAAACAACAGTTCATG
CTGTAAAATATTTGAACACTTAGGTATAAACCTCACAAAATAAAATATATTAATACTCATACAGCACTAAAATTTTATTTTACTGGAGTTTATC
AAGTGAAAACTTTGAAAATAACTATTAGGAGAAGAAGACAAGCAATGGACACTGGAGAAAATACTAACCCGTATTAAACATAAAGGGCTGTTGA
GAATATCCATCAGTAGATGTGAATGGCTTAAAACTCGAACTATATCCATATGGTAAATATAATTCAGCAATAATATAACAAACTTTTCTTTTTA
TTATTTTTTAAATTAGCAAACAAATGCTATTTATTTTTTAATATTTTTATTATTTAAGAAATTGATACAATGTATTTTTATCATACTCACTCCC
ACTCTTTTGTTTTATTGGTTAGTTTATTTCTTTACATTTCATATACTATCCCCCTTTCGTTTCCCCTCCATAAACACCCTATCCCTTCCCCTCT
CCCCCTGCCTCTATGAGGGTGCTCACCCACCCACCCACCCACCCATTCCTGTCTCCCTGCCCTGGCATTCTCCTCACTGGGGCATCAAGCCTTC
ATAGCGCCTCTTCTCTCAGTAATCCCTCACAAGCCCATGCTCTGCTACATGTGCAGCTGGAGGCATGGGTCCCTCCATGTATACTCTTTGGTTG
GTGGTTTAGTCCCTGGGAGCTCTGGGTGGCTCTGGTTGGTCGATATTATCGTTCTTCCTATGCCGTTGAAAACCCCTCCGCTTCTTCAGTCCTT
TCCCTAACTCCTCCACTGGGGACTCCATGCTCAGTCCAGTGGTTGGCTGCAAGCATCCCCATCTGTATTGGTCAGGCTCTGACAGAACCTCTCA
GGGGACATCTATACCAGGCTCCTGTCAGCAAGCACTTCTTGGCATCAGCAGTAGTGTCTTGGTTTCGTGTCTCCAGATCGGATGGATCACTACG
TAGGCCACACTCTGGATGGCCTTTCCTTCAGTCTCTGCTGCACTCTTTGTTCCTGAATTTCCTTTCGACAGGAGGAATTCTGGATTAATATTTT
TGAGGTGGATGGGTAACCCCATCCCTCAACCAGGGGTCATGCCTATCTACTGGATATGGTCTCTACAGGTTCTCTCTCCCCTTTGTTGAGTGTT
TTGGCTAATGTCCTCCCTGTTGGATCCTGCGAACCTCTTGGGTCTCTGGCATCTGGGACTTTCTAGTGGCTACCCATCCCCCCACTGCTAACCT
CCTTTCAAAATTCTCCCCATCTCTAAACTGCCCCCCTTTTCCTTCCCCCTGCTCTCTCTCTCCCAGGTCCCTCTCTCCCTCTACTTCCCAATAT
TATTTTCTTCCCTTCTGAGTAGGACTGTAGCATCCACACTTTGATGTGATCTTCTTTCTTCTTGGATTTCATATGATCTGTGAGTTGTAGTGTG
GGTAATCAGAGCTTCTTTTGGGTTAATATACACTTATCAGTGAGTGCATACCATGTGTGTTCTTTTGTGACTGCGTTAACCTCACTGTCCTGGC
TAGTTTTGTCTCAACTTGGCACACCTCGACTTATCACACAGAAAGGACCTTCAGTTGAGGAAATGCCTCCACAAGATCCAGCTGCAAGGCATTT
TCTCAATTAGTGATCAAGGGTGGAGGTCCCCTTGTGGGTGGTGCCATCTCTGGGCTCGTAGTCTTCGTTCTATAAGAGAGCAGGCTGAGCAAGC
CAGGGGAAGCAAGCAAGCCAGTAACATTCCTCCATGGCCTCTGCATCAGCTCCTGCTTGAGTTCCAGTCCTGACTTCCTTAGTGATGAACAGCA
GTATGGAAGTGTAAGCTGAATAAACTCTTTCCTCCCCAACCTGCTTCTTGGTCATGATGTTTGTGCAGGAATAGAAACCCTGACTAAGACACTC
ACTCAGGATGATACTTTCTAGTTCCATCCATTTGCCTATGAATTTCATGAAGTCATTGTTTTTAGTAGCTGAGTAGTAGTCCATTGTGTAAATG
GACCACATTTTCTGTATGTATTCTTCTGTCGAGGGACATCTGGGTTGTCCAGCTTCTGGCTATTATAAATAAGGCTGCTGTGAACATAGTGGGA
CATGTGGCCCTTGTTATATGTTGGGACATCTTTTCGGTATATGCCCAGCTCACTCTCACTCTTACCCCTAACTCCTCTCAGATAGACTCTTCCT
CCATCCCTCTCAAACTATGTGCCCTCCTCTTTCTTTTCTTTCATTCTTTTTTAATGAGCCCACCAAATTCAATTTCTGCTGCCCATTTACCCAT
GCTGTGTGGCCGTGTGGCCATCTACCGGAACTTGCAGTAGACTTGCCAGAGAATACACCCTTAAAGAAAACTGACTTTTTCCCTTCCTAGGAAG
TGACCAACTCTCCATACCTCCTCATTTATGGCTGCAGACCCCTTCTCTCTCTCTATGCTAGAATTTTGACTAGCTTGATCTTGTACAGACAACC
ACAACTGCTGAGTTCATGAGGATACCAGTCCTGCCATGTCCAGAAGATACTGTTTTGCTCTGATTCTCTGCAACTTCTGTCACTTAGAATCTTT
CTGTCCCCCTTCCACCACTTTCTCGGGCCTTTCAGGGATGTAACATAGCTGTCTCACTTGTTCCGAGCACCCTAGGACTCTTAGTCTCTGTACT
TCCACCAGTTGTAAGTTCTTGCATTTGGCCACCATTTGCTGCACAAAGAAACTTTTCTGATGATGTCTGAGAGCTGCCCTATTCTATGGGTAGA
GAGATCAAGACATACAAAGCAGTCCAGCCAAATGCATGTATCTGGAGGATATCATCCTTAGTGAGGTAACCCAACCACAAAAGAAGTCATTAGA
TATGCACTCACTGATAAATGGATATTAGCCCAGAAACATAGAACACCCAAAATACAATTTGCAAAACAAGGGAAGACCAACGGGTGGATACTTC
GTTCCTCCTTAGAATAGGGAACAAAATACCCATGAAACGACTTACAGACACAAACTTTGGAGCTAAGACGAAAAGATGGACTATCCAGAGACTA
CCCCACTGGGGATCCATCCCATAATCAGCCACCAAAGGGACCCTGCTAGAGCTGTCTTGTATGAGGCTATGCCAGTGCCTGGCAAATACAGAAG
TGGATGCTCACAGTCATCTATAAGATGGAACACACGGCCCCCAATCGACAACCTAGACAAAGCACCCAAGGACCTGAAGGGATCTGCAACCCTA
TAGGTGGAACAACAATATAAACTAATCAGTACCCCCAGAGCTCGTGTCTCTAGCTGCATATGTAGCAGAAGATGGCCTAGTAGGCCATCACTCG
GAAGAGAGGCCCCTTGGTATTGCAAACTTTATATGCCCCAGTACAGGGGAATGCCAGGGCCAAGAATCGGGAATGGGTGGGTAGGGGAGCAGGG
CGGGGGGAGGGTATAGCAAACCTTCACGATACCATTTGAAATTTGAAATGTATATAAAGAAAATATCTAATAGAAAGAAAGAAAGAAAGAAAGA
AAGAAAGAAAGAAAGAAAGAAAGAAGGAAGGAAGCAGTCCAGCTAGCACTGTAATAGTAGTAGGCTCACTCTGAGGCCTAGGAGTTCTTTAACC
ATGGGTTCTTGGTCAGATTTAGAGTACCAGTCATTTGTTTCCTCCTGGACAAAAGGACTTTAAGTCCATCAGAAGTGGTTGGCTACCCCCATAA
CCTTTGTGCCACTGTTGCACCCATGGGTGTGCCTTGCCGTGCCGGTTATCATTGTAACTGATAGGGTTCACAGATTGTCGATGCCATTTTCTTC
CAGCACCTACCATAGCACCTTCCACTACTGCGAAGGCTGACCAGATAGCAGAAAAACCCCTGCTCAGTACCAATCTGATTTCTTCATGCCCTGT
GACAAAATCTCTGTCCTATCTTCACAATAACGCTCTACCATCAAGTTCTGGTGAGCAGTCAAGACCAACAACAATGCCATGTGCTGTTGGAAGC
GTATCTGGCACATCTCTGTTCAACATCATGAGGAGAAGAATCCCAGGGGTGATCCTGGGCTTTTCATTTGGCATCTTATGGCTTCTGAGGCGAG
CATAGTCTCCTATGTGGCGTGCTTCCAGTTAAGCATCTTTATATGTTTATGTGCTTCGGAAGCTTATAAAGCAGTCGATTTCCGCATCGCCTTT
TCAAACATCCTTAGCGTTAGTTATCCTTGCCTCTTCTACCCTACTCTCCTGTCTCTCTGCTCACCTTAACCTCCCTCCCTTATACACTGTATTT
TCTTACATATATGTCATAAACATTGCTCACGTTTGATCCCACTGTACTCCTCCCCTTCCTTCCCCTACCTTCTTCCCTCCAAATAGCTCCCCTT
ATGTTTTCATACTATGTATGTATATATCTATTATGTATGTATTATCGTATATGTATATGTGTGTGTATATTTAATTCTAGGTCCTGCATATGAA
AGGAAATGAGATGCTTTATATTTCTCTTCTATTATTTTTACTTGTTCTCTTTTAATATAAACACCTTCTAATTTCATACTTAAATCTATATTCT
GCATATAAGAGAACATGTGCAACATTTGTCTTTCCAAGTCTGACCAATTTCACTTTCCAGTCCCACACATTTCCCTGCTAATAATATGACATTC
TTCTTTAATCTTGAATGACACTCTACTGTGTATTGTGCAACAGGTTTTCTTTATTAGTCTGTATTGTTGTCTGTATATTGCCATCTAGGCTCTT
CCTGCTTCCTGGCCATTTCAAAAGTTCTGTGGTAAGCACAGATGTGCATGCCAAGATAGACTCCTTCAGGGTATGCCCAAGAGTTGTACATCTG
GATCATAACCGTAGCCTACTTTGAGCTTTTTGACACACTCTGTGCTGGTTCCCATAATGGCTGTACTAGATTACATTTCATCTTAATCTAACTC
TACAACTCCAAAAGAGATGTTCTCAGAAAGCAGAGCGTAGATTTGGGGCTACTGCGAGGTGTAAGGGCTGCAGCAGACTTTGGGTGGTGATGCG
ATGTTCATGTTGATTGCACTGATGGCTTCCCATCAAAATGGCAATTGCATATTCCAAATATTGCACTGTCATGTACTAACGCTGTTTTCAGAAG
CTAGAAGGAAGAAGGACTTGCTACTGGAGTTTGTGCTGGTAGTAAGCATGACTGGAACCCAGCCTTTCGATTCACTTATGGACAGTGCATTGTA
AAATTACTCCCAGGGCTCCTTTTAAAGCAAAGAAGTCTTTGTAAAAAATAATATTACTTTCAATATCTCTTTTCTCATGGTTCCTATTGCAATA
TTGTTTCCTTAAAGATACATCACAGTTTGATATTGGAGACCAGAGTGACCACTGCACTGTATTGCTCATATTCCGCCATGAGGGGCAGAAGGCA
GATTCAGTAGCAGACTACACACAGTTTAGTGCATTCATTAAATCATATCTCATGGTTAAATATTTACTCTACTTAACATCTCTGCCAAATTTCA
GCTTAGGAACTTGCATGTGCTTTGTCAAAACAGCATTTCAAATACTTCAAAAATGATTTGTTCCTTTTTAACACCAATCTCAGGTTGTAATTAG
ACTGTACACACAAGCTCCATTTTAGCCTCCTAACGAAATCAAAACTATGTAGTGTTAAGGTGCTTCGTGAAAAGATGCAGGGTCAACAGATGCA
GTGAGCGGAAAGGAAGCAATAGGTTGCACCTCCCAGCCATCCCTGCCCTTCTTATGCCAACACAAAATGACTGTGGTGTTGCTGTAAATCTCCT
TCCAAATATGCCCCGGCAATGAAAACACGACACAGTTAATGCTGTGCACCTAGATTGGGCAGATCTACGGCTACACTACCAYCTTCTACAACTT
ATGAGACCCCTTAGAACTTGCAGTTTCTCCAGGCCATGTGCTAATCCTCCACTTTTCTTTGTCTTCTTCTACCTCCTCCTCTGCATCCTCTCCC
TCTTCCATTTTCTCCTTCTTATCTCCCACTCACCTTCTGCTCCACCTTCTCTTTTATCTGCCCAATCATCAGGTCTCCATTATTTTACAAATTA
AGGTGGGAAGCAGGTTTACAGGAAATCACCTGAGTGCTGACTCATTCCTTGTTCTCAGCCCCTCACACGACAATGGAATTAACACCAAATATAA
TTAGCCCCAGGGCTATGCACAACATTTCCCCCTTTCTGTCCAATTAAAAGACTATTTTATCTCAGATATAATTGAACATAACTATTATTATTTT
GTAATTTATAAAGTACAAGAGACCTAACCCAGTCCATCATCCTTGTTAATTAAACAGAACCTCTGTCATCTATTCTTACTTAAAAGACTTATAA
TTCTACATCTGGCTATGTCTTCGCTTTAGATTGAATGCCATCTGAACACCATCCTCTCAAAACTGTTCCTCTCCAAATAAAAAGCCTGAGTTGG
CTAGGAGACTATGTAGTTTTTCAACCTCATCAGAAATCTAAGAACCACTGATATTAACTGGAAATATATACAAACCCTAAAACGGCTTCCAAAA
CGTAGCCAATCCATAGAGACTGCTGATCACCTGGACAGTCCCTTACTTCAACACGCTGGAGCATCGGTCTTCAGCCTACTGGCCAGGGTCATCT
GATGGACTTAGAAAAACAGGAATATTAAGGACTAGCCTACTCTGTCTCGGCAGAATCAAGCTGTCCTAACCTGCAATTGCATCCTTTCTTTGGA
CAGTATTATGTCTGTAGATGAAATGAGCCAATTCTTGCCTAGTGGCTGTTTCACCACAACTGGAGTAACTCTAAGGTGCTCAGTTTCTTCTTTG
AATCCAAGACCGGGAAACCTGTCAGGAGCAGAATGGTCTCAATAACAAGTGAATAAATAACATTAAATGTCACATTCTGTGGACTTCTGATGTT
TCGGAAAACCAACTATCTATTTAAAGTAATGTAGACAGTTCTCTGTTAACTCCTCTCAGCCATTTCTAATTAAAATAACTGAGAACACCCTAAC
AATAAACTCAGAGCCATGAATTTCCTATTTCGCCCTTAACTCACAGGCTTAGACATCTCAGATCTGTTTATAACAGCAATAGAAGGACTCGGTT
CAAGCCTTGTACTTCAAAATTTTTAGAATCAAGGACCACCTATAATAACCACCCCCAGCCCCAAAACCTAGGAAACTGGGATGACGACTCTTCA
TAACTTCCTCAAGCTGATTATGGGCATTGAGATATTTTAAAGGGAGGGGGAAGGGTAACGAAAATGCGGGAGTTGGTTGGCCTTAAGAACACCC
CACCAATGATTGTATTAGTCTCTGATATCTGTGTCCTTACTGGATTCGGATGAGAAGCCAAGAAATCAGGAGTTAGTCAGGTCAGTTCAGCATG
TCTGACGATGAAATTCACCAAGGCTGAATATTCTGTCATATATAAATCTCCAAACAAAATTTTACTATCATCAAGATAACCTTTTTGCGGTCTC
CCGCTATCAAATCTGATCCATATAACTCTGCGAGGTCTAAATACATTATTCACCTTTTCCCCAAATCAGCATATCCTTCAGCCGGTAACCAGGA
AAACCTGTAGCTTGCCCTCTGTCCCAGAGGAACAATAATACAGCCACATTACTCAAAATCACACACATTTTAGCCTATTTAGGCCTTTCTAATT
TGTCATATCAGGATATTACCCCAAAATTCCCGTCGATCCCACTGTGTACAGAGTATGAGTCTCCTGCAGACTTTATTATACCATCTTTTAAACC
ATTGATTTAAAACCACACTTCTATTTTCCTTCCTTTTTCCTTTTCCTTTTCCTTTCCTTTTCTTTCCTCTTCCTTTCTTTTCTTTCCTTTCCTT
CCCACTTTTAAGGTGGGAAGCAGGTTTACAGGAAATCACCTGAGTGCTGACTCATTCCTTGTTCGCACCCCCTCACAGGAGAATCTAATTAACA
TCAATATAATTAGCCCCAGGGCTATCCACAACACTACGGATGCTTAGTAGTCCTGCTCCCTCTGCCAGGGCTCATGGGGACCTGGGAGCTTTGG
TGGTCTTTTTTCCTCCTTTGTGACTGAGCCAGCCTCTCTTTATTCCAGGGTTTGAACGGCATGTCTGTGGATGAGAAGCCTGGCTCCCCCATGT
ATGTATATGAGTCCACAGTCCACTGTGCCAACATCCTCCTGGGCCTCAATCACCAACGGAAGAAGGACATTCTCTGTGACGTGACGCTGATCGT
GGAGAGGAAGGAGTTCCGAGCCCACCGGGCTGTGCTGGCCGCATGCAGTGAATACTTCTGGCAAGCACTGGTTGGACAGACGAAAGATCACTTG
GTGGTCAGCTTGCCTGAGGAGGTACAGTGATTTGGTGTGGTTGTGGGGTTGTGGTGGAAGTTAGACGTGCACTGTGCCACGTCGATGGCCACGT
CACCCATGTCCACATCACGTCACCCACATGTGGGCTTGTAGCATAATCAGTTTCTGTTTGATGCACTTGAAGCCTCAGAGGCATGAATACAAAG
TGAGCGTGCTTCTTTAAGGGAACTGAGCCTCACCTGGGGCCCTGGCCCTCATAGTTTCTAGTTCACTTAAACTTCGGGTTTTGAATAGTTCAAC
CTCATTCTGATGCAGTCCTCTGTGTAGGATTTGAATCACTACTATTTCTTCTCTTTCAAATGGATCATTAGATTTCCCCTGAGAATAAAACAGC
GAAAGAATTCACAGGACCTTCCTTGCTTAGGAGAAAAACAAAGCGACCAGCAATTCTCACCATTAATGCAGTGAGATTCTAAGAAGTGTAAATT
TGCTTTTCTCATCAGGATTGAAAATATCCCCTACTCAGGTTTCTTAACTGCTTCAGTGAGAACAGTCATTTTGGTACTTTGGGGACATGAATAG
CAAGGCTTGTTCTGTCCAGAGATGACAGTCAAGTGGTTTGAGAGGCAAGGACCCAAAACATGGGTGTCACAATGGTCAACCATTAAACTGGTCA
CTCTTCAGACTGCTTATGATTCTTCAGTCATTCGTAGCCTCCTTATCTTCAGAAGACCGGGGTTAATGTGTGAATCCTTGAGCTTTGTGTGCAA
TGCAGAGTATTCTCTGCACAACACCAATATATGATACAACTGCAGAGCCTCTGGCAGCCGTTTGCAAGCTGTCTACAGCACACCATGCAGGAGC
ACACCTCACCTTCACGTCCTTGCGAATGAGACCCAGGGTCACCTCTCCACCTTCCTCACAGCAGTCTTCTATGATAAGTCAAAGACCAAAAATG
TAAGGAGTTAAAGATTACACTTACCACTCCATCCCGCCATCACCAACTCAGATGCCTTCAGAGACATACCCGTGACATTAACAACTCAATAGTG
CTTTGTAAAGAGTAGGGCGTGATGGAGTGAGCAGCTAGACCACCAAAAACACGTTCAAGCCTAACACGAGAGAAACACAAAGGGGGCTGGAGAT
GCAGCTTGGATAAATTGCCTAGAGCGTGGTCCCCAGCAATAAAAACAAGACGCATGGGATGGAAGAGACACCAGATTTCAGTCCCTTGCTACAC
AGCATTTGTGACTACCCCCGCAGAGAGCAGAAGAATGGCCAGCTGATGAACCGCTGACGTTTGAAACATCTTCACATAGGCACCCTGTCATAGT
CACAACCAACTGCTCCATTCCCATTTCCTACACAGCCGTGAGAGAASGAAAAGAATAASTCATTTCAAGATTAGGTAGCCAAGATCAAGTCTTC
GATCTAGTAAGAAGAGAAGGAGAGCGAGCAATGGCAGCTGGGTCCTTAGCAGGATGGGCGGTTCCCATCTGCACTGGATGGAGGCATGGCCGTC
TGTAAACTGCTCCTCCGCTTCGCAGCTGAGGTAGTGATGTAATGCTGCAAACCCAGCCCATCCTGCAGCAAGTGCTGCTCAGACACATGTCCTT
CTTCTCCAATGGGAACAAAGACGACATCCTCCTCACTCAGTCCAACTCTAGAATTCTCTGGAAATAGTTTCATGACATCTAGTTATACAAAGTA
GTCTTAGAGGAGGTGACACATGTTGCCTACTTATTTCTGTTGTGTCTTGGAGAGCCATTTCATATGTGTATATGTATTACTAATTTCCAAAACT
TAGATATTAAAGCAGATACACAAACGAAGTCATACTTTATGTATCGAGTCTTCCCTCAATGACTGTGTTAGCCCTACCTCATACTTCCTAGAAA
AGAAGACCTAAGCCCAAGCCTGTTCTCAATTCTAACCTGGATCCTGATCTACTAATCTCTCCGACCCTATGTGTCAGTGTGTGCATGTGTGTGT
GTTTGGATTTTGGGTTTTTTTCCCCACACCAGATTTCTCTTTGTAGCCTTAGCTGTGCTAGACCAGGCTGGTCTCAAACTCTCAGAAATCTGCC
TCCTAAGTGCTCAGCCATCATCTTAATTTCAAGAAGCCCTAAAATTCTGAAGCCCTTAACCTATAATCAAAATACAGTACCCATCCAGTAAAAT
GTCAAGGAAACCAGCGTATAAATAAATCTTACTAAGCCTCAAGTTTCTTCTCAAGTCAA
MOUSE SEQUENCE—mRNA
CGAGCTGCCATGTGATGCCCATCCCCTCCGCCTGCTCTCAGTGACCCCAGGACCGCCCACCACGCCGGCGGCCGGGAGGGGGCTGCGGGCTGGG
AAAACACGGGCAGGACCGGCGCAGGGGGACAAAAGTTCCCGGGAAGCTCTCTGCTTCCAGAAGTGAGCCTTCTGAAACAAGAAGGACCTTCAGG
AGCTGCTCCACACTGTGACATGTCTGATCCCTTGTGCCCGTCCCTGCAGCATGAACAAGGTGGACACTCACTGATCTATCACAAGATTGCCTCA
CTCAGTTTCGGCGTCCATCTCTGAATGCATTGCTGTAGCCTTCTCATCTCTTCCTCTGCCCAGTTCCCAGCATCCTAAGACTCGAAGCCAGGAC
AGGACCTGGGGAAATTATATGGTTTGAACGCCATGTCTGTGGATGAGAAGCCTGGCTCCCCCATGTATGTATATGAGTCCACAGTCCACTGTGC
CAACATCCTCCTGGGCCTCAATGACCAACGGAAGAAGGACATTCTCTGTGACGTGACGCTGATCGTGGAGAGGAAGGAGTTCCGAGCCCACCGG
GCTGTGCTGGCCGCATGCAGTGAATACTTCTGGCAAGCACTGGTTGGACAGACGAAAGATGACTTGGTGGTCAGCTTGCCTGAGGAGGTCACGG
CCAGGGGCTTTGGGCCACTGCTACAGTTTGCCTACACTGCCAAGCTGTTACTCAGCAGAGAGAACATCCGGGAGGTCATCCGCTGTCCTGAGTT
CCTGCGCATGCACAATCTGGAGGACTCCTGCTTCAGCTTCCTGCAGACCCAGCTCCTGAACAGGGAGGATGGCCTGTTTGTTTGCAGAAAGGAC
AGTGCGTGCCAGCCCCCCCAAGAGGACCATGGGAATTCTGCAGGAGAAGAGGAGGAAGAAGAGGAAACAATGGACTCAGAGACAGCTAGGATGG
CTTGCGCCACAGACCAGATGCTCCCAGACCCCATCAGCTTTGAGGCCACTCCCATCCCAGTAGCAGAGAAAGAAGAAGCCCTGCTCCCTGAGTC
TGAGGTACCCACAGACACCAAGGAAAACTCAGAAAAGGGTGCATTGACCCAGTACCCTAGATATAAGAAGTACCAGCTCGCGTGTACCAAGAAT
GTCTACAGTGCACCCTCACACGGTACCTCAGGGTTTGCGAGCACATTCAGTGAAGACAGTCCTGGCAATAGCCTCAAGCCGGGGCTCCCCATCG
GACAGATTAAAAGTGAGCCACCCAGTGAGGAGACCGAGGAGCAGAGCATCACCCTCTGCTTGTCCGGAGATGAGACCGACATCAAAGACAGACC
AGGAGATGTCGAGATGGACCGAAAACAACCCAGCCCTGCCCGTACCCCCAGTACCCGTACTCGAGCCGCCTGCCTGCACAGGTCCAGGAGTGTG
TCCTCGCCTTCCTGCCTGCGCTCTCTGTTCGGTATAACGAAAGGTGTGGAGTCCACTGGCCTGCCCAGTACATCTCAGCAACCCTTAGTCAGGA
GCTCAGCGTGCCCTTTCAACAAGCGGATCTCTCAGGGTGACCTTAAAACTGATTACACCCCTTTGGCAGGGAATTACGGACAGCCCCACGTGGG
CCAGAAGCATGTCTCCAACTTCGCAATGGCGTCGCCACTCACGGCGCCCGGGCCGGAAACTCTCTCTGAGTTCTCCTCTTCGCCCTGTTCCCAG
GGAGCCAGATTCCTTGCCACGGAACATCAGGAACCAGGGCTGATCGGAGATGGAATGTACAACCAAGTCCGACCCCAGATTAAATGTGAGCAGT
CTTACGGAACCAATTCCAGTGACGAGTCTGGATCATTCTCGGAAGCAGACAGTGAGTCGTGTCCTCTGCAGGACAGCGGCCAGGAGGTTAAACT
TCCTTTTCCTGTCGATCAGATCACAGACCTTCCCAGGAACGACTTCCAGATGATGATCAAAATGCACAAGCTAACCTCAGAACAGTTGGAGTTC
ATCCACGACATCCGGACGCGGAGTAACAACCGCATTGCAGCCCACCGCTGTCGAAAGAGGAAGCTGGACTGTATTCAGAACTTGGAATGTGAAA
TACGSAAACTGGTGTGCGAGAAGGAAAAACTGTTGTCGGAGAGGAATCACCTGAAGGCGTGCATGGGAGAGCTCCTGGACAACTTTTCCTGCCT
CTCCCAGGAGGTCTGTCGAGACATCCAGAGTCCAGAGCAGATCCAGGCCCTGCACCGCTACTGCCCTGTCCTCATACCCATGGATCTCCCTGGA
GCCAGTGTTAACCCTCCTCCTGTGGGTGTTGAGCAGAGCCTTGCACCCTCCCCGTGTGCAGTAGGAGGAAGTGTACCCTGCTCCCTCGAGCCAG
GGGCGGCTCCCCCCGGGCTCCCCTGGGTGCCCAGCAACACCTCTGAGAATTGTACCTCTCGGAGGACGTTGGAACGCAGTCACCCTGGAACATT
CTCAGAACGAGGACCTCCCCTAGAAGCCAGGAGCCAGTCTGTGACGGTGGACTTCTGCCAGGAAATGACTGAGAAGTGTACAACGGACGAACAG
CCCAGGAAAGATTATGCCTAGCCGGTGTGATCAGCTCTCCCCTACCCACCACCCTACCCCCGCGTCTTCACACCTCTCTCATCTGGGTGTTCTT
CTGCCAGCCAGTGGCGCTGTTCATCTGTGTCTTGAAGAACCAAGAGCGAATTTGGTGCACACTACAGCAGTCTTAGCACCAATACTGTTTCGAA
GTATTCCCTCCTCTCTCTAAGCAGGACTGCTAGTTACCTTCATAATGGTGCTACCCCTTGCCCTGGCAAGGAAGACAACAGTGTCGACACTGTC
TGTCTGTGGGTTCATTGCAAACTTCACAGGGATAGACTACACCTCTAGGACCCAACCACGGATTTTTTTTTTCTCAGTGGCCCATGTCACAAAC
CCTATCTCAGGAATTTCTTCTGAATGTTCAATTTTTTTCATTGAAGACAGCTTCTATACACATCAAAGTTTTATAGCTATACTGTGTACATAGT
ATATATAATATATATGAAATATATATCCATATGCAAAAAGTCCTGCATGCCTCAATTTTCTCATCCCTGAAACTGGAAGCTTCACTTATCATTT
ACAAACAGGTTCCAACATTCCTCTTTTTGTGTCTGGTGCCAGAACTGGTTTGGAAGCTGTTAACATGGCTGTTTTGCTTGCTGCACAATTCGGT
TTCCATCTGTGCTTATTTACAGACAAAATTCAATGTTGGGAGATCCTTCTCAAGGTTCAATCTCACACCTTTTACTTTCGTTGGTTTGGTTTTG
CTGCCGCCGAACGGTGTCAGGTGAGCACCGTGAGTCCGCTCTTCTCCCCTTGTGTTTTCCCCTCGTCTCTGCGGATACTGTACAGCAATGGTCA
ACTTTGCCACTTGCACTGAGTTTTGAGTCAAACCTATTTTCTTAAATGAAGTTGTAACTTCGGTATAACTCAAGTATATTTTTTTTTTCGTTTC
TTTTTCTTTTTGGAGACAGGGTCTCACTATGTAGCCCTAGGTGGCCTGAAACTTGCTAGGTAGACCGGGCTAGCCTTGAACTTAAAGAGATCCA
TCTGCCTCTCCCTCTGCCTCTGGAGTGCTGGGATAAAGAGTATGCACCACCATGCCTGGCAGTCCGGGAATGCCTACCCGTTCGCCACCATGAC
ATTAGGTAGCAAAGCAGCCGGAATCGCTCCTCTCTGGCGGCTGAGGGTCTCACTGAGGAACTGAACCAGCAGATGTTCTACACCTTCTGTGCTG
TAGGAAGAGAACTCACAGCTGCTTCCAAGGCTTTGACACTGTGTGCAGGGCTAGAGGCCAATGGTATAGGAGCGGCCGGTAGGGTTGTGAATAG
AAGAACAGACGGGGCCCGTCACCGCCCACTCGTACCACACTTTCTTGCAATTCCTCCATCGCCAGAAACCCACACAGATCTTCTGGCCTTCGTG
CACCGTGATGGGCTGCTTAATGGGGAAGAAGATGGCGAACCATGAGAACATTCCAGCACAGTGAGTCTCTGGCCGGATACTCAGAGTGATGTCC
CGGTAAAGCACAGTCTCAAAGTAGCCTGCGAAGCCATGAAGCACCGTGTTCACCTCCACAGGAAACTCCAGGGTACAGTAGCGGTTGTTGTCAA
TCATAGGATCTCGGTTGGGATGGCTCAAGGTAAAGCAGGGCTTAGGAGCAGAGAGCTGGTGGAAGTTGTCCAACCGAACCACATAAGGCATCTC
AAACTGTGCCTCACGATCGCGGTCCTTTTCCCGACAGGCACGGACCTCGTTGTACAGCTTAGAGGAAGAAATGGGAGCCAGGAAGGAGGTGTAT
TCTCCAGGGATGCTCACGCCATCATCTTTCAGGAAGTGCTGTGCTCCATCCAGACACTCAGGTGACAGCTCGTTGTCGGCAAAGGAACCCAGAA
GCTCACTGACAATAATGTCAGCTTTCTCCGGAGCCACCCATTCCCGCATGTCTGATGAGACAACTGTCACCTGGCTCCCCCATTCTTCAAACTG
CCAGTTCTCTAGCGTCACCACAGCATTGGGGTTCTTCTCCACAGCATACAGCCTGATCCGCCGCTCGGCCTGTTTGGCTGCCCGAAAAGACGCA
TTCACAAGAGGACCCCGGCCTGCACCCAGCACCATAAGTACCTGGACATTGGTCTCCTTTTCTTCTTCTGGTACTCGGTCTAGCAAACATTTAT
AAATAGCCTGCTGATATTGAGAGTATTTGATGGGGTCCTTTTCAAACACTTCATATGTCTGAGATTCCAGATTGTCCATCAGAGGCTGGAGTGG
GGACTGCAGATAGTCTTCATAGCCTTTGGCAAAAAGCTCATAGGCATTGGGTGGAGGGCGATTTTCGCTTAAGTATTCCAAGTACTGGAGGTAG
GAACAGAACTCCTTCTCTGAGTGGTGGTTGGTTCCCGTGATGATAAACTGCACTTCCAACTTGAGGAGCCGGAAGATCAGCCTCTGCTGCACCT
TAGAAAGAA
MOUSE SEQUENCE—CODING
ATGTCTGTGGATGAGAAGCCTGGCTCCCCCATGTATGTATATGAGTCCACAGTCCACTGTGCCAACATCCTCCTGGGCCTCAATGACCAACGGA
AGAAGGACATTCTCTGTGACGTGACGCTGATCGTGGAGAGGAAGGAGTTCCGAGCCCACCGGCCTGTGCTGGCCGCATGCACTGAATACTTCTG
GCAAGCACTGGTTGGACAGACGAAAGATGACTTGGTGGTCAGCTTGCCTGAGGAGGTCACGGCCAGGGGCTTTGGGCCACTGCTACAGTTTGCC
TACACTGCCAAGCTGTTACTCAGCAGAGAGAACATCCGGGAGGTCATCCGCTGTGCTGAGTTCCTGCGCATGCACAATCTGGAGGACTCCTGCT
TCAGCTTCCTGCAGACCCAGCTCCTGAACAGGGAGGATGGCCTGTTTGTTTGCAGAAAGGACAGTGCGTGCCAGCGCCCCCAAGAGGACCATGG
GAATTCTGCAGGAGAAGAGGAGGAAGAAGAGGAAACAATGGACTCAGAGACAGCTAGGATGGCTTGCGCCACAGACCAGATGCTCCCAGACCCC
ATCAGCTTTGAGGCCACTGCCATCCCAGTAGCAGAGAAAGAAGAAGCCCTGCTCCCTGAGTCTGAGGTACCCACAGACACCAACGAAAACTCAG
AAAAGGGTGCATTGACCCAGTACCCTAGATATAAGAAGTACCAGCTCGCGTGTACCAAGAATGTCTACAGTGCACCCTCACACGGTACCTCAGG
GTTTGCGAGCACATTCAGTGAASACAGTCCTGGCAATAGCCTCAAGCCGGGGCTCCCCATGGGACAGATTAAAAGTGAGCCACCCASTGAGGAG
ACCGAGGAGGAGAGCATCACCCTCTGCTTGTCCGGAGATGAGACCGACATCAAAGACAGACCAGGAGATGTCGAGATGGACCGAAAACAACCCA
GCCCTGCCCGTACCCCCAGTACCCGTACTGGASCCGCCTGCCTGGACAGGTCCAGGAGTSTGTCCTCGCCTTCCTGCCTGCGGTCTCTGTTCGG
TATAACGAAAGGTGTGGAGTCCACTGSCCTGCCCAGTACATCTCAGCAACCCTTAGTCAGGASCTCAGCGTGCCCTTTCAACAAGGGGAACTCT
CAGGGTGACCTTAAAACTGATTACACCCCTTTGGCAGGGAATTACGGACAGCCCCACGTGGGCCAGAAGGATGTGTCCAACTTCGCAATGGGGT
CGCCACTCAGGGGGCCCGGGCCGGAAACTCTCTGTGAGTTCTCCTCTTCGCCCTGTTCCCAGGGAGCCAGATTCCTTGCCACGGAACATCAGGA
ACCAGGGCTGATGGGAGATGGAATGTACAACCAAGTCCGACCCCAGATTAAATGTGAGCAGTCTTACGGAACCAATTCCAGTGACGAGTCTGGA
TCATTCTCGGAAGCAGACAGTGAGTCGTGTCCTGTGCAGGACAGGGGCCAGGAGGTTAAACTTCCTTTTCCTGTCGATCAGATCACAGACCTTC
CCAGGAACGACTTCCAGATGATGATCAAAATGCACAAGCTAACCTCASAACAGTTGGAGTTCATCCACGACATCCGGAGGCGGAGTAAGAACCG
CATTGCAGCCCAGCGCTGTCGAAAGAGGAAGCTGGACTGTATTCAGAACTTGGAATGTGAAATACGGAAACTGGTGTGCGAGAAGGAAAAACAG
TTGTCGGAGAGGAATCACCTGAAGGCGTGCATGGGAGAGCTCCTGGACAACTTTTCCTGCCTCTCCCAGGAGGTCTGTCGAGACATCCAGAGTC
CAGAGCAGATCCAGGCCCTGCACCGCTACTGCCCTGTCCTCATACCCATGSATCTCCCTGGAGCCAGTGTTAACCCTCCTCCTGTGGGTGTTGA
GCAGAGCCTTGCACCCTCCCCGTGTGCAGTAGGAGGAAGTGTACCCTGCTGCCTGGAGCCAGGGGCGGCTCCCCCCGGGCTCCCCTGGGTGCCC
AGCAACACCTCTGAGAATTGTACCTCTGGGAGGAGGTTGGAAGGCAGTGACCCTCGAACATTCTCAGAACGAGSACCTCCCCTAGAAGCCAGGA
GCCAGTCTGTGACGGTGGACTTCTGCCAGGAAATGACTGAGAAGTGTACAACGGACGAACAGCCCAGGAAAGATTATGCCTAG
HUMAN SEQUENCE—GENOMIC
ATGATGTGTACCTGTAGTTCGAGCTACTTGCGAGAAAGAGGCAGAAGAATCACTCGAGGCCAAGAGTTTGAGGCTGTGGTAAGCCATAATTGTG
CCACTGCATTCCAGCCTGGGCAACAGAGTGAGACCTTGTCATTCATAGATAGATAGATAGATAGATAGATAGATAGATAGATAGATAGATAGAT
AGACAGGAAAAGGAATGTAATGGACATTTCTCCAAAGAAGATATACAACTGGCCAGCAAGCACACACACAAAATTCTCAATATCACTAATCATT
AGGGAAATGCAAATCAAAACCACAATGAGATACCACCTTACACCCATAAGGATGCCAACTATTAAAAAAAAACTAACGTGAAAAAAAATAAAAT
AAAAAGTATTGGTGATGATGTGGAGAAACTGATACCTAGAGTAGTCAAATTCATAGATATAAAAAGTTAAAAAGTGGTTTTCAGGGSTTGGGGA
GTTGTTTCATGTTTTGCAAGATGAAAGGCATTCTGGAGATTGGTTGCACAATATGAATGTACTCAACTCTCCTGAACTGTACATTTAAAAATGA
TTAAGATGATACATTTTATATTATGTGGATTTCACCATAATTTAAAAAGTAAATTTTAAAAAAGAGGGGGTGGATATAATTATAATAATTGCTG
CAAAGGATTTAGGTCCAAGGTACCTATAAAGAGGATCTGACCTGGGTAGTGGTGAAGAAAGCTCCACTTAGCTGAGAGCAGAATGAGTAGGAGT
TTGCTGGGGGGAAGAAAAGAGGTAGAAAGAACAATATATGCAAAATCCTTGTGAGGTGAGTGATCTTCATGCACATGGGATGCTTTCTTAGGTA
TCAACTAAGTATAAACCTTTATTTTCACTTGACTATTTCTGTTTTTAAAAATGGAGACATAACTTATCAACACAGATTGCAAAAACCTTAAGTG
AACAGCTCAGTAAATTTAGTAAAACACTTTSAATCCAGTAACAGTCAAAAAAGGTGCAGTTGTGCTTCCTTTATCCCTTCCTGCCCCTTCCCCT
AATGCTTCCCTGGGCTGAGGATATGTCAGGGGGAGCTTTCCATACTGAAGGAGACTAAAGAGCTAGCACAACTAACTGTACCCCATGATCCTGA
CTCAAACTTTGCCCTAGAAAGGAAAAAAGATATTGTTGGTACAGTTGGTGAAATTTGAATAGGGTCTCTGGATTGAGTGGTATTGTTATACTGA
TGCTTACTTTCTGATTTGGATGTTGTATTGTGGTTATGTACCATTATTCCTTTTGAAAATGTGCACTGATGCATTTAGCAGCTGATGGAGCATC
ATTGTTGACAACTTACTTTCAAATTATTCAGAAAGAGAATAATGGTAATGGGTGTTTATATTAGATATTTCTGCAGGCATACGGAGAGAGAAAG
AGAGAACAAATGTGTTAAAATATTAACAATTGGGATATCTGCATGAAGGAGATATGGTAGTTCTGTGTATTACTCTTGAAACTTTTCCTAAAGT
TTAACATTATTCCAAGATCAATTATTTTTAAAAGATACTGTCTATGATGGCAATGGACTCACAGGTGAGGCAGCAGGTAAGAGAAGTGAGATTA
GACATAAAGATAAACATTTTATCTGTCACTGAATTTGAAAAAGCAAAGTGTCAGAGAAAAGAATTAGTGTTCACTTAGCGCTTGCCAGAATGAA
GTAGGCTATCCTGCAAATAACCCACTTATGGTTATCATAAATTAATAAGCATTCCGATTCAGCATCTGCTTTCATTAGCATAAGTTGGTCATCA
GGCTGGGAGCACGGGTTCCTCCTCTAGACAATGGCCCAGCCACCAATCTTAAGACACCTTATATCCCAACCCACTTCCCTAGACCATCCTTTCC
AGCTTTAGAAAATTAAGCACCAAGGAAATGTACCAATAGAAGCATGCCTGTTGACAAGACCTGGGAAGAGCTGTAAATCCAGAGGGTGCTGAAG
TGCAGCTGGAACAAACACAGCACACCTCCATGTTTTCAGCCTTCTGCAAAATCACCAAAGGCTCAATTCAAGTTGGGGCACGAAACACTGGGTT
TCCACACACACCTAACAATCGAAAGGCAGAGAAATTAGCTCCTCAGTGTGTGGTACTGTGGGAGACCTACTTAGAGAGCACCTGGGGAAAATGG
AGAAACCGATGACACCTAAATGTCTGTCATTCACATAAGCACTATGCCGGATGCACACACGGGGCACAGAACAGCTGTGCTGACCAGCACATTG
CTGCAACCACTGTTCAGGTTGGATGCCCTTGCATAATTATATCACATAAACAGATTTGTGAAAAACAGATTAGAAACTGTAGGTGCCATCTTAC
ATATTCTTTGGGGAAATTGCTATAGGGTTAGTGAACTCAACTTTCTGTGTCTCTCAAAAACTCATAAGCTGAGTTGAGAAATATAATTCAATCG
CAAGTATATTTTTATCAAAATAAAAGCATCAAGGCTTTCTTTTCACAGTAATTTAAAAATTGTCAGATTACTTCTGTCTACGACCAAACTTTTC
CAAGTTTCTTTAAGCAAAGATGTAATAAAAGCTAAAACTCAGACCACTGATCAAAAACATCTTTTAGAGGTGGGCAGAATAAAGAGATGGACAT
TTAGTTAATGGAGTAGTTTAGAAAAAACTAGGCATCACAAACCCTGAGGGTAAAAAAAGGGAAGCATTGTTAGAGCTTTTTTTAAAAAAAAAAA
AAAAAAGGGAAAAAAAGAAAGTAATCTTGTGATTATTATAAATTTTATTATTATTTTGCTTACCTGAGCCTGACCTAATCACCTCCTTCCCTGT
TTCCCAGGTAAAAAAGAAAAATTAAGCTCTTACCCGAAATTTCATGTCTCTTGGCCCTACATCTTATCCTGAAGCTTCAAAATCTTTGCATCAT
CCCTTTCTTGGATGTCCCTGTAATCCAGACAGTTTTCAGAGGCGAGATCTGAGTGATCCTCCCCCGTCCTGCAAATTCTGTTTAATGCTCATGT
TCTGCCTTTCTTCCACCTACCCATGTTTACCCCTGCCCCAGAGTTCTGCATTCTTGCCATTTTTTTCCTCTACATCAGTGCTCCTTCTGTTATC
TGCTCCATTACCTTACCTTCTACCTCTTCCTTCACTCAGATTCCTACCTTCCTGCCTTTCTCCATCTTTCCAGGCCCCCACTTCTCTCATTCAT
TCCCCCCCTCCTCTGCAGTGGGTCTAGAAGCTCCTTGCTGTCATATCACACAGCCCCCATCCCACCAGACCTTTCTTAATCATGGGATGCTATT
CCCAGGCCCCTCATTGAAATGCCCTTTTCCTTACCTTCCTCAACTTCCCAGTCTCTGCTTGATTTTCTACCTTCCTGTTGGCTCCATTCCTGTC
TTTTTCATAAACTCCTTGTTCTGTGCCCACATCCATCCCCAACCCAGCTATTCCTCAAACTTCAGCATTGAGGAAGTCAAACTTCCCTCCTTTT
GACTCCACCCTTTACCAGAGTGATCTTAGCCTCCTCCTGCCTCCCAGGGCCAGTTCCCTCCTAGTCACACAGGCTAGAGGTCTCCATTCCCTCT
TTCTCTTCTTCCTCCCTCTCCGTCTCCTCCCACAAGCAAATGACCCCTAAACCATAAGCGCTTCCCAGCCCTGCTCACTGCCTTAACATAGGCT
GTAGGACTTGAGCTACTGTCTTATAGTCTCCAGCCTCTTCAGGCCCCTTCATATGGCCAATGCTGTGTTCTTTCCAAAACCAGATCTGATTATG
CCTCTTTGGCAACTGGGGATCACTCATCGGCTTTCTACCCATGCAGCCAGGCTTTTCAGTGTTTCTGGGGAAATTAGAAGATAAACTCGGAGCA
TTTTCCTCAAGTACATCCTTCAGTACTTTGATTTTGGGTGTGGGAGAGGAACTTTTAGTCCTGATCGTCACAAATTGTTAAACTTTTTTAGTAA
AATCAACCCATGTACTTCAAAGAGAACAAAAGAAGTTCAGGTGATTTTTTAACATGTAACAGGAAACTGCAAAGACATTTTATGCTTTGAAAAG
GCAATTTGGGGCCATGTTCTCAGATCCCTAGGAAGTTAGCATTCCATTTTCTCTGCCATTCTGAGCACTTCACTGGAAAAGTTCAATGAGAATT
TTGATCTGTGGATAAAATTACACCTTCATGCTGATTTCCCATGTCTACCTTTCCAGTCCCATATTCCACCACTGGCTGTCGCTGCTAACCATCT
CAATTCCTGCACTTTCGCTACTCCAATTTTCCTGCCTGGAATCACCTTCCAACATTTTCTTTTCACAAAATCTCATCCTTCAGAATCCAGCTCT
GTTGTCACCTCCTCCAGGAAGCCATCCCACATTCTCCTAAGCAAACTCACTTGCCAGAAGACTTTTGTCCTATTCAGGCCCTTAGCATGGTGTG
CTGTGAGGACTTCTTCACCGGTTCACCTTCCCCACTAGTCCAGGAGCCCTGACTTATGCAGTGTTTTATCTCCAAAAGTTAGAATAGTGCTAGT
ACATAGGTTGTGTATGCTCGAGGTCTGTCTCGAAAAAAAGAAAACAGGCAAGTAACAGGTACAAGGTCTTCCCCATTGAGAGGGGAAAGAAGGA
AAAATCTACATTTTGAAAAAATGAGTCATGATCACAATGGCATTTTCTCACCATGGTACTTCAGTACTCCTTGCTAGCCATGACAGCAGGCACA
ATCCCCCATACCTTCCACTTCTGACCTATCCTTCTTGACATCACAACCTCTCACTCTTTCCCAACACTGCAAGATATGAATGCTATAGTCAGAT
GAAAGTGTAACCTCAAGGGGTCCTTCTGCATTAAAAGTCCAGCCACCTTCCCTCCTCTCTGACTCCTTCCTGGCCTTGAGGTTCAACTGAAATT
CCACCTTCTCACTGAAACCTTTTCTGGCTACTTTAACCTTCATAATTTGTTTTTCCTCTTAACATCTACAATACTTAAGTTCTTGTTAGAATTT
AATTATGCATATTTTGAATTTTACAACATTTATTGGCTACCTTTATTACAGAAGTAATATATTTATATTACAGAAAATTTTTTTAAAAAGCAAA
AGTAAAACCACTTATAGGCTCTTTATTTCAAGAGAACCACTTGAACACTGTGCATATAGCCTTCCAGATTTTTCCTATGCATGCACTGGCAATT
TTTTTTCACAAATAGGATCCTATTGTAAATAGTTATACAAATTATTCTTAAACTATACTAACAAAATATTAATATATCAATATACATAAATTTT
CATCACTAATTTTTTTCATTATTATTATTATTTTTGGTAGAGATGGGGTTTCACTATGTTCTCCAGGCTGGTCTCAAACTCCTGAGCTCAAGAA
ATTTGCCTCCTTCAGCCTCTCAAAGTGCTGGGATTATAGGCATGAGCCACCGTGCCCAGCCACCAATATTATTTTTGATGGATCCATGATATTC
ATATTTTATATATGAACCACCATTTATTTAGCCAATCATTTCCTGTAAGGCATTTGGATTTTTCCATTTTCTTTTTGCTATCATACAAAAAAGA
TCTGTACATTCTTAATTTTTTCATTAGTATAAATTATAACACATACAATTTCTAAATAATTTTAAATATTAATATATAAAAGTAATAAAATCAA
ATACAAAATTACATTTTTCAATTGTTTCATGTATATTAGTTTTGACTCCTTATGTAGATTTAAGTTCCTTAAGGATACAGTCCAATGTTTCTTA
ATTTTTCACCTCAACATGTAACAGATGCTCAGTAGTGTATGTTGAAAAATTAGTTTATTTCATATACCATATTTTACTAGTTTATTTCATATAA
GCTTTTAGATAATAGTGGCATCAATTCTTTACTATAGAAGAAGATCACTATAGATAGTAATATAAGAACATCACTTTCTTTTAGGGACTATTTC
CAAAGTCCTTCTTAGGAACTGAGGCAATCTTTGAGGACATGAAGATGGGACAGATAAGAGATATACAGTTTGAAGGAAAAAGGCTGCCAGCCAA
ATTTAACAATAGCTAGAAGCAAAATTTTTGCTTTTCTGGTTTCGATTGCCCTGATCATTTTTCAAAACTTGTGTCAGATTTTGTACAATGAGAA
ATCTCTTCTTGGCAGTGGTGTGTCCAGAAAGCCCCCACGAGTGGGCCCCCAAGGTCCTCTGTGCCGTCCAGCAATTCTGCCACATCCCTGGCAC
TGGTTCACATCTTTTCTCTATCCCCTAAATCTATCCTTCCCTCCTCCACTATCAGTGAACGGTCTATCTTCTTACTCCACTAAGAAAACAGAAT
TCCTCAGACAACGGCTTCCCATACTTCCTACCATGATATTCCAGCCTCCCTGCACTTCCCCACCTGTGCTGCCCTTCCTTCTGTTGGTTGGGAT
GAACTGGCCCCTTTCTCTCTCAAGCAACCTTCTCAGCTTCCTTGTGGGGATCTTTTTTTCTTCATCTTCCTGACCTCTAAATGTCGGAGTCCCC
CAGGTCTTAAACCTTAGACTTCTTCTCTTTGCTCCTCTTCTCCACCCATGTTTCCAGTTGCTGTGTTCATGACACACAGATTTCTATCTCTAGT
CTGGACTTCTCCCCTAAATTCTAGATTCCCATGTCTGATTACCTGCTCACCTTTTCCACTTAGATGTCTGATAGACATCTGAAATGTACTATAT
CCAAAACCAAATGTTTCACCATTTCCCCCATACCTGCTCCGCCTGGATAAATGAACTCTCCATTAATAAGCTGTTCAGTCCAAAATTCAGAATT
TCCTTTGACTCTTCTCTCATATCCTACAATGGAATCATCAACAAATCTTGTCCGCTTTATCCTGAAAATATATCTGGATTCCATTTATGGCTGT
CATTCTAGCATTCTATTAATAGTTTAAATCACCATCACCTCTCTAATGACTTATCTCAATAGCCTCCTACTTGGTCTCTCTGCTTCCATTCCTG
TACTTCCCGTGACCCAGCAGAGTGATCCTTTAGGAGTTGACGCCAGGACATGTTCCTTGTCTGCAGAAACCCCTACAGCATCCCACTCCATTCA
CTTTTGTCAGATTTCATTCGATGTTAAATTTGCCCTGCCATGCCTTATTCAAGGTACCACATTTGAAATTCTGTCTACTGTTCTGCCTAAGAAA
AAATAGAATATTTTCTCAACATCATCAAATCCTGTACAGGGTGCTGGACAGCAAGAAAATCAAAGGCTCAkCAACTGCCCATGTCTTTAGTCCC
TCTTCCTTTCCTCATCTGTTTCCTGTATATTTTAATTTTTCCTGTTTTATTTTCTACAATCAAGAAGATTTCTATTATAGAAATAAAGTTTATT
TGTTTCAATGCCATGATACAGATTTATTCTCCCTGGAAATATCATGCTTAGAAATGAATCACAGACAAAGCCCATGCTCTGGATCAACACACAT
GTCTAATTATGTAGGAAAAAAATGTATATCAGGAAAGGTTGAATGCTCCAGGCATGAGAAATAAATTGACCTCCACTCAACTTACTGCCATCAT
TATACAGAGGGAAGGACCTGGATCTGTTTCACATCATAAACGCCTAAATTGCCACAGCAGCACAAGCCCAGGAGTGGCCATGCAAACTCATGAT
CGAGGTGCTAAGGCTGTCCACAGCCCAACCTCTGCAGCAGTACTGTTAAATGAGTGTCTAGTACTTGACTTACCATTTTAATTTCACATAATTC
TGAATCTATTTTTCGGCTTGAATTCAAATAACCCACTTCTAACTACCGAAAATAAAGTAGAAAAATGAACTCACTACCAGACTTCAAAGCTTAT
CCAAAGCAAAGATTTCGTCTTACAGCCAGAGGTGCATGATTGCAGAGCTGGATGTAACCTGAGAGGCTAACTACTCCTAATTCAGCCTCCTTGA
ATGACTGGATGATGCAACCTATCACAGGTGTTTTAGGTTTTTTCATCTCTATTTAATGTCCCACCTCATGCTTGAAAATCTCAAAGTGAAAAAG
CTCCAGTCTGAGTCTTTGGCCAAGCAGACTAACTGAAATGACCTGTTAGCCTTTGTTGTATCCATCTGACAAGATCAGCTTGTAGAATCCAGAA
TGGAGGTGGGAGATCAGCTGGCAGCCTCATTTCCCTCCTCAACCACCCCTACGCTGATGTGCCCAACTCCACTCACAGCTGGGCAGCCACCGCT
TGCTTGAAAATAAATCAATCTACACCACTCTCATACGGATGCTCTCAAGCATCCCTTGTTGTGAGAAAAACATTTATTCCTGCTACTAAAATGC
GTAAAGTTATCTCACAAACACATACTTACAACAATGAGGAATGAGAAACAGAACCATCCATAAAACTATAAGAAACGGCCTGGCCAGGGCAGAC
CAGGAATTAGTACTCTCTCCTTGCCAGGGGTCAGGCAGGGACCTCACAAGCAGGGTGTTTTGTCCTAGGGGGCACCAGACCAGAGGTCAGGACA
CTGAGGGCTACTCCTAGCTCTAGGACTTTTCCTTATCTGAAGGCCGGGTCGGTTAGCAGAGAAAATCTCACAGTCCCGTGCCAGACCTCCACGC
AGGCACTCTGCAGTGCTGTTAGAAAAATTAGCTCAGCACCTTCAGCTTGCTTTCAGCCATCACTTAGCTTTCCACACAGACATTCCAAATGGGG
CCTTTCAAAACTCTGCCCTCAAATGAAGGTAGTTCAGAGCAACACTTTAGATCATATCACAAGACTCCCATGACGCTTCACTGCTTCCTCAGCA
TACGCCAGTGCCCGTTTTACAGGGGGGATTTATGATCCTTCTCTCAGTAGAGCGAGCCAAACTTTTATAATATTCATTAAAAATCAGCACCACG
TGTAATAATATGGAATACTGCCTGTACACAACAGGGCCAAGTTATAGGTGflTAGGGAAACGTGGCAGAATTTTCTGGCCTTGGCAAGAGGTAA
AGTTGCAGGCACCAGCACAACACTAACACAACCTTATTTTATTGCAAATGTACATTCAGCCTAAATCCTAATTACCTTCTGTAAAATCCTAACC
ACCACCAAGCTTTCTTCTGACAGGGCACTCACACGACGGCCTTTAAGGGCAGCAACAACATCCTAAGAGCCGCAGAAAGGAAAGGCAGGGGAGA
GTGGCTGGAAGGCAGTAGGAGCTGGGCCTCAAGCCCGGGACGTTGGCTTTTAATGTCCTCCTGAAATTGACCACTCTCTTTCCAAAAACACTGG
CTTGGGGGCTTAAAGGTTCGCTCAGTAGGGCAGGCGGAGGCCCTCCTGAAAAGGATTGAGAAGTCAACATTCAAAAGGCTGCTTTTACTCGCCC
GGTCCCCACCCAAAAGGGACTCCGGTCACCTTTGTGGGGGCCAGTGGAGCATCTTTTCTTGCCCTTCCGCGAAAACGCTAGCTAACCCTGGGAT
CCCCGGTCCCGACGTCTGCTCTCCTTCCCCAGGTGCAGCACCTAGGGCTCTGGCCCCCTCCCCACGTGCCACACCAGCCCTCACCACTACTCTC
ACCCTGCTATGCCCCCAACCCTCGTCTTTCGTGGCCGGGAAGGCCAGGCCGAGCGGGGCGGTCAGCCGGGCCGGGAGGAGGGGGCTCTCCGGGC
CGCGCGGCCGCACAAAGCGGGGAGATCTGCTGCTGCGGCGGCATCGAGGCGCCCCCCCTCCCGCGAGCCAGCGGAGCGCGCGCGCCCGCCCCCG
TCCCCCGCCCCCCCCCCCAGCCCCCCCACCGCCATTCGCGGAGCGGCTTACGCTAGTCGCCGGGCCTACCGCCCCCCAGCGGCCGGGGAGGTGC
GCTGCCCGGCTCCCGTAAAGTTATTGTGAATGGGGAGCGGGTGACGTCAGCGCCGAATCTCAACAATGTAGCGATTGAGAGTGTGGGCGTTCCG
GGGAGACCGCAACCCCCGCCGCCCGCAGCAAACAGCGCCGAGCCGCCGCCGCCTCAGCAGCACCAGCACCAGCAGCAGCGGCAGCAGCGGCCGT
GCACGCCCGGGCTGCGGTCGCACAGCGCTAACGTGAGCGGCCGCCGCCCTCGCCACCCCGCCTGCCCACTCCCGCCGCCGCCCCGCTCTCGCTT
TCCCCCCGGCCTCCCCTCGCCCCTTCCCCTCCCCCTTCCCGGCGCACTCGGGGGGCTGGGAACGAGCTGCCATGTGATGCGCGTCCCCTCCGCG
AGCTTTCGGTGACCCACGAACTGCCCACCTCGCCGCCTGCCGGCAGCGGCCTCCGAGCCGGGAAGACGCGGGGAAGAGGAGGCGCAAAACGACG
CAAAGTTCTCCGGCGAGGTGAGTCCCGGGCCCCGGGCCCCCGGCCCCGCCGCTGGGCGGGGTGGCGGGGCAAGTTTGCGGGGGGAGCGGGCGCG
CGGGGCGGGCGGGGAGGCGTGGGGAAACGGCGCGGGAAGGGAGCCCCGGCCGCCGGGCGCGCAGCCGCCCTCCCCGCGCCCTGCCCCCTTTTAT
GGCATTTTCTAGCAACGGGAAGGGGCTGCGAGCCCAGCCGCCGCCCGCGCCGCGCCGAATGTGTGCTCTCCCTCCCGGCTGTTTACGGCGGCCG
AGGCGCATTGTATTTTGCTGGCGTCGAAGGGTGTTTTGGAACAGCAGAGGGAGGAGGACCACAGAGTAATAACTCAGGCATCGCGAGGGCGGGC
TGCAGGAGGCGCGCGTCCGCGCGAGCCGCAGCAGCTGTCAGACCCGCGGCCCTTCCCCCGGCCCGGCGAGGCCCGGGTGTCCCGGCCCCCAGCC
TGCCATCCCAGCTCCAGGCCGGGCGGCCTCCTCCTTAACCCTCGGCGTGCGCATCCCGGGCTGCTCCGCCAGGACCTTCGCCGCGGCGCCTTTG
CGCTCAGCTGTCAGCCGCCCCCGGGTGGCCCGGACCACCGCGACCGGCGGGGAATCAAAGCCCAACTTTAGGCTCGCAGGAAGAGGCGAGCTGG
CGGCCTCGCCGCCCAGACCTGGATCGAATCTCTCCTAGCGAAAGATCGGGTTGTCCGAAAGCGTCCCCCGTAGCTAAGACCTAAGGGCGCCAGG
CTTCTGAGAGGGAAACCTTGCACCTCCTCTCCCACAGATCCTCCATGAAGTCAAGCTGCAACACACACACACACACACACACACACACACCCTA
CACTCCAGTCTCCAACCCCCACAAGCTTCACCCAGGAGACTGGTTTATGAAGGGGACACTGCCCTCCCCGTCCCCGCGTCGAGGCGCTCCGTGG
CCCCGCTGTGCTTCGCTCACCCGGCGGGTGTTCGGGAGCCCGGCGCCGCTGGAGACGGCGGCGGGCGGCGCTCACGGGCTACCCTAGGTGCCCA
CGAGGGGAGAGACTGGAGCGAGCATCTCGGCCACCTCGGTCTGCCCAAGCATTTGCAGGAACTCGGACCGTGAGGGGAAGCCTGCAGCGCCGGG
AGTGAGTGTGTGAAGCGGTGGCACACTCCTGCCTTCTGGCGTCCCGGGCGCATGGGGCATCCCCAGCACTCTCCCGCGCGTAGGCGAGTTTGGT
AACTTGAGGGAAGTTCCGCCGCGGCCGCTGCCGGGGTGGTTTGTCTGTGGCCCGATGAGGCCCCCCTCGCACCCTGCTCTCCCGATCACCGCCG
TCGCCGTGACCTGTGGCCTCCAGGAAACGAGAGGCACCGGGGCGCCCCACCCGCGAGACGGACCCGCAGTCTCCCGGCGGGCCCCCGGGCGGCG
AGACGCGGCGTTCCTGGTTTTCACCTTCGCTGTCTAGTGCTGCAGTCTCTCACTCTCTGTAAATTTCATCTGTTGAGTGTATTTAACTAAAAAG
GGTAATTACTTTAGATAAAAATCCTTTCCTGCCTAGTGGGAACCTTGGCGGAGATGATGCCTAATGAGATATTTTGCTTTTGTCTGTTTAGAGT
AAAATTAGAGATGTTAACGCTGATAACGGTTTTCTCAGATCATTAAAATGTAACATGTAGGAAAGGCACGTCTTGCTGCAAAGGCTCGGGCTGA
CATGAAAGAAGCTGAGCGTGAAAGGCTGCCCCTCCTTTGGCGGAGAGGGCTATTTTGCTAAGGCAGCGGGCGTCTTGCTTAAAATGTGAGATCG
CCCCACCCTGGTTCTCGGGCACCTCCCGAGTAAACGGCGTTTTTCATTCTTGCACGTAATAATAAACGTGAGTCAAAATGACATCTTGTTAGAA
TTAGTCTTTAGTCTGTAAGAGAGATTGCCAAATTACAGTGTTGCGTTCAAACTGCTCCACTGAAAGGTCTGTCAGCATTTCCATTATAAATTCA
GTTTTTCTGGAGTTTATAATTTCACCACAAAACTTTGAGTGGCTGAAATGTTTTCCCTTCTAGTATTCTGGTTTTTGAAAGAAATTTATTGATT
GCCCATTTCCAACGTTTTTTTTACTCTCGAAACCTGAATATCATTGAAATAGAGCGAAGTCCCACAAATGGAACACACAACCATGGAATAAAGT
ATTTTTGTTAGAACATAACTTTATTGGTGCAGAGCCGTATTTTCGTTTTGCATTGCAGGAGGCTTCAGGTTTGCCATTTGGTAATCATGAATGT
GTTGAGTAAATTCTTCTGCTGTCTGTCTATTCTGCAGGTGGACTGAAATGTCAGTTGGTAGTGTGTTTGCCAGGATTACATGGAGACACACACT
TCTCACTTAAGTCTGTGTCTGAACTCATAGCTAAATTGTGAACACTCCTGTTAGTTACTTTTTTGGTTCTTTGTATGTTGCATCTCAGGATCTG
CTATGAAGAAGAAGGGGTGAGGTGAAAGAGAGGGAGGGGATCAGGATTCACTTTCTGTATTACCAGTGCCTGGGAGAAAGCCATTTATTATTTT
CCTATTGAATTATGCCCTTTGACTTAGTATCTTCAGGCAATTCTTTTCCAGTAGCTCACCTCTGGCTGCTGTGTAAGGGGCTTAATTATTTGCA
AACTGCCTTGAAATCCCTGGATGAAAGGCACTGAATAAGTGCACACTATTGTTATTCAGATATGGAATTTAATGATCCATTATAGTTCATCAGG
AAAATGCACTTTGCAGTGATGGTAGGAAATGTTTCCACCTGATAGAGGGTAATAATAACTCCTTAAAAGTAGATTCAGATTACAGATCAGACAA
TTAACTCTAGCCATGTGCTCTTCAATTTGTTCCAATTCATTTTGTGATCAAAGTGAGTCACAGAGGGCCAGATGGTCAGGTTCATGTTCAGATC
TCTCCTAGGCCAGCCCTTCACTTCTCGCCCCACTGTCTGCACAGCCGACAGGACTTAGTTATTCATTACCGCTTGTGAGCTGTTTCTCAGAATT
CCTAATCGAGGCTCCTGTGATGCCAACAAAAGGGCTCAAGCCAATCTGTATTGTTGAGAGCAGTTTAATTTTACTTGGATTAACTTTCAGTGTC
TCTGGTGTGGATCCAGTCTTAACAAAAAGGAAAGAGACCCTACTGGCTCTCTATCTCTGCTGTGCCTGGCCCCTCTACTCTAGTTTTTGAACCT
CAGATTTCAGGGGTGTGACATCTAGCTTATTGTAAATGCAGGCTTGATTGTTAATGAATGAGAGAATACTTAGATAAATAAATATCTTCCTGTG
TGTCCAGGGGGTGAGAGCCAGTACTAGCTTCATGGGCATAAGACCTGTGCAGTTACATAGGCCCCCTTCCTCTTCCCTGCTCAGAAGGACCTCA
TATTTGGTATAAGGTTCTGCTGTTTTCTTCGGAAATTCTTAATAATTTTTGAACAAAGGGCCCCTCGTTTTCATTTTTCACTGAGCCCTGCAAA
TTATGTACTTACCTGGTTCTGGTGAGGAGCAGGGCATAGTGTGGAGTGGCAGGCCGCCCCTACTCAACTCATTGTAGACTCTTGCTAGGGAACA
GTTGGTAGGACTACTGGCTTTGTGTTGCCACATCATTTGATTTTTCCAGGGGAAGCTGAATATTGGATATTTATCTGCAATTTCCTGATTTTTA
AATATTGGCTCAAATCTTTAAAAAATTTTTGGATGAAAGCATATGTAACAGCTACTGTCGGCCTGGGGGCTGCTTGTCTCCCACTACTGAACAG
ACTGAAACATCTTTTTTTGTTTAATATCTTTGTGTGTCTCTGTTTTCTAAAGGCCTGGCATATAGTGGATGATTTCTCAGTATGCACCCAATGA
ATGGTTACAACTACCTCCAAAATACAAAGATGCCAAAAAAACAAAACTTCAAATCAACATTGACTCCCACTCAGGGATTGATCACCTTCCTTTT
TAACAGAGAATTCGACATGAAAGGCCGAATAATTTAATACCATGAGTACAGTGTGATTCCTTGCAGGTGAATAATCCATTACTTTTGAACCACC
TGCCCTCTATTTAGTTGTTACTGACCACATCGGGTAACTTGGCTGGGTAATCCCTGACGACCTCCATGGGAGTTTGACATTTGAGAACACTCAC
CAAAATAATAGTTTTGATTTACTGAATCCGCACCATGTGCCACACCCAGTGCTGACTACCTTGCCTGAATGTACTTCATTCATTCCTCAAAGCA
ACCCTTTGAAGTAGGTGTCGTGCCTGCCCATTCTGCAGAGTTGGAAGAACTAATCTCATGTTGCAATGAACTTAATCTGAATATAGTGCATGTT
TTCTTGAATGTCTGAAGCTTATTTCCCCATTCCATTACACAGTCCAGTCCTCAATCAATGACTGGGCATGCTGTAGGACTGTGACATACACAGA
ACATGGTCCCTGCCCTCACATAGAACAGAGAACAATATAAAATGTAACATATTTGTCAAAATCTGCAATTCAGATAGCAGACGCTGTAAATCTG
CCTCCCTGTTTTTCTCCTTTCCCTGTCTGGATGTTGAAGAAGTTTCAGCGACATATGACCCTGTCAGAGGTACTCACAGTTCACAAGTCAATGC
TGGTTGCAAAAATTGGAATTTCTTTGGAAAACAACACAAGCTTTTGGCAGAGCTGGGCCCACATATGGGAACGCAGCACCAAGGCCTTGCGAAT
GACGGAAAATCGCTTCTGTATTGTTAATAGCAATATATGACCTCTGCTGTCCTCCTATCTTTAAATTTTATGTAAATATTTACAAACTGTTCAT
GTCCAAACTGAAACCTGCTATGAACTAAACATTTTGTAAACTCAGTAACATTGCCCAAAATACAACTCAACTTTCACCTTTTTTTTTTTGTTTG
TGATGACATTTAATTTAAAAAAAAAAGACAGTAGTTGCTTTTTTTTTTCTTTTTTTTTGTCAGTTCAGGGTCTTTTAATTTTTTCCCTTTACTT
TTTTTTTTGTTAATTTCAAATGTCAGTCTATCTAAAACTGAAACTTAATTTTACTATCAGCATGCTACTCAGCTTCCGTAACGCTGGAAATGTC
CTGCGAATCTTACCACTATGTCTTTTCCAAGGGCCATTTCATTTCTAAAGAATGTATAAATTGAACCTCATCCTGCTAGTGACACTACTTCAAA
ATTCAGGCAGGAATTTTGCCATTTGTTTTTCCTTGAGCTATTTTTTTTCCAAAATAATAAATCTTCCCAATCCAAAAGCATTTCACATCATCCT
TCATTCTAGTCATTGGAACTACAGCCAAAATGCCTCTCAGTCTTCCCCAGTGACTTCATAATCACCGTTTCTTCAGCATATTCCCTGGTTGACT
TCTCCTTTGTTCCTTAGCCTCATAATGAATTCCCCTTTGGTTCTGAGATGTGTCATTTTCCTCCCTGACCTTTTTGTTCTTTTCCTGAACGCTG
TAGGACATGCTGCTGCTGATGTGATGAGAGCCGGCGCTTGGTTGCTAGGTCCCTCCTGTCCTTGTGTCAGCTTTCATTGGCTCCTTTCCTAAGC
ATTTAAATCCTCCACTTTCCAGTCCTCCCATTCATCTCATTATTCTCTTCATGTGTGCCTGAGCCTGTAGCTGGCATGTAGACAAAGTCCCAGT
TAGTTAGAAGAAAGCTTTTCGAGTTTCCAAGTCTTCCATCACTCTAGTCTTCCGCCATCTTCTATTCTCCCTCCCCTGTCACTTTCTGCAGATA
CTTCAGGAATTTCCTCAAGACTTTCCAGCAGTCTAACCCAAAGACAGCTTAGACCTTCACTTCGGATTTTAAAGTTGGGAGATCCCAATGTGAT
GATTTCCATTCCACAACTAGGAAACAAACTGAATCTACATGCTCAGCATCTTTCCTTAGTATTTCAGTATCCATAGATTTTTGGCAATTTTTCT
TTTTTTCCTATCCTGTATTCTTCTAAGCAACAGAAGCTCGTGGATAGTGCAAAATGGCCCAAGTGTCCAGAAATACTGTTGCTTAGAGGCAGAT
GCCTCATTCATTCATTAAACAAATATATACTGAGTATCTCTTACATGGCAGCCATAGTGTTAAGTGACCACAGTGCTAATGGGGAGCAAACCCA
GTCCTGGCCCCTGGTCTCATGAAGCACGTCATCTGGTAGGAAGAATGGCACTGATCAGTTAGTAACAGATAACCCACTGCTCGTGAAGGAAACT
ATTTCATACACCAGAGTGTCTAATGGGCAGATTTAACCTGGTCGGGAGGTTGGGGAAGCCCTCCCTGAGGAATTGTGGAGTGACCTTCCATCAG
GGACACTCTCAAACTTGACATTCACTTTTTCTCCAGCTTCCTAATCCTATTAATTCACTACTATCTTTCGCCCTTTGGAGTATTGCCTAAGCCA
TGCTGGAACCTCTGGGGCCATTTTGGCAAATAATAGTTCCTGTATACAGAGTCCAGAATTGATTTATTTACCTGGGTCTTTAGAACCTGATAAA
AACAGAAGTTAACTGCCAAGAGTACTGTTCATTTCCATACTTGGAAAAAATACAAGTTAACATTCTTATTTTGAACATATTTAGGTTGGTTTTG
ACAATATTTGAATGATCACAAGCTACAAAGATATTCTCTCCCAGTCAGCTGATGTGTGTAGGGCCTTTGCTGAAAAAGTGACTCTAAATAGTCT
GTCTGAAGTCCCTGGCTACTCCAGAGCAGAGGGTCTCCATCCTCTGTGGCCCGAAGATTATTCCAAGCTTGTCCAACCCATCGCCACCAGGCCT
CTTGCCTGTTGAATGCGGACCAACACAAAGGTTTTTTGTTTTTGTTTTTGTTTGTTTGTTTTTTCTTTTTTCCTATTTTTCTTGTTTCAGCTCA
TCATGTATCATTAGTGTTGAGTGTATTTTATGTGTGGCCCAAGACAGTTCTCCTTCTTCCAGTGTGTCCCAGCGAAGCCAAAAGATTGGACACG
TCTTATTTAGACCATTCTTAGATGCAAAATTAAGGAATTTTGACAGCATCTATTTAAAATAAATTGATTATACTTCATGCTAACACCCCTCTAT
TTTCTTTTTCTTTGATGATAGTTAACTTCTATTGAGAGCTTCCTCTCTGTGCTGCTCATATTAACTCACATAATCCTCAGAACAACCCAGGGCT
AGCTGTGATCACTAGAAGCCGCAGCATAGGTGTCGCTCAGCTAATGAATGGTAGAACTGGAGTTCGACACTAGCTGTCTGATGCTTGGGCCTGT
TCTCTTACCATGTTATGGCTCTCCCTTTTCCTTTTCTTCTTCATTTGAAGTTGGAACTCTCTTTAGCAGTTCCCAGAAGTAGAAATAAAGGTCA
TCTCACTCTAAAATATTGCATGTTTTGTTGACATCTATCTTAAAGTTAAAAAATAATTTCTCAGTAAATCTGAGTGAGTATATCTCCTGTCTTT
CACATGGCCTGCTTTCTAATAATTGCATTCCTTAGGTTTTAGTGTCCATTTAGGGATCGGAAAGTAAAAGTGATGCATATAAAGGCAAAAGAAG
TACTACGCATATAACTGAAATACCATGGCTCTGTCTCCAGGGTTTACTTGTAACTCACACTCCTACCCTCTTCTTAGGTGCAGGGAATTTGTTT
TTTCCCTTTTGTTTTTTGTTTTTTGTTTTTTTGGTGGGTAGGAAAAGGTAAAAAACTATACCTGTAAGAGGTAGAGTATTCTACCAAGGAGGAA
GATGTTCATTCAGAACTAATTCCATCAGAAATCCTAATTAGAAATATTAGCTACCAGTAACAGATAAAAGGAGGTAACCTTTGTTCTCATTCTG
GTCAATTTCAGGAAGAGATTATCTTGCCAGATTAGCATGTTGCAACTCTCAGCTGGAGATTTGAATGGTTTTAAAGGACTCAGCCACTTGGTAT
GGCAGTAACCCCCAATTACCTCAGGTTTGCAGGGTCACTGTTTAGAATGCTGACTCAGCTCTGCCTGGGCCAGACACCGAAGTTGTCATCTTTA
GTCAAGAAGCATCATTCTCAGGAGCCACTTGAAACATTAAGCACACATTTGAAGCTCAATTTGGGAAATGATCAAGTGTATGAATGTATAGTAC
TGTGCTTATTTTTCAGCATTTAGTTCAAATTTTGGACAAAGCTAAATGGGAGATCCTTACTGTGTCAGTGTTGGAGGTTTTAAGTGATTTAAAA
AATCAAGCAGATGAGTGCATAAACATTTCTATGCAAACAATCTTCAGCTTAAATTAAAGCTGCTGATTTAGTGTGAGAATTACTTGCATTGATT
TGTAGAATATCTATGTGGGTTCAAGATTCCATATTATGCAAATGAATAAGCCCTGAAGAGTCAAACTGAAAAAAAAATGAAATTAACTGTGAAA
GATATTATTACCCATTCAGCAAGAGGAAAATGTAGACAGAGTTAACCCTTCCTTTTCATACATTTTCTTGGGAAGATAAGTGCCAGGGATGATG
GTCCGTGTCCCAGATGTAAAGAAGCTAGGCACGGTTTGCAGCCAGTTCCCCCATCCTCCTTCTGTGCTCACTTTTTTGTTTCATGCTCTCTTAC
CTTTTGGCCACCCAGTCCCCTCAACTAGTCCTTGTCCTTCCCTTCCAAAACCAATCTCAGAGAAAGATTTTATCAACACAGTTTTACTAATATA
TAAGTAACTGAGCATACTTAATGTGTTACTTTTCTGAAGCATCAGCATGTTAATAGGAGACAAAGCCAAAGAAGTAAAACCCTAAAGATAAAAA
CAATAGAATTTCGCACACTGGTAACCTGGTGATAGGAGACCATTTCTGAATGGAGAGAGGGCTCGTGATAAATAAACACAACCCTAGGCAGAGA
ATATAGGCAAATGCATTACAGTATTTAAATCAAAGTAGTATTAAAATACAAAGAGAAGATTATTTTTAATAATACATTTGTCAGTGAGCATTTC
CCGCCTTTTGCCGTACATTGGAGTTGATCACATAAACCTCTATAGCAAGATGGTATGTATTTAACATTTAAACAAAGCTTCCACGGAAAAGCCA
TTTGGTTTGTCGTTAGCGATTTTTGTTATTCAGTAGCAATGAACCTGAAATTCTATATTATCTTTGCATGTTGAATTTTAGAAGAAAAAAAAAG
CAGCGGATCCAACTTCACTTACCTCCCCACCCCAGTTGCATTGATACAAATTGAATTGATAAATTTATTTCAAAATTGGTCTGTCCCAATTTGA
CATACCACAAGCATAGTGGTGTCAGCATGGTGCTGACATCTGGACATTAGGAGAGTTGGTTGATTAATTAAACTATACTTATTTTAGATAGAGT
TGTTGGCAGGTAAATACCTGGCTGTAGAGTCAACGCCCTTCAGTCCCACCTCTCCCCCACCATACCCTTCTCCAGCAACCATGCTATGTTGAGT
TCATCGCTCCATCTAGTGCCAGTCTGTGGAACTGTCTTGCAGGACTTCACTGTCACCTCCAGAGCTGGGTATGATGAAGAGTCCTCTTTCTCTG
GGAACACACTGTCTAGCGGGGAACTGCCCTCTAGTTCCTACCTCTCCTTTGTTTTTGCAGTTTAGTTATACCTCCGTGTCTTTCTTTGTTCCAG
ACTTAATTTGTTTCCCTCTCTCTAGTACCCCCTCTTTGTACTTGTTTCTCCTCCTTTTTTGTTTTCCAACTCTCAATTTTTTTTTTGGAGAACA
AAACAGTACTTAAAACCGGTAAGTATAAAGATTTTTTTTCTAACAATACTTTATGCCAAAGTAAGAGAATTCTATGCATTTTAAATGAAACTAT
CAATTGAAACCATGTTAGAGAACCAGAATGACCCTAAAGTTGAAGTCTGAAAGTGTCACTTGGAAGACTGTGTCCCTTCATCCTCCTGTAGTTA
GACATTTCCTCAAACACAGTTAATCAAGAGTATTTTCTTTTAAATGGTTTTGGAACTATCATTGTAGTATCATTTTCTTTTTAGATTATAAATT
TAACCTCTCATATTTTAAGTTCAAGACATTTTCACGGACTATCAAGGAATCCTAGCTCATTGGCCTGGCCCTATTTCTGTGGGAAAATGTATTC
TCACTTCCACACAACCAGTCTTCCTGCAGATTTTTAGGTCCCGTATAAAACGAGAGAACATAGATGAATGAGAGGCATTGTCAGACAAAGCCTC
GCACATGAGATCTCAATTAGCATACAGGTTTTAAATTTCCCACATTAAACAGTACATTTTAAATTTCCACTTATGTTAAGCGTGTTGATATTGT
GGGTTTGAAAGTAAGTCCCCTCTGAAAAACAGGAACTGTGCTTGTCTGTTACCAGTTCTTGTGGTCCATATGCTAACTATTTTGATTTTTCAGA
AGGGAGGAAAAGCAGTTAAATCTAGTTAAAATTAAAACCAGTTAAAATTAACTCGCTCGTGACATTTCAGTGCAGCTGTTCCACACATAGCAAC
ACTAAGAGTGAGTTGTTTATTACCATGATTAATTATTATTAGTTGTTACTTCTTTTTGAGCAGTGGCATAGATTATTTATATTTTTGGTCTAAC
CTTGGAAAATAGAAACTGCAAGCGTAGAGAGGTTCCCGTTTCCTAATTTGCATGTACCCTGTTTTTGTTTTTGCCAGGTAGGTGTGTGCATCTC
AAGTACACGAGAGTAATTTAGCATGTCAGCACTTTCCTACCAGCAGTGCTTGCTGACTCATGCAGCTGTTGTAGCACTCAGCTGGCCGCACTGT
AAACTGCCCATAGTACCAGCACCGCCCTTGGAGAGCTCCGGGCTGCTGGGCTGGTTAGCTACTGGGAGGCTATTTTCAGATCTGTGGTCACTGC
TGAGCTGGGTCCTCTTCTCCTGCCAGCAGCCAGACACAGCCTTCTGGTTGCACCGGAGAAAATTGGACAAATTTCTACCTTTGTAGGGACTCCA
TAAAGATTCATAGCATTTCTGGATATCCCTCAGGAAAACTTTTTTTTTGCTTCACTTTATTTTTCTGGGAATATTTAACGGGAGACGCAAAAGG
GGCTGATAATAAATGAAAACGGAATCTGCTGTTATTTCCTACTAAGATCAGAAAGAGTTTTCATAAACCTTTAACTTACTTACGCTTTCTTGGC
GTAACTGAAACCTGACCCACTTCTCCCTCAGTGCAAAGCAGTGTGTCCTGAGTAGGGAAGCAGGGGCGAGGGTGCAAGTGACTAGCCTGACATT
GTTTTATGTGGCTGAAGTCCCTAAGTGATGACAGCTTTTGTTTATATCCGTTCCCTGTTATTGAGGTTAAAAAACAAAACAAAAAACTTGACCT
CAGGTCATTTTAAAGCTAGCATGTATTTTCAGAGATGGTTTCACTGTTTGTTTTCAGAGTTCAGTTTTCCTTATTTTCATCCCAAAGTGTGAAA
TGTTGCTTTTCTGAGCCTTCTAAATAAACTTCCTTTTGTAGATACAAGTTGATCCAATCATCATAAACTGTCTTGAAAAAGCATGATTAAAGTA
AGATCAGCTGGGGAAGGGAAAGCTTTGCACACCCTTGAGGAGTTTGCCTTCTTTTTCTTAACTTTCAATAAGCATTCTGAAGCAGCTTTGACCA
GTAATAAAGAAAAGCCACAGTGACTGTGTGTAACATGATGTTGATGGAAGTTCTTGGTTTCCGCCGATACGAATCACTCATCAGTATCAATAGA
ATTGTGACTTCTAATAATAACACAGTGCAAGACCTTCAAAACATGTGGTTTTAGCCCTTGCTCTTAGTGAAAGGTTGGAAAATGTTAGTTTGAG
CTTTTTTTTTTTAATCTCTTGATTTTGCCCAACTATAAAGTTGTTTTTTGTAGGAATGATGATCCCCCTGTTGTTTTCTCATCTTACTGTTTTT
AGTTTCATTATGATTAAGGAGCCAAACTCAGATCATTTCATCGTTTAGAAATCTCTGCGCTAAGCATCTCCTGTCGGGGCTGTGTTTGAGGGAA
ATGTGGCTGAAAAGCAAATCCTCCCTGAATGCAGAAAGGAAAATACTGGTGCAGACTACAATCCACTGAGCTGCGTCCCTCCTACACAGCATCT
ATTGCGGAGGGCTGTGGTATTGCTAAGTAGCCCCATAACCCTGTGAGTCATTGTCAAAGGATTCCAAGAGGAAGGTTAACAGAAAATGCGAGTC
AGAGGAAACAGCAGAGTGGAGCAGCTAGCTCAGGAAGAACTGTGCTACCTGCTGACGGCCTGCCCAGATGTCACCAGGAATTCAGGTGTACGTT
CATCTTTTTGCAGCCCATTTCCGTATGTCTACATATGGGGACATTTTTGTTTTTTCTTTAGTTTTGGTTGGTTTTCCTGCACTTTGGCCAGACT
ATCAGAGATCACTATCTTAGCTTCGTATCACAGTGGTCTTATCCCACAGCCTTTGCTTTTTGTATTTTATAGTCAAAGCAACTGAATTTCTAGA
CTGTAAGACCAACATGTATATTTAACATAATTCTTTTCCTTTCTAAGTGCTTTATTTATTTATTTATTTATTTATTTATTTTGAGATGGAGTCT
TGTCCTGTCACCCAACCTGGAGTGCAGTGGTGCGATCTCGGCCCACTGCACCCTCCACCTCCCAGGTTCAAGTGATCCTCCTGGCTCAGCCTCC
TGAGTAGCTGGACTACAGGCACATGCCACCATGCCCAGCTAATTTTTGTAATCTTAGTACAGATGCGGTTTCACCATGTTTGCCAGGCTGGTCT
CGAACTCCTGACCTCAAGTGATCTGCCTGCCTCAGCCTCCCTAAGTGCTGGGATTATAGGTGTAAGCCGCCGTGCCTGGCCAGACCTAAAAAAT
TCTTATAAAATAGTTCAAAAGTTAAAAATGCATGAGGAGGCCGGGTGTGGTGGCTCACGCCTGTAATCCCAGCACTTTGGGAGGTCGAGGCGGG
TGGATCACGAGGTCAGGAGATCGGGACCATCCTGGCTAAAACGATGAAACCCTGTCTCTAGTAAAAATACAAAAAATTAGCCGGGCATGGTGGC
AGGCACCTGTAGTCCCAGCTGCTCGGGAGGCTGAGGCAGGAGAATGGTGTGAACCCAGGAAACAGAGCTTGCAGTCAGCCAAGATCGCACCACA
GCACTCCAGCCTGGGCAACAGAGCGAAACTCCATCTCAAAAAAGAAAAAAAAAAAAGCATGAGGGGTCTTTCACTTATTGTTGGAAAAAAAAGT
GAGTAGGACTTCTGTTCACTGAGTGGTAACTATGGAGAATGAGAAAACAAGCCCAAAGTGGTAAAGACGTTTGTGGCACATAAATAATACTGGT
TCAGCACACATGTGAATCAATAAAAAAGCCAGATAACCAAAAAGAAAAATGATACTGTACATTCATATTCTTAAACATCCATTTCACAAAGGAA
GAAACCCAATTGGCTAGTAAATATATAAAAAGATGCTCAGCTTCATTAATAAACAAACACATGCAGATTAAAATCATACTAACATATGATTACA
CACTCTCTGGATTGGCAGAAATTTTAAAACCTGACAATACCATGTAAGGATGTGAATGAATGGGAGTTTTTGTATTTAGTTGACAGGAGTCTAA
CTTGGTACAATTATATCGGAAAACAATTTGCTGTTACCTAACCAAGTTCAACCTGCAAATAACTTACAACACAGCCATCTTACCCCTAGGTATA
CACCTAAGAAAAATGATTACCTATGTGCTTTAAGAAACATGAACAAAACAAAAAATAATTGATGCTGGCAAGGTTATGGAGAAAAAGGAACACT
TACACACTCTCGGTGGGAGTGTAAATCAGTTCAGCCATTGTGGAAGACTGTGATGATTGCTCAAAGTCCTAAAGATAGAAATACCATTCAACCC
AGCAGTTTCATTACTGTGCATATACCCAAAGGAATATAAATTATTCTAAGACACATACACGTGTATGTTCGTTGCGGCACTATTCACAATAAGC
AAAGACATGTAATCAACCTAAATGCCCATCAGTGATAGACTGGATAAAGAAAATGTGGTACATACACCATGGAATACTATGCAGCCATAAAAAA
GAATGAGATCATGTCCTTTGCACGGACATAGATGCAGCTGCGGCCCATTATCCTTAAGCGGACTAACACAGGAACAGAAAACCAAACTGCACAT
TCTCACTTATAAGTGGGAGCTAAATCATCAAAACGCATGGACATATAGAGGGGAACAACGGACACTGAGACCTATTAGAGGGTGGGAAGAGGCA
GAGAATCAGGGAAAATAACTAATGGATACCACGCCTAATACCTCAGTGATGAAATAATCTGTATAGCATACCTCCATGACACAAGTTTACCTCT
GTAACAAACCAGTACATGTGCATACCCCTGAACTTAAAAGAAAAAACATGGACAAACATATTCAAAGAAGCATTGTTCATAAGAGCAAAAAACT
GGAAGCAACCCAAATAAATCCCCATCAACATTCAATCGAATCAGCACATTTTGCTGTGAGGTATTTATACACTGTCATACTATTTGGCAATGAA
AAATCAACTAGTATAACCACATAThGAAGGGTGTGGAGAGGCAGCATTTCTTGGTGGTCAAGAGGAAGGATTGTGCCTGGGTTCAGATTTTGGT
TCTGCCACTTATTGTGTGACCTTGGATGAATTTCTGAACTTCAGTGTACCTTAGTTTTCTCATCTGTACATCAGGGAAAATGATGTCTACCTGA
TAGTGTTGTTAGGAAGTTTAAATGAGTCAATGTTTGTGACATGCTTAGGAGAATGACTGGCAGACAATACATTCTATATGTGTTTGTTAAACAA
ATAAAAGTGCATCAAAATGCATGAATCTTACAAACAATATGGAAAGAAAGAACCAAGATAGAAGAATATATACAGTGTGATTCTATTCATCTAA
AGTTCAAAAGCATGCAAAACTAAATATGTTATTTAGGCATACATACATAGATGGTAAAACTATAAACAAAATTAATATGATTTAATATGATTGT
CACAAAAAGCAGTATAACAGCTACCTCCACACGTCAACGAGTGGGTATGATAGAGAACGGGCTCACTGGGGGCTTCTGAGGTCCTCGCACTGTT
TTATCTCCCAACCTGCACAGTGGTCCCAAGGATATTCTTTCTTCTTAATTGTTTTTAAAAACTGTCTATGTTTTTTATATATGTGTGACCTATT
AGTAAACATTTTAAAGGATTTATGTGAGTTGTTATAGTAGCAACATGACATTAAATAGAAATAACTGTAAATTGCTACATTTTAGTTAAAAATA
ATTGTTCAAGTGCACATGGGAACACTTGCTTGGTATTATTTCCTCCACAACATTGTGAGCCACCAGTGCAGTGTGATTCTTACAGAAGGCGACA
CCTCCTTAAGGCCACATTAAGAGAGCTGTCCCCTTTAGATCAGGGAATGTAATGTTCTCACTCAACTACTCTCAGGTCTGGATGTCCCATGTGT
GGGATGCTATGTCTTGTCCCAAGGGATTTATTTTAAGAAAGATTTTCACCACAGAGGGAGCATTTTCTCTCATAAAGATGTTTAGGGGTCTGGA
AACCTATCAGTTCTAAGAGTGGCCAAAGGAAGTGGGGATTTTCAACATGGAGAAGAGGAGATGTTGGGAGAGAAAGAGTGTCTTCCATCACTAG
AAGTGGAAGCAGCCTTTCCTTGTTGCTTCCCTCTCTGTAATATACAAGTCCCTCCCTGTAATGTCTACCCTTGGAGGCAGGTTTCAAGTCCTGG
ATACTCGACATGCCCAAGCAGAGGCTGTGGGACCTCCCTTAGACTTCACTGGGGCCACAATACCCACTCCCTGGTCCCTGGACCAGCAGCATCG
GCATCACCTGGAGCTTGTTAGAAATGAACTCTCAGGGCCACCCACACCTACTGAGTCTGAATCTGCACTTTCTCAAGGTGCCCCTGGGGTCTCA
CATAAACATCAAAATTTGAGAGGCACTGGGCTAAATGTCTCTAAGATCCCTCATGGTTCTTAAGATTTAATGATTTTATAGAATAAACTGTATG
TTCAACTGAAAATTATCAGTTCATATGGTGACATTATCAATTTAAAACACCTTGGGATGTTACATGTCCACACAACCATGTAAGTATTTGTTGC
TAAATTAGTTTTAAATGGATTTGTCCAGTTTCCCCCGATGTCAAAGTTACGTTGCTTATGTATTTCGGCACCTATAAGAATTAAAATATTACAT
AACGTTGTATTTTCTTCTTTCTAACATACAGGATTAGATTCTTGCTTTAAAATTCTCCATTAATGTCTTCAAATTTTTCTTTTATATTCATTGA
AAATTCAAAAGCAGATTAGGGTTCTGAATACCTGTTAAGAATACTCAAAAGGGATATTTAAATAAATATATCTCATTAATACATTGATTTTATA
TTTAGCATATTTTTTCTTCTTATACATAGTCCATATTTTGACCTTATGGGAACCTTTGAAGTCTGAGTATTTTATAATGATTCTCCACAATACC
TCTTTATCTTTTAGATTCTAGATCTGAGATCAGGCAAGTAAAATAGTTTTACCTTTTTCCCCTCAAAAGGCCATGACTAACAAGCTCATTTACT
TTTTCCTTAAATATTTTGCTAATTATCCTTTTAACTGATGAAGTTCAAGTGGAATCCATGATTCATTTAATCTTTTCCCCTTTATCTAATTAGT
CACTTGTTCTTTTGATGTTCCTAGCAAAACTAATATTTAAAGGGCTAGTCATAAAATTCCAAAATAAAAAGTTCTTAAATGACTTAAAATAAGA
GATAAAATATGCTTTACTCTATAGTAAAAATGGAGAAAACGTCTCATGAATAGATGTTCTTTAAGGCTGTGAGTTATTTGATTTAAGCGTGTGT
TACCACGTCTGTGTTCTTTTGGTATATAGGACCAAGAAACTACTTTATCGCTTAATGTTTGCTGTACGTATCTCATCTAGATGAGATAATGTAT
GACAGAGGGCTTTATAAAATGATAAAGTAGTGTAGACTTTTTTTTTTTTTTTTTGAGACGGAGTCTCGCTCTGTCGCCCAGGCTGGAGTGCAGT
GGCATGATCTCGGCTCACTGCAACCTCCACCTCCTGGCTTCAAGCGACTCTCCTGCCTCAGCCTCTTCAGTGGCTGCGATTACACCCATGTGCT
GCCGTGCCCAGCTAATTTTTGTATTTTTAGTAGAGACGGGGTTTCCCTATGTTGGCCAGGCTGGTCTGAAACTCCTGATCTCAGGTGATCCGCC
CACCTCAGCCTCCCAAAGTGCTGGGATTACAGGCATGAGCCACCGTGCCTGGCCGTATTCTTTTTTTTTTAAGACCAAGATTTAGGAAGATTAC
TGCATATTGCTATAGCGTTTGTTCGATTTTACATTTTTTCAGAATGGTTTGAAATCACATATTCTAGCTTGAACTCTAAACCTGGTCTGTCCAG
TATGGTAGCCATCAGCCACATGTGGCATTTGAGCATATGAAATGTGGTTGAGATGTGCTGTGCAATATACACCAGCTTTCAAACAAAAAGGATA
TATATCTCCTTGATAATTTTTATTATGTTGATTACATGTTCAAATGATAATGTTTTACATATATACGATTAACTACTAAATATTAAGATACATT
TGCCCTGTTCCTTTTTACTTTTTAATGTGGCTACTAGAAATTTAAAATTATATGTGGTTCACCTTATACTTTGATTTCAAAGTGCTGATTTAGT
CTCTAAAGTCTAGAGTGATTGAGAGCTCTCAGAGAAAAGAAGATCAGAGCTTAACAGAGAGTTTTAGAGATGAGGTGCCACCGACAGAATCCAC
TTACTTGAAGAAATCCCAGTCTGCACCTTTGCCCTACTTTTACAGATTACTGCTTTCTTGAACCCACAAAGTAGAGCACTGGGTAGCAAGCATT
TAATATCTACAATGTACAGAGCATTGAAGGGGGATTAAAATAAGTATCACACAGGTCCCTGCCTTTAGGGAAAACATATAGTCTACTCGGCAAG
CAAGATATGAGCACATGAGTTCTTAAATCATCGCTTGAGAGATACATAGCTGTTCAATGCTCACCTCCAAGACTGTTGCAAACACACCGTTGAG
GCACTAAAAAAAGTGCTTCAAAGGAAGGAAAGGTCTCCACGGCCTGGAAAGGTCTCCATGGCCTGGAAGGGTGTCCCACCAGAGGAATGCCTTG
GCTGGGCACTGACGAGTGGGTAGAATTTCAGTGGGCAGAGAGAAAGGGGGCATGGCCAGGTAGGAGGCAGGGTAGAGTCGGAAGAAGGAGGAAA
ACATGGAAAAGCACAGAATGGTTGAGAAGTCAGTCACAAGAACAGATGGATTGAACTGTGAGCTCTGAGTACAATCATTCTCTAGTCCACTTAT
TATTGAAGCTTTAATATTTGACATCGTCTCCTATAATATTATGTATCTTGACACTCTTCCGAAAATTATTTACCAAGTGTCTCAAAGTAGAGGT
TAGGGCAGGACACTTTAACTTTGGGTAGAATAAATGTTGCATATCTTTGATTGTTAGGAAGTTCTTTAAATGGCAAAACTGATAATATTATCTT
GCCAGTTATGTTTATACTAACATTTTGTGTAGAACCATGTAACTTTAAAGGCTTCTCGGATAAGTACATTATTACTATTTCAGGCAGTAGTGCT
CACCATTTGTATATTCTTCTTCCTTAAAATGCCTTCAGTGTTATGTCATTTGATCTTTGCTCTTCGCTCCATTTTATAGAACTGCAACCCAGAG
AAGCTAAGATTGAATAATTAATGGTAGAGTCTGGAATTTGAACCTAGCTCTTAAGCTTCTTCCATTTTACTGTGTGAAACACACTAGTTTTCAT
TCCTGTAAGTCTGTTTCTTAAGAGAAGCTGATTAATTTTATTTCTTTTTAATTGAATGATAATATAAATAGGGAAAAGTATGCATATAACATAT
ATTCATCTTACTGACGAATTTCCATAAAGTGAACACGCTGTTGTAACCAGTTCCCACATTAAGACACAGCATTATCAGCGCCCTAGAAATCCCT
CAGGCTTCCTTCCAGTAACTACTTCACCCGTGGTAGCCACTACTCTGACTTGGGAAACCATAGATTTGCTTTGCCTGTTTTTGAACTTTATATC
AATGGAGATACAGAATGTACTATTTTGTGTCTAACTTCTTTCACTCGATAATATGCACAGTTAACTCATATTGTGCATGACACCATATTGACTA
TGGTAGTTGATTTTTCATTCTCCATGCTATATAGTATTATATTGTGTGACTATACCACTATTTATTAATTTGTATAGTTTCCAGTTTGGGGCCA
TTATGAGTAGCAATGTGAAGATTCTAGAACATATCTTCAGGTGAACAACATAATTATTTGTGTTGGGCATATTTAGGAGTTAAATCAGGAAAGC
AGTGTAATTTTTAAATGTCTTGTAGATGAGGCTGAAATTTGACTTTGTGACACTCTTCAAGAAAAGAAGTGAAAACCTCAAACTGTTGGTGTCT
TGAATAGTATATCAAAATAAATACTAAGGCAGCCATTATGAAAAGGTCCAAGGTAGACGAATTTTAATGCCCGAACACATTTTTTCAAGGGAGG
ATGAAAATAGTCAATTCTCATATAGAGAGAATTTGAAAGGGTTAGGATGTTAAAATACTGACGTTATATCACTCAGGTTTCTCTTACAGTTATA
TTTTTTTTCTTCAAGAGAACTTTTAGCAGGTGATAGTGGAAAACTAAGGTGTGATTGGTACCAAAATGACCATTGTCCCAGGGTATAATAAGGG
ATGAATAACTGGGGAGTGTATTTACTAGGAAATAAGAAAATGCCGTTGGGTTAAATGGCAGCAAGGTACATTCCAAAATCTATAATGCAACCTA
TGGTTCTCAAAATTTTACTGAAATTTCCTCTCTCTCTCACTCTTTTGCTTAGCGTAATCTGTAGGCAAAAGAATTTGCATTCTTTTAAAGAAGG
CAATTATAAATACCATAACTTCTTTTTAGAAAAAATCTTAGACGTTTATCCAGAGCCAACCTGTCTGAATGAAAATGTAGTTCTAGGATTTGCC
AACACAAAAGACTTCAGTGTCTACCTTTAATCCTTATTAACATTAATGGTGATCATTTAAAGGTGTGTGTTTTATGTTTAGACTTATAGGTGTT
GTTGATCTTAAGCAGACTAGGCAGAGAAATCCTTCACATTTTCTGTGCTCTCATTCAGGATGGCCCTAGGCATGTTACATGGCAAATGAGAATA
TGTGAATAAATACTCTCATACTTTCTTGGGCCTCAATCAAAAGAACATTTGTTACCATTTTTAGTCATAAATTAAAATTATTTCAGAGTAGGAA
ATATAACATTAATTTAGAACATGGCTGTCATAGATGAAACGTTTThCACATGTATTGCTGTGGTAGACATTCCTTGCATTTATTGAAAGCCTCT
CCTTTATAAAGTTAGTGAAGTGTGACTACTCTGACCTCCAAATACTGGGTGTATTTGAACTATGAAAGTAGGTTTAAAACTTACACTTTTCTTT
AATGCCCATTGATGATTTCTTTCTTTTTTTTTTTTTAAGACGAAATCTAGCCCTGTCACCCAGGCTGGAGTGCAGTGGTGTGATCTCGGCTCAC
TGCAGCCTCTGCCTCCTGGGTTCAAACTGTTCTCCTGCCTCAGCCTCCCAAGTAGCTGGGACTAAAGGTGCACACCACCATGCCTGGCTAATTT
TTTTGTAGAGACTGGGTTTCACCATATTCGCCAGGCTCGTCTCGAACTTCTGACCTCAGATGTTCAGGCCGCCTTGGCCTCCCAAACTGCTGGG
ATTACAGGCGTGAGCCGCTACGCCCATCCAGAACAACAGGCACTGGGGCCTACTGGAGAGTGGAGAGTGGGACGACGGGGAAGAGCAGAAAAAA
AAAAACCTATCAGGTACTAGGCTTAGTACCTGGATGACAAAATAATCTGTACGACAAACCCCCATGACCCAAGTTACCCATATCACAAATCTGC
ACATGTAACCCTGAAGGTAAAAGTTAAGTAAATAATAAAATATTTTACATTTATTTAAAAATTCTAAAATGGTTGTATTTTAAAAGTAAAAACA
AATTTTGGTTAGGATTTGAGCTTATTCCATTTTTCTTCTAATTTTCCAAATTAAATGTAAAATGAGAGCATCCCAGGTAGGGGGAGGTAGGGCA
GAAACCAAATAATTTTCAAGTCATATTTGAAGAGCAGGTATGTTCTCTCACGATTTACAGTGCAGGTGCATTTTAATTTAACTGCTTTAAATGA
TGATAAAAATTGTTCAAGTAGAACAAAGCAAAGTTTTAGAAGTGACTTGTAAACAGCCATTCTTAATTTTTTCCTGTTTTCTCTCCACTTATGT
GACTTCCATCAATTTCTGAAGCAGTCCTTTCAAATGACACTGCTCCAAACATCTGAATTGCATTCATCAACAAAATCCAGCCTTTTCCTTTGTA
CCACAATGTCGGCTCACGGCGCAACCCGTCTTTTCTTTGTCTACCCTCGTGCCAAAGCAAAGACTACTCCTCCCTGCGTTTGGACCCAGTGACA
TGTTTCCATTTGTCATTGAACACTAGGGGGAGGAACTGTAGCCTCTGAGGTACCCCCATTTGGTCCTCACCCTCTACCAGAGGATTTGCTGCTT
CAGCCTCTTCAGTGCCCCAGGTATTTGATGCAAAGATTATCCACTTATGCTGCCACTTATCAGGGTTGTGTGGGTGTCTTTAGAGGGGTCTCCC
CTTAGCATCAGGTCTCAATGACAGAATCTAAATAACACAGGTTACTCATCACGAGTTAAAGATTTTTTCCCTTTTCACATTGATGCTTCTGATA
TACTTTTATACGTTAGCTGATTGTATGTGCGTACTTTGTGGCTGCAAAGATGCAGCTGGAAAGTGTGTGGGGGTTGTCTGCTTCCTCTGAGGCT
GCTACAGGTGGTCAGCTGCGGGCGGCTGTGATAAACGTACAGCACCCACTTCCGCCAGCTTGTCTTGTGCGCCCTGTAACCCACTGCATGAACC
CGAGTGGCACTTCAACCGCATTTTCTTGTTGCCACTTTTATCTTTCACTCCTTCTCACTTGCCTGTTGACGTTTATCACTAACGTTGTGATTAA
AAATTCCCTTTTTAGGTATGAAAAGTCTTTTCAATTACTTTGTGTTCCTTTTTTTGTTTTGTTTTGTTTTTGTTGTGTGTGGACTTTCTGGGTT
TTGTAAAAATGAATCTTAAAAAAATCTTAATATTATGTAACAGTTAGATAAAGGTTAAGTAGCTAATATATTCTCTCATCAGGGCATACAATCA
ACGTATGTTCTTGGAAGATTAAGTGTGTCAAAATGCATTTTATGATGGAAGCACTGTCAGTTGTTTAGAATAGGCATGGAAAAGCCCTTTTCAG
AATATTGTCATAAAATCAGACTTGGAAAGGTTTTCGTTTATTCAGTCTGTATTCCCCTATCTGTCTGTTTAATCTCTGCATATTACTGTCCTTG
GAGCACGGAGAAACGTGAGCTACCCTTGGAGGTTTATAGTCCCACTGGAAGGGAACTAATGTTTACGCCTGATTATATGATAGGAGCTTTACAT
GTTCTTATTCAGTCTTTGAGGAAACCTTATAAATAAGATAATAACTTTTTCAGAGAAAGAAGCTGGGGTTCTGAGACATTACCCACTTAGGGGC
ACCCAGAGGAAAGAGCAAGACCTCCAGCTCCATCACCAGTAATTTCCAGCCTGTGAGCTTCCCTCCACACTCAGTAATTTAAAAAACAACTTGA
TTTAGGGACATCTAGTAAATATTCTAGAAGTTCAGAGCCAGAAAAGCTAGTTTGCAGCTGAAGTACTCAGATTTCCCACTGGCTGAGTGGGAAA
TCAGACCCGAGCCTTGACAGTGGGCAGAATTTGTATAGAGGAGCCAAGAGAAGAACAGTTTCCACACTGTATAAGCCAAATCATGGAAGGTGTA
ATAACAAAGGAAGGGTGAGCACACAGGTTTAGGAGATGCTGTGTGGGCCAGTCCAGCTGGGAGCCATTACCATTTAACACTTAATCGAGTGCTT
ACTGTGCTAGGCACTCTTCTAAGTTCTTCACACCTTTTAACTATTCTTATCTTCACAGCAAGCCTTTGCAGGAGATATTATCAAGTCCCTCCTG
CCCCCACTTTTTTTAGAAACAGAGTCTTGCTCTGTTGCCCAGGCTGGAGTGCAGTGGTATGATCGTAGCTCATGGTGGCCTCGAACTCCTGGGC
TCCAGTGATCCTTTTGCCTTAGCCTCCTCAGTAGCCACGACTACAGCTGTGTCCCACCATGCCTCGCTAATTTTTTTTCCCCATAGAAACAGGA
ACTCGTTATGTTATCCAGGCTGGTTTTGAACACCTGGCCTCAAGCGATCCTCCGCCTTAGCCTCCCAAAGTGCTGGGGTTACAGGTGTGAGCCA
CTCCACCTGGCCTTCATTGAGGCATGAGGAGACTGAGGCACATAGCAGTTAAGTTGTGGAACTGTGATTCAAAGCATCGCCACCAGGATCCAGA
GCCTGAGTTCTTAGCTACTCTCCTGTCTTGTTTTCTCTCTACTCGGCAATGCAGGTTGCTTGTTACACGGGTGATGAGGATTCTCAAATTGCTG
GGGATAGCGAGAGGAAGATGAAAATGGCAGGGGTAGTGATAGAAAGATCAAAATGGCAGCAGCACGCTGGCCAATTTTACAAGAGGAAACATTA
GGAAAGAAGAGAAGAGGGAGTTTTTCTCAGCTAAGCAGGATCTGGTCACTGTAACTGCGTAGCAAAACATAGAGGTGAGATGTAACAAATCAAG
AGCCCTTGATGAATGACTGGAATTCAAGAAGAGGGAATGACCAAAAATGAATCTAAGATTTGGAGCTTGGTTGGCTGGGAGGATAATTCTGCTA
TTGCAGAAATCAATGAGGTCAATAGACAAGCTCATTTTTCCACAGCAGTAGTGTTGCAGCAAGAAATCAAGGCTTTTCAAGAGCATATGCAGTA
GAGATACCATATGCAGGAAAAATGGCTCACTGGAGAGTTGAGAATAAACGACAGCAGTTCAAGGGAGGGAATGGGGATGATTGGGGGGCTATCT
GCAAGGAGAGAATTGATGTGCTGGGAACAGACGATTTCTGAGGGAGAGAGAAAAACCCAGCGCCTTAAAAACTGTCCTTGGTCAAGAAGCAGAA
GGAGAAAGAGGAGCAGGAAACCATAAAAGAAACAGGCGAAGCAGGAGAGAGAGGAGAATAAAAAGAGGAAAAAAAAAACTACTGAACAGTGTCA
GACACTACAAAGAAGTCAAGGAGAACAAGAGTGAAAGGGGGACATAAGATTTGACACGGAAGAAGGCCATTTGTACCCTGCACAGTAAGTCTTG
GTGACATGAGGAGGTGAAATCCAGTTGCATTAAACTCTGTGGTATTGCTGACTTCTTCCTCATGCGCAAGTCCCTGGACCTTTTCTAAGCACTA
AATTTGCAGGTAGTTCAATGTCAACCAGAGAAGGAAGTTGGTTAACAGCACTTGGTTGCATGATACTACGTTTTGTTATAGTGACCTAACTGAT
CTAACGTGTTTTGTCTTTCAGCGCGTTCGTTCACATAGCTCCCAGTTTTAACATTTCGCCACCTACTGAAGACATCATTTGGGACCAAGCTGAT
GACCCCTTGAACCACAGCAGGTGACCCAAGGACCTCAGCTTGCTCTTTGTTTCATAACTTTACACAGCTAGCTTACATTCCCACCAGCAGTGTC
AAAGTGTTCCCTTTTTACCAGATCCACGCCAGCATCTATTATTTTTTGTTTTTCAGTTATGTCCGTTCTTACAGGAGTAAGATGGTATCTCGTG
CACTTTTAATTTGCATTTCCCTAATAGAGATGTTGAGCATTTTTTCTTATGTTTCTTCGCTATTTGGATGTCTTCTTTTGAGAATTGTCTGTTC
ATGTCCTTTGCCCACTTTTTGATAGGTTCTTTTTAAATTAGTTTATTAGCTTTTAATATAAACATGAGAAAAACCACATAAATTGTAGCATTCT
TTTCAAAATAAAACTGCAATCAATACTTGAATGAATCTCCAAGCTCTGAACTTCATAAACAATGTTTTTTCTTTTCTTTTTTTTTCTTTTCCTT
TCTTTTTTCTTTTTTCTTTTTTTTTTTTTTTTAAATCGGCTTCTTTTTATCTTGCTGATTTGAGTTCCTTGTAGATTCTGGATATTAGTCCTTT
GTCAGGTGCATAGTTTGCAAAGATTTTCTCCCACTCTGTGGGTTGTCTTTTTACTCTGTTGATTTTTTAGTTTAATTAGGTCCCAACTATTTAT
TTTTGTTTTTGTTGCATTTGCTTTTGGGTTCTTACGCATCAACTTTTTCCCTAACCCAATCTCTAGAAGAGTTTTTCCAGTGTTCTACAGTTTT
TATGGTTTCAGGTCTTAGATTTAAGTCTTTGATTCATCTTGACTTCATTTTTGTATAAAGTGAGAGATGAGGATCCAGTTCATTCTTCTACATG
TGGCTTGCCAATTATTCCAGCACCATTTATTGAATAGGGTATTCTTTCCTCACTTTATGTTTTTGTTTGCTTTGTCAAAGATCAGTTGGCTGTA
AGTATTTGGCTTTATTTCCGGATTCTCTGTTCTGTTCCATTGGTCTATGTGCCTGTTTTTATACCACCACCATCCTCTTTTGGCAACTATAGCC
TTGTAGTATAGTTGGAAATTGGGCAATGTGATGCCTCCAGATTTCTTCTTTTTGCTTTTGTTCTATTGGCTATCTGTACCTTTTTTTGGTTCCT
TGTGAATTTTAGGATTGTTTTTTCTAGTTCTATGAAGAATGATGATAGTATTTTGATGGGAATTGCATTGAATCTGTAGATTGCTTTTGTCAGT
ATGGTCATTTTCATAATATTGATTCTACTCATCCATGAGCATGAAATATGTTTCCATTTGTTTGTGCCATCGATTATTTCTTTCAGCAGTGTTT
TGTAGTTTTCCCTGTAGAGATTTTCACCTCCTTGGTTAGGTGTATTCCTAAGTATTTTATTTGTTTATTTAGCAGCTGTTGTAAAAGGGATTTA
ATTCTTGATTTGATTCTCAGCATGGTCACGGTTGGTGTATAGCAGTGCTACTGATTTGTGTTCATTGATTTTGCCTCCTGAGACCTTACTGATC
TAGGAGCTTTTTGGATGAGTCTTTAGAGTTTCTTAGGTAGTACAACCACTCTGGAAAACAGTGTGGAGATTCCTTAAAGAACTAAAAGTAGAAC
TACCATTGCATCTAGCAATCCCACTATTATCTACCCAAAGGAAAAGAAGTCATTATATGAAAAAGACACTTCGACATCCATGTTTGTACCAGCA
CAATTCGCAATTTCAAAAATATGGAACCAGCTTAAATACCCATCAACCAATGAGTGGATAAAGAAAATGTGGTATATATACATCATGAAATACT
ACTCACCCATAAAAAGGAACAAAATAATGGCATTCACAGCAATCTGGATGGAATTGGAGACCATTATCCTAAGTGAAGTAACTCAGGAATGGAA
AACCAAATATAGTGTATCATAAGAATGATATAATGGACTCTGGAGACTCAGAGTGAAGTTCCACTAGGGAACTTATCCATGTAACCACAAACCA
TATGTTCCCCCAAAACTATTGAAATAAAATAAAAATTAAATTAAAATTTTAAAAGTTCACACAGCTGCCCAGCGTGTGTCCCACTCACCGGGGC
CATCACCTTATTCTGTGTATTTCTAAGCATCTTATGAACACACTGATTCTTATAAGGAATCCAAACAATATAGCACTGCCACACTTGGGGCTGC
TATTTGTTTTAGGGCTCTTTTATTATGGAAAGTCCAACCGATATGAAAATAACCTAAATTTTCTCTGACTTCTCAGAAATTCTCAAAACATCAA
AATGTGCCCTGTCTTTTGATGCTGGTTACCCCTTGGTGGCAATCCAGGATTTCCTTATTTCAGTCTCACAGCTGTGAGTTGTAAAGCATTTCAT
TCACCACAATGCTAGTTACAGTTGATTTTATTTAAGCTGCCAGATTTGGAAATGCACCTCACTATAGCATTAGTTTAAAAAATTTAGGAAGGGG
AGAAGAAATTTCTATCTACAAATGATATTTTTTACTTTTCGACTGTAAGTATGTTTTTTGCTTCTTTATTCTTCCCACCACTTTTTCTGGGTAA
CTGTAACTTGGTGTATCAACTTTTAGAAAACTCACAAGACTTAGGAGTATGTAAGCTCTCTCCCTTCCCTTCCCACCCCTCACCCCCAGCATAG
AATATTGGTACGTGAAACTTTATTAAATAGAATCTGCACGGAGTAGTCAGACCTTAGCCCCACCTAACCCTGCCACTTGTCTCTGTTACTGTTT
TCTGTTGCTATTAGCATCTTCATTCAGAAGGACGAGAGGGGAGAAAAAAATGAAAATGAAGTTAATTTTGTTCAGCAAAAGTTAAACTCTCTGG
CTGAACTCTGGGTAGCTCCTTTTGGAGTTGTATCGGCTTTCATTTATTCTCCAGGTCTCTTAGTCTTCACTTGAAAATAGAAACTAGAGTTCAT
TTTTCCTGACAAGAATGAACTTAATTATTTACCTAGAATGGTTAGTAATCTGTTCTTATTACCAGAAAGCTTTCTTCTGATCTATTTAGTATCT
TTTTTCATAACAGTTTGAATATATTAGCATGTATTCTCAATAGAATCTAATCTTTCATTATTAAAGTTCCTAAATATCTTATATTACTATGTTT
TATCATTATGAACATTGACTCTCATTGTTTAGACTTTTGCTTCTCTAATTATCTTGGGTGAAGGACCAGTTTTGTTTTTAATTTCCAGTATGTC
ATGGATTGATAATTTTATAAAATACAATAAAAATGATTTACTAGAAAAATGAAATACTAGAAAAATGAAATTTAAAGAAACTAAAAACATAAGC
CTGATTAAACATTTATTATTCTTATAGTCAACAGACATAAAATTACTCTGGCAAGCTGCTGTAAAAAAATTCTAAAGGTCTACTCTCAGTTTCT
GTGCTTATTCTCGGACTAGGCCTGGTCTGCAGAGTCCAGTTCGAGTTGCACTGTTGGACAGAATATATACAACTTAGCACACTGAAGTTCAGTA
GATACTAATTTCAGAACATATCCTCAAAGTGGGTTTTTGGGGACTGTCCCCTTCACATTTCTTGCATGTATAAAAGGCAAGTGCAGTTCGGGTA
CAGTGGTTCATGGCTGTAATCCCAGCACTTTGGGAGGCCAAGGCAGGCAGATCACTTGAGATCAGGGGTTTGAGGCAAATTTGGCCAACATGGT
GAAACCTCGTCTCTAAAAATACAAAAATTAGCTGGGCATGGTGGTGTGCACCTGTAATCCCAGCTACTCAGGAGGCTGAGGCATGAGAATTGCC
TGAACCCAGGAGCCAGAGGTTGCAGTAAGCCAAGATCATGGCACTGCACTCTAGCCTGGGCCACACAGCAAGACCCTGTCTTGAAAAAAAAAAA
AAAACAAAAAAGGCAAGTGCAGAAAAAAATGCTGTTTACTTAAACTTTTTCTATTTTAAAAAAAATTGTAGGACAATGCATAAAATAATATTTA
CGTCAATATAGAAAAAGTTGATTCTCTTTCTCCCACTCCTCTGCTTCTTTTCCTTTCTCTATACATCATATACATACATACAAACATATACCTT
TACATGGAGAAGGGACATTTTTTCTGCTATGAAAATGGCATCATAAACAATACTCTGCAACTTTCTTTAATATTTTGTTACAACATTTATCCTT
ATCAAATATGAATCTAGTGGCTCTTTTTAACAGTTGCATAATATCCTATGGTATCGTTGTACCATAGTTTATTCAATTATTCCCCATCTGATAT
ACCTTCAAGAGCATTCTAGGTTTTTACCATTCCTAACAACACTGCAGTTAAATTCTTGTACATATATTCATGTGTATCTACTTTGATATTTGAA
GGATAGATTCCTAAAAACGGAGTCAGTGACTCATGCATCATGTCAGATGATACTCCAAAAAAGTTGCATTGCTGTAGAGTCACACCTGCAAAAT
ATGAGAGTACCTGTTTGCCTCACCCCTGCCAGGTGTTAGGAGTCTTTTTAAGTGTTCTCTCTCTGCGGTGTAAACTGATCACTAGCTGTTTTAA
TTTGAGTTCCCCTGATTGCCAGCAAGAGTGTGCTTCTTTTCATATGTTTAAGGGCCTGCTGGATCTTTCTATTCAATTTGGGGGCAACAAAACT
TGACAGATTTTATTTTATTAGGTCTTTTGTGTACCAAGTTTTCTGTCTGTGGTACACTCAGTCGTTGGCCTTTATATTATTTGTTCGTTTTAGT
AGGGTAGAGGACATGGGAAAAGAACAAAGATACAGTGTTGAGGGTTTTTTGGTGGGGGGGAGATGTCTTAGTTCTGATTTTCTTTGTCTAACAT
GTTTTTTTTCTTCAAGATCAGCTTACAGGAAATCCGTCCCTATTTGTGTGTAATGTAAAAAGGGCACAGGGTGGGGCATCTTTATAGCTTGGCA
TAGTGTATATCGTTATTCAAGATTGCTCAAAGACTATGCGTTGCCATGTGTACTTTTAAAAAATTCAGCTAACTTCATATAGAATTAACCCTCC
TCAAGTGTACAATTCAGTGGCATATAGTACATTTACACTGCCGTGCGACTGGGACCTCTATCCAGTTCTGAAACATTTTCCTCACCCCAAACGA
AACTCCGTCCCCATTAAGCAGTCACTCCTCATTCCCCTTATCCCTCAACCCCTGGAAACCACTTCTCTCCTTCCTCCGTCTATGGTTTCACCTT
TTCTGGATATTTCATATAAATTGAGTCATGCAGTATGTGATTTTTTATGTCTGGCTTTTTTCATTTAGCATAACATTTTTGAGGTTCATTTGTA
TTGTTGTGTGTATCACTACTTCATTCCTTATTGTCGCTGGATAAAATTTTATTGTATGCTACAATATACAATAATTTGTTTATCCATTTACCAG
TTGATATTAGGGTTGTTTCCACCTTTTGGCTGCTGTGAACAATTGCCCATGTCCACCTAGATGCCAAGTTAAGTCATAGAGAGGCATGAGGGAA
GAACAAAGACAGCTGAAAAGAACCTCCCAGGGAGCATCTTCTGTCTTCTAGAGCCTTCCTCTCTCTGTAGTTCGTCATCTACAGGCTCTTTAGG
AGGCTGGGTCAGTCGTGGGGCCAGATTTGGGATCTGTTTTCACTGGCTTCAGTATCTTCGTTAAACCAGAGATAGACCCTCCATATCACACCCT
CTCGATTTAAAAAGGAATTTACATCCCACCCTCAGGGCACTAGGTCTGCTCTAGCCTCCATGGGTGCAGTGCCCGCAAGGAACATTCATGGCTA
TTCCTCCATGGTTGTTGCCTCTACCTTTAGCATCTGGGTTGGAGCTTGTAGAATGTGGTGATCAGGAGGAATTGTGCCCACATAGTACCTGGGC
ATATGACAGTATAGGCTCATTTCCCATCTCTCCACCCTTAGTCCAGTTATGTATCTCTCAGTTTTCTCCCTGGTAAAATGGCATTACTAATACT
TACATCATAGGGTTGTAGACATAGTTACATGGGATAATGTAThGAGAGCACTGTTACAGTACCATGTCGTACTACTTGATAAATGTTCATTTCT
TCTGTTCTCAGTGCTTCTCTGTCCTCTTCTATCTGGTGCCCAGGACATTACATACTTCACAAGGTAGTATTAAGTTTAAAATGAGTTGATAATG
CAGAGGAAGTCTCTTAGCACCATGCCTGCAACGTAAGTCAACACTCACTATAGATAGAAAGGTACCTTACCTTGCAGTTAGGATTTCTCATTGG
GAAAATGCCATCCAATTGATTACAAGCCGTCTAAAGTGTTTTAAGTGGTAAAGATTTCACCTGGGTATATTGAGTTGTTCTCCAGCGTGGTGTT
TATTACCATAGACACATCGGGCTAATTAAGACAGCCATGTTCAGGATAGATCCACTATCACTAAGATCCTGATGTGTGAGTTGGGCATTTCCCA
TCATGTTAGCACAAATATATTAAAGAAAGTTACTTTTATATCAAAGTGTTTCCATCCCAAAGAAAATACTTGTACAGCCTAAAGTTCTCTTTCT
TGTGGAAGCTGACAAGAGACTTCTGTCTTGCCCTCCAAAGTGGTTTAGTATCCTATTTTGAGCACTCTTTGGGTGCTGTTATTTAGAAATTCTA
TTTTAGAGCAAATGGGAAGGATTTTATAAAAAAGGGAGAAGCAACTGTCCTCCACCATGCTCTCTCTCAGCTGTGTAACAAGCCTCTCTGAGGG
TGAAGTGGATCCCCATAATGTGGGCCCCATGTGTGAACCTTTTACAAGCTTTTCTTGTTGTAATGGCTGATATAATTAAAGGAGAGAGTTCATG
TTTTGTCTCAAATGGAGCATGCCTTGAGTTACAATGTTTTGTTTTTCTCACCAAATATATCCTCACTATAATAGCAAACAGCTTGTATAAGATT
TTTACATAAACATTTGAAAAAGCATTCTTGTCTTCACTGAAATTTTGAAAGCCTTTTAAGAATATTTGTAGCACTTATGTTTTTAAATGTACAG
GTCTAACATGCAGTTGTTTATTTGGTAAATTCATTCCATGAGGGTGCTTTGAATCTACCTCCAACCTCTCACGGGTCTCCCAGACTTCCCAGGA
ACCACTGCTTGACAGCTGGAGAGACAGCAGGTGAACCAGGGTCTCACTGGGAGGGAAAGACGAGGAAACCCCAAAGGGACAGCTTTCTGGAGAA
AAATGCCTGGCTGTGAATGCCTCTTCACCTCCATCCCAGATACACACTTCCAGGATGTGCAAATTGAGTCAACATCATGTCTGTAGAGGACAAC
AACATGTCTTTTGTTAGTCTTGACATTTCTTTAGCCCTAGGCCTCTCAAGTTTTGGATATGTGATGCTCAAGAAATGCATTTACAATTTGAAAA
CCTGGTGCTCATTAAGTAATTCTTTTAAAATTTTTTTCTTTTCCTTTTGAAAAATTCAAACCTAGAGAGGAGATGAAAGAATCATATGAAGAAC
ATTTATATACCCTTTGTTTATATTTGCCAATTATTAATATTTGTTATTTTGTCTCTGAATTTATAGTTTTGTATGTGTGTTGGCAAGAGGCGTT
CATTTTTTAGAACTATTTAAAAGTAAGTTGCAGACTTACTTTCATCACATTTTTCCCTGAAGACCTCAGCATCATTTCTGAAGAATAAGAACAT
TTTCCTACGTAACCACAATCCTGTTATAAAGTAAGTCTTAATTGAAAACTTCAGACAGAGGACAAAAGAGTAAAAAAGGCAGAGATTGAACAAA
GCTGTAATTGAACTTGGAAAGTATAAGGAGAAGAAATATAGGGAGGTAATTAGAACTCCTGTTTGGTTCCTTAAAGGATAAATTTTGTATATAC
CACCAAATCACTCAATGAATGCAGATTTTCTTCAAATATTTACTTTATCTAGTCCAAGGAGTTTCTCCTGGTGCTCTGAAGTCACTGTTTTGGC
CACGGTTATAACCTTTTCAGCCTGTAAATACATTTCTTCAGCATCATCAATCTAAAACCTGAGTGACCACATCCTACTTAGACTTGTCGTTAGG
AGCAAATTTTCAAGGGATTTTGCTGGTGCCATTACCTTGAGAACATGGGACCTTCAGTTATTACAGTCAGAAATGTTTACTAATGGGCAGTTAG
TGTAAACATGGGAGTCCTTTCCTGACATTTAATTTAGGTTTGAGTAAAAGCTGATGTGTTAGCACACTATTTTGAGAAATAATTTTACAGGCTT
GGCAAAATGTTAAGCTTGATGTCATCACAGACTTTTGCAGATTTAGGCTTCAGGAGTCAGCGCAAGAAAAAATGCTACTCTTATAAAGGCTGAA
CAGCAGGAACAAAGTTAACTGGATGGCATGTAGATGCATCACTAATTTGTCTATTTTAAAACAAAGATATACATTTTCTTCATACCAATAGCTT
ATAGAACATTAAACAAATTAAAAGGTTTATTTGGACTGTTTCCCTGAAAGCCTCCTTCTTCGGTAGGATTTAATATTTTGCCAGAAGAATTATG
TTTGGGGATTTATTTTTCAAATTTTTTAAAAAAGCTATTTTCACTAAGCTTTGGGAGGGGAACCATATTAAGCTGTCTGTCTAAGTAAGCACAT
CAGGCATCATCATGTCAAGAATGAGAAACTATGTGTTTCCTTTAACAGCAGTGTATGTCATAGACATGTTTGACCCATGATTTTTCATGAAAAG
GTCCATTTTCAGTAAACTCTTGTGCTTACCTAGTGTCTTCAATGTGATAACTGGCTTCCCACTGATCAGGGGTGAGATGCATCACAGAGAGTTT
GAAACTACACATTTTGTCTTTTATTTCCTTTTTCTTTTTACTCTTTCAGCCTTCAGTGGCCATCGAGATTTTTTATTTTAAATTCCAATTTTAC
ATATCAAATTTACAAACTGTGACTTTTAAAATAATTGTTGTACTCTTTTCTGTGAGTGAATTTTAAAAAGCATTTAATGTAAAATGCATGTGTA
GTTTCTTGTCTATCAAAGCCATCCTTTTCCTTAGATCAGCTTAATCGTCTCCTGTTTCCAATTTGTGTTAGAAAGTTCTGTGTGAAATGTGAAC
TCTAGTTTATATACTTACTAACAGTTAATGCGTGTCCCTTCGGATAATACCTCTTCAGCTATCTTTGTCCCTGTCTTACGTAGACCATTTGAAT
CTTTCTCCTTTAATGCCAAGTATCCACTTTTCACGTGTAAATTCGAGATGTCACTACCTGCACTTGGACACCAGTGTGTGCATGTAATGTTGAT
TGGTGTCATCATGGTTTTTGGCTACTCTGTGATAATTTTGTTTTTCAGAGGCAAATTTTGTGAGGCCAAACTTCGGAGATTGGGTCTGTACATC
ATTCATTCTTTCAGTCAGTAAACATCCATTTAGTCCCTACTCTGTGTCACTGCTACTCAAAAAGCAACAGCCCAGGATTGCTGTCCTGGAATCA
TGTGCACGCATCGTACCCATGAATGCGTACTAACAACACAACACCCACTTGAATCGCCTGGCAATCGGCCGTGGGGATGGGAAGGGGCTCCACA
GATAGGTGAATTGGTCTGTAAAAGTCATCGCTGTACAAATGAATCCCAAACCAAACATTGAAAGAATGCACAGTAGATTCCCCCAGTTAGGGCA
GGGTCATAGAGCATTTTGGGCAAAGAGCCCATACAAGGCCATAGAAGCATGAAACATATGCCACATTGTATCAATTTCAAATAACTTCATATAA
TGAGAGTTTGGGAACATGGAGAAGGTAGTGGAGGAAGATCAGACTAAAACTGATTATGAAGGACCTTACGTACCATGCCAAGGAGGCTCGCCTT
CATCCTGTAGTCAGTCGGGAACAACTTCAGGAATCTCAATGCAGAGCTTTCATGATGAAATTTGTGCTTTACAAATATTCTCTTGCAGCACTGT
GGAGGTACAGATAAGTAGGAATGGAATCCAACGCGACAGGCTCACTCTGCTCCTACAGAAGTTCATGGGGCAGTCCCAGTCGGCACATAAGGAG
ATGATGGTGCTGACACCCAGTTAACAAATAGAATCCTCAGAACTTGGTAACTGATTGGTTATGAGTATTGACACTACATGCGTCACTACATGAG
TGATCTCATCACTATATAAGTATATAAGTGCTCAATTAGATCGTGAGATCAAGGGGCGATATTAATGTAGGAAACAGAGAACAGAGAGAACCAA
TGATATAAGCCCTAGGAAGTGGACTTTTAAGGAGCAACCAAATAAAAACAACCTTTACAACCAATCATCTGAGGGTATGACGAAAACCTGAGGA
TACGGTGCTCCACGAACCCAAAGCAGGAATCTGCAGAAGGAGGGAGTAGTCAAGAATGTTGAATACTTCAGAGGGGTCAAGCAAGGGTTCCAGG
ATGTGTCAACTCGTACGTTCACTAATCCTAGCAACAGCAATTAGTGGGTGGTGAAAAATAAGAAATGAGATGGTTCATTTATACTACTCTTTCA
AGGAGCTTAGATACTAAGCGAAGGAGAGCAAGAGTTGTCAAGGAACATTTTTTTAATATTCTTTTTCAAGGTTAAAATCTCAAGCAAGTTTACA
TCCTGGAGGATAGATATAATCCATTAGACAGGAAGAAGAAGCAGATAACTGATGGAATAATGTCTCTAAGCAGATCTGATGGCACGTAAGCTAG
AACACATCGCAAGATTAGCTTTGGGCTAGACAAAGCACAACTCAGTTTTTAATAGATGGGAACAAAGGAGGAAAGACTGGGTGTGGATATGGAT
AAGGGATTGTAGGTCTTGAAAGTTGGAAGTTTGAGGGGTGTAGTGTCCATGAAAATAAGTGCTTAGATCTACAGCTAGAAGCGTAGTTGACTGA
TGGCCCAACTCCTCCCCCTCTGCAGCCACCCTTGCATTCTACTAAACTACAAATTGCCACTACCGTCTCCCAGTCATGACCAACCACAATAGGG
GCTCCTATTTCAGGCTCATTCCTGTGCGACACAGGACTTTTCCAGTGGGCCAAATTGGCTCAAGAACTCCTATTGCCCTCAGCAGACCTTTCTT
GCAACTGTGTTGGAATCCAAGACTTCCTAGCCATTCCTTCTTCCTTTCCTCTCCATGTCCATAGGTGTGGTTTGAAGGACCTCCCACATTCTGT
GGCTTCCTTTCTCAATATATCTTTTGTATTTCTAGTTCTATCTTCGTACTTGCTTCTGGGTAGACCCAAACTAACATAAAGAATTTGGTCGAAA
TGTGTATATTATTAAGGTAATGCTAGCTGCTGTAAAAATAACTTCTCAGTTCAACAACATGTACATCATTCAGACAGAAAATTAGTAAGAAATG
CAGGACTTGAATTGCATTTTTGGCCAAATGGACCCAATAGACATCTACAGAATTTTCCATCCAACAGCACCACAATGTAAAGTTTTTCTAGAGT
ATACATAGAACATTCTCCAGGATAGACCATATGTTAGGCCACAAAATTTAAGATTGAAATTATGTCTAGTATCATTTCACATATAACTTCAAAC
CACAGTGCTATAAACTACACATCAGTGACAGGAGGAATCTTCAAAAATTCACAAATATCTGGAACATAAACAACATGCCCCAGAACAACCAATG
GGTCAAACAAGAAATTAAAAGATAAATTTAAAAAATGCCTTGAGACAAATGACAACGGAAACACAATATACCAGAACTGATGGGATATAGGAGA
AGCAGTTCTGAGAGGAAAGTTTATAGCAATATATGCCTACATTAGAAAAGAAGAAAGATCTCAAATGAATAGTGTGACATTACACCTCAAGCAA
CTAGAAAAAGAACAAACTAAAACCAGATTAGTAGAAGGAAAGAAATAAAAATCAGAACAAACATAAACTAAATGGATAATAGAAAAGCCACAGG
AAGAATCAATAAACTTAAGAGTTGGGTTTTTTTTTAAGTAAAATTGGCAAACCCATAGATAGTCTAACAAAGAAAAAAGAAAACTCAAGTAAAA
CCAAAAATGAAATTGAAGAAATTACAACAGACACCTCGGGAATAAAAAGGATGATAAGTCCCTATTACGAACAATTATATCCCAACAAATTGGG
TGGCCTAGAGGAAACAGATAAATTCCTAGGAAAATACAACCTACCAGGATTGACTCAGGAAGAAATAGAAAGCCTGTAACAGACCAATCACAAA
TAGATTGCAGAAGTAATGAAAAACCTCTCAACAAAGACAAGCCCAGGAACAGATAGCTTCACAGCTGAGTTCTACCAGACATTCAAAGAATTGA
TACCAGTACTTCTTAAACTCTTCCAAAAAAATAGAACTAGAAGGAATACTTTCAAACACATTTTATGAGGCCAGGATCACCCTGATACCCAGCC
AGCCAAAGACATCACAAGAAAAGAAAATTTAAACCCAATTTCTCTGATGAATATTGGTGCAAAAAGCCCCAGTAAAATATTAGGAAACCAAATC
CAACAACACATCAAAAACATTACATGTCATGACTAAGTGCGATTTATCCCTGGCATACAAAGCTGGTTTAACATCTGCAGATCAATCAGTAGTG
ATACATTGCATTAACAGAATCAAAGATAAAAATCACATGATAATCTTAATTGACACAGAAAAAGCATTTCACAAAGTCCAACATCCTTTATTGA
GAAAAATGCTCAATAGTGTATGTATAGAAGCAAAGCTTCTCTATGTAATAAAGCCCATTTATGAAAAACCCACAGCTAACATTATAATACATGG
GGGAAAACTGAAAGTTTTTCCATGAACGTCTAGTATCAGGCAGGCATGGATGCCCACTTTCACCACTTCTATTCAACATAGTACTGGAAGTACC
AGCAATAGTAATTAGATAAGCAAAAGAAATTAAAGGCATTGAGGTCAGGAAGAAGTAAAGTTATCTCTATTTGCAGATGGTGTGATCCTATATT
GTAGGGGGGGAAAAAAGCCCCTGCAGATTCCACACAAAAAAACTGTTACAACAACGAATGAATTCACTAAACCTCTGGGGTGCAAAATCAACAT
GCAAAATCAGTTGCGTTTTTTTTCATACCAATTACAGTCTGTTTGAAAAGAACATGAAGAAAATGGTCCCACTTAACAAAGCATCAAAAAGAAC
AAAATACCTAGCAATAAATTCAACCAATGTGAAAGATGTGTACACTGAAAACTATAAAACATTAATGAAAGAAATTAAGCACAAAAAAATGGAA
AGATATCACATGCTCATGGATCAGAAGAATTAATATTGTTGAAATGTCCATAGTACCCAAAGCAATATACAGATTCGGTGCAATCTCTATCAAA
ATTCCAGTGACCTTCTTCACAGAAATAGAAAAAATGCTTCTTAAATTTGTACAGAACCATGAAAGACCCTGAATAGCCAAAACAATTATGAAAA
AGCAAAACAAAGTTGGAGGTATTATACTTCCTGATTTAAAAATTATATTACAAAGTTATAGTAATAAAGACAGTATTATACAGCCATAAAAACA
GACACATACACCAGTGGAACAGAATAGAGAGTCCAGAAATAAATCCACGTATATATAGTCAACTAATTTTTGACAAGGGCACCAAGAAGACACA
ATGGGAAAAGAATAGTCTCTTTGATAGGATGTTAAGAAAACTGGATTTCCACATGCAAAAGAATGGAATTGGACTGTTATCGTATACCACATAC
AAAAATCAACTCAAAATTGATAAAAGACCTAAACATAAAAGCAGAAACTATAAAACTCCTACACAGGAACATACGGGAATAGCTCCTCGACATT
GGCGTTGGTAGTCACCTTTTGGATATCACAACAAGAGCTCAGGCCACAAAAGCAAAATTAAATAAATGGGGGCTGGCCGCAGTGGCTCACGCCT
GTAATCCCCGCACTTTTGGGAGGCTGAGGTACGCGGATCACAAGGTCAGGAGATCGACACCATCCTGGCCAACATGGTGAAACCCCATCTCTAC
TAAAAATACAAAAATTAGCTGGGTGTGGTGGCGCACACCTGTAATTCCAGCTACTTGGGACGCTGAGGCAGGAGAATCGCTTGAACCCAGCAGG
CCGAGATTGTAGTGAGCCGAGATGGCGCCACTGCACTCTAGCCTGGAGGACAGAGTGAGACTCCATCTCAAAAATAAAATAAATAAATGGCACT
ACACCAAACTAGAAAGTTTCTGTACAGTAAACGAAACAATCAACAAAGTGAAGTAGCAGCCTACAGATTGGGAAAAAATTCCAATCAGTATATC
CCAATATTCCAATGTACATCAGATATATTGTAAATCATGTATTTGGTAAGGAGTTAGTAGCCAAAATTTATCAGGAACTCATACAACTCAATAG
CAAAGAACAAACGAATTACCTGATTTATAAAATCGGCAAAAGGCCTGAGTACACATTTTTCTAAAGAAGACACAAAGATGGCCACAGGCATATC
AAAGGCTACACAACATCATATCAGGCAAATCCAAATCAAAACCACTGTGATTTACCTCCTCACAACTGTTAGGATGGCTGTTATCAAAAAGTCA
AAAGATAACAAATGTTGGTGAGGATGTGGAGGACTCTTGTCCACTGTTGGTGGGAATGTAGATTGGGTATAGCCGTTATGGAAAACGTTATAGA
GGTTTCTAAAGAAATTAAAAACAGAACTACCATATATCACCCAGCCATTCCTTTTCTGGGCATATACCCAAAGGAAATGAAATCACCACCTCAT
AAAGATGTCTGCACTCCCATGTTCACTGCAGCATGATTCACAATAACTAAGATATGGAAACAACCTAAGTGTCTGATGATGGACAAATAGAGAA
AGAAGTGGCTGTAAGTATACCACATTTGGTTTATACAAAATGAATATTATTCAGCCCTAGAAAATAATGAGAGCTTGTCATTTGCCACAACATG
GGAAAGCCCATTGTGCTAACCCAAATACGCCAAACAAAGACATATTATATGATCTTACTTATATGTCCAACCAAAAAAATTTCAAATATGCAGA
GAGAATACAACAGTGGTTACCAGGGATATGGGTTGTGCGCAGGAAATGGAGAGATCTACGTCAGAGGATACAAAGTAGTATGAACAAGTATAGA
CATCTAATCTGCAGTATGAAGACTATAGGTATGGCATTCATGCTAAGTGAGATTTTAGCTCCTCTTAACATAAAAACAAAAATAGGGTAACTGA
GATGATGGATATGTTAATTTGCTTCACTACACTAACCTTTTTACTATCTATATTAAGCCTATAACATCACGTTGTATACCATAAATATACGTAA
TAAAAATTATTTTTCAAAATAAAAAAATACAAGATAACTTCTCAACATTTCACTGTTCTAACACAAGTTTCTTCCTTATTCACATGAGGTCTTA
AATGGCTGTTGATGAATGGTAGGTGACATTTTCCTCCTGGAAATCCTTCAGGAATTCAGATTCCTTCCATCTTGTAGTTTCTCCATCTTCACCA
TGTGACTCCCAGAGTTACTGTGCTTGTTTGCATCACATCAAGACAGCGGGAAAAACATGGCAGGTTACACATGGAAGGTTTTTATGGAGTAGGC
CTAGAAATTAGCATAGAAATTAGGCCTAGAAATTAGCATAATCACTTTCACTTATATTTCGTGGTAGAACTCAATCACATGTCACCAACTAGCT
GCAAACCACGCTCGAAAACGTGGCCCAGCTGTGCACCAGGAAGAAGACACTATAAGTTTCATGGAATAGTCCCTGTGGGAAGTGGGAGGACACA
GCTAATGCTATGAGGCCTGGATTTATCACACTGTACGTTTTATGTGAGATTTTTTTTTTCCCCAGGAGCTTCAACATTGAGTTCACTGGTGAAG
TTGCTGAGAAAGCAGGTGGTTGAGTTTGAAATTCAGAATTTGGAGGTTCAAAACTGAATAGTTTTAAAAGGAAAACTTGGGCAAGTCTCCGTTG
GAAAATGTCTTTTCAGTGTTTCCGTACATTTTCGCGTTGATATGAGAAGGGCATACTCACAACATATGTCACTCTGTGTCTTCCTGGTTTTCGG
TCCTGCACCTGGACAACCAAACAGGACTCGCCCCTTCGTTCCTGCTTCACGTTGGACCCTTCAGTCGGAGATAGTATGACTTACAGAGGGAGAG
ATGTTTTCAAACCCTGTGAAACCACCCATTGTTCAGATGAACCATTTATCTTGCACTTTTCTCTAATACAAATGAATGAACCTTCCTGCTTCTA
GCTAGTACCCTTATTCACCTGCTCTTCTGGTGGTATGCAATGCTCATTACATTTTTTGCTTTTGCAAATTTGTCTCATTGTGTTTCCTTTGCTT
AAAGTTGGCTGTTTTCTTCTTCCCTCTTCTCTTCCCTTAAATCATTGTCAATCCAAATCCTGGACAACCTGTCCTCTCAGGCCCAACTCAAATG
CCATCTCCTCTGTCATTCTCCCCATTTACCACAGTTGAGTCCCTCCTGTCTTCCTGACACTCTTTGGGTCTCAGTTTCACCACTCAGGTGGCCC
ATGGCTGCCTTGATACTTCTGTATGAGTCTTTCACCTACTACATTTAAAACTTGATGATAGAACTGTGACTTCCTACTACTTACTTGCTCTTAG
CACAATGTCTTACACACAGTACATTTTTAGTAAACAATTGTTGAGTCAAAATCAATAAATATTGCTTATTGTGGACCACATAGAATCAAGTTCA
CTTTGGAGAATCAGTCTTGTGTGGCCACAGATCACATCAGCAATGTAAAAATTAAATAAATAAAACAAGCCTAAGATAATGTGTTACAAGGGGA
CAAAGGCCTCTACCGATTTTTTCCATCTCTAATGATCATAGAGATATGATTTGTATTATTTATGTGGGCTAGAAAAGGCGATCTCTATTAGGGC
TCTGAAGTTTGTGAAGGCTCCAGCCACCCATCTGATGTTGAAAAAGTCAATTCATTGACAACCCACTGTATTTACAATCTTGACTTATTTTCCA
GCGTTAATGGAGGCAAACTGAGATTTCGGTTGGTTGGTTGTAGGGAGTATAAGTTATATCAATGCTCAGGGGAGTAGTTTTGAGTTTGAAACAT
TACAATAACTTCTTCAGGCTTTTAAGATGTACATAAAATACTTCTAAGTCGATGATAATGAATTGACAAGAGACCTCTTTATACAGCTACAATA
TATCAAGTTGTTACTTTTCTACAAATCTCCTTATAGATTGGGTTTTGCTGGTACTGTTTTTATGGTTGTAGTTGTTTATTGTAGGATAAAAGTC
CAAGAGGAAATGTCTCTTAAATATAAAATGTATATTCTAAATATAATATATAGATACTATGTATAAGCTATTTTTCTGCTCTAGGTCCTTTTTA
TTTTCTTAAAGCCAAACATATTGTGTGTGATTCAAACAGGTAGAGAGCAATTAATTTAAAAGTGGCCTAAAACCCACCTTCCTCTACTACCTTT
GAGGGGCATTATACCATTATATGATCCAGGATTTATATAGCAGATTATTTTATCACTACTCCCTTAGAGCAACCAATCAATCAGCTTCATTTTA
TTAGGATGCTTTAATATACCCATTTTAAAAATGTTTATTTAATATTTTTAAGTAATTTTTGAAAAGATCTAGGAAGATTCACATACTCATTTTT
TCATGAACAAATTATGCTGTATACTTAATTGAGTCTGTCTGTACGGATCATTTATTTCTATTCATCAACTCTTTACCAACCTTCATACTAGATA
TTGAGATGATAGTCTATTGATTTTGTTTCTCTCTCTCATGTTTTTCTAGTATGTCTTATCTTTTGGGGTTTATTTCTGGCCCTGGAGATCATTC
TTTTATGTCAGTTCTCAGCTAGTTGTCATTTGTTGCTAAATTACCTGCATTCAAGTTTTTATAAATGAATGTAGATATTTTGAAAACTATTTCT
TTTAGGATACTAAACAGTAAGACAAAGATACACTGCACAATTGTGTACAAAAGGTCTTTTGGAATATGACTTCTTTGTTAAAAGCAATTTGTGC
CATGATAGTTTAAAAAAAATAGTTCCGCAATCATGTTTTCATTTATGACTATCTACATACTCCATTTGACCAGAGAGAAGTTTTTTATTATCAC
TAAGGCCTCTGTGTAACCAACTTCACCTCAAATATGAAATATATGGTGTAACAAGTGCTGTGTTTTCTCTTTAAAATACACTTGGATTCTTCCA
CGAGGTATATTAAAAATGCTTTGACATCATTATTTCATCTTGAGTTACCCTTTCATTCACTAGCTTGGTTGGAGAAAATTAACTCTTCAATACA
TGATACAGAAAATCTGTTGATGCAGCCTCCCTCCAGTTCTTAGTATTTAATTTCATGAGGGACATAGCACTTTTCCCCATGTAATTACAGATTG
GTAGAGTTGAGCAAGACCTTAAACATCCTGAAGTTTAACACCCATCAAATGCAGATACCTCTTCTAAGGTATCCTAATTTCTATATCGAAAATA
ATTCTAATTATCAGTTTACTTGGCAAATCTGCCATAATAAAGTCTTTTTCAAAGTTATCTATGCCCAGTTCCCCTCAATATTTCTCATAATATT
AGTTCCACAGTCATTCTGATCTCACTCCTTTTTGCTTTCTCCAGTTTATCAGAAACTTCCTTAAAAGGTAGTGGACAAATTATAGAAGTACCTC
CCTTTTTTTTTTGAGGCAAGATTTCACTCCTGTCATCCAGGTTGGAGTACAATGGCGCAATCTTGGCTCACTGCACCCTTCACCTCCCAGGCTC
AAGCAATTCTCCTCCCTCACCCTCCCAAGTAGCTGGGTCTACAGTTGCATACCACCATGCCTAGCTAATTTGTGTATGTCTTGTAGAGACGAGT
TTTCCCATGTTACCCAAGCTGGTCTTGAACTCCTTACCTCAAGTGGTCCGCCTGCTTTCCCCTCCCAAACTGCTGGGATTATAGGCGTGAGCCA
CTGCACCTGGCCCTAAAGCTACTCTTTCTGAGCAGTTTGAGAGGGACTGTGGCTTATCTCGCCTTGAGAACAGTGTCTTTATTAATGCAGCCTA
AGAGTACATTTTTCCAAACCCATCACACTGCCTGTATTGAATCAAGAGGCTGCTCCACCTCCATGTACTGACCATACAGGACCTCACATTTCAG
CCTAGTAAACTTGACTATATTCATTTTGGTCTATTTTTAACCTTGTGAGAACTTTTGTAATCCTGTTTCTGGCATCCCTGGTGTTGTGTTTTTG
TACCAATACAGCTTCTGGATCATTGTCTCAATCATTGATAAAAATGGGCAAATACACACTTTCTGTCCACAGTGATAATCATATCCATTACTTT
TGCTTTAGATAAGAGTCTTCCTGTTGATCATCTTTGCCTGGGAAGTTCAATGATAAAGCCAGAAGAAAGCATCCTTTCTGATCATTGTAAGTTT
TACTTTTAAGGAAAGAGACTAAAAAAATTTAGCAGGAAATTTAAATTTTATTAATATCATCTCATATACTTTAGAAGATCTAAAACTGTTAAAA
GAAACAAAATGGTTTACACTGGAGCCTGGTTATAACCTTTCTTTGGTAGCCCATAGCTGTGGGGCCCATAGCTTTGGGGCCCAAAGCTCTCTTT
GATTTGAGTCAGACACCTTCCCATGTGCCCAGGAATTTTGATTATGGCAGCTCATATTATCAAGTCTTCATCAGATTTGGCTGGAGGGAAAAGC
TGTCTGTCACCAAGTTGTGTGAATCTTTGTATTGCTAAAAAGGATACCCGGGCAGTCTTAAAACTCGTGCCTTATGTTATTTGAACTTTAAAAT
ATTCTCATGTTCATGTTTGCTCAGGCTGGCTACTCCAGTTTTGTTACAACATAGTGCTGCTCAGACCATCGTTGAAAGTTTGATGCTAAAAAGC
ACAGTGTATTTGAGCATAGTCAATTCTAAAAAAAATTTTGTTTTCTTTCTTCCTTCCTTCTCCTTTCCTTTCTTCTTTCTGTCTTGAAATCTGT
GGATTGAACTTTCCCACCCCTCCAAAAACAACTCAGAAAGTATATCATGTGTCATCACTATCATCTTCCTTTTATCAGTGCAGGTTTATAGAAA
GTGTTCTCATATCATCCTGAATCATTTCTACAAACTATAAAACAAAATTAACTTTCCATTACAATCCTAACAATTGTAATAAATGCTCCTATTA
CAAGCTTTTACTTCCATCCTGTGAAGTATATCATGCTGAGGCGAAAGTTGCATCTTCATTAGTCACCCATGACTTACTCCAGGTGTTACCCTCT
AAGTTAGAAAGAGAGAGGGCAAAATACCCTGGTGACACATACGTTTTTTAAGGGAAAAAATTCTGAAAGCAAAAGCGTTCTCTCTTTTTTTAAT
ATGACTAGCAAAAGAGTGTTGATTAACATGTGTCAAGCAGGTGCTGGGTATGTGCTAAACTAATGGTTTTCAGAGTACTCAGTGGCTATTTTTA
AATGTTTCTATATCATTCTCAGTTAAGCTGCTGGATGAAAAGTACAAAAGGCTAAAAATATTTACAGTTTCAGTAATGTCTGTTTTAAAAGAAA
CCATCCGCGTCTATGGCCACACCACCCTGAACGTGCCTGATCTTGTCTAAAAGAAACCATCCTGTGTGATTTTTCTTTATTTCCATTTGAAGGA
AAAGAATATTATGGCTTACAGAGAAGTGGTTGAAAGCAGTTTGTTCAACACTGAGGTTTTTACGAAAAAATGGCCATCAAAAGGACAGTAAGTT
CGGTTACAAATCATCACGATTAAAAAAAAAAAGTTCATTATTATTCCTTGTACTATATTATTATTACTATTTTTGTATTATTAACTCTAGTTCC
AACTGAAAATAGTATTATCTTTGAAACTTTTTGTATGGAGTTAGGAGACAAGTTGCTGGTATCAGATTACTTGGGCCTATATCTCAGCTCTATC
CCTTGGATATGTGATCCTGGATAAATTGTTTAACCTCTTTGTGCCTCAGTGTACCCATCTGTAAAACAGAATAATAATAGTGCCTTCCTGCTAA
GGTTGTTGTGATTAAATGACATCATGCTCTGCCTAACATGGTAAGTACTCAGTAAATGTTTGTTATGCTTATTTTTTTCATTTAAAAAAATTTT
TGGTTAAATGAACACATTTATTCTCTTAACCATTTTTGAGTATATAACTCAGTAATATTAGCTATATTTACATTGTAGTGTAACAAATCTTTAG
AATTTTTCATCTGGCAAAACTGAAATGTTTATTATGTTTTAAAACCTCATTTTTCTTCAGAGTCAGTTACACAGCTGTGTGGACGTAACACACG
AATCCAACCACCATTGGGGCAGGGAGTTTAGACTCTTCTGTTCACTGCTGTATCACAAGTGCCACAATCAGCATCTGGCCCATAACAGGGCTCA
ATCAATATCTGTCGAATGAATGAAGTAATGAATGAATGAACAGTGAGGCTTCATTTGACAAACTACATGTGTGTTTGAAAATTATTTCTTAAAT
GCTAAATCCATTTTTATGAGTGATTTTAAGTATACATCCAAAGTTGACTCCTTTCGGAGCGTCAAGTGATTTCTAAAACAACTGTTTTCTAATT
ATTTAGCAGTTCTGGCTTTGGTAGGTCAACTTTTCTTAAACTGGAAAAAAAAATAGTATTCTTAGTGTAGATTGCAAAAGGAAAGAGGATATGT
TAGATGATTTGCCCAAAATTTAAACAGGATTCGCTTTTTAAATTCAAGCCTTTTTGCTTTCATTCAGATCTGGTCACCAGACTTACTTTTTCCT
TAAGGCATATATGAATCATCTTGTTCTTTCATTCAGAAATCAAAAGTTCACGCCTACATCAGTATTTACCAAAACTGCTGCAACACTACCTTTC
CACTGAGAGTGCATTACCTTTTTTTGAGTCTTTGAAAACAATGTCAGCTGAACATGGTCTGGAAGTGGCCAAAACTCTGTGGGTGGGGAGAAAG
GAAGAAATAACCTATCTCCCATTTAAAAACCTACCACCTATTAAATAAACGGCAGTCTTGTTCTGTGGAGTATTCATTTGGGTTATCTATTCTG
ATGAACAAATACAAATTCTTCGTAGGGTTTTCTTGCTTCTGGATAAAATGCTTAGTGTTGCTTTTTGTTCTTCAATCTTAGGTTTTGTTTCATT
TTGTTTTTCAGGGTCTCACTCTGTCAACCAGGCTAGAGTGCAGTAGCGCAATCATGGTTCGTGGCAGCCTCAGCAGCTCCCTGGGCTCAGGTGA
TTCCCCCACGTCAGCCTCTCCAGTAGTTGAGACTATAGGCACGCACCACCACACCCTGCTAATTTTTGTGTTTGTAGTAGACATCGGAGTCTCA
CCATGTTCCTCAGGCTGGTCTCGAACTCCTGGACTCGAGTGATTTGCCCACTTTGGCCTCCCAAAGTGCTGGCATTACAGGCATGAGCCACTGC
GCCTCGCCTGTTTTTATGATATGTATTGAAATGCTCCAATAGCATTTTATTTTTATTTAAACATTGCTGTTAGCTACTTGGCACAAAATGTGTC
TTATGCCAAAGTTTACTTCCTTCTACCAAGGAAAGGGGACTCTGTCTCCTGGACTTTGCAGTTATGGGAGGAACATGACAGGAAGCTACATCAT
CTGCCAGGATTTTTATGGGGCCACATCACATACAGTGCCTGTCTGTAACTAAGAGCAAGAGCACATCTCTCCTTTCAGCTGATGTTTAGCAAAC
CCTCACTCTGCTCCCATGGCAAAGACAGTCACTCATCTTCCAAATTGTGGTATCTTGAGTCATTTCCATTATGACTTGTCTTCTGAAAAGTGAT
AAAGCAAAATCATCTTACCTAGTCATTTTTTCCCATTCTACAAGACAAAGTTTATCTCTGAATCAAAGAGCATAAATCTCTGTTGCCTCTCTGA
GATAATAAAATATTTTTATATTTAAATTTTCTGTTAACAGGAAAATGTATAAAACCTTCCCAAATTTTTAACTCCTTCTTTTGATTCTATACCT
ACATAGGTTTTTATTTGGATTTGAAACCAAATAAAAGACCGTTTCATGGTCTGGGCCCTTGGGACAGCGTAGTAGTGAAGCAGCCAGTTCATTT
ATTCTTCATCTCCCCTGCCATGGCTTCCTGTTGCACTAAGAATCCAGCCTCCTCCCCGGAGTTGGTGGGAGTCTGCTGACCTCGCCCCAGCCAG
GCTCTCTGGCCTCATGCAGCCATTTTCCCTTCATTGACCCCATACCACCACTGTGACCAGGTGCACCAGGCTCTTCCTGAGGCTGCTTTTCTCC
CTCAAATCCCCACCCCACCTCCCACTTTTCATTTTTCTAACTCTCGTTCATCCTTCACTTGCATTTTAACATCACATCCTCTGAGAAGCCTTCC
CTGATCTCCACCCTTAATGAGCACCACCCAGTTGTCCATACTTTGCTTTCTCCTTTCTTTCCCAGCCCTTATTAGAATTTTAATTTCATATTTG
GCCATACATTTGTTTCTTTAATAGTTTTCTCTCCCATTAGTCTATGAGCCCATTAGCGATCACGGCTATTTTGTCTGCTGTATGTAATATCCAC
TTCCTAGCAAGCAGGACACACTCAAGGAAGAGTTATTGAATAATAATTTAAAAATATTTTTTATTAAATGAAAAATATAAATATCCAATTCTAA
GAATGTGCAATTCTGTCAGGAGTGTTAAGTACTGAAAAAACGACAGCAGATTAGTTAATTGGTTGATTTCACAAACATCTGTAGATTGTTGACA
GTGCACTATGATGTCCTGTTCTAGCTGCTGAGTACATGTGGACGGCTTGTTGCCTGGCTTTGCAGAGGTCTCACCTTGGGCAGATAGCAAAGAG
ACACAATGAGGAATAAAATTAGTGCCTTTCTCTCAAGGAGCATATGTATTCATTCATGTAACAAACATTTGTTGAGCACCTATGATATACTCTA
AGCTAGAAGACACTTGAATGTGATGAGTATAACATATAAGAGAGTAAAATTAATCTCCAACAAACATACAGAATCCTCTACGGATCAAGATTAA
GAAATGCTGTCTGATTAGGGACATCAGAGAGCATCCTGGATAAAGCAGAGACCGAAGTGCTACTTGAAGAATGGGTTCAACTTTGACAGCTCAA
GCTATGAGGGAGGAAATTCTAGGCATGGGAACCACTTGGGTAAAGGCATGGAGATGGGAAGACATTCCAGGGATACCTATTAACCCTTTTTAAC
TGAAGCATAGCGTGGATGATGGTGAATAAGAAGAAATTAGACTAAAAAAGTAGGTAGAGGCTATACTTTAGCGGAGTCATGAATTCCTCTAAGT
TTAGAAAAAGTTGATTTTAATTACCTTAAATAAGGCAGTAATGGTACTAATATTCCTGTTTGGTAGCCCTTAGGAAAATGATACTTGTGACTTG
GTACAGTGGCTCACACCTGCAATTCCAGCACTTTGGGAGATTGAGCTGCGACGATTGCTTCAGCCCACGAGTTCAAGACCAGCCTGGGCAACAT
AGCAAGACCCCATCTCAAAAAAAAAAATAACTGTACATGGTGGTGCATGCCTGTAGTCCCAGCTACTAAGGAGGTTGAAACAGGAGGATCACTT
GAGCCCAGGAGTTAGAGATTGCAATGAGCTATGATGACCACTGCACTCCAGCCTGGGTAAGACACCATCTCTACAAAAAAAAAAAAAAGAAGAA
CAAGAAAGAAATTGATACTTGTTTAAATATATTACATGTCAAATGTACTACAACAGTCCTCTCCAAATCAGAATATAAAGAGCTTCATCCTTGT
AAACTGCAGTCATGTTCTCGTTATAGTGGTAGTTAGTATGCAGGTCAATAATTTATATGTGGTCTTTAGCTTTGTCTTTTTCATTAAACAGTAA
AAACGGTAACCTGACATTTGAAGGTTTTTTTTTCACATTTGTAATATCAAAAACTTGATTCGTAACAAGTATCGTAAATTTACAAGTATGTTTT
TCATGCATATTTTAAGAAAATTTTCATAGGACTTTAACGTCAGGTTTCTTTTGAATACTTCCACATGCTCTACCTAACAATTTTAGTGTAAAGT
TTCATTTTCCTTATCAAATTCTATGTAAGTGAGACATTGGTGTTTTAGCCAAGGTACCCTGCTTTATGGAGTATCTGTGTTCCTAGAAAATTTG
TTTTCAAATATCATTTTGTAAATCAGATTGTATTGTAATATACTTGGTGACCTTTTGCTTCAAATCACCTTAAAATAAATTCATTTATATTATC
TAATTCATATTTTATAAATCCTAATTTTTATATCTACTCATTTTTCTTGAATTGGGGGTAATTCTACAAACAATAAACAAGGTAAATGATTTTT
TTTTGCCAGTTTGTACTAAGAGAACATGTTATTTTGTTTCGGGTGAATGTATGTATCTTAATACACTGTACTACATTAGACATCAATAGGGAGG
AATGTAACGCATTTTTCTTTTGTATGGAAATCTGTTGAAACCTATCTTAAAGAGTTTTGAGCAGAAATTGAAGGATGAGCCTGACGTTTTCTCA
TTAGTTGGAGAATATTGTTTTCACTAGACAACAGTAAGAATAAAAGTGGAAAAATTGTATTTAAAATTGATGTTTTATAACTTTCAGAAGTTCA
TCTCTCCATTTTACACATTATACTTATAAAAGTACAGTAATCAACTCTGCTTTATAACTGTTTTGTGAAGATTATTTAAAGGTCAAGGGAGTGT
AGTAGAGCCACAGAAAAACACAATAAAATTGGAATCCTAGAGTTTATGTGCATTTACGTTAATTTTGACTTAGTGGCTCCTGGCTCTCACCAAT
CTGGGTTGAGTGAAGGACCCACTGTTCATTGTGTTCCAGCAGTAGTCACTCAGACCCAGCTTGCCACGTTATCAGTCCAACTTAACTTCTGCCA
CGTCCCACTCCTCCTCCCTTGATAGCTTCTCTTGCTCACATCCTTTCCACCCCTTTGTGCTGCATTCCTCTGGCACTGCCACCCTCCTGTCATG
GAATCAGCGTCTGGCCCACGAGACCTTTGGAGAAAATTCCTGGAGAGCAAGTTTTCATAGATTTTTCTCCAATTTTTTCTGTTTCCACCCTGTT
ACAAATATTTTAATCCAAATATGAAAAATCTTTAAATTCAGACTTCTCTTGTTTCAAATTCAGACTTCTCTTGTTTCAAATTCAGATTATTTCT
GATCACCTCATAGCTAGTTCTTGAAGTXCATCTTAGCAGGAACAGAGCTAACTAAACTACTGAATGATGTAAATGAACATATAAAGGCTATGTT
TACCTACTTAAGAAATTGCTTTTAGCCAGTTTAGAAATGTCTCCTTACTCTTTTGTTTTTAAATTTAAAAAATTCTTCAGAGATGGCATCTCGT
TCTGTCAACCAGGCCGGAGTGCAGTGCCACCGTCACAGTTCACTGCCTACCTCAGCCTCTGGAGTAGCTGGGACTACAGGCACCCACCACAACA
CCTGGATAATTTTTTTAAATTTTCTTGTTAGAAACAGAGTCTCTCTATGTTGCCCTGACTGGTCTTGAACTCCTGGCCTCAAGTGATCCTCCTG
CCTTGGCCTCCAAAAGTACTGTGATTACAAGTGTGAGCCACTGAGCCTGGTTGAAATGTCCACTTACTTTTAAAAATGAATTGTATTTTAAGGA
AGAGTTTGCAATGCTTAAATAATTTTCATCAGTTTACTTAAAAAGTACTAAAGCCTTTTTTTTTTTTTAAGACAGAATCTCACTCTGTCACCCA
GGCAGGATTGCAGTGGCATGATCTCAGCTGACTGTAACCTCTGCCTCCCAGGTTCAAGCGATATTCTCCCACTTCACCCTCCCAAGTAGCTGGG
ATTACAGGCACCTGCCACCACACCCGGCTAATTTTTTGTGTGTTTTTAGTAGAGACAGGGTTTCACCATGTTGGCCAAGCTGGTCTCGAACTCC
TGACCTCAGGTGATCTGCCCACCTTGGCCTCCCAAACTCCTCCGATTACAGGCGTGAGCCACCACACCTGCCTAAACCCTATTTTTAAAGCATA
ATTTATATTACGTATTCTTAATCCTTCACGGTTCTTGTTTGGTTAATTTCAGCAGCTTAAGGAAGATCACTTGGAGCTAGAAACGCCCATGAGG
GTGATGATGGCTCAGAGGGGGCAATAGAAGCAGCTTTTAGGGAGCAGTCAAGTGCAGTAGGTAAACATGGGATGTGTCAGATATGATACCAGCC
AGTGGTCCCCATAGCACAGGCAGCAAGTGTGAGGCACAGCACAGAGCACATGTACACGAGTATTTGTGTGCGTGTGTGCGCATGTGTGCCCGTG
TGAAGGGGGGAGGGGGTGGTTGCTGTCAGGTGAGCAATATACCCAAATGGAGACCCCAGAAGCAGCTGATACTAATCCATCCAAGTAGGCAGCA
GTGTCTGTCCATGAGAATGTTGGGCCCAGCCATTATCCAAGGATTCTAGACCAGATTCTGGAGAGATCACAGCAGAGTTTCTGCTTGACTTCAC
TCAGCTTCAGTGTTTGAATCTGTAAAATGGAAGCAGTAATAGTAATTACCTCAAGGGCTTATTTTGATCGCTAATTGAAAACATGTATGCGAAG
CCCTTGAATACCATCTGGTACATAGTAAGTATTTAGTAAATGTTACCTATTACTGTATTACATGAAATTGGGAAGACAGTATTTCTTTTTAAAT
GTCCTATAAATAACCGGGTGCAGTGGCTCATGCCTGTAATCCCACCACTTTGGGAGGCCCAGGCAGGCGGATTGCTTCAGCTCAGGAGTTCAAG
ATCAGCCTGGCCAACATGGTGAAACCCTGTCCCTACTAAAATTGCAAAAATTAGCCGGGTGTGGTGGCACATGCCTGTTATCCCAGCTACTCAC
GAGGCTGAGGCATCAGAATCATTTCAACCCAGGAGATGGAGGTTGCAGTGACCTCAGATCATGCCACTGCACTCCAGCCTGGGCAACAGACCCA
GACTCTGTCTCCCAAAAATAAAAAATAAAAAATGAATGTCCTATCACTGAGGTTTATTGCTCCTCAATTGAGCTATTCCAATCAATGAAATTTT
ACTACATAAAGGTAGATGCCTTCTAATGGTTTTCTTCCCACAGGGATGGTGGGGTGAGATGGGCAACTGTTCAGGTAGTAGACCTGTTCATGAG
GAAAAAAACTATTTAAATGCTCACAAAAGGATGCTAGCTTTTTTGGATCCATCATCATTTTTGCCAAATTCATAGAATTTTTGCCCAGTGGTGT
CAAACTTTAAAATTCATAGGAAAAAGAGATTCAGTAATTACTCTGTAATATTAGGGAGGGTGTGGAAATAACGAATGAACGTTATGTAAAGACC
ATAATGCTAGTCAGAGAATGTTCCAATGGAAAACTGATGTTTCCTTCTGCCACCAGGACAAAACTTTTGTGATCTAAAGGCAAAACAATAACAA
AAACAGCAACAGCAACAAAAACCAGCCTAACAGTCCCAAGTGGTCTTCACTGTCATGATTATTAAGCATTTTCTCCAAAGTCTGAACTACAGTT
TGTTGAGGTTTCATTGAAAATGATACTAAAACAAATTTGCTTAAAAGTAAAATGGAGTTATTGGCATCACAAAGATCATAGTCACCTTCTTAAG
AATTCCATAACCTTTAATGACTGTAAAGGATTTTTAAAGACGATCCTTGCCACTAGTTATTAATACATTTTTTTGAGGCTGTGCAAATCAGATA
ATTTGGGCCGGGCACATTGGCTCACGCCTGTAATCCCAGCATTTTGGGAGGCTGAGGCGGGCGGAGCACCTGAAGTTGGGAGTTCAAGACCAGC
CTGACCAACATGGAGAAACCTTGTCTCTACTAAAAAAAAAAAAAAAAAAAAAAAAAAATTAGCCGGGCATGGTGGTGTATCCCTGTAATCCAAG
CCACTCGGGACCCTGAGACACCACAATCGCTTGAACTCGGGAGGCGGAGGTTGCAGTGAGCCAAGATCACCCCATTGCACTCCAGTCTGGGCAA
CAAGAGCTAAACTCCGCCTCAAAAAAAAAAAGAAATCAGATAATTTGCCCAAAGTCAACAGCCCAAAGTCAACAACTCCTGAATTTTTTGATCA
CATTATCTTTCAAGTTTAGTTAGAACCTGAAAGTTAACTGTCCTTCACTTAGGTAGATCATAAATAATGCACTGGTCACATTGTGTAGATATTA
AGTTACACTTTGGTAGATGGATTTTTAGATATTGAAAATGATAGATTGCTACAACTGCTTTGAAAGTTTGGCAGCTTCTTATAAAGCTCAAGAT
AGGCTTAACGTACAATTCAGCAACTACGCATCTAGATGTTTACCCAAATGAGTTGAAAATTTATGTCTGCAGAACAACCTGCATGCGAATCTTG
ATAGCAGCTTTATTTATAACTGTCAAAAACTGGAAGCAACTAAGGGATCCTTCATTACATCAATTGATAAACTGTGGTACATCCAGATAATGGA
ATATTATTCAGCACTAAAAACAAATGAGCAATGAAGCCACAGAAACACACAAAGGAACCTTAAATGCATATTGCTAAGTGAAAGAAGCCAGTCT
GGAAAGGCTACATACTGTACGATTTAAACTATAGAAAAGGCAAAAGTCAAAACCATAGAGACAGTAAAAAGATCAGTGGTTGCTAGTTCAGGGA
AGAGGGGACAGGATGAACAGGTGGAGCACACTGCATTTTAAGGGCTGTCACACTATTCTGTATGATATTGTAATGGTGGATAGATACGTGTGTC
AAAACCCATACAACTGTGTAACATAAAGAGTGAACTCTTATGTAAACTATATTGACTGTTATGACTAGTTAATCCTATATCATCATTGGCTCAT
TAATTATAACAGATCTACCATACTTGTGCAAGATGGTTAATAACAGGGGAAACGGGGAAGAGGGAACTTTTGGCTTAGTTTTTCTATAAACCTA
AAACTGCTCTAAAAAATAGTCTACTAATAAAAAAAAAAAAAGAAAATCAGGATAGATTGTAGCTTAGAAATAAAAAAACAATACTCCAAGACAA
AACAAAACAAAAGCCTTCTATAATCTCTTTCATATAATATTCCCCACCTTATTTCTCTAGTTGTTTTTTAATTTTTTTTTCATTTATCTTATGT
GTTATCTCATCAACCTTTAGTAACGGGCAGTTAAAAAAATAAGCAGTTTGGCAACTTCCTGTGGCATACATTTCAGATTGTGAGCAGAGATCCC
CACCATGTGACTGGCAGGTGTCCCTCTCCCTAGCCACACCCTGTCCCTCTTTTCCACCTACCCTAGCATTAGTTGTCTCCTACCTTGCTTTTGA
CAACAGACAGGGTGAAAATGTGGGCTTGTGGCCATTGTGCTAAATGTTTTATTTCTATGTATTTTTTAATCCTTACAGCAGTTCCCATTTTGTA
GATGAGGAAATGAGAGCACTGGAAGAGAGGAAATTCCTACCCTTGCAGTCTGACTCCATTCTGATCCTCTATCAGGCTAATGTGAACACACCTC
ACTCTCTGTCCCAGCCTGCCCCCTGTTGAGTAGGTGGGAGGGGGAGCCATTTGGAGGATTTGGTCCCAGTCCAGGTGCTATTTAAGTGAGCGGT
TGATTTTAGCTGTGCTGAATACCACCACCCTACAGGCTAGTGTCTGCCATTGAGAAGTATCATCTCATCATTTTCAATCTATTAACTGATACAT
TATCACATTATTATTATACATATATATTATTATATATTATCTGGAAACCATATAACTATAATTTTAGTCAACTCTTTTTTTTTTTTTTTTGAGT
TGGAGTCTCGCTCTCTCACCCAGGCTCCAGTGCAGTGGGGCGATCTCGGCTCACTGCAACCTCTCCCTCCCAAGTTCAAGCGATTCTCCTGCCT
CAGCCTCCCAAGTAGCTGGAGACTACAGGCGCACGCCACCACGCCTGGCTAATTTTTTCTATACTTTTAGTCAACTCTTAATTTCTAGCCTCAT
ATTGACAAGTGATAGGGTTCAAAAGTAATATCTGTTGGCTTTGGAAATAATATTATATTTAGTATTATATTTAATGGAAGTTAGCAGATTTAGC
TTCTTAATAATGTTTGGCTGGAGGCAGTATTAACCTTTGGTTGCTGTCTTGTGGCCTGCAGATGTTTGTAATGCAAGAGATAGGAATTTGGTCC
CTAGGAGGGTAAAGCTAAGGTTCACTCTAAGAAAGCCACAAAGCAGACAGTCTACATGTTGAGGATTAAATGTTGATTTTACCTGGGTCATCAT
TTTTAAAGTCCATTTGCCTTCTTATTTTGTGATGAATATTTAACATTTTCAACTACATCTCCTCTTATTTGCTTTGTAGTTCTTATGAGGAAGA
ATTCCCATTATAGTGGGGCTGAGCACATAACCATTATTTTTCCTTATGCTTGTTTTCTTAATATCGTAAAGCAGACAATAGCAGGATATTTAAT
GAAATACATCATGAATTTAATCCTAGACCAAAGCAAAGTATTTTCAAGTATTTTTCATTTTCACATAAATTATATTAAAATTCATATTTAAGTT
AAAATTTTTGAGACAGTTTACTTGAAACATAGTAGCATTCTTCACTGATGTTAGAATTACTTTATAAGTTATTTTGCATTTCTTAGGAGGCAAA
ATAGGTTTTCAAAAGGATTAACATGTGTTAAACTTTTTGATATTTCATTAAAAAACATAGTATTCGAAAAATGCAGTATTTTTTCATTTACTTC
CAAATGTTTTGTATTAAACTTTTTTTGACCTAGTAGATGACTAGTACAAATAGAACTTTTAAAGATTAGGATATACCTGTTACTTGTAACATGA
ATTTTTTTAATGCTTAATTCAAATAATAAAATATATCTGTTTTTGTATTTTCTGTAACAATATACAAGTAGTTCTCAGATTTCTTTTTCTATAA
GATGAATTTTTAGATCTTTATTTTACTTGGCAAGTCTAAAATAGTGGTCGTTCTGGGCTTCATTCATCTGTTCGTTTTTCCTACTGTTTGGCTA
ATTCTTGTATGTGGTTTTAATTTTTTTAATAGCAAATATATATTTCTGTATCTGAATAGTCAGCCTGTCTGTGTGTGTGTGTGTGTGTGTGTGT
GTGTGTGTGTGTGTGTATTCCCCCCCCCTTACTATGGAGATCATGCATGTCAGTCCTGAGCTTGGGGAAAACAGAAAAACAAACCTGACCTTTG
ATCCCTTCAGAGATAACATAATCTCTTAGTCATATAAAGATAAGGTCCATCTCTTAGTCATATAGACGAGATTTATATCTTAGTCATGTATCCC
TATATACATAAATATGTGCATATTCCCACAGATTATTAAAGCATGTACATGCATACATAAATAATTTTTAAAGTGAAAAGAGAATCCTCCTATA
ACACCTTACAGGGTGGCTATGTTCTTTTAATGTTTCATGGGGACCTTGCTGTAATTTTAGAGCCAGCACCTGGCTCAGGTTCACCCATGACATT
TTCAGCTGATCTTTCGCTTGTTTTCTAGTTGACCTTCAAACACAAAGTTCATAGCCTCTTCTCAGCTGTTAATGTGATTTACTTCTTATGTCTG
GGAAGTCAAGATTGTTGCTGAATTCATTCTTTTAAGCCGATTCAGCTCCTTGGTTTAATGCCAGGACATTCCCAGCTGACAGAAAACTAAATCC
GCCAACCCTAATTTCAAAGATTACCAGGTTTGTGGCTCGTGGACATCTTAGATCCTAGGTCGAGCAACTCTTAGGCTGTTCCTGGCACACCACA
TACATATGGGGTTGTGTATTGATTTTAATTCAAGTATCATTTTAGCATTGATTGGCAAACACCCTAGTGGCTTTCAGTCAGTAAAATTCAGTGC
AGCAGCTAACCTGCTGCTGCTCCTCCCTTAAAATCAGTATTTGAGTTAGTGGTCGTTTAACTTTGCAATTTTGACTCTGTCTTAAAATGTATAC
TTTTTCTTAATTTTCAAAATAGGAAGTGAGGTGTGCTCTTCACGTTCTTGGGCTCACAGCAGGGAGGTTATGAAATATAAATGAAAGGACACAC
TAGATGAGCTCCACACAAGGCAGTATCACAACTCACTCCCCCAAGAAGGAAGCACATCATCATTTCTTACACCGTGAGAAACAGCCATCTTGTC
ACAGGAAAATGAGATTGAAGAATTAGTCTGATTAAAAACAAATTACCACAGTTGCTGTTCAGTTAGGTGGCCTGCAGAATATTAGCAGCTCTGG
TTGGAAAGCCATCAGGAGTTTCTCTCAACCAAGACCAAGCTGCTTTCCTTACATCCCTGTCTTGTGTCCCAGCCTGTTTTATGCCTTCACCACC
CTCACTTTAGCTTTTTCCCAGTAGGAAACAATGGCAAGGTAGAGGAAGAGTTTTTAAATTCATTCTTATTAGGAGTGAGTTTTTTTCTTTGTAG
ATATTAGTAATCTAAAAGTAGAAGTAGTGTAAATATTTTTTACAGCATATAATTCAATTGCACATCACCAGTTGCGCTATCTGTATATGCAAAT
ACTCTAAGAAATTTAATATTTTATCAATAGCCACAACTCCAAAAATGAAATCTAATGACTTGTTTCTATGGTAACCACTATCGAAATATGTCTA
GCCAGTGTGTGTCTTCCCATAATTTTTCTCTAAGAGTTTCAGGGAGTTCATTAAATTTGCTTTCCCAACATAGATAGATGATCGATCGATCGAT
AAGAGAGAACAGATACATTTTTCCCCCTAATGGGGTTATGAGACTATTATAAAATTCTCTTTACCTTCGTATAGAGTATGACTTCATTCTTAGA
CATGAATGTATTTGGCTAAGGGACAAGCCTATTGTTTTATAAATTTAGTTTAAACCAGTAATAAAGCCAGGTTAGTAATAATTTCTAAAACGAG
ATTAATCTTGCTTCATA\ATATTTTCTGGTATTTATATATGGAACTGTTGGATTGCACACACATTGATTTCTACAATGACCCATGTCCTTTTAA
AATTGAAATTCATTTGCTGTTCCTTTGAGACCTTGTTAGATTTCTTTATTGCTCGTCCACCGTTGTCTTTGTTATCTACCAGGGCGTTGAGTGT
CTGTCCACCTTGATGGAGTTCTGACCTGGATTTGATCAACATCCCCTTGTGGCCTTTCTTCCTTGTCAGAGGTTGTGTGCTGCAAATACAATGA
AAGTCACAACTTATTTATTTAGAGATCTTGACATTTCCCAGCAGGTTCATTCAGAAAAGCTGACTACAGTGTTTCCAGAGGTACAGAAGAGATT
CCATTGCATTTTACATTTAAGAGAAAGTAAACTATTGGTTTGGTAAATTTTTCACCAGTCTCAAGGCCTGTCATGTCACAAAACAAACAGATGT
GGTCAGATATTCTAGTGATATAAGTGTCCATTCACCCTGAGTATTAACATTATGGCAGGGTTCATGGAATTCTCTGGTTACATTCAAAGGGAAA
CATTTTGTAAAGTAAAGTGGCAGGAAATAGATACTGAGGAAATAAAACTACACTCGGTCTGACAACCTGGAACTTTCATTTAGCCTACAAAGTT
GACAGACAGGCTAGGATGTCTCTGAACCTGTTAGATATGGTTGGTCATAATAACATTTAATTGTTTGTTGAGGAGGGATGACTATTTAACTTAA
GGGCCCTTCCTCTGTACTTTCAAGCTCTCCCAGATTTCTAAAACAAGAGCACTGCGCTGGGCGCAGTGGCTCACGCCTGTAATCCCAGCACTTT
GGGAGGCCGAGGTGGATGGATCGTGAGGTCAGGAGATCGAGACCATCCTGGCTAACACAGTGAAACCCCATCTCTACTAAAAATACGAAAAATT
AGCCGCGCGTGCTGCCACGCGCCTCTACTCCCACCTACTTGGGAGGCTGAGGCAGGAGAATCGCTTGAACCTGGGAGGTGCAGCTTGCAGTGAG
CTGAGATTGCGCCACTGCACTCCAGCCTGGGCGACACAGAGACACTCTCTCAAAAAAAAAATAAGAACATTGGCCTTCCTGAGTCCTCCAGAAT
GGGTTTGTACAATTTCACAGTGGAATCATGGACATAGTATAACTGCATCTACTTTTCAATTTTAATTTGTAGTCTCAGTTCTTTCAAGAAGTAG
CTGAACAGTGACAGGCACAGTTTTCTATACAGTGAGCTAAAGTAAGATAGCTTCATGGAATCAGGTGGTTTCATATCCTGAAATCCCAGAGACT
CTCTTTTTTGCTCCCTCATCTATTGCCCTGTGTTCAGGCTTTACCATTTCTCTTCTGGACAAACACAGGAAACTCTTTACCTGCCTCCTGCTTT
GCACATATGGCCAGCCCCTTGGTTCATCTTCCATACTGCCAACCAAATGTTCTTTCTAAACGCAAAACTAAACATCATGGCATGACTTTGCTTA
AAATCTTCCGAAGACTTCTCTTCCTTTGCAAGGTGTCTAAATCCCAGAATGTCTCAGACCTATCTATCTTTCCAGTCTACTCTTTCTGTGCCCT
GGGTAAACTGTTCGCTTCCCAAGTGCTTTGTGCTAATTGTGTGAACTCTTTCTGGGTCCCACCATGCAGGCCTGAGGTCCCTCATGGCTCAGGT
TTGTCTCTCGCCTACCATACTGTTTCTAATCCTTAGTTGACGTGCCTTCCTCACTAAACTCTAAAAAGCATTTTCAGCACTGTTTATTGCTTGC
TTTTGCTTAACAAATACTCAGCCCAGCACCTCGCACCTAGGTGGTGCTCAATAAATGTTTCTTATATCATTGAATAAATGAATGAAGGAATGAG
TTAGTGATATCACACAGGAAGCAGTGGTGAAGGAGACACTGCATTTAGTTAGTAAAACAGCCTTGAGCTGCAATTAACAGATTTCAGCAAGAGT
GACGCTGGTTCGTTCCTCCGTCGCCCCCATAAGGGCATAGCCCTGGTGAATAGCCACAGGACCAAAATCAGTTTTATTAGTTCTTTTTGAGACA
TGTGACTTGCAAGAATTGACTTATAGTTAAATTTATGAGAGATTAATTCATAATTGATATGCTCATGTATTCTTGACAATGAAAACAGGAAGGC
CAGGCAGCACAACTGACATGGGTCATTTGCTCAGGCCACATCCTGCTGCTCAGTAAGTTCATTCAGGAGGCCCAATATTAGAACTTACTAAATT
CTGAGTAAATGCATCCTTTCTAATTGTCTCTAAGCGATTGTCCATCAAGCTGGATTACCCAGAAGAAGGATTATTTTCTTTTCCTATTTAAAAA
TGTTTTTAAATTTAAAAAAATTTTTTAGAGACAGGGTCTCACTATATCGCCCAGCCTCAAACTCCTTCCCTGAAAGGATCCTCTTTGCCTCCAC
CTCCCAGGTAGCTGCGAACTACAGCCTTGTGCCACAATCCCTCGCTTTTTTAGTTGAACGCCATTTCTCTATAGATCACTGACTTTTACAACAT
CCTTAACAGTAATCAAAACAGTTCTACCTTTGTAATAATAATGGCTAATTCTTGAATGTTTACTGTGTTGGGCACTGTTCTAAATGCTTTATCT
ACTTTGACATAATCTTCACAACCCTGTGATGTAATTACTATTATTAGCTCTGTTTTTACAGACTGGGAAACCGAGAGCAAAGATGTTAAGTGAT
TTATCTCTGTTCTAACGGGTGCTGCAATTTGAACCCATGCAGATGCACTCAATACCTTTGCTTTTAACCACACACTAATCTTCCTTTCTATGAA
TGCAACCAGCATTTCTTGTGTTTGCTTTGTGTGACTTCGTTTAATGCTCCTAGCAACTTCTGCAAATTAGGTGTTAAATCTCTTTTGCTTGCAG
CCGAAAAAAGGTCTTGGTTTTTTGGTTACAAGCAACGGACTAAAGCAAAAAAGATTTTACCATGTCTTATACCTGAGCTATCTTTAGGTCAGGT
TGCTGACTATGATGATGGGTGCCCCAGTTGGTATGGGGAGGGGCAACTTTTCACAAAGGAAGGGGAGCCAATGATGGACAAACAAAATCACATG
AAGAAATGGAAGTTTAAATGACTTGCCCAAGGTCACCCAGCTAGTGAGTGCCAAAGGTGGGATTTGGCCCTAGGCTGCCTCTAGCACCATCTGG
GTTCACTCTGATTTGAGTGGACCCTTTGCAAACTGTACATCCTGCTGCTGCTGTTCTTTCATCAGCAGGTTATGCTATCATAACCATAACATGT
ATCATTTTCTTTATTCCATTCTGGTTCTAAGAATACACTGTGACCACCTTCTTTGAACCTGGCTGTTTCCCAAATGTAGTGCACATTGTTTTAT
TTAATTCTAAACTATCTTTTAGGATAGTTGTATAAACAGTTTAGTTCATCTAAAATTTTAACTAAAATTTGTACTGCTTTCCACTTCTCAAAGT
GACCTTTTTTTCTGACCTGGCTGCAAATTCTGGAGAAGGCTTGACTGAAGCTCTGTGAGCAGACCAGAGCTTTTTCACGCTAACGTTTATACAA
AACATTGACCTTCATGGAAATTCTGGTTCTTGATCACTTCGGTAACCAAGTAAGTTCATCGGAATGCCCATCTATTCACTCTCAACTCACAGCC
CTACTGTACACCTCCTTCCTCCGGAGCATGCTCTCTGGAAAGTGGCTTATACTTTGCACTTCTGAATCTGTTTGTGAGGAAATGACAGTATTTT
TCCGCACTTGCACCACCGACTGAAGCGCTGATCCTTGATGTGTTTAGTTTTTACCTGTGCTCATCTCTACATCAAAAACAGAGGAAGCCACAGG
AAATTGCTGCCTGTATTTCCACGAAACTTAACTACATCATCGCCTCCCCAATCCCCACAGCCCAGAACACCCTGATGCTGGCCTCAGTCTTGCT
GATGTGGGTGGTGATAAGGGGCCCAGAGTGTTCTCATCCTGTGGCTCTGCCAGTGAAAGCCTAGAAGAGATGAAGCACTCTTCAGACTAACAGG
AAAACCCTGAGTCTGGTTCTATAAGCACTTAGTCTCTGAACATGCCGACAGTGAGGGTGAAGTGAGGGATAATTCTATCCCAAGGCTAGTGCTC
CTCTTTCTTTCTGCTCAGGTGTCCTATCTTGTCCCTGGTCCATAGGCCCGTGGCTGGCATTCTCTCTGATCACAGAAAATTCAAATGATCCTCG
GAAAATTGTCACATGAGCCTGTGGATGGGGTCAGGAGAGATAAAGACCATAGGATTTACACTGGCCACCAGCAGTTCCTCAAAGAATTATAATA
ACATAATTGTAATACCAATCGCTGATATTTATTGAGCATTCACTTTGGTGTGCCAGGCATTTTGTCGAGGACCCTATGAGCATTAATGTAATCC
TCACATAAACCCCAAAAGGGACTCTTTATTATTCCCAATTGTCAGGCGAGGTACCTGAGACTCATAGAGTTTGATACCTTGTCCACGCTCATAT
AGCCATTAAAGGATGCAAAACTTGAACCTAAATCTGTGTCATTCTAAGCCAGCACTATACATAGTCAAGTACGTTTTACTCCAGGGTGGAGTGG
GGCTGGCAGCCTGTGTGCACAGGCAGACGGAAGCAGACAAGATCCATCCAAGGCAGGCTGAAGACTTATACCCAGAGAAGGCTTTGGTGTACAT
CTGCCAAAGTGATATTCTCATGTAGAAGAAAGGATTGGGTGATAGTCCAATAAATACTTTACCACAGCGAACTTATGTGTCTTCTGGGGTCTGG
CCAAAGTCATGAGTGCAAGCTCCCAAATAAAAAAAACGTGGCTTCTCACCTCCTCATGATCCCAGCTTCCTAGCATACCACTCTTCTCTATTTT
AGCTTATCAATTCCAAATGTGATTGAAACAAGTATGAGAAATTGATGTTGCTTCAGCTTCTCTGTGAACTGAAACAAATTCTTGTTGAAACATG
ATATCTCCTGCCTCATGGATCAAAGAGGGATGGTCTGGAAGAGAACCCCCCATAAATATTTGAGGCTTAATGAAGGCTATCTGTTGAATAATAC
ACCTGTATTATTGTAAAAAGTTTTAATTTGGCCTCAGAGATACTCCCCACTAAAGCAGACAACAAAAAAGTGAGAAAATGAGGCTAGGAATTAA
TAAAAGATGTCAAGAAAGACCATTTAAGGACTTCTTAGACACAGGCCATAAATGTGGTTTTGAACTTTTTGGCAGCTATTATGAAGACGGAAAG
AGAAGTGTCATGGGAATCAATTTTCAAAACTTAAAAGTTCTCTTAAAATTCTAGCAGAAAAATAGTTTGCAGCTCTACACAGGTATTGGCTAGC
ATTAGTTTAAAGTGGTTGACATGCAGCCCTACTCCACACCTCTTTATATTCCCTTTGTGTTTAGGATTAGAAAAACTCACATAGTATGATCTAT
CATATGTCTACTTCTGGATTATTTCAAGATTGATAATCTCGTTTGTGTATTATCTTGGTCTTCATTTCTCTTTCCTTCTGGGCCTGTTGTTCAT
CTACTGGACATTTCTTTTCTTATTAACATTTCTGCTAAATTTTAAACAGAGAAAAGAAAAATAAATACACAATTCCAGCTATTTGCAGAGGTGA
TTTCAATGCTTTGTCAGCTAAACCCAATTTCAAGAGAGATCTTTCTACATCAGTCTACTCATAATAGAACTCCTGGCTATCTTGGGTTGAGCCT
GCCTGCACGTGTGCTTAACCTGGGCCACAGATTAAGGCAGGTAACGGAGAAACACCTGCAGACGTACCTTTTGACCCCATTATACCTAAGATGA
ACGTCACTCCTTGTGAATTGATATAGAATGTGAAAAGGGTAGAAACTGCTGATTAAAACAAAGTGTTTTGATTATCTGGATTTCAGTAATAAGT
GTTTTCCTCTCTTCCAGTTATAAAGAGTTGAAAACCTTCCAACGCACTCTTGTATAATTCTGTCCTTAAAAGGTTTAGATAACGGTTGGGCTTC
TCTCTCTCTCTCTCTCTCTCTCTCTCTCTCTCTCTCTCTCAGACCAAATATATCATGTCTATTGAAAGTCTGAAGATCAGTACATTTCCTCCTG
TTTGGAAAATAATAATGCCTAGGTTTCACTAGAATTCTTTTTATCTCCAACGCTCTCTTAAATATTGACTAATTAAATAAAAACTAAGGAAGTC
TAGCTAAATACCCTCACTTTGAGGACCAGCCCAGTGGACTTAGAATACACAGTGATTTGCTGTATCTCTCAAACAAGCAACTAGAAATCTTTTA
TTATTGGCTATAATAGCAAGTGGCATCTCTTATTATGTTTGGCAGCTGACATTTCAAATTGCATTTTGGTTGGTTGTTATACATGAAATAGTAG
GATATGAGTAGACTAAAAATGAGAATTTGCAGCCCAGGGATGACATGAAATATCTAACATCTAGGGGTTGCCATGACAACTCATCAGAAAGTTG
CTTTGTAATCTTTTGGATTAGGCTCTGGCCCAGGGTCACTGGATTGGAGTTGGAGAACGCTTTGGTAACAGGATGTCAATGTTGTACCTTTACT
CAATGGCATTTGAATTTGCACTTTGGTCATGTTCCTAAGGTCAAGTAGAAATGACATTGAGGGAATTTTTAAATTCCCGCAGAACCTAGACAAG
GTCACATTTGTCAGCAAAAATACTCAGATGGAATAGTCTGAGACTTACCAACTCAAAGACACCATTTCCTGTCCTTGATAGATAAAAACTATGC
ACATATCCATTTATATATGCCTATCTCTAAACAGTTGTATCTAATGAAAATTTGGGAAATTAAACCCTTTTCATAATTGTCTTCTGTTATAAAA
TTGGAACTGAACACCCCTAAGAAAACAGTTTGGCCACAAACAAACCACAGCTGCTTTCTAGTGCTCTGTGTCCTCCCTTTCAGCTGGAAATGGC
CTGCAGGGTCTGGAATTTGGACCAGGGAAGGGAATTCGGCAGAGAGAGGAAGGAAGCAATTCCGAAACAGGCTACCACATTCCTCATCCCCCAC
ATTGGCCTTGACCACAAGGACAGCATCTTCCACATGATAATGCACCTCTCAGGCATGCTTCTCACCAGGGATGATCAATGGAAGCAACCTGGAA
ACTAAAGAGCTCTGTTCCTAAGTCTCATCCCACTTCTGCCACTCACACTCTGATCTTGAGCAAAACACATTTCAACTCTGGGTTCCCCTAGGAA
ATGAGGGGGCTGAGTTTCCTCTGGCTGTCAAGTTCTGCTATTTATCATCATGTGGGGGCAGAGCCAGGTCTCCACATCCCTTTTCTTTGCCATT
AAGCCCACATTCCCATCATAACTTTGCAGTAGAAGTACCGTTCATTGTTAGTGGGACCTCTTAATAATTAAAAGAAAGACAAAAAATGATTTAT
TCTTATCCCCATACCTTTTAAAGTTGTGGTTTTCTCAAGCAAAGGCTGCCATGCAGTGAGGAAAGGATGAAATTCCAGACAGAAGACACTCACT
TGCAATAAGTTGTCCTACTACCAGTACTGTCAGCATCAGCTCAGCTTATATTTACTGACTATTTTCTATATGCAGACAGTGCTAACCCCTTTAT
ATCCATCAAACTCTTTAATCCTTAGGACATATTCACATGTACACATGTATAGGTATGATGCATGTGATTAAAATTGAACATTTGCTATGTACCA
GGTGTTATGCCAAATCCGTACAATAATCCACTGAGATCAATAAATGGATTCAGTCAGTCAAGCCTCACAACAAAGGAGGTGTTATCAGTTATCT
CCGTTTTTACAAATAAGGAAACTGAGCCATAGCTAGTAACTAGTGGAGCAGGGATTTGAACCCACGTAGTATGGCCTCAGCATCCTTTCTCAAA
ACCTCTCTCCCTGTGGTTCTCCTCACTCATATGACATAACCACACCTGGGGAACTTTAGAAATATAAGGATCTTGGGGCCCCATTCTGGATCAG
TCAGAATGTCGGGGATTGCGTCCCAGACCCAGGTTTGCTAATATGCAGCCAGGGCTGGGAACCACTGCCTCAGATGGAATACCACGGTTATGTT
GTTGGAGAGTTGCCTGTAGCTCTACAGCCAGCAGATGACTGACCTAGGACTTGCATCCAGGCTGTAGGCTCTCAAGCCAAATATCTCGACGGCA
CAATGGGCAACAATTCAGTTGTTATCTGGGCTCATATCTACCACCATGCCTAGTTTCTCTCTCCTAGTCTAAATCGCAAAGCCGCAAGTTCATT
TAGGGCTGTTTAAAGACTGTATGCTACACCAATTATGAGAATCAGAGCACAAACTTCTTGTTGCAGCCAAAGCAGTGATTTCCTACTTAAAAGT
TTCAGAGGTAACCTTTGCTTTTACCTGTCACCAACTTAAATGTAAGTTATCGTGCTTTTTCCTCATTGAGCAAAATCTTGTACTCACAGAGTCT
AGGACAGTGGTTCTAAAACTCTGATGCACATTAGAATCTCCTGGGGATCTTTAAGAGCTACAGATGGCCTGGCTTCCACCCCAGACATTTTTTT
TTTCTTTTTTTTTTTGAGACAAAGTCTCGCTGTGTAGCCCAGGTTGGAGTGCAGTGGCATGATCTCTGCTCGCCGCAACCTCCGCCTCCCAAGT
TCAAGCAATTCTCTGGCCTCAGCCTCCAGAGTAGCTGGGATTACAGGCGCTGGCCACTGCACCCGGCTAATTTTTTGTATTTTTAGTATAGACG
GGCTTTCACCATGTTGGCCAGGCTGGTCTTGAACTCCCGACCTCACGTCATCCGCCTGCCTCGGCCTCCCAAAGTGCTAGGATTACAGGCGTGA
GCCACCCCCCAGCCTCTGATTTTATTAGTATGGGATGTGACCTCGGCAATGGGAGTTTGTAAAGCTCTCCAGGTGATTCTGATGTGTAGCAGAG
TTTGAACAGTGCTTTAAGAACTTGGTCTGTGAGTTCACAGATGTGTTGACTTGAGAACACTGTGGAATCACCTCATGGATAGAACTCACTTTTT
AACTCTCTGACAGTGTCTCTTGCGTTTCAGCTGGCAGGATTAATTTGAGTTTAATTCCACCCATTTCACTACCTGACTTGGAATTGTACCTCAC
TGTCAAATGATGGTTTCTCCCCAAAGGTTGTTCTTATACTTACGCTCATGCAGTGATATTGGCGACATGTCTGTAAGATCCCTTTGTAAAGTTC
TCAGCCTCATTTGACTCTCTTATTTCCACTATAGAATATTTCTTTTTATGTTGTTTTACCTTTTAAAACTGTTTTTTCTTGAGACAGTGTCTTG
CTGTCACCCAGGCTGGAGTGCAGTGGTGCCATCTCGGCTCACTGCCCCCTCCACCTCCTGGGTTCAAGCAATTCTCCTGCCTCAGCCTCCAGAA
TAGCTTGGTGTGCCACCAAGCCTGGCTAATTTTTCTAATTTTAGTAGACACAAAGTTTCTTTTCACTGTGCTGCCCAGGCTGGTCTTGAACTCC
TGGTCTCAAGCAATCCGCCTGCCTTGACCTCCCAAAAAGTGCTGGGATTACAGGCGTGAGCCACCACGCCCAACCTAAAAACATTTTTATGATT
TTAATACATGTTGCTTTTTTTCTTCCACGAGCAAAATAAACACCTCTTCCACATAATGCATTATAGTAATAATCCACCTATGGTTCTTTTCCCA
AAATGGCTGACCATCAGCCTCACTATTCGGAGACAGCAGCTGATGTGCCTGTAGTGTTTAACGGCTGATAGCGTCTTACAGATAGATAGTGATA
TGGTGGAAAGTTGGAGATTATGTAAAGAAGAATTGACTCAGACTTTATCCTCAGAGATTTTAGTAAAGTCAGATTAATGTAATCAACTGGAAAA
TATACATGGATTATAAAAGTATATTAAAGCAGAAGTGTAAATTTGTTGGCAAGTTTGCAAATGTACTGGATTAATCTAGAAATCATTTTTGCAG
TAAGTCTTAAATAGATTTTTAAACAGAGATGTTATTTTGTGGATAAAAAGAGACAGGTAATTTACAAGTGGAACAATTCTTGATAAAGGCTGGG
GATGGCAAATGGAGTGTTGCAGGCCACTAGGCCAGCTAGCTAGGCTGGTATGAAAAGTATAAACTGGGTGTAGCAGTTAATGAGGAAGGATTGC
TGAGGTGGATAGAGCTAGCTATTGCATGAGATTTAATACCAAGAATACTTTGGAAGAGCTTTTTTTTTTTTAAAGGGATATATCAGGAGTTTCT
GTTTTCCTTTATGTGGTTGTTGAAGTCTAGTTGATTTCTAGTCTGTAATTTTGTTGATATTTCAGATCACCAAACAAGGCTGGTAAGATGGGTT
AGTTATGCTTCTCTTGAGGATAAACCTTTTCAAATTAACTCTGCTTCTTTAGGTTTAAGAATTTCTAATTCTGTCTGTCTACATCTTGCTGCTG
TAATCTCCAAGAAAAGAAAAAGGGGTTAGGATCCCTCTCTTTTGAAATGGAGGGGTCAGAGCAGGCAGGGGGCTGTCACTGTTGTTTCTCTTTG
TTCAGAAATTAGAACATGTGAGCAAGTGGTTCCACCCCTCATTTTGTGAGCTGTTTTCCTCTGATATTTCCTAATTTTTCCCATGACGTTTTAG
CCTGTTTCTTCACAAGATTGTAACCCCTGAAAGACCCCATTGTTTGACAGGAGTGCAGGCTTGTGCACATTTGCTGATCTGGCTGCCCGGCGTC
TGAGTGTGGGTGGTATACCGCCCGAGGGATCATGCAGACGGGAGAATCCGTGGAGCAGACTCCTGGTAGTTGCAAACACTTTATGTGTATTAAG
AGTTCATAGAATGTCTTTTTGTAGACAGAAGATGCTGCACTTTGAAAATGTTATTCACAAACTGAAATCTCATTGACAGAAGTAGGGATATTCC
ATTAGGCTAAGAAAAGTTTCTTAATGCCAAATCAAATGGATGAAGGCCTTATTCAAACTTCATTTCATCTTCAGATAGATTCAAACTTTTATTC
TTGCAGTTCACCCACATTCCTTGATCGCCTGTCTTGGATTTATGTGAGCCTTTGGAGCAGCAATCTCACATACTATGCATGGCAAATCCTAGTC
AATGCATACTTTTTCAGAGTGCAAGATGTTAATTGTAGTAAGAGAAGAGAAATTCAATAACAAATGTTTTTGAATAAAGGAAGCTGAAATTTAA
TACTAATGCTGTTTTCTCTAAATGAAGTTAATATATTATTGTTGTATTAACTTTTCAGGAGTTTGAGGCTGCAATGACCTGTGATTGCACCATT
CCCCTCCAGCCTGGATGACAGAGTGAGACCCTGCCTCTTAAAAAAAAAAAATTCTAAGGACTTCGGCTCTGTGTTTGATTGACAGTAATAGACC
AATAGAAGACATTGCATTTATATACACTTATAAAATAGCATTCACATTTCCAATCAGATTTACAGAATTCTCCCTTATTTTTAAATGTTCTCAG
TGGTAACAGTGACGTTGGGACTAGAGTCAGTATTGTGAGTCGTTTATGCACATCTCTTCACAACTCCATGTTCAGTGAGTCATACTGGCAGCTT
GAAATCAGCCATGGTGGGAGAGTTTACACCATGGAAATCAAACACTACAAATTGGTGCTCCTCACCCTCAGAGTCTGTTTTTAAACATTTAGCA
GCATACCACTGCCCAAAATGGAGTTGAGCAGTCAGGGAGTCTCCTCTTCAGGCAAGTCATGCAGTGCTTCCACTCAACCAAACAGCCAACATGA
ACATTTTGAAATGTAGGCTGTGTGCCTCCTGAAGAAAAGTCCTTCATAGCTCCACATTTTTCTGAGCCAAAGCCTTGCTGTGATCATAAAGCTA
TTCATGCTGTGGCCACCACCGTCCGTCCTCCTGGCTCTCACCTCCAGATGCCTGGTTTCACCCCTTTTTCTGTAGAACATCCTAGACCCACTCC
TATTTTAGGGCCTTTTCTGTACGGCAGTCGTTCTCAAACTTTACAGCACATCAGAATCACCTGCAGACTCTGCAAAAACAGACCACTGGGTGCC
TCTCTAGCATTTCTGAGCTAGTGACAAGTTTCAGGGTAATGCTGGTGGCCTTAGGACCCCGCTTGGAGAACCACTGCTTGAACTGATGGCCTCT
TGGTTTACCTCTCCCCTCCAGATCTCTGATCCTCTTTTTCTTTCTCTCAGTAAGGCACACCCTGACTATCCTATGTAAAATTGCAGCCTTTCTC
CTCCACCACAGTTCTAATTCCTGACTCCAATTTTTATTTATTTAAGTTCCAGGATACACGTGCAGGATGTGCAGGTTTGTTACATAGGTAAATG
TGTGGCATCGTGGTTTGCTGCACCTATCAACCTATCACCTAGCTATTAAGTCCCAAATGCATTAGCTATTTATCCTGATGCTCTCCCTCCCCAC
CCCCCTCTAACAGGCTCCAGTATGCCTTGTTCCCTTCCCTGTGTCCATCCGTTCTCATTGTTCAGCTCCCACGTATAAGTGTGAACATGTGGTG
TTTGCCTGACTCCCAATTTTTTTCAGTGCACCTGTCACCTGTTACCTTACAACAAGTTTCTTATTTGTGATTATCGTCTGTCTCTCCCCACTAA
CTCTAAATTTCACAAAGATAGGGAATTTTGTCTGTATTTTTTTAAAAAACAGGGTATCACTCCAATTATCCAGACTGGAGTGCAGTGGCATGAT
CACAGCTCACTCCACCCTCGAACTCCCGGGCCTGGGCTTGCGTCATTCTCCCCCATCAGCCTCCCGACTAGCTGCCACTACAGGCATGCACCAC
CATGCCCAGCTAATTTTTTGTATTTTAGTAGAGAGTTTTGCCATGTTCCCCAAGCTGGTCTTGAACTCCTGGGCTCAAGTGACCCACCCGCCTC
GGCCTCAGAAAGTGCTGGGATTACAGGTGTGAGCCAGCATGCCCAACCTTGTTTCTTGTTGTTGTTGTTGTTGTTGTTGTTGTTATGATGTATT
TCAAGCCTCTACAACAGTGCCTCGTGGCAGGTGCTCACTAAATTGTTGAATGAATTAATGCATGAACAACATTGAGATATGAATAATGTATTTC
AAATTTTGGTCCCAGCCTTTTAAATTCTAACTCACCAGAGAATCTCAAAACACTTTCTGCAGTTTTGTTTCTCACCTTCACTGCTCTTAGGATA
ATCAGGAATGGTTTCTGCCCTGGGCTGAAGTTTGGGAATGACTTGATGAGCCTTAAAATACCAGGTGCACCAAATTGTTGTTCTTCCATTTACA
TTTTAACCTCAAAGTCCCTAAGCCAGTGATCTTCAAACTCTGGTCTGCAGAAGTTCCCTGGAGATACTTCAGAGGCTCTGCAAACATCTAATTT
GCATTTCATTTTAATATATTTTAAACTATGTTTTATAACTATAATAAAAGAAAATGCACACAAATGTGCTACCTACCAAATTTTAACACATTAG
GACCACCAGCACATTGAATTGGACTCCCAAGTCAACCTTGAAATAGTGTTTTCCACTATTTTGGCTTACATATTTGAACTTCTTATAAATAAAT
GAATCATTGATTAGGAACTTCCATCCCAGTATTTTTCATATTCCAGCCTCATCATAAATTGAACAGGCAAATTCCTCTTGTCACACATATTCAG
CACACTTGATGACATGCCAGGCAGCGTTTCAGAGCCTCTGTGGCATCGAGGCTTCTGTGTGGATTAATGGCTAGTTGTACAATAAGTGAACACC
ACACACATCACTTAGTGATGTACATTCTGTTAGAGGATCATGTCTACCCACTCTACATTTTGGATACTCTTTTACCTTAAATAGTTGTCAAATT
ATCATTAGTGATTAAAATTTGAAATAATATCTTGACTGCTGCATTTTCTCCAAGCTTTTAGATTAGTTTTGAGGCATATTATGAGATTATCAAA
TGAAATGCTAAACAACTGTTATAATTTCCAATACAACTGTGCCTTACAATTCAAATCTGCTCATTTCCAGAATTCAGCTGCCAAAATTTCCCAT
TGTAAATTCCAGTGCAAAGGAATTTCAACTTCTTATGTTCATGTCAGCTTCGTTTCTCAGTTTCAGATAGTAAGTAGTAACAGTAGCAAATAGC
GAGAGATTTGTCTGAAAATTTGAGTTTTGAGAGCAGAGATTCAGATAGTGTTATCTGTATTTAGCAGTATCAGGATTCTCTTAATACAGTGAGT
GCAACCAAATACAGACACAGAAGTAAATCATATTCTGGATCACTTTTAAAAATCAATTGAGGCTGAGCCTCGTGGCTCATACCTGTAATCCCAG
CATTTTGGGAGCTCAGGGCAGCTGGATTGCTTGAGTCCATCTTTTCAAGACCATCCTGGGCAACATGCCAAAACCCTATCTCTACTTAAAAAAA
CAAAAAAAAAATTAGCTGGGTGTAGTGGTGTCCACCTGTAGTCCCAGCTACTTGCGACGCTGAGGTGAGAGAATCACCTGAGCCCAGGAGGTCC
AGGCTGCAGTGAGCTGAGATCACGCCACTGCACTCCAGCCTGGGCAACTGCAGTGAGGCCCTGTCTCAAAAAAGTCAGCTGATAGAAGCCTTAC
TATCTGAAAGCCCCACTCCATCTCACAAGTGCCATTGAATACATTATATGAAACAGTTCTAAGTTATACATTATGGAACATTTTGTAGGCCTCT
TTGCATATCTGTTTATTAATTTACTTAATGCTCTGTTGTAATTTGTTTTGTCTCCTACACTGTATTTGAGCTCTTTGAAAGTAAGAATTATGTC
GTAGCTTTGCTTCCCCAGTCCCCAGCGTTGCCTAACATGTGGTGGGTACTCAGCACATGTTTATTAAGTGTTGGAAGTAAATGCTCGGTGCCAC
CAAGTGAAAATAGCACCCAGGCAAAAGTTTTCTCAGCAAGCCAATTTGCTTCTATAGAAGGGTGCCTCTCATGGATGGAGCAATGGCCAGAGCA
CACTGGACAAGGAAGGGGAAGTGGGTCTTATCCTTAACCCAGCTAGTCCCTACTGCTGTGTCTTTCCCCTATTGGCTAGGGTTGCACCACACAG
TCTAAGCTAATTCCGATTGGCTGTTTTAAAGAGAGCAGGGGTGCGCGCCAGAGTGCGGCGTTGAGTAGTTTCGGCAGGAAGGACTGTTTGAGAG
CAGGTGACAGAGGATGACTAAGGACAGTGCAGGTGACTAACGATGACTAAGGACAGAGCAGTTGACTAAGGACAGAGCAGGTGACTAAGGATGA
CTAAGAGCAGATGATAGAGGCTAAGAGGGGGTTGTTTACTCAAACTAGGGGCAAGGAGACATAAAGAACGAGCAAGTTTTAAACTTTAAAATGG
AGAACAAAGAACAGGAGAGCTGAACATGCTGAACGTACCATATTGGTTCTTTGAAGAGGAATTTACTATATCCTACATAAGTGACACTGCATTC
TACTGCAGAAGGAAGCAAGCTCAAAAGGAACAATGAAACTTCATATTAAATACACAATCAGTCAGCTTTCATTCTAAGCACAAATTTCAGCATG
AAAAAAATGTAATGGTTCTGTGAGTCCTTCACTTGATCCCTCACATACAGTCTTCTAAAGTTTTCTGAATTCCTTTTACAAGTATCTTCTGACT
CTGACTCTTCCATGCCATCCTACTTGCTCTGAGCCTTGTTCTTCTCTGTCTCCCTTGCATGGACTGTGGAAGCCACCTCAGAAGCCTTCTCCCA
CACCCAATGTTTCTGCTTCTTCACATTGTTGCCATTGTCTCATGAAATAAAACCAAGCATATCCTTTGGTCTGCACTCCCTGCAAAATAACGGC
TAAACCTGTGCTTTCCAAATATAATACTCACTAGCCACAGGTGGCTGTTCAGCTCTTAAAATGTGGCTTGTCCAAATTGAGATGTGCCGTAAGT
GTAGAATCCACACCCTGTTTCAAAGACTCAGTATGAACAAAATTTGTAAAATAGCACATTAATACTTTTTATATTGATACCATCTTAAAATAAT
ACTTTTTTCTATAATATTAAGTAAATTTCTCTCTTTTTATTTGTTTAATGTGGTTATTAAAAAGTTTTAAATTACAGGTTTAGTTCACCTTGTG
TTTCTGTTGGCCAGCACTGGTCTAAGCTATATCATGACATTTAGAGTTTCTTATAACCTGGACTCAGTTACCTCTTTGGCCTCATCTCCCAGCC
CTTCCTGTCCCTTCCACAATTTCTCATAACCCCCAGACTCACCAACCCTGTTTATACTTACGGGTTTTAATTTTTTTCACATTCAGTTTCTTCT
TTCTGAAATGTCCCTCCTTTTTTAGGTGTCAAAAATCCTGCTCACACTTTTAGGACCTGACTTAATTGTCCCTTGCTGGTGATGTCACGCCCTA
TTTCCTCAAGCAGAATTAGCCACTCCTTCCCATATAGTGTCTCTCAGCACCTCCATTATTGCATTTGTCTTGCTGTTCTGCCATTAGGTGTCGT
CTTAAGTAGACTCCTCAAGGGAAAGGCTGCAACTTATTTCTCTGATGACCACAGGGCAGTACCTCGTGTCTACTAAGCACTTAATGGATGTTTA
TTACATTAACTTATGAACTAATTTTCATCCTGCTATACACACTGCTATTTTTATATACATCAGACCTTGATCATCTTAACCATTGGCCATGGAA
AAAATTAGATGCTGAGGTGTATACGACTGGACCTTTCAGCCTTAACCTCAATTTCAGGTTTTCTGTTCAATAAAATGGCCTCCTTTTTCTCACT
GGGTGGCTTATGATTAAAAAATTATAACTTTGAACTTAAAAAATCCATGAATATTGTACAGACTAAAAGTATAAAAGGACAGTATAAATTACTC
CTTTTTACCTATCTTGCTTATAGGGATTTCATATAAGATTTTGTTTGATTGAACATTTCACTTCAGAACAAGTTTGGAAAGCTACTGTTCTATT
CCTAAATTTCATTTACATTTCTAAACCAAAGGTTTCATTTTTATTTTGATGAGATGGTTTCTACTATCATCTTAGTTCACATAAGGCAACACTT
CTCAACTTTAGTTCCACAAAATTGGGAAGCTTTTCAAAAATACCTCCCCACTCAGGGATCCTTGTATAATTGAGCTGGAGGAAAGGGGCCCAGG
CACCAGTATTTATCAAAAGCACAAATACCTGTAATAAAATGATTCTGCAGTGCTTAGAAAACCAGGTAGTTAACTATGAAAATACTGAAGTTTT
AAATTGCTAATTTTTCTTTCTTTTTATTAACTATGCTGTTATTGTTTTTCTTGGCAGTCAAGCTAATCCAATTTAAAGTTTGTATTATGGTTTT
GAGACCTCAAACAGCATTTAATAGACGCCATCATCTCTGGACAATTTTCCTAAGGCTTCTGAAATTAAAAATTTCCTTTTCTGTCACTCTCTAA
AAACCTACATGCAGCAGAATTTTAATCTCCCTTATTGATAGAAATAGCTAACACAACACCTATTTCACATCATGGAAATGAGGACTGACAAGCG
CTGTGGGTTTAAGAAGTTTACATAGGTAGTGGCCTTCCTGGCACCCTTGTTAGCCTCAATAAACAGTCCTCCCCTGACAAATCCTCTGTAGCTC
TGCCACATTGATAAAATCTGACATTCTGGTTAGTCACTTTTTAATGATATTCTTTCTTTTGTTCTTGATATGTTAGAAACCAGCCCTTATTTTT
TTCAGTGTGTCCGAAAGAATTATCTTTAATTTCCTAATTCGGTAAAATGGGCTGCTAATGCAGACCTTATTCTTAGGGGGACAGGAAGAAAAGT
GACCTAATTTCTATATATCAAATACATCTTCCTTCATACATTTAAAAATGTATAGAGTTATAAAGGACCTTAAATCCTGTAGCGGAGAAACTCT
GGGGTAAATACTTTGGAAACATTGTGAAAAAATTCTATAAATTCTGATAGTAGGTTCCATTTCATTGCTCTGTACTATTAAAAAGTGCAGATGT
AAATAAGCATAAGTTTTGCAGGTTGTCAATTTGTTACAAGCGGCTGCATGTTCTTATTCTTCTGAAGTGTCATCTCTTTCAATGTGGGCTGTTT
AGGCCGAAAAAAAAAAACTCAGAAAAATACACACTTGGGATCAAACCCTTAGTCCAGAAAAAAGAATCAAAACCTGTAGTTAAGTTGGTTATTT
GCACTGCTGGTATGTCATCCTGTGTGAGACTGACGTCAGGCAGATTGAATCCACACCCAAACTTCGGGAGCGTGTGTGTGTGTGTGTGTGTCTC
TGTGTATGTGTTTTAAAGCCCCACTCCCAGAATATGAAGTGAGTATGAAGGGCACCACAGCAACCCCTGCATCTCTCAAGAATGTACCTGTTTT
TAACATGCTGGATCAAGTGTCAGCACTCAGTAGATGAGGAAGGGGTAGAGCCCGACTTGTACAGATTCCGCGGATGGTAAATCGCCCTCTGCCG
TGTTTACAATACAGCTGTGCATTCTTAATGGCTCTGCCGCTCCCATCTCAGGTAAAGTTTTCTTTGTACGTGATGAATGGCAGAGAATTCTTTA
GCAGAAGGAACCAAAGGAGCTGGGAGGAGGAAAGGCGAAGAGAAGACCGCAAAAGAGAGAGAAAAAGAAACACACAGCTCCACAGGGACATAGC
CTGTGCTTTGCAGTTGCTTGTGTGGATAGAAACCAGATGGTAAGCTCGAACACCCCCTTGGCTATCTGAGGAGCCAAACATATGGTTAATGGTC
GGGAGAAATAGCTTTCAGACCCAGGGCTTTGCTGACTGCCTCATATTACAGATTGTTACAGTCTGTCATTACATTGCCAACCTAAGTGCTTAAT
ACCCACTGCAGGCGCTGGGCATACACTTACAAGAAAGACTTTTAGCTCTTTGCTGGCTCTAAACAGAGAAGTCACATCATAGGGAGGCTGAAAA
TGTCTGGTGTTGGAGGTGGGGAGAAGGATAATTTTGTAGTCCAAACAACAATTTTTTTTCTTTTTTTTACAACCCTTCACTCCACTGAAGTCTA
CTGTTTTCTGAGAACCTTTTAATACTAGACTGGTTCTCTCACTCTCTCAATCTCTCTTGCGTGCACTCTCACTCTCTGTGTCACACACACACAC
ACACACACACACACACACACACACGGAAACGAAACCGAAATTCACAGCCCAGGCCATGTCCCCCAACTCCAGTGGATTTGACAGGCCTCGTTCA
CCTGGAAGCCACATCACTGACTCAGAGGCCCTGCATTTGAAGTTTCTGTTTGGGGAGCTTTGGGCAACAGCAGGCCTGTCTTATCTAAGGAACT
GCTGAGCCCATTCATCTGCTTTTCACGGCCCGTTTCCTTTTATTTTTAGCCAAATCCGTCAGGCCTGACAGGCGGGTAATTCGAGCCAGAGAAA
GGGCAGAGCTCCAGGTCCTTTCCACAAAGCAATTCTTCTCCTCCCTCCTGGGAGGGCTCCAGACTTGGCCTGCTTCACGCAGATGGATTTGTTG
AGTCATGTGAGATCATTTACACAAAAACACAGTGAGGCAGTGGAAATTAAAAAAAAAAAAACAAACAAAAGAAAAAGAGGAGGGTGGGCGAAGA
GGAAAGAGGCGAACCCAGGGGAATGTGCGCTGCCCTGCTGCTGAGGAGCATACGAATTTTGCAGTGAGGCAGCTAGACTGAGCAATGCCTAGAG
TCATTTGTGTATAAGGTAATGTCTAGTTTACAGAGTGGGGCGGGCCAGGCGACGACGGCGCCTCCAGCAGCTTGCCTCTGTTTAAAACAAGAAG
CTGTTGGGAAACTTTAAAAAAATTTTTAGAGCAACACCCACCAAACAAAGACCACACTGTTGACAGCGTTGGGTTCCAGTAGCGGTAAACTACC
AAGGGGCTGGTTTACAGAAAATGAGTTTGCTCTGTCATGTCATACAAGTTTGCTTTGTCCTGACGCCAACATCACACTCAGCCAGCAGAGGAGG
CAGAACAGGAAAATTGGAACCGTACTCTTAGTTAATGGTTTCCAGACATTATTTACCACCACTTGAACAGAGGGAGGAAAATATTGTCAACGAT
TGCTGCGAGGTGTACCATAATTGCGGTAGGTAAAACAAAGTCATTACTATGGTTTTCTTCCTCAAGAAGGATTGAGCAATGACTTCAAAATGCC
AAGTAAGGTATTATTTTTCCCTACCACACTATTTATTTTCCTTTAGCTTCTGGGGCATTAAAAAAAAACACCAACTCTCACATCATGCCAAACA
GTATTAATGTTAGTGAATCAATTTTGTTTACTGTTTATACCACAAGCCTTTAAAACATTCCATTAAAAAATTGTCTCCCGCTCATTCATGAAAT
TCTTTTTTTCCTTCAAATTTGCTTACATGCATTAGCTTTGTTTGGATAGGGACTTTTTCCCTTTTTGGCTGGAGTAAAAGAATGCATAAAAGAA
TAGTGAGTAGATTATCTAAATGTACATTCTTACAACAAATCTAATGAAAATATGCCGCGTGGATGAGACGGAATATTTCAAAACAGAAAGAAAA
ACAGAAATGGGGAGCATTTCAAAATAGTCACCCTGATTATGTTTGTTATGATGCATTTCTTCAATTCTGCATTTATTTAGAACCCTATTGTGCA
GCTATTTCTTTTAGCCACCCTAGATAGAATGTAGCTCAACATCAACATTGTTCCTCATATTTTGTTGGTATTTTAAAAGTTGAAACATTTTGCA
GTTTTTTCCAGAGCTAGATATTCTTAGGTTATTTAGACGGTTTTAGTGACCATAGAACTTCACGTATAAACTCCTTCTGTTAATAGCTACCACT
GAATTTTGATAGTAGACACTCAGATCACACCTTGACCTGGAGTAAACAAGGCACTGATGATATTGATGATAACATAGTCCAACACTGAAGCTGT
TCCACTTCTTCCAGGCAACTCTGATGGTCTTACTCTGTGTAAGTTACAGCTTTTACTTCGCTCAAGGAGAGAACTGGTAAATTTTTATGGTTGT
TAATTGTTTACATTTTGGGGACCCCAAGTTGCATGGTGCCACATTATTATAATGTGATTATGAGTTGGCATGATTTTAAGTCTACCCATATCCT
TGAATGTTCCCTCCCCGTCAGGATTTCCCAATCTCAGCACTATTGACATTTTGGACCAGTAATACTTTATTATGGGGTGTGTCCTGTACGTCGT
AGGATCTTCAGTAGCATCATTGGTCTCACCCACTAGATGCCAGTAGCACCCTCCCCCGCGTCATCACAACCAAAAATGTCTACAGCATTGCCAG
ATGTCCCCTGGGAGACAAAACCACTCTGCTTCAGAACTTCTGCTCCACATTTCTTACTCTGCTTTAGAAGCTCACGCTTTACGTCATGAGCTGG
CTGCTCAGTTACTTCTAAGATTGAATTAAAGGATATGAAATAATGTTTTAAGTTGGAATTCCAAGTTAAGTAAAGTTTTTGAAGCTGCAGGCAA
GAGTACTTTTGAGTATGGTTATGCAGAACAACCTCTCTCTTGGAATTGCGACCTTAGCAGGTGGATCCCCTCAGGACTCCCTTACAGTGAGTTT
CCCAGTGCTGTTTAACAGGAAATGACCCCACCGTCTGAGCCGAGGGAAGTCGACATTACCACAAACGGAACTTCCCCTCAGTCACCTCAGCAGA
CAGCCTAGGCCCCAGGCTCGCTGCCTGTATATCCAGCCCCAGAAAGAGGGCAAGGCAGCAGCCACAGTTCTTTCTTGGGAGCACAGCTGACCTC
CTCCCCATTCCAGCGGCTGTGGTCTCAGAAGCTGAAACTCTCGTTAATAAGGAATGTGCAGCTTTCCACAGCTAAGGCAAGCATAAATTTCCTC
TGTTTGTTTTGTGAGGACTAGTGTCAACTGCTGTAATCAGATCAGAGAGGACCCCAGGGTCAGCTGCTCCAACTGCTTTCTGTGGCTGTTCTCT
TGGCTGCTTGCTGTCGGAGAACGCACTGACTCCCTGCAGACCTCCCTGATGTGTTAAGGTGCTTGTGCCCTTGTTGCATTTCTTGCTGTCTTTG
CTTCTCTCATTCTACTAAAACATCACTGTGCAGTCATCCAGTTCTAAATTATCGAAAAGTTAATCCAAGGCAGATTCCTTTCCACAGAACTGAG
CGCAGACTTCGGTGTGCAAATTCCACCCTTGGGAAGGAAGGTGACCTGTTTCCTTCGGGTAACTCCCTGGACCTGCTGCTTCTGGCTAAGGGTA
GGTTTCTCAAGGCCTGGGCTACCCGTAAGCACTTTCTACCCCCAATGGCACTCTGTAATGAGGATGAGTTAGTGAAAGAGTCACAGCAATTAGC
TTACGCTACAAAGAACATAATTCTAGTTGTAGCCTAAATGACAGCTAGAATTGGCTACATATCGAACCTAAATATGGCAGAATTGCATTTAGGG
AACCCAATTCTCCCAGAATCGTATACTGAGCTCATGCAGCCTGGCCTACTTCTGACCACCCACCCCAAAAAGTCCTAAGCCTGGCCTACTTCTG
ACCACCCACCCCAAAAAGTCCTAAGGTATTATATTGGTTAAATATTTTCAAGTACATACGAGCTTTAAAGCACCACAGGGAAATTCTTAGGTGC
CAGAAGACATTGATGCCACTGGCCTTAGAGTGTTTCAGACCCAGCTGTAGGCTCTAGGCTCTAGGCGCTATGGTGTCTATACTCACACAGGAAT
TGCTTGTGAAAGCGGCCCAAGAAGATTTTCCCCAGTCTGTTTGGGGCTTTAAGTCTGTGTGTTGGGGCACAGACCAGGGGGATGGAAACCCAGG
GTTACACTGTTTGAATAGCTCTGGGGTTCATAGTTACACTACTACCTGCATGGTATAACTTCAACTGTTTTGGCAGAAACTGGTTTGAGAGCAT
TGAACGCCCTCACCCCATAGTGCAGCCAAACACTAGATCCCTGTGGAGAGGCTTAACAACCTCGGACATGGTACTCCCTCAAAAAGAATAACCT
GCACTAAGGAGATGCTGATAATAAGTACAGAATATGGCCACATACAGTGGCTCATGCCTGTAATCCCAGCAATTTGGGAGGCCAACACAGGAGG
ATCACTTGAGCCCAGGAGTTTGAAACCAGCCTATGCAACATAGCAAAACCCTGTCTCTACAAAAAATTATCTGGGCATGGGTGGTGCACACCTG
TAGTCCCAGCTACTTGGGAAGCTGAGGTGGGAGAATCACTTGAGCCTGGGAGGTTGAGGCTTCAGTGAGCCAACATCGCACCACTCCACTCCAC
CCTGGGCGACAGAGTGAGACCCTGTCTCAGAAAAAAAAAAAAAAAAAAAAAAAAAAGGAACAGAATCTAAGCCCCACAAAAGCAGAGGTTAACA
GTGAACCTTCAGCCCAACTAGAGTTTTCTTCTGCAGATTAATGAAAGTTTCTTCTCAACACGAACAAGCCATATAACCCATTCTGGCTTGCTAA
GCAGTTTCAGTTGTAAGCACTAGCCCCAATTAAGGTAACATCCTACTTATAGCTTGTCCCCAAGATCTTCTTGAGAATATTTTACTTCCTTAAT
TAGAAACTTTTTATTGGAGAGATAGCTGGCCCCCTTAACGCTTCTTTAACAGTGCTCCCATTGCAGTGGATCACTCTGAAGTAACCCATCAGGC
TGTCTGTTATTTCAGTTTCTCACCAAATCATACGAAATATCTTTGCCTGAATTGTACAGCAACCCCCTCCCCCCGCCCCGCCAAGCGAGAGGGA
AGTTGAAATTATTTGGAGGGGTCTGGGATTCTTTCAGCATAAAATCAAAGAAACCCAGGTAAATAAGACATGGTTAGTAAACATTTGTTCTAGA
TGAATATAATTCAGCCTTCTCAATCCAAAGTGAACAAATGGATCAAGAGTTGCCTGGAATAGCCACTGTGTACTCCCTTTGCAGTCACGTGCAC
TATTGGCAAACATCACTTGAGAATGCTAAACTTAATGCATCATTCCTTAATTTATTAATAGCACAATGAAATCTCTTTTGTTTAGTTTTTTTTC
TTCTAAAGTGCGCAAAAAGCTGTCACCAGTAGTACCCAAATAGTGCCTTGCTGACCTAAAAGTGTGCCATGCTTCTTAAGAAAAAACTTCAGTA
TTTATTCTTAATTTGCACTTCTATAAAGTTTAATTTCAAAATATTCTGACCAAGCCAGAAGTAGATATGAATATTGACATTAAACCATCAGAAG
AGGAGAGAATGAAAGCAAATAGGTTCAACTGGTGCCAGACTTACAGGAGATCTTCCCAAACATTATAATTAAATTTGGCATATATTGAGTGCCT
ACTGTATGTATGTAAGGCAGCGGGATAGGTGCTGGGTATTTGGGTACTACTACAAAATAGACAAGATCTCTTCTTGTGAAATGCTCAAAACAAT
CCTCAAAAGAATCTCCAGAGATATAAAGAATTTCCCCCAGCTTTAGGGATAAAGGAACAGAGACTGAGAGAGAGCCAGTAACTTGCCAAAAATC
ACATTCCGAGAGGTGGAGTTGATATTCAGACTGACTTGGCCCCTATCTCTCTTTGCCTACTCTTCTCCCTGGCTTTCTGTGGGCAGTGAAGCCC
TAGCAGTACAACCCAGAGGCCCCAAGAGGCAGGTACAGAGTTTTCTCTCCCGGAGCTTTACACGAACAAAGAATCCCCTGACTGACATGGAAGG
TGTGCAGTAGAAGAGGCAAACTAGCCAACCAGACCCAACTCCTACAAAATTTCCAAAGTATTAGCATGAGTTTCCAACATTAAAACAGCAAATT
ATTTTACACAGTCTCTCAACTCCGTTTCTTGAGTATCAGAAGCTCTTGGCACATGCGGCTTGTTCCTGCTTTGCTGGGGCTACAGCTGAGTAGC
AGACTCCCCCGATCCCCCATTCCTCACTGTCTTCCCACACCTGACCTTTCACTCATCTCATTCTTTCTTGACCCTTGCAGTCATCTGAATTTGT
GACCCCTGGTTTAAATAGTCACTTAGGCAAGCGAAGTGGGCCAGGCCAAGTAACCTCTTGGGGGCTCCTCTGTGTTGTGCCTTTAAATTGAGAT
AGTCCTAAATCACTGGAGACTGCGATTTACATTTTACAGTGATAGCCCTGAATCTAAAGATTAGATATCCTGACTTATCATTTGACCAAGTGCA
AGAACCCCCTAGCCTGTGTGCCAGAAGTGGGTGTATGAAAGTGATGGACCCTCTACCACTTGTCACTCTTGGCCCTTCCTGGCCTCTGTTTCTC
CCCATCTGGCTCTCAGACTATTTGTGTGCGTGTGTTACCAACAATGTGTCTCTCTTTTATAATTTATAATCCTCTTGTTTCCTCCTCTTTATTA
CCATTTCCTATTGAACCATAACTCATATATTAGTTAAAATTTCAGAACATTCATTTTCAAATTACCTAACCTATCCTTGGGGAGGAAGGCTCTT
GTTGATGCTTGATGGGAACATACTCTTGTTGTTCTGGCTTAGAATGTCTGTTTTCCATGGTATGCTGTGAACGCAGCGCACAGGGTAGCAAAGC
AGAATGGCAAACGTCTGGTCTCTTGGGGCAGAACCATGTTATAGTGTGTTTGCTGCCTCCATGTGGGGTGGCGAGGACACTGAAGTCATGGAGA
ACCACAGCCACACATCTGCTGTAACTTTGAGGATGGACAGCGACCTGCAGGAATCTCCTTGGCAACCTCCACTCTGTTCCTCTTGCCTCTTCTT
TAGGAAGCAGGGAATGAGCCAGCCACTTGGAAAGAAGCTGTGTATGCATTGGCGGAAGCGGGCAGGAGTCTAGTTTCTTTGCCTTTGGATCCTT
CAATCCCAGCACCATGCCCCCTATGGTAGAAGGGAGGGATTAGCTTTCTGTAATAAAATGACCTTATATTTTTTCAGTTGAAAGTCTCCAGTTG
AAGATTGTCCAGACTTAACTTCAAAGCCATGTGAATTACTCCACCCCTTAAAATAGAGTAGAGGAAATTTGGGATATTGCTCTCACCTGTCCAT
CTGATTTCCCAAGTTTCTAAGTCCTAGATGCAAGAGCATTTTTTTCTAGACTTCAGAGCCGGTTCACCTTGTATTACTTCACTTACTCCTTCTC
CAAAAGCTCTTGGGCCTGGCATAGGCCCTCATGCCCCAGCCCTCTGCCTAAGCTGCTGGGCGTGGTGGTGGGAAGGGTAGGAACAAGAGTCCAT
CCCACAGACTGGCCTCATGGTACGTTATGTCTAAAAGCTAGTGAGACCTTTAACACTGCGAAGAGTGACCTGCTTGCTCTTGTTGGCCTATCTA
TCTCCCACAGGAGTGCCTGAGCTACCCAGCTTTGACATATATTACTGAAGGCTTCTAGAATGGACATCATAGAAGGGGGTGGGAGTTGGAGTGG
CGAGAAAAGCCCAACTCACCATATTCCATTCACTATTTGGCAGTATTAGTTGCATTTTCAACGGTCAGGAGAGCACACACACACACACACACAC
ACACACACACACACACACACACAGCCCTTGACACTTTTAACCTTCTCTTTAAAGAGCATAGGATTAAAGGTGGCTTATGTTATTCTCAGCATAC
CTCTATACCACATTAACAGTGATCCAGGTAAAATAGGCTTCTCTCCATGGTACATGGAGGTTGATGGTAAATAAATAGTGGTGAATCAGGTACG
CCTGGTGTTTTCTCCAACTCCCATTTGCTGACACCCAAGACATCAGAGTATAACCCTCAGAGAAACCATAGGATGTGGAATTGTCACCAGGAGC
CCAAATCTCTGGGTCTCTTCCATAGCGAGGACCTGGCTGGTGAGGGGCACTTGGCCATGTTACCAAACCTATCTCTGAGTGTCTTTGTTTGCTT
GCCGCCCTTTGTTTTTCTCCATTCTTTATATCTTTCATCTTTTCTTGTCATTTCTCTCTTCTTCTTAGACTTACTTTGTCTCTGCCTTTTTTTT
TTTTTTTTTTTTTTTGAGATGGAGTCTCCCTCTGTCACCCAGGCTACAGTGCCTCTGCCTCCTGGTTCAGGCTATTCTCCTGCCTCAGCCTCCT
GAGTAGCTGGGATTACAGGCCTGCCCCACCATGCCCAGCTAATTTTTGTATTTTTAGTAGAGATGAGGTTTTTCCATGTTGGCCAGGCTGCTAC
TCCTGACTTCAAGTGGTCCACCCGTCTCAGCCTCACAAAGTGCTGGGATTCTGTAATTCTGCACCACCTTTCTTCTTACCCATGCTTCTATCCA
CCTGGAAAGACAAATTATGTTTCATTAACCTTTTAGAAGTCTAAGATTGACCATTGAACCAACTGTTAGGATCAGCTGAGTCGAAGTCACACGG
CCTTATGGGATTAACTTTCTCAAGGCACCCTTTAAAGACCTCTGTAGTTTTCCTTTTGTTCAGTACTACAGGAATCCAACTTCTTAAAACAATA
AAAAGAAACATTGAATAATAAACTAAAAAAGAAAACATTCTTGATTCCACCATGGTAACTCAGGTATCTTTTTCCCTAATGCTTTATATTTAAG
ATGCAGTCTCCTTTTTTAAGCTGTAGATTTTGCTAAGCTTCTTCATAAACTGAATTGGCTGCAAAACAACCAGGTTCCCTCGATTTCAAAGGAG
ATGGAAAGTACTTGATAGAACAAGGCCAGTCTTTTTGGTTGCTGTCCAGAAGTGAACTCACCCAGTTTCTAAAATTGTCATCTGTTCTCTGAGG
CGTTTTCTGTTAAATGGTGGTCTTGGTGTGTGCATGTGCGTGTGTGTGTGTGTGTGTGTGTGTGTGTGTGTGTGTGTTGTTTTGGGGTGTGTGT
TGTGTTTATTTTTTATTTCTGGTCTTTCACATGCTTTATTTCCATAGCGTCTTGAAATGAAGTCACTTCTAGTCCAGGGTCTATTGCTTATTAT
AGCAAGAACCAGGAAAAATTCTTTTACCTCTCTGTGTCTGGTTTCCAAATTAGGAAAA
HUMAN SEQUENCE—mRNA
GCGGCCGCCGCCCTCGCCACCCCGCCTGCCCACTCCCACCGCCCCCCCGCTCTCGCTTTCCCCCCGGCCTCCCCTCGCCCCTTCCCCTCCCCCT
TCCCGGCGCACTCGGGGGGCTGGGAACGAGCTGCCATGTGATGCGCGTCCCCTCCGCGAGCTTTCGGTGACCCACGAACTGCCCACCTCGCCGG
CTGCCGCGACGGGGCTGCGAGCCGGGAAGACGCGGGGAAGAGGAGGCGGAAAAGGACGCAAAGTTCTCCGGCGAGCGCATTCATTCACATAGCT
CCCAGTTTTAACATTTCGCCACCTACTGAAGACATCATTTGGGACCAAGCTGATGAGCCCTTGAAGCACAGCAGATAACAGTGTTGCTGTTCAT
CATCTTTGCCTGGGAAGTTGAATGATAAAGCCAGAAGAAAGCATGCTTTCTGATCATTTGCAGCTGTCTGCTTCAGAAAGTGAGGGCTCCAGGA
ATGAGGAGAATCTTCAAGAACTTCCTCGCACTGTGACATGTCTGATCCCTTGCTCCCATCCCTGCAGCATGAACAAGGTGGACACTCACTCACC
TGTCACAAGGTTGCCCCACAAAACTTTGGGGTCCATGTCTGAATGGATTGCCAGAGCCTTCTCATCTCTCCCTTCGCCCAGTTCCCTGCATCCT
AAGACTCGAAGGCAGCACAGGACCTGGAAAAATTACATGGTGTGAACGGCATGTCTGTGGATGAGAAGCCTGACTCCCCCATGTATGTGTATGA
GTCCACAGTCCACTGCACCAACATCCTCCTGGGCCTCAATGACCAGCGGAAAAAGGATATTCTCTGTGACGTCACTTTGATCGTGGAGAGGAAG
GAGTTCCGGGCCCACCGGGCTGTGCTGGCCGCATGCAGTGAATATTTTTGGCAGGCGCTGGTTGGACAGACAAAAAATGATTTGGTGGTCAGCT
TGCCTGAGGAGGTCACAGCCAGGGGCTTTCGGCCGCTGTTACAGTTTGCCTACACTGCCAAGCTGTTACTCAGCASAGAAAACATCCGCGAGGT
CATCCGCTGTGCTGAGTTCCTGCGCATGCACAACCTGGAGGACTCCTGCTTCAGCTTCCTGCAGACCCAGCTCCTGAACAGTGAGGATGGCCTG
TTTGTGTGCCGGAAGGATGCTGCGTGCCAGCGCCCACACGAGGACTGCGAGAACTCTGCAGGAGAGGAGGAGGATGAAGAGGAGGAGACGATCG
ATTCAGAGACCGCCAAGATGGCTTGCCCCAGGGACCAGATGCTTCCAGAGCCCATCAGCTTTGAGCCCGCCGCCATCCCCGTAGCACAGAAGGA
AGAAGCCCTGCTGCCCCAGCCTGACGTGCCCACAGACACCAAGGAGAGCTCAGAAAAGGACGCGTTAACGCAGTACCCCAGATACAAGAAATAC
CAGCTTGCATCTACCAACAATGTCTATAATGCATCATCACACAGTACCTCAGGTTTTGCAAGCACATTCCGGGAAGATAACTCTAGCAACAGCC
TCAAGCCGGGGCTTGCCAGGGGGCAGATTAAAAGTGAGCCGCCCAGTGAAGAGAATGAGGAAGAGAGCATCACGCTCTCCCTGTCTGGAGATGA
GCCTGACGCCAAGCACAGAGCGGGGGATGTCGAGATGGACCGGAAACAGCCCAGCCCTGCCCCTACCCCCACGGCCCCAGCTGGGGCCGCCTGC
CTGAAGACATCCAGGACCGTGGCCTCGCCCTCCTGCTTAAGGTCTCTCTTCAGCATAACGAAAAGTGTGGAGCTGTCTGGCCTGCCCAGTACAT
CTCAGCAGCACTTTGCCAGGAGTCCAGCCTGCCCTTTTGACAAGGGGATCACTCAGGGTGACCTTAAAACTGACTACACCCCTTTCACAGGGAA
TTATGGACAGCCCCACGTGGGCCACAAGGACGTGTCCAACTTCACCATGGGGTCGCCCCTCAGGGGGCCTGGGTTGGAGGCTCTCTGTAAACAG
GAGGGAGAGCTGGACCGGAGGAGCGTGATCTTCTCCTCCAGCGCTTGTGACCAAGTGAGCACCTCGGTGCATTCTTATTCTGGGGTGAGCAGTT
TGGACAAAGACCTCTCTGAGCCGGTGCCAAAGGGTCTGTGGGTGGGAGCCGGCCAGTCCCTCCCCAGCTCGCAGGCCTACTCCCACGGTGGGCT
GATGGCCGACCACTTGCCAGCAAGGATGCGGCCCAACACCAGCTGCCCGGTGCCAATCAAAGTCTGCCCTCGCTCACCCCCCTTGGAGACCAGC
ACCAGGACTTCCAGCTCCTGCTCTTCCTATTCCTACGCGGAGGACGGGAGCGGGGGCTCACCCTGCAGCCTCCCTCTCTGTGAGTTCTCCTCCT
CGCCCTGTTCCCAGGGAGCCAGATTCCTTGCCACAGAACATCAGGAACCAGGCCTGATGGGAGATGGAATGTACAACCAAGTGCGGCCCCAAAT
TAAATGTGAGCAGTCTTATGGAACCAACTCCAGTGACGAATCCCGATCCTTCTCGGAAGCAGACAGTGAGTCGTGTCCTGTGCAGGACAGGGGC
CAGGAGGTAAAACTTCCTTTTCCTGTAGATCAAATCACAGATCTTCCAAGGAACGATTTCCAGATGATGATTAAAATGCACAAGCTAACCTCAG
AACAGTTAGAGTTTATTCATGATGTCCGACGGCGCAGCAAGAACCGCATCGCGGCCCAGCGCTCCCGCAAAAGGAAACTGGACTGTATTCAGAA
TTTAGAATGTGAAATCCGCAAATTGGTGTGTGAGAAAGAGAAACTGTTGTCAGAGAGGAATCAACTGAAAGCATGCATGGGGGAACTGTTGGAC
AACTTCTCCTGCCTTTCCCAGGAAGTTTGCCGAGACATCCACAGCCCCGAGCAGATCCAGGCCCTGCATCGGTATTGCCCTGTCCTCAGACCCA
TGGACTTGCCCACGGCCTCCAGTATTAACCCTGCGCCCTTGGCTCCTGAGCAGAACATTGCGGCCTCCCAATGCGCACTGGGGGAAAACGTGCC
CTGCTGCTTGGAGCCAGGCGCGGCTCCCCCCGGACCCCCCTGGGCACCCAGCAACACCTCCGAGAATTGTACCTCTGGGAGGAGACTTGAAGGC
ACTGACCCGGCAACCTTCTCAGACAGAGGACCTCCTCTTGAACCCAGGAGCCAAACAGTGACCCTGGACTTCTGCCAGGAAATGACTGATAAGT
GTACAACTGACGAACAGCCCAGGAAAGATTATACCTAGTCACTCGGCTCTGCCTCCCAGTCCGCACACCTCTCCCATCCAGGCGTTCTTCAGTC
AGCCTGTGGCACTGTTCATCTGCTGTCCCGAAGAAACCGAGAACACATTTGGTGCACACTACAGCGGTCTTAGCAGCAATACTGTTCCGAAGTA
TCCTCTCCTCTTCTCGAGCAGGAGTGATAGTTACCTTCACAATGGTGCTACCCCTTGCCCAGGCAAGGAAAGACAGCAGTGATGACACTGTCTG
TCTGTGGCTCAATTTCAGTCTTCACAGGGATAGACTACAACACCTCTAGGCCCCAACCACGGATTTTTTTTCTCAGTGGCCCATGTCACAAACC
CTATCTCAGGAATTTCTTCTGAATGTTCAATTTTTTTCATTCAACACAGCTTCTATACACATCAAAGTTTTATAGCTAGACTGTACATATTATA
TATAATATATATATAAAAAATATATATATATATATATATCCATATGCAAAAGTCCTGCATGCCTCAACTTTCTCATCCTAAAACTGGAAACTTA
TTTCTCATTTAGAAACAGGTTCCAACATTCCTCTTCTTTTGTCTCTGATGCTAGAACTAGTTTGGTAACTGTTAACGTGGTCATTTTTCTTGCT
TCACAGTTCAATTTTCAATTCGTACTTATTTATGGACAAAATTCAGTGTTGGAAGCTTTTTCCCAAGGTTTTATTTCACATTTCTTTTTCGTTT
GGTTTGGTTTTGGCACCTCCAAGTGGTGTCATTTGAGCATTCTAGGTTTGTTTTTTGTTTGTTTGGGGGGTTTTGTTTGTTTTTGTTTTTGTTT
TTGTTTTCCTTGCAGATACTGTACAGTAATGGTCAACTTTGCCACTTGCACTGAGTTTTGGGTCAAACCTATTTTCTTAAATGAAGTTGTAACT
TCGGTATAACTCAAGTATACTGTATATTCTTTGCTTTTAGTTAAAAAAGTAAAACATTTTAGCTAATTAAAAAGCACTCAGGTGATAATTATGT
AGGAAAAACAATCTTGCCAAATAATGAATTCATCCTAGGATGTGTAGACAATAATCTGCTTGAATATTTTTATATTTCACCTCCTCCCCACCTT
TCCCTAACCAAAGTTTAAACGCAGATAGACAGTTCAGAGTTGATGCTCGATGTTCAGATTCCTAACTGGGGAGAGAGTTTGGACATCTCACTCA
AAAGTACATCAGAAAAACAGGAATCCGTGATTTTATACCAGAACTCAGCAGGCATTGGCTCCTAGAAATCAAGTTAGAAAGTTTTCACCCAGGG
AGTAAGTCCCATTCATTTCAACACGTCCTGAGGCCTCGGCTTGCTCTTGGAAGTGGTGTGCAGTAGGACCTGCTCCCCTGAAGGACGGGGCCAA
CCAGCCACTCGCTTTCCTGCCCACGCTTGCCCTCCCAGGACATCTGGCCTGAGGGGATTTGAATCACAGCCCCGAAGGTCCTGCCTTCACCCCA
TTGGGAGAGAGCAGGGCATCCTGGCATCTGCGATCCATCCCTGACACAGGCTGACACATTCTTTCTCCTTTCCTTCTCCAAACGCTTGGAGTTT
TCTTCTGAGGTTTTTCTGCCAGTGTCTTGTCTGAAGGCAGACTTCATTCTGAGGCTTTGGACAAGCTATTCACCGGGAACCCTCCCTGTCCCCT
TCCCCAATCACACACATACCCTACCCTCACCTGATGATAATTTTCTCTTCTTGCTGCAAAACTGGTTGGCTTGCAACCCAGAGAGAGCACCTTC
CCTTGGCTCTGGGGGCCGTGTTGGCCCCAGCCACGTTTACACGAAGGTGTGCCCCACAGGAGGAGGAATCAGCTCCCTCGCTCCAGTGGCCTTG
GGTCCGGGTCTCACTGAGCAGCCCGAGGGCCACTCCAGCCCGGCTGGCCAAGAGAGTCCTGAACGGTTTGATGTGGGCATGGGGTGGTGGGCAG
TGGGGAATAGATGCTTGACTTTGTTTCTTTATTTGTGCCATTGTTTGGACAATATTAAAGCTGCATCTAAAAGGGGAAATTAGTATATGATGTA
GGCTAAAAGTGAAATCATAGTAACATATGTTTTAGTATTATTAACTTTTTTCTGTACAAATATTAGCACTAAATGTTTAAATATGTATGAATGC
CAGAAATTTGTCAGTTCATGCAGTAGGATAAAAAAAAAAAAAAAAAAAAAAGGGCTTTTCTTTTTAAACAGTTCCACTTTTAAAACCTGCCTCT
GGGTTTTTGTTTTTTCTTGTTTGTGTGTGTGTGTGTGTGTGTGTGTGTGTGTGTGTGTGTGTGTGTGTGTCTGAAACAGATCTTGATAAAGCTC
TGTGTTGGAGCTGCTGGTTTTTGTTATGGTTGTTGGAATTTCTTGGCCTACTAGGACAGTTCTGTGCTTCACCATGAGGTTTGCCTTTGTGGAA
AACTCGTGGGTGACAGTGAGAATATAAACTCAATGTCAATCACGTGATACTTCCGCAGGCGTGTGTTACAGTGGAGTCAGCTGACAGTATTTTG
CTTTTTAACTCTATTGTTGCCTTTCCAAGTGACCTCTCCTCTTCTTTTAAAAAAAGAACACTTTCTGCTCATATCATAACCAGGTCCAACCCAG
CTTCTTGTCATCAGGTTTACCCTGGTAACAACTCATGTGCAACTGCTAGTCTTGACCACATTCCATCCATTTCCTCAGGTTTCTGTGGTTCAGT
AGCCCAGACCTGTTTGGCAGCCATTTCTAGCAGGGGCGGGGCCTCTTTATTTCTCTCCACCCTATCTCAGACCTCACCTTCCTCCCACCCACCC
CTGCCTTGCTTTTCTTCCTCTTCCCCCAACCTAACTTCTGCCATGGGAACTGGTTAAAAACACTGCTCTAAAAACCATCTTCCAATTTCATAGA
GATTTCTCACAAGTTATTTCATTCATAATCCACCATCAACAGTGACTACCTTCGTGCAGTTGTTCATGTGATGTGTGTGTGTCTTTTCCTATTC
AGAACTATGTGCTTCTCAAAATTATTTCTGGGTTGATTCAAAGGGAGGACTTGCTGGGGACCAGAATCCAAACGGCCTCAAGTGGAATTTTAAA
ACCTACCCTGTCTCTTTTCCCTGGCATCCCTCTGTCAACCCCACGCCTTTTAGGAAAAAGAAAAGTGAGTGAACAGCAAGGAAGAGTGTTTCCA
CAGTACAGTAACATTTGGTTGTTCTTAAGGCTCTTTTCTTACAAAAATAAGAGACCCTCCAACCACGGGCTGTTTAGGAGGATGCCTGCTTGGG
TCTCCAAATGGCTGGGGTAGGAATGGTTGTTGGGGCAGACCCAGTGGAGGTGAGTGACCCTGAGACTAATGAACATCCCACCTAAATCCAGTCC
TCCCCTTGGATCTGCCTTTGTCCTGCTTCTGTATCCAGGCAACCTCTTTTCAAGTTGGTCAGGCTTTCGACACGTGAGTGATTTCCTGTATGTG
TTTGTTTCTCTGCGTTACCTGGGGGTGCCTTGATTAAAATCGAACTTTATTACATACTGATTCTGGAACAAAACAGTTAGAAAAACTTTAAACT
TTAAAAAAAAAAAAACCGACAAAGTTACGAGGCCATCCTGCTATTTATCTTCTGAGTTCCCAGCAATGACTCAGGCATCAGAGATGATGCTGCA
GTGGAAAACCTGACTCTGTGTCTCTGCAACTGAATGTTGTGCGAGTAATTTATTAACTGTCTTTCTAAAGCTTTCCTGCTTTTAACATGCACTA
TAATTCGGGATGTAATCCTTACATTGCTTTTCCAAGGAAGGGAACAAAAGTCTAGTGATTAGTATGCCAACTGCCACTACTCCTTCAAAAGGAG
CCAGGACCAGCGACAAGACTCATGAGAGGACTGGCTAAAGTGAAGTGTGCACAGTGTGAAGTTTAATGCTGTTGTCAAGAGGCCTAAACCCACA
TTTTCTCTTTTAATATTTTATGATTGCCATCAAAGAAGAAGAAAAAGAAGGAACAGACAAAGGTTTGAAAATGATAACCCTGTTAAGACACCAA
AAACTCCTGTCCCGTGAAGCTGCTTGACATCCTGTGGAGTAGCATAATCCTCTCAAAATGAGGAAGAGCTGCCTGCAAAGCTTTCTCAAGTCCC
TATTTGGCTACCTACTTCTCTACATTATGCCCCATTTAAACTAGGAGCTGTCTTAGAAATGACTTCAAACTGCTTCACTATTGCTTACAGTTTA
CGAGGAGTCTCAGATCCAGAACGAGCAAGAATCAAGTTTGGTCCTCAAATGACTGTAAATAGACTAAAGAACAAGGTGTTTTTTGTTTTTGTTT
TTGTTTTCTAACAATAAAGCTGTTCGTTCTATCATGAGTTAGTGTTTCTTCCCCAAACTGAACACTGTGTTGGAAGTGCAATTTCTGGTGAGTC
AGTCCACAATACAATGCCCTGTGTGGAGTTGGTATTCATACAGGAAATCTGTGTGCACGAGGCATTGTGTGTTGAAAGTGTATGTTTATAGTAC
TGCCTGAGCCATCTCATGACCCCAGCGTCCAAAACCGATGCTGTAGAACAGAACATATCTGTCACAAATAGGTGTGTGCAAATAGCATTTGTAC
ATACAAAAGTCTCATTGTGGCAGATTGAGCATAAATTATTCAACTGACGGTGCAAAAACATTACTTGCAAAGAAAAGTTTATAGTATTTTCCTA
CACTCCACCCTGGGAGATGATATTTCTATCAAATGAATATCAGTGCATTTTAAATGTAATATGAAAACGATGCTGCCATTTTGTGAAGAATACC
CACTTGGTTGCAGACGCCAACTTTCATAGCTTTGATTTAATGTTGTGACACGGTGTATGCATTTTGCTGTCAAGCAATGGATAAACAGCTCTGA
CTTTCATTCTCATTCCAGTTTATTGACCTCAGATAAAACACTGGCCCTTCTTAGAAGCAGAAGTGTGCACCAAGACCATTCATTTCAGGTAGAC
TCACATTCAGTGCCAAGTGCTCCCATGGGAATAATCAGACGCATATGTTGCGAAAGAGTGAAGGGACTTGGACAAAGAGGGGTTTTCCTACAGA
TGGATGCTCAGTCTTCTACCAAAACATGTTTGGAGGCAGAACTATGACCTCCCCTTAAGTCCTAACAATGTATTTTGTGTGTGCAAATCCTGGG
ATGCCCGTTTCACGCTCTGACATAAAGACATGGCACCTCTAGTGAGTGATCAGGAAGATTCCATATGCATTTGGGAGCTTCAGGTGCTTGTTAG
ACACAGTGAGCCATTCAAGGCAAGCACCACCTTTGCTAGTGAGGCCAAGAGAGCCTGTGACAATTTGACAATTTGTTCCAGAACCAGTCTGATG
CAAGTGCACCTCTAATATATCCCTTACAAACTCCAGAGGCCATATTCAAAACAGGGTCTTCTCAGTGTATGCAAGGGGCTGCAGCCCCTCTTCT
CTTCCTCCCCAGGTTGAACAATACGGACAGTTTTCACACATATCTACCTGTATAACCCTCTGTACCTCTCATAACTGCTCAACGACTGTAACAG
GTTACATCAGGTGTTTTTCTACATACTTTTTACACAGATTCTATGCGATTAATGTAATTTAATTCAATGCATCATTTTATTGTACTAGTTCTTA
GGCTTGTCCTTATTTTTTTCTAAGTGATTGTGGTTTTTCTCGTGGTTTTTATTGTAAAAAATGAAAGGCTGTTGATGCTTATTCTCTGTAACTA
AGAATTTTACCTTTTGGGGGAAAAAAGCATTGCTATGAACTAATGGAATTGGAACTTCATTTACTCATTGTAAATACACTATTGTGCAAAAAAA
GTTTTCACTCAATTGAATTGCTAGTGTTAACTGAATTTTGTCTAGACACCATTTCTGTTGATGAAATAAAGACATATCATTATGCATTGTAAAC
TG
HUMAN SEQUENCE—CODING
ATGAGAAGCCTGACTCCCCCATGTATGTGTATGAGTCCACAGTCCACTGCACCAACATCCTCCTGGGCCTCAATGACCAGCGGAAAAAGGATAT
TCTCTGTGACGTGACTTTGATCGTGGAGAGGAAGGAGTTCCGGGCCCACCGGGCTGTGCTGGCCGCATGCAGTGAATATTTTTGGCAGGCGCTG
G
TTGGACAGACAAAAAATGATTTGGTGCTCAGCTTGCCTGAGGAGGTCACAGCCAGGGGCTTTGGGCCGCTGTTACACTTTGCCTACACTGCCA
AGCTGTTACTCAGCAGAGAAAACATCCGCGAGGTCATCCGCTGTGCTGAGTTCCTGCGCATGCACAACCTGGAGGACTCCTGCTTCAGCTTCCT
GCAGACCCAGCTCCTGAACAGTGAGGATGGCCTGTTTGTGTGCCGCAACGATGCTGCGTGCCAGCGCCCACACGAGGACTGCGAGAACTCTGCA
GGAGAGGAGGAGGATGAAGAGGAGGAGACGATGGATTCAGAGACGGCCAAGATGGCTTGCCCCAGGGACCAGATGCTTCCAGAGCCCATCAGCT
TTGAGCCCGCCGCCATCCCCGTAGCAGAGAAGGAACAAGCCCTGCTGCCCGAGCCTGACGTGCCCACAGACACCAAGGAGAGCTCAGAAAAGGA
CGCGTTAACGCAGTACCCCAGATACAAGAAATACCAGCTTGCATGTACCAAGAATGTCTATAATGCATCATCACACAGTACCTCAGGTTTTGCA
AGCACATTCCGGGAAGATAACTCTAGCAACAGCCTCAAGCCCGGGCTTGCCAGGGGGCAGATTAAAAGTGACCCGCCCAGTGAAGAGAATGAGG
AAGAGAGCATCACGCTCTGCCTGTCTGGAGATGACCCTGACGCCAAGGACAGAGCGGGGGATGTCGAGATGGACCGGAAACAGCCCAGCCCTGC
CCCTACCCCCACGGCCCCAGCTGGGGCCGCCTGCCTGGAGAGATCCAGGAGCGTCGCCTCGCCCTCCTGCTTAAGGTCTCTGTTCAGCATAACG
AAAAGTGTGGAGCTGTCTGGCCTGCCCAGTACATCTCAGCAGCACTTTGCCAGGAGTCCAGCCTGCCCTTTTGACAAGGGGATCACTCAGGGTG
ACCTTAAAACTGACTACACCCCTTTCACAGCGAATTATGCACAGCCCCACGTGGCCCAGAAGGACGTGTCCAACTTCACCATGGCGTCGCCCCT
CAGGGGGCCTGGGTTGGAGGCTCTCTGTAAACAGGAGGGAGAGCTGGACCGGAGGAGCGTGATCTTCTCCTCCAGCGCTTGTGACCAAGTGAGC
ACCTCGGTGCATTCTTATTCTGGGGTGAGCAGTTTGGACAAAGACCTCTCTGAGCCGGTGCCAAACCGTCTCTGGGTAGGAGCCAGCCAGTCCC
TCCCCAGCTCGCAGGCCTACTCCCACGGTGGGCTGATGGCCGACCACTTGCCAGGAAGGATGCGGCCCAACACCAGCTGCCCGGTGCCAATCAA
AGTCTGCCCTCGCTCACCCCCCTTGGAGACCAGGACCAGGACTTCCAGCTCCTGCTCTTCCTATTCCTACGCGGAGGACGGGAGCGGGGGCTCA
CCCTGCAGCCTCCCTCTCTGTCAGTTCTCCTCCTCGCCCTCTTCCCAGGGAGCCAGATACCTTCCCACAGAACATCACGAACCAGGCCTGATGG
GAGATGGAATGTACAACCAAGTGCGGCCCCAAATTAAATGTGAGCAGTCTTATGGAACCAACTCCAGTGACGAATCCGGATCGTTCTCGGAAGC
AGACAGTGAGTCGTGTCCTGTGCACGACAGCGGCCACGACGTAAAACTTCCTTTTCCTGTAGATCAAATCACAGATCTTCCAAACAACGATTTC
CAGATGATGATTAAAATGCACAAGCTAACCTCAGAACAGTTAGAGTTTATTCATGATGTCCGACGGCGCAGCAAGAACCGCATCGCGGCCCAGC
GCTGCCGCAAAAGGAAACTGGACTGTATTCAGAATTTAGAATGTGAAATCCGCAAATTGGTGTGTGAGAAAGAGAAACTGTTGTCAGAGAGGAA
TCAACTGAAAGCATGCATGGGGGAACTGTTGGACAACTTCTCCTGCCTTTCCCAGGAAGTTTGCCGAGACATCCAGAGCCCCGAGCAGATCCAG
GCCCTGCATCAGTATTGCCCTGTCCTCAGACCCATGGACTAGCCCACGGCCTCCAGTATTAACCCTCCGCCCTTGGGTGCTGAGCAGAACATTG
CaGCCTCCCAATGCGCAGTGGGGGAAAACGTGCCCTGCTGCTTGGAGCCAGGCGCGGCTCCCCCCGGACCCCCCTGGGCACCCAGCAACACCTC
CGAGAATTGTACCTCTGGGAGGAGACTAGAAGGCACTGACCCGGGAACCTTCTCAGAGAGAGGACCTCCTCTTGAACCCAGGAGCCAAACAGTG
ACCGTGGACTTCTGCCAGGAAATGACTGATAAGTGTACAACTGACGAACAGCCCAGGAAAGATTATACCTAG

[0267] TABLE 3
MOUSE NOMENCLATURE
ICSGNM Wnt1
Celera mCG18420
HUMAN NOMENCLATURE
HGNC WNT1
Celera hCG4T496
MOUSE SEQUENCE - GENOMIC
TGAATGCTTGAGATAACCCAAATGCATGCTCCACGCTCGCGCCTTTGCTGCACAAGAGATGAGGGAGGCCTGAGAGGATCCCAAAGTGAGCCCA
ACTTCAGGATAGCGGGGGGGGGGGGGGGTCCTGCTTTCTCCAAGGACGTTCCCACACAAATGTGAATACGCATATGGGCATAAACAAAAAGCTA
CAAAGTGAACCTTTAATTTTTTTTAATGTGTGAACAAAACAACAACAGCAAACAAAACAAAACAAAACAAAAAAAAAAAAAAGAAAGGCCTCCC
CAAAACAAAGAAGACCCAGCAGATGAAAGAAAGTGTTTGCTGACTGGGGCGTGGTGGCACACCCCTTTAATCCCAGCACTTGGGAGGNNNNNNN
NNNNNNNNNNNNNTGGGAGCCGAGGCCAGAGAGTGGTTCCAAGAGCCTGACCTCGGACCCTTCTAATCTAGCTTGCCTGGTATTGCCAGCACGA
GGAGGCAACACCCCTCACAGGTGGTGGGGAACCCCCTTCTAATCCCTCCCTCTAACCCTGTAAGGGCGGGCAGATCAGTTGTGCGGCCCACAGA
GAGGGAGCGGTTGGTGAGGAGGGATAGAGGGTCTGAGAGAACCGGTCTCAAATGGGTATCTGAGTGTCCCAGGACCCTGCGTCGTGTGTGAGCT
GGCTCCCCCCCCGCCCCTGCCAGACCGCAGCCCCAAGCACAGCATGACTGGCCCTGCGCACCCAAGTCACATAGATCCAGAGCCGACCCCCCAA
GGAAACAGAAGCACAGGGCTGGTACCCACAGCCACAACCACCTCTTCATTGCTGGTGGCTAGCAGCAAGGCTGGCCAACCAGCCCCTGGTCTAC
ATTCTTGCAAGTCTTGCCTTGTGTTGAAGAGGCATCCCTGGCTAGGTGTCTAGTACAAAGGAAGTTAGGTATCTGGGCTTACTATTGAGTGCTT
CCTTGATGAGGGTGCTGGAGCCCTAAGCTAGACCACAGCGGGAGGTGCTCTTTCTGACTCCCCCACCTCTGGAGTAGGGAAAAGGCAGCCCAAG
AGCTCCTTCCCATTTAGGGGAAGAAGGCCAAACCATGTATAACTTCTGAGATCGGCCAGCACTGTCTCAGTAACTTCTACCCTACTCCAGAACC
CAGGATCCTCACCAGTGCCCCATCCTCTCTCCTGCCTGTCAGCCTGGGACTCACCCAGGCCCTGGAAGGGTATTTAGCAGAPCCTTCATCAGTA
TCTCGAGGATATTCACGTTTCTCCCGTGGCTGCAGTTCCATTCACACGTTGGATTTTGTCTTGTTCCTATTTGTCCCTAATGCTATCTTTACCT
CCTAGTTCTATCATTCAGTCAGATGTCAAGAAGCGACTAGGGCAAGCTGGGCCACGTAGAGCTGTGTGTGTGTCTGTGTGTGTGTGTGTGTGTG
TGTGTGTGTGTGCGCGCGCGCGCCATGCTTTTACTCCCAACACTTGGGAGGCAGAGGCAGGTGGATCTCCTTGAATTCAAGGCCAGCCTGGTCT
ACTATGTACTGAGTTCTGGGACAGCCAGGCTATATAAAGAGACCCTGTCTCTAAAACCGATGATGATGATGATGACGACGACAGCGGCAACGAC
AATAATAATAATAACGACGAAGGTGATGATGATGATGAAGGGGCTAAGGAAGATTATAGCGCCCAGAGGTTCAACTTCTTAGTGGTCTGGGGGC
TCCCCAAGTTGAACTGTCCCAAACCTAACAACTCATACCGCTGTTCTCTAACCTCTCTGAAGTCTTGCTCTTTCATAAGAGGCCACAGGCAGGC
AGTGGGTGGCCTGAGCTGGCCGAGGGTGCCCTCTTGCCGACCGTCTGGCCTGAGCACTGACCCACACGCAGCTAGAGGCCGGTGGGACAGGCGG
GGCCTGGAGAGGCCTGCGCGTCCACACCCATTGCCTAATACCCCAAGCACGCAGCCAGCTCCAAGAAAGAGGAGGGGCAGGAACCAGAGAGACC
TTGACAAGGGTTGAGACCTACATGAGAGGGGGAAAAAAGGCGCCCTCCCATCACTGCAGGCAGGAAATGAGAGCAACCTGGCCCATCTTCCTTT
TGATGAGAAAAGTGGAAGGCCCCTCCGGCCCTTGCGGGGATGGGGAGGGGGGACGTGTAGCAAAACACTGTGGGAAGAACAACGAGGCCCTGAA
GGGCGGGGAGTGTCAAATAAAAGAGTGGGGACCTCTGGAGATGGGGAAATCAAGCAACTGAGGCGGTGGCTAAAGCCGGGCTACACTCGGGAAT
CTCCTCCTCCTCCCCCTCCCCTGATCTTTGCCTTGGCTGCGGTCTTCGGTGACTCATCTGTTGCTAAGCCGCTGATAGGGGCGGCCAGCCCAGG
GAACCCAAATTATAGCCCCTGGAGGGATGGATGCCCCTGCGGCGGTGAGCTCAGCTGTACGCCTCCCTCCACCTCACCGGTCTTCCACTGCAGC
ACCGAAGGCCACCACCCAGAGGCGCCAGAGATGTTGCAGACGAACTACTGGACTCCAGAGAAGCCCCCACATTCAGTAGTAGCCCCAAGGAGTC
TTCTGACTCACCCAAGACAGAATGTTACCCCCTTGTCTACTATAGGTTGATGGATGGGTTACACCCTCCCAGCCCGAGGGGGTAGCGCCTGCCT
GGGCTTCAAAGGCTTGCCCAAGAACTCAGAGCTCTGCTCCAATGTTCTCTCTCTCTCTCTCTCTCTCTCTCTCTCTCTATACACACACACACAC
ACACACACACACACACGTCTAAGCAAAGCTTTCACCCTCCCCCACCGCCTCCCTCCTAGATCTATTCCAAGCCCTGTGTTTTGCTACAGAGTTT
CTACTTCAATTCTTTAGTTAACTGTAGCCAAAAGTGACAGCAAGCCGCCCCCTGTCCCATATACCTAGAATAAGGAAGTTGAGGGAGGGAGATC
AAGAATTCCAGGAGAGCAGATCTACAGATCAGCATCGAAGAGCTCTTGTTGCTTTTGTAGAAGACTTAGGTTCAATTCCCCAGCGCCCACAAGG
TGGCTCACAACCATTCATAACCTTGGTTCCTTGGGAATCAATACGTATGAGTGTGGTGCGCATATATACGAGCAGGCAAAACATTGAACTACAA
AGAAAAACAAATCTAATAAATAATNNNNNNNNNNNNNNNNNNNNNNNNNNNNNNNNNNNNNNNNNNNNNNNNNNNNNNNNNNNNNNNNNNNNNN
NNNNNNNNNNNNNNNNNNNNNNNNNNNNNNNNNNNNNNNNNNNNNNNNNNNNNNNNNNNNNNNNNNNNNNNNNNNNNNNNNNNNNNNNNNNNNN
NNNNNNNNNNNNNNNNNNNNNNNNNNNNNNNNNNNNNNNNNNNNNNNNNNNNNTTGAGCCACATGTAACCCAGGCTAGCTTCAAACTCAATATG
CAGTTAAATATCACATTGAACTCTGACCTCTGCTTCTCAAGTGATAGGACTATACATGTCACTGAACATGGCTTTATCTTCTCTTTATTTTTAC
CATACCTATGCTAAAGCTTAGGACCTCACATATGCTAGGTAAGTTGTGTGTGTGTGCGTGTGTGCGTGTGTGTGTCCATGTACACATACGTGTG
TGAGCACATGCAAAGGCCAGAGGTGGGGATGGCTGTCTTCCTCTATTTCTCTTTGCCCTATATATTTTTTAGTTTTCATCTTATTTTCATTTTT
AATTTATTTATTATTAGTGTGAGGGGTTGTTGAGTGTGCATCGTGGTGACAGCCATTCTCTCCCCTCTGTCCCCACTTCAGCAGCGGTACTCAT
AGATAATAGGGTTTCCCTGTCTTAGATTGCATTCCACCACCAGAGATCAAGAAAGGTACATGTGTGAAAGGTCTCAGTCAGGGTGTTACTGCTG
TGAACAGACACCATTACCAAGGCAAACTCTTTTTTTTTTTTTTTTTTTTTTTTTTTTTTTTGGTTTTTCGAGACAGGGTTTCTCTGTATAGCCC
TAGCTGTCCTGGAACTCACTTTGTAGACCAGGCTGGCCTCGAACTCACAAATCCACCTGCCTCTGCCTCCCTAGTCCTGGGATTAAAGGCGTGC
GCCACCACACCCGGCTCCAAGGCAAACTCTTATAAGGACAACATTTTTTAAAAGATTTATTTATTTATTTTATGTATGTGAGTACACTGTCCCT
GTCTTCAGACGCATCAGAAGAGGGCATCAGATCGCATTACAGATGGTTGTGAGCCACCATGTGGTTGCTGGGATTTCAACTCAGGACCCCTGGA
AGAGCAGTCAGTGCTCTTAACCACGAAGCCATCTCTCCAGCCCAAAGCACAACATTTAATTGCGCCTGGCTTACAGGTTCAGAGGTTCAGTCCA
TTATCATCAAGGCAGGAACATGTTAGGCATGCTTCAGGAGGAGCTGAGAGTTCTACATCTTGTTCCGAAGGCAAACAGGAGAAGGCTGGCTTCC
AGGGAGCTAGGATGAGGGTCTTAAAGCCCACAGGCACAAGGGCACACTTCCTCCAACAAGGCCACACCCACTCCAACAAGGCCACACCCCCTAA
TAGCCGGTACTCCTTGGACCAGCATATTCAAATCATCACAGTGACCCAGGCCTCAGTGATGACGAATTTCTCAGGGACAAAGTCAGCCGACCCA
TCTATAGTGCTCATTCCCTTGAGCCTTCTGTGCAGGGTACTATGTGCAGAAATTCCTAGCTTACGGACATGTGTAGGAAGCTAGGCCATTCCAT
ATTATACCTCAGAAATTCATCTTTGGAGGAAGCAGAGTTCTAGGCTAAGAGAGAGCCTGGGAAAGACATTTCCATTAACAATAAAATAAAATAA
AATAAAATAAAATAAAATAAAATAAAATAAAATATCTCAGCAGCTAGAGGCATGGCTCATCGGTTAAGAGCATCGGCTGCTCTTCCAGAGCACC
TGGGTTCACTTCCCAGCAACCACATGGCAGCTCACAGCTATCTATAACTCCAGTTCCAAAGGATCCAGCACTCTCACACAGATATGCATGTAAG
CAAAACACCAATGCACATAAAATGAAAATAAATTTATCATTTTTAAGACTCCACCAAGCTTCATTTGGGTTGATGTACATCTTGTTCTAAACAC
ATTCACACCTATTGGGATGACTCAGAAAGTTATGGGACCTGTGACCAAATCTATCGACTCGAGTTCCATCCATGGAACCTTTGTACTAAAAAGA
GAGAATCAATTCTTGTAAGTTGTTCTCTGATTATGCATGCTATAGCAGTCTCACTCATTTGCTTATTCTCTCTCTCTCTCTCTCTCTCTCTCTC
TCTCTCTCTCTCTCTCTCTCTCTCCACACACACACAGACACTCAGGCACACACACACAAAGTGATTAAATGTTTAAATTAAGGGCTGGAGAGAT
GATTCAGCTGTTGAGAGAGCACTGACTGCTCTTCCAGGGTCCTAAGTTCAATTCCCAGCAACCACATGGTGGCTCACAACCATCTATAGTGGGA
TCCGATGCCCTCTTCTGGTGTGTCTACAGTACACATATACATAAAATAAACAAATAAATCTTTAAACATTTTAAATTAAACACAAGTCCCCCAG
GAACAGTAACTAAATCTATCAGTCATTTCTTCCTCAGAGTATAGCTTGCCGGGAAAGGCTGATCCATTCTCAGAGTCAAGCTCTTTTAGAGTCA
GACTCAGGGAGTTTAGTCAGAAATCATACTTAAAAAGCAGACGAGATGCAAACAAAAGGTGCCAAAAAGGTGGCAGGCCAGACCTAAAAGTCAC
TTTCTTTCTGTGTCAACTCTGAAAAGGGACCCCAGCCTGCTCTGCTGCATATCAGGCAGCCACTGAGCCACTGACGATGCAGAAAGAGTGTGCA
TAGGCTTTGAGTTCAAAGGGGCTGTCAGGTCTGGGGGAGGGAACATGCCCCTAATCTCCACTGGAGGACTGGAGGAAGAGAGGTCAGAAGTTCA
AGGCTAGCTAAGACCGTATCTTTAATTTGAAGCCAGCCTGAGCTACATAAGACCTTATAGCAACAAATACGCAAACAAAAATCAAAACCAACCA
GGCTAGAAAGATGGCTCAACACTTAAGAGCGCCTGCAGAGGGGTGGGGGTTTAATTCCCAGCACACACATAGTGGCTCAGGGAATCTGAAGCCC
TCTTCTGGCCACTGCGTGAACTGCATGCGCATGATACATGTGCATACATGCACACAAAATACTCAAAACACATTAAAAAAATAAGTCTAGCGGT
GGTGGCACACGCTAGCACTCAGGAGGCAGAAGCAGGCGGATGTCTGAGTTTGAGGCCAGTCTGGTCTACAATCCAAGTTCCAGGACAGCCAGGG
CTACTCTATCTCAGAAAACCAAATAATCAAACCAATAAGACTCCTCTACCCCCAAAAAACAAAAAAGCAAAAAATAACAACTGGGTTTGGGTTT
AGCTTTGAGATAAGATTTTACTATGTATCCCAGGCTGGCTATACTAGAACTGGTTACTATGTATCCCAGGCTGCCTATACTAGAACTGGTTACT
ATGTATCCCAGGCTGGCTATACTAGAACTGGTTACTGTGTATCCCAGGCTGGCTATACTAGAACTGGTTACTGTGTATCCCAGGCTGGCTATAC
TAGAACTGGTTACTATGTATCCCAGGCTGGCTATACTAGAACTGGTTACGTAGACCAAGATAGCCTCAGACTCACAGATGTGACTCACTTGCTT
CTTAACTCCCAAGTGCTGGATTTACGACCGGTGCCACCAAGCCTGGTGTCCCCAAGGCTTTTTAATCCTCCTGCCTCAGCCTTCCAGGTTCTGG
GACTGGCAAGCATGTGCCCCCACACAGAGTTGGCCTGGGCATTGTTTATTCTATTTTTCATTAGTTATTATTTTGTTGTTGTTTGAGATGGGAT
CTTTCTACATATCTCAGCGTTGTCTCATGTTTGGAGCAATCTTCTTATATTTTATTGTATGTGTGCCTGCATGTGTGTACATGCGTGTGCGCTC
ATGTGCATGTGCGTATGTGTGTGTGTATGTCTGTGTGTGCATCTGTGTGTGTGTGTCTGTGTGTATTGTATGTGAGCAAGTGTGCAAGCTCATG
GAGATCAAAAGACAAGTGTTTAGAATCAGGTCTCTGCTTTCATCACATGGGCCCCAGGGATGAGGCGCAGCTCACCTGGCTTGCCAGCAAACAC
TTGTTTGTTTGTTTGGTTGGTTGGTTGGTTGGTTGGTTTTTGGTTTTTTCGAGACAGGGCTTTCTCTGTATTGCCTGGCAGTCCTGGGCTCACT
CTGTAGACCAGGCTGGCCTCGAACTCATAAATCCGCCTGCCTCTGCCTCCCAAGTGCTGGGATTAAAGGCGTGTGCCACCACGCCCAGCTCAGC
AAACACTTTCTTTCATCTGCTGGGTCTTCTTTGTTTTGGGGAGGCCTTTCTTTTTTTTTTTTGTTTTGTTTTGTTTTGTTTGCTGTTGTTGTTT
TGTTCACACATTAAAAAAAATTAAAGGTTCACTTTGTAGCTTTTTGTTTATGCCCATATGCGTATTCACATTTGTGTGGGAACGTCCTTCGAGA
AAGCAGGAGCAGGAGTTACAGACAGTTATAAGCTGCCTGACCTGGGTGCTGGGAAACACCTCAGGTCCTCTGGAAGAGCAGTAAGTCCCCTTAA
CCAATGAACCATCTATCCGTCCAGCCTACATTTAATTTGTTTTCTTATTTACTTTGTCTGCATGTGCATGTGTGTGCATGGGACACTGGATGCC
TCTGGAGGTCAGAGGTCAGTCTTCTCTCCTTCCATCCAGCGACGCTCGGGGACTCATATCCTCAGGCTTGGCAGCAAGTGCTTCCTTGTCCCCT
TAGTCAGGGATTCTCCATGTAGCCCTGGCTGCCCTGCAACTCTCAATGTAGACCAGGCTAGCCTCGAACTCACAGAGATCCATCTGCCTCTGCC
TTCCAAGTGTTAGGGTTGAAGGCTTGCACCACCACAGGCCTTGCTTTGGGTTTTTGAGAGTGTCTACAGAATGCTGGGAGGTGAGGAATAGCCT
TGAACTTCTGATCTTCCTCCCTCCCAAGTGCTGGGGTTACAGTCATGCGCCACCAATTCCTGGCTTTTGCAGTGCTGGTGATCCAAACTAGGGC
TTCATGCAAGCGAGGCAAACACGGTATCCCAGTTCCTGGGAATGTGGCTTTAACATGGATTCATTTATTAGCAGGGACCTGGGACCTGAAGACA
CTGCCTTACCAAGCATCTCCTCTGTGAAATAGAAGAGAGGAGAAATATTAAGATCCTGGGAAGGGGGCGCTTCCCTGTGTGACAGTGGTGCGTG
ATAACCAGGCTGGCAGTGCCCTCTGCATCCCACATTGGGAACAGCAGCCTGATACTCCAAGGCTGCCATGACCCTGAAGATCACTGGAATCAGG
AGGAAAGTAGAATCCACAATGGAAGAGTTAAGGCTCTTGGGTAAGAGTGGGAGAAAATGGGGGTGGGGGGTGGGGACACTGCAGAAACCTGGGA
GAAAAAAAATCCAACTAAAATCAGGAAACACATGGAGGCACAAATTTGCTAATCTTTCTTTAAAAAACTGTTTCAGGAGATTTATTTTATGTAT
GTATGTATGTATGTATGTATGTATGTATGTATGTATGTATGTATACGTGCACCTGTGTGTGCTTGGTGTCAGTGGGGCTCAGACATCACCTGAT
TCCCTGGAACTGGAGTTACAGGTGGCTATAAGCCACCACTTGGGTGCTGAGAACAGACTCCGGGGCCTCTGGCAGAGCAGTCAGTGCTTTTAGC
CACTGAGCCATCTCTCATTCCCCCCAATTATGTTCATCTTGAGTTGGGCAGGTACGGTGGCGGAATAGGCCTGTAATCCCAGCAGTCACTGGAC
CATCATGGGTTCTACATATTAAACCTTTATGTTAGGTAGGGTCACACAGCAAGATCCGGTCACAAAACCAGCAACAACAAAACCAAAAGGAGCC
AGCTTCTTCCCACAAGCATTCTTTCCCTCAGGTCTTCAGCTCCATCTGACAGCTACTCGGCTGGTGGTCCTATCCTTTCTGAGCCTAGTTGCCA
GAGAAACAAGCCCGGTTCATCTTCATGACTAGCACATCTAATGATAAGCACAGGTTGACTCAAGGTGCCATAGGGTGACACTAGGTACCCAGAG
CGACAGAATGACACCTATGAGTGCACGTCGTTAATCACAAACACACACACACACACACACACACACACACACACACACTCATGCACCCACCTGC
AAACACAATTGCAGCCTTCTGGACGTCTCCTGTCACAGCCCCACCTCCTTCCTGATACACTGCGTTAAGTGGTGACTGTAACAAAATGACTTCA
TGCTCTCCCTGTCCTGAGCCAAATTACACAATTATTTGGAAAGGGCTCAAAATGTTCTTCGTTAGAAGTTTCTGGATACACCAATACACAGGAG
CGTGCACCCTCAGAACACATGTACACTTTGACTTAATCTCACGGGTGACACACCGACGCTTACACTCCCCCTAGCCCACAGAGGCAAACTGCTG
GGCGCTTCTGAGTTTCTCACTGCCACCAGCTCGGTTTGCTCAGCCTACCCCTACACCCCACGCCCGGGAATCCCTGACCACAGCTCCACCCATG
CTCTGTCTCCTTCTTTTCCTTCTCTGTCCAGCCGTCGGGGTTCCTGGGTGAGGAAGTGTCTCCACGGAGTCGCTGGCTAGAACCACAACTTTCA
TCCTGCCATTCAGAATAGGGAAGAGAAGAGACCACAGCGTAGGGGGGACAGAGGAGACGGACTTCGAGAGGACAGCCCCACCGGCGCGTGTGGG
GGAGGCAATCCAGGCTGCAAACAGGTTGTCCCCAGCGCATTGTCTCCGCGCCCCCTGGCGGATGCTGGTCCCCGACGGGCTCCGGACGCGCAGA
AGAGTGAGGCCGGCGCGCGTGGGAGGCCATCCCAAGGGGAGGGGTCGGCGGCCAGTGCAGACCTGGAGGCGGGGGCCACCAGGCAGGGGGCGGG
GGTGAGCCCCGACGGTTAGCCTGTCAGCTCTTTGCTAGACCGGCAAGAGCCACAGCTTCGCTCGCCACTCATTGTCTGTCGCCCTGACCAGGTG
CGCCCTGGTGCTTTTAGTGCCGCCCGGGCCCGGAGGGGCAGCCTCTTCTCACTGCAGTCAGCGCCGCAACTATAAGAGGCCTATAAGAGGCGGT
GCCTCCCGCAGTGGCTGCTTCAGCCCAGCAGCCAGGACAGCGAACCATGCTGCCTGCGGCCCGCCTCCAGACTTATTAGAGCCAGCCTGGGAAC
TCGCATCACTGCCCTCACCGCTGTGTCCAGTCCCACCGTCGCGGACAGCAACCACAGTCGTCAGAACCGCAGCACAGAACCAGCAAGGCCAGGC
AGGCCATGGGGCTCTGGGCGCTGCTGCCCAGCTGGGTTTCTACTACGTTGCTACTGGCACTGACCGCTCTGCCCGCAGCCCTGGCTGCCAACAG
TAGTGGCCGATGGTGGTAAGTGAGCTAGTACGGGGTCCGCCACTTGTCCTGGGGCAAAGAGCCAGGCACGGGCCTTACCCAGCTCCCACGCTGT
GGGGATCACCAACCTACAGACCCCCCTCGTGCATTGTGACTTCACATCCAGGGTGCTCACACCTAGAACTAGCTCTGCTGAAGTGGGGGCACAT
CATTGGCATGCAGAAGCCCAGATACACCAGGCTCAGAGACCATTCCCATTTAATACGACCCCGTTTCTGCTGAGCAACAGGTCCCAACCTCGCT
GTGGTGGGTGCTCAGGTGTCCCTTAGGTCTTGAACCAAAAAAAAAAAAAAAAAAAAAAAAAAAAAAAAAAAAACCAGATATTAGCTTTGAGGTG
AGGGAGTGGAATTCCTAAGTTTTTCAAGGTGGGCAAGGCTGCAGGTGGGGTTTCTCCTCGGGGGCTGACTTGAAGAAAGGAAGAGCTAAGGTAG
CCATGCCTTTTCTGTCCACTCACTAGACTCTGGAGCTCAGGGCCAGGCAAGGATAGGGTGGTACAGCCTGTATGGTTAGGATGCAGGTCCCCTC
CCCTGGACTGAACCCTTATGCATCCCGCCAGGGGCATCGTGAACATAGCCTCCTCCACGAACCTGTTGACGGATTCCAAGAGTCTGCAGCTGGT
GCTCGAGCCCAGTCTGCAGCTGCTGAGCCGCAAGCAGCGGCGACTGATCCGACAGAACCCGGGGATCCTGCACAGCGTGAGTGGAGGGCTCCAG
AGCGCTGTGCGAGAGTGCAAATGGCAATTCCGAAACCGCCGCTGGAACTGCCCCACTGCTCCGGGGCCCCACCTCTTCGGCAAGATCGTCAACC
GAGGTGGGTGCCCAGGAAAGCGACGCTTCCGGGATTAAGGGAAAAGCAGGGTCATCTCCAGGGCATAGGCGGGCGAAGGCAGGGAAGACATCCC
AGGGTTATATGTGATCAAACTGAGAATCGCCTGGTGCCGGCAGTTACCGTAGGTCAGCACCAGATTCTTTCTAGCCTTGCGTTGTGAGCATGAT
CTTTAACGTTGCTGAGCCACTGGCCCACAGAAAGGGAATTCCGGATCGTGGGCGCTGGGCGACAGCTGTTTTTCCCTAGCCTTCCTCAAAGGTA
CCTGGGAAGCTGATCTCTGAGGGCTAGCTAGGGTTGTGCTTCGCACCCAGCAAAGTTTGCACTGCCAATACTAGTAGCGATCTTGGCTATGCAG
ATTTGTTCTACTTGGGAATCTCCCCTTGGAGCTGCTCTGCTAAGGCTCTGGAGTCTCAGTAAAGCTTAGAGAGGAGGGCATTCCATGCTTCGCA
CACATGACTCCAAGGATGTTGGACTGTAGGGTACCAAGTCTTCCAAACAGGGTGCTGAGTTGGCCCCACGCCTTCTCTCAACTGATGCGGGGTC
GCTTCACCCACAGGCTGCCGAGAAACAGCGTTCATCTTCGCAATCACCTCCGCCGGGGTCACACATTCCGTGGCGCGCTCCTGCTCCGAAGGCT
CCATCGAGTCCTGCACCTGCGACTACCGGCGGCGCGGCCCTGGGGGCCCCGACTGGCACTGGGGGGGCTGCAGTGACAACATCGATTTTGGTCG
CCTCTTTGGCCGAGAGTTCGTGGACTCCGGGGAGAAGGGGCGGGACCTACGCTTCCTCATGAACCTTCACAACAACGAGGCAGGGCGAACGGTA
CGTCGGTGTGTCCGGAACCAATGGCAGGGGAGATGTAAGACAGGTGCACGGGGACAGAGGCACAGGGAAGGGGCTTCCCGAGAGAGTGGGACTC
TAGGAGGGAAGACAGAGAAGAGGTGGTGGTTGAGGGCAAAGAGGTTCCTGAGCTGATGACAGAACAGAAGAGATTAGCAGGCTATCAACACGTG
GGATGTATTGAGATGGCTCCATGGCACACTTTTGAAAGATAAAAGTGACTTGCTGGCGTGGAGCAGAGTCTGGCCGAATGTCCCTATCTCAGCG
GGCCATTTTGCACTTCCTCTCTCCCGAGCTTAGTCACACCTGGACCTTGGCTGAAGTTTCCACAGCATCGACGTGACCCGGGTGGGGTGGGGGT
GGGGAAGTATGGGTGGTGGTTCGTGGGATGTTGGCTTTGACCTTTTCTTCCCTCCTCCCCTCGTCCCCTCCTCCCCCAGACCGTGTTCTCTGAG
ATGCGCCAAGAGTGCAAATGCCACGGGATGTCCGGCTCCTGCACGGTGCGCACGTGTTGGATGCGGCTGCCCACGCTGCGCGCTGTGGGCGACG
TGCTGCGCGACCGCTTCGACGGCGCCTCCCGCGTCCTTTACGGCAACCGAGGCAGCAACCGCGCCTCGCGGGCGGAGCTGCTGCGCCTGGAGCC
CGAAGACCCCGCGCACAAGCCTCCCTCCCCTCACGACCTCGTCTACTTCGAGAAATCGCCCAACTTCTGCACGTACAGTGGCCGCCTGGGCACA
GCTGGCACAGCTGGACGAGCTTGCAACAGCTCGTCTCCCGCGCTGGACGGCTGTGAGCTGCTGTGCTGTGGCCGAGGCCACCGCACGCGCACGC
AGCGCGTCACGGAGCGCTGCAACTACACCTTCCACTGGTGCTGCCACGTCAGCTGCCGCAACTGCACGCACACGCGCGTTCTGCACGAGTGTCT
ATGAGGTGCCGCGCCTCCGGGAACGGGAACGCTCTCTTCCAGTTCTCAGACACACTCGCTGGTCCTGATGTTTGCCCACCCTACCGCGTCCAGC
CACAGTCCCAGGGTTCATAGCGATCCATCTCTCCCACCTCCTACCTGGGGACTCCTGAAACCACTTGCCTGAGTCGGCTCGAACCCTTTTGCCA
TCCTGAGGGCCCTGACCCAGCCTACCTCCCTCCCTCTTTGAGGGAGACTCCTTTTGCACTGCCCCCCAATTTGGCCAGAGGGTGAGAGAAAGAT
TCTTCTTCTGGGGTGGGGGTGGGGAGGTCAACTCTTGAAGGTGTTGCGGTTCCTGATGTATTTTGCGCTGTGACCTCTTTGGGTATTATCACCT
TTCCTTGTCTCTCGGGTCCCTATAGGTCCCTTGAGTTCTCTAACCAGCACCTCTGGGCTTCAAGGCCTTTCCCCTCCCACCTGTAGCTGAAGAG
TTTCCGAGTTGAAAGGGCACGGAAAGCTAAGTCGGAAAGGAGGTTGCTGGACCCAGCAGCAAAACCCTACATTCTCCTTGTCTCTGCCTCGGAG
CCATTGAACAGCTGTGAACCATGCCTCCCTCAGCCTCCTCCCACCCCTTCCTGTCCTGCCTCCTCATCACTGTGTAAATAATTTGCACCGAAAT
GTGGCCGCAGAGCCACGCGTTCGGTTATGTAAATAAAACTATTTATTGTGCTGGGTTCCAGCCTGGGTTGCAGAGACCACCCTCACCCCACCTC
ACTGCTCCTCTGTTCTGCTCGCCAGTCCTTTTGTTATCCGACCTTTTTTCTCTTTTACCCAGCTTCTCATAGGCGCCCTTGCCCACCGGATCAG
TATTTCCTTCCACTGTAGCTATTAGTGGCTCCTCGCCCCCACCAATGTAGTATCTTCCTCTGAGGAATAAAATATCTATTTTTATCAACGACTC
TGGTCCTTGAATCCAGAACACAGCATGGCTTCCAACGTCCTCTTCCCTTCCAATGGACTTGCTTCTCTTCTCATAGCCAAACAAAAGAGATAGA
GTTGTTGAAGATCTCTTTTCCAGGGCCTGAGCAAGGACCCTGAGATCCTGACCCTTGGATGACCCTAAATGAGACCAACTAGGGATCCAGGTCT
CCTGAGAGAAAAGCCTGCTCAAAAGCTCCTGCAGGGCTCTTCCTCCTGTTCTGGCAGCAGGTGCTTAAGTGATGAGGACAAGTGTGTCACCTGA
TGGGGACTCAGCACACCAACAGTCCAGCTCTCCTAGTGCAAGAGCTGGGGAGGTAGCAGCAATGAAAGGAAAGGATAGCCATGACTAGGTCCTG
AGAGGGGGGGGGGGGAAGCTCAAGCAGAAAGGGTGTCATTGCCCCTGGGAGGCTATCAACCTTTTCTGCAGTCTGAGCTTTGAGCAGTGGAAGG
CCCACCTCTTACACTCTTCCTGGAAATTCTTTATGACCAACCCAACCCTAACCTACAGGTAAGGGACATCCAGGAACAAGCCATGGGTTAGAGC
TCGAAAGATGGCTCAGAGGTTAAGAGCACTGGCTGCTCTTCTAGAAGTCCTGAGTTCAATTCCCAGCAACCACATGGTGACTCACAACCATCTG
TTAATGGGATCTGGTGCACTCTTCTGGTGTGTCTGAAGACAGCTATGGTGTGCTCATATAAATAATAATAAAGAAATGATATTAAAGAAAAGCC
ATGGGTTAACAGTGGGCCCTAAACTTGAACTAGAAAACTTAAAGATGCTCATAGGGAAGAAGAAAAGAGCAGAAAGCTTAGCTTCTAGACAGGG
GTAAGGCTTAGAGCTCAATAAAAAAGGAACCCCAAGAGTGATTGGTCCACAACCAAAGCAGTAAGCTAACCACACCCACAAAGAGCCAGAATGA
GGATTCCTTATGACCTGCAGGCTACCTCTGTGCTTGCAGTCACCAGTCAGCAGGAAAGGAATCCTTCTCAGAGTACTCAACCTGACGCCAGTCA
TTTCTTCCTCCCTTCCTTGTCCAACCAGAGCCTTAGCCCTGACTCAGGGAACACTAACCCTTTCCAATACCTGACCTTCATCATAGCCCCTTCC
CACCAGAGAGGACCCGAAAGGCATTGACAGAAGCTACAGAGGACCCCCGCCTTCCCAAGAGCCATAACCAGTCTCAATCAGCTCACAGAGTTTC
TTCTTCTTCCCAGGATCCTTTGCTGCAGGCTATCACCTCTGGGGAAGGGGGGGGGGAAGAGGTGGGGGGGGAGGGGTGAACTCTGACCCCTGTT
GGTTTTTTGACTCTGTGAGTGGGTAGAGAAGTAGATTCAGGGCCTGCTCAAGCCATTTCCTTGCCTTTCTCTCCACTGGCAAAGCTAGCACTGG
GTCAGTTCTGATGAGTGGATCCAACCTGGGATACTGGATGTCTGGATCTCTAAAAGGTTCTGGGTCTCCAGTGATGATCATCCAGAAGAGCCTA
CTCAGTCCTAACCCAAGCTGAGCTATCAGCCCCTCAGCGCTCCCAAAGTATGAAGCCATTGGGCTGTCCCAGGGCACAAATGTGTGTGTGTCTG
TGTGTGTGTCTGTGTGTGCATGCCTGCACATGCTGTGTTGCACGTGTGTGCCTGTGTGTATGTGTGCATGCACGCATGTGCACATGCACGCTTG
TGTGTGTGTGTATGTGTGTATGTGTGTGTGCATGTGCACGTGTGTGCACGCATGTGCGAGAGTGTGTACGCGTGGGCTGCTGTAACTCAATGTA
TCAGGGAGAAGCAGCAGAATGGAGGAACCAAACCATCGCCGACCAATCTCACCCAAATCCTAACCCAGGAACCTGGAAACTAGTGTGCTGAGCA
GAGGTGTCTTTCAGGAGTTGGAAAGAGAGCACCACCACCCCCTTTTGCCCAGGTATTTGACACATCTTTTGTCTTCAGTCTTCTCAGTCCCATT
TGCCTTGCTTGACCCTTAATTGAGAATATTCAAATATCCATCTTTGTTGTCGCTTAAGGAGGGGATAGGCTTCAAATGACATAGTGTCTGTGAC
AGCTTGGGTTGTGTGGACGGCTACTGATACCTTTTCTGTACTAGCCTCTGTCAAATGCTGGCAGTGCAGCAATCTACAAGCCAGAGGTCCAGCC
AGGACTCAACCAGGCCAACAAACACTAACAGGCATAGAGGGAAAGACCCTCGGTGTGCAGGAAAGGCTTCAGCACCCTTCTCTTCCAGGGGCTC
GAACTTGGAAGAAGTGTGCCATGGGAAAATGCAGAACAAAGCCAGGGCCCAACACAACATGCACAAATAAAAGGAAACACTTCAGATAAAAGTG
CTGGAAATGTGTGGCGTGATGGTAGAGCACGTGTAAGGACGAGATGGGTTGGATCCCCAGCCGTGTGTGTGTGTGTGTGTGTGTGTGTGTGTGT
GTGTCTGTGTGTGAAGGGGCTGTGGGGTCTACAAGTGTTGCCTAGGAGCTGAGGACTCTTTTGTCCCTATTACCTGTGTTATCTGCGCTGCCCT
CTCAACTGGATCAGTAGATCAGTAAGGAAGGGGGGGGGGAGGTGCGTACCTAGAAAGAGTCTCAGGGCTCAGAACACAAGGCGCTGTCCATAAG
ATAATGAATGTCATCAGAAATATGCCTGACGCACCTTCCTGAGGCTTCCACCCACTCGTGATCTTTAGATGCCATGCAAATACACACCACCCCG
GGGACAGGGACCCTGGTCACAGAGCTGACCTCAGTCAGAGCTGTTGCGGGGACTGAGTCTTGAAATATCCCAGGGGTGGCGGAAAAGCTGAGAG
GACCAAGACAGCCAGCGGGGCTGCACGGTCCCTGGGGGGTCAGCACCGAACACCCTGACACTGGCATCTCGGAAAAACCCTGTCAGTGGTAACT
GCAAATACCAGAGGGTCCAACCCCCCCTTCCTTACGGCCCCAGGCAGGCTCAGTCCCTTGGCTCCAGGGAAGAAAATAAGCTGTCTGGCTGTGG
TGTGAGCAGGAACATCCGTGCAGAGCTGCCCACCAACTCACCCTTACTCAGTCTTTCCACACCATGCCAGGGCCGGGCATGAGACAGACCACCC
CCTTACCCCCTCCCCCGTCTGGGCTAAAAGCAGACACACTGGGTTGGTGAGAGAGCAGCAGGTTATAAATATGCCCAAGGAACTGCCGCCAACT
CGCTCCCCTGTCATCCCCTGGGAGGGGGTAGGGTGGGGTGACACCTAAGGAGGAGCCAGGGCTGCCCTATTCAGTGAGGCCCAGAGAGAAGTGG
AGCCTCCAACCAGCTGCTGAAATATTTATTGATTTTTTTTCCTTTACCTTTCCCAGGTGAATGTGCCACCTTTGACGTGTGCCCTGGACTTTTG
TCTACCCCACCCTCCCTGGTATATGGCCTTATGTCCAGCGTGAAAGGGCTCAAAGCCCTGGGCCATTTCCTTACACCCTCAAGAAAATAGCAGA
CTTTTTAATTCACTCACTGAGTGGACATAGTGAGGTGCGCATGCGCACCTGCAGCCCCGGCGCATGCACACCCTACTCCTGGGTGATCGTACCA
GCTCCAGCCTCTGTTCTGCACGCTGTGCCTTCAACCTGGCAACCTCCCAGGGGAAGGGAAGGGAAGGGAAGAGAAGGGAAGGGAAGGGAAGGGA
AGGGAAGGGAAGGGAAGGGAAGGGAAGGGAAGGGAAGGGAAGGGAAGGGANNNNNNNNNNNNNNNNNNNNNNNNNNNNNNNNNNNNCTAAGGCA
AAAGGGGCAGCCCTCCTCTTCCAGGGCTGAGCCCCTCCCTTCTCCATCCTCCCTATTAATCCTCGGAAGTGAAGGGGCCGTCCCTGGCGGCCCT
TCAGCCCTATTGTGGCCCCTCGCCCTCCTCGGCTGGCGTCTAATTAACTCCTCCTGCCCCTGGTTTTGTGTGCCCCCCTTACTCCACCTTGTCG
GCCCCGCCCCTCCGCTCGGTCCGCTCCCCCCGACGGACATTCCAGTCAGGCCGGGCCAGTGTGCCAGGGCAACCAGGGCCAGACCGAGGCCTAA
TCCCCCCTCCACCCGGCCGGGCTCAGGGAGCCCCACTCACCTCCCGGCTCTCTAGGGGCTGCTCGGCTCTGCTGTGGCGGAGACACACAATCAG
GACAAAGGCGCAGCCCCCAGGGGGCTAACTCAGCCTTCACGCCCAGGTTGTGCGGCATTTGGGGAGTTTAATGAATTGTCCATCACGCCTTTCA
GGGCCCGCCCGTCAGCCTGGATTAATCTTCGGAGCCCTGGTGGGGCAGGAGACACTAAGCCTGTATTTATTACTCTCCCATTGTCACTAATTGA
GGTAATTATCTGTGACTCTGGCCTGGCCAACAATGCTGCATTCACTCCTGGGACCTCGATGGGCCTGGCTCCCACTCTCAGCACCAACCCTCCC
TCCCTTCCTCTCTAAAACGCGCCAAGGGCCAAGATGGGCCCTGGAGCATGTTGGGAAAGTGGACAACGTTCCACAATGTTCCACGTTCACGTAG
TGTCTCCCAAAGCCTCCTCCACTATGGAGCAGTGTTGAGGAGAAACCTGGGTCTCCTAAAGTTGGTGAGAGAAGAGGGCACACAGGCTTGACCC
GCAGAAACCCCAGGCCACAGCCAGCCTGGCATGCTTCATTCCTGGGTAAATGGCACTAAAGTCTCACGGGGCCTTTCACATGTCCCTGTAGCCT
ACAGGACTCTGGAGTGCTAGAGGGCACATACTATTCCCTGCTAGATGAGACCTTCTGGAAGCAGAAGCTACCAGAGTTGCCAGAGCGGCAAAGT
TGGAGAAAGTTAACAAGAACAGGATAGGGCGCAACAGGGAGCAGAAGGGCAGGATGCAGAAGCATCCTAGGAAGAAGCAACCCAAAGTCAGAGC
ATTCCCCAGGGATCACACCAATGTGACCATCAATTAGTGCCATGCAGCAAGCTGGAGAAAAACCCAATTTAGAGTAGATGTCATATGAAGATGG
CCTTCTGGGTCAAGGGAATATTCCTGGAGAACGTGTGTGTGTGTGTGTGTGTGTGTGTGTGTGTGTGTGTGTGTGTGTGTAATGCATGTGCATG
TGGTGTGTGTGTGCATGTGTTGTATATACATGTATGTGTGTGAATTCTTGTGTGTGTGCTTGTGTGATGTGTGCGTGTGTGTGTGTTTAAGATA
CAATAAAGAAGAGTAGACTTGGATGAGACTTGATTTTGAGATTCTTGATGGCAAAAATTATGTTTTGGGTCACTGTTATTTTTATAAGATCCTA
ATACTTTACCTAGAATGCCAGGCTATATGAAGCCCGTACTTCACAACCGTTGCGGCCTGTCAGATCTTCTCTTAAATGTCTGTCCTCCGGCTCT
TCATTTACCTAGTTCTTGGTCAAAAGAGATGTCTAGAGCATTCCTGGACAGTCCTGTCCTGGATGGACAACTGACCAGCTGAAGCACTAAGGAT
CCTGGTAGAACTCAGCGCCAAAGTTCGAACAGCGCCACCTCGTGGCAAATCTTGGGAGAGCTTCTGGAGACACTAGCTAAGAGGATAGAGCCAG
CGGCTGCAGGGGCTCAGGCTGGACAGCAGCCATCCTCCTTCATGGCTGCGTTGTTGTCTTCCCGGCTTTTATTTTAAATTGTCCCTCCATTATT
TGAAGTAATGTATCGTGCACTTCGGGATGTCATCAAGTTTCCCATGTGCTGAAGATAACAGAGAATACCCGGTCCTTTTGCCTGTACCCCCTGA
GTGCTAGGACTTTTACGGGGCTACCATGGCCAGTTTATAGAGTTTTGGGGATCAACTGTGGGACCTTGTGAATATTAGATGAGTTTCTATCAAC
TGAGTTACATTCTCCTGCCTCACTTCCCTCTTCTTACACAAACCTTTTTGGAGGTGTTTTCCATGCCAAGATTTCGTGGCTACAGAGTCAAACA
TGTAAATCAATGTATGTAAATCATATTCTAGTAACAAATTTCAAAGGGTAACCAAGTCAACAAAGATGCCAGGCATGGTGGCACACACCTTTCC
TCAGAGGATTTGGGAAGCAGAGGAGGGTGGATCTCTGGGACTTTCCAGGCAGGTTGGTTTAAATAGAGGGTTCTAGGTGAGTGGGGGCTATGTG
GTGAGACCCCATCTCCGATACAGTCCCACCATCACTAACCCACACCAAACCAACCAACCAAAAAGAGAAAGCACAGCAAAGGTCACGATGGAGA
GCCAGGGAAGTATTCAGAACTGAAGTACAATAAGATACTCCCAGCTCAAAACTCTCTGTCATCACTCTTTTGATTCTTCTCACAAAAGATCCTG
TGTTTCTTTAGCCAGAGGCAGAGCCTCATTGCTTTTCCCATGTTGCCTTGGAATTCCTGGGTTCAAGGGATTCCCCACCCACAACCCGCCATGT
AGCCGGGACTACAGGTGTATGCGTCTGCCCCATGTGAACGTCAGATGCTTGCTTTATGCTTGCCTTCAGTAACCTCTTCGTGACCAAGGCCTCT
TTCTTCCCAGGGCCTTGTTCCCTGTGGAACTCATGTCTTCTCACATTCTGGACGCATCTGTTTCCTCATCATCTTTGTGAGAACTACCTCAAAC
ATCCCTTCTTCAGCTTTCCCTTGGCAGAGTGACCTTGCCTGCCCGAACTCTTGAAATGCTTTGCTGGCCATCCGTGTATGCAGTAGACCAGGCT
TGCACCTGCATGAGGACACAGGTTAGGTGTCTCTCATTTTGCCATCCTTGCTAGCACCAGATAGGGACATTATATGCCCTCATCAGATGATGAA
TAAGTGGATTCATGGATGAAGAAGCAGACGCATGGATAGATGGATATGGAGAGGCACTTGAATGGATGATAGATGAGATGTGGATAGATCAGTA
AGTGCATAGGTAGGATGCATGGATAGATGCATGCATAGGAAGGATAGATAGGTGAGTGGCTGGATGGGTGGATGGATGGAAGGATGACTGGATG
GGTGGATGGGTGATGATTGGATCGATAATTGGGTGGATTGATGGGTGGGTGGATGGATGGATGGATGGATGATTGGATGGTTAATTGGGTGGAT
TGATGGGTGGGTGGAATGGATGGACTGATGGAGCATTTATCCACAGATGACTTGTATATCCTAGTTAATACAAGGAGATTCAAAGAAGGGAGCC
TACCCCCATGGCATGCCATGAAGAGGCAGGAACACCCCTAGTTTAAATTTTTCTCTCTATGTGCACCCTTGAAGACTTGTCTCCCAGTAGGCAT
TTGTGGCTATATCCCATTCCCTATGAGTCCAACTCAAGGAGGTGTCCTCCTCCCACTTCTTTCCATAAAATATGGAAGAGTTCACAAATTTGAA
TGTTGGCCTTGCAGAGGCACTGCGCTAATCTCCTCTCAGCTGCTCCAAATTTAGTGTAAAAGTGATCTCCCCAAAGGTAGAAGGTGTGCCCGAG
TCTCCTCGATCTCCCTGGAACACATGGTTAGTGGGCAAGTGGACAACTGAGTAATTACTGAGAGAATACTACCCTGTCCTCAACGAACACTCTG
TGCACACATCCCAGGACCCTGCATTGAGCGGCTCTCCTCTCTTGCAAACACATCCACATTACTGATCTCTGTTTTGTTTTGTTGTTTTTTGGTT
TTTCTGAGACAGGTTTCTCTGTATAGCTCTGGCTGTCCTGGAACTCACTTTGTAGACCACGCTGGCCTCGAACTCAGAAATCTGCCTGCCTCTG
CCTCCCAAGTGCTGGGATTAAAGGCTGTGCCACCACTGTGCTCACTGATCTCTTTGATGTCCCAGTTATAGCTCTTGGGTTCCCCACCCATTTG
TAGGGGGACCCAGGACACCTCAGAGCTCTCCCAAGTCTAAAAAGGGCAGGGTTCCTGGCTCCCTTAATGCCTTATCAACCACAACAGAACTCAG
GGGCAGAAAATGTTCCCAGGAAGAACTTAGCTGTGGGGAGAGTCATGGGGTCCCCTGCTAACCTAAGATGTGTTGCCCCCAAAAGAGTAGCCCT
CCAGGACCTGCTGTCTTTTCTCCTGATCAAGGGGGCAGTTCCAGGGTGGGGGTGGTTGTGCCCTCCTTCAGAAGGCTGGGTACCTGGCAGACAC
AGCTAGATTTAGAAGTCATTTTCACAGCAGGGAGTCGCTAACCTGCCACCCACAGGGCCCCATGGGGCCTAAGATACTACTTACCAGGGTCTGG
CCCTGAAACCTGCAGACACTCCTCTCCTTCTCTCCCAGAACTTTGGCAGCTGGCTCCGACTCTATCCTTGGCAAGCTCTGGAAGAAGGCACGTG
TTGCCCTGACACCCTAAATACCCAAATGTTCCCCCACACAAAATGGGTGGTTGTTACCTAACCTAGGATATGCCTTTTTCAATGCTGGGGACCA
AACTCAGGACTCTGTACATTCTAGCCACACATGCATACTACCATTGAGCCACCACCACAACCCGGTTCCAAAGGGACTTCTTTTTTTTTTTTGG
AGACAGAATCTTGCTGGGCTGAACTGGGATAGGCTGGAAGTTGCTGTGTAAACCAGGCTGGGCTCAAACTCATGACCATTCTCCTGACTCCAGT
TTTCAAGAAAGTGCGCCATGCCTGGCTTCCTTCTCTCTCTCTCTCTCTCTCTATCTATCTATCTATCTATCTATCTATATATATATATATATAT
GTTTTATTTTGCCTGGATGGCATGCAGCTCATTATGTAGACCAGGCTGGCCTTGAACACCCAGAGACCCACCAGCCTCTGCCTTCTGAGTGCTG
AGATTAATGATGGAGAGTGCCACCAATGCAGAGTGCCACCAACCGGGCTTCTTTCCCTAATTTTTATCTACAAGTCACCTCCTCTGTGAACTCT
CCCTGGATTTTCTAAAACTAGGATCTCCCTTGATTGACTCTTCCTAGAACTTAACACAACCGTCCTCACTGTCAGACAGCCCTTGCCATTTCTG
CCCTTGAGCCCAGCCCAGAGTCTAGTTCCTAGGAAGTGTTCAGTAAATGCTAGGTTTCGCTTGGCAGCAGAAAGGACTGCATTGGACGTGGTAA
GACCTTTGGTATCTTTGATCTTTGCCCAGGGTGACCCGGC
MOUSE SEQUENCE - mRNA
AGTGGCTGCTTCAGCCCACCAGCCAGGACAGCGAACCATGCTGCCTGCGGCCCGCCTCCAGACTTATTAGAGCCAGCCTGGGAACTCGCATCAC
TGCCCTCACCGCPGTGTCCAGTCCCACCGTCGCGGACAGCAACCACAGTCGTCAGAACCGCAGCACAGAACCAGCAAGGCCAGCCAGGCCATGG
GGCTCTGGGCGCTGCTGCCCAGCTGGGTTTCTACTACGTTGCTACTGGCACTGACCGCTCTGCCCGCAGCCCTGGCTGCCAACAGTAGTGGCCG
ATGGTGGGGCATCGTGAACATAGCCTCCTCCACGAACCTGTTGACGGATTCCAAGAGTCTGCAGCTGGTGCTCGAGCCCAGTCTGCAGCTGCTG
AGCCGCAAGCAGCGGCGACTGATCCGACAGAACCCGGGGATCCTGCACAGCGTGAGTGGAGGGCTCCAGAGCGCTGTGCCACAGTGCAAATGGC
AATTCCGAAACCGCCCCTGGAACTGCCCCACTGCTCCGGGGCCCCACCTCGTCGGCAAGATCGTCAACCGAGGCTGCCGAGAAACAGCGTTCAT
CTTCGCAATCACCTCCGCCGGGGTCACACATTCCGTGGCGCGCTCCTGCTCCGAAGGCTCCATCGAGTCCTGCACCTGCGACTACCGGCGGCGC
GGCCCTGGGGGCCCCGACTGGCACTGGGGGGGCTGCAGTGACAACATCGATTTTGGTCGCCTCTTTGGCCGACAGTTCGTGGACTCCGGGGAGA
AGGGGCGGGACCTACGCTTCCTCATGAACCTTCACAACAACGAGGCAGGGCGAACGACCGTGTTCTCTGAGATGCGCCAAGAGTGCAAATGCCA
CGGGATGTCCGGCTCCTGCACGGTGCGCACGTGTTGGATGCGGCTGCCCACGCTGCGCGCTGTGGGCGACGTGCTGCGCGACCGCTTCCACGGC
GCCTCCCGCGTCCTTTACGGCAACCGAGGCAGCAACCGCGCCTCGCGGGCGGAGCTGCTGCGCCTGGAGCCCGAAGACCCCGCGCACAAGCCTC
CCTCCCCTCACGACCTCGTCTACTTCGAGAAATCGCCCAACTTCTGCACGTACAGTGGCCGCCTGGGCACAGCTGGCACAGCTGGACGAGCTTC
CAACAGCTCGTCTCCCGCGCTGGACGGCTGTGAGCTGCTGTGCTGTGGCCGAGGCCACCGCACGCGCACGCAGCGCGTCACGGAGCGCTGCAAC
TGCACCTTCCACTGGTGCTGCCACGTCAGCTGCCGCAACTGCACGCACACGCGCGTTCTGCACGAGTGTCTATGAGGTGCCGCGCCTCCGGGAA
CGGGAACGCTCTCTTCCAGTTCTCAGACACACTCGCTGGTCCTGATGTTTGCCCACCCTACCGCGTCCAGCCACAGTCCCAGGGTTCATAGCGA
TCCATCTCTCCCACCTCCTACCTGGGGACTCCTGAAACCACTTGCCTGAGTCGGCTCGAACCCTTTTGCCATCCTGAGGGCCCTGACCCAGCCT
ACCTCCCTCCCTCTTTGAGGGAGACTCCTTTTGCACTGCCCCCCAATTTGGCCAGAGGGTGAGAGAAAGATTCTTCTTCTGGGGTGGGGGTGGG
GAGGTCAACTCTTGAAGGTGTTGCGGTTCCTGATGTATTTTGCGCTGTGACCTCTTTGGGTATTATCACCTTTCCTTGTCTCTCGGGTCCCTAT
AGGTCCCTTGAGTTCTCTAACCAGCACCTCTGGGCTTCAAGGCCTTTCCCCTCCCACCTGTAGCTGAAGAGTTTCCGAGTTGAAAGGGCACGGA
AAGCTAAGTGGGAAAGGAGGTTGCTGGACCCAGCAGCAAAACCCTACATTCTCCTTGTCTCTGCCTCGGAGCCATTGAACAGCTGTGAACCATG
CCTCCCTCAGCCTCCTCCCACCCCTTCCTGTCCTGCCTCCTCATCACTGTGTAAATAATTTGCACCGAAATGTGGCCGCAGAGCCACGCGTTCG
GTTATGTAAATAAAACTATTTATTGTGCTGGGTTCCAGCCTGGGTTGCAGAGACCACCCTCACCCCACCTCACTGCTCCTCTGTTCTGCTCGCC
AGTCCTTTTGTTATCCGACCTTTTTTCTCTTTTACCCAGCTTCTCATAGGCGCCCTTGCCCACCGGATCAGTATTTCCTTCCACTGTAGCTATT
AGTGGCTCCTCGCCCCCACCAATGTAGTATCTTCCTCTGAGGAATAAAATATCTATTTTTATCAACGA
MOUSE SEQUENCE - CODING
ATGGGGCTCTGGGCGCTGCTGCCCAGCTGGGTTTCTACTACGTTGCTACTGGCACTGACCGCTCTGCCCGCAGCCCTGGCTGCCAACAGTAGTG
GCCGATGGTGGGGCATCGTGAACATAGCCTCCTCCACGAACCTGTTGACGGATTCCAAGAGTCTGCAGCTGGTGCTCGAGCCCAGTCTGCAGCT
GCTGAGCCGCAAGCAGCGGCGACTGATCCGACAGAACCCGGGGATCCTGCACAGCGTGAGTGGAGGGCTCCAGAGCGCTGTGCGAGAGTGCAAA
TGGCAATTCCGAAACCGCCGCTGGAACTGCCCCACTGCTCCGGGGCCCCACCTCTTCGGCAAGATCGTCAACCGAGGCTGCCGAGAAACAGCGT
TCATCTTCGCAATCACCTCCGCCGGGGTCACACATTCCGTGGCGCGCTCCTGCTCCGAAGGCTCCATCGAGTCCTGCACCTGCGACTACCGGCG
GCGCGGCCCTGGGGGCCCCGACTGGCACTGGGGGGGCTGCAGTGACAACATCGATTTTGGTCGCCTCTTTGGCCGAGAGTTCGTGGACTCCGGG
GAGAAGGGGCGGGACCTACGCTTCCTCATGAACCTTCACAACAACGAGGCAGGGCGAACGACCGTGTTCTCTGAGATGCGCCAAGAGTGCAAAT
GCCACGGGATGTCCGGCTCCTGCACGGTGCGCACGTGTTGGATGCGGCTGCCCACGCTGCGCGCTGTGGGCGACGTGCTGCGCGACCGCTTCGA
CGGCGCCTCCCGCGTCCTTTACGGCAACCGAGGCAGCAACCGCGCCTCGCGGGCGGAGCTGCTGCGCCTGGAGCCCGAAGACCCCGCGCACAAG
CCTCCCTCCCCTCACCACCTCGTCTACTTCGAGAAATCGCCCAACTTCTGCACGTACAGTGGCCGCCTGGGCACAGCTGGCACAGCTGGACGAG
CTTGCAACAGCTCGTCTCCCGCGCTGGACGGCTGTGAGCTGCTGTGCTGTGGCCGAGGCCACCGCACGCGCACGCAGCGCGTCACGGAGCGCTG
CAACTGCACCTTCCACTGGTGCTGCCACGTCAGCTGCCGCAACTGCACGCACACGCGCGTTCTGCACGAGTGTCTATGA
HUMAN SEQUENCE - GENOMIC
CCCTGGAGTCGGGAGATGACTAAGAGGGAGTCCCTGAGGTCTTTGAAGATGTGTACAACCGAGTTCTACATCTGAAAGCCTTAGAAATTCCCCC
AACCCTGCAGGGAGCTTGGGTGGGTGAGGTGGGAGCAGAGCCTTTGTGGTTCTGTTTTTTTGTTTTTTTTTTTTTAAATTCACTTCASGGTTAA
TCAGTCTTTTAACCAACCTACCTACCACCATCCTAGCACCCCCAAAGCACTGGAGCTATGGAGCTGCCCTTCCGCTTCCCAAGATGTAGTTTTA
TATTTGCCCTTCAAGACTGCCCTTTTTATGTTTATCCTAACCTGCTATTACCCTATAAAACACTGAGAGGAGGAGAGAGGTTGGGGAGTGATTT
TCCCTAAGGCCCTCTTAAAAGGTTGGCTTCTTTGTTATGTTTTGGGGGTCACAGAAGCTCAGGCTGCCAAGCCTTTCCCAGACTTAAATAAACA
TGCTCACCATTTGGGTGTCCAAGCCTTCCCCTACACCAGGCCCTGTGGGGAAGGAGGGGGACCCTCACTTCATTTTAGGCAGGGGCTCTCCGGA
GCCCTGAGAAGACGAGAGACAGCACCCGCTTAGAGACCAGGCCTCTGCTACCCCAGGATCTAGGGCTCCTGGGCCAGCCTTCTGATCCCCCTAA
CTCCAACCCTCCAGGGGTGAAGCTGTTTGCACAAGTCTTGGGAATTCCCCTGCAGATGGCAGCTGCCTATTAACCCCATAGTCCCCAGAGCACT
GCCCCCATCTCTGGGCTGAGCCCCCATGGGTCTTTACACCTCAGGGAGTGAACTCCAGTGGGAAACCAGGAGAGGCAGCCATGCCTCCCAGACC
AGGCCAGCAGTGACCTGTTCTCTGCCTCTCCAGCCGTTCTTCACCTGCTCAGGTGAGCAACACCTGGAGCCCCCACAGCACAGAGGAGGGGACT
GGCTCCCCAGCTTCAAAGTCATCAGGGTCTTTGTTCCCAGCTTTGGCTCCTGGGAACCCCAGCAATTAGGGGAGCAGATTTAACCCTTAAACGG
TTGGGGGCGTCACCCCACCCCCGCTGAGACACTGGGGACACCAGCCTGGGCTTGTCCAGCCAAGATGGGGGGAGAGAAAATGGTGGAGGGAATA
GGGGGGCGTTTGAAGCTTCCAGGACTGGGGGCATCTCTTGTTCACAGGTGCAACCCAGATTAAGCTGAGCGGAGGCAGGAAAGGGGGGCCCTAG
GGTAGGAGAGCAGGGACCCAGCTGCCTCGCTGGCAGCACGCAGGTGGAAGTTAGGCGCGCAGGGCCCCAGACGAGTGGCCAGACCTGGCTCAGA
GCGGCTCCGGGGGGGGCGGGGAATTCCAGGAGAGGCCCCTCCCGGAGCCGCGAAACCATCCCTTCCCGCCTCCGCGCGCCTCGCCCTGCCGCCC
ACCCCCTAGCCTCCGCGGCAGCGCCGACCCGCCCAGCCAGGCTCACCGCGCTTGAGGATGGCGCTGTGGTGCGGCAGGCGGCCGCCGCCCTCAA
GCGCGGAGCAGTTCCAGCGCTGGTCGCGCAGCTGGTGCTGACACTCGTGGACCGCGATGTGCAGACCCTGAAGCGCGGACGCCGTCACGTCGGG
GTTGCGCAGGCACAGGCCTAGCTGCCGCTTGCTCAGGCCGGACAGCGTCAAGCACACGGTGTTGGCCGTCAGCGGCGGCTCGCCAGGCAACTTC
AGGCCCAGAATCTCATTGCTTAGAGCCCTGGGAACCAAGAAGGCGTCTGGGGTCTGCGGTCCAGACCCCTCCAACTCTCCCCACCCCGGGTCGG
TGTTTCTATGGCCTGGGAGACAAGGGGAACTGCTCACCGACTGCACAACGCCAGGAACAGGAGACCCGCGAGGCCCGAGGGCGGAGGCCGCGGC
CGGGGCTCCTCCAGCATGTCGAAGCCCGGAGGCTCCGGTGGGCAGATCGATCAGGACCTGCGGGACGGGAGACTTGATGCGGGTTCAGGAATAG
GGCGGCTCGCTTGGGGAACCAAGTGACGCCCTTCTTCGGGCTCCTAACCCACCGGTGCCACCCTACTGACCCTTCTCATTCCTCCTCAAACAAA
ACAAGAAGAAACACCCCTTGATTCCCAGAGTCCCTGAGGCTTGGAGGTCTTAAAGAAGAAGAGTCAAGGCGTTGTCCCAGCTCAGGACTCAAGC
GAGCACCCCTGGAACCTTGCCCAATCAGACACAACGCCCGGCACACAGACACACACTCACTTGCAAACTCAGACACACAGACTCACAAACACTT
GCTCCACAACCTCGCCTACTGCTCCCTTTTCCAGGGCCCCACGACTAGCTTCCCCGCCCTCACAGGGCTAGGGAGAGGGATAGGGAGGAGGTTC
CCCACCACCTAAGGGGGTGTCACCTCCAGGTGTCATCAAGGGCAAGTAGGCTCCATGAGAAAGGTCTAAGAATGAGTTCCCCACTCACACTGCC
CCCTCCCTGAGCAGCAAGGAAAGAGGAGAGGCTCCAGGTGCAGGAAAGATGGGGAGGAGAGCCTGGCTCCCTCCTAAAAGGGACCGTGGCACAG
ACTGAGTCCTCTTCCCTATCCCCCACCTTGCCTAACTACAAGCTCCCCTCCTCCATAGTCGCCCGTCTGGTCCTCACCCCTTGGCTCTCACATT
CATTGCATTCTAAATCTGGGGGCACTCCTTTATTCTCTGTGTCTTTATCTCTAGCAATATCTCTGGCTCTCTATGCGTCTCTGTGCTTCTGTGG
GTGGATGCGTGTCTGTCTGTCTGTCTGACTACACACGTGCCTGTCTCTTCCTCGTGTGCACGTCCCTGCCCTCCCTGCTTTCCCAGGTCTAATT
ACCTCCAGTGGTTTGGGTGCGGGGTCCGAGACAGGCACGGTTGGGTTGCCTGGGCTTCACTAGTGCTGCTTAAACCGTGGGGAGACTGCGCTGG
GTTCTGTCCCCTTGTCAGAGCCGCATTCTTCCAGGGCCGGGCCACTCCTCTTCACCGCTTCCCCAGCGCCGCCGCGGCCGCCGGGAGGAAGGGC
GGGAGGAAGGGAGGGAGTGATCGAGAGAGCTAGCAAGCCGGCGAGCAAAGGACTGGGGGCTCTGGCTTTGCTCTCACCGAGCTCAGGGTGGCTC
TGCCGGGCTGACGGAGCTGCAGCCCCTCCCCGAGCCTGGGGCTTCCCCACCCTACCCTCCACTCCCAGCCTTGACCAGGCGAATGCAGCCTCCC
CCTCCTCCCAGCGCGCGCGCGCGCGCGCGCACACACACACACACACACACACACACACACACTCTCTCTCTCTCACACACCCTCTCCCCCGACG
CCTGGGTTCAGGCTTGGCCCCACTGAAGAAGGAGGTGGCCAGAGTTCCTCTCACCTGATCTGGGGTCGCCAAGGCTGCAGGGAGGGTGTAGTAA
CCTTCCTAGGGAGCCAGAATGGGGCCCAGATGGCCACATCTTTCATCACTCCTCTTTGCGTCAGTTTCTCCACCAAGATCAGGGTGGCTGGAAG
GTGCCTTTGACAAGATGAGGATGGAGCCAGACAGTCTTTGGGCTTCTCGGTGTGGGACAGTCACATGTGGCACCCACAGCCTGAGCGCACCCGG
GGTACTCAGAGCGGGCAGGAGAAGCACACGTCTGGGCAGCTTGGTTCCCACCCTCCTCCAAGCCCTGCGCCTGCCCCTTTGGAGGGGACAGCTT
TGGCCTCAGAGTTTGGCCCTAGCAGAGGTTCAAGTAGCACCAAAGATTGTCAGCCTGCCCCGATGCTTCCTTGCCTGGCAGGGATGCTTGCCAA
CAGAGGTATCCTACCCTTCTCGGGATTCCCCCGGTCTGCACTTTGGGTGGCCTGGATTCCTGCTCCAAGCTGTAGACTTGCTTCTTATGGGATG
AGGAGGGCCTTGGGATCCAAAATTGAGCCAAGCCCAAGGGCAGCCGGGAAAGAGCCTGGTCTTGGGGTGCACAGGCAAAGGCAAACCGCCTTAG
GGAGACCCAGTGGCAGCGAACGGGTTAGGCGCCACCGTGCTCCCGCCTGACTCACCCTCGAAGCTCTAACCACTGTGGGCTATTTTTGCCAGAG
AGGGGCCCCAGGCTTTCCAGCCGCCCCCCGCCCCTGCCAGACCGCAGCCCAAGGCACGGCTGGCCCCACGCGCCCCAGGCACATTGACTCAGAC
TGCCCCCAAGCAAGCAGAGGAACAGGGATGATACCCACAACCACAGTCACCTCTTCCTTGGTGGTGGCGTTGCAGCTCTGCTGGGCAGCCAGCC
TCCAGTCTGTGCTGCTGGAGGTCCTGCCCGTGCTGCAGGGGTCACTGTTGGATAGCGGGCACAGCAGTCTGAGACAGGAGATCGAGCAAACTTA
CATCTGTTGGGATATTTACAGATCACCTTTACGTGCCAGGCTGTGAGCAGTCTGGGGAGGTGAAAGTGCCATGGTCCCTGACACTGGACAGCCT
GGACCAGACTGCTTTTCTCTGATTCCCTACCTCTGGGATGGGGAAGTGGGAGCACTAGAGTTCCTGACCCTCCTTCCCATTTAGAGGACAAGAG
CCAAACCATGTGTGGTTTTGGAGGTCACCAGAATCTGCAAGCCCCATCTCATAGTTTTCATCCTTACACCTGGATTCATGATCCCCACCAGTGT
CCTTATCCTTTTTCTTGCAGTCACCCTGGGATTCCTGCCAGGTCCTTGGAAGAGGGGAATGAGGTTGCCTAAGCCTCTCTTCTCCATGGGGACC
TCATGGACATTTGTATTTCTCCATGTGTCTCTGGGTCCCCCTTAGGTTTGGGATTATTTTTTGCCTTCTGATTCTACCCTTGTCAGGCTCCAGC
ATACAGCCAGGTGCCAAGAAGGGGCGAGGGGCAGAACTACTACAATAGGTTTCAACTTCCTGGTGACCCTAGGTCTCCCCAAGCAGGACTGTTC
CAAATCCAAGGACCCAGAGTCCTGCTCCTTCTCTCTACTGAAGCCCAACTCTGGGACAAGAGGCCACAGGCCGGCAGACTGGGTGGCCTGAGCT
GGCCCGCAGTGCCCTCAGCCCGACCGGCTGGCCTGAGCACTGACCCGCAGGCGGCTAGAGGGCGGTGGGACAGGCGGGGCCTGGAGAGGGCTGT
GGGTGCACACCCATTGCCTAATACCCCAAGCACGCGGCCAGCTCCAAGAAAGGGGAGGGACGGGAACCAGAGAGACCTTGACGTGGGTCAGGGC
CAATGACAGGAGGGGGAAAGTGGGGGGCTTTCATCACTGCAGGGAGGGACTAGGAGCAAGCTGGTTCCCCTTCCCCTCAATGAGAAGAGTCGAG
GGCTGCCCTTCCCATCCTAGGGATGGAGGGTGTAACGAGAGCAATGTGGGAAGAACACTGGGGCCCTGGAGGGCGGGGGTCAAAGAAAAGAGTG
GGGGCCCCTGGAGATTCGGGGATGTCGAGCAACTGAGGCGGTGGCTAAAGCCTCAGAAGCCTCCTCCTCCTCCTCCCCCCATGTTTGCCTTGGC
CCGGGGTCCCGGGTGACTCATCTGTTGCTGAGCCGCTGATAGGGGAGGCCAGACCCGGGGAACCCAAATTATAGGCCCAGGAGGGATGGATGCG
CCCGTGGCGGTGAGCTCAGCTGCGCTGCCCACCCTCCGCTTAATGCGCCTTCTGCTGCAGCACCGTAGGCCACCACCTGGAGGCACCAAAGGGT
CTGCGGGCCGACTGCATACTGGACTCTCAGGAAGGCCCCACTTTCAGCAGTCCACTCCAACAAATCCATGGGATTACCTTAGACAGAATTTTGC
CCCCTTCTGTACTCAGGCCTAATGGATGGGCTGTGCCTTCCCAGCCCAAGGGGGCAGTGCTGCCTGCGGGTGCTTCAAAGGAGGGTAGGCTCCT
CTGCCCACAAACTCTAAACCCTGGAGCCCTGCTTCCTCCCCAGATCCCAAAGTCAAGGCAAAGCCCCTCTCCCCTCTAACATCTCACCTCTAAC
CCTATTCCAGGGGGGTGGTTTGCTACTGATTTTCAACTTCAAGCCTTTAAAGTCATCCACGGTCAAAACTGATACAGAGAAAAATGAAGCAGGG
TAAAGGAGATTAGTAGTGGGATTCTATTTTATAAAGGGGGAGGGAAAACAAACTGAACGAACAAATACATGGAGAGATCTGAGGAAGAGCATTT
TAGAAGACAGAAAAGCAGGTGCACAGACCCTTAGAAAGGAGCATGCTTGGTTCAAAGGATTAGAAAAGAGGCCAGTGAGGCTAGTGGGGAGAAA
TTCGCAAGGAAGAGAGTGGTAGGCAATGAAGCTGGAGGGCTAGGAAGGAGGCCCCTTTACTTTGAGTGACATGGGGTCTCGCTGGAAAATTTTG
AGCAGAGAAATGAACTAATCAGACTTCTGTTTTAGGAAAGATGGCTCTGGGCTGGGCGCAGTGGCTCATGCCTGTAATCCCAGTACTTTGGGAG
GCCGACGTGGGCAGATCACGAGCTCAGGAGTTCGAGACCAGCCTGGCCAACATGGTGAAACCCCACCTCTACTAAAAATACAAAAATTAGGTGG
GAGTGTTGGTGGGCGCCTGTAATCCCAGCTACTCGGTACGCTGAGGCACCACAATCGCTTCAAACCGGAAGCTGGAGGTTACAGTCAGCCGAGA
TCATACCACTGCACTCCAGTCTGCACAACAAGAGCAAAACTCCGTCTCAAAAAAAAAAAAAAAGAAAGAAAGAAAGAAAGAAATTGGCTCTAGT
AATTAAATCAACCCTTTTGATTTTTGCAGTAAAATGGAGCACTGAAATGGAGCAATCTTGGGCAGTAATGTGGGGTCTAATGAAGTTTTTGGGT
TTTTCAGATGGGTACTATTGCAGCATGTCTGCATGCTTATGTGTATGTTCCAGGAGAGAGATAAGTGGATGATGCAGGAAAGAAAGAGGGGACA
GTTGATATCATGATTATTTGATCTAAATAGAAAGTTGGGTGCTTGTTTTGGCAGCACATATACTAAAATTGGAATGATATAGAGATTAGCATGG
CCCCTGCACAAGGATGACATGCAAATTTGTGAAGCATTTCATATTTTGAAAAAGAAATGTCAGCCACGTCATAAACAGTGTGACCCAGATCTAG
GGGCCTTACCCTCTTGCCCCCTACTCCTGGTGTGTGGAATGTTGGAACAAAGCACAGTGGCTCCTTTCCTCTCTTCCCACCTCTGCTTGACAAC
AGTCGTCAAAGACAGGGCTTCCATATTTTCCAGCCAGCCTCCCACCCTCACGGTGTTGTATCAATCCACCAGGCCAAAAGATGTGACCCAGCCC
CCAGTGGGAAGAAACTCATAAGGGATAAAGGACAGGCTCCCCGTGATACATTCTCCATTTACTTGAGCTATCTATCCTGCGTCCTCTCTGCAGG
GACTACTGGCTTTTGGATCTACGGAGGGTGCTGGACCACTACACCTTTTCCCTCTGGGGTGGATCCTTGGAAGGGCCAGATATACTAGGCTGGG
CAAAAGGGAAGAAAAAAGGGAAAGAAGGACATTTCTTTCTAAAATAACTTCCATCAGGCTTCATTTGGGTTAATATGCATCTCATTTAAAACAC
AAGTGCCCGGGAATATTAATGAAACTTACCTCGCATTTATTCCTTAGAGTGATTTCCCTGCCTTAGAAGGGAATCCTAGTCATTTCTGGCACTT
GAGACTTTAGGTTCAGGCCTGGGGAAATTTCTCAGTCAGAAGGCATCCTAAAAGACAAGGGAGATGAAAAAAATGAGAGCTAGAACTCAAAAGG
GAGGCAGAAAGGCCCAAAAAATTATTTTTACCCATCAATTTTGAGAAGGGTTCCCAGCCTGTAATTGCTGCACACTGGCAAGCAGCTGGTAAGG
TCGAAAGAGCATGGGCTTTGAGTCAAATTGGTCTGGGTTTTAATCTGGCTCTACCATTGATTCATTTATTAGACGTGGACCTTGGACAAGTGCC
TGATCTATTTTTAATTCTGCAAAATGGGGAGAGAGAAGAGATCTTCCCTCCTTCCAGGGGCCATGTGTGTGGTGGTGGGGCATGATAACCAGGC
TGGCAGTGCCCCCTATTCCCCATATAGGGAAAAGCAGCCACTTTTTTTTTTTTTTTCAGATGAAGTCTTGCTCTGTAGCCCAGACTGGAGTGCA
ATGGCGTGATCTCGGCTCACTGCAATCTCCACCTCCCGGGTTCAAGCCATTCTCCTGCCTCAGCCTCCTGAGTAGCTGGGACTACAGGTGTGCG
CCACCACACTCAGCTAATTTTTGTATTTTTATTAGAGATGGGATTCCACTATGTTGGCCAGGATGGTCTCGATCTCCTGACCTCATGATCCACC
TGCCTCGGCCTCCCAAAGTGCGGGGATTATAGGCATGAGCCACCGCGCCCAGCCTGTCACTTCTTCAATAGGAGCCCTAAATGGCCTTGAAGCT
GAGTAGGAGTCCCTGGGAGAGAAGAGAAAAGTGTACAATGGATGAGATGGTCACAGGCACTCTGGGTATCCCAGTGTGGTGGGAACTAGAGCTT
TAGGCAAAGACAGAAACTTGGCAGAAACATCCAAAGAGAAGCAAACACATGGAGGCACAAGTTTCCTCATCTAGGTTCAATGTAGCCAGCAACC
CTTGTCTTCCCAGTCCTCTCCATCACCATACATACAGTGGACATCCGCACCATTTCCCATCCTTTCTGAGCCTACGCCTCAGAGACTTAGCCAC
TCCACGCTGGGTTCACCTCAATACCATCTTGGTTGTAGGCTCGGCTCTCTCCCCCAATGACATGCACTGGTTCACACATACCACAGTGTGACAC
GCCATAGGATGCCACGAGGTACAAAGGGCAACAGAATGACGCATACACACATATTTAATCTTCCCATGCACATGCTCATCCACCCACTCCACAC
ACAGTCCAGACACTCTGCATCCCTCAATCATGCTTCTGAGTCTCCTGTCGACAGTTGCCACCTCCTTCCTGACACACTGCCCCAGGCGGTGACT
GTGACAAGGTGACTCCATGACCTTTTCTGACTTGAGCTAAATTCCAAAATTCTTTGGAAAGTTTCCTAACATCCTTCGTCAGAACAAGGAGTTT
CTGGCACGTACCAACACACAGGGAGGATGCACCCTCAGAACACAGCACATTCTCACTCCCACCCATATTCACGTTGTTCCACTTCACACACACA
CACACACACACAGCCACTTGTGCGCTTCTTCTGGCGCACATGAGCAAACTGCCTCTTCCTTTAGGTTTCTCTCCACCGCTAGGCTCCTTTTGGT
TAGCTCACCCCCACAACTCATCCCCGGGATTTCCCTGACCACAGCCGCACTCACGCCCCCGTCTCCCCTTTTTCCTTCTCTGTCCAGCCATCGG
GGGTTCCTGGGCGGTTAAGCATCTCCCCGGAGTCGCTGCCCAGAACCACAGCTTTCCTTCCGACACTCAGGATGGGGGAGAGAGGGGACGTCGG
AGGGGCCCGGGGTGACGTCGAGGGGACAACCCCACCGCGGGCGGCGAGGCGGGCTGGGCCCCTGGCGGGCTCTCCCCGCAGCACACTCTCGCCG
CGCCCCCTGGCGGATGCTAGTCCTCGACGGGCTCCGGACGCTCAGCTGAGTGAGGCGGGCGCGCGTGGGAGGGTGTCCCAACGGGAGGGGTCCG
CGGCCAGTGCAGGCCCGGAGGCGGGGGCCACCGGGCAGGGGGCGGGGGTGAGCCCCGACGGCCAACCCGTCAGCTCTCGGCTCAGACGGGCGGG
AACCACAGCCCCGCTCGCTGCCCATTGTCTGCGCCCCTAACCGGTGCGCCCTGGTGCCACAGTGCGGCCCGGAGGGGCAGCCTCCTCCCGTCAC
TTCAGCCAGCGCCGCAACTATAACAGCCGGTGCCGCCCGCCGTGGCCGCCTCAGCCCACCAGCCGGGACCGCGAGCCATGCTGTCCGCCGCCCG
CCCCCAGGGTTGTTAAAGCCAGACTGCGAACTCTCGCCACTGCCGCCACCGCCGCGTCCCGTCCCACCGTCGCGGGCAACAACCAAAGTCGCCG
CAACTGCAGCACAGAGCGGGCAAAGCCAGGCAGGCCATGGGGCTCTGGGCGCTGTTGCCTGGCTGGGTTTCTGCTACGCTGCTGCTGCCGCTGG
CCGCTCTGCCCGCAGCCCTGGCTGCCAACAGCAGTGGCCGATGGTGGTAAGTGAGCTGGTGCGGGGTCGCCACTTGTCCCGCGGCACAGAGCCA
GGGGCCAACCCTACCCAGCTCCCACGCTCTGGGATCCGTCTGCCGACAGGCTCCCTCCCCGCTCTGACTTCCCTCCGCGACACCGAAGGGCGAT
CTGGCATGAAACTGCCCCAGACTCCAGCTCTGTACAAGTGGGGCGAATGATCCGCCCGCGGAGGCCTAAGATACCCCAGGGAGCGAGCCCACTC
TCATCTAGCACCGCCCTTCCCCTTTGAGCGCCAACTCCAGCCTCACGGCGGTGGCTCACCACAGGTTTCCCCACCTCGGGAAGTGAAGGGCCAG
GAGTTCGCCTAGAAAGGAGGGGAGAAGAGGGTGGGACTCCTAAGCATTTCACGCCTTGGGTGGGCAAGAACTGCAGGCCATGATTATCTCGCTC
AGGCTGACCGGAAGAGGCTCGGAGATCCAAGGTAGACACTCGGTCTCCGGGTACCTCCTCTGTCCAGTCTCCGGACCTAGGGCTCAGGCGAGCA
GCCCTGGGACTACTGGGCACACACAAGTCTGGACGCCCAGTTCTTTCAAATTAGTGAGCCTGGGAGAGCGGGTATTATTAATCTCCCGCCATTC
TCTCCAGCCACATACCCCCAGGAAGAGGACCGGGTGGCACAGTTTTTATGGTTAGGGTGCGGATCCCCTTCCTGAGCCTGAGCTATCATACGTC
CCACCAGGGGTATTGTGAACGTAGCCTCCTCCACGAACCTGCTTACAGACTCCAAGAGTCTGCAACTGGTACTCGAGCCCAGTCTGCAGCTGTT
GAGCCGCAAACACCGGCGTCTGATACGCCAAAATCCGGGGATCCTGCACAGCGTGAGTGGGGGGCTGCAGACTGCCGTGCGCGAGTGCAAGTGG
CAGTTCCGGAATCGCCGCTGGAACTGTCCCACTGCTCCAGGGCCCCACCTCTTCGGCAAGATCGTCAACCGAGGTGGGTGCCCAGGAAGGCGAC
GCTTCCGGGAGCAGGGGAAACGCGGGGTCACCCCCAGGGCATGGGCGGGCGAGTTCAGAGAAGGTGTCCCAGGCGCCTGGAGGGTCACACAATC
AACCTTGCCAAGTGCCTCGTGCCCAGCGCCAGCTCGGGGCCAGACTTCTACCAGGCGTTTTCCAGCCGTGCACCCTGGAAACCAAGCTTAACTT
TTCTGAGCTACTGCCCCAGATAAAGAAAGTTTCGGGTCGCGGACGCCGGCTGACCGCCGCTTTCCCCCAGCCTCTCTCAAAAGCGCCTGGGAAG
CTGCTCTCTCCAGGCGTGTGTCTGGCCTCTCGCCCAGCAAGGCTTGCACCGCCAAAATGGGCCGAAAGTTTTGGGCTGCGAAGAAGTCTTGGGG
ATGTATGGTTCTTCCGCTCCCCTCTCTTCGGTTTGTCTCTCTGGGGCTGCTCCACTTCCGCTATCGAGCCAAAATGCGCCCTAGAATCTCCCAG
TAAGGTGTGATTACGCCCGTGGACGTGGCTGCGTGCCCACGCACCTGCTTTCTCTACTAGCCCTAGAGACCAGCTTTCCAGCACTGCCGGCCCT
GGCTCTCAGGACTCAAAGTGCGGAGTCGGGGGTGGGATTCCGGTCCCAAGCCCTTCATGACGGTGCTCGCCGCGCCCCGCGTACCCCCTCGCTG
ATCCCCGCTCCCTTCTCCCACAGGCTGTCGAGAAACGGCGTTGATCTTCGCTATCACCTCCGCCGGGGTCACCCATTCGGTGGCGCGCTCCTGC
TCAGAAGGTTCCATCGAATCCTGCACGTGTGACTACCGGCGGCGCGGCCCCGGGGGCCCCGACTGGCACTGGGGGGGCTGCAGCGACAACATTG
ACTTCGCCCGCCTCTTCGGCCGGGAGTTCGTGGACTCCGGGGAGAGCGGCGGCACCTGCCCTTCCTCATGGAACCTTCACAACAACGAGGCAGG
CCGTACGGTGAGCTTTGAGAGGCTCCGCACCCTAAGCGGAGCGGCAGGGGCCAACCTCGGGCTGGGGAAGTGACGGTCGGTGAGATAAGGCAAG
GGGCACCAGGAGAGGGCGTCCTCGGAGAGCCGGAGGCTTGGAACGAAGACGGAGAATAGAGGAGACAGTGGCTGAGGGCAAAGGTATGTCTCGC
CCGCGGACAGGTAGAAGAGGTTGCAAATCAAGCACAGTCTCTTCGCTGTACAGATTCGAAAAATAAGCCTGAGAGGCCGAGACTGACTCGCCGC
GGCGGAGCAGGGTTGGGCAGGGTTTCCAAATCTCAGCGGAACATTTCGCGCCTCCCTTCCCCTGGGCTCAGCTAGGCCTGGGCCTTTGCTGAGG
TCCGGCCCCCGTGGCGTCCGGGAGAGGGCAGTGTCTGGGAGGGTGACTCTGGCCCGGTGCCCTGGGACACTCTTTCTTCCCCTATCCCCGCAGA
CCGTATTCTCCGAGATGCGCCAGGAGTGCAAGTGCCACGGGATGTCCGGCTCATGCACGGTGCGCACGTGCTGGATGCGGCTGCCCACGCTGCG
CGCCGTGGGCGATGTGCTGCGCGACCGCTTCGACGGCGCCTCGCGCGTCCTGTACGGCAACCGCGGCAGCAACCGCGCTTCGCGGGCGGAGCTG
CTGCGCCTGGAGCCGGAAGACCCGGCCCACAAACCGCCCTCCCCCCACGACCTCGTCTACTTCGAGAAATCGCCCAACTTCTGCACGTACAGCG
GACGCCTGGGCACAGCAGGCACGGCAGGGCGCGCCTGTAACAGCTCGTCGCCCGCGCTGGACGGCTGCGAGCTGCTCTGCTGCGGCAGGGGCCA
CCGCACGCGCACGCAGCGCGTCACCGAGCGCTGCAACTGCACCTTCCACTGGTGCTGCCACGTCAGCTGCCGCAACTGCACGCACACGCGCGTA
CTGCACGAGTCTCTGTGAGGCGCTGCGCGGACTCGCCCCCAGGAACGCTCTCCTCGAGCCCTCCCCCAAACAGACTCGCTAGCACTCAAGACCC
GGTTATTCGCCCACCCGAGTACCTCCAGTCACACTCCCCGCGGTTCATACGCATCCCATCTCTCCCACTTCCTCCTACCTGGGGACTCCTCAAA
CCACTTGCCTGGGGCGGCATGAACCCTCTTGCCATCCTGATGGACCTGCCCCGGACCTACCTCCCTCCCTCTCCGCGGGAGACCCCTTGTTGCA
CTGCCCCCTGCTTGGCCAGGAGGTGAGAGAAGGATGGGTCCCCTCCGCCATGGGGTCGGCTCCTGATGGTGTCATTCTGCCTGCTCCATCGCGC
CAGCGACCTCTCTGCCTCTCTTCTTCCCCTTTGTCCTGCGTTTTCTCCGGGTCCTCCTAAGTCCCTTCCTATTCTCCTGCCATGGGTGCAGACC
CTGAACCCACACCTGGGCATCAGGGCCTTTCTCCTCCCCACCTGTAGCTGAAGCAGGAGGTTACAGGGCAAAAGGGCAGCTGTGATGATGTGGA
AATGAGGTTGGGGGAACCAGCAGAAATGCCCCCATTCTCCCAGTCTCTGTCGTGGAGCCATTGAACAGCTGTGAGCCATGCCTCCCTGGGCCAC
CTCCTACCCCTTCCTGTCCTGCCTCCTCATCAGTGTGTAAATAATTTGCACTGAAACGTGGATACAGAGCCACGAGTTTGGATGTTGTAAATAA
AACTATTTATTGTCCTGGGTCCCAGCCTGGTTTGCAAAGACCACCTCCAACCCAACCCAATCCCTCTCCACTCTTCTCTCCTTTCTCCCTGCAG
CCTTTTCTGGTCCCTCTTCTCTCCTCAGTTTCTCAAAGATGCGTTTGCCTCCTGGAATCAGTATTTCCTTCCACTGTAGCTATTAGCGGCTCCT
CGCCCCCACCAGTGTAGCATCTTCCTCTGCAGAATAAAATCTCTATTTTTATCGATGACTTGGTGGCTTTTCCTTGAATCCAGAACACAACCTT
GTTTGTGGTGTCCCCTATCCTCCCCTTTTACCACTCCCAGGCTTGGAAGCTTACCTCTCTCAAACAAATAGAATATGCTGTTGGGGGACTGGTT
TCCTAACCTTGCCAGAGGACCCTGAGATTCTGACCCTTGGATGACCCTAACGAGGCCACTGGGAATCCAGCTCTCCTGAGAGAGGAACCTGGTC
AGTAGCCAAACAACCCTGCAGGGTTCTTCTTCCTCGTGGAACAGCAACTGGCTGTGTGATATGGACAGGTGCATATACTTGGTGAATGGGGGTT
AAACAACCTCAGTGCCTGCTTTTCCTGCCTGGAACAGCTGTTCAGAAAATAGCTACTATTGAATGATAACTGTGACCATCTTCCAAAAAGTAGG
AAGAGAAACTAAAGCAGAGTGCTGCTGCCCCTAATGTGGAGCTATTGGTCCCTGAAGCTTGGCTTCTTCAGCTGTGGTCAGGGCATTGGACAGG
GGTGAAGCCCTTCCACCAACAGAAAAGTAAATACTGGCCTGGGGCAGTGGCTCATGCCTGTAATCCCAACACTTTGGGAGACCGAGGTGGGTAA
ATCGATTCAGCCCAGGAGTTTGAGACCAGCCTGGGCCACACAGGCAGCCCCACCTCTACAAAAGAAAAAAAAAAAAAAAAATAATATATATATA
TATATATATATATATGTGTGTGTGTGTGTGTGTGTGTGTGTGTGTGTGTGTGTATATACACACACTATTAGGTATTATATATGTATATCTATCT
ATCTATCTAATAAATACCTTATCAGGAGCCCCACTCCCAATCTTGGGCTCAGGGAGATCCAGATAATAGGTGATGAGCCTGGTGCTGGACCGAC
AAGCTCAGAGATGCTGGTGGGAGAGAAGGGAGCAGGTAGGCTAGAATCCAAATGCAGGCTAGGCTTAAACCGATGTAACCAAAGGAAACCCTAA
TGTGGTCCATAACCAAACTACTAAGCTAGCCATTCCCATAAAGAACCAGAATGAGGATTTTGTTACTAACACCACCAGTGTGATACCTCTGTGT
GCACATTCACCAGAGTCAGTGGGAGTTCTAATCCTACCCACGGCCCTAAACCTATCTCTAACTCTAACCCTCTTCCTGTTCCTAGGTCTAGGTT
GAACCTTAGCCTTAACCCTAACTTCAGACAAACACTAACCCCTTCTAAGCTCTAATGTCTGTCCCTAATCCTAACCCCTCCCCACAGGGGAGGA
TCAGAAGGGCAAGGGGAGCTGTGAAACACCCAACCTATCCCCTAAGAGCAACAACTGCTCCCAGCCAGCTTGAGAATTTCCCCTTCTCCCCTAT
TCCCTCCTCTCCTGTTCAGGCCTCTTCTGCTGTTGGTGCCTCCCACCACCTTTGGGATATGTGTAGGGGTAGGGGAATGGAGCCAGGAACTGCT
CAGTCCTGCAACGACATCCCTTTCCCTTCCTTTCCACCTGCCAAGCTAGCACCATCTCAGTTCTGATTCCTCACCCTAGGGGAAGAAATAAAAA
CCTATTGATCCTGGGGAAGAGGCACCTGAAAAGCTTTGGGTTTCCATAAAGAGCACCCTGCAGAGAATGCCCAGTCTATAAGCCAAAGGGCTAT
TAGATCCCTCAACTCCCCAAATAAGAAGTTAATAGGCTGCCAGAGGTGGGAGGGGGGGCTTGGGCCCCTGCTGGACAGTGCCCAGAGTTGAGAT
GAAGCAGCAGGGTAGAGTCAAAGCATTGGCAGCTGTCTCCAACTACTTTTGCCTAAATTCAAACTCTAAGAATTGGAGTCAGTATCAGCTTTCA
GGCTTGGAAGCTGGGGCACTCTGAACCAGGTTGACAAACAGGAGCTGGAGGAAGAGCAAGGGAAAGTGGTGAATTCTTTTCTGCCCCTACCCAG
ACTTTCAGCAAATCTCGTACTTTCTCAGACTCAGTTGCCTTGCCTATCAAACAGGGATGGTTATTGTTACTTAACCTTTCAGGGAGGTGATGAG
GTTCAGATGAGATGATGTACATGAAAGCCTGGGTCATTTGAATACTCACTGACACCTCTTCTATACCAGGCATCTGCCAAATGTTGGCAATACA
ATGATTTATAAACCATAGTGCCTGCTTGGAGGAGGTTGACAGTCTGGCCAGGGGATCAAGCACATCCTCAGATATTGTTAGCATATGGAGGGAG
TGCAATGAAGGCTCAATGAAGTGTAAAGCCTTCTCCACATAAATGAAGTTTAAGGGCAGACTCCCATACTCAAGCCCTCGGCATGGAGGCTCTT
CTCTTCCAAGGGCTGGAATTTCAAACGTGATGGTGCTGGGAAGTGCAGAATTAGGCTGGGCCCTCAATGGGCACTAATAAAACACAAACACACA
TACACACACACACAAACAAGTAAAAGGGCAGAGGGATCTGCAAAGCACTACATAAAAGCTAATCATTTTGTTATTGTGATCATCTATGCTATCC
TCACACAGGGCTGGAGCGGGTACATCCTGAGGAGAAGAACAATTATGCATAGAAAGAAGACTCACAAAGGTCTCAGGAGCCACAGTAGGCTCAG
GGTGGTGGCCATAGGATGGTGTCATCAGGACTGTGCTTGATGCGCCACCTCTCACCACCTCTGATCTTCAGGTGCCAGGGCGCTGGATACACGT
TGGCCTGAGCAAGTGAGGGAAACACTAGTCCTGAAATATCCTGGGGGGAGTGGAAAAGCTGAGAAGAAAGGCAGGCTGTGCACAGTCCCCAGGG
GGTCAGCAAGCCAGCACCACACACACTCTGCCACACGCACCCTGGAAAAACCCTGTCAGTGGGGCTGCAAATACCCTAGGGTCCAGCCTCCCCC
AAAGCCTCCCCCCTCGCCCCAGGCTGGCTCAGTCCTCCTCTCCAGCGCAGAGGGAGAAAAATAACAAAACGAGGAGAAAATAAGCTGTTTGGCT
GTGGTGTGAGCAGGAATATCCATGCAGGGCTGCCCACCACTCACCCTTACTCACTCTTTCCACACCCAGCCGGGGCGCCCAGCATGAGACAGAC
CACCCCCCTGCCCCCTCCCCCGTCTGGTCTAAAAGCAGACGCTGGTGAGCGAGCAGCAGGTTATAAATATGCCCAGGGAACTGCCGCCAACTCG
CTCCCTTGTCATCCCCTGGGAGGGGCAGGGTGGGGTGGCTCCCAGGGAGGAGCCAGGGCTGCCCTGTTCCCTGAGGCCCAGGAGGAAGTGGGGC
TTCCTAGAGGCTACCATATTTTCCCCCCTTTTCAAGGTGAAGGAACCACTGCCACTCCATTTTCCCTGAACATTTGCTCATCTCTTCAGATATG
TGGTCCCTACCCTCCCTGGGCCCTGGCTGGAGGCTCGGAATGAAAGGGCCCAAAGTACTCTGTGTCATGGCACAGCCCGCTGCTACTTCTCTTC
TTCACATGCATTTGCTCTCAGCAAAACAGAAGTTCATTCATTCATTCAACAAGCATTAACTGAAAGCCAGCTGAATGCCAGACCCTGTGCACAG
GCCCACCTGTGTGCACAGTGTCTGCACACACAGGTGCAAGCACACACAGCTGCCCCTACTCCATGTGCTCACATCACCTCCAGCCCCCACTAAG
GACTTCCTGGCTTCAACCTGCCAGCCTCATCAGGAAAGCAAAGCTTCAAGCTCCTGGTTGTCCCTCAGAGTAGGTTAGGGGGCATGGGGTAGGG
GGTGGCTGAGAACAGGACCCCAAACACTTCTGCTTCCACTACTTCCCCTGTAAATGAGGGGGTCCTTTCTCTCCTTCCTGCCCAATCATCCTCC
CTAAGTAGGTGCCATGTGACGAAGAAAGAGCCATTCTTGGGATGCTGAGGGTACCTGTCCAGGCCACCAGAGCCTCCCACCTCCCAGCAACTTG
CCAACTAGGTGCCAAGCTGGGGCAAGAGGCGGCACTTCCACCCTGTGAAGCTCCCAGCTCTCCTCCCCCAGGGCTGAACCCCTCCCTTTTCCCT
CCTCCCTATTAATCCTCGGAAGTTAAGGGGCCGTCCCTGGCGGCCCCTCAGCCCTATCGTGGCCCCTCACCCTCCTCGGCTGGCGTCTAATTAA
CTCCTCCTGCCCCTGGTTTTGTATGCCCCCCTTACCCCACCTTGTCGGCCCCGCCCCTCTGCTCGGCCAGCTCCCCCCCACGGACATTCCAGCC
AGGCCGGGCCAGTGTGCCAGGGCAACCAGGGCCGGACCGAGGCCTAATCCTCCCGCCGCCTGGCCCGGCTGGGGGAGCCCCACTCACCTCCCCA
CTCTCTGGGGGCTGCCCGGCTCTGCTGTGGCGGAGACACACAATCGGGACAAAGGCACAGCCCCCAGGGGGCTAACTCAGCCTTCACGCCCAGG
TTGTGCGGCATTTGGGGAGTTTAATGAATTCTCCATCACGCCTTTCAGGGCCCGCCCGTCAGCCTGGATTAATCTTCGGAGCCCTGGTGGGGTA
GGAGACACTAAGCCTGTATTTATTACTCTCCCATTGTCACTAATTGAGGTAATTATCTGTGACTCTGGCCTGGCCAACAATGAGGCATTCACTC
CTGGGACCTCGATGGGCCTGGCTCCCACTCTCAGCACCAGCCCTCCCTCCCCTCCTCTTCCAAACCCGCCAAGGACTACGATGGGCCCTGGAGC
ATGTTGGGAAAGTGGACAGCGTCCCACAATGCCTCACCTCCCCACCGGCGTCTCCCATAGCCATCACTACAGAGCTGTCTCCTGGTCCCCCCAG
AGAAGGTGAGAAAAGAAGGCAGCCTCTGCCAGGGGATGGATTTGCCTGGCAGAGCCCTCAGGCCAGAGAGCGACCTGTTTCTGAGGACTTTGGT
TTTCTGGACTCTCCAACTCCTCATCTCCAGATGCATGACACCAGCGTCTCACAAGGTGCTTTTGCAGATCCATCCTCATGTCCCTATAGCCTCT
AGGGTGTTAAGAGGCTCTAGCCTGTACCAGCCCTACTCTGGGGAGGTCCCTAAACCTACCAGTCCTGGCAGAGTGGCTGTGGATGTGATGGGAG
ATGTTAAGAGAGACAGCAGGAAAGGTTCTGTCAGGGGAAGAGCAAAAGGAGCCAAGTCAAGAAGGAGCAGTCAAGAGTCACAGCATTCCCGGGG
GTCACACTAATGTGGCCATGCAGCAACTTCAGCGAGAAACTTGGATTTGGAGGGGCAAGAGTTCCAAACAGCGGATTTCACGTGGACACAGCTT
TCTGGGTCAAGGTGGTTGGCCCTGGGGAGCAGGTATGTGTGTACAAGAAAGACAGAGAGAGAGAGAGAGAGAGAGAGAGATAACAAAGGAAGAT
TTAGGCAGAACTAGATTGTGAACTCCTTGAGGGCAACAACTATGTCTTTGTGTCTTGGTCACTGTTGCTTTTATGAGAGCTTAACATTCTACCT
TGCACGTAATAGGCACCGTCAAGTGAATGGATGAATACAGATGAAGCCGGCACTTGCTTTAAAACTGGGATCTGTGAGCTATTCTCTTCCACAG
CTGCACTCAGGCTCCTCATTCTCTCAGGACTTGCTGGAAGGAGATGTCTAGACCATCCCTGCACGGTCAGCGGTGGGCACTTCACCAGCTGTTG
ACACGACAGACCCTGGCCGAACTCAGAGCGGTAGTGGGGATAGCGCCACCTTGTGGTCACTCTTGGGAGAGCTCCTGCAGAGACGCTAGCCAAG
AAGGCAGGGTCATCTCTCAGGAGCAGGGTATCACCCCGCGCTGCAGCCATCCTTCTTCCTCTATGTCTGAACTGCATTGTTATGCCAGCGGTCC
TGTGGCACAGTTTTATCATTTGTTCCTTCTTTATTCCAGCATTTTCTGAGAGCCTGCTCCACGCCAAACTTGTCGGGTATACAGAGCTAAATCA
GCTAAATCACCTCCAGCAGCTCATGGTCCAGCAGGGGATTCCACAAGGTAACAAGACCAACGAGGTTACGATCAAGCCGCAGGAAAAAAAATTA
TCCAGGTGTTGAGGAGGCACTAGAACATTCCCAGCTCAAAAACTCCAGCATTCACCTCTCCCTCAATTCCTCTCACCGAAGTGCAAATGGTTTA
TCTTCATTACCAAGAAACAGTCTGGGCATGGTGGCTCACAGCTGTAATCTCAGCACTTTGGGAGGCCGAGGCGGGCGGATCACTTGAGATCAGG
AGTTCGAGACCAGCCTGGCCAACATGGTGAAACCCGTCTCTACTAAAAATACAAATAAAAAATTAGCCAAGAGTTATGGCGCCCACCTGTAATC
CCAGCTACTCTGGAGGCTGAGGCAGGAGAATCGCTTGAACCCAGGAACTGGAGCAGAGATCACACCACTGCACTCTAGTCTGGGTGACAGAGTG
AGACTCCATATCAAAAAAAAAAAAAAAAAAAAACCCAAAAAGCAAAAAAGACAAGAAATACTTCAAGTTCTGGCTCCCACACATCTTTCCAGGA
CTCACTCTTCTGCCCCACTGCATTCCCTAATGCCTCTGCTCCCTGTGAAAGCCACGTGTTTTCCTACCTCTCTGCATTTTCCCACCTCTCTGCA
TTTTCCCACATCCTAGAATGTCCCCCTTCCCTGTATCCCACTGTTGGAACCCATCTCAGATGTTCCTTCCTCCATGAAGACTCTTCTGATTTCC
CTTGGTAGAGTGGTCTTGCCTGTTCTAGCTCCTGAAGCACCATGTAGGTAGGTGCTTTCATTAGCAGCACATACTGGGTGTCCCATTGGTGGTT
GTCTGTGTATATTACTCATCCTCCTACTAGGCTAGCCCTTGCAGCACTGACCTGGGCATATCATATGCCTTTGTTAAATGGTGAATAGACGGAT
ACATGAATAAATGGATGCACGGACAGAGGAATAAATCGATGGAAGTATAAATGGGGCCAGGCGCGGTGGCTCATGCCTGTAATCCCAGCACTTT
GGGAGGCCAAGGCAGGCGGATCTCCTGAGGTCAGGAGTTTGAGACCAGCCTGGCCAACATGGTGAAACCCTGTCTCTACTAAAAATACAAAAAT
TAGCCAGGCATGTTGGTGGGCGCCTGTAATCCCAGCTACTCAAGAGGCTGAGGCATGAGAATCGCTAGAACCCTGGAGGCGGAGGCTGCAGTGA
GCAGAGATCTCACTAATGCACTCCAGCCTGAGTGACAGAGTGAGACTCTGTCTTAAAGAAGAAAAAAAGTATAAATGGCCAGATAGATGACAAA
TAGGTTGGTGGATGGGTGGATAAGTGGATGTGGAATGTATAGATGGATGGGTGGGTGGATGGATGAATAGATGGATGAATGGAAAATCTATCCA
TAAAAGGACTCACAAAAGGCTATGTAGGCTGAGTGCAGTGGCTTATACCCGTAATCCCAACATTTGGGGAGGCCACCATGGGAGAATCGTTTGA
GCCCAGGAGTTTGAGATCAGCCTGGGCAACATAGGGAGACCCCGTCTCCACCAAAAAAAAAAAAAAAAAAAAATTAGCCCGGCATGGTGACACG
TGCCTGTGGTTCCTACTATTCAGGAGGCTGAGGTGGAAGGATCACTTTTGCTGGGCAGGCTGAGGCTGCAGTAAGTTGTAATCGTGCCACTGCA
CTCCAGCCTGGGTGACATAGCAAGACCCTGTCTCAGAAAAAGAAAAAAGAAAAAAAATGGCCAGATGTGGTGGCCCATGCCTGTAATCCCAGCA
CTTTGGAAGGGTGAGGCAGGCAGATAGCTTGAGGTCAGGAGTTCGAGACCACCCTGGCCAACATGGTGAAACCCTGTCTCTACTAAAAATACAA
AAATTAGCTGGGCGTGGTGGTGCGCGGCTGTAATCCCATCCACTTGGGAGGCTGAGGCAGAAGAATTGTTTGAACCCGGGACCTGGAGGTTGCA
GTGAGCTGAGATCGCACCACTGCACTCCAGCCTGGGTGGCAGGAAAGAAAAGAAAATTTTAAAAAAGCCCAGGTAGCACCAGAGGCTTCAAGGG
AGGGAGCACACCCCATGCTAGGATATGCAGAGGCAGAGGCAGTATCCAGGCCAAACTTTCCTTCACTAACATCTGCACCCTCAGCAACTTGTCT
CCCAGAGGCCTAGATACATTCCACTCCCCATAAGAAGTCATGGTCTGGGAGCGGCTCCTCTTTTCATCCTCCCTGCTCCCTCAGGAATGCTTTC
ATTAACATATATTATGCCATCTTCCTGCACTGCAATGACTGTGGGTTTCCTCTTCCACATCTCTTTCCCTATATCATACACACCCTAGCTTGAG
AGCTCCCTGAAGGGAGGAAGCATGCCTGAGTCTCTTTTGTGTCCCTAGCACCTGGCATATATGTTTAATGAGTGAGTAAACAAATGAACAACTG
AGTGAGTGCTGCCTCTTCCCCATAGACACATTTTATACACTTCCTGCGTCCTCTTGTTCACTTATCTCTCCTGGCCCTCTCCTCCGTACACACA
TCACACTCACACTCCTGACCTTGACACTCTGAAATTCCAGAGTTATATGCTGGGGCTCGGTTTCCTTACCTATTTGTGGCTGATCTAGGGAAGT
CCCAGCCCTCCCCTGAGAGTCTGAAAGAGACGGCTCTTGACTCCTCTAAAGCCATATTAACTGGGTCCCATGGAGGGCAGAAAGGGGCTTCCCT
AGGAAGAAGCTCTCTATTGGGAGGGTAGCAGGATCCTGCACTAACCTGAGGTCTGCTCCCCCAAATTGACCACATCCTCCTGTGTCTGCTGTCC
CTACTCCTGACCAGTGAGGCTGTCCCAAGGTAGGGGGTGGTTGTGGCCTCTGTCTCAAGGCTGGCTGGCAGACACAGCCAGATTTAGAAGTCAT
TTTCGCAGCAGGGAGCCTCCAGTGTGCCACCCACAGAGCCCTGGAAGGTCAGTCTGAGATATGGCTCACCAGGGGCTGGCCCCTAGACCTGGAG
TCACTCCTCCCCTTCTTGTCTCTCTCCTTTTTTTGCCCAGAATTTTGGCAGCTGGTGCTGACTCTATCCTTAGCCAAAGATGGAGTAAGTTCTG
GGGGAAGGGGTGTGCTGCACTGACACTCTAACCGCCCAAGCACTGCCAGGGCAC
HUMAN SEQUENCE - mRNA
ATGGGGCTCTGGGCGCTGTTGCCTGGCTGGGTTTCTGCTACGCTGCTGCTGGCGCTGGCCGCTCTGCCCGCAGCCCTGGCTGCCAACAGCAGTG
GCCGATGGTGGGGTATTGTGAACGTAGCCTCCTCCACGAACCTGCTTACAGACTCCAAGAGTCTGCAACTGGTACTCGAGCCCAGTCTGCAGCT
GTTGAGCCGCAAACAGCGGCGCCTGATACGCCAAAATCCGGGGATCCTGCACAGCGTGAGTGGGGGGCTGCAGAGTGCCGTGCGCGAGTGCAAG
TGGCAGTTCCGGAATCGCCGCTGGAACTGTCCCACTGCTCCAGGGCCCCACCTCTTCGGCAAGATCGTCAACCGAGGCTGTCGAGAAACGCCGT
TTATCTTCGCTATCACCTCCGCCGGGGTCACCCATTCGGTGGCGCGCTCCTGCTCAGAAGGTTCCATCGAATCCTGCACGTGTGACTACCGGCG
GCGCGGCCCCGGGGGCCCCGACTGGCACTGGGGGGGCTGCAGCGACAACATTGACTTCGGCCGCCTCTTCGGCCGGGAGTTCGTGGACTCCGGG
GAGAAGGGGCGGGACCTGCGCTTCCTCATGAACCTTCACAACAACGAGGCAGGCCGTACGACCGTATTCTCCGAGATGCGCCAGGAGTGCAAGT
GCCACGGGATGTCCGGCTCATGCACGGTGCGCACGTGCTGGATGCGGCTGCCCACGCTGCGCGCCGTGGGCGATGTGCTGCGCGACCGCTTCGA
CGGCGCCTCGCGCGTCCTGTACGGCAACCGCGGCAGCAACCGCGCTTCGCGAGCGGAGCTGCTGCGCCTGGAGCCGGAAGACCCGGCCCACAAA
CCGCCCTCCCCCCACGACCTCGTCTACTTCGAGAAATCGCCCAACTTCTGCACGTACAGCGGACGCCTGGGCACAGCAGGCACGGCAGGGCGCG
CCTGTAACAGCTCGTCGCCCGCGCTGGACGGCTGCGAGCTGCTCTGCTGCGGCAGGGGCCACCGCACGCGCACGCAGCGCGTCACCGAGCGCTG
CAACTGCACCTTCCACTGGTGCTGCCACGTCAGCTGCCGCAACTGCACGCACACGCGCGTACTGCACCAGTGTCTGTGA
HUMAN SEQUENCE - CODING
ATGGGGCTCTGGGCGCTGTTGCCTGGCTGGGTTTCTGCTACGCTGCTGCTGGCGCTGGCCGCTCTGCCCGCAGCCCTGGCTGCCAACAGCAGTG
GCCGATGGTGGGGTATTGTGAACGTAGCCTCCTCCACGAACCTGCTTACAGACTCCAAGAGTCTGCAACTGGTACTCGAGCCCAGTCTGCAGCT
GTTGAGCCGCAAACAGCGGCGCCTGATACGCCAAAATCCGGGGATCCTGCACAGCGTGAGTGGGGGGCTGCAGAGTGCCGTGCGCGAGTGCAAG
TGGCAGTTCCGGAATCGCCGCTGGAACTGTCCCACTGCTCCAGGGCCCCACCTCTTCGGCAAGATCGTCAACCGAGGCTGTCGAGAAACGGCGT
TTATCTTCGCTATCACCTCCGCCGGGGTCACCCATTCGGTGGCGCGCTCCTGCTCAGAAGGTTCCATCGAATCCTGCACGTGTGACTACCGGCG
GCGCGGCCCCGGGGGCCCCGACTGGCACTGGGGGGGCTGCAGCGACAACATTGACTTCGGCCGCCTCTTCGGCCGGGAGTTCGTGGACTCCGGG
GAGAAGGGGCGGGACCTGCGCTTCCTCATGAACCTTCACAACAACGAGGCAGGCCGTACGACCGTATTCTCCGAGATGCGCCAGGAGTGCAAGT
GCCACGGGATGTCCGGCTCATGCACGGTGCGCACGTGCTGGATGCGGCTGCCCACGCTGCGCGCCGTGGGCGATGTGCTGCGCGACCGCTTCGA
CGGCGCCTCGCGCCTCCTGTACGGCAACCGCGGCAGCAACCGCGCTTCGCGAGCGGAGCTGCTGCGCCTGGAGCCGGAAGACCCGGCCCACAAA
CCGCCCTCCCCCCACGACCTCGTCTACTTCGAGAAATCGCCCAACTTCGGCACGTACAGCGGACGCCTGGGCACAGCAGGCACGGCAGGGCGCG
CCTGTAACAGCTCGTCGCCCGCGCTGGACGGCTGCGAGCTGCTCTGCTGCGGCAGGGGCCACCGCACGCGCACGCAGCGCGTCACCGAGCGCTG
CAACTGCACCTTCCACTGGTGCTGCCACGTCAGCTGCCGCAACTGCACGCACACGCGCGTACTGCACGAGTGTCTGTGA

[0268] TABLE 4
MOUSE NOMENCLATURE
ICSGNM Rasgrp1
Celera mCG14557
HUMAN NOMENCLATURE
HGNC RASGRP1
Celera hCG38304
MOUSE SEQUENCE - GENOMIC
CACTTTTCAAATAACATGAAAGTGAAAACCTGTTGGCAAGACCAAAAGAAGTCTGGGGTAGTGGTTCTTCTTAGGTCATTTTAGAGATTCTTAG
ATCTTGAGACAGAGCAAAGAACTGCTTGTAAATGAGCCAAGAAACTAATCTCCATAATGCTCAGGGTAGAAACTTGTAGCTTACAAGACACTTC
AGAGGTTAGCACCGACAACCATCTATTTAGAATGCGTTACGCGTCCCTTTTTCTCACACAGTACTTTTTAATGACTGATCGCTGAGAAGCTCAA
ATGTTTTTGGATACAGAATCTAAGCTTGTCACAAAGGCGTAGTTAGCTTTTCTTCCACATTTGCTTCTCACAAGCTGTGTTCGGACAAGTGACT
CGACCCCTCTAAGGCTTAAGTTCCTCATCTACAAAGCGAGGGACCATGACAACTGAAAACCAACACAGTGTGTTGTGAGGGTGAATGAGGTCAC
AGGCATGGCTTCCTCAGAACAACTTCTGGTCTGCACAAGTCATTTCCTCAGAAGGAGGCTGGAGAATCGGAAAACAAGGAGGTACAAATAAATA
TTTTAAACAAAGTACTAATGAGTGAACATTCCTTTTTAAATATTCTGCTCCATCCCAGCACCCAGATCAATGCAAATTAGCATGAAGCCAGACT
TTGCGGTTTATTTGTTTGGTTGGTTTTGCCTCCTACTAATCTTGCCTGATGGTGTAACTGACTTTTCTCAGGGATCCAGAGTTGCTGTGTCCTT
TCTGCTTGGACCTCTCAGGATAACAGCTCCAAGTGTGACCTGGGACATAGGGGACATGTTATGAACCASGACAAGCCCTTGGGAGTTGCTATGC
CAGCAGCTAGTTATGGGGTATGTATGGCTCTTTGGGCCTCTTTAAATGAGAGTCTAGTTTTATCACATCTTGGGCCTCTAATTCGCTTGGATTG
AGATGGGAGTTCTTTGTTTACACGTTGAGGTCAGGACTGTACTATGTACCCCAAGCTGGCATCAACCTCACTATATCCCTGCCTCAGCCTTTTT
CAAGTTACGGTTTTTATATTTTATTTTTAACAGCAGTTTTAGGTTAGAAGCAGAATTGTGTTGAGCATCATCCTGTCATCTCTACATGTGCACA
GTACCCCTCTCCAGAGTGACACATGTGTGACATCTGATGAACCTAGATCATTATCACCCAGAGGCCATGGTTGACATTGGAGTTCTATAAATTT
GAATGACCATTCACTGTCTAGTGTCCCCACACACATTACAGTGCCTTACAAAGTAGATTCACTGCCCTGAAAAGTCTGCGCTACAGCTTTACTT
TAAAAAAACCAAATACCAGGCCTATTTTCCAAATTTGTTATCATAGCATTTGGGAGATGATGGCAGAAAGGAGACAAGTTTATGATCTATATTG
AATCCGAGGCCAGCCTTGGCTCATGAGACCCTGTCTTAAGAAAATAAAAGCATAAAAATAAAAAGAATGTGTATTTAAGCCCCCTTTCCACCTC
ATATACCACTAACTGTTCTCCTCCTTCTCCTTCCTGTGAGTCCAAGGGACCAGGAAATGGCTCATGTCTAAATCCACCCATGACAACTAACTCT
TCCAAGAAGGTGCAAGTCTAACTGCCAGGTGCCGTTGCCAGTGGGTCCCAGGCTCGGGACTCATAGCAATCACAATATCCACAAAGCAGGTTTC
AATTTCACTACTTTTATAATCAGACAAAACACATATTTAGGGTTGGATAGATGACTTGGTGAATAAACCACTTGCTGTCTGAGCATAAGGACCT
GAGTTCAAGTCCCCAGAACCCTTAGGAAGATGGTAGCGTTTATCTTCAGTCCCAACTCCTTCTGGCAGSATGAGAGACAGAGACAGAGACAGGT
GAGTCCCTGGAAGATCAGGAGCCATCTAGCTCAATTTACACAATAGAGAGCAGCAATGAGAACTGGTCTCCAGTAAGCTGGAGAGGAAGGTGTG
ACAGCCAAGGTTTTCCTCTGACCTCAGATACATGTAGGACACCTGTACTCACACACAAAAGCATGCACATTACATGCATCCACACGTCATGTAC
ACACACACACACACACATGCACATGCACATGCACATAGACACATAGGCATATAGGCATATTTAATAATGAATAAATAATAATAAGAATCCTCTA
GATTATATTCACCTTTTTGCCACTGCAGTTACAAAATGTTTTTTTTTTTAATTTTTATGAAAGAGAAACAATTCTGCTGCATTTAAGAGCAGGG
TCTTAAGACACGCAAATCGGTGACGTTATCCTCTACTTTGCCTCTACTCTTCCGATTTCTTCCTCTTCCATTACCAGGCAAAACTCACAGCAAC
ACTGGGTTCTATGGGCTTGTCTAAAAAAAAAAAAAAAAAAAAAAAAAAAAAAAAAAAAAAACTCCAGCAACAATCACACCGAACTTGTTTATTT
CATGTGCCTATCATAAGCCTTCCCCAGATTTTTCACACCCTCCTCCCAGATACAAACTAACAATGTCACAGCAACTAACAGCACAGTGGGGTCA
CACCTGCATGGGCCAAATTAAGATCCGCCATGAGGTGACTGTCCTCTGGGAGCGGCTCTCGCTTCAGAGGCTCTTGTGAATCACACACAGCAGC
ACCATCACACTTCCCACAGCAGGTGGCCATGTTTTTCACTGACTAACGAGCAGGATCAATGACTGAACACTTCACTAACACCTGGTCGAGGGCT
GATCTCCATCCACCCTGGGAAGCTGAAATGAAGTCTTCTCTAGCATTTCCTATCTAATTCAATACAGAGGAGGGGAAAAAACATTAGAGAAACA
AGATAAACAACAACAAAATGACAGTATTTCTATTACATTGAATTTTGTGTGTGGGTTGATACTGAGAGATTATTTCCACCAAAATGTTTGAGCC
AGTTTGCCAGTTAGCAAACTAGGCAGTCATGCAAACTAATCTAGATCCATCCTTGCAACAAACTGTAGCTCCCATCCGGCATTGTGTCCCCCTA
AACAATGCAGTTGTGATTGGCACAATCCAGCTCACATTGTCTCTATTCTGTCTAAAACATGCATTGCATGTGGAAAATACAGTAGCCTACTCTC
TGCTAACTGCCTGCCTTAGTCTCACCTAGAGTTTTCTCTCTACTTCTCAAGCCAGAGGGCACAGAAGACGCAGACATAGAAAATGATCACTCAA
ACCCTATGTGGATTTTCATGGGAATATTGTCTGCCCTTAAGAATGCCACCCTCTGCTCTCACGACAGTGAATCAAACTGAATTGAATGACAAAA
CCTTAAGCCTGTAAAGGATAGGTACGCTTGGTGCAGGAATGGTAGAAATGGCTATTAGAATGGGAAGGTCAAAATCAAGTCATTTGTGGTTGTG
TCTGAAGTTGATTCCTTTAGGTTTCATTAAATAAAAAGAGTGAGGGTTATGGAGACATGATCCCCACCACTGAAGTAAAAGCTGGGTGAAGGCA
CATAGGTACCTGCGTCCCCCGTGCTTTAGGGTGGACATTGGAGAGTCCAGGACGTCTCTGGCCAGCCAGCCAGGCCAAAAGAGAAACATCAGGG
TTAGTGAGAGACCCTGGATTGAGGAAACAAGACAGCTGTCATCCTCTTCTGATCACAACCCCATGTGAGCACATGGGAACACACACATGTGTAT
AGTACAAACACAGCAAACCTACACAGAGACAGACAGACAGACACAGAGACAGAGACAGAGAGAGACTTCCCTTTTAAAAGGAAACGTTTCCTTC
CCAAGCTTAACGATACATCTGCCCAGTCTTTGAGAAATCTCTCCCCACATTGATTTGCCATTATTTTCTCTGCTACTCCCATGCAAGTTGGACT
ACAGATTTTCAGGAGTTTTTGTTTCAATGCTGTGTTTATCACAGCACTTTTTTGAATGCATATTGAATTGAGCAGTTTAAGGGTTTGGTTTTGG
TTTGGTTTGGTTGGCTTTGTTTTGTTTCTTTGTTTTTACCCAAAAAAAATCACGTCTGTTTTTTTTTTTTTTTTTTTTGGTTTGTCCAGATGTT
TGGATCTTTCTATAAACTGCACCCCACCCCAGCATTTACCCATGCACCTTTGCAGGTGATAAGTGATTAAGCAGAATGAGTTTACTGAGGTATA
CAATACGAACTTTATAAATAGTGTTTGTGTGGCCAAACTGGTTTTAACTTTGGAATTGGTGCTGGTAGACTGTACTGTCGGCCTCTGGAAAGAG
GCCCAGTATTGAATTTTAATCTCTTCAGCCCTCTTTTTAGACCTACTTGTCCCAGGCACCCACTGGCAAACCTGAGGGTGTGTGCTAATTGGAT
CACACCCAAAGGGGAGAGCAGGTAGAAGGAGCTGGAGCAGACTTCGGAGAACCAGAACCTCCCCGCCCTGCCAAGACAATTGAGAGGCAAACAG
ACTGATACACACCAGTGGGTGAGGGGAGGGTGTGTCGCCCCAGTATTGTGGTTCTGCTCTAACTCTCCCGAACCCTGCATATCCCTTCTCGTTA
GCATCCCTCCTTTGTTCTCCTCTCCCCTCTGGTCCAGCTCTCTGTTCCTGTGATCCTTTGTATCCATAGCCTGGCCCTTATGTCCTCTGAAAAG
CTGGCCCTTCCTCCATGGGTGTGAACACAGCTCCAGGGGTGTTCACACAGGATGGAGCATCCACCCTGAGCATAGAGGAGGCAGTCAGAGCATT
AAGAGTCCTGCGTCTGGGGCAAAGTTCAAGCTTCAGGCTCTGATTCTTTAAAACTCTTCTGAGATAGGCATTGAGCCCATTTTTTAAAACGTCT
TGGGGCTGAGAATCAAATTCAGTCTAATCTAAAGTGAGACTTTAAGTCACTGACTGAGTCCATCCTGTCATCCAAATGTTGGTAAGAAAGAGTG
ATACTGTCTGTTACCCTTGAACAAAGTAGACTTACCCAGTTAGCATCAAGACGGGCAATTCTCACACATCCTCTCACCTGTACCTGTAGAGGGG
TGTGTGTGCCTGCTAAGCAAAGTCAGGTCCCAGCCCTCCTCTGTTATCTCCCTTCAGGAAGCTCTCNNNNNNNNNNNNNNNNNNNNNNNNNNNN
NNNNNNNNNNNNNNNNNNNNNNNNNNNNNNNNNNNNNNNNNNNNNNNNNNNNNNNNNNNNNNNNNNNNNNNNNNNNNNNNNNNNNNNNNNNNNN
NNNNNNNNNNNNNNNNNNNNNNNNNNNNNNNNNNNNNNNNNNNNNNNNNNNNNNNNNNNNNNNNNNNNNNNNNNNNNNNNNNNNNNNNNTTCTG
TCTCCAAGAATAAACATCATGAGACCTTTTCTATGGCTTGGTATAGTATGGGATGGGGTGGGATGGGATGGGGTGAGATGATATGGTATGGTGT
CATGCTGTGTCATTCTCTATCATATCATATAAAATCATATAATACATAGTATTCTATTCCTTATATTTAGTACAGTTTATTACATTATCACTAC
TTGTCTATCCTGCTAGCATCTTAAAAGATGCAGAAGTCAAATGTGATGCCATTTAGAGACACTGTTTCTGCCTATGTGCTCTATAGGGTAAATA
AATACAATTCTGCCAGGCTCTGGTAAAGAAAGTCAAAGAATCAGACAGCAATTTCCAAGCAGCTAACAACAAGAATGTGTTTTCACAATTAGGA
TCTGTACTTGGAGTGGTCTAACATAACACAGTGTAATTACCTTCATAAAAATCCCCTTTGAAGACTTSGGGATAGATCAGTTAGTAAAATGACT
GTCTAGCTTGCTTGAGCCCTCGATAAACCAGCGCTGCATAACCCACGTATATCAGTAGGTACCTGCAATGCCAGCAGCACTCTACAACTAGAGG
TAGGAGGAGCAGAAGTTCAAGGTCAAGGCCATCCTCAGTGACATAGAAAATTTGAGGCCAGTTGGAGTTACACGAGATTTATTTAAATACAAAC
AAACAAATGGACTTCTGTGAAGATACCTCAGAGCAGTGGAGCAATGACAAGCCCTCCTCCAGACAGATACTCCCTGAGAGAACTTCAATGTACA
CAAAGACAGAGTCCAATTCTAACCCCAGGTCTGAAAGACAGAAGCAAAGGATCACCTCTCACAGAGACATGCCCTCCTAGCCTGGGTCTGAGGT
GAGTCACAGCAAAGACCATATTTACAAGCCTATGGGTTTGCAGATGACAATGTGCAGAGAGAAAGACACTTTGGAACATTCAGGCCTAAATTCA
ATGTTATTGTCATTGTTGTTGTTGTTGTTGTTGTTAGTCAAAAGTCCTCCTTTCATGACTCAGAGATGTATGAAAGAAGAAGTGGAAAGACTCT
AAGAGCCAGGAACACTGATGACTCCAGAGAAACAGTGTCTTGCAGACACACACACACACAGCTGATGCACGTGTGAACTTAAGAGACTAGGACA
GTACACATAGACCTGTACAAGTTCAAGCCAGACACAATCCCAGGGCAGAGACAAGGAAGTAGCTACAAGGACCCATTTCTAACACAGAAGCTAT
TTGCTGTTAATACCTCCTTGGGAGACGGAAAATTAGTTTATACCACTGGAATCCACTGGGTATATTAACCACGCTCCAGGGCAGGTCTCATGCT
CAGGAGCAGGTGGCCAACACAAAATAGACTCCATGATTTGTGTGTGGGTCACTGAATTTTTTGGTTTGTTTTGTCTTTCTGGTTTGTTTTGCTT
TTTTTTTAAGAGAGGAAGAATATGAATTCGGGTAGGTGGGTGTAGTAAGATCTAGAATCAGTTAGGGGAGGGGAATGAATAGGATCAAAACAGA
TCATATGAAAAAAACTAAGAGGCCCATAAATAAAACCAAAACCCACGGTTCAGGGGCTGGAGCAAAGGCACAATAGTGAAAGGCACTTACTACT
CTTTTTTTTTTTTTTTTTGTCTTTTTTTGATTTTTTTATTTTAATTAGGTATTTTCTTCATTTACATTTCCAATGCTATCCCAAAAGTCCCCCA
TCCCCTCCCCCACTTACTACTCTTGCAAAGGACCTGTGTTTGGTTCCCAACACCCACATAGTGGCTCAGAACTACTCCTAACTCCAGTTCCAGG
GGATCCAACACCCTCTCCTGACCTCTGGGGGCATCAAGCATGCACAAGCTACATACACATACATGCAAGCAAACAAGGAAAACTGTGGAGCAAC
CAGCCACAGTCACATACATAATGAGGCCACGTACCCTTGCCTCAGAGACAGAACCATGCTCAGCAACTGGGCCATAATCTGACCCCGTTTCACC
CTCTGTCTCTTCACTCTCCTCTAGAGCCCAGTGCCCCATGGATGCTGGCTTTTTCTTACAGAGCCAGCAACTTGACTTGGATACAGACCATGGG
GGGGGGAGCTCATCTTGGACATTGCAAGGAGGATAGTGGTGTCCTAGCACTGAAGGGGCAATCTCTAGATGGGAGAGATTTTTAAAGTCACAAC
ATATTTATATGTTCATTTATTTGCTGCCTTGGTTACTGTCCATGTACTAGACATGCGAGCTCATGAACACAAGGACCTTGCCTGTCTTGTTCTC
TCCAAGACTCTCAGTAACAAGAACAGCATATGACACTAGGGAGNNNNNNNNNNNNNNNNNNNNNNNNNNNNNNNNNNNNNNNNNNNNNNNNNNN
NNNNNNNNNNNNNNNNNNNNNNNNNNNNNNNNNNNNNNNNNNNNNNNNNNGCACGGCAGGAGTGATGAGAGTATAATGTGAGAAGTCAGGTACC
CAGCAGACCACGGCTGGAGGCCAACCAGACAGGAGGGTCCATCCATGAGAGTACACAATGCTATGATATCTAACTCTCATTTTCTAGGTAATTG
GAGGGGAGGGTGGTTCCTAAAGTTTGGAAACAGAGAAAGAACACAGTAGTGCAACCATGCAGTGGTGTAGGGGGTGGGGGGCGGTCCAGAGAAA
GGAGATGTCAAAATTAGGGAATGCAGTCTACCCCATAGATCCAGGTGGGGGATGATGGGAATACACACGGGTTTGTGGCTTTGGAGACAGAAAG
GAAGTGACAATACAAGGGAATGATGGAGAGAAATGTCTCTACTAGATGCCAAGTGTAGATACTCAGCGGACCCCTGTGGGTCATGTTGAAGCCA
TGAAAGAAAAACGAAACCACCTCACTTAAGCCTGGATCATATAGAAAAGCCAATGACAATTAAACCATTCCTCCAAGAAAAAAAACATATCCAG
AAAGTAGGGCTGCGGTTGCAAAGGAGTCCCTCGGGTGAGCAAAAGGTCTGTGGACCTTCGTTAAGAACCCGATTGAGAAGAGGAAGAAAGACTG
AGTGGATCCTGGCTGCCACAGAGACATGGGCTGTACCAGTGAGAAGGGAAGAAGCAGCAGGAAAGGGGGCAAGATGGGGTGGGAAGAAGGAGAC
AGTTGGTGCCCAGTTGGAAGTGCTTCATATGCACAGGAGACTGTGCACAGGACAGGAGGTGAAGAGGGAAAGGAAGCTGACATGAGTTTTAGAA
GGTTAGGGGAGGCAGGTTGCTGAGGGAGGAGTAGGTGAAGCTCACGGGAGGTCTCAGGTGAGTACTATCTGGATCTATCACAAGTATTCCATCA
TTTTGGGAAAAGTAAGGGGGGCTCTCACCTCATCCAAAACTGCTCCCAGTGACGCCACCCTGCATACCGTCTTCATCTCTATGTTTGCCTGTAT
CTGTTCTGCCCTCATCCTGCATGACCCCGAGGTGACATCACTAATGCTCGGGAGTATCCTCAGGAGAAACGTCTTTTCAGGCTCTGTGACAAGA
ACCTCGGATCTTTTAAACATTTTTTTTCTGTTTCTTTTTGTTTTCTTCCTTTTTTGGGGGGTGGGGGTGGGGGTGTCTTTCATATGTAAGGAAC
TGAACTATGTAGACCTTCCTCTTGGGCTTGGCTGACCCCTTTGAAGCAAGTGTCTACTACATTCTGTTTTCCAAATGTGTAAGCATACATTGGT
ATGTAATTTTAGACTGCTCTCCACTTCTGGCCCCATTTTATCGGCCTTGTTTTGTTGCTGTTGTTTCTCATACTTATTTTTGTAGGTTGTGTAT
TCTTGTAAGTGATCCTGAATTCTTTTCTAGGACAACATTGCACATAAACATGAGGAAATGCACGCGTTATAGCAGAAGGAGGTCTTAAAGTCCA
GAACGTTGTGGCTGGGAAGATCACGGGATGTGATAGCAATAACGAGGGTGTTATTAGGCCAGTCCAGCAGGGACTTAGAGACGCCAGGCAGAGC
TCAGTCTGGGCCACCTCTCTTTTCGGTTTACTGGCTGTGAGAGCCTGGTGTTCTCTAAATCTTACGCAGTGCCCTCTTTGCGTTTGGAGGGGTG
GCTTAACGAGGTAACATGTAGGAAACAGCACTGGATCAGCATTAGCTGTTGGTATTACCGTGGCCATGTTCCAGACAAGTAGCAGGTAGGTCTC
CCCTCTTGGCCAGGTCTGCTGGCACGCTGACATTGCAAGAAAGCCCCTCCCCTAGCCTTCCACTCCCACTTGGCTCTCTTGGTCTACCACACCC
ACAAACTCCCAAGCAGCAGCCTCTAACCTGACAGCTCACCTCCACACCCACCGCCTCCTCCGTAGTGCAGTGCACACAGCTAAGTCTTCTCTTT
TTTTAAATATGCCAAAGAGAACTAAGTGCGTAGTAGTTTAGGGGGGTTCTGCCTTCCTTGCCCAGACCCGACTGTGTACCCTCACTGATACATA
CAAGACAGTCCTGCCATCCGGGAAAGGGTCTCAGCAGAGCCCCCACCCCCACCCCCCTAGGGGACTCGTAGCCTTGGGTGGAGGCAACTCTTCG
CAAGGCTCTAGCTTTGTCAATTTCGGGGCAACTCACTCTGCACCCCTCGGACCTAACTCTTGGGCTGGGAGAGATGAATGGCAGGCGGGGATGA
AGGGAGACGCTAGGGCGGCGCAACTCCTCGGGGCCCTACCAAGTAATGGGGGCAGGATTCGAAGAAGAACTGAGGGCGCCCCACGTTTCCTCCA
GCCTGATGATAACATCAACGCCTGTCACGTGGTTGGTGCGAGAGAGTGTGTGCGCGCGCGGGAGCGAGCGTAGGGAGCGCGCTCGCACAAACTT
TGTGCCTGCGGGTGAGCCTGGGTCGGCTCGCCGGGCTCCAAGAGTGGTCGGCTCCGGGCTGCGAGGGCCAGCGGCGGCCGAGGGATGCGCCGCG
CCCGGCCGAGCCGATCCCACCGCTCTAGGTGAGACGGCTCCAGGGGCGCAGAGAGCCGCGACCATGGGAACCCTGGGCAAGGCGAGAGAGGCTC
CGCGGTGAGTAGCTGCGTCTCCTCGGAGAGCGCTGCACCTCTACTGGGGAAGGATAGCTGAGCGGTGTGCCCTGTGGTCCTCTCCAGTGGGTAC
CAGGAGGGACTAGACGACCAGGGCGCCTCCCTCGGAGGAGAGTTGCCTACAGGGGTAGACCATGATCGGGGACCTGGGAGCCAGGTCAAGATAG
GCGTGATACAGACAACCTCAGAGTCCAGCACACCAGGTCGGGAAGAAAGAGTTGGGGTTGCTGGGGTGGCGAGGCCACAGGTCACCTGGGCAGA
TCTGGAGTGGTCTGAGCCCAGCCAAACCTTTCACCTACCCAGCCCCCACAACAGTCGACCTCCCTCGATGCTCTCGGTCTGGCCACCCCCCGGG
AACTCCCACTCGCACACTTTCCGTGCCCTTGGCACCCGCTGCGGGCGCGGGTCTAGGACAGCGCCACCTTGCGGACTCTCCTGGCCTTTCAGGA
GCGACTGGCGGCAATGGCTGCAAGCGGAGGTGGCAGTGCTTGGCTGCCCTTTGAGGAAAAAGAAGTTTCCAAATCAATGGTCTATGAGTCTACA
CCCCTCCCCTTATACTCTACAGAGATGTTTGGGAGACGGAAGGTGAAGGAAGAATGGCTATGAACAGTCTATCTCTTGGGCAGCAATAAGGAGC
CTGGGGTGGGGGTTGGAGGGATGTCAAGAAATTTAGTGTTTGTCCTCAAAACACCAGGACCCCGTAACTGCCTGGACACCACTTAGCCTTTGTT
AGGGCCGAGAACGTTGTGTCCTTCACAACGCCATTCACGTGGACTCCGATATGACGGCACCATGCCTGATCTGTAACTATGCCCATTAAAATTC
CCTGTTGGGCCATATCATCCCCTGAGTGTTCTCAACCTTACCTTGCGCTACACTATAATGGGTTACTCCATTGAATTAACTCTGCATTATTGGC
GGTGTGGGGCAGGACTGGAAGCTACACTCAGCAGAAATGGCCCTGTGAAAGCTGCCTTTTCTTATAAACAACTATGAGATGTCCCGGCCCTCCT
CTGTTTCCTCCTTTCCCCTGTGGATAACTGTGCCTGGAGACTAAGTCCCCCAAATCGGTTCATACTTCGAAACCTCTCCCCAGGCTCTGTGGGG
TGGGGAAGGCAGACGCTAACTACTGCAGGGCTGAGAAAACATCTTGAAGTTACTGGGTTTCTTTCAAGCTTTTGTTTTTGCTGTTATTGTTGTT
ATTTTGTTTTATTTAATTCATAAGTTTAACTGGAAACGTGTGGCTACTGCCCTTTAAAATCATGACTTTGTAGAATTAGAGGCTGTTCACTCTT
CAGATGGTTAAAGCACTCTCAAAGTTGCCTATCATAAAGCACTGTAAAAATCCTTACCTACAACCATCTCACCAAGAGGTGGAGGGAGGGGAGA
GGGCAGAGGACGTGAAGCGGGGATCTAGCTTGGTGAAGAGTGTTTGCCTGGCATGCAACAATCCTGACTTTGGTCCCTAGCATCATGTAAGAAA
GAAATTAAGATATTTCTTTTAATTCCTTTGGTTGCATCTTGGTGGAGTGATAGGATTGTTCGTTTTCAATCAGGTATGATGGGGGCATATTTGC
AATCCCAGCACTGAATAGAAAAGACTAATACAGAGTTTCAAGCCACATAGTAAGACCCCTGTCTCACAAAAAGAAAAACAAAACAAACAAACAA
ACAAAACCAAAACAAGCTAAAAAAAATTCTTTTTAAAAAAAATGTAAAGAAAGAAAGAAAAAGAGAATGTGACCTGAGAGTTTTTCCAGGGCAA
GCAGTCAAGAGACTAGACAAAGCTTACATGTGCACAGAGTGCTGTTGGCTTTTAACACTTTGCCTTCCCTAGTTTCTCATGCCCTCTGAATTGC
TCCTCACTGGGCTAGGTTTAGGTAGTTGTCTTTTTTCTAGGAAGGGAAGGGAGCCAAGCTAGGAAGTGTGGCTTGGTGCTAAGGAAGCTGGCTG
CTAACCTGCTGTGCATCTGTGGCCAATATATCTCTATTGCATAGCTGTAGGTGTTTGGGAAAGGACTGTGGAGAGACGACTAGCCAGCTCTTGG
GTCCTGGTGACCATTTCAGGAACCTACTAAACAAGGAAGAGCTGAGACGCTGCCTCTGCATCACCAGCCATCTTTCTGAAGCACACGGTTGTTA
TACATTGAATAAGCCCTTTTGGGCTCTTGACAATCTACTCACCAATTTCAGTGCAGGAATAAACACACAGTTTCATGTAAAAAAAAATAATAAT
AAAGCCTACTAGATGAATAAAAGCAAGAGGGACCCCAGATACTAGTCCCTGAGATAGCCCATATGAACAGCCTCAGTATGTGTAGGACTCAGTT
TCATATCACAAGGTCGTATCTTTCTAGACTGTAGCTTCAGACACAATCCAAATTCCTGCACAGTATCTTTGGAACATGGAAACTTCATGCAGAC
TGTTGCTGTTTTCAGGTTATCAGTTTATTCTCAGACACTGATCTGACAGTCTCAGGGTCTGGATAAAAGACGGTGGTGGTCAAGAGTTTAGTGG
ATTTCTGCAGCACCAACCTGATTCTTTGGGAGTCGTTGGCTTGGGTTAGCATGTTCCAAGTCACCAGGGTGACTGCGCTTTATTGGTCCTAGCT
TGGAACTGAGCTCCATGCACACCACAGCCCGATGCTCTGAAGTTGGAGCAGAACTGGAAGGGCCAAGGTGACTCCTGGAGTCTGGCTGTGTGGT
GTGTCCTGTGTTCAGGGTACTGTCTTTGTGCAGGCTGATTTCTACAAACCCAGGTGTGCCCAGGGTGGGGGCGGGGTGGATTTCTGTTTGTTTG
TTTGTTTGCTTGCTTGCTTGCTTGCTTGCTTGCTTGCTTGTTTTAACTAAGGATTTGTTTGGCCTCTTCTGAGTGAGGTTTAGACCTTGTCAGA
GGAGCTCTTCCACCCAGCCCCTGGAAGTGCTTTGCCCTCTGCTTTGCCCTCGACAATCTTGAGACATTCACCTAGAAGTTACGTGGTTACACTC
GCTGTCTTGGTCAGATTCCCCTACTAAAGCTTTGTGTATTAGGGAACTATGAGATGGCTTTATACAAGAGTAACTAACACGCTATGGACATGTA
TAATTTACAGAGAAAGTTACAGAAGCCATCTCACCACGGTCTCCCCCCTGGCCCACTGTAATATCTTACTCATGCGAATAAGTATGCGGCGAAT
CGATGCAGACTTGTGTTTCTAGTATGTGCTATGTTTCTAGACTGTTAACTCCTTCTCTTCTTTGACAGTTAAACTATACATTAGCCAAGGGTGC
AATGAGAAAAGAACTAAGAACATGCAAAAAAAGCTACCAGCAAAAATGCCTATCATTATTAAACCTTCAAACATTATAGACGTGGGTCTCTGTG
TGGTTTTTAATAAAGAGGAAAATAAAACATACTGCATGAGACACTTTGCATGGTGACCTGTATCAGCCAGATCACGCCAAGCTAAGGATGAGCA
GACGAAGCGCCACCAGACTCCTAAGCCATTTCCAGATCCAAAATGGTTACTTTATATTCGGTTCTAGAGCAGGCAGCTCAGCTCAGAGCCAACC
CCTCCCCAGTTTCTCTTCGTTGAGGATCAATGTAAAGACCCGATGGAATACTGTTTACTGGTCTAAGTGATTCATAGTGGTTCCTTGTGTTATC
AAAAATGAAACCATTTATTAAAACCAACCAAGATGTGTAAGAAATGCAGAGATGACTGAAAAATCTAAATGTCACCCCCCTGCTTCTTCAAGAT
TCTCAAAGCTAGTTCAGGGGACCTCCTGCCCTTCTGTATCTTTGGCATTGCTTAAATGAATGAAACTATCCAAAAAGGATGCTAACTGAACCAG
TCCTTCAGACCCTGGGTCCGTAGCCTAGCAACTAGAAGCTAAGGGCTCCCAAGGAAGCTTCTTCCCTCTGCATCTCCCCTTCTGGAAGAGAGAC
GGCAGCATAGAGCAGTCCTTACACCAATGGGCAGAAGGCTATTGCTGCCCTGGAATCTCACCTTGCCATTTGCTGGGGAGATGTCTCTTTAACA
GCCAACCAGTCTGTTCAGTGCTTTTGCCAAGTGGGAGGGGTATGCCTTCTCCCAGCCCAGCTTCAGAGACTCACTGTCCTATCTCCTCTTTGCT
TGGTCTTCGGAGCCTGGACCTGCCATTGAGACCCCCAGCTGCTCTCTCTATCCTCACTTGAGTCTCTCTTTCCCCCAGGAAACCTTGCCATGGC
TCCAGAGCTGGCCCCAAAGCAAGACTAGAGGCCAAATCAACCAACAGCCCTCTCCCTGCCCAGCCCAGCTTCGCCCAGATCACCCAGTTCCGAA
TGATGGTGTCCCTGGGACATTTGGCCAAAGGAGCCAGCCTGGATGATCTTATTGACAGCTGCATTCAATCTTTTCGTGAGTTGGGCAACTGCCC
ACCTATATAGAGATTGCTGTGTTACTTTGTTCTGTGCCTTAAAAAGTGTCTTATACAAGAGCAACCTAGATTGTATTTTGCCTTTAAAAATAGC
TTTAGAGCTTTTGAAATGTTGGAGACAGTCTGTAGCGCTTACGGCACATGACTATGTGGGTGGAATAGGTCGTGATGAGAAGTACAATTTGAAG
TGAGAACTTAGTGAGCGAAGTTGGCATTTTCCTCGCATGGTGGTTTGTCTCATGGTGAGGGGAAAAAAATCACAAATTGATATTGGGTATTCTT
CTCCTCTAGTTCTTGTGGTCGAAAAATCCTAAGCCTGTCTCACACCGCCAAATACAATTTGAAAACTTTTAGGTCATTTGGACAAATAAGGTCT
CGACAGTTCCCCCTTACAATCTGGACTTGTGCTGTGTTTGTGACTAGAAGATGAGGAGCCCATGTGTTGCAGGTCGAGGTGGGAGGACCTGAGC
ACATGGGCACATAGGCCGCCAGCGGTGTATGGTCCAGGTGCTCCCCTCTGTACTGCCAACAAGCAGTGCCCTCAAAAGATTTCTTTTTATCCAA
ACATTTTCTTTTGATCGTTGCTTATGAAATGGTGACTTGAAAGTAGTACTAAATATTGGGTTTGCTTCCAAAAGGGCAGGATTAAAACCGACAG
ATTTCACTGAAACCCATTAATTCAGAGATGTTTCAGTGTCCCCACGTCCCCTTTTCTATGCTCATGCATCTCCCTCTGGGAAGGAGATGGATTG
GTGGGACTCGGCTCTGAAGCATCAGCCCACCCCAGCCTGATCCTCCTGGACAGCAGAGGGGAGTTGTGCTCAGCTCTCAGAAGTGGGGACTGTT
GGTGTTTAGGCCCAAACAAGGACCTTATTTATAGACTTGGGGAAGACTTGGCACTTTGGGGAGATTCTTTTTGTGCAACTGCCTCAGTTTTGGT
TTAAAACAGTGCTTCTTAAACATTCTTGCACACACAGTTTGGGGGTTTTGATTTTTTTTTTTTTTTTTTTAGTAATGCAGATGGCTAGGTCCCA
CCCCCAGAGTTTCTGCCTGAGTAGGTCTGGCCAGGGTGGGGTCCAAAAATTTGCATTTCTAACGAGGTCCCAGGTGAGGCCTTGACAGCTGCTC
CCAGAACTCCACTTTGAGAATCGCTACTTTTAAGTTCTGTTGGCTGTAGACTTCTTGACTTTGAAAGAAAGCAGATTGGGTGTGTGACTCAGGC
TCAGTGTTTACCTAACAGGCAGGGGCTTGAGTGCAGGCTCCATCCCTGAAAAAGAAAAGGCCATTCATTCTGCTCCCTGTTTTATCTTTACCCG
AAAGACTAATTCAAGATGAATTTTCTACTGCTAAGCTACATCTTCACCTCCAGATTGAATAACTTTGTGTCTCAAAATCATCATAGACGATTTT
TTACATTCAAGGAGACAGCTAGAAGCTGGTGGAGACCAGTGGCCATGTGGTAGTCATTAGTGTTCTTAGATAAGCTCCTTGACTGCTAATTGTA
TTCAGTAGACCTGCAGAGAGCATAGTGTAACTATTGCATGAACAAGGACCTTTACTCTCTCTTTCACTGCTGAGAACGCTGGGGCCATCACCGT
GTTTATCATGTGAACGCTCTTCTTTTTCTACCAATCATCCAACTACCTGATGAGTTCAGCCTGTTTTCTTACCCTTCAAATACCTGTAGCTTCA
ACCTCAAAAATACATGGCCAGTTCTGGAGTCCTTTCCAGAAACAACCAATCAGAACCCACTCCCCCAACCAGCCCTACAAAGGCAATGGTGCAT
TGTTTCCTGCAATATGTGAAGGTAAAAAGTGGTGCTTTAAAAAACAGGAGCTGAGTAAGTGCCACTGAGACTAAAGCTCCTCAGGCCACTACCA
AGAAGCATTTATTAAGTCTGTAATTATGCCTGACCCTGCACTGGGTGGCACCCAAGAAAGTCACAGTGACCAAGTGCCTGTTTCATTAGCACTT
ATGACACCTGTGAAATACCCGGTTCAAGAACACACACACACACAGAGACTCACACATGCACATACCTGTGATAATAAGTTAAGGTGTGGTGTTT
GGAAAACACACACACTCACACACACAGTCACACACTCACACACATACACTCACACACACATACACTCACACACACATGCACACACACTTGATAA
TAAGTGAAGGTGTGGTGTTCAAGAACACATTCACACACACACACACACACACACACACACACACACACACACACTAACAAATGAAGGTGTGGTG
TTCAGGAGCAAGTTCCTTGTACTAGGTAGGGTTTGAATCAGGGCACTTATTGATAAGGACCAGTCATCACCTCACATACCCTGGGCCATAGGCA
TGCTGTGGACAAAACCCCGAGCTTTCTGTATTATATGTTACAGAATTTCCCATCACAGAGTTTACATGAAAGACACAAAACAGCCAAAGCAGGG
AAGAATTAGAAGGCTGCCTTTGTGAGTGGCCTCCTCTTGTTATCAGCTGACCTAGCTCTTGTGGGAGGAGCTACACTCTGAGCCGTGAAAAGCC
GGTTTGAAGATTAAGGCAACTTGACTAATTCCTTTCTTTACTTTTTCCTACCTGCTCATTTCACCTTCATGATGATGCCTAGGAAGTATTTCAG
GAGGCTGTGTACACAGCACCCACAGGGCCCCCCCCCCCCCGAACACAGGGGCCATTGTCATACACATTTTAATTAGTTAAAACAAAACCAAGTG
TAAAGTTTAGTTCATGCCACAGCAGCCACCCTTCCGAGTGCTTGATGGCCTCAGGTGGTGACTCCTGTGAAACCGAGTAAGCAGACAATGCCTG
TGGTCACAGAGTCTGACTTGGGTACTTGAGAGGGAAGACAACTGACCTGAGGACACAAACGGTAGCTAGATTTTTCTGGAAACTGAGGTTTTAT
TCATGTCTCAGGTACACCTAAGGGACAATCTAGTTACTGTTTAAAACCTCATGGGCATTGAGACGTGTATACTGAAAGCTGTCTCTTGAGCATA
ATTAAGTGTTAGTTGTCCATCCCTTCCAGCAACTGCTCTCTTGGAAGGCTGGAATAGAAGGCCTTTAAGGATACGAATGCAAATGAAGGTACTG
TGGACGGCCCCCAGCAAACCTCTCTGTATCAGAAGGTTACAGATCTGTGATTAGAAACACCGAGCCTCCATTCCGTGGCTTTACCCCTGCACCA
GCCCACTCCCACCTTCTGTTTTAATCCGAGGGCATGCTACCCATCCCGACTGTGGCTGCTAGTTAACGCTATCTGAGGTAGATCATCACAGCAG
GTGAAACATACCGTCCGCTAACAGGTTAAAGGCCTATGAGAAGCACTTAGGCTTTTCGCTTCTTCCTCACTTTGCAAGAGGGCTCTGAGCATTG
GGGCCAAGTGGAAAAATGGAATACCCCAAGTTACAAGGTGCTTTCATGTCTCCTCTCTGGGCAAGAGAATTCTGATAGCATCAGGGAACAGTTG
CACTCGTACCTCAGAAAGCACGGTAGCAAGCAGTTCCTCTGTGTCCAGATCGGGATGTCAGGGCCGAGGACAGTGCATCCAAGTGGCTTATATT
ATATGGAGTGTTACTTTTTTTTCTTGGTGTTCTGTATGTATTAATTTTTCTTCTATATTCAAAACAACCCTGAAGTAGGTCAAGTATTATTATC
TCCATTGGGTGAACAAGAAGAAAAGTGGGACATCTGAGATCTGAAACAACACACCCTGTACCCACCATCTAAATAGAAAACAGGCTGCCTTTTT
CTTCTGCCTCTACCACCAGCAGCTATTTGTACCCTGAGCTCGTGCAGATGTGCCTCACTTCCCAAGACAGGCCTCATAGCCTCAGAAGAGATTT
CAGATTTTGTGTTGCACAAGGTAGGCTGGCAACCTGTGCTTGCTAGTCTGCAGGCCTGGTCTCCCTCAGTTAGAAACCACATTCCGTTCAGTGC
AAGAAATAGTCAGACTTCACCTTTATACCATCAACTGTCTGGTTGAAGTTAATCGAGTCAAACTTATATTTGTAAGTTTCTATGTGTATGCATT
GTACTAATGTTTCCCAAACTAGAAAGACCCTAAAACCAGTAAGAGTAGTTTCTGTACTATGGGCTAGTTGAATACTAAGCTCCTTATAGACCTT
AAGGAATTATAGTCTTTGAGACTGGAGCTGAGGAAGGGCAAACACGTGCTTGCTGGAACCGCTGTCCCCTCCACAGCAAAGTGAAGGTTGGATG
TTCCTCATCTCAGCTTTAACTCTGCACACTGAGGCAAGGTGTACAGGAGACAGGCACCACACCACGCTCTATGACCCAGATGGGTCCTTAGCAC
TGACACCTGCAGGCACCAAGCCACATATATAAGGTCACATATACAAAGCCTTACCTAGGGCTGATAACAACCCCCGAGGGTAAGCCACAGCTGT
CCCTGAAGCCTCCTCATGGAATTCCCCAGATTTACAAGGTTTCTCGTAGAAAACAGCAAACAGCCATTTGCGGGGGGCACCCTACCCTAAACAC
CTGGGCCTGTCAGAAGTGCCCAGTATGTGGAGAGAACTGGCATTCTTCGTTCGGTGTGCCACTTAAGCTAAAGAGCCCTTTACCATGTCTCTCC
TGGGGTGATATCAACCAGTGCCCCTGCAATATCTTCCCTTTCATGTGTGTGAGTTCTGGTGACTCTTGGGTCPGAGGAAGGAGATGGTTTAACC
CTCTTCACCTCAAACTTTCCTGTGTGGCATTATCTCCAGGAGCCCTCCCTGTGTACTGGGGCAAAATCAGGCCTTCAGACGATGATGCCTAAGA
GCCACAATTTCTCAGGAGTTCTGGGTACTTTTCTTCAGTAGGTGGACCCAGAGGAATGAATCTTACTGCTGACTGAAAGACAGAGGGTGTGGAG
TAGCTGAGCACTTATGGCTCGTGGGTGCAGTGGGGGCGTGGGCCTTTCCCTGATCTGACCCTGCTGGGCTTCTGAACAGCACTGTGCCTTGTTA
GTTTCCTCTCTTAGCTGATAGGGAACTGGGACTCAGAAGACGGAAAGGACACATGCCTGGCCCAGCTCATTACTGGCCCAGCTGCTGAGACCAA
AGCTCAGGTCGGCTCTCTGAGGCTTGTGTTCTCTCTGCTGGAATAGAGTCTCATCCTGTGTGAGTTTGTCAGACATGCAGCCCCTCATGAACTG
ATACCGATCACCACTTCCCTGTAGCCCGCTTGCTCCTTGGACATCCCAGAACATGTTCTTAGGCTTTCTAGGAAAACAAAACCAACTACAAACA
GCTCTGAGAAGCAATGGAGCCAGTAGGCTTTTCAATTTATAAACCGATAAAGCTCTCGGGGAAGCCAGAAAGCATGAAAGCGGTCCAGCAAGGT
TTAATTAGAGACACTCTTTGCCTGGGAGCATGTTGGAAATCCCAGCACAAGCTAGCAGCAAAATTTACAACCTGTCAGCCTTACACTTGGGACT
TGGGGATGGGGGCAGTACTTCATTGCTCTCCAAGACTTTTCTTCAGGCTTACATTTGCTGCTGTGGGGAGATGGTCAGATCCATTCCTGATGCT
ACAGTAAGGTCTCCATTCTTGTCTCCAGCCAGCCTCCTGGACTCACAGGCCTTCCAGAAGAGGCTGAGCTGGGAGGAGCCAGAGGGAAGCCCTG
AACAACCAGCCAGATGAACCTGTTTGCCAGTAGATTCTTTAAGGCTTTCATTGGGAAATAATAGGAATTCCACACCTGTCTGTTTTGTTATCAG
AACAGGGGCTGGCCCTCTGAGAGCCTCGGAGAAGGGCATCTTAGGGGCAAACTTACCTCCTGGCCCTCTAATTGTTGCCTCATGCCTGAAGCAC
TTGGTGAAACTAGGTACTTCAATGCCAAACAGTCTTGACATCCTTAATAATCCTTAATAATTTAATTAATTATTAATAATTTAATGATCCTTGC
TGATTCAACTATAATGTTGAAAGGGGGGCATCTTTTCATACCTATTGGATCTTAAAAACCACATGGCCTGTCATGAGCGTGAGAATACTAAGAA
TGGATGGCGGTGGGTGTCTTGCCAAATGCTGACGATGTCGAGGAGATGGGCCTCTAACATATTATATTTTTTATGAACATGGAAGTGTGAGTAT
GAGAGTGGAGGGAGATGATAGCCTGATCTGCCAGCTGTGGCATACTGGATGATTATCCAGCACACAAGATCTAACCTGTTCTATTTTGTCTAAT
TTTGCAAGCCAGTTGTTAAACATAGCCACCATTAAAGAGTCTGTTATTTACATGTGTGCTGAGTAAGTTCATAGAAGACAAGCATTGGAAATTG
GTCACTTTCTAATGCGTGGTCATGTTTACTGTTCTGTGTGCTTAGGAGGGTGTGTCCATCATGCCTGTATGGTGAAAAACACTGCAGAGGCTTT
TGCTGCAGTGTAGTGCAGTGCAGTGCAGAGCAGGGCAGCGCCCCCACTGGTCCATCTGCAGCAAGGCAGGCTGGGAGCTTGGCTTTGCCAGTGT
AGTCACACCTTGGAAATAAGCAACATTACTGCCAGCCCAGCCTCCTCAAACCCAACCCCCTAAGAGCTCGAGGTTAAAGGCTTACCAGCATAAC
ACCATTGTCAGTACTAAACCCCGGGGCGCTGTCAGAGCAGAGTCTAGAGGGAGGGGACCCTCAAAGCTGACAATCTTGTTCTGTATCACTCAGT
TAGGAGTAAGGCTAACATAGTTTTTGGGTCTTTCATACCCTAAGTAACCAACCTCCTTGTCTGTGGTCAAGACAAGACAAGGCAAGATGAAGAA
ATTAAACATCAACAAAGCTGGGATTTTCTTAAAGACGTTATTATGGAACAAAGATAAATCCAAGAGATTTCATTTGTAATTGAACCAATTACAT
ATATATATATATATATATATATATATATATATATATATATACATACATATATATATATATATTTTTTTTCCCCCTTAACTCACCTCCACACATT
CTGCAGGATTAAGCGTCTCTTACTTTTTCAATTTCTTATACTTCTGACCTCCACATGTATGACCCATCTCTATCTGCTTAGGGCTCCGTCTGCA
GTGTTCATTTGCTTTTATTCCCTCTGCGTGTTGACAGCTTCAGTGGAATGAACACACGAGCTTTGCTAAGCAGGTGTTTTTTTTTTTGTTTGTT
TGTTTTTTTTTTTTTTTTGTAATGAGTTTGCTGTGTTCCTGATCATGAACAGTCTCTTCATACCTGTTTGTTATCTGCTGTTTACGGTTCTATA
TTGCTAGAGGTTTGCACCTGTTTTCTTGGCTAGCATTTGTTGATGCCTTTCTCCTATTTTCATCCCTTCATTATTTTTACTCTTACAATACGTA
GAAATTCCATGGTTTTATGTAGTTAAATTTGTCTTAGCCTTTTAACCCTTTATTAATTCTAAACTTAAAATCTATACTTCACCCACTTGGAAAA
TATCTTCCTGTCATTTTAATTAAAATGAAAATTATTTTAATTCATTCAGTGTATATAATATGCATTATACAGTCTTGGGAATGATCAGTAAAGT
TTGCAAGTTATTGCTGGAGGAGAGAAAGCCTTTCGCTTTATTTCTGGGATTAGCTTAAAGCCGGTCTGGGTCCTACTACACACTAGACTACTGC
ACACAGGTCATTTTGGCACTCAGAACCCTGCTCTCTCTGACTCTGTCACAGATGATTAAAATCAGTTCTAAAACCAAGCAGTGTCTGGAGGAAG
AAATAGCGTGATCTCAAATATGATATTGAATGTCAACTTGAAGGAAACCCTTCAGAACTGATGTATAAAGTGCTTTTAACTGTTTATAGAACCA
ATAGCCTTAGAAGACTAAAACTCTCGTCACATTTAAATCTCATTTTTCTAAGTTATTTCTGTAGAGTGAACCTATGTTGCTCCTAAGTAGGCCG
TTTTGTGACGAGATACATAAAACATTAACAGTACTTATCTATTTAAATATTCACTGTTATTTTAGAAATAACCAGCCTTTGGATAATTATTGTG
AACAGTACCGTGTTTATGTTAATATTATATATATTTATTTAATTCACACTCTTATGTTCCTATAACTACAAATATTTAACTAATACTCTAAATT
CATATTTTTAAAAAATTTTAATAACTTTTAAAAACCATTTGCTTCACTCTGGGAAACTTCAGAAATACAGTTTAAAAATGAAAAGCATTGGGGC
TGGACACATGGTTCAGAGGTCAAAAGCACTGGCAGTTCTTCCAGAGGATCCTGGTTCAATTCCCAGCACTTACATGGTGACTCACAACGATCTA
TAATTCCAGTTCCAGTAAATCTGACACCCTCACAAACACACATGCAGGCAAAACACGAATGCATGTAAAACAAAATTAAAAATCATTTTAAAAA
CTTTTTAAAAGGAAAAAAATTACAGTTCTGTATCCTACCCCCACAAACAGTGTTAGCTATGAACATTCTTGGATTTGTCTCAGCGTTCTCCTAT
GGATATGCACGGATACTGTGAACATAGTGCATGTCTTGTGATAGATTCTCCATACCTCTGTGTGTTCAATATTCACATCTTAACCAATTGTGAT
CCTGCGATGAACATTACTACGTGCCAAGAAGCGTGCTAGCATACAAGGTTTCTACTCTATCCTAAAATTGATCCTAAGAAAATAATGCTGGCAT
AATTCCATCAAATATGGGACATAAAATTGAGGGTTGCTTGGCAACCAAAATGACGCTGATGAAGAATTAAAGGCATTTCCAGAGAAGAAGAATA
CTGATTTTTCCAATGTAAAGTGCTAATTATAATACCCTAGGGCTGATTACAGATAGAATGAATGAAAGGGAGCAATACTTAAACTAACTGAAAA
TCCAAGAGGCAAGCATTCTTCTTCGTTATGTGTGGCGAAAGTGAGTTAAAGGTTTACTGTCAGAAACGAAGAATAAAATCTCTTGCCTTCATTA
TAACTTCTCTAAGTTATAATGAAGGAGCAGTGAGGTGGGATTTATAGCAGAGCCTAGAAGAGGCTGAAGTCTGCTCAGTCCAGCTGCTTTTGCA
GTGACTGTGAGGTGGCGGGCAGCATCTGAGGAGGCCGTACTGTTTCCTTCCTTTTTAGTGCAGAACAGGCCAGGGCTCAGGCACTGAGCATCTT
GCTAAATGGTTGTACCGTTTGGCAGAACCAGCTGCCAAGATGGAGCTTGAACAAGGGGCACACCAGTGATTGACTGAAATGAACAAAAGAACAT
AGGTACTACTACAGGAGGAAGAAAGAGCAGAGAGTACTAATTTTATCCTGAAGGAGAACACGGATTCATAGGAGCAAGATGGGTGTTGAGTATA
AAATCATCTGAAGGCTCACATGGAAAGTGAGAATTCCCAAGTAGAAGAGCAGACAGTTCTTCTGTCTCCTCTCACTGATCTGCCGAACTGTAGT
ATGGACTTGTTTATATGATCTTTTGAACAGCCCCATTTTAAAGAGGAACTGAAGCACTCAGGAAACGGGTGTCCCCCTAATTATCATATGTGAG
TGAGTGTACTTGTTAACATATAGTCACACCCTACAGAGCACCCTTGAGTCTGTTGAGCAGTTGGCTAACTCTGCGTTCGTTGCTTCCTGCGTGA
GCATAGGGACTTTTCCATACTTCCTTCCTTTCTTTCACACCTTGGATTCCAACTTTACTTCATCCAAGAGCTTCGCCATTTACCTCCAGGCCTG
GGCCACTCCAACCACACAATAAACCAGTTAGCATCTGATACAGTTCTTTCCAGAGGTCAGCCACAGGACCCACACTGCTGGCTACCCAGCTATC
TTCAGTTCCTGCTAAGGATGAGTCCTCACTCTGTAATAACTTGTGAGTTGGCTCTACTCTATGAACATACTCCCCTTACTTATTGTGCCTATAG
TCTCCCGCACTGCCTGCGTGCCCAATGGCTTAGAGTCCTATTACCTTGTCACCAATCACAGGTAGATTTAGCTAACTGAGGAAGTGGACCTTCA
TAGTGTCACAGGGGAAAATATGAA
MOUSE SEQUENCE - mRNA
GGATCCGCGGCCATCGGAACCCTGGGCAAGGCGAGAGAGGCTCCGCGGAAACCTTGCCATGGCTCCAGAGCTGGCCCCAAAGCAAGACTAGAGG
CCAAATCAACCAACAGCCCTCTCCCTGCCCAGCCCACCTTGGCCCAGATCACCCAGTTCCGAATGATGGTGTCCCTGGGACATTTGGCCAAAGG
AGCCAGCCTGGATGATCTTATTGACAGCTGCATTCAATCTTTTGATGCGGATGGAAACCTGTGTCGGAATAACCAACTGTTACAAGTCATGCTA
ACCATGCACCGGATCATCATCTCCTCAGCCGAGCTGCTACAAAAAGTCATGAATCTATATAAGGATGCCCTGGAAAAGAATTCTCCAGGAGTTT
GCCTGAAGATCTGCTATTTTGTCAGGTATTGGATAACAGAATTCTGGATCATGTTCAAGATGGATGCCAGCTTGACCAGCACCATGGAAGAGTT
CCAAGACCTGGTGAAAGCCAATGGTGAGGAGACCCACTGCCACCTCATCGACACGACCCAAATTAATTCTCGAGACTGGTCCAGGAAACTGACT
CAGAGGATAAAATCGAATACTAGCAAGAAGCGCAAAGTGTCCCTGCTGTTTGACCATCTGGAACCTGAAGAACTGTCTGAACACCTCACCTACC
TTGAGTTCAAGTCCTTCCGACGGATATCTTTCTCTGATTACCAAAATTACCTTGTAAATAGCTGCGTAAAAGAGAACCCCACCATGGAGAGGTC
CATTGCCCTGTGCAATGGCATCTCCCAGTGGGTACAACTCATGGTTCTCAGCCCTCCCACCCCGCAGCTCCGGGCAGAGGTCTTCATCTAGTTC
ATCCATGTGGCTCAGAAACTCCACCAGCTACAGAACTTCAACACGCTGATGGCTGTGATCGGGGGACTGTGTCACAGCTCCATCTCCAGGCTTA
AGGAAACAAGTTCACATGTCCCACATGAGATCAATAAGGTTCTGGGCGAGATGACTGAACTGCTGTCCTCCTGCAGAAACTATGACAACTACAG
GCGAGCCTATGGGGACTGCACCCACTTCAAAATCCCCATACTGGGTGTGCACCTCAAGGACCTCATATCCCTGTATGAGGCTATGCCCGACTAT
CTGGAAGATGGGAAGGTGAATGTCCAAAAGCTCCTGGCCCTTTACAATCATATCAATGAATTGGTCCAGCTGGAGGAGATGGCCCCACCATTGG
ATGCCAACAAGGACTTGGTGCATCTGCTGACGTTATCCCTGGATCTATACTATACAGAAGATGAAATCTATGAGCTTTCCTATGCCCGGGAGCC
GAGGAACCACAGAGCTCCGCCACTGACACCTTCGAAGCCACCAGTTGTAGTAGACTGGGCCTCTGGAGTGTCTCCCAAACCTGACCCAAAGACC
ATCAGCAAACACGTCCAAAGGATGGTGGATTCTGTCTTTAAGAACTATGATCTCGACCAGGATGGCTATATCTCTCAGGAGGAGTTTGAGAAGA
TCGCTGCAAGCTTTCCATTTTCCTTCTGTGTGATGGACAAAGATAGGGAAGGCCTCATCAGCAGAGACGAGATCACGGCCTACTTCATGAGGGC
CAGCTCCATCTATTCCAAGCTGGGCCTGGGCTTTCCACACAACTTTCAAGAAACCACTTACCTGAAGCCCACCTTCTGTGACAACTGTGCTGGC
TTTCTCTGGGGCGTGATCAAGCAAGGCTATCGCTGTAAAGACTGCGGGATGAACTGCCACAAACAGTGCAAAGACCTGGTGGTGTTCGAGTGCA
AGAAGCGAATCAAGAGCCCAGCAATATCCACAGAGAACATCAGCTCTGTGGTACCAATGTCCACCCTTTGTCCACTGGGAACCAAAGATCTGCT
CCATGCACCCGAAGAAGGATCTTTCATTTTCCAAAACGGAGAGATTGTGGACCACAGTGAGGAGAGCAAGGATAGGACCATCATGCTCCTCGGA
GTGTCCTCCCAGAAAATTTCAGTTCGGCTGAAGAGGACTGTTGCCCACAAGAGCACCCAAACAGAATCGTTCCCGTGGGTTGGTGGCGAGACGA
CCCCTGGTCACTTTGTGCTGTCTTCTCCAAGGAAGTCGGCCCAGGGCGCTCTTTATGTGCACAGTCCACCATCTCCATGCCCCACCCCAGCACT
GGTCCGAAAGCGGGCATTCGTCAAGTGGGAGAACAAAGAGTCCCTTATAAAACCAAAACCAGAACTTCACCTCCGGCTCCGGACCTACCAAGAA
CTGGAACAGGAAATAAATACCCTGAAAGCAGATAACGATGCTCTGAAGATCCAACTGAAGTACGCACAGAAGAAAATAGAATCCCTGCAGCTTG
GGAAAAGCAATCATGTCTTAGCCCAGATGGACCACGGTGATAGTGCTTAATCCAGAATTTCAAGGACCAGAATCTGCAGACGGGTTTACTGGGA
TGTCGAC
MOUSE SEQUENCE - CODING
GGATCCGCGGCCATGGGAACCCTGGGCAAGGCGAGAGAGGCTCCGCGGAAACCTTGCCATGGCTCCAGAGCTGGCCCCAAAGCAAGACTAGAGG
CCAAATCAACCAACAGCCCTCTCCCTGCCCAGCCCAGCTTGGCCCAGATCACCCAGTTCCGAATGATGGTGTCCCTGGGACATTTGGCCAAAGG
AGCCAGCCTGGATGATCTTATTGACAGCTGCATTCAATCTTTTGATGCGGATGGAAACCTGTGTCGGAATAACCAACTGTTACAAGTCATGCTA
ACCATGCACCGGATCATCATCTCCTCAGCCGAGCTGCTACAAAAAGTCATGAATCTATATAAGGATGCCCTGGAAAAGAATTCTCCAGGAGTTT
GCCTGAAGATCTGCTATTTTGTCAGGTATTGGATAACAGAATTCTGGATCATGTTCAAGATGGATGCCAGCTTGACCAGCACCATGGAAGAGTT
CCAAGACCTGGTGAAAGCCAATGGTGAGGAGACCCACTGCCACCTCATCGACACGACCCAAATTAATTCTCGAGACTGGTCCAGGAAACTGACT
CAGAGGATAAAATCGAATACTAGCAAGAAGCGCAAAGTGTCCCTGCTGTTTGACCATCTGGAACCTGAAGAACTGTCTGAACACCTCACCTACC
TTGAGTTCAAGTCCTTCCGACGGATATCTTTCTCTGATTACCAAAATTACCTTGTAAATAGCTGCGTAAAAGAGAACCCCACCATGGAGAGGTC
CATTGCCCTGTGCAATGGCATCTCCCAGTGGGTACAACTGATGGTTCTCAGCCGTCCCACCCCGCAGCTCCGGGCAGAGGTCTTCATCAAGTTC
ATCCATGTGGCTCAGAAACTCCACCAGCTACAGAACTTCAACACGCTGATGGCTGTGATCGGGGGACTGTGTCACAGCTCCATCTCCAGGCTTA
AGGAAACAAGTTCACATGTCCCACATGAGATCAATAAGGTTCTGGGCGAGATGACTGAACTGCTGTCCTCCTGCAGAAACTATGACAACTACAG
GCGAGCCTATGGGGAGTGCACCCACTTCAAAATCCCCATACTGGGTGTGCACCTCAAGGACCTCATATCCCTGTATGAGGCTATGCCCGACTAT
CTGGAAGATGGGAAGGTGAATCTCCAAAAGCTCCTGGCCCTTTACAATCATATCAATGAATTGGTCCACCTGCAGGAGATGGCCCCACCATTGG
ATGCCAACAAGGACTTGGTGCATCTGCTGACGTTATCCCTGGATCTATACTATACAGAAGATGAAATCTATGAGCTTTCCTATGCCCGGGAGCC
GAGGAACCACAGAGCTCCGCCACTGACACCTTCGAAGCCACCAGTTGTAGTAGACTGGGCCTCTGGAGTGTCTCCCAAACCTGACCCAAAGACC
ATCAGCAAACACGTCCAAAGGATGGTGGATTCTGTCTTTAAGAACTATGATCTCGACCAGGATGGCTATATCTCTCAGGAGGAGTTTGAGAAGA
TCGCTGCAAGCTTTCCATTTTCCTTCTGTGTGATGGACAAAGATAGGGAAGGCCTCATCAGCAGAGACGAGATCACGGCCTACTTCATGAGGGC
CAGCTCCATCTATTCCAAGCTGGGCCTGGGCTTTCCACACAACTTTCAAGAAACCACTTACCTGAAGCCCACCTTCTGTGACAACTGTGCTGGC
TTTCTCTGGGGCGTGATCAAGCAAGGCTATCGCTGTAAAGACTGCGGGATGAACTGCCACAAACAGTGCAAAGACCTGGTGGTGTTCGAGTGCA
AGAAGCGAATCAAGAGCCCAGCAATATCCACAGAGAACATCAGCTCTGTGGTACCAATGTCCACCCTTTGTCCACTGGGAACCAAAGATCTGCT
CCATGCACCCGAAGAAGGATCTTTCATTTTCCAAAACGGAGAGATTGTGGACCACAGTGAGGAGAGCAAGGATAGGACCATCATGCTCCTCGGA
GTGTCCTCCCAGAAAATTTCAGTTCGGCTGAAGAGGACTGTTGCCCACAAGAGCACCCAAACAGAATCGTTCCCGTGGGTTGGTGGCGAGACGA
CCCCTGGTCACTTTGTGCTGTCTTCTCCAAGGAAGTCGGCGCAGGGCGCTCTTTATGTGCACAGTCCAGCATCTCCATGCCCCAGCCCAGCACT
GGTCCGAAAGCGGGCATTCGTCAAGTGGGAGAACAAAGAGTCCCTTATAAAACCAAAACCAGAACTTCACCTCCGGCTCCGGACCTACCAAGAA
CTGGAACAGGAAATAAATACCCTGAAAGCAGATAACGATGCTCTGAAGATCCAACTGAAGTACGCACAGAAGAAAATAGAATCCCTGCAGCTTG
GGAAAAGCAATCATGTCTTAGCCCAGATGGACCACGGTGATAGTGCTTAATCCAGAATTTCAAGGACCAGAATCTGCAGACGGGTTTACTGGGA
TGTCGAC
HUMAN SEQUENCE - GENOMIC
GGTGCTTGGGAGGGCATGGCTGGAGAGGTAAGATCCAGTCATGCAGGTACATGATGTTAAAAAGTTTGCACTTTATTCTGTAGGCAATTGGAGA
CTCCTAGGCAGTTTAGAAGCAAAAGAATTATGTGACCATGTACATGAAAGAAGCAACATGAAAGAAGAATCAGAGAAAAGGAGGTTATGTAATT
AGGGACGCCAGTTACAAAGCTATTACACATGTCCAGGTAAGAGATGATGGGGGCTTAGACCAGCATGTGGCTTTAAAGATGGAGAGGAAGCCCT
TGGGAACAATGAAAGGAGGTGGTGGTTGAAAATGTGGGTCTAAATGCTAGGTGACATAGGTGGATATTCGGACAGAAGAGTCATATAGGTCCTG
CTGAGGCCATGGGAGAAAATTAAAACACCTACTTTGAGTAACGGATCATTTAGAAAATCTGAAGAAAGCTAACAACCCTTCCCCCAGAAAAAAC
ATACACAAAAATTTAGATATAGTTTCAGAAGCTTCACATATAGTATAGTCCCTTCTCCCCAGTTAATCTCCTCATGGACATTAATTAAGAGTCC
ATGATTGAGAGAAGGAAGAATAACAAAGAAAGCATCCAGAGGAAGGGCCTCACCCAAGGGGTGAGAAGAGGAAGACTCCCCAACCAGACACCTA
GGAAAAATAGAAGAGAGGGTAAATGAGGGTACAAGATAACACACTTGGGTGGCTGGCAAGATGGCCAAATAGGAACAGCTCTGGTCTGCAGCTC
CCAGCGAGATCAACACAGAAGGCACATGATTTCCGCATTTCCAACTGAGGAAACTGGCTCATCTCATTGGGACTGGTTAGACAGTGGGTGCAGC
CCACGGAGGGCGAGCCAAAGCAGGGTGGGGCATCACCTCACCAGGGAAGTGCAAGGGGCCAGGGAACGCCCTCCCTAGCCAAGGGAAGCTGTGA
GGGATTGTGCCATGAGGAATGGTACACTCTGGCCCAGATACTACACTTTTCCCACAGTCTTTGCAACTCGCAGACCAGGAGATTCCCTCAGGTG
CCTATGCCACCAGGGCCCTGGGTTTCAAGCACAAAACTGGGCAGCCATTTGGGCAGACACTGAGCTAGCTGCAGGAGTTTTTTTTTTCATACCC
CAGTGGCACATGGAATGCCAGTGAGACAGAACCATTCACTCCCCTGGAAAGGCGTCTAAAGCCAGGGAGCCAAGTGGTCTAGCTCAGCGTATCC
CACCCCCACAGAGCCCAGCAAGCTAAGATCCACTGGCTTGAAATTCTCGCTGCCAGCCCAGCAGTCTGAAGTCAACCTGGCACACTCAAGCTTG
GTGCGGGGAGGAGCATCTGCCATCACTGAGACTTGAGTAGGCCGTTTTCCCCTCACAGTGTAAATGAAGCCGCTAGGAAGTTCGAACTGGGCAG
AACCCACTGCAGCTCCACAAAGCCTCTGTAGCCAGACTGCCTCTCTAGATTCCTCCTCTCTGGGCAGGGCATCTCTGAAAGAAAGGCAGCAGCC
CCAGTCAGGGGCTTATAGATAAAACTCCCATCTCCCTGGAACAGAGCACCTGGGGGAAGGGGTGGCTGTGGGCCTCCTCCTGGCTCTGAAGAGA
GCAGTGGATCTCTAGCACAGTGTTTGAGCTCTGCTAAGGGACAGACTGCCTCCTCAAGTGGGTCCCTGACCCCTATGCCTCTTGACTGGGCGAC
ACCTTCCCGCAGGGGTCGACAAACACCTCATACAGAAGAGCTATGGCTGGCATCTGGCAGGTGCCCCTCTGGGACAAAGCTTCCAGAGAAAGGA
ACAGCCAGCAATCTTTGTTGTTCTGCAGCCTCTGCTGGTGATACGCAGGCAAACAGGGTCTGGAGCGGACCTCTAGCAAACTCCAGCAGACCTG
CAGCAGAGGGGCCTGACTGTTGGAAGGAAAACTAACAAAGAGAAAGGAATAACATCAACATGAACAAAAAGGATGTCCACACCAAAACCCCATC
CAACGGTCACCAGCATCAAAGACCAAAGGTAGATAAATCCATGAAGATTAGGCAAACCAGCACAAAAAGGCTGAAAATTCCAAAAACCAGAATG
CCTCTTCTCCTCCAAAAGATCACAACTCCTCACCAGCAAGGGAACAAAACTGGATAGAGAATGAGTTTGACGAATTGACAGAAGTAGGTTTCAG
AAGGTGGGAAATAACAAACTACTCCAAGATAAAGGGGCATGTTCTAACCCAATGCAAGGAAGCTAAGAACCTTGAAAAAAGGTTAGATGAATTG
CTAACTAGAATAAACAGTGTAGAGAAGAATGTAAATGACCTGATGGAGCTGAAAAACACAACACGAGAACTTCGCGAAGCATACACAAGTATCA
ATAGCTGAATCAATCAAGTGGAAGAAAGGATATCAGAGACTGAAGATCAACTTAATGAAATAAAGCATGAAGACAAGATTAGAGAAAAAAGAAT
GAAAAGGAATGAACAAAGCCTCCAAGAAATATGGGACTATGTGAAAAGACCAAACCTACATTTGATTGGTGTACCTGAAAGTGACGGGGAGAAT
GGAACCAACTTGGAAAACACTCTTCAGGATATTATCCAGGAGAACTTCCCCAACCTAGCAAGACAGGCCAACATTCACATTCAGGAAATATAGA
AAATGCCACAAAGATACTCCCTGAGAAGAGCAACCCCAAGACACATAATCATCAGATTCACCAAGGTTGAAATGAAGGAAAAAATGTTAAGGGC
AGCCAGAGAGAAAGGTCGGGTTACCCTCAAAGGGAAGCCCATCAGACTAACAGTGGATCTCTCTGCAGAAACTCTACAAGCCAGAAGAGAGTGG
GGCCCAATATTCAACATTCTTAAAGAAAAGAATTTTCAACGCAGAATCTCATATCCACACAAACTAAGCTTCATAAGTGAAGGAGAAATAAAAT
CCTTTACAGACAAGCAAATGCTGAGAGATTTTGTCACCACCACCCCTGACTTACAAGAGCTCCTGGAAAGGAAAAACCAGTACCAGCCACTGCA
AAAATATACCAAATTGTAAAGACCATCGACACTATGAAGAAACTGCATAAACTAATGCGCAAAATAACCAGCTAGCATCATAATGGCAGGATCA
AATTCACAATAACAATATTAACCTTACATGTAAACGGGCTAAATGCCCCAATTAAAAGATACACACTCCCAAACTGGATAAAGAGTCAAGACTC
ATTGGTGTGCTGTATTCAGGAGACCCATCTCACATGCAAAGACACACATAGACTCAAAATAAACGGATGGAGGAATATTTACAAAGCAAATGGA
AAGCATAAAAAAGCAGGGCTTGCAATCCTAGTCTCTGATAAAACACACTTGCAACCAACAAAGATCAAAAAAGACAAAGAAAGACATTACATAA
TGGTAAAGGGATCAATGCAACAAGAAGATCTAAATCGTAAATACATATGCACCAAATACAGGAGCACCCAGATTCATAAAGCAAGTTCTTAGAG
ACCTACAAAGACACTTACATTCCCACACAATAATACTGGGAGACTTTAACACCCCACTGTCAATATTAGACCCATCAACGACACACAAAATGAA
CAAGGGTATTCAGGACTTGAACTCAGCTCTGGACCAAGCAGACCTAATAGACATCTACAGAACTCTCCACCCCAAATCAACAGAATATACATTC
TTCTCAGCACCACATCACACTTATTCTAAAATTGACCACATAATTAGAAGTAAAACACTCCTCACCAAATGCAAAATAATGCAAATCATAACAA
ACGGTCTCTTGGACCACAGTGCAATCAAATTAGAACTCAGGATTAAGAAAGTCACTCAAAACCGCACAACTACATCGAAACTGAACAACTTGCT
CCTGAATGACTACTGGGTAAATAAAAAAATGAAGGCAGAAATAAATAAGTTCTTCGAAACCAATAAGAACAAAGACATAACATACCAGAATGTC
TGGGACACAGCTAAAGCAATGTTAAGAGGAAAATTTATAGCACTAAATGCCCACATCAGAAAGGAGGAAAGATCTAATATTGACACCATAACAT
CACAATTAAAAGAACTAGAAAAGCAAGAGTAAACAAATTAAAAAGCTAGCTGAAGACAAGTCACAACAAAGATCAGAGGAGAACTGAAGGAGAT
ACAGACACACACAAAAAAAACCTTCAAAAAATCAATGAATCCAGGAGGTAGTTTTTTGAAAAGATTAACAAAATAGATAGCCCACTAGCCAGAC
TAATAAAGAAGAAAAAGAGAAGAATCAAACAGACACAATAAAAATGATAAAGGGGATATCACCACTGATACCACAGAAATACAAACTACCATCA
GAGAATACTATAAATACTTCTATCCAAACAAACTAGAAGAAATGGATAAATTCCTGGACACATACACCCTCCCAAGACTAAACCAGGAAGAAGT
CAAATCCCTGAATAGACCAATAACAAGTTCTGAAATTGAGGCAGTAATTAATAAGCTACCAATCAAAACAAAAGCCCAGGACCAGTTGGATTCA
CAGCCAAATTCTACCAGAGGTACAAAGAGGAGCTGGTACCATTCCTTCTGAAACTATTTCAAACAATAGAAAAAGAGGGAATCCTCCCTATCTC
ATTTTATAAGGCCAGTGTCATCCTGATACCAAAGCCTGGCAGAGACACAACAAAAAAAGAAAATTTCAGGCCAATATCCCTGATGAACATCGAT
ATGAAAATCCTCAATAAAATACTGGCAAACTGAATCCAGCAGCACATCAAAAAGCTTATCCACCATGATCAAGTCAGCTTCATCCTAGGGATGC
AAGGCTGGTTCAACATATGCAAGTCAATAAATGTAATCCATCACATAAACACAACCAATGACAAAAACCACACGATTATCTCAACAGATGCAGA
AAAGGCCTTCAATAAAATTGAACACCCCTTCATGCTAAAAACTCTCAATAAACTAGGTATTGATGGAATGTATCTCAAAATAATAAGAGCAATT
TATGACAAACCCACAGCCAATATCATACTGAATGGGCAAAAGCTGGAAGCATTCCCTTTGAAAATCAGCACAAGACAAGGAGGCCCTCTCTCAC
CACTCCTATTCAACATAGTATTGGAAGCTCTGGCCAGGGCAATCATGCAAGAGAAAGAAATAAAGCGTATTCAAATAGGAAGAGAGGAAGTTGA
ATTGTCTCTGTTTGCAGATCACATAATTGTATATTTAGAAAACCCCATCATCTCAGTCCAAAATCTCCTTAAGCTAATAAGCAACTTCAGCAAA
GTCTCAGCATACAAAATCAATGTTCTAAAATCACAAGCATTCCTATACACAAATAATAGACAGAGAGCCAAATCATGAGTAAACTCCCATTCAC
AATTGCTACTAAGAGAATAAAATACCTAGGAATACAACTTACAAGGGATATGAAGGACCTCTTCAAGGAGAACTACAAACCACTGCTCAAGGAA
ATAAGACAGGACACAAACAAATGGAAAAACATTCCATGCTCATGGATAGGAAGAATCAATATTGTGAAAATGGCCATACTGCCCAAAGTAATTT
ATAGATTCAATGCTATCCCCATCAAGCTAACATTGACTTTCTTCACAGAATTAGAAAAACCTGCTATAAATTTCATATGGAAGCAAAAAAGAGC
CTTTATAGCCAAGACAATCCTAAGCCAAAAGAACAAAGCTGGAGGCATCACACTACCTGACTTCAAACTATACTACAAGGCTACAGTAAAAAAA
AAACAGCATGGTACCAGTACCAAAACAGAGATATAGACCAATGGAACAGAACACAGCCCTCAGAAATAATGCTACACATCTACAACCATCTGAT
CTTTGAGAAACCTGAGAAAAACAAACAATGGGCAAAGGACTCCCTATTTAATAAATGGTGTTGGGAAAACTGGCTAGCCATATGAAGAAAACTG
AAACTGGACCCCTTTCTTATACCTTGTACAAAAATCAACTCGAGATGGATTAAAGGCTTAAACATAAGACCTAAAATCATAAACACCCTAGAGG
AAAACCTAGGCAATAGCATTCAGGACATAGACATGGGCAAAGACTTCATGACTAAAACACCAAAAGCAATCGCAACAAAAGCCAAAATTGACAA
ATGGGATCTAACTAAACTAAAGAGCTTCTGCACAGCAAAAGAAAATATCATCAGAGTGAACAGGCAACCTACAGAATGGGAGAAAATGTTTGCA
ATCTACCCATCTGACAAAGGGCTAATATCCAGAATCTACAAAGAACTTAAACAAATTTACAAGAAAAAACAAACAACCCCATCAAAAAGTGGGC
GAAGGATATGAACAGACACTTCTCAAAAGACATTTATGTGGCCAACAAACATATGAAAAAAAGCTCATCATCACTAGTCATTAGAGAAATGCAA
ATCAAAACTACAATGAGATACCATCTCATGCCAGTTAGAATGGCAATCATTAAAAAGTCAGGAAACAACAGATGCTGGAGAGAATGTGGAGAAA
TGGGAACACTTTTACACTGTTGGTGGGAGGGTAAATTAGTTCAACCATTGTGGAAGACAGTGTGGCAACTCCTCAAGGATCTAGAACCAGAAAT
ACCATTTGGCGCAGCAATCCCATTACTGGGTATATACCCAACGGGATTATAAATCATTCTACTATAAAGACACATGCACATGTATGTTTACTGC
AGCACTGTTCACAATAGTAAAGACTTGGAACCAACCCGAATGCCCATCAATGATAGACTGGATAAAGAAAACGTGGCACATATACACCACGGAA
TACTATGCAGCCATAAAAAAGGATGAGTTCATCTCCTTTGCAGGGATATGGATGAAGCTGGAAACCATCATTCTCAGCCAACTAACACAGGAAT
GGAAAACCAAACACCGCATGTTCTCACTCATAAGTGGGAGTTGAACGATGAGAACACATGGATACAGGGAGGGGAACATCACACACTGGGGCCT
GTCTGGGGGTGGGAGCTAGGGGAGGGATAGCATTAGGAGAAATACCTAATGTAGATGACGGGTTGATGGGTGCAGCAAACCACCGTGGCACTTG
TATACCTATATTACAAACCTGCACGTTCTGCACATGTATCCCAGAACTTAAAGTATAATGATTTTTTTAAAAGCACGAATATTATCCTCATTAG
CTACCTTATAAGAATGTTATATTAAATGATGTATTTTGTGAAAAAAAAAAAAAGTTTGTTCTTGAGGTCAGAGGTGCCTCATATAACACCAGGC
AGACTAATCACATGGCCGATGATTAAAAGAGAGATAGACAAACTTCTCATTTTTTAGATCTTTGGAAAAGACTTATTGCTCAGGTAGGAGTAGC
CAGAAAACCTCAAAAAAGAGCTCGAGGGGGCCCAGAAGCAGAATCAGATGCAAGTGAAGTGCAGAGTACTCAGAAAGTCCAAGAGAAAAACACT
CGCTGGGCATATGTAGGCCTCTTTCTTTAGAAAACTCAGCAAGACTCATGTATTGAATGAATTAATAACCTTGGTTTCAACCATTTGTATATAT
GTGGACTGTAGGTGTGCAGATGTGTGTAACTGCCTACATGTGCACTTAGTATTATGCATATATGTATATTTACATATAAATATAATGATGCATT
TACATAAAGGCATCCATTTGGCATACATACCTATGCATATGCAGTATAAGGCTGGATTATTCCCCTGCCACACACAAAGATTTTGCTGTCCAAA
GACTCAGTGCAATGAATGGCATGGAAGGGGCTCTATTTTCAAGGGTGAAGCAATAGAGAAATACCGAAGGCCTCGGATAACCTGTGATGGGGAT
CCCACGAAAGCCACCGGGGACAGTGCCAGTAAGCTTATCACTCCTGCCATAGACAGCGGACTTCAAAGAAAAACTGAAACCCTTTCTCCGGAAA
TAATCAGGAAGGATCTTATTTTCTTCTTTGAGGTCAGCACATTTTGCTTTTCAAAATCAAATCCACAGCAGTTCATTAGTAATGTCCCACAGGT
ACTGCCTCAAGTTGGCAGCTGTGGAAGCTAAAGAAGCATAAGACCTGATTCTTGACCTCGGACAATTTACAGTTTAGCTGTGGAGGTAAGACAG
GGACACAGAATATTATGTGGCAATTGAAAGTGTAAATATTATAGATTTAAGTAGGGTAAAGAGCTCATTCTGTAGTAGAGGGGTCAGTGAAAAG
TAATTGTTCACCTGGTAATAAGAGAAGATCTCTGTGAACAAAGTCTAAGACTGCAAACTTAGGACTGTTGGGAGATAGTCAGATAGATTCATAT
ATAGATACAAATCTTTACCATCCTCAGACATCCGCCAACTTGGTTGTTTAGGTTGTAGGGCTTACATGAGGAAGGGTGTATAATAGATAACTCT
AAAAATGTTTGAGCCTTAGACCCAGTGAGTGAGAAAGAGTGTCATCATTTAATATTCTCCTGACATTCACCTGCCCCTTCTGCATCTGTGGCTG
TGACTGAGGACTTGGTTCTTTATATCACCCAGTGTTCATGAGGATTCTCTGGAGAAATTTCTTGCTGGTCTCAGTATCAAGAAAGGGGGATCTT
CTCTTGAGCAATTTTGTTTTTGGTCTTGCATGTGATAGGAATTGAACTTTAGACAAGGCCTCTCTTTAAACTTGACTGCTAGAAATGCAGGAGA
CAAATTTTGGTCCCACCTGTAGCAAGGGTATTTGACTCTATGAGATGCATTTATTTCAAATGATGTTCATTTTTGGCTCCATCTTGTGTGCCTC
ATTTTTCATTTCACACACTTCTTTTTGTAGGTTATGTGCTCTTGTAAGCTATCTCGAATTCTGTTTTAAGGACAAGGTAGCATATAAATATAAG
GAAATATATAAATGAAACAGAGGAAGGCTTTAAAGTCCAGAACACTATGGCCAGGAAGACAACTATGACTGTGGCTAGACTTATGGTCTGTGGC
CGTGATAATGAGTGTGTTATTAGGGCAGTCCAGCAGTGATTACAGGGAGTCAGACAGACCTCAGTCCAAGTCAGAGGTCTCTCTGCTGTTTATT
AGTTGTATGATCTAAGGCATAGCATTCTCTAAACCTTCATTTTCTCATCTTTACAACAGTGATCTCTTTGTATCAGGGAGAGTGGATTAAATGA
GGTAATGTATACAAACCACTTAGCACAACCGCACTCAATCATTAGCTATTGAGATTATCAGCACTATCACCTGGACAAGCAGCGGATCGGGCGC
CCCTCTTGGCCAGGTCTTCTGTGCGCACTGACGTTGTATGAAAGTTGTCCCCACATCTCCTACACCCACCGACGCCAGGCGGCCGCGTCTGGGC
CAGATATGGATCACGCCTGTGGAGCGCACCTCCACACAGGCAGCCCTCGTCCAAGGTGCAGGGCGCAGGGCACAGGGCACATCTCTACGGCCCA
GTCCTGCAGACGGCTACCTAGAGAGGGCAGGCCACAGGTTAAGCCAACTTCACAACTGTCTTTCCGTTCCTTTCCCCTGCCGGACTCCGCGCTC
TGATATATACAGGAGAGGCCCTGGAGGGGAGAAGGCGTCCTCACTGCAGTGCTCCCAGCAGCCGCCGCAGGAAGAGGCGTGGAAGCTGCGGGTC
GGCTGCGGGAAAGGGGGTCCCATGGGAGCCGCTAGCGCAGCCCGTTTCCCGAGCTGAGGTGGAGGTCGAAACGCACAGGTGCCCTGCAAGGCGC
GGGCGTGGTAGCCGGGAGCCCGCTCCTCTCCAACTCCCCTGAGACTTAACCCTTTGGCCAAGAGAGGTCGAAGGCGGGCAGGGGTGAGAGAACC
GCGAGGCGCAGGCCGGGCACCCGCGGAAAGGGGGCAGGTTTCGGGGAAGAGCGGGGCGCCGCACGTTTCCTGCAGCCGCCAGCATCAGCGTGTC
AGGTGGTTGCCAGGCGGGTGTGAGCGCGCGCGCGAGGCAGAGGGGGCGCGCTCGCACAAAGTTTGTGCCTGCGGTGCACCTCGGTCGGGCTCGC
CGGGCTCGAGGGCTGGCGGGCGCCGGGGCTACGAGGCCCGGGGGGGAGAGAGCCGGCAGGCGGCGGCGGTGGTGGCGGGGCGATGCGCGCGCC
CGGCCGCGCTAGGTGAGCCGGCACCGGGAGCCGGCCGCGGCCATGGGCACCCTGGGCAAGGCGAGAGAGCTCCGCGGTGAGTAGAGGCGCAGTG
GCCCTCGGGAGCGCCTGTGTCCTTTCTTGGGAAAGAGGCCCCTGCCCGTCGCCCCAACACCCCGAGGGAAGTTGAGGGCGGAGGGGGGCCGGGG
TCGGCCGGAGTCCCGGGACACCAGCGCGACGGGCGGACGTGTCCAGAACGCCCGCGCGCCCGGGGTTTCGGNNNNNNNNNNNNNNNNNNNNNNN
NNNNNNNNNNNNNNNNNNNNNNNNNNNNNNNNNNNNNNNNNNNNNNNNNNNNNNNNNNNNNNNNNNNNNNNNNNNNNNNNNNNNNNNNNNNNNN
NNNNNNNNNNNNNNNNNNNNNNNNNNNNNNNNNNNNNNNNNNNNNNNNNNNNNNNNNNNNNNNNNNNNNNNNNNNNNNNNNNNNNNNNNNNNNN
NNNNNNNNNNNNNNNNNNNNNNNNNNNNNNNNNNNNNNNNNNNNNNNNNNNNNNNNNNNNNNNNNNNNNNNNNNNNNNNNNNNNNNNNNNNNNN
NNNNNNNNNNNNNNNNNNNNNNNNNNNNNNNNNNNNNNNNNNNNNNNNNNNNNNNNNNNNNNNNNNNNNNNNNNNNNNNNNNNNNNNNNNNNNN
NNNNNNNNNNNNNNNNNNNNNNNNNNNNNNNNNNNNNNNNNNNNNNNNNNNNNNNNNNNNNNNNNNNNNNNNNNNNNNNNNNNNNNNNNNNNNN
NNNNNNNNNNNNNNNNNNNNNNNNNNNNNNNNNNNNNNNNNNNNNNNNNNNNNNNNNNNNNNNNNNNNNNNNNNNNNNNNNNNNNNNNNNNNNN
NNNNNNNNNNNNNNNNNNNNNNNNNNNNNNNNNNNNNNNNNNNNNNNNNNNNNNNNNNNNNNNNNNNNNNNNNNNNNNNNNNNNNNNNNNNNNN
NNNNNNNNNNNNNNNNNNNNNNNNNNNNNNNNNNNNNNNNNNNNNNNNNNNNNNNNNNNNNNNNNNNNNNNNNNNNNNNNNNNNNNNNNNNNNN
NNNNNNNNNNNNNNNNNNNNNNNNNNNNNNNNNNNNNNNNNNNNNNNNNNNNNNNNNNNNNNNNNNNNNNNNNNNNNNNNNNNNNNNNNNNNNN
NNNNNNNNNNNNNNNNNNNNNNNNNNNNNNNNNNNNNNNNNNNNNNNNNNNNNNNNNNNNNNNNNNNNNNNNNNNNNNNNNNNNNNNNNNNNNN
NNNNNNNNNNNNNNNNNNNNNNNNNNNNNNNNNNNNNNNNNNNNNNNNNNNNNNNNNNNNNNNNNNNNNNNNNNNNNNNNNNNNNNNNNNNNNN
NNNNNNNNNNNNNNNNNNNNNNNNNNNNNNNNNNNNNNNNNNNNNNNNNNNNNNNNNNNNNNNNNNNNNNNNNNNNNNNNNNNNNNNNNNNNNN
NNNNNNNNNNNNNNNNNNNNNNNNNNNNNNNNNNNNNNNNNNNNNNNNNNNNNNNNNNNNNNNNNNNNNNNNNNNNNNNNNNNNNNNNNNNNNN
NNNNNNNNNNNNNNNNNNNNNNNNNNNNNNNNNNNNNNNNNNNNNNNNNNNNNNNNNNNNNNNNNNNNNNNNNNNNNNNNNNNNNNNNNNNNNN
NNNNNNNNNNNNNNNNNNNNNNNNNNNNNNNNNNNNNNNNNNNNNNNNNNNNNNNNNNNNNNNNNNNNNNNNNNNNNNNNNNNNNNNNNNNNNN
NNNNNNNNNNNNNNNNNNNNNNNNNNNNNNNNNNNNNNNNNNNNNNNNNNNNNNNNNNNNNNNNNNNNNNNNNNNNNNNNNNNNNNNNNNNNNN
NNNNNNNNNNNNNNNNNNNNNNNNNNNNNNNNNNNNNNNNNNNNNNNNNNNNNNNNNNNNNNNNNNNNNNNNNNNNNNNNNNNNNNNNNNNNNN
NNNNNNNNNNNNNNNNNNNNNNNNNNNNNNNNNNNNNNNNNNNNNNNNNNNNNNNNNNNNNNNNNNNNNNNNNNNNNNNNNNNNNNNNNNNNNN
NNNNNNNNNNNNNNNNNNNNNNNNNNNNNNNNNNNNNNNNNNNNNNNNNNNNNNNNNNNNNNNNNNNNNNNNNNNNNNNNNNNNNNNNNNNNNN
NNNNNNNNNNNNNNNNNNNNNNNNNNNNNNNNNNNNNNNNNNNNNNNNNNNNNNNNNNNNNNNNNNNNNNNNNNNNNNNNNNNNNNNNNNNNNN
NNNNNNNNNNNNNNNNNNNNNNNNNNNNNNNNNNNNNNNNNNNNNNNNNNNNNNNNNNNNNNNNNNNNNNNNNNNNNNNNNNNNNNNNNNNNNN
NNNNNNNNNNNNNNNNNNNNNNNNNNNNNNNNNNNNNNNNNNNNNNNNNNNNNNNNNNNNNNNNNNNNNNNNNNNNNNNNNNNNNNNNNNNNNN
NNNNNNNNNNNNNNNNNNNNNNNNNNNNNNNNNNNNNNNNNNNNNNNNNNNNNNNNNNNNNNNNNNNNNNNNNNNNNNNNNNNNNNNNNNNNNN
NNNNNNNNNNNNNNNNNNNNNNNNNNNNNNNNNNNNNNNNNNNNNNNNNNNNNNNNNNNNNNNNNNNNNNNNNNNNNNNNNNNNNNNNNNNNNN
NNNNNNNNNNNNNNNNNNNNNNNNNNNNNNNNNNNNNNNNNNNNNNNNNNNNNNNNNNNNNNNNNNNNNNNNNNNNNNNNNNNNNNNNNNNNNN
NNNNNNNNNNNNNNNNNNNNNNNNNNNNNNNNNNNNNNNNNNNNNNNNNNNNNNNNNNNNNNNNNNNNNNNNNNNNNNNNNNNNNNNNNNNNNN
NNNNNNNNNNNNNNNNNNNNNNNNNNNNNNNNNNNNNNNNNNNNNNNNNNNNNNNNNNNNNNNNNNNNNNNNNNNNNNNNNNNNNNNNNNNNNN
NNNNNNNNNNNNNNNNNNNNNNNNNNNNNNNNNNNNNNNNNNNNNNNNNNNNNNNNNNNNNNNNNNNNNNNNNNNNNNNNNNNNNNNNNNNNNN
NNNNNNNNNNNNNNNNNNNNNNNNNNNNNNNNNNNNNNNNNNNNNNNNNNNNNNNNNNNNNNNNNNNNNNNNNNNNNNNNNNNNNNNNNNNNNN
NNNNNNNNNNNNNNNNNNNNNNNNNNNNNNNNNNNNNNNNNNNNNNNNNNNNNNNNNNNNNNNNNNNNNNNNNNNNNNNNNNNNNNNNNNNNNN
NNNNNNNNNNNNNNNNNNNNNNNNNNNNNNNNNNNNNNNNNNNNNNNNNNNNNNNNNNNNNNNNNNNNNNNNNNNNNNNNNNNNNNNNNNNNNN
NNNNNNNNNNNNNNNNNNNNNNNNNNNNNNNNNNNNNNNNNNNNNNNNNNNNNNNNNNNNNNNNNNNNNNNNNNNNNNNNNNNNNNNNNNNNNN
NNNNNNNNNNNNNNNNNNNNNNNNNNNNNNNNNNNNNNNNNNNNNNNNNNNNNNNNNNNNNNNNNNNNNNNNNNNNNNNNNNNNNNNNNNNNNN
NNNNNNNNNNNNNNNNNNNNNNNNNNNNNNNNNNNNNNNNNNNNNNNNNNNNNNNNNNNNNNNNNNNNNNNNNNNNNNNNNNNNNNNNNNNNNN
NNNNNNNNNNNNNNNNNNNNNNNNNNNNNNNNNNNNNNNNNNNNNNNNNNNNNNNNNNNNNNNNNNNNNNNNNNNNNNNNNNNNNNNNNNNNNN
NNNNNNNNNNNNNNNNNNNNNNNNNNNNNNNNNNNNNNNNNNNNNNNNNNNNNNNNNNNNNNNNNNNNNNNNNNNNNNNNNNNNNNNNNNNNNN
NNNNNNNNNNNNNNNNNNNNNNNNNNNNNNNNNNNNNNNNNNNNNNNNNNNNNNNNNNNNNNNNNNNNNNNNNNNNNNNNNNNNNNNNNNNNNN
NNNNNNNNNNNNNNNNNNNNNNNNNNNNNNNNNNNNNNNNNNNNNNNNNNNNNNNNNNNNNNNNNNNNNNNNNNNNNNNNNNNNNNNNNNNNNN
NNNNNNNNNNNNNNNNNNNNNNNNNNNNNNNNNNNNNNNNNNNNNNNNNNNNNNNNNNNNNNNNNNNNNNNNNNNNNNNNNNNNNNNNNNNNNN
NNNNNNNNNNNNNNNNNNNNNNNNNNNNNNNNNNNNNNNNNNNNNNNNNNNNNNNNNNNNNNNNNNNNNNNNNNNNNNNNNNNNNNNNNNNNNN
NNNNNNNNNNNNNNNNNNNNNNNNNNNNNNNNNNNNNNNNNNNNNNNNNNNNNNNNNNNNNNNNNNNNNNNNNNNNNNNNNNNNNNNNNNNNNN
NNNNNNNNNNNNNNNNNNNNNNNNNNNNNNNNNNNNNNNNNNNNNNNNNNNNNNNNNNNNNNNNNNNNNNNNNNNNNNNNNNNNNNNNNNNNNN
NNNNNNNNNNNNNNNNNNNNNNNNNNNNNNNNNNNNNNNNNNNNNNNNNNNNNNNNNNNNNNNNNNNNNNNNNNNNNNNNNNNNNNNNNNNNNN
NNNNNNNNNNNNNNNNNNNNNNNNNNNNNNNNNNNNNNNNNNNNNNNNNNNNNNNNNNNNNNNNNNNNNNNNNNNNNNNNNNNNNNNNNNNNNN
NNNNNNNNNNNNNNNNNNNNNNNNNNNNNNNNNNNNNNNNNNNNNNNNNNNNNNNNNNNNNNNNNNNNNNNNNNNNNNNNNNNNNNNNNNNNNN
NNNNNNNNNNNNNNNNNNNNNNNNNNNNNNNNNNNNNNNNNNNNNNNNNNNNNNNNNNNNNNNNNNNNNNNNNNNNNNNNNNNNNNNNNNNNNN
NNNNNNNNNNNNNNNNNNNNNNNNNNNNNNNNNNNNNNNNNNNNNNNNNNNNNNNNNNNNNNNNNNNNNNNNNNNNNNNNNNNNNNNNNNNNNN
NNNNNNNNNNNNNNNNNNNNNNNNNNNNNNNNNNNNNNNNNNNNNNNNNNNNNNNNNNNNNNNNNNNNNNNNNNNNNNNNNNNNNNNNNNNNNN
NNNNNNNNNNNNNNNNNNNNNNNNNNNNNNNNNNNNNNNNNNNNNNNNNNNNNNNNNNNNNNNNNNNNNNNNNNNNNNNNNNNNNNNNNNNNNN
NNNNNNNNNNNNNNNNNNNNNNNNNNNNNNNNNNNNNNNNNNNNNNNNNNNNNNNNNNNNNNNNNNNNNNNNNNNNNNNNNNNNNNNNNNNNNN
NNNNNNNNNNNNNNNNNNNNNNNNNNNNNNNNNNNNNNNNNNNNNNNNNNNNNNNNNNNNNNNNNNNNNNNNNNNNNNNNNNNNNNNNNNNNNN
NNNNNNNNNNNNNNNNNNNNNNNNNNNNNNNNNNNNNNNNNNNNNNNNNNNNNNNNNNNNNNNNNNNNNNNNNNNNNNNNNNNNNNNNNNNNNN
NNNNNNNNNNNNNNNNNNNNNNNNNNNNNNNNNNNNNNNNNNNNNNNNNNNNNNNNNNNNNNNNNNNNNNNNNNNNNNNNNNNNNNNNNNNNNN
NNNNNNNNNNNNNNNNNNNNNNNNNNNNNNNNNNNNNNNNNNNNNNNNNNNNNNNNNNNNNNNNNNNNNNNNNNNNNNNNNNNNNNNNNNNNNN
NNNNNNNNNNNNNNNNNNNNNNNNNNNNNNNNNNNNNNNNNNNNNNNNNNNNNNNNNNNNNNNNNNNNNNNNNNNNNNNNNNNNNNNNNNNNNN
NNNNNNNNNNNNNNNNNNNNNNNNNNNNNNNNNNNNNNNNNNNNNNNNNNNNNNNNNNNNNNNNNNNNNNNNNNNNNNNNNNNNNNNNNNNNNN
NNNNNNNNNNNNNNNNNNNNNNNNNNNNNNNNNNNNNNNNNNNNNNNNNNNNNNNNNNNNNNNNNNNNNNNNNNNNNNNNNNNNNNNNNNNNNN
NNNNNNNNNNNNNNNNNNNNNNNNNNNNNNNNNNNNNNNNNNNNNNNNNNNNNNNNNNNNNNNNNNNNNNNNNNNNNNNNNNNNNNNNNNNNNN
NNNNNNNNNNNNNNNNNNNNNNNNNNNNNNNNNNNNNNNNNNNNNNNNNNNNNNNNNNNNNNNNNNNNNNNNNNNNNNNNNNNNNNNNNNNNNN
NNNNNNNNNNNNNNNNNNNNNNNNNNNNNNNNNNNNNNNNNNNNNNNNNNNNNNNNNNNNNNNNNNNNNNNNNNNNNNNNNNNNNNNNNNNNNN
NNNNNNNNNNNNNNNNNNNNNNNNNNNNNNNNNNNNNNNNNNNNNNNNNNNNNNNNNNNNNNNNNNNNNNNNNNNNNNNNNNNNNNNNNNNNNN
NNNNNNNNNNNNNNNNNNNNNNNNNNNNNNNNNNNNNNNNNNNNNNNNNNNNNNNNNNNNNNNNNNNNNNNNNNNNNNNNNNNNNNNNNNNNNN
NNNNNNNNNNNNNNNNNNNNNNNNNNNNNNNNNNNNNNNNNNNNNNNNNNNNNNNNNNNNNNNNNNNNNNNNNNNNNNNNNNNNNNNNNNNNNN
NNNNNNNNNNNNNNNNNNNNNNNNNNNNNNNNNNNNNNNNNNNNNNNNNNNNNNNNNNNNNNNNNNNNNNNNNNNNNNNNNNNNNNNNNNNNNN
NNNNNNNNNNNNNNNNNNNNNNNNNNNNNNNNNNNNNNNNNNNNNNNNNNNNNNNNNNNNNNNNNNNNNNNNNNNNNNNNNNNNNNNNNNNNNN
NNNNNNNNNNNNNNNNNNNNNNNNNNNNNNNNNNNNNNNNNNNNNNNNNNNNNNNNNNNNNNNNNNNNNNNNNNNNNNNNNNNNNNNNNNNNNN
NNNNNNNNNNNNNNNNNNNNNNNNNNNNNNNNNNNNNNNNNNNNNNNNNNNNNNNNNNNNNNNNNNNNNNNNNNNNNNNNNNNNNNNNNNNNNN
NNNNNNNNNNNNNNNNNNNNNNNNNNNNNNNNNNNNNNNNNNNNNNNNNNNNNNNNNNNNNNNNNNNNNNNNNNNNNNNNNNNNNNNNNNNNNN
NNNNNNNNNNNNNNNNNNNNNNNNNNNNNNNNNNNNNNNNNNNNNNNNNNNNNNNNNNNCGCGGCTGACGTGGGGCCATTGTTCATCATGTACT
CCACTCTCACTTCCTTCCCAACCTGAATAAACTGCAAAGTTCCTTACACCATTTCAGCAGTCAGATTTACTCGGCTTTAGCAGGCCACCATGAC
TATTTCCTGAATAAGCATTTTTCTTCTTTCTCTTTCACTATTGAAAAAACAGGGACGAGAAACATGTTTATCACACCACCTTCCTTCCTTCCAT
ACCTGTTGTGCAACTGCCGGCCGAGTTCAAGACTGTTTTTCTAATCTTCAAAGAATCATGTTATCAACCTGAAAAATACATGACTGATTCTGAA
GTCCTTCCCGCCAAATAACCAACCCTAATTCAATCCCCTTAACAGACCTTCCAAAGGCAACGACAATATATTGTGTTCTGGAATATGTTGAACT
GAAAACAATGGCTTAAAATCCCAAAGCTGTAAAAGTCCCGTTGAGTCTAATAGTCTTTTATCCATTATCAAGCAGCATTGGTTAAGCCCTTAAT
TGTATCTGACACTGTGCTAGGCAGTGCTCAAGAAGAATTACAGCGACCAAACTCTCCCTTCCATTAGAGCTTACAACACCTGAGAAACATACTG
TTCAGGAAATATATATATATATATACACACACACACACACACACACACACACATATATATACAAAGGACAGGGTGATAAATACCGAAGGCATGC
AGGAAGAGTAAGTTTTTATACCATGTAGAGTTTGAGTAAGTGCACCTCATGGGTGAGGACATACGTCAAGGAGAACAGCCACCATTTGTTCAAG
TCCCTCACGGGCCAAGGGAATGCTGCGGGAAGTCAGTAAGGTAAGATCTCAGGGTTTTGTGTATTATGTACTGCAGAGTTTCTCATCACAGTAC
ATGAAAGAGGCAAAAAAGAAAAGACGCTCTGTGTCTGGAAGGAACAGAAGCCAGCACCTTTTGTCTGTCTCTCTTCTTGCTCTTTGGTTATCAG
TTGACCCATCTATGGGGCTGGGACATGGAAATTGGGCTACAGAGGAAATGGAGCCAGGAATCAGCAGCAGACTTTATGAGGGACAAAAGCCCAT
AGCAAAATATATGCCTGTGCTTCCGTAGGTCTCTTTAAGAGGTCATCTGACAGTAGAACAGACTGAGGCTAATGCTTCTCCTGAAGTTTACCTT
ACTGGTTAGTTTCTCAGGTTTGTAGAGAAAAGTGGTGCTTTAGATTAAAGCAGTCTACCTAGCTTTTTGTTAATGAGTTTAGATGTCTTCTCAT
TTTAAACCCACGAAAAACTGTACAGAAGTGTGCAGGGGAAATTATTATCATTATTATTATTGGGACTCTTTTGCCTCAGACCGTAATTTCAGCT
ACTCCACCCAGCAACTTGAATAAAAGAGGGAAAGAAACTGTTTTAAAGAGAAAGACTGAATAATTGTTAATTTAGTTTCTACTGCCTCTCAACC
TCACCTTCTTGCTTTCAGGAGGTTTGAATTGGCTACAGCTGTCCTGTCCAATGCACTGGCCACATGTGGCTATTTTCGTATACATTTCAATTAA
AGTTAAATGTAAGATTTCATTTCTAAGCCTCACCAACCATAGGCGAAGTGTGCAATAGCCACAAATGGCACCTACTGTTGGACAGAGGAGAGAG
CACTTCCATTGTTGCAAAAAAGTCAGTTGGACAATGCTGGAGAGGGTAGATGTTTGTCGCAAAGGAAAAAAGAATAGATTTTCTACAAACTGTG
GGATTTGCATTTTCCTAGCATTTCTAGATAAGAGTCTGAGTATTGCTTAAAGCATCGTGGGCATTCACAAGTCTCACTGATGGCTATCTCTTTA
GCATTATTAACCATTAATTACCACCCACACTGTTCTCAGAAGAAGGACTTATATTGCTTTTAAGGGCAGTGGCTAGTACATATAAATTAAGAGC
ACTTTCAAAGGCCTCTAGCAACCCTCTCAGTGTCACATACAAGGTTACAGATCTGTGACTAGAAACTTACGGCCTTGAGTCATAGTTCATTGCT
TTAACCATGAAACAACCCACTCCCGCCTTCTGTTCTAACCAGAGATCATGCTTTACATTCTCAGCATATTATTGCTAGTTAATCCTCTCTTCAG
CTGAGCATAATAAGGCAAATCATCACAACCTGGTTACACTTATGTCAAATATATGTGAATCACACCATCTGTTTCAGAGGTAGAAAAGACCTAT
GAGATCATCTGGGCTTTTATTTTTTTTCCCTTTACAAGAGGGCTGCCAGCATTTGGGGCCAAATGGAAGGCTTCAAATGTCTGAATTCACAAAG
CTCTTTCCTTATCTCCCTCTCAATGCAAGACAACTTCTGACAGCATCGCAAAGAAAACTGCACACCTGCCTCAGAACGGGCCCCCCCAACACAC
ATACACAACTCCACCCCAGCAAGCAGACCTCCTACTCCCAGTGAGACGTGGGAAGAAACTCCATGTTTCATCTTACCTATTAGTGTGAAGGGAA
ATGCTTCCTAATATCTTCTATTPATGGACTGACTTATTTTTTCTTAGAGTTCCATTTGTATTGATTTTCTTTTATACTGAGAACAGCTCTGAAA
TAGGCAGGTCAGATATTACTCTCTCCATTGAACAAACAGGAAAATAAACCTTTGAGAACTGAAAGAATTTGCCTTGTGCCCCCAGTCTCAAGAG
AGGATATGCTGCTCCTGTTCTCCTTCCCCTACCCCTAGCAGCCACTTGCAACCTGGGTTGGGGCAAGCCTGGATCTCTCTCCTAAGACAGGCCT
TCCTACACTCAGGGGAGACCTGCATGCCACATAGGACAGGGCTGCACCTGGTGCCCACTCTTCTGCAATCCTGGTGTCTCCCCAGTTAGAAATG
AAACTCCATTCAATGTAAGAAATATTGATTGCACCCAATCTATATACCAGGTGTCTGCCTGATATTCTCTATTGAGCAAAGTGTGAATCACTGA
ATTCTTGTGTGAATTGTACTAATGCTATCCAAAGACCTTCCAAACTAGAAATACCCCAAAACTAATAAGTATGTTTTCTCCACCATGGGAGCAG
TTGGATATTAAAAGCATTTTATAGGCCTCAGCTTATTGAAAGTAAAACATTCCGTCTCTTTTCAAAATGGGAGCCGCAAAAGGCAAACACACAC
TCAGGGCCATAGCCCTCTCCGTAACAAAGGAAAGATTAGGTATTTCTTACCACTCTGCAACTTGGTCTGTGCACCAAAGCAAGGTCCCCAGAGG
GCAACAGGAGCATAAGACCAGAAGCCAAGGGCCATGACATCATTGGGGATGCAGACCTAATAACAGGCAACACCAAGGAACAAAGTCAGTTGTA
GTGTCAGGAAGGGGCCGAAGCCTTAGCCACTGTTGATGGCAGGCCCTGTGTGAAGAACACAGCTTTCCCAGAAGCCTCCTCAGTGGAACCTCCC
AGTCGCTAGTAGTCGTGGCTACAAGATTTCACGTGTAAAGGATGGTCCTCGGGGGCACTTGCATCCTGAGGCTTCTAGTCATCAGAGCAGCTCC
CAGGCCGCTCTTAGCCCTCTAGAATGAATTAGCATTATTATAAGACTGGACACTATTTATTCCAAGGAGGCCTTTGCTGCATCTTTGATGAGCA
GGCATCACCAGTTCTCCACGCTGGTCTGCCTTCTCATGAGCATGGGTTTCAGTGACTGCCAGGCCTGAGAAAGGAGGAGATGGGAAATCCCCTT
CATTCATATCTGTGCTCTCCTGCTTGGCAGTGTTTGTTGCAGGCCCCGCTGTAGAGAACAGAGGCAATGCTTATGCGTAAGTTAGACAGTGTCT
CAGGAATTCTGAGCAGTTCAATTCAGTAAAGCCATCCAGAGAGATGAGTTTTACTTCTGAGAGAGCTGGAGACAGACAGTAGTTTAACACTTAT
TGTGGACTCTGTAGGATCCTGAGCCTTTACCTAACTTGACCCAATTAATCCTCCCAACAACCCTATGAGGTGGTTGTTATTTTGCTCCTTTAAC
TAATAGAGAATTGTAGCTCAGGGAAGTTAAATGACCTGTGGAAAGTGGTTCAGCTCATTAGTGAGAGAGCTGCTGAGATGTGAACTCTGGTCAG
TCTTCCCCCGAGGTTCGCGTTCTTTCTGCTACTCCAGAGATTCTCCAACTTTGGCGTGAGGAATAATCAGGGAGTGTGTTGAACATTCAAATTC
CTCACAGTCAACCCCAGAGATTGCCATTCAGCCAGCAGTCACTGGTTTGGATGGAGGTGACCCATGAATGGATGTTGAGAAATACTGTCGTATA
GCACACTTGCTTCCTGAACATCCCAGATCATTTTTCTCAGACATCCTAGGAAAACCTGAAGGGCACAAATCTCCAGGGAAGCAATAGAGCATAT
AGGTTTTTCAGCTATGTGAACTAGAAAAGCACATGGTGAAGCCAGCCTCTTGGAGATCTCTAAAACAATCCAGCCAGATCTAATGAGATCCCTG
CCTAAGAGCAGGTCTGAAACCCTGGGAGCACTTTTATCAGATTTTTCTGCATTCCTATCTCTTCTCAACTGCAGTAAGCCCCCTATAAAATGTA
CAGCACGCCTGTCTGTTGGCTGTGTAAATAGAATGTGGATGTCTGTTACAACTACAGTTTGATTCTTGCATTCAAAGGCCATATTCCTAGTGTA
CATTTCCACCTTTATTCAACACTCCAGTTTCCTATGGTGCTGGGAGGGTCTACTCCGTAACTTATGCCCGTCCCCATGGGTCAGAGGACTACAG
TAGTGGCTTAGCTGGGGAGGAACTGGGGAGTGCTTCTCCTGAGTACTTACCCAAAAGTACTACTTTGGCAACAGATTATGTAAGGCAATATGTT
GAACTGAAGTTTATGAAATCTGTGATGAAAACACATTGGGAAACTGTGTGAAAGCAAAAACAGTCTTTTCAGTAATTGACAGAAACAGCTGTGT
TGGACCCTGAGACCCCTGGAGAAGGTCATCTACAGTTCGGGCCCCAGCCGCAGCCCACCTGCTGATGTTAGAACTTGTCCACTCCTGCCCGGAA
CAATTATAGCTGCTGTGTCTTGTTCTGGAGTTACAGTGAGCTTTGGCTACAACCTAGTTGGGCTTGCCCTAGAGTGGCTGGAAGGAAAAGAACG
GGGAAAGAGTGAGAATGTAAGCAGAGCCAGCTTCCTGGGCATGCCACCTCTGAAGGCCCACAGGTTCCCATGCTTGGTTTAATGCTGTCACAGT
CTTGAAATTTTTAATAATTTTTGAATAAGGGACCATCATTTTTAATTGCACTGAGTCCCACCAACTATGTAGTCAGAGGTCTGTGTAAGAGCCA
CAAGACCAGAGGGCAAAAATAATTTGCCATATATTGAAGACACATAGAACGATGTGGATTTATGTCTTAATTTCTTTCTTCATAGATGCAACTG
TGAAACAAAAATTATTTCATTATCTCCTAGCAGTGGTGTGCTGGGCTGGCTCATACCAGCTCACAAGAGCAGATTGTTAAATTTTCAGGAATTT
TGCAAGCTAGTTATTAAACACAGCCATGATTGAAAATTAAGTTATATATGCTTACAATTAAATTATATTAAAAACAAAGATAAGAAATACTCAA
AACTCACCACTTCCTAATTCATGACTACATTTTACTATTATCTTTGCTTTTGAGGTTATGTCTGTTATGTCTACCTGGTACAAACGCTATATAA
TGGTATGCTAGCATGCATCTTTTCCCAGCTCCGTGTTCAGTCAAGTCATGTTAGTAGCTTGTTAGTAGTCTGTTGGGAGTATTTACACCGTGGA
AATCAACAAACATCACTAATCAGGGCTTCCTTTTCAATCCCTCCCCTGGAGAGCCCATTGTTAAACATTTACCAGCACACCACTGTTTCCCAGA
TACAGAGGGTGCTTACATAACAAAATGTTGAGGTGGGAAGGGACCCTAAAAGCTGAGACTTCTATTTTTTATCTCTTAATTAAGAGAAAGTAAT
AATTCTGCTATTATTTTGCTTTCATCTATGTATCTTATAAAACAACCTCTCTGTGTGTTCTTCAAAGGAAAGGAACAATGGACCTTAGAGATAA
GGAAATCATGTATCAGTGTGGTTGAGAAGTTTTCTTAAAGAAGTGACAATGGAACATGAAAACAGCATGAGAGATTCTCATTCTGAAGTCAAAG
TTATTTCGTGTTTGTATTGTTTTAATTCACCTCTAAAATATCTCTTAAGATTAACCAGCCTCGTTTCTGACCAACCGTGAATTTTGTGAACTTT
TGTTCTTCATGTATTATATGCTATCTCTATTTTGATTTCTGATTCCATCTGCTTAATCATTTGCCTTCATTACCCACTGCATGGTAACAGGCAC
TACTGGTGTCTATAACCAAGCTTTTGTTGAGTATGTTTTCATAAGTTTGTTTGCCTACTGTATTTCCAGTTTTATGAACGGTCTGTTCATATCC
TTTGCCTATTTATCACTTGCTGCTCAATGCTTTTATTATTAGAGGCGTGCAAAAGCTTTTTATATAAAAAGCTGTTAACTCTTTGAATATCATT
TACTATAGGCATTTTTTTTCCTGTTCTCATTTTCATTTTTATGTTGGTTTTGATATTGTCATGTATAGAAACTTCGGATTTTTGTGTTTAAATT
TGCCCATTTCTATTTAGCTTTTTAAAATTCTAAACCTTAAAAAAATCCCTATTCCAAAGATTTAATTAATAGTCCATTGTCATTTTAATCAGTT
TTACTTAACCCAGTGTATAATTCCATATCATACATTGTCGTGGATGATCAATACAAGCTTGTCAATAAGTTATTGCTGGCAAAAAAGAAGCCTT
CAGTTTTGTTTCTGAGATTGTCATTTCCTTAAAACCACAGCGCTTGGACTGGTCGGTTTGTAACTCAGAGCCTCCGTTTCTCGCTGTGATACCA
TTAAAATGATTTCTGAGACTTAAAGTGTCTGGAAGAAGGTGTAATGGGGTATCTCCATCACGATATTAAACTTGAAGAAAGTCCTTCAGGAATT
TGCATATTTTAAGAATGTCCTTTTCGATATATTTGAAGACTCAATATTCTTAGGATGGAGTCTTAGAAACCCAACAAATTTTTAACTCAGTCTT
TAAAAATTATTAATTTAGACTGTTTCTTGTTCTTACATAGACTTTGTGGTAAGATATACATAAGATCAACCACTAGCATAGACTTTTAAAATAT
TATTTTAGTAATAGCTAACTTTTGAGCATTTACTATCAATAACACAGTGTTTATCTTAATATTTTACATATGTAGTCTCATTTAGTTCCCACTA
TTTTATAAGTTCTTGTATTTCCAAAGATCTAACTGTCCCTCACCATTTATACTTACTTTATAAATGTTAATAACTTTTAAAATTATTCATGTTC
ACCATAGAGAACGTAGAAAATACAGACTGGCAAAAAGAAAAAAATTACCGTCACTCATTTTACCATCAAGACCAAGATAAGCACTATCAACTTT
CATGGGTGTGCCTTTCTTGATTCTCTTCTATGGATATTTACATGTATTATAATCACAGTAACTTTTTGGTGATAAACTCACTATAACTTTTTGC
TTCCCATAATTTATATCTTAAACAATTTTGATCTTGAAATCAATATTATTATTTATAAAGAGGTATGCTAGCACACAAGGTTGCTCTTCTATTT
TAAAATTGATTTTTTAAAAATAATTCTGCTTAGTCCCTTCAAATATAGGACATAAAAGTGAAGGTTGCTTGGCAACTGAAATGATGGTAATGAG
GAATTAAAGACATTACAAGAAAAGAAGAGTACTCAGTTCTTTTCAATGCTACATGCTAATTGCAGTAACTATGGCTGATTACAGTTGTAATAAA
TGAAGGAAACACAAAACTTCCATTAAAAATTCTTGATGTGAACTTTTTTTTATTTTGTATTACAGTGAAAGTGAGATGGGGTTTGCTGAAGAGA
AACTTTACTTTCAGAAACAAGAAAAGATCTTTTGTCTGTATTAACTTTTTTTTCTTTTCTTTTCTTTTTTTTTTTTTTTTTGGCGACAGAGTCT
CACCCAGGCTGCAGTATGGTGGCATGATCTGGGCTCACTGCAACCTCCACCTCCTGGGTTCAAGTGATTCTCGTGCCTCAGCCACCCGAGTAGC
TGGGTGTGCACCACCAGAGCCAGCTAATTTTTCTATTTTTAGTAGAGATGGGGTTTCACCATGTTGCCCAGGCTGGCCTTGAACTCCTGAGCTC
AAGAGATCCACCTGCCTCGTCCTCTCAAAGTGCTGGGATTACAGGCATGAGCCACTGTGCCCAGCCTATTAACCTTCTAAGGGAATATTAAGTT
AGCAACTGGGTGAGATACGTAGCAGAAGCACAAAGATTTGGTACATCTGTGATTCTTCAGCAGCACAGAAGAGATGGTGGGCAGTGGTGTGAAG
GAAGCCATGTTAACTACTTGTTTTTTTTTCCCCAAAGAGTAGTCAAGGGCCCTGGAGAGATTGCTGAGGTTCTCACTAGAGCCTTCAAGCAGAA
GATGCTTCCTAGGATGGAGATGTACTTACAAGGACACCAGTGATTCATTGAAATGGACAAAGGGAGTAGAGACTAGAGGGGGAAGAGGGAAGCA
GAGGGAAAGAGGGAAGCAGAGGGGAAGAGGGAAGCAGGGATTGCCGGTTTTGTAACAAACAATGCAGTCACCAGAAAAGTAAGGCAGTTTGGGA
TGAAGCCATCCAAGAACTTATCAAAGGTATATCTTTGCCACAAAGTGAGGATTTCTAGTTGGAGGAGCAAATGCAGCTATGTCTGTCTCCTCTT
CACTGATCTATCTGAATCATGGTATAGGACTTGGTTTTGTAATCTTGTGAACAGCCTCATTTTAAGGGGGAACCCACAATATTCAGGAAGCCAA
GAAATGTCCCTGTTAATCATCTATGAGTCTATCTTGCTGGAATGTAGTTATAGACTATGGAACATCCTTAAATCTGATGAGCAATTAATCACTG
GTTAATTTTGGATTCACTTATTAAATGCCAAATGCATAGGGGATTTTTCACACTCTCTGCCCTTCCTCCTTCCCAGTTCATGAGCACCACAATT
GGATTCCATATTTACTTCATCCAAACCTACCTTGGTGGGTTCACCATTTACCTCCAGTCCTGGGGAGTTCAGTCCAGACTGTGAATTACTGCCA
TTTCTGAGGGGCTGCTTCCCAGATGGGAGCCATAGGACCCTCGCCTCTGGCCCTGGACTCAGTCTTCGTTTATTGCCAAGCATGAGCACTTGCT
CTCGGGAATGGATGCTGGCGTCCACCTGACTGTTTCGCTTGCTTTAATCCCTAAAGGAAAAGCTCCCTACATTTATTGTGTCTGTGGTCCCCCC
ACCCTCTCTGTCCCAGTGCCTAAGAGTCTCATTACCTTGTCAGTAACTACCAGTGTCTACCTGAGATGGACTAAGCTTCATTTAACTGAGAAAG
TGCACCCTCAAAATTGCAAGGAGAAATGTTGGAGGAGGACCCTCTGGATTAAAAGAGACTTAAAAGACATTTCAAACAGTCATAGTATGTGAAC
CTTTTTTCTAAAAATTATGTGTGTGTACACATACACACTCATAGGAGTATAGATGGATCCACATCTGCTGTATGCTGATCATTGTTGCAGCTGG
CTGAGTGCATGGAGGTCCCTTACGTTGTTTTGCTCACTATGGTATACATGCTTATAATTTTCCATAATCTTTTTTTGAGACAGGGTCTTGCTGT
GTCACACAGGATGGAACACAGTGATGCCATCTTGGCTCACTGCAGTCTCTCCCTTCCCAGCTCAAGTGATCCTTTCACCTCAGCCTTCTGAGTA
GCTGGGACTATAAGCATGTGCCACCATGTCTGGCTAATTTGTGTGTGTATGCGTATTTTTTTGTAGAGACAGGGTCTCACTGTGTTGCTCAGGC
TGGCCCCAAACTCCTGGGCTCAAGTGATCTGCTCACCTCAGCCTTCCAAAGTATTGGGATTACAGGCATGAGCCACTGCACCCGACCTCTAACA
ATATATTAAAATTAAAAGTGTCCTCAAACCTAGGACAAATAGATGATTTAGGATTACAAAAATTCAAACGGATTTTAGGAAATTTCTCTAAATT
TTCTTAGGTGGCAAAATAGAGTCGCTGTGTCTGTTTTAAAGAAGGGAGAGGAAAATAAAGAATGAAAATGGTTACTTTGGTTACACATCATGAA
AATAATTCACCCGTGTCATGTACTTGACATCTCCTGTCACAGCGCATTCCCCAATCAGCACTGAGATGCTCAATTCCTGGGTATCCAAAAAGAC
CAAAAAAAAAAAAAAAACCTGGAAACTTGTAATCTTTAATGCTACTGTCAGAGGCGGGAGTTGGAGTTGAGTAAGTAAGAGAATGTAATACTCT
CCTCCACACCCCATCTCACACACACACACACGCGCGCGCGCACACACACACAGTTTTGAGCAGGGAAATGTCATGACTGTGCCACAGCTGATTT
CAGCAAGCGGTGAAAAGATTATGGAGGCCACGTCACATGGCAGTCTTTGGAATCTGAAGCTGAGTCACTGAGTCTGCCATTTACCACATGTGGG
GCTTGTTTGCCCGTTTTTAAAATGGAGAATAATGGTAAAAAATTTTAAAGGTGGTTTTACTTTGGGTGGAAATTTAACAAGATTGTCTTAGTTT
GAGTTTTCCCAGGAGCAGATCCTGAGACAAGGATTTTTAAGTACAAATAGTTTACTTTGGAAGGTGGTCCTAGGAAAAACTGGTAGGGGAGTAG
GGAAGGCAGCTCTTGGAGGGTGCATTGCCAAGTTACAACTCTGGGAGTCAGAGTGGAAGGCTCTTTTCAGACCTATCTTATCTGAGGGAAAGGA
ACTGGAGCATTCATGTACCAAGTCCCATCGCTCATTGGTTGAGGGCTGCTTTTAGAGGGTCTTAAGTTTGCAGCACATTTGGCCTGCCCTGCAC
ACAGGTGGGGGTGTCAAGGGCTTCCAGAAACCTCTCAGGCTGGTGGAAGTTGAGTTGGCATGCATTACAATGGGAAGGTCTGAGAGTATGTGTG
TGGGAACTTACAGGCTCTGCTACGAAGTCAAAAAGTAAATGTTAGATGGGCAAATATAGGCTACATGAAAATCCACATAAACAGTTTCAAAGCT
AGTTTATAGTCCTACTCAAAGTGTATACATCTAGATATGAGTATTGAAGGATGTCCTTCTGCAGGTGAACCATTTATGAGTGGCTGTCGACATT
TTCATCAGATTTAAACACAATCTGTGTTTTTGGTTAGACACACTGTGGGAAATAGCATAATTAGCAGAATTCAGGATGTGAATAACATAGCACA
AAGAACTTAGACAAACAGGACTTCAATAAAACGTAAAGTCTCGCACTTAAGTTTAAAAATAGTGCTTCCTATATGTTCTGGATGGGGGGAAGCT
GTATTAATTGTAGTTCTTATGACCAATACCAAGAGATTTTAGTAGATTGTAAATTCAACATGAGTCAGTAGTGTCGTGTGTCTTCCCCAGAATA
TTAACTTTCCAAAAGTTAAAATAATTAGAGATTGCCTCAACAGAAATAGCCTTTCCATGTTAAGGGAGTAATGCCTCCATTCTATCCTGAGGTC
CAGTCCTAATGCTGACACATAGTAACTTTATTCCCTTAGCCGGTGTCTTAATGTTTCGGAGACTCAGTTTCTATCAACCTGAAAGTTAGTAGAT
ACTTCCCCTGGATTGTCGTGAAGTAAGCATCTTACCAGAAAGTTAGAATTTATGGCCCAGCACGGTGGCTCACGCCTGTAATCCCAGCACTTTG
GGAGGCCGAGGTGGCAGGCGAATCGTGAGGTCAAGAGATCGAAACCATCCTGGCCAACATGGTGAAACTCCGTCTCTACTAAAAATACAAAAAT
TAGCTGGGTGTGGTGGTGCACACCTGTAGCCCCAGCCGCAACAGAATACTCTGGAGGCTGACGCAAGAGAATCACTTGAACCCAGGAGGCAGAG
GTTGCAGTGAGCCAAGATTGCGCCACCGCACTCCAGCCTGGTGACAGAGCGGGACTCCATCTCAAAAATAAATAAATAAATAAATAAAGTTATA
ATTTATGTAAAATGTTATTAAAATTCCAATCTGCAGTACATACTCAAAAACAGTAGCAATCATTATTAGTATAGACTTGTTAAGTGTTAGTGTA
TGGCTTTTTCAGGTTAATAATGCAGCTTGCCAGAGGATCCAAAATCACATCATGGAGATACAAGATGGTTATAATGGCTATGCCAAAAAAATTA
CCAGGATGGTGTCATAATAGACACGAACAGCTATGAGACTAGAAGAGAGTGTTATAATTTAAATTTTCCCATGAATTTGAGCTGTATTAATGCA
GTGTTTAGTAAGGAAGACCTGAAAAGTCTCTCATTTTTCAAAATATTAGGACAATGATGGAAATCCAACCAGAACTATCTTTGGGAATTTATTA
GAAATAATATGGAGTATTTCATATATCTAAAACACAGGAAGAGTACAGGATGCCTGCAGGCCTTAGGAGTGCCTGAAATTAGGTACTATAATAC
TTTTAGGAGACTATTGCATATGTTCTGTGTATGTATGTGTCTCTTCTCTGTCTGACTTGCTTCTCTCTGCTTGTCAGCTCATCATTTTCTTTCA
CTGAAGATTTGTTTTCTACATGGCACTAACAGCTCTAAATCATGCATCTCTTACCATTAGAAATTTAATATTTTTTTCCCTCAAGTTCAGTGAA
AAAAAAAAAACTGTCAGGGAAGAACTTTGGTTCAGATTTGGCCAGGTGGCTACTGCTTGAATGAATTGACTGTGGCCACAGGGTTGGAGTCATT
TAATAATCCAGCATTTCTCTCTAAAACCACATGACGGAATCTGGGGAAGGAGCGTTTCCTAAAGGAAGGCTATTGTGCTGGGCATATGAAGCAG
TATCTGTCATAACCAAGATCTGACCAAACACTAGAGTGCAGCATGCTATTAGATTCAAGTTTAGTTTCTGGATTTTAAGATGGGAATCGAAAGG
CTAGAGAGAGTGCAGAGGAGATAAATAGTTAAGAAATTATACAGAAATAACATCTGTGACGATATAAGATGGCAGAACCTGAAAAGAAGACAAA
TAAGTGGGTTTTCCCCTTTGTTTTCTTAATAATGTAAACATGTATGTCTCAATAGTAATAACCATACAACAGCTAGTATGAGTTATTTACCTCC
AGTGGGACATATAAAGGGTAAACAAATTTAAATCTACCAAAGAACTGGGACTTCCCATAAAAAAATTAAACATCAAAAGGAGAACTTTCATATC
TGACCATAGTGGAATACTGGATATTAGAATTATTTTCCTGCTACCAACAGCTATAAAACTGGACAAAATATCTGAAGCAACTATTTTTGGGTCT
CAGAAAACAAGACAGACATGTGATTGTGGATAAAATAAAAAGATGTGAGGTTAACTCAAAACTCCTCTTGGCTTTCTGCCTGAGAGCACTTTAC
AAATCATGGTACAGGAAACTGGAGCCCAGTGAGCAGCATCTTGCCTTGCGGAGTATCTTAGTTCGTTTTCTGCTGCTGCAACAGAATACCAGAC
TGGGTAATTTATAAAGAGATTTATTTGGCTTATGATTCTGGAGGCTGGGAAGTGCAAAATGAAGGGACCACATCTTGTTATGTCATAACATGGC
AGAAGGCATCACACAGACAGAGAGAGTGCTTGCAAGACAGAGAAGAAGGGGGCCAAACTCCCAAGATAACTAACCCTTTCCCAAGATATGGAGT
TAATCCATTCATGAGGGTGAACCCCTCGTGACCCAGTCACCTCTTAAAGGCCTCACCTCCTAATACTGTTACAATGACAATATTAAATTTCAAC
AAATTTTGGAGGGACATTCAAACCACAGCACAGAGAGAACAGTTTGTGTTCAGGGATTCTGGGATGGCTGGCATTTGTGGAGTGGCATACAAGA
GAGAAGGTATTTCCAAAGACTAAACTCTGCATGGATATGATGAGACTCTACGACCCCTAATAGTTCCTGGGGGTCTTTGAGTTAAAGGAGGTCT
CATGGTCTGGGAAATAACGCAGTTCCAACCAGCCAAAATGGAGAGACATAACACTTTGGGCATTCAGGTGGGATGAGAAAAAGACTACAATGTA
GGAGTTGGGCTACTTTAGCCCTAGAATATGAGCTAATCTTGACTCACCCTAATGAAGCCTAAATCTGAGCTTCAACAGGATTAATTTAAGGTCC
CATCAATTAAATACCACCATAAAGGAACATATTAATAATTCAAATTATCAATATTGCACTTACAATGCCCAGCATGTAATAAAAATTATAAGAC
AGAAAAAGAAGCAGGAAAATGTGACTCATAACCAGAACAAAAAAGATCAATAGAAATGAACTCAGAGATGACACAAATGTTGGAATTAGTAGAT
AGAGAATTTAAAGCAGCTATTATAAATAAATATGTTGGAGGATTTAAAGTAAGATGAATAGATGTAAGTAAAGTAAGATGACCTTAGCAGATAA
ATTGCAACAATTAAAGGAACCAAATGGAATTCTAGAACTGAAAAATAAAATATACCAAAAAGAAAAATTAACTGGATGGGCTTAATACTATAGT
GGATGCAAAAAAAAAAAAAGAAAAAAAGAAAAAAAGAAAGGTCAGTAAAGTCAATGACAGGTCAATATCTCAGAGAGAAAATGCTGAAAAAAAA
AAAAAAAAAAAAGACTAGAGTTTCAGATGATGTAACCAGAGTTTAAATGGACATGAAAGGACCTGGAATAACCAGAATCTTGAAAAAGAATGAA
GTGGAAAATTTACACTACCTGTTTTCAAGACTTAATATAAAGCTATAGTAATCAAGTCCATGTGATATACATATAAGGATAGACAAATATATCA
GTGGTACAGAATAGCACGTTCTGGAAGAAATCTACATATACGGTCAGTTGATCCTCAGCAAAGGCACCAGGGCAGGTTAACGAACAAAGGAGTA
TCCTCTCAACAAATGGTGATGGAACAAATGACAGTCATGAAAAAAAATGAACTGTGACCTGTGTCTCACACCATACACAAAAAATGAGATGAAT
CAAATGATGTAACTGTAAATAATGTTAACCTGAATGTAAAGTTAAAACGATAAGTCTTCTAGAAGGAAATTTAGGACAATGTTTTTGCAAACTT
AGAGTATTTTTTAGACAGGACACAAAGGACTAACCATAAATAATATATTTAGCAAATTGGACTTTATAAAAATCAAAAACTTCTCATCAAAAGA
TACCATTAAAGAAATGAAGGAAGAAAAATACTGGGGAATATATATATGTNNNNNNNNNNNNNNNNNNNNTATATATGTATGTGTGTATATATAT
ATATACACACACATATATATACACACATATATATGTGTATATATATACACATATATGTGTATATATATACACATATATGTATATATCTGACAAG
AACTTCATTTTATGCTAGTATACAAAGGAAAATTCCCTGTGGCCCAGATGAATTGCCATTATTGGGACCCTCTGGCTCACACCAGATTGATTTC
TGATCATGCTTTTGAAATTAGAATTAACCAAGCCCCATCAAGGAGTCTGTAATATAGGCAGGCACCAAATCAGCTGTGTTAAGTACTTCCCTTG
CATGTTGCCCTGAGAACAGGCGAAAGACTTCACTGCCGATTTCTGAAATTGGAAGAGGTCTTCATGGGGTCATCTAGTATAGCTTGTAGATCTA
CTCCAGGGCAAGGATGAACTCAATGGTCTAAATCAGTCTAATCAAACTTGATCTGATCCCTTGGGAGCTTTTTAAGAATCCAAATTCTCTGCTC
CATCCCTGGATCTCTTGATGGAGTAGGTATTAGGTAAGGCCTTGGAATCTATTTTGAGTTCCGTTGGTGGTTTTTTGTTTGTTGTTTTGTTTAG
GCCAGTCAATGAAGCAGTGAGAGTGGAGAAGAAACAAAGAAACCTGTAACTGGTTGTGATCAATTAGTTGTAAACACCACTTCAGTCAGAGCAG
TTTTTGTTCTGCTTTTGTTGTTATTTTTTAGTTTAGTGTGTTGTTTGTTTGAGACAGGGCCTTGCCTCTGTGTCACCCAAGCTGGATTGCAGTG
ACAGTATCAGCTTATTGAAGACTTGAACTCCTGGGTTCAAGTGATCCTCCCATCTCGGCCTCCCAGAGTGCTGGGATTATAGGCACCTAATGGG
TAAGCTGCCACCCCAGGCCCAGCCTTAGTTTTGTTGGTAAGCTAATCAGGAGGTCTTGAAAAGTCTCACCTGCCTCTTAGTCTATCAGAATCTG
ACCCTTCCTTCAAGGTCCATCTCAAATGCTACCATCTTTATGAAGCTTTAGCCATTTCTTCCAGTCAAATCTGACTTTCCCCTTCCTCTGAACT
GCCCGTGTTTACCTCCCTCTAGGCCCTGACTGTACCATGTACTGTAGTATTGCCTGTAGCTTCTTCAGGCTTGGGACAGGGTGCTTATTATATC
TGCAATCCCACAGTACCTATCACAGTGCTCTTTGAGCAAAGAACTCTGGTCTTGTGATGAGAAAAGCCAAGTCTAGGATGCCAGCTCTGCCACT
TGATGGTATTATCCGTGGGTTAGTGATTTATCCAGGGGTGACATTCAGAATATTTATGTGTGTGTGTATATATATATATCAATGAATAAATGAC
AGGGTCTTGCTCTATCACCCAGTCTGGAGTGCAGTGGCACAATCACGGCTCAGTGCAGCCTCCACTTCCCTGGCTCAAATGATCCTCTTACCTC
AGCCTCCCAAATAGCTGGGACCATAGTCATGAGCCACCATGCCAGCTAATATTTTTTTATTCTCAGTAGAGATGAGGTCCTGCTGCGTTGCCCA
GGCTGGTCTCAAACTCCTGAGCTCAGGTGATCCTCCCGCCCCAGACTCCCCAAGTGCTGTGATTACACGTCACCACACCTGGCCTTCAAAATAT
TTAACCAGCATGGCACATGTCCCTTCATTTAGACGCCCGCTGGCCAGGCTGGGGATTAGCCCTGTCTTTATGCTTTTATTCTCGGTAAAGTGGA
TACAGTCCCTACCCACCTCAAAAGGTTGTTGTGATGGTCAAATGAGATAATGCATGTGAAAGTACTCTGTAAAGTACAAAGTGCTATACAAATG
TAAGTCAGGGTTGCCTGGTGGTATTTCTAGTGCCCGTGTGTGGGGTTGGTTGCCCAGCCCTCAACATGGTCTCATGGTCTGCTCTGCTCTGCTC
AGAGCAGTCTCCCAGGAGCAAACCAAGGAGTTGTTGAGTAATTGAGCAGGACACTGCAAATCTGAGAAATCCTGGAATCAGCCTGTTAGGTCCT
AAGGAAACTCAGAATATCAGCTCCTTCAAGGATGGCCCCTTTTTAGGCCTGAAAAATATCAATGTTTCAGTACATATATTTTGGAAAAGCTAAA
TAAAACAAAAACCTAAAAAGGCTTTTTGAATTTTAACCTAAGTTTTCCTTATTTGAGGACACCTTGTTCTATTGCACAATGACCTTAAAATTCA
GGATCCTTAAAGATATCTGGGCATCTCAGACTCATCTGATTGTCACCATATGGCAAGGAGCTGCTCTGCCTAGATCTGTAAATGGAGTTAAATG
CCAGAGACATTAACATAGATTAAAGGGACAGTCTAAATCTTAGTCACTGCTTTGTCTTTATAGTTTCTTGCCTCCTCTTTTTACCCTTTTACTT
CCTTAAAAACTGTCTTAATTTCCTCACCATCGCCTTCCCACATGCCCTCAGGTCTGCAGATCCTGGGGATACAAATCCTTAGCCACTTTTCTCT
TCCAAATGCATTTCACTCTTTCCTCATATTCAGTGCCCAGTTACTGTTTTGTGTTTATCATTAGTTGCCAGTCAATGTTAATGTTTGTTCTTAT
ATGCTTTGATTTAAATGAAGGAAATGGCCCCAGTGTAGTGTGTACAGCAGAGAACTAGAGACTGTAGGGAACAGACAGAAAATAGACACAACCC
TTTTACTTACTCTTGAAGGATTCCCATTTAAAAGGCAATGCAGGGATGGCCACAGTGACTCATGCCTATAATCCCAGAACTTTGGCCGGCCGAG
GTGGGAGGATCGCTTGAGCCCAGGAGTTCAAGACCAGCCTGGGCAACACAGCAGGACCTCATCTCTACAAAATATAATAATAATAAAAAAGAAT
TAGCCTGGCATGGTGATGTGTGCCTATAGTCCCAGATACTTAGGAGGCTGAGGTGGGAAGGTTACTTGAGCCCAGGAAGTCAAGTGTGCAGTGA
GCCATGATTATACCACTGCACTCCGGCCTGGGCAATAGAGTGAGACCTTGTCTCAAAAAATAAAAATAAAAACAAACGGCAAAGATGAGTTCAT
GTCCTTTGTAGGGACATGGATGAAATTGGAAATCATCATTCTCAGTAAACTATCGCAAGAACAAAAAACCAAACACCGCATATTCTCACTCATA
GGTGGGAATTGAACAATGAGAACACATGGACACAGGAAGGGGAACATCACACTCTGGGGACTGTTGTGGGGTGGGAGGAGCGGGGAGGGATAGC
ATTGGGAGATATACCTAATGCTAGATGACGAGTTAGTGGGTGCGGCACACCAGCATGGCACATGTATACATATGTAACTAACCTGCACATTGTG
CACATGTACCCTAAAACTTAAAGTATAATAATAATAAATAAATAAATAAAAACAAAAAAAAAACGGCAATGCAGGACTGTGGTAGATATTAATA
ACTTTAAAACATAATGATAAAATAACCAGGGTGATAATTTGTAGCCCCTTCTTGCTACTTCCTAGCTGTGGGACATTGACTAGATATTTTTACC
TCTCTTGACTCTGTTTCTTCATGTGTGAAACAGAGAAAACATCGATCATGCAGAATTGTAGTAAATATTGAGAGCATGTCTGTAACATGGCCTA
GTTCACTCCTGGCACATGGTGGATGGTTCAGTATATGGTGGCATTTATTATATTCTCATTTAGCATGCAGGCCAGCTCTGGGAAACCCTCAATA
CCCAGGTAGACTATGTGCTTTTTATCTTTACAGCTGTCAGGGTGAGAGGCAGTGGTATCTGGTGGAAAGGGCAGGGTTTACCTCAGAAGACTGG
AACTCAAGTCACAGCACTGTCACTCATAAGATGGGTGACTTTAGGCAAGTCATACCACCTTACTCTCTGTTTCCTCACCTATAAAATAATGCAA
ATAATACCCATCTCTCAGAGTTGTGAGGCTCAGATGAGGCAACGTGTGAGGAGAGTGGTCATTCATAAAACGCTAATAAATAGAGGTTATTAGT
ACTTCAGCACCAGGGTGAGGGTTTCATGTGCCTACGTGACAACTGTCAGGCACCGTAACTATTTGGGACCCACAAGTTAACCAGACATCCGTGG
TGTGAACTCAGTTCAGAACCTTGTTCTCCTCAAAACATATTAACACTTTTTTCTTATCTTGAGTGCCATCTCTGGATTATCTCTCTGTTGGAAC
GGGTGGGCGTAAGACATTATGAAGCTCTCATTCTGCAAAGAGCAAATTGAGGCTCAGAAACAATCAGGGCCATCCCAGAGCCAGGCAGCCTGGG
TTTGAATCTCAGGTCTACTACTTACTAGCTGTGTAAACTTGGACAAATTACCTTACTTCCTTGCCTCAGTTTCTTCATCTGTCAGATGGCACCT
GTCTCACAGGGTTAATATACGTAAAGGCTGTCTTGAAACAGTGTCTGGTACACAGGAAGTGCTCCAAGTATGTTAGCAAAAAGAGAAGACGCGG
GTGGCTAAACCTTGAATGTAGTTCATTTCTTCTGGTTAGATGCTGCATTTCTTCCAACAATCTCAAATATTTCTCCTGGTCTCCCCCATCTTCC
AATAAGTAACAACATTGTTAGTTTCAGTGTTGCATTTTGGCTATTTCTGTAGGACAGTGATACAACACATCAATTCATGACTTAGGATGTTCTG
AAGCACATTCTTTTTTGTTTCATTTTGTTTATGGAGACAGAGTCTTGCTCTATCCCCCAGGCTAGAGTGCAGTGGTGCAATCTTGGCTCACTGC
AACCTCCGCCTCCCAGGTTCAAGCTATTCTCATGCCTCAGCCTCCTGAGTAGCTGAGATTACAGGCCCCCACCACCACACCCAGCTAATTTTTG
TATTTTTAGTAGAGACGAGGTTTTGTCATGTTGGCTAGGCTGGTCTTGAACTCCTGACCTCGGGTAATCTGCCTGCCTCAGCCTCCCAAAGTGC
TGGGATTACAGGCATGAGCCACCGTGCCCAGCCCCTTGAAGCACATTCCTATTCAGCTCTTGACTACTGAATAGAGACCAGTTTCTTTCCTTTG
AATAGTAAGAGATTCCTCACTCACCGGTGCAGTTCTCACTTCAGAGTGGCTCTCCAGGTCCTCCTGCTCACTTCTCTCTAGCACCTCTGTAAAC
TCTTGAGGGTTCTGGCGTTGGGGGAGTGCGCTTAAAACCTAGGATTGAAGGGAAGCTTGGAAGGCTACTAATATAGTTGGGATGTTGTTCCTGC
CCAAATCTCATGTTGAAATGTAATGTTGGAGATGGGGCCTGGTGGGAGATGCCTGGATCATGGGGGTAGGTTTCTCATGAATGGTTTAGTACCC
TCCTCTTGGTACTGTCCCCATGATAGTGAGTTCTCATGAGATATATGTCCCTCTGGGAAGCTAGGACAGGGCCCCACTGCTCCTGCTTCCCTTG
CCTGGCTCATGTCTATAGTGCTGCATGGGAATGGTCAATGTCTATGAGCCATGGGGTTGCGTGCATGGCAGCTCATCAAAGAATCAAACTGTAG
CATAACTACCCAGCCAGATGTGTGGCACTTCCTCCCTCTCCCTCTTGCTCCTGCTTTCACCATGTGACGTGCCTGCTTTTTCACCCTCTACCAT
GATTGTAAGCTTCCTGAGGGCTTCCCAGAAGCAAATGCTGCTATGTTTCTTATTCAGCCTGCAGAACCTTGAACCAATTAAATTTCTTTTCTTT
ATAAATTATATTTTCTTTATAGCAATGCAAGAATGGACTAACACAGCCACCAACTAACTGCCAAGGAGGACCCCATGCTTGAGGGGTCCAGTCT
CGCTGGCACAGTGATGAACTACAGTGGACAGCCACTCCTTGAGTAGTGGTCATAGTTAAGGGACAAAAAAATCATGGTTCCAGTCTGGAATAGC
CAAACAAAGAAAAAAAATAGCCAGAACAAAGGAAAAAAAAACAAAATAGTGCTTAAATCTAGCAAGAGAAATAAGAATAATTCATCACTGTTAT
AGTGCTTCACACTTTTCTAAGCATTTTTATGTATTTAATCAAACATCATCTAATCCTAACCACAACCAAAGAAGGGGTGAGGAAACTTTCAGAA
TAATTTCTATCTGATTTCAAAAGACTCTGTTCAGTTACTTTTTACCCTACATGGTGATGTGATGTTTTTTTGTACGAGACTGTTCATTGCAGAG
AATTATAAGCAATTAAAGAACAGTTTCTGTGGTGAAAAGCATATTTTACAATAAGACTATGGTCAGTGGATTTCTATTTTATGTCAGCATACAC
TGTTTCCCACAATTCCATCATGCACTGGAATGAGGTTATCTATTATCTAGGGTTGTGGGTCTGATGGGACCAAGTCACTCATTGAGAAAAATTG
TCTGAGGAAGGCTGAGGTCATGGCTAACCAGTAATTCTCAGATGGGCCTTATATTATTTTGTTGTGTAAGTATTTGGGAAGTTCTCCAAGTTGC
TTCTTCGTGCCTATTGGGCATGTCTGAAAATATGCAAAAAAGGCCAAGAATTTAATAGATAAGAATGACGTGATACAAATATGCTCCAGTGAGC
AAGGTAAGAGCCTGACCCAGATTTTCTTCCCAGTTTGTTTATTTCTTTTTCTTTGGGTCCACTGGCCCTTTGCCAGCCCTCCTCCCAGCAAGCT
GCTGGCAGCTCTCTGTGTCCTTCTGGGAAGCTAGGACAGGGCCCCGCTGCTCCTTCTTCCCTTGCCTGGCTCATGTCTATAGTCCTGCATGGGA
ATGGTCAATGTCTATGAGCCATGGGGTTGCGTGCATGGCAGCTCATCAAAGAATCAAACTGTAGCATAACTACCCAGCCAGATAATTCAATTGT
TCCTAGAGAGTTTGATGGGACCCAGAAGAAGTAGCCACCAGGTATATTCAGTCGGCACTGACTTCAACAAATGCTCTTAGAGTTTGAAGTCATA
GCGTTGTCCCAGAGTCAGCTCACTGGGTCTGCTCGGGACTTGCAGTACCTCTTCCCTGCTCTTCTGTTTATTTCCTAGCCCCAGTCCCCAAACC
CCACCCACAGACTTGTGTCCAATTTCCAGAACTGAAGAGGACCAACTTCCCTCCTGACTTCTGAGACTCATGATTCTTCAGACATGACAAGTCC
AGATCGAGACTGCAATCCCCAAGGAAGGCCAGCTGTCTTGCTCAGCAGAGACAATACAGCTAAAAGCTCTTTCTCACTTTAGGCAATTCATGCA
CTTGGTTAGACATTTATAGACTTCAACTGCTCATCCAAAAAATCTAGGTCATTCTTTACATAGAGCTTCACACTTTGGAAGGAAAGCCAGGCCC
AGGGAGGAGCGTTTCTGTTGATGTCTGGTTTGGCTGAGGCAGTAGAGAGTGCTTCTGCTGTGGGAAGAGGGAGAGATGGACCAGCGCAGGCACT
GTGGGCCCTTAGGGGACGTGAATTTTCACCCCCTGGCCACTGACTCACAGAGTCTCTGAGTAAATGGTGCCAATAATAGCTGCCTTGTGTTGAT
GTCATGAAAAGTGGTGGGTTTAACGATTAGGCTTTCTAAGGACATTTTTAAAGTATGTACCATAATTCCAGTGAGAAGGGCTGGGTGGGTCTGT
TGGGGGTGTAGGGCTTCCTGGGGAGGAAGAAAGAATAGAGGTGTGGGTGAGAGGTTTAGCCATGTAACATGGATGGCCAAAATGGTACAGCTCT
TCCAAGTATATTCCTACCTGCCTCCTAAGCCCCGAGGAGAAGGACATGCCAAAGAAAGAGCCTTGGGCTGGGAGTGAGAGGGCCCTTCTTGTGG
AGGTTCCTCTACTCACCATGGCTGAGGCATGTTGCTTCAGTTTTCTCATTTTTAAATTTCAGCTCATGGTTCTGCTGCTCCATTGAGCTGCTGT
ACAATGCAAATGTTCAACACAAGTGAAGCTGTTTGTTGAACCTAAGTGCCACAAAAACGTAACATATCATTATCAGGTGTTCTCACCCAGAGAG
AATAGTGTGGTTCTTCAGCCACTCGCTTGCTTCAGGGATGGTTTGTGTGGGCATGTGCTCATTTTGTACAGGTCTCTTCCTGTGTACCTAGATG
CTGTGCAACTTGAAAGGCCTGCTCCTCCTTCCTGCTCTACTACTCTGGCCCCAGCAGGACAGTGAATATCAATAGAACAGAGGCAGGAAGCATG
GGTTCTTTTCCTTCAAGTCTTTTCCACGTTGGCTTCTCTGCAACAGGAGTTGAGGGAGGCTTGGTTAGAACAAATCACCTTTGTCTGGGGGTGG
GTTAACCAGATTTTTCCCTCTTCTGTGTCTGTGGCCTTGGTTGTGGCACCAGCTGTCATCACTGCCCCACCAGTTGGGTGGGAGAGAAGAGATG
AGCCTGGCCAGCCCCTCTCCTGCTTTAGTAAGACTCCGCTTAAAGGCCTGTTGTAAAAGTTTGAAATTGCAGGTCAGGGTTAATTTAAAGCTTG
TGTATTGTCCATGTTATGGTGTCCCCCAGCCATTACAAGTAAATAATTAAAAGCCAATTCTAACCAAGATATTCAGAGCTCCATAAATTCCTGG
ACACCATAATATGACAAGAAATAGACACTAGTCTAACTATATGGCAGGCTGTCCTATGTGGGCCAGGGTATGACATACCAGGTTATCCCAGAAA
GAAGAACAGGACAAGCTTTACAAGGAACTGAGCTTCCCTTCTCCCAAATTCTCACCTTATATTAACATTTTTGTTCTTGGTTTAGAGCACCAAC
CACTTCAAGAAACTGCTGTTGCAATGTGGATTTCTCTGAGAGGATTCACCCTTGAAGTCCTTGTCTCCTCCAGAGGAATTTGTTGATCTGGATT
AACTGTCCAGTCATTGGGCAAGGCCCAGACGGGATGAGATTAGGAGTGAGATGAGGAGTGGAATGGGTTCAGGAACACCTGGGGAGCAAGGAAA
CCAGACAGGAAGGAATACAAAAGGAAGCCCAGCAAGCACCAGCCCTCTTGAGGAGGCTTGCAGCTGCTGTGGGTGCATGCTGGAGGTGGCCCAC
ACCTGTCCTGAGAGCTGACTGCAAGCATCTCTTCCTAGGTGCATGTTCAGTGACTTCATGTTGGTAGCTTGAAACTGGCCATAGTGGAAGTATT
TACACCATGCAAATACGTGAACACTACAAACCAGGGTTCCTCTCACTTCTCTCCCAGGAGAGCTTTACATTAAACTCTTGCAAGCATCCTGCTG
GTGGCAACCATAATGGATTCTCACTTTCCCTGAAAAGCAGGACTTAATCCTTAGCAGATCACTTGCTTTCTCCCGATTGTTCTCCTCCCCTGAG
TCTTGAGGGGCTGGGGACTAACAGAGACCAAAGTGGCCTTGGTGATATGTATGAAGTGGCTCAGGTCATAGACGGTATACAAGTTCAAAGTTTG
TATCACCACATTGTTTCTTCACATGCACTTCCTGCCTAAGTTGCTGCCGTCCGCTCTAAAAAACTAAACAAACAACGACCAGAAAACAAACTCT
ACTGATCTTATTTTCAGCTTGCCAATTTTTATACAGTCTCCAAACAGGATTTAATGAATGTAATAATCTTCCTGACAAATAGGTTTTACTTCTT
TGGAATATTTATCACATAGTTATTTATTTAGAATTCTGTGTGTATACCTACCAGGTTCAACCTAGACCCAGCCTAACCATGTTTCTGGAGATAC
TGACCTCCATTATCAACCTCAGCCTTACCACAGGCTCTGCTCTAACCTTGCCCCTAGGTTTTCTGATCCTAGCTTTCCCATTACCACCCTCTGG
CCTCTGGTTGTGGCACACCTGTTATTTCATGTTAGGCCCTCAATGCTGACAGCTTGCCTATCCTTCATATGCTGATCTGTCTCTGGTACACTCA
AAATACCTWCACACATCAAGAGATTTCCTTGGAAACCAAAACAAAGGAGAAGAAGTGACTGTTCCGGAGTTGCTGCCTGGTGCTGGACGTTTGT
TTTCATGTTTCATGTTCATCTTGCAGCAAGGCATTTCCATCTCATCCCCCAGACAAGCCTTCACTGTAGGAAAGCTGGCCCCCACCTCTTATCA
GCAAGGAGCAGGGTCTGCATCACCACCCTTTGCCAGTTTTCTCTCACGAGACTCTGATCATCAGGGAGCAGGTCTTCTCTCTCAGAGCCAAGGA
GCTTATTTCAGGCAATAACAGCAGTTTTCATATGGTTCTTCACATCTCCTTTAGTACCTAGGACAGTGCTTTCCATAGGGTAGATTCATTATCA
ATGTTGGTTAGTGGTGTCAAAAATTATTTCTACTTGAAGTAGAATGAACAGTTGCTATATAGAATAGTTAGGAAGCCATATCCTGTCATTGGAG
GGGTCCAAGTAGAGGCCAGACAACCACTTACCTGTGATGGTTTTAGGAGGGAATAATGCATTTGGATAGAAAGAAGAGGTAGAAGATGGCTAGC
CTTTTCCACCCTGATTGTGATCTCATAAACTATGGGATGCCAGCACTGAGTCTAACGGTGGAAAATAGGCTGTTGGCCCAGAGACAGATGACTC
TCCAGAATCCGCTTAGTTTTTCTGTTTTCTTGAGCAAGTGGTCTGCAGGTTGAGTGAGTCTTTAATTAATATGCTTCTCTAGCAGCTTACATTA
CTCCCCTAGTCAAATGGCAGAGTATGTAAGATCAACATTGTGTACCCCACTGAGGCTTCAACCCTTTAAAGAAGTCTTTTCCTGTAAGTCTAAG
GAGAAGCAGATGGTAATGAAAAAATACGCACATTTTATTATGCGTTGCACATTTTACTTATTAGAATTTTTAGTATGACACCCTGCATTTTAAA
AAGCCTAAAGATGAAAACAAAATGGAATTATTCTTTGAAATATTTAAATCAGCTTGCAGCAATTATCTCAAAATATGAAAATAAAATCTAGCAG
CCTGGAAGGTAGATCTTCCTTGACCACCCACTTTGAAAATCTCGTCTTTCAAAGGGAGGCTCTTCCTCTCAAAAAGGAAGAAGAGCATGCTGTA
CAGAATGAGGGCAGGAAGGGACGTATCCCCGATGAGGTTGTTCAAAAAGGAAGAAGAGCATGCTGTACGGAATGAGGGCAGGAAGGGACATATC
CCTGATGAGGTTGTATAGAGCTGGAGCTTATGTGTGGGAGAGCTGGTGGTGGGAATGAGGGCAAGTGACTACACTGAACCATTCTCTCGTTGAA
AAGTAGAACCACGACTGGAGAGGAGTTACCTCGGAGTTCTGGACTGGGTGTAGAGAGAGAGTGTTTCTGTCTCCTCTTTCCCTAACCACATCTC
TGCCTCCCTTGGCTGAGTGAGTCATCCTCTGCCAGCCTTACCATTTGCCAGCACTCACTCCCACAGAGACCATGTGAGGATTAACAAGCCGTAC
TTTGGGAACGTCACTGAAACTGTGGAAAAGCAGTGCAAGGTAAAGGTGAAGTGTGAATATGATTGTGAATCTTAAGCACAGAACCCTGAGTTCT
TAAAGGCAATTTTTAAGATTAGTATCCATCAACCAAAGTTCACAAGAGTTTTTCACAAATCACCAGAGTACAAAAGCTATTTCACGAAATGTGC
AGTGGCTGTGACCTTAGTGAGATTTCTTAGACTTCTAGCCATAAGGACTGGAAGAGTTCGTAAAGCTCAGCTCCCACTTTATTCTTGAATTCCT
TATCCTGACGAATGGTGATTCAGCATGCAGCCAGGTATAGTGGAAAGAGAAGGGGCTCTGGAATCAGACAGACCTTGGGCCAGGTCCCAGCTCC
TCCACCCATTGTCCCTTTGACCTAGAACAAATTACCTAATCTCTCTATGCTTTGATTTCCTCAGCTGTGAGTTGTGAACAATGCTTGTTGTTGA
GAGTTAGAACATGGTTAAAGTGTTTAGCACAGCTCCTGGTATTTAGTAGGGCTTCAATAAATCATAGCTGCTATGCTAATTACAATAATGCTTA
TTAAGTGTTGCTCTTCAGGCTCTTTTTTAATATCTCTGTGATGGCAATGCTTCCATCATTAGACAGTGCTGATGGCTAGAATTTTCTGCCACAT
GTTGTGCCCAATCCTATTTCCTATAATTTCTATCCATCTACTCTGGTGCTGCCTTTTGTGGCCCCATAGAACAAGTCTAAACCAACTCCCACAA
AGAACACTTCAGATATTTGAAGACAATTTTAATCTCTTCCCCAAGTTTTCTTCATGGTAAACCCTTTAGTTCCTGGAATCCTTCCATAGGTGAC
TTAGTTTTGATCTCACCCAGGACACGTCTAAGTCCCTTTTCCTCACATATGAGTATCTATGGGAAGATGCTAGCCAGCCATAAAGGGAAAGTTG
AGATGGCAAGTTTTAGATGCCATCCATACTGAATAAGCTGGCTTTTGTCCATGGTTCTTGTGAACATTCTAATGCATACCCTACAAGTATATTT
CACAGTTCCTTCTTTTCACTGTAGTTTCACCAGAGTGTTCAGGAATATGAACACTGCTACCTGTGAGGAAGNNNNNNNNNNNNNNNNNNNNTTG
CAGTTCCTGCCCTTTGACTTTATATTCAGTAGTGTGACTTGCTTTGGCCAACAGAATGAGTCAGAAGAAACAGCACGCCAGCTCCAAACCTAGG
CTTCAGAGGCCCTGGGTATTTCCAGTTACTCTTCAGTGTTCTGCCATCATCATGAGATAACCTACCCCCACTAGCCTACTGGCCCAAGGAAGCA
GGGAGGCATGTAGGCTAGGGCCCCCAGCAGCACCCAGCCTGCACTAGCTGATTGTAACCAACTCACAGAAACTTGAGCAAAAGTAAGTGATTAC
TGTTTTAAGGCACTGAGTTTTGGGGTGGTTGGTTATGCAGAATTTTTGTGGCAAGAAATAATTATTATGGAAATTATGTGGGGCCAGAAAACAT
AAAGTAATACTAACCCTACCTGGACAGAGTACAAGTTTAGAAGAATTAATGAAAGATTTACAAAACTATAACCAAGCTAGATGAACACTTTTTA
AAAATGATTTACCAAATTGTAACTTTGAATTTCTTGTGCAAACTGTGACCAGGAAGAAGATAAATGTGTATATTACATTTCACGAATGAAATAG
GTAATGACGAAAGCAAACTCAATTTCTAAATATCTGTGAAAAGTTAACGTGTTTCCTATTCGATATAGTTCACTCATTTACTCAAGAAATGTTG
AATGAATCATGTGTCAGTACCATTCTAGGCCCTGGAAATATAGTTGTGGAAAAAGTGGACAAGGCCCAGGTCTCATGAAACTTGTATTCTACTG
GAGATTTAGAAAATAAAAAATTAAATAAATAAAGCAGATAACTTCAGATAATGGTAAGTACCATGAGAAAACTCAGGCAGGGTAAGGAATACCT
TAGGTAGTTTAGAAAAGACTTCTCTGAGGATGTGACATTGAAACTAAGACCAAAATGACATCAGTAATTCAAGGGAAGAAAGACTACATTGAAG
AAAATAGCAAATGCAAAGGCCCTGAGGTAGGAATAAGCTGGGAGTGTTTGAGGTACAATTAGAGGTGTGGAGAGGAGCAATGTGGTATGAAATG
AACTGGATGATATTTAAAGAGGCCAGGACATGTAGTGCTTTTTTGGCCACAGTAAGGAGTCCGTTTTATTCCAAGTCCAATGGAATCCACTGAA
GTGTACTAAGTGCATGACTTGATTTATAGGTTTTAGGAGTTTGTCCTGACTTCTGTATAGGGAATAGATTGTAGGTGGACAAGAGTGGAAGGAA
GGAGGTCGATTAAGTCATTGCATCATGGTGGCTACAACTAGGGTGAGGCCAAGGATGGAGAGAAATGAACAGGTTTGAGATATATATTGGAGGT
AGAATCAAGACTTCCTGATGGATTGGATGTGAAGGAACATGAGAAATAAAGGATAATGGCTAGGTTTTTAGTTGGGGTAACTGAGAGGATGGTT
GGTGGTGCCATTTCTGGAGATGAGGCAGATGCGAGGAACAATGAACTCAGGGGAGGGAGAGATCAGGAGTTTTGTTTGAATGAGTTAAGTCTGA
ACTTAGACGTTGAATTGGATTTGCCAGGTAGGCTGCTGGACATACTAATTGGGTAGCGAAGGCTGAAGATACCAGTTGGGCAGTCATCAGCATA
TAGATGGTATTTTAGCCAAGAGACTAAATGAGTTCATCTAGAAAATAGTAGTGAAAGTGTTTTATTTTTAATTTAAAATTTAAGAAGTTTTAAA
TTTTAAAAACTGTCAAAAAATAAATAAAAGAAAAAGCGGGAGGACTCAACCACAGAGCATGCTGACATTTAAAAGCTTAGCAGAAAAAGAGGAG
ACAGAAGAAGAGCCTGAGAGAGAGGCTGAGAGAGTGTGATGCTATGGAAGCCAAGAGAAGAAAGTGTTCCAGGAAAGAGAGTCATCAACTTGGG
TTGTGTTGGGTTGAATGCTACTGAGTCATAAAGTAAGATAAGGATCAAGGAGTAACTGTTGGATTTGGCAGTGTGGAGCTGATTGGTAACTTTG
AAAATAAAAGATTTAGTGGAATAATGGACACAGAAGTCAAATGGAATGATTGAAAAGTAAATGGGAGAAAAGAAACTGATAACAGTGAGGTTTT
GCTAAAAATGGGAATAGAGAAATAAGTAGCTAGAGAGGATGAGAGTTTAAGGTTTTGTTTTATTTGGTTTTGAATTGGAGATGCAGAGGCATAT
TTCAATGACAATGGAAATAAACCCACAGAGAGAAAAGTTGATATTGTGGGAGAGAAAATGGACAAATGCAGGATCAACGTCCTTGAGAAAGGGG
GAGACCCAGAGCACAGTGAACTGTTGGCCTTCCATGCTAACAGGAGAGGGCAGGGGATAAGGGCAACAGAGTACCAGTGAAATGGTGGATTTGG
GGATGGGAAGATGAAAGACACTGTCAGTTTACATATACATATATATATACATTTTAATATATACACTTTAATTATTGAGATGGGCTCATGCTCT
GTCACCCAGACAGAGTGCAGTGATGTTATCATAGCTCACTGCAGCCTCAAACTCCTGACCTCAAGCGATCCTCCCACCTTGACCTCCCAAAGCA
CTGGGATTACAAGCATGAGCCACTGTGCCCAGCCACTTATATTTTCTCAATGAGATATGACTTTAGATCGTCGTTTGAGGAGCCAAGACTTCTG
AATCCTGAGCCCAAAAGCACTGTGTCCTTCATTTACCATTTGGTACATTTGAAGCAGAGTGAATATGATAACCCCTTTAATATAACTTTAAAGA
GCAATACAGATGACAAAACAATTCATGTATATTCTTTCATTTGATACTCTTGCCTTGAATAATTGAAGTTCCCAGTCTGGAACAGAATTCAGTT
CGTATAAATGAAGACATTGTAATGAAGGGACTATTTACAGAGATGAGAGTGGAATTAAGAGATGTATCCAGAAACTATCAACACTCAGGAGTCA
TTACCACCCTTGGGGCCAGGGGGCCAAAGGAGATTAATAGTATTAGATCCAACGAGAGCTGGTGCCATGAAGGGAGGACCAACCAGCATGATCA
TTCATTGAAAAGATATGTAGTCACTGTCAGGGGAGTGGTGTCAATGCAGAGAGGGAATGAAAAACAAATATCCTGACTTCCCTCCACTCCCAGT
CTCTTGCTGGTGCTTCCCAATGGCTAAACCCAACTGGAAGCCAGCTGGCAAGTGAGTGGGCTGATATTTTTCATGGTGAAAGAATAGATCTGGC
AGAGAATAACCAGCAGAGCTCCTAACACTTCATGCCATAAATCTTGAAAAGATTTTGAAAACCACTCCAAGGGGAATCTTTTTACCCAATGCCA
GTGTATAAATGCATCTTATTATTTTGTGCCAGCTGGGATTTAGAAAACCTAGCTAACCATGTTCTTTAATACAAATCATCATGAGTACTTGTAA
TCCACTTGCAATCTTAAAATGTAATGTTTGCCCATAGTCTTCTTTTATTTCCATCCAGAGGCATATTAACCATAAAACTGGAGAAGCATATATT
TCAGGGCTCCTCACTTGCATGAGCCCCTTCCAAGGCCATGGGACGGCCCTAGAAATGTATTCATATGGTCATTTGTTTTTGTAAAATTTGTAAA
GGTAAGATATTTTAACTGCAATCTATTAAAAACCAACTTTTCTCACTCTGACCCCAGAGAATTCTCTCCCTGCCCACCCCCCAACCAGTTATAT
GAACTTTAGGCCCCACAAAACCTGGATCTCCTTCTGCTTTCAGTGAGACTCAAGTGTGCTGATGCAGATTTTATCCCTTTCCCGATTTTACCAC
TGTGGAGAGGAAAAGGGGTAGTTAATGAGCATCAAAATGGACATTCTGCAAGGGAAGAATGTAGCAGGAGGATGAGAAAAACAGAGGGGGGCTG
TGCTAGGGGCAGTGGAAGAAAATCACTGTGCCTGAAGGATTGCACCTGAGTCACAGAGGGTTTGCAGGTGTCTACCAGGTGACTAGTTTCCCTC
CAGGGCCTAACTCAGGTGCTGCTCTTTATATTTTCAGATGCAGATGGAAACCTGTGTCGAAGTAACCAACTGTTGCAAGTCATGCTGACCATGC
ACCGAATTGTCATCTCCTCTGCAGAACTGCTCCAAAAAGTTATCACCCTATATCCTTTAACATAGTGACTGGCAATCCCAAAATGGGATCCACC
CAAAAAGTAGCTTGAAATTTGAAGTATGCTTTTATTTTTATTGGTTTGGAATAACCCTGAGTGGCAAATAGGTTCATATGTCCTTTCAGGGGTA
TGGGTGCATGTGTTGGGGGTGTGTTCATGTATCCTCTGTTGGGTGGGGCAATGTTATTGATGCTGATTGCTCTGGGGGGTGGTCAAAGAAATCA
ATATGCAAGCACAATCTTCAGGCTCTTAATAGTAAAAAATATTTTTTCTGTAGAGTGTGCAAAATAGATATTCATCCTGTGCAAATTGACAAAG
GTGCAAGCATGACTCAAGGATAAATTTCTTTCTGGCCTTCCTGTCCAATTCTTCAACTTTCTCCAGGTTCTGAAGAAAGATTCCCAGTGCCACA
GCATCTCGAGAATCTGCTGGTGCCTTATTGCTTCAGGCACGAGGACTGACTATGTGCCAAGCAAAACCTGCTGGACTTTAACCTTATTACGGGA
TATGAATCAAGTAGGGAGGAGAAAGCTCCTGCTTGCTTTTTCTCACTGATGACACTGTAAGCAGCAGCCCCCACAAAAGAAGAGTTCTAGGCGG
AGTGAGACCGTTTAGCACCCAAGGCGCAGGTCCCTGGTACTGTGTCATGACTTGTAGCTGCTCTAACACTTTTCCACTCTCCTAATTCCCCGCG
TTTCATCTTACAGCACACAGAAAAAATAAAAACCATCAGGACTGAATCCCTTCTCTATACCTACTCATGAGTCTTTACCTCTCATCTCAAAGGA
GGTGTTTTCCAGTAGCACACAAAGTGGGGGAGCATTGCGAGAAGTGCACATAAATAAGAGGTGCAGGTAATAAGTGGGTGCCTCTTCTACAGAG
AATTTTAAACCATCATGAAACCAACTCAGTGTCTACTTTTTATTAATTTCATGTACCAGTGATTATAAACAATGTCAGTGATTAAATATTCCTC
CCTAAAAACTTATTTGTTGGCCTAGGGACTAAATTGTTCCTGGGGTGTCTGGGCACAGTAGCTCACATCTGTAATCCCAGCACTTTGGAAGGCC
AAAGTGGGCAGATCACTTAAGGTCAGGAGTTTGAGACCAGCCTGGCCAACATGGTGAAACCCCATCTCTACTAAAAATATGAAAATTAGCCGGG
CATGGTGACATATGCCTGTAATTCCAGCTACTCATGAGGCTGAGGCAGGAGAATCACTTGAACCTGGGAACTGGAGGTTGCAGTCAGCTGAGAT
CACACCACTGCACTCCAGCCTGGGCAATGAAGTGAGACTCTGTCTCAAAAAAAAAAAAAAGAAAGAAAATTGTACCTCGGGGTTCCTGCCCTTA
GTGCACTACTGGCTGCCTACATATTGGGGCAGACCCCCCCTCCCTTTCCCATGGTCCCTCGTACTTCTCACAGAATCTTACTCCACCAGCTATC
ACCCCTCCTATACTTTTAAACTCTACCTCTTCAATGGCACCTGCCCCTCAGCCTAAAACACATTCAAGTCTCCTCATCTAAAAATCAACTCTTA
ACCCTACCTCCCCTTCATTCCATTGTTAGGGTTAAAAATTTGATGTGAAAGCGTCTTAAAATAGTCTACACTCACTATCTCCAATCTCTTTACT
ACTCCTCACTTCGTAACTGTGTTAAGTTGGCCCCCAGTATTCGAACTTTCCTCTGATGTCACCACTAACCTCCTGATTGCAAAGCCCAATGGCT
TTTTCTCATCCTTGTTTCCATTGACCCCCAGAAGCATTAGGCATGACTGACAACCCCGTTCTCCTCCCAGCTCTCCCTCCAAGGCTCCCGGAAC
GACACCCTCCTGGCTTTCCTACCTCTTGGGTTGGGCCTTCTCCAGCTTTTCATCTAGAGGCTTCTTCGAGCTCTGCTTACATATGGTGTAATGT
CCTGGTTTTCCTCTTACTCAGCTTCCTTTCTGTGGGTGATTTCTCACCAGAATTCCTACCACTGTTTCCACCATTCTTCTGTGCTGATGGTGAC
TTTCAAGTCTGGATTTCTCTAACTTAAACCTTTCCTTTTTTTTTTGGAAATTGGTGCGGGGAGAGGGGTCTCACTATATTGCCTAGTCTGGTCT
CAAACTCCTGGCATCAAGTCATCCTCCCACCTCAGCCTCCCAAAGTACTGGGATTCCAGGCATGAGCCACGGCACCCAGCCATCTAACCTAAAC
CATTTTTCTTAGGTTTATACCAGTTTGTCCTGCTAACACTTAAGACTTTAATATATGCATTAGCCCACTGTCCCCACCCACAGCCACTACCTCA
TTAATTCTCCTTCGACACCAGTACAGCCTTGTTTTGCCTAAGACACATTCTGAGAAATACATCATTGGGCGACTCTGTCATTGTGTGAACACCA
TAGAGTGTACTTACACAAACCTAGATGGCATAGCCTGCTACACTTCTAGGCTAGACGGTACAGCCTGTTGCTCCTAGGCTACAAACCTGTACAG
CAGGTTACTGTACTGAATACTGTAGGTGGTTGTAGCACATGGTAAGTATTTATATACCTAAACATAGAAAAAGTACAGTAAAAATATGGTATAA
AAGATTAAAAAATGATATGTATAGGGGGGCACTTACCATGAATGGAGCTTGCAGGACTGGAAGTTGCTCTGGGTAGTCAGGGGTGAGTGGTGAG
TGAATGTGAAGGCCTAGGACATTACTGTACATAACTGTAGGTTTTATAAACACTATATACTTAGGCTATACTAAATTGATAAAAAATATTTTTC
TTTCTTCAATAATAATTTAGCTTACTGTGACTTTATGTTATAAACTTAATTTTTAAAACTTTGACTCTACACAGTGTACAGCTGTGTAAAAATA
TTTTCTTTATATTCTTCTGTAAGCTTCTTTCTGTTTTAAAAATGTTTAATGTTTATTAACTTTTTAAACTTTCTTGTCAAAATCTAAGACACAA
GTATACACAGTAGCCTAGGCCTATATTGGGTCAGGATTATGAAGACAGGATGAGGCAATAGGAATTTTTCAACTTCATTGTAATCTCATGGGAC
CACTGTCATATATGTGGTCCGTCATGGACCAAAATGTTATGCAGCACATGACTGTATTTTCATGGTCAATTTCAGTTAATAGTGTTAGTATCTA
TTCTTGCCTAAACCAGTAACATCAGAAGCACTCTTGACTTCTCCCCTGCTTTCACCTCCTACAGTCTGTCACCTGATCCTAGGGTTTCTACTTC
AGAAATGACTCTTATCTGGTCTCTGCTCTCCATTCCCATACCATGCCTTAGTTCATGTCTCCGTGGTCTCTCTCCTGAACCACTGTCCCACTCC
AGTCTTTGTATCTACATGGTCCGCCTACCCCGTCTCATGGTAGCTACCCTTGAAATTCTTTCCTACAAAGCAAATTGGGCAGGCCATTGTTTCT
GACCCTCTGCAGACTACGGAGTTAATGTCAACTCCTTAGCTTGCCAGCAAAAGGGCCTCCTCAGTCTGTTCCCAGCGAGTTTTTCCTGCTTCAT
TCCGTAGCTCTCTGAGAAACCCTTTCCCTTCCTCACTGAACTTCTCAATATACTGGATGTAATGGGGCCTTTTATCATTCCTGTGCCTTGAAAG
CCTTTCTACCCTCTTTGTTTAGAAGCTCTTTCAAGACCCTTCTGGGAAGCTTTTCTAGACTTTTCCAGCCCTTCTCCCCTTTTAAAAATACTTC
TAATGTTTTAAAATAGTATTATTGATTGACAATCTATTTAATTCCTTTGATTTTAGTTTTGTACTGCTTAAGTCAAAGTGCGTTTCTCATATCT
CTGGCCTGGATGTAATCTGCATTGAAAAACTCACAGAAAGTGTGAAGTGTTTTTATTCTGTTAGCTAAATAAATGTATCTACCTAAACTTCAGT
CCGTTTTGCAATGTAGTGCCTATGTACTCTGGTCTTTATAGATGACCGTTTCAAGTAAAGTACAGAACGTTTGTGTCTAGCTGCTGTGATTTCA
ATTTGGTTAATAATATAAAAGATTGCAAGGGTACTGAAAAATTGATTGAATTACAAATTAAGAAAGATATATTTTTGTATTTTAAAAGTATGTA
CACTGTAACTTACCTATTTGTGTGTCGTCTCCCCCGCTAGACTCTGTCTTTCAAGGGCAGGGAGCAAGGCTTATTTATCTTTGTATCTAGAACT
TAGTTTAGTGGCTGTTTCATGGTAGGACACAATAAATGTTGCATTACTATGGGTGCAAACATTGGGATACTTTTTATATTTACAAGAACTTTTA
CCTGTGATATCTGGGCTTTGCTCAGGTGAAGATGTAACCTGGGGTAGGGAAAGGGATTCTGAGAGTATGAAATAATACTCCTGTAATGAAAGCC
AGGTTAAACATTGAAGGCAAAATTATTTTCTTTCTTTACGCTTAGTTTCCCTGTTCTCTGACCTGGAAGTAATAGAATTTTTAGTTAAATAAGC
TCAGATGGTCTCCTGATTACCATTGTGAAAAGAAGAGAGGGATAAATTTGAAAATGTGCTTTGAATAGTTTAGGTGCCTGAAAAGTACAGTCAG
AACTGTACTGGTACTTTATAGCCACAGTACTAGCTATGAAGAAAAGAAAAAGGTATGGGGTCTGAGGGTTCCAGCAAACACTGAAGTTTACCAA
GATCAGCAGATGCCTGAGCCTCTTACTATTTAGCCTGCATGTGCTGGTGTTTGCTTCAGCTCCTGAATGAAGTGAGAAAGAGGGTGCCCTGCTC
CCTGTGGGGGGCAGCCTTTGCCATGGCATAGGGGCTCTAAGGACCTCTGAATGATGCCCAGGCTCAGCACTCACGTGTAGACTGACTGGATTTA
CAACACTGACGCTGCACCACATGCAGCCAACGTGCACTGTCAGAATATACTTTTGAAGGGAACGATAAGGAGCCACTGGGAGAAGGTGAATGAC
ACGGTAAAAGTCACCATGTCGATTTAATGTATCTACTTAGCTTTAAAACAGAAGTGTGGTTTTTGTGCCTTCCCCTTTAAAATGGAAGAATAAA
AATTTCAACAAGTAGAACAAATGATAAAAATATAGAATCTGAGAGGTATTTATCTATGTGCCTTTTGCCTGAATCTCTTTGCATTGAAGTGATG
CATTTTCTTAGTGATGTGGCATAAAGAAACATAAAGCCATCTCATTCTCACTTCTACTTTTCCACCCAAAGAAAGGCAGGCATAAAAACTTTCT
ACTTCATGAAGTTTGCCAGTTCCCTGCACTTATTTTTATGTCAATTACCTTTGTTGATGTGTAGGGTTTTTTGGGTTTTTGTTTTGTTTTGGTG
CTCTGATCTAAAGGGCAGATTTTATAGGCAGTATATGTATTAAAATTTAATTTTTAAAACTAGAAGTCATTTTATTAAAATTACAAATTTTATA
ACCATAGTTCTTGTTTAGGGTTTCAAGTTTAGCTTGCAAATCTTACTGTTTCCATAAGTCTAGCATGTTTCAGCAAGCATTTTTAAGGGACTTT
GAAAAATGTTTCGTTAATTTGAATAATGTTAATTAAATATTCCCAATGATTTTAAACTACAGTTCTGCATTTTATATCTTAGATAATTTTTAAG
TGCTTCAGATACCTCCCTGAATTCTAAATAGTTTTTTATAACTCTAATAGATTAAATTTATAAACAGTAAAGCTATCATTATCTTAGATGTTCC
AAAGCTATGCATAAACTTAATAAGGTTTCAATTTAAAACCACAAGTGTAAAGCACTTAATTATATATTGCAAATTGAAGTTTCAAGGCTATCAT
TCTAATATGCTTTTAAACATTACAAGCATATACAATTTCAAAATGCACAGATCTCCTTCCTGACAAAAAAGATCAGTACTATGACTTTGACTCT
CTTTTGCTTTTCTTTATTTAACTCTAAATTTTCCAAAGGTTAAAATATATACACCCACAGAAGGAAGACCAGTCCTGTCCCAGTTAATTAAAAT
GTTTGCTGGGTTGTTCACTGGATTCCTCTCATGGGCCCAGCTGGAATTCACTGAACCCTATATTGTAGTCATTATGCACAGCTTTTAGAAGGAA
AACAAGGCATGGCCTTTACGGGCGGGCACAGAGCCCACATAGCCTGATGCCTCAGTCTGTTGATGGGAAATGGCAGGACCTATTCGGGCTCATC
ACTGCATTGGAGTTCTCATCTCTTTGACTCTTAAAATAGATGAATATTTTTTTCCATTTATCTTTAAAGACATGTGAACTTGATGAGATCTTGC
TATTCTTTCATATTCTTGGAATGCTCAGAATGAAAAGGATCCTTAAGGTGACCTCCAGTTTTGTTTTCGATTATTCACACGGTTTATCTGACTT
GCCGTTACAATCTATGAGGTCAGTCTACTGACATCCTCTAGGTGTATATATTGTAACTTTCATATTATTGTTCTTCATTATCATGACATATCTG
AATATTGAATATGTATTTTTTCCTCTTCGAATTCACTGCATACATGTGTATCAGTTAAAAGAAACATTCTAAAAGATAAATGGGGCTGCTGTTT
TTTCTTTTTTTTCTGCTTCATTTTTCCTTCATAGGGGCTGCTTTTTGAGCACAGGCAAGGAGTCATTTGCCCCTTCTTCACTTTTTATAAGTTA
CCTGTCTCAGGACCTCTTTACATGATTCATTTCTTAGTTCTGCAGTGCTGCTGCTTCCTTCCGTAAGCCAGGTCGACGTGGGCTGGAGAGAAAA
TTACCATCATCGCCTTTCTAGGCAATAATATGCATACAGCTGTACACATCAAGTTGGTTTTTATCCTTTGGCCAGAAAGATAAAGCATCACATT
TTCATTTTTTAGAAAAAATATTTTGGGAGGTAGTTTCAGCAAATACTTCCAAAGATGAAAAGTCGTTTGGTTTCTGTAACAGAGGTCTCCATTT
CCCTTAACCACAGCCCTACCTATAAGGATGCTTTGGCAAAGAATTCACCAGGACTTTGCCTGAAGATCTGTTATTTTGTAACGTAATGTTTCTT
TATGTATTTCAAGACTTTGTGGAGCAAGGTGAAATGAAAGGTGAAGCAAGGGACTTTCCCTGCCTTTCCTGACCTCTATAGAACACCTTTGGAC
AGATGGAAAAGGGTAGTCCTTCATAACAGTGAATTTTCTCTGGTGTACTTGAGCTTAATTATTTTATACCAACCTTTTTTCAGTCTTTGGTATC
AAATGACATGAAGGAGGGAATACAGAAATAATTAAAGGTCTGTTATTTTCTTTATTTTTGTTCTTAATTATACAAGTAATATAGCTCATTATAG
AACATTTTTAAAAATGTAGAAAAGAATATAACTATAATAATGATCACTCATATCCAGTTACCTATTTTGGTGTATTTCCTTTGTCTTGTTTTCA
TGTCAATTTTTTTGAGATGAAAATATATATACGGTTTTATATCTTATAGTTTTCACTTAGCTTTATAGCATGAGAATCTTCTCTAGTCATTAAA
GACTTTTTGTAAACATTCTTTTTAATAGCCATGTAATATTCGAATATGATAAAGCATAATCTATGAATAGATTGTCTCATTTTGGACATTTGGT
TTATCTATAGTTCTCTCCCTTATAATTATCTCCAACCCACATGATTGTGCCTGAATCTTTGTCATGGCTCCTTTGATTATGCTATGCCTTATCC
TACCACAGCATTTGTGTGGAGGGACAGAAGATTTTCAGTGGATGGGTTTTCTTCCTTCCCTGCTCCCACCCCAGCTCCTTCAATATACTAATAG
ACGAATCAGACTTTGTCTTTTTCTGAGTTCTCTTTGTGGCAGTAAATTCCTTTTGGAACCCAACAAATTGTGAGTCCTTGGTATCAGTTTTGGA
TTGTGTTTTTTAACCCCCTCCTTGTAGGTATTGGATAACAGAATTCTGGGTCATGTTTAAAATGGACGCCAGCTTGACAGACACTATGGAGGAG
TTTCAGGAACTGGTGAAAGCTAAGGGTGAGGAGTTACATTGCCGCCTGATTGACACAACTCAAATGTGAGTGTCAAGGTCTTGACTCATCTTTC
GAAACCACCTCCCTCCTGTAATATAATCCCAGTTGCTTGTTGGGCTTCTCACCCCCAGCGGTGACTGCTGCTCTCTTTCTCCACTCTGAGAAGC
CCCTCAAATACACAGGTTCAAACTGCCTCACCAAAGTGAAGGCTTGGCATTTAACAGAAAAGCAGAGAGGCCTCATGGTGATAAAGCAGTAGGT
GACATATCCAGGAGCAGAAAAAGTAAGTCCCAGTCAAAAAGAAATCAGGTAGCAAGATATTGACTAAAATTAATCCAGATAATGAAAAACTGAA
AGTGCAAATGACTGAACCCACGCTTAATGCCAGGAGGCACACCTGAACTTGTAAATGGGACAGGACTAAAAAATGTATTCAGGAGAAGGGTTAT
AACATATATGGATGTCTATGAAAGACACTTAGACTTCCAGAGCTGGATGGGATTCCAGGAATGTTTTAAATTATTCCTTGGAATTCTTATTTAT
AAGACTGACCCATTCTGGGAAAATGAGTGCCTTTCCTAATTAGGGGGAGGGGAATCTATGCTTTGTATGCCAGGGTTTTCACAGTGTGGCTGCT
TTATTTTGAAATAGTACAAATCCCTAAGAAATAGAATTCTAGAACTGATATATATTCTAGAGATCATTTCATCCAACATCCTGATTTTTCTGAC
TGGGAAATTGAGGCTCAGCAAGAATGTGACTCATCTAGGGTCCAGCTAGTTAAGCTAGTGACAGACCAGCAGCTAGCCTCTGAGGTCCTGTCCA
TGATGCACTGTAGCCACGTAGAAATGATTTCAAGATTACATTCCAGAGCCCCAAATAAGTCTGTTTATCAGTTTGGATTCTCTGTACTTCTCTG
CTTAAAATTACACAACTTGAAAGATAAGAGATTATTCAAAGTAATAGTTTCTTCATTTTAAAGATGAAATTAGAGCCCAGGGCAATTCTCAACC
CCAGCTCTCCTTGTCCCAGTATTTCCTAGCTGACTTTTCTTGACCAAAATTTTCCACATTATATTCTGTAGGAATTATTAGTCTGTGGGGATAT
TACTTGGCCAGATATAACTGAGGAATAATGAGTTAAACTTTCCTTTTGCAGTGCTTTTCAGAGTGTGTAATATGCTCACTGGCCAAAGAGGCTA
CAGAATTTATAGCACTTCCCAAGCTCATTGACCACAGAACCCTTTTATCAAGAGACAAGGTTCCCAGGAATACCAGTTTGGAACACAGGCAACC
TGCTGTCTTTCAAAATGGGGCCGCTTCCCTTTGCTTGTTTAGTGAAGGAAACTGAATAAGAAATGCATGGGTTGATTACAAGAAAATAATGGGG
GCAGGGCGCACTCTAGGGTCAGCTAGGCTTCCTTGGTCATTTCAGTAGCTGAGGACATTTGAGGAAAATGACACAACTCTGCCAAGAGTGACCA
TATGTTTCTACGCGTGATTCCCTCCCTTTATGACATCTTGCTGTGGTTCTTTGAGCTCTCTTTCTGGCATGAAAACTGTTTCACTGCCTTGGGA
TTTCCAACCAGATAGAGAGTCCCTATCATTCACACAAGAATGAAGGAACACACAAGCAGAATGGAGGGAGCAGACATACCAGATGATACACAAA
GGAGCCAGGACCAAAGGCAAGGAAACTGACCGATACCTGAGACTCCTTCCTTCCCACTGCCTTAAAGTAAACTCATTTATCCTGTACCCAACTG
CACACTTAAAAGGCTCACTGAAAACCAGCAAGACCTCCTGGAGCCTGCCATGGAAAAAAACTGATTTGGAGAAACTCTGTGAATGCACTGTTTT
GGCATTCACAAGGAAAGTTAGCTAATGGTGTTTTGTATATTCTTGTGAGAAATGTTAATGGATTTACTTGCAAAAAGCGATTTATTCCTTTTCC
CTGTCTTCTCCCTTTCACATTTACCCACAAAAGCAATGCCCGTGACTGGTCCAGGAAACTTACTCAAAGGATAAAATCAAATACCAGCAAGAAA
CGGAAAGTCTCCCTGCTCTTTGACCATCTGGAACCAGAAGAGCTATCCGAGCACCTCACCTACCTTGAGTTCAAGTCTTTCCGGAGCATATCGG
TATGTATGCAAGGGGCAGGAGAAAAATCTTCCCTGGGATATTTCTGAAAATAACATGATAATTCAACAGCCCATCCGCTTCATAACCTTAGAGG
CCCCCTCAAGTCCTGGCAGGCTTTCCTGCCAGACATCATAGAGTCTGAAAAAATCAGTACCATCTGAATTCCTTTGATTGTGACTCCTGTGCTT
CTCCCATCTCTCTTCTTCCATGCCCCCGCCCCATACCATCCCACCACTCACTCAAGTTACCATACTGTGGGCACACATCACACACACACACACA
CACACACTCTCTCTCTCTCTCTCTCTCTCTCTCTGTCTCTCTCATTCTACCCTCATACCCCTCATAATCCTCATACCCCTGATAATCATTAGGC
TTCAACAACTCTTTTTAAAATCTTCCTCAAAAAAAAAAAGGGGGGGGGGTGCGGGGGCGGGGAGAGGATATGTCCTCTCACAGTTTGAATTCAT
TCTGGGGTAAGCTTTGAATGGCTCTGGGAAATCCCAAAATAGATTCTACTGCCCTAGCCCAGAACATACCTAAATCCTTGAAGTGGTCCTGGCC
CAGAAGTCACTGTGATTCTAGAGATAAGCTGTGCTGACCCAAAACCTTTCAACTGGGGCAACTAAGCAGAGTCAAAGGGAGAGAGATTTCAGTT
GATCATCAGGTACAGAAAGAGTACAGGTTCATCCTTTCCTCACTGCAATCCATATGTGATCCCAAAGAATATTAGTTCTATGCAAGAGAACTTG
TCAACATGTCAGATGCCAACAGACCCTCACTGGCTAATGTGCTTTCCTGAGAAATGAAACCCTTATTCCACTTAGCCCCTACCCCTACCAACAG
ATACAGTCTTCACCTCCGTGCTAAAAATAGTGACCACCTAGTTGCTGGGTCCATTTATTAAAATGACCAGTATTCTCCTGGTGAGGGGATGGAG
GCCCAGAGGGCTGACTTGAACAAGGTCGACACAGCTGATTACAGTCAAAGCTGGGGCTAGGACTACATGCCTCTCTCAGTCACTCAGCACCAAT
TTGTTGAGCTCAGTTGTGTCTGGAAGGAGACCTGCAAATCAGGTTACAAAGGTTATTTTACATTTTCATTCATAATATTGACAGCCCTTCTGTT
TTCACGCAGCTGTTTGGTCACTCAGCCAGGAAGCTCCCAGCTTCCATTTGGAAATAACTTCTCCAAGCATTAACTCTCCATTCTCTGCACCCCT
CAGTACCCCAGACCCAAATTGAAAAGCTCTGCCTCAGGAGTTCCCATTTGGCAGTGCCTCCCCGTCACAGGGAAGGACAGCAGTCAGAGCTGAG
CCACTGAAAAAAGCCATTTATCACACAGGAAATCTGAGCTCTGCAGGGGTCAAACTCGCAGGCTGCTTGGTCAGGCCTGCAGGATGTCTCCTTG
ATGCCAATGCTCACATCAGTGGAGGCAGAAGTGAAAAATCAGTGCAGAACGAGGAATCCCAGCCAGTGTCCCCAGGGGTTGAACAGTGTTCTAT
TTGCAAGTGAAAACATCAGTTTCAACCTTCATTTCTTTTGAGTGGCTTGGTCCCTTCATAGAAGACTATCTCAGGGTTTTTTTGTTTTTCCTGT
ACAGTGCTAAACAGTTTTACCAAACACAAGTTTTCTCTCCAACATGAGGTTGGAGGGAAATTTATCTGTGCTGTGAATTGAAAGGCATTTGATA
TCTTCTGTTTATTACAAAACTTTAGGGGTAGTGAGGATGTTACTGGGATAATTGTTTTAAAAAAACAAGTGGATTTAAAGTTATATTTATAGTG
GGAGGGGGGTATTAAATGTATTCACTGGAATATATTAATTGAATGAATATATTCAAAATATATGCAATGAGTTGTGGCTACTTTCTTTTAGAAC
CAGTAAGATGTTTGCTTTATATATCTCTCTTAAGGAGCGATTTTGGTCCTACTCATAGGTTTTCCACCCATCAGCAGCCATATAGCACAGTAAA
ATGGGGCTCAGTTAATTTGCAGCTATTTTATTTGGGTTGTGACTTCTCATCTATATATTTACTACTTAGGCAGAACTAAGGTGTACTGTAGTAA
TAACCCCCCACCCACCCACCTCCTGTACAATCTCAGTGGCTTAATTAAGCAAAAGTTTATTTTTCACTCACACTGCATGTCTAACATGGGTCAG
CAGAGGCTGATCAGAGTTCCCCAGGAACCCAGATGATGGAGGCTTCATCTTGCCAGGAATTTCCAAGATCTCTGCAGCAGTAGGAAGGCAACAT
GGCAGACCACTCACTGGCTCTTACATCTTTGCCTCCAAAGTTACATCGCTTCCACTCAACATTCTGCTGGCTGAACCATGTCATATGGTCACAC
CTTCTTTCAAAGGGAAGAGTTGAGAAGGGAAGAGTTGGAAATAATTGGGGAAAAGCACCAAAGACTTCCATAGGAAACTTGAAGAGAAACAGAC
TGTGATTTGAGCAGAGGGATTCTTTGTGACAGGGACACAATAGCTACAAACATCACTTAGACTAGATCTTCAGGGGACATTTCCAGTTTTACAC
ATGTTGTTTCATTGCCAACTGTAGTCAATGCTATTGTCAACTTGGGAAACCATGATCAGCAAACATATAGCTAACCAAATTTTTAAGTACTCCA
TTTGCCTCTGCTCCAGTTGGTGAGTAGAAGGAAATACAAACAGGCTTGTATTAGCATAAGGTTCATAACTACTCCATTAGCGCAACCTTACATA
TATGTAACACTTTAAAAAGTTAAAGCTTTCACACATTATCTTCTTTGATCTTCATAACAATTCTATGTCCTAGATAGCCCAGATTTTATGATCA
CATTTTTAAGGTAAGAAAACAGCTGGGGAGAGAGAGATTTGTTTTTGTCAGGGGAATTACCTTTTATTCCCTTAACCTTAGCAGCAATACTGAT
CTTTATTCTGTACTGTATTCTTTAGAATTTAGAATAGTCAGTAACAATATCTACTGAAATACAGCATTTGGATTAACTAATGTGTCTACACATC
CACTTATTCCTAATAACTTTCGATGTAGAGAAATCATGCTGTGGGTAGAATAAGGAAGATTTCCCTCCCATCATGCTTGTTGGCAAGTGGCCAA
GATGCAGAAGAGCACCAGGAGCTCCTCTGTTCCATGGCACTTCCCAGCCATCAACTGAGCAGACTGGACTTGTCCCTTAAATCTTCTGGAATAC
CAGAGTACAGTACTGATAGGTTTTTTTTGTTGTTGTTGTTTCTTTTCCTGCAGTTCTCTGATTATCAGAATTACCTTGTAAATAGCTGTGTGAA
GGAAAACCCCACCATGGAGCGATCTATTGCTCTGTGCAACGGCATCTCCCAGTGGGTACAACTGATGGTTCTCAGCCGCCCCACGCCGCAGCTC
CGAGCAGAAGTCTTCATCAAGTTCATCCAGGTGGCTCAGGTGAATAACTGGTTTAAGACATTTGGCTTGGGCTATAAGGTAAACTTTCTATCCC
CTTTTCCTCCAGCTTAGTCTATTAATTAGAGCTGTTTTTTCCCTCCTGAACCATGGCGAGGGGGTGGAGAGGTTTGTGTGCCTTCAACCAGATC
TAGATATGGTGACTTGTCTCTTCTTCCATACAAGGACAGTGTGGAGGGGAGGGGGCCATACAGGCCATATCAGGGGTCAGGATCCAGTTTTAGA
TCTGTTTAGACCTTTAACATTTTTCAAAAGATGCTTACCAGCCTACATTATTTTCCCGAGTCTGGCCCACATGGCAAAGGAAAGGGCAATTCTA
AGATTTACTGGAGCTGGACCATCCTGGATTGTCTTAGGTCTTTAAGCCCATGCAGTGCTGAATGGCTGCATTTAATGTTTGAGGGCCATTTTAT
AAGAGGAAAACAAGTACTATGAACCCATATTTGAAGTTCCCCAGAGATTCTAGCTTCTCTGTCCCAGTTACTGTCCTATATAGGCACTGGCATT
GCATGGGAAAATAAGACAAAGTCCTTACCCTCAAAAATAAAAGTCTGGTAAATTTGGAATAAATAAAAGATTACACTTAATAATATCTTTCTCC
AACTCTGGATGGTCTAGACCAGTGTTTCTCAAAGTCAACAGCTCTGACTTTGGATCACCTGCTCTGATATTAACTAAAGGTATATTAAAAGTAC
AGATCTCCAAGCCTAACCCCAGATCCAGGCAATCAGAATGTCTGGGTTAGGTCCAGAAACCATTGTGTTAAACAAATACTTGAGGTGATTCTAA
GAAAGCACTGATCTAGAAGGTGGTCCACAGATCAGCAACAACAAAAGGAGAGAGATGTAATGCCTCCCAGATGTGGAATCCACCAGTCTGAATA
AAGCAGAAGGGGAGACATGGACAGGAAATTGCAATGCCTCGTAACTAGTCTTTAACCAGCGTTAAGGGAGACTCACGGCACAGAGACAAGAGGC
AGCCTCTAAGCTCCCCATATAACTGACATGTACAGTGACTCTGCTGTCATCTGTCTTCTGTGTCACAGAAGCTCCACCAACTACAGAACTTCAA
TACACTGATGGCTGTGATAGGTGGGGCGTGTCACAGCTCAATCTCGAGGCTCAAGGAGACAAGTTCGCATGTCCCACATGAAATCAATAAGGTC
AGTGCTACTGTCTTCTCTGGGGCCCTTAGCAGCATTCTCAAGATGTGTGCCAACATTTTCTCCTTGGTGGGCAGCCCAGAGAGCATTTCCAACC
ACACCATCCCTTGTCAACCAGGCTAAGTGGCAGGGAGGCAAACCTTAAGGAAATCCATAGGATGGAGAAGTCACATTTTTTAGAGTAACTGTGA
TTTTGTCTGGCCTCAGACAGTGTCACTGCAAACATTCCTGCTGGACCAGTTGAAACAATGTGTGCCTCTTCCCATGTTCATAGGCCATGGAATA
TTCAGTTACCATCTTTGACACTGATTCCCTCGCTCCAGCTCCTTGCTCTAAAATGTGTTCTCAAAAGGAATTGTGGTTCGGTTGACCATAGGTC
AGTTTGCACATTGAGTGTAGTTATATAGTGATATATTAAAAACTTAGCTATCCAGAACCCTTGAAGAATGACATTCCGGATAGTTGAATTTTAC
CAGATAATTGGATATGAGTTCTTCAGATACCATTTTGTAATACATAATGTTTTATTAATGAATATTTTTCTTAAATGTCCTGTACATTTTCCTA
CATTATTAGATTTTACAGAATATACTTTTATCTTTTATGACATAGGGCTGTTTTGCTTGTTTCTCTTTTTTATAGAAACAGGGTCTTCCTCTGT
CATCAAGGCTGGAGCACAGGCTGGCACGATCATAGCTCACTGCAGTCTCAAACTCCTGGGCTCAAGCAATCCTCCCACCTCAGCCTACCAAGTA
GCTAGGACCATGGGTGCACACCATTATGCCCAGCTATTTTTTAAAATTTTTGTAGAGATAAGGGTCTCCCTATGTTGTCCAGACTGGTCTCCAA
CTCTTGGCCTCAAGCGATCCTCCCATCTCGGCCTCCTAAAGTATTGGAATTACAGGCATGAGCCACTGAGTCCAGCTGGAGCTGTTGTTATAAA
TATAAACCACTGTAATATACCGAGGATATAAATGTATGGCATGGGTTAGATAATGACTGCTCTTTGAGCACTTTCATGTAAGAGGACCTTACTA
TACTCAAGCCCCGATCCTTCCAAACTAGCATGGAGAGGAACTCTCTTTTTAGGGAGAGATACCTAAGCTCATTACCCCATCTGTTTTTCCCAGG
TGTTCAGCTCCCTTTTGGGGAGTCTTTTATTATCTCTGTTATCACAATGCTGGGCCTCTGGGGAGGCCCCCCACTTCCCAGTGGTCTGATCAAA
AGGGCATCATCTTTAGTCACCTCTTCATTCCTTAACGGTTCTGCTGAAACCAGGTGGAACAGTTGAAAAGATTGCCCACATCTCAGAGGTGACA
GAGAGAAATAGTCACAGAGATTAAGAAGCCTTCATGTCATTTAGCTTATAAGAGAGAGCTTGCTCCTCTTCAGCTTGGGGTCCCCCCACAGCAG
TGCTTCCTGTCGGTAGCTACTTGACCCTCAGGGTGGTCTGCATAGTGAATTAGTAAGTCCAGGGTTGAAGCAAAAGTCCCCAAGTTGTTGATTT
CACCTTCGGAGGGGAATAAAAATATCTTTATCATTTTTGCTGTTACACTCTTGTCTTGTGAGCCCCTTCCATGCCTAGGGCTCACCTGCACCAT
TGGTAGAGGTTTATGAAGAAGAAGCTCTCTTGCCATCTCCCAGTGATTTGAAGGGGTCTGACTCCAAGAACTCCAAGTTCTTCATTGTGGAGAA
ATGGTACTTCGTAGGCCACAATTTTATTAAGTTTGGGCACAGTGTCTAAAAGGGTTACAGTAGTCCCCCTTATCTGAGGTTTTGTCTCCTGTAG
TTTCAGTTATCTGAGGTCAACTGCAGTCCAAAAAAAATTTAATGGAAAATCCCAGAAATAATTCATAAATTTTATTATTTATTTATTGATTGAG
ACAGTCTCACTCTGTCACCCAGGCTGGAGTGCAGTGGCTCAGTCTCAGCTCACTGGAATCTCCGCCTCCCAGGTTCAAGTAATCCTCCTGCCTC
AGGCTCCCAAGTAGCTGGGACTACAGGCGTGTGCCACCACGCCGGGTTAATTTTGTATTTTTAGTAGAGACGGGGTTTCACCATGTTAGCCAGG
CTGGTCTTGAACTTTGGACCTCAGGTGATCCGTCCACCTCGGTCTCCCAAAGTGCTGGGATTACAGGCATGAACCACCACGCCTGGCCAATTCA
TAAGTTTTAAAATGCATGCTGTGCTGAGTAGCATGATGAAATCTTAAGCCATCCCATTCCATTCTTTCTGGGACTCCTTCATATCAGTCACTAA
GTAGCCGTCTTGGTCATCAGATTGACTGTCATGGTATTGCAGTGCTTGTGTTCAAGTAACTCTCACTTTGTTTAATAATGGCCTCACAGTGCAA
GAGTAATGATGTTGGCAATTTGGATATGCCAAAGAGCAGCCCTAAAGTGTTTCCTCTAAGTTCTTTACTTAATAAGGAAGGAAAAAAATCATAT
GCTGAGGTTGCTAAGATCTAAGTAAGAAGGAATTTCATCTATGAAATTGTGAAAAAGAAAAGAAGTTCATTCTAGTTTCTCTTTTGTACTTCAT
ACTGCAAAAAGTTATGGCCACAGTGCATGATGGGAATGGCATTACATTTGTGGGTGGGAAACATGAACAGAAATGTGTTCCACTTGACAGCAAT
CGGGTTTGTTACTATGCACAGTTTCAGGCATCAATTAGGCATCTTGGACTGTATCCCCCTAAGGATAAGAGAGGACTCCTTATGTTGTATGATA
ACATGATTGGCAGACAGTCACTTCATGTCTTTGCTTCTGAGAAAGCTGGTTATCACTCATGGGGAATGGATTCTGTGAACTGCTTGCTGACTTG
AATGACAAGTGATTGAAAAGAAAACTAGATCTGGCTGCTCCCTTTCTGTGCTGGTGAGCAGCCGTTCCCACTTCCAGGTTTGAAGCAGGGTGTA
ACCTCTAATGTCCTCTCTCCTGTCCTTTGCTCAGAATTGATCTAGTCTATTCAGTCTTTTTAGTTCAAGGTTTTAGTCTGTGAATGGAATGTCA
CTTGCTTTCTAGTCATAGGCCCATTCTGAGAATCTTGAAAGGCCCATCAAGCACCTCATAGAGAATAACACACAATAGACTACTGAAGCTCCAC
TCTTAAAATACATGCTCTTCCCCATGCCAGCAACATAGTCAGCATTTCCTGACATCACATTTCAACTGTTAATCAATGCAGTGTCTCTGGAAGC
ATTCAGAAGACACCAAGGAAGGGAATCACATGGCTTGGGGACAGGAGTTAGAGGGATAGTGTTCACTATATATTCTTGTACCTTTTTAATTTTT
GTATCAGGTCCTTGTTTTTGAAAAGAAGGAAATTTTAACATAAAAATGATAAAACCCCGATTTATAATGTTTAAGTTATATAACAGATTCAAGC
ATATCTTGTGTTTATAAATATATTCTGTGATATTTGACATAGCTGAGGTTTTAACTGGGGAGTCATAATCTGTACCTTTTACATGAATTACCCC
CTGCTCAACAAATTCTGGATGGGGTGAGATCATGGCACAGGATGCAAACATGCAAGGTCCTCATTACAGACAATGCACACTGCCTAGCGGGTAC
CTGTGATTGGTCTGTTCTGCTTTGTAGGTTCTCGGTGAGATGACTGAGCTGCTGTCCTCCTCCAGAAACTACGACAATTACCGGCGAGCCTATG
GAGACTGCACCGACTTCAAGATCCCCATTCTGGGTGTGCATCTCAAGGACCTCATCTCCCTGTATGAAGCCATGCCTGACTATCTGGAGGACGG
GAAAGTGAACGTCCATAAGCTACTGGCCCTATACAATCATATCAGTGAATTGGTCCAGCTGCAAGAGGTGGCCCCACCCTTGGAGGCTAACAAG
GACTTGGTACACTTGCTGACGGTGAGGCTCACACTGGAGGACAATTACTAAGCACTTTCTGTGTGCCAGGTGCCATTCTATACCCCTTACCAAA
TATTAGCTGTTAGTCCTCATAAAGGCTCTATGAAGCAGATCCTATTACTATCTCCAACATATAGCTAGGGATACTAAAGCACAAAGATATACCT
TGCCAGGAGACCACACATTATTAAGTAGCAGAGCCTTGATTCAGACCCAGGTGGTGGGACTCTAGAGACTGTGCCCTTCAGACTTCTAGGACTG
TTTCACTACCTCTACAAAAGCAGTCCTAAGCTCTCTGGGAGGAGCTGATGGCAAATCAGGATACAAGTCTTGGTAACAGATGGAGAGAATGAAT
GTGCTCTCATAAAAAGGGCAGGCAGTAATTTAAAAAACAAACAAAAAACACCCAGGGTTATTATTTGGTTCCTGGCTTAGATCTTTGCTCTTGG
AGATATTCAAGTGAAGATGAACACTTGTCAATGGTGTGGGAGACCAGGATTTGCATTTTGCATATGGGGTGAGATCAGATGATGAACTCCCTTC
CAGACCTGCAATTCCGTAGTTTACCAGCTGTGTGACTATGGACATATAACCGTCCAAGATTCCTCTCCTCAAACGAATTAGNNNNNNNNNNNNN
NNNNNNNCCAGTTCTAAAGTTACACAGTTTTTAACCTGCTGTTTTTGGAGAGTAGAATAATGATCATAACCTCTTTCTGCCTCACAGCAGCATT
TTGATAGAACCCTGGGCTTCACATCAGCTGGTGTGTGATCCTAGCCCTTTCACTTATTAGCCAGGTGACCTTGGCAGGTCTGTGTCTCAGACAT
CATTTGTAAAAACATGGAGTGAATCTTAACATTCTTTGGATTATAAATCTTGTGATGAAAGCTGTGAACCTTCTTCCCAGAAAAATGTACATAA
GCCATTTATTTTTAAATATGCATGTAATTTCAAGTTCTGAAATCCTTGAAGCCTATCCATAGACTCAAGGTTAAGAATAAGATTATTCCTAAGG
ACTTCTCTCCTAAAATTTTATAGTTCTAAGATACATGAAACTCACTATTTTTTTTTTTTTTTTTTTTTTTGGAGACAAGGTCTGGCTCTATGAC
CTAGACTGGAGTGCAGTAGTGCAATCTCAGCTCACTGCAACCTCTATCTTCCAGGTCCAAGCCATCCTCCCACCTCAGCCTCCTGAGTAGCTGG
GACCACGGGCACACGCCACCACGCCCGGTTAACTTTTGTATTTTTTGTAGAGACAGGGTTTTGCTATGTTGCCCAGGCTGGTCTCAAACTCCTG
AGCTCAAGCAATCAACCTGCCCTGGCCTCCCAAAATGCTGGGAATACAGGCATGAGCCACCATGCACCCAGACTCATTAACTCTTAATAGCAAT
TAATATGTCTTACCATTTAAACTGGATTTTATTGCTGGACTCAAATTTAATAGTCTCAGACTATACACACCATCCTTTCAGATCATCTGTCTGC
TTTGAGAGAGAACAAGTGATGTATTAGTCATCTGTCCAGACAAGGCCTTTGGCCTAAGCTCTATATAGAGGCTTAGATTTAAATCATAGTTAAA
AAGAGGGCATCCTGAGATATGTCCAAAATTAAAAACATTTCAATGAGAATTAATGCTTGCCCTATTGCAATAGTAGGTGTTATACCTGTTTTGT
GACTTTTGAAAACAAACTGTTTAGAACCTAAAAGAGTAAACTACTGGCAAGGAAAATCCAAGAAAGAACCATCAGCTGTGGGAGAGGCAAACAG
CATCTTAGCAATGAACCCTGTTCTGCTTTGATCTGCAGTTATCCCTGGATCTTTACTACACTGAGGATGAAATCTATGAGCTTTCCTATGCCCG
GGAACCAAGGAACCACAGAGCTCCAGTGAGTTTTTCATATTAAGACTCCACATGTAACAGGTGCTTTACAAGCTTCTCCTCGAGTTCATTCATC
CTCAGGAACAGACTTTCAGTTCAGTTTAATACATGTACTGTTTTTCTTAGTGCTCAACCTTATGCTAGGAACAGAGAAAGCTTTTCAACATATG
TCTGAGGAATAGTTCCTGTCCATTAAAAAGCTGTGATATAGTTGAAGGGATAAGCCTAATGTGTGACCAGTGAATAACTAGTGAACAGTAAATA
ACTATATCATCAGAATGCCAGGTGTGGTGGAATCAGTCAGTGGTTTACAAAGTAGAGAAGGAAGATACTATTGTGCACCAGAGTGACATCCCCC
CCGCATTAAGAAGAGTCCCCACATAAATTTCTTTTCTATCATTCATTGATGATAATGAGAGTAATATGCGTACTAATCAGAAGCTAAATTTCTG
AAGATTTCCAGGTTGGTAGATAGAAAAGCCCCATTTTCCTGTAATGTTCTGGGTGAAAAGAACAGTCTGCTGAGTCTTTTGACCTCCTATGCTG
AGAAGTCCTCAAAATAGTACACAGTCCTGGCACTGCCTGCAGTAGGAACTTCACAGGTTATCTGCCCTACCCTCCCACAGGCAAGTAAAATCAC
TTCAGTCTCCTGGGACGTTTCCAAACCCCAAAACAAGTGATACTCAAGGGAAGAGAGTTGCCCACACTTAAGAAATCCAGCTCATCTATTGGGG
TGGCTAAATTGCACTCCTCCACACAGAAAGATCAAGTTCTAGCTTTCTATTGTAATGAAAGATTCCACTGAAAATATTTGGTAGATTCCATTTT
CAGGTTAGAGGCATTTCAATGGAAAGGGTACATTCTGTTTTTTCAGAGAGATTTTAATTTGGGCTGAGTTTCAAATACAGTCATGCACCACATA
ATGACATTTTGGTCAGTGATAGACCTCATATACCACAGTGGTCCCTTAAGATTATAATGGAGCAGAAAAATTACTACTGCCTAGTGACAGAACA
ATTGTAACATTGTAGCACAACACATTACTCACTATGTCTGTGATTATACTGGTGTAAACAAACCTACTGAGCTGTAAAAAGTCTAGGTTATACA
CTTACGTACAGTACATAATACTTGATAGTAAGTATTACCGGTTTATGCACTTACTATACAATACTTTTTATCATTATTTTAGAGTGCATTCCTT
CTACTTAGAAAAATTAACTGTAAAACAGCCTCAGGCAAGTCCTCCAGAAGGTGACAGCTCCATGCATGTTATTGCCCCTAAAGACCTTCCAATA
GGACAAGATGTGGAGTGGAAGACAGTGATATTGATGATCTTGACTCTATATAGACATAGGCCAATGAGTGTAATTGTACCTTAGTTTATAACAA
AGATTTAAAAAATTAAACATTTTTAAAATAGAAAAAAGTTTATAGAATATGGCTATAAAGGAAATAACTGGTACAGCTATAAGCTATACAATGT
GTGCTTTAAGCTAAGTGTCATAACAAAAGAGTAAAAGTTAAAAAAATTAAAAGCTTTTACAGTAAAATAAGGTAATTTATCATTGAAGAAAAAA
TTTAAGAAACTTAGTGTAGTCTAAGTGTACAGTATTTATAAAGTATATAGGAGTATACAGTAATGTTAGGCCTCCACATTCACTCACCACTCAC
GACTTGCCACAGTAATTTCTAATCTTGAAAGCTCTATTCATGGTTAAGTGCCCTATACAGGTGTAACATTAAAAAAAAATTTCTATACCATATT
TTTACCTTTTCTATGTTTAGATATGTTAAGATACACAAATACCATCATTACAATTGCCTACAGTACTGAGTATAATAACCTGCTGTTATAGGTA
TGTAGCCTAGGAGCAGTAGGCTATACCAAATAGCCTAGGTGTGTAGCAGGCTATACCATCTAGGTTTGTGTAAGTACACACTGTGGTGCTCATA
CAATGACAAAATCACCTCATGACACATTTCTCAGAACATATGCCCAGTCATTAAGTGATGCATGACTGTATTTAGAAAAGAGCTTGTCCAGGCT
TCCGATGATTTTTCTTGTGCCTTCCTGCCTTTTAGCTAAGCTTTTCCTTATTCACATTTCTACTGCAAAATGTGACTGGAGAATAGAGAGGAAA
CATAAATGATCCACTTTACTCTTTGTTGATAGCTCTGACAAAGGGTTTAATGGAGAGGGAATTGCAACTCAGGCAGATTGAGAATTTCAAATTA
TCTGTAGCTGCAGATAATGTATGTGAAGAGCACTCTGGAAACCGTAAGCACAATGCCTTGTTAGCCAAAATTATTAGTAGAGATTTCAATTGCC
TGTGGGTTCTCTGCTCCTTGCCACTGAACATAATTGAAGATTGTCCATAAATGTAACCGTCAGGTAGTGGGAAAAGAAAGAGCTATAGGTTATA
ATATTGCATTGTAGTCATGAGGATTTCTCTAAATATTTCATTTTAGCCACTAACACCTTCAAAGCCACCAGTAGTAGTGGACTGGGCTTCTGGA
GTGTCTCCCAAACCTGATCCAAAAACCATTAGCAAACACGTCCAGAGGATGGTGGATGTAAGTACAGCTGTGTTCAGCACACAAAAACTAGGCA
TTGCCTGGCTCAGTTTTGTATGTGGGGTAAAGGGAGAGGAAAGCACAATGGTGGAAATGTAAAGGCACGAAACTTGAACCACTTACTTCTCTTA
CTGTGGCTTTAGAACAATTCAAAAGTTACATTTTGACAACACACACTGGACTCATATGAAGGCAGTTGTGCCTCCTCTTCAAGACCTAGCAAAA
GAGCATATGCTTAAAGGTTGTCAGTTGATTTAGGAGTACAGAAGTATTGGGATGCATTTGAGTATAGTAAGGGGTAATCAGGTAAACCTAAAAC
TGAAAACCTTTGTACTGCTTAATTCAATTCTCTGTGCTAATTGCTGAGGAAGGGGTATATATTCTCATACTTATGCATGTATCCTCGTGGACAA
CTCACATGTAACAATGGAAAACTAAGAGCGTAACGGTGAGAAACAAGAGGATTAACAGTGGGGACAGAGCACTTCCAACTGGGCTGTTTGTAGA
AGCTTCTCAAAGAAGGTACAACTGGAGCTGAGTGATGAAAAAAAGGGTAGAGTGAAAGGAGAACATCCCTCTGCGCAGTGAACTAGGAGTAGCC
AGCGTGATAGTATAATTGACGTGCTAATGATTCAAAGTACATGGCCACCCCCCACATGCTGCTACCAGCAAAGGCCTGAGATGTGACCTGCCAC
ATCTTTGCCACAGCTAAAGGAGCAGGTTTCCCTGTTCCTCTCGTTCAGGTTGTTAAAAGGCTTTTATCCAACTGCCCCAGCTCTTTGTCATTTG
ACTAAAGGGAGAGAAGACCGGTTTCTCTTTAGTAATCACCAAAAAAACTCCTTTTTCACAGTCTGTCTTCAAGAACTATGATCACGACCAGGAT
GGATACATTTCTCAGGAAGAATTTGAAAAGATTGCTGCGAGTTTTCCATTTTCCTTCTGTGTGATGGACAAAGACAGGTGAGGGTTTGTACTTA
GGAATATGTGGTTATGAGCCCATTGGTGAGAATAGGTTTATAGGTATGTCACTAGAAGAATTTGAAAACTCAGATATGTTGCTGCTGTGATCAC
TTAAAGAACAGACCATGAAATATGCATTCTTTTAAAAATATTCTGGGCCTGGGCACAGTGGCTCACGCCTGTAATCCCAACACTTTGGGAGGCC
GAGGTGGGCAGATCACCTGAGCTCAGGAGTTCGAGACCAACCTGGCCAACATGGTGAAACCCTGTCTCTACTAAAAATACAAAAATTAGCCAGG
TGTGGTGGTGGGCACCTGTAATCCCAGCTACTCGGGAGGCTGAGGCAGGAGAGTTGTTTGAACCCAGGAGGCGGAGGTTGCAGTGAGCCGAGAT
CATGCCACTGCACTCCAGCCTGGGCCACAAGAGCAAAAACCTGTCTCAAAAAAAAAAAAAACAAAAACTGAATTGAACATTCCATAAATCTGCC
ACTTTATAAATAGTCAACTATAAATAAGAAAAAGTTTAGTCTTCCTTCTTGCTTTGTCATTACAGATTTTGGGAAACAACTAATACTTATTCAT
ACTTTGCATTTTTACTTTTCTCAAGGTTAAATAAATTCTATCTTGGTTCTCTATAGGAAACTAATCATATGGTTAGTGGGTTCCAGTTAGGTAC
TGTCTAAAGTCAGAAACTGTAGCATAAGACATTTCCCTCCCTATACACATGTACATGTTACATTGTTTCTTTTTCAAGTCTTATAGATAGTGGT
CAAGTTAGTTAGGGAAACCTAGTTTGGCCAAAGAACACCTCTGTGGAAATGAGTAATGCTGCCTTACCTACTTACCACATGTCATCTTGTATCC
TTGTTAAGAGTAGGGCCCATGGAAGTAATCATGAGGTAGCACATACCATATTACCACTGAGGATAAAAAGAAAGGTGAGTTTCTAAGGCTAGAA
GCCCCCCCTTGCTACCTGCCTCCATGCCCCTTATACTCACATCCTTGCCTTGGTCATCTGCCGGCAGGGAAGGCCTCATCAGCAGGGATGAGAT
CACAGCCTACTTCATGAGAGCCAGCTCAATCTATTCCAAGCTGGGCCTGGGCTTTCCTCACAACTTCCAAGAGACCACCTACCTGAAGCCCACT
TTTTGTGACAACTGTGCTGGATTTGTAAGTTGTTCTTAGGGTGCTCCAGGGCTGAATTTGGGGAAGAGTGTGGGATACTTTAAGACAGGCACAG
ACCTCACAATCCTTATGAACCCATCCCAGCTTGGAGCCCACACAGACACCTAGAATAACCTACAGCTCAAGCGTGTGGTTTTTACCTGCACTCA
TCATCTCTCGCTTCTTCCTGTTTTTTCTTTTCTATTGCAATGAGGCCTTAGATAAATGGTACCAGAAATGCTGAATTAGGATATACTTTTAAAG
TATAATATTCATGTGCTGTTTCAAGTGTTATAACAAAGACATATGAGATACCTTCTGTCTTTAGGAGATAACCTTGGCTATGCCCCTCTTCCGT
TCCACTCCTGACCAATCGTTTCCCCCTAAACTCGGGTCCTGATGCAAGGCTCTATATCCTTCTCAGTTTGGAGTCCTGAGGAACCTGTTTGCCC
GATGATTCATCCATTTCTCGAGAATGTCTGGGTCATAAGGCTGCTAGTGAGAGCCAGGTGTGGTGGCTCATGCCTGTAATCCCAGCACTTTGGG
AGGCCAAGGCAGGCAGATCACTTGAGGCCCCGAGTTCGAGACCAGCCCACCTAACATGGTGAAAACCCGTCTCTACTAAAAATACAAAAAAATT
TAGCCAGGTGTGGTGGAACATGCCTGGTAGTCCCAGCTACTTGGGAAACTGAGACAGGAGAATTGCTTGAACCCAGGAGGTGGAGGTTGCAGTG
AGCCGAGATCGCACCACTGCACTCCAGCCTGGGCAACTGGGCAAGACTGTCTCAAAAAAAAAAAAAAAAAAAAAACCTGCTTCTTCAGAAACTT
TGATCAGCATAAACTCTTCTCATGGATTTAAGGTCAGAAGGGACAAGACATGAGAGATAAATGAGGTTTCCTTCCCACTTGAGCTAGAGAGTAA
AATGAAGGAAAATAAAGGAATGTCACCTTGTAGCCTCACACCAGATGGATGAATGACATGTGGTGCATTCTGTCTCTTGTTTCATAGCTCTGGG
GAGTGATCAAACAAGGATATCGATGTAAAGGTAAGACTCAATATTGTTGACATATTCCTGGTGTATCAGTCCATTCTCACGCTGCTATAGAGAA
CTGCCTGAGACTGGGTAATTTATAAAGGCAAGAGGTTTAATTGACTCACAGTTCCACAGGGCTGGTGAGGCCTAAGGAAACTCACAATCATGGC
AGAAGGGGAAGCAAACACATCCTTCTTCACATGCTGGCAGGAAGGAGAAGTGCTGAGCAAAAGGGGGAAAAGCCCTTATGAAGCCAACAGATCT
CATGAGCAGTCACTCACTATCATGAGAACAACATGAGGGTAACCGCCCCCAGGATTCATTTACCTCCCATTGGGTCCCTCCCATGACACATGGG
GATTATGGGCACTACAAGGTGAGGTTTGGATGGGGACACAGAGCTAAACCATATCAGCTGGTCTTAGAGTCCCACCTCTAAAACATTTTTTACC
CATAGTAGTTGTCCATTTAGTCCACAACTTCTCAGCAGAGTTCAGAGTCTCATCCCCAAAGTGGTTTCCCTCGGACACCCCCGGTGAATGACCG
CCACACCGAAGAGAGAAATGCCTGGTTGCACAGATAGGCATTTTCTCTGTATAAAATCCTCTTTCTGTCGTGGCTGGCCTAGAACAGGGATAGC
AGGTAGGAGATGGTGCTCTCATATAGTCATGGAAGGGTGGGTCCCCAGTGAAAAAGATAGAATCTCTTCTGCAACAGAAGATAAATGATTACTA
AAGGCCCTTGTCAGCTTTCCTTTATCACTCAGGACATAACTGTCCTTCCTTGTGACTAGGAGAATTCAGGAGTGAAAGAGAGGAAACCTTTTAC
TGCAAGAAAGAAAATAAGACCTAACAGCTGAGTGTTTCCGGAGGGTCTCCCTAGAGTAGGCAGAATGTATGGGATACCAGGACACCATCTCTTC
CCTCCAAGATATCAGGATACTGCTTCTGATGCTGAGATTCACTGATAAGGGCTACATCAAGAGTGTGAGCTCTGGGCTTCACCAAGTGAGAAGA
ATGCTAGCTTCATTAGGAATGTTAAGTGTCTTAGCTCCAGAAGATAGAACAGACATGTGTGACAAGAAAGCACTGCATGAATTTGGTTGTGAGA
CACACTGGGGAAGAGAGAAAAGTGAAAGACTTCTTGACCCAGGATGTCTTGTCCACAGACTGCGGGATGAACTGTCACAAACAATGCAAAGATC
TGGTTGTGTTTGAGTGTAAGAAGCGAGCCAAGAACCCAGTAGCTCCCACAGAGAACAACACTTGCTGTGGGGCCAGTGTCCAACCTTTGCTCAT
TGGGAGCCAAANNNNNNNNNNNNNNNNNNNNNNNNNNNNNNNNNNNNNNNNNNNNNNNNNNNNNNNNNNNNNNNNNNNNNNNNNNNNNNNNNNN
NNNNNNNNNNNNNNNNNNNNNNNNNNNNNNNNNNNNNNNNNNNNNNNNNNNNNNNNNNNNNNNNNNNNNNNNNNNNNNNNNNNNNNNNNNNNNN
NNNNNNNNNNNNNNNNNNNNNNNNNNNNNNNNNNNNNNNNNNNNNNNNNNNNNNNNACTTAGCAGCAGGAAGCAGACTTAGCCACAGACAGAGT
TCTACTAGCTGAGTGACTGTCTATGATAGCCCCAATTTTTCTCCAGGAGAGGAACCCCAAGCCATTAATTTAAGACCAGGTCCTAGTCTGAGGA
ACCCTGAGGGGCCAGGTAGCAGGTAATTGTCAAAATTCTAGAAACAGAAGGCTAAATGTAGAAAGGAAGGGCGGGGGGCAAACTCCCACTCAAG
TGGAGCTTGCAGATTAAAATTCCAAATCATACAAGGAAAATCCTAGGACTGAGACAAAACATTCAACATTCAAGAAATAAACTAGCAAATTCAC
TTACATTAAAATGCAAACAACAGTACAATAAGGAAATGACTTTGAGTATGTTTGAGATGCCCCAGATCTAAAGTGCAAAGAAGCAGAATAGACT
GTCTCTGTCTTCATGGAGTAGTTCTAGTTAGGGGGAAGATAATATACAAATATAGAGCAGTTTAGAAACAATGCAAGAGTATATGCTAAGAGCC
AAATAGGTTGCAGTGACAGCAAATGACAGGAGGACATAGCAGAGAGATCGCTGTACTGGGGCTGTTGGGACTTTATGGAGAAGGTGGAATTTCA
GCTAAGTCTTGAAGGAAGGGTAGAATTAAGTTATGGGAGGAGGACAGAGCACATTCCAGATAGGATGTACAGTAGGAGCAAAAGGCCAAGGGCA
GAACAGCTTTAGTACTATTGGGATAGTGGGAAAAAAAAAAAGGTGTTAAGGCGATTTAGGTAAGAGATGAAGTAGAAAAATGAGACAGTCTAGA
GAGTCTTAAATGACAGGTGCCTGTCTGTATGATAAAATGAGGAGCTATTTAAAAAAGGGTAACATGAAGGGCTTGTTGGGGACGGTTGGGGCAC
AAGGCTTCATAGTGCTATACTAGGCCCTGATCTCTGGGCTGGCTGGTTAGCCAGCATGTCAAAACACTGATCACCTTGACTAACTAAAGAACAT
ATAGGTCTTCAGCAAAAATCCAGTGCTTATTAGGTTAGTGCCAGTTTAATATAAGAAGCTGTGTGACTTCTAAGTAGAACCAAAAAGGGAAATA
AGAAATGAGTTTATTTATATAAAGCACTTAAAATCGGGCTTAACACGTATGTACCATATGTTAATATCATTACTCTTTTGAAATAAGCTCCCTA
AAGTGGTAAGGCCACTATCGTTACAACAGATGCCTAGAGAAAAAGTCCATATAGTATACATTCTGCATTTAAAGCACTTCTAATGTTCAGTGGT
AAATATCCACATGCATTTATTGATCAATTAGATCAAAGCTTAAGTGCTTCACTTCCATGTAAGAAATGCACATTCCTTTTTATCACATCAGCCA
AGTAAAAATTTTCTGTCTTCCTAAATCTTTCCCCTTACTATCTATCTAAACACAGGCTGACTTCAAACTTTTGGGGTGTTTTGTTCTTAGGGGG
AAAAAATCCTCTTAGGGTCTTTTCTAAGAAAGAATATGCTAATCAACTAAGAATTTGATGTTCAACTTTTAATAGAAATCACAAACACCATTGT
GAAAAATAGGCCTGTACCCTGTATTTCATTCATGCACTCTGTATTTTCAGAGTTACACATAACCTTAGGGCACCACAATTCTGTCACATAAAAT
GCAGATTTTCAAGTGGAAAAGACAGCAGAGAACAGCCTGAATCTGAGGCCTCAAAAAGGAATCCCTGAAGGGGCAGTTGTTAGAGATTTCTCCT
CTCCAGGCCATCTCTCCCCTTTTCCAAACCCTGCCCCACAGTGGTAAGATAAGTACTTGTCAGGAAGTAGACCAATAGGTAGGATAAACATACA
TGTATCATGGGCAACAAAATGAAAATTACTATATTATTATAAAGTTGCTAAAAGTCAAGGTCTATTTATAATGGCAAAAATGACTATTGGATAT
CATCCATTCTTAGTTATTTCTATCTCATTATTATCGGGGATGGTTTCTGCTTATCAAATCAAAATTTCCAGTGATTTCTTTTAGCCCATTACTA
TCTTTCTCAATCTCATCAACTTTCACTTTCTTGAAACTTGTACCTCTCCTAATTTCTGTTAACACTGTCATCTCTCAGGACTCTTCCTGCAATT
TTAAGGGCTTTCTGTTGCTTTTTGTTCTTACTGCTTTCTTCCTTTTGCTCCTCAAAGTGTATAGTGCCTGAATTTCTGTCCCAAGCTCCCTGTA
TGTCTAGGAATTCAACCTAAATAATGGAGGGGATTATATTCATAATTTGACAATCTAGGTTGGTAAAAAGAATGTATAACTGTATTACAGAAAA
GTTGGAAAATGGAGATATAAAAAATAATCACCCATAATACTCCTCCAAAAAAAAAATGTAATTATTTTAGGGTGACCATAACAATTTAAATATT
TGAGCACTTAAATAACTATGTAATTACAATTTTGAGCTTTATTGGATAAATATTAAATGTTAATTTAAATTATGTTCTCTTTGGCAAGAATTAA
ACTAAGATCTTTGTAAGATTTCTAGTTTTACAACTGGTTGATTCTGGTCAAATACTAATTAGAAAACTTTTTTGTTGTTTTTTAAAGCCATCTT
GACTATACTAATCCAATGTCTTCAAAGTCAGACTATCCAATGTTTTAATCACTGCTGAGTCTTTCCAAAAAGTAAACTGAGATGATCTTCAGTT
TATCTTAAAGCCTATCTATCGCCCACCTCAAATACATCTGCTCTTACTTTACTTTTCCAGGAAATTACTCCTTATGGCTAACATTACTAGGCTG
GATCCTGGGTAGTGGGTCTTAGTTAAAGAAAACCAGAGTAACTTACCTTTTTCCTCTCAGTATCAAACAGGGGCAATACATTTTAAGGTACATT
TCCACAAAGCTAAAACTTCTTTCTCATGGTTAAGCTGTGCCCACTGTACAAACGGGTTCCCAGAGAGTACTTACCTGCTAGAGGGTGTCTGTAT
CAGGACTGAGACATGAATGTGGAGAGCTCCCAAATTCCAGGGTCCAAAAAAGTATTTATGGAGCATTTCTGTCTAGATATTGTTCTTGTTCTCT
TTATTTTATGAAACTCTGTGGCACTGAGGCAGGGGCTTCAACTTACCTCCAAAAACAGAAACCCTCTAAGCAACCTTTGTGCAAACAGAAGATG
CTCTTTCTCAGGGTGGATGTAGCTTGACACCAGTGGCCATGTCTTGGCCAAAGCCCCTGGATTTAGCCCTCACCCCCTAAACTGGGTGCCTGAA
AATGGGTCCTCTTTGAACATATGGAACTCCAGTAACAATAAGAAAGGTCTCATTGAAACTAATGTCTCAGTCTTGAGTCTCTGCTTTCCTGAGC
TAGAGTACTAGCATGTCCTGTATCTTCCTACAGCACCTGAGGAAGGACCTTTTACATTCCCTAATGGGGAGGCTGTGGAACATGGTGAGGAGAG
TAAGGATCGGACCATCATGCTGATGGGAGTGTCCTCACAGAAGATTTCTCTTCGGCTGAAGAGGGCTGTTGCCCACAAGGCCACCCAGACTGAA
TCACAGCCTTGGATTGGCAGTGAGGGCCCTTCAGGTCCCTTTGTGCTGTCTTCCCCAAGGAAGACAGCCCAGGATACTCTATATGTGCTTCCCA
GTCCCACCTCTCCATGTCCTAGCCCAGTCTTGGTCAGAAAGCGGGCTTTTGTCAAGTGGGAGAATAAAGACTCCCTCATAAAATCAAAGGAGGA
GCTCCGTCACCTCAGACTGCCTACCTACCAAGAACTGGAACAGGTACCTTCCTTTTCATTTTCCTTTTTTTCAGACTATCTTAGAGAAGTGGGG
CCAAACCAGGAAAGAGCATGTGGACTGAAGATTCAGATCAGGCTGATTACAAGCAGTCTAAAACAAAAAAGGAGGAGGGGAGAAACAGGGAGGG
AGAAACAGGGAGGAAGAGAGGGAGGGAAGGAAGAAAGGATGATTGATTCCAGCTTTCTCACAACCCACTGGGGGCCTTGGTTCACATTACACAA
GTAGCACAGGCTATACAGGGCTCCCTATCACCACACAGGTGGTGGCATTTCAGAGTGCTGGTGCCAGTGCCCAAAGCCCTGTTTAGTAGGCTCA
CAGAGAAAAACCACAGTATCTACTGGTTAGCTTTACTGTGCTGATACCACTCCTTTTCTAGATGGAACTAAAATGAACTTGCCTAAATCCTCCT
TCCCTAGAGGTCTCTTTAACATGTTCATCAGGGTTATGGTTTAGGATCATCATGGTTACCTAAGCATCTTCCTAAGAGAAGTTAGTGATCTTAG
TCCTATAGCAACAACAACAAGAGAAAGGTGAGTGTATTGTGGCTCACCATACAAAACGCCTCCCTCCTAAATATAAACGAAGAGAATCTTTTCT
AACACATCAGGGAATATGCTGATCTTTTACACATATTAGAATAGTGAAAGCAACAGTAGCAGGCAAACACACAGTGGAATATAATATAGAGCAA
TATAATCTATAAAATGTTAACAATCATGACAAGAGGAGCTGCTTTTCAATGTTAGGCTCACAATGTCCTAATTATCAGGTACCTAACAGAGACA
ATGGAAAAGACAAAATAAAGTTTACCAAGGAAAGGAGACCAAGAGTTTGGAAACATGGTGCCAAGGTTTGAGAGAAGGGAATAATGACATTAAA
AACAGGAAAATAGGGCTGGGCGTGGTGGCTCATGCCCCCAGCACTTTGGGAGGCAGAGGTGGGTGGATCACTTGAGGTCAGGAGTTCGAGAGCA
GCCTGGCCAACGTGGTGAAACCCCGTCTCTACTAAAAATACAAAAATTAGCTGGGCATGATGGCAGGTGCCTGTAATCCCAGCTACTCAGGAGG
CTGAGGCAGGAGAATCACTTGAACCCGGGAGGTGGAGGTTGCAGTGAGCTGAGACCAAGCCACGGCACTCTAGCCTAGGCAACAGACTCCATCT
TAAAAAAAAAAAAAAAAAAAAAAGGCCCGGCGTGGTGGCTCACGCCTGTTATCCTAGCACTTTGGGAGGCCAAGGTGGGCGGATCACGAGGTCA
CGAGATCAAGACCATCCTGGCTAACACGGTGAAACCCCATCTCTACTAAAAATATAAAAAATTAGCCAGGCGTGGTAATGGGCGCCTGTAGTCC
CAGCTACTTGGGAGGCTGAGGCAGGAGGATGGCATGAACCTGGGAGGCGGAGCTTGCAGTGAGCCGAAATGGCACCACTGCACTCCAGCCTGGG
CGACTGAGTGAGACTCCAACTCAAAAAAAAAAAAAGCGGGTGGGGAGGAGTAGGAGACGGGAACAGCAGAAGGAAAAAGAGCCAACAGCCAACT
GTCAAGATACTCAATTCTGAAGGTTCAATCATTACTATACTTCTTTTTGTTTCGAGTACAGTACACAACTCACAGGGCTGGCTCAAGAGGTTAC
CTATAATTGGTAAGAACCTACAAATGGTAAGAAACTACTGTCCCATGGCATAGTAGTTTCTTAATTATAGATAACTAAGCCATTTTAGAGACAG
GGAAGCAAGGATACGTTAATATCAACACTACTATTCACTTTATTACAGGAGGAGGAATGCCTTTCTGGCTTTTCCCAAAAACATCAAGGTTTGC
ACTGTGTTTTTGGAGACCTGTCAGTGCAAACACAAAACCAATATCCAGCTAGTAGAATTCCTTATATAATTCTACATTCTACAGACTGAAAAAC
TGTCCACGAGGGCTTCAGGATTCCCTGCATTGTCCTCAATGCTCTACCTTCCCTGTCAGACCCCCAGAAACTGAATTAGAGAAACATCTGAAGA
AACAAGTTAGATAACGTATGTGGAACTCTTGATTTGGTGCTTGGTACAAAGAACATAATATTAAGAGAAACATACGAAAAAAGAACAACAGATT
TTCTGGATGAATGGTACTCTCTTGCTCAGAGTTATTGTTAAGATGTGCTGTAAAAACCAAGTCAATGAGAAGGTGGCAAAACGTGGGTTAGACA
AACCCCTTCCTCTTTAGGGATAGAAACTGCCAAATGCAACTTCTAAAAATGATGAAAGAAACCTCGAAAAATGAACTCGGTAGAATAGAAAGAA
CTTTGGTCTTGGAGGCAAAGATTTGTGTTTTCAGTCCCAGACATTTCTTACACCAGCTGTTAAACTCTACAGCCTATTTGGTCCTTGTGAAATA
CAGGGCTGGGATTCCATGTTCTGAAAGGTTTGCCTCAAATCTTGACATTTTACATGCCGATCAAAAGGAAAAATGTGGTTGGCAACAATGCTTT
AAGAAGTGGCTCGCAGAAAGATTAGAATTCCTACTCAGCAACATCAGAGCCAGTAAACCCTCTCACCATTTTGACCACCGCCTCTCTTTACTTT
TTAGGCTTGTCAGATAGACCTAAGGTCCAGAATTCACTGTGTGTATTTTAGAGGAACAATTATGTGTCCCACTTTCCCATTAAGTATAATCCTT
ACAATGACTAGTCTATGTGTAATTCAACAGTCCTATCCATAATAACTAGTCAAATTAAATCAGTATTTACAATATATAACGTATATTAATAAGA
ATAAATATTATGTATTATTTTAAGTATAATGTACCACTGAACCAGCATGGGACAAAAGAATAAGCAAATAAAAGCTTTTATGTTTAGATATACC
AAGGCTCAACTCTGCAGTTTTATACTATATGGCAACATTTGCCTTTATAAGATTGAGGTATACAACCTATTTTCAGGGTGTTTGTGTAGGTTAA
GGCAGTCCATTATGTCACACACCGCAGGCACATAGCAAGTGCTCACTATTATATGGCAGCTGAGACAGCTATGTAGATAATTCAGATTGAGAAA
CAACCCCAGTGTATCCCAAATTACCCAGACACTGGCTATATATAATATTCTCTTGGAGTAATCAGTATAGGATAACATANNNNNNNNNNNNNNN
NNNNNNNNNNNNNNNNNNNNNNNNNNNNNNNNNNNNNNNNNNNNNNNNNNNNNNNTTGGCTCTATAATGATACCACTACAAATTAGACCACTAA
ATCTCAACTTAGGGGTGGGGTGAAATTCTTAACATCATCAAAAAGTTAAATTTGTTTTCAATAATTTGTGGGGGGGAAACTTAGATAAAATTAA
CTAACACCTTGCATTACAGAATTCTCAGTCATGCTTTCATGGCTCAGACCTGACCAGAGACTGTTTCTGCCAAGTTGAGATCTCCCGCGAGAAA
ACATCCAAAAGTTTTGTCATTATCTACCTATTGCTCGGAAATGGTTTATTCTGCCTGCTAACCACTCACAAACTTTGATATGATAACAAAGACT
AACTGCTGCTTACAAATGCTCGTTTGATATTTAACTTGCTATTTTCTATTCAGGGCAAAATAACTATCTTGAAAATGGTTGTTAATTCTCAGCC
ACAGTGAATAGGAAATGCCAATCAAAAGTAGCTCTCAATTTGTAATTCATTTGCTATTCATTGCTGCTTTATTAACATACCTCATTCTCCTTTC
CCTTTAGGAAATAAATACTCTGAAAGCAGATAATGATGCCCTAAAGATCCAACTGAAATATGCACAGAAGAAAATAGAATCCCTCCAGCTTGAA
AAAAGCAATCATGTCTTAGCTCAAATGGAGCAGGGTGACTGTTCTTAGCCCAGAAACTAAGTAGCACAATCTGTAGATGAGTATAGTGATCTCA
TTTCCTAAACTGTAATGCACAGACCTGAGGAACTTTACACTGACCAGCTTTAAAACAGTACTTTAAAAGGAAAAGCCTGTTACTGTTTATTTAC
CTAAAAGATTCCTAATGTGCAGCACTGTTTTCTCTTTCAGTTAGTTGACTCAAAGGGGGAAAACTAAAGAATGCAAAACTTTTGCTATTCATAC
CACTGATGTTCATCAAAAGTATGCGATCTAAAACATGACTATCATTTCCTGACAATGGGGCATCTCGGTGGCCTGCCTGGCTGATTCTTCCTTA
AAACTAAAATCTCTGGAAAATGGATTTGCTTCTTACCCTGTGTTTTCTGCAAACTCACTTACTTTGTTCCAGCCAAAGCTTGCTAATAATAGAA
AACTACCCATATTCCAAAAGTAGATTTCCTCTGTATCCCAGCATACTTTGTGAACCTGGCTCCTTCTTCACTACCTCAGATCTAATCAATTAGT
CCATGTACCCTCCTTCCTCACTACAGTCATAACACATGAGCATATCTACCTAGAAGCCAATTTCTACTGATGTAGCCACAACTTTTTAGAGGCC
TATTAAACATGACGTTATCCAATTGCAGGTCAACTTATAGTTGTAGCCTTACAACTTACAGGCATCAGAAAATAAGTAATCAAATTAGGTACCT
GGAAACATAGCTATTACCATCTCATATTACTGTCTAATTAAAATAAACATAACGCAAACATGTTTGTCCTTATATATTCTACAGTGGATAGAAT
TAGGAATTGATGGCTTAAAAAAAAAAAGTCTATGAAGAGTCTGTTTAACTCTTCATGTTCCATCTTTCTCTTCTGAAGTAAACTATTTTGAAAG
TTCTCTTTTTGAAATGAATTTGTGCTTAACTGTCTTCACTATTAATACTATTTAGAAATAAGCTAATTGGATCAGTGGCTTAAATAATAGCTGA
CTGTGTGTACATATGTATATAATATGTATATACAATATCAGGCATGCATGTGGCTTGGAATTTTGTTTCCTCCATAAAATGTGGAAGTGAATTA
AACAAGTTTTAGTCATTTATACAAAGTCACAAATATAAAGTTCAGTTTGTCACAAGATTAAATTGCTCACAAGGTAAAATTGTATTGTTTGGCA
AAATCACAAGTAACAATCCTGTGAGTTTTCTATTATGAAGGTTAATAATAAATGGGCTCATTTAGTTGCCTGGGCACCTATTCACAAATTCATT
TGTCAGCCTCTTTTTAGTTCTCTTAAAAAAAAAAAAATCATATGATCATTTTCCTTTTTGGGGGTACTTAGCTTCCATGCCTATAAAGTCTGGT
ACCAGACTGACTTGAAATTCATAAACAAGTTGTCCAATTGCCAAGAATATGTTAACAATTAAAAGTTCCAAACTAAAGCCAGTAGCACCAAGTC
TTCATAAGAATACAAAGTATACATACAGTATTGCTTACCTGGAGGATTCAGATCATTTAGGAATTCTCTTTGATGAAAGATCAGTTCCCATTTG
AGTTCCTCCTTGCACTGAGTTTTAGTGATATAGAACTAGCTTGTACTTAGTGTTTCATTACATTATAAAGAATAGTTTTACACACGTATTTACC
GTTTTCCAAATTTAAACTCAGAAATACCCAAAGCAGGCCTGCTTAAGCCCACTACCTGGCATATAAACTTATAGTAACACTTTGTTACTTTCTT
TTTAATAGGACAAGCATGAGTTAGGACAAACTCTAAAAATTCATATTCTTCACTATTCTTGTTTTCCTTTGATTGATATAGACCAAAGATGGTG
TACTCTAATTTTTTAAAACAGTAATGGAACACAATTTTTTTCATTCTTCCTCCTCTCCATTCGAAGTAAAGATCCCCAGTTAGTTTTTATATAA
ATAATCTATAGGGATTCAAAAGGTGTCACAGTCCACTTAATTAGTCAAATTAGCAATGGCTAAACAGTATCAAGTACTGCAGAATTTATCACTG
AAATGGATAAGAGGAAATAGTTTAGTCACAGGTTTTTACAGTCCAGCAAGGGCCAAAGAGGTATAGTATACAAGTTAATAGTATTTGTGTTGAG
CAACATGGGGCTAGTGGGATCACAGAAATCTGGAAAAAAAAAAAAAAGGCTTTGGCTTATCAAGCCTAGTGTAAATTTCTGCATCTCACACGAC
TTTAGTTTGGCCAGGTATTTATCTGCCAAAACAAGGACAAATCTTGTTGTATTAACAGCAGGGTCACTTCTCATTTTCTTTGCTGACTTACCTT
TTTACTGACCGTTGTGAATTTCTGTCTCAAAATGTATAATATAGAAATGCAAGAAAAAAACAAATGTACAGATTGTAAAGTTTTTTGATACCTA
ATGTAAGTTTTCTTTGTGTAATATTTATATGATAAAAGACATTAGGATCCCTACAACACAAATGTCTTGTGTTTCTTCTGCTTCGTGACCCCGT
AAACACTTTACCTGAATTTTTCCTATATTCCACAGCTAAGACCACTGCCCTATTCTATTAATCAAATTGAGTTTTCCTGGAAGGAAAGGCAAAG
CAGCTATTCAGTTTAAAATTTTCTACATCTTTTTACAACACGAAGAAGTAACACTACAGAAATATTCAATCTCTTTCCATCTTATTCATAACTT
ACAGTGGTCCCCAAATATTAAGTCTATAAATACTTAACATTAAAGGAGACAGACTTGAGGTTGTCCCTTCTCTGTGGCTTTTAATTCCACAGTT
TCATCTAAGCAAACTAGCATGTAAAGAAGAAATCCTTTGAAGCTATGGATAAAATTGGTAACGACAGCTCAATCCAGGTTACAGACCTACTCAG
GGCAATTTATTTGTGGTCATGATTATTTAGAATGATCAGACATAGCCACAATTTTCCCTTAATCCCCAGCTAATTTTTGTTTAACCACACCAAT
GAAGAAAGAGGAAAAATTTCAGTCACTCAAATTCCTCTGTGGAATGCATTCTGGAACGTTTAGATGGGGGTGTATTTATCATTTGGGCAATTCA
TAATACTTCATACAAAGTAATAAAGTCACACTGACAGCCTGATCCTGAAGGCAAGATTAAACTGCCTGCTCACCTCCCCCAATTTTCATCCCCA
CATTTCTCTAACCTGTGCTCCTTCCAAGGTATAGATAGTATCACTGCTCAGGACATTTTTCTGGTCACAAATTTTTTTTAGGTTGTCATGCCTC
CTCTTGTCACAGATACAGGTAATAAGATGTTTTTTATTTAAAATGTTTTCCTTTTTCTGTTTAATGAGGCAAGGTTTCCCTGATCTGCAAAACA
AAAGTAAGTTCAAAGAAAACCCTTGTTTCCCTTTTGATGTGTGCTTATGAGTAATAGTGTGGTGATTATGTTATAGACAGAATACATGCTCTTT
ATACGGTCGAGAGGAAAGATGACTACTTTAGGCAGAAACTCCCAGTAAGATCATGTCTATATTTGCTATTAGGTACCAGGCTGGACAAAAAGAG
AAGAAAAAAGGGGAAGGACAATGAGGTAATTAAAAAATGAAATTGAGAACCAGGCAAAAAAGAATGAAAAGGAGCTATCAAAAAAAGTGTTGGA
TTTTAGGAAGCAGTGGAGTGCCATTCATCATACTCCATGTCGTATTGCACTCAATTTATAAAACATTTTCACACTATGGCCTTTCCCATTAAGG
CCCCAAATTTCCTTCCTGCTATTCCAGATACTGCTCAGCAAACTGTTCTACAAAAGAAATTTTTACTGAACAAAGATTATCAGGAAAATCCCAC
CTTACAGGAAAGAGTAAAATATTAAGAGTCTACCTGATTCAGCTTTTCATTCAATTAAGGTTTATAGGAATGTGTACATAGGAGTGGTTTCAGC
TCCAACACGATTCCAGGAGCAAGTGCTAAACTTTGATAGGAAATAAGTGATTGTAGTGAATAACCCAAGCAGCACTCCTATAAAGGTACAAAGA
AATCTTATGGAAAATCTAATGAAACTGATAAACTATTGTTTCTGCCATATTTACCATAAACCTTTAGTGGTAAAAAAGTTGAAAGTAGTTGTAA
ATCTCCTTCATCAGCAACTAATGCTACCAAAAAAGAAGTGAGGCAGAAATGTAAAGGTTTTAAAGAAGATTTTTAAACAACTCTTGAAATATTT
TACTCAAGTAGTTTTTTTCTTAAAAGTTTTTAAAAATTATTTTTCAGAGTTCATAGCTACTGATAAAGGTATTTTCTTAATTATGGAAAGCCTT
TTTTTCAGCTATCACAAATGAAATTACATCTTTTCATTAAATATAAACACACAAAAAATAAATTTACAAATAACCAAAAAATTTTATATTTTCC
TACCTTGAACACATTTCTTCAAAGGGTTAGCTTGAAAAATACATGTCTAAGATTACAGAATATTCAATAGTTACTTTTAGGGTTTTAACATTAT
TTTAGATTTTACCACAGAGTTTACCAAAAAAATAACAACAAAAAAACCTGCTAAACATCAAATACCACTTGTCCACTGGGAACAATTCAGCTTT
CTATCAGTTGAGTTGGTTAGATCACATTAAGTTGTTATGTATAGGTATTGACCAGAAGCCTACAATGAGATACAGATTTTACACTAAGATTGAA
AAAATTTATGGTACCAGCTCTTTTTCTCTTAACTTTCTACACTAAGAGAAAAATACATTACTTGGCCTACATCTTAAACCATTCAAAATAGGCC
CTCTGTAAGTTTTTAACAAATTGTATTTGTATTTAGGTCTTTAAGAAACAACCTGAGATGATGGTAAGTGTCTCATTCCTCATTTGACAAATGA
GGACAAATCACTCCTTGAGAACTAAGGTCATTTCAATCCATAGCACCCCTGACCTAGTGCCATGATTCAAATTCACAACTCTTGATAGCTAAGA
CTTTGACTGCTCCAACTAGCAAATCACATATAGCCATTCCCTAACTTTGTGTTTCCCAAATCTAGCTGTGAATCAGAATTACCACAGGATGCCT
TAGCCCTACCCTTGATCTACTGAAGCAGAAAATTACTGCCTTAATTCTGTGTGATACAGGTCAGCCTGCCTTTTAATATTTGGATATCTAAAGT
GAGAGCATAAATGATGAAGAGACCAGTTTATAGGACTATTTCTCACACCGTCATGTAAAGTTGGTATGTGTCTTTGCTCCATTAAAGTATTTCT
GACCTCAATCTTAAACTTTGCTTTGTCAAACAAAATCATGCTGATTTCAAATCCAATTAGAAAATAAGTATGTACAGTAAAAAGTAAACTTGGG
CTTCAATTAATGAAACTTTAACAGAAACATGGCTAGAGAGGAATCTCCTCCTATAAGAGAAAAAAATGATTCACAACAACTGCCTACTAAATAC
AACTGGAAGTGCCTTTCCCTATTTTGTAAAATCGAATGAAAAACCCACAAAACACATCCACAGCAATACAGGTGAGGCAAGGGTCTATATTCCT
TTCTATTACAGGTGGGGTCTTTTATATGTCTCAAACCTGAACAAAATACAGGTAACAATCTAAATTCAATCATGACAATAAAATACTTTCCATT
TTCCAAGTCTGATGGTAATAAATATTTACATTTTAAAAAATAATTTTTGTTCTTTTTTTTGTTTTTTAAAAAGACACAACATGCTCAAGGGTAC
ACAGAATATGGAAAAAGTCATCACTTCATTTGAGAGATCAACTGGTAATAAAAAACAATGTTCTTACATATTAACCAATTCAAGAGTGGTATCA
CCAGGGAGTCTAACATGGTGTTTACTTCAAAGATGATATTCAAGTATGTTATTTGGAACACTATTTCTAATGTATCTATAAAGAAGCAAGCACT
GCTATCTAATTTTTATAGTTTTTAGTATCTTCTATATTCCACCTCCTCCACCACCACCACCACCACCACCACCACCTCCTCCATATGGATCTCC
ATAGCCTCTTCCACCATAGCCCCCTCTTCCACCATAACCCCCTCTTCCACCATAATCTCCCCTGCCTTGGAAACCTCCTCTACCANNNNNNNNN
NNNNNNNNNNNNNNNNNNNNNNNNNNNNNNNNNNNNNNNNNNNNNNNNNNNNNNNNNNNNNNNNNNNNNNNNNNNNNNNNNNNNNNNNNNNNNN
NNNNNNNNNNNNNNNNNNNNNNNNNNNNCCCCAACCACCCCTTCCACCGCCGCCTTCTTGTCTCTTTTGCCAAGGGGGCATTTCTGGAGGTGGT
GGTTCAATTTCATTCGGCCGGCCTCCCCTGTCAGGCACCCTTCCCATCAGCACCTGTGTGAAGAAACATTTTCTTTTAGTTCCTAATATTTCAA
AAAAGTTTACATAAAAGTTTCAAGTGATGTTGTTTCTAATAAACAGAAGCCAATATTTAAGGACATGAAAGTACCAGACATGGCAGAACAAATT
AATATTAAAAATATTAAGTGTGGAAGCATAAGGAGAAATCTGTTAAAGGATACAAAATCACGGCTAGACAGAAGTAATAAATTCTAGTGTTCTA
TACCATTGTATGATGACTGTAGTTAATATATAGTTTCAAATAGCTACAAGGAGGATATTGAATGTTTCCAACACAAAGAGATGATAAATGTTTG
AGAGGGATATGCCAATCACCCCGTCTGATCACTATACATTGTATGTATCAAAACATCACTATGTACCTCATACATATGTACAATTATGGTGTTT
CAATTTAAAAAATAATTTTTTTACTTCCTGTTTACCAAGTCTGAAGAAAAAAGAAAAAAATGAATGGTTTTAAAAAGGAAATATGAAAAAATAT
AAAATGTGTGATACATGACAAATTCCTTAGTGTATATATATATATTTTTTTTTTTTTTTTTTTTTTTTTTGAGATGGAGTCTTGCTCTGTTGCC
CAGGCTGGAGTGCAGTGGCATGATCTCAGCTCACTGCAAGCTCTGCCTCCTGGGTTCACGCCATTCTCCTGCCTCAGCCCCCCGAGTAGTTGGG
ACTACAGGCACCCGCCACCACGCCCAGCTAATTTTTTGTATTTTTAGTGGAGACAGGGTTTCAACGTGTTAGCCAGGATGGTCTTGATCTCCTG
ACCTCGTGATCCGCCTGCCTCGGCCTCCCAGAGTGCTGGGATTACAGGCATGAGCCACCACACCCAGCCTAGAATATATTATTTTTAAACAATC
TGAGAGAGTATTTCTGAAACTTAAAGGCTTAATTTTTTTCTCACTTAAATTTGTTTAGCAAATTCTGTAACAAATGTAGTACCCATTTCACTAA
GAAGTTCTTTTAGGAAAACATTTTTTATATATATAACGACATACCTTACATTCATTAACTTAATATCCATTTATACAATAACAACTCTGGACTT
TCCATTGCCATTGATTTGGTAATTGATTATCCAATAAAAGATTATATTCCTAAGCACATTTCATTTCAAAAATGTATGAAGTACATATAACATG
GGACCTTAATGAGGTCAGAGATTGATATAAAAACTATAATTCCAGGTATCACTGCAAAGAGAGAGAAGGATTCTCAATGAACTGCTTCTTTTAA
GAAACTTAAGCTCACTTACTTTCAGTGATGATACTAGTACCATATTATTAAAAGGAAAACACAGTTAATATAATTCCTTTACTATGCTTTATAA
TCCTTTCAAAAATAAACTAGGGAAGAGTTTAAGTATCCAACCTTCTATAAAAAGTAGCAGCTTTATATGCCATGAGCAGAGGAAAGATAGCAAT
AAGAAGGGTGTCATCTGCTCACCACAGACAACGGGAAGCCAATAGCTTCCTGCTACTGCCTTTCAGGAAAGAAAGTAAAAAAGCAACTGCCTCA
ACCAAAATGACCAATTAATTATACACTTCCATTGATCCTCCAATCAAAACCAAGTTTAGGATTTATGTCACAAATGAAATATAAAAAGTGCAAT
ATCCTCAAAGTGAGACAAGGTTCTAAGTATGCAACATTCTTTTAAAGATGGCAATGATGTCCTAACTACCAAATCCAAAAAACAGCCTTTCTTG
GTTATTATTCTCACTGGTCTCTCTACCAAACATGGTATGTTGGTGGGCATATGGAGATGCCAGAACTGATCATAAGACTACCCTCAAATAATGA
GACCATAAATTATAAACTCAGAAGAGATGGCCAATGTTACTTACAGAAATAGAACTCTTGATCCAGCAAGACTAAATTATCACCCAATGCAAGA
TGTTAGGTAATATATTTAAAGAGAGAACACTTTCAGAACATAGGATTGAGCCACAGTGGAAGCACAGAGGCAAACACTGGTGATGCCTAACTTA
GCAATAGTTAGCAAAATGACTTTAAAAACAACCATCCCTCTGAAAAGGTATTTTATCTCAAGTTACACTGAGTGAGAAGCGATGCTTTAAAATT
ATCCAAATCCCTTATTTCTGATTTTTTGCTCTTTTGTAATAAAGTTTGCCATGGAGTGCTCTACCTAAATGAAGAGGACATGCCAGTTAAGCTG
ACATAAACATACTAAATTACTTTATTGTTATTGCTGTTGTAAAGTGAAAAATTCAGACTCCTTGAGCTTGTTTAAATAGACTACTGTCAGAGAA
ATGGATGTATACTCCAAATCAGGAAACAGAAGCTCAAAGAAGTTCAGTAGCTTGCTCAGGGTCATTTCTGTAAGTAAATCACAGAGCCAGGATG
GGAACCCAGATTGGTCTGACTCTAAAGCACAAACTCTTCTTCCCTTTACACCAAGGATATAACGAATCTGTCAGTACTTGAAACAATTCCGAAA
GATTCTTACTGACAAAAAATGATTACTTTTTAGAAAGATGGAACATAATTCTTGCTAAAGCTTTGACAAAAACAATTCATAATTCCTCTAATTC
AGAAAATACTTTGATTTATGAATACACAAATTCAAGTGAACATACACACATACACAAAAATAACATAACTAAGCCTAGACTGAACCCCCCTGCC
ACTCTTTTTTCTAAACATTTACCAGGACATGAAAGAAAAATAGACTAAAATCTGTAAAAACATTAAGTAAGATATCATCAATTCATTTTCCACT
GTACTGAAAGAAACACCAACCTTATTAATGGCACATGCGGTCTTCTCCCGGCTGGTGCCACTACTTGTCCTAATGATCTTGGATAGATCTTCAC
GAGCAGCAAGTAGATGTGCCATTGTAATCGTTGTCTTGGGTGACAAAGCATAACGCTTAGGCTGATAAATTCTTGCTATATCATCTGTTTTTAC
CTAAATGACAAGAGTTAAGGAAAAAAGGAACAAAAGTACATTTTAATGAAAGAGCAAAAACAATCATAATCTTTAGAAATAAAGAAAAGGAGAT
AATGCATAAGCAAGGAGTTAGAAAAGAGCAAAAACACCCAAATATCTGAGAATTTATGAATAATTTAGAACAAATAAAATAGACCAACAGGTGT
TAAAAATATGTAACTACCAGCAACAACTCGCTAAAAAATAATAACAAAAAAATTTCTATACATATTAACAAAAAATACCTAAAAAATAGTTTTA
CCAAAACCACATACAGGACATTTAAAAGGGAAACATCAGTAAATCTTGCAAAAACAAAAGGAAAACTTGTATAAATGGTAAGAAATACCAAGTT
TCTGTATGGGAACATTAAGTATTATTGTCAGTTTTCCCCCAAATTAACTTATAATCCTATATAAATAGTTTTTGAGAGAATGAAAAAAAAATCT
AAAGTTAAATCCAGAAACTCAATATGTAAGAATAACTAAAAGCATTTTGAAATATAATCCTACCAAATACTAATATGCTATAATACAAAATTAT
CATCATCTTATCAGTTAACATTTAATGAGAACTTATTAAATGTGCCAGGATGCTGTTCACTTAGTAAGGCATTATTTCTTTAATCCTCAAAATA
TCCTTTTAGAGTGGTTGGTTTTTATTATCCCCTTTTGCAGATGGAAAAAAAAAATGAGGCATAGAAAGCTTAAGTTAGTTTCCCCAAAATATAG
AGAGAATCCTAGCTCTGCCCACTTAGCAACAAAGGTCTACCTGACCCCCAAGCACAGGTCTAGTATAGATAACAGTTTGCTATCCTACCTCCAT
CTAATTAACTAGAACTTGGGAGAAAAAAACATAGATTGATGAAATAGTATATTGAGACTCAGAGCCTCATAAATCTATGAATGCAATAAATGAT
AAAGGAGACATCACAGATCAACGAGAAAAGGAAAGGATTATCTTTTAAATGGTGCTGGAATGACCTGGTGGCTATCTGTAATAATAACAATAAT
ACAGCACACCATATAACAAAGGGAATTCCAAAGAGAACAAAAAGTTAACTGTTTGAGGTTTAATTTTCAATTTAAAAACAACTACATTATAAAA
ATTAAAATTTCTGTACTTTAAAAGATATAAAACAACATCTAATGACAACTGGGGAAAATATTTTCAACAAATAATTCAACCAGCAAACTTCCTT
TCTATATAAAAACCTCAAACACAAAAAGAAAACAGAATTCTACAGGAAAAAAAAATGACAAGACATAAATAGAAGTTAAAAAGAGGAAATTCAA
ATGACTAATAAGCTTATGAAAACAGTTCAACTTTGTCAATAATAAGAACAGACAAAACAAGTTAGTCTTTTTAACATCAAGTTAGCAATAAAGA
GGCTAAAGTGACACAACATTTCATTTACCTTACTGGAAGGAGTTTAAATTCATATAAA
HUMAN SEQUENCE - mRNA
CCCGGGGGGGAGAGAGCCGGCAGGCGGCGGCGGTGGTGGCGGGGGCGATGCGCCGCGCCCGGCCGCGCTAGGTGAGCCGGCACCGGGAGCGCGG
GCCGCGGCCATGGGCACCCTGGGCAAGGCGAGAGAGGCTCCGCGGAAACCTTCCCATGGCTGCAGAGCTGCCTCTAAAGCAAGACTAGAGGCAA
AGCCAGCCAACAGCCCCTTCCCCTCCCATCCCAGCTTGGCCCACATCACCCAGTTCCGAATGATGGTGTCTCTGGGACATTTAGCCAAAGGAGC
CAGCCTGGACGATCTCATTGACAGCTGCATTCAATCTTTTGATGCAGATGGAAACCTGTGTCGAAGTAACCAACTGTTGCAAGTCATGCTGACC
ATGCACCGAATTGTCATCTCCTCTGCAGAACTGCTCCAAAAAGTTATCACCCTCTATAAGGATGCTTTGGCAAAGAATTCACCAGGACTTTGCC
TGAAGATCTGTTATTTTGTAAGGTATTGGATAACAGAATTCTGGGTCATGTTTAAAATGGACGCCAGCTTGACAGACACTATGGAGGAGTTTCA
GGAACTGGTGAAAGCTAAGGGTGAGGAGTTACATTGCCGCCTGATTGACACAACTCAAATCAATGCCCCTGACTGGTCCAGGAAACTTACTCAA
AGGATAAAATCAAATACCAGCAAGAAACGGAAAGTCTCCCTGCTCTTTGACCATCTGGAACCAGAAGAGCTATCCGAGCACCTCACCTACCTTG
AGTTCAAGTCTTTCCGGAGGATATCGTTCTCTGATTATCAGAATTACCTTGTAAATAGCTCTGTGAAGGAAAACCCCACCATGGAGCGATCTAT
TGCTCTGTGCAACGGCATCTCCCAGTGGGTACAACTGATGGTTCTCAGCCGCCCCACGCCGCAGCTCCGAGCAGAAGTCTTCATCAAGTTCATC
CAGGTGGCTCAGAAGCTCCACCAACTACAGAACTTCAATACACTGATGGCTGTGATAGGTGGGCTGTGTCACAGCTCAATCTCGAGGCTCAAGG
AGACAAGTTCGCATGTCCCACATGAAATCAATAAGGTTCTCGGTGAGATGACTGAGCTGCTGTCCTCCTCCAGAAACTACGACAATTACCGGCG
AGCCTATGGAGAGTGCACCGACTTCAAGATCCCCATTCTGGGTGTGCATCTCAAGGACCTCATCTCCCTGTATGAAGCCATGCCTGACTATCTG
GGGGACGGGAAAGTGAACGTCCATAAGCTACTGGCCCTATACAATCATATCACTGAATTGGTCCAGCTGCAAGAGGTGGCCCCACCCTTGGAGG
CTAACAAGGACTTGGTACACTTGCTGACGTTATCCCTGGATCTTTACTACACTGAGGATGAAATCTATGAGCTTTCCTATGCCCGGGAACCAAG
GAACCACAGAGCTCCACCACTAACACCTTCAAAGCCACCAGTAGTAGTGGACTGGGCTTCTGGAGTGTCTCCCAAACCTGATCCAAAAACCATT
AGCAAACACGTCCAGAGGATGGTGGATTCTGTCTTCAAGAACTATGATCACGACCAGGATGGATACATTTCTCAGGAAGAATTTGAAAAGATTG
CTGCGAGTTTTCCATTTTCCTTCTGTGTGATGGACAAAGACAGGGAAGGCCTCATCAGCAGGGATGAGATCACAGCCTACTTCATGAGAGCCAG
CTCAATCTATTCCAAGCTGGGCCTGGGCTTTCCTCACAACTTCCAAGAGACCACCTACCTGAAGCCCACTTTTTGTGACAACTGTGCTGGATTT
CTCTGGGGAGTGATCAAACAAGGATATCGATGTAAAGACTGCGGGATGAACTGTCACAAACAATGCAAAGATCTGGTTGTGTTTGAGTGTAAGA
AGCGAGCCAAGAACCCAGTAGCTCCCACAGAGAACAACACTTCTGTGGGGCCAGTGTCCAACCTTTGCTCATTGGGAGCCAAAGATCTGCTCCA
TGCACCTGAGGAAGGACCTTTTACATTCCCTAATGGGGAGGCTGTGGAACATGGTGAGGAGAGTAAGGATCGGACCATCATGCTGATGGGAGTG
TCCTCACAGAAGATTTCTCTTCGGCTGAAGAGGGCTGTTGCCCACAAGGCCACCCAGACTGAATCACAGCCTTGGATTGGCAGTGAGGGCCCTT
CAGGTCCCTTTGTGCTGTCTTCCCCAAGGAAGACAGCCCAGGATACTCTATATGTGCTTCCCAGTCCCACCTCTCCATGTCCTAGCCCAGTCTT
GGTCAGAAAGCGGGCTTTTGTCAAGTGGGAGAATAAAGACTCCCTCATAAAATCAAAGGAGGAGCTCCGTCACCTCAGACTGCCTACCTACCAA
GAACTGGAACAGGAAATAAATACTCTGAAAGCAGATAATGATGCCCTAAAGATCCAACTGAAATATGCACAGAAGAAAATAGAATCCCTCCAGC
TTGAAAAAAGCAATCATGTCTTAGCTCAAATGGAGCAGGGTGACTGTTCTTAGCCCAGAAACTAAGTAGCACAATCTGTAGATGAGTATAGTGA
TCTCATTTCCTAAACTGTAATCCACAGACCTGAGGAACTTTACACTGACCAGCTTTAAAACAGTACTTTAAAAGGAAAAGCCTGTTACTGTTTA
TTTACCTAAAAGATTCCTAATGTGCAGCACTGTTTTCTCTTTCAGTTAGTTGACTCAAAGGGGGAAAACTAAAGAATGCAAAACTTTTGCTATT
CATACCACTGATGTTCATCAAAAGTATGCGATCTAAAACATGACTATCATTTCCTGACAATGGGGCATCTCGGTGGCCTGCCTGGCTGATTCTT
CCTTAAAACTAAAATCTCTGGAAAATGGATTTGCTTCTTACCCTGTGTTTTCTGCAAACTGACTTACTTTGTTCCAGCCAAAGCTTGCTAATAA
TAGAAAACTACCCATATTCCAAAAGTAGATTTCCTCTGTATCCCAGCATACTTTGTGAACCTGGCTCCTTCTTCACTACCTCAGATCTAATCAA
TTAGTCCATCTACCCTCCTTCCTCACTACAGTCATAACACATGAGCATATCTACCTAGAAGCCAATTTCTACTGATGTAGCCACAACTTTTTAG
AGGCCTATTAAACATGACGTTATCCAATTGCAGGTCAACTTATAGTTGTAGCCTTACAACTTACAGGCATCAGAAAATAAGTAATCAAATTAGG
TACCTGGAAACATAGCTATTACCATCTCATATTACTGTCTAATTAAAATAAACATAACGCAAACATCTTTGTCCTTATATATTCTACAGTGGAT
AGAATTAGGAATTGATGGCTTAAAAAAAAAAGTCTATGAAGAGTCTGTTTAACTCTTCATGTTCCATCTTTCTCTTCTGAAGTAAACTATTTTG
AAAGTTCTCTTTTTGAAATGAATTTGTGCTTAACTGTCTTCACTATTAATACTATTTAGAAATAAGCTAATTGGATCAGTGGCTTAAATAATAG
CTGACTGTGTGTACATATGTATATAATATGTATATACAATATCAGGCATGCATGTGGCTTGGAATTTTGTTTCCTCCATAAAATGTGGAAGTGA
ATTAAACAAGTTTTAGTCATTTATACAAAGTCACAAATATAAAGTTCAGTTTGTCACAAGATTAAATTGCTCACAAGGTAAAATTGTATTGTTT
GGCAAAATCACAAGTAACAATCCTGTGAGTTTTCTATTATGAAGGTTAATAATAAATGGGCTCATTTAGTTGCCTGGGCACCTATTCACAAATT
CATTTGTCAGCCTCTTTTTAGTTCTCTTAAAAAAAAAAAAATCATATGATCATTTTCCTTTTTGGGGGTACTTAGCTTCCATGCCTATAAAGTC
TGGTACCAGACTGACTTGAAATTCATAAACAAGTTGTCCAATTGCCAAGAATATGTTAACAATTAAAAGTTCCAAACTAAAGCCAATAGCACCA
AGTCTTCATAAGAATACAAAGTATACATACAGTATTGCTTACCTGGAGGATTCAGATCATTTAGGAATTCTCTTTGATGAAAGATCAGTTCCCA
TTTGAGTTCCTCCTTGCACTGAGTTTTAGTGATATAGAACTAGCTTGTAGTTAGTGTTTCATTACATTATAAAGAATAGTTTTACACACGTATT
TACCGTTTTCCAAATTTAAACTCAGAAATACCCAAAGCAGGCCTGCTTAAGCCCACTACCTGGCATATAAACTTATAGTAACACTTTGTTACTT
TCTTTTTAATAGGACAAGCATGAGTTAGGACAAACTCTAAAAATTCATATTCTTCACTATTCTTGTTTTCCTTTGATTGATATAGACCAAAGAT
GGTGTACTCTAATTTTTTAAAACAGTAATGGAACACAATTTTTTTCATTCTTCCTCCTCTCCATTCGAAGTAAAGATCCCCAGTTAGTTTTTAT
ATAAATAATCTATAGGGATTCAAAAGGTGTCACAGTCCACTTAATTAGTCAAATTAGCAATGGCTAAACAGTATCAAGTACTGCAGAATTTATC
ACTGAAATGGATAAGAGGAAATAGTTTAGTCACAGGTTTTTACAGTCCAGCAAGGGCCAAAGAGGTATAGTATACAAGTTAATAGTATTTGTGT
TGAGCAACATGGGGCTAGTGGGATCACAGAAATCTGGAAAAAAAAAAAAAAAGGCTTTGGCTTATCAAGCCTAGTGTAAATTTCTGCATCTCAC
ACGACTTTAGTTTGGCCAGGTATTTATCTGCCAAAACAAGGACAAATCTTGTTGTATTAACAGCAGGGTCACTTCTCATTTTCTTTGCTGACTT
ACCTTTTTACTGACCGTTGTGAATTTCTGTCTCAAAATGTATAATATAGAAATGCAAGAAAAAAACAAATGTACAGATTGTAAAGTTTTTTGAT
ACCTAATGTAAGTTTTCTTTGTGTAATATTTATATGATAAAAGACATTAGGATCCCTACAAAAAAAAAAAAAAAAAAAAAAAAAAAAAAAAAAA
AAAAAAAAAAAAAAAAAAAAAAAAAAAAAAAAAAAAAAA
HUMAN SEQUENCE - CODING
ATGGGCACCCTGGGCAAGGCGAGAGAGGCTCCGCGGAAACCTTCCCATGGCTGCAGAGCTGCCTCTAAAGCAAGACTAGAGGCAAAGCCAGCCA
ACAGCCCCTTCCCCTCCCATCCCAGCTTGGCCCACATCACCCAGTTCCGAATGATGGTGTCTCTGGGACATTTAGCCAAAGGAGCCAGCCTGGA
CGATCTCATTGACAGCTGCATTCAATCTTTTGATGCAGATGGAAACCTGTGTCGAAGTAACCAACTGTTGCAAGTCATGCTGACCATGCACCGA
ATTGTCATCTCCTCTGCAGAACTGCTCCAAAAAGTTATCACCCTCTATAAGGATGCTTTGGCAAAGAATTCACCAGGACTTTGCCTGAAGATCT
GTTATTTTGTAAGGTATTGGATAACAGAATTCTGGGTCATGTTTAAAATGGACGCCAGCTTGACAGACACTATGGAGGAGTTTCAGGAACTGGT
GAAAGCTAAGGGTGAGGAGTTACATTGCCGCCTGATTGACACAACTCAAATCAATGCCCGTGACTGGTCCAGGAAACTTACTCAAAGGATAAAA
TCAAATACCAGCAAGAAACGGAAAGTCTCCCTGCTCTTTGACCATCTGGAACCAGAAGAGCTATCCGAGCACCTCACCTACCTTGAGTTCAAGT
CTTTCCGGAGGATATCGTTCTCTGATTATCAGAATTACCTTGTAAATAGCTGTGTGAAGGAAAACCCCACCATGGAGCGATCTATTGCTCTGTG
CAACGGCATCTCCCAGTGGGTACAACTGATGGTTCTCAGCCGCCCCACGCCGCAGCTCCGAGCAGAAGTCTTCATCAAGTTCATCCAGGTGGCT
CAGAAGCTCCACCAACTACAGAACTTCAATACACTGATGGCTGTGATAGGTGGGCTGTGTCACAGCTCAATCTCGAGGCTCAAGGAGACAAGTT
CGCATGTCCCACATGAAATCAATAAGGTTCTCGGTGAGATGACTGAGCTGCTGTCCTCCTCCAGAAACTACGACAATTACCGGCGAGCCTATGG
AGAGTGCACCGACTTCAAGATCCCCATTCTGGGTGTGCATCTCAAGGACCTCATCTCCCTGTATGAAGCCATGCCTGACTATCTGGGGGACGGG
AAAGTGAACGTCCATAAGCTACTGGCCCTATACAATCATATCAGTGAATTGGTCCAGCTGCAAGAGGTGGCCCCACCCTTGGAGGCTAACAAGG
ACTTGGTACACTTGCTGACGTTATCCCTGGATCTTTACTACACTGAGGATGAAATCTATGAGCTTTCCTATGCCCGGGAACCAAGGAACCACAG
AGCTCCACCACTAACACCTTCAAAGCCACCAGTAGTAGTGGACTGGGCTTCTGGAGTGTCTCCCAAACCTGATCCAAAAACCATTAGCAAACAC
GTCCAGAGGATGGTGGATTCTGTCTTCAAGAACTATGATCACGACCAGGATGGATACATTTCTCAGGAAGAATTTGAAAAGATTGCTGCGAGTT
TTCCATTTTCCTTCTGTGTGATGGACAAAGACAGGGAAGGCCTCATCAGCAGGGATGAGATCACAGCCTACTTCATGAGAGCCAGCTCAATCTA
TTCCAAGCTGGGCCTGGGCTTTCCTCACAACTTCCAAGAGACCACCTACCTGAAGCCCACTTTTTGTGACAACTGTGCTGGATTTCTCTGGGGA
GTGATCAAACAAGGATATCGATGTAAAGACTGCGGGATGAACTGTCACAAACAATGCAAAGATCTGGTTGTGTTTGAGTGTAAGAAGCGAGCCA
AGAACCCAGTAGCTCCCACAGAGAACAACACTTCTGTGGGGCCAGTGTCCAACCTTTGCTCATTGGGAGCCAAAGATCTGCTCCATGCACCTGA
GGAAGGACCTTTTACATTCCCTAATGGGGAGGCTGTGGAACATGGTGAGGAGAGTAAGGATCGGACCATCATGCTGATGGGAGTGTCCTCACAG
AAGATTTCTCTTCGGCTGAAGAGGGCTGTTGCCCACAAGGCCACCCAGACTGAATCACAGCCTTGGATTGGCAGTGAGGGCCCTTCAGGTCCCT
TTGTGCTGTCTTCCCCAAGGAAGACAGCCCAGGATACTCTATATGTGCTTCCCAGTCCCACCTCTCCATGTCCTAGCCCAGTCTTGGTCAGAAA
GCGGGCTTTTGTCAAGTGGGAGAATAAAGACTCCCTCATAAAATCAAAGGAGGAGCTCCGTCACCTCAGACTGCCTACCTACCAAGAACTGGAA
CAGGAAATAAATACTCTGAAAGCAGATAATGATGCCCTAAAGATCCAACTGAAATATGCACAGAAGAAAATAGAATCCCTCCAGCTTGAAAAAA
GCAATCATGTCTTAGCTCAAATGGAGCAGGGTGACTGTTCTTAG

[0269] TABLE 5
NOMENCLATURE
TCSGNM Nmyc1
Celera mCG19753
HUMAN NOMENCLATURE
HGNC MYCN
Celera hCG1783900
MOUSE SEQUENCE - GENOMIC
TAATGAAATTCTGAAGCCTACAGACTCTTCCTAGGGGAGAGAGGAAGTATTCAACTTGGTAGAAAATAAATGATGGGTGAGGGAACAGGAGGAT
GAAAGGGCCTGATGAACAGGTGAGCGCCTATGACTCCGTGGGGTGGAGGTGATGTTCTGGATTATCTAACCCAATCTCCCTCATAATGTTGTTC
CGGGACAATCGAATTCATCCAGAAGGATCTTGCCCAAGGTAGGTAAAGGGGATTCAGAGAAAACTTTTCTATGCTTTGGTGCTATGAGATAGGA
GAGCAAAGAAAAATCACGAAGACTTTGGTCAGCAAGCCAAATGCCACATTTGAGGGTGTCTTGTCCTCAACCCAATTCTAAAGGGACCCTTGTG
TTACTGTGCCCAAGAAGTTGGAATTTCCCCCAGGAGTTTCACTTTAGGGGAAGAAAAAGCCTTGAGTCCTGGTTCCAGCCAGAGAGGGAGCTTG
CCTTCAGGGAAGTGATTGTCCAGATCTCACAGAGTTCTTGCAAATTGATATTACAGCACCTTGCAAGAGAAAATGGAGCTGAGACAATGCTGCC
TCAAAGGTGGGTGGGAAAGACCAGGACTCTTGTGTCACAAATACCTGTTTCCTTTCATTTAGTCCTATACCTGTCTGGACATCGAAGATGAACT
GAGGGCCTGGGATGGGGAAGGGGGTGGGGGGTCATTGAACCCCTTTATATTTGTTTCTCTCTCTGATGTGATCACATTGAATGCACCTCTGTTT
TCCACCATTGATTGCTAGGCTGCATCATTGGTCTATTGAGGACGAGTAGTCAACTCTTGCTTGTTAACGGCTGCCTTACAACTATGATTAGAAC
GAGCATTTAAAATGGTGTTACGGGGCTGGAGAGATGGCTCAGAGTTAAGAGTACTGACTGCTCTTCCAGGGGTCCTGAGTTGCTCTCCCAGAAA
CCACATGGTGGCTCACAACCATCTGTAATGGGATCTGTCTGGTGTGTCTGAAGACAGCTACAGTGTACTCATATAAATAAAAAAAAAAAGAAAT
TAAAAAGAAAAAACTTTAAAAATACACATTAAAAAAAAAAAAGATAAAATGGTGTTACCACCCTTTCCCAGTGCCCTTTTCCGATGATGGCGCT
GCATGGTGAAAAGCTTGAGTTAGTACTTGTAGCTATGCTGTCCAAGGATCCGCTGCAATCCGTGCAGGTCTTCGGACACAAGAAGACAGTCACT
GCTGTGGCCCACTGCAAATGAGGAAACGGGCTCATCAACGTGAATGGATGAAGCCTCTAAGAAGGAGATCAAAGATAGCCTCATTCAGTATGAT
CGGACCATTCTTGTAGCTGACCTCCAGTCGCTGCGAATCCAAAAAGGTTGGAGGTCCTGGTGCCCGTGCTTGATACCAAAAATCCTACCAATAA
GCCCATCCCAAGGACCAGGGTTTGTTTACCTCTGTAATGCACATCCTAGGATTTTTTTTTTAAATGACATTACCGATACAACCCCTCAGCCACA
CACTCACCCTTGGCTAAACTCTCTCGGTGCTAGCTTTGAAATTTCCTCCAGCCTCCAATGGCAAAATACATGCACCTAGTTTGGTGGGGCACCT
CAAATATTATAAACTTCATTCGGCTGTGGTGGTCAGCTTGTGATTCAAATTCAACTACCACCTAATTTGTCTCATCTCAGCCTCTCTGAACCCT
TCAGAGAGTTCAGTGGCAGGTAGTCAGGAAGAGTAACAGCAAATCTGGGTAGGAAAACATAGACTTAAGGGTAGTTTAGGCCGGGCGTGGTGGC
GCACACCTTTAATCCCAGCACTTGGGAGGCAGAGGCAGGTGGATTTCTGAGTTCGAGGCCAGCCTGGTCTACAGAGCGAGTTCCAGGACAGCCA
GGGCTATACAGAGAAATCCTGTCCCGAAAAACAGAGAGAGAGAGAGAGAGAGAGAGAGAGAGAGAGAGAGAGAGAGAGAGAAGAGAAGAGAAGA
GAAGAGAGTCACCACCACCACCCAATCCCGAATGTTATTCTAATCAAAACAAACAAAACAGAACAAGCAACTTTGGGGGAGAATGGGTTTATTT
TAGCTCACAAGCGCACGTTACAGTTCACTCTACGGCAGGGAAGTCAAGGCAGCAAGAAGTTCAAAGGGCTGGTCCATCCACAGTCAGGAGCAGA
GGGCGAATGAAGTATACTCGACATTCCGTTCACTGTTTCCACTCGAATACAGCTCAGAACCCAATCCCAGAGAACGGTACCACCCACAGTGGTC
GAGGTCTTCCCACATCAATTGAGGCAGTCACTCACAGACATACCCACAGGCCAACGTGACCTAGACAATCTCTCATCAAGACTCTCTGCCCAGA
TGATTCTAGGTTGTGTCTAGTTGATAATTAATCTCACCATCATAGGTATTAGAGATAGATGTAAATANNNNNNNNNNNNNNNNNNNNNNNNNNN
NNNNNNNNNNNNNNNNNNNNNNNNNNNNNNNNNNNNNNNNNNNNNNNNNNNNNNNNNNNNNNNNNNNNNNNNNNNNNNNNNNNNNNNNNNNNNN
NNNNNNNNNNNNNNNNNNNNNNNNNNNNNNNNNNNNNNNNNNNNNNNNNNNNNNNNNNNNNNNNNNNNNNNNNNNNNNNNNNNNNNNNNNNNNN
NNNNNNNNNNNNNNNNNNNNNNNNNNNNNNNNNNNNNNNNNNNNNNNNNNNNNNNNNNNNNNNNNNNNNNNNNNNNNNNNNNNNNNNNNNNNNN
NNNNNNNNNNNNNNNNNNNNNNNNNNNNNNNNNNNNNNNNNNNNNNNNNNNNNNNNNNNNNNNNNNNNNNNNNNNNNNNNNNNNNNNNNNNNNN
NNNNNNNNNNNNNNNNNNNNNNNNNNNNNNNNNNNNNNNNNNNNNNNNNNNNNNNNNNNNNNNNNNNNNNNNNNNNNNNNNNNNNNNNNNNNNN
NNNNNNNNNNNNNNNNNNNNNNNNNNNNNNNNNNNNNNNNNNNNNNNNNNNNNNNNNNNNNNNNNNNNNNNNNNNNNNNNNNNNNNNNNNNNNN
NNNNNNNNNNNNNNNNNNNNNNNNNNNNNNNNNNNNNNNNNNNNNNNNNNNNNNNNNNNNNNNNNNNNNNNNNNNNNNNNNNNNNNNNNNNNNN
NNNNNNNNNNNNNNNNNNNNNNNNNNNNNNTATATATATATATATATATATATATATATATATATATATATATATATATATATACATACACATA
TATATATACACACACTTAAAAACAAATAAGCATACCTCAAAATCTAGCAAGCAGCATAGCCTGGCAGCACAGTGCAGTGTAGAGTATCTGGTGT
TTATCCTCAAGACTGTAAGGCTTACTAGAGAGTATAGCTTGCTATCTCTGCCCAGGGCTGTTGAAAGAGTACCATATGTTGTTGGTTCTGAGAA
AGTATTATTATTGGAGGGGGTAGGGGTGTCACTCATGCTACAGCATGCCTGTGAAAGTCAAAAGACAATTTTGTGGCAGTCAGTTCTCCTCTTC
CACCGTGCAGGTCCCAGAGAACCAACTCAGGGTGCTGTGCTTGGTAGCAAGTACCTTTATCCAATAAGCCATCCTGCTGGCGTGTGTGTGTGTG
TGTGTGTGTGTGTGTGTGTGTGTGTGTGTGTGTGTGTGTGTGTGTTTTGGTGGCATTGGTTGGGGGGGGGGGGTGTATCTTTGTTTTGAGATAG
GATTTTGCTACACCACCAAGGCAAGCCTTCAACTTCTATATGTAACCTAGGTTGGCCTGATTAGTTAGCTCAGGCTAATACCAAATTTGCATTT
CTTTAGACTCAGCCACAATAGCACTAGGATCACAGGCAACACACCCTGCTTGTTGATTGGCACTAACAAGTCTTACAGTGTTTTTGCTATTGAC
AACCTTGAAGCAGTACGTATTCTTGGTGATTTGTCTTAATCTCTCTCTCTCTCTCTCTTTCTCTCTCTCTCTCTCCCTCCATCCATCCTTCCCT
CTCCCTCTCTCTGTCCCTCTCTCTGTCCCTCTCTCTGTCCCTCTCTCTGTCCCTCTCTCCCTCCCTCCTTTCTTCCCTCCCTTCACCCAGGGTA
TGACTTAGTCTGTAAACCACTCTAGTCTCAATTTATGTAAATCTACCTTCTTTGGCCCCCGATGTTGAGTGTTGGGATTAAAGATGAATGTCAC
TAATGGAGTCTCAGTTTGGTTGTTGTTGTGGTTATGGTTTTGGTGTGGTTTTGTTTTTGTTTGTTTGTTTGTTTGTTTGAGACAGGATCTTGCT
AAAGACACCACATTAGCCTCAATTTTGTAAATCTTCCCAATTCTCCCTCCCAAGTGTTGATGTTTACAGATATGCTCTGTTATCTTCAGGAGTT
TTAAAAACTATTTTACATTGCACACTTATTTATTTTAAGGACTGGGTGAGATCATAGGACAGCTTTAAGCAGATGATTCTCTCCTTCCACTAAA
TGAGACCCAGGGATCAAACTCAAGTTGCCAGGTTTGGCCACAGGTTCCTTTACCCACTAAAGACATTTCAGCAGCTCTTGCTTTATTATCTCTT
TTTGGGTGATTCTAGAATGGAATTCTTTCTACTTTTGGGACAGAAGCAGCAGTGGTGTATGAAAGTGTTCGTATCTCTCACTCTCCAGCCTCAC
CACCGTTTTGAGGCAATCTGCTAGACTGAATTGTTAATCTCCCTGAGATTTAATTTGGATTGTCCCGAGTCAGGCGAAGTAGCCCATTTTCTTG
TTGGTACTCAATTTGCATTTCCTGTTTGGCAAATTGCCTATTCATATCCTAGAGCCAGATTCCTCTCTGGCTTTTCTTTACCTCCATTCAGTTT
CTAGGATCCCTTCCTGCACGAGGAATATAACCTTTGCCTCTGAGGGCCCTCAGGAAGTGCCATCCCAAATATGACATTTTTGAGAGCTGATGAA
CTCAAGGGGCGACGGAGCTGGAAACTGCAAGTGTAGGCTTAGCTGTACCCCTTATCTACATAAAGACATCCTCCCAAGGCAGCTAGGCTGTTCT
GAATCTACTCTCCAGTTTCTTATCTCCCAGTGGAGATTACCTCCGTGACACCCAGCCAAGGTAGACTCTCCCTGACCTATTCTGTGGGCCGCTT
CCAGACAGGGTTAATAATACCTGAGACTGTATCGGTCTGATAAAGTCAGACCTGCTTTCCTTCCCTCAGCTCCCAGAACGCTAGGCATCCCGGG
ACACTGCATGAGTCTCAGTCATTTGACCGTCCTTCAGACCTCAGATGTGTGAGGCTCCCATCCACTGACATATTGTTCAGTGTATTTTCTACTA
TGCTAATCTGTCTGTTTTGATAGTTCTACTTTTTGCAGTCAAATCTTAAAAGCCAACCTATTTTCATATTTTACTTTTTTTGTGCAATGCAGAA
TATAAGTTTTCTTTTCTCCTCTTCCTCCTCTGTCTTTTTTTCTTTCATACAATACTTCCTCATCGTCCTCCCCTATCCCCGACTTTTTAAAAAA
ATAAAGTCAATTAATCTGCAGGATTTTTTTTTTTTAGTATGTATATGTGTTGACCTGTTTGCCTCAGAATGCATGCAGAGATCAGCAAACAACT
TGCAGGAGTCTTTTCTCCCCTTCCACCACGTGCATGGGGCCTCAGGCAGTTAGACATAGAGGAAAGGGTCCTTACCACCTGAGCTAGCTTACCA
ACTGGGTCCCAGGGATTTTTTCAACTATTTTAAGCAAAAATTACAAGTCCTTTATTTTGTTGGGCCTGGGTCTTGTGGTATAGTCCAGGATGAC
TTCGGACTCCCTGCCTCAGCCTCACGAGGGCTGGAGTACAGTACCACAAGGGACTGTGCCTTTATTTGGGCAGGAGAAATTTGGACTCAGTAAA
ATAGTCCCAGAAGAAACCCAAAAGCTGGATGAGGTTGTTGGTCTACTAACCATGATGGATTAAATCCTCCTGGGTTTGTGTACCTGTGAGCTGT
CTTTATTTATTTCATTTGGTAAAGAAAGANNNNNNNNNNNNNNNNNNNNNNNNNNNNNNNNNNNNNNNNNNNNNNNNNNNNNNNNNNNNNNTAA
CCAGGTCACCTTCTCTCTGTCCCCTCTTTTCTGAAACATCTTATCTTTTAGCAGAGTGAAGAGCACAGGTGTGGAGAGAGAACTTTATCCATAA
CTAACCAGGCCATCTTAGCCGACTTTCCCAGTCCCCTGCTGCTTGAGGGAGTTCTAGTAGGCTGGTCAAAGTGTCCTTTACGTGTCCGCTGCTG
AAGTTCTGAGGAAGATTCTAGAAGCCAGATGTGGTGGCACAGACCTGTAGTCCCAGAGTTTGGGTAATGGCAAGAGGATCAATTCAAGGTCATC
CTCCTCAATAAAAATAGAGTTCAAGGTCATCTTGGACTATATGAGACCTCGGCTCAAAAAACAAACAGAAACACCTCTCCTTCCCCTCCCCCCC
CCCCCAAAGCAACAACAAAAAGAGAAGGTTCTGGGAGCCACACCTATCTCTCCCCCACTGTGCCACTAATAAACAAAACTAACCTGCCAGATCT
GGCTGTCTAAAAGGGTTCCTTTCAATGGAGCCTACCTCCAGCAGCATCCAGGAACACTTACCATACAGCCCCTGCTGTGTATGTATAATTACAA
TCCGAGGCAAAGTTTTCAGAGAGCCAGCATCTTGAGGGAGAATTCAGCGGGAGGTCTCGGTTTGGAAGAGGCCAGGGGTGTGAAAATGAGGGTG
TTAAAGGCTTTTGCAAAGGTAATGGGTTTTACATATGTGAGCCCAATAAGAAAGGCCTTGGAAGGGTGGCTCACCCTCATTCACGGCTACTTCC
TAGAACCTGCCGCAGTCCCCAGAATTATGTAGGCATTCGGGGACAGATGGGAAGACTTTCACACATGCTAATACACATTTTGACCTTGACTCTC
TAGGCATTCTCTTCTTCCTCGCTGGAGGTGAATGAGGGGTGTCATTTTCAATTTAGAGGGAAATGGAGACGCTTCCCCACAAACAAGCTTAAGG
GTTTAAGGATAAATCCCACCCTACTGAGAATGTGTGTTGAAAAAGGGCTTCACCCAGGGACCCAGGTTACTCCTGGAAAGTTTTGTGGGGCAAG
AGCATTTATTTTTAGCCCCACATTTAGGAAACAGACCTTTTAGCATGCTTGCCTAGACAGAAGTGAGACGCTGTGGGATGGGGAGGGAGGGAAA
TGTGCCCACGGCTGTGAGGAAAGAATACACGCACCCTGCTCTAGTCTAAATAAGATGTCGCGCTCTCTCTGTTCACGCCACCTCGTAAGTGAGG
CAAATGGGACACAAAGAGGCCAAATTAATGATGGCTTTCCTTGATGTCACCATCCGTAGGAACTCGAGGTATACAGAGCAGTCAGTGATTTGGG
CAAGGAAAGCAGCGGTCCGTAATTCAACCCTGGCTTCGGAAAGGCTTTTGTTGGGAACGGTGGGCGCGACTTTAGGGGACGTCCCTCCACGCGT
TTCACAATCCCTTCCGCGGTAGCAAGGATTCGCTAATTGTCTCGCGGGGGTGGCCCCACTCGGGCTCCGAGGCTGGGCGGTGCGGCTCCGCTTT
CTGCTTGGTCTCCGCGAGGTGTCGCCTTCGGCCGAAGAAAGCGGTAAGGCGCCACCCTCGTAGCCCGCACTTATTTATTTTCAAACAAGGGGGG
CGCCCCTTCCTTTCAATTTGAAACTAGAAACCTCCTGCGGTCTCGTTTCTACGTGGGCGCGTCCTCGGCCTCCCATTTTGCACTCCTGTGTCGC
CTTCCTTCGAGATCACACACGAACAGCCCCTCGACCAGGCCTTGTTCCACTTTAGCCTGGAGCTCATCTTTCACACAAACACACACTCGCGCGC
AGTCCACGCAGGGACTGGGCTAGAAACCTCTTTTCCCATTCCCAGAACACACCCAGCGACCTTTAAAAAAAAAAAAACACGGAGTGCAGCGGGT
GCAAGCCAGGGGGTCCAAAAGGGAGGGGGAAGCACTCCTCGGGTTTCCCAGCTTTGCTGCTTGCAGTCTGAAAAACGAGAGGGGGGAGGGGGAG
AGAGAGGAGGGGAGGAGGGGGAGAGGAGAAGAGGGGAGGAGGGAAGGGAGAGAGAGAGAGAGAGAGAGAGAGAGAGAGAGAGAGAGAGTCGGAA
AAAAAAGAGAAAAGCAAATGGCTTTTGGCGCGAAAGGCTTTGGCGCCTCCCCTGATTTTTATGGAAATCAAGAGGGCGGGGAAAAGCCTCTTGC
CTCTGCCTTTCTCCCTCCCCCTCGTCTGCGCCACAGCCCCCTTCTCTCCCCGCCCCCCGGGTGTGTCAGATTTTTTCAGTTAATAATATCCCCC
GAGCTTCAAAGCGCAGCCAGTGACAGNNNNNNNNNNNNNNNNNNNNNNNNNNNNNNNNNNNNNNNNNNNNNNNNCCCGCCGCCGCTCCCTCAGC
CCACCCGGAGACCCCAGCCCCGAGTCGCCTCCGGATCCCCGGCAGTCTGCGGGAGGTAAGAAGCGGTACTTGCGAAGCTTCGAGCGCCCGGGGA
ACGGCGGAGCGCTGCGGCTAGGCAAGCCCCTGGACGCGGCTCCGCACCCTGCACCCAAATATGCCGGGCTTTTCTGGGGGAGGGGGTAAGGGGG
CAACACACCGCGTCTGCTTCCGAAACAAAACCATCTGGGTTTTTTGTTTTTTTTTTTTTCCTGAAAAGCCTATTCAGCACCCGAAGGCACCCTG
GCTGGAAGAGACCCGCCCTAATCCCTTTTACAGCCCTGGCCCAGGCAGAGAAATAGCTTTAGCGAAAAGAAATTCGCCCGGCTCCACAAGATTT
GTCTGAGTGTGAGGTGACTGGGAACCGGTGCGTCCCCACCCCAAGCTGGGGTTCTCCAAAAGGTGCCGCGGGGAAAGAAGGAAAAGGGGTTAGG
CGAAGCTAGGTGCCTGAGTGATAATGTAGGTCACGGCTGCTCCGGCTTAGGAGACGCGATTCTCGCCGGCGACCCTGCACCATTCCTAGGGATG
GGGTTCAGCCTTTCCCCCCGCCTGTTGAAGAGGTTGAGGTCTCTGAAGGAAGGGGAATGGAAAGGGTATAGGTATAGGCAGCGATGAGTACCAA
GGGTATCTGCCAAGATTGAGGCTCTAGGTCTAGGTGGAGAGGGTTGTATGTAATTGCCTGTTGTTGGTCTGACTGGAGAAAGGCCCTTAATAAT
TAATAAAGTTTCCTGAACCCCGTTAGCGTTTGCGCTCCCGTGATCGCATTTCTGCAAAAGGGGAATGAAAGGTACTTCAATCCCATGCCTGGTA
GCTGGGCTAGAGAGCAAGGACTTCCTTTAAGCAACTAGTGCAAGTGGGGTAGTCGCGCTAGTAAGAGCTGAGATCTGCAGCTTGAACAGCCCCC
CTCCCCCAGGCAGTGCCTTGTGTGAATGAAACGGCAGTTTCCCAAAGTTGCAGAGAGCCACACCACCCCCTGNNNNNNNNNNNNNNNNNNNNNN
NNNNNNNNNNNNNNNNNNNNNNNNNNNNNNNNNNNNNNNNNNNNNNNNNNNNNNNNNNNNNNNNNNNNNNNNNNNNNNNNNNNNNNNNNNNNNN
NNNNNNNNNNNNNNNNNNNNNNNNNNNNNNNNNNNNNNNNNNNNNNNNNNNNNNNNNNNNNNNNNNNNNNNNNNNNNNNNNNNNNNNNNNNNNN
NNNNNNNNNNNNNNNNNNNNNNNNNNNNNNNNNNNNNNNNNNNNNNNNNNNNNNNNNNNNNNNNNNNNNNNNNNNNNNNNNNNNNNNNNNNNNN
NNNNNNNNNNNNNNNNNNNNNNNNNNNNNNNNNNNNNNNNNNNNNNNNNNNNNNNNNNNNNNNNNNNNNNNNNNNNNNNNNNNNNNNNNNNNNN
NNNNNNNNNNNNNNNNNNNNNNNNNNNNNNNNNNNNNNNNNNNNNNNNNNNNNNNNNNNNNNNNNNNNNNNNNNNNNNNNNNNNNNNNNNNNNN
NNNNNNNNNNNNNNNNNNNNNNNNNNNNNNNNNNNNNNNNNNNNNNNNNNNNNNNNNNNNNNNNNNNNNNNNNNNNNNNNNNNNNNNNNNNNNN
NNNNNNNNNNNNNNNNNNNNNNNNNNNNNNNNNNNNTTCGAATTGGGCTACGGAGATGCTGCTGCCGGAGCCGACCTGTGGGGCAACCCGGGCG
AGGAGGATGCGTTCGGTCTCGGGGGCCTGGGTGGCCTCACTCCTAATCCGGTCATCCTTCAGGACTGCATGTGGAGCGGCTTCTCTGCCCGCGA
GAAGCTAGAGCGCGCAGTGAACGAAAAACTACAGCACGGCCACGGGCCCCCGGGCGTCAGCTCAGCCTGCTCGGCTCCCGGAGTGGGTGCCAGC
AGCCCCGGGGGCCGTGCCCTTGGTGGGTCGTCGAGTGCTAGCCACACCGGGGCCACCCTGCCTACCGACCTCTCCCACCCGGCTGCCGAATGTG
TGGACCCCGCCGTGGTCTTCCCCTTCCCGGTGAACAAGCGAGAGTCGGCGTCGGTGCCCGCTGCCCCCACTAGCGCCCCGGCGACCAGCGCTGC
GGTCACTAGTGTGTCTGTTCCAGCTACTGCCCCGGTGGCTGCTCCTGCTCGTGCAGGCGGCCGTCCTGCCAGCAGTGGGGAGGCCAAGGCCCTC
AGCACCTCCGGAGAGGATACCTTGAGCGACTCAGGTAAAGCCTAGAGTAGAGTTCTTGCTAGCTCCTTACGGACTGGGAAGGTGGGGGTGCTGC
GTTCCCTTTGTTATCATAGATTTGTGCGGGTGATTCTCTTCTGTTCACCAGCCTCCCGGGACAGAAGAGGCTGGAAACACCAGCTACACCTTCT
CTTAAATTTGCCATCCCCTTTTTCGCGAATCCTTGCGGTAGGCATGCCCTCACTGTGGCAAAAGTTGGTGGCCAGCTCAGTCAGTCTGTGGAGT
CCAAAAAACTACCTGTACAGAAATCTGTTAGTCCGTTGGAAAGGAACCTTTAAGCCAGGTCAAGGAAGGGAAAAGACTCCCTGCAAGACGAGGG
CTGCACAATCCCACTTGCAAAAGTTAAGAGAATGCCTGGCAATTCCTCCCTCCCCTCCCCTAGGACTCTGAGCCCTCCGTGGGTGGTGGGCTGT
TTGCGTTTGGTGCGTGGCCAGCAGGCGGCGTTGTGTCTGACGCAAGACAGGCAGGATCAAAAAGACTGGGGGTGATGGGGGCACCCCCTCCCTC
CAGTTCAGCAGCTGGCAGCAAGTGCATTAGTGGTTGTGTACGTTTTCAGAGAGCCTCTTTCCGGTTTTGATTGAGTACTAGTCCCGTTGTGTTT
CCTAGCTGGAATTTCTGACCTAATTGAGCTGAGTTGTGTTCCATAACCCATTGCCCTTGAAGGTTGAGGGCGGGTCCCTACCACTGCCGCTCCT
AAGGAATGCACGCACCCTTAGGATTCATTGGTTCTATTGTAAGCCTTTATCTGCGCTGTCCTCGGAAAGAAAGGGTTAAAAAGAAGAAGAAGAA
AGCTTTTTTTTTCCATGGGGCTGTGAAAGTACCTACCACACTTTACCCAAATCCAGTCTGCCCTTGTCCTTCGAGCTGTAGGTCCAGCCCCCCT
ATTAGACCTTGGAAGCCAGTGTTTTCAAAATGCCAAAGAATAAAAAGTCTAAATTTCCTCCTGGGCTGTGGAGGGATCGCTCTAAGGCTCCTGG
GAGGAAACTTGGTGATAAGCCTGCACTTTGAAAGGGCTCTGTCCCTTTAATGTCTGTGCCTTGACAGCTTTCTGTTAGGAAGCAGTTCCTTCCA
ACAGCTGTCTTCTTGGCTGAAAACCAAAACACTGGCTTAAAGGGACCTACCGGCTGGAGCAGCCTAACATTTCAGCCTTAGAAGAAGAAACCTC
ACAATTGTTCCGCTTTCCGGTCCTCCCTAGATTAAGCAGACGATGTGTTTTGGTTTTCGTGCTTGCTTTTATTTTCTTCTTTTAAGCCATAATT
TTCTCTCCTAGCCTGGCAGTAAACGAAGTCAGAATGAATACACATAGGACGATACAGGCTTTTTTTTTTTTTTTTCTCGTGCACCGCCCCCTTT
GGGACTCTGAGCTACTGTGGATTAGAGCTTTATAATTGAGATCTGATCTCTGCCTAGATGAAAAACTGCTTACTCCGTACAACGCATGTTCGCA
CCAGGAAAGGTTGTTGTCGTAGTGAATGAGATTGTCCTAGAGTTTTAAGGATGGCAGAATCAAACCCAGCCATGGGTTTTACCAAAGGAGGAGC
CTCCGGTCTGAAGGGCGGCTGTGGAAGTGTGTATAAGTAAATCCATGGGGCAGACTGGCTGGTGATTATGCTAAAAGCCCCTATTACCGAGCAT
CTGTCGCCAAGTCTACATAGTGTCTGCCAAACTCAAACACTGTGGTTATTACCCCCATTGAATAGCTGAGGACACTGAAGAGTTTTTCCAGGAT
CATGCCGACAACGGCTCGTTCTGACTCCAGTTGGGTTCCTCGAGTTTCTGCCACATCCTCAAGTTTGTCACCAGGGGTTGAATCCTGGGCCCTT
CCACATCAGACAAGTGCCCTGCTGGCCCCACACCACCCAGGGAAGGAAAGGGGTGGGGCGTACCTCTTGTCCGCGTTGTGATCAGCAAACCTAG
CTGACTTAAATAACAAGTGTATGTTAATCGCACAATTAACCAGAAACTATTTTTCCCCTCAGATGATGAGGATGACGAGGAGGAAGATGAAGAG
GAGGAAATCGATGTGGTCACCGTAGAGAAGAGACGTTCCTCCTCTAACAACAAGGCGGTAACCACTTTCACGATCACTGTGCGTCCCAAGACCT
CCGCTCTGGGTCTGGGGCGAGCACAGCCTGGCGAGCTGATCCTCAAGCGCTGTGTTCCCATCCATCAGCAGCACAACTATGCTGCACCCTCACC
CTACGTGGAGAGCGAGGACGCGCCCCCGCAGAAAAAGATCAAGAGCGAGGCTTCTCCACGCCCCCTCAAAAGTGTTGTTCCAGCAAAAGCGAAG
AGCCTGAGCCCCCGAAACTCAGACTCGGAGGACAGCGAGCGCCGCCGCAACCACAACATCCTGGAGCGTCAGCGCCGGAACGACCTGCGCTCCA
GCTTCCTGACGCTCAGGGACCATGTGCCTGAGCTGGTGAAGAACGAGAAGGCCGCCAAGGTGGTCATCTTGAAAAAGGCCACCGAGTACGTGCA
CGCCCTACAGGCCAACGAGCACCAGCTCCTGCTGGAAAAGGAGAAACTGCAGGCGAGGCAGCAGCAGTTGCTAAAGAAGATCGAACACGCTCGG
ACTTGCTAAACGTTTCCCACACGGACAGTCACTGCCACTTTGCACATTTTGATTTTTTTTTTTTTTAAACAAACATTGTGTTGACATTAAGAAT
GTTGGTTTACTTTCAAATTGGTCCCCTGTCGAGTCTGGATCTGGGTAGGGGGCAGGACACGGGGTTCTGCCATGACCTTGGAAAAAAAACTGAC
TTATGGGATGCTGGGTGGCTTGTTTTCCTCCTCCATATCACCTGGTGACAGCCGTGGAAGTTCGGGACACTAAGGAGCTTCAGGAGGCTGTGAA
GTCACCTTGTTCCGGTCCAAGATTCCAAACAGAGTCATTCCTTCTTTTTACAATGGTGCTTAAGTTCCAGCAAATGCCACAGAAGGGGGGGGTT
GCCATTTGATGCCCCTGGGAACACTTGTGTAAATACCATTGATACACCCGCCTTTTGTATACGTCCTGGGTAATGAGAGGTGGCTCTTGCGGCC
AGTATTAGACTGGAAGTTCACACCTAAGTACTGTAAGAATACCTCAATGTTTGAGGGGCATGTTTTGTATACAAATATATTGTTAATCTGTTAT
GTACTGTACTAATTCCTACACGGCCTGTATACTTTAGTATGACGCTGATACATAACTAAATTTGATACTTATATTTTCGTATGAAAATGAGTTG
TGGAAGTTTTGAGTAGATATTACTTTATCACTTTTTGAACTAAGAAACTTTTGTAAAGAAATTTTACTATATATATATATTCCTTTTTTTCCTA
GCCTGTTTCTTCCTTGTTTACTGTATTTGTTCATGTTTGGTGCATAGAACTGGGTAAAATGGCAAAGTTCTGTGTTTAATTTCTTCAAAATGTA
TATATTTAGTGCTGCACCTTAGAGCACTTTGAAATACCTCATGTTTATGAAAATAAATAGCAATTAAATGATGCAAGGCGATGTTTTCCTTCCT
AGCTTGGCTGCAGTCTCTGCACACAGTCCATTCCTTACCCGGACTTTTAACATTGTGGAATCCTGGTTAGGGAGGGTACTTGTAGAGGGATAAA
TGGGTTTGTGAATTCCACAGATTAGAACCAACTACTTTCAATAGGCAATCAATGGGTGTTAAAGCTCTTTCAAATATTTTGTTTTGGGTGTGAG
TGTGCCCACAATGTCACATCCCCTGCAACTGGAGTTCAAGTCTAGGAACAAGGCAGAGGCCCTGCGCAACAGTAACAAGTGACTCACCCCTGAG
CCATCTGTCACCCCTTCATTTTTGAGGCCTCTTTGGGTCTCTAGCTGGGATTATAGGTGTGTGCCCCCCATATCTAGTTACCAAAACACTTTCA
CATACTCGAACTCTCAAAGCATTTTAGATAGTGTAGATACCAGCCCAAAGTTTGGAATAAGCAGTAAAATTGGCAAGTTGTGCCGAAATTTACA
TAAACACTTGTCCTAGTTGTTTGGAAGGACTTGTTCCTGAAGATTCCCCCAGGAAGAGCTAGGTGTGGAAGCATATCTGATGCCTGCAGAGGTG
ACAAGAAAAATGTCACCTAGCCCTCTTAGCACAGCAAGCTTCTATATTGCAAGCCCAAGGCCGCAGAGTAACACTTAGTCCAAAAGAAATCTAG
GACCAGTATAATATTCTGGACTGAGCACTAGTGAAATAAGAGGATGGAGTCACTGTTCATCATTGATCTCGGTCACCAGCCTCAGCTCCAGTTC
CCAGAGTACTGAAGACCAAGAAGGGGAAGGAGAGCTGTCATTGGGTGGACTGTGGGGGTGCCTCAAGGAAGAATGAGCTACAGACCTTGGAGAA
GGCCAGAACTAAACATGAAGGAGGCTTCCCTCTATCTACTCAGGGAAAATTTTCTGGAAGTCTGAAGACCATCTACCTTACTTAAGAACAGGAC
TTCTATTTTTCTTTGGGGTAACAGACTACACACAGCATTTCCCTATGGTTTCATTCACTGCAGGTTTTTAACTTCAAGTTGAAAAAAAAAATGT
CTTCATGGAAAAATGCAGCCCAAGGGTCCAGACAGCTTTGCTTGTGTGGCTGTACTGTCAGGGACAGAGATCAGGCTGCGCAGGTGGTTGGCCA
GACAGGTAGAAGGTGAGCCATGGAGGTCCTTATTTGGGGTGACAGCTACAGATGCTGTCTTAACAGTTGCTGTTGGGTTGGTGGTACTGCCTGC
ATTCTCTGGTGATTTGACAAAGGTTGGAAAGTGGGCAAAATGCCCTTTACAAAATCCTATAACTCCCCAGTCCCAAACTAGCAAATAATAAGCC
ACTCTGAAGGTCCCATTCAAAAGAACTCATCTGTTGCATCTTGCAAGTCCTACGTAACAAGCCCATCACTGTATCAGTACATCTAGAAACCAAA
TGGAACTTAAAGATCTCAGGTTAATTGAGCACCTAAGAGTGTTGAAGCCTGCCGCAGTCAACTGAATTGCTCTGTTTCTCTTCTCCCAAAGGGG
ACCTGAAGTGTGACAGATGAGCTAGAATTCTACTGTGTAAGAAGAAATAGAACAGAGACCACTGAACTGAAATTTCTACCACATTCTTATTTTG
GTGACTACGGGGAAACTTGTAGATAATGCTCTCTTACATCTCCAGGACCCACTTCTGCCTCGAAAGCTCTGTTACTCTCTTGACATCAATCACA
TAACAACAACAAACTCTCTGCATTCGGTGGATCATAAATAAAAGAACATATATTGCTCTTCCAGTGGATCTGAGTTCAATTCCCAGCACCCAAG
TTAGGTGGCTAAGCTGCTTGTAACTAAGGCACCAGGGATTTGACATCTCTAGACTCCTGTGACTTACACTCGCATAGATACACACACACAATTT
AAATAAATACATTTAAAATAAATAAAAACACACTAAAAACTGTTAACACTTAGGTTAAGACACACTTTTGTTTCCTCATCTAGCTGGAGGAAAG
TGTTCCTACTGTAACTCTGCAGTTCTCTGTACAATAATTGGAAAAGAGAAGAATCCAAGCAGTTGTCTGAAAAACACAAGACTGAGATACTCAC
AGAAAGAAACTCTTTCTTAAAAGAGTAAACTGGCACTTCTGTGGAGTGTTCCACCATCTCTCAATCACTTCCTCTCACAGAATGCAGGTGGGGT
GTCCCTGGACTAACTTGGGGCACAGGACTGACATTGAGGCCTCGTGATCAGCCTGGTGGTATCTCGCAGGACTCCTGTAACCTATAGGCTGGCC
TCCACCTCAATATGTAGCTGAGGATGGTCTGAGCTCCTGGTCCTCCGACCTCCACATTCTGGATACTGGCTAACAAAGTGAGCCAATATACCTA
TGCATGTATTATGTAAGTGCTGGGGATAGAATCCAGGGTTTTGTGCATGATAAGCAAGCACTTCCTGAGCTATGTCACGTACCCTTGCTGATGG
AATTCCCTGGCTCTTTCCTCTCAACCAATGTTATTAACATAGGAACTAACATTTGTCAGGTGTTTCTGGTGCTTGGGAGAAATCAATGAAGAAC
AGCAACAACAACAAAAAAAAAACAAAATTGCCAACTGCACCCAATTCTTGTCTCCTTGTGGTTTATAATCTAGGAGACAATGGGAGTAAGAATA
TAAATAAGCAAAGCAAGCCAACAAATAGCACCAATGAGGTAGTGAGTAATTTATAAAAGAAGTGGACTGGTATAGAGGAATTCAAGATTGCCAC
CAGAGGGGATGGGGAGCCAGGCCAGTGCAGATGCACCTGGTCCTTGGACCTGTGGAGGAAAACGCAAGGTGACTGACAGGGCTGCTCAGCCACC
AGAGCAAGCTGCTCAGGTTCTCCATTTAGTCCGTCTCCCCTCCTCACACCCTGGACATGCGTGTTCCCTACTATGTCCTTTGCCTATCTGCTGA
AAGCGAAGCATCAAACTATGATGCAGCTGCAGTCTGATTCCCTGGGACTGAGTCCCACAGTTAACACAGTTCCTCATATTGTGGTGACCCCCAG
CCATAAAAGCATTTTTGTTGCTACTTCATAACTATGATTTTGCTACTGTTATGAATCGTAGTGTAAATATCTGATATGCAAGATATCTGATATG
AAACCCCAGTGAAAGGGCTGTTCAACCCCACAACTGTTTCCACCCACAGACTGAGAGTCTCTGCTACAGAGAAAGGTGTGTGTGTGTGGGGGGG
GGGGGGTTATTTGGTATCGACAGAATTGTTCCTTTGTTTCCTCTGTATTTTTCTAGGAAAAAAGGACTATTTAGAAAAATGAGCAGTAAAGCAA
ATATATAAGCCTGACCTCAATGAGAACTCTGCAGACTTTTGTTACCCCCAAAAGGCTTTATAAAACCTAAAAAACGGGCGCTTTGGAAAAGAGT
AAAGGTAAGCTCTGAAGCCTATTTTAAGACAGAGACAGATCCTAGGAACCTGAGTTCCACGGACCATCTATGCTTTCTACAATGGTTTATTAGT
TCTCCTTACTTGTAAAGGAAATCCCTTCATAGGCGACTGACCAAGGCCACCTGATCTCTCTTGATACTGACAGGTCATACTACAAGACATCCAT
CCTGAAACCTTTGACCAGAAGTAACAGAGCCTTGTTTATAGTGGAAGCATGGCGACTGGCTGGGACAGTGCATATTTGGGGAACACACACACAC
ACACACAGCCTAGGCTGCTTAGATGTGAAACGTAGGTGATTGGCGGGAGCATGTGTGCACTGAGCGGCAGCGTCCAGTGGACTTTCCTCTGCTA
TCTAGCAGGCCAGAGATTTTTTTCAGGCCTTAAGGGCTAACAGATCTTTTTTTAAGGATTATTTTTATTTTTATTCCTGTGTGTGTCTGTGTAC
CCAAATGTACCTTCAGATGCCAGAAGAAGGTATCAGATCTCCAGCAACTGAGTTAGAGGTAGTTGTGAGCCACTCAGTGTGGGGGTTGGGAATC
AAATCCAGGTCCCCAGGAAGAGCAACAAAGGCTCTTAACTGTTGAGCCCTCCATTTATGCCATAATCTTTTTAAGTTATTCATTCATTTATTCA
TTCGTCACTCAGTGGGGGGGGGGGGGGTGCATGCCACAGTGCATGTAGGTATAGAGGTCAGAGGGACAACCTGAGGGAGTCAGCTCTTTATTTC
CAGACCAGCTGGGCCTTAGGAGAGATCTTTGGCCATCAGGCTCAAGGGCAAGAGCCTGTTTTTTTTTTTTTTCGATGAGCCAACCATGTCAATG
GCCCCTGTTAGAGAATCTTTGAGAGGCAGGAAAGCAAGTAGAGGTCTTCTCTAAAGTTTTTCTGAAGTGAGAAAGAGAGTCAGAGATAGACACA
CACACACACACACACACACACACACACGGAGAGACAGAGAGACAGAGACAGAGATTCAATACTGAGAGTTGAACCCAGACTTTCACACATGCTG
GACAAGTGTTGACTACCACTTAGCTACACCCCAAGCTCTCCTTTTGCCTTGTATTTTGAGACAGGGTCTTACCAAGTTGTCAGGCTGGGCTTGC
ACTCCCTCTGTAGCTCAGATAGTCCTTGACCATGTTGTCCCCCTGTCTCAGGCCCTGTATAGCTGGGGTTGCAGACCTGACCCACCAGGTCTGT
GTATTTCGTGTGTCTTTGTTTTGTGTCTTAGGCTCCCTTTCATGAGATGATAGGACGAGGTGACACTGAGCGTTGCCTGGGAGACAGACTTTGT
GGGCCAGCAACCAGCCTTGANNNNNNNNNNNNNNNNNNNNACCTCCCTGTTGGCTGTGAATATGTTTCCACTGACACCTTTGGGAGGTGATTTC
TCCAGGAGTGCGACCTCACTTGGTAATTCGCCTGGGTAACAAAGGTACCAGGCCTGTCTGTCACTGTTGCCCAACTTCCCACTGACCCTCCGGA
GTGGAGGCTGCTGCTGCCCTGTACCCTCACCACCCCACCGTCAGGTGCATAGCTGCTGATTCTGGTTGAGCAACCCCAGAGTATTGTTTCTTGG
GTATTGTGATGAATCACAAAGCAAAACAAGGCTGGGGAAAGGAAGTAGTACTTAGTCCAAGTTCAAAGTAAGCTGCTTTCATTGGAGGCAGTGA
CTACAGAGAGCAGGCTAACTGAGGTAGAAAACACCAGACAGCGCTTGGATGACTTAACAGTTAAGAGCACAGACTGCTCTTGTAGAGGAGCCAA
GTATGGCTCCCAGCACACACACTCAAGGGGATGGCTCACGACTGCCTAAAACTTCAGTTCCAGGGGGCTGACGCCCTCTTCTGGCTTTCATAGG
CATCTACATTCAAGTGCACACACACACACACACTTAAAAATAAAATAGAACTCTTAAGCCAGGGCTACACAGAGAAACCCTGTCTCGAAAAACA
AAACAAAACAAAACAAAACAAAACAAATCTCTTTTACTGGTGTTCTTTTTCCTTCTATTATCCAGGGTGACTGACCAACCCATCTTGGCTTTCA
AACTAAAGGACCTGGATCCTAGGGAACATTGAGGTCCCCTTACTCTGCCCTGCCACTCCTCCCCCCCCCCCCCCCCGACAGTGTTTGCTTCTTC
ATTGTGCATCATAAATTGTACAGCCACCTTCTGCAGGTCAACCAACTCTGCCTTCTTTGAGGGTCAGCCAAATGATAGGGAAAGGAGTGATTGG
CCCACGCCAGGCCAGACTGGGAGGAACATGGACTTGGGGTTGGATAGCCCATAGATAAGAGATCTGGAAACCTTCCAAGGGTAATAAAAGGAGA
GAAATCTATTTTCCTTTTCAGAGACATTGAATGTGAAGCTGGTGGGTCTCACATAAATGTCAGGGACCAATTTAANNNNNNNNNNNNNNNNNNN
NTTAGGCTCCCTTTCATGAGATGATAGGACGAGGTGACACTGAGCGTTGCCTGGGAGACAGACTTTGTGGGCCAGCAACCAGCCTTGACTCCTC
TCGCTTGCTCACCTTCTTACTCTCCGGCCAGGAAAGTTTGTATCAGTTCCCCATCTGTGAGCAGAACAGGCTGGAGCTGGTGAGCTCAGAGACA
GGTGCAGCTTGCAGTCACTCATCCTGAGGAAGGGCTGCAGCCTTCAGCATCCCCACAAGATGCCAAGCACGGTGACACACGCTTTTAATCCCAG
CACTGAGAAGGGAAAGCCTAGCCTGGTCTACATAGCAAGTTTCAGGATAGCTAGGGCTACATATAGAGAACCTGTCTTAAAAATAAAAGATGAC
TAAAAGAGCTAGGGATGTAGATCAAGTGGTAATTTGTCTGGAGTGCAGCAAATATAAACGCCATATTGTGGTGCACTCAGGAAATCCTACATGT
AGGCAGAGGATCAGGCGTTCAAGGCCATCCTTGCCTACACAGCAAAATGAAGTCAGCCTGGACTATATATTTCAAAACAAAAACAAACAAAAAC
CAACTCAGATGTCGTCAGTGCTGGTAAACAGTGGCACTGTGGTTGGAAACTTGGGAACCTATCAGCTCTCTGCTGGTCACCTTCTCCAGAACTG
TCGTCATTCAGTGCATCCATCCCTCTGATGCACGCTGTCTTCCAGCCTAAAAGCGGGAGCTGGGGATGTTTTTCATCTGTGGAGTGTGGAAGCT
AGCTTGCAGGAGGGCCTGGGTTCAATCCCCAGTGTTGCAAATGTAAAATAAGAATCACAGCTGCAAGGTTCTTGCAAGGATCAAGTCATAAACC
ACTGGAGGGATGTGACAAACTTTGGAAACATGAGCGCCATCCATGAGGTCTTACTGCTGCCCGGACTCAGACCACACTTGAGCAGCCTCCCTCC
AGTCTACAGACTGCCATCTAGATTCGACCCTCAGGGTGTTTCCCCAGGCAACAAACTCCTTTCCTTGTGTAGCAGGCTTCCTCTGGTTGATCCC
TTGTACCTAGAATAGGGCTTTGCTTGGCAGTCTAGATGTTATTTTCATAGGGAAAACCTGGCTATTTTCTTCAAGCCAGCTAGAGCCATGATTC
CTGCAAACGAACTGGGTACTCTGGCTGGTCTCTGCTGAAACTAGAGAGAAGTATGATTAATCCATTGTTGAAATTGGTTACTCAAATGAAAACA
GAACATGGTAACAGACATTTCATACCTTGAGTCTTTGCTTGGGTTATGCTAGTCACTTCTTTTTGGCACAAAACAAGAAAGAACAAGGGCTTTA
AACCAAGAGTAGATACAAGTTTGCTCTTTTCTTTTTTCCAGAGCAACTGAGCTATAGTAAAGAAAAAGAAACCCCCCAAAGAGTGGGAAAGCAC
GAAGGAAAGAACACCCCAGGTTTAACTGCATGGGTTGAAAAAAAATTCTTTATCACCTGGCATGGTGGTGCATCTCTACATTCCCAGCACTCGG
AAGAAGCAGAGGATTGTTCAGACTGACTGGTCCAGGTACGGTCTAGGCCAGGTGGGGCTACTATATACTGAGACTTTGTCTCCAACAAAACAAA
ATAAGAAAGGAAATCTTTCCCACCCTGTGGTGGGTCCTACTTCTGAATTTTCTTTCTTTCTTTCTTTCTTTCTTTCTTTCTTTCTTTCTTTCTT
TCTTGCTTGCTTGCTTGCTTGCTTGCTTGCTTGCTTTCTTGCTTCCATCCTTCCATCCTTCCTTCCTTCCTGTCTNNNNNNNNNNNNNNNNNNN
NNNNNNNNNNNNNNNNNNNNNNNNNNNNNNNNNNNNNNNNNNNNNNNNNNNNNNNNNNNNNNNNNNNNNNNNNNNNNNNNNNNNNNNNNNNNNN
NNNNNNNNNNNNNNNNNNNNNNNNNNNNNNNNNNNNNNNNNNNNNNNNNNNNNNNNNNNNNNNNNNNNNNNNNNNNNNNNNNNNNNNNNNNNNN
NNNNNNNNNNNNNNNNNNNNNNNNNNNNNNNNNNNNNNNNNNNNNNNNNNNNNNNNNNNNNNNNNNNNNNNNNNNNNNNNNNNNNNNNNNNNNN
NNNNNNNNNNNNNNNNNNNNNNNNNTCCTTTTTTTTTTTTTTTTTTTAATTTGTTTTTTTTGACAAGGCCTTGCTATGTAGCCCCAACTAGCTT
AGTACTATGTAAACAAGGCTGGTTGGAACTCACAGCGATTGTTCTACATCAGCTTCCCAAAGGGCTGGAATTACAGGCATGAGCCACCACCTTC
TATTTTATTGCTCATGTTCTGCCCGCCTCCCTCCACCCTCCTTCTTTGGACAGGGTTTTTACTCAGCAGCCCTGGCTAGCTCAAAGAGACACAC
ATGTCTTTGCCTCCATGTTTTGGAATGAGAGGCTTATGGAGGCACACTCAGCCTTCTGCTAGCATCCTCTAGCTTCCTCTAGTCTCCTCCTTCT
TTCAGTCTTTGTACGCTGCCAAAAGAAACGGTTGTCCGATGAAAGAGCACAAAGCAAGCTGAAAGGAGGTGAGGGAAACACGTAAAATAAAATG
CTCCCCCAGTTCCTAGGGAAAATTGAGCCCTACTTAGTAAGAAAAGCTGCAGATTCAGGTACCTGGATGTGGGTCAGGACCTTGATGCTCTAGG
ATTATACCATCTCCCAGGAATCTTCCTGGGGCTTCCTGTGGTGGCTTTCCACGGTCTCAGGATGAGACCACCTGGGCATAAGCCAGTTGTGGGT
GGAGGGGCTGCATTCCTCAGAACTTGAAGATGGATCCCTTCACAAAAAGAAGAGGATGGAAGAAAGTAGACCTTCCAGGAGCCTTTAGCATGGG
TATTCACATGGATTTAACTTGGGGACAAACCTGCGGTTAACTTGGTTAGCAACTGCTTGTAAATGGGAGAATCCTTATTCCAGGGGCTGGTGCA
CATGGGGGAAAAAGACAGAGCAGTCCATGGCCTCCTGAAGGGAATGGTTCTATCATGTTAATGCTCTGCATCTTATTACAGTCAGGACAAAGGG
CCTGGAGTTTGGGACTGAGAGTTTGTTTTGGAGTCTTTTAATATGGAGATGACTCTCCCTAAGGGGAAGGAAGAGGACCCTGGAGTCAACCCAC
AAACTTGTCTTGGCATGGTGGTGGTGGGGTGTTGAGACTCACCACAGGTGCGGTGCCCCNNNNNNNNNNNNNNNNNNNNAAATGGAAACAAGGA
CTTTGGTGCTACTGATGTCTGTCTCTCTGCCTATCTCTTGGTGTT
MOUSE SEQUENCE - mRNA
GAATTCAGTGGGAGGTCCCGGTTTGGAAGAGGCTAGGGGTGTGAAAATGAGGGTGTTAAAGGTTTTTGTAAAGGTAATGGGTTTTATACATATG
TGAGCCCAATAAGAAAGGCCTTGGAAGGGTGGCTACCCTCATTCACGGCTACTCCATAGAACCTGCCGTAGTCCCCANTATGTAGGCATTCGGG
GATAGATGGGAAGACTTTCACACATGCTAATACACATTTTGACCTTGACTACACAGGCATTACACTATTACTTACTGGAGGTGAATGAGGGGTG
TATTTAATCCAGAGGGAAATGGAGACGCTCAACATAAATAAGCTTAAGGGTTTAAGGATAAATCCCACCCTACTGAGAATGTGTGTTGAAAAAG
GGCTTCACCTAGGGACCTAGGTTACTCTTGGAAAGTTTTGTGGGGCAAGAGCATTTATTTTTAGCCCCACATTTAGGAAACAGACCTTTTAGCA
TGCTTGCCTAGACAGAAGTGAGACGCTGTGGGATGGGGAGGGAGGGAAATGTGCCCACGGCTGTTGAGGAAAGAATACACGCACCCTGCTCTAG
TCTAAATAAGATGTCGCGCTCTCTCTGTTCACGCCACCTCGTAAGTGAGGCAAATGGGACACAAAGAGGCCAAATTAATGACGGCTTTCCTTGA
TGTCACCATCCGTAGAACTCGAGGTATACAGAGCAGTCAGTGATTTGGGCAAGGAAAGCAGCGGTCCGTAATTCAACCTTGGCTTCGGAAAGGC
TTTTGTTGGGAACGGTGGGCGCGACTTTAGGGGACGTCCCTCCACGCGTTTCACAATCCCTTCCGCGGTAGCAAGGATTCGCTAATTGTCTCGC
GGGGGTGGCCCCACTCGGGCTCCGAGGCTGGGCGGTGCGGCTCCGCTTTCTGCTTGGTCTCCGCGAGGTGTCGCCTTCGGCGAAGAAAGCGGTA
AGGCGCCACCCTCGTAGCCCGCACTTATTTATTTTCAAACAAGGGGGGCGCCCCTTCCTTTCAATTTGAAACTAGAAACCTCTGCGGTCTCGTT
TCTACGTGGGCGCGTCCTCGGCCTCCCATTTTGCACTCCTGTGTCGCCTTCCTTCGAGATCACACACGAACAGCCCCTCGACCAGGCCTTGTTC
CACTTTAGCCTAGAGCTCGTCCCCACACAACACACACTCGCGCGCAGTCCACGCAGGGACTGGGCCTAGAAACCTCTTTTCCCATTCCCAGAAC
ACACCCAGCGACCTTTGACCTTTAAAAAAAAAAAAACACGGAGTGCAGCGGGTGCAAGCCAGGGGGTCCAAAAGGGAGGGGGAAGCGCTCCTCG
GGTTTCCCAGCTTTGCTGCTTGCAGTCTGAAAAACGAGAGGGGGGAGGGGGAGAGAGGGAGGGACGGAGGGGGAGAGGAGAAGAGGGGAGGAGG
GAGGGGAGAGAGAGAGAGAGAGAGAGAGAGAGAGAGAGTCGGAAAAAAAAGAGAAAAGCAAATGGCTTTTGGCGCGAAAGGCTTTGGCGCCTCC
CCTGATTTTTATGGAAATCAAGAGGGCGGGGAAAAGCCTCTTGCCTCTGCCTTTCTCCCTCCCCCTCGTCTGCGCCACAGCCCCCTTCTCCCCC
GCCCCCCGGGTGTGTCAGATTTTTTCAGTTAATAATATCCCCCGAGCTTCAAAGCGCAGCCAGTGACAGTCATCTGTCTGGACGCGCTGGGTGG
ATGCGGGGGGCTCCTGGGAATAAGCGCGCACACACTGCAGCCGCCGGAGGACAACCCCCTCCCGCCGCCGCTCCCTCAGCCCACCCGGAGACCC
CAGCCCCGAGCCCCTCCGGATCCCCGGCAGTCTGCGGGAGGTAAGAAGCGGTACTTGCGAAGCCCGAGCGCCCGGGGAACGGCGGAGGCCCTGC
GGCTAGGCAAGCCCTTGGACGCGGCTCCGCACCCTGCACCCAAATATGCCGGGCTTTTCTGGGGGAGGGGGTAAGGGGGCAACACACCGCGTCT
GCTTCCGAAACAAAACCATCTGGGTTGGGTTTTTGTTTTTTTTTTCCTGAAAAGCCTATTCAGCACCCGAAGGCACCCTAGCTGGAAGAGACCC
GCCCTAATCCCTTTTACAGCCCTAGCCCAACAGAGAAATAGCTTTAGCGAAAAGAAATTCGCCCGGCTCCACAAGATTTGTCTGAGTGTGAGGT
GACTGGGAACCGGTGCGTCCCCACCCCAAGCTGGGGTTCTCCAAAAGGTGCCGCGGGGAAAGAAGGAAAAGGGGTTAGGCGAAGCTTAGGTAGG
TGCCTGAGTGATAATGTAGGTCACGGCTGCTCCGGCTTGAGAGACGCGANNNNNNNNNNNNNNNNNNNNTCTCCAAAGGTTGAGGTCTCTGAAG
GAAGGGGAATGGAAAGGGTATAGGTACAGGCAGTGATGAGTACCAAGGGTATCTGCCAAGACTGAGGCTCTAGGTCTAGGTGGAGAGGGTTGAT
AGTAATTGCCTGTTGTTGGTCTGACTGGAGAAAGGCCCTTAATAATTAATAAAATTTCCTGAACCCCGTTAGCGTTTGCGCTCCCGTGATCGCA
TTTCTGCAAAAGGGGAATGAAAGGTACTTCAATCCCATGCCTAGTAGCTGGGCTAGAGAGCAAGGACTTCCTTTAAGCAACTAGTGCAAGTGGG
GTAGTCGCGCTAGTAAGAGCTGAGATCTGCAGCTTGAATAGCCCCCCCTCCCCTAGGCAGTGCCTTGTGTGAATGAAACGGCAGTTTCCAAAGT
TGCAGAGAGCCACACCACCCCCTGCATCTGCAAGCCCCCTCCCACTCCCAGTCCTAGACAGCTTGTACACAAAAGGAGGGAGTAGGGGAGACGC
TCAACTTTCTCCCACCTTCCAGAGCTGTGGGGAGCTTGCAGAAGAGATTGGGGGCTCCCACTGCCTGTCCCCACCAACCCACCCCTTTGGCTCA
TTCTCTCTTGGTTTGCCTATTGGTTGTAGAGTTGGAGGTTGGCGCGACTCTGCTGCTCTCCACGGGGAGGAAGCACTCCCCCATATTAAAAAGA
GCGGAGATATTAAAAAGAGAGGCGAACCCATGCCCAGCTGCACCGCGTCCACCATGCCGGGGATGATCTGCAAGAACCCAGACCTCGAGTTTGA
CTCACTGCAGCCCTGCCTCCACCCGGACGAAGATGACTTCCACTTCGGCGGTCCCGACTCGACCCCACCGGGGGAGGACATCTGGAAGAAGTTT
GAGCTGCTGCCCACGCCCCCGTTGTCGCCCAGCCGCGCCTTCCCAGAGCACAGCCCGGAGCCTTCGAATTGGGCTACGGAGATGCTGCTGCCGG
AGGCCGACCTGTGGGGCAACCCGGCCGAGGAGGATGCGTTCGGTCTCGGGGGCCTGGGTGGCCTCACTCCTAATCCGGTCATCCTTCAGGACTG
CATGTGGAGCGGCTTCTCTGCCCGCGAGAAGCTAGAGCGCGCAGTGAACGAAAAACTACAGCACGGCCACGGGCCCCCGGGCGTCAGCTCAGCC
TGCTCGGCTCCCGGAGTGGGTGCCAGCAGCCCCGGGGGCCGTGCCCTTGGTGGGTCGTCGAGTGCTAGCCACACCGGGGCCACCCTGCCTACCG
ACCTCTCCCACCCGGCTGCCGAATGTGTGGACCCCGCCGTGGTCTTCCCCTTCCCGGTGAACAAGCGAGAGTCGGCGTCGGTGCCCGCTGCCCC
CACTAGCGCCCCGGCGACCAGCGCTGCGGTCACTAGTGTGTCTGTTCCAGCTACTGCCCCGGTGGCTGCTCCTGCTCGTGCAGGCGGCCGTCCT
GCCAGCAGTGGGGGGACCAAGGCCCTCAGCACCTCCGGAGAGGATACCTTGAGCGACTCAGGTAAAGCCTAGAGTAGAGTTCTTGCTAGCTCCT
TACGGACTGGGAAGGTGGGGGTGCTGCGTTCCCTTTGTTATCATAGATTTGTGCGGGTGATTCTCTTCAGTTCACCAGCCTCCCGGGACAGAAG
AGGCTGGAAACACCAGCTACACCTTCTCTTAAATTTGCCATCCCCTTTTTCGCGAATCCTTGCGGTAGGCATGCCCTCACTGTGGCAAAAGTTG
GTGGCCAGCTCAGTCAGTCTGTGGAGTCCAAAAAACTACCTGTACGGAAATCTGTTAGTCCGTTGGAAAGGAACCTTTAAGCCANGTCAAGGAA
GGGAAAAGACTCCCTGCAAGCGAGGGCTGCAGAATCCCACTTGCAAAAGTTAAGAGAATGCCTTGCAATTCCTCCCTCCCCTCCCCTTGGTTCA
GCAGCTGTCAGCAAGTGCATTAGTGGTTGTGTACGTTTTCAGAGAGCCTCTTTCCGGTTTTGATTGAGTACTAGTCCCGTTGTGTTTCCTAGCT
GGAATTTCTGACCTAATTGAGCTGAGTTGTGTTCCATAACCCATTGCCCTTGAAGGTCGAGGGCGGGTCCCTACCACTGCCGCTCCTAAGGAAT
GCACGCACCCTTAGGATTCATTGGTTCTATTGTAAGCCTTTATCTGCGCTGTCCTCGGAAGAAAGGGTTAAAAAGAAGAAGAAGAAAGCTTTTT
TTTTCCATGGCCATGGGGCTGTGAAAGTGCCTACCACACTTTACCCAAATCCAGTCTGCCCTTGTCCTTCGAGCTGTAGGTCCAGCCCCCCTAT
TAGACCTTGGAAGCCAGTGTTTTCAAAATGCCAAAGAATAAAAAGTCTAAATTTCCTCCTGGACTGTGGAGGGATCGCTCAAGGCTCCTNGGAG
GAAACTTGGTGATAAGCCTGCACTTTGAAAGGGCTCTGTCCCTTTAATGTCTGTGCCTTGACAGCTTTCTGTTAGGAAGCAGTTCCTTCCGGCA
GCTGTCTTCTTGGCTGAAAACCAAAACACTGGCTTAAAGGGACCTACCGGCTGGAGCAGCCTAACATTTCATTCAGCCTTAGAAGAAGAAACCT
CACAATTGTTCCGCTTTCCGGTCCTCCCTAGATTAAGCAGACGATGTGTTTTGGTTTTGCTGCTTGCTTTTATTTTCTTCTTTTAAGCCATAAT
TTTCTCTCCTAGCCTAGCAGTAAACGAAGTCAGAATGAATACACATAGGACGATACAGGCTTTTTTTTTTTTTTTTCTCGTGCACCGCCCCCTT
TGGGACTCTGAGCTACTGTGGATTAGAGCTTTGTGGTTGAGATCTGGTCTCTGCCTAGATGAAAACTGCTTACTCCGTACAACGCATGTTCGCA
CGAGGAAAGGTTGTTGTCGTAGTGAATGAGATTGTCCTAGAGTTTTAAGGATGGCAGAATCAAACCCAGCCATGGGTTTTACCAAAGGAGGACC
TCCGGTCTGAAGGGCGGCTGTGGAAGTGTGTATAAGTAAATCCATGGGGCAGACTGGCTGGTGATTATGCTAAAAGCCCCTATTACCGAGCATC
TGTCGCCAAGTCTACATAGTGTCTGCCAAACTCAAACACTGTGGTTATTACCCCCATTTAATAGCTGAGGACACTGAAGAGTTTTTCCAGGATC
ATCCGACAACGGCTCGTTCTGACTCCAGTTGGGTTCCTCGATCGAGTTTCTGCCACATCCTCAAGTTTGTCACCAGGGGTTGAATCCTGGGCCC
TTCCACATCAGACAAGTGCCCTGCTGGCCCCACACCACCCAGGGAAGGAAAGGGGTGGGGCGTACCTCTTGTCCGCGTTGTGATCAGCAAACCT
AGCTGACTTAAATAACAAGTGTATGTTAATCGCACAATTAACCAGAAACTATTTTTCCCCTCAGATGATGAGGATGACGAGGAGGAAGATGAAG
AGGAGGAAATCGATGTGGTCACCGTAGAGAAGAGACGTTCCTCCTCTAACAACAAGGCTGTAACCACTTTCACGATCACTGTGCGTCCCAAGAC
CTCCGCTCTGGGTCTGGGGCGAGCACAGCTTGGCGAGCTGATCCTCAAGCGCTGTGTTCCCATCCATCAGCAGCACAACTATGCTGCACCCTCA
CCCTACGTGGAGAGCGAGGACGCGCCCCCGCAGAAAAAGATCAAGAGCGAGGCTTCTCCACGCCCCCTCAAAAGTGTTGTTCCAGCAAAAGCGA
AGAGCCTGAGCCCCCGAAACTCAGACTCGGAGGACAGCGAGCGCCGCCGCAACCACAACATCCTGGAGCGTCAGCGCCGGAACGACCTGCGCTC
CAGCTTCCTGACGCTCAGGGACCATGTGCCTGAGCTGGTGAAGAACGAGAAGGCCGCCAAGGTGGTCATCTTGAAAAAGGCCACCGAGTACGTG
CACGCCCTACAGGCCAACGAGCACCAGCTCCTGCTGGAAAAGGAGAAACTGCAGGCGAGGCAGCAGCAGTTGCTAAAGAAGATCGAACACGCTC
GGACTTGCTAAACGTTTCCCACACGGACAGTCACTGCCACTTTGCACATTTTGATTTTTTTTTTTTTAAACAAACATTGTGTTGACATTAAGAA
TGTTGGTTTACTTTCAAATTGGTCCCCTGTCGAGTCTGGATCTGGGTAGGGGGCAGGACACGGGGTTCTGCCATGACCTTGGAAAAAAAACTGA
CTCACGGGATGCTGGGTGGCTTGTTTTCCTCCTCCATATCACCTGGTGACAGCCGTGGAAGTTCGGGACACTAAGGAGCTTCAGGAGGCTGTGA
AGTCACCTTGTTCCGGTCCAAGATTCCAAACAGAGTCATTCCTTCTTTTTACAATGGTGCTTAAGTTCCAGCAAATGCCACAGAAGGGGGGGTT
GCCATTTGATGCCCTTGGGAACACTTGTGAAATACCATTGATACACCCGCCTTTGTATACGTCTGGGGTAATGAGAGGTGGCTCTTGCGGCCAG
TATTAGACTGGAGTTCACACCTAAGTACTGTAAGAATACCTCAATGTTTGAGGGGGATGTTTTGTATACAAAATATATTGTTAATCTGTTATGT
ACTGTACTAATTCCTCACGGCCTGTATACTTTTGTATGCGCTGATACATAACTAAATTTGATACTTATATTTTCGTATGAAATTGAGTTGTGGA
AGTTTTGAGGTAGATATTACTTTACACTTTTTAACTATAAACTTTTGTAATAAATTTTACTATATATATATATTCCTTTTTTTCCTAGCCTGTT
TCTTCCTTGTTTACTGTATTTGTTCATGTTTGGTGACATTAACTGTGTAAAATGTCAAAGTTCTGTGTTTAATTTCTTCAAAATGTATATATTT
AGTGCTGCACCTTATGAGCACTTTGAATACCTCATGTTTATAAAATAAATAGCAATTAAATAATGCAAGGTTGATGTTTTCCTTCCTAGTTTGG
CTGCAGTCTCTGCACACAGTCCATTCCTTACCCGGACTTTTAACATTGTGGAATCCTAGTTGGTGAGGGTACTTGTGGAAGGATAGATGGGTTT
GTGAATTC
MOUSE SEQUENCE - CODING
ATGCCCAGCTGCACCGCGTCCACCATGCCGGGGATGATCTGCAAGAACCCAGACCTCGAGTTTGACTCACTGCAGCCCTGCTTCTACCCGGACG
AAGATGACTTCTACTTCGGCGGTCCCGACTCGACCCCACCGGGGGAGGACATCTGGAAGAAGTTTGAGCTGCTGCCCACGCCCCCGTTGTCGCC
CAGCCGCGCCTTCCCAGAGCACAGCCCGGAGCCTTCGAATTGGGCTACGGAGATGCTGCTGCCGGAGGCCGACCTGTGGGGCAACCCGGCCGAG
GAGGATGCGTTCGGTCTCGGGGGCCTGGGTGGCCTCACTCCTAATCCGGTCATCCTTCAGGACTGCATGTGGAGCGGCTTCTCTGCCCGTGAGA
AGCTAGAGCGCGCAGTGAACGAAAAACTACAGCACGGCCACGGGCCCCCGGGCGTCAGCTCAGCCTGCTCGGCTCCCGGAGTGGGTGCCAGCAG
CCCCGGGGGCCGTGCCCTTGGTGGGTCGTCGAGTGCTAGCCACACCGGGGCCACCCTGCCTACCGACCTCTCCCACCCGGCTGCCGAATGTGTG
GACCCCGCCGTGGTCTTCCCCTTCCCGGTGAACAAGCGAGAGTCGGCGTCGGTGCCCGCTGCCCCCACTAGCGCCCCGGCGACCAGCGCTGCGG
TCACTAGTGTGTCTGTTCCAGCTACTGCCCCGGTGGCTGCTCCTGCTCGTGCAGGCGGCCGTCCTGCCAGCAGTGGGGAGGCCAAGGCCCTCAG
CACCTCCGGAGAGGATACCTTGAGCGACTCAGATGATGAGGATGACGAGGAGGAAGATGAAGAGGAGGAAATCGATGTGGTCACCGTAGAGAAG
AGACGTTCCTCCTCTAACAACAAGGCGGTAACCACTTTCACGATCACTGTGCGTCCCAAGACCTCCGCTCTGGGTCTGGGGCGAGCACAGCCTG
GCGAGCTGATCCTCAAGCGCTGTGTTCCCATCCATCAGCAGCACAACTATGCTGCACCCTCACCCTACGTGGAGAGCGAGGACGCGCCCCCGCA
GAAAAAGATCAAGAGCGAGGCTTCTCCACGCCCCCTCAAAAGTGTTGTTCCAGCAAAAGCGAAGAGCCTGAGCCCCCGAAACTCAGACTCGGAG
GACAGCGAGCGCCGCCGCAACCACAACATCCTGGAGCGTGAGCGCCGGAACGACCTGCGCTCCAGCTTCCTGACGCTCAGGGACCATGTGCCTG
AGCTGGTGAAGAACGAGAAGGCCGCCAAGGTGGTCATCTTGAAAAAGGCCACCGAGTACGTGCACGCCCTACAGGCCAACGAGCACCAGCTCCT
GCTGGAAAAGGAGAAACTGCAGGCGAGGCAGCAGCAGTTGCTAAAGAAGATCGAACACGCTCGGACTTGCTAA
HUMAN SEQUENCE - GENOMIC
TACAGATATCTTTCCCTTATGGAATAAAAGCAGGGATAGGGCTCATTATTCCGATATTATGAACCAGGAGAAGTTAATGGACCGATCTAAAATT
CCTCAAGAAGTAAGACACAATTCTAAGCTTGAAGAACTCCAGTCCTCTCCCCGGGTGACCCTGTGTTCTTACTAGGACTACCTTATACTACCTT
GACTCTGCAGTACCTTCTTTCAAGCCTAAAGTTACTTGATTACGGACAAGCCATGAAGAGTAAAGGGGTGTGGCCCAGAGAGATTTCCAGTTGA
AGAAAGAATGATTCAACAGTCCCATTAAAACAAAGAGACATTTTCTGCAGGCTCCCCCAGGACACACATGCTATGGTCTATTGCTGCGGGGTAC
ATGGAGCCCCTGCAGGAGGGCTGGGACTAGAAGGAAGGGAGGGAACGTTTACTGGACATCCATTATAAGCCAGATGGCTACTTTGTGTAATCCT
CACATGATACTAAAAGAAAGATGAAAAAATGGCCGGGTGTGGTGGCTCATGCCTGTCATCTCAGCACTTTGGGAGGCCGAGGCGGATGGATCAC
TTGAGGCCAGGAGTTTGAGACCAGCCAAGCCAACATGGTGAAGCCCCTTTTCTACTAAAAATACAAAAAAAAAAATTAGCTGGGCACGGTGGCT
CGAGCCTGTAATCCCAGCTACTTACGATGCTAAGGCACAAGAATCGCTTGAACCCGGTAGGCGGGGGTTGCAGTGAGCCGAGATGGTGCCACTG
CACTCCAGCCTGGGCAACAGAGTGAGATTCTCTCAAAAAAAAGAAAAAAAAGAAAGAAAGCAAGAAAGATGGAGAAATAAAGCCTCAGAAAAGT
TGGACTATCCAACATAGCAGAACTCGCTGTCATGTCTGGTGTCAGAGCTGTTCTTTCCAGCATTCGCTGCACCAGATGCTGTAGAAGATGGAAA
GGCAACATGGGAAAGGGTGCTGCACTCAGGAACTGCTCATCCTGTTAGGGGAGTCGCACACACACACAGGAATCTGATAAAGAACCCCCATGGC
CGGGCACGGTGACTCACACCTGTAATCCCAGCTCTTTGAGAGGCCGAGGCGTGAGGTCGCCTGAGGTCAGGAGTTCGAGACAAGCCTGTCCAAC
ATGGAGAAAGCTAAAAATACAAAAATTAGCCGGGCGTGGTGGCACGCACCTGTATTCCCAGCTACTCAGGAGGCTGAGGCACGAGAATCGCTTG
AACCTGGGAGGAGGAGGTTGCAGTGAGCAGAGACTGCACCACTGCACTGCAGCCTGGGAGACAAGAGTTAAAAATAATAATAAAAATTAAAAAA
GAACCCCCTTGTTGGCGGCAAGCAGTATAAGATTAATGGAGATTTGGGGCAGAGAATGGGTAGGGTTAGGGGAAGGGAGGACGAGATTCCTTCC
AGGACAGTCTCCAGCTGAACTTTGAGGAAAGAATTTGAATAAGCAGAAATGAAAGGAAAAGCCTTTCTAGGCCAGAAGTAGCAGCTTCTGGAAA
TGAGCAGATAGAATCACTGATATTTATCAGTGATTGTTATCTGAGTCCAAGGAAACTGAAAGGGCCAGCAGGCAGATTCTAGCAATTCCACTCA
GATATTGAGGTAGCTCGGGCCGTCCATGGGGCTACAGGAATGTATCCAGCATTATAGGAAAATGAAATTAGCAAGAATCAGTGGGTGAGATCAG
CCATCTACTAAGTAATCACCTGAGGAGAAGATCTGAAAACTTCAGCACAGCGCGAGGTGATCTGGACACATCCAAAGCACGTCATTGTGTCTGG
AAAGTAATCCCAGAAAAAGGAGACCCCTGTCCTTCGTAGAGAGCCTGCCTGTTTCAAGGGGCAGCGCCAAATGGACTCAAAGGCCAGATCTGGC
ATCAGAATTCCTTGTAGCCCTTACAGATTCCTACTAAGATGAGGATCCCCTAATTGTGAGCCATTCCAGTGCACTGACAAATTCAAGTTTGAGG
CCCACAAGGGGAAACCTATTTCTCCCCAAACCCCATACCTGTGGAGCCTGGCCCTGAGCAGCTGCCTCCAGGGACATCTTTCCCATTTTGACTT
TTAGCATAAGGAAACTAAGGGAAATGAGAATTCCAACTCCACAGCAGCAGTATCACCGTCCATTCCCCGTAGCTCTTCATGGTTTGCAGTGCAT
TTTGACTCACTCCATCTTAGCCCTCTCTCAAGTCTACGTAATGCATGAAGCTGGAGGGAAGTCTTCACAGTGGAAGGGGTCTTTGAGCTGCCTC
CAAGGATGCAAAACTAGTCTCTGAGGGCAGTCCAGGGTCTGCTGGACACTTCGATTTTCTAAATCAGTAATCAAATTACTGGCATTAAATGAAG
ATAATTTTTGTTTTAAACCTAATTATGCTATTACAAATAAAACTTCCCACCTCCAAAACTCTCTCAGTGGTGGATCTCAAACTCTCCTCCAGCC
TCAGATGTCAAAAAACTATGCATTTTGCCTTGGGCACATCCAACATCATATACGTTGAATGGCTTTGATGGGCATGATTCTAATCTTAATTAAA
GCAGTGCCCGTTTTGGTCCATCTTGGTCTCTTTGAACCCACTCTCAGCTGACTCAGTTCAATAGCAGTTTGGTGGGAAAAATGCCAACTGGCCT
GGGAAACAAAGGAGAAATTTGGGGGTGACTTTAGGCTTCACAAAAGGGTCCCTTACATCACTTGAAATGATTAACTTTACTGAAAAGTAACAAA
ATTATTTTTGAAAAATAACAAAAACAAAGAAATTAAATTTGTTCATAACCCCATTGCTTTAAAAAAAAAAAAAAAGTTATAGGCCAGGCACAGT
GGCTCACGCCTGTAATCCTAGCACTTTGGGAGGCGGAGGTGGGTGGATCACTTGAGGTCAGGGGCTCGAAACCAGCCTGGCCAACACGGTGAAA
CCCTGTCTCTACTAAAAATACAAAAGTTAGCCTGGTGTGGTGGCATGTGCCTGTAATTCCAGCTACCAGGGAGGCTGAGGCAGGAGAATCACTT
GAACCAGGGAGGTGGAGGCTGCAGTGAGCCGAGACCGTGCCATTGCACTCCAGCCCGGGCAATAAGGCGAGACCCCATCTCAAAAAAAAAAAAA
AAAATTAATTAGGCATAGTGGCGGGTGCCTATAATCTCAGCTACTGGGGAGGCTGAGGCACAAGAATCACTTGAACCCGGGAGGCAGAGGTTGC
AGTGAGCCGGGATCACGCCACTGCACTCCAGCCTGGATGACAGAGCGAAACTGTCTCAAAAAAAATAAAATAAATAAATAAAAGTTATATCAAG
AAGAAAGTTTCTCCCTCCACCTGACTGATTGTCTTCTTCAAAGTAAACCCCTGTTAGCAACTTGGTGCACATTCTTCTCAATTTGTTACTGGGG
GGTTGATGCAGATATATCTAAGTACATATATATCCAAAATGCCAGACAGATTGACCTATACCTTGCTTATTTTCCTTCATGTTCAGGAACATTT
CCCGTCTGTAACTATAGACCTAACACATTATTTTTAGTGGGTGTATGTAATTCCACTGCATGGATGTATTACATACCATTCTCCTGTTTAATTT
GTTTTAGTTATGGATATTTAGATTGCTTATAGTATTTTTGTTATTGAGAATGATGCAGCCACACACATTCTTGTTTATATGCTTTTATGTGTTT
GTCTTATTATTTCTCGTAGGATGGATCATGAAGAGTGGAATTGCTTTTCCTCTTGGGGCAGGCACACCAACAGTGTATGTGAGGCCCCTGCTCC
CACTCCCCAGGCTGGCCAGTACTTTGGGCCAATCTGCTAGACCCAAAAATGTTAATCTCACTGAGATTTAATTTGCATTCCCCTGACTACCGGT
GAAGTTGAGCATCTTTTCATATGTTTATTGACAATTTGCATTTCTTATTCAGTAAATTACCTGCTCGTATCCTAGAGTCATATTTCTGTCTGCC
CCTTTTTTTCTATTCAATTTGTGGGAGCTCTTTGTATACCTGGGATCTAATCTTTGACTCATATATATGGCAAGTATTTTCTATTACTGTTGTC
AACTTTTTATCATAGTAAAATTCTTACATCCAGCACCCCCACCCCTCCCCTGCCCTTTTTTTTTTTTTTTTGCATTTGGGTTAGGCAGAGAGCT
AGCTTTACTGTTTTCCAAATGAAGTCAATCGATCCCAAGGATTTTTAAATTATTTAATCAGTAAAAATGTACACATTTTGAGGGAGGTGTGAAG
ATCCTAGGAGAAACTGTGCTCTTGTCCCTGAAGACAGACTCAGTAGATCTTTTTTTTTTTTCTTTTGAGACAAGGTCTCACTCTGTCATCCAGG
CTGGAGTGCAGTGGTGTGATGATGGCACACTGCAGCCTTGATCTCCCTGGGCTCAGGTGATCTTCCTGCCTCAGCCTCCCAAGTAGCTGGGACC
ACAGGCACGCACCCACCACGCCCAGCTAATTTTTATATTTTTTGTAGAGACAGGGTTTCACCATGTTGCCCAGGCCGGTCTCAAAATCCTGGGC
TCAAGCCATCTGCCCTCCTCAGACTCTTGAAGTGCCAGGATTACAGGCGTGAGCCACCATGCCTGGCCAACCCAGCAGATCTTTAATTCACAAT
CTGGAAAAACCATCTAGAGGCTGTTGCTCTCCTAGCCAGTCATGATTTGGGCCCTTCTCAACATGTGTATGTGTGTGTTGTTTCTTTGTGTGTG
TGTGTCTTAGTAAAGAGGAGATTTGTAAACTAAAATATTCTCCTCTCTCAAAAATCACCTTAATTATAAACCAAATGCTGTGTATAACTCTATC
CTAGCAGTTGGTGATTAGATTGAGGCATCCATTTCAGATGTGGGTCTCCTTCCCTGGTCCACAGTGAGCTCCTTGCGGCTGTACCTTAACTTAC
CTCTGTTCCAAACCCACCCAGGGGCTCAGACACAGTAATAGATGGGTACTTGTCTCAGTTCATTTTGTGTTGCTATAACCTAATAGCACAGACT
GGCTAACTTATAAAGAAAAGAAATGTATTTCTCATGTTTCTGGAGGCTGAGAAGTCCAATATCAAGGTGCCAGCAATTGCTGAGGGCCTTCATG
GTGTACCATCCCCTGGCAGGAAAAAGGAAGAGAGGGCAAGAGATCAAACTCCTAGCCTCAAGCCCTTTTATAATTAGCATTAATCCATTCACAA
GAGTGGAGCCCTCATGACCTAAACACCTCACATTAGGTCCTGAGACAGGAATAATATAAGGTGGCTGCAGAATAATAGAAGATTTTGGGCAGCA
ATTTCACATGACTAGCAAAAGGAAACTGTTGAAATGGCTGCAGAGGCCATGGGCTAAGACCGTGAAAAACAGAGTGTAGACCAAGCTGGCTAAG
ACCCACTGAACCCAGCATGGCACTGGATTTGACCTAGGTTTCTCCTAGGACCTCATTATACGCTCATTAACATACTAAATCACACACCCCACTA
GCATCATGACACTTCCGAGAACACCCATATTTGGTTTAAAAATAGGTGGTGTCACAGTTCTGAGAAATCTCCTCCTTTTTCTAGGAATGATCAT
GAATATTCCGCCTCTTGGTTAAAGAAACCCGTAAAGGTAGCAACCCCAAACCCCCTTTCGTGTGAGTCTCTCGAGTACACCCATATTCCCTTTT
CTTGAGTGTGTACTTTTCCCTTTGCAATAAATCGTACTTTCACTATTTTCCAACTGGTCTTTGAATTCATTCTCTTGATGGTGTCAAGAGCCTG
GACACTGGCTGGGGTCTAGGTCCCACTGGCATTTGGGGACCTCCCCTCCAACACTGTTGCACTGGGGGTTAAACTTCCAACGTGTTTTTTTTTG
GAGGACACATTCAAACCATGGCAGTACTGAACAAAACCTTGGCTTTGAAACCATATGAAGATTTGTTTTGTGTGTGTTCACATAGTTGAAGTAT
TTCAACATTTTTAAGAGGGATTTTCAGGCTTCTCTATAAGCAGACTAAGAATCAGCATTAGCATGTTTTCTCCATGTACAAAGTCTTTTATCTT
TCTACTTACAAATGAAGGTAACCAATAAATATTTGTTGAATTTTATCATTCTGTTAACCTTCAGATTCAGACTTGTCAGTAATTACTGGCTTGC
ATTAAAAGCAGGAGATTAGAGATTGAGGTCCAGGAAGTATAAATGATTTGCTCAAAGGCATGTAGAGTAACCAGGTCTCCTGTCCCTCTGTCCC
CCTTTTCTGCTACACCTTGTCCCTCGACAAAGGGTGAATGACCTAGTGATGGTCATTCATCTGAGGAGAAAGGACAAAGGTAGGACTTTGAATC
GGAGCAACTGAACCCATCCTGGCCTATTTTCACAGTCTTGCCACAGAAGATCTGGCCACCTTAGAAGGACTCATTCAGTGATCTTGGTCTTGAA
TAATACCATGAGTACTTACTATATACAGGTACACTGCTGTGCCGTAAGGATTCCCTCTGGAGCAAAACTGACCCAGGTCACAGGTTAGTGAGGG
AGACTGAGCCTGTCTTCCACAGTGTCACGGAAGTGAGCACTAAACAAATACTCCCAGGCATGGATCATTACAAATGGAGGTGAGTGCTGGACAG
GAAAGGACAGGATGCTAGGCGAGAATTCAGCAGGAGGGCTTGGTGGCGATTAGGGGGCTAGGGAAAAGCAGAAGTGGGGCTGTAAAAGGCTTTT
GCAAAGATGAAGGCTTTTACATTTGTGAGGGAAATAACAATAATAAAGGTGCTTGGAAGGGCTGCTCATCCGCATTCATGGGCCTCTTCCTAGA
ACTCTGGGAATCTTTCTCCCTAGAGCTCTGTAGGCGTCCAGGGTCAGGGCTGGAAAGGCCTTCACAAATGCTAATCTGTGAGCATTTTATGGGT
TGCCCCCTGACCCTCAGCATCCTCCTCCTTAACTAGATCCAATGGTGAGGTGAAGAGGTGGGGGCGATGGAGAATGGCATTTCCAGTTTGGAGA
AAAAAGTAGGGAGAGGCGGGGAAGCCTTCCCACCCCAATCCCAGGGCCAGGTTCCCCTCTCTCCAAACAAGCCTAAGGAATGTTTTTCAAGGCA
AAATCCCACCTCACTGTGTATTTGGTTGTGAAGGGGGCTGTCCAGGAGATCAGGGTTGTTTTTGGAGAGTTTGGAGGGCAGGGGCAATAATGTC
TGACCCCCTGCAAACAAATACACCTGTAAGAAAAGCTAGACCAGAGTGAAGTAAAGCCAGGATTTGATGGTGGCGGGAAGGGAAGGGGCCAATG
CTGCTGCTGGACAGAGGGGTGTTATTTTCCCCAGAAGAATAGCATGTCGTGGTCATCATCATAATAATAGCTGACACAACTATTATGGGCTGGG
GACTTATAAGAGCTTTCATAACTCTCAGGTAGGAGGCACTACGAACTCCATTTCACAATTGAGGAAACTGAGGCACAAAGAAACGAAGTAGTGA
CAGCAGCTTTCCTTTTTCCCTTCAACAGTTTGGAATCAAGCTGTTTGAGCCGAGGCTGGGTCTCAGGAGGTGTGGACAGCACTTCCATCTCGGT
AAATCAGATTCGCCTGCCCATAATTGGGGAGAATGGTGGCTTTGAAAAGGTTAACTTGGGAGCCCTGGGGACGGCTGCAGGGAACGTACGCCCA
TTCCCCCTAGGAAGCAGAGCCAGGCCGCCTCCTCCTCCGCAGTGGTGAGGACGCGTGGACAGTCCCGCGGGGGCGGCGGGAGACCTGCGGAGTG
GCCGCACTCCAGGTCCGCGCCAAGGCCGGGCAGCTCCGCTTTCTGCTCAGTCTCCGCGAGGTGTCGCCTTCGGCCGAAGAAACCACCGCGGCGC
CACCCTCGTAGCTCGCACTTATTTATTTATTTATTTTCAAACAAGGGGGGCGCCCCTCTTCTTTCAATTTGAAACTGGAAACATCCAGAGGTCT
TGTTCCTAAGGGGGCGCGTCCTCTCCCTGCTATTTTGCACCTTCGGACTAGCCTTCTTTCGTAATTACACAGGAGCAACCTCCCTGCAAGGCCT
TGCTCAACGTTGGCCTCGCGCTCAGCTGCACAACACGCAGTCAAAGCGGGGGCTGGGTTAGAAGCATCGGTCTCCCCTCCCCAACACACACCCC
CGGAGCCCTCCGTAATTTTTTTTTCTTTTAATGACAAGCAATTGCCAGGCTCGCAGGGTGGGTGCTGCATTGCACCGCTCCGCGCGCAGCTGGT
TCTCAGAGTGCAGCCGGTGCAAGCCCGGGGGTCCAAAAGGGCGGGAGGAGCACACCCTGGGCTTCCCAGCTTTGCAGCCTTCTCTCTGCAAAGA
AAAGCAAGTGGCTTTTGGCGCGAAAGCCTTGGCGCCTCCCCTGATTTTTATGGAAATCAGGAGGGCGGGGTAAAGCCGCTTTCCTCTCCTTTCT
CCCTCCCCCTTGTCTGCGCCACAGCCCCCTTCTCTCCCCGCCCCCCGGGTGTGTCAGATTTTTCAGTTAATAATATCCCCCGAGCTTCAAAGCG
CAGGCTGTGACAGTCATCTGTCTGGACGCGCTGGGTGGATGCGGGGGGCTCCTGGGAACTGTGTTGGAGCCGAGCAAGCGCTAGCCAGGCGCAA
GCGCGCACAGACTGTAGCCATCCGAGGACACCCCCGCCCCCCCGGCCCACCCGGAGACACCCGCGCAGAATCGCCTCCGGATCCCCTGCAGTCG
GCGGGAGGTAAGGAGCAGGGCTTGCAAACCGCCCGGCGCCCAGGGAAGCGACGAGCGCCGGGGCAAGGCAAGCCCTGGACGGGATTGCGACGTG
CGCACCGGGCGCCCTAATATGCCCGGGGGACTGTTTCTGCTTCCGAAACAAAACCATCTCTGGGTTTTCCCAGAAAAGCCAGTTCCAGCCCCGA
AGGCATCCTGGCTAGAGGAGACCCGCCCTAATCCTTTTGCAGCCCTTACCGGGGGGAGTAATGGCTTCTGCGAAAAGAAATTCCCTCGGCTCTA
GAAGATCTGTCTGTGTTTGAGCTGTCGGAGAGCCGGTGCGTCCCCACCCCAGGCTGGGGTTCTTCTCCAAAGGGTGCCCCTGGAGGAAGAAGAG
GGGGGGATTAGGCAGGGCGAGGCCGCCGCGGTCGCAATCTGGGTCACGGCTGCTCCAGCTTGGAGGAGAGGCGGCTCTCCCGGCGACCCTCCTC
GCGCGGGCGCCCCTGCCATTCCCGGGAACAGGGGCTCAGCCTCTCCCTCCCTGGAAGAGGACGTTGTCGTGGGTTTGGAAGAGCAGGGGTGGGC
TTAGAGAGCTTCCAATTAAGCTATTGGCAGGAGTATCCCTGCAGCGGGTGAATGCCGAGGGGCGTTTGCTCAAATTTGGGGAGGGGAAGGATTT
GTGGATATGGGTGTCTGTTGTTGGTCTCTGTCTAGAGAAAGGCTTTTTTTTATTTGCAAAGTTTTCTAAATCCCCTGCTATCATTTGCACTCCT
GAGGTTGCATTTTTACAAAGGGGGTAGAAGGTACTCCAAATACCATTCCCGGTAGCTGGGTCGGAGAGCCTGGGGCTTCCCCTGAGCAGCCGGC
CCCACACCGCTGCGAGTGCGGTTGTCTGCGTGCTCGTGAGAGCTAGAATTCTGCAGCCAGGAACAGCCCCCTCCCCCAGGCAGTGCCTTGTGTG
AATGAAATGGCAGTTTCCAAAGTTGCGGAGCCTCGCCACCACCCCCTGCATCTGCATGCCCCCTCCCACCCCCTGTCGTAGACAGCTTGTACAC
AAAAGGAGGGCGGGAGGGAGGGAGCGAGAGGCACAACTTCCTCCACCTTCGGGAGCAGTGGGCAGAGTGGGGGGCTTGGAGGGAAGATTGGGGA
ACCTGGTTAGAGGGGGCGCCCATTGCCTATCCCCTCGGTCTGCCCCGTTTGCCCACCCTCTCCGGTGTGTCTGTCGGTTGCAGTGTTGGAGGTC
GGCGCCGGCCCCCGCCTTCCGCGCCCCCCACGGGAAGGAAGCACCCCCGGTATTAAAACGAACGGGGCGGAAAGAAGCCCTCAGTCGCCGGCCG
GGAGGCGAGCCGATGCCGAGCTGCTCCACGTCCACCATGCCGGGCATGATCTGCAAGAACCCAGACCTCGAGTTTGACTCGCTACAGCCCTGCT
TCTACCCGGACGAAGATGACTTCTACTTCGGCGGCCCCGACTCGACCCCCCCGGGGGAGGACATCTGGAAGAAGTTTGAGCTGCTGCCCACGCC
CCCGCTGTCGCCCAGCCGTGGCTTCGCGGAGCACAGCTCCGAGCCCCCGAGCTGGGTCACGGAGATGCTGCTTGAGAACGAGCTGTGGGGCAGC
CCGGCCGAGGAGGACGCGTTCGGCCTGGGGGGACTGGGTGGCCTCACCCCCAACCCGGTCATCCTCCAGGACTGCATGTGGAGCGGCTTCTCCG
CCCGCGAGAAGCTGGAGCGCGCCGTGAGCGAGAAGCTGCAGCACGGCCGCGGGCCGCCAACCGCCGGTTCCACCGCCCAGTCCCCGGGAGCCGG
CGCCGCCAGCCCTGCGGGTCGCGGGCACGGCGGGGCTGCGGGAGCCGGCCGCGCCGGGGCCGCCCTGCCCGCCGAGCTCGCCCACCCGGCCGCC
GAGTGCGTGGATCCCGCCGTGGTCTTCCCCTTTCCCGTGAACAAGCGCGAGCCAGCGCCCGTGCCCGCAGCCCCGGCCAGTGCCCCGGCGGCGG
GCCCTGCGGTCGCCTCGGGGGCGGGTATTGCCGCCCCAGCCGGGGCCCCGGGGGTCGCCCCTCCGCGCCCAGGCGGCCGCCAGACCAGCGGCGG
CGACCACAAGGCCCTCAGTACCTCCGGAGAGGACACCCTGAGCGATTCAGGTAAAGACCGAACTCGGGTCCGGCTGCCTCCCTGGGGCACTGGA
CCCCGGGTCGCGTCCCCTTTGTTAGTGCTCGTATGTCTTGGCCTGGGGAGCATTTTGGAGGCAGTGCTAGGGGCAGAGAGGTCCTGTTTCCCCC
AAGTCTCTCCTCGGGGTAAAGAGAAGGGGCTGAGAGAATGCCGTTGCAAAAGGGGTGCTCTCCAATTCTCGCCTTCACTAAAGTTCCTTCCACC
CTCTCCTGGGGAGCCCTCCTCTAGGCCATCACGGGCCCTCACCCGGTCCCCCACCTCTCTTTTGCAGCGCAGTCTGAGGAATAAAATTGGAGAA
AGTTGGTGGCTAAACCGGGTGGGGGTTTAGGGGGTTGCTGGGTGCACTGCCTGGACAGAAACCTGTTAGCGCAGGGGTGAAAGGGACTCTCTGG
CCCAGGTCAGGGGAGGGAAAGACATCCCGAGAAGATTCAAGGGCTGTGCAAAGCCCTGTTTAAGGCGCAGGAACTTATAGGAGGGTTGCACAGA
TGGCTAGAGCCGATTTTCTATTCTTTTTCTTTTTCTTTTTTTTTTTTTTTCAAATGTCGGTACCTTTCCCTTCCCCCATCCTCGGTGGGTGGTG
GGCTATTTGCTCCTGGTGCGTGGCCAGCAGGCGGCGATATGCGAGGCCAGCAGGCGGGCCCGGGATCTGAAAGGCTGGGGGTGGTGGGGGCACC
CTCCCTCCCTCCATTCAGCAGCTGGCTGCAAGTGCAACAGCAGTTGTGTACATTCTCAGGGGGCCTCCTCTTTCCAGTGTGCAGTGGAAACTGG
CTGTAGTTTTGTCTTCCAGCCTGAATTCCAGGCCTAATTTGAGATGTGAGTTGTATCTGTAACCCAGTGCCCTTGAAGGTGAGGGCAGGCACTC
AGCAGCCTCTCCAGGAAGGCTCACATCCTGGGAGGACTCACTGATTAGTTCTATTGTGTTCATTTGTCTGTGTCTTAAGCTGAAGGGAAGAGTT
AAAACCAAGCCTTTCCCTGGGGGTCTGGATGAACAGAACTCAACCCAAAGAGTGGCATTGCCTTGTCCTTGGAGCAGGGAGCTGGGACCCCCCT
TGGACTTTGAAAACCAGTGTTTTCAGAATGCAGGTGGATAACAAGCCTAAATTTACTTCTGGGCTGAGGAGAGATCTTTGAGGCTCCTGGAAGG
AAACTTGGTGATAAGCCTCCAGTTTGAAACGGCTCTGTCCCTTTAATGTCTGTGCCTTGACAGCTTTTGGTGAGGAAGCACTTCCTTCCAACAG
CTGTCTTCTTGGCAGAAAACCAAAACATTGGCTTAAAGGGACCCACAGACTGGAACAGCCTCACATTTCGGCTTTAGAACAAATCCCACAATTG
TTCAGCTTTCCGGTCCCCTTCAGATCAAGCAGAAGATATGTTTTGATTTTCATGCTTGTATTTTAAACAATAATTTTCTACCCCAGCGTGGTAG
TCAATGAGGAGAGAGGGGAAGAATGCGCACATGATGCTACACGTTTCTGTTGTTGCTGTTATTATTGGTGGCTTTGAGGAGAGCTGCTCCCATT
TGGGGGTTTATACCAACTGTGGATTATGGCTTTGTCATTAAGATTTGATCTTTGTTAAATGAAAAACTGTTTATTGTATAAAACTCAGGTTTGT
GGACGAAAAGTTGTTTTTTTTCTTCAGTTAATTAAATTGTTCCTCAAGTTTGTTTAAGGACTTAAAATCAAACACAACCATGTGTAAACTGCTA
AATGAGGCTCCTAAAATGAGAGGCCTCAACTCTTTAAGTGTGGAGCTAGAAATGTAAATAAGTCCACAGGGCAGACTGGTGATTATGATAAAAG
CTACCATTTACTGAGCATCTGTCTACTAGGCTCAGCTCTATGCTAAGTCTACATGTTATCTGTCAAAGTGGTATCATCCCCATTTAATAGCTGA
GGAAACAGAGGCTTAGAAAGGCTGGGTAACTTGACCAGGGTCATGCAACTAGTCTGCGGTGGAGCCAGGATTCTGTCTGACCCTAAAGGCCAAG
TTCTTTATATTTATTTCTACCACCTGCTAAAGTCTTGAATGGAGGCTGAAAGCACAGTTGGGGTATGGGGAAGAAAAATATATATACATACATA
TATGTATATGTATGTATGTATGTATGGGGGGTTGTTTTGTTTTTGTTTTTGATAAGGAGTTTTGCTCTTGTTGCCCAGGCTGGAGTGCAGTGGT
ATGATCTGGGCTCACTGCAACCTCCGCCTCCCGGGTTCAAGTCATTCTCCTGCCTCAGCCTCCCGAGTAGCTGGGATTACCGGAGCATGCCACC
ACACCCAGCAAAGTTTTGTATTTTTAGTAGAGACAGGGTTTCACCATGTTGGCCAGGCTGATCTTGAACTCCTCATCTCAGGTGATCTGCCCGC
CTCCGCTTCCCAAAGTGCTGGGATTACAGGTGTGAGTCACCGCGTCCGGCCTACAGATATATTTAATTTAAAGAGATCTAAAACAAATACAAAA
CTGTCCACATCTATGTTGATGGACCCATAAAAATAGCAGTCTGCCAGGGTCTGCCGGAAGAGACAGATAAGCATACATATTAACATGGATATAT
ATGTGAATTTCATTCAAATGGTTCTCACATGAGAGTAACTAGCATCTTTCTCTCAGATGATGAAGATGATGAAGAGGAAGATGAAGAGGAAGAA
ATCGACGTGGTCACTGTGGAGAAGCGGCGTTCCTCCTCCAACACCAAGGCTGTCACCACATTCACCATCACTGTGCGTCCCAAGAACGCAGCCC
TGGGTCCCGGGAGGGCTCAGTCCAGCGAGCTGATCCTCAAACGATGCCTTCCCATCCACCAGCAGCACAACTATGCCGCCCCCTCTCCCTACGT
GGAGAGTGAGGATGCACCCCCACAGAAGAAGATAAAGAGCGAGGCGTCCCCACGTCCGCTCAAGAGTGTCATCCCCCCAAAGGCTAAGAGCTTG
AGCCCCCGAAACTCTGACTCGGAGGACAGTGAGCGTCGCAGAAACCACAACATCCTGGAGCGCCAGCGCCGCAACGACCTTCGGTCCAGCTTTC
TCACGCTCAGGGACCACGTGCCGGAGTTGGTAAAGAATGAGAAGGCCGCCAAGGTGGTCATTTTGAAAAAGGCCACTGAGTATGTCCACTCCCT
CCAGGCCGAGGAGCACCAGCTTTTGCTGGAAAAGGAAAAATTGCAGGCAAGACAGCAGCAGTTGCTAAAGAAAATTGAACACGCTCGGACTTGC
TAGACGCTTCTCAAAACTGGACAGTCACTGCCACTTTGCACATTTTGATTTTTTTTTTAAACAAACATTGTGTTGACATTAAGAATGTTGGTTT
ACTTTCAAATCGGTCCCCTGTCGAGTTCGGCTCTGGGTGGGCAGTAGGACCACCAGTGTGGGGTTCTGCTGGGACCTTGGAGAGCCTGCATCCC
AGGATGCTGGGTGGCCCTGCAGCCTCCTCCACCTCACCTCCATGACAGCGCTAAACGTTGGTGACGGTTGGGAGCCTCTGGGGCTGTTGAAGTC
ACCTTGTGTGTTCCAAGTTTCCAAACAACAGAAAGTCATTCCTTCTTTTTAAAATGGTGCTTAAGTTCCAGCAGATGCCACATAAGGGGTTTGC
CATTTGATACCCCTGGGGAACATTTCTGTAAATACCATTGACACATCCGCCTTTTGTATACATCCTGGGTAATGAGAGGTGGCTTTTGCGGCCA
GTATTAGACTGGAAGTTCATACCTAAGTACTGTAATAATACCTCAATGTTTGAGGAGCATGTTTTGTATACAAATATATTGTTAATCTCTGTTA
TGTACTGTACTAATTCTTACACTGCCTGTATACTTTAGTATGACGCTGATACATAACTAAATTTGATACTTATATTTTCGTATGAAAATGAGTT
GTGAAAGTTTTGAGTAGATATTACTTTATCACTTTTTGAACTAAGAAACTTTTGTAAAGAAATTTACTATATATATATGCCTTTTTCCTAGCCT
GTTTCTTCCTGTTAATGTATTTGTTCATGTTTGGTGCATAGAACTGGGTAAATGCAAAGTTCTGTGTTTAATTTCTTCAAAATGTATATATTTA
GTGCTGCATCTTATAGCACTTTGAAATACCTCATGTTTATGAAAATAAATAGCTTAAAATTAAATGATGCAACTCAACCTTTTCCTTAATGGCA
TTACACTCTGTCCCTTAAGGAGCAACCATAAATAATCCATAACCTATAGAGGGAATTTGGTTTCCGTAAATAGCCCTTTTTGCACCTGTACAAT
CCTGGTTGGGGGGCATGAGTCATTGTCCCCACTTAAGGTGGAGGGAACTGAGTTTGGGGAAATTAAGGCAGTTCTCCAAGATTATGCAGAATAG
AGATGTTATTAGCGACTATTGTGTGCATTGTAGCAATGGCATTTGATAATTTACAGAGCACTTCTGTATACTGTGGCTCCTTAGTGGAATTAAG
CTGAGACCTCAGATCAGTCCCTTTAAAAGAAAAGTAAAAATAGCCACAGGGTTGTTTAACTCGCTTGTATTGGGCTTTGGTAGTATTCGTCCCA
TTGGCAGACAGTCTTCTATTTTAAGGTAGAGCATAGTTTGTCTCCAAGAATTCATTGTTAAAAACATTCACTAGGATCTGTGGAGGTTCTAGGC
TAAGCAGAGTAAGCAGAATAAACAGATGGAAATGGGTTCCTCCCTTCAATGAACTCAACCTGATTCACCAAAGTGTAATTCACGAGTGACAGTT
ACGTAGTCCAGAGCAAGTACCAGGTGCAGGAGAGACCCTGGGGTCACAATGGAGACCCCATATGGGTGGCATGGCTCTCTACTTGCCATTCCTA
TTACACAGCAGTGTCTTGGCTACTTGGGCTGCCCTTTGGAAATGGGATCAATCTTGCAGGCTCCAGAAGACAGAGCCAAGACTTGTGTGTTAAG
GAGATAGTTTACCTGTTGGGACATAAGAGCCTTGCTTGTAAGCAGCTTCTCAGAACTAAAAGTGTACAAATAACCTATTTCTCTTTTGAGTGTC
AGGTTGTACTCGGTTATTTCTCTAGGGTTTTGTTCATCTCAGATTTTTAACTGTGAGCCGAAAAAAAAGAAAAAGGCCTTTTGCTTCACTGAGA
AGAAAGCAGGTCCAGAGATGAGACAGCTTTGCTTGCCTGGACACACAGTTTGTCAGGGGCAGAGATGGGAGACACCAAGCCATGTGTCCTTGTC
TGCTTTGGTCATTTTTATTTGTTTCTTTTGAGATGGAGTCTCACTCTGGTGCCCAGGCTAGAGTGCAGTGGTGCAATCTCGGCTCACTGCAACT
TCCGCCTCCCGGGTTCAAGCGATTCTCCTGCCTCAGCCTCCTGAGTAGCTGGGACTACAGGTGTGTGCCACCATGCCCGGCTAATTTTTTGCAG
TTTTAGTAGAGACCAAGTTTCACCATGTTAGCCAGGATGGTCTCGATCTCCTGACCTTGTGATCCACCTACCTCGACCTCCCAAAGTTCTGGAA
TTGCAGGCGTGAACCACCATGCCCAGCCGCTTTGGTCATTTTATAAAGGCAAGTAGGAGTTTAGAACTCAGTCCTCCTTATCCTGCTTATCGCA
CACCCTTGAGATACGAGGTTGGTGATACTACCATGGACATCTTTCTGATGGTCTCGCCATGTAGAAAATAAGATAAAATGCCCTTTAATTCTCC
TAGTCCCCATCCCCAGACTAAAAAATAATGCACCCTTTCTTTTTGAATTGTCATTCAAAAAACTTCCGTTCGTTTGCATTTTACAGGCCCCAAA
TCACTCACGGCCTCTGCCCCTGTGTGTGTGCAAGAGCCAAAAGAAAGTTAAGCAACCTCACATTAATTGTGTACCTAAGATTCTTGAAGCCCAG
CTCAGTCATCCCAGTTTCTCTATTTGTGATTACCATAAGGAACCTACCTGAGTGTGTCCAATGAAATGGAATGCTTAACCGTGAAGAAAGAAAA
CTGTTCATATGAATGAGGCCACTAAACTACAATTCCTACTATGCTCTCTTTTTGCTCGGGCTGCTGGGAAGCTCAGAGCCAAATTCCACCCCCT
CTAACATCTCCAGTGGTCATTCTCTTCTAAATGTTTACGGTTTCTTGTTTTCCATTGTTAGGTTAGTCATCTTTTTAATGTATATAATGTAGTA
TATAACATGAAACGTTTTTGCATTAGGTGGACCACAAATATGCACCTAAAGGATTAAAACTAAAGTGAAAAAATCCCATATTTGCCTTTTCTGA
CCTAGCTGAGGGAATGTCACCAAATTTAGCTCTGCAATTATCTATAAAGTAATTGCTGTAGTCACAGAAGAATTGAACTAGTTGTTTCAATAAC
ATGAGAAACCATCTCTGCATTCCAAGAGCAGTTTTGAGACTGGGAAAGAGCTCTACATCATTTAGTTCAATAAACGATAGAGCTGAGACGAAGC
ACAGAGATCATCTCATTGAAATTCATTTCTCAGAATGAGGGTGCGGGATCCCACCTGGAATTAATGGCTTAACCCAGGGAGACTAGAGCCGGTG
TCTCCTATGACCCGCCCAGTGCCCTTCCCCATAACATTCACTTTCTCATTGCCCACACTGTAGCCTCCCCACCTCCTGGCCTGCCCGTCCACCT
ACATCATGCTTCCATATTAACCCTTCTAAACCACCTACTCTTTATGCAAACTTCCAACAGTTCCCTACTATTTACAGAATCGAGTCCCGACTCT
CCAGCCCAGCACAGAGGCACTTCTACCCAGTCCCACCAGCTCCATTGCCCATGGCCCTCCATGTGCTGGACTCTGGCTGTTTCTCATCCGTGAC
TTGTTTCACCACATCCCTCCTTCTAGGTTACCCAGATTCCATTAATTGAAATCCTTCTCAATCTTGCACCCCCAGGTAGGCCTTTCCCAGCCCT
TGGCCTCTGTGCACTTATCTTCTAGCTGCCTTATGCACCTCCTGGACCCCCTAAACTGTGGGCTCCCTTAAGGCAGATAGGGCTCTCATTTGCC
TCTGATTCTGAGCATCTGCCCTGTGACTGACAGGTGACAGAGCCTTAGCAGATGCCAGCAGTATAGACGGTAACAGAGGAAGGAGCGAGGAGAG
GATTTCCATTATGGGTGGGTCTCCCACCAACTCCAGTTCACAAGCTCTCAGGCTAATTCAGATGGGAAAAGACATCCCTTAGACATCAATGAGT
GTCTGGTACTGACTATGCTGGCAGTTCTGAAGAAGTGAAGATAAAATGCTCATAGAGGACTGTCTACAAGGAGCCCACAGTCTGCAAGAGAGTT
AAAGCCCTGGGGGTTGTATAGAAGGCAAGAAGAGAAACCAAGAGGCACTGGGTTGAGGGGCTGATGAATGAAAGCATATGAGGGGCCTAGTGGC
TGAGTTTGGGGCTATCTGAAGGAGGAAGCTGGTCCTCTGCCTGGGTTCACTGAGTCTACGCCTGGCCTGGCTTGTGGCAGCTCAGACACTTGCC
TCAGGCCACAGATGGTCTACACTCGTAGTGAAAAAGGTTGCAATGCCTCCCACCCCTGTGTAGCACTGCAGAGCTTCCCAAGTTTTTGTATGCA
TGAGTCTCAAAAATCCTTGAGGATTTTTGACCAGTTTATCACATTCCCACATTATAAGTGAGGGAATCTGGTCTTCTGAGTTTTAGTTTCATTA
ATCCCTATGGTGGCTATGTTTTGAAATTCTGATGTGAGTTGTTTTCGAAATCAGAGGTTGTTTGATTTGGAAGAGGCATAGAAGCCAACTAGTT
TACTCTCCCATTTCAGGGGAGGCACCTACAGTCTGCTTGTGAGAATTTTATTTTTCCTTTATTTTATTTTTCTTTTTTTTGCAACAGGGTCTTG
CCGTGTTGCCTAGCCTGGCGTGGAGTGGCTAATCTCAGGCACAGTGCCACTGCTGATCAGCACAGGAGTTTTGACCTGCTCCATTTCTGACCTG
GGCCAGCCAGTTCATACTTCCTTAGGAAACCTGGTGGTCCCCTACTCCCAGGAGTTGCCATATTGATGCTAAACTTAGTGTGGACATCCAGTAG
GCATAGGGTGCTACAGCTCAGAACTTCTGGACTCAAGTGATCCTCCTGCATCAGCTTCCTGAGTAACTCGGACAACAGGTGCACACACACTGCC
GTGCCTGGAAGCGTTCTTTTTTCTTTTTTTCTTTCCCTCTTTCCCATTCTTTCTCTCAACAAATATTTATTTAACAGTTACCATGTATCAAGCA
CTGTTCTAAGTGCTTGGGAGACATCAATGAACAAAAAAGACAAAACTCTCCCAAATCTTCTCTGCTTTCTTGAAGTTTATAGTGTAACAGAGAG
TGACAGCTGTACAAATAAACATAATAAGCAAATAAATTAAACAGCATCTAATATGGTGGCAAATGCCGTAAAAAATAAGTAGAAAGGCTAGAGG
AATTCAGGGATGCCAACAGCAGAGGTAGGAGGCTCAGGGAAGGCGCATCTGGTCCTGGGAGCTGAGGGGCAGGGCCTGTGGGGAGAGTGTCCTG
CCCTGGGCACTCTTGTGCTTGCTCAGAAACCAGATCTCAGGCCTCAAGCTTCTCGGTTCAGTGCTTAACTTCCCTTATCTCTGGCTGGGCGTGG
TGGCTCACGCCTGTAATCCCAGCACTTTGGGAAGCCAAGGCAAGTGGATCGCAAGGTCAGGGGTTTGAGATCAGCCTGACCAACATGGTGAAAC
CCCATCTCTACTAAAAATACAAAAATTAGCTGGGCATGGTGGCTGGTGCCTGTAATCCCAGCTACTCAGGAGGCTGAGGCAGGAGAATTGCTTG
AACCTGGGAGACGGAGGTTGTAGTGAGCCGAGATCACACCACTGCACTCCAGCCTGGGTGATAGAGCGAGACTCCGTCTCAAAAAATAATAATA
AAAAATAAAAAATCTTCCCTTATCTCCCTCTGGACATTGGTAAATGTACCCCACCAATTTCCATTCATTGTCTCGAGGAGAAACCATTGAGCAT
AGTAGTTAAGAGTATGAATCTGGGCTGGGCATGGTGGCTCATGCCTGTAATCCCAGTACTTTGGGAGGCCAAGGCAGGTGGATCACCTGAGGTC
AGGAGTTCAAGACCAGCCTGACCAACATGATGAAACCCCATCTCTACTAAAAATACAAAAAAATTAGCCAGGTGTGGTTGCGGGCACCTGTAAT
CCCAGCTACTCGGGAGGCTAAGGCAGGAGAATTGCTTAAACCCAGGAGGCGGAGGTTGCAGTAGGCCAAGAGCGCGCCATTGCACTGCACCCTG
GGTGACAGAGCAAAACTCCGTCTCAAAACAAAGAGTATGAATCTGAAGTTAAGACTCCCTGGGTTTGGCCGGGTGCGGTGGCTCACGCCTGTAA
TCTCAGCACTTTGGGAGGCCGAGGCAGGGAGATCACCTGAGGTTGGGAGTTCAAGACCAGCCTGACCAACATGGAGAAACCCCGTCTCTACTAA
AAATACAAAATTAGCCAGGTGTGGTGGCTCATGCCTGTAATCCCAGCTACTCAGGAGGCTGAGGCAGGAGAATTGCTTGAACCCGGAAGGCAGA
AGTTGCGGTGAGCCAAGATCATGCCATTGCACGCCAGCCTGGGCAACAAGAGTAAAACTCCATCTCAAAGAAAAAAAAAAAAAGTTAAAGACTC
CCTGGGCTTGAATTTGATTCCCAAACTCACAGGCTCTGGGTTGTGCAGCTCCCCAACTGGTACAACGAGGGGATAACACTGGGATTATTAGCGG
GTTGGCATCATTATTATTAATATGTTTTAAAATGGTCTCACTCTGATTGCCCAGATTGGAGTGCAGTGGCCTGATCTCGGCTCACTGCAGCCTC
GACCTCCTGGGCTCAGGCGTTTCTCCCACATCAGCCTCCCAAGTAGCTGAGACTACAGGCGCATACTACCATACCCAACAAATTTTTTCCATTT
TTAGTGGAATGGGGTTTTACTGTGTTGCCCAGGCTGGTCTCGAACTCCTGACTTCAAGTGATCCTCCTACCTTTGCCTCCCAAAGTGCTGGGAT
GACAGACACAAGCCACTGCACCCCGCCTTCAATTGATTTATATACAGCACATAGAATAGTGTCTGGCATGTGACAGGTGTGGTTTAAGCCTGCT
CAATAATATGATTTGATGTTGATGGGGTCTTTCCTCTCTCTATTTCCTCAGTATGTTACCAGGGCAAAGAACCTTTAGAAAAAAACATTTACCG
GTAGAACAAATTCACAAGCCTGAGTTTAACAAGAACTTTGCAGACTTTTGTTCCTCAAAAGAGGCCTTACAAAACCTGAAAACGGGTACCTTGG
AAACAAATGAATGTGAGCTTTGAAGCCTATTTTAAGACGGAGCCTAGGAATTTGAGTGCCGCAGAACATCTACGCCTTCTACAATGGTTTATTA
GTTTTCCTTACTTGTAAAGGAAATCTCTTCATAGGCCACTGACCAGGGTTACCTGATCTCTTTTGATATTGGTGTATCAAGCTACAAGACATTC
ATCCTGAAACCTTTGACCAGGAGAGGTAACAGAGCCTTTTTATGGTCGAAGCACACAGACCTATTGGTACAATGCACGTTTGGAGAGCACACAC
AGCACAAACTCCTCTGATAGCTACAGACAATTTGCAATGGGATTTGCTCGGAAGAGGCAACACAAAATCAACTTTTCTCTGCATTCCAGTGGGC
CTGAGATTCTCAGCAGACCTTTGAGGTAGGGTGGGGGAAACAGGCCCACTCTTTCACAAAGCTTGACATCAGTTGAATTTTGTGTGTTCTTGTT
TTGTGGCTCAGGCTATCTTCAGCCATCTTCCTGAGAGAGGACAAAAGAGCAGTCCCTCCACTGGAAAAATGTTGTTCCAGGTTCACTGGGAGGC
AATCCTGAGTCACAGAAACACTTAGTTTGGAAGAAGCCCCTGGATTGGGTCTTAGATCAGTTATTGACTATTTTCAACCTTGAAATAGGAAAGT
AACTTCTTGTTGCTCAGTTTCCTTGTCTATAAGTAGAATGGGCTGAAGTCAGTGATCTCTGGGGCTCCCTGTCAACTTTGAGGATCCAGAGTCA
TTGGTCCTTTGCAATGGCTGCAGCTTTAAAGGTGGCTGCAAGACTGCAGTGTCTGTCAACACCCTCTGGTTGGAAGATGTGCCCTGTCAAGTTC
ATATGATGGAAATTTAATCCCCAATGCAATAGTGTTGGGAGGTGGGTACTAATAAGAGATGATCAGATCATGAGGGCTCCGCCCTCTCAAATGG
ATTAATGTGCTTACTGGGGGAGTGGATTAGTGACCTTGAAACCGCCATTACAAAATTGTAACTGAGACAGTGAAAGAGCTGACCTAACCAACTC
CATCTTGTTTCTAACCTCCAAGCTGTCCTTGTTCTTTGCTGGGCGTAGGCTGAACTAACTTTGGGAGGAACTTAGTTTGTAGATTAGCCCTTTC
CCAAAACAAACCTCCTTCTTGCCTGGGGACTAGACTGCCTTTGTGGGACTAACACCAGCCACAAGATTAGAAATTATGGTTTAGGAGCCATGCA
GCTGGAGGCTACAAGATTCCGACCCTCCCTAAACTGCTCCTAAGATCAGTGCTTGAGATATTCTGCAGACCCTGCACTTGATGATCAGCTGGCA
CCACCCAGATTGATAAACTGGCTCATCTGATCCTGTGGCCCCCACCTAGGAACTGACTCAGCACAAGATGATAGCTTCGACTCCCTATGATTTC
ATCTCTGACCAATTAGCACTCCTGGCTCACTGAATTCCCCACACTCACCAAGTTGTCCTTAAAAACTCTGATCCCCAAATGCTTGAGGAGACTG
ATTTGAGTAATAAGAAAGCTCTGGTCTCCCGCACAGCTGGCTCTGCATGAATTACTCTTTCTCTATTGCAATTTCCCTGTCTTTATAAATTGGC
TGTGTCTAAACAGCAGACAAGGTGAACCCACTGGGTGGTTACAACCTCAGGAGTGAGTGGGCTTATTATGAAAGCGAGTTAAGCAGCCTTTCTC
TCTCTCTCTCTCTTGCATCCTCTTCCTCTTCCACCTCAAGCTATGGAGTGACACAGTAAGAAGGCCCTTGCCAGGTGCAGGTCTCCCGACCTTG
GATTTCTCAGTCTCCAGAACTGTAAGAAATAAATTTCTTGGCCGGGCGCGGTGGCTCACGCCTGTAATCCTACCACTTTGGGAGGCTGAGACAG
GTGGATCACCTGTGGTCGGGAATTCATGACCAGCCTGACCAACATGGAGAAACCCCGTCTCTACTAAAACTACAAAATTAGCTGGGAGTGATGG
TGCATGCCTGTAATCCCAGCTACTCAGGAGGCTGAGGCAGGAGAATCGCTTGAAACCGGGAGGCGGAGGTTGCGGCGAGCTGAGATCGCGCCAT
TGCACTCCAGCCTAGGCAACAAGAGCGAAACTCCGTCCCAAAAAAAGAAATAAAAATAAAAATAAAAAATAAAAATAAATAAATTTCTTTCCTT
TATAAATTACCCAGTCCGTGTCATTCTATTACAACAGCAGGGAAGAGACTCAGATAGGAGCCCTGGGGCATATCTTGGCTCTGCAATTCACCAA
CTCCATGGCTGAGGGTCAGTCACTTCCCTCTGAATCTCACTGTCTCTCTCTAAAACAACAAGAATAATCACCACCTCACCAGGTTCTCATAAGG
ACCAAATGACGTATAGGAGGGAGGTGCTAGCACTTGAAGATGGGGCAATCTTTTAAGAACCCTCATTGCCCTCGATATTGACACATTCAGCCCT
TGTCCAGCACGGCCCACCCATTCCACTGTTTTGCTTTCTGGATTCATCTCTAAGTGGGTTTCCCCAGGTGGGAAACTCCTTTAAAGACAATTAG
CATACCTCTGGGTGCTCCCCTCTACCTAGAACACGGCTATGCTCATAATAGCTGCTTCATAATGTTTGTTAAATAATGACAACCAATGAAAAGA
CTTGACTGATTGTTCAAAGCCAGATAGAGAGACTCAATGTGTGCAGACAAACTGGTTACACAGGCTTGTCTCATCTGGAACTATGGAAAACTAT
GATTAATCTGGTTTTTAATTTGGTTACTTGAATGAAATAGAATATGGCAACAGACATGTAACACCCTGAGTTTTTGCTTGGGTTGGTTTAGCCA
CTTTTCTTTGGCATAAAGCCAGGAAGAACAAGGAATTTAAACTAGAGATTTGAAACCAAGGAAGCTTTAGTTAGATGCATCTTTGTTGGTAAAG
AGGGCAGAATTGAGACCTGAGTTTATTATTATAAATAGC
HUMAN SEQUENCE - mRNA
CTCCGGTGTGTCTGTCGGTTGCAGTGTTGGAGGTCGGCGCCGGCCCCCGCCTTCCGCGCCCCCCACGGGAAGGAAGCACCCCCGGTATTAAAAC
GAACGGGGCGGAAAGAAGCCCTCAGTCGCCGGCCGGGAGGCGAGCCGATGCCGAGCTGCTCCACGTCCACCATGCCGGGCATGATCTGCAAGAA
CCCAGACCTCGAGTTTGACTCGCTACAGCCCTGCTTCTACCCGGACGAAGATGACTTCTACTTCGGCGGCCCCGACTCGACCCCCCCGGGGGAG
GACATCTGGAAGAAGTTTGAGCTGCTGCCCACGCCCCCGCTGTCGCCCAGCCGTGGCTTCGCGGAGCACAGCTCCGAGCCCCCGAGCTGGGTCA
CGGAGATGCTGCTTGAGAACGAGCTGTGGGGCAGCCCGGCCGAGGAGGACGCGTTCGGCCTGGGGGGACTGGGTGGCCTCACCCCCAACCCGGT
CATCCTCCAGGACTGCATGTGGAGCGGCTTCTCCGCCCGCGAGAAGCTGGAGCGCGCCGTGAGCGAGAAGCTGCAGCACGGCCGCGGGCCGCCA
ACCGCCGGTTCCACCGCCCAGTCCCCGGGAGCCGGCGCCGCCAGCCCTGCGGGTCGCGGGCACGGCGGGGCTGCGGGAGCCGGCCGCGCCGGGG
CCGCCCTGCCCGCCGAGCTCGCCCACCCGGCCGCCGAGTGCGTGGATCCCGCCGTGGTCTTCCCCTTTCCCGTGAACAAGCGCGAGCCAGCGCC
CGTGCCCGCAGCCCCGGCCAGTGCCCCGGCGGCGGGCCCTGCGGTCGCCTCGGGGGCGGGTATTGCCGCCCCAGCCGGGGCCCCGGGGGTCGCC
CCTCCGCGCCCAGGCGGCCGCCAGACCAGCGGCGGCGACCACAAGGCCCTCAGTACCTCCGGAGAGGACACCCTGAGCGATTCAGATGATGAAG
ATGATGAAGAGGAAGATGAAGAGGAAGAAATCGACGTGGTCACTGTGGAGAAGCGGCGTTCCTCCTCCAACACCAAGGCTGTCACCACATTCAC
CATCACTGTGCGTCCCAAGAACGCAGCCCTGGGTCCCGGGAGGGCTCAGTCCAGCGAGCTGATCCTCAAACGATGCCTTCCCATCCACCAGCAG
CACAACTATGCCGCCCCCTCTCCCTACGTGGAGAGTGAGGATGCACCCCCACAGAAGAAGATAAAGAGCGAGGCGTCCCCACGTCCGCTCAAGA
GTGTCATCCCCCCAAAGGCTAAGAGCTTGAGCCCCCGAAACTCTGACTCGGAGGACAGTGAGCGTCGCAGAAACCACAACATCCTGGAGCGCCA
GCGCCGCAACGACCTTCGGTCCAGCTTTCTCACGCTCAGGGACCACGTGCCGGAGTTGGTAAAGAATGAGAAGGCCGCCAAGGTGGTCATTTTG
AAAAAGGCCACTGAGTATGTCCACTCCCTCCAGGCCGAGGAGCACCAGCTTTTGCTGGAAAAGGAAAAATTGCAGGCAAGACAGCAGCAGTTGC
TAAAGAAAATTGAACACGCTCGGACTTGCTAGACGCTTCTCAAAACTGGACAGTCACTGCCACTTTGCACATTTTGATTTTTTTTTTAAACAAA
CATTGTGTTGACATTAAGAATGTTGGTTTACTTTCAAATCGGTCCCCTGTCGAGTTCGGCTCTGGGTGGGCAGTAGGACCACCAGTGTGGGGTT
CTGCTGGGACCTTGGAGAGCCTGCATCCCAGGATGCTGGGTGGCCCTGCAGCCTCCTCCACCTCACCTCCATGACAGCGCTAAACGTTGGTGAC
GGTTGGGAGCCTCTGGGGCTGTTGAAGTCACCTTGTGTGTTCCAAGTTTCCAAACAACAGAAAGTCATTCCTTCTTTTTAAAATGGTGCTTAAG
TTCCAGCAGATGCCACATAAGGGGTTTGCCATTTGATACCCCTGGGGAACATTTCTGTAAATACCATTGACACATCCGCCTTTTGTATACATCC
TGGGTAATGAGAGGTGGCTTTTGCGGCCAGTATTAGACTGGAAGTTCATACCTAAGTACTGTAATAATACCTCAATGTTTGAGGAGCATGTTTT
GTATACAAATATATTGTTAATCTCTGTTATGTACTGTACTAATTCTTACACTGCCTGTATACTTTAGTATGACGCTGATACATAACTAAATTTG
ATACTTATATTTTCGTATGAAAATGAGTTGTGAAAGTTTTGAGTAGATATTACTTTATCACTTTTTGAACTAAGAAACTTTTGTAAAGAAATTT
ACTATATATATATGCCTTTTTCCTAGCCTGTTTCTTCCTGTTAATGTATTTGTTCATGTTTGGTGCATAGAACTGGGTAAATGCAAAGTTCTGT
GTTTAATTTCTTCAAAATGTATATATTTAGTGCTGCATCTTATAGCACTTTGAAATACCTCATGTTTATGAAAATAAATAGCTTAAAATT
HUMAN SEQUENCE - CODING
ATGCCGGGCATGATCTGCAAGAACCCAGACCTCGAGTTTGACTCGCTACAGCCCTGCTTCTACCCGGACGAAGATGACTTCTACTTCGGCGGCC
CCGACTCGACCCCCCCGGGGGAGGACATCTGGAAGAAGTTTGAGCTGCTGCCCACGCCCCCGCTGTCGCCCAGCCGTGGCTTCGCGGAGCACAG
CTCCGAGCCCCCGAGCTGGGTCACGGAGATGCTGCTTGAGAACGAGCTGTGGGGCAGCCCGGCCGAGGAGGACGCGTTCGGCCTGGGGGGACTG
GGTGGCCTCACCCCCAACCCGGTCATCCTCCAGGACTGCATGTGGAGCGGCTTCTCCGCCCGCGAGAAGCTGGAGCGCGCCGTGAGCGAGAAGC
TGCAGCACGGCCGCGGGCCGCCAACCGCCGGTTCCACCGCCCAGTCCCCGGGAGCCGGCGCCGCCAGCCCTGCGGGTCGCGGGCACGGCGGGGC
TGCGGGAGCCGGCCGCGCCGGGGCCGCCCTGCCCGCCGAGCTCGCCCACCCGGCCGCCGAGTGCGTGGATCCCGCCGTGGTCTTCCCCTTTCCC
GTGAACAAGCGCGAGCCAGCGCCCGTGCCCGCAGCCCCGGCCAGTGCCCCGGCGGCGGGCCCTGCGGTCGCCTCGGGGGCGGGTATTGCCGCCC
CAGCCGGGGCCCCGGGGGTCGCCCCTCCGCGCCCAGGCGGCCGCCAGACCAGCGGCGGCGACCACAAGGCCCTCAGTACCTCCGGAGAGGACAC
CCTGAGCGATTCAGATGATGAAGATGATGAAGAGGAAGATGAAGAGGAAGAAATCGACGTGGTCACTGTGGAGAAGCGGCGTTCCTCCTCCAAC
ACCAAGGCTGTCACCACATTCACCATCACTGTGCGTCCCAAGAACGCAGCCCTGGGTCCCGGGAGGGCTCAGTCCAGCGAGCTGATCCTCAAAC
GATGCCTTCCCATCCACCAGCAGCACAACTATGCCGCCCCCTCTCCCTACGTGGAGAGTGAGGATGCACCCCCACAGAAGAAGATAAAGAGCGA
GGCGTCCCCACGTCCGCTCAAGAGTGTCGTCCCCCCAAAGGCTAAGAGCTTGAGCCCCCGAAACTCTGACTCGGAGGACAGTGAGCGTCGCAGA
AACCACAACATCCTGGAGCGCCAGCGCCGCAACGACCTTCGGTCCAGCTTTCTCACGCTCAGGGACCACGTGCCGGAGTTGGTAAAGAATGAGA
AGGCCGCCAAGGTGGTCATTTTGAAAAAGGCCACTGAGTATGTCCACTCCCTCCAGGCCGAGGAGCACCAGCTTTTGCTGGAAAAGGAAAAATT
GCAGGCAAGACAGCAGCAGTTGCTAAAGAAAATTGAACACGCTCGGACTTGCTAG

[0270] TABLE 6
MOUSE NOMENCLATURE
ICSGNM Myb
Celera mCG2825
HUMAN NOMENCLATURE
HGNC MYB
Celera hCG3238O
MOUSE SEQUENCE - GENOMIC
NNNNNNNNNNNNNNNNNNNNNNNNNNNNNNNNNNNNNNNNNNNNNNNNNNNNNNNNNNNNNNNNNNNNNNNNNNNNNNNNNNNNNNNNNNNNNN
NNNNNNNNNNNNNNNNNNNNNNNNNNNNNNNNNNNNNNNNNNNNNNNNNNNNNNNNNNNNNNNNNNNNNNNNNNNNNNNNNNNNNNNNNNNNNN
NNNNNNNNNNNNNNNNNNNNNNNNNNNNNNNNNNNNNNNNNNNNNNNNNNNNNNNNNNNNNNNNNNNNNNNNNNNNNNNNNNNNNNNNNNNNNN
NNNNNNNNNNNNNNNNNNNNNNNNNNNNNNNNNNNNNNNNNNNNNNNNNNNNNNNNNNNNNNNNNNNNNNNNNNNNNNNNNNNNNNNNNNNNNN
NNNNNNNNNNNNNNNNNNNNNNNNNNNNNNNNNNNNNNNNNNNNNNNNNNNNNNNNNNNNNNNNNNNNNNNNNNNNNNNNNNNNNNNNNNNNNN
NNNNNNNNNNNNNNNNNNNNNNNNNNNNNNNNNNNNNNNNNNNNNNNNNNNNNNNNNNNNNNNNNNNNNNNNNNNNNNNNNNNNNNNNNNNNNN
NNNNNNNNNNNNNNNNNNNNNNNNNNNNNNNNNNNNNNNNNNNNNNNNNNNNNNNNNNNNNNNNNNNNNNNNNNNNNNNNNNNNNNNNNNNNNN
NNNNNNNNNNNNNNNNNNNNNNNNNNNNNNNNNNNNNNNNNNNNNNNNNNNNNNNNNNNNNNNNNNNNNNNNNNNNNNNNNNNNNNNNNNNNNN
NNNNNNNNNNNNNNNNNNNNNNNNNNNNNNNNNNNNNNNNNNNNNNNNNNNNNNNNNNNNNNNNNNNNNNNNNNNNNNNNNNNNNNNNNNNNNN
NNNNNNNNNNNNNNNNNNNNNNNNNNNNNNNNNNNNNNNNNNNNNNNNNNNNNNNNNNNNNNNNNNNNNNNNNNNNNNNNNNNNNNNNNNNNNN
NNNNNNNNNNNNNNNNNNNNNNNNNNNNNNNNNNNNNNNNNNNNNNNNNNNNNNNNNNNNNNNNNNNNNNNNNNNNNNNNNNNNNNNNNNNNNN
NNNNNNNNNNNNNNNNNNNNNNNNNNNNNNNNNNNNNNNNNNNNNNNNNNNNNNNNNNNNNNNNNNNNNNNNNNNNNNNNNNNNNNNNNNNNNN
NNNNNNNNNNNNNNNNNNNNNNNNNNNNNNNNNNNNNNNNNNNNNNNNNNNNNNNNNNNNNNNNNNNNNNNNNNNNNNNNNNNNNNNNNNNNNN
NNNNNNNNNNNNNNNNNNNNNNNNNNNNNNNNNNNNNNNNNNNNNNNNNNNNNNNNNNNNNNNNNNNNNNNNNNNNNNNNNNNNNNNNNNNNNN
NNNNNNNNNNNNNNNNNNNNNNNNNNNNNNNNNNNNNNNNNNNNNNNNNNNNNNNNNNNNNNNNNNNNNNNNNNNNNNNNNNNNNNNNNNNNNN
NNNNNNNNNNNNNNNNNNNNNNNNNNNNNNNNNNNNNNNNNNNNNNNNNNNNNNNNNNNNNNNNNNNNNNNNNNNNNNNNNNNNNNNNNNNNNN
NNNNNNNNNNNNNNNNNNNNNNNNNNNNNNNNNNNNNNNNNNNNNNNNNNNNNNNNNNNNNNNNNNNNNNNNNNNNNNNNNNNNNNNNNNNNNN
NNNNNNNNNNNNNNNNNNNNNNNNNNNNNNNNNNNNNNNNNNNNNNNNNNNNNNNNNNNNNNNNNNNNNNNNNNNNNNNNNNNNNNNNNNNNNN
NNNNNNNNNNNNNNNNNNNNNNNNNNNNNNNNNNNNNNNNNNNNNNNNNNNNNNNNNNNNNNNNNNNNNNNNNNNNNNNNNNNNNNNNNNNNNN
NNNNNNNNNNNNNNNNNNNNNNNNNNNNNNNNNNNNNNNNNNNNNNNNNNNNNNNNNNNNNNNNNNNNNNNNNNNNNNNNNNNNNNNNNNNNNN
NNNNNNNNNNNNNNNNNNNNNNNNNNNNNNNNNNNNNNNNNNNNNNNNNNNNNNNNNNNNNNNNNNNNNNNNNNNNNNNNNNNNNNNNNNNNNN
NNNNNNNNNNNNNNNNNNNNNNNNNNNNNNNNNNNNNNNNNNNNNNNNNNNNNNNNNNNNNNNNNNNNNNNNNNNNNNNNNNNNNNNNNNNNNN
NNNNNNNNNNNNNNNNNNNNNNNNNNNNNNNNNNNNNNNNNNNNNNNNNNNNNNNNNNNNNNNNNNNNNNNNNNNNNNNNNNNNNNNNNNNNNN
NNNNNNNNNNNNNNNNNNNNNNNNNNNNNNNNNNNNNNNNNNNNNNNNNNNNNNNNNNNNNNNNNNNNNNNNNNNNNNNNNNNNNNNNNNNNNN
NNNNNNNNNGTCCAAACCTCTTTGTTTGATGGCATCTGTTTACAGTAGTTACACTTTAATATCAACCTGTTTCCTCCTCCTCCTTCTCCTCCT
TCTCCTCCTCCTCCTCGGTGACCTCCTTCTCCTCCCCTTTCTCCGGAGAAACTTCGCCCCGGCGGTGCGGAGCGCCGCTGCGCAGCCGGGGGAG
GGACGCAGGCAAGGCCGGAGGGCAGCGGGAGGCGGCAACCGGTTGCGGTCCCCCGGGGCTCTTGGCGGAGCCCCGGCCCGCCTTCGCCATGGCC
CGGAGACCCCGAACACAGGTAATGGGGAGGCTGAGAGGGCGGCCTCGGGCTAGGGCGCGCGGGGATCCAGGCATCCCGGAGCAGGTGGGAATGC
CTTCCCTGTTGGTTTGCGGGGCTGTCAGCCAGTGGCAGAAGACACTCGGGAGAAGGATGAATGGAAAACTCTGCGAGAAGCGCACGGGTATAGT
GGGAAGCATGCCCTGAGGCTCTTTTTTATTTTATTTCCCTTTTTCTTTCTTTTTTCTTTTTCTTTTTGCAAGTTGCTCGGGGATTCGTTTCTCT
TTGGGGGGTGGGGTGGGGGGGGGGCTCGGCACTCTTCAGCCGAGGACTGAACGGTTCCATCAGACCCGAGGAGCCCACCAGGTGTTTGGCTTGA
TGCCCCGAGTGTCGGCGAGGGAGTCGCAGCCTAATTGCTGCATGCATTGAGGTGTGTTTGCACTTGAAGAGCATATGGCAGATATAGGGAAAGG
CCGGGTTGTTTAGTAGCTGCAGGTAGTTCATTTAAATTTCATTCATTCATTATGGAGGCGAGAGAGGTGTCAGCTGACAGGCAGGCAGCTGCAA
AGATTTTAGGGGGACAAAATGGGTTTGCAGATTGTTTTAAACCCAGCCGTTTGAAGATTCTTGTACTTGTTATGGAAGAAGCTTTTGCAAACAC
TGCACGCGCCCGCGTCGCACATGTCACCGCACCGGCCGAGATGATGCGTGCACTCTCTTTCCATTTTGGCCCCACCTTCGGGAAGAGGGATCCT
CTCGGAACTGTCAGTTGCTGGCGCTCAAGTCCGGCCCGACTCGGGGTTTCCCGAGGACACGCCGGGGCTCCCAGAGAGCAACAGATGCGGGGCT
TAGCTCGGTGGCGGTCGCCACTCGGCGCAAAGTGCTGGAGGCAGGCGGCACCCAAGGCAGCTGCAGTGCACCCCGGGCGATGTCGCCGCTCTTC
TCCTGGGCCGCGCACACGTGGAAGCAGCTGAGGTCGCCGCTGCTCCCAGCACTCTGCTCCAGCTGCTTTTGGTGGCCCGCCTCTGGCAAAGCCA
CCGACCGACCGACCCTAAGGAAGNNNNNNNNNNNNNNNNNNNNNNNNNNNNNNNNNNNNNNNNNNNNNNNNNNNNNNNNNNNNNNNNNNNNNNN
NNNNNNNNNNNNNNNNNNNNNNNNNNNNNNNNNNNNNNNNNNNNNNNNNNNNNNNNGGTGAATTGGGGAGACCTTGAATCTTGGCTCCCAGTGC
CTGGCCCCGGGCCTGCCGCGCCAGCCTAAGTGCCACCCTTTAAGAGGTTTCGCCTTTCGCTTTTGGGACCTAAACCGCCCGCACCCAGGTCACC
TGTTCTGCAGAAAGCTGAAACCTGCAGCAGGAGGAGGGAGTTAGGAAGGGGTGCTCCCAGGAGGTGCGGCCCAAGCTGGCCGCCCCAAGGTTCA
GTCGGGGCGTGGCCGCGCAGGTTCCCTGGGGCTCGCAGGTAGCCCGGAGCGGAGGCGGCAGGGAGGGGCGGGAGCCTTGAACTTGACTCAGGGG
GAAGAGAAACCCGGCTGCGGGCTCGGAGCCGTTTCTTGCAGGGCTAGCGTCAACTCGGCAGGGATTATTAACCAGGTCAGCGAAATGACTCTGA
ACCCCTTTTCTAGAATCACGTAGCGGCCACAGGCACTTCCTCCGGTCCCCCTCCCTCTTCCCAACCCCCCAGTGTTCTTTTTCGTTTCTTTGCA
CGGTTTGTTTCCTTGATAGAATGTAACATTCATAGTTGTACTCTTGTAACCACACCGGCTCTCGCAGGTGGAGCAGTCGAGAGCATCTAGCTTG
AAATCAGCCTTTGAAAGTCCTTTGACTGTTGGGTCTGAGATCTTGTCGGAGCAGATAAAGGAAAAGTTATTTCGGGTCCTTTGTCGAAATTAAT
CATGCTACCGAGGCGACCAGGTCATTTTAGAGCAAGGAAATGGCATGCAGAGCTCAGAGGCAAGCCCCTTGTCAAAGCTGACAGAATCCTGGAC
TCGCCCAGCTCCCTCTCACAGCCTTTCAAGATCTGCAAGAGTCACACGCCACATTTCACCCCAAGACTTTGGCTTTGCACATCTGCCCAGGGCT
TGCTTTTTAAGAGGCACAGAAGACAGTAGAGGCATGCCTCTGGAAAGTACCTTAAACATAGAATCCCCTCCCTAGTGTGTAAGATGGGATCCAC
GAGAGGGAGGGGGGTTTGTCCAAATCAAACGACTAGGTGCGTGGACAACTAGGGCTGTTAGAACTTTGCTCCTAGACCCCCTGGTCCTGTGTGA
TCCCAGTTCTCCCTCACCTGACTATTGACTGCCCCCTGTGGGCGACTGAGGGTGATGCTTGTTTTTAGATTAAGTTTTGACCAGAGGAAAATTT
GCTTGGAAAATGTCCACAATGCTGAAAGTGACACCTCCAGATCTGGACAAGCCTAACAGGCGAATCTAATGAGAGTTAAATCGGTGGCTCCACT
CTCAGGTCCCGTTGGCTTTCTTGGTATCCCTGATACTTCACAAAGGGATGTTTCATCCTGAGAGCTTTCCAAGTTCCTTAACAAAAGGGAATTG
TCACCCAAAGAGGCTGGTTTGCAGTTCCGGCCTCATAACTCTTTTTCCCTTCACAACACCATGTTTTATAAAATCGTAATTATTACTGCACAGA
AGTTATTTGCCGCCTCCTGTTTACTGTTGGAAATAAAACTGCTTTTGGTTGAAAGGATTTACACTAAGTGGAAAAATATATTGCAGATCATGAA
TAAAGTTTCCTGGGATTTTTTTTTTCTTTTTGGTGGTGTTATTTTAACGTTAGATCACATCCTGTCACCATGAAGCCTGAGCCATCAGTTTGAG
GCTCAGAATAATATTTTAGATGATGAAAATCCCAATGTTTGGTAAACACTTTGGCTTAACTTTTAGGGGGCCAGAAATATACATTTAGTGAGTT
CGTCTGGAAAGACAAATCCTATTATGAATGTAAGTTTGCCTTTTAAAAATAATTTTCATTATGATGTTGTCTTATATCATCTTGCTGGTTCGAT
AGGTTTTTCAGTTTTACAACAGTGAGTTTGTTAAGTGGAGTTGTTAAGTGTAAAATTCTTCACATTTTAAGTCTTATAGAGTGATAACAAAAAC
TAAACTGCAGAATTACTCTGTTCTGTATATGATTGATGAGTTTGGAGTTCCTTCAGCTGCCATCAAAATTCACACTGTTACTCAACCCGGTAAA
AGAAAAGGCTGTTTTGAAAACAGTCTTTTTTTTTTTTTAACCTGTAGATTTCATCTGGGGGAACCCCTTGGTTTTTAATTAGATACATTGTAAG
GTATTTTAGACTCCATGCACTCAGAGACAGAGAAAACAAGAGTAAGTAGGAGTCTGAATAGCCAGTGCCCTGGCCATGTGCTTAGTTACTCAGG
AGACAGCACTGTAAACACAAGCACAGCTTAGGTAGAGTAGACACGGGCGGGCAGCGTTTGAATGATTTGCAATTTATGTTAATCACAAAACAGT
TTGAGGGATGTCTCCTTTACCAGGTCTTGAAAATCTTCCTGATTTTTTTTTCCCCTAGTGCCATGGTCTTTAAGAGGTGATCACAACTATACTT
TGGAATGTATTCTGTCTTGGTTTTTTTATTTTATCAGACTACCAGTACTCTTGAGACACACTTGATTGGTCTGTTGTGTTCAGAAACTATTTAA
ATGATTTGCTATTTGCTATATGCCAGAGTTGGAGTGTGTATTTATAGCAAGGACATGGGCTCTTGTTCTTCTCATTGTCCTTAACATTGACTTT
TAAACTCAAGCATCAATTGGTTGGGAGTTTGCCAGATGTGTAACTTGTCACTGATCTAACAGTAACAGGTTCAAACATGCAGAGCAATAGAAAA
ATGCCAGGGCTCTTGGTGTCTCTGTGGATACTAGTAACAGCAAAACCAGTTTACAAACACTACAGCACCAGAATGCAGAAAACCTCATTGCGCA
ACTGTGCAAGGTTTTGTTTCTGTAGACTTTTAACAAGCTTGCTGAAGCGTTTCTGTCTGAGTTTCATAATCCAATAGTTTAGATCCTCTGCCTT
TGGCCCATGTGTGTCCATTCTTATTTCTGCAGCATCTACAGTAGCGATGAAGATGATGAAGACATTGAGATGTGTGACCATGACTACGATGGGC
TGCTGCCCAAATCTGGAAAGCGTCACTTGGGGAAAACTAGGTGGACAAGGGAAGAGGTAACTAGTCATTTTATCAAAACGTAGGGAAACTCTGT
AGAGTCTGTGATTGGTGAAAACTGAAATCTCGGCTAAGCTACATGTGCCCTTCTGAAGACTCTTGAAGAGGTTATCTTGGCATGCTGTACAGAA
TGCTCGTGTTCTTCTCTCCCAGTGTTTATTCTGCTTTCTGTTCCCAACCTGTTTATTGTTCCTTAAATGCTTTCTCCTTTTTCCTTTCCACTTT
GCCTGTCTGGTTCTCATTCTGGAACCTCACCATTCCCTACACATTGCCTTTTCTGTGAAACTGTTACTGGCCACCATCTTTAAGGCTGGATGCA
CCCTCCCGTGGTCCCAACCCCCCTGGGCACATGCTTGGCTTTATTGGTGTTGTTACATATTTGTCTTTCCCAACACACTGCCAATTCCTTGAGG
GTTAGGACTAAAGTATCTCTTCATCTTTGTGTTCCTCAAACTCAAAATTACTTGCTAAAATGTAGGATAGTAATGAATGTTCTCTGGCTAAAGT
GATGCTTTGCTATTTTCTAAGCTAAAGTAGCCGTAGAATTTATTGTGTTGTAATATGCTCAGTGAACATTCGTTACACATGATAGTCACATGAC
CTATGTATGTGAAAGATTATTCTGAAGAGATCCAGTAATAGGAGAAGATATGCCCACTTCTTTCTAGAGCAAAAATCATCAAAGTATGAAGAAA
GCTTTCTTCCTTCTCTACTGAACTGTGACCTTGATTGCATGCTAAAATCAAAGCTCCTGAGAACAGGTGGAAGCACTCCCAGGGAGGCACTTAG
GGAATGCACGTTCTGTCTGTCTGTCCTGCTCAGGCCCGTGGATGCTCCCTTGGAGTGTGAACTTCTGTTGTTAACCATGGATTCCCAGACTCTG
TCTGTTTTGTCATTATGTGTGAATGCAGAAACCTATGAAGACTGTGTTTACAAAGGTGTGCATGAGCTAGCATGTAGATGAGCGTATGTGCTGA
TGGAGCCAGCTTGGGAATGTCTAGCTAGTGTCTTCTGTGTTCTCATCCATAAACTCTGAACATATTGATGCAGATCCTTAATGGCTTTACTGCA
TGAAGTACACCTTCAAGTCAAATGTGTCAAATATCTTCTTCTTTGCATATGGAGAAGGTTGAACCAATGGGAAGCTGTCTCATCCATGGTCTTA
TCTTTCTCAGGGTTGAACGGTGACTAAGTTTAACGTTGGAATTCATTTTCCCCCATTTAGTAAGAGTGTTAACAGTTACCATCTATTAAACACT
AACACATGCCCGGCTTCACTGCTTTACATAATGGTATTGTGTAATCTCCAGATAACAATGTTGATACTACCATTCCTATCTTATAGATGACAAT
AGAAATCTGTTTATATAACTACTCAACAGCTGTGTCAAAGTAAAAGCTTTAGTGTGCCTGTGAGTAAATGTATGCCCAGACCAGTATATTACAT
TAATATTGGCTTTATTTGAGTGGTTTTGAAAGCTCCCCCCCACCCCCGATCATGAGGTTGGTTCCTTTTTTCATTAAACTTAGACAGAGCTGTT
CAGTAAACAAGTGATGCCTAGGATTGTCTTTACACACCTTAGGATGAGAAGCTGAAGAAGCTGGTGGANNNNNNNNNNNNNNNNNNNNNNNNNN
NNNNNNNNNNNNNNNNNNNNNNNNNNNNNNNNNNNNNNNNNNNNNNNNNNNNNNNNNNNNNNNTCTTTCGAATGGAAAAATCTCATCTGGATTT
AAGAAATTATTGGATAGTTTACTAAAATACTATGTATTTGCTCATATAGAGTTAAGAGGAAGAGAGCCATCCGTAATTTTTATATCTGACTACA
CAACATATAATTGAGGTTTCTAGAGTTACTATCCAGAGATTTTGATTTTTTTTTTCAACAATTGCTTCTTGTTTTGTTTTAAAATACCCTGATA
GTGTAAGTTAACATTCTGATGGGTTGTTCCAGGATAAAATTTTAAACTTGGTATTCCCTCCAAGTTAGCTTCTAAATTCTCCTATTCTCATCAA
CAGCCACATTTTTGGTGTGTGGGTTTAAAAATCTAGAGCGTCTTTTGTCTTATAGCCTCCCAGGTCCATCTCAATGATGAGTCGGGAGCGCAGA
ATTTCTTTACAGTCCTTCTCTTCCACTTCTTTCCTATGGTCTGGTCACAGGGCAGCTGCCCTGCCCTCTCTATCATAGTGGCTTCCTTCTTGGC
TTCACCATCTTGGCTTCACCACGTGTATTCTTTGAGCTTACCACCAGTTCCAAACACTGCTAGCTGAGGGAGCCTCCTAAACGGCAACTACTCC
TAACTACTCTGCTTGCCTAGGGTGTCTGAGTCCCTAGGTTTGGTCTCCTGCACCAATAAAATCAACAAATAAGCAAACAAACCCCCAGCAGTGG
TGACATAGGTTCTCACATGGCAAGTGGGCTACCTTGACCTGGCATCCAGTTTCTCTCCTATCTGGTCTCAACTTACAGTCCCACTGCCCTCTCC
CTCCTCTACCCGCTCTGTTTCCTGCTTCCTCCCCACAAGCAGGTTTGGCTGTGTTCATTTCTGCTTTTTCTCCTCTGGGCTTTTCTTCCTGCTG
ATTTCACCCCCACCCCCCACCCCCAGCATGTTCTCTCTTGCTTCTCCAGTTAAAAGTACTGAGCACCCTCCAAAGGCCGGATCATGAGCTCTCG
AATGCCTCTGAAGGAAGCAGAACCTCTTCTTTAAGAGTCCTTTTCTCCTCACCCCAACAGCACGTGGCTTAGGTCTCATCTTACAGATAAAGTC
AGCCTTTGGTGTAATCAGTTACATGTCCATCTTTCTTCTTCTAAGATTATGTCTAAGAAAGTGAGAAAGTTTTATTGTTTTCATTCAGTCTAAT
ACAAGTGTCTGTGGTCCTGAACACACAGAGAGGTTGAATGGGAGGCACTTCAGTTCCTTAGGATGGATTTTTATTGAGGCGTGGCCATGTGGGA
TCACTAATGCATCTTCAGCCACAGAGGTACAAACCACAGACTGAGGTTAACGATAAGTCACGTTGGCATCTATGTGTGTACTGTGATGTTCCTT
CTATGCACATGGCAGACCATTACCTTCAGGCTCCAATCTTAGATGCAACTTGGATACATTCTCTAGTCCGTGAGCAGTGTGGGATGGATAGGTG
GGCTCTCTGTACAGGCTTCTAAATGTTCTTAGATGTTTTCACTATGTATCATCCACATGTGATCCCTATTGAACAAAGCCTTCATGTGTTCTTC
ACGCCTTATCATCCCAACGCTGTGTACTTTGTCTAGAACCGGACAGATGTGCAGTGCCAACACCGGTGGCAGAAAGTGCTGAACCCTGAACTCA
TCAAAGGTCCCTGGACCAAAGAAGAAGATCAGAGAGTAAGTTCTGTCCCCATAGATGTGTGACTTGCAGTTAAGAATATTGCTAAAACAGGTTT
CTCACCCCAAGGAAGCAATTTAAATCTTCAAACAGGAAGTAAAGGGCTGGCTCCTGCATGTCCAGTGGATGAAAGCAGATTATTTCAAGATCTG
AAGATCTTGTAACATTGAGGCTTGATGACGCTGACTCTTTCCGTAACATTAAAACACAGATTATTTTTCTGTTCATCTGAAGGTCATAGAGCTT
GTCCAGAAATATGGTCCGAAGCGTTGGTCTGTTATTGCCAAGCACTTAAAAGGGAGAATTGGAAAGCAGTGTCGGGAGAGGTGGCACAACCATT
TGAATCCAGAAGTTAAGAAAACCTCCTGGACAGAAGAGGAGGACAGAATCATTTACCAGGCACACAAGCGTCTGGGGAACAGATGGGCAGAGAT
CGCAAAGCTGCTGCCCGGACGGTAAGACTTGGGCAACAAATATATTGATTGGGAAGAACCAAGGGATGGTCGCTAAACATTCTCTGTGTGTGAA
TGAATTACATTCGAGCAATTATAAGCATTTTGTCAGATAAACCAGAAACACCAACTTTTAGGAGCGGGCAAGAGCTTGGAGTTTGTTCCGTTGG
ACAAGGCTAGTGACACCTGGGTGGTGAGCCCCAGCCAAACCTTTCGGCTTTCCTCCACTGTTGCTCCTCCATTTGTGAAATAGCTGATTTCCAT
GAGTTAACGTTAGGATCAAGTGAAATGAATGTCAGGTATTCTGTAAGCTAAAGCACCTACCTGCCTAAGAAGGGAGTGCAGACACAGATTGCTC
TCGGGCTGAGGCCATCCAGCCAGTTCAGCCATTACTGGTCACTCCTCCACTTTAGCAATTTCCGTTTTCCTAACACCTGCATTCACCTCATTTC
CCATTTGATTACTGGGTGTTTTTTTGGTTTTGTTTTTCTGAGACTAAAAAAAGCCTGTATGTCTAGAGTTGTCACGACAACTTCAGGTTTTTTA
ACTAATCTCAGTGTTATGTCTTATTTTTACCAAACAAGGAGGGGAAATGACGCCTTTGTATAGGATAATTATGGAAACTCACCTTTGACCCACT
GTCTACACATATATACATTGATTTTTTTTTTTTAGCTATTTTGAGAAATACTTTCACTGTAAATTTTAAAATAAACAATATTAAAAGTATTCTT
ATTCTTGAGCTTTTTGACCCCAAAGTGGGGAAAGGATTGTTTCAGGATGGCTTATCTAGTATTTCCTAGTCTTGCATCAATGGGGTAGCTCCCT
CATGCCTTGAGAACTTTAAGAAGCCATGGATCTGGTCAAAGGAGGCCTTTCCTCCCATGTGGCCTCAGAGGATATACTGTTGACTTTTCTAAAG
ACTAAAGGGGCAACTGAACTTCCTCTTTTTTAAAAACACACATTTCCCCACCCCCATGGAAATAGTAAAAATGTTTTTACTTAATTTTTCTTTC
TTTTCCTTTTCTTTTTCTTTTTTATTTTTTTAGCTAAGAAACTTCCTGAAAATGGGAAGAGTTTAGTAAAAGCACCTTGCAGTTTGAAACTATA
CTAGGGGGTTGAATGTGGTAGCACATGCCTGTAATCCCAGCANNNNNNNNNNNNNNNNNNNNNNNNNNNNNNNNNNNNNNNNNNNNNNNNNNNN
NNNNNNNNNNNNNNNNNNNNNNNNNNNNNNNNNNNNNNNNNNNNNNNNNNNNNNNNNNNNNNNNNNNNNNNNNNNNNNNNNNNNNNNNNNNNNN
NNNNNNNNNNNNNNNNNNNNNNNNNNNNNNNNNNNNNNNNNNNNNNNNNNNNNNNNNNNNNNNNNNNNNNNNNNNNNNNNNNNNNNNNNNNNNN
NNNNNNNNNNNNNNNNNNNNNNNNNNNNNNNNNNNNNNNNNNNNNNNNNNNNNNNNNNNNNNNNNNNNNNNNNNNNNNNNNNNNNNNNNNNNNN
NNNNNNNNNNNNNNNNNNNNNNNNNNNNNNNNNNNNNNNNNNNNNNNNNNNNNNNNNNNNNNNCTAAGCCACAATGGAAGGGCTTTATAACAGT
GGGGACTCTAAGTTCTATTAAAGTCCAGTGGCACGTGAATTCTGAGGACCTACGCCTTTATCAAGAAATCAAAATGCTAAAATAAATTTTGCAG
GAAACTTGATACATCCCAAATCAGGTGAGCAAGAGAAGAGTGGCTTTTCAGTTAGGCGACAAGGTAGAAAAGATGAAGACAATTTAAAAGAGGG
AAAGAAAAGTTAGTGGAACCACAGCAATTAAAATGAGAAAATAAAAGTGGAACCACAGAAATTAAAGTATTTTTTGTTTGTTTTTTAAGAAACA
GTTTTCTGTTGATTGACTGTAATCTGAGTTAAAAGTTTTATAAAGTTTGTATATGGTACATTTCTACACAGGACTGATAATGCTATCAAGAACC
ACTGGAATTCCACCATGCGTCGCAAGGTGGAACAGGAAGGCTACCTGCAGGAGCCTTCCAAAGCCAGCCAGACGCCAGTGGCCACGAGCTTCCA
GAAGAACAATCATTTGATGGGGTTTGGGCATGCCTCACCTCCATCTCAGCTCTCTCCAAGTGGCCAGTCCTCCGTCAACAGCGAATATCCCTAT
TACCACATCGCCGAAGCACAAAACGTAAGCCACTCCCGAGAATGTAGAGGGAGAAGAGAGGTGGTTATATCACCTGGGGTCATAAAAATACTTT
ACAGTTGTGTGCTTTGCATAGATGTTGTACAAGCATGGTCACAGATGGAGATGTGTCGATGGCCCTCAGCTAGACCCACTGTGTGAGGTAGGAG
ATGGCCCTCAGCTAGACCCACTGTGTGAGGTAGGAGATGGCCCTCAGCTAGACCCACTGTGTGAGGTAGGAGATGGCCCTCAGCTAGACCCACT
GTGTGAGGTAGGAGATGGCCCTCAGCTAGACCCACTGTGTGAGGTAGGAGATGGCCCTCAGCTAGACCCACTGTGTGAGGTAGGAGATGGCCCT
CAGCTAGACCCACTGTGTGAGGTAGGAGAAGATACACTTGGCTTCCGTTTCTGGAAACAAGAATGAAAAGGAATTTGTCCATCACATTGAAGTA
GTGCTGAATAGAACCAAAGTCGTCTGATTCTAGTTTTCTGCTCCAAACCTGATTTAAAGATCGTGTTTTAATGTAAATGTACTTGTATATTGCT
AAATCTTAAGAGTAGGTGAACATAGATAGATGCATAGTCTGTTAGCTTTCTTTTCCAAAATGAAAAATTGATGTAATATTACATTTAAGGTCAT
AAAGAGGAGATAGCTAACCTCTGAAACATGAAAGGAGATTATAAGTTCAATTCTGGCAATGATCTGAAGAAAATGAATTGATTTATATATCCAG
GAAATGTTTACTTTCTTACTCAGAGTCAAGGGCTGTACTGTGATATTAATTTGGTGATGTGCTCCTTCATCCTCGCTTGGGTTGGTATCATTTC
TTCCTCATTTCTAGACATTCATATCTAGCGAAAGAAATCGCTTACAGTACATGGGAACAAAGTCTAAAGAGGAGAATATCAAGAAATGCTTATC
ATCGAGCTGATGCTAAAAAATGACAAAACTCACCCAAGAATCACAAAGACCATATGCAAATGTTATGTAAAACATATGCATGTGTAGTTCTCAC
GTGGCTCTATCTGTTTCTTAGATTTGACTACAGAATTTCCAGAAAGGTCTCCAGTGAATGAATTATCATAAAAGTTTCTGTGCTTTTTATTAAA
AGGAACATTATTCTAAGAAAAGTACCCCTAGTGTACTTTTTTCACGCATCCCACGAACACTTTCCCGTTGTTCCTCTCTCCAACTGAGGGATGT
TTTCTGTTGGGATAGGCAGACTCTTTGGGCCTCTCTCCCTGTTTCTTGAACTAGTTAGCCATTTTTAAGTATCTGGCTAACTTTCAAGTTAGAG
AAGTTTTTGTTTTTGTTTTATTTTAATCATTCCATGAATTTTATCAACCAAGTACTTTCTCCCTTGGTCACAGAGCAAAATTTTAGAGAGCTGA
ATCCTCCTGGCGCACTTGTTAAGTAGGAATGACTTAGTCTTTGTTTTCTTTTCCTGGTCTAGATCTCCAGTCACGTTCCCTATCCTGTCGCATT
GCATGTTAATATAGTCAACGTCCCTCAGCCGGCTGCGGCAGCCATCCAGGTGAGATCATCTGACGGGCAAACTCCTTAGCTGAGCAAGGCACTG
CTTTTAAAGAATACTTTCTTTCTACACACACACATACCATGTAATAGAAAAGCTAACAGCATTGCCAACCTACTTTGGGCTAGCCTTTATTTAC
CCTTGGTGGCTTCTGGAATTTTCTGATGCATCCATGAGCAGGTGCTCTAGCCTCTGCCTTACCCCTTGTTGCCTTAAGTCCCGTATCACTTTGA
GCAGATAGTGGTGAATTCTGTGGGGTGATTCCACATGGAAGTTCTCTGGGCTGTGTAAGGTACCTCTCCCTCAGACCTTGTCTCTCCCTGCTTC
ACTTGAAACTCTAGAGACACTATAACGACGAAGACCCTGAGAAGGAAAAGCGAATAAAGGAGCTGGAGTTGCTCCTGATGTCAACAGAGAACGA
GCTGAAGGGACAGCAGGCATTACCAGTAAGACTGTGACCTTGGGATGGGTGGCTTCGCTCAGTGCTCTTCTCTCTCCTCCTCTGTCTCCTTTTC
TAAAGACTGTCTCATCCAAGTTCTGTGTGTCCGCTAACAATGCTCAAACAACAGAAACTGCTACTGATGACTGATAAAAGTCTGTTAGTCTCAG
AATGTGCATTGAGTGACTGGAAGTCACTGTTTTAGAATAGGACCACAGTACCCACTTGTGACTGTCAGGATCTCCATTGTAACAAAGCACAAAG
CTTTGCCTGCTTGTTTGATTCTTTTACTGTTATCCTTTTAACCTGGATTTACATTTCTTACAATCTCAAATTCCATTTGAAGTGTATTTATTAT
ATACATGTTTTTTAAAAGGGATCTATACATAAGCCACTCTTTAAATGTTTGCTATCTTTTATTTGCATGTATGAAAGCTCTCTGATCAGTAGTG
ATAAGGTGTTTGTGTAAACACATATATGTTCCCATAGATATGTGTATATATGCGTGCAGATTTCTGTGCATACATGTGTCCAGGCCAGAGGTTG
ACACCAAGTGTCTTTTTTGATAGGTTTCCACATTAAAAAATGTAGTTGTATGACTACCACTCATAAGGTACTATAAGATATATGTTGAAATAAA
CTCTTTCCTCTCAAAGAAAAAAAAAACACTAGTTGTAATTGTGTATGCATGTGTACATGTGCTTGTGTGCACTCTTGGAGGTAAGAGGACACCG
TTCCAGAATCAGTTCTTTCCTTCTACCGTGGGCTCTGGGGATCAAACTCCTTTTTAACTGCCTAGTCATCTTGCTGGCCATCCAGCTTATATTT
TGAAATAGGGTCTCATGAAAGCTGGAGTTTGCCCATTNNNNNNNNNNNNNNNNNNNNCCAGTGAGCTCGAGGGTGTACCTGTCTCTCCCTCTCC
AGTGCTGGGGTTACACAATGGAGCTGCTGTGGGTGCGTGGAGATCAAATCCAGGTTCTTACGATTGCATGGCAGTCTCCCTTCAGAGTGAGACA
ACCCCCTCCCCTTTTTTTTTGTGCTGACAATTGAGCCTAGAGTCTCAGACATGCTACATTGCACACACACACACACACACACACACACACACAC
ACAGGATCCAGCTCTAGCTCTTGTATAGACCGTTTCTGAATCCTTGAATGGGCAGCTCACGGAAAAAGCAAACTTTGGAGTTTTGGTAGTTTAG
CCAAGAAGTGAGTATGTGAAAGGTGATACCCACTAGCGATTCTTCAGGTGAAATGTTCTTTGTTGTTGTTATTAAATAATAAAATAATGTACTT
GTGCTAGTTCAACCACTTTTGAACTTTAGTTACTATTTTGCAATTTCTTCTCTTGCATGGACATGCTGTAAGGGGACTTCTGTTAACTTGATCT
ACTTTCCCAACCACATATACTCTGCAGCTCTAGCTTGCATCAGTGCAACCTATAGCCAAAAAAAAAAAAAAAAAAAAAAAAAAAAAAAAGAAAA
GAATAGAAGCAACAGGATATGTACAGATAGAAGCAATTCTAACCCTTGAATGCTTTCAAGGGCTTAACATGCAAATAGGACCATTCTTAAGTCA
TAGCAATGGGGAACTGTTTTTAAATTAAACTCCAATGGAATTCTAAGACATCTAAGACTTGTATTTTGTAGCAGTCCCAAGGTTTAACATTTGA
CTAAAATCTTAGCAACTGAAGCAATCCTCTAGGTATAAATTGGAGAGCTATTGCAAAGCTGTCAAAAAGGAAACATCTTGACAACTGTCTGGCA
GGCTTGAGTTTTGGATGAAGCAACCACTTTTTATCTTGCCTCCAACAGCATCTGATACCTTGTGCAACATAGTTGCTAAGTTTCTTCTTCCTTT
CTTCTCTCCATCCTTATTTCTACACACCCCCTTCCCCAGACACAGAACCACACTTGCAGCTACCCCGGGTGGCACAGCACCTCCATTGTGGACC
AGACCAGACCTCATGGGGATAGTGCACCTGTTTCCTGTTTGGGAGAACACCATGCCACCCCATCTCTGCCTGCAGATCCCGGCTCCCTACCTGA
AGAAAGTGCCTCACCAGCAAGGTGCATGATCGTCCACCAGGGCACCATTCTGGACAATGTTAAGAACCTCTTAGAATTTGCAGAAACACTCCAG
TTTATAGATTCTGTAAGTAGAATTGCTAAGGCACGTTGATGTTTCTGGAAGAGGAATTGAGAATTGGTATAGCATAAATCATTGCCATTTTCTA
TAGCAAATACGGTTTGGTCCTACATTCATGTAAAGTGAAAGACTTAGCTTTTACGATTCCACTTCTCTCAGTGGTCTTGATTTTGTAGGCTACC
CACCCAAAATTGTTTGCCTTCCAGGTGTGAATTAATGAAGTTCTGACTTACCACAAAGGGCTCAGAATGAGAGCTGTGTCTGAACTATTTTAAC
AAATTTCTTATATATTTTGCTTACTTCTTTGTGATTCTCTAGAAAATTTCTTTGTTGTTTTGGTTTTGCTTGCTTTTTGTTTTGTTTTGTCTGT
TTTGGGACAGCACATTTGGACTTACGTTTCCTCGTAACCTTAAGCTTTCAGTTCAAGGGTGGGGCATATAGATCTCTCTACAGCATACTGTAAA
TTGATTGACAATCATAGTAACACCAAAATAAACCATCTTGAACCATCTTGAGTGAAACAAATTTGAGTTCAGCAGTCACTCAGTTCATTTTCTT
GGTCTCCTAATTGGTTAAAAAGCACTTATTCCCTTCACACGGGACAGGGCCAGCTATTGCCATAATGTATCATCTAGAAATGTTTTCTGTTTGC
TTTAAATTGCATGCAAAAGAGAGTGCCTGAGCTCTCCACAGCAGATGTGCAAGACAACCCATGCACCGCTGTAATCCCTGAGCTAGAAAGCAGG
CAGGCAGGCAGGCAGGCCCAGCGTTTTCGTCCATTGCTCTTTCAGTGCTGTGTTTGGGTGATGGTGGCGCTGTCACTTGCATACCATCTCAGAA
GCTCTGTGCCTCCCACGTTGTTTCAGGATTCTTCGTGGTGTGATCTCAGCAGTTTTGAATTCTCTGAAGAAGCGGCAGCTTTTTCACCTAGCCA
GCAGCCCACAGGCAAAGCCTTCCAGCTTCAGCAAAGAGAGGGCCATGGGACTAGATCTGCAGGAGAGCCTAGCCTGAGGGTGACCAGGCGAGTG
CTGAGCGAGGCATCCCTCGGCCCAGACTCACCCCAAGCGAGGCACAGCAAGGTTCCGCTGGTCGTCCTACGAAAAAGGCGGGGCCAGGCCAGCC
CCCTAGCCGCTGGAGAGCCTAGCCCCTCCCTCTTTGCTGACGTCATCAGCTCAACTCTCAAGCGTTCCCCTGTCAAAAGCCTACCCTTCTCTCC
CTCGCAGGTAGAGCACAATTTCTGCACAGCTGTTACTAATTTTCAGCATACACCCGAGCCTTAATAATTAGAAACTAATCTAAATTTGAACAAA
TGACTAATGACTGCCGTCCTGGCAGATTTAATTCCGCGTTCAATCTCACTGGGGTAGAGGTGGCTAGCTTCCTGGCATTTGGGCTGACACACTG
GTGATTTTGTCGCATCTCTTTCTCTCGAAGTCTTGGTGTTTTGGAAAATGGACAGAAAGTTGCATGGGATGTGTTTCCATTTCCCTTTTCACTA
CATTTCCCTTTTTCCGTCCCTCCCCTCTTCTCCCTTGTCATCCTTGCCTCTTCACATTTTAACACGATGTCTGCCTCTTTGTTCATTGACTACT
AAGTGATTTACTGACCCTGGGGAGGAGGGAACCAAATTATGATTACATAACATTTGGATTACAACTAGAAAATGAACCACTATGCCCCTTTTCT
AAGTGAGGATGTTTACTGAGATGATGAAAAAGAGATGCTTCTGCAAAATAATTTAACATTTTCAACACTGGGTCTTTTAAATTCTGCTATGGGA
TTTTGCTAAGGTACCGTTTTCCAAAGAATACCCTTACTTCATATAGTGTTCTTAAGGTATATAACACTATAATGCTTAGCAGAGCCACGTGCTT
TCCAAATTATAATTAAGAGACAATTTGGCTCCTTAAATTTTTTTCCCAATTATATCCGTTGAAGATTTGGTACTTTGTTTTACTTTACTTCATT
TTAGTAGTAGTAGTAATAGTAGTAGTAGTAGTAGTAGTAGTAGTAGTAGTATTGTGGTTCTTAGAATCTAACCTGGAGCCTCATGTGTGCTAGG
GAAGTGCCCTACCACTGAGCTATACATATTTCTGGACTTGTTTTTAAAAGAACTTTAAGTATAGACAAATGATCCCCCCATTCCCCAAAACAAT
TGGTCTCCACCCCCCACCCACCCCCATATTTTCCTAAACCGTGTTTTGTGAAATCATTTCTGCAAGATAGATGTCTCAGGGAAAAGATCTAGG
TAGACATAAACGTTTGGGAAATGCTAACTCGGGCTTTAAACGGCTTCTTTACCAGAGGGTCCTTCAGGCTTGGCGTTTGTTTGGATTTTTTATT
CTTTAATTTTTCAGAATGCAGACAGTCTTTTATTCTGCTCAGCTTGCCTTATGCTCCTGAGTTCAAGAGGCGCCCTGGCTTCTGAGTGACTGAC
TGCAGGCAGCAGCCACTGCTCCTGGCTTCCCTGAGAGCGTTGAGTGTGCTCATCAGTCTACCCAAGAGATAAGATCCATTGCCTTTCCCAAACC
TGTGTTACCCTGGGAGCGTCAGGATGCTGAGAGACAAACCTTCTTACTGGATAATTTCCCACATCACGCAAACCTTACACAACAACAGTCTGAG
TTATTAGACCATTAAACCGAGAAAACCAAATATGAAAGAAAAAGAAGATAACCTTTTTAATGTTGATCAAGAGCACATATCATTCTCTTAAGTG
ACAAATGTCATTTACAGAGAAGATTTTCTTTGAATTTTGCAAGGTTTGAAGCTTTGACCCTTTAGATGTTCTTTCTTATAAATCTCTGAACCTT
GCCTAATCAGGTGGAATAAATCAATATCCTTGCCAACACTGAAAGATTGTTAACGTTGTCGTAGTTGGGGTTGTGAGTCAGTAGAGGACACTTG
CCTGCCATCTGGGTTTGGCTTCAAACTGCATGATCACAGACTCATTATTTAATCAGTTTTTCTTTCTTTCTTTCTCTCTCTCTCTCTCTCTCTC
TCTCTCTCTCTCTCTCTCTCTCTCCCTTCCTTCCTCCCTCTCTCCCCCCTCCCTCCCTCCTTCCCTCCCTTCCTTTCTTCTCTCCCTTCCTTTC
TTTCTTCCATGTTTAGTTCTTGAACACTTCCAGCAACCATGAAAGCTCGGGCTTAGATGCACCTACCTTACCCTCCACTCCTCTCATTGGTCAC
AAACTGACACCATGTCGAGACCAGACTGTGAAAACCCAGAAGGAAAATTCCATGTAAGTCTTAGTTCAATAAGAAAAATGTTTATTTTATTTAT
TTATATTAATTAAAATGTCTGACCCCCCCTTGTATGTATATAATGCATTCACTGTATGTATCCTATGCATTCTCATAATGGATACATCCCAAGT
AAGTTACAACCAACCAGGGAAGAAAGTAGAGAATAATTACCTTCTGTAGTACATTCTGATGTCTTATGTGCATGCACAGGGAGTTTCTGTACCA
TTCCCCACCCCCCACCGGCCAGGTTTTTCTTTCCACTGTTTTTCAATATCCTTACTAAAAACAAACAAAAGAGACTGAAGCATTCAGAATAAAA
TTGAGAATGGTTCATAGTTTATATTTTTTAATCTTATTTTTTCTTTTTGTAACAAATACATTAGGATCTTTTTGCATACTCACAGGAATGAAAA
ATAAAAACAAAGTTTTAGACATAGCGTGTTTTGGCCCCGTTTGAGGGAGCAGGTGAGACTGGTTTACAAATGATCCCAGATATCACGGTGCTAG
TCACCATTATACAGATCCAAGGCCATTACCTATGCCTCAGGCTCATTCTCAAAAGGTGGGAACTACTTCAGAGCTCTTAGTCTCAGGGCACGAT
AGTTTGAAGTATTTGTAGATCTGCAATCTGGTTTAATTCAGATCTACAATCCCTCAATGAATGCATTTGGCTAATCAGCATTGCCCTTCCTTGT
CCGTTGCAGCCTCTTAGTGTCCACGCTGACGGCGTCATACGGGATACATGTCTTTTTATTCTCTGCTTCTTCTCTTCTTTAGCTTTAGAACTCC
AGCTATCAAAAGGTCAATCCTCGAAAGCTCTCCTCGAACTCCCACACCATTCAAACATGCCCTTGCAGCTCAAGAAATTAAATACGGTCCCCTG
AAGATGCTAGTAAGTTCAAGAAAGGTCCTTAGATTTAGTGGGCTTAGGAGTGTAGACAAGTTTCCTCTGATCTGGAAATATCCACTCTTCCCTT
AGCCTCAGACCCCCTCCCATGCAGTGGAGGACCTACAAGATGTGATTAAGCGGGAATCGGATGAATCTGGAATTGTTGCTGAGTTTCAAGAGAG
TGGACCACCGTTACTGAAAAAAATCAAGCAGGAGGTAGGTCGCCCTCGCTGCTTTGTGCACTTTGAACTGTTTGACATCACTGCTAAGGAACAG
TAACACTTGTCATGCAAGACTTTTGTGCAAGCAAGTTGAAAGGCACTGTCATAATGAGGACTTCAACCTTCCATTTGGAAAGTGACTTCCATCA
ACTTCTTTAGGCAGAAAAGATGCTAGAGAGGGGTAAAGGGAAGAGGGGGCAGCGGGCTTATACTCTTCTTTCAAAATTTATTGACAACATAGTA
TTAATCGCACATATGCAAAGAGAAAGACTCCCAACCCAAATCATGACCACATTAATTAGAGCAAGCTTTTTTGTGTGCACAGGCTACTTCTCTG
TAAGTCAAGAGATTAGCATTGGACATGGGGAAAATAAGGGTTTTTGTAGTTCAGGAGTAGAGGGTTTCCAAATGGGGGTTTTGGTAGGCAAAAA
GCCAGGGCTACAGGAGCCAAACATAAGCATCACAAATTGTTCGGAACAACCTCGTAGAACAAAAGCATAGTTAACAGGTGGTCATGACAAGGTG
ATCATAACAACCTTTGAAACACAGACATCATTGCCATGTCCTGGAACAGGCAGTACAGAGCCATTTGTAATTGAGGTTTCAGATGGGGCATAGC
CCAATGCTTGAGAAACAGAGGTTTAATCATAAACAGGAATGGATCTAATTGGTCTTTACTTTAAGATGGCTTTCAAGCCTAAGATGGAGGCAGG
TGAATGGGCAAGAGGATGGATAGACAAGCAGTCAACAGAGAAACAGATTCCAGATTCATTCCTGTTGTCTTTCTAAGGACTAAGAAATAGTTTA
TTATAAGAGTGACCATGCCCAGAGAATGTAGATTCAAGTTACCCTGAGTGGTATGACCCGTTAGAGAACAGGAGTTTGCAAGCACAAGAGAATG
AAATTTTAGCCATCAAGAATCAGTGTTAACTCACTAGGGAGAGGCACTTGCAAGGAGGGTGAACTTCCTTTCATGACGACTTTATTTTTGCAAG
AATAGGTAGCAATTTACACCTGAGAGTAAAGGTCTCCAGAAAGTCTTTCTTCCATACACAGCACTTCCTGTTTGCTTTTAGGTGGAGTCGCCAA
CTGAGAAATCGGGAAACTTCTTCTGCTCAAACCACTGGGCAGAGAACAGCCTGAGCACCCAGCTGTTCTCGCAGGCGTCTCCTGTGGCAGATGC
CCCAGTAAGTATCAGGCGGATCTCGGACTCTTCTGTGATCACGTGGCCACAGCGTCCCGCGTGTGGCATGTGGGACCCCATGCCTTCAGCACTC
ACTCTTAGAGCACCTGCTTCCTAAGTATTCACAGCCACATGATTCTTTTTGCATTTGCATTATTTGTCTTCTAAGTGCTGTGTTTCCTCCTAGT
TAAGCAGTATGTTGTGTGGTTCCATGTGGTATCTAGCATAGAGTCAATCATGGTGTGTACCAAATATTTGGCATGCTAGGAGCCTAGTCAAGGG
GTCCTTATGGAGCCACAGGAGAATGGCCCACAGGCCAGATTCTCACGTTCCACAATTATAATGGCATGGTATTTGCATATAACTCATTGGGTCC
TCCTGTATACTTTACATTAGCTTTAGATTAACTCAACTCTCACATTGTATAAATGTTGTGTTAACAGCACTTCACCGTCTTAGTGTTTTGACCG
TGAATCCGGATGCAAAGTGGAAACTCTGTCACCTTGCTCTGGTTGTCACAGTCTAACAGTCTGTGGATAGCGTCTCCTACATCTTATGGAAAAC
CAGAGCTAGTGAAAATTGTGAATACTTACTCAGTGTGTTAACTGTTAATTATCATTTCAGGGACTTTAGATGAATTAATTCCTGTAGTCCTCAA
AATAACATTGTAACATTTTCACTTTCATTAAAGCAACTGCAAGTTGGGTAACTTAGTGATTTGGTTGCTCAATATTATATACTTAACTTAGTGC
TGCTGCATTAGAACTTTGAAAGTCAGCTCATAAATACCACGCTTTCACCATTTGTAGTTGATGTTGCCGTAGATTTGTAGACGTCAAACACTTC
TGTGCCGATATATACAACATAAGATGACTCATTAGCACATCTCTTAGTTAGAAGAATGGATTGGTAAATTCATTTAGTAGATAGCTAGGACATG
CCACATGCTTAGAATTAAGCGGTGCCCTACAGTGTTTTCACCATTTTGGTGATGTTTGCAGCAGAGAGATGAGAGGCCTGTGTAGAGTTGGCTC
CTTTCAGCTCCCAGAGAAGGTTAATTTCTGGTGGATACTTGCTAATGTGTGGCATTTCACAGTAATCTCTCTAGAGTTAGGTCTGTATTCGCTC
TTGTATTATCCTGCCTCACTTAAATGATTCCTTTCCCTTTAGAATATTCTTACAAGCTCTGTTTTAATGACACCTGTATCAGAAGATGAAGACA
ATGTCCTCAAAGCCTTTACCGTACCTAAGAACAGGCCCCTGGTGGGTCCCTTGCAGGTAATGACTGTTCTAACATTTGGTGTCTTAAAATTTTT
TAACTGAAAGTCCGTTACTTTGCGTTGTTTTTAATGTTTTATACATAAAGGAATGATACTTTAAGACAATGTCTTGATGTCTAGAAGTGAGCCT
ATGGTGTTTTGTTACTAATCATGTGAGACACTGGAAATTCTTGTTCAGTCGGGGGCCCCCAAACATGATGAAGTGAAACATTTTTTTAACTGTA
ACTGAGACTGAGATCATGTGTTGCCCTAGGCTGTGACAGTATCTCCTTCTGCTTTTAAACAATCTTTAAAATATGTATCTGTGTAGTTTTTTTT
CAGAATGTAATTATGTATGCTTTATCATTAAGCAACCAAGGCCTCAGAGACTAAATTTCTAATAAAATGGGAAATTAGCTAGAAAATAATTGCA
ATGCCTTTGACTCTCAGAACAAAAGGGCAGCCCTCAGTGTTGGTGGACCATCTGCCGTCAAGTTTTAATATCAAAAGAGATTTCCCTTGCAACT
CTGAGGTAGATGTGTATTGATGAAATACAACAAATTCCAAATTAATCCTGAGCCAAGTGTAAATAAGAATGCAAATTTGTTCCCTCAAATTAGT
TGAAGCAGTTCCCAACATTAAATAGCGTAGCACCTGGCCAGCTGCACTTCTCTTCCCTCTGTTCCCCCATTGTTACTCAGGGGGGAAACTCTAC
CAAGCAGAGAATAGCCTGGCTAGAAGTAAAAAGTACTATTTGATGCTGTATGCTTAAAGGCAATGTAAAAGATAGTAGCCTTTGAGAGCTGGCC
TCTCTGTTTATAGGGCCGTCTTGCCACTGATATTCTGTCTACCCCAAGTTGTGAGAATCTTAAAGTCTAACCTTGTATTATTTGCTATCATTTA
AAATGTCTTTGTTAATTCTTTGAGGATTTCATGCATTGTGTTTTGATGACATTCATCTCCAAGTCCTTTCCTTAACTCTTCGGACACCCCTGGT
CTCCTACTTCTTGTCTTCTTCGTCGTTGTTTTGTTCAATAACCTACTGACCTAATTTGTGCTACCCATAATACTCGAAGCAACTCACTGTAGTA
AGCTCAGCCTGCCAGGAGTCTCACACTCTTAAAGAAAACTGACTCACCCTCCCCCAGAAGCCACCAACTGTCCATAGGTCTGCAGTTGAGGGTA
AGGGTTTATAAACCCCTCCCACATCATCGTTGATTGGTCTTGTGTAGGCTCTGTGAGTTTGTGAATGCCGTGGTCCTGTCATGCCCAGAAGACA
CTGATTTTCTTCATACTTCCGCAGTCTCTGACCCTTAGAACCTTCTATCCCTCTTCTAAGTGTTGGAGAGAGCTGTGATATGGATATTACATGG
TGGCTGAGGACTTCTCAGTCACGTGTTCTCTATGTTTAATAACCTATTGACTACAGCAGTGAGTTTCTGCTTTAGCCATCATCCAGTAAACCGA
GAAGAGTATCTGATGAGGTCTAAGAGCTTCACTAATATACAGGTGAAGAGATAGGAATTTAGAAGATAGATTAGTATTGTTCCCATTTAGCAAA
GTAACAGTAGTAGATTTACATATGGGGCCTATGAACTGCCTAGCCATGGGTTCTTGGCCAAATTTGCAGGCATATGCTAACTCCTATGAAGCAA
GTCTTAAGTTTAAGAAGAAAACGGTTGGTTGCCTCTCTGACGTTTGTGCCACCGTTGCTGCCATGGGCATATCTTGTCACGGGGGTCATTATTG
AGGTTCACAGTGTTCACAACTGGGTAAAACTGATTGGAGCTCTCTGCCCTGTCAGCAGCCTTGCATGATGTCTTCTGGTATTGTGAAAACTAGC
AAGGATGGAGGACTCTTCCTGGTCAGTATGAATCCAGAGAGGCAAACATACCATGTAGATTTTATTGCTGAATCTTTGTATTTGTGTGTTTAAT
TTGGATGGTCGGTATAATCGAGGAATCTGGAAAGGGTTCATTGGTGGGGAAAGGGAAGAAAAGATCTTAAGGAGGGGAATGGTTAAACAAAGAG
GAGAAAATGGGGAATAATGGAAGGGAGGCTTAAGTGTGGGGGATGAGAGGATAGACTAGAGGATGGGTTAGGAGACAGACAACTAACACTGAGA
ATATTTGGAAAAGCCACTTGGAATCCCACTATTTTATAAACTGTATAATAATGTATCCTTTAATTCATCCTACAAAGGGGAGTATGCTTATTTT
AGAAGCTATAGAATAAAAAGCCCAGTGCTAGGTTCAGGGTACCTCTCCACTAGTTGTTGGTCAGAGGTGTCCTAGGAACCCTGAAACAATACAG
GCTACTGCCATTGCTCATGGTATTAAGACTCTGTTGCTGAAGACACCACATGCTTCAGTCACAAGACATGGAGAAGTCAACTTGGTATTTGCTG
TCACCTTTTAGGACAACTGGATGAACTGTAGGCATGGTTATTTCTTAACTCAGTTGGATTGGGTCCCTGTAGCTTTCCTCAGGTACATGAACTG
CTCTGATGAAAGGTGGGTGGGCAGGAGTACGGAAGAGGAAGACCAATACACCAAGTCAGCTCTTAGGGCAGTCAGCCTTCTCTTGCCCTATGTA
GAGAGAACTCAGAATACCTCAAAGATATGGAAGGTAAAGAAGAAAGCACACTTCACCCAGGTCTAGTGGGATACAGGAAGGGGATTCAAAGGAT
GTCAGAGCAAAGGTAGCTATTTAATACAGTACTGATCCTTGGTGGAGAGGAAACACCTTGCTTTTTAATTGGCCCTTTGGTTTCCAAAGCATAG
AATTTGACTAATGCTGTTTGTATGTTAAGCTACATAAGTTTCATGCATATTTTATAACCTAGCCCGATATTCAGCCTATGTTTATTGAAGTATA
AAGTGTAGCCTGACATGAGGTTGCATGTCTTTAATCTCAGCATTTTGGAAGCAGAGGCAGGCAGATTTCTGGGTTTGAGGCCAGCCTGGTGTAC
ATAGAGTTCTATATACCAGCACAGGTACATAGTGAGAACATGTCTTTAAAAATAAGACGAGAAAGGAAGGAAGAGAGGTAAAGAAGAAAGAAAG
AACATTCAGAACGTCAGAGTAAGCGTGTGAGTGTATTTGGTGGCAGTAATCATTTCATATATTGAAAACTCATGACTGTGCACCTAAAATGGAA
TCCTATCAGTTTCCAGCTTTACCATGCAGTGGTTTAGGCCTAACTATTCAGAGCTGAACATGGGCTAGCACTATTTTGCTATATTCTTCCTTAC
CTGTGAGGGTATAGTTTTTTTCCCCTCCCCACAGTGGTACCTGAATTGTGGCTGATATCAAACATTACATATATGATGCTTTTACATATCTATC
ATAAAGTCTAATCTATAGACTAGGCAGTAATGAGATACAGAAGTATGATAATAAACTGTAATATAAAGCATCCTAATCCTATGAGTTGTTTATT
TCTGCATCTTCTGACTGCATTTGCCCCAGGTAACTGCACTACAAAATGCTGAGACTGGTGCACAGGGAGATCCACTGTTTTTTCCTGTACTGGG
AGCTTTGTTTGTTGAAGCATAATGCCATTTCTAGTGTTTCCACCAATACTTCAATTGGATCTGATTAGGCAGATCTTCCATATGTGGTATTGGT
GAGCATACTGTTCATTTATTAAATAGTCTAACTTGGATACTTTCTTTCCCTTTTACTATGAAATAAATATCTGACAAAAGCAAATTAAGGAAGG
AAGGGCTTGTGTTGGCTTGTACGTCGTTGGAGGGTGCCAGCCATCATGGCGGCAGGAGCTTGAGGCAGGCAGCGGTCACATCTCCCCCAGGCAG
GAAGCACAGAGCAATCGACACTACTGTTCAGTTTGCTTCCCCCTTTTTATGCAATCCAGGACCCCAGTGCAGAGAACAGCACTGCGGTGTTTAG
AGTATGTAGTCCCAGTTCAATTAACTAGTCACGATAATCCCTTACACATACTCCCAAAGGCTTGCCCCTGGAAGTGACTCTATTTTGTCAAGTT
GCCGGTCACTATCAGCCTTCTCACTGAATAAAGAACATTTCATAGAATCTAAAACTTTTCTCATTTGTACTTTTAAGATAAATTAAATTTTCAA
TGGATCTTTAGCCAAACCATTTGGATATTCTTGACACTGCATAGTTTTTCGTTATTTTGGTTTTATTTTCTTGAAATGAGCTCTTACTATATTG
TGTAGCCCAAGCTATCCCCAAATTTGGGACAATCCTTCTGCCTTGGCCTTCTGAGCTTTGGGATTGCAAATTGAAATTCACTGTGCCTAGCTTT
TACCTAAAACAACAAAGCACTATTCCCCAAATATTTTACAAGTTGACTGTTTTATAAAATACAAAATATTTGCCACTTTTCTAGTGTAATAAAT
TGCAAATGTAATTAAAACCAGTTTTAATANNNNNNNNNNNNNNNNNNNNNNNNNNNNNNNNNNNNNNNNNNNNNNNNNNNNNNNNNNNNNNNNN
NNNNNNNNNNNNNNNNNNNNNNNNNNNNNNNNNNNNNNNNNNNNNNNNNNNNNNNNNNNNNNNNNNNNNNNNNNNNNNNNNNNNNNNNNNNNNN
NNNNNNNNNNNNNNNNNNNNNNNNNNNNNNNNNNNNNNNNNNNNNNNNNNNNNNNNNNNNNNNNNNNNNNNNNNNNNNNNNNNNNNNNNNNNNN
NNNNNNNNNNNNNNNNNNNNNNNNNNNNNNNNNNNNNNNNNNNNNNNNNNNNNNNNNNNNNNNNNNNNNNNNNNNNNNNNNNNNNNNNNNNNNN
NNNNNNNNNNNNNNNNNNNNNNNNNNNNNNNNNNNNNNNNNNNNNNNNNNNNNNNNNNNNNNNNNNNNNNNNNNNNNNNNNNNNNNNNNNNNNN
NNNNNNNNNNNNNNNNNNNNNNNNNNNNNNNNNNNNNNNNNNNNNNNNNNNNNNNNNNNNNNNNNNNNNNNNNNNNNNNNNNNNNNNNNNNNNN
NNNNNNNNNNNNNNNNNNNNNNNNNNNNNNNNNNNNNNNNNNNNNNNNNNNNNNNNNNNNNNNNNNNNNNNNNNNNNNNNNNNNNNNNNNNNNN
NNNNNNNNNNNNNNNNNNNNNNNNNNNNNNNNNNNNNNNNNNNNNNNNNNNNNNNNNNNNNNNNNNNNNNNNNNNNNNNNNNNNNNNNNNNNNN
NNNNNNNNNNNNNNNNNNNNNNNNNNNNNNNNNNNNNNNNNNNNNNNNNNNNNNNNNNNNNNNNNNNNNNNNNNNNNNNNNNNNNNNNNNNNNN
NNNNNNNNNNNNNNNNNNNNNNNNNNNNNNNNNNNNNNNNNNNNNNNNNNNNNNNNNNNNNNNNNNNNNNNNNNNNNNNNNNNNNNNNNNNNNN
NNNNNNNNNNNNNNNNNNNNNNNNNNNNNNNNNNNNNNNNNNNNNNNNNNNNNNNNNNNNNNNNNNNNNNNNNNNNNNNNNNNNNNNNNNNNNN
NNNNNNNNNNNNNNNNNNNNNNNNNNNNNNNNNNNNNNNNNNNNNNNNNNNNNNNNNNNNNNNNNNNNNNNNNNNNNNNNNNNNNNNNNNNNNN
NNNNNNNNNNNNNNNNNNNNNNNNNNNNNNNNNNNNNNNNNNNNNNNNNCAGTTTCCTTTACAGGGTAAGAAACATGCTTTATGCTAATAAACA
TTTCTACTGCCAGATTCAAACCCATGCTCTTGCTCTTAGCCGCCTGAGCTTCATTTTCTTTTACGTTATCATTCCTTTTTAGTCCTGTTTGAAA
CATGAGTGCAAGCGCTGTGTTTATATGCGTTCTTTACTCATGCACTCTCCTCTGGATTGTTTTGTAACCACAGAATGACAGCCTTAAATTTTAA
TTTCCTGACTTGGTTTGTCAAAGCCTTACTCTTAAAAAAAACAACAACAACAACAAAAAAACCAATGAGTTTGAAAACATTTCTTCAGTCTTTA
ATACTTCAGCCCATCCTCAGAAGTTCCAGAATTTTACAGGACTGTTAGCAGAAATTGCGGCTCTCTTCCCTCCTCTGTTCTGTGTAATTCAGCC
GGTAATTGTCTGCATTTCACTCGTCTGTAAGTGTTCATACTTTTCCAACAACACCCTTTCCTTGTGACTGATGTTGCTCCGAAGTGACATGAGT
TCTCACATGGGCATCAGAGCCTGGGCTCTGCTCTGGGCTCCTTCTCATCCTATTTGGAGGACTTGATTAAATGGAGCAAATGAAATGAATTAAG
TTACTCTTGTCTACAGTTAAGGACCGTGATGTGTCCTTCCCTGGTCTCTTAAGATTGCTGTAAAGATCATATGGATCGGATGATTCCAAGATGG
CAGCACATAAGCCAGCCTGCTCCCATGATATTTATTATCAGAGAAAAACTGCATGCAGCCTCTGTCCTGTCAAAGAAATGCAGCTGAGCTGGCA
GAGTGCTAGCACAGCATGCATGAAGCCCTGGGTTTAATCCAGCACCAGGTGTAGTAATGTAAATCTATAATCCCAGTCCTCTGGAAGATCAGGA
GTTCACCTGTAACTACATAGTAACTTTAAACATAGTCTTGGTTATATAATGAAAAAATCTAAATATAGCTTAAAAATCTTAATACAGTAGTTAA
AGAGCAAGTAAGTAGGTCTCCCTATTGCCAGGACTTCTTGTATTATGTTAATAACGTCTACAATTCCTATTCCACCTTGCAGAACCAGGTCAGT
GGGTCACTAAAAGAAATAGCTGAGCAGATCAGGTAGTCAGGGCTCCTACTACAGCAGAGATGAAGCAGGTGACGGGCGGCCTGGGTTTCTTTTC
TTTCCTGCTGTTGTGTGGGTAGCAGGAAGATGGCCGCAGATACAGAGTGCATTCTGAGTGTCTGTCTGTCTGTCTACTGTGCTGCCGGGTTTAA
CTCCAGGGTGTCTTCGCAATTGTTGCTATTCTCTCTGGTCACTATTTTTCCACCCATGTCACTCTCAGAAGTGTTTCAGTGACCAGCATTCAAT
TAGTGATATAGATTAAGTAAGCTTTCTGTGTGTATCTCTGGGATGGAATTTCTCTGATGAGCTGAGTCGGTCTGCCCTGCCCAAGTTGTTCCAA
GACAGTAACTCTTCATACACTTTGTTTGATGATATTTAAAACAAACGTGGAGATAGAAGTTGCCTTGGGTAGGTCAGAAAAGGTAAATTGCTTC
AGAGAGACTTGACAGTTGTCTGACTACTGATAATCAAGCACTAGGGGATGTCCGAGGAAGGAGCTGTTCTTCCTAAAACTTGGGTACCCCAAGC
TATAGAATGTAAGTTATTGAGGTGTCTATAAACATGTTAGAATGAACACTTCTAGAGACATCTGGATAAAAGCCCATATCTGCGAAAGATCCCT
GTGCTCTACCCATTGTTAATTCAGCCTGGACACAGAGGCACTAATGGGTAGGGGGCATCCTGCAGTAATGAGTAAGGGGCATCCTACACTAGTG
GGTAGGGGGCATCCTGCACTAATGAGTAGTGGGGCATCCTATACTAATGGGTAGGGGGGCATCCTGTACTAATGGGTAAGGGGCATCCTGCACT
AGTGGGTAGGGGGCATCCTGCACTAATGGGTAGGGGGCATCCTGCACTAATGGGTAGAGGGCATCCCGCCACCACCTACATTGTCCATCCCTTC
AGTTAGGAACCCTGAAGTTGTAAGTATTTCATTGTGCTGCCACAGGTATTCACTAGTGAGGAAGTTTGCTACCCATTGATCTCACTGTAGCAAC
CTCTTGATACAATGAAGATTTTCTGTGGTATCCTTTATGAATGCCGTTTTACGCAGATGTCCCTGTGGGAAGGAATTCTGACTTTCAGAATCTC
ATTAAGGATGAGATGAGTAGTATTTTTGTTTGGATGAATTAAATAGAATCGGAGAATTCTTACTCTGGATTCCTTAGACACTATCAATCCATAT
ATATTAGTTTTTTTAAAAGTAATATAAATATCAATAAGATAGTAATTATATGTTATAATAATAAAATATTAAATAAATAATAAAATATATATTA
GATTCATCTCGCTGTCTTATTACATCTTCACATTGTAAAATAGAATTTCCCAGGCGCCTTGACCTCAGCAGATACTGTGTGGCTTTATGAATGT
AATAATACAGTTATTCAGCATGAGGGGAGCCCACGGGAAATGTTGCAATAATCTAGTTCTGTCAGAAAACCACCTGTGGGCGTGGTCTCGGCTC
CTTTCATTTATTGGGCTTTTGCAAAGGGTCTGGATGTTTTTTTTTCAAAGTGCTTTAACAGGATATCCCAGTTAAAGTTTTGACAGACTGTTTA
TAGCTCACGTCTGCCCAGCGGCAATGAAAGATGCATTACAGGATAAGCAAGGTGACTCTCCTGGCCGCCACAGGAGGATGTAGGGTAGGATTCT
ATTAACATTTAAATGAATTCAGACAGGCTGACATCTACAGAACACTGGGTTTAGAAGCAGCAAGAATTCACATGCAGAAGCTGCTGCGCCTAAC
TGCTCTCTTAAAGTAAACAGAAATGCAGGAGTTGAAAACAGAAACACACAGAAATTGAGGTGACAGCATTCAAAAATAGCCCTTAACAGAAAGA
CACCTAATCCTGGTTTGTCACAGCTATCATGTTCTTGAGAAGTTGCTGTGGGGTCCCCAGTTCAAGATCCTAAGGAAAAAGGAAGCTGACCTTG
ACAGTCTTTTTTTCTCTTCTCTTCTTCTCTTCTCTTCTCTTCTCTTCTNNNNNNNNNNNNNNNNNNNNCCTCCCTCCCTCCCTCTCTCCCTCCC
TCTTTCTGTGTATGTGTTTGGGAGAAGCACACAGATGGTATGTTGCAGACAGAGGACAACCTTGGATAGTGTTCCTCAGAGTCTGTCCATCCCA
CCCTACCATCTCTTTTGAGACACTCCCTGAAACTCATCAAATACCTAAGTAGGCTAGGCTGGCTGGCTAGTGAGCCCTAGGGATCCACCTGCCC
CTGCCTTCTTAGTGCTAGGATTCCAAGTGCACACTACCGTGCCAATCCCACCCCCCTTTTAAAAAACACAGTTTCTGGAAATCCAGCCCAGGTT
CTTCCTCACTGAAGAGTAAACCCTTTACTCCCCGGGCCATCCCCCTCGCTTGAACCATAGTGCCCGCCTACCTGACCTTGCTCTCCATTCTCGC
CATTGGTATGTGTTCTGTTCAGCTTATTACATTCTCTGTGATGTACCTACTGTGTGCCCTCCTAGCTCCCAAAGCCGCTTAGCTCATGCGAGCT
GCCTTTCTGCCCACAGTGATTCCACACACGCTAGCTTACTGCACCCTATCGTGTGCACACCAAGAACTGCGTGTTCTGACCTCTCCCTAGCCCT
AGGCTCTGAGGCTCTGACCTAGCGCTAGGCTCCGGCTTAGCACACGTGCTGAGGAGTCTGGGTATTTTCATTATTGTGAATTTGATCTTTAGAC
ATTCTCTTTTGTAGGAGAACCTGATTATTTGAAAAGTCCCCACAAAGTACTCATGAGAACTATATAGTACATTCTTTATATATTGATTCTATCT
TAAATATCTAGTCCTGGAGGAAAGACAAAATATCACTCCAGGGATGATCAACCTGGAGATTTATCAAAGTCACAATTCTTTTCAAATTGATAAG
TTGATATGATTCTCTGAACAGGCATGGACAGTTAAGAGTCATCTAACATACCATACAGCAAAGGACGGCTCAGTGTGTGGCCATCAGCAGGAGC
AAACATAACTTATATTGTGGTGGAAGCTTAAGAAACTTAATTTGCATACAGGAATTTTATTCTGTATTAAATCAGGCCAAGTAGAAAATTTCTT
TTTTTTAGTAGGAAAAGCTCTTAGAAAAAAATAGAAATAAGCCTTTTTTGTTTCAATATGTTTTTTCCTTCATTCTTCCTCCTCCATTCTTTTG
AAGATACATGTTTTTGGTAATACACATACATATATATATGTGTGTGTGTGTGTGTGTGTGTATGTATATATATATATACATATATGTGTATATA
TATGGTGTAATTTTAAATCTACATGCACAGTATCATTAGGTTAAGTTATACAGTAGCCTCCTCACTTAGTCAGTGTTTCTAAGCACTACATATG
CTTCTCTGTAGAGGATACACCATTTGATTTGTTGTCTCGTTTTTTGTTTGGTTTGGTTTGGTTTTTTTGAGACAGGGTTTCTCTGTGCAGCCCT
GGCTGTCCTGGAACTCACTCTGAAGACCAGGCTGGCCTCGAACTCAGAAATCCGCCTGCCTCTGCCTCCCGAGTGCTGGGATTAAAGGCGTGCA
CCACTACTGCCCGGCTCTGATTTGTTGTCTCTTAACTGCTCATTATTATATGTCATATTTTGCTGCAAGGATTACAGGCCCTAACTCAGTAATT
AAATTGTATTAGTTTAGGTGATATAGTGTGTCTGTTTGATTTCTGTGCTGCACTGGAAAACCTTCGCTCCTGCAAGTTAGCAGGCAGTAACACT
CAAGCAGAGGCGCTGGGCGGACTGAAACCCTGCGCAGAGCCATGTGTGTTCGGTCTGTGCATTTGGATCCAGGGAAATACTCATTTTACAGCAC
TTCTCAGTCTTCCTAATCTGCAACCGTTTAATACTACTACTGTTTTGAATTGTAAAGTATGAATCTGTGTTTTCCCATAGTCTTAGGTGACTCC
CTCAACCCTCCCCCACACCCTCAAAGGAGTTGCAATCCACAAGTTGAGAACAGCTGGTTTAGAACCATTTCAAAGGATGTTGTAACTAAGCTTA
TTGTTAGGAAAAATATCAAATGTGACTTTGTGTTCAGAAGTCAACCTGGGATGGCTGCCATCTTGGTTGCAGCCTGTCTGTGACATGCTGTCCC
TTGGAATGCTGTAGGACGATTCAGTGGCTATGGAGTATGTCAAGCTGCACCTGATTGTTTCGAGCACACTTGTGCACTTGGCTGTGACTGAGAG
GCAGCCAGGCAAGCTAAGAGGCTGTGACTCAGGGAAGTCAGAACACAGCGCGCTGCAAACTGAAAGTCACTGGAACTTTAGTGTAGTCACTGAG
GGGGGTGGCGGGGAGATCAGGACCTCAGCACCATGTCCAGCAGTGTTCCTTCAAGGTTGCCATAGTTACTCACCAACAAGCATGCCTCTTCTCA
CTCCACCCCCACCCCCACCCCCATGGTTCTGTCTGTACTGGAAGGTCCTGGTGATAAACCCCTGAATTTCCTATGCACATCCCTGCTACGTTCC
TCATAAGAGGTCTTAGAGGTATGGGCTGCTGAATCCCACCTCATTCAGATTACTGTCCCCTCGTTCCTTAGTGATCTAGTCTTGAGTGTGTTGC
TCATGTGCTGTCTTCTATGTTAACTTCCTGCTGTGTGACCTATGTGGGGTGCTACAGAGGTGGCCACACCATGGGTGTTCTGTGTGAGAGTTTA
AGTGTGACAGGATCACAGCAGTGCAGTGTAAGGGCCGTTCCATGATGCCTTGCAACCACTACATCCTTTGTTTCTCCATAGTCTTTCTCACCAA
CACTGTTCAAACCGAAACTCCCCACCCTCACTATCCTTTCCCTCCGGCCGTTCTTAAACAGCGTTCTCAGCGTCCTGTGTCCTGTTCTCTTGCA
TGTGGCACTGCAAACCGCCACGCGCCGGGGTTTTTTTTTTGCAGGGTATAAAAGCACATGTGTGTTTTATCTCTCAAAAGACGCTTGAGGTTCT
GGAGAGCAAAAGCTTCAATGTTGGAGACAAAGCTATGTAGCCCATGTTGGCCTTCAATTCACTAAGTCTCAACATTCCCTTCCTAGTGTTCTTG
CTTTTTGTTCTTTAAAAAATAATTTATTTATCTACTTTATGTGCATTGGTGTTTTGCTTGCATGTATTTTCTGTGTGAAGGTGTCAGATCTCCT
GGAACTGGAGTTACAGACAGTTTTGAGTTGCCATGTGGGTGCTGGGAATTGAACATGGGTCCTCTGGAAGAGCAGCCAATCAGCGCTCTTAAGC
ACTGAGCCATCTCTCCAGTCCTACTTCTCTACTTTAGAACCACTGTTGTATTTGTGCTATGAACGCTGTAAACCATCCTGAGAATTAAGTGGGA
CATAAACTGTACATATTCCAGTTTGAGTAGACATGGAGAAACAGCAGGAACCAGGAGATACAGTGGGCAGAACACCGTTCAAGCTATTGTGTGT
ACACCATAGCCTCACTTGGGCAAGTTCTCTCTAAACCTCACCCCTTCATTTACCTGTCCAGCTACGGTGTGTCTGAACCTTTCCTCGTGGTGTG
TCTGCACTATGTACATGTGACTATGTGCATAAGACCCAGTACTGTCCTGGGTATCTGTATGTTGCTCTTCATTACTTTTATCTTGTGATTTCCA
ATGTATCCCTTAAAACTACGCTAACGTGGGGCTGGAGACATAGCTCAGTCCGCAGACTTCTTCTCTGCCATACATTAAACCCTGACCCAGCACT
TGGGGAGTTGAGGCAGCACTTGGGGAGTTGAGGCAGGGGAGTCGAAGTCAGCTCAACTACACAGTGAGTTCAAGACCAGTCTGAGATACATAAG
GCTCTGTCTAAAAGGAGAGGAAAAGGTTAAGCTAATCTAGGAGTTTGGGTTGTAGTTTAATGGTAGAGCATTTGCCTAGAAAGTGTGTGAGGCT
CTGGGTTTAACCTTCAACGCCGCAAAAAGAAGCTGTGCTGATAGACATACTAATAAAGATAACTTTGAAATGTACATGTGTGCAAATAGATGTA
TGTGTTTTAGATATTTGTATGAATTGTGTGGGTTTTATCAGGTAGTGGTACATTACAGAAATTACGCTGCTTGGCTCAAGGGCTCGTCAAGTCC
ATGGAGTGAGTAAAGGCCTAGGATCTATCTGCCTCAGGTATCTGTAGAGTGATGCCCAGATTCTGTCTCCAACCTTGGAAAACTGCCTGCGAGG
CAGAAGGCATTCCAAGAACAAGATGTTACATCTTACGAAAGTTCTGAGAGACAAAGGCTTGCTAGCATGGACTGCTTCCCGCCTGGCTGCCCTG
CTAGGGTGGGGAAGCCTGGGCCTCCTGGCCTGACCCTAATGTCTCCTTCTCCTCCCTCATTAGCCATGCAGTGGTGCCTGGGAGCCAGCATCCT
GTGGGAAGACAGAGGACCAGATGACGGCCTCCGGTCCGGCTCGGAAATACGTGAACGCGTTCTCAGCTCGAACTCTGGTCATGTGAGACATTTC
CAGAAAAGCATTATGGTTTTCAGAACACTTAAAAGTTGACTTTCGACACATGGCTCCTCAGCGTGGAGCGCTCCATGGCTGAGAGAAGAGCCTG
ATTTTGTTGTGGTACAACAGTTGAGAGCAGCACCAAGTGCATTTTTAGTTGCTTGAGATCTCACTTGATTTCACACAACTAAAAAGGATTTTTT
TTTTAAAAATAATAATAATGAATAACAGTCTTACCTAAATTATTAGGTAATGAATTGTGACCATTTGTTAATATCATAATCAGATTTTTTAAAA
AAAATAAAATGATTTATTTGTATTTTAGAGGATACAACAGATCAGTATTTTTGACTGTGGTGAATTTAAAAAAAAAATTTACACAAAGAAATAT
CCCAGTATTCCATGTATCTCAGTCACTAAACATACACAGAGAGATTTTTAAAAACCAGGAGAAGCATTATTTTGAATGTTAGCTAAATCCCAAG
TAATACTTAATGCAACCCTCTAGGAGCTCATTTGTGGCTAATAATCTTGGAAATATCTTTATTATACTAAACCATTTCATGAGGAGAATTTTGT
TGTCAGCTTGCTTGAAAAGTTATTACTGTATGAAATAGTTTTATTGAAAAAATTATATTTTTATTCAGTAATTTAATTTTGTAAATGCCAAATG
GAGAAATGTGTTCGCTGCTATGGTTTTAGCCTGTAGTCATGCTGCTAGCTAGTGTCAGGGGGCAATAGAGCTTAGATGGAAAAAAGAGAAAGAG
ACTCGGTGTTAGATAACGGACTATGCACTAGTATTCCAGACTTTTTTATTTTTATATATATGTACCTTTTCCTTTTGTAATTGGAAAACTTATT
TGGGAGAATTTTGCATTTGTTGTACATTTTTGTTTTTTAGGATTTTTTTTTTTGTTGTTATTGTCGGTTTATAAAAGCATTGCACTTCTTTTTC
TTTTTTTGGGAGATTTGTGTTGTTTATGTCATATGTTTTGTTTTGAGTTCAGCCTGAATGTTCATCCGTTTGGGCGTTTTTCTGACTTGGAAGA
ACATTCTCTGTAGGTTTCTAAGTGTACAGAGCCGGAACTGCCTCGTGGTTCCTGGGCTTCAGGGAAGACAAATATGGAAGTCAACAGCCAGTTT
CTGCCTTGAGAGCATTTGCAAGAATGCTGGCCTTGAATTCTGAAATGACAGTGTATCTACTGCCTTGTAGCAAAATAAAGCTATCCTCTTATTT
TACATACTTCCTGATGTCTCTCGATTCTGTGATTTGGGGTGGTGGTTACATATTCGAGGAGATGAGACAAACTCAAAATAATCTTCACTTTAAA
AAAAAAATGTGCTTGCCATCTAACTTTTTACATGGAGAGTCATCGCCACTTCAGGGAACGAAAAGACAAACCAAGGTAAGTCCACAGAACCGTC
ACAACGACCGTTGGAGGGCTCTTCCAGCCTGTGTCAAACAAGGGCACTGAAGCTCTTTAATTGAAACAATGCACTCTAGAAGTAAATGCTGGTA
TCTGAGTTAGGGAGATGGCTCAGTCTGGAATGTTCTTCTGTCAAGAATATAACCTGAGCCGGGCGTGGTGGCACACGCCTTTAATCCCAGCACT
CGGGAGGCAGAGGCAGGTGGATTTCTGAGTTCGAGGCCAGCCTGGTCTACAGAGTGAGTTCCAGGACAGCCAGGGTTACACAGAGAAACCCTGT
CTCGAAAAAACAAACAACAAAAAAGAATATAAACCTGAGTCCCCATCTCCAGAAGCCCCACAAAGCCAGACAAGGCATCCATGTCTATAGTCCC
ACCAGACAAGGCGTCCACGTCTATAGTCCCAGTATTCCTGTGGCAAAAAAACGGGAGTTGAAGATGAAGATTCTCGGATGCTGGCATGCACCCA
GCAAACCCACACAAGAAATGGCAGAGAGCTAAGAGATGCTGTCTCAAGACAAGGTTTGAGGGGAGAACTGATAGCCAAGGTTGTTCTCCATAGA
GGACATGTGGCATGCATATGCCCCGCCTCCACCATGCACACAGAGGCTCGAGAATTTAATCGCATATAGGTAGGCTGTGAGAACTGAAAGGTCA
TGCTCATGGAAATTAGGAGACTCTGAGAGATGCGATGAGCCCTGGTGATGCAAAGGCTTTCTCTTTCTGCTTCCCAGCCACTCTGATGCAAACT
GCTCCACTTTCCCATCGTAATGGGCTGACATCTCTGAATCTGTCTTTCCACAAGCTGCTTCTATATTTTATCACAGTGAAAAAAAGTAACAAAC
ACAGGTGTTCCAATGTGGTCTATTCAGTGTTCAGTATCCCTTGCACAAATACTGATTGATTCTCACAACTCAAATCCAAACTCCAATTTTGAGT
TTTCATAAGCATAACATAGTTGGTGTTCATCAAGCCAAGGATATGATAGATCTAATGACTAATCTTCAGAGCTATTTTATAATCCTTGATCCTG
GTGAGCAATACATTTTCTGAGTGTTGAGTAGTATAACTGATGAGTAGCTTTTGTCAGAAAATGGAGCCTTGATGACCAGTTAGCTATCTCAGTG
AGTCAAAGTATTAGAGATGATGAATGTGACTAGCAACGAGGAGCCTAAGTGTGTGGTTCAGTGGCAGGGCAAGAGCTGAGCATGTGAATCCCTC
TTATAGAGGCTTCGACCCTCTATAAACTCTTACCTATATGTAAATCATAGTTATATGGCAGGCAACTGGGAATGGCTGTTTTACTACCCAGATT
TTTCTAGTGACTTTCAGGAAGGCAGTGGTCATAGGTTTATAACACAATGCTTTAAAGTATATTGTTCTCTAGTTCTGGGTGCTAGAAAGTCCAA
GTTCAGTAGGTGGATTTAAAGTCTGGCGAGAGCATACTTCCTGTTTCGTAGAAGATACGATTTTGTTGTGTTTTCTGTTTTCACATGACAGAAG
GCCCTGGTTTATTTTGTTGATTGGGTGGGTAGGTAAAGTGGGTGGGTGGTTTGGTGGGTGGGTGGGTGGTTAATTGGGTGGGTGGGTGAATGGT
TGTTTGGTTGGTTGTTTGGGTGGGTGGGTGAATAGCTGGTTAATTGGTTGGTTGGGTGGGCGGATGGTGGTTATTTGGTTGGGTGGGTGGTTGG
GTGGGTGGTTATTTGGTTAGGTGGTTGGGTGGTTGATTGGTTGGTTTGGTTATTTGAAACAGGGTCACCTGTAACCCAGGCTGGCCTTGAAGTT
GTTATGTAGCTTTGAATGGTCTTGAATCCCTGAACTTCTTACTTCCAATTTCCAGGCGCTGGGATTATAGGCATGGGCCAGTATACCCAACTCT
TGCTAGTTTACTTTGGTTGTTGGTTTTGTTTCATGTTTTAGTGACCCTACTCTCTGTGACACATGTACAAATGCATGGATGTACTATATTTACT
ACCTAAATGAGAAGCTATTCCAATGTCACTATAAAGTGGCATGTGAGGAACAGGAGAGACACTGAGAGGACCAATACTGTCCACTGACCTCATA
TAGGACTGGTAGATGCGAGTGTTGTCANNNNNNNNNNNNNNNNNNNNTTCTGCATCACCAGGGTCCTGTGTTAGGGCCCCCTGCATTGCCTCAT
CTGATCTGAAGTCTGACAAAATTTGGTTGTAATTCAGACTTTACCATCGTTGTTGACTTCACACAAGTTTGATGTCATCTCTCTAAGTTCATTT
TACTTATATTGGATATCAAATATAGGTATTATGAAGATGTTGTGAAACAGGAAATCCATTCATGGGTCTCTCTTAAGATTCTGTGGCACCTGTC
CGTAAGATGCTTTGCTAGTTCATCTGTGCAAACAAGAACTGTGTGTGCCATTCGGTGATGAGGAATGAAAGATTTCTGAGGCTCATGTCCCTGC
TTGCAAGTTACATGTACTCAAATATAAATATTCCTTCCTAATATTCTCAGTTATTCTACAGTAGATAAATTCTTCTTATGTAACATATATGCAA
ATGACAGCACAGCTTCCCTTCAACCTCTTGGTTTCTAGTGCAGTGTATCTTACACACACTCGTTCTCATCCATTGCCGTTCTCATCCATTGCCG
GGGGGTGATATCAGCAGGGATGCAGGGTGGCTAAGTGCTTACTGCATCTACTGTCAAGGAGGGAGGTGACCTGGTTCCCAGCAGTGAGAAGTGA
GAGGCGAGGGGCAAGATAGGAGGCTGTGAACTGAGGTTTGGACTTTGTCCTTTGCGATATGGGGGGTTATTAAAGGCTTTTAGGTAGAGAAATA
AAATGATTAATTTATATCTGATGTATAGAAATCCTGTTCAAACTCTTTATTCACATATAGTATAAAATTAATCCTCAGATTAGTAGGGAGAGAT
GATCAGAGTCCAAATTCCATGCCAGTTAACTTATTTTTCATAGCATGTTTCCTGCTGCCTAATTTCAGAAGCATGCATTTTAATCCTAGAAAAT
CTAACTCGGGGGGGAAAAAAAAACCAACTCAACTTTGATCTGTGCTTCATGAAACATCATTTCAAGTGTTATAATCCATAAAGTAGAAATTGAC
TCAGGAAGAAACGATTGCCCAGAACACTTTTCTCCTTTAGAAGTGGGACTTTTCCAACCATTACTTTCTCAGACCTTCTCTGCTAAACCTCCCA
CTGAATCATTATGTGGTCTAATCCTTGGTTCTTTATGGATATTTTGATGGATTTTTGTATTCACTGATTAAGGAATCTTTCCAGCATTTGTTCC
TGAAGAAATTTCAATGTAGTGTTATATTGTAGTCTACCCTTCACACTAGAACACCAATGATCAGTGGGTCTTGGGTTTTATTGGACACAGAGGC
TAAGAACACTGGTAGATTGAAGTTAAGTCAGGAATGCGTCCTGTGTAAACTCTGCATCCCATGTTTGACAGCCACCAAGTGACTCCAACACAGG
AGGACTGAGGGAATTGAACTACAAAGACCCGGTTTTGTGAACAAATTTGCAACCTGAGCTTTCTATCTGACCATTCCGCAAGCCTTACCCGTTT
CTATTGAAAATGTCCATTGGTCTGCAACAGAACCTTAGAAAACATAACCCACAGCTACAGGGTTTTCTTAACTCTAAGGATTTAATTTGTTACT
AGTGTTGGTAATTAGGTCTTTTGTCTGGTGTTTACAATTGCAGGAAGCATAATTTCATTCACAATACACTTGGGTCTCTCTTATCATATGGCTC
TGTTGTCCGCGTCCCATCAAAAGGGAATATACATCGATGAATTCAACATTAAAGCAAAGCAAAGCTGTTGTTCAGAGAGATTCTTATTTCGAAA
CCAGGCTGCAATGAACTTGCTGATCTCCTTTGTTTGCCTAAACCTCTGAGCTTTAGGTTTCCGTTCAAATGGAGGAAGTATTTAATCCTGTATA
TAGTTACAAAGCATACAGAATTTCTCAGATCAGAGATAAACAAAACTCAAAGAATGCTTCAGTAGTCCAAAGCCATTGGAACACACAGTGTGGG
CTGCGAGATTTTTAGGTCAAGAACACCCTCCAAGATGAACCTACTATGCTTGGAGAATATGTAAGGACAGAGTCACGGGTTGTTTTCATTTGAC
TGATCTCTTTAAAAACATAAGTGTTTTCCCACTTTCTAATAGTACTAAATATATCTGACCATGGATGGAGCAACTCATCCAGCTAGTAGGGTTA
GAACCTACCACTCATTTTTTTCCAAAAATTCTTTTTTTATTGAGCACTTCCAATGCAAGGCCGAGTTCAGCTGAGTATATACAGCTCACAAACA
TAATAAGTACACACAAGTATAGTGTGTACAACATTCACAATTATAGGCAGGATCATTTTCTTGGATACCCTCGAACATATGAAGGAAAAAAATA
GGCTTATACTTTGGTAACTATGTTTCTTTAAGTCATACCTGTCACTGTTTAGGTAACCAAGAACCAGAGGTTAGATGGACCAGAGACCTACAGT
AAGAAAGCATAAAAGATAGTGATAAAACGACCCCTAATGATATTCTGCTATAGTCATAGATCAGTGGCTCTGTTCAGCCATCAGAGAAGCTTCC
TCCCACAGCAGATGGAAAGAAATACAGAGACCCACAGCCAGACATTACACACAGAAAGACCTTAGAACACTCAGCTCCAAGTGGGATGTCTCCA
TCCATCAAATCTCTCCCCTCAGAGCTCAGGGACCCCCCCCACACACACACACACACACACAGAAGAGGAAGGAGGGTAAGAGACAGAGGAGGTG
GGCCACCAGGAAAACAAGGACCTTTAAGTTTACATGAACAAAGCACATATGAACTCACAGAGACTTAGCAGCAAGCACAGTGCCTATACACGCC
TGCACCACGTCCTCTGTGTGTATATAACGGCTTTCAGTTTTGTACTTTTATGGGACTCCTGTCTGTGTTAAAAATGGGTCGCTGATTCTTGTGC
CTTCCCTTGGGGCTCTTTTCCTTCTGTTATTTTATCTTGTCCAACATCAATGCGATGGTGTTCTTTCTTATTGTGTTTTATTTTGTCATATTAT
TATTATCATCATCACTTAGAAGCCTATTCTTTTCTCCTGAGAGACAGGAGGGGAGTGGATGCAGACGGGAGCCGAGGGACAGAGGGCCTGAGCA
GGATGGGGGATGGGAAATGATCATCACTCTATTCTGTATGAGAGAAGAATCTACTTTCAATTAAAGTGAGGAAAATCTAAGATGTCTCTTTTAA
NNNNNNNNNNNNNNNNNNNNNNNNNNNNNNNNNNNNNNNNNNNNNNNNNNNNNNNNNNNNNNNNNNNNNNNNNNNNNNNNNNNNNNNNNNNNNN
NNNNNNNNNNNNNNNNNNNNNNNNNNNNNNNNNNNNNNNNNNNNNNNNNNNNNNNNNNNNNNNNNNNNNNNNNNNNNNNNNNNNNNNNNNNNNN
NNNNNNNNNNNNNNNNNNNNNNNNNNNNNNNNNNNNNNNNNNNNNNNNNNNNNNNNNNNNNNNNNNNNNNNNNNNNNNNNNNNNNNNNNNNNNN
NNNNNNNNNNNNNNNNNNNNNNNNNNNNNNNNNNNNNNNNNNNNNNNNNNNNNNNNNNNNNNNNNNNNNNNNNNNNNNNNNNNNNNNNNNNNNN
NNNNNNNNNNNNNNNNNNNNNNNNNNNNNNNNNNNNNNNNNNNNNNNNNNNNNNNNNNNNNNNNNNNNNNNNNNNNNNNNNNNNCTGGACTACA
CACAAGTCTGTGGTGCACTTTTTTGATTAGTGGTTAATGTGGGAGGGCTGGGCCACCGTGGGCAGTGCCCTACCTGAGCTGTGGTCCTGGGTTG
AATAAGTAATTGGGCTCAGCCAGACACAATGAATAAGCCAGTGAGCAGTGTCTCTCCATAGCCATTGCTTTACTTCCTGCTTTCAGGCTCCTAT
TCTATATCCCTGTCCTTGCCTTCCTGGGTTCCCGCTCCGATGAACTACAGTCTTTAAGGGTCCTACTTCCGTTTGGACCTACTCCTGTCTTGTC
CATTCCTCCTCCATCTCCCTGGGCTTGAACTGCCTGCTCTTGCTATCCCTATACAGTGCACTTCAACTTTTATCCTGGACACCTGACTCACTGA
CAGAGTCACAGGGCTGGTTTCTGTCATCCTACATCTGGTAAGTCCTTGATTCCTCTCCTTGGTGGTATTTGATCTTTATCACTACTGAGAAGGA
AGCCCCAGAAGTTTCTTTTTTCTTCTTCTTAATAAAAAGAGGGCGGGGCTCAAACCATGACTCAGAGTTGGAACATTAATTAATAAAGGAACCT
TTTCTAGGCCAGCAGACAGGAGTTGCATTCTTGCCAATCCTTTCTAAGAGCGGATGGGCAATGCCTGCATCCATCCTGCCTAAGTCATCTTGAA
ACTGAGGGTAGCTGATGCTTTTATTGGCATCCTTCCTTTGAATTTGACTTTTCAGCTCCTCTGTGGTTTTGTCTGCAGACCCTGGTGGTGAGGT
GAAGGGGCAACGCTTTGCTCACACTGCAGCGTTCTTCACGAGCATATTCGTCCCTAGACTACTGAGCAGCCTGAGCAGAGATGAATACAGGACA
GACTGATGAATGGTTGTGAATGGTAGATGATGAGTCGACATAGCAATTACAGTCCAATGTTAATTGTCAACTAGACAGGGAGTATGCGTGTATC
TGCTTTGACTTGACATTTTTTTCTAAATGTTTACAATACTCAAAATGTAGAGTTTCAGGGTTGGATGACTACAAATCTAAAGGCTTCGACATTG
ACACCATAAAATCCCCTCTGACTTGAACGCCCTGAAGCTCATCATGCTTCTAAGTTGTTTTGTTTGTTGGTTGGCTGTTGATCATTTTTTCATC
TTTAGGTATATTCTTGTGATTGTCCAACATGGAAGCTTTAAAAAATGGGTATTTTTTCTTTTCAAAAAGAGAGCTGGGAGTAGTGGCACACACC
TTTAATCCCAGCACTTGGGAGGCAGAGGCAGGCGAATTTCTGAGTTCGAGGCCAGCCTTGTCTACAGAGTGAGTTCCAGGACAGCCAGTGCTAT
ACAGAGAAACCCTGTCTCAAAAACAAAACAAAGAAAAGAAAAGAAAAGAAAAGAAAAGAAAAGAAAAGAAAAGAAAAGAAAAGAAAAGAAAAGA
AAAGAAAAGGAAAGAAAAGAAAGAGAGCTTTAGGCTGGCCTGGAACTCACTACGTAGCCCTGGCTGGCCTTGAACCTATAGCCATCTTCCAGCA
TCATCCTCCTGAGTATGTTTGATTACAGATGTGAGCTACCAGACTCAATTCAGTTTGTTAAAATAATAGCCAATTGTGGTCTTTTGTGAACCCG
TAGTCCGGGATTTCTTCAGGTGTCTGTATCTTGCTCAGTTTTTGGTCTTGGGCTTGGTGAGGGTTAGCACAGCTCCCGGGGGCAGGAAGAGAAG
TACAGAGCAGTTAGTTCATCATCACAAGATCAGCTAAGCATCTGAGAGAGGGCCCTGGGTTCCATCTCCTATTGGCAAGCAATAGACTCACATT
GCAGAGAGTATAGAAGGGCATCAACCAGTTTTGGACTCTGTATTAGTCAGGGTTCTCTAGAGTCACAAGACTTATGAAATGTCTCTATATATTA
AAGGAAATTGTTGGACTGACTTACAGTCTGCAGTCCAACTAATCCAATGATGGACAACTGTGAATAGGAAGCCAAAGAATCTAGCTCAGCCCCA
CAAGACTAGTTGTTTCAGCTGGTCTTCTAGAGAAGCAGGTTCCAACAGATGTGCTGGCAAGTAAGAGCAAGCAGGTGAAGAATGGACCCTTCCT
TCTTCTATTGTCCTTACATAGGCCTCCAGCAGAAGTATGGCCAAGAGTAAAGGTGTGTACTACCATGCCTGGACCTAAGTTGTTCTTTACTTGG
AACTTGCTCTGTCCCAGGCTGGCCTTGAACTCAGAGATCTGCTTGCCTCTGTCTCCTGGGAATAAAGGTGTGTACTGTCTTGCCTGGTCCTAAG
CTTTTCATGGCCACTATGCCTCAAGATCTGGATCCCAGGTGTGCCCTCCATTTCTGGATTGTAGTTCATTCCAGATATAGTCAAGTTGACAACT
GGGAATAGCTATATTACAGACTCTATCAATATAATCACCCCCTTAGCAGTTCATCTTTTAAAATATCATTAAAGGATGTGGAGAAATGGCTCAG
CTGATATGGGGCATTAGTTATGGAGGAAGTGTCTGTGCTGGGCATGGATGCATTACAATTCGGAGATGTGATTAGCAAATGACCCTGACAAATA
CGGTTAGCAAATGTAATTTCTCCTTCCCTCCCCTCCTTCCTTTGGATGAATAAATAGGTGTTTGCATTTATAAATATATAAGTCTCCCTTCTTA
CCTACACTTTGCTTTCTGAGCTTAAGTTTACCTGAAATCAAGCACAGGTCAAAAATATTAAGAAGAAAATTCTAGGAATAAACAATTCATGCAT
TTGAAACTGCTTTTATTATAGTATAGTATAACAATTACTGTATGCTGTTGTTATTATCACTGCATCTAATTTATCACTTAAACCTTACCTAGGT
TTATAGGTACTGCAAACACACACACACACACACACACACACACACACACACACACACACACACACACACACACACGTTGTGTATGTTGGTTAGG
GCCAAGACCGCCAGGCAGGAGAACCCGAACTCCAGCTGCTCGGCCTGATTCTGATGGAAACCCTGACTTCCGGCCAGCTCACTGCCTTTCGGGT
GCTGTAGGATCCCTGCCCTCCCCCAGCATCAGCTTCCGCAGAAGACAAGTGTGCTCGGGGCTCCTCTTCACACCCTTGAGCCCACACTCCCACG
GGCG
MOUSE SEQUENCE - mRNA
GGGAGTGTCCAAACCTCTTTGTTTGATGGCATCTGTTTACAGAGTTACACTTTAATATCAACCTGTTTCCTCCTCCTCCTTCTCCTCCTTCTCC
TCCTCCTCCTCGGTGACCTCCTTCTCCTCCCCTTTCTCCGGAGAAACTTGCCCCCGGCGGTGCGGAGCGCCGTGCGCAGCCGGGGGAGGACGCA
GGCAAGGCGGAGGGCAGCGGGAGGCGGCAACCGGTGCGGTCCCCGGGGCTCTTGGCGGAGCCCGGCCCGCCTCGCCATGGCCCGGAGACCCCGA
CACAGCATCTACAGTAGCGATGAAGATGATGAAGACATTGAGATGTGTGACCATGACTACGATGGGCTGCTGCCCAAATCTGGAAAGCGTCACT
TGGGGAAAACTAGGTGGACAAGGGAAGAGGATGAGAAGCTGAAGAAGCTGGTGGAACAGAACGGAACAGACGACTGGAAAGTCATTGCCAATTA
TCTGCCCAACCGGACAGATGTGCAGTGCCAACACCGGTGGCAGAAAGTGCTGAACCCTGAACTCATCAAAGGTCCCTGGACCAAAGAAGAAGAT
CAGAGAGTCATAGAGCTTGTCCAGAAATATGGTCCGAAGCGTTGGTCTGTTATTGCCAAGCACTTAAAAGGGAGAATTGGAAAGCAGTGTCGGG
AGAGGTGGCACAACCATTTGAATCCAGAAGTTAAGAAAACCTCCTGGACAGAAGAGGAGGACAGAATCATTTACCAGGCACACAAGCGTCTGGG
GAACAGATGGGCAGAGATCGCAAAGCTGCTGCCCGGACGGACTGATAATGCTATCAAGAACCACTGGAATTCCACCATGCGTCGCAAGGTGGAA
CAGGAAGGCTACCTGCAGGAGCCTTCCAAAGCCAGCCAGACGCCAGTGGCCACGAGCTTCCAGAAGAACAATCATTTGATGGGGTTTGGGCATG
CCTCACCTCCATCTCAGCTCTCTCCAAGTGGCCAGTCCTCCGTCAACAGCGAATATCCCTATTACCACATCGCCGAAGCACAAAACATCTCCAG
TCACGTTCCCTATCCTGTCGCATTGCATGCTAATATAGTCAACGTCCCTCAGCCGGCTGCGGCAGCCATCCAGAGACACTATAACGACGAAGAC
CCTGAGAAGGAAAAGCGAATAAAGGAGCTGGAGTTGCTCCTGATGTCAACAGAGAACGAGCTGAAGGGACAGCAGGCATTACCAACACAGAACC
ACACTTGCAGCTACCCCGGGTGGCACAGCACCTCCATTGTGGACCAGACCAGACCTCATGGGGATAGTGCACCTGTTTCCTGTTTGGGAGAACA
CCATGCCACCCCATCTCTGCCTGCAGATCCCGGCTCCCTACCTGAAGAAAGTGCCTCACCAGCAAGGTGCATGATCGTCCACCAGGGCACCATT
CTGGACAATGTTAAGAACCTCTTAGAATTTGCAGAAACACTCCAGTTTATAGATTCTTTCTTGAACACTTCCAGCAACCATGAAAGCTCGGGCT
TAGATGCACCTACCTTACCCTCCACTCCTCTCATTGGTCACAAACTGACACCATGTCGAGACCAGACTGTGAAAACCCAGAAGGAAAATTCCAT
CTTTAGAACTCCAGCTATCAAAAGGTCAATCCTCGAAAGCTCTCCTCGAACTCCCACACCATTCAAACATGCCCTTGCAGCTCAAGAAATTAAA
TACGGTCCCCTGAAGATGCTACCTCAGACCCCCTCCCATGCAGTGGAGGACCTACAAGATGTGATTAAGCAGGAATCGGATGAATCTGGAATTG
TGGCTGAGTTTCAAGAGAGTGGACCACCGTTACTGAAAAAAATCAAGCAGGAGGTGGAGTCGCCAACTGAGAAATCGGGAAACTTCTTCTGCTC
AAACCACTGGGCAGAGAACAGCCTGAGCACCCAGCTGTTCTCGCAGGCGTCTCCTGTGGCAGATGCCCCAAATATTCTTACAAGCTCTGTTTTA
ATGACACCTGTATCAGAAGATGAAGACAATCTCCTCAAAGCCTTTACCGTACCTAAGAACAGGCCCCTGGTGGGTCCCTTGCAGCCATGCAGTG
GTGCCTGGGAGCCAGCATCCTGTGGGAAGACAGAGGACCAGATGACGGCCTCCGGTCCGGCTCGGAAATACGTGAACGCGTTCTCAGCTCGAAC
TCTGGTCATGTGAGACATTTCCAGAAAAGCATTATGGTTTTCAGAACACTTAAAAGTTGACTTTCGACACATGGCTCCTCAGCGTGGAGCGCTC
CATGGCTGAGAGAAGAGCCTGATTTTGTTGTGGTACAACAGTTGAGAGCAGCACCAAGTGCATTTTTAGTTGCTTGAGATCTCACTTGATTTCA
CACAACTAAAAAGGATTTTTTTTTTTTAAAATAATAATAATGAATAACAGTCTTACCTAAATTATTAGGTAATGAATTGTGACCATTTGTTAAT
ATCATAATCAGATTTTTTAAAAAAAATAAAATGATTTATTTGTATTTTAGAGGATACAACAGATCAGTATTTTTGACTGTGGTGAATTTAAAAA
AAAAATTTACACAAAGAAATATCCCAGTATTCCATGTATCTCAGTCACTAAACATACACAGAGAGATTTTTAAAAACCAGGAGAAGCATTATTT
TGAATGTTAGCTAAATCCCAAGTAATACTTAATGCAACCCTCTAGGAGCTCATTTGTGGCTAATAATCTTGGAAATATCTTTATTATACTAAAC
CATTTCATGAGGAGAATTTTGTTGTCAGCTTGCTTGAAAAGTTATTACTGTATGAAATAGTTTTATTGAAAAAATTATATTTTTATTCAGTAAT
TTAATTTTGTAAATGCCAAATGGAGAAATGTGTTCGCTGCTATGGTTTTAGCCTGTAGTCATGCTGCTAGCTTGTGTCAGGGGGCAATAGAGCT
TAGATGGAAAAAAGAGAAAGAGACTCGGTGTTAGATAACGGACTATGCACTAGTATTCCAGACTTTTTTATTTTTATATATATGTACCTTTTCC
TTTTGTAATTGGAAAACTTATTTGGGAGAATTTTGCATTTGTTGTACATTTTTGTTTTTTAGGATTTTTTTTTTTTTGTTGTTATTGTCGATTT
ATAAAAGCATTGCACTTCTTTTTCTTTTTTTGGGAGATTTGTGTTGTTTATGTCATATGTTTTGTTTTGAGTTCAGCCTGAATGTTCATCCGTT
TGGGCGTTTTTCTGACTTGGAAGAACATTCTCTGTAGGTTTCTAAGTGTACAGAGCCGGAACTGCCTCGTGGTTCCTGGGCTTCAGGGAAGACA
AATATGGAAGTCAACAGCCAGTTTCTGCCTTGAGAGCATTTGCAAGAATGCTGGCCTTGAATTCTGAAATGACAGTGTATCTACTGCCTTGTAG
CAAAATAAAGCTATCCTCTTATTTTACAT
MOUSE SEQUENCE - CODING
encoding71kdmybprotein,completecdsATGGCCCGGAGACCCCGACACAGCATCTACAGTAGCGATGAAGATGATGAAGACATTGAG
ATGTGTGACCATGACTACGATGGGCTGCTGCCCAAATCTGGAAAGCGTCACTTGGGGAAAACTAGGTGGACAAGGGAAGAGGATGAGAAGCTGA
AGAAGCTGGTGGAACAGAACGGAACAGACGACTGGAAAGTCATTGCCAATTATCTGCCCAACCGGACAGATGTGCAGTGCCAACACCGGTGGCA
GAAAGTGCTGAACCCTGAACTCATCAAAGGTCCCTGGACCAAAGAAGAAGATCAGAGAGTCATAGAGCTTGTCCAGAAATATGGTCCGAAGCGT
TGGTCTGTTATTGCCAAGCACTTAAAAGGGAGAATTGGAAAGCAGTGTCGGGAGAGGTGGCACAACCATTTGAATCCAGAAGTTAAGAAAACCT
CCTGGACAGAAGAGGAGGACAGAATCATTTACCAGGCACACAAGCGTCTGGGGAACAGATGGGCAGAGATCGCAAAGCTGCTGCCCGGACGGAC
TGATAATGCTATCAAGAACCACTGGAATTCCACCATGCGTCGCAAGGTGGAACAGGAAGGCTACCTGCAGGAGCCTTCCAAAGCCAGCCAGACG
CCAGTGGCCACGAGCTTCCAGAAGAACAATCATTTGATGGGGTTTGGGCATGCCTCACCTCCATCTCAGCTCTCTCCAAGTGGCCAGTCCTCCG
TCAACAGCGAATATCCCTATTACCACATCGCCGAAGCACAAAACATCTCCAGTCACGTTCCCTATCCTGTCGCATTGCATGCTAATATAGTCAA
CGTCCCTCAGCCGGCTGCGGCAGCCATCCAGAGACACTATAACGACGAAGACCCTGAGAAGGAAAAGCGAATAAAGGAGCTGGAGTTGCTCCTG
ATGTCAACAGAGAACGAGCTGAAGGGACAGCAGGCATTACCAACACAGAACCACACTTGCAGCTACCCCGGGTGGCACAGCACCTCCATTGTGG
ACCAGACCAGACCTCATGGGGATAGTGCACCTGTTTCCTGTTTGGGAGAACACCATGCCACCCCATCTCTGCCTGCAGATCCCGGCTCCCTACC
TGAAGAAAGTGCCTCACCAGCAAGGTGCATGATCGTCCACCAGGGCACCATTCTGGACAATGTTAAGAACCTCTTAGAATTTGCAGAAACACTC
CAGTTTATAGATTCTTTCTTGAACACTTCCAGCAACCATGAAAGCTCGGGCTTAGATGCACCTACCTTACCCTCCACTCCTCTCATTGGTCACA
AACTGACACCATGTCGAGACCAGACTGTGAAAACCCAGAAGGAAAATTCCATCTTTAGAACTCCAGCTATCAAAAGGTCAATCCTCGAAAGCTC
TCCTCGAACTCCCACACCATTCAAACATGCCCTTGCAGCTCAAGAAATTAAATACGGTCCCCTGAAGATGCTACCTCAGACCCCCTCCCATGCA
GTGGAGGACCTACAAGATGTGATTAAGCAGGAATCGGATGAATCTGGAATTGTGGCTGAGTTTCAAGAGAGTGGACCACCGTTACTGAAAAAAA
TCAAGCAGGAGGTGGAGTCGCCAACTGAGAAATCGGGAAACTTCTTCTGCTCAAACCACTGGGCAGAGAACAGCCTGAGCACCCAGCTGTTCTC
GCAGGCGTCTCCTGTGGCAGATGCCCCAAATATTCTTACAAGCTCTGTTTTAATGACACCTGTATCAGAAGATGAAGACAATGTCCTCAAAGCC
TTTACCGTACCTAAGAACAGGCCCCTGGTGGGTCCCTTGCAGCCATGCAGTGGTGCCTGGGAGCCAGCATCCTGTGGGAAGACAGAGGACCAGA
TGACGGCCTCCGGTCCGGCTCGGAAATACGTGAACGCGTTCTCAGCTCGAACTCTGGTCATGTGA
HUMAN SEQUENCE - GENOMIC
TTGAGAAAAACATGTAACAGTGTGAAGGTAAAAGGTATCTTCTTTTAAAAAGTATTTTGCATAGATATTGTTCTTTAAATGTTCCATGAGGATA
TCCTTAACTACCAGTTATTTAGAAGAAAGAAAGAAGCAGCAAAAGAGTTTTCAAAGAAAAAAAAGTATATGCAATCTAAAAGCCAGCTAAGGTG
CTATGCACACCCTCTAAGTCCCAGCTGCTTGGGAGGCTGAGGCAGGAGGATCACTTGAGCCCAGGAATTCAAAACCAGCTTGGGCAACATAGCA
ACATCTCATCTCAAAAAAAAAGAGAAAAAGTTATCAAAACTCCATGTAACCTAGATTAAAACATAATTAGAAATTTTATACATATATCAAAATG
TCATATTGTTCCCCATAAATATATACACTTATAATTTATCAATTATTGATAAAGAAATAAGAGCTTTTATATCACGATTTTGGTGTACCTGACA
TTTTTCAAACAAATTCCGCCTTTTGGGGCCAAAGTGCTCTCTGTCAAGCTCCATACTAAAGGATCAAATGAGCCTCCCCAAGCTCCCAGCAGAA
CTAGCACTTTGGAACTTTGTCAAAATTTTAAGACAAAGGATTATAAACACTTTGATATAGTTTCCTTAGAGGCTGAATGTTTTGCTTAACACAA
ATATTTAAACCAAATTAAGATAACTCAAGAACTGATATGTTTCATAAACTGATTGTTTTTATTTTTCTCAGAACCGTTACCTTAACTGAAGAGT
AAATTGGAATAAGCAATTTCTATAGATGTCAAAACTTTGTAAAATTGATTTTTTACATCATCCACAAACTTTGTATTTCTAGCAACAAATGTAA
AAGAAAGAGTAGAGTTATGGTACACTTCATCCTAACAGGGTTCACATTTAAAATCATGTAGTCCACTTCTGTGAAGGGCCCAAGAAAAATAACT
CCCTTAAATCCGTTCCTTTCTTCTTGTTCTGTTCGAGTTAAAAACTTTATTTTCTTAGACTTTGGTTAAAAAAAAAAAAAAAAAAAAAACAAGG
AAAGACATAGTGGTGATTAAAAAACATGCCATTTCTTACCAAATGGTTTTCACAAAGCCTAAAAAAACCTACAGTTGCTGGAATTAAGCACTCA
TTCACTTATTGATTTTATGACTAATTTTAAAATGGATGGCCCATTGAGGTAAATTCAATATTATATAAAGATGTAGTAAAGTCAACAATCAGAT
AAATATACAATGATAAAGTAGGAGAGACAGAAATAAGATTCAGAAAAATAATATGTGAAACATCATGCTTTAAAAGAAAAACAGTTCCAAAGTC
ATATTGCCAAACAGACAGAAATCTATCCAAATCATAGAAATAAAGCACTACAAGTAAGCTTAAAATTATGATTTTGCTATCATTTGTAAGGTTA
TCAACCTTTATCTGAGGACAGAATTGAATCCCTTTGAAGGACTCACAATACAGGAAGAATTACAAGAACATAAAGGCATAGGAGTTAAAAGTTG
AAGGCTGCCAGAGAGTAGCGGAAAGAACTTTGGATTTGGAACAAAAAAACCTTCATTTAAACAGTCCCAGCTCTGGTAAATGTTATCTGTGTGA
CCTTGTGCAAATTACTTCACCTGTTTCAATTTCAGTTACTTGACCTGGAATTGAGGAAAATAATACCTGCGGGGGAGACATAGGCAGAAAGGCA
TGAACTGCTGTGAGGATTAAATGATATAATATATGGCACAGCCTGTTGTAATCTCTAAAGCCAAATATAACGTGCTAATAAGTATATTAAATAA
AAAATAAATAAAACAGCTCCAACTAGTTCTCATCAGTTGTCATCAGCACAACAAAGATTTATGTACGTACTTATGTTCAAGACCCCGTTCTAGG
AACTGAGTAGGTAGAAAGGTAAAAGATACTGTCTCTCCTCTCTGACCTATAATGAAGGCTCCAGATGAAATAAGACACATTTATAAATAGATAG
ATAGATGATGCTTAGATAGATAGATAGGTAATAGATGACAGATAGATAGATAGATAGATAGATAGATAGATACATAGATAGATAGATACATAGA
TAGATACATAGATAGATAGATGATAGCAAAGAAAGGTAACATAGGCCATACACTCAACAAGAGTCAGGGAAGGTAGGTATTAACACAACTCACA
GGTGGGAGAAATGACTGTGGATTAGCAAGGTCCAAGAAGGCTTCAGAAGGAAGATTTGGACTTCAGCAGGGCCTGAAGAATGGGTAGCACTTAC
ATAAGCAGAGAGGAGAAAGGAAGGCATTGCAGGCAGGAGGCATGCTTGTAACCAAAGGCCTGAGATTGCCAATGGTTTTTTGGGGGAGGAAACA
GAGTGAACAGAGTATGATAAGAGATAAGGCTGAAAGGTAGGTTGTGTTCTAAGGCAAAATGGCATGCAGTCAGTGTGCCCGTCAAGCCCTGCAG
GTTGTCTATAGCCAGGCCCACTCTGATTGGCCAATACATGAGCCACTTCAGGTATTAAATACTATCACCCCTGGGGGTAAGGTTGTCTGGGCAC
AGAGGCCAGAGCAAGCTCAGTATAGGGAATGCCAAGTTAAGGAGTTCAGATCTCTATCTTGTCAACATTAGGGAGCCAGTTAAGGGTATTTAAA
CAGATGACTAACATGCTAAAAGTGAGTATAATGAGATTATTGAGCAGTGGGATGCAGAATGCATGGGGGAAAAGTGGCCACAGGGTGGAAAATT
AATTAGGGGGCTGTTATGGTAGTTCAGGGTGAAGTAATAATAGCCTAGAAGAAGGTGGTGACAATAGAAAGAGAAAACAGGCCCTGAATGTGCA
GGAATCATCTAGTAAAAGTTCCACTTCTTTCTTTCTGCAGGCCCAAGCCTTGCACAGTGCCCAACACTAAGTAAACACATGTGTTTATCAACTA
TAAGGAACTATGGAAACATTGTCAGGGATACAAAGGTAAATTGAGAGACCTGAGTATTTAAGAAAGAAACAGAATATTAAAGACTGGAAACATT
TTTAAAGATCTCTACTGCAGCCTCCATGGATTGAAGGTTTGAAATATGAGGCTCAGAGAAACTGTGTGCTGCTCATACATTTGATGAACCTGCC
TTAAACACCCTGTTATTTGTTATTCCAATAAGCCCCTAAATGTTATTAATCTTTTGTTGTTGTTGTTTCTATTAGCATTTCTACTAATAAAAGC
TTACTGTTTTGTTGACTAACTTTGAAAGCTGCTATTTTACATTTATAACATATGTGGGAAAGTATAGAGAAGGAGGGGAATTGACTAAGAACAG
TTGTGAGAAGAGATAAGAGAGAAATTACATCTGTAGGCCGGGTGCAGTGTCTCACGCCTGTAATCACAACACTTTGGGAGGCCCAGGCAGGCGG
ATCACGAGGTCAGGAGTTCAAGACCAGCCTGGCCAACACAGTGAAACCCCGTCTGTACTAAAAATACAAAAATTAACTGGGCGTGGTGGCAGGC
GCATGTAATCCCAGCTACTCGGGAGGCTGAGGCAGGAGAATTGCTTGAACCAGGAAGTCAGAGGTTGCAGTGAGCCGAGATCGTGCCATTGCAC
TCCAGCCCAGGTGACAGAGCTAGACTCCGTCAAAAAAAAAAAAAAAGAAAGAAAGAAAGAAAGAAAGAAATTACATCTGTAAACTGGTCTTGAA
GAATTTCCCCGAAAGCTTTAAAAAGATAGGACTGTCACTTGGAGAAAAGTTAACGATTCCATAAAACAGATATTCTAAAGCAGAAAGAGGTAAG
ACCTTCATCCTCTACAGCAATGTTTTTCAAACTGCGATTCACTACCTATAAACAGAGCACGAAAACAACTTTGGGATCCTGACCAGAATGAAGA
GAAGAGAAGAGAAGAGGTCTCAGATTGCATGCTTGGTAGTAAGGGGTAAGTATTGTTTTGTGAAACTTTTAAAAATTATTATTTAATAGGGACA
AGGTCTCACTATGTTGCCCAGGCTGGTCTCAAACTCCTGGTCTCAAGCAATCCTCCCACCTCGGCATACCAAAAAAGTGCTGGGATTACAGGTG
TGAGCCACCACACATGGCCAGAACTTTTCTTAGCTCTGTGTGTGTGTGTGTGTGCGTGTGCGTTGAGATAGGATGTAAGATGTGCTTCTTATCG
TGTCACATATAAAAATATTTGAGGCCGGGTGCAGTGGCTCACGCCTGTAATCCCAACACTTTGGGAGGCTGAGGCGGGTGGACCACCTGAGGTC
AGGAGTTCGAGACCAGCCTGGCCAACATTGTGAAACCCCGTCTCTACTAAAAATACAAAATATTAGCTGGGCGTGGTGGAAGGTGCCTGTAATC
CCAGCTACTCGGGAGGCTGTGGCAGGAGAATCGCTTGAACTCGGGAAGCGGAGGTTGTCGTGAGCCAAGATCGCACCATTGCACTCCAGCCTGA
GCAATAAGAGCGAGACTCTGTCTCAAAACATATATGTATATACGTATGTGTGTGTGTATTTGAAAGCCACCTTTTCCTCAAATAAATCAAAGCC
TTTCAAAATCAGTTGAAAAAATACAGAATTTTATTAAAAGAAGAAAACATTTGTGTGTGTGTGTATATATATATATAACTTTCTTTATTCCCCA
ACAGGTCTCTCCACCCAGCCTCTACCTCTCAGTCTCAGCCCTGTCTTTTAACCTCTTAAATATTATCCAAAGACTTTCCCTTGGTCAGATCTCT
ACATTAGCAACTCTATGAAATAGCACAGTTGTTGCCTTCATGTAAATAAACTCTTAAATAAAGCATTTATTTGATGTGCTACTGGTGAATGTTT
AACAATCAGTTTTCCAATAAGAAAAAGCCCTTATTTGTAGCACTTGCCATTTCCTGTGGTGTAAATACTCCAACTAGAGCCAATTTCAAGTTAC
TAACATTACATCACTACATATGAAATTGGAAAGAGATGCACAACAGCACATATTACATTGTGTGATAGACATAAATAACCTCAAGTATGTAGAT
AATAGGAAAATGTCATAAAATAGGAAGTGATGAGTTTTGAATATTTATTGTCTTTTAAAATAAAATATATTTAACTGTAAGTTTATATAATTTA
CTTTTTAATAATGGCTGTGTCTAACAATTAACTCACAAAATTTAGCTCCCGTGTATTCCTGACCCAGCTTGACTTCGCCAGCAGGCTCTGATCC
CACACTCTCTACCACCTGCTGAACAACTCTACCCGGATGTCTTCCATAAGAAACCACAAATTTAACATACCGAAATCTAAACATGCTTTCCTCT
TTGAATCTCCCAGTGCATACTTCTCTTCGCCTCTTGACTTCCCTATTTCTATTAATGGTGCCTCTAATATCCTTAGCAACCCAATCAGTTGCTA
AGTCTTGAAGGCTCTGCCTATGTTCTTCTGATCTGCCTCCTCCTTTTCATTCCACTTACGGTTACTGTCCTACCCCAGACAATTACCTAGCCTC
TTCCCCTTGTCTCTTCTCACTCCAATCTATCTGACAATACTGATAGATTAATCTTCCACACACACAGCTCTGATAATATAGCTTTGCTATTCAA
CGCACATACATGAATCCGGCCTTCAAAGCTCTCCTTGCTTCAGGCAATCTGGCTAGCTCCTTCTTTCCTGTGCTGGGAACATGCCTTGTGGATT
CTGATTGTGTGATTTTGCTCTCACTTTTGACTTTCTCTGGACTGTCCTTCCCTCTTTATGGAAAGACTCATAACTTTTATACAAGACAGCTCAA
ACAACAATAAAAATATGTGGGTTGGTTGTCATAGGAATATGTAAGTTGATGAGAATCTGGAGAGCGGAAACAAACAAGAAGTGCCAAATCCAGG
AATCATTTTAAAATAAAAATTTATTTGGTCACTATCTGTTATGGAGGTTCTATGAAACATACTACACTGTTATGGAGGTTCTATGAAACATGCT
ACACTGAGGTAGCACTTAGTCCACTGTCATTACTAAAAGATTTTCTGGGGGAGTCAACATGAGATTTATCTCAAAACTATGGATTTCAATTATA
CATGCCACAGCTTTTCTTCATTAACTGAAATAATTAAGAATTGTCTGCATTTTAACCATTTACTGTAACTATTTCCCTCTTAATGCCCTGAGCC
AAACTGGGTTGAGTGGGTGAGGAAAGGTGGGTGGTAGAGACATGGAGCCCCTAATCTGGTCTGTTTTCACCATTGATGAGCCTGATTCATCTTT
GGGATGTGGATCACGAGGATTAAAGATCCACCACGTGCCCAGGATTTCCCAGCAATTAGAAGCAAAGAAACTAGAATTTGTATCTTTTATATAT
ATTTTGTCCTTCAGCCCTTCTCCAGTGCTTAGAGTAAAATAAAATCCCTTAAGTGCTTGCTTTTTTCAGCAGGAGAATCCTAATGATGAGCAGC
ATGTGATCAAGCGATTCCTTTTCCTTCAAGCTGAGGTTGAAGTTCAGTAGCGAAGGAAGAAGGAACAGGCAGCTACAGCCCTCTGGTCAGCAGC
ACCAACTTTCTCACGGAGTTAAATTAGTTTGGGTTATGGAGAGCCTGAATCTTTAGCCCAGGAGAGGTGAAAGTGAATGAGGGAGAGGAAGGCG
GTGAGAGACAAATGGCAAAGGTAAAAGTGGGCTGGGTGCAGTGGCTCACAACTGTAATCCCAGCACTTTGGGAGGCTGAGGCAGGAGGATCAAG
CGCTTGAGCCTAGGAGTTTGAGACCAGCTTGGGCAATATGGTGAGACCTCTTCTCAACAAAATATTTAAAAATTAACTGGGCATGGAGGTGCAT
GCCTGTAGTTCTAGCTACTTGGGAGGCTGAGATGGAAAAATCACTTAAGCCTGGGAGGTGGAGACTACAATGAACTGTGATGGTGCCACTGGAC
TCCAGCCTGAGCAATAGAGGGAGACCCTGTCTCAAAAATATACATATTTTTTTATTTTTAAAAAAGGTAAAAGTGTATCAAAGCAGTCTGCCTT
CACTCTGATACTGAGATTATCAACCAGTGCTCTGCAGACCTTCCATGAAAACTACTGTTAAAGATGCAGATTGTTAGGCCTCATCTCAAACCTA
CTGAATCATGGTCTCTAGGGGGACAGCCTGGGACTGTGCATCTTTCATGGGTACACCCAGCAATTCTGATACACTCGAAAGCAAGTTTGTCTAA
CCTGTGACCCGCAGGCTGCATATAGCCAAGGACAGCTTTGAATGCAGCCCAACGCAAATTTGTGAACTTTCTTAAAACATTATGAGTTTTTTTG
TGGTATTTCTTTAAGCTCATCAGCTATCGTTAGTGTTAGTATATTTCATGTGTGGCCCTTCTTCCAATGTGGCCCAGGGAAGCCAAAAGATTGG
ACACTTGGGCTCTAAAGATTGAGGATCACTGCTCTAGTGTTGGCCAACTACTCTAGTGTTGGCCTGCAGACTCAATACAGCCTTTGAGCTAAAA
ACGGTTTTTACATTTTTAAAGGGTTGTAAAAAAAGACAAAAAGAAAGACAGACAAGGAAAGACACAGAAGAATATACAACATAGCCTACAAAGC
ATTTACTATCTGGTCTTTTACAAAAGAGTTTTCTGACCCCTTTCTAGTGCACTGCAAATGAAAGGCTGTACCCAAATTTAGCTCCAGTGCAGCC
CTGCCACAGCTGAAATAACTGATGTAGCAAGCAGATCTTAAAAAAAAAAGTGATGAAATGTGTAAAGTTGTCATCTAAAAATACTTTTGTAATA
ATTATAAATGGAGAGAGAAAATGTATAAATACAAACATTCTGTAATGAGTTTAAAAATATAGTTTCATCCATACAAGAATTTTGATAACTCCAT
TTGATTCTGTTTTTCCATAAGCTTATCAGATAGCAATATATCCAACATTAGCCTAATAAAATTACTGCATGTGAATTCTTTATTGGACTATGCA
TATTCCCAAACATATTATTGTCATACAACTGAGGGAAAAATGTAAAACTATATCTGGGAAATGAAAAATTATAAATTCTCAAAATGATACATAG
GAAAATGATTTACAAAGAAAAAAAGGAAAACTGAACTTAGTATCTTTCTACTTTAAAGGGGTTCAAGAACTTAGGAGTAGTTACACACCTCCTA
AAATCTTGAAAAAGAGGCTATGAACTCACTTCACAAAGGGTTCAGATACTCACATTGTGTCCAAGAGACTCAGCAATTGGGAATCTTGCCAGTT
AGATTCATAAAGCAATCCGAAAGCCAGAATGCAATTTCTTTAGGGGTGGTTTCTAGATGTTTATTCTAGATATTTTTAAAAGATTTTGTTTATT
TTTGATGTGAAGAAAGAAAATTATTATAGAATCTAGAAATAAATATTGGCTTTAAAAGTATTAATTTGCCTTGTCCTTTGTAATTGTGATCCGA
AATATCTCACAATAATTTTGTTTCAGTGTTATTTTCTTCTCAGGAGGAAAGGAATGTTAAAACCTTACTAGCAACTAACACTTGATAAAGATTT
AAACTATATAACAATTTTAAAGAAAGTCTAAAACACCAGATAGTCTTGAAACCTCGCATGCTTCACCGTTTAATAAAATTATGACTCATTTTAG
TAAGAACATGCTTTTTTAGTAAGAAAAAATGCTTTCTGAGCTAAGTTTGAACTGCTGGGGCACATGGGACACCCACAAACCCAGTCAGCAGAAG
TCTCAAACTCCTAAAAGATTAAAGGAAAAATACATTAGTGTGTACAGAGAATGAAAAAAAAATCCCCAATGGTTCTAATCTATAAACGGAAGTA
AAACTAAAACTCCCCTAAAATCCCCCCAGTCATCAATCCTTATAAATTCAGCACTTATCTTCTTCCTTTACTTCTGGAGACCCTCATTAAACAA
CACGAAAGCCTTTGCTGACTTTTATCTCGTAAAATAGAGCCCTCAAATGACACTAAGCAGGGATACCGACCTCCAAAATCACAAACTGTTTTAC
TTCTAAAACCATGCATGCAAACGTGGGGTTTCCTGAGTTCTGCTAGGGGCGGGCTGTCTGGACCCCCGTGTATTTTTTTTTTTTTTTTTTTTTT
TTTTTTTTTTTGCAGGTGTGCAATCCAGGGTGCGCGCTCTGTGCAGGGAGGGGAGCAGAGGTGTGCGGTGGGCACCGCCTGGGCCGGGCGGGGC
GGGGTGGGTGGGGCCCGGGTGTGTGCTGGGGTGAGAGTGAAGGACATGTGACAATACGACGGTGGCGGCTGCAGGATCCGGGAGGGGAGTGAAA
GCTCCGCTGGGGCGCTCCATTAGTGAGCGGTGATGGTTGCCGCCCACTTGTATTGAAGCGTCCTTTGTCACTAACAAGTTAAATTAGAGATGTT
ATTTATTTAAGAAGAAGGAAAAAAAACCCTAGCCAAACAGCCTATGAATACATATGCTCACATCCCCTACTCCTCCAACTCCTAATTTCCCCGT
CTCCAGAGGGCACAGTTGTAAACCTTGACGAAAATCCAATCTTCTGTGCGGGAATTTCCCCCCACCGCTTGCCGCCCCCGCGACAGTGAGTGGG
AGCTGGAGGAGCTCTGGTCCCGCTGCCCGGGAGCACGCGGAGCCGGGCGACCGCGGTGCGGCAGCCAGGGAGGAGGGGAGGCGGCGGGACTGGG
CGCGGGCGGGCCGCCGCCGCGACCCGGGAGCGGGGTTTGCTCAGGAAAAGGCGCCGTCGCGGCCCCCGGCCACCCCTCCCTGGCCCCGGGCTCC
CTGCCCGCGCGCCTCCCGGGCCTCGCGGCGCGCTAGGCGCACCGCGGCGGCGCGAGCGCCGAATGGGAGCGGCGACCCGGCCAGCCCGGCAGCC
CCGCGGGCGGCAGCCAGGGCGACCGCGGAGGCGGCGGGCAGGGCGCGTGCGCACTGCAGGGGCGCCAGATTTGGCGGGAGGGGGAGTGTCCAAA
GCTCTTTGTTTGATGGCATCTCTGTTTACAGAGTTTACACTTTAATATCAACCTGTTTCCTCCTCCTCCTTCTCCTCCTCCTCCGTGACCTCCT
CCTCCTCTTTCTCCTGAGAAACTTCGCCCCAGCGGTGCGGAGCGCCCTGCGCAGCCGGGGAGGGACGCAGGCAGGCGGCGGGCAGCGGGAGGCG
GCAGCCCGGTCGGTCCCCGCGGCTCTCGGCGGAGCCCCGCCGCCCGCCGCGCCATGGCCCGAAGACCCCGGCACAGGTAACGGGGAGCCGGGCG
GGCGGCCGAGGGCGGGGGCGGGGGCGCGCGGGGCGCCAGGCTCCCGGGAGCAGGTGGGAATTCGTTCCGGGATCATCTGAGGGGCTGTCAGACC
CTCCGAGGACCTGGAGCCCCTGCCTCGGCAGCAGAAGCCGCTCCAGAGACTGATGAATGGAAGAGTCTTTGCGGGAAATGTATCCGGACGTTGG
GAAGCACGCCCTGCGGCTCATTTTGCAAGTTGCATGGGGATACATTTTTCTTTAGGGGGAAAAAGAAAGCACGTTCCAGCCGAGGGCAGAGCGG
TGCCCACCAGCCCCGGGGAGCCCACCAGGTGCCTGGCTTGATGCCGCGGGTGTCGGCGAGGGATCCGCAGCGTAATTGCTGGATGCATTGAGAT
ATGTTTGGACTTGGAAGTGCAGAGCATATGGCAGATACAGGGAAAATGCTGGATTGTTTAGTAGCTGCAGGTAGTTCATTTAAATTTCATTCAT
TCTTTATGGAGGCGAGGACCAGTGTCAGCTGACAGGCGGCTGAAAAGCAGATTTTAGGGGGATAAAGGGGTCTCTACTTTTGCAAATTGTCTTA
AGACCTGGTTTTGGAGGTTCGAATCATTTTTCTCTGAAAGGCTTTTACTTCCACTGCAAACATTGCACGCGCACCCACACGCGCCGCCGTCGCA
CATGTCACTGCACTTAGGGAGGCTCGCCGGGAAGATGGGTGCAGTCCCTTCACATTTTTGGCCGGACAGATGGGAAGAGGGAGAGGAGGAGGAG
GAGGGAAATCCTCGTCCGAACTGTCAGTTGCTCGTTCCCCAGTCTCCACCGGCCTCTGGACTTTCCCAGCAGCACACGCCGGGGCTCCCTGCGA
GCGGCGGGTGCCAGGGCTAGCTCGGCAGCCGTCGCAGTCGCCACTCGGCTCAAGGGGACAGAGGCCGGCAGCACCCAAGGCCGCTGCCGCGCAA
CCGGGACGCGATCCCCGCGGGCTCTGCCCCCAGGCGAAAGGTCCCTGCGCGGCGCGCACACGTGGATGCGGCTGAGGTCGCCGCGCCTTCTCGC
ACCCTCCTTCAGCCGCCTTAGGTCGCCCCGGCCGAGGCGCGGTGACCGGACAGATCCTCGCGAAGGAGTTCTAAGGCGAAGTCCATGGAGGCAA
AGCAAATCCATTCGCCTTTCCTTAGATTGTTTGATTTTCTCCTACTGGTTTGTTGTTGAGCCTGCGGGCGCTGGTCCCCGCGCGGCGCTGGGAA
GTTGCAAAGAGCGTGGGTGGAGACCCTGCAGCAGCACCCGCGGGCTGGGCTGGGCGGGGAGCAGCGCCGGGGCTTGGTTGGGCTCTGGGGACGA
GAGGGCGACTTGGGGGAGCTCCGGGCTCCCTATGCCTACTCCGGAGCCTGGCCGCGCAGGACGGTGTGCTGCCCCTCGAGGGCTCCACTTTTCG
CCTTTAGGACTTCACAGGACAGCTACCGGGGTCATCTGTTTTTTTTTTTTTTTTTTTTTTCGAGAGCTGAAACTGGCAGCAGGAGGAGGGAGTC
GGGCAGGGGTGCTGGGAGGAGGCGCGGCAGCGGCTCCGCGCCCCGAGGTCTCGGCCGCCCCCGCGGGGCGGGGCCGCGCAGGTTCCCTGAGGCT
CCAGGTAGCCCAGAGGGGAGGCGGCTGGGAGGGGCGGGAGCCTTGAACCTGCCTCAGGGGAAGAGAAACCCGACTGCGGGCTCGGAGCCGTTTC
TTGCAAGGGCGAGCGTCAACTCGGCAGGGATTATATTAACCAGGTCAGCGAAATGAGTTTGAACCCCTCCGAATCACAGTAGCGGCCACAAGGC
ACTTCCTCCCGCTCCCCTCCCTCTTCCTAACCCCCAGCACCTCTTTTCTTTTTCGTTTCTTTGCACGGTTTGTTTCCTTGACAGAATGTAACAT
TCATAGTTGTACTCTTGTAACCACACCGGGTCTAGCAGGTGGGGAGTCGAGTGCATCAACCCTGAAATCAGCCTTTGAAAATCCTCTGACTGTT
GGGTCTGAGATCTTGTCAGAGCAGATAAAGGAAAAGTTATTTCAGGTTCCTTAGTAGAAATTAATCATGCTTCTAGGACGACTTAGAGCAAGCA
AATCGCATGCAAAGTTCAAAGGCGAGCCTGGGTGGCCAGCCTGGCAGGGAAACTCAGGAGCTGGGCGCGTGAGCAGCCCCGGACTCGCCCTGCT
GCGTCCTGGCCCCTTCAGGTCCTGCAGAAGTCACTCTCCACCTTGCCCCCAAGACCTTAGTTTTGCACATCTTTGCCTCTGTGCTTAGCTTTTA
AGAGGCACGGAAGGACATGGCATGGTCATGTATTAGCGCTGGAAAGTACCTTAGAAATAGGATCCAAGCAAGCCCTTATTGTAAAGGCGAGGAA
CTGAAGTCTTGAGAGAGAGGAAGTGATTTGTCCAAGTCATACAGCTAGGTGGAGGCTAGACTAGAACCTTTGCCTCCAGAACCCTAGTCCTGTT
GATTCCCGTGCTCTCACCTGACGTTGGCTGCCCCCTGCGGGCGGCTGAATAGGTTGCTTGTTCCTGGGTTGTTAAACCGCTGCGGAGAGAGAGG
TGCTCAATGACTACTCTGAAAAATGTGCTCAGTTCTGAAAATGTGACCTCTAGATCCAGCCAAACCTGAAAAGTTAATTCGACTTGAATCTATG
ACTGCAGTTTCAGATTCCTCTGGTTTTCTTGGTGTCTCTCACATTTCACAAGGGACTGCATTTGGGGTCTTTCCAAGGAGTTCCCTATGAATCT
TTCAAAAGATGCAGACTTACACCTCTGGGCTTTATAGCTTTTTTTTTTTTTTTTTTTTTTTGCTTTATCATATCGTGTTTTACATTTTTGTAGT
TCTTGTTCAGAAGTTGTTTAGTGCCTCCTGTTGACAGTGGAAACAGAACTAGGCTATTGTTTCAAAACACAGACACTAAATGAAAGGAATTATT
ACAGATTATAAATATATATTTCCTGGGATTTTATTTGGTGGTGGTGGTATTTTAAATTTGGATTACATCATGTCGCCATTCAACCTGGACTATC
AGATTGTTGCTTAAAATAATAGCTTTAAATTATGAGAACCCCCAATTCAGGATTTTTGGTAAGCACTTCAGCTTCACTTGTAGGGGGCTGGTAA
TATGCATACCAGTGAGTTAGTTTGGGAAGACAAAACCTGTAATGAATATAACTTTTCTTTTTAAAAACAATGATTTACATTATGATATGGCTTT
ATATCATTGTTTTTATTGGTCTTAGTTTAATGGGTTTCCCAACATTGCAATGACAAATTTTAGTGAAGTTTCTAAGATAGTATTTTTCCTATTT
TAAGTTTTATAAGAAAAACTATAAAATAAACCGTGTCTGTAAAATTATTGTCATCTGATCAGTTGATTAGATTAACAAACATTATGATTATGAT
TAACAAACAGTAAGCATATAGTTACTTCTTCAAAAGTCATAAAATTTCCTAGGTTAGGTTAACTAAATAAAAGAAAAAGCTTTCGAAAATAGTA
ATGGGTTCTTTTAAATCCATGGCTTTTTTCTGGGGAAATCCCTTCTGGATTAGGTTACATTTTATAATATTTCAAACACCATTCCATCAGAGAC
AGAAAAAACAAGAGTAAGTAAGACTCTGACTAACAAGTGGCCTAATTATTCACTTAGTTACTCTAGAAACTAAGTATTGTAAACATGGGCACAA
GTTGGATCAACCAGGCCTGGAGTTGTGAGCAATTTGGTATTAATTTTATTTACAAAACATTAAAGCTTGATCACTCAATGTTCTTATCTTTGCT
TTGGTTTTAAAATCCTTTCCTCTTAGATTCTCCTAATCCTCTAGACTTTATGGGATCACTATAATTCTGTTTTGCGCTGTACTACTTCTTGATT
TTTTTCTTCTTTTAATAAAACAAAAACCCCATTGGAATAGCATAGTTGAATTGTTTATTATGTTTGAGAAATATTATTTAAACGATGTGACAGA
TGCCAAAGATTTTGAGTGTGCACTTATATAAAGGACATGGGTTCTTGTTCCTTTTCTTATCCTTAACCTTAAGTTTTCAACTTAAACCTTCACT
GGTTGGAAGGTGGCCAAATGTGTAACTTGTCCCTGGTCTAATAGTAACAGCAGGTTCAGACATGCAGGGGAATAGGAAGGTGCCAGGTCCTTGG
CCGTGTCTGTGGATACCCATAACAGCAGAACCAGTTTACAATACTAGAGCAACAGAATGCAGCAAACAATCTTGTTGTGCAAGTTTTCAAAGTT
TTGTCTTCATAACCTTTGAAAAGATTGTTGAGGAGTTTTGTGTAAGTTTTGTAATCCAGTAGTAGTCTAAATCCTCTTGTTTCAGCCCACGTCT
ACCCATTCTTATTTCTGCAGCATATATAGCAGTGACGAGGATGATGAGGACTTTGAGATGTGTGACCATGACTATGATGGGCTGCTTCCCAAGT
CTGGAAAGCGTCACTTGGGGAAAACAAGGTGGACCCGGGAAGAGGTAACTAATCATTTTATCAAGACGCAGAAAATAGATAGAGTGTATAATTT
ATAAAAAACAAAATTTCAACTAAACTACAGGTGCTCAAGCTCATTAGCAGGCTCCTTGAGATCTTATCCTAGCCCGCATGTGCAGCGTGCCCTA
TGCCCCCCACTTCATTATATTATCCATTTCCACACTATTTGCAGTTCTTTGAATGTCCTCTTCTCATTTTAGGCTTCATCTGTGTTTCCTTTTG
CCTGTTGAGTTCTCATCCTTTTGTCCCACCTCTTCTTCCTACTTTTACATTACCCATGAAGGCATCACCTCTTCTGTGAAGCCATCCCTGGCTT
CGCCGGACAGGATTGGATGCATCCTCCTGTGATCCCATGCATGGGTGCATGTTCTACTTTATTGTTGCTGGGACATATATACCTCCTCCAGCTG
ACTGCAAGTCTGTTGAGGGCAGGGCTCTTGTCTATTCATCTTTGTGTTTCCTGAATTCACAAATGCTTGGACCCAAAATAGGATATTAATAAAT
GTTCTCTCAATAAGTGAATGACTTGCTACTCCCAAAAACAAAACAAACAAAAGAATAAAACAAAACACTCAGAGAACTCATCTTTTTACAGTGT
ATTGATTTAATATCCTTGATATACTTAACAGAGCCATCTATATGAAGGTATGTTTTAAAATCATCCGATAATGGATGGAGACACATCTGCTTCT
CCTGTTTCTTTTTCGGCTGGCTTATCAAAAGTTTGATTTTGTAGGAATGGAAAAATATTTTAGAAGCAAAATTATTAATATGTGGAGAAAAGTT
TCTCTAATGTTCTTAAAATTTTTGCAACTAATTTTAGATGATTCATGTTACAATAAATGGTATTGGCTCTTCTTCAGTTTCACTGTTCTCTGCT
TCATTTAAACCAGAGCTCCTTTTAACAGGCAGGTAGGATTCCCAGAGAGGCCCATAGGAAATTCATATTTTACCTATTAAGATTATCCACTTGG
ATAATCCTTATGATACGGAAATTCTGTTGTCAACATTGGTTTCCTAATTCTTGTGTCTGTATTGTACCAGGGACCTCCACTGTGTGTGAATGTT
ACCTTTGCAGAAACATAAGAAGGAATGCATTTATATACTTATGAACTGGTAGGATTGTGAACAGCATATAAACTAAAAGAACTGATTAGCTGGA
AATGTTTAATGTCTTTTATGTTCTAACACATCTGGCCTATCTAAATCTAACTGATTTTCTTATATAGCTTTCAAATTTAATTTTAAAAATGGTC
TTTATTTCTTTATAAAAAGTTAAACTAACTGGAAATATTCTATTTCTTGCTCAAGATCCTATTTATTACCATAGGTAAATGTGTACTGAATCTA
GCACTGGAATGCATTTTTTCCTAACAGAGTAAAGCAGTTATTTATAATAAACACTCAATATATGCCAGGCATTATGATAAATGTTTTGCAAAAT
TGCCTCATGTAATCCCCAAATAACCCTGTTAATATCAGCCTCATGTTAATAAATTGCCCCATGTAATCCCCAAATAACCCTGTTAATTTCCATT
TTATAGATGGCAATACTAAGGCCCAGAAAGGTAAAATGGTATACCCGCTTTACACAATTAATAGTTGAGTCAAGATGCCAACTCTGGTCTGATT
CTAAATAAATCTATACTCCCAAGTCCGTATATTACATTAATATCTCCTGTATTCGGATACTTTAGAGAGACTTTTTATTCTAGATTCGTTCCCT
CATTCACTTTAACTTGAACAGAGTTATATAGTAAATAACTGATATCCTAGGATTACCTTTAAATGTCTTAGGATGAAAAACTGAAGAAGCTGGT
GGAACAGAATGGAACAGATGACTGGAAAGTTATTGCCAATTATCTCCCGGTAAGTTAGTAAGTTTTTCTTATAACGAAAGGAAAGCTTCTCCCA
AAGATTTCTATAAAATATTCTAGGAGGAGTTATTAAGATAGTGTATAATTTACTCACATTTAAGAAGTGGGAGAAATGCCCTACCCATAACTTA
TATTTTATATTATAATGCATATAATTAAATTATTAGAATTTAGATTATTAGAATCGATTATTATAATTTAGATTATCAAATTTTAAAAACAGTT
GCTTCTTGTTTTATCTTTTCATTTATAGGATAATTAGTATTTTGATGATTTGTTACATGGTAGTTGATTAAACTTGATATTTCCTCCAAGTCAG
TTTTTCCTGAATTCCCTATTTTTGTCAATAGCAATACTTTTGGCACCAAGGTTTAAAATTCTGAAGACCTTTCTTGACTTATCACATTCCCCCA
ACCCCTACATCTAAGCAGTTACTAAGGACCCTGGAATTCCTTTATAGTCAGTCCCGTCCTTTTCATTCTCATGGCTGTGCTGAAGGTTGGGCTC
CTGCCCTCTCATTTGGACTATCATATAACTTCCTAACTGGCTTCCCCACTTGTAGTTTTCCATTTTTCTTTCTTTTTTTTTTTTTTGTTTTTTG
TTTTTTGTTTTTTGAGATGGAATCTAGCTTTGTTGCCCAGGCTGGAGTGCAGTGGCACGATCTCAGCTCACTGCAACCTCCGCCTCCCAGGTTC
AAGCGATTCTCGTGCCTCAGCCCCCTTAGTAGATGGGATCACAGGTGCCCGCCACCATGCCTGGCTAATTTTTGTATTTTTAGTAGAGACAAGG
TTTCACCATATTGATCAGGCTGGTCCCAAACTCCTGACCTCAAGTGATCTGCCCACCTCAGCCTCCCGAAGTGCTAGGATTGCAGGCATGAGCC
ACCGTGCCCAGCCAGTCTTCTACTTTTCCATTCATCCCAAACACCATTGGCAGGTGGAACTTCCTAAAATGCAGCTGTACCTTATCTTTTCAAA
ACCAACCACAGTGACAGAATCTCACAAATTAAGTAAACTGCCTTGACTTGGCACACAGAGGCCCTCCTCTATTGCCCCAACTTACAGCTCCAGT
TCTGTTTCCTGCTTCCTCTCTCTAAGCAGGTTTGCTTGAATTTATTTCTGCTTTACCTCCTCTGGGCTTTTGCTCCTGGTCTTCCCACCTCCTA
GAATATTCTCCCTTTATGTCACCAATTAAAGTTCTGTCCATCCTTCAAAGTCCTTATGAAGAGCTCTTCAAGACTCCTCCCAAGGAAACCATTT
CTCCTCCTAAGAAGATGCTTCTCTCCTCACTTCAGTATCATTTTGCTTTGGTCTTTTCTTCCAAGTGAATCAAATTCAGCATCTGTGATAGTCA
GTCATCTACTTGTCTTTTCCTTCTTATAAGTTTACAAACTCCTGTAACATAGGACCTATCTTTTATGCATCTTTTTTCTTTCTGCAATATAAAT
ACTTTGGTCCTGGATTGAAGCACATCTCTTGTCTGAATGGGAAGCAAACTTTAGTCTTTTAGGGTGGTTTCCATGAAAGCCTGACAACATAGAA
TCTCTATCAAGCCTCAGGCTATGTAGATACTCTGCAAAAGTATCTGAGGTTAAGGTTAACTTGGCAGGCACATGTGTAGTATGATGGTCCTTTA
GATCATGTGGCAGGAATGTTTCCCTCAGGAGGCAGAGTGTCTAATTTTAGATGCAACTTTGATATATTACTTGCATGTTCTGTAGCCTGTAAGT
AATGAGGGATAGATGGGCTCTAAACATGCTCTAAAATGTTCTTAAATATTTTCACTGCATATGGTCTATGTGTGATTCCTATTACAACAAAAAA
TTCACGTGCTTATCACATCATATCTTTATGGTGGTGCATACTTTATTTGTCTAGAATCGAACAGATGTGCAGTGCCAGCACCGATGGCAGAAAG
TACTAAACCCTGAGCTCATCAAGGGTCCTTGGACCAAAGAAGAAGATCAGAGAGTAAGTTCTTTCTTCATTGGTGTGTGACTCATAATTAAGAA
TATTCCCAAAATGCTAATATTTTCCTATTTGAGGAAGCAGGTAAAATGGGCAAACAGGAAGTAGAGGACTCTATTCCCATATTTCCAGTGAATG
AAAGCAAATTTTGGAAATTTTCTAAAGATCTTGTAACACTGAAGAATGATTATACTGACTCATTACATAACTTTAAAACATAGGTTATTTTTGT
GTGTTTATCTGAAGGTGATAGAGCTTGTACAGAAATACGGTCCGAAACGTTGGTCTGTTATTGCCAAGCACTTAAAGGGGAGAATTGGAAAACA
ATGTAGGGAGAGGTGGCATAACCACTTGAATCCAGAAGTTAAGAAAACCTCCTGGACAGAAGAGGAAGACAGAATTATTTACCAGGCACACAAG
AGACTGGGGAACAGATGGGCAGAAATCGCAAAGCTACTGCCTGGACGGTAATAATATGTCAAAAAATATATTGATCGGGAAGAATGAGGGAGTG
GGTATTGAACATTCTGCTTTAAATGTATGGTGAGTAAATTATATTTCATCAGTCGTAAGTGTTTTATTAGATAAACCAGCTACATAGCTTTTAG
AGATTGAAGACATCTTAGAGTTTATTTGGTTGAGAACTTCCAGGATCCACCTGACAGTGAGCCCTGGGTGAAGACATTTAGCTTTCCCCAGCCT
CAATTTCCCCATTTCCAAAATGAATCATACAGGGCCAGTGTTAGGATCAAGTAAAATGAATGTCAAAGGACTTGGTAAACTATAAAACTCTAAA
TGCATAGAAAGAAACTGAAGACAGTTTGTCTCTGGCAGTTCACGTAGCTGGTTAAGTTACTCAAAGGAACTCAGCTACCATTTTCCTGATAACC
ATCATTCATTTCTTTTATTTTTTTTAATTATTATTTTTTAGAGACAGAGGCTTGTTCTGTCACACATGAGTGACAGAGTGCAGTGGCATGATCA
TAGCTCAATACATCCTTGAACTCCTGGGCTCAAGGGATCCTCCCACCTCAGCTTCTTGAGTAGCTAGGACTACAGGTGCACCCCACTACACCCA
GCTGATTTTAAAATATTTTTTGTAGAGATGGAATCCTGCTATGTTACCCAGGCTGGTATCAAACTCCTGGCCTCAAACAATCCTTTCACCTCCC
AAAGTGCTGGGATTATAGGCATGGGCCACCATACCTGGCCACCAGTATTCATTTCATTATACCACTTTGCTTAATTTTTTACTTCATTGATTAA
AGAAATAATGTATTTCTTGAATTCTCATACTACTTCCAGGTTTTTAAATAATGTCAGGGTAATAATGCTTTCTTTTTAATGAACAAGGCAAGAA
AATGACCTCATTATGAGGGATAACTATGGAAGCTCATTTTGTCCCATTTTTCCCACTTAAGTAGTATATAACAGATTTTGTTCCTTTGGAAAGC
AATACTTTTAATGATAAATCTTGCATTAAAATGATGTAGATCAAAAATATTAAAAATAGTTTTATTCTTGAGCTTCATAATCCAGGAGAAAGTT
TATATAGTATTCTCTAGTGATGCTCCAAAGCATTTGCACCCTTGTGGTTCAGTATAAACTTAGAAATTTTAAGAGGTTGGTAAAAAAAGGCCTT
TCCTCCCATATGGCCTGAGAGGATACACTGCTGATTCTTCTCAAAATTAACAGGGCTATTGAACTTCCTCTTTCTTTAGCATACATTCCCCCAC
CCCCATTGAAATAGAAAAAGGGAGACTTAAACGGTTTTTTTGAATTGAGAAACTGTTTTCCTGAGAATGGAAAGACTTTAGTAAAAATGCGTTG
CCTTTTGAAAATATACTGGGGGTTAGGATCTTTCCCTTTGGGATCCCATTTTCCACTCTCGTCTCTGTCTGATTCAGAAAACAATTGGGGTGGC
TTTCAAAGAGTAGGAGGTTTTTTGGTCTCAGAAGTTCTCACTAGTGCTTTGAGAGATAAAGAGTGAAGTATTCTTCATCAGCAGCATCTTATCA
TCCACCAGACTTCACCATGTCCCTCTCGTGGTGTGTAGGCCCTGCTGTGCCACATTCAAAGGAGTAATTTCCCCAAGGCAGCTGGAACTTTACA
TTGTGTTGGAGTCTTGTACCGCGACCGGTCAGAATAAACATGAAGCGTTATCGTATTGAAAATACTCCTTTACCAAGGAAATGGAATGGTTAAA
AGATACTGATATTTCTAGAAAACGACATGCATTCCAGATTGTGTAACTAAGAGAAATCTAACTAGGCAATAGAGAAAGCCTGATCTCAGAGGGT
GGAGAAGAAGGAAACAATTAAAAAGAGAAAACAACTAATAGGCCCAAGGGAAAGGTCTCTGTTAGAAACAGTTTTCTGTCAATTCACTTTAATC
TGAATTGAAATTTTTGTTTGTGAAATTTGTGTGATATATTTCTGTGCAGAACTGATAATGCTATCAAGAACCACTGGAATTCTACAATGCGTCG
GAAGGTCGAACAGGAAGGTTATCTGCAGGAGTCTTCAAAAGCCAGCCAGCCAGCAGTGGCCACAAGCTTCCAGAAGAACAGTCATTTGATGGGT
TTTGCTCAGGCTCCGCCTACAGCTCAACTCCCTGCCACTGGCCAGCCCACTGTTAACAACGACTATTCCTATTACCACATTTCTGAAGCACAAA
ATGTAAGCCATTCCTGTGAATCTAGTTTAATGAGAGAGACGGTTAGTTTAGCTCCAGGTAATAATCATACTTTGCAGTTGTATACTTTTCAGAG
AACTTTCCTGAGCATGATCATGGCCAGTCTTCACCTATGCCCTTTGAAGTAGATAGGGTGTAGGTATGGTGTGTTACCCCTGGTTTATGTCTCC
AGAAACGAGGATGGTAAGCGCTTTGCCCAGGGTGACACAGCTCATAGAGATAGTGCTGACTAGAAAACGAGCTGTCCGATTCTAAATTGCTGCT
TCAAATCTAATTTGAAGGCAACCTTTGAATGTAAATTTACTTAAGGTACTATTGAAGAATAGGGGAATGGAGTCGCATTTGTAGATGTAATGTT
TTTCTCTTCCAAAACGAAAAGGGAAGGTAGTATTATGTTTAAAGAGGAGAGAGTTTGACACTGAAATTCAGTGGTTATGGTATGTTTCATTCTG
GCAGTGATCAGGCAGACATGTCTTAATTTATTCACTCAGTAAGTGTTTACCTTCTTACTCTGAGTCAGGAGCAGAACTTTGTGACATTCATTTT
CTGATGTCTCCTTTTAGTCTCCGTTGGATCAGTGTGATCCCTTCCTTATTTCTAGATATTTATATTTAGGGAAAGTGATAATCCATAATAGGTG
GAAAAAGAAGAAGAAAGAGGAAAAAAATCGAGAAACTTTAATCTTAAGAATAACAATATTAAATGATAAAACTTACCCAAGAATAGAGAGCTCA
TATGCAAATTATATGCAAAACATGTTCATAAATAGTTTTTATTCTTCTCTGTCCATGGATTTGACTACAAACTTTACAGAAAGGTCTCAGATGA
ATAAATTATCATAAGAATTCCTGTGCTTTTTATTAAAACTCAAAATTATTCCAAGAAAAATATTTTTATTTACAAACAGCTGGTGCCATCAATT
TTTCCCATAGAAACAATTTTGAAACATTCATTAATGTATTTTATAATATATTTTTTATTGTTTTTTTCATTGTGTTTTTCTCTAATTAAGGAAC
ACTTCCCAAAATTTAAAGTGCTCATCAACACCTCCCAAGGATTTTTCACCATGTTCCTTTAGCTGTTTAGCCATTTTAAAGGCCTGGCTAAATT
TCACATTAAAAGGTTTTAAAAATTTGTTTAGTGTATTTTATCAGTAAAGTGTTTTTTTTCTCTCAGTCCCAGAACGAAACCTCAGGAAGCCAAG
TCCCCTGAAGCATATGTAGCCCTGAATGACGTGGCCTTTGTTTTGTCTTTTGCATCTAGGTCTCCAGTCATGTTCCATACCCTGTAGCGTTACA
TGTAAATATAGTCAATGTCCCTCAGCCAGCTGCCGCAGCCATTCAGGTAAGATCATTGATCATTCACTGTTCAAAGCACCACTTTTAAGAAATG
CTTATTTCTTTCATCTAAACACATATTTTTACCTGAGCAACTAAAGTAAAAAGGAAAGGGAACATGGAGAGGAGAGCAGAGTCTTGGCCAGCAA
TCTATTAATCTTGTCTTCTAGAATGAGTTTGCTCTGGAATTTTCTGATTCTTTGATGTTGCAAGGTGAAATAACTCATCAGTCAGCATCCACTC
TAGCCTGAGATTTCACATCACTCCCTTAAGTCTGAAATAACATTCACAAAGATTTCTGCAGGAGCCAAATTTGGTTGGTGGTGTTGTCACAGTG
AGGCTCTTTGGGCTGTGCGGCACCTCATGACCATATTGGCTACACCCATTGTATTTGCAGCTTCCAATCAGACCTTTGTCTTTATTTCCCTTAC
TTTGTAATTTCAGAGACACTATAATGATGAAGACCCTGAGAAGGAAAAGCGAATAAAGGAATTAGAATTGCTCCTAATGTCAACCGAGAATGAG
CTAAAAGGACAGCAGGTGCTACCAGTAAGACTGTCATCATGTGCTTGAATGAGGGGATAGCAGCTTTGCCTCAGTTTACCTAAGCGCTCTTCTC
TTCTAAATATTACACTTAGCAAGGCTCCATATATCCATTCAGAATGTCTCAACACAAGAAGTTGCTTGTAGTAAAATGTAGTTGGTATCAGATT
ATATGCTGATTAAATTGGAAGCAGTCTTTTTGTAATTGCAATAAAAATGCAATATCCACTTATGATTGTTATCATCAATTTTTTTCTTCAGAAG
GACTATAATCAGTTTAAAGACTAGCAAAGATAAAATGAATGAAAATCTGCATTTTCTACAGAGCTATGTATCTATATGGTACCATTTTGGTTTT
TTTCTATTATTTTGTTAACCTATATTTTCATATTTTATAATTTCAGACATGATTTGATGCATGTTCAGTATATACATGTAAAAGGTTATATATA
AAACCTCTTCATAAATAACATTAGCTGCTCTCTTTTATTTGCATGTGTGAAAGTTATGTGGGCCATTACTGAATTCTGACATCTTTAGCGACTG
GGCAGCCAACTGGGATGGCTCCTTGTGCTTTGCAACATACATAGTTAACCAACAAAGACAATAAAAGAGAAGTGATGCCCAGTAGGTATTCCTA
GGGGTAAATTTATTTTTTGTTAAATAATAAGATGTTTATGTGCACATGCTAGTTCGACCACTTTTTAACTTTAGTTAATGTTTTGCAATTTCTC
CTGTTGTGTGGTCATACTGTAAGGAGACTTCTGTTAATTTGCTCTTCTGCTTTCCTAACCACGTTGATTTGGCAGTGCTTCACTGCATCAGTGC
AATCTGTAGCATTAGAAAGGGATAGAAGCAACAAGAATATGTGTAGATCAAAGCAACTCTAACTCCTGAGTCCTCTAGCTTTTTTGTGGTTAGA
ATGCAAATAGGACAGTTCTTCAGTTCTTCACTCACAGCAAGCATTTATGGACCTTTGGCAAATTATATTAAAGTGGAATTTTAAGACAATATGA
TAATTATACTTCGAAATATAGACCTATGATTTGACATTTTTACAAAATGATAACAAGGTAATCATATAGGTACAACCTCTAGCACTATTAAAAA
CAGGGTCTTGCATTGATAAAAGGAAACATCTTGACAACTGTTTCATAGGCGTAAGTTTGGGATGATGCAACTACTCTTATCTTTCCTCCAACAG
CATCTGATACCTTGTGCAACTTCATTGCTAAGTTCCTTCTCCCTTTCTTCTGTCCTCTCTTTATTTCTACACCCTTCCCCCTTCCTTAGACACA
GAACCACACATGCAGCTACCCCGGGTGGCACAGCACCACCATTGCCGACCACACCAGACCTCATGGAGACAGTGCACCTGTTTCCTGTTTGGGA
GAACACCACTCCACTCCATCTCTGCCAGCGGATCCTGGCTCCCTACCTGAAGAAAGCGCCTCGCCAGCAAGGTGCATGATCGTCCACCAGGGCA
CCATTCTGGATAATGTTAAGAACCTCTTAGAATTTGCAGAAACACTCCAATTTATAGATTCTGTAAGTAGAATTGTGAAGGGAAGTTAACGATT
CTGGAAGATAAATTAGAAAACCCATTTCTTAAATCATTGCCATTTTCTATAGCCAAGCTGTTATTAGCATATATTAATGTAAAGGTAGAAGTAT
GATTTTCATCTTCATGAATATGTTTTTTCAAAGATCTGATTTCATAGCCTACCGAGAGAGACAAAAGTATTTATAAATACTTACAAAATAGGAC
TTTTGAAGGAAGAGTTTTTTTTCACATTTTCACACTTTTCCTTCAAAAGTCATATTTTTAAAAATAGTCAGATTGATGACTTATAAAGCAGAGC
TTGGATTATGGGAACGGAATGGTGTTTGAGTTACTTTTAACTTTTTTTTTTCTTTGCTTACTTCATGGTGCTTCTCTAGAATTTTGTCTTGCTT
TTGAACAGCACATTAATGATTTGGCTTACTCAGAGCTGAAAGCAATCTTTTAGTGTATTTGAAGTAATAATCAGCTCCTTGGTCATACCTGGCT
CTTTCCACAAAATGGTGATTATTGATTACTGGTCCCATTGCTTCACTGAGATGAATCATCTTTCGTGAAACAAATTTGTATTCAGCACCTCCTC
AGCGAACACTTGGTTCCTTTCCCAGTTGATTAAAAATCATTTATTGCACACTCATTGGTTAGGAGATGACCATTGCCGTAATATGCCATCTAGA
AAAGGTCTTCATTTTGCTTTCCATTGCATGCAGATGTAGAGTGTCGGGAGGTCCCTGCAGCACATCAGAGGGCCAGCCTTGAGGCAGCCCACTA
GACCCTGCTCTACTGCAGTATAATAGAGCAACTGCTCATCTTGAAGCTGTTGCTCAAGAAGCCAAACCAACGGGCCTAGTGTTTGCTTTGCGTT
GAGCATCTCTCTCTCAGTGCTGTTTCAGGTGATGATGGCACACACTATCTCAAAGTTCTGTGCCTCCCACATTGTTTCAGGATTCTTCATCATG
GTGTGATCTCAGCAGTTTTGAATTCTTTGAAGAAGCAGATTTTTCACCTAGCCAACATCACACAGGCAAAGCCCTACAGCTTCAGCAAAGAGAG
GGCAATGGGACTAAACCTGCAGGAGAACCTAGCCCAAGGGTGAACAAACGTATGTTGAGTGAGAGTTCACTTGACCCACCCAAGGTCTTACCTC
CTGCAAGGCACAGCACAATTCCACTGGTCATCCTTCGAAAAAAACGGGGCCAGGCCAGCCCCTTAGCCACTGGAGACTGTAGCTCCTTCATATT
TGCTGACGTCAGCAGTTCAACTCCCAAGCGTTCCCCTGTCAAAAGCCTACCCTTCTCTCCCTCGCAGGTAGAACACAATTTCTGCACAGCTGTT
ACTCATTTTCAACAGACACCTGAGCCTTAATAATCTAGAAACTAATACTTCGGAACAAATGACTAATTACTGCTGCCTTTGCTGATTTCATTCT
GTCGTTGAATCTAGCTGTTGCTAAGTTATACTGCCTCCCAAAGTTTAGGCTGTCTGCAGGCTAACTGTTGATTTTGGCATCATTCTCTCTCTTT
TACTTTTGGGTGGTTTTGAAAGATAGTTGCATGAAACGTACTTTTATTTCCTTCAACACTAGAGTTTAACATTTCTGTCCCTTTCTTTTTCTCC
CATCTGATCCCTCCCTTTAAAATTGTTAACATCATTTCTTCCTCGTTGTTCATTTATTCTTATGCGATTCACTGACCCAGGGGAGGAGGGAACC
AAATTGTGTTTATATAACATTTGGGTTGCAACTAGAAAATTTAAAGCTAGAAAATTTAAAGGTTCCAATTCATCTTTAAATGGAAGAGTTTGGG
AAGAGGATGAGAAACAAATGCTTAAGGAAAAGAACATATTTTTAATTTCAGTTTCTCAACATTGGCTCTTTTGAGTTGTGCCATACTATTTTAC
TAGTGCAGTTTTTGCCAAGGAATATTTTTATTTCATACAGCTTTTTTAAGGCATGAAAATCACAATTCTTATCAGAGATTTGTGTTCCTAAATT
ATTTAAATAATTAAATTAATAGATAATTTGGCACTTTAAAACATTTTTCCAATTGTATCTGTTGAATTTGTTTTAAGAACAGATTTAGGTATGA
TATAGGTATATACATTTGGGAAACACTGAATCAAACAAAGTTACAAGTAGGTTTCTTAGCTGGGCATAGTGGCATGGGCCTGTAGTCCTAGCTA
CTGGGGAAGCTAAGGCAAGAGGATTGCTTAAGCACAGGAGTTCAAGTTCAGCCTGGTGAACATAGCGAGATCCCATTTCTTTAAAAACTTTCTT
TTTTTTAACTGCAGGCCTTCTCAGAGTTATTAATATGCCGTTGTGCCTTGTGAATTTCCAGGAGGAGATTATGATATGTTGTGTTTCCCAAATT
TATTTTACCTTGGAATTGTTTAAGGAACACCTAGTTTTTTCCCAGAACTTTAGTGTTCTGAGAGACACAGTTTATTATTCAAGAATTTTCCATA
TAATGTAAACCTTCTGTAATACTAATTTTGGTTCATAGATTATTAAAGAGAAAAAACAAAGTATGAAAGGAAACTATTAATTATTAACTATTAT
TTTCCCCAAAATCACTAAAGCCTTTTAAATGTTAATAAAGAACACATCTCATTCTCTTTAATGACAAGTGTCATTTATTGAGAGTATTTTCTCA
CAGTTTTGCAAGTTTTTCAGCAATGACCCTAAATTTTATTTCTTGGAAACCACACCCAAATCCTGGGTGCTCAATTGAAATAAAACAATACCCT
AGTCAATATAACATGCTTGTTAGCATCTTTATTATTTAATATAGTGGGTCAGGAAAACATTCTTGTTATCTAGGTGTGATTTTTAAATTGGGGA
GAATAAAGAATTACCATCTAATCTAAGTATTTTTTCTTTCTCTCCATATTTAGTTCTTAAACACTTCCAGTAACCATGAAAACTCAGACTTGGA
AATGCCTTCTTTAACTTCCACCCCCCTCATTGGTCACAAATTGACTGTTACAACACCATTTCATAGAGACCAGACTGTGAAAACTCAAAAGGAA
AATACTGTGTAAGTCTTTGGTTCAGGAATAAAATGATTTATCTTATTTACTTATATTTAATTAATGGAATATAGTTCCCAGATGTCTGATCCAC
TTGTATGTGCATAATTTTACTGACCATTTATATATAATCATGTCTATTCCCACATTGAATATATCTGTCCTGGGCATATTACAACTACCTACAG
GTAGAAGATGGGAAGATAAACTAGATTCCTTTTGTAACTTACTCCAAAATTTCCTATATATGCACAAGTAGTTTTCATAAAACTTTTCCATTCG
GTTTGTTTGTTCCCTCCATAAGGCCTTCTTATGAAAGCCAGATTTTCAACCTCCTTTCCTCTCTAATTGTAAGCTTCAGAATAAGAACGAGTAT
GGTTTCTTACCTAGTTTGTATTTTTATTTAATTTTATTTGTTTATTATTTATTTATTTTTAGTTTGTATTTTTTAATCTTATTTTTTCTTTTTG
AATTTATGTGTAGATAGGACCTCTTCTGACATCCCCAGGAATATTATATGATTAGAAGCCAAGGGATGAGTAAGCAGTCATTTTTATTCAATAA
AGCCTTAATCAATTCAGAGAAATGGTAGAGAAAGTGTGAATTATCAGAAACCTTGAAAAGAAATGCACTGTTATTTCGAAGTACAAAAAGTAAA
TTTTAAAAGTTTAACATGTTTTGTAGTATGGGCTCTGTTTTCATGAATAGGGAAACCTGATTTGTAAATGACATCAGGTCTTCTTGATGCTCAT
AGTCTTATACAGATCATAGGCACTACATGTGTCTTCAGAGCCATTAAGGAAAGATGTTAAATCATTTAATGCTTTTAGTCTTCGAGGTATAATA
TTTTGAAATATTTGAAAATATGTGATATGCATATTCTCTTTTTCTTAACGAATAACGTGATTAATCAGCACACCCCAATTCCATATCCGGAACA
GAGTTTATTGTATTCAGTGGAAAAATGTTAAATGTAACAGGTAAAGCCATGTAGGGACATTTATTCTTTTGTATTGAGCCACTGCTTGTTTTCT
TTTTAAAGTTTTAGAACCCCAGCTATCAAAAGGTCAATCTTAGAAAGCTCTCCAAGAACTCCTACACCATTCAAACATGCACTTGCAGCTCAAG
AAATTAAATACGGTCCCCTGAAGATGCTAGTAAGTTCTAGAAAAGTTTTTGGATTTCATTGGTTTATTAGTCCCATTAGGAGTTCTCTCTGATG
CAAAAATACCCACTCTTCCGTTTAGCCTCAGACACCCTCTCATCTAGTAGAAGATCTGCAGGATGTGATCAAACAGGAATCTGATGAATCTGGA
ATTGTTGCTGAGTTTCAAGAAAATGGACCACCCTTACTGAAGAAAATCAAACAAGAGGTAAACACGCAACCCTTTGGAAGCAACAAGCTGAGAA
TCCTGCCCCCTTTATTCCTTGTGTGCAGCTTGATGTGTCTGCCATTGGCACTGTGCAACACCACGACTTTTCGTGCAAGATTTTCATACAAGGT
GCAGCGAAAAGGTACTGCCAGACTGTAGGCATCATCAACCTTTCCTTTGGGAAGCCAAGCCATCTCTATCTACTTCATGTTTGGACAGAAAACA
TACTAGAGAGTATCAAGAAAAGGGAGGGAAAGAGGTTTTTAATGTACTTTTAAACATTACTGATTATATAAAGTTGATATTTCATTTTTAGATG
TGAAGAATTGGAATTTAAATTAAAATAATAGTATCTTTAATTAATTGTATTAAAAAAAGGGAGGCTGGGCGCGGTGGCTCATACCTGTAATCCC
AGCACTTTGGGAGGCTGAGGTGGGCAGATCACAAGGTCAGGAGTTCGAGATCATCCTGGCTAACATGGTGAAACCCCGTATCCACTAAAAATAC
AAAAAAATTAGCTGGGTTTGGTGGCGGGCGCCTGTAGTCCCAGCTACTCAGGAGTCTGAAGCAGGATTATGGTGTGAACCCGGGAGGCAGATCT
TGCAGTGAGCCAAGATCGTACCACTGCACTCCAGCCTGGGAGACAGCAAGACTCCGTCTCAAAAAAAATAAAAATTAAAATTAAAAAAGAGAAT
CTAACCTGCAAGGATCAAAGTTTTAGCTTGTTGGCAACAGCTGTTTTCCACCAGGTTAGATACAGTGCTTCTTGAATTTATTTTCATGTAAAGA
TAAGTATTTTTTTTTATAGCTAAAAATCTGATTTGATTATTTAGTAATGGAGAATTTTACCAGAATGTGATTAAAAACCAGTCTTTTGTCACCA
AAAGATCTTTTATGTCACCAAAATAAAATCCTTGACGGATACAACACTACTAGGTGTATCATTAAAATATATTCTTAATAGAATAAACACCTAG
AATCAGAACATTGGTTGAAAACGTAGGAGCTTTACAGGGGCAGTAAATTTGGAGCTAGTCACATTTCAAATTTGCCATCAGTGTTTCTTTGTTG
AATCCAGAAGATAGAGCAAATTGAGCTGATAGTGTAAGTTAGCAACATAGTTTTATAAAAGTATTTGAGGGACTGGCCAGAAATATACTCCTGA
CTGTACATGTTTCATAGGAAGTTCTAGAAACAACAAAGCACTTTCTATATGCTTTTAGGTGGAATCTCCAACTGATAAATCAGGAAACTTCTTC
TGCTCACACCACTGGGAAGGGGACAGTCTGAATACCCAACTGTTCACGCAGACCTCGCCTGTGGCAGATGCACCGGTAAGTACGTGTGCACCAG
CCCCCAAGTTGTTATGTGACACTGGTGCCTCATGAAATCCTGTGTGTGGCATAGGGCTGCTGCGGTTTCAGCACTCCCTCTTTAACACATCTTA
TTTCTAAATGTTCTCCTGCACATGATTTTTAAAAAATGATTATTAATGTAGAGTATAAAGTTGAGATTTTTTCATGTATTAGAAACATTGCAGA
CTTTTTCATTATTTGTTTTCTCATTATTTGAGTGCCTTGGCCATTTAAAAAAATCTACATGGATATAAAAACTATGTTCATTTATATATTTTCC
TTTATTTGTCTTCTAAATAATATTGTCTTCTTGTTAAGTTGTCTCTTGTTTGGTTTGTGTAGCATCTCATATGGTATCAACCACGTTGTCTATA
GTAGATGCCCAGTATTGTACCCAATTGCTTTGGGTTACTACCACCATTTTTAAAGTTTATAATTTGTGAAGGGTTGTCCTTATGTCTTAAGGAA
AATCAGAGCTAATAACAGCTGCTAAGATTTATTTAGTAGGTACTAAGTGGTAAGTACTGCTCTAGGGGCTTTCGATGAATTGATTCAGTTAATT
CTCACAATTATCCTGTAAGGTTGGTATTATTTTTATTAATTTTTATTTTTTTTGAGACGGAGTTTCGCTCTTGTTGCCCAGACTGGAGTGCAAT
GGCACGATTTCGGCTCACTGCAACCTCTGCCTCCCGGGTTCAAGCGATTCTCCTGCCTCAGTCTCCCGAGAAGCTGGGATTACAGGCACCCGCC
ACCACGCCCAGCTAATTTTGAATTTTTAGTAGAGACGGGGTTTCTCCATGTTGGTCAGGCTGGTCTTGAACTCCTGACCTCAGGTGATCTACCC
GCCTCGGCCTCCCAAAGTGCTAGGATTACAGGCGTGAGCCACCGCGCCCGGCCAGGTGGGTATTATTATCATTTCTATTATGTCAACTGGAAAA
CAGAGGCACAAAGAGGCTTAGTCATTTGCTCAAGATTGTATACCTAATAAGGGATGGTGCTGGGTTGGAACTCAGAAGGTCTTGTTCTAAATTC
CCTACTTTTCACCATTTTTTGCCAATAATTTATAGCTCTAAAATATTGATAGTTCTGTACCAATATATGAAATAAAGTGTTCTCTCCCCAGAAC
TTAGTAAATCTTCTATTTTGAAAGGCATGTATTTATTAATTCATTTAGCAGATGTTTTTTGAGTGCCTAACACATGCCTAGAACTCTGGGATCC
CAAAGGAGCTTTGTGTTGTGGTGATGTTTGCCACAATGGGATTAAGGTTCAGACATAGTTGATTTCTCCTTTTAGCTCATAGTGGGGAGAATTT
CTGGCAGATGACTGCATTTTTTTATGCTAATGTGTATCATCTCATAGTAATCTACTCTCCACAGTGTTAGAAAAATGTGGCTCTCATATTATCC
AACCTCATTTAAATTTCAAATTATTCTCTTCCCTTTAGAATATTCTTACAAGCTCCGTTTTAATGGCACCAGCATCAGAAGATGAAGACAATGT
TCTCAAAGCATTTACAGTACCTAAAAACAGGTCCCTGGCGAGCCCCTTGCAGGTAATTACTATTCCAACATTGGTATTTTAAAATTCATTCACT
GAAAAACTGTCATCTTTGGTGGTGGTGGTGGTGGTGGTGATGGTAGTGCTGGTGGTCTGTTTTTCGTTTTCAACATTTTAGACATAGGGGAGTA
ATGCTTTTATACAATTCTTGATGTCTAGAAAAATCCAATAATTCCTTTTTGCTACTCATATGAGACATGCTAGAAATTTTTATCAGTGCAGATT
CCCCAAAGCATGATGAAATGAAACATTTCTTACTGTGACTGAGACTAAGATGTATTACACGTGTGTCACTATCTTCTTCTGCCCTCAAATGTTT
TATAAAAATATATCAATATAGTTTACTTTATGTTCCAAATTTTTTATTTTTTATGCTGTATCCCTAGGCAACCAAAGCTCAGAGACTGTTCCAA
TTTTAAATGAAGTCTGAAATTAGTCAGACAGAAAATAATTGCAATGTATTTGACTGTCAGAATAAGAAAGTCAACTGTCAATGTTGTGAGGCCG
ATCTGAAGTTGACCATCTGCTGTCAGGTTTTAATATCAAAAGAGATTTCCCTTGTAACCCTAAAGTGGGTGTGTGTTGATGAAATATAACCAAT
TCCAAATTAATCCTGAGCCAAATGTAAATAAGAATGCAAATTTTGCTTCCCTAAATTATTTAAAGCAGTTTCTGACATTAAATAGCCCAATACC
CAGCCACCTGCAGAGCCCTCTCCTCCATCCCCCTGTGCCATGCAGAGGGAAACTTCATAACCCTAGAGGAAGTGAAGAGCCTGGATTCAGAAGC
TGAAGGTCATATTTCTTGCTGTAAGTTAAATGGCACGATCATAGGACAGCAGCCTTTGAGTCTGCCCATTACCTTAAAGGGATTTCCCATTCTT
GTGATAGTTTCTCCTTCCAAATTGTGAGAATCTGAAAACTTGCCCGGTAAGTATTTGTGATGCTTAGTTTTTCAGGGTTTTTTGTTGATGTTGC
TTTGTTTTTTGAAACAGGGTCTTACCCGGTGGCCCAGGCTGGAGTGTAGTGGGGTGATCTCGGCTCACTGCAACCTCCGCCTCCCAGATTCAAG
TGATTCTTATGCCTCAGCCTCCCAATTAGCTGGAATTACAGGTGTGAGCCACCGGCAACCCAGCCGTTTTTTTGTATTTTTGGATAGAGACAAG
GTTTTGCCATGTTGGCCAGGCAGGTCTCGAATTCCTGGTTTCAAGTGATCTGCCCACCTCGGCCTCCTACAGTGCTGGGATTACAGGTGTGAGC
TACCGCACCTAGCCAGTGCGTAGTATTATTGTAAAATAAGGATTGCAAGCACATTTTGTTTAATTAAATCAGATTGCTTCCTTCCTGGCCTCTC
TCTGACAGCAATTGTTTTGGTAAAATGGCTGTGGACTGGAATGTGAGACAGGGAGTCAGTATTTATGGGGAATCTGGACAAGTTCCTGCGTCAG
TGAGGCTGGAGTTGGCCCCGTGTGGAGAAGACTCAGAATACCACAAAGAGGCCAGACGCAGTGGCTCATGCCTGTAATCCCAGCACTTTGGGAG
GCCAAGGCGGGTGGATAACTTGAGGTCAGGAGTTTGAGACCAGCCTGGCCAACACGGTGAAACCCCATCTCTACTAATCCCAGCTACTCGGGAG
GCTGACACAGGAGGATCGCTTGAACCCAGGAGGCAGAGGCTGCAGTGAGCCGAGATCATGACACTGCACTCCAGCCTGGGTGACAGAATGAGAC
TCCATCTCAAAAAAAAGAATATCACAAATAATTGGGAGATGAGGAAGAGAATGAACTCCACCCAGACATAAGAGGAACCCAGAAAGGGAGTTAC
AAAGATTTCAAGGCAAAGGGCAGCCATTTCAAAATTTTCCTGAAAGCTGTTCTTAGGTCCAGAAGAAAAGCTTTTGCTTTTTTTTTTTTTTTTA
ATTATTCCCACCTAAGTTACTTGGCTCTTGGTTTCTAGAGAACAGAATTCAACTACTGCTATTCGTGTTTTAATTAAGTTAGATTAAGTTTTGC
ATATATTTTCTAACCTAGTCTGGGGCCAACTTGTATTTGTAGTAGTACAGAAAAAGTCTGTTCTAAATTTCAAAAAGCCAACACATCAATATAC
TTGGGGACAATTACCATTACATAAGTTGAAACCCATAGTTCAGTATTGAGCTTTATCAGTATATTTGTATTTTATTTAATGGAAATATTGGTTA
TCTTTGAAACTCAAAATTAAGTTATAGCTCTATTTTATTAATCTGTATTCTCCTGTCTATCAGTGAGTCATATTGGCACTTTATGAATTCTAAC
ATCTGTACACTGAGATTAAGTTGTGTATGGTGAAGGTAATATTTGTCAATTCTATCAAACTGAATAATTGAGACTTGAAAGTTAATTTTAGAGT
CAATACTCCTGTCTAAACCATATAGTTTACTGGTTTACACTGACCAGATATATTTTAATAATCTGCTATAAAGCCAGGCTCAGTGGCTCATGCC
TGTAATCACAATACTTTGGGAAGCCAAGACTGGAGGATAGCTTGAGACCAGGAATTTGAGACCAGCCTGGGCAACATAGTGAGACTCAGTCTCT
ATTAAAAAATAATTAGCTGGGCTGGGCGTGGTGGCTCACGCCTGTAATCCCAGCACTTTTGGAGGCCGAGGTGGGCGGATCACGAGGTCAGGAG
ATCGAGACCATCCTGGCTAACACGGTGAAACCCCGTCTCTACTAAAAATACAAAAAAATTAGCCGGGCGTAGTGGCGGGCACCTGTAGTCCCAG
CTACTTGGGAGGCTGAGGCAGGAGAATGGCATGAACCCAGGAGGCGGAGCTTGCAGTGAGCTGAGATAGCGCCACTACACTCCGGCCTGGGTGA
CTGAGCGAGACTCCATCTCAAAAAAAAAAAAAAAAAAAAAAATAATAATAATAATAATAATAATTAGCTGGGTGTAGTGGTACATACCTGTAAT
CCTAGCTACTTGGGAGGCTAGGGCAGGAGGATCCCTTAAGCCCAGGAGTTCAAGGTTACAGTGAGCTATGATTATACCCCTGCACTCTAGCCTG
GGAGACAAGACCAAGACCTTGTCTCTAAAAAAAATTTTTTAAGGCCAGCCGTGGTGGCTCACACCTGTAATCCCAGCACTTTGGGAGGCAGAGG
CGGGTGGATCACAAGGTCAGGAGTTTGAGACCAACCTGGCCAACATGGTGAAACTCTGTCTTTACTAAAAATACAAAAAATAGCCAGGCGTGGT
GGTGCGCACATGTAATCCCAGCTACTTGGGAGGCTGCGGCAGGAGAATTGCTTGAACCCAGGAGGTGAAAGTTGCAGTGAGCCCAGATCGTGCC
ATTGAACTCCAGCCTAGGCAATAGAGTGAGACTCTATCTCAAACAAACAAACAAAAATTTAATCTGCTATAATAGATACTAATTTATTTTAAGA
AATACTTAGTGAATGTTGTTCTACATACTTGCCAATTGGGAGGAAAAAAGAAATATTCACTAAATGAATGAATGTTATACACCAAGTATCTCCT
TCATTTTATGTCATGGAGTTCTAGCTTCTGATATCACAGAAATATGTGATTTCTAAAATGTTTCAGACTATTGTGATAAGTATTGGAAAATGCA
TCAAGTGACTCTAAATATTTAAACATACATCACCTATATTTCATATAATCCTGATTCAATAATATTTCTATAGATTTTTTATGCAATTTGGTAA
TTTTGTTTGTTTGAAACACAGTGCTATTTCATATATTTCTATTGATAATCCAATTTGACCTAATTAGGCATATTTCTCACACATGGTATTATTG
AACATATTGCACATTTATTAAATGATATGTATTTTACTTAAGAGTACTTTATATAATCTATAATTTTTGTAATTTGTACTTATAATAAATCAAA
TATTAAGTGGGATTTTAGCCAAACCATCTAGACATTTTTGTCATAATGTTTTTATTAAAACAGCAAAATAGGAGTTTCAAAATATTTTAAAATT
TGAATACTTCTAAAATGTAAAATGTTTGCAACTGGTGTAATGCAGTTGATTGTCTATCCCTCTAAACTGTCTAAATAACTTAGGTTCAAGAACA
GTTTATTGAAGAACATAGGAACTGCGCAATTCTGTGTTTTATCATTTCAGTTTTAATCACCCCGGCTTGATTATGGCAACAACATTTTAGACAA
GCAATTATTACTATTTTTGAGGCCCATATACTGGGCCATTATGGTTTTGCTTCTAACGTACATATAAATGCACATGCAATATATATAAATTATG
TTTGCTGTTTTAAAATTAGAAATGCCGAGAAGCTATGTGTTTGACATTTTATTATAAATTTTGTACACACATAGATGTATGGAAAATATACTAT
GTTCTAGAGTCAACAATTGTTATCATTTTGCCATATTTACCTCATCTCTTTTTTTTTTTTTTTGAGATGAAATCTCATTCTGTTGCCCAGGCTG
GGGTGCAGTGACGCAATCTCAGCTCACTGTAACCTCTGCCTCCCAGGTTCAAGCAATTCTCCTGCCTCAGTCCCCTGAGTAGCTGGGACTACAG
ATATCTGCCTGGCTAATTTTTGTATTTTTAGTAGAGATAGGGTTTCTCCATGTTGGCTAGGCTGGTCTCGAACTGCTGACCTCAAGTGATCCAC
CTGCCTCGGCCTCCCAAAGTGCTGGGATTATAGATGTGAGCCACCACGCCTGGGCTACCTCATCTCTTTTTTATGAAGTTTTTATTTTTATTTT
TTAATTTTTTTTTTAATTTTTTTTTTTTTTTGAGACAGCGTCTTGTTCTGTCACCCAGGCTGGAGTGCAGTGGCATGATCTCGGCTCACTGCAA
CCTCCACCTCTTGGGTTCAAGTGATTCTTCTGCCTTAGCCTCTCGAGTAGCTGGGACTACAGGCGCTTGTCACCATGCTAGCTAATTTTTGGTA
TTTTTAGTAGGGACGGGGTTTCACCGTGTTAGCCAGGATGGTCTCAATCTCCTGACCTCATGATCGGCCCGCCTTGGCCTACCAAAGTGCTGGG
ATTACAGACATGAGCCACTGCACCCGGCCAGTTTTTTATTTTTTATTTTTTTGAGACAAGGCCTTGCTCTGTCACCCAGGCTGGAGTGCAGTGG
CAAGATCATGGCTCACTGCAGCCTACCTCCTGGACTCAAGCAATCCTCCTCCCTCAGCCTCCTGAGTAGCTGGGACTATAGGCACATGCCACCA
TGCCCAGCTAGTTTTTTTTTTTTTTTTTAGAGATGGGGTCTCCCTGTGTTGCCCAGCCTGGCCTCAAACTCCTGGGCTCAAGCAATCCTTCTGC
CTTGACCTCCCAAAGTGCTGGGATTACAGGCAGGAGCCACCCTGCCCAGCCTGAAGTATTTTAAAGTAAATTCCAACTAATATAACATTTTATT
CTCATGTACTTCCAGATGTGTCTCTAAAAATAGACATTTTTATATATAACCTAATACCATCATTACATATTTAACAATAATTCTTTAATCTTCT
CATTCTCAGGTATATTTAAATTTTCCCATTAATCCAAAAAAGAATCAAAATTGAAACAATTTCACACATTGCATTTGGTTAAGCCTCTTAAATC
TCTTTTACTCTCTAGTCCAGTGCTGTCTAATAGAACTTCTACAGTGATGTGAAGGAAATATCTAATATGCTGCTATCCACTATGATAGCCAGTG
GCTTTTGAGCACTTGAAATATGGCAAGTGCTGCTGAGGAGCAGAATTTTCAATTTGAATTAATTTAAGTTGCTTTAATTTAATAGCCACATTTC
CTTACTCTCTTACTGGAATCAGCCATTTCCCCATGGTGCTCTGAATCCTCTTAGTGAGAAATGGTACATAGACACCAAAATCAGGGTGCTAAGT
CTGTCCATTGTTATGTGGTTTGTCATTGAGATACAAATAATTTTTTTTGTTTTGTTTTGAGACAGAGTCTCACTCTGTCACCCAGGCTGCAGTG
CAGTGGTACAATCTTGGCTTACTGCAACCTCCACCTCCTTGGTCCAAGCTATTCTCCTGCCTCAGTTTCCCAAGTAGTTGGGATTACAGGCACC
CACCACCACACTCAGCTAATTTTCGTATTTTTAGTAGAGACATGGTTTCACCATGTTGGCCAGGCCAGGCTCAAACTCCCAACCTCAGGTGATC
TGCCTGTCTCAGCCTCCCAAAGTGCTAGGATTACAGGCGTGAGCTGCCACACCTAGCCAAGACTCAGTGAATTTTAATAATCCAGAGCTCTCCA
TGTATCCCCTAATCTATAATCTACAGTGCTTAAATAGAGGCTTTTATAAGCCATTATGTACACTCATGTTATGTTTGTTTTTTTAATTACTTAG
TCTTTTTCCAAAAGGAATTTGCAACAGCTACATAATCTTATAATTGTTATGTTTCTTTTATATTTTCACAGTTGTTTTAATTTTAAATTGTAAA
AGCAAACAGGATATTCTTATAATAAAAATGTTCTGAGATGTTTTTCATATTTGTGTCTTTCATGTGGCTCAGAATATATGAGATTTTCATGTCA
TATCATTGTCAGTATTCAGCCTTTTCTCCACATTGTGTGGGGTAGAGGATAGAGTCTAGAAGCTTATAAAATGGTCACAAATGAGGAAGTAGAG
AAAACATTCAGCCTAGAAAGCGTGCATTTGTGGTATGAAAGGCACTGTGGAATGCTGCTGGATTCTGCCCTTCAGTAGTTACCCGAGAGAGACC
GAGGCAGACGCATAGCTCCCTCCTCAGCAAGGAGAAAAGAGTTGCCTGCTTTCCTCAGCGTGCTTTCCATTTCCTTTGTTTTGAAAAAAGCACA
TTATGCTAATCAACTTTCCTTAAGGTAGACATTTTTATTGGTAGATCAAAAACCGTGCTTTAAGTTATAAGCCTTCTGAACTTCTGTATTTTTC
TCTTAAATTATAATTTCCTTTTATTCCTATTTAAAACCCAAGTGTAAAAGATGTGTTCATAGGCTTTCTACTCACTCACTTGCCTCTTTTTCGT
AACCACAGAATGACAGCCTTAAATTTTAATTTCCTGACTTGGCTTGCCCATGGCCTGACTTTTTTAAAACAAGGAGTTTAAGTTAAAGAAATTT
CTCCAGCCATTATTATTTAAACACATTTACACAGTATCAAAGAATTTAAAAATGTTGCTAGCAGTTGATACTCCCCTCAGCTTTCGGTTCAGCG
TGTTTTAGATTGCTCCTATTTTGTTATTTGTCTATGAACTTTTATATTTTTCAAAAAAATAAGGCAAGCCCTTTTTGCCTGATAGGCACTGCTG
AGCAGTATAATAAACAAGCATGGGGGCAACAGAACCTGGGTTCCAGGCTAGACTCCACTGTTTTCAAACGGCATGACTTTAATTCATCAAGTGA
ACACAATTAAGCAAAGTATAAGTTTGGGACCATGGAATATCCTTCACTCATCACACAGGTTACTGTGAAGATCAAATGGATATAATATTGCTTT
CAAGATGGCGGCACACTTGCCACTATACACAGGTGATATTATTAGGCAGAGTCGCCACATAGTCCCTGTCCTTGAAATGCAGGCAAGGAGCCCT
CACCAAAGGCCAGGGTGGTTTTTTGTTTTTCGGGTTTTTGTTTGTTTTTTTCATTGTGGTATATTATTTCCTCTGGCATGCTATTCCCTGTCCC
ACTCTTACAGAACTGTGTCAGTGGGTCACCAAAAGAGAGAGCTGATTCAACTGATTCCTTGAAATAAAGGTAGTCAGACCTCGCGGTATGATGG
AGATGAAGCAACTGATTTACTGGTTTTCTCTATTTTTCTGCTGTTCGTGTTGTCATTTAAACAGACATGGAAACCGTCTGCACACGACAGAGAT
CTTTCCGAGCCTTTTTCATCTAGTGTGCTGTGCTGACCCGCTCCCCTGGATGCCTGCACACTCATTTGGTTCTCCCTTTTGGTCACTTTTTTCC
ACTTACCCTGGCAGAAATTCACGTGGCTGTCAGTAGTAATTCAGTGACCTGCTTTCAAAAAATGTTATAAATTAAGCAGCTTTTCTGTGTATAG
CTTTTGGGTTGAACTGAGAAGGGCTAAGTGAAGGGAGAAGCTATGTTGAGCTCAGAGTCAGAATGCCCTGCCCCAGACATTTTGAGATGTGAAT
TTTTCATTTGTTTTGTTTGGTGACACTTAGAGAGAATAAACATTCTGAGATAAAAATCTTCCTTGGGCAGGCCAGCAAAGATAGAATTGCTTTA
GAGCAATTTGGCACTTGGTCTTAATCTTAATAGTTTGGAACTCATATGTGACTAAGGAAAAGGATATTGCAAAAAGTTGTGCCACCCTAGGCTA
TATGATATAAACTTAGAAAGTCTATCAACGTGAAAGGTGAAGAGACCTCTAGAGACATCGGGGACAAACTCCAAATTTGGGAAAGGTCCATCCA
CATTTGCAATTGTTAGTTAGGCTTGGGAAGTGGAGTCATTGGTGGATGAGGCAACTTCCAATCACCATCTCGATTTTTATTTCCCTAACTTTTA
AGATTATTTTCTATAGAAAATCAGTAGTGCTGAAGTTGGAGTCATTTAATTGATTTGTGCCAACCTAGGGAAGCATTTACTCTCGAGAAAAGTT
TGGTAACCATTAATCTTACCTTAGCAACATTTCAGTTTAAGCTTATCTCTGACTTTCCAAAGACAACTAAAGATTTCTACAGTCTCTCTTATAA
CTGATCCATTTTTTCAAAAGATGTCCCTTTGGGAAGGAATTCTCATTTTTAGAATTTTAGTCCAGAGGAAGTATTTTTTTTTCAGATAGGTGAA
ATAGAATAAGCAGAAAATTCTTATTTTTTACTGTTTTATATACCATTGATGCCTGCTTATTTTAAAACAAAACACAATAAAAACATGATACCAT
CTGATGAGTTGCTTTGGTTTTACTTTTTTTTTTTTTTTTTTTTTTTTTTTTTTTTTAGTTTATACAAGTTTCTTATTAGGTCAGCAAATTGTAA
AACACATAATTTGCCAAGGCTTTTGAAGCCAGCAGATACTGGGTGAAGTTGCTGTATGAATATAATAATAAGAACCGTTTTTGTTCAGCTTGAT
GAAAAAACTATTCATGTTCTAAATGAAAATGTGAAGATCATCTAATTCTGACAGAAAACCACCTGTGGACATGGTCTTGTTTCTTTTTATTTCT
TCTGTTTTCTACAAAAGATGGCAATATTTATTTAAAGTGCTTTAACAGGATATCCCAGTTAAAGCTTTGACAGACTGTTTATAGTTCACTTCTG
CCCAGGGGCAATTAAAGGCACATTACAGGATAAGCGAGATGACTCCCCGGCCACAGGAGGAGGATGTGTGGGTAGGATTATTAATGTTGAAATG
AATTATGATAGAGTGACATGTCTGCAAGAGCACCATGGGTTAGTAACTTAACAAGAATTCATATGCAGAAACCCATAATTCTCAGCAGTTCTTT
AGGGTAAATGAAACTAAAGTTTAGGGAGAGAGAACAAGGAGAATTTGCAAAGATATGTATGACAGTATTTAAAAATGTTCTTCCAGCACAAAGA
CATTAATCTTCCTTTGTCAAAATAATTCTTTCTGCATGAAAAGTTGGCATGGGGCTCCCAGGCTTCAGGTAAGATGGGAGAAAGGGAGCGTTTC
TTTTTTTTTGTACCAAAGTACTCAATCTTCTGATCTTCCTTGACTTTCACGACATAGGCATATGTCTACTCTGACCAGTTTGTTTCATTTATTG
TGGTAAGATGTGCTTGTCTTGTGCTTTCCTGGTGCAGAAAAGGAGCTGCCTCGCTCATGCTTGGTGGCCTTTTTGTTCCTACACACAGTGGTTC
TCGTACATGGTGGCTACCACATCCTGGTGTTTGTCTATACTGGGAGAATCAGGCGTTCCAAGTCATCTTGGCTGCCCTAGCTCTGAGCTTCAGG
GGATATATGACTCAGAAATGCTATGCTTTCTGGAATTTGGATATTTCATTTTTATTTGTTTCTTGGTAAATTCTCTTTTGACTTAGGAGAAGCT
AACTATTTGGAAAGGTCTCTCAGAACTCTAATTACAAATATATGGTACCTTCTTTATATTGATCTCATTTTTAAATACCTAGTCCTGGAGGAAG
AGCTAAATATGAATACAGTGATGAGCTGTGTAGGGGATCTCACAGGAACACAGTCAGATTTCAAGTTGAAAATAGATTCAGTTGATAATACTTA
GTACTAGATTCTCCTGAATCGACTTTGGGAATTCTGAGTCAACCTAAGGACTATATTACAAAGGATCAGACCTTGACTTTTAGGCCAGGTGTAG
TGGCTCATGCCTGTAATCCCAGCACTTTAGGAAGCCAAGGCAAGTGGATCACTTCAGTCCAGGAGGTTGAGACCAGCCTGTGCAACACAGCGAG
ACCCTGTCTCTACCAAAAATACAAAAATTAGCCAGGTGTAGTGTAGCACCTGCCTGTAGTCTGAGCTACTGAGGAGGCTGAGGTTGGAGAATCA
ACTTTAACCCCGGATATGGAGGCTGCAGTGAGCTGTGATCATGCCAGCCTGGGCAAGGAGCAAGACCCTCTCTCAAAAACGAAAACAAAAAAGA
CACAGAACTTGACTTTTAACAGGAGGCATAGTAATAGCAAGCATAAGATTGTTTTAACATAGCATTTAAGATAATTTACGCATTTAGAAAATTA
ATTCTGGCTGGTTGTAGTAGCTTATCCTTAATCCTAACCCTATGAGAGGCCAAGGCAGGAAGATCACCTGAGGCCAGGAGTTTGAGACCAGCCT
AGGCAACATAGCGAGACCCCCGCTCTCTACAAAAAATTTTTTTTAAAAAACATAGCTGGGCATGGTGACACACTCCTGTAGTCCCAGCTACTCA
GGAGGCTGAGGCGGGAGGCTTGCTTGAGGCCAGGAGTTTGAGGGAGCTGTGATCACGCCCCTGCACTCCAGCCTGGGCAACAGAATGAGGCCCT
ATATCTAAAAAAAAGAAAAATGGACAAGAAAATTCTATATTGATTGAAGCCCAGCTAAATAGAAAAAAAAAAATTCTAATAGGCCATTTTAAAG
ACTTTGGAAAAATTCTTAGCTAGAGTAAAACAGAAGCAATCCTTTCTTTCCTGGTTCTCACATCTCCATTCTCACCTTCATTCCCCTTCCCCTC
CATTTGTTTCAAGTATTTTTCTTTTCTATGTGTGTCTTTATGTAAATTTAAATTTACCTACAAGATATTATGATATTAAGATATTTCATTCTGC
TTCCTGTTTTGTCACTTGTTCTTTAAGATCCAAGTCCTTGGCTCCATGTGCATCTAATCCTTGCCATAAGCCCTGCATCGTACTTCATATTCAC
CATATTGAACTATTCACCCTCAAGTAGTCACTATTAAATGTCACACTGTTGTAGCGACTACAAATGCAAGCTCAGTAACTGAAAAGATAACATT
AAATTTTGTTTTTTAATTGGTTTCCTGTGTCAATTTCATGTTTCGGGAATTTGTATGGACAGATAGACACCAGAGAGATATGCGTATTTCACCT
GCATGCTTGAGGCTAGAGAAACATGATTTATTCAGAACTATTTCAAATACTGTAACTAACCTGGTAATTTTGTTTAGGAAAACATTAAATTCGG
AATAGAAGGCAATTCAGAATACCTGTCTGTTATCTTTGTCTTGTCATTTTTGAGATACTCAGTTCCTGGAAAATATTATGATAATCCATCTTGC
TATGTAGTATTTCAAGTTATATGTTGAGCCTCTGAGCTTGCAGAGTGAACATTTCTATTCATAGACAGTGCTGTTGACATCAGTGGGGAGATGG
CACAAGCTTTGTGCCCTAGGAAAGTTTAAAAGCTAGAACATTACACTGCAAACCCTATGTCAGGAAACTTTGTTGCAGCAACTAGGCAAGGAAA
CCCTACCACTGTACCCATACCTTGTTTTAGTAGAATTATGTTTCTTTGCTAAGAAGTCTGGTGACTCTCACACCCCATCTCAGCACTTTCCTGG
ATTCCAAGGCCCTGGTGCCCTGAGCACACAACTTCCCAGGTTCCTTTTATTGTTTCTGATAAGAACTCGAATTAGAGGCAGCGTCTGGTACTCA
CCAGGGGTGTGGTCCCATGGGTGACATTCTTGCTCCATCATTTCTTACCCAGGTAACCTTGAGTATGGCGCCTAAATCCTCTCTTCCTTTCAAA
TTGCCTGGTCTGTAAAATGGATGCAGTGAATGGTAGCTATGCCACAGGTGTTTTGTGTGAGAATTAAATGAGAGGAGTTATATCAATAACACTT
AGAGGCATGCGGTGCCTATAGTGAGGGCTTGTTTTATGTTGTCGTTTAACCCTTTCTTTCTCAGCCCTCCCCCACTCCACATCCCCTCCCACTG
GCAATGTACAAATTGCAGCTTCCTGCCTCTTTCCTGCTATCTCGCTCCCTGGATGACATCCCTGCGTTTCCACCTCTCTCTCCCCTAATCTTAG
CTGTTTTCACCCTTTCCCCACAGCATTGCCTTGACAGTTCCTCAGTGTCCCATCCCCTCTTCCCATGGACAACACCACAAACCTGCGCACACGG
CCTGTTATTATTCCTCCTGTTTCACCTGTGTCCATTCTGTCTCATAAAGGACACTGTAGGCTCTGAACAGCTAAGGCCTTTCTTATTCTTTTGT
CCCATGGAAAATAATCCCTCCAGATAGCAATACCAGGAATAGTGCCTTTTCTAACCCACTGGTTTCCTTTTGAGCTTACAGCCACCAAATCTTA
TATCTGTTTGTTTCTGTTCCCCTCTCTGCATTGACTGCTAGAGAGATCAGAGTCAAGCAGGAGGTTACATCTAGCTGGGGCACTGTGCTTTATG
CTGGTGTTTCGTGTGCAAATCTCATACCATCTTCATGTTACAGTTGTTCCTTAGTGTCCATGGGGGATTTGTTTCAGAACCCGCAAGGACACCA
AAGTCCAGGGATGCTCAAGTCCCTGATATAAAATAGCATTGTGTTTGCATATAATCTACACACATCTTACCATATAATTTTTTTTATTATTTGT
ATACATTCGTGGGGTACAAGTGTAATTTTGTTACATGGATGTATTGCATAGTGGTCAAAGTCGAGGCTGTGAGTGTATTTATCGTTGGAATAAT
GTACATTGTACCCGTTCATTCCTGTATACTTTAAGTCATCTCTAGATTACTTATAATAGCTAATACAATGTAAATGCTATGGAAATAGTTGTTA
TATTGTTAGGGGATAATGACAAGGAAAACACCTATACATGTTCAATACACAGCAATTATTTTTTTCTGAATATTTTTGATCTGCCATTGATTGA
ATCTATGGATGTGGAACCCACAGATATGGGACCCACAGATGCAGAGGGCCAACTGTGTTTATTTTTTCCAAATTTGTTTCCCTGTTATGACTCT
TCTTTATACACATTTTTAAACTCTGTTGTCTTGTATTTCTTTTCTAATCATCTTACGTCCTTTTGGAAACCAAGTGGGGCATAAATAGTACATG
TTTGCATTTGAGGCAACACAGAGGCATCGCAGGAGCTGGAGACAGCAAAGTTCAAAGCCAGTCCACCACTTACCTACAGAGTGGCCTTGGGCAA
GTTACCTCCATTTTCTGTCTCCATTCTCGAGCCTGTCTAGAGAGAGAATGAACCTGCCTCCCGAGGTGATGGTGCTGTTTTAATGAAATAATGC
ATGTGAAATGTGAAGTGCCACTGTCCCTGGCATGGAGATGCTGTCCTTAGATATTAGGTCCATCTTGTATCTTCTAGTGTATCTTTAAAAATTA
AACTATACTGGCTTCATGCCTGTAATCTCAGCACTTTGGGAGGCCAAGACCGGCAGATCACTTGAGTCCAGGAGTTCAAGACCAACCTGGGCAA
CATGGTGAAACCCTGTCTCTACAGAAAATACAAAAATTAGTGGGGCTTGGTGGCACGTGCCTGTAGTCCCAGCTGCTTGGGTAGCTGAGGTAGG
AGGATCACTTGAGCCCAGGAGGCTGAGGCTACAGTGAGCTGTGATTGCACCAATACCGATCAGCCTGGTATGACAGAGCATGACTCTGTCTCAA
AAAAAAAAGGAAAAAAATTAAACTATACTGATAAATATTTCTAAAGTAATTGATGAAAACATATATATGACACTTAGCAGGTATTGATCAATTC
CAGTGCGTGCATGAGCTGCTTTGCACTGTGGCTACGGCACTCAGCAGTTTGCTTAGTGAGTAGATGGCCATAGCTCACTTTAGGTATCTGGAGA
ATAATGCTCATTCCTGTCTCCAGCTTTGTAAAATTGCCTAATAGACGGAAGGCATTAAAATATGAAGATGGGATTATATCTTATGAAGCTGCTT
GGAATGGGTTTTCCCTCTTAACAAATAATTTCTGATCATCCATATCCCTTAAGAACACCGGATTTCTGGGGGCCAGGGAGGTAAGATTCTATCT
GACAAAGCCTTCCTGGTGTCAACCACTTGCCATCTGTTGGTCAGTGCTGGCCCTGCTGGGTCTATAGAATGAGCTTCTTTGTCTGACGCTCCTG
TTGCCATCCCTTTCTCCATCAGCCTTGTAGCAGTACCTGGGAACCTGCATCCTGTGGAAAGATGGAGGAGCAGATGACATCTTCCAGTCAAGCT
CGTAAATACGTGAATGCATTCTCAGCCCGGACGCTGGTCATGTGAGACATTTCCAGAAAAGCATTATGGTTTTCAGAACACTTCAAGTTGACTT
GGGATATATCATTCCTCAACATGAAACTTTTCATGAATGGGAGAAGAACCTATTTTTGTTGTGGTACAACAGTTGAGAGCAGCACCAAGTGCAT
TTAGTTGAATGAAGTCTTCTTGGATTTCACCCAACTAAAAGGATTTTTAAAAATAAATAACAGTCTTACCTAAATTATTAGGTAATGAATTGTA
GCCAGTTGTTAATATCTTAATGCAGATTTTTTTAAAAAAAAACATAAAATGATTTATCTGTATTTTAAAGGATCCAACAGATCAGTATTTTTTC
CTGTGATGGGTTTTTTGAAATTTGACACATTAAAAGGTACTCCAGTATTTCACTTTTCTCGATCACTAAACATATGCATATATTTTTAAAAATC
AGTAAAAGCATTACTCTAAGTGTAGACTTAATACCATGTGACATTTAATCCAGATTGTAAATGCTCATTTATGGTTAATGACATTGAAGGTACA
TTTATTGTACCAAACCATTTTATGAGTTTTCTGTTAGCTTGCTTTAAAAATTATTACTGTAAGAAATAGTTTTATAAAAAATTATATTTTTATT
CAGTAATTTAATTTTGTAAATGCCAAATGAAAAACGTTTTTTGCTGCTATGGTCTTAGCCTGTAGACATGCTGCTAGTATCAGAGGGGCAGTAG
AGCTTGGACAGAAAGAAAAGAAACTTGGTGTTAGGTAATTGACTATGCACTAGTATTTCAGACTTTTTAATTTTATATATATATACATTTTTTT
TCCTTCTGCAATACATTTGAAAACTTGTTTGGGAGACTCTGCATTTTTTATTGTGGTTTTTTTGTTATTGTTGGTTTATACAAGCATGCGTTGC
ACTTCTTTTTTGGGAGATGTGTGTTGTTGATGTTCTATGTTTTGTTTTGAGTGTAGCCTGACTGTTTTATAATTTGGGAGTTCTGCATTTGATC
CGCATCCCCTGTGGTTTCTAAGTGTATGGTCTCAGAACTGTTGCATGGATCCTGTGTTTGCAACTGGGGAGACAGAAACTGTGGTTGATAGCCA
GTCACTGCCTTAAGAACATTTGATGCAAGATGGCCAGCACTGAACTTTTGAGATATGACGGTGTACTTACTGCCTTGTAGCAAAATAAAGATGT
GCCCTTATTTTACCTACTTTTGTTTTCTCTCTTATTTGTCACTATGGACAACAGTTACACTTTAAAGAAAATGGAGCAGACTCAAAGCACTTTC
CTCTAATAATTGCACACCATATGCACTTCGTGTGAAGAAGCCAGGAATCATTACAATGGAGAAGAAAGAACAAGCAAACTGAGTTAAATAGTTC
ACAAACAATCACATGGACAATGGGGAGGAATCTTCCAGAATGCATCAGTCAGGGTCTAGCGGCATTTGAGTGCGGATGCTGTAAGGGGAATTCG
TTCACAAATGTACTGATACCACAGATGTGGGCAGGGGCTAGGAGAGCAACAGGGTGCAGGCCTGAAGGCACCTGGAAGGCCGCCTGGAGGGGGA
CAGTCAGGAAAGCAGGAGCCCTTGAGAGGAGCACTAGCCTTTGATGAGACCACTGCCATCGAAGGAGACCTCACAGGGAGGGAGCCAAGGGTAA
ACCCTAACTTTGTTTCCCCATTTCTCCTATCTCTGCCTAGGGGTCCTCACTGGCAGAACCAACCAGAAGCTGGAGGACAAGGGAGCTCCCATAT
GGGAGCCGGCCTGTGAGCCTTCAAGGGTATGCGGAGTCGTTTGTTCAAAATAGCCCCATTTCACAGATGAATCTCTACTGGCTCCATCTTCAGC
TTAGTGTTCTCTTCACTATGCTGTAATATCCCTTTTAACATAAATTCCTTTAAATTTCCTTTACTCACTCTGTTCCAATTCTGAATTCTCATGG
GCATGATACACTTGGTGTTCATAGAGCCAAGGATTTGTTACGCCTAATTACTAGTTTTTGAGTCAATTTGGTGGACTTTTACTGTCCTGCTGAT
AGATGACGTGACACGTCTTCCCAGTGTTGGGAAGCTCTTTATATTCATGCCCTCTCCGAGTATTTTTCCAAGCGCTGACTCTGCCACTTACTAG
CAGTTTGAACTTAGACAAGTCACTCACATCTCTGAGCCTTTTTTCCTTATCTGGGCAATGAGTTCTTTCCCACAGTGAAACTTTTATTAAGTAA
TGCACTATACAAATGTTTGTTATTATGTACACTTTCCACAGTCCAGTGATGCTTGCTGTGTAGTGTGTTGAATGCCCATCTTGCTGATAATGTG
CACTGCCAATTACACAGTTATATTGAGAGGTCACTTAATTATTAATGACAAGAGTGAACTCAACATCTTACAGAACTGAAATAGATATTTATAT
TTCCAACACGCTTGTAACCCAATAACTAGAGACTAAAAACCTAACTTCATGAAAAGGAGTGTAAATTTAGCTGTTATGGTCAAATACTCACACA
GCACACCCAGTTCACAAGCATCTCCAAAACGTTGATTGTTCTGATCAATTTTGAAAATCATCCTGCTCTCTACAGCAGGAATTCAGGTAGTACA
AGTGAAAACAGTATTATATACTACTTAAATGAAAGGCTGCCCTTGTGAGTTACTGTGTGTGAAGTTGCTTCTGCGTATGTCCATCCAGAGAACA
GGAGAGACACTGAGAAGACTGATGTGTCCCCGACCTCTAGATGGGACTGAAAATTCAAGATAAGAGAGATGCCCAGGGATAAACTTCCTTCTTT
CTTTAGAAATTATACAATATTAGAACTGAAAGGGACATTAGATATCATCAGGGCTTCCCATAAGGGGCTCACTGTCTTGCTTTATTGAAAGAAA
ATCAGTTTTGAAGCCAGACCAATCTTTTTTTTTCTTTTTAAATATAGGTGGTGTCTTGCCATCTTGCCCAGACTGGTCTCAAATTCCTGGGTTC
AACCAGTCCTCCCACCTCAGCCTCCCAAAGTGCTGGGATTACAGGTGTGAGCCACCGCACCTGGCCACCAATCTTGATTTGAATTCAGACCCTA
CCCTTTACCAGCTGTGTGACTTTGTATGTTTTACTTAATCTCTCAAAGCTTTATTTTACTTATATTTTAATTATACTGGAGATAAAAATGCATT
TCAAGTCAAGGTTGTTATTGTGAAGATTCTGCAAGTAAATACATTCTTGCATCTCTGTAAAATGTTGCCGTGCCTGTTGATTAGATAAGTCACC
ATGATGACTTATGATCAATTAGAGAAAAATGTCTGTTACCCAGCGATGGGAAAGTGAATACCTCCGAGACCCATGTCCCCAATTGTGTGTTAAA
ACTATTCTATGTTAAAAACTTACTTTAAAACTCAATTATATCTTCTCAAAATATTACTAATCATTCTAACATATTTTAGTTAATATGTTTCTCC
TTGTACAAATATATATGTGGGAAGTAGAGGGCATATTTTTCCTTAAGCTTGCTGCTTTCTAATCCAAAAAAAATGTGATGTGCAGGTCTATTAC
ACTCCACTTAAAATACTTACAACTTTGGGGCTTATTTTTCTCCTTTGAACCATTACTATTATAAAAATCAATTCTTCCTTAGTCACCAAGTCCT
CATCCTTGAGGAAAGGAAGTCAGCTAAAATACAAATCTCTTTGTAAAAGTAAAGTTTAGCGACTTGGGAGGCTGAGGTGGGAGGATCCCTTGAG
CCCAGGAGTTTGAGACCAGCCTGGACAACACAGAGAGACCCCATCTCTGAAAATAAATAAATTTCAAAAGTAAAGTTTACTTATATACAATTAT
ACCTAGTAACTTTGCTCCCTATAGCAAAAGGAAGCTAAACTATAAATCTTATGGAACTTGTTAGTGTTCTGGTAATAAACAGTTAATAATTTTT
TAAAATTAATATTCAGTGAAAATAATCTTGGCCAGGTGCGGTGGCTCATGCCTGTAATCTCAGCACTTTGGGAGGCTGAGGCAGGTGGATCACC
TGAGGTCGGGAGTTCGAGACCAGCCTGGCTGGCCAACATGGCAAAACCCCATCTCCATTAAAAGTACAAAAATTAGTGGGGTGTGATGGTGCGT
GCCTGTAATCCCAGCTACTTGGGAGGATGAGGAACAAGAATCACTTGAACCTGTGAGGCGGAGGTTGCAGTGAGCTAAGATTGCACCACTGCAC
TCCAGCATGGGCGACAGAGGAATGCTCCATCTCAAAAAAAAGAAAGAAAAGAAAGTAATCTTGATGCTAATATGGAAATGAAAGAGGTGGTTTG
ATATTTGTCTTTACACTATATTTCTTTAATTCAACTAGTACATGTCGAGGCTCTATTTTGTGCCAGGTGCTGTGTCAGAAGTTGGGGTTAGAGC
TCAGAACAACATAGATCAAAGTCCCTGCCCTCTGTGAGCTTATGTTCAGATGGGAGATACAGATGAGTAAAGGTTACTACAATATAATCAGAAT
AGGGATAACGGAGACCACGTAGAGCACCAGATCAAGACGTGGAGGAAGAAGACAGGTTTCCTACAGAACTGACACCTAGGCAGGACTGACAGAT
AAAGTCAGGCAAAAGTTGGAAAGGACAGTAGAGTAAGATGTGACATCTTAAACTTGCTGAATAAAAACACCCAAATATAACAAGTTATCTTTAA
ATTCATGATGATATATTGTATTTGGACATTCAGGCAGTTCTACTACCTGAGTATATCTAGTTAGTAAATTTTTTCCCCATGCTCCAAACAACAG
TTTCACACCCCTTTCTCTCAAACTCTCCATCCCGTTTCTACCCAGTCCCCGCAGATAACTTTGACTCATACACGAATGAGAAAAGAGAAGCCGT
CAAGAGCCACACCTGCATGCCTACTCTGTCTCTTGTTAGCATGGGTGAGCATGCCCAGCTGCAGTCATGGACTGGCCCATCCATCTGGCCTCTG
CAAGCCATTCCTCTGTATCCTCAGGGGTTTCATCTTGTGAATACTCTCTCTCTCCCCGACATCATCATTGTCTTCCTCTCTCCCAATTATTCCC
TCACATTAACATGGTCTACAACTTCCAGCAGGAAAGACAATGTTCCCTCATCAGTATAGTTTAATTTTTTTTCTTTTCTTTTTTCTTTTTTTTT
GGGGGAGTGGGGACAGAGTCATGCTCTGTCATACCAGGCTAATCAGTATTGGCACAATCAGGGTTCACTGCAGCCTCAGCCTCCTGGGCTCATG
TGATCCTCCTACCTCAGCTTCCCAAGTAGCTGGGACTACAGGCACGTGCCCCCAAGCCCCACTAATTTTCGTACTTTCTGTAGAGACAAGGTTT
CACCATGTTGCCCAGGCTGGTCTCAAACTCTTGGACTCAAGTGGACAATATCCCCTTATATACCCCATCATACCACCCCATTTATCTGCTCCTC
AGCAAAACTGCTTAAGGGAATTCTGTATGGCAGGTCCCCACTTCCCCAGGTTGCCTCCCCTCTGCCCACTCCACATGAACTTTCATTGCCCCCA
CTCCTCCATGCCTGCCTCTTCAATGTCACCAGTGACCTCCACTTCGCCAAATGCTGTAGTCACTTCTTGGGCCTCATTTTACTTTACTTATTGG
CAGCAGTCAACAGAGTTGACACCCCCTCTTTCTCTAACCATTTTTCTCTCTTGGCTTCAGGCATGACTCTCTTGGTTTTCCTGCTTCTCACTGG
TTCCCTCTGTTTGCTGCTCCTCCTCACTTTGGGCCTCAAGTGGCCCTTTCCTCCTTCTCTCTCCATCATTCTTCCTAAAGGATTTCATCAGTGC
TGTGGCTTTAAATACCATCTCTTCACCCCTGAGCCCACTCTGAAATTCTAGACTCCTGCAGCCTATTCCATGTTAACATCTTCCCCATATAAGC
ATCTTAGATTAAGTATGAACAAAACAGAACTCATAATCATTTAAATGCTTTTTTCTCATTAGCAGTAATTGGCCCTTGTATCTTAATTTCTTCA
TTTCTCAAGCCAAAAATTTGTCATCCTTGGTTTCTCTCTTTACCTTATTACCCTCCTTACACTCAAATGCTCAGAAAGACCTGAATATTCTATC
TGCAAAATGTATCTTAAATGTGTCTGCTTTTTCTATTACCTGTAATAATCTTGTTAGTAATGACACAATATTTATGAAGTGCTCTCAATATGCT
AGGGAAGAAGAAAGAGGGAGAGAGAAAAGAAGAAGAAAGGTGATGTCTGAGAGGTGAGTTTTGAGAAACTGAAAGAGAAACCTGGAGGAAAAAA
AAAGATACGAGGCCGGAGAGAAAAGCGGTGTAAATAGAGCTTGAACTTTGTCCGTAGAGATATGGGGAGTTATGGAATGGTTTCTGCAGTGATA
TAAAATTACTTATTTATAGCTGATTCATATAAATAATTTTGTTCAAATCCCTTTTTCATAGACAGTATAAAATTAAACCTTAGGTTAGCAGGGC
CAAATGCTGGCAGGGCCTGAATCTTATACTCAGTTAATTGGATTGTACATAGTGCACTTCCTACTGCTTCTTAATTTCAAAAGAATGTGCTTTA
ATCCCAGAAAAATCTTATTGAAAACATATCTTTTGATCCGAAGTTCATAAGGGCTGTTTTCACGTTTTATAGTCCATAAAGTAATTAGTTCAGG
AAGAACTGATTACTTAAAACTCTTTTCTTTTTTAAGAGCAGAATATTATCAACAAATAATTTCTCTAAAAGTTTCCTCATCATTTTCAAAAGCC
AAATCTTCTACTGAATTTTTCGTATGGAATAATCTGATTATATTTTGATATTTTGGTCATTAAGAAATTCTGCCAATATTTGTTCTTGAAGGTG
TTCTTAGCTTAATTTTATATTTTCTTTTACTCTTTAATCTAGAATGCATTTGTAGAGTCAATGATCCTCAGAAACACATTGGAAATTTGTTTAA
AATGGAGATTCTTGACGTCACCCTCGGATTCTGATTTATGAGTCAGGTGTAGACCTGGGAAGGTTTAACAAGCTTGCAGCTGATTCTAATGCAG
GTGGTCTGAGAGGACCACACCAAAACACCCTGCCTTACTCCCCCAACCCTGTGTTTTCTGTCTAAACACTCCCCAATAGCTTTCAATTCCTTTG
GGGCCCATAATTTTTAATTAAAATGCCCATTTGTCTATAGAGTATTAGAAAAATATTAAGACCCTAACTATAAGTAGATTTTCTTAAATCCAGG
GAATTATTATGTTCCAGATGTTGGTACTAATAATGGCTAACCTCGGCCGCTGATCCATCTTTTGTTTGATTTTTATAATATATGGGGAAGCATA
ATTTTGTATATATCTAAACCTCTTTAGAAATATGGTTCAATTGCATATGATCTGTCATAAGGGAATTTATATCTCACGAAGTTAAGCGCATAAA
CAAAACAAGACCAAACACACACACACACACACACACACACACACACACACACATTTTCATTCAGAAATCCTTGGTTCTAAACCAGTCTCTAATC
AACATGCCAAAAACCCTTGTTTCAAATCACTTTACTCCTCTGTGCTTTGGGATTTCTATTTAAATGGGGTAAGTATTTAATCCTGTATATAGTT
ACAAAGCCCAGGGAGAACCTCAGATCAAAGACAAAATTGAAAGAAAGCTTTAGTAGGCCAGAGACATTGGAGTACCAAGGATATAATTGTGAGG
TTTTCCTGCTAGAAAACATCCTCTGAAATGAACTTATAAGTTAACAAATCACCCTTCGCCTGTGTTTGGGGGCAGATGTTAGGCAGAGTCAGGA
TTTGTTTCCATTCGGTCACTTTTCTAAAGAATACAAATCCATCCACCTATTCTTTAATGGTCCTAAATAGCTAACAATGGACAGACAACTCCCT
TCCCTTCCTTGCCCAGTTTCCGAGTCAAGGCGCGCAGTGTTCAGTGTATGACCTGAAGCCTTCTGGAAAGTGGTGATTGGTTAGGGTACTCGCC
AGTTTGGCCTTACTTTGAACATCCCAAATTTATTTCCTTCCCCATTTCAAATATTCCGAAATGAAAGACATTAGGAGCACGTATTCTGGTTAAA
TACGGTGATTGAAAATACGAATGAATGCCACTCCATCATGAAATTTCACTAAATGACAATGAGTCAGCAAATAAGGGGCATAAATATACAAGTT
AAAGAGAACAACAGGTAAGAGATTATTTGTCAAGAGCCTGTAACTCATTTATTTATTCAACAAATATTTACTGAGCACCTCCTCTGCAAGCAAC
ACAGAATTCAAAACAATTAAATATGTATTACATATACAGCATATATGTTTACATATAAACAATATATAACATATATAAAGTTACTGGCAGAGTA
ATATTTTCTTGGATAGTCACAGATGTATTAAGAAACAGGCTTGTTTCAAATTTGCTTTTTTAATAACCATATTTCTTTAACATATTCTTTTTCA
TCTTTTACCATTTCTGACATCAGATTGTGTCTTTAACATGGTCTGATTTTTCTTTTGTTGTAAACTTATTAAACCCATAGAGTCTTATAATTGA
TGATACCATAAAATAAAGGAAAAGCTTGGAAATTAACCAGCAGAAATTTCAGAAAGGACCCCTTAGGTTTCTTTTTTTTTTTTTTTTTCTTCTG
AGACAAAGTCTCACTCTGTCACCCAGGCTGGAGTGTGCAGTGGTGAGATCTCAGCTAACTTTCATCAGTAATGAAACCAGCAGGTGTTCTGCTC
CCCAAAAACTTTGTCCACTGTCTCCAGACACTCAGAGCCACATGCTTAACTGTGGCTCATGGGTTAATGCATGTCTGAACTTTTTCAGGGTGGA
AACTCCCTTTTTTCTTTAGTGTCTAACCCAATGCCCAACATGACATAAGTGCTCAGTAAATATTCAGACAATCCACGTATGAATGTGGTTGAGC
ATCTGTGAGTGGTCTCACCTCCACCCTACATGTGTTACTATGGTCAACCACTTCATCTCTGTGGGTCTCTGCTTGCTCAGCTATAAATTATTTG
GGATCAGCTCAGCCATAGATTCCCTCCAACTCTAATTATCTCTGAGTAAATGAAGTCATGAAAATATGGGAAACTGAGGCAGGAGAATAGGGTC
TAGAGGCAGGGAACCTAGGGCTGATTCACAATTAATTCCTAGAACTAAATCAAAAGGAAAACCCCCAACTTGCCATGCCCAACTATCAAAAGGA
CCAGAGGCTACTCCCTTTACAACCCCCCAACTTTTTCCGCATGGCAGATGAAATATTGAAAGTACCTCTGATTGGTCCCCTTCTGCAACCAATC
AGGTTGGTCATGGGTCAAGTCTTCATTTGCATAGGAGTATAACTTTGTATATACTCTATTTTATCCCCTCCCACAAGCAATCAGACTGATCATG
GGCCACCACTTCATTTACATAGGGTGTACACCAAGTAAGCAATGGGAAACCTCTAGAGGGTATTTAAGTCCCAGAAAATTGTGTAACTGGGCTC
CTGAGCCACTTGCTCAGGTCTGCTCCCACCCTGTGGAGTATGCTTTCATTTTCAATAAATCTCTGCCTGTGTTGCTTCATTCTTTCCTTGCTTT
ATTTGCACATTTTGTCCAATTCTTTGTCCAAGACACCAAGAACCTGGACACCCTCTACCGGTAACAAAACTACAGTGATTTTAGAGGGTTTGTT
TGAAGTGTGTATTGCTCATGAAGGTAATGCCTTTGATGATAACATTTGCTAAACACCACGTAAAGGAAGGGAGGCATTTCCACACTTTGGGTCT
CCTCCCATCTCTATCCCCAAGCCTTAAAATTTCTGCTTAAATGGGAGTCGAAGGAACCCAACAATACTCAGTTGTGTCACTTAAAGGCTGTGCA
ACATCGGGAAGCTTTCTGTATGTCTTACAGCTAGTTCATATCACAAGCCAGCCGTTTCATCATGCAAAAGTCTAAAACAACTTACACCTACTTT
CTAACATTCTTACGGAAAAACCAATACTGTTGAACAGAGGTGGACAAATTATAGCTCCTGGCCAAATCTGGCCCACTTCCTGTTTTAATAAATG
CAGTTTTATTGGAACACAGCCACACCCTTTTATTTCCCATATTATCTATGGTTAGTTTTCTGCTGCAATGGTGGAGTGAAATAGTTGCAACAGA
GACCATGTGACCTCCAAAACCTGAAATATTTACTATCTGGCCCTTTACAGAAAAAAAGTTTGTGACCCCAGCCCTAGAAGAAAAGTAATCAAAA
ATCACAATGGCAGTATTAGTGGTGAAGATAATGGATTCTGCTTCAGTTAAACAGTGTAACTGAGCTTATGATTTTTCTTTTCCTTCTTTTTTTT
TTTTTTTTTTGAGATGGAGTTTTGCTCTTGTTGCCCAGGCTGGAGTGCAATGGCGCGATCTTGGCTTACCGCAACCTCCACCTCCTGGGTTCAA
GCGATTCCTGCCTCAGCCCCCTGAGTAGCTGGGATTACAGGCATGCTCCACCATGCCCAGCTAATTTTGGATGTTTGTAGAGATGGGGTTTCTC
CATGTTGGTCAGGCTGGTCTTGAACTCCTGATCTCAGGTAATCCACCTGCCTCGGCCTCCCAAAGTGCTGGTATTACAGGCGTGAGCCACCGCA
CCCAGCCGTGATTTTTCTATTACCTAGGTCCTTTTGTTGGCTACACACCATGACTGCTTCTGTTTGGGAGTTGAGAACATCTGGTAGGTTAAAT
TGGCAATATTTGACTGATTTGACCTACAATATGTGGTCAACTTCATGTGACTCAACCTAATACTTTGGCTTCCTTCAGTGTGTTCAGTTTCAAT
TCCCCGCTCCCTTTGTAGTCTTCCAGCTACCTCAGTGATTCTTAATCTTAGCTGTGTATTAGAATCATCTGAAGAACTTAAAAAAAAAAAAATC
AATGCCCAGGTCACACCCAGGACCAAGTGAAGCCGAATCTCAAGGGGGAGAAACCAAGCCCTTGGTAATTTTGGAAAGCACCCCAGGTGATTCT
GAAGTGCAGTAAGGCTTGAGAACTATGGAACTACCAAGAGCTTTTGGCAATACGCATGTGCTAGGTGCTATAGACTCCTTCCAATTGGAGAAAA
GAATGTGGACAATTGTAATAAATAATTGGGGCAAGCCGGCATAGTGGTTCTCAAACATTAGCATGCAACCAATCACCTGGTGGGCTTGTGAAAA
CACAGATTTTTGGTGCCAACCCCTCAGTTTCTGATTCTGTAGGTCTG
HUMAN SEQUENCE - mRNA
GGCGGCAGCGCCCTGCCGACGCCGGGGAGGGACGCAGGCAGGCGGCGGGCAGCGGGAGGCGGCACCCCGGTGCTCCCCGCGGCTCTCGGCGGAG
CCCCGCCGCCCGCCGCGCCATGGCCCGAAGACCCCGGCACAGCATATATAGCAGTGACGAGGATGATGAGGACTTTGAGATGTGTGACCATGAC
TATGATGGGCTGCTTCCCAAGTCTGGAAAGCGTCACTTGGGGAAAACAAGGTGGACCCGGGAAGAGGATGAAAAACTGAAGAAGCTGGTGGAAC
AGAATGGAACAGATGACTGGAAAGTTATTGCCAATTATCTCCCGAATCGAACAGATGTGCAGTGCCAGCACCGATGGCAGAAAGTACTAAACCC
TGAGCTCATCAAGGGTCCTTGGACCAAAGAAGAAGATCAGAGAGTGATAGAGCTTGTACAGAAATACGGTCCGAAACGTTGGTCTGTTATTGCC
AAGCACTTAAAGGGGAGAATTGGAAAACAATGTAGGGAGAGGTGGCATAACCACTTGAATCCAGAAGTTAAGAAAACCTCCTGGACAGAAGAGG
AAGACAGAATTATTTACCAGGCACACAAGAGACTGGGGAACAGATGGGCAGAAATCGCAAAGCTACTGCCTGGACGAACTGATAATGCTATCAA
GAACCACTGGAATTCTACAATGCGTCGGAAGGTCGAACAGGAAGGTTATCTGCAGGAGTCTTCAAAAGCCAGCCAGCCAGCAGTGGCCACAAGC
TTCCAGAAGAACAGTCATTTGATGGGTTTTGCTCAGGCTCCGCCTACAGCTCAACTCCCTGCCACTGGCCAGCCCACTGTTAACAACGACTATT
CCTATTACCACATTTCTGAAGCACAAAATGTCTCCAGTCATGTTCCATACCCTGTAGCGTTACATGTAAATATAGTCAATGTCCCTCAGCCAGC
TGCCGCAGCCATTCAGAGACACTATAATGATGAAGACCCTGAGAAGGAAAAGCGAATAAAGGAATTAGAATTGCTCCTAATGTCAACCGAGAAT
GAGCTAAAAGGACAGCAGGTGCTACCAACACAGAACCACACATGCAGCTACCCCGGGTGGCACAGCACCACCATTGCCGACCACACCAGACCTC
ATGGAGACAGTGCACCTGTTTCCTGTTTGGGAGAACACCACTCCACTCCATCTCTGCCAGCGGATCCTGGCTCCCTACCTGAAGAAAGCGCCTC
GCCAGCAAGGTGCATGATCGTCCACCAGGGCACCATTCTGGATAATGTTAAGAACCTCTTAGAATTTGCAGAAACACTCCAATTTATAGATTCT
TTCTTAAACACTTCCAGTAACCATGAAAACTCAGACTTGGAAATGCCTTCTTTAACTTCCACCCCCCTCATTGGTCACAAATTGACTGTTACAA
CACCATTTCATAGAGACCAGACTGTGAAAACTCAAAAGGAAAATACTGTTTTTAGAACCCCAGCTATCAAAAGGTCAATCTTAGAAAGCTCTCC
AAGAACTCCTACACCATTCAAACATGCACTTGCAGCTCAAGAAATTAAATACGGTCCCCTGAAGATGCTACCTCAGACACCCTCTCATCTAGTA
GAAGATCTGCAGGATGTGATCAAACAGGAATCTGATGAATCTGGATTTGTTGCTGAGTTTCAAGAAAATGGACCACCCTTACTGAAGAAAATCA
AACAAGAGGTGGAATCTCCAACTGATAAATCAGGAAACTTCTTCTGCTCACACCACTGGGAAGGGGACAGTCTGAATACCCAACTGTTCACGCA
GACCTCGCCTGTGCGAGATGCACCGAATATTCTTACAAGCTCCGTTTTAATGGCACCAGCATCAGAAGATGAAGACAATGTTCTCAAAGCATTT
ACAGTACCTAAAAACAGGTCCCTGGCGAGCCCCTTGCAGCCTTGTAGCAGTACCTGGGAACCTGCATCCTGTGGAAAGATGGAGGAGCAGATGA
CATCTTCCAGTCAAGCTCGTAAATACGTGAATGCATTCTCAGCCCGGACGCTGGTCATGTGAGACATTTCCAGAAAAGCATTATGGTTTTCAGA
ACAGTTCAAGTTGACTTGGGATATATCATTCCTCAACATGAAACTTTTCATGAATGGGAGAAGAACCTATTTTTGTTGTGGTACAACAGTTGAG
AGCACGACCAAGTGCATTTAGTTGAATGAAGTCTTCTTGGATTTCACCCAACTAAAAGGATTTTTAAAAATAAATAACAGTCTTACCTAAATTA
TTAGGTAATGAATTGTAGCCAGTTGTTAATATCTTAATGCAGATTTTTTTAAAAAAAAACATAAAATGATTTATCTGGTATTTTAAAGGATCCA
ACAGATCAGTATTTTTTCCTGTGATGGGTTTTTTGAAATTTGACACATTAAAAGGTACTCCAGTATTTCACTTTTCTCGATCACTAAACATATG
CATATATTTTTAAAAATCAGTAAAAGCATTACTCTAAGTGTAGACTTAATACCATGTGACATTTAATCCAGATTGTAAATGCTCATTTATGGTT
AATGACATTGAAGGTACATTTATTGTACCAAACCATTTTATGAGTTTTCTGTTAGCTTGCTTTAAAAATTATTACTGTAAGAAATAGTTTTATA
AAAAATTATATTTTTATTCAGTAATTTAATTTTGTAAATGCCAAATGAAAAACGTTTTTTGCTGCTATGGTCTTAGCCTGTAGACATGCTGCTA
GTATCAGAGGGGCAGTAGAGCTTGGACAGAAAGAAAAGAAACTTGGTGTTAGGTAATTGACTATGCACTAGTATTTCAGACTTTTTAATTTTAT
ATATATATACATTTTTTTTCCTTCTGCAATACATTTGAAAACTTGTTTGGGAGACTCTGCATTTTTTATTGTGGTTTTTTTGTTATTGTTGGTT
TATACAAGCATGCGTTGCACTTCTTTTTTGGGAGATGTGTGTTGTTCATGTTCTATGTTTTGTTTTGTGTGTAGCCTGACTGTTTTATAATTTG
GGAGTTCTCGATTTGATCCGCATCCCCTGTGGTTTCTAAGTGTATGGTCTCAGAACTGTTGCATGGATCCTGTGTTTGCAACTGGGGAGACAGA
AACTGTGGTTGATAGCCAGTCACTGCCTTAAGAACATTTGATGCAAGATGGCCAGCACTGAACTTTTGAGATATGACGGTGTACTTACTGCCTT
GTAGCAAAATAAAGATGTGCCCTTATTTT
HUMAN SEQUENCE - CODING
ATGGCCCGAAGACCCCGGCACAGCATATATAGCAGTGACGAGGATGATGAGGACTTTGAGATGTGTGACCATGACTATGATGGGCTGCTTCCCA
AGTCTGGAAAGCGTCACTTGGGGAAAACAAGGTGGACCCGGGAAGAGGATGAAAAACTGAAGAAGCTGGTGGAACAGAATGGAACAGATGACTG
GAAAGTTATTGCCAATTATCTCCCGAATCGAACAGATGTGCAGTGCCAGCACCGATGGCAGAAAGTACTAAACCCTGAGCTCATCAAGGGTCCT
TGGACCAAAGAAGAAGATCAGAGAGTGATAGAGCTTGTACAGAAATACGGTCCGAAACGTTGGTCTGTTATTGCCAAGCACTTAAAGGGGAGAA
TTGGAAAACAATGTAGGGAGAGGTGGCATAACCACTTGAATCCAGAAGTTAAGAAAACCTCCTGGACAGAAGAGGAAGACAGAATTATTTACCA
GGCACACAAGAGACTGGGGAACAGATGGGCAGAAATCGCAAAGCTACTGCCTGGACGAACTGATAATGCTATCAAGAACCACTGGAATTCTACA
ATGCGTCGGAAGGTCGAACAGGAAGGTTATCTGCAGGAGTCTTCAAAAGCCAGCCAGCCAGCAGTGGCCACAAGCTTCCAGAAGAACAGTCATT
TGATGGGTTTTGCTCAGGCTCCGCCTACAGCTCAACTCCCTGCCACTGGCCAGCCCACTGTTAACAACGACTATTCCTATTACCACATTTCTGA
AGCACAAAATGTCTCCAGTCATGTTCCATACCCTGTAGCGTTACATGTAAATATAGTCAATGTCCCTCAGCCAGCTGCCGCAGCCATTCAGAGA
CACTATAATGATGAAGACCCTGAGAAGGAAAAGCGAATAAAGGAATTAGAATTGCTCCTAATGTCAACCGAGAATGAGCTAAAAGGACAGCAGG
TGCTACCAACACAGAACCACACATGCAGCTACCCCGGGTGGCACAGCACCACCATTGCCGACCACACCAGACCTCATGGAGACAGTGCACCTGT
TTCCTGTTTGGGAGAACACCACTCCACTCCATCTCTGCCAGCGGATCCTGGCTCCCTACCTGAAGAAAGCGCCTCGCCAGCAAGGTGCATGATC
GTCCACCAGGGCACCATTCTGGATAATGTTAAGAACCTCTTAGAATTTGCAGAAACACTCCAATTTATAGATTCTTTCTTAAACACTTCCAGTA
ACCATGAAAACTCAGACTTGGAAATGCCTTCTTTAACTTCCACCCCCCTCATTGGTCACAAATTGACTGTTACAACACCATTTCATAGAGACCA
GACTGTGAAAACTCAAAAGGAAAATACTGTTTTTAGAACCCCAGCTATCAAAAGGTCAATCTTAGAAAGCTCTCCAAGAACTCCTACACCATTC
AAACATGCACTTGCAGCTCAAGAAATTAAATACGGTCCCCTGAAGATGCTACCTCAGACACCCTCTCATCTAGTAGAAGATCTGCAGGATGTGA
TCAAACAGGAATCTGATGAATCTGGATTTGTTGCTGAGTTTCAAGAAAATGGACCACCCTTACTGAAGAAAATCAAACAAGAGGTGGAATCTCC
AACTGATAAATCAGGAAACTTCTTCTGCTCACACCACTGGGAAGGGGACAGTCTGAATACCCAACTGTTCACGCAGACCTCGCCTGTGCGAGAT
GCACCGAATATTCTTACAAGCTCCGTTTTAATGGCACCAGCATCAGAAGATGAAGACAATGTTCTCAAAGCATTTACAGTACCTAAAAACAGGT
CCCTGGCGAGCCCCTTGCAGCCTTGTAGCAGTACCTGGGAACCTGCATCCTGTGGAAAGATGGAGGAGCAGATGACATCTTCCAGTCAAGCTCG
TAAATACGTGAATGCATTCTCAGCCCGGACGCTGGTCATGTGA

[0271] TABLE 7

MOUSE NOMENCLATURE
ICSGNM Sox4
Celera mCG11673
HUMAN NOMENCLATURE
HGNC SOX4
Celera hCG36747
MOUSE SEQUENCE-GENOMIC
ACTATTGGTAACTGTGATGGTTAACTTTGCCAGTTTCACTGGGCCATTAGGTACCCAAATATTTGTTGGAACATTCTAGAAGTATCTATGAGCA
TATTTTGGGTTGAGTTTAATATTTCAGTCTATAGGTTGAGTAAAACAGACTGCCCTCTGTTGGGAACAAAAAAAGGGGTCCAACATCCAGCCAG
AGTTCCTGTGCTCTGAGCAGGCAGACGCAGGCAGAACTGCCAGACACTTTCCACTCAGCCCCAGGTGGACATCTAAGCCTCTGACCCCACTCGG
CGGGGGGTGGACAAGGGGCAGCCCCCAACTGGGGACCCTGAGGTGACACCCTGTCGTCCCGGGGTTATAGGAGAGAGGGAATAGGGAAGAGGTT
CCCAACACTGACCAGAGTCTTAATGGAGCAGAGACTCTCTATGGTTTAAGAGCTTTATTATAGAAATGCAGGGAGAAAGAGAGAAGGTAGAAAA
GGAGAGAGAGAGAGAGAGAGAGAGAGAGAGAGAGAGAGAGAGAGGGAGGAAGAGGAAGAGGAAGAGGAAGAAGAAGAAGAAGAAGAAGAAGAAG
AAGAAGAAGAAGAAGAAGAAGAAGAGGAGGAGGAGGAGGAGGGAGAGGAGGAGGGAGAGGAGGAGGGAGAGGAGGAGAGAAGAAGACAAGGAAA
AGAAAGAGAAGAGAGAAGACAAAGAGAGGGGAGAGGGGGGAGAGAGTGAAGGGTAAGAAGTAAGAGCATAAGAGTAAGAGAGAGAGGTGGGGGC
TGAACAGCCCTTTTTATGGTCTTTACTGCTGCTAGGTAACTGGGGAGGAGTTTAACCTGAAGGTCAGAATCTTGGGACATTGCTTATGTGACTA
CTGACCATGCTTCTCTTGTGGAGGCTGTGGGAGGTGGTAACTTAGGCAGGGGCCAGAGCTCCAGGAGCATGAGGGAACGCCTACTGTGTCATGA
AGGTAAATTATGACCATCAGGGTTCAGACCTCAGCTCGACCGGAGACCAGCCTGCAATTCCCCACAGCCCTCCCTAAAGTGGGTTAAAAGACAG
AAAAGAATTAAATATCTGATCCTCTCCCATATCTACAAGACGTAACTTCCCTTGTCCAACCATCTTGTAGATTGGATGTTGTTTTTCCCTTGCT
TTTTAATTAGAACTATGTCATTGGTCCTCCTGTGTCATAAGTCTACAAAGTGCATGTGTGCTGGCTAATCTTGTGTCAACCTGACAGACAACTA
GAATTATCTGAAAGGAGGGAACCTTAATTGAGAAAATGCCTCCATAAGATCCGGCTGCAAAGCATTTTCTTAAATTGTGATTGATGTGGCCGGG
CCCAGCCCATTGTGGGTGGTGCCATCCCTGGATTCTGGGCTCTATAAAGAAAGCAGGCTGAGCAATCATTGAGGAGCAAGCCAGTAAGCAGCAC
CCCTCCACGGCCTCTGCATCAGCTCCTGCCTCCAGGTTCCTGCCCTGCTTTGAGTTCCTTCCTGTCCTGACTTTCTTTGATGATGAACAGCAAT
GTGGAAGTATAAGCTGAATAAACCCTGTCCTCCTCCCCAACTTGTTTTTTGGTCATGGTGTTTCATCACAGCAAGAGACCCTAACTATGACAGT
ATGTCTTAGGAATTATCAGCCTCCATAATCAGGAGCAAAATTCCTTATAGCAACTCACTAATATGCCAATGGTCAAAGGAAGTTAGTGACCAAA
TCCAGAGAGTAAGGGGTAGAAAAGTCTTACACGGGAGGTACCATTGCCAGGAAGGTTGGATTATCAAGACTCCCAACACACTGGCTGCCAACAA
GGAAACCCCAAATATCGGCAGAATTCTCACTGATTGGCACTTGCCTGGTAACTATAGTNNNNNNNNNNNNNNNNNNNNNNNNNNNNNNNNNNNN
NNNNNNNNNNNNNNNNNNNNNNNNNNNNNNNNNNNNNNNNNNNNNNNNNNNNNNNNNNNNNNNNNNNNNNNNNNNNNNNNNNNNNNNNNNNNNN
NNNNNNNNNNNNNNNNNNNNNNNNNNNNTGTGTGTGTGTGTGTGTGTGTGTGCGCGCGCGCGCGCGCAACATGTGTTGGCATGTGTGCCACTGG
TGTAGGCATGACAGTCAGAAGAAAACATTAGGGAGACAGCTCTCACAAAGGGTCTCTGTTAGTTTTCCTGCTGTGCTTACTATCACAGGTTAGA
TAGCTCACAACCACTCAGGAGTCTCCTGTCTCTACCACCAGCTCACAGCCACTAGGAGTCTCTGCCACCAGCTCACAGCCTTTCAGGAGTTGCC
TGTCCCTGCCTCCTGTCTAACTTTCGAGTGCTGAGATGACAGGTACCTACATCTAGCTCTCTTATGTAGGTCCTGGGGAGTAAACTCAAGTCAT
TAACCTTGTTGTAGCAAATGATTTTACCCACTCAACTGATGGCCCAGTTGCCTTGATGGTCTGTGTGGTTGGTTGGCTGGACTTTTTGTTTCGA
GATAGGATCTAAGCTAGATAACTTAGGCTGGCCTTGAACTCATTATATAGCCCAGGCTGGCCTCCAACTCAGTGCTTGCCATACTTCAACCTCC
CAGATGCTAGGACTATATGCATGAGCCATCAAGCCTAGCACCGTGCATATTTAAATTGTATGGTTTGTATTATACACTATATAGATTTTAACAC
ATGGTACATTGGGAATGATGTCGATTTTTAAAATACATATATAGTAGGTAATGTCACACACAAATTTTCTTTCATTTAAGGTTACATTACACAA
TGCATGGTGGCACAAGCAAGTCTTTAATGCCAGCTCTTAGAAGCAGGAGGTAAAAGAATCCAGAGTTCTAAGTCATTCTAACTGCTCAGATAGT
TCAAAGCCAGCCTGGGTTGCATTCAAACTTGTCTTTAAAAAAACAAGTGACTCGACATTTGTACAACACAGTGATATTTCAGATGATGTTTGTG
AAATTGAGTTAAATTTGAGTGTTGTAAGGATGAGCCTTCATTTATTTGTCCCGACAAGCCAAATCAACTTACTTATGGAACTAACTTAAAGCAG
TCTGCTTCTGTAAGTCCAGGCTGTCCTTCAACTTGTGTTTCCACAAGCTCTTGCCTCAACCAAGTGCTGAGATTTAGGTGTGTAAACCATTTGA
AATTATTTTTCACTTGGGCTGTGTGGGACAAACAGCCCACAGAGTCTTGTGCTTCAAGGACTTCTTTTAAAAAAAAAAATCATAAGCTACTAGT
CTCCAGTTACTCGGCCAGACACCTCCCTCCTCTTGCCTTCAAATTTGCCTCTTTACAAAAGCTGCTTTGCTGGCAGTTCAGTATGAATTTATTT
TACAGCATATACAAGGTTTTCTGGTAGCTTGCAGTTCCTGAGAACTGCAACCGAAGGCTCTTAAGCTGAGCGGGGGACACACAGTAGGGCACTC
ACTACGTTGATTGGCAGTTGAAGTGGCAGTTGGTGTGGAGTCGTCGCTGCCACGGGTACTCTTATCTTTCCTGGCCACACCCCTGGGCCCAGGA
GGCAGCTCTGAACAGATGGTGAGTCTCCGGTGCCAGGTGTGCAGCGCGCCCTGCGCTGTGTGAGGCACAGGGCTCTTTGGTCCTTGCCGCACCC
CACCCATCCTATGCCCGCGAGCGCCCCCAGCGCAATGTGTGTCTCGGTGCTGTCCGCACGCGCGGTTAGCCGAAGGTGAAAGGCTGGGAAAAAA
GGAACCCTAGTGCCAGGCAGAACCCGCCACCGGGCCAGCTGCTCGTGGCGAGCACGTTCCTCCCCTCCTCTGACTCCCATCACTTGGCAGCCAC
CCCAATCGCCTGCTCGCCCCTCTGCAGCAGCACACACGCCTTCGCACTTGCTCCCCTCCCTATTCTCTTTTCTGACACTTCGTGGCTTACATGG
ACCACTCTCCAGCGGGATGCCCTTGGTCCCCGCCCGTCTCTTAGCCTTCAAGGTGGCTCTCCTCGTTCCCTAATATTTGGGGAACTCTAGGCGG
CTTTTTTTTTTTCCATAATCGTAATCATTTGCTTGCCTCCTGGGACTCCAAACTGTAATTGCTTTTACGTGTCTGTGGTCTCGAGGACAAGGAA
TCCACTGAGAGATGGTTTGGGGGTGCTGGGCTGGGAAGAGGATGCTCTATTCCGATTCCGAGTACCGTTTGCGGGGTGGGGGCTGCAAGGAGGA
AAGTGCGCTCAGCCTTTCCTTTATCCACCCTCCCCCCGTCGCCCTCGGCAAGGGCTTTGGGGCGCCTTCGAGGTCCTCTGTGGACACACAAACA
CCTCAATCTTCCTGATCAGGCTAGAGCCTGGAGGTGGGGAACTATCTGGTTCCTTCGTTCTGCCCCTGGGAAGAAGCCCTGGCCGCTGTGCGTG
CACTGCCCCTCCCGCAGTCACAGTGAGAGCTGAAGCGTGAGTCCCAGACCGATGCAGATGGCACGCTATTTAGTCCAGGAGAGGCTCACAGAGG
GTAAGGGGCTGCTGGGCACCCGAGTGCACCCAGGGAACCAAATGGCTGTCGGTTCCGGTCAGTGGCGGAACTGGGCCCCAGCGGCTAGGTCCAG
GCTGGAATCGGGGGGAGGGGTGCGTAGGGGGAGGGACTGGGCGAGATCCCCCCTCCTGGAGTGGCTGCTCCAGCTGCCACTTGCAAGGANNNNN
NNNNNNNNNNNNNNNNNNNNNNNNNNNNNNNNNNNNNNNNNNNNNNNNNNNNNNNNNNNNNNNNNNNNNNNNNNNNNNNNNNNNNNNNNNNNNN
NNNNNNNNNNNNNNNNNNNNNNNNNNNNNNNNNNNNNNNNNNNNNNNNNNNNNNNNNNNNNNNNNNNNNNNNNNNNNNNNNNNNNNNNNNNNNN
NNNNNNNNNNNNNNNNNNNNNNNNNNNNNNNNNNNNNNNNNNNNNNNNNNNNNNNNNNNNNNNNNNNNNNNNNNNNNNNNNNNNNNNNNNNNNN
NNNNNNNNNNNNNNNNNNNNNNNNNNNNNNNNNNNNNNNNNNNNNNNNGGCGGGGGGCGTCACCAGCCCATTCCTGACCGTAAACCTCCTCAGA
AGGCAGTGGTGAAACGCCGCTGCGAGCGTCGCCCGAGCCACGTTTACAGTAGGAAAGACTTTCCTCCGAAAAGCACCACCGGAGTCGATTGCAA
TTTAGCTCCTCCCAGTAAGAGTCACAGAGAGGCAAGGCGAGGCCGGTGCACCGGGAGTCCTAGGCGAGCTTGGGCAGGACCCCTGTTGCTGAGC
TCCACGGGGCGGGCGTGCCGGGCTACGGAAACCATTTCTTTTCAGGAGCAGGGTTGGCCTTTGGGACTCCTGTGGTCATGCACCGTGTGTTTCT
GCCGCCGCCGAAGCAGAGCGCGCAGCTGGCGGAGAAACCGCATTCTCGCTCCTACCCGCCCGAGGGAGATGACCCGTGACCTCCCGAGTGAGGT
TACCAGATCCGAAAGGGGCGTCTCGGCTTCCCCAGCCATGGGGGTTGAGGGGGTGGGGGGTGGAAGGTGGCCCTGAAAAAAGTGGACGAGCAAA
CAGGGAGCAGCAATCGGTTACCCTAAACTTTGTCTTACGGGGAATGGGGGGATGCCCAGAATTCACCAGCACACCCACCGGTCCTTGAAACCCG
GAGAAGTGTTGGGGGTTCACTGGTTCAGGAGACCAGGAAGGGACGGTTGGATCTTCCCCCACGTTTTCCCACGTCGCTGCATGCTCAGGCAGGC
TCAGCGCTGCCACCTGGCGGCTGCCTCTCCCGGACTGGGAGGAGCTGTCTGCACGCACCAGTTCCACAGATCTTGAAGGGTGTGCCAGGCCTCT
ATCTGGGGAAAGGGCAGAAGCTCCAGTTAATGCTTCCTATCTATGTGGCCCGTGCAGACACACTTGTTTTCTGCTTGTTCTCAAGAGTAAGAGG
GAAATGCGTTGGCGTTGAACGGCATGGGTATAAAGAGCTGACTTGAGCCTGCTGGTTATGAGGGGTGAGAAAGTGGTGAAATTATTAGAAATAT
ATGTTTCTTATCTCTGTGTAGTCTAACAGTGAATATGAACGACAGCTTTCATTTATCCTGCTTAATATTTTTCGAATAAGAATTCAACACACTG
GTCTGGAGAGATAACTCAGCCCTTGATAAAGGCTAAGGCTCACAACCAAAACCTAAAAAATACTGTTTCAATACAGCCCCCCTTTCCTAGTCCA
GTTTCAATACAACTTCCTCAGCACCAAGAATGGAGTAGTGCAAGGGGTTGGGGGGTGGGGAGCAAAATCAGCCCCAGTGAAGGGTTGACCTGAA
AACAGGGCTGATGGCATTCAGTTTCCCAGAGCACTTCCAGTCAACGAAATTAACAAGAAGGCGTCCTCCACCTCTGTTTATTTGAACTGAATGT
TCAAAGCCAGAGGGGCTCACACACTCAGTTTCTACAGCCAAAGCAAAGCACGATTCTTGGAAAATAGTGCCAAGCCAGACTCGTGAAACTAATT
TCCATGCAGGTTTTCCTCCCTCTATGCTATCGGGACACATTAAGAAGTCGAGGTAAACCTTCATCCATACCCCATCCATACCATTCTGTAGATG
TGAGGTTTTATGTTGTGCAGGTGTGTAGGGGCAGGAGAAGCACATTAGCAGTTATTACCCTCTCATGTCGAATGGATTGCATTTAATGGAATAA
AATAAATATCTGCCTTAATTCAAGACGTGAAAGATCTAATATCATTTCCAATAAAGACCATTAGTTGATGATTCTAAGGCAGGACTTGTTTGCA
AAACAATCCTGGCTCTCTGTTCATAGAACTACAAGGGGAGCGGAGGGAAAGAGCACTGAGCACTGACTTACTAGGGGCCACCAAATAGCTAGTA
TCTGGGGGGAACGGGGAGGTCTCTGATGGAGAACTGATTACAAAGCTTAGGGCATTAGGTAATGAGACCCAGAAATCTTAATATCATGATTTGG
TATTAAGTCCAGTGCATTCTGGTGTATATGTACTTTAATCAAAAGCTATTTGTCACATCTTTTGTCACATGTTTCCATGCTCTAAGAACAAAAA
CAGTCACACTTCAATAACTCCAAACTGTCAGGTATATACTCTACAGGATTACATTGTACAATGGTGTAACTAGGTCAACGGATGCTACCAACAC
ATATTTTACCAGGTCTAAGAGAAACATAGACACAGGGGGTGCATCTCATAGTCAGGGGGACAAGGAGGACCTTTAGCAGCTCGTGAGTTGGCTC
AGCCGGTACAGGCCTCTCTAGGCCAAACCTGGCAATGTGAGTTCAATCCCCAGTACCTGGATAGTGGAAAGAGAGCACTGGCCGCACAAGATGT
CCTCTGACCTCCATCTATGCACAGTGCCAAGCAGTGGACTCGCATACAAAAATTAACTTAAAATGGTTTATCCCCTTTTCCTTAAAGGCCTTTT
GTCCTTTGATGGCATATACTATTACAGTACACCTTAAAAGTCTGTTGGGTTTTCTGACATGCATCTAACAAGAAAAATCAGGGCAGGAATTACT
TTTTTGATATGCTCTTTAAATTAAATATGTGCATTAAGCATGAGTGTAACTATGAGGGGTGATTTACACCACTGGAAATACCACCAATTACACC
AACACTCATCTTTGCCAAATTATCCAACATTGTTGAATACAGATTGTACAAGGAATACATCTCCTTATTTTTGTCATAATAAAAATACTGATTT
TGTAGACAATAGACCTTTTAGGATAACCCAGATGCCATTTTGATGGCATCTTAAGAAGGTACATCTGTGGGTATCAGAAAAAAAAACAAAAAAA
AACAAAAAAAAAAACACATATGCCTTGCAAAACACTTTTCTTGGTGGAGGTTTTTTTCTTGAAGGAGTGCATACTATTTTAGGATTTCCTCCTC
TGGGAATTAAAAAAGGGCTGTGATGGGTAGCAAATAGTCAAAAAAAAAAAAAATTACTTGCTTTTTACCCACAAAACATTCTTGCCTGCAGTTG
ATCTTAGAGACCCAGTCAGCTGTCTCCATAGGGTACTCTTTCCAGTAAATGTCTAATTCTTGACACCCTCGGCCTCCTTCCAGCCTAAATACTC
TGAATGTGTGACAAGGTAAATGGAAATATACCACCCAGCACTACTGTGCTCTCAATCAAGAGCTGGCTCTAAGTTGGCCTCCTCTGTTACTAGC
CTGAGGGAAATCAGTTTATCATCGTATTAAAGGTGAGTTTTCACTAGAGTCCCAATGCTCAGATCTTGGGAAAAGGGTGGTTTGTGTAACTAAG
TTGTTCTATATTCTAAGTATTATCTGCATGTGTTCGCTCTTTGAGACAAGGACTTGGGTAGCTGGAGCTGTCCTGGAATTCTTTTTTTTTTTTT
TTTTCCCTTGGTTTTTCGAGACAGGGTTTCTCTGTGTAGCCCTGGCTGTCCTGGAACTCACTTTGTAGACCAGGCTGGCCTCGAACTCAGAAAT
CCGCCTGCCTCTGCCTCCCAAGTGCTGGGACTACAGGCGTGCGCCACCACCGCCCAGCTTGTCCTGGAATTCTTAAGCATCAGCGGATGATCTT
GAACTCCTGATCTTCCCTGAAGGCACCTCCCAAGTACTGAGATAACAAACGGGGACCACCAAAGGGGCTTTCGATTACGTTTCACCACCGGTGA
CCACCTTCCCACCTTAGTCTCTCGAACATCGTGCTGCTCTTACTAGAAGTGGCATTTGCATTAGGGAGAACTCGGAATGTGTGTTAGAATCCAG
AGGGCTCAGGACACACATCCGTGGTTTATAATCACACACTCACCGGGCACTAACACAAGCCCTCTATAAAGCTCACAAGGTTCCCAAAGCACAG
CAAGAGGAGGACAATGAGACCCAGAAAGAAAGATCAGGAGAGGGACTTGAGATAGGTCCAGCAGCCCACTCCCCTGTGCCACCCCTTTCTCTTC
TTGGTCTTTTAGGCCCAATTGCTTCAAGTAGCACAGACACACGGGAGACAATGGGTAAGAAAGAGAGGGGGAAGGAGAGCACATAGCGAACCCA
TCTATCCTTTGGATATTGTGGAAAACAAACATTTAGAAAGTGAAGTCAATCCCATCCTGTATTCACCATGATCGCCCTATACAGAAATCACACA
AAGTCTCTTATTGAGGTAATTATGGGCCACTGCCTTAGCGTTCCACAGAAAATACTTGTTTGGCCTACCCAGGATTTATAGGGGAAGTGAAATC
ATTAAATAACTAGTTAACCTCTGTTTGGCAAAAAGAGTAAGTAATTACTGAAAAGGGGAGAAAGAAAAAAAAAAAAAAACCCTGCCTTTCACAA
ACAGCACAGATAGCATCCTGAAGGGATTTACACAATACACCAACGTTTGTTCTGTACCCAGAGTTGTTAAAATAATTGTGATGACAGGTGTCTA
GGTACCACTTTCTTAATGGTTTTCAATATCCATTGATTTATTATTGTGGCTCCCCCCACTTACATCTCTAGCTCTAAGAAGGGGCTAAGAAAAG
AGATTTTGCACCAAAGGCTGATTCTTTATTCCTGGGCTGAAAAGAACTAATAAAAATAATCACTCGGCTTTTAAGCAGAAAGCTTCCATTTACA
GTATTTCACCCTTACCCCCCCTCCAAGCCCCTTGTTATCTAACATAATGGCTAGAATACATTTCCGTCTCTCCCCTTAATAACTTCATGCATTA
ACATCCTCTTCACACATGCGCGTGCGTGCGCGCGCGCGCGCGCGCACACACACACACACACACACACAGAGGCAAACGCGCGCGCACCCAGCAA
AAGGCGGAGGTGGGGGGGAAAGAGGCAGCAGAAATCTCAGCTGTACTTCTAGCCCTTTTAAAAAGTTTGCTCTGTAAATTGGAATGAGGTCAGA
TTTGGAGCTTCTCATTGCACGCGGAGATTATTATTGCATCGGGTTCCAAGCCAATGGGAAGGACGGGGGAGGGGCTTGGCACGAGGAAGCGTTA
GTTACAGCGGCTGNNNNNNNNNNNNNNNNNNNNNNNNNNNNNNNNNNNNNNNNNNNNNNNNNNNNNNNNNNNNNNNNNNNNNNNNNNNNNNNNN
NNNNNNNNNNNNNNNNNNNNNNNNNNNNNNNNNNNNCAGTGGGGGAACTCTGCCGGTAACCAGCTCCCCTTCTTGCAGGAGGGAGGGAGAAACA
TACATTTATTCATGCCGGTCTGTTGCATGCAAGCTTCTTGGCTTCCTACCTTGCAACAAAATAATTGCACCAACTCCTCAGCGCCGATTCCGCC
CACAGAGAGTCCCGGAGCCAGAGTCGCTTTGGCTTTGCACTGCAGGAAAGGGACTTAGGCGCTAGAGACGATGTCGCTTTCCTGAGCTACCGCG
AGCTCTCGTGAACTGCAATCGACTGCTTCAGGGAAAGGGGTGGGGGAAAGACTTGCCCCGGAGGCGGCGAGAAACTTGCGTTTGGAAGATACTC
CGGCTACCAACGTTTGGAGAAACTCCTCGCCGCGGCCGACTCCAGCCTCGGTGCCCGCAGGGAGCACTTCAGCGGTGAGGGAGGACGGAGGGCC
TCGGGGACTCTAGGTTGGCGGCGGGAGGCGGCCGCCCCTGGCCCGCGCGCCGCTCAGGGGACCCTGGTCTCCGCCCCGGGGAGCCCGCAGGGCC
CGGCGACCGCGCCGCGAGCGTGTGAGCGCGCGTGGGCGCCCGGCAAGCCGGGGCCATGGTACAACAGACCAACAACGCGGAGAACACTGAGGCT
CTGCTGGCCGGGGAGAGCTCGGACTCGGGCGCCGGCCTGGAGCTGGGCATCGCGTCCTCCCCGACGCCTGGCTCCACCGCGTCGACGGGCGGCA
AGGCGGACGACCCCAGCTGGTGCAAGACGCCCAGTGGCCACATCAAGCGGCCCATGAACGCCTTTATGGTGTGGTCGCAGATCGAGCGGCGCAA
GATCATGGAGCAGTCGCCCGACATGCACAACGCCGAGATCTCCAAGCGGCTAGGCAAACGCTGGAAGCTGCTCAAGGACAGCGACAAGATTCCG
TTCATCCAGGAGGCGGAGCGGCTGCGCCTCAAGCACATGGCTGACTACCCTGACTACAAGTACCGGCCGCGAAAGAAGGTGAAGTCGGGCAACG
CGGGCGCGGGATCGGCGGCCACAGCCAAGCCAGGGGAGAAGGGCGACAAGGTCGCGGGCAGCAGCGGCCACGCGGGAAGCAGCCACGCGGGGGG
TGGCGCGGGCGGCAGCTCCAAGCCCGCGCCCAAGAAGAGCTGTGGCCCCAAGGTGGCGGGCAGCTCGGTCGGCAAGCCCCACGCTAAGCTGGTC
CCGGCGGGCGGCAGCAAGGCGGCTGCATCGTTCTCTCCAGAGCAAGCTGCCCTGCTGCCCCTGGGGGAGCCCACGGCCGTCTACAAGGTGCGGA
CTCCCAGTGCGGCCACTCCGGCCGCCTCCTCCTCGCCGTCCAGTGCGCTGGCCACCCCAGCCAAACACCCTGCCGACAAGAAAGTGAAGCGCGT
CTACCTGTTTGGAAGCCTGGGCGCTTCGGCGTCTCCCGTCGGGGGCCTGGGAGCGAGCGCCGACCCCAGTGATCCACTGGGGTTGTACGAAGAT
GGAGGCCCGGGATGCTCGCCCGATGGCCGGAGTCTGAGCGGCCGCAGCAGCGCAGCATCATCGCCAGCCGCCAGCCGATCGCCCGCTGACCACC
GCGGCTACGCCAGCCTACGCGCAGCCTCGCCCGCCCCGTCCAGCGCGCCCTCGCACGCGTCCTCCTCGCTCTCCTCGTCCTCTTCCTCCTCCTC
GGGCTCTTCGTCGTCCGACGACGAGTTCGAAGACGACCTGCTCGACCTGAACCCCAGCTCAAACTTTGAGAGCATGTCCCTGGGCAGTTTCAGC
TCCTCATCGGCGCTCGATCGGGACCTGGATTTTAACTTCGAACCCGGCTCAGGCTCCCACTTCGAATTCCCGGACTATTGCACGCCCGAGGTGA
GCGAGATGATCTCGGGAGATTGGCTGGAGTCCAGCATCTCTAACCTGGTCTTCACCTACTGAAGGGAGCGCGGGCCGGGGAGAAGGTGGGCCAA
GAGGCAGGAGAGGAGAGAGGGAAAAAAGAAAACAAAAAACAAACAAACAAAAAAACAAACAAAAAAATGTTAAAAAGAAGAAGAAAGAAAGAAA
CAGAAAAAAAATGAGTTAAAAAGAATAGATGGAGAGTAGAAGGAGAAAGGGGAAAAGAAAAGGAAGAAAAAGTGCATAGAGCTGGCCTGGAACA
CGTCCCGCCGTTGGAGAAGGAGCGCGGGGGCGTTAGTGGACCCGCGCTCCCATCCCCCACTCTCAGGGCTGGGGACTCGAAGGAGGCGGAGAGT
AGACGGGGGCGACCTTTTTTTGTTGTTGTTATTGATGTTGGTGGTGGCTAAAAAAGCTACTTCGAGTTTCCTCCCCAATTTTGCTTGAAGAGAC
TCCCCCCCACCCCACCCTTCCAACGAGCTTCCGGACTTGGTTGCACCCCCAGCAAGAAAAGAAGCCAAGCAAAGCTTCTAAAGACCGAAGGAAT
CTTTCCCTCACCCCCACCCCCTCGCCTTGGTGATTTCTTGTTTGATTTTGCCTCATGGTCAAGAAAGGAGGGGGAAAATCCAGCGTGCCCCATC
TCCTACCCACCCCCTCTTTGTATTCTCTTTGTATTTTTCCCCTTCTTAAAATTTCTTTTTCTGCAATGAAGACAGAAAGAAGGCTCTGGGGTGA
TGCGTTTGGCATTTGTGTTGAGCTTAGGGGAGCATTGGCATGGAGAAACTCCACGCTGGCGAAGTCCCGGGCTGGGCTTTCTCCTCCTCCCCCC
ACCTTTTTTCCCCTTGTCCTTGCAGCTGGAGATGTGCTGGGAGTAGCAGGCCAGCCTCGGAAATGGACATGGGGACCTCGTGGAAGCCACAGCA
ACCTGGTTGGGGATGCAGAAGGACCCGGAGCACAGAGGGCGTTGGGGTTCCCGGGCCTCCGCCTGGGGTCTGTGCAAAAATAAAGAATTAAAAA
AAAAAAAAAAATCAGAGAGGTGAGGCTACCCAGAGCCGGCGGGAGGACAGGAGACTGTGGGATGTGGTCCAGGGGCCGCGGAGTGGTTTGGGGG
GGAAAAGAGATTTTTTTCTTCTCTTAATGGGAATCGTGATGGTGTTGAGTTATTTCACTGGTGGGGTTAATATAGCATGTTATCCTGTCTATCT
TTTGAAGATTTCTGTATAAGACTGTTGAGCAGTTTTTAAAATAGTGTAGGATAATATAAAAAGCGGATAGATGGCGCTATGTTTGATTCCTACA
ACGAACCGATCACCAGCTCCTTTTCATTTTTAACTCTTTAAAAGGATTCAAACGCAACTCAAATCTGTGCTGGACTTTTGAAAAACCACAATTC
AGGACCAAATTTTTTCTCCGTGTGTGTTTATTCCTTATAGGTGTAATTGAGAAGACCCGTTTATTTTTACCCCCTCACGGACTCTCCATCTTTG
TATTTTTTTTTCCCTTGTAAATGTAATCAGATGCCATTTTATATGTGGACGTATTTATACTGGCCAAACAGTTTTCTTATTTTGTCCCCCCTTT
TTTTCCCTTTTCATTTGCTTTCTTGTCTTTTAACCTCGTTTCTTTATCTTCTTTTTTATTTTCTTTCTTTTTCTTCGTTTTTTTTTTTTTCTAG
TGTTGTTACCCACGCCATTTTACGTCTCCCTTCACTGAAGGGCTAGAGTTTTAACTTTTAATTTTTTATATTTAAATGTAGACTTTTGACACTT
TTAAAAAACAAAAAATGACAAGAGAGATGAAAACGTTTGATTATTTTCTCAGTGTATTTTTGTAAAAAATATATAAAGGGGGTGTTAATCGGTG
TAAATGCCTGTTTGGATTTCCTGATTTTATAATAGGGTGGCTGGTTAATATCTCACACAGTTTGAAAAATCAGCCCCTGGTTTCTCCATGTTTA
CACTTCAATCTGCAGGCTTCTTAAAGTGACAGTATCCCTTAACCTGCCACCGGTTTCCACCTTTCAACCCCCTGGTCTTATAAGGGGAGGAGAG
TTCAGCCCAGCACCATAATGCTTTAAAAAAAAAAATTTTTTTTTTTTAACGAATTGCTGTTCTGTCCAGAGGTTTTTAAAACTGGTGCATTCAC
AGCAAAAAGGGATTCTGTAGCTTTAACTTGTAAACCACATCTTTTTTGCACTTTTTTTTATAAAGCAAAAACGTGCCGTTTAAACCACTGGATC
TATCTAAATGCCGATTTGAGTTCGCGACACAATGTACTGCGTTTTCATTCTTGTATTTGACTATTTAATCCTTTCTACTTGTCGCTAAATATAA
TTGTTTCAGTCCTATGGCATGGTGATAGCATATGTGTTCAGGTTTATAGCTGTTGTGTTTAAAGATTGAAAAAAGTGGAAAACATCTTTGTACA
TTTAAGTCTGTATTATAATAAGCAAAAAGATTGTGTGTATGTATGTTTAATATAACATGACAGGCACGAGGACGCCTGCCTTTTAAGAGGCAGT
TCCGTTAAGGGTTTTTGTTTTAAAACTCTTTTTTTTCCTTTCTTTTTTTATTTCTTTTTTTTTAACCATCCATCCTGTGCAATATGCCGTGTAG
AATATTTGTCTTAAAATTCAAGGCCACAAAAAAAAGCAAAAAAAAAAAAACAAAAAAAAAAACAAAAAACAATATTTGGGGGAAGAGAAAAAGA
AAAAAAATCATGCCAGCTAATCCTGTCCGTCACTGCCTGTCAGGTTGTTCCTATATACCTTCTGTAAATAACTTTTTTTGAGAAGGAAATAAAA
TCAGCTGGAACTGAACCCTAAATCTTGACTTTTGTCATCCTTATTCCTGGGATCTCTCCTTTCACTGCAGGCTGCTGCTTTGCTGCTTTGCAGC
TTCGCGGTGGCATGGAAGCTGGTGCTGATTCAGTTAAGCCATCTTAATGGCAAACCCTAAGTTCCTCTTGGCCAGATTTCGCAGGCCTGACCCC
GAGTGATGGCATTGGCCACGTGTGTGTCAACCCTCCCTCCGCACGCCAGCCTTCGAGGAATTCTCTGCGTCTACTGTACATCAGCAGGCACCCT
TTGTCTGGAAATTGCAAAGACGGGGCAGCGGCAGGCTTCTCTGCTCTCAATCCAGCCGGCAGGCTGAACTTTTTTAAATGTATTTTTTGCTTTT
GTGTCTCTAAGCCACCATCCCCTTTACACACCAAGATTTGTTTTGCACAGACCAAGAAGAACAAATGAGCCTGTTAAATTATTAGGTCTTCTAG
GAGAAAAGCCTTCCATAGTTACAAGATGGGAAAACCAAAATCAACTTAGGCTTGCTTTGTTGGGGTGGGGTGGAGGAGTCCCCTTAAATGCAAA
GGTCAGTAGGGTGTGGTGTAATCCAAGTACTTGAGAGGCAGGCCAGGCTCAAGGATCCTGAGTTTAAGGCCTGAGTGGACTACTTGATTGAAAC
TCTGTTTCCAGAACTACCAAAGTTACTATGGCCCTAAGCTGTTCATCTTATGCCCCGCCCAACATGGGCGTCACTGTGAGTAAAATATAGCCTA
CCTGCTCACCACTGGAATGACAGGCCAAGTAGGAGAGTGTAGATTTTTATAGGCACCAGACACAGCATTAGTGAAGCCTGCATGCAGCTGGACA
GTAGTCGGTGTTTATTTTAGAGATCAACGGTCTCCATGGGCAAATAGAAGTATCTTCCCTTCCCAAGGCTCATCTTCACAAATGTGTGCTTTCC
ATGTTTCCTAGTCTTTCCGCCCTGGAGAGAAAGGGTTAACATGCAGCACTTGGAAACAATCCTTTCTGAGGATCGGAGGCAAGGTGCTTGCATC
CTGGGATCACAACAGAAAGAAGACTTAAGGGCCAGTACCGCAAGCATTTTTGCACAGTAAAAAAGCCATTTGCTAGGGGTTGGCTGTGATCAAC
TTACACTACATACTTGGATGAAGTATTCAAGGGGGGGAAAAACTGAAAAAGCAATTCCCTCTCTAAATACTGTTCTAATATCATTTTTCCCTGA
GACCTTGAAACAGTATGGTGTAAATTTTTCTTTTTTAAAAGAGCTTTGGGAAAGAGTTGATATGCTTGTTTAATGGTTGATTATTATGGTGAGG
ATAATAGAGCATCTTAGGGTCTTGGAGAAGAAAGCCTTTGATAGTTACAAGACGGGGTGGGGGTGGGGATGACTTAGGCTTGCTTTGTTAGATT
TGGGGTGGGGGTTTCCCCTCAAATGCAAAGGTCAGTAGGGTGTGGTGTAATCGAAACACTTAGAGACATGCCAGGCTAAAGGATTCTGACTTTA
AGGCCATAGTGGACTACTTGAGACCCTGTTTCCAGAACAACAAAAGACCTTGTTCCTTCCCCCTTCTCCCCCGACCAGACAAAAACATCGAAAT
CCTACTGTAAATGAATCCTGTATGAATCATTTTTAAGTGATGCATATTTTCAAATAAGTTTGTATTTTTGTAGGCTCTTCTGCTACAGCCTTGT
TTATTTTCCCCTGACTTTGCATGGGAGGAGCAAGCAGATGCTTTCAAATATTTTCTTTAAGAATCCTAAGGCTCAGGGTGAAAGTGGAGCAGTG
CACTTAGCTAGCGTGCTAGAGGCCCTGGGTTCTGTTCCCAGGCCCCTGAAAAAAACAAGGAATTCTGGCACATCACCCTTTTCTCTTTAAAGTG
TTGATACCGCGTGCTTCCTAGCAGGGGCGTGGCAGATGTGAACCACTGGAACCCTGTATTCAGGAAGGAGACTTACATGCCAGACTGTGCAAGG
GAAAATAGATATTAGAAAACCACTTCACGGTGACTTTCAGATGGTGTGGCTCAGCAGAAAAGAGTGAGCTCCAGCTAGCTTTTCGCTCTTGTTC
TTAAGACCCGGCTTCAGGCCCTGTGCTCAGTCAGCAATGTGGATTAGTGACACTTGTCACCATTGTCAGTTCTTAGCTGAATCCCCTGAAGAGC
CATGAAAATAAATAAATAAATAAATAGGCAGCCTCCAGGCTCCTCTGGTGGGGTGAGTGCCTGCAGGGGCCTCAGGTTACTGCTGACTCTAGTC
TGAGTAGGTGTCCTAAGGAAAGAACAGAGTTGGAAGGCCAGCAACCACTCGGTTTATCTGCTGTATAGATGGGATCAGAGTGCTTCATCATAAA
TCAATCGTTTGGTTGGTTGGTTTTGGGTTTTCCGAGGCAGGGTTTCTCTGTAAGGCCCTGGCCTAGAACTCTCTCAGTAGAGGGGGAGCGCCTT
GAACGCAAGGATCTTCCCGTCTCTGGAAGTGAGTGCTGAGCCTGAAGATGCGCACCCAACACCACACCCTCTCACCTCGGATCTTAACCCACTG
ACCTAGAAGGTTTTGGATAGCAGGGCATGGCGGTGCTGTCCATTTAAAAAAGAAAACTTCCAGAAAAATCTAAGACCCCCCAAATCTGTTAGAT
TTCTCAAGGTGGAAGTTTTCTGTCATTTTTTTTTTTAATGGATACTTTGAGTTGTTTTTTTTTTTGTTTTTTTTGTTTTTTTTTGTTTTTTTTT
TTTTTAAAGATTTATTTATTTATTATATGTAAGTACACTGTAGCTGTCTTCAGACACACCAGAAGAGGGAGTCAGATCTTGTTAGGGATGGTTG
TGAGCCACCATGTGGTTGCTGGGATTTGAACTCTGGACCTTCGGAAGAGCAGTCGGGTGCTCTTACCTGCTGAGCCATCTCACCAGCCCTTGAG
TTGTTTTTAAGATTGATTTTATGGAAGTGTTTGCGAGTGGTGTGCACATGTGCATACAAGGAGCCTCACAACAGCAAGGTGTCCTGTTGCCTGG
AGCTGCAGTCACAGGCAGGTGAGCCACCTAACTCCATACCAGGAACTAAGTTCAGGTTCTCTGGAAGAACGGGAAGTAGTATCAACTGCCAGAG
CCTCTCCAGCTTTCCTGTTGATTGTGGTTCACAGCCCTGGCCCCAGGACTATAAATACACCTCTGGCTTCTGATCTCTTGTGTTTCCCCCACAC
ACACACACACACACCCCACCCCCGGCCTCTCTGATTCATCCTAGAAAACAACCTGAAAATCCATGTCGGTTTTTTTTTTTCACCCTGCCCACCA
TTTGAAAGCTGGGGTGGGCAGCTTGTCTGCATTTTCACCCCACCCACCATTTGGAAGCTGAGTTGGGCAGATGGGGGCTAGGGGTGTGTGTGAG
CATCTTTTGATATCTGCATGGTGTTTCAGACCACACTAACCATCATTATTATCCTTTGTCCAGGGTGAGGTACTCGGTTCTCGTGCAGCTTGTC
AAGACTCTGCACAAAATGGTGGTGGCTCTCCTCCTCCAATCTCCACCACCCACCACTGCAGCACGAAGCCTTTCCTGGGGAAGCTCTCCGGATG
GTGGAGCCCAGGAGGCAGAGGCAGGAGGGTCTCTGTGAGTTCACAACCAGTCTGCATAATGAGTTCCAGAACAGCTCAGACTACATAGAACAGG
ATTAACCCTTTAATGCCTGTTTCTCCACACTTACTTTGTAGTGAGTTCTTGCATAAAACCTGTTCTTCAAGCTTCCAAAATATATTCATTTCCC
AAAATATTTGCATTTTGTGCTATCTTTGGCAAGCAGCGTTGAATTTAGTCAAAATAATCCATGTGTGAATACTGGCTCTGAGCTAGGCTGGCTG
GAGCACGGTGGTCAAGTTTCTTAGTCCCTTGGAGCCTCCGTTCTAAATCGTTCCATAGAAGGCCACCTGACTGAGAAAGCTGTTGTGAGAATTG
AGTGTGACCCCATATGTGGAACACATGCAGCAATGCCTGGCAGCAATCTGTGCTCATTAGGTACCAGCCCTTCACCTTGTGCGGCTGATTATAA
AAAGGTAAAGGTTGTGCAAGCCAACCACAGTGCCAGCCACTCAGAAATCAGACAGCACTAAATAACAATAAATATGCTGTCTGCTTCTCAAATC
CTTAATATTAGTATGAATTGAGGACAAGGCTAGAGCTGGAGCCCAGTGGCTAAGTGCTCGTGAAGCACACATGAGGCCATGAGGCCCTGGATTG
GCCTCCCAGTATCAATCACAATAAGACAGACCTGGTGAAGCCATGCCAGTACTGGGGAAGATAGCTCAAGGCTATCTTTGGTTAAATAGTAGGT
CTGGGGGCAGCCTGGACTTTGTGAGCTCTTGTCTGAAAACAAAAAGAATGGTTTGGGAGCGTGTGTGTGTGTGTGTGTGTGTGTGTGTGTGTGT
GTGTGTGTATTATTGGGAATTGAACCTTGAGTCTGGGACATGCTAGGTTCTCTTCCATGGATCTAAGTCCCAGCCAGAATTCTTTTTATTTTTT
TAATATATTTTTAAATTATTGCTAGTGAATTTCATGCAAGTATACAATGCAGGTTTTGATCAAATCCATCCTCTACACTCCCCCCGCCCCCCGC
CCCCTAGCCAGGACTCTTTAAAAGAGCAGAACCAGACCACAGTCTTAAGTTCTCCATATATTCTCAGTGCAAACCAAAGTGAAAATGACTACCC
TCACAGTGTGTTAGCATGATCTCAATAAGTATACAGGCAAAAGATTGATACCACCCTTTTTACAAGGAGATGTGGCGATGATTCAGTAGTAAAC
CTGAGATCATAGAATCAGAAGGGGAAGAAGGGTGGGGCTGTGGCTCAGTGGTAGGATTCTTGCCCTAACATGTATGAGACCCTGGGTTGGAGCC
CCAGCACTCAACTGCATTAATTAGGAAAGAAGAGGAAGGGGGCCCTGGAATCTTATTTCCTGAGCCCAAGAATGAACTTAGATCCAGTGTCTCT
CCAAGTGTGGTGGCACATCATTCAGAAGACAAAAACAGGAGGATTGCTTGGCGACCAAGTTTAAGGCCAGGCTGGCCTACAAAGTGTATTCCGG
GATAGTTAGAACTGTTACATAATGAGACTCTCTGTCTCTAGAAAACAAAAGCAAGCCAGGAGCTGGTGGGCCGTGCATGCCTTTCATCCCTGCA
CTTAGGAAGCAGAGACAGGTAAATCTCTGAGTTCCAAGCCAGCCTGGTTTCCAGAGTGAGTGCTAGACCAGCCAAGGCTACACAGAGAAACGCT
GTCTTGAAAAACAAAACAAAACAAAACAAAAAAGAAAGAAAAAAAAAGAGAGAGAGAAAAAGGAAGGAAAGGAAATGAAACAAAAATGAAAATT
AATTAAAACAACAACAACAACAAAAACAATCAGAATAGGTGTCCCCGTTTGAGAACTAGAGAAGCATAGGTGGGAGGCCTTGAGTCTTTGGTAA
GGATTGGCCATCACCTCAACCCTCCACATCCTTCCTTCAGCTCTGATCCATTTCTCCAAGGCTGTCTTGTACATCTCAGTTTGAAGTGCAAGCT
TAAGTAATTTGTGTGTGTGTGTGTGTGTGTGTGTGTGTGTGTGTGTGTGTGAATACATATTAGTTGAACAAATGTGTGTTAAAATATGAATGCA
CGGTCTTCATTTCAGGAGTCAGCAAGGCAGAAGAAATGATCTAGCTATCAGTAGTGGATCTTCTGCTCTGTCATTCAAAAGGTGGGGTGGGTGA
CCACGCTGCTGGTTATTCAGAATGCCTTCACACAGAGGCTCTAGGCTACCCATCCTATCCTAATGAGATTGGCCGTTGCTACAGTTAACTTGAA
GGGTTTTATGGTTTCCTGCATGTGTTGTTTTCCTGCTTAATGTTAAAAAGAAGAAGAAGAAAAAGCTCACGTCACTAAACTGAATTTCCCAGGG
GGCTTTTGTATCTTCTGCAGTCTGGCTTATGCCTTGGTTATGATGAGATACCTCTATGTGTGGATATCTGTAGATACAGGTGATAACAAAGTTA
GCCCATTTTCTTTGCTTCTGACAGTTTCCATTCAAGACAGTTGGTTTAAATGGAGTCCTGCCAACATGCCAGGCACAAGTCAAGTCGTGGCATG
AGCTTTGCAGCCAGAGCCTTTCCTTCAACCTGCAGACTTTGTGGTAAAGGCCAAAGTTACAACTGATTTATACACCACCTTGCTTTGAACCGCC
CCTAAGACACTCCAGTGACAAGACATCGACATCTGATTGGAAGGTTTTGGATTTTATTTTTAATGACTTGGAGAGAAGGAACAAATGAAGTATA
ATTTACTCAGCCCTCTTGCTTCTTTAGTTATTTTCAATACAATTATTTCTCTATTTCCTGCTCCAGGGTGGAGTTTGGAGGGAGGGAGGAAGGG
AAGGAGAGAGGGAGGAAGAGAGGGAAATGGAAGCCCTGTCTGTCAACTTTAGCAGGCTCATTCTGTAGTGAATGCACAGTATGTGGTGGTGGCA
TCCAAGTTAAGGAGCAGGCAATTGCTTTTCTAAGAGCCAAGCAGCCTGTGCCGGCTTAAAGGATCAATTAAGTCCTGTTGTCTGTGTGGTTAAT
TGTCACCTTCTTACCAGTGGCTGTCCTAACTCCCTCAGCTCTGGCACCTAAAACCTGTGAAAATAGTTTCCTGCAACTCTTCGTCCTCCCTCCC
ACGCCTCTCACTTTCTCACCCCCCTTTCCCACACTCCCTATGTGGGCCTTTTATCTCTCCTGTTTGCCATTCCCCGGAGAAGGCAGACTTTGAA
TAATTTATCTAAAGTTCCTGGGAAGTTGTGGGGCTGTAGTCTCAAAACACACAGCACTTTGTTCCTCCCCCAGATAGAAAGGCCAGAAGTCTGT
CTTTGACCTAGCCCCTCCTCAGTGAATCCAGGAAATGAAGTAGGTTACTAAAGCCATGGAAAGTCCTCTGTGTTTCTCAAATAGTTTAGCCAGA
GTATTCCCAAATCGTTTCTTTTAAGGTATTGGGGGGGGGGGGGGTCAAGGTACAATCCGAACACTCAGGATATGGAGGTAGAAGGGTTGAGTTC
AGGGCCAGCCTTTGCTATGTAGGGAATTTGAGGCTTAGCTGGGCTACAAGAAGACACTTTGTCTTTTTTTTTTTTTTTTTTTTTTTTTTTTTTT
TTTTTTTGGTTTTTCGAGACAGGGTTTCTCTGTATAGCTCTGGCTGTCCTGGACCTCACTTTTGTAGACCAGGCTGGCCTCGAACTCAGAAATC
CGCCTGCCTCTGCCTCCCGAGTGCTGGGATTAAAGGCGTGCGCCACCACGCCCGGCAACACTTTGTCTTAAAATGATGA
MOUSE SEQUENCE-mRNA
AGAGCAGCAGAGTGAGGGGAAGAGGGCCGTCTCCCTCCCGGTTTCCAGTTCTTGCACGCTGTTTCTTAGAGAGTCTGCAGTGGGGGAACTCTGC
CGGTAACCAGCTCCCCTTCTTGCAGGAGGGAGGGAGAAACATACATTTATTCATGCCGGTCTGTTGCATGCAAGCTTCTTGGCTTCCTACCTTG
CAACAAAATAATTGCACCAACTCCTCAGCGCCGATTCCGCCCACAGAGAGTCCCGGAGCCAGAGTCGCTTTGGCTTTGCACTGCAGGAAAGGGA
CTTAGGCGCTAGAGACGATGTCGCTTTCCTGAGCTACCGCGAGCTCTCGTGAACTGCAATCGACTGCTTCAGGGAAAGGGGTGGGGGAAAGACT
TGCCCCGGAGGCGGCGAGAAACTTGCGTTTGGAAGATACTCCGGCTACCAACGTTTGGAGAAACTCCTCGCCGCGGCCGACTCCAGCCTCGGTG
CCCGCAGGAGCACTTCAGCGGTGAGGGAGGACGGAGGGCCTCGGGGACTCTAGGTTGGCGGCGGGAGGCGGCCGCCCTGGCCCGCGCGCCGCTC
AGGGGACCCTGGTCTCCGCCCCGGGGAGCCCGCAGGCCCGGCGACCGCGCCGCGAGCGTGTGAGCGCGCGTGGGCGCCGGCAAGCCGGGGCCAT
GGTACAACAGACCAACAACGCGGAGAACACTGAGGCTCTGCTGGCCGGGGAGAGCTCGGACTCGGGCGCCGGCCTGGAGCTGGGCATCGCGTCC
TCCCCGACGCCTGGCTCCACCGCGTCGACGGGCGGCAAGGCGGACGACCCCAGCTGGTGCAAGACGCCCAGTGGCCACATCAAGCGGCCCATGA
ACGCCTTTATGGTGTGGTCGCAGATCGAGCGGCGCAAGATCATGGAGCAGTCGCCCGACATGCACAACGCCGAGATCTCCAAGCGGCTAGGCAA
ACGCTGGAAGCTGCTCAAGGACAGCGACAAGATTCCGTTCATCCAGGAGGCGGAGCGCCTGCGCCTCAAGCACATGGCTGACTACCCTGACTAC
AAGTACCGGCCGCGAAAGAAGGTGAAGTCGGGCAACGCGGGCGCGGGATCGGCGGCCACAGCCAAGCCAGGGGAGAAGGGCGACAAGGTCGCGG
GCAGCAGCGGCCACGCGGGAAGCAGCCACGCGGGGGGTGGCGCGGGCGGCACGTCCAAGCCCACTCCCAAGAAGAGCTGTGGCCCCAAGGTGGC
GGGCAGCTCGGTCGGCAAGCCCCACGCTAAGCTGGTCCCGGCGGGCGGCAGCAAGGCGGCTGCATCGTTCTCTCCAGAGCAAGCTGCCCTGCTG
CCCCTGGGGGAGCCCACGGCCGTCTACAAGGTGCGGACTCCCCAGCTGGCCACTCCGGCCGCCTCCTCCTCGCCGTCCAGTGCGCTGGCCACCC
CAGCCAAACACCCTGCCGACAAGAAAGTGAAGCACGTCTACCTGTTTGGAAGCCTGGGCGCTTCGGCGTCTCCCGTCGGGGGCCTGGGTGCGTG
CGCCGACCCCAGTGATCCACTGGGGTTGTACGAAGATGGAGGCCCGGGATGCTCGCCCGATGGCCGGAGTCTGAGCGGCCGCAGCAGCGCAGCA
TCATCGCCAGCCGCCAGCCGATCGCCCGCTGACCACCGCGGCTACGCCAGCCTACGCGCAGCCTCGCCCGCCCCGTCCAGCGCGCCCTCGCACG
CGTCCTCCTCGCTCTCCTCGTCCTCTTCCTCCTCCTCGGGCTCTTCGTCGTCCGACGACGAGTTCGAAGACGACCTGCTCGACCTGAACCCCAG
CTCAAACTTTGAGAGCATGTCCCTGGGCAGTTTCAGCTCCTCATCGGCGCTCGATCGGGACCTGGATTTTAACTTCGAACCCGGCTCAGGCTCC
CACTTCGAATTCCCGGACTATTGCACGCCCGAGGTGAGCGAGATGATCTCGGGAGATTGGCTGGAGTCCAGCATCTCTAACCTGGTCTTCACCT
ACTGAAGGGAGCGCGGGCCGGGGAGAAGGTGGGCCAAGAGGCAGGAGAGGAGAGAGGGAAAAAAGAAACAAAAAACAAACAAAAAAAAAAAAAG
A
MOUSE SEQUENCE-CODING
ATGGTACAACAGACCAACAACGCGGAGAACACTGAGGCTCTGCTGGCCGGGGAGAGCTCGGACTCGGGCGCCGGCCTGGAGCTGGGCATCGCGT
CCTCCCCGACGCCTGGCTCCACCGCGTCGACGGGCGGCAAGGCGGACGACCCCAGCTGGTGCAAGACGCCCAGTGGCCACATCAAGCGGCCCAT
GAACGCCTTTATGGTGTGGTCGCAGATCGAGCGGCGCAAGATCATGGAGCAGTCGCCCGACATGCACAACGCCGAGATCTCCAAGCGGCTAGGC
AAACGCTGGAAGCTGCTCAAGGACAGCGACAAGATTCCGTTCATCCAGGAGGCGGAGCGCCTGCGCCTCAAGCACATGGCTGACTACCCTGACT
ACAAGTACCGGCCGCGAAAGAAGGTGAAGTCGGGCAACGCGGGCGCGGGATCGGCGGCCACAGCCAAGCCAGGGGAGAAGGGCGACAAGGTCGC
GGGCAGCAGCGGCCACGCGGGAAGCAGCCACGCGGGGGGTGGCGCGGGCGGCACGTCCAAGCCCACTCCCAAGAAGAGCTGTGGCCCCAAGGTG
GCGGGCAGCTCGGTCGGCAAGCCCCACGCTAAGCTGGTCCCGGCGGGCGGCAGCAAGGCGGCTGCATCGTTCTCTCCAGAGCAAGCTGCCCTGC
TGCCCCTGGGGGAGCCCACGGCCGTCTACAAGGTGCGGACTCCCCAGCTGGCCACTCCGGCCGCCTCCTCCTCGCCGTCCAGTGCGCTGGCCAC
CCCAGCCAAACACCCTGCCGACAAGAAAGTGAAGCACGTCTACCTGTTTGGAAGCCTGGGCGCTTCGGCGTCTCCCGTCGGGGGCCTGGGTGCG
TGCGCCGACCCCAGTGATCCACTGGGGTTGTACGAAGATGGAGGCCCGGGATGCTCGCCCGATGGCCGGAGTCTGAGCGGCCGCAGCAGCGCAG
CATCATCGCCAGCCGCCAGCCGATCGCCCGCTGACCACCGCGGCTACGCCAGCCTACGCGCAGCCTCGCCCGCCCCGTCCAGCGCGCCCTCGCA
CGCGTCCTCCTCGCTCTCCTCGTCCTCTTCCTCCTCCTCGGGCTCTTCGTCGTCCGACGACGAGTTCGAAGACGACCTGCTCGACCTGAACCCC
AGCTCAAACTTTGAGAGCATGTCCCTGGGCAGTTTCAGCTCCTCATCGGCGCTCGATCGGGACCTGGATTTTAACTTCGAACCCGGCTCAGGCT
CCCACTTCGAATTCCCGGACTATTGCACGCCCGAGGTGAGCGAGATGATCTCGGGAGATTGGCTGGAGTCCAGCATCTCTAACCTGGTCTTCAC
CTACTGA
HUMAN SEQUENCE-GENOMIC
TATGAAGTTTCCTCTTAGCACTGCTTTTGCTGTTATCTCAGAGGTTTTAATAGATTGTATTACTATTGTCATTCAGTTAGAAGAATTTTTTAAT
TTCCATCTTGATTTTATTTTTGACCCAGTGATCATTCAGCAGCAGGTTACTTAATTTCCATGTATTTGCATGGCTTTGAAGGTTCCTTTCGGAG
TTGATTTCTAGTTTTATTCCACTGTGGTCTGAGAGAGTGCTTGATATAATTTCAATTTTCTTAAATTTATTGAGGCTTGTTTTGTGGCCTATCA
TATGATCTATCTTAGAGAAAGTTCCATGCACTGATGAATAGAATGAATATTCTGCTGTTGTTGGGTAGAATGTTCTGTAAATATCTGTTAAGTC
CGTTTGTTTCAGGGTATAGTTTAAATCCAGTGTTTCCTTGTTGACTTTCTGTCTTGATGACCTGTCTAGTGCTGTCAGTGGAGTACTGAAGTTC
CCCAGTATTCTCGTGTTACTTTCTATCTCATTTCTTAGGCCTACTAGTAATTATTTTATAATTTGGGAGTTCAAGTTAGGTGCATATATATATA
GAATTGTGATATTTTCTTGTTGGACAAGGTCTTTTATCATTATATAATGTCCCTCATTGTCTTTTTAAACTGCTGTTGTTTTAAAATTTGTTTT
GGCCGGGCACAGTGGCTCATGCCTGTAATCCCAGCACTTTGGGAGGCCAACACAGGTAAATCACCTGAGGTCAGGAGTTCAAGACCAGCCTGGC
CAACATGGGGAAACCCCGTCTCTACTAAAAATACAAAAATTAGCTAGGTGTGGTGGCAGATGTCTGTAATGCCAGCTACTGGGGAGGCTAAAGC
AGGAGAATCACTTGAACTTGGGAGGCGGAGGTTGCAGTGAGCTGAGTTCACACCATTGTACTCCAGCCTGGGCGATAGGAGTGAAAGTCTGTCT
CGAAAAATAATAATAAACAAAAAAATAAACTTTGTTTTACCTGATATAAGAATAGATACTCCGCCGCTGGGCGCAGTGGCTTACGCCTGTAATC
CCAGCACTTTGGGAGGTCAAGGCAGGTGAATCACCTGAGGTCAGAAGTTCAAGAGCCAGCCTGGCCAACATGGTGAAGCCCCGTCTCTACTAAA
AATACAAAAATTAGTCGGGCGTGGTGGTGGGTGCCTGTAACCCCCGCTACTCGGGAGGCTAAGGCAGGAGAATCGCTTGAACCCGCGAGGTGGA
GGTTGCAGTGAGCCAAGATCATGCCACTGCACTCCAGCCTGGACGACAGAGTGAGACTCCATCTCAAAAAAAATAAAATAAAAAAAAAAAGAAT
AGGTACTCCTGCTCGCTTTTGGTGTCTATTTGCATAGAATGTCTTTTTCCATGGGGTTATTCAATTTTAGCTAACTCCCATATACACTATGGGC
ATTGGTGAAAATACTGACTGAATTTTTAATAAAGATCTAGAGTCATTAAGAAAAAGTTACCTTCCTGCATGAACTTATATTTTGGCATCTATCA
AATGGCATTGTAATTAATACAACTCTGACCTCTATTACTGCATAACAAACTACCCAAAGCATAGTGATTTAACGCAACTTATTAGTTCTCATAA
TTCTGTGGGGTGTCAATCTGAGTGATTCTTCTGTTGTACCCATCTGGAATCGCTCCTGTGGCTGCAGTCATCTGACAAACCAACCAAAACTGGA
GAGTCCAAGATGGCCTCAGTCACATGCCTGGGATGCTGGCCTTGGAGGGGCACCTTGGTTTTCCCTATGGGGCCTTCAATCCTCGAGTAAGATC
AGCTGCTGAAGGTAGTTCACAACATGATGTTTTCATGGTCTCACTGGAGTAGGTTCACAACACGACGGTTTCAATGGACAAACCCCAGTACATG
GGCACTTGTGAAGTCTGTTTGTCTCATGCTTGCTAATGCCCCATTTCCCAAAGCAACTCAGTGACCAAATCCAGAATCAGAGAGAAAAAGGTCC
ACATAAAAGCACACGTACTAGGAGGACGATTTATTACAAGAATCTACCACATCCACTGTAAATTTAAGAACTCAGAATACAAGTAGCATCCTCA
TTATTTAGCGTTTGCCTGCCACCCATAGTGCATAATTCACACCTAGGCAGTAGTACTCCTAGGGAGAATTTTTAAATTTTTGGACAACATTTTG
GGTGTTCTAGTGAAATACAGCCCTACCATGCATATTTGAAATGTATATTATCTTATTATAAATTACCTACTGTGTATTTCTCCTTTAACATTGT
AGTTTGAACATTATGGTTTCTTTTTTAATTTTGTGCATAGTAAGTTACGTAATCCACAGATTTTATTTCAGGAGAGTAAAGTTATATTACAAAA
TATTTGTTACAATAAGGCAGCGGTTTGGGTCTGATATTTTTGAAATTAATGAGTTAAGTTTGAGTGTTTTAAGTACTAGCCTTCAGTTATTTTT
GAATCGTGATAGCCAGATAAAGTGTCACTAAATTATTTTTTTAACTTGGAATGTGGGACAGGAAGGATGGAGTTTCATGCTTCAGGAAGCAGTG
AAAAATCACAAAACCTCTGTACTGCTAGACCCAACACTTTTCCAGATCCCCAAACTATCTCTATCACCCTCCTTTCATGGCAAATTTGCATATG
CATTATTGTCAGAATTTTGAACTTATTTTACAACCATATACACAGAATTCTTTTCTAGCTTGCTGCTTAACTGAACAGATGGTGCAGTTTCCCA
GCCCAGCAGCTGGAGGGGACCGAGGATGCGCTCGGCACACAGTAGGAGCACCATAAACGTTGATTGACTGAGTTCATTGAGGCGGTTGACGCCA
GGCCATCCACTCCCACGCGGTACTCTTATCTTTCTCCAGGCCCACACCCCTGGCCCGAGAGGCGGTAGCTGGGAGCAGATGGCGAGTCCCGGGT
GCCAGGTGTACTGCACTCCAGGCGCGGTCTGGGGCACTGGGTTCTACGGTCCCTGCCCCACCCCTCCCATCCCTATGAGTTCCCCCAAAGCTGT
CTGCGCCAAGTGTGACGTCTGACTACGGCGGGAACATGGGAGGGGAAGGGCTGGAAGAAAGGAGATCGGTTGCCTGGCGAGGGGGCCCGTGCGT
CCTACAGTCGCTACCCGCCACGCACGCGTCCCTCTCCTCCTGACCCGCGTCACTTAGCAGCCAATGCGGTCTCCGTGCCTTCCCACTTCCCCGC
AATCAAGCGCCTTTCTTCCTCCGCCTCCCCTCTTTCTGTTATCTGACATTTTGCTCTGCTTCCCTCTGCCCACTCCCCAGCGGGATTCCCTCCC
TGGCAGACGCGCGCGCCCCAGCCCGCCCTCGCACAACCTCCAATAGCAGGTCAACTGGCTTGTAACGCTGGCTTAGGGTTGCTCTTGAAGTGTT
TTTCCAAAAGCGAAATCACCCGCTTTCCCCCACGGGGCTAAAACTGTAATTGCAACAACGGGCTGTTGCGTTGGGGGTGGGAAGCCCGTCGGGC
GTGCCCCACCTAGACCGCCTGCTGGGGCCACTGGGGTGGTTTTGCCGCCCCCTCAACCCCTGCCACCCCGGGTCGAGTAGGCAGCTCCACCCGG
ACGCTTGCGCCAGGGCCTGACTGCCGCGGCTGCCAGCGGAAAGGCAGAGACCAGCTGATCCAAGGAGGACAAAGCGAGCCGAGACCTTCCGCAG
AGCTTGGCTTCCTCGTAACTGCGCCCAGGGCGCAGCCTCTCCCTGTTAACTACCTGCCATATGTTCCCTTCTCTCAGACCCGAAACCGCCTCCT
ACAGGTGCTGGGGACTGAATCTGGAGCTTCGGGCGCGGCCCTTGACAAGGGCGCCTGGCACCCTGGGGCGCCTCCGTGGCCCTCGCAAACTCAG
AGAGCCCCCACCGTCCAGTCTTTCCTGCACGAGCGAGGGATCGAGGGAAGGCGCCAATGCACGTCTGTCCCTCCGTGATCCGCGCAGAAGGGAC
GCTTGAAGACTGGGGTGCAATGAATTGTCGACTTCCCTCAGCTCTCAGCCCTTTTCCTCCCCCCGCGCGCCGTGCACGCGCAGCCTGCTCTGCC
CTTCTGAAAGAGACGCTGCAGCTGCGCTCTCAATGGGGCCTCAGCCTGCGGGGTCCGGGGAGGGGATGAAGTGGGTGGTTGCCCAGCCGGTGTA
CGAAGGTCGTGTGCCTGCCGAAGAGTGGGTCCCACACGCACAGCGCGCGCCGTACCAACCAAGCAAGGCTCACAGAGAGCATTTAGTCGTCCAG
AGCAAAGGATGCTGGGCACTCAAGAGAGCAGGGGGCCAAGTGGCTGTCAGTTCTGGTCAGTGACGGAACTGGACAGCATCTCCAAGGGCCAGGG
GATGGGGTAGGAGGACGGAGGAGCCAAGCTCCTGGGAAACGACCCCCCCAACCTATCCGCGACCGGTTGCAAATTCAAAGGAGGGCTGGGAGCC
CGCGAGGGTGCGGGAGGTGTCCTCGCTTGGGCTGCGTCTGCGCCCGCGTTTGTGTGTGTGTGCGCGCGCGTGTCTTCAGCTCCTTCCCCGGTCG
TAAAACCTAAACGGAAGACGGGTGTTAAAATGCTGCTGACAGGATCGCCTGAAACATGTTTACAGTAGGAAGGACTTTCCTCCAGAAAGCACAG
TCTGAGTCGATTCCAATTTATTTCCTCCCTGTAACTGTAAGCGAAAGGAGAGGTTCGGCTGCCGCGGCGGAGCGAGGCTGAGCACCATTAATCC
TTGGCGAGCTTAAGCCAGGGAGAGCGCCGTGCCTGCGAGACCGAGTCGCTGCGCTCCGGAAGGCGTTCTGCCTGAAGGAAACCTCTTTTTTTTT
TTTTTTTTTTTTTTTTTTTTTGAGTAGGGAGTGGCCTTTGCACTGGAGTCCTTAAGTAAGGCGCGTCGTTTCTCTGCAGCCGCTCTCGGAAGCC
GGAGAAACTGCATTCACTTTAGCAAGAAGACAGGGAAACTGAAATTGATAATCCCCCGAGTTGGGTTACCTGATCCAGACAGGAAGCTGGTCTA
GGCTTCCCCCGTCACCCGGAGCTCCTGACAAGTGAGCAGGAGGCGGCGGGTGGTTGCCCTAAACTTTGATTTATGAAAAAAAATCAGAATTCAT
CGACATACCCTGTTACTCGTTGAGCGTTTAAGCCTCTAACTAAAGAAGGTACAGTGGTAGGGAGTGGTAGGGGGGTCGGGAGAGGAGGAAGGGG
GAGAAGAAAGAAGACTGACTATCCCCACGATTTCCTACCTCGCCTCGCGGGCGCAGGGAGGCTCAGCGATGCCACCTGGCGGCTGCTTCTCCCC
AGATTGGGAGCCGGCTGGCTGCAGACAAACCCAGGCTCTCCCCGGGTGCCGTGCCTCTGCCTCTAGAATAGAAGCAGAAGCCTGTATTCATGCT
TGCAATCCAAGTGGCCCTGCAAACATTCGTCTTCTGCTTGTTTTCTTGAGAAAATCGAAGGAAAGGAATAATGAGTTGGCATTGGCATGAACAG
CTTAAGCCTACTGTGTGCTAGTCACTGGTTATGAGAGGAAAATGGTACAATTGTTAGAAATGCAGGTTTCTTAACTCTTAGCTTATTCTAGTGA
TAAAAATAAATGCTAGGTTTCATTTACCCCAGAATCCTATTTTGATATTTTGCAAATATGAGTTATTTCCATATATTATTTTTCAATGCACGCA
CCCCCACCCCCATTACGCGCTGAGCCCAGTTACAATGCAATGTCATCAGCCCAAAAGGATGAAGTGCAAGTTATGTTTGTCTACTTGACTGAGA
AGTAAATCAGCCTCACATGGAGGCTTCTTTTCCATAAAGTGTGGAACCAAAAAAACTGGCGCCTTTCAGTTGACAAAGGCCAATGACATCAGAT
TTCCCAGGGCTTCTTCCTTGTCAGGTAAAGTAACAACTACACAGTTTTTCCTCCTCTTTATTTTATTTGAACTGAATACTTGTCAGGTCTGACT
AGCGCCTACAATCATAGTTTCTATAACCAAGGCAAGGCAAAATCTTGCAAATCAGTGCAAATCCAGATTTGTTAAACTAATTTCCATTCAGGTC
CCTCCCTCCATGCCAAAGGAATATATTAAGCAGTGGAATAGAATCTTATTTCATCTATGCCCCATACCATTGTATGGATGTGAGATTTTATGTT
GTGTAGATGTGTGAGAGCAGAAGAAATGCATTAGCAGATATTACACTTACATCTCAAATGGAATTCCATCATTTAAGGGAATAAAATAAAATAC
CTAATTCAAAATTGGAAATGTCTAACATCATTGCTAACAAAGACAGTTTATTATTCTAAACCAGGATTTTTTTTTTCTGCAAAATTATCTTGGC
TTTCTCTTAATACAGCTAAAAGACTAGCATTAAGAATTACTTCATGTACTGCAAAGCCAGCAGAGGGAACACTGCGTACTGATTTAGTAGGGGC
CACCAAATATCTGGTATTTGGGGAAAAAAATGTCAGTAATGGAGAACTGATTACAGAGCATATGAAGTTAGGGAATGAGAAGGGAGAAATCTTT
TCTCATTATTTGGTATTGAGAGGTCCAACACATTCCAGTGTGCACACACTTAGTTGGTCACAAAGATGACTTTAATAAAAGGGCATTCGTCATA
TGTTTTCTTACATTCTAAGAGAACTAACCCATTAGAACAGATCTATTTCAGAAGTCTAGGCACTTGTGTAATATATAAATATATATGCAGTAAT
TATAAAGTCAATGGAAGTTACTGATACCATATTTCATCAAGTCTAAGAGGAAATTTTTCTTTTCATTTCAACTCTTCCTGAAATAAGGAGGCAT
CCTACATCTAGGGGGATATCACAGTTTCATTGGCAGCTTTCTTCCTTGGTGGAATGTAATATAATGGTGTGTCTTAAAATTTGTTGGATTTGTT
GAAATACAGAAAATACATGTAACAAAAGAATGAGGCCAGTGGCTGTGTTTTAGTACACCCTTTAAAAAATCCATGTGTTTTAAGCAGAAACATA
TATGACTGCTTTAACTTCCACTCTTCCCTATCATATTCGATGATGGAAGCATAAATGACTGAGAAATATAATCAATAATGTTGATACTCAACTT
GACTGAATTATCAAACTAGCTACACCCTCAAATCATTAGTTAGTACAAATTCAAAAATAAATATTCTTTTTTATTCTAGTGAAAATATTGATCT
TATAGATAATAGCCCTCTTAAAATAATTTTTTTTTGTCAGATTGGTAACATTTAAGGATGTGTTTCTATGCACACCAGAGAAAATGTAGTATAT
AACACAGCAACACTGTTATGCAAAAAAGGTGCCTGTGTGTTTTTGGTTTGGGTTTTTCTTTTTTTAAGGATTTGTTTCTCCTTTTTTAAAAAAA
TTATGTAATACAAGTAGCTAATCGTCAAAAATTATTTGCTTTTACCCACAAAAACAGTTTTGCTTGTGGTTGATCCTTACAGATCCAGTCAGAT
GGCTACATAGGGTGTTCTTTCCAGTAAAATTCTAAGTCTGACAACCTGGGCCTATTGCCAGCCTACATACTTTAAAAGTTTGACAACATACATA
GAAATTTACTACCCAGCACTAGTTTAATCTGAATCAAAAGCCGACTTAATTATTTTGGATTGACTTTACCTAACCACTTATGGTTAGCCTGAAG
AATATTAGTTTCCTATTATAGTGTTAAGGAAAGCTGATTTTTACTACAATTCTAATTTTCAGACACTGGAAAACAAGTAATTTCTGTAGCCAAC
GTTTATTTTGAATACCTTGGCATCCTTTCTTTGCCACATTCTTCTTAGTATTCTTCATGGAGTTCCTTTCTTTTAAAATCAATGGAATGGCAGG
GTTGCCACTATTGTCCTTCTATGGTTCACATCAATGATCTGTGATTACTTTTTTTTTTTTTTTGAGATAGTCACACGCTATCACCCACACTGGA
GTGCAGTGGCTCAATCTTAGCTCACTGCAACCTCCTGGGTTCAAGCAATTCTCCCGCCTTAGCTTCTCGAGTAGCTGGAATTACAGGCGCATGC
ATCCCTGCCCAGCTAATTTTTTAATTTTTTAATTTTTAGTAGAGACAGGGTTTCACCATGTTGACCAGGCTGGTCTCGAACTCCTGACCTGAAG
TGATCCACCCACCTTAGCCTCCCAAAGTGCTGGGATTACAGGCGTGAGCCACCGCGTCCTGCCTGTTATTACTTTTTTACATAAGTGGCTATTC
TGTTTTAGCCTCTTGAACAACATGCAGCTTTTACTAGGAGTGTGTCTGGCATTTGAATTAGAAAGGAAGATATTAGTATTCATTGAGGGCTTAC
AATACATCAGGTGCTTCATAGTCACAAATTCATTGAACCCTCACAACAACCCTCTATAAAGTAGCTCCTAGTGTTCCCATATAATAGATGAGGA
AAACTGAGACTTGGCCACATCCCCATAGTTACAAACCATTAAGAAGGATTAGCAGCCAGGTCTACTATGAATCCGGAGGCCCCATTCTCTTCTG
CTACCAGTTATCACCTCCTTCTACAGTTTCTCTTTGCCTTGGTTTTTCAGTTCCCTTCGATTCAAGTAACAAGAGGAAATATATAAGAAGGAAA
GGAGGAAGATGGCTTTGGGAGGAGGAGAGGGAAGAGAGTGAAGCAATCTTTAATTTTGAAAACAGGGAAAACAAATATTTAGAAAGTAAAACCG
ATTTCCATCCTTTACATGCCATTATACATCCTATACAAAACTCTGGAAATCTGCCTATTGAGGTAATTACGGAGCACTACCTAATGTGTTTCAA
GGGAAAGCTCCCCTGTTTGGGCTATGCAGGATTTACAGGGAGTTTAAATCATTAAATAACCATAGTTGACCCTTGCTTGGTTAAGAGAGTAAGC
AATTATTGCAAAGTCCTCTTCCCTGCCTTCCACAAACAGCACAAAAACGGTTCTGAAGGGATTTACACAATACATCAACATCTGTGCTGTACCT
AGAGTTGTTAAAATAATTGTGATGACAGGTGTCTAGGTACCACTTTCTTAATGGTTTTCAATATCCATTGATTTATTGTTTTGTGGCTTTCTCT
TCCCCTTTACAGCTTTGGCTTTAAGAAAGAGCTGGGGAACAGATTTTGCACCAGAGGCTGATTCTTTATTCCAATGCTGAAAAGAACTAATAAA
AATAATCACTTGGCTTTTAAGCAGAAAGCTTCCATTTACAGTATTTCACCCTTACCCCGCCCCGTTCCAAGCCCCTTGTTATCTAACATAATGG
TTAGAATACATTTCCGTCTCTCCCCTTAATAATTTCATGCATTAACATCCTCTTCACACACTATACACACACGCACGCGCGCACACACACGCGC
GCGCACACACACAGCAAAAGGAAAAAAGAGGCAGCAGAAATCTCAGCTGTACTTCTAGCCCTTTTAAAAAGTTTGCTCTGTAAATTGGAATGAG
GTCAGATTTGGAGCTTCTCATTGCACGCGGAGATTATTATTGCATCGGGTTCCAAGCCAATGGGAAGCCCGGGGGAGGGGTTTGGCATGAGGAA
GCGTTGGTTACAGCAGCTGATTGGCTGCAGCCAAGACTGTGAAAGGATAAAGAGGCGCGAGGCGGAATTGGGGTCTGCTCTAAGCTGCAGCAAG
AGAAACTGTGTGTGAGGGGAAGAGGCCTGTTTCGCTGTCGGGTCTCTAGTTCTTGCACGCTCTTTAAGAGTCTGCACTGGAGGAACTCCTGCCA
TTACCAGCTCCCTTCTTGCAGAAGGGAGGGGGAAACATACATTTATTCATGCCAGTCTGTTGCATGCAGGCTTTTTGGCTTCCTACCTTGCAAC
AAAATAATTGCACCAACTCCTTAGTGCCGATTCCGCCCACAGAGAGTCCTGGAGCCACAGTCTTTTTTGCTTTGCATTGTAGGAGAGGGACTAA
GTGCTAGAGACTATGTCGCTTTCCTGAGCTACCGAGAGCGCTCGTGAACTGGAATCAACTGCTTCAGGGAAAAAGAAAAAAAAAAAAAAAAGAC
TTGCCTGGGAGGCCGCGAGAAACTTGCATTGGAAGCTTCAGCAACCAGCATTCGAGAAACTCCTCTCTACTTTAGCACGGTCTCCAGACTCAGC
CGAGAGACAGCAAACTGCAGCGCGGTGAGAGAGCGAGAGAGAGGGAGAGAGAGACTCTCCAGCCTGGGAACTATAACTCCTCTGCGAGAGGCGG
AGAACTCCTTCCCCAAATCTTTTGGGGACTTTTCTCTCTTTACCCACCTCCGCCCCTGCGAGGAGTTGAGGGGCCAGTTCGGCCGCCGCGCGCG
TCTTCCCGTTCGGCGTGTGCTTGGCCCGGGGAACCGGGAGGGCCCGGCGATCGCGCGGCGGCCGCCGCGAGGGTGTGAGCGCGCGTGGGCGCCC
GCCGAGCCGAGGCCATGGTGCAGCAAACCAACAATGCCGAGAACACGGAAGCGCTGCTGGCCGGCGAGAGCTCGGACTCGGGCGCCGGCCTCGA
GCTGGGAATCGCCTCCTCCCCCACGCCCGGCTCCACCGCCTCCACGGGCGGCAAGGCCGACGACCCGAGCTGGTGCAAGACCCCGAGTGGGCAC
ATCAAGCGACCCATGAACGCCTTCATGGTGTGGTCGCAGATCGAGCGGCGCAAGATCATGGAGCAGTCGCCCGACATGCACAACGCCGAGATCT
CCAAGCGGCTGGGCAAACGCTGGAAGCTGCTCAAAGACAGCGACAAGATCCCTTTCATTCGAGAGGCGGAGCGGCTGCGCCTCAAGCACATGGC
TGACTACCCCGACTACAAGTACCGGCCCAGGAAGAAGGTGAAGTCCGGCAACGCCAACTCCAGCTCCTCGGCCGCCGCCTCCTCCAAGCCGGGG
GAGAAGGGAGACAAGGTCGGTGGCAGTGGCGGGGGCGGCCATGGGGGCGGCGGCGGCGGCGGGAGCAGCAACGCGGGGGGAGGAGGCGGCGGTG
CGAGTGGCGGCGGCGCCAACTCCAAACCGGCGCAGAAAAAGAGCTGCGGCTCCAAAGTGGCGGGCGGCGCGGGCGGTGGGGTTAGCAAACCGCA
CGCCAAGCTCATCCTGGCAGGCGGCGGCGGCGGCGGGAAAGCAGCGGCTGCCGCCGCCGCCTCCTTCGCCGCCGAACAGGCGGGGGCCGCCGCC
CTGCTGCCCCTGGGCGCCGCCGCCGACCACCACTCGCTGTACAAGGCGCGGACTCCCAGCGCCTCGGCCTCCGCCTCCTCGGCAGCCTCGGCCT
CCGCAGCGCTCGCGGCCCCGGGCAAGCACCTGGCGGAGAAGAAGGTGAAGCGCGTCTACCTGTTCGGCGGCCTGGGCACGTCGTCGTCGCCCGT
GGGCGGCGTGGGCGCGGGAGCCGACCCCAGCGACCCCCTGGGCCTGTACGAGGAGGAGGGCGCGGGCTGCTCGCCCGACGCGCCCAGCCTGAGC
GGCCGCAGCAGCGCCGCCTCGTCCCCCGCCGCCGGCCGCTCGCCCGCCGACCACCGCGGCTACGCCAGCCTGCGCGCCGCCTCGCCCGCCCCGT
CCAGCGCGCCCTCGCACGCGTCCTCCTCGGCCTCGTCCCACTCCTCCTCTTCCTCCTCCTCGGGCTCCTCGTCCTCCGACGACGAGTTCGAAGA
CGACCTGCTCGACCTGAACCCCAGCTCAAACTTTGAGAGCATGTCCCTGGGCAGCTTCAGTTCGTCGTCGGCGCTCGACCGGGACCTGGATTTT
AACTTCGAGCCCGGCTCCGGCTCGCACTTCGAGTTCCCGGACTACTGCACGCCCGAGGTGAGCGAGATGATCTCGGGAGACTGGCTCGAGTCCA
GCATCTCCAACCTGGTTTTCACCTACTGAAGGGCGCGCAGGCAGGGAGAAGGGCCGGGGGGGGTAGGAGAGGAGAAAAAAAAAGTGAAAAAAAG
AAACGAAAAGGACAGACGAAGAGTTTAAAGAGAAAAGGGAAAAAAGAAAGAAAAAGTAAGCAGGGCTGGCTTCGCCCGCGTTCTCGTCGTCGGA
TCAAGGAGCGCGGCGGCGTTTTGGACCCGCGCTCCCATCCCCCACCTTCCCGGGCCGGGGACCCACTCTGCCCAGCCGGAGGGACGCGGAGGAG
GAAGAGGGTAGACAGGGGCGACCTGTGATTGTTGTTATTGATGTTGTTGTTGATGGCAAAAAAAAAAAAGCGACTTCGAGTTTGCTCCCCTTTG
CTTGAAGAGACCCCCTCCCCCTTCCAACGAGCTTCCGGACTTGTCTGCACCCCCAGCAAGAAGGCGAGTTAGTTTTCTAGAGACTTGAAGGAGT
CTCCCCCTTCCTGCATCACCACCTTGGTTTTGTTTTATTTTGCTTCTTGGTCAAGAAAGGAGGGGAGAACCCAGCGCACCCCTCCCCCCCTTTT
TTTAAACGCGTGATGAAGACAGAAGGCTCCGGGGTGACGAATTTGGCCGATGGCAGATGTTTTGGGGGAACGCCGGGACTGAGAGACTCCACGC
AGGCGAATTCCCGTTTGGGGCTTTTTTTTCCTCCCTCTTTTCCCCTTGCCCCCTCTGCAGCCGGAGGAGGAGATGTTGAGGGGAGGAGGCCAGC
CAGTGTGACCGGCGCTAGGAAATGACCCGAGAACCCCGTTGGAAGCGCAGCAGCGGGAGCTAGGGGCGGGGGCGGAGGAGGACACGAACTGGAA
GGGGGTTCACGGTCAAACTGAAATGGATTTGCACGTTGGGGAGCTGGCGGCGGCGGCTGCTGGGCCTCCGCCTTCTTTTCTACGTGAAATCAGT
GAGGTGAGACTTCCCAGACCCCGGAGGCGTGGAGGAGAGGAGACTGTTTGATGTGGTACAGGGGCAGTCAGTGGAGGGCGAGTGGTTTCGGAAA
AAAAAAAAGAAAAAAAGAAAAAAAAAGAAAAAAAAAAGATTTTTTTCTTCTCTTAATCGGAATCGTGATGGTGTTGGATTATTTCAATGGTGGG
GTTAATATAGCATGTTATCCTGTCTATCTTTTAAAGATTTCTGTATAAGACTGTTGAGCAGTTTTTAAAATAGTGTAGGATAATATAAAAAGCA
GATAGATGGCGCTATGTTTGATTCCTACAACGAAATTATCACCAGCTTTTTTTCATTCTTAACTCTTTAAAGGATTCAAACGCAACTCAAATCT
GTGCTGGACTTTAAAAAAACAATTCAGGACCAAATTTTTTCTCAGTGTGTGTGTTTATTCCTTATAGGTGTAAATGAGAAGACGTGTTTTTTTC
CTTCACCGATGCTCCATCCTCGTATTTCTTTTTCCTTGTAAATGTAATCAGATGCCATTTTATATGTGGACGTATTTATACTGGCCAAACATAT
TTTTTCTTTTGTCCCTTTTTTTCTTTCCTTTCTTTTTACTTCCTTTATTTCTTTATTCCTTCCTTTTCCTTTTTTTCTTTTTTTTTTCTTTTTT
TTTTTTTTTTTTTGGTAGTTGTTGTTACCCACGCCATTTTACGTCTCCTTCACTGAAGGGCTAGAGTTTTAACTTTTAATTTTTTATATTTAAA
TGTAGACTTTTGACACTTTTAAAAAACAAAAAAAGACAAGAGAGATGAAAACGTTTGATTATTTTCTCAGTGTATTTTTGTAAAAAATATATAA
AGGGGGTGTTAATCGGTGTAAATCGCTGTTTGGATTTCCTGATTTTATAACAGGGCGGCTGGTTAATATCTCACACAGTTTAAAAAATCAGCCC
CTAATTTCTCCATGTTTACACTTCAATCTGCAGGCTTCTTAAAGTGACAGTATCCCTTAACCTGCCACCAGTGTCCACCCTCCGGCCCCCGTCT
TGTAAAAAGGGGAGGAGAATTAGCCAAACACTGTAAGCTTTTAAGAAAAACAAAGTTTTAAACGAAATACTGCTCTGTCCAGAGGCTTTAAAAC
TGGTGCAATTACAGCAAAAAGGGATTCTGTAGCTTTAACTTGTAAACCACATCTTTTTTGCACTTTTTTTATAAGCAAAAACGTGCCGTTTAAA
CCACTGGATCTATCTAAATGCCGATTTGAGTTCGCGACACTATGTACTGCGTTTTTCATTCTTGTATTTGACTATTTAATCCTTTCTACTTGTC
GCTAAATATAATTGTTTTAGTCTTATGGCATGATGATAGCATATGTGTTCAGGTTTATAGCTGTTGTGTTTAAAAATTGAAAAAAGTGGAAAAC
ATCTTTGTACATTTAAGTCTGTATTATAATAAGCAAAAAGATTGTGTGTATGTATGTTTAATATAACATGACAGGCACTAGGACGTCTGCCTTT
TTAAGGCAGTTCCGTTAAGGGTTTTTGTTTTTAAACTTTTTTTTGCCATCCATCCTGTGCAATATGCCGTGTAGAATATTTGTCTTAAAATTCA
AGGCCACAAAAACAATGTTTGGGGGAAAAAAAAGAAAAAATCATGCCAGCTAATCATGTCAAGTTCACTGCCTGTCAGATTGTTGATATATACC
TTCTGTAAATAACTTTTTTTGAGAAGGAAATAAAATCAGCTGGAACTGAACCCTAAATCTTGACTTTTGTCGTTATTATGCCCAATGCCTAAGA
TTGGAAAGGCCCTACAGTATCTGGACACTACACAATCTGCCTTAGCTTTAAAAAAATAAGTTCTCAGAGGAGTCTTGTCAAATGCTACCTTATC
GAGGAACATTAAATGTCTCTTGGCCAGATTTCCTCTGACCCTGAAAATGATGGCATCAGCTGAATATGTGTCAACTCAACACATGCTTTCTAGG
AATTTTCTGAGTTTACCATATTTAAAAACGCCCTTTGTCTTGGAATCTGAAAGAGGGGGAGGGGCAACGTGGACAGAATTCTTCACAGATGAAA
CTGGCTAGATGATCTTTTTTTCAAGTTGGTGCTCCTGGAGCTGCTTTCTCCTTGATTTGCCCATGCTTACCTCCAGCAGTGGCTGTAATTGGTT
TTCGTGGGTTAAGGACAAATAAACTGTTATTATCAGTAGATTATACAGGAGGAGGCTTTTACCGATTATGAAATGCAAAACGTATGCATTTATG
CATTTTTTTTCTCAAGCAGAAAGGTTGATGTGCTACAATCTTCATTTTTTGCCATGCCCAACATGGTGTTAATGTAAGAGAACTGCAGCAATAA
GGATGACCTGGAGAAGCTGGCTGCATGTGGGCTCAGAGGAAAGCCCCCTCTCCAAATAGCACTTACTTTGGCTGCTGGAGATTTGTGCTTTTTC
TAAGAATCAGGAAGGATTGTTGAGACTGCAAGGTGAAAAAGTACTTGGATTTCTTAAGGCCCATTACTCTTGGGTTTGGAACATACAACTTGCT
AAGTGGCACTATTTCCTGTTTATTTTGAGAGTTAACAATTGCTATTAACTAACAAAAGCCATCTTCCAAATGTTAATTAAAAATGTGTCTTTTA
CTTGTCTTGAGTTTTTCAGCACTGGAGAGGAGGGGTTAACAAGCAGAAGTGTTTGGAAATTATCCCTTAGTCATTTGGATTGCTTGTAGATAAG
GGAGTAGTATCCTGGAAGGTACATCTGGAAAAAGAGACCTTTTGAAGACTAGTCTAACAGGAGGGGGTTTTGTGGTTGTCCAACGAAAAGCAAT
AATGCACCCCCAAAAACCAGTATAACTTGTGTTTCAATATAATTTATCTCTTAAAGATAGCTACTAGTTTTCAACATTTTTTTCATGTGTGGTG
CTCATATATTTAGTTTTAATTGCATTTGCGTTCTGCAATTGGAATTCCATTTTTTAAAATGACCTTAGAACAACATGGCATCTAAGTTTCTTCA
AAGATCTTTGTAAAAGGAAGAACTCTTCTTTAGAAAAGTGCTTTTAATTTTTGTTCATTGCAGTGATAATATAATGGTTTAGCTTTTTTCAGAT
CCAAGGTATCAATACCATGACATAAATGAAGCCTTAAATGATGCCTTTTTTAAATGATGCATCTCTTTTAAAGCATATTTTTATTTCGGAGGGT
TCTCCTGTTAGAACTGTTTCTTTTCCCTTGACTCTCTATGTAAAAGCAGATGTTTTAAATATTTCCTTTAAGAATTTTGATAACATTGGTTTAA
AAATAAAAGCTGAAATGTGTGTGTCCTTCCTGTCAGGTGGTAAAGTAAGAAGCATTTTTGTACAATGTCTTTTTCTCTGAGTCTGTTTTCATTC
GTAAGGGATACTTACTTGTTAGGTGGTACAAGGCATCCTAAACCTGCGAAACCAAACAGTTTAGTGTGATTTTTTTCTTACAGATAATTTGGAT
CAATAGAAAAGAGTAAGTTTCAGATTTTCTTTTAAGAATATCCAGCAATTGCTTCTGGCCCTGTGTTCCATCACAAATGTGAATCAGTGATACT
TGCTTAAGCAAGTTTTGTCAATTCCTAGTTGAATTCCTTTAAGTGCCAAGAAAAAAAATAAAAAGCATGTAAGCTGAGAGGGTGGGCCCAGCTC
CTGGGAAGGCTTTTAGGGTTTGTGTTTACCCTGCTTTTGAGGGTACTAGGGGAGCTAAGGGATTCTGAGGAAAGCAAGAAAGCAAAGGGTTAAA
TGGACATCAACATTTACCAAGGGTTTCCTGTGTTTGTAGGGTACACACAAATTAGAAGACATGGTCTGGGGAATACTATGGGTCAGAATGCTTA
ATCATGAATTTAAAACAAATTCAGGGATCCCAAGGAAGTATTTGAAAAGAGAGAAATGTTTAAAAAAAAATTTTTTTTTTTTAAGAATACAAAC
CCATCTGGCCGGGCGCGGTGGCTCACGCCTGTAATCCCAGCACTTTGGGAGGCCAAGGCGGGCGGATCACTTGAGGTCAGGAGTTTGAAACCAG
CCTGGCCAATATAGCGAAACCTCCTCTCTACTAAAACTACAAAAATTAGTTGAGCGTAGTGGTGCACGCCTGTAATCCCAGCTACTCGGGAGGC
TTAGGTAGGAGAATCTCTTGAAGCCGGGAGGCTGAGGTTGCAGTGAGCCAAAATCGCATCAGTGCACTCTAGCCTGGGTGACAGAGTGAGATTC
TGTCTCAAAAACAAACAAAAAAATACAAACCCATCTACCCATTTGGATTTCTCAGAGTGTAAGGTTGGTATGCTTTATTTCTCTTTCTGGTGGT
TTTTGTTTTGTGCCTCCTCCTGGCACCCCTCCTATTAAGGCCTACAAAATACCTCTCTAACCCATATTCACTAGGGTTTACTCCTACCCCTCTG
ATTCTTCCTGAAAAATGATATCTCCATACGCATTTCTCAATTTTCACTATCATTTGAAAGCTAAAGTGGAGGGGTGGGAAGAAAGCATCTCCAG
ACATCCGCATGGTGTTTCAGGCTCTGCCAAGTGTCTACCACCATTCCCCTGTGCCCAGGATAAAGTGCAGAATTCACATGCTGCTCTTCAAGGC
CCTGCACAAAAGGGTTTTAAGCCCAACTTTCCAGTTCTTCCAAATTGCAGTATAACCAAACTGCTCTTTCCTGATAGACTGGAATTCTTGAAGG
ACAGAAACTAGGCATTGAATACTTCTTGCATTCCCCAGTTTGCTTTCCCTGCTTCTTTTCACATAATAAATGCTAAATTCTTATTTCTTGACTT
TACATGGTTTCCATGGGTTCCTAAGAGCTTCCAACAGGCATTTGCATTTTATGCTGCTTGTGGTAAGCGCCAGCGCCGGATTGCATGAAAACCT
GGATTAGAATGCTGCCTCTGAGACCAACAAGCTGGAGGACCTTGGACAGATTTCTCAGCCTTTTTAAGTTTCCGTGTTTTAAATCGTCATATAG
AAAGAGAGCTATCTAATGTAGACAGCTGTGTTGGGAATAGAGTGCAGCGGCACGTGTGTGACATGTCGTAATGCCTGGCCTACCCCATGGGCTC
GGTGAATGCTAGAACCTGACCTCATGGGTGGTTCTAAAAAGCTAATGTGTGTAAAGCCTAACACAGTGCCAGCAACACAGAAGATGCTTTAAAT
TCTAAAAATGGGGAGCAAAGCAGCGTGGCCGGGGTCCGAGCTGGGGTTCTGTCCCCACTGGGCTGTCGCCCCAGCTGGACTACCACCATGGAAC
TCAGGGCCGAATACCTCAGGGAGAAGCTGCAGCGGGACCTGGCGGCGGAGCATGTGGCGGTGGAGGACAACACGACCCTCAACCATTGCGCCTG
TAGCTTCTGGCGGTGTCGGCCAAGTTCGAGGGGAAGCCGCTGCTTCAGAGACACCGCCTGGTGAACGCGTGCCTAGCAGAAGCGCTCCTGCGCA
TCCATGCCTTTGAACAGAAAACCCTAATCCCAGAGCAGTGGGCCCGTGAGCGGCAGAAATGAGGGACTGGGACCTGCACAGCCATTAAATTACA
AATCTGGAAAAAAAAATTTCTAAAAATAAATCTCCTGAATCAATGTTTCTCAGTCTGCTACACGAATCCCCAGCATCAGAATTACCTGGAGATT
CTTGTTAAGGGTAGCGATTATACAGATCGCCAGCCACCGTCAGACTGTGGGGATGGGGCCTTAATGAGCCCCCCATAGATTTCCAGTGCTCACT
GAAGTTTGGAAATCAGTACCCTCACTGTATTTTAGCATATTCTCACAATAAGTATGCAGGCGAGGGATTATGACGCCCTCATTGTTTTAACATG
GAGAAATTGAGTTGAGAATGGCCCAATGGCTGATCTGAGGTCACAAGATCAGAAGTGCCAGAAAGGGTATTGGAACTCTATCTCCTGAGCCCTA
GAATCAGCCTAGAACTTATTTCTCTAAATAGATGTCTTCTCCATTTCTACCCAAGGCTTGGTCCCTTGGCAAAAATTGGCAGTCCCTGCACTTC
CCTCAGCCCTCTGACTCCTATCCATTTTCTCAAGGATGCCCTTCCACCATCCTTGTTAAAAGTTTAAGTTTGGGCCGGGCGCCCGTCGCTGGTG
CCTGTAATCCCAGCCCCTAGGGAGGCGAGGCAGGGGGATCACCTGAGGTCAGGAGTTTGAGACCAGCCTGACCAACATGGTGAAATCCCGTCTC
CATTAAAAATACAAAAAAATTAGCTGAGTGTAGTGGCACATGCCTTTAATCCCAGCTACCCAGGAGGCTAAGGCAGGAGAATCGCTTGAACCTG
GGAGACAGAAGTTGCAGTGAGCCAAGACTGTGCTATTGCACTCCAGCCTGGGCAACAAGAGTGAAAATCCATCTCAAAAAAAAAAAAAAAAGTG
TAAGTTTAAGTAATTAGCCAAGTTAATGTGTGTGTGTGTGTGTGTGTGTCTGTGTGTATTCCAGTTAAACAAATGTGTGCTAAAAGATGAACCC
AGGGACTGATTTTTGGTAGAAGTATCCAAGGCAGAGAACAGAAATAATATAAATATAGTGCCTGGAACTTCTGCTTTGTTGTTTAAAAGGCAGA
GCTTCCAGCAAGTGAGAAAATTGGAAATTATTCAGAGCACACTCAGCCTTTATAGAGAGGGCTATCGTCTACCCATTATATCCTAATGAGATTG
ACCGTTGGCTACAGTTAACTTGAAGGGTTTTATGGTTTCCTGCATGTGTTGTTTTCCTTCTCTATGTTAAAAAGAAGAAAAAAAAAAACTCTCA
CATCACTAAACGGTATTTCCCAGGGGGATGTCTGACTAGGCTGCTGCATTTTGGTTTGGGCCTTAGTTAACAATGGACCTCTATGTGTGTATGT
TTGTGGATACAGGTGATAATAAATTTAGCCCATTTTATTTTCTTTTGACAGTTTCAATTCAGGGCAGTTGGTTTATGGGGTACCGCCAAACAAG
CCAGGCCTAAGTCAAGTCATGGCAGGAACTTTCTTGTAGGGCCTTCCTTTACCCTGCAGATTTTTTGTTGAAGGACAAAGTTCTAAGTCATTTG
TGGACCAATATACACAGCTGCTTTGCATCATACGTAAGACATTCTAAGGGTATTCCATTTGAGTGTTTTTTTTAAAGGGCAGGACATTAAGAAA
CAAATGAAATATCATTTACTTAGCCCACTTACTTCTTTAGATATTTTTCCAAATACATAATTCTTTGGATTAGTTTTTAAACACATAATGAATG
TGCTATTTCCTGACATAACATGCAGTTGAAAGGCAAGTGAAAACACTATTATCCTTAGTAGGTAGGCTCTCTCCAGGCAGTGAATGCCCAGCAG
TGTAGGGCGATGGTTGGCTAATACATGTGATGCATGTAACTGCTTTTATAAGAGCTAAGCAGAAGGAGCCTGTTGAATGATCAGTTAGCTCCCG
TTGTATATGTGGTTAATTGTTACTTTCTTTCCTACCGGCCCCTGCCCTAACTTCCTCAGATCAACACCTAAAGCCTGTGAAAATAGTCTCTTCT
GGAACCCCTGACCTTCAGTCTCTGCCCCTGCTTTCTCTCTTCCCATTCCCACACTTTCTATGTGGACCTTTTATCTCTCCTGTTTGCCAATCCC
CCTCAGACTTTGAATAATTTATCTGAAGTTCCTGGGAAGTTGTGGGGCTGTCTGTAGTCTCAAAATACACTGCACTTTGTTCCTTCTCTAGGCC
GAGGTAGGTCCAAAAGCCTGTCTTTGAAAGAGGTGGTACTAAGTACATTGAGGGATTTACTAACAGTTTTAATTTTTTGGATGAGCACCCAATG
AATCCAAAAGCTGGAGGAAAGAAAAAATAAGGGGCAAAAGATGAAGGTGAATACTACTTTGTAATTCTGATATCTCCCAAAGAATGTCAAGTAA
ATTAAGGGAACACTGATTAAGATTTCCAGTTCCTATTGTTATAACAATGTATTTTATACATGTCTTTTCAAATACATGAGAGTTTTCCTTGAGT
AGTTACTAGAAGTGGAAAGTGCTGGATCTTAGTCTTATAGACATAGGCTTTTGACAGTTTCCGTACCCTGGAGCTGGTTAGGCGTAAAGTGGTT
TGAGGAGAGAAAAACTAGTGATATGTCTAAATGAACACAGGTTAAAAAGTAAACCAAACTTTGAAACAATCATTTTAACCCCCGGAGAAGGTGA
ATAGATTATTTTAATATGTAAGCAGATACATCTGCAAATCATACTGAGATGATTTTTCTATCCCAAGTGTCTGATAACATATATGAATAGAAAA
GCGAACAATTACAGAAACAGCCTTGACACTGACATGGTGACAAAGTATGGGGATTTTAGTACTTCCGAAATAAACATCAGAACAGAGATCAACT
CTCTTCGGTCTTTTTCTTCTTCCATTAGAACTCATCAGGCTGATTCCCATTTCTGCATTACTAGCCTTACTTTTTTTTTTGCTAGGCTCTGTGA
TGCAAGGAACAGAATCACTCAAGTAACCTGAAATCATGGGGCTTTATTACAAAGAGACACGGGGCTTTATTACAAAGAAACACAAGACTACAAG
GGAACTGAAAATGTCATGGTAGTTCTGGGAGAAATAGTGTTCAAGATCCACGGCAGCTCTGGAGAGATTAAGTGGTTACCAATTTAGCATTAAG
ATTATGCAGATAATTAATATTGCTCAGGTATTCTCTTAGTATTCCTGTGTGTGTTGATTTTCTCCCAATACCAAATCTTGCTTCTGTTCTCCAT
ATTTTGTCCTTCATATTCCCTTTTAAGACAGCTCTGGGCCGGGCACGGTGGCTCAGGCCTGTAATCCCAGCACTTTGGGAGGCCTTGGTGGGCG
GATCACTTGAGGTCAGGAGTTCAAGATCAGCCTGGTCAACATGGTGAAACCCCGTCTCTATTAAAAATACAAAAATTGTTGGGAGGCCGAGGCG
GGTGGATCACGAGGTAAGGAGATTGACACCATCCTGGCTAACACGGTGAAACCCCGTCTCTACTAAAAATACAAAAAAATTAGCCGGGCGTGGT
GGCGGCCGCCTTTAGTCCCAGCTACTCAGGAGGCTGAGGCAGGACAATGGTGGTGAACCCAGGAGGCAGAGCTTGCAGTGAGCTGAGATCGCGC
CACTGCACTCCAGGCTGGGCGACAGAGCAAGACTCCGTCTCAAAAAAAAAAAAAAAAATTGGCCGGGCACTGTGGCTCATGCCTATAATCTCAG
CACTTTGGGAGGTCAAGGTGGGCATATCACGAGATCAAGAGATCGAGACCATCCTGGCCAACATGGTGAAACCCCATCTCTACTAAAAATACAA
AAATTAGCTGGACGTGCTGGCACAAGCCTGTAGTCCCAGCTACTCGGGAGACTGAGGCAGAAGAATCACTTGAACCCGGGAGACGGAGGTTGCA
GTGAGCCAAGATGGTGCCACTGCACTCTAGCCTGGCAACAGAGTGAGACTTCGTCTCAAAAAAAAAAAAAAAAAATTTGCTGGGCATGGTGGCA
TGCACTTGTAATCCCAGCTACTCTGGAGGCTGAGGTAGGAGAATCGCTTGAACCCGGGAGGTGAAGTTGCAGTGAGTCGAGACTGTAACCACTG
CACTCCAGCCTGGGTGACAGAGCAAGACTACATCTTAAAAAAAAAAAAGACAGCTCTGCATGGCAGTTATTTCATCAATTACTTACCAAGCAAT
GAAACGGCTGCTTTGGGGTTGTGTGCCTACTTTTGGACAAATCACTTATTAATGTATTATATTCTTCACTCTCCCATCCCTCTTTGTTTTGCTT
TTGTTCCTAGGGTCTCATGGCCCTCATACGTCCTCTTATATTTTTTCTTTGATCTTCATATACTAAGGGAGGGTGAACCCCAGGCTTCATGGAA
CATCCACCCTTCCTCCTCTACCATCCACAATATCCTCATTTCAAACAGACTGGCTTGGCTTTTATCTATTTAAAATTCTAACCTTTTCCCTATA
GCTCGAATTTTGGCACTCAGGCCTAGAGATATAAAGAGTAGAGATTAAATATGCCACATTCTAAAGGGAAGCCAGGTGATGCCCTTACCCCAGT
AATCCAGAGCAGAAAGGATCCTACCATAGTCAGTATTCCCCTCCTCAACACGG
HUMAN SEQUENCE-mRNA
TTCCCCAGCATTCGAGAAACTCCTCTCTACTTTAGCACGGTCTCCAGACTCAGCCGAGAGACAGCAAACTGCAGCGCGGTGAGAGAGCGAGAGA
GAGGGAGAGAGAGACTCTCCAGCCTGGGAACTATAACTCCTCTGCGAGAGGCGGAGAACTCCTTCCCCAAATCTTTTGGGGACTTTTCTCTCTT
TACCCACCTCCGCCCCTGCGAGGAGTTGAGGGGCCAGTTCGGCCGCCGCGCGCGTCTTCCCGTTCGGCGTGTGCTTGGCCCGGGGAACCGGGAG
GGCCCGGCGATCGCGCGGCGGCCGCCGCGAGGGTGTGAGCGCGCGTGGGCGCCCGCCGAGCCGAGGCCATGGTGCAGCAAACCAACAATGCCGA
GAACACGGAAGCGCTGCTGGCCGGCGAGAGCTCGGACTCGGGCGCCGGCCTCGAGCTGGGAATCGCCTCCTCCCCCACGCCCGGCTCCACCGCC
TCCACGGGCGGCAAGGCCGACGACCCGAGCTGGTGCAAGACCCCGAGTGGGCACATCAAGCGACCCATGAACGCCTTCATGGTGTGGTCGCAGA
TCGAGCGGCGCAAGATCATGGAGCAGTCGCCCGACATGCACAACGCCGAGATCTCCAAGCGGCTGGGCAAACGCTGGAAGCTGCTCAAAGACAG
CGACAAGATCCCTTTCATTCGAGAGGCGGAGCGGCTGCGCCTCAAGCACATGGCTGACTACCCCGACTACAAGTACCGGCCCAGGAAGAAGGTG
AAGTCCGGCAACGCCAACTCCAGCTCCTCGGCCGCCGCCTCCTCCAAGCCGGGGGAGAAGGGAGACAAGGTCGGTGGCAGTGGCGGGGGCGGCC
ATGGGGGCGGCGGCGGCGGCGGGAGCAGCAACGCGGGGGGAGGAGGCGGCGGTGCGAGTGGCGGCGGCGCCAACTCCAAACCGGCGCAGAAAAA
GAGCTGCGGCTCCAAAGTGGCGGGCGGCGCGGGCGGTGGGGTTAGCAAACCGCACGCCAAGCTCATCCTGGCAGGCGGCGGCGGCGGCGGGAAA
GCAGCGGCTGCCGCCGCCGCCTCCTTCGCCGCCGAACAGGCGGGGGCCGCCGCCCTGCTGCCCCTGGGCGCCGCCGCCGACCACCACTCGCTGT
ACAAGGCGCGGACTCCCAGCGCCTCGGCCTCCGCCTCCTCGGCAGCCTCGGCCTCCGCAGCGCTCGCGGCCCCGGGCAAGCACCTGGCGGAGAA
GAAGGTGAAGCGCGTCTACCTGTTCGGCGGCCTGGGCACGTCGTCGTCGCCCGTGGGCGGCGTGGGCGCGGGAGCCGACCCCAGCGACCCCCTG
GGCCTGTACGAGGAGGAGGGCGCGGGCTGCTCGCCCGACGCGCCCAGCCTGAGCGGCCGCAGCAGCGCCGCCTCGTCCCCCGCCGCCGGCCGCT
CGCCCGCCGACCACCGCGGCTACGCCAGCCTGCGCGCCGCCTCGCCCGCCCCGTCCAGCGCGCCCTCGCACGCGTCCTCCTCGGCCTCGTCCCA
CTCCTCCTCTTCCTCCTCCTCGGGCTCCTCGTCCTCCGACGACGAGTTCGAAGACGACCTGCTCGACCTGAACCCCAGCTCAAACTTTGAGAGC
ATGTCCCTGGGCAGCTTCAGTTCGTCGTCGGCGCTCGACCGGGACCTGGATTTTAACTTCGAGCCCGGCTCCGGCTCGCACTTCGAGTTCCCGG
ACTACTGCACGCCCGAGGTGAGCGAGATGATCTCGGGAGACTGGCTCGAGTCCAGCATCTCCAACCTGGTTTTCACCTACTGAAGGGCGCGCAG
GCAGGGAGAAGGGCCGGGGGGGGTAGGAGAGGAGAAAAAAAAAGTGAAAAAAAGAAACGAAAAGGACAGACGAAGAGTTTAAAGAGAAAAGGGA
AAAAAGAAAGAAAAAGTAAGCAGGGCTCGTTCGCCCGCGTTCTCGTCGTCGGATCAAGGAGCGCGGCGGCGTTTTGGACCCGCGCTCCCATCCC
CCACCTTCCCGGGCCGGGGACCCACTCTGCCCAGCCGGAGGGACGCGGAGGAGGAAGAGGGTAGACAGGGGCGACCTGTGATTGTTGTTATTGA
TGTTGTTGTTGATGGCAAAAAAAAAAAGCGACTTCGAGTTTGCTCCCCTTTGCTTGAAGAGACCCCCTCCCCCTTCCAACGAGCTTCCGGACTT
GTCTGCACCCCCAGCAAGAAGGCGAGTTAGTTTTCTAGAGACTTGAAGGAGTCTCCCCCTTCCTGCATCACCACCTTGGTTTTGTTTTATTTTG
CTTCTTGGTCAAGAAAGGAGGGGAGAACCCAGCGCACCCCTCCCCCCCTTTTTTTAAACGCGTGATGAAGACAGAAGGCTCCGGGGTGACGAAT
TTGGCCGATGGCAGATGTTTTGGGGGAACGCCGGGACTGAGAGACTCCACGCAGGCGAATTCCCGTTTGGGGCCTTTTTTTCCTCCCTCTTTTC
CCCTTGCCCCCTCTGCAGCCGGAGGAGGAGATGTTGAGGGGAGGAGGCCAGCCAGTGTGACCGGCGCTAGGAAATGACCCGAGAACCCCGTTGG
AAGCGCAGCAGCGGGAGCTAGGGGCGGGGGCGGAGGAGGACACGAACTGGAAGGGGGTTCACGGTCAAACTGAAATGGATTTGCACGTTGGGGA
GCTGGCGGCGGCGGCTGCTGGGCCTCCGCCTTCTTTTCTACGTGAAATCAGTGAGGTGAGACTTCCCAGACCCCGGAGGCGTGGAGGAGAGGAG
ACTGTTTGATGTGGTACAGGGGCAGTCAGTGGAGGGCGAGTGGTTTCGGAAAAAAAAAAAGAAAAAAAGGG
HUMAN SEQUENCE-CODING
ATGGTGCAGCAAACCAACAATGCCGAGAACACGGAAGCGCTGCTGGCCGGCGAGAGCTCGGACTCGGGCGCCGGCCTCGAGCTGGGAATCGCCT
CCTCCCCCACGCCCGGCTCCACCGCCTCCACGGGCGGCAAGGCCGACGACCCGAGCTGGTGCAAGACCCCGAGTGGGCACATCAAGCGACCCAT
GAACGCCTTCATGGTGTGGTCGCAGATCGAGCGGCGCAAGATCATGGAGCAGTCGCCCGACATGCACAACGCCGAGATCTCCAAGCGGCTGGGC
AAACGCTGGAAGCTGCTCAAAGACAGCGACAAGATCCCTTTCATTCGAGAGGCGGAGCGGCTGCGCCTCAAGCACATGGCTGACTACCCCGACT
ACAAGTACCGGCCCAGGAAGAAGGTGAAGTCCGGCAACGCCAACTCCAGCTCCTCGGCCGCCGCCTCCTCCAAGCCGGGGGAGAAGGGAGACAA
GGTCGGTGGCAGTGGCGGGGGCGGCCATGGGGGCGGCGGCGGCGGCGGGAGCAGCAACGCGGGGGGAGGAGGCGGCGGTGCGAGTGGCGGCGGC
GCCAACTCCAAACCGGCGCAGAAAAAGAGCTGCGGCTCCAAAGTGGCGGGCGGCGCGGGCGGTGGGGTTAGCAAACCGCACGCCAAGCTCATCC
TGGCAGGCGGCGGCGGCGGCGGGAAAGCAGCGGCTGCCGCCGCCGCCTCCTTCGCCGCCGAACAGGCGGGGGCCGCCGCCCTGCTGCCCCTGGG
CGCCGCCGCCGACCACCACTCGCTGTACAAGGCGCGGACTCCCAGCGCCTCGGCCTCCGCCTCCTCGGCAGCCTCGGCCTCCGCAGCGCTCGCG
GCCCCGGGCAAGCACCTGGCGGAGAAGAAGGTGAAGCGCGTCTACCTGTTCGGCGGCCTGGGCACGTCGTCGTCGCCCGTGGGCGGCGTGGGCG
CGGGAGCCGACCCCAGCGACCCCCTGGGCCTGTACGAGGAGGAGGGCGCGGGCTGCTCGCCCGACGCGCCCAGCCTGAGCGGCCGCAGCAGCGC
CGCCTCGTCCCCCGCCGCCGGCCGCTCGCCCGCCGACCACCGCGGCTACGCCAGCCTGCGCGCCGCCTCGCCCGCCCCGTCCAGCGCGCCCTCG
CACGCGTCCTCCTCGGCCTCGTCCCACTCCTCCTCTTCCTCCTCCTCGGGCTCCTCGTCCTCCGACGACGAGTTCGAAGACGACCTGCTCGACC
TGAACCCCAGCTCAAACTTTGAGAGCATGTCCCTGGGCAGCTTCAGTTCGTCGTCGGCGCTCGACCGGGACCTGGATTTTAACTTCGAGCCCGG
CTCCGGCTCGCACTTCGAGTTCCCGGACTACTGCACGCCCGAGGTGAGCGAGATGATCTCGGGAGACTGGCTCGAGTCCAGCATCTCCAACCTG
GTTTTCACCTACTGA

[0272] TABLE 8

MOUSE NOMENCLATURE
ICSGNM Tcof1
Celera mCG6035
HUMAN NOMENCLATURE
HGNCT COF1
Celera hCG38609
MOUSE SEQUENCE-GENOMIC
TTAAGAAAGCTGGGGCCACTGGACAGTGGTGGCCCACGCCTTTAATCCCAGCAATTGGGAGGCAGAGGCAGGCAGATTTCTGAGTTTGAGGCCA
GCCTGGTCTACAGAGTGAGTTCCAGGGACAGCTGAGACTACACCGAGAAACTCTGTCTTGAAAAAAAAAAACTGAAGGAGAGGAAGAAGAAGAG
GAGGAGGAGGAGAATTNNNNNNNNNNNNNNNNNNNNNNNNNNNNNNNNNNNNNNNNNNNNNNNNNNNNNNNNNNNNNNNNNNNNNNNNNNNNNN
NNNNNNNNNNNNNNNNNNNNNNNNNNNNNNNNNNNNNNNNNNNNNNNNNNNNNNNNNNNNNNNNNNNNNNNNNNNNNNNNNNNNNNNNNNNNNN
NNNNNNNNNNNNNNNNNNNNNNNNNNNNNNNNNNNNNNNNNNNNNNNNNNNNNNNNNNNNNNNNNNNNNNNNNNNNNNNNNNNNNNNNNNNNNN
NNNNNNNNNNNNNNNNNNNNNNNNNNNNNNNNNNNNNNNNNNNNNNNNNNNNNNNNNNNNNNNNNNNNNNNNNNNNNNNNNNNNNNNNNNNNNN
NNNNNNNNNNNNNNNNNNNNNNNNNNNNNNNNNNNNNNNNNNNNNNNNNNNNNNNNNNNNNNNNNNNNNNNNNNNNNNNNNNNNNNNNNNNNNN
NNNNNNNNNNNNNNNNNNNNNNNNNNNNNNNNNNNNNNNNNNNNNNNNNNNNNNNNNNNNNNNNNNNNNNNNNNNNNNNNNNNNNNNNNNNNNN
NNNNNNNNNNNNNNNNNNNNNNNNNNNNNNNNNNNNNNNNNNNNNNNNNNNNNNNNNNNNNNNNNNNNNNNNNNNNNNNNNNNNNNNNNNNNNN
NNNNNNNNNNNNNNNNNNNNNNNNNNNNNNNNNNNNNNNNNNNNNNNNNNNNNNNNNNNNNNNNNNNNNNNNNNNNNNNNNNNNNNNNNNNNNN
NNNNNNNNNNNNNNNNNNNNNNNNNNNNNNNNNNNNNNNNNNNNNNNNNNNNNNNNNNNAATTACCCTTGGCTGCACAGCATGTGTGGGCGACA
CGAGACCCTGTCTCTAAAAAGAAACAGCAGCTGGGACCTGAACCTGTAGTCAGTAGCTTAGCTAGGGCGGGGTGGGGGACCGGGCTGATAATCA
GGGATGCGCTGTGAGGCTATTTGTGTGGAAGAGGGAAGGGAAGGAAGAACAGCAGCAGAGAACAACCAAAAGCATCAGCCTAGGAGAAAGGGAC
CAACTGGTCTACCTTTACTCCCTACCTGTCAATGACCTTACTCAGTCACTTCCTGTCACTAGGCCTGGTTCTTTAACCATGAAAGGATGGAGCT
GGCCAGGAGCTCTCTATGAACCCTTTCTGATGATCTTCAAAAGAAATGCACCCCCCCACACACACCCAAATAAATAAATAAATAAATAAATAAA
TAATGCTCAGGAGACCAGTGGGCAATTAAATTGGTTCTACCTATTATAGTGTCTCTCCCTGTTGCCCACTGATTCCACCCTACAGTTTTAAGAC
TTCAGTCCATAGCCCACTGTGGTTTTAGCTTAATCATAAGGCCTATGTCCTGCCTCCCTCATCTGTGCCTGTGGTCCAGCCTGGGTCATGTTAG
GAGGCCCTGAAAGCTGGCATCTGCTCCAGTCCTGCCTTGTACCACCGGTGGTAACTCAGTCCTCACCTCTCAAAGTCTCTGTTTCCTCATCTAC
TAGCAGAGCTGGTAACCAGTTCAGATATGTTCTACGGTGCTAAACTGATGAGTGCTTATTGGCCTGAAGGCTAGCTCCGGCTCGCTGCATATGC
TTCACAAAATCAGCCTGCTTTGAAGGATCCACTCTGAGCCTATGCAGACCTCAGTATCGGGAGAACTGGCTCTAACATGTTACTGTTCAGTAAA
CGAGAGGGTCACAGGGTTTTATGTATACTGTGAACACTCTAAGAAATAAAGGAAGGGAGAAAGGGTGGGAGAAGGGGAAGTGAGAAAGAACAGG
ACTCAAGCCCATAGGGAGGTTGTGAGTACTTGCGGAAACTGGGCAGGGATGTGCTGGACGGAAAGGGTTAAAGCCTGAGCCGGCCTCTGAGGGT
GAGGGTACTGAAAGAGAAGTAACTCCCTACAACTTGGAATGTCTTAAGCTGCTACTTTAGTAACAACTTAATGACCTTCAAAAGCTTTCTCTGG
ATTGAAGAGAAACAGAAATTGCAGGTCAGATCTGGGAAGAGCAGAAAAAGCCCAGGAAACATCCTGCCAAAAAGACTTGAGTCAGAGACCCTGG
AAGGCGGAGAGAGGGGCTATCTTTCCGTTGGAGTCATAACAGAAGCAACCTTCCCAGGACCCCCTAGAAAGTCCGGTGCTGAATGGATGGAACT
AGAAAACCTCATCCTGAGTGAAGTAACTGGGAAAGATAACGACGGCCTGTACTCACAAGTGGACGTTAGCCATAAAGTACAGGATAACCATGCT
ATGATCCACAGAGCCAAAGAGGCTAAGTATCAAGGAGGGCCGAAAGGAGGATGCTTGAATCTCACTGAGAAGAGGGAATAAAATAGACATCTGG
GGTGGAGGGAGGGAGGGAAGTGGGTGGAGGCGGGTGGATAGGAAAGCAGGAGGGATCTCAAGTGTGGGGAGGATGGTGGGAGACAGAACTGGGA
TAGAGAACTAGAATCCATGTATACGTGGGGGAGGGGGAAGCATCTCTGGGACAAGGTAGAAATCTAGGACAATGGAAACTCCCAGGAATCTGTG
AGGATGACCCTAGCTAAGACTCCTAGCAGTCAGGGATATGGAACCTGAAACAGGCACTTCCTGACACCAAACGAGACTTCCAATGGAGAGATGG
GAATACCAACCCAGCCACAAAAATCTTTGGCCCTCAATTTGCCCTGCCTATAAGAGGTGGTGGGATAAGGAGGGAGCAGAAAATGAGGAAGTGA
TCAACCAATGACTGGCCCAAATTGAGCCTCATGCCATGGGAGGGAGCCCACCCCTGACGACAGTATTAACAATATTCTGCCGTACTTGCAGACA
GGAGCCTAGCATAGCTGTCACCTGAGTGGCTCTGCCCAGCAGCTGATGAAAACAGATGCAGAGACCCCCCAGTCTAACATTAGACAGAGCTCGG
AGAATCTCACGGCAAAGGGGGAGGAAGGATTGAAAAAAGCCATGTCAAAGACGCCGCAAGAAAACCTACAGAACCAACTAACCTGGGCACAGGG
GGGCTCACAAAGACTGAATCACCAGAGAGCATGCATGGGACAGACCTAGTCCCCCTACACCTTTGTAACAGATGTACAGCTTGGTCCTCGTGTG
GGACTCCCTAACAACAGGAGCAGGAGCTATTTCTGACACTGTTGCCTGCCTTTGGATCCCCATAACTGGACAGCCTTAACAGAAGATGTGATAT
GACATGGCATGTTGATATTCAGAGGTCTCCCTTCCTCTGGGGAAAAAAGGAGGGGCATAGGAGGAGGGGAGGGGAGAAGGAGGGACTGGAAGGA
GAGGGGGTAGGGAAAGCTCTGATCAGATTGTAAAGTAAACGAATCAATAAATGGATGACTAGAATAGAATAGAATAGAATAGAATAGAATATAG
TGCTAGAACAGACCTTGTTCACAGATCCATGTAACACAAGGTCGTTTCAGGGGACTAGAGAGGACAAGAGACTGGCCCACGACCACGTAGCAGA
AGTTGGCTATAAAAGCTCTTTACTGGTCCCTGGTTCTGCTGCTTCCAACCTGTGTGCAGACCATTGCTGCTGGGAAGAGCATGTAGAACCCTAC
CTGCTGAGTGTTTTCTTCTTAAAAATAAAAAAACAAAACAAAAGAATTATTATGCTACACACCAGGGTGCATGCTTTTAATTCCAACTCCAGCC
CTCGGGACACAGAGGCAGGCAGATCTCTGTGAAATATGAATCCAGCCTGGTATACATAGTGAGTTCCAATATAGTCAGGGACACATAGTGAGAC
CTTGTCTCTAAAAACAATAAATAAATAAATAAATAAATAAATAAATAAATACATACATAAATAAATAAATACATAAATAAAAAGATTGTTATTA
TTTTAAATTATGTGTATATGCGTATGGGTATGTGCCCATCTGTAGAGATAATCTCTTGTACACTGTGTAAAAAACAGTCACCTGTCAATTTAAA
AAAACTGACCAATGAGCTTAGGCAGAAAATCAGGAGGTGGGACATCCGGGAGATAGAAGAGGGAGAGGGGGATGCTGGGATAGAGACAGACAGG
AGATTGGCCCCACCCTCAACCCCCAAATGAAGATATAGGCAGCAGCAACAGAGTATCAGGTAACCAGCGACGTGACAGAACTTAGAATAAAATA
ACAGGATGATTAACTTATGAGCTAGTTGGGGGATAACCAAAGCCTATGGCATGAGTGTTTATAAATATATTTGAGTCTCAAGAGTCATTATTCC
AGAAGAGGGACCAGGAGGAAAAAACAGGAGCTCACAGAAAACACACAACTACACCCTTGAGTGGAGGTCCCTGAGGAGGTCAGAAGAGGGTATT
GCATCCCCTGGAGCTGAAGTTACAGGCAGTTGTGAGCCATCAGATGTAGGTGCTGTGACTCAGACTCTGGTCTTCCACAAGAGCAGCGAGCGAG
TGCTCCTGACTACTGAGCGATCTCTCCAGCCCCTGGTTTCCTCCTTTTCCTGACCTGCCTGGGAACCTGAGGTGACTAAGGCAGGATGCTTTTC
CCAAGGACACTTAAGTCAAGTGCTCTGGAAGCTTCCAGCTTCTTCCATGAACAAGGTCAACTTTTCCAAACTGGCGGAGAAAGGCTCCGAGGCT
AATGTTTTTAATGCACGCCTTTGTTTGCTTCTGCCCTGACTGTGGCCTTTTTATATTTTATGGGCTTAATGTTCTAATTTCGTGCTAGGGCCCT
GAGGCAATTCACCGAAGGATGTGATTTTAGAAAATCCAGGAAATAAAGGAATTGTCCGCCAAAGAGGCATCTGACAATGAATTTTATTAGGGAC
AAAGCAAATCAACCTGTCGCCAGACTGAGGTATTAGCATGTCCTGGTTTAATGTAGGTTTGTCTTTTTAATTTAATACTAGCTCTCCGTTCCTG
CCGGGGTCAGCTGGGGATACATACCCGGCTCCTTCTTGGCTCACACTACTGCTTGTAGAAAGCACCCTGGCCTCTTCTCAAGGCACTTGCCAGT
AGTGACCAGAGAGCCTACTGTGCACAGCCTCTGAGCTGGGGGCAGGTCCATGTGCTCAGACAGGGACCACGAGATCCTTTTTAAGGGCCTGTTC
ATTATCGTTTGGAGAATGCCCCAGAGGAGGAGGAACTTGTGGGGAGAGGCTAGTGCGAAAGAGCACGGGTCTTTGAATGCTTGCCTGCTCATTC
CGCACGCTCATCAGCCTACCATACCACATCACATCATACTACACATGACTGTGCAAGTGAAACCCCAGGCTCATCATTCACCCACCTGCCGGCG
TCTACTTTCCAGGTCTCTAGTTGCCCGAACCTATGGTGGCCCTACTCTCTGAAGGCTGTATCCCTAAAACCTGACCCTTTGCATCCCTCTCCTA
CCAATTTAATTCCTAGGGGTGGGGTACTGTGGTTCTTTTGGGAACACCTTAGACCCCACACCCTTTTGTTTCCTGGCGGTTTGACAAAACCCCT
CTGAGTGTTTTTCTTTGCCCGAATCTGGGCAGGTAAGCCCTGCCTTCAGAGAACCCAGCAGACTGGCCACCGTAGCTCTAGCTGCATCATCAAA
TCCATCAGGCCACCCAGGATCCTGTGGGCAAGTTGCTTGACTCTCTGAATGCTGGCTCTCCCTCCTTCCAACTCCTCACCACCTCTTCTTCACT
CTCAGCAGACCTTGCCTCCCACTTGGAAGAGGAAAATAGAAGTTCAAGATGAAATCTCCCTTAACCTCCCACTGCAAACCCACATCCACATGCG
CTCCCATTCTCTCCACGAGCCTGCTTTGGGCTTCTATTGAAGTCCTCCCTCCTCCGTTCTCAGACCAGCCCTTCACCCACACCAATGCCTCCCT
CCCACGTACCCTCAGACATCGCTTCCCAGCTTCCTAAAATGCCCCCCACCACCCCATCTCTCTCCCCTGGATCTAAGTTGATTTTTAAACCAAC
TTCGGTCTCTTCCATCTCAAAACACTCCTCCCCCAATAACACACACACACACACACACACACACACACACACACAGAGTGTTAGTTCTTTTTCT
CCCCTCCACGCAAACCTGCCCAACAGCCCAGCATCTCCCCAGCCCTCCCACACTTGTGGTACCATTGTCCCTGCCCTGTTCTGCATGCAGCACT
TTCTGAGTCAGTCTTCAGTGATAGCAATCAGACCAAGCATGACCCATGTCCATCTCTTCTGGCCTTAGAGCACTTCCCAGCATTTCACATTACT
GAAACTCTGCGCTCAGCTCCCTCGTGAGCCCCCTCTGGCTTTGCTATTCTGCTGCAGCAGGCTTGTCTTTTGAACAGCCCTACCTGTGGGCATG
CCTCAAAAACACCTCTGGTACTACCTTCTTTCTCTCTGTGTGTTCTTGGTGGGCATGGTGTCTACATCTAGAGTCCCAAAGAACTTCTTTCCAT
TGACAAATTTCTTTCTTTTCTCTGACTCAGACCTCTAATTTGTGCCCAAACCAGGTTTCAAAGTACCTACTAGGGACCTGGGACTCTCTGGACA
CTTGCACAGGCCATGTATAATTCATATGGTGTCCTGTCCCTCTAGGGCTCAAATTGCCCCTGCTCTCCAACCAGCCTCAAGCTAAGGAAACCTC
TAAAATGGAGTCTGTCTTGTGCTGTCCCTTTGCGCCCTTCAGTCCCCACATCGGAGTCCTCCTGTGCCCTGCCAGCAAGGCCTTCACCTGGGGT
ATATAGCTCAGTGGGGAGTTCTTGTTTAGCCTTCACAAGGCTCTGTTCTCCAACCCCAGCACCCCATCCTGGGCAGCACACATACACACAGAGG
AAAGCAAACATCTATTTGCCTTTTGCCCTTTCTAGCCACAGGGTGGATGAAGTAGGACAGATTCTGCTTCTCCTCTGCCATTGCCTCCCTCAAC
CCTTCCCCAAGCCCACTTCCTGCTACCTCATCTAAAAGGTTCCGCCTACCTGTCTGCACAGACACCCCAGAAGACACACAAACACCCCAGAAGA
CACACCCTGAACTGCTTCTTGCTTACCATCCCATTCCAGCCGGAGTTAGTGGTGGCTGGGACCAGCTCTGGGGACCTCCATAGGTCATTGTTCT
ATGCCACAGATGTTGCTCCACCCTCTGTTTGCTACCCTGCTGCCTGCACCTCTCACCATTATTGATTTTACCCCTCACTCTACTCTCTGGACAC
TTGCACAGGCCATGTATAATTCATATGGTGTCCTGTCCCTCTAGGGTTCAAATTGCCCCTGCTCTCCAACCAGCCTCAAGCTAAGGAAACCTCT
AAAATGGAGTCTGCCTTGTGTTGTCCCTTTGCGCCCTTCAGTCCCCGAATCGAAGTCCTCCTGTGCCCTGCCAGCAAGGCCTTCACTCGCCTCT
CCCCTTAGTTGTAACCTTTCCCAGGGCAGAACAAGGTTAAGACAGAGTGTCACTGTATAGGTAGCCATGGTTGTCTTGAACTTATTATGTAAAC
CAGATTCGCCTCCAACTCAGAGCAAGCCTCTGGTCTCTGCCTCTGGAGTGCTAGGATTTCAGGCATTGGACACCACCCCCAGCTTCAGCCATAC
CATCTGCCTCAAGATCTTCTACCAGGTGCCCCTCTGACCAGGTGCCTCTGACCAGGTGCCTCTTTTACCAGGTGCCCCTCTGACCAGGATTCTG
CTGATCCAGACTCCCTCACACCTAGCTCAGGTTTCTTCATAAACACCATTTCCTCTGGGAATCCTTCTACTTCCCCTAAGAAGAGAGAGATTCC
TTCTTCCTGTTATTTTACAGTAATTGCTAAGGTACTCAGTTCTATTGCTAAGGAGGTTTCTAAACATTTCTGCTTAGAACGCCCTTCCCCTTCC
TGACAACTCTTGGAGGTAGAAAATGGTAATTATCTCCACTTCTCAGATAAACCAAGGCACAGAGAATGCCTAGAATTGCCAAGCTCACTTAATA
AGAAACAAAGCCAAAATTTAAATCCAGATCGTGTGACTTCAGTGTAGCTTTCAGACACCATACCATTCCACAGGAAGAGGCTATCCACCCTTTG
GTGTACGCTACAGCTATTTGTTTAACAGGTACCTCTCTCATTAGCCTTGGAAGTTCTGCAGACGTATAGACCATGTGGTCTCCAGTAGTAGGTA
TTCAATAAATATCTGCCTGGTGTCTGAATGTAGATTAGTCTCCTGTGTCCTCACACACTACGTACCACCCATTCCTGTCACCTGGTCCTGTGTG
CTTCTCCCTGGAATGTGCATTTGTCACTTTTCTTGTCCCTGTGGCCAAATATCACAAGAACAACTTATATTAGAAAGGTTTATTATGGGGGCTG
GAGGGATGGCTCAGCAGTTAAGAGCACTGACTGCTCTTCCAGAGGTCCTGAGTTCAATTCCCAGCAACCACATGGTGGCTCACAACCATCTGTA
ATGGGATCAGATGCCCTCTTCTGGTGTGTCTGGGGAGAGCAACAGTGTACTCACATATATAAAATAAATAAATAAATCTTTAAAAAAAGAAAGA
GGCCAGGTGGTGGTCGCGCACGCCTTTAATCCCAGCACTTGGGAGGCAGAGGCAGGTGGATTTCTGAGTTCAAGGCCAGCCTGGTCTACAAAGT
GAGTTCCAGGACAGCCAGGGCTACACAGAGAAACCCTGTCTCGAAAAAAAAAAAAAAAAGAAAGAAAGAAAGAAAGAAAGAAAGAAAAGAAAGA
TTTACTATGGCTCACAGTTCACAGGCCATGAAGGAAGGAAAGATGGTGGCAGGAGCTTTGGTTACATGTCAGCTGACCAGAAAACAGAGAAAGA
AAAATACAAGCAGGCCCTACCCAGACATATCCACAGGAGTATCTCTTAGGTAATTCTAAAGTCCAGTCACCACTAAGGATTAATTATCATATGT
GCTTATGTGGGTCCTAAACTTTCGTAGAAATGTATGTTGACACATATTTCTAGAGTGAAAGCTATCAGCAGATTTCCAACCAGTCCTTGAGGAA
CAGCCGCCTCAAATATTCCCAGGGTACTCCCATTCTCTCCTGGTCAGTGCCTCCTCAACAAACACAGTAGCCTACATCCGGAGTCTTTTCTGTA
TTTTGGACTTTCTTCTTCCCAATTCTACAGCCTAGCAGTACAGGGTTCTGTTTGGGGTTCCCTTACCAAATACCAAGGTGGTTCTCACATTCTG
ACTCACTCAGTACCTCCAGCCTCTCTGTGGTGCTTAAAAGTTCCTGCTGTCTTTGGGGCTAAATTTAAATGTCTCTTGGGGGTTGGGTGCTCCT
CCTCCATGCTTCCATGAGCTCTGACTTCTCTCGACAAGGTGCACCAGACATCTGAACTGTAATTACTAGGTTATTCACTGTGTCTCCCACATGG
GTGATTTTTGAGTCAACTGTTTGCTTTGTTTCTCTTTACGTGCTCCTAGCCTAGCTAGGCGCGATCCAAACATATAGAGCTCAGGTAAGGGTTT
GTTTAGAGATTCAACACACTAGTGACATCTCATGCCTCATTCATGGATCCTAAACACTGTGTGAAATGAATACTCGGAAGCTGGGGACAGTGAT
CAGGAAGTTCAAAACTGAATAAAGGCGCCGCAGGCATCAAAAAACCTAGACAGTAAATCCCTTCAAAGGGTAAGAATTAAGATGCAGGAGACTT
TTTTTTTTTTTTTTTTTTTTTAAATCATGGCGGCCCAGAGGGCGGGTCTAGATCGGGACACGCCTTCGAGCCAATGGCAGAGCTAGTTAGCCTT
CGTGGCTCAGCCCTCTTGGATGGGATTGCCCACTCCAGCTGCAAGACTACACTTCCCAGCGTGCCGCGCGGCCCGGTGACGCGGAGCCGGAAGT
GAGGAACATGAGGTTCTAGGGCGCGAGGGAAGCGGCTAGCGGGGGCGAGGGGGCGTGCACGTGAATCCCCTGGCCAGATCTCTGGCATGGCCGA
GGCCAGGAAGCGGCGGGAGCTGCTTCCCCTCATTTACCATCATCTGTTGCAAGCAGGCTACGTCCGCGCGGCGCGGGAAGTAAAGGAGCAGAGC
GGCCAGGTAAGCGTCAGATGGCCCAGTACAAGATCTAGAGAGCAGTAGCCCGCTCCCCTCCCGGGAGACCTGGCCAGCGGGAGTCAGAGATGCG
GGCTAGGGTGGAGGAAGAACATTAAGCTCTGCTCTACTCCCTGCGACTTATAGCCACTTCCCAGGGCTCAGTTTCCCCATGGGTGCAGTGGGCG
GGCCGGAAACTGGTCCAACTAGTGCAGCTTTGTAATTCCCGCCCGGGTTCCCGGTAGCGGCAGGTTTAAGTTTCCCTAGTATCTGGCCACGTGG
CTCTATGCAGTTTCCCTGGGACACCACATGGGAGTCCAGCTGGAGTGGATTGTCACCACTGTTGTTGGGAACACGGAGACGAAGGTCCCCTAAG
TTGATGATCTAGAATGCAGGGCGTGCAGGCAGGCCCTTGGCTGTCTTCGGTTATGACAAGACTTGAACCCGTGGTGCGGTGATTTCAAAGTTCA
TTCATTTGGCAACTTTTGTTTTGTTTTGTTTTTTCGAGACAGGGTTTCTCTGTATAGCCCTGGCTGTCCTGGAACTCACTCTGTAGACAGGCTG
GCCTCGAACTCAGAAATCCGCCTGCCTCTGCCTCCCAAGTGCTGGGATTAAAGGCGTGCGCCACCACTGCCCGGCTGGCAACTTTTAATTTGGC
CCTGTCGTGCGGATGATGAAATGGGACGCGCCAGTTTCAGACTCCTCTGCCCGTCTCACAGCCTAATAGCTGGTACAAAAAAAAAAAAAAAAAA
AAAAAACCCAAAGTGACTGTACAGTTAACATATTAAGCTATAGAACGAGAAATTGGAGATGCTAAAACATGGGTGGAAGAACCTGGGTGGGAAA
TATCCAGGACTGCTTCCCTAAGGATGTAGTAGCTGATCTGAGATCTCGAGGGAGATGGGTATTAGAAGCTCTGATGCGAGGCTTCTGAGTGTCC
TAGCCACCAGAAAGTTTGCTGAGCCTGAAGTTTGAAATACATGACTTGGAATGGAGTCTCCCAAAGCAGACAGACAGGAATGGCTGATGGGTAG
TCTTCCCAGAACTGTGTGTGATTAAGTCACTGGTGAAATGGATATTGACCTGGAGGATCCCGGGTGTTGTAGTGTCTGCCTTTAATCCCAGCAC
TCTAGAGGTAGAAGCAGGTAGATCTATTTTTTTTGGGGGGGGGGGCAGGGGGGTGTTTTGAGACAGGGTTTCTCTGTATAGCTGGCCTTGAACT
CAGAAAGCCACCTGCCTCTGCCTCCCAAGTGCTGGAATTAAAGGCATGCGCAACCACCGCCCAGTTGGTAGATCTCTTAAGTTCAAAGCTAGCC
TGGTCTACATAGTGAGTTCAAGACCAGCCAAGGTTTGCATAATGAGACCCTATCTCAAAAAAAAAAAAAAAACCTTAAGCTGGGGTTGGGTGCA
CCCTGAGTTGGCCCATAACTTTAATCCCATCACTCTGGGGACCAAAAAGGATGGATTTCTGTGAGTTCAAGGCCGGCCTGATCTACATAGTGAG
TTCCAGGACAGCCAAGGCTACACAGAGAAACTCTGTCTTGAAAAACAAAAAAACAGACTTAAAGCCCAAAGTTGCTGGGCCCTTAAGATGTTAT
CTATTGCTTTCTTAATCTTCCTGTATGGTTCTCCATGTCCATTCATACTCAAACTATAAAACAGAGGAAATGGGTTATAGTGCCCATTGTTGTG
GTTCCTGTGCCCAAGCCAGAGTTCCCTGCTCTCACAGAAAAGATGCAAATACAAACAAACAAACATACATACATACTTAAATACATATATGTAT
GTGTATTTAAGTATGTATGTATGTGGCTTAGCATATTGTGGCAGGTGCTGGCCATAATAAGGCTAACAAGTGTCAGCCCTCGGTTATAATTAAG
ATGGTCAGAGAAGCTTTAATGGGGAAGGTGACGTTGGAGTAGAGACTAGAAGGAAATGAGGAGATAGGCTGTGTGGTTGGCAAGAGAGAGAAAG
TCTCAGTAGCAAGAATGGCAAAGCCCTGTTAGGAATTGGTAGCCCAATATACTTTGTCATGACGATACAGTTGGAGCAGGATGGAACTGACTGA
CTGACTGACTGGACTGTGCCCTTCAGACCTGACAGGGTTTCTCTGTATAGCCCTGGCTCTCCTGGAACTCACTCTATAGACCAGGCTGACCTTG
AACTCAGAGATCTGCCTGCCTCTTATCTCCTGGGAGTAGAGGGAGATACTATCCATTTCCCTCTTACATTTATGGTGCTGTGAAGAAGGATCCT
GAAGTTGGCAGAGGTAGAAGATGAGCTGAACGGTCCAATAGGTGCTCTCCCTGACTCCAGGCCAATCTGTTTCGGTGCTAGCATGTTCTTTCCT
TTGCACATGGCTCTTTGGAGTCCATTGGAGCTATTCTTCAGTCTTAATGGTCACACAGAGTGTGTCCTCACCTTAGGCCTGGATTCTACCTGTC
AACCTCTGTTTTAACTCCGACCCTAGCACTCAGTCTCTTTCCAGACATCCACTGGGTTCCGTTATGTCACGTGGAAGCTTTCAGGGTTTGGGCT
GTCTTGTATTTGGGGGAAGATTGACTAGCCAGGAAGCCCTGTCATGTGGCTTCCATCCCTGTACTGTAGTAGGATGCTGGGTAGTGCTAGTTTG
GACTGTTGAGTGCCTACCTCTCAGAGGCGCCCCTTTCCGATGTATCCTATTGAAAGGTTTGTAGCTGGAACTGTTTGTCCTTCTTGACTCTGGA
AGACTGTGAATGGTGCTGGTGAAGCCCAGAGGACCTGGAAGAGCAAACGGCATTTTCCAAAGCACTTGTTGCAGGCCCTGATGTCAGGGAGCAT
CAGGCCCAGGGACGATGCCTATCGTGTTGGGTATTTTTTTTGAAGCTCTCTCTCTCTCTCCATTTCTCTACAGAAGAGTTTCCTGACTCAGCCC
GTCACCCTTCTGGACATCTATACACACTGGCAACAGTAAGTCTGGTGGAATGGAAGGGAGGGAGCAGGGATACCCTAACACGTCATCTTTGCAT
TGAGCTAATATGTGAATGTGTTCTAATGGCCCACTGTGGGCATACTTGTCACCTTCATTTGGTCAGTTCCACCTCCCCCACTTTCCATGTGTGT
TCTGTTTTAAAGAGAGGATCTCACTATGTAGATCAGGCTACCCTTGAACTCACGGAGATCCTGTTGCTGCTGCTGCCTCTTGCATGCTGGGACA
ATTGGAGTGTGTCTGGGATTAAAGGCGCACGCCTTGGGAGGCAGAGGCAGCCTGGTTGGTCTACAAAGTGAGTTCCAGGACAGCCAGGGCTACA
CACAGAAACCCTGTCTCAAAAAAACAAAACAAAATAAAACAAAACAAAAAACCAAATGCTCACACCTTTAATCCCAGCACTCCGGGGATATTGA
GGTAGTCAGGTCTCTGAGTTCAAGTCCAGCCTCGTCTACAGAGTGAGTTCTAAGAGTCTCAAGAAATAAAGGAAAAGAAATGGAACAGCTGGGT
TTTTATTTTTTTATTTTTGTTTTGTTTTGTCTTTTCAAGACAGAGTCCCTGGGTAGCCCTGGCTGTCCTGGAACTCCCTCTGTAGACCAGGAAT
TCAAAGATCCACCAGCCTCTGCCACCCGAGTGCTGGGACTAAAAGGCATGAGCCTGCACGGCCTGGCTTGTTTCTTCTAGGTTGTAATCAATGC
GGCAGGCACAAAGTCAAGGAGATGCTAGTGGTAGTGAGAACTAGTGAAGGCAGGAGCCTGGCGCCCAACCTGAGCGCTTACCATCTGAGCTGCT
GAAAAGTGAGGTTGGTAGTGACAGTTCTATCATGGCAGCACCGAAGGCAGGGGATGCCAGGCTCCGGAGGAGTACTCGGGTCAGTGAAAATATT
GCCCACCCTCCCTCCATACTTTTCATGCTCCTCTGCTGCTCGACAAGCTCGGAGCACGGGTGCGTCCTTGCCCAGGTGTGTGGGTGTTGCTTTC
TGTGCTTCCTTCCCCAGCAAACTGTTGGAGCTGTGCCACACACAGTTTCCTGCCTCTGCCCCCTCTGTGGGTGAGGGGTACAGAGTGGGCCAAA
GATCTCACCCACTGAGCCAGTCCAGAGCAGCGATTACCTATCAAGTCAAACCCAGTAAACGAGCTACATGACCTTGAGCAACGTTTGTGACCTC
CTAGAATAACATCATCTGTAAAGTGAACTCTATCATCACGTATTGGGAAGAAGTTCAAACACAGTGATCTATTTGATAACAGTCCTAAAACTGG
CCAGTGAGATCTGTCCTGGCACTGGTCCTCAGATACTACATTCTTGATGTTACAGAGAACAAGCAAGAAGGGGGGGAAAAAAAATCCCTGTTCT
TGTGAAATTCACATTCTGTTGGGGGATGGGGTGGGGGGGTGGAACAAACTTATACCTGTAATAAAGCCTCTTCTAACAGCTTCCTGGCAGGTGG
CCTTCCTAGGAAGAAGGAACCTGGGTAACACAGCCCAAACTGTGGACAGCAGTGTCAAACCCAGCTAGGAAGAATGGGGCTTAATGACTTCCTG
CCGGTAGAAGGGTGGAATCAAAGTTCAAGGGACTAAGCTGTCTGAAGACTTACAGCACGCGTGCGCGCACACACACACACACACACACACACAC
ACACTCCCCACTCTGCTTCCTTCCAGACTCCAGTTCGATGGTGGTTCCTTTCTCTAGGTGTGTGCCAGATACTGGGTGGGATGCTGTATGCTCT
CTGGGGGCCTGTTTGTATAGTAGTGGAGTCGTCCAGAAATCAACCAGAGAAGGAAACGAAACTGAACGCCAGGGCGGAGTGCTGGGGGGAGGGG
GGAAGGGGTGTCAGCAAAGATGCTTCACGCCAAACTCGAGAGTAACGAGAGTGCTCCTTCCTCTTTGATGACTCTAGCTTGTGTCAAGTTAACT
GGCAAAACCAGTCAGAGCTGGGCGTGGTGGCGCACGCCTTTAATCCCAGCACTCGGGAGGCAGAGGCAGGCGGATTTCTGAGTTCGAGGCCAGC
CTGGTCTACAAAGTGAGTGCCAGGACAGCCAGGGCTACACAGAGAAAACCTGTCTCGAAAACCAAAAAAAAAAAAAAAAAAACCCAGTCAGGAC
AGCACCACAAGAGAAGGACGCAGTTCTAGGGTCGGGAGAACCTGGATGGTTCTGTGCAGCCTATGGGCTGTGGCCAGTCAGCCGATAGTAGTGA
GTGAGCTGCTGCCGTCCTGTCACCTCGTCGGCTGCTTGGGACCCTGAGACTGGTTAAGGTGCATTAGGAAGCGGGTGAAGAACAGATCATTTCT
GCACTGTGTCGGCGCCACTGTTTAAACTCTGTGTGCCCATTTCCTTTGAAAGACTGAATAGGTAAACAGGTATCTTTCCAAACCTCATGGATTT
GTCCCATCTCCCCTGCCCTGCAGGACCTCAGAGCTTGGCCAGAAGCAGAAGGCAGAGGATGATGAGACCCTTCAGGCTAAGAAGTCTCGAGTGT
CGGATCCTGTTAGCAGCTCAGAGAGCTCGGATCAGGAGAAGGAAGAGGAGGCAGCAACCGAAAGGGCCAAAGCCAGTAAGAGCCCTCCTTGCTG
TGTGAGATTGGGACCCGCCTTGGCAGTTGCGGGCTTCTAGTCTGCTCTACCGGGGTGTCTGCCTCTGAATCATTGTTTAGTGTCAAACAAGAAA
AGGTGGGGCTTCTCAGAGGGAGGTTGTAGTACCTGGGAGGCCTTCCTTTGGCAGGCATTTTAACCCCTGAGGGCAGGCATTCTAATCCTCTGAG
GATCCAAGGATGAATCCTAAGATCCCAGGAGGCTGGGTAAAGTGGCGCACACTTTTAATCTCAGCACAGAGACAAGTGAATCTGAGAATTTGAG
GCCAGCCTGGTCAACATAGTAAGTTCCAGGCCAACCAGGGCTACAAAGTGAGAACCTGTCTCCCCCCCCAATCTCCCTTCCCCCAAACAGGATG
GCCCACACAGTCAGTTGCTCAGTTCACTTCACAAGGACTGTTTCCACAGCTCCTGGATGCTGCTGCTAGAGATTGGCTAGGCATGGGGGGGTGG
GGGGGAGGCATTTGTGCAGGTGTTGAGTCCATTTCAGAAGGTTGATAGTTCTGGCTTCTGTGTGGCCCTGGGGCTGCTTTCAGACTTGCTGGTT
GTTTTAGTTACTGTTCTGCTGCTATGAGGAGGCACCGTGAGCAAAGCAACTGACATAAAAGGAAGCATTTAGCTGAAGGGCTGGCTTACAGTGT
CAGGGGAGTTCATCCATGATCCCCATAGCAGCAGCCAGGCAGGCATGGCACCGTAGCAGTTCCTGTGAGCTTACATCCTGATCTGTAGACAGTG
AACAGAAAGCTGGAGACTGGGCTTGGTGTAGGCCTTTGAGACCTGGAAGCGCACCCCCGTGATACACCTCCATCCACCAACCAGGAACCAAACA
TTCAAATATAGTCTCATTCAAACCACCATACTAATTGTCCTCTTATTTTGGCGGTATGTGGTGGGTCTGGTAGCTATGTGGCCTCTTCTCTCCT
GACAGAAGCAGCTAGAATGCTACACCCAGCAACTGGCTGTGTCTCTGTGTCCCACAAATATCATATTGCTTATACAGAAGACAGTTTCTTGATT
TTTAAGTAGGTTTTCTGCTTATAAAAGAAGTGCAGGATTTATTATAAAATGTTCATTACAGAACATTTGGAAGTTGTTTTAAGAAAAGGCAGGG
GAGAAGTCACCCACATTCTTGACATCTATACCCCCACAATCTTGTCTTTCATTATTCCTCCTGTGTATGTTCTGTCAGATGCTCAAGAGGACAT
TTTCGGTGCATATTTTATATCTTAATCTTAAATTATAAATGCAAAGCAGGTCCAGTTTATAGACAGAAGCACAGAGAAGGGAAATGTAAGAATC
CTTGTTGCCAGCCCCATCACTTCCTACCCATGTCTCTTGGTCGGCAGCCCATAAACCTGCCCTGTTGCTTCCAGTCAAACAGGAGTCCAGCTGT
GTGCATGTGGACTGACCCACAGCGGGCTTCAAACAGAAATGGCAAATGCTTGTGCTATTAGGTATCTGATAGTAATCGGTTTTTTTAAAAATAC
CTTACTCTTTAACAGTTTCATACAGTATGTGTTGATCATGCCCATGCCCAGCTCCCCCGGGGCACGCCCCCAGTATGTCCCCTCTCCTTAGTAC
CCTCTTTTTGTTTCCCGAGTTTGTTTTTTTATTGTTGCAATCAACTGGCTGGATCCAGTTAGTGCTGCCTGCAGGGTGTTGACTGATCCTGTGT
AGGTCACCGGGCTACATCAGGTTCATGAGTATGACCTTGTCGTGACCATGTTTCATCAGCTTTGCATTCTTTTGTTTTTGTTTTTGTTTTTTTG
TTGTTGTTATTGTTTTGGGTTTTTTTTTGTTTTTCGAGACAGGATTTCTCTATGTAGCCCTAGCTGTCCTGGAACTCACTCTGTAGACCAGGCC
GGCCTCTAACTCAGAAATCCACCTGCCTCTGCCTCCCAAGTGCTGGGATTAAAGGTGTGCACCACCACTGCCCAGCCAGCTCTGCATTCTTTTT
TTTTTTTTAATATTTTTTTTATTAGGTATTTTCCTCATTTACATTTCCAATGCTATCCCAAAAGTCCCCCATACCCTTCCCCCCACTCCCCTAC
CCACCCACTCCCACTTTTTGGCCCTGGCGCAGCTCTGCATTCTTAACACCATCTATTCTATAATGCTCCCTGAGCCATGTAGGCTTGATAAATG
TCCCACTGAGGGCTAAGAGCTCAGGTGTCACTCAGTCTCAACTTTGACAAGTTAGGAGTCTCTGCATTGCTATTGCAGAAAGGTGAATGTGTGT
GCATGCGTGTGTTTGAAATGTTCTCATGGCAAACTGACAGTAGTAAGTCCCATCACTTATACCCCCAGCCTACAGTCTTGAGCTAGTAGTCACT
TTTAAGAATTATTTATTTTATATATATATATATATATATATATATANNNNNNNNNNNNNNNNNNNNNNNNNNNNNNNNNNNNNNNNNNNNNNNN
NNNNNNNNNNNNNNNNNNNNNNNNNNNNNNNNNNNNCCCGGTATCTAGACACACCAGAAGAGGGCATCGGATCCCATTAACAGATGGTTGTGAG
CCACCATGTGGTTGCTGGGAATTGAACTCAGGACCTCTGGAAGAGCAGTCAGTGCTCTTAACCATTAAGCCATCTCTCCAGCCCTATAATTGAC
TTTTTACATTTTGGGTTTTTGTTGTTTCCCCCTAGTTCTTCTTGCGACAGGGTCCTGATGTGTACCCCAGACTGGCCTCAAACTCAGGGACGTC
CTGCCTCAGCTTTCTGGGTGTCTGGCTTAATTTAAGAGTCCTCAGAAGTATTTATGGGTAACATGACAGGGTGTGAAGTTCTTCAAAATAATGT
ATGATGGGGAAGGGAAAATGAGACATTGGGTGAACTGAGGTTGGCTACGGGTTGATATAAAGTTACAATAACAGCTGAGGCTGCATATCATACA
TACACACACACACACAAAAGCTGGAGTTAGGTGACTTTGGTGTACTTCTGAATATTTTGGAAACTTTGCTCATGTGCAGAAAAGGGAGTGTCAA
AGAGCCCCGAAATGAATTCAGTCCTGCCGTTCATTTCAACACCTGTCTCTTTAGTGATAACTTCTTCCCCTGAATGCCTGAGATCCAAAGCACC
GTTTCTTAAAACCCTCGAGAGTCTGAATCTCAGTGTCTCCTACTAGTCCCAGGCTCCTGGGTCGGCACAATTGACGACCACATAGCTTCCTCTA
TGGCCTGGGGCTGGCTGCTTGACCACTGCCCTGCCTGCCAGTGACTTATCAGGACTGATGATGGTTGGCACCCAACCCAAAGAGTAGTCACCAG
AGTTGGGCATGTCTTGTGGTGGTGGGTGGTAAGATTATAAGCCTGTCCTTTCCCTCTGGGGGCCTCCAGATCTCATGCCACAGAACAGCTGGGA
GTCCCTCGGGGATGCAGGCACAGTAACCACCATGGGTTCTGGGCGAGGCCTTCTCATGGTTCTGGGCTAGGCCTCAGGTCCTCATACTAGCACC
AAGCAACTAGTACCTGTAGGACCATTAGGTGGTGTAAAGTCTGCCCATCTTCTTAGATGAGAAGAGCCCACCTTGCTCACAGCGTTTGTGTCTT
GCAGCCCCAAGACCGACACCTGTCAATTCTGCAACCGCAGCTTTGCCATCAAAAGTAAAAGAAAAGGTGAGTTTATTTCCGAGTTACTCATTAC
CTGTGGAAGCTGTATCCAGTGGAGCATAGTCTGCCGTGTCAGGATAGGGTCGTGTGGTTCAGCGTGTGTCTCTAGGTGTCTGTGACTTCATCTA
GCTATGCCTCGGGTGCCTTTTCTGTGAAACAGAAGTGATGCCTCAAACCACACACTTGGGCAAGTGCCTTCCTCTGTCGTCCTTGCACCCACTC
ACCGGTTGTATAAACAGCTCCCCTCCAGTCCCTGGTGTGCTACTAGGCCGTCAGTACCATCATAAGGAATGCACTGTACACATTTTCTAGATCA
AAAAATACTTCAAAAATGTCATTTTCCAGTAATCCATACACACTGTTGCAGACACATAAATGATGTGTCACCCGAACCAGGCGATAGCTATCGT
ATGTAAAAGCAATGATGAAATAATAATAGTATCACAGTGAACTATAGCTTCATGTAAAGTAGGAACTACTCTGACCCAGAAGCAGTAATGCTCC
CTTAATGCTTGTGTGGAAGGCATCTTTGTCTTGCTGTAGAGATGAGATGACAAACCAGTGGACTGTGAAAGGCCAGAGCTGGCTGCTCTTAGTC
TGTGGGAGAGGTGGGACACTCAGAGAGCTCGGAAGTCGCCTTGTAGGACCCAGTGTCCTCCTGATGCTTTTCACATGTCCTGTCATGACAGAGT
GCTCATCCCTCCCATACTCTGTAGGGAAAGACCAAGACAGCCAACAAGACGGTGAACTCTGTGTCGCACCCTGGGTCCGGAAAGACGGTGGTCC
ACCTGCTCTCTGGGAAGTCACCCAAAAAGTCAGCAGAGCCCTTGGCAAACACTGTCTTGGCCTCAGAAACTGAGGAGGAGGGCAATGCCCAAGC
CCTCGGACCCACTGCCAAGTCTGGTGAGACCCCCAGAGCCTGGGGCAAGGGGTCAGGACTGAACACTGTGGAGAGACATTCTGAGTGTGGGTTT
GTCTCTGACAGCCAGGGTCTTACAACAGCCATTTCCACCTTTTCTGACTTCCTAGACTATTTTAAATTTACTTTTATTTTATATGCATCGGTGA
TTTGCCTGCATGTACATCTGTATGAGATATCACACTTTGTAGTTATAGACAGTTGTGAACTGCCATGTAGGTGCTGGGAGTTGAACCCAGGTCC
TCTGGAAGAGGAGTCAGTGCTCTTAACCTCTAAGCCATCTTTCCAGCCCGCTATATGGGCTTTTTAGAGGGTGGCGTTTCCGGCCTTCTCTCTC
TGGTGGATTATAGGGAACACTGTGGTCACCTGGAAACTAAATGAAAAGGTGTAGGTCTTGATGCAAAATAGGCCTTTGCCCAGCTTGTCCCCCA
TTCCCCAACTTGATAGCAAATAGTGACTTGATTAACTAGCAGGTACTTCTAGCCTTTCCAAGACCTCAGAGAGGCCTGCAAAAATAGGTAGTGA
GGGTCCCTGTTCCAGCTAGGGGACTTTGGGTCAGAGCAGATAGCAAGCCCTGTACAGTTGAGAAGCATGTGCTACCTAGGTTTGACTAACAACC
TGCATGGAGGCTCTGGGAGGGGAGAGGACTGTGGGAAGGATCCTTAGTCCCCTGTGTCCCCCCCCTCAGGAACGGTGTCAGCGGGCCAAGGCAG
CAGTTCCAGTGAAGATTCCTCCATCTCAAGCGATGAGACAGATGTCGAGGTAATTGCCACCCATCCCCAGGGATTGATCTCTTCAAGCTTCTGA
CCCTCTCTTGCCAGTGTTCAGATCCCAGTGGCCAGTCATCAGCCCAGCAGTTGTGTCCGACAGCTGCATGGTTACAGACAGGGCTAGGCAGTTG
GAGAATGAGGACCTCAGTACTGCTCTGGATATGCTGGGTATCAGAGTCCAGTGCTGGGAGAGGAAGACACGGGAGCAGAGACCTGAGTAGGAGT
AACTGGGACATGTGGCCAGGGGTAGGACTGCCTCGAGGATTCTGAGCCCAGTGGTGAATGTGCGTTTGGGGATAGAATTGGATGGGATCCTTGG
TCTGCAGCCTTGTCTCTTTGTAGGATCGTTGGGGGGGTGGGGGGTCATCACAGGGTTTTATGCACCGAAGTGAGGTGGCCTGGCTCGCATCTCA
AAAAGATTGCTGTAGCGTGGCCTGGAGGAAGATTTAGAGTAAAATTAGTGAGGCCCACTGGCAGACTGTCAGGTAACAGCCACAGGTGCCAGTG
GCAGGAACCAGTATGCCCCATATGTATGACATATATTATTTGGCATAATAACCAACCTCTACCCCAGTACAAAGCCACAAGCTTATAAAAACAA
AAGACAAAAACCATGAGGGTGTTTATATTCCAGTTGTTGGATCTTGGGCATGAACTTTGTAAATCACAAGACTGTATCACACTTTCAAAAGGTT
GGACATTTAAGGGGGTAGCAGGAGCCAGGGATAGACTGTGCCTACGCAGCTGCCCCACCAAACCCAGTGGCCCTGTGTAGCCCGAGCCATCCCC
TTCTGTTCAAGACTTGACCACAGCTGTTCCCTGCCTGCCGTCTCTCTGTTGGGCCCTGAGTGTAATAAGGCCCACGGGATTCCTCTGTGTCCCT
TTACTCCAAGCCTTGCTCCCACAAATCCAGCTCCTACGTATACGTATACAGCACGTGTACAGCACTGGCAACAGGAAACCAGCGCGGAGCTCCT
GCCGCTGCGTTTGAAAGAGGGTGGTGCCATAGGCTGGTGTGGGGCGTGAGGGGCAGCGTGAAACAGGCGCTGACTGGCCTGCTGGCTACCTCAG
GCCTGTCGGGATTTTGGAATGCTAAGGAAGTTCCAGGAAGAAGTTCAAGTCAGTGCAGATCCAGGCTCCTCTGTCCGGAAAGTACCTCAGTCAG
ATGCTTTTTAGTTGAGTGGCCCCTCAGGATGGACCCTCTTATAAACATGTCAGTGGGCAGGCAGGTGCGGTGGCCGAGTTCTGCCCCAAAGGTA
GCCAGGGGTCCTTATAAGCCTTTTGTGCTGCCCTTAAATGATCTGTGCCTTTTTAGGAGAAGGGTGTAAGATTCTGTCTGCCTCTGGGAGATGG
AAAGGAACATGCTTTTAAGAAGGGGCTTGTATTCCTTTTCTGTTGCTAAGAACAGCCCCCATAGGCTCATCTATCTGAATGCTTGGTCACCAGG
GAGTGGAACTATTTGAAAGGATTACAAGGGTTAGGAGGTGTGGCCTTGTTGGAGAAACCCCATCACCGCTGGGGGTGGGCTCTGAGGTCTCAAA
GGTTTCCAAAGTCCTTTTGTCTTTGTCTACCTGTGGATCAGGCTGCAGCTCCCAGCTACTTCTCCAGCAACACGTTCTTCCTTTTAAACGACCA
CCTTGGTCACGGCGTCTCTGCACAGCAATAGGGCAGTGACTCAGACGCCAAAGCAAGTTTTTTAAGAAAAAAGTTTAGTTGAACTTATGGTTTC
AAAGGGTTAAGAGTTTGTGACGGCAGAGCAAAGGCACAAGAACTGGAACCGCTCGGAGCTCGAACCCCGATTCACAAGCAGGAGGCAGTGAGAA
AACGCAGGGCATAAGCCTACCCCAGTGACACACGCCCTCCAGCGGGGCAAACACTTCTCGTAGTTGGGAGCCTATGGGGCCGTTCCCATTCAGA
TTGGCAGAGAGCTGACAGCAGAGGGGGAAGGCTCTTCATGTGCTGCATCTCTTGCCTGCTTCTAGGTGAAATCTCCAGCAAAACCAGCCCAGGC
CAAAGCTTCAGCAGCCCCTGCCAAGGATCCTCCAGCAAGAACAGCCCCAGGCCCTACCAAGTTAGGGAATGTGGCGCCCACACCTGCTAAACCA
GCCAGGGCGGCAGCGGCAGCTGCTGCTGCTGCTGTGGCTGCTGCTGCTGCTGCAGCAGCAGAAGAGTCTGAGAGCAGTGAGGAGGACTCAGACA
GTGAGGACGAGGCCCCTGCTGGTCTGCCCAGCCAGGTGAGTCCAGGGGCTGCTATCCGTGACCCGCTGCCTGTAGTTCCCCCCCCCCCCATGCT
GGCAAAGCCACTGTGTGATGGAGAACTCCTGAAGAGGGCCCATTCTAGAGAGAGAAGCAATGGCAACTGGCCAGGGGGCTTCGGTGCCTGTGGA
AACGTCCACTGGGCCCACACCGCAGCCAGAGTGGCTGATGCCTTTGGGGAGTTGGGGGGTTGTCCTGCACCTACTCTGGTGATGATGTTAATTT
TCTTGGTTTTCGTGTGTGGTCAGTGTAGCTGCCCTCAGCACAGCTGCTCGGAAGAGACCTGAGGCTTTCTTCATTCTGAGTCGGTTTCCCTATA
GCCCAAGCTGGCCTCTAACGCATTCTCTTCCTGCCTGAGCGCCCCAAGTTTGGGGGCTACAGGCACGTGCTATCTTGCTGTCTTAAGTTTTCTA
TCGCTTCAAAGAGTCGTCATCACAAAGCAACTTATAAAAGCGAGAATTCAAATGGGTGCTTGCAGTTCCATGGCCGTCCTGACTGAGAACATGG
TGTCAGCCAGGCATGGCACTGGAACAGTAGCTAAAAGCCTTAAAACTGGTCCACAGGCAGAGAGAACGCTACCTTCAAAGCCATTTAGTACACC
TTCTCTAATAAAGCCAGGCCTTCCAAACGCTCCCACCGATGGAAGGGGTGGGGATGGGGGAGACACAGCAAGTATTCAGATATCACATGTGTCC
CAGTGAGTCCTGAGAATGTTCAAGGGCTTGGTTCTCTCTTTAGCCAAACCAGACCCTGAGCCGGCAACCACCAGAGAGAATCTCTTTTGTTCCT
CTTCTGGGGCCTTTCCCATGGAGTGTAATTCAGATAGCAGTCTCACAGTCCTGCACACATGCTGGGCGGAGCAGAAAGGGCTGGAAAGCTTTTA
GAGGTAGAACAAGAAGAAGTGAAGGGGTCTGTATCCAGGACTGGGGCAGGGGTAGGGGGTGGGGCGGGGGCATGGCAGTTATTAAAATGTTAAA
GAAGAGTTGGTTGACAACATGAAGTGGACAAGGAAGGACCCAGAAGGAGATGTGACCACAGACCTATAGTTGAAGGGTGTAGAGGATATAGTTG
GCTGCTGAAGTTCTGTGGCAATAACTTGGGACCCAGCCTACTTGGGGCTGCATTGTGGGTATTGGTTCATGTCTGAAGAGAGGAGCCAAATGCA
GCTTGTGTACAATTACTGCCCCTCCACACAGAAGGCCTTAGAAGGTCCAAAGCCATTTATTTTCTAGGAAGCTTAGGGCAGAGCGGACAAGGCC
GTCATGAGAAGACTGTAGAAGCTTGTAGCCACCCTACCAAACAGGGAGGCAGTGGTGAGCCTTTGGCTGAGAACAGTGAGGAGAATGGATAAAG
AGGAGGCCAGTGAAGGGACTGCATCTAGAACAGTAGTTCTCAGCCTCCCTCATGCTGTGAGCCAATACAGTTCCTCATGTTGTGGGGACCCCCA
ACCACAAAATCATTTCATGGCTACTTCATAACTGTAATTTTGCTACTGCTATGAATCAAAATGTAAATATCTGGTATGCAAGATATCTGATGTG
GGTCGTGACCCACAGGATGAAGACAGCTGATCTAGGAGTCCTGTCTACCACTGGAAGCCCTGGGGAGTTTGAGCCTTTTTCCATGCTCAGGCTG
TTCTTGAAGAACTTTGCATACACCCCTTCTCTGCCTTGAGCATTGCTGGCTAGTTAATGAGCCGGACAGTCTCACAAGCCAGTGCTTGTACCCA
CAGAACAGACTATTCCAGCTAAGGATTTAACCATTTACGTGCTAGGGCTCTGTTCAGGGCCAGAATGAAGGCCACTATATGGTGTCACTGGGTG
CTGAGGAGGTCAGTGCTCAGGAAGCCGAGGGCCAGCCGGGGTGGCTGGGGCACCAGTGAAGATGAGAAAGGAAAGTGTTATCTCCAGAACCTCT
GGGCTTCTTCCTGATGGCATCACCTAAGGACTGAAAAAGAAGAACGGGCTATTCTTTCTCTTCACCAGGTAAAAGCCTCTGGAAAAGGTCCCCA
TGTCAGAGCCGACTCGGTGTCTGCCAAGGGGATCTCTGGGAAAGGGCCCATCTTAGCAACCCCAGGGAAGACTGGGCCTGCAGCCACCCAGGCC
AAGGCAGAAAGGCCAGAGAAGGACTCGGAAACCAGCAGTGAGGACGATTCTGATAGTGAGGATGAAATGCCAGTCACTGTGAATACTCCTCAGG
TAAAGCCTGGGGGGAGAAGGGAGGCATTATAGCCCAGACCTGAAGGCTGCTAACCTGTCTCCTCAGCTGGTCCCAGCCCCTGTCCCTTCTCCTC
AGCTGGGCCCAGCCCCTGTCCCTTCTCAGCTGTGCCCAGCCCCTGTCCCTTCTCAGCTGGTCCTAACCCCGTCCCTTCTCTTCAGCTGGGCCCA
GCCCCTGTCCCTTCTCCTCAGCTGTGCCCAGCCCCTGTCCCTTCTCCTCAGCTGGTCCTAACCCCTGTCCCTTCTCCTCAGCTGGGCCCAGCCC
CTGTCCCTTCTCCTCAACTGGTCCTAACCCCTGTCCCTTCTCCTCAGCTGGGCCCAACCCCTGTCCCTTCTCAGTTAGTCCCAGCTCCCATCCC
TTCTCCTCAGCAGGTCCCAGCCCCCATCCCTTTTTACTGGTAAGGCTCCCTGCTCCTGTCAGGTCTCTGCCCACATCTGCCTAATGATTTACTC
CTCAATTTCTCATACCAGGCAAGGACTTCTGGGAAGAGCCCTCGGGCCAGAGGTACCTCAGCCCCCGCCAAGGAGTCATCCCAGAAAGGGGCTC
CTGCAGTCACCCCTGGAAAGGCAAGGCCTGTGGCAGCCCAGGCAGGGAAACCAGAAGCCAAGAGCAGTGAGGAGTCAGAGAGTGACAGTGGGGA
GACACCAGCTGCTGCGACTCTGACCACGAGTCCTGCCAAGGTGAGGCCAGGTGTGCCTTGTGCTCTGCCTAGAAAGGAAGGCCTCCTTCTTCAA
AACCAGAGCACGTCCCCTGATCTTGCCCTCTGTCACTCCCAGGTGAAACCTTTGGGGAAGAGCTCCCAGGTCAGACCTGTTTCCACCGTCACCC
CGGGGTCATCGGGAAAAGGTGCCAACCTGCCCTGCCCTGGGAAGGTGGGGTCAGCAGCTCTCAGGGTCCAAATGGTAAAGAAAGAAGATGTCTC
GGAGAGCAGCAGTGCAGAGCTGGACAGTGACGGGCCTGGGAGCCCAGCCAAGGTGAGTCCTCAGAGGTCTCAGCCCGGGAGCCTACATGGCCCT
ACACCCCAGGTCTGTCGTCTGGGTCTCTAATTGCTGCCTGTCTCCTACCTGGGGCTCCCACTGATCTCATTCCAGGCAAAGGCCTCCCTTGCGC
TCCCTCAGAAGGTGAGGCCTGTGGCCACCCAGGTCAAGACTGACAGGGGCAAAGGCCACTCAGGGAGCAGTGAGGAGTCATCTGACAGCGAAGA
GGAGGCAGCACCAGCAGCCTCTGCTGCTCAGGTGGGGACCAGGGAAGAGAGGCAGTCTGGCTGTCCTGGCCCGCCCCAGTCAGAAACCCCACCT
CTCAGAATTAGATGGGTTCTGGTTAGTAAGGAGACCAGGGGGAGCTGCATCTCAGAACGAATTAGTCCAGGAGTCTCCCCCAACCTCCATCTGC
ACTTTCTCCACAGGCTAAGCCAGCTCTGGAAAAGCAGATGAAAGCTTCCTCTAGGAAAGGCACGCCTGCATCCGCAACAGGAGCGAGCACCTCG
TCCCATTGTAAGGCAGGAGCGGTGACCTCTTCAGCCAGCCTGTCATCCCCAGCTCTGGCCAAGGGCACCCAGAGGTCAGATGTGGACTCTTCCA
GTGAGTCTGAGTCAGAAGGAGCTGCTCCCAGCACCCCCAGGGTACAGGTAAGGGCTGGATTTACCCAGGTAGGCTCACTCCCAGCCCCCATGGG
GCATCTCTGGCCCTTGAGAAACTCTTTCTTCTCCTTGACTTTCTAGGGGAAGTCTGGGGGTAAGGGCCTCCAAGGGAAAGCTGCCTTGGGGCAA
GGGGTGGCCCCAGTGCACACTCAGAAGACAGGGCCTTCGGTCAAAGCTATGGCTCAGGAAGACTCAGAGAGCCTCGAGGAGGACTCCAGCAGTG
AGGAAGAGGATGAGACCCCAGCACAGGTGAGGTAGGGAGGAAGCAGCCTGAACCAAGACTGGGGATGAGCTCAGTGGAGGCTGCCCTTGGCCCT
AGGAGCACAGAATCCTGGGACTCAGGCTCAACTAAGTCTCACGTTCTCACACGCTCTTGTTTCCTGAGCCCCCTGGCTCTAGGTTCCTACACAT
CTGGGTGTGCCACGCATTCTGCCCACTGCCACTCTAGACAGAAGTCTGTGGCTTTGGCCTTGGGGAAGTTGCCACCTGGGGCAAGGTGTGATAT
AGTACACACCGTTACAGCAGGATAGGGATGTGCAGTAGGGCTAGCCAAGCATGGTACCCGAGATATTTTAAGAGGAGTGTCATGTCGGTGAGGA
ACTGAAAGTCGTCTGGTGAGGTAGAGGGTAGACTCTTTGCAGAAGCCAAGAAAGTTGGCTCGGGTCGCACCACAAGCAGGATTAAATGGCAGAG
GCCAAGAGCCAGGTTACCTGGGCTCAAGTCCAGTTCTATTCCTGGGGCCTTGGCTACAGTCCCATCTGTCATCAATCCACCCTTGTGGGTATGG
GTAAGGCCTCGCCTGCCGGAAGCCCGGGGACCTGCCTTCCTGGCCGTGGGCTAGGCTGCTGGGGGCAGAGTTGCAAGGCACACCACCTGGCCCG
AGAGAGCAGGAAATGAAAAGGAGCTTGTCACGGTCTGCGCTATGGGGGACCTTCCTTAAGTCCTAACTCTGTCGTACACATGAGAGGCATTGGG
AGTTGGAGCTACTTTGAAACTAACTAGATGGTGATATCTGAGTGAGTCGGGGCCTTTCTCAGGTCCACACTCACCGAATTGCACTCAGAGCCTA
TCAGTGTCTGTCTTACTCTGGCTGAGGCCATAGCTCCTAGCTGGGTGGTATAGTGTTTGCCTACCATGCACCAGGCCCTGGGTTCCATCTCCGG
CACAGCACTGACTCCGTAATGTGGGTTTGTACAAGCTGAACACCCTGACAGGCATGGGGGGGGGGGTGAGATTAAGCAGAAGCAATGACTCTAT
CGTGTTCTGTTAACCTGCCCAGTTCCTAGTTCCTGGGCTGAGACGGATGCTTGAGCTCTGCATTTCAGGGAGAAGAAAGCACAGATTGACGATT
CTATATGGCACTCAGCTTCCATTCTGTAGAGTAGAATTTAATGACAGACACGGAGTCTAGTTGAAAGGGAACCTAAAAAGCAGTTGTGTTTGGG
TAGGAGTATATTTAAAAGGCTTTACAGTGCTGAATTTGAGTGTGTGTTAGTGCCAGTTAGACTACTTAAACACGTAGTCTGTTTAATCTTTGCA
GAAATCCCATAGATAATGTTTTATTTTTACACTCCTTTTATAGAGATGAAAGTGAGGCCTGGTAAGATTAAGTGGCTTCTTCTTGGTTGTGTTT
TGTTTTTGGAATCAGGTCTCACTGCATAGCTCTGGCTGTCATGGAACTTGCTCTGTAGACCAGGCTGGCCTCAGACTCACAGAGCTATGACTAT
CCCTGCCTACCAAGTGCTGGTTAAAGGTGTGCACTGCCATACCTGGCATCAGGGACTTCCTTTTTTTTTTTTTTTTTTTTCTGAAACAGGGTTT
CTCTGTGTAGCCCTGGCTGTCCTGGAGCTCACTCTGTAGCCCAGGCTAGCCTCGAACCCAGAAATCCTCCTGCCTCTGCCTCCCAAGTGCTGGG
ATTAAAGGTGGGCACCACCATCGCCCAGCAATCTTTTTTTTTTTTTTTTTTTTTGGGTTTGGTTTTTCAAGACAGGGTTTCTCTGTGTAGCTCT
GGCTGTCCTGGAACTCACTCTGTAGACCAGGCTGGCCTCGAACTCAAAAATCCGCCTGCCTCTGCCTCCCGAGTGCTGGGATTAAAGGTGTGTG
CCACCATGCCTGGCTTGGCATCAGGGACTTTTTTTTTTTAAACATTTATTTATTTTATGTATATGAGTACACTGTAGCTGTCTTCAGACACATC
AGAAGAGGGCATTGGATCCCATTACAGATGGTTGTGAGCCACCATGTGGTTGCTGGGAATTGAACTCAGGACCTCTGGAAAAGCAGTCAGTGCT
TTTAACCACTGAGCCATCTCTTCAGCCCAAAATATTGGTACATCTTTTTTTTTTTTTTTTTTTTGGCTTTTTCAAGTCAGGGTTTTTCTGTATA
GCCCTGGGCTGTCCTGGAACTCACTCTGTGGACCAGGCTGGCCTCGAACTCAGAAATCTGCCTGCCTCTGCCTCCCAAGTGCTGGGATTAAAGG
CATGCGCCACCACTGCCTGGCTTGGCATCAGGGATTTCTTAAACTCACACTGCTGTTAGTTGGAAGGAGGAGCCAGCATCGGCTCAGTGTCTGC
AGCATCAGTGTTCTTTGATGACTGCTCTGTTGCCCTTTGCCCTTCCTAATTCCCTTCCCTTCCTTCCAGGCCACGCCCTTGGGGAGACTTCCTC
AGGCCAAAGCCAACCCACCTCCCACTAAGACACCTCCAGCGTCTGCATCTGGAAAAGCTGTGGCTGCTCCAACCAAGGCAAGTAGGACCAGAAA
CCACAAGATACGTTAGGATAAAATCTCAAAATCTGTAGTCCCACAGTGATCCAGCATGGACCACCCGCTGTCCCACCCCCTGTGATATTACAGC
CACACACTAGTAGAAGGATGACTGCCGCCCTTTCCTCCTCCAATACCATTGCTACCTCTCGATTCAGGGAAAACCACCTGTTCCGAACAGCACC
GTCTCTGCAAGGGGCCAGCGGTCTGTGCCAGCCGCGGGAAAAGCAGGGGCCCCAGCAACCCAAGCCCAGAAGGGTCCCGTGGCTGGCACAGGGG
AGGACTCAGAGAGCAGCAGTAAAGAGGAGTCTGACAGTGAAGAAGAGACGCCAGCCCAGGTACCCACCCAGCTGGACTTGGGGTTAGAGCACCA
TGTGTTTTGGCCCAGGCCTATAGGCACACTTGACATGCCTCTCCCCTTGCTGTTTCTCCAGATAAAACCTGTGGGGAAGACCTCTCAGGTCAGA
GCTGCCTCAGCCCCTGCCAAGGAGTCTCCTAAAAAAGGAGCCCATCCAGGAACCCCCGGCAAGACGGGATCTTCAGCTACCCAGGCCCAGCCAG
GGAAGACAGAGGACTCAGACAGCAGTAGTGAAGAGTCTGACAGTGACACAGAGATGCCATCAGCCCAGGTGAGCTCTGCCAGGCCCGAGAGCCA
CCGTCACCAACTCTGCTCATAAACAGATCGTGCCCCAGAGGGGAGAAAGAACAGATAGAAGTCCTAACTCCAGGATCCCTTGCCTCCAGGTCCT
CCCCACCATGCCCCTGGATGAAATGAGCTGTAAGTCCCAAACCAAGGCCATCCTAGTATAGGACATCCTAGGTACTCCTACAGCTCCGCAGGGG
CCTCTGCAGCACTGGGCACGGCAGTCCCATGCAAGCTGAGTCAGGTTCTGCTGAGGAACCTGGAGCCATCCTGCAAAGACACCCCTGTCAGAGT
CACCAGGAAGCTTGGGCTACGGCGCAAGTCTCTGTCTAAGAAGGGCCCGTCTCGCTCAGTGATGCCTAGGCCCAAGGAGTGGAAAAGAAAGAGA
AGCTGTCTCATACTCAAACCATTGTCCAGTTCTCGGCCCGGTTGGTTGCAGCGAGCAGTGGGGCTTGCTCTGGCTGACAGTCTCTAGTCTGAGC
TCAGGCAGCCTGGTAGAATCGGTACGTGATGGCCTCTGGTGTCGCACCTTAGGGAGGTGGCAGCAAGATCAGAAAGAAAATGGTTGGTCCTTGT
CAGTTTCAGCCGACCGTGGCTTTATAGAAACAAAGGGAATGTCACATATAAGTGGAGATTTTGTAGCTTCTCCTGAGAAACCCAGTCCTACTTG
CCGATTGAGCACAGGCCACCCGAGCAGGGAGACATAGAGCCCTCCCTGGGCCTCCCTTAAGTTGGCATCACCACCAGCTCTTCTTCACTGATTG
ACAAGTTCTGTGGCTTTGGACCACCCGGCCCGTGAAGAATGCTCTTAACAGGGCTTAAGAAGTGTCACTCTTCCGCATTTTCCCCTCACTGGGA
ACCCTCCCGTGTCACGTGCTTACTCAAGTCTTGTCCCCTCCAAAGGATGCTATCTCCCAGCCTGCCAGAGGCAAAGCGTCAGGTCCAGCGTCCC
CAGAGAAGAGCATAGAAGGGTCCTCAGAGAGCAGTGATGAGGATCTGCCCTCCGGCCAGGTAGGCTGTAGCTACTCTAAAGGCTGCCCCTGGCT
GGGCCAGGCTGCCGCTCTCTGTGAGAGGGTGCAGCTTCCCAACAGGGATAGTCTCACCACATGCAGGTAGCACTTCACAGCTCCTAGCTGTCTT
CTGATACACTCCTGGTGTGGTCGGGCCTCAGGCTTCACACCCCTGGCCCCACTCTGCTGCCCAGGAGCCTTTTAGGACTCTGATGTTTTATGTA
AACTGGAGTTGGTCATGGTGCCCAGGCACCTGCCTGAGCACTGTTAGGCGGGCACGTTGTCCTGGCGGCCTGTTCGGGGCCGGGGTTGAGGCCC
CTTATCTTCTCGTGAAGAAGTTTGAGGAACCCAGAACACTACTGCCCAAGCCTCTCTGGTCCCCATGGACAGTTGGGGCTCTAGATCCTCCCTT
GCGACCTTCGTTGGAATCTGTGGGCCCCACCCCAGGTCAGGCCTATGCAATTTATGGCACCTGCTCATTGTCTGCTGGTCCCCACTCCTGCCTG
GCCTTGTTCCCAAGGGTGAGGTCCGGGACACCTTCTCTGATTTCAGGAGCCCAACATAGCCACCAAGATGGTACAAGCTCTGTGTGAACCCAGG
CCTTTGTAGAGGCAGCACTGCCCTCTTTCTGAGGGAGTAGGGTATTTCCATTTGAAGGAGAGAGGGGCCTGTGACTCTGAGGCAGCTCAGAGAA
CATTTGAATCCTGGCAGTCTGCACTTTCTCCTGCCCAGCTGTCCCTTTAGCCCCCTTCCAGGCTTGGCTTTTGCCCTCTGGCTCTGCAGTCTTT
CTGAGGTACCTCCCTCACTCCTAAAGGACAGACAGCCAGTATGGAAGGTTGCCTTGGTTTTTCTCTGTGTGAGTAGACTTGCACAATTAAAATG
AGCATTATGCTAAAATTGAACCTTTAAAGTGGTCTTGCAGATCTGGGGGTCTCTATTTTGAAAAAAAACAAAGCCAATAATTTTCTAGGTTCCC
AGAAGGAATTCAGGGAAACGGGCACAGCCCAGGAAGCTGTGGTTTCCCTCTGGGAGAGTGCTAGCCTACGCGGGATTGCTGTCGCTGTTGGGCA
TTTATGAAGCACTTCTCTATGGAGAGCTGCAGATGGTCCTTCCTAGGGCTCCCCGTCTGGTTGGTTGTTTTTCATTAGCCTGTCCGTGGGAGAA
AAGGCCGGGTAGTCCAGCTCTGGGCCAGCTCTGATCCCAGGTTCTGTCCTGCAGCTCTGTGTAATGCCGTGTGGAGTGTAAGCCTCAAGCTGAG
GCTGGCTGGAACCCGGGGTGGCTACAAGTTAGAAAGAAGTGGGCATGTGAGGTAATGCAGGCACGAGACGGCATGGCTGATCCATTCTGTTGTA
GCCATGTATCGTACTGCGTCACGCACATAGTCATGCGTAACCTCCCACGTAAATTATTATTAAATGTATCAGCGTTTGCCTGCATGTATGTATG
TATGTGCACCACATGCCTGCCCGGTGCCTGTGGAGACGAGAAGAGGGTGTCAGATCCCTCTGGAACTAGAGGTACAGACAGTTGTGAGGTGCTC
TGTGAATGCTAGGAATCAAACCCAGGTCCTCTAACCTCCGAGCCATCTCTCCAGCCCCCTTAAATTGTTTTAAAGGCTACTTCAGCTGCTGTTT
TGCCGAAACAAAGGCATAGGCTATGTCCTTATTGAGTGAGAACAGGGGGCCTGTTAAAAAAAAATCTAAATTTTAGAATTAAGTCAAGGCTTGC
ATGGTTAGGTCTGGCTCCCAGAGCGCTTCCTTCCAGTCCTGTATCTTGAAACCAGTTTGCTGGTCGTCCTGGACGAGGTGCTTGTCCACTCTGA
GAGCCTCAGCCTTAGCTCCGAGTCAGACTGGGGTTTATAAACCTCAGGTCTCCTAGCTGCATCCCCAGAAAGTGTCGTTTCTAAGTCTCATGGG
GAAGGATGAGCCCCCAGGTAATAGTCATCTTCCTCCTCTCTGGGGGGGCGGGGAGGGGTCCTCAGGGGGTCCCAGTGCTGAGGACACACCCTCC
ACTGCACTGCACCTCTAGCCCCACAAAGCTGCTTTGAGGGAAGCTCTCGGTGACTGTCCCCTTCGACAGAGCTCCACCTCCCCTCTCTGCCCCA
GACTAACTGGAATAAGTAGATAGAAGCCCAGCTAAGACAGCGGGCAGTGGGCACCGCCCAAAAGGGCCCCAAATCTGCTTCTGTAAGCATCATT
CCTGCAAATAGGTAGGGTATCCCCCTAATCTGCTCTCAGCACCCCAGGGGGGTGGAGGTGAGATGCTCAGGTGGCTGTGGTGGTAGCGTCCTCT
TCCACCGCTTTGCCTCTCTGATCAAAGCACAGCCCACACCCACTGGGCTTTGTGCTTTCCCCAGGTGACCACACGCAGCACCCACCACAGAATG
AGGAGCAGAGGCGCTACAGACCTAAGCACTGCCCCTGTGCCCAGCCCACCCTCATCAGCCAGGCCGCTGCCTCCTCTATCGCCTGCCCGCTGCC
TCCTCTATCGCCTGCCCATCGCCTGTCGTCCCTGCCTCGAGATGGGGTGGTGTGGGCAGGTGGGGCTGGAGGAGGCTGTGCTGCAGAGCTGCTT
TTAACATTCCAAGACGCTATTGTTTGCCTCAGTGGGTTTGCTGCCTCTCTTGGTCCCCAACAATCTGTTCTTCTGTCTTCTCACATATATATAG
ATCCCCCTCCCTCCACCGCAAGCCTTCTCCCACTTTCCATCCTTCTCCTTCTCATCACGTGGGAAGGGAAGGCTCTGGAAGTGGCAGCTCAGAG
CAGCCGCGGGGGAGGCTGTTTGGCAGGGTAGGGAGGGCCTGAGCGCAGCGGTGCCGCCGCCACACTTGGTGGGTACCATAGTGCTAAAGTTTGT
TGCTTTCTCTGTGTCTCACAGCCCCTGGGGCGGTGGGAGCTTGGTAAAGCACTGCAGGCAGGAGGGTGTCCGTGGATAGAGACCCAGCTACCCC
TCAGGCAGCCCTCTCATTAGCCAGAGCACCAACAGCCTTCAGCCAGCACTGGCGTTTGGAGAGTAGAAAGTGGAATTCTAGTTCCCTACCTACT
GCCTCTGTACCTTCATCGGCTAGGACTCTGAAAGGAAATAGATCTGGAGTCCCCTGGTATGTTGGTGACATATTTGGGAATCTGGTCCACTGCC
AAATTGACCCTCCCAGTACTAGGATCTGCTGCTGCTCTGCCGTCTCAGTGAGATACAGAGCAGACCCACAGGTGAAGTGCATCAGGGCATGTTA
GAACATATCTGTAATCCCAGCATCCAGGAGACAAGGTAGGAATATCAGAGGCCAATGTGGTAGGCTATACAATGAGACCCTGTCTCAGGATTAA
AAAAGTAAAACTGAACCCTACGCATTATCCCAACCTGCAGCTGTCCCGGTCCTGAGCAGGTTGGCTTTGTGCACATTCTACTTGAGTCCTTGAC
TTTGAAGCTGGTCTCAGGCCCGTCACGTCATCCATCAGAATTTCAATATGCAACTCAAAATGATAAGAGTCTTCCTAGTCCTTGTAGACACAAC
CACAAGACAGTATCTCGGCTAGAAAGCTGACCGGCAAGCAGGCCTTGTGCCTGTTTCTCCAAAGTATCTGTCTGATGAGTGGCATTTTTCATGC
TTGTCCTGTTTAAGAGTGAGTCTAATAAATAAGGTTAGTATGTGGAGATCTGTTCCTCTAATTCCAGCAGTGGAGGCAGAGGCAGGTAGATTTC
TTCATCCAAGGATAGACTGGTCTACAGAGCAAAACCTGTCTCAAAGCACATAAGGGCCACATATACACATATATCCTGAGCGCTCTAGTCTGTT
GGCTGGCCTACCCATCCCACCCCCCCTGTTACTCCAGGCAGTTTGTGTACTAAAGAAACTAGTTCAGTATAACTGGGGTCTGCATGCTGAGCCA
CATCTCAGGGAGGATGCTGTCAGGGTCTCTGGGGGAAGGGACAATGAGACTCCAGGGAAATCATACAGTCACACTGTTACAGGAAATGCTTTTT
AGAATTCCCCACTCAGCAGGTGGCCATCTGATGTCACTAGAAGAAAGGCTAAATTAGACATTCCAGCTCTCGCCTTGCTTCCTTCCCATGTGGC
TGTGTGGCCTGGGCGCTCCTCTTCTCCCCTCTGGACTTAAGGCTTTCCTGTTAGGCCAGTGGAGTGGGTGGATACTGCTTAGCTTGGGGTCACT
GTGAAGGTCAGCTGGGCTCTAAGAGCTCTGAAGTGCTGTGCTGTGCTGGGTGTCTGGCTGTTATGGGGTGGGAGTGGGCCTAGAAGACCCCAAC
TCCTTGAAGTTTGCATTACAAAGCCCCTCCCTCACCCATTTCCTCTCCCCTTCCCCTGACCAAGCCTTTAATCAGAGGCGGGATGTTTCTGTTT
TTGGTTTTCAAGGCGATTAAATCCCCTCCAGTTTCTGTCAACCGTAACAGTAGTCCAGCTGTCCCAGCTCCTACCCCAGAAGGAGTCCAGGCTG
TGAACACCACAAAGAAGGCCTCAGGCACCACTGCCCAGAGCTCCTCCTCTGAGAGTGAGGACGGGGACGAGGACTTGATTCCTGCCACACAACC
CTCCACCTATGGTAAGCGCTGCTGCAGTGGGTGCTGTTCGGCCAGGACGGGCCCCAGCCACGCATGCCCTCCCCACTGAGGCCAGAAGGCACTA
ACCAGGTGGCCTAGCAGAGGCATTGGCGAGGACTGGGGACTCAGCCTTAGGCACTGTATTGTTCCCTTAATGAGGAAAGCTCGTCTGCCTCATT
TTGAAGGAATTACATTCGAGGCTTCTGTGTGCTGGCTCCAAGCCTGAAAGCCAGAGGGAGCATTCTGGTGGCTACAGGAACCAGGCTAGTCTAA
ACCAGAGCTCTGCTATAGCCACCTGGCCGTGGGGTACACTATTAGCCTGGCAGTGAGCTTCCATCCCCTTAGCATAGAAAAAGGAGACAGGTAA
CATTTTATACTTATTCTCTTCCCAGAACCTAAGGTGACTGAGTGTCTTTGTATGTGGCGAGGCCCTCTGGTAGCGCAATCATCTTCAGTTATAT
ATCAGGACACTGTGTCGTGCCGGGCGGTGGTGGCGCACGCCTTTAATCCCAGCACCTGGGAGGCAGAGGCAGGCGGATTTCCGAGTTTAAGGCC
AGCCTGATCTACAAAGAGAGTTCCAGGACAGCCAGGGCTATACAGAGAAACCCTGTCTCGAAAAACCAAAAAAAAAAAAAAAAAAAAAAAAAGG
ACACTGTGTCGTTAAGTATGGACAGCAAGATTCCTACTGTCAGCAAAATACTGCTGTTTATTTGGCGAGTACATAGTGGTGACATGAGCTCACA
TTAGGCTGTGGTAAACATCTCAGCACCCAGCAGCTCTCCCACTGGTCCTAACTGAGCAGTTGCTCACTGTGACCTGCACAAGAGAAAAAGATGA
GGGTAAGGCTTGGAGTCACCGCCACAGCAGCCATTTTCAAATGACATGGTGACAGCTGCTGTCTGGAAGGCTTGGGAAGCCAGCGTCCCCTTTA
TGATCCCTAAGCTCAGCATAGGTCCGAGGGAAGAGTGATCTGGTAATGCCTTGCTGGGGAGTCCTACGGCTTTGTATCCTGATGTGCCCCCCCT
TCTCCTCCGTTTCAGCTCTCAGAACCAGTGTGACGACCCGCGCAGCCCTCTCACGAGCAGCTTCCCAACCCAGCAAGAGTGAGCAGTCTAGCCG
GATGCCAAAAGGCAAGAAAGCAAAGGCGGCGGCGTCCGCTCAGGTACTGTCGGGTAAGAGAGGGCTGTGGTGGGGTCACTCTCTGCTGCCTTGC
CATGTGTCCTCAGGCCACACGCCAGTCACTAGCTTGCTCCCAGCCCCCTGGCACTGTCATACAGGCCAGGAGCCAAGCTCCCAAATCCCATGGT
GTTGTCCGGAAGAGCGGGCTGGGAGCCCGAAGGCAAGCGGAAGCCCCTGTCCTCCCAGCTTGCCTGAGTGTGGATTCGTTTTCTGGATTTGAGA
CGCTGAAACCGACTCTTGAGTTGCTTGCCTCTCTTAGTATTCGTAATGGAAGTGGCCTTACTGTTTCCTCCAGCCTTCACAGTCCAGTGCATTA
TTAATATCTAGGGCAAGATTAGTGGACAATATCTAAATAAAACAGGGCTCATCCCACCAGGGTTGGTCCAGGCCAGAACCTGGGTCCTCCAGCT
CCAAGTTCTTTGCTCTGGAGGCCTAATGGGGTTTGTTAACGTGAGGGAAGAGTCTATCGCACACCCAACACCCTAAGGGGCAGGAGAAGAAGGC
TGTACTGAAGCCCCTCCCAGCTTCGGGGTGCTACTGTGCCACCCTGTTACCCGGTGCATCACAAACTAGCCCAAAAAGAGCCTCTGGCGGCCGG
GTGATCCAGTGGGTAGTGAGATGGCCTGAGCATCTGCCCTGCTGGGCACCGAGGCTGCAGCAGGCACGAGACCTTCACGGAGTCCTAAACCAGC
AGAGACACAGCCATTACACAGAAAAAGCAGCATAAATTAGTTGTCACCAACTGCTAGGTGTTGCAAAGGGAACAGCACAGAACAGAGAATAATG
GGTGACCTGCTTTAGAAAAGGCGGGCAGGAAGGCTTCTCTGGGAACATGAGCAGAGCCTGCCCTGCAGGAAGGGAACCCAGAGGTACTAGAGCC
CTAGGTGATTGACATAGGGCGGGTAAGATAAAGTAGCAAGGGGGTCAGGCCATACCTGGACTGCTTTGTGTCTGCAGCTCCAGGAGGCTTAGCA
AAGGCTCATCTATTGTCTGTGTGCTCTTCCTGACTTCTAGCAGGATGGGAAGCAGGGGTGCCCTGAGGGACCACCTAGCCAGGGACACATCCCA
GAGGAGACACAGGCGATGGCCACTGGAGTTGGGGCTGCGCTGTCCTCCCCTGGGCCCAGATTAGAGAACAAAGCCATAGCTCACCACCTGGTAC
CCATCTTTCCAGCTGCGATGGCTCCTCTGTTCTCCACCTTGGCCTCAGGGCTTTTCTTGCTTGAACATCCCTGCCTCTTTACCCATGCCAGTCA
TTTCTGGCTCAGGGTAGCACAGATGCTGTTCTGAGAATCTATGGGTCTCAGGGCCTCCTCGTACCATCAGTGGATAACAGAGGGACCCTGGGTC
TCTCCCACTGGTGTTGAAAGCTCATTCTTAAAAAGCCAGTAAGCCGGGGGCTGGAGAGATGGCTCAGTGGTTAAGAGCACCGCCTGCTCTTCCA
GAGGTAATGAATTCAAATCCCAGCAAATACATGGTGGCCCACAACCTTCTGAAATGAGATATGATACCCTCTTCCAGTGTGTCTGAAGATAGCT
ACGGTGTACTTATATATAATAAATAAATCTTTTTTTTTTTTAAGCCAGTAAGCATGGGGGAGGGGCACAGCTTACTTACTGTGCAAGCATGAGG
CCCTGAGCTCATTCTCCTGTACCCACAGGGGAAAGCCAGGCATGGTAGTGGGCGTTTGTAATCCCAATACTGGGGCACGTTAACCAGCCAGCCT
AGCCTAATTGGTGAGCCCCAAGTCACATTAAAAGACAGAAGGCTTCATATGACTGGGTTCTCTTCTGCTCCACCTCAGTGAAAGGCCAGCATGG
TTGTGTGTGTAGTCAGCAGCCCCTCTTTCACCTCCCTGGGCCTCAGTGTGCTAGTGCCAGGTAAGGAGCCACAGTGCCCACCAGAGGGCTGTGG
GAAAGTCATAGAAAGCCATGCGTAGTGCTTCCCACGTGGAGCCTGGCCTGCCGTGTCCTTCTCACTGTAACTTAACCTTGTGTTCCTACTTTAC
CAAACTAGACCAGCAGTGCCGTGGAAACACTCCCCATGATGCCTCCCCAGAGCGCACCCATCCAGCCCAAAGCCACCAACAAGCTCGGGAAATC
CAAGCTCCCTGAGAAGCAGCAGCTTGCCCCAGGCTACCCCAAGGCCCCCAGGAGCTCGGAGGACAGCAGTGACACTTCTTCCGAGGACGAGGAG
GATGCCAAGAGACCCCAGATGCCCAAGTCGGCCCACAGGCTGGGTGAGGATTCCCAGAGGGAGGGTGGGAGATGAGGCACAGCCTGGTAGAACT
GTAGGCTCTGGCCTTCTCAGCCCACCCTGGCCTTGTCTCATCCCCTGATAATACCTTTACAACTTCAAAGACCCAACTGCTGTTCGACAGCTGG
CAGCTTCTTGGTATTAAGCTCCGGTTATTGAAGGCCCCAAGTCCCAGGACTCTGCTTCCCTTGGGGGGAGGGGGGGCAGAAAAGTGGGAGCCTC
AGGAACCAGAGGGGAAATGATGCCATTCGTGTGTCGGGCTAGGTGCTCCAGACTAGCATGGGTGGACAGCAGGAGGCTTCGTGCAGGAGGATGA
GGAACAGAGAAAGACCCAGGCCTCGGAGGCCTCCTGGGGAGCTCTGCCTGGCCTGAATAACAGGGCCGCCAGGGACTCACACTCAACGGGAAAC
CTCTGCTTCCACACTAGATCCAGACCCTTCCCAGAAGGAAACTGTGGTAGAGGAGACCCCTACAGAATCCAGCGAAGATGAGATGGTGGCCCCC
TCACAGGTAACTGCCAGGCAGGGCTGGAACTTGGAAGCTGCCTTTAGACTTCAGCCACCCCCTGGATGAGTGTCTAGATCCCCATTCCCAGGGC
CCTGGGTAAGGTCCTGTCAGTGGGGTGCCTCTAATCAATCGGATAGAACCTCACCTCATGCTCTGGGGCCCAGGGAAGAGATTCAGATGGATTC
TGAGACATGACCAGAGAAGACGACTTCTTAGGTCTCTCTTAAGGCTCTTCCTATACAGGACAGACTCCAGTGACTTTCTCACGTGTGGGGAGTG
GGTGCGTGTTGGGGTCAGTCCTCTCCTTCCACTTTCACGAAGGTTACTGGATTGTACTCAAGCTGTCAGGCTCGACTCGTGTCAGTGCCTCTAC
CCTCTGAGCCATCTTGCCAGCCCAAAAAACGTTAACCATCTTCTGTGATGGTACTAGTCCATTGGCAATAAGAAAGTCCCCTTTTAATGTGCCT
TACATATGCGTTAATTCACATAGCTTAGAAGGCACAAGCTGAAGGCCTATGTCCCCCGTGGGCTCAGTGCCGCCCGCTCATCCTTGGCTGGGTT
GGCCTGATCCGGGGTCACCGACTGATTCCCTTGAGCCTTGCCTCTGGGATACGGCTAGGGGCTCGATGCGTCTTTCACACTGGACTTCTTCAGT
CTCTCCTCTCAGGTTACATGACTCCCGGCTTGACTGTGGCTAATTCCCAGGCTTCAAAAGCTACTCCTAGGCCAGACTCCAACTCCTTAGCTTC
TTCTGCCCCGGCCACCAAAGACAACCCGGATGGCAAGCAGAAGTCAAAATCCCAACACGCAGCAGACACCGCACTCCCTAAAACCGGTGAGTGG
GGACAGCAAGACATGGAGAAGCAGGGCTGCTGGTCCCTGCTTGTTATGGGCAGCATTTGTCTGTGTCCCTTCCAAGAGTCTCATATTCGAGCCT
GTGGGGTCCTCTGGGAACTAGAGGTACCCTTAAATGCAGCTGGCGCCCAGGACCAGGTTGCCAGCTCTGGGCAGTCTGGGAACAGATATAGCCA
GCCATTTGAAGCTATTTCTTTAAAGCTTGTGGAGGAGGCCTTGGCTCTCCGTCCGTCCCTACTGACTTCTCAGTCAGTGGACAAGGGTCCTGGG
TATAGGGACCCAGAATGACTCAGACTAGGCCAGCAGCCTTGTTTAGAGAATTCAATACCTAGAGGAGACCCTGGATAAGGGACAGGCCTCCGGG
GGCTGCTCTGGCTCACACTGCTGTAGCCTTGACAAGCTCCTGACCCTGTGTCTTAATCACACAAGGTAAGAGCAATGCCATCGTGCAGGGTCAA
AAGCAGAGCATAAAGAAAACTGTCACATGACATTTGGAGGGACCCAGGGGAAGGGACTGTTGGGAGTGCCCACATCCCTGACTTATATAACATG
AAGCATCCCGTCCCACTCCTGTCCGCTTCTCCTTAACCGCACTCACTGCTAGGGTTCAGCCCCTGTGCCCAGCATGTAGGCATTCCTTGCTGCA
CAGGTGACCTGGGAGGCCAGCGGGGGTTCTGGGCCCAGGCTCTGGGGGCTGGTAACTTCAGCTTCCCAGCGCTGGGTCAGAGGCGGAGCTGTTG
CTCACTTTCTTCGCCAGTGTTCTTGTCTATGTGAGAGGCGGGTGCGAGCGACAAGGAGACATTTTCGAGGGGGCTGTGGAAGGTTTTTTTTTTT
TTTTTTACACGTGTAGTCAGCACACAATTATCAAAGGCAAGCAGAGGCGTAGAAAATTCTAAACAAAGGCTGCACCAGAAGCCACTCTGGCAGG
CAGTAAACCTGCTTAGTCAGCCACTGCATGCATACACAGCATACTCAGGAGTGCCCCCCAATCTGCCTGTCGCCCCAGCCTTGATGGGCTAAGG
ACCCATGGTGTGTCTACAGACGGGAGCTGAGCATTGGTCTGTAGGACCCCCTCGTGTGTTATAACCCACAGTTCATGGCAGAAGACATCATTGT
ATGTCTAGCTTCTTCCTCTAAGGTGGGAAACAGCCTTGAGGGACTGTGACGCCTTGAGGGACTGTGACCTGGCCAAAGCCCTACACTAAGTTGA
TAAAGGCAGTCCTAGAACCAGTGTCACCCATGTCCCACCTACTGTGCCCTCCGTCTCATTAGCAGACTTCAGGTCCTCTCCTTAGCATTCTGGG
ATCTCTGTCGATCCACAAACATAGCTAAGCATAGGAGACAGATAGAGCAGAGTGACCCCTGGATCTCAGTTTCCCATTTATGCAGTTGTAAAGT
ACACCCCCTCAGTTGTCATGCATTGTGCAAGATCTCACCCTCAGCTTTCCAGACTTGTGACCTCCAAGACCTGTGATCTACAGGTAGGAAAGAG
GCCTCCTCGGGCTCCACGCCTCAGAAGCCCAAGAAGCTCAAGAAGAGCACCTCAAGCTCGCCGGCCCCCACACAGACACTGCCGAACAGCATCA
CCCAGCGCCTCCTGGAGCAGGCCTGGCCCCTGAGCGAGGCGCAGGTGCAGGCCTCTGTGGTGAAGGTCCTGACAGAGCTTCTGGAGCAGGAACG
GCTGAAGGCCACAGAGGCCATCAAGGAGAGTGGGAAGAAGAGCCAGAAGCGGAAGTTATCAGGGGACCTAGAAGCTGGGGCCCCAAAGAACAAG
AAGAAGAAGGAGCAGCCAGTGCCCAGGGCAAGCGCTGTTTCCCCAGAAAAGGCTCCCATGACTTCCAAGGCAAAATCAAAGCTTGACAAAGGGA
GTGCTGGTGGCAAGGGGAAGGGGTCTCCTGGCCCCCAAGGAGCCAAGGAGAAGCCCGACGGCGAGTTGCTGGGGATAAAGCTTGAGAGTGGCGA
GCAGAGCGACCCGAAGAGCAAGTCGAAAAAGAAGAAATCCCTCAAGAGTAAGTGACTGCTTTCCAGTACGCGCTGCCGGTGCAACCTGGGTGGC
AGGGCCCTGCCCCGGCTCTTTATCTCATTCTTTCCACAGAGAACAAGAGCCTGGGAAGTGGTTTGTCCAGAGTTTAACAAGTGTCTGGTGGCAA
AGGCAAAAGGAGACTGTAGAGCTGGCCTGCGTCCCCTGCCCCCACGGCCCCTTACAATGCCCAGTATTTAGCCTCAGGGTTTGGAAAACAAACT
CAACCCCGGCTTCACAACAGGGAGCTCTCTGCTCCAGCAGAGTCCACGGCCAGTCCCTGGGGTGTGGACTGTCCCCTGGGTTCTCATCCAGAGC
CCATCTTTACTCTAGAATTCAGTTCTTTGGTGAAAACAGCCATTCGTTGCCCTCCATGCGGGAACCTGCACCCAGCAGGACTTCTGAGTCACTC
ACCAGCCCTGGGCCTCGGGCAGTGTTGTTTTCCTTTTCTAAGGGGAAAGCAGGCTCTGAGAAGGAAAGACCACTGGCGCTAGGCAGTCCCTGCT
TTAGTTTTGTCTTAAGACAGGGCCTCACAATGTAGCCTTGACCGGCCTGGAACTTTCTGTGTAGAACAGGCTGTTCTCAAACTTACAGCAATCC
ACCTGCCTCTGCCTCCTGGGTGCTGGGATTAAAAGGGTACTCTACCACGCCCAGCATGGAAGTCCTGAGCACTGCCATTCTGTGGCAGGAGATG
TGTCACCTGATCTCTCCCAGGTTCTTGTCCCTTCCCTCACACTCAAGATTAGATAGATAGACTTGCATAGTTCTGAGGCCAGATTGTGTAGTCC
ACAGTCAGTAAGAGTGGAGCCTGGCACATGGATGGTATCCTGGCCCTATCAGGGCCTGATGTTAAGAGCCGCGAGCTGCCGTGGGCCTCCTGAC
GCTGACCCATCAGTGTCAAAATCTATTGCTCAGGAAGCTCGCTTTCTTCCCACAGAAAAAAAAGACAAGGAGAAAAAGGAAAAGAAGAAAGGAA
AAAAGTCCCTGGCCAAAGACTCTGCCTCGCCGATCCAGAAGAAGAAAAAGAAGAAGGTAGATTGAGTTCCTGAGGGGTCTCAGGGCTAGGAATT
CAAACCCTTCCCCTTCTAACACCTAGACCAGGCCCATGCCACCTTTCCAGTCCCTTAATCTAATGGACCTTGTGAGGAGGAGCAGGGGAGGGGT
GATGGGAGAGACCTCCACAGGCGGGACAATGGTCAGCTTTCAGGTTGGCTGGCCAGCGGGGAGCCCACTGAAGAAACAGCCAGCCAGCCGCTTC
CTGGGATCAGAAGGCAGTTCTGCCCAGGGCTGGTATCAGTGGGTCTCGATCCTTACACCTATGGGGGGCCGTGGATCCTTCGAAGGGAGTTCTG
TCCTGGACCTGTGGGACAGCGGTGGTGAGGAGAAGCCACAGAACTGATAGCTTGCTTCNNNNNNNNNNNNNNNNNNNNNNNNNNNNNNNNNNNN
NNNNNNNNNNNNNNNNNNNNNNNNNNNNNNNNNNNNNNNNNNNNNNNNNNNNNNNNNNNNNNNNNNNNNNNNNNNNNNNNNNNNNNNNNAGAGG
GAGGGAGGGAGGGAGGGAGAGAGAGAGAGAGAGAGAGAGAGAGAGAGAGAGAGAGAGAGAGAGAGAGAGAGACTTCTTTCCTCAGGTTGGTTGG
ACAGCAGCTGCTGCAGCATGCAGAGGGTCCACCCTGAGGGAGTCTGGTGCCTAAGCTAGCTGCCGCCCATCCCTCCCTTGGTTTTGTTCCCTTT
TGTGGAGATAAAGGTCGGCAAAGCTGACCAAAGCCTGGTTTGTTTTCTTCTCCTAGAATCTTGGCAGAGTGTGACCATCCATCCCCAGGCCTCT
GACCTCTGGCCAGCGTGAATTGGGCCTGGACTTTTTAACTTTCCCTCCCTCAGCAGAAGATGATGGCTGGCGCGTGCTGGCCAAACCAGTGAAC
CCGCAGGGAAGCTGCAGTACCAGGAGGAAGCGAGGTGGGACACACACCCCCTCTGAGTGCTACGTGACATGTGTATAGTATATCTATTTTTTTA
AGCGACTTGCCTCTCTCCCTTCAAATCCACCGTGCCCAGAGGCCTCCGGACCTCCCTCCATGTTATCTGCAGAGCCAGCAAGGTCCCGCGTGTG
GTTCATCCCACACCCTGGACCCCTGGCGCAGCCTGAAGCCTTGCCCCATCAATTTTTCCAGCTATTTTGGTTTTGTTTTTTAAAGAACTCAGAA
TAAAAGACTTTAAATATAAAGGTTTGCCTTCCCCATGCATCTGGGACTCGGACTGTTACTGGCTACTTAGGACAGACAGTGTAGTGACCCTGGA
CATGCACAGGTCAGTACTCAGGGCTCCTTCCTGACTTCAAGCCAAGGCCCTAGGTACTGTGAGTAGGACAGTTTGCTAAAGAGGAAGGCTCAGT
GAAGCTCCCCAGGGAGGGAGTTGATGCAGGGACGGCTCCCCGTAGGAAGTGGCCTATAAGCTTAAAAGGAGCTGAAGGTGGGTCAGACGCCAGG
TAGATGGCTCAAGTGACCAGGGGGCCTTTGGAAACAAGTTACGATGTGGAGGGAGGCAGTGGCGAACAGTGGTGGCTGGCATGAGAAGCGGGGA
AGACCCAGTGAGCTAGGCCTTGAGTCACCCTCTGTCTGGGGAACAGTTCTGTGCTGGTGACAGTAAGAAGTGGGCAGAGCTGAAGTATGTTGGA
ATAATCACTGAACATTCACCTCAACAAAACAAAAAACCAGTACAGAGAAGGAGCAGGTGCAAGTCTCGGGGACCCTGTGCTCAGAGCCTTGGGA
CGGGCACGCCATACCCAACAGTCAGCCATTCCATCCATTCTCAAGTGTGGATCAGAGTGTGGGATGTAGGTCTAGATCAGAATACAGAGAGCCT
CTCCTTGGCTCGGCTGACTCGCAGAAGTATTTAAACCTACAAAATGGAACAGCGTCCTTAACGTTCATCTCGGAGTCCCTGGTGGTGAGGGATC
CGCTCCCTTTTCCTGTGACAGTGGGCTAAAGCTGACAAGACACAGGTCCTGCCCAGACAGACAGCCACTGGCAGCCCCCACCTGCATCCATTCC
TGACACTAGGTCCCTGTGTCCACTGCCATCTGTCATCACACTTACGCTGTCCTTAGTCCAGAAATGGAATTGGGGACGGGAGGAATGGAAGCTA
GGACGTGATGAGATGTGATTTTAAAACCGAGCAGGAGTCTGTTTCTTTCTGACTGTTAAGTAGACACCACGTGTGTCTGGGACCCATCTCCCCA
GTCCATGTACGTAGAGGATTAGATTTAAGGTTGTCCTCGGCCTTGGGGTAAACTAACTGGATCCCAACTGAAGAGGCGGAAGCAAGAGTGTTCT
ACTTTCTTCCTTTATTGTCACTTGAACCATGATCCTACAGGCTGCTGACAAGCTTGGCTGAGCAAGGAACCTGAAAGGGGGTGGGGCTTGAGGG
GGGGTGGCAGGATGTGAGGAGGGGTTACTGGGAGGAGGGGCTTGGGTTCTTCTTCCTTGAGGAGAAGGCAGCAAATGTGTCCAGCCTAGGTTAA
GGGTAGGGCATCCCTTGTCCCTGTCTGCGGGCCTTTATCTCAGAGCCCCACATTCAAGACTACTAATGGGTCAGAAATGGGGGTTCCCTTTAGA
TAGCGGTAGCCAGCAAGGCCCTCCAGCGTCCTCCTTCTGTTCTGACTTCATTTGCCGTGTCCTGGGACGATGAAACAGACACCAGTCTCAAGCC
CCAGGGTGCAGGGAGACGGGAAGTGGGGTGTGACATCAGGGAACATAAGAAGGGCTGAGGCACAGGAGAGCAGGGGGCGCTGCTGCTGTGCAGA
GCTGGCCTCTGTCTTCACAGGGTGACTGGGAAGAGAAGCACAGGTTGATACAGCTGGGCCACCAGTTTGTTGTCCCTGCCTCCTCTGCCCAACA
TCTTGGAACTGCAGATCAGTCTGTCCCCCTGCTAAGCTCAGGTAGTACTGTGCTCCCAGCCACCATCCCATTCTAGAAAAACCATCCCAGTGAT
AGTGATGAATGTCCCAGTGTCACCAGAGTCTGCATGTGGGTGGCCCCCTCTGTGATCCCCCCCCTTACCTTGACCCAGTTCCTGCCTGGTCACT
CCCAGGCCAGAAGATAGGTCTTCCATGTCCAGTGGCTCTGCAAGGGAAGCATCAGGCTCACTGTTATTTTTACCCCAACACACACACACACACA
CACACANNNNNNNNNNNNNNNNNNNNNNNNNNNNNNNNNNNNNNNNNNNNNNNNNNNNNNNNNNNNNNNNNNNNNNNNNNNNNNNNNNNNNNNN
NNNNNNNNNNNNNNNNNNNNNNNNNNNNNNNNNNNNNNNNNNNNNNNNNNNNNNNNNNNNNNNNNNNNNNNNNNNNNNNNNNNNNNNNNNNNNN
NNNNNNNNNNNNNNNNNNNNNNNNNNNNNNNNNNNNNNNNNNNNNNNNNNNNNNNNNNNNNNNNNNNNNNNNNNNNNNNNNNNNNNNNNNNNNN
NNNNNNNNNNNNNNNNNNNNNNNNNNNNNNNNNNNNNNNNNNNNNNNNNNNNNNNNNNNNNNNNNNNNNNNNNNNNNNNNNNNNNNNNNNNNNN
NNNNNNNNNNNNNNNNNNNNNNNNNNNNNNNNNNNNNNNNNNNNNNNNNNNNNNNNNNNNNNNNNNNNNNNNNNNNNNNNNNNNNNNNNNNNNN
NNNNNNNNNNNNNNNNNNNNNNNNNNNNNNNNNNNNNNNNNNNNNNNNNNNNNNNNNNNNNNNNNNNNNNNNNNNNNNNNNNNNNNNNNNNNNN
NNNNNNNNNNNNNNNNNNNNNNNNNNNNNNNNNNNNNNNNNNNNNNNNNNNNNNNNNNNNNNNNNNNNNNNNNNNNNNNNNNNNNNNNNNNNNN
NNNNNNNNNNNNNNNNNNNNNNNNNNNNNNNNNNNNNNNNNNNNNNNNNNNNNNNNNNNNNNNNNNNNNNNNNNNNNNNNNNNNNNNNNNNNNN
NNNNNNNNNNNNNNNNNNNNNNNNNNNNNNNNNNNNNNNNNNNNNNNNNNNNNNNNNNNNNNNNNNNNNNNNNNNNNNNNNNNNNNNNNNNNNN
NNNNNNNNNNNNNNNNNNNNNNNNNNNNNNNNNNNNNNNNNNNNNNNNNNNNNNNNNNNNNNNNNNNNNNNNNNNNNNNNNNNNNNNNNNNNNN
NNNNNNNNNNNNNNNNNNNNNNNNNNNNNNNNNNNNNNNNNNNNNNNNNNNNNNNNNNNNNNNNNNNNNNNNNNNNNNNNNNNNNNNNNNNNNN
NNNNNNNNNNNNNNNNNNNNNNNNNNNNNNNNNNNNNNNNNNNNNNNNNNNNNNNNNNNNNNNNNNNNNNNNNNNNNNNNNNNNNNNNNNNNNN
NNNNNNNNNNNNNNNNNNNNNNNNNNNNNNNNNNNNNNNNNNNNNNNNNNNNNNNNNNNNNNNNNNNNNNNNNNNNNNNNNNNNNNNNNNNNNN
NNNNNNNNNNNNNNNNNNNNNNNNNNNNNNNNNNNNNNNNNNNNNNNNNNNNNNNNNNNNNNNNNNNNNNNNNNNNNNNNNNNNNNNNNNNNNN
NNNNNNNNNNNNNNNNNNNNNNNNNNNNNNNNNNNNNNNNNNNNNNNNNNNNNNNNNNNNNNNNNNNNNNNNNNNNNNNNNNNNNNNNNNNNNN
NNNNNNNNNNNNNNNNNNNNNNNNNNNNNNNNNNNNNNNNNNNNNNNNNNNNNNNNNNNNNNNNNNNNNNNNNNNNNNNNNNNNNNNNNNNNNN
NNNNNNNNNNNNNNNNNNNNNNNNNNNNNNNNNNNNNNNNNNNNNNNNNNNNNNNNNNNNNNNNNNNNNNNNNNNNNNNNNNNNNNNNNNNNNN
NNNNNNNNNNNNNNNNNNNNNNNNNNNNNNNNNNNNNNNNNNNNNNNNNNNNNNNNNNNNNNNNNNNNNNNNNNNNNNNNNNNNNNNNNNNNNN
NNNNNNNNNNNNNNNNNNNNNNNNNNNNNNNNNNNNNNNNNNNNNNNNNNNNNNNNNNNNNNNNNNNNNNNNNNNNNNNNNNNNNNNNNNNNNN
NNNNNNNNNNNNNNNNNNNNNNNNNNNNNNNNNNNNNNNNNNNNNNNNNNNNNNNNNNNNNNNNNNNNNNNNNNNNNNNNNNNNNNNNNNNNNN
NNNNNNNNNNNNNNNNNNNNNNNNNNNNNNNNNNNNNNNNNNNNNNNNNNNNNNNNNNNNNNNNNNNNNNNNNNNNNNNNNNNNNNNNNNNNNN
NNNNNNNNNNNNNNNNNNNNNNNNNNNNNNNNNNNNNNNNNNNNNNNNNNNNNNNNNNNNNNNNNNNNNNNNNNNNNNNNNNNNNNNNNNNNNN
NNNNNNNNNNNNNNNNNNNNNNNNNNNNNNNNNNNNNNNNNNNNNNNNNNNNNNNNNNNNNNNNNNNNNNNNNNNNNNNNNNNNNNNNNNNNNN
NNNNNNNNNNNNNNNNNNNNNNNNNNNNNNNNNNNNNNNNNNNNNNNNNNNNNNNNNNNNNNNNNNNNNNNNNNNNNNNNNNNNNNNNNNNNNN
NNNNNNNNNNNNNNNNNNNNNNNNNNNNNNNNNNNNNNNNNNNNNNNNNNNNNNNNNNNNNNNNNNNNNNNNNNNNNNNNNNNNNNNNNNNNNN
NNNNNNNNNNNNNNNNNNNNNNNACATTAGCCACACCAAGCCTGGCCCCTGGTCCCCCATGTTGGAGAGCAGCGGTGAGGGGCACCCAGCTATG
GAACTCCAGTCAGGGTCAGGAGCTGAACCAGCACCTCCAGTTTTTTCCCTCTGTCTGGGTCCTCTGCCTGTCCTCACACAACCAGTGTTCCCTG
CTGTAGGCCAAGAGCCATGTGCCATGCACTGTGCCTGACACGAAGCAAGCATGTGCAATATTAATTTGGGAAGGAGAACATGGTATTGTGGCCA
AGTCAATCCATTGGACCTTAATTTGATTTTTTTAAAAGATTTATTTATTTATTTCATGTATGCGAGCACACTGTCTCTGTCTTCAGACACACCA
GAAGAGGACATCGGATCCCCATTACAGATGGTTGCGAGCCACCATGAGGTGGTTGGGAATTGAACTCAGGACCTCTGGAAGAGTAGGTGGTGCT
CTTAACCTCTGAGCCATCTCTCCAGTCTCAATGGACCATAATTTTTAACTCCTCAAAAGTGAGGTGGCTGGAACCTGGCCTAGTGATGCACGCC
TTTAATCCTAGCACTGGGAGCCAGAGGCAGGCAAATTGTGAGTTCAAAGCCAACCTGTTCTACATAGTCGGTTCCAGGACTACATAGACTCTTA
TCTCAAGGTGGGTAGGGGATGGACTGTACGCAACAGTTAAGGACCACCTTGTATTCCTTGGACTAAGCATGTGTTGAGTTTATAGTGAGCCTAA
CCCATGAGTGAGGGCCGGGGTCCCACGTGACCCAGGAGACTACCCGCTGGCTCTGATACTCACCGTGAGCAGATGCATCACATGGTCCTGGGTC
ATGTTGCCGTACTTGGTAACGTTCTTCACAGGCTGTGGGGAAGGGAACAGGGTTACCAGCATTGCAGGGATCAGCAGCTATAGTCTAGTACGAG
TCAGGTGCTTGCACTCAACAGCTCAAATCTGCCACCTCCTAACATGGAAGTGCCAGCCCCTCACGCCCTTCCTGCCTCTATGCCCTCTCTGGTC
AGGCGGGCAGAAGCTTGTCAGAGCCTTCCCAATAGCAGAGTTTGCTTCCTCCTCCCAAGCCCTCCCATATGTTCCTTCCTGCTTCACTTCAAAT
TCATGGCCTCTTTTTTCATTCATTGTCATTGCTTGCATATATTATATGTCTATATATATACACCACTAGTCCTAATTAAACCTGCCCCGTCTGT
ATCATGCTAACTTATGTATGTTTTCAGGACTGACCATTTGGCACCGTTCGATTGATGTGCTCTGCCCTGGATAAGGTACCAATAGTAATCCTAT
GAGTAACAGCATTTTTGCAGCCAAAGACTTGGAGGAACTGAGGGACTATAGGATGCTGAGGTGAAGAAGCACTTTGCAAGCTGTGGGACTTGCC
CTTTCCCCACCAGGGGAGCCCTAAGAGTTCTGGCCTCCTCAGTCACCTTGGGCAAGCCTCTCTGAGGTGTGCCCTGCTCCTCGCCAGTAGTTAG
TGCCCAGATTCCTTGACAACTGTTATCCTTCGGCCCCTCCCCTTGGCAAACACCAGCTACCATTTCCTTCCTGCCGCCTTCCTTACCCCAAGGA
GCATGTTATCCATGGACATTGGACGCATCAGCAAGGGAGTAGCCATCCGCATCTGGCTCACAGGTTTGGCAGCTGTGGGGCAGGGAGGACAGTA
TGAGTCCAGGTCCAAGGGAGTAAGGAACCCAGGGGTTAAGATTTGAAACCCGGTGCGGGGGAGGAAGGGAGATCGGGAGGGGCTAAATGGAGAA
ATGATGTCTGTGAGGTGAGGGACAGGTGGAGCACGCACATTTCGGAAGCTTCATGCGAAGGCTCTCCAGTTGCAGGTTCTGGGAGGTGATGGTC
AGCTTGTCTAGGCGGCCCTGTTGCTGGTACAGGAAGTAAGCAGTGGTGGCCTGCCCAGCCAAGAGCAGAGCCACCAGGACAGAAACACCGGTGT
ACAGAGCTCCACGGCTGCACCTGTTGGGATGGAGTAAGAGCATGATCCAGAGCTGGACGCTGACTGGAAGTGGGGACGTAAGCCCGGACCCACG
CCCTCTCAGACTCAAACCCTCCCAATAGTGAGGACATCTGCTCCTGCCGCCCCCCAGTGTCCTTCCCAGGAAGATCCACCTGGGGCCCAAGCTC
AATGGGAAGGATGAGCCACGTTCCTTGCCTCCTCTGGGCTTTGGTGTCTCCTCTGTGTAGTGACAGGGTAAAGTCCTTCCTCCTTCCGAGTCCC
CTCTACCCTAGAGATCTGAGGAGCTAAGCCCCCCTCGGAAGTGGGGAGGGGGATTTGATCTTGTTTTTGCTGGCAGAAAAAGATAGGTGAGTTT
ACTATGTAAGAGGAAGAAGGGTTTTCATCTACTGTGCCGTCCCCAATCCCCACGGTGACGTCAGGTTTAAAGAGAAAAGGGAAGGAAGTGCGGT
AGGGGACAGCAAAAGCCGGATTTATACCTGAAAAGGAGAAGTGGGGCCTAGAGTTTTTACATGTGGAGCGGGAGGAACATTGTCAGGCTGAAGC
AGTGCCAGGCACGTGTGCGTGCACACACACACACACACACATCTCCAAGACAACCCCCTCACCCCCACCCCTGCTCCAGAGTCCGTCTGTCCCA
GAGTCCCTGGAAATTTGAATAGATCTTCTTCCCCAGTCTCCCAGCTCTCTCATATGTCATGTGAGCAACCCTCAAACCCACAGTGTTAAAATTT
GGCTGTCCTCCAACAAGTGTGTGTGTGCGTGTATACTCATGTGTGCTGTGCATGTGTATGTGNNNNNNNNNNNNNNNNNNNNTATGGCCTAGAA
GCATCTTGTAGTGATCTCCAACTGGGAAAGTTCAAGAGCAACACAGGTACCTAGGCTTCATGCTCTTGGACAGCCAGACTCTCAGACTTCAGTG
ACTCCTTACAGTTTGGGGGCTTTTTTGGGCTGTGTTGGGGTGCATGCACATGTTACAATATGGAACACAAGGACCCTGACTGGGCACCCTGAGA
TTTCCTGTCCAGTCTTCCCCACTCACCCTTGGGTAGGGAGAACTATCAGTAATGTTATTTGCACACATCCCCTTTAAGATTCAAGTGTTGGGGT
TGGGGATTTAGCTCAGTGGTAGAGTGCTTGCCTAGCAAGCGCAAGGCCCTGGGTTCGGTCCTCAGCTCTGGAAAAAAAAAAAAAAAAAAAAAAA
AAAGACAAAATAACAAAAAGACCAAAAGAAAAACAAACAAAAAAAAACAAGGTAAAAGATTCAAGTGGATGGATGGAGTTAGGCACCGTTGTAG
GAAGGCTTAACAGGGGAGTGAGTCTCCTGCCTTTTCACTGCCTTTCTATTTACAACACAGCAAGAAACTCATCATTAGGGGCTGGAGAGATGGC
TCAGCGGTTAAAAGCGCTGACTGTTCTTCCAAAGGTCCTGAGTTCAAATCCCAGCAACCACATGGTGGCTCACAACCATCCATAACGAAATCTG
ATGCCCTCTTCTGGAGTGTCTGAAGACAGCTACAGTGTACTTACATGTAAAAATAAATAAATAAATATTTTTTTAAAAAAAAGAAACTCATCAT
TAGATGCCAGCGCCTTGATCTTGGGATTCTCAGCCTTCGTAACTATGGGAAATAAATCTCCAGATTTTTATTATTATTATTATTATTATTATTA
TTATTATTTATATAAACGACCCAGTCTGTGGCTTTCTATTATAGTAACACATACTCAGACTAAGTAAGACGAACTACATTGGAAATCCTCGTGA
TAAGTTTGCATCTTGCCTACTCCAGCAACCAGGAAGGGTAATTTAGGAAACTCCAGAAAACCTGTCTGCCTGGTAACTTATGACATCACAGACA
CAGCTAATTCTCATTGGCTTGCCAACCCTCTGTATTTCCTAAGCCAAGGGCTGGAGAAAGGAGATCAGACAGGAGGGAGAATAGGTTTAAATTT
CTTGGCCTTCTGAAGGAAGATGGAACCTGGGCTCAAGGTCTTCTGCTTCATCTACTTTGGTGACTCATGGAACCCCCGAACCCCTCTACCACCC
CATATTCAGATCTAGTCCCAGCTCTACCTGCTACCACATGAGCTTGGGGTAGCCACGTCCCTCTCCTTTCGAACTTCAACCTTTCAGAAGGCCA
GTGAACACAGGTTTGTATTGAAGATGTGAACAGTAGCCATAACTGGCATCCTGGCTTGCCTAACTCTGGGGCCAGGAACAAGACACTTCTGCGT
GTGGACCAGGTTAGGGCTTGGAATGAGCGGTTGTTAAATAACGAAGAGATGAAACATAAATAACGAAGAGATGAAACACTTGGCCCCACACCGG
ACACACATTTCCTCTACCAGTAATACTGCTCTCAGGAAGGTCACTATCCATAACAATGCTGCCCTCCAGGAGGCTGGATGTCAAGCCCAGCATC
ATCTCTCCTTCCACTTTTATTCAATTTAATATTATTTTGTTTTTCTGAGATGGTCTCATGTAGATGAGTCTGGCCTTGAACCCCTGATCCTCCT
GCCTCCA
MOUSE SEQUENCE-mRNA
TAGCGGGGGCGAGGGGGCGTGCACGTGAATCCCCTGGCCAGATCTCTGGCATGGCCGAGGCCAGGAAGCGGCGGGAGCTGCTTCCCCTCATTTA
CCATCATCTGTTGCAAGCAGGCTACGTCCGCGCGGCGCGGGAAGTAAAGGAGCAGAGCGGCCAGAAGAGTTTCCTGACTCAGCCCGTCACCCTT
CTGGACATCTATACACACTGGCAACAGACCTCAGAGCTTGGCCAGAAGCAGAAGGCAGAGGATGATGAGACCCTTCAGGCTAAGAAGTCTCGAG
TGTCGGATCCTGTTAGCAGCTCAGAGAGCTCGGATCAGGAGAAGGAAGAGGAGGCAGCAACCGAAAGGGCCAAAGCCACCCCAAGACCGACACC
TGTCAATTCTGCAACCGCAGCTTTGCCATCAAAAGTAAAAGAAAAGGGAAAGACCAAGACAGCCAACAAGACGGTGAACTCTGTGTCGCACCCT
GGGTCCGGAAAGACGGTGGTCCACCTGCTCTCTGGGAAGTCACCCAAGAAGTCAGCAGAGCCCTTGGCAAACACTGTCTTGGCCTCAGAAACTG
AGGAGGAGGGCAATGCCCAAGCCCTCGGACCCACTGCCAAGTCTGGAACGGTGTCAGCGGGCCAAGGCAGCAGTTCCAGTGAAGATTCCTCCAT
CTCAAGCGATGAGACAGATGTCGAGGTGAAATCTCCAGCAAAAGCAGCCCAGGCCAAAGCTTCAGCAGCCCCTGCCAAGGATCCTCCAGCAAGA
ACAGCCCCAGGCCCTACCAAGTTAGGGAATGTGGCGCCCACACCTGCTAAACCAGCCAGGGCGGCAGCGGCAGCTGCTGCTGCTGCTGTGGCTG
CTGCTGCTGCTGCAGCAGCAGAAGAGTCTGAGAGCAGTGAGGAGGACTCAGACAGTCAGGACGAGGCCCCTGCTGGTCTGCCCAGCCAGGTAAA
AGCCTCTGGAAAAGGTCCCCATGTCAGAGCCGACTCGGTGTCTGCCAAGGGGATCTCTGGGAAAGGGCCCATCTTAGCAACCCCAGGGAAGACT
GGGCCTGCAGCCACCCAGGCCAAGGCAGAAAGGCCAGAGAAGGACTCGGAAACCAGCAGTGAGGACGATTCTGATAGTGAGGATGAAATGCCAG
TCACTGTGAATACTCCTCAGGCAAGGACTTCTGGGAAGAGCCCTCGGGCCAGAGGTACCTCAGCCCCCGCCAAGGAGTCATCCCAGAAAGGGGC
TCCTGCAGTCACCCCTGGAAAGGCAAGGCCTGTGGCAGCCCAGGCAGGGAAACCAGAAGCCAAGAGCAGTGAGGAGTCAGAGAGTGACAGTGGG
GAGACACCAGCTGCTGCGACTCTGACCACGAGTCCTGCCAAGGTGAAACCTTTGGGGAAGAGCTCCCAGGTCAGACCTGTTTCCACCGTCACCC
CGGGGTCATCGGGAAAAGGTGCCAACCTGCCCTGCCCTGGGAAGGTGGGGTCAGCAGCTCTCAGGGTCCAAATGGTAAAGAAAGAAGATGTCTC
GGAGAGCAGCAGTGCAGAGCTGGACAGTGACGGGCCTGGGAGCCCAGCCAAGGCAAAGGCCTCCCTTGCGCTCCCTCAGAAGGTGAGGCCTGTG
GCCACCCAGGTCAAGACTGACAGGGGCAAAGGCCACTCAGGGAGCAGTGAGGAGTCATCTGACAGCGAAGAGGAGGCAGCACCAGCAGCCTCTG
CTGCTCAGGCTAAGCCAGCTCTGGAAAAGCAGATGAAAGCTTCCTCTAGGAAAGGCACGCCTGCATCCGCAACAGGAGCGAGCACCTCGTCCCA
TTGTAAGGCAGGAGCGGTGACCTCTTCAGCCAGCCTGTCATCCCCAGCTCTGGCCAAGGGCACCCAGAGGTCAGATGTGGACTCTTCCAGTGAG
TCTGAGTCAGAAGGAGCTGCTCCCAGCACCCCCAGGGTACAGGGGAAGTCTGGGGGCAAGGGCCTCCAAGGGAAAGCTGCCTTGGGGCAAGGGG
TGGCCCCAGTGCACACTCAGAAGACAGGGCCTTCGGTCAAAGCTATGGCTCAGGAAGACTCAGAGAGCCTCGAGGAGGACTCCAGCAGTGAGGA
AGAGGATGAGACCCCAGCACAGGCCACGCCCTTGGGGAGACTTCCTCAGGCCAAAGCCAACCCACCTCCCACTAAGACACCTCCAGCGTCTGCA
TCTGGAAAAGCTGTGGCTGCTCCAACCAAGGGAAAACCACCTGTTCCGAACAGCACCGTCTCTGCAAGGGGCCAGCGGTCTGTGCCAGCCGCGG
GAAAAGCAGGGGCCCCAGCAACCCAAGCCCAGAAGGGTCCCGTGGCTGGCACAGGGGAGGACTCAGAGAGCAGCAGTAAAGAGGAGTCTGACAG
TGAAGAAGAGACGCCAGCCCAGATAAAACCTGTGGGGAAGACCTCTCAGGTCAGAGCTGCCTCAGCCCCTGCCAAGGAGTCTCCTAAAAAAGGA
GCCCATCCAGGAACCCCCGGCAAGACGGGATCTTCAGCTACCCAGGCCCAGCCAGGGAAGACAGAGGACTCAGACAGCAGTAGTGAAGAGTCTG
ACAGTGACACAGAGATGCCATCAGCCCAGGCGATTAAATCCCCTCCAGTTTCTGTCAACCGTAACAGTAGTCCAGCTGTCCCAGCTCCTACCCC
AGAAGGAGTCCAGGCTGTGAACACCACAAAGAAGGCCTCAGGCACCACTGCCCAGAGCTCCTCCTCTGAGAGTGAGGACGGGGACGAGGACTTG
ATTCCTGCCACACAACCCTCCACCTATGCTCTCAGAACCAGTGTGACGACGCCCGCAGCCCTCTCACGAGCAGCTTCCCAACCCAGCAAGAGTG
AGCAGTCTAGCCGGATGCCAAAAGGCAAGAAAGCAAAGGCGGCGGCGTCCGCTCAGACCAGCAGTGCCGTGGAAACACTCCCCATGATGCCTCC
CCAGAGCGCACCCATCCAGCCCAAAGCCACCAACAAGCTCGGGAAATCCAAGCTCCCTGAGAAGCAGCAGCTTGCCCCAGGCTACCCCAAGGCC
CCCAGGAGCTCGGAGGACAGCAGTGACACTTCTTCCGAGGACGAGGAGGATGCCAAGAGACCCCAGATGCCCAAGTCGGCCCACAGGCTGGATC
CAGACCCTTCCCAGAAGGAAACTGTGGTAGAGGAGACCCCTACAGAATCCAGCGAAGATGAGATGGTGGCCCCCTCACAGTCTCTCCTCTCAGG
TTACATGACTCCCGGCTTGACTGTGGCTAATTCCCAGGCTTCAAAAGCTACTCCTAGGCCAGACTCCAACTCCTTAGCTTCTTCTGCCCCGGCC
ACCAAAGACAACCCGGATGGCAAGCAGAAGTCAAAATCCCAACACGCAGCAGACACCGCACTCCCTAAAACCGGTAGGAAAGAGGCCTCCTCGG
GCTCCACGCCTCAGAAGCCCAAGAAGCTCAAGAAGAGCACCTCAAGCTCGCCGGCCCCCACACAGACACTGCCGAACAGCATCACCCAGCGCCT
CCTGGAGCAGGCCTGGCCCCTGAGCGAGGCGCAGGTGCAGGCCTCTGTGGTGAAGGTCCTGACAGAGCTTCTGGAGCAGGAACGGCTGAAGGCC
ACAGAGGCCATCAAGGAGAGTGGGAAGAAGAGCCAGAAGCGGAAGTTATCAGGGGACCTAGAAGCTGGGGCCCCAAAGAACAAGAAGAAGAAGG
AGCAGCCAGTGCCCAGGGCAAGCGCTGTTTCCCCAGAAAAGGCTCCCATGACTTCCAAGGCAAAATCAAAGCTTGACAAAGGGAGTGCTGGTGG
CAAGGGGAAGGGGTCTCCTGGCCCCCAAGGAGCCAAGGAGAAGCCCGACGGCGAGTTGCTGGGGATAAAGCTTGAGAGTGGCGAGCAGAGCGAC
CCGAAGAGCAAGTCGAAAAAGAAGAAATCCCTCAAGAAAAAAAAAGACAAGGAGAAAAAGGAAAAGAAGAAAGGAAAAAAGTCCCTGGCCAAAG
ACTCTGCCTCGCCGATCCAGAAGAAGAAAAAGAAGAAGAAGAAGTCAGCCGAGCCTGCCGTGTGA
MOUSE SEQUENCE-CODING
ATGGCCGAGGCCAGGAAGCGGCGGGAGCTGCTTCCCCTCATTTACCATCATCTGTTGCAAGCAGGCTACGTCCGCGCGGCGCGGGAAGTAAAGG
AGCAGAGCGGCCAGAAGAGTTTCCTGACTCAGCCCGTCACCCTTCTGGACATCTATACACACTGGCAACAGACCTCAGAGCTTGGCCAGAAGCA
GAAGGCAGAGGATGATGAGACCCTTCAGGCTAAGAAGTCTCGAGTGTCGGATCCTGTTAGCAGCTCAGAGAGCTCGGATCAGGAGAAGGAAGAG
GAGGCAGCAACCGAAAGGGCCAAAGCCACCCCAAGACCGACACCTGTCAATTCTGCAACCGCAGCTTTGCCATCAAAAGTAAAAGAAAAGGGAA
AGACCAAGACAGCCAACAAGACGGTGAACTCTGTGTCGCACCCTGGGTCCGGAAAGACGGTGGTCCACCTGCTCTCTGGGAAGTCACCCAAGAA
GTCAGCAGAGCCCTTGGCAAACACTGTCTTGGCCTCAGAAACTGAGGAGGAGGGCAATGCCCAAGCCCTCGGACCCACTGCCAAGTCTGGAACG
GTGTCAGCGGGCCAAGGCAGCAGTTCCAGTGAAGATTCCTCCATCTCAAGCGATGAGACAGATGTCGAGGTGAAATCTCCAGCAAAACCAGCCC
AGGCCAAAGCTTCAGCAGCCCCTGCCAAGGATCCTCCAGCAAGAACAGCCCCAGGCCCTACCAAGTTAGGGAATGTGGCGCCCACACCTGCTAA
ACCAGCCAGGGCGGCAGCGGCAGCTGCTGCTGCTGCTGTGGCTGCTGCTGCTGCTGCAGCAGCAGAAGAGTCTGAGAGCAGTGAGGAGGACTCA
GACAGTGAGGACGAGGCCCCTGCTGGTCTGCCCAGCCAGGTAAAAGCCTCTGGAAAAGGTCCCCATGTCAGAGCCGACTCGGTGTCTGCCAAGG
GGATCTCTGGGAAAGGGCCCATCTTAGCAACCCCAGGGAAGACTGGGCCTGCAGCCACCCAGGCCAAGGCAGAAAGGCCAGAGAAGGACTCGGA
AACCAGCAGTGAGGACGATTCTGATAGTGAGGATGAAATGCCAGTCACTGTGAATACTCCTCAGGCAAGGACTTCTGGGAAGAGCCCTCGGGCC
AGAGGTACCTCAGCCCCCGCCAAGGAGTCATCCCAGAAAGGGGCTCCTGCAGTCACCCCTGGAAAGGCAAGGCCTGTGGCAGCCCAGGCAGGGA
AACCAGAAGCCAAGAGCAGTGAGGAGTCAGAGAGTGACAGTGGGGAGACACCAGCTGCTGCGACTCTGACCACGAGTCCTGCCAAGGTGAAACC
TTTGGGGAAGAGCTCCCAGGTCAGACCTGTTTCCACCGTCACCCCGGGGTCATCGGGAAAAGGTGCCAACCTGCCCTGCCCTGGGAAGGTGGGG
TCAGCAGCTCTCAGGGTCCAAATGGTAAAGAAAGAAGATGTCTCGGAGAGCAGCAGTGCAGAGCTGGACAGTGACGGGCCTGGGAGCCCAGCCA
AGGCAAAGGCCTCCCTTGCGCTCCCTCAGAAGGTGAGGCCTGTGGCCACCCAGGTCAAGACTGACAGGGGCAAAGGCCACTCAGGGAGCAGTGA
GGAGTCATCTGACAGCGAAGAGGAGGCAGCACCAGCAGCCTCTGCTGCTCAGGCTAAGCCAGCTCTGGAAAAGCAGATGAAAGCTTCCTCTAGG
AAAGGCACGCCTGCATCCGCAACAGGAGCGAGCACCTCGTCCCATTGTAAGGCAGGAGCGGTGACCTCTTCAGCCAGCCTGTCATCCCCAGCTC
TGGCCAAGGGCACCCAGAGGTCAGATGTGGACTCTTCCAGTGAGTCTGAGTCAGAAGGAGCTGCTCCCAGCACCCCCAGGGTACAGGGGAAGTC
TGGGGGCAAGGGCCTCCAAGGGAAAGCTGCCTTGGGGCAAGGGGTGGCCCCAGTGCACACTCAGAAGACAGGGCCTTCGGTCAAAGCTATGGCT
CAGGAAGACTCAGAGAGCCTCGAGGAGGACTCCAGCAGTGAGGAAGAGGATGAGACCCCAGCACAGGCCACGCCCTTGGGGAGACTTCCTCAGG
CCAAAGCCAACCCACCTCCCACTAAGACACCTCCAGCGTCTGCATCTGGAAAAGCTGTGGCTGCTCCAACCAAGGGAAAACCACCTGTTCCGAA
CAGCACCGTCTCTGCAAGGGGCCAGCGGTCTGTGCCAGCCGCGGGAAAAGCAGGGGCCCCAGCAACCCAAGCCCAGAAGGGTCCCGTGGCTGGC
ACAGGGGAGGACTCAGAGAGCAGCAGTAAAGAGGAGTCTGACAGTGAAGAAGAGACGCCAGCCCAGATAAAACCTGTGGGGAAGACCTCTCAGG
TCAGAGCTGCCTCAGCCCCTGCCAAGGAGTCTCCTAAAAAAGGAGCCCATCCAGGAACCCCCGGCAAGACGGGATCTTCAGCTACCCAGGCCCA
GCCAGGGAAGACAGAGGACTCAGACAGCAGTAGTGAAGAGTCTGACAGTGACACAGAGATCCCATCAGCCCAGGCGATTAAATCCCCTCCAGTT
TCTGTCAACCGTAACAGTAGTCCAGCTGTCCCAGCTCCTACCCCAGAAGGAGTCCAGGCTGTGAACACCACAAAGAAGGCCTCAGGCACCACTG
CCCAGAGCTCCTCCTCTGAGAGTGAGGACGGGGACGAGGACTTGATTCCTGCCACACAACCCTCCACCTATGCTCTCAGAACCAGTGTGACGAC
GCCCGCAGCCCTCTCACGAGCAGCTTCCCAACCCAGCAAGAGTGAGCAGTCTAGCCGGATGCCAAAAGGCAAGAAAGCAAAGGCGGCGGCGTCC
GCTCAGACCAGCAGTGCCGTGGAAACACTCCCCATGATGCCTCCCCAGAGCGCACCCATCCAGCCCAAAGCCACCAACAAGCTCGGGAAATCCA
AGCTCCCTGAGAAGCAGCAGCTTGCCCCAGGCTACCCCAAGGCCCCCAGGAGCTCGGAGGACAGCAGTGACACTTCTTCCGAGGACGAGGAGGA
TGCCAAGAGACCCCAGATGCCCAAGTCGGCCCACAGGCTGGATCCAGACCCTTCCCAGAAGGAAACTGTGGTAGAGGAGACCCCTACAGAATCC
AGCGAAGATGAGATGGTGGCCCCCTCACAGTCTCTCCTCTCAGGTTACATGACTCCCGGCTTGACTGTGGCTAATTCCCAGGCTTCAAAAGCTA
CTCCTAGGCCAGACTCCAACTCCTTAGCTTCTTCTGCCCCGGCCACCAAAGACAACCCGGATGGCAAGCAGAAGTCAAAATCCCAACACGCAGC
AGACACCGCACTCCCTAAAACCGGTAGGAAAGAGGCCTCCTCGGGCTCCACGCCTCAGAAGCCCAAGAAGCTCAAGAAGAGCACCTCAAGCTCG
CCGGCCCCCACACAGACACTGCCGAACAGCATCACCCAGCGCCTCCTGGAGCAGGCCTGGCCCCTGAGCGAGGCGCAGGTGCAGGCCTCTGTGG
TGAAGGTCCTGACAGAGCTTCTGGAGCAGGAACGGCTGAAGGCCACAGAGGCCATCAAGGAGAGTGGGAAGAAGAGCCAGAAGCGGAAGTTATC
AGGGGACCTAGAAGCTGGGGCCCCAAAGAACAAGAAGAAGAAGGAGCAGCCAGTGCCCAGGGCAAGCGCTGTTTCCCCAGAAAAGGCTCCCATG
ACTTCCAAGGCAAAATCAAAGCTTGACAAAGGGAGTGCTGGTGGCAAGGGGAAGGGGTCTCCTGGCCCCCAAGGAGCCAAGGAGAAGCCCGACG
GCGAGTTGCTGGGGATAAAGCTTGAGAGTGGCGAGCAGAGCGACCCGAAGAGCAAGTCGAAAAAGAAGAAATCCCTCAAGAAAAAAAAAGACAA
GGAGAAAAAGGAAAAGAAGAAAGGAAAAAAGTCCCTGGCCAAAGACTCTGCCTCGCCGATCCAGAAGAAGAAAAAGAAGAAGAAGAAGTCAGCC
GAGCCTGCCGTGTGA
HUMAN SEQUENCE-GENOMIC
CAGGGAAAGGTAGACAGGTAGTTCCCTCTGCCTCTAACCTGCTGGGGTCCTTGTCGAGTCACTTCCTGTCACTGGGCCTGTTTCCTTATCAGCA
AGAGGAGTGAGCTGGGCTAGATGCTCTCCAAGGACCCTTCTAGCTCTGAGAAATAAAACCACAAAAATAAGAAATTATGCTGATGAGGCTATGA
ATTGCTACAACCCTTTTGGCAGTTAATTGGGCTTTAGCTATTAAAATAAAACTCATGCATCCCCTCTGGTCCACTTGCAATTACATCATACAGA
ATTAAAGCTCCAGTCTGCAAGGATGTATTTACTAGGATGTTTAGAGCAACACTACTCTATTAGCCAAAAAACTAGAGGCGAATAACCTGTATCA
TATCATCTCCCATCTCTGTCTGTTGATGGCCCTACTGAGGGACTGGTTATGAGCCCTCTGGCAGCTGGAGCCTGTCTTGAGCCTCAGTTTCCTC
ATCTACAACCATTTGACATGCTTTATAGGATGTTGTGAGGTTTTGATTGGTTAGTGTTAGAGCCTGGAAGCACAGCTCCAGCTCACTGCACACA
CTCAACAAATGATAGCTGTTACTATTACTCAAAAGAGTGTGGCAGATCCCAGCATCTAGAGAAATAGCTCTGCTGTATTGTTATTAGGTGAAAA
AAGAGAGTTGCAGAGTTGAGTGTTTAGTATGATTCCCTTTTGTAAGAAAAGAAGCAAAGAAGCCAGGTGCAGTGGCTCATGCCTGTAATCCCAG
CACTTTGAGGGGCTGAGGTGGGTGGATCATCTGAGGCCAGGAGTTCAAGACCAGCCTGGCCAACATGGTGAAACCCATCTCTACTAAAAATACA
AAAATTAGCTGGGCATGGTGGCACATGCCTGTAGTCCCAGCTACTCGGGAGGCTGAGGCAGGAGAATCATTTGAACCCAGAAGGCAGAGGTTGC
AGTGAACAGAGATCATGCCACTGCACTCCAGCCTGGGCAACAGAGCGAGACTCCGTTTCAAAAAAAAGAAAAGAAAAGAAAAAGAAAAAAGAAA
AGAAGTAAAGAGAAGTGAAAAAGGAAAAGGAGAAGGAGGACTAAACCTTATGAAGGATGTCTGTGTTTGTCTGGGCAGAGAAAGGATGTGAAGG
GATTGAATACCAGGCTTCTTTCTGATTGGGAAATGAAGAGGCTCTAGTGTGGAGAAGTGGGCAGGGAATGGCTAAGAGGGAGGGAAAAATGATG
GACTTTGTCTTAATATATCTCTGAATTGTTTAACTTGTTACTTCAGTAACAACTTGTAAACCTTTAAAAGCTCCTGTGAGATTAAAGATTTCGT
GTCATTTCACGAAAGGGAAGGAAGTCTTGGGAAATCTACTGGCCAAAATGACTTGGCCCAGGGAAAACCTGTTGTTACAATGGATGAAGGGAGC
TACTGGGAAGGGCACCCTTCCCAGATGGGCCCTTCTCTTAAGAGTTCCACTACTGGAAGGGTCTTTGTTCAACAGCTTCATTTAACAGAAGGTA
ATGCTGAGGACCAGAGAGGGCAAGAGACTGGCCCAAGGTCACACAGCTGAGCCAGGTGAAAAGGGCCTGACTCCTGACAGTAACACAGGGGAGA
GGCCCAGTAACCTTTCCCCTGTATCGCTGCTACCTCCCACCTCTGTGTCAGAGCCATTCCTGCTGGGAGAGACAGGTAGAGTGCCCCATCTGTT
GAGCTTCCTTCTCTTCTGTTGTTCATTCTTCCTTCATTCATTTCCTAAGTGACCTCGCCGTGCCCTGCATGGGAATCCAAGGTGACTAAAGCAT
GCTGCTTCCCCAAGAGGCACTCGCAGTTCAGTGGTCTGGGAGCATCTGGCTTCTACCACTAACAAAGGCATTTTCTCTTACTGGTAGAGAAATG
CTCTGAGGCTAATTTTTTTTTTAATGCACTGTTTTGTTTGTTGCTGTCTTAATAGTTGCCATGTTATATTTTATCAGTTTAATGTTCTAATTTT
GTGCTTGGGCCCTGAGGCAATTCAGTGAAGGGTATGATTTGGAAAATGAGGGAAATAAAGAAATTGTCCACAGAAGAGACAGCCTCCCAGGAGC
CGAGGACAAAGCATAAGTGCCGACAATGAATTTTATTAGGAGCAAAACAAAAACAACCTGTTGCCAGACAGAAGGTATTAGACAATCCTGGTGT
GGTTTTGTTTTCGTTCTTTAATTTAATTCCAGTTCTGCATTTCTTCCAGGGTCAGCCAAGGATGCACAATCCAGTTCCTTCCCCACTGCCTTCC
AAAGCCTTCCACATTCCTGCCTCCAGGCCTAAACTCAGTGAGCACCTTGCCTGCCCTGCCCTCCCTTCTTCTTCAGGAGAGGTCTGTAACCATT
CCTGCACTTGCCAATACTTATTAAGTGCCTGCTGTATGCAGGCACTGTGCAAAATGTTGGAAATAATGCAACCAACAAGGCAAAGGTAAGTCTG
CCTTCAGGGAGTTTACATTCTACTAAGGCATGCATTCTCAAATGGGGCCTTGATGCCCTCGAGGAAATGAAAACTGGTTCCTGGAGGTGTTGGT
GGAAAAAAATCTTAGATCTTACAATGGTTTGTATGCTCATCATGTACATTCATCACCCATCCAGCCACCCAAGCAGAAACCTGGGTGTCACCAC
CAGTTCCAGCTCCCAGCCCTCTCTGATCTCAGGGGTCCCTCATAAGGCCTGGCCCGTGAAGGATTCCACTCTCTCCCTGCAAACATCCATCTGC
CTTGCTTCCCTCGCTACCCAGTGTAGATCCCAGGACCCAGAATTTTAGCATCTCTTTGCCAATACTTTAGACTCCTGTGCCCTTTTTTCCCCAC
CCATCTGGCAAAGCCCTAGGCCTGGATAAATCCCACTATGTACATACATCTCCCCAGCCTGCAGCTGGGTAGGTGAGCCCTGATGGAGGAATTC
ACTCAGCAGGACAGGACGAGACACACATACACTAAGGACCACCAACCTCAACTGGGGAGCCAAGGCTGTCAGGCAATTGGGGATTTTGTGGGCA
AGTTGCTTCTCAACACTCTGAATGATCATTCTTTCAAACTCCTCACCACCTCTTCTTCACTCTCAGCAGAAGACCTTGCCTCCCACTTTGCAGA
AAAAATAGAAGCTCAAAATGAAATCTCCCTTAACATCCCACTATAAACCTACATCTACATCTGCACCCATCCTCTCTTTGTTCCTGCTTTTGGG
TTCTAGAGAACTCATCCCTCCTCCTCCCCAAGACGAACCCCCCCAACCCACATGCCTGATCCCAGCCCCTCGCACATGCTTGAGAGAACTTTAC
TCGCTGATTATCTCCCCTATTTCTTACACTCTTGGTTAACCTCTCTCTCCTGGATCTGCCATTCACTTTTAAACAAATCTCAGGTTTCTTCTAC
CTTGAAACACACCTCCCCTAACATACATATTGGCCCTAGCACTTTATCTTTCTCGTCCTTTTTATACAAAAACTTCTCGAAAGACCCACTGCCT
CCCTCATCCCTCCTGCACTCATCAGACCACTGCCATCTGACCCCCTCCATCATGCCACACATAAATAGCCCTCCCTAAGTCCCCAACAATCTCC
ACGCCTGTCCATAAACCAAAGCCCAGGGCTGCACCCTCCTCCTATCTGACCTCTCAGAGCATTCCCTCCATCAAGTCTTCCCAGCTTTCTAAAA
TGTCTCCCTTGGCCTCCTTCCATAAGCCCACTCTCCTGGGCTTTCTCCAAGCTGTCCAGCCACTCCTGATCAGCCTTTGCAGGCAGATCCTTTT
GTACACAGCCCTAATCTGTAGATGTACCTCAAAACTTCATCCTGGGCCATCTCTCTTCTCTCTCCACATTCTTCTCCCTGGGTAAGCTTCTCCT
CATCCACAGCCGCAATTATCATCTGTCTATCGACAACTTCTCATCTTCATCTCTAGCCCAGACCTCCACGCCACGTCCAAACCCAGGTTTCCAA
GAACCTTCTCAACATCTGCATGTGGTGACTGTAAGGCATTTCAAGCTCAAGATGTCTAACATAGAATATATACTTTCACCTCTCTGTCCACATC
CTCCTCTCCTCAATCAAACCACCCCCCTGTCTCAGTCCTCTTCTAGTTTTTTCTATCTCAGTGAAAAATACTGCCTACTTGTTTGCACAGAAAC
CTCAAGGTCCATTCTGACATTGCCTTTTCCTTCCCCTCCCATTCCAACACACCTCTGTGAAAACTTTAGTTCCTGATTAACTCTGGGAACCTTC
CACTCTCTTCAACTCCACTGCCACCAGCACCCTCCCCGCTGCCCCCGCCACCTACCACCCGCCCCCCCCCCCCCCACATACACTGTCTTCTCCC
TGGATGCCTGCCTGCACTCCTAACCCTGACTTGTCTTCCCACATCTACTCATACCCACCAGACACACTCCACTCTCCACTGGGCAGGCACACAG
GTCACAGTAAAATTCAGATTTCATCCTGTACCTCTTGGGCTTACACCGTCAGTGGCTTCCAATGGCTCTTAGGATGGAGGAAAAAAAACCCTGA
TGTGGCCAATCCTTCACATGGAGTCTGCCCTCTGCCCACCTTCTACACTCCCCAGTCCCCCTGCTCTCCCTCCGGACTATGCTACAAAGGCCTT
TTTGTGTCTATTCTCTCAGCTGTACCTTCTGCCCTAGGCCCTTTGCACAGGTTCTTCCCTCTGCTCAGGTTTNNNNNNNNNNNNNNNNNNNNNN
NNNNNNNNNNNNNNNNNNNNNNNNNNNNNNNNNNNNNNNNNNNNNNNNNNNNNNNNNNNNNNNNNNNNNNNNNNNNNNNNNNNNNNNNNNNNNN
NNNNNNNNNNNNNNNNNNNNNNNNNNNNNNNNNNNNNNNNNNNNNNNNNNNNNNNNNNNNNNNNNNNNNNNNNNNNNNNNNNNNNNNNNNNNNN
NNNNNNNNNNNNNNNNNNNNNNNNNNNNNNNNNNNNNNNNNNNNNNNNNNNNNNNNNNNNNNNNNNNNNNNNNNNNNNNNNNNNNNNNNNNNNN
NNNNNNNNNNNNNNNNNNNNNNNNNNNNNNNNNNNNNNNNNNNNNNNNNNNNNNNNNNNNNNNNNNNNNNNNNNNNNNNNNNNNNNNNNNNNNN
NNNNNNNNNNNNNNNNNNNNNNNNNNNNNNNNNNNNNNNNNNNNNNNNNNNNNNNNNNNNNNNNNNNNNTTTAGTATGTGTCTCCTCCGTTAGA
CTGTAAGCTCTATTGGAGTAGAGACAATTCCATCACTAGACTGTAAGCTCTATAGGAGTAGAGACTATTCCATCCCCAATGGTAGGTACTCAAT
AAATATTTGCTCAAGAAAATGGGAAATGTTGAATGTGTACAGACACATAACATTTTCCATTCAAGTTCAAGACAAAGATAACCACATACCTGGA
CCTCCTAGGGTTAGGGACTCCTGCGCCCGTAAGAAACATGCTGCCCTCAGATTCTCAATGGGTCGGTGAAGTTAAGAACAGCTCACTCTAACAT
TCTCCAGCCTACCTCACCTTTTCCCTGCCATCCTTCCCTCAACAACTACAACAGCCTCACATTTAGTATTAATGGTATGTGCTTTGGTTTTAGC
AATCTTTTAAAAACACAAAACAGGGTCAACCTCCTCGGAAAAGCCAGTCAGAGACTATCTAATGCCCTCAGAGCAAAGTCCAAACTCTGTTGGG
GGTGGGGGAGTTGTAGGCCTTGTCTACTTCTTCATCCTCATGTCCCCTCATTTGTTCCCTCTTCCCCACCTCACCCCACCCCACCTGGACAGCC
CAGCAGCGCAGACTAGGGGTTCTGGGTTTAGGGTTCCCAGGCAATAGCAGGGTGTTTTCTCATGCCTAGACTCATGCAGTGCCCTCTGCCAGTC
CTCTCCTTTGCACCCAGCAATTTCGGGTGTCTTTATGCCTCAGCTTAGATATCTCTCTGGGGTTCGGTGCTCCTCCTTGGGGCGCCCATAGGCT
GCATCTGTCCCTGACAAGGCACACAAGATATTGAACTATAGTTGCTTGGTTACGGACAGTCGTCTCTGTGAGCTTTGAGGGCAACTGCCATGTA
TTATGCATCTTTTGAATCCCCCTAGCCTAGCCGGGTGCTAGCCCAAGTTAGGTGCTTATTACAGATTTGTTCAGTTAGCGAATGAATCAATGAA
TAAACTGGCAATTCGTGTCTGGTTCATGGGCACCAAAAACCGTGCGAAATGGATAAATGAGCAGGTAATGGCAGTACAAAGTTCGGATCTAGAG
AAAGATCCAGATTAGGGAGTTCAGAGATGAGTAAAACGCAGACCCAGCCATCAGAGAATTAACAAGGAAGATAAATCTCTTCAAGAAGCCAGCC
GGAAGGATTAAAAGAGAGTCGTCCAAGTCCCGGCCGGCCCCGGGGGCGGGTCCCTGTCTAGCCCCGCATGCTCCGCGCCAATGGGCGGTATTGT
TGATCACGAGTCTCCGCCCCCTTCGCCTTGAGGGGCGGGGCCGGCCACTCCCGGAGAGGGGACTACGTTTCCCGGCGCGCCGCGCGGCCGGAGC
GAAAGAGGAGCCGGAAGTGGGGCGCGCGAGGTCTAAGGGCGCGAGGGAAGTGGCGGGCGGGGACTAAGGCGGGGCGTGCAGGTAGCCGGCCGGC
CGGGGGTCGCGGGTATGGCCGAGGCCAGGAAGCGGCGGGAGCTACTTCCCCTGATCTACCACCATCTGCTGCGGGCTGGCTATGTGCGTGCGGC
GCGGGAAGTGAAGGAGCAGAGCGGCCAGGTAAGCGTTCGTGGGCCGTGTGCGAGGGCCGCGTGCAAGATGTGGAGATCAGCGGCCCGCGGCCCG
CGCCCCGTCCCCAGGCGACCCGGCAGGCGCCCGGAGCCGGGTCCCGCAGTGCTCGACGGCGCGGCCAGGGGTACCGGAGGAGCCGCAATCTCTG
CCTTCCCACTGCGACTTCAGTTCCCCTGGGCCTCACTTTCCTCATCCGGGCAGTGGGTTGGGCCAGAAAGTGTGCTCGCAGGGGCCGAACTTTG
TAATTCCCGCTTCCCTTACCTCCACGCCCTTCCTGGTAGCGGGTATTTTAAGTTTCCTAAGTCTCCCGCCACGTGGCTAGGCTCTGCGCGGCCC
CCCCTGGGGCAAGGAGGTTGCTGCGAGTCTCGGGGGTGGATTGCGACCAGCCCCTCGGGGGAGCGCCTGGAAAAGGGACCCTACAGCCTCTTAG
TTGAGCTGGAACTCAGGCCTTTAGCGATTGTCTGTACTGAGACGGTCAGCTTTGGTACTCGAACTCGTGGTACAGTCATTTCTTACTTGATTAA
TTCAACTGTTAATCCGGTACTCAGGGTGCTTCCTGGTGTTCGAATGGTGAGCACCATCTCTCAGCCCTCCTGGAGCTTACACTCTAGTAAGGTA
GACAAATCAAAGAATCACAAAAGTGACTATATGCTTAGCACCGCAATAAGTGTTAAGAATGAGAGGGATGGGCCGGGCACGGTAGCTCACGCCT
GTAATCCCAGCACTTAGGGAGGCCGAGACTAGCGGATCACCTGAGGTCAGAAGTTCGAGACCAGCCTGGCCAACATGGTGAAACACCGTTTCTA
CTAAAAATACAAAAATTAGCTGGGCATGTTGGCGCACGCCTGTAATCCTGGCTACTCATGTGGCTGAGGCACAAGAATTGCTTGAACCCGGGAG
GCAGAGGTTGCAATGAGTCAAGATCGTGCCACTGCACTCCAGCCTGGGCGATAAAGCGAGACTCTGCCTCAAAAAAAAAAGAGAGATGGATGGC
AGATTGCCCTGGTCAGGAATAGCTGAGGTGTAAATGCCTTGTGGTGGGAGGGAACTTGTGTACACACTGGCCTGGAGAAAGTCCACTCTCTTGA
GCCCAGGAATTTGAGGATACAGTATGAGCCATGATCATGCCACTGCACTCCAGCCTGGGCAACAGAGCAAGACACTGTCTCAAAAAAAAATTTT
TTTTAAGTCCATAGCAGGCCAGGTACGGTAGCTCACGCCTGTAATCCCAGCACTTTGGGAGGCCGAGGCAGGCGGATCACTTGAGGCCAGGAGT
TCAAAACCAGCCTGACCGACATGGTGAAACCCTGTCTCTACTAAAAATGCAAAAATTAGCCATGCATGGTGGCATGCACCTGTAGTCCCAGTTA
CTCGGGAGGCTGAGTCAGGAGAATCACTTGAACCCAGGAGGCAGAGGTTGCACTGAGCTGAGACTGAGCCACTGCACTCCATCCTGGGTGACAA
GGCGAGACTCCATCTCAAAAAAAAAAAAAACGTCCATAGTGGCTGAAGTGTGAAGTACAAGGGCCAGATGCCCCTGGGGAGATGGAGGCAGGGG
CTGGCTGGAGTGGTCTGGTGGGCAGTTTGATCTTCCTTGGAAGAGCAGTGGTAAACCAATGGAGAGTTTTGAACTGGTGAGACAGTATCCTAAG
TAGTCAGATCCCTTTCCCCTGTGGTGTAGGCTCTGCTCCTAATGCTTGCTCTCAGAACCTCCTGGAGGGACTAAAGGGTGATGGGCCCTAAGAC
GTTATGTATGCTTTTCCCAGTTTCTCTGAACCTCACTTGCTCTTCCTACCGCAGCTATGGTACTTCACAGATAAGGGGAGCAAGAGATAGTACC
CATCTTCATTGGAGCAAAATATCCTGCCGTCATGGAGCACACATTCTAGTAGGAGCAGACAGGTGACAAATAGAAAAAGTTTAATAAGTTAATG
ATATAGTATATCCAATGATAGTTGGTGCTTGCTATAAAAGGCAGGCAAGGGGGATAAGGGATGTCAGACTTCGATTATAAGTAGGGTAGTCAAG
GAAGTCTCATTGAGAAGGTGTCATTTGGGCAGAGACCTGAAGGAAATGAGGGAGTGAGCTGTGTAGTTAACAGGGGACAGAACATTCCAGACAA
GAAGAATAGCAAGGCCGCGTTAGAGGCAGGGTGGCCTGACACATTTGAGGACAGCAAGGAGGACACTTTGCCTGAGGTGGAGCAGAGGGAAACT
GACTCTTGAAATCTTAGTGTTACCGGCTCACTGCTGGGCACTGACAGATGGTCTTGTTCAAACCAGATAGCAGCCTGCAAGGTAGGTATCGCTG
TTGTCCCCATGTTAAGAAGAAATCTGAAGTTCGAAGACGTGACGAGATTAGTTCAGTCCACCCGTGCCCCACATTGCTTAGCCTCATTAGAGTA
CTTGATATCCTGGCTTATTGACATTTACAGAGACATTGGGCCCTCTGGCCTCTGCTCCAAAGGCCTGGATTCCACCTGGTTCCCTCTGCTTCCA
CCAAGGGACTGGTACCATTTGGGCCCAGTCTTCTCCCAGCAGACTAGTAGACTGTGGTCATGCCACCTGGATGCCTCAGGTGTCTGGGCTGTGA
TTCGTGCTTTGGGAAGATTGGCTGGCCACGTCTTTGAAAGCTTTTTTAAAGGTCAAAGGTGGGGAAAACCCTGTCTCATGGCCTCTAGGCATGG
ATAGTGCCAGAGAGGCTGGGAGCTGGATGAATGCTAGCTTGGAACATTCCACCTCTGGCCTTTCAAAGGGGTTGTCTAAAAAGGTTTTAGTTGG
GATTGGTTGTTCTTCTTGTCTCTGGAAGGTTTGGGACAGAACTGGCAGGGCCAAGCAGACATACTTCCCAGAGCAAAAAGACCCTCTTTTTTTT
TTTTTTTTTTTTTAAAGAAAGGGTCTTGCTCTGTTGCCCAGGCTGGAGTGCGGTGGCACAAGCATGGCTCACTGCAGCCTCGATATCCTGGGCT
CAAGTGATCCTCCCACCTCAGCCTCCTGAGTAGCCGGGACCACCAGTGCATGCCACCATTCTCAGCTAATTTTTAAATTTTTTTATAGAGACAG
TCTCACTATGTTGCCCAGACTGGTCTTGAACTCCTGGGCTCAAGTGATCTTCCTGCCTCAGCCTCCCAAAGTGCTGAGATTACAGGTATGAGCC
ACCATGCCCAGCCAAAAAGACCCTCTTCTGAACCACCTGTCTATACAAGTCATGAGTTTGGGGAGATCTGGGCCCAAGAAGGATCCTTACTGTG
CTGGGGATTAATTGTGGCTTTCTCTTTACCTCTCTGCAGAAGTGTTTCCTGGCTCAGCCCGTAACCCTTCTGGACATCTATACACACTGGCAAC
AGTAAGTGGTGGGGCCTATAGGGTGGAGTAGGGACGGACACCCCAAGCAACTCAGCTTGGAATAAGCTGGGATACCTATCTGGTCTAAGATCTG
TCCCCATAGCCCACTGTGGACACCATTGTTGCCTCCAGAAAGCCAGCTCACATCACATGGATGGGTATTTCTGTGTGGATATCTGGTAGTGGGA
GGGGACATTGAGAGCTGTGATCTCTTAAGAACAAGAGCTTCTCACCAGCTTGTCAGTTGCTCAGCAAACGTATATTGAGCACCTCCTGAAAGCC
AAGTCCTGTTCTTACTTAGTATGCAAATATTGTCACAAGTGAGACAGACATGGTTCCTTCTTTCCTGCAGCTGACATTGTAGCCAAGGAGGTAG
GCATAAGTCAAAGAATGAAACAAATGAATGTTAAATTACAGTGGTAGTAAGGATTACAAAAGAGAGGAATCTGTTGCCACAGCCACATAAATGG
GTAAGTCTGGCTTCATCTGGGGGTCCAGGGGAAGCTTCCCTGAGGTGATCTTTGACTTGAGAGCTATAGGAATTGGAGGAGTGAACTATGCAGT
GGGTAGAGAGTGGCAGGTGGAGTGTACCTGCCAGTGGAAATTGCTAATGCTAAGTCCTGTGGCTGGTGGACAGTACAGATGGGGCTAGGTCATC
GCATGGATAGCCATGCATGGGCTGGTTATCCATGGTGAGGAATTTTGTCTTTATCCAAGAGCAGTGGGGCCATGGTAGGGTGAAAAAGTGAGGA
GATTGCTCTGCACCATGGTGAGACTGGTGGGGCCATGGTCACCATCGTCCAGGCAAGAGCTGATGGGGCTTGACACAGGGAGAACAGGGTAGAA
AGTGGATTCCCAAGAATCATAGGGATGAAACCAGGGCCTGTGGATGGGTGGGAGAGGAAGTATCTTATTGACTCCACATCTAACTTGTGTACCC
ATGCATAGAGCTTGAAGGGAACTCAGTTTGGAGGGGAAAGATTTCAATGACATGTTGAGTGTGAGATGCCTTTTAAACATGTAAAATTTATGTA
CTCTTCAAGGAAGGGGGAATCATCCAAGGATATATCAACAGAGGAATGGTTGGAAAATGGAGAGAGTAATTGTGTTCTCTTCATGCACTGGCCT
GACCACAGCTGACTAAGGGAGTGAAGGACATGCAGACATATCCCATGAGGAATGGTAGAGAGTACTGAATTGCCTTGGATGGAAAGGAGGCAGG
AGAGGGGTGTGAGGGACCACTGCACATCTTTGAGGACCAAGAATAGTGCGTTCTCTGAGGCCCCGGAGACAGAAGTGGGCCCCAAATGTACCTG
CTTCAGGAAGACAGGTTTCAGCTTCTGAATATAATGACATCAGAGCTATCTAAAAATGAGGTGGGCTAGGTGGAAGTGGTGGGCTCCCTGTCAT
TAGAGGTGTGTAAACAAAGGCAAAAATGGTGTGGAAGGGATTACAGCCTCTGGTGGAGAGCTAAGGTCATTGAAAACCCTGCCAACCCTCAGTC
CTCTGCTGCTAAGGAGAGCTTAGAGCACAGGGCACAGCCCACACTTCCTCACCCTGACTTGCCCAGGTGAGTGGGTGTTATTCGTAGTACTTCC
TTCCCCCAAAAAACTGCTTCAGTGAGCTACTCTGCACACTCTTCCCTGCCACTGGCCCCTTCTATGGGTGAGGGGGACAAGGACCTCAAACCCA
CGAAAGGCAGCCTAGCCTAGCAATTCCCTGCAGAGTTCAAACCCAGCAACTAGCTGTATGTATGACCTTGAGTGGATTTCTTGGCCTCCCTGAG
TCTGTCTTCACCTATAAAATGAAAATAATGATGGCAATTATCTCATTGCATTGTGAGGGTTAGACACAGTGCTCCATATAAAGTGCTAAAACTA
CCGGTTGGAGGCTCCCCGACTTCCTGCACCCGCCTCAGTATTTATTAAGCATCTACTACAACCCAGCAATATTCTTGATATAGCTGGGAACAAA
CCAGAGAAAAATCCCTGCTCAACATTTTTGTTGGGGGAAAAGAGGCAGAATAAATTGATACATGTAAAAATGAAACCTGTTTTTAACAGGAGAA
TCCTGACAAGTGGCTTTCCTGGGAACAAGGGACCCTACTATCACATCCCAAACCATGACAGAGCAGAGTCCATCGCAGCTGGGAAACCTGGGGC
CTAGACAGTGACTCCCTGGGATGGGGGTCAATGGGCGTGAGACTTCAAAGTCCAGGGCCTCAGCCATCTGGGTGCTTATCCTACCCATGCCCTA
GACTCACTTTGCCATGAGCAAGTCACTTAGTTGTTCAGTTTTTGAGACATGTGTGAGGCACTGAGGATACTGTAGTGAGCTGCCAGCTGCCTTC
CTCCCTGGGCCTTTCTGTGTAGGGGAGGAGTCTAGGAAGTAAGTAAAATAACAGGAGATAGAGAAAAGCTATGAAGAAAATGAAACAGGATCAC
AGGGCAGAGCATGCCTTGGAAGAGGGGCAATCTTCGAGGGCCTCTCTTGGGGGGCTACATTAAAGTTGAGACGGGAAGGACGAGGACCTGGGCA
GAGTCTTCCAAGAAGGCACAGTACACACAGCATGTTCTGCAGGGGGAAGAGCCTGGGCGGTTCTGTGAGGTGCCTGCATGGGTCAGCTCCTATC
ACTTAAAGACTGGTAGCTGCTGCAGCTGTTATATAACATTATCCAGCATTCCTGATTATTTTAAAGACTAATCAAGAATTGTAAAAGCACTTTA
TGAAGTGAGTGAAAATGCAGAATACAAAATTGTGCCTATACTGTGTTTTCACCACTGTTTAGATTCTATGCACATTGCCTTTAAGAGCTGGAAG
GATGCGGGAAGGTCTGTCTAGTCAATTCTTGTGGAGTTGTTCTGTCACCCAGTTGGTATAGACAGTCACCCTTGTCCTGCAGAACCTCAGAGCT
TGGTCGGAAGCGGAAGGCAGAGGAAGATGCGGCACTGCAAGCTAAGAAAACCCGTGTGTCAGACCCCATCAGCACCTCGGAGAGCTCGGAAGAG
GAGGAAGAAGCAGAAGCCGAAACCGCCAAAGCCAGTAAGAGCCTTGCAGCTTTGGGAACAGGCTATGGAATATTGATTGTTCTAGGGTAGAGTC
TACCTCCAGCTTCTTCTCTTATCACTAGAAGACCTAAAAGACCCTGGGGAGGAGATTGGGAGGGCACCACATATCTTTGGCAGTATTTGAGCCC
TTCCTCCGTGCCAGGCATTATATCTCCATGCTCTGGGGGTGCAAGGCCGAACCAAAACAACCAGATGGGCCCTTCCAGTCTCATTTGGTGTATG
GGGCCCAGGAGCTGCCCTATTACAGGCTCCCAGGTGATTCTTATTAGCTGGAAAGAAGACACACGTTCAGAAGTACTGCTGGAGGGATTTCAGA
AAGCAGCTAGCGGACACATTTTCTGTGTGACCTGTGGGATGCTTTAGGAATTGCTGATCTTCATGTTCGTTTAGAATTGTACCCATTAGCACTG
GAACGCTGTACTGGGCACTGGTTTTACACCGTTTGCAGGAGTAACTCAGTCAAAGCTTTTATAGCCCCTTCTTCTCCTAAGGTCCCAGGGCTCC
TTGTACTTTCCCCAACAGCAGCCATAACTCTACAGAGGAATTGCTGTGTCTCCTTTGCATCGTATTATCTTCTTTTGCTTACATAGAAGACACA
TTTCTTAATACTTATTTTTTATTTTTCAAGACAAAGTCTTGCCATGTTGTCCAGGCTGGTCTTGAACTCCTGAGCTCAAGTGATCCTCCTGCCT
TAGCCTCTTGAGTAGGTGGAATTCCATGCACATACCACCATGCCCAGCTTCCTGAGTCTGCTTTTAAAGTGTTTGAGATCATACTAGGTATATA
TTTTATTATTTTTTTGAGACGGGGTTTCACTCTTGTCACCCAGGCTGGAGCACAATGGCGTGATGTCAGCTCAGGGCAACCCCCGCCTCCTGGG
TTCAAGTGATTCTCCTGCCTCAGCCTCCCGAGTAGCTGGGACTACAGGCATGCACCACTACTGTCAGCTAATTTTGTGGGTTTTCTTTTTCTTT
CTTTTTTTTTTTTTTTTTTTTAATAGAGACGGGGTTTCACAATGTTAGCCAGACTAGTCTCAGGTGATCCGCCCACCTTGGCCTCCAAAAGGGC
TGGGATTACAGGCATGAGCCACTGCGCCCTGGATATATATTATATATCGCTTAATTTTACATTATAAATGCAAAACGAGTTCACTTTGAACTGT
AGAAGAGCATATAGAAGAAAACTTAAAGGTTTTTTGTTGTCCTACCCTGTTCCCTATCATTCCTAAGTGCATCTCCTCATAGGTAACCTTTAAA
ACTTCCTCCTTTGCCTCTATATTCATTCAAACATGTATTCTTACATGCATATATACAGACCTGCATGCTATTTGAAACACAAATGGTAAAATTT
CTTACTGATTGGCTATTTGGTATTAATCAATTTTATAAGCTGTGATAATGGAGGTGTAATTACATTTTTTTGTTTGTTTGTTTGGGGCTTTTTT
TGATATGAGGTCTTGCCATGTTGCCTAGACTGGCCTTGAACTCCTGGCCTCAAGTGATCCTCCTGCCTCAGCCTCCGGGTATGTAATTTTATTT
TTTTAAAAGTCTTCACTGGGTTGGGCATGGTGGCTCACACCCACCGGTAATCCCAGCACTTTGGGAGGTCAAGGTAGAAGGATCACTTGAGCCC
AGGAGTTGGAGACCCGCCTGGGCAACATGGCAAAACCCTGTATCTACAAAAAATTTAAAATTTAGCCAGGCATGGTGGCGTGTGCTTGTAGTTT
CAGCTGCCTAGGAGGCCTGAGGTGGGAGGATTACTTGAGCCCAGGAGGTCAAGGCTACAGTGAGCCATGACTGTGCCTGCACTCCAGCCTGGGC
AACAGAGCAAGACTGTCTCAAAAAAAAAAAAAAAAGGAAGAAGAGTCCTCGTTGGCATCCTGGGCAACATAGTGAGACTCCGTCTCTGCAAAAA
ATAAGAAAATTAGCTGGGCATGGTGGCATGCACTGGTGGTCCCAGCTACTCAGGAGGCTGAGATAGGAGAATCATGTGAGTCCAGGCATTGGAG
GTTGCAGTGAGCTATGAATGTGCCACTGTACTCCAGCCTGGGCAGCAGAGCAAGACCCTGTCTCAAAAAAAATTTAAAAACGCATCCTCATTGA
GAGAGAAACATGCTGAAGTATTTGTGGGCAACGTGGTAGGATCTATGGCATTTTCTTCAAAGTAATGCTTGATGGGGAAGGGTGAGTGAGATAA
TACATGAGATGAAAAGATTGGTCACAAGTTGTTAATGGTTGGAGCTGCCTGGTTCTTCCTTTCTATTTACTACTTAAAAATTTTCCATAATTAC
AGAAAGAGAGAGATGGAGTGAAGTGCCAGGAAAAGAATTAGATCATGCCATTCATCTCAGCAACATTCTTCTTAACAAAAAGAAATCTGAGATT
TAAGGAGACAATACCCTGGTATAAAAGCACTGAGAAGCTGGGTGCGGTGGCTCATGCCTGTAATCCCAGCACTTTGGGAGGCCGAGGTGGGCAG
ATCACGAGGTCAGGAGATCAAGACCATCCTAGCTAACACGGTGAAACCCCGTCTCTATTAAAAATACAAAAAATTAGCCAGGCATGGTGGTGGA
CGTCTGTAGTCCCAGCTACTCAGGAGGCTGAGGCAGGAGAATAGTGTGAACCCAGGAGGCGGAGCTTGCAGTGAGCCGAGATTGTGCCACTGCA
CTCCAGCCTGGGCGACAGAGCAGGACTCTGTCCCAGTAAATAAATAAGCACTGAGAATCAGTGAATATCGATATCTAACGGGGCCCAGGTGGCA
TGGTTCAGCCACCTCTCCACTAAGAAGCCATTTGAATTCCAGGCAACTTTCTCTGTGGACCTGAGGCTGGCTGCCTGCCTGACCACTGCCCCTT
CTTGCCGAACAGCTTTCAGGGCTACAGTGTGGTGGCCTGTGTGAATGGTGCCCATTGCAGTGTGCAGTGCCCAGTAGGCAGCAAGAATGTGGGC
CAGTCCTTTTCCCTCCAGGGGCCTCCACGTCTCATGCTGCGGGGGAGTTGGGAATCCATCAAGGATGCAGACACATAGCTTCATGTTACCATCC
TCTTCTCTCTTGCTCCTGGTGGACCTGGCTGATGCATCACAGAGCTCATTCCTGCAAGTCTGGGCTCAGCCTCAGATCCTCATGCCAGCACCAG
GCAGCCAATACCAATAGAATTGTTAGGTGAGATGAAACCTGTTTGCCATTCATAGATGAGAAAAGCTCATCTGGCTCCTTTAGCAGATGTTTGT
TTCTTGCAGCCCCAAGACTAGCATCTACCAACTCCTCAGTCCTGGGGGCGGACTTGCCATCAAGCATGAAAGAAAAAGCCAAGGTGAGTGCGAC
TGCCTTCCAAGCTATTGCCTATGGGATTTAAGGTGCCTGGTAGGGGACAGTCTTACATGTCAGAGAAGGATAGGGTTGTGAGTAATTGCCCCAC
CTGGATTCAGAGCTCAACCTGTGTCACCAGTTGTGGGATCTTAGTCCCTTCACCTCTCTGGGCCTCAGTTTACTTTTCTATAAAGATAAGGATG
ATGCCTGCTGCAGTGGGCCACTGGGCACATTCTACACCTGGGGTAGGCGATTTCTTTCCTCTTTCATGCCTGCGTTCACCCGTTCACTCAACAG
ATCTTGACTAATACCTGTTATGTTCCAGGCACTGTGCTAGGTGTGGAGGCACCGTAGTGATCAAGACATCTGTGGTTCTGAAACTCTAAAAGCA
TTTTCCAAACTGGAAACTGCTCAAAAAACAAGGTGTCATTTTCTAATAATCCAGAAAGCAGAGTTAGATACATACATGTATAAAGAATTGTGCC
TCTGCGATTGCCTGGAGCATTAGCAACAATGTCTCAAAGTAATTATGAAGTAATGATAAGATCAACAACAAACTGCTACTTACCACTTAGTAAA
TAACTACCATGTCCCAAGAACTGGGATTCTGTTTTCTCAACACCTCTGGTGAGAGGAGGTGCTGTTTTTAACCTCACTTTAAAGATTGGGAAAC
AGATTGAAGGGGTAGTTTACCCAAACTCACACAGCTAAGAAGTGGTAAGATTGGGTTCAGATGCAAGTGGCCTGTGCTCTTAGTTCACCATGCC
ATACCAGATGTGTCTGTCACTCTTGTTCTCTGTAGGCAGAGACAGAGAAAGCTGGCAAGACTGGGAATTCCATGCCACACCCTGCCACTGGGAA
GACGGTGGCCAACCTTCTTTCTGGGAAGTCTCCCAGGAAGTCAGCAGAGCCCTCAGCAAATACTACGTTGGTCTCAGAAACTGAGGAGGAGGGC
AGCGTCCCGGCCTTTGGAGCTGCTGCCAAGCCTGGTAAGAAGTCCCCACCTCTAGGAACCTAGTCCCCAGAACTTGGGCTGGTGAGGCAGGCCT
AGGCATTGCTTTAAGTTCTGGGACATTTCTGGAATCAAAAGTTTGTCTCCAGGACAGCCAGGTTCCTGCATCTTAGGACTTTTCTCATCACCTA
GACGAGGGAGGGTCAGCTTACAGGGACCTGGCCTCAGGCTGAACAGCCCACCTGGTGGTTGGAGCATTTTCTGCTTTATGACTCCCTGGTGAGT
TACAGGGACAACTGGCAGCTCAGAGACTAAACTGAAAGGCCTGATTTGCCTCTGTTTCCTATGTAGAGTAGACATCTGTCTGGCCTGCATCAGT
GGATATGATGGTGGATGGAGGTTCTGTAGACTGTCAGGTGCTGGTGCATATTTGTTGGGTCCCCTCACAGCCCTTCCCAGGGCCTCAGAGATGT
GTGGGAACATAGGGATGGTGATGGTACCCACCTCAGAAGGGGGCTTCACAGCTCAGTGCATGTGAGGCACACGAGGGGTGAGCGCTCAGCACCT
GGCTTTGATGAGCAGCTGGTTTGTGGGGAGGTGCTGGGGAGGGGCAGGTGAGGCTGGAAAGGGAGTCCCTCAGTCCCCTCCGTGTCCGATCCTC
AGGGATGGTGTCAGCGGGCCAGGCCGACAGCTCCAGCGAGGACACCTCCAGCTCCAGTGATGAGACAGACGTGGAGGTAATTGCCACCCATCCC
TAGGAGTTGCCCTCTCCCAGCCTCTAACCCTTCCAGGAACCTGTCTGGGGCTTCAGACACCAGTGGGCCCAGATGAGTTCAGCAACTGTGGTAG
GGTGACCAGGAGCTGGAAAGGCTGCAGCCGGAGAGGGGCAGGGAGAGGAGTCTGGTGCTGCTTGCTGCACTCTGAGTGTGAGATCAGCCCTGGG
GGCAGGAGAGGGACACCCTCCTGCCTGTGAGACTAGACAAGCCTTCCTGGGAGAGGTGCCCTGGAGTAGGGCCTCAAAGCACAGTGGGCTTCAC
TGGGAAGGGATGTGGAGGAGGCAGGGCATTCCAGACAGGAAATGGGGCAAGAACAGGGCCCAGAGGCAACAGTGTGGCTGTCGTGGTCTGGCTA
GGGCTGCGGCTGCTGAGAGGGTTCTGGGCCAACTGGTGAATGCCAGGCCTAGACACTTGGCTAGAGTTGGGCAGGACTCTTGGGTTTGTGAACT
TTGACCTGGAAAAGGTCTCCACAGGTTACTTTTTATTGTGTACCTACTAAGTGGCAGACCTGGGGAATATAGTGATGAGCAGGACAGGCAGAGT
TCCTGCTGCCATGGGGCAAGGGAGCGTCCCTCAGATATTTAATTGGTGATGGCTGCTATGAAGTGGAAATGTAGAGGGCCACGCAGGGCAGGAA
CCTGACGTTGATGAGTAGGCGTAAGCAGAAGGAATGGCATGTGCAGAGAAGGCGGCAAAGAGAGTTTGGTGCTTTTAAAGAACATTGATCTTTT
TTTAAGACAGTCTCACTGTGTCACCCAAGCTGGAGTGCAGTAGCGCGATCTTGGCTAGCTGCAACTTCCACCTCCCGGGTTCAAGCGATTGTCG
TGCCTCAGCCTCCCAAGTAGCTGGGATTACAGGTGCACGCCACCACGCCTGGCTAATTTTTGTATTTTTTGTGGAGACAGGGTTTCACCATGTT
GGCCAGGCTAGTCTCGAACTCCTGACCTCAAGTGGTCCATGTGCCTTGGCCTCCCAAAGTGCTGGGATTACAGGCATGAGCCGCCACGCCTGGC
CAAAACCTTGATCTTTAAATGAGAGGGAGAAACCAGGCACGGTGGCTCGCACCTGTAAGTGCAGCACTCTGGGAGGCCAAGGCAGGAGGATCAT
TTGAGGCCAGAAGTTTGAACCCAGCCTGAGCAACATAGTGAAACCCTGTCTCTACAAGATGTTATTTTTTAAAAAAACAAATAAATTATGGGGA
AAGTGACACAAGATGAAGTCCTAGGTAGACAGGGGCCAGATCTTCTGTCTGACCTTGAGGACCACCATAAGGAATTTGGGTTTTATTCTAGGGG
CTGTGAGAAGCCATGCCAGCAAGGAGAGATGGCCTGATTTGCATTTAATAAGATTGCTGGCTGCAGCCTGGGTTGGAGGGCAGTGCAGAATAAA
AGCAGTAAGACCATGTAGGAGACTATTGGAGTAATACTGATACTGGCATAAGAGGCTGGGGGCTGGGAGACCAAGGTGTCCACAGTTGGAAAGA
TGTTTTCAAGGGAAAACCAGCACAAGTCAGGGATGAACTGATCTGGTGCCCAGGGAACTTCTCACTTTACTGTGCTGCCTGGCCCAGTAACCCT
GTGAAGGTTGAAAGCTCACCCCCATCTACCCCAGGCCTTACCAAGGGCTGCCCTCCACCTTCCGTCCTCACCCTTGCGCCCTAGATACCACCAG
CTGTAAGGACATCCCTGGCTTCTGTCACCCCAGGCCTTGCCAAAGGGAAGAAGACCACTCCCAGCCCTCCATAAACACACAACCTCAATGGGCT
GAGGCTGTGCAGAGCTCCAGTAGCAGACGCCCCAGAAACCCAGGGCCGCAAGGGGTCTGATGGATCTCAGAGGTAGAAGTAGGGCACTGACTGC
CTGGGAAATGTCTGAATTGTGGAAGTGTAGGAAAGAGCTCACAGAGGGAAGGAATTTGCCCAAGGTGTGGCAAGCCAGTGGCAGAGGTGGTGTT
CACATCCTGAACTCCTGGCCCTCAGGAGGGCTGCTGTGATCAGATACTTGAGTTTAAGGGGCAGACAGGATGCGCTCTCCTGATTGAGATGCAA
GCCCTTCTCTCAGGCCAAGCCCGGTGTGTGCCAGGTGGGAGATGAACGTAATGGTTTTGAGATCTGTTCCAAAGTCAGACAGTCCAGGGTTCCA
ATGGGGCTCTGTCCCTTCATATTGATCATGAGTGATTTTACCTCTTTAAGCCTTGTGTACTTTTCTGGAAAATGGATCTAAAGCTAATAGCCGT
CTCAGGGAGTTGCTTAAAAATCCAGTGACATTAGGAAAGAGCTTTATCAACTGCTGAAGCCCCTAATACAGAACCTTAGGGGGAAACAGTAATT
ATTATTCATTTTCTAATTCCATCCTCTTGTTCCAGGGGAAACCCTCAGTAAAACCAGCCCAGGTCAAAGCCTCATCAGTTTCTACTAAGGAGTC
TCCAGCAAGAAAGGCGGCCCCAGCCCCTGGGAAGGTGGGGGATGTGACACCCCAGGTCAAAGGAGGGGCCCTGCCCCCAGCCAAGAGGGCCAAG
AAGCCAGAAGAGGAGTCAGAGAGTAGTGAGGAGGGATCTGAAAGTGAGGAGGAGGCCCCTGCAGGGACACGAAGCCAGGTGAGGCCTGGAGGAG
GGCTGCCCCTTGGAGGACCTGCGGGTCCCCCAGCAGCCTGAGCACTCTGCCATGAGCACCTCTGCCACTGGAGTTGGGGAGAGGGAGGACTATG
GTGTGAAGTTGAAGAGCAAGAACAGCCTGCTTCCCACAGGGGAGTCTTGCACTCCACTTTGTCTGTGACCAACTTTACCTCAGTTTCTCTGCCT
AGTAAATGGGCCGCTGTCCTCGTCCCAGCCAGTCCTGCTGTGAGGGACTTGAGAAGTTTTGATTGCCTAATCCTCTGACTTCTCAGGACAAACC
AGACCCTGAGCAGGCAAACACTACGTTAGCTAAAGGGAATCCAGTTCCCTTCCCCATCTGCTGGGAGTGGGCAGGGCTGCAGCCCCAAGGCCCT
GGGTGTATCCCAAGGGCAAGACAGGGGGGCTGGAAAGCAATGGAAGTCAGAGCAGGAAGGAGGAAGAGTGAGGGTCACCCACCCAGCCCCAGGC
CTGGGCAGGACAAGGCGGGGGCATGCAGTAGATAAGCAGATCCCCTGCGTTAGCTGCTGGTAAATGGTAAAGAGGAAGTGGGGGACATAGGAAT
GGCAACTTGAAGCAGAGTGCTCTGGGCTGGCCTTGGGAGAAGGCGTCTCAGTAAAGACCAGAAGGAGGAAGCACTCTTAGGAAGGTCATTCCAG
GCAGGGGCTCAGCAAGTGTCAAGGCCCTGAGGTAGAAGTAGGACTACGAATTGTGACAAATTGTTGTTCCCACCCCATCTACAGGGAACTTCTA
CGCCTCGGCTGTCTATTTTGCAGTGTCTGGGGGCTACACAGTGTTGGATGGGCATCCACTTTGAGAAGGAACACAAATGTGAATTTTTTTTTTG
AGACAGAGTCTTGCTCTGTTGCCCAAGCTGGAGTGCAGTAGCGGCAATCATAGCTCACTGCAGCCTCACTCCTGAGTAGCTAGGAATACAGGCA
CACACCACCACACCCAGCTTGTGTGTGTGTGTGTGTGTGTGTATAGACAGGGTTTCACTGTGTTTCACAAGCTGTGGACTCAAGCAGTCCTCCC
ACCTTGGCCTCCCAAAGTGCCGTGATTACAGATATGAGCCACCGCACCTGGCCATAAATGTGAACTTTTATGTAAAATCTGCTTTCTCCATGTT
GGCTCAAAAATTTAAAAAGGAGCTAGCCAAGCAAGACCTGTGTGGAGCAGCCTGCACTTTCTGCATGAGAAGCTTCTTAGAAGATCAGAGCTGC
TGTTTTCTAGGGTTGTTGGCCCAGGGCTGAACACCCAGGGCCTTCCAGGGAAGACAGGGCCTGCAGCCACCCTGCCAAAGCCCCAAGACAGTGC
AGAGCCCCACCGAGGAGTTAGTGAAGAGGGGGCCAGGTGTGCAAACCTTGCCCCATGAGGCTGAGGGTGGGCTTCCAGGGGTCCTGCTGCTGTC
CATGTGCAGAAAGTCCAGTGAGGGCCTCCCTCAGTCCCTTCCCCACTTTCAGACTGCCTCTTCATTCCTTCCCTTCCCTGGGCCTTTGCACACC
CCCTCCCCACAGCCCAGTCTGATGATGCTCCCGATAAGCCAGTGCCTGTGCCTCCAGAGCTCTCTGGCCAGTGGGAGCCCAGCAGAGGACAGGC
TCTAACTACCCAGTGTGCTGGGGCACCAGGGGGAACCATGTTAAGGAAGTGGTGTCTCTTAGGGAGCCAGAGACAGAGGAGGCAGTGGCTAAGT
GAAATGGAACAGGGGGCATGGAGGCTCCAGGAGTGAGAGTGTGTGAAGCTGATCGATTTTTGAGAAACCAGGAGGCCAGTGTGGCCAAAGTATC
AGTCAAGGTGGGGAGTGGGGAGGGAAGCAGGGGAGGTCTTAGGAGCCTCATTAAGGCCTCTGGACTTTATCCTAAAGGCATCACCAGAGAGTTT
TCACAAGCAGGAGAGCAAGCTGCCCTTTCTTTTTCACCAGGTAAAGGCCTCTGAAAAAATTCTCCAGGTCAGAGCTGCCTCAGCCCCTGCCAAG
GGGACCCCTGGGAAAGGGGCTACCCCAGCACCCCCTGGGAAGGCAGGGGCTGTAGCCTCCCAGACCAAGGCAGGGAAGCCAGAGGAGGACTCAG
AGAGCAGCAGCGAGGAGTCATCTGACAGTGAGGAGGAGACGCCAGCTGCCAAGGCCCTGCTTCAGGTGAGGCCTGAGGAGGGAGACTCCATGCA
GCCAGGCCCGTCCCCAGAAGGCCTTCTCAGGACTTGTTCTCCCACTCTGGGCCAGAGCCCCGGGCGTGCCTCAGACCCCAGCCCCTTACTCCCC
TCTCACTGTGTGGCATCATTTGCCCTATCTGGTCTTCTGTACGTGGTGTCCTGTGTCTCCTCACACGTCCATCCTCTGGGCTGTCTCCCCTTGT
CTTGTTTCTCCAGGCGAAGGCCTCAGGAAAAACCTCTCAGGTCGGAGCTGCCTCAGCCCCTGCCAAGGAGTCCCCCAGGAAAGGAGCTGCCCCA
GCGCCCCCTGGGAAGACAGGGCCTGCAGTTGCCAAGGCCCAGGCGGGGAAGCGGGAGGAGGACTCGCAGAGCAGCAGCGAGGAATCGGACAGTG
AGGAGGAGGCGCCTGCTCAGGTGAGGCAGAGGGGAGGGGTGGAGAGTAGCCCCATGCCTAAACCCCAGCACCTGCATGGGTGTGGCCACCTTTG
CCACATCCAGCTCCTGTCTCCACACGTCCACCCTCTGGGCTCTCCCCTCATCCTGTTTCTCACTCCAGGCGAAGCCTTCAGGGAAGGCCCCCCA
GGTCAGAGCCGCCTCGGCCCCTGCCAAGGAGTCCCCCAGGAAAGGGGCTGCCCCAGCACCTCCTAGGAAAACAGGGCCTGCAGCCGCCCAGGTC
CAGGTGGGGAAGCAGGAGGAGGACTCAAGAAGCAGCAGCGAGGAGTCAGACAGTGACAGAGAGGCACTGGCAGCCATGAATGCAGCTCAGGTGA
GGCTGGAAGCCGCCCTGCATGGCCTGTGCCCTGCCTCAAAAGACCTCCTGTGGTTTTGACTTTTCCTCTCTGAACCTAGAGCCCTGTGCGGCTG
GCTTCGTTTGCTCTCCTCCCCTCACTCACATTCTCCTTCTGGACTCCCTCCCTAATCTTGTCCTTTGTGTCTCCCAGGTGAAGCCCTTGGGGAA
AAGCCCCCAGGTGAAACCTGCCTCTACCATGGGCATGGGGCCCTTGGGGAAAGGCGCCGGCCCAGTGCCACCCGGGAAGGTGGGGCCTGCAACC
CCCTCAGCCCAGGTGGGGAAGTGGGAGGAGGACTCAGAGAGCAGTAGTGAGGAGTCATCAGACAGCAGTGATGGAGAGGTGCCCACAGCTGTGG
CCCCGGCTCAGGTGAGGCCCCTTCCTGTAAGGCTCTTTCTTTTTCCCCCCCACTCAGAGTGGAGCTGCCTGTGGCCTCCCAACCTCACACTGGG
ACTCTGTCTACAATCTTAGTTTCTTAATGTCTGCACACACCTACCCTGGGCTCCCTCTCCCGATCCTGTGTATCTCACTCCAGGAAAAGTCCTT
GGGGAACATCCTCCAGGCCAAACCCACCTCCAGTCCTGCCAAGGGGCCCCCTCAGAAGGCAGGGCCTGTAGCCGTCCAGGTCAAGGCTGAAAAG
CCCATGGACAACTCGGAGAGCAGCGAGGAGTCATCGGACAGTGCGGACAGTGAGGAGGCACCAGCAGCCATGACTGCAGCTCAGGTGAGGCCTG
GGGAAGGAGGCTGCTACATGGCCTGATCTGCCACACCACAGTCAGCACCCCCGGGGAGCTGTGCTCCCTCAGGCAGAGCATGGGTTTTGGCTGG
TGGGGCAGAACAGATGGGGGACTCTGAGTTCAGGAACCTTCTCCAGCCTTTCTTTGGTGTCCCCTCAGGCAAAACCAGCTCTGAAAATTCCTCA
GACCAAGGCCTGCCCAAAGAAAACCAATACCACTGCATCTGCCAAGGTCGCCCCTGTGCGAGTGGGCACCCAAGCCCCCCGGAAAGCAGGAACT
GCGACTTCTCCAGCAGGCTCATCCCCAGCTGTGGCTGGGGGCACCCAGAGACCAGCAGAGGATTCTTCAAGCAGTGAGGAATCAGATAGTGAGG
AAGAGAAGACAGGTCTTGCAGTAACCGTGGGACAGGTGAGGCCTGTGTTTTCTGGGCGGGCCTCAGGGCCGCCCCTACGTGGTCCTTTGGACTC
CTGGAGACACCTCTCTTCCCCTTGTCATCCCAGGCAAAGTCTGTGGGGAAAGGCCTCCAGGTGAAAGCAGCCTCAGTGCCTGTCAAGGGGTCCT
TGGGGCAAGGGACTGCTCCAGTACTCCCTGGGAAGACGGGGCCTACAGTCACCCAGGTGAAAGCTGAAAAGCAGGAAGACTCTGAGAGCAGTGA
GGAGGAATCAGACAGTGAGGAAGCAGCTGCATCTCCAGCACAGGTGAGGCCTAGAAGGAGCAGGCCCATCCCACCCACACCTGTTCCTGAGCCA
GGGCTGAGGATGGGCTTGACTGGGGGCTAGTGTTGCCTGCAGGTGTGCAGAAGCCTCAGAGGTAGCCTCAACACAGCTTCCTTCCCTATCTTTC
ACTCCATGTCTCCTCTGCCCATCAGAGCTCCAGGGTCTCTGTCTTGTTTGCCTTTTGAGGTCCTCCTGCTGATTGATTCCCTGTGGTTTTCACA
AGCTCTGGAGTTCCCACCCTGCCAGGTGCTGCCCTTGTCTGGGGTTGCTGAGGCCCTGTTCCTCAGGGAAGTCCTGTCTCTGTGGAGCATGGAC
ATGCTCCTGCAGTGTGGAGCGATGGGGTTGAGATAGAGGGTGTGAGCCTGGGCTGCGCAGCATGACAGGTGAGAGCATCTAGGCCTTTTACAGG
AGGTGGCAGCATCTGAGCCATGGGCTGAAAGAGTTGGCCAGGTGAAATGGGCAGGGAGAGTGTTCCAGGCAGAGGAAGCAGTCTGTGCGAGGCC
AGGGAATGAGAGAGTGCCTGGCTTGGGTGCCTTGCCACAGGCGGCACATTGTGGTGGGATGGCTGGCAGTTGTTTAGAGCCAGACCGCCTGGGT
TCAAGTTTCAGCTCCACAGCCTGGCAAGTGCTGTAAGCCCTCAGAGCCCTTACTCTCCTATAAACAGGAAATCAGCCCTCACAGGTTTGGGTGA
GAATTTAGGTGAGATCTCACCTGCTACACCCAGCAAGGGAGCTGCACACAGCAAGTTGTCTCTGTCACCCTGACGATGGGCCAGGCTAATGTGG
AACAGATCAGGAGTGAGGTCTCCAAGCCTGGAAGAGCTGAGAGAAGATGGCTCACTCCCTGCACTCACCCACCCACTGTTTATTATTTTTAATT
GTCGCTCTGTTTTTTTCTGTAACCACTCAGAAATTAGTCATTTCTTTTTTCTCTGTACCAGAGCACACATTTCTACTGATTTTTTTTTGTCCTC
CTCTCGTTGACTTGTGGGACCTCAGGGCTCTAGAATTCCTCCATTGAGGTTTTTAAGCTCTGCAGGGGCCCCTTCCAGAGCCGCCTCTACTCTT
TCCCAAGCTGCAGGCACATTCCAGACCCAATGCCTTACAGAGTTTCATTATGCAGCTCACTTAAATATTTGTCTTCCCTTCTGAGCCTCCCACC
TGTACCATGAGGTGGGTGTTTTATTTTTATTTTTTGAACCATGGGCTATTTTGAAGTAAGCCGTTTAATTTCCAAATATCTGGGATTACCCAGG
TTTCTTTTTGTTGATTTCTAATTTAGTCACATTGTGGTTGGAGAACATATTTTGTATGATTTAAATCCTTTTTTGTGTATTGAGACTTGTTAGG
TCAAGTCAGTCTTGTGTCTTGTTTCTTGTGGAAAACATGGCTCCCCTCTGGAGGATTTACGTGCTCTACTGATGAGCACCTCGGCCTGAGTCAT
ACTTGGTCCACACTGTAGGGAATCTTCTTGAAGTCCTGATTCTTCACCTCATTTGACCTCATGTGTTTGAGGAATGCTGGGGGATGGGGTTGTT
TTCTGACACTGACCAGATGCCATCCCTGAGTGAGGCAGGGGCCTTGAGATGCTGCCAGAGTCCTCATTCTGTTTCACATTAGGCTTGCTGTCAC
TCCTGTTAAGGATCTCACTCTGGGAATTTCCCTTTTTTTTTGTTCTCCTTCTATTTGTTGGAATCCCTGACAGGCCTTTTGGGGGTTCTCTGGA
TATCGGTTAAGGCTAGATTAAGCTGAAGAAAACCTTAAACAACAAGTATCTTGTTCTGCCGTGGCTGCTTGAGCTCCAGCTCTGACCTCAGCAT
TCCATCTAGCCTGGAGGAGGAAGAGACATGTTTCTGACCTTTTATGGCACTCAACTTACATCCTATGAGCCAGAATTTAATGACATTGCCACCT
AGCTGAAAGGGAGCCTGGAAAACATCTGTTTTAGGTAGTCTTGTGCTTAGCTAATGCTAAGGAAGGCACGCACAATGAGTTTGAGTGTTTATTA
TGTTCCAGACATCATGTTAAACTCTGAATCTCCTATTTAGTCTTCATCATAACCCGTAGGTGGGCCTTATTATTATCTCCATTTGATAGAGGAC
TGAACTGAGGCCCAGTGAGATCAAGTGATGAGCTCAGGTTCACACGCCTATTGCATGGAGGAGCCAGAATCCAGACTCGGGCTCCAGCTCCAGA
GTCTGTATTCTTGGCTAGCTGCTTTACTCAATCTCACCTTCTCCCTCCTTAATTCCCTTTTCTCCACTCAGGTGAAAACCTCAGTAAAGAAAAC
CCAGGCCAAAGCCAACCCAGCTGCCGCCAGAGCACCTTCAGCAAAAGGGACAATTTCAGCCCCTGGAAAAGTTGTCACTGCAGCTGCTCAAGCC
AAGCAGAGGTCTCCATCCAAGGCAAGTGGGGCCAGAAGCCACAGGAGGTGTGGAGGGTTGGGGTAGAGAGGAGGACCAGTCACTGAGCCCAGCC
AGGAGAAGGTGCGTGCATGGGCAGGCCACCCACCCAGAGTTGTGCCATAGTGGGGAGTGGGACCTGAAAGGAATCACTTTTGCCTCCAATACTA
TTATCCCCCTGCAATTCAGGTGAAGCCACCAGTGAGAAACCCCCAGAACAGTACCGTCTTGGCGAGGGGCCCAGCATCTGTGCCATCTGTGGGG
AAGGCCGTGGCTACAGCAGCTCAGGCCCAGACAGGGCCAGAGGAGGACTCAGGGAGCAGTGAGGAGGAGTCAGACAGTGAGGAGGAGGCGGAGA
CGCTGGCTCAGGTGAGGGGGAGGGAATGGAGATCATCCCCTACATGGGATGTAACACCTTTGCCACATCCAGCTCCTGTCTTCTCACACGTCCA
CCCTCCAGGCTCTCTCCTCTCATCCTGTTTCTCCCTCCAGGTGAAGCCTTCAGGGAAGACCCACCAGATCAGAGCTGCCTTGGCTCCTGCCAAG
GAGTCCCCCAGGAAAGGGGCTGCCCCAACACCTCCTGGGAAGACAGGGCCTTCGGCTGCCCAGGCAGGGAAGCAGGATGACTCAGGGAGCAGCA
GCGAGGAATCAGACAGTGATGGGGAGGCACCGGCAGCTGTGACCTCTGCCCAGGTAAGACTTGCCAGGCCTCTGAGCCACCAACACTCACTCCT
CAGAACGGGGGTATAGGGCTGGGCGTGGTGGCTCACACCTGTAATCCTAGCACTTTGGGAGGCCGAGGCAGATGTATCACTTGAGGTCAGGGGT
TCAAGACCAGCCTGGCCAACATGGTGAAACCCCGTCTCTACTAAAAATATAAAAATTAGCTGGGCATGGTGGCGGGTGCCTGTAATCCCAGCTA
CTCGGGAGGCTGAGGCAGGAGAATCCCTAGAACCTGGGAGGCGGAGGCTGCAGCAAGCCAAGATCATGCCACTGCACTCCAGCCTGGGTGATGA
GAGTGAGACTGTCTCAAAAAAAAAAAAAAAGAAAAAAAAGAAAAGTGAAAAACCAGGGTTTAGGGCCAGGTAAGGAAAAGAAAGGAAGGCCAGG
TTAAGGCTTAAGGCTCCAGCTCCACCATGCCCTCCTCCGTCTGCTGTCATCCACATCTCCTTAGGTAAAACCTGCTACTAAAACCCCCCAAACG
AAGACTTCCGTAGCTAAAAGTGTCCTGGGTCTATATCTAGGTCGAGGTCTCCACCAGCTCTATAAGCTAGGCCAGTATTTCCCACCAAGGCATA
TGAGACCAAGAATCTACATGTTAGTTATTGTGCATACGTTAACGTTATACAAAATGACTCTCCCTGTCAGAGTCCCAGGGAAGCTTGGAGTGTG
GCACAGGTCCCCCTGAGGTCCTGGAGAGATGGAGGAAGTCTCATCCTGCACCTTGGCCCGGAGCCTCACATAGGCAGGCGCATCTTCTCAGGCA
GGGCTTGTCTAGCTTAGTGCAAAGCCTGGACCCTGGAGAGTGGGGAGAAAGAAAATCTGAACAATTCCCTCTGTCTGCTTGCAGAAGATAGCAG
GGCTTGCTACATCCTACAGAAGTGTAGGATGACAAACTCCAGCACTGCCAAGGCACAGGTGTGTGATGGAAATGACTGATGCAGGCCTGGCAGG
AATGATAGATGTCGGCCGGGTGCGGTGGCTCAAGCCTGTAATCCCAGCACTTTGGGAGGCCAAGGCGGGCGGATCATGAGGTCAGGAGTTCGAG
ACCAGCCTGGCCAACATGGTGAAACCCTGTCTCTACTAAAAAAATACAAAAATTAGCCAGGCGTGATGGCAGGCGTCTGTAGTCCCAGCTACTC
GGGAGGCTGAGGCAGGAGAATCGCTTGAACCCGGGAAGCAGAGGTTGCAGTGAGCCAAGATCATGCCATTGCTTTGCACTCCAGTCTGGGCAAC
AGAGTGAGACTCTGTCACAAAAATAAAAAAAAGAGATGATAAATGTCAGGAGAGATGGTAGATAGTGGTAGCAAGTAGGGCAGACCGGAGAGCC
CTTGCCCCATCCAGAGGGGCAGTTCTTATCAGCTTCAGCCAGTCATGACTGTGGAGATGGACCTTCTGTGTGGCCAGGTCTTCCATTTCTTAAG
GGAAGCTGGAAGTCCCTGTGCCAGGCCAAGCTCCATAACCTCTTAGATTTGTTTTCTTCATGAGTAAAACAAGCACTGAGATGAATGCTCCCTA
GCCCTAACCTCTGCCTTTGATACACCAAACCAACAATTACTGGGGGTGAAAGACATTGGCCCCACCCTCAAGGAGCTCACAGTCTGTGGGGCAA
GACAGGTGACCGGATTATCGCAGACTATGCTAGTGGTGCTGACAGCTGAAAGAGCAGGTCTCTGAGAGGCCAGAAAAGGAGGAGATGATTGAGC
TGAACCTGAAGGATGACCAGGCACAAAAGTGGAGAAGGCCCCTCAGTGTGTGCAGAGGGGCTGGGCATGAAGGCACATGGTCACTGAAGGCAGC
TGTCCTGCAGGCCGTAGGCCCTCCCAGGTGCTTGTTACTGGTAGATTTATGGAGGACCTAAATGCCAGACTAAGACATAGGCCCCGGCCATATT
TTGGGCTGTGTAGTTTTTTTGTTTTTAAGTTTTCAATGAGTTCTTAGTCAGAATGGCCTAATCTGTAGGAGAAAGCCCCATTCAAAAGAGCTTA
AATAAGGGGATTGACTGTCTTAAAGTGCACAAAGTCCCAGGTTCCAGCTGCTGAAAAGCTGGTTCCTTTAGCTGAGCGTCAGTGGTAACCAGAT
TTCTTCATCTCTGCACTCCACTAGCTTTATGGTCATAGCAGGGCTGCAGCATCTCCTAAAGTGCTGGGGGCAGGCCAGGCACGGTGGCTCACAC
CTGTAATCCCAGCACTTTGGGAGGCTGAGACAGGCGGATCACTTGAGGTCAGGAGTTCAAGACCAGCCTGGCCAACATGGCGAAACCCCATCTC
TACTAAAAATACAAAAACTAGCTGGGCCTGGTGGCACCAGCCTATAATCCCAGTTGAGGCAAGAGAATCACTTGAACCTGTGGAGGAGGAGGTT
GCAGCCTGGGCAACAGAGTGAGCAGAGCAAGACTCCATCTCAAAAAAAAAAGAGATTAGGGGGTAGACTTAAGGCTACTCAGACCTCAGGCTGG
ACGTTCTACCGCCTTAGCCATAGACAAGAGGCCGGTAGTTCCCATGACTGGCTGGGAGGAGGGCCCACCCTCCCTGAAGCATGTGGTAGGGGCC
ACTGAACAGAGTGAGGGTTCTATTAGCAAGGAACAGATGGGGGCATGGCTGTTAGGAGGCAGCCTGCAGTGTGCATTGTAGTTGCCCCATTTAA
AAATTGGAAATGACATGTACAAATCTTCCAGCTTCTCTTGATAAATTGGAAGCTCAGGCAGCCTGGGTCCTACTTTTTTGGCTAGGCTGAGTAG
GGAAAAGGGGGGCCCCCATTCCAATAGGGACCACTGAGCTGCCATCACCACCAGCATTTCCACCCAGATCTCTGAGTCCTCCTCTGACTGCAGT
GCTTGCTCATCCTTCCAGCCCCCATCATCACACCTGCCCCAACAGGAGGGGATGGTAGCCAGTGGAACACTTCTAGGTGGCTCCTGCTTTTGGC
TGGGGGTGTTACAACCGGAGGTGAGCTGTGCTGGGACCACTGGCTTGTGCCTGCAACCTTGTCCCAGGCTGCTGTCACCTCTTGTCGAGACATT
GGGCCAACAGCCCTGCAGCCCTCAGGTTTTAGCTGCATCGGAGTCATAAATCCCTTTCATGTTCGGAGTCAGCTCTGGAAGGAGCTAGCAGGGT
GGAAGCATGTTTCCAGTGGCTGTGGGGCAGGTCAGGCCAGCAGGTATCCCTGTGCATGTGCAGGAAGGGGCCACGCTGCCTCCCCTGGAAACCA
GAGTGCCTGAGGGTCATTGCCTACTGGCTGTTTCCCCCTCAGCAAATGCCCCACTCCCCGACCACGTGCTTATCCAGGTCTTGTCCCCTCAGAA
GGACAGTAACTCCAAACCTGCCAGAAGCAAGACCCTGGCCCCAGCACCCCCAGAGAGGAACACGGAGGGGTCCTCGGAGAGCAGTGAGGAAGAG
CTGCCACTGACCCAGGTGCGCCATGCCTTCTCTCTGCAGATGCTGCAGGATCAGAGCTGGGCTGGCAGGCCTTGCAGGAGAGGGCAGATCTTGC
CCATAGGGAAAATCTCGCCATATTTAAACAGCACCTCACAGCTTCCAGAGCTCTTTCCTCTATTGTGACATTCATCTGAGCCCTGTGAGGCAGG
CAGCAGTACACAGTTAAACATACAGGCTTCAGAGCCAGGTGGTGTTGGGGCGAAGCCCAGCTCTTCCACCCAACAGCCCCATGGTCCTGGGCAG
ATGCCTTTTCCCCTGTGTGAGGCTCAATGTTTCAGCCATAAAATGGGGACAGTACTGGCACCTCTCTCCTGCCTCTGTGCACTGGTGCCAGCAC
ACAAGGTACTTGCCACAGTCCCCTGCCTAAGAAAGGGTGCCTGTTAACTGTGAGAAGGGCAGGGAGTGTTGCCCCATTTGACAGATTGGGAATC
AAGCCTTAGAGTTGAAGCAGTTTCCCCAAATTCTCATGATTCATAAGAGGCTGAGGAAAGGTCCAAACGCTGGTCCCCTGGCTCCCTGTATCTC
TCTGTTTTCTGTTTAGGACCAGGAGTCTTCTTGAATCCCATGAGCTCTGCCCAGGACCCTCTCTCAAGCACCTGTGGCATACCTTCATGTGCTC
CACTGCACCCAGAGCTTAAGCCACAGTCCTGCTCAGGCTACACCTCCAAGGGTGGGACCAGGCCCACCTTATCTTCCTGTACTCCAGAGGCCCA
AGTCAGCCATGCTGGTGTGGTCCAAGCTTCTGTGTGAACCCTGGCCCTTCCATCAGACAGCATTACCCTTTGTCCTCCTCTAGCCCCAAGCTCC
CAGAAGCTTCTGCCAGGCACCTCAGAGCACCAGCTCCCCTGTCCCAGGGCCTAACCACAGATCCTGGAGTTCTGCAACCTCCAGACCAGAGCGG
TCTCATGAACCACCTCCCCTTGAATATCACATACCACATTGTTATCAATTCATCAGTAAGGTCAGATGCTGTTTGCACACCTCCAGCAATAGGG
TGCTCACTGCCTCTCACTTTCCAATGGCACAGATTACAAAAGTAAAGAACAACCACCACCAACATCGGTAACTCCCTGTATTCTCATTTTTCTG
TTTAATCTCCACAACAGCCCTATGAGGGTGGCTCCCTTTGTTGTTTGCATTTTAAGGAACTGGGAGTGAGGCTCAGAGAAGTTGAGGGACCTGT
CCCAGCATCACATGGCTGATGACAAGTGGACAGACCTGGTGTTTGAGCACAGGCCATTCACATTCTGACCCGTTGCCTGGTGCTGCCCCGACAC
TCTCCTCTCCTGGGCTTGGGCATTGCCCTCTGGCTCTGTGTGGAGCCTTTACGAGGCCACCTGCCTCTCTGAGGGATCTAAACAACTGGGAGGG
AGGGGACCGCTCCCCCTTTCTCTGTGGGGGTGGACTAACACAATTAAAATGAACATCCTGCTTAAACTGAACCATTTAATTGGTATGTTAGTCC
TGAAGATTCTGGAGTCTCTATTTAAAAAGCAGAAAAGAAGTCAGCGGTTTGTACATTCCCCCAGGAGGATGCGGGGAAGACGGGCATAGCCCGG
GGAAGCTGCAGCCTCTTCCTGATTGAGAGATTTTTAGTTCCTAATCCCCAGCTCACTAATTATGATTATTTTCATTATTGTACATTTATTGAGC
ACCTCTCTATTGACAAGTTTCAGTCTGATTTTATTAGCCCATCAGTGGGGAAAGGGATTGAGGCCAGGGTGGTGGGCAGAGTCCCAGGCTGGGA
GGCAGGGATAGATACCTTGGCTCCATTCCTAGACCCCTCACTGTGCCTCCGCCCTGTTGTGCAGAGTAGACCTCAGGCCAGAGTCTGTGCTGGG
GTCAGGACAGCTTCCAGATTTAAAAACAAGTAGGTGATACATATGTTAAATAACTTAATTTAGCTATTCCACAATGTATATGTGTATCAAAACA
TCATGTTATATACCACAAATATATGCAGTTTCACTTGTCGGTAATATTTTTTAAGGCCAACTTCTTCTATTAGTTTGTCAAAGACGTAGGCCCT
GCTCTCAAAGTTTTAGGTTGAATCAAAGAAAAAGGAAACCTGTAAGAAACTAAATTCTGGTGTTACATTGAGGCCTAGCATAATTGGTTCTAGA
AGGAGCTCCAGTCTGGTGCCTGGAGAACTAACTTCTAATCCTGGCTCTGGCACCAGTTTGCTGGTTGCCCTGGGTGAGGCCACTTGCCTTCTCT
GAGCCTCATTCATCTCAATCTCTGGGATGAGACTTCCTGGGTTGGTGGGGTGGACCTTGAGGCTCCAGGCCACATCCCCAGAGAGTAGAATTTC
TCAGTCCCCTGGAGTGGGGCTGGCCTAGATCTGTTAAGCAGCCTCAGGCAATTCTGAGAGAGGTTCTTGGAGTGTTTGTTGCCTTTGTGGTCAT
GTCCCTTGCCAGGGTCCGCAGCCTAGGCCATCAGCCCCCTCTCCCCACTCTGTGACTTGCTGGAATGAAGGCACAGTTAGAATGAGCTCAGCTT
TGACAGGATGGGGTGAGCACTGTCCAGAAAGCCCCTAGGTTTGGTTCTGCAGGCATCAGACCTACAGGTAGGAGGGGTATCCCGGGGTTCCCTC
TGGGTCCTTACTGCCCAGCACCTATAGGGAGGTACAACCAAATGTTCAGGCCAGTGCTGGTTTTGCTGCTTCACTCCCATCAGTTTTTTTTCTA
ACTGACCCCAGAACTACATTCCTGTGTATACTGTGCTTTCCAGTTTCCACAGTGCATTGGAACCCCTCCAGTGAATGAGCCCAGGCTGGGATAA
CTACTAGCCGTTTCATTAAACGGGAAACTGAGGATCAGAAAGTTGAGGGGCTTGACCACACAGTGAAGTCATGAGAGAGGCGTAATGAGAAGCA
GGTCTTCTCCTATACCCTGGGCAAGCTTCACTGCCCACCTTTATGAACTCTACAGGCTAATGCCCCGCCCCAACCCCCCACAGCCAAGCCCCCT
GCACCACCTCCCTCCTATGGCCCAGAGGCCCAGTGGGGTGGCGTGGGCAGGTGGAACTAACAGGAGGCTTTTGCTGCTGAGCTGCTTTTAACAT
CCCAAGACGCTATTGTTTGCCTCAGTGGGTTCGTTGCTTCTCTTCGTCCCCGACAATCTGTTCCTGTCTTCACATATATATAGATCCCCCCTCC
CTCAACTGTAAGCCTTCTCCCACTTTCCATCCTTCTCTTTTTTATATCGTGGGAAGGAAGGCTCTGGAAGTGGCAGATCGGAGCAGCCGCGGGG
GAGGCTATTTGGCAGGGGTAGGAAAGGCCTAAGCCCAGAGAAGCTTCCACCCTCAGGCAGGCACCTTTCTGTTTTACTTTTTACTTTATGCCTC
TCCACAGCACCTTAGCACCCTGAGGAGCCAGGTGTGCTAAGTCAGGCTCAGGGGGTAAACAGGATGGTGAAACAGAGACCAGTCTGGACCTGAT
TCCACTCCTCTCTTAGCCTCAGGCAGCTCCCTCTTCCTGCCCTCCAGCTCTTCACTGGCCAGAGAGGGAGCAGAGCTCAAACCAGATCTGACAT
TTGGGGAATGGAAAGTAGACCTGACCAGCTCCCTGGCTCACAACCATGTGTGTTCTCGTTAGCTGGAGGTTCAGGAAGGAAATGGGCCTGGAGA
TGCCCTCGTGTGCGGTGAACATGTTCAGGGATGGTGCAGTTCAAAACCAGACTGGCCTGCAGAATACCAGGGAGCTGCTGTTGCTTGTTTGCTT
TTTCTTTTATTGTTTCCTTGGAAAATTTAAAGCATACCCAAAGATAGATAATGTAAAGAACCCCCACGTACCATCCCCAGCCTCAACAGTTAGG
AACTCCTGAGCAGGCTCGTTTCACGCAAACCCTCCACTCAGTTCCCCAACGCCCCTGGATTACTTTGCAGCCAGTCTCAGACATGTCAGCTCAT
CCACCAGGATTTCAGTATGCAGCTCTCAGTTATAAGGACCTTTTTAAGCACAACTACGATACAGTGTCACACCTAATAAGTTGATCTACCCAGT
CAGTGTCCCTATTTCCCTGATTGTCTCATAGAGTTCAGTTAAAGGCCACGTACGGCATTGAGTTATTAATCCTCTAAGTCTTAATCTGTTGGTT
CTCACCCACTCACCCAACCCTTGTTTCTCTTGTGCATTTTTTTGTTGAAGAAACTGAATTGGTATAGCTGGGGAGTTTCATCCTGGGCCATGTA
TCAGGAGGGCTGCATCAGAACCTCTGGGGTTGGGGCAACTAGACTGTAAATACCTCCCCAGGTGAATTGCATATTCCAACCAGGCAGCCTTGGA
AAACTGCTTAGACCACTCCCTGCATTCAGCAAGTAACTGTCTCTGAAGCCAGCCGGGGAAAGAAGGCAGAATTGGACATTCTGGCCGTGGCTTT
GCTTCCAGTAGGGACAGCAGCCTTGGGTCGCTCCCTTTCCCTCTGGGCTTGTGGTTTTCCCACTTTGTATAAGGGAGCTGATCCTGCTGAATGT
AGGGCTTCACTGTGAGGGTCAGGTGGGCTCTGGGAGTTGTGAAGTGCTGTGCTGGGTCTTAGCAGATGTGTGGGGTGGGAGGGGGCACCCTGGG
CAGCTGGAATGGCTTCTGTGCCCAGCTGCCCCTGAGCTCAGTGGACCCTTTGCCTTGTAAAACACTCCCTAACCCCATCACCTCCTTTCCCTGG
CCAAGCCTTTAATCACTGGGGGGGTGTTTTGTTTTTGTTTTTCAAGGTGATTAAACCCCCTCTGATTTTTGTCGACCCTAATCGTAGTCCAGCT
GGCCCAGCTGCTACACCCGCACAAGCCCAGGCTGCAAGCACCCCGAGGAAGGCCCGAGCCTCGGAGAGCACAGCCAGGAGCTCCTCCTCCGAGA
GCGAGGATGAGGACGTGATCCCCGCTACACAGTGCTTGACTCCTGGTGAGCGCAGCCCTTATGCAGTGGTGGGAGGGGCTGCCAGCACTGCCCC
ACATTGAGGCCCAGAAGGGACAGGACACTGGCTGAGTCACATAGCAAGGTGTTGGTCGGGAGGGGCTTGGGGTCAGGTCTCTGGGCCCTGCATT
AGCCATTCTGATTAGGGCCTGGCTCAGACCTGCAGTTCTGGGGGAATAGTTGCCAGAGCTTTTTTGTGGCAGCCCCAGTCATGGAGCCCAGACC
AGTGGCTAGAAGCTGCAGGGACCAGGTTCCTACATAGTCTAAGAAAGAATTCTGTATCAGTTGACTGCCTGTGGAACAAGTGGTCAGGGTGGTA
GTGAGCTTCCCGTCCTTGGTGGCATGTAAAGTAGGTTAGGCAATCCCTAAGCCAGAGACATCACAGGGATAGATTTCATCTATCAGAGAGACAG
GACCAATCTGAGGTTTCTTTGACTTCTGAGAATCTGTGATTCTACCAATGACAACAGGAAAAGGGTTAATGTTACTATTACAGTTATTGTAACA
GTTTTACAAGCAATAATACCTGATCCTGATAGGACAATTTAAAAATGCAGACGGGTGCAGTGGCTCACGCCTATAATCCTAGCTCTTTGGGAGG
CTGAGGCAGGCAGATCACCTGAGATCAGGAGTTCAAGACCAGCCTGGGTAACATGGCGAAACCCCGTCTCTACTAAAAATACAAAAAATTAGCC
TGGCGGGCGCCTGTAATCCCAGGTACTTGAGAGGGTAAGCCACGAGAATCGCTTGAACCCAGGAGGCAGAAGTTGCAGTGATCTGAGATGTGCC
ACAGCACTCCAGCCTGGGCGACAGTGAGACTGTCTCAAAAAAACAGAAAGCAGGCAAAATAGAGATTACTGCTGGGCATGGTGGTTCGCACCTG
TAATCCCAGCACTTTAGAAGGCCAAGGTAGGAAGATCGCTTGAGCCCAGGAGTTCAAGACCAGCCTGGGCAACATAGTGAGAGCCCTATCTCTA
CCTATCTACCTACCTACATACATATGTACATATACATATACTTATACATATATGTGTGTATGTGTGTGTATATTTTTTTAATAAAAATACAGAT
TAGCACATAAGAAACTATATCACCTGTAATTCTGCCCCAAATAATTACTGTTAACATTTGACAAATGCTAACTTTATAAAAACCTAAAATATAC
GTGTGTTTTTAAAGCAAGACCATACTGTATCTAATGTTCAGTAACCTTCACTGGATATTTTATGACATCGGGTTTTTTTCATCTTTACATATTT
GCAGCACAATTCCTAATGGCTACAGAGAAATCCCTTGGGTGGACATGCTACAGTGTGTGTAGCCAGCACCATGTTGGAGGAAGCAGAGGGTTTT
GTTTCAGGGTGGAGGGGTGAGGGAGTTGGCTGTTATAAACAGTGCTTTGAAGAACATGCATGTAACCAGGCCTCTGCAGATAACCACGGGGACT
CTTAGGAGAGACGATTTTAACTGCAAGGAGAGTCGTTTGGTGCCGGTGCTCTGGCCCATTGCTCAGGAGTGGCAGCCCGACCAGTTGGGAGGGG
AGGGGATGAGGAAGCCTGGGGTCACCCCCAGAGCAGCCATTTGAGCTCCCTGAGCCTTGTCAAATGACATAATGACATCTCCTGCCTGGGAGGC
TTGGAGAGGGAAGTAAACAAGCTTCTACCTCTGTAAGCCCTGAGCACAGCTCTAGATCACCAGCACAGGCCGGTAAATTGGGTTATTGCCGCTG
CTGAGGAGGCGATGGGGCTTTTGTGCCCTGATGTGCCCCCATCTCGCTCCATTTCAGGCATCAGAACCAATGTGGTGACCATGCCCACTGCCCA
CCCAAGAATAGCCCCCAAAGCCAGCATGGCTGGGGCCAGCAGCAGCAAGGAGTCCAGTCGGATATCAGATGGCAAGAAACAGGAGGGACCAGCC
ACTCAGGTACCTGGTGGGCAAGGGAGGGTAATGCAGGCCAGTGGGGTGGGGCCCTACTTCCATACTTACCCACATGTGCTGATGGGATGGCCTG
CAATTGCTGTCACGCCCACACTCCAGAGGTCGTGGCCTCACAGCCAGAGGCTTTCTGGCCTCCTAGCTACAACCCCCCAAATCACCTTTGAGTT
ATGAGGAAGAGTAATCTGGGGACACAGCCTCCTGGCCAAGCAAGCCCTGCAGCACTCGAGTCCCTCATGAGATTTTCCAGCGTAGTGGGGCTTT
TGATTTTTTTTCTTCCAGTTTTGAAATGCCATGAACAAAAGTTGCCCTTTTTTGGTGTTTGTAATAGTGACTTCAGCATTCTTCCAAGCCTTTA
CCATCTTCAGTGCATTTTTATTTGGTCCTTGCCTGAATCTAAAAGCTGGGCATTTTAGGGTTAATGGCTGGTGCATTGTTTAGATCATAAAACT
TAGCACACATCCCCACCCCAAGGGCTGCGATGTGACCAGCATTCAGCAAGGCCGGAACCCGGGTCTTCTGAGACCCAGTTCATTGCTCTTTGGG
CCATATCAGTCTGGTTTCCCATCCCACTGAGAGGATGAAGTCCATGACACACTCTGACCTCTCTTCCTGAGGGGTGGGCTAAGGGGGTGTTGGG
GGGCGGTGGGGCTGGTGTGCCACCCACTCCCTGGGCTCATCACAAGCTCCAGGTCAAAAACTTCTGGGAACATGGGTGTCGGATGGGAAGTCAG
GCTGTGGTCACTGCATCCATGAGCATCGGTTCCTGCCAGGCCCTAGGGATACTGCAGGAACCAAGACAGGGACAAGGAATTCCCAGGCCAGTCA
GGGAGTGGTGAGGGGCAGCGATTAAACAAGGAAACCCACATATAAATAAAAAGTATTCACCAGCTGGTAGGAGAGGAAACAATAAAAACTAGAG
AATAGTGGGGTGACCTGCTATATGAAGGCCTCCTGAGACAGCGATGCTTAAGCAGAAAAAGCAGCCAGTCACAGGATGAGCTGGGCCACCCTCC
AGGCAGGGAAACTGCAGGTACCAGGTCTTCGGGGGAAGCGCTTGGGAATGAGGGAAACTGAGAGGTGGGGACAGCTGGATGAGGAGCTGGGGGA
GAGGAGATGAGCCAGGCCGTGGCAAGAGCCACGCCACATTTGAAGGCTCTCAGCAAGGGGTCATGCCCAATTTCCATGCCCACCACTCTCCCTG
ACTGCTAGTGGTTATAAGAAGTAGAGATGGGGGTCCACCAGGTTGGAGATTATCCCCAGTGAAGGTGCAGATTGAGTAGTGGGGCCTAAGCTGC
TTCCCTGCCCTGGGCTGGGAACTGTCCCTTGCTCCTTGAGAACAATGTGATTCGCTCATAACCTGAAGCCTGCCACCAGTTTTGCCCCTTTGAC
TGCCCCTCAGTCCCTGCTCCAGCCCTCACCCCAGCCAGACAGCATCTGACCAGGGTGTGGCACAGCTGGCATCCCAAGGACTTGTGAGTCTGAG
GGCTACCTCTTGCCACCCACAGGTGTCAAAGAAGAACCCAGCTTCCCTCCCACTGACCCAGGCTGCCCTGAAGGTCCTCGCCCAGAAAGCCAGT
GAGGCTCAGCCTCCTGTTGCCAGGACCCAGCCTTCAAGTGGGGTGAGCTTGGGGAGCCAGGGGAAGCAAGCCCACGGAGCGTAGAAGGTGCAGG
CGTGGCCCTGCATTGCGGCACCAGCACTCATCTGCCCCATGACCTCTGCACTTGGTTTGCCTCCCTCGGCCTCAGTGGCCTAATCTGTAAGAAG
GAATTACAGTACCTTTCGTAGTTGGAAGGATCAAATGAGGCTGCATGTGTGCCCCATCTAACACAGTTCCTGGCCCTACTGAAGTGTTCAGGAA
GGACCAGGTCTTACTTGCCCTAATTTTTCCTTCCATTCCTTCTCCTTTCACCGAATTAGGTTGACAGTGCTGTGGGAACACTCCCTGCAACAAG
TCCCCAGAGCACCTCCGTCCAGGCCAAAGGGACCAACAAGCTCAGAAAACCTAAGCTTCCTGAGGTCCAGCAGGCCACCAAAGCCCCTGAGAGC
TCAGATGACAGTGAGGACAGCAGCGACAGTTCTTCAGGGAGTGAGGAAGATGGTGAAGGGCCCCAGGGGGCCAAGTCAGCCCACACGCTGGGTG
AGGGTGCCAGGGGAAAGGCAAGGGTGGGCCAGGAAGAGGGTGTTGTGTGGCCTGGTGGAGCCATAGCTCTGGCCTCAGCTCCATATCTCAGACT
CATTCTGCACCTGTGGCTGAGCCTGGGCCTCAGTTTCCCCACCTGTACAACTTCATGAGGAAGTCAATCCAAATGATTTCAGAGACCTGACTTT
GCTGTTTGACCACTCTCAGCTTTTTGGTATCAGACTCCCTTCACTGGCTCCCAAAAACTCCAGGGCCATGTTTCTGGAACAGTGGAAAGCAGGG
AAATAGAAATGGGGCCTCAGGAATTAGAAATAAGGCTTTGGCATTCAAATGTCGCACCTAGCATGCTGTGACTAGCGATAAGTGTGCAAGGAGT
GTTGAAGCAGTAGGAAGACTTGTGGTGAGGCGGGGCAGGGGATGGGGGTGAGGGACCTGCAGAGAGACCAGGGCCTTCCTGAAGGGCTCTGCCC
TTCCCGGCTGGCAGGGGCCACCTGGGGCTACCAACAGGATACTGTGCTTCTCCAGTAGGTCCCACCCCCTCCAGGACAGAGACCCTGGTGGAGG
AGACCGCAGCAGAGTCCAGCGAGGATGATGTGGTGGCGCCATCCCAGGTAACTGCAAGGGAGAGGACTGGCAGCCCATAGGCCTTAGGGTGGAG
CCCCAGGCCAGGCTCCTGTCTACCCGATCCCTCAGGTCAGGGGTCTGGGTCCCCTCTCTTCACAGAGGCCTTGGGCAAGGTCCTGTCTGCAAGG
CACCACGTGTGGCCCAGCCAGCAGACCACAGCCAGGCTGCCTCCGTCCCCTCATAGAGCCCTGAGTAGCTGACCCTTGGGGTCTGTAGAAGGGA
TTGACCTTGATTCTGGGTGATGTCCGGACAAAAACATTCTTTAGCAGATTTATTTTAAGGTTACTATCTGTATGTGGCAAAAGCTAGTAATTTT
CCATTTGTATTAATAAGAAATTTCCTTTTTAAATGTGCCTGTCTAGAAAGTGTATTAATTAAAATAGTTCAGGAGGCACACGCCAAGGGCTGAA
GTGCTGCTCTGTGCCTTGTTGTCCACCCACTCTGCACTGATAGGGCAGGGTGATCCTAGAGGCCCCAGGCTGCTTTCCTCACAGCAGGCCATGA
CTCGGGCTGGGTTATGGCAGTGGGGTGGGGTGGTGGCAGCCTCTTTCACAATGGGCTTCTTCAGTCTCTCCTCTCAGGTTATATGACCCCTGGA
CTAACCCCAGCCAATTCCCAGGCCTCAAAAGCCACTCCCAAGCTAGACTCCAGCCCCTCAGTTTCCTCTACTCTGGCCGCCAAAGATGACCCAG
ATGGCAAGCAGGAGGCAAAGCCCCAACAGGCAGCAGGCATGTTGTCCCCTAAAACAGGTAAGTTAAGGTCTGCAGGAGGGACATAGCAGGACAC
AGAGGGACAGGGCAGTGGGCCCCTTCTTGCCCTCCTGTAGCAACAGTCCTCCCAACATGGTCCTGTCTGCCCCCAGAGCCTCTCCAAGTGAGAC
CTTGTGGCCTTGCATTGGACCTGAAGATGCTCATCAAAGTGCAGGTGGGGCCAGGTGCAGTGGCTCATGCCCATAATCCCAGCACTTTGGGAGG
CCGAGGTGGGCAGATTGCTCAAGCCCAGGAGTTCAAGGCCAGCCTGGGCAACACAGAGAGACCCCATCTCTAAAATTTATTTTAATTAGCCGGT
GTGATGGTGCACGCTTGTAGTCCCAATTACTTGAGAGGCCAAGGCAGAAGAATGACTTGAAGCCAGGAGGTTGAGGCTATAGTGAGCCATGATC
ATGCCACTACACTCCAGCCAGGGTGGTACAGTGAGACCCTGTCTCAAAAAAAAAGTACAGGTGGGCCCCACGCCCAGGTGTCTGGCTCCCATGG
CCCTGGACAGCCTGGAAGTGGGGGTGTATCCAGCCCTGGGTGGTGCTGATGCACCTGGTAGGATAGCCCTTGCCTCAGAGGAAGCTGCGTCTTT
TGGCTTGTGGAGCAAGTGTTGGCTCTCTCCAACCATCACCATCAACTTTTCTTCCCTGTAAATAGGCTCACGGTGTGGGCCTTGGGCCTCAGAG
GATAGCTTAGACAATAGGCTGACAGTCACGTTTGGAGGACACTCAGCACATGCAGGAGACCCCAGGCAGTAGACTGGCCCCAGGCTGTTCTGAC
TCATTGTAAAGCCTTGGAAATCCCCTGGCCACTCTGGACCTCTGTGTCTTAACCATACAAAACAGCAGTTGATGTATCCAGTCTGTGTCAAGGC
ATGGCACATGTAGAAAATAGTCACATTGTATTTGGAGGGCAGACTGGATTATTCAATTCACCTAACCTGGGGCATCCACACTCCCTGACCCTAC
TGGAGCTAAGGGTCAAATATGTACCAGCTGGGCACACTTGGGACAGCTCCAGGGCTTCCCCAGCCTTGGTGTTCTGGGTGTTTGCAGATAAGCA
GCAGAAAAGTGGGCCTGGCGCAGTGGCTCGTGCCTATAATCCCAGCACTTTGGGAGGCCAGGGCGAGTGGCTCACTTGAGGTCAGGAGTTCAAG
ACCAGCCTGGCCAACATGGTGAAACCTTGTCTCTACTAAAAATACAAAAAACTAGCCAGCATGATGGCAGGCGCCTGTACTCCCAGCAACTCAG
GAGGCTGAGGCAGGAGAATCGCTTGAACCTGGGAGGTAGAGGTTGCAGTGAGCCGAGATTGCACCACCGCACTCCAGCCTGGGCAACAGAGCAA
AACTCTGTCTCAAAAAAAAAAAAAAAAAAAAAAAAGGCAGCAGCAGAAACGTAGGCTCTGGGGAGAGAGGTTTCCGGGGCTAACTGCCCTCCCC
AGCTTCCCTCTCCATTGGCTCCTGCCATCTTGAAGAATCCCCAGAGGATGGAATTGGGCCTCCAGCCGTCCCGGGGGCCCCTCTGCCTAACCTG
GCCTGCCCTGCCCAGTCCACCTCCCCCAGCCCACCGCAGCTCTAGAGCCAAAAGTCGCCAGAAATCCTGGTTGGGGCTGAGGGGCCAAGCTCAC
TGCATGCTGCAGGGGGCAGCCCTAGCCTCAGTGTGACATGAGTACCACATAGAGTGTGACATGGAGTATCCACCTGGGCCTTCCTCCAGGCAAA
CACCTCCAGGACCAAACCACCAAGCCACCTTTCAGAGCCCAGCATGCAGGAGTGTTGTGCCCATGAGACCCAGAATGGGGCAGAGACCTCCAAG
TCACTTGGAAGTTAGAGCCGGTGAGGAGACCCAGTCATGGGGCTTTCAGCTGCAGCTTGCCCCAGGCTGGGTCGGAAGAGGAATTGCTGCTCAC
TTTCTTCCCCAACATTCTCTGTGAGAGGCGGTGCGACAAGGAGACATTTTAGAGGGGGCTGTGGAAGGTTTTTTTTTTTTTACACGTGTAGTCA
GCACACAATTATCAAAGGCAAGCAGAGGCGTGGAAAATTCTAAACAAAGGCTGCACCAGAAGTCTCTCTGGCAGGCAGTAAACCTGCTTAGTCA
GCCACCACGTGTATATACACTGCACCCAGAGCTCCCCACCTTGCCTGGACCCCCTGACCAGGAAGGGCCGAGTGTGGGTAATCATCAGTTGAAT
GTCTGCATGGCCCCCACTTTTATTATAAATCTACAATGTATCATAGGAAGCCTTACTGTTCATCCACCCCTCACGTTATAGACAGGGAAACCAA
GGCCCTGGGAGGAGATGGGTCCTGGCCAGAATCACACTGAAAGTGGGTGGGAAAGTCAGACCTAGAACCCAGGTCTCCTTCCTCCCAGCTCCAG
ACTCCATCTCCCTCCTTTCTGAATTTTCATTCCATTGATAGATTTCAGGCCCTTTCATTAACATTCTGGAGTCATTTTCTGTCCCCCACCCTAA
CTGGAGTTTTTAGTATAAAGAGACAGGGAAAAGCTGTAAGTTAGAAATGAAGTCAGGGTGTGAAATTGGTGGAAAGGTGTGAGCTTAGGAGACC
AGCTGGGGCAGAGTGACCGCCAAGCCTTGCTCTCCCCATCTGTGCCATTGTAAGAAAAGATGGAGTCACTCCCTGCACCCTCTTCGCTCTTAGG
TACCATAAGATCTGTCCCCCAACTCTCCCAGATCTGTGACCCCACATTCTCTCTCCATAGGTGGAAAAGAGGCTGCTTCAGGCACCACACCTCA
GAAGTCCCGGAAGCCCAAGAAAGGGGCTGGGAACCCCCAAGCCTCAACCCTGGCGCTGCAAAGCAACATCACCCAGTGCCTCCTGGGCCAACCC
TGGCCCCTGAATGAGGCCCAGGTGCAGGCCTCAGTGGTGAAGGTCCTGACTGAGCTGCTGGAACAGGAAAGAAAGAAGGTGGTGGACACCACCA
AGGAGAGCAGCAGGAAGGGCTGGGAGAGCCGCAAGCGGAAGCTATCGGGAGACCAGCCAGCTGCCAGGACCCCCAGGAGCAAGAAGAAGAAGAA
GCTGGGGGCCGGGGAAGGTGGGGAGGCCTCTGTTTCCCCAGAAAAGACCTCCACGACTTCCAAGGGGAAAGCAAAGAGAGACAAAGCAAGTGGT
GATGTCAAGGAGAAGAAAGGGAAGGGGTCTCTTGGCTCCCAAGGGGCCAAGGACGAGCCAGAAGAGGAGCTTCAGAAGGGGATGGGGACGGTTG
AAGGTGGAGATCAAAGCAACCCAAAGAGCAAGAAGGAGAAGAAGAAATCCGACAAGAGTGAGTGACCGCTTCTCCCAGCCCACCCCAAGGGCTG
CTGGGCACCCCACGGGGGCGGGAGGGACCCTCAGCCAGCACCTGGTCTCATTCCTCCCATGTAGAAAAGAGAGGCTGAGACCAGCCTGGCCAAC
ATGGCAAAACCCCGTCTCTACTAAAAATACAAAAAATTAGCTGGATGTGGTGGCGGGCACCTGTAATCTCAGCTACATGGGAGGCTGAGGCAGG
AGAATTGTTTGAACCCGGGAGGCAGAGCTTGCAGTGAGCCGAGATCACGCATTGCACTCCAGCCTGGGTGACAGAGCAAGACTGTCAAAAAAAA
AAAAAAAAAAAAAAAAGGCTGAGAAGTGGTTTGTCCAGAGTCACAGGGGCAGCTTGTGGCAAAGCCCGAACTCGATTCCAGAGCACTTGAGTCA
GCACTGCCAGGAATGCTCCAGAAGGACGAGGAGTCATGTCCTCTTTCCCCAAGCCCAGTGCAGCAGATCTTGGAGGAACCTGCTTCTCCAGCCA
GCTCCTGGGTGCAGAATGGACCAGGAACCAGACTGTCAGAATCCTCATCCCAAACCCCATCTTGTCTCTAGACCTCAGTTTTCCCTCCATAGTA
ACACTGGCCCTTTACTGAGTGCTGTTCTAGACTCCGCATGCAGCAGGACCTCATTTAGGTAGAAATGAGACTCAGCAGGTAGAAAACTGCGGCT
CGGGCTCGGAGAAGTAGAGATGCTGTTCAGGGCCACAGAGTTTTGCTAGGTGGAGCCAGAGTCAAACCTAGGCAGCACTCTCGAGCATCGCCCT
GGACGGTGGGTTGCCAGTGACGCCCGAAGAGCCAGCTCGTTCTGGAACAAAAGTCGGGCACCCTCAGAGCAGGACTTGCAGCCCCTTGGTGCTC
AGAACTGTGCTAGATTTCCATTTACAGTAGGGATAGATAGTGTCCATTTAAAATAAATTTGCGGGAGTTTTAAAAAGTGAGTTGAGCTAAAGAA
AAATGGTAGTCATCCAGGTGGTCCATGGATGGGACAGAAATCATGAGCTGGCCTCCAGGGGGCAGGTGAACTGGCCCTGCTGGGTGATCACCAC
AGCTGCCAGCCTGTTTTATTTTTATTTTTTGAGACAGGGTCTTGCTCTGTCACCCAGGCTGGAGTTCAGTGTCAGGAACGCAGCTCACTGCAGG
CTCAGCCTCCCAAGCTCAAGCGATCCTCTTGCTTCAGCCCCCCAAATAGCTGGGACCACAGGCGTGCACCACCATCCCCAGCTAATTTTTGTAT
TTTTTGTAGAGACAGGTCTCACTATGTTGCCCAAGCTGGTCTTGAACTCCTGGGCTTAAGCAATCCACCCGCCTCAGCCTCCCAAAGTGCTGGG
ATTGCAGGAATGAACCTCCACGCCCCGCCCTGCTGGCCTGTTGTGATGGCTTCTGGTGGTGTGGGGAAAGCTGGGAGCCCTGCCCTGTGCACCT
CCCAACATTGACCCCAGCACTTAGGATTACCATCTGTTGTTCAGGAACTTTACTTTACTTCCCTTAGGAAAAAAAGACAAAGAAAAAAAAGAAA
AGAAGAAGAAAGCAAAAAAGGCCTCAACCAAAGATTCTGAGTCACCGTCCCAGAAGAAAAAGAAGAAAAAGGTAGAGAGTTCCTGGGGTGTCTC
AGGCCAGAAAACAGACCCAAACCCAAGCCCCCTCCTACACACCCAGACCTGGTTCCTGCCCCCTTCCCATTTTCGGGGCCCAGTCGGGGGCGTC
AGGGGTTGTGACACACCAGGGAAGAGGCTGGCAGGGCATGTTCCCTGAGCACATGGAAGCCGTAGAAGTGGCCTGCCGGAGGTAGAAGGGTGTT
GGGGAAGGAAGGAGAGACTCCCCCCAGCACAGGGAAACCAGGTAGACTGTGGCAGGTTTCCAGGTGAAAGGAAACGTTGCCTGGGCTGCGTGTG
CCCCAGCTGGCAGGCTAGCCCTGAACAACAGCTGTCCTCACGGCCCGGGGCCTTAGCACCTCAGACACAGATGAAGTTCTCACCTTGGCCAGCA
GGGCCTCAGCTGTATTTAGGAGAGCTGAACATCTGTTTGCCTCTGCCCTTGGAGGTCGCTGCAGACCCAGTATCTATTCTAGGGGAATTCACTA
GTCCTCAGGAGGTGGGGGCAGCAGTGGGTGGGGAAAAGCTGCAGGTCTGAGAGCCTCTCGTACTTCCCTCCTCACAGAAGAAGACAGCAGAGCA
GACTGTATGACGAGCACCAGCACCAGGCACAGGTACGCTTCCCAATCATTCCTGAGCATTCAGGGTGGGAGGACAGCTCTGGTGTCCCCTGTGG
TCCCAGAGAGCCAGGCAGACCTGATAGGTGGGCTCTAAGGGGAAAGGAGGCTGGGGAAAGAGGTTCTGTTGCCAAGGGTCCATGGGGCCACTGG
GGTGACATCAGGAGCTGGCACTGCAGCATCAGAAGGATCCAGAACAGTAATGGCAGTGGTGACACCGAGTGCACCTGGGTGCAGGGGTTGTGCA
TGCTTTAGGGGGTGTGCCCTGGGATGGAGCCTGTTTGTAGGTGAGGTCGGATACAGCTTGGTTCCTCCTTCACTTGTGAGCGGTTCATTTTCCT
CATGATCCTGTAACTTGGGGGCATTTCCTTTTGGGAAGGAAGATGGTTTACTCAAGATGAGCTATCACCATGGATCTATGCTTCCCTATGGAGG
ACAGGCCCTGCCAAGTGGTGGTGACAGTTAGCTGCTCCACCTGGCTCTGCTGGCCCTGTGGTCACCCAGCCTCCTGTAAATGGGGGTGATGCAG
AGCCCGCCTCCTGGGCCAGTGGTGAGGCTTATGTGAAGCTAAACTAAACACTAAAGGACTCAGCCCAGTTCTCAGAACATTCCAAGTGCTAAAA
AATGTCCACTGTGGTTAATGCCTCCCCCCTGCATTGGAGATGCCAGATTTCATTTTCCTTGCAGGGGAAAAGGGTCAGGAAATTTGACATCTGC
ATGTGTTTCCTTCCCCTAGGGATTTCCTAGCCGAGCAGTGGCCATCCCCATGCCTCTGACCTCCACCGACCTCTGCCCACCATGGGTTGGAACT
AAACTGTTACCTTCCCTCGCTCCACAGAAGAAGACAGCCAGCTTCAGGGGTCCCTGTGCTGGCCAAGCCAGTGAGCCTGCGGGGAGGCTGGTCC
AAGGAGAAAGTGGACCAGCTCCCATGACCTCACCCCACTCCCCCAACACAGGACGCTTCATATAGATGTGTACAGTATATGTATTTTTTTAAGT
GACCTCCTCTCCTTCCACAGACCCCACATGCCCAAAGGCCTCGGGACTTCCCACCACCTTGCTCCACAGATCCAGCTAGGCCTGACCTGTGCCT
CATCCCGTGCCGCTCGGTCTCTGGCTGATCCCGAGGCTTTGTCTTCCTCTCGTCAGTTCTTTTGGTTGTGTTTTTTGTTTTTTTTTTAATAACT
CAAAAAAAAAATAAAAGACTTGGAGGAAGGGTGCAAGCTCCCAGTGCATCTGGGGCACATGTTTCTTGGAAGGGACTGTCTCGCCGACACTCGG
GATTCCCTCTTGCCTGCATGTTGAGGCTATGGGTGACCGTGGTTAGTGGGACAGGCAGTGAGCAGTGAAGTGCCTGAGTGCCGAATTGGTGGGG
AAGGCTTCCTGGATGAGGTGGCATCTAAACTAAAGGATGGAACTAAAGGATGGTCATGGTTGATTTCCTGTTGCCAGAGTAAGTCATGTAAATA
CCCAAAGACAAGAAATGGAAGGGGCTGAGAATCCTCGAGTTAGGCCTCGAGCTAGGGGCAGGCTCCCTGGAGGTGCCTGGTGAACAGCTGTGGC
AGGCACAGCAGGTCTAGGAAAATCGGAAGTGAGTTGCCCCTCAAATCGAGCTCACCATGGTTCTGTGGTGGTGAGGGCAAGAAGTGGATGAACA
TGAAAGACAGGATGATGTCTTGGGTGTGGACTGAGGGAGGGGAGGATAGCAAAGGAGGTGGTCTGCTGCTCCAGCCTGGAAATGCAGAAGCCC
ACTTCCCTGGGCCCAGAGCCATGTGGAACACCAGGGGTCCTGGAGATGGTCTCCAGAGCTTTTAGCCTCATGCTGGAAACAGCCAGAGGCAGTG
CAGAAAAGGAATGCATGGCTGGAGGTGTCGGAGACCCAGGTTGGCATCCAGCTGCACCCTTGACTCGGGGCCCGGGGCCAGACCCTCCACCATC
TGGCCTCTCTCCTCTCAAGCATGTTGCTCTAGAACAGAACTACAGAGTAGTGTCCTCATTGGGCCTTGTTGACCCACAGCAAGACTTTAAACTT
AAAAATGGGGTGATTTCACTGCAGTTCTTGATTTCTGGCTCCTCTTAAAAAGATAACATCTGGCAACGGGGGCTGTGCTTCCTCCTGGCAGCAA
CCAGATAGAGCTGAGTAGCAGTCAGCCCCTTAGGTAAGGCATGGGCACCCAGTTCTCCACAGTCCCCTACTTCCTGTCCATCCTGACACGGAGG
CCCTATGTCGGTTGCCATCTGTCATCACATTCACACTGTTCTTAGTATAGAAATGAAATTGGGGACATAGGAAAATGAAAGCTGTACCAAGAAG
AGCTTGTGCTTAAACTAGGCAAGAGCCTATTTCTTTTTGGAAGTAGAGTGTTCGTGTGTGTTAAACATGTAATCAAGTATGTCTGTGTCCAAAG
ACTACAAGCCCCCCCCCAGGCCTGCCTGGCCCCGCAGGCATCTCTGTGGGTTACTTGGGCTGCGTTCTCCCACCTCAGTGACTGGATTTAGCGT
CTTTAGTTACCTCTTTAGGATAAATGAACTGGATCTCAACAGAAGAGCCAGGAGCCAGAGTGTTCTAATTACTACCTTTTATTCTAATGTGAAC
CATGGCCCTGAAAGCTGATAACAAGCTTGGCTGAGCAGAGGGAACTAGGGGTCGGCAGAAAGGATTATGGGTGGAAAACATTGGCTCTTCCTTG
GGGAGTGATGCTGGGGAAAGGGAAGAGAGTGGCTCAGCCTGCAGGTAAATAGGCTAGAAAAGCCAAGGCCAAAGGCTGGAGGGGAGAGGACAGT
CAGCATGTCCAGCCTGGGGTCTGGGTGTAGGGTTATCCCTTCTCCCTGTGCCTTCCCATCTCGTCCATGAGCCTAGGTCTTGGAGCCTTGTGTT
GGAGGCTGCTGTGATGTCAGGAACGGGGATCTGTCTAGCTTTTGGCCACTTCCTGGGACCTCACGCCCCTGTTGACAGATGGAGATTGGGCAGC
AGGGCCTTGCTGCATTGTTATCTGCTGTTCCGACTTGGTTTGTCTTGTCCAAGGGTGACGAAAGAGCCAGGCACCAGGGTCTCATGGGATGAGG
TACAGGGTGGGAGATGGGGGAGGGGCTGGGGGCTGAAGGGAGCAAGAAAGCTGTAGCTGTGTGGGGCTGGCAGGATGTTGAAGACCGCCTCTGC
TGCTCTCACATGGGGACTGGAGAGAGAAGCAGCAGGTTGAGGTTGGGGTCACCCATTTGTTGTCCCTGCCCCTTTCTAACATCCTGGACCTGCA
GAGCAGTTAAGGACTGTCCACCCTCCCCTGCCCCCTGCTCAGGTCCAATAATGACCATCATGGATTTGTGTAACTCCCCACAGCCCCCCAACCC
TGTTCCTTCGTCTGTGAAATGGACATCCCAGGAATGTTGGAGAGTGGCCCAGCGTCACACTCCTTCACCTGCCCACAAAGGAGCTGGCCCTGCT
GGGGATGAGCTGCTGGTGACCAGATGCCCCTCTGCAAGGCCCTTACCTGGGCCCAGATCCTGCTTGGTCACACCCAGCCCAGAAGACGGGTCCT
CCAGTTCCAGTGACTCTGCAAAGGAGCAGCAAGTCCGTTTGTCACTTGAAGTGCAGCCTACCTGACCCAAGATGCCTGAGGGCAGTGCTTCCCA
CCTAGCCACAGGCTTAGTGCCTGGGAAAGCAGGTACCCAGGGAAGGACAGCTGCAAGCAGCAACAAAGAGGTGTAATGGGGGCTCGAGTGAGAA
GGGGGTGATGAAATGAGATGGGTGGGTCTGTAGGACTCCTGGATGCTAGAGGATGGCGCGTGGATGGATGAAATTCACAGATGAAAGGACTGAC
GGATAAGTGAACAAATATGAGTGCATGTAAGAGGAGAGATGATAAATGGACAAATAGGAATGCACAGGTGGGTGGATGGATAAAGGGCTGGACG
CATGACTACGTCACTGCCCCCAGGAGCTGCCATCCTGGGTGTCCTGGTCCCATGTGCTTCAGAGGGGACCTCTTGCCCCTCAACCTTCCTAGTC
CTTCCTGGTCCTCTGACACTGGCACAGTGCCACTGCTTACCACTGCAGTTATGGTGCCCGCGGCTTCTGGTGTTGGGGACCTCCGTGCCGTTGG
GGAAGACACACCAGCAGTAGCCGATGCTCCCATAGCACTGGAGTGGCAGATAGTTGCCGTTCTCGTCGCACTTGGGCCTGAATGAACCCGGGTG
GACAGCAGGGATGTGGCTGACCTCTTCCTGGCACTTGGTCAGTACTGAAGCGACAGGCATGATGAGGACACAGTGAGTGAGTGAGCTCTGAACC
AGGGTCTGAGCAGAGCTAAAGACCCACACACCACTGCTGTGGGCTTAATGCCTTCTTCCCAAGTGGCTTTACTCACTCCAGCCATCACACGGAT
GGGAAAACTGAGGCCTAGACCAACAAGGTCTGAGATCAAAAAGGAAGTGAATGGCCATGTGTCCAATTCACCTCAGAAGTTGATGGTTTCTTCT
GACACTCAAAGCCCATTACAGTTTTGGGCCAGGCACAGTGGCTCATGCCTGTAATCTTAGCACTTTGGGAGGCCGAGGTGGGCGGATCACTTGA
GGTCAGGAGTTCAAGACCAGCCTGGCCAACATGGTGAAACCCTGTCTCTACTAAAAATACAAAAATTAGCTGGGCGTGGTGGCACATGCCTATA
ATCCCAGCTACTCGGGAGGCCGAGGCAGGAGAATTGCTTGAACCCGGGAGGCTGAGGTTGCAGTGAGCTGAGATCGCACCACTGCACTCCAGCC
TGGGCGACAGAGCCAGACTCTATCTCAAAAACAAACAATCAAACAAAAAAACACCATTACAGTTTGGAATTGCACTTGCGATTCTGATTCTAGA
GAAAAGCAATGGGCACCTTGGTAAGTCTAAGCTTCCTGTTACTGGGAGTTCTCAAGTAGAAATGGGGTTTACCGTTTGTTGGAGATGTCTTAGA
GGGGTTTAAGCATCAGCTAGGAGTTGGAGATAGCATGTAAGGTGCCTTCTATGAATCTGATGCAGAAACTGAGGCCCCAGGCAGGGTGGCCCTT
TGACCTTCTACTTCAGGACCCTGAATCCTAGAGGGAAGGGGACTTGTCCAAAGTTACATAGCAAATTAGAGACAGCACCGGGATAGAAACAGCA
CTCTGTCTTTGGGTCTAAAAACATCCTAGTCTGCATTGTCCATGAGGTGGGAAACGCCCAAGGCTCTCTTGGCAGCAGCTGTGACCTTGGCGCC
CTCACTGGATTGCGGGCAGCACTGGGGCAAGGTCATTACAAGGATTCCTTTCTGCAGTGTTTCGGGCAGGTTCTACCCCAGGCACCCTGTGCTG
TACCATCCTCTATGAGAGAGGTCACCTGTACCCTGTGGTGACAGGCCTCTGTGGGCCCTTAGGAACCCTTAGACAAGATGGGGGTGGGTCAGGG
GAGGGGGACAGCCAAACCAAGAAGGAACAGACAGGAGAGAGAGAGAAGTGAGAAAGAAGTGAGAGCTGAGAGGATGGGAGATTCCGCGGTGCTG
GGACCAGGGAGTGCTGGAGGCCCCGGCCTCAGCAGCTTCAGGAGAGCCCCGAGGGTCCAGAAGCCCTGGCACGCTAAAGCTCCCACTCCCTGTA
CCTTTCGGTGGAGCGTCAGTGGGCTTTTGCTCCAAGGAGTGCCTGCTCATTTCAAACAGGAGCCAATGGTGCATCCAGCTCTCAAAGACCTAAT
ACGGATAGAGGTGGAGGTCAGGTTCGATGGCCACCACCAAGCCCCTACACTGCCTGGCTTTGCCCCTGGGGACAGAAACATGCAGGGCCAAATA
GGGCCCCAACACCCGGGTCCAGCTGCAGCCTGGTTCCCTCTTAAAGACCCCTGGGGCTGAACCCCACATACTCTGCAGCATCCAGGTTTTGGAA
GTGCTGGTAAACCCCTTCAGCTTCCTGAGAATGGCTTCCCCAGCCCACCCTCACCCCACCTCTCCTAGCCCTGCCCTAGACACCAGAGGAAAGA
GAGAGTTCCCATGCAGGGAAACCTGCTGACCTTCCAGTCTATGGTCTCCATGGTGTTCTTAAGGTGTCTCAGGTTCTCCGGGAAGCTCCCCTTC
AGTGGCGGGTACACCTTCAGGGGGTCAGCATTCTACAGGGTAGCAGGGCAGGAAGGATGGTTCAAGAAGAGCTCCCTGGCAGGCAGTGTGAAAT
GTGTAGCCCACGTTCCCTTGGTCTTCCATTCTGAGGAATGGACCAGAGCTACACCAAGCCTAAACCCTGGACTTCAGCCATGATGGGAGGGGAG
GGGAGGGTACGGGTAAGGGTAGTCCAGCTGTTCAGCTACGAGACTGCAGCGTTGCGAGTCGAGTTCCAGATTCCAGGCCAGCTCTACCAACAAG
CCCCAGTGTCCTCCCTGTGGATGGCTGCTCAGCTTTCAGGTCTTACCTGCTCCAGCAGGTGAGGACCCAACCTTGACTGCCCCCAGCTAGGTTG
AGTCCTCTGCCTCTTTCTTCACAAAGCCCCCTGCACTTCTGTCATCACCTGGTCACTTGTCTGTCTCCCACACTAGCCTGGGATCCCCATGGCT
TCAGGAGCTGGGTCCAATTGCTCCCCATTGTGGGCCCAGAGCCTTGCACAGTGCTGGCATAGGACAGACACGCAGTACAAATTTGGGGAGAAAA
AAAGGGTGTCTTGAGCAAGTCACTTCCAAACTTTGAGCCTCAGTTTCTTTTTTTATTTTTATTTTATTTTATTTTTTGAAATGGAGTCTCACTC
TGTCACCCAGGCTGGAGTGCAGTGGCGTGATGATCTCGGCTCACTGCAACCTCCACTTCCCGGGTTAAAGCGATTCTCCTGCCTCAACCTCATG
AGTAGCTGGGATTACAGGTGACTGCCACCACATCCGGCTAATTTTTGTATTTTTAGTAGAGACTTTCACTATGTTGGCCAGGCTGGTCTCGAAC
TCCTGGCCTCAGGTGATCTGCCTGCCTAGGCCTCCCAAAGTGCTGAGATTACAGGCATGAGCCACTGCACCCAGCCGAGCCTGTTTATCTCAAA
AATGCAGAGGCCAGACTACATATAACATTTAAGGGTCACCCTTGTATTCAGTAATCCAGAGAGCACATGTTGAAAGTCTGCCATGAGCCAGGTA
TACAGGCCTTGGAGCTTGGCCCGGCCAGGGTCCTGGGTGGGCAGGCAGGACCACCCAGCTAGCTCCCTGCACTCACCTGGAGCAGGTGCATCAC
ATGGTCCTCTGTCATGTTGCCATACTTGGTGGCATTCTGCATGGGCTGTGGGAGGAAGTAACAGAAGGTTACCAGAGCTGGTCCCTGGAGCAGG
GGGTATGGAGCAGGAGCCGGTTGCTGGGATCTAGGTAAGAGACTGGAATCGCAGGCACTTGGTCAATGGTTCCATCTCTGCCACCTCCAAACAT
GAGAGCTCGAGCAAGTCACTTTAGCTTCCTGCCTCAATGTCCTCATTGGTCAAACTGGCATAAGCTTTCCTGCCCAGGGTTTTGTCCACAGCAC
AGTATTGTGAATATAAATATTGTCAATGCATGATAGCAAGGTCTTTGAGAATGGGAGAGGACAGTGAGATGCTATAGGAAATGAGAAGCACTTT
GTAAACTGTAGAGGGCTGAGCCTTCCTCCCAGGGATGGCACCAAGAGACTCTTCACCTGTGCCCTCCACACCTGGGGAGCCCGATTCTTCCTGA
GGCAGGCACTGTCCCTCCCGCAGCAGTCAGGACCCCTCCCCAGGTGGGCTCTCTTCCCTGCCCCTCCCCTTGGCACTGTCCTCCATCCAGGCGG
GATAACCTTGCCCCTCCCACCACCCTGGGGCTGTCCTTACCCCCTGGGGCAGGGCTCCCATGGGCAGCGCCTGCATCAGCAGCGGGGTGGCCAT
GCGCATCTTGCTCACAGGCTTGGGAGCTGTGGGGACAGGAACGAGGGTAAGTGTGGCCCCGGTGCCCAGGGAGGAGGGTATCAGACCCAGATGA
GGAAGGGCTGGAATTCCAAACCGGAGGGAGAGGACAGTGGGCCCAGCTGGGTGCAGGGATGCGGGTCTCTGAGTTGAGGGATGGTGGGAGGTGG
GGGGTATCAGGATGTAGGGGTGCACGCACGCTTGGGAAGCTTCATGCGCAGGTTCTCCAGCTGCAGGTTCTGGGAGGTGACTGTCAGTTTGTCC
AGCCGGCCCTGCTGCTGGTACAGGAAGTAGGCGGTGGTGGCCTGGCCAGCGAGGAGCAGAGTCACCAGGATGGAAAAGCCTGTGTACAGGGCTC
CGCGGCTGCACTTGCTGTGGGAGGTGGGGAGGATAGGTCAGAGGAGGATCCACAGTGGTGGCTGCCCCAAGGGCTGGCTAGGAATGGGGAAATG
TATACCCCCATCTCCATTAGACCCCTAAGCCACCCCTAATAAACAATGCATTTGAAGCACAAACAGTAAGCTGGCTATGGAAACACAGCTTGAA
GACCTCACCCCACCCCTCCTTCCAACCATCGATGTGCCTGAAGTCTTCCCTGGCAGAGACCCTGCAGCTGCCACGGGCCTGAGTTGAACAGAGA
AGAGCAAAGAGGCATGCTCTTTGTCCTCTCTGGACCTTAGGGTCCTGCCTGTGCGATGAGGGGTTGAGGTGGGGGGGTCTTCCCAGGCTCCCTT
TGCCGTGCGGATCTCCTGATGATCAGGGCTGCCCTCAAGGGGAACAGGTTTGGTTTTTGTTTTGTTTTGTTTTGTTTTGTTTTTTGAGACGGAG
TCTTGCTCTGTCGCCCAGGCTGGAGTGCAGTGGCGCGATCTCGGCTCACTGCAACCTCCACCTCCTGGGTTTATGCCATTCTCCTTCCTCAGCC
TCTCCGAGTAGCTGGGACTACAGGCACCCGCCACCACGCCTGGCTAATTATTTTGTATTTTTGATAGAGACGGGGTTTCACCGTGGTCTCGATC
TCCTGATCTCGTGATCCACCCACCTCAGCCTCCCAAAGTGCTGGGATTACAAGCGTGAGTCACCGCGCCCAGCCTTTTGTTTTGTTTTTTTTTT
CTGCTGGCAGGATCAACCAGGTATGTTATTTTTTTTAATTGACAAAACCAAAAAAAATTGTATGTGCTTACCAAGTAAGGGGAAGAGGGTTTTC
ACCCCTCTGCCCAACCTCCCACCCTCACAGTGAAATCAGATTTAAGGAGAAAAGGTAAGGAAGTGGGACCGGGACAGCAGAAAATGTAGCCCAC
CTGGGAAGAAGTGGGGCCTGGCCATTTTAGGAGTGGGCTGGGGGAGGCTTGGACAATGTCAGGCTGAAGCAGGGCCAGGCACCACCCACTCTGG
GGCCATCCTCTGCCCAGGCTCTCCATGTCTTTGAGCATGTCCCTGCCAATCTCTGTGCCTCTGTTCCCTCATTTGTCACATAGGTGCCCCCACC
TCTGCGATTCTAGAATTTGGTGGGTTTCTTCTTTTAAGCAAGATCTCACTGCAAGCGCCAAAGTATTTCAAATGGTAATATCCATCCTGCAGGG
GGTGGGCAGGAGTATAGGTGCCTGAGCCTGTGTGGCCTGGATGAATTTCTCATGCTCCCTGGACTCACCATCCAGACCCTCGGACCTCAGCAAG
CCCTTGTATCTGTGGGACTTGGATGCGACTGGGGGGTGCATGCATATGTTACAGTACAGGGGATGTAAGGATCCTGCCCCTACACCCCAGGAGT
TTCTGATCTGTTCTTTGACGACCCCAGGGGTGGGACTACTAAGACCCTAGTCCAGGTGTTGCCAATGTGAAGGTGTTGGGAGGTGATCGGGCCA
CAAGGCCTTCTCCCTCACGAATGGGATTAGGTGCCCTGTAAGACGGCTTGATGGAAGGAGTTGGTTCTCTCTTGCCCTTCTGCCTTCCACCATA
TGAGGACACATCAAGGAAGCCCCTCACCAGGCTGGGTGTGGTGACTCACGCCTGTAATCCCAGCACTTTGGGAGGCCAAGGCAGGTGGATCACT
TGAGGCCAGGAGTTCGAGACCAGTCTGGCCAACATGGCGAAACCCCGTCTCTACAAAAAAATACAAAAAACTTAGCCAGGCATGGTGGCGTGCA
CCTCTAGTCCCAGCTACTTGGGAGGCTGAGGTGGGAGAATCACTTGAACCCGGGAGGCGGAGGTTGCAGTGAGCCGAGATCACGTCACTGCACT
CCAGCCTGGGTGACAGAAGGAGACTGTCTCAGAAAAAAAAAAGAAAGCAAGCTAGGCCGGGCGCGGTGGCTCACACCTGTAATCCCAGCACTTT
AGGAAGCCAAGACAGGTAGATCACCTGAGGTCAGGAGTTCGAGACCAGCCTGGCCAACGTGGTGAAACCCTGTCTCTACTAAAAATGCAAAAAT
TAGCCGGACGTGGTGGCGAGCACCTGTAATCCCAGCTACTCGGGAGGCTGAGGCAGGAGAATCCCTTGAACCTGGAAGGTGGAGGTTGCAGTGA
GCTGAGATCATGCCATTGCACTCCAGCCTGGGCAACAGAGTGAGGCTCCATCTCAAAAAAAAAAGAAAAAATTAGCCGGGCGTAGTGGTGGGCA
CCTGTAGTCCCAGCTACTCAGGAGGCTGAGGCAGGAGAATCACTTGAACCTGGGAGGCAGAGGTTGCTGTGAGCCAAGATCACACCACTGCATT
CCATCCTGGGGGATAGAGTGAGACTCTGTCTCAAAAAACATAACAAAAAAAAAAAAAAAAAACAAGAAAGCCCCTCCAGAACTGTGAGAAATAA
ATTTCTGGGTGTTTTTTGTTTGTTTGTTTGTTTGTTTGTATATTACGCAGTCTGTGGTATTCTGTTAAAGCGGCACAAAACGGACTAAAACAGA
CCCATTGGGAACTGCAAGGATGAGGCTGCACCCTGCCTACTCCAGCAACCAGCAAGGATGGTTTAGGACGCTCCAGGAGTCCCTTGTGCCTGGT
AACTCATGACATCACAGACTGGCTCATTCTCATTGGCTTGCTGCGTGCCAGTCTGTGCTTTCTGGGATAAGGCCCAGCCCAAGGGAGAGTTATT
CGGGAAGGAAACAGCAAAAACCCGACGGTGGGCGGGGGGCGGGGGGGAAGTGGGGAGACCAGACAGGAAGGGAAAACAAATTCTACTTCTTGGC
CTTCTCAAGGAACACGGGTGGCCTAGCCTGTGTTCAGGCTCTCCAGCCTCATCCTCCACCTGTTCAGTGCTTCTGCAACCCCACACCCAATTCT
AGCCCCAGCTCTACCTCCCACACACGACATGGGACAGTACCTTCCCCTCTCTGCACCACAGTTCCTCAGGAG
HUMAN SEQUENCE-mRNA
TAAGGGCGCGAGGGAAGTGGCGGGCGGGGACTAAGGCGGGGCGTGCAGGTAGCCGGCCGGCCGGGGGTCGCGGGTATGGCCGAGGCCAGGAAGC
GGCGGGAGCTACTTCCCCTGATCTACCACCATCTGCTGCGGGCTGGCTATGTGCGTGCGGCGCGGGAAGTGAAGGAGCAGAGCGGCCAGAAGTG
TTTCCTGGCTCAGCCCGTAACCCTTCTGGACATCTATACACACTGGCAACAAACCTCAGAGCTTGGTCGGAAGCGGAAGGCAGAGGAAGATGCG
GCACTGCAAGCTAAGAAAACCCGTGTGTCAGACCCCATCAGCACCTCGGAGAGCTCGGAAGAGGAGGAAGAAGCAGAAGCCGAAACCGCCAAAG
CCACCCCAAGACTAGCATCTACCAACTCCTCAGTCCTGGGGGCGGACTTGCCATCAAGCATGAAAGAAAAAGCCAAGGCAGAGACAGAGAAAGC
TGGCAAGACTGGGAATTCCATGCCACACCCTGCCACTGGGAAGACGGTGGCCAACCTTCTTTCTGGGAAGTCTCCCAGGAAGTCAGCAGAGCCC
TCAGCAAATACTACGTTGGTCTCAGAAACTGAGGAGGAGGGCAGCGTCCCGGCCTTTGGAGCTGCTGCCAAGCCTGGGATGGTGTCAGCGGGCC
AGGCCGACAGCTCCAGCGAGGACACCTCCAGCTCCAGTGATGAGACAGACGTGGAGGTAAAGGCCTCTGAAAAAATTCTCCAGGTCAGAGCTGC
CTCAGCCCCTGCCAAGGGGACCCCTGGGAAAGGGGCTACCCCAGCACCCCCTGGGAAGGCAGGGGCTGTAGCCTCCCAGACCAAGGCAGGGAAG
CCAGAGGAGGACTCAGAGAGCAGCAGCGAGGAGTCATCTGACAGTGAGGAGGAGACGCCAGCTGCCAAGGCCCTGCTTCAGGCGAAGGCCTCAG
GAAAAACCTCTCAGGTCGGAGCTGCCTCAGCCCCTGCCAAGGAGTCCCCCAGGAAAGGAGCTGCCCCAGCGCCCCCTGGGAAGACAGGGCCTGC
AGTTGCCAAGGCCCAGGCGGGGAAGCGGGAGGAGGACTCGCAGAGCAGCAGCGAGGAATCGGACAGTGAGGAGGAGGCGCCTGCTCAGGCGAAG
CCTTCAGGGAAGGCCCCCCAGGTCAGAGCCGCCTCGGCCCCTGCCAAGGAGTCCCCCAGGAAAGGGGCTGCCCCAGCACCTCCTAGGAAAACAG
GGCCTGCAGCCGCCCAGGTCCAGGTGGGGAAGCAGGAGGAGGACTCAAGAAGCAGCAGCGAGGAGTCAGACAGTGACAGAGAAGCACTGGCAGC
CATGAATGCAGCTCAGGTGAAGCCCTTGGGGAAAAGCCCCCAGGTGAAACCTGCCTCTACCATGGGCATGGGGCCCTTGGGGAAAGGCGCCGGC
CCAGTGCCACCTGGGAAGGTGGGGCCTGCAACCCCCTCAGCCCAGGTGGGGAAGTGGGAGGAGGACTCAGAGAGCAGTAGTGAGGAGTCATCAG
ACAGCAGTGATGGAGAGGTGCCCACAGCTGTGGCCCCGGCTCAGGAAAAGTCCTTGGGGAACATCCTCCAGGCCAAACCCACCTCCAGTCCTGC
CAAGGGGCCCCCTCAGAAGGCAGGGCCTGTAGCCGTCCAGGTCAAGGCTGAAAAGCCCATGGACAACTCGGAGAGCAGCGAGGAGTCGTCGGAC
AGTGCGGACAGTGAGGAGGCACCAGCAGCCATGACTGCAGCTCAGGCAAAACCAGCTCTGAAAATTCCTCAGACCAAGGCCTGCCCAAAGAAAA
CCAATACCACTGCATCTGCCAAGGTCGCCCCTGTGCGAGTGGGCACCCAACCCCCCCGGAAAGCAGGAACTGCGACTTCTCCAGCAGGCTCATC
CCCAGCTGTGGCTGGGGGCACCCAGAGACCAGCAGAGGATTCTTCAAGCAGTGAGGAATCAGATAGTGAGGAAGAGAAGACAGGTCTTGCAGTA
ACCGTGGGACAGGCAAAGTCTGTGGGGAAAGGCCTCCAGGTGAAAGCAGCCTCAGTGCCTGTCAAGGGGTCCTTGGGGCAAGGGACTGCTCCAG
TACTCCCTGGGAAGACGGGGCCTACAGTCACCCAGGTGAAAGCTGAAAAGCAGGAAGACTCTGAGAGCAGTGAGGAGGAATCAGACAGTGAGGA
AGCAGCTGCATCTCCAGCACAGGTGAAAACCTCAGTAAAGAAAACCCAGGCCAAAGCCAACCCAGCTGCCGCCAGAGCACCTTCAGCAAAAGGG
ACAATTTCAGCCCCTGGAAAAGTTGTCACTGCAGCTGCTCAAGCCAAGCAGAGGTCTCCATCCAAGGTGAAGCCACCAGTGAGAAACCCCCAGA
ACAGTACCGTCTTGGCGAGGGGCCCAGCATCTGTGCCATCTGTGGGGAAGGCCGTGGCTACAGCAGCTCAGGCCCAGACAGGGCCAGAGGAGGA
CTCAGGGAGCAGTGAGGAGGAGTCAGACAGTGAGGAGGAGGCGGAGACGCTGGCTCAGGCGAAGCCTTCAGGGAAGACCCACCAGATCAGAGCT
GCCTTGGCTCCTGCCAAGGAGTCCCCCAGGAAAGGGGCTGCCCCAACACCTCCTGGGAAGACAGGGCCTTCGGCTGCCCAGGCAGGGAAGCAGG
ATGACTCAGGGAGCAGCAGCGAGGAATCAGACAGTGATGGGGAGGCACCGGCAGCTGTGACCTCTGCCCAGGTGATTAAACCCCCCCTGATTTT
TGTCGACCCTAATCGTAGTCCAGCTGGCCCAGCTGCTACACCCGCACAAGCCCAGGCTGCAAGCACCCCGAGGAAGGCCCGAGCCTCGGAGAGC
ACAGCCAGGAGCTCCTCCTCCGAGAGCGAGGATGAGGACGTGATCCCCGCTACACAATGCTTGACTCCTGGCATCAGAACCAATGTGGTGACCA
TGCCCACTGCCCACCCAAGAATAGCCCCCAAAGCCAGCATGGCTGGGGCCAGCAGCAGCAAGGAGTCCAGTCGGATATCAGATGGCAAGAAACA
GGAGGGACCAGCCACTCAGGTGTCAAAGAAGAACCCAGCTTCCCTCCCACTGACCCAGGCTGCCCTGAAGGTCCTCGCCCAGAAAGCCAGTGAG
GCTCAGCCTCCTGTTGCCAGGACCCAGCCTTCAAGTGGGGTTGACAGTGCTGTGGGAACACTCCCTGCAACAAGTCCCCAGAGCACCTCCGTCC
AGGCCAAAGGGACCAACAAGCTCAGAAAACCTAAGCTTCCTGAGGTCCAGCAGGCCACCAAAGCCCCTGAGAGCTCAGATGACAGTGAGGACAG
CAGCGACAGTTCTTCAGGGAGTGAGGAAGATGGTGAAGGGCCCCAGGGGGCCAAGTCAGCCCACACGCTGGGTCCCACCCCCTCCAGGACAGAG
ACCCTGGTGGAGGAGACCGCAGCAGAGTCCAGCGAGGATGATGTGGTGGCGCCATCCCAGTCTCTCCTCTCAGGTTATATGACCCCTGGACTAA
CCCCAGCCAATTCCCAGGCCTCAAAAGCCACTCCCAAGCTAGATTCCAGCCCCTCAGTTTCCTCTACTCTGGCCGCCAAAGATGACCCAGATGG
CAAGCAGGAGGCAAAGCCCCAACAGGCAGCAGGCATGTTGTCCCCTAAAACAGGTGGAAAAGAGGCTGCTTCAGGCACCACACCTCAGAAGTCC
CGGAAGCCCAAGAAAGGGGCTGGGAACCCCCAAGCCTCAACCCTGGCGCTGCAAAGCAACATCACCCAGTGCCTCCTGGGCCAACCCTGGCCCC
TGAATGAGGCCCAGGTGCAGGCCTCAGTGGTGAAGGTCCTGACTGAGCTGCTGGAACAGGAAAGAAAGAAGGTGGTGGACACCACCAAGGAGAG
CAGCAGGAAGGGCTGGGAGAGCCGCAAGCGGAAGCTATCGGGAGACCAGCCAGCTGCCAGGACCCCCAGGAGCAAGAAGAAGAAGAAGCTGGGG
GCCGGGGAAGGTGGGGAGGCCTCTGTTTCCCCAGAAAAGACCTCCACGACTTCCAAGGGGAAAGCAAAGAGAGACAAAGCAAGTGGTGATGTCA
AGGAGAAGAAAGGGAAGGGGTCTCTTGGCTCCCAAGGGGCCAAGGACGAGCCAGAAGAGGAGCTTCAGAAGGGGATGGGGACGGTTGAAGGTGG
AGATCAAAGCAACCCAAAGAGCAAGAAGGAGAAGAAGAAATCCGACAAGAGAAAAAAAGACAAAGAAAAAAAAGAAAAGAAGAAGAAAGCAAAA
AAGGCCTCAACCAAAGATTCTGAGTCACCGTCCCAGAAGAAAAAGAAGAAAAAGAAGAAGACAGCAGAGCAGACTGTATGACGAGCACCAGCAC
CAGGCACAGGGATTTCCTAGCCGAGCAGTGGCCATCCCCATGCCTCTGACCTCCACCGACCTCTGCCCACCATGGGTTGGAACTAAACTGTTAC
CTTCCCTCGCTCCACAGAAGAAGACAGCCAGCTTCAGGGGTCCCTGTGCTGGCCAAGCCAGTGAGCCTGCGGGGAGGCTGGTCCAAGGAGAAAG
TGGACCAGCTCCCATGACCTCACCCCACTCCCCCAACACAGGACGCTTCATATAGATGTGTACAGTATATGTATTTTTTTAAGTGACCTCCTCT
CCTTCCACAGACCCCACATGCCCAAAGGCCTCGGGACTTCCCACCACCTTGCTCCACAGATCCAGCTAGGCCTGACCTGTGCCTCATCCCGTGC
CGCTCGGTCTCTGGCTGATCCCGAGGCTTTGTCTTCCTCTCGTCAGTTCTTTTGGTTGTGTTTTTTGTTTTTTTTTTAATAACTCAAAAAAAAA
ATAAAAGACTTGGAGGAAGGGTAAAAAAAAAAAAAAAAAAAAAAAA
HUMAN SEQUENCE-CODING
ATGGCCGAGGCCAGGAAGCGGCGGGAGCTACTTCCCCTGATCTACCACCATCTGCTGCGGGCTGGCTATGTGCGTGCGGCGCGGGAAGTGAAGG
AGCAGAGCGGCCAGAAGTGTTTCCTGGCTCAGCCCGTAACCCTTCTGGACATCTATACACACTGGCAACAAACCTCAGAGCTTGGTCGGAAGCG
GAAGGCAGAGGAAGATGCGGCACTGCAAGCTAAGAAAACCCGTGTGTCAGACCCCATCAGCACCTCGGAGAGCTCGGAAGAGGAGGAAGAAGCA
GAAGCCGAAACCGCCAAAGCCACCCCAAGACTAGCATCTACCAACTCCTCAGTCCTGGGGGCGGACTTGCCATCAAGCATGAAAGAAAAAGCCA
AGGCAGAGACAGAGAAAGCTGGCAAGACTGGGAATTCCATGCCACACCCTGCCACTGGGAAGACGGTGGCCAACCTTCTTTCTGGGAAGTCTCC
CAGGAAGTCAGCAGAGCCCTCAGCAAATACTACGTTGGTCTCAGAAACTGAGGAGGAGGGCAGCGTCCCGGCCTTTGGAGCTGCTGCCAAGCCT
GGGATGGTGTCAGCGGGCCAGGCCGACAGCTCCAGCGAGGACACCTCCAGCTCCAGTGATGAGACAGACGTGGAGGTAAAGGCCTCTGAAAAAA
TTCTCCAGGTCAGAGCTGCCTCAGCCCCTGCCAAGGGGACCCCTGGGAAAGGGGCTACCCCAGCACCCCCTGGGAAGGCAGGGGCTGTAGCCTC
CCAGACCAAGGCAGGGAAGCCAGAGGAGGACTCAGAGAGCAGCAGCGAGGAGTCATCTGACAGTGAGGAGGAGACGCCAGCTGCCAAGGCCCTG
CTTCAGGCGAAGGCCTCAGGAAAAACCTCTCAGGTCGGAGCTGCCTCAGCCCCTGCCAAGGAGTCCCCCAGGAAAGGAGCTGCCCCAGCGCCCC
CTGGGAAGACAGGGCCTGCAGTTGCCAAGGCCCAGGCGGGGAAGCGGGAGGAGGACTCGCAGAGCAGCAGCGAGGAATCGGACAGTGAGGAGGA
GGCGCCTGCTCAGGCGAAGCCTTCAGGGAAGGCCCCCCAGGTCAGAGCCGCCTCGGCCCCTGCCAAGGAGTCCCCCAGGAAAGGGGCTGCCCCA
GCACCTCCTAGGAAAACAGGGCCTGCAGCCGCCCAGGTCCAGGTGGGGAAGCAGGAGGAGGACTCAAGAAGCAGCAGCGAGGAGTCAGACAGTG
ACAGAGAAGCACTGGCAGCCATGAATGCAGCTCAGGTGAAGCCCTTGGGGAAAAGCCCCCAGGTGAAACCTGCCTCTACCATGGGCATGGGGCC
CTTGGGGAAAGGCGCCGGCCCAGTGCCACCTGGGAAGGTGGGGCCTGCAACCCCCTCAGCCCAGGTGGGGAAGTGGGAGGAGGACTCAGAGAGC
AGTAGTGAGGAGTCATCAGACAGCAGTGATGGAGAGGTGCCCACAGCTGTGGCCCCGGCTCAGGAAAAGTCCTTGGGGAACATCCTCCAGGCCA
AACCCACCTCCAGTCCTGCCAAGGGGCCCCCTCAGAAGGCAGGGCCTGTAGCCGTCCAGGTCAAGGCTGAAAAGCCCATGGACAACTCGGAGAG
CAGCGAGGAGTCGTCGGACAGTGCGGACAGTGAGGAGGCACCAGCAGCCATGACTGCAGCTCAGGCAAAACCAGCTCTGAAAATTCCTCAGACC
AAGGCCTGCCCAAAGAAAACCAATACCACTGCATCTGCCAAGGTCGCCCCTGTGCGAGTGGGCACCCAACCCCCCCGGAAAGCAGGAACTGCGA
CTTCTCCAGCAGGCTCATCCCCAGCTGTGGCTGGGGGCACCCAGAGACCAGCAGAGGATTCTTCAAGCAGTGAGGAATCAGATAGTGAGGAAGA
GAAGACAGGTCTTGCAGTAACCGTGGGACAGGCAAAGTCTGTGGGGAAAGGCCTCCAGGTGAAAGCAGCCTCAGTGCCTGTCAAGGGGTCCTTG
GGGCAAGGGACTGCTCCAGTACTCCCTGGGAAGACGGGGCCTACAGTCACCCAGGTGAAAGCTGAAAAGCAGGAAGACTCTGAGAGCAGTGAGG
AGGAATCAGACAGTGAGGAAGCAGCTGCATCTCCAGCACAGGTGAAAACCTCAGTAAAGAAAACCCAGGCCAAAGCCAACCCAGCTGCCGCCAG
AGCACCTTCAGCAAAAGGGACAATTTCAGCCCCTGGAAAAGTTGTCACTGCAGCTGCTCAAGCCAAGCAGAGGTCTCCATCCAAGGTGAAGCCA
CCAGTGAGAAACCCCCAGAACAGTACCGTCTTGGCGAGGGGCCCAGCATCTGTGCCATCTGTGGGGAAGGCCGTGGCTACAGCAGCTCAGGCCC
AGACAGGGCCAGAGGAGGACTCAGGGAGCAGTGAGGAGGAGTCAGACAGTGAGGAGGAGGCGGAGACGCTGGCTCAGGCGAAGCCTTCAGGGAA
GACCCACCAGATCAGAGCTGCCTTGGCTCCTGCCAAGGAGTCCCCCAGGAAAGGGGCTGCCCCAACACCTCCTGGGAAGACAGGGCCTTCGGCT
GCCCAGGCAGGGAAGCAGGATGACTCAGGGAGCAGCAGCGAGGAATCAGACAGTGATGGGGAGGCACCGGCAGCTGTGACCTCTGCCCAGGTGA
TTAAACCCCCCCTGATTTTTGTCGACCCTAATCGTAGTCCAGCTGGCCCAGCTGCTACACCCGCACAAGCCCAGGCTGCAAGCACCCCGAGGAA
GGCCCGAGCCTCGGAGAGCACAGCCAGGAGCTCCTCCTCCGAGAGCGAGGATGAGGACGTGATCCCCGCTACACAATGCTTGACTCCTGGCATC
AGAACCAATGTGGTGACCATGCCCACTGCCCACCCAAGAATAGCCCCCAAAGCCAGCATGGCTGGGGCCAGCAGCAGCAAGGAGTCCAGTCGGA
TATCAGATGGCAAGAAACAGGAGGGACCAGCCACTCAGGTGTCAAAGAAGAACCCAGCTTCCCTCCCACTGACCCAGGCTGCCCTGAAGGTCCT
CGCCCAGAAAGCCAGTGAGGCTCAGCCTCCTGTTGCCAGGACCCAGCCTTCAAGTGGGGTTGACAGTGCTGTGGGAACACTCCCTGCAACAAGT
CCCCAGAGCACCTCCGTCCAGGCCAAAGGGACCAACAAGCTCAGAAAACCTAAGCTTCCTGAGGTCCAGCAGGCCACCAAAGCCCCTGAGAGCT
CAGATGACAGTGAGGACAGCAGCGACAGTTCTTCAGGGAGTGAGGAAGATGGTGAAGGGCCCCAGGGGGCCAAGTCAGCCCACACGCTGGGTCC
CACCCCCTCCAGGACAGAGACCCTGGTGGAGGAGACCGCAGCAGAGTCCAGCGAGGATGATGTGGTGGCGCCATCCCAGTCTCTCCTCTCAGGT
TATATGACCCCTGGACTAACCCCAGCCAATTCCCAGGCCTCAAAAGCCACTCCCAAGCTAGATTCCAGCCCCTCAGTTTCCTCTACTCTGGCCG
CCAAAGATGACCCAGATGGCAAGCAGGAGGCAAAGCCCCAACAGGCAGCAGGCATGTTGTCCCCTAAAACAGGTGGAAAAGAGGCTGCTTCAGG
CACCACACCTCAGAAGTCCCGGAAGCCCAAGAAAGGGGCTGGGAACCCCCAAGCCTCAACCCTGGCGCTGCAAAGCAACATCACCCAGTGCCTC
CTGGGCCAACCCTGGCCCCTGAATGAGGCCCAGGTGCAGGCCTCAGTGGTGAAGGTCCTGACTGAGCTGCTGGAACAGGAAAGAAAGAAGGTGG
TGGACACCACCAAGGAGAGCAGCAGGAAGGGCTGGGAGAGCCGCAAGCGGAAGCTATCGGGAGACCAGCCAGCTGCCAGGACCCCCAGGAGCAA
GAAGAAGAAGAAGCTGGGGGCCGGGGAAGGTGGGGAGGCCTCTGTTTCCCCAGAAAAGACCTCCACGACTTCCAAGGGGAAAGCAAAGAGAGAC
AAAGCAAGTGGTGATGTCAAGGAGAAGAAAGGGAAGGGGTCTCTTGGCTCCCAAGGGGCCAAGGACGAGCCAGAAGAGGAGCTTCAGAAGGGGA
TGGGGACGGTTGAAGGTGGAGATCAAAGCAACCCAAAGAGCAAGAAGGAGAAGAAGAAATCCGACAAGAGAAAAAAAGACAAAGAAAAAAAAGA
AAAGAAGAAGAAAGCAAAAAAGGCCTCAACCAAAGATTCTGAGTCACCGTCCCAGAAGAAAAAGAAGAAAAAGAAGAAGACAGCAGAGCAGACT
GTATGA

[0273] TABLE 9
MOUSE NOMENCLATURE
ICSGNM Pim1
Celera mCG21141
HUMAN NOMENCLATURE
HGNC PIM1
Celera hCG33220
MOUSE SEQUENCE—GENOMIC
TAGGGAACACCAATTGAGAAAACACCTCCATAAGATGCAGTTATAAGACATTTTCTTTTTCTTTTCTTTTCTTTCTCCTGGAAATCACTTTGTA
GACCAAGCTGGCCTCAAACTCAGAAATCTGCCTGCCTCTGCCTCCTGAGTGCTAGTATTAAAGGCGTGCACCACCACACTGGGCAAGACATTTT
CTTAATTAGTGATTGGTAGGGGAGGGTCCAGCCTAGTGGGTGGGGCTATTCCTGGGCTGGTGGTCCTGGGTTCTGTAATTAAGCAAACTGAACA
CACCATGAAGAGCAAGCCAGGAATGAGAACTCTCCATGGTCTCTGCATCAGCTCCTTCCTCCAGGTTCCTGCCCTGCTTGAGTTCCTGTCCTGA
CTTTTTGATAAACAGGTATGTGGAAATGTAAGCTGAATAAACCCTCTCTTCCCCAAGTTCTGGCCATGGTGGTTCATCCGGGCAATTGTAATGC
TAACTCCGAGTCTTTCTCTGGGTTAAATATAGCCCAGGTTGGCCTCAAACTTGCTATGTATCTGGAGACAACCTTGAACCCCTGATCCTGCATG
ACAGACATGTGCCCATAACCAGCTTATGTGGTGCTGGGATTGGAATGAAGGCTTTGATGGTTCCACGCCTGCTAGGCAGTATTCTACCAACTGA
TTTACATCCCCAGCCCCAAAGAATTCCCCAAAGAATTATCGGGACAACTTCAAGTCTTTCCTTCTCTTATGGCTGCACTGGAGACTTCCCACCT
TGTTAAAGAGCCAGTGCTGTTCCCCTGGAATGTGAGTGTATGCCCCCGCGCTACTGGACTTTCGCTGTTTCTTTTTGAGTTTTAAGGTGCACAT
GAGATACCTCCAATGCCCTTTAAAGTCCCTAGTCTTAGCTGGGCGTGGTGGCGCACGCCTTTAATCCCAGCGCTTGGGAGGCAGAGGCAGGCAG
ATTTCTGGAAACGCCCTACATAGACCAGAATGCTCCACCCCTGCCCCGCACCCTGTGTGGACAAGAATGTTCCACCACCTGCACACACACACAC
ACACACACACACACACCCTTTTAAATTTTGACACAGGATACTATGTATCCCTGACTGTCTGGGAACTCACTATGAAGTTATGATGGGCCTGGAC
CTCTCAGAGGTCCGCTGCGCCTCTTCCTTGAGCCCTGTGATTAATAAACATGTGCATTACCACGCCTGTGCCACCAAAGTCCCTACCATTTTTA
ACATTTATTTTCAAAGGTCACTTTGCAGCAATTTATTGGGATTAAACAAACGGTTCCTGATTCCAACTGAACATCTTATTTTTGTAATTTTAGG
GAGAGGTGTCTCCTCTAAACCCCTGGCCCACAGGGCTCTAGAGTGGATGCCTTGAAGTAACACATATGGTGTAATCTCTGCTTCTGAGCCCTGC
TGGGGGAAAGGGCAGCCCTGCTTCCTGTGTCACCCTAGAGTATAGCTAACTGCATGCCTGGGAAGTTGCCAGGTCATGTGGGATGGGCAGCTGT
CTGCATGGTGTCATTGGTGGGTTTGAGGAAATCCCCCTGCATAAAAATATCTTCTCCCGTCCAGGGCCTTGGCACTTACCCTAAATGTATCTCT
TACCATTGGTTGCAAGGTGATGTGGGAGGCCAATTGTTTACCAAGTTTGGCCAGAGAGTCCCACTAGCTCTCAGCGATGCTTCTTGCATCCAAA
TTCACCAGCCAGGATGAAGTGTACAGGAGACAGTTCCTTTTAATTAGGGACTTGATTCTTCAATGTGAGAAATCTGGGGTGATGGCCACTCAGG
GGAAGGACCGTGACGAGGACTCTTAAGTTACCTTCTGACTGATCACAAGACCAGTCCAGGAGATGGAAAGAGACGACTGCTTATGTTCCCAAGA
GAATTCCAGGCTGCCATGATGGCCTGGGAGTCTTTAATCCCAGCACTCAGGAGACAGAGGCAGGTAGGTCTCTGTCTCTATAAGGTCAAGGCTA
GCCTATAGTGAGTTCCAGGGTTGTAGTGAGACTTTATCTCAAAACATACAAACAAGCCGGGCAGTGGTGGCGCATACCTTTAATCCCAGCATTT
GGGAGGCAGAGACAGGCGGATTTCTGAGTTCAAGGCCAGCCTGGTCTACAGAGTGAGTTCCAGGACAGCCAGGGCTACACAGAGAAACCCTGTC
TGGAAAAAAGAAAAACAAAACAAAACCGAAACAAACAAACAAAAAACTATACAAACAAAAATAAAACACACATAAAAATAAGTAAAAAACAAAA
ACAAAAAACAAACTCACCACAGAACCCTAGGCGTGCTGAACAGGTGTAAGAGTGTCAGCCAAAACCTTACTTGAGGTGCCACAGCGAACAGGTC
GGTTAATTACCAGGCTAAGTCACCATGTCCCAGGTACCTGTGATGTCCTTGGCAATTACAGAATTGTGTCTAGGAGGGAGGGAGCTATTATTAG
CCTCAAATTACAGGTAAGGAAACTGAGTCTTCAGAGAGGTTCAGCTTGCTCAACCTCCAAATGGCTGAGTCAGGACAGAGGTAAAGGCAGCACA
CATGGGAAACCTGGCACAGCCTCCTGCTCCAGGGCTGGACAGACAACTATGACTTACCCCGAGTCATCTCAAAAGGAAAGGACCTTGTCCTGCC
ATAGCCTTGATGGGGCCTGGATCAGAGTCAGGTTTGGGTTTTGTTTTGTTATTTTTCTCTCTAAGGCCTTGCGTGTGCTTGAGCAAGTGATCTT
CCTTTGAATATAGAACCGTCTCTCATTTAAAAAAAAAAAAAAGTATTTTCAACTGAACAGGCAGGGGTGCTGCACACCTTCAGTCCCAGCATTC
AGAAGCAGAGGCAGGCAGATCTCCCAGTTCAAGACTAGCCTGGTCGACAGAGCGAGTTCTAGCCTGGTCTACAGAGCGAATTCTAGCCTGGTCG
ACAGAGCGAGTTTCTAGCCTGGTCTACAGAGCGAGTTCTAAGACAGCCAGGGCTAAGCAGAAAAACCATGTCTCACAAAGCCAAATAAAATANN
NNNNNNNNNNNNNNNNNNNNNNNNNNNNNNNNNNNNNNNNNNNNNNNNNNNNNNNNNNNNNNNNNNNNNNNNNNNNNNNNNNNNNNNNNNNNNN
NNNNNNNNNNNNNNNNNNNNNNNNNNNNNNNNNNNNNNNNNNNNNNNNNNNNNNNNNNNNNNNNNNNNNNNNNNNNNNNNNNNNNNNNNNNNNN
NNNNNNNNNNNNNNNNNNNNNNNNNNNNNNNNNNNNNNNNNNNNNNNNNNNNNNNNNNNNNNNNNNNNNNNNNNNNNNNNNNNNNNNNNNNNNN
NNNNNNNNNNNNNNNNNNNNNNNNNNNNNNNNNNNNNNNNNNNNNNNNNNNNNNNNNNNNNNNNNNNNNNNNNNNNNNNNNNNNNNNNNNNNNN
NNNNNNNNNNNNNNNNNNNNNNNNNNNNNNNNNNNNNNNNNNNNNNNNNNNNNNNNNNNNNNNNNNNNNNNNNNNNNNNNNNNNNNNNNNNNNN
NNNNNNNNNNNNNNNNNNNNNNNNNNNNNNNNNNNNNNNNNNNNNNNNNNNNNNNNNNNNNNNNNNNNNNNNNNNNNNNNNNNNNNNNNNNNNN
NNNNNNNNNNNNNNNNNNNNNNNNNNNNNNNNNNNNNNNNNNNNNNNNNNNNNNNNNNNNNNNNNNNNNNNNNNNNNNNNNNNNNNNNNNNNNN
NNNNNNNNNNNNNNNNNNNNNNNNNNNNNNNNNNNNNNNNNNNNNNNNNNNNNNNNNNNNNNNNNNNNNNNNNNNNNNNNNNNNNNNNNNNNNN
NNNNNNNNNNNNNNNNNNNNNNNNNNNNNNNNNNNNNNNNNNNNNNNNNNNNNNNNNNNNNNNNNNNNNNNNNNNNNNNNNNNNNNNNNNNNNN
NNNNNNNNNNNNNNNNNNNNNNNNNNNNNNNNNNNNNNNNNNNNNNNNNNNNNNNNNNNNNNNNNNNNNNNNNNNNNNNNNNNNNNNNNNNNNN
NNNNNNNNNNNNNNNNNNNNNNNNNNNNNNNNNNNNNNNNNNNNNNNNNNNNNNNNNNNNNNNNNNNNNNNNNNNNNNNNNNNNNNNNNNNNNN
NNNNNNNNNNNNNNNNNNNNNNNNNNNNNNNNNNNNNNNNNNNNNNNNNNNNNNNNNNNNNNNNNNNNNNNNNNNNNNNNNNNNNNNNNNNNNN
NNNNNNNNNNNNNNNNNNNNNNNNNNNNNNNNNNNNNNNNNNNNNNNNNNNNNNNNNNNNNNNNNNNNNNNNNNNNNNNNNNNNNNNNNNNNNN
NNNNNNNNNNNNNNNNNNNNNNNNNNNNNNNNNNNNNNNNNNNNNNNNNNNNNNNNNNNNNNNNNNNNNNNNNNNNNNNNNNNNNNNNNNNNNN
NNNNNNNNNNNNNNNNNNNNNNNNNNNNNNNNNNNNNNNNNNNNNNNNNNNNNNNNNNNNNNNNNNNNNNNNNNNNNNNNNNNNNNNNNNNNNN
NNNNNNNNNNNNNNNNNNNNNNNNNNNNNNNNNNNNNNNNNNNNNNNNNNNNNNNNNNNNNNNNNNNNNNNNNNNNNNNNNNNNNNNNNNNNNN
NNNNNNNNNNNNNNNNNNNNNNNNNNNNNNNNNNNNNNNNNNNNNNNNNNNNNNNNNNNNNNNNNNNNNNNNNNNNNNNNNNNNNNNNNNNNNN
NNNNNNNNNNNNNNNNNNNNNNNNNNNNNNNNNNNNNNNNNNNNNNNNNNNNNNNNNNNNNNNNNNNNNNNNNNNNNNNNNNNNNNNNNNNNNN
NNNNNNNNNNNNNNNNNNNNNNNNNNNNNNNNNNNNNNNNNNNNNNNNNNNNNNNNNNNNNNNNNNNNNNNNNNNNNNNNNNNNNNNNNNNNNN
NNNNNNNNNNNNNNNNNNNNNNNNNNNNNNNNNNNNNNNNNNNNNNNNNNNNNNNNNNNNNNNNNNNNNNNNNNNNNNNNNNNNNNNNNNNNNN
NNNNNNNNNNNNNNNNNNNNNNNNNNNNNNNNNNNNNNNNNNNNNNNNNNNNNNNNNNNNNNNNNNNNNNNNNNNNNNNNNNNNNNNNNNNNNN
NNNNNNNNNNNNNNNNNNNNNNNNNNNNNNNNNNNNNNNNNNNNNNNNNNNNNNNNNNNNNNNNNNNNNNNNNNNNNNNNNNNNNNNNNNNNNN
NNNNNNNNNNNNNNNNNNNNNNNNNNNNNNNNNNNNNNNNNNNNNNNNNNNNNNNNNNNNNNNNNNNNNNNNNNNNNNNNNNNNNNNNNNNNNN
NNNNNNNNNNNNNNNNNNNNNNNNNNNNNNNNNNNNNNNNNNNNNNNNNNNNNNNNNNNNNNNNNNNNNNNNNNNNNNNNNNNNNNNNNNNNNN
NNNNNNNNNNNNNNNNNNNNNNNNNNNNNNNNNNNNNNNNNNNNNNNNNNNNNNNNNNNNNNNNNNNNNNNNNNNNNNNNNNNNNNNNNNNNNN
NNNNNNNNNNNNNNNNNNNNNNNNNNNNNNNNNNNNNNNNNNNNNNNNNNNNNNNNNNNNNNNNNNNNNNNNNNNNNNNNNNNNNNNNNNNNNN
NNNNNNNNNNNNNNNNNNNNNNNNNNNNNNNNNNNNNNNNNNNNNNNNNNNNNNNNNNNNNNNNNNNNNNNNNNNNNNNNNNNNNNNNNNNNNN
NNNNNNNNNNNNNNNNNNNNNNNNNNNNNNNNNNNNNNNNNNNNNNNNNNNNNNNNNNNNNNNNNNNNNNNNNNNNNNNNNNNNNNNNNNNNNN
NNNNNNNNNNNNNNNNNNNNNNNNNNNNNNNNNNNNNNNNNNNNNNNNNNNNNNNNNNNNNNNNNNNNNNNNNNNNNNNNNNNNNNNNNNNNNN
NNNNNNNNNNNNNNNNNNNNNNNNNNNNNNNNNNNNNNNNNNNNNNNNNNNNNNNNNNNNNNNNNNNNNNNNNNNNNNNNNNNNNNNNNNNNNN
NNNNNNNNNNNNNNNNNNNNNNNNNNNNNNNNNNNNNNNNNNNNNNNNNNNNNNNNNNNNNNNNNNNNNNNNNNNNNNNNNNNNNNNNNNNNNN
NNNNNNNNNNNNNNNNNNNNNNNNNNNNNNNNNNNNNNNNNNNNNNNNNNNNNNNNNNNNNNNNNNNNNNNNNNNNNNNNNNNNNNNNNNNNNN
NNNNNNNNNNNNNNNNNNNNNNNNNNNNNNNNNNNNNNNNNNNNNNNNNNNNNNNNNNNNNNNNNNNNNNNNNNNNNNNNNNNNNNNNNNNNNN
NNNNNNNNNNNNNNNNNNNNNNNNNNNNNNNNNNNNNNNNNNNNNNNNNNNNNNNNNNNNNNNNNNNNNNNNNNNNNNNNNNNNNNNNNNNNNN
NNNNACCTTCTTAGACAAAAGGGTCTCACTGTGTAGACCTGACTGTCCTGGAACTCCTATGTAGACTAGGATGGCCTTGAACTCACAGAGATCT
AAGAGTCTATGCCTCTCTCTGCTGGGATTAAAGGCATTCCATCCTATGCCTAGTCCAGGACCAGTGTATCAGCCTGCCCTATGCTCTATTAGTG
CTTCATCATGGAGGCAGATCTCAGCCCTGGCTTCCTGTGATGCTCAGGTGCCATTTCTCCTGGGCACAACAGTCTGCCTGTTATCCCACGTCCT
GGTTCTCTTGAAGATGGGCCTTTACTGTCTGTGACCTGAGTGTGCTTTCTAACAGACAGCAACACCCCAGGCATCTCCCAGGAATGAATGATGG
CTTGCATCTAAGTCACCTGTGGTCCTTGGGCAAGTTATTTCATTTTCTAGGTATGCTAGCAATTAAGAGAATTAGAGAAAAATATGCACATATG
GGCCATATGGATATACATGAATATGTATGTGCCATATGTGCCGTAGAAAAGGATTAATTAACACACAGCTAATATTAGATAGCAGTTGGACACA
GCCATGTATACCTGTAATCCAATCACAGTGACAGGGGAGGCTAAGGAAGGAGGCCTGCATGCAGTAGCTTCAAGCTCAGCCTGGTCTACATAGT
GACCCCCAGGCCAGCTAGGAATCAGGTGAAACCCTGTTTCAACTGCTCACCCTCCGAAAAGCTAGATTTTATGTGTTTTATTTGTTTGCAATGG
TAAGACAGGGTCTCATGTTGTTCAGGCTGTGGTTGAACTCCCTTTGTAGCCCTAGATAATCTTTTTTTTTAAATTGTCTTTATTTGTTTGTTTT
CGAGACAAGGTTTCTCTGTGTAGCCCTGGCTGTCCTGGAACTCACTTTGTAGACCAGGCTGGCCTGGAACTCAGAAATCTGCCTGCCTCTGTCC
CCCAAGTGCTGGGCTTAAAGGCGTGCACCACTGCTGTTCAGCTAGCCAAAGATAATCTTAACCCCCACTTCTCCTGCCTCCACCTCTGAGGCCT
GGGGTGACACTCAGGTTCCACCCTGCCTGGCATAGATATTATTCTTCATTGGATCACACCTCACACCTTCTTCACTGGGCCTCTGCTTTAGGAA
ACTGGTTATCTTTTTATTCATTTATTTATAGCTATTTATTTCTAGTGTTGGGGAAAGAATCCAGGACTTTGGAAATGTTATGGAAGAGCTCTCT
GCCACTGAGATCGGCCCCCAGGCTGGAATCTGGAAATCAATGCAAATCTCTCTCTTTCTCTGTCTGTCTCTGTCTCTGTCTCTGTCTCTGTCTC
TGTCTGTCTGTCTGTCTCTCTCTCTCTCTCTCTTGTTTGTAGACCAGGCTATTGAACTCAGATTCACCTGCCTCTGCCTCCGGAGTGCTGGGAT
CGAACGTAAGAGCCTTCACATCTGGCGAAGCACCTTCTTGAAGAAGGCAAAATTTTGCTTCAAAAATTTGTTTTTGGTGCCAAGAAGTGAACTA
GGCAAGATCTCTCACCAAGCTACACACCCAGCCCCGGAATTTGCTTGTTTTATTTTACTTTTTTGAGATAGAATATCAATATATAGTTCAATGT
GGCCTCCGATCAGAGGTCTTCCTGCCTTGTCCTCACTTCCTTCCTTTTTCAGTCATCGGAGTCCATGGGGTTAGAATCGTCCTGGCCACCTCTG
CCTCGACGTTTGTCTTTTTATGAGACTGATCAATTACGTTTGTACCAGTGAGGCACGTATGTTGTGGCTGTGTTGTGGAAAAGCAAACAGCCAT
CTGTCTTTTCATTATAATTTATCAAGACGGTGACTGGGACAGAGGGAGAGCCAGGGAGCAACCACATCGTCTCGTGTGTGTGGCCTCAGATCAC
ATTTGATTCTTTTTTTAGAGTTGGCAACACAGTTCAGCGGGTAAAAGTCCTACCGCCATGCCCACCAGCCTCAGCTTAGACCCCAGGACCTGTG
TGGTGGAAGGAGAGAGCTGACCTTCTGCAAGCTGCCCTTTGACCTTTATGCATACATTAGAGAGAGAGGAAAGCATCTGAGCTGCTCATGGGCT
CTACATACACAACAGGCCTGCCTCAGCCTTCCTAACAGCTGCTAGTAGGTGTGTGCCACCTCTAGTGATGCTTGCTGGCTTTTTCCTATTTACT
AATTGGTTATTTATATTTACATACATGTGCCTGTGTGTGCACCTACCCTACATGTGGAGGCCACACACACACACACACACACTCTTGGTGCTGG
AATTATAAGCACCAGGCCCGCACCCAGCTTTTATGTAATGTTCTCATGGTACAGAACTCAGGCTCTCATTCTTGCTTCGACACCACTTTGCCAA
CTGCATCATCTCCCTCGCCACCCCCATTTTTATTTTTTTGAGACCAGTTTTCCAGACTGGTCTCGAAATCAAGATCCTCTAGGGTCAATATCCT
GAGTGCTAGAATTACAGATATCAGCATCCCATATTGACTTAAATAATGTGGCGGTTTAAATAGTAAATATGGGCCGGGTGGTTGGGCACGCCTT
TGAACTGAACACTTGGGAGTCAGAGGCAAGTGGAATTCTGCGAGTGTGAGACCAGACTGGTCTACAGAGTGAGTTCCAGAATAGCCAGGGCTAC
ACAGAGAAACCCTGTCTCGAAAAAAGGAAAAACAAAACAACAACAACAACAACAACAACAACAAACTAGTGGCCAGGAAGAAGAGAGAAAGATC
AGGTGGCCTCTCCAGTTTGGAAAGAGACAGGATGAACTCAGGACTAGCTGTTTGCCAGCTCGGCTTCCATTCATAAGAAGGGTTTCAGGTGCGG
CTCTGACCTATAAAAGGATGACCTTCTGACCTAGTTAGTGTGTGAGTGTCTTTTTCTGGTCTTTACTACTTAGCTCAGGCTGCCCTAGAACGGC
CCCATTTCTCCCGCTTCAGCGTGTGCCACGGTGCCCCAGCCAAGTGGTTCCTTAGTAAAGTGGCACTGTTGGACACCTAGGCAAAGAAAGGTGA
TACCAGTGCTGTGTGTGGGCAGCACAGCTCGCTAAGTTCCCGGGATCAGCCAGTTTTCTATGTAGACACTTGGGGACTCTCACTTCTGAGCACC
TGGCACATACTGTTGAGGTCTGTAGTCTCAGGGAGCTGAGGCAGGTGGATGATTCCATGAGAATGAAGGGTTTGAATCCCATCTCAAAAATGTA
GCAAAGCTAAGACTCCAGTCTAAGTCCATGTTTAATAACAAAAAGAAGATTGGGGGGCTGGAGAGACAACTCAGCAGTTAAGAGCACTGGCAGC
TCTTCGGAGGACCCACGTTTGATTCTCAGCACCCATGTGGGGGCTCACAACCATATGTAACTCCAGCTCCAGTCTCAGAGGACCTGGCGCCCTC
CTGTGGCCTTCACAGGCACTACGTACACACGTGCTATACATACATACATACATACATACATACATACATACATAGCACGCAGACACAGAAATTA
AATTAAATGGAGCTGGGCATAGTGAAGAAACTAAAGCAGAAAGATCCCTTTAAGATGGAAGTGTCTATCTCCGAGCTAGAGTGAGTTTTAAGCC
ATGCTGGGCTACAGTTAGATTCTGTGGAAACAAATAACATCAACCAGAGCAATAACAATAATAACGAGCATAGAGAGAAAACAAAGCAAGCCAG
GTAGGGTGTACTTCAGCGGTTAGGCAGAAGANNNNNNNNNNNNNNNNNNNNCCTGGGCGCGCGGGTCGTTGGGACGCCGGGAGACCCCCGCGTG
GGTCGAGCGCGCTGAGTGTCCCGTGCCTCTTTCCTAGGCAAAGAGAAGGAGCCCCCTGGAGTCGCAGTACCAGGTGGGCCCGCTGTTGGGCAGC
GGTGGCTTCGGCTCGGTCTACTCTGGCATCCGCGTCGCCGACAACTTGCCGGTGAGTGGGCAACGCCGCCTCGGGGAGGGCGCGCGGAGGGATG
CTTTGAGCAGGAGGGTCTGATGGAGACTCGGGGGTCTTCTTCCAGGTGGCCATTAAGCACGTGGAGAAGGACCGGATTTCCGATTGGGGAGAAC
TGGTGAGTGAGCCGGAGCCAGAGACCCTCTCATGGGTGGGTGGGTGGCGACGGGCGTGCCGGAACCGGCGCGCTAACCCTCGCCCTCACTCTGC
AGCCCAATGGCACCCGAGTGCCCATGGAAGTGGTCCTGTTGAAGAAGGTGAGCTCGGACTTCTCGGGCGTCATTAGACTTCTGGACTGGTTCGA
GAGGCCCGATAGTTTCGTGCTGATCCTGGAGAGGCCCGAACCGGTGCAAGACCTCTTCGACTTTATCACCGAACGAGGAGCCCTACAGGAGGAC
CTGGCCCGAGGATTCTTCTGGCAGGTGCTGGAGGCCGTGCGGCATTGCCACAACTGCGGGGTTCTCCACCGCGACATCAAGGACGAGAACATCT
TAATCGACCTGAGCCGCGGCGAAATCAAACTCATCGACTTCGGGTCGGGGGCGCTGCTCAAGGACACAGTCTACACGGACTTTGATGGTGAGCC
AGGCCCCGGGGAGGGAGCTGCCCAAGGTGCCGGCCTGGAAGCCTCTGGCGGCCTCGGCTCCGGCCCTTTGTAAAGGTCATTGGGCCGCCTGGCT
CAGAGCTGGCAGGGGTGGGGCAGAGTCGAGCTTCCCGGCATAGTACAGCCGGGGATTTCGAGCTGGTTGAACGAACCTGCAACATTTCTGGCGT
GATTGGGGTTTTGTTGTTGTTGTTGTTGTTGTTTTTGTTGTTGCTGCTGGTGTTTGCTTGTTTTTCTTTTCAGCAGGAATTTATTAAATTCCAT
GCTTTCCCGGTGAATAAGAGGTCGTGGGTAGCCGGCTGTAGCCCAGATTTCTAAAGTATGACCCACTTTTCCCTCCAGTAGGAGGTGGAGCCGT
TGGTGGCGGGAGACATTGGTGCTGATTTTTTTCTTTTTCTTTTTTTTTTTTCTTTTGTAGTTTTGTTTTGTGGGGGAGTTTTAAGGTAGTTCTT
AGAACTGCAGGGTTTTGTTTTGTTTTGTTTTGCTTTTGAGGGTAAAGGAATAAGAGCCGCGGTTTCACCCCACTTGGGGGTGTTGTGGGGTGAG
GAGGCCTGGAATGAATGTTGTGAAATAAGATCTGTTGCTGGTTTGAAAATTAGTTGGGAGTCTCCGCTGGGAGGATGAAAACCTATCTACCATA
GGGAGGGGCTTGGATCGCGTTCTTTCAGCAGTGGAGGGCAGGAATAGTAGATCAAAGCGCGAGGGTGGGTCACGATCCGAGTGGCTCACCCGGA
CAAACTATGGCCTTTCAAAACTTGTGACTCTGGCTTGTGGTTTGAATTTCTTTGGAGGATGCCGGGCTGGGCTGCGTTTTTTGTATTTAACAGT
TAATGGCTGGCTGAGTCCTCCCCTGTGTTTTCCCCCCCTGGGCAAGTCTTTGCTGCCCCCTGTTGAGCACCACGAGGCTAGCACCTTTTTTTTT
TTTTTTTTTTTTTACTCCCCAAAGTTTGTAAACAGGAATCACGTGGTCTGAAACCAGCCCTGCAACTGTACCTTTCCAGTCTAGGGAGTGGGAG
AGTGCAGTGTCTATGCCTTGCTTGCATAGAACCCGGAGGAAAGCACACCCTGAGTTAGTTGTGTATAAAGGCCCTTACCTGGGCCCGGTCTAGA
TGAGACTGGTGTGGCAGGGCCCTGGGGTCCTTGTAGTTAAAGGCTAACCCACTGAGTGGGGCCTCTAGACTTGAGCTTTTCGGTGGCTTTATTT
GTCTTTGGGCCGATGTGTAAGGGATTTGGGTTTAGGGTTTTTGGGCTCCCAGAGAGCTACCATATCATTTCTTCATTTTCTGTCTGGACCAGAG
AGGCAGAGATGGAGAGAAAAAAAAAATATGGTTGTTTTAAAGTCAAATCTGCCTGTCTGCCTCCTGAGAGCTGGGATTAAAGGCATGTGCCACC
AAACCCGAGCCAGGCAGTGTCTTTATTAAAAAATATTTGAAAACCTAGTGGAGGTGGTGGTTCTTGCTTTTAATCCAGCCCTTGGGAGGTAGAG
GTAGGCAGATCTCCGAGTTCAAGGCCAGCCTGGCCTACAGAGTCACTTCCAGAGCTACACAGAGAAACTTTGGAGGAGAAAAAAAAAATTAAAA
GAAGCGGCTCAGACTAGCTGCTTTGTTACCTTTTTTTTTGCTAATGCTGGTTTCTTTCTATTCCCTCTGCTGGTAGGGACCCGAGTGTACAGTC
CTCCAGAGTGGATTCGCTACCATCGCTACCACGGCAGGTCGGCAGCTGTCTGGTCCCTTGGGATCCTGCTCTATGACATGGTCTGCGGAGATAT
TCCGTTTGAGCACGATGAAGAGATCATCAAGGGCCAAGTGTTCTTCAGGCAAACTGTCTCTTCAGGTAACTTCCCTCAGACACCCCCAATCCTT
CCCAAACCCTGGTTCAGGGTTGGTTTGGGGATTACAAGAGTGAGAGAGTATTCCTATCCACCTTTTTATTTTTATTTATTCATTTTCTTTGGGG
GAGAGTAAGGCCTTAGCCTGCCTCTGACCCCCAACTGCTGGGACTCAAGAGATGGTGGGTTTTCACTGGGTCAGAGTACTCCATTTGGGCTCAA
ATTGGAACAAGTTTTATATACATCCCACCCCAACCCCCAGACCCTGTAAAATCTAAGTACCAGCAGAGACCCAGTCTCTAAACAAAGTTTAAAA
AAAAAAAAAAAAAATGAAGGTTCCGGATAGTGTCAGTGGAAGGCGTGAGGTAGGTAGGTGAATTGAATCACCTCATCTTGCTCACTGGTGGCTC
ATCAAAACCCTTGTCATCCTTCCTATTTCTAGTGAGTGGGTGTCATGGGAAAGGCCCGAGCTATTGAAGTCTGAAACCACAGGTTTAAGAGGGG
AGGCACTTTTTTAACTGAAAGCTGATTGCTGGAGGCTTTCGGTATCCGTTCTTTCCCACCGGGCAGTGTTTGGTATAAAAAGTACCGTGCCTCT
TTAAAAACCCCAGACTTGTAGGTCTGGGGAAGAAGACCTTTGCATTACAAAAACAAGTTGAGTCATCTTTAACCTCTGTCTGCCCCGCCTTCTG
CAGAGTGTCAGCACCTTATTAAATGGTGCCTGTCCCTGAGACCGTCAGATCGGCCCTCCTTTGAAGAAATCCGGAACCATCCGTGGATGCAGGG
TGACCTCCTGCCCCAGGCAGCTTCTGAGATCCATCTGCACAGTCTGTCACCGGGATCCAGCAAGTAGCAGCCTTTCTGCTGCTGTCTGTCAGAC
CCTCCAGGGAGGGAGAGCTTGTCTTCTGGCCTCCAACAGGACCCTGCGTGACGATGCAGGGACAGCAATGACAACTCATTCCAGACTCCAGGTC
CCTGGAGGAGCCTCCCACAAGGGAAAGAGACTACTTCACTGGTCCTGGGCCCCTCTTTGCGCGCCCCGCCCCCAGACTCAGCGTCTAGTGTTGC
TGGGCTCCCCTGAATCCATCCCTGGTTGGGGGTGGGAGTGGATCAGAGCCCTGTCAATGGAACTTTAATCACCATGGAGACTGGGTCACCAAGA
TGGGCCAGGGGGGAGGGGAAAACAGTCTGGGGGGGTGGGATAAAAACTAGCACCATATTTAAGTCCCTGTCACCTCTTCCAACTCCTGAGTGCC
TTCTGTGGGGACTCCGCCTGTGCTGGGAGAAATACTTGAACTTTACCTCTTACCTGCTGCTTCTCAAACTCTGCCTGGGTTTTGCTTCCTTCCT
CTCCTCTCCTTTCCCATCCCCCACTTCCTATGAAAGGTGCCATGGGAGAGGCTACAGGGCCAACTGCTGAGCCACCTGCCCCTTTTCTGTCTCC
TTTAGTAAAATTCCCAAGCAAACTGGTCTTCCTTTTTTGTTTCGACTTAACTGTTTCAAAACCAAGACCTCACACAGAACGCACAACCAATGCA
AAAAAAAAAAAAAAAAAAAAAAAAAAAACCAGACAAGCTGTAAATGTGTGTATAGTTCCGGCATGGTAGCCTGCAAAAGGACTGTAGATGATAA
CAATTTTAAAGAAGAAAAAAAAATGCCTTTAAGTTATTTTATGTGTTGGGGGGTTTGGTTTGGTTTTTTTTTTTTTTTTTTTTTCTTTTTTATT
CTTTTTTGCTTGTTTTTGAAAGATGGCACGTTCTACCCCGGAAGTTTTAATGTATTTATTTATTTATTTATTTGGTTGCCTTCCTGTCCAAGCT
TCCACTGACTGTTGCCCCCGGTTTATTGTCATGTTCTGCCTTTTTTTTTTCTTTCCTTCCTCCTGACTTGGGGACCTTTTAGGGGAGGGCTGTG
ACGCTTGCTGGGGTGTTGGGGCTCCGGTGGGACAGCTGCTGTAGCCCCCTTCTCCAGGGGCCCCCTTGGCTGCTTGCTGGAGTGGGTCTAGGGT
CTGCTGACTGTACATAAGACAGTTCCGGTGTGGTGTGCCTTCCGGATCCTCTCTGGGGCTGTGCTTTGAGCAGCGTGCAGCCCGCTGGTTTTAT
CTGAGTAAAGTATACTGTACAGGGGAATAAAAGAGATCTTATTTTTTTTTTTTATACTTGGCATTTTTTGAATAAAAACCTTTGTCTTAAACCT
TGAGTTTTCCATTCATTCATACAAAGNNNNNNNNNNNNNNNNNNNNCTGACGTGTCATGTCAGAGCTAGCATCGAACACTTGAGTTCCATCAGA
CAATGTGGTTGCAGGAATTACTACAGGTAGCACTTGAGAGTTTGATTTGGTTTTTGTTTTAAAGATTTTATGTATGTGAGTACACTGTAGCTGT
CATCAGAACAGGGCATCAGGTCCCATCACAGATGGCTGTGAGCCACCATGGGGTTGCTGGGAATTGAACTCAGGACCTCTGGAAGAAGCAGTCA
GTGCTCTTAACCATTGAGCCATCTCTCCAGCACCCTGGTTCTTGGTACCTCATAGCAGGGTTTCTCTTGAGCTCTAGCTGTAACTAGGGCTGTA
GATGAGGCTGGCTTCAAGCTCAGACCTACCTGCCCGGCTTGGTGAGTGACCAGAAGCCTAGTGTTTTTGACACAAGGTTTGAAGTCTGTGTAGC
CTTGGAACTTGATATGTATAGACCAGGCTGGCCTGAAACTCCTGGATCTGCCTGCCTTTGCCTCCTAAGTGCTGGGATTAAGGGCATGTATAGT
TCCACTGGAAAAGATTTGGGAGCCACGAGTCCTAGCATCTTCCTAGCAGAGTGGTGTAATCCTATAATCCCAGCACTTGGGAACTAAGAGGATG
AGAGTCAGGAGTTCAAGGTCAGTCTCAGTCTGGGATACTCGTGACTGGTCTAATCAGCTGGAAAGATGCACTCTGGTAGACAGGACCAAAGGAA
TTCCTATACATTCAAGGCTGAGCCTGGGCTGGAGTTCCAGGTCTATCCTATCTCGATAAAAGGGGATGAGGATGGGCAGGGGAAGTGGAGAGAT
GGCTCAGCAGTTAAGAATTCTTGCAGAGGGCCTGGGTACAACTTCCAGCACCCACATGGTGGCTCACAACCATCTGTAACTTCAGTTCCAGAGG
ATCCAATGCGCTCTTCTGGCCTCCAAGGGCACTAAGCGTGCATTCATACAAATACACAGATAACACACCTATTAAGAAAACATTTCAGCCGGGC
AGTGGTGGCGCATGCCTTTAATCCCAGCACTCGGGAGGCAGAGGCAGGCAGATTTCTGAGTTCAAGGCCAGCCTGGTCTACAGAGTGAGTTCCA
GGACAGTCAGGGCTACACAGAGAAACCCTGTCTCAAAAAACCAAACAAGAAAGAAAGAAAGAAGAAAGGAATAAAGAAAGGAAGAAAGAAAGGA
AGAAAACGTTTGCTGTTCTTGCAGGGGACCCAGAATTGGTTCCCAGCACCTGTATGACCTCACAATTGTCTGGAAGATGGGGCCCCCAGTTTGC
CTCATGTTTGGTCTGAGTATGTCCTAATAGTTGAACCACTGCTGATCCAGGTCCTAAAAGTAATTCTTTCTTTCTTTCTTTCTTTCTTTCTTTC
TTTCTTTCTTTCTTTCTTTCTTTCTTTCTTCCTTCCTTCCTTCCTTCCTTTCTTTCTTTCTTTCTTTCTTTCTTTTTTTTTTTTTTAGGCAATT
TCTCCTGTAGCCTAGGCTTAAATAGCCCAGGAGAGCCTTGAACTCCCGATCTGTATCTAGGATCTGGGGCTTGCTGCCACCACACCCAGGTGTA
AACATTGCTTTCTTGTTGCTTTCTGCCCATTAGTAACAGTTCTAACATTCTTCCCTCCTGCAGGGGCATCTTGACCTCTTCCTCCCCTCTTGCC
ATAATCTCTTAGGAACTTGGCCCCATTGCATTGCGCTTGTGGAGGATCCAGGCCACAGTGCCCTCCCTTCATCGAGAGATCTCCTCTACCACCA
CATCTTGGACTAGGTCCCAAACCCCAGCACAGCCTCGGTGTGGCTCAGAAAGGAAGGAAGGATTTCTCAGCTCTTGGGGGCTGATTTTCTGAAG
TTCCCCTTTTCCCTACCCTTCTGTCCCCTCCTCCTTCCTGTATACACACTGCCCGGCAGCTGGGTGTCTAAGCACACTGTGGGACCTTTCCAGT
CAAGTTGCAAGTGAACAATTGAAAGTTGCTAGAAACTTTATTTATTTATTTCATGTATGTGAGTACACTGTAGCTGTCTTCAGACACACCAGAA
GGGTGCATCAGATTTCATTGCAGATGGTTGTGAGCCACCATGTGGTTGCTAGGAATTGAAATCCCCTGCTAGAAATGAAATCCGGCAGAGCCTT
GCCCTTCTTGCCTTTGAGATGAGTTGGGGGGGGCCTTTCTGTGGCTGTTGAGACTGCTGGGGGCCATACAGTGTGTCTGTAGAAAGTAGGTTCT
CAGGGGCTAGAGAGAGGGCTCAGTGGTTAAGAGCACCGACTGCTTTTCCAGAGGTCCTGAGTTCAATTCCCAGCAACCACATGGTGGCTCACAA
CCATCTGTAATGGGATCTGATGCCCTTTTCTGGTGTGTCTGAAAATAGCAACAGTGTACTCATATACATGAAGTAAATAAATAAATCTTAAAAA
AAAAAGAAAGAAAGAAAGTAGGGTCCTCGCTAAGTAGAAGAGGTCAGAGGTTGTAGGAGATGCTTTTAGGTTCTGTTTGTTTTGTTTGTTTTTT
GTTCTTTATGTAAACCAGGTTGGTCTTAAAGTCACAGAGATCTACTTGCCTTTGCCTTCCTGAGTGCTAGGGTTAAAGGTCTGTGCCACCACAC
CCTGCATTATTTATTTTTTATTTTATTTTAATTTAATTTAATTTTATTTTTTATTTTGAAATAGCATCTCCTGCATTCTAAGCTAGACTTGAAC
CCTGGCATGATAGGTGTGTGTGAGCTGAAACTAGGCATTTTTTGAGAAGGGGAAAGGTCCTTGATCTCTCTCTCTCTCTCTCTCTCTCTCTTTT
TTTTTTTTTTTTTTTTTTCCAGACAGGGTTTCTCTGTGTAGCCCTGGCTGTCCTGGAACTCACTTTGTAGATCAGGCTGGCCTCGAACTCAGAA
ATCTGCCTGCCTCTGCCTCCCGAGTGCTGGGATTAAAAGCATGTGCCACCACCGCCCGGCGTGGTTGTCACTTCTAAGGAGTAAGAAGAGGGTT
GTGATCTGGGGAGAGGGACCGGCCCAGCTATCTTCGCATTAGTTCCCATCCAAGAGATGGAGACAGATCTGTTTATGTCCCTGTTGATTTGCTT
TTTAGCTGTATGACATGTTGTGACATTATGGACAGACCTGTGTTTCCAGGAGGCAGAGATGGGGATGGATGTCCTTGGCGGAAGAGATTGGGAA
ATCTCCCCAGGGAAGGCAGCTTCTCACTGTTTTGTTTTGTTTTGAGTCAGGGTCTCCATACATGTAGCATGGGCTGGGTTCTGATGCTATGGTG
CCCTGGGAGCTCAGAAAACAACTTGNNNNNNNNNNNNNNNNNNNNNNNNNNNNNNNNNNNNNNNNNNNNNNNNNNNNNNNNNNNNNNNNNNNNN
NNNNNNNNNNNNNNNNNNNNNNNNNNNNNNNNNNNNNNNNNNNNNNNNNNNNNNNNNNNNNNNNNNNNNNNNNNNNNNNNNNNNNNNNNNNNNN
NNNNNNNNNNNNNNNNNNNNNNNNNNNNNNNNNNNNNNNNNNNNNNNNNNNNNNNNNNNNNNNNNNNNNNNNNNNNNNNNNNNNNNNNNNNNNN
NNNNNNNNNNNNNNNNNNNNNNNNNNNNNNNNNNNNNNNNNNNNNNNNNNNNNNNNNNNNNNNNNNNNNNNNNNNNNNNNNNNNNNNNNNNNNN
NNNNNNNNNNNNNNNNNNNNNNNNNNNNNNNNNNNNNNNNNNNNNNNNNNNNNNNNNNNNNNNNNNNNNNNNNNNNNNNNNNNNNNNNNNNNNN
NNNNNNNNNNNNNNNNNNNNNNNNNNNNNNNNNNNNNNNNNNNNNNNNNNNNNNNNNNNNNNNNNNNNNNNNNNNNNNNNNNNNNNNNNNNNNN
NNNNNNNNNNNNNNNNNNNNNNNNNNNNNNNNNNNNNNNNNNNNNNNNNNNNNNNNNNNNNNNNNNNNNNNNNNNNNNNNNNNNNNNNNNNNNN
NNNNNNNNNNNNNNNNNNNNNNNNNNNNNNNNNNNNNNNNNNNNNNNNNNNNNNNNNNNNNNNNNNNNNNNNNNNNNNNNNNNNNNNNNNNNNN
NNNNNNNNNNNNNNNNNNNNNNNNNNNNNNNNNNNNNNNNNNNNNNNNNNNNNNNNNNNNNNNNNNNNNNNNNNNNNNNNNNNNNNNNNNNNNN
NNNNNNNNNNNNNNNNNNNNNNNNNNNNNNNNNNNNNNNNNNNNNNNNNNNNNNNNNNNNNNNNNNNNNNNNNNNNNNNNNNNNNNNNNNNNNN
NNNNNNNNNNNNNNNNNNNNNNNNNNNNNNNNNNNNNNNNNNNNNNNNNNNNNNNNNNNNNNNNNNNNNNNNNNNNNNNNNNNNNNNNNNNNNN
NNNNNNNNNNNNNNNNNNNNNNNNNNNNNNNNNNNNNNNNNNNNGCCGGGCACGTTTCTCGTAAGTGTTGCTCAGCTCCTTTAACTGCTCCGCT
GGTTCTTGGAAACCCTCACCACAAGGACCTATCGAGAGCAGTGTTGGAGCAGATATGGCATAGCCCTCCCCCCCCAACCCCCCCCAGTTCATTT
CCGCAATGGCCTGTGCTACTAACCCCGATTGCCAACAGCGAGGTTGCAGTGACCCCTCCAGTGGTGGTGTGAGGGAGTGGAAACGAAGCAGAAC
TCAGGCCAAGATGAGGAGACCCCGTATTATTTTAATTTACAGTAATAGGACTTCCAATGTGCAGAATTCTTGGTGACCTTAGGTCTGGGATACA
GTACAAGACCGGCTGTTATTGAATTGTATCCTGTTGTTTGGCGAGTCTAACACCAATAGCAAGCAAGTTGGTGGTGTGGCTCAGTGGGTAGAAC
GCTTACCAGGCATGCACGAAGCCCTGGGTAGGGTGTTTTTTTTTTGTTTTGTTTTGTTTTTTTACTTATTATATGTAAGTACACTGTAGCTGTC
TTCAGACACACCAGAAGAGGGCATCCGATTTCATTACAGGTGGTTGTGAGCCACCATGTGGTTGCTGGGATTTTGAACTCAGGACCTCCGGAAG
AGCAGTCAGTGCTCTTAACCCCTGAGCCATCTCTCCAGCCCCCTGGGTAGGGTTTGTAATCCCTGTGCTGGGGAGGTAGAAGCAGGAGGCCCAG
ATGTTCAAGGTCATGCTCAGCCTGCATTATAGGCCACCCTGGACTACAGGCAGGACAGTAACAGTCACGTCTATGTGACCCGATGGTTTTCTTA
GTTTGTGTCCCGATGCCCCCAGATAGACCCTGCTGTCCTGAATGCCAGGTGTAGCTTTTTTTTTACCTTAAAATAAATGCTTTGCCAGGCAGTA
GTGGCCCACGCCTTTAATCCCAGCACTTGGGAGGCAGAGGCAGGTGGATTTCTGAGTTTGAGGCCAGCCTGGTCTACAGAGTGAGTTCCAGGAC
AGCCAGGGCTGCACAGAGTAACCCTGTTTTGAAAACAACAACAACAAAGAAATAAATGCTTTTACATTCATTTACTTTGATGTTGTTGGTTTTA
AGATTTATTTTCAGTTTGTAATTATTTGTGCACTTGTGTGTGTCTGTGCGGGGGTGTGCCTACAGTCGGGCACAAGTACTTGCAGAAATCAGAA
GGGGACACTGGACCCTCTGGAATTGGAGTTGCAGGCAGTTGTGAGCTGTCAGATCTGAATGGTGGGAACCAAACTTGGACCTTCTGTAAGACTG
GTATGTATCTTAAGCCCTGGACTATCTCTACTGACCCCATCCGTGATCATGATCGTGTCACCATCACCATCATCAGCACCACCATCATCATCAC
CATCTCTGGCTAGCCTTGAATTTTTTTTTTTTCTTTTGAGACAGGGTTTCTCTGTGTAGCCCTGACTGTCTTTGAACTCACTCTGTAGACCAAG
CTGGACTCAAATAGTGCTGGGGACAGAACCCAGGGTTCCTGCAATGCTAGGTAAACCCTCTTATCAACTGAGCCACATTGCCGCCAGCCCATGA
GTTTTGAATAAACAATTAATTTTGTGTTTTCCAAAGTTTTGTCATTGTATATAAAATACCCTTTTAATCTAACTCCCTGGAACCATGAGGGCCC
ACATGAAATCAGGGGCAGTAGCAGCGTGGTGTGTAAGGGACCCTTCCTTGACTTGGAGACATATTGTCACAGTTGAATTCCGCTCCAACTTTGG
TCTTCACGTGACCTTGGCAGATATTTAGTTTCTGAGTTTTGTTTTTTTTCTTCTCATCCACGACAGAGAAATGGTCCGGAGTTTGTGAAGCCTG
TGCCACCCAGCCAACGGTCATTGGTACAAATGAGGCACAGCTTAAACAGGACACCGTCGAAAGGAGATTTTAGAATGAGCTAGTCTGAATCTCG
GTGACCTGGAGCTAGTGGGGTCCAGAGATAGACTGAAAAGGGCGCCAGGAACTTCAGGGGAGGGAGTGCGGACTTGTTTTTCAAGTATGGTAAT
GTTTATTCGGCTGTGAAAGGCTGTCAGAAACACACCCTACTGAGCTAATGCTTAAAATGCATGCAGTGTCTTATGTGTATAAATTACCCCTGGG
TAAAATGACTTAAAAAAAAAAAAGTTAATTTCTTTTCCTTTTCCCCATCAATGAAAACACGTCCCTGAGCCAAATATACCACGGAAGTCTCCTT
TCCGGTTAGATTATTCATGTGAGTGCGAACATTCTCCCCGTGGATTGATATAAATAAATGAGAATTGGCTTAATTTCCCACCTTACTTTCTGAC
TGTAGTGCAAAATTAGAGAGATGTGTCATCAGGGGGTGGAGGGGGCCGACGCTGCGACCACGCTACGACGGAGATAAACTTAAACGCCGCATTT
TTTTTTTTCTTCAAAGTCATAAACTTAAAGGGAAAAGTTTTGTTTTTTGTTTTTTTTTTCCTGGCGAAGCACTAAAGCAAAGTGATGGTTGCTC
GCGGTGGCGGAACATGTCTGGGAACCTCGCACCTTGGGAGGTAGAGGCAGGAAGGTCAGGCAGCCAACACTTGGTGAGTTCCACGCCAGCCTGG
GCTATGTGAGACCCAGTTGCTAAACAGCAAAGCGAGATGGTGCGGTGCGGCACAGGCTGACAGCTCTGCAGTAGCCAAAGGAATCACGTGATCC
ATCTGGTTCTATCTCCCATCATCCCTCATTTCTTTCCCCTTTGGGGTGAAATGTACACATGTATCTTTGAAGGAATTTTTTTCTTTAATATCTA
CTATTAACATTTTTGCTTACAACTCCTTGGCTTTTATTGTCTCCACACCTAGTCAAAGAGAAACTAGACATTTTAATCTATTTTTCAGGTAGCC
ACGTAACTAGAGATGAGAAGATGAGAACGGATTTTGCTGTAGATGTCTATCCATCTCTGTGTCTTTGGGTTTTTTAAGATTTACTTTATTATAT
ATACACAGTGTTCTGCCTGCATGTATGCCTGCAGGCCAGAAGAGGGCGGCAGATCACCTTATAGATGGTTGTGAGCCACCATGTGGGTGCTGGG
GATTGAACTCAGGACCACTGGAAGAGCAGCCAGAGCGCTTAACCTCTGAGACATCTCTCCAGCGCAGTCCATCCATCTCTATGCATATGTAGGT
TAGGAGTAGTGCAAGGTCAGAGCTCAAGGTCCTAAGCAGGTGGTGCACACTTGTCAGCCTAACTCTAGGGAAAAGGAGGCACGAGAATCAGGAG
TTCAAGGTTAACCTTGGCTATGTAACAAGTCTGCAGCCAGTTTGGGCTCCAAGAGACCCTGTCTTGGTAAAATGAAGCTGATAAGCACACTTGC
TGCTCATCCAGAGGACCCAAGTTCAAGTCCCAGCACCCACACAAATTGGAGGGCAAATTGGTATTTAATTATTTACTATCTGTTTGTGCTATTG
GGATTTAGAACTGAGCTAGGCAAGTGCTCTACTCCTGAGCTCCACCCGTTGCTGCAGTCTTACATATCCAGGTGAGCACGTGGAGGTCAAAGGA
CAACTGGAGAATTGCTCAGAAGTAAAGAGCACTGGATGCTCTTCCAGAGGTCTCAAGTTCAATTCCCTCACCCATATAGTGGCTCACAACCATT
TGTAATGTGAGCCAGGTCTCTCCTGGCTCAGGGGTGCAGGGTGCAGGAGGTCTAACTTAGCCCTCTCGTTTACTTTGTGCCACAGGGTCAGTTG
TCCTTGTCACTTGGCTCTTCAAACAGTTACATCTTTTTGATCACCTGGGATTCCTTCAGGCTGGGTTCTGTGCTCTTTATTTTAAGAATATTGT
TATATTTTAAGGGGGTGGGCTGTGGATCAGGGGAGTGGGAGTCATTTCTTCTAATCATTTTGGTCCCGGGGATGTAATTCAGGTCCTCATCTCT
CTCTCTCTCTCTCTCTCTCTCTCTCTCTGTCTGTCTCTGTCTCTCTCTGTGTCTGTCTCTCTGTGTCTGTCTCTCTGTTTCTCTGTCTCTCTGT
TTCTCTGTCTCTCTCTCTTTGAGACAAGGTATCCCTGGGTGATGTGAAACTTGCTGTGTAAACCAGACTGGCCTCAAGCTCATAGGGATCACCT
GCCTTAGCTTCCCAGTGCTGGGGTTCAAGATGTACAAGGCCTGGCTGGAGAGATGGCTCAGTGGTTAAAAGCACTGACTGCTCTCCCAGAGGTC
CTGAGTTCAAGTCCCAGCAACCACATGGTGGCTCACAACCATCTGTAATGGGCTCTGATGCCCTCTTCTGGTGTGTCTGAAGACAGCTACAGTG
TACTCATAT
MOUSE SEQUENCE—mRNA
TCTAGAGTCGACCTGCAGCCCAAGCTTCCTTAATGGAATCTTCTGGTTTATTTATTTCTCACCTTTGGCCTTATTTTTTCCTGTGCTCACTTAA
TATCCTGGTTGCTGTTGTTGTTGTTGTTTTGTCTGCTTGGTTTTTTTTTTTTCTTCCCTTGTTGATCATGAACCCCAGGCATGCTAGATGACTA
TCTGATCATTGAGCTACATCCTCAGCCATAAGGCTTTTCCTTTTGACATATGGTCTTGGTTACACCACTGTCTGGCTTCACTATACTGCTCAGT
TTGGCAGTCCTCCTGTTTCAGCCTTCCAAATATTAGAATGACAAGGATGACCCACTACATCAGGTTCATGAATTGCTGTTAAGTGTTCTTTACG
TTGGGTCATCTCCCATCAGAAACGGTTGGATAAAGGGTGGTTGTGCTTGCAGTGTGGGCAAGAGGGAAGGCAGAAGCAAACGATCCATGAATTT
GAGAACTGTCCTGGCTTTGGCATGCACAGTGAGATTGTATATTAAGAAGCAGAAAAAGGAAACAAAGCAGGTAGACAGTATAAATCAACGAAGA
GATAGCATACAGAAAGTCTTCTTGTTTTAAGGCAGGATCTTTTGTGTCTCTGACTGACTTTGAACTTTGACCTGACTCTACCTCTTTGTCCTGG
GATCAAAAGTACCATTTATGCAGTGCCCAGGGATCAAACCTAGGATTTTCTTCTGTATGCCAAGCAAGGACCCTACCAACCGAGCAGCATCCCC
AGCCCAGAAAGATTTTTTTTCTTTGTAAGAACCCCACATGACCATCAGATGGGCGGCAGTGAACGAAGGCTTAGAATTTGTTCAGCAAAAAAAT
GTGGAAATACACGCGCCTTGTTCAGAACGCAAGGCTTTGAATAAGCGACAGGACTGGAGTGTATGTAGGTTGGTGACAGGGTGCATGTGTAAGA
CCCTGGATTTCCCAACATCAGACACATTCCGAGAAGAGGACAGGGCACTTTGGACAGGTGGACTTAGTTTTCAGAGGCACAAAGTCTGGAATGT
GCTGGGAGATTGAAAACAAGTGGAAATAGTCCTGTTTGGACAGAGCTGAGGGCCTGATAGGGAACTGGAGGTAGTTGTACTGGTGTTTAACACA
TATTTATTTATAGACAGAGTTTCTCTTTGTAGACAAGGCTGGCCTGGTTAGAATGTTGTGGTTTTAACGTTGGGCACCACTCTAGGCATACCTG
TTTTCTGATTGCCTGCTCAATACCAGTGCCATAGATGTTTTTAGGCTGATTAAAGGGAGAGCTCTGAACCCTCAGGAGCAGAATTTGGGCCATT
CTCTCTGCTGTCGTATGACCCTGTGTCATCCCAGTGACGAGTCATTTTCCTATCTGCAAAAAAGGAAGTAATTCTCCTTCCCCTGGGTTTTTCT
CCTTTCGTCATCAGAAATGAATGAGTTAGTCCACAGAACACAAACAAAGGGAAATATGTAATGTTTTGTAAGAGGCATCCATAAAAGTTATGGA
GTCTCTGGGCATCTTTATAAGCAGCATGGAAAACTTGTAAAGGAAGCATTTAAACGCGTGCGCTAATGACTACATCCACAACAGGCTCGTTCCT
CCTTTAAAGATCTCTCAGACCTAAGAACAACAACAAAAATAACGAACAAGGGGTGTAGCTGGCTGTCCATGACTCTGGCCACCAGTATCTCAGT
TTATATGGATTACACAGAATGAGAGTTTACCCATTTCCACACGTCGTTATCAACTCTCCATGAAGTTCAAAAGGACAAAAGATGAAAGCGGACT
CGGCTAGCTTTCCGTGGTATTTCCACGTGCATGTGGGGACTTTCCTTTGAGACAAGGCTGGGGTGGGGGCCAATAATATCTGGTATCGCCTGAC
TGCTAATACCAAGCTGATGAGAAGGTAACTACCGCAACAACCTCTGATTAAACCCAGCGGCACCCTCCCACCCTCGCCCGCGATCAGGAATTTT
CCTGCTCCTCCCGCCCTCTCAGAAGGGGCTGAGGCAGCATTTGGCAAGAGAAAGCTAACGTTTGTGTCGTGATTTCCTCTCTCAGGCGCTCGGA
CATGGACCGAGGGGATCAGGTACCCCGGGTCCCTTCTAATTCTCTCTGCATTTCTAAATTGAGAATCTTTGTCACCGGCTCCTCGCATCCCAGG
TCTCCCCCACTTTTCCTCGCAGGCCTGTGACTGGCCTCGGTGTGCAAAATGCCGGTGACTCACGTCTTGCACAGCCTTCGCCCCCAAAAACACA
ATCATCACCCCCAGGATCTAGCCCACATAGCATCGTCAACCCGCCCCAGCAGCCTTGGAGGTCTCCGGGCTGAGTCACACCAGAGGACCACCCT
GGTCGGCATCCACACACACGCGGTCCCTACTCATGGCTTCCGCGCCCGCCACACCAACGCCCTTCCATTTCTCACAACTTGCTACGCTCCAGCT
CCAATCCTCGACCCCCCTCCACAACCCAAATCTCCGGGAAACACAGAGCCGGCGGAGCTGGCCTCGGGCGGCCTTTGATGGCTTTGTTATTGTT
TGGGTTTGAATCGATACCCCCTCCCCATCCTTCCACCCCCGCCCGCGCGCGCCACCCAGCTCCCGCCTCCCTGCACGCCCAGGCCCCTCCCCCT
CCGTTTTGGCGCCTTTTCCTTCCCGCCAGTCGGCTTAGACCATTCTGACCGCGAGGCGAGAGGCGGGGCCCGCAACGCCTTATGCAAATAGGGC
GTCTTCTGGTTGGCTGAAGCGCGCCCGAGGGCGGGGCCGGGGAGAGGGGTGTAGCCGCGAGGGGGCGGAGCGGAGGGGGAGGGCCCTGGTCCCG
CCGCCTCCCCGCCCCCTCTCCGCCCTCCGCGCCGAGCCAGCCCGGCTCCCCACCTCGCTCCCGGAGAGGCCCCGCCCCGTCCCCGCCCGCCGCC
GCCCTCCCCAGCGGCGCGTCCGCCCCTTTACTCCTGGCGGCGGGGCGAGCCGGGCGTCTGCAGCAGCGGCCGTGGCGGCGGAGGAGGCTGGAGG
GGAGTCGGCAGTGCCGGCGGCGGGATCGGCAGTAGCAGCAGCAGCAGCAGTCACAGTCAGCAGCAGCCCTGGGTCCCGCAGCGCCTCTCGCCCT
GCCGCCTCCCGCACTGCCTGACCCAGCCGGCGAACCCGCCCGCGGCCAGCCCCGCCAGCGCCCTCAGTCGTCCTCCGACTCGCCCTCGGCCTTG
CGCGCCAGCCGCAGCCAGAGCCGCAACGCCACCCGCAGTCTGAGTCCCGGCCGTCGCTCAGCCCCAGCTCGCTCCGCCGCCGCTGCTGCTCGTC
CCGGCACCGGCGCCGCACCGACACCCTGGAGGTGGGGATGCTCCTGTCCAAGATCAACTCCCTGGCCCACCTGCGCGCCCGCCCCTGCAACGAC
CTGCACGCCACCAAGCTGGCGCCGGGTGAGTGTCCCCACCCCACCCTGGGCGCGCGGGTCGTTGGGACGCCGGGAGACCCCCGCGTGGGTCGAG
CGCGCTGAGTGTCCCGTGCCTCTTTCCTAGGCAAAGAGAAGGAGCCCCTGGAGTCGCAGTACCAGGTGGGCCCGCTGTTGGGCAGCGGTGGCTT
CGGCTCGGTCTACTCTGGCATCCGCGTCGCCGACAACTTGCCGGTGAGTGGGCAACGCCGCCTCGGGGAGGGCGCGCGGAGGGATGCTTTGAGC
AGGAGGGTCTGATGGAGACTCGGGGGTCTTCTTCCAGGTGGCCATTAAGCACGTGGAGAAGGACCGGATTTCCGATTGGGGAGAACTGGTGAGT
GAGCCGGAGCCAGAGACCCTCTCATGGGTGGGTGGGTGGCGACGGGCGTGCCGGAACCGGCGCGCTAACCCTCGCCCTCACTCTGCAGCCCAAT
GGCACCCGAGTGCCCATGGAAGTGGTCCTGTTGAAGAAGGTGAGCTCGGACTTCTCGGGCGTCATTAGACTTCTGGACTGGTTCGAGAGGCCCG
ATAGTTTCGTGCTGATCCTGGAGAGGCCCGAACCGGTGCAAGACCTCTTCGACTTTATCACCGAACGAGGAGCCCTACAGGAGGACCTGGCCCG
AGGATTCTTCTGGCAGGTGCTGGAGGCCGTGCGGCATTGCCACAACTGCGGGGTTCTCCACCGCGACATCAAGGACGAGAACATCTTAATCGAC
CTGAGCCGCGGCGAAATCAAACTCATCGACTTCGGGTCGGGGGCGCTGCTCAAGGACACAGTCTACACGGACTTTGATGGTGAGCCAGGCCCCG
GGGAGGGAGCTGCCCAAGGTGCCGGCCTGGAAGCCTCTGGCGGCCTCGGCTCCGGCCCTTTGTAAAGGTCATTGGGCCGCCTGGCTCAGAGCTG
GCAGGGGTGGGGCAGAGGCGAGCTTCCCGGCATAGTACAGCCGGGGATTTCGAGCTGGTTGAACGAACCTGCAACATTTCTGGCGTGATTGGGG
TTTTGTTGTTGTTGTTGTTGTTTTTGTTGTTGCTGCTGGTGTTTGCTTGTTTTTCTTTTCAGCAGGAATTTATTAAATTCCATGCTTTCCCGGT
GAATAAGAGGTCGTGGGTAGCCGGCTGTAGCCCAGATTTCTAAAGTATGACCCACTTTTCCCTCCAGTAGGAGGTGGAGCCGTTGGTGGCGGGA
GACATTGGTGCTGATTTTTTTCTTTTTCTTTTTCTTTTTTTTTTTTTTTTCTTTTGTAGTTTTGTTTTGTGGGGGAGTTTTAAGGTAGTTCTTA
GAACTGCAGGGTTTTGTTTTGTTTTGTTTTGCTTTTGAGGGTAAAGGAATAAGAGCCGCGGTTTCACCCCACTTGGGGGTGTTGTGGGGTGAGG
AGGCCTGGAATGAATGTTGTGAAATAAGATCTGTTGCTGGTTTGAAAATTAGTTGGGAGTCTCCGCTGGGAGGATGAAAACCTATCTACCATAG
GGAGGGGCTTGGATCGCGTTCTTTCAGCAGTGGAGGGCAGGAATAGTAGATCAAAGCGCGAGGGTGGGTCACGATCCGAGTGGCTCACCCGGAC
AAACTATGGCCTTTCAAAACTTGTGACTCTGGCTTGTGGTTTGAATTTCTTTGGAGGATGCCGGGCTGGGCTGCGTTTTTTGTATTTAACAGTT
AATGGCTGGCTGAGTCCTCCCCTGTGTTTTCCCCCCCTGGGCAAGTCTTTGCTGCCCCCTGTTGAGCACCACGAGGCTAGCACCTTTTTTTTTT
TTTTTTTTTTTTACTCCCCAAAGTTTGTAAACAGGAATCACGTGGTCTGAAACCAGCCCTGCAACTGTACCTTTCCAGTCTAGGGAGTGGGAGA
GTGCAGTGTCTATGCCTTGCTTGCATAGAACCCGGAGGAAAGCACACCCTGAGTTAGTTGTGTATAAAGGCCCTTACCTGGGCCCGGTCTAGAT
GAGACTGGTGTGGCAGGGCCTGGGGTCCTTGTAGTTAAAGGCTAACCCACTGAGTGGCCTCTAGACTTGAGCTTTTCGGTGGCTTTATTTGTCT
TTGGGCCGATGTGTAAGGGATTTGGGTTTAGGGTTTTTGGGCTCCCAGAGAGCTACCATATCATTTCTTCATTTTCTGTCTGGACCAGAGAGGC
AGAGATGGAGAGAAAAAAAAATATGGTTGTTTTAAAGTCAAATCTGCCTGTCTGCCTCCTGAGAGCTGGGATTAAAGGCATGTGCCACCAAACC
CGAGCCAGGCAGTGTCTTTATTAAAAAATATTTGAAAACCTAGTGGAGGTGGTGGTTCTTGCTTTTAATCCAGCCCTTGGGAGGTAGAGGTAGG
CAGATCTCCGAGTTCAAGGCCAGCCTGGCCTACAGAGTCACTTCCAGAGCTACACAGAGAAACTTTGGAGGAGAAAAAAAAAATTAAAAGAAGC
GGCTCAGACTAGCTGCTTTGTTAACTTTTTTTTTGCTAATGCTGGTTTCTTTCTATTCCCTCTGCTGGTAGGGACCCGAGTGTACAGTCCTCCA
GAGTGGATTCGCTACCATCGCTACCACGGCAGGTCGGCAGCTGTCTGGTCCCTTGGGATCCTGCTCTATGACATGGTCTGCGGAGATATTCCGT
TTGAGCACGATGAAGAGATCATCAAGGGCCAAGTGTTCTTCAGGCAAACTGTCTCTTCAGGTAACTTCCCTCAGACACCCCCAATCCTTCCCAA
ACCCTGGTTCAGGGTTGGTTTGGGGATTACAAGAGTGAGAGAGTATTCCTATCCACCTTTTTATTTTTATTTATTCATTTTCTTTGGGGGAGAG
TAAGGCCTTAGCCTGCCTCTGACCCCCAACTGCTGGGACTCAAGAGATGGTGGGTTTTCACTGGGTCAGAGTACTCCATTTGGGCTCAAATTGG
AACAAGTTTTATATACATCCCACCCCAACCCCCAGACCCTGTAAAATCTAAGTACCAGCAGAGACCCAGTCTCTAAACAAAGTTTAAAAAAAAA
AAAAAAAAATGAAGGTTCCGGATAGTGTCAGTGGAAGGCGTGAGGTAGGTAGGTGAATTGAATCACCTCATCTTGCTCACTGGTGGCTCATCAA
AACCCTTGTCATCCTTCCTATTTCTAGTGAGTGGGTGTCATGGGAAAGGCCCGAGCTATTGAAGTCTGAAACCACAGGTTTAAGAGGGGAGGCA
CTTTTTTAACTGAAAGCTGATTGCTGGAGGCTTTCGGTATCCGTTCTTTCCCACCGGGCAGTGTTTGGTATAAAAAGTACCGTGCCTCTTTAAA
AACCCCAGACTTTGTAGGTCTGGGGAAGAAGACCTTTGCATTACAAAAACAAGTTGAGTCATCTTTAACCTCTGTCTGCCCCGCCTTCTGCAGA
GTGTCAGCACCTTATTAAATGGTGCCTGTCCCTGAGACCGTCAGATCGGCCCTCCTTTGAAGAAATCCGGAACCATCCGTGGATGCAGGGTGAC
CTCCTGCCCCAGGCAGCTTCTGAGATCCATCTGCACAGTCTGTCACCGGGATCCAGCAAGTAGCAGCCTTTCTGCTGCTGTCTGTCAGACCCTC
CAGGGAGGGAGAGCTTGTCTTCTGGCCTCCAACAGGACCCTGCGTGACGATGCAGGGACAGCAATGACAACTCATTCCAGACTCCAGGTCCCTG
GAGGAGCCTCCCACAAGGGAAAGAGACTACTTCACTGGTCCTGGGCCCCTCTTTGCGCGCCCCGCCCCCAGACTCAGCGTCTAGTGTTGCTGGG
CTCCCCTGAATCCATCCCTGGTTGGGGGTGGGAGTGGATCAGAGCCCTGTCGATGGAACTTTAGTCACCATGGAGACTGGGTCACCAAGATGGG
CCGGGGGGGAGAGGAAAACAGTCTGGGGGGTGGGATAAAAACTAGCACCATATTTAAGTCCCTGTCACCTCTTCCAACTCCTGAGTGCCTTCTG
TGGGGACTCCGCCTGTGCTGGGAGAAATACTTGAACTTTACCTCTTACCTGCTGCTTCTCAAACTCTGCCTGGGTTTTGCTTCCTTCCTCTCCT
CTCCTTTCCCATCCCCCACTTCCTATGAAAGGTGCCATGGGAGAGGCTACAGGGCCAACTGCTGAGCCACCTGCCCCTTTTCTGTCTCCTTTAG
TAAAATTCCCAAGCAAACTGGTCTTCCTCTTTGGTTTCGACTTAACTGTTTCAAAACCAAGACCTCACACAGAACGCACAACCAATGCAAAACA
AAAAACAAAAAAAACAAAAAAAAAACCAGACAAGCTGTAAATGTGTGTATAGTTCCGGCATGGTAGCCTGCAAAAGGACTGTAGATGATAACAA
TTTTAAAGAAGAAAAAAAAATGCCTTTAAGTTATTTTATGTGTTGGGGGTTTGGTTTGGTTTTTTGTTTTTGTTTTTTTTTTTCTTTTTTATTC
TTTTTTGCTTGTTTTTGAAAGATGGCACGTTCTAGCCCGGAAGTTTTAATGTATTTATTTATTTATTTATTTGGTTGCCTTCCTGTCCAAGCTT
CCACTGACTGTTGCCCCCGGTTTATTGTCATGTTCTGCCTTTTTTTTTTCTTTCCTTCCTCCTGACTTGGGGACCTTTTAGGGGAGGGCTGTGA
CGCTTGCTGGGGTGTTGGGGCTCCGGTGGGACAGCTGCTGTAGCCCCCTTCTCCAGGGGCCCCCTTGGCTGCTTGCTGGAGTGGGTCTAGGGTC
TGCTGACTGTACATAAGACAGTTCCGGTGTGGTGTGCCTTCCGGATCCTCTCTGGGGCTGTGCTTTGAGCAGCGTGCAGCCCGCTGGTTTTATC
TGAGTAAAGTATACTGTACAGGGGAATAAAAGAGATCTTATTTTTTTTTTTTATACTTGGCATTTTTTGAATAAAAACCTTTTGTCTTAAACCT
TTGAGTTTTCCATTCATTCATACAAAGATGTATGCTTGGTACAGAGCCAGGTAGACTGGGCACTTTCAGACTAGATCTGATTTCCTGCTGGGGC
ACAGAGAAGTACCAGGCTTTCTGAACAAACCATGCTGGATAAAACCCAGGCCTTCCGTGCCCACTCTACCAAGGAAACTCCCTGACTATGACCA
ATTCCCTTTAACAAAAGTTTAGGGATTGTCACCTTTTCAAAGCAGGTGCAACCAAATTACAGCACCAGGAACATGGGGACAAGACTTGGCTAGG
ACTAAATTTTTCTGACGTGTCATGTCAGAGCTAGCATCGAACATTTGAGTTCCATCAGACAATGTGGTTGCAGGAATTACTACAGGTAGCATTT
GATTTGGTTTTTGTTTTAAAGATTTTATGTATGTGAGTACACTGTAGCTGTCATCAGAACAGGGCATCAGGTCCCATCACAGATGGCTGTGAGC
CACCATGGGGTTGCTGGGAATTGAACTCAGGACCTCTGGAAGAAGCAGTCAGTGCTCTTAACCATTGAGCCATCTCTCCAGCACCCTGGTCTTG
GTACCTCATAGCAGGGTTCTCTTGAGCTCTAGCTGTACTAGGGCTGTAGATGAGGCTGGCTTCAGCTCAGACCTACCGCCCGGCTTGGTGAGTG
ACCAGAAGCCTAGTGTTTTTGACACAAGGTTTGAAGTCTGTGTAGCCTTGGAACTTGATATGTATAGACCAGGCTGGCCTGAAACTCCTGGATC
TGCCTGCCTTTGCCTCCTAAGTGCTGGGATTAAGGGCATGTATAGTTCCACTGGAAAAGATTTGGGAGCCACGAGTCCTAGCATCTTCCTAGCA
GAGTGGTGTAATCCTATAATCCCAGCACTTGGGAACTAAGAGGATGAGAGTCAGGAGTTCAAGGTCAGTCTCAGTCTGGGATACTCGTGACTGG
TCTAATCAGCTGGAAAGATGCACTCTGGTAGACAGGACCAAAGGAATTC
MOUSE SEQUENCE—CODING
ATGCTCCTGTCCAAGATCAACTCCCTGGCCCACCTGCGCGCCCGCCCCTGCAACGACCTGCACGCCACCAAGCTGGCGCCGGGCAAAGAGAAGG
AGCCCCTGGAGTCGCAGTACCAGGTGGGCCCGCTGTTGGGCAGCGGTGGCTTCGGCTCGGTCTACTCTGGCATCCGCGTCGCCGACAACTTGCC
GGTGGCCATTAAGCACGTGGAGAAGGACCGGATTTCCGATTGGGGAGAACTGCCCAATGGCACCCGAGTGCCCATGGAAGTGGTCCTGTTGAAG
AAGGTGAGCTCGGACTTCTCGGGCGTCATTAGACTTCTGGACTGGTTCGAGAGGCCCGATAGTTTCGTGCTGATCCTGGAGAGGCCCGAACCGG
TGCAAGACCTCTTCGACTTTATCACCGAACGAGGAGCCCTACAGGAGGACCTGGCCCGAGGATTCTTCTGGCAGGTGCTGGAGGCCGTGCGGCA
TTGCCACAACTGCGGGGTTCTCCACCGCGACATCAAGGACGAGAACATCTTAATCGACCTGAGCCGCGGCGAAATCAAACTCATCGACTTCGGG
TCGGGGGCGCTGCTCAAGGACACAGTCTACACGGACTTTGATGGGACCCGAGTGTACAGTCCTCCAGAGTGGATTCGCTACCATCGCTACCACG
GCAGGTCGGCAGCTGTCTGGTCCCTTGGGATCCTGCTCTATGACATGGTCTGCGGAGATATTCCGTTTGAGCACGATGAAGAGATCATCAAGGG
CCAAGTGTTCTTCAGGCAAACTGTCTCTTCAGAGTGTCAGCACCTTATTAAATGGTGCCTGTCCCTGAGACCGTCAGATCGGCCCTCCTTTGAA
GAAATCCGGAACCATCCGTGGATGCAGGGTGACCTCCTGCCCCAGGCAGCTTCTGAGATCCATCTGCACAGTCTGTCACCGGGATCCAGCAAGT
AG
HUMAN SEQUENCE—GENOMIC
GGCTAATTTTGTATTTTTAGTAGAGATGGGGTTTCTCCACATTGGTCAGGCTGGTCTCGATCTCCCGACCTCAGATGATCTGCCCGCCTCGGCC
TCCCAAAGTGCTGGGATTACAGGCATGAGCCACCGTGCCTTGCCAACCCGTCTCTTTAAAAAAAATTTTTTTTACGGCCAGGCACGGTGGCTCA
CGCCTGTAATCCCAGCACTTTGGAAGGCCGAAGCAAGTGGATCACTTGAGGTCAGGCGTTCGAGGCCAGCCTGGCCAACGTGGTGAAACCCTGT
CTCTACTAAAAATACAAAAATTAGCCAGGTGTGGTGGTATGCGCCTGTAATCTCAGCTACTCGGGAGGCTGAGGCAGAAGAATTGCTTGAACCA
GGGAGGCGGGGGTTGCAGTGAGCCAAGATCATGCCATTGCACTCCAGCCTGGGCGACAGAGAAGACTCCATCTGAAAAAAAAAATTTTTTTTTT
TTACAATATGATCTCTGCACTTGAAGAGCTGATGGTCTCATTGGGGAAACATGAGTCCTTTCAAAGTGGGTATTAAATTAATGCTTGCTGCTCC
TTAAAATGATGCTATAATGACAGTAACTACTTAGATAACAAAAGAATATGATTGTATCAGATTAGTATTACAAGTAACTGCTGTGAGTTTAAAA
ACTATTGGCTGGAGTGGTCAGGGAAAGCTGTAAGAAGTCCAAATGGCCTTCAGTTGGTCTGAAAGGACAGACAGAATTTGGGGATGTGTGTGCA
ATTTGGGTTAAAGAATGTAATCTGTGTTGTCTTTAAGCCCTGCATCAGAGGACCAGCTATTTGCCAACATAACTCCCATTTACAAGAGTAACTT
CAGATAAAACCCTGATGACTGCCAAGTCTGACTTTCTCATCTAGTGAGTGGGTGTCTCTCTAATAAAGTAGCATCACTGAACACAGAAGCAAGC
TTAACCTATCCAGGGAAAAGTGACACCATTTCTATAAAGGGAACAGCACAGCTCCCTAGTTCTCCAGAGTGAGCAAGATTGTATTTAGACATGC
AAAGAATCTCTGACAAAGTAATACATTGAAGGCCATAAAAAACAGCTCTGTATCTGTAGTATAGTTGTTCTAGTTCTGGCTGTGGTGAGCTGTC
ATGTTTGTTTTAGCAGCATGCCACCTAAAAAGAGAAGTAAAACAGAGTTGGAAAAGAGGAAGTATATGTTGAAAATGTAAGTTTCTCCAAATTA
TTGAGTAGATTTCGTCCAATAATGTTACTACATGTCTTTTTTATCATTTGGAACTTGGAACACTCTGTGTATTAACCACGATATAAGCAAATAT
TCCTAAACTATAAGCTTCAAAGGATTATTTGAATAGAGAATCTTCCTAGTTTCTTCTTCAGTAGACTGAAATAGCCAGGCACAGTGGCTGACGC
CTGTAATCCCAGCACTTTTGGAGGCCGAGGTGGGCAGATCACGAGGTCAGGAGTTCGAGACCAGCCTGGCCAACATAGTGAAACCCTGTCTCTA
CTAAAATCACAAAAAGTAGCTGGGCATGGTGGCGCGTGCCTGTAGTCCCAGCAACTGGGGAGGCTGAGGCAGGAGAATCGCTTGAACCTGAGAG
GTGGAGGTTGTGGTGAGCCGTGATCGTGCCACTGCACTCCAGCCTGGGCAACAGAGGGAGACTCTGTCTCAAAAAAAAAAAAAAAAGACTGAAA
TAAAATATCTGTCATCTTTTGCAACATGACATCAGGAGCTCCTACTAATTCTCTCTGGCTTCTTGCTTTTGATTTAAAAACTTTTGAGGCCGGG
AGCGGTGGCTCACGCCTGTAATCCCAGCATTTTGGGAGGCTGAGGTGGGTGGATCACAAAGTGAGGAGTTCAAGACCAGCCTGGCCAAGATGGT
GAAACCCTGTCTCTACCAAAAATACAACAATTAGCTGGGTGTGGTGGTGCACACCTGTAATCCCAGCTACTCGGGAGGCTGAAGCAGAAGAATC
GCTTGAACCCATGAGGCAGATGTTGCAGTGAGCCGAGATCGCGCCACTGCACTCCAGCCTGGGTGACAGAGCGAGACTCCGTCTCAAAAAAAAA
AAAAAAAAAAAAGAAACTTTTATTCATTCATTTCATGCGTATTGGGGAATACAAAAAAACAACACAAAGCATCTTTTGCTTCACTTCCTGACTC
TACTCACCGTGTTCTCTCTCTCCTTCCTACTTACTCGTATTTTACTCATTAAGACCTGAGTTAAGATCTACATCCTCCATGGAGCCTCCCCGGA
CCTCTTCAGCCTCCTCTGAACCTTGACTTTGTGGATGATGCTATCAGAACTTAATCACAGAAGACCTTGTTAAATCTCTTTTTTTGTTTGTATG
TTAGAGACAGGGTCTGACTCTGTCGCCCTGGTTGGAGTGTAGTGGCACGATCAAGGCTCACAGCAACCTCTGCTACCTGGGCTCAAGCAGATCC
TCCTCCCGAGCTCAGCCTCCCGAGCAGCTGGGACTACAGGTATATGCCATCACATCCAGCTAATTTTTGTATTTTTTGTAGAGACGGGGTTTCA
CCATATTGGCCCACCTGGTCTTTAACTCCTGGGCTCAAGTGATCCACCAGCCTCAGCCTCCCAAAGTGCTGGGATTACAGTCATGAGCCACTGT
GCCCGGCCGTTAAATCTCTTAAACTCATTTTGTGTTCCTTGGAAAGGCAGAATGGCATGGTGGGTAGGAGATTGCTCTGCCACTTAACAGTGTA
GCCTTGGGCAAATTACTTATCTCTGTTCCGTTTATTTATCTGTAAACCAATGAAGATAGTAAAAATGCCCACCTCATAGGATTTATATGGGGAT
ATAAATAGAACAATGCCTAGCACATCATTGATGCTCAATATTGGCTTTTAGTACCCTATCTCTTTTGCCCCTCCCGCCAATGATTTTCATTTCT
TAGCCTTTATGTTCAATTAAAGGATGATGGTTTCTGCCTTCAATATATTTATAGTCTAGTTGTAGAGATGAGACAAATACAGAAAAATAAGACT
ATATACTATTAGATGACAAATTAGATACACAATAAAGAAATGTTTTCATCACTTTCTTTGTAGTGCTTACAAGGATGTTCCATGAAATCTTTTT
TGCACTTTTTTTATTTTACCTTGATGAACTTTGTGGCTTTTCCAAAGTCTTACATCAGCAATTTTATTTTACTTTTAAAAGATGGTAGACAATC
CCCTCACCAGCTCCTAGATAGAAGACATTCTCTCTCTCTCCCTCACACACACACACACACACACACACACACACACACGCACAGACACGATGGC
CCTTTTCTTTGTTAGTTAGACATGCAGCGTTTTTGTTCATGTGTCTGCCTGGTTGTTCTGATCTGAGGGATACATTTTCTTAGTCTTCTAATAA
GGTATTTTATAACAGTCTCCAGGCTTCCTGTAGCCTTTATATGTTCTAAGCTACTCCTTTTTATATTCATCTATCCAGCAATACTCAGGAACTA
TAAAATCTTTGTGTATAATGCCTTCAGTAAATATTATTTTTACTCAAATTGTCAGTATCTAATGTGCAAAATTCCAAAAATAAATCTAGATTAC
TTTTATTTCCTCTGAAAAACAAAACAAATGAATTGGTAATAATTTAAATATACTTTATTGTAAAATAGCCCTTTCTTTTCCCAACCTTGCTGGC
TAAAATAGATTTATAAAACTGAAATAGGCCAGGCGCAGTGGCTCATGCCTGTGATCCCAGAACTTTGGGAGGCCGAGGCGAGCGGATCACGAGG
TCAAGAGATCGAGACCATCCTGGCCAACATGGTGAAACCCCGTCTCTACTAAAAATACAAAAATTAGCTGGGCGTGGTGGCGCATGCCTGCAGT
CCCAGCTACTCCGGAGGCTGAGGCAGGAAAATCCCTTGAGCCCAGGGGCCAGAGGTTGCAGTGAGCTGAGATCGCACAACCGCACTCCAGCCTG
GCGATAGAGACTCCGTCTTAAAAAAAAAATGAAATAAATATCATATCCTTATCAAGGACAAGAACTAGCTAGGCATGGTGCCTCACACCTGTAA
TCCCAGCACTTTGGGAGGCCAAGGCGGATGGATCACGAGGTCAGGAGCTCGACACCATCCTGGCTAACACGGTGAAACCCTGTCTCTACTAAAA
ATACAAAAAATTGGCTGGGCTTGGTGACACACGCCTATAGTCCCAGCTACTTGGGAGGCTGAGGCAGGAGAATTGCTTGAACCCGGGAGGTGGA
CGTTGCAGTGAGCCGAGATCGCACCACTACACTCCAGCTTGGGCGATAGGGTGAGACTCTGTCTAAAAAAAAAAAAAAAAAAAAAAAAAAAAAG
GCCAAGAACTAGTTCTAGTGACTACATAGATTCCTTGATCATTCTGAAATTGGGACATGGTGGATTTCCTAAGTGTCTCCCACTATCACAATGA
TTTCAATTTAAAAAGGTTTTCAGCTGGGTTTAGTGGCTTATGCCTGTAATACCAGCATTTTCGGCCGGGCGCGGCGGTTCACGCCTGTAATCTC
TGTAATCTCAGCACTTTGGAGGCCTAGGCGGGTGAATCACCTGAGGTCAGGAGTTTGAGGGCAGCCTGACCAACATGGTGAAAACCCGTCTATA
CTAAAAATACAAAAATTAGCCGGGTGTGGCGGCAGGCTCCAGTAATCCCAGCTACTCTGGAGGCTAAGGCAGGGAGAATGGCTTGCATCCGGGA
GGCAGAGGTTGCAGTGAGCCAAGATTGCGCCACTGCACTCCAGCCTGGTAGACAGAGCAAGACTCCATCTCAGACAACAACAACAACAAAAGAA
ACGCATTTTGGGAGGCCAAGACTGATGGATCACTTGAACCCAGGAGTTTGGGACCAGCCTTGGCAAAATGGTAAACCTCATCTCTACAAAAAAT
GTGAAAATTATCGGCCGGGTGCGGTGGCTCAGGCCTGTAATCCCAGCACTTTGGGAGGCCGAGGCGGGCGGATCACGAGGTCAGGAGATCGAGA
CCATCCTGGCTAACATGGTGAAACCCCGTCTCTACTAAAAATACAAAAAATTAGCTGGGCGTGGTGGTGGGCGCCTGTAGTCCCAGCTACTCGG
GAGGCCGAGGCAGGAGAATGGCGTGAACCCGGGAGGCGGAGCTTGCAGTGAGCCGAGATCACTCCACTGCACTCCAGCCTCGGTAGCAGAGCGA
AACCCCGTCACACACACAAAAAAAGAACAAGTGAAAATTAGCCCGGCGTGGTGGCTCACCCCTGTAATTCCAGCTAGGTGGGAGGCTCAGGCAG
CAGGATCGCTTGGGCGCAGGTCTAGGCTGCAGTGCGCCGTGATCCATTGTGCCACTGCACTCCGGACCCTCGGTGACCAGAGTGAGACTTTGTC
TCAAAAATAAATAAATAAAAATTAAAACAAAAAAAGAAATATTCAGTTTTTGTTTTGTAAAGACAGGGTTTCCCTATGTTGCCCAGGCTGCTCT
CCTGAGCTCAAGCAATCCGCCTGCCTCGGCCTCCCAAAGTGCTGGGATTACAGGCGTGAGCCACCATGCCTGGTCTTTTTAAATTTAGAATGTT
TCCTGTCTGGCCAGGCGCGGTGGCTCATGCCTGTAATCCCAGCACTTTGGGAGGCTGAGGCCGCCGGATCACTTGAGGTCAGGAGTTTGAGACC
AGCCTGGCCAACCTGATGAAACCCGTCTCTACTAAAAATACAAAAATTAGTCGGGTGTTGTGGCGGACGCCTGTAATCCCAGCTACTTGGGAGG
CTGAGGCAGGAGAATCGCTTGAACCCGGGAAGGGGAGGCTGCAGTGACCCGAGATCATGCCACTGCACTCCAGCCTGGGCGAGAGTGGGACTCT
GTCTCAAAAACAAATAAACTAAATAAAATAAATAAAAAACTGAGTAAATTTTTTTTAGGAGATAAATGAGTGATGCAGATTCAATACGTCTCTA
CCTGATTAATTATAAATAGCGTATAGAGTCTTAGTTATACAATCCTAGTTATATAAATGCATTGACTAGACTTACAGACACTTTAAAAAATTGT
GTACCGATATCACTTTCAAACTTTCTTCTAAACTTGTTTTTTAAAAAAATTTCGTGACTACAGAACTTGCTGAAGTCATTGTTTTTTTGTTTTT
TTTTTTTGCATAAGCATATAGTCCCTGGATGAAGTCATTCCTTTGACAATGACTTGATTAAACCCATATCAGGCAGAATATGAAAACCACCTAA
GGATTAATTTGGATATTGTTCAAATTAATATTAATAAATGCTCCTCTTCCCAGAGAACTGTTAGCATAATTGTGGCCTTTTATCCTTCCAAAAG
CACTTGTCATTTAATTATTAGGGTGATTTTTCTGATTCTTTGTTAGATTCTTTGAGATAGCACAAATAGTGCTAATTTTATTAAGACTATATTT
CGATAAATCAAAACATCAAGTTCCCTACTCTCGAGGAGTAACTTTTGACCCACAACACATCTGAATGTTTACTAATTATCTTTTAAAGCAGTTT
TAAGTAAATCAAAGCTGTTTGCCAAGCAAGGTCCATGTTTTGTAACTTCCAGCTGTGAAGCCCCCACTATACAAAGTAGATATATTAAATGTTA
ATCACTTTAGCTCTAATTAAATATTTAGTCCTTCAAAGACCTAGAAAAAGTGAAAAAGGTTGAAGTTGATACATATTTTTTTTTCTAAAAGGCC
TAAAAGATCTACTAGAAACAACTATTTTAAATCACATCTCTCCCCAAATGGTTAAAAATCGAACTATTAATCCAGTAGTTTACCTTTGGTACCT
TCTAGGTGTAAGACCGTTTGGGCTGGGCGCGGTGGCTCACGCCTGTAATCCCAGCACTCTGGGAGGCCAAGGCAGGTGGATCACAAGGTCAGGA
GATCGGGACCACCATGGCTAACACGGTGAAACCCCGTCTCTACTAAAAATATAAAAAATTAGCCAGGCGTGGTGGCAGGCGCCTGTAGTCCCAG
CTACTCGGGAGGCTGAGGCAGGAGAATGGCGTGAACCTGGGAGGCAGAGCTTGCAGTGAGCCAAGATTGCGCCACTGTACTCCAGCCTGGGAGA
CAGAGCGAGACTCCGTCTCAAAAAAAAAAAAAAAAAAAAAAAGGCCGTTTTAAAAAACATCATCATCATAACCACGATCAACATTATTGCCATC
ATCATTGCTAATATTTATTAGAAGTTTACTCTGTACTGGGTTATATGCTTTACAAACAAGAGTTTTATTTGCTCCTTACAACAACCCTATGAGG
TAGATGCTGTTATTATCTCCATTCTGTCTAAAGCTTAATAAGGTTAAGTAACTTGACCAATGCCTAACTAGTAGCTGCCAGATCCCGGAATTGA
AACCAGGCTAACTTAGTTTAAAGCCCTTGCTCCCAACTTTTATGTTCCCGAAGCCCACTTAATTCATTTAAATTTGGTATAAATTGACTTTAAT
TATGGCCTTTTTGTTAGAATCCATTATAGTCTTCTCTTTTATCAACAAATGTTGGATAAAGTATGCATTCAGGGAGGCTGGGCATGGTGGCTCA
CACCTGTAATCCAAGGAGGCTGGGCATGGTGGTTCACACCTGTAATCCCAGCACTTTGGGAGGCCGAGGCAGGCGGATCATAAGGTCAGGAGTT
CGAGACCAGCCTGGCCAACATGGTGAAACTCCGTCTCTACTAAAAATACAAAAATTAGCTGGGCATGGTGGCGGGCGCTTGTAATCCCAGCTAC
TTGGGAGGCTGAGGCAGGAGAACCAATTGTTTGAACCCGGGAGATGGAGGTTGCAGTGAGCCGAGATAGTGCCATTGCACTCTAGCCTGGGTAA
CAGGGCGAGATTCCGTCTCAAAAAAAAAAAAAAAAAAGGGCATTCAAGGAATAGGAAGACAAAGTATAATGGAAAAGTAAATGAACAAAAAGGA
TTTAAAAAAACAAATCCCAACTGTCAGATTAGTGGACAGTGAACCAATGCTCTGAGTTTGTTCATCAATCTGTGGTAGAACTACAATTGTTTCC
TAAAGAGTGGAAAGGCTTTGAATAAAAGTGGAGAGGTAGAGAGGGCTCTCCCAGGACAGGTTGATTGCTTCCGCAAAGGCAAAGGGTCTGTAAA
GTGCTAGGCGAGTGGGAACAAGTGGGAATAGTTCTGTTTGACTACATTTGAGGGTTTGAGAAAGGAAAGGGAGGGTAGAAGGGATGGAAGTGGG
AATCACATATGTTTAATGATGTCTTGTTCGGTGCCAAGGACAGTTTTAGACCCTGATAAGCGGAAAGCTTTGAATACTCAGGAGGTGAATTTGG
GTCATTTCATCTCCTCTCTTAGCTGCTGTATGACCCTGTGCCATCCTATTTATGTTTCATTTTCCTATCTGCAAAAAGGGAGTAATTCTTGTTC
CCTTGGGTTTTCTCCTAGTCATAAAAAATGAATGAGTTCGGCCACAGTACACAAACAAAAGGAAAATATGTAATATTTTGTAGGATAAATTCAT
AAAAGTTGTGGAGGATCTGGGCACTTTTATAAAGCAAGCACTGTAGAAAACTTTCAAAGGAAACATTTAAATTCACTAATGACAGCTATAGGGA
TCCTGATTTTTCCTTTAAATGGCAGGCACTTCAAAAAATTAAAATAGAATGTAGTTAGCTTTCAATTACTTAGGCCACTGACAATTCAATTTAT
GGATTATATAGTATTTTAATTTACTCATTTCACACGTCGTTATCAACTCTACATGAAGTTTAAAAGGACAAAGGATGCAAGTGGAATTGGTCAG
TGTTCCGGGTTATTTCCAAGGGAGGCAGAGGGTGGGGGGTTTCCTTTGAGACAAGACTTGGGGTTGGCCAATAATTGCTGGTATTGCCTGCCTG
GTAATAACAGGCTGATGAAAAGGTGACTACAACGTGAAAACTGGTTAAATCAAGCGCACCCTCCCACCCTCGTTTTAGATGAGGAATTTTCCGC
CCTCACAGAAGGGGCTGAGGCAGCATCTGGCATCACAACACTAACATTTGCTTCGTGATTTCCTCTTTACCCGGCCCTTTGACACACATCCCTT
CCCAGAAATCAGGATTCGCTGGTGCTTTTGCATTTCTAAAATGGGAATCCCGTGGCTGAGCTTTTAGCCGGCCGGAACGACTGAGGGCTGCATC
CCTTTCCCGCAGGAGCGGGGCTCCCGCCTCCAGTTCTGTTCCAGGCCTGACTCCTCCACTCCCTCCGTGACTCATGTCCTGCGGATCCTTCGCC
CCCGACGCGCCCCCCAACACACAAACCCCCAGAATCCGCCCCCAGCCTACAGCGCGACGTCAGCCCGCCCCAGCCGACTTGGAGGTCTCGGGTC
TGAGTCACACAGAAAGACCACCCTCGTCGGCATCCCCACACACAGTCCGACACCCGGCGCGCCGGCCTCCCCGCCTGACACACTAACGCCCGTC
GTCTCCGCGCAACTTGTTATGCTCCGGCTCGAGCCCTTGACCCAAAAACCTCAGCGAAACGGAGAGCCGCAGAGCCGGCCTCGGGCGGCCTTTG
ATGGCTTTGTTATTGTTTGGGTTTGAATCGATACGCCCCTCCCCATCCTTCCTCCCTCGCGGCCCTACACCCAGCTCCCGCCTCCCCTCACGCC
CCGCGCCCCTCCCCCTCCATTTTGGCGCCTTTTCCTTCCCGCCACGTCGTGGCGGCGTAGAGACCATTCTGACCGCGAGAGCTGGGCGGGGCGG
GGGCGGGGCGCGCCGAGTTATGCAGATCAATCGGCCTCTGGTTGGCTGGAGTAGCGCTGGCAGGGGCGGGGCCGGGGCGCGGCCACAGAGCGCG
CGGGGCGGGGGCCGAGGGGAGTCGCCCAGTCCCGCCGCTTCCCCACCCCCTCTCCTCCCTCGGCCGGCCCGGCAGCCCTGCTCCCCGCCTTGGC
CTCCCGGAGAGGCCCCGCCCCGTCCCCGCCCGCCGCGCCCTCCCCGCGCGCCCTCCCCGCCGGCGCGCTCCTCCCCTTTACTCCTGGCTGCGGG
GCGAGCCGGGCGTCTGCTGCAGCGGCCGCGGTGGCTGAGGAGGCCCGAGAGGAGTCGGTGGCAGCGGCGGCGGCGGGACCGGCAGCAGCAGCAG
CAGCAGCAGCAGCAACCACTAGCCTCCTGCCCCGCGGCGCTGCCGCACGAGCCCCACGAGCCGCTCACCCCGCCGTTCTCAGCGCTGCCCGACC
CCGCTGGCGCGCCCTCCCGCCGCCAGTCCCGGCAGCGCCCTCAGTTGTCCTCCGACTCGCCCTCGGCCTTCCGCGCCAGCCGCAGCCACAGCCG
CAACGCCACCCGCAGCCACAGCCACAGCCACAGCCCCAGGCATAGCCTTCGGCACAGCCCCGGCTCCGGCTCCTGCGGCAGCTCCTCTGGGCAC
CGTCCCTGCGCCGACATCCTGGAGGTTGGGATGCTCTTGTCCAAAATCAACTCGCTTGCCCACCTGCGCGCCGCGCCCTGCAACGACCTGCACG
CCACCAAGCTGGCGCCCGGTGAGAGCACCCCCCGCCTCCGGCCCGGGGATGCGGGGCGGCGGCGGGATCTCCTGGGTGGGGAGCTGGCGGCTCG
CGGGCCGGCACTGAGTCCCCGTGCTTCCCCCTTTCCTAGGCAAGGAGAAGGAGCCCCTGGAGTCGCAGTACCAGGTGGGCCCGCTACTGGGCAG
CGGCGGCTTCGGCTCGGTCTACTCAGGCATCCGCGTCTCCGACAACTTGCCGGTGAGTGGGCGCCCCGCGGTGGGGAGGGCGCGCCGGGCGGGG
GGCGCACGGGCGTGCTTTAGCCCGGACGAGGGAACCTGACGGAGACCCTGGGCTTCCAGGTGGCCATCAAACACGTGGAGAAGGACCGGATTTC
CGACTGGGGAGAGCTGGTGAGTGCCCTGCAGGAGCGACCCCCAGGATGAGTGGGTGGGGTGAGGGGCGCCCCCGACTCCCGCCCTAACGCGGCC
CCCTCGCCCCTGCAGCCTAATGGCACTCGAGTGCCCATGGAAGTGGTCCTGCTGAAGAAGGTGAGCTCGGGTTTCTCCGGCGTCATTAGGCTCC
TGGACTGGTTCGAGAGGCCCGACAGTTTCGTCCTGATCCTGGAGAGGCCCGAGCCGGTGCAAGATCTCTTCGACTTCATCACGGAAAGGGGAGC
CCTGCAAGAGGAGCTGGCCCGCAGCTTCTTCTGGCAGGTGCTGGAGGCCGTGCGGCACTGCCACAACTGCGGGGTGCTCCACCGCGACATCAAG
GACGAAAACATCCTTATCGACCTCAATCGCGGCGAGCTCAAGCTCATCGACTTCGGGTCGGGGGCGCTGCTCAAGGACACCGTCTACACGGACT
TCGATGGTGAGCCAGGCCCGGGAGGGAGCTGCCCAGGTGACTCGGCCCGGCCCGGCCCAGTCCGGAGGCCTCGGCCAGTCTCCCGCGCCAGCCT
TTTGTAAAGGTCATTGGGCCGCCTGGCTCGATGCTAGCCGGGGTGGGACGCAGGAGAGCCTCCCAGCGTAGTAAAGCCGGGGATTTTCAGCCAG
CTGAACCTGTAATGTTTCTGGCATGATTTTATTCTTCAAGTGGAATTCAGTTAGTTCCAGGCTTTCCCGATGAATAAGAGGTTGTGGGCAACCG
GCGGTAGCCCAGATTTTTCTAAAGTCTGACCCAGTTTCCCCGCCAGTAAAAGGATGGGGGCGGGGGAAGAGGTGGAAATTGATGCCGGTTTTGT
AATTTTTGTTTTATTTTATAAGGGAGTTAGTTTTCTGTATGGTAGTTTTAGAGCTGCAGTTCTTAACTCCTTTCTGATCTAGGGAAGGTTAAGG
AATAGGAACTATATTATTACTGGTGGCTTTTTTTTTTCTTTAGTGTTAAGGGGAGAGAGAGTCAGGAATGAATGTTGTGAAATAAGATCTGTCG
CTGGTTTGAAAATTAGTTGGGTGTCTCCGCAGAGAGGATGAAAACCTATCCTAGGGAGGGGCTTGGAGCGGGTTCTTTCAGAAAAGAAGGAATG
GAGAGCCTGAGATCAAAGCTGCGGAGGGTGGGTCATCATCTGAGCGGCTTAACCTAACAAACGACAGCCTTTCAAAACTTGTGACTCGGGCTTG
TGGTTTATGTTTATTTGCCCTTGGAGGACGCTGGGTTGGGCTGCATTTTTTGTATTTAACAGTTAATGGCTGGCCGGGTCCTCCCATGTTTTTT
CTTTCAAGTCTTTGCTGCCCCCTGGTGAGCACCAGCGGCATGGCCCCTCCTTTTTCTTTTACTACCCAAAGTTTGTAAACAGGAATCACGTGGT
CTGAAACCAACCCTGCAGCTCTGTCTACCTTTCCAGTCTAGGGAGGAAAGGGTGTGGGTGTCTGCTCCTGCTTGCATCGGGTGGGGAGGAAGGC
CTCCCAAAGGGCACCCTGACTTAGGATGTTGTGCAAGCATCCTTGCTTGGATCCTGTCGGCCATGAGAATCTCACCCGGGCTCCTGGGCAGTGG
TGAATGCAATTTAAGGATAGTCTATGAGATACCTTTCTTGGTTGTGCAGACATGCATCCCTTCATCCTTCGCAGGCGGTCCTGCCTCACAGGGC
CTCAAGTTTTGGGTCTGCGGCCAGCTGTGTTTGTTTCTTGGAGCAGTTCATAAAGAATTTCAGTTTATGGTTTGGGCTAGCAGAGAGGTGGGTA
ATGCTTTGGGTTGGAGAGATGCCGTAAGGTGCGCCTCCACTCTCCTTAGCCCAGAGGGAAAAATGGAGTTCACCTAGCTCCTGAGAGAAGGGAT
TTTTTTTTTTTTTAAAAGAAAGAGTTATATATACCACCCAGCTTCTTTGTGCTTGTTTTTGCTAAAAGTGTGTTTTCTCTTCTATTCCCTTGGC
TCACAGGGACCCGAGTGTATAGCCCTCCAGAGTGGATCCGCTACCATCGCTACCATGGCAGGTCGGCGGCAGTCTGGTCCCTGGGGATCCTGCT
GTATGATATGGTGTGTGGAGATATTCCTTTCGAGCATGACGAAGAGATCATCAGGGGCCAGGTTTTCTTCAGGCAGAGGGTCTCTTCAGGTAAC
TGATGGAAACCCCTGGCCATGGGGTTATTGGTCTTAATGGGGCTATTAGTCTTCATGGGACAGTCTTTGAAATTCTGGAGAGCTTCACTCTCCA
GTAGATTCTGTCACCCTTGGCTTAGAATTGTAGGTGAGTGATTTACACTTGAGCTGGCCTCATAAATCACATGGTTTGCACTTGAGCTTTCCTT
GGGAGGTCAGAGGAAGGCATGTGTGAGCATATTAAGAAGAAAAGACAATCTGGCTTCTCCAAAAACTTTTTTAAAGGTACCAACAGAAACCTGA
TAATTCCTGGCTGTTTTGCCAGGGAGTAAAAAGTTAAAAGCTCTTTTAGCATCTTCTTTAAGGCAGCAGCTCCAAATATTTTGGTACCAGTGAC
CTCACTGTGGGTGGTGTTCGTGTTTGTAAGTTGGTAGGTGAATTGAATCATTTCATCATGCTCAGTGGTGTCTCATCAAAATCTCTTGTCATCA
TCCTTCCTATTTCTGGTGAGTGGGTGTTGTGGGAAAGGCCCCCACTATTGAAGTTTGAAAACCACAGGTTTAAGAGGGGAGTCAGTTTTTAGCT
GAAAGCAGACTGGAGGACCCAGATATTAGTCAATACCTTCCTATTGAAGGGTACCCAGCACAGTGTTCTAGAAAATGCTTGGCCTCCCTGGGAC
CCCAGACTTGTGGGCCTCTGAGAAGCAAATGGGGAAGACCTTTGCAGTGTAAAAACAAGTTGAGTCATTCATAACCTCGTCTATCCTCCTTTCT
GCAGAATGTCAGCATCTCATTAGATGGTGCTTGGCCCTGAGACCATCAGATAGGCCAACCTTCGAAGAAATCCAGAACCATCCATGGATGCAAG
ATGTTCTCCTGCCCCAGGAAACTGCTGAGATCCACCTCCACAGCCTGTCGCCGGGGCCCAGCAAATAGCAGCCTTTCTGGCAGGTCCTCCCCTC
TCTTGTCAGATGCCCGAGGGAGGGGAAGCTTCTGTCTCCAGCTTCCCGAGTACCAGTGACACGTCTCGCCAAGCAGGACAGTGCTTGATACAGG
AACAACATTTACAACTCATTCCAGATCCCAGGCCCCTGGAGGCTGCCTCCCAACAGTGGGGAAGAGTGACTCTCCAGGGGTCCTAGGCCTCAAC
TCCTCCCATAGATACTCTCTTCTTCTCATAGGTGTCCAGCATTGCTGGACTCTGAAATATCCCGGGGGTGGGGGGTGGGGGTGGGTCAGAACCC
TGCCATGGAACTGTTTCCTTCATCATGAGTTCTGCTGAATGCCGCGATGGGTCAGGTAGGGGGGAAACAGGTTGGGATGGGATAGGACTAGCAC
CATTTTAAGTCCCTGTCACCTCTTCCGACTCTTTCTGAGTGCCTTCTGTGGGGACTCCGGCTGTGCTGGGAGAAATACTTGAACTTGCCTCTTT
TACCTGCTGCTTCTCCAAAAATCTGCCTGGGTTTTGTTCCCTATTTTTCTCTCCTGTCCTCCCTCACCCCCTCCTTCATATGAAAGGTGCCATG
GAAGAGGCTACAGGGCCAAACGCTGAGCCACCTGCCCTTTTTTCTGCCTCCTTTAGTAAAACTCCGAGTGAACTGGTCTTCCTTTTTGGTTTTT
ACTTAACTGTTTCAAAGCCAAGACCTCACACACACAAAAAATGCACAAACAATGCAATCAACAGAAAAGCTGTAAATGTGTGTACAGTTGGCAT
GGTAGTATACAAAAAGATTGTAGTGGATCTAATTTTTAAGAAATTTTGCCTTTAAGTTATTTTACCTGTTTTTGTTTCTTGTTTTGAAAGATGC
GCATTCTAACCTGGAGGTCAATGTTATGTATTTATTTATTTATTTATTTGGTTCCCTTCCTATTCCAAGCTTCCATAGCTGCTGCCCTAGTTTT
CTTTCCTCCTTTCCTCCTCTGACTTGGGGACCTTTTGGGGGAGGGCTGCGACGCTTGCTCTGTTTGTGGGGTGACGGGACTCAGGCGGGACAGT
GCTGCAGCTCCCTGGCTTCTGTGGGGCCCCTCACCTACTTACCCAGGTGGGTCCCGGCTCTGTGGGTGATGGGGAGGGGCATTGCTGACTGTGT
ATATAGGATAATTATGAAAAGCAGTTCTGGATGGTGTGCCTTCCAGATCCTCTCTGGGGCTGTGTTTTGAGCAGCAGGTAGCCTGCTGGTTTTA
TCTGAGTGAAATACTGTACAGGGGAATAAAAGAGATCTTATTTTTTTTTTTATACTTGGCGTTTTTTGAATAAAAACCTTTTGTCTTAACTCGT
GGCTTCTAATCGTCTGTGCGGAGGCATTGCTAACCTGCATTTATTGAGCATTTGGTAAGTGCCAAAGAATTGTAGGAGAAAGGAATTCTCAGCC
TAAATCTGGCTTCCTTCAACATTGGGATTTCTAGGATAGTCATCTTCCTGAAACGAATGTATGGTCAAGGGGTAGGACCAGTATTGTCAAAATT
TGGGCAATATCTGGCATGGGAGGCCTAATAAAATAACCTTTTCCAGATTACAATTTTAAAGCTATGCAAATAGGATAGATGTGACAATTTTCAA
GTGTTCAATAGCCATTTATGGCTAGTGGCCACCTCATATAAAACATCATTGCAGAAAGTTCTATTGGATGGGGCTGATCTAGAGATAACAAATA
CATACCTATTACCAAACTAACCCTTGAAGCTTTTATCAGTTGTCTGCCACTGATAGTAAAACATTTTGAGCATGTCCCCTTGGTACACGTGAAG
TTTATTGAAAAACTATTGCCTCTATTACTCTCGGTTCCTGATTCAAGTTTCCTTCACCTTTAGTGTGAGGTTTAGTTTCTTTTCGAGACTGAGT
CTCTGTCAACCAGGCTGGACCAGCTGGCGTGCCACTGCCAGTGGCACGATCTCGGCTCACTGCAACTTTCACTTCCCGGGTTCAAGCAGTTCTA
CCTCAGCCTCCTGAGTAGCTGGGATTACAGGCGCCCGCTGCCACGCCCAGCTAATTTTTGTATTTTAGTAGAGACAGGGTTTTACCATGTTGGC
CAGGCTGGTCTCGAGCTCCTTGACCTTATGATCCGCCTGCTTCAGCCACCCAAAGTGCTAGGATTACAGGTGTGAGCCATCGTGCTCCGCAGCC
TTTTTTTTTTTTTTTTTGAGATGGAGTGTCGCTCTGTTGCCCAGGCTGGGGTGCAGTGGTGCAATCTAGGCTCATCGCAAGCTCCGCCTCCCGG
GTTTTAAGTGATTATCCTGTCTCAGCCTCCCGAGAAGTTGGGATTACAGGCATGTGCCACCAGGCCAGCTAATTTTGTATTAGTAGATACGGGG
TTTCGCCATGTTGGCCAGGCTGGTTTGGAACTCCTGACTTCAAGTGATCTGCCTGCCTTGGCCTCCCAAAGTGCTGGGATTACAGGCGTGGGCC
ACCGCGCCTGGCCTAGTCTTTAACAATAGTATAATTTATTATGCAGCATAGAAAAAATAATAGAACGGTGTGGTGACACTAAAGTCGTGACCAG
ATAAGACCCAGTCTACAAAAAATAAGTGAAAATTAGCTGAGCGTGGTGGCATACACCTGTAGTCCTACCTATGCAGGAGGCTGAGGCAGGAGGA
TCGCTTGAACCCAGGAGCTCCAAGGTTGCAGTGAGTTATGATCACGCTATTGCACTCCAGCCTGGGCAACAGGTAACCCCACTTAAAACACACA
CACACACACACACACACACACACAATAGTGGATGGGTAGAAATGTGAGTTTGACTTAAGGTTTCCCCCTCTGATGTGTTTGACAAAGGGCTAAT
ATTGGGAGTAGGTGAAATGTTAGCTCTGCCATTTTCTTACTGCTTATTCTTGAATAATTAGTATTTTTAGTCCATGGTTTCTTTGCAGGGATCT
GTTTAATAGGCCCTTTGTCCATTTTGTGTGAGTTTAGTTAAACTGGATGGCAAGACCCATGAATCCACTTTGTACGTGTGGCCTGAATACATCC
TGATATTTTGAAAGCACACTGGAGTGCCATTGTCAATTCATATATTAAGTATTGGTAAATGTTGGTTTCTTGTTTCTTTATAAATATCCACAGT
TATAATACTCCCTCCCTGGGGGTCATCATGCTCCCAACCCTCAATGCATCCACACACCCTTTGGACACTGGCCCATATGCACCCTCGAGGTTGC
TGGAGGGTGCAGACTATAATACCCCTCACTCCTCATTGGGTTCTGGTGTATGTCTACCCTTAAGCTTAGACTAGATCCCATACCTCAGCTCAGC
CCCCATGTGGCTATAAAGAGGAAGGAAGGATGTCTTGGTTCTGGGGGGCTGATTTTCTGAGGTTCCCCTTTTCTCTAATCTCTCCCATCCCCCA
CACAACATACACACACTACCAACATCTTGGAGCCTGAGGGTTGCATGCTTCGTCCTTTCCAGTAAAGCTGACACTTGGATAATTAAAAGTTGCC
GCAAACTATTAACGAAATCAGGCAAAGCCCCACCCTTCTCTTTCTCGAAGTGAGTTTCTGGCAGTTTCCCCATCTAATGAGACTGCTGCGGGGG
AATAGAAGAAAGTATCTCTGAATAAAGACAGATCGTGCTCCTGTTGGATGCAAGAGATTAAGAGTTTTAGGGGGAGGGTGAAAGGTCATATTTA
ATCTCTTCTCAGGGGCAGTTTGACATCTAGCGTGGAAAGGGAATCAGATAACCAATAAGTCTGCGGGGGATCAATGTCATGGCCAGAGGAATAT
AGAGAGCAATGGTTAAAAGCATTGACTTGGGAATCAGCCTTGAGCTTACTTATCTAGAAACCTTGGGCAAGTTATTACACCCTCTAAAACTAAT
CTCTAAACAGAGATACTCCTGGATTGGATTATTAGGAGACTGGGTTAAATAACAGATATACTTACATACAGAAAAACTACTATCTCCCGCTTAC
GGATGCATACACATGTAGCAAAAGTACAAAGAAGTACAGGGTGGGGTAGGGTGTGGTAGTTCACACCCATAATCCCAGCACTTTGGGAAGACAA
GGAGGGATGATCACTTGAGCCCAGGAGTTTGAGACTAGCCTGGCCAACATGACAAAACCCCATCTCTACAAAAAAATAGAAGCATTAGCCGGAC
GTGGTGGTGCGTGCCGGTAGTCCCAGCTACTTGGGAGGCTGAGGTGGGAGGATCAATTGAGTCCGGGAGATGGAGGCTGCAGTGAACCAAGATG
GCACCACAACATTCTAGCTTGGGTGAAAGAGCGAGACCCTGTCTCAAAAAAACAAAACAAAACAAAACAAACAAAAAAGTACAGGGTGATAATA
AGTTTCCAGAGTCAGGGAAGTGGTTATTACCTTTGGGGAGAAGGGAGGGAGGTTGTGATTTGTGGAAAGAGACCTTCAACTATTTTGGCAATGC
TTTATTCCATAAACTAGATGGTATGAGTAAGGTGTTTGTATTATTCTTTTCAACTTTTGGGTTGTTTTAAATGTTTTATGATAAACTTTATTTT
TAAAAATTTTTCTCTGGCTGGGCGCGGTGGCTCACACCTGTAATCCCAGCACTTTGGGAGGCCGAGGCAGGCGGATCACAAGGTCAGGAGATCG
ACACCATCCTGGCTAACACAGTGAAACCCCATCTCTACTAAAAATACAAAAACTTAGCCAGGCATGGTGGCATGTGCCCATAGTCCCAGCTACC
CAGGAGGCTGAGGCAAGAGAATCGCTTGAACCCAGGAGGCGGAGGTTGCAGTGAGCCAAGATAGCTAGCCACTGCACTCCAGCCTGGGCGACAG
AGTGAGACTCCGTCTCAAAAACAAAAAAAATTTTTTTTCTTTGTTCTTTCTTTTTAAACATTTATTTATTTATTTTAGCTGGGAGTGGTGGCTC
ACGCCTGTAATCCCAGCACTTTAGGAGGCTGAGGCGGGTGGATCATCTGAGGTCAGCAGTTCAAGACCAGCCTGACCAACATGGTGAAACCCAG
TCTCTACCAAAAATACAAAATTAGCTGGGCATGGTGGTGCATGTCTATAGTCCCAGCTACTCAGGAGGCTGAGGCAGGAGAATCACTTGAATCC
AGGAGGTGGAGGCTGCAGTGAGCCACGATCACGTATAGCCTGGGCGACAGAGCGAAACTCTGTCTCAAAAAAAATATATATATTTATATATATA
ATATATAATATATATTATATATTATATTATATATTATACATAAATTATATATTATATATATAATATATAATATATAATATATATTATATATTAT
ATATTATATATTATACATAAAATATATATAATATATATTATATATTATATTATATATTATATATAAAATATATATATAATATATATAATATTAT
TTATTTATTTTGAGACAGGGTCTCACTCTGTCACCCAGACTGGAGTGCAGTGGCATAATCTCGGTTCACTGCAACCTCCACTTCCTGAGTTCAA
GCAATTCTCGTGCCTCAGCCTCCCAAGTAGCTGAGACTACAAGCGTGTGCTACCACACCTGTCTACTTTTTGTATTGTTAGTAGAGATGGGGTT
TCACCATGTTTGCCAGGCTAGTCTTGAACTCCTGATCTCAAGTAATCCACCTGCCTTGGCTTCCCAAAGTGCTGGGATTACAGGTGTGAGCCAC
TGCGCCCGGTCCATTTTTTTTTTTTCTTTTGAGAGACAGATTTTTGCTCTGTATCCCAGGCTGGAGTGCAGAGGCATGAACTTGGCTCACGGCA
CCCAGGTTCAAGCGATTCCCCTGCCTCAGCCTCCCAAGTAGCTGGGATTACAGGGACCTGCCGCCATGCTTGGCTAATTTTTGTATTTTTAGTA
GAGATGGGGTTTCATCTTCTTGGCCAGGCTGGTGTCAAACTCCTGACCTCAGGTGATCCGTCCACCTCGGCCTCCCAAAGTGCTGGGATTACAG
GCACGAGCCACTGTCCTCAGCCTTTCACTTTTTCTTTTAATTGAGACAGGGTCTCACTACGTTGCTCAGGCTAATCTTTAATTCCTGGCCTCAA
GTGATCCTCCCTCCTTGGCCTCCCAAAGTGCTGTGATTACAGGTGTGGAATATCATGCCCAGCCTATGATAAGCTTTTAAAAGTGATGAATATA
TTTGTGCGTATCATGTAGGAGGCAGCAGATGGAGTTATTACTGCCCTTGGCTGAGGGGATCTGGGAAGGCTTCAAAGAGGAGGTGGCATTTCAC
CTGGATTTTGAAGGATGGAGCCTTAGCCTGCTTCCCTGTAAAATAGGCACCAAACATGCAGATGGAGCAGAGAAATCTGGATGTGCTAAATGTT
TTTCCCCCACTAGACCAGGAATCAGCAAACTATGGCCTGCTGCCTGAACTGGTCCCTGTACAGTTTTTGTACGGCTTGCAAGCTAAGCCTAGAT
TTTACATTTTTAAGTAGTTGAAAATCAATCAAATGAAGAATAATATGTTGTGATATGTAAAAATTATATAATACTTGGCTGGGTATAGTGGCTC
ATGCTTATAATCCCAGCACTTTGGGAGGCCGAGGTGGGAGGATTGCTTGAGGCCAGGAGTTCTGGACCAGCTTGGGCAACCTAGCAAGACTTCC
ATCTCTACAAAAAATAAATAAAAATTAGTCAGGCATGATGGCCTAGCTACTTGGGAGGCTGAGACAGGAGGATCACGTGAGCCCAGGAGTTTGA
GGTTACAGTGAGCTATGATCTCACCACTGCGCTCCAGCACTCCAGCCTGGTTGACAGAGCAAGACTCTATCTCTAAAAGAAAAAGAAAAAAAAA
GAGGCCAGGTATGGTGGCTCATACCTGTAATCCCAGCACTTTGGGAGGCTTAGGTGGGCGGATCACCTGAGATCAGGAGTTTGAGACCAGCCTG
GCCAACATGGTGAGACCCTGTATCTACAAAATACAAAAATTAGCCCAGTGTGTTGGTGCCTGCCTGTAATCCCAGCTACCAGGGAGGCTGAGGC
AGGAGAATTGCTTAAACCCATAAGGTGGAGCTTGCAGTGAGCCAAGATTTCTCCATTGCACGCCAGCCTGGGCAACAGAGTGAGACTGCATCTC
ACAAAAAAAAAAAAAAAAAAATATATATATATATATATATATATACACACACACACACATTTGTACACACATATGCAACTCAATTGTCTGTGTT
CATAAATAAATCTTGTCCATTTACATATTGTCTATGGCTGCATTTGTGATACGATGGCAGAGTTGAGTAGTTAAGACACTCAGTATGGCTGGCG
AAGCTGAAAACATTTACTATCTTGTCCTTTACAGAGAAATTTGCTAATCTCTACACTAGATTATGGTCCCATTGACTCATTTTTTGTTGTTGTT
GTTTTTTTGGGGTTTTTTTTTTTGAGACAGGGTCTTACTCCGTCATCCAGGCTGGAGTGCAGTGGCTCGATCAGGGCTCACTGCAGCCTTGACT
TTCCAGGCTTAAGCAATCCTCCCACCTCAGTCTCCTGAGTAGCTGTGACTACAGGTGGGCCCCACTGTGCCCAGCTAATTTGTTTTTTTGTTTG
TTTGTCTGTTTGTCTTGAGACAGGGTCTTGCAATGTTGCCCAGGCTGGAGTGCAGTGGTGCGATCACGACACACTGCAACCTCAACCTCCTGAG
CTCAAGTAATCCTCTTGCCACTGCCTCCCAAAGTGCTGGGATTACAGGCATGAGCCATTGTGCCTGGTCTGAACTACATCTTTGATAACTCTTT
TTTTTTTTCTTTTTGAGATGGAGTCTCGCTCTGTCCCCAGGCTGGAGTGCAGTGGCATGATCTCGGCTCCACCTCCTGGTTCAAACATTCTCCT
GCCTCAGCCTCCCAAGTAGCTGGGATTACAGGCGCCTGCCACCACGCCTGGCTAATTTTTGTTTTTGTTTTGTTTTGTTTTGTTTTGAGATGGA
GTCTCACTCTGTCACCCAGGTTGGAGTGCAGTGGCACCATCTCGGCTCACTGCAAGTTCAGCCTCCCGGGTTCATGCCATTCTCCTGCCTCAGC
CTCCCAAGTAGCTGGGACTACAGGCACCCACCACCACGCCCGGCTAATTTTTTTTTTTTTTTTTTTTGGTATTTTTAGTAGAGACGGAGTTTCA
CCATGTTGTCCAGGATGGTCTCAATCTTTTGATCTTGTGATCTGCCCGCCTTGGCCTCCCAAAGTGCTGGGATTACAGGCATGAGCCACCACGC
CCGGCCTGATAACTCTTAACCTAGTGCCAGGCATGTAGTAGTTCCTTAGTGATAATAGCTAACATACAGTACCTACTATGTGCCCAGCACTATT
CTGCATGCTTTGCATGCATTAACTTATTTATCCTTAAAACAACTCTATGACACTATTGGAAAGTACAGGGGGAAACACTGTTATTTGTTTTATT
TTATTTTATTTTATTTTGTATTTTTATTTATTTATTTTTTTTTGAGACAGTCTCGCTGTATTGCCCAGGCTGGAGTGTAATGGCGCGATCTCAG
CTCACTGAAATTTCTGCCTCCTGGGTTCAAGCGATTCTCCTGCCTCAGCCTTCTGAGTGGCTGGGATTACAGGTATGTGCTATCACGCCCAGCT
AATTTTTGTATTTTTTTTTAGTAGAGACTGGGTTTTGCCATGTTGGCCAGGCTGGTCTCAAACTCCTGACCTCGGGTGATCCACCCGCCTCAGC
CTCCCAAAGTGCTAGGATTACAGGCATGAGCCACTCCGCTCTGCCTATTTTATTGTTTTAGAGATGAGGGTCTTGTCATGTTGCCCAGGCTGGC
CTCAAAATCTTGGCCTCAAGCAATACTCCTGCCTCAGCCTCCTGAGTAGCTGACTGTACAGGTACATGCCACCTAGCCCGGCTTGATGCAGTTA
TGTATCCACATTTCACAGATGGGGATAACAGATGTGCAGAGCAGTAAATTTCATGTCAAAGGCCACATATTAGGTAGTGGTCAGGTCAGAATTT
GGACCTAGGCCATCTGTGGTTCTATGGTCATCCAGACTCCGCGATCTTGGCTCACTGCAAACATTTGTGTGGATTAGCCACCTCAAGGTCCCTT
CAGGGCCCAGGATCTGGAGGTGAGAATGGTTCTTCCCCAGACTCCAGAGTTGGGTAAGCCATTCTGTTCTGTGGAAATAGTCATTATGAACTCC
TGTAAACTATCTTTCACTTGGGCCTGGCTGGGGAGGAAGAGTTGGAGGCTGAAAAGGGAGAAGAAAGGGGACCCGGGGGGGTTGGGGTGGGGCA
GGGGCACATTTCTTGTAAATGTTGCTCAGCTCCTTCAACTGCTGTGCTGGTTCTTGGAAACCTTCACCACAAAAGACCTATCAAGAACAGTGTT
AAAAAAGATATGGCCTCATCCCCCAGTTCATTTCCTGCCCAGCCTTGCACTACTAACCCCGATTGCCAAGAGCAAGGTTGCAGTGTCCCCTCAG
CAGTGCTGTGGGAGGAAGTGCAAAAATAAGCAGAACTAGGGGCAAGACCAGAGGACTGTCTTTATTTTTATTTATTATAACAGGACATCCGATG
TACAGAAGTGGATTCATCATAATCCTTGGCTCATCGTATATTCTCATCCTTGGTCCAAGAATGGTCTTTTGTTTATATATATATATATATATAT
ATATATATATATATATATATATATATATATATATATATATATATTTTTAAATCGGAGTCTTGTCACCCAGGCTGGTATGCAATGACGTGATCTC
GGCTCACTGTAACCTTCACCTCCCAGGTTCAAGTAATTCTCCTGGTTCAGCCTTCCAAGTAGCTGGGATTACAGGCGCCTGCCACCACGCCCGG
CTAATTTTTTGTATTTTTAGTAGAGACAGGTTTCGCAATGTTGGCCAGGCTGATCTCGAACTCCTGACCTCAGGTGATCCACCTGCCTCGGCCT
CCCAAAGTGCTGGGATTACAGGCGTTAGCCACCGCATCTGGCCCGTTATTATTATATTTTATCATACTGGGTAGTGAATCCACCACCCAGCTCA
AAAAACAGAATATTAACAATGACATCCATCTATCTATATGATCCTCTCTTAGTCCATTTCTTACCTCCCCCAGATACAACCCACTGTCCTAAAT
TTTGTGTTTGGCATTCTCTTACTTTATATTTTATTTATTTATTTTGAGACAGAGTCTCACTCTTGCCCAGGCTGGAGTGCAGTGGCATGATCTT
GGCTCACTGCACCCTCATCTTCCTGGGTTCAAGCGATTCTCCTGCCTCGGTCTCCGAAGTAGCTGAGATTACAGGCATGTGCCACCATGATTTT
TGTATGTTTAGTAGAGACAGGGTTTCACCATGTTGGTCAGGCTGGTCTTGAACTCCTGTCCTCAGGTGATCTGCTCGCCTCAGCCTCCCAAATT
GCTGGGATTACAGGCATAAGCCACCATGCCCGGCTTATTTATTTATTTACTTTGAGCTTGTCACCCAGGCTGGGGTAGTCGCGCAATTGAGGCT
CACTGCAGCCTCAAATTCCTGGGCTCAAGTGATCCTCCTGCCTCAGCCTCCCAAGAAGCTGAGACACAGACATGTTGCCACCACACCTTGCTAA
TTTTTTTTTTTTTGAGATGGAGTCTTGCTCTGTCGCCTCGGCTGGAGTGCAGTGGCACAATCTAGGCTCACTGCAAGCTCCACCTCCTGGGTTC
ACGCCATTCTCCTGCCTCAGCCTCCCGAGTAGCTGGGACTACAGGTGCCCACCACCACGCCTGGCTAATTTTTTTGTATTTTCTAGTACAGACA
GGGTTTCACCATGTTAGCCAGGATGGTCTCGATCTCCTGACCTCGTGATCCGCCCGCCTCAGCCTCCCAAAGTGCTGGGATTACAGGCGTGAGC
CACCGTGCCCAGCCCACCTTACTAATATTTAAATTTTTTGTAGAGATGGGTGTCTCACTATGTTGACCAAGTTGGTCTTGAATTCCTGGCCTCA
AGCAATCCTCCAAACTCAGCCTCCCAAAGTGCTGGGATTACAGGCGTGACCACTGTGCCCGGCTAACTTTTAAAATTTTTTATAGAAATAGGAT
TTTGCAATGTTGCCCAGGCTGGTCTCAAATTTCTGGGCTCAAGTGATTCACCCGCCTCGGCCTCCCAAATTGTTGGGATTACGGATGTGAGGTA
CTGCACCTGGCTAACAGCATAGCAGCATTCTTTCACTTTAAAATAACATTTTATTTTATAGGTATGTATCCCTAAATTATGGAGTATTTAGTAT
TTTTATTTTGTCTTATTTTATTTCATTTCATTTTTAGATGGAGTCTCGTTCTGTCGGCCAGGTTGGAGTGCAGTGGTGCGATCTCGGCTCACTG
CAAACTCTGCCTCCCGGGTTCAAGTGATT
HUMAN SEQUENCE—mRNA
GAGGAGGCCCGAGAGGAGTCGGTGGCAGCGGCGGCGGCGGGACCGGCAGCAGCAGCAGCAGCAGCAGCAGCAACCACTAGCCTCCTGCCCCGCG
GCGTTGCGACGAGCCCCACGAGCCGCTCACCCCGCCGTTCTCAGCGCTGCCCGACCCCGCTGGCGCGCCTCCCGCCGCAGTCCCGGCAGCGCCT
CAGTTGTCCTCCGACTCGCCCTCGGCCTTCGCGCAGCGCAGCACAGCCGCACGCACCGCAGCACAGCACAGCACAGCCCAGGCATAGCTTCGGC
ACAGCCCCGGCTCCGGCTCCTGCGGCAGCTCCTCTGGCACGTCCCTGCGCCGACATTCTGGAGGTTGGATGCTCTTGTCCAAAATCAACTCGCT
TGCCCACCTGCGCGCCGCGCCCTGCAACGACCTGCACGCCACCAAGCTGGCGCCCGGCAAGGAGAAGGAGCCCCTGGAGTCGCAGTACCAGGTG
GGCCCGCTACTGGGCAGCGGCGGCTTCGGCTCGGTCTACTCAGGCATCCGCGTCTCCGACAACTTGCCGGTGGCCATCAAACACGTGGAGAAGG
ACCGGATTTCCGACTGGGGAGAGCTGCCTAATGGCACTCGAGTGCCCATGGAAGTGGTCCTGCTGAAGAAGGTGAGCTCGGGTTTCTCCGGCGT
CATTAGGCTCCTGGACTGGTTCGAGAGGCCCGACAGTTTCGTCCTGATCCTGGAGAGGCCCGAGCCGGTGCAAGATCTCTTCGACTTCATCACG
GAAAGGGGAGCCCTGCAAGAGGAGCTGGCCCGCAGCTTCTTCTGGCAGGTGCTGGAGGCCGTGCGGCACTGCCACAACTGCGGGGTGCTACACC
GCGACATCAAGGACGAAAACATCCTTATCGACCTCAATCGCGGCGAGCTCAAGCTCATCGACTTCGGGTCGGGGGCGCTGCTCAAGGACACCGT
CTACACGGACTTCGATGGGACCCGAGTGTATAGCCCTCCAGAGTGGATCCGCTACCATCGCTACCATGGCAGGTCGGCGGCAGTCTGGTCCCTG
GGGATCCTGCTGTATGATATGGTGTGTGGAGATATTCCTTTCGAGCATGACGAAGAGATCATCAGGGGCCAGGTTTTCTTCAGGCAGAGGGTCT
CTTCAGAATGTCAGCATCTCATTAGATGGTGCTTGGCCCTGAGACCATCAGATAGGCCAACCTTCGAAGAAATCCAGAACCATCCATGGATGCA
AGATGTTCTCCTGCCCCAGGAAACTGCTGAGATCCACCTCCACAGCCTGTCGCCGGGGCCCAGCAAATAGCAGCCTTTCTGGCAGGTCCTCCCC
TCTCTTGTCAGATGCCCGAGGGAGGGGAAGCTTCTGTCTCCAGCTTCCCGAGTACCAGTGACACGTCTCGCCAAGCAGGACAGTGCTTGATACA
GGAACAACATTTACAACTCATTCCAGATCCCAGGCCCCTGGAGGCTGCCTCCCAACAGTGGGGAAGAGTGACTCTCCAGGGGTCCTAGGCCTCA
ACTCCTCCCATAGATACTCTCTTCTTCTCATAGGTGTCCAGCATTGCTGGACTCTGAAATATCCCGGGGGTGGGGGGTGGGGGTGGGCAGAACC
CTGCCAATGGAACTCTTTCTTCATCATGAGTTCTGCTGAATGCCGCGATGGGTCAGGTAGGGGGGAAACAGGTTGGGATGGGATAGGACTAGCA
CATTTTAAGTCCCTGTCACCTCTTCCGACTCTTTCTGAGTGCCTTCTGTGGGGACTCCGGCTGTGCTGGGAGAAATACTTGAACTTGCCTCTTT
TACCTGCTGCTTCTCCAAAAATCTGCCTGGGTTTTGTTCCCTATTTTTCTCTCCTGTCCTCCCTCACCCCCTCCTTCATATGAAAGGTGCCATG
GAAGAGGCTACAGGGCCAAACGCTGAGCCACCTGCCCTTTTTTCTGCCTCCTTTAGTAAAACTCCGAGTGAACTGGTCTTCCTTTTTGGTTTTT
ACTTAACTGTTTCAAAGCCAAGACCTCACACACACAAAAAAATGCACAAACCAAGCAATCAACAGAAAAGCTGTAAATGTGTGTACAGTTGGCA
TGGTAGTATACAAAAAGATTGTAGTGGATCTAATTTTTAAGAAATTTTGCCTTTAAGTTATTTTACCTGTTTTTGTTTCTTGTTTTGAAAGATG
CGCATTCTAACCTGGAGGTCAATGTTATGTATTTATTTATTTATTTATTTGGTTCCCTTCCTATTCCAAGCTTCCATAGCTGCTGCCCTAGTTT
TCTTTCCTCCTTTCCTCCTCTGACTTGGGGACCTTTTGGGGGAGGGCTGCGACGCTTGCTCTGTTTGTGGGGTGACGGGACTCAGGCGGGACAG
TGCTGCAGCTCCCTGGCTTCTGTGGGGCCCCTCACCTACTTACCCAGGTGGGTCCCGGCTCTGTGGGTGATGGGAGGGGCCATTGCTGACTGTG
TATATAGGATAATTATGAAACACAGTTCTGGATGGTGTGCCTTCCAGATCCTCTCTGGGGCTGTGTTTTGAGCAGCAGGTAGCCTGCTGGTTTT
ATCTGAGTGAAATACTGTACAGGGGAATAAAAGAGATCTTATTTTTTTTTTATACTTGCGTTTGGAATAAAAACCCTTTGGCTTT
HUMAN SEQUENCE—CODING
ATGCTCTTGTCCAAAATCAACTCGCTTGCCCACCTGCGCGCCGCGCCCTGCAACGACCTGCACGCCACCAAGCTGGCGCCCGGCAAGGAGAAGG
AGCCCCTGGAGTCGCAGTACCAGGTGGGCCCGCTACTGGGCAGCGGCGGCTTCGGCTCGGTCTACTCAGGCATCCGCGTCTCCGACAACTTGCC
GGTGGCCATCAAACACGTGGAGAAGGACCGGATTTCCGACTGGGGAGAGCTGCCTAATGGCACTCGAGTGCCCATGGAAGTGGTCCTGCTGAAG
AAGGTGAGCTCGGGTTTCTCCGGCGTCATTAGGCTCCTGGACTGGTTCGAGAGGCCCGACAGTTTCGTCCTGATCCTGGAGAGGCCCGAGCCGG
TGCAAGATCTCTTCGACTTCATCACGGAAAGGGGAGCCCTGCAAGAGGAGCTGGCCCGCAGCTTCTTCTGGCAGGTGCTGGAGGCCGTGCGGCA
CTGCCACAACTGCGGGGTGCTACACCGCGACATCAAGGACGAAAACATCCTTATCGACCTCAATCGCGGCGAGCTCAAGCTCATCGACTTCGGG
TCGGGGGCGCTGCTCAAGGACACCGTCTACACGGACTTCGATGGGACCCGAGTGTATAGCCCTCCAGAGTGGATCCGCTACCATCGCTACCATG
GCAGGTCGGCGGCAGTCTGGTCCCTGGGGATCCTGCTGTATGATATGGTGTGTGGAGATATTCCTTTCGAGCATGACGAAGAGATCATCAGGGG
CCAGGTTTTCTTCAGGCAGAGGGTCTCTTCAGAATGTCAGCATCTCATTAGATGGTGCTTGGCCCTGAGACCATCAGATAGGCCAACCTTCGAA
GAAATCCAGAACCATCCATGGATGCAAGATGTTCTCCTGCCCCAGGAAACTGCTGAGATCCACCTCCACAGCCTGTCGCCGGGGCCCAGCAAAT
AG

[0274] TABLE 10
MOUSE NOMENCLATURE
ICSGNM Wnt3a
Celera mCG11700
HUMAN NOMENCLATURE
HGNC WNT3A
Celera hCG42253
MOUSE SEQUENCE—GENOMIC
TGAGCTGTTGATCACATGCTGCATTTAGAGAGAGTTCTGGGACTAAAGCTCAGAGAGAAGACACAGGCCCATGGCCAGAGAGGCCTTACCTATG
TGGGCCTTGCCACCTGTACCCAGGAGCACACCACTCCCTTTGGAAAGAGCACCCTTCTAACACCTATCATCAAAGTCAAGCAGACCCAGTCAGT
ACAGCTTCCTTTCTCTCCCCTGGCCTTGCTCTTTTGCCCTTTGCAGCCAACCAGTGGGTTGAGTTGAGTGGATGCCCGAACAGAGTCTTTCCAG
TGGACAATAGGCGCTGTACTGAAGCATGGTGGACGCGGGGACATGTTTGAATATTTCTGATACTTTCCCCCATCCCACCATGTGACAACCTTCC
AGCTCTGAGACCTAGAGGAACCTGGCCTCTGCCTCTACCTAGGTCTCCCTCCAGGGCTCCCCAGGTGACACCCTCGAGGTGTCTGATACATTAG
TGCTTCCACATTCCTTCACCAGCAGAACGTGCCGCTGCCGCCCAGAGAGGCTGGCAAACACATGGCCGCCGGCGCGGGAGCCTCCCGCCTGCCA
GGACTCGTTCAAAGTATGTGTCAGTAATCCTGCTGGCCCGGCGGGGCAGGACAGGCGCTGGCTGGGAAGGCTTCAGGCAGGGCCCTGTGCTGAC
TGGAGTAAGGACTTGGGACCCCTCCCCAACTCAGAAAGTGCTGGATCCTCAAGGAGGGCTTCCATTTTCTGGGGATGCTGTCCATTCGTGGGAA
GGCAGCGGATTGTTGGGGATCTCAGGAACACAGGTACCGTGGGGACAGCTCTCCATCTGAATGGTTCCTGGACAGCCCCATTCAAAAGAGGACA
GTGTGCTTTGTCCATGAACAGAGTGAGTCCCATACCCTGGGTCTCAGGTATGAGTGTGGAAGCCTGGTGATGTCACTGAGAGGCCCAGTGCTCC
AGAGAGAAAGGCCTGAGTGGGACCCACAGCATTCTGGCCCAGGACCCTTATCAACAGAGACTTCTCTACTCATGATCCTCCTTGTTCCCTCTGG
GCCTGGGCAGAGCCTTAGGAACCCTACCTGCTAGGATCCAACTCAGTGCTTACTGTGCCTGATTCCATGCCAGCAGCGGATAAGAGAAGTCAGG
CAAGCAAGGCACTTCCTGCACCAGATATAGATGCAGGGAGAGGTGGACAGACACAGTCCCAGACAGGCAGGTAGCGCTCGCACACACACACAAA
CACACACACACACACACANNNNNNNNNNNNNNNNNNNNNNNNNNNNNNNNNNNNNNNNNNNNNNNNNNNNNNNNNNNNNNNNNNNNNNNNNNNN
NNNNNNNNNNNNNNNNNNNNNNNNNNNNNNNNNNNNNNNNNNNNNNNNNNNNNNNNNNNNNNNNNNNNNNNNNNNNNNNNNNNNNNNNNNNNNN
NNNNNNNNNNNNNNNNNNNNNNNNNNNNNNNNNNNNNNNNNNNNNNNNNNNNNNNNNNNNNNNNNNNNNNNNNNNNNNNNNNNNNNNNNNNNNN
NNNNNNNNNNNNNNNNNNNNNNNNNNNNNNNNNNNNNNNNNNNNNNNNNNNNNNNNNNNNNNNNNNNNNNNNNNNNNNNNNNNNNNNNNNNNNN
NNNNNNNNNNNNNNNNNNNNNNNNNNNNNNNNNNNNNNNNNNNNNNNNNNNNNNNNNNNNNNNNNNNNNNNNNNNNNNNNNNNNNNNNNNNNNN
NNNNNNNNNNNNNNNNNNNNNNNNNNNNNNNNNNNNNNNNNNNNNNNNNNNNNNNNNNNNNNNNNNNNNNNNNNNNNNNNNNNNNNNNNNNNNN
NNNNNNNNNNNNNNNNNNNNNNNNNNNNNNNNNNNNNNNNNNNNNNNNNNNNNNNNNNNNNNNNNNNNNNNNNNNNNNNNNNNNNNNNNNNNNN
NNNNNNNNNNNNNNNNNNNNNNNNNNNNNNNNNNNNNNNNNNNNNNNNNNNNNNNNNNNNNNNNNNNNNNNNNNNNNNNNNNNNNNNNNNNNNN
NGGGAGCCTTGGCCCAGGGAGGCCAGTGCTGGCCCAGGCTGGGCTGGCCTGCTGCCCATCTCCCAGTCCTGGACCAGCCTCCTTCCTCTACTGC
ATGTCACAGCCAGCGTCTCTGCTATATCCCTGGCCAGGTGCCCGGCCTTTCAACAGGAGCAAGGGAAGGAGGAGGGAGAAAAACCATTAGTGTT
TGCCGGCTGCAGGCGTGGCTCACGTGGCTGCAGCCACAGGATGAAACTCCTAGTCTAAGGATGGGGCTATGTTCCAAAACATAGCGAGCTCTAA
GTAGACGGCGATGCCTACCCCTTTAAAGACAAACTAGGAACAAGTAATAAAAAATTAACAGCATTAGTGAAAATGAAAGCAAGAGGAGTCTGAG
ATCTGATTGGCATAACACGGGCATTTTCACTGGTGTGGCTTGTTCTTGTTTGACACACACACACACACACACACACACACACACACACACGCTC
GCGCGCGTGCGCGCGCATGCTTTTGTAAGGATAAAAAGTTTCAGCCTCACTTTCTAAGGCATAGTTTAAACATCTGCATTTTGGGATCATTTTG
AGGGCGGCCTCAGCAGTTACCTGAGGTCTGAAGTGCTTAGGGTCCACTGCCTAACTTTGGCTGCCAGTCCTTCTGCTAGGACCCAAGAAAAGGC
TTGGGGTGGGGTGGGGTGGCTGGACCTTTCAGAGAAGGAATGGCAGGAGAACACTAATTTTATTTGGTGGGGGTTTGTCCAGAGGACCTTACAA
TGTGATGTCAAGTTGGACAGTTAAAATTCTAGCTGAAAGTAAGATTGTAGGCTTCTCCCAAGAGGCTGTCCTCCACCCTGGTTGGCAGAGAGAG
GGGAAATGGAATGAATTCCTCCCACCGTGAATCACAAAGGCCAGGTGCAGAGAAATGGGTGCAGCGAGGGTGTGCCTCCTCCCAGCTTCTCCCC
AGGCCCAGGCAGGGCCCTCCTGCCCTAGCTGTTTCCATCACCCCAAGGCAGGGTTCAGACCTTACGGTGACCTCACAACTGGAGGAGCTGGATG
TGGATTGGAAGTGACTGGTTACAGGGTCTTCCATTCTTAATGCTCTTCCTGGGCAAAAGATAAGGGCTCAGCCTAAGTCAGGACACGGGGTCCT
TTGAGTAACCTGAGGGTTCTCTGTCTTTGTCTGCACATGGGTTTACACACGTTAGAGGGATTCTGTGTGAAAGGGGAGGGAAGAGTTCATACAA
CACTCCTGGAGGCTCAGGGCGGGCCCAGGGGCTCAGGAAAGACTAGGTGCGTTCTGGATGGGATGAAGACCCCCGTTTGTCTGGCTGGTAGCTG
TCTCTTGGGCCTTGTAAGCAGGCAAGGGCGACTGGCTAACTGCCAGGGCTCAGGTCCCACTGGTCCCTGTCCCTTCTCCAACTCCTGATATCTC
TTGGGGGTTGGATCTGATAAATATTGGCCTTTAAGAGAGAGCAATGGCTCAAGAGGGCAGTGGAATTTCAGATGTCTAGGGGAAATTATGTCTA
TCATTAAGTTCTGGGAGAATCAGGTGGAGAAAGCAGAAAAGGCAGGTGGCAAAGGCCAGGTCAGGGCCCAGGAAGGCACTCAGGTGTTTCGAGT
TTGGACTCAAGCCTTAGCAAAATGCTTGTCTTTGGAGTATCTTTACAGTTATGGAATGTCAGGCTAGAAGAGACCTCAGATCAGCAGCTTAAAA
CTGTGTTTCTGTCACTATGCTCCAACCCTACGGTTGGTCACCTACGGTTCAGCTAGGGACACTGAGGCTCCAAGAGTCTCAGAGGGCAGACCAG
AATAGACCAGCACAGTGATGAGATGATGAGATGAGTCCTCACAGTTAAGATCATTGCTCTCATCTCCCTTGGTGACTCTCCCTTGATGGAAGTG
GTCCTGTAAGTGAAGCCTGCCTCTTTTGTAACACTGTCTCATTTTGATGTGCTAGCTGCACAGTTCGGCTTGATGCATTTCTCTGTATTGGACT
CATTCATGAATGTTACTTTGCTTAATACATTTTAAGACTATTACAGTGTATCAGGGCCAAGAGGATGGCTCAGTCAGTAGATTATGTATCTGTT
ACACAAGCACAAAGACCTGTGTTTGATCCTTAGGACACACATAAAAAAATTATCTGGTAGTATAGTTTTGAAATACCAGTGTTGAGGATGGAAA
GACAGGCAGGCCCCCGAAGTTCACTGACCAGCCAGCCTAGCCTAAAATAAGCTATAGGTTCCAATGAAAGACCCTATAACAAGACATAGTTCCT
AAGGAACAACATACAGGATTGATCCCTGCCCATCTAGTGCATGTGTTCACACCTGAACAGGAATGCGTGAGGGGGTGCCCTTGGGAGCCAGTGT
GCCTTGGGGACCATTGTTTTTGCCATATCAACCTGAAGTCTTGATATAGGCTCCACTCACCAAGCCTTGGTTTCTTGTCCCAGGTGGTCTTGGG
TCGCACCTGTCCTAGTTTGTCACATACAGGGTCTGTGAACATATCACTCGTGAGCTCCACCCAGGGCAACTGGAGCTGAGGGTGGGCAGATATG
GGAATGGGACAATGATGAGAGATCTGAAGGGACACACACAGCAAGAGATGATCTGTGGAAAGGTCCTGAGTAGCATCAGGAAGGGGCAGCTGTC
CACAGGCTAAGCCAACAAGCTTGTGGCATGTCGTTGTGTCATGTGCCCCTGGAGCTTGGACACAAGGTGCCTAAAAGGTGGCATCTCCCAGAGA
TGCCTTTTTGTTCTGGGTGTTGGGACTCAGGTAGGGGTAGAAGAATCCAGTGCAGTGAGAAGGACAGTGCTGTGCCCCTTGGTTCTTGTCAGAG
CAGAGCAGATGCCCCAGATTTAAGAACTTTTGCAGCTCAAGGTGTCAGCCAGACCAGGAAGCCACTTCTAACCTCACTCGCATTGTTGGGGCTC
ATTTTGTGTTTTTGTAGGACTGAGTTCTCCAGGACTGGGTGGCTGTGGCTTAGGGTAGCCCCTGAGAGTCCCTCTGTGGTCTCAGAGCCAGAAA
CTCGGAGGCAAACTCCATGCTTTGGATCCAACTTCTGAAAGCACACATGAGTAGCATAAACTTAGAACTCCAGACTCAGTGTATGCCCCAAAGT
CCTGACATTCTGGGCATAGTTTTGGACCTCAGAACTCTGGGAATACCTCAGAATTTGAGGTGCTGCTAGATTCTGGGCTTGGAGAGGCTTCTGG
GGATAGGGGATGGAGTCAGGCAGCTGTGTGTGCTAGAGAGCAGCTGTACTCAGCCTAAGCTGTAGAAACCTGGTGGGCATAGGGACCGCTGAAT
CATACTCCTGTGCAGTGTCTCAGTGCTAATCTCGTGCCCATGCTCCCAATGGGACAAGAAATAACATTCTCACCCCCAGCTCTGCTCATTGCCA
TGGGACCTCACCCTGGATCACAAAAGGAGATGACACGCTGCTGTTACAGCCACATCACTGAGGGAAGACAGCTATCATCATAGTGGGTGAGAAC
TGGAGAAGAAGTTACAGATGCTGTTGCTGTTTAGCGTAGCCTATAGAAGTCTAGCACACACAATAGCAGGACCTCCCCCCGCCCCTAAAAAATT
CCACCTTGCTCGCCTTCCTATAGCTCAGCTGATTTGGTTCCTCATAGCTGTGCTGTCTCCACTTTCCTTCTGGGCTGTTTTGTTTAGTTTTTCA
TTTTAAATATATTTTATTTATTTATTGTATGTGTTCATTTGCACTTGTGCACAGGCCACAGCATGCTTGGGGTGGGGGGTTGGAGGACAACTTC
AGGAATCTGTTCTCTCCGTCCACAGTGTAGATTCTAGGGAATCAATGATGTTTGTCAGGCTTGGCAATAGGCACCTTTAGTCACTGAAATCTCT
CTCCCACCCTGGAATGTGTCTTGATGACTGTACAAAGGGCTCCTGGCACTCACCTTGGAGACAGTGTCCCCTCATTCTGATGTTAAGAAAGAGT
AAACCAGTACATACTTGTGGTCCCCGGTGAGGGAGGTTGAGTCTAAAGAATCATGAGTTTGAGGCTAGTCTGAGCTACCTAGCCCGGGCTAGCC
TGAGCTAGGCTGAGCTTGTTGCTTAGTAGTAGTTGCCTGGCTGGGGCAAGTCTCATTAGTGGAGAAGGAGGAGGAGGGAGAGAGCCAGGAAATG
GTAAGTTAGCCAGAAGTTTAGGAGAACACTTGAGAAAGTCCTGGGGAGGGTCAGAAATTCATTGGCTACATGAAGAATTAGAGACTGGGATATA
TGGGACTCTGTCTCAAAAACAGAAAAATAAATAAATGAATAAATGTTTGACTTTGTACAGCTTTCCTTCTGTATTCTGTAGGCACAGGCTTAGC
CAGCTGAAAATTGAACATGTTTGGAAAAACTGGGCATGGTAGCACATGCCTTCAATTCCAGCACTCTGGAGGAGGCAGAGGCAGGTGGATCTCT
GTGAGTTTGAGGCTAGCCTGGTCTAGAGAGTGAGTTCCAGGGTGGAGTTTAGTTAGTAGAATGCTTGCCTCACACACACTTGGGAAGTAGAGAC
AGGGGGAGGAGGATTTTAAGGTCATCTTTAGCAACTTAGCAAACTGGAAGTTAGTCTGCACTACATGAGAGACAGACAGGCAGGCAGGCAGACA
GACAGACAGAACTAAACAAACTAATACAAACCTAAGCTGACCATCACAGCCCAGCTGAAGTCCAGAAGTTTATCGAACCTCCTCAACCCTGCCT
GCCCGTCTCCATCGTATGACAGCCACCCTGTTCAGTCTTCAGCATTCCTTCCCACAAGGCCTCTGTGCCTGGGCTTTCCTGATGGTCCAGCTCT
CAGGGAACAAGAAATGATCCAGGCTGCGATTCAAGGCACTTCAGAGGCTCTTGGGTCCAGAGAATGTTCTCTTCCACCTTTCTAAGTCCATGAG
AGAGAGCAGGAGGGATCCTGCTGGTGCTGCCCACACCCTGGCCTCCTAGCTAGGGGAGGTGGCGAGCAGGGACCTGCCCAGAGGAAGGGAAGCA
GAGAAGGCTGACTCAGCATCTCCAGAGGAAGGGGGCTGGGGCGCTGCCATGGACCTGGGAAGTCCCTTCTCTGCCTTCCTTGGGGGCCACTCCC
AGCAAGGTGGGTGGGGAGCTGAGGTCTGACCACTCCATGCCATTGGAAGGAGCCCCCTCTTCAGCAGCATCCTCTTCTTCCGAACCCACATCAT
CAGCACCCAGGATGAGTGCTGGTTTCTGGCATCTAACAAAGGAGACCACCTACTCTTGGGAACTGGCCACTGGCCTAGGCAGTTCCTCCTGGGA
AGACAGAAATGGCCAGGTTCTGGCCAGGTTCTCTTTTTCTGCTATTTGAGAATGGTCATGCTTTCCATTGTCTCTAAGTCTCCTAGTTAACTGC
ATTCACAGAGTGAAGATTGTCTTCTTTTTGGATGGATAGACAGATGCCCTTACCCTCTTTCTGGGAGCTATGAATGTGGCTCAGTGGGTAGAAT
GAATGCCTAGCATCTGTGAAGTCCTATGTTTGATCCCTGGCACTGCAGAGGCAGATGGATCTCTGTGAATTTGAGGCCAGCCTGATCTACATAG
TGAGCTCCAAAACAGCCAGGGCTATGTAGAGAAAACTTGTTTCCAAAAAACCACAAGAGGCTGGGCGATGGTGGCACACACCTTTAATCCCAGC
ACTTGGGAGGCAGAGGCAGGCGGATTTCTGAGTTCGAGGCCAGTCTGGTCTACAAAGTGAGTTCCAGGACAGCTAGGGCTACACAGAGAAACTC
TGTCTCAAAAAACGAAAACAAACAAACAAACAAAAATAGAGGAGGAAGAGGAGGAGGAGAAGGAAGACGAGGAGGAAAGGAGTAAGGTAGGGGG
AGGGGGGACATTGCCCAGGCCAAAGGAAAATCTTGCTTTGCCACAGGTAGGAGAGTCTTGGTGAGTGTGGGTGCAGTGGGCAGTGGGGTTCATG
GGTGCTGAAAGAAGGAGAGCTGAAGTACTTCTGGATGTGGGTAACAGGCAGAGAGCAGATGAGCCTGATGGGACATGATGGGACCTCTGGTTTT
AGGGTGACTAGCCAAAAGTGACAAGGTACAGCAGTGGCTTTCCACCTTGGTCTAGTTTCTTCCTCTCTACTCAGAGCACCTAGCCAGGCCCCTC
CTCTCTGCCATCCTTGAGGGCAAGGAGCACAGATCCCAGTCCACTCCATATGGACGTGTCTCAGCTCTCAAGCCAGGACCTTGGACAGTGATTT
CTTCATTTCCCACCAAGTGTCTGCTCTCCCCATACTCAGAAGTGCCTCTGTGGCCCATCTAGTGCCACCAGGGACACACAGACAGCCATGGTGG
TCTGTACCTAGAGAAGAAAGTGCTGATTCCGCCTGCAGGCAGGGAGGAGGGCATCTCTGAGCCAGACTAACCATGGAGGTCAGGGGCCTGGAGA
GGAGAGACAGCTGCTGAGAGTGGAAGCAATCCCCAGCCTACACAGGGCTGGACTTCTTATGAACGTGGGGCAAAGAGAGGAAGGATAAAGGAGC
AAAGAGCAGGCTCTGTCATGGTGTGCACAGGGATGCACGCTGCACCTAGGCCAGGCATGTGATGATGTGTGACGCAGGTCTCTGGAGTATTTCA
GGAGATAAGAGAGGCCAGCTCTATGGGAAGTAGACCACAAGGATGGATGTGCTGGGGACAGCCAAATCTCTGCATGTGAGGGTTCTACAGTCAC
AGACTTAGCTCCAGAAAAGTCCTAAGTGTTTGGAAAAGCCGTGTACAGCAACACAGACCTGTAATCCCAGGATGCTGAGACTACACAGTGAGAA
CCAGGTCAGCCAGTGGTACATAACAAGACCTTGTCTCAAAGAAAGGAAAGAGGAGAGATGGGTGTTGGAAGCCAGGCCCAGGGGCTCGTGCCTG
TAACTCCAGCCAGAGGCTCAGAAGATCAAGGTCGGCACTGGCTACACAGCAAGTTTGAAGCTAGTCTAGGCTACATGAGACCCTGTCTCAAAAA
TAAGAAAAACAAGGGCTGGAGAGATGACTCAGCAGTTAAAGATCGCTAACTGCTCTTCCAGAGGTCCTGAGTTCAGTTCCAGGCAACCACATGG
TGGCTCACAACCATCTGTAATGGGATCTGATGCCCTCTTCTGGTGTGTCTGAAGAGAGCAATGGTGTACTCATGTACATAAAACAAATAAGTAA
ATCTCTTTAAAAAAAATAAGAAAAACATGAAAATGAACATGGTGGGGGGAGAGGGAGAGAGAGAAACACTATTTGGGAAGGTTGCTGCATGTGT
ACTGACCGACTGACCGTGTGTGGGCTTCCGGTGCTGGCTTTCCCTGCAGTGTAGTGTGACAGTCTGTGGCCTTAGAATCCTTGTCATCTAGGTT
TGGCATGGACAGAAAGGTGTGTGGACTATGTGCAAATACCATGCTACTTAATACAAAAGATCCAAATGTCTGCTGTGAGCGTGTGGGTACGTGT
GTGTGTGTGTAGGCCAAAAGTTGATGTTGGATGTCTTCCGTCACTCCCCACTTTGATTTTCGGTACAGGGTCTGTCACTGAACCCAGAACTCCC
CTGGCTGCCTTTGCTCCCCACCTCAGTGCTATGGCTGCAGACATTTGCCAACCTGGTTTTTACATGGGTGCTAAGGATTGTATCTCAGGTCCTC
ACACTCACCTGGCAGGCATTTGACCAACACCTTCCTCCCCATCCCCTCCTCACATGTTTTTTTAGAGGACATTTGCTTCTCCCCCTCCCCCACG
CCTGAGTTGGCTAGTGCCCCACTCCACTGAGACACCTCAGCAGCCATCCTCATCCTATGTTCTCCGTCAGTGTCTGTATCCTCCAATGCCTATA
GAGGTCTTAGCCACAAGCTGAGGGTCCCAGGAATGCAGGTCTGGTTCTTACACACCGTGAGTCATGACAGTGTGACATGTGGTCTACATCCTGG
GTACATGGTCAACATGCTGTCTCTAGGTGCCCTTCCTGTCGGAAGCAGCTCCGGGCCGATCACATGCACATAGCCCAGAGTCTGTCCGTTTCCA
GAGATGGTCTCAATCACCTCCTTGTCTTTCCACCAGGTCCTTGGCTGTGGGACCCCAGTACTCCTCTCTGAGCACTCAGCCCATTCTCTGTGCC
AGCATCCCAGGCCTGGTGCCCAAGCAGCTGCGCTTCTGCAGGAACTACGTGGAGATCATGCCCAGCGTGGCTGAGGGTGTCAAAGCGGGCATCC
AGGAGTGCCAGCACCAGTTCCGAGGCCCGGCGTTGGAACTGCACCACCGTCAGCAACAGCCTGGCCATCTTTGGCCCTGTTCTGGACAAAGGTA
CCCTGGGGTGGTTAGGGTCATCTCTATATGGACATCATAAGGCCTTCCAAACTCTAACCTGGCTGGGCTTGCTCCTCCCGACCAATGGAGGGCC
TTGGAGAAGAAAGGGGGAGGGGAAGGGAACCGTAAGCCCACCAGGCGGGCGGGAGAGGCTTGGAGTATGTTGGGGAGGTGGTTCACCAGCCAGC
ACCCCTGGGCTGGTTTGGAAAGGAGAGACCGGCAGGAGAGCTAGGTGTTAGTTAGCTGCTGGCAAAGAGCAAATTATCCTAAAGTGTAGTGGTT
AAGGCAGTAATTACCATGTGTTGACCTCCTGCTGCCGGGGGTCAGGGGCTGGGTTGGCTCTGCTTCCCATCCACAGGGAGGGAGGTCCATGGGA
GGCTGTCTCAGCACCAGTTGCTAGAGAGGGCTCTGAAGTGGGGCAAAGGCTTCTTTCTGTGGTCTCTGGGACCCAGGTCTGAGACAGAGAGGGA
GACAGAGATAGAGGAGGCAGAATCAGAGAGGCAGAGAAATAGAAGAGAGACAAAGATGGCAGAGACTGGGTGGGGGGGAGGGGGCCGAAAGGAG
AGAGAACACACACCAAATGAAAGCTTTCATGCCTTGAACAAGAAGGGAAAATCATATAATTTAAATCACTTTAGAACATACAATCTCAGCACAC
TTAGCACACCCACAGAATTGCGACACTACCACTCCTAATTCCAAAATATTTTCATCCTCTCGAAAGGAAATCCCAAACCCATTATGCAGTGCCC
CTGGCAACCACTGGTTTGCTTCCTACCCCTGTGGTTTTCTTATTCTGGACATTTCCTCTCTGTGTAATTATGCACTCTGTGGCCCTTTGTAGCT
GGCTCCTTTCACTGAGTGTGAGGTTTACAAAGTTCATCTATGTTGCCACACATATCAATGCTTCATTCCTTTTGATGACTGAATACTATTCCAT
TTCAGTGTGTGTGTGTGTGTGTGTGCACGTACTCGTGTGCACCTTAAATTTTACATGTCAAAAAAAGAATTTTATATGTAAAAGATGATGCCAT
CTGTGGATTTCATTTCTTTTATTGGTATATGTTTATTGTATTGGGTTTTATGTATATCTTCATACACATATAGAATGTATTTTGACCTGACTTA
ATTCTGCTGCCCAGGACATCAGTCCCCTGTGGGACCAAAGTGGAGAGAGTGGGTCAAAACTCTAAGCAGTGGATGTCCGTGTTTCCTGAGTCAC
CCAGCCTTTGTGTTTGCTGCAGAGGTCAAAATACAGCACCTGTGGCTTTGCAAGCCTGGCTAGGAAGCATGGACACTGAACTGTCCCCAAGGAG
AACAGCATTGTGGAGAAGAGGCTGGGGCTGGGTTCCTGCAGTGGTCTTCCTGTGACCCTGAAGGTGTTTAAATTCTTTCTTCTGGTGAGGTCAA
AGCAGATGACCTCATGAGCCTTTGGGGTGGAAGTAACTCTGTTCCCTGCAGTCTGACCCTCCCCTGACTTTCACTTCCAGCAGTCCACTGTCGG
CATGGCTCCACCCAGTCCCATCAGCCTCCATTCACAAGCCAGCTCTTCACTTCATATAATGACATCATGCCACCAGTCCTGACCCTATGGTTCC
TCTGACCCCCTTTCACCTAACGTCATGACCCACCATTGATTGTCCTTCCTGGTGGCATTCACCAGCTCACTTCCAGGGGTGTTAGCGTCCCTAT
CTATAAAATGGGAAAGTAATTGCAGCTTGCAACTTGAGAGCTGTGAGTCAGGCTAATTACACAGTTGCTCCCCACAGAACAGCACTGCTGTATA
CAGGGGAGGATCAAGTCCCTAGGCCGGTACAGTTTACCAAGCATGCCTTATAGTATGTGCACGGGTGGTCCATCCTGTGTCTTCATGGGAATGT
GATGTGTGTACGTGCAGCAGTAAAAATGCTAGTGTGTACACATGTTTTCCTACATGACCACATATGAGCAGCACACGTGTATTCTGTTGCTTTT
TGTTTTTGTTTTTGTCTATTTGTGTTTTGTTGCTATTACAATGTACCTGATACTAATAATTTGAAGAGGGAAGATCGATTTTGGCTCTTGGTTT
CCGAGGGTTCAGCCCATGGTTAGAAGACTTCACTGCCTTAGGCAAGGCAGTCACAAGGTAACTGGAATGTGTTACCAAAGGTTTCTTCCTTCAC
TGGAACCAGAAAGCACAGAAAGCAACAGGAAGGAGCCAGAGGTGAATATCTTTCTAGGACATACCCCAAGCACGCTTCTACCTTCTTCCCCCAT
GAGCTCCCTGTCTCTTAATGATACCACGATATCCTCACTCTGTCAAGTCTGCTCATTAGTTCCAAGCTCAGGTTCCAATCACCTCAACAGTCCT
TCCCAGACAACACTCCATTTCAAAACATAGCAGCACGTGTGGTTATGGTATGTACATACGTGTGCACACATGGCTTCAGAGTGGGGCTGCACTC
ACATGTGAATCTGTGTGCACAGGTGTGGGAGGAGCTGAGAGTTCTACATCTTCATCTGAAGGCTGTCAGCAGAATACTCACTTCCAGGCAGCTA
GGACAAGGGTCTTAAATCCACGCCCACAGTGACACACCTACTCCAACAAGGCCGGCCATGCCTTCTAATAGTGTCACTGCCCAGGCCAAGCATA
TTCAAACCACGACAGTTGAGGAGCCTTTAGAGATCCTGAGAAGCTGGCCTTTGAAGGTTTCTGCCTGAAGTCTGTGCTGCAGTGAACAAGCCTG
ACTCCCATTACCACAGACAGAGCCCCTCCAACCTCCTGCTTCTCTGTGATTGACTGAAATGAGCCAAACATTACTTCTGTTGGGTATTTTATCA
CAGCAATTATAACTAATACATCCACCTCCATGGGGGAGTCTGTGGGAGCATGCACACACACCACCTCCCTCACAATGCTAAAGTGAGTCTCTCA
CAGGAGCAAGGAGGGCACCCCATGATTCGCCAACTATGTTTAGAGCTGAGGAAGGGGCAGGCTTTTATATCCTGTCATGCTAACAGAGCGGGTA
GCGCTCAGTTTCTCCTCTTCACCAGCACTCGGTATTGTTATTTTCTTGCAGCTGTCTTCATGGGCGTGAGCATTTTTTCTTGAATTTATCAGTT
ATGTGTGCCCTTTATAAAAAAATCTATCTATTCAGTTCTTCTATTCATGTTTTAATAAGGTTATTTCTATTTAGTTTGAGTTTTGATTATTTGT
GTTTTCCTTAATCATAGTTTTAGTTTCTCTCTCTCTCTCTCTCTCTCTCTCTCTCTCTCTGTGTGTGTGTGTGTATGTGAATGCTTATGTCTGC
CTTGGTGAATATGTGAAAGTCAGACAGTCCGAATCTGGTTCTCTTCCTAACCTGTGGATCCCAGGGATTGAACTCAGATCGAATTGGGTTCANN
NNNNNNNNNNNNNNNNNNCAAGCCTCCACAACATGGAGACAAAAACATGCAGACATTTAAAGTATTTTTTTATTTTTACTTTTAAAAAATGTAA
AAATTCTTTTAGTGTATAGCCTGTGTATGGTTTAGTGTACCTGTGTGAAGGTGCCCTTGGAGGCCAAACAGGGTCCAGACCCTCCCTGAGCTGG
AGTTACTGGCAGTTGTAGCTGTCCAGTATGGGTGCTGGGAACTGCACTTGGTCCTCTGCGAGAGCAGCCCATCTATCAACTGCTGACTGGTCTC
TCTAGCCTCCTACAGGAGTCTTTAACTTTGATGACAAGTCCCCAACTCTCTCTTTGGCTTTTTAGCGCTAAGAAAATCTGGCTGAACCCAAGGT
CACAGATGTTTGCTCCTCCCTGAGCCCCCCACGCCCGAGACAGGGTTTTTCTGTGTAGCTCTGTCTGTCCTAGAACTCACTTTGTAGACCAGGC
TGGCGTCGAACTCACAAAGATCCACCTGCCTCTGCCCCTCGAGTGATGGGATTAAAGCGGTGCACCACCATATCAGCTACAGAAAGCCTGCTTT
TTCTGTTTCCTCGAAAGAGTCTTATAGCTTCAAGCCAGAAGTGATGGCATGTGGCTCTATTCCTACTCAGCAGTCAGAAACCTGAGCTCTATAC
ATTTGAGAACAACCTGGTCTATATCCTGGTCTGTATGGTGACTTCCAGACCAGTCAGGGCTCAGCTCACAGTGCTTTTACATCAAAAAAAAAAA
AAAAGAAAAGTCCTATAGCTTTTAATCTGACATTAGGTCTATGATTTTGTTTTAATATTTTGATTAAATTTATATTTTGTGTGTATGGGTGTTT
GCATACATGTATGTTTATGTACCACATGCCTGGTGCTCACAGAGGTTAGAAGATCCCCTGGGACTGGAGTTATATACAGTTGTTGCCATGTGGC
TGCTGAAAATTGAACCCAGGTGCTCTGGGAGATCAGCCAGTGTTTTTAACCCCTGAACCATCTCTCCAGCCCTGCTTGATATATATATATATAT
TATGTTATTTTTATTTGTGGTATGAGAATGGGATCCAACTTCATCTTTTTTTCTTTTTTAACTTTGGCTTGTTTGTTTCTTTTTTCAAAATAAA
GTTTCTTTGTGAAGACCCGGTCGTCCTGGAACTCACCATGTAGACCAGGCTGGACTCCAACTTAAAAGAGATCCATCTGCCTCTGCCACGTGCT
GGAATTTAAAGCTTGTACCACCACCACCCACCTCCAACTTCATTCTTTTTTTTATTTTCATTTTTATTTTTTTCTTTTTAGTATAGAATAGAGT
TTATTTAGGGCATGGGGAGGGGAGCTAAGAGAGTAGTAGAGGCAGAGAAAGGCGGAGAGAAGGAGAGAGTAGAGAAGTGGAGGCCAGCCATGAC
CACGTGGAGAGAGGGGGGACAAGGGGACAAGAGGCAAGAGCATAAGCAAGCAAAGCTCCAACTTCATTCTTTACTGTGTTGAAATGCAGTTATT
CAAACAGCGTTTGTTATAAAGAGTATTGTTCCTTCTTGAATGGCCTTAGCTCACTCATTGAAAATCACCTGGCTTTGTATGTTTGCATTGATGA
ACATATAGGCTGTTTGCTCCATTCCACTGGTCACTGAGTATTATCATAGCAGTGTCATGCAGTTTTCCTGTCTATAGCTTTGTCCTGTGTTTTT
TTTTTAAACTCAAAGTTGCTTTGGTATCTGAGGCCGTTTATGTATGTTATCATATGTATGTTAGGATCCACTGGTAATGTCCGTTTTTTTAGAC
TTATTATTTTTAGTGTGTACGAGTATTTTGCCTACATGTGTGTATGTGTACCATGTGTGTTCTTGGTGCTCACAGAGATCAAAAGAGAACATTG
GATCTGCTGGAACTAGAGTTATAGATAGTGGTGAGCTGCCATGTGGTACTGGAAACTGAACCCAGGTCCTCTGGAAAAGCAGCCAGTGCTCTCG
ATTCCTAAACCATCTCTTCAGCTCCCAGTTGGATAAAATCTTGGAGATCTTAGGGACTGTGTGGGAGAAGGGGGGGGGGAGAAGAAGGGGGAAG
AAGGAGAAGGGGAAGGAAGAGGGAGAGGAGGAAGAAGAGGAGGAGGAAGATGAGGAGGAAGGGAAAGAGGAGGAAGAGAAAGAAAAGGAGGAGG
AAGAGGAGGAAGAGGAGGGAGAGGAGAAAGGGGAGAGGAGAAGGAGGAAGAGGAAGCAGGAGAAAGAAGAGAGGAGAAGGAGGAAGAGGNNNNN
NNNNNNNNNNNNNNNNNNNNNNNNNNNNNNNNNNNNNNNNNNNNNNNNNNNNNNNNNNNNNNNNNNNNNNNNNNNNNNNNNNNNNNNNNNNNNN
NNNNNNNNNNNNNNNNNNNNNNNNNNNNNNNNNNNNNNNNNNNNNNNNNNNNNNNNNNNNNNNNNNNNNNNNNNNNNNNNNNNNNNNNNNNNNN
NNNNNNNNNNNNNNNNNNNNNNNNNNNNNNNNNNNNNNNNNNNNNNNNNNNNNNNNNNNNNNNNNNNNNNNNNNNNNTCACAGCCCTACTGCAT
CAGTGACACTTGGCGGCTCCCATCTCTGAGTCTTGTACATTGTTTTCTAAATTGTTCCCGAGCATTTCTTCCATTGTTATCTACCGTGACATTC
TTTTCTTTTTAAAAATTAATTAATTTTATGTCCCTGAGTGCTTTTGGGCACCACTGTCATGCCTAGTGCCAAGGAGATCAGAAGAAGGTGTCGG
TTTTCCCGGAACTGGAGTTACAGATAGTTGTGAACTGCCACGTGGGTGCTGGGAACTGAACCTGGGTCCTCTCCAGGAGCAACTAGTCTCTCTC
CTGGGATAACCATCTCTTAGCCCCATCTTGCTTTTCTTACTCTGTAGACCAGGCTAACTTCTAACTCACAGAGATCACCTGCCTCTGTCATCCA
AGTGCTGGGATTAAAGGAGCACACAAGGCTTCCTGCTCATCATTGTTTTATTTCCGTTTTGTATTGTGTTTGGATTGTTTGTTGCTAGGAGGCA
GAGATTTGTTGAGCTCAATGAGGTGCAGTACAATTGACCAGCTGCTCCGTGACCTGGCTGAAGCTATTGATAGGCTCCAACAGGTTGTTTGTTG
TCTACTATTGGTTCCTTGGGCTGCTCTACGCATAGGGTGATCTCACCTCTTCCTCCCATGCTGGATGCTCTTTATTCCTTTACTTGATATCCAG
GGTGAGAGCATCCATATTTTCCCAACCTTGAAGTGACTGCTTTCTGCCTTCCCCATAGACAGTGATAGCTGTGGGTCCATCCAGGTTTTAATTT
TGTAGATTCAGAAGTAAGAACCCTTTACTCGTGTATAAGTAGATAAAGGATTTTTTTAAAAAAATATTTTATTTATTTTTATTTTGTGCATATG
GGTGTTTTGCCTATATATACACCTATGTGCCACATTCATGCAGTGTTCACAGTGTCCAGAAGAGGGCGTTGAGTCCCTGGAGCTAGCGTTAAAG
ATGGTTGTGAGACACCATGTGGGTGCTGGGAATAGAACCTGGGGCCTCTGGAAGAGAGGCCAGTGCTCTTTAATGGCTGAGACATCGCTCTAGC
CCTTAAAGTTAGCAGTGTTTTAAATTTTATTTGTTTTACACACACACACTCATGCACTCACACATGTGCGCACACACATGATTGTGTGCACATG
TGTGAACATGTATGCAAGTGTCTATGGAGACCAGAAAGGATCATTGGATCCTCTGGAACTGGAGTTACAGATGGTCATGAAGAGCCATTTGGGT
GTTGGATCTTCTACAAGAGAAATACACACTCTTACTGGCTAAGCTATCTTTCTAGCCCTGAGAGTTTGTTTTCAATAATCCATTCTTTTGATCT
TTTGGAATTATACCAACATTTTAATGACAATCTATTATCAAAAGGTTTATAGATGGGGCATAGTGGTATACATCTTTAATCCCAGTACTTGGAA
GTCAGAAATAGATGGATCTTTGTGAGTTCGAGGCCAGTCTGGTCTACATAGCCATGTCTCCAAAATAAAACAAGTTCTCCAAATTCATGAGCAC
ACAACTCAACTTCATTTTATTTATTTGTTTCCTTGCTTAGAGATAGCATCTTACTATGTTGTCTTGGTTCTTATTGAATGCCCCAGTTCAATGA
ATCCTACTGCCTCAACCCTCTGAGTAGCTGAGGCTACAGGCATGGGCCACCCATTCATTTTCCTTTCTTAAGTTCCACGGCAAACATAACTGGA
GGTGAGCAGAATTTCACAAGGTGCTGTAACTAGCGGCAAGCACCTCTTTCTTGATTTCTAGGACAAATTCTCTGGGGCTAAGCACATTCTAGAA
AGATCGAGAAATCGTCCAGAACCAGAGCTGGGACACGAGAGGCTCTCCAGTGGATATGTATATGATGGCAAGCGCTCCATCCCACGCTGCAGAT
GCACACAACCTATGTGCTTTCAGTCAGCACTCTGCTGGGCAGCCCCGGTGCTCTAGCCTATGCATTTTGCTCTGTGAATGTGTCAGATGACTGA
AAGACAAGGGGCTGGTGCCTGGGAATATCTTGGAAGGCTTCCTTGGGGAAGCGGCTCCAAACTCTTTGGGCAGACAGTAGTATGGTTGTGGGGA
GCCCAGGGGTGAGAGAAAAAGGAGCAGGGGAAGGCAGTGGGGCTCAGCAGTCTGACTAAACTGGAGCCTGAGGCACCGTGGAGGAAGAGAGAGG
ATGGCTGTGCCTGAGGCTAGAGCCCCGTCACATAATTTTGGGCGAGGTTAGGGGAGCTGCAGAATGTTGAGGGTCTCCCAGTATGCTCTTGGGC
AAACACAGGCTGTCTAGGGACAAGCAGCTGCCACAGGTCCTGCCCTAGAGAGCAGATAGTCACATCAGCCTTGGGGCTGAGGGCCGCGCCTGCC
CACATTCCTCTGCCTACACCCTTGCCTCCTAGAAGCCACCTGCAGGACAGAGAGAACCTAGGCTGTCTGGCCTCAGCATCCCATCCCTCTTTCC
CATGGCAGCACTGGAGGATTTCCTGCCAGACGGCAGCCTGCACCCCTGCAACTGTCCTCCCTGCAAACATGACTTAGGCCTCTCTCAGTTTGCT
GCTCCCTTCTTCACTCTGTCCCCTCCGGTCCCCAAAAGCCCCATCCTCCTCCTCCTGCTTATGCTCCCCTCCTCAGTCCTTGTTCTCCTTCTCT
TCTGGTGGCCAGGGGAGAAAGGAGCCCTCCGTGTGCCCCCAGAAAGGCTGGCTCCAGAAGTCCTTGTGCCCCCCACCCCCTGCTGCCTGCTGGC
CTCGAAGTAATCAATCTGATTGGATTAGGGTCAGGGCAACCCTAATCATGTCAAAGGTTACCCTAGGCTTTGTGGCAAGGACCACAGGGGTGCC
TGGCCACCCCTGCCGAGGTGGCCTCTGTTGAACAGAGTTTAACATCTACCAGCCAGCTGGGAGGAAGGGAGCCAGCCTCTTGCGTGCATGTGTG
CATGTATGTGAGCTTGTGCAGCCATGTGTTATAGAAAAGCGTGTGTGCATGTGTTTTATATATGCATGTGCGCATGAATGTCTTACGTGGGCCT
GCGCACTTGTGAATATGAATGTGTTTGTGCCCATGTTAGTGAATATGTCTGTCCGAATGTGTGTCATGCATGGGCATATTTCAGTGTGCATTTG
TGTGGATGTGCCTTACGTGGGTATGTGTGTAAGTATATGACTGCATGTGCTGTGTATGGATATGTGGAGATGTGTGCACGTGTCAGTGCACATA
TACATTTGTGCACCTGTGTATGTACTCACAGGTATTGATTATATATGTATAGATGTGTGAATGGTAGCTACACACAAATGCTCGTACATGTGTG
CTCAGGTGTCTGTCTCTGTGTGGGTGTGACCATGTACACGGTACAGGCGTGTGTGCATATGTATATGCATTGAGCATGCATGTGTGAATGGGTG
CCTGTGTGTATACAAGGCAAGTGTTTGCTCATATCTAATCCCAAAACCATCTGCCCTGTGTCAGCCTAAAACTCAGGATGCTAACCTGAGCGTG
AGGAAGCTCTAGCCCTTGAATGCAGAACGAGGTCCTAGAGGGCTCTGCTCTTGCACCCAAAAGTAGCAGGGAGCGACCTACCTACCTACTCGGG
ATCAGAAAGCATTTGAAGAATTTTGAGTACAGGATGATTGTGAACCGTTTATATCCCTTGAGGCAAGCCTCAGACACTTGGAGGCAGGTACTAG
GTGACTCCCCTGTATTGACCTCTGGCAAGATGAAATGGGTGGGGTGGTTGCAGGGCCAGCCTGGGCCAGAGGTAGGGGTCACAGGACGAAGGTC
AATAAAACAGCTGGTCAGGCTGGAAGGGGACAAGTGGGAGGCTCACAGGATTGGGGGGTGGGGGCAGAGTCCAGGAAGCAGGTTATTAAACACT
ATGTGTCCTTGTGAGGGGACAGCTTTCTTTTGGCTGTGTGTGACATTTGCATGTAAGACATAAAGGCACATGGTCTGGAGCCCACAGCCATGGA
AACTGGGGTCTCTACCTGCCTGTGTACGGGGGTGGCTGTGCCTGGAGTCCTCAGAAGCTCCTAGCTGGCTTCCCTATGAGGGAGGAGCATCTTC
TACCCACCTTGCAACACTCCACCCCACTTGGGGGTGGTCTCCCCAAGTCCCTAAGGACTCCTGGGGGCTCACTGCTTGTACAGGCAACCTTTAT
TCACTGCGAAGTCTTCATTTGGGCCTTGCTGGCCTGGACAGTGTCTCCAGCCAGAGCATCTTACCTCGTGTTGGGTGTGGTCCCTTCCTCCAGC
CTGTGACATACCTCCAGGCCAGCCATACCCTCAACCCATAGTGGCTGGACTTTGTTGGGTCCCCCAAACCTCTGCCACAACTATTAGCAGAGTT
GGTTGCTTTTGAACATCAGACTCTCAGTATCTGCTGAACTCACCCCAAGCCCTACTTGGCTTCTGGGCAGGGAACAACAGCTTGGCCTCTTCCC
CTCCCCCAGGCAAAACCCCTTCCTGATGACTGGCCTCAGCTTCGTGGCTCCTCAGGGGGTGGTCCTCCACCTCTCTGTGTGCTCAGCCTATGGA
AGGATCGACTCCAATGAGACTAGCCTGCAAGACAGCCGGAGCTTAGGGGTTCCGGAGGGACAGAAAGGGCAGCTTTTTAGGGAAGCAGAGTCCC
CAAATCCAGGTTGCGACCCCTGACCCCCCCATCCGAAAGTGTTACCATTTACGATGCGTTGGGGGTGGGGGGGCTCCCCTGGCTCCGGGGGCCT
CTCCGGTATATCATTAACTCTCCGCTGTGGGAGGGGGGACCCCGGCCGATATCCCACTGCGCTCGGCTCGGAGCACAATGTCCCTGCGAGGACG
ACAAGATTAAGCACAAGGGAAAAGTGAAAATGCTGTTGGCGATTCACACGCCCTTCGGGGTGTTGAATTAAAGCGTCTGAAAGAGGATTTCCCC
TCGCGCCCGACGGCGCGGCGGGCAGCGCATACTTCCAGGTTGCTATGACTGGCCGGCGATCGCCTAATCACCGGCCAGGGGGAAATTCATATAA
AATATCGCTGGCCATTGTGGGGCTAACGCGGCGTGACAGTGTCGCACAAAGCCGGATTCATCAGCCCCAGCAGGTCAGCCAGGCGCCCGGCCGC
GCGGGCCCGGGCGGTGTCAGGGGCCGCGGCCACGGTGGGGCACCGGCGCATTCCGCTCTCAGGTGGCTCCGGGGCCTTTTGTGCCTCCGTGTGA
TTACCAAATGCCACCGCGACACCCCCTCCCGGCCGCCCGGCTCCTCGAGGCCAGGAAAAGGGCCTGGGGAAGGAGGGACGGTGGGCAGCCTTGG
AGGGGAGGCGCCAGGGCGGGGCCTGGGCTGCAAGCTACCAGCTGGGGCTGCTCGGTTCTCTCGTCTGCCCTCTGCCTGCTGTGCTGAACACGGG
TGGGGGAAGGGATGCCCACCCACTGAATGTGTTATGGAAGCACTTTCAGACATCGGGATGGGAATGGGATAGATAGATGGTTTGTCTTTCCTCA
GCGTGACAGGAGAGTGACACTCCCAAGGGAGGTGATGCCCCATGACCTGCAGGCTCTGGCCAGTCTGAGCAATTATGGCTATGCCATAGTTGGG
CCTTCTTCCCACCAGTGGTCGGATAGTGATCTCCCAGTTGGAGTCTGGAAATTGAGAGGACAGAGACCATCTGGAGGTTGTTGCCTGACAAACT
CAGCCCAGGCTGCCAACCCTAAGCCTTCTGTGGTCTCCAGGAGGGTGTGGTGGATGTAATGTGCAGACATAGGTAAGGGTGAACCTTCTGTCTG
CTGGGATTCCCTGGTTCTAGTCCTGTGCAGGGAAGCTTCAACAGAGATAGAGGGTCCTAAATAAACGCATACATAGCATATGATCCTAAAGGTT
CATGCACCAAACTTTGGTGCACCCAATTTCAAAAATAAATAAATAAATAAATAAATAAAAATATAAAANNNNNNNNNNNNNNNNNNNNCCAATT
TAAAAATAATAATAATAAAAATATAAAAATAAAAATAAAAATAAAAAGGTACTACTGGATTTAAAGGCACAGATTAACCTCAACTCATTAATAG
TAGGCAATTTCAATAAGCCCACACACACATGCACACACGGACACGCACACAGCTCGTACCTGGTTCTGGAGAGTAGACACCTTCCATATGATTC
ATTTCACTTCTAGTTCTGAGCCTAGTGCCTAGCTCATTATGGACTCTCATATTCTGGATAGGTGATGGACGGATGGACAGATGAATGGATGAGT
GGGTGGATGGATGATAAATGGGTAGTAGATGGATAATGAGTGCGTGATAGATGGACAGTAGACAGATAATTGAGTGGGTGGTATTTTGGTGGAG
GATGGGCGTATGATAAATAATGAACTAGATGAAGGGAAAGGAAGGAAGCCCAGATAGTGATACTTTCCTTAAACCCAGTAAGAGCGCAGCAAAG
CTGAGATTGTTTCTGCAGGGGGACTTTGCTCCCCACCTCCCAGGATCTGGGTGAAGAGACAGTGGCCTCAATTCATAATCCTCCCACGTCAGCC
TTCCTGGTGCTGGAATTACAGGCCTGAGCCATGACACCGTTTTTGGAATTTGCTTCTTTTATAGAACAACTTCTTCAGGTAGTTTCTTTTCTTT
ATCTTTACCTGTATCTGATAAATAGACAGTATCTCCAGCCCTCCAAAAGCTCTTCTTAGCTCTGCCCCCAGATGACTGGCCCAGATGGGCAACA
CTAGTCTGTAAGAGTCCTGTGCTCAGGCACCCACCCCCTCCTCATTTGATGATCAATAGCCATTTGAAGGGTCTGATGTCATGCACTTGTTTTC
TGGAGGGAGGTGTGCTCTTGGAAGCCCTCACCTTTATGCTGGCCATTTCTGCTGAGTCAACAGAAACTGAAAGGTGCTGTGTGTGCCAGGAACT
TTGCTGTGGTGTGCCCCATTCCCATTCACTCTCTGCAAAAGAGATAGCTCTGGGAGAGTGCTTCATAGCTCTGGTAGAGTGGTTCATTCACCAT
GGTTGTCCTAAAACCCTATGGGACTCTGATGGAAGCAAAGGGTTTCCTCTCTGAGAAAATGTGTTTGTTCCCAAGATCCACGTTTTGCCTCTGA
CTCCTGGGTAGACCCAATCTTGTTGGATTAAAATCCCTGCCATCCTAGGATGTCACCTAAACATTCTGGAGCCTTTCCTTTCTAGGTCTCCTGC
AGACATGTTCTCAGTTATTATTAAGTATCTTAAGTATAGCGAAGCATTGCAGGAATGGTGTGGAATCTCAGGTCCCTGTCTTCCTCTCCACACA
CACAGCCTTGCACACTGCTGTGGTACATGGTAATTGATCATGAAAGCCAACCTGACTTGGATAACCCAGGTCTTTGTGCCTCCATGTCCCTTGA
GTTCCACCATCCTTCCCTTTTGTACTGCCCAAATCATCACCATTTATAGGAAGGACCTTAATCTGGCTTTAGCAGCTGCCTCCAATTCATTTAA
GTAGAGACTATACATTTTTAGCAAGAAAACATTGAAAACGATACAATCTTTCCTAGGAGGTAGATGGTATCTATTCACTGCTAGGAATGTGAAC
TCCACTCCTTGCATAGTGTGTGATGGTGATATCTTGGGAGGTGGGGTTGGGGTGGGGAACTGCTTAAGACTTTTGGCTGCAGCTTGCCTCCATC
CTTCTTTTCCAAGCATGTTCCATTTCACATTCACCTAGCCAAATGTGGGTTTGCAGCCCACAGTTCCTCCCCTGGCTTCTCAGATGGAGTTTCT
GGACTACTTGGACTTTCTTACTTCTGGCCTTTATTTCTTCCCCAGCCTGTTGAAAGCCAGCTCCAGAACTTGCCCTGCCTTGACTTGATCGGGA
GCCCCCACCTCCTCATTTGACAGTAGAGGAAACTGAGGTTCAACAGAAAGGGAGGACTTCCCAGCCTGCTGGTGACAGAGCTGAGCAAGAATGA
ACTCTTGCCTACTTCAAGTTCTATGTTGTTCTCTCCTTCTCCCAAGGACCCTTCCCCTCGAGTGTGCCTACCAGCTCCAGGCTGTTTGCGTGTG
TCTTGATAAGCAGGGAGCCTGAAGGCCTTGTTCTGGGCAGGGCAAGGCCTAGAGTGCTGGGCCCCCTTATCTTTTGGAGCCAAGAAGGATGGGG
GAGGAGCGTTTGGGTGACACTTGAGCTGGATAAGGTAACCAAGGCTGCCTTGAGACTTGGAATGTGAGGGTGTAGGCAGAGAAGTAGACTTCTG
AGTCGCACCCAAGAGAAGGTAGCTCAAGGCCTCTGGCCCCAGACTCAGGTTCTATGCAGAAAGAAAGAAGACTGGAGTCTTAGGGGCACGAGGA
GGAGTGCCTTGGCTCCTTCAAAGATCAAATAGGGGTTAGAGATGTAGCTCAGTTGGAAGAATCTTTGCCTGGCATGGACAAAATCCCCAGGTTT
CATTTCCAACACTACGCAAAGCTAGGCGTGGTAGCACACAGCTGTAATGTTAACACCTGGTGGAGTTCAAGGTCCTTCTAGGCTACACAGTAAG
CTCCAGGCAAGCTTGGGCTGAAGTCCCTGCCAAAAAGAAAACAAGAAAGAAAAAAGAAAAATGACGGCTCGAAGGGGTAGCCTGTGCTCTGGAA
TGGAAATAAACAGTGAACAAGATGCAGATCCCACCCGTGGGGAGGATCTGGACTGGAAGTGGATTCCAGAAGACAAGTCTTCCCGAGGAATAGG
CACAGCTGACATGTTGGGTAGATAGTGCCCAGGACCTTGGCTGCCATGCTACAGAGTGAAGCTGGTAACACTGAGGCTGGGGTAGAGCTTGAGC
CCAGGGAAGAATGAAGGCTGAGTGTGACCAGAGGCCAGTGAGTGCTGAGAAGAGGAGGAAGACAAGGCTGGCGGCAGGAAACCTTTAGAGAACT
TTAGGAAGGCTGTGTATCACACTGGCTCTGGGCACGGAGCTGGGCCTGCAGTGGGTGGCTGTGTGCTTGGCCAGTGGAGGCTACTGAATACTGG
GTGACAGTTCAATTGAGAGCTTCTCTGTGGTTCTGGTAGTTCCTTGTCCATCGTAATGTGGGAAGAGTGGGAAGCAGCTGGACTCCTAGATACC
TGCAGAAGTTGTCCAGGCTCTGACAGTGCCCCAGGTTGCGGGCAGAACAGCTGGAGTCTGCTCAGAGATGAGAGTAAATGTGTGTTCTTTGATT
CTATGTGTGGACGCTGACTGAACTTTGTGGGTCAGTCTGAGTGTGAGTGTAGTTGTTTGCAGTTTCTCTGTCCCTGTTTGGGCTTTGGGACACA
CAGAGTCCCGAGAGTCTAACCTCTTAGATGCAGCTTGAGGAAATATGGAAAGCTAGTGTGTGCAGGAGGGGTGAAGAGGCCACAACTTTTTATG
AAAAGTCTCACAATCCCAAGAGGGTCACCCGGCCCAAGAAATCCTGCGCAGGCAGGCCTGCGAGGCTTTCTGTCTGGAATGGTTTCTAGCCGGG
TGTGTAAAATCTCTGCTAGTCAACAAGTCAGATTTGTATCCATCTTACTCAGAACACCGTGCTTATCATACAGCAAGCACTTGGCACACCTTTA
TCTGGTGTCAAGTAGACGAGGGAGTGTCTTCTCTTAGGAAGAAACTCCTATGCACAATTGGTGTGTGTGTGGTGGGGGGTGTGAATCAATGCAA
CCACTATAGAAATGTTTGTGGATTCTTAAAAAATGAAAAATGGAACTACCACAAGACTCTATTTCACTTCTGGACCTATATCCAGAGAACTCTA
TACTCTATCATAAGGATATTTGTACCTCCGTGTATAATGCTGCTTTATTCACTATAGCAAAGAATTGGAATTAACCTAGTTGTCCATTAGCAGA
TGAATCGATAGTGAACATTTTGCATATATATAAAAATGGATACTATTCATCTCTTGATTTATTTTTTGCTGCCTTTTGTAGTCAATATTATATT
TCGTTATCACAATATTATCATTTCAAGATCCGTCCACATGATTTGCCCTCTCAATCTGAGGCCCCTGGTCTAGACCTACAGTGGATGCCTACTG
CCGGGAATAATGCAAAGTCTGGACTGTTGTTTTTCCTGTTTATGCAGACCGGTGATAAAATATCAGATATGTTAGACACAGTCAGATTTAATGA
CCAATCTCCAAACAGAACAGTTACAGTACAGCTGTGGTANNNNNNNNNNNNNNNNNNNNCTAGTCTACTTGGCTTGCAGCAAGCTAGGTAGTTC
TGGGACCTTAATGTAGTCCTCCTTGGGACTCTCCAGGAAGACAGAAGGGATAGAGTGAATCACTCTCCATACAAAAAGGATTTAGTAGAGTGGC
TTACAAGCTGTGATCTGGATAGTACAATGGCTGTCTTCCAACAGAAAGCTCAAGAATCCGGTGTTGTCCATAGACTGGATGTCTCAGCAGCTCT
TCAGTATACACTGGAATCCCAAGAAATGGGCTCTAAACTCAGTGAAGGAATAAACTTACCAGGGAGAGTGAGGGCAAGCAGGCCAAAAGCAGAG
GTGCTTCCATGTCCTTTGCATAGGCTGTCACCAGCAGGCATGGCCCAGATTTAGGGTAGGTTTTCTGACCTCAAATGATCCAATCAAGAAAAAT
CCCTCTCAGTGTGTGCTTTGCACACCGTTGATCCCATCGCTCAGGAGGCAGAGACAGGCAGATCTCTGTGTGACCTAAGGTAGCTTGGTCTACA
TAGTGAGTTGCAGGCCAGCCAGGGCTATGTAAAGGCTCTGTCTTAAAGCAAAAAAGCCAGACAATGTTGACACACACCTTTAATTCGAGCACTT
GGGAGGCAGAGACAGGCAGATCTCTGAGTTCAAGGACAACCAGAGCTACATAGAGAAACCCTGACTCAAAACAAAAACAAACAAATCCCTCACA
GACATACCCTGCAGGTTCCCCTTTAATTAACTCTAGATATACTCAAGTTGACAACCAAGAATAGCTGTCCTGGTTGGACTTGAACTCAAAGCAA
TCCTCTTGCCTCAGTTTTCCACATGCAGGTATTACAGGTGTGTAACATAAGTTCTGGTTTAAAAATCTCTCGTTACCTTAATTTTTAATGTTTA
TTTATAGATCTAATTTTATGTCAAAGATCTAATTTTCCTTTTGTTGTTCTGAGATGGGGTATCATGTAGCACAGGTTAGCCTTGAGCTGTCTCA
AGCTAAAGATGAACCTGAAGCTCTGCTCTTCAGCTTCCACCTCTGGAGTGATGGGATTTCATTATAGGCCTTCACAAGCTCACTTCAGGCAGGG
CTGGGGTTTGATCTCTATTCCTTTGGCATGTCTCTACCCATTGAGCCATATCCCTAGCACACTCATTTTATTTGTTTTTTTGAGACAGCCTCAT
GTAGCCCAAGCTGGCCTCTATGACCTTGAATTTTTTATCTTCCCGCTTCCTCCTCCCTGATGCTGGAATTACAGAGTGTACAGCTATGCCCCAG
TTCATGTGCTGCCAGGGATGTGAACACAGGGCTCCATTCATGCCAGGCAAGCACGCTAGCAGCTGAGCTGCACCCAAGGCCCTACTTCTGTTAG
CATAATTGTAAGTATTTTTAAGGTGCTGTGCAATATTTCAGTATAGGATTATGTTTTTTAAATGACCCAATAAGGGTTCTTAACATGTCCATCA
AGAACATTCAAAATCCTTTTCAAGTGATTTTTAAAAATACGATCACTTGTCCACTGTCCTCACATGACTGTTCAGTGGCACACCAAGACCCCTT
AACCATCATCTGAAATTCAGACCCACTGATCATCTTCCCTCCACCACCGTCCCAGGCCCTGCCTCCGTAAGTAACCCATTCCACTTCCTGCTAG
GAACGGAGTGCTTTTAGATTCCACACCTGAATTAGAACATGAAGTTCTTGTCTTCCTGTGCCTGGCTCATTCACTTATGTCCTCTGGGTCTGTC
AATCCTGCTGCAAGTGACAGGGTCTCATTCTTTTGTAGTGTAGCCTTGGCTGCCCTGGAACTCACTCTGGAGACCAGGCTGGCCTCAAACTCAG
AAATCCACCTACCTCTGCCTCCCAAGTGCTGGAATTAAAGGCATGCACCACCACTGCCTGGCTAGGGTCTCGTTCTTATTTATGACTAAATAAC
ATTTCGCTGTGCACACTACAGAGCTATCGTAACAAAGCACATACATACAGTGCTGGCATAAAGGGACACACACAAGCTGACGACTCAGGACAGC
AGTTCGAGAGCTAACTCCACATAGTCCCGCCCAATTGTTTTTTCAGCAAAAGGTATGAACGTACATTGGAGAAAAAAGTCTCTCTGACGAATGG
AGCTGGGAAATTGGATATCTCTATCTACGTAAGAACAAATTCAGTCCCTCCTGTTTCCTATGCACAAAACCCAACTCCGTGTAAGACCTGAAAC
TACTGGGACAAAAAGCATAGGCCTGGGCATGGTGATGATGCCTTTGATCCCTTTTGTGAGTTCGAGGCCAGGCTGGTCTGCATAGAGCATCCCA
GGCCAGCTTGAGAGATAGAATGATTCCCTACCTCAATAACAACAACAACAACAGCAACAACAACACACACACACACACACACACACACACACAC
ACACACACACACACACACACACACACTCACTCACTCACTTAGGAAAAACACTTGGGTCATTTGGGTCAATATTCTTCATAAAAGATCCTCAGAA
GAGCAGTGGTGAGACCCTGTGAGCACTGAGTTCTCCTCTCTTGGCCCTGGTTTTGGATTCCTGCCTTTTGGACTACAACCCTCCTCACCTGGCC
TCCATAACCCCCTATCTCCTTCCTCTGCAGCCACCCGGGAGTCAGCCTTTGTCCATGCCATCGCCTCCGCTGGAGTAGCTTTCGCAGTGACACG
CTCCTGTGCAGAGGGATCAGCTGCTATCTGTGGGTGCAGCAGCCGCCTCCAGGGCTCCCCAGGCGAGGGCTGGAAGTGGGGCGGCTGTAGTGAG
GACATTGAATTTGGAGGAATGGTCTCTCGGGAGTTTGCCGATGCCAGGGAGAACCGGCCGGATGCCCGCTCTGCCATGAACCGTCACAACAATG
AGGCTGGGCGCCAGGTATGTGCACAGAAGCCCAGGGCTGTAGAGCAAGGGCTGCTTTTTCACCGGGATGTCCAGTGGGGCAGGACAAGGGGTAG
AGGGGAGGTGCTCTTGGTGACCAGGCTGCTCTGCTTGCCTTCTATCAAGGGACATTGTGCCCAGCTGTACCTCAAGTGTCCAGTGTGCTCCCAG
AGAATGCCAGACTCACCTGTGGACATAGGGTTCCTGGAAGTAGACAGGTGGCAGAAGTAGCTGCAGAGCACATAGTCTCTCAGGATTCCGCGAT
GAGGAGATGTCCATGAGAGGACAAGACGTGAAGGGAGGAGAAGAGGGATGGAGGGCAGACACGTATAGTAGGTACAGATTGAACTGAGATAGAG
GGTTAGAGTGATAGAGATGATTGATACAGGCTACTGAAACAGACGAGAGGGTGAGAGAGGGGAGGGGAGGGGAGAGAGAGGCAGACAGACAGAC
AGACAGACAGAGAGAGAGGAGAGAGACAGAGACAGACAAATAGAGAGATAGAGAGATACAGAGAGATAGAAAGAGACAGTCAGGCAGACAGAGA
GAGAGAGAAGGGAGACAGAGATAGACAGAAAGACAGAGACAGACACAGAGAGACAGACAAAGATATAGGAAGACAGAGAGAGAGGAGGGAGAGA
GACAGAGACAGAAAGACAGACAGAGAAAGGCAGACAGAGAGACACTCACAGAGAGAGATTATCACAAGGATCTGGAAATACAGAAGGGAGCCAT
GCTAACAGAACACTGTTGAAGGTTCCCTCCCTCTGACCAGGTTATACCTGGATCTCAGGAGCTAACACTGGGATTTCAGGAGAAGCAAAGGTCT
GAACTTTCATGCACAGACAGTGTTTTACCACAGCAGCTCATCTTCAAATACGCTTAGCCTCCCTCACCCAGAGAGCCCTGCTTCCCTTCTCTGA
GAGTCCAGATAGGTAGTGCTCAGCAGCATAGCAGAGCCAAGAACTGAGTAATGGGCTGGAGAGCGACCTCGAACCACTCAGGAATGCATATCAT
CAGGTGTCAGGTATGGAGAGAAACAGAGCTGACTGTGGGGGTCAAAACAGAGAGACTTCTTCACAGTGTATTTTAAAGGCATTTTAAGCTAGGT
ATGATGGTGCAGGCCTGTAATCCGGACGCACAACAAAGGCAGGGCAGGAGGATGAGAAGTTCAAAGTCAACCTCACTATGTGTTTGAAGCCAGT
CTCATACTTAAGACCTAGTCTCAAAAATAAAGAAGAGAAAGAAAAGGAAAGAAAAGGAAAGGAAAGGAAAGGAAAGGAAAGGAAAGGAAAGNNN
NNNNNNNNNNNNNNNNNGAAAGGAAAGGAAAGGAAAGGAAAGGAAAGATACTGTAGCCAGGCACCTGCCTATCTTTCTCTGTAGCAGACATTCA
GAGATGTGCTTTTCTGAGGACAAACTGTCACAGTGAAACTTACTTCCATACATAACGAACTTCAGACCTTTGACCTCTTCCTAAAGCCCAACAC
TAGCTCAAAGGCTCTGACCCTTCAGACAAAGAACAGGATACTCTCTCTGGAAAACCCAGCTCTTCCAGCATGAACAGAGGGGTGCCTAGAACAG
GGATCACTTTACAGTGAGTGTGTTGGGAGTGACAACTGCCTCCCACCTGCAGGAATTTCCAGAAAGCAATGTGGGGTGCAGGGGTAGTGGTGCA
AGTCTTTAATCTTAGCACTCCAGAGGCAGACTAGTGGTTTTCTGGGTTCAAGGCCAGCCTGGCCTATCTAGAGAGTTCTAGGACAGCCAGGATC
TCTGAATTTGAGTCTAGCCTGGTCTACAGAATGAGTTCCAGGACAGCTGGGCACAAATTTAATAATGTAAATACATAATAACAACATTTCATCA
GGAGTTTTGAAGGGTATGTTCACGAGAGACAAGGGAGGACATGAGGAGAAAGGCAAAGACATAAGGCAGGAGCTTTCCTAGAACTGATGTTTTA
GACCACACAGGCCGGACTGCAAGGATGGGGATAGAGAGAGAGATGACTTGGGTCAAGAGCTCTTGATGTGCTTTTTAGAGGAACAGCATTTGGT
TCTCAGCATCTACACCAAGGGACTCATAACTGATTGTAACTCCAGCTCCTGCTACCTTCTGGCACATGCACACACATGGCAGCACCTTAACACA
CACACACACACACATAAAACATTTTTAATCTACAAAAATAGGGAAGCCATCTTCCCCAAGATGTATTATGAAATTCAGAGCACAACCTAAAGAA
ACCCTCCAACCTTCAAAGAGACCACTTGATGTCCCTGCAAAGGTTGAGGGTGGGAGGAGGAGAGCAACAAGAGCATCATTGGAAGCTAGAAGAA
ATTTGAGCAACACTTTGGGATTCCGAGTGATAAAACGATTTTAATCCAAGAATTTTATTCCCAGCCAGAGTATGAAAGATTTGCTTTTCTACTA
CATTAGAAAAGGTTTGACTTTAGACAGTATCATTTCCCAAGGTTTACCAGGTGGCTGTGAGTACGTAGGGGTGTGTGTGTGTGTGTGTGTGTGT
GTGTGTGTNNNNNNNNNNNNNNNNNNNNNNNNNNNNNNNNNNNNNNNNNNNNNNNNNNNNNNNNNNNNNNNNNNNNNNNNNNNNNNNNNNNNNN
NNNNNNNNNNNNNNNNNNNNNNNNNNNNNNNNNNNNNNNNNNNNNNNNNNNNNNNNNNNNNNNNNNNNNNNNNNNNNNNNNNNNNNNNNNNNNN
NNNNNNNNNNNNNNNNNNNNNNNNNNNNNNNNNNNNNNNNNNNNNNNNNNNNNNNNNNNNNNNNNNNNNNNNNNNNNNNNNNNNNNNNNNNNNN
NNNNNNNNNNNNNNNNNNNNNNNNNNNNNNNNNNNNNNNNNNNNNNNNNNNNNNNNNNNNNNNNNNNNNNNNNNNNNNNNNNNNNNNNNNNNNN
NNNNNNNNNNNNNNNNNNNNNNNNNNNNNNNNNNNNNNNNNNNNNNNNNNNNNNNNNNNNNNNNNNNNNNNNNNNNNNNNNNNNNNNNNNNNNN
NNNNNNNNNNNNNNNNNNNNNNNNNNNNNNNNNNNNNNNNNNNNNNNNNNNNNNNNNNNNNNNNNNNNNNNNNNNNNNNNNNNNNNNNNNNNNN
NNNNNNNNNNNNNNNNNGTTTCTCTGTATAGCCCTGGCTGTCCTGGAACTCACTCTGTAGACCAGGCTGGCCTCGAACTCATAAATCTGCCTGC
CTCTGCCTCCCAAGTGCTGGGATTAAAGGCGTGCGCCACCACCGCCCTGCAAAAGTTGCTTTTCTTATTTGACCATGGACTTCCTGTGATAGGA
CACGGGTAACTAGCTTAGTGGTAGATCTTTACCCACTGAGCCACCTTACCATCCCTTTAAAATTTTTTTTTCTTTTTTGAGACAAGGTTTCATG
TCTTCCAAGCTGACTTGAATTTTCAATGTAGCCATCTTCCAACCTCTTGCTTCCACCTCCCAAGTGCTGGGACTGCAGACATGTACTACCACTT
TTAGCTTATGAGATGCTGGGGATCCAGTCCAGGCCTCCATGCCCAGCACGCAGGGACCCCATCAACTGAGCTTCATCTCCAACCCTGGCGATTG
GACATCTTAAAGATTGGATTGCTTAGAGAGGAGAAAATACAGGGCTGACCCATAACGAGTGTGTTAATCACATAACAGAAAGTTGTATGGGAAA
GGAAATGTCACCTTAGAGTAAGCCTGCTAACACAGCCAGAACCGTGGGCAGTGAGTACTGAAGGGAGAGATCACGCTACTGTTTTCAGGGCGGG
AACGGGGAGGGTTTGGCTGTATAGTGGGAGGTAAGAGGGCGTAATAATTTTCACACTTCATGGTAAGAAAGCAACAGAAAATACCTCCCATTCA
AAAATCAAGACACAGCAAGACAAGTGCTGTGACAGCCCGCATACCACAAGGCACTTCCTTGCGTGGTCAGGAAACACACCACACAGGCAAGCAC
CGGCCCCATCCCTGTTTTAACAGCAGGTCTCAGTGGCTATTGAGATTCTTGACCAAGTAAAACAAAACCAAGAGAGACTGAAAAAGGAGAGATG
GCAAGAGTCTCCTCTCAGAAAGCCTGGCTGCAAGAGAGAGGGATGTGGGCGCTGGACTAGCTGGATAAGCCAGGCATGGTGTTATTCTTCCATG
CCCATGGGCCAGTTTGATAGGCAGGAAGGGTAAAGAAGCAGTGGAAAGTCAGGTGAGGTGCAAGCAGGGCCGAAGCCAGAATGATCAGAGCATT
AAGCCCATGCTGTCCAATATGAATCCTTGCAAGCCACAACCTGAGCTGCTTGGATAGTTACTAGCTCTCAGGTAGTTATAGTGAAAGGATAGCT
AGAGCTGGACGGTGGTGGCACTTGCCTTTCATCCCAGCACTCTGAGACAGAGGCAGGTGGATCTCAGTGAGTTAGAGGCCAGTGGTCTACAAAG
TTCTGAGACAGCCAGGGCTGTTACACAGGGAGACCCTGTCTTGAAAAACAAAACAACAAAAAAGAATACACTGAGAGTTTGGAGAGATGGCTCA
GTGGTTAAGAGCACTGACTGATCTTCCAGAGGTCCTGAGTTCAATTCCCAGCAACCACATGGTGGCTCACAACCATCTGTAATGGGATCTGATG
CCTACTTCTGGTGTGTCTGAAGTCAGCTACAGTGAACTCATATACATAGAATAAAAAAAATCTTTTTAAAAAAAGAATACACAGTTAAAATACA
CTTGGAGTCCTTTGAAAGGCAGTCTTACGGTGTAGCTCAGACTGGCCTCCAGCCCTCAGTACCCCAGCCTTAGCATCTCCAGTGCCACTGTGAT
TGTTCATAGTCATGCTCCTCCAGCACGCTGGGCTGGCTTTGATCTTTCATCACTCTCTCCTCCTTCTGTCCATTTTATGACAAATGACCTGTCA
CCATAGGGAAGGCAGTGGCCAGTGACACGTGGATATAACCCATGTCTCAGACTCATGGTAGTTTTACAGAGCAGGTGGGAAGCAGGCAAGGTCC
TTGAGAAGGAAGCTTCTAGCAACCTAATAGTTTCCTGCCTCGGTTTAAAATGTTTTAGCTGTCATGGTAATGGAACAGACTTACTGGGTAAAAT
GAGACCTTCAATATGTGAACATAATGCACTGTGGCCAAGCAGGCTAGGAAGCATCCTTATCGCCTGAAAAATCATTTCAACTAGGCATGATGAT
GCTTATCTGCCATTCCAGCACTTGGAGGCACAGACAGGAGAACTGCCACAAGTTCAAGGCTAGCCTGGGCTATGTCACTGAGTTCCAGACCATC
CAGGGGCTACATAGTGAGAACCTGTCTCAAAATGAATTTTTTTTTCTGTTTGAATGTTCAAAACCTACTCGTCATTTTGAAGCAGTACTTTGTC
TACTGTGGTGGACGCTTTGTGCTATAGAATACCAACAGATATCTATTCCTCCCTTCCAATGATGACCTCTTCAAGCTCCTACTACTTCTTAGCA
TTGCCACACTTGGGACCCAGCATCCAGCATGAGAACCTTGGCCACAGCCAGATCTAAACAATAGCTAACCCCATGGCCAGCTTGTTATTTCAGT
AGTGCAGTGGATGTTGAAATTATGAATGCAGTATCCTGCATGTGTTTCCTACTTTGGGGCTTAAAAGACTCAGTGTGTGCTTTGCACATAACGG
TGCTTGTTGGAATGTAAGAGGAAAGACACCAGGAGCTGTCCAGAGCAGATGCTTACAGCCTGGGCAGGAAGGCTACATGTCTGGAGCAGAGGAA
CTGGGATGGTCCCTGTGGTGGAGGGGGCTTGGAATCTGAGGGCAATGGACAAGGCCCCCTTGTCCCCACGCATTTCCCTACAGAAAAGGAGGTA
GGAGTCCCTACTTCTTGAAACACCTATTTCCTTCCCTGTAAAGGGAGCAAGGTCTACATTGTTCATAGGGAAAGCTGCTGTCCATCCCGGCCCT
GTGAGTATAGGGAGCACTCTAAGCAGCCCAGCTCAGTCTTCACACCGTAGCATCTGCTCTCCACATTGTCCCTCCAGCATCCCCAACCTGAAGC
TCCTTGCTTCCTGTACTCCGTCCTAGACACTCCTGCAAAGAGAATTAGCTAGACCCACAGGGAGAAAGCAGCTCCCAGGCTCCTGAGGGCTTGG
ATCTGGCAGAGAAGACCCAGGTCACCATAGAGAAGATAGTAGCACTAGGTGACCAAAGAGAGGAGTCTGGGGGCGGGGGCTTATGGAGAAGGTG
GGCTGCAGAGAGCAGACCCCCTGGTTGAGCCGCGCTAGGGACCAGTGCAGACACACTTCTGTGCTTGCCTCCTCAGGCCATCGCCAGTCACATG
CACCTCAAGTGCAAATGCCACGGGCTATCTGGCAGCTGTGAAGTGAAGACCTGCTGGTGGTCGCAGCCGGACTTCCGCACCATCGGGGATTTCC
TCAAGGACAAGTATGACAGCGCCTCGGAGATGGTGGTAGAGAAACACCGAGAGTCTCGTGGCTGGGTGGAGACCCTGAGGCCACGTTACACGTA
CTTCAAGGTGCCGACAGAGCGCGACCTGGTCTACTACGAGGCCTCACCCAACTTCTGCGAGCCTAACCCCGAAACCGGCTCCTTCGGGACGCGT
GACCGCACCTGCAATGTGAGCTCGCATGGCATAGATGGGTGCGACCTGTTGTGCTGCGGGCGCGGGCATAACGCGCGCACTGAGCGACGGAGGG
AGAAATGCCACTGTGTTTTCCATTGGTGCTGCTACGTCAGCTGCCAGGAGTGCACACGTGTCTATGACGTGCACACCTGCAAGTAGGAGAGCTC
CTAACACGGGAGCAGGGTTCATTCCGAGGGGCAAGGTTCCTACCTGGGGGCGGGGTTCCTACTTGGAGGGGTCTCTTACTTGGGGACTCGGTTC
TTACTAGAGGGCGGAGATCCTACCTGTGAGGGTCTCATACCTAAGGACCCGGTTTCTGCCTTCAGCCTGGGCTCCTATTTGGGATCTGGGTTCC
TTTTTAGGGGAGAAGCTCCTGTCTGGGATACGGGTTTCTGCCCGAGGGTGGGGCTCCACTTGGGGATGGAATTCCAATTTGGGCCGGAAGTCCT
ACCTCAATGGCTTGGACTCCTCTCTTGACCCGACAGGGCTCAAATGGAGACAGGTAAGCTACTCCCTCAACTAGGTGGGGTTCGTGTGGATGGG
TGGGAGGGGAGAGATTAGGGTCCCTCCTCCCAGAGGCACTGCTCTATCTAGATACATGAGAGGGTGCTTCAGGGTGGGCCCTATTTGGGCTTGA
GGATCCAGTGGGGGCGGGGCTTCACCCCGACTGGGTGGAACTTTTGGAGATCCCCTTCCACTGGGGCAAGGCTTCACTGAAGACTCATGGGATG
GAGCTCCACGGAAGGAGGAGTTCCTGAGCGAGCCTGGGCTCTGAGCAGGCCATCCAGCTCCCATCTGGCCCCTTTCCAGTCCTGGTGTAAGGTT
CAACCTGCAAGCCTCATCTGCACAGAGCAGGATCTCCTGGCAGAATGAGGCATGGAGAAGAACTCAGGGGTGATACCAAGACCTAACAAACCCC
GTGCCTGGGTACCTCTTTTAAAGCTCTGCACCCCTTCTGCAAGGGCTTTCCTAGTCTCCTTGGCAGAGCTTTCCTGAGGAAGATTTGCAGTCCC
CCAGAGTTCAAGTGAACACCCATAGAACAGAACAGACTCTATCCTGAGTAGAGAGGGTTCTCTAGGAACCTCTATGGGGGCTGCTAGGAAGGAT
CCTGGGCATGACACCCTCCTACGATAGCCTGCATCCGCTCTGACACTTAATACTCAGATCTCCCGGGAAACCCAGCTCATCCGGTCCGTGATGT
CCATGCCCCAAATGCCTCAGAGATGTTGCCTCACTTTGAGTTGTATGAACTTCGGAGACATGGGGACACAGTCAAGCCGCAGAGCCAGGGTTGT
TTCAGGACCCATCTGATTCCCCAGAGCCTGCTGTTGAGGCAATGGTCACCAGATCCGTTGGCCACCAGCCTGTCCCGAGCTTCTCTAGTGTCTG
TCTGGCCTGGAAGTGAGGTGCTACATACAGGTCATCTGCCACAAGAGCTTCCTGATTGCTACCACTGTGAACCGTCCCTCCCCCCTCCAGACAG
GGGAGGGGATGTGGCCATACAGGAGTGTGCCTGGAGAGCGCGGAAAGAGGAAGAGAGGCTGCAAATGCGTGGTGACTGACTGTCTTCTGCCTGG
AACTTTGCGTTCGCGCTTGTAACTTTATTTTCAATGCTGCTATATCCACCCACCACTGGATTTAGACAAAAGTGATTTTCTTTTTTTTTTCTTT
TCTTTCTATGAAAGAAATTATTTTAGTTTATAGTATGTTTGTTTCAAATAATGGGGAAAGTAAAAAGAGAGAAAAAAATAAGTTTGTGGTTTGT
TCTAGATTTTCCCTTTTATTAACAAGCATTAGGTGTGCATACTAATGGAGTTTGGTATGGAATTCTTCGATGATCCTCCCCACCCCCAAGGGTA
ATTCACACCTCCCTGTCCCTTATCACTTGTGGGTCTGCACTATGCTGAGAACCTAAACATGCCAACTCAGGTTCAGGGTCCCAGAGCCAAGTAG
AGACTGTCGACAAGCCTCCAGGGAGGGAGGTGGGGTCAGAATTCCAAGAAAAGAGAATTGAAATAGCTAAGTCAAGAAAAGAGCCGGTCAACTG
TAGAAAAATCTGGAACAGGGTAGATCTGAGAGCTTGAATAGAGGGGTGCAGGTGGGTTAAGTTTAAGCAAGTATGGGAGCGGGGTAAGCATACA
GTAGTTAGGATACTTTGGTAGTTCCAGTGAACAGATGAAAAGTCACAGGAGAAGAGGCTTAACCAAGACCCCCTCACACGCTGGGGATGCAGAG
GAGACGTGGAGCAGATCGCCTCCCTGTGACTTCATGTTCTCACAGCCCATTCCCCAGAATCATGTATTTAGGGTGGACAGCCCTTGGTATTTGA
GGACAGTGGCCTGGCTTGCTGCTGCTGGCTTCTTATGTGTAAAGTCAACAGATCTTAGACTTTAGTCCTCAGACCCTGTCACCAGGAATGTTTC
AGATTCTCACCCAAAGAAAGCAATGGGAGGGAGGGGTCTTTGCCTCAGGAGCTGCCATGTTCCCACTTGCTTTCACAGGGGCGCCAGGGCCTCA
GTCAAGACAGGCAAGGCTAATCATCCTGTTGGCAAACCAAATGATGGGGCAGGTGTCAGGGCGCCCTGGGAGTGAGGCTAGAGATCTCTCACAA
AGCCATACTTCTTTTAAGGCCACACATCTGCCCAAGCAAGCCTACCATGTCTCTGCTCCTCTCCCTGGTCCCCCATCTCCATCCCCATACTGTC
CCCACCTCTGAGTCCTATTCTGATGTCCAGATGTCAGGGCAAAGGATGCCCTGCAAAGCTGAGAGCAGCAGTCCCAGTCCTACCTCTCAAAACC
CAAGCTGAAGCCGAGTATAGCAGTGCACGCCTTTAATCCCAGCACTCGGGAGGCAGAGGCAGGTGGATCTCTGAGTTACAGGACAGCCTGGTCT
ACAGAGTGAGTTCCAGGACAGCCAGGGCTACACAGAGAAACCTTGTCTTGAAAAACCCCAAGAAATAAAAAAATTAAAATTAAAATTAAAAAAA
AACAGGGGGAAAAAAGCCCAAGTTGAGCACAGTCATTGTTCTTGTGTCCCATTTATATCCCAACCCAGATCCAAGTGATTTGAAAGCCAGTTAG
AAGATGGCCATAAGAATAAGCCTAGGAAGTGTCTTATGATGTCCAAGGTCCTTTAGCTGTCGTGATACATCATGACCTCATGAACCTTAGAACT
AGGAAACCCTGCTGGCCTCTAGAGGACCAAGGGAAAGGATCTGAAATATAGTCACTGTTGACATAGGGGAATGCTGGTTAGGACAACCAGGAAG
ATCATTAAGTGTCCTCTCAACCCTCCCAGGGGACAGTGGGACTGCCTGTCCCAGAAGAGGGGAAGATAATTCCCAGACCCTAAGAGCTGGGAAG
AGAGGCAGTGAAGTGAGAGGAGAAACAGGCAAGGCCCTTCTAGACCCATTTGATTCAACACTGTAGAGTTGGTCGGTGATGACAGCTAAAGCCG
AGGCTGCTGTCCACATGCCCTGTGAATTTGTCCACAGGCCTGGTAACAGAATACTATGTCACACTGCCTGAAACTCTGAATGCCACTTGTCAGA
GCAGGCTGCCACTGGTTTTATGGCAGGACCACTTAAGGGGGTCCTTAAACCTTCAAAGCAATCACAAGCAGGCCTAAGACCATACTAGACTCAC
CTGTATCCTTAAAGAAGAATATTGAGGAGCCTCCAGGTCTTGGGACATAAAGATGAGACCAGGCATGGCTCCACTGCATGCTCCAGGCACATCT
TTTGTTCACCAACCCACTGGCTAAGCTTTCTGATCTTCCAGAACACAGATTCAACCTGTAGCTGCTGATCCATGGTCTGAGTCAGCTCAGTCTA
CCACACTAAGATTCTAGACCCTCCGTGGTCACACTGTCATACCTAAACACCAATGTGCCCAGAGTCCAAGTAGGGTACAAAAGGAATAGCCAGC
CTGGCTTGAAGGTATTGGCCTATAATCCAAGCTGCCCCAGAAGCTAAGGCAGAAGGACCACAAACTCATGATTGCCTGGGATACAGAACAAGGT
GAAGATCAGCTAAAGCGATTGAGTGAGACCCTGTCACCAAATGAAAAGTGATAAAGAACTGGGGTGTACCTCAGTGACAGAGGACTTTCCTAAT
GTGTGAGGCTCTGGACTCCACCAAAGCACTGAAAAGAAAAGAAAAAAAAAAATCACAGACTGTGAGGGATGCTGACAGCTAAGTGGCCTTGGGA
AAGGAGTGCCATCCTGGGGCTCTCTGGCCTCTGGCCAGGTCTGTTTGGGGTTTGTGGAGGAAGAGGCCCAGGTTCTGGATTCTCAGTACCTCTT
CTTTAGCCTTCTGATTCCCTGACTCCTGGCAGGCAGGCAGGCACTCCAATGACATCTATGCCTTCACACGGCTCCCTCTTCTCATTCTCAGGGC
TGCAGGTGTATGTACACCAGGCCCTGACCTACTATTGGCAGGACTACCTAGGATTTCCCAGTAAGGGCAAGGGTCAGTGGGGGGGTAGGGAGGG
CAACTAGCTGCAGGTGGACACTCCAAAAAGAGGATGCCATGGTCCAGGGCCAGCCAAGGCAGAAGGATGGGCGCCCATTCTCCCCTCAGGGCAG
TGAATCATCAGGTGAGTGGGCAGGTTCAGGAAGAGTCCAATTAGCCCGCTGGGCCATCTTGGGTGCTAACAATAATAGAGCCATCAGTCCCTAG
GGCAGTGATGAGAGTCCTCAGTTAAGCCTGTCCGACAGATGAGTAGTCCCTCTAAGTTGGCACCCTGGGCAGGAGCCACCCTAATTGCTACCTG
CTGCCCTAGTGCCCAGATGAAAGGGACAGACTCGACTGGGAGGCGGCAGGGCAGTGGCAAAACCAGCATGTCACGAGGGCCTGGAAAGTCAGAG
GCCAATGGGTATGGGGTGCCAGGCTGTCTCAAGACCCCAGTAGGGTCTAATGTCACATGGCTTTTGGGGATGCAGAGCCCATATGCCCAGGCAG
AAGACAGATCACTTTAGAAGGTCAAAGGCTAGGAAGCATATAGCCTACAGAGGAGGCAGCATTGGCCTGAGGGCTTGTCAGGGACACAGGTGGG
CTCTGGTGTCTGGTGTCAGTTTCTGAGCAGCAGCCCCTACAAGTCCAGGATGAAAGACTACCCTAGAGATTGTCTTGGCTATCCACAGGAGATA
CACGACTANNNNNNNNNNNNNNNNNNNNNNNNNNNNNNNNNNNNNNNNNNNNNNNNNNNNNNNNNNNNNNNNNNNNNNNNNNNNNNNNNNNNNN
NNNNNNNNNNNNNNNNNNNNNNNNNNNNNNNNNNNNNNNNNNNNNNNNNNNNNNNNNNNNNNNNNNNNNNNNNNNNNNNNNNNNNNNNNNNNNN
NNNNNNNNNNNNNNNNNACCCCCCCAGTCCGAGGAGTGGGAAATCCCAGGCCCCACTCAGACCCAAGCTCGCAGCTGTGGGCCTCAGAAGCAGC
CTCTCTGGTGAGTTTACAGCCCCTCCCGCTGCCCTGGAGAAGGAGGAAATGAGCGGGAGGCCTGTTCACAGGTAGTTGAGACAGCCCCCGAATA
ACCATATAAAAGGGCCGGAGGCTGGGGGCCCCACCCAGCCAGGACAGGCTTGGCCATCCCCTTGCAAATCTCACACTCAGTAGCTTTGAAGTAC
TGGAAAGGGTGTGGCCAACCCCCACCTTAGGGCCCCACTGACCCTCCCTTTTTCTGTCACCCCCTCCCCTGGATGCCCACTTTCTGGGTCCTGG
GGCTCAGTTTCCTCTCTTCAGAGACAGACTGGAGGCTGTCACCATGGCCTGGCCTCCAGGAAAACCTACTCTTGGTCAGCTGGGGTGCAGCCAG
CTGTGGTTCCCACCCCTGGCTTGGGACTGAGAAAATGGACCTGAGGACTAGCTTTCCATGATGTGGGCAAGTGTATGACCAGAAGCCAGAGTCC
CCAGCCCAAGCAGTCTTGGTAGTAGGATCTAGCACTGCCTTTTCCAGGGAACACTGGGGACAACAGGGCAGCCAGGAGACAATTTTGAGAAGTC
CCTAGGACCTTCCTGAAAGCTGACCACCCACTGTTGGGGTGAGAGAAAACTATGATGTTCTGTTGCTGTGTAGCTGGTGATCAATAGCTGGGCC
AACTCTGAGTCCTAGCAAACCTGGCCCAGCCATAATGATCTACCTTGAAGGGACTTTGGGATACATTACTGCCCTGGAGTCCAGCGAGCGTCCT
GGGACAGATTCTTCTCCCCCTGGCTTTACCCTGCACCATGCCACAGGCCCCAGGTCCCACCTCTCTTCACCAGTCGCTCACCTTCCACAGCCTA
GTCCTTTCAGGGGTTCCCAAATTTCTTTTCAGAAACTCTCTTGGAGGGGGGGGTACCCAGAACAACACACTCTGAGATTATAGCCTTTTAGGAT
CATCATCCTCTCTAAGGACCTCTGACTTCCAGAGCCAGAGTAGAAACCAGGTATACACACTTACTATCCCTACAGCCCTAAGGGGCCAGCGTGC
CATCCTACTGGAGTCTAGTATTGGACAGATATATGAGTCTGGGATAGTCCAGTTGGCTAGAGTCTTTCATAGATTTGAATTGAACTGTACTCTC
AATGCTACTCTTGGGCTATGTGGGAAGGCTTCCAACAAGGTGCTGCTTCTGCCTTCTGATGTTTGTTAATTCTGAGATACCATACAGATGCCAA
GACAAATAGTGCAGGGCAGCTAGGAAGCCCTGGAAAGGGCCCCCAACTCCAGGAGCTTGGGCACTGCCTACCCTTCCTACCCTGCCCTGCTTTG
CCTGGTCGGGCAGCTGGGACGGAGCTGCAAGCTGTCAGAAGGTGCTAATTGTTGTTTAGCTCTAAGCCGGCTCCTTGCTCTGGTCTTTTTTCCA
CCCTCTCTCTCTTTTTTATTTGAGCGTCTAGAACTCATGGTAAATAGTCATTTGGCTCTCAGAGCCCTGCAAATTGGTGTTTATGGTGTGAAGA
TGAGGAGGACCCAGGACTAGTCCACCAAAACACAGGCCAGTGAAGAGGGAGGAGAGAGGGAAGGAGGCATAGGCCCAGCTGGGACTGGGCATCC
TCCACGTCCCATCCAGGCCTAGCTCTCTGCTGCTTGATCCAGGAGAGCTTCCAGGAAGAGGCTCCTCCGTCATCCTTATCAGTGGGGAGACTGG
AGATTGAAGAACTAGAGCAGGACCCATATTTAGCATAGGAGATANNNNNNNNNNNNNNNNNNNNNNNNNNNNNNNNNNNNNNNNNNNNNNNNNN
NNNNNNNNNNNNNNNNNNNNNNNNNNNNNNNNNNNNNNNNNNNNNNNNNNNNNNNNNNNNNNNNNNNNNNNNNNNNNNNNNNNNNNNNNNNNNN
NNNNNNNNNNNNNNNNNNNNNNNNNNNNNNNNNNNNNNNNNNNNNNNNNNNNNNNNNNNNNNNNNGAAGGAAGGAAGGAAGGAAAGGGAGGTGA
ATGGGGAGGGAGGGAGGGAGAGAAAGAGAGAGACAGAAAAATCCAAGTACATGGGCCCTTCTTACCCAGTGGCCTCCCAGATTTGAGACAGGAA
TGTATGGCTTCTGTATGATGCTTGTGGGGTGCAGGGTGTGGAAGGCAGGTGCCAGAGGAATTCCAAGCCCGAGCAGATGGCTGGGAGGGCTTCT
CAGGAGAAGGGGACTTCCCCAGTTGTTCGCCTCTCAGTGCAGAGAGCAGGCAGGCCTGTGCAGAACCCTCAGACTCCTTGGCAGTGGTGGCTCA
GCAGCCTCCCTTCCCCATCCCCCAGGCTCCTCAGCTCCCTCTACTGCAGGAAGCCCAGGGTGTTCCCACAGCCTCACTCTGTCCCTTCTCCATT
CCTGGCACAAGCTTGAGACACTCTGCCACCCCACAGTGCCAGACTTTATAAAGCAAGCTGGCTTCTAAGCAGCCCACCAGACACACAGCCCTGG
AGGGGCGAGTCCCAAAGCTCTAAGAAGGCCATTTGACGTCTGTAGCTTGGAGTAGACTCCAGGGATTACACATGCTTCTTCCCCGACTGTTTTT
ATTGTCCAGGTCTGGGTTGGGGCAATAAAGTGAAGTGCCAGCTTGCACCTCGGGGACCAGGGACTAATCTGGTGGGAGTCGTGACCCAGGCAAC
AGTCCATATGCCATGGACCTGATCCTACACCTCCTCTGCTTAAGGATATTCCATGGTTTCCCTGTGTCCACCAGGTGAAGTTTAACTTCTCAAG
CCTACGTACCTGGCAATCTATCCCCTTAAAAGAGTCCTGATGTATGGCGTGAGAGACTGAGAAACTGTCCTGCACAGGAGGTGTATACGGACAT
TACTCTTCAGACTGCAACGGACGCCCGCCTCTATCACTCATTCCCTCAGATGCTCTCGGACCTCCATGCCAGCCTTCTCACCAGTTCTAAAAGA
AGTCTCTCTCGGGTCTCTAGCCTTCTCTCTCCCAGGTCCTGAACTTTCAATGGGTTCTTCTGACTCTGGAACTGGTTGCAATTCCTTGACCTTC
TCTGGTCACATTCAGGAGCCCCCATCACTGTCTCTGGGGGGACACTGGAAGTACCAGCTTGACCTCAGGGACCTGTATGGCAATAAAGGGGGGG
AGGGGATTCTGATGTCAGTGTAACCTTGATCATTCCTGGGGCTTGGAAGCATACCCAGCTGAACCAAGAGCTTGAGCTTCCAAGTGACCCATCA
ACCAGAGGACCCCACACCTGTGAGAGCAGGGAGGGCGGCCTCAGAACCGAGGCCTTGTCTGGTCCTTGCTGTTGTATGATGGGAGGTTGTTTGA
CAGATGCAATGGATGAACCATGCAGAATCCAAGCATGACAGGGATGAGGCCACAGCGCAGGTGGCGAAGGGCCATGTGAGGTCTGGGAAGGTGG
AAAGGATGCAGGAGAGGACCTTACAGGGGAGGAGGATGCCAGTGGAGATGGTTCAGGAGAGGACCTCGTGGGCGGGCCTGAGGAGACAGTGCAG
ATGAGGTGTCAGTAAGGAGGATGCAAGCAAGAAAGATGCAGGAGATGATGGAGAAGCTGAAGAAGGCACTGAAGAAGGCACAGGGAAGAAGAGT
GCATGTTAGGATGTTCAAGCAGAGACGGTGCAGTGGTGAGGGTGAAGGTGGAGGAGATTCAGATGAGGATGGTACAGGTGGGATCCTGCATATG
CTATCAGGCAGGTGGCCCAGAACAATGAGCCTGGCCATGGTCTATGAGGGACGCACACACTGGGAATGGTACCTACAAGGTTCTGAAAGTGCAG
GCTTTTGGAGACCACCCTCCCCCCAAAGAAAGGGGTTTCTACCCCTTCTCCAGTTCTTCCCTTGTGCTTTAACCAAAAGCAAGTCTTGTGCACT
GTGCCCAACCAACCCTGCACTCTGCTGAACCTGAGGCAAGAGTAGAAAGGCTGCTGTCTTTTCTAACCTGTACCCTGAGCCAACTAGGTCAGAG
TCAGAGGCCTCACATACGTGAGTAGCCCTGGTTGGAGGGATCTCTAAACCCCACCACAGTCCTGGGACAGCCTGCTGTTTCCTGGGGTCAGGGG
TCTTCCATGGGCCCACTGCCGTCCTAGTCAGCTTTGCTTCTGTTACTTGGGGATTTTTTCCAGTCTTTCCCTTCCGTTTAGAAATCCTTTTCAG
GACAGATCCCTGACAGAGGTGCTGACATCATTAGGCCTCCTCAAGGGCACAGGCCCACCCTTCTGCTCTGGCTACCCCTATCCCTAACCCACAG
CCCAGCTCTGCCAGGGTCCAGGCCTGGCTGGCAGCCCGCAGACTACCCAGACCAATGTGTTGGCTCTAGGCAGGCAGGCATCCTGAAGGGTCTA
ACAGTGTCCTTTGCCAACTCTCCACTGAAGCCGATGCTGGCCTGTGCCTTTCCCTCTGCCTCTTATCTTCTTTCCCTCGCTGCCACCACACTCA
GGAATCATGGGACCCTCTGGTCTTTGAGCTACAGCTCTGTGCAGGTAGCACAGCCTCCTCCTTCCCTTCCCTCCCTCATACATGTGGCTGTCGA
CCCCTGTCTCTGCAATAAGCTCTGGGTGCCTCTGACTACGCCTCTGACAGTCCTAACTAGTGTGGGCTGGAACACAGTGGCCAACATATGTAAA
TGCTGGAAACCCCTCTCATAATAGAGATGGCAGGTGTGGAGCTCCGTTGAGCCTGAAGGTAGAGGGCAGAGTAGTGATGGTCTACGGGCCACAT
CTGGTCCCTAATGGTGGGAGTCAGGACCTGCCTGGTTTCCTCAGAGCCAGAGTGGGAATACAGAGGCATCTGGTATCTTAGGTCAAGGGATTTC
TCCAGCCCTTACAATGTGAGCAGGATGTTGCTGTCAAGGCTACTGGACAGCTCCAGGCTCTGGAGACCACCTGAGGAGATATGGACGGGCCAGC
CCCTGGCACAGTCCAGATTTTACCACGGACCCAGCCTGGGGCACAGGTGTTAGGGGTGGGGCTCATGTTGGCGGGAGTGCTGGCTGCGGATGCT
TCAGCTGGGCTTTTTAATTAACCTCTGCTGGCTGCTCCAAAGGGCCCCAATTAAGTGCAGAATGCGATGGCAGAGTGGGGTCAAAGAGAGGAGC
TGGTTTTAATTAAAGTGCAGTGGCCTGGGCAGGAGCGCCCCCGCCTGACCGCCTCCTCAACAGGCCCTGCTCAGCTCAAAGGCGGTCACATGAC
GGGTAGATGACAGAGAACTCTGCAGTCCTGTCTGGCTGAGATCCCACCAGATAACAGCAGGACCAAGGGCTGCCTTGTCTAGCCTGTGTGTCCA
CTGCCAGGCAGCCCCTCTTCGAGCCACTTTGTCCTCTCTGACCTCTTCTCATTTGTCACCTGACCTGGAATAGCCATCTGCTACCCTCTCAATA
AGCAGGTCCCTGGTATAATAAGCATCTGTGGTATGTCTACTTCAGAAGCAGCAAAAGGAATAAAACAAACAATTCCATCAGATGTGCATGGGCA
ATGGGATTAAGCAAAATGGGGGGGGGGCGGGGGAGGGGGAAGGCCAGTGGAGAGCTGTTTAACCTGGTAAAGGAGCAGATAGCAGCAGGAAGGG
GAGGGAGCTCACCTGGAGAGGTAAGGGCCTGGTAAAAGCCAGAGCAGGATCTGGCCAGGGCTGAGTTGCTGAGGTACCAGCAAGGCCAAAGCCT
GCAAGCAAAAATAAGAGAGAAAGCCAGGCTTTTCTCCAAATGGCCAGAAGACTACTGAGGACTCTCAACATAATTAGCTTTCCAGGAAATGTAA
TGAAAAACCCTGGGCGAGGGCCGGTGAGCTACCACCAAGCCCGGAACCCACACAGTAAAAGACACAGCTGACTTCTGCACACACACAAATGCTT
GTATAAGCATATACTTATACACATGCATGCATGCACTTGGAAGTGGAGGCAGCAGCATTAGAAGTTCAAGGTTACCCTCAGTTACATAGGGATT
CTGGGCCTGCCTGAGCTACATGAGGTCTTGTTTCAAAACAACATCAGCAACAACAAAATTGGATCCTAAGGTGACAGTAGAGTGCCAGCCTCCC
TCCTGCTGCAAATTCCAGGCAGGTGTTCCCCACCTATTACAATGGTCCCAAGTAATTTTTTTTAATGTTATGGGCATTTTAACACACACACACA
CACACACACACACACACACACACACACACACACACACAGAGAGAGAGAGAGAGAGAGAGCATGCGTGCAAGGGGATAAGGCCTTTGTGCTTCAC
TTGGGAAGAACAGGTGTTTCATGAGTTTCTTGTGAGGAGAAACATTTGCTAGGCATCATAGCCCTCTAGGAATCTCACTGGCTAGGAAGACAGG
ATGTCTTCCAGCATCTTGACCCA
MOUSE SEQUENCE—mRNA
GAATTCATGTCTTACGGTCAAGGCAGAGGGCCCAGCGCCACTGCAGCCGCGCCACCTCCCAGGGCCGGGCCAGCCCAGGCGTCCGCGCTCTCGG
GGTGGACTCCCCCCGCTGCGCGCTCAAGCCGGCGATGGCTCCTCTCGGATACCTCTTAGTGCTCTGCAGCCTGAAGCAGGCTCTGGGCAGCTAC
CCGATCTGGTGGTCCTTGGCTGTGGGACCCCAGTACTCCTCTCTGAGCACTCAGCCCATTCTCTGTGCCAGCATCCCAGGCCTGGTACCGAAGC
AGCTGCGCTTCTGCAGGAACTACGTGGAGATCATGCCCAGCGTGGCTGAGGGTGTCAAAGCGGGCATCCAGGAGTGCCAGCACCAGTTCCGAGG
CCGGCGTTGGAACTGCACCACCGTCAGCAACAGCCTGGCCATCTTTGGCCCTGTTCTGGACAAAGCCACCCGGGAGTCAGCCTTTGTCCATGCC
ATCGCCTCCGCTGGAGTAGCTTTCGCAGTGACACGCTCCTGTGCAGAGGGATCAGCTGCTATCTGTGGGTGCAGCAGCCGCCTCCAGGGCTCCC
CAGGCGAGGGCTGGAAGTGGGGCGGCTGTAGTGAGGACATTGAATTTGGAGGAATGGTCTCTCGGGAGTTTGCCGATGCCAGGGAGAACCGGCC
GGATGCCCGCTCTGCCATGAACCGTCACAACAATGAGGCTGGGCGCCAGGCCATCGCCAGTCACATGCACCTCAAGTGCAAATGCCACGGGCTA
TCTGGCAGCTGTGAAGTGAAGACCTGCTGGTGGTCGCAGCCGGACTTCCGCACCATCGGGGATTTCCTCAAGGACAAGTATGACAGTGCCTCGG
AGATGGTGGTAGAGAAACACCGAGAGTCTCGTGGCTGGGTGGAGACCCTGAGGCCACGTTACACGTACTTCAAGGTGCCGACAGAACGCGACCT
GGTCTACTACGAGGCCTCACCCAACTTCTGCGAACCTAACCCCGAAACCGGCTCCTTCGGGACGCGTGACCGCACCTGCAATGTGAGCTCGCAT
GGCATAGATGGGTGCGACCTGTTGTGCTGCGGGCGCGGGCATAACGCGCGCACTGAGCGACGGAGGGAGAAATGCCACTGTGTTTTCCATTGGT
GCTGCTACGTCAGCTGCCAGGAGTGCACACGTGTCTATGACGTGCACACCTGCAAGTAGGAGAGCTCCTAACACGGGAGCAGGGTTCATTCCGA
GGGGCAAGGTTCCTACCTGGGGGCGGGGTTCCTACTTGGAGGGGTCTCTTACTTGGGGACTCGGTTCTTACTTGAGGGCGGAGATCCTACCTGT
GAGGGTCTCATACCTAAGGACCCGGTTTCTGCCTTCAGCCTGGGCTCCTATTTGGGATCTGGGTTCCTTTTTAGGGGAGAAGCTCCTGTCTGGG
ATACGGGTTTCTGCCCGAGGGTGGGGCTCCACTTGGGGATGGAATTCCAATTTGGGCCGGAAGTCCTACCTCAATGGCTTGGACTCCTCTCTTG
ACCCGACAGGGCTCAAATGGAGACAGGTAAGCTACTCCCTCAACTAGGTGGGGTTCGTGCGGATGGGTGGGAGGGGAGAGATTAGGGTCCCTCC
TCCCAGAGGCACTGCTCTATCTAGATACATGAGAGGGTGCTTCAGGGTGGGCCCTATTTGGGCTTGAGGATCCCGTGGGGGCGGGGCTTCACCC
CGACTGGGTGGAACTTTTGGAGACCCCCTTCCACTGGGGCAAGGCTTCACTGAAGACTCATGGGATGGAGCTCCACGGAAGGAGGAGTTCCTGA
GCGAGCCTGGGCTCTGAGCAGGCCATCCAGCTCCCATCTGGCCCCTTTCCAGTCCTGGTGTAAGGTTCAACCTGCAAGCCTCATCTGCGCAGAG
CAGGATCTCCTGGCAGAATGAGGCATGGAGAAGAACTCAGGGGTGATACCAAGACCTAACAAACCCCGTGCCTGGGTACCTCTTTTAAAGCTCT
GCACCCCTTCTTCAAGGGCTTTCCTAGTCTCCTTGGCAGAGCTTTCCTGAGGAAGATTTGCAGTCCCCCAGAGTTCAAGTGAACACCCATAGAA
CAGAACAGACTCTATCCTGAGTAGAGAGGGTTCTCTAGGAATCTCTATGGGGACTGCTAGGAAGGATCCTGGGCATGACAGCCTCGTATGATAG
CCTGCATCCGCTCTGACACTTAATACTCAGATCTCCCGGGAAACCCAGCTCATCCGGTCCGTGATGTCCATGCCCCAAATGCCTCAGAGATGTT
GCCTCACTTTGAGTTGTATGAACTTCGGAGACATGGGGACACAGTCAAGCCGCAGAGCCAGGGTTGTTTCAGGACCCATCTGATTCCCCAGAGC
CTGCTGTTGAGGCAATGGTCACCAGATCCGTTGGCCACCACCCTGTCCCGAGCTTCTCTAGTGTCTGTCTGGCCTGGAAGTGAGGTGCTACATA
CAGCCCATCTGCCACAAGAGCTTCCTGATTGGTACCACTGTGAACCGTCCCTCCCCCTCCAGACAGGGGAGGGGATGTGGCCATACAGGAGTGT
GCCCGGAGAGCGCGGAAAGAGGAAGAGAGGCTGCACACGCGTGGTGACTGACTGTCTTCTGCCTGGAACTTTGCGTTCGCGCTTGTAACTTTAT
TTTCAATGCTGCTATATCCACCCACCACTGGATTTAGACAAAAGTGATTTTCTTTTTTTTTTTTTCTTTTCTTTCTATGAAAGAAATTATTTTA
GTTTATAGTATGTTTGTTTCAAATAATGGGGAAAGTAAAAAGAGAGAAAAAAAAAAAAAAAAAAAAAAAAAAAAAAAAAAAAAAAAAA
MOUSE SEQUENCE—CODING
ATGGCTCCTCTCGGATACCTCTTAGTGCTCTGCAGCCTGAAGCAGGCTCTGGGCAGCTACCCGATCTGGTGGTCCTTGGCTGTGGGACCCCAGT
ACTCCTCTCTGAGCACTCAGCCCATTCTCTGTGCCAGCATCCCAGGCCTGGTACCGAAGCAGCTGCGCTTCTGCAGGAACTACGTGGAGATCAT
GCCCAGCGTGGCTGAGGGTGTCAAAGCGGGCATCCAGGAGTGCCAGCACCAGTTCCGAGGCCGGCGTTGGAACTGCACCACCGTCAGCAACAGC
CTGGCCATCTTTGGCCCTGTTCTGGACAAAGCCACCCGGGAGTCAGCCTTTGTCCATGCCATCGCCTCCGCTGGAGTAGCTTTCGCAGTGACAC
GCTCCTGTGCAGAGGGATCAGCTGCTATCTGTGGGTGCAGCAGCCGCCTCCAGGGCTCCCCAGGCGAGGGCTGGAAGTGGGGCGGCTGTAGTGA
GGACATTGAATTTGGAGGAATGGTCTCTCGGGAGTTTGCCGATGCCAGGGAGAACCGGCCGGATGCCCGCTCTGCCATGAACCGTCACAACAAT
GAGGCTGGGCGCCAGGCCATCGCCAGTCACATGCACCTCAAGTGCAAATGCCACGGGCTATCTGGCAGCTGTGAAGTGAAGACCTGCTGGTGGT
CGCAGCCGGACTTCCGCACCATCGGGGATTTCCTCAAGGACAAGTATGACAGTGCCTCGGAGATGGTGGTAGAGAAACACCGAGAGTCTCGTGG
CTGGGTGGAGACCCTGAGGCCACGTTACACGTACTTCAAGGTGCCGACAGAACGCGACCTGGTCTACTACGAGGCCTCACCCAACTTCTGCGAA
CCTAACCCCGAAACCGGCTCCTTCGGGACGCGTGACCGCACCTGCAATGTGAGCTCGCATGGCATAGATGGGTGCGACCTGTTGTGCTGCGGGC
GCGGGCATAACGCGCGCACTGAGCGACGGAGGGAGAAATGCCACTGTGTTTTCCATTGGTGCTGCTACGTCAGCTGCCAGGAGTGCACACGTGT
CTATGACGTGCACACCTGCAAGTAG
HUMAN SEQUENCE—GENOMIC
CTATGGGAAAACTTCAAGCAGCCCAACATAGATGTAAGTGGAGTCCCTGAAGGCAGGACAGAGTTATCACAAGGAAGTGCCTTATGCATTTGTA
GAGGCTGAACATGTCCAAAATTCATAGGCCAGGAACTCAGGAAGACCATAGACAGGCTCAACCCATGGGCTTTCTGTCTCTATCCAGACAACCC
AGGAAAAAGAGAGAGGACAATGACTAATCTCAATAATTAGAAAGGTGACATCTCTACAGATTCTATAGATATTAAAAAATAAACAGGAATAAAC
ATCTACATGTGTATAAATTCAACTTCTGTAAAATGAACAAATTCCTTGAAAGACATCAACTACCAAAGCTCGCACAAGAAATAAATAAACAAAA
TGGTTCTATAGCTATTTAAAGAACTGAATTGTGGTTACAAGCCTTCCTACAAAGAAACTTAAAGGCCAGATGGCTTCATTGGTGAATTCTACCA
AACATTTAAGCAAGACATAATAACAATTTCCACAAACTCTTCCAGAAAATTAAAGAGTTGGAAATACTCATGAGTATCTCATGAGGCCAGAATT
ACCCTAATGCCCAAATCAGACAAAGACATTATAAGGAAAAAAAATTCTAGATCAGTACTTCTCAGGAACATAGATGCAAAAGTTCTTAACCAAG
TTTTAGCATATCCAATCCAACAATATATAAAGAGGATGATACACCATGAGCAAGTGGGATTTATCCCAGGAATGCAAGGTTAGTTTAATATTTG
AATATAAATTAATGCAATTCACTATATTAATTGGCTAAATAAAAACATATAATTGTCTCAATAGATGCAGAAAAATCATTTAATAAATTCCAAT
ATTTATATAAAAACTCTCAGCAGATTAGAACTAGCTGTGAACTGCCTAAACCTGATAAGTGGCATCTATGAAAAACTTCAGCTCACATCACACT
TTAATAAAACACTGTGTGTTTCCTCCCTAAACATCAAGAACAACACAAGCACATCCACTCTCACCACTTTTATTTGACACTGTCCTGGAGTTTC
TAGCTAGTGCAATAAGACAAGAAAAAGAAATGAAAGGCATCTAGAATTTAAAGGAAGAGGTAACCTGTCTTTATTCACAGGTAACACAATTGTT
TATATGGAAAACGCCAACAAATCTACAAAAAAGAATAAGTCTGCTGGAACTAATAAGTGAACTTAGGACAGTTGCAGGAAACAACATCAATGTA
CTAAAAGTCAGCACTTGCAACAAAACATGGAAATGGAAAGAAATAATACCACTTTAAATAGCTGATAGCTTCTGGACTAAGAGGAAGCTGCAGG
TAGAGGGGGCAGGTGGAAGATTTAGGAGAGTATGGAGGTGGTTGCTGAGCCTGATATGAGAAGAACCTGGACAGAACAGGAACAAATGCTTTGC
CGAAGCTTCTGGACCCACTGGGCTGGAGGACAACCAGCAAGGAACAGCAAGGAAGGAACCAGCAAGGAAGCTTCTGGACCCGTTGGGTTGGAGG
ACAACCTCAGCAACCCTCTGAGGAGGGAGAGACAGAAACTCTCTGCAGAGACTGCAGGTTGTGACACAGAAGCTGATGGCCTCGATTTCCCTCC
ATGAAATGGGACAGTAGGGTGCCGTTGACAGTCAGAAAGGGTGTGCAGGAGGTGGATGCTAGGGAGGAAGCCCACAAAGGGGCTGATGGACTGG
CCTTGTAAGAAACAAAACATCATGTCTCCTTGGAGCCATGTCTCCTGTGCCTCGCCAGGGACAGTGGGCCCCAGCTTCTTCGACCAGGGAAGAT
GGCAGTCAATGGATACCCCAATGGCTTTTTCTCTTCACCTGTTCCCCCCACTCTCCTGTTCCCTAGAACCATGTTCCCACATAAACCACCTGCA
CTCACTACTTGTATCATGTTCTAAAAATCCCACCATGTCCCTGGAGCTCAGGATCTTCAAGGCCAAGGGGAGGCCCTAAAGGTGAAGTTGGGGG
TGAACCAGAGTGAAGGAGAGCATCTCCAGTGATGAGGGAGTCCAAGACCCATGATCCTGGGTGATGGGGGTGGACAGGAGGAGCGTGACTGTCA
AGCTGCCCAGGCCCAGGCCCATGTGTGAACAGCAGCCCTGTGAATCTTGCTCTTGGCCTCTGAGCCTTGGCTCTGGCTTATGCTCCAAAGATGG
TGACACTGCATCTCCTGTGGTCTCAGGGATCAGCTGGGTCATGCAGGTTTCAGCAGGGGTTGTGGTCACCACTATTCCCATGAGAGAGGTCATA
CCCACAATGTAAAATCCCACTTGGGCTGCAGGACAGCCAAGGGCTAGGGAGGAGGCGCCGCTCATGTCACCCACAACCTTGCCCAGAAGGGGCA
CTGCCTCTAGGGGAAGATTGGACCCAGGCACCCCTTCAGTGCCGCCCTCCTCTGGCATCTCCACTTGGTGGCAGTATTGGCCCAGAAGCGGAAC
TCCAGCAAGCAGCCACCAACCGGTCCCTAAGAGCTGCTGTGGCAGCAAAACTTAGCTCTTTCCCAACAGGAAAGTCTGGGGAGTCTATTGCCCT
CATTTCACAGGGAAGTAAGTTATGGCCTGGGAACCAGGATTCTGGATAATTAATCTGCAGGATTCCAGAACTCCATGATACTGTGATTTTTTTT
TTTTTTTTTTTTGAGTAGTGGTCTCTCTCTGTCACCCAAGCTGGAGTGCAGTGGCACAGTCATGGCTCACTGCAGCCTCGAACTTGTGGCCTCA
ACCAGTCCTCTCACCTCAGCCTCCTGAATAGCTGGGACTACAGGTGCATACCACCATACTCAGCTAATTTTTTATAGAGACGGAGTCTCACTAT
GTTGCCCAGGCTGGTCTCAAACTCCTGGGTTCAAGAGATCTGCTGGCCCCAGCCTCCCAAAGCACTAGAATTACAGGCATGAACTACCTGTCTG
GCCCATTGTGATTTTTTTTTAATTCTCAAATTTGATTTTCTTATGGTTCTAAGACTCTCCATCTATGGGTCCATGCTTGAAGAACCATAAGATT
CTAAGATCAGAGGGTTCTACTGACTCAGTTCCCCTGCATCCTATAATTCTGTGTTTGGATGATTCCAGCATTTCATGGCCATTTCATGGGATCA
ACCAGGATTAACCACATGGCTAAAGGGAGAGGCTGATGGCCCTACTTCCATGGTTCCCAGATTCCATCTTCTCTTCCTCATAGGGAGGTCCACA
ATTCCCCACATATCACCAGGCCACCTGCAAGGAGAGCAGGTCCAAGAAGTCACCTTGCAATGAGAATGAGATCGTGTGCCTCCTACATCATGCC
CTAAGGGAGAGAGGACAGCATGGAGCTAGGAGGTGGATGGCTGGGGTGTCAACTGAGAAAGACATGCCTGTTGGACCCCAGAGTTGACTTTTAT
GGCATCCAAGAGCTGCCTGTGAGAACACACATGGTTTGATTTGTGAAGGGATGTTCACACAACCATCATGCGTCAGCCTTCTCAAAGGTGGCGT
TCGTAGCACAGCATGCGAAGGGCTTTGAGTCAACAGACATTCCTGGAAAGAAAGCAGTGTGGGGGTATGGAAGGATCCCTGGAGGCTGGGACCT
GGAGACCAGGGTCTTTCCTGCGGGCCCATTGCTCCTTCCACTTTGCCTTGAGCCCACTCTTTCCATACAAGGAGAGGCTGACCTAAGGTTCCAG
TTGCTTTCATCAGGTGGGATCTGGTGAAGGGTCAAAATGGAACTCTAAGATGGGTAGTTGAAGGGGTGACACCCGAGGAGAGAGTGATGTCTCA
AAACAGACTGAATTATTTCCCAAAGAGGTGCCCCAAGCCCCTGCAAATGCACTCTCTAGGAAGTCTGGCCACTGGGCCCCTTGCCCTCGTCCCA
CAGGGCAGCTCAGAAAGGCAAGCTCATGAGGACCGGCTCGTGTCCACCTACCCCCCTCATTGCCTACAAGGACTCCCGAGCATGCCCCCCATCC
TGGCGCAATCTTCTGCCCTGGAGCCAGGAAAGGATGGCCTTCTGAGTTGGAGTCCTGCAGTCGGTCTTCCAGTCTTGGAGGGAAACATATACTC
TACAAATGGTGAGCCTCGGAGAGAGCCCAGCCCTGCTGTGCTGCCTCCAGGAGGTTCAGGCGGCTATGCCTCCTCATTCAGCCTCACTGAGCCT
TTTCCACTTCCAGAACATGGTGAAATTCACTTCCCTCTGACCACACAGTGCTTGGTGGATCACCGGGCACACAGTGGGCCTACAGTGGGCATGG
TAGTCGCTGTCATCACTCCGCTCCAGGAGCCTTCAAGAAATCATCTCATCTGACAACCCACATTTACCATAAGGACCTTTTGGAGGCCAGGCGC
AGGGGCTCACCCCTGTAACCCCACAGTTTGGGAGGCCAAGGCAAGAGGATTGCTTGAGCCCAGGAGTTAGAAACTACAGTGAACTATGATGGCA
CCACTGCACTCCAGCCTGGGCGACGGAGTGAGACCCTGTCTCAAACAAATAAAAAAGAACCTTCCGGAGAACTGAAGGAAAGTGGAAATTTGAT
AAGAGATCTGGGCTGGAGAGGAGAAAAGTCTTTTAAAATATAAATATAACGGCAAGCTCAGAAAGATAGATACAGGGCAATGGTAAGAAGCAGA
CAGGTAACCAGATTGGGCTAGTGGGAGATGCTCATTGAGACAAGCAGTGCAGTGGTGTGCCACTGTGAGGGGGAAACGGGGATGGTGCCCCCGC
CATCCTGCTTTGTGACTGGCGTGCACGGCAAGGGGGCAGAGCAACAACTTCTGTGGGCTGGACCTGCCCTGGGCAGGGGCCACGGGGAGGCCAC
AGACTCCGGTCTGAATAAATACACAGCAGGAACCCAGAGCTGTGGATATGTAGACCCCACACACAGCCTCCCACAGAGGGCAGGTAACCCACAG
GAAGACAGACAGCCCTGAGCTCACAGCCATACCTGCAAAGCCCTGCCAGGACATACCCACATCAGTAATGTCCACGGGGGCTCTCATGGTGATA
TTAACGCGGAGGAGGTAATTCCCACAGTGCCTGAGCTGAACAATGCCAACAAAGGTGGAGACGGGGCGGAGGGACAGACAAGGAATGTAGAGAG
GGGCTGCAGACAGGAAGAGCAACTCACAACTGTGCAGGAGGGCTCATCGGCTGTGACAGGAAAACACACAGAGACTGATAGAAAGACAGGACAG
CCATAGACAGGAGGTGGGAGGCAGACAGGTCTGTGGCCCAGAGACCCTGTCTCACCACAGCAGCTTTGGGGAAGCAGGTGGCCACGTCATTTTC
CTTGTCTCTGTTTGGCTGACCTGTGCATCTCAGGCCCAGCCCTGGCTGCTGTTTTTCCAGCTGCAGTTCCCAAACTGTGTGCTAAGGCACCCTG
GGACGCCACAGCAAATTCCCAGGGTGTTGCAGAATATCACGCCTGTAATCCTAGCTCTTTGGGAGGCCAAAGTGGGAGGATCACTTGAGCCCAG
GAGTTCAAGACCTGCCTGGGCAACATGGTAAGGCCCTCGTCCCTGCAAAAAAAATTTGTTTTAAAGAAAGTACAATTGAGTCTTGGACAACATG
GGGGTTAGGGGCACCAACCCCCTGCAAAGTCAAAAACTTGAGTATAACTTTTGACTCCCTGAAAACGAAACTACTAACAGCCTCCTGTTGACCA
GAAGCCTTGCTGATCCCACACACAGTCAGTCAGAACATACGCTGCATGCCACATGTGTTATCCCCTGTGTTCCTACAATAAACTCAGCTGGAGA
AAGGAAATTCCTGCTCAGAAAACCTAGAAAAGAAGCCAGACTCACAGTTCATGAGGCGGCAGTGGGTCCTCATAAAGGTCTTCATCCTAGTGGT
CTTCATATTGAGTGGCTGAGGAGGAAGACAGAAGCGGGGCTTGGTCTTGCTGTGTCAGGGTGGCAGAGGCAGGAGAAATCCATGTATAAGTGAC
CCACACAGTGCAAACCTGTGTTGTTTGAGGGTCACCTGTCCTGCATGAACATCACCTTGTATGGCCTGAGAGCCAGGACCTTGAACAAGAAGTG
AGAGTGTTGCTTCTGGAGGGCCAGTAACTGCAGTTATGTGAGGATGAAATAAAAATATGATTCATTTATTTTTAACTGATATGATTTTTTTTCA
AATAGCTACTGATCATTAAGTGGTTGGACCTAATTACTTAATAAACAAAGCTCTTAGGTATTTATTTTAGCCTGAGGAGCTGGGCAAAGAATGA
CTATAAGTTGTTTTCTTGATTAATTTAATTTAATTTAATTTAATTTTATTTAGAGTCAGGGTCTCACTCTGTCACCCAGGTTAGAGTGCAGTGA
TGCAATCATAGCTCACTGCAGCCTTGAACTCCTCAGCCCAGATGATCCTCCCATCTTGGCCTCCCAAAGTGCCGGGATTACAGGTGTGCACCAT
CACACCTGGCCAATTGAAAGTTTTGATCTCAAGAACCCACTGCTTATGGAGAAGGCATCCAAAGAGTGACCCCCACAAGGAAGGTCAGGGAAGC
TTCCAGAAGGGACCAAGTTCCAATGGAACTGACTGTGGAGGGGCACTCCATCTTCTGACCCTGGACCCCTACCCTGTCCTGCTGCTGTTCCTTC
CAGGGTCCCTCAGCCAGAAAGCCCCCAGAGCCTTGAACTCTGTCTGCCCAAACCCCTTCTCTGTTTTCCCCCAACTTATTTTTGCTCAAATGAG
AAAAAAAGGAAGCAAAAGATGACCAGTTAGTGTCTGAAATCCTGGCTTGCCCCACCCATAACAGGGACTCACACCCGCTGTAGACAGGGAACCC
ACTACCTCACACAGCAAACTGTCCATCAGAGATGCCCCTCCCACCTGGCTTACCCCACCCAAGCAGGTATCTTACAGAGCTTCCGGGGTGGGCA
GCGCCTCCTCTCGCCTGGGGGCCTATTCTGGAAGGAGGGAGCACGCTCCCTGGGCCCTCCAGCAGGCCAGAAATGATGTTCCCTCCAGCACCAT
CCATACATGGGGAGTTTTGTTTTATCAAACACATGGCTGGCTGCTCAGGGCTTAGCTCCAGAGCTGCCCGGTTGTCAGGCCTTCTCACACGTGC
CCTCTCTGAGGACGATTAGCCCTTTCCTGACGCTGGCTTGCAAAGGTCTCACCCACCTCCCCGTTCCAAGTGTTGGAATGTGGGTCTGTGTCCT
GGCCAACAAGGAGGTCTGTGGAGACAGGACCGGGTCTCAGTCACCGTTCAGCAGCCACCCGGCATGCCCCCAGGAGCCTGCCCTATGCCTTGAC
CTCAACCTACGCCATCCCAGTCCCCAGCGCAATGCACAGGTGGGGACATAGACCTTGACAGACTGGTCAGGGACAGCTCCCTTTAGGCAACAGC
AGAGGGCGCTTCCAGGGAGGCCCCTCACCTTCCTCTGCACCCCAAGCAAGGGACAAGAGGTGCTGTAGGCAACATCACCCGAGCCTGGAAGACA
CTCAGGAGAAGCCCCTCAGGCCCCTGACACCCAGCTGGGGTCCCACCCTTGCTCTCCCACTCTGCTCTCCACCCCACCCCAGCCCAGCCCCACT
GACTTGGCTGCTCAGGAGCCGAGGCTCTCGGAGGCTCACAGAGGGAAAGAGGAGCCCCACATGGTACAGGCAGGTACCGAGGAGCTAGTTCCAG
AAGCCTCCACTCGTTCCTCCATGCAGCCTACCCTGGCTCCCTGGTATCCAGAGTCTTCAGAAACAGGAGCCCTCGCTTGAGAGCCTGGCCTGGG
CAGGCTGAGCTCCTGCCTGGGGCCTCGGAGTCTGCTCCTCCCTTCATCTTCTGCAGCCTGGGAAGCGGCCGGATCTCAGTGTGTCTACTACCCA
GGTGGCACGGGCAGAGGATGGGGCCTGATGGGGGAGAAGAAAGCAGCCAGGAGGAGGGGCTTGGGAAACCAAGGGGCAAGAGGGCAGGACTGAG
CAGGCTGCGCTCACCTGCCCCCTTCAGAGAGGTCACGAGGCCCATCCTGTCGGTGGGCAGAGCTGGCATCCTCTAGGGGGCTCTAATCCCCGAG
CCTCATTTCTGGGGAGGTGGGGGTAACAAGAGTCTGCGTGCCTCAGGCTGGGCTCAGGCGCCCACCCCACCTGCAGCCCAGGTTTTCCCCAGTA
CCACAATTGGGTGGGATTTTTGCTGCAAGGCCAAGTCCAGAGGAGCACAAACACGCTCCTCCCCTCCCCCTCCCTGACCCCACCGCCGCTTCAT
TCCAGAGCTCTTCCCTCTTTCCCTCTGAGGGTGGGGGCCCCGCAGTGCCTGGGAGAAGCGGGTGGGCGGCCGGGCATGCGTAGCGGAAACTGGA
TTCCCAAGGTAGTGAGGAGCAAAGGGAACTTTTTTTCAAAGAGAAAGGCTGTCACTCTGAATTCAGGACTCCTGACATAGTCACCAGGTGACCC
CTAGGGCCGGTGTCCACAGGACCACAGGCTCCCTCTGCAAACGCAGAACCAAGTTGTGAGTGGGGCACACTGTGGGAAGCAGCTGCCTCCATCA
GCCAGCCAGTGACACACCTGGGGACATCTCAGCCACCCCCTCCCTGAGAAGCTGCACAGAAGCGGCCACATGCCCATCCCTGCCTCTCCATGCA
CCTCCCTCCCGCAACTCTGCAGCCGCACAGGAGGCCTAGCCCACAGGCTGGGCAGTGCAGTATCCCCAGAGAACACACCACGGATGAGTCTGGA
GTTGCTTGGAGCTCTCAGAAGCTCCCGGAGCCTCCTTCCTCAATTCCAACGCGGTAACCAAGATTCCTGCTGAGCTTAGGTCACAGTGTGACTG
CAGGAGGACCAGCCGCGATGGGAGAGTGCCTCTTAACCATCCCAGTTATCAGGTCCCCCGGGGGAGGCTGGGGACACTTCCCCTCTGCAAATTA
CAATCTCCCCAGGCGGCTCCCGGGGCAACACATGGATATGCAAATGACTGGGAGCTGGAGAGTTGACTGGTCACTGGGTGACCTTGGGCAAGTC
ACTTTCCCTCTCAGGTCTTCCCCTCTCCATCAGCAAACTCCTAAAGCTTAACTAAACAGTCAGAAATCCCTCTGTCGGAACAGGCTGCATAGCT
CTGGGCAGACCTGGAGGTTGGTGGTCCCAGAACCTGGGGGCAGCACTGCGCTTCCCCACCGTCCCATCGCGTCAGGGGCTTCCACTGTTCTCTT
CCCTGGTGGAGTGATGGGGAGAAAAATGGAGGGGTCAATCCCTGCGCCACAGAGAGAGTCCCACTCGTCCCCAGCTGTGACCCACAGACGCGTG
GCTGCACCTTGGAGGTCCACCTGGCCGCTGTCCCCATTGCAGGCTGCACCCATCCCGGACCCTTTCTATCCGCCGAAGGCGCAGGCAGCTCTGG
TCTCAGCGGAAGGAGTCCGGCCGCAGGCAGACGGGGCCAAAGGACGTGCACCCGACAACCGTCCGCTCCCTCCCCAAACCCCCGCCCCGAGAAG
GTTGATGGATGAAGGGGAGCCCTAGCCCAGCCACCTCGGGGGCAAGAGACGGAGCTCGCCACAGACCAGGAGCGAGAGGGGGACTGCGGGTCCC
ACCGTGAGCGCAGGGCGCGCGGGGCTGGAAACCCAGGACGCGGCCCGGGAGCTCCAGGAGGGCGCCTGCGGATCGCGCGGCCCCGGGCCGGCCG
CCTGCCCATCTGGCGCACCCCAGCGCGCCGCGCACACCTGGGGGCCCGCACACCAGCACGTCCTCAGACACACCGACACCCACGGCAGCAGGCG
GGGGCCAACGCCGCCGCCGCGGTTCGGGCTCCCGTGGCCCCGCCTGCCCCTGCCTGCCCCGCCCGGGCCCCGGCCCCGGCGGGCGCCCCCCGCG
GCGCTGCCCCGCCCCCGCCGCCCCGCGCCGCCCCGGGCCTCGGCCCGCAGCCCGGCCGCCGGCCCACCTGGCGCAGCGCCGCCCTCGGAGCCCG
CGCACACCCGCGCACCCGCGGCCGCAGGAGGGCCCAGCGACGCCGCCGCGCCAGCTCCCAGGGCCCGGCCCCCCCCGGCGCTCACGCTCTCGGG
GCGGACTCCCGGCCCTCCGCGCCCTCTCGCGCGGCGATGGCCCCACTCGGATACTTCTTACTCCTCTGCAGCCTGAAGCAGGCTCTGGGCAGCT
ACCCGATCTGGTGGTGAGTGAGCCTCCTCGCGTTCGCCCCTGCCCCTGTGCGCCGCGCCCGCAGCAGACGGTCCCCTCGGGCAGGGACCCCGCG
GTGGCCCGAGCCCGCGCCCTTCTGCTCCAGCCCCGCGTGCGGGCCGCGGGCGGTTGGTTTTCCTTGACGGCCACTTTGGACCTGTTCAGGCCGC
TGGGACGCGTGGGTGGCGGAGTTTCCGGAGACATTGATTCCCGAGCGGGGGAGTAGGGGAGGTTGCGGAGGTCCTAGCTGCCCCTGGCGTCGGA
CAGGGCGAGCAGTGGGCTGGGGAGAGGCTGAAAGAAGGTCGGCACGCACGGTCACCGAGGGGACAGGCAGCTCGAGGCCAGGGGACAGGCGAGG
GAAGAGGGCCAGCGAGAGAGAATTCGCCGGAGACTTTCCTCAAAAACCGTATCTTACACACAAACACACACACACGTTTTAAAACAAAGTCGAT
GAGACAAGACTGAACAGCTCGGAGCAGCGTGGTTACGTAAAGAAAGCTGGGACCCGGCGGGGAGTGGCGCAGAGCCGGCGGCGGGGCGCACTGG
GGGCCGGCCCTGGGCCCCGCGCGCCTCCCCGCCGCAGTCCGGGCACGGGGGTTTCCAGGGGCCCTCTCTGCGAGCCCTCCGCATGGGTCCACCT
GGCAATGAGGGGCTGCTGTAGAGAGAGTTAAGGGTGAGTTAAGCACGGGGTGTGAGGGGCTCCAGGACCCTCAATCAGAAAGCGCTGTGCTGCG
CCCTCCACACCAGAAAAGGCGCGTTCCGTGAGACCCTCCCCAGCCTGGCGATGGAAGTGCAGATAAACCAAAGGAAGGGTCCCGAAAGGTCTCT
CTCAGGCCTCCCACCTCCACTGCACATATCCTGTGGGAGGGGGAACGGTGGCCACACTTTCGCCAGGGCTTGTGATCCCTCAGAGCCCTCACCA
AGCAAGGATCACCCCAGTTCCGAATTAAGGGCGCTCTGAGATGCCCAAGATTGAGGAACACAAGTGGGAGGAATGTGGGCGCGCAGGGCCGGGC
GCAGCGCTGGTAGGACCCACAGTTGGAGAGAAGCCTCCCCACAAGCATGCACACTCCCCCCCATCCTTCTCCGACGGCAGCCTGGAATTATAAT
AATTACGCCGAGGGGAAGGGGGGAGACCCAGCGAGCCGAGGTACATCTAATCCGATAATAATTTTTCTCTTCGAGATGGTTCAGGAGCGGGGGC
TCCCGCGGTAGGGGCGCCGGGCCAGGAGCAGCGGGGAGGGGAAGGGGCAGCCCTAGGCAGCTGAAGGGCCTGGAAGAGGCCACGAGGCCGCGGG
GACGCGCTTCGGGGACCCCCGCGCGCCCCTATTTCCGCGTGCCCCATTTCCCGTGCGGCACCTGCTGCGCCCAGTGGCCCACCTGAGGGTCAGG
CTCGGGGCTCGCCTTGGGGTGCGGGGATACTGACGCGCGTCCAGACGGCCGCAGGGAGCCAGGGGCAGCGCGTCCGTCCGAGAGAGCCCCGAGG
GCTGCCGGCTTACGCACCAGGCTTCTAATTAGAACCCGCCGCCGCGTTCCTGAGCGCAAAAGGAAGCTCCTTCGCCCCGCGCCCTTCCCATAAA
TGTCGCCAGCCTCCTGGCAACCCCGCGCCCTAGGATCTTTGTCTTGTCGGCCCTGAGGGTTCCTAGCCTCGGTCCCCATCCACCTCATATGCAT
GTATACCTCCTTTTCACCTGGGCCCCCTGTGTTCTACCCTGAATGGACCCTGAGACACCCTCGGGGACAGTCAGGCATTCTGCAGGGGAGCCAG
GAGGAGCAGAGAAGTGAAGTCCCTGTACCCTCCGCACCCTCCTATCAAGAGTCCAGGACAGCCCTTTGGCCACACAGGGAAGCGGGGCATAGAA
CCCCACCTGACACTGACCGGGGTGGGTGGTGAGGACCCCTCCCCCATCCCCACCACCACTTTGTTCTCAGTAGGGTTCTCACACTTGGGGATTC
TCTGCTTCCTGAGAAGCAGCCTCCCCTTGGGGGAGGCTGGCTCCCTGGGGACAAGTCTGCCCCCTTCTTGATCCCCTCTCTGCTCCCAGGCAGG
CTGCTCGGGCTGGAGCAAAGACATGGCTTCCCCCAGGCATGAGCAGCACCCCGGCAGCATAGGGAAGAAGACTCACAGAAGGACGCAGTGCTGC
AGGACCCCTGCTGCTGGACCCCTGCCGCTGGCATCCTACAGTTTAATAGCCTTAATAGCCGGGGAAGATTCTCTCTCTTTCTCTGGTCTTCTAC
CCAGTAGAGCATCTCCTCCTTTCTCCTGCCTCCCCGCATCCACCCCAGATTAAGCATCACCAGGGGAGGAGGGGACCTTGGCCCCTGCCAGGTG
GGCTCCTGGTGAGCCCCAGTGGAACAGAGCAGGCTGGGGTGGGGGGCCTCCCTGTAACTCCTCACCTGTGCCCCCAGCCCCTCCCTAACATGAA
GCCGCTGGCCCCTTGATTCTCCCCCCTCCACCATCACCGGCACATGAAAGTGAAAGTGAAGGGGAATCTCCTCACCTGGAGAAACAAACCAGGA
AACAGCCCAAATCAGGGTAATTAGGCTTTTGAAGTTGGCAGAGGGAGAGGCAAAGGTGTCCCTGTGGCCAGCAGCCCTGTGAGAGTGTGAAGGG
CCACCTGCCTCCCCAGGGCTGGGTGGCCCAGAGGTGTCTTATACCCACGCAGCAGATGCCAGTGGTCCCAAGGCTGAGCGGGTCTGAAATGCAG
AGAGACGGGCCTAGCCTAACACTGAATGGCCCAGAGCTGCACAGATGTCCAGGGGCATCCATTCTGAGCTCATCCAGTGACAGAGAGGAGACAG
GCAGGAGACCAGACCAATGCATATGCATCTGCCCACCTGCGTCCCATGAGGCCACAGACGGCAGGAACCTAGTGGCCCCAGCCTCCCAGCACGC
CCCTTCTAAGCTGAGTTCTCAGGAACAAGAATTCTTGGAAGAGCCCACATGGACAGAGGACAGGGCAGCTGCGCTGCAAGGAGACCATGGCTCC
ATCTGAGAACAATCCCCAGGCACACCCGCACTCCAGGGCACTCTGAGCACCTCTCCCTTCTTCCCATGTCTGGGTTAACGGAATCTTGTCATCT
CCCCAGGGACCCCACCAGGACCCTAGAGGTGGGCCTGTGCCTCCCGCCACCGCCTCCCCAGGGTCCAAGCCCACTTCAGGGCTTGCAACTGGAT
TTTGTTCATCTTTCAAGTCCCTCTGCTGCCTTTACCAGACTGGGCTGTGGCACTCCCGCCACGGCCACCTCCTGCTTCCGTTCTCAGTCCTGGC
CCTCCCCTGGGACCCACACCCTCCCAGCCACCTGGAGTTGCTGCCAGGCCTGGCCATAGCCACCGTCGCTGCCTAGTGGAGCACAGCAAGCTCC
ACCCCTTACCCAGCCCTGCTCTCCCTCTCAGGCCGTTCCTTCTGCCCGGCCGTCACCAGCTCCTGCTGGACTATGGGATCCCAAGCACAGAGGC
CTGGCTGCTTGCAGATGGCCACCCCAGTTGTCCCAGCGAAGTGCAGTGTGGGCTGTGTCCAGCCTTTTGCCTGCCCCTGGCCTGCTCCACAGCC
TCGCTCATGCTCCCTCCAGGGTCTCCCTCACATCCCTCTGGGCCTCGAGCTTGTCACTATGACAGAAACACATCATGACCTCCATTTTTATAGG
GCACCTCACACAGCCCTCAACAGAAGATGTAGGCCCTTTCAGGCCCCCACTCTCCTACACACTCATGGGTGCAAACAACCTCCTGGGCACAAGA
GCTCAGCCCCTCCTCCTAGCCCTTCATGGGCTGGAGGGCCAGCACACTTGGAGGCCCTGCTCAGCCAGTGTCTGCACTGCACCACCGCCAGGCA
CTTCGCCCCTGTGTCCTCAGTCCTGGTGGGCCTCATTGTGGTGGGGAGACAGCCTGACTGGAAGAGGGGTCGGGTGAAGAGGCAGCTTAGAGAG
GCAGGAGCCAGGAAAGGGTGCAGGAGAGAAGGAGCTCGGCTGGAATGATGGGTCAGGCATACGTGTGTGGTGTGTGGGCAGGTGGCTGCAGCAT
GGGTGTTTCGGGGACTGAGAGGGGCCAGTCGAGCAGGGCAGGGACATGGCCCAGGGTACCCAGAAGCTCAGATGGGAAGGGCCTTGTGATAGGA
GGGATGGTTGCCACTCCCAGAGTCACCCTGCCTCCACATTAGCCTGCCACTGGCCCACTCCCTCTGCAGGCCTGGCCTCACCCTAGCCCCTTCT
TCCTTCTCCCTTCGCCCGCATCTGTCTGTGTCTCTCTGTCTCTGTTTCTCTCTTCCCTGCCTCTGTCCCTCCATATCTCCATACCTTTGTCTCT
CAGTTTCTCCCTGTCTGTCTCTCTCTCTTCCCTGTATCTGTCTCTGCCCGTCTCTGTCTCTATCTCTCTGTGTCTGTCTCTCTCTTTCAGTCTT
TGTCCTGTCTCTCTCTGCCTGTTTCTGTCACTCTATCTCTTTTCATCTCTGTCTTTCTGTCTTTTGCAGTCTCTGCCTCTCGTCTCTGCCTCTG
GTGCTGAGGACAGCAGTCACTAGCAAATAAAACTCGTGAAACGAGCTGAGTGGAGCCACCAGGCCAGCCCTCCCAGAGCTGTGGGATCTCAGGG
CCCTGGGGGTGGCATTGCTTCTCAGAGCTGCCCACACACAAACCCCTCCTGAGGGTGACGGTCAGGAGTGGCCACACGTCAAGTGTCTGCAACC
AGACATTGGCCCTGCATAACTGCCAGGATCCGTAGCCGCCTCAGGGACGCACAGCACCCTTCCAGAGTGCAAAGCTCCTCCTGCCTGGTGCTCG
CACCTCAGGCACTGGCCAGCTTGGGCCCTTGAGGCCAGCTGCCCCTCTGACTCACGGGGCTTGTTCTAACGATGTTTGCTTCGCATAAGCCTCC
TAGAATCTTTTGTAGCAGGGAGAGCAGGATGAGTAGATACAGTCATAGCAGCCCAGTCTTAGGGGTGGTGACTGCCCGGTGGCCACTTCTTCCA
CTGGGTCCCTTGTGCACATCACCGTACTGTGAGGAGGGAAGCTCCGGTGTCCAGCAGCCCTCCCAAGATACAGGTGACAGGGCTCCCGCCATCT
CCATCCAGGGACCCCGTTGGGGCTTCTCAATGTGGGGCCTACCATGCAGAGCCCAAATGTGAATGCTTGGCCACCTGCCATGAAGAAATCAGAA
CAGAAATGGGAATTTAAAAAGGATTTGGTGACATTGTAGCGGTTTGACGGTGCTGCAACCATTTCTGTGGATTTTGTAATAATGGAAATTTAAA
AACAAACCAACCACGTCCCTCTGTTGGGACTCTAGTCTGAGAAAGCCAGCCTGAAGCCACACCTGGAGTAATGGGGGTGGGGGGGCTCTCTCAA
TGTGGACCACTGCCTGTAGCCCTCATCCATTGGATTTTTGACCCAAACGTGAGACTTCTAACTTGCCCCCTTTAAGAGTAGTTGAAGGGCTGGT
TGCTGTTTCTGTTCAGAAGACCCGCTTCATGTCTCTGAAGGCTATTGGCTGGGGAAGAAGGATTAGACTGTGGCTCAAGGGGCAGGGGCTGGGG
CAGAGGTTGCAGGTGCCAAGGAGGCTGGTTCTGGCTCCCAAAGAGAAAAAGCTCCCTAGGGATGAGAGCCTGTGCCCCAAGTGGTACCAGGGAG
GTGCTGAGCTGCAGCTACCGAGGCCGAAGAAAAGGAATGTCATTCACAAAGGAGACCTGTACAGCCCCACAGACAGGGTCTCGCTCTGTCACCC
AGGCTGGAGTGCAGTGATGTGATCTTGGCTCACTGCAGCCTCGACCCTCATGGGCTCAAGTGATCCTCCCATCTCAGCCTCCTGAGTAGCTGGG
ACCACAGGCGAGCACCACCACTCCCAGCTAATTTTTGTATATTTGTAGAGATGGGTTTCTCTCTCTACAAGAAACCATTTCTCTCTCTAGAAGA
AACCATGTGGCCCAGGCTGGTCTCGACCTCCTGGGCTCCAGCAGTCCTCCCATCTTGGCCTTGTGAGTAGCTGGGATTACAGGCTCGTGCCACT
ACGCTTGGCTAGTATTTTTCATTTTTTGTTGAGATGGGGTCTTGCTCCGTGGCCCAGGCTGTGCACTTTAATGTTGGACAATCCCCCACCCCAC
CCCTCACTGGTTACAGCCCTGAGGCTGGTGAGGGGCACATGGCCTCTTCCTTGGCCTCCCTACTGGCCTCCCCAGGTGACACCCTGGAGGTGTC
TCTCACGTTGCTGCTTCCACATTCCTTCCCCGGCAAAACGTGCCGCTGCCGCCCAGGGAAACTGGCAAGTGCGTGGCCGCGGGCACAGGAGCCG
CTGTGCCTGCTGGGACTCGTTCAAAGTATGTGTCAGTAATCCCAGCTGGGCCGGCGGGCAGGAGGAGGTGCGGGTTGGGAGAGCTCCAGGCAGG
GCTGGGCAGCCTGGACTGGGAAGGGTTGCCGACACCCAGGAGGGACCTGGGGGCCTTAAGTCCTGGGGACCCTGGCCGGCTCACAAGGTGCTTG
AGCTGCCGAGAGTGGTCTTCTAGGCAGCTGCAGTTCCACCACTGGGTGTGAGAAGAAACCAGAACCTTGGGGGTCTCCCAGGCAGGTGGGTGCC
CTCGGGCAGTCTCAGCCTGGGCGAGATGGGAGGTCATCCACCAACAGGGAAACACTTCGAGCCTCAGGTCTGAGGAAGGAAGCCTTATCACCGC
CCATGGAGTGGCCCTGATCTTAAGAAGACAAAGATTTGGAACAGGATGTTTGCTCCAGAGGCCCCACAGAGGGGAAGCCCACCTGCCCAAGCAG
GACCCTCAATGGCAGAGACACCCACCTGCCCTGGTCCTCCACACCTGCCTGCATTGCAGCTGTGCTGGAGCCAGAGGGGTCCCAGGAGGCGACC
AGCTGGACTCAGGGCACAAATTGCATCCTGGAGGGGTGGCCCTGGCAGGTCCGCGAGTGGGGTGCACTGGGTCCCTCTCAGGCCAGGAGGAGGC
TGAGATGACATCCAGCAGGGCAGCAGGGCCTGAGATCAGTGTCCCCATTCCATGCACTGCTCCCCTCCTCTCTCAGAGCTTCAGGTAGGAGAGG
GGTCCATTACCCCATTTGACAGATGGGGAAACTGAGGCCCAGGAGGGGAAAGAGAGAAAGAGCAAACAAACAAGCGAGTAACAGGGCCCGAGTT
GGAGCCCATGCCCACCTTCCAGGCCTGTCCACACGCCTGCATGGAGCATTACTGTGAGGTCCCCACGCCCCCAGCAAACATGCAAGCACAGAGC
CGTGCCCTTGGTACATGGGTGCTCTGAGTTCGCTAAATTTTACTGCTAAAAGACACCAGGCCTGGACTTGAGAAACCTAAGAGCCTGCCAGCCT
CAGAAGGACTTGCACAGGAACAGTGGAGGCTGGATATGGTGGCCACTCAGGACCCCCACAGCTGTGTGGCTGCGAGAAGGCCCCCACGCTTTGC
CCTGAGCTTCCATCCACAGGGATTAGGTAGCACCTCCAGTGCCGCCACGTAAGATGGGAAATTGCACATGGGACCAAACCAAGCCGGGGAGGCC
AGCGTGGCCCGGACTGGGCTGGCCTACCGCCCGCCTTGTGGTCCTGGGCCAGCCTCCTTCTTCCCCTGCATGTCACAGCCAGCATCTCTGCCGT
ACCTCTGGCGAGCTGCCCAGCCTTTCAACAGAAGTGAGGGAGTGGGGAAGAAAAACCATTAGTGCTTGTGGGCTGGAGGCATGGCTGCTGTGAC
TTTGGCCACAGGCGGAAGCCATGGGTCTAGGGACTGGGGCCATTTTATAAAACTACATTTGTGTGTGTTCTGAGTGAATATGACAGCCTCCCCT
TCAAAACAAACGATTGTTAGGAAAAAAACAAAACAAAACAAAACAAAACCTAACAGCATTAGTGAAAATCTGGAAGGAAAGACAAGTCTGTGAT
CTTATCAACTTTTTCAACTTTTTGTTTTTCTAAGGATAGAAACAGTTTGTGTTCTGTTTTTGAAAACTCACTAAGCATCATCTCCATTTCTGGG
GCCTTCTGGATGATCACACGATGGTTCCACTAGGTCTTGTGGTGCTGGTACTGCGATCTGCTAGCCCAGCCCTGCCGTTCCCTCCAGAGCTGGG
ATTCCAGGGAAAGGGGACAGAGCAAGAGAGGCTGGAGATATTGGAAGAGCAGGGTCACATTCCCTTGGGACACCAATTTTGCACAGCCAGAGGG
ATATCTGGTGTCCCATCCAGTTGGGCAGTTAGAATTCCAGCCACTCAGCTGTGTGGCAGCTGGACGTGGGAAACATGGACTCTTCCTGGGACGC
TGTGGTGTTGGCAGTGAGAGGGGAGAGGGAATGAATTCCTCATCCGGTGAATCACAGGCTCGGGGTGCAGGGCATGGGGGCAGGGAGGGCAGGC
TGGCCTCAGCCTCTCCCCGGGGACTGGGCCCAGCCTTCCTGCCCCTGCTGTTCCCACCACCCTGAGGCAGGGCCCAGACCTCACTGTGATCCAG
ATCGTTGGCATCCAGGAAGTGAGTAGGGAGTGACGGATGGCAAGACCACCACCCCCGCCTCCCCCCCACCCCCGCCGCCCAAGTGCTTACCTGT
GGTTCCTTGTGTGAGTGATCCTCAGCAAGGACCCTTCGTCCTTGACCAGACACTTGTTTGCATGCCTACAAAGCGTGGGAGAGGTCGAAGGGGA
GATTGGAGAATTCATCAGAAGCCCCAGAAGCCCAAGTGGGAGCTCCTGGCCCTGCCTGCTGGCTGGGGCCACGCTTGTCTTAGGGCACCAGGCA
GGACAGTGGCCAATCGTGGCTGCTCCGCCTGAGGCCATGAGCAGGCAGGAGCCACGGACTGACAGCCAGTGCTCAGGGTCTGTCTGTGCCCGTC
ACCTTCTGGGCACCCGATGTTGCCCCTTTCTGTCCCCCGCATGTGCTTTAAGCGCCTGCTACTACCTTGCTCTTTTGGGGATCCTACTGACTAG
AGGGTGGAGGTAGGTCCCTGACCCCCCAGGGTGATTATCAGCAAGGCTGACTCCCCAGGGACTCAACCCAAGGGAGCCCCCAAGGACCCTCAGA
GTCCTCATGAAGACAGACAGGGGCCATGGAGCAAGTTTAGACTCAAGGAAGCCATAGAAGTTTCCCCGTCAGCCTTAGAATGTCCAAGCTAGAG
GCAGCCTGGGTGAACCCAGCACACATTCCCTGTGGCACTCACGCTCCTGGGGCCACCCTGGGAGGACCCTGTTCTAAACCACAACTGCCCAGTT
CAGTTGGGGAAACTGAGGTTCCAACAGTCCCAAAGCTGCAGGTGCAACTGTTAGGGCCACCACCCATGTCCCCCTGGGTGGCCTCCTGGGGTGG
AAAGGGGGCTGCATTGGGGACAGGAAGCCCTATGATGTCTTGGGTCATCAGCTGCAAGGAGGCTGTCCAGGGTCTGTGTGACTTGCGCCATTTA
TCTCTGACTCATTTATAAATGTTATTTTGCAGGGACTGGGGTTTCATACGTGTACTTGTCCATTCTGCATTGCTATAAAGGAATGCCTGAGACT
GGAAAGAAAAAAGGTTTAATTGGCTTAGGGTTCTGCAGGCTGTACAAGCATGGCACCGGCATCTGCTGAGGCCTCAGGGAGCTTCCACTCATGG
TGGAAGTCAAAGGGGAGGTACGTGTGTCACACGCGGGAGAGGGGGCAGGGGAGGGTGCCAGGCTCCTTCTAACAACCAGCTCCTGCATGAACTC
AGAGGGAGAACTCCCTCATTACCGCAGGGAGGGCACTGTGCCATTCACGAGTGATCTGCGTCTGAGACCTAAATGGGTGGGGCCCACTAGGCCC
CACCTCCAACACTGGGGGTCGCATTTCAACATGAGATTTGGAGGGGACACACATCCAAACTATATCAACACATTTGAAGGGCATTGTAGGATCT
TAGAAAGCAGTGGCCCCTGGAGGCCAACATGCGGGAAGCCCTGTTCTGCTGTATTAGCCGGTGGCTGTGGCAAAGCTCCATTCCCTGAGCCTTG
GCTTCCTGCTCTGGGAGGTCCCAGTGCCACCTATCCAGGTCCTGTGGGTTTCAGGGAGCCACATAACTAGAGCCCGTGGGGAGGTCACCAGTGA
GCTCTGCCCAGCAGGTGGAGGCCAGGTAAGGGGCTGGGTGGTGGTAGTAAGAGGAGCGATGCTGGGTATTGGAAGGGAGAAACAACCAGCTTCA
GCAAGCCTCCCTTTCAGAGACAAGAGTGCTGGAAAGGTGGAGAGGCCGCAGGAGGAGGGAAGAGGAGGGACTAGCTCTCTAAAGACCACAGTGG
CCAGGCGCGGTGGCTCACACCTGTAATCTCAGCATTTTGGAAGGCCGAGGCGGGAGGATGGCTTGAGTCCAGGAGTTCAAGACCAGCCTGGGCA
ACATAGACAGACACCATCTCTACAAAAAATACAAAAGTTAACCGGGCATCATGGCACAGGCCTGTGGTTCCAACTACTTGGGAGGCTGAGGCTA
AGATGGGAGGATCCCTTGAGCCCTGTAGGTCAACGCTGCAGTGAGCCCTCAGCCTAGACGACAGAGCAAGACTTCATCTCTAAAAAAGTAAATT
AATAAAATTTAACAAATAATAAAGGCCATGGCAGTGGGCTGGCGGAGACAGCGGTGGCTCGGGCCCCTGGAGCTTGCATAGCAAGATGCTGGAG
GTGGCAGCCTGGCCTTCAGATCCTTCTCCTTCTCTGGGTCTGAGAAGCTTAGGTGTTGGAACTCAGAGGTGGTCAGGAAATGCCAGCATGAGCA
GGAAAGTGAGAGGGAGTATCTGCTGGCTCCCAGTGCTGCAAGACCCTATCTCTACAAAAAATACAAAGCAAGAGAACAGCACGGGGGCTTTGCC
ATTGGCTAACGCAGACTGACCTCCCCAGTTTGGGCATGAACATCCTTTTCACGTTCCAAGGTGGGATCCGGGAGTCCAGGTTGCATTGTATTTG
ATGCACCCTGAGAACTTGCGCTGAGAACAGGACCCTGGGGACACTCGATCTCGAAGACGGGGTTCTCATTCACTCTCCATTTGCAGAGCCCCTC
CCCCACTCACTGCAGCCAATACTCCCTGGCGAGACCCTGAGACAGGCCTGTCTGTCCCTTGTCCCAGGCAAGCCTGGCCCACAGGGTGTGGGAG
GAGGAAGTTACAGGTCATAGTTTCCCAAGCACTGATGGATTCCGGGCATCTGCATTCTCCTTGGATTAGAAATTTGGATCCTAGGAGCTTTTGG
GGGCTGGTGTGGGGATAGTGCCTGTGCAATTTAGATTTTTTTTTTTTTGAGACAGGGTCTCACTCTGTCACCCAGCCTGGTGTAATCAGAGCTC
ACTGTGGCCTTGTCCTCCTGGGCTCAAGTGATCCTCCCACCTCAGCCTCCCAAGCAGCGGGGACTACAGGTGTGTGCCACCACACCCAGCTAAC
CTTTGTATTTTTGTAGAGATGGGGTCTTGCTCTGTTGCCCAGATTGGTCTTGAACTCCTGGCCTCAAGCAATCCACCTGCCTCAGCCTTCCAAA
GTGCTGAGATTACAGGCATGAGCCACCATGCCCAGCCTTATATTTGATTTTCTTTTTAATGACCCAACTGATCCTTCAAGGCCCAGCCAAAATC
TGGTGGCCCAGTGAGCCTCCAGGGCCCTCCTCTGCACTGCTCCCTGGCCCCACAGGAGCTCCCCGCTGCCTGCCAGCTTTCCACCCTCCTCAGG
CAGGGTCTGTGTGGCCCAGGCCTTCTGGTGGCCTGGTGCTATCAGAAGGAGAAATCTCTCAGGAAGCAATTCAACGAACTGGAGGGGCCCTCTG
GTCCACAGGAGGCAGGAGAAGCCCATCCTGACCCCAAATCCACAAGGGCCCGTCAAGGGAGGGGTCCCATCAGGGCTGTGAGAGGCCAGGGATG
CTGGAGCCACCTCTGGCCTGGCAGCTGGCCACCTGCACCCTGGCCATACTCAGGAAGGTGGTGGGCCAGGGCCCACCCGGGAGGAGGGTGAGAG
GGGCACAGAACTGGCTGACTCAGCACCCTGAGAATGGAGGCTTCAGACTTGGGAGTCCACCTCTCTGCTTTATCTAGAGACCAGGGACAAGGCC
GCCCCTCCCAGCCCCGAGCCTGCGAGCTGAGGTGGTCCCGGCTCCATGCTGGTCATAGTGTTCTGGGGGTGGGCAGAGTGACAGCCCCCAAAAT
GAATCCAGCATCTAGCCTCGGAGAAGGGATGAGCCTTGGAAATGGCCGCATCCCCCAGGCCAGTCCCTGTTTTGTAAGCAGCAAGCTCTAAGTG
GATTCCTTTGTTTCTCCTCATTCTAAGTCTCCAAGTAAAAAGGACATTCAACTACTCTTGCTTTTCCTTCTTTCAGACACCTCTTGCTCACTTC
CCTGGCTGTAAGCTAGGCTGGCCCTGGAGCCTGGGTACCCGGCCCTTCTCAGACACACTCCCAGGCCTCAGCCATGACACTCAAGTGTTTGTCC
TCTACAACATTCCATTAGGAAAATTTTCAAACATCTGGAAAAGATGCAGCCTTTGGACATCAAAGCCTTGTGTGTCCACAGCTCACACTGAAGT
CAGCCTGCTTTATCTCACACCCACCACCCTCTCCATTCTCTATCTATCCGTCTTATCTTTTTATGCTTACGTCAGTCTGCTCTGTCCCAAATAC
TGTAGCAGGCACGTCCTGAACCAGTGCTGGATGTTTTGCAAGTAACATCCCACATGGAGTCACACCATAGAATGGGTGAAGGGGAAGCATCTGG
GTTCATGGAATGGAGGCACCTCACCTGGGGCAACCACCTCACCCTGGCTTAAAAATGGAAGCCCCTTGCCTGGGCACGGTGGCTCATGCCTATA
ATCCCAGCACTTTGGGAGGCCAAGGCAGGTGGATCACCTGAGGTCAGGAGTTTGAGACCAGCCTGGCCAACATGGCAAAACCCCGTCTACTAAA
AATACAAACATTAGCCAGGCATGGTGGTGCACACCTGTAACCTCAGCTACTCGGGAGGGTGAGGCAGGAGAATCGCTTGAGCCAAGAGGGGGAG
GTTGCAGTGAGCTGAGATCACACCACTGCACTCCAGCCTGGGCAACAGAGCGAGACTCCGTCTCAAAACAAACAAAAAAGGAAGCCCCTGCAGT
CCTGGGCGAAGCAGACAGTTGGTCTCCCGGCCTCACCCATGGGCACCCCCAGGCCCCTCTGCTGGCGTTCCTGGGTGCTCTGAGGTGCATGGTT
TGAAAACCACGAGTCCAGCCCCTACGGTCACCTCCCTGGCCTGGTTCAACCCACCTTCTCCTGTCCAGAGGCCTCTCACCCACAGTCCAGGTCA
CAGACAGCTGACCTTGGTCACCACCACTTGGCCCTGGGCAGTGGCAGTGCAGACCATACCCCAGGGACCCCGGATGGTCATCCAGTTGCCGGGA
CTCAAAGGAAGAGAGAGGATGAGGAAGGAGACATGGAAAAAGACTACCCAGCTACCTACAGCAGGAACACCAACCCAGGCTGCATCAGCACTTC
CTGGAAGTGCTGGGATCTACAAAATGGTGGAGGGGGTGTGCAGGGACACCTGGGGCAGGATACCTGCGTGTAGTGAATGAATAAAGAAGTGAAC
AAGGGAGCCGACTGTGCAAGGACAGACTGCAGGGGTGCAGGCTTGAGTGGTGGCCTGGGGATGCACGTGGGGTCTGGCGCGAGGTTATGCACTC
AAATGAGGGACAGACAGGAGGGAGGGTGACTAGGGAGAGGGAGGCCAGATCTCCAGGGGGTAGACATATTGGGGACCCTGAACACTGGGAGTCC
GGTCCGGAGGCCAGACTGGTTGGATCCAGTGGACACATCGACAGGTGGTCATAAGCATAAGGAACTCTCTCCCTCCACCCACCTCCACCAGTGC
CCAAAAGGACCTGGTGATTTCTTTAAATTGAGGTGTATTTTGTACAGCAAAATGGAAGACCCTAAGTGCATGGCTCAATTCGTTCTGACGTGAA
GCACTCACATAACCAACATCGCAGTCAAACGCAGAGCACTTCGGCCAGGCTGGCCTGGCAGAGCTTCCCTGATGACAGGCACATTCCCTATCTA
ACTGTCCCATTCAGGGTAGCCACGGGCCACACGTGAAGCATGGCTGGTGCCACCGAAGGGCTGAGTTTTACATTTCTTGCATTTTAATTAATTT
TAAACTTAATTACATTAATTTAAACGGCACAGGTGTCGAATGCCTTTTGCCAAAAGCAGAGCACAGCCTGGGAGCTGTTGGGACCTGGAAAACG
AGGAGTGAGGTTGCCACGGTGCTGACCTCTCCCGCGGATGAGTGTTGCCTGGTCTTGAGCTCAGACTGGGGGATGCGGAGGGCCCCAGGAGCAT
CTCACAGTTGAGCCCCTCCTCCCCACGTGCTCACGGGAGCCCATGCCTTCGGGTTTCTGAGCAGCCTGGCACCCTAGAGGCAGTCTTCATTTGT
TTATTCACTCTCCTATTGACGGATGCTTGGGTGGCGTCCAAGTTCCTGCTCTCAGGCTCAAAGGCCTGGGAAGATTCCTGAACACGTCTCATTG
TGGACACGTGTTTACATCTAGGGGTACATAGCCAAAAGTGGGCCTGCGGGCTGGCGGGATGGGTCTGAGTTCCACAGTGATTTCTGCGCTGGGT
CACGCCTACATCCCGGAAGCCAGGCCTCCTCCTCCAATCCCAAAGCCAAGGGCATCCCTTCTCTGGGCAGCCCCCACCTGACCCGGTCCCCAGC
CTGAGGTTCTCAGGTTCTAGCCCTGAGTCCCCCATTGGGCTCCAGGTCAACCTGGTGTGAACGGGGCCCATGCAGTTGTGCTGAGCAGGAATGC
GGGGCTGCATCATTTCCTGTTACAGATCTGGACGACTTGAATTCTGAGCTGAGTTTTGGGGATAGGGCAGGTCAGGGTCCTGGCCTTGTAAAAT
CAGACTTCCAGATAAAACATACAGAAAAACACATAGATGATATCAAAACATCTAGAAAAAATTAAATAGCCAGCATTGAGTATTTATTCTGCAC
ACAACATTGTATTAAGCACTTCCTGTATAACATACAGGCTTAAGAGCTGGGCAAGGTGGTTCATGCCTGTAATCCCAGCACTTTGGGAGGCTCT
AGCGAGAGGTCACTTGAGGCCAGGAGTTTGGGACCAGCCTGGGCAACATAGCAGGACCTTGTCTCTACAAACTGTAAAAATAAAAATTAGCTGG
CTCTGGTGGTGTGTGCCTGTAGTCCCAGCTAATCTGGAGGCTGCAGTGAGCCATGATCATACCACTGCACTCCATCCTGGGCAACACAGTGAGA
TTCTGTCTCAAAAAAAGAAAAATTAGAAGGCATGGTTTATGAACATTATTTTAGAGGCCACAGAGAATCCTTAATTGGGCTTTTAAGTAAAAAT
TCTCTTACTTGCAAAATAAAAAATCAGATTTCCTTCATGGTGGAAGCTGCGTCTCGCCCCCCGAATGCACTTGAGGCCCCAGAGCAAAGGGTCT
GTAGCCTGCTCATCTGTGTCGCTGTCCCAGCCCCACACTCACCACCGGATCTTGCCCTCTGCAGGTCGCTGGCTGTTGGGCCACAGTATTCCTC
CCTGGGCTCGCAGCCCATCCTGTGTGCCAGCATCCCGGGCCTGGTCCCCAAGCAGCTCCGCTTCTGCAGGAACTACGTGGAGATCATGCCCAGC
GTGGCCGAGGGCATCAAGATTGGCATCCAGGAGTGCCAGCACCAGTTCCGCGGCCGCCGGTGGAACTGCACCACCGTCCACGACAGCCTGGCCA
TCTTCGGGCCCGTGCTGGACAAAGGTATGGGGGTGGTCTGGGGGAGGGCAGATGAGTCTGGAGTGGGACAGAGTCTCCCGCCTAGCGCTGCCTG
ACATTCTCATCTGTGCACACGGTGGGAACAGTGCCTCACGCGGACGCTGGGGTCCTTCCCGCTTACCTCCAGGAGGACGGTCTGGGGCTGAAGC
AGGACTGAGCCTGTGGGGTTATTCGGGTATCCCTCCTCCTCCTGCTCCCTGGAGAGGAAAGCGGGCATTCTAAGGTGACTCCAACCATGGCCAG
TGGCGGGGCTGCTCCCAGGAGCCAGGGCACAGGCCAGGCTTGCAGAGGAAATACACAAACTTAAAGACCTACAAGAAGGGAGAGGTTTGGGGGC
ACCCTAGAGAAGAAAGAGAGACAGAGAGAAAGACAGAGAGAGACAGAGAGAGAGAAAGATAGAGACAGACAGAGACACAGAGAGAGACAGAGAC
ACAGACACAGAGAGAGAGGAACAGTGAGACGGAGAAAGAGACAGAAAGATGCAGAGAGAGACAGAGAAAGACACACACACAGAGAGACAAAGAC
AGAGAGAGAGACAGAGAGGGACAGAGCGACCAAAAGAGAAAGACACAGAGGAATAGAAAGACAGAGACATAAAGATGCACAGAGACAGAGAGAG
ACAGAAATAGAGAGAGACAAAGAGGGACAGAGAGAGACACACAGAGAGAAACTGAGAGACAGAGAGACAGAGACGGAGAGAACATGGACAAGAT
TAAAACTTTAGCATCTTTTTTTAAAAAGTTGAGGTGAAATTCACATAACCGAAAATCCGCGATTTTAAAGTATTCAATTCAGTAGCATTTGGTA
TACTCACAGAATTGTGCAACCATCACCTGCCTAGTTCCAAAATATCTTTATCACCCAAAAAGGAAATCTGTGCGCATTAAGCAGCCATTCCCGT
TCTTCTCCCTTCCATAGCCCCTGGCACCCACCCGCCTGCCTTCTCCCCTGTGATTTAGCTACTCTGCCTGTTTAAGAAACGGCATCACTCAATA
TTTTGCGTCTGGCTTTTTTTCACTGAGTGTGTTGATTCACCTGCACTGTGGATAGTTTCAGCACTTCATTCCTGTTCATGGGCTGAATAATATT
CCATTGCATGGATGGAGCACACTGGTTTATTCGTTCTTCAGGTTGACGCATATGAGCGTGGTCTCCACCTTTTGGCTGCTGTGGCCTTTTCTTG
GACATGCATGTGTTTGAACGCCGTTTTCACACCTTTTGGTTTCTGTATCTAGGAGTGGAATTGCTGGGTCACAGGGTAATTCTGTTTCGCTTTG
CTTGACCTGGGAGGTCAAGGCTGCAATGGGCTGGAACCATCACACTATTTTCCACAGCAGTTGCACCATTTTATATTCCTACCAGTATTGTTTG
AGGGTTCCAGATTCATCCTCACTGATACACTGTTTTCTGGTGTTTGTATTTCTTACTTCTGGCCATCCTAGAGTGTGAAGTAGAACCTACTTCT
GATTTCAGTTTGCACTTCTCTGATGACCGATGATGCCAAGCACCATTTCATGGGCTTTGGGGCCATTTGTAGACCTTCTTTGAAATGTTTAGTC
AAGTCCTTTGCCCATTTTTAAATTGGATTCTTTGTCTTTTTGTTGTTGAGTTGTGAGTGTTCTTTATATATTCTGGATACTGGATGTGCATCAG
ATGTATGATTGGTGAATATTTCTCTCTCATCGTGTAGGTTTTTTTCATTTTTGTGAGAGTGTCCTTTGATACACAAAATTTTTTAATTTTGGTG
AAATCCAGTTTATATAGATGTCATACTGAAGCAAGAATTAGCTAACATAAGGTCACAAAGATTCACATCTATGTTTTCTTCAAAAAACCTAATA
GTTTATCTTTTACTTTGAAGTATTTAATCTATTTTGAGCTCATCTTTTTATATGGTATGAGGTAGGAATCTAACCACATTTTTTTGCATATGGA
AATTCAGTTATTCCAGTACCTTCTATGGAAAAAACTGTTCTTTTTCCCATCAAATGGTCTTGGCACCCTTGTTGAAAATCAATTGGTCATAGAT
GTATAGGTTTATTTCTGGACTCTCAATTCCAGTCTATTGGTCTGTATGTCTGTCCTGTCACCAATACCACATTATTTTGATTGTTGTAGCTTTG
TGGTATGTTTTGAAACTGGGAAGAGTAAGTTTTCCAGCTTTGTTCTTTCTTTTCCAGATTGTTTGGGGGGGACAGGAAAAAAGATTGTTTTGGC
TATTTGGGGTCCCTTTCAAATATATGTAAATTTTAGGAGCAGTTTTTCCATTTGTGCAAAAAAAAATGCTGCTGGGATTTTCATGGGGATTTCA
CTGATTCTGTAGGTTGCCTTGGGAAGCATTGCCTCCTTAACAATATTAAGTTATTTAATTCAGGAGCTCAGGGTCTTTCCATTTATTTAGGTCT
TCTTCCTTAATTTTGTTTGTTTGTTTGTTTTTGTTTTTGAGACAGGGTCTCACTCTGTTGCTCAGGCTGGAGTGCAGTGGCATGATCACGGCTC
ATTGCAGCCTTGACCTTCCAGGTTCAAGCGATCCTCCTGCTTCAGCCTCCCAAGTAGCAGGGACCACAGGCATGCGCCACCATGCCCTCCCAGT
GTTTGTATTTTTTGTAGAGATGGGATTTTGCTGTGTTTCCCAGACTGGTCTCTAACTCCTGGGCTCAAGCGATCCACCTGCCCTGGCCTCCCAA
AGTGTTGGGATTACAGGGCATGAGCCACTGTGCCCAGCTTCTGTAATTTCTTTCAGCCATGTTTTGTAGTTTTCAGGGTATGAGTTGTGTACCT
CCATGGTTAATGTATTCCTAAGTACTATTTTTCTTTTTGATGCTATTGTCAATGGAATCATTTTTCTTTTCTTCTTTTTGTTTTGAGACAGTGT
CTGGCTCTGTCACCTAGGCTGGAGTGCAGTGGCACCATCTCAGCTCACTGTACTTCCATCTCCCAGGCTCAAGTAATTCTCCTGCCTCAGCCTC
CTGAGTAGCCAAGCTTGGCTAATTTTTTGTATTTTTTTTTTTTTTTGTAGAGATGGAGGTCTCCCTATGTTGCCCAGGCTGGTCTTGAACTTTT
GGGCTCAAGCAATCCTCTCGCCTTGGCCTTCCAAAGTGCTGGGGTTACAGGCGTGAGCCACTGTGGCCAGCTTGTAATTGTTTTCTTAATTTTT
TTTCAGATTTTCCATTGTTAATATATAGAAATTTAACTTTTTAATCAAGAAATACATTTTTTTTTTAGTTTTGATCCTCAACTGTAACCCTGCT
TAATTTGTTTGTTAGCTTTGAGAGGGTTTTGGTGAATTGTGTAGAATTTTCTACATATAAATTGATGTCATCTGTGGATGGAAACTGCCTCCTT
TCTTCCTATTTGAATGTCTTTTATTTCTTTTTCTTTCCTGATTGCTCTGGCTAGGACTTCCAGTGCTATGTTGAACAGAAATGGTAAAAGTAGG
CATCCTTCCCTCGCTCCTGATCTTAGGGTGAAAACTTTGAGCTGCCTGCATATATGGTGTTGGCTGCAGGTTTTTCTTTCTTTCTTTTTATTTA
TTTATTTTTAATTTCTATTTCAATAACTTTTGGGATACAAGTGTTTTTTTGTTACATGGACAAATTGTTAGTGGTGAACTGAGATTTTAGTGCA
CCCCTCACCTAAATAATGTACATTGTAACCAATATGTAGTGTTTTATCCCTGGCTTCCCTCCCAACCTCCCTCTTCTGAGTCTCCAGTGTCCAT
GATATCACTCTGTATGCCTTTGTGTTCTCATAGCTTAGCTCCCACTTATAAGTGAGAACATAGGATATTGGTTTTCCACTCCTGAGTTACTTCA
GTTAGAATAATGGCTTCCAGATCCATCCAAATTGCTGCAAATGACATTATGTAAATCCTGTTAATGTCTGAGTAGTATTCCATGGTGTATATAT
ACCACATTTTCTTTATTTTATTTTATTGAGATAGGGTCTCACTCTGTCATCCAGCCTGGAGTGCAGCGGTGCGATCTCGGCTCACTGCAGCCTC
CACCTCCTGGTTTCAAGCGATTCTCCTGCCTCAGCCTCCCGAGTAGCTGGGACTACAGGCACCAGCCACCAAGCCCCACTAATTTTTGTTTTTT
CAGTACAGACGGGGTTTCACCACTTTGGCTGGGCTGGTCCTGACCTCCTGACCTCAGGTGATCCACCCGCCTCAGCCTCCCTAAGTGCTGGGAT
TACAGGCGTGAGCCACGGTGCCTGGCCTTATACACCACGTTTTCTTTATCCACTTGTGAGTTGATGGGCACTTAGGCTGGTTCCACATGTTTGC
AATTGGGAATTGTGCTGCTGTGAACATATGTGTGCAAGTGTCTTCTTCATATAATGACTTCTTTTCCTTTGGGTAGATACCCAGTAGTGGGATT
GCTAGATTGAATGATAGAACTACTTTCAGCTCTTTAAGGAATCACCATACTGTTTTCCACAGTGGTTGAACTAATTGACATTCCTACCAGCAGT
GTATAAGCATCCTCTTTTCCCCACATCCATACCAACATCTATTATTTTTTGATTTTTCAATAATGGCATCCTTGCAAGAGTAAGGTGGTATCTC
GTTGTGGTTTTAATTTGTGTTTCCCTCATGATTAGTGATGTTGAGCATTTTTACCTATGTTTTTTGGCCATTTGTACATCTTATTTTGAGAATG
TCCATTCATGTCCCTTACCCACTTTTTAATGGGATTATTTGTTTTTTCTTGCTGATTTGTTTGAGTTCCTTGTCAATTCTGGATATTCGCCTTT
GTCAAATGTATGCTTTGTGAATATTTTCTCCCACTCTGTGGGTTGTCTGTTTACTCTGATGATTATTTCTTTCTGTGTGCAGAAGCTTTTTAAT
TCAATTAGGTCCCATTTATTTATTTTTGTTTTTGTTGCATTTGTTTTGGGGCTGTTAGTCATGAATTATTTGCCTAGGTTGATGTCTAGAAGAG
TTTTTCCAATGTTGTCTTCTAGAATTTTTATAGTTTCAGGTCTTAGATTTAAGGCTTTGATCCATCTGGAGTTGATTTTTGTATAAGGTGAGAG
ATGAGCATCCAGTTTCATTCACCTACATGTGGTTTGCCAGTTTCCCCAGCACCAATTATTAAGTAGGGTGACCTTTTTCCAATTTATGTTTTTG
TTTTCTTTGTCAAAGATCAGTTGTCTGTACATTTTTGGCTTTATTTCTGGGTTCTCTATTCTGTTCCATTGGTCTATGTGCCTACTTTCATACA
AGTTCCATGCTGTTTTGGTCACTATAGCCTTGTAGTATAATTTGAAGTTTGCTTCAAATTAGTATAGTAGTATAATTAGTAGTATAATTTGTTT
TTGCTTAGGATTGCTTTGGCTATTTGGGATCTTTTTTGGTTACATATAATTTTTTTTTTTTTTTTTTTTTGATGGAGTCTCACTCTGTTGCCTA
GGCTGGAGTACAGTGGAGTGATCTCGGCTCACTGCAACCTCTGCCTCCCAGGTTCAAGCCATCTCCTGGATTCCCTGCCTCAGCCTCCCAAGTA
ACTGGGATTACAGGCATGTGCCACAATACCTGGCTAATTTTTTTTGTTGTTGTTTTTGTTTTTTGTATTTTTAATAGAGACGGAGTTTTGCCAT
TTTAGTCAGGCTGGTCTCAAACTCCTGACCTCAAGTGATCCACCCACCTTGGCCTCTCAAAGTGCTGGGATTACAGGCTTAAGCAACCACACCT
GGCTAGTTCCGTATAAATTTTAGGATTGTTTTTCCTAATTCTGTGAAAAATGATGTTGGCATTTTGAGGGGAATTGCCTTGAAGCTGTAGATTG
CTTTGGGCAGTATTGTCATGTTCACAATATTGATTTTTACTGTCCATGAGCATGGGATGTGTTTCTGTTTGTTTGTGTAGTCTATGATTTTCTT
CAGCGGGGTTGGCTGCAGGTTTTTCACAAATGCCCTTTATCCAGTTGCCCCAGGTGGCAGTGGCTTTATTTAACTTTCAAGGTTTTCAAAGACC
ACCCTTCAATTAGCCACTGCTCTCTCCTGAGACAGTTCTGAGTTAGGCAAAACGAGTTTTTTTTTTACCCAGACAGGTTAAAACAGACAAACAA
TTCCTTGGGGAAAAGGTCTGCTCCGCTCCCTCCAGAACTATCCACCCACCTGGGGAACGCCGGCCTTCACTGTCCCAGGCAGGTTTGTAGGCAC
CACCACATGAAAACACTACCAGGCTCTCCTAGCAAGTCAAGGTCATCATTTCCTCAAGTTGGCATTCAGTGGGTTGCGGTGACCCTTTGACTAC
TTTCCAGAGAGCTAACAATGTCGGTACTAACCGTTTGTGTCTAATTTTTTGGAGGGCCCTTGGAGCTTCCTTTTGGGTTCCAGGCTGCGTTCTG
GGGTAGAGGACACAGATCCCACCACTCGATGGAGCATCAAGGTCACCTTGGGAGACCCACATGTAGGGCGGAATGTGCATAGTACCATCCACCC
CAGGGTGGCTCAGCACAGTCCTGCCGGCAGAGGCGGGGCCCAGGGAACCACAGCTGTGCTGAGCATGTGGTCAGCAGGCCGAGGAGACTTTGGA
GACCATGGTGCCGAAGGAAGGCTACTCAGACAAAGCGAGACAGGTCACGCTGGGAAAGTCCTCCCAGGGACCTTGCAGTCCTGGGGGTCCTGTT
GGCAGAATGCCCAAGGCCAGAGTTCATCTCACTTCTCCACAAATCTGCTTCCCCGCTGTCTCCCTCATTTTATAACGGACAACCCCAGTTCTCT
GTTGCTTAGGTCAAAAACCCTGGGCCCCTGGCTGCCACCTTACCCTCCTCCCTGTCCTCCCCGCAATAGTATGAATGCTTGTGCCCACCCCCCC
CCCAATTCCTACATTGAAATCCTCACCCACAGGTGACGGTGTTAGAAGGTGGGGCCTTTGGGAGGTGGTCAGGTCATGAGGATAAAGCCTCATG
AGTGGGATCAGTGCCACTGAGGCTGAGGTGGGAGGATTGCTTGAGGCCAGGAGTTCAAGACCAGCCTGGGAAACATAGCAAGACCCCATCTCTG
CAAAAAATAAGTTAACATATATTAGCCAAGCACAGTGCCTTGTAGTCCTAGCTACTCAGGAAGTGTCACTTGAGTCCAGGTTGAGGCTACAATG
AGCCATGATGGCACCACTGAGCTCCAGCTTGGGCAACAGAATGAGACCCTGTCTCTAAAAAAATATAAAAATAAAAATAAATAGGCCAGGCGTG
GTGGCTCACGCCTGAAATCCCAGCACTTTGGGAGGCGGAGGCGGGCAGATCACTTGAGGTCAGGAGTTCGAGACCAGCCTGGCTAACATGGTGA
AACCCTGCCTCTACTAAAATACAAAAAAATTAGCCAAGGGGGGTGGTGGGCATCTGTAATCCCAGCTAGTCGGGAGGCTGAGGCACGAGAATCA
CTTGAACCTGGGAGGCGGAGGTTTTAGTGAGCCGAGATCGCTTCACTGTACTCCAGCCTGGGCAACAGAGTGAGACTCCATCTCAAAAAAAAAA
AAAGGAAAAATATAAATAAATAAACAAATAATAAATAAATAAAAAGGAACCTCTCAGTCCTTCCACCATGCATATGCTGACCCAGCGAGAAAAA
GAGGTCTGACCCAGTGAGAAAGAGAGGTCTATGAACCAGGATGTGTCCTCGCCGGGCACTGAACCTGCCAGTGCCTTGCCCTTGGACTTGTGCT
GTTTATGAGCTGCCTGGCTATGGTGTTTTTTTAGAGCAGCCCACACGGACTGAGACACTCTCTGTGTCTTCCAGCCCCACTGGCCTCTTGGCTG
CTTCTCAAACACTGAGCATGATGCCCCCTCCCTCCCACCTTTGCACTTTGCAGTCCCTCTGCCAGGAACACCCTTTCTCCTGTAGTAATTCCCA
CAGGCCCTCTCAGGAGTGTCCCCCACGCTTGCTCCTATCCCCCAACCCTGCTTCACAGCCTCTGGTCAGCCCCATGAGCTGATGATTCTGTGGA
AGGACAGCATGGCCTTGCTCAGCCCCTGCAGCCAAATGCGAAGGAAGACCACAAGTCCTTTGGAGGGGAGGTGCCTGGCCCTGGGGGGCCTGGC
ATGTGCACTGACCAGGAGAGCTCCTGAGTGTGCAGCTGACACTGCCTCCAGGGCTGGTGGGGCCTGGCTGAGGCCATCCATGGGCAGGAGCCCT
CCAGCATCCAGTGGCCATGGCCACGCCCCAGCCCTCATCACGGGCCTGTGTTCTTCAGGCGTGGGGAAGGCACCGTGGGGCAGAGAGTGGGGAC
CCGAGGGTCAGGCTCAGAGTCCGGGCACTGGTCACTGTGGGTCTGGGATGAGGAGGACGTCCCTGAAGGACAAGTCAGGGTCCCTGTAGGAGAA
GAAACTGGAGCTTGGGGAGCTTGGATGGTGGCCTTCCTGTGATCTTGAGTGAGAGGCAGCTCACTTCCTGGAGCATCAGCCTCCCATTTATAAA
GTGGAAGAATACTTACAGCTTGTCAGACCTCACAGAGCTGCTGGCTGGGGTAATACACCACGCAGCTCCCCTGGAGATAGCTGCCAGGGTGCAC
AGGAGTCAGGTCCCAGGGCCGTGCAGCTCATCGAGCGTGTCCAAGGGTGTGTGTGGCGTGTGATGCATTGTGTGTATGTGAGTGTGCACGTGTG
TGGGAATGTGGTGTGATGTGTCATGTGTGCACATGCATGTGGTGTGTGGGGTGTGTGCCTGTGCATGTGTGTGCATGTGTATGTGTCAGGTGTA
GTGAATGTGTATGTGGTTTGGTGGATACATGTGCCTGTGCATGGGTGTATGTGGATGTGCCTGTGCCGTGTGCATGTGGCTGTGGCATGCATGT
GCATGCCTATGTGTGCATGTGATGCAGTTGCTGCCCGCTAGGGTTCCTGGGCTGTGCTGTAGCCAGTGGTGGCATGGAGGGAGGCATGGGCAAC
ATATACACTGCAAAAGGCCAAGAGCACCAGACTGGGCCCTGTGCCATGTGCTTGCTGGCTCCAGAGCCAGGATGGGGTGCTTAGGGCTGCCACT
CCCCCTCTGAGAAGGAAGCAGCGATTTTAGGAAGAAAGCAGGAAGCCTGTCCTGCTTGGAGCCATACCAGGTGATGGAGGAAGGCTGTGCTGCA
TGGGGTCAGAGGGGAACATGCCATTCCCTAAAGCCCTGCTACCCTCGGGAATCTTTAGGATATTTCATTGCCCTCCAGAATGTCAGGGTGTCTC
TCACTTGTGGAAGCAGGGAGGACATCTCACTTGCCAAAGCGGGGAGGGCTCCTGCCCATGGACGGCATCAGCTCACTGACTCCCAACCTGGGCA
TCTGAGCCCAGCTGGAGGCCAGGAGGAAGCTAGCCTCATGAGTCACACCATTCAGGAACCCTTGGGTCTGTCCTCCAAGCTGAGCCTTGGGGAG
CCTGTGCATCACTGTCTGGATTGGACGATGCCCATGGAAAGGCACAGATCTGCACAGATGGGAATCCCAGCCAGCAGATTGGCTGGGGGCCCAG
CCAGCTGAATGCAAAGCCCCAAAGTCGGTGAATAGCACTGGGTCCTAAACCTGATGGCAACTCCAGCTGCTTCAAGGAAAGGCCTATGAACGAG
TCCTGCTCTGGAGTCCCCAAATCTATGGTCTAGGAGCCTGGTCATATACCAGAACTTCCTTCCCTTTTATGGCTGAGTAATATTCCATTGTATG
GATAGACCATATTTTGTTTATCCATTCACTCACTGATAGGCATTTGGGTTTTTTCAATTTCTTGACTATTATAAATAATGCCTTTTGTGTGAAT
GTGTATTTTCAGTTCTCTCTGGCATATACCTAGGAGCAGAATTGGGTCACAGAGGAACTCCATGCTTAACTTTTTGAGGAACTGTCAAACTATT
CCAGAGTGTCTGCACCATTTTACATTCCCATCAGCAGGATCTGAGGATTCTGATTTCTGCACATCTTCATGAGCACTTGTGATTTTCTGCTTGT
TGTTTTTGTTCTAGCCATCCTAGTGGGTGTGAAGCAATGTCTCACTGAGGTTTTCATTTGCATTTCCCTGATATCTAAGGATGTTGAGCATCTT
TTCATGTGCTCATTGGCCATTTGCCTCTCTTCCTTGGAGTAATGTTATTCCATTCTTCCACCCACATTTTAATTGGGTTATTTGTCTTTTTGTC
GTTGAGTTGTAAGAGTGCTTTATATAGTCTGCATACAAGTCCCTTATCCAATACATGACTTGCAAATATTTTCCCCCATTCTGTGGGTTGTCTT
TTCACTTGCTTGATGGTGTCCTTTGATACATGCAAGATTTTAATTTTGACGAATTCCAAGTTATCAGTTTTTTATTTGGTTCCTTGGCTTTTGA
TGCCATATCTAAGAGACAATTGCCTAACCCAAGCTCACAAAGATCTACTCTTCATTAGGTTTTTTTTAAATAAGAGTTTTAGCGTTTTAGTGCT
TACATCTCGGTCTTTAATTTTCATCGACGATGTGAGGCAGGGATCCAATCACATTCTTTTGCATGTGGAAATCCAGTTATTCCAGCACAATCTG
TTGCAGACTGTTCTTTCCCCTTTGAATAGTCTTGGCAACTTTACTGCAAATCAGTTAGCCCTAGATGTATGAATTTATCTCTGTGCTCTTTATT
CTATTCCATTGTTCCATATGTCTGTCTTTATGCCAGTGCCACACTGTTTTGATTATTGTAGTTTTGTAGTGTTTTGAAATTAGAACATGTGAGT
CCTCCTGCTCGTCTTTCTTTTCAAGGTTATTTTGGCTATTTGGAGACAATTACAGTTCCATGTGAGTTTTAGGATTAGCTCATCAATTTCTGCA
AAAAAAGCTTAGATTTTTAGAAATTGTGTTGAATGTGTAGATCGGTTTGGGAAATATTGTTCTACTAATATTATGTCTTCTGGTCCATGAACAT
AGGATATCTTCCTATTTAGGTCTTTAATTTCTTTCATGACATTTTGTAGTTTTCAGCATACAAATCTTGCACTTATTTTGTTAAATGTATTCCT
TAAGTATTTTATTATTTTTGATGCTGTTGTGAATGAAATTGTTTTATTAATCTCATTTTTTAATTATTTGTCACTAGTGTATAGAAACACAAAT
GAGGCCAGGTGCAGTGGCTTATGCCTGTAATCCCAGCACTTTGGGAGGCCAAGACAGGGAGATCATTTGAGGTCAGGGGTTCAAGAACACCCTG
GCCAACATGACAAAACCCTGTCTCTACTAAAAATACAAAAATTAGCCAGGCATGGTGGCACATGCCTGTAGTCCCAGCTACTCAGGAAGCTGAG
GAACAAGAATCACTTAAGCCCAGGAGGCGGAGGTTGCAATGAGCTGAGATCACACCACTACACTCCAGCCTGGGCAACAGAGTGAGACTCTGTC
TCAAAAAAACACACACACATACGCACACACACATACACACACAAATGATTTTTAATATAGATCTTGTACTCTGTAACCTTGCTGGAGTTGTTGA
TCAGTTCTAATGTATTTTTTAATTTGCAGATTCATTAGGGCTTTCTACGTATAAGATAGTTTTATTTCTTCCTTCCAATCTGGATGCAGTTTTT
TCATTTTTCTTCCTTAATTGCCCTGGCCAGAGCCTCCAGTGCCATGATGAATAGCAGAGTTGAGAGTGGACAAACAGCTTTCAGTCTTTCACCA
CTGGATAGGATGTTAGCTGCAGGTAGGCCCCTCTTGCTTTTAAACTTAGTAGTTCTAGATGTGAGAAAAACTTTGTTCACATAAATAAATAGAT
AAAAATGGGAGCACTTAGTTACCATGCATCTCTCAATTCTTTGAATTTTTTTAGAGTTATATATGCCAAAAATCACATGGTGGCCTATCATCAA
AATGTGAAAAAATCCTATCAGCCCATGACTCAGTTAGGTCCTCCTTAAAGTTTGTGGAAAACAGGGAATTAAAGGTGCCTGATTTTCACAAGTC
CCAGTCATTATCAATGGCTCCCACTCTTGCTTTCTGGGAGAAACTCCCTAGGGTATGGCACACTCCAGGAAGATCCAGGAGTCTCCTGGAACAA
GAGCTGGGACCCTTGGGGGTCTCCCATGGGTCTGGTGTGTGACAGCATCCCTATAGCATATGCCACACAGGTATACATGTGGCGCAAATGTACA
CAGTCGGTCCCCTGGGAAAGCACAGAGATGCACTCTGCCACACAGCATATGCTTAGAAATGATGTATTAAGCCAGTGACCTAAGGACAATGGTG
CATGACTCGGGGAATCCCAGGAGGGCTTCCCAGGGGAGGTGGCCCCTGGGCTGAATCTTGAAGGATTTTCTTCCTTTAAAACACACACATATGC
AGTATTTTCTAGGCACCATTTAAGTGTTCGACACACCATGGCCAGTTGAATCCTCATGCCCATCTGTTGAGGCCAGCAGTGCGGTGACCCTGTT
TTACAAATGAGGAAGCAGAATCACTGTGACAAAGCAGAGACATGAACCTTGGCAGCCTGGCTCCAAAGTCCCCAGGCAGAGGGGACAGCCCATG
CCAAGGTTGGGGCTGACGTGGGGGTGAGCAGAGCCCTCAGGCAGGCCCAGCAGTGACAGAGCCTAGCTGGAGCATACAGTTTAGGAATCACTGG
AGGAACCCCAAGCCCACAGGGAGGGCAGGTGCAGCCCGGGAGGAAGCAGAGAAGGTAGGACTCCAGAGGATACCCGGTCCCCATGTGTGCATCC
CTCCGGGCAGGGCGGGGATGGATCTGAGCGGTCACTGAGAATTTCTCAATGGGGCTCTTGGATTAATGCCGCAGGCTCTCCAGGGGCAAGTGGG
CCTCACAGATGCCCAGGTCCTGCCCTAAGGTGCCAGCGTTGGGTTGGGGCGGGGAGCCCCCATTTCCGGTTGTTTTCCTGCTGCTATGCCGGCC
TCTCTGCAAAGGGCTGAGCTCCTGCTGTGCTTCTAGCCTCCCCTCCCATCCCACTTACCTCCCCTGGACCCTCTCCTTCTCCGCTTCTCTGATC
CTACTACCCCCTTCTCCTCCCCTTTCTGATAGAGGAACACAGTCTGGAACCCCTCCTACCTCCTCATGGCTTAAATAGGTTTAAGTAGGAAAGG
GGAAGTCCCGGCTCCTCCCTCCTGCCTGCCATGGGGACTCAGAAATGCTTGGAGTCCTGGTGGCCTGGGAGGAAGGAGCCCGCCGGGTGCCTCA
GAGAGAGGCCTGCTCAGGAGGCCATTGTGGAGGCCCTGGCTGCGCTCTCCATAATCATATGATTGGATTAGGGTCAGGGCAACCCTAATCATGT
CAAAGGTCACCCCAGGCTTTGTGGCAGTGGCCACAGGGTGCCTGACCACCCCTGCCAAGATGGCCTTGTTGAACACAGTTAAAAACCCTCAGTC
AGCTGTGAAGAGAGGGGCCCAGCCTCTTGTGTGTGTGTGCACATGTGAGTGTACACCCTAGCGTGTGCATTGTGAGGGGTGCATGTGTGTGCCT
ATATGTGCACATAAGCCATATATGTGCATGCCTGTGTGTATGCATGTGCATGTGTGTGTGTGTGTGTGCATGAGTGTGAACATATGAAGGAAGA
AGCTTCATATCCTCACACCTCCTGCTTTCATCCCCATCTGCCGTCCACCTGGCCTGGGGCTGGGGACTGGGGCCACCAGACTGAGGCTGGGAGA
AACCATCAGTCCTTGGAACATGGGGCTCTGTCACAGAAGCTGAGCCTGGTCCCTGAAGAGCCCTCTCTTCTGGGGTCCAAAAGGAGCAGGACAT
TCAACCTGCCTGGGGTAGAAAGCATTTGAGGAATTTTAAGTGCATGGAGACTGGGCACACCGTGCAGCTTCTCTGTCCCCTGCCGCAGGACCCA
GGCACTGGGAGGGCTCACTTCCCTGCAGAGCTGGAGACACCTCACTCTTGACCCCTGGCAAGGTAAAGCTGGCAAGGACACAGGTACAGAGAAA
GGGCAGGGACGGCTGCAGTGGATGCAGCAGCCCAGGGCCCAGCAGCTGGATCTCAGGCAGCACGTGGCTCTGCAGAGAGCCTGGCCTGCTCTAG
GCCAGGTGGGGCATGTGCTCCTTAGAGAAGGGGACAGAGGCCAGGAGCGGGCGAGGCCTGGAGCCTAGGGATGCCACCTGTGCCCACATGCTCG
GTGCCCTCTAACATGGGCTGGGCCCAGGAGTCCCCCCGGGCCCTGGCACCTGCCAGATAGGTCGGGGGGAGTGGAGTGGCATGGGGAGGTATGC
AATCTCTTGTGCTTCCCAAGTAAGTGTGCTTCCCACAACTCCCAGTGGACACTTCCCAGAGCCCTGGGGTTTGCTTCTTCGTACCCAGTGTGGG
TGGGGCCTGCAGCAGTGGCCCTCCCACTCAGCCTTCACACACCACCCCCTCTTCAAGCATTTCCAGTCCCCACCCCCTGCCCTATTCTGTGAAC
CCCAGGGTATCCCCACTCAAAGCACACGGCCAGATTCCTGGTTGGTGCCCCAGGACCCCTCCAGCCCCAAAGGGTGGGGAGAGTAATGAAAGGG
TCCTGCGCACCACATGTCAGTAAGCCTTGTTGGGTGCCCCACAAGTCCCCCTTCATCTCTCCAACGTCTTCCCCAGGCAGGAGACAGCCCAGCC
TCCTCTCCTCCCCGCTGAGCCCCCAGGAGCCCCTCGGGGGTGGTCCGCCACCTCCCTGTGTGTCCCCTGCCTATGAGGGCCGGCACAGGGGTGG
GGCCTGCCTGCTAGGACATGGGGACACACAGGGCAGCTCTTTAGGGAACCAGCGTCCCCAAAGCCAGGTTGCGACCCCTGACCCCCCCCATCGG
AAAGTGTTGCCGTTTAAGATGCGTTGGGGTGGGGGGCTCCCCTGGCTCCAGCGGCCTCTCTGGTATATCATTAACTCTCCCCAGTGGGAGGGGA
ACCCCGGCCGACTCCCCGCCGCGTCCGGCTGGGAGCACAATATCCCAGCGACGGCGACAAGATTAAGCACAAGGGGAGAGTGCAAATGCGCGGG
CGGTTCACACGCCCTTCGCGGTGCTGAATTAAAGCGTCTGAATGGGGATTTCCCCTCGCGCCGGACGGCCTGGCGCGCGGCGCATACTTCCAGG
TTGCTATGACTGGCCTGCGCTCGCCTAATCACCGACTAGGGGGAAATTCATATAAAATATCGCCGGCCATTGTGGGCCTAACTCGGCGTGACAG
TGGCGCACAAAGCCGGATTCAAGCGCCCCAGCGGGTCAGCACGGCGCCCGGCCGCGCGGGCCGCCCGGCGGTGTCAGGGGCCGTGGCCGCGGTG
GGGCGCGGGCCGCATTCCGCTCTCAGGTGGCTCCGGGGCCTTTTGTGCAGGCCATGATTACCAAATGCCACCGCGACACCCCCTCCCGGCCGCC
TGGCTCCTCCTGGGGCCGCAGGAATGAGGGAAGGTGGGCAGCCCCCGAGGGGAGGCGCCCGGGCGTCGGCTCCGGCGGGCTCCGGCGGGGACCG
GGGCGCGGGCTGAGTCCCCCTGTGTGCCCCACAGCAAAGGGTCTTCTCCTTCCCCTGTGTTCAGGCCTCAGTGGGGGAAAAGGGCCCACGCGTT
GGCTGCTCTGGAAGCCTGTTGTGGCCTCCCGATGGGCACGAGAAGGACTTTGCTTGTCCTTTTTCAGGGGCGATGGTCCCCAGATGACATGACA
TTTGGGGCCACAGTGACCTGCAGGCCCCTGGCCAGTCTGGTCAGGTGGTCCTAGCTGGGATCCAAGGCACCCCCCTCACTCAGCCAGCCCCTTC
CAGCAGCTGTGGCGTGAGCAGGCAGGAGATGGGGGCAGCACCAGGAGGGAGGGACCCAATGCATTCGGGGTGGCCACTGTCCCCACAACTCTAT
GGGTCCCAGGTATGTGGTGGGGGTGTGGTAATCATACAGGGTGCAGCGTGCACGGGGGGCTGTGTTCGCTGTGACCCTCCATCCCCCAGGATGC
CTGAAGGCCAGTCCCTGGAGTACAGGGAGACTGCTCCTCACTGGTGCATGGAAAGGGCTGGCAGATCAGGCAGGGGGAAGGCCTGTGGGGTGGG
GCATTTGCCCTGCAGACCTGGGGAGAGAAGCTGGCTGCAGTAGGGTGCACTTGGGGGACAGAGGGCATTTTTTTGTCACAGTGGAGGTGAGAAC
TTCCCGGTGGAGATTCAGCAGAGTTTTTCTCCTGGGCAGTGGGCAATGTTGGGAGTCTGGGCCCCCAGCACCCGGCTGGACTGGCCACCATGGA
GTCCTGCCCTCGGCCAGTGCATCCCTGCCAGAGCTGGGGGTGTCCAGCCAGACAGTCAGCATTGCCAGGGGAAAGAGACGAAGCCACAGGTTTC
CAGGGGCTGGGGACAGCATTGGAGGGCCCCAGGAGGCATGGCCAGGTGAGCATGGGTCAACATCAAGAAGCAGACTGGGCAAAGGCGGCATCCC
AAGCTCCTAGGAAAGGAGGTGTCAGCTGCCCCAGGATGGGGCCACAGAGGCAGAACCATAGCCCCCTTCCCAGACTAAGCAGCCCAGCCACCAG
CTGCCAGCAGCCAGGGCCCTGAATCCCAGAGCCTGTGACCAAGGTACCCACCTCCAGGAAGAGGCCAGGCCAGAGACCCAATGACCACTGTCTA
CTCATGGGGGGATGGCCATCAGCATATCAGAGACACCCTCCCAACCCCCTTCTCCTGGCAGGCTCCTGTTCAGGGTCTTGTCCAGGGTCCCATA
GAGCCCTTACAAAGTCATGGCCAAGCTGTCCATAGCCTTCTTTCTGGTCACAGCCCAGAGGAGGGGTCAGCACGGAATGGAATCTGAGCTTGGG
AGATCTCATCTCAGTTGATGCATCAGAATCACTGGAGACCCTTTAAGATATAGGTGCCCCCCACCCCAGTTGAACTTGGGTCCCCAGGGCGGCC
CTGCAGTGATTCATTGGCCCCCCAGCCATGACCATTGTTGGAAGCCTCCAGTCCTAATTCCCTGATGGGCTTCCCAGAGGGGCCAGCCTGGGTG
AAGCCCTTCAGACTGAGCACTCTGCCTCCCCGAGGAGCTGGATTTCATTGTCCTATGGTCGCATTTAACAACAATCCCCACCCCCTGACCCAGA
ACTTTCCCTCCTTCAAGTTGTTTGTCCCTCAGAAAAGCCACTCAGGAGTCCCCTCTGGACCAACAGGCATGTCCCAGGAGCCCAGGAGTCCCAG
GCTGTCCCTCTCCTCTCGCCCTGTATCAGCCCCCACAGCCTTTCCACAGATAGGCATGTCCCCCTCAGCCATGCAGTGGGGGCCCAGCCAGGCA
GGTGGGCTCCCTGCTCCCTTGAGGCTATGGCCATGGAAACGCCAGCCATGGGAACACCCATTGGAGCTGCAGGAGCCCATAATGATGAGTTCAG
GGACCTCTCTTGGGACCCCTCTGTCTGGGCTCTGCACTCACTGCTGTGCAGCCTGGGGCCCATGGCTGACCCTCTCTGAGCCATCTTCCTGTTG
GGGCCACTTCTCTCATTAGTTAATACAAGGATCGGCTTGGACCTGCTTTTCCCACTGTCACCCCCTAACAGGGCAGCCTCCATGCTATGCTGCC
TCAGCAGCTACCTTCTGAGCAAACACCTGTCCCTGCCGAAATGCTTCTTGGGTCACCTCCCCATGGTAAGGTCAGCTCTGAGAGGACAGAGGCT
GCAGCCTTCTTTGCCACTTAAAAGACAGTCACTGCGTAATAAATAGTGGCAACTGAGCAACTTTAGTGAAATGTGAAAGACAAGGATTTTGGAA
TGATTTGGGCAAATGTTGTTCAACGTTTAAGAATTTGGAAACATGGCCGGGCGCAGTGGCTCATGCCTGTAATCTCAGCAGTTTGGGAGGCCGA
GATGGGCGGATCACGAGGTCAGGAGATCGAGACCATCCTGGCTAACACGGTGAAACCCTTTCTCTACTAAAAATACAAAAAAAAATTACCTGGG
CATGGTGGTGGGCACCTGTAGTCCCAGCTACTCGGGAGGCTGAGGCAGGAGAATGGCGTGAACCTGGGACGTGGAGCTTGCAGTGAGCCGAGAT
CGCGCCACTGCACTCCAGCCTGGGCGACAGAACGAGACTCTATCTCAAAAAAAAAAAAAAAAGAATTTGGAAACATATCCTTCCTGTTTGATGT
TCAAAGGTCCTTTTCTGAAGTTATGATGGTAGATATTTTATATATATATATATATATATATAATATCTACTACATATCTATATCTATCTATCTA
TCTATCTATCTATCTATCATCTATCTATCATCTATCTATATCTTTTCCTGTCTCAACAAAATAAAAGCACTTGGCAGTCCTCTGTTAGTCCCCA
GATGCTCTCTGATACTTGAAAAGCCCATTAAATCCAAACCTAGAAACGAAGGATTTGTTAAGATCCCTCTAGTCCAAAAGTTCTGAGATGCAAG
AGACAAAGGAACCATCAAAGCTCATCTCATGATTCCCTGCATCTGACAACTGCACTGCCCTCAGCTGTGATGGAGCCTTGCCTGGCAGCTCTTC
TGCCTTTCCCTAAATGCCCACCTCTTACCACCTAGAACTCCCTCACCTTCTCCGACTTTATCCATCCATCCATCATCCATTCATCCATCATGCA
CGATCCACCATCCATCAATTCATCCATCCATCCATCCACCATCCAACATCCATCAATCTATCCATCTGTCAATCTGCCATCCATCAATCCATCA
TCCATCTATCCATCAATTCATCCATCCATCCATCCATCCATCCATCCATCCACCATCCATCAATTCATCATCATCCATCTATCCACCATCCCTC
AATCCATCATCTATCCACCCACCCATCCATCTACCCATTATTCATCACCCTCCCATCCCAGGCCTGCCTCAGAGCTCATGTTGTCAAGCCTTGC
TATGTGTCCTTGTCCTCTCTACTGCCTCCCTTGTGAACTGTAAGCTCCCAAAAGCACATGGTTTAGCACAGTCCCAGGCAAAAAACCTAACACA
CACACCAACAAAGCCTCCCACCAGAGATAGGGAAGGCTTCCCCTGGTTCATTCTCCTTACCAAGGCAAGGACTCTCTTCTCCTGAAAGTGGGTC
ATCCAACCTCTGTTTTATTATCACCAGGACAGGAACTCCTTCAACTTTCAGAAAGCCTAGGTTGTTAGAAATTGTATCATATTGAGCAGCAGTC
CACTTTCTGGAGGATTTTTTTTTCTTTTGATGGAGTCTCCCTCTGTTGCCAGGCTGGAGTGCAGTGGTGTGACCTCGGCTCACTGCAACCTCCG
CCTCCCGGGTTCAAGCGATTCTCCCACCTCAGCCTCTTGAGTAGCTGGCACTACAGGTGCACGCCACCATGCCCCGCTGATTTTTGTATTTTTA
GTAGAGACGGGGTTTCACCATGTTGGCCAGGATGGTCTCAATCTCTTGACCTCGTCATCTGCCCACCTCAGCCTCCCAAAGTGCTGGGATTACA
GCTGTGAGCCACCGCGCCCAGCCTCTGGAGGATTTTTTTTACTGTGGTTATTGAGAGTGGGCACCTTGCTTCTTATTCATCTCATATTCCTCAT
TCAGCCCAGTGCCTGGCTCATTAGGGACTCTCAGATCCTGGATGGATGGATGGATGATGGATGGATGGTGGGTGGTGGATAGATGGATGAATGG
ATGATGGGTGGATGATGGATGAATGGTGATGGATGAATGGTGATGGATGGATTAGAGATGGACAGATGATGGGCAACAGATAGGTGATGAATGT
ACAGATGATGAAGGGGATGATGGATGGATGATGGTTGAATGGTGGATGGGTGATGAATTGATGATGGATGCATGATGAATGGATAATGGGTGAA
TGGATGGATGAGTGGTGGTAGATGGTGGATGATGGGTAATGGATGGACAATGGATGGATTGTGGATGGATGGTGGATGATGGATGATAGATGTA
TGGATAATGTATGGATATGGATGATGAATGGATGAATGGTGGATGATGGATGATAGATGGATGATGGATAGATGTGGATGATGGATGGATGGAT
AATGGATGATGGATGGATGTGGATGACAGATGATGGGTGATGGGTGGATGGATAGATGGGTGGTGGATGGTGGATGATTGTACATGATGGATAG
TAGATATATGGATGATGGATGGATGGATGGTGAATGGATAGATGAATTTATAAGTGGATACATGGTAGGTGGTGGTAGAGGATGTATGATAGGT
AATGGATAGATGGATGGATGGATGGATGGATGGATGATGCACGATAGATGAATGGATAGATGGATAGATGTGGATGACGGATGGATGAATGAAC
GAAAGGAAGGAAAGATAGATAATTGATACTTTGGATGAATTCAGTAAATAACTGCTAAATGAGACCACAACAAGTTTCTGGGAAAGATGGTTTT
CCCAGGTGGAAGATACTTCCCTTACAGAACAATTTTGTTATGCAGTTTCCTTTCTTCTTCCTTTCTCCAACAACTGATTGCTGTGTTAGAATAA
AAGTCTTGGGCCTGAATGGGGCAGGCCTTAGGTGGCTCAAAAAGTTCAGCCAGGCTCCTTCCCAGGTGACTTGGCCAAATTGGCAGCATTTGTG
TCTAAGCACCCTGCCTCCCAGTAGCCTGTGTCCCATTCCAGTGGGAACTCCGACAGTCCACTCTAATGAAGGCATTTTCCTGCTGACTGGGATG
ATTTCCTGGCCTTCTGGGATGGCTGGCACTTCCCACGGGCAAGATGCCTCCGTTTCACCCCCATAGCTGACTCTGTTGTGTCAACAAAAGCAGA
AACCCCTGACAAAGGTGTTTGTGGTAGAGAACTTGGTTTCCGTGGAGGCTGGCTGCCAGAACTCCAGAGCCTGGACGTAAGTCCTGGCCTCAGG
GGAGCCCTGAGTCAGCTCCTCTGTAAACAGAGGTGACTCTGGGCAGTGGTTCATAGCCTGCATGCTTCAAACACCTGTGGAAATCTGATCAAAG
CAATGGATTCTCTCTCCAGAAAGATGCCCGTGCTCCCAGACATACCCCATCGTTTGTGCTATTTTGGGAGGGTAGTGAACCTGCTGCAGATTCC
CTCTAGAACCTTGGGTGGAATCCAACCCATAGGCTCAAATCTCCTGCCGCTGTGCCTGCCACTTGGACATTCTGGGGGGTCTTCCTTCTGCATG
GTTTCAGGACATTTTTTAACTTTTTATTTATTTTATTTTATTATTTTTAGATTAGAGATGAGGTCTCATTCTGCCTCCCAGGCTGGAGTACAAT
GGTGTGAACACGGCTCACTGCAGCCTTGAAGTCCTGGGCTCAAGCAATCCTCCTGCCTCAGCGTCCCAAGTAGCTAGGACTACAGATGCACACC
ACCATGCCCAGCTCATTTATGTTTGTTTGTTTTTTAAGAAAGGGGGTCTTGCTATGTTGCCCAGGTTTAACTTTTTATTTTGAAATAATTTCAG
ACTTTCATAAACATCGCAGGAGTGGCACTGAGAGTCCTGGGTCCCCTCGTCCAACCCAGTGGTGCATAACTATGCCAATTGTTCAAAACTAAAT
GTGTTCTATTCACCACACTCTGGACGTCACTCAGCTTTCCTTCGTTTTTCTATCAAGATCCCTTTTCTGTCCCAGAACCCCCTCCTGGGTCCCT
TGTTACTTTTGGTGATGCCATGCCTCTGGCTTCTCCACTCTTCCCTGTCCCTCATGCCCCTGAGACCTCTGAGGAGCACAATTAGGCATTTTGC
AGAACAGCCATCAATTTGGGTTGGTCTGATGTCTCCCGACAATTAGATGCAGGCTGTGCATTTTGGGTGAGAATACCTCAAAGGCTATATTTGG
CCTTCATGCATCATCCCTGGAGCCACAAGGTATTGTGTGTCCCATTTCAGGCAAGGTTAACTCAGTCCCCAGAATAAGGTGGTGTCTGCCAGGC
TTCTCCTGTGCACAGTTAAGGTTTTTCCCATTGTGCTTGATAAACACTGTGAGCAGTTGCGGAACCGCTTAGAGACCTTGTGGCTTCAACTTTA
ATGCAGGCTCTCTTTGCCAGAACATAGGGTCTCACGCTTTTCTGGCCTGTGGTCTTGCAGCCTGCAGCTTCTACTTCAGCCTCGGATGGGGGTG
TCTGTCCTGGGATCTGAGCCTCTCTGCAGAGACTTCTTGTCTTCAGTCTTCACGAGTGAATTGAAGGCCTGCTCCAGGGTTTTCTCAGCCTGGC
AGGGAGCTCCACCTCCACATGTGATGGAAGAGAAAATCAAGGTTCAGCCAGCTGGTGACCAAACTGAGCAAGAATGAGCTCTTTTCTGTCCAAG
TGGAAGCCCTCAGCACCACCCGCCCTTGCCCTTGAGTGTGTCTGGCTATTGGGGCTGTTTGCCTGAGTTTTGATAAGCAGGGATCTCGAGGCCC
TTGTTATGGGCAGGGCATGAGTGAGGCACAGAGAGCCCTAGCCTCAGGCTCTGGTTCTCCTCTTACCAGAAGCTCAGGAGCAAGAGGGAGGGGC
TGGCCTTGGAGACAGACTCTTGTAGTAGCCAGGCCGTGAGGTGGGAAGGCAGACTCAGCTGGGGTGGGGTATTCAGGGTGTGGGATGCCCAGGC
CATTTGGGAGTGAGAAGGTCCGGCCAGGAGGGCAGGTGGAGCTGTGTGCCATGCGTGAGCTCCAGGAGCACCCAGGACACTCCTCAACTCTACC
TCTCAAGCTGCCCTAGAAGGGAAGCAGGGCAGATGGCAGGGGAAGGGGCGCTGACTAGGGAGGGGACGACCTGAGTCCTTTAAAGACAAGAACA
GGCGCTCAGGCCTGGAGGCTTAGAGAGGAAGTGCTCTGCATCCAGCCACACGTGTATTCACTCAGAGGCAGTGGGTTCAGCAAAGGCCCCTCCA
GGCCTGTCTGTGAACTGATCAGTTGTGTTAGGGAAGTAACATGGGGTCAGGGGTGGGGGCTTTAAGTTTCTTGGAGAGGTGCGGAGGAGGTGGC
TGCCTAGCTGCTCCCTGGGAAAGGAAACAGCGGAGGTTGCATGATGGGCCTGGGTGCCTTAGAGGGGCAAGGGTGGGTCTGCTCTGGGTAGGCT
CAGACCCTGCTCATTCCTTGACTCAGCCCACGGCTCCTGCCTTTCATTCTGGCCCCAGGAAATATCTATGGGCTGGGCCTTGTGCTCCAGATTG
CAAATAAAAGGTGAGCCAAACAGTCCCTGCCCCTAGGCAGCCGCGGCTAGGGAGGGAGTCAGTGGGCAAATCTTCCTGGTTGGGGAGGGGCAGC
CAGGTGTAGAGGACACCCGATCCCTGGCCGCTCCCCTCAGAGCAGGCAGGGGCACAGCAGGTCCAGCCTGAGCCAAGGAAGGAACCGGAAAGAG
CCCGAGGGGAGGACAAAGGGCTGAGTGCGGCCTGAGGCCAGGGAGTGGCATTGAGGTCAGGAGAGGAGATAGATCCAGAGGGGGCCTGGCATGG
CCAAACTGGCATTGGGCGAAGACCTCAGCCTGCAGATAGTGTGTTGCGAGGGAGAGGTGTGCATGTGTGTGCATGCATGTGTTTGCATGTGTGT
GGTGCACATGTGGAGGGGTGTGTGTGTGTGTGCATCTGTGTGCATGCATGTGTTTGTGTGTGGTGGGTTGTGAATGTATATGTGCATCCGTGGG
AGGTGTGCATGTGTGTGGTGTGTATGGTGTGCATGCATGCATATGTATGTGTGTGCATGTGTCTGTGTGTGCATTGCACGAGGCGTGCATGTGG
GGGTTGTGTGTGCATGTATGTGTATGGTATTCATGTATGTGTATGTGTTGTGTGGTGTGTGTGTGTATTTGTGTGTGTGCATGTGCATGGGGTG
GGGTGTGTATATGTGGGGTATGTGCATGCATGTGTGTGCATGTGTATGGTATGTGTGGTATGCCTGCATGGTGTGCATGTGTGGGGGGGATGTG
CATGTATGTGAGTGCATGTGTATGCTGTGCTTGCATGCATGTGTATATGTGTTCATGTATGTAGTGGGGTGTGCATGTGTGCTTGTGTGTGGTG
GGGTGTGCATGTGTGTGCATGCGTGTGATGTGTGCATGTGTGTGGTGTGCATGCCTATATGTGTGTGTTTGCATGTGTGTGTGCATGTGCATCA
GGTGGGGTGTGCATGTGTGTGTGGTATGCATGTGTCTGTGTGCGCACGCATGTGCGCATGTGGCTGTGCATGCATGTGGTGGAAGGAGGAAGCT
GGAGGCTGGGGCCTCCTAGGGGCCTCTTCATGGCGAGGTGGGAGATGGACCCACAGATAAGAACCAGGAGGGGCAAATTGGCTGAGAGGCCCCA
GGGCCACCTGGGAAGGCCACAGCAGCCTGGGCGGCTGGGGCTGTTTCAGGACTGGACAGTCTCCAGCCAGCAAGCAGAGCCCTTCCTGAGCTGG
TGGTGGGAAGTGGATACAGAAGAAATGGACAGTTTTCTTCTGGGCTTGTGGCTGGATGCAGTGGGTGTCCAGGCCTGACTTGGACAGGGCCCTA
GGGAGGGACGGGGCTGCTGGGACCCGCCATCAGGGGGCTGTTGGCCAATCCACAGAAAAGTCAACCAAAGCAGGCCCGAGGGGCTCAGGGGGCT
TTGTCAACAGCCAGGGGGATGCCAGTGCAAAGCCATAGCCTCAAATACCTTCCACTTTGTATGTTCTTGTTATGGGAGCAACGTGCGTTCTTCT
GTGCTGGCTGTGTGTGGATGTGTGTTGGGCCGTGTGGGAGCGTCTGAGTGTGTGCACACTCACTCGTGCCTTTCTGTCCCAGCTGGCCTGGGCT
CAAGGGCATCACGAGCCCCAGGGGCTGCTGTCTCGGTCCTCTCCTAGGCAGCCTGCAACCACATGCCTGTGTCCCTGAGTTAGGCCATTCTTGC
ATTGCTATAAAGAAACACTTGAGGCTGGTAATTTATAAGAAAAGATGTTTAATTGGCTCAGGGTTCTGCAGGCTGCACAGGAAGTGTGGCTCTT
GCTTCTGCTTCTAGGGAGGCTAGGAAGCTTCCAATCATGGCGGAAGGCAAAGGGGGAGCAGGCATGTCATGTGGCGAGAGCAGGAGCGGGATAA
AGAGTGGGGGAAGAGGTGCCACACACTTTTAAACAACCAGATCTTGCAAGAACTCACTCATAATCTCGAGGACAGCACCAAGCCATGGGACCCA
CCCCCCATGACCCAGTCACCTCTACCAGGCCCCACCCCAGCCCTGGAGATCACAGTTCAACATGAGATCTAGGCAGGGTTAAATATCCAGACTA
CATCAGCCCCATCCACCCGAGGATGAAAGCTCCCTGGATGTCCAGGTGGCAGAGGAGGTCACAGCCCCCTATGATGACTCTGTTGTGACCCTAA
GGGGTCCATTGCAGGCCTCTGCCAAGGAGGAGCAGGGGACACTGTGGGACGTAGCCCTGTATCCCCGCCTTGTCCCATGGGAGGACCCTGGCTC
CAGGAGAACCTCAGGCCTCCTTCTATCCCCATAGAGAGGGCCCATCGGAGCTCCCTTCTCCCTCCTGCTCTCCCAGGGCCTCGAGGGGAGAGAG
AAGGTCAGAGCCAAGGAAAGGTGGAGGCTCAGGACTCTCCCACAACAGAAGCAGAGACATGGAGGAACCTGCCCCAGGGCACACCTAGCCCCCA
GAGGCCAAGCCGAGGCTCAGGGGCTCCAAAGCCCAGGTGTCTTCTTGCTAGGTCTGTAAGATCCCTGCCCAGCAGCAGGTCAGGCTCTTTCCTG
GTTGGCTCCCTGCTAGTTCCCCAGCTCAGACTGCAATGCTTGGCAAACAGCAGGCACTCTGTTCCTCACCTGTGTCAGAGTGTGGGTCCAAAGT
GAGTGCCTGTCTCTTTTTATTTTGTTTTTTTGAGACAGGTTCTCACTCTGTTGCCCAGGCTGGAGTGCAGTGGTGTAATCATACCTCACTGCAG
CCTTGAACTCCTGAACTCAAGTGATCTTCCTGCCTCAGCCTCCTGAGTAGCTGGGATTATAGGCCCCCAGCCCTGAGTGTCTTTTATCAATGGA
AGCAGGGCCTGGCCAGGCCCACCCCCTCTCCTCATGCCCTTGCAGAAGTGTCTGCATACACCCACCCCCAAGACACAGCTCATTCTTTCAACCT
GTCTGGGGAAGCCTGGCTGGGGTCCTGGCCTCTGCAAAGCCCACACCACCGCTCATTCCCATCCCTCTGATCCTAGCCTCCAGAGCTTTCTCCT
AAATTCCAGCCCTCCCCTACCACCCTTCTGCACAAGCAATGCCACTTCCCCAACTTGGCCTCTATTTCCCCATTTGGGGAAGAAGGAAGCTGTG
TACAAGGACCCAGGCAGCTCCAATGTCAGCAGCGGCAGACACCCTGCAGCCTTCCAAGCTGGAGGCAGGGGCATTTGGGGCACTGGGGCTGGCC
CTGGGGAGGCGGGCACTGGAAGTCACTGGTGTTGAGAAGATTCCAGAAGAGGCAGCTGTACCGCTGAGCCATGCAAGTGTCGGTGCTTGGGGTG
GAGGAAGGCAATGGCAAGTGGCACAGCAGAGGTGGGCGGTGTGTGGGGTGGAGCCACACTCTGGGGTCTGCACCCCAGGCTATCTGGGCAGCAG
AAGGAATTAGCTCTTGTCTGGTTTTACCTGCCTTCGTTCAGTTGTATGATTATTTTGAGATCCTTTGTGCTATTTTTCTTGTTATTCCTAAATT
AAATGCTGTTACAGACTTGCCACTGCTTTTTAACCATCCCTGTTAATGGACATTGGGGTACTTCCAGTTTGTGGCTTGTGTGAACATTTGCTTA
CAAGTCTTTGCACAGACACGGGTTTCCTCTGGGGCAAACCTAACGGCTGGTGGACGTTTACCCTTGAAGACACTGCCAAAGTGCCTCCCAAGGG
GACTGCACCTTTCCCCTCCATCCAGCTGTGAACAAGGGTCAGGGTCTGATTTCTCCACATCCTTGCCAACACTTGCTACTCTTTGACTCTTTGA
TTGCAGCCATCCCCGTAGGTGTGAGGCGGCCCCTTATTGGGTTTTTTGATTTGCACATCCCCAGGATGGGTGATGTCGACCATCTTTCCAGGTG
CATGCTGGCCTTCCTTGTGCCTTTTTTTTAAAGACAGGGTCTTGCTCTATCACCCATGCTGGAGTGTGACTATAGCTCACTGCAGCCTCAAACT
CCTGGGCTCTAGCAATCCTCCCACCTCCGCTTCCTGAATAGCTGGGACTACATGCACACACCACTGCACCTTGCTAATTTTAACATTTTTTTGT
AGAGATGGGGTCTTGCTACATTGCCAAGGCTGGTCTCAAACTCCTGGGCTCAAGCAATCCTCCCACCTCTGCCTCCCAAAGGGCTGGGATTACA
GATGTAAGCCACCTTGCCAGCTGTATGTTTTTTAAGACAGGGCTGGAGTGCAGTGGTGCTATCCTGGCTCACTGCAGCCTCCACTTCCTGGGCT
CAAGTGATCCTCCCGCCTCAGCCTCCCAAGTAGTTGGGGCCACATCCAGTTAATATTTTTAGTTTTTGTAGAGATGGGGTCTTGCTATGTTGAA
AAGGCTGTCCTGGTCTCAAGCAGTCCTCCTACTGTGCCTCTCAAAGTGCTGGGATTACAGGCATGAGCCACTGTACTTAGCCAAAGTTGCTTGT
TAAAAAGAGCCTGGTACCAACCTCCCCTCTCTCACTTCTGTCACCATGTAATTTCTTGCACACACTGGTTCCCCTTTACGCCCCCTTTCCCTTC
TGCCACAAGTGGAAACAGCCTGAGGCCCTTGCCAGAGGCAGTTGCTGGAGCCATGCTTCTGTGTAGCCTGTAGATCCGTGAACCAAGTAAGCCT
CTTTGCCTTATACACCACCCAACCTCACGAGTTCCTTTATAACAATGCAAATGGGCTAAGACCCCTGACCTGCCCAAGGCGGTCCTTTGAGCTG
AGCCCTGTTAACCCTGCATCTCTCCTCTCTCTACAGCTACCAGGGAGTCGGCCTTTGTCCACGCCATTGCCTCAGCCGGTGTGGCCTTTGCAGT
GACACGCTCATGTGCAGAAGGCACGGCCGCCATCTGTGGCTGCAGCAGCCGCCACCAGGGCTCACCAGGCAAGGGCTGGAAGTGGGGTGGCTGT
AGCGAGGACATCGAGTTTGGTGGGATGGTGTCTCGGGAGTTCGCCGACGCCCGGGAGAACCGGCCAGATGCCCGCTCAGCCATGAACCGCCACA
ACAACGAGGCTGGGCGCCAGGTAGGTTCGCCGCCCGCAAGGGTGCTTGGGAAAAAGGAGCCTCCTCAGCAGGGTGTGTGCCCTGGTTCCTTGGG
GCATATGGCCCGGTGAGGCAGGATGGTGGCCAGGCTGAGGGTCTTCTCGACCCCTGCCTGGGGTGTGCGAAGCTTAGCACCATCCAGCTACACC
ACAGCATCCAGTGCGCTCCTGGGGATGGCGAGCCCACCTGTGGACTGGGGTAGCCAAGAAGGAGTGATGAGGCAAAGGCCTGGTCAACAGGAGC
CCCGGCAGAGCCCAGGGAGGGAGACAGCCAGGCAGCCACAGAGACGGGGAGGAATTCTGCAATGAGGAAATGCAGGCACACAAGGTGACCCGAT
GTCAAGGACAGCTGGCAGTAATTTAGGGGGAGGGAGGCTGGGAGAGCCTCCCAGGCAGCCTGGAGGTGAAAGACAACAAGCGACTTGGTGGGCA
GAGCACAGAGTGTAATGGAACAAAGAGCATCTTGATCTGCAGAGGCCAACCCAAACCAAGCCGTGTAAAGCTTCGTGAGCCTGTGTCTTATTCT
GTCTGTGCTGCTACAACAAAATACCTTAGACTGGATAATTTATAAACAATGGGAGTTTAGTACTCACAGTTCTGGAGACTGGGAAGTCCAAGGT
CATGGTACTAGCAGATACCTTGTCCGGTGAGGGCCTGCTCCTCATGGATGATGCCTTCTGTGTCCTCACCCAGGGTGTGGATCGCTCTGGGGTT
ACTTTTATAAGGGCATTGTTTTAGGCCATTCTTGCATTGCTACCCGAGACTGGGTAATTTATGAAGAAAAGAGGTTTAATTGGCTCATGGATCT
GCAGGCTGCACAAGCTTGGTAACAGCATCTGCTCAGCTTCTTGGGAGGCCTCAGGGAGATTTTACACATGGCAGAAGTGGAGTGGTAGCAGGCA
CGTCACATGGGCCAGAGCAGGAGCAAGGAAGACAGAGTGGGGGAGAGGTCGCCACGCACAGATCTTGTGTGAACTCACTCATTATCATGAGGAC
AGCACAAGCCATTCATGAGGGATCTGCCCCCATAACCCAAACACCTCCTACCAGGTCCCACGCCCAACACTGGGGATTACACTTCAACATGAAA
TTTGGAGGGAACACAGATCCAAACCGTATCAGGCACGAATCCCATTCACGATGCTCCACCCTCATGACTTGACTTGATCACCTTCTAAAGGCCC
TACCTCTTAATGCTGTCACCTTGAGGGTAAAGATTTCTTTCTGGGGGGGTGGGGACACAGGGTCTTGCTGGATACAGTGGCACCATCTCAGCTC
ACTGCAGCCTCCACGTCCCGGGTTCAAGCGATTCTCCTGCCTCAGCCTTCTGAGTAGCTGGGACTATAGGCGCATGCCACCACACCTGGCTAAT
TTTTGTATTTTTAGTGGAGATAGGGTTTCACCATGTTGGCCAGGCTGGTCTTGAGCTTTTGGCCTCAAGTGATCCACCCACCTCGGCCTCCCAA
AGTGCTGTGATTACAGGTGTGAGCCACCATGCCCAGCCGAGGGTAAAGATTTTAACCCATGAATTTTTGAGGAACACAAACATTCAGACCACAG
CAGCTTGCTAGAAAGGATGTGGTCAGAAGATCAGTGGATGGCCAAGGGAGGAAAGATGGCTGATGGGCAGTGACGGGCGTAAGGACCAAGTGGC
GTCCACGGGATTTAACAACATGAAGATGGCAGCTGACCTTGGCTGTAGAATCAGGGGACCACAGAGGGGTGACGAGTGAACAGGGGATATTCAC
CTTTTAACAGTGAGGAACTAGATAACTCAGACTAATCTTCCTGCAGAAGACAACTTCAGATGCAGGATGAACTATAAAAAGCACCCTGTTAAAA
GTGTGGAGTCCCCATAATTACCCAATTCATGATAGATGAGGCAGTGCAGTGCCATGGGAGAAATGGGCTTTTCAATAAATGGTGCTCAGTCAAC
CGGGTGGTGCTATGGTCTGAATGTGTCTCCCAAAATTCGTATGTTGTAAGCTTGATCTCCAGTGCAACAGTCTGGAGAGGTGGGACCTAATAAG
AGGTGTTTAGGTGATGAGGGCCTTGCCCTCATAAAGGGACCAATGCTGCTGTAAAAGGGCTTGCAGAAGAGGGTCTCTCTCTCTCTCTCTTTCT
ATTACTTTCCTGCCATATGAGGACATGATGTTCCTCCCTTCTGGAGGACATGGCATTCATTCAGGGTGCCCTCTTGGAAGCAGATAAACCAAGC
CCTAACCTGTCAGCACCTTGATCTTAGATTTCCCAGCCTCCCAAACCATGAAAGAATACATTTATGAATTACTCAGTCTCAGGTGTTACGTTGT
AGCAATACAGCATTGACTAAGACAGATAGCAACATGGAAAAAAAATAACCCTGGCTTGCTACCTCACACCATCTGTAAAAATCAATTACAAATC
CCAGTGGGACAGGTAAAACAATAAAACTTTTACAAGAAAATATAGAATATCTTTGTGACCTTAGAGTAGGCAAAGGTGTCTTAAACAGTCCAAA
AAAGCACTCACATTGAAAGAGAAGTGGAATAACATAGACTATATTCAAATTAAGAACTTTCATCCATAAAAAGACACCACTATGGGACTGAAAA
GGCAACCCATAGAGGACACATTCACATACATACATCCACACTCACATATGCAGCAAATGTAGAGAAGCTACAGTAGGAAAAGAACTCTGCAGAC
TAAGAAAAAAAAGATAGACAAACCAATGGGAAAATTGGCCAAAAAATTAAAAGCCATGTTATGAAAGAAAATATAGAAATTCCACTACCTATAC
AAAAGGTGCTCAATGTTATGAGTCATCAAGAAAATGCTGTGAGAACCTATGTCCTGGAAAGAGAGAGGAGGATGGGGGTGTCTGAGACACTGGT
GTTCTGGGGCAGGTAATTTGTAAAATTTTGTATATTTTGCACTTATGACACATATATATTTTTGTATGTCTATTATACTTCCATAAAATGATTT
TTAAGTGTCAAATAACTGACCATCTAGTGAGGAATTAGCAGCCCCTGATCCAAGAGAAGATCCCAAGTCTGGTACCTGGGGTAGCTTTTGTCTA
GGGGCCATTTGCTGACCTGGAAGAGACTACAGAGGTTGCACTGCATTTCCAGCAGACTCACAGAGCTAAGGGGCCCACCAAGGGTGCCATCTCT
GGTAAATCCTTCCTCAGTGTAGGCTGTGACCCTGAAGAGCAAAGCCAAGCCAGAAGTAGTCTTGTCCTGTTCACATGGGCAGACTAGAAATCTC
TCAAAACCTGAACTTGGATTAAGGTAATCCCAAATTGCTGGTACTCCCATACACCTGGAAAAAGCAGACAAAATCCTCTTTGGAGAAGGATGAT
ATCCCTCCTCTAAGCCTATAAATGTTTCTATAATAATTTTTTAGAAAACACAATGTTGGCTGGGCGTGGTGGCTCACACCTATAATCCCAGCAC
TTTGGGAGGCCGAGGTGGGCGGATCGTGAGGTCAGGAGATTGAAACCATCCTGGCTAACATGGTGAAACCCGGTCTCTACTAAAAAATAACAAA
AAAAATTAGCCAGGCGTGGTGGCAGGTGCCTGTAGTCCCAGCTACTTGGGAGGCCGAGGCAGGAGAATGGCGTGAACCCAGGAGGCGGAGCTTG
CAGTGAGCCAAGATCGCACCACTGCACTCCAGCCTGGGCGACAGAGTGAGACTCTGTCTCAAAAAAAAAAAAAAAAAAAGAAAACACAATGTCC
AGCACACAATCAAAGATAATCTATCACATGATCTGATGACACAGTGAGTTAAACCAGAAAAAAAAAAAAAAACACAAGTACACAGGGAATTCAG
ACAATGGAATTATTAGACACAGACTTTGAGGGGAAAAATGCTTACTTAGGTTCACAAAGCTAAAACACAAGTGTGAACATTGCATCAGGAAACT
AGAAACTATAAAAATTATATAATAGGCTGGGCACGGTGGCTCGCACCTGTGATCCCAGCACTTTGGGAGGCCGAGGCGAGTTCGAGACTAGCCT
GACCAACATGGAGAATTCCCGTCTCTACTAAAAATACAAAATTAGCCGGGCGTGGTAGTGCACGCCTGTAATCCCAGCTACTTGGGAGGCTGAG
CCAGGAGAATCACTTGAATCCAGGAGGCGGAGGTTGTGGTGAGCTGAGAGTGCACCATTACACTCCAGCCTGGGCAGTTTTTTTTTTGGAAACT
GGGAGTTTTTTTTGGAAACTCCGTCCCAAAAAAAAAAAAAAAAAAAAAATATATATATATATATATATATATATATATATATATATATACACAC
ACACAATAGATTTGGAAAATAATTACACAGAAATTGCAGAACTGAAGAACAAATAAGGACTTCCAGTTAAAGATGAGAAGCTGAACACTTCCGT
CTGCACTCTCCTGGAACCCACTAAAATAACAATAAATTAATTTTAAAATAAATAGATATGTAGAGATAAATATAAATAAAATATAAATAGATAC
AGGTAGGGACAGGTAATAGTAGATATAGATGATAGATATAAATGGATATAAATAGTGCATAGAGATTATACATAGATATAGATGCTAATACAGA
TAGGATGGATGGATAAATAGATTAGATAGATGGATGAATAGATAGAGATGGATACTCATGAGAATACAGAAAATAAAGAGGAAACAATGGTAAC
AAAACTTTGAAAGCTAAAAGCAGATAGATGAATACTCAAGCAGACTCAAGAAAACTGAGTCTTAAGCCAGTAGAGAAGAAATTTGAGAACCAGT
CTAGGAATTCCTAGTGTCTGATATCTTGAGAAGTTGAGATAAATATGGGGCTGAAAACAGGAAGATTGGTTGAAAGATGACTTTCAGGGTACTT
TATAGCCCACTCACTCCACTACCCAACTCTTTGTAGCCAGGCAGCAGCCTCTCCTTTCCCTGTTGCTGAAGCCTGGAGGTTTGTTTTCTGCAAA
GCACAGGTCTCTGATCTGAGGGACGCCAAGCACATCTCAGAGTGAACCTTCCAAAGTGAAAATTTTCTCTCTACATATGGAAGTTCATGCCTTT
CTCTCTCCTCCTGATTTCCTAATGCTAGCTGTGAACCCTAGTTATCCTCCAGGCAAGAGGATGGAAGATTCTGCTCTGGGGACTCTGACCAACT
CAAAAGAGGAGACTTCAAGACAGTTACCTGTGGAAGGTCCCAATAAAGTGATGCAGCTAGATCACTCTATAGAGAGGACCAAAGTTGACAAGTC
TCTCCCATGTACAGGAACTTCCAATAAGATTTTTAGTGTCCCATTTTTAAATACGAGCAGACAGCCAAGGATCATCAGACCTCTGAGGAAGGAC
TCTAACAACAATAATGGCAAAGTCCAAAACAAACAAACTCAAACAAAATTTATGGGAAAGAGACATTGTAAAGAGAGATGAAACTTCGAAAGAT
GATCATTAATATCCCCAAAAGATAAAACACTATATCCATGAAATTGGAACAGGATGGTAATTTTAAACATTCAGGTTACAAAAGAGCTCTTAGA
AATTAAAAATATGATAACAGAAGCAAAATCCTCAAATTGAAAGATAGTTGAGATACCCTCCCACAAGACAGAAAGAAAAAAAAGACAAAGAGAT
TAAAAATAAGAGCAAGGAGAAGATTTGGAGGATCTGTCCAAGAAAGACAATGACAAACAAAAAGAGGAGGCAGTCAGCAAAGAAACAAGGCAGG
AAGCTTCCTCAGAACTGTGGAGCACAGGTTGCAGACCAAACAGGCCACTAAGTGACGAGAACAACAGAAGAAAAAGATCTACTTCAAGACACAC
TGCTGTGAAGCTCAGAGCCTACTGCACAGAACAGCCCTCCAAGCTGCCAAGGAGAATGTTTGGGCTTCAGGATCAGGAATCAAAATAGTACCAG
ACTTTTCGGGAGCAATAATGAAAGCTAGAAGAAAACAGTAATAATACTTTTTGAACTCCAAGATGTAAAAATGATTTTAAGCCAAGAATTCACT
TCCCAGCAAAACTATCAATTAAATGAGATAGTAGAAAAGATTGTTTTTAGACATGGACATTTCAAAAAATTTACAAGGCCTTTTCTGGGAAAAA
AAAATCTGCAAGAAAATGAAATTGATAGAATAGCTGATGTGTTTGGACATCTTGAAGAGAATATGTAGATAAGTAAGGGAGAATTTGAGGCTGA
ATCAGTTACAGGTACATTGATAACACCAACTACAAAAAGTCATTTAGGAAAAGAAAAGTCATCATAATATATGACACTTAAAGTAGTCCCAATA
CCACCAGCAGTGAATATTGATGTGAAATTAAGCTAGTTTTTAGGGCAGGAGGGGTTGGTGCTTGGGAAGTGTGCATCAGTGTGGTGGAGTAAGG
AGAGAAAACTAACTGCCACCCACCATGGCTAGAGGCCAATAAATAATGCCTAATGCTGAAAAATCAAGAGGTGTCAAGACAAGTGTGTTAACAG
AGTTGTAGACATTGCAAGGGGCTGCATGTAGGACCAGAATTCCTGTTTATCTAAACAGGTCTTGCAAACTGTTGGACTCTTCCAAGTAAGCACC
TATATAACTTTGATCCAATATAAAACTAAAACAAAAGAGGAAATAAAATGGATATTAGATAAACTAGACTGGGCAGGGCGAGGGATATGTTACT
CTACAGATGCCCATAGGAAACAGTCAATATCAGAGGGAGGAGTTCAAGAAAGAGCCAGAAGGGGACGAGGAGGAGGCAGGATTGGGACCCAGAG
CCCAGTTGAAGCCTTAGATTAGAACTGTCCAATAGAAATAGAATGGGAGCCACAAATGGCTCATAGATTATTATAATTTGTCCCACAAATGACA
CAAAGATCATTATAAATTTTCTAGTAGCCACATTTAAAGAGTAAACAGGTAAAACAAGTTTTTTTGGTTTTGATTTGGTTTGGTTTGGTTTGAG
ACAGACTCTCGCCCTGTAGCCCAGGCTGGATGGAGTGCAGTGGCGCAATCTCCGCTCACTGCTGCCTCCCCCTCCTGGCTCAAGCAATTCTGCC
TCTGCCTCCCAAGTAGCTGGGATCACAGGTTCCCGCCACCACGCCTAATTTTTGTATTTTTAATAGACACGTGGCTTTGCCTCAAGTGAGCCAC
CCGCCTTGGCCTCCCAAAGTGCTGGGATTACAGGCATGAGCCACCATGCCCGGCCAGAAACAAATTTTAATACCAAATTTGATTTAACTCAGGA
TAGCCAACATGCTATCATTTCAATAATGTAGTCAGTATTAAAATTATGAATGAGCTGTTTCTCATCCTTTTCTTACACTAAGTCTTGGGAATCC
AGCATGCAGTTGGCACGTATAGCATTTCTGAATTCACACTGCCATGCCTCATGGGCTCCTGTCTGTCCAGTGGCTGCCACAGTGCAGTGCCACC
TAGACTGTTCTGATGTTCACATGCCCCTTCACGCTCACCCCTACCCCTTCCCCAAAGAAAGAAGGGAAAAGAAGCTGAGTTCTACACTGCCCAT
AGGGGAAACCGTTCGCTCCTCAGCGAGGTCCTGCCCGGTCCCCCAACAGCCTTATGTCCCAACATTGCCTTCCTCTTCCTCTGCAGTCCCCATA
CAGTGACCAGCTTCCTGGGCCACTCTCTTTACTCATGCTCAGGACTCGTGCCTTTCCACCCAGCCGTATACACCTCTGGGCAGCGTGCCTGAGT
CCTCAGGGTCAGAAGGAACGCCTATCCCCCTGCATCCCTGCACTCTGACTGCTGTGGCTCTTCGTGTATGGCATCCCACGCTGCAGCTCTGTCC
TTCATTCGCTCCACCCTAGACAGTGTAGAAGTACTCAGCTAGGAGACGGGAAGAGGGGAGCCCCCCAAGCCCTGACCTGGGAAGGCTTGGGTCT
GGCAAGGGAGCAGGCACCAGTATCTGCACCATAGGAAGGGGGTGGCCCTGGGGCCCTGCCTGGGAGTCTGCCCCCTCTGCCCGGGGGCTTTATG
GAGCAGGTAGGCTGCAGGCGACATGTAATGCTGTTTCCTCGGGGAGACGCACCAGGGGGCCGCCCTGACGCTGGCTCCTGCGCGTGCCCCGCAG
GCCATCGCCAGCCACATGCACCTCAAGTGCAAGTGCCACGGGCTGTCGGGCAGCTGCGAGGTGAAGACATGCTGGTGGTCGCAACCCGACTTCC
GCGCCATCGGTGACTTCCTCAAGGACAAGTACGACAGCGCCTCGGAGATGGTGGTGGAGAAGCACCGGGAGTCCCGCGGCTGGGTGGAGACCCT
GCGGCCGCGCTACACCTACTTCAAGGTGCCCACGGAGCGCGACCTGGTCTACTACGAGGCCTCGCCCAACTTCTGCGAGCCCAACCCTGAGACG
GGCTCCTTCGGCACGCGCGACCGCACCTGCAACGTCAGCTCGCACGGCATCGACGGCTGCGACCTGCTGTGCTGCGGCCGCGGCCACAACGCGC
GAGCGGAGCGGCGCCGGGAGAAGTGCCGCTGCGTGTTCCACTGGTGCTGCTACGTCAGCTGCCAGGAGTGCACGCGCGTCTACGACGTGCACAC
CTGCAAGTAGGCACCGGCCGCGGCTCCCCCTGGACGGGGCGGGCCCTGCCTGAGGGTGGGCTTTTCCCTGGGTGGAGCAGGACTCCCACCTAAA
CGGGGCAGTACTCCTCCCTGGGGGCGGGACTCCTCCCTGGGGGTGGGGCTCCTACCTGGGGGCAGAACTCCTACCTGAAGGCAGGGCTCCTCCC
TGGAGCCAGTGTCTCCTCTCTGGTGGCTGGGCTGCTCCTGAATGAGGCGGAGCTCCAGGATGGGGAGGGGCTCTGCGTTGGCTTCTCCCTGGGG
ACGGGGCTCCCCTGGACAGAGGCGGGGCTACAGATTGGGCGGGGCTTCTCTTGGGTGGGACAGGGCTTCTCCTGCGGGGGCGAGGCCCCTCCCA
GTAAGGGCGTGGCTCTGGGTGGGCGGGGCACTAGGTAGGCTTCTACCTGCAGGCGGGGCTCCTCCTGAAGGAGGCGGGGCTCTAGGATGGGGCA
CGGCTCTGGGGTAGGCTGCTCCCTGAGGGCGGAGCGCCTCCTTAGGAGTGGGGTTTTATGGTGGATGAGGCTTCTTCCTGGATGGGGCAGAGCT
TCTCCTGACCAGGGCAAGGCCCCTTCCACGGGGGCTGTGGCTCTGGGTGGGCGTGGCCTGCATAGGCTCCTTCCTGTGGGTGGGGCTTCTCTGG
GACCAGGCTCCAATGGGGCGGGGCTTCTCTCCGCGGGTGGGACTCTTCCCTGGGAACCGCCCTCCTGATTAAGGCGTGGCTTCTGCAGGAATCC
CGGCTCCAGAGCAGGAAATTCAGCCCACCAGCCACCTCATCCCCAACCCCCTGTAAGGTTCCATCCACCCCTGCGTCGAGCTGGGAAGGTTCCA
TGAAGCGAGTCGGGTCCCCAACCCGTGCCCCTGGGATCCGAGGGCCCCTCTCCAAGCGCCTGGCTTTGGAATGCTCCAGGCGCGCCGACGCCTG
TGCCACCCCTTCCTCAGCCTGGGGTTTGACCACCCACCTGACCAGGGGCCCTACCTGGGGAAAGCCTGAAGGGCCTCCCAGCCCCCAACCCCAA
GACCAAGCTTAGTCCTGGGAGAGGACAGGGACTTCGCAGAGGCAAGCGACCGAGGCCCTCCCAAAGAGGCCCGCCCTGCCCGGGCTCCCACACC
GTCAGGTACTCCTGCCAGGGAACTGGCCTGCTGCGCCCCAGGCCCCGCCCGTCTCTGCTCTGCTCAGCTGCGCCCCCTTCTTTGCAGCTGCCCA
GCCCCTCCTCCCTGCCCTCGGGTCTCCCCACCTGCACTCCATCCAGCTACAGGAGAGATAGAAGCCTCTCGTCCCGTCCCTCCCTTTCCTCCGC
CTGTCCACAGCCCCTTAAGGGAAAGGTAGGAAGAGAGGTCCAGCCCCCCAGGCTGCCCAGAGCTGCTGGTCTCATTTGGGGGCGTTCGGGAGGT
TTGGGGGGCATCAACCCCCCGACTGTGCTGCTCGCGAAGGTCCCACAGCCCTGAGATGGGCCGGCCCCCTTCCTGGCCCCTCATGGCGGGACTG
GAGAAATGGTCCGCTTTCCTGGAGCCAATGGCCCGGCCCCTCCTGACTCATCCGCCTGGCCCGGGAATGAATGGGGAGGCCGCTGAACCCACCC
GGCCCATATCCCTGGTTGCCTCATGGCCAGCGCCCCTCAGCCTCTGCCACTGTGAACCGGCTCCCACCCTCAAGGTGCGGGGAGAAGAAGCGGC
CAGGCGGGGCGCCCCAAGAGCCCAAAAGAGGGCACACCGCCATCCTCTGCCTCAAATTCTGCGTTTTTGGTTTTAATGTTATATCTGATGCTGC
TATATCCACTGTCCAACGGAGTTAGACGAATAGATGTGTTGTGTTTTTTTTCCCTTTTCTTTCTATGAAAGAAATTGTTTTAGTCATAGCTTGT
GGGTTTCAAACAATGGGAAAAGTGAAAAAAGAGAAACAAGCCATCAAGGCTGTGGTCTGGGCTGGATGTTTGGTGGTGGGTCAGCACGGTGTTG
AAAGAGTAGAGAAGATGCCCACTCAGGGGCTCAGGGCCTGGGTCCGGGGGCAGGGGGATGCCCCAGGGCCGTGATGGGCAGGGGACCTCCAGAG
CTGGAATTCCATGGGGAAGGAATAAGGATAGCCAAGCTGAGGAAATGAGGGAACGGCCACTGGCACCAAGGCCTGGAGCAGAGTAGAGCCTCTG
ACAGGGAGAGAGCAGCAGGCACCTGGAGGCCCCAGGTAGGCAGCCCTAAGGTAAGGGGGTTGGCCGAGCCCCCAACAAGTCAGTAGAGCAGCAA
GACGCCCACCACCTCCCCTCCCGCAGAGCCTGTACTCACTCAGCTGATACCTTAGCACCAGCTATGGATGTGCCCCCTCTCTAGGTTTGGGGAC
AGTGGCCTGGTGGTATAGGATCAGCTGGATCCCAGCAGGACCTTGGGATGGGACTGGCCATCAGGAGTTCCTCTGGGATCCTCACCTCGTGGGG
CTGTGCACAGGGGTGCCCCCTGTGCGAGCCCCCATCTCCTTTCCCCAGCCAAGGAAGGCAGGGAGAGCCCCTGGAACAGGTGAGCCATCCTGCC
GACAGGAGCCCTCATGAGGCCTTACTAGGGGTGCTGGGTGTGCCTCTGGAAACAGGCAGCAGGAGCCCAAGGGCTGTCTCAAGGCCATGCCTTC
CCCGTCCCAGCCCCACCAAGGATCTCTGCTCCACTCTCTGCCCTCCCATGCCTGTCCAGTCCCCATGCCCATCTCTGGGCCCTGACTGGATGCT
CAGCCAGACCTTCAGGGCAGTGAATGCCAAGGGAAGAAGCTATGGAGATGGGGCAGCCAGGAGCAGCCAGTGTACCTGCCTGCAGGCCGGGCCC
AACACAGCCACCATACTCAAGCCATGTGCACGCCGGCGGGGAGCCAGGCCTTCATAGAACAGGAATGGCTGGCCATCCCCCAGTGTGCCCCATG
GTAGGAAGGGGGGTCAAGGCAGCCCCAGGAGTGGGGTGGGTGCACCAGCGTCCTAGGCATGGAGGTCATGGGAACACAATCCCCAGGCCTCAAG
AGCCAGAGAAGGGCCAGCCCCAGGCAGGAGCATAACCCCTCCAGGAACAGTGTCCCCTGACCCTGCCACGCACCTGCTGTCCTGGACCCTGAGG
GCACAGGCCCAGGGCATGCAGCTAAGGCTGGGCAGAGGGGCCTGAGGGACTGCTGACCTCCCTCCCCACACCCTCACCCCAAGGTGCCCTCACG
GCTGCCCAGCAGGACACCCTCTCTAGGCCACACTGGGCCTGGCCACCCTCTCTGGGCACCATTTTCAAGCTAGAGCCCTTGCTCCTGACCTTTG
TGACGGGTCCACTAGAAGCCTGGCCTTCCCAAACCCCCCACCTGCCCCTCACTATCCACTTCCTAGGTCCCCCTGGTCCTGTGCCTCATCCACC
TCCCTAAGGCTACAGATCCAGCCCGGCCCCCACCAGAGCCCTGCTCCTCCCCACCCCAGGTCAGGTCTTTCCACCCCACTCACTGCCCAGGGCC
TCCTCACAGTGCTGGCATAGTGAAGCCTCACAGCACCCACGGAGCAAGAGAGCATACCGCCCTCTACCATACCCTGCTGGCTGCACAGGGCTTC
TGCCCAGGTCTGGCTGCTGCCCAACCCCTGCCTGCAGCAGCCTTGCAGAACCTCATGAAGCAGAGGCTCCCACCCGAGGACAGTCAAGGAGGCC
AGGCCCAGGAGGGGATGAGGGCTGAAGTGTGGCTGCTGGGGTGGTTGTAGGGAGGGAGTGTTTCTCCAGAGCCACCAGCCATGGGAGCACAGAG
CTACCCAGGGCCTGTCAGGGCCAAGGGAGAAGGGACCCGGTCCAGGACTCTGGAGGTCAGGCACCCCTCTCCTTTGCCTCCCAAAACTGTGCCT
CAGCTTCCATGCACCCCCAAGGTCTGGTGGGCACCCCAATATCACTCCCAGCCATGGCCTCATTGGCTGGGGCCGTGACACCCATCCCAGGTGG
GTCACCCACTGCTCCAGGGCAGCCCTGACCCTCCATAGGCAGGGCCACTGGAATTCCCGGGGGGCACCAAGGGCAGCTGTGCTACCGTCTACAA
AGAGGGAGCCAGTGACTAAGGGCATAGGACCCCTGTGGTGCATCACCAGTGGGGGGACCCCAAGCCCGCTCAACCCGCCAGGCCTTCCTGAGCA
ATAGCCATAAAGGGTCAGTCCTTGGGGGAGGGCAGTGCCCCACAGGAGCCCCTGGTCAGCCCCAGCCCATGGGCACAGTGCCTCTTAGTCGGGA
CCCAGGTCACAGCCACCCTAATTAGCACCTACTGGGCCCCAGTGCCAGGGGCATTGCAGATGACAGACACTGACCCAGCCGGGAGGCGGCTGGG
CAGGCAGAGGGCACGAGATCATGGGCATGGCTGCCAGGTTGCAGGGACCTGAGCAGTCAGCATAGGCCGGGGCAAGAGCCCACACCCAGATCCA
GGCCAGGGCCAACTCGGGGCTCAAAGCTGAGGTAGGCCCCAGAGAGATCCCCAGCACCCAGGCTCTATCTCCGCTGCTGGGGCCCAGAGAGGAG
ATGGTGCTGGCCTGAGGACACACAGTCTGCTGGAGACCCAGGGGGCCATCTGGGTGGAGAGCCGAAGGTCCCCTTGCAGGCCAGGTGTGAAGGA
CCACTGTGAAGATGGTCTCAGCTGTCCCCATCCCCACTGTGGCCCTAGCACAGACAGAGGGTGACCCCACAAGAGGTTCTGGATGTGTTTCTGA
GGAATGGGGGTCGGCTGGTCTGCAGCCCCTGGGGCCATAGGACACACCCCAGTTTATAGGCAATGGGGGCTGGGAGGTGAAACGCTCAACTCAC
CCTGTGTAGGAGCAAGGCCCACTCCTGCCTGGGCCTCAGTTTCTTTTCTATGTAAAAGGCAGTGAGCCAAGGGAGGTCTTCCCTCCCACGGGCC
TGCTGGCTTGGGCTGCTGCACCTGGTGCATGGCCTCCCTCACCTGCCAAGGGCAGGCATCACCCCGGGAGCCCCAGCCCCCAACCCCCCCGGAG
CCTGCAGGCCTCCAAGTCAGTCTCAGAAGCCACCCCCCAGGGCGTTTATAGCCCATCCTGCCCACCCGCCCTGCAGAGGGAGGAAATGCGCCTG
GTGGGCCTGTTCGCAGGTAGTTGAGACAGGACAGGAATAACCATATAAAAGGCCCGGAGGTAGTGGGGCCCCACCCCACCAGGGCTCCCCTGCC
CAGCCCCCTGCACATCTCACCCTCCATGCTTTGAAGTCCTGGAGGGGTGTGGCCAGCCCCCAACTTGGGCACTCCTCCTCTCTCTGACACTCCC
CTCCTGACACCTACTTTCAGGATCCTGGGGCCTCAGTTTCCTCCCTTCAAGGAGGATCCTGGAGGCTGCCAGCCTGGCCTCCCCAGGACGCTGG
GACCGCAGCAGGCAGGTGCAAGGCCAGCTCCAGGTCCCCATGCCCGACATGGGGTGGGGGTGAGGCCCTACTTACTGACTGCCCAGTGCCCGTC
CCCAGTGCTGAGCCTGGGCTTGGTGTGCCCCGGGGCCCTGCCAGCCCTGGCCCTTGCCCCTGCTCCATCATGGGTCCTCTCTGGACCATGCTGG
GTCGGTGGGGGCCTGAGAGGCTCATCAGTGGAGACGGCCCCTCCCCTCTCAACCGGGTTCCACACCCAGCCTAACTCCCCTAGTGTGGGCCTGG
CGTCACCATCCTCCAGTGGGTGGGAGAGGAGAGGGCAGAGGGCAGGACCCCTGACCAAGCTCTGGGCCTGTCAGCTCCCAGGGGCACAGCTGCT
GCCCCAGGAGTTGACACAGCCCAAAAGATGACCTTGGCTCAGGGGGTCCTCGGCCTGTCCAAGGTTGGAATGTGGTCTGTCACGGCCTCCAGGG
AACTCCAGGACACAGGCTGAGCAGCCAGGAATGAATTCAGGGCTTCCCCGCAGTCCCTTGGGCTATCCTCAAGAAGGAACATTCTAGAAGCTTC
TTGTTGGGGGAAGGCGAGGCCTGGGGAAAGATGCCCCTGAAGAGGAAGAGAAGCTGGGACTTGGGGGTCCCACACCCCAGTCCTTGGAGGGGGT
CCTCCAAGGACCAGGGCATTGCAGAGATGATGTCAGGCCCAGCTTGCCGTCCAGGCCTCAATACGCCTGTTTGTGTATGGGGTGGAGTGTCTGA
GACGTCGTCAGACATCAGCCACTCCTAAGCCCTAGCAAGGCTGCCCTGGCCACAGGTCCCCCGATAAGGTGACCCTGTAACTTCATTCCCTGGA
GCCTTCCTCCAGCCTGGCCCTCCCCGATGTTTCAGCCGGATGGATACCTCCGCCCTTTCCCCTGCAGATAGCCTCTCACCAGGAATTACAATCA
GGGCCATGCACTCAGAGCCTGGCATCATCAGAGTGGGGGACCCAGGTCCCCGAGCCCAGGGCGGGGCTTGGTGGGTGGACTGTCCATCCTGCAC
TGAAGCCTGGAGTGACAAGCCATGAGAGAAAGTCCACGGGGAGAACCAGAGGGGGACTCCTGGGATGCGGAGCCAGCCTCTGCCCTCTGCCAGG
CTCTGTCCTGAGACCCTGCCCTTCCATCTGTAGGCCCTGCCATTCCTGGGCTACTGGCAGAGAGGGTAGAAGACGTTGGAGCACCCTGGGCTGC
GGGCCCAGGTAAAACAAGTACAGACCCTGAGCCTGGACTGAGCTGAGGATGTGCCCCATCCTGGAATATAAGAAGACACGGCCCTGCCCTGGGG
TCTGGGAGACACAGCCTCAACCTGGGTCCTGGGGGAAGCAGTCCCACCCTGGGGTCCAGCTGTCGACCTGGGATGAGCCCTAGTTCCCTCTGCC
CTACAGTGGCACCACCGCCCCCCACAGGCCCCACCCCCTCCCCTGGACAGCTCAGCCCTCTTTCCCAGTCTCCTCCCCTCATGGATCCCCCTTT
CTGCCTCTGAACCCCTAGGGATGGATGCCTCAGGACAGGGCACTCAGGTCCCTGTCGGAGTCTTGCTTGGATCTGGAGCCCTGGATCCCAGGGG
CATGACCTCCTGGAGCAACTTCCAAGGTCTGGGGGACTAGGTCAGTGTTCCTCCCTGCAGAACTGGACTGCTGTCAGTGGCTGCCTTCGGGATC
ATCTGGGAGGGCTTCCAGGAGGAGGTGAGCATGGGGACACTTCCTAGGGCTCCAACATCCTCCTGTAATTCTGAGATTGCATCCCTGCAGACGC
CAGGAAAAAAGTGGGTTCCCATGGCAGCCGGGGAGCCCTCAGAAGGGGCCCCACTGAAGCCTGGGAGCCACCACCCGCCTGCCTGGCCAGGATG
GGAGCTCAGCAGAAGGTGCTAATTGCTGTTTAGCTCCAAGCTGACTCCTTGCTCTCTTTTTGTCTCTCTCTCTCTCTCTCTTTTTTTTTTTTAC
TTGAGCCTCTAGAGCACACAGTAAACAGTCATTTGGCTCTTGGGGCCCTGCAAATTGGTGTTTATGGTGCGAAGATGAGGAGGATTTGTCCACC
CAAACACAGGCTGGCTGGGAGGGAGGAAGCAGGGGTGGGACATCCCATCCAGGCCCAGCTCGGGGAAGCCTCCTTCAGACTGAGGAGCTGTGGT
CTCACAAGCAGGGGACTGTGATTAACCCAGGAGAGCTTCTAGGAAGAGGTGAGGCATCCGCGGCAAAAAGACCTCCTCCAGGGGAAGCTGCAAA
GGCTCCACCATACCCTCAGGTGCCCATGGGGAGCCCTGCCCTCCAGACCCAGCTGGGATCAGAGCTTCTTGGCTGGGTCACAGCCTGGGTCTCC
TTCCAACAGCACACCTCACCTGCCCACCCAGCAGCCAGCTGCAGAATTACAAACTGGAATGCCAAGGCCCGGTCTCCTGGCAGGAGCAGGAAAC
ACAGAAGTCCAGGCGCAGGCATATGGGCTGGATGTGTGGCTGGGAAAAGTGGATTTCCCCAGGTATCTCCCCCTCGTTCACGAACCTGAGGTGG
GCAGACTATGCCCCAGAGCCAGTGCCCGGGCTCCTGTCTTCTTCTGCTGCCCAAACTCACCCCACCATGGCAGAAGGCCAAGAGGCCAGACTGG
CATTGCCCTCTCCCCACTCCATCCAAGGTCTGGCATGAGGCACCGGCCCTGCAGTGCCACTCCTCAATGGAGCAGGCAGCCTGCAGCACCAACA
CCAAAGGCTGGGGAGGACATGGGATGCTGGACATGGGAACCATCAGGAGTGTGCAGGAGGGGCAGTGTTGGCGGGTAGTGTAGACCAGAATGTA
CAGGGCATGTAGAAGAATGGATAGTGTAGACAGGGTAGTGCAGAGGAATAGCACAGGTGGGATAGTGTAGGGGGATAGTGTGGGGGGATAATGT
AGGGGGTATAGTGTAGAGGGATAGTGTAGGGGGATAGTGTGGGGGGATAATGTAGGGGGTATAGTGTAGAGGGATCGTGTAGGGGGAATAGCGT
AGGGGGGATAGTGTAGAGGGATAGTGTAGGGGATAGTGTATGGGGATAGTGTAAGGAGGATAGCATGGGGGATAGTGTANNNNNNNNNNNNNNN
NNNNNNNNNNNNNNNNNNNNNNNNNNNNNNNNNNNNNNNNNNNNNNNNNNNNNNNNNNNNNNNNNNNNNNNNNNNNNNNNNNNNNNNNNNNNNN
NNNNNNNNNNNNNNNNNNNNNNNNNNNNNNNNNNNNNNNNNNNNNNNNNNNNNNNNNNNNNNNNNNNNNNNNNNNNNNNNNNNNNNNNNNNNNN
NNNNNNNNNNNNNNNNNNNNNNNNNNNNNNNNNNNNNNNNNNNNNNNNNNNNNNNNNNNNNNNNNNNNNNNNNNNNNNNNNNNNNNNNNNNNNN
NNNNNNNNNNNNNNNNNNNNNNNNNNNNNNNNNNNNNNNNNNNNNNNNNNNNNNNNNNNNNNNNNNNNNNNNNNNNNNNNNNNNNNNNNNNNNN
NNNNNNNNNNNNNNNNNNNNNNNNNNNNNNNNNNNNNNNNNNNNNNNNNNNNNNNNNNNNNNNNNNNNNNNNNNNNNNNNNNNNNNNNNNNNNN
NNNNNNNNNNNNNNNNNNNNNNNNNNNNNNNNNNNNNNNNNNNNNNNNNNNNNNNNNNNNNNNNNNNNNNNNNNNNNNNNNNNNNNNNNNNNNN
NNNNNNNNNNNNNNNNNNNNNNNNNNNNNNNNNNNNNNNNNNNNNNNNNNNNNNNNNNNNNNNNNNNNNNNNNNNNNNNNNNNNNNNNNNNNNN
NNNNNNNNNNNNNNNNNNNNNNNNNNNNNNNNNNNNNNNNNNNNNNNNNNNTGCAGGGGTATAATGTAGGGGTATAGTGTAGGTGGATAATATT
GGGGGACAGTTTAGGGGGAGAGTGTAGGGTGACATTGCAGGGGTGATAGTGTAGAGGGATAGTGTAGAAGGATAGAGTACGGGGGATAGTGTAG
GCAGGAGAGTATAGGGGCATAGTGTAGGGGAGATAGTGTAGGGCAATAGCGTAGGGTGATATTGCCCAGGCTATAGTATAGGGGGTGCTGTAGA
GGGATAGTGTAGGGGAGGAAAGTGTAGGGGGGATGGTGTAGAGCGATAGTATAGGTGATAGTATAAAGGGATAGTGTAGTGGGGATAGTGTAGG
GGAACAGTGCAGGGGGGATACTGTACAGGGATAGTATGGGGGAGAGTGTAGGTGGATAGTGAAGGCGGATAGTGTGGGGCATAGTGCAGGTAGA
TAGTGTAGGACAATAGTGTAGGTGATAGTGTAGAGGGATAGTGTAGTGGGGATAGTGGAAGGGAATAGTGTAGGTGGATAGTGAAGGGGAATAG
TGTGGGGCATAGTGTAGAGGGATAGTGTAGGGGATAGTGCAGGGGTCACAGTGCTGTTGGGGTGCCAAGGCACCGTGCTCAGTGTCCATGATGG
TTTGTGTGCTTTGTGTCTGGAGCATCACGTGGGGACCCTGCAGACACAGAGTCCTGGTCACCCTCCCTGTTTCTGTGTCACTTGGCCTGCCTCA
GGTGGAGGGTCAGAGGTCAGTGTGTTCCCCGTTAGTGTGGGCACTTTCCTGGGCTGTGCCTAACCATAGGTGGCTCTGCTCAGGCCATCCTGGC
CCAGTGCTGCCTAAAGGTGTGCAGCTGGCCACCACCCACTCTGAAT
HUMAN SEQUENCE—mRNA
CGGCGATGGCCCCACTCGGATACTTCTTACTCCTCTGCAGCCTGAAGCAGGCTCTGGGCAGCTACCCGATCTGGTGGTCGCTGGCTGTTGGGCC
ACAGTATTCCTCCCTGGGCTCGCAGCCCATCCTGTGTGCCAGCATCCCGGGCCTGGTCCCCAAGCAGCTCCGCTTCTGCAGGAACTACGTGGAG
ATCATGCCCAGCGTGGCCGAGGGCATCAAGATTGGCATCCAGGAGTGCCAGCACCAGTTCCGCGGCCGCCGGTGGAACTGCACCACCGTCCACG
ACAGCCTGGCCATCTTCGGGCCCGTGCTGGACAAAGCTACCAGGGAGTCGGCCTTTGTCCACGCCATTGCCTCAGCCGGTGTGGCCTTTGCAGT
GACACGCTCATGTGCAGAAGGCACGGCCGCCATCTGTGGCTGCAGCAGCCGCCACCAGGGCTCACCAGGCAAGGGCTGGAAGTGGGGTGGCTGT
AGCGAGGACATCGAGTTTGGTGGGATGGTGTCTCGGGAGTTCGCCGACGCCCGGGAGAACCGGCCAGATGCCCGCTCAGCCATGAACCGCCACA
ACAACGAGGCTGGGCGCCAGGCCATCGCCAGCCACATGCACCTCAAGTGCAAGTGCCACGGGCTGTCGGGCAGCTGCGAGGTGAAGACATGCTG
GTGGTCGCAACCCGACTTCCGCGCCATCGGTGACTTCCTCAAGGACAAGTACGACAGCGCCTCGGAGATGGTGGTGGAGAAGCACCGGGAGTCC
CGCGGCTGGGTGGAGACCCTGCGGCCGCGCTACACCTACTTCAAGGTGCCCACGGAGCGCGACCTGGTCTACTACGAGGCCTCGCCCAACTTCT
GCGAGCCCAACCCTGAGACGGGCTCCTTCGGCACGCGCGACCGCACCTGCAACGTCAGCTCGCACGGCATCGACGGCTGCGACCTGCTGTGCTG
CGGCCGCGGCCACAACGCGCGAGCGGAGCGGCGCCGGGAGAAGTGCCGCTGCGTGTTCCACTGGTGCTGCTACGTCAGCTGCCAGGAGTGCACG
CGCGTCTACGACGTGCACACCTGCAAGTAGGCACCGGCCGCGGCTCCCCCTGGACGGGGCGGGCCCTGCCTGAGGGTGGGCTTTTCCCTGGGTG
GAGCAGGACTCCCACCTAAACGGGGCAGTACTCCTCCCTGGGGGCGGGACTCCTCCCTGGGGGTGGGGCTCCTACCTGGGGGCAGAACTCCTAC
CTGAAGGCAGGGCTCCTCCCTGGAGCTAGTGTCTCCTCTCTGGTGGCTGGGCTGCTCCTGAATGAGGCGGAGCTCCAGGATGGGGAGGGGCTCT
GCGTTGGCTTCTCCCTGGGGACGGGGCTCCCCTGGACAGAGGCGGGGCTACAGATTGGGCGGGGCTTCTCTTGGGTGGGACAGGGCTTCTCCTG
CGGGGGCGAGGCCCCTCCCAGTAAGGGCGTGGCTCTGGGTGGGCGGGGCACTAGGTAGGCTTCTACCTGCAGGCGGGGCTCCTCCTGAAGGAGG
CGGGGCTCTAGGATGGGGCACGGCTCTGGGGTAGGCTGCTCCCTGAGGGCG
HUMAN SEQUENCE—CODING
ATGGCCCCACTCGGATACTTCTTACTCCTCTGCAGCCTGAAGCAGGCTCTGGGCAGCTACCCGATCTGGTGGTCGCTGGCTGTTGGGCCACAGT
ATTCCTCCCTGGGCTCGCAGCCCATCCTGTGTGCCAGCATCCCGGGCCTGGTCCCCAAGCAGCTCCGCTTCTGCAGGAACTACGTGGAGATCAT
GCCCAGCGTGGCCGAGGGCATCAAGATTGGCATCCAGGAGTCCCAGCACCAGTTCCGCGGCCGCCGGTGGAACTGCACCACCGTCCACGACAGC
CTGGCCATCTTCGGGCCCGTGCTGGACAAAGCTACCAGGGAGTCGGCCTTTGTCCACGCCATTGCCTCAGCCGGTGTGGCCTTTGCAGTGACAC
GCTCATGTGCAGAAGGCACGGCCGCCATCTGTGGCTGCAGCAGCCGCCACCAGGGCTCACCAGGCAAGGGCTGGAAGTGGGGTGGCTGTAGCGA
GGACATCGAGTTTGGTGGGATGGTGTCTCGGGAGTTCGCCGACGCCCGGGAGAACCGGCCAGATGCCCGCTCAGCCATGAACCGCCACAACAAC
GAGGCTGGGCGCCAGGCCATCGCCAGCCACATGCACCTCAAGTGCAAGTGCCACGGGCTGTCGGGCAGCTGCGAGGTGAAGACATGCTGGTGGT
CGCAACCCGACTTCCGCGCCATCGGTGACTTCCTCAAGGACAAGTACGACAGCGCCTCGGAGATGGTGGTGGAGAAGCACCGGGAGTCCCGCGG
CTGGGTGGAGACCCTGCGGCCGCGCTACACCTACTTCAAGGTGCCCACGGAGCGCGACCTGGTCTACTACGAGGCCTCGCCCAACTTCTGCGAG
CCCAACCCTGAGACGGGCTCCTTCGGCACGCGCGACCGCACCTGCAACGTCAGCTCGCACGGCATCGACGGCTGCGACCTGCTGTGCTGCGGCC
GCGGCCACAACGCGCGAGCGGAGCGGCGCCGGGAGAAGTGCCGCTGCGTGTTCCACTGGTGCTGCTACGTCAGCTGCCAGGAGTGCACGCGCGT
CTACGACGTGCACACCTGCAAGTAG

[0275] TABLE 11

MOUSE NOMENCLATURE
ICSGNM Ly6e
Celera mCG2785
HUMAN NOMENCLATURE
HGNC LY6E
Celera hCG1765592
MOUSE SEQUENCE—GENOMIC
TCTCACTTCACCTGGGTCTTCCTCAGGACAGGGGCCTGCTTGGAAGAGCTTTGTGAGTGAAGTGGCTCATCCAGTGAGAAAGAAGAGACAGCCC
TGCCTGGGAACACCCTAGGAGCGAGCTTAGCAGACTGCAGATAAGGGTTCCTCCACCCTAGAGACACCCTCTGACTGTGGGAGGGACTTAAGGA
TTTTCTGACTGCACTAATCTTGTCCTAGTTTGTGAACTCGGCAAGGCACAGTGGACCAAACTGAAAAAGCAGGTACAGGAATGACTAAGGCTGA
GTTGAGAAACTCCTCACGGCTAGGACCAGGGCCTGCTAGGATCCACAGATGGATGGTTGGCCAACTTTCAGTCATCCTCATGAGATAACATTCT
GTCTGGGAAGGTCAAGGGGTTTGTGAGCAAGAAGTAGTACAGGTTGTATCCTGTCTCAGTCAATGTTCTATTGCTGTGAATAGACACCATGCCC
ACTCTTTACAAAAGAAAGCACTTAATTGGAGCTTGCTTACTGTGTCAGGGGTGTTGTCTATTATCACCATAGCGAGGAGCACGGCAACACAGGC
AAGCAGACAGGACGCTGGGGAAGTAGCGGAGAGTCCTGCATCTGGACCCACAGGCAAGCAGGAAGAGAGTGACACTGGGTCTCGCTTGGACCTT
TGATGCCTCAAAGCTCACCCCTCAGTGACACACTTCTTTGAACTGAAAGAACCTAGTGGGAAAACCCCCACTCAATTTCTGTTCAGTGCACACC
CAAGAATCACGAACAGACGACCATCTTGATGTAAAAGCATGAGGTAGTTTAATGACGGAGCTCCGGGCCGACACATATCTCCCACAGGAGACAG
AGGTGTGGACCACATGGTGGAGCCATAATGGCGGAGCTCCGGTTCAAAACGTATCTCACACAGGAGACAGTGGTTTCGACCATGAGGCTTGGAA
GCTAGGGGCTTTTATAGAAAAGGGGGTAGGGCTGGGGGAGGAATTAGCGAGGTTTTACATGATTGGTCTATTTAAATATCAACAGACTGTCAGA
AGGGCGGGAGATAGGGAGGCACTAGGCCAGTCAGGACATGTAAGGCCTGGGCATGTCCTGGCCTGTTCTGCTATGTTCTCAGCCCCAGGTTTTA
AAGCTCACAAACAACTCTTTGGGCTATTTTGACATAAATTACATGAATTCACATGTCTCAAGTTTTATTTCCTTTCAGAACAAGGCTANNNNNN
NNNNNNNNNNNNNNCCTGTCCTTACCCTGAAGACCATCCTGTCCCTGAAGACATACTGTCCTGGTCCCTGTAACTCCCTGGGGGGCAGCCGAAG
TAGGTGTTTCTATACATGAAGAGAGGACAGAAAGTTCTACATAAGACAACCTCAGCAAACTTCACCCTCACTGAACACATGTCTAGAATCCCAC
CAAGGTGGGACAGGCTCAGTAGTAACAGAACTCCAGCCCATAATAAAGCCATTGGCACAAGCCTAAGTCACACCATGGATGTCACTGTCAGCCC
ATGACAAGGGACCAGAAAGAGTAGCACAATTGAGTTGGAGATGTGGTTCTTAGCATGTATGAAGCCGTAGGTTTGATCCTTAGTACGCATAGCC
CTGGTATGGCGGTGCACAGCGCCAATCTGTACTCAGAAGCAGAGGCAGGAGGTAGGAGGATTAGATGTTCATCCTTAGCTACTCAGTAAGTTCT
AGACCACCCTGGGCTCCATCAGACCCTGGTTTGTTTGTTTGTTTGAATTTCTTGTTACCATTGCTCTGGAAGGGTAGATGTTTCAAACCCAAGA
AGACAGATGCCGGTGGATGGATTCTGAACTGTTTCCCAACAGCATCCGAAGGGTGGTTATAGAAACATATTCAGAAATAGAAAACAGTGGGGGT
GGGGGCTTCCGCAGGGGCCTGTGGTGTACCTGTTCAAGCGGCACTAGGATCTGAACATCTAGTCAGGTCACAAGGTCTGTGAGGTCTGGACTGA
GGCAGAGGTCACTGGCCACGCAAGTAAGATCTGAGTCCTTTGTTACAGAGGCTACAGAGAGACAATAGGAAGATTCCCACACATGACTTGGATG
GCCTAGGAATGAATGAGTGAACAGGAAGTGCTGAGCCACCAGTGGAGTGGGATCACAGATTTGTGAAGAGAGACAGCACCTGTCCCTCTCATGT
GGTGTCACAAGTGGACTGACTAAATTAAGGAATTGAAGGATAGACCAAGAGTTCAGCACATGAGATCAATCTGTGTAGAAACTCCTGGAATCAC
TGCCTGGGTCCTGAGATCACTGCCTTAAGGAGGGTTCTCCTTGGGGACGTGGATTCCAATGTCAGTCATAACTCCTAGAAGCTTATCACTCACT
CTCAGATTCCTCTTAGTTGCACAGCATTAAGGGAGCCAGCCAGACTCCTCTACACAATGCTTCAAAGGAGACTAGGCTTTGTGCCTGAGTAATG
ACAGAGACCTTAGAACTCTTGAGAGCTATATACATCCATAATCAATTAAGGTCTCTTCTGATGTAACTTGTCTTCCAGGTCCAAAGGAGGGGCC
TGTTCTCATGAATAATGGCTCCTCACTCACTGAGACCCTGCCATGAGCCACACGTGGTGCTAGACACAAGATGAAGTTCTCTGCCCTCAGGTCC
TTCATAGTGACAGCTTGACAGGAATTCAGATCATTGGAGCAGCCCAAGAGCAAGTATGAAAAAGATATTCTAACTACAAGGAAGACATCTCCAT
CCTTGGCTACTGGTCCTGCCCCCAGGTAAGACCAGGGAGGAAAGAGAAAGCTAAGGCCTCAGATACTGAGCAACAGCCTGGCCATTGCCTGCTG
GATGGTTTCTGTCTTGGGAACACCCCAAACTGTGGATTCCCAGACCACCAAATGTTACCATTGTTGTGTTGAGAGAGAGAGAGAGAGAGAGAGA
GAGAGAGAGAGAGAGAGAGAGAATATGATGTTTGGTGGAAGTGCAGTCAGGTGTGGGTGGAAGATGGTGCCTCTGAGGGCCCATGCTGAGCCAT
CCCTTCCCCATGAGGGTCCAGCCATAGATGGTATAGTATAGTACAGTATAGTATAATATAGTATAGAATAGAGTTTATTCAGGGCATGGGGAGG
GGGGGTTAAGAGGGTAGTNNNNNNNNNNNNNNNNNNNNCTTCCCTTTCCTTGCTGTGGCGTAAGCTAATTCCTGCATTACGGCTGGTGAGGCAT
CTACACATGCTTTAATATAATCTTTCAGGGGAACTTGTCTTATGGATTGGTCTGTTCAGGTCTTGGCACAAGGTATTCACGTATTCCCAAGCCA
ATTGTTTTATTAATATATCAGTCCCTTCCGAGGGGGGAAGCATCCTAGAAACTGCCTCTTCCAATCTAGCCACAAAACTCTCGTAAGATTCATC
ATGCTTTTGTCTAATTCCTGAAGGGACTGTGGATTTAGCCCCAGGTGGAGGTAAACTCTGCCAGCTAGATACAGCTATCTGACTAATTTTCTCC
AACACTGCTTTTGAAATTTTCAGTTGTGCTGCTCGTTTAGCATAGTCTTTTTGCCCAAGAAGCATAGGCACTGTGGGTTTAGTTCCATTTCTAT
TTTCCTCATGGAACTTCCTCATATCCTTACCTACTCGCTTCCAATATTCTAATGTCAAGCTTCCCTCCTCTAGAAACCAGGGACTGATTTTTTG
CACGAAATTATGAAATTTATCCGAAACCTTTAGGCTTCTTCCAGACAACATGTGCTTAAACACTGACAGAAACAATCTTTTCCCTTTTAACTTT
TACTGCCCCGTAATAAAAAATTACTCGTCTCTTAACGGATGTACAGATCCTCTCATCTGCAGCACGGTCACGACGAGATCCTATCTTTGCCTGA
GAAAATAAAGAATAGAAAGAAAAAAGAAAGAGAAAAAAGACTGATCTGCCCGGGTGTCCCTGTTTGAAGGCACCAACTGCTGCAGACCCTCTGG
GCTAATGTTTGTCTGCGTGAAAAGAGTCTCTCGAGCAGATGGGCAAAGAGTCACATGGAGTGACAAACAGATACACACACACACAAGAGAGGTG
TTGGATCTGAATGTAATGTTCCAGTCGAGCCTCAGACATTTTATAATACAGAGTAACAGAATAAGGCACGTTGAAGTTTTCCAGGTGCGAGAGG
AGTGACTTCAAAAGGAACCAGATAAATGTTTACTTTAGAGATTATCACCCTGCTTCAGATCAGCCCTGTGCCAGGCAAGAAATTTACACTTCAG
TGTTAATAGCACCAGGGGGTTGTTAACTCTTGACAGGCTTCAAGAATGATGTAGTGTCACTGACCCCGAAATTCTCTAGGCCTTGTTAAATTAT
ATCTAGTCTGGAGAATCCTCATTATCAGGATAGTATATTCACTTGCTCTTGGCATGGAATGTAGCTTGTGGTAAAATTTTTATCTCAGTGAGGA
TTTTTGTCTCTTCCTGCAGACAACTGAGTTAATGGCTGTAATTTATTCTTTTATTGTAGTGCTTAATTAGTTACTGAATAGGTTAAGCTCCTTG
CTGCTGTCTGGAATTTTGGAACACTGGGAAAGGCTTTAGCTATGTCAGAATACAATCTTAAAAGGCATTTACAATAAGGTAATACTAAATAGAG
AGCACGTGGATCCATACACTAGACTAACTCGGGAATGAAAAAATTAATTTTATGGTTTATATAGATTAGGGAGAGAGTGACAGACCCCAGGAAG
GGAGTTTCCTTGAAACTCTTTGCTTCATGAACCAGCTTCCCAGCTTTCGCTTTGTCAAGCTGACTCCACCAGAGTGCCATGGCAAACATGTGGT
CACTCAGATGCCTGTTGCTGCTGCTAAATACCTTCTTCACCATAAGGGACTCTTATCCCACCAGGAGCCCTGACCCTCAAATACACTCTTCCAT
AATGCTGTTTTCCATCCTGGTGTTTTATAACTGCAACAGAAAATTAATGGGATACATCCTGTCTTAAACAAAAGGAAAAAAAATAAAGCAAAAC
AATAACAAAAGTCATTCAAATAAAGCATTTTGGAAGCAAAACTAGGCAATAAAACTAAAACTGGAACAAAGACTTTTTTTTTTCAAGACAGGGT
TTCTCTGTGTAGCCCTGGATGTCCTGGAACTCACTCTGTAGACCAAGCTGGCCTCGAACTCAGAAATCCTCCTGCCTCTGCCTCCCAAGTGCTG
GGATTAAAGGCATGCACCACTACTGCCTGTCAGAACAAAGACTTCTAATTACTTCCTATTAAGAACAGACCAGCTGTTTCAAAACGGGGCATAG
GGGACAGTGTTAGATTTGGTCCTGTGTCTTCTCACAAGCTGCTTAGTTTCTTTACAGCCCTTCCCCCTTTTCATATACAAGGTCTCTTTTCATC
CTAGCTTGACCTGGACACTGAAGATGACCTTGAACTCCTGACCTCCTTGGCTCCACCTCCCAAATGCTTAGATGACAAGCACGCACTACCAGTC
CTGGTTTATATGGAGCTGGGGATGAACCCAGGGTGTCTTGCTTGCTAGGCAAGTACTCCAGCAAAGGAGCTGCATCTCTAGGCTCTCAATAGAC
TTCTTCAATCTTTCTACTTCATGATCTCTTTCACTCAAGGTGCAGTTCTTCTTTGCAGAGGAAGATAGTTTATTCTGGAACCATACAAAAATGG
CCCAGGATCACAGATTTAGGTTACCCCAAATTTCTGTGTTCCCAATGTGGCAACAGTTTGAGGAGNNNNNNNNNNNNNNNNNNNNGATAGGAGA
GGAGAGGAGAGGAGAGGAGAGGAGAGGAGAAATAGAGGCTGGCCATAAGCATGTGGAGAGGGGGAAGGGAATGGGAAGAGAAGGGGAATGAGTG
AGAGGACAGAGGGGTAGCAAGAGGGCTAGAGAGAGCAGAAGCGATGGCAAGAAGCCCCTTTTATAGTGAGTCGGGCATAACTGGCTGTTGCCAG
GTAACTGTGGGGTGGAGCCTAGACAAAACACTAACAGCCATGCTGTAGCCTGGACACCTGAGGACCCACACTGAGTCTTGCTGTCAGCTCTTGA
GGAATGAGCACCAAAAGCATGTGTGTCCCCAACCCTTATCTGTATGGGATGATCCTGGGCATGGCTGGAGCTGAGGAGAACTCTGAAAACACAC
AACAACAAGCTGTTTCTTCGCATCACTAGCAGCAAACACGGACTATGCTCCCAGTTCCCCTCCACCAACAGCTAGCTTCCAGCTACAGGGCAAC
TTGGCCTCGGCCCCACCCTGGCCAACCCACCCAAGCAGCTTCACAACTTTTTCTGTCTCCTCCCTACCCCCAATCCTAGGACCAGCCCCTGTCA
CCACCATCAACTCCTTAGACTGTGAGGAAGATCAGGTGCAAAGCCCCTATTTCCACATGTGAGACCAAGAATGGAAGTGTGACTCTCAGAAAAG
CAGGTGGAGGAAACTCAGCAGCCCACAATCCCCTGAGTAGGGCTGTGCTGGAGGATGATGGGGGTGAGGAGGGAAGGGAAGGAGAAGGAACAAA
CAGGACTGCCAGGCAAAGGGAGCCTGATGCCCTGATCTCCCCCAGAAGAATCACCCAGAAGCAGGACGTGGGTCCCAGGGTTCTGCTAGAGGGA
TAACACTCAGCAGGTGGTCGTTAATATTTGTTAGGTGTGGAAGCACTTCCTGAGCGGTAGGAATAGAATACTGGAGGACGCTTAGGTAAAAGCA
GAAGGGTTGGAGATTTCCTTGTAAAAACTGGGGCTTCAGCACTTAAGATGAGAACCAAAACCGGATGCCTGGGCTGGATCCTCTGTTCATACTC
AAGGAGCGGAGTGTAGGAGGCAGCCCGGCACCTAGAGGAAGTGGGAAGTGAGAAACAGATCTGTTCAAACCAGTGCTGCAATGACCTCCTTCCC
GAGGAATTTCTGTCCTGCCGCCTCATCCCCAAAAGAGGGATGGCCCAGACGGGCTCAGCCCAGAGGGACCTGACAACCTGAAGGGCGGGTGATG
AGGCATCCTTGGTCCAGGACTTCCTCAGCCTTACAGCAGCAGAGATTCCCATGAGCGTTTCAGGATGCAGTCTGTCCCCTCACTCCTTCCGGAA
GCAAGCTAAGCCTGCGCACAGGTCTTAGTATCGGTGATTGCCAGAAGCCCTGGCCTTTCCACCCTCCCTAGGTCTGTCCTGAAAGGTAAGGTAG
ACATGCTACACCAGAAGCCACGCCAGGGCTCTGATGCCACATTGTGTGCGGTGGGGCACTTAGGGCGGTCTCAGCCAGGCTTCTGGGTACCACC
GGGGACCGCCGCCGTGGGCGCATAGCTTGGGACCCCTGTCGTAGTCTCAGAGGAGCAGTTGTGCAGCCAAGCCAAGGGCACAGCCGGAGTTGCC
AGAGGCCAGCAGCCAGGGTCGTTCTCCCCACCAGCCAGAGACCCGCCCACAGCCCATGAAACGCCCCGCCTGCAGCCCGCCCCCGCCATCTGTG
CTCCGCTCCGCCTGCTTGGGTGCATTCAGCCTTTGGTGATCCTCCAGGACCTAAGGTTTCGGTATTATCTTCGGGGCCTCTTCACCCGGAGGTG
AGTCTGCTGAGCCCGACCTCAGGTGTTCACTCGTCACGCGAGGGCCTGGCCACGGCGGGGAAGCACTGGGAGAGAGCGGGAGGCCTTGACCGCA
GCGTGTAGGATCTGGGGTCCCGGCGCTCTGCTCCCGGGTGCAGAGTGGTTGGAGCATGCGAGGCCCTCTGCAGCGTGCTCTGTTCCTACCATCA
CCCCACCCCCACCCCAGTCCTTCCTGCACGTTTCTGGAGAGGCAAAGGCCCCTGCTGAGCCTTCACTGGGTACCCCTATCTCGACTCCACTTGT
CTGCTTGGGATCTCCAAAGGGGGATACACCCTCGTAAACTAGAGCAGGAGGCTGGGGGGTGGGGGTAGGGGTAGGGTCTGACCAGTTAGATTGA
GGCTGGACCCTCCCCAGAGTGAGGAGCGGGAAGCTCTTTGTCTTATCCAGGATTTTGCATATCAATGCTGAGGTTCTGGTGATTAAGTAGGGTC
CCTGGCTAGCGGGGGTAACCTGAACAACCTTCCTCCGCTGGCCGCTACCCAATAGACACCTGGCTTCCGCGGATGAGCCCTTTGAGTTTGTGGA
GGTGTTCCTCAGGTCCCCAGGGCCCTGCCCCGTTGCCTGCAGATGTGTGGACAGACAAAACATTGGACTCGTTTTCCAACCACTTCACCCCTTC
CTTCGCTAGTCCTCCGGTGGACGATGGGATGCCTCATTGACTTGTTTGTGGCTGTGCATGCCAGAGCTTCCTAGCAGACAGCTCAGGGCTCCAT
CGTTCCTAAATCCCACTGTGTAACGAAAAAAAAAAAAACAAAAACAACAACAACAACAACAACAAAAACAAAACCAGAAATGAGGACAGGCCCA
GCTGGGCTTGGCACTGAACTTGGCCACCTGGAGCTTTGGCTACCCACTACAAGATGTCAGCAAGTCTCAGGATAGAAGAGGCCTAAGGCCAGTC
CTGGAAGATACCAAAACTTCACCTCCTCTATACCCCGTTCCTCTAGGAGAACTGTAAGCCACCTTTCTCTCTGGGACGCCCCTCTCCCACTCAA
CAGATGGCACCAGTCATCTTCCTCCTCAAGAGGCCAGTGGTATTCAAAATAGGATATTGAAACCAAGCAAGCTGGTCCTCTCCTCTACCCTATG
CCAAAGACTTCTGCCCAAAGGGCCCAGAAAAGTCCCATAGCCATCTGGCTGGCTAGTGTGCTGACTGCTACAGGTGTCAGTGTCCCCAGCGAGC
AGGTAGTGGAGTGGAGGTGTCTTCTTGTGGAAATGGGTCCTGAGCCTCTACCTTGTACAGAAAGGAATTAGTGAAGCCCAGAGGCCTCCAGCCC
GTGTCTCTGCCACAAGAGAGAGGGGGTGGGGGTGGGGCTGTATTTGGTTCCCAGGGCTCAGGGAAGGTTTTCGGTTCATGCATGCTCATTTATC
TGACCACTGTCTTAACCCCAGGACAACCACTTAACTGTCCACTTCCATATCAGAGTTCTTGGTTCCCCTTTACTTCGTCTATGGAGCCCCTGAG
TTTGGGAAGGGGTATTAACTGAAAGGTACCATTAGATGAACTTGGAGAAAGATTTGTAGGTGCCACGGGAGATTTCAGGTAAAAGCTCTTTTAA
TAATTGGCTACAATAGCAGCAGGAGGAGGCCAGGAATTCTGAGGTAGAGATTTGATTAGCAGCACGTGGAGCAAAGGAGACTTCTGACTCCTAC
AGGTTTCAGAAAGTGGGGAGAGGCTCTCAGATGAATGGCTTGGACTGTGAGGTAAGTGTTAATGAAAGGAAATAAAACTGTAATTCATGTAATG
TATGTTAAATAGCCCCAAGAGTTGTTTCTGAGCTTTGAAACCTGGGGCTGAGAACATAGCAGAACAGACCAGGACATGCCCGGGCAAGCCCATC
GCCTCCCTAGCTCCCACCCCTCTGACCTAAGTTAAATGTTACAGGCTGCTGATGTTTAAATGGACCAATCATGTGAAACCGCGCCAATTCCTCC
CCCAGCCCCACTCCTTTTCTATAAAACCCCCTAGCTTCCAAGCCTCGTGGTCGAATCCACTGTCTCCTGTTGTGTGAGATACGTTTCGACCCGG
AGCTCCGCCATTAAAAAACCTCTTGTTGTTACATCAAGGTGTTGTGTTCTATTCGCGATTCTTGGGTGCACGCCGAATCGGGAGCTGAGTGGGG
GTTTCCCCACTGAGTTCTTTCATTAGTGTAGCACGAGACTAGCTTAAGGCTGTACAAATTGTCCGTCTGATTGGTGCATGGGGCCAGGTAGACA
CTAGATAAGCAATTGGGCCTTAACTCGAGTTGTCTTAATGGCTACCCCCAGGGCAGCAGGGAGTCAATACTGCTCTCCTGTCTGGGGCCTGAAT
GCTGAAACCATCTACAAAGGGGACATAAGGCATATTGGGGAGGTGTAGAGTGGGCCAGGCCCAGGGTCTGCTGGTATCTATGCCAGGATCCTGA
GTGGTGGTGGCGTAGCCTGTCTTTTAACCAACTGCCTCTCTCACAGTAGGCTTCTTTGGCTTGCGAACCTTCAGCAGATGTCTGCCACTTCCAA
CATGAGAGTCTTCCTGCCTGTGCTGTTGGCAGCCCTTCTGGGCATGGAGCAAGGTATGGAGCTCTGAGATAACCCTGCAGCCTGGTCCTCCTCC
TGATCTCTCATTCTTTCTCCTGAGTAGATGCCCAGGGCTCCTCCTGAGCCAGCCCTCCTAGGAACGTCTGGCCTTCCCACCTCCTACTCTCTAG
CCAACTGACCTAGTTCCCCTGATGCTGTGCTGGCCCAGCTACACCTTTGTCACCTCGTGTTGACTTTAGCCACTCCAGTACCAAAGTCTGAAGT
CAGTTGTCATTGGCTGGCTTTTTTCCCTGACCCAGGGCTGAGCATGCTGTTGCTTCTTGTCAGTGGGTTGGGGATCAAGGGCCCCACTGGAAAG
TCACCTTACCCTGGAAGGCTTCCCCAGGCAATAGGCAGGTGTCACCTACAGCATTGTCCCTTTTGCAGTTCATTCCCTGATGTGCTTCTCATGT
ACCGATCAGAAGAACAATATAAACTGCCTGTGGCCAGTTTCATGCCAGGAGAAAGACCATTACTGTATCACGTTATCTGCCGCTGCGGGCTTTG
GTGAGTAGCTGCCTGTTTCCCTAGCCAGGGCCAGGGACCTGCGGGGCTTTCCCCATTTCCTGCTACCCTGTCTGTCTGTCCCCTCATCCTCACT
TTCCATGCAGGGAATGTCAACCTTGGCTACACCCTGAACAAGGGCTGCTCCCCGATCTGCCCCAGTGAAAATGTCAATCTCAATCTCGGTGTGG
CGTCCGTGAACAGCTACTGCTGCCAAAGCTCCTTCTGCAACTTCAGCGCAGCTGGCCTCGGACTTCGTGCCAGTATCCCACTACTGGGCCTTGG
ACTCCTGCTTAGCTTGTTGGCTCTGCTGCAGCTGAGCCCCTGACCATCCCCCATGTGTTCTCCATATCCCCCCAGCTCAGGAAAAGCCCAGCTC
CTTTTAGGTCCCAGGGGACCCTAGGAACCTTCAGCTCCTCCTGGGTGTGTCTAGTTCCCCCTCCACACTCTCTCAACGTCAGGGCTAAGTACCA
AACTCACCCATACCTGCTCTGTTGAAGTGGTACTGGCTACCCTTGCTTCCAGAGCCAATCCTATAACCTCCCTTGGGGAACCAGCGAAGGGGTG
AAGATCTCCTTGGAGTCTCAAGAGTACCAGAGTCAGCGCCGAATCTTGTGGACACACTGACAAGGATGTCTAATCCAAATAGATGTATATCTGT
GTGCTCAGTGTATCCCTGTGTGAATGAAGCCACTTGGATTCTGGGGTGGGCAAAGAAGACCTGAAAAGATTCTACAGCAGAAGGCCTGTGTCGC
CACCAAAACCCCTCCCCCTGGTATCATTGTACCCACCTTGTACTCTGTTCAGGAGGCTGCCCATCGAGGACTGCCACCCCTCCAGATGAAGGCT
CCCACTACCCGATGCAGTTGAGTCCCATCCTGCCCTCTCTGCCCACACTGCCTTCCTGCTGCTATTCTAGTGCCTCAAATAAACCGTTCACACC
CTTTCCTGCTATGTCCTGGTTGTCCTTAACCCGTCTTCCCCCTCCGGTCCAAAGGGACCTGGGGATCCTGCAGGCCCACAGCCCTGCTTAAGCG
ATTCTGAAAGACCAACCCCGATACAGTGATACATTCCTATGATGCCATCATAGCAGAAGCAGAGGTCTCTGGGAGGCCAGCCTGGTGCATAGCA
AATCCCAGGAATCTAGGCCCATTTAGTGAGACAGGCCTGAGAGAAAAGAGAGAGAGCAAAGGCAGAGAGAACTTGAAAGTGTGCTGTCTCAGGC
TGAAAGCTGAGAAGTACAGCTACCCATAAAGGCAGGCCCATCAGGCTGGTCACACATTCCCAAGCTTTGTCTGCCCCAGAGACTTCAGAGGCCT
GCTGTTGCCACTTGTCCTTCATAAACTACCCTGTAGTCTAAGCCATGGGAGTCTGGCCCAGGCAAGTGATACTTGTCCACCCTATAACTGGCTT
TGCTTTGCTTTCTGGTATTTTAAGACGGTCTCGCTATGTTAAGACTAGCTGCCCCAAACCCAGAGCAATCCTCTTTGAGTGCTGGAATTAAAGG
CATGCACCACCACACCTGGCCCTTAGACTTTTTTGTTTCTGAGGCAGGATCTCACTTGAACGTTAGGTACTGGCATTACAGGCAGATGCTACTA
CACCTGGCTTCCTGGGGTTCAGTGCTGTGAGTATTATGGACACTGATGGAGAAGCTCCTGAGTCTGGGTGCCTAAGGAAGCTATTTCTCAGCTG
TTCCTAAGCTTCTGGGCTGTTGGGTGATACCATAATGGGATAAGATCCACACAGATCCTGGCTGTGGTGATATCCGTGTCTGAGGAATACTGCC
CAGTGGGGGTCAGACACAGGGACAACACAGGGGCTCAGGGTGAATTTCTAAAATCTATGTAGGCATTGGCTTTGTGCCATGATTCTCAAGACCA
GGGTTCCCATGACGTATAGCCTGAGGGTACAAGAAGGAATTAGCCTCATACCAGGTAGCTCAGCTACCTGAAAAGGACAAACTTTGGGGAAATG
TCACCGGGACAGCACCTGAGACTCAGAAAGTATGCTTTGTTCCTAGAATATTGAAAGGCCAAATGGAGAAAGGTGGGAGCCAAATCTTCTGCAA
GGAGCTTGGGCTGCCTCAGTGTAGACAGTATCCACTGTGGTGTTCAGGACAGATCTGAGTAAGGTTTCTAGAGACTGGCTTGTCTGTGGTCCCA
GCAGATCTAACCACCAAAAGCAGTATGAGGGAAGACACCTGGGTTAGACTCCCGGGACATGGGAACCAGAAGGGCACCAGGCAGTGACAGGGAC
ACGTAACAAGCTCTGGTTTTCTCCCTATCTTGATTTAGCTTCCATATTGTGATGGAGTGGTGTCACAAGGCTCAAGAGTTGAGGCCACACGTGA
TCTGGGATCCTCTGCTCTAGTCTGGAGGGCGTGATGGTTTCAAGGCTAAAAACTGGGACAGTGAGTGGTCTGCTCTGATTCCTCTCAGGAGAAG
AATGGGCAGAAGGGGCTTGAGTTCCAGGAATGACCTGAGGAGAAGGGAGGGTGAGGATTGGAAAGAGGAGGGAGAACTGGAAGCAGGGGAGGGA
GGGGCCAGGGGCCAAGTTTCACTTCCCAAAAGCAGAATCGAAAGTATCCCAGAGTTAAGTTTCAATTTCATGAAGCTTGGAGGCAGGAAGGGTG
TGGAAAGAGGGAGGAAGGGTGAATGGGGAGGGAAGGGTGCACACTGCACCTCTAAGAAGGCTGTCCAGGTTTGGAGCCACCAGCTTCACTCATA
CCAGATTCAAATGCTAGATCTGATCCCACATGATCCAATATGTCTCTGATTTGTTCTGGGCCCATTCTACCTCCAGACCCTGGCCAGCTTTCCT
ATTATTGCTGCTAGTTAGTGATCAGTGACCAGTGACCAGGGCTTCCCCAGTCTGATCCTGCTAGCCTGCCCCAACCAGCAAGTGCTTAGCTACC
TCCCTTCTGTCCCAAGGGCTCCAGTGACAGACTAGAGATTGAGGACTGCAACCTCAGGTGGACGCCTCTCCACCTGAGCATCATCCAACCAACT
GAGTATCCTCAGGCAAGATCAAAGCAAAAGATGAGAGAAATTTCCCTACTAGGGCTCCCTCTAATAAACAGAGCATATGCAGGAAAAGCCTACT
CTGTACCAAAGTATAAAAGGCAGGGGCGATGTAAAGGTCTCGTAAAGGGGTCTATACTTCATGGTGGATGCTTTGGGGGCTCTGTCCCCAGCTC
AGTAGCCCACTCTCATTCCTGGGAGTCTGTTGCTTGTCTAAACTCTATCTTTAATTCTAACCATCTGGTTCCAATCTTTTGTTCTGAGACATAG
GAGTCTAGAGTGCACTAATGCAAGAGGTGTTTTGTTTGTTTGTTTGTTTGTTTGTTTGTTTACTACTTTAAAAAATTGAATCTTATTTTTTTAT
TTTAATAAACTTTATTATTTAAAAAAGCGTGCAGATCAGGGGCTGGAAAGATGGCTCAGCAGTTAAGAGCACTGGCTGCTCTCCCAGAGGACCC
AGGTTCCATGTCCTGCACCCACATGGTGGCTCACAACTGTCTGTAATGCCAGTTTACAGGGATACCCATCCTCTTCTATCCTCTAGGGGCACTG
CATGCATGTGATACACAGACAGACAGACAGGTAGACAGACAGACAGACAGGCAAACCACTTAGACACATAAAATTAAAATCTTTTTTTTTAAAG
CTTTCAAACAAAACCACGATACATCAAACATTAACCAGACCCAAAGCCTAGACGACGTAATGAACTTACATGCAGTTAGAACTGGCATTTGAAA
TGGAAGCCGTGAAGCTCAGCATTAAATTTACACTTCCAGTACCAAACATTCTATGCATTGTTAGTTAGGGTTACCCTTGCTGTGATGAAACACC
ATCACCAAAAGCAATATGGGGAAGAGAGGGCTTATTTGACTTATACTTCCACATCATAGTGCATCACTGAAGGAAGTCAGGCGAGGCAGGAACC
TGGAGGCAGGAGCTGATGCAGAGGCCATGGAGGAGTGCTGCTTACTGGCTTGCCCCTCATGGCTTGTTCAGCCTGCTTGCTTTCTTCCTCCTCC
TCCTCCTCCTCCTCCTCCTCCTCCTCCTCCTCCTCGTCCTTTTTTTTTTGAGACAGGGTTTCTCTGTATAGCCCTGGCTGTCCTGGAACTCACT
CTGTAGACCAGGCTGGCCTCGAACTCAGAAATCTGCCTGCCTCTGCCTCCCAAGTGCTGGGATTAAAGGTGTGCACCATCACTGCCCGGCTCAA
TATGCTTTCTTAAAGGACCCACGACCGACTGCCTGCCCAGGGATGGCCCCACCTGCAATGGCCTGGGCCTTCCCCCGTCAATCAGCAAGAAAAT
GCTCTTCGGGGCTTGCCTACAGCGTGAAGAACGTAGGAAGGCATTTTCTTAATTGAGGTTTCCTCTTCATGGATGATTTAGCCTGTGTCACGTT
GACGTAAGACTATCCAGCCCACACCCTGACCCACTTTTCTTTAACTCCTTCCTCCCCTTGCCCATGATCTCTTATTTTGGAGACCTGCAGGTGC
TCAAGCTTGCTTTCCCTGACGCTGTGGCTGTTTCTCTGACCACTATGCCTAACTTTAAAGGTGTTAAAATTGCAGCGCTGGGTGTGGTGGTGCA
CGCCTTTAATCCCAGCACTTGGGAGGCAGAGGCAGGCAGATTTCTGAGTTCGAGGCCAGCCTGGCCTACAGAGTGAGTTCCAGGACAGCCAGGG
CTATACAGAGTAAACCCCTGTCTCAGAAAAAAAAAAAAAAAGATTGCAGCAAGTGCCTGGACAAGCAGAGTTTGGCCACCCAGCCGCAGAAAAG
AGCCAATGCAACCACATTGGCAAGAGAGACTAAGATCCAGTGGCCAGACCTCATTAAACTCATCCTTAGCGCCTTAACATGGGGGTAAGGTTTA
AACAGGAGACTGATAGCAAGGGTGAGGCAGTCCAGCCAAGGTGTGCCCCCCCCCCACCGCGGTCTCAGTTCTCAAGTCTACAGTGTCTCACAAG
TTATAAATCTTTCTCCAGGGGACATGTTCTTCCTCCTGTTTCCCCAGCCTTTGGCTCTTCCAGCAGGAAGTATCTGAGGAAATTCCAGTTTCTG
GGGATCCTTTATTTCAGTAATCTGCTAGCCCGAGAGAGGAACGCAGATAAATTTCTCCCAGGGAGGCAGGTTCCAAAGGACTGATTTGCCAGTC
CAGTCAAGTCTTCCCCTTGATCCTTAACTAAATTAAGTTGTCCTTGCGATCTTCTTGCTTTCCTTCTCAGTCTGGTCCACCCCCTATACACACC
TGCCCCAGTGATGAACTCTAAGGGTCCTTAGCCTGCTTCATCAGGCCTCATGGCCACAGCACCTCAGCTTCCAGAGGCCCTAGGTCCCTCTCCC
TCTCTTTCCATTCTGACAAGCCCTTTCCTGCAACACGTTTCATGTCAACTGGAGCACCCCAGGCAGCTTTGAGGCCTCAGGTGACTGGCTGACT
GGCACACAGTCCCATTAGGAAAGGCTGCCTGATTGCTGGAGGGCCTCTCGGCATACTCAGAACTCCGAGGACCACGGCTATAGCCCAGACCTCT
GGAGAAATTTAGAAGATGGAATGCTGGTCTGTGTACCGGGGCATAGCCAGTGGGGAATCCTTAGCCCAGCTGGCAGGAGTGATTGGTCTTACAG
GGCATGACCAGAATGACCAAAGTGCTATAGCTCTCCAAGGGGAAGCCAGAGTAAGACAGGCTGCCCCTGAGGTGGTGGCAGGTGGCAAGAAGCA
GAGGGCAGCTAGGAGCCCAAGTCGGGGCCACTGAGCAGGAAGTGGCTGTGGTCACGCGCATGCATACCGTACACCACTTGTTGGGGATCTGGGG
ATCTAGGTCCAGCAAAGAAAGCTTCAGGAGGAAAAACTCTTCCATGAAGTGTTACAGCTCAATAAAGCAGGCACCCTCAGTCAATCTTTGGTGA
AAATCACTCAGGCACTTTATTCCTTGTGGACTAGGACCTTATAAACATTTTGGGATGGGGTGAGTAAGTGCTTCCTATTGGCTTGGTTTGGGAT
TCTCTATCTGCATGGGGAAGGACTTCAGGTGTTGACTGTACATGCCTGATTTTCATGGTCCTCCTAGTGGGGTGTCTCAGTCACGTGCTCCAGG
ACAGGAATCTGGTTGGGAGCTAGTTTGAACTCCTGCCATTCTCAATGATGAATTTTATGGAAGTTCTGAACTTGCTACAACCTTACCAGCTCTT
CTATCTGGTGGCATGGCCCACTGCCCCCACAACTCCTCCTTTTCCTTTTTATAAAGGAGAGGTATCATTGGAGTGACTGTCTCCTGTGTTGGGG
ACAGTTTGGTATTGAACCAAAACCTGATTGGTAGTTATTTTTGCAATGCTACTAATCTGCTGCTTTAGAAATTGGATGAGACAGGGTGCCAAGA
GAAGCAAGGCTCCAAGCTCATACAGGGCCAAGGAGGAGCAGAAGCCAAGCTACCAAGGGGTTAGAGAGCCATGGGGCAGGGGTGTTGGGAGCAC
AGCATGCCCAGCGATCCCCCTGGAGCTCTTTGGGCATTTGCACATCTTGTTCTACCAGCCCAGATTCACTGACATAGAAGCAACATTCCTCTTC
TAGCAAAACACAAGTCCCTCCCTGTTCAGCAGGTAGTAAGCCCAAGGCCCTCCAGTTTTGGAGAACAACTCCTGCCAAGGAGGTTGTCTGGCAT
TGAAGGGACTCAAGCGTGTCTGCAGTGGAGGCCATTGCCTGGTCAAGTTTGGTCTGGAAGTCGATGGCCAGATGCTGTGTTTGGACCAGGGCTG
CTCTACCAGCTCCTGTCATGCCTAATGAGACAAGGAAACCCAGTGCAGCAAGCAGAGGGATGAAGATATCTCTCTCTCTCTCTCTCTCTCTCTC
TCTCTCTCTCTCTCTCTCTCTCTCTCTTCCTCCCATCTGCAAGGCAAGTTCTTCAGGTTCATAGAGATAAATCTGGGAAACAATTATTATAGGA
GTTGCAGGAGCCTTGAAAAGGGGTGGGGCGGGGGGCAGTGTTAATGCAGGAGCCTGTAGTGCTTTGCACCAGAGAAGTGCAGGGGGTTGATGTA
TGTTGATTTGGTGATGGTGTTGTAACAGGCACATATAAGATGGGGTTTTTGAGGAGGGTCCTACAAGGCAAAAGGGGGAAGAAATGCCCCACCT
TTAGGTTGAAGAGAGGAATATCCTGTGCTTTCCTTGTGGGTAAGGGTCTATGGGTTTTATGGGAACAGCTGCTAATAGCAGTCAGGAGAGAGAA
GCACAGAAAAAAGAGGAGTTTTTGGGAGGAGTTGGGGTGGGTCATTAAAGGAAGGAGGTCAGCTGTATATTGGATTTACTGTAGCCAGGAATGG
GTAGCTTGGAGTTCCTTCTGAGACTGATTTTCCCATTGAAGAATATTAACATGCATAAAGATTGATTTGGAGGTGGGAGGGGGGAGTTCACGAG
AGACATGTAAGTTGGCTATGGGGTATTTGGCATAGCCATTATGGTAGAGTTTACCCATGACTCCTCTTCGACAACATTCATCCCACAGATGGCT
GATGGAAAGCTGAAAATGAGTTTTAGGTTGGTGAGCATGGTGCCACTGTGGCTGGTTGGTTTCCACTCTGCAGCTCCAATACCTCCTGGAGACA
TTCACCTGTGTTTCAGTAAGGAAAGCAGAGGAAAGGGCTGTGTATAGTGGAGATGCCATCTGGGTGTAGGGAGATCTCAGTCCTGGTCCAACAT
GCTTCAAGTGGGCAATTCTGGGACCCTATGATTTTTGAGTGTGTATCTGTTGTAGGTCTCCCTAGAGAAGAATCTTTGATGGTAAGTGTTGGGA
AGGCTAGAGAGAGGCTGGACATTAGCGGAGTTAGTATGAAGAATGACAAAGGAGAGGTGTCCCCTTCCTCCAGGCTTGAGTAGGCTAAATAGAC
CTTAAGTGCTTGCCACAGTTGGACCTTAAAGACCCAGGTGGAATCTTCCATCTAGCCCATTTGCAATTTCTTACAGGAACAGACTGCCCGCTGA
GCTTACTTTGCAACTTAATCTAGCTGAAACAAAGGATGGGGTCTGTGGATTTTCCCTATATAAACACAGAGCTGAATATTAAATTTTGAGCCTT
GATCAGAAACTTTGTCTTGGCTTCATCCTTCTCTTGCACCCTATCCTTTATCATTTCTAGCCTCCCTTTCAAGTAGACCCAGTTCTCCATGGCT
GAAGGACAGCTACAGAGAAGGGAGGTTGTGTAAGGCACATGCCTGGGCAGCAGTCACCAGGTCATGAATGTCTTTCCAGGAGATCTTGTTCTTT
TGGGCATGGCATCTCCTCTGCCTCCTCCTCCACCTCCTCTGTCCTTGATCTGCCAGTAAGAGGCAGGCTATCTTCTTGGTTGGTGTTTGACATT
TCTGGCAGGAACCCAGATAGGAATAGGCTGATACTGTGGGAAAACACAAACGAAATCCTTCTCAGTTGTAAGGAGTCTGGTCCTTTCCAAATCC
CATCCAAAGGATCATGACATCGTACTAAGATGGGGGTGGGGGTGGGGGTAGGGGTGGTTAAATTTTGGTGTGTGCCAATGGAGGGAAATAGGAG
AATGCTTAGAGTTTTTGTAGATGTTAAATATGCTTGGTGTAGTCATAACTATTGTTAATTGTACATGGGGGTAGGTGGTTGGCTTTTGTTTTAG
AAGTTGAGCTTTTAGGATTTGATGTATTCTTTCTACTATCCCTTGGCCCTGAGGGTTGTGGGGAATCCCCGTATGGTGGGCAGTTTCCCATTGT
GTGCAGAAAGTTTTGAACTGAGAACCAGTGAAGACAGGGCCATTATTAGTTTCTTTTATCTGTTGAGGAATGCCCTCTGAAGCTAAGTTCACCA
AGAGCTGACAAAAAAAGGCTCTGTCAAAATCAAAGACACCCCAAATTTTCCTCTATCACCCCATCCTATCAGTTCTGATCAAGAAGTAGGGTCG
CCCTGGAGGAGAGCTCCAAGATGAAGTTTCTGACAGCTTTATTTTACCAAAGTCCAGTCTCCCAACCCAACCTCCATCCCAGAGAACAGGGTGT
TAAAGAAGGGACTTCCTTGACATTCCTTGGCACTTCTGAAGGACTGCCCCTCTTGTGAACCCTGTCCTCTAACCCCAAGTCTCTGAAGACTGTT
GATGAAAAGGGAACGCTGTTGTGCGGATAGATGTGGTGTAGGAAAACAGCTATGGAGACTCCAACTCCTGGGCAGGTTTGCCCGGATGTCTAAG
TAGGGAGGACAGAGGCTCCAGTGGGGGCCAGGAGTTCCAGCCAGAACTCAGCACCTGACTGTGAGGTGGGGCCTGACCCCTCTATGTGGACCAG
AAGTTCTCCCTGGGGTACCTTCCAACCTCCCAGCCTCTGGCCAGCTGTGCTATTTCCAGCCCCCAGCCTCCACCCTCAGAGGGGAGTGGTCTGG
GAATGTCACGGAGATGACATATACACTTCATCCCAGGCCTGGACAGAGGCCAGAGAGCCCTAAGAGGCTCTATTAGAGCCCCTGCTCCCTTCAC
TTCCGAAGGTCCCCATAGTCCTCTCCCTCCTCTAAACTTCAGGAAATCGAAACTCAAATTCTCCGCCTCTCCACCTCTTCCCAAAAGTCAGGAA
ACTGAAAGCTAGCTCCCGACCACCTCTGCCAATTTACTTTCTCTTCTCTCTCCCAGGTATCTTACAGCCTGTCTGAAGCCTGTGGTGCCCTGCC
CATGGTGAGTCCTAAGTAGGACCCAGAATCTAAGCAGGAAAGTGGAATGGGAGTTCTGCCCAGTGAAAGCTCCCTTTGAAGTAGCTCTGGCTCC
CCAAACACACAAGTCAGACTAAATCTTCCCTGGAGCCCTCAATGCCCGTATTACCCCCAAGCGCCCCTGGAAACTCCTATGGGTTGGACGGGAA
GGGTCGGGCATCCTCCTCTCGCCCCCAGGGAGGGACAGTGTTGTTAGTGAGTGTAATAGCTCTCAGCGTGTGCTTGCTATGGGGAGATTCCATT
GACTTGAAAGTTGAAATGCGCTCTTACTGCTTTGACAGCTTCTGCCACTAGGGGCGCGTGTGGCCAAGCCTGGAGCCCGGGTTTGAAAGCACCA
CCCTCCTGGGATAGGGTTAGTCAGCTTCTTCCGGCAAGCTGTGCCTGCCGGTGAATTAAAGGGGCAAGGGTGGCCACGGTGGCACATCCAGCTC
CCGTGCTAACCATCAGCTTAAAGTCATTAGATGAAAATGAGAACACAGCCACATGCCACAATTGAGTGTCCCCTGCCCTAGAGCAAACTCCCTT
CAGCCCTCACCCATAGGGCCTTTCCATCTGCTGGGCAGATGACTAAGGATCTTGGTCTAATAATTCCATCTTCCATTGATGAGTCTGCGGTTCC
ATCTTATGGCTTGAGTGTTGGAACATCTCTCGTGGAGGAGAAATGCACGGGCGCTAGGCTATGTTCCTTCCTCACAGCTGCCTTCCAGGGTGTC
GGGGTACCAGGCTCCTGGGACCCCAACACATCACTCAGGGGAGGTGAAATGCACTCTAAAATAGGGGTCCCAACCCATGTTTCTCCAGGTGAGA
AATGGCAGGGGCTAGGACAGTGGCTGTGGTTCTCAAACTCCTGGGCACCCAGATGCCGCCGAGAACGGCATTGAGAATGGGGTTCCCATACTTC
TCTGTATCCCAAGGCCGCTGAGGACTGCAAGCAGTTGGGAGAACAAGGGCCGAGGGCCTGTGATGAGGGCGTGTGGGGGCTCCAACTTAACTCA
GGTGAGTGCCAGGAGTGTGCAGGGGCCTTCTACCCGAGACTTAGGTGCAGCTCTGTATGATGAAGGCTTCCCCCCATAGTGGTCCTTGATGAAG
GAGACAGCCCTTGCTTGTCCAAACTGTTTATTCATGGCACATGAAGACTCATGTGATTTACTCAGGGTGAACCAGAGATTAAATACCTTTTGCA
GAAAGGGACGCTTAGGAAGAATGCTCATTGGCTAAACAC
MOUSE SEQUENCE—mRNA
CTTCACCCGGAGTAGGCTTCTTTGGCTTGCGAACCTTCAGCACATGTCTGCCACTTCCAACATGAGAGTCTTCCTGCCTGTGCTGTTGGCAGCC
CTTCTGGGCATGGAGCAAGTTCATTCCCTGATGTGCTTCTCATGTACCGATCAGAAGAACAATATAAACTGCCTGTGGCCAGTTTCATGCCAGG
AGAAAGACCATTACTGTATCACGTTATCTGCCGCTGCGGGCTTTGGGAATGTCAACCTTGGCTACACCCTGAACAAGGGCTGCTCCCCGATCTG
CCCCAGTGAAAATGTCAATCTCAATCTCGGTGTGGCGTCCGTGAACAGCTACTGCTGCCAAAGCTCCTTCTGCAACTTCAGCGCAGCTGGCCTC
GGACTTCGTGCCAGTATCCCACTACTGGGCCTTGGACTCCTGCTTAGCTTGTTGGCTCTGCTGCAGCTGAGCCCCTGACCATCCCCCATGTGTT
CTCCATATCCCCCCAGCTCAGGAAAAGCCCAGCTCCTTTTAGGTCCCAGGGGACCCTAGGAACCTTCAGCTCCTCCTGGGTGTGTCTAGTTCCC
CCTCCACACTCTCTCAACGTCAGGGCTAAGTACCAAACTCACCCATACCTGCTCTGTTGAAGTGGTACTGGCTACCCTTGCTTCCAGAGCCAAT
CCTATAACCTCCCTTGGGGAACCAGCGAAGGGGTGAAGATCTCCTTGGAGTCTCAAGAGTACCAGAGTCAGCGCCGAATCTTGTGGACACACTG
ACAAGGATGTCTAATCCAAATAGATGTATATCTGTGTGCTCAGTGTATCCCTGTGTGAATGAAGCCACTTGGATTCTGGGGTGGGCAAAGAAGA
CCTGAAAAGATTCTACAGCAGAAGGCCTGTGTCGCCACCAAAACCCCTCCCCCTGGTATCATTGTACCCACCTTGTACTCTGTTCAGGAGGCTG
CCCATGGAGGACTGCCACCCCTCCAGATGAAGGCTCCCACTACCCGATGCAGTTGAGTCCCATCCTGCCCTCTCTGCCCACACTGGCTTCCTGC
TGCTATTCTAGTGCCTCAAATAAACCGTTCACACCCTT
MOUSE SEQUENCE—CODING
ATGTCTGCCACTTCCAACATGAGAGTCTTCCTGCCTGTGCTGTTGGCAGCCCTTCTGGGCATGGAGCAAGTTCATTCCCTGATGTGCTTCTCAT
GTACCGATCAGAAGAACAATATAAACTGCCTGTGGCCAGTTTCATGCCAGGAGAAAGACCATTACTGTATCACGTTATCTGCCGCTGCGGGCTT
TGGGAATGTCAACCTTGGCTACACCCTGAACAAGGGCTGCTCCCCGATCTGCCCCAGTGAAAATGTCAATCTCAATCTCGGTGTGGCGTCCGTG
AACAGCTACTGCTGCCAAAGCTCCTTCTGCAACTTCAGCGCAGCTGGCCTCGGACTTCGTGCCAGTATCCCACTACTGGGCCTTGGACTCCTGC
TTAGCTTGTTGGCTCTGCTGCAGCTGAGCCCCTGA
HUMAN SEQUENCE—GENOMIC
NNNNNNNNNNNNNNNNNNNNNNNNNNNNNNNNNNNNNNNNNNNNNNNNNNNNNNNNNNNNNNNNNNNNNNNNNNNNNNNNNNNNNNNNNNNNNN
NNNNNNNNNNNNNNNNNNNNNNNNNNNNNNNNNNNNNNNNNNNNNNNNNNNNNNNNNNNNNNNNNNNNNNNNNNNNNNNNNNNNNNNNNNNNNN
NNNNNNNNNNNNNNNNNNNNNNNNNNNNNNNNNNNNNNNNNNNNNNNNNNNNNNNNNNNNNNNNNNNNNNNNNNNNNNNNNNNNNNNNNNNNNN
NNNNNNNNNNNNNNNNNNNNNNNNNNNNNNNNNNNNNNNNNNNNNNNNNNNNNNNNNNNNNNNNNNNNNNNNNNNNNNNNNNNNNNNNNNNNNN
NNNNNNNNNNNNNNNNNNNNNNNNNNNNNNNNNNNNNNNNNNNNNNNNNNNNNNNNNNNNNNNNNNNNNNNNNNNNNNNNNNNNNNNNNNNNNN
NNNNNNNNNNNNNNNNNNNNNNNNNNNNNNNNNNNNNNNNNNNNNNNNNNNNNNNNNNNNNNNNNNNNNNNNNNNNNNNNNNNNNNNNNNNNNN
NNNNNNNNNNNNNNNNNNNNNNNNNNNNNNNNNNNNNNNNNNNNNNNNNNNNNNNNNNNNNNNNNNNNNNNNNNNNNNNNNNNNNNNNNNNNNN
NNNNNNNNNNNNNNNNNNNNNNNNNNNNNNNNNNNNNNNNNNNNNNNNNNNNNNNNNNNNNNNNNNNNNNNNNNNNNNNNNNNNNNNNNNNNNN
NNNNNNNNNNNNNNNNNNNNNNNNNNNNNNNNNNNNNNNNNNNNNNNNNNNNNNNNNNNNNNNNNNNNNNNNNNNNNNNNNNNNNNNNNNNNNN
NNNNNNNNNNNNNNNNNNNNNNNNNNNNNNNNNNNNNNNNNNNNNNNNNNNNNNNNNNNNNNNNNNNNNNNNNNNNNNNNNNNNNNNNNNNNNN
NNNNNNNNNNNNNNNNNNNNNNNNNNNNNNNNNNNNNNNNNNNNNNNNNNNNNNNNNNNNNNNNNNNNNNNNNNNNNNNNNNNNNNNNNNNNNN
NNNNNNNNNNNNNNNNNNNNNNNNNNNNNNNNNNNNNNNNNNNNNNNNNNNNNNNNNNNNNNNNNNNNNNNNNNNNNNNNNNNNNNNNNNNNNN
NNNNNNNNNNNNNNNNNNNNNNNNNNNNNNNNNNNNNNNNNNNNNNNNNNNNNNNNNNNNNNNNNNNNNNNNNNNNNNNNNNNNNNNNNNNNNN
NNNNNNNNNNNNNNNNNNNNNNNNNNNNNNNNNNNNNNNNNNNNNNNNNNNNNNNNNNNNNNNNNNNNNNNNNNNNNNNNNNNNNNNNNNNNNN
NNNNNNNNNNNNNNNNNNNNNNNNNNNNNNNNNNNNNNNNNNNNNNNNNNNNNNNNNNNNNNNNNNNNNNNNNNNNNNNNNNNNNNNNNNNNNN
NNNNNNNNNNNNNNNNNNNNNNNNNNNNNNNNNNNNNNNNNNNNNNNNNNNNNNNNNNNNNNNNNNNNNNNNNNNNNNNNNNNNNNNNNNNNNN
NNNNNNNNNNNNNNNNNNNNNNNNNNNNNNNNNNNNNNNNNNNNNNNNNNNNNNNNNNNNNNNNNNNNNNNNNNNNNNNNNNNNNNNNNNNNNN
NNNNNNNNNNNNNNNNNNNNNNNNNNNNNNNNNNNNNNNNNNNNNNNNNNNNNNNNNNNNNNNNNNNNNNNNNNNNNNNNNNNNNNNNNNNNNN
NNNNNNNNNNNNNNNNNNNNNNNNNNNNNNNNNNNNNNNNNNNNNNNNNNNNNNNNNNNNNNNNNNNNNNNNNNNNNNNNNNNNNNNNNNNNNN
NNNNNNNNNNNNNNNNNNNNNNNNNNNNNNNNNNNNNNNNNNNNNNNNNNNNNNNNNNNNNNNNNNNNNNNNNNNNNNNNNNNNNNNNNNNNNN
NNNNNNNNNNNNNNNNNNNNNNNNNNNNNNNNNNNNNNNNNNNNNNNNNNNNNNNNNNNNNNNNNNNNNNNNNNNNNNNNNNNNNNNNNNNNNN
NNNNNNNNNNNNNNNNNNNTGGCAAAACCCCCATCTCTACAAAAATACAGAAATTAGCCAGGCGTGGTGGTAGTGCATGCCTGTAATCCCAGCT
ACTCAGGAGGCTGAGGCAGGAGAATCGCTTGAACCCGGGAGGCAGAGGTTGCGGTGAGTTGAGATTGCGCCACTGCACTCCAGCCTAGATAACA
GAGTGGGGCTCCATCTCAAAAAAAACACACACACACACACACAAATCAACTGTTCCTCTGGCCCCCACTTTCACCTGCAACCTGGAGAGCAGTG
GACACTGATCACAGCCTCACAAGAATATGACCCTCCCTTTTTTCCTTTCCTCCTTCCCCTGCGGCCACTTCTTTCTTTAACTATTGAAGCCCCA
AAACCCTCTTTGGAAAAGGAGTGGGCTGCACACCCTACTGTGTTTTCTGCCTCTTTTTCCCGGGCATGGCTTCAACCTTGGCAAAGTGAACCTC
TGAACTGGTTGAGACCTGTCTCAGTCACTCTGTGGGAGGGGCCTCCCCTGAGGTTGGGGAAGATGTCCCAAGAGGAGGGACAAGCAGCAACTCA
GGGAGGCCTGGAGCCAACTTCGGTTTCAGGGTTGAGCCAGGGTCAAGGTGGCAGTGGAAGTTACAGGAAGAGCCTAAGGCCCCAGTGGTGGGAG
CAGATGCTGAAATCCCCGGGAGCACTTTGGACTGTGCCCTGGGAGAGGCGGGAACCAAGCCTGAGAGCAGAGTACTGGCAGCTGCACGTTAGAA
TGTGAAGCCTGGACACAGGGAGGTCAGGCAGCGAGCTCACCTCACGGCAGCCCAGCCAGAGAGTCAGCCTGCTCTCCCCGCACTGAGCCAAGGC
TGGGAGACAGCCTACCTCCCACCAGAGCCAGCAGGCAGGTCCCAGCCCAGCCTGCCCCGTCCCGCCCCAGCCTGCCCTGTCCTGCCATCTGCAC
TCCCCGTCAGGCCTCCTGGCCAGCCCCACAGTCCCTGCCTTCCAAGAGACACAGGCAGCGGCAGCAGGGGCTGGATGGGGGAGGCCAAGAATCA
GAGGCGCTCCCCCACAGGACCCCTGAATCGTGGCCAGAGAAAGGTCAGGGCAGGATGAGGCCTGTGGCCACGGGCAGATCTCAGGTGGCTGACC
CGTCCTAGGAGCACACAGGGCAGCTGTGGCTCCTTCCCTCTTGAACCCAGAAAACAGGGCAGAGCTCATCGGTGGCCTCATCTGCCAGCCCCAG
CAGTAAGGCCACCGGCTCATTCTTCATGGGGCAGCAGCATCTGGCTTTCTGGCTCCAGACACCGCCTGCTGGGCCAGGCCTTCAACCAGGTCCC
TCCTGACAGCAGGCACGCCTGAGTCCAGACCCGAGACAGAGCCGGGAGGCAGCCTGCAGCAAACGTGCCCCAAACTCCACAGGCGCCTAACCCA
GTCCTGCCAAGGGAAAGTGCTCAAGGCTCTGCCCTCTCGCTGGAGGCCCACTGCTCACTCTCACCCGTGGGACTTCTCCCCACAGCCCCCAGCA
GCCTCCTCCCGTCATCTGAGACGCTACCAGGACAAAAGTCTTCCACAACTAGGGCCAAAGGCCTCTTAGTCATGGAAGTCTCCCTGAACCTATT
CTGGTTCGGAGGTTGCCTGGTTTAAAATTTTAAAAATTAAAAAAACAAAAGCCTCCGCATGACAGCAGGCCCGTCCCAGTCTTATGATCTCTCT
GCTCTGGTGTGGGAGGAGGAGGGAGTGCCGTGTGAGGAGGAGGGAGTGCCGTGTGAGGAGGAGGAGGGAGTCCTGTGTGAGGAGGAGGGAGTGC
CGTGTGAGGAGGAGGGAGTCCCGTGTGAGGAGGAGGGAGTCCCGTGTGAGGAGGAGGGAGTGCTGTGTGAGGAGGAGGAGGGAGTCCTGTGTGA
GGAGGAGGGAGTCCCATGTGAGGAGGAGGGAGTCCTGTGTGAGGAGGAAGGAGTCCCGTGTGAGGAGGAGGAGGGAGTCCTGTGTGAGGAGGAG
GGAGTGCTGTGTGAGGAGGAGGGAGTCCTGTGTGAGGAGGAAGGAGTCCCATGTGAGGAGGAGGAGGGAGTCCTGTGTGAGGAGGAGGGAGTGC
CGTGTGAGGAGGAGGAGGGAGTCCTGTGTGAGGGGGAGGGAGTCCTGTGTGAGGGGGGAGGGAGTCCTGTGTGAGGAGGAGGAGGGAGTGCTGT
GTGAGAAGGAGTGCTGCTACGTAAGAAGGAGGTAGATGTGTGGGGGGAGAGTTGGCATTCGGCCCGGTCAGGACTCCATGGCCCTTGTTACAGT
TGTGGGTAGAAATGGAATCTCTGTGACATCTCCTGCTCCCCTTTCGCCTGCCCCAAGGCAGGTCTCCAGTACTCCCTCTCCTTTCTGATCATGG
GCCCAAAGAGGCTCATTCAGAGAGGATCAGTCCCATGCCCTGGGGGCAGGAATGCTGAGCACATAGAGGTTTACCTGGAGGGGCCACGTGGGCG
GCATGGAAGCTCCCCACCCCTTCCGGGAGACGGCGCCCTGTGCCTCTCGCGTGTATCCATTTATAATTAACTGCAAATGTGTTTCCCTGAGTTC
CCTGAGCCACTCTTGCAAATCAATTGAACGCAAAACCGGGAGGGGCTGCAGTATTGCTGGGAAAGAGGGTCCTGATCCACACCCCAAGAGCAGG
TTCTTCGATGTTGTGCAGGAAGTAATTTGGGGTGAGCCACAGAGCACAGTGAGAGAAGCAGGTTTATTTGAAATGGCTCCGTTCCAGAGTGGGG
CGTGCTCAGAAAGCAGGAGGAGGAGGGCCTGTCCTCTGTTAGTGCCTCTGCTTACAAGAAACTGTAAGGAGCTACAATTACACCTGGAATGGGC
AGATGCACCCACTAAGGATAGGGGCTGTGGGTGCCATCAGTGCCCGTTCATCCTCCAACCTCAGGCTGCTCATTGAAATTATCTCTGAGTAAAG
TGGCCTGCACTCTTGGGTTATCTGGACAGTCTGCGGGCTTGCTGGGAGATGCCCCATATGGCCACAAATATTCTGTAATTATAATTGGTGTCCA
GCTTGAGACATGGCTATTTTTAGACCATAAGCATTAACCTTATAGGTGCCTTGTGAGTGCCTCCTACTCACTTCAAGATGGAGTCACTCTGGTC
ATGTTTCATTAAACCAGAGGCCTGGTGAGCAAGCGTTCCTCTAACAGTGGGAACCTCAACGTCGGGCCAGTCGGTAAGAAGTTCCAGAGGCTGG
CCCTCGCAGCTCATGTGTGTGCATATGTGTGTGTGTGTGTGTGTGTGTGTGTGTAGGTGTCTGGATCTGACGCTATCTGCAGGTACCGGAATGG
TGTTGGAGGACACTCGGCTGGTGTCCGCTGCAGAACTGATGGCTTGCTCGGTGGCGGGGAGANNNNNNNNNNNNNNNNNNNNNNNNNNNNNNNN
NNNNNNNNNNNNNNNNNNNNNNNNNNNNNNNNNNNNNNNNNNNNNNNNNNNNNNNNNNNNNNNNNNNNNNNNNNNNNNNNNNNNNNNNNNNNNN
NNNNNNNNNNNNNNNNNNNNNNNNNNNNNNNNNNNNNNNNNNNNNNNNNNNNNNNNNNNNNNNNNNNNNNNNNNNNNNNNNNNNNNNNNNNNNN
NNNNNNNNNNNNNNNNNNNNNNNNNNNNNNNNNNNNNNNNNNNNNNNNNNNNNNNNNNNNNNNNNNNNNNNNNNNNNNNNNNNNNNNNNNNNNN
NNNNNNNNNNNNNNNNNNNNNNNNNNNNNNNNNNNNNNNNNNNNNNNNNNNNNNNNNNNNNNNNNNNNNNNNNNNNNNNNNNNNNNNNNNNNNN
NNNNNNNNNNNNNNNNNNNNNNNNNNNNNNNNNNNNNNNNNNNNNNNNNNNNNNNNNNNNNNNNNNNNNNNNNNNNNNNNNNNNNNNNNNNNNN
NNNNNNNNNNNNNNNNNNNNNNNNNNNNNNNNNNNNNNNNNNNNNNNNNNNNNNNNNNNNNNNNNNNNNNNNNNNNNNNNNNNNNNNNNNNNNN
NNNNNNNNNNNNNNNNNNNNNNNNNNNNNNNNNNNNNNNNNNNNNNNNNNNNNNNNNNNNNNNNNNNNNNNNNNNNNNNNNNNNNNNNNNNNNN
NNNNNNNNNNNNNNNNNNNNNNNNNNNNNNNNNNNNNNNNNNNNNNNNNNNNNNNNNNNNNNNNNNNNNNNNNNNNNNNNNNNNNNNNNNNNNN
NNNNNNNNNNNNNNNNNNNNNNNNNNNNNNNNNNNNNNNNNNNNNNNNNNNNNNNNNNNNNNNNNNNNNNNNNNNNNNNNNNNNNNNNNNNNNN
NNNNNNNNNNNNNNNNNNNNNNNNNNNNNNNNNNNNNNNNNNNNNNNNNNNNNNNNNNNNNNNNNNNNNNNNNNNNNNNNNNNNNNNNNNNNNN
NNNNNNNNNNNNNNNNNNNNNNNNNNNNNNNNNNNNNNNNNNNNNNNNNNNNNNNNNNNNNNNNNNNNNNNNNNNNNNNNNNNNNNNNNNNNNN
NNNNNNNNNNNNNNNNNNNNNNNNNNNNNNNNNNNNNNNNNNNNNNNNNNNNNNNNNNNNNNNNNNNNNNNNNNNNNNNNNNNNNNNNNNNNNN
NNNNNNNNNNNNNNNNNNNNNNNNNNNNNNNNNNNNNNNNNNNNNNNNNNNNNNNNNNNNNNNNNNNNNNNNNNNNNNNNNNNNNNNNNNNNNN
NNNNNNNNNNNNNNNNNNNNNNNNNNNNNNNNNNNNNNNNNNNNNNNNNNNNNNNNNNNNNNNNNNNNNNNNNNNNNNNNNNNNNNNNNNNNNN
NNNNNNNNNNNNNNNNNNNNNNNNNNNNNNNNNNNNNNNNNNNNNNNNNNNNNNNNNNNNNNNNNNNNNNNNNNNNNNNNNNNNNNNNNNNNNN
NNNNNNNNNNNNNNNNNNNNNNNNNNNNNNNNNNNNNNNNNNNNNNNNNNNNNNNNNNNNNNNNNNNNNNNNNNNNNNNNNNNNNNNNNNNNNN
NNNNNNNNNNNNNNNNNNNNNNNNNNNNNNNNNNNNNNNNNNNNNNNNNNNNNNNNNNNNNNNNNNNNNNNNNNNNNNNNNNNNNNNNNNNNNN
NNNNNNNNNNNNNNNNNNNNNNNNNNNNNNNNNNNNNNNNNNNNNNNNNNNNNNNNNNNNNNNNNNNNNNNNNNNNNNNNNNNNNNNNNNNNNN
NNNNNNNNNNNNNNNNNNNNNNNNNNNNNNNNNNNNNNNNNNNNNNNNNNNNNNNNNNNNNNNNNNNNNNNNNNNNNNNNNNNNNNNNNNNNNN
NNNNNNNNNNNNNNNNNNNNNNNNNNNNNNNNNNNNNNNNNNNNNNNNNNNNNNNNNNNNNNNNNNNNNNNNNNNNNNNNNNNNNNNNNNNNNN
NNNNNNNNNNNNNNNNNNNNNNNNNNNNNNNNNNNNNNNNNNNNNNNNNNNNNNNNNNNNNNNNNNNNNNNNNNNNNNNNNNNNNNNNNNNNNN
NNNNNNNNNNNNNNNNNNNNNNNNNNNNNNNNNNNNNNNNNNNNNNNNNNNNNNNNNNNNNNNNNNNNNNNNNNNNNNNNNNNNNNNNNNNNNN
NNNNNNNNNNNNNNNNNNNNNNNNNNNNNNNNNNNNNNNNNNNNNNNNNNNNNNNNNNNNNNNNNNNNNNNNNNNNNNNNNNNNNNNNNNNNNN
NNNNNNNNNNNNNNNNNNNNNNNNNNNNNNNNNNNNNNNNNNNNNNNNNNNNNNNNNNNNNNNNNNNNNNNNNNNNNNNNNNNNNNNNNNNNNN
NNNNNNNNNNNNNNNNNNNNNNNNNNNNNNNNNNNNNNNNNNNNNNNNNNNNNNNNNNNNNNNNNNNNNNNNNNNNNNNNNNNNNNNNNNNNNN
NNNNNNNNNNNNNNNNNNNNNNNNNNNNNNNNNNNNNNNNNNNNNNNNNNNNNNNNNNNNNNNNNNNNNNNNNNNNNNNNNNNNNNNNNNNNNN
NNNNNNNNNNNNNNNNNNNNNNNNNNNNNNNNNNNNNNNNNNNNNNNNNNNNNNNNNNNNNNNNNNNNNNNNGGGGAGGGGCAGGAGAGGGGCT
GGGGCTGCCGGTGGGTTGGTCCCCAGAGAGCTGAGCTTCTCCTCCCATCCCCCGCAGGCCTCCCCGAATGTTTCCAAAGATCTGGGGCGGGACC
GGGCGGAGACTGCCGCCAGGAGCCTCCCGGCCGCCCCAGGGCTGCGCAGCCACTGGAGCCCATCACCCAACTCCAGACGCTCCTGGCTCCTCTA
CGTGGGCCGGGAGGGACAGCCTTGAGGACTAGGGGAGGGGGCACGGGACCTTGCAGAGCTCCTGGCCGGAAAGGGAGGATTGACCGCCCCCGGC
ATATCACCCCGGAGCACTGGAACCCCCCCCCGCTTCTTGTTTTGGCACTGGTGGTGCTTGCGGTGAGGTCCAAGGAGCCCAGCCTCCCTGAGTG
GACCGCCGGGCCCCTCCCCGTTCCGGGACACAGGAGAGCTCCCGCCCCTTGCTGGCTGGGCAGCCCCTAGATACCTGGCTCCCAGGGGCCAGCT
TCCCTGAGCCTGGGGATGAGCCATGAGCCTGCAGCCTGGCCCCAGGGCGGCCCCCCACGGCCTGCCGGCTGGCTCCCTCCGGCTCCATGGCCCA
CCCGGCCTTCCTAATTGCCTTCGGCTCCCACCGGTGCCTTAGCTCAGCCTGGTGGCCCAGCGGGTTGGGTGCCACCCAGTGAGCAGGTGGCGGC
ACCAGCTGGACCTGTTTGTGGCCCTGTATGCTAGGACTTCCTCAGAGACAGCTCAGGGACCCCCCCCACCTACCAGAACCTCACTTAGGGGGTG
GGGGGAAAAGGAATTGGAGATCCTTCCTCCTCGGGCTACTCCCTGGAGGCGGGGATAGGCCCCAGCCGGACTTGGCACTGTTTTTGGCCACCTG
GGGCTCCCACTCCCAACCCCAGGATGTCAGCCCAGGTCTCACTGTCCTGGCCTGCTGCTCTCCCCTTAGGGCCTCTGCGGGCCCCTCTCCAGAT
CTGTTCTCTGAGGCATCCTCCTTACCCCCAGTGCCCAGCACTAGCTCCCCAGGCCCGGGATGTCCCTCCCACTCCTCTGCCCACGGCTGTCCCT
GACAGAAGGCAGCAGCCTCCCCCTCCAACACCATGCACTCACAAAACAGAGAATCACGACCCCAGCTGGGTGTGTTCCAGATTCTTTCTCCAGC
AGTGCAGAGGGTCCTGTGCAGAGGCCGAGGAGCAGTACAGCGACCCATCTGGCCCTTTCCTGCTGGTGGGACCAGTGGCACGCAGCCTTGTCTC
TCGGAGCCCATTTCCCAGCCACAGAATGGGGAGTAGCAGATACTGAGTGGGGTGCTTTCCTCGGAACTGAGTAACATCAGGAATGGGGAGTGCT
TTCCCCCTCAGCCATCCCCCACCTGGCCCCAGGTCTCCATGTGAGGGGAGCTGCCTGGGCTCAAAACACTGAGCCATCCCAAGGAAAATTCTAG
ATACAGATTAGCTAATATACACTGACAGATACACATATAGATGTGTATATAGATTTCTCTTTTTTTTGAGACAGGGTCTCACTCTGTTGCCCAG
GCTGCAGTGCAGTGGCATGATCATACTTCACTTCAGTCTTGAACTCCCTGGCTCAAGAGATCCTCCCACCTCAGCCTCCCAAGTAGCTGACCAC
AGGCACGTACCACGCCCGGCTAATTTTTGTATTTTTTGTAGAAACAGGAGGTCTCACTGTGTTGCCCAGGGTGGTCTCAAACCCCTGGCCTCAT
ATGATCCTCCTGCCTTGGCCTCACATAGCATGGAGATTACAGGCGTGAGCCCCTGTACCCAGCCCCAGACTAGCTAATATTATGACTGATCACC
ATTCCCCATTCCCCATTCCCCCACCCCAGGACCACTGGCAGAGGCCACTCACTCTGCCTTCTTTTCTGTGGTTCTGAGAAGGCTGCTGAGTTTC
CTCCTCTTGCCTGTGCAGCCCCCTCCTGCCAGGTTTCAGGAGGGAGATAGCCTAGAGCATGTCTGCACTGAGTGAGGAGTGGGTCAGGAGAGAA
GCAGGGAAGTCCTTGTGTGCTGGCAGGTCCCTTCCCCTCTGCTGTCTGTGTCCTCATCTGCAAAGTGGGGGTGCATGGTCTTGGGGAGGAGTGA
GGCACCACCCGGCCCCCTAACCAGTGTGTCTCTCCAGAGCAGGACAGGCTGCTTTGGTTTGTGACCTCCAGGCAGGACGGCCATCCTCTCCAGA
ATGAAGATCTTCTTGCCAGTGCTGCTGGCTGCCCTTCTGGGTGTGGAGCGAGGTGAGGTGCCCTTGGGGACCCCAGACCTTTGTCCAGCTGTGC
CCTGCTCCACTCCCTCTCCACCCCTCTCCCCTGAGCAGACGCTCCAGGGGTCCTTCCAGGCCGCTCCCAGCAGAGGGCTCACCCGGCCTGGCCA
CACTGTCTCACTGTGTGTTTGAGTGTCGCTTGACCTGCTCGACGGCCAGGGTGGGGTGTCACTGTCTTTGCTCTGCCTTCAGCCCAGGGCCTGG
TATACAGTAATTTCTCAGTAAATGTCCACTGGGGTCAGGCCTGGGAGGGACACTGGAGGCTTCCCTGAGACAGGTGTGTCCTCCTTCCGCAGCC
AGCTCGCTGATGTGCTTCTCCTGCTTGAACCAGAAGAGCAATCTGTACTGCCTGAAGCCGACCATCTGCTCCGACCAGGACAACTACTGCGTGA
CTGTGTCTGCTAGTGCCGGCATTGGTGAGTGCCAGGCCTCAGACCGTGCCTTCCTCCCCTGGCCATCTCCCTAGCCCGGGCCGGGGCTCAGCAG
AGGCCATTGCTGTCTGTCTGCAGCCGTCTGTCTCTCCCCTGACAGCCTCATTTCCCATGCAGGGAATCTCGTGACATTTGGCCACAGCCTGAGC
AAGACCTGTTCCCCGGCCTGCCCCATCCCAGAAGGCGTCAATGTTGGTGTGGCTTCCATGGGCATCAGCTGCTGCCAGAGCTTTCTGTGCAATT
TCAGTGCGGCCGATGGCGGGCTGCGGGCAAGCGTCACCCTGCTGGGTGCCGGGCTGCTGCTGAGCCTGCTGCCGGCCCTGCTGCGGTTTGGCCC
CTGACCGCCCAGACCCTGTCCCCCGATCCCCCAGCTCAGGAAGGAAAGCCCAGCCCTTTCTGGATCCCACAGTCTATGGGAGCCCCTGACTCCT
CACGTGCCTGATCTGTGCCCTTGGTCCCAGGTCAGGCCCACCCCCTGCACCTCCACCTGCCCCAGCCCCTGCCTCTCCCCCAAGTGGGGCCAGC
TGCCCTCACTTCTGGGGTGGATGATGTGACCTTCCTTGGGGGACTGCGGAAGGGACGAGGGTTCCCTGGAGTCTTACGGTCCAACATCAGGACC
AAGTCCCATGGACATGCTGACAGGGTCCCCAGGGAGACCGTGTCAGTAGGGATGTGTGCCTGGCTGTGTACGTGGGTGTGCAGTGCACGTGAGA
GCACGTGGCGGCTTCTGGGGGCCATGTTTGGGGAGGGAGGTGTGCCAGCAGCCTGGAGAGCCTCAGTCCCTGTAGCCCCCTGCCCTGGCACAGC
TGCATGCACTTCAAGGGCAGCCTTTGGGGGTTGGGGTTTCTGCCACTTCCGGGTCTAGGCCCTGCCCCAAATCCAGCCAGTCCTGCCCCAGCCC
ACCCCCACATTGGAGCCCTCCTGCTGCTTTGGTGCCTCAAATAAATACAGATGTCCCCCAGCTTCCTGCTCTGAGTGTGGCTGCCCCTTGCGGG
GAGAGGCAGAGCACCCCAGGTTTGGAGGGTCCTGGGGTCTTCTGTGGTATGGCCCAGGGGGGTGGTGGGGGAGGAGGAGTCATCCCCCTGAGCC
ACAGCCAGCTGCTTGCCTGACCTCAGAGGGAGCCCCTCCCCAGTGCTCTGCCCTTTCTTCTGCCCCAGGTTCAGCAGGTCAAGTGAGTTCCTCC
TCCACACAGCGGAAGGAGGATGTTGGGGGGCATGGAGGAAAGAAAGCGGGTGCAAGAAGGAGCACGCTCAGGCTGGGGCAGCACCCAGGGCCGT
AGGACTTGGGAATGGAGGGTGTCTGTCTGGACCCGCTGGTGCAGAGGGCACAAAAGCTGGGCTGGGGCAGGACAGACGGGCCGGAGTGTAGTGA
GTGGCCTGTGGGAGGGGCAGGGGGCTCCCACGCAGAAGCTCTGGGCAGCAGCCCTGACCCATCCGTGCCTGGACTGCAGCGCTGCCCGCTTCCC
CCTGGCAAACAGGTGGCAGCCTCCTGACAGAGGAAGCCGGCCCAGGCCGCCGTGTCTGCAGTTGGGTGCTGTGCGCTGCCCAGAGGGCTCTTTG
GGCTGGAGAGAGAAAACAAGAACAGACACCCAGTGGAGGTGTGTTTGTTCATTTCTCCGGGACAGTGGGAGGGAGCCGGCCAGGGTCTCAGCCA
CTTAGGGCCCGACCCTGAATTTTCCCGGCTGGCCAGAAACTGTGGTGTGTGTGTGTCAGGATCCCAGGGGCACCGTCCAGCAGGAGGGGCCGGT
GGTCAACGTGGAGGCCCGAGATTCCCACCCCTGGCAGCTGATGTGAATAGCCGGGTCCTCCCAGGTCCCTGAGGTCAAGGCAGGTCAAAGACCT
GTGTCCTCCTCCTGGGTCCCTGAGCTAGTGATTCCTGTCTGAAACACATGAATCATTACTGCCACCCATGAGGGGCCCATTGTAACCGAGCGAG
AGGGCCTGGAAGAGGTCAGCGGGAGGAGGGGCCTGATCGGTGGATCAGCTATCCCTGTGCAAGGACCCGGAGCCCATCAGAGCAGCCTGCAGAG
ACTGAGCTTGAGATTCCGTCGGGAGTTTGGATTCGCTGAGTGGGTCGCTCTAGCATTGAGAAATGCAAGCAGAGAACAGAGGGTGGAAACCAGA
TGGTCCAGGAGCCTGGGCACTGTAGCCAGGAGGACAGAGATCCCGGTGTGCAGTGCGTTCACTGCATTGTTCACTCGGAATCGCAGGTGGCTTT
GCTGGAGGGACAGACAGTTGATCATAGTGGAGCTGGTGAGAGGAAGCTGCACCCAAAAGCCATGGCCGGGAACCTGGATCTGACTGCAGGGAAA
CAGAAGCGTGGTGGGCGCTGGGCGATGATGGAATTTCTAACAAATGCTTTGTTTCTGCTAAAGCTAACTTGCGCTTCCATCTCTGGCATCTCCT
CCACTTCCCAGGTGAGCTGACTGGTTACTGAGCCTCACAACCACACTGAGACGGGGGCGCGGTCATCCCCTCGTTTCCCCAGGGGAGACAGGCT
CAGAGTGGAAGCCGCTTGTCCTCCTAGGATCTGGGACTCGGGGCCCAGCTCTCCCTCTGCTCTGGGTTTAGGGCTGAGGTCAGAGGCAGCCCTG
ACCTCCTGCTGGTGGTGGGTAGGGTAGTCCCGCCGGGTTCCTGCTGCCCCGCCCTCGGGAGGCTGGAGGCCCCCCAAGGACAGGTGGTTTCCAG
GAGCAGCGGGAGGGAGCCCCGGTTGTGTCCTGGGCCTGGAGCAGAGAGGGGAGGAGCCCAGCGCCTGAGTTTCAATTTCCTGAAGCCTGGGGGA
GGGAGAGGAAGAGAGCCTCGTTTCCTTTCGGGGCTCTGGACCTGAGCCTCCCGCCCAGGGCCCACCGCACCCCGCTAGGACCTGGGATTTCCCA
GTCTCCACACCGGCCCGGAACTGGGCCCCCTCCTCTCCGCAGCCCATCCAGCCCCACTTCCCCGCTTCCCCGCTTCCCAGCATCTGCCCGCGGA
TGAGCCTCTGGAGGATGGGCGGCCCGTCCCGGCGCTGCCCCTCACCCACCCCCCACCGCTCAACCCCTGTGGGGACTTCCTGCAGTGAGGCCCA
GGCAGGACGCTGCGCTGCCTCCCCCATCCACAGCCTCTGCCCCCTTGACACCCCCGCCCTCTGCCGTGCCTTGCAGGACTCCCCAGCCTGTGGG
CCCGGGACCATTTCACACGCTGTCCACAGTCGTGGAAACCCGGCAGCCACAGCAGGCCTGGGCCCACGGTGCCTCCACCCCTCCGTCAGCCCCC
AGCAAGTCTTCCTGGGGGTCCCCAGCCCTGAGTGCGAGACCCTCCAGGCTGCTTCTGGACCTCGGGGCTGGGGCTGAGCCCGATCCTGGCTGGA
AATGAGTGCAGGGCCGGGCTGCCTGGGGGAAGGCCCTCCAGTCTCTGAGCCCCACCCTGGGGAATTTGCTGGGACACCTTGAAGGCCGCAGGCC
AGACCCCAGGGGTTAATAAGGGAACAAAGTCCTTGGGCGAACACCTGCATTTACTATCTGAGCCAGCAGGCAGCTAGGATGCTGGGTGAGGGGG
TCTCTGGGCTGCTGGGCGGCCAGGCGGGGGCATCGGGGCAGGAGCTGAGGGCTGCACTGGGCAACCACCCTGAGCTCCTGTTTACCCACCAGGG
GCAGTGCCAGGGCGGGCTGGGCTCACAGCAGAGCCCAGAGGAAGGGGCTCAGGCTGAGCAGGAGCTCCCTGACAGCCTGGCACCAGAGGCCACG
CCGCACTGTGGCCGCCTTGTTACGGAGGCTATTTTCACAGCAGGTCATGTCCAGCTTCTCAATCTTCGAGTCAATCAGTCTATCCTCAATTTCT
GTGGGGTAAGACCCTCCAGGGACCACAGGATGGGTGAGGTTCATAATCTGGGCACAGAGTGGGGCCACAGCCCTTGCTAGTGTAGCTGAGCTTC
TGCCCTGTGGGCAAGAGAGGAGGGTGTCTGCCACAGGAGGCCCCACCCCACCCCCTCGGACCCGCCCCAGGACCGCCCCCTTCAGGGAACCTTC
AAGCCAGTGGGGACGCGGAGGCGAGCAGAAGAGAACGGGCGGCGGCCCCAGGCCCCACACCAAGTCTGCAGTCCATTAGATGGAGGTCCCTGAG
CTCTGTCCCCAGATCTAAGCTTCCACCAGGCCAGGGGGCTCAAGGCAGACCCCCTGGGATGCTGCCAGAGAGTGCCCTGCCCACCCCTCACCTG
CCTACAGACGCTGGGTCCCACCCAGGACTCACCATCGATAGTGCCAGTGACCACAGAGGAGGGGCAGCTTTGAGCCTGCATGGGATAGGAGACG
GGGTGACACAGGCTGGGGTCCAGGACACCGTAGCACTGGAAGCACTCAAGGCCCTGGCCTGGGATGGGGCGGGGAGGGTGCAGGTCAGGGTCGC
AGGCTGAAGGGTGGGTTCCAGTCCCTCTCACCAGCACCGGCAGCAGGCCTGGGCAGCACACAGGTAGGCTCAGGTGCCCTTGGCTACTCAGAAT
TGTGGGCAGGGTCCTGCTGGCATCTGGAGCCCCCAGCATCAAGAGGGTCTTACTCCCACCTTCAGGCCTCCTTCCCATCCCCCACCCTCAGCCA
GCAGCAGCATGGGGCTAGTGACCTTCATGGTCTTGGGTATGGGTGCATTGAGGGCACATGTGGCACAGAGGCTCTGAGCCTGGGAAGAGCTAGG
GGAGGCCTTGCACCCCCGAGCCTGGGAACCTCTGCCCCACTTCTGGTTTGTGATGAGGAACCCGGATTGTTTGTGTAAAGTGCACACAGCTGAT
GGCCTCATCCCATCATCTCACAGAATGGGAATTGAGGGGTAGAAACCCTTCCTTCCTGACCTGGCTGCTCTGGAAGGCAGACATGACCTTGAGC
AAGACCCCTCTCACCCCACCCCTTCTCTGCCTGGGGCCTCCCAGAGCTCAGGGTGTGAGCAGAACAGATCCGGAGGGAGGAGGGGCTGCGGTGA
GGAGAGGAGGGGCTGCGGTGAGGAGAGGAGGGAGAGGTTGTCCCCTGGGGTGGGAGGACGCCTTAGGAGAAGTTCTGACTCAATAGAGAGGAGG
GTCCTGGACTACGCCCTTGAGTTTCAGTTTCAGTTTCCTGGTGCATCACAGTGTTGGTGTCTGAACGAGGAGAGAAAAGCAGCCGTGAGACCTC
AGGTCACACCCAGGACCAGGCCCTTCCCGCTCAGGATGAGGGTCTCTGGCTGAGCCCACCACTGGCAGGCCCCCGTGCAGACAGAGCCTGGGAG
GGGCCAGCAGGGCAACAAGCTCTGACACTGAGACCCCAAGCCAGGCACCCCTTGTTTTCTGTGCAGGGAGCAGAGGCCCCTGTAACGGGGTGGG
ACGACATGGGGGCTCCCTTGGGGCAGGGGAGGAGGGNNNNNNNNNNNNNNNNNNNNNNNNNNNNNNNNNNNNNNNNNNNNNNNNNNNNNNNNNN
NNNNNNNNNNNNNNNNNNNNNNNNNNNNNNNNNNNNNNNNNNNNNNNNNNNNNNNNNNNNNNNNNNNNNNNNNNNNNNNNNNNNNNNNNNNNNN
NNNNNNNNNNNNNNNNNNNNNNNNNNNNNNNNNNNNNNNNNNNNNNNNNNNNNNNNNNNNNNNNNNNNNNNNNNNNNNNNNNNNNNNNNNNNNN
NNNNNNNNNNNNNNNNNNNNNNNNNNNNNNNNNNNNNNNNNNNNNNNNNNNNNNNNNNNNNNNNNNNNNNNNNNNNNNNNNNCCCACACCCGAA
TTTGTTCTTCACGGAGAATCAGAAGACACAGGAAATGGGCCAGGGGTGACAGACTGCAGACTCCACCCCCCCTCCCCAACCAGGTGCTGGGCAG
AAGGAAGACAGGCCTCCCTGGGCTGTGGGGACAGAGCCCTTGATGAAGACAGATAAAGGCAGCAGACCTGCATAAGGATGGGTCGCCTCTCCGG
TGGGTGGTCCCTTCCGAAAAGCAGAATCCACTCTGTGCCCTCAGGGGTCTCTGCTTGGAGACTCCATGGCATCTGAGAGGATGGGCCAGGTGAG
GTGGGGGTGGCTCCTGAGAGCAGGGAGGACAAGGGCGGAGCTGGAGGCGTCAGGCCCAGAAGACCCCCCCAGTGACTTCCGGCAGCTGTGGGCA
AGGCTTGGACCCAAGAGGCCTGACCACCCCGCCTGGCAGCACACCAGAGCACAGGCCAGACCTGAAGGGGCACGCCAGGGGGGGCCCATGGTCC
ACGGGTCACTCTGCTGGCCCTGCGGCCACACTGCTCAGGTCCCAGGGCCTGATGATGGCTGAGCCAGACATCATAACACCAAGCAATGGAGAAG
CAAGAATATTGCTAGGGATACTGACTTGTATTTTTCAATCTTAAAATATATGTTTTAATCTGACATCTATAAGCAGTGCATGTTACATGCCAGT
CAGAGCATGAGCATCCCCAAGAGGTGTGCACTCTGTGTATCTATGGATAATGAAAGCACGGCTTTCACACAGCAAGTTATCCTCACTTCCTGTG
ATCAACTCTGATATCTTCTACTTTATTTGAAAGAGTATTGATTGTGTCCCACTCGACTGATTTTACACCCTCTATGTACATGGTCCCCAGTTTA
TGGGCAGGGCGGTTATTTTGTGTTTTATTTTGTTTTTGAGACGGAGTCTTGCTCTGTCGCCCAGTCTGGAGTGCAGTGGCGTGATCTCGGCTCA
CTGCAACCTCCGCCTCCCCGGTTCCAGCGATTCTCCCGAGTAGCTGGGATTACAGGCGCCCGCCACCATGCCCGGCTAATTTTTTTATTTTTAG
TAGAGATGGGGTTTCACCATGTTAGGCTGGTCTCGAACTCCTGACTTCAAGTGATTTGCCTGCCTCAGCTTCCCAAAGTGCTGGGATTACAGGC
ATGAGCCACCACACCTGGCCTGTTATGTTTTTTGAGATAGGGTCTCCCTCTGTCACCCAGGCTAGAGTGCAGTGGTACAATCACAGCACATTGC
AGCCTCAACCTCCCTCCCAACCTCAACCTGCAGGGGAGGGGAGGGAGAGGAAGGGAGGCTCATCTCAGGGCTCTGAACCTGAGCCTCCCACCAG
GGATTTCCCAGTCTCCACACTGGCCTGGAACTGGGCGCCCTCCTCTCTGCAGCCCCATCCAGCCCCCACTTCCCAGCATCTGCCCACGGATGAG
CCTCCGGAGGATGGGCAGCAAGTCCTGGCACTGCCCCTCACCCGCCCCCCACCACTCAGCCCCTGTGGGGACCTCAGGAGGTAAGGCCCAGGCA
GGACCCTGTGCCACCTCCCCCATCCACAGCCTCTGCCCCCTTGACGCCCTTGTTACAGAGGCTCTTTTCACAGCAGGTCATGTCCAGCTTCTCA
GTCTTCAATCAATCAGTCCATTCTCAGTTTCTATGGGCTAAGACCCTCCAGGGACCACAGGATGGGTGACGTTCATAATCTGGACACACAGGGA
GGGCCACAGCCCTTGCTAGTGTAGCTGAACTTCTGCCCTGTGGGTGAAAGAGGAGGGTGTCTGGCACAGGAAGCCCCACCCGACCCCCTTGGTC
CCACCCCAGGACCGCCCCCTTCAGGGAACCTTGAAGCCAGTGGCGACACAGAGACAATCAGGAGACAAGCAGAAAAGAACAGGCCGCGCCGAGT
CTGCAGTCCTTCCAGCCTCAAGCGATCCTCCTGCCTCATCTTCCAAGTACCTCGGACCACAGGCACCTGCCACTACCCCCAGCTATTTAAAAAA
AAAAAATTTATAGAGATGGGATCTCACTATGTTGCCCAGGCTGATCTTGAACTCTTGGGCTCAAGTGATCCCCTTGCCTCAGCCTCCCAAAATG
CTGGAATTGTAAGCGTGGGCCTCTGCACCCGGCCTGGTCCGCAATTTAAAAACGCACACCCACCATTCCCTCTCCAGAAAGCACCCAGATGCCT
TTGGGAGAACCAGCCTCCTCCATGGAGGAAAGCTTGGCATCTGCCTTCCCACCTGGGGAGGAGAGGGATCTGTGGAAAATCCTTCTGACGGACT
TCCCCTCAGTGCCTGATCCATACTCAATAGTAGAAAAAGTAAGAAATATACAAAGATAGCAGATACACGGACACACTTCCCCAAATAGCTGAGC
GAATAGCGCAGAAGCAATATTGAAGACCTAATAGCTGAGACATTTCCAGAACTCATAAAGTGCATCCAGCCACAGATCAAGCAGCCCAGAAAAT
TCCAGGCAGCATCAACAAATAAATAGCCCCACATGCACCCCTGAAAATGCAGAAGACCAAACAAAAAAGTCCTGTCAACAGCCAGAGAAAAAGA
TCAGCCACCAGGGGTCGGTAGTGAGAAGGACAACTGTGGAAGCCAGGAGAGACGACAGCCCTGAGTTCCACAGGCAATGGAAGAAAGACTGTCA
GACAGAAAGGTTGTCCCCAATATACTTGCACTAAAAGAAAATCTTTTTTTAATTAATTAATTAATTTATTTATTTTAGACAGGATCTCACTTTG
GAGTGCAGTGGCGGGAACACAGCTTATTGTAGCCTTGACCCAGGCTCAAGCGATCCTCCCACCTCTGTCCCCGAAGTAGCTAGGATGACAGGTG
TGCACCACCATCCCCAGCTAATTTTTGTATTTTCATACAGGCGGGGTTTCTCCCTGTTGCCCCACCTGCTCTTGAACTCCCTTGATCAAGGAAT
GCTGGGACTACAGGTGTGAGCCACAGCACCGCCCAAGAAGGTCTTTTAAAAAGTCTTTTCGGGCACGGTGGCTCATGCCTGTAATTCCAGCACT
TTGGGAGGCCAAGGCGGGTGGATCACAAGGTCAGCAGTTCAAGACCAGCCTTCCCAAGACGGTGAAACCCCGTCTCTACTAAAATTAGCTGAGT
GTGGTGGTGGGCACCTGTAATCCCGGCTACTCGGGAGGCTGAGGTAGCGAATTGCTTGAACCCGGAGGCAGAAGTTGCAGTGAGCCAAGATCAC
GCCACTGCACTCCAGCCTGGCGACAGAGACAGACTCTGTCTCAAACAAAAAAAAGAAAAAGAAAAGAAAAGTGATCTTTAGGCTAGACATGGTG
CATGGTGGCTCTCACCTGTAATCCCAGCACTTTGGGAGGCCTAGGCAGAAGGATCGCTTGAGTCCAGGAGTTCCAGACCAGCCTGACCAACATG
GAGAAACCTGTCTCTACTAAAAATACAAAAAAATTAGCCGGGCGTGGTGGCGCATGCGGGTAGCCCCAGCTACTCAGGACGCTGAGGCAGGAGA
ATCGCTTGAACCCAGGAGGCAGAGGTTGTGGTGAGCTGAGATTGTGCCATTGCGCTCCAGCCTGGGCAACAAGAGCAAAACTCCATCTCAAAAA
AAAAAAAAAAAGTGATCTTTAGGCCGGGCACAGTGGCTTGTGCCTGTAATCCCAGCACTTTGGGAGGCTCAGGTGGGTGAATCACTTAAGGTCA
GGAGTTGAAGACCAGCCTGGCCAACATGGTGAAACCCCATCTTTACCAAAAATACAAAAATTAGCCGGGTGTGGTGGCACGCACCTGTGATCCC
AGCTACTTGGGAGGCTGAAGCAGGAGAACCACTTGAACCCAGGAGGCGGAGGTTGCAGCGAGCCAAGATCTCGCCACTGCACGCCAGCCTGGGC
AACAGAGCGAGACTACATCTCAGAAAAAAAAACAGTGATCTTTAGCCAGAAGGAAAATGGTCCCATTCAGAATCAGAGATACCTCAAGTGATGA
AGCACAGATTCGTAGAAATGTGGTGAGTCTAAATGAACATCAATTCTATTAAAAAAGATAAAATAGTGGCCGGCGCGGTGGCTTACGCCTGTAA
TCCCAGCACTTTGGGAGGCCGAGCGCGGCGGATCACCTGAGGTCAGGAGTTCAAGACCAGCCTGACCAACATGGTGAAACTCCATCTCTACTAA
AAATACAAAAAAAATTAGCAAGGTGTGGTCGCACATGCCTGTAATCCCAGCTACTACGGAGGCTGAGATGGGAGAATCACTTGAACCCAGAAGG
CCTCTCACGCCATTGCATTCCAGCCTGGGCGACAGAGCAAGACTCCGTCTCAAAAAAAAAAAAAAAGTTCTGTCTTGTGGGAGATTTAAGTTTT
TGTGGTGAAATTAAAATTCATACCATAAATACAAACCTGGAAAGGAGTGAATACAATGACGCCAACCCACTGGGCGGTTACACAGTGGCCCACA
GCTGTAGTCCCCACTACTCAGAAGGCTGAGGCAGGAGGACGGCTGGAGCCCAGGAGTTCAAGACCCACATGGGCAACATAGTGAGATGGAGCAG
GGACCCCTCCTACGTGCCTGCCAGGCTCTCCCAAGCTTGGAAATCAAGGAACACTCTTGAATCCCTTCAAGGGAAATTCCAGTCACCTTGCCAG
CCTTGAAAGGTAAGTGAGCAGCCTGCCAGGAAGGCGACGGGAGCACGCGTCTCCCAAGCAGGCCACAGCCACAGGTGGTTTGCTTCCCTATAGA
AACTAAAGCATAACATACATTCTCAAGTCTTTCAGAAACCCCCACCCGGTGGAAAATGCCGACTGCTATCACAGAGACCCAGATAAGGGGGAAC
TGAGGACTGAACTCTGGCCGTGTTCTCTGTCATGAATTTCTTCTTGAGGGGCCTGGAGGGAGTCACAGCTGTGAGCCACTAATGTGTGCCCCCA
TGCACACAGCACCCTTGGCATAACTAACTCCATCTTAGAGACTCCATTGTATATCTTACAGGGCACTTGGCCAACAAAGGTAAGATGTTTTGCT
TAATAAACAAGTTAAAAATAAAGCCTGCATCCAAACAGATGAGGACGCAAGCAAGCGCACTCTTCAGATGTCACTTCTCACGGGAGGCCTCTGT
GATTGCAGAAGGAAAGGCCCCAGCAGAACTCACCATCTGCCGCCTGAGGCTCCACCACCTCGAAGACATCCTTGCAAGATCCACAGACTGGCCC
AGACCAGGAGGTTTCTGTCTTCTTCTTGTGTCTTCTTCACTCTCCTGGACTGGTTCGTGAACCCTTTCTCCTATCTCTGTTTCCTCTGGATGTT
HUMAN SEQUENCE—mRNA
GCTCCGGCCAGCCGCGGTCCAGAGCGCGCGAGGTTCGGGGAGCTCCGCCAGGCTGCTGGTACCTGCGTCCGCCCGGCGAGCAGGACAGGCTGCT
TTGGTTTGTGACCTCCAGGCAGGACGGCCATCCTCTCCAGAATGAAGATCTTCTTGCCAGTGCTGCTGGCTGCCCTTCTGGGTGTGGAGCGAGC
CAGCTCGCTGATGTGCTTCTCCTCCTTGAACCAGAAGAGCAATCTGTACTGCCTGAAGCCCACCATCTGCTCCGACCAGGACAACTACTGCGTG
ACTGTGTCTCCTAGTGCCGGCATTGGGAATCTCGTGACATTTGGCCACAGCCTGAGCAAGACCTGTTCCCCGGCCTGCCCCATCCCAGAAGGCG
TCAATGTTGGTGTGGCTTCCATGGGCATCAGCTGCTGCCAGAGCTTTCTGTGCAATTTCAGTGCGGCCGATCGCCGGCTGCGGGCAAGCGTCAC
CCTGCTGGGTGCCGGGCTGCTGCTGAGCCTGCTGCCGGCCCTGCTGCGGTTTGGCCCCTGACCGCCCAGACCCTGTCCCCCGATCCCCCAGCTC
AGGAAGGAAAGCCCAGCCCTTTCTGGATCCCACAGTGTATGGGAGCCCCTGACTCCTCACGTGCCTGATCTGTGCCCTTGGTCCCAGGTCAGGC
CCACCCCCTGCACCTCCACCTGCCCCAGCCCCTGCCTCTGCCCAAGTGGGCCAGCTGCCCTCACTTCTGGGGTGGATGATGTGACCTTCCTTGG
GGGACTGCGGAAGGGACGAGGGTTCCCTGGAGTCTTACGGTCCAACATCAGACCAAGTCCCATGGACATGCTGACAGGGTCCCCACGGAGACCG
TGTCAGTAGGGATGTGTGCCTGGCTGTGTACGTGGGTGTGCAGTGCACGTCAGAGCACGTGGCGGCTTCTCGGGGCCATCTTTGGGGAGGGAGG
TGTGCCAGCAGCCTGGAGAGCCTCAGTCCCTGTAGCCCCCTGCCCTGGCACAGCTGCATGCACTTCAAGGGCAGCCTTTGGGGGTTGGGGTTTC
TGCCACTTCCGGGTCTAGGCCCTGCCCAAATCCAGCCAGTCCTGCCCCAGCCCACCCCCACATTGGAGCCCTCCTGCTGCTTTGGTGCCTCAAA
TAAATACAGATGTCCCC
HUMAN SEQUENCE—CODING
ATGAAGATCTTCTTGCCAGTGCTGCTGGCTGCCCTTCTGGGTGTGGAGCGAGCCAGCTCGCTGATGTGCTTCTCCTGCTTGAACCACAAGAGCA
ATCTGTACTGCCTGAAGCCGACCATCTGCTCCGACCAGGACAACTACTGCGTGACTGTGTCTGCTAGTGCCGGCATTGGGAATCTCGTGACATT
TGGCCACAGCCTGAGCAAGACCTCTTCCCCGGCCTGCCCCATCCCAGAAGGCGTCAATGTTGGTGTGGCTTCCATGGGCATCAGCTGCTGCCAG
AGCTTTCTGTGCAATTTCAGTGCGGCCGATGGCGGGCTGCGGGCAAGCGTCACCCTGCTGGGTGCCGGGCTGCTGCTGAGCCTGCTGCCGGCCC
TGCTGCGGTTTGGCCCCTGA

[0276] TABLE 12

MOUSE NOMENCLATURE
ICSGNM Rasa2
Celera mCG21645
HUMAN NOMENCLATURE
HGNC RASA2
Calera hCG16062
MOUSE SEQUENCE—GENOMIC
TGGAGCTCTGATGCTGAGGGCCCGCATGAAGGCCAGCTAGGTATAAAAATGCATCTGAAGTCCCAGACGGTTGGAGGCAGAGACGGGGAAACCA
CGAGACAAGCTTGCTACCTAGACTAGCCAAACTGGCAAGCTCCAGCTTCAAGATCTTGCCTCAGTAACTTAAGTGAAGGATAGAAGACAAGGAG
ACCTGTAACCCCCTAACCTCCACACAAATGCACACAGCTACAACAATACATGTTTGGGCCCGAAAAATGACATGCAGGTACCTGTGGTTGTCAA
GACTCAGTGACATTTTGTGCTGACTTGGAGTCAAGAGTTTCCCTCTGTTCTGGTGAACTGAGCACCTGGGTTCAGGCCATCTAACACCTACCTT
TCTCAATGGGATGACGTCAGGCCTCACAAGATACCCCTGAAAGCGCAACCATTTGTCTGCCTTCCGCAGGAACAGTAAGTTATTCAGATTCCAG
GCTCTAATGGTCCCTAGGAATGAGAAAGTTCCCTGAACCTAGTGCCTTCTGGACGGAGTGTGAAATCTGTATGTATACAGGAGTGGCCTTTGGA
TTTGATGTAGGATGTACTTTGCCACCCTGATTCAGCCTAATCAACTTCTTGTGTCTCAGCTTTCCTAGGTTTTTCTATTAGTAAAAAACCAGAG
ATCATCTCTGAACTACCCACCATTGCACTTTGAGCGTCCTCAAAGACCCCCCTTTGGTGGTGCTGTGGTTTCTTCTGTTGTCTGGGGTGATAAA
CAGCAAGGTGACCCTCCCCTCTCCACTAGCCTCCAACAGAACCACACTGTAGCTGCCTCCTCAATTCCCAGTGTGCATGGAGGACACCTGCTCA
TGATTTGTAAGAGTCTCAGCCCTACTCTGCGGCTAGTGTTACACATGTTGCTACTCTCTTGTAAAAACATAAGAGATGTCTCTGGAGTGTGGAA
GTCTGTAGGAATCCCAAGGTGAGAGGCTGAGGCTCTTGCTCTAGGTAACAGGAAAGGTAGACAAGAGAGCAGAAAAGACATGTTCCCCTAAGGA
CTGAGCTGGTGGGCTAAGGAAGTACAGAAGCTGAAGGGTAAACTGAGGAATGTGGGCGATGCATGTTTGCAACAGGCAACCAGCATCACTGGTG
CATGGGGGAGGGGGACTGCTAAGAGCACTGTTTGAGTCTGAGCAGCAGTGACATGCCATCTATGGGGCATTCTCTATCTTCCCCCTGGACCCTG
ACTCCCCCAGAGAAGGTGGACACCTCAGTGAGAACAAAAAGAGGCCACAAAAAGGGCAAGAAACTCAGCACTGTCCTCCTTCAACTCTGCTGTT
AGCCTCCCAGATGGTGACAGGCCTGATACAAAGGAGAATAGAAGCCATAGCTTTGACTGTTCTCCTCAAAATGATGCTTAAATTGTTGAAATGA
TATTTCGGGGGCACCTAAAAGAGGCTGAAAGGGTGCTGGAAATGGTACCATGCACTTAGAGCTAGAAAAGAAGTAACATCGGGAGAAGAAGGCG
AATAAAATTGTTTTGTTGCCTCTTTGGAGCCCTGCATACCCTTGGCTACTCCAGAGTTGGGGCTCTTCACTCAAGGGTCCGCCCCGCCCCGCCC
CGCCCCGCCCTGCTAGCATGTCCTCTTTCCTGGAGGCCTCTTCAGTCTCCAGATTGGTGTATCTACTTCTCTACTCAAATACTTCTCTTTCTGC
TGCTCTGGGGCTAAACCCCCATTCAGCCCTTTCACATCAAAAATGCCAAGGAAGTGGCTCAGAAATTGTGCATGCCATCCAACATGTCTGTTTG
CCAGCACTGACCTCCCCCAGTCCTCACCACTGGAAAACTTCCCAGTGGGCAATGGGGCTTCTGAAGATGCTAACAAAGAGGACCGACTGGGACT
GTGCTCTGCGGGCAGGGTGCATTGGCTCAAATCCTAGAGAGTCTGTGTGGGTCAGCTTTGCTCAGAGACAGCATGAGAAGAACAGTAACAAATG
CTGACGTTAGCTATGAAGTGTTGTCGCGTCTAGTGGAGCATGTAGCATCTACCTGCAGAGGCCGCCTCGAGGAGCTTTGTCAGTATTTTACGGC
CAGCACACTGCCTGTGCTTTGTAGAGAGAGAAGAAACTCAGCAAAGAATTCCCCTTGTGCCTGAATCCTTGACTCTTAGCCCTCATTGCCCTTC
CATTCCCAGCTTTGTTTCATGAGGGACTTTGGGTCGGCTCTTTAGCACCCTTCCCCCCAGTTACGTTTTATTTGCTTGCATGTGTGTGCCTGGA
GGCCGAAGAGGCGTTGGATCCCCTAGAACTGGAGTTACAGACCATCATGAGTCGTCATGTGGGAGCTGGGAATTGAACCTCAGTCCTCTGGAAG
AGCAGCCGGTGGCTCTTAACCACTGAGCCGTCTCTCCAGCCTCAGCCAGTTCTTCGTGAAGTTATACTCTCTCTTGGCTGAGACTTGAGAAGAT
TTTGAAAGTATCATTTAACCAACTACCATTCTAATGTATTCTCGGGGCACTAAGGAGAGGAGGGGGCACCGGAACTTTCTCTGAGCAGAGCCAC
GTGGGTCCACATTTCCTTGACTCCTGGAGGTGCCCATGCGCATCTGTACTAGCCAGGTTAGTGACAGGAACACTGGGAGGCCCTAGCAGTATCT
TAAGAGTGCGGGACTCCATTAGACCATGTCCTGAAGGTCCCATGGCTGCTGCGTTGGCAGGGGCTGCCTGGCCTCAGGTACTCTAGCCTGGCAC
TTAACTACTGAATAACTCATGGGTGGCTCTGGGATGCTGGATGAGTGGATAGCGCTGCCCAGACAAATGAAGAAATGTCCTGGCACAGAGTCCA
TGAACCAACTGCAGAGTTGCTCAACGGTTCCACCCTTTCGTGGCTGTTGTTTTATCAGTGAAAAGTGACAAGAACAGTGGACTGGAGGAGGGGT
GAACGCACCATCATAATTCAAAAGGAAGGGAGCCTCGGGACACCTGAAGTCACTCTGGCCAAAGGGCATATGCTGCCTTATGCTCCCGCAGCCG
GGCCTTTAACCGCTTCCTCCAGGAGCTAAACTTCTTTGAAAGTATTTTAAACAGATGAGCTGGAGCCTTCGGGATAAAAAAAAAAAAATGTCCA
CATATTTTACCAGTTTTGTCATGGCCTTGTTTGGTTCTGAAGTAAAATCTTAAAAGCTCTCTGAGTCTTTCATCAACTTCCCCATGTCCAGCTT
TGCTAAGAAGAAAACTGCTGCCTGGACTTAGAGGAAGAGCGAATAACTAATTCACCAACGTATTAAGATGGGATGAATGGGGGCACCAGATCAT
CACTGATGAAAGCAACTTGCCTCCCAGCCAGTCTAGGGGAAATGATTCTTCCTCATTACTGCACAGATATACGAACATGACCTACATTTAACTA
CTAAAAAAGCACAAACACATCTCCTGACTTATCAAAGAAACACCAGTAACCTGGGGGGCCCAGGGCGTCAGCCAACCCATTTGAGCCCAGCAGC
CAGGAGCCAGGAGCCAGTGGCTCTCTGTCAATTCCAGGCCAGCCAGCCCTACAGAATGAGACCCTGTCTCAGAAGTAAAATAAAACAGAGGCTG
GAGAAATGGCTAAGCCATTAAGAGCGTTTGTTCTTGCAAAGGACCTGAGCTTGGTTCGCAGTACACTAATGGAGGCTAGCTAACAACTATCTAT
AGATTTAGTTCCAGGGGACCCAATGCCCTCTTCTGACCTCTTCTGGGTGCCAGGTACTCGTGTGGTGCGCACATACACACATACATGCAAGCAA
GCAAAACATCCACTAGACACATAAAAAATATTTAAATGAAAGTAAATATTAAAATATAATAAAATTAAAAACTTCGGACCAAAAGATAGCTCTT
ACAAGTCAGTTAGAGGCTAGTAATAGGATGTATTAGTATTCAGAAATAGCATGGAACTGACCAGCTCTAGAAATAGTTTCTAGCATCAGGATGT
ATTCATTTCATTAACAGAAACGCCAATTTTCACACATCGCACCTTGAATGAGCTGACTTGTGGTTTGAAACAAATGAATGGGCTTAAAACTAGC
TAAGAAGTCAGAAAAGACAGGGCAGTGAATGACTGCTCATCAGAATAGAGAAGAGGTGGGGAGAGATAGGTTTTAAAGACATTCATTAATAATA
TGGGGAAGGAAGTGAACTGCAAGATCGTGTCTGCTGCAATATTGTTCCCGTTACCAAACACAGTGAGGAGAGGAACTCTAGACGAATTTAAAAC
CCAGCGCACAAAGCCATAGACAAAATGAGATGGAAAAGCAGTCTTGCAGCTTGCATGCAGACCTTAGTCTCTAAAACTCGATTCCTGAATGCTT
TATATTAAGGAACAAAGACTAGTGAAGATTTCTGCAGCACCAGTTGAAAAAAATGTCATTCCTAAAGTGCTCCTTCAGAAATGAAGTAATTAGA
AGTGACTTGGGATGAAAAGGAAGAGGAGCTGGAGGGCCTTAGTGGAACAATGTGATCATTTCAAACTCCACTACAGGAAGATGTCCTGGGAGGG
AAAATTAATGTTACTTCAAATAAAATTGTTTTTATATGTTTTAGTAACAAACTAGTAACAGAGTTCATGAAAAACAAGGCAACTTAGAAGAACC
TACTGTAAGCAACAGTATTTTTTCAAAGAAAAAAACAAAACAAAACAAAAAAACAAAAGAAAAGCTAGCTTTGGAAGTCTACCTGGAGGATGTC
ACAAAAGTTTTCAGGTCAGACGGCTTCCATTTGGACGACTATGATAACAAATTACAAGTGAGAAATTTCACAAAAGGGAAGCGCCACGTCTGCA
GAGCAGAGGAAGTTAAGACATCACTCATTCATGCGTGAGCACACTGAAATTGTTAAAGAATATCGAGTGCAGGAGATAAAACCCCTCGTCGACC
ACCTCTCCCTCCATGGGAGGGGGTGGGGAGGAGAGCTATGCAAAGCTCCCTCTCTCCTTGTGCTAGGAGGGTTTCATATAATAGAAGTGATCAG
TACTATACAATGACTCACGTGAGAGCCACTGCCCAGGAGAGAAAGGAGAGGAAAATGAGGCAACCCTCGGCCAGACTTTTTTCTCTTCTCTTCT
CTTCTCTTCTCTTCTCTTCTCTTCTCTTCTCTTCTCTTCTCTTCTCATTTTCTTCTTCTTCCTTTGTTTCTTTGTTTCCTTCTCTCTTTCTTTC
TTTCTTTCTTTCTTTCTTCCTTTCTTTCTTTCTTTCTTTCTTGGAGACAGGATAGCTCTGCCTGGAATGGAAGTTGATATATAGACCAGGCTGG
CCTTGAACTCACAGATATTGGCTTGCAACTGCCTCCTAAATGCTGCAATTAAAAGCATGTCTCTCCATGCCTGGTTTAGGAACCCATTCTTAAC
AAGTTGTTGGGGAAAGTCGCTCAAAGTGACTGAGGTAGGAAACGTTCGACACAGGCTGGGTCCAATCTAAGCCCCGAACACCTGGCGGAGGAAT
GTGAACTTCATTCATTAGTCATCTGTAGCTGGCTTCCTGACCTGCACTCCTCGATTGCTTGGTGACTGATACAATGAATGAAGCCATTCATAAG
GTTTTTATTGTTGTTGTTGTTGTTCTTGTTCTTGTTGGCTTGGTTTGTTTTCCACAAACCAAATAAGCTTCCTGGGTTTTGCTTTAGATTAAGA
TTCATTGGTGCAGAACAGGAATGAACGAGGTGGGAGACTTATCACATGCGTTCATGTCAAGAGCTTGATGTGGCATTTACTGAACTAATCCTAC
TAGATACGTCACAGACATGTTCTCAACACTTACTTAATACTATTGATAATCCTTCAGAGAAGGAACACCCAGTGTAACATTTCAGTTCTGCATC
AGAGAAGCACATGCACATGTTTAAAGCCATACGTTAGCTCTGTTCTTAGATGCTACTCAGAAGCCTCCTTTTGCAGTGGCCAGAGGTGGATGCA
GAGATTCACAACGGGCCAGAGAGCTGAGAATCTGGGACTGAGAAATGCTCAGCCCTAGATGAGACATCCAACCACTTCTGAGGTCCAGAGGACT
TCAAGGAGGGATCGGCCAGGAAGGAGGATGGGGAGGAGAGCTATGCAAACCTCCCTTCTGGACTTGACACGGCCTTTGTCCTCATGAACTCCAA
GCAGCTGTGCTTACCTACACACGATTAACCGGGTCAACATTCCAGCCCCGCTGTGGGAGGGGCTCGTGAGCACCTTCCCCTCTCTGAGGAGCTG
TGTAGGTAGTTAATGAATGGCTGCTGGGGTAAGGGGAATCATTTTCTTGAGGCGTGCAACCACTGTTCAGTTGCTCCAATAAATAAGCCTTGAT
CCACAGCCCTAATTACAGTCTATGGCATGATTGGGCACTTGTGCAAAAACACACACACAGAGTCACAGACAATTCTCTCTCTCTACACACACAC
ACACACACACACACACACACACACACACACACACACACACACACAAGCATCAGCACTTTTGGGGGGGGAAAGAAGGATCTCAGTAGGAGTGGGA
GAGGAATAAGGGGGTGAATAGGATCAAAATATAGTCTGTGTGTGTATGTGTGTGTGTGTGCATGTGGTCCTCACAGAATACATTTTAAGAAAAT
ATGTTTAAAGACTAATTTATTAGGTATCTTATGTATGTGGGTACTTTGTCTGCATGTATATATCTAAACATCAGAGAGGGCATCAGATCCTATC
ATAGATGGTTATGAGCAACCATGTGGGTGCTGGAAGTTGAACTCGGGAACACCAGCCAGTTTAACCACAGAGCCACCTCTCCAACCCCAAGTGG
GGGAAAAAGTCCTTTTACAAAGCTTGAATATCACTCCTAAACATCACAGCTGTAAAAGGATAGGATAAGGTTTCCTATAGCATCTACAAAGCCT
TGTCTTTGAAAAAAATTGTATTGTGGACACTCTTCAGATGAAGTCTTGTTTTTATTTTTAAAGAATTGCCATGACAGAATGGAAAGGAGAAGAG
AGAGAGAGAAAAAAAGAAGTTTCATCAGAGGGATGTGACAACCAGACACACTGTGAAGAGAAGGTCTAGGGAAATCAGTCTCCAGATGAAGGAG
AGTAGAGGAGGGAAAGGCCAACCGAAACTAACGATTATGAAAAGGTCACAAGTAAACCAGATACTTCATATGATAATTTAAAAATTGAATTAAA
TAAAAGGAGTTTGATGGAGGTACCCTGTGAAAGTAGATAAAACTTGCGCAGAGAAGCTAAAGGTCATCAAATGCAAACCCTGTGCTGGGAGTGG
ACCATTTCTGTTGTTGGTCCCACAGCCCCACCACCCTTCCAAGCAATATAAGCAATCACCACTCTCCTTGGTAGCCCACCAGAACTAGACTTGT
GAAGCCGAAGATACATGTGCTGAAGAGACCACAGGGCATACAGACATCAAGGTGACGCAGAGAAGGCGCTTCCTCCCAGCTAGCTAACCCCTCA
TCATGCCAGAAGGTGCTATTCAGGCTGCTGGTAGAGAACTGTCATCAGTAATCTTACTCAGCTGGGGTCCCTACTTCCTACATCACTGACCTGC
CAGGCAAAGGGCACCTACTGACACACTACTGGGAAGTCTGCTATGGGGGTGACCAACCACTTCCTGACTGCAACTCCTTCAGACGAAATTCACA
TCTGGTACTATAAACCTGTTAAAAAGCCTATGGCTGGGGAAGTCACAGCCCCAGTAGGGCAGGTACAGATGTTCTTCTGCTAAACAGATGTGAT
GTGTGCACCAAGTTGCTTTCCAATAATTGTGCTTGTGCATAGGAATTCGTGAGCATGTCATGTTTGCTTCGAGAAGTCCACCCCCTCATGGGCA
GTATTAAACGCAGAGATTCATAACTAGTCACTGAGAATAAAAAACTGGATGCTCACCCTTAAATAAGACCTGTATATCACCCCCCCTCGGAGGA
ACGTTGAGGAAAAGATGGGAGAAAGACTGTAAGAGTCAGAGGATAGAGTGGAGTGTGGTGGAATTTTCTTGGCATGACATCACATGGCTGTCAC
ATTTTTTGTACAAAGATATTTCTATTTGTATGTGTATGAGTGTTTACTTGCATGTATGTATACCATAATGAGTGCTTAGTCTCCCTGAAGGTCA
GAAGGAGTAGGATCCCCTGGAACTAGAGTTACAGACCATTGTGAGTTGCCACTTGGGTGCTGGGAACTCTTCTCTAAGTGCTCTAAACCCTTCA
GCCATCTCTTCAGCCATTCTACCTGACAGCAGCTGTGGTTGTCTGTACTATACAAGATCCGTGCAATACTGGGAGCCAACATCCTGTGGTAGGG
TGCAGGAGGATTTACAAGGATTTTTCACAGTTGATGGTTGCCGGAAGAGACATTTTCTTCAGTAGTACAGCCACTGTTAAGTTTCCTGTGCTCC
TGTAATTAATCTCTCGTCTATGCTTCTGGAAACAACTCTCATAAACTCATTGAACTAAAAAAAAAAAAAAAAGTCTTGCTGGTGTGATGACTCA
GTGATTAAAGGTTCTTAATACCAAACCAGATCGCCGGGTTAATCCCTAGGAAACCCACGGTGAAAGGAGAACCACCTCCCAACAGCCATCCACT
GACCTTCCAGGGGATTGGAGGGGAAGAAAGCCAGCTGGGAGGAGAGGAAGGGGGTGCAGGGGATGTGGACGGCGATGAAGAGGGTATTGAATAC
TATGCATACATTAAACATGTGTATGAAAACGGTATCACACCATGACTGTGTATAAGTAAGACATACCAATAAAGCATTAAACGTTTTAAAATAG
AAAAAGCCAGTCTCTGGCCTGTCGTGTGTGAGCTCTGATTTGGAAAGAAAGGGAAATACCATTTGGAGTTTCTGTTTGAAACAACAAAATGCCT
GGAAGGAGAGGTAAGCTCACTTTCTCCAAGGCTGTATGGTACAGGACAAGGGGCACCCTCATGCATCACCAGCTGGACTGGAAGTATTGCTCGG
TAGCCTAAGACATCCAGCAAGCTTAGGTCACTCCGTCTGCCTGACTGGCCTTGGCACAAGTGGCTTCTGGGCTTGCTTGTCGTCTGTTCACTCT
TCCCAGGCAGGCTCTCCTTGACTCTGTTTCCACAACTTGCTTCTTCTCTCTGTGTGCCCTTCCAGGTTGAGGTGCTCATGGTCTTGGCGCCTTC
TGCCCCGTCTTTTTGCCCTAGGGCCATTCCTATATGTCTGAAAACATTCCTTGACTGGCTGACTCTAGCACCTGGCAAAGAACAACCCTGCTCT
ATTAAATCAGTTTCTTCCTTCTTAGGGCAGCGCAGTTAAACCTCAGGACCAGGAAATCATCCCTCTCCTCACATACCAGGGTGTTATCCACACA
GTTTACTCACTGTAAATAGTTCCCTTAAGATAGTGGCAACAACTAGTTGAAGATTTACAAACTTCCCAGGGCCAATCTACTTTCTAAAAAGCCT
GCTTCTGGGAGTCGGAAAGAGGTCACCGTTCCGATTCTGAAATGCAAAACTGGTGATAAACTCAAAATTTCTCTGGGTCTCAGACAGGACTGGA
CGGAGTCTGTGGTCCTTTTCTTGACCCAACTTTTTCCAGAGCAATGTTCCCAGAGCAAACCTTGAGTATGTGGTTTGTCCCCCACGTGCCGCAC
TGCGGGAGCATCTAGACACCGCTGGAAGAGTCTCTAATACATCTCTTGACGTTTGCCAAAATGCCAAACTTTTTCCTGGAACCTGGAGTCATTC
TGACTGGGGACTTTTCTTTTCCTTGACCATCTGGGGACCTAGAGGTCCGTTCGTGGGGGACGTCCAATTCTCACGGTTCTGGGGATCACAGCAG
GGCCAGGGTTTTCCTCCTTGTGGGGCTTTCAGAGCGCCTCTCGCGACTTGCCCAGGGAGGCAAGGCGAGGCGGATGCAGGGCGGGCACGGCGCG
AGGGGCGGGGCGAGTCAGCCCGAGGCCGACGCGGGGCTACAGCGAGGCTCCATCCGCCCTAGGCCTCGCTCCGGCTCCGCCTTGCCCGGCTACG
CAGGCGGTAGGGCTGGGGTAGGCGCCGGGCGGCACCATGGCGGCGGCAGCGCCTGCTGCGGCGGCTTCTCCCGAGGCGCCGGCCGTCTCGGGCA
GCGCAGACCCGGAGACGGGAGACGAGGACAGTCGTGAGGTCCGAGTGCTGCAGAGCCTGCGCGGCAGGATCTGTAAGCGGGGCCGGGGCTGAGG
GGACCCCCGGGGCGGCGCGGAGGGTGGGCGGCGGNNNNNNNNNNNNNNNNNNNNNNNNNNNNNNNNNNNNNNNNNNNNNNNNNNNNNNNNNNNN
NNNNNNNNNNNNNNNNNNNNNNNNNNNNNNNNNNNNNNNNNNNNNNNNNNNNNNNNNNNNNNNNNNNNNNNNNNNNNNNNNNNNNNNNNNNNNN
NNNNNNNNNNNNNNNNNNNNNNNNNNNNNNNNNNNNNNNNNNNNNNNNNNNNNNNNNNNNNNNNNNNNNNNNNNNNNNNNNNNNNNNNNNNNNN
NNNNNNNNNNNNNNNNNNNNNNNNNNNNNNNNNNNNNNNNNNNNNNNNNNNNNNNNNNNNNNNNNNNNNNNNNNNNNNNNNNNNNNNNNNNNNN
NNNNNNNNNNNNNNNNNNNNNNNNNNNNNNNNNNNNNNNNNNNNNNNNNNNNNNNNNNNNNNNNNNNNNNNNNNNNNNNNNNNNNNNNNNNNNN
NNNNNNNNNNNNNNNNNNNNNNNNNNNNNNNNNNNNNNNNNNNNNNNNNNNNNNNNNNNNNNNNNNNNNNNNNNNNNNNNNNNNNNNNNNNNNN
NNNNNNNNNNNNNNNNNNNNNNNNNNNNNNNNNNNNNNNNNNNNNNNNNNNNNNNNNNNNNNNNNNNNNNNNNNNNNNNNNNNNNNNNNNNNNN
NNNNNNNNNNNNNNNNNNNNNNNNNNNNNNNNNNNNNNNNNNNNNNNNNNNNNNNNNNNNNNNNNNNNNNNNNNNNNCGGGCGAGCGGGGCGCC
CCGGGAGCTCGGGCAGGACACTTGTGCCCGCCCCACCTTGCCGCGGCGGGGACTTGAATCGAGAGCCGGCGTGACTGACGGTGACTTGGGGCAG
GATCTAGTGGCTTCCTGTGAGCAGGTCTCAAAACTCAGTCATCCAGTCCGCGCTCAACCCACTTGATTCTCTCCCGTCCATTTGTGAGAGCCGC
ACCGATGAGTGTAGACTCTTACTCAGAGACGGGCCAGTTCGTTTGTCATTCCTATCCTTCCTCTTTAAAACGACCCTTTGATATTAGATCGACT
TCCCCCAGCTTATTGAGATGGTCCCTTTTCACTGTATGACTGGCGAATCAGTACAGTTTATTGTTACTTTAGTTCAAAACCTTTTTTAATTCAG
ATTATTTTATCCCCAGAATGAAATCGGTCTCCTAAATAATGCCTCGCTATAAGAGATATTTTATATGTTGAAAATTCAATTGTGTTAGAATGGC
TGATACTGCTCTTTCTTTGGCAGAGTATAAACTTTAATTCTTAAATCTCGATGCTTCTTTTGGATTCTCCCACTTGAGTTTTTGATGTTACTCC
CCTTTCAAGGATTTGGAATTTTATTAAAACCCCAGGAGCAAGCATGTTAAATGTTACTTTTCAATTCCCTGACGTCATCCTGGGACTCCCAATT
CAGACACTTTTAAGTATTAAAACTTGGGAAATTACACCAGAGCAGTGGGTGTTTTGTGCGTCTTAAGTTCCCAGTATTTTAAGTTACTTTCTTA
GGGTGTAAACTTTTCACAAATTAGCTTTCTTACAGTTAATATTTGCATGTATGTAATGTTTGGGAAAAGCCAAATACACTAGAATTTTCTTCCC
CTACTAATTAGGTTTTTCAAATTTTTACTACTTTATATTTTTCTCTGACTTGATCCTAGACACTGTTGAAGCCTTGCGAATCTATAAAAGCAGA
TTGTGTTGTCGGAAGACAGTGTGCTCTGTTGGAGTTGAGATTTAGGGTTGGGCTGTTTTTAGGACTAACTTACCTTCTGCTTTGACCTGATGCA
TAGCAAAGGTTCTGTGAACAGTGTGGTAAAAATATCACTCCAAGTGAAATTCGCGTCTGCAGATTAAAACACACACACACACACACACACACAA
GCACACAAAACTTGGTTTCTGTGGCTTAGGCAATCTCACTCCCAGAAATTCACCATTAATTTCCTGGGAATATTTTTATTTTAACCCTAGTTAA
ACTAAACCACTTGTTTCTACCCTAGACAGTTTATTTATTTTTTATTGCTCATCTTATAGCTCAGGTCATGTTGTGACTGTTTCACAAGGATACA
TACTGAAATCAAGAACACCCCTCCCATTTCTTGCCCTTCTTTTACCTGGTATGATCAAGGTTGGTTGCCCTCCGGATCCTTGTAAGGAAATGCC
CTTCTGTGTTTCCTGAAACTGACACGTGGGCTTTGTAAGGTGATGAGAAGTGGCGGAAACATTAGCACGTGCTGAAGTCACAGAAATGGGATGA
TGGCAGTTTGACAATGAAGAATCTAAGCAGTTTGCGAGTGTTGAAGTCACCAGTCCTTTCTACCACACTGAGAAACCTTGGGGAGAACCTGGTA
GCTCCCTGTTAGCCTGGAGATGAGCTGTTAAGCTCAGAACTGCTCTTTGGGAGCCTCTCATCTGATCCACCTGAGAGGAAGCACTCCTGGGTAG
TGTAGTCCGAATCATCCTTAAGAAGAGCGAGGGTCGCCCGATGTTTATATTGTGGAAGTTCTAGAGGTTAGATAATGGTCCACACTTTCTTCAG
TGTTTCATTTCTAACTTATTTGTGTCCCATAGATTTCACAAGGTATAAATAGTATCAAGTTGACAGATCAGAAAACCAGCGGGTGGGGGACATG
GGCTCAGTTGGTAAGTGCCTGCTTAGCAAGCAGGATCACCAGAGCCCAAGTAGAAANNNNNNNNNNNNNNNNNNNNNNNNNNNNNNNNNNNNNN
NNNNNNNNNNNNNNNNNNNNNNNNNNNNNNNNNAGAGAGAGAGAGAGAGAGAGAGATCAAAACACCAGATGTTGGTCTCAGGCACCCACACCCA
TGGGCATGCACATGCACACACAGCTAGTGCACACAGTCAGTACATTAACAAGTACACACACCACACAAACACACACACACACACACACACACAC
ACACACACACACACAGAGACCATCATATAGCTGTTTTCACACAACCAGTTTAAAGAAATCTATTATCGCAGACAGTATTTTGTGTTATAGACTG
ATTAGTGCCCAGTTTCTTACGGCATTTTAGTGTCCTAGATATCCTGAGGGTTTTGAATGTTCAGCTTCCTTACCTGAATTCACGACACAAAGTT
GTTAGATATCTTAGAATTTTCATCTGAACCTTTAGTAAACAAAATTAGGAGTATTTTTGGTCTGAACTACTTTGATATAAGTAGCATACCTAAA
GGTAGTTTGTATGCACCCCCCCTCCATTATACCCTATATTCAGGTGAAAAAAAAGTTTTAGATTTATATGTGTGTGTGTGTGTTTATGTCTGTC
TGTCTGTCTTCAGGCTTGATATGGCCTCGTTTTTGGTTACCCCCTTTTCTAATTAAGTCAACTGTAAACATTTTGAAAGGCTCTACACTACCTT
ACACAGGGCTTTTCTCTCAGGGATACCAGGTTATAAAGGCACCAGCCTGCGAACATTTGTGGGAAGTGTTTGATATATTGTTCAGTGAGATCTG
TGAGACAGTGATGTGGCCCAAGAACTACTCACTTACGATTTTGACATTTTCAGACCAAGAATCACTTCCGGCTGTTTGACAAAGGAGATAGATT
AAGTACTTAAGCTTAGGAGGCCTGGTGTAGTCAGTACCTTCAGCCCCAGCCCCCTAAAAAAAAATCTGGGTCAGCCATGGGCCATCTCTTAGGA
AGGAGTTAAGTAGCAGATAAGCCTTATCTGATGCTCTTGTCCAGCCTGCACTAACGTTTCCTGGTGTAGACAGCAAATTGGAAGCAGAAAGCCC
GTGTTCTGCTTCATACTGTGTTAGGTAATATTCCTGTGACTTCAGGCAGCTGTTTACTCTTGAGCTTGTGGTTGTTTTTATCTTTCTCATCTTT
AGAGTGGACTAGTGCTTTGTCACCAGACACTTGGCTCACCTTGTTTCCTCTCCCTGAGATTGTGTCCCCCCCTCCCCTTATTTATGTCAGAGAG
CCACATATCCTTCCAATGCAATCCAAGTCTCCTCTGACCAGATTTGCCCTTCTTTCTAGCCATATGGCTTTGATGCCTAAAAAAAGAAAAACGT
AATTCATGACCATTTTCTTCTTATAAAAATCATTTGTATATGTCCCCTGTTATGTTAATTTTAGAATTCATTCTTGTTTTTAATATTTGTTGCT
GCTGGTGGTGTGTGTGTCTCAGTCTCACTAGATCAGGGCAGGCCTTTAGAAAATACCCTATCTCTCAGTGTTATAGATACTTTCAGAGCACTGT
GTATCTGGATAAGAAAGAATTTCCATATCTCTGGACAGATTAGCAGGGTTAGCTTTAGTAAAGGAAAGCTTCCTGAGTCTCTCTGGAAGTTCTT
TATTCTTTTTCTTGAAAAGTTGTAATGTCTGCTAATCTTAGGTTTGAACTGAGGCCAAACTTGCCTCCTTAGGAAAAGGATTACATTTTTTCTA
AATGCTGGCTTATTAATTAGAATATTAATTGTTTCCTGACTGTGTCCATTAGTTTTGTTACTAATTGGTCCCCAGAGCTTGGAAAAGAAAATAT
TAAACTCATACTTTACCTAGAATTGTTTTTATTTGACATGACAGGTTTAAATGTTTTCGTACTAAGATGTAAATCAAGATGTTTTATTGACTAC
CCAAGGGTTGAGAGGAAGAGATTTAAAAGGGATTATTCATGCTAATAATTCATTATTATCAGATGTTTGAAATGAGATGATGAATACTTAGTAG
AGGAATTTAAAAGGGTTTACTCATGCTAATAATTCATTATTGTCAGATGTTTGAAATGAGATGATGAGTTCTTTAGGACGGAAGAAGAATCCAT
CTTTGAGATGGATAGAAACAGAGGAAAAAGCGACCTTTGTAAAAGTTCACAGAGCATTCAGCTAATCATTTGCTCTGTGCAGGACAGGAATAAA
CCTCAGGGAGTTCATAGAGTTTTTGTAACTGAGAACTCTTTGAATAGCCCTGGACTGACTGGGAAGTAATGTAGCTAGAATAAAACCACCATTT
TTATCCTTTAATTATAAACCCTAATCCTATTTCCTTGTTAACGTGCTTTCTGAAATTATTTCATAATATCAGATTCTGTGCTTTACCTACTGAT
ATATTTATACCCTTTTATACCCTAGTAACAGTTTTGTTGTATAGTCATGTGTTATTGTTAAATTAGGAACATTTTGTGTATGTTAAATTTTTAT
GACATCTAGTTTTGTGTAATGTTTGTTTTTTGATTTTTTTTGTTTTGTTTTTCGACACAGGGTTTCTCTGTGTAGCCCTGGCTGTCCTGGAACT
CACTCTGTAGACCAGGCTGGCCTCAAACTCAGAACTCGCCTGCCTCTGCCTCCCAAGTGCTGGGATTAAAGGCGTGCGCCACCACGCCCAGCTT
TGTGTGATGTTTTAATCATCAAAAATCTCTAGCTAGATTGGCTTCATTCTCTTTGTGTCTGTGTGTGTCTGTGTGTGTGTGTGTGTGTGTGCGC
GCGCGCAGGTACATATGCATGTGTGTATATGTAGATGCCAGAGGATGATCTCAGACATTGTCCTCAGGAAACACTGTCCACCTCTCTTATGGCT
TGGAGCCCTACTAATTAGTCTAGACTGGCTGGCCAGCAAACTCCATGGATCCCTCTGTCTCTACCATCTCTGTGCTGGGTTACATGCAGGACCC
TTCACACCCAGCATTTTTGCCTAGTTTCCAGGGATTAAACTCAGGTCCTCAGGTTTGAGGCAACCAAACATGACTTACTGACTGATCTCTCCCC
CTAGCCCCAAAATGGCCCATTATAAGGTTATATCAAATATGAGCCAGGTGGTGCTGACATAGGCCTTTAATCCCAGCACTTGGGAGGCAGAGAC
AGGCAGATATCTGAGTTCAAGGCCAGCCTGGTCTACAAACCAAGTTCTAGTACAGCTAGGGTTACACAGAGAAACAGAGTCTCCATTGCCACCC
CCACCAAAGGAAAGAAGAAAACATTTTTATTATTGAGTGTGGTTTCTTTTTCTTTTTTTTCTTTTATTGGGTATTTTCTTTTCTTTTTTTTAAA
AAGATTTATTTATTATTTATATGAGTACACTACAGCTGTCTTCACTACATTTCAGAAAAGTGCATCGGATCCCATTACAGATGGTTGTGAGCCA
CCATGTGGTTGCTGGGAATTGAACTCAGGAACTCTGGAAGAGCAGTCAGTGCTCTTAACCACTGAGCCATCTCTCCAGCCCAAGCCTTCTCTCC
AGCCCGGGTATTTTCTTTATTTACATTTCAATTGTTACCCTGTTCCTCCCCCAAATGTTATCATCCCCCCTCCCTCTGCTTCTATGAGGGTGTT
CCCCCACCCACCACTCCTGTCTCCCCACCCTCGAATTCCCCTCCACTGGGGCATCAAGCCTTCACACGACCAAGCGCCTCTCCTCCCACTGAAG
ACAGAGAAGGCCATCCTCTGCTACATATGTAACTGAAGCCATAGGTCCTCCXEGTGTACTCCTTGGTTGGTAGTTTAGTCCCTGGGAGCTGGGG
GGGGGGGGGATATTGTTCTTCCTATGGAGTTGCAAACCCCTTCAGTTCTCTCAGTCCTTTCTCTAACTCCTCCATTGGGGACCCCATGCTCAGT
CCAATGGTTGGCTGTATTTGTCAGGCTCTGGCAGAGCCTCTCAGGAGCCTGCCATATCAGGCTCCTGTCAGCATGCCTCTTGGCTTCCACAATA
GTGTCTGCGTTTGGTGACTGTATATGGGATGCATCCCCAGGTCGGGCAGTCTCTGGATGGCCTTTCCTTCACTCTCTGCTCCACACTTTGTCTC
AGTATTTGCTCCCGTGAGTATTTTCTTCCCTTCTAAGAAAGATGAAGCACCCACACTTTGGTCTTCCTTCTTCTTGAGCTTCATGTGGTCTGTG
AATTGTATCTTGGGTATTCTGAGCTTTTGGGCTAATATCCACTTATCAGTGAGTGCATAGCATGTGTGTTCTTTTGTGATTGGGTTAACTTACT
TAGGATGATATTTTCTAGTCCCATCCATTTGCCTACGAATTTCATGAAGTCATGGTTTTTAGCTGAGTAATACTCCATTGTGTAAATGTACCAC
ATTTTCTGTATCCATTCCTCTGTTCTTTCCAGCTTCTGGCTATTATAAATAAGGCTGCTATGAACATAGAGGATCATGTGTCCTTGTTATACAC
TGGAGCATCTTCTGGGTATATGCCCAGGAGTAGTAGAGCCCAGTCCTCAGGTAATACTATGTCCAATTTTGTGAGGAACCACCAGACTGATTTC
CAGAGTGGTTGTACCAGCTTACAATCCCACTAACAATGGAGAAGTGTTCCTCACATATGTACAGCTTTCCTCTTTCTCCACATCCACACCAGCA
GCTGCTGTCACCTGAGTTTCTGATCTTAGCCATTCTAACTGGTGTAAGGTGAAATCTCAGGGTTGTTTTGATTTGCATTTCCCTGATGACTAAG
GATGTTGAATATTTCTTTACCTGCCATTTTAGCCATTCGATATTCTCAGTTGACAATTCTTTATTTAGCTCTCTTCCCCATTTTCTAATAGGGT
TATTTGGTTCTCTGGAGTCTCACTTCTTGAGTTCTTTGTATATATTGGATATTAGCCCTCCATCGGATGTAGGGTTGGTAAAGATCTTTTCCCA
ATCTGTTGGTTGCCATTTACTTCTGTTGACTGTATCCTTTGCCTTACAGAAGCTTCACAATTTTATGAGGTCCCATTTGTCGATTCTTGATCTT
AGAGCATAAGCCATTCGTGTTCTGTTCAGGAAATTTTCCCCTGTGCCCATGTGAGATCTCAGAAGAAGATGGAAAGATCTTTCATGCTCATGGA
TTGGCAGGATTAATATAGTATAAATGGCCATCTTGCTGAAAGCAAGCTACAGATTCAACGAAATCCCCATCAAAATTCCAACTCAATTCTTCAT
AGAGTTGGAAAGAGCAATTTGCAAGTTCATTTCGATTAACAGGACAGTGAAAACTATTCTCAACAGTAAAAGAACTGGGGGAATAACCATCTCT
GACTTCAAACTGTATTACACAGCAATAGTGATAAAAACTGTATGCTACTGGTGTACAGAGACAAGCAGGAAGATCAAATGAATAAAATTGAAGA
CCCAGAAATGAACCCACACACCTATGGTTACTTGATCTTTGACAAAGGAGCTAAAACAATCTAGTGCAAAAAAGACAGCATTTTCAACAAATGG
TGCTGTCTCAACTGGAGGTCATCATGCAAAAGAATGCAAATTGATCCATTCATATCTCCTTGTACAAAGCTGAAGTCCAAGTGGATCAAGGACC
TCCACATAAAACCAGATACACTGAAACTAATAGAAGAGAAAGTGGGGAAGAGCCTCGAACACTTGAGTGTGGTTTCTTATAGTGCTATTAATGA
TAGACTAACCGTGCATATTGAGGAGCCCCTACTTTACCTCAAAAATGAGGACTTGGGTGTGTCTTTCAGAAGATACCCCTCAAATTATTTAATA
GTTGCTTTACGAAGTGCACCATTTCTCTTAAGATAATACATCAGAGCCCTTTGCTTTAGACTTGAGTTTGTTTAATATACTTGTTTTGTATTTA
ATGCAGTACTTTTAAGAAATTCGCCTAAGATTTATTAAGGTTGTTTGAATCCTAAACATTTTCCAGTGGGCAGTAGTTAATTCAGTAGTTGTAT
ATGATACATAGTTGAGTATCTGATAGGGTATATCAACCCCTGGTGCTGAGAAATAGGTCTAAGCTGTGAGTCGGATGAGAAAGTCTTTACTCAG
CGTTTTACTCTGAAATTTATACTAAGCAGTAGCGTTCATTCATTCTCTGCTTAGAGAGTTAGAAAGCTTTAGAACTGGAAGGAAAAGAACACTG
TTGTTCTGTTCATGTGTACGTGAAGACTAGAGGACCCAAGTGGCACACGTTAATCACTTGTTGGACACTAGTGCACTGTTTTTTCTAGAGTGCT
GTTGATTTATTACTATGGATGTTGAAAATGCACTAGATTTAAGCTATGAAGACTGCTTTACCTCCCCGATGGTTTTTAGAGCGGTGCAGTTGAG
GTTTGTACCCATGCTCATCTGCTCCTGCTAAGAACTTAGTGACCTGATTAGGACCAGCAATGCCGTGACCTCTGTGGACATAATCTGGATGTTT
ACTGTTTGTGTCAAATCCCACCTTAACTTTTTGCAGTCCATCAGTGTCTCTTGAATACTTAAAAACGTTTGATATCCACACTCTAAATAAAATC
ATCATTTTCAGCGTCTACCAGCTTAGTTTGTATCTTTTTAGAGGTAGTTTAAGCATAAACAAATAATTCCTTGTGTATTGTAGCTTTTCCACTT
CAGAGAAATAGAAGCAAAATATGCAGTGTTCTGCATCTTTTTAAATATAACTTAAAGATGTTTTTATATCCTCACTTAAAAATAATATAGTATG
TATAATACCTCATCTCACATCATCTAGATGTATTGCATTTTAGCTAACCAGTCACCTGTTGATTCCAATTTAAGTTGTCTCTTGTCTTTGCAAT
AACAAACATTGCCACCATAAATAGCCCTGTTTATCATGTATATGTGTAAGGTGTGTGTGTGAGTGTGGATGTGTGCTACTAGGGAGAAAATTCA
GGGTCTTATTTGCACTCTACCATCAAGCCAAGCTGTAGGCCATGTGTGTGTGTGTCTGTGTGTGTGTCTGTGTGTGTGTCTGTGTCTGTATGTG
TGTCTGTGTGTCTGTGTGTATGTTTTTGGAACCACAGTTTCTCTGTCTAGTTCTAACTGCCCTAAAACTCACTCTGTAGACCTGGCTGGCTGGC
CTTGAACTCAGAGATCCACCTGTCTCTGCCTCCCACGGGCTGAGATTACCATTGCCTGGCTGCTACATGTTATTTTAAATGTGAGCTCTTGCTA
TGCAGCCCATGTTGACCCTGAATTTCGGATAATATTCTTGACTCTTGCACTGGCTGAGTGTCCTCCGATTACAGCTGTCCACCACCATGTCTGG
GCTTCATACAGATTTTTAAATTAAAGAGGTTAATAGAAAAATGAATGCAAAGACACTCCACAGAAGAAAATAAATTATCTAGTAAATATATGAA
AATGCTGGTGAAATTGACCAGAAATGAATCAGAGAAATAAAAGTATAAATACCTCAACACTTAAAAAAATGGAAACCTTGTATATTTCAGTATT
GAATGAATGCTTAAGGAAACAGATACTGTTCGTACTTTCATTGTGATTTTACGTTTATAAAACCATGTTAGAGCATTTGGTAGTATCTAATAAA
AACCTAGATGTATTTTTCTTATGCTTTTACTTTTGCCATCTCATCCTGCAGACACAAACATATTTTGTGTTGACCTTGTTTGTTTTTTAAAAAG
GCACATTGAAGTTCTAGTAACAGGAAACTGGTTAAAGTGGTTTGTTCATAAATATATTCTATAGCAGTTAAACAGAATAAACTACATCTATATT
ATGATGACCCCAAGGTGTATTATTGAGTGAAAAAAAGCAAATTGTTAGAGTAGTATGTATGTTTATTATCTGTCATCCATCTATCCGTCTGTCC
ATCTATCCCTTTATTCTGTCTCTATGATGCCCAAGGATCAAGCCTGGGACATCACAAATGCTAATTAAATTTTCTATCACTGAGCTACAAGCCA
GCCCCTTAATGTATGCTTTTAAACTCTTGGAACAGTGCGTTTTTCCCCCCTATAAATTAGATAAATTTTATTTAAAAATGTCTACAAAGATGTA
TATTGATTTTTTCCCCAATGATGGGCAACAGGAATTACTCTTCTGTAATGACTTGATTTTCAATAGGGAGTATAGTATGTATTTGAGATGTTAT
TTCAATTTTCTATTTGTACAAATGAATTTGATAGTGTCAGATATTGTGAGACTCAATTTAACTTTTGATTGAATACTATATCCAAAATCAGACT
TAGTAACATTTTAAGCATACATTGAAATGAATAATATCAAATTTTCTGTTTTCAATTTCTACTTACTAGTTTCTATATAAATGTATGTAATTGT
GTGGGAAGGTGTGTGTCTGTGTATGTGTGTGCATGTATAGTGGACTACTTCTAGGAGTTGATTCTCTTCTTCCAGCTCCACCAGGTCATCAGCA
TTAACAGCAAGTGCCTGCACCTGCTCAGTTATCTCACCAGCCCTCCTTTTATGTCTTTTCGGCAATTTTAACGATGCCTATTTAATCATGAATG
TGTGAGTGCAGGTGCCTATCGGAGCTAGGGGAGTTAGACGTCGTTCGGACCACCCTCTATGGATGCCTGCAACTGAACTCAGGTCTTCTTCAAG
AGAAACATGTGTTAGCCCCATAATTTTATTTTGAGGTTAAAGAAAATGAAACTCAGAAAAATTCAATGGATTCCTATGTACTTTGCCTGTTTGA
CCAGTTGCTTATGCTAAGAAGATTGACTTTTCGAAAAGTTAATACTTTTCAAAGGAGTGTTATATAAAGGTCCTGAATAATTTTGAACCTGTGT
ATTTGGACAGTCTTATTTATATAAAAATTGCTCAGTATATAAGCGGAATGAAGCAGTGTTTACTGAATATTTGCTGCTTTCCCGATATTGGGCT
AGGATACTTTGCTTCATTTCGTTACAGGATTGCTGTTCTTTAAGAACCAGCAGCAGAGAGGCTCTTTAGCAACACCAGATTTCAGCAGGCTTGT
TGACAAGGCTCATGTCCGTTCCCTACACCAGGTTTTCTGTCTTGTAGTGTACTGGCATGAATTCATTTTTGTTCTCAAGACATGGTGATTTCTC
TAAATTAACAGTGGCCTAATGAATAGAGATTAAAGCTAGATTGTTGTCAAACACAGTAAAAATGAGTCCAGGGATTTGTAAAACTATTCTTTGG
TTTTCCTAACCCTGCTTTTGTTGGTTTTTCTCTTCTANNNNNNNNNNNNNNNNNNNNCCCCTCCCTCCCTCCCTCGGTCCCTCTCTCCCTTCCC
CTTCCTTTCTTCCTTTCTTTCTCTACTTCCCTTGTTTTTTGACATGAAATCTCTCTCACTATGTAGTTCTGGCTGGCCTCAAACCCTCAGCCTA
GTGAGAGTGCTAGAGCTCAGGTGTGTGCCACTGATCTCTCTGTTCTTTAATGCACTTTCTTGCTTTTGAGTGGTCCCCCTAATATGTACACACC
TTTTATAAATGGGAGTTGGGTATGTGTATCTTCTTTGATAAGAGTTCCATTATCAAAGATAACACTCACATCCCATGTAAGGCCTGTCTACATG
CCCCGAGACTCTCCCAGCATCAGCTTTTAGCTTTTTGCTTGGCATTTCAGGCTCTTTAGGTTGCCTTATGAGCCTTGCTAAGTATCATGGAGCT
GTAGGGACCAATGGCCTAGCTCAGCAGAGATTACACCATAATCTCTGATTGCTTTCTCACCATGCACAGGGGCCTTTAGGGACCTTTAGGGACC
TGCTCGAAGCTGACACCAGAAGTGAGCAACGCAGACCACAGCAACATCTTCCTGCACTTGGTAACATACGTCTATAACCTATGGACATTTCCTG
GCAATACCTTGTGAAACTAGCCTTTTCACGTACAGTAGTTTCCTAACTTCTTGTTCTAGACTAAGCTTCAGTCAGAGGTGAGTAGCATGATCAC
AATATAGATAACTCGAACAGTTATTATGCATTATCTTTGATCTGAACGTGCTGCCTTGAATAAGGGAATTTTATATAGATGCTAACTTTTAAGA
ACCTCTAGCCCAGCAAGAGTACTAGTTCTTGTTTTGATTTGCTAAGTACTTACTTTCTTTTAGATATTGTGCCAAGTGCTTTACCACAGTTAAT
GTTCACAACAGTCCTAAGTATTACCTCCTTTACACAGGAAGTTGAAACTAAGGACATAACAGATTCTAAAGTACAAAGCTTATATTGAAACTCA
GATGTCTGTCTTAAAATGCACTCATTTAACTTGCTGTATTGTCACTACTACTTGTTTTAGAATTCCCTGGTGCAGAAGTTGAAATTAAAATTAG
CAGAACATTTTGAAGACTTTACTATATATTATCATATCATACCTAGGGTTCTCTGATGTATACTTAGGTAGCATTTTAATTTTATCTAAGCTTA
TCAACCTGAGTCCGTATTTTCAAATATTTTAAAGTTTTTTAAAGATTTATTTTTTTATCGTCAGTGTATGAAAGCTTTGTCTGCATGTCCGTGT
TTACATGTGTACCTCATAGCCTCAAGCAACACCATATCCCCTAGACTTGGAGTTAGCGGTTATTGTGAGCCATCATCCGGCTGTTAGGAACCAA
ACTTAGTTCTCTGCAGTAGCAACAAGTACTTTAAACTGCTGAGCCATCTCTCTTGCTCCCACAGTATATTTTTAAGTATGTATGATCCTTCTTT
GTTTTTTGTTGTTAGTGTGAATATATGGTGACGTTTACATACTGTCATAGCTCTCACTATGTAAAAGCTAAAAGCTTCTGTTTAGGTTGACATC
TCTGAGGACATCATGTTTTGTGTCACTTGAGCCAGTTTATACCAGATTCTATGAATTCTCTCTCTGTAGTTTCTCTTCAGTTTTTTCTTTCATC
TCTTTCCTTTTCATTACCTCAGTCTAACTTAGAACTCTGTAGCCTTCCATTTTAGGTTCTCTGTTGGCCTCCATCCTGTATCCTCCTGTTCTCC
CTTAATCCCCCTGCCTTAGTTTGTCATATTCACTGCTGCCTTCAAGATGCTTCTTGTTCCCACCTCCATTACCAAAGATGACATCACATCCCAT
GTAAGGCCTGTCCGTGTGGTAGGCCTTCTATTGCAACATTGATCTTCTGGTCTTAATTTCTGTATTTTTTTTTTTTTTTTTTTTTTTTTTTTTA
CAGTTGGATGATCTTTTTTTTTTTTTTTTTTCTTGTACAAAGAAAATTTATTTCTCTATGTTAACATTTTTCTTAAAATGCCTAGGCTTACTTT
TCTTTTTTTTTTTTTTTTTTTTCCCCCATTTTTTATTAGGTATTTAGCTCATTTACATTTCCAANNNNNNNNNNNNNNNNNNNNCTTTCCCCTG
TACCGGGGCACACAAAGTCTGCGTGTCCAATGGGCCTCTCTTTCCAGTGATGGCCGCCTAGGCCATCTTTTGATACATATGCAGCTAGAGTCAA
GAGCTCAGGGGTACTGGTTAGTTCATAATGTTGTTCTACCTATAGCGTTGAAGATCCCTTTAGCTCCTTGGGTACTTTCTCTAGCTCCTCCATT
GGGAGCCCTGTGATCCATCCATTAGCTGACTGTGAGCATCCACTTCTGTGTAATTTCTGTATTTTGAAAAAAAAATGCACCATTGAAAGATTTT
AAGTAAAATAACATGACATTCTTTAAAAATCTGCTATGTGTAACATATTAACTTATTAAGTAAGTGGTACCTTTTTATTATGGTTTGGCTTGAC
TTTTTCCTGCTCCAAATAGTCTTTATTATTATTATTATTATTATTATTATTATTATTATTATTATTACTTTGTTCAGGACCCTGACCTATTATG
ATTTCCTCTGAGGCTTGATCCCTTTAGGATCTATGTTTGCTCCTTTTCTTCTTTGTTTTAAAGGTATGCTTTGAAGTAGGGCTGGGTTTACCAA
GTCTCTTTCAGACAAGGATAGTCTCACAACTACTATTTTCGAAAATCTTTAAGAATAGAGTGGAAAGATAGATAATCATGCTATTGGCTTTTGA
CTATGATTTATTCATTGATGCTCTTGCTGCTGCAGATTTACTTTATAAAAAGGAACAGAATTGCTTACCTAATAGGGTTGTTGTACAAATCAAA
GGAGACATTTGAGAAAATCCTTAGTTGTGGGTCATCCAGATATTTAAGAGATAGTGTATCCAGTACTATGCTCACCTAGCACATTCTTAAACAA
CAATAAAACCCACTGATAAGTATATATACAGAATCTTCCCTAAAACATCTACATAAACACGTGTACACACACAGGTGTACAAACCACACTTATC
AAAGTAAGTGTGAGCAGCTTTGATGTAAGTATTCTAGTGCCAGGTACAATTTATATGGTAGACTAGGAAGATGGCTCAGTTGGTAAAATGTTTG
CTGCAAATCATGAGAATCTTAGTTTGATTCCTGCAACTCACATAAAAAAAAAAAAAAACCCAAATATGATGAGATGCACTTGTAATTCTCTCTT
GGGGGAGATGGCACAGGAGGACTCCTGGGACTTGTGGGTTAGTTAATCTAGGCAAACTTCTTAGCTCCACGTTCACTGCGAGGCTCTGTTCCCT
AAAAATTTACATGATAGGCTCTAAACAGAAGCATGCCCGCATGGAGTTACTGTATAATCTACACAGAGAGGACAAGCATCAAGACAAATAACGT
CGGGGCTGGAGTGGAGGCTAAGCAGTTTTATGAGCATATATACTCCTCTTAGAGGGGATGTGAGTTTAAAATTCTCTTAGAGAGGATGTGAGTT
TTTAAATTAATTTAATATAAAAACTGATAATAGCTGAGAATGGTGATAACCCAGCACTTGGGAAGAAGAGGTAGGAGGGGGAAGAGTGCAGGGT
TATCTCTGTCTGTCCAAGGCCAACGTGGAAGCTCTGTCTCAACAAAAAAGGGAAAAATTGTGTGTGTGTGTGTGTGTGTGTCTGTGTGATGAAG
AAAAGCTATATCTTATTCGTCAGCTAAAACTGCTGTCATATAATGTGAAGGTGTTTTGGCCAACTTACACTGCATCTATGAAAGAAGAAATATC
TAATGAAGAGTTTATTTTGTTCATCTCTGAAAATTTGTGGTTTCATAAAAGGGACAATGGGTGCCCCGTGGATTTCTTCTTTTTTGTTTGTTTG
TTTGTTTTGGTTTTGGGGTTTTTTGTTTGTTTGTTTGTTTCCTTTGGTTTTTCGAGACAGGGTTTCTCTGTATACCCCTGGCTGTCCTGGAACT
CACTCTGTAGACCACCAGGCTGGCCTCGAACTCAGAGATCCACCTGCCTCTGCCTCCCAAGTCCTAGGATTAAAGGCGTGACCCACTACGCCCG
GCGGATTTCTTCTTAATACATACGAAACCTGTAACTGGTACTGCTTGCTACCAGAAACTACCAAAACTCAGTGTCCTTCTGTTTTCCAGTTTTC
TAGTGAATGACTCTGATTACTCCAACTTAAATTAGTAGAACTTACAAACATAAACATAGCGGCAAGATAGGTTAGGAGAATTTCTAGCTTTAGA
GTCTCCATAATACCAGAAAGCACACAAGTAATGCTGTACCGCTAACTCACCATATCTTGTATGAGTATAAAGTTGATTCTTCTTAAGAATAGAA
CTCAGTATGCAGACTGGAGTTGCCTTGAACTCAGAGATCCATTCACAAAACTTCCTCAGTGCTAGGATTAAAGGTGTGTGCCACCATGCATGGA
GAGTCTTTTTATTTTATAATGGCATGTTTTAAAAATACCTAACAGTGCCCTTCCTCTGATGAATTAAATAGTCTATTCCAAGTTTCCTCCCATT
TAAATATGCTCTGTAGATAAAAGCCTAAATGAGGGGTAAAACAAAGACCGTTTAGCAGGAGCTGCCAAACAGAGGGTGGGTTAGTGCTAAGATA
CTAGAGAGTGGCCACATACTCTGCTATTGACACGCAGTAATTCGATTCGGAAGTGCTTAGTGTTACTAGTGTTCGTAAAGGTTCTAGGCAAAGG
AAGGTCTGAAGCTAATTGTAGAACGCTAGGGTATGAGTGAAAGAGGAGGGTTAGAGGATGGGTGATTTTGACTCAGTCATGTGAGTTATAGCCT
AAACTTGCCTGGAAGTGGTAGGACCATCTCTGGGAAAATGCAGGCTTCAAATGTGCTTCACTTTGTACTTTATGTACTTGATGGTGGAGGGTGC
GCTGGCAACACCTTCTTCTGCTTAGAGATGCAGAGAGGCGGCAGTGCTTTCGTTCGAACCATCGCCTAGGGTGCTTTATCAGTGAGCAGTAATC
TCTACTGTAGTTTGGAATTACAGTTTAAAACTCCTCATAACTGATAAACATTACTGTGATTATTTTGGAGAACTGGGTTTGATGGGATGAATTT
TCAAAACAGCTTATTTGAATGTCAACCAGTGGTAAATAGTGAAAAAAAAAAAAAAACATCAGGAAAACTACTTTTATAAAAAGTGGTGCTGGGT
GCATTTCTTACACTATCTGAGACTTGGCCTTTGATTATTTTAAGTAAATATCTGCCAATTCAGTTTCATTAAATTCTACAGACAAAGTAACCCT
TGTTTCTCTCTTGTGGGGTGGGACTGGTAGATTATTTACACATTATGCCCCATTATTTTCTAACCAGTGCTTAGCATGAATAAAACAGGGACAC
GTCCTAGGGTAATGATTTAATTTTCTAAACTCTCTTTTACATATGGAGCGTATTTATTGTACTCATATGTGTATGTATGTATATATATATATAT
ATATATATATGTATGTATGTATGTATCTATGTAACTAGGTGGTGTATTATGCACTCTATAAACTTTGGTTTTAAAACAAATCCATTGTGTTATT
CAGAGGCAAAGGAAATTCTGAACAAGTTTGACAGCAGTGAAAATAGAATTGTTAAGCAAGGTCCTATGTAGGGAGAGAGGAGGGACAGGGGAGA
GAACCTCAAACTCACAGGGATCCTCCTGCCTCTGACTCCAGTGGCTGGTATCACAGGCATGACCACCATTCCAGCCAGTTCATTTTGTTTTTGA
AATGTGGTTTCTCTCTCCCTGTTTGTTTTGTTTTGTTGTTTTGTTTTCCCTTAAGATACTTTCTCTGAATAGCTTTGGTTGTCTTGGAACTCAC
TCTGTAGACCAGCCTGGCCTCAGTCTCACAGAGATCTACCTGTCTTTGTCTCCTGAGTGCTGGGATTAAAGGCATGTACCACTACTACCTGGCT
GCAGGTTTTATCTTGTTGACGCCAGAGCTTCTGGGTGGGTCTCCTGTGTCACCTCCCATCGTCTTACTGTAGAAACACTGGAAACATTATGTGC
ACTCCAGCTTCCAGCTAGTCAGGATTGCACACAAATGTTCCCACCCACTTAGGCTTCTTACTGGCCCCTTCCTCACTGTCTTAGATTTGTACAT
TGGTATGGGATTTCAGTATACACATCAAGTAGACACTTGGGTGTCGTCCTTTTGGTACACAAATAGCTCATGAGACCTTCAAAGCTTGACTTGC
TGGGTTCTTTATTCCTTCAACAAACATATCACCAGAGTTTTCCTGTTTTACATCTTCGGCATTAGCAAGTTCTCAGACCTTGTACAGGAGCTGC
AGAAACCCTTAACAGAAGTTCACCCCATTACAAATTCTCTCAAGGAAACCAAACCTAAGACTAATTAGGGAAAAGGTCAAGTGTCATTTGAGGT
CAGGACTGAATGATAAGAATGTCCCAGCCGTGTAAAGAGTACAGAGATCCGGGAAGAAATAAACTTGATAATAAACTTGACATCGCTGATGAAT
GGAGAAAAGTGAACCAAGGGAACAACAAAAGAAGGAGTCAGAAGCGATACTTACGGTCATGCAGAGTGTGATTTAGAGATTAGACTTTATTCTC
AGACAAGTGGGATGAGCTGAGAAGTGACTGAGTTCAATCTTATGAGAAGATCATGCTTGGTCTGGATTATGGCTCAGCAATAGAGCATTCGTCT
ACTCTGCATTCATGCAGACCGCTTGGGTCTGATCCCCAGCATGGGAAAGGAGAGAAAAGATCACATCTCCTGGTGAAGAACAGGTTGGTGAAGA
GTAGCAGAAACAGAAGATACTGCCATGCTCCTCTGCAGTGATCCTGTTTGGGTGATTCTAGTGAAGGGGAGACGTAGCTGGGTTTTAGATGTTG
TCTTTTTGAAGATCTTCTGGATGTGCTAATCAGCTGGATTGTGTGAGGCAGAGGCAGGAAGACGATAAGTGAGAAGGAAGTGGTGGTAGACCAA
GGGAAGAGCTTATAGAAGAGGAAATAAGATTGGTTTTGGGGACTTGCTAAATATGAGATACCTGCCAGATATCTAGTGGTATGAATGAGGGAAG
GTCAGGCCTGCAAACACAGAACTGGGAGCTCCTAGCATTAACAGTGTGTACTGCAGTAGTTTATAGAAAAAGGAAGGGATGGTCTAGAACAGAC
CCCTGAGGCAGTTACAGCATTTCGATGAGGAGATGAGTGGAAGACATAGCAGAAAGGCCAGAAACCGTGTGCTGTGGAATCCAGGAACAGGGAG
CTTGTTACATGTCCACTCTGTTAGATGCTGCAAAGGTGTGGATGTAGTAAGAATACATTGGACATGGGTGAGCCAACATCCTTTGACATTGGTG
GCCTTGACTAAGCAGTTTCATTGTCACTTTGGAACCGGAAGCTGATTAGAGAGGATCACAGCGTGAATGGGAAGTGAGCAAGTGAGGGGCAGTA
CTTAGAAGAAATTCTCCTTTGACAGAGGAGTCTGGAAGTGGAGGTGTGGCACGGGAGAGAAGCCGGACCGAGCATAACGGTCTGCTGCTTTTGT
TTGTCTTAATTGTGGAGTGTTGTTTATATCCTGCTGACAGCAAACGGTAGAACGGAAATTAATGCTGACTCAGGAGAGATTCATTGCAGGAAAA
TTCTTGAGATGGTTCTGGTGAGACAGGAGGGAGAGAAACTGCCCTTTCATAGAGGAAGGATGCAGTCATGTGTCTATACATAGCTCCTCTGGTC
TTTTTACTTTTAAACACTTAGGTTTTTTCTTGTAATAAAAAATACTCATTTTTATAGACTTCTCAGGAAAGTTCACCACCTTTTAGCTCATCCC
CCAGTCTTCACTAGTCTCCTTTAGACCCCCTGACCTCTCTGAGCACAAGTTGCTTTTTTTCCCTGTACTCCATATTATGCCTTCTTCCAGACTG
AATTCATTTATAACCTTTGGGTCATGTAAATAAAAAATTTAACATCAATTTAAACTTTTGTGTCAACAGATGAAGCAAAAAATTTATTGCCATA
TCTTGGACCCAACAAAATGCGCGATTGTTTCTCCACTATAAATTTGGACCAGGAAGAAGTTTATCGCACCCAGGTTGTTGAAAAGTCTTTAAGG
TTGGTAGAAAAATTAGAAATTATTCATTTGATGTATATTCATGGTTTTATGTATTTTCCAGATTTTTATCAACAAATTGAGTTTCTTGATATTG
AAGCTAATATTTTTTATTTAAAGGTTTTGTATTCTATTATGAATTTATTTTTTAGATTTATAGAATCTAAGCATTTAAAGAGGCCTTGAATGTC
AGTAAGCTGCACTGACAACATTGATCTCCTTAGCAGTAGTTCTGGGAAGTGGTCATGGGGCATCTACTTCATAATGGTTCAGTCACCAAGAAGT
TCACACCTCCTAAGTAGGCTGCTTGGTCTTTGAACTCTTCTGACTCAGAAAGTGCTTATGTTTAATTGCTTAGTCATTATTAAAGTGACATCCA
GTCACGTGCCCAGCGCTTGCTCAGTTCTGGGTTCTGTTCACTCATGTCTCTAAGAGTGACCCCAGTGAAGTGCTTGCTCTCTCATGTGGCCTTT
CATTGCCTTAGGAAGTAGTTTTTCTTAGTTGTCCTAGCTCTGTCCCTTAGATTTCTGGGGAACAATTTTAGTCCATCTTTTATGTGACAGCATT
AAATGTTTGAAAACAACTATTATAAGCGTTCAATGTGCTCTCTAGGCTAAATAGTGCCTATTTGTTTGAGCTTTCCTCAAAGCACATCATTTTT
ACTTCTCCAGAGAACATATTAGCTCAAAGTTCACACAAGTTGAAGCTAGAGAGGTCGATGGCTTTCTTGGTAAAGTACTTGCTGCACAAATAGG
AGGTCAAGTGTTACATCCCCAGTACCTATGTAAGAAAGCCAGGTACAGTGGCTCCCATATAGTTCCCAGTGCTGGGGACATGGAGCGAGGAGGG
TCCCAGGAACCTCCTGGCCAGCCAGTGTAGACAAACCGTTTAACAACAGTCCTGTCTCAAAGAATAAGGTAGAAAATGATTGAGAAAGGTGATG
GATGTTAACCTCTGGGCTACACAAACACACCCTTTCTCCGCATCTGCATACATACAAGTTACTTACTAATGGATTATCAGGGAATAAGCTCTTG
GATTGTTTTTATCTGTCAAAGTGTAATTATTCTTTGAAAGTACTGCATACAGCAAATTCTTTCCCTCCTCTGCCTTGTAGCAGTGTTTGTGTTT
GTAATTTTGATATAGAACTGTGCTAAAACCAGGTGTCATGATACAGGCTTTAAATCCCAGCATTTGTGAGGCAGAGCTGGTCAGGTCTCTGCTG
AGGTTGAGGCCAGACTGGTTCACATAGCAAGTCCCAGGCCAGTCGGGCTACATAAGGAGAGTCTATCTTTAAAAAAAAAAAGAACCGAACCAAA
CCAAACCAAACCACCACCAAACTGCTGAAAGAAAGTCTTCAGAGACAAAGCATGGAGGATTCTGGGACTTCTTGGGACAAGCATGGTGAATGAA
ACAGTTGTCGAACTGTATTTTATCCCATTCGATTCTGGAGGATGCTATGGTACCTTGTTACCCTCTCCCACACACTTGCCTGTGTTTTCCTGTG
ACATTTGCCTGTGTCTCTTTCCTCTTCTTTCTTTGTCTTTTCTCCTCTCCCCTTCCTTCCCTTTTCCTTTCCTCTTCTCTATGCGGGGTCTAGC
CTTGTAGCCCAGGTTGGCATTGAACTCTTACTCCTACTTCAGCCTCACATATTGGTGGTGTACCCAGGCCCCTCTGCATAGCTCTTTGTCATTG
GGTTCTTACAATTTTGATCTCTTCATAAGAAAACTATATAGAACTAAAAGTAACCCTTGTAGTCGCTCCGTCAGTGGGTGAAGGAACCAGCTGT
CAAGCTTGAAACTTCAGCTCAGTACCCAGAGCCCACATGGTGGAAAGAGAGCACCAACTCCCACAGGTTGCTCTCTGACTTCACATGAGCGCCC
TCCTCAAAAAATGAGAATAGTACATAATTAAAAACAAAACAAACAACTAAAGGTCCCTTAGTAGCCCAAAAATATTGAGAGTAATGAATTTCAA
AGATTTTGTCACAAGCCTTATGCCCATATTTAGAATCTTAATTATTTTTCACACTTGTGCATTCAGAGTCACAGATGGCCTTTTTCTTTGTTTA
TGAATGATGAAATGTCACGGGAAGGCTGCATCATGTGTCATATAATGAAGGAAGGTAAAAGCACAGCTGGGATTTGAGACCTGAAAATATTTAA
ATTTCAGTTTGTTACAATTTTATATCACAAGGTAATCAGTGATTACAAAATTCAATAGTAATTTTGTAAATTGAGTCCATAAATTGAGTACTTA
TAGTTTGTAATATCTAGCCATATATGAGAAAATAACCCTTAACCTTTCTGAACGTTTGTATAGTGGAAAAATGATGAAACCAGTTTTCTTTATT
TCTTTCCACCTTTAAAAAGAAAATCATTTGAAAGATAATTTCAAGCTAGCTGTGTCACTGCCTTAGATCGTAAGGGTATAGCTAGCTAAACTAG
ATAATTCTTGCATTCTGAATGCCTCCAATCTTACTTTCTAGAATAGGGCAAAAATAATCCTTCTTCAACTTGATTTTATTATAACGTTCTTAAT
ACTTGTCTAAATTTTCATCAACCATTAAATTGGAAGTATCTACATTGTAGGTCTTTCTAACTTTTTCCACCTTTGGAATTTTTTCTTCAGTTTT
TATAACTCTGAATTATAAAACAGGAAATACTTTAGAATTGTAAAAAGATTTAAGAGATTTTGCTTCTAAATATCTCTAAATCAGAGCAAGTGCT
TAATAATTAACGATTTTAAATTTTAAGAAGATTCAGATATTTCATAAAGGAAGATATACAAGTATCTCCAAGACACATCGAAAGAGATCCAGTT
CCATGAGCCACCAGGAAAATACAGTTTAAAACCATTTTTGTCACTATTAGGACATAATCTGTAATGATAGAACTTTCCCCAGTTGACTGGCTGT
CTGAAGGGTCATTGCAGAGGGTACAGGGAAATTTCTGGGGGATAGGTGATAGGTTTTATGTTTAATTCTTTCTCTGAAAATTCCATACGTAAAT
GTTTTGTTTGTAACTCGTACCCACTCCGTTACCCTCCCTCATCTGATTCCCATGCACACTCTCTGAATTCCTTCTAGCAAGCTCTCCTGCTCTC
ATGTGTTTGTGGGTATGTATGGGACCCACTGAGTTTAATTAGGGCTGCTTGCATACGGGTAGGTGGAGCATGATGCACTGGGGCATGGGCAACA
AACAAATGGCTACACCACTGAGGAAAATGATTTCCCCTTTCCAGTAGCCACTAACTTCCCCAGCCATCATAGGTCAGTCAGTGAAGTCCTTGTC
GTGAAAGCATTGAGAACTTCAGTTTGGACAGTTAGCACTCATGTAGAGAGCCAGACATTAGTGGTGTAATCCCAGAGCTGAGGTGTGGAGCTAA
GAAGATCCTTGGGACTTCCTGGCCAGTCCATATAGCCACCTACATCAGTGCTTCAGCTACAAACCCTGTCGTTTGGTTTCGTTTGGTTTGGTTT
TTTAAAATAAGGTAAAGATAGATGAAGGAAGATGCTTAATATCCACTTCTGATCTCTATACTGATGCACACATGGGAGTATGCACACCCACACA
CAGGTCACACAGGTGCACACACAGGTGCACACAAGTCAAATCACTGAGACTGAAAAATTAGCTCAGTCTTGTTAGACAAGCATGAAGACCTGAG
TTTGGTTCCTCGGCACACATAAAACTGTATTGCAGTTGTTTGAAATGAGCTGGGCTTATATGAACAGGAAGGTCCCTGGAACTAGGTAGCCAGC
AGTGTGGCCAGACAGGGACTTTCAGATTCAGGGAAAGACCCTGTATCAAAAAATTAGGTGATGACACTCAACTAGGTGATTCACCTCTGGCCTT
TATACTCAAAACAGTCACACTTGTACACATATGTATACATATACAAAGAAATCATATCACTGGGCTAAGAATATAACTCAGTAAAAGAGCACTA
GTGTTATAAAAGTTAAAATGTATACAGTATTTACCTTAATCACAATGGGGGCAGATGTAAAAGAATTTTAATCCAGCATCATGCCTGTTCTGGC
AAGGGATCACATCCAAAGCCTTCTAGGACTCTGTGATCTCGCTGGAGTACAGGCTCACCCTTAGCACACAACTTTAATCCTAAACAACGAAGGT
AAAGTTAATTTGTAGAAGGAAGCAGCCGTGAGGGGCAGACAAAATGACAAGTCAGAGAAAGATTTGACAGAATGAGTCAGTGATGGCATATGCT
CAGCTCTCACAACATGAGAAAGAGAGGTGACTTAAGAGAGCAGCATAGAGGGGTGGGGAGAATTTTACCAACGTAGGTTGCAGATAAAAGACAG
AGAATAAGAAGCAGCCAGAAGATTAGAACAGATTGCCAGAGTTAGTTTGAGGCCAAGCAGAGCAATTCACTCAGATGCTAAGAGGAGCCAGTGT
GAATCAGTCAGCTTGGAGAGGAGTTTGGTTCAGAACAGCTGAGTTGAACCAGCCAGCCAGAGTTGAAAGAGCTGAACAGATGAGATTATTCAAT
AGTAACCCTCTGAAACAACAACTGTATCTGGCAAATAAAAGATACATTTACATACTTGCATAGCATACACAAGCTCCCTGGCTCAAACCTCTGG
AACCCACCCCCACTGCTCAGCTATCTAAGGTGCTAACAGTATTCTATATTTTGATTGAGGTAGAAGCTACACAGGTTTGTAATTTTATCAAAGA
CCACCAGCCTCTATAGATCAGATTTGATATTATATAATTCAAAATTAACTCCGGAAAGATAATAAAAATGCTTAATGGTCTATTTCTAATATAA
TTAAATATTTTATATAGCATTATTCATTTTAGATATTCAGTATTATACAGCTGTTGCCGGTTATATCTTTCTAAGATAATAATACGAATGGCTT
TGTCTTGACTCTCATTCATGTCAGCTTTGGGTGAGCATGGCTAGCCAGGTACTAACTCTTCTGTTCACAGGACCTTCTGCAAAGCTGTATGTTT
AGAATTCATTTGCCACCTAAAGTCTCCTCAGTTCACCTCGATTTCTATAGAATTTGTTTGAAATTCTCAAGAATTTTAGTTTATAATTTCATGG
ATGTTTGTTGAAAGTAAAATTTGAATCTGATTTTATTATTGGTACCATTTTAATAGTCATAATAAATATATATTATTTAATATAATGAGATTTC
TCTTTTCTCTCTAGTCCATATTTCAGTGAAGAATTTTATTTTGAGATTCCAAGAACTTTCCAGTATTTGTCTTTTTATGTTTATGATAAAAATG
TTTTACAAAGAGATCTTCGTATAGGTAGGTACTATTCATAATTATTTATAATTACAACATTAGTATTATGTTCATTCTTTCTGTAAGTCTTTGA
TATCTGCTTATTAAAGTAAAACCCATCAGCCATAGACGTTCACACCAACAGACTGGCAGAAGGTTGCTGTCTGTCCGTCCATCTCAGGCTCTCT
ATTGTGACATAGAGTTGCTGTCCATCTCAGCCTCTCTGAGTTACAGAGTCAGACTTCCCATCTAGAGAAAAAGAAAACCAAACAAATATTTTTA
TTAAAAAGCAAATACTAATTTTAAGAAAAACGATTTGTAGTTAAAAACAAACCTATAGGGCATAAGCAGATAATTTACTTCTGAAATGTTATAC
CCGGGGTCTGGGTTGTCCTTTGGGAAGATGAAGATGTCAGGTGTATTTCCTGTGATCTGAAACATATAGTAGGAAAGACTCGTTCCTGTGCGGC
TTTTAGGCCATGCTTGGTTAAATAGTCTTAAGTTGACGCAAGGTGGAAGTTGAGTCACTGCTTGTAACTGCACCGATGTCATTTTTAGAATGTG
GGCATGAATTGCTCAAAGGAATAAGCATCCACATAAATATTTTAAAACCCTCCCTTTTAAGGTTGAGGACTTGTCTTGTTTTCCCTTCATTTCT
CAGCTTAAAATTCAATTTAAAAGCCCTGAAGTACATCTTTCTAGTGTCACTTTCTACAATTCTAACTGTCACACAAAGATTTTTTATCTTTGTA
TTAGATTTCACTCAAAATATTTAAAAGAAAACAGATTCATAGGTTTAAAGATTTTTGTGTTTTGAATTTTGTGTGTTAATAGACTGATTGGATT
TTCAGTCTCTTGAGGACTATTGCTGCAGTTGCCATTCTACTACAAATCTGGTTCCGTACTTTAATGTTTGTTCTTTAAATTATACATCTGAAAA
GCCAGGCGTGGTGGCGCACGCCTTTAATCCCAGCCCTTGGGAGGCAGAGACAGGTGGATTTCTGAATTCGAGGCCAGCCTAGTCTACAGAGTGA
GTTCCAGGACAGCTAGGGCTACACAGAGAAACCCTGTCTCAGGTATTGAGTTTTAAGTTATAAAGAGCTAAACATAAAACTGTAATATGTTTTT
AAAAGTTTAAGTAACAACTTTATTAAGGTATAAGTTATATACCACAAAATTTTTTGTTTTAAAGTATATTATATTTAAAACTTATTTTTTAAAG
ACTTAGAGAAGGGATCATTGTACATTTACATATTATACACATACACATGCACATATCAGAGCAAAACATACGAAAAATGATAAGATTTTTGGAA
ATCCTGGGTAAAGAAAATAGTTTTATGTACTGTTCTTGCCAGCTGTTTTTTAAATTTGAAATTCTTTCTCCCCCCTCCCCTTTTTTTGAGACAG
GGTCTTTCTTTACAGCCCTGCCTGTCTTAGAATGCACCATGTAGACCACGCTGGCCTAGTGCTGGGATTATCAAGATAAAATATTTGTAAAATT
TGAAATCACACAGTATGACAATTGTATAATCACCACCTGCTTCCAGAAAGAAAAAAAATACACACACATACACGCACATATGTTGTTCTGTTTG
TTTTTCTATCTTCCTTTTCACTTGATAATTTAAAGTTGATACAGCTTCACATAAAAATTTATCATTTCTGTTTTCAACTGTTGAACTAAAAGTA
AGGTTATGTTGTAAGACATAACATACAGTTTGGGATACTTAAAAGGAAAGTATGTGTGGAGCAGAGACTGGGGGAACAACCATGCAGAGACTGC
CCCACCTGGGGACCCATCCCATAAACAACCACCAAACCCAGACACTATTGCAGATGCCAGCAAGAGCTTGCTGACAGGAGCCTGATATAGCTGC
CTCCTGAGAGGCTCTGCCGGTGCCTGGCAAATACAGAGGTGGATGCTCACAGCCATCCATTGGACAGAGCACAGGGTCTCCAATGAAGGAGCTA
GAGAAAGGACCCAAGGAGCTGAAGGGATTTGAAGCCCCATAGGAGGAACAACAATATGAACTAACCAGTACCCCCAGATCTCCCAGGGAATAAA
CCACCAACCAAAGAAAACACATGGTAGGACTCATAGGTCCCGCTGCATATGTAGCAGAGGATGGCCTAGTTGGTCATCAGTGGAAGGAGAGGCC
CTTGGTCCTGTGAAGGTTCGTTGCCCCAGTATAGGGGAATGCCAGGGCCAGGAAGCAGGAGTGGGGGGTTGGTGAGCTGGGGGAGGGGGGAAGG
ATGGGGTTTTTTGGAGGGGAAACCAGGAAAGGGGATAACATTTGAAATGTAAATAAAGAAAATATCTAATAAAAAAAATCAAAAAAAAAAAAAA
AGACATAACCTACCGTTGGGATACTTAAAAGCAAAGTATTTTTAAAACAAGGAAAGACGTGAATTACTCTTAAACTACCCTGTATCTCCTTTGT
TGGAGCTTTTGTGCGGTCTTTGAATGGTTAGTCACATGCAAAACGATGCTTCCCAGGGCTTGCATTGAGGAAGGAAGTGCTTTGCCCCAGCACA
CCAAGACCTTCATCTCAACATTATTTGCTTCTTCTCTCCTTTCATCCTCCTTTGTTCACCGTATTTCCTCTTTCCCTGAGACACAAGCGCTTTA
GGGAGCAGCTTTGATGGCTAAAGCAGTAGAGCTAGCTTAGTAATCTTTGATAAAATGATCTTTGAGGTACTTTGCACATTTGTTAGTAATAGGT
AAGATACTGTTTGTCCTTTCACTTAATTGGAGCATATAACTTCTTATTAAATGCAGGTGTTACTGCTCAGAATTAACAGCACACACACTTCATC
CACAGTGCTTCACAACCTGGAAAATTATATAGCATTGCCATTTACATTCTGTTTTTATCCTGAATATTAATCTGAGGAAGTGCTAACACACCAT
AGTTACATTAAGTCCAGCTGAGTCCTTCTACTCCCCTGATTCAGAATGACCCACAAAGGGCCTTCCAGTGGGCAAGCAGAAACACGGACATTTC
TTCTTTAAGGTATAAGAAAAAACAAACTTTATAGAAACAAATTTTTTAATTCTGTAATCTCAGCACTCAGAAGACTAAAGCAGGAGGATTACCA
TGAGTTTAGGTCTATCTTGGGCTAAATCGCAAGTACCAGGCTAGCCAGGGCTACATAGCAACATCCAGTTTCAAAAAAAGGAGTAACGGTGGAT
TTTTATATCAGCACATACAAATTAAAATATTTTCTGTAAAATATATAACAATGCTTATGAACCATAAGGTTATATAAACTATGGTTTCTCATCA
CTTTATTTATTTTCTGTAGGAAAAGTAGCCATCAAAAAAGAAGACTTGTGCAGTCATAGTGGTAAAGAAACTTGGTTTTCACTGCAGCCGATTG
ACTCAAATTCAGAAGTTCAGGTAAGTTAAATAATCAGGAGATTATAACATGAAAAACCAGTGAAAACCAACTAATTATACTAGTTTATACTGAT
AGAACTTCTAATACCTTATTTTACATTCTAATACCAAACATAGACCTTAAAGTAATAGAGAGCTGGAAGGAAATGGCTTTTCCATTTCGATTTT
TTTTTATTTTATGGATATATAAGTACAGTGTAACTGTCTTCAGACACACTTGAAGAGAGTGCCAAATCCCATTACAGATGGTTGTGAGCCACCA
TGTAGTTGCTGAGAATTGAACTCAGGACCTCTGGAAGAGCAGTCAGTGCTTTTAACTGCTGATCCATCTCTCCAGCCCTCGAGAACCAACTCTC
ATCTCTAACTTCCATTCATGTGCACGGCACCTATATACATACATATATATACATGTATCCATACAGGAATTAACCAGAAAATAATAAATTCTCA
TTTGAACGCATTTACTCCATTTCTAATAAACTAGATTTGTGGACAAAAAAATCTTCCTTATTTAAACCATCCCTGAATCTGCAATGCATAGCCT
TCATTCCTACCTCCCCTCCTGTTTACCTCCTTTTATTTGAAGGCGTATAATTATTCTTGTTAATCTATTCTTTTTCCCCTTGCCACATAAAAGG
CCTTGTATAAATTCTATATGTGAACAGAAATGTATTGTTGAAGTTTCTAAAAAGCTTAAGTCTCTATGACTTAAAAATTAATTCTAAGGGAATC
AATCTCTCTCTCTCTCTCTCTCTCTCTCTCTCTTATTTCTTTTCTTTTTTTGTAAACTTATTAACTATGGTAATGATTGTGTAGCCATTCACAA
GGGCATAACTCCAGGCAGGATTCTTTGTCTCTTAAGCAGGCTATAATTTGCTGCTAAGACTCAGAAGTTTAAAACAAAGAGACAAAAAGCATAC
CCACAGATACTTTGCAAATAAAATACGTCTCCATTTCTTCATAACCTTTTATGCAGTCTCTGTGATTAAATTCTAAAAAAAAAAAAAAAAAAAG
TATTGTGTGCAAAAATCCCTTCTTAAATACAGAATATAGCTAAGTACTTTTTCTGTTTTATCTACTCTACCCCGTTTTAATCTTCTGTCTGTCC
ATTTGACCATATGTATCATTCAGCTCTCAGGAAGAGCATTGTTGGTGCCAAGGGAGAAGCCATCTGAGGAACTAGAATGGGCTGATGGTGTTTT
CATATGTTCAGTTTAATGACCTTGAGCTTCATTTCTGTAAAAGGAGAATAAAATTCACCATGCTTGACTAATATGGATCGAGAATACTTTAAAA
CTTGATTTAGGGCTGGGTTGTAGCTCAGTTGGTAGAGTGTTTGGCTCGCATGTACAAACTCCTGAGTGCCATCCGCAGTACCACAGAAACTGAA
TGTTGTCCACGCACATTTGTCACCTCAGCACCTAGGAAGTGAAGGCCGCCAGCCTGCATAAACCCTGTCTTTAAAACAAACAAACAAACAAAAA
CCTGTTTGCTTCTATACAGATGTAAATTTATTACCACTACTCAGTCTGGTGGTGCCCTAGTTAGGGTTTCTGTTGCTGCAGTGAAACACCATGG
CCAAAACCAAGTTAAGGAAGAAAGGCTTTAGTCGGCTTACGCGTCAGTTTCCAAAAAAGTCAGGACAGCAACTCAAACAGGGCAGGAACCTGAA
GACAGAAGCCGATTGCAGAGGCCATGGAGGAGTGCTGCTTACTGACAGCCTGCTTTCTCACAGAACCCAGGTTCACAGACCCAGGGATGGCACA
CCCTACCCACAATCCGCTGGGCCTTCCCCCATCAATCACTAAGAATCTTACAGCCACACCTGGATCTTATGGAGGCATTTTCTTTCTTTCTTTT
TTTTAAGATTTATTTATTTTATGTATGTGAGTACACTCTACCTCTACAGATGGTTGTGACCCTTCATGTGGTTGTTGGGAATTGAATTTTAGGA
TCTCTGCTCACTCAGTCCCTGCTCGCTCCGGCCCAAAGATTTATTTATTATACATAAGTACACTGTAGCTGTCTTCAGACACACCAGAAGAGGG
CATCAGATCTCATTATAGATACTTGTGAGCCACCATGTGGTTGCTGGGATTTGAACTCACGACCTTCGGAAGAGCACTCAGTGCTCTTAACCAC
TGAGCCATCTTGCCAGCCCCCATGGAGGCATTTTCTCAGTTGAAGTTTCCTCTTTTCAAATAGTTCTAGCTTGAAGATAGTTGACTTAAAACTA
GCCAACACGGGTGGCTTTCTAATATAGCTTTACCAGATTATCCATTTTCAGTTTTTGACACATGACTTAATACATTTTCCATCTACGCCCACAT
GGTGTCAGTCATTTGAGTATGCTGCTCATGTGTACTTGAGGTTGGCTTCGATCTCACAGTGCTCTCTTAATATTGGCATTCTAGGCGTACACCA
CTGCACCCATCTAATCTGTCAGTGATTTGAACAAGAGGAAAGAGAAGAAGAGGCTTGTAAGATTTTGATCTGAAATGGAATTACTTAGAAGATT
CATTACAGTTTATTTATTTATTTATTTATTTAGTACGTTCTTAATGACCAGCATACATTTTTCTAGATTTAAGAATTTGATTCTGGGGGCTGGC
CAGATGGCTCAGCTGGTAAGAGCACTGAGTGCTTTTCCGAAGGTCCTGAGTTCAAATCCCAGCAACCACATGGTGGCTCACAACCACCCGTGAT
GAGATCTGACGCCCTCTTCTGGTATGTCTGAAGATAGCTACAGTGTATATATTAATAATAGTAAATCTTTGGGCTGGAGTGAGCAGGGACTGAG
TGAGTAGGGTTCAACGAGGACCTGACCAGAGCGAGTAGAGGTCCTAAAATTCAATTCCCAACAATCACATGAAGGCTTACAACCATCTGTACAG
TGACAGTATACTCACATACATAAAATAAATAAATCCTTTTAAAAAAAGATTTTGATTCTGAAAATATAGAGCTCTATGTGTTCTTTGTGTAAAT
CTTGGAGGTCATACCAGAAACTAATACTAGAGCACAGGCTTTATCTGACAGTGTATCTATAAAGCCATTATGTTTTATATATAGTATTGGCATT
TACATTTTTAGTACTGTTTCCTTCCGTGCCCATTAGTCATTAGCCTTTCCAGAACTTTTATCTTAAATGGTAATTACTAAGACTTACCCACTAC
TTAAAATAGATTTTAAAAGAAAAATGCTGTAGGAGGTGGGAGGGAGGGATAATACTTTTCAGGGTAATATGCTATCATTGGGAATATTATTATT
TAGCCACAAACAATCTGAAAATACCACACTAGCCTTGTGAGTATAAAAGATTTGAAAACAGCTTGAAACTAATATAGAGCCTACTCAGGTTTTG
TTGTTTACCCTGTATAAGTTTTATAATATCTTTTAAAGACATGCAAAAAGAAAAATAGATGGCAGCATAGAAAGCAATGAGATTACATTTAGCC
AGGACTCAATCTAATGATTACTTTTAGTAATTATAAAATATCTACCAAGTATAGCCCTGAGTACTTAATATACATTATCTCATTTAAGGCCCAT
AGTAGCACTATGAGGTAGGTATATTAACCTCATTTTGCAGATTATATTAATAGGATTAAACGACTTAGTCATAGAAGATGTGATCCCATTAGAG
ATCTGCCTAACTCCTAGTCACAGCACTGTGCTGTCTTTCAGTGACGTGTACTCTTAGTTATAGAAAGAATTCAACAGATTAGAATTGCTCAGGG
AGCATCAAAATATAAGAACAGAAGCCTACCCAAATTAGTGGGCAAAGGGGAATGCATTAGAAACTGTGTAGGGAGCTGTTTGAAGTCAAATTAC
AGGAACTTCCTCGGGAATGTGAGCTACATAGTTCCCAGACATTTCCACAGATACTTCGTGGTAATGGCAGTTAGGTTCTGACAGTAGCACACAA
GATAGAAATTCACATAAGTTAAAAATGATCCTTGAAGTGACTAAGTCTTCATAACATGGTTGACTGCCACAGAGAACATTAGTTTTTATCTGGG
GCTTTGATGAACAAACGCTGTGTAGTGTCATTCTTAGCAGTAGCCCCAACTCGGCAGCAATGTACTGTAAGGCAGGTGAGACCTGTGATCCACT
GGTTGATTTTTTTCATGTTTGTGGCTTTTCATTTTTCATTTTGAAAAAGGAATACTTATGTTTTCTTCTTTCACTCTCTTTTAAATAACTATAT
ACTTGCAAAATAAAGAGTGTAGCCGTGAATTAGTTAAACCGCTTTGGCTCCTAGCAGGTTGCGCTCTCACTGTACCCGCCCAAGAGCTCAGATT
CCCAAATAAAAGACAAACACACACATCCCAGTTAATTTTGATATCCTTTGACTAGCTGAATGGCTCGACACTTCTAAACCTCCCCATGGCTAGC
AAACACTCCCCTCTGATATTTCTGAGTTAACATCTTTAAAAATCTGTATTTCATCTCTGCTACCCCAGACCCAAGTGGGGAAGTGGCCCCAGAT
ACTTATTTGCCTGCAGGCCTATAAGTTTCATCTTTTTGCTTCCCCATCCTTGGGTCCCTTGTCCACACAAGTCTCGCCCCATCTCCCTGTCCAA
CCATTGGCTGCACAGCAATTCTTCATTATCAGTCAAAGCCAGTAGCGGGCAGGAATCCTCAGGTATCAAGAAAGCATGACTTTTGGAAGCCAAA
ATAAGACCAAACATTAGAACCAATTTCCAACAAAAGAGAAAAAAGATTCTGGGTGTGTGTGTGCAGGTGCCTGTCTATGTGTGAGCTTGTGTAT
TTACAGAAAGAATAACCTTGGGTCTCATTCTTAAAGATACTTCAACTCGGTTTTCAGACAGGGTCTCTCAGTGGCACCTAGAGATCACTATTGC
TAGGCTCGCTGGTCAGCAAGTCCCAGTGATCTACCTGTCTCTGCCTCCCTACGACTTCCAAGTACAACACTACAACCATCTTTGTTAAAAATTA
TTTCTTTTTTTTTTTGAGATTATACTATAGTTATATTATTTCCCCTTTCCTCTTTCCAAGCCCTCCCATATATCCCTCATTGTTGTTTTTCAAA
TTTATGACTTCTTTTTTCATTAAATGTTGTTAGGGATGTGTGTGTGTATGTCGGTGTGTGTGTCGGTATGGGTGTGTGTGTGTGTGTGTGCTCG
CGTGTGCGTGCGCGTGCGTGCGCATGTGTGCATATATTNNNNNNNNNNNNNNNNNNNNCGTGCGCATGTGTGCATATATTCTTAGCATGTACTA
CCACCTATTTAATCTGTATAAGGCTGGGCTGACTGTTTGGTGTCAGATGCCCAATTGGTGTAGCCTTCTGGGTAAGGGCTTCCCCCGCCTGGGC
TACCTCACCCCAGCCCACAAAGGCGTGTCTGTTCTCATCCTTGTTCCGCTTCTATTTAGGCAGTCATTTCTGTGAAACTTCATGCGTGTACCTT
CTGACATTACTGGGAGACATAATTCCATAGCAAACTCTCTGATCCTCTGGCTCTCACAGTCTCTCCACCCCTCACTCCCCTTTCACAATGATCC
TTAGGTGCAGGAGTTGTATTGTTGATGAATCTGTTGGGACTGGGTTCCACGGCTCTGCATTTTGTTGGTTGCGGTTTTCTGTAATGTTTCTAGT
CCTTTGTAAAGAGAAGTTCCCTTGATATGCAGGATGAGGATATAACGGCAGATATTCAGAATGTATTAGATACCCATCTTTATTTATACACCTG
TTTTCCTGGGTGGCTGGTGGGAGTTACTCATCTTCAGGCAGGCATGGCAGACGCTTTAGCAATTGAGCTATCTCCTCACTTAATGATTCCTAAA
GATGTCAACCATTCTTTTTATATGCCTAATGAGAGTACATATCTCTTCCTTTGTTTCTTTCTGTGAGTTTACTCTTAGTGCCTCTTGTAAAATG
CTATATTCATCTTTAAGTCTCTTTGTCCATATACCTTCCTCATCCTCAAAGATCTGACTCAATTTACAGAGAGAAGTTAGCTAAATTTTTGTCA
CTGTCCACTAAAGTCTAATGAGGTTGGAGACATTGCAGGGCAGTTCATTCTGGAGTCTGGGTTAGGCCCGTTTGTTTAGGGGATTGAGTGGATG
AAATGATCAGCATCTTTATCTCGGAGAGCAAGCAGTTTAGTTATCTGCCATTACCACTAATTAGTATTTGTAACTCAAATCCGTACCGATTTGT
TGGTGGAAGATCACTTATGGAATGAGGACCTCGGTGTAAAGGACCACGTGTCTGTGGAGATCCAGGAAGTGACACGTGTAAATGTCGGTCACTC
CTTGACTGAGGAGCTTCACTAGTAACTCCCATTTCATACCACGCACTTGATTGTTATCTTAGCCTTTTACTTTATCTCTTGCTTATTGGACTTA
CTGATTATTTTCTTCTTAGAAGCTCATGGTAGCAGGATTTAATGAGTGCATTTTCTACCTTTTTGGACAGAATTTTAATTAAAAAAATACTTTA
TGTGTATGTATGTTTTGCCTGCATGTATGTCTGCACCACATGTGTGCCTAGTGTCTGTGAAAGCCAGGTGTTGGACCCTTTTAAACTGGGGTTT
CAGACAGTTATGAAATGCCTTGGGGGTGTTGGAACCAAGGTCCTCTGCAAAAGCAAGCAGTGCTCTTAAGTGCTGAGCCATGTCTTCAGCTCCT
TGGCAGGATTTTTAGAATATTTATTGTCTGTGTCTGTGTCTGTGCCTGAGTGTATTAGGGGCAGCACGTGTGTGCAAAGCCCACAGAAGTCAAA
AACTGGCATCCGATCCCCTGGGGGGCAGGAGTCGGATGTGGTTGAGAGTCCACGCTGGGTTCTGGGAGTCAAATCTGAGTCTTCTACAAGAGCA
GTGCTTGCTGTCTGTCAACTGCTGAGCCATTTCTTCAGCCCCTTTTCTACCTTTTTAATAAAATACAAATCTTTTTCTTGACTCTGTTTTTTGC
CATTTTCCCCTCTGACATGAACCCTTTTCTTTTGAAACCATTGTAGTGTGCCTTCAGACTCGCTTCTTCGGACTTGATGCCCCTAAGCAAATGG
GCACGTCACTTTTATCAGGGCTCCACTGGCTGCCTGCTGCTCTGGTTTTGAAGCGTTCTCTTCCTTAGGCTCCAGTCCTGGTTATGATCCTGGC
TGTCAGTCTGTTCCAGTTGGTGTACATTTTCTTTATTCTCTTCCATACAAGTGATGATAATACAGCCATCCTCTTAGCTGTGAGATGCTGAAAC
TCACACCTTATAAGCATTGTTCCATTCTTTATTTCCTAGGTACCTCGATAAAAAACATCCTTTGCATAAGACTGTTGATTATGGGTGGGGTCTC
ACACAACATGTACAGGCAGCAAACCCACATGTTATGCCAGATGCAATGTTAGTTATGTCCTTTCGATGCAATTACTTACTAAGTCTTATCCAAC
AGGATAAGCTTGACCATCTGGATCATACTGTAAGTTATCGATCGGTATATACTTTTTCTTAATGGCCTTTGTTTTACTGTTTTGTTTTTTTCCG
AGACAGAGTTTCTCTGTGTAGTCCTGGCTGTCCTCGAACTCACTCTGTAGACCAGGCTCGCCTCGAACTCAGAAATCCGCCTGCCTCTCGAGTG
CTGGAATTAAAGACGTGCACCACCACTGTTTTAAATAGCCAGTTAAGAAGAAATCAAGACATTAAACACATGTTCAGTTAAGGGATCATAATAT
AAAAGCATAATTCATTATTATTATTATAGATTGATTTTAAAACTTTGTGAATTTGTATATGGGAACTAACAGAAATGAGCCATTCTATTTCTTT
TTAGATTTTTTTATTTTTTTGAAAAAAGGTCTCACTATATAGTCTTGATTGGCCTGGAACTCACTGTGCAGACAAATTCAGATCTGCTTACTTC
TACCTCCTCCTGAATGCTGGAACTAATGACATGTGTGGGCCACTGTGCCCCACTCTTTATCTCATTATTAAATTATTATTTAAGGAGAAAAAAA
TCTTGCCATTAATATAAGAGATATTATAAAGTAAAGTTTTGTCTTTCATCTGACAAGCAGTTGTGTCTAAAATTATTTAGAGGCAATTTCTATA
ACTAAAGCTGTCTTACCTGCTGTAGCGATGCATGATGCATGCCTGTAGCTCCAGCCACTCCAGAAACTGAACACCTTAGCCAGTGTAGCCAGAC
CTGAACTCAAAACAACCACTGAAACTCTGTCGGGAGCCATAACGTCGTGGTGGTGGTGGTGGTGGTGGTGGTGGTGCTGGTGTTAGTTGGTTTA
TTTGTTCCTCGCCTCATAAGTTTTTTAAACCAATTGAAACATACAGAGTTCTTTTTTATTTCTCTCTAAGGTCTGTGTGTTTGTATGAGTATCT
ACATGTGTGCATGTGCACCGTATGCCTATTTGGTACTCTTGGAATCCAGAAGAAGCATCGGGTGTCCGGGAGCTGGAGTTACAGACATTTATGA
TTGGCTGTGTGGTGCTGGGGTCCTCTGTGGGAGCAGCCAGTCTTCTTAACCACAGAGCAGTCTCATGCTGAAACAGTCTCAGTCATTTTTATGA
GGAAATTCTCAATATTTAAAATGTTCTATGATTTAAAGACTATTTAGATCTGAGAGGATTTTATCTTTATGCATTATTTTTTGCCTGTTTTTAC
AAACCTGTTTTCTGTGCATTTTTTGATACCAGGAGATAGCAGCTGCACTAAGGTTCCTTTTTATCTTTTCAGCTGTCTCACTAGTGCTTTGGTA
TGCTGTCTTCTTATTTATCCAACTGATATGTTTTTAGCAGATTTTGAATCTGTAACGTAATGTCTTTCACAGGTCTTAGAAAATTTAAAGCAAT
TCTCTCTGGATTCTCCCGTCTCTGACTTTCTGTACTGGGATTCCAGGCTCCCTGTACTAGAACCAGACTGTTGTGTATGTGTCTTATGTCTCCT
AAGCGCTCCCCTCCTCTGTACTTCATCATGAACATTTTCTATTCATCAGCCTTTCACTCCTGTTTATTCTCCTTTAGCTGTGGCTGATCTGATG
TTAGATATATCTCATTTCAGTTACTTTAGTACTTAGCTCTAAAGTTATCATTTAATTCATTTATAGTTTCCAGTTATTTGCTAGATTTTTCACT
TTATTTTCTGTTAGAATAAAAACAAGGCAAAATAAACAAACAAACAAACAAACAAATGGGTGGTATATATTTTAAGTTTGAGGCTGGCCTGGAC
TAAATAGCGAGACCCTATGTTAAAAGAAATTAAGATAACTATTTTAAACTCCCACTCCACTTACAGTCTTCTGTTCTTGTCTCTCTCTCTCTCA
CACACACACACACACACACACACACACGTAACACTAAAAATTACTACATAGTATAGACCTTCAAGGTCAGTATCAAAACGCAGAGGTTGTAAAT
GCTCAATGCAGGAATAGTGAAGGACCGAGTTTGTAAGATATATATGATTTTATCAGTATTTATACCTAAATTTTTTTTTCTGGACTATTTTTTT
AGTTCCATATTTATACCTAGATTTTTTTTCTGGACTATTTTTTTGGTTCCATATTTATACCTAGATTATTATTTCTGGAATATTTGTTTCTGTT
TAGTTCCAACTCTACATGACTGCTCGTTTTCTCATTGACGCCTTTTGTTGTTTGCGTTAGAGCGTATCTCTCTCATTCACACCTTTGCACTATG
ACTCATAACTGTATATTGCTCATTGTGTAGTAGTCATCTAGCCTAAAGTTCACAGCTAATGGTCCTGACATTCAGTATCATAAGAAAAGTCGGC
ATAAAGTAATAAAGGTGATTCAGATTATATCTTTAAATGAATGTCTAGAAGGCCTCTGAAGAGAAGCTGTAACTAGAGTGCAAATATCCCTACC
CCTGATACTATCACTCAGTACACCAGGCCCTAGACATCACACCCCAAGATCTCCACTTGGCACTCGGAATTTGTCTTGTCAGCTATGTGGAGGT
AAGGCAGCACTAATTGTTAACCGGTTTAGGATTGCTCATCGCCAGTAAGCAGAAGAGATACCCAAGCTCTGGATTACATTGTCCCTAACCTCTT
TCTTGAGGAAGCTAATGCCTTCAGTTCCTTAAAACGTACTAAATTGCGCTTTCAATTCATCTCTTACCAGCTGTGTGTAAGAGAGAACTCTATT
TTATTCCAATTCTTCCATCAGTGCTTTGACCGTATAGTGTCACTCTTACAGTCTCTCTGGCTAGGTCATGAGCTTCTGGTCAGTAGTGACGGTG
TCTTACACAGCTGTTTGCTCCTGTGTATTCCCATAGGACTTCCTAAAACATAGCAGATTCTAAATCAATCTTCAGTAGTTGACAAGGTATATTT
TAAAAAACTGATTCTTACTATTTTTAACTTAATTTCATAGCTTTAGAAATTAATTTATTTTATGTTTTCAAAAAATATAAGTGCCTTCTTTAAG
GAAATACTGTGGTCATTCCAGTATATAAACATTTATTAAGCAGGTATAAAGTTCCTAAATTTCTACCTGTCATATTTCATATAAATATTAGAAT
GTTTTCTCTCACAACTTTGCTATATATGCGCATGCATGCACATACATTGCTGATTATTAGCCATTTAACAAATAAATCTATGCAGAGATATGTA
ATAGTGGTTAGTGAATAATTATGTGTGCCATTTGGATAGAAGTACATTGTAATATTTTGTTAGCAAAATAAAATAGACTGAGTTTGATATTTTC
TTTTTGTCCTAGGGAAAGGTTCACCTTGAGTTAACACTGAATGAGCTGATAACAGAGAATGCAACCGTGTGCCAGCAGCTTGTTGTACAGTAAG
TATATCCTTTTTATTCATTTATTTCTTTTTGTCAAAACCACCTAGAAATAATTCTCTTTTATACTCTTAGACTAATTTCTTATTTTAAATATTT
TAGAAACTTCAAAATAAACCTCTCATGCATCATTTCTTTACCAAACTGAGAATCCAGCTTATTTTTTCATTTAATCCACTTAAGCTATGGCAAG
TCATTAATTACTCAACAAAGTTTTAATGAATGTGGGTTGAGCAACAAATGTATGTAAGCATTAAGGCATGAAGGGTCATAGGAAGGAGCCTCTG
GCTTCCTAGCTCCGGAGACTCAGAAAGTGTTTCCAGGGGATTCTTCTCCGAGCACTCAGTCACTACGCAGAGCTTCAGGGAGCCAGGGATCAGG
GTGAGGAGGTCATACGACGTGATGCTCAAACTACGTGACCACCTAAGATTGCTAGCACCTTTCCCTCTAGGAAGCTCTCAGTAGTCAGTCCAAC
TCTGTTGTGAGGTCATGTTCTAGCCTACTCTTCTACTTCTTGCCTCTGTAAACGCTTGCTACCAAGCGTTTCTCATTCTGGAACTTTCTGTGTC
TTTGCCTCAGTTGATATCTGAATGTCCCTGAGGTTATGAGGTTCATATCTACATACCTTAGGAACGAGTTAGAGCAGTTGTTACTTTCCTATTG
CTGCTCCACACTATAATTCACTCTCCTAATGATGAAAACCCCAATTCCTTGAAGCATTGCCTTTCTGTCTTGTGTGTACTATATGATCTGAGGT
GTTCAACTTCTTTCTGCTTTTATTAGCTATCTCAACTAATAAATAATAAAGAGACTAAGCGATTTTTGCTGTGTGTGGATGACTTACCAAAACA
GTATGCTTAACGCATTTTTTCCTAAAAGCTTTATAATCATGGTAACATTTAATAGATTAATAAAGTAATAAAAATTTTTTTATTTACTAACAGT
TTTTGTCTTACTGATTTTCAAATTCCATTTGCCTATTGAAAATAGTCCAAAGCCAGGCATTGTGCTATCTGCCTTTAATCCCAGCACTCAGGAA
GCAGAGGAGGTGGCTCTCTGTGACGTTGAGGCAACCAGGGCTACATAGAGAGTTCTAGGACAGCCAGGGCTACATAGAAAGTCCTAGGACAGCC
AGCCAGGGCTACAGAGAGGGTTCTGGGACAGCCAGTGCTACAGAGAGAGTTCTAGGACAGCCAGGGCTACACAGAGACCCTGTCTTGACAACAA
GAAAAAGACAGTAGAAATGAGTGTGCAGACTTCGCCCGCAGACTGAGAGCCTGTAGTGGAATTCTTTGGATAAGGCCCTCCTGCTCCTCCCTTC
CCTGCTTGGGTTTAGTGACAGTAGTCAGTCATTTGAAGTACTAGTAGTTGGATTACCTTATTTGCATACTTGTTTAGGTTTTTCTCTTGGGTGC
TTGGCTTAGTTTTTATTTATGTATATTGTGTGCTTGTGTGCGTGTATGCCATACATGTATAAGTCCTTACAGAGGCCAGAGATGTTGGATCTCC
TGAAGTTGGAGTCATAGGCTGTTGGGAGCTACCTGATTTGAGTACTTGGAACTTACCTGGGGTCCTCTGGAAGGGTATCCAGGGCCCTTACCTG
CTGAGCATTTCTCCAGCTTCCTGTTGTTATATTTTAGGATGTAGAATATTAGCATGATTTCAAAGGAAAAATTGTATCAGAAGGCATTATTCAT
CGGTCTGGTTCAGTTCCCTCTTCCTCACACTCAGCCCTAGGCAACCACAGTCTGATTTCTGTGTCTGTTTTTACTTTTTGGTTAGACTGGTTTG
ATATATTTAGTCTTTTGTGTCTGGCTTCTTTTACTTAGTATTCTCCCTTTCATACTCATTTACATCGTTGCCTATAGTAGTAGAGAATCTTCTT
TCCAGTGTTTCCAGTGTCTCCTGAGCTAGGCACACGGGTTCTACCACCCAGACAAACCCCAGCCCCTTATTTTTTCCCATGACTTGACAGATAA
CTCAACAATGTACATGCTACTTAAATAAGCCCAATTCCATACTCTTCAGTTTCAGGGCTAGATTTCAGTTTTTCTATTTTAATGTTTTAACTTG
AGGTTATGGATTTACAAAGTACAAACAGGTCTTTGTGCTCTTTACTTAGTTTCCCCCAGTATTTACATGTTACATGACTAAAGGAAATTTTTAT
TCCTACACTTTGTTGTGTATATACCACTTGGTTACATGTATGAATGTATGCAACCACCACTACAATCAACGTACAGTACATACTGTCTTCTGAA
GGCTTTTATTCATACTACAGCTGATAGTCATGCTCCTCTCTGCCACTCTCCCGACTCTTTTCAAACCTCTTTTCTGTCTCCAAGTCTATAACAT
TGTCATAACATGGTGTGAGAGCTCCAACTGTGACTCACTGCTGGAACACGGAACTCAGTGCTTCCTTACACGCTGTGAGGTCCTGCGTTCAGTC
TTGAGTAAACACACACAAACATAGGCACACACAACTAGGAGAAATAGAACCTAATTGTGTATAGCCTTTGAGATTGGGTTTTGTGCAAATCCAT
ATGAATTATGTGTACTCTCTTGTAGATAGACCCTATCATTGTAAAAAGTCGTTCTGTGGGAAGGCGTTGCTAGAGAGATAGCTCCATAGTTGAA
GAGCACTTGCTGCATGTGCAGAGGACCTGGACTACTTCCCCAGCTCACAACCGTCTTTAATTCTAACTAGGGGAACCTAAGAACATGGTCTGCT
CTCTGTAGGCACCAAGCAGGCATGTGGTAAACAGGCATACATGCAGACAAAACATTCTGGGGCTAGAGAGATCACTTTGTGGTTAAAAATATAT
ACTTCTCTTATAGAGGTTCCAAGTTCAGGTCCCAGTGCCTGTAACCGAATGGCTGACAACTGCCTGAAATGCCGTAACTCCCATGCATTAAACA
CTTATATACTCGTGGATACATGACATCCTTCCAGTATACATCAATAAATAATAGATAAAAACTATTTGTAAAGAGCCATGTTCTGTTCTGTGAA
TTTTTTCCATTTATTTTTAATCTAATTATTGATACACTTAACTCTGTCTTGTTTCTGTATACTGTCTTCTATTTTCTGAACTTACCTGAACATA
AGTTAAAATTATGTTTGGTTTTTCTTGGATATTTTCTTTACATTTCAACTGTTTTCCCCTTTCCAGGTCTCCCCTTCGGAAACCCCCTATGTCA
TTTCCCCTCCACCTGCCTCTATGAGGGTGTTCCCCCACCCACCCACTCCCATTCTCCCACCCTGGCATTCCCCTACACTGGGGTATCGAGCACC
CTCAGCACTGAGGGCCTCTTCTCCCACTGATGTCCAACAAGGCCATCCTCTGCCACCATGAGCCAGCACCATGGGTCGTTCCATGTGTATTCTT
TGGTTGGTGGTCCAATTTCCGCGACCTCCGGCAGTGGGGGCGTCTGCCCTGTTGACACTGTTGCTCCCTCTATGAGGCTGCAAACCCCCTCAGC
TCCTTCAGTCCCTTCTTCAACTCCTCCATCAGAGACCCCCAAGCTCAGTCCAATGCTTGACTCCAAACTTCCTCCTCTGTATTTGTCAAACTCT
GGCAAAGCCTCTCAGGAGGCAGCCATATCAGGCTTCCATCAGCAAGCACTTCCTGACATCCACAATAATGTCCAGGTTTGGTGGCAGTATATGG
GATGGTTCCTGGGTGGGACAGTCTCTGGATGGCCTTTTCTTCAGTCCCTGCTCCACACTTTCTCTCCATATTTCCTGTTCTATTTATAGTGTCT
TATTACATAGGTCCTTTAAAGTGGTTGTCTTGGGTATCAGACTATGTGTACATAACATATAACCTCCTGTTGTCAACAGTTCACCAGTTACAGA
TATCTTGCCTCCTCTTTTACCTTTTCCTTGCTCCCATGTTTAATATATTTTTGTATTAAACATTGAGAATTGTGCTAGTGTTAGAATTCTTTGC
ATCAGGCATTTAACTTAATCCAGAAAAAAGGAAAGCATAGTATTATTTACACATTTTTCTCTGTCCCTGTTCCTTTCTTTCTTCCTGAATTAAC
ATTCCTTTTGTCATTCTCTTTAAATATCCTCCCCGCCCCAATTTCCCATACTTCTAGGGTAGATCTAGGGTGACAAATACTCCTCATTTTCCTT
CTCAGAATCTTTTGATTTTTCTCTATACACACACACAAGCTACAACCAGTTCCTCTCTCACCAGCTAAGCTTTGGCCGTGGGTGTGGGTGGTGA
TAGCATTAGTTGTTTTTCATTTGGTTGGTTGGTTTTTGGTTTGTGTGGGTTTTTTTTCTTTGTTTGTTTTTTGTTCTTCTGCTTTTTGCTTTTT
GGTTGAGGAGCAAGTGGACATTAGCTTATGAAGGTTTGTTCTGTTGGGTGCCCTGTTTCTTGCTCTCCTTTGGAGGCCGATTTCTGAAAGACAT
TTGTTTAAAGATACAGGAGTTCGGGAGTAGTGTGTGCACAGGATTATTCACAAATGTGTACAGCATCAAAGCTGACCAATAGATACTTACATGA
CAGAAAATTTACATATTCTCTCATACTTTAGTACCGACTGCCCCTCTGTGGCTGTTCAAGACATGAAATAAGCCATATGTGACTGATATTTTGT
TAAATTTTAATGTAATAGCCAAATATGGTTAGTGGCTGCAATATTAGTATAGCTCCAATAGAAAGCAGAAAGCCTGGAATCCTTGTTAGCAATG
GCTGATCTAGGGCTGGCTTAAGGAAATATATGATGAAGCTAGAATACCTTATGAAATTAGAATGTAAGGAAATACTCCAAAAAATAATGGAGAG
ATAAATGAATGAGAGACATTGAAATCAATCTGAATAAGTTTCAGAAGGCCAATTGTGGGACAGCTTCAGATTTGAGGACAGCCTCAAAATTAGT
ATTAATAATGGACTAAAGCTTGAACAATAAATATTCATGAATCACTACTGATACAATACACACAATCGTGTAGATACATAGGAAGAAACAGTTA
CTTTTCCTTACAGTATAATTCTAATTAATGAATTTAGGAACGGTGATGGAGATTGAATCAGCACTGGCAAATACCACAGCTGGGTTCAAGCAGA
GAGACAAGCACTCTATGCTCTCAGTTATATATGGATGCACAGAAAGCCTTTATCAAGGAAGCCGGTACAGAGTAGTTGTTCCCAGAGCCTCGGG
AAGATCTACGGGAAGGATTGGCAGAAGGAGGATTGTTTAATGGGTACAGAGCTATAGCGTAGGAGGAATAATTTCTAATAATTTATAGCACAGA
ATAATTATGAGTGACAACTGGATATTTCAGCACAGCTAGTAGAATTTTGAACATTCCCCAAAGAAATTATGTTTAGATGTTAGATATGCTAATT
TCTCTAATCTGATCATTACTGTGTGTGTGTGTGTCTGTATGTATACATATATCTGTGTGTGTGTGTGTGTGTATTGGTCTGTGACACTGTATTC
ATAGGTATGTACAATTACATGTCAGAAATAAAAGCATATATGGGGGCTGGAGAGATGGCTCAATTGTTAAGGACATTGACTCTGCTCTTCCAGA
AGACCTGGGTCCGAATCCTAGCACCTACATGGCAGTTCACAACTACCTGTGACTTCAACATCTGATGTTCTCACATAGACATACATGTAGGCAA
AACATTAATGCACATAAAACAAAAACGTAAATAATTGAAAAATAAAAGCATATAATTAAAATATAACTGAGATCTGGAACCATGGCACAGTGGT
TAAGATCACTTGATACTCTTTCAAAGGACCTAGGTTCTGTTCTAGCACCTAAATGCAAGGTGGCTCATACCTTCATTTCCAAGGCGATCTGATA
CCCTCTTCTGATCTTCACTGGTATCAGACATGTAGGTGGTGTACATACATGTATGTAAACATTCATAGAAATAAATAGCTAAAGTATAATAAAT
AGGATGAGAAGTATCTAAGAGTACTAAGTATGTTAGCCTAAGTATGATTGCATTTTTGTATAGTCTCAAACAATCTCCCTCTGAACTTATTTCA
TAGATAACTCTTCACAGTAGCATATCAGGTAGTCTTGGTACTATGTACACAAAAGAACAGCGAGCTATCTAATTGAACACTCCCCCTCCAATAA
TAGACATGGCCCCCAGTGGAGGGATGGGGCCACCCATCTTCAAAATTTTTGACCCAGAATTGTTCCTGTCTAAAGGAAATTTAGGGACAAAAAT
GGAACAGAAACTCAAGGAAAGGTCATCCATTGTCCATCCCAATTTGGCATCCTTCCCATGTGCACACACCAAACACTGACACTATTGCTGATGT
TGTGCTTGTAGACAGGAGCCTAGCACAGCTGTCCTCTGAGAAGCTCTATCAGCAGCTGACTGAGACAGATGCACATACTTACAAGCCAACACTG
GACTGTCGGAGACACCTTTGGAAGAGTTACGGAAAGGATTGAAGCGGCCTAAGGGGATGGCAACCCCATAAGGAAGACCAACAGTGTCAACTAA
CTGGGACCCCTGCAACTCCCAGAGATTAAGCCACAAACCAAAGAGTGTACATACGCTGGTCCGTGCCCCCTCCCCCAATCCACACAGAGGACTA
CCTTGTCTGGCTTCAGTGGGAAAGCCTACTCCTCTAGAGACTTGGTGGCCCTTTATCTATTTTTAAATATATAAAACTATATTTAAGCTGGGAC
ATTCACCCCAAATAAAACCTCTTTGGGAGTAGAAACTAGACATGTGTCTGATTTATTTAAATCGTATTTATTTTGATAAAAATGGGGGGGCATC
TGATTCCATTCTGGTCAAGAGCAAATGTCAGACGAACTTAGATTAAGTAATGTGAAAGCAGTTATCACAAGGTCAGAGACTGGGAGGACATGGC
AGCTGAATGCAGTGTAGAATCCCATACTGCATCCTGGAGTTCAGCAAAATTTGAGTGGCATCTGTAGATTAATTAGCGTTAGTAGCATTAAATG
TCAGTTTCTTGATTTCAGTAGCTTCACCTTGGTTACACAGAATGTTAACATTCAATGTTAGGGTTTATAGAAACTCTGTATGTTGTTCTTACAA
CTGTTTCAAAGTCTGCAATTATAACTAAGTGTGTTTGTTTTGAGTCCTGGTCTCCTATAGCCACTGTACTGTCACATAGCACTGCCACTGTCAC
ACACCTCAACTTTTACACATTCAGTTTCAGGTTTGTTCAACTCCTTTCCAGAGTCTTAGCAGATATTTGAGTCTACCTGTGTTTCTTTAATCAG
ACCTTACATTTTTTCCATTTCTAGACCTTTGTTTTATTATGCAAAAATGTTTATTTTGAAATTTTTTAAATTTAGAAATACAAAACCTCATAGG
AAGGAGGAAAGAAACAAAAACCACAAAGCATCCAGGCAGTGTTTTACTTCATGAACATGTCACCCCCTCTGGCTCACTCGTCCCATGGTGAGAA
AGGAAGGACTCAGCCACCCACAGCAATGTTATTAATCGGGATATCCATCAGTTTCACCAACAAGCCAGTGAACCCCATGATAGCAAATCCCATC
GCTGTGGCCATGGCAGTCTTCTGGAAAATTCTTTTCTATCAAGTTTGGTACATCTTTTAGTCAGCCGCATTGAGTCTTTTACAAACTCCTGACT
GGGCTCTACAGACTGCATTATCTGATCCATGTGTGTGGGATCACGGTTTGAGAGGGTAGAGGCACGTAGCCTAGGAGAGAATTCAGCCCTAGAC
CTTTATTTCTTAAGGCTTTCTGTGTCTATGGTGTGTGAGGTAAAAATTTTCAGTGTTCTTGTCTACAATTACTTTTTGTCGTTTCTCCTTCTCT
TTTGGTGGTTTTTCTTCTCACTGTAGGCCATGCTTATTCATTGTTTGAGTTGGACATAGAAGTCACTAGCTGCTCTGTGTTGCTGTAATGTACT
TGAATTGGTTTTTAGGTATCAGTTAACTTACTTGGAAACAATTCATTCTGTTTATAATTTGGTTTTAAGCTTTGTCACACAGATGAGAACAGCA
TATTATCATAGAGCTTGCAAGAGGCCCACCCAGCCACAGAAGAGAACTGGTAGTTTAAGAATAATGCCATTAGTCGGAAAATATGAACCCCAAA
GTATTTCTTTGGGCTGTACTTTTTTTGGTTAGTTTCAGAAATTTGTGAATTTTATTTTTGATGCTCAGTTTAGCAGAAATGAGTCTTGTTTTCA
ATTTTCTCTTTACTTGGCAATACATCATTTGCACTTCACCCATGAGTGAGTCTTGGAGAGAAATAGAGGATGTTTCTCAGTAGGGGTTTGTGAA
ACAAAAACAAAACACTTGGCATTTATGAGCCTCTGTGAGGGAGCAGGAAATGAGACTCAGACTTTAAACCAACTAACTTAGTAATAATTACTGA
GGAATAAACCAACTAACTTAGTAATAATTACTGAGGAACTGTGAGAATCGCATCATTAGAGCGTGTTCTTTGCTTGCTATAAATACAACCATAG
TCCGTACAGTAGATTGGATGGCCTTGGCTTTGTAGTGCAGTTCATTTTGTACAGAGTGATATAGGAGCTGCTGTTGAGACTCACCATGAGAGTC
TGGAGAACTATGTGAGGCTTGCCCTATATTTATGAATCAGATTTTAAGTAAAACCACAACCATTTCCTTGTGTGTCATTCATGCTTTAGCAGAG
GATATGGTGCCACACAGCTGGCCTGGTTTGTAGTTTCTCATGTAACCCTACACCACTTTCTTTTCCGTTTTACAAGCCACAGCAGTTTTGATGT
ATTATCAAACCACAAAATGTACCTTGAGCATTTCCCAGGAAGAACTGTGCTATGCTGGTCTGAGTACCCATTGTCCTTGCTGGGTGGTTCTTTT
TGGGAAGTACTCATGTAAATAAGTAATTTGCAGTAGTTGATACATTGGAACTACAAAAATGCAAACAGTGTTACGGTCTTTGAATATATAGATT
TCTATTGAAAGATAGTGTTTTAGGTTTGGTAGTGCAGCTCAGTTGCAGGGCACTTGCCCTGTGTATATGACTGAAGCCAGGGACTGTTCCCAGT
CCACAAGAAGGAAACGACAGGGAGAGAGAGAGGGGGTAGATACTATGTTATGATGTTAGTGCTAACATATTAAGATCTGTTTTGTTCTACCTTA
GCATCAAGGCCTGCCATGGGTTGCCTCTCATAAACGGACAAAGCTGTGATCCTTATGCAACAGTGTCCCTCGTGGGCCCCTCTAGGTAATGCTT
ACTGAATTGTTACTGCATTTTCAAGTTTAAACTTCGATTTAAGAATTGGAAATGTACAGTTCTTAGATCAAGTGCTGAGTAACTCACATAAAAT
AATGCTTTAAAACAATTTTTTGTAAGTTCTAGAGCACACTTGGTAAACAACTGAGTTCTGTTATCACAGAAAGATACTGGGTGTTATTTCAAAT
CTGCTATGTGCTTATTAGGCTCTGGTGAAAGCTTCAATCTTATGCCATTGTAAAATGTACTTTAAAGTATATTCCTGGCCCAGGTATGGGGGAT
GCATGCCTTTAATTGAAGTATTTGGGAAGCAGAGGCAGGTCGATCTCTGTGAATCAAGGCCACCTTAGACTGTATAGCAAACTACAGGCCATCC
AGGATCTAAAACAAAACAAAAAACCAAAAAAAAAAAACAAATCATATACACCTGGCTGCCTTTACTCATTAACATTCTTACTTTCAAATATCCT
CAATTTTCTGTAAGTAAAAAAATCACATTTTAGTGATTGTCAACTCAAAATAGCAAAACAGTTTCCATACCAGTATCTGGGAAGCCGCTTAGGA
CTGAGAACTGCCTTTTCTGTTCATGTGTCGGTGCTTTGTGAAGAGACCTCCAAACTCTAGAAGAACTACTGAGGTCCCAGGCCATGGTGAAGTG
CAGCATGATGTTGAGTAATTGGTCTATAATTTATGAAAAACCAGTAACACTTTGTGGTATCTATATTAGATAACTTCATTGTAGTTTCTTTACA
AGACTGACTAGTCTCGAGTTTGTGTGCAACTTAAAGCTCTTTGAATCAACAAACAAAAGCACAAAATTTGTTATCACCATGACTCCCCTTTATC
ACCTAAAGCTGTAGTCTTTGTTTTTTCGGTCATCAAGTCTTAAAAAAAGTGTGTGTGTGTGTGTATCAAAGCACCTGATACCATGGAGCTTAAA
TACTGATATGCTATTATTACAGATTGGTTTTAAATTTAAAAGCAAAAATGTATATGGCATTAAATGCTGCCAAAAGACTTTTCACATCAATGTT
AAAAATGTTCATCCTCACTGGATATTGGAAGCATAATGATAACCCCTGTACCTGGGCAGCAGACGTAGAGGCTCACACATTCTGGCCAGCCTGC
ACTACTCACAACCATCTCTCACAGACAAATGACAAGCGAAACCAGCCAGCCTAGAAGAGCTGCTTGTTTCCAGTAAACCTCTTTTGTAGTTCTG
TCATTGAACCAGACTATTGTTACTAAGCAGTTACTCTACCAGAGAGAGATTCTCAACTCAGGAAGTTGTTCTTGGTTTCTGTTTAATGATTTCT
ATCTCATGACAAATTCTTTAGTGGAGCTTTTAAAGTAACATTTCACAAGAACTATTTTTTTAAGATTTATTTATGTTTATTTTATAAACATTGG
TGTTCTTCCTGTGTGTGTGTGTGTGTGTGTGTGTGTGTGTGTGTGTGAGAGAGAGAGAGAGAGAGAGAAAGAGAGAGAGAGAGAGAGAGAGAGA
CAGTGCATGCCAGATCTCCTGGATGCTGGGAATTGAACCAAGATCCTTTAGAAGAGCAGCCACTGCTCTTAACCACTGAGCCATCTCTCCAACC
CGAAACTTTTTTTTTAATCACAGTTCATTTTGCTATTATACTACCGTTGCACAGACATTCCCATTGGTTGAGTCTAGTCAAACAGACAAGACTC
CCAGTACATTTCTTTATAACTGCCTCTGAAATTGTCCATTCACTGAGAATTAGCAGGCTTTGTTTTTTTTTAAGTTTCTGTCCTGGCTCCGGCC
CTCAGAAGTACACTGGGTTCAGAGTTACCTTTCATGCTTCTCAGGTGTTCCAGCATCAGTAAAGGCTTGGAGGCTTGGGCCTTTCTTCTCACCA
CTCCTTCTGGTAGTGTAATCGGATCAGCTTCTCCTAGCCGTGGAGACAGTAACCCAATCTTGCCATGTATAGATATGTAAAACTTGCATCCTGT
GTGTGGATATTCATCAGATTCAAGTTTGTGAGGTTTATATCCTTGGCTTTTTTCCTTTGCATAATATGTAAGTTACTGTCTTCTCTCAGTTGTC
CTAAAATGTACGCAGAGGTTAGGCATCCTAGCTGGGAATAGCTTGTTTTATAATTGTGTACTATTAAGTTCTACAAGGTATAACTCTACTACAT
TGGAACACGAATGACCAAAAGAAGACAAAAGTAAAGAAGAAAACAAGCAATCCACAGTTCAATGAAGTCTTCTATTTTGAGGTAATTTCTTGTT
TTATATAAATGTTAATGTTTGATATGTAATTCTAGTTGATTTAATTTCGTAAACCATAGCCATCAAAATTGTTTTATTAATTAATGCAGCTAAT
AATCTGTACCCAGAGATGAGTAGAGCCATAATGTCACACATGCAGCTCTGGTTGGTTTGGAAGTGGGGAGGGCTAGAGCCCCTACCACATAGTC
ACATTGTCACAGCTCCCTTGAGAGCCTCCCCACACTTTCCAGTCTACCTGACACATAGTGACTTCTGAGCAGACTGTTGGAAATCCTATAGAAA
TTTAAATATTACCATTCAGAAGATCTGAAACCTTTTCCCAGCTGATATTAATGATCAATTAAATGTAAACCCTGCCTTCCATATCCTGTAAAAG
GGTAATTTTATAAGGAAGAACGGTAGCAAATCTGCCAAATATGAGACTACTTTGAGAGTTTGAAACAGTTTACGATTATGCCTTTTTACCATTA
AGTTCTCTAAATCTAATTTACTCTGTAGATGTAGCTTGTTCATGCGGATCTCCAGCTGCCTTGAGTGAATCCTAACCACTGGACCACCAAGCTT
GCATCTTCAGCTGCTTTGAAATTGCCCCAAATAAAGTGCTTTGGCATTCTTTAAAGTATTTAGTCTTTTTTCATATTAATTGAAGACTATAGAA
AAACTAAAAATCAAAATATCTAAAAGGTTGTAATAACAGAACAAGTTGCAATTGATATTAAGATGTGAGAACAGGTTGTAAAAGTGGGTAATTA
CATCTTGAAGTTTTTATTTTGTTTTTTTCCTCTGTTTTGGAGACGGCACCAAAGTACCCCAACTCATGCCTCATTGTTGTTCTTTAATAACAAG
GAGCATGAGCTGAAGAAAATGCCAAAGGTGACATAGGAAACTGGGGGTGGGGTGGGGGACAAGAAAAACCTACTGAGTCAAGAGGCTTCCTTTC
CTCGCTGAGGACTTGCTGCTGCTTTCTACATTTATTAACAGCTCTTATGTCTAACCATGAGAATCAGAAGAAGATGACAGTTCTAACAGCTCCT
GCCCAAAGTCACTCACTGCATATAGTTCACACCTCAGGTGGCCTGGAATTCGCTCCTTAGGAAGAACCTGTAGCCAGAGGGTAACTTTCTGAAA
GTTGAGGTCAGAAATGCTTGCCTTACCAATTTACCTCTCAGGCCTTAAACTGTTTATTCATCTAGTCCTTTGTTAGATTGGTTGTACAGACAGG
CATGCTCAGTACAACCAGAGCAAGACATAAGAAAGCACACACAGGTGCATATACACAGCTATAATCTGGAGCAAGACATAAGAAAGCACACACA
GGTGCATATACACAGCTATAATGTGGAGCAACACATAAGAAAGCACACACAGGTGCATATACACAGCTATAATCTGCAGCAAGACATAAGAAAG
CACACACAGGTGCATATACACAGCTATAATGTGGAGCACCCTCTCTCGAGCTCAGGGTTAAAACAGTCCAAAGCTAGATTTTTGCGAGAACAGA
AATAATATTACAGAGACAGAACACTTTGGGCACAGAGACAGAAAAACTGAAAGTTATACCCAGAGAACATCAAGTAAAGATTTAACTAAGTTTA
GTAAAGTAACCAAAAAAGATGGGATAAACTGCTAAGTGTCCGGCGGTGCTTTAGCTTTAGCCATTAAACTAGAAAGAAATAACCAGGATCTGTT
AGCAGAGCCCAGAGACCTTCAAAGAGCTGAGAGCGGGGCAGAAGTCGAGATAACTGATCGTGGGAGAAAAGGGAGAAAGAAATCAAAAGCATCC
ATGGATCTGTGTAAAATTCCTCCACCAGGCGTCAGATGTGGTACATGCCTGTCATCCCAGTCCTTGAGAGGTGTAGGCAGCAAGAGCAGTTTCA
AGGCCAGTCTCAGACCACCTTATCTCAGAAAGCAAATCAGATTTGCTAACAGGACAGTTCATGACTGAAGCATGGTAGGTGATAACTATGGATC
ACAATACAGGATTTGGTACAGACCCAGGAGAGCCAACAGTGAAGAGATGCAGCAGAGGAGAAACCCAGTCAGCTCTGGTGCTTACTAACCACTC
CGCTTCAGACGTGCTGATGAAGTTTGTACTGTCGCTTCCTCATTTTTAAAGTGAGGGGAATAAATCTAGCTCTGCCTGCCTCAAAGCAACAGTC
TAATGAGTCCAGAGATGTGATAGCACTGAGTAAGCCAGACAACATGGTGTGGCGTTAAGTTACATTTAGAACAAAATAAAACAACCTTGGAGAA
CCACCTGTGCAATTCCAAGGAGGAGTAGAGAGCAAGAGGTAGCAGGCTAGCCCACAGGTAAACCGAATGCAAAGAACTTGTCTGGGACTAGGGC
GGGGGAGGGGGAGGGAGGAAAGGAGAGAAGAAAGAAGAGAGAGAGAGGCCAAGGACACTGACAATCTTAGACTAGAAAGAAGTCATCAGACAGC
TGGACTTAGAGTAGACCAAACGCTTATAACACATGCTTGTTAGTTAATACTGTGGTGAAAGGAGCAGGCTTGGGGAGGTAATCTTAGAACCATC
ACCTCTTCAGAAGTCCTGAGGGTGGGGGAAGTGGATGCTCAGCTTGGTGGCAGTTGAGGAAGTTCCTGCCCAGTGGCCTTGATATTTTCAGTAA
AAACTGTGAGAAGGAAATATGAGTAGGTGTGACCCGTGCAGACAGAGCGTTGTAACCAGGGAACCAGATGTGGCTCTAAGTAGAACTGACGGTG
TGGAGGCGAGGAGGCCTCTGATTTTTATGCCGGACTTTCTTACCTTCTGGTGCATATTTGGTACATTTCCCATCCTTTGGAAATTGCATTCACA
CTTGACTCTTTATATTTGTAATTGAATATTTTGGGAATGGTCATTTTTGAGCTCATGAAGGAAAGATACTTTAAACAGTCTCTACTGAAATCCT
TCGTTTGTAGGTAACCAGATCCAGCAGTTACAGCAGGAAGTCCCAGTTCCAGGTGGACGAGGAGGACATTCAGAAGCTGGAGATCAGGTCAGTG
CCGTCCTGTGGCGCTGGAGAACGGCTTTTCTCCATGCAAACCTCCATAGAGCCCTTCATAGCAAGCTGATCGATGAACTTAGATGAACAGGCAT
CTAACTTAATCCACTTAGCCTTTCAAAATCGGATTCTTCTCAGAAATATCAAGTAGTTCTCTTGTGTGAGCAAAGACAGCCTAATTTCACCTAG
TCTGTTTTCATTTTCCCTGATTTAATTGCTCCTTCACTACCTGGATTATAGTATAATGAATGGAAGACTGATTATATTTAATCCAATTTAGAAA
TAATTGTTTTATTCTTCTTAACATATCTGCTGACTATCAGACATTTCAGTGAGGTAAGGCGATACCCGCACAGGTGCATGTGTTTGGAGTTTGT
GGTATTTCCTAGGCCTTCAATATCTATGCTGTTTTGGAAAGGAAACTTTTGCAAATGCATGTCTAGGTGTGGTGTTAACAGTGTGTTTTCTAAA
AGGCATATTAATCATGTGTTCACATTGTTAGGCAATATTTTTCTAAATCACCGATCTTTATGTATTAATTAATAACATATTGATTTATCATCAA
AGAAAAAGTGTGGTCTTGTTTTGTTTCCTCAATTCAGTAAAGTAACCCTTTTGTCCTAATGCTACAAACTAAAAACAAACAAACAAAAAAAAAC
AACCCTAGACTTTCAAACTTAGTTTCTCCTTTTATACTGTTTAGAATTTGGCCAGGAAGCTGGCCTAGGTGGGAAAGGCACTTGCTGCCAAACA
AGTCTTCCTGAGTTGTATTCCTTGGACCCTCACAACGGAAGGAAAGTGCCAACTCCTGTTAATTGTCTCTGACCTCCACTGTGCACAGTGGCAT
GCATCCCTCCCCCAAAACTAGTTAATAAGGATGTAAATTACAATTTAAATCCTGATTTTTTTTTCATAAAAATTGCTGTAGTAATTTGCTTTCA
ATGTCTAGATAATGCATTATATGACAATGCTAATCTAACATCTCTTTTAAAAGCATGTAAAAATATAGTACAAATCAAAATCACTTGAAACTAC
TCAGTGTGGTTTGCCAAAACTAATGCTAGGTTTTCAATTTTCACGATTGACTTGTGGAATAATGAAAACCTAGTCCAAGATGTTTTCCTGGGAG
AGATTAAGGTTCCTGTCAATGTGTTAAGAAGTGATTCCTTTCATCAAGCCTGGTAAGAAGACAGATACTCTAATGAACCAAATTTAATTCTCTT
TAATAAAGAATATAAATATATGCTTGCTGGAAATAAGTAAAAAGTTACTGATATTAATTTGGTTATGAATTTGTTATTAGAGGAAAGATAAGTA
CTTTAATAGTTGTATCACTTGATCTGTGATACTGAGATAAAGAATTTAGTTGTCTAGGAATATTTTTCTGTTTAAGAATAAAATCTTGGGGCTG
TAGAAATAGCTGAACTCTCTTCTCAGTTTGGACGGGGTTTCAGATCCTAGCACCTACCTCAGATCTCTCAAACAAAGGGCTTTAACTTTAGGTC
TAAGGAATCCACTGGTCTCTTTGGTCTTGATGGGCACCTGTACATGGACACACACAAACACACACACACTAAAAATAAAGTCTTAAATCTAAGA
AATGAGAAACATTAAGACATCGAATGAACCGCTCGTTGATCCTTGATCACATGTCATCATCTGCAGTTTCGATGCTTTTCGGTCAAAGAATTGT
GGGTAGAAAGCAGAGGGCTTATTGAGAAGACACAGCAGTCTTCTGTCTGAGGCAGTGTATGATTTTCAGTTATCACACATTTACAAATGCAGAT
AACCTCGATGTGTTTTCTGAGTGTGGGGTATTGACTATAATGTCATTTGGCCTTTTCATGGCTCTAATAGTGATACTGAATTAATAACATTAAT
GTTAATAACCTTAATGTTTTGACATTAAATTCATACTTATTTCAATGTGAAACTTTTTCTCTATAGCCCTTAAAAACTAGTGTTTTCTGTCTCT
TCGTGTGTCTGAGCCCATGTTTCTTCCTAGATTGATTGGTATGTAGGATCATGCTTTCTCAGTTGTTGGTGCTTGTTGATGCTGCTATGTGAGC
ATGTAGGTATGCTTACACTCATGCGCACATAGAGAACAGACTTGACACTGGATATGTTCACCAGTCACTCTCAGTTTCTGAAGAGAGGACTTCA
GAACCACGAGCTCACTGATTAGCTAGGCTGGGTGGGCAGTGAGCTCCAGGGACTGCCTGTCTTTTCCTGCCCCCTCCAAGGATTGCAGATGTGC
ACACCACTAAACCCAGCTTTTACATGGGTGCTGGGAACCTAAACTCGGATTCTCATGCTCTGCAGAGCAAGCACTTTATCAGCTGAGCCATTTC
TCTGACCTCTGTCTCTTCCCTTTAAAGGTCACTTTTTAAAATGAAATGTAATATTTGTGCCTGCTTATTAAGTGTAATAGTCACTTGTATATAC
TGTGTAATGATCAAATCAGGATAGTCAGCATTTCCATCTCTCAAATACCATTTCCATGTTGGATGCTGGAGAATTAGACTGTGCTGAACCGTGA
CATCAGTTGTTACGGACCATAGTGAACCTGTTGGATTATAAACAGAGCTGCTACTCCCACGCTGCATTGAGAGCCCGTTCTAATAATAATACCT
TTCTCTGATGATCTCCCCTCCTGCCTCTAGCAACTTACAGTCTTTGTTTTTATGTGGATCAACTTTAGTTTTCACAAAGGAATAAGAACTTGTG
GCCTTTGTCTTTCTGTGCCTTACTTCACATGATAAAATGACCTCCAGTTCCAGATGGGTTACCATAAGTGATAGGATTTCACTCTTTAATAGCA
AACCGTCTGTTGATGAGTAAATGAATTTAAATAACGTGGTCTGTACACACTGGGATGTTAACATAAGAACCGCTCTTTAGAACTCAGCTGCCTA
GAAGAGGAGTTGGTGTTGACTGTTTAGGGGTTGGGTTTTTGTTTTTGTTTTTGTTTTTATTGTTTTAGTTTCTGAGACAGAATCTCACTATTTA
ACCTTGACTGGCCTAGATCTTACTATGAGGACCAGACTGTCCTTGAACTCAGACATCCACCTGTCTTTGCCTTCTAAGTGCTGAGATCTAAGCT
GTGCACACTCCAGCTGACCTAGGACTTAGACGTTTCTCTTTCCTCTCACTTGCCTTTAAAGGAGCCTGCCACCAGACAGTCCTCATTGGGATTC
TGCTATTCCATAGCCTTCCTTAGAGAGACTGTATTTTAGACTAATTTTCAAATTTTATTTTTTAACTCTTCCAATGCAAATCTAAATGTATTAG
TCTCTCTAAAAACATTTTGTGTGTTTTAATTTCTAAATGCATCCAGAGAACGAGAAAAATGACTTTAATTGTTGAGAAAAATGTATTACCGTTT
GCCTCCCCTGCCCCCATGTCATATTTCCTCCCTTCTCCATGAAAATTCCTGAACTCAGTTTTTAAGTCTTGAAAATAACATTCCATACCTTTAG
TACAGAAGAAAAAATGAGTTGTTGTGTCTCCCAGGGGCCTCCACAATGAGCCTCAGACCTGCCCCCACAGTGTGACACAGTCTTTCCATATACT
TTCAAATTTGACAGAACTTTCTACCTTGGCCAACTTGGAATATTAACAGACAATAAGTAACTTTATTTCAATTTCTTCTATCAATAGTATAAAT
ACTTCATGTGCTCTTGAGTGCTGGTGTCTTTGAGGTCAGAGTCGTTGAATCCTCTGGAGCTGGAGTCACAGGTGATTTGTGGCTGCCTGATTTT
GGTTGCTAAGAATTGAACTCGTTCTTTGTTTATGATCTCAACCATTGAGCTAGTTCTCTAGGCTCCAATAAAAATATTTTAATTTAAAGTAGTC
TGTCAGAAGCATAAATGCTAAAATTTATGTAGCATAAAACAGAAGAATCTGCTAATGTATATGAATTAATGTACATTGTATGGAAGTATAAAAA
TGTTAATGCCATTTTAATTGAAGATCTTGATCTCCTTTATCACTTATAGAGCTGTAGCATCCTCTAGTGGTATTAAAGATAACTGCACAAAACC
TCATTCCATTCAGGCATAGTTATTTCTAACCTTGATATTGCAAAGCGTCATAATAACTTATTAGTAGGCAGTACTCTTGCTTTAAGTTTTTCTA
TTTTCTTTTTTCCAGTAATTTCCATTAGTATTTGCCTATTATATTGTATGTCTAAAAACTGGTTTTTCATGGTTTAGTTTTTTTAAGATTTCTA
TTTTATGTATATGAGTGTTTTGCTCTATGTATGTCTGTGTACTGCATGTATGCCTGGTGCTTGTGGGGGTCATCAGATGGTGTCAGATGCCCTG
CCACAGGAATTAGAGATAGTTGTCAGCCAACATGTGGGTCCTCTACAGAAGCGGCAAGTGGTCTCCACTGCTGCATCATCTCTCCAGCTCTACT
TCCTATTTAATTTTATTTGCAGATTATAATACAATGACTCATGCCACTTTCCCTTGCTTTCTAAGACGTCTTTTGTTGCCCTTATGTACATATT
ACTTTTATGTGTGTCCCTTGCGCGCGCAGCCTGTGAATGCCTGCAGGAATTGTTCTCTGTTTCCACCACTTGCCTTCTGGGTATTGAAGTAAAG
GCATCTCTGTTTACCTTCAGTCGGTTCTTGGTGGTGCGGCAACCTGGGAGAATGAAACGGACTACAGTCTCGTGCTAGCCAGCCGCACTCAGAG
CATCACACATTTCATACTCGGAGTGATTTACCTCCTTAACCTTGATTGTTTTTTAATTGGTGATAATTAGATTGGACGTTAGCATTGTCTTTTT
TGTGTTGATATTAGCTAATTTTCATTTTGCCATGTGTAGATAATAGAACATAATTTGATTGTTTTTTTAAATAAGTTTTTTTTAATAGAAATTA
CACCATTCCTAGGTAAAAAGATGTAAAAGAGAATCCTGCCTCCTTCCCCAGTGCCACTTGCCTAGGTCCTATTTCTGAGCCAGCCTCTGTTCTC
TAGATTCTGGGAATATTTTCTATATTCATAGGCAAATGCATGTATATATTTTCATTCGTTGTTTTGTTGTATTGAACCTGGGTTTCTGTGTGGC
CTGGGAGTCATAATCTCCCAAGTGCACACACGACCACATGCCCACCTGTACTATGCCTGTATGTTTACTCAACAGTGTAGTAGAACACTATAGA
TAGGCGTTGACTCTTGATGGTGGTTTACAACTTATACTCTAGAATCAGACAGCCTTAATTCAGGTCCCATCCTCGCCAGTAACCACTTGCTCTG
TGCTTCTTATTTCGTGGGCACAGTCAGGGCTGAATGTGCTCAGAACACAGTCCGCCCATGACCTGCAGTCTGGCCCTGGCCCGTGGTTTCTTCT
TCAGTAGCTCAGCTGTCTACTTATCCCGCTTGCTCGTTAACTCACTACCATCACGTGTAGTACCATCAGCTGTACTTTTACTTTACGTACTTGC
TACAGCCAAGAGACAATGGAAACAAATCATCTAAAACCGATGACCTGGGATCTCTTCTGTTAACTCTCTGCTATACAGAAGACTGCGTGCTTCC
ATCAGAGTACTATGGACCGCTGAAAACTTTGCTGCTAAAGTCACCAGATGTTCAGGTACTTTAAAAATCTTTTTTTTTCCCCAAGTGTTTTGTG
ATTTGTTCTGGATTTGTATATAGGTACAAAGCTTCAAGGGATAAACCCAGAAAAACGGTCACCTTCATCCGTCCACATGTCGGAGGAGCCCTTG
TGGTCAGCTCTGGGAACTACTTTAAAAATCTTATATGATCCGCAAGTGGGGCAGTCTCTGGATGGTCGTTCCTTCAGTCTCTGCTCTGAACTTG
GTCAGACTGCCCCACTTCGGGATCCATGCCATAAACAAACCCAGGCACTATGGCAGATGCCAAAAAGAGCTTGCTGACACGACCCTGATATAGC
TCTCTCCTGAGAGGCTCTGCCAGTGCCTGGCAAATACAGAAGTGGATACTCACAGTCATCCATTCGATGGAGCACAGGATCCACAATGAAGGAG
CTAGAGAAAGTACCCAAGGAGCTAAAGGGGTTTTCAGCCCCATAGGAAGAGCAACAATATGAACTAACCAGTACCCCCAGAGCTCCCTGGGACT
AAGCCACCAATCAAAGAAAACACATGGTGGGACTCATCTCTCTAGCTGCATATGTAGCAGAGGATGGCCTAGTCAGTCATCAATGGGAGGAGAG
GCCCTAGGTCCTGTGAAGATTATATGCCCCAGTATAGGGGAATGCCAGAGCCAGAAATGGGAGTGGGTGGGTTGGTGAGCAGGGGGAGGGGGGA
GGGAATAGGGAATTTTTGGAAAGGAAACTAGCAAATTTCATTTGAAATTAAAATATCTAATAAAAAAAAAGAAATTAAAAAAATCTTACATGAA
AAGGCTAAACTAATTCTGCAAATGATAAAAGATTTCATAGTGTCAGCTCTTACAGAGTGCTGTGTATTTGATTTCTCTGAACCTGAATACTGAT
GTGCTTCAAATCTTATCTCTGATTATAATTTAGAAAACTAAATACTATCTTACCTCTGATCAGTTATAATTAATGAGTGTGTTTAAATTTCATC
CACAGGTTAGTGATTACGCATGCAACCATGGTTCCTTGATTCTGTCCTTGTTTTTACCTTCTTTATCCTAGCCAGTATCCGCCTCAGCTGCTTA
TATTTTGGGTGAAATATGTCAAGATCAAAAGGATGCTGTTTTGCCCCTTGTACGACTGTTCCTGCATCACAATAAACTTGTCCCTTTTATCACT
GCGGTGGCCGAGCTGGACTTGAAGGATACTCCGTAAGAACTGTATTTCATTAAATGTTTAAACTTCAATTTGCCAGATTGTTTTTATAGTCTCA
GTTCTTTTGTATTGACCAAGTTTACTATACACTAGGTTAAAAAGAATCGCTTAGTCAGTAACAAAAGACAGTTCTTAGAGTTACCAAACAGAAT
CCGGCTGACCGTAAGAACCAGTTATGCAGACATGTGTATAAGTCAGTGGTGCCATTTCCTTTGTTACTATTACTGATCTTTGCTCCTGGATGCA
GTGATTCACATGTCACAGCAACAGCTCTCTATCACCCTTGTTACACTGTACGCACACGTAGAGCGTTGTGAAGAGCGGTCAGTGCCTTTCCATT
TCCATCGCAGTGAGACAACACCATCATCTTATGCACACAGACCCACACTACACCATCATCTTATGCACACAGACCCACACTACACCATCATCTT
ATGCACACAGACCCACACTACACCATCATCTTATGCACACAGACCCACACTACACCATCATCTTATGCACACAGACCCACACTACACCATCATC
TTATGCACACAGACCACACTACACCATCATCTTATGCACACAGACCCACACTACACCATCATCTTATGCACACACACCCACACTACACCATCAT
CTTATGCACACAGACCCACACTACACCATCATCTTATGCACACAGACCCACACTACATTTTTTTTACATTCATAAACATAGTTTTGATAGGTTT
AGAAATTCTAATGCCAGCAAACATTGCTGTTAATAGTAGTAAAGGTTACTAAAATTGTGTATATGTTCAAAGTCAAATTATTACTGTTTGAAAC
TTTTCTTCTTTTTGCTGTCAATGGTTTTTGTCTCTTTCTATTTCACAGATGCCAACGCAATATTTAGAGGAAACTCCCTGGCTACCCAGTGTCT
GACTGAGATGATGAAGATAGTGGGAGGGCACTACCTGAAAGTCACGCTGAAGCCCGTTCTAGATGAGGTACAGAGTAGACCTCACAGGCAGAGC
CTGTGACCAGCTAGAGCAGCCTTCTCAACTTGTATGTCCTGAAAAGCCCTTTCACAGATCATCTGAGGCGTCTGCGTGTCAGATGTTTACGTCA
TGATTCGTAACCACAGCTAAATACAGTTATGAACTAACAGAAAGAGTAACCTTACGCAGGGGTCACCCCAACATGCGGAGCTGTAGGAGAGGGC
CCCAGCAGTAGGAAGGCTGAGAGCCACTGCAGTAGACCTTCTCTTTTAAGAAGTAATGTGTTGATTAAAAGGGTCTGTCCATTCATGGGCTACT
GGAGGAATAGGTGTAGACACTTTGTAAGTAAATTTCTTTGCCCTCTGTGGATTCATTCTTACTCACAAGACACACTGATCTACATTATTGTTTG
TTAGATTTTTTTTTAACTAGGATTTTGATATAGTTCTTTGGGAAATTGTTTATGCTGCTTTAAGTTATCTTCAGGTCGAAGCTTTAAATTTTGT
TAGATTTATTTTTTATAATATCAGAAGAAGAAGAATTATATTCATGTTGTTAAATCACCTAGGAAAGAAGAGTAACTGAGAAATACTTGTATAT
TCCAGATATGTGAATCCTCGAAATCCTGTGAAATAGATCCTGTTAAGTTGAAAGAGGGAGATAATGTAGAGAATAATAAGGTATGATTATACAG
TGTCATTTATATCTACATTAATTTTTATCTTCATGTGATACCTGTCTCCCATAAATGGTTTATTTTATTTTCTATGTATGAGTGTTTTGTCTGC
ATGTATGTCAGTGTGCCATATGTGTGCCTGGTACCTGTGGAAGTCAGAACACCGCATTGAATCATCTGGGAATAGAGTTCAGGTGGTTATAAAC
CATTATGTGGGTGCTAAAATCAAACCCAGGTCCTCTGCAAGCACATAAGTGCTGTTAACCACTTAGCCACCTCTCTACCCTCCAACATATACTC
TTAAACTGTGCTTCTTGTGAAAATTACTCATATATTCATTCATTTGTCTAGAAAGTCTGAATTTAACTTAATAAATTAACCTTAATGTTGATCG
GCCTTTAACCTGAGTTCGGACTAGAAGCAGGAGACTCGAGAGTCATCTTCTAATAAGTCTCATACCCATTATTTGTTCTCATGAACATATTGAA
GCTGTGTGACAATCAGAATCTTAGTGTTTACTTTGTTAAAACCTGCAGGAGAATCTGTACTACTATGTGGACAAAGTATTCAATACAATCGTAG
GATCAAGTGTGAGCTCCCCCACTGTGATGTGTGATATTTTTTATTCTCTGAGCCAAATCGCTGCTAAGAAATTTCCTAGTAAGTGCCTTGGTAT
ACTTAATCACATTTTCTTTTTCTATTTTTTTCTCCATGCTCCTCATTTGGTTTGTGTGAAATACTTGTGCATAGGTACAATCTTCTGAGTTTTT
CAAAATGGTGCTAGCTTCTTTGTGAGATTTAATGATTTATTTTTTCTAGAATCTCAAAACATGCAATTCACTTTATTTCAATATAATGGCAACT
ATATAAAGAGCTAATCAAAATCATTAGTTTTAAGAAGGGACAGTTTGCATCTGTACAGTTTTCTATAATATGTAAGGAAATCTTTATGTGTCGT
ATAGTTAACAGATTGTAGAATAAACCCGTGTGTACCAGCTATTTTTTCCAGTTGCAGATTTTCAAACAGTAGTAATTGGTAGTTTTATACAATT
GACTAGATTTGACAGCTTGAAGATACTAAGATGTCTGTGGTGACATGTCTTTTCAGAAATAGTCTTTGGCTTTACAAATACTTGTCCCACAATC
CATAGGATGATCTTGCTTCAGGTTTTGCAAAAATATCTATATTAAGATTTTGCTTGGAAAGGCTTTATAAAGTTATGAGATCTACTTCTTATTG
TTAGCACTTGGAAATACTCAAAATTTTAGTTCATTTCTGTTACATAAATCAATTTGCCAAAACTCATTGCAGATCTGCCCATAACACAGACAAG
GCAACTATTTACAATAATAATCAGGTTTATCTATCTGCATAAGACTGTAAATTAACTTTCTTAGCCATCCAACGAGATTTTGTTATTTCATTAT
GCTTCCATTCGTCAGACCCTTTATTTAATTCACTCATACTAACTGCTACATGAATTCGGGTTTTGGTCTCTTGGCTAATTACAATAAAGAGATA
AAACATTTAGCTTTAAATAAATATATCTAGTCTTCATAATCAATAAAGGAGGCAGAGACTTGATTTTGCATACATAAAGATGAAATAGCAATTA
GATTCTGTTTTCAAATAGTGAGCTAGATCATAACCACTTTCCCTGCTTGCTAGTCTGTCTTATCCTTTACTCTTAACATGTTTGAAACCATTAC
CCATTGATTAGCCAATGAAACTGAGGTCTCAGTTGTTGTTACTACCTGGACCTCTGCTACCCTGCTAGCAGGGCAGGCAGTCATAATGATGGAC
AGCTTGACAGTTCCCTACTGGGTGATTTGTAAGACTAAACCCCACGTCAAATCCGGAGATTCTTTCCCTCACTGCCCTTTCTCTGGCGTCTGAT
TGTTGGGTTAGTTGTTGACTCCAGTCTGAAACAAGTCCTGACAATGAGTGATCATTGCTACAACTAGCTTTCAATTCACCTGCAGTTTATGTGA
AATATTGGTAGCTTTAAAAGTACTGTCTCTACCTAATTGCTTTTAGTCTTTAAATTGTTGGCTTTTCTTTTTGTGACAAGTACATGAGAGAAAC
AACATAAAAGGTAATTGTGGGTTCATAGTTTCAGAAGCCTCACTCCAACACCCACAGGCTCCGTTACTTTAGTCAGGCCTGAGACAAGGCAAAG
CACTGTTACGGCATCTTCTACCAGAGACCGCTTGTCTCCTGGCAGTGAGGAGGCAGACAGAGGGAGGGATGAGCCAGGGCCAGAATACACCCTT
CAAAGACATATCCAAAGTCCTCTGCTTCCGCTAATAAGCCTCCAGCTTCCACAGCCCCACCACCTCGTACAACAGTCTATTGCAGTTGGAATCC
GTCAGTGTGGTGAACGTTGATTACATCGTGATCTAGTCATCTCTGGAAACATTCTTACAGAAATACTCCAGATGGTGGTCTACTGGTCTTGTAG
GCATTTTTCATCTAATGAACTGAATAATCAAGACTAACCATAATATAGCCTTAGACACCATGAAGATTTTTAGGGTGAATTTAAAACAAAAATA
TAAAACTGAAAGCTAGTTTTTGGTATTCAGTGTTGTCACTAGGTAGTACTACGTAGGGCTTTAATGTTACTTTTTTTTAAAATAATTTCAAGAA
TCTTTTATATCAAGAAGCTATTTTTCAAATTAAAAGTATTTCTTTAAAAACAGCAACTTTGCTTTCCGTTTGTTATTTTAAGTTACAGCATTTT
TTTCTCTTAGTTTAGCCACAGTCAGCATCATTTCACAGCTCAGTTTTTACAAGTTATTTTCCTTTCCTACATAGTTTACATGATTTTTTTTTTT
GCTTTCTCCTCTTTGGTTTATAAGTAGTGTGTTTGCATGACGTTTCCCATTTTATCCCTGCAGATCACCCTCATGTTCAGTACTCTGCAGTGAG
CAGCTTTGTCTTCCTTCGTTTCTTTGCTGTAGCCATACTCTCACCTCATGCTTTTCATTTGCGACCTCATTATCCAGTAAGTGTTTGCTCCTCT
CAAAGCCTTGTTCCATTTTTATTTATTTTTTGTAAAATGAAGAAGAAATATCCCATTTTTCTTTTTCGGTGATAACACATTTCACAGTTGGCAG
AATGCTGCTAAGTTGATGTCTCCTGATGAGCAGAGGGGAGCACTCCTCAGGGCCTTTCTCCGGCTGCTGCACACGGGCTGCGGTCCTTAGTTAC
AGGGAGCTGGGGATGCTGGGGTGGTAGGTGGAGTTGGGGCTGGTTGTTAGCCGACCCTCTCCTGGTTTATTACAGCAGCTTATTTTTTATTTCT
ATATTCTGAGCCAGACTCTTGTTCCATAGCCCAGATCGACCCTGACTCACAGTCTTCCTGCCTCAGCCTCTAGAGTCCAGGAGTACAGGCATTC
CCACCGCTCCTGGTTTACGGTGGTTTAATCATGGCAGTATTTTAAGATCTCAGAAATGTGAAGGAAAATGAAGAAGTTTATTTGAAAAGTATTC
AGGAACCTGACTTACTTGGTATCTTTGTGCTTTTGCTTTCTGTTCACCTAAGTTATATCAAAAGATGAGACTAAAATGAAGTTCTGTTCAGTTA
CCTAAATCTACATCTGCGTTGAATATATACCTCTTCATATTTTAAGGTTTCCTTTTTCTTTTAACCTATTTCTAGTCCTTCATATAGCATATTT
TTAGTCACTCTTTGGTCTTTCTCTGTTGTAAATATTTTATATATACTCTTGATGCTTTAGCTGCTGCTGTGTACACTAGAATAGGAAACATTTA
GTGATGACCTTGTTCTAAGCTTTCCTTGAATCACTTTCTATGTCTAACTCGCTTAGGTCTTCCTAGTCACTGTAGGAGTAAATTACTTTATTAG
CCCCATATACAGGTAAGGAAATCACCATGCAATAACTTCTCTAGGCTCATATAACTAAGACATCACATTTGGATCCTACACAATTTGTACTAGA
TTCAAATGGGACTAGTTCAGTCTCCACAGTCTATAAGCAGACTGGTATTGAAAATCTTTTTTTTTTTTTTTTTAATGTATGTGAGTACACTGTT
GCTGTCTTCAGACACACCAGAAGAGGGCATCAGATACCATTACAGATGGTTGTGAGCCATCATGTAGTTGCTGGGAATTGAACTCAGGACCTCT
GGAAGAGTAGTCAGTGCTCTTAACCGCTGAGCCATCTCTCCAGCCCTGGTGTTGAAAATCTTACAGCAACCACTGTCACAGTGCTCAGTGCTGG
AGACATATGCACCCTTAATTGACATTCCCTACTTCAATGTACCCATGGTCCATCTAGTAGTGCAGTGTAGGGAAAACTTAGGGGCAAAACTGGC
TTCTGAATGTTCACTTCCCCTCCGAATAGCCTCACAGTGTTAGCTGAGAGCCATGCTGCAGTGGCAGAAGATGGATGTTCTGTGTAGCCTGTAT
CCTTTTGTTCATGGAGAACCCTTCTGTGGCTGTGTTAACTAAAGCTGGAATGACCTGGGGCAGTGAGAGCTTGCCAGCCACATTCTATACAGAA
GTAGAACTCCCACCTCTCCACTTGTGGCTCTGCTTGTATTCAGACTTGGAATTCCTAGATGGAATTTCAAGAAAATCCCTCTAACACAAACACT
TTTAGGTCACTTTTCACGCAACTTTATTATTTAAAGTTTTCTTTTTGTTGTTATTTGCCCCCATCCCCAATACCTCAGCATCTCCATCCAGTCT
TTAGCCATAATTCTTCATTTTAAAGAAAATTTGAAGTAGTGGGAATAGACACAATATGACATTTGACATTGCTGCTGTAGGGATGAGCATAGCT
GCCTTCTATTAAGGTAGAACTATTGCATCAGTTTAAAGCCAGCACATGATTAGCCAAGTAAAAAGTAATAGTAAGCACTGCTGTACAGGCCGAG
AATACAGAGCAATCCCAGACTCTGATGGCTTCATCAGGAACTGGAAGTTACAAAGTAATACAGGTGCAGAATTGATCAAATGCTACTGAATTTT
ATGTTTAGAAATCCTTTTAATTCTAAGAAACTAATTATAGAAGATGTTTTAGAGTAGACAAGAAAGAATAAAGAACAGCTAGCTAAATAATCAT
AGCAAGGGCAGGAGATCTGAGCGGTGCTTGCTGACAGTCAAGGGATGTGTGCACACACATGTATAAAAACTGTTTTGAAAACATTAGTTTAGTA
AAAATGAAGGCATGGGCTGGACAGTTGGCTCCGCGGTTAACAGCATTAACTGTACTTCCAGAGGTCCTGAGTTCAATTCCCAGCAACCACATGG
TGGCTCACAACCATCTGTAATGAGATCACATCCCCTCTACTGGTGTGTCTGACAACAGCAACAGTGCTCACATACACAAAATAAATAAATCTTA
AGAAAGAAAGAAAAGAAGAAGAAAGGGTGAGCTGGATTGATCGCTCAGCAGTTAAGAAGGCATACTGCTCTTTCTAAGCCCCTAACTTCAGTTC
CCAGCACCACGTCAGGCAGCTCACGGCCCTCAGTAACACCTATTCTAGACGGTCTGACCCCTCTTCTGAGCTCTGGGGACGTGCACCCTGTGTG
CACATACCTACACACAGATACACATATGCAGATAAAAAATAAGGTTTTAAAATAATGTAAATAATCAGATGGACTAACGGCTCCGACTAGAGCT
CAATGTTCAGTCATTTGCCAAGCATTTGTGACCCCCTACATTCAATTCCTAGGGCTGTAAGAAAGCAAAAAAAACGGAAACCTTCACTTGAACC
TCCTTGGTGATTGTTCTGTGTTTTTTTTTTAAATACAGATTATGTAAACATTCATTTTGTAAACCAATGTTGAAATTTCAAAACGAAAATCATT
AGATGATTCTTATTAAATCCCTCATTCTTCCTTGATTATCCCTTTGAAGGCCCTCCTGCTGAAGACCTCTTTTACCCATTGGTTTACTTTCTGT
CTGTTGTATATACCTGTAATACCCTGTGCACTCTCTCTCCCTCTCATGGCATTTTCTATTCTGGCTAGTAACATCTGTGTATAACAGATCTCTG
CATACAGACTGCCAGCATCTCCAGAACAAGGGAGGACCTTTTCCTAATATGTGTATCCAAAGCATGTGGTAGTGTCTAAGACAGTCACATGATC
AGTTTAATTAATAAAAATGATAGTTGAGAGAAGGAACTCATCAAGTGAGTCTTTTCTTAATGGAGAAACAGATTCATGGTTTAAATACAGGGGA
AGAGGCAGGCACTCGAAAAGAGGGCTTGCTGCCTCCAGGTCAGAATCCTAGAGGATTCTAAGCAAAGGTGTAAGATTAGAACCGAGCAGCTGCT
CTTTTGAAAGATAACAGCAAACTTGGGACATTAGTTTTTTTGTAGACCAAAGACAGTCAAATGGCACCAATGAAAAACAAGAGAATGTGTGCTG
AGTTACTTTGAATTAAAAAGTTTAACATTTTGGTTGACTTTAATAATTGTTACATAGTGTTTGCTGAGTTGTGTACTGGAAGCCAGGTGAGGAA
GGTCCTGGGTATACAGTGATGGGAAATTTTTATTACAGTTTGCATGTATACAGTAACGAGTCAAAGCAGCCGAGTGACGTGGTACTACAGTAGC
CACGGTTATGTGGGTCAAAGCAGCCGAGTGACATGGTACTACAGTAGCCACAGTTATATGGGTCTAAGCCAGCCTTGGTGACCTGACACTGAAT
AAAATGAGCTCTGTTCCCTCTTGCTACTTCAAAAAAAGAATAACCTAAAACACTGAATTTAAAAACCACGTTTAAGCCCGGCAGTGCTGACACA
CACCTTTAATTTCGGCACTGAGGAGGCACAGGTAGGCAGATCTGTGTTCAGGGCCAGAATGGTCTACAGAAAGAGTTCCAGGACAGCCAGGGCT
ACACTGAGAAACCTTGTTTCAAAAAATCAAGAAAACAAACAAATCAACAAGTTTAAATGGAGAAGTCTTGTGAAATTCAATTCAAACTTAATGT
TCCCGGAACTTCTAAAGAATGTTAACTCTCTTCCCAGGTAGAGCTCTAGTGGGGTTCTCTTACAGGTAGAACAGAGTCCCAGGTGCTCCATCTG
AAGTCATTTTTAGATAACCATAATTTATAACTTTTACCAGATATATCATAATGGTCATATACCAGATATTCCTTCTCCGGATTTCCTCATTTCT
TGGTCATTTCTTCCCCACTACATTCATTGCCTGCTTTTAATATGAGATATTGAAAGATAAAACAGTATTAACTATAATAATTGTATTTTCCTTG
ATATGTCTTTTGATAATATTGTTTACTGTGGTAAGATAGTTCGTTATGTAGACATGTAGGTCAGTAAGACTCATCAGCGAACTGTGTTCTGTCC
ATTTATTATATGTACTTTAATGTAAATTACACTACTATCAGGTAGACAGACCTGAAAGATAACGTGGCTAACAGACCCAAACAGTTACCTTCCA
GTACGTTCTTATGTGAGTGGGTGACTCCATTTCCTGGTCTGAATTTGTATTCTCCCTCTGCTCCCATCATGGGAACAGTTGATTGCAGAAGTCT
TACGTGTTCTTTGAATATGCTTAGAAGTAGACTGGGCACAGAAAGTTCGAAACACCTCTAAGTTAGAAAAAAAAAATAGGTATCTCTGATATTC
CAAAAATAAATAGATTTGGAGTGTGATCCAGTCTTTCGACTACACAAAGCCCTTAGATACAGTTGATTACATTATGTTTTTCTTTTTTTCTAAG
TCCTTAGTATTGTCTTTAAAGATTGATTTATTTATGTTATGTGTATGAGTACCACATTATGTTTTTCAAAGGGAACAACTCATTAAGTGTTTAA
TCTCTGACTTTTTTTTAATGGTACTGAGAATGGAATTGAAAGGTCACCCATGCTAGGCAAGCATTCCACCACTGAGCTGTTCTACCGGCCCTCT
TTACTCTTTATACTGAGGCAAAGCAGTCTCATTCGGTTGCCTGGACTGGATTTTCTCTGTAGCTTTAACAGACCTGAGTTTGCAGTCCTTCTGT
CTGAGCCTCCCAACCAATTGAGATCGTAGACCTACACCACCAACTTCTTTCATTCTCTCCCAACCCAAGTTCTATAACTTGTCTTAGGCTTGGC
TGCATCTTAACTATCTTTGTTTGAATGAACATTTTTAGCCATTATTTTAGAGCCATATAGCCCATTCACTCTATTCTGCTTTTTATATAAACTC
AACTTCTTGAAAACTTAAGAATTTTGATCATTCTTACCTTTTCTAGGATACACAGACAGTTAGGACATTGACTCTCATCTCAAAAACCATTCAG
ATTATTGGAAACTGGGGATGTCAGTCCAGAAAAAAGGTGAGTTTATAACTGTTTCCTCTTTCCATACTTAACAAATTTTATTATATACTAAGAT
TCCTTCTTCACTTACTTCCTTACATGTTAAAAATAAAACTGAAGAGAATACATATTCACATGCAATAATGGTCTTTTAGTGGGTGTTCTACTGT
AGTCACCTTTTGAAGGAGACGGTGATACTTAACCTGATATACCCGTGGTAGGGAAAAAACTAGGAAGAAGACACAGGCACAGCTCAGTTATGTG
GTGGTCTGTGCCATAGTCACCTAACAGCACTGGAAGAAGCCTTCAGCTCCAGGATGGATGATTCATGGAGACATGGACAGCTTTATCCTTAGCT
TCAAAATACAGGCCCGTCATTGTCTTGTGTTCTACCTCAGAGCTTCATAAACTTGTCACTCATGAAGCCGTTTACTTAAGAAACTTATGCAACC
TTACGTATAAAAATCAAACATTTACTGATAATAACTTACTTTAGCATTTTGAAGTCCTCAGCTCCCAGTGCTGAGGAGTTTTTTCTTCCATTTG
CTTTTGCAACTGCTTTCTTGGGGCTTTTCCCTAGTTTAAGACCTAGAAGGAAAAGGTCAAACAGTGACTGCCAGTTCAAAGCTATATGCAGGCT
CTGAGGGATATTCACTGCTCCTCGGTTCCTCTCTCACCAAGAATGTTCATCAAAGAAGGGAGAACAGCCAGGCTCAGATCAATAAAGTAACTGC
AGGTCACTGACTCTACAAAAAAAAAAAAAAGGCTTTGCTGGCACCCTGCATCTGGCCCAGCATGAGGTATCTTTGGCTATCAGCAGCTCGAATC
AACAGAATGTGAATGGAGCCTCATCATGTTCAGGGAGAGGCTGAGCATGATATCCCATGTGCTGTGTGGGGAAGGCTAAAGACCATGAGTGTGT
GGTAGCCATGATCCTGGAACATTCTGGGTTCGCTGACTTGGAGGAATGCTCTCTAGGAGAGCTCTGAACAAGATGGTGAATGTGGCTGTGAGTT
CCCAGCCCGCCTGCTGTCCCACATCGAGAAGAGTTGAAGAAGCTCTCTATAGTTGCTTCTGAGCCACGATCTGGCCTACTACACAGATGAGGCA
GCACTCTTGGCCCTCTGGCTGCAGACCTGGCTCCTTAAGGCACCCAAGTGAATTGCCATGACTAATTATGACTGATTAGCCAAGAGGAGAGACA
CCACCTTACTTCCTACCTGACATGAATGAAATCTCCGCATCCCAGACGATTGGGGAACCAGAAGAGATTGTGCCGCGCTTTCCCGGAGTTGGCT
CTTATCAGTGGGGAGAACCGCATAGTGGCCACCTACTTCCCTACTCTGAAGAAAGTAGACTTGAGCTCATCTGGGGAAACAAAGCAGTTGGTAT
GGAAGCTGGAAGCCTTAAGAGGAAGTACTTTGCCTTGCCCTGGAAACCTGCCTAGGACACGGCTGCTATGAAGAGCCAACAAACACACAAAGAA
AAGCTAGGATTGGGTGACCTACACTTCCTCTGATCTACTAACTAACCTGTATTAGGTACCTTTATTATGTATAACAAGAGGAGTTAGCTGATCT
TAATGGGAAGTCTCTGTAGGACACAGTCTCAGGCAGTACTTCCTGAAGGAGGAAGTTGTATTTGCTAGTTTCTGGTCCCAGTAAATGGAAGGTT
TTGCCATTTACAGGGGTCTCAGGCAACTACAGTCCTTGACAGGGCTTTGTTCTTGCCATCAGTCCACATTCACCCTGTGCTTCATCTGATCCCC
ACACTAGAGTGTTGTAAGTTCCAGGTTCTATAGGGAAAATTTATGAAGTTGTTCACAATTTTTCATTTGTGATAAATACATTTGAACACTCCTA
AGCTGGGCCCATTCCTGTGTGGCTGGTGGGAGCAGCCCCTGTGACCTGGAGGCCTCACCCTTATCACTGTCTCTCACCTCTCAGGATCTTTCTT
TCCCTCCCTGCCTTCTTCCTTTCCCTTGAGACTAGAAATCAAAGGGCTGGGCTGTATCTACCTCAGTGGGAGAGCCCTTATCTTTTATAAATCA
GACCATAGGTTCAGTCCCCACTACTACCATTTTTAAAACAAAAAAGAAACCAGACATTGGCCTGCATAGCTTCCATCCAGATCTGCATCCCTCC
CTGTGTTTACTCTGAGCCTCTGGAGAGCCATGAGCTTCCAGGAGGCCCTTGTTTTGGATTCACAGTTGCACTTGTCAGGAGACCCCCAGGTAGA
TTTTTATTTCTTACTTGGTCCTTTAGACCTTGCAGTAATGATGGCTCTATACCTTATTGTATGCTAGTTAAACCTATCCATGCATTTGTAAGTA
CTTTTCAAATTCTCTGTTACATTTTTCATTTTGTCATATAATAATAATACAAATTTATATATGCAATGTTTTAATACATATTTACATTGTATAT
TGGTCAGATATTTTAAACCACTCTTTGTATATATAATTTTACCACTTATTAAAGACAAAATACAAATTTGCATACTAACGAGAACGATATACTT
GTTTATGTTTACATAAATAAATACTAGTTGAATATTTAGAGTTGAGTATATAGAGCATCTTCAGTGTTTTTCAGAGTTGATTGTATTTTGATTT
TGTAATCATTCAGTTTACATAAACATATAGTACAAAATGGCAGAAGTATATTTAAGGCCATTTTTTAAATTGTTGGAAATTTTGTCCTAATCTC
AAGCTAGAATTTACTTAGTGTTTCTTTGGTTTTTGGTTGGTTGGTTTGGGATTTATTTGTTTGTTTAGTGAAACTTAAGTCAGCAACATAAGCA
ATTAAAGTCAAACATTCTAATAAAATCCAAAACTACTAATTGATACATGCTGACTAATGATGTGGGAGAATATTATAGGTTTTTGTTTCTGTAA
TTAAGCCATTATGTTTTTGTTAGAGCAAAAGCCTTCATGTCTAGTAAAAATAGCTCAGTTCCTAGTATACGGTGGCCCAGTCCTTTGCGCTGAG
GCCTTCAGGGCAGCAGTGACTGGGGATGTGTGATGTATTGGCATGCAGAGTGCAAAGCATGCCTGCGGTACCATGCAGCAGAAACACCTCAGAC
TTGGACATGTTTGATTTTGAACTAGTTCTTGTTGTTTCTGTCTTTAGAAACCTTTATTCTTCATAAGTTTCTCATGACCACATGTGAGACACGA
CTAATAATTTAAGAACTGTGCGTATTTAACATACACAAATCCTGTATTTGTTTTCTCATAGTCACGGTTCAAAAAGTCAGTCATGTGTGAATTT
CTCAAAATGTTTCAACAAGAAAGATATTTTACAGATGTCAAAAAGGTATCCTTCTTTCTTGTCATCTAGTTTAAAGAAATCAACATCTCATATT
CTTCCAAAGAGTCCATTTCCAGCTTTAAAAAAATAAAATCATGTTGAAACTGTCAACCATGAAGTCTTTTTTGGGTTGGAGAGATCGCTTAGAG
GTTTAAAGCACTGACTGCTCTTCCAGAGGTCCTGAGTTCAATTCCCAGCAACCACATGGTGACTCACAACCATCTGTAATGGGATCCGATGCCC
TCTTTTGGCACCTAGGGCATGTATGCTGGCAGAACAGTGTGTACATAATAAGTAAAGAAATCTTTTTTTTTTTTTAAAGGTCTTTTTCTTCCAA
TTCTATCAAATAAAGCTGTGAGATTAAGCAAGTCTTAACAATAACTACTGTAAGCCTTAACTCTATAAATACAGATTTCTATGCAACACTATTG
ACATTTGGGGCTAGGTAGTTATTGATTTTGCATCGTAGGATATATGGCAACATCCATCAATTAAATGTCAATGGCATATACCCAGTTTTGAAGG
CCAGAAATGCTTTTAGCTATTACTAAATAGATGTCCCCTGGAGGATGGAACTGGCTTTGTTAAGAACCTTTGTTCTAGGACTAAAGCCTAGTAG
AGCTTGTTATGTAGTAGAGTGGGTACTCACTTGCCATAGCAAAGCAAAATCGGTCACCAGGATGGCTCAGCAGGTAAAGGGACTTCTTAGAGGA
CCTTATTGCTGGGGTCACAGTGATTGGAAGGAGGGTACCAGCTCCCATAGTTGTCCTCCAACCTCCATGTGTGTGCTGAGACACACACATTCAC
ATAAAGTCAGAAAAAAATGTAAAACAGTGTTTTCAATATAATGAGTATGCATGGTAGTAACTGGAAAAAAATAAGTAAAAATAAAAATATATAA
ATGCCTACAGCATAAAATGTCGATATAAGACCTACAATATGTAAAAAGGAGTGTCACTAGAAACTGAGAAGTCTTTTTAAGTCTTTAATTTTTT
GGTCCTTAACTTGTTATTCATTCACATAAAATACATTATTATAACCCTGAAAAACTTGGAACAAAAAATTATCTTAGGATATAGCTAAACTAAA
CTTGAAGAAAGTAATGTTTCGTTATCACAATCCTAACTTAGTGAACCAAGTTAGCAACCCTAGTCTTAAAGCCTGTTGAGTTTCTATACATGAT
TTAGCTGTTGATGGCCAAGAACATTTTTACTGAAGTACCTGTTTAGACTGAAGACATACTTTCTCGAAGACTCTATGAGTGAAAATGCTCCCAT
CAGATAGGGCTTGGTTTTCTTTTATTTTTACAGAGTCTCACTATATAGCCTTGGCTATCCTAGTTCTTAGTATGTAGACCCGGCTGGCCTCAAA
CTCACAGGTAGCCACCTCCCTCTACCTCCTAAGTGCTCAAACTAATCGTGTACACCACTATGCTGAACCTAAATTTTTTTCTCCTTTAGTTGAA
AGCTTTTGAGAAAATTTAATAATATGCTTTTAATTTGTAAAATAAAATTACAAGTTTTGTATANNNNNNNNNNNNNNNNNNNNNNNNNNNNNNN
NNNNNNNNNNNNNNNNNNNNNNNNTACATTTACTGTCTCATGTATATCTGTAGTCCTGAGGTAGCATAAGATAGTTTGTCCTAAAATCTTAATT
ATCGCCAGGCAGTGGTGGCACACGCCTTTAGTCCCAGCACTTGGGAGGCAGAGGCAGGCAGATTTCTGAGTTCGAGGCCAGCCTGGTCTACAGA
GTGAGTTCCAGGACAGTCAGGGCTACACAGAGGAAACCCTGTCTCCGGGGGAAAAAAAATCTTGATTATCTTTGTGTGTGTCCATGTGTCTTTC
TGTCTGTCTATAGATCGGACCTAGGATTTTACATATCCTACACTGTTCTGTCTCCAGCCTCTATAATTAAGGAATTACGAGTGTCCATGTAACT
CATCCCATACTGGCATTTATACTAGTGACTTTTAAGTGACTCGTAACTAAATCATACGCTGTTGCCCACACAGTAAAAGGAAAGGTAACCAGCA
GAGTTCTGGATACAAGGTGGTTATGCAGTTTGGTGACAGAAGCACAGCACTGTGAGGGAGTGAAGATGTTTACAGCTCTAAGTAGAGTGAATCT
AAACCAGCTCCTTACCTACAGTTACTTACGTCTGAGTGGTTTCACATCACACATTGGCTTTTATCTGATACTTCTTCATATAATGCTAAGAAGT
GAGATATTCAAGTAGCCATTAAACTCCACTGGTGGATGGCCCATCTATTAGAACTACAGATGAGACAGCATACTTTGTTACTGTTGTCCCTGGA
TACTTGAACCTGCACCACCAAGACAAAAAGGATTCTGTTCTTGGTTGTTCACTTACCAACATTCCCTTCCAGCAAACTCGAAGGAAGCCTCTTG
AGTGAGTGCTCTGGTGGGCGAATCACAGCACCCATAGCCCCAGCTTGCTGCGCCTTCAGTCCTGTAGAGGAAGCACTCGTCCCTTGATGTCCTT
CTTATAAAACTATGTGCTTTTGTCGTGTGTATCCTAAATCCTAAACAAAATAAAGTTAAAAACAAAACCGAAGACAGCAATACAGGCCAGACAA
CTGGGAGCATAATATCTCTTGGATAAGCAGATAGATAGGATTCCTCTCTAAGACCGGGAGGTGCTTTGTGAAGTGCTGTTTCCTCTTTCCACGT
GCTGGGAAGCCCGTGACTAGTCCAGCTTACATACTCATGAAGCTAAATGCTGTTCACTGAGTGGCCTCCTGTTTCTAGCAATGGATGCTACAAA
TTTTCTTGAGCCACATCCTTATATTCTGCATAGAAAATTTGTAAATATTTATATTTGATTTTAGCTTAGCTCATTTGTCAAGGTCACCAGTTAT
ATATAATAGAAATCAGCAAGCTATTTTCTATGAATAACCAATGAATGGGAGGGCTTATTGGTTACATAAGACCAATAAATCCTTGTACTTGTAT
TAAATATCCCCCTTTGGTTCCATCCAGTAGTCACACACAGTATTTATTTGTCACGATGGAAAACACACTGTAAAATAGTACATGAGAGCCCTGT
GCCAGTGTTTGCTGCAAATCAAACATGAGAGTTTTAAAAGGGAAGAAAAATAAATGCTTTGAGCCAGGTGGTGGCAGCACATGCCTTTAATCCC
AGCACTTGGGATGCAGACGAGGGTAGATCTCTGTGAGTTTGACGCCAGTCTCGACCACAGAATGAGTTCTAGGCCAGCCAGGGTACCAAAAATA
TGGATAAGGGCCAGATGTGGTGGTATATGCCAGTCATCTTAGCACTGAGGAGGCTGAGACAGGAAGATTACAGTGTGTTTGAGTTCAGCCTCAG
AAATAGTGAGACCCTGTCTCAAAACGAATTACAGTTAAGGATTATAGATTGAGTTATTTCTCTAGGTAAGTACATTCAZAATTTGAGTAAGTTA
AGAAACAATTTTTGCCTTTAATCCCAGCACTTAGGAGGCAGAGGCAGGCAGATTTCTGAGTTCGAGGCCAGCCTGGTCTACAGAGTGAGTTCCA
GGACAGCCAGGGTTATACAGAGAAACCCTGTCTCAAAAAACCACAGAGAGAGAGAGAGAGAGAGAAACAATTTTTTAGAACGCCTTTCTTTTGT
AAATTGGGAACTTTGTATAACCAAATGTATTTTATTTCATAGATTACTATAAGATCAGCCTCTTTGATCCAAGGATGATCTAAGATCTGAACTA
TTGCAATATTTAAAACTTCTTGAGTGGACATCATGTCACAGTGCAAAATTAAACACTTCATCTCAAGTGATAGGTCACAAACTGCAGGTGTAGT
AAAACAAAAACTATATGAAATTACCCTTAGGCTATGTATATGAATTTTGTTTAGATATCAGTCCAGTCCCCAAGATACCTTACTATATATGCAA
ATGTTTCAGAATCCTAAATCTAAAGCACTTTGGTTCTAAGCAAGAGATTTCCAACCTCCATATATATATATACTTTAGTAATAAGAAATTCCCT
AATATAATCAGTGACATGCAAGATAAAAGTTTGTTTGTTTTTTAAGACAGAGTTTCTTGGTATAGCCTTGGCTATCCAGAAACTCATTGTAGAC
CAGGCTGCCTCAAACTCAGAGATCTACCTACCTTTGCCTCTGGAGTGCTGGAATTAAAGGTGTGTGCTGCCACCACCACCTGACAGATAAAATA
ATTTTTTATAATATACCTTATTTACTCACACACTGTAATACTTCCCCATCTCCCCATTTAGTTCTTGGATGAAATTTCATCTACGGAAACTAAA
GAGTCCAGTGGTACCAGTGAGCCTGTGCACCTGAAAGAAGGGTAATTAACTAAATGAGACATGAAAGTTATAACTCACTGTAGACAGTAAGTAC
AAAGAACATGGCTTTGAGAAGGAGGACACCTGAGTTTTCATTCTGTTCCACAGCTTCCTAACCGGCTTCACCCAGGTAAATCACCCTCACGGCC
CTGTCTGCTCCGTCTTAGGACAGCACACGCTGACTACACAGTCCCAGGCTGTTCTGTAGTTAGGAAATGGCTCTGTTTCCTTACCGAGGAGTGG
TTGTTACTAGGAATAATGAGATGGAAATAACTTTCCTGGCCCTTTTTATTCTGTATAGCACAATTCTAAAACGACATTACTTAGAAGAGGAGAG
GTGCCTCACTCATGGTTAAGAGAGGTAGTGGCTCCTGTAGAGGACCTGGGTTCAATTCCCAGCACCCATAGAGCAGCTCACAACTGTTTGTAAC
TCCAGTTCCAAGGGATCTGATGCCCTCTTCAGATTTCCACAGGCAATGTACACTGTGCATAGATGTCATGCAGGCTACGCCATTCCTAAAAGGA
GAACTAAGACAGCCCTGCATTGATAGAAGGACGTCCTGAGTCATCCCCAGACGTCACTCCTGTGCACTAGTAGCCGTGCATGGCCGCGATGCGA
CCTAACAGTCAGGGTCAGCTTCGTTTCAGGGCAGTGGTTTCCACCTCTGAGGCTTAAATGTTTGCTTCTGTCTGTTATGTTCGCAGTGAGATGT
ATAAGAGAGCTCAAGGAAGAACCCGTATTGGAAAGAAGAACTTCAAGAAACGATGGTTCTGCTTGACGAGCAGAGAGCTCACCTACCACAGACA
GCAAGGTAGAGTTGTGCTTGGGCTTCGTTGTGGCTTTACTCTGCTGGTTCATGGTGCCGCGGTGATCGCTGCACAGTAAATGGTTCAGAGTGTC
TGTCCCACAGTGACACACAAAACTGAACTGAAGTGTTTCTTTTATCACATTATGTAGTATATAATAAAACTATAACGTAAAAGCCTCGTGTAAA
CCAGTTTGAGAATAAAACAACTGGACTTGGTAAGTAAGACAGTATAACAATACAAAGCAGAAAGGCACAGACTTAACAGGTTAACTAACAACCA
CAAGCACTCAGCTAATCTGTTAACTCATGGTGCTCAGTAGGTTTTGAAGTCCCATGAAATCTCATGGGTAAATACCAACTAGGAGAGCTTCTCC
TATGAATACCGAAATGATGACATAAAGGCCTGATACAAGGTACTTTGAGAGAATATAGAGTGCTTCATTGGGAATTCCTGAATAGTAGAATAAT
TGAGAAGAGAGATATTTTAAAGAGATGAGGTCTTGACCCAGAACTCTGGGCTTAAGCAGTCTCTTGCATCAGCCTCCCAAATAGCAGGGACTAC
TGGCATGTGTGCACATCTGCACACACACATATGAGCAGTTTAACCTGAAGGAATGAATAGACATGTATATTCCAAGTATATTAATAAGAAGTTT
TTTACAGTGTGTTGCATTTTAGGCATCTGCATAGTTTGTTACAGTATATAATATGTATACAGTATATAAATATGTAACTAACGATCAGTAGGCT
TACCTTTGTTTTTAAAGCTGTCTTTGAATATTTCAGAATTCTAGTTTATATTAAATTTTATATAAATATTCTTACCTATGGATACCATAGTTGT
CTGATAATGGTTATTTTAATAGCACAAGCACAATTTAAACCAGGCATGGGGGTACATACCTCTAATCCAGGCTCTAAACAGTGGTGGGAGTTAT
AGGACAGAGACAGACAGATCTCCATGAGGTCGAAGCCAACCTGGTCTACATTGTGAGTCCTTAAACAGCCCAGATAACAGAGAGAGACTGCTGC
TTAAAAAAACAATCAAACAAAAAACCCTAATAATTATAACAACAATAGTGCAATTAAATAAAATTTAAGATAAATTAGTCATCTTCTGTGAATA
AACAAGTTATTTGTTCCTCAGTTAAAACACTATCTAGCCAGGCGGTGGTGGTGCACGCCTTTAATCCCAGCACTTGGGAGGCAGAGGCAGGCGG
ATTTCTTGAGTTCGAGGCTAGCCTGGTCTACAAAGTGAGTTTCAGGACAGGGCTACACAAAGAAACCCTGTCTTGAAAAGCCAAAAAAAAAAAA
AAAAAAAACACCAAAACAAAACACTATCTAATCTAACCCAGCATTCCAAAGCCTGCTAGTTAGAAAGTTGTTGAAGTCAGATGATAGTCATGGT
GAATTTCCTGACAATCTTACTATGTACATATACACATCGAGTTTGCATAGGAATTTCATGGACCTCAGAAGCCTCAAGTGTACCTACAGTTGTC
ACATTTAGCCTTTTGTTCTAGCCAGTGATGCTAAAAAAGGATGGACTTTCACAGAATTAAGCTAGTAGAACTGTAAGAATGGATGTATTAGATC
TGTGTTGGTTTTATGTTGGAGGAATACACAGGATGGTGAGATTATTTGCCAAAGCTTACAGTTCTAAGCATGAATAATTGTTGTTTTTAACTAT
TTTGATGGATTTTTTTCCAAATTGGATTACATCCTTTCCTGCTGTCTAAAAAAGAATTCATCGAACATAAGTTCACATTTTCTGATTTCTTGGG
GTGGTCATGGGTGATATTACTGCATTTTTAGAGTGCCAAAGGGTAGGTGCAGCTGTTTTTTCCAGCTGACAGCCTTTGTTCCCAGTTAAACACC
TCAGAAGCTGCGCTTTTGTGTCCGTGTGTTTGCTTTGTACAGTTTATCTCTCACCTCTTTTAGTCAGGCTGTTATCTTAAGTTTCCTTTGCTGT
CAGTGACGTGTCTCACTCCCATCCCTGTAGCCAGCCTTCATCCCTTATGCCTAATATACTAGGGATTAAGGTGCAGATACTATAATTGCTAAAC
TACACCTAAGATCTAAGGCTTCGAAAGCAGATGTAAGGGCTTTCCCTCATAAATAAAGTCTCCGAGCTTTGTATTTCCTGCTTGCTCAGCTTAC
TTCTATCTTCTGGCTGTTTTCTTGATAGCCTAAACTAGTCATTATTTTTTGTTGCTACAGCTACTATATTAAATTTTGCTATACAATAAATTTT
GAGGTGCCGGGCGTGGTGGCGCACGCCTTTAATCCCAGTGCTTGCGACGCAGAGGCAGGCGGATTTCTGAGTTCGAGGCCAGCCTGGTCTACAA
AGTGAGTTCCAGGACAGCCAGGGCTACACAGAGAAACCCTGTCTCAAAAAAAAAAAAATTTTTTTTTACATTTGGTTTGGATTTTCTATATTGA
TACAGATTAACGCTATATTTCGTTACAACATACTATGAATATATGTTTCAACTCTTGTTTAAGGTGTTGTATCTATGCAATGCTTCAAAATGCA
ATATTAAGTTCCATATAATGATCCTTAATTTTCCTCAGAACTTTAAAGTTATAATACTCTGACCTATGGCCATAGTATCATAGTTCCATTCTTA
GCTTACCTCAGAAAATAAGTAGACCCCTAACCTAGTTAGTAGTTACATGGAAAACTACTTGGGAATAACACGTGCTGTAGGTGTGTGTGTGCGC
ATATTTTATTTTTATATATATTGCTCCATTGTTAATAGCTTCCATTGTTGCTAGTGAAAATTTTTATATCTGATTATTAAATTTCTGATGTGTC
TCTCTGGAAACTCTTGTAACATTTCTTTAGTAAGTTTTGCTATTTTGTGACCCATAATTTAGAAATTTTTCCTTTTTCTTTTTCTTCTATTCCT
GCCTAACACTTGGTATATCTTTCCATTTAGAGACTCCTTATCTTTTTCTTAAGGGCATTTAGTCACTTGCCAACACTTTTAAGTCCTATGAGTC
TAAGCTTGTATTATTGTTTCTATGTCATTCTGTGTTGTAGTTTTGGAAACTTCTTGGAGAGATCTTTTGTTTCTAACTCACATTGTAATGTTAT
CATGGTTGACAGAAGTACCCTTCATAGTGTAAGAACAGATAGGTAGCCCCTAGAGCATCTAACATTTGTAGTATTAGAATTGGTTCCAAATGAA
TAAGTACAACTTTAGAGTATGGACATGTTGTAAATATCTAACACATTTAAAGAAAGAATATTTTTAAATTATCTGGCCTCCACTGTCCTGTATA
GCTTGGTACCCAACGCTGTCTCTCTGTCTCCTTTCTCCCCCAGATCATACCTCTGATTCATTCCCTCAGATGTTCTCTCTATGTGTAGCTCTGC
TTTCGAATGCTAATTTTCCTATCTATTTGGTTACCGCCTTGACAGTTTGCTCATCTTGTGTTCTACAGTCCATTTACCTACCTTAGGGTTCAGT
AACATACTCACAATGATCATGTTATCTCATTGCACTGCCCTGCCACCCAGCTACAGCCTTGCTTCACTAGCCTGTCTAGTTTCGCCTGATGGAG
CTCATCTGTTAGTTAACCATCCTGCTATGTCTGAGGCTCCAGCTCCAGCCTGCTGTGCCTGCACCTCTCCTAACTTCTCCCCAGCTGTGGCTTC
CATCAGCATTTCCTTCCGACCCTACCTTCTGTCCTCGCCAATGTTATCTTGTCTGCTTTTCTTTTGTTCCTGTAGATGACTGGTATTTGTTGAA
TGTTATTTCCACAGGGAAGTTCTCTAACTGCCCAATCTAGACTAACTTTCCATTACATTTTGTCACATCACTTCAGTTTATCTTCGTCACAGTG
TCCATCTCTAGTTAATATTGCTCTACCAGTCTTTTCAGAACTCAATACAGATTTCACTAGGAACCTATTCCCTGTTTATTGTTCTGTCTTAAAT
TATTACAATAGTACCTGGCATATAGTAGACATTCAAGATGTATCTTTTTAAAAGTACATGCCATGTCTGTTTGAATCACCTTAAATTTTAGGCT
TTGTACCAGGAAAGTGTCTGAACAACTATTTTGTATTAATGTCTTTATTTACAGCAAAAACAAAATCACAATTAACCAGATACTGTTCTTTGTC
AAAAAAAAAAAAAAGGTCACAGCATTAATCCTTTGAATAGTGTAAAATAGAATGTTTTTAGCTTCTTATATTTCAACCCACACGTCCTTAAAGA
AAGGCTTGAGGAAGAAGTAGAAACAAACCTTTGTTGGTGTAAAAATGCCATCACAAAATGACAGAAGTCAAAACTGCATTTGTCATTAGCTTCT
TCTATAACTGGATGAGGGACAGATACCCAGGCTGTACTGACATGCATCATCTTACAGGAGGCCCTTTAACAAACTCAAATTCCCTTACCTACGT
TTCACATTGTAAACCGTTAGGGATTCCATCTGCTCCATAAACTCTCACATTCTCTCTAGCACCTCCTAAGCAAACTTTGTAGTGTCTAGCTAGT
GACTCGCTAACCGGTGACAGCTGTAAATAGTTTAAACCATGCTTTGGAGCTAGCAACATGAGTCACAGGGTACACGATTGACTGTCACCAAGAT
TGATAAGCAGTCCACTGTCTGGGACCCATATGGTAGAAGAAGAGAACTCATTTCTGCCAGTTGTCCTATACCTCTGTACATGTGCTGGGGTACA
CGTGCAGGTACATACATGTGTGCGTTCGCACACACGACACACACACACACATGCACACATATACACACATACACTCAAACACATACACACACAC
TAAAATAAAATGTAATTTTAAAAAAATTTAAACAAGGCTCATGGTGCTCATGGTGGCACACGCTTTTAATCCCAGCACTTACAACGCAGAGGCA
GGTGGATCTCTAAATATGAGGCCAGATTGGTATACAGGATGCGTTCCAGGACAGCCAAAAGAGACTTTGTCTGGAAGGAAGGAAGGAGAGAGAG
AGGGGAGAGGGACAAAAGAGAGAAACTTAAGAATTCACTGCTTTTAACCACTTGGTTTTGCTCAGTTTCCAGCACCAACATGGCGGCTAGCAGT
CATCTGTAACATCAGTCTCAAGATATGGAAAGCCCTCTTCTGACTTTGGCGGGCGGGGCAGAGGGAATTGTTTGTTTTATTTTTTTGAGGGCAC
TGGGCACACATGTGGTACACGTATATACATGCTGCAAAACACATCCACATGCATTACGAATAGAGATGTAGATCACAGCTAGAGCACTTGCCTA
ACATGCATCATGCTTTGGGTTTGGTTCCTTGCACATATACACACACTAAACGATGATGTTGTTGCTGTTGCTGTTGTTGTTGTTTTGAGGGCTA
GTCCTTTAATTAAATGTTAGGTTGACAAACAGAAAGGATTCTACTTGAATAGTCATATTCACTGTGGTCATAGCTCCTGAGCCTGGGCCTCAAA
GTGGGTCTCTGTCACTAGACACATTAGTTCTTTCAGCTGCCACATAATTAGTGTTGCAAATTTGTAATAGCATAGAAAATAATTGTCCATATAA
AGATCAAACTTAGATGCTTTTCCTTGAAAATATTTTCATTTATGTGTTAAAAGGCAGGGACATTCCTTTACATTAAACATCAAAATTCTCTTTC
CGGGCTGGAGAGATGGCTCAGCGCGTAAGAGCACTGGCTGCTCTTCCAGAGGTCCTGAGTTCAAATCCCAGCAACCACATGGTGGCTCACAACC
ATCTGTAATGAGATCCGATGCCCTCTTCTGGGGTGTCTGAAGACAACTACAGTGTACTTATAATTAATTAATTAATTAATCTTTTTTAAAAAAA
TTCTCGTTCCATATTATACATAAACCATCCAGAAGTCTATTGTGGATGCATATGCTTCTATCAGCTAGTGGAATTAGCCTTCCAGAATTAACAT
CTCATCTTTATGGTTATTACAGTAATTCTTTTAATTTTGTCGTCTTTTATTATTTAGGCAAAGATGCAATTTACACTATTCCAGTAAAAAATAT
TCTTGCTGTGGAAAAATTGGAAGAAGGCTCTTTCAACAAGAAAAATCTAAGTTGCATAAATATTGAAGCATTTTAAGTCATCAGCTGTACGTAA
TTTTGGTATCTACCATTCAGGTCTCTCAATAATGTCCCAAGTTAGGCCACTCAGCTGGTGCAGGACCCTCCAGTCCCCAGGATGACATCTCTGT
TCCTTAGCATCTCCTCACTAACTTGTGGTTCCCCCAGGTTCTCCTCCATCTGAAATTACCTTTTTCTTCTTATGCACACAGTGGCCTCCTCTGC
ACTTGTATGGCATCTGCAGTCTGTATTGTTCTGCTTAGCCCCATTGGCTAAGATGATCTTTGGTACTGACCTGCTTACTGCACCAATTCATTCC
GACACATTAGCAGACATTTCTTAGCCAAGCAATCCAGGTCTCCTAAGTGCTTTTTCTTTTTGTATAGTATATGTTGTTTTTAAGGTTTCTCTAA
CTTTTTATTTTAATTTGCAATAAAGATGTTCCAAGTGATACATACAGAGAAAACGCTGTACATCCAAGCAAACAACTGTGTGGAAGCCAATGAG
TGGATAGATGTCCTGTGCAGGGTGAGCAGATGCAACCACAACAGGCTCAGCTCTTTCCACCCCTCAGCGTATCTCAACGGAAACTGGCTCTGCT
GCCAGGAGACGAGTGAAAGCACACCAGGCTGCAAGCCGTGCACCGCGTGAGTAACTCATGACTGCATGCGGGCGTGGGTGTGAGAGCATGACAG
ACGCTATGTAGAAGTAGCTGGACAGAGGCCGCACGGTGCTGAAGACATTTCTATAAACCGTGTCTAGAAAGGCTTGGGTTGTTGCCCAGTGGTA
GAGTGTCTCTCTCACCTGACACACACAGGGGCTTTGGTTTAATTCTAGTACCACAAAAATTAAAATACAGAGAGTAAGTAAATTTCTATAGACA
CAACTGTAAGTTAGTCGTGCCCAGGGGCTAGATTGATGCATTGTTCCGTGAACAACTATAGGTTATATATATGTTTATTGGGACTGGGGAGCAG
TTAGTGCTTGTTGTTCTTGTAGAAAGAAGACTCAACTTTAGTTCCAAAACCCATCTCACACCAGCTCCAGAGCACAGATCAGATACCGTCTTCT
AGCCTCTGCAGAGGCATGTATAGGCACGCACGCATGCGCACACACACACACAGATATACATATATACATTAAAAATATTTTTTATGATTTTACT
TCAAAATCTTTTTCAAGACTTGAGTCCTTAACAACCAGACCTTGTGATCCTGTTG
MOUSE SEQUENCE—mRNA
ATGGCGGCGGCAGCGCCTGCTGCGGCGGCGGCTTCTCCCGAGGCGCCGGCCGTCTCGGGCAGCGCAGACCCGGAGACGGGAGACGAGGACAGTC
GTGAGGTCCGAGTGCTGCAGAGCCTGCGCGGCAGGATCTATGAAGCAAAAAATTTATTGCCATATCTTGGACCCAACAAAATGCGCGATTGTTT
CTGCACTATAAATTTCGACCAGGAAGAAGTTTATCGCACCCAGGTTCTTGAAAAGTCTTTAAGTCCATATTTCAGTGAAGAATTTTATTTTGAG
ATTCCAAGAACTTTCCAGTATTTGTCTTTTTATGTTTATGATAAAAATGTTTTACAAAGAGATCTTCGTATAGGAAAAGTAGCCATCAAAAAAG
AAGACTTGTGCAGTCATAGTGGTAAAGAAACTTCGTTTTCACTGCAGCCGATTCACTCAAATTCAGAAGTTCAGGGAAAGGTTCACCTTGAGTT
AAGACTGAATCAGCTGATAACACAGAATGGAACCCTGTGCCAGCAGCTTGTTGTACACATCAAGGCCTGCCATGGGTTGCCTCTCATAAACGGA
CAAAGCTGTGATCCTTATGCAACAGTGTCCCTCGTGGGCCCCTCTAGGAATGACCAAAAGAAGACAAAAGTAAAGAAGAAAACAAGCAATCCAC
AGTTCAATGAAGTCTTCTATTTTGAGGTAACCAGATCCAGCAGTTACAGCAGGAAGTCCCAGTTCCAGGTGGAGGAGGAGGACATTGAGAAGCT
GGAGATCAGGATTGACTTGTGGAATAATGAAAACCTAGTCCAAGATCTTTTCCTGGCAGAGATTAAGCTTCCTGTCAATGTGTTAAGAAGTGAT
TCCTTTCATCAAGCCTGGTACTTGCTACAGCCAACAGACAATGGAAACAAATCATCTAAAACCGATGACCTGGGATCTCTTCTGTTAACTCTCT
GCTATACAGAAGACTGCGTGCTTCCATCAGAGTACTATGGACCGCTGAAAACTTTGCTGCTAAAGTCACCAGATCTTCAGCCAGTATCCGCCTC
AGCTGCTTATATTTTGGGTGAAATATGTCAAGATCAAAAGGATGCTGTTTTGCCCCTTGTACGACTGTTGCTGCATCACAATAAACTTGTCCCT
TTTATCACTGCGGTGGCCGAGCTGGACTTGAAGGATACTCCAGATGCCAACGCAATATTTAGAGCAAACTCCCTGCCTACCCAGTCTCTGACTG
AGATGATGAAGATAGTGGGAGGCCACTACCTGAAAGTCACGCTGAAGCCCGTTCTAGATGAGATATGTGAATCCTCGAAATCCTGTGAAATAGA
TCCTGTTAAGTTGAAAGAGGGAGATAATGTACAGAATAATAAGGAGAATCTGTACTACTATGTGGACAAAGTATTCAATACAATCGTAGGATCA
AGTGTGAGCTGCCCCACTGTGATGTGTGATATTTTTTATTCTCTCAGGCAAATGCCTGCTAAGAAATTTCCTAATCACCCTCATGTTCAGTACT
CTGCAGTGAGCAGCTTTGTCTTCCTTCGTTTCTTTGCTGTAGCCATACTCTCACCTCATGCTTTTCATTTGCGACCTCATTATCCAGATACACA
GACAGTTAGGACATTGACTCTCATCTCAAAAACCATTCAGATTATTGGAAACTGGGGATGTCAGTCCAGAAAAAAGTCACGGTTCAAAAAGTCA
GTCATGTGTGAATTTCTCAAAATGTTTCAAGAAGAAAGATATTTTACAGATGTGAAAAAGTTCTTGGATGAAATTTCATCTACGGAAACTAAAG
AGTCCAGTGGTACGAGTGAGCCTGTGCACCTGAAAGAAGGTGACATGTATAAGAGAGCTCAAGGAAGAACCCGTATTGGAAAGAAGAACTTCAA
GAAACGATGGTTCTGCTTGACGAGCAGAGAGCTCACCTACCACAGACAGCAAGGCAAAGATGCAATTTACACTATTCCAGTAAAAAATATTCTT
GCTGTGGAAAAATTGGAAGAAGGCTCTTTCAACAAGAAAAATATGTTCCAAGTCATACATACAGAGAAAACGCTGTACATCCAAGCAAACAACT
GTGTGGAAGCCAATGAGTGGATAGATGTCCTGTGCAGGGTGAGCAGATGCAACCACAACAGGCTCAGCTCTTTCCACCCCTCAGCGTATCTCAA
CGGAAACTGGCTCTGCTGCCAGGAGACGAGTGAAAGCACACCAGGCTGCAAGCCGTGCACCGCAGGCATCCCTGCAGACATCCAGATAGATATC
GATGAAGACAGAGAAACAGAAAGAATTTATTCTATTTTTACCCTCAGTTTACTTAAGCTGCAGAAAATGGAAGAGACCTGTGGGTCTATAGCTG
TGTATCAGGGGCCACAGAAAGAACCTGGTTATTCTAAGTTCACCATTGAGGATTCTGTTGCAACCTTTAAGACAATTCAGCAAATCAAAAGCAC
CATAGAGAAGCTCGATGAACCTCATGAGAAATACAGAAAGAAAAGATCGAGTAGTGCAAAATACGGAAGCAAGGAAAATCCAATTGTGGGAAAA
ATATCATAG
MOUSE SEQUENCE—CODING
ATGGCGGCGGCAGCGCCTGCTGCGGCGGCGGCTTCTCCCGAGGCGCCGGCCGTCTCGGGCAGCGCAGACCCGGAGACGGGAGACGAGGACAGTC
GTGAGGTCCGAGTGCTGCAGAGCCTGCGCGGCAGGATCTATGAAGCAAAAAATTTATTGCCATATCTTGGACCCAACAAAATGCGCGATTGTTT
CTGCACTATAAATTTGGACCAGGAAGAAGTTTATCGCACCCAGGTTGTTGAAAAGTCTTTAAGTCCATATTTCAGTGAAGAATTTTATTTTGAG
ATTCCAAGAACTTTCCAGTATTTGTCTTTTTATGTTTATGATAAAAATGTTTTACAAAGAGATCTTCGTATAGGAAAAGTAGCCATCAAAAAAG
AAGACTTGTGCAGTCATAGTGGTAAAGAAACTTGGTTTTCACTGCAGCCGATTGACTCAAATTCAGAAGTTCAGGGAAAGGTTCACCTTGAGTT
AAGACTGAATGAGCTGATAACAGAGAATGGAACCGTGTGCCAGCAGCTTGTTGTACACATCAAGGCCTGCCATGGGTTGCCTCTCATAAACGGA
CAAAGCTGTGATCCTTATGCAACAGTGTCCCTCGTGGGCCCCTCTAGGAATGACCAAAAGAAGACAAAAGTAAAGAAGAAAACAAGCAATCCAC
AGTTCAATGAAGTCTTCTATTTTGAGGTAACCAGATCCAGCAGTTACAGCAGGAAGTCCCAGTTCCAGGTGGAGGAGGAGGACATTGAGAAGCT
GGAGATCAGGATTGACTTGTGGAATAATGAAAACCTAGTCCAAGATGTTTTCCTGGGAGAGATTAAGGTTCCTGTCAATGTGTTAAGAAGTGAT
TCCTTTCATCAAGCCTGGTACTTGCTACAGCCAAGAGACAATGGAAACAAATCATCTAAAACCGATGACCTGGGATCTCTTCTGTTAACTCTCT
GCTATACAGAAGACTGCGTGCTTCCATCAGAGTACTATGGACCGCTGAAAACTTTGCTGCTAAAGTCACCAGATGTTCAGCCAGTATCCGCCTC
AGCTGCTTATATTTTGGGTGAAATATGTCAAGATCAAAAGGATGCTGTTTTGCCCCTTGTACGACTGTTGCTGCATCACAATAAACTTGTCCCT
TTTATCACTGCGGTGGCCGAGCTGGACTTGAAGGATACTCCAGATGCCAACGCAATATTTAGAGGAAACTCCCTGGCTACCCAGTGTCTGACTG
AGATGATGAACATAGTGGGAGGGCACTACCTGAAAGTCACGCTGAAGCCCGTTCTAGATGAGATATGTGAATCCTCGAAATCCTGTGAAATAGA
TCCTGTTAAGTTGAAAGAGGGAGATAATGTAGAGAATAATAAGGAGAATCTGTACTACTATGTGGACAAAGTATTCAATACAATCGTAGGATCA
AGTGTGAGCTGCCCCACTGTGATGTGTGATATTTTTTATTCTCTGAGGCAAATGGCTGCTAAGAAATTTCCTAATCACCCTCATGTTCAGTACT
CTGCAGTGAGCAGCTTTGTCTTCCTTCGTTTCTTTGCTGTAGCGATACTCTCACCTCATGCTTTTCATTTGCGACCTCATTATCCAGATACACA
GACAGTTAGGACATTGACTCTCATCTCAAAAACCATTCAGATTATTGGAAACTGGGGATGTCAGTCCAGAAAAAAGTCACGGTTCAAAAAGTCA
GTCATGTGTGAATTTCTCAAAATGTTTCAAGAAGAAAGATATTTTACAGATGTGAAAAAGTTCTTGGATGAAATTTCATCTACGGAAACTAAAG
AGTCCAGTGGTACGAGTGAGCCTGTGCACCTGAAAGAAGGTGAGATGTATAAGAGAGCTCAAGGAAGAACCCGTATTGGAAAGAAGAACTTCAA
GAAACGATGGTTCTGCTTGACGAGCAGAGAGCTCACCTACCACAGACAGCAAGGCAAAGATGCAATTTACACTATTCCAGTAAAAAATATTCTT
GCTGTGGAAAAATTGGAAGAAGGCTCTTTCAACAAGAAAAATATGTTCCAAGTGATACATACAGAGAAAACGCTGTACATCCAAGCAAACAACT
GTGTGGAAGCCAATGAGTGGATAGATGTCCTGTGCAGGGTGAGCAGATGCAACCACAACAGGCTCAGCTCTTTCCACCCCTCAGCGTATCTCAA
CGGAAACTGGCTCTGCTGCCAGGAGACGAGTGAAACCACACCAGGCTGCAAGCCGTGCACCGCAGCCATCCCTGCAGACATCCAGATAGATATC
GATGAAGACAGACAAACAGAAAGAATTTATTCTATTTTTACCCTCAGTTTACTTAAGCTGCAGAAAATGGAAGAGACCTGTGGGTCTATAGCTG
TGTATCAGGGGCCACAGAAAGAACCTGGTTATTCTAAGTTCACCATTGAGGATTCTGTTGCAACCTTTAAGACAATTCAGCAAATCAAAAGCAC
CATAGAGAAGCTCGATGAACCTCATGAGAAATACAGAAAGAAAAGATCGAGTAGTGCAAAATACGGAAGCAAGGAAAATCCAATTGTGGGAAAA
ATATCATAG
HUMAN SEQUENCE—GENOMIC
CTTCCTTTTCCTGATCCTGCCCAAAGTGAGGAGGTTTGTTAAGCAGATAGGGGAAAGGCTGAGGGCTTCGGAGTACTGCATCTTTAGGACCCTG
GGAGGAGTTCACCTTATCGGTTGCCTGACACCACCCCAGAAGTGGCTATATCAAAGTTTAACTCAATAGCACAGCATAGCTTGCAGGGAAAGGG
GTGAAATATAATTTCCTGAGCTTCCCCCAAGACCAGTACGGACTAGACTGGACCAAGGAGTTTCCACATACTCCAGAGAAGAGGCGTGGAAAGC
AGCTGAGGTGGTAGCCACCAGGCTTCCAGGCACTGGCCATCACAAGGGAAAGGTGAATCAGCAGCGAGGCTGGGGAGAGATATTCTAGTGAAGA
GCCAGATGGAGGATGTAGGGTCTGAGAGGCAGCCAGAGTGGAGTCTGAGTCATCAGGGAAAACAAGCAGGCGCTGCCAAGCCAGGAGGAACCAA
ATCACAGGTACTATAGATACAGCCTCAATAGCAGGCCCTCACACAACTCCCAGGATTGAGCCCGTCTCACCCTCAAAAGAAGTATCCAGAAAGT
ATCCAGACCACCCACCCACAACAGAAATCTGCAAAGATGCAAAAGATACTGCATTGATACAAGGACCCCACCTCTTCTCTGTCTCTATGGGGTC
ATTTAGCCACAACTCCATCAAAAACTCAGACACCATCTCAAAAAAATATAAAAAAAGAACGCAGATATCTAAGAGGCTGAGCATTATTTACCTA
AATGGATGGACCATTTATATAATGTCTATTTAGGTCGCTGACACCTGTAATTCCAGTACTTTGGGAGGTCAAGGCAGAAGGATTGCTTAAGCCC
AGGAATTTGAGACCTGCTTGGGCAACAAAGCAAGACCCCCATCTCAACAAAAAATAAAAATAAAAATAAATGGCTTATACCTATAGTCCCAGCT
ACTCAGGAGGCCAAGATGGGAGGATCCCTTGAGCCCAGGAATTCGAGGTTGCAGTGAGCTATGATCATCCACTGCACTCCAGCCTGGGTGACAG
AGTGAGACCGTGTCTCAAAACAAACAAACAAACAAACTGGTGCATCAGAATATTTTCCCCTCTATTCAGTTATTGGAGACTCATAAGGAAGAGA
AGAACAATTTTAGAGAAATGAAGATGCTACATCTTCTTTGCACATCTGTGGGTAGGATGAAAAAAATCTGCAACCCTTCACACATACTAGTGTT
GCCAGTTTTTCTTGTCCTCCTCCCCACTGCTAAATTTGGTGCTGCTTGGGCTGCTCAGTTCCTCCCATCCACCCACACCCAACTGTAGAGAAGA
GCGTGGAGGGTCCACACCGGATCTTTGGGACTTTTGATGCAAAATTTAAAAAAATAAGAGAGGAATAGAAATGACATAAGCCACATGGGTACAT
TCTAGGGAGAAAAGAATCAAAGCCAAGCTTTTCTTGCAAGAAGCAACTGAGAGTGGGGGCCATTGATGTGCTCAGGGGCATCAAGTGGGAGCAG
GAGGACAGTCAGAGATAGAAAGAGAGAACGGGTGGGTGGGAGAGTGTGCTACTCTGGGGAAAGAGGGTGAGGGATCTTGGTTTTGTTGGATATT
GGAGAAGATAAGATGAAAAACATTTTGATAAGAACTGCTCCAGCCTGGTGCTGTGACACACACCTATGATGCCAGCTACCTGGGAGGCTGAAGC
AAGAGAATCCCATAAACGGGAGTTCGAGACTCACCTAGGCAACATAGCGAAACCCCATCTGAAAAAGAAGAAGAAAGAAGAAGAAGAAGAAGAA
GAAGAAGAAGAAGAAGAAGAAGAAGAAGAGGAAGAAGAAGAGGAAGAAGAAGAGGAAGAAGAAGAGGAAGAAGAAGAAGAAGGAGAAGAAGAAG
AAGAAGAAGAAGAAGAAGAAGAAGAAGAAGGGGAGGAGGAGGAGGAAGAGGAAGAGGAAGAAGAAGAAGAAGAAGATGAGGAGGAGGAGGAGGA
GGAAGAGGAAGAGGAAGAAGAAGAAGAAGAACTGCTCTAGATTATATACTTGTATCTCATTTTTTAACAGTAGAATTACTATCAGGACTTTGCT
TCTTTGAACTCTACCCACTCAGGCACTGAACAACGCAGACCTCAGCTTTGACAGGTTTACAAACACAATGACCCTGTTAATACAAAAGATGTAT
TAACATACAGCAGAGATTCTCAACGGGGCGGTGATTTATCTCCCAGAGGATATTTGGCAGTATCTGTAGACATTTTTGATAGTCACAACTGGAA
TATGCTGGTGGCATCTAGTGGATAGAGTCTAGGGTGCTGCTAAATGCCCTATAATGCACAGGACATTCCCCAACGAGAAAGAATTACCCATCCT
AGCCAAAATGTCAGTAGTGCCACAGTTGGGAAACCCTGAAATAGAGAAATGGAGGAAGGGCAGTTGTTTCCTTACAGCTTCCCTTTCCAATGAC
AAAATAAAAGACAGCTTTGTTTCATTCGAAACACGTTCTCAAGTGTGTGATATTCATTCTTAATCAGCACTACATACATATAATAATCTCAGCC
AAACCATATAAATCAGTTCCCTAAAACCCTTTAAGGTAAAAGAATTCCCATTGAAGAATTCCAGATCCTGTGGAAAAAACGGAGTTGAATAAAG
AAGGCTCCAGAAAATTTTGGAAAATCTTTATAAATATTTGTATTTTCAATATGAAATATGAAAATATAATAAAACTAGCACAGCAAATAAAATA
GCTATGACATGTAAGACATGCTTATTATGGGTAATCAGGTTACTCTCTATGCTTTGCTCATTCTGAGAGAATCCTCAGAATCTAGCTTATATTC
CATCACGCCCCTTGAGAAAGTTTAGCTGAGGTGTTAGTACGTTTGTTTTGCCTCATTGCAGATAAGACATTCACTAAGAAGGATTATTTGGAGT
TAAGGGTGCTGGGGACAGTGGTATATTTGGCCTTCCATACAGATGCTCTATAAATGCCTCTGGATTTTTATTTCAATCTCCTTGGCCCCTCTCT
CCAACAGCCCTTCCCAGTTCTATCTCTGCACAGACAGCCCAAGAATTCAGTCCTAAGGACCCACCTTACATGGCTTAAAACAACAATACACAAA
CTAGATGTTTTACATTCTGGTGGCCATGTCGAGTAATTATTTGATAGGCCACGAGCTTTCATTTGTGGCTGTATATCCAAGTCAGTTTTCCAAA
ATTCAGTTATATGATTATAAAATAAGTACCAATGTCTTTAGAACTAGACAAAATACAATTTATTAAAATATTTTATCTTTATATATGTGATAAG
GATTGAGGGGTTCACTCCCTCATTCCATCCCCAATCTTGCCCTCTTTTAGATGAAAGGCAGGAGGCAGTTGCCTAGGAGAGGGCAACCAATAGC
CCTGGCCTAGGCAGGTCAATGCTGGCCTCTCTCCTTCCCTTGGACCCTCAACTGTGAGGGCTAGGATACCAGGCCGGGCTGTTCCTAAAGACTC
TGAGCCCAAGCAGTGCAGCTGGGCCTAGAAATGGGGAGGTAACCCTTCTTGCCAACTTTGCTGAAAATGTGGAAGCCCCGCGGGTTCTGAAGGA
TAACGCTCTCGGCTTGGGCCTTGATAGTCTCATAGCAGGCATCATAAAGTGGTGAGGGTCCCTTTTTGTGACAGTGGCAGGCGGAGCCAGAGCA
GGAGAGGAAGAATATAACAAATCCAGCAACCCCATCATGTTCCCCACACCCTACTCTGCCAATGTAACCCACTGGGCACTCCTGAAAATCAATA
ATTGGGAAGAGGTTTAATTATTTGGGCAGGTAGAAAGTGGAGACACAATAGAGAACTGCGGATTATTTATGTTAACAGGATTTCATTTGTAGCC
ACAGACTGACATGCTGCCTAGATATTTGGTCATAATAACAAGTATGAAAACACCTTGCAACTTTGAAATCAGTTTTCCCAGCTTCTACAACCAC
CCACAAAAAATTGTATCTAGCCTACGTTTAGAACACAGATTATGATCGATGAGCTTCTGCTCTCCTTGGCTGTCTCTGACAAAAATGAGCTGCT
TGTGACAGACGCAGCCCCAGCCCAGTGTGAGGATTGGAAACCTCAGACCCTGACTCTTTCCCTTTCTCCTTCCTTATCTGACTCCTGAGCTATT
ATTGCCTTTTCTCTGCACCTAAGCTTTCTGCAAAGCCCAGACCCAGCCAGCTGGTTCTGTGGTCTGCTCTGATTTCCCTTGTGGATTTTAAATT
CAGAATTCTAGGCTCATTTGTTAGCAGCTTCTCTGAACACATTATCTCATTTATTTGCTCATTCATTCATTCGTTCATTTATCAAACATTTAAT
AAGTGCCTTCTGTGTTCTTCTATATTTTCTATGCGCTAGGGAGGCAAAGACAAAACATTGTCCAGTCTTTGAGATGGTTTCAGACAGGTAAACA
AACAGGAATAGTAAATGTGTTATGAGCACTACAATGATTATGTGTATTCTTATATACATGGTACATAATGGCCTAAAGGAAAAAGAGGCCAGTT
CTGTGAGACAAAGTCAGGAGGTGAAGATTGGGCATTAAATGTATTGAAATATTTTCATTTGAACTTAGGCACTATTATTGGAAGATAAGTATGT
TGATATGGTGAACAGAGTTGGCTGCCTACTCCATGTCTTACTGCTCCCCTTTCTGTGTCACAAGAAAACACTGGTTTGGTTCAGGCTTCAGGTC
TCAAGTAGCAATGTACTTTGGGAAGGAGGGTTCATCCCCAGACCCAGGGGTATCAATGTTGCTTAGACTAAGAAAATTATATATTCCTTGTGAT
TGTAAATGAGCCTTAAGAAGATACCTCATGGTGGTGATTTACAGGAAAGCTACCTGGAAAAGCGTTCCTCCCTAATATTAGGTTGGTGCAAAAG
TAACTATGATCTTGCCACTGAAAGTAATGAAAAAGACATTTTAGAAAAAAAAAAATACACCTTCCTGCCATTGGATGTTGAGATATTTGGAGGT
ACAGGAGCCATATTGTGACCATCAGGCAAAAGCCAAAAGAATTGCAAAGAAGCTAACCCAATAAAGTCCTGTTTATGAATGAATACAGAGTAGA
AAATGAAACAAGTGAATGGCTGCACAACATTTCCAGTTTTCTTTTTACACTTATTGTTTTGTATGTTTTTATTTGTTTGGTTGGTTTTGAGTTT
TGGGGGTTTTTGTTGTTTTTGTTTTTTGATTTGTTTTTTTAATAGATTTGGGGTCTCACTATGTTGCCCAGGCTCGTCTTGAACTCCTGGGCTC
AAGTGATCCACCCAACTCGGCCTCTGAAAGTTCTGGGATTATAGGCATGAGTCACCATGCCCAGCCTACACCCATTGTTTTGTTTTATCACTAA
AATGACAAGAATGCACTGCAGATGGAATGGATATGGCAAAATAGTTCAAAAGGAGGGGGATTGAGAAATAACTGAAGTCACACTGACCTAAGGG
CATCAGCTGTATTGTGCTCAGATATTCAGGCCTTTAAAGTTCTCTTGCAAGAGGTGACAGAATTTGAAAAAAAAAAAATTCTATTTTTAGAGAC
AGGGTCTCTCTCTGTCACCCAGGCTGGAGTGCACTGGGATGATCATAGCTCACTGCAGCCTCAAATTCCTGAGCTCAAACAATCCTCCCACCTC
AGCCTCCTGATTAGCTAGGAGTACAGGCAGGCACGTGCCACCATGCCCAGCTAATTTATTTATTTATATTTGTAGAGACAGAGTCTCACGGTGT
TGCCCAGGCTGCTCCTGAACTCCTAGCCTCAGGTGATCCTCCTGTCAAAGTTGGTATTACAACCGACTGTTGGATTACAGGCATGAGCCATCAC
ATCTGGCCTTGAAAATATTTGTACCGAAGGAGTTGGAGGTTTTAAGGTAAAAATTTGTCCACATTTTTGTCCACACAGCCTTGTCAATGGCCTT
ATTTGGTCTTCAAATGAAATGTTGAAAGTATGTTTTCTGAACATTTAAGGTCTCTCCTCACCTCCTACCACTCCAATTTTATTTTTTAAAATGC
CAGTTGGATTTAGAGATTTTTTTTTAATAATGTAATTAGTGCATAATGCTTAACATCAAACAGTACTCTGATGGGGCAAATGGGGAAACCAAGT
CATCAATGATCAAAGGAACTTGCTTTCCCACCAGTCCGGCAGAAACAGTTCTGTCTCATGAGTGTCCAGCCCTATGAAAATGATCTACATTTAA
ATATTAAAAAGAAAGCACATTTCTCTTCCTCCTACTCGCCAGAAAAAATGTAATAAATAACTCAAGGCCAGGAGACAACCCCTTACAATGCCAT
GTTATAGGTTGGTGGGTGCTGATTCAAAAATATGCCGTAACAGACAAGTTATGGAATTAGTTTCTACCTGCAGGTTATAGTCTTCTTATTAAGA
GACAATCTAGTTTTCCTACATCATCTGCCATAAAGCAAGCCAATGTATGGGTTGAAATGACTGAATGAGTTTAAAACTGGTGAAGAAATAGGAA
AAGACATAGTAGTGAATGGTTGCTCATCAGAACGAAGAGTGGTAGGGATAGAAGGGATGGCCTTTAAACACATTCATTAATAATTTGAGGAAGG
AAGTGAAGTTCAAGTTTGTGATGATGCAATATTGTTCCAGTTACTAAACATCATGAAGAAAAGAGAGCAACTCTAGATGAATTTAAAACATAAT
GCAAGGGCAATAAGGGGAATCAGATGTAACAGCCTTCTCGTAATTATACTGTATGTCTTGTTAGTCTTTAGAAAACTTTATTTTCGGCCGGGCG
CGGTGGCTCACGCCTGTAATCCCAGCACTTTAGGAGGCTGAGGCTGGTGGATCACGAGGTCAGGAGATCAAGACCACAGTGAAACCACGTCTCT
ACTAAAAACACAAAAAAAATTAGCCGGGCGCAGTGGCGGGCCCCTGTAGTCCCAGCTACTAGGAAGCCTGAGGCAGGAGGATGGCATGAACCCG
GGAGGCGGAGCTTGCAGTGAGCCGAGATCGCGCCACTGCATTCCAGCCTGGGCAACAGAGCAAGACTCCATCTTAAAAAAAAAAAAAAAAAAAG
AAAGAAAGAAAGAAAACTTTATTTTCCAAATATTTTATATTAAGGAAACATTGACATTACCCAAGATCTCTTCAAAGTAGGCAAGTATCAGTAA
AAACAGAATAATTAGAAGTGACTTCGGATGAAAAAGCAATGGAGTTTGGGGATTTTAGTGAAACGGTATAAGTCCGAAATCTGCAAAAGGAAGA
CTGTCTCGAAGAACAAAAAAGTGGAGTGTCCCTTTATGTAAAATTGTTTTCATACCTTTAGTGACCATTTAGTAACAGAGTTATGCACTTGGGG
TTAAGCTAGTGAAAAGGAAGGGAAGTTAGAAGATTTTGACACTAATGGACAAAGATATTGATACTTTGTCCATTGGATACGTTTGTCCATTGGA
TACATTTGTCCATTTGTACATTGATACTTTATCCATGGATACATTTGTCCAAAGGTTCAAATAATTTCTCTGTTTATTGGAGAAAGAAATAGAT
GGATGAGGCATCGCTTGGCCAAGCAGGAGGAAGGCCAGAATCAGGCTGGTGAGAAAAGGGGCTCAGTGTGCCTGCAGATCAGAGGAGTCAGGTA
CGCTGGATCCAGTTCCAACTCTTGGCTGAAGAATTTGAACTTTAGTCATTTCTAGCATTGTTCATTACCTGTAGTGTGCTCTTGCTAGCTGGCT
GAAGGGATAAATGAAGCCACTGATGTCCTCTTGAGCAGGCAACTGATAAGCTCCATTTTTTTTGTTAGGAAAGTTAATTTAAGTGGTATGTAGG
AGGAATGAGAGGGATGGGGGACTTATTACCAGAGTTCCAGTCAAAAGCATGAGGTCAGTTACTGAGGTAATCCTACTACGTGCTCAGCATTCCA
CTAGACACTTAACACCCTGCTCCCAATACTTATTTAATCTTAATAACAACCCTTCAAAGAAGAAAGTTTAGCATTTCCACTTTACTGTTAAAGA
AACAGGTTCAACCGGGCGCAGTGGCTTACACCCAGCACTTTGGGAGGCTGACACGGATGGATCACTTGAGCCCAGAAGTTCAAGACCAGCCTGG
GCAACATGGCAAAACCCCATCTCTACCAAAAATACAAAAATTAACTGGACATGGTGGCGCCCACCTGTAGTCCCAGCTACTTAGGAGGCTGACA
TGGGAGGATAGCTTGAGCCCAGGAAGTTGAAGCTGCAGTGAGCTGAGATCGTGCCACTGCACTCCAGCCTAGGCAACAGAGCAAGACTGTCAAA
AAAAAAAAAAAAAAAAAAAAGAAAGAAAGAAAGAGAAGAAACAGAAACAGGTTTAGGAAGGTTGAGTAACTTGCCCAAATGTAAAAGGGGTAGA
AACAGGCTCTATGTCTGATTCTAAAAAGGGATGCCTTTAAAAATAAGGGGGAAAAAACCCTGTAACACGTTCATACTCTTTAAATGAGAATAAT
TTTAACAAGCGCAATGACAGAGAATGGAAACGAAGGAAGAGATTTCAGCAGAGTCAGAAGGATGTGGCAACTGAAAACAGCATTGGGACAAGGG
ATAAGAAAAAGTCAAAGTTTCTGGCCTGAGTAACAGTATAAGATGTGAACTCAGATTTGGAAAGGGAGACAGGAAATTAAGTTTTGGACTTATG
TTTGAAATGACAGCAAAACATTCATATAAGAGGAAGTGGTTCACTTTATCCAACAAGTGTAAAGATCACATGGGGAAATAGAAGTCACCTGCAA
CACAGGCAGAACTGGAAGCTTCGCTGGCCAGGTCCATGTTAAACTCTGACCATTCTCTGGGGCTGTCCAGCCTTTGCACAGGCGGCGCGTTTGT
CTTCAGTTTTCAGGTTTCCCCGTCCTATTTCTTATCTCCCAGTGCCTCTCGCCTTTTCTGTGTCTCCCTCCAGAATGAGCTGGAGCTCTCTTCA
TCTTCACCTTTGTGTAGTCTCTGAGGTCTGAGGCCATCACTATGTCTGACCCTCAAAAAATATTTGTTGACTGACTGGCTTATTCCTGTTGTTG
CCCTGGAAAAGAATTACCCTGCCCGATTAAGTCACAGTTTCTTCCTTCTTAGGGCAGCGTAGTTAACAACCTCAACACCAGGAAATTGTCTTCC
TCATCACATACCAGGGTATTATTCATGCAGTTTACTCACTGTAAAGAGTTCCCTTGAAATAAAGCTAACAATTAGTCAAAGATTTACACATTTC
CTAGGGTCAGTCAACTTTTTAACAAAGCCAACTTTTAGTAGTGGTGGCGGTGGCGGGGGGGAGCCCTTCTTTGCTTTTTCTGTTCCTGAAATAC
AAAAGTGATGGTAAATGCTTCAGAATTTCTCTATGAGAGGGTCTCAGGCACTGCACTCACGCTGGAGTTGGGGGTGGCTGGTCCTTTTCTTGAA
CCAGGTTTTGCAGAGAATTGGTCCTAGTAAACAGTATTTGTGTGGGAGGAGTTTGCCTTGCTGGCGGGGAGTATTTGGATAATACTGGAAGAGC
CTCAAATGCATCTCTTGCCTCCTTTTGAATAAGATACTTTTGAGGTCCACCCACCTGCCAAATTCCATTCTATTTTCTTCCCACAGGGAGTTTC
CCTGATTGGGAAGGGCCTGTATTTCCCGCGAGCGTTAGGAGATGTGCAGGTCTATTCATTGGGGGAGCCCAATTCCCGGGAGGATTTAGGGATC
ACGGGAGGGCCGGGGCGTTCTCCTCGTGGGGATTTTAAGGCCGCTCAGAGCCACGACTGGGAGCTACCCTTAGCCAGCGCCCCAAGCCCGGAGT
ACGGTTCTCTGCAGGGTAGCCCGGCTCGGGGGTGGCGAAGGCGGTGAATGGAGACCCGGGGGGGGCGGGGGCGGGGCCGCGGCGGGCGGGGCGG
GGCGGGGCGAGTCGGGCCCAGGCCCGGGGGCGGGGCCAGGCGCGCGGCTGGCCTGCGCCTAGGCCGCTGCTGGGCTCCGCCTCGCCCGGCTACG
CAGGCGGCAGGGCTGCGGCACGCGCCGGGCGGCACCATGGCGGCGGCGGCGCCTGCTGCTGCGGCGGCTTCTTCCGAGGCGCCAGCGGCGAGTG
CGACTGCAGAGCCCGAGGCCGGGGACCAGGACAGTCGCGAGGTTCGAGTGTTGCAGAGCCTGCGGGGCAAGATCTGTAAGCGGGGGCTGGGCTG
AGGGGACGCCCTGGCCGCGCTGGGCGCGAGGCTGAGGGGGCGGCGGGTTCGCGGCGGTGGCGGCGCCGAGCTGCGCTGGGATCGCGGGCCCGGG
AGGGGGCCTGGGCCGGGCGCGGTTGAGGCTGGAAGGGGGTGTGTTGCGGGGCGGCGTCGCCTCGACGGGGCGGCGTGGGCCGGGGCTGCTGCTC
TCCGGAGGGAGTGGGAGCTGGAGATGGGCCTGGGGTGGGAGAGCCCGGGCTGCGCCGGCGTGAGGGGCTCGGTCGTGGGGAGCGGCCTGGACGC
GGGGACGCTGGAGTCCGGGGCGCGGCCGGGGGCGCGGTCCGGGGGCCTGAGGAGCTTCCGGCCGCCCTCAGACTCAGGCCTTCGCGCGGCTGCG
GGCGCTGGGGAGTGGCCCCGCGGTGGCAGCCGAGCAGTAATTATACGGAGGCGCGGCCCGAGGAGGTGGCGGGCTGGGAAGTGGGGCTGGCCCG
AGGGGAGGCGGCTGTTCGTTTCCTGGGCTCGGCGAGCCTGGGAGAGGTTGAAAAAGGCGCCCTGAGCTGCAGGAAACGGGCCGCCCTGGGGCCC
GAGTGGCTACCGCGCGGTCTGTTCGCGGGTGAGCGCCCCGGGAGGAGCTCGGCGGGACACCTGTACTTGCCCCACCTCGCTGCGGCCGGGACTT
GAATCGAGCCACGGCGTGACAGGCGGGACTAAAGGCAGGATGTAGTGGCTTCCTGTGAGCAGGTCTCAAAACACAATCACCCAGCCCGCACTCA
GCCCGCTTAATTCCCTTCCTTCTCATGCGTGTAATTGCTACTTTAGTGAGCGACCCTACCAGTTGACTAAATACGAAATTTTGCTCAGAGTTGT
CCGAGCATTACTGTGGACAGATTATTTGAGTTCTGTCATTTGAACATTTTAGTTTTAAAAACGACCTTTTGGTGTCAGGTTGCCATTTTTTTTT
TCACAGTGGTTTATTTAGATGAAGTGCTTTTTCTTTTCTGTTTGTAAGAGAGATCAATAACATTTATTTTTGCATTTGTCGAAAATTAGCATTA
TTTTCTTCATGCAGTATTCTCAGATTGGAAACATGCTTCATGTTTCTTATAAATAACCCTCAATTATGAGGGCGTACTTTTCACTTTGAAGAAA
ATTGACTTGCATTAAAGTGCCTAACAATTCTTTCCTGGGCACGATGTAAAATTTTCCTCTCCTCTAATACCAGTACTGTTGAGCTCACATTCTC
CCACTTTTCCTCTTTTCAGGTGGTTCACGTATTTGCGATTTTATGAAACCTCACAACCAGACATGTTAACTTTTCTTATCTTTTTATTCCCTGA
GGTAGTCCTCGGGCTCTTAAGAGATTACAGTTCTTAAAACCTGGAAAGTGACACCAGAGAGGTAGATCTTAGTTCCCAAAATTAAAGTTACTTT
CTAGGGCATAAAACCTTTTCAGAATTCAGATTAAATTTTATTTATTTTTTCTTTTTTCTGTAACCTTATATTTGAGGGGAAAATTTTATTTTCA
ACTTTTGCATATATCTAATTTAACATTTGGGAAAACTGTAAATGGGCCAAAGTTTCTCCCTTTATATGATTTTCCAGATTTTTACCACTTTCTT
AGTGCCACTTGATGCTAGGCATTGTCTATTGGAGACTCACTGGTACGTAACTGCAGGTTTTACCATGGAACTACATATACACATGTCTTGGAAT
TGAGGGTTAGGGTTTCCAGAAGGACTTAGTTGTCCTGTGCTTTTGTCTGCCCCATGCCAAAGACCACTAAGAACAGTTTTGTAAGTGAAACTTG
GGTCTACACGTTAAAAAAAAGAAAAACAAAAAACCACTTTGTTTCTATGGTTTAAAGCAACCCTGGCTTGGAAATTGATCATCCAGCTGCTGGG
AATGATATTACTGCTTTAACCACAGTTGAAGTATTCTATCTGTTATCCTAGTCAGTTTCTTGCTTTTTAAATTGCTTATCTTATAGCTCAGGTT
ATGGAGTGTCTGCTTTCTAGAAAAAAAAAATGTATTTGTATACTTATATACAGAAGCTCTCTTCCCATTTCTTTGTCCTCCTTTTAAATGATGT
AATCCACAGTTGGTTGACATTCAGAACCTTGTGAAGAGATGCTGTTTTCTGTTTCCCTGAAACTAACATGTGGGTTTTGTAGCGTGGGGACTGA
GGGGTTGGAAGAGTCATTAGCAGGTGTCAAGGTCACAGAAATGAGATGGTGGTGGTTCTGACAAGATATTAAGCAGCTTCGGGAGGGTGTAACC
GTGTCAGCTTTTCTCTTCACCACAGTAGGAAACCTTGGAAGAAAGCCTGATAGTGCCCACTAGGAGATGTGCTGGCAGATTTTATACTACTGAT
TGAGAGCCTCTTTTCTGGAGAGTTAGAGATCTGTAGGGGCTGAAAATTAGCCTCAAGAAATTTTCTTATTTCTGGACTTCCATAGGACTTTTAA
ACTGCACATCACCCCACTGAAAAGTGAGGATGGATTGGTTTATGTATCTTGAATGTTCAAGAGATAATAGTCCATAACCTTCTTTAGGGATTTC
ATTCCTGTAATTATTTCCCCTTATACTTCACAAGGTGAAATATCTGTCAGTTGGACAGATATTTGTCTCTTGGACAAGAGGAAACTTAACAAAA
AGTGGTAACCAAAAAGGTGCAGCTCACAAAATAACAACATGAGACCTCAATATATATAAAGGATGAAGCCCCAATACCCCTTTTTTGCTTGAGT
GTACTTTTTTTTTTTTTTTTGCCGGGGGGCTGGGGAGGAGGGAAGAAGGGACATGCAAATATGTTTCAGGTGTTTTATATGCGCTCAAACGAAC
CCAGGGAATTCGAGATCCATCTATAAGACAAAATATTGTCAGCAACCCTGCATTTGCTGCAGTTTGCGCTAGGAAACCATGACAGTTCTGAATT
GTCTGCTTCCTTAAACTTTTTCAAGAGGTGAGTTTGGTTGTTTGATATCCTAACGTTGTCATATGAACCCTTGATAAAGGAAATTAGGGGTGTA
CTCGACTCCATTCTTCGGTCTGCACTCCTGTGTAGCGAGTAGCAAGTATGCTAGAACACCTGAAACACATTTGCATGCTCCCTCCTCCCCTCAA
AAAAAAAAAAAAAAAAAAAACCGTATTCAAACAGAAAAGAGGGATTGGGGCTTCCTCCTTTATGTATCTTCAGGCTTCATGCTGTTATTTGGTG
ACCTCCTTTTTGATTAGCACTTGTTAAGTTTCCTCTTATCCAATTACATTAGATTGTAAAAATGTTGCGGAGAGCACCCATGCCACCATATGTG
TGGGCTTATCTACTCAAGGAATACCAGATCAATAAGAGAGCCAAATGGGAAAATTTTGTGTGAATTTTCAGATGTGTGGTACAGTGCGAGATCT
GTGGGACTATGTGTTCCAAAACTCACTTAGTTTCTCTGGTGTCTTCAGACCAAGAATAGCCTAGGGTTATTTGACAGAGTAGGGAAGATCTATA
GGGTATGGTTAAGTGCTTGAGCTTAGAGGCTGGGTGAAAAAGTTAGTTACCTGGGTTTGAATCTTCACCTAATTTCCAACTTTTGTTAATGTCT
TTGGGCCTTCATATTCTCATATATAAAATGGGGATAGTAAAAATACCTATCTCACCGGTTGTTATCAGGTTTAAATAAGCCTCCCTCCCTACTC
TGCCCCTCCTCATCTCTGCCTGCTCTTTCTCACTCCCCAGGATCTGGGTCATACACCGACCATCTCTTAGGAAGGAGTAAAGTAGGAGATAAAA
ACTAATCTTCATCTGATGTTCTTGTCCAACGTATACTGGAGTTTCCAGGTGTACAAAGCTGATTAAAATCTGAAGACCTATATTCTTCTTTAAA
CGTTGTTAATTAATCTTCATATCGCCTTACCCAGCTCACTTATCTTCAACCTTACCTTCCGCATCTTTTAAATCGGAATGATGCTTTTCCACTA
TCCATTGTATACAGGTTGTTCCCTCTGCTTGGGATTGTCTTTCTTCTTTACTCCACCCCATCTTTATGTCAGGAAGCTCCTACTCATCCCTCAA
AAGCCTGCTCTATGTGATCTCCTTCCCAAAACCTTCTGAGACACTTCCAGTGCCATCTCTGGCCAGCATCTCTGCTGCTGGGGAACACAATTCC
TTGCTCATTTCCTTATTATAGCACATTTCATAGAAATCATTTGTTCACTTCTCCTGTTAGATTGTGAGCTCTTTCAAGATAGAATTGATTCTTG
TTCATTTTTAAAAAATCATCCCAGTGTCAGCACAATGCCTAGAACAGAATAGCCCTTTAGAATATGCCCTACCTCACAATGTTATCCTGTGGAT
AATTACTACATATGAAAGCATTTTATAAATTATATACCTAAAAAAACTACAACGTGTTAGTATTAAGAGAAAACTGTATGAGTCTGCATCAGGA
AGTTCATCCCTTTCAAAATCACAGTGCCCACTAAGCTTAGGTTTGAATTGATGCCAAAGTTGCCTTGTTAGGAAAAAGATTAAATTTTTCTTAA
TGCTCTGATTACTTATTATTAGGGCATTTGAATATTGTTACTAATTGGTCCTCGAGCTTGGAAAAGAAAATCTCATATTCATACTTTACACATT
AAGTGTTTTAATTTGACATGACAGGTTTGAATAAAACCGTCTATTTAATTCTGTGAAGTATAAATGAAAACATTTTATTGACTATCCAGTAAAG
TTGAGTGGAAGAGATTAAAAAGGGTGTATTCATGCTAAGAGTTCATTTTTATCAGATATTTGAAATGACATGATGAGTTATTTACGATGGAGGA
AGAATCCATCTTTCAGATCGATAGAAACTGGGGAGAAAACCGTTCTTTCTAAAAGTTCACACAGCAGTCTGCTAATCATTTGCTCTGTGGAAGA
CGGGAGGTAAACCTCAGTGAGTTCATAGAGTTGTTTTTTTAAAACTTAGAACTCTTTGAATAGATCCTTAAGTGACTAATATAGCCAGAATAAA
ACCATCATTTTATCCTTTAATCATAGCTGCTAATCCTATTTCCTTGTTAATGTGCTTTATGAAATTATTTGACAATAATATCAGATTACATGTT
TTTGCTACTAATAAAGTTCTATTCTCTTTTGAGAACTGCAAACAAAATGTTGTATAGTCATATATTCATGTAAGTTAAGCTTTTTATGTGTATT
AAGACATTTTTATGGCATCTCTTTAGGTTTGTATGTAATTTTAGTTATCAAAAACCCCTATCTAAAGTGATAAACATTAAAAGTTTGTATCAGT
ACACATACAGACAACCATAAATGACAAATTTCTTTTCCTGTCATTAATCACAATCACTTTGGCCAAATTCTTTAACCTTGCTGAGCCCGTATTT
CCTTACTTGTAAAATTAGAGGTTTGGATATGGTCTTTAACATCCCTTCTACCATTTTGATTATTGCTTTTTAACTTGAACCATTTGCTTTAAGG
CAGTACATCAGATGCTTTATTTTAGTGTTTAAATGTATTTAGTACACTTGTTTTGCATGATTCACTGTTTTAAAAATATTTAAGATTTATTAGA
TAAGAGCGTTTGAATTCTAAATTTTTTTTCTGTGACTGTTAATTAATTCAGCAGCACGTAATACATATCGAAGGGTCTGTTAAGACACGCTAAC
CCACTGGACTGAAATGGGCCTAAGCTGTGAATCGGATGAAAGATCCTATTTTATCCTAAAGTCTATACTAAGCAATAGCTGTTTTTAGACATCT
GTATTCTTAGACAATTATAGAAATTTAAAGCTGGAAGGTAGAGAACATGAAGGTAGAGAAAATAAAGGTTCTTACCCTTCATTTTACAAATGAA
GAATCTAACAGAGACAGCAAGTGTCACACAGTTGATGGCCTGTTCCGCACTAGTCCACTATTATCAAAGTTCTTTCTAGAATGCTATATGAGAT
TAACTTATTACTATGAATGTTGCAAATGTACTACATTTAATACACAGACATTATACTACTTATCTGTTTATATATTGACAGGTGGTAAGATTTT
CACTGTGCCGTCTACACACTCTTAACTGTTCCTTCTTAAGAACTTTGTGAAGTGGTTAGGATTAGTGATGAAACTATGGTTATGACCTAGGTGG
AGATTGAACCTGGATGTTTAGTTACTTGTGCCATGGTCTACCTCACCTATTTTCAGTTCTCACTCTCTCTCACCATCACCTGTGAACTAAAAAA
ATTATGATGCCCACACTGTACCCCAGACCTACTAAGTCAGAATTTCTGGTTTCAAAAGTTCCATAGGGGGTGATGTTGGGCAGCTAGCATAGTG
AATTTCTGCTTTTGTCACAAATAGATTAGCCACATACCCTACCTAAATGATGGCAACCTGCTGTGCTATCATTTAAAACGTATCAGTAGAAAGG
TTGGTATAGTTACAGTGAGATTTTAGTTTGTTTGCATATATATTTGATGTATTAATTCTATTTGATTAGATAATATGAACACTTGGTACAAAAT
TCAAGAGGTACAAAACAGTATATACATTGAAAAGTATTCCTTCCTTTCATTATCTTCTAGCCATTCCCTCCCAAGAAGCAAGCATTACCAATTT
GTTATATCCTTTTTCTTCTGTCTTCTTCCACAAATTAAGCATTTACAAACATAAATTTATCTGCACTAATATATTCCTTCCACCAACATACAAA
TTATAGCAAAATATATACATTTTTCTGTATCTTGCTTTTTTACACTTAACAACATAGCTTGAAGATTTTTTCACATTCACATAAAGAGAGATCT
GCCTTATTTTTTAAACAACTCCATAATATTTCATCATTTCGCTGTACCACACTTTATTTAGCCAGTCCCCTATTAGTTGACACTTAGGTTGTAA
ACAGTCATTGCTATTACAGACATTACTACAATGAATAACCTTGTAAGCATGTCATTTTTAATATGAGTGTCTTTTTGTAGGATACATTTCTAGA
TAGATGTTAAATTGATGAATTGAAGGATATGTGCATTTTTATTTTGGAAAGACAATGCTAAACTATAGCAATTTAAGCTCTCACCAGCAATGTA
TGACTGCCTATTTCTTTATACCCACGTAGGGTGTATTTTAAAACTTCTTAATCTTTACTGGTCTATGAAATAAAAAGGAACATTTAATTTGTAG
TTTTAATTTGCACTTTTAAATGACAGTGAGGATTGCTCTGTCACCAGGGCACGATCTTGGCTCACTGCAACCTCCGCCTCCCGGGTTCAAGCGA
TTCTCCTGCCTCAGCCTCCCGAGTAGCTGGGATTACAGGCATGTGCCACCACGCCCAGCTAATTTTTGTATTTTTGGTAGAGACGGGGTTTCAC
CATGTTGGCCAGGATGGTCTCGATCTCCTGATCTCGTGATCTGCCTGCTTCAGCCTCCCAAAGTGCTGGGATTACAGCCGTGAACCACTGCGCC
TGGCCCTAATTTTTAAATTTTAAATTTTTCTAAGGCTTGAAATTAAGTTATAGGATCTCTTCATATTTTTAAGAGCCATTTTTTTTGATGTGCT
ATGTGAACTGGTCTATTTCTTTTGTCCTTTTTTTTCTGGTGAGTTACAGTCTTCTTGATTTGTGAGAAAATGCTTTATGCTGTAAGGAAGTTAG
CTATTATTTTAAAACCTGTGCAAAGATTTAAAAAATCTGTATACTTTGGCTGATGCCTGAATTTATTCTTAAGTTGATTGTGACATCCAGTGAG
GGCAGTCAGTTGTAAGTTTCATCTACTTATATAACGTCTGATGGTTGAGAAATTGAGAAAGAACTGCTTGAGGAAAGGTAAGTGAAGACTTATA
AACAAAAGTTAAAAGACAATAGATTGGGAGAAAATATTTCCACTGTATCCTTCAGACAAACGAAATGTGTATAACACTGAATTCTTTGCCAGGC
ACTGTTTTAAAGCACTTTATGCGTATTAACTAATTTAATCCTTACAGTAACTCTAAAAATACCATTATTATCCCCATTTTACACATTATGAGGA
AACAGATACACAATAGCTAAGCTAAGTAAATTGACCAAGGTTAGATGGCTGGTGAATGGTGGAGCTATCAATCAGACTGGCCAGATTGGCTCTA
GAGTCCATCCTGTTAACTCTTAACCTACTCTGCTATTATGCCTCTCTATTTATTATCTCCAGATTATATAAATAATTCATACAGACTTAAAAAC
AAGAGGCCATTAGAAAAATAAAGGATACGAATAGGCATCTCACACGAAAGGAAATACAAATGTCCAGTAAACATGAAAATATTGGTAAAGTAAA
AATTAATCAGGGAAATAAAATTTTAAAACATCAATTTACAAAAAAAGGAAAGTTTATCTCAGTCTTTGGTGAGGGTTTAGGGAAATAAGTATTT
TCCTCATTGTTGTTGTGAGTTTAAATTGATAAAGCAATGTTGGAGAGCATTTTGGCTATATCTGTTAAGAATTTAAATGTCTATACACCATGCA
TTTTTACTTCTACCTATTTGCCCTGCATCAACAGTTGTACATTTAGAGAAGAGGCATATACAAAGATATTCAATGTTGCCTTGTTGGTAAAACA
GAATAATTGGAGACGACTTAAATGTACATCGGTAGGAAAATGGATAATATGTTCATACACGTATTCTATAGCAACTAAAAAGAATGAGGTATAT
CTATGTTATGAAAGGAAAGAACTCCAGGATGTCTTGTTGGGTAAAAACAGCAAGTTGTAGAATAATATGTGTAGTATCCTGTGTATTGTTTTAA
ATCTCAAAACATTTTACTTTTCTGCATGTAGATGGATAAATACATAAAAAGAGGTCTGAACAGTTGTACAGATAACAGTGATTGCCTCAATGGT
GGATAAAGCGAGTTAGCCGCTGCTGGGAAAACTGGCTAGGCATGTGTAGAAAGCTGAAACTGGAACCCTTCCTTACACCTTGTACAAAAATTAA
TTCAAGATGGATTAAAGACTTAAATGTTAGACCTAAAACCGTAAAAACCCTAGAAGAAAACCTAGGCAATACCATTCAGGACATAGGCATGGGC
AAGGACTTCATGTCTAAAACACCAAAAGCAATCGCAACAAAAGCCAAAATTGACAAATGCGATCTCATTAAACTAAAGAGCTTCTGCACAGCAA
AAAAAACTACCATCAGAGTGAACAGGCAACCTACAGAATGGGAGAAAAATTTTGCAATCTACTCATCTGACAAAGGGTTAATATCCAGAATCTA
CAAAGAACTCAAACAAATTTACAAGAAAAAAACAACCCCATGAAAAAGTGGGTGAAGGATATGAACAGACACTTCTCAAAAGAAGACATTTATG
CAGCCAACAGACATATGAAATAATGGTTATCATCACTGGCCATCAGAGAAATGNNNNNNNNNNNNNNNNNNNNNNNNNNNNNNNNNNNNNNNNN
NNNNNNNNNNNNNNNNNNNNNNNNNNNNNNNNNNNNNNNNNNNNNNNNNNNNNNNNNNNNNNNNNNNNNNNNNNNNNNNNNNNNNNNNNNNNNN
NNNNNNNNNNNNNNNNNNNNNNNNNNNNNNNNNNNNNNNNNNNNNNNNNNNNNNNNNNNNNNNNNNNNNNNNNNNNNNNNNNNNNNNNNNNNNN
NNNNNNNNNNNNNNNNNNNNNNNNNNNNNNNNNNNNNNNNNNNNNNNNNNNNNNNNNNNNNNNNNNNNNNNNNNNNNNNNNNNNNNNNNNNNNN
NNNNNNNNNNNNNNNNNNNNNNNNNNNNNNNNNNNNNNNNNNNNNNNNNNNNNNNNNNNNNNNNNNNNNNNNNNNNNNNNNNNNNNNNNNNNNN
NNNNNNNNNNNNNNNNNNNNNNNNNNNNNNNNNNNNNNNNNNNNNNNNNNNNNNNNNNNNNNNNNNNNNNNNNNNNNNNNNNNNNNNNNNNNNN
NNNNNNNNNNNNNNNNNNNNNNNNNNNNNNNNNNNNNNNNNNNNNNNNNNNNNNNNNNNNNNNNNNNNNNNNNNNNNNNNNNNNNNNNNNNNNN
NNNNNNNNNNNNNNNNNNNNNNNNNNNNNNNNNNNNNNNNNNNNNNNNNNNNNNNNNNNNNNNNNNNNNNNNNNNNNNNNNNNNNNNNNNNNNN
NNNNNNNNNNNNNNNNNNNNNNNNNNNNNNNNNNNNNNNNNNNNNNNNNNNNNNNNNNNNNNNNNNNNNNNNNNNNNNNNNNNNNNNNNNNNNN
NNNNNNNNNNNNNNNNNNNNNNNNNNNNNNNNNNNNNNNNNNNNNNNNNNNNNNNNNNNNNNNNNNNNNNNNNNNNNNNNNNNNNNNNNNNNNN
NNNNNNNNNNNNNNNNNNNNNNNNNNNNNNNNNNNNNNNNNNNNNNNNNNNNNNNNNNNNNNNNNNNNNNNNNCCTATAGGGAGTATATTTATA
TATTATATTATCAAAAGTAACTATTTATATAAATGAACTTGATACAGTATTAATCTTAAGCTGTGCCAGTCTCTGTTGCTCTACTTTGGAAGAC
TATCCTATCTGCAAAACAAGAGTAATCAAATGTTAGCTTTTGTAACATTTTGAGTGCTATAGAACAAATAAAGTCAACTTTTCTGTTAAGTTTT
TTTGGTAACTTTTGATATAATTTCAAACTTACAAATTGTAAGAATAGGCTGAGGAGGGTGCATCGCTTGAGCTCAGGAGTTTGAGACCAGCCTG
GGCCACATGGCAAAACTCCGTTTCTACAAACGAAAAAAAAAAAAAAATGCCAGGCATAGTGGTGTGTGTCTTCAGCCCTAGCTATTAATACTTG
GAATGCTGAGGCCAGAGAATCACTTGAGCCCAGGAGGTTGAGCCTGCGGTGAGCTGAGGTCGCACCACTGCACTCCAGCCTGGGTGACAAAGTG
AGACCCTGTCTCAAAAAAAAAAAAAAAGTAGAAATAATACAGCAAATTCTTATATACTTTGCCTGTTTGACTAATTGTTTATGTTAGAAAAACT
TTTTAAAATTTTAATACATTGTTTCAGAGAAATGTGGTAAAAAGGGTCTGAAAATTTTGGATCCTTTAAAATATGACATTTGTGTGAGTGGTAC
AGAATTTTAGTTTTGAATTTTACAGTTTTATATAAAATATTCTTGGTAGATCGGCTGAACTAATGTTTATTGAGTATTTCCTGGTTTCCAGATG
TTGTGTTAGGATACTTTGCAAAATATTTCATGTAATCCAATTTCATGAAGAAGATTGTTATTCCTATTTTAGAGAAGAAGCAACAGACAGAGGT
TATTTGCTCAGGATTGTAAGCGAGCAGAGCCAAGTTTTCAGAAAGTCTTTATGTTACCAAAGCCCACATCCCTTTCTCTACAAAGCTGCCTGTG
AGATGATATATTGGAAGGAATTGATGAATACATTTATGTTGTCAAGAAGTTGATAATTACTCCTAAATTGGCTATGGTCTAATGTAGTGGATAT
TCAATAAAATTATCATGTTTGAATGCCATAAGAATTTATCTTCTGGCCTGTTTTGGGGGTTCATGAATGTAATTATTTTAGCTGCCTAACTGCT
TATGTGGGTTTGTATGTACTTTTGAGTGGTTCTTGGATATGTGTACACACATACATACACACACACAGATATACACATACACACCTTTATATGC
TCATGGGTGTAACTTCTTTATGTGTCTAGGTGTCTTTTTTTTGTGGAGGGGGGGCGAAGATCAATATGAATCCTATTTTGGCCCCCTGGATGCT
GTCACCAGAAATAACAGCCATATCCCATATATACCCTGTCCATGTAGCCCTGAGTTCTCCCAGCACCTGGCTTTTTGCCTTCCTTTTGTTTGTC
ATACCAGGCTCTCTTGGTCACCTTGGTAGCCTTGCTAAGCTTCTTGTAGCTATAGGTACCATTGGCTTAGCCCAGAAGAGATTCCTGCCATATG
TACTTCAGAGTTTGGTTTGCCACTTGAGGAAGGGGTCTGTAGGGAGCTTGTAGATCAGCACACATTCAAAACTGAAACCGGAAGTGGGCAAGGC
AAACCACAGGAAGATCCTGCCCGCAACTTGGTGACGTATCTATATAACCCATAGACACTTCCTGGCAATACCTTGTGAAACTTGCCTTTTCGTG
TATAGTAGTTTCCTAACTTCTTGTTCTAGATTAAGCTTCAGTGAAAAGTGATTAATATGATAGCAGTGTAGATAACTGTATGATAGTTATTGTG
CACATGACTTCCATGCAGCAACTAGCCCCGATTATGTTCTGTAGACTTTATCACTGAGGACTTGCAGTGGTATTTATGCGTTTACTTTGACTTT
GTCTTGTCACTAGCCATTGTCTTACTTATGTGTAATTGTACTTATATATAGTTCAGGTTTTATACCCACAAAAACCCTTGTCATATAATACCAC
TATACAGGATTGCCTTATTTATGTGGAATTGTACTTATATATAGTTCAGGTTTTATAGCCACACACACACACACGAAAAAACAGTTCTTTGCTT
CACTGAGTCTCGGCTAGCCACCCAAACTGTGTCATATTCCTACAGTCCTGTGCCCACTCAAGTGTTTCCTCACTGGTACTACCTCATTTTATCA
TAGTGCCTTGTTCTTAGGCACAACCAGATTTCTGGTAGGAGTTATTTAATGTGTTGATTTTTTTTTTGAGACGGAGTCTCCCTCTGTCACCAGG
CTGGAGTCCAGTGGTGCGATCTCAGCTCACTGCAACCTCCACCTCCCAGGTTCGACAATTCTCCTGCCTCAGCCTCCCGATTAGCTGGGACTGC
AGGTGCACGCCACCACATCCAGCTAATTTTTGTGTTTTTAGTAGAGGCGGCATTTCGCCATGTTAGCCAGGATGGTCTCGATCTCCTGACCCGC
CCACCTCGGCCTCCCAAAGTGCTGGGATTACAGGCATGAGCCACCGTGCCTGGCCAATGTGTTGTTTTTTTAAAGATTACCAATCGAGTGGGAT
TATAGACTCTTGGATTATTTTACAGATACAAGTCATTTGCCAGGACTGAGGAAAATTGCTTGACAACTCAGTTATCTCACCATGTTAATTTATG
CATTCGAAAACTCTGCTTAGTGGTAGATATTCCACCAGTCACCATATGCCTATTGGTACTATTTCTCATTCTCTGTCTGATTAATGTCACAAAT
GTGTAACTTTCCAGTGGTGTTTTCAAGATGACAGTTAAGGACCCACTAAGGAAGGAAATAACAGCTACATAACTTTTTTCTTTTCAGTAGTTCT
TGACAGTCCCCCCTCCTTTTTTTGTTTTTGTTTCTTCATACCCTGCAGCAATCTCATGTACTCTGAAGGGGGTAAATTTGAGACTCTTTGGAAG
GTCATGTCTCATAAAGACAGTTCTTCTCTTCCTTTCTCCATTCAGAACTGTTAAAGATAAATCAATGGGAGTGTTTTTTTCTTGTGTAAGATTT
ATTATATACAAAATATTTTTTAAGTGTGTGAAAACTGATTAAATGATAAAGGCTAAGGTAGCATGTTTAAAGCATGGTTTTCTGCTACTTTTCT
ACTAATCACTTAACCTCTCTGAGCCTCAGCTTCCTTCTCTACAAATTAGGAATAGTAGTTTTACTAATCATATACCATAGTTGTGAAAAGGTTA
AATGACTCGGTATACTGCCTGGCATTTTGTGCTCAGTTAAGTGTTGGTTCTAACATGAGCAGTAGTGATACTCATAAAGTATCTTTTCATAGTT
TTCTTAATGGATAACTTATTTGATAGAAATGTACTGGAGTATTCATACTTACATGTATATCCAGTTCTTGTAGTGTTCATCAGGTTAAACTGGC
AATAAGTGTTAATATCTCAAAGCATTAGAAATCAGTGTTACTCTGTGCTTTTTAAATTTCAAGTCTTGTCTCTCAGATTTTATTTTTTTATTTT
TTATTTTTTTTGTCTCTCAGATTTTAGAGCTATAGAGAACCTAGAAGATTAACTGGCTAAGGAGTTGCAAACTCAAATATACACAGACCAGGTA
TAATGCAGTAAAGCCCAGCAGAGATTATTATGATTTAGTAAGATACACCTGTCTGCAGTTTCCACTCAAAATCATTTTGCCAGATTTTGATTAT
TAAAGAGAAACCAGAAATACAAATTTATTTATTGTTAGCTCTCAGTTTCTAGATGGTCACAAATTATTTTTTAAATTTGGTGCAGGCCAAACAA
ATCTCTGGCTAGCCAACCTCACATTTGTATCCTCATTTTAGAGATGTGGAGCTTGAGGTATAAAGGTTGGACGTGTTTCCATGTATTTCCTATA
ATAGAAATCCATTGATTCTGTAACAAAGGACTCATTTTAAACAATGACCTCCTCTGTTATACCCAGTTGTTATATTACAGGTTATTTTTGGTCA
GGAGCTAATGGCTTGGATGAAGGGAATTGTATATAGATGCTAATTTTTAAGAATGTCTAGCCAAGAAAGGGCACTAATAGTTACTATCCATTGA
ATATTTACTCTGTCTTAGGCATTGTGCCAAGCGCTTTACCTTAGTTAATGCTCACAACAATCTTGAAGCATTATAGTTACCTCTTTTTACATAA
GAGGTTGAGAGTAAGGACATACAGATAGTTAAATGCAAAGTTCATGTTGAAACGCAGATGTCTGCCTCTGTAATGCATTCATTTAACTTGCTAT
ACTATACTAGTACTGTATATGTTTTTATAATTATGCATACCTTTTATCATATTGCAAAAATTGAAATTAAACTTTAGAAGAAAATTTCAAAGAC
CTTATGATATATTACCATTATATAGGGTTGTCTTATTTATATGGAATTAGATTGGCACAACAGCATTTTAATTTTACTCTAAACTAGTCAATAC
CAGAGACTATATCATATTTTTAAATGTGCATTAGATTCATTCTTTCTCACTCTTTTTTTTTTGTTGTTGTTGTGAATGTAAATGACAAAATGTG
CATATTTTATATCTTTTCATCTCCTGAAGTTCTACTGTTCTGTTTAGGTTGATATTTCTATTACTGGTTGAGCATTCCAAATTTCAAAGTCCAA
AATTCCAAATGCTCCAGGATGCAAAACTGAGCACCAACATGATTCTCAAAGGAAATACTCATTGGAGCATTTCAGATTTTCAGATTTGGGATGC
ACAACTGGTAAGTATATATAATGCAACATTTCAAAATGTAAAAACATTTGAAATCTGAAATACTTCTGGTCCTAAGCATTTCAGATAAGGGATA
TTCGATCTGTATTAGAACATTATGTCCTGAGTCATTCAAGCCAGTTAATGCCAAATTCTGTGGATTCTGTCTCCATAGTAGCTCTTCTATTTTT
TCTTTCCTCCTATCTCCCTTTGTTACCTTAATGTAGGCTCTTCAGACTATCAGAGTACTTTTCCTGAAGTATGAACCACACAGAAACTTTTAGC
GACCCTTGTTGCCTACTGAATAAAGTTAAACCTTAGCTTGCCATTTTAGGTTCTCTGTTTGATACTAGCTGTCCTTTATAATCTTTTCCCTCTC
ATTCCCCCTTCATCTCTCTTTATGCTTTAGTCAGTTTATACTATTCACTGCCTCCTCGATGGTGCTCTTCTTGTTGCCACCCTCCAGAACTTGT
TCATGTTATGCCTTCCTCCTGCAACGTTATCCTCCGATCCCCAATTTCTGTATTTTGAAAATATATATCATTCAGAAGAGTTATTGTGAAGATT
AAGTAAAATAATATATATGAAGTCAATGAAAAATCTGTGTAATACATGTATTAATTTATTCAGTAAGTGGTACCTATTATTATGATTTGGCTTT
CTGTCACCCCAAATAATCCTTAACTTTGGATCATCTTGTCCAGGACCCTGGCTCTTTGCAGTTTTTCTAGGGGATTAATCCCACTGGGACCCAT
GTTGGCGCCTACCCTTGTACTTCAGGTAACCTTTGAAGCAGACCTGGACCTACTACATCTCTTTCAGATGGGAATAGTTTCTCAGCACAGCTGT
ATTCAGAAAGACCTTAACAGTTGAATACAAAGACTCTAGGCTTTGGAGTTTGATTTATGCCAGATAACCTTACCAGCTATGTAACTGAATTTTT
TTTTCTTAATTTATGAAAGGGAATAGTAATGCTTATCTCACAGGGTTGTCGTACCGATCAAATGAAACATTTGAGAAAATATTTAACACTGTCT
TGGAGCATCTAACTACTTAATAAATCTTTATCTTCTTTTCTGTCTTATCCCTGTAGTGTCCTCCCCTAGGACATGAAGAAACATACATGCAAAC
CTTCAGGTATAAATCCATGCACATAATCCTCAAACATCCACATAGGCACATAGGTACATACTCACATATGTACATACTCACATACATGAACAGA
ACCATATACATCAGAATCTCTACCTTTGATAGTAGCCTGATATTGGAATTTTTGTCCTAGATAAAATTTATATGGTAGGATTTGAATTTACTGT
CTGATGACTGTTACATGGAATCATTGATCTTGTACATAGAGAGTTGGCTGTTTTTCCATTTCTGTTAATCTTAACAGTTTTGATTTGATGGTGT
TTATCTTTCGCGCTTTAAACTATTTACTTTTTAACAATATCTAAAAGCTGCTGTTTTCTATAGTTACATGTCTCTCCTCTTTTTTCAGGTATTT
ATGCAGAAGTTACTTTCTCAATGAACCCTTCCTTCAGCTACCTCATTTCTTGTGGTGCCCATACTTATTAGTATTAGGCCATACATTTTTACTT
ATTTATCTTATTTGTTGTCGATCTCTCCATGTGTGTTAGCCTAATAAGGACACAGACTTTTTGTCTGTTTTGCTCACTGTCATATCCTAGCAGC
TTAGTAGGTACTCAGTAAATATTTGAATGTGTGAACTTCAGCACTGGTTTATTTTCAAAACGTCTCTGTATTAATACAATAAAGATTCTTTAAG
TGCTTTTGGTAACTGTATACAGGAGACTTTTTAAAAAATCTTTGGAGTAGTTGACATAAATCAACTTAAATGAAATGGAAAAAAGAAGTTTACA
TACAATTTTATGGTTTGTGATGTGGTATTGGAACCTCTTTTTTGCCCATGCCAAAGTTATATACACACGCATTGATACTTATTCAGCAGCTGTT
TCATTATATATTTTATGCTAAGGATGGTGCTAAGAATTGGTCCCCTTCCTCAAGAAGTTTATAGTTCAGTGAAGAGACAACCAAACTGCTTTTG
CTTGGTTGTGTCTCATCTTTACCACCTCAAAACATTAGACAGCCCTGAGGCTCACTCTTCAAATTTCTTTTCTATATTTGCTCCCATTGTGATT
TTGTATTGTCTCTTGGTTTTCTAAATTTTATGTACTTACTGATGATTCTCAAATTTTTTCTCTATCTAGGACCCTTTGTCCTTGGACAGATTGT
CTGCACTTGGATGTATAAGGCATCTCAGATTTAATATTCAATACAGTCTCTTGAATTTGGTCCCCAACAAGAGGCTGTGTCTCTAGAAATAGCA
TCTCTATTCATCCAGCTGCTCAGACTAAGACTCTTAGAAGTCATTCTTGACTACTCTATTTCTCACACCCTGCAGTAAATCCTGTTGGCTCCAT
CTTCAAAATACATGCCCAAATGACCCATTCTCTCCAGACCCGTGTCTGCTCTGCCCCTCCCCTGACCTGCAAGTTTTCGCTCATTGAGATTACT
ACAGTAGCCTCCTATCTAGTCACCTCCTTCTACCTTTCCCCTCTGCACTGATTTTAAAACAAAAAATCTTGCCATTTTTATGCTGAAAATCCTT
CAAAACCTTACCATCTGACACACAAAAAAAGCCTAAGACTTTCCCGTGCCTGTAAGACCTTATTTAACCTGTCTCCTCCCATACCCTTACTCCA
TCTCTTACTATCTCCTCCCTCTCCCCACTTTGCTTATTGCTTTGTAGCCATACTGCCCTCCTTGCCACTCCTCCAGTGTGCCAAACTATCCTGT
CTCAGGGCCTTTGCACATTTTATTCTTTCTGCCTGTCCGTCTCCTTCCCCAGATATCTGTATGGCTTATACCCTCAATGACTTCCTTCAGGTAT
CTGCTTAAATATTTTAATTGAAAGGCCTTCCCTGCTTCCCTATATAAAATAACATTGACCTCCTCCCTGTCTCTACCCTCTGGGCCTGCCATTC
CCTAACTCTCTTAACCTGCTTTCTTTTCTTGAATAGCAATAAATATTTATTTCTTCCATGACAATAAATACTATATGCTTATTTAAGAGTTTGT
GGTATTTGTCGTCCCTGTATATATTCTACAACAGTTTCGTATGGGCAGAGACCTGTTTTTATTCACTGTTATATCCCCACCACTTAGAACAGTG
CCTCGTGTGTTTAGGCACTTAGTAAATATTTGTTGAGTGAAATGCAACAAGTACAAAACAATATGATCACTGTAGTAGAGATGCAAGGTACAGT
AGAAACACATGGGAAAGAGTGACATGACTACATAGGAATTGAGCAAGACTTTGCAAAGATGCCCTTAAGCAGAGCTCTTTGGAGAGAAAAACAG
GTAGGGCATTTCATACAAAGAAAATAGCATTGCAGATACACAGAGGAATGAGAGAACAGTGTGTTCAAGGAACTAAAATATAGTACTGCTACAG
CATAATTTGTGGGGGTAAAGATGAACTAGATGAGGTTGAACATGTAGTAGATAGCACCTGATCATGGAGGGATGGAGGGTTTTTGTGCCAGACT
AAGGAATTTTAGATTTTGTCCTGTCAAGTGGGCAGTGGTAGATAGTGTGACCCATTGAAGACTTCTAAGCAAGGGATGTTTTATTTATATTTAT
TTATACGTGTCTCTGTCTTTGTGTGTGTGTGTGTGTGTACGTATTAAAAAGGTAACTAGCAACATTGTGAAGGTTGAGTATCAAAGCTAAACAC
AGCATTTTATTTAAGATATGTATGATTTAGGAAGATATGATGTAGAAAAACAATTACTATCACATGTGGGCGAGAGGATATTTCATTTTATATT
TGGACAAAATCATGGATGTATAGTGGGAACATGTTCTTGGCATACTTGCAGTACATTTGTGAAAGAGAAGAAATGCACAATGGACGATTATTCT
CTTTGTCTTTGAAAATCCACCCTTTAAGAAAGAAGACTTTAAAAAATTAGTTAACAGTTATGTTGTAAGTCGTAATGTACACTAGAAAAGTGCT
TAAGGAGTACCAGTTATGAATCAACAAGAAAAGATGTTACAGAATAAAATAAATTGTGCTTGAATGTCAACCTCCTTTCTTCGTAGAGGAACAG
TTGGTTGTCATTGATATACCTCCTGATCTTGATTTATTGTTGAAGGAAATAGTGACAGTTGTACACACAATCAAATCTATACTGTTTGCTGTGG
GAACAATGTATCTGCCTTTCTAGGACAAATGTCTGCTTTTGCATATTCCACGACTCCGCATGCACAGAATTTTTGAAATGAGGGATGAACTATA
AAAACATTTCTTCCTTTCATTCAAATCCAAGTAAAAACCATTTTTATTATTTCAGCTGGCTTGCTTGTGTCATATCTTAGCAATATATTGAATT
TCTTGAATACTTTATTCTTATTAATTTAGGGTCAAACTATGATTTGTGAATTTAAGGATAAAATAGAGGCACCCAAAATGGTGCACACGATTTG
AATGTTAAGAATTTGGATTTCGCACTCCCAGCCAGGCATGGTAGCTCACGCCTATAATCCCAGCACTTTGGGAGGCCAAGGCAGGCAGATCTCT
TGAACCCAGGAGTTCAAGACCAGCCTGGGCAACATGGCAAAACCCTGCCTCTCCATAAAATACAAAGCAAATTAGTCAGGCATGGTGGTATGTG
TCTGTAGTCCCAGCTACTCGGGAGGCTGAGGTGACAGAATCACGTGAGTCCAGGAAGGCGAGGCTGCAGTGAGCCATGATTGTGCCACTGCACT
CCAGCGTGGGCGACAGAGCGAGACCCTGTCTCAAAAAAAAAAAAAAAAAGAAAAAGAAAAAAGAATTTGGCATTCCAAATTCATGAAAATATGA
ATACTGTATTATTGAATATATTTTTAAAATTTTATCCAAATGCTACAGAAGATGAAGAAATATTTTGTGAAGGTAGATACAACTATATATGGAG
TTAAGATCCATTTCCCAAGTTAAACGATTCCCTTTTTAAGTGTGCTGCTATTCAACTCACTATCTGATGGAACAATGAAAATAATTTTCAGTGA
AAAATTGCTTGGTAATTTCTGTGTCCATGTTTGATCCAGATACCCACGTGTAGCCGGTGGATTTACCCAACCATCATGACCAGTAACTCAAAGT
GGGATTTTCTAATTTGTTGGAAACAAAGGTTAGAAAAGAATTGAGATTAGGTGACAGCATCAACTCTAGTTAGTTTAAGCAGAAAGAGCTTTAA
TAAAAAAATTTTAAGTCCCTTACAAAATTGTTGACAAGGCTGAAGAAACAGACTCTAGATCTAGAAAAAGCCATGTTGCATCTAGGCCACCAAG
AGAGTTATTGCCTCTTTTAGGATCAGAAAGACTTTTGCAGAATTGTGAAACTGTAACTTTTAGATGCCTGTCTTAGAACCTTACCACCTCTGCC
ATGATCAGGAGTCTACTACTGTTAGGAAATAGCCATTAGCAAGCAGCCACCTTCCTCAGTAAGCCGTTCTTGTTGCTGGCCCTAGAGCCAAGCC
CTGCCTACCACAACCTGTACTGCAGAATGGATGCCTTCTGCCTTTCTTAATATTCATGAAATCTGTGACTGAATACTAGGACTTCAACAAATAC
TGCTGTGAACATGAACATCTCCATGACAATGTTTCCTAGTAAAACAACCCAAACTCAACCTCCCTTCTCTTCTGTCCTTGAAATTTCTAGTGAG
TGCATCTGGTTGGTGGAACTTAAATCACATTTACAACTGTAGCCACAAGAGAGCCTGGGAAATGTATTTTTTAACTTTCTCTTCTCTGCAGCAC
AGGAAGACATACACTGAAGGAGGTTGAAATGGATGTGAACAGTAATCTACCATATTTACTGCAGGTTTACAACCTGGTTCTCCTTAAGGCTGGC
TGTCATTAAACGGGCTATAGATAAGTTGAGAAAGTTTATAAATAATACCGTCAAACAATGTTGAGAAACTCATTTGTTTCTTTGTATATTTTTA
TTGTTTTATAATGACTACATTAAAAAAAAAACTAGAATTTGTCCTTCACCTCTATGATGAATTAAGTGGTCTGTGGATACCGAAAGTTTCCTCA
CGTTTAAGATGTGGTTAGTGGATAAAAAGACCAAAAGAGGGAGTATAAGAAAAACCCTCATACAAGGTTACCTCAGCTGAGGAAAGGTTAGTGT
TGTCAAATAATGAAGAGTGGTCAAATAAGGTGGGACTGAAAAGCAGTGTTACGATTTGGGCACTTAATATTAGTGGTTTTTTGGGTTTTTTTTT
TCTTTCTTTACTATTCAGACAGGGTCTTGCTCTTTTGTCCCAGGCTGGAGTGCAGTGGCAGCTCACTGCAACTCCCATCCCCTGGGCTCAAGCC
ATCCTCACACCTCAGCCTCCCAAGTAGCTCGGACCACAGGCATGCACCACCACGCCTGGCTAATTTTTTGTATTTTTAGTAGAGATCAGATCTC
ACCATGTTGCCAAGGCTGGTTTCAAAATCCTGTTCTCAAGCAGTTTGCCCACCTTGGCCTCCCAAACTGTTGGGATTACAGGCATGACCACTGC
GCCCAGCCTGTTAGTGTTCTTCAAGGTTCTAAACAAGAAGTAGAGAAGTAGGATAAGAGGGCAAGTTGCACGTTTAGGCTGTGAGTTGAAGGGA
GCACTTGAAAGGAGAGATTATAGAATAAGTTTTCAAGAAATTTGGCAATGGATTTTTTTTTTTTTTGGTCCAAGGCGCATGCTCATTTATATAC
CAGAATTGGCTAGAGTTCATGAGGCCCTGAACAAATATCACACACAAGCAAGTACAGTCTTCCAAAGTTCTTCACTTTTGTCTTTTTGTCTAGC
TTGATGTAAAGTGTGGCTCTTAACATATTCTCTTTATGCTTAGAGATATAATAGGCACAATATTACTTTTATTATATCTGTAACCATTACTTCC
TTTTTGATTATGTTGTTTATAAAGTGCCAATTAATCACTACTATAGTTTGGAGTTACAGTATCTGACTTAACATATTTGTACAATTGATTGTTG
AGCCGGGCATTGATTAGATGAATTAACTTTCAACAAAGTTTATTTGAACTTCAGTCATTGGTGGATATTTAAGAAGTACAGATTATGATAACTG
CTTTTATAGGAAAGGATGCTTGGTACATTTTTTCATATGAGATAGATCTTACATTTTTATTTATTCTGGATAAATATCTGATAATGTCAGGTTC
ATTGGATTCTTCAAAATAACCTCATTGTCTCTCTCTTAAGAGCGAGAGGGAAGTAGAATATGTGTAAATTTATATAATGTTGTTTTCTCAAAAC
TGCACCTATGTGAATGAAACAGAAACATGTTCAGGGACAGTTAGTGTTTCAAATTCTCCCAATTAGATATGGAGCATATTTATTATGGAGCATA
TTTATTAAGTAGAAAATTATTATGGTCTAATTCCAAATTTTTTATATTTTAGGTCCTATATTGCGACCTAGTTGGACTTTCGTTTAAAAAAAAG
TCTAAATTATGCAGAAGGGAGACCTCAAAGAAAAAGGAGAGACTGAAGAACAAGAAGCCTGAAAGTAATGAAAATAGAATTGCTAGACAGTGTC
CTGGAGGGACAAGAGGGAATGGGCTAGAGAGAGCACAGGTAAATGGATGAGCTTTGGATGAGAAGAGGAATAACTAGTCTTTGGAGGAAGAGGA
AAATGGATGAATACCGGTTCAGATATAGATTATTTGTCTTAGTGACCTGGTTTATTTGTAAGGACTAACCCATTTTAGGCAGTTAATTAAATTA
ATCATTTAAAAGGTGAGATTCCTCAATTCTGACTTGAGATGGACCTAAATTTGTTTATTCTGTTTAAGTAGTAACTTTATTTTTTTAGTGACAG
ATTTAAGAAGTATCTTACTGGTACTATTCCATTGGTTTTCTTATTTTAATTTTATAAATAATGTGTTTACTGAGTTTTTTTATAGGTGCTTCTT
AGGTTTCTAATAGACTTCTCTAAAATATATTGGTTTAAATGGCCTTTAAAGTTGATAACCAGAAAGATACTTGAGTTTATCTAGTCCAAACCTT
CATCAGGAAAGCTGTGATTGAGTGATTTGTCTGAAGTCATACAGCCACTTAGTACCAGAGTAAGAGAGCAATATTGGTTTTATGGTTCTTGGGG
TAATCCTCTTTCCCTTATGCCAACTGATTGCATAAGGGAACTAGTGTACTGATTTCAGCGCCCATACTTGTGTATGTCCTTTGAGCTAGAGTAT
CAAAGGACTTCAAAACTTCAAAACTAGACTTTTTAGGTTATTTAATATTCCTTCAACAAATCTTTCTCAGCTGTCTACCGTATGACAGTCACTG
TTTAAGATCTTGAAGATCAACAAGTTCTTGGGCCTCAAGAATGAGGGAACCAAAAAATAAACACTGAATTAAAAATGAACAGAAATTTAGATAA
TCATCAGTCCTATCAAAGAAACAAAATGCAGAAATAGAATATGCTAGCAGAACTATGTGCTTTAGATAGAATAGTCAAGGAAGATTTCTCTGAG
TTAGTCATATTTGAGCTGAGACTGAATGATAAGGCACTCGCCATTGAAGATATCTAGGAGTGTAGCATTCCAGACAAAAGCCCTAAACTTGAAC
ATGGTGTGGCACAGTTGATGAATGAAAAAAACTAAACAGTGACCGGGGTTGGGGGAATGGAAGGAGAAGAGATCAGAGAGACCATTAAGTAGGG
CTTTGTAGACTGTGGTATAGAAAGATAATTTTATTCTAAGTGAAATGGTGTGGTATTGGAGGAGCAGAGTGAGTGAGTAACCTAAAGAATATGT
TTCAAATATCACACTGCTTGATCGAGAATGGATTGTAGGAGGGCCAAAAGTGGAAGCAGGGGCACCAGTTAGGCAACTCTCATGTTTGTTCGAA
TAAAAGATTGTGGTGGCTTGGACTCGGTCATTCTGGTCAAGGCAAACAGAACTGGTTGGATTTGGCATTTATTTTGGACCTCTGCTGGATTTGC
TAAGAGACTGGGTATGGGAGTTTGGGGAAATAGAGGATGGTGAGAGTAAGAGAGAAAAATGGTAGACTGGGGAAAGGGCACATCTTGGGGAAAG
AAATCAGATGGTTTTTCTGGGACTTGTTAAATTTGAAATGCCTACTGGATATCCAAGGAGACAGTTAAATAGTCACATCTAGTGTTTGTTGAGG
AGAGGTTAGACCTGGTGTTGCAGATCTGGGAGGCGTTCGCATTAACACCATATACTGCAGAGTTGGCAAAGAGAAGGAAGAGAAGGTGGTTTGG
AATTGAGGCATTGCATGTTTAGAGGTAGCCAGGGGGAGAAGTCAGCAGAGAGCCAGTGACGTAGGAGAAAAGTCAGAAATACTGTGTTGTGGAA
GCCAAGAGAAGAGACCATTTTAAAGAGCGATATTTATGTTCACTTGGGTTAAATCATCCTGCCACGCCGGGTATGATGAAAACAGAGAAGTGAC
CGTTGATTTGGCAATGTGGAAGGCATTAGTGTCCTCAGCTAGAGCAGTTTTAGTGGCATGGTGGGGTCAGAAGCTGATTGGAGAGGGTTGAAGA
ATGAATGGAAGGTAAGAAGAGACAACGACTAGAGATCATCCTTTTAAGAAGTTTTTTTTCCTTTTCTTTTTGTGTGTTTTTTTAAGTTGAGAAA
TTCCCATCATCGTTTATATGCTGATGGCAATGATCGCTAGAGAGGAAAATTAATGGTGATTTGGGAAAGAAAGATTAATTGTGGAGTAAAGTCC
TTGAGGTAGCACTGGTGGAATCGCATACAGACCACAAGTAGAGGGATTACCCTTTCATAGGAGTGGGGATGCAATTACGTAATATAAAAAAGGG
ACCTCAAGCCACTTTACACACAGCCCCTCCCTTCAGTCTTAACAATCTCCTTTAGACCAGCTTGATCTTTCTGTAATCACTAGTGTTTTTTTTT
TTTTCTGTGCCACATTAATATGTTCTTTCAGATTGAAGTCATCCTATATAAGGCTTAGTATGAAGCAGTTGATGATATTTAATAACAATTTTAA
ATTTTATGCCAACAGGTGAAGCAAAAAATTTATTGCCATATCTTGGACCCCACAAAATGAGAGATTGTTTCTGTACCATAAATTTGGACCAGGA
AGAAGTTTATCGTACCCAAGTTGTGGAAAAATCTTTAAGGTTCGTAGAAAAAATTGGTAAATTATAATTTTTACTATATAGATTGGTAAATATT
ATGCATTTTCCAGATTATAATAATCAAGAAGACAAGACAGAAACAGTGCTTGCTTTCATGTGGCTTTTCATTGCCTCAAAATGTATCTTCCTCT
TAATTGTTCCTAATTTTATCTTTGTTTTCTGGAGAAAAGTTTTTTCACATGACAGGCTAAATATTGCCTATTCGTTTGAACTTTCCTCAAAGTA
CATCTTTATTTTATTTATCTAAAGAATAAGTTACTTAAAGTTCATAGAAGTTGCTTAACTTAGTAGTGCATTATCAGGGAATGAATTCTCAGAT
AGATGTCTCATCTTTGAAAGTGTAATTGCCCTTTGAGAGTATCATATTAAATTCTAATTCATAAAACTGCAATATACCACCTCTGCACCGTAGC
AATGTGAACATAATTCTAGTGCAGAGTTGTGCTGAGAATCTTGTTCAGAGACAAAAGTCAAAATAAGGAGGCCGGGCGTGGTGGCTCACGCTTG
TAATCCCAGCACTTTGGGAGGCAGACGCGGGCAGATCACTTGAGGTCAGAATTTCGAGACCAGCTTGGGCAACATGGTGAAACCCCGTCTCTAC
GAAAAATACAAAAATTAGTTGGGCGTCGTGCTGGGTGTCTGTAATCTCAGCTACTTGGGAGGCTGAGGCAGGAGAATCGCTTGAACCCAGGGGT
CGGAGGTTGCAGTGAGCCAAGATTATGCCATTGGACTCTAGCCTGGGCAACAAGAGTGAAACTCCATCTCAGAAAAAAAAAAAACAACAAAAAA
ACAAAAAACAGGGTGTGGGGTATTATTGGAATGAGCATGTGGTGGATGAAATATTGAATGCCATGCCTTATCTGAATCATATTTTAGGTCAGTT
GTATTTTAGGGATCTGTTTTTTTTTTTTATGCCTTTAAAAAAATATCTTTCTTTTACATTTGCCTTTGAAGTTTCCCTTTATGTCTTTATTTTC
ATTTTTTATAATTTTAAATATCTATTGAATTCTTCTTAGAAAAGGTATTGTATAAAACTGAAAATACTTGAGTAGCCCAAAAACATTTCAAGGA
GTAAACTTGAAATCTTTAGTCTTAATTCTCATATTGTTCTTATTTGGCTTTAGAATGTACTTTAAACATAATATTTGAATCTGGATGTGATATA
TAAAGGAAATTCTGCATTTATAATTGTTTAGAAAATAATGCAAAGAGATACATACCTACACATGTCTTGTCTTTCATATCATGTTTTCATATCA
TATTTGACTAATAGTTCTTTTTGCATTCATTTCTATGTTCAAATTAATTAGAAGGCTCTACTTACTTTGTCAGACCAACTTTTAAAAGTTTAGT
TTGCTTACATTTGAAGCGAAAAATATACTCACAAAAGTTCACCAGCCATTTTAACAACTAAAAACCTGAACCAACTGTTTTCTAGACAAGATCA
GATATGACTTCTGTAGGAGTATTTTACTTTATATTTCAGCTTCTCATTTAGTTATGACATCATAAAGATACTGCATTTCATAGCGATATTTCTA
GAGAATCTTTTTGTTCTTTAAACTTTCTCAGGAAAGAGGTACACTTGACAAAAGAAACTATCATTTCAGAGATTCGCGTCTTCATAGAAGAATC
ATAGAAGGATAAATATATCAAAATGGCATTCTTAAAATGAACTTATAAAAATAAGCTTTGCAACATGAGGATGGGCAAAGATTTCTTGCTTTGA
ATGCAAGAAGCACCACTAATTATAAAAGATGAAAATTGGTAAATTAGATTTTATCAAACTTAGAGGCTCCTTTTCTTTAAAAGACACTGTCAAG
AAAATTAAATGGCAAGCCACACCTGGGAGAAAGTATTCTGACAAAAGACTTGTATCCAGAATTTATTTAAAAACAAAAACCCTGATAACTCAAA
AGAAGACCGATGGCCATTTAAAATATGGGGAGAATACTTAAACAGATACTTCAGAAAAGATATGGCCAAGAGCACATCAAAAGGTATTGGACAT
TGTTAGTCATCAGGAAATCAATTTAAAACCATTTTTGTCACTATAGATTCTAGAACATAATCTGCAGTGATAGAAATCATATCACTGGTTGCCT
GTAAGAATATGGTGGGAGTGATTGCAGAGTCACAAGGGAACTTTCTGGGGAGATAAAAATGTTTTGTATCTTGATTATAAGGTAGAGATTACAT
AGGTGTATACATTTATCATGTTACATTCACTAGAATAGCTAAAGTTAAAGGCTGTCAGTACCAAGATGTGGAACAACTGGAGCATTGCTGTTAG
GGGTGTAAAACAGTACAACCACTTTGAAAACAGTTTGACAGTTTCTTGTAAATTACACATTCACCTGCCTTTTAACTCAGCAGTTGCATTCTCA
GTAATCAAAAGCATGTGTCTAGAAAAAGCTTTATATAAGAATGTTCATAGCAGCTTTACTTTTGATAGCCCAAACTGGAAACAACTCAAATAAC
ATCACTAGGCGAATGGATTTGGAATGCAATGGAATACTATGCAGCAATTAAAACAGTTGAACTACTATGTACACAACAACATCGAAAAAATCTC
ATAGACATTAAGCTGAATGAACAAAGCTGGACATGAGTACATACTATATGATTCTATTTATGTGAGATTTTAGGATAGATGTATAGTGATAGAA
AACACATCACAGGTTGGGGCAGGTATGATGGGGTAACTGAAGGAGAGGCATAAGAGAACTTTCTGGGGAGATAGCAGTGTCCTTTATTTTGATT
GGGGTGGAAGCTACACAGTTGTATAAATTTATCAGAAGTCATCAACCTCTATACTTTAAATTGGATTTTTATTGTTTGTAACTTATAGCTCAAT
AAAACTGATTTAAAAATACCTTGTTTTAATTTTTTAAAAATATTTTTTAAAGTTGATTTTAAAATTGCATATTTTAATTTTTTAAAAATAGCTT
AATTTAAAAAAAAATTTTGAAGTAGCCTTTCACATAACATTGGCTGTTTTAGGTATTATGTATTGTAAATAATACAGCTTTACACATTTCTAAG
ACAAGGATGGTATGAATGACACTATCCTCACCTCTCAAATGGTCCACCTTAGGTGACCATGACCCCAGGCAGTTACTGTATCTTCTATCCACAG
GACTGCTGAAAAGCTATTTGTTCAGAACTCATACTGGCAACTTAGATCCCTTCAGTGTTCAGCTTGGTTTCTATAGAACTTAGTTGAAATTTAG
CATTGAGAATTATTTTGGGCCTTTTCAAATTCTTTTCAATGGCATTTTAGTCCATAATTTCATTAACTTTATTGAAAGTGATATTATTTGGCCA
GGAACATTAGCTCACTCCTGTAATCCCAGTACTTTGGGAGGCTGAGGCGGGTGGATCGCAAGGTCAAGAGATTGAGACCATCCTGGCCAACATG
GTGAAACCCCATCTCTACTAAAAATACAAAAATTAGCTGGGCGTGGTGGCATGTGCCTGTAGTCCCACCTACTCGGGAGGCTGAGGCAGGAGAA
TCGCTTGAACCTGGGAGCTGGAGGTTGTGGTGAGCTGAGATCACGCCACTCGACTCCAGCCTGGCAACAGAGCAAGACTCTGTCTCAAAAAAAA
AAAAAAAAAAGTGATATTATCATTCTCAGCAAACTATCGCAAAGACAAAAAAACCAAACACCACATCTTCTCACTCATAGGTGGGAACTGAACA
ATGAGAACACTTGGACACAGGAAGGGGAGCATCACACACTGGGGCCTGTTGTGGGGTGGGGGGAGGGGGGAGGGATAGCATTAGGACATATACC
TAATGTAAATGATGACTTAATGGGCGCAGCACACCAACATGGCACATGTATACATATGTAACAAAGCTGCACGTTGTCCACATGTACCCTAGAA
CTTAAAGTATAATAAAATATATATATATTAAAAAAAGAAAGTGATATTATTTGAGTATTTATACAATTATTATTCAAACTGATATTAATTATTA
TTTATTTTATATTATTTGAAGTAATGAGCTTTCCTTTTCTTTCTAGCCCATTTTTCAGTGAAGAATTTTACTTTGAGATTCCAAGAACTTTCCA
GTATTTGTCTTTCTATGTTTATCATAAGAATGTTTTACAAAGAGATCTCCGTATAGGTATGTACTATTCATAATTATCTTTAATCACAATGTTA
ATGTTTATATTCATTCGTTCTCTTACTATAGTTTTGAAAATTGCAGAATAATATATGCTCAACATCTCTGATCTTTTTCTGTAGACTACATGTT
CATTTGTGAAATTTCATTTTTAATTTGTATGTTCAGCTTATATGACACTTTCTCAGGGAGGCCTTTCCACCTCCCCTAGTCACTATGTCATATG
TTTTTATAATTCCTGATGGTTCCCTTTCCATGGTACTCATTATGCTTATTCATTAGTTGGCTGTTTCATATCTAGGTTCTCTAGTTAAATGTGA
AATTTAAAACGCCAGGGACTCTTTTTTTGTTTTTTTTTTTCACACACAATCTTCCTCTATCTCCCAGGCTCGACTGCAGTGGTGCGATCTTGGC
TCACTGCAACCTCTACTTCCCAGGTTAAGCGATTTCTCCTGTCTCAGCCTCCTGAGTAGCTGGGATTACAGGCGTGTGCCACCACGCCTAGCCA
ATTTTTGTATTTTTAGTAGAAACAGGGTTTCACCATGTTGGCCAGGCTGATCTTAAACTCCTGCAGGAAATCCACCTGCCTCGGCCTCCCAGAG
TGTTAGGATTACAGGCATGAGCCACCACGCCTGGCCGGGCAGGGACTCTTTCTTACGGAGCACCTTACACTTACTAACTGTTGCGTAAGTATTT
GTTTAGTGCTTCAAATAATGTTTTTATAGAAAGATTGCACTTTTGATCCTTCCAAAGAACATCTGTTGTTGAGGTTTTTCTAATAGAAGTAATA
ATTCACTTTAATCTATTTATACATTTTCTTCCTGTCTGTATTAGTGACTGTATTAGTCCATTCTCACACTGCCATAAAGACATACCTGAGACTG
GGTAATTTATAAAGAATATAGGTTTATTGGCTCACAGTTTTTCAGGCTGTACAGGCTTCTGCTTCTGGAAGGCCTCAGGAAACCTACATGAGTG
AAAGGCAAAGGGGAAGCAAGCACATCTTCACATGGCTGGCAGGACAGAGGAGAGTTGGGATGTGCTACACACTTTTACAATAACCAGATCTCAT
CAGAACTCACTGTCATGAGAGCAGCAAGGGGATGTCTGCCCCCATGATTCAGTCACCTTATGCCAGGCCCCTCCTCCAACAGTGGGATTACAGT
TTGCCATGACATTTTCGTGGGGACACAGAGTCAAACCATATCGGTGACCAATAAATATATTTCTCTTTTTTTTTGAGACGGAGTGTCACTCTGT
CGCCCAGGCTGGAGTTCAGTGGCGCGATCTCAGCTCACTGCAAGCTCCGCCTCCTGGGTTCACGCCATTCTCCTGCCACAGCCTCCCGAATAGC
TGGGACTACACGCTCCCACCACCACGCCCGACTAATTTTTTTTGTATTTTTAGTAGAGACAGGGTTTCACCATGTTAGCCAGGATGGTCTCGAT
CTCCTGACCTCGTGATCTGCCCACCTCCCCCTCCCAAAGTGCTGGGATTACAGGCGTCAGCCACTGCTCCCGGCCAATAAATATATTTCTTAAA
TAATTGTCAGACTAGAGTGTGATCTGTGGGCATGAACTAGAACAGAGCTAACTGGCCACATATGTGTCACATTCCTGATCTTTGCACCACTATC
TTTGTATTTTAATCATAGGCAGAGGTCTAATTTACATTTATTCTCTTTCTTTTTAGTATCCTAAATTTCATCTCCCTTTCCTTTTTTATTTGAA
ATATGGTCAAGTCTCCTACAGCTTAAAAAATTAAGCATTATTTGGCCAGGTGCAGTGGCTCATGCCTGTAATCCTAGCACTTTGGGAGGCCGAG
GTGGGCAGNNNNNNNNNNNNNNNNNNNNAAAAAAAAAAAAAAAAAAAAAAAAAAAAAATAAATTAAGCGTTGTCTTTGTCCTCTTAACTAACTT
CTGATGTTTCTCTGTGTTTGATATTGAACTCCTTAACAAATCGTCTGTGTCAGTCCTCTGCTTGCTACTTATTTCTTTTAAAATCTCTATAATC
TGGCTTCTATGTTTTTTTGATAAACCTTTCTTGAAATTTGCCAACATCATTTTAATCAAATAACCTTTAAAACAATATGTTTTTCTTAATTATA
AAACTGTTATATGTTCTTAGTATTTGGTAGTGATTCTCTACAGAAATAACTACAGTTAATAATTTGGTGTATTTCTTCCATTCTTTATTTCATA
CATTTGTATTACTACATTTTATTCAGATTTTTTCCTTTTCAATTAATACCATAGTGATCCTTTCCCCATATCATTAATATTTGTTAAAACTATT
TGTTACATAATATCCTTTATAGAAAAGTGTTTTATTTTAACCACATCCTTGTTGGTGAACATTTACATTTCCAAATTTTGGGCATCCTCAGTGG
TGTTGCTATGAACAAATCTCCTTTGGCATAAATTTTTGCATGTCTCTTTTTCCCCAGGATAAATTCCTAGAAGTCAAAATACTGAGTCAAGGGG
TATGAACATTTTTATGATTTCCTCTGTAAATTTCTGTATTGCCCCTCTGCCCCACAGAGTATCATACTAATATGGACGACATAAATGTTGTACT
AATTTACATTTCCTCAAAGATGTCATGGGCATAACCATTTTACCACGCCCTGGCCATTCTTGCATATTATCATTGAAAAAAATTTGCCAATATG
ATAGGTGAAAAATAACACATTATTATTTTAATGTGTGTTTTCTGATTTTGAAGGAATTTGAGGAATTTTTCATATGTTTATTGGTATTTACATT
TTTCTTCTGTGAATTGATTGCTCATTCCTTTGCCTATTTTTCTTTTGGTTGGAGTTCTAACATTTATCCTTAAGCCTTCTTATTTTTAGATATG
TTAACTTTTGTCAGCTATATACATACCAAATACTCTCTCTCACAAAAGGCATTTTCTTAGTTTTTATTGTTATCTGCCTCTGTGTCACATTTCA
CTCTCTTCATTGCTTATTCGGTTTGCTGAAAGTGAAAGAAAAGACATTTTCATGGTGGTGTATTTTTTTAGATGTGTTTCTCCCTCTGATGCCT
TCTTATATGCAGACTCTTCTCTTTGTAGCAAACCGTTCATTATAGATCACCCTTGAAGCTGTATCCTCAATTCAGTTTAACATTTACCAAACAC
TTCTCCGTGGCACACAAAGGTTGGGACTTTTAAGATGAGTAAGACTCGTTGCTCATCAGAGAGGCAGACTTCTAGTCTAATACTAATATATTAA
TACTAATATATTAGGGTCTGTGCTGGAGATATGAACAGAATACTTAGAATAGTAGGGAGAACAGCTCATTTTATTTGGTAGGGGAATAACAGAG
ACTACATAGGTAGGAAAAAGAAGAACAATTTCTTTTCTTTTTCTTTTTCTCTTTTTTTTTTTTTTTTTTTTGAGATGGAGTCTTGCTCTGTTGC
CCAGGCTGGAGTGCAGTGACATGATCTCCGTTCACTGCAACCTCCACCTCCTGGGTTCAAGCGATTCTCCTGCCTTAGCCTCCAACTAGCTGGG
ATTACAGGCATGCAACACCACACCCAGCTAATTTTTGTATTTTTAGTAGAGACAGGGTTTCACCATGTCAGCCAGGCTGGTCTCGAACTCCTGA
CCTCGTGATCTGCCTGCCTTGGCCTCCCAAAGTGCTGGGATTACAGGTATGAGCCACCACGCCCCACCAGGAAGAACACTTTCAAGGTGACAGG
GATTGGCAGAAGCAGAGGGGGAAGAATGAATCATGTTTGTGGTGTACCTCCTGGAGGAGGGTCATAGAAGCTGAGGATATAAATTGGGACCAAA
CTGATGAACCCTAGAAACCATTCTTAATTCCAAAAGCTAAGGAACTTGGACTTTATTCTGTAGACAGTGGTTTTGAACCTTTTGAGAATGTATG
TAACTATATATAACTGGAGTGTGTGTGTCTGTGTGTGTTATAATATACATGCATTTGTACTGCTACAAACAGAAGAATCTGCATATTGTATTAT
ATGATATACAGTTATATATAGTTACATACACATATATATATATGCACACACATATATACACATACACTTATATACACAGATATATATACACACA
CAGTTATATACACACGCAGATATTATATATTCTAATTTAAATATGTAATCTATATACATCGAGTTTGTAGTACTGTTGTAGGCCATAAGAAGTT
GTTGATTTCCAATAGGGAGCGGTTAGAGGCAGGAACACCAACAGGTATGCTGTTTTCAAATGAAATGAGTTACCGCAGTTGCACTGGAAATACA
GATGAGGGAATGTACTTCAGGGGTTTCAAATAGGGCATAGGGACCAAGATGAACAGGAGATGTGAAAAGGAGAAGAGTTTAAAATGGTCTTGTT
TGTATGGCTGTCATTAAATTAGATAAAGAACACAGCAAGAACATTCACTTTTGAGTGAGAAGGGGAGAGGATCACTTTGGTTTCAAACAAGTTA
AACTTAGTATTACCGCCGTACATCTTAGTGGACATGTTGGTTGACAGTTGGAAATATAGATCTGAAGCTTAGAGAAAAGAGCTAGAGATGTAGA
TTTGAGAGTTATTAGCATTAAGTGATAGGTGAAGCCTGTGTTGGAATGAACGAAATTACCTGGGAGTGGATAAGGAGGGTTTCAGGGAAGAAGA
GACTTGAAGATAGATAAGGCATATCAGGAAGTAGAAAGAAACATGGGAGAGATTAATGTCAGAGAACATAAGGAAACCTTTTAATGTCAGCAAC
TAGAGAAAGGTGGAGTCAGATAAGGATTGATAGAGGCTATTGGTAGTTATTAATAACCTTTGAGAGAATGTATAACTTCGGCCATCATACCTTA
AGAAAAATGTTTAGTAATTTTCGTCTCTTTACATGTTATAATCTTAAGGTAATATTTCTTGAAAAGGCCTTTAAGGCCTTTTAAATAGCAGCAT
AAAGTTGAGGTTTATGATTTCCAGAAGTTGCCTTTGTTTTTTGTTTATTTTGAAAGTAAAAATCAACTTTAGGTAAAATAATTTCTAGTAAAAA
TCAGTTGTTTAGGGAGTGGTGTCAGAAAGCTGTAACTGTTGGTGTGATAACTTTTTCTTAAATGTTTATTCTTTCTAAGGGATAAAATTTATAC
ATTTAACAGAAAATTCTTTTTCCTTTTGCATATAGAGTTATTATTAAACACACTACATACCCTTTAAGGTTCCAAGTGGTTCATGGTTTTACTT
ATACATTTTTAACATTTTTCTAGTTCAGTATCATTTTCTTTTGTCATTAACACACAGGTTTTTTTTTTTTTTAATTTTGAGCTATTGCAAGTTG
AGTTTTCTTAATTATAATTTGGAGCCACTCAATTGTAGATTAAACACTGACACACCATTTTCTGGAAATGAAATTTGAGCTAGAATTTAGAGAA
TCATCTTTTAAACTTAAGATCTTAGATTCAGTACAAGTTGAGCATAGATAGATTTTAGGGGTTTTTTATTTTTAATTACATGAGTAATGTATGG
ATTTTTTTTTTGTCATTCATTTATTTCACATTTATTCTCATTGTACCACGCAAAGAGAGCAAGGAGTCATGCACCAACACACACAGATTGTGCT
GTTTTTCAGTCTTTCTGATAGAATCAGGATCCAGATTCTAACTGTCTTCTAAATCTGGATCAGTCAGTAGAGATGGACCACTGTGGTGGAGGGC
CCGGGGCTGCTGAGAGAAAGGCAGGATACATCTCTAGAACTGACCATGGCAGGTTCATGTTCCAGGGCTCCCATCTGGGTACCTGAGCATTTTC
CATATAGATCACAGGTGTTGGGGCCCACATCGGCTCCTGAAAGTCTCCGGGAATGCCATAGGCGTGGGGCTGGTGCTCGGGAGGTGCAAGGTCA
GCCACATCAGCACAGGGAGGACCTGAGAAGACGCTGATCTTCCATCTGTATCCCAGAATCCTGTGCAGGGCCTCTCCATAAGGACATTGCAAGG
GGTGGCACCTTGGCCTCTGGTTGGCCTCATGAATAGTGAAGTATAAGTCCTGCAAGCTTATCAGCATCTGGAGACATTCCTGCCAGCTCTTCTT
TATACCTCTGTGCTTGAGATGCGGGGCAACTGCTTTTGATACTGTGTGATACTTCTTCACCCCGTACACTTCACGCTCAAGAAATTCCCATTCT
TCCAGGAAACTCTGGACTTCCTGGCTACTCCATGGTTTAATTAACTGGACTGAGGGCTTTTCTGGTCCCTGGACTGCTTTTTTTCTGCTTCATT
TTCAGGATGTTTCTGGTAGTTTCAGTCTGAAGTATCACTTTCTCCATTTTTATTCCTGAGTTTTCTTCTGGGATGATTCTCACTGAGTCTGCAG
GGCCTGTTCCTCGGTTGGCGGAACACTGCCACTTACTCTGCTCTAATGGAACCTACGACAGTCAGAAGGAGCCTGAGTGTGGAAATGTGTTTGC
TTCTCTCTCCTTCTTATGTATGGATATTTTTATTTTTGTAAAAAAATTTTAAATTATGGCATAGATAATCCCATTTTTTTTTTTTTTGAGACGA
AGACTTGCCCTGTTGTCCAGGCTGGAGTGCGTTGGCATGATCTCGGCTCACTGCAACCTCCGCCTCCTGGTTTTAAGCAATTCTGCCTCAGCCT
CCTGAGTAGCTGGGATTACAAATACCCACCCCCACACCTGGCTAATTTTTATATTTTTAGTAGAGACGAGGTTTCGCCATTTGGCCAGGCTGGT
CTCAAACTCTTATCCACCTGCCTTAGCCTCCCAAAGTGCTGGAATTGCACGCGTGAGCCACCGTGCCCAGCCTAAATTACTTTTGACCACTGCC
TCCTCCCAGTCCTCTTCCCAGAGGTAATAATTGTTATTAATTCCGGGCATAATTGTTTATATTAGGCATCTTTATATGCTAGGAACTGTTAGTA
CAAAATGAGAGAAAAAGAAAAACTTTAAGCATATATTTTTATTTCCAATCAGGATTCTAATAATATTGAAATTAAAACATAAATGTTTTACCTC
CTATTATGTATTTTTTAGTTATTTTGTTATTCAAGAGCTCAAACAAGTAAACTATGACTATTTTTCTAGAGCTCAAACAAGTAAACTGACTATC
TTAGTAGACTCTGGCAGTTCTCCCCGACCCCTCACTCCACCTTGGTTCAGAACCATATAGAAATGAAAGCATTTTACTAGAATGTCAGAGACCT
GAATACCAGTCATGACTATGTCACTATCTATCTATGTGATCTTCATTGAGTCATTTTCTTAGGCCTGGTTCATCCATAAAATAAGATTGGGTTT
AAAATTGCTAAGGTCTTTTCCAACACTTTCAATTGTAATTTCTGCTCACATTTAGCTTTTAAGCAAAATTTACTGTCTATAAATTGCTTATGGC
TACACTTTGGTGTCTGTTTGCACAGCCACTATATCAGTTATCTACTCCTATGTAAGTACTCCAATACTTACTGGCTTAATACAGCAACCGTACA
TTTACTCATGATCCTATTGTTTGTCAGTTTGAGCTGAACCTAGCTGAGTGGCTCGGCTGGTCTCGCCTGGGGCTGATGTGCAGTTATCTGGGAG
ATTGGGGCTGGCTGGTCTGATTCATATGTCTGATGGTTGGTGCTGACTATTAGCTGGACCTTCCTCACCACATCGTCTCCTGATTGGTTCTAAG
AAGGCAAGCCCTAATGCAAAGGTGTGTCACATTTGCTGATGTCCCATTGGTAAAAGCAAGTCACATAATCCAAGAGTCAGTGCTATAGGAGACC
ACACAATGGTGTAGATAACCAGGAGTTATGGAGGCCATTAATATACCAGTTTACCACAAAGACCAAAATATGTCTATCGAAACCTCGTACACTA
AGGCTTCGAAGTGCTGCCATTGTCTCTAAATTGCTGCTGTTGACTGTTTGCCAGGATTTGTTCAGTCCTCTGGTCCTGTTTCATTTTTCTATAG
ACAGTAATATTTGTCACTGTTTTTCTTTGTTTGTTTTTTTGAGATGGACTCTTGCTCTGTCGCCCAGGCTGCAGTGCAGTGGCGTGGCATGATT
TCATCTTACTGCAACCTCTGCCTCCTGGGTTCAAGCAATTCTCTTGTCTCAGCCTCCCGAGTAGCTGGGACTACAGGCGCACACTGCCACGCTC
GGCTAATTTTTTGTATTTTAGTAGAGATGGGGTTTCACCGTGTTGCCCAGGCTAGTCTCAAACTCCTCAGCTCACGCAATCCACCCACCTCAGC
CTCCCAAAGTGCTAGGATTACACGCGTGAGCCACCATGCCCGCCCTGTCACTGTTTTTATCTCCTCTTTTAGCCATTTCTGCTAGTGCTCAAGT
AGGAACAGGACTATCAGCATTTTCCTAATTGGTGAATTGTATCAGCCTCAAATTTCTAAGAATATATTCTATCTAAAAATGGGTCCCAAGGGTA
ACACAGTATTTACTGATGGCAAGAAAATGCTGCTGAAAAATGGTATTACAAAGCTAAAAATGCTTTTTTTTTATTTAAAGATCAACAAAGGTGG
TTTCTGTGCCCACAGTTCCTTCATTTCCTTTTGTGTTTCCTTTCTTTGTCTGATTTTAAGGAACTAATACAGCATCTGGTGTGTATATGTTTGG
TTTTAAGCTCTTTCTGTCTGTGAGTTTGTCAGGACACTGAGGAAATGAAGTACTAACTTTAAATGATTTGTTGGGACGTTTGTTTCTTGTTGAC
TTTTTTTTTTTAAGAGTTGGGGGTCTCACTCTGTTGCCCAGGCTGGACTTGAACTCCTGGGCTCAAGCAGTCCTCCTGTCTCAGCTTCCCAGGT
ACCTGGAACTACAGGCATGCACCACTGCACCCAGATGTGTTTGATTTTTTTTGAAGTTGGTAACTTCATAGCTAGTGAAATAATCAATTAATTT
TGTTTAAAATAGTAATCAACAACTGGCCACAGTGGCTCATGTCTATAACCCCAGCACTTTGGGAGGCCAAGGCAGTTGGACTCCTTAAGCTCAA
AAGTTCAAGACCAGCCTCGGCAACATGGTGAAAACCCATCTCTACAAAAACTATAAAAAGTAGCCAACTGGGACCAACTGTAAAAATTACTTCT
GGCTACTTGGGAGGCTGAAATGGGAGGATCACCTGAGCCCAGGAGATCGAGGCTGCAGTGAGCTGTAATCATGCCACTACACTCCATCCTGGGC
AGCAGAGCAAGACTCTGTCTCAAAAAAAAAATTAAAAAAAATACATAAATAAAAGAAAATAGTAAACACTAAACTAAAACAATCTTTGGGACTA
TTAGAGGCACAAAAAGGGTTTTTAAGATCATTAAGTTAAAAGTCATTCTAATGCAGAGGAGGCACATCAGATGTAGAGTTTGAGTAATTCACCC
AAGATTACACAGCTAATAAGTAACAGAATTGACACTAGGTTATCGAATTAGTGTTTGTGTTCGAACGAGCACAAACAGGCATGCCTTGGTTTCA
AAATCTGGCTGCAGCACCTGTTAGCGGCAAGTTTAAAAATATTGTTCAGCTTTCCTCATCTGTAAGATGGTGATTATACCCTCTACCTCCAAGA
TTGTTAGGAAAATTAAACAAGAAAATATATAAGAATGTCTCCTACCTGGTAGAGACTCAGTAAATGCTCGCTTTTCTTTCAGTTCAGTGCTCTT
TCCACTGTGTCGGGCTGCCTACCTTTTACTGTTAATGCCTCCCAGTTTAGTGATTAAACAACAAATCAGAATCGTCAGGCTTTTTTTTTTATTC
TATTTGTGTTTCAGAAACTTGTTCCTTCTTTCCCCATCCTCTCTTCTCCCTCTCCCGTACTTCCTTCTCATTTATCCTTCCACCTTTTTTCCTC
CTTCATTCTTTGTCTGTCTTCTCCTCTCCCTCTTCCCTGTTTTATTCCCTTGGGCTGATCATGTATATTTCTTTTTATATGTTATATTGCCTAA
TAAAGTGCTGGACATCTTGTAGGTATCCTGCTACCTATTAACTTCAAATATTTTTCTTAATTTTCCTGTGCCATTCTTATATATCATTTTCTCT
AACTTTGTGGAATCATGTACTCTTTCTTCTCTGTTTCTTCAGGCCAACTGGCCTCATGCAACTAGATCTTTACATATCAGAAACTGACATCTTA
AAAAGGAGCTTAAGAATAAGAGCTGGCAATAAAATTACAGATTATTCTCAGCTCACAAATGACTTGTTTATGCAGCTAGTCAGAGAAGGGTTTC
CCTCTCATAGGACAACAAACATTCAACTCTTCAGTCACAGTGAATGTCATCATACTCATGATGCACAATAGGAGGAAGACGCTGCTTGCTTTAG
AATATATTACCTGTGTGACTAAGAGAGGATTCTCTTTTGGGAAGGCACCTGTGACAGATGAGATGTATTTCCAGTGATCTGAGAGTAGTGAGTC
ATAAATAGGACAGGTAAATTTCTACTCTAGTTTTTAGCAGCATTGTTAGTTAAATAGAGTTTGGTTAGGCAAGCCTGGAAATCAAATCAGCATT
TACAACACAATGCCATTGTGATTGTTGAATGAGGGAATGAATTTGTCAAACCAATAAACTCCTAAATAAACTTTGTAGGCAACCCTCTTTTAGA
ATTTGGGACTTGTTTTAGTGGTGTTTGTATGTATTATATGTATGTACATATGTACATCTATATACATATTCATAAATTGTGTACAAAACTAAAA
ATTATGGAAATTGTAAAGTAGAAATTTCACCAGAAGTCTACTGATTCGTTTCTGGATGGTAAGTAAACTCTCTTAAAATTTTGTGCCAGATATT
ATCTGTCCTTTTTCTGGGGAGAGGACATAAAAGATACACAGTTACAAAGATTCTTAAAGGGAGGGTAATGGTTCTCAAAAGGTAAGAGCTTCAG
CTATAGCATGTATAGATATATTTCTGTATGTACATATATATTTTTTGAGTATCAAACTGTTATCCATTGCCTTAACATTTTATTTATGTCTGGT
GTGGAATCTGTGGTAATTAGGACTACTTGATAGAATTATGGTAATCATTTGTGGTGTGCAATATTGAATACTTTGTCATAATTTTATATCTTAA
GCCATTCCTGGTAATATATCGATTTGCCAGGAATTTGATACAATTCATAGATAAAACATATCCAGAGATTTGGATGATTTGTCTCTTAACCTAA
ATTCTTCCTGCAGTTTAAGGAACATTTGAGTATTCCAGTTAGTACCTGAATTTTATATTTGGCTTTTAATCTGTGTATTTAATACTATAAGAAT
TTCTGTTTTCCCATCATTTTTATCTTAAATTTAACCAAAAAAGAACTAAAATACATTATTTCCCTAGTGTCATTTTCCATGTGATTTGAATGAA
CTATAAATGCTGTATATTCACATAAAGATTTTGATCTTCAATTACATTTTATCCAAAGTATTCAAAAGAAAGTTGGGAAGATACCTATTTGTTA
TCAGGACCAATTTATTTTAAAATTTTATATGTTTTAACTTCATGTATTCATAGACATATAAAGATGAACTTTCAATACGCCTCCTTCGATTGTA
TTTTTTTAATACAGTTACCACTCGTATTTTTTTAATACAGTTACAAACTCTTTAATAAAATACAGCTGTGTACTTTACTATTTTCTTTAAAATT
AGATGTATCGATTGTCTTTACAGTTTGAATTCCAAGACATGAATGAGAAGCTTATCAAAAACTGTAATGTGGTTACATTCTAAAAATAACAGTT
TTATTGAGATGTAATTCACATACCATTAATTCACCCTTTTAAGGTATACATTATATTTGCTTTTCAGTGGTTCAGAAAAAGAATCATTATATAC
GTTAGAGGGAGAGAAACATTATAAAAGTTAACAGTAGGGGAATGTGAGTAGAAAATATGGAAATTTTTAGTGTACGGTTCTTGTAACTTTTCTC
TGTTTGAAATTATTTCAAAATACATCTTTTTTTCTTTTTTCCAGCACTAATGGCTTGGGTGAATTAAAATATTTTTTAAATTAAAAAAAGTGTA
TGGTGTGGTGGGGGCCTTAATATATTCACAGAGTTGTGTAACTGTCACCACTAATTCCAGAGTGAAATTTTAAGCATAGTTTGTGTTTGTTTTC
CTGTTCCTTCCTTTTCACTTGATATACAAAAGTTGACGTATCTTGACAGAAAAATTTCTTTACAATTTTCTTAAAGTTTTCAAATGTTGAACTA
AAAGACCAAGGTATATCATAAGTACAAGGAAATAAAGTAGAATTAGGGCGTATAAAATGAAAATTCTTACTTGACAAAAGAAAGTGAACTGCTT
TTAACTTTATATATCCTTTGTTGAAACTTTTGTGTAGAATCCTGGAATAAATCATTAGTCTTATGCAAAACTGTGTCTACTTCTTAAAACTTGA
ATTGAGGAAGGAAATGCTTTGTACCAACATCGCAAATATTTTATTATAAGAACATTTCTGTTTCTTCCTCTCATACTACTATGTTCATTCTACT
GTATCTTCCTCTGAGAGGGTTTAAACTCTTTAGAGAACTGCCTTAATTTTTGTATGTATTGGAGCAACATAATCAGTCTTTGCAATGTTTTGAT
AAAAGTAAATTCTTAATAATAAAATTGTTATAATCTCCCATAATTTTCAAGTCAGTTTTCACTGTTGTTAATGATGTATGATATTGTTTTTCCT
TTTCTCTTAATTGGAATTTATAAACTCTTACTAAATGCAGATACATCTGCTCAAAACTTGTCATTTGTTCTTAGGGTCAAAAAATTGGGAAGAT
TAGTTTGCACTACCATTGTACCTTGCTTTTTATAATGAGTGTACTCTGGGTAAAAACATGAATCTCAATAAGTACTAAAAAAATGCAGTTGCCT
GTAATACAACTGAGGTTTTATCTAATCCCCTGATTCAAAATGACCCAGACAAATGTCTGCCAAGGGGCAAGGAGAAATGAGACACTTTTTCATT
CTTTAGAATGTAGAAAAAATGCTTTATAAAAATGGATTTTTATGTCAATAGGTACAAATCATTTTAAAATATTTTCTATAAAGTATTATATAAA
ACAGTGCTAATGAGTCTTAGGATTATACGAAGCATGTTTTCTTATATTGTTTTACTTATTTTCTGTAGGAAAAGTAGCCATCAAAAAAGAAGAC
TTGTGTAATCACAGTCGCAAAGAAACTTGGTTTTCATTACAGCCTGTTGACTCCAATTCAGAGGTTCAGGTAAATATTAAGGCTTATGTAATAC
AAGAGATTGTCACAGGAAATGAGTAAAAAATGAACTAATTAAACTGGTTCATGTAAATAGAGCATATTATACCTTATTTTAAATTCTAGCATCA
AATATTATAGACTTTTGGGTAATATAGGACAGCAAGGTAATGGCTTTGTCATATTGTTTCAAGAATAATGCTCATGTATATGCATATGTGTAGA
TTTGTGGAGATTAGGGCATTTCTTTCTTACCTTCTGTTTGAGTCACAATAGCAAATTATTATTTGTCTTTGAGGGGAAAAGTTTTAAGGGAAAA
TATGTGTTTTATTAACTCTGACTTTGGGGGAGAATCCCTGGAAGTCTGATTTTGTCTGTCTTGATTCTCTGTTTACTCTCTAGTAAACTGGACT
TGGGGAAATGTTATTCATTTAAACCCTGCCTGAGCCCACTGTGCACAGCCTTCACTCCCACACCCACCCTTTCCTGTTGTTCACCTCGCTTTTT
ATTTGAAAGAGTATCATTACTCTTTAATCTTTTTCTTTTTTCCAAAATAAGAGACCTTTTTCAGATTCTGAGTAAAGATGTGTGTTTAGCCATG
TAGCTGAAGTTTCTATTTGTTTTTAGAAAATCTGAGTTGCTCTTAGAAATTATTTTTCTAACTAAAGGGAATCTTTTTGCTGTAGCCTTATTTA
TTTATAAAATATGGTAAGGATTGTGAAACCATTTCCCGAGGGCATAATTGCAAGCAGGATTCTTCCTCTCTAAAAGAAGTTTTAATTTGCCACT
GTGACTCAGAACTTTAAGACAAGAAAAAAGTGCTACACCCACACCACAGATAATTTGCAAATAAGTGCCTGTGTCTCCATTTCCTCATAATCTC
TCAAGCATTCTCTTTGATTAATTATTAAATTCTCAAAAAATTAACTACTTATGCACTAACCCCCCTTCTTAACTGCAAAATTTAACATACTTTT
CCTGTTTAACCTACTTTGCCATGTTTTAATATTCTTGTCTTTCCTTATGACCATAGCTATTATTCAGATCCCAGTTGTACAGTATTGTAAATGA
TCCATGTGACAAGCAATGTGAAGAAGTGGAAACTGTTTAAATTAAAAGGCAGAAAACTTAGGTCCTAGTTTTTATATGTAGTTACTTAAATGAC
ATTGAATTTCATTTCTATAAAGTGGGAATAAAAGTTGCTGTCTTCGATTCATATGGTTGTGAGAATTAAGTGAAATATCTGTAAGAATAGTTTA
AAAGCTGTTAATGCTATACAGATGTAAAATATTGTCTGTTTACCACCAGTCAGTCTGGTCGCTATTTCCCTAATATTCCTTTACCAAAAGGCAG
ATATGAAAGTTTTAAAGTACCAGTTTTTCTTTTAATAGTTTTAACAAAACCCATGATAGGAAAAGGCTTTGAAAATTTAAACTGAAATTTTATG
AACCATTACATTTTATAAAACTCATAAATTTTGTGAATTTTATGTAAATTTGCTAAACAATTTAAGAGTTCCAGCTCTCAAAAGGTAAAAATCT
ATATAGAATATAGAATTCTTGTAGATGGTACTAAAGATTAATACAGAGACACAAGACTTTATTTGATGGTGTGTGTGTGTATATATATGTGTGT
GTATATATATATGCATATGTGTATATATGCATATGTGTCTATATATATGCATATATATGTATATATATACACACACATTACATACACATGGGTA
TGCATATTTATAGATATACATATATATGCATATATGCATGTATATATACACATTTGAGAGATATATATCTCATCTATGAAACATGAAAATTGGG
GAAGCAACAGTTACCCAGATATAATATAGTCATTTAAAAATTTTGTACAAGTTATTTTCATGACTGTGAGTTATTAAACTTTACAACTCTTTTG
TCTTAAATGATACTTACTTAATAAGATTTGCTCACTATTTAAAACACATTTTAGAAGCAAAAGTACTTTCTCGGGTGGAAGAGACATATAACAC
TTTTGGGTTAATATGGTACCATTGAAAATGTTCTTGTCCCACTGCTGATAAGGGAATACTAAATTATGAGTCTAGAAAAGATAGAAAATCATCC
CATGGTTCATACAAATCCTACTTTGTTAATAAATTTGTTCACTTCCATAAACTTTATAAAATTTTACAAAAATACCATGAAACATAAGAGCAAT
TAATAGGGAAATAGGTGAAAGCTATGAAACAGATTGCGTTCAACAGGAACTCAGTCTGATAATTACTATTAGTAATTATACCAGTGTATCCTAA
GCACAGTACTAAGTACTTAATGTCATTTAACTTTCAAAGTAGCATTATGAGGTAAATAGCATCACCTGCATTTTACAAATAAGGCAAATGAAAT
TCAGAGGTTAAATGTCTTCTCCAGAGTCACAGAACTACTAAGTAGTGGAGCCTTGATTCCAAAAGAGATCTGTCTGATTCTAAAACTCCTAACC
ACAGTGCCTTTACTACCTTTCACCATTCTGTACTATTAGTCATTAAAAAAAATAGATTAGGAGTATCACTTAAGTAACATCTGAGTGTAAGGAA
GAGAAGCCTGCTCAGATTTGCTCAAAGAAAATGGGAGAGGCCATTGGAAAGCTCCTAAAGAGTTTCTTCGAATGTCATCATAGGAACTTTACAT
TGCCAGTGTGAGCTAGAAACTTCTCAGGCATTTGCAGAGGAGATCCATCTTAAGTGGAGGCTAGATTCTTAGAACAACAGACATTAAAATTTGC
CTAAGTTCATCTGTAAAATGAGTATACAAAATGAAAAGTTAAAAATTTTTGCGTAAGTTACAATTATTTTTGAAAAGAGTTTAGTTTCTTATAA
AATACACTAAGGTATTTGGGTGCTTTCTTTGTTTTTGGTTGACTACCGCATAAAATAATTGGCTTGCATTCTGCCCCATGGTAAATGAAAACTA
TATACTGTATCTTTAAACTGTAGACCTCCCCCCTGCCCTGACTCAGTACAGCAATAGATACTGCAAGTGGCACATGGAAACTGAGACCCACTAA
TCATTTCTTATATTCCTATGTTCACTGTGCTTATTGAGCATAAGTTCTCACTGTTTAAATATTGTTTTTTTTCTTTCCCTTTCATGAAGTGAAT
AATGTTTTCTCTCAGTCTTTCCCTCTCATTTTAATAACTATTTGCTTTGCAAAATATAAAGGAAACAAAAAAACACCATTTTGAGATGCCATTG
TATTCTTTTTGTATGTATGATGAGACATGTCTCTTCCTCTGCTTCTCTGTAAATCTACTCCAGTCTCTTTTTGAGACCTAAAAGACGCCACACC
AATTTTTGAGTCCATGTGACCATACAGCTTCCTCACCTCCAACATCTCACTCAGTTTTCTGCCACAATCTAGAGAGAAAGTTTCGCTAAACTTG
GGTCAGATGTCTACTTCAATCTAATTTGATATCGTTGGAGGAAAATTCACTGTAAGCCAGTCCACTTTAGCGCTTTGAGTAGGCATGTTCCCTA
AGGAAGGGGTTTGAGTAGAGGAAATGAATGGCATTGCTACCTCAGAGGGAGAGATGCTTCTTTCCTAGTTCTACCACTAATTAGCATTTGTGCC
CCAAATAATCGCAAGCCTGTTACCTGAGGATCTTCATCTATCAAATGATAATGTCAGCGCAAAGGGTTCCCTTAGTTGTGAAGTTCTAGGGAAA
TAACATGCAGAAATGTAATTTAGCTTTCCAGTGGAAGGATCCCAGTAGTATTAAGATGGGCTTTATCCCAAAACAGTTGAAAAATTCTTTAGAA
CTATAACCTCTTACCTTGAATTGTCTCCCAGAGATAATTTTTTATTATTGCTGATACTGTTATACTTGTCAATAATGTTAATAGTTCTTTTCAG
TTTCATCTTCAGTAGTTCAAAATATTGTTAGTAACATTTCATGAGTGTATTTTTCTACTTTTTTTTTGTATTTAGATTTTGGCTTGATTCTACC
TTTTGTAATTTTTCCTTCTGGGCTGAACCATTTTTTTCCTCAACCTATTCTAATCTGCTTTCAGACTCTGCAGTGGGTCAGAGAGAGAGCAGAA
ATGGTTCTTTTTACCAATGACATTGTGTCAATAAGTCTAGTGGACATTTTTCAGTCCTCATCTTACTTGATCTTTGAGCAGCTTTTGATACTGG
TGACCACTCCCTCCATTTTGAAGCATTCTTTTCCTTAGTTTCTGATCCTGTTTATGGTCCTAGTTATCATCTATTTCATTTGGTATTCTTTCTC
AATATTCTTTGCCACATATGTGAAGTTAATATGGGTTGTGCTCGTGCCTTCTATAAATCCTCTTTTGGCTTCAGTGAACTACAGCCGTGCTATT
AGTTATTAGGTCCTGTAACTCACCAGGAACATTAGGTATTTATCCTTTCTTTATTTCTTACGCACAGTGATAAAAAGCATACTTTACATATGGT
TGATTAACCAGGCCGGCTATCGTCGCCCACTGTAGTCCCAGCACTTTGAAAGGTTGAGGCAGACAGATTGCTTGAGCCCAGAAGTTTGAGACCA
GCTTGGGCAACATAGCAAGACCCCATCTTTATAGGGGGGGGAAAAAGAGTGATTAAACCAAATCTCCCATATGGAGAATTTGCTGCTCTCATTA
ATTAAGGAGTTTGTCTCACACAACTTGTCCAAGCAGTAAATCCAGATGTGCTATCAACCATGTCCTATATCATCCAATTACTTAGTTAATAGGT
CTTTACCAACAAGCATATCTTGAATTTCTGGATCATGCCATAAGTTATTGATTGTTTTATAGGTGTTTTTTTTTTAAAGACCTCTGCCTTACCT
GTTTAAAAAGACATTTAAAAAGAAATGCAATGATTATAGCTAATAATAAATACATGAGGATTTTTAAAACATGCCCTATTCAAGACATAACAAA
TGTAAAAACATAATTCATTATTGCAGGTTGATTTTTTTTAACTTCATTTTAAATTTTTATGTGAATTAATAATGAGCCATTCTAGATCATATTA
AATACTTCTTTAAGGAGAAAACAACACCTTCATAAAGAACTGCCATTAATATAAGAGATATTAAATAAAATTTGTATTTTGCTTTTTCATCTGA
TGGGCGATTGTGTCCAAAATCATTTATAGAGGTAATTTCTACGTATTAAAACATCCATCACAAACTCCGAAGTTGGGATATTTTTCACCTCATC
TACAGGCATACCTTCTTTCATTGTACTTCACTGTGTCGTGCTTCACAGATACTGCATTTTTTACAAATTGCAGGTTTGTGACAACCCTGTGTCA
AGCAAATCTATCTGCCTCATTTTTCCGACATCATATGCTCACCTCATTTCTCTATGACAGCCTTTTTTAGCAATAACATATTTTTAAATTAAAA
TATGTATATTGTTATTTAAGACATATTGCACACTTAATAGACTGCAATATACTATAAATGTAACTTATATACACTAGAAAACCAAAAAATTTTT
GTGACTTTCTGTTTAGATATTTGCTTTATTGAAGTGGTCTGGACCCTTAGACAGTATTTCCAAGGTATGCCTGTAAAAACATTTTTTACCAGTT
GAAACATACTGAGTTATTTTATATGGAAATGGTTGTTAAAATTTAGTGTTTTGTGATAAAAACAAAATAAAGTTTAGACTTCAGAGGATTTTAA
GTGCATGTATTATCTTTTGCTCAAATACCTCTATATTAGTCCATTTTTGTGTTGCTATAAAGGAACATCTAAGGCTGAGTAATTTATAAAGGAA
AGAGGTTTATTTTGGCTTACAGTTCTTCTGCAGGCTGTACAGGAAGTATGGTGCTGGCATCTGCTTCTGGTGAGTGCTTCAGGAAGCTTACAAT
CATGGTGGAAGGTAAACGGGGAGCAGGCATATTACATCATGAGAGAGGGAGCAACAGACAGAAGGCAGAAGTCCCAGACTCTTAAACAACTAGA
TCTCACATGAACTAACTAAGCAAGACGCACTTATCACCAAGGGGGTGGCACTCAGCCATTCATGAGGGATCTACCCCCATGATCTGACACCTCC
CACTAGGCCCCACCTCCAACACTGGGGATCACATTTCATCATGAGATTTGGAGGGACAAACATTCAAGCCATATCAACCTCTGTTCATCTTATT
TTCCCAAACTGTATGCAGAAATTTACACAGTATCTTCTATATGGTACCAAGAATGTATGTAATACACAATTCAAATAATCACAGATATTTTTGT
GTGAAATTTTTGTAAAATTAATTGAAATAAAGTTAGCGTATAAAATACTAAATCTTCAAATAGTACCTCTATTAGCCCATTTTCACGCTGCTGA
TAAAGACATATCCAAGACTGGAAAGAAAAAGAGGTTTAATTGGACTTATAGTTCCACATGACTGGGGAGGCGTCAGAATCATGGCAGGAGGTGA
AAGGCACTTCTTACATGCCAGTGGCAAAAGAAAATGAGAGAGAAGCAAAAGCGGAAACCCCTGATAAACCCATCAGATCTTGTGAGACTTATTC
ACTATTACGAGAATAGCACAGCAAAGACTGGCCCCCATGATTCAATCACCTCCCCCCGGGTTCCTCCCACAACACATGGGAATTCTGGGAGATA
CAATTCAAGTTGACATTTGGTGGGGACACAGCCAAACCATATCAGTACGAGAGTAGTGTAAGTTCCTCAGAATGCCCCTTAATATAACATAATG
TGATATTATAACTGCATGTATCAGCCTAACATAGTCAGTGCTATGGAAGTCATATAGAGCAATACCTTCCAAGAATTTGGTTTATTTTTTATTA
AAGACGTATAATACACTGCAAGGTATCTGATCTTCCAACATTTTCTGACATACATGAAAAGTATACTGTCATTGAGCTTCCTTTAGGAGATTGA
ATAATAAGAATGCAGTTGTAGACCAAATCACATTACATGTTTATTATCAAACATAGTACCTTGTTAGATTCTTTTTTTTTTTTTTTTTTGAGAT
GGAGTTCTGCTGGAGTGCAATGGTGTGATCTCAGTTCACCACAACCTCTGCCTCCTGGGTTCAAGTGATTCTCCTGCCTCAGCCTCCCGAATAG
CTGGGATTACAGGCATGCGCTGCCACACCCGGCTAATTTTGTATTTTTAGTAGAGACGGGGTTTCTCCGTGTTCGTCAGGCTGGTCTCAAACTG
CTGACCTCAGGTGATCTGCCTGCCTTGGCCTCCCAAAGTGCTGGGATTACAGGCATGAGCCACTGCGCCCAGCCTCCTTGTTGGATTCTTAATG
TTACTTCTTCGTAGGTTCTTTATTTTTCTTATTTGTCCCTAGGAGTTCTTGAATCTGTGGCTTGTCTTCTATCAGTTTTGGAAAATTCCAGGCA
ATTATCTTATCTCCTTTTTTTTTCTGCCCTGTTCTTTTTTTCTCTTCTCTGCTGTGACTCCACTTACATCAATAATAGGCCATTTCACCATGTC
TCATATGTCTCCTATCCTTTTTCCCTCTCTGTGCTTCATTGTGGATATTTTCTACTGACCTGTCTCCCATTTCACCAGTCCTCTTTTCAGCTGT
GGCTACTCTGCTACTAAATACATTTTCATTTTGGTTTATTGCTTAGTTCTAACTTTTTTATTTCATTCATTTTATAGTTTCCAGGTATCTGCTG
GATTTTTCATTTTGTTTTATGTCTTTTAAAAAATAGCTATTTTAGGCTGGATGCAGTGGCTCACACCTGTAATCCCAGCACTTTGGGAGGCCAA
GGCGGGAAAATTACTTGAGGTCAGAAGTTCAAGACCAGCCTGGCCAACATGGTGAAACCGTGTCTCTACTAAAAATACAAAAATTAGCCGGGCG
TGGTGGCACATCCCTCTACTCCCAGCTACTCGGGAGGCTGAGGCAGGAGAATCGCTTGAACCCGGGAGGCAGAGGTTGCAGTGAGCTGAGATCA
CGCCACTGCACTCTGGCCTGCGTGACAGAGCTAGACTCTGTCTCAAAGAAAAAAAAAGCAATTTTAAATTCTGTCAATTCCAATATCTGCGTCT
CTTGTAAGTCCACTGCTTTCCTCATTTTTTCTCTTGGTTTTTGATCTTCTGGCATATTCTGTAATTTTTAATCCAATGCTGGAGAATAAAATAT
AAAATATATTGGAGATAATTTGAGGGCCTGAATGGTATATTTCCTCTAGAGAAGAAGTATGATTCCCTGCCAGCAACTGCTGTTTCTATCTTGT
TGGCCAGAACTACATCATATGGCTATCCCTGATCTCAAGGGAGGCTACAGAATGTCAGTTTGCTGGGCTCATAACTGCCCCATCAAAAAACAAA
ACACACACACACACACACACACACACACACAAACTTGTTTTGCTGCAATTCAAATCTATTAAATGATTACAGATATAAGTAAAACTGAACTTTT
GTGTGAAAAGAGACTAAAAACTATTCTAAAATGTTCACTGATTTGAGTTTCTAAAACTGAAAAGCAGTTTTAAATAATTTAAAACTTTATTTTT
CTTTACTAAGAACAACACAGTAGTAGTAAAAACTTTCAAAATTAAATTGCTAGTATATACTTTTAAAATCTGAAAATTAAATTGGTAGTATGAA
CTTTTAAAATCTAGAGCAAAAAAGCAAAGAAAATCTTCTGAAATTTCACCAACCAAAGGTGTCTTCTATCAACATTTTGGTAGATGATCTTGTA
ATTTTATACATATATGTTTTTTATTTTTATAAGTTAACATTATAGTATGTACCCTATTTTGTGATTTATTTCTTTTGCTAAGGATAGTATGTAT
TTCCTTGTTAAAGTATATAATGAGTTAGTGTTTTACAGTTTAGAAATTATAATTTCCTTAATTTAACTCATAATGCCTTTTAATTTAGTGTTCC
ACCCTAACAGTATGTGTTTTGTGTCTGCCTGTTCTGTCCTCACACTTTTCTTGACCTGGTTAATATATAATTGTGTTATTGTTGATTAATACCT
AAGGAATGTTTTATTTACCAGTCAGTGGGAGTAATGAACATATTAGGTAGGCTCTGACTCAATAATAATGATTTCTGGCAGAATCTCATTAAAT
ATCCTTTTGACTTGCTATAATACTATGATTTTAGTTGTAAACAAAATGATTATCTTTTTCTACTCTATTGTCATAGTTTTTATTTCTTAGAACT
GGAATAGATCCCAGACATTTCCTGAGAGACAGTTGTGTTAGCATACGATTTCTGTAATAAAATGTATATATGTTAAAATTGTAAAACTGCAAAT
TTTTCTGCCGTTGGCTTGGCTCCCTTGCTAGCCAAGTAATACATACATGCTGTCACAACAGAAAATATGATTTCAAAATTCTAGTTGAGTAATA
TTACAAATTACAGATCATGGACCTTCAAGATCACCCTTGAATAGTAGACATTGTAAATACTAAATGCAGGAATAATGAAAGACCTAGTTTACAA
ATTATATATGATTTTATGAATATTTGTGCCTAGATTTTTAGTGGAAGATTTCCTTAATTTAGTTCCACCTCCACGTAACTGCTATTAATTTTTC
TACCACAGATGTGTTTGCTCCTTTAGACCTTAGCTTTCTCAGGCACACTTCTGTTTTAAGATCCATCAGTATTTTTTGCTCATCTCTTACTATT
CATCTAACCCTGAGCTTTCTACCTGGTGGACCTCAGATTCATTCTTGTATAAGTCCCCTTAAAATAGTGAGGGTGTTTCAGCTTAGGTTTCTGT
GAAAGAATTTTTGAAAAGGGTTGTTCTAAACAGCAACAGTGACTACATAATGAACTTTCCTACCTCTAATGAAATCACTCACGTCATCAGTCCC
TAGACATCACTCCCCTGAAATCTCCACATGGCAATGTGAGAATTTGTCTTGTCAGCTGGAGGGACGTAATCCAGTACTGTTTCTTAACCAGTTT
AGAATTGTTAGCGCAGAATTGCTCATCACCAGCGGCAGGTTAGAAATATCAAGCTCTACATTATATTGTTCCTAAGCCTTTATTTCTTGAGAAG
TTGATTGTTTGAATTCTTTTGAACTTACACTACTTAATTTTTAAAAATTCGTCTATTAATATCTCTTTAAGAAAGTACTCCTTTATTTTCAGTG
TCCCATCTTTCCATCAAGACTCTTGGCCATATGTTATCTTTTGTTTATTGTCTTCCCAACTAGATTGTACGCTGCTTGTAAGCAGTGACTTACA
TCTTTAACATCTATGGATTCCTACCCACTCCCACAGTGCCTTCTGAAACATAGTAGACATTCCATAAATCTTTATTGTTTGATCAAAGTAAGTA
GTCACAAATTGAGTTTTATTGCCTGTAACTTAGTTTTTAGTTGTTTTAGAATTGTATGATTTCTCTGTCTTTTAATCAGACTGCTTCTGTCCTT
AATGCTGGTTTATCTTCTGGAAAAAGCATCCTACATTTTATAATTTGGTTTTATCTCAAAATTTCCTTAAATTTACGTATTGTCTTTCCTTTTA
GTCTGTGATAATTAGATATATAAATATTTATTGAATTGGACATAAAATTCTTAAATTTGAATACCATGTTTGACATAAGTATTTGTTTCATATC
TTTCAGAACTTTGATCTCTGGTTTTGGTTATTATTCATTTAACAAGTACTTAGTGTAGGCAAAGCCATGTGCTAGTGGTCAGTGGATAAATACT
GTGGTGATTTGAAAAGGCACATACCTTTAATATTTTGTCAGTAAAATAGACTACTCAGTTTGTAATCTTTTTGTCATTATAGCGTAAAGTTCAC
CTTGAATTAAAACTGAATGAACTGATAACGGAGAATGGAACTGTATGCCAGCAGCTTGTTGTACAGTAAGCATTTTTTTTAACCAAAATCAACT
AGAAATAATTCTCCATTTTGTATTCTTTCGATTTTAAGCCAACTCCTTGTTTTAACTTCAGAAACTTTTTTCAAAAATGAAATTCTGCTATGTC
ATTCCTTTTGTGAAGTTGATTTTCAATTTAATTTTCTCATAGTCTACTCACGTTATGGTGAGTCATTAATTTATTCAACTAATATTTATTGAAT
ATGGGTTAAATGATATATATGGGCATTAAGGATAAGGGTGTCTAACTCTCTGGCAGTGGAGAATTGGAAAGGCTTCCCAAAGAAGGTCCTCTAG
AAATTGTCATACCACAGAGCAGAGGTTTAGAGACTTTGCAGCTAGAACTAATGCCCACTCAGAGATGACCAGTATTGATTCCCACCTACTTTGA
ATTCCTTTTTACCTCTTCCACCCTCAAGTCATTTTTTACCACCCAGACTCTAATCTCCTGGCTGTTCTGGAAATCTGTTGTAGCCCAATCCCCT
ACTCTTTTCCTCCCCTCCAAACCCTTACTCTGTGATATCAATAGACTCCCAGATAACCTTCACTTCTTCTGGGTGTTTTCCTCTATTTTTGCAT
TAGTTGACATCTGAATATCCCACAAAGTACAGCAGTTTCACAGCCTTCTCAGTTAGAGGCTTTGTTTTTCTATCATGTCCACATATTGTAAGGT
CAGGGAGTAGAGTAGATATTACTCTCCTATTGCTGCTCCAGACTGTAACTTATTCTCATCAATTGTGAACCCCAGCTCCTTTGAGGTATTCTAT
CTGTATATAAATATGTCTGTTTGCTACTATATATAATATTTATTTCATTAATTTTTTCTGACCTCTTTGAAAGAAGATTGCATATGTATGACTC
TTAATATATCAGTATGTATTTCCTAAGAATAAGGAATATTATCTTAAATAACTCCAGTACAGTTACCAAATTCAGGAAGTTTAACATTGTTACA
ATACTTTTTAAAAATCTATAGTTATTTTCTAATATTTTAATCTGCAGTTATTATATTCCACTTTTGTTAACTGTCCCAATGATGTCTATTAAGG
CGTTTTTTTCCTTCTAAGAAAGGATCTGCTCCAAGATTATGTTTTATGTTTAGTTGACATGTCTCTTTAATCTCCTTTAACATGGAATAGTTTT
TTGCTTTTCTTTGATTGTATTAACATTTTTTAAGAATATAAACCAGTTTTTTTTTTTTTAATGTTTCTCAATTTGGATTTACCTACTAAAAATA
GTTCAAGATCTGTTTGCAGCTTTTTCTCCACAGACTGACTCTGTAGACCAACTGAGAGCATATGGTGAAAGTATCTGGATTAGGTCTTCCACTC
CTCCCTCCCCTGCTTCAGTTTAATTATAATAGTCATTTGAAATATAGTTAGTTTGGTTGGTTTCGTTTGTTTGCATTCAATTTAAGGGTTTTTT
TGTGCCCCTTCCCCCCAATTTAAGTTTTTTCCCCCATCCTTCTAGGCTTAATTTTATTTTTCAATAGAATATTTGCATGATTTCAAAAATCAAA
ACTATAACAAAAGGCGTTACTCAGAGATGTGTGTAGTTCAGTTCCGTCTCCCCACACCCAGCTCCAAGCAACCATGATCTGATTTCTGTCCCTA
CAGTTTTTGCCTTTTCCAAAGTGTTATTTGAACAAAACTATATGATATGTCTTTTTTGTGTCTGCTGTCTTTCACTTAGCATAATGCTTTTGAG
ATTCATCCACACTGTACGTATATCATTTCCTTTTTGGTGTCTTATTTGTTTCTTGCCATAATTTGGTAGATACTGTTATCCTCATTTTGCAGAT
GACAAAACTGATGCCCATATTGGTTAAATAAGCCTAATTTCACACAGGAAGTGTTCGACGCTGGCAGTTTGATTTTTTTCCCCCAACTTTAAAA
TTTTGAAATAATTACAGATTTACAGAAAGTTGTAAGGATAGTACAGAGAGGTCCTGTGTACCCTTCATTCTTTTTCCCTCAGTGGGTACATCTT
GCATGACTATAGCACAATACCAAAACCAGGAAATTTACATTGGCATAATGTATGTATATAGTTATAGATCATTTTATCATGTGTGTTGATTTGT
GTAACTACCACCACCAAGATACGAAACTCTTCTGTCACCATAAAGATATCTCTCATCCCATAGCTTTATAGTCATAACCACTCCTCTCTTCTAA
CCCTTGGCAACCTCTAATCTGTCTTTATATCTATAATTTTGTCATTTCAAGAATGTTATGTGAATGGAATCTTATAATATGTGACCTTTTGAGA
TTGGCTTTTTTTACTCAGATCTATCTGAATGACTCTGTGTAGTTTTTTGTAGACAGAATATACTTGGGTCACTTTTTTAAAAAAATCATTTTTG
CCAATCTCTGTCTTTTTTTGGTGAGTTTTTTCCATTTATTTTTAATGTAATTATTGAATATTAGGCTTAAATATGCCATTTTTTGTTTGTTTTC
TGTTTGTCTCCTATTTTATAGTTTTCTGTTTTCTTTTTCCTGTGGGTTACTTGAACACTTTTTAGAATTCCATTTTGATTTATTTATATTGTGT
TTTTAAAAAATCTATGGTCTCTTTGTATAGATTTTTTTTTAGTGGTTGCTCTAGGTATTACATTATACATGCATAACTAATCATAATGTACTGA
TGTCAACATTTTACCAATTAGAATAAAATGTATGTACTTTACCTTTCTTTAAATCCCTTTACCCTCCCCCATTTGTAATATACTTTGTCTTAAA
TATTTTGTCTACATATATTGAGAACCACATCAAACAATGTTATAATTTTTGCTTCAGCCATCTAACACAGTTGAAAAGAGTTAGAGGAAAAGGA
AAGTGTAAGTCTGTTGTCTCTACCCACATTTTTGCCCTTTCCATGTTATTTTTTTCCTTTCTGATGTTTCACGATTCCTTCTGTGATTAAGTGT
ATAGAGTTTCCTCTTAACATTCTTTTAGAGTAAGTCTCTTGGTGATACATTCTCTTGGTTTTCCTTCATCTCAGAAGGTCTTGATTTCCTCTTC
ATTTGTAAAAGATAATTATACTAGATATAGAATTCTGAGTGCACAGTTCTTTTCTTTCCACATTTGAAAATGTACCACTTCCTTGTGTCCTCGA
TGGTTTCTCATGTGAAGTTCATTGTCATTCAAATTGTTTTTCCCTATAGGTAACACACCGTTTTTCTCTGGCTTCTTTTAAGGTTGTTCTTTGC
CTTTAGATTTCTTTTCTTTTTTCTTTCTTTCTTTCTTTTTTCTTTTTTTTTTTTTTTTTGATATGGAGTCTAGTTCTGTCACTCACGCTGGAGT
GCATTGGTGTGATCTCAGCTCACTGCAACCTCTGCCTCCCGGATTCAAGCGATTTTCATGCCTCAGCCTCCTAAGTAGCTGGAATTACAGGCAT
GCACCACCATGCCCACCTAATTTTTACATTTTTAGTAGAAACAGGGTTTCGCCATATTGGCCAGGCTGCTCTCGAACTCCTGGCCTGAAGTGAT
CCTTCTGCCTTGGCCTCCCAAAGTCCTGGGGTTATAGGTGTAAGCCACCACGCCCACCCTGCCTTTAGATTTCTATATGTTTTAGCTTGATTGT
CATGTATCCTGGAATAGATTTATTTAATTTATCCTGTTTGGGGTTCGCTCAGCTTCTTGACTATGTATATTTATGTCTTTTGCCACATTTGGGG
AATTTTCAACCATTATTTCTTCTATTAATTCTTTATCACCTCTGCTATCTTTCTCTTCTTCTTTCAGAACGCCAGTGGCACAAATGTTAGGTCT
TTTTTTTACAGTCCCAGAGGTCCCCCTGACGCTTTGTCCTTTGCTTTTCCCCCCAGTCTATTTTCCCTCTGTTGTTCAAATTGGGTGATTTCTA
TTGTTATGTCTTCAAGTTCACTGATTCTTTCCTCTGTCTTCTTCATTCTTCTGTTTACCTTATCTGTTGAGTTTTTTATTTTCGTTATTTATAT
TTTTAAGTTCTAAAATTTATATTTGATTCTTCTTTATAACTTTTTTCCTTTGGTGAGAGTTTCTTTTGCAGAGACTTTCTTGTTTTTTTGTTTC
AAACATATTCATAATTGTTCATTGCATTATTCACAATAGCAAAGACATGGAATCAACTTAAATGGCCATCAATCCCAGACTGGATAAAGAAAAT
GCAGTACATACATGCCATGGAATACTAGCCGTAAAAAAGAAAGAGATCATATCCTTTGCAGGAACATACGCGGAGCTCAACGCCATTATCCTTA
GCAGACTAACGCAGAAACAGAAAATGAAACCAAATACTGCACGTGCTCACTTATAGTGGGAGCTAAATGATCACAATGCATGGACACATAGAGA
AGAACAACAGACGTTAGGGCCTACCAGAGGGTGGAGAGTAGGAGGAGGGAGAGGATCAGGAACAATAACTAATGGGTGCTAGCCTTAATACCTA
AGTGACAAAATAATCTGTACAACAAACCCTTGTGACACAAGTTTGCCTATATAACAGACCTGCACATGTACCCCTGAACTTAAGTTAAAAAAAA
ATTGCTCATTGAATTATTTTTATGATGGCTGCTTTCAGATCCATGTCACATAATCATAACAATCATGTCATCTTGGTGTTAGTGTCTTGTGTTA
GTCCATTCTCACATTGCTATAAAGAAATACCTGAGACTGGGTAATTTATAAAGAAGTTTAATTCACTCATGGTTCTGCAGGCTGTACAGGAAGC
ATGGCAGCATCTGCTTCTGGGGAGGCCTCAGGAAGCTTCCAATCATAACAAACACCAAGCGGGAGCAGGTGTCCTACATGGCAGGAGCAGGAAC
AGGAGAGAGAGTGGGGAGGTACTACATACTTTTTTTTTTTTTTTTTTTTTTGAGATGGAGTCTCACTCTGTCCACCACCCTCGGGTGCAGTGAC
ATGACCTCCACCTCCTGCGTTCAAGTGATTCTCCTGCCTCAGCCTCCGAGTAGCTGGCATTACAGGTCTGCACCACCAGACCTGGCTAATTTTT
GTATTTTTAGTAGAGTTGGGGTTTCATCATGTTGGTCAGGCTCGTCTCCAACTCTTGACCTCGTGATGTGCCCACCTCAGCCTCCCAAAGTGCT
GGGATTACAGGCATGAGCCACCAAGCCTGGCCCTCTTTTAGTTATTTTTAAATGTATAATAAATTATTGTTGTCTGTAGTCACCTTCTTATGCT
GTTAAATACGAGATCTTATCCATTATATCTAACTATATTTTTGTACCCTCACTTCCCGTCCCAGCCCCTGGAAAACTTTGTTCTACTCTCTGTT
ATCATGAGTTCAATTGTTTGAGTTTTTAGCTCCCACAAGTGAGACCATACGAGGTTTGTCTTTCTGTGCCTGGTTTATTTCACTTAACGTAATG
ATCTCCAGTTCCATCCCTGTTATTTTGAATGACAGGACCTGATTCTTTTTTGTGACTGAAAAGTACTCCATTATGTATATATACCACATTTTCT
TTATCAGTTCGCCTGTTGATGGACACTTAGATTGCTTCCAATTCTTGACTATTGTGAATAGTGCCACAGTAACCATGACAGCGCAGATACCTCT
TCAATATACTGATTCCCTTTCTTTAGTGGGATTGCTGGATCATGTGGTAGCTCTATTTTTAGTTTTTTCACCAACCTCCAAACTGTTCTCCATA
GTGGTTTTATTAATTTACATTGCCACCAGCAGTGTACAAGGGTTCCCTTTTCTCCATATCCTCACCAATATTTGTTACGCATGTCTTTTGGATA
AAAGCCATTTTAACTGGAGAAAAATTATAATTTCATTGTAGTTTTGATTTACACTTCTCTGATGATCAGTGATGTTGAGCACCTTTTCATAAAT
TTGTTTGCCATTTGTATGTCTTCTTTTGAGAAATATTTATTCAGATCTTTTGCTCATTTTTAAATCAGATTATTATATTCTTTTCCCGTAGAGT
TGTTTGACCTCCTTACATATTCTGGTTATTAATCCGTTCTCAGATGGTTAGTTAGCAAATATTCTCCCATTCTGTGGGTTGTCTCTTCACTTTG
TTGATCCTTCCTTTGTTGTGTAGAAGCTTTTTAACTTGGTGTGATCCCATTTGTCTATTTTCGCTTTGGTTGCCTGTGCTTCTGTGCTTGTGGC
AACCATTATGCAAGAAATCTTTGTCTAGTCCAATGTCCTGGAGAGTTTCCCAATGTTTTCTTGTAGTAATTTCATAGTCTGTGGTCTAGATTTA
AGCCTTTAATCCATTTTTATTTGATTTTTTTAATATGGTGAGAGATACCGGTTTAGTTTCATTCTTCTGCATATCCATATCTATTTTTCCCAGC
ACCATTTATTGAAGAAACTGTCCTTTCCCCAGTCTATGTTCTTGGCACCTTTATTAAAAATGAGTTCACTGTAGATGTACGGATTTGTTTCTAG
GTTCTCTGTAATGATCTGTTGGTCTATGTGTCTCTTTTTATGCCAGTACAATGCTGTTTTGATTATTATAGCTCTGTAGTATAATTTGAAATCA
GATAATTGTGATTCTTCCAGTTTTGTTCTTTTTGCTCAGGATAGCTTTGGTTATTCTGGGTCTTTTGTGGTTTCATATAAATTTTGGGATTTTT
TTTTTCTATTTCTGTGAAGAATGACATTGGTATTTCAGTAGGGATTGCATTGAATCTGTAGATTGCTTTAGGTAGTATGGACATTTTAACAACA
TTGATTCTTCCAGTCCATGAACTTGGAATATCTTTCCATTTTTGAGTGTCCTCTTCAATTTCCTGCATCAGTGTTTTACAGTTTTCATTATAGA
TGTCTTTCACTTCTGTGGTTAATTCCTAGCTATTTTGTTTTATTTGTAGCTATTGTGTAAGCAGTATTACTTTCTTGATTTATTTTTCAAATTG
TTCACTGTTGGCATACAGAAACCCCACTGATTTTTGTTGTGTTAATTTTGAATCCTGCCACTTTACTAAATTTGTTTATCAGTTCTAATAGTTT
TTTGGTGGAGTCTTTAGGTTTTTTCCAAATAAGATCATATCATCTGTGAACAAGGATGATTTTACTTCTTTCTTTCCAGTTTGGATGCCTTTAT
TTCTATCTCTTGTCTGATTGCTCTAGCTAGGACTTGAATAACAGTGGTGAAAGTGGGCATCCTTGTCATGTTCCAGATCTTAGAGAAAAGACTT
TCAGTTGTTCCCCATTCAGTATGATACTAGCTATGGATATGTACTATATGGCTTTTATTGTGTTGAGGTTTGATCCTTCTGTACCTATTTTTTG
AGGGTTTTATTATTATGAAGGACTGTTGAATTTTGTCAAATACTTTTTGGCATCAGTTGAAATGATCATATGGTTCTTGCCCTTCATTCTGTTG
ATATGATGTGTCACACTGATTAATTTGCACATATTGAACCATCCTTGCATCCCTGAGACAAATCCCACTTGGTCATGATGAATGATCTTTTTAA
CGTGTTGTCGAATTGGGTTTGCTCATATTTTGTTGAAGATTTTTGCATCAAGGTTCATCACCGATATTGGCCTATAGTTTTCTTTTTTTGATGT
ATCTCTCTCTGGTTTGGTATCAGGGTAACACTGGCCTCATAGCATGAATTTGGAAGTGTTCCCCTCTCTATTTTTTGGACTAGCTGAGTAGGAT
TGGTATTAGTTCTTCTTGAAATATTTCCTAGAATTCAGCAGTGAAGCCATCAGGTCCCAGCCTTTTCTTTGCTGCAAGACTTTTTACTGTGGCT
TCAATTTCATTACTTGTTATTGGTCTCTTCAGGTTTTGGATTTTTTCATGGTTCAATCTTGCTAGGTTGTATATGTCCAGGAATTTATCCATTT
CTTCTAGGTTTTTCCATTTATTCTTTTTTTCAAAGTTTCTTAAGCTTTTGCTCTCCATACTCACTGTCTTGTAGCAGCAGAGTTCCAGTGGTAG
CTTTATGGAATTTATTGTTGATTTCTCATCCTTATACATATTCTGAAATTCATGACATTCTCTGTTTTTTACTATTGCTAAAGGCATGGTTTCA
CATATGGCTTTCTTTGTGCTTCTTGCTGGACTTTGGTTTTGGGGGAGTAATGTATGGGAAGATTCATATCCTAGTAGTTACTATTATCCTCCAG
ACCTAGAAAGTCCCCACTACAACATTTTTTGAACTTTAGTGAGACCTCCCTGCCATCCATTGATCTTCACTGTGTTCCTGTTTTCACTTCTTTC
TACATCTTTTTCCGTGACCTATTGCTGTAGTCATTTTCTCGCAGGTTCCGTAAACTCCCCTATTGTTCTCATCATTCTTATTTATCTGGAAAAA
CTCTAATTGAAAATGACCTCTTCCTCTGTGTTCAATCTGCACATGAATATAGCTGGAGAAAATCATGTAGGCTGATTTCACTTTAAATTTATCA
TCACAGGCCTCACATGGGCACTTATATCTGCCCTGGAATTTAACTGTGCTTCTCTAATACACCTATAAGATTCTCTACCACCACAGCCTGGAAA
TTGCTTACATCTTCCTGAATCCAAATCTATAAACCTAATTTGCATCCATAATTTTGTCCTTAGAGCACAGGAGGTACTCCTTTTCTTCACATTG
AATTCTTCCATCTGAGCTCTGGATTCCATTTATTTCCTCTACTTAATGAGTTTTGCTCCTTCAGTTATGCCTTCTTTTTCTTGTTTTGTCAGCT
TTACCTTCTCTCCTACATGGTTCTCACCACAAATAAACATGGTCTAGTATCTCTGTCCTAAAACGCATGCCTCCCCAGACCTCATCTCTGCCCA
CCCATACCCCAGTCCTTTTTATCATTCCCATTCCTCTGCTCTCCTTTGAAGGCAGACTTCTCTAGGGAAAAATAGTGGTAGGAGTGTGTATGAG
TGTGTGTGTGCGTGTGTGTGTGTGTGTGTGTGTGTGTGTGTTTGCAATTCTCCAGTCAGCACTCTCCAGTAGATTTTTCTGTGATGTGGAAAAT
GCTTTGTATCTTCACTGTCCAAAACAGTAGCCACTACCCATGTGTGGATATTGAAAACTTGAAATACACCTAATGTGACCAAAGAGCTGAAGTT
TAATTTTATTTAATTTTAATTAAATGTAAAAAACCACACATGGCTAATGACTACAGCATTAGTGCAGCTTCAGTAAAAGAACCTGGACTCCTTT
TTAGCAGTAGCTTATTTCAGGACTTGGGCACGGAAAATATGACATGAGTCTGGAGCATCTTGGGGTCTCAAAAACTAAGAAAGTGCTAAAAAAT
AATGGGGATATGTAAAAAGGACATTGAAGCCAATGTAAAGGGACTTCAAATTACCAAATCTGGAACAATTTGAGCTTCAGAATAAATAATAATA
GTGGATTAAAACTTATAGAATAAAATAAATATAAGCAAATACTGGTACAAATAAACAATTAAAAACTCAAATACTTGGTAGGGAGAAAGGACTG
ATTTTTCCTATAGTAGAATTCTAGTTAATGAATGTAGGAGGAATGATGCAAATGAAAATCAACATTGGCAAACATCACAATAATAAGTGGGTGA
GGGGACAATTCAAAAAATCATCTATGGATGCTAAGTGAGCATAAGTGTGGTGACAAGATGTCTGATAGATGCCACCTTAATTGAGTGATCAAAG
TTAACATCACCAATAATGAGACATCCAGTACTTCCCAATAGGATGCATTGAGAAGGACACCAAGATACATAACCTCAACCTAATCATGAGTAAA
CATCAGACAAACTCAGATTAAGGAATACACTACAAAATAACTGGCCAATACTGGCAAGATCACGGGGCAAAGAAGGAAAACTAATGAACTGTCT
CAGGATGGAGAGGAATAAGAAGACATGACAACTAAATGCACTATGGGATCCTGTATTGTGTCCTAGATCAAAAAAGGACATTGGTGAAATTTGA
GTAAGGGCTACAGATTTCAGTAATTCTGCTGTGGTTCTACAAAACGTTAACATTTGTTGATGAGTATACAGAAACTATTATTTTAACAGCTTTT
TTGAATATCTGAAATTATTTCAAAATAAGGTTTTTAAAATTGCCTCTACCTTGTGCATTCAACCCAGGTCTGTTTTCTCAGTTTCAGATTAATA
TGTCTACTTTGATGAATCACATTGCAAACTTAACACATTTAAAACTGAAGTACAGGGAGGCTGAGGCAGGAGAATGGCGTAAAACCGGGAGGCG
CAGCTTGCGGGGAGCCGAGATTGCGCCACTGCACTCCAGCCTGGGCGACAGAGTGAGACTCTGTCTCAAAAACTGAAGTACTGATTCTCATGTC
TATCCAACTCCTCCCCCAAAGTCTTAGCAAATCTTTAATTCCGCTCAGTATGTTTTTCATCTCTAGATTTTTCCATTTTTATTGTCTTCTGTGT
CTGGATGGATCATATGGAATATAATTATAACTTTTAAATGTCTTTGTCTGCTACTTCTGTCTTCTTTGTCATTTCTGATTCTGTTTCTATTGAT
TTTTCTTTTCATTATGGATCATAATTTCTTAGTTCCTTGCATTCCTGGTTATTTTCTGTTCCATCCCAGACATTGTGAAGTTGCTGGATATTTT
AATATTTCTATGAATGTACTTGAGCTTTGTTCGGCACTTGGTTAAGTTACTTAGAAACAGTTTGATCCTTTTGTGGTTTACTTTTAACTTTTGT
TAAACAGACAAGCACAGTCTTTACTGGAGCGCTTATCTTTTCCTACTATTAAGGCAGTACCCATGAATTACCAGGTTTTCTACTCTGCCTGATG
GTACCTCTTGCTAGCCATGTGTGGGTTTTACGAACTATTCCCTCTATTCTTTTCAAATGGTTCTTTCCCCAGCCTCAGATGATTTCCTCATATA
TACACGTATCAATACTCAGCTGAATACTCAGTGGGGATTCTTGTAGCTCCCTGGAGGTTTTTCTTTCTCTGTGCAACTTTCTTCCCTTTAGTAC
TCTGCCCTGGGGTCCCTAGTCACTTTGACCTCCTCCTGCTGACAGCTTTGCCTCTTCTTCTCAGAGAAACCATTTAGCTGTAAGCTGGGGCAGT
TGGAGGGCTCACCTGTCCTTCACTGCTGATTTTGTTCAATTCGTTTTGGGTGGAGAGTAAATCTAGTTCCTGTTACTCCATCTTACCTGGATGT
AGAAGTTAAAATTTTCTTTTAGTTTAAAAAAAAATCCAAAGAAAAGAATCAGATCAGTCTTATTCTGAACTGTTTATAATATTTTCTTACCTTT
GTAAATTTTAGATACTATATTGTAAATGCTTTATATGTCACATATAAATAAAATATCAAATTCCTTATTGAGGTTATTTTCAACATTTGTTTTC
TGCCCATCCATGATTTATGATATGAAATTGCTTACTTACAGATTGGAAGAACAGTGCTATGCTAGGTAATTAGAAAAATAATATTTCCAAATAT
ATGTAATGAATAACCTATATTTAATAATATTACTTAAGTTTTGCAGAAAACTCAATTTTTAACTGTTTTATATTTAAAAATTAAGAGTACTGAT
GATTTCTGTAGGGTGCACTTCTGGTTTATGGGCATCCGTGTTTTGGTTTGTGGGTATTCTTATCGTTTCATAAGTTTTTTATAAGTCAGTACTG
CATTTTCCTCTGCTTTTTTTTATACCTCATAAAATAGAAAATTCGATTTCTGTCATTAAGGTTTCTCATAATTGGTGTTTATGTGAGATAAATG
TGGTATTACAACCACACTAATATTGTATTTGGGGGCACAGTCGGAATGTAGAAGGGCACTGGACTTCAGTAACAAAATTAAAAAGTAGAAGTTG
AGTCTTGGCCAGCTTCTTACAAGTTACGCTACCTCTTTGAGCCTTACCTTGTAACTTCCTCACATAACCTGTGAGCCTTACTTCTTTTAAATGG
CATAATTCTCTTCTCAAAGGCAGTTGTGAGAATTACGTGCATTTTGTGAAAGTGCATAGTAAACTGCAAATGCCGTGTCACATATCATTTTGAG
GTTTAGCCTGAGAAGGGTAAGTTTTAAGCAGTATGTACAGTGGGAAAATCTGACTGTACCTCAACCCAACATTAAAACCCAGAATTATCTTGGC
TTGTGTTTTCTTTGGCTAGTTTCAAAATTTCTTTCTTTATTTTTTTATGCTCACCTATAATAGAAATGAGTCGTATTATCATTTCTGTCTTTAC
TCTGCAGTATACCAATAGCACTTCACTCACATCTGTGACCTCTCCGTTGTGGAGAGAAATAAGGATCTACTCAACAGCTTGCATCTTTCAACAA
AGAATACTTTTCAGCAACACTCATGAGTTTCTCTTAGCCATTAGAAAATCCAGACCCTTAGACATTAAACTAAACTCATAAACTCAGTAATATT
TAGTGAGAAAATTGGAGGAACAAATCACTAAAGTTAGATTCTGTGTTCTCTGTAAATGCCAACAACTGTGAGCCATGGAGTAGATTAGATGACC
TTGGTTTTTATGGTCTAAAACATTTTCTACAGAATGGTGCTTACTGAGGAGCTGTTTACTGAGAATTGGAATAAAAGGCTGCAGAATTGTGTGA
AGCTTGCCCTATATTTATGAATCAGATTTTTAAGTGGAAGCTGCAGTTGTTTCCTTGTTTGTCATTCATGCTTTAGCAGACGATATGATGCCAT
AGAGCTGGCTTGGTTTGTAGCTTCTCATTTAGCGTTTGCACCACTTTCTTTTCCTTTTTAGAGGCCACAGCAGTTTTGATGTATTATCAAACCG
CAAAATGTACCTTGTTGGGTATTTACCACAAGGAAATGTGTTGACTATTACACATCCCTTATCTACAGTGCTTGAGACTGTTTTGAATTTCTTA
TTCTTATTTTTTTTTTTGAGTATTTGCATTATATATACTTGCCCATTAAGCATCCCAAATCCAAAAAGCCCAAATTTGAAATGCTGCAGTGAGC
ATTTCCTTGGAGCATCATGTCACTGCTCAGAAAGTTTTGAATTTTGGAGCACTTTGGATTTTTGAATTTGGAATGCTCAGTCTGTGTTTGATAG
TTTCATTAGTGATTGTGGCATTCCTGTTTAGTCTCATTTTGAAAATACAGCATAAATTTAAAAATGCATACATACATATGTCCATACATATTAC
TACCTATTCCATATAGGTAGTATATAGCCATACAACTGCAGACACATGGAAAACAATTCTTAACCTTTTGAATGTATTAGTTTGTGTTTAAAGA
TAATGTTTTATCTTGTTTAACTGGAATCTAATATGTTAAATCTCTTTTATTCTACCTTAGCATCAAGGCATGCCATGGGTTGCCTCTCATAAAT
GGCCAAAGCTGTGACCCTTATGCAACAGTTTCTCTAGTGGGCCCTTCTAGGTAATATTTATTGAATTATTATTACGTTTTAAAGTTTTGATGTT
TGATTTAAAAATTTAAAAAGTAAGATTCTACGAGCAAATGATAAATAGCTATTTATAACACACAGTAATAAATGCTTTGAAAGAAAAATCTTTA
GTGAGTTCTATTATACACTTGTCAATAACAAAGCCCTCTTTTTACAGACAGAAATTGGTACCCCATTTTAAATCTGCCATGCTCTTAGGCTTTA
AGGAACAACTTCAGTTTTATACTAGTACAATGTAGTACTTTAAAACATAAACTTGACTTTTCATGCATCAGCATTCCTACTTTTCAAATATCCT
GAATTTTATGCATGTAAAATCCTGTTTTAATGAATGCCAGTTCAGAATAACAAGACAATTTATATATTTTTATCTGGAAGGCAGCTCAGGACTG
AAAATTGCCTTTTCTACTCATGAAATCTCTCCTCTACAGAGAGAATTCCAACTGTAGAAAAACTGCTGAAGTACTAGAGCATGGCAAAGTGTAC
CATATCATTGATTTAAATCATTTATAATAATTTGTGAAAAAACCTATAGCACTTTGTAATACGGTGTGTTATATGACTTCATTATGATTTCTTT
AAGGAACTGACACATCTGAAATATGTCTACAACTTGAAGGTTTAGAATCAGGAAGCAAGAAACACAGTATTCCCTCTACACACACATACATGCA
TACATACACACCCCTTTTCCCCATCCCCAGAATCTCTAGTTATTCTTACTTTGTAGAAAATCACTACTAAGTCACTTTGAAAAATGTATTTATG
TATGTATGTAAAGTACCTAGTACCATGCCCGTATTTATTAGGTGCTCAAACAATAGTATCCTATTAGCAGATACTCAGTCGTATGACATTAAAT
GCTATTAGAGAGATTTATTTTTGTGTGTTAAAAATGTTCAATCTAGTGGAGCTATTTTTGTTTTTTTTAATAATCTCTACCTGACAAATTATTT
GGTAACATACAGTTAGAGACAATTTGGCATATGAATTTGTGTTTTAAAAAGTCTGGCCAGGCGCAGGTGGCTCACGCCTGTAATCCCAGCACTT
TGGGAGGCCGAGGCGGGTGCATTACCTGACGTCAGGAGTTCGAGATCAGCCTGACCAACAAGGAGAAACCCCGTCTCTACTAAAAATACAGAAT
TAGCTGGGTGTGGTGGCTCATGCCTGTAATCCCAGCTACTCGGGAGGCTGAGGCAGGAGAATCGCTTGAACCCTGAGGCGAAGGTTATGGTGAA
CCGAGATTGTGCCATTGCACTCCATCCAGCCTGGGCAACGACCAAAACTCCATCTCAAAAAACTAAAAAATAAAAAGTCACTGTTGGTTTTGCT
ATTGTACTGTAGTTGTGTAAGATGTTAACACTGGGAGAGGCTGGGTAAAAACACAACATTTCCTTATGCGTTTTTTGTGACCTCCTCTGAATCT
ATAATTAAATTAAAAGATTTTTTTAAGAAGTCTCTATTATACCTGAAGCCCAAGAAGTAAGCTGAGTTAAGAATGTTTTTCAAGTTCCTTGGGT
ATTTTTCAACATACATGAAGGTGCTCTAAATCTTATTGTCTTCCTTCTATTTATTCTGAGTTGCTTATAGAATAGAATGTGTTTTTAAAACCCC
TGAAAAAGGTTGGCAATCTAGTGTGTCCGTAGAGAGAATAATACAATCTTGGCACATAGGGGATGCCTAAAGCTTATATATTCTTTGATTTGAG
TTTATAAGGACAGTTACTTTTTTCCAAGCAATATTTAAAACTGAATCTTCCCTGAGTCACCTTAACTTTTAAATGGAGGTCAGGCTCCCTGGTT
GGAAATAGCATGTTTTATAATTGTGTACTGTTAAGTTCTACAAGGTAAAACTCTACCACATTGGAACAGGAATCACCAAAAGAAGACAAAAGTA
AAGAAGAAAACAAGCAATCCGCAGTTTAATGAAATCTTTTATTTTGAGGTAATTTTTTGTTTTACGTAAATGTTAACATTAAATATGTAATATT
TAATGCTAGTTGATTTCTTTTTTCAAACCACAGTCATAGTAATCATTTTATCAATTAATGCAGATAACCATTTCTCTCCTGAAAGCAGTAGAAC
CATGGTGTGATGCAATGGATGCCCAATATATAAAATGAATAAAGCCACAGCTCTAATTTGGGAGCAGGAACCGCCAGGGCCATACCCACTCCCC
AGTCATCCTCACTATTCATGCCCTTCCTTTGCACCCTCCCTTACCCTACCCAGCTCCCTACCTAACACATAGTGGCCACACGATTCTTCTGCAG
GGTACCCTTTGACAGTCACTAGTGAAGTAAGTCTAATTATCACTCAAGAAATCTGACTTCCAGTCAAGTTGACTGAAAGACTCACTAAATGTGA
CTCAAGTTTCTTATCCTGTGAAAGAATAATCGCAACGGAAACTAGCAGCACTACCTCACTCAGAGTTTTTGTAAGACCCAAAGCATGTGAGAAT
CCTTTGAGACCATAAAATACTTTATGATTACAGCTTTATTATTACTTTTTTTTTTAAGCCTAATTCATTCTGTGGACGCCTGCTTATCTTCATA
GACAGCTTCAGCTCCCTTGAAGTTGTCCCAAATACAGTTTGGACAAAAGCTTTGGAGTGCTTTTCTTTGGAGCATTTGTTAAAGAAATCCTTTT
TCATATTATTTGCAAACTACAGAAAAAAAAAATCAAACTCTCAAAAAGATTGTATTCTAATAAAGCATGTTGCAGTTCATATCAACGTGTAGGG
AAGGTTTGAAAAAAGGAGTTACATTTTGTGCCTTTTCTTCTGTGTGTATTTTTCTTGGTATTTCACAGTGGAGAGAATAACGGTACCTCTAGTC
ATGCCTGATTGCTGTACTTTAATAAAGGAACACAGGCCGAAGAAAATGCCAAAAGTGAAGCAGCAAGAATTGTGGAGGGGGAAGCAAGGGAGAA
AAAAAAAACAAAAGAAAAAGTACCAATGTGAGACTTTTCCATTTCCTGGCTAAGGACTTGGTGCAGTTGTTCTACGTTTATTAATGGCGGTTGC
ATCTAACCTGGAGAAAACAAAGAAGGCAGCAATGTAAAGGGCCGCTGACTAAAGGCACTCACACTCCCCATTAGCCCACATACCTTAAACCTCA
GCTGGATGGAATCTACTCTGCTTCATGGATCCTTACAGTCAGCAGATGACCTTTTAAAAGTAGAAGGCCTGACCTGCCTGCTGTAGCAGGAGTA
CTTGTTAGGCCTTGCAACATTCATTCAGAGGGCCTTTAGTTGGTTATAAAGATAGATACATTTCCATCTCTCTCCTTTAACTGAAGCAAGGAAC
ACAAAGCAGACATATGTATGCATATACACAACAGTAAAATGCAGTAGATATTGGGGAGGTCAGATGAACTCTGCTCCATTAAAGGCTTGAAGAA
ATATTGGATTTTCTAAGATTGAGGAAAGAGAGTATTAGAGATGACGAACATTTTGAGCAGAGGCACAGAGACAGAAAAGCAGAAAGTTATGTCC
AAAGTACAGTGAGTACTGATTTTACTGGGCTTGTGTAAGGAAATAATGGAAACTAAGATTACAAAGGTAGAGTAAGACCAGCTGATGAAAGGCC
TTGAGTGCCTAGTTATGGTGCTTAAGTAAATGATTTTGAGCCTATAAGTTATGAGTAAAACAGTGTTTGGGAAGGAATTAACTATGATCTGAGG
TCCAGGTGGCTTAGGGAGAAAGAACAAAGCTGGGGAGACTGTTGTACTTTAGGTGTAAGAAAAATGGGGAGGGGATGGGGTATCTTTCAAGAGA
GTGCTATGGAAATAGAGAGGAAGAGGCAGATAAAAGAGAGAATGCAAACGGCAAGGTAACAAATTGGTTATAGAAAAAAAGAGAAAGGAAGTAG
TTGAATGCTGCCCCCAAGGTTCCAAATCTGGAAAAATAGAAGAGTAGGCAAGAAGGAAAATAAAAGTGGCTTAGTTTCGAGCATAATTAGCTTG
AGGGCTGACATTTTAAATCCTCCAGTAGGGAGTTTATGACTGAAACTTAATATGAGTGATAGTTATTGACCAACACTCAAGGTTTGTTTATATA
AACACCCAAGAAACCCAAGAGAATAGAGGTATACAATACAGGAGAAAACTGAAGAAACTAATTTCTGCGACTCAACTATTTAACTTTCAGCATG
TCATTTAATTTCTGTACTTCAGCTTCCTCATTTTTAAGTGAGGGTAATAAATCTAGCCCTCTCCGCCTCTGAGCAGCGTTCTGATGAACAAAGG
ACATAATGCATGTGAAAGCACTTTGTAGATTGTACAGCACTGTGCAGCTCCAAGTTGTTTTTAGTGCAAAATAAAACATAAAATTTTGAAGAAT
AATTTATCTATAGATTCTGAAAAAGAAACAAAGACAGCAGCATAAGGTTGCCAAGGTAGTGCCCAGGTAAATTCTATAGAGTGTTTCTGGGAAA
CGAGATACAGTTGTATGATCACTAAATTAAATAGGAGATCAACGGAGGTAAGAACTGAGAATTTATCCTCAGATGTGGTGATGAAGAGAGATTT
TAGGAGAGTGATCTGTGAGGAAGCCAAGATTATAAGGAGTTACTATAGTGAGTGGGTGGTGAGGAAGTACAACCTGTAAGGATGGATTGCAGTT
TTCAGATTTGTCTAAGAAAGGAAAGAGATAGGAAGACCATAATTTAAGGGGAGAATTTTTCTTAGACTTGAGTGAGATGAACAAGCTGGTATTA
TTTTGATTTTTTTTTTACACTACCTTATTCTTTTCTGCTACTTCCATAGTTGCTTTTATATTCAGCTATTGAGTAAAATATTACTTGGACATTT
TCCTCTGCTTTTATCCACAATTGAATATTTTGCAGATGATCATTTTTAAGCTGTAGGAAAAATGTATTTTTTTAAAAAAAATTTTTACTAAAAT
ATTTTGTTTACACGTAACCAGATCCAGTAGTTACACCAGAAAGTCCCAGTTCCAGGTAGAAGAGGAGGACATTGAAAAGCTAGAAATCAGGTAT
GTGCCTTGGGGTTTTACAGAATTGCTTTTTTGTATACCAAAAGAAAATCCTAGATTCAACCAAAAAAAGTAAACCAACTTTAATAGAATTCTCT
ATAGCAAGTTGGTTGATGAAACTTAGAGGAATATGCAACTAATTTAAATCCAGATTATCTTTCCAAAGTCTGATTTGTTTGCACAAATAGTCAA
AGTGTATTAATTTTATAAACAAAGATGATCTAATTTTCATCTGTTTTATTGTATTGATTTTTAATTTTTCCCAAATTCTTCCTTACATTTCTGG
ATTATAGTGTAATGGATGGAAAGGAAGTTATATCTCAGCCAATTTAGAAATTTTTTTTTATTCTTCTTAACATATCTGCTGTCTAACAGAAATT
TCAGTGAGGTAAGAAGATAATTCAACAGGTGCATGTGTTTGAAGTTTGTGCTGTTTCCTGGGTCTTAAATATCTATGCCCTTTGCGAAGGAAAA
ATCTTATAAATGCATGTGTAGGTGTGATGTTAACAGTGTGTTCATCTAGATGGTATATTAATCATGTGTTTGGAGTGATCAGGTAATGTATTTT
TCTAATTTTTCTATATATATATTAATTGGTGGTAATCTAGAGAGAAACTGTAGTCTTATTGTAGTTTCTTTCTGTAGTCCTTATTGCTATAGGT
TAAAATAAAGCCTCGACTTTCAAACTAAGACAGTTTAAGTGCCTTCTTTCAGACTATTTAAAATTACTTTCTGTGCTTTTTAAATAAAAGCTGC
TGTAGTATTTTGCTTCTCTAGTCTGGATAGTGAGGTATCTATATGGTGTTGCTAACATCTTTTAAGCATGTAAAATTAATGCTGTAATACAGAT
CAAAGTAATTTGAAGCTGTTTTGTGGTGTGAACTCTCTTAAACATTGTTTGCAAAACATAAAGCCAGTTTTCAATTTTCAGGATCGACTTGTGG
AACAATGGAAACCTAGTCCAAGATGTTTTCCTAGGTGAGATTAAGGTTCCTGTGAACGTATTAAGAACTGATTCCTCTCATCAAGCCTGGTAAG
GGCCCACCATTTTAGTGAACTCCATAGTTTAATTCTCTTTAGTACAGTATATATATCCAAATAAATGCTTACTCTGAACATATTTTAAATTTGC
CATGTAATAAGCTAAACGTCATTAATATTGATATGTTCATTAATTCATTGTTGCAGAAGTAAATTGTAAGTTTTATGACTTGACCTGTGGTACT
GAGATAAAAGAACTGAATCATCTAGGAATATTTTTCTGTTCACAAGTGAAGACGACTCTTAAGGAGAAAAATGGGAAACATTTAAAACATTACA
TAAGAGTTGTTCATGTAAGAAAACGCTTGGTCACAAATCAGTGTCTGCATTTCAGAAGTTTTATTAGTGGTCATAGGAACTGTGGGTATTTGAA
AGCAAAGGATTTTATTTAGGGGACTCAGTTGTTTATGGGAACTAACCACTGTTCTTCCTTCACCACACCCCATTGAAATGTACTGTAGATGGCC
CTAATGTTACTTTTTGAATGTCTAAGGTCTTATGTTGTTGACCTCGCACTTTTTAGGGCTCTTCCTTTTCAATAATGACTATAATATTATTTTA
GTTTTCAGTGACTCTAATAATAACATTACACTGATGTTAAATTCAAATTAATGTTCAGACATTACATTGACCTAGTTTCCTTAGCAGAATCAAT
GTGAAACTATTGTTTTTTTTCTGTCTATAGCACTTAAAAGCGTGTGTATCCTTTCAGTATGTTGCCCAGCATCTCTCTTGCTAGATTTTGGTTT
CAACTGGGTATAAATGAACATGCCTTTCTCATTTGCCTTTTAAGGAGCACTTTTTGGATCTCAGTTTCTGCTGCCTCAAAGAGCAGTGTTTAGG
TGTTTCTTATGGATATCAGTTTCATCTGTTCCTAAAAGAGCCTGCCTCTTCTGATTGGCCATCACACATCTTCATTTTAGACTCTTGTCCTAGA
GCAGTTATCACTTCTAGACTGATATGGAGACTCTCAAAATTTTTACTTTATTTTTGCCTCTCTATAGTCCAAGGCAGATCTAAGATTTATTGGT
CTTTATGTTGGCATTTTGTGTATTATAGTTTGTAAAATGCATCCACAGAGGGGGAAAAAAATCAAATCTAGTCACTATGAAAAATTGATGAAGA
TTTGGGACCTGTCATCCTCCCACTACACCATGTCTTCCACGTTCCATCAAATAGCATACATTTTAAAATGAAAATTTCTGAGCTCAGTTTGTCA
AGTTTTTAAAATTATGTGCCAGACCACTCAGTACAGAAGAGAAAAACACGTTGTAGTGCCTCCGGGTCCCTCAAAATGAACTTGAAATGTGCCA
CATAATCTGTTTTTTAAGTAAGACTGTCTCCAGAGATGCCTTCCAAATTTGGCAAAACTTTGTGCAGCTTCCTTGGCAGTATGTAAGAACATTA
ACAAACTAATTTTATTTTTATAGATGTTTTTGGCCCATGATATTTTAAAGTAACCTGCCAGAAATATAAGTGCTGAAATTTATATAGCATGAAA
TAGGAACATCTGGTAATTCATATATAATTCCACAGTTGTAAGGAAACATAAAAATGTGAATGCCATTTCTTTTAAGTTGGAAATAAAACTCTTA
ACCTCCTCCATCAATTGTAGAGCCATACCATCCCCTTGTGGGGTTGTTAGTAACTGCATGAAAACTCAAGAAAAGATTTATTTACCCTCAGGAT
TTCAGGCAAATTCTTTCTAATGTTGATGTTAAGAGAGTAATCATCAGTAATTTAATTCTGTTGTTTGAAAAGTCTCAAAATAGATTAATTTTTA
AATTTGAAAGTAAGATTCAAATAATAGATAAAATGAATTACTGGGTTTTTCTTTTCAACAGAAGCACTTTATACATGATTTTAGACTAGATGAA
TATTTGATATCATTTAGCTTTCCACTTTGTTAATTTTGACACCTTTTGTCCTCAAACTTTTTTTTGTGGGGGGGCGGTCTTACTTTTTTTGAGA
CAAAGCCTCACTCTGTTGTCCAAGCTGGAGTCCAGTCGCATGATCTCGCCTCACTGCAACCTCCACCTCCCCGGTTCAAGTCATTCTCCTGCCT
CAGCCTCCCAAGTAGCTGGGACTTCAGGCACACACCACCATGCCGAGCTAATTTTTGTATTTTTAGTAGAGACGGGGTTTTAACTATGTTGGCC
AGGCTGCTCTTGAACTCCTGACCTTCGTGATCCGCCCACTTCGGCCTCCCAAAGTGCTGGGATTGTCAGCCATTGCGCCCACCCTTTGGTCTCA
CATTTTTAACGTATCTGTTTAATATTTGAATTTAGAAAATATAACAAGTCTCCTGTNNNNNNNNNNNNNNNNNNNNNNNNNNNNNNNNNNNNNN
NNNNNNNNNNNNNNNNNNNNNNNNNNNNNNNNNNNNNNNNNNNNNNNNNNNNNNNNNNNNNNNNNNNNNNNNNNNNNNNNNNNNNNNNNNNNNN
NNNNNNNNNNNNNNNNNNNNNNNNNNNNNNNNNNNNNNNNNNNNNNNNNNNNNNNNNNNNNNNNNNNNNNNNNNNNNNNNNNNNNNNNNNNNNN
NNNNNNNNNNNNNNNNNNNNNNNNNNNNNNNNNNNNNNNNNNNNNNNNNNNNNNNNNNNNNNNNNNNNNNNNNNNNNNNNNNNNNNNNNNNNNN
NNNNNNNNNNNNNNNNNNNNNNNNNNNNNNNNNNNNNNNNNNNNNNNNNNNNNNNNTCCATTCTCCTGCCTCAGCCTCCTGGTAGCTGGGATGA
CAGGCATCCGCCACCACACCCAGCTAATTTTTGTATTTTTAGTAGAGATGGGGTTTCACCATCTTCACCAGGCTGGTCTTGATCTCCTGACCTC
TTGATCCCCCCGCCTCGGCCTCCCAAAGTGCTGGGATTACAGGCGTGAGCCACCGCACCTGGCCCACGTTCAGTTATTAATAGAACTGCTTCTT
TATTCTCTCATTTACATAGCATTATGTACAAATAATTGCACTTTGGGTTTGTCTACCTCAATTTTAATTACACAGACCGTATCGTTAGAATTGT
TTAAATGCTGATTTTTTTCTGTTAAGGGACTGTCAAAACTGCTTACTCTTGAGAGCATAAGGATTGCTTTTATGCCTGTGAATGAAAAGTACAT
GTTTAGAGCAACTGAATGCTACTTTCAGTTAAAAATTTCTCTTTATTCCCTGTTTCTTTTTCTTTCAAACGGAAATATTTCATTCAAAAACTGA
CATATATATATATGAGTTTTTTGTTTTGTTTTCACTTAGAAATGCCAGATAGTCCTGAACTATTTAACAAATCTTGAGCCTTTTCTCTTTAGCT
CTAATTCATACAGAATTATTTAATTCACAAGCATCCTTCAGGCAGTTTATTAAATTGAGCTTTTGTAATAATATTTTAAAATAATCACATTTAT
ATAGTTATACAAATGACTATTGATAGTTATTCATATATTTAAGTGGTAATAGTTATACATCACATATATAAATGTTATATGTGTAACATTTACA
TAGTGATTACTGTGTGCCAGGAACTATTCTAAGTACTTTACTTATAATAACTTTTTTAGGGCTGTTCTAGGGTTTTAATGTGTTAAGACACTAT
TAATACTCCTTATTTGACAAATGAGGAAAAAGCACAGAGAAATTTAGCAACTTGTCTAAGGTCACACAGCTGGGATTTGAACCAAACTGTTTGA
CCCCAAAGTTTGTGCTTTTAACCAGTGTACTGTAAGTTTGAACTCTGGCATATTTCTGAATATATTTAAAACTCAAAAACATTCTTTTAAGCCA
TTAGCAAAGATTTGAGTGTCCCTTGCTTATAAAATATTATATAAAAGAGAATCAGAGAGTTCCCTACTCATTTAAAAAATCATCTTTTCAAGGG
ATGGGTAAAACAACAACATGTTGTGAAGTCTTTTTTTTTTTTTTTCAAGTAGACATAGATGAGATATTTTGTCTATGGGGATTTCTTATCCTGC
AAAGAAAATCCAAGGAAACAAGTTTAGAAAGTATGCCAGGAGTGAACCCTTCTGGACTTCTTAAGCATCCAAAAACAATGTATGCATAAAAATG
AGTAATTGGTATAGCACTACCCTAATTCCTCTACATAGAACAATGCTATGTTAAGACTGTAGGCCTGGTAATTTTCAGTTATATGAGAGTAAAG
AGGGATGTCATACCCCTCCCTCAGTTATTTGGAGCTAAAGGAAATAAAGTTGCGCTCTGAGCAAAATTTCTGTAGTAAAAACCAAAACAGAGTT
TGTTTTGACTGTAGAGTTCAGAGACACTGTTTAAGATGGATAGGGATGGTCCCAGAGAGGCAGAACCAGTTGTAACTGAGTAAGCAGTAATACA
AGTAATGTTAATCTACTGTGCATGGAAAACATTAGTTCAATAGGAGGAAAAGATTCATCTAGAGTAATAAAAAAGGATTCCAAAGAGGTAGGCA
TGGTACTGCCTATTCAAGCACAATTGAGGGGGTAGGGGATTCTGGTCCAGAAGAATTACTGTTTCCTTGGCAAGACTGTTGTCTTAGCTGAGAG
ATTCTTAAGGCTGCATAAAACTCCTTGTCATGCCTCTGTACTCACCACAACGCCTTTTGATAATTTGCCTTTCCAAATAGCCTACCAACAGGTA
AAAAAATACAGTGAAAGATATAGATGAAAACCCTATGGTAAATGGTGATAATTGTTGTAACCAAGTGACAAGCACATGGGGGTGGTGGTAAGAA
AGGGTGTTCATTATTACTATTATCACTCTTCTCCCTACTTTTGTAAGTGAGCATTTCTATAATAAAATGCATTGGTCACTTAACAATCCAGGTA
CTTATGCCACTTGACTATATTTCTTTTTCATAAATTTAATAATTGACCTGCTTTTAAGTATATCAGGCTCTGCACTCAGTCATTGCAATTCAGG
TGCACCTTATTCTTTTTTTTTATTTTTTTGAGATGCAGTCTCTCTCTGTCGCCCAGGCTGCACTGCACTGGTGCGATCTTGGCTCAGTGCAACC
TCCACCTCCTGGGTTCAAGCGATTCTCCTGCCTCAGCCTCCCAAGTAGCTCGGACTACAGGCCTGTGCCACCATGCCTGGCTAATTTTTGTATT
TTGGTAGAGATGGGGTTTCACCATGTTGGCCAGCCTGGTCTCGAACTCCTGACCTCAGGTGATCCACCCGCCTTGGCCTCCCAAAGTGCTGGGA
TTACAGGCGGGAGCCACCACACTTGACCTTCAGGTTCACTTTAGATGTGCTGATAAAACCAGATGTCTGAATTTGCAAGGTTGCCGAACATGCC
CTGGATTGTGAAAAATTGACCAAAGTATCAATTGTCAGGATGCTTGGTCATCAACCAGCTAAACTTCCTGATGTGGTTTGGCTGTGTCCCTACC
CAAATCTCACCTTGAATTGTAATCATCCCCACATGTCAAGGGCAGGGCCAGGTGAAGATAATTGAATCATCGGGTGGTTTCAAATCCCCATACT
GTGCTTGTGGTAGTGAATAAGTCTCATGACATCTGATGGTTTTATAAATGGGACTTCTCCTGCACAAGCTCTCTTGCCTGCCGCATGTAAGACG
TCCCTTTACTCTTCTTTGTCTTCTGCCATGATTGCGAGGTCTCCCCAGCCGTGTGGAACTATGAGTCAATTAAACCTCTTTCCTTTATAAATTA
CCCAGCTTTGGGTATGTCTGTATTAGCAGCATAAGGACAGACTAAATACACTTCCCTTAGAGGTACTTCTGAGTCACCTTTGCTAACAGGCTTG
TTTCTAATTATTTCATTGACCATATCTTTACATCACTATTTCTTAAATCAGACAGTAGATGTTCTGAAGGTTGATCTTCCTCTTTTGTGGGATA
GTGATGTAATTTCTTCTTGTATTAACCATCCCTTCATCCTTTAAATTTGCCTTGGTTAATTCGCTAGTTGTCTTTTCTGTCTTTATCTTATCTT
TCTCAAAGCTAATAAATGTTCTATTAAAGCCTTCCTCCTTCTATTTTTAAATGAATTAATATATTAGAGGAGGTCATAGCTGATAAATATATAA
ATTAAGTATTAAAACTACTATTTCTTTTATAAAAAGCATCTCAGCATTCCAGCTAAGTGAAGGACcAGTGATAGAGTTATAAAATTATCATTTT
GATGATTAATGGCTCTAAGCCGTGATCATCAGTGGCTGCTGATATTGCAAAAGGACAAACAACCAGACATTTATGCCTCTTGGTAGAACTACAC
AGCATTATCAATGAAGCATTCTTGCCAGAACATCAAATCTGAATCTAACCAAGCCTCTAGATCTAACTACCAATATAGAGGAAATACAGAGAGG
ATGAAGGAATATGGTAAATGACATTGTGGAGGTAGAGATAAGAGTTAACACAATTCCAAAGGTGGAAAACTCTATAGGACCAACAGTGAGGAAT
CTATAAAAGAGACTTAAGAATGCTATTACCAATTCTAATCTATGGACCTTATTTGGATTCGAACAAACTGTAGAAAAACATTTATGATAAGTTT
GGGGAAATTTGAATACTAAGTGAATAGTGATGACTTTTTAAAATTATATATGAAATTATACCTGGAAATTGCTTTAAAATAATAATGCAGGAAC
AGGATGGGAGAGTGAGTGAAGGTATGGCTGAAACAACATCAGTCTTTTATTAAAAAAAAATCAGTGTATGTATTTTTAAATTTTGTTTGGCATT
GCCTTTAGATAGAGAATAGAGAAGATGGCAGCTTTTTTCTCATGTTAGTTAGAAACTTCTAATTGCTTTCAAAAAGTGACCCAAGGCTTCAAAA
CCAAAGCATTCATTCACTCACTCTCTAGTCAATATCCATGGGAATGTCTACTACTAAGCCCATGTGCCCTATTCTGACCTATCTACTAAAAATA
AAATCGTGGGTTCAAACAGCAATGCTTAAAAAAACTCAAACTGCTTAAAAATATTGCACCTGTGAATCTGTTTTAGTATTTTTAGGGAATTACT
TTACTACTGGGCTTTGTAATTTTAAACTTTAGAAAGGCCTTAGCACAGGATTTATAAAACTTGAAAACTATGAGTATAAATAAATAATTCCAGG
CCAGGCATGGTGGCTTACACCTGTAATCCCAGCACTTTGGGAGGCTGAGGCGGGTAGATCACCTGAGGTCAGGAGTTCAAGACCAGCCTGGCCA
ACATAGTGAAACCCTGTCTCTACTAAAAATACAAAAATTAGCCCGGTGTGGTGGCCCGCGCCTGTAGTCCCAGCTACTCGGGAGGCTGAGGCGG
GAGAATCGCTTGAACCCGGGAGGCAGAGGTTCAGTGACCCGAGAGCATGCCATTGCACTCCACCCTGGGTGACAGAGTGAGACTCTGTCTCAAA
TAATAATAATAATAATAATTCCAAACATTCTACATTCTTAGATAAAATATGTAATTTATTTCTCAAACAGTATAGCGGAAATATTGACAACATT
TAAAATGCATTTTAATGTATTTTAAAACTTTTTAAATGTATTTTTAAAACATTAAAATGCATTCTTAATGTATTTTACATGTATTCACAAAATA
TAAGAAAATGCAATTCGTGTCATAATTGTGACATGATACCAAAGGAGAAAATCCCTCCCTTTACTGTAGCAACTGTATACCATAGAGGCAGTGA
GTAAGAGAGGAACAGAATAGAGCAGTAACAAGATGAAAATGGAAAGACAAACTCTTCCTCAGTATAAGTAACCAGTGCTATAAATTTGCCGTGC
CTAGTACAAATGTTGAACAATTGTATAAACAGAGGTTGAGGATTTTCTGCAAATAATAAAAGAAATATCAGTGCAGATTATTCTGGGAGAAGAA
TGGCAAAGAAAATCCACAAAAGCATTTTAGCAGGACTTGGGTAACAGAGGACTGAGAGAGAGAATTTCCCAGACCCAAAAAGCAAATAAATAAT
TTTCCCCAGTCTCTTAGTAAGGAGGGTTGAAATTAAATTCAAAATTTTAATGTTTGCTGTTTATTGCTTTCTGAACACAATTATTTTTAAGTTA
CTTATGGCCTATTAAGCTGTATAGCATTTTCACTTCACAAGACAGTACAATTATTTTTCATTATATTCATAAATACCTCTCTTAAAGAACTCGA
GTCCATTCATTGCATGAATATTATCTACCCGTTAAAAAGAACAAACTCCATCTATCAAAACTAGTTTCAAAGAGTTAACTACCAAGTGCTTTCA
GGTAAAAAAAACAAGATACAGGAGAGTAGAATATGATAACATTTTTGTAAACTGACTAATAGGCTCAGAACTCATTTATAAATGTGTATATATG
CACACATTTTAAAAAATCTATATAAAATTATATAAGCATGAAGAAAATACACAACGGTCCATAGTAGGTAGTTAACAGGTTCCTAAGAGAAGCG
GAGGTGCAGAATGGTAGTGTTTTGAAGATAGGAAAAAAGATAAGAGAAAAACAAAGTTAAAAGAGAAAATAAAGAAAACGTTCCTTAAAAAAAC
AAAAGCATTGATTTGATGACATTGTTTATATATGTATGCATCGTTATCTATTTGTCTATGTGTAGTAACGATTTTTTAATATTAAATAAAGAAG
ATTCTGGTTCAAAGAGTGATGAAAATAGTAAGTGGCACTCCACACAGATTCTTTCTTGGTTCTTGAAGTTTGAGCTTCACTACAAAAAGAATCT
CCATTCAGTTGCTTTTATCTACCCTACAGCGTTTGTTAATAGCAAATCCAAATTTGTAAATTTAATTTGGAGTTATTTCTGAAAATAAATTTTG
TGGGCAATATGATGATAAGCCACAGGAAAAAAAATATGCAGATAAATATTTATAAATAAATTCCTTTAATATATTCTAATTGTGATAGTTTCTG
CAGCATAATTTAAAATTATGCTATTTTCAGTGTCCAAATAAGGATCTTATCAGTGTTAGTATTGATCATCTGGCTGCACATAGTAACTTAAAAT
AATTTTGTTTTAGAATATACTAATAAAAGACATATATAATACACTTTTTCTGCAGTTTGGTTTCTGGTTATAGTTAAGTAAAGCAAAGATTCAC
TATTTTATATACAGCACAAGAAAACGCCTTTTTAAAATAATGAATTATTGAAGAATAAGAATACAGTTAAGTTTTTTTCCTGGATGTTTTTAGA
TATTTTGCTCTAATGGAATAAAGGGGATGAAGTATTTGTAATGGGCATATTATTTTAGATAAATAAATTTTTAAGAGTTTGAACAATTTTTTAA
CTCCTGGAACTCTTGTGATATCTTGAATGACTACCAAACTTTTTTTTTTCCAGTCCTAGAAAGATATATTTTCGCTAAAGCCCAGCAATTCTGA
AGTTTTAATGACCAAATTAGTTGACTTCAATTGTTTTTGCCAACTTAGGCTACTTTAAGAGTAAAAATTGCCTTTCTCTAATCCTGATATAGTC
TAGAAAAAAATAGGTATTTACACTAACAACAAATCATAAATTTCAAATTTAGGCAAGCATATTGCTGAGTATCCCCCCAAAAAGGAAATATGAA
TACTTGATTGTCAATGGTACTTTACAATTTTTATCAGCCTTCATCCAATTTTGTTTTGTTTTGTTTTTTAATTTTAGATTCAGGGGTATAGGTA
CAGGTTTGTTACATGGGTATATTGTGTAATGCTGAGGTTTAGGCTTATTATCCCTTCACCCAAGTAGCGAACAAACTACCGGATGGTTTTTTCA
ATCCCTACCCCCCTATCTCCCTCCCCACTTTTGGAACCCCCAGTGTCTATTGTTACCATCTTTGTGTTTGTCCATACCCAGTGTTCAGCTCCCA
CTTACAAGTGAGAACATAGGGTATTTGGTTTTCTGTTTCTGCATTAATTCGCATAGGGTAGTGGCCTCCAGCAGCATCCATGTTAGTGCAAAGG
ACATAATTTTTTTCTTTCTGTGACTGCGAACAAGATTAGTCTTCAGTTGATAATTGTTTAAGCTAGATAATGGGTACATGAGCGTTCAATATTC
TCTTTTGTTTGTGTTTTTAAATTCCCATGATAAAAAGCTTTTTTTTTTTTTTTTTAAACTCTTAGATTTCTCCTTTTGGTCCTGCAAATTTCTC
TTAAGTTCAAATTTTTGGAAAAAGAATTTACTTTAAAACAAGGTTACTTACGCATTCTCATATGTCTTATCTACTTTTTTTTTTTTTTGAGACG
AAGTCTTGCTCTGTCATCCAGGCAAGCCCAGACTGGAGTACAGTGGCGGGATCTCAGCTCACTGCAACTCCGCCTCCTGAGTTCAAGTGATTCT
CCTGCCTCAGCCTCCCAAGCAGCTGGATTACAGGCACCTGCCACCATGCCGGACTCATTTTTGTATTTTTAGTAAAGACAGGGTTTCACCATGG
TGGCCAGGCTGGTCTCGAACTCCTGACCTCAAGTGATCTGCCTGCGTCAGCCTCCCAAAGTGCTGAGATTACAGTCATGAGCCACTGCACCCGG
ACTGTCTTAATTTTCAGCTAAATGCCTCTTTCTTAAATTTAGTTGGTAAAAATTTATTTTTGATAATACATTGGATTTTAAATGTTTACCTTTT
ATTATCATTTTTTCTAAACCTGCAAGCTAATCAAACTCTTGTTCAACTCCTTTGACATCTTAATTTCTGTAATATCTATGCTTTTTGTTTCCTG
GATAAAAATGTGTTTATAGCTTTGTAATCCAATGTATAACCAATATTAGTTTTCTGAAGATGAGTATCCTGCTACTTATGAAGCTTCCTAACTG
TAAATACTAAGTTGACTTTTTTGG&TTACTTTTTTTATAACTTAACTCTTAACTTGCCTCATTGGCTTGAATGCATTTCCATCACATGGAATCA
CTTATATTTTTACTTTAGGTACTTGCTACAGCCAAGAGACAATGGAAACAAGTCATCCAAAACTGATGACCTGGGGTCTCTTCGATTAAATATA
TGTTATACAGAAGACTACGTGCTTCCTTCAGAGTACTATGGTCCTTTGAAAACTTTGCTGCTAAAATCACCAGATGTTCAAGTATGTTAAGAAT
CTTAAGGATATGATTTAACACGAAACGGCTAAAATAATTCTATAAATGATAAGGAAAAGATTTCAAGAGTATCAAGTCTTATTAAAACAGTAAA
AATTATATACATACATATATATACACACACACATTTCTATTTATCTCAACCAGAGTACTATGATTCCTACATGTGCTCCCACAATCATCTCTGA
TAAAAAATTTCGAAAATTAAATGTCCTGTATAACAGCTTTAGTGACATTATTTCAGTTACTTTTACAGGCTACTGATTGAACAGTTAATCATGT
TTCCTTCATGTTTGTGCTTGTTTTCTACCTTTCTGTATTTAGCCAATATCTGCCTCAGCTGCTTACATTTTGAGTGAAATATGTCGAGATAAAA
ATGATGCTGTTTTGCCCCTTGTACGACTGCTGCTGCACCATGATAAACTTGTTCCTTTTGCCACTGCTGTGGCTGAATTAGACTTGAAGGATAC
ACAGTAAGAGTTATATTTTATTAAATGTTAATTACATGTTGTTGAAATTGGACCTTAGTTTGACAGATTGATTTTGTAGTCTGAATTTTTTTGT
ATTGATCAGCCTTACTGTATAGTAGGCTGAAAAGAAGTACTTAACAAATAACAAAAGGCAGTTAAGCTATCAAACAGTATTCACCTACCTTAAG
GACAACAATTAATGAAGGATGTTTTTCTTTAACTCAGGAAATTTCATTTGTTACTAATCTGCTTCTTACTGTAATGGTTCACGTGTCACAAGTT
AAAACACCAGAGCAGAAGTGTTTTTTTCTTTATTCATTATGTATCACCCTTATATGCATATGTATGACATTCTAAAAAGCAGTCAAGTGACTTC
TCATTCACGTCATAGTCTAACACTGTTGTTTTTTTACACACAGAGACATACATATACTCCACATTTTTGGTTCATAAACATGATTTGCCTTTTT
AAAAAAACATATATATATATATATATATATATATATATATACACACACACACACACATATGTATTGAGTTTTTTGTTTGTTTGTTTTTAAGACA
CAGTCTCGCTTTTTCACCCAGGTTGGAGTGCAGTGGCATGATCTTGGCTCACTGCAGCTTCTGCCTCCTAGGTTCAAGCGATTCTCATGCCTCA
GCCTCCTGAGTAGCTGGGATTACAGGCACTCGCCACCACGCCCAGCTAATTTTTGTATTTTTGGTAGAGATGGGGTTTCACCATGTTGGCCAGG
CTAGTCTCACACTCCTGACTTCAAGCGATCCACCTGCTTCGGACCCCCAAAGTGATGGGATAACAGGCATGACCCATCACACCTGGCCATTATT
TTAATATATTTTTCGTAAGTTTGAAAAACCTAATGGCAGCAACCTTTTAAATAAATGCTAAAAATTACTAAAATTGTAGGTCACTTATGCCTTC
TAGTATGTCTTAATCTATTTCAGCTAAATGCTTCTTTCTTAAATTGGTCAAGTATGTTATATTATTGGTTTCAAAACCTTTGTTTACTACATTT
GGTTTCATCTATTTCTATTTCAGAGATCCAAACACAATTTTTAGAGGAAATTCCCTCGCTACCCGATGTCTGGATGAGATGATGAAAATAGTGG
GAGGGCACTACCTGAAAGTAACATTAAAACCTATTCTTGATGAGGTACAGAATATATCTCCAACAATGATAGTTTGTGGCCTTATGATAGTTGT
TCTTTTATCAAGTGATCTATTGATGGGAAGGATTTATTCATTCATGTGTTACTGAAAAAATAGACTGAACACTTTAGAAGCAAATTATTTACTT
CTCTGTCAATGGATTTTTACTCAAAAGGTACAGTATAGTATAATCTACATTATTTCTTTGTTATGGGATTTCTATTTTAGCTAGAGTTTCAAAT
ATATGACAAATACTTTTTGATATCATGTTTTAACAAAATTGTATATCTTATCCCTGCATAGGACATTTTACCCTTTGCTACACTTTAAATTTCT
ATAATTAACTTTTATTATCAGAAAAATAAGTTATTTTCATTTTGTCAGACTACTTAGAAAAAAATCATTAACTGAAAAATTTATTTTTCAGATA
TGTGACTCCTCAAAATCCTGTGAAATCCATCCTATTAAATTGAAAGAGGGAGATAATGTACAAAATAATAAGGTAAGTCCTTGTTATATTATTT
ATAATTGCATTAAAATTGGTCTTAATGGTGTACCTTTCTCCCACTTACATTATGATAAAGCCATATAGAGGGAACCAGTCCTGTTTATTCTTCA
CATAAGCCTTTATTATTAGCAGCACTTCCAGCTCCTAGGATTAGTTTTTAGAATCTTATTTCCTCAGTGGTTTCACTTTATTTTTGTTCTTGAT
TGTCTCTTTTTGGCTCTAGTAACAATACTGAACTTAAGCTATAGCTACTTCCAGCCCCCGTTCTAGCCATTCCTTTGGGCTCAAACTGATCAGG
CTAAGTGACACAGTGACTTTATCAGTCAGTAGTTTCAGTGGCCTCTCAAAAAACAATGATTGTGTTAGGGTCACAAATTTTTATTGCAGTGGAT
AATAGTGTCACAATCTCCTTGTGCTTGTGTATCCGACTTATTTTCTGATTTCCTTTTGGATCATTTTATTCCCTCTTGCTTCTTGTGAGGTTTA
TTCATAGATTCACCTCTTACGCCTAGCAAATCTAAATTTAATTTATTAAATTAAGTCA
HUMAN SEQUENCE—mRNA
ATGGCGGCGCCGGCGCCTGCTGCTGCGGCGGCTTCTTCCGAGGCGCCAGCGGCGAGTGCGACTGCAGAGCCCGAGGCCGGGGACCAGGACAGTC
GCGAGGTTCGAGTGTTGCACAGCCTGCGGGGCAAGATCTGTGAAGCAAAAAATTTATTGCCATATCTTGGACCCCACAAAATGAGAGATTGTTT
CTGTACCATAAATTTGGACCAGGAAGAAGTTTATCGTACCCAAGTTGTGGAAAAATCTTTAAGCCCATTTTTCAGTGAAGAATTTTACTTTGAG
ATTCCAAGAACTTTCCAGTATTTGTCTTTCTATGTTTATGATAAGAATGTTTTACAAAGAGATCTCCGTATAGGAAAAGTAGCCATCAAAAAAG
AAGACTTGTGTAATCACAGTGGCAAAGAAACTTGGTTTTCATTACAGCCTCTTGACTCCAATTCAGAGGTTCAGGGTAAAGTTCACCTTGAATT
AAAACTGAATGAACTCATAACGGAGAATGGAACTGTATGCCAGCAGCTTGTTGTACACATCAAGGCATGCCATGGGTTGCCTCTCATAAATGGC
CAAAGCTGTGACCCTTATGCAACAGTTTCTCTAGTGGGCCCTTCTAGGAATGACCAAAAGAAGACAAAAGTAAAGAAGAAAACAAGCAATCCGC
AGTTTAATGAAATCTTTTATTTTGAAGTAACCAGATCCAGTACTTACACCAGAAAGTCCCAGTTCCAGGTAGAAGAGGAGGACATTGAAAAGCT
AGAAATCAGGATCGACTTGTGGAACAATGGAAACCTAGTCCAAGATGTTTTCCTAGGTGAGATTAAGCTTCCTCTGAACCTATTAAGAACTCAT
TCCTCTCATCAAGCCTGGTACTTGCTACAGCCAAGAGACAATGGAAACAAGTCATCCAAAACTGATGACCTGGCGTCTCTTCGATTAAATATAT
GTTATACAGAAGACTACGTGCTTCCTTCAGAGTACTATGGTCCTTTGAAAACTTTGCTGCTAAAATCACCAGATGTTCAACCAATATCTGCCTC
AGCTGCTTACATTTTGAGTGAAATATGTCGAGATAAAAATGATGCTGTTTTGCCCCTTGTACCACTGCTGCTGCACCATGATAAACTTGTTCCT
TTTGCCACTGCTGTGGCTGAATTAGACTTGAAGGATACACAAGATGCAAACACAATTTTTAGAGGAAATTCCCTGGCTACCCGATGTCTGGATG
AGATGATGAAAATAGTGGGAGGGCACTACCTGAAAGTAACATTAAAACCTATTCTTCATGAGATATGTGACTCCTCAAAATCCTGTGAAATCGA
TCCTATTAAATTGAAAGAGGGAGATAATGTAGAAAATAATAAGGAGAATCTGCGCTACTATGTAGACAAGTTATTCAATACAATTGTAAAATCA
AGTATGAGCTGCCCCACTGTAATGTGTGATATCTTTTATTCTCTAAGGCAGATGGCTACTCAGAGATTTCCTAATGACCCTCATGTTCAGTATT
CTGCAGTGAGCAGCTTTGTATTTCTTCGTTTCTTTCCTGTAGCCGTAGTATCACCTCATACTTTTCATTTGCGACCTCATCATCCAGATGCACA
GACAATTAGAACATTAACTCTCATCTCAAAAACTATACAAACTTTGGGAAGCTGGGGGAGTCTGTCCAAAAGCAAGTCAAGTTTCAAAGAGACA
TTCATGTGTGAATTTTTCAAAATGTTTCAAGAAGAAGGATATATTATAGCAGTTAAAAAGTTCTTGGATGAAATTTCATCTACTGAAACTAAAG
AGTCCAGTGGTACGAGTGAGCCTGTGCACCTGAAAGAAGGTGAGATGTATAAAAGAGCTCAAGGAAGAACTCGGATTGGAAAAAAGAATTTTAA
GAAACGATGGTTCTGCTTAACAAGCAGAGAGCTCACCTACCACAAACAGCCAGGCAAAGATGCAATCTACACAATCCCAGTAAAAAACATTCTT
GCTGTGGAAAAACTGGAAGAGAGCTCTTTCAACAAGAAAAATATGTTCCAAGTAATACATACGGAGAAACCACTCTATGTCCAGGCAAATAACT
GTGTAGAAGCTAATGAATGGATAGACGTACTCTGCAGGGTGAGCCGATGCAATCAAAACAGGCTCAGTTTTTATCATCCCTCTGTGTATCTAAA
CGGAAATTGGCTCTGCTGTCAGGAGACTGGTGAAAACACTCTCGGCTGCAAGCCATGTACTGCAGGTGTCCCTGCAGACATCCAAATAGATATT
GATGAAGACAGAGAAACAGAAAGAATTTATTCCCTTTTTACCCTCAGTTTACTTAAGCTGCAGAAGATGGAAGAGGCTTGTGGAACTATTGCAG
TCTATCAAGGACCACAGAAAGAGCCTGATGATTATTCTAACTTTGTAATCGAGGATTCTGTAACAACCTTTAAGACAATTCAGCAAATAAAAAG
CATAATTGAGAAGCTGGATGAACCTCATGAAAAATATAGGAAGAAAAGATCCAGTAGTGCAAAATATGGGAGCAAGGAAAATCCAATTGTTGGG
AAAGCATCTTAGAGTTTAACAGATTGGTTCAGAAGAACTGGAAAATATTATTTT
HUMAN SEQUENCE—CODING
ATGGCGGCGGCGGCGCCTGCTGCTGCGGCGGCTTCTTCCGAGGCGCCAGCGGCGAGTGCGACTGCAGAGCCCGAGGCCGGGGACCAGGACAGTC
GCGAGGTTCGAGTGTTGCAGAGCCTGCGGGGCAAGATCTGTGAAGCAAAAAATTTATTGCCATATCTTGGACCCCACAAAATGAGAGATTGTTT
CTGTACCATAAATTTGGACCAGGAAGAAGTTTATCGTACCCAAGTTGTGGAAAAATCTTTAAGCCCATTTTTCAGTGAAGAATTTTACTTTGAG
ATTCCAAGAACTTTCCAGTATTTGTCTTTCTATGTTTATCATAAGAATGTTTTACAAAGAGATCTCCGTATAGGAAAAGTAGCCATCAAAAAAG
AAGACTTGTGTAATCACAGTGGCAAAGAAACTTGGTTTTCATTACAGCCTGTTGACTCCAATTCAGAGGTTCAGGGTAAAGTTCACCTTGAATT
AAAACTGAATGAACTGATAACGGAGAATGGAACTGTATGCCAGCAGCTTGTTGTACACATCAAGGCATGCCATGGGTTGCCTCTCATAAATGGC
CAAAGCTGTGACCCTTATGCAACAGTTTCTCTAGTGGGCCCTTCTAGGAATGACCAAAAGAAGACAAAAGTAAAGAAGAAAACAAGCAATCCGC
AGTTTAATGAAATCTTTTATTTTGAAGTAACCAGATCCAGTAGTTACACCAGAAAGTCCCAGTTCCAGGTAGAAGAGGAGGACATTGAAAAGCT
AGAAATCAGGATCGACTTGTGGAACAATGGAAACCTAGTCCAAGATGTTTTCCTAGGTGAGATTAAGGTTCCTGTGAACGTATTAAGAACTGAT
TCCTCTCATCAAGCCTGGTACTTGCTACAGCCAAGAGACAATGGAAACAAGTCATCCAAAACTGATGACCTGGGGTCTCTTCGATTAAATATAT
GTTATACAGAAGACTACGTGCTTCCTTCAGAGTACTATGGTCCTTTGAAAACTTTGCTGCTAAAATCACCAGATGTTCAACCAATATCTGCCTC
AGCTGCTTACATTTTGAGTGAAATATGTCGAGATAAAAATGATGCTGTTTTGCCCCTTGTACGACTGCTGCTGCACCATGATAAACTTGTTCCT
TTTGCCACTGCTGTGGCTGAATTAGACTTGAAGGATACACAAGATGCAAACACAATTTTTAGAGGAAATTCCCTGGCTACCCGATGTCTGGATG
AGATGATGAAAATAGTGGGAGGGCACTACCTGAAAGTAACATTAAAACCTATTCTTGATGAGATATGTGACTCCTCAAAATCCTGTGAAATCGA
TCCTATTAAATTGAAAGAGGGAGATAATGTAGAAAATAATAAGGAGAATCTGCGCTACTATGTAGACAAGTTATTCAATACAATTGTAAAATCA
AGTATGAGCTGCCCCACTGTAATGTGTGATATCTTTTATTCTCTAAGGCAGATGCCTACTCAGAGATTTCCTAATGACCCTCATGTTCAGTATT
CTGCAGTGAGCAGCTTTGTATTTCTTCGTTTCTTTGCTGTAGCCGTAGTATCACCTCATACTTTTCATTTGCGACCTCATCATCCAGATGCACA
GACAATTAGAACATTAACTCTCATCTCAAAAACTATACAAACTTTGGGAAGCTGGGGGAGTCTGTCCAAAAGCAAGTCAAGTTTCAAAGAGACA
TTCATGTGTGAATTTTTCAAAATGTTTCAAGAAGAAGGATATATTATAGCAGTTAAAAAGTTCTTGGATGAAATTTCATCTACTGAAACTAAAG
AGTCCAGTGGTACGAGTGAGCCTGTGCACCTGAAAGAAGGTGAGATGTATAAAAGAGCTCAAGGAAGAACTCGGATTGGAAAAAAGAATTTTAA
GAAACGATGGTTCTGCTTAACAAGCAGAGAGCTCACCTACCACAAACAGCCAGGCAAAGATGCAATCTACACAATCCCAGTAAAAAACATTCTT
GCTGTGGAAAAACTGGAAGAGAGCTCTTTCAACAAGAAAAATATGTTCCAAGTAATACATACGGAGAAACCACTCTATGTCCAGGCAAATAACT
GTGTAGAAGCTAATGAATGGATAGACGTACTCTGCAGGGTGAGCCGATGCAATCAAAACAGGCTCAGTTTTTATCATCCCTCTGTGTATCTAAA
CGGAAATTGGCTCTGCTGTCAGGAGACTGGTGAAAACACTCTCGGCTGCAAGCCATGTACTGCAGGTGTCCCTGCAGACATCCAAATAGATATT
GATGAAGACAGAGAAACAGAAAGAATTTATTCCCTTTTTACCCTCAGTTTACTTAAGCTGCAGAAGATGGAAGAGGCTTGTGGAACTATTGCAG
TCTATCAAGGACCACAGAAAGAGCCTGATGATTATTCTAACTTTGTAATCGAGGATTCTGTAACAACCTTTAAGACAATTCAGCAAATAAAAAG
CATAATTGAGAAGCTGGATGAACCTCATGAAAAATATAGGAAGAAAAGATCCAGTAGTGCAAAATATGGGAGCAAGGAAAATCCAATTGTTGGG
AAAGCATCTTAG

[0277] TABLE 13
MOUSE NOMENCLATURE
ICSGNM Gata1
Celera mCG3964
HUMAN NOMENCLATURE
HGNC GATA1
Celera hCT10890
MOUSE SEQUENCE—GENOMIC
TGCCTATAGTTTCAGAGGCTGAGTCCATTATCATTGTGGAAGCATAGCAGAAGGCAGACAGGAGTTGGGGCACTATCTGAGACCTTSATATCCT
GATCCATAAGGCAAAAAGAGACACATGAGCTTTTGAAGCTTCAAAGCCCAGCCCAGCCCCAGTTGACACAGGTCCTCCAACAAGGCTACTCCTC
CTAATCCTTCTCAAATAGTGCCCTACCCCTTGATGGCTAAGTATTCAAATAGATGAGCCTATGGGCCATTCTTTTTTTTTTTTTTTTTTTTTTT
TTTTAGTTTTCAAGACAGGGTTTCTCTGTATAGCCCTGGCTGTCCTAGAACTCAAACTGTAGGTAGACCAGGCTGGCCTGAATTCAGGAATCAG
CCTGCCTCTGCCTCCTGAGTACTGGGATTAAAGGTGTGCACCACCACTCCCTGGCTGGGCCATTGTTATTCAAACCACCGTGTGTGTGTGTGTG
TGTGTGTGTGTGTGTGTGTGNNNNNNNNNNNNNNNNNNNNNNNNNNNNNNNNNNNNNNNNNNNNNNNNNNNNNNNNNNNNNNNNNNNNNNNNNN
NNNNNNNNNNNNNNNNNNNNNNNNNNNNNNNNNNNNNNNNNNNNNNNNNNNNNNNNNNNNNNNNNNNNNNNNNNNNNNNNNNNNNNNNNNNNNN
NNNNNNNNNNNNNNNNNNNNNNNNNNNNNNNNNNNNNNNNNNNNNNNNNNNNNNNNNNNNNNNNNNNNNNNNNNNNNNNNNNNNNNNNNNNNNN
NNNNNNNNNNNNNNNNNNNNNNNNNNNNNNNNNNNNNNNNNNNNNNNNNNNNNNNNNNNNNNNNNNNNNNNNNNNNNNNNNNNNNNNNNNNNNN
NNNNNNNNNNNNNNNNNNNNNNNNNNNNNNNNNNNNNNNNNNNNNNNNNNNNNNNNNNNNNNNNNNNNNNNNNNNNNNNNNNNNNNNNNNNNNN
NNNNNNNNNNNNNNNNNNNNNNNNNNNNNNNNNNNNNNNNNNNNNNNNNNNNNNNNNNNNNNNNNNNNNNNNNNNNNNNNNNNNNNNNNNNNNN
NNNNNNNNNNNNNNNNNNNNNNNNNNNNNNNNNNNNNNNNNNNNNNNNNNNNNNNNNNNNNNNNNNNNNNNNNNNNNNNNNNNNNNNNNNNNNN
NNNNNNNNNNNNNNNNNNNNNNNNNNNNNNNNNNNNNNNNNNNNNNNNNNNNNNNNNNNNNNNNNNNNNNNNNNNNNNNNNNNNNNNNNNNNNN
NNNNNNNNNNNNNNNNNNNNNNNNNNNNNNNNNNNNNNNNNNNNNNNNNNNNNNNNNNNNNNNNNNNNNNNNNNNNNNNNNNNNNNNNNNNNNN
NNNNNNNNNNNNNNNNNNNNNNNNNNNNNNNNNNNNNNNNNNNNNNNNNNNNNNNNNNNNNNNNNNNNNNNNNNNNNNNNNNNNNNNNNNNNNN
NNNNNNNNNNNNNNNNNNNNNNNNNNNNNNNNNNNNNNNNNNNNNNNNNNNNNNNNNNNNNNNNNNNNNNNNNNNNNNNNNNNNNNNNNNNNNN
NNNNNNNNNNNNNNNNNNNNNNNNNNNNNNNNNNNNNNNNNNNNNNNNNNNNNNNNNNNNNNNNNNNNNNNNNNNNNNNNNNNNNNNNNNNNNN
NNNNNNNNNNNNNNNNNNNNNNNNNNNNNNNNNNNNNNNNNNNNNNNNNNNNNNNNNNNNNNNNNNNNNNNNNNNNNNNNNNNNNNNNNNNNNN
NNNNNNNNNNNNNNNNNNNNNNNNNNNNNNNNNNNNNNNNNNNNNNNNNNNNNNNNNNNNNNNNNNNNNNNNNNNNNNNNNNNNNNNNNNNNNN
NNNNNNNNNNNNNNNNNNNNNNNNNNNNNNNNNNNNNNNNNNNNNNNNNNNNNNNNNNNNNNNNNNNNNNNNNNNNNNNNNNNNNNNNNNNNNN
NNNNNNNNNNNNNNNNNNNNNNNNNNNNNNNNNNNNNNNNNNNNNNNNNNNNNNNNNNNNNNNNNNNNNNNNNNNNNNNNNNNNNNNNNNNNNN
NNNNNNNNNNNNNNNNNNNNNNNNNNNNNNNNNNNNNNNNNNNNNNNNNNNNNNNNNNNNNNNNNNNNNNNNNNNNNNNNNNNNNNNNNNNNNN
NNNNNNNNNNNNNNNNNNNNNNNNNNNNNNNNNNNNNNNNNNNNNNNNNNNNNNNNNNNNNNNNNNNNNNNNNNNNNNNNNNNNNNNNNNNNNN
NNNNNNNNNNNNNNNNNNNNNNNNNNNNNNNNNNNNNNNNNNNNNNNNNNNNNNNNNNNNNNNNNNNNNNNNNNNNNNNNNNNNNNNNNNNNNN
NNNNNNNNNNNNNNNNNNNNNNNNNNNNNNNNNNNNNNNNNNNNNNNNNNNNNNNNNNNNNNNNNNNNNNNNNNNNNNNNNNNNNNNNNNNNNN
NNNNNNNNNNNNNNNNNNNNNNNNNNNNNNNNNNNNNNNNNNNNNNNNNNNNNNNNNNNNNNNNNNNNNNNNNNNNNNNNNNNNNNNNNNNNNN
NNNNNNNNNNNNNNNNNNNNNNNNNNNNNNNNNNNNNNNNNNNNNNNNNNNNNNNNNNNNNNNNNNNNNNNNNNNNNNNNNNNNNNNNNNNNNN
NNNNNNNNNNNNNNNNNNNNNNNNNNNNNNNNNNNNNNNNNNNNNNNNNNNNNNNNNNNNNNNNNNNNNNNNNNNNNNNNNNNNNNNNNNNNNN
NNNNNNNNNNNNNNNNNNNNNNNNNNNNNNNNNNNNNNNNNNNNNNNNNNNNNNNNNNNNNNNNNNNNNNNNNNNNNNNNNNNNNNNNNNNNNN
NNNNNNNNNNNNNNNNNNNNNNNNNNNNNNNNNNNNNNNNNNNNNNNNNNNNNNNNNNNNNNNNNNNNNNNNNNNNNNNNNNNNNNNNNNNNNN
NNNNNNNNNNNNNNNNNNNNNNNNNNNNNNNNNNNNNNNNNNNNNNNNNNNNNNNNNNNNNNNNNNNNNNNNNNNNNNNNNNNNNNNNNNNNNN
NNNNNNNNNNNNNNNNNNNNNNNNNNNNNNNNNNNNNNNNNNNNNNNNNNNNNNNNNNNNNNNNNNNNNNNNNNNNNNNNNNNNNNNNNNNNNN
NNNNNNNNNNNNNNNNNNNNNNNNNNNNNNNNNNNNNNNNNNNNNNNNNNNNNNNNNNNNNNNNNNNNNNNNNNNNNNNNNNNNNNNNNNNNNN
NNNNNNNNNNNNNNNNNNNNNNNNNNNNNNNNNNNNNNNNNNNNNNNNNNNNNNNNNNNNNNNNNNNNNNNNNNNNNNNNNNNNNNNNNNNNNN
NNNNNNNNNNNNNNNNNNNNNNNNNNNNNNNNNNNNNNNNNNNNNNNNNNNNNNNNNNNNNNNNNNNNNNNNNNNNNNNNNNNNNNNNNNNNNN
NNNNNNNNNNNNNNNNNNNNNNNNNNNNNNNNNNNNNNNNNNNNNNNNNNNNNNNNNNNNNNNNNNNNNNNNNNNNNNNNNNNNNNNNNNNNNN
NNNNNNNNNNNNNNNNNNNNNNNNNNNNNNNNNNNNNNNNNNNNNNNNNNNNNNNNNNNNNNNNNNNNNNNNNNNNNNNNNNNNNNNNNNNNNN
NNNNNNNNNNNNNNNNNNNNNNNNNNNNNNNNNNNNNNNNNNNNNNNNNNNNNNNNNNNNNNNNNNNNNNNNNNNNNNNNNNNNNNNNNNNNNN
NNNNNNNNNNNNNNNNNNNNNNNNNNNNNNNNNNNNNNNNNNNNNNNNNNNNNNNNNNNNNNNNNNNNNNNNNNNNNNNNNNNNNNNNNNNNNN
NNNNNNNNNNNNNNNNNNNNNNNNNNNNNNNNNNNNNNNNNNNNNNNNNNNNNNNNNNNNNNNNNNNNNNNNNNNNNNNNNNNNNNNNNNNNNN
NNNNNNNNNNNNNNNNNNNNNNNNNNNNNNNNNNNNNNNNNNNNNNNNNNNNNNNNNNNNNNNNNNNNNNNNNNNNNNNNNNNNNNNNNNNNNN
NNNNNNNNNNNNNNNNNNNNNNNNNNNNNNNNNNNNNNNNNNNNNNNNNNNNNNNNNNNNNNNNNNNNNNNNNNNNNNNNNNNNNNNNNNNNNN
NNNNNNNNNNNNNNNNNNNNNNNNNNNNNNNNNNNNNNNNNNNNNNNNNNNNNNNNNNNNNNNNNNNNNNNNNNNNNNNNNNNNNNNNNNNNNN
NNNNNNNNNNNNNNNNNNNNNNNNNNNNNNNNNNNNNNNNNNNNNNNNNNNNNNNNNNNNNNNNNNNNNNNNNNNNNNNNNNNNNNNNNNNNNN
NNNNNNNNNNNNNNNNNNNNNNNNNNNNNNNNNNNNNNNNNNNNNNNNNNNNNNNNNNNNNNNNNNNNNNNNNNNNNNNNNNNNNNNNNNNNNN
NNNNNNNNNNNNNNNNNNNNNNNNNNNNNNNNNNNNNNNNNNNNNNNNNNNNNNNNNNNNNNNNNNNNNNNNNNNNNNNNNNNNNNNNNNNNNN
NNNNNNNNNNNNNNNNNNNNNNNNNNNNNNNNNNNNNNNNNNNNNNNNNNNNNNNNNNNNNNNNNNNNNNNNNNNNNNNNNNNNNNNNNNNNNN
NNNNNNNNNNNNNNNNNNNNNNNNNNNNNNNNNNNNNNNNNNNNNNNNNNNNNNNNNNNNNNNNNNNNNNNNNNNNNNNNNNNNNNNNNNNNNN
NNNNNNNNNNNNNNNNNNNNNNNNNNNNNNNNNNNNNNNNNNNNNNNNNNNNNNNNNNNNNNNNNNNNNNNNNNNNNNNNNNNNNNNNNNNNNN
NNNNNNNNNNNNNNNNNNNNNNNNNNNNNNNNNNNNNNNNNNNNNNNNNNNNNNNNNNNNNNNNNNNNNNNNNNNNNNNNNNNNNNNNNNNNNN
NNNNNNNNNNNNNNNNNNNNNNNNNNNNNNNNNNNNNNNNNNNNNNNNNNNNNNNNNNNNNNNNNNNNNNNNNNNNNNNNNNNNNNNNNNNNNN
NNNNNNNNNNNNNNNNNNNNNNNNNNNNNNNNNNNNNNNNNNNNNNNNNNNNNNNNNNNNNNNNNNNNNNNNNNNNNNNNNNNNNNNNNNNNNN
NNNNNNNNNNNNNNNNNNNNNNNNNNNNNNNNNNNNNNNNNNNNNNNNNNNNNNNNNNNNNNNNNNNNNNNNNNNNNNNNNNNNNNNNNNNNNN
NNNNNNNNNNNNNNNNNNNNNNNNNNNNNNNNNNNNNNNNNNNNNNNNNNNNNNNNNNNNNNNNNNNNNNNNNNNNNNNNNNNNNNNNNNNNNN
NNNNNNNNNNNNNNNNNNNNNNNNNNNNNNNNNNNNNNNNNNNNNNNNNNNNNNNNNNNNNNNNNNNNNNNNNNNNNNNNNNNNNNNNNNNNNN
NNNNNNNNNNNNNNNNNNNNNNNNNNNNNNNNNNNNNNNNNNNNNNNNNNNNNNNNNNNNNNNNNNNNNNNNNNNNNNNNNNNNNNNNNNNNNN
NNNNNNNNNNNNNNNNNNNNNNNNNNNNNNNNNNNNNNNNNNNNNNNNNNNNNNNNNNNNNNNNNNNNNNNNNNNNNNNNNNNNNNNNNNNNNN
NNNNCTGGGTGCAGTGCTGGATATCTACAGGCCCAGTCTCAGTACTGAGGCTGAAGCAGGAAAGGCTGCACAGTTGAGGTCAGCCTGGTATACA
GCCGAAACCCTCGTCTCAAAAAACTAACATGATTTTCTGTTTTGTCAAGATAATTGCTTGTTTCAGGTTGCTCTGCCTGATTAGTTTTCTTGTG
TTTGTGGTGGGTTTTGGTATTTGTTTGTTTATTTGTTTTTGAGACCAGGTTTCTCTGTGTAGCCCCAACAATCTTGGAACTCTATAGATGGGCC
TTGGCCTTGAACTCACACGGACCTGCCACCTCCGCCTCTGCCTGGAATCAAAAGGTGGGAATTAAAAGCGTCCACCCTCACCTCCTGACACTGT
TGTTTTGAGAGCTTCCCACTTTAGCCTGGCCTTGAACTCAAACTAATCTTCTTGTCTCAGCCTCCCAAATACCAGGATAACAGGCATGAGCCAG
GGTGCCTGATTTCCGATGCTTTCCTTGTGCATACTCATGTGTATTCAGATGCCCGTGAACGTGTCAGTGTGTTCACATGGAAGGCCAAAACTGA
TGTTGAATGTCTTCGCCAATCATTTTCCACTTTACTGAGGCAGGTTCTCAGGGAACCTGGAGCCTGTCGATTTGGACTAGTCTCACCTGCCACC
CTGTTCCAGGGATTCTGTCCCCATCCTTCTACTTGCTGGCATGATAGGTAGACAATATGTCTGTACCACTAPGCTCTTGATGACTACCGAGTGG
AGTCTTATGAAGTCAAGGTTATGGGGTQTGGTGGTACACCCTGTTAAGTCCCACATCAAAGCAGCTCACAATACCTCTGCAGCCTGCGTTCAAG
GGGATCTAGTTCTCACTTCTGGCCTACACACACAGACACACAGACACACGGACACACAGGCACACAGACACACTGACACACTGACACACAGGCA
CACAAAGAAAAAACTTATCTTTTAAAACCAAAGTCAGTTGAGTGCAGTGGCATGTGCCTTTAGTCCCAGTGCTTGGGAGGCAGAGGCACAGAGA
ATCTCTGTGACTTCAAGGCTAGTCTGGTCTACTTAGTAAGCTCCAGGACAGCCATGGCTACACAGAGAGCTCCTGTCTCCAAAATGTTAATTAA
TTAAAAAAATAAAACTAAAGTAAAACATTTATTCAAGTACATAATTATTGTAAAGTTCTGAGACTAATTCCTTTACAACTATGGTTAAGTAAAC
AACTACTGACTTAGGTGTTCTGGGATATTTGAAATTCTACATATCTGTTGCTACACATATATACACGCACATACACATCTTGAGGCTAAATTAG
GATATGTGTCTAAGTTTTTCCAAGTGTTAGGCAAAAGTTTGTGTGTTAAAAGTGTGTAGGTTTAATACATTAAGGCAGTCAATAATATTCTCTA
AACATGATCCATTGTGTGAAAACCTTAAACACATCATTACTACCATCTGACGAATTTCTGCTGTATATTTAGTAAAATTCACGATTATCGGCTT
GTTTTATTTTTAATTATGTGTCCATACTTAATTATTTGAGTATATATATATATATATATATATATATATATATATATATATATAPATATATAPC
TGTGTAGGAGCATTGTAGACATGAGTACAGGCCCTTGGAAGCCAGATCCCACAGCTAAACCATCTCTCCAGCTCCTTGTTTTGTTTTATGAGAC
AGGGTTGTGTTACATAGTACTCCCTCATCCAGAACTTGCTATGTAGATCAAGCTTGACTAGAACTCACCACATAGTCAAAACTGGCCTTGAACT
CCTGGTTCTCCTGCCTCTACCTCCAATATACCATCATCCCCCAGTCAGGTGCCATTTGTATACTTCTCACACTTAAAATCTGGCCTGCAGCAAG
ATGTGGCAGCTTATATCCATGAGTCAAGCACACGCACCCCCAACTCTGACACGAGAGGATCACCAGAAGTTGCAGGCCAGCTTAGGCTGGCCTG
TAGTGTATGGTTCTGTCTCAAAAGAGAAAAAAAAGGAGAAAAGGAGTAAAGAAAGTGTAAAAAGCTTTGGGCTAGGGGTACAGCTCAGTTGATA
GATCACTTGCCTAGCATGTGCAAGCCCATAGGTCTATTATTAAATCTGCGGCAATCACATCATGTACCCCAACTCAGGTGTCGCCATCTGTTGT
CAATAAGCTATTTAAAAGAGGCAAATTAAAAGTGAAAAGCAGAGCCGGGCGTGGTGGCGCACGCCTTTAATCCCAGCACTCTGGAGGCAGAGGC
AGGCGGATTTCTGAGTTTGAGGCCAGCCTGGTCTGCAAAGTGAGTTCCAGACAGCCAGGCCTATACAGAGAAACCCTGTCTCGAAAATAACAAA
ACAAAACAAAACAAAACAAAACCCAAAAAGTGAAAAGCAAAAAAAAGTGATTTAGTCAATCAGGCCACATTGGGAAGAGGGATAAAGACCTCAA
TACAAGTGCTTCCTTCGAATAGCTTCAATTCTACCAGACCAGTCCCAATTCTACCAGACCAGTCCCAATTCTGAACTGGCACATGGTGTCTATG
TCTGAAACAAAAGGATAAATACAGTGACCGTAGGGATGGCAGCTTCAATATAGTGAGGGGTACCACACCTAAGAATCATTTTCCATGGCTCTTA
GTTACTGTTGGAAGGGGTGGGACAAGCAACTCCATTTCACTGGCTTGAGACAGGCTCCCATCAGGAGGTCTACACTGGCCTCAAATTTGGGATC
TGCTTGTCTCAGCTTCCCAGGCAAGTGCTACCATGCCTACTGTGACTTTATTTTCAGTCTAACCATCTCTCTACCCCCCATCTCTGAACAAATA
TTTTCTGAAGACATTGCTAATTGACCATCTGGTGGTTTGCTTTCCAAAGTCCCATGATGCCAGCCAAAGACTCCTTCTGGTTGGTCTGCTTTGA
ACCCCTTTGGCAGCGTAATGAGAGATGTCAGCAGCTACAACTAGTCAGCCTTTCAGGCCTGATTTAAACAACTGGGAATATAGAGGGATTGGCT
CCGAGGTCAGGTACACCTGAGGTCCATACACTTGTCCTGTGGCTAATGTCCTGCTGTCTCAATGATGCTGTTCGGGTTCATTTGTCAAAAGCCT
GACTTCTGTAGAACGTTAACAGACAGTTCACTTATAAGGCTCTGCAAAACAGAGTTAGTGGGCTGGAGAGATGGCTCAGTGGTTAAGAGCACTG
ACTGCTCTTCTGAAGGTCCCGAGTTCAAATCCCAGCAACCACATGGTGGCTCACAACCATCTGTAACAAGATCTGATGCCCTCTTCTGGAGTGT
CTGAAGACACCTAGAGTGTACTTACATATAATAAATTAATAAATCTTAAAAAAAAAAAACAGAGTTAGCAGGTATTTCGCAACCAGTAACTATA
ACACAGTACACAAACACTAGTTGGGGCTGGNNNNNNNNNNNNNNNNNNNNGAAACTGAGTCTGGGATGGTGAGACTCAAAGTTCCTGAAAACAG
ACCCTTGTCCCCACCCACCTGTTACTCTTCTCAGAGGAAGCCAGTAGCTTTGGCGTCATTTCAAAAGTTGGGCGGGGATGGCAGAGATAAGCAG
TGTGGGGGCAGGAGTACTGACCCCCCCCCCATAGAACAGGGAGGAACTAACGGGGCCCACAGTCTGCAGACACAACTGAAGTGGGCCAGCGGAT
AAAGCCGGAACCACGGGGTTTCTGAGAAAGTCAGATGGCAAGATACAACAGATAGGGATGAAGTTGGGGAGCACACAACGGGTCAACCCCAAAC
TCCTATGGGAGCTGTCAAGGGGTCCAAGGGATCTTGGTCCTGCATTCTGCCTCTGCAGAAGGAAAGAAAGGAAGGGGAAGAGAGAATAAAAAGA
GGAATGGAGGAGGCCTTGAAGAATGGGAGAAAGAGAAGCAAGGCTTGCCGGAGGAGGAGAAAGAGGAAGGTTAGAATAGGAAAGTAAAGGAGGA
AGGAAAGAGGAGACACAGAAAGAGGAAGAGAAATATGGTACATGAAAAGGAGGGACAGGAGCAAGCTGCGAGGGAAGGATGGACCAACAGAGAA
AGGAAGGGAATACAAGACAGTGGAAAGAGGAAAAGGGGAAGAAAAGAGGGAAGAAGGAAGACCTGGAGAGACCTGGAGATGAGGAAGATGGGAG
GAGGGATAGGAGAGGAAGAAGAGGGACTCAGAGGCAGCAAACTGATGGAGTAGTACAGGTATGACAGACAAGAGGCAACAGGAGGATGGGGAGA
GATCAGAGGAAGATCGGAGAAAGGGACAAAGGATGATGGAAGAAGACAAGAGACATGACAGCCTAGGCAGCCATGGAAGGGAAGGGGAGAAAAA
TAATCTGAGAGCCCAAAAGGAGACACACAGAGTCTCAGTGACAGATTCGGAGAAAGAGAAAAAAAAGGAGGGAAGAGCCAGGCGGTGGTGGCGC
ACGCCTTTAATCCCAGCACTTGGGAGGTGGAGGCAGGCAGATTTCTGAGTTTGAGGCCAGCCTGGTCTACAGAGTCAGTTCCAGGACAGCCAGC
GCTACACAGAGAAACCCTGTCTCGAAAAAAAAGAAAGAAAGAAAAAAGAAAAGAAAAGAAAAGAAAAGAAAAGAAAAGAAAGGAGGGAAGAGAA
TGTTTCTGTGTCTCACAACCCTTTCTGTCCTCACAGGTTCAACCCCAGTGTTCCCATGGATTTTCCTGGTCTAGCGGCCCTGGGGACCTCAGAA
CCCTTGCCCCAGTTTGTGGATTCTGCCCTGCTGTCCTCACCATCAGATTCCACAGGTTTCTTTTCCTCPGGTACCAGACATTTGGATGCAGCAT
CTTCTTCCACTTCCCCA~ATGCAGCCACGGCCGCAGCATCAGCACTGGCCTACTACAGAGAAGCTGAGGCCTACAGACACTCCCCAGGTAACTG
TTGGGTGGCTGCCTTGGCACTCGCTGGAAGCTGTCAGGGTTGCCATAGAGATGGTTAGCTAGTTCACAGTTCTGTCAGCTCATCTTGGAAAGAG
TTAGAGCTCTGTCGATAGGTGTACCGCCCCATTTGTACCAATCCTCGTCTCTGTCTGCCATACTAATAGTGAGCACACGGAGAAGCCAGGCTGG
AAGTGTGTACGAAGCTGTCTTATTTGTCACTTGACCTGCAGCCTCTTGGTCTCAATATCAAAAAGGGATGGAGGGGATCGTCCTTGCTATAGTG
ACCAGAGGGACATAGAACTCCGAAGTCACCCAAGCACCAAGAGACTATTGTAGGAAGACCAGAAAACTAGCCACCATGTTGGGACAGACGAACA
CCATTTCACTGTAAAAGTAGGACTACCTAAGGTTTGCTGTTCTTTCCTTTTCCTCTCTACCCCTTCAACAGTCTTTCAGGTGTATCCACTGCTC
AACAGTATGGAGGGAATTCCTGGGGGCTCACCTTATGCTAGCTGGGCCTATGGCAAGACGGCACTCTACCCTGCCTCAACTGTGTGCCCCAGCC
ATGAGGATGCCCCTTCCCAGGCCCTGGAAGACCAGAAACQGAAGAGCAACAACACGTTCTTGCACACCTTGAAGACGGAGCGGCTGAGTCCAGA
CCTCCTGACGCTGGGGACTGCACTGCCTGCATCGCTCCCTGTCACCGGCAGTGCTTACGGGGGAGCTGACTTTCCCAGTCCTTTCTTCTCTCCC
ACTCGGAGCCCTCTCAGCTCAGCAGCCTATTCTTCCCCCAAGTTTCATGGAAGCCTGCCATTGGCCCCTTGTCGTGAGGCTTTCAAAAAGGGAC
CAGGAGGTTGAGTTCGGCTAGGTGGCTCAAGACATAGCTAAGCTGACCGAGCCTTGCTTCCTTTTCTCTCCATCTACCAGAGGCCAGAGAGTGT
GTGAACTGTGGAGCAACGGCTACTCCACTGTGGCGGAGGGNNNNNNNNNNNNNNNNNNNNNNNNNNNNNNNNNNNNNNNNNNNNNNNNNNNNNN
NNNNNNNNNNNNNNNNNNNNCAGTGCTGGTGCATGCCTTTAATCCCACCACTTGGGTAGGCAGTAGGCACCTGGATTTCTGAGTTCAAGGCCAG
CCTGGTCTACAGAGTGAGCTCCAGGAACAGCCGAGGCTACACAGAGAACCCTGTCTCGAAAACCAAAAAAAATTTAAAAAAAGACTTATTTAAG
AACGCCACCTGGGCTGGTGAGATGGCTCAGTGGGTAACAGCACCCGACTGCTCTTCCGAGGTCCGGAGTTCAAATCCCAGCAGACCACATGGTG
GCTCACAACCATCCGTAACAAAATCTGACTCCCTCTTCTGGTGTGTCTGAAGACAGCTACAGTGTACTTACATATAATAAATAAATAAATCTTA
AAAAAAAAAAAAAAAAGAACGCCACCCAACTCATACTGGTCCCGGCACTATTATACTTGCCCTCTTCCTTATCCTTTCCCCATAGGGACCATCC
ATCCCTTTCCCATGCAGGAACCCCGCTACCTACCTAGAACTCCCATCCAAGGCCAGGAATTTTTACAGCTTCCCCAAGGGATTCTTGTGTTTGT
TTTGTTTTGTTGTCTGATTAATTGATTGATAGATTTGGTTTGTTTTTTGTTTGAAATGGGGCTTTCCTATATAGCCCTGGGTGGCCTGGAGCTA
TCTATACGATACTGGTTTTTAATTTGCTATGGTCCTCCTCTCTCTGTCTCTTGAGTGCCAGGGTTACACCCCTGTCTTCCTCCAAGACATTCTG
ATATGTGGTCAAAGTCTAAAACTAGAGATACAAGAAGTCTTGCATAGCTATAGAAAAGAAACTCCTTGCTGGGCAGTCGTAATGCATGCCTTTA
ATCCCAGAACTGGAGACAGAGCCACGTGGATCTCTTGTGAGCTCAAGACCAGCCTGGTCTACAGAAAAAATTCCAGGAGCCAAGGGCTACACAG
TGAAGCCTGTCTTGACAGATAAATACACACATACATAGATACATAGATCAATAAACTTCTTATCCCAGATAGGAACCCTTTCCTTAAATAGCAC
TCTCATCCCTTAAGCTCTTTTCTCAGGCCCTGTAAGGCCCTGTCCCCGAATCCTACCTCTCCCCTACCCCCAGCACTAATCTCCTGTCCTTTTA
TTCCTCAGATTGTCAGCAAACGGGCAGGCACCCAATGCACTAACTGTCAAACGACCACTACAACACTCTGGCGGAGGAATGCCAGCGGAGATCC
GGTATGCAATGCCTCCGGCCTCTATTTCAAGCTCCATCAGGTATGCTATCCTCCATGTTGCTTCCTGTCCTCCAAGCACACTCCCGGCTCCTCA
TCCAGCCCTCATCTACCTTGAGCTGTCTTCCTCTGCCTTTGCTTCCTCCCTCTTTGCTCCTCTTTCTCTTCTCAGAAGTTGTGTACTTGCGCCT
CCTTGCCCAATTTCCACGGCTTCCACCTCAAGCCTCCTTCCATCTGTCCTCTCTTTCCTCCTTGCCACCTCCCGTGATTTGAGTCTTGGCTACC
TCTTACCAGTGTAGGAGGATATTCTGAGCTGAGATCAGCGCCACACACAAGCACAGGTCTCACCTCCCTAGCACACCCTGGGTATATTACTCTA
GCCATTGAACTAATTCCCCATTCTTAACAAAGTGGTGTTAAGAGACTGTCCCTAGCCCAGCTACATCAGCACAAAGGGCTCGAGCTCGTAACCC
CTGTCGTGGTCTCCGTTTCTACAGGTGAACCGCCCACTGACCATGAGGAAAGATCGAATCCAGACGAGGAACCGCAAGGCATCTGGCAAAGGGA
AAAAGAAGCGGGGCTCGAATCTGGCTGGAGCGGGAGCGGCTCAAGGACCAGCTGGTGGCTTCATGGTGGTAGCTGCTAGCAGCAGTAGTGGGAA
TTGTGGGGGAGGTCGCCWCAGGCTTGGCACTGGGCACTGCAGGTACTGCCCACCTCTATCAAGGCCTAAGACCTGTGGTACTGTNNNNNNNNNN
NNNNNNNNNNNNNNNNNNNNNNNNNNNNNNNNNNNNNNNNNNNNNNNNNNNNNNNNNNNNNNNNNNNNNNNNNNNNNNNNNNNNNNNNNNNNNN
NNNNNNNNNNNNNNNNNNNNNNNNNNNNNNNNNNNNNNNNNNNNNNNNNNNNNNNNNNNNNNNNNNNNNNNNNNNNNNNNNNNNNNNNNNNNNN
NNNNNNNNNNNNNNNNNNNNNNNNNNNNNNNNNNNNNNNNNNNNNNNNNNNNNNNNNNNNNNNNNNNNNNNNNNNNNNNNNNNNNNNNNNNNNN
NNNNNNNNNNNNNNNNNNNNNNNNNNNNNNNNNNNNNNNNNNNNNNNNNNNNNNNNNNNNNNNNNNNNNNNNNNNNNNNNNNNNNNNNNNNNNN
NNNNNNNNNNNNNNNNNNNNNNNNNNNNNNNNNNNNNNNNNNNNNNNNNNNNNNNNNNNNNNNNNNNNNNNNNNNNNNNNNNNNNNNNNNNNNN
NNNNNNNNNNNNNNNNNNNNNNNNNNNNNNNNNNNNNNNNNNNNNNNNNNNNNNNNNNNNNNNNNNNNNNNNNNNNNNNNTACTGGATGAGGTT
GCAGGTATAATATGTCACAACTGAAACTCATGATGCACCAACCGAACTCTGTATCTGAAGCCTTGTGGACGGCATCCAGGTCGCCCCATATCTC
ATCGTAAGATGCTGGATGACTGATTACTTGTGGATGAGGTGGCGGGAGATGCCACCGTCTCATCAAGTTGCAGGTAAAACAGCATGTGGAGCTG
TGCGTGCAATAACAGGTCACCAGACATCGAAGGCTGTAAAGGTGTGCTTGTGCATGACTGCCCTATCGTTGACACAGTCTGACGACACATAAAC
TGGACATTTTTGAAACACTGAGCAAGAACTCAAGTGTAGGATTGTCCTGAAATCAAGGCCATTGAGGCCTACAAAGCAAATGATATACATATAG
TGGAGAGAGAGAGAGAGAGAGAGAGAGAGAGAGAGAGAGAGAGAGGATCTCAAAAATATAAATTAATCACAATAGTTTATATTCCTTTCAGAGA
CTGTCCACAATCGCCATGGCCCTATAAAAGTCCCCAAAGCAGCTCAGCCCTCAGCTCCCACACCTTGCAGACACCCCTTACCTGAATAGCAAGT
CTACTCAGAATTGCTCTTACACAGGWTCCTGGCCTTACCTTGAAAATAGAACCCAGGTTCACACCCTCATACAAACAGCTGCCCTGACTGGTGC
CGGAAGCACAGGCTAGCCCTGAGATCCTATGGAACAAGACCTCTTGCTCACTCTTGTAAACTCCCTCTCCTTCCGTCCTTCTCTCTTCCTCTCT
CTCCCCCTCCCTCCCTTTCTTCCTCTCCCTCTGTCCCTCCCTCTCCCAGCCTTTCCTTATCTCCCTGCTCTCACTCTCTCCTTTCCTCTCATGC
ACCTCAGGTCTCATACCTGCCGTGCAGTTCAAGCTTCCCTCTAGTTGATTTGTTTTTCTCGATTTTTCTGAGTGGGGGTCTCACTCTGTATGTG
ACCCAGGCTGGCTTATCTGCTCAGTAAGTATCCCAAATTCTGGCCTTGGACTCATGGCAATCCTCCTGCCTCAGCTAGGATTTCAGGCAAGAGC
CACTGCACCTCGAAGGGAGCCCTTTCTCCAATAATTCACAGGCAGCCCATCCTGACCTGGATACGACCCGCAQTCCCTACCAGCCCATTCAGCA
ATNNNNNNNNNNNNNNNNNNNNNNNNNNNNNNNNNNNNNNNNNNNNNNNNNNNNNNNNNNNNNNNNNNNNNNNNNNNNNNNNNNNNNNNNNNNN
NNNNNNNNNNNNNNNNNNNNNNNNNNNNNNNNNNNNNNNNNNNNNNNNNNNNNNNNNNNNNNNNNNNNNNNNNNNNNNNNNNNNNNNNNNNNNN
NNNNNNNNNNNNNNNNNNNNNNNNNNNNNNNNNNNNNNNNNNNNNNNNNNNNNNNNNNNNNNNNNNNNNNNNNNNNNNNNNNNNNNNNNNNNNN
NNNNNNNNNNNNNNNNNNNNNNNNNNNNNNNNNNNNNNNNNNNNNNNNNNNNNNNNNNNNNNNNNNNNNNNNNNNNNNNNNNNNNNNNNNNNNN
NNNNNNNNNNNNNNNNNNNNNNNNNNNNNNNNNNNNNNNNNNNNNNNNNNNNNNNNNNNNNNNNNNNNNNNNNNNNNNNNNNNNNNNNNNNNNN
NNNNNNNNNNNNNNNNNNNNNNNNNNNNNNNNNNNNNNNNNNNNNNNNNNNNNNNNNNNNNNNNNNNNNNNNNNNNNNNNNNNNNNNNNNNNNN
NNNNNNNNNNNNNNNNNNNNNNNNNNNNNNNNNNNNNNNNNNNNNNNNNNNNNNNNNNNNNNNNNNNNNNNNNNNNNNNNNNNNNNNNNNNNNN
NNNNNNNNNNNNNNNNNNNNNNNNNNNNNNNNNNNNNNNNNNNNNNNNNNNNNNNNNNNNNNNNNNNNNNNNNNNNNNNNNNNNNNNNNNNNNN
NNNNNNNNNNNNNNNNNNNNNNNNNNNNNNNNNNNNNNNNNNNNNNNNNNNNNNNNNNNNNNNNNNNNNNNNNNNNNNNNNNNNNNNNNNNNNN
NNNNNNNNNNNNNNNNNNNNNNNNNNNNNNNNNNNNNNNNNNNNNNNNNNNNNNNNNNNNNNNNNNNNNNNNNNNNNNNNNNNNNNNNNNNNNN
NNNNNNNNNNNNNNNNNNNNNNNNNNNNNNNNNNNNNNNNNNNNNNNNNNNNNNNNNNNNNNNNNNNNNNNNNNNNNNNNNNNNNNNNNNNNNN
NNNNNNNNNNNNNNNNNNNNNNNNNNNNNNNNNNNNNNNNNNNNNNNNNNNNNNNNNNNNNNNNNNNNNNNNNNNNNNNNNNNNNNNNNNNNNN
NNNNNNNNNNNNNNNNNNNNNNNNNNNNNNNNNNNNNNNNNNNNNNNNNNNNNNNNNNNNNNNNNNNNNNNNNNNNNNNNNNNNNNNNNNNNNN
NNNNNNNNNNNNNNNNNNNNNNNNNNNNNNNNNNNNNNNNNNNNNNNNNNNNNNNNNNNNNNNNNNNNNNNNNNNNNNNNNNNNNNNNNNNNNN
NNNNNNNNNNNNNNNNNNNNNNNNNNNNNNNNNNNNNNNNNNNNNNNNNNNNNNNNNNNNNNNNNNNNNNNNNNNNNNNNNNNNNNNNNNNNNN
NNNNNNNNNNNNNNNNNNNNNNNNNNNNNNNNNNNNNNNNNNNNNNNNNNNNNNNNNNNNNNNNNNNNNNNNNNNNNNNNNNNNNNNNNNNNNN
NNNNNNNNNNNNNNNNNNNNNNNNNNNNNNNNNNNNNNNNNNNNNNNNNNNNNNNNNNNNNNNNNNNNNNNNNNNNNNNNNNNNNNNNNNNNNN
NNNNNNNNNNNNNNNNNNNNNNNNNNNNNNNNNNNNNNNNNNNNNNNNNNNNNNNNNNNNNNNNNNNNNNNNNNNNNNNNNNNNNNNNNNNNNN
NNNNNNNNNNNNNNNNNNNNNNNNNNNNNNNNNNNNNNNNNNNNNNNNNNNNNNNNNNNNNNNNNNNNNNNNNNNNNNNNNNNNNNNNNNNNNN
NNNNNNNNNNNNNNNNNNNNNNNNNNNNNNNNNNNNNNNNNNNNNNNNNNNNNNNNNNNNNNNNNNNNNNNNNNNNNNNNNNNNNNNNNNNNNN
NNNNNNNNNNNNNNNNNNNNNNNNNNNNNNNNNNNNNNNNNNNNNNNNNNNNNNNNNNNNNNNNNNNNNNNNNNNNNNNNNNNNNNNNNNNNNN
NNNNNNNNNNNNNNNNNNNNNNNNNNNNNNNNNNNNNNNNNNNNNNNNNNNNNNNNNNNNNNNNNNNNNNNNNNNNNNNNNNNNNNNNNNNNNN
NNNNNNNNNNNNNNNNNNNNNNNNNNNNNNNNNNNNNNNNNNNNNNNNNNNNNNNNNNNNNNNNNNNNNNNNNNNNNNNNNNNNNNNNNNNNNN
NNNNNNNNNNNNNNNNNNNNNNNNNNNNNNNNNNNNNNNNNNNNNNNNNNNNNNNNNNNNNNNNNNNNNNNNNNNNNNNNNNNNNNNNNNNNNN
NNNNNNNNNNNNNNNNNNNNNNNNNNNNNNNNNNNNNNNNNNNNNNNNNNNNNNNNNNNNNNNNNNNNNNNNNNNNNNNNNNNNNNNNNNNNNN
NNNNNNNNNNNNNNNNNNNNNNNNNNNNNNNNNNNNNNNNNNNNNNNNNNNNNNNNNNNNNNNNNNNNNNNNNNNNNNNNNNNNNNNNNNNNNN
NNNNNNNNNNNNNNNNNNNNNNNNNNNNNNNNNNNNNNNNNNNNNNNNNNNNNNNNNNNNNNNNNNNNNNNNNNNNNNNNNNNNNNNNNNNNNN
NNNNNNNNNNNNNNNNNNNNNNNNNNNNNNNNNNNNNNNNNNNNNNNNNNNNNNNNNNNNNNNNNNNNNNNNNNNNNNNNNNNNNNNNNNNNNN
NNNNNNNNNNNNNNNNNNNCCCTGTCTCAAAAACAAACAAAACAAAAAACCCAAACCAAAAACAAACAAACAAACAAACAAAGCACAGCTGAGG
TACATCAGTTAGTAAAGTGCTTGCCTTACAAAGACCAGGACCTCAATTTGACTCCCAGAACTTTGGTAATACAGGTCATCTTGCGGGAGCATAC
TTATAATCCCAGTACTCATCCAAACTGGCAAACCCCTGGGATTTCCTGGCAAACCCACTTAGCCTATTTGAGGAATCCCCAGCCAGTGAGAGAA
ACTATCATGAAAATGTGCTCTGGGGCTGGTGAGATGGTTCAGCGCATAGGAGCACTTGACTGCTCTTCCCAAGCTCCTGAGTTCAAATCCCAGC
AACCACATGGTGGCTCACAACCACCCATAATGAGATCTGATCCCCTCTTCTGGCACATCTGAAGACAGCTGCAATGTACTTATGCATAATAGTA
AATAAATCTTAGAAAAAAAAAAGAAAATGTGCTGTGTCTCACAAACAACATCTGAAGTGGTGCTCTCGACTTTACATACATGTCAATTCTCCTC
TACACACAGTAACACACATACACAAACCCACTCACATGCATGTCAGGAAAAAGACGACACATAAGCCACACTCTGAATTCCATAAACGCCTGTC
TGGACCCCGCATTAGACCCTTCAGCTTGAATATACAAGATTTCACAGATCTGTCTACTCCAGGAACTTGGGTCCAATGCTGTACACATACACCT
AGATTTTTAAAAAATTATTGTTTGATGAATCTTTGGGATGTTTTTATACTAGCCTGTCCCTGTGGGTTGTTAGGATCCCTGCGTTGTGAACTAT
TTTATGTTGGGCACAAATGTTTTTAAGTGCAGAAGAAGTTAAAGCAAGAGCATTGTTTGTCTTGTGGCACCACCGATGGTCCACAGAGGCAAAT
GTCAGTGTGCAATCGGATGTTTTCACAAGCACCCCCTGTGTGAGTGGAGGCATAACAACTGGGAACAGATATAAACAGATkGCATGCACAAAGG
TCATTCTCCCAAAAGAGGAGGCACAAGGAATATCCATCTGGCAAAGGGCATTCGTCCATAACCCTCTGGGCTAAAGTTGTCATATGTGATACCT
GACTTATTATATAAGTTTCTGGCTTGACCAACTACTGAAAGCCACTCTTCTGGCTTTAATATAATCTTATATCTTAGTCTGTATAGAAAAACAG
CGCCTTCACATCCTTCCCTCTTCCTCAATCATGTCTCATAACGTTTGTTTGTTTGTTTGTTAGTTTGTTTTGTTTTTCTCTAGACAAGGTTTTT
CTCTGTAACAGCCCTGGCTGTCCTGGAACPCACTCTGTAGACCAGGATGGCCTTGAACTCAGAATCTGCCTGCCTCTGCCTCCCTAGGTACTGG
GATTAAAGGCATCCCCCCCCCCCCCACCCCCCAGAATGTCTCTAMTTACCAGCTAAATTATAATCATTCTCCTGAGACCAGACAAGTACACATA
GAGAAATTCTTACCTTTGCAGTAAAAGAATTCCTGTGCCAGGCTTGGGGCTGTAGCTCAGTGGCAAAGCACTTGCCTAGTGTGTATGAGTGCCT
GGGTCCCATCCCCATGCCTGCATAAAAGAAAACATGTCAGTCACTGTGATTTGAAATCAATACAACTATTTTTCCAGACTTATTTTGAATTATA
TCCAGAAGTGCCGTCCACCGCTTCTAGGGCCCTCCCACAAGAGCTTCTCACCGGAGCCTCCACTTTCTGCTTCCCTACCCACGAACTTCGTAAC
AAGAACTCCAAGTACCCGGAGGAAAGTAGTCAGAAAATGAATTACCTGGGTCCCTGAATTACCAACAGTCAGTATTCTGATTGGGGCTTATATG
AGAAAGAAGAAATATTTACTTGTGCTGGCTGGGTTTTCCCCATGATTTATTTATTTTTACTCACATTACGTCCCCATCTGCAGCACACCCTCTT
GTTCTTGGTGGTCATCCCATGGTACTGGCATCTCCAAAACTGCTGGGGTCTTGCACTACAATTGGGCTGCACTTTCACCAATAGGTTCTGTTCA
CGGTGCCAAGCCTCAACTTCTCTCCATGACCCCATCAATCTTGGAGCTTCATTTGCTATGGAGGCTCCACTTTCAGCAATGGCCTCTCCTGGCT
CTCACAGTGCTAGGCGTCAGCTGCTCTCCATGAACTCTCTACGCCTTCAAACCAGTACCACCTGGGTGACTCTTACACTGCCAAGTTCAGCTGA
TAGCCCAAGGTACAAACTTGCCTGCCTCTCGAACATAGCTTTTAGATTTCACCTTGACACTGCTGCTCCTCTCCTCTACCTCCTCCTCCTCCTC
CTCCTCCCCCTGCTTTTCTTTCTCTCTTCCTTCCTTTTTCTTTTTCTTTTGCCCCGTCTGTCCTGGAACTCACTCTGTAGACCAGGTTGGCCTC
AAACTCAAGAGATCCACCTGCTTCTGCCTCCCTATTGCTGGGATCAAAGGCATGGACCACTTCCACCTGGCATTAAGATTTTTTATTTTTGTGG
ATCTGTGTAAGTACACTATAGCTGTTTTCAGACACACCAGAAGAGGGCATACGATCTCTATAGATGGTTGTGAGCTACCATGTGGTTGCTTGGA
TTTGAACTCAGGACCTCTGGAAGAGCAGTCAGTGCTCTTAACAGCTGAGCCATCTCTCCAGCCCTCTGGTCTCTTCTAAATCACCATTAATTTC
TCATCTACAGATGAGCAGAACTGAATATCCCAGCAAGACAAAGGATTCACTTAAGCAGTTGTGCTAGCTTGTTAAATCTTCAGCCCCTACTGAC
CAGAACCATGGAATATTAATTCAAAACAACAAATGGCCCCAGTAGTGTCTTTAAACTTCTCCCTGTCACTTCACAAGCCAGGTCTCTATCCTCG
GCATTGCTCTCAAGAGTCTCATCTTCCAACCTTTTACAGAACAGCTCATCAAGCAATGAACACCCTCCCCAAAACAACATCGCCAGGGTTGTCA
CAGCAATGCCCCGCTCCTAACACCAACTTGTCTGAGTTAAGGTTACTATCTCTGGGATGGAACACCATGACCAAAAGCAACGTGCAGAGGAAAG
GGCTCATTTCACTCACAGTTCCACGTCATAATAGGTAATCATCAAAACCAGTCAGGACAGGAACTCCTACGGCAGaAACCTGGAGCCAGGAGCA
GATACAGAGACCATGGAGGGTGCTAATTACTGGATTGTTCCTCATGGCTTGCTCAGCTGCTTTCTGAAACAATCCAGGACCACCAGCCCAGGAG
TGGCGCCACCCACAATGAGCTGGGCCCTCCTCCTCAATCACTAATTAAGAAAACGCCTCAGGAGAGGCCTGCAAACCCCAGGCCACAACAATAG
ACCATCGCCCTTCCCACTATCAGAGAGGCTCTATTTAGCACCTGATGGGAGCAGATACGGAGACCTGCAGCGAAAAATTAGGCACCTCTGGAAA
CCCCAGCGAAGAGGGGGAGGACAAGTTGTAGACGTCACAGCGATCAAGGATTCCAGCAGGACACTGCCCACGGAATCAGTGAAGCAGGGCTCAT
AGGGGCTCAAAGACACCGAACCAACAACCAGGAGCCTGCATGGAGTTTGCTAGACTCTCTGCATATGCTACGGTTGTATAGCTTGGTGTTCTTT
CTCGACTCCTAACAATGGGAGCAGGGGCTGTCTCTGACTTTTTTGCCTGCTTCAGGGACCCTTTTCCTCCTACCGACTGGCCTGGTCCAGCCTT
CATGTGAGGCTCTGTGGCTAGTCTTACCCCATCTTGTTATTGCCGTGTTTAGCAGGTATCCGTGGAAGGCCTGTTGTCTTCTGAAGGGAAAATG
CAGGAGAAGTGGATCTCGGAGAGAGGGGATTGGGAAGGGGTGGAGGGAGGGCAAACTGCTTTTGAGATGTAATGTAGGAGAGAAGAAGAAAAAA
GATTGATACAAATAACTGTCCTCTAAGTACCCAAGAATAGAAACATAACCATTTAGAGAGGGGCAAAGAAAGCCTTACAGGCCTGCCTACACCC
TGATCTTACGGAGGCATTTTCTTTGCTTTTTATAATTTTGCTAGTTATGATACATAATCTAATATTTTTAGAAGAGAGAGGGTTGTCAAGGGGG
TCATAACCCGCAGGTTGAGAAGTACTGTTTTAAGTTGCTGAACTAGAGAGATAGATGCCTTCAGTGCTTGAGTCCCAGCACCCACATCTAAAGG
CTCACAAACACTTCTCACTCCACCTCCTGGAGGATCCAGTGTCCTTTCTTGCCTCCTTAGGCATACACACAGGCAAAATCCATGAAGTATGCTG
GGCATGGTGGCACATGCCTTTAATCCAGCACTTGGGAGGCGGAGGCAGAGGCAGAGGCAGAGGCAGAGGCAGAGGCAGAGACACATGCATCTCC
GTAAGTTGGAGGCCAGTCTGGTCTACATAGTTAGTTCCAGTACAGGTGGGACTGCATGGAGAGACCCTGTCTCAACAAATAAGTAAACAAGTAG
CAGAGGAAGATGGCGGCCGCCTTAGCTGTTCCTGGAGCGGGATCTGCAGTGGTCTTTGGGCCTGAGGCTCTCACCCCAGACTGGGAAAACTGAG
AAGTCTCCACACGGACCATGATCATGGCTTTGTAATTTAATGGAGGCGTGGTTCTAGGAGCAGACTCCAGAATAACACTGGGTTTTACATCGCC
AATCGACTGACTCACAAGCTCACCCCTATTTATGATTACATCTGCTGCTGCTCAGGCTCAGCAGCTGATACCGGAGCAGTAGCAGATGCTGTCA
GTTACCAGCTTGGTTTCCACAGTATTGAACTGAACAATTCTCCACTAGTACACATGGCTGCCAGGCTCTTTAAGGAGATGTGTTACCGGTGCAG
AGAAGATCTGATGGCAGGAATCATCATTGTAGGCTGGGACCCTCAAGAAGGAGGGCAGGTGTCCTCTGTACCCATCAAGCGTATGATGGTAAGA
CAATCTTTTGCCACCGGAGCCTCCGGAACCTCATACATCTATGACTATGTTGCTGCTATCCATCCTGAAGGCACGACCAAGGACGAATCTCTGC
AGTTCACTGCCAATGCTCTCTCTTTGGCTAGAAAACACGAAGGCTCCAGTGGAGGAGTTATCCGCTTGGCAACCATTCAAGGATCAGGGGTAGA
GCGGCAGGTGCTTTGAGGAGACCAGATCCCCAAGTTTACCACTGCCACTTTGTCACCTCCCTGAAGCCTAGATGCAAAAGCTAATAAACAGTGT
TAAAGAAAAAAATAAGTAAACAAATATAATTTTTAAAACAAATGGTTGGCTCCGTGGTCGTCGCGCATGCCTTTAACCCCAGCACTTGGGAGGC
AGAGGCAGGCAGATTTCTGAGTTCGAGGCCAGCCTGGTCTACAAAGTGAGTTCCAGGACAGCCAGGGATATACAGAAAAACCCTGTCTCAAAAA
CAAACAAACAAACAACAAAAAATACCAAACAAACAAACAAAAAACCCCAAATGGTTGTTAAGCTGGGCAGTGCTGGCACATTCCTTTAATCCCA
GCACTTGAAAGGCAAAGGCAGGTGAATTTTTGAGTTCGAGGCCAGCC~GGTTTATAAAGTGAGTTCCACGACAGCCAGGGATATACAAAGAAAC
CCTGTTTCAAAAAAAAAAAAAAAAA
MOUSE SEQUENCE—mRNA
ACTCGTCATACCACTAAGGTGGCTGAATCCTCTGCATCAACAAGCCCAGGTTCAACCCCAGTGTTCCCATGGATTTTCCTGGTCTAGGGGCCCT
GGGGACCTCAGAACCCTTGCCCCAGTTTGTGGATTCTGCCCTGGTGTCCTCACCATCAGATTCCACAGCTTTCTTTTCCTCTGGGCCAGAGGGT
TTGGATGCAGCATCTTCTTCCACTTCCCCAAATGCAGCCACGGCCGCAGCATCAGCACTGGCCTACTACAGAGAAGCTGAGGCCTACAGACACT
CCCCAGTCTTTCAGGTGTATCCACTGCTCAACAGTATGGAGGGAATTCCTGGGGGCTCACCTTATGCTAGCTGGGCCTATGGCAAGACGGCACT
CTACCCTGCCTCAACTGTGTGCCCCAGCCATCAGGATGCCCCTTCCCAGGCCCTGGAAGACCAGGAAGGGAAGAGCAACAACACGTTCTTGGAC
ACCTTCAAGACCCAGCGGCTGAGTCCAGACCTCCTGACGCTGGGGACTGCACTGCCTGCATCGCTCCCTGTCACCGGCAGTGCTTACGGGGGAG
CTGACTTTCCCAGTCCTTTCTTCTCTCCCACTGGGAGCCCTCTCAGCTCAGCAGCCTATTCTTCCCCCAAGTTTCATGGAAGCCTGCCATTGGC
CCCTTGTGAGGCCAGAGACTGTGTGAACTGTCGAGCAACGGCTACTCCACTGTGGCGGAGGGACAGGACAGGTCACTACCTGTGCAATGCCTGT
GGCTTGTATCACAAGATGAATGGTCAGAACCGGCCTCTCATCCGGCCCAAGAAGCGAATGATTGTCAGCAAACGGGCAGGCACCCAATGCACTA
ACTGTCAAACGACCACTACAACACTCTGGCGGAGGAATGCCAGCGGAGATCCGGTATGCAATGCCTGCGGCCTCTATTTCAAGCTCCATCAGGT
GAACCGCCCACTGACCATGAGGAAAGATGGAATCCAGACGAGGAACCGCAAGGCATCTGGCAAAGGGAAAAAGAAGCGGGGGTCGAATCTGGCT
GGAGCGGGAGCGGCTGAAGGACCAGCTGGTGGCTTCATGGTGGTAGCTGGTAGCAGCAGTAGTGGGAATTGTGGGGAGGTGGCCTCAGGCTTGG
CACTGGGCACTGCAGGTACTGCCCACCTCTATCAGGGCCTAGGACCTGTGGTACTGTCAGGGCCTGTCAGCCATCTTATGCCTTTTCCTGGACC
TCTGCTGGGATCGCCTACAACCTCCTTCCCCACCGGTCCTGCACCTACCACCAGCAGCACCAGCGTGATCGCCCCACTCAGTTCTTGAAGGTAC
ACAGAATAGCCTTGACCTTGTGGCAGAGGAGACCCCCCCTTTTTTTGGAGACAGGATCTTCTGTAGCTATGTAGCTATGAACTATGTAGATAAG
GGTGACCCCACATTTCCCATTCTCCTGCCTCTACCTCCCGAGTACTGAGATTCAGGCATGTATTGCTATGCCTGACATTTTCCTTCCTTTCAGT
TTTGTTTTGTGGGGTTTGTTGTTGTTGTTTTGAGACAGGGTTTCACTATGCAGCCTAGGCTGGCTTTGAATTCCTTATGTAGTCCAGACTAAGC
TCCAGCTTGAGATCCTTGTGCCTCAGTTCCTGAGTGCTGGGATTACAGGCATGTGCTACCGTGCCCGTTTCTCCCTCCTCTTAGAGCCACTGGC
CTTTACAGCCCAACCATCTCCTTGCCCTGCACCCTTAAAGATTTTGTAAAATAAAACCACCTGGAGACATGCGCTGGTATTTGGTTAAATAAAT
GTCAGTGTCAAGTGGAGCATG
MOUSE SEQUENCE—CODING
ATGGATTTTCCTGGTCTAGGGGCCCTGGGGACCTCAGAACCCTTGCCCCAGTTTGTGGATTCTGCCCTGGTGTCCTCACCATCAGATTCCACAG
GTTTCTTTTCCTCTGGGCCAGAGGGTTTGGATGCAGCATCTTCTTCCACTTCCCCAAATGCAGCCACGGCCGCAGCATCAGCACTGGCCTACTA
CAGAGAAGCTGAGGCCTACAGACACTCCCCAGTCTTTCAGGTGTATCCACTGCTCAACAGTATGGAGGGAATTCCTGGGGGCTCACCTTATGCT
AGCTGGGCCTATGGCAAGACGGCACTCTACCCTGCCTCAACTGTGTGCCCCAGCCATGAGGATGCCCCTTCCCAGGCCCTGGAAGACCAGGAAG
GGAAGAGCAACAACACGTTCTTGGACACCTTGAAGACGGAGCGGCTGAGTCCAGACCTCCTGACGCTGGGGACTGCACTGCCGGCATCGCTCCC
TGTCACCGGCAGTGCTTACGGGGGAGCTGACTTTCCCAGTCCTTTCTTCTCTCCCACTGGGAGCCCTCTCAGCTCAGCAGCCTATTCTTCCCCC
AAGTTTCATGGAAGCCTGCCATTGGCCCCTTGTGAGGCCAGAGAGTGTGTGAACTGTGGAGCAACGGCTACTCCACTGTGCCGGAGGGACAGGA
CAGGTCACTACCTGTGCAATGCCTGTGGCTTGTATCACAAGATGAATGGTCAGAACCGGCCTCTCATCCGGCCCAAGAAGCGAATGATTGTCAG
CAAACGCCCAGGCACCCAATGCACTAACTGTCAAACGACCACTACAACACTCTGGCGGAGGAATGCCACCCGAGATCCGGTATGCAATGCCTGC
GGCCTCTATTTCAAGCTCCATCAGGTGAACCGCCCACTGACCATGACGAAACATGGAATCCAGACGAGGAACCGCAAGGCATCWGCCAAACGGA
AAAAGAAGCGGGGGTCGAATCTGGCTGGAGCGGGAGCGGCTGAAGGACCAGCTGGTGGCTTCATGGTGGTAGCTGGTAGCAGCAGTAGTGGGAA
TTGTGGGGAGGTGGCCTCAGGCTTGGCACTGGGCACTGCAGCTACTGCCCACCTCTATCAGGGCCTAGGACCTGTGGTACTGTCAGGGCCTGTC
AGCCATCTTATGCCTTTTCCTGGACCTCTGCTGGGATCGCCTACAACCTCCTTCCCCACCGGTCCTGCACCTACCACCAGCAGCACCAGCGTGA
TCGCCCCACTCAGTTCTTCA
HUMAN SEQUENCE—GENOMIC
AGCAGCTTTCCATCTCTGCTGTGACTGCAGGCCGTATTTGTCACATTCTTCTCTGCTTATTTTATGTTTTACAGCAAGATTCTCGGCAGTCATT
GCCATGGGGAGCTGGACATGCTGATCTGTTAATCCTATCCATAAAGAATCTTCCAGCTTGATATCTGATCCAAGCTTGGTTCCAAAACACACAT
TTCTGACACAGTAGGGAGCTTGGCTCATGCTTTTGGTTCCTCCGCATAAAACAACTTCAGCTTCTTTAACACAAATTTCCTAACACCTATTCAC
AGTGGACTGAAAACCAGAACCACAGAGCCTATTAATCGTGAGAGCTGGGGTCTCCTTTCGGATTCCCACACGCAAACCAACATGCCTTGCCAAA
AAATATGGAACGCTTCACGAATTTGCATGTCATCCTTGCGCAGGGGCCATGCTATATCTTCTCTGTATCGTTCCAGTTTTAGTATATGTGCTCC
CGAAGCAAGCATGGAGATGATTTTTTTAAAATGGTTAGATTCTGGAGATATTTTGAACATAGGGACTGGATGAGTTCAACAAAAAAGAGGATGT
CAGCTAGAGAAGAGGCCTGAGGACATTTTGGGTTCTAAAACAAGAGAAGGGACAGACAGATGACTCAGGCAAGTGGGAACGGAAGTGTGTGGAT
TCCTGAGTGAAGGAGTGATGGATGGAGGAGCATGCGTGAGAGTCTCCTGAAGTAAAGGAGCCCCTGGTCTTCTGGACTCTGGTCGCTAAATAGT
CTTCAGACGGTAGTTCAGCCAGACCCTGTGACTGAACCGCCAAGGAGCCCCAAGAGTGCTGCCAAGAGAGCGAGTGTGAGGATATGAGTTTTAG
CAAGTAAAAGGCTTTCCTAAAACCTGTAGCATTTTCTGGCAGTGGAAAAAAAGAGGAAAGGGGTTTTCTGCCTCATTCTAAAAGACAATTTGCC
ATGCACCCAGACATTATATGCCTGAAGATGGATGATTTATGGATGAAAGGAAAGAGAAAATGAAGGAATAGAAGAAGGAAGGAAGGAACAGATG
GGTGGATGGGTGAGTGGGTAGGTAGATGAATGAATGGGTAGATGCTCTGATATTTCCTCCCTCCTCCCCCGAGAAACTCCTTCACAGGTGTGCA
CAGAGAGAGGAATATGAGTTTATGAATTGCAGATTTGCTATAATAGGGAAAGAAACTAGAAACAATGCAAATGTTCATCAACAGATTAGTGGTT
AAACAAAATGTGGTATATCCATTCCATGGAATATTACTTTCAATAAAAGGGAACGAACTTATGAGGCCAGCATTACTCTGATGAGAAAACTAGA
CAAAGATATCACAAGAAAAACTACAGACCAATATCTAAGTATACATGCAAAAAPCCTCAAAAAAATACAAGTAAGTAGAATCCAGCAACATATA
AAAGGATTATACACCACGGCCAAGTGGGAWTTATCCCAAGAATGCAAGGTTTGGTCAACTAATGAAAATCAATCAATATAATGCATCATATTAA
CATAATAAAGAACAAACACCACATGATCTTTTCAGGAGATGCAGAAAAAACATTTGACAAAATTCAACATTCCTTCATGATAAAAACACTCAAC
AAACTAGGAATAGAAGAGAACTTCCTCAACCTGATAAAGGACATCCACAAAAAACCCACAGCTAAGATCATACTTAATGGTGAAAGTTGGAAAC
GAACAACACAAGGATGCCCCTTCTTACCATGTCTTTTCAACACTGTATTGGATGCTCTACCTGGGGCATTAGGCAACAAAAAGAAATAAAACCT
ATCCATATTGGAAAGGAAGAACTAAAACTATCCCTATATGCAGATGACATGATCTTATACATAGAAAATGTTAAGGAATCCACCACGAAACCAT
TAGAGCCCCATTAGTGCATAACCATTAGAGCAAGGTTGCAGGATATAAGATTTTGTATCATATATGCTAGCAATTAACAATCCAAAAGTGAAAT
TAAGAAAACTATTCCATTTACAATAGCTTCAAAATGAATAAAATACTTAGTAATAAAATGAATGAAAGAAGGGTAAGACTTATACACTGAAAAC
CATAAAATATTATTGAAAGAACTTAAAGAAGACCTAAATAAATGGAAAGACATCACATGTTCATGGATTGGAAGACTTTATAGTGTTAAGATGG
CAATACTCCCCAAATTGATCTACAGACTTGATGCAATCCCTATCAGAATCCCAGCTTGCTTCTTTGCAGAACTGACAAGCTGATTCACATGGGA
GTGCTAGGGGCCCAAAATACAACAATCTTGAAAAAGAAAAACAAAGTTAGAGGACTCACACCTTCCAGTTTAAAAACTTACTATACAGCTACAG
TAATCAAGACCATGTGCTACTGGCATAAAAACATACATATAAATTAACGAAATAGAATTGAAAGTCCAGAAATAAATTCATACATTATAGGCAA
CTGATTTTTTTGAGACACGGACTTGCTCTGTTGCCCAGTCACAAACATAGCTCACTGCAGCCTCAAACTCCTGGGCTAAGCGATACTCCCACAT
CAGCCTCCCAAGTAGCTGGGACTACAGGCATGCACCACTGTGCTCAGCTAATTTTTAAAAAACTTTTTGTAGAGACAGGGTCTCAATGTGTTGG
ACAGGCTGAACTCCTGGGTTCAAGTGATCCTCCCACGTTGGCCTCCCAAAATGCTGGGATTACAGGTGTGAGCCACTGTGTCCAGCTAGCAATT
GATTTTTGACAAGTGTACCAAGACCATTCAATGCGCAAAGAATGCTCCTTTCAACAAATGGTGCTGAGACAGCTCAGTATCCACATGCAAAACA
ATAAAGTGGGACCCCTTCCTCATACCATATACAAAAAACAACTCAAAACAGATCAAAGACCTAAATGTAAGAGCTAAAACGATAAAACTTTTAG
AACGGGGGTCCCCAACCTCCAGGCCACAAACCCATCTGTGGTCTCTTAGAAACTGGGCCACACAGCAGGAGGTGACCTGCGGCTTGCTGCCATT
CATGAAGCTGAGCCCGCCTCNNNNNNNNNNNNNNNNNNNNNNNNNNNNNNNNNNNNNNNNNNNNNNNNNNNNNNNNNNNNNNNNNNNNNNNNNN
NNNNNNNNNNNNNNNNNNNNNNNNNNNNNNNNNNNNNNNNNNNNNNNNNNNNNNNNNNNNNNNNNNNNNNNNNNNNNNNNNNNNNNNNNNNNNN
NNNNNNNNNNNNNNNNNNNNNNNNNNNNNNNNNNNNNNNNNNNNNNNNNNNNNNNNNNNNNNNNNNNNNNNNNNNNNNNNNNNNNNNNNNNNNN
NNNNNNNNNNNNNNNNNNNNNNNNNNNNNNNNNNNNNNNNNNNNNNNNNNNNNNNNNNNNNNNNNNNNNNNNNNNNNNNNNNNNNNNNNNNNNN
NNNNNNNNNNNNNNNNNNNNNNNNNNNNNNNNNNNNNNNNNNNNNNNNNNNNNNNNNNNNNNNNNNNNNNNNNNNNNNNNNNNNNNNNNNNNNN
NNNNNNNNNNNNNNNNNNNNNNNNNNNNNNNNNNNNNNNNNNNNNNNNNNNNNNNNNNNNNNNNNNNNNNNNNNNNNNNNNNNNNNNNNNNNNN
NNNNNNNNNNNNNNNNNNNNNNNNNNNNNNNNNNNNNNNNNNNNNNNNNNNNNNNNNNNNNNNNNNNNNNNNNNNNNNNNNNNNNNNNNNNNNN
NNNNNNNNNNNNNNNNNNNNNNNNNNNNNNNNNNNNAACCTACAGAAGCACAATATTTGAAAATCACATATCTAAAAAGGAGTCTAGTATCCAG
CAATACATAAAGAACTCTTACTACTCAACAATAAAAGGACAAATAACCCAATTCAATGGGCAAAGGATTTAAATAAAAACACTTCTCCAAAGAA
GATAAATGGGCTGGGCACGGTGGCTCATGCCTGTAATCCCAGCATTTTGGGAGACTGAGGCGGATGGATCACTTGTGGTCAGGAGTTCGAGACT
GGCCTGGCCAACATAGTGAAACCCCATCTCTCCTAATAATACAAAAATTAGCCAGGCATGGTGGCGGGTGCCTGTAATCCCAGCTACTCAGGAG
ACTGAGGCAGGATAATCACTTGAACCCAGCAGGTGGAGGCTGCAGTGAGCCAAGATCGTGCCACTGCACTCCAGCCTGGGTGACAGAGCAAGAC
TACATCTCAAAAAAAAAAAAAAAAAAAAAAAGAAGATAGATGACCAACAAGTTTATGAAAATATGCTCAACATCAGTGGTCACAGGGAAATGCA
AATCAAAACCATAACAAGAWACCACTTCACACCCACACCCAGTAGGATGGCTAGAATCAAAAAGAGGGACAATAGAAAGTGTTGGAGGCCAGGC
ATGGTAGCCTGTAATTCCAGCACTTTGCAAGGCCAAGGCAGGCAGATTGCTTGAGCCCAGTAGTTTGAGACTAGCGTAGGCAACGTGGCGAAAA
TCCCATCTCTACGAAAAATTAACAAAAATTTAGCTGGCTGTGATGGCATGCACCTGTAGTCCTGCCTACTCAGGAGGTTGAGGTGGGAGGATCA
CTTGAACCCAGGAGCTTGAGGCTGCAGTGAGCAGAGATCATGTCACTGTACTCCAGCCTGGGGAACAGAGTGAGACAACCTCCCACAAAAGAAA
AAAGAAAAAAAAGAAAAAAGAAAGAAAGAAAGAAAGAGAGAGAGAGAGAGAGAGAAAGAAGAAGAAGAGAAAAAAAAGAAAGAAAGAAAGAAAG
AAAGAAAGAAGAAAGAAAAGAAAAGAAAAGAAAAGAAAGAAAGAAAGAAAGAAAGAAAGGAGTGTTGGAGAGAATGTGGTTAAATTTAAATTTG
AATCCCCATATGGCAGCTGTGGAGAACACTTGCAGTTCCTCAGAAAGTTAAACATAGAATTACCATATCACCCCGCAATTCCATTCCTAGTTAT
ATACCCAAGAAAACGAAAAACATATGTCCACATAAAAACTTTCACATGAATGTTCATAGCAGCATTATTTGTGATAGCCAAGAGTCCATCAATG
GGTGAATGGATAAGCATAATGTGGCATTTCTTTTTCCTTTTATCTTTTGAGACAGGGTCTCACTCTGTTGCCCAGGCTGGAGTGCAGTGGTGCA
ATCATGGCTCACTGCAGCCTCAACTTGCTGATCCTCCCACCTGAGCCCCCCAAGTAGCTGGGACCACAGGCATGCACCACCACACCCGGCTAAT
TTTTCTTTTTTGTACACACGTGTTCTTGCTACGCTGCCCAGGCTGGTCTCGAACTCCTGGGCTCAAGCGATCCACCCACCTCAACCTCCCAAAG
TGCTGAGATTACAGGTGTGAGCCACCGCATCCTAGCTATAATGTAGTAGGTATTTTCATACAAAGGAATATTATTCAGTCATGAAAATGAATGA
AGTACTGATACATGCTACAATATGAATGAACCTTATTACTTATGTGAAGTAAAAGAAGGCAGTTACATATAAGGCCACATATTATATGACTGCA
TTTATATGAAATGTCCAAAACAGACAAATTCATAGAGACAAAGACATTTGTGATGGCCCGGCGATGGGAGGAGAGGGAAATGGAATGGGAGGGT
GTATGTTAATAGATATAGGGTTCCTTTTCGGGGTGATGAAAATGTTCTGGAATTAGGTAGTGGATAGTTACACATCCTCGTGATATACTAATCG
CTTTGCTATACATTTTAAGAGTGAATTTTATGGTTAAGAGCAAATTTTATGGTATGTGAATTATGTCTCAATAACAGAAAAAAAAGAAAAAAGA
ATGAACTATTGATACACACGACAATGTGGAAGAATGTCACAGACATTATGCTGAGCAAAAGCAGCACATACTGTATGATCTGCTTCCATTTCCA
TGAAGTGCAAAAACAGGCCAAAACCCCAGGTATCATATGGTGTTTATGGGTACCAACATATGGAGTGATGGAGTTATAAAAATACTCATGAGGA
AGATAAACACCAAGCTCAAGGCAGTAGAAGGAGAGAGGGAAATGGAATCAGTACAAGAGCATCTGTAATATCGCATATCCTTTAAAAACAATCT
GAAGTCAATAAGGCAAAATATTAATGTTTGACAAAAGTAGATGCTTGTTACAGCACCCTTTATACTTTCCATTTTTTAAAACAGTCAACCAACA
GTTTGTTTCTGAGGGCAAACGCTTGACTCCTTAACCAGGCTTTGGTTGACATTTGCCTTAGTGCTTTTGACACCACAGTCTGTCAGGCTCTGTC
CCCACCCTGATGGGCTCCACAGTACAGAAGAGGCACAACAGTACAAATGCCATGGGGCCTAACGACCACCAGGGGCTCTAGAACCCCAGAAGAT
GCCAGGAGGGAGTGAGCCAGTCAGGGAAGGCTTCCGAGAAGACAGCACATTGAACAAGAGTCTCAAACTTAGGCCTGACGGAGAAGACGCGCGG
CCAGGACACCCCACCCCCGCCCTCGTCTCCCCCAAAGCCTGATCTGGCCCCACTCATTCCCTTATCTGCCCACTCCCAGCTGCCTCCTTGCTGG
CTCAACTGTCGCCGCAGACTTCTGAGCCTGCGCCCCCTCCACGGGGATGGGGGAGGGAATGGGGTGAGGCCTCGCCTCACAGCCTCGGGCTTTC
CAGCTCTTCCTGGAGGCAGGGCTCTGGGGCGCCCTACTCCTCACCCTTGGCTTCTCTTCCTGAGCGCTCTGTGCTCTCCAGAAATCAAGAAATG
G~GTCAGTCCACCCCCCAAACCCTTGTCTTAGCTCTTAGACATGCCTCGAGCCTGCCATTCCCTGTGAGCACAGATTTCCCTATGTTGCGACCG
CTGCTTCTAATAATAATAATGATGATGATAATTCCCATTTACAGATCACACCATTTATGGTGTGCCAGCAGGCCCTGTGCTGAGTGGTTCCTAC
CCACGTGGGGGGCTAGCACTTTACCCGTTTTCCAGATGAAGAAACTAGAGGCTCAGAGGGCGTCTGGCCCAGGAATCACACAGCAAMCACACAG
CAAATCAGAGTTGAGACAAGAACCCAGGGCCCTGGAGGAACATCTTCATTTCCACACACCTATGTAGAACCAGTCTGCAGGTGAGGGCAATTAT
ACACACTTGCACCACAAGGAGCTGGTGAGAATGCGATAGAATTATGGGTGAAGAACCCTTAGCACAGTGCCTGGGGTCACTCAGCAAATAATGC
CGCTGCTGTTATTATTAGTCTATTAATGCTATTATTAATATCAGAATTAAACAAGCCTCGGCAACATAGCGAGACTTCATCTCTATTGAAAAAA
AATTTTTTGCTGGGTGTGGTGGCATGCACCTGAAGTCCCAGCTCCTCAGGAGGTTGACGTCGGAGGATCACTTGACCCCAGGAGGTGGACGCTG
CAGTGAGCCAAGATTGTCACTGCACTCCAGCCTGAGTGACATAGTGAGACACTGTCCCCAAAAAATATTTAGTACGTATCATTATCACTATTGT
TGTTAGAATTAGAATAGTTTTAGAATTAGTGTTAGTATTAATAATAGTATTAGTGTTAGATTAAAATTAGTATTAGCATTAGATGAGTATTACG
ATGAAAATTAGTATGTCCTCATAGAAATAGAGAGTAGAATAGTGGTTACCAGCAGATGGGAGGGTAGGAGGCAGGGAGGGATGGGGAGAGGCTG
TCAATGGGTACAAAGCTACAGTTAGATAGGAGGCATAAGTTCTGGTGTTCTAATGCATAGTACAATGACTAGAGTCAACAATAAATGTATATTT
CAAAATAGCTCAAAGACGCCTTCTCGAATGTTCTCATCACAAAGAAAAGATAAATGTTTAAGGTGATGAATATGCTAATTACCTTGATTTGATC
ACTACACAATQTATACATGTAACAAAACATCATGTTTTACCCCATATATATGTACAACTATTATGTGTCAATCATAAATTTAAAGAAATAAAAT
TAGTTTTAGTGTCAGTATCAATATTACAATATTGGTATTACTCTTAGTGTCAGCATATTATTAGCATTAGTACTATAAGTAGTAGTAGGGTTAG
AAAGGGCTATGTACTCTCCCTTGTATGCAGTAGGTACTCAATAAATAAATAGGGGTACTTAATATTTATTGAGATTTCAGATTCAAGTAAGTTA
AGATCATGTAACATGGGTTAAAACTCATTTAGTCTCCCCAGTCACTGCATGGAGTGGCTTATTGGGGTATATTATTACCCCATTTTTACAGAAG
AGGAGCTAAATTCCAGAGCCGATGGTAACTCTCCCAACGTCACCTGATCCATTAGTGGTTAGCGCAGTCTATGAACCAGGATGAGCTGCCTCTA
GAGACCATCTCCTGAAACCACTGCCACTTAAGTCAGAGGTGTCTTTGTATTCGTTCTCCTTATTACTGATGAGGGTTCAGCATGGGGCGTGGCA
CACCAGCAGGAGCTCAATAAATAGGAATTCATGGGCTTGCTCTCTTTCCTCCTCAAATCTCCCATTGCATATGAGGACACTGAGGCTCAGAGGA
GTGAGATAAGAATGGTAACATCCCTCCAGGGTGGGCCAGTGGGCAACCTCACCCCACTCACCTGCGGCTCCACCCTPGCCCTCTGCCCTTTGTA
GGTCTCAGTCTCCCCATCTGTAGACTAGGTGGGCAGGACAGCTCCTTGTCCCACGTGTCCATGTGTGTCAGATGCTTTCATATAGAAAAAGTGC
TCAGGTTAGGTACAAGTCTATGTGAGGTCTATGAGACACTGTGGTTGTTGTCATTAATATTTGGAGGAGGTGGGGCAGGGCAAGAGTGTGGGGA
CTCGGGTGCGGAGGCCTAGCCACATTCTGGTTGTCCCCTGCTGAGGGCTGACGGCAGACCCACAGGCTACATCAATCCACATCCTCCCATCCTA
CCTGCATGGGCACCACATGCCCAGGGTGTGATCCAGTCTGCCTGGACCTTCTTCTGAGTCTGTCTCTCAATATCCCTCTGTCTCTGTCTCCCTT
CTCAGTTCTCCACTTCTGTCTTTGGCCTCTTTCCCTTTCAGGTTTTATCTGTCACTTCTGTCCATCTCTGTCTCTCATTCTCTCTTTGCCTCTC
TCTATATGTCTTTAATGGTCTCTGGTTCTCCCCGGGTGTCTCGCCCTCTTTGTCTCTCCTTTTCTTTTGTCCCCTCTCTCTGCCTCTTTCCACG
TCTGTCTCCTTCTCTAT&CATCTCTGTCACTCTCTTTCTCCCCATTTCCATCTCTCTCCGCCTATCTCTGTTTTTGTTTGTCTCTCTGCCTCTG
TCTCTCCCACTCCACCCCTTTCCTTTCCTACCCTATCCCACTCCTCGAGGAATCATCCCTGGCTCCCACCTCAGTTTCCCGCCTCCAAGGCAGC
ATGGCGGGCAAGAAGTTGAGGCCACTGTCCCTGGGTGTTCCTACCCCCACACCCTCACCCCAAGACAGCCTGTTACTGCGGCGCCAACAGCCAC
GGTCGCCTACATCTGATAAGACTTATCTGCTCCCCCACGGCAGGCCGGAGCTGGCGTAAGCCCCATGGGGCCACTAAGTGACTGTGCCCCTCCC
TCCCGCCAGCACTCGCCTGGCCTGCACGCTTAGCCTGGGTCATCAAGGTATCCCACAGGCTCTAGTTCAAATCCAGCAGAACCTCTCTGAGCCT
CACTCTTCTCACCTGCAAAATGGATACAGCCACATCCCTTCTCTCCCTGCAGCCAGGAAGACGCACATACACAGGAGTCTAGCCCACACCGGCC
CCGCACAAATTAAGGGCTTTACTCTCTGAAAACCCCAGTCAACTCATCAAACCATATCTGCTATTTTCATTTATCTTGGTTTCACCCTATTTTG
CTTGTCTGGACACTACAGTCCACGGGAGCCTAGGTCGAGCGAGGTCCAAGAATCCCCAGGGTGGGCAGGGAGGGTGGAAGAGGGCCTCCAGTGC
CCAAGAGGTGCCCCACAAGCATGGGACCCCCCCCCTCCCCTCGACTGCCCCACCCACTGGGGCACCAGCCACTCCCTGGGGAGGAGGGAGCACG
CAGAAGGQAGGQAGGGAGGGAGGGAGGAAGGGAGCCTCAAAGGCCAACGCCAGCCACGACACCCCCTGGCATCACACTGAGCTTGCCACATCCC
CAAGGCGGCCGACCCTCCGAAAACCACCAGCCCAGGTCAGTCTCAGCCCCCAGAGAGCCCCCACCAAGGCAACCCTGGGCCTGCTGCCCCTACC
CTTATGCTTGCTCCAGGCTCCCCAACCCACAGCTGGTCCCCAAAGTGTCAGCCAGCCCTGAATCCCTTTACAGCTCCTCCAACCCACCTGTCTT
TCCAACTCCCATTTCTACCCCAAATCTACCCCCTAAACCCCACCTCTTTCTGCCCTCTCATCCACTCCGTCCAAGATATCTATATCCTCTGGAT
CCCTTCACTTTGCTCGCTATACCCCTAGGTCTGTCTCCCCTAAACACTAACTCTGTCTCCCAAAACATGACTTTATCTCCCCAAATCCTTTCCC
TGTCCCATATCTCATTTCCACTCACCCAAACTTGTCTCTGTCTCCCTGACTTCTCCTCCAAACCTCACTTTTCTGCTCCCAAACCCCTTATCTG
CTCTACAACCCCTTGTCTTTGCCCCACTCTCTCTGAGCCCCCAAACCTGTCTCTGATCTGCCAAACCCTAGCTCCATCCTCTTACCACCATCTC
TGCCTTTCAAACCCACTCTTTGTTCCCAATGACTTCTCTCTGATCTCCGCAAACCATTTATCTCTCCCAACTCCCTGCCTGCTCAGTAAAATAT
CTTTGTCACTTCAAACACCAAGTCAACTCCCCAAAATCTGTTCTGCCGCATGAACCCTCATGTCTGCCTTCCCCAAACCGTATCTCAGCCCTAA
AACACATCTCATTGTCTCCCTGAATCTCTCCAGCTCCAAGCCTTTCTCTACTCCAATTCTATCTTGGCTTCTCAAACTCCCCTTTACTAGCCAC
ATTCTGTCTGCCCAAACAGATCTTTGACTCCTAAACTCCATCPCTCCTCCAGAAAAACCCTTGAACTCCCCAGACTTTTCTATGACCCTCAGAA
TCTGACTCCCACACTACTTCTCAACTTTATATCTGACTCTCAAACTTCGCCCCGATCCCCCAACCTCGTCTGTTTTCACAACCTATTCCTGAGC
CCAAAATGTGTCTCTGAACTTCCAAGCTCGTCTCTGCTCCACAACCCCGCCCATATCTGCCTCCCCACAAACTCCATGGCTACACCCCAAACCT
CTCTGACATTACCCCATATCTGACCTTCAAATTCCACCTCTATCTCCCCCTAACCCCCATATCTGCCCCCTAGACCTTATATCTGCTCCCTTCA
GCCCGGTGAGACCCTCCCTTGAGGGCTGGGATTGGAACGTTACCTGGGGTGAGGGGCTGGGGCCGAGGGAAAGTGGACCGTGCCAGCTGCTGCC
TGCTGCCGCCGTTGGGGCAACACTTACTCTAGTGGGGCAGCTGATAAGGAGCTTTCATATCCCCCAGCCTCGAGATAAACTTTATCTCTGTCCG
GAGAGTGATAACTGGGGGTGAGGAGGCTGGGCCCCTGCCATGGGAGGGGTGGGCAGCCCTGGACTCACCAACGTGTGAGGTGCAGGGGPTCGGG
GCAGTGGGGCTGGAGCGAGATCATGGTGGGTAAGGTGGAGTTGAGGGGATGAGGGAATACTGGTGAAAGAGTGAGCAGAAGACACACAATCAGA
CAGGGAAGAGAGGGAGAAACAGGGAGAGATGGGAAGAGAGAGACAGACACACAGAGACAGAGCAAGAGACAAAAAAGAGACATGAAGAGAAAGG
AAAACAGAGAGAGAGAAACTCAACGAGTAAGAGACAGAGACAGACAGATGGCCGGAGAAAAAAGAACGAAAGACCCCGGAGCAGAAAAGGAGAT
AGAAATGCAGAGATACACGCAGCTAGCACTGTGAAGAGGCAGAGACTAACACACAATTAGAGACAGAGAGGAAAGAGATGGAGACCAAGATGGG
GAAGCAAAACACTCTCTTCAGACAGCAACAGCAGGCACCCTGGCGCTGACAAGGTGTTGACGGTGGGCACACTTGTGGCCCATCTCTTTCCTAG
CATAACTCCCAAGCCTGGGCCTGCCCCTTAGCCTGTCTATACCATGGGTCATGTAAGCAGGAGTGAGGGGCAGTTTGAAGACAGCCTTCTAGTC
TAGCCCTGTCACTCCACCCTACAGACACAGAAACAGAGCAGGCCAGCACAATAGGGCCAGGGCCAGCATTCCAGGCTCCTTATCCTGAGCTGCA
TGTGGCTGGGTACGGTCAGGGGTATGGGACTAGTAAGAGGCACGTGGACATAAGGTCAGAGGCCCCAAAGAGAGGGAAACAGAGAGAACAGACA
AACAAGCAGGAAGAGTGGGAGAGATGCAGAGATGTTCAGAGAGATAGGAGAGGAGAGGGAGAAAGCAAGAGTAACAGAAAGAGAGAGCCAGAGA
CAGAAACATGGGAAGACAGAAAAGAAGACAGAAAATCATCAAACATTACAAAAGCACAGAAACAGGTCGGGCGCAGTCGCTCACGCCTATAACC
TCAGCACTCTGGGAGGCCGAGGTGGGCCGATCACTTGAGGTCAGGAGTTCAAGACCAGCCTCCCCAACATGGCAAAACCTCGTCTTTACTAAAA
ATACAAAAATTAGCTGGGTGTCCTGGCATGTGCCTGTAATCCCAGCTACTAGCGAGGCTGAGCCACGAGAATCACTTGAACCTGGGAGGCTGGG
GTTGCAGTGAGCTGAGATCGCACCACTGCACACCAGCCTGGGTGACAGAGTGAGACTCCGTCTCGAAAAAAAAAAAAAAAAAAAAAGAAAAAGC
ACAGAAGGAGAAGACAAGCTATATCATAGAAACACAGAAAGCTGGGGAAGCTACAGAGTCAGACTTGAGAGCGAACAGAGAGTCAGGGGAAAGA
GCCCCAGGGGATAGACAAGTGCAGAGCTAGATGACAGACACACACAAGGCAAAACAGGCAAAGGGCCATCCCACAGGTCTCAGCTCAGCCCCAG
CCCATCACCACCCCCAATACAGCAGATCGCGAAACTGACGCCTAGGAACTGAAAGAGCCTGAAAGCAGAACTCTGGTGGGCCTCTCCAGGGGAG
AGGGTACCGGTAGAGGTACCACCCACCTGCCACCCTCTTCAGAGGAAGTCAGTGGCCTTGGGCTGATTTCAAAAGTTGGGCGGGGAAGGCAGAG
ATAAGCAGTGGGGGGTACTGACCCCCCCCCAACCAAGAAGTAGGGAGGAACTAAGGGGGCCTTCTGTCTGTAGACGCAACAGAGGTGGAGGGAG
GAGGGAGTCAAGCCCGGAAACCATGGGGTTTCTGAGAAAGTTAGAGCGCAAGATACAACAGATAGGGATCAAGTTGGGGAGCAGAGGATGGTGA
ACCCCAAAGTCCTGGATGAAGTGACCAAGAGGCAGGCACTCTCGTCCTGCATGCCATCCCACCCTCACCCAGACTCTTCTAGAGAGGGAAAGGA
AGAAAGGACGGGGGGACGGGGAGAATAAGAGGAAGTGGAGCAGCGGAGGAGAGGAGATGGGGAAAGGGAGAAAAGGATGAACAGAATAGGGAGG
AGAAGGATGAAGAAATTGGAGGGGAGGACAAATGAGTAGTAGCAGAAACGAGTGCAGAGTAGATGTAAACAGGGAAAAAGAAGCCGGAAGATGG
TGGCTCACACCTGTAATCCCAGTACTTTCGGAGGCTGAGGTGGGAGGATCACTTGAGGCCAGGAGTTCAAGACCAGCCTGGGCAACAGAGTCAT
ACCCCATTTCTACAAAAAAAAAACAAAAACTAGCCAGACCTGGTGGCACACACCTGTAGTCCCAGCTACTCACGAGCCTCAGCCACGACCATCA
CTGCCGGGA~GCAGTGGTTGCAGTGAGCCGAGATCGTGCCACTGCACTCCAGCCTCGCAACACAGCAAGACCCTGCCTCAAAAAAAGTGTGTGT
GGATGCGGCAGAG~GAGATAAGGTGTGTGAGAAAGGTAGAAAAGGAGAATGAAGACAAAAAGAGAAGGAGGACAAGGAAGAGGGGAAACAGGAA
AGGAGAAGGAGGAGGTCAAGGAGGAAAAGAAGAAGGTGGAGGAGAAAAACGAAGCAGGAGAGAATGAGAAAACAGTCGAGAAAAATAGAAATGG
GGAAGAGGGGGGCAAAGAAGAGATGGGAAGAAGAGAGACGCGACAAAGACAGGAGGAAAAGGGAAGGGGGGAAGAAGAGAGAGAATGGAAGGAA
GAAGGGAGAGGTAGAAGCAGATGAGAGTGGAGGAAGAGCGAGAGGAGGGAGGAGAGGAAAGACAAACGGCAAGAGGGGCAGAACGAGGAGCAAG
ATGAAAGGAGGGGCACACAGGAGTGGAACGGGGAGATGCAGGAGGGAAAAGAGAGGAGAGGGAGGAAGAGAAGGAGGGGAAGGAGAGGGGAGAC
TAAGGTGAGGAGGAGGGGGGAATGGGGAGGTGGGAAGGAGAAATATGGAGACTGAGGTGATGGAGTGGGAGGAGGGGGAAAGGAGGGAAGAGGA
GCAGGTGAAAGGAGGTGGGGGGGAAGGATTTCTGTGTCTGAGGACCCCTTCTGTCCTCGCAGGTTAATCCCCAGAGGCTCCATGGAGTTCCCTG
GCCTCCGGTCCCTGGGGACCTCAGAGCCCCTCCCCCAGTTTGTGGATCCTGCTCTGGTGTCCTCCACACCAGAATCAGGGGTTTTCTTCCCCTC
TGGGCCTGAGGGCTTGCATGCAGCAGCTTCCTCCACTGCCCCGAGCACAGCCACCGCTGCAGCTGCGGCACTGGCCTACTACAGGGACGCTGAG
GCCTACAGACACTCCCCACGTAACTCCATTCAGTGGCTGTCTTAGCATTGGCTGAGTGCTGTTGGGGTTGCCATGGAGATCCTTGGCTAGGTCA
GAATACCACTGTGAGGATATCTCAGAAATGGCTGGAAGCTTCTCAAATGGATGTGCCGACCACTTTCCCTAGTTAAGTGCAGACCTGGGAATTC
CAATGCTCCTCAACCTGCCATATTGGGGCGGCCACACTGAGAGGCAATACTGGAAGTATGTGGTGGTTGCCCTAGTTGTCGAGTGATCCGTGGA
GCTCCAAATCCCAACAGTCATCCTCAAAAACCCACTTGGAAATGGTCAGAGCTTATTGCACAGGCCACACTGACCAGTGGGGGTCAGGATCCAG
GAAGCATCCAATGGCCAGCACCTGTTCTGGTAGCCTCTGGAAAAGCTGGGAACTTGGCCACCATGTTGGGGGTGCTGGGAACCACTGCACCCTG
ACGTGCGCTGACCCTAGACTGATTTTGCCTCTTCTTTCCTCCATCCCTACCTGCCCCCAACAGTCTTTCAGGTGTACCCATTGCTCAACTGTAT
GGAaCGGATCCCACGGGGCTCACCATATGCCGGCTGGGCCTACGGCAAGACGGGGCTCTACCCTGCCTCAACTGTGTGTCCCACCCGCGAGGAC
TCTCCTCCCCAGGCCGTGGAAGATCTGGATGGAAAAGGCAGCACCAGCTTCCTGCAGACTTTGAAGACAGAGCGGCTGAQCCCAGACCTCCTGA
CCCTGGGACCTGCACTGCCTTCATCACTCCCTGTCCCCAATAGTGCTTATGGGGGCCCTGACTTTTCCAGTACCTTCTTTTCTCCCACCGGGAG
CCCCCTCAATTCAGCAGCCTATTCCTCTCCCAAGCTTCGTGGAACTCTCCCCCTGCCTCCCTGTGGTGAGAAATTCAAAAAAGGACAGGGAAGT
TGAGGTGGGAGGGGTGGCCCAAAGTAAAGCTGAGCTGAGCCTAGCTCCCTCTTCTCCTCTCCACCCCACCAGAGGCCAGGGAGTGTGTGAACTG
CGGAGC~CAGCCACTCCACTGTGGCGGAGGGAACAGGACAGGCCACTACCTATGCAACGCCTGCGGCCTCTATCACAAGATGAATGGGCAGAAC
AGGCCCCTCATCCGGCCCAAGAAGCGCCTGGTAAGACCACAGACCTGCTTCACCTTATACACAGGAACCCCTGTCCTCACCCTGTACAAGAAGC
CACATCTTCCCATTATATAGGAACGCTGTTCTCATGATTACAGGAAGCTACTGCAGGCCACCCTGTATGGGAACCCCTGTCCCAATATCACATG
GAAACCCTTGCCTTCATCCTACACAGGAAAATCTCCTCATCCCATATGGAAATCCTAGCCCTCACCCPGCATGAGAACTCCTGCCCTTTCCTTG
TACAGGAACCCAGATCTATAGAAGCTCCTATCCTCAACCTACCCTTATAAGCTTCAAACAGAAACCTTTGTCCTCACCCTGCACACCAGTGTTT
TCGTCCTTGGCTTCACACTGGAATCACCCCAGCTCCCTTCTCCCAGATGTCCTCATGGAATTGGACTGGGATGCTGCTTGCGCAPCAGGATATT
TTAGCTCCCCAAGTGATTCCGATACGCAGCCAAAGCTGAGAACCACCAATGTAGTCCCCCATAGAATACAGAACAAAAGAAACTTATACCAGAT
AGGAACCCCTGTACTGGCCCCATACACAATCCTCAGGCATCACCCTGTAAACAAAGCCCTGCCTTCAACCTGACCCTCACTTCTTGGGTCCTCC
TGACATCCCCTGTCAGCCCCTTACCCCCACTTCCACATCCCCAGGGCACTGATCTCACATCCTGTCGTCCCCTAGATTGTCAGTAAACAGGCAG
GTACTCAGTGCACCAACTGCCAGACGACCACCACGACACTGTGGCGGAGAAATGCCAGTGGGGATCCCGTGTGCAATGCCTGCGGCCTCTACTA
CAACCTACACCAGGTGACGCCCTGCCCCTTGGAGCCACCCCTCTGCTTTCCCTGTCTTCATGCCACACTGCCCCCCACTCTGTTCCTGTTCTAC
CTCTCTCTTCCCCCACAACCCTCTTTCCTCTTTCCCCTTTCCCTCCTTCCTCCCCCTTCCCCCATCTCTTCTACTTTCCCCCTTCCTCCATCTC
TTCTACTTTCCCCCTTCTCTGTTATTACCCTCCCTCCTTCCTTCTCCATTCCCTCCTCCTCCGCCCTCCTCCTTCCTCTCCTCTCCCCCACCTC
CAGGCATCAGCTAATGTCCAACCCCCTGCCCTAGACCTTGGGCAGCTCCTATCAGCCTTGGAGGCTTTCCTAAGCTCAGGGCCTCACAGCCTCA
GGATTCCTTGGACAATCTCAGCACCCAAAAATTATCTTACCCTGAAAGAAGTGGGGTAGAGAGGGTGTCCCTGGTTGACACAGAGAGGCAAAGG
TCTGGAGTTGGGGACACCCGCAGCCTCCTTTTTGGCAGGTGAACCGGCCACTGACCATGCGGAAGGATGGTATTCAGACTCGAAACCGCAAGGC
ATCTGGAAAAGGGAAAAAGAAACGGGGCTCCAGTCTGGGAGGCACAAGAGCAGCCGAAGGACCAGCTGGTGGCTTTATGGTGGTGGCTGGGGGC
AGCGGTAGCGGGAATTGTGGGGAGGTGGCTTCAGGCCTGACACTGGGCCCCCCAGGTACTGCCCATCTCTACCAAGGCCTGGGCCCTGTGGTGC
TGTCAGGGCCTGTTAGCCACCTCATGCCTTTCCCTGGACCCCTACTGGGCTCACCCACGGGCTCCTTCCCCACAGGCCCCATGCCCCCCACCAC
CAGCACTACTGTGGTGGCTCCGCTCAGCTCATGAGGGCACAGAGCATGGCCTCCAGAGGAGGGGTGGTGTCCTTCTCCTCTTGTAGCCAGAATT
CTCCACAACCCAAGTCTCTGGGCCCCAGGCACCCCCTGGCTTGAACCTTCAAAGCTTTTGTAAAATAAAACCACCAAAGTCCTGAAATTGTGGG
TGTQTCTATGTGTGGCTGAACAGCAGAGCTGAGTGCAGTGTGTAACAATGCCTGTGGCTCTCTGATQACAGTGCATGQCTGCAATCTGTGACCA
TGTGAGGCTGGCTGACGCGGCACATGTGACACTTTGTGACCAAGGGTATATGTTGTGTGATTGGACAATCTATGTGAAACTTCTTGTGAAGTGT
CCAGGTGGTTCCATATGTCATGGTAAGAGGCCACGCAGGGCTTGCTGACGGTGGGGGTGGTGCCGGGTGACTATAAGCACACTGGAAGTGTGTG
TGCTGGAGCAGGTGATAAaGAGGTQTQCGCQGCTGTAGTCTTGTGGCTGGGCATGACGCTGGGGGACCTTTGAGACGGCATCACGCTGGGGGAC
CTTTTAGACAGCATGACAGCATACGTGGTGGGCACAGAATCTGGTAAAGATTCTTGGAATGTTGAACAAGAAGTGTGTGTCAGGATGTGTTTGT
GCCTCTGGCGATGGCAATATTTCAGTGCAAGTCCCTGTGCATGGGCATGGGTGTGCGTGTGTGTGCATTACGTGTGGCATGTCCCATGTCACAG
TGTCTCTGAGTGGCTGACAACATGAGCAGCTCTGTGTACATTTGTTTGTGGAGGTCTCAACAGCAGAGTTTCAGAGGGTATAAGTTAGGGACTC
TCTTCCAAGGGACAAAAGACACATTCAGGAAAGGAACACGGAGAAGGGTGGAGCTGGAATGGTAGCTGGCAAGGTCAGAGGCCAGTGCTGGGGC
GCAGGGTTGTCCGTGCGTCTTCCTGTCGGACTGGTCTTATCTTGCTCAGCCCAGCTCAGCCTGCAGCCCTGTGGGAAATGGTAGAGAATGAGAG
GGGGAGATTAGGGGGACAAAGCAGCCCCTGGAGGTGGTTTCAACCTCAGTAGGTGGGGCGCTCCACACAGTGCCAACCCCTTCCCCAACATTCC
CACTCACCTGGGTGAACTGCTCCCCCCACAGCGGAGTCTGTTCCTCAATTTCACAAACACACAGGAGCATAATCTGAGTCATGCCTTAAGCATC
CTAAGGCAGACTGCTTAAGTGGCTCAATGGAGGCCACACAGCCAGTGGCAAGGGGCCCAGCGGGGCAGTCTGGCCTCGTCTCCATGTGCTCAGC
CACACCCCACAGCCAGCAGCACCCTTTCCTAAGGGCTCACTGTGGGTCAGGCGGCAGGCTGGGAGGCTCCAGTTGCTTTAGTTCATTAGTGCCT
GAAATAAATATTCTGAGGAAAATATACCCATACTCATTTCACTAATCGAAGACTCAGGCCCAGAACTGATGAGTAACTTACCCTGACCACCAAG
TTTAAGGAGTGGATTTTGGATGGGGTGACACACCCAGCCCAGCAAATAAGTGCTGCTCACACTTAACCGCTCTTTATGGCTTCTTCCCTAGAGC
CCCGGATATGGGGGTTGCAGGGACCCACAGGTCCTGACCATATTATAGGTAAGCAGCTGTCCTCCACAGAACACCAGCCCATCAGCTAGCGGGC
ATTCCAGCTCCACTAAGTAGCCTGCTGCAGAATCACAGGAGTCTATTATGCTCACTGTCGGCATTATCCACAACAGCCCTGATCCCATAAAAGA
CACGTGTCTGGCCTCCCCTCAGAAGCCCAGCCCTCACACCCTGCACGACGCCCCATCCTCTAAAAACCCCCTTCAGAACCTGTCCTCGACACAT
GCCTGGCCCCACCTTGTTCAGGAGCCCCGGCCCTCACCCCCATAAATATAGCTCCCCCAGCCTGGTACAGAACACTAGCTCTGAAGCTCTAACG
GAGCCCTTCATCTAATTATCGACAGGAACCCATCCTGATCCTGTACAGGAATGCCAC3CGCTTACCCTGAATAGCAGGAACCTCTGCCTAACCC
CAGCTAGGGACATCTGGACTAAGCTGTAAGGAAGCCCCTGCACACCCTGGACAGGAACCCTTGTCCTGACCATCCACACAAGCCTCAGTCTCCC
TATACGAATCCTGTCTTGACCTCAGACAGGAACACCTTTCTACTCACACTGCTGCAGTCCTGTCCTCCAGGTAGCATTTTAAAAACACCTCACT
CACAATAATCTCAGTAGTAAACCATGGACCCAGCTCTCTCTTTACAGAAATCCCTGTCCTCAACCTCTTCAAGGACCCTAACTATGTGTGGAAC
CTCTTGCCTTCATTGTTGACAATGATCCCTGATGTTCTCCCTGCACAACAATCCATGACCTCACACCCTATCCCATAGATCCACAGGAACCCAT
GATCCAACTCTCAACATGAACCTCAGTCTTTAACTTGTATAGAAAACCACTTCCTGACCTTATGGCAGGAATGCCTGTCTTGACCATTTACTTT
AAGCCCTGACCTCACCCTATACAGACACCTATGGCCTCACCTCATACACGACCCCCCCTTCTCACTATATAGGTCGCATTTATTCATGCTGCAC
GAGCTCCTGGGCCTTACCTTGTATTAGCTCCACTACCCTGACCCTCTACAGCAGGGGTTCCCAACCCCCAGGACACGGACTGGTACATGGTCCA
TGGCCTATTAGGAATTGGTCCACACAGCAGGAGGTGGGCAGCAGGCAAGCAAGCATTACCACCTAAGCTCCGCCTCCTGTCAGATCAGCAGTGG
CATTAGATTCTCATAGCAGCACGACCTTATTGTGAACTGTGCATGCAAGCAATCTAGGTTGCGTGCTCCTTATGAGAATCTAACTACAAGCCTG
ATGAGCTGAGGTGGAACAGTTTCATCCCCAAACCATCCCCCACCATCCGTGGAAAGACTGTCTTCCACGAAACCCATCCCTGGTGCCAAAAAGG
TTGCGGACCGCTGCTCTACAGGAAGCCTGACCCTAAAACTGTTCCAGGACTTCTGACAGGTCTCTGCAGAAAGCCTTTGTCCTGAACCTCAACA
CAAATCCTTTACTTTTACAGTAATTTATTTACAGGAATCTCTGTAATTTACAGGAATCTCTGATCTTTATAGGAACTCCTAGCTTTACTCTCTG
GAAATACACTGCTTACCCTGAACAGGAAGCTTAATGTGATTCTCTATAACAGCCTTTTCCCTGGCCTTGTCCCAGAAGCCCCACCTGCACCCTG
TACAGGAACCACTGCCCTGACCCAACAAAGAAACACCGACCTGAATCTCTGAAGGGGCAGTGTCCTAACTACACAGAGGATCTTTGTCCTGAAC
CCGCACAGGAACCTCTATTACCCCCAGCAGGAACCTGTGCCCTGTGCTAGCACAGAAAATCCTGCCCTTACACTCAACAGGAACCTTTGATTTG
CCTCTTTAGAGTAATCCAAAGAATGAACCAGTATAAAAAACCTCTACACTGTACAAGAACCTCTGTTCTGTACTTGTTAAACAACCCATAATCA
GAATCACCATGAATACCTGCCTGGAGACTGTACAGGAACCCCTGACCTAACCCCCAATGGAATCACCTGATCTGTCTGTCTCTAGTAACACAGC
TCTGATCCTGGACAGAAATACCTGGCCTGAGTACGCTGTGATCCTCTGGCCTCCCCGTCTACAGAAAACCACTCTCCTGGCCTCAAAAGGAACA
CCTAACCTTAATCTGTATGGGAAAAATGCCTTCACAGTTTTCCCTCTCACTTTACAATGTCTCCAACCTTTGTATTTCCCCTCCAAACCTCCCT
TACCAGCTAACAGAATCATTCTCCTGACCCCAGACAGGAAACACTAACCTGACCCAGAGATGCTCCPACCCCTACACAGTAAGAGTCCCTGTCT
CAATGCTTTAAAGAGAAATTTCTATAGCAGTGCTCTCCAATAGAAATATGTGAGTCACACGCGTAATTTTATATTTTCAATGTAGCCACATTAA
AAAGAGAAAAAAAAGATAAAATTATTTTCAATAACATCAATATACTTAACTTTACCCAATATATTCAAATATTATTTTAACATGTAATCAATAT
AAAAATTACTGAGCTATTTTAAACTTTTTATACTGAGTTTTGTGATCTGGTGTACATTTCACATTTATAGCACATCATCTCAAGTTAGACTGGC
CACATTTCAAGAGCAGTAQCCACACGTGGCTGGTAGCTACCATATAGGACACCATAGGTCTGTGGAGTCTACGGAACCCTATAGCAGACACTGC
TATAACCTCATTGAGACCTGTTCCTGTTCTTCCTGAACTCACTCTACCTATTCCAGCCTCCTCTGCAGATAGATGTGGGCACATCACAGAGTTC
TGACCAATGGAGTATGGGCAAAAGTGACATATACCAGTTCCAGGCCTGACCCATAAAAATCTCTCATGCAATCCTCCATTTCCTCTCTTTCCCT
GTCTACCAACTGAAAACCAACTAACTCCAAGGACCTAGAGCAGGACAGAGTCACAAAATAGAGTTTGCCTGGGTCCATGAATGAACAGTAGTAA
ATATTCAGATTGGCTTTTGAATGAGCAAGATAAGATCATTTATTCGTTAAGCCCCTGAAATTCTGGGTTACAGCAGCTAGGATAATTTAGCCTA
ATTAATAATAATCTCTCCCCCTCTCTCTCTCTCCTTTTTTTTTTTTTTTTTTTTTTTTGAGATGGAGTCGCCCACGCTGGAGTGCAGTGGTGCA
ATCTTGGTTCACTGCAACCTCCGCCTCCCAGATTCTCCTGCCTCAGCCTCCTGAGTAGCTGGGATTACAGGTGTATTAGCCCGGCTAATTTTTG
TAGTTTTGGTAAAGATGGGATTTCACCATGTTGGCCAAGCTGGTCTCAAATTCCTGACCTCAAATTATCTGCCCACCTAGGCCTCCCAAAGTGC
TGAGATTACAGGCGTGAGCCACCACGCCTGGCCAGTAATTTTTTTTTTTTTTTTTTGAGACAGGATCTCACTCTATTACCCAGGATGGAGTACA
GTGGCACAATCTCGCCTCACTGCAACCTCTGCCTCCCCTCCCAGCCTCAACCGATCCTCACACCTCAGCCTCCCGAGTAGCTGGGACTACAGAT
GCACACCACCACACCCAGCTAATTTTTGTGTTTTTTATTGACATGCGGTTTTGTAATGTTGCCCAGCTGGTCTCAAACTCCTGAGCTCAAGCAA
TCTGCCCTCCTCTGCCTCCCAAGTGCTGCGATTACAAGTGTAAATCCATTCTGCCTGGCCAATAATAATCTCTTCACCGAAATCTAGACACCTG
ATCTCACTGTCTATATGAACACAAGCTCTGAACCTATACAGAAACACCTGTGACCCAGTACTGGCCCACCTGATCTCTTTGTAGGAAGCTGTCA
TAACATAGGTCTAAGAAGCCCCATCCTGGCCACGAATGGTGGCTCACACCTGTAATCCCAGCACTTTGGCAAGCTGAAGCAGGCAGATTGCTTG
AGTCCAGGAGTTTGAGACCAGCTTGGGCAACATGGCGAGACCCCATCTCTATAAAGAAAAAAAAATTAGGCACGCATGGTGGCATGCACTTGTA
GTCCCAGCTACTTGGGAGGCTGAGGTAGGAAGACAGCTTGAGCCCAGAGGTTGAAGCAGCAATATAGCCCTGTTCACACCACTGCACTCCAGCC
TAGC~CAACAGAGTGAGACCCTGTCCCCTGTATCAAAAAACAAAAACAAAAAAACAAAAAAACAAAACCTAATCCTTAACTTGCACAGGAACAG
GAACCCATAGTCTGGAGCTCTCTAGAAACCCCTGCTTGATTCAGTAAAGGTACAATATAGAAACCATACGAATCCCTGTCCTCATTCTGTCCAG
GAACATTTGGAATGACCCACCAGAGGTACACTAGAAGTGACCTGACCCTGCCCATGAATCCCTGTCCTCACACACCTCACACAAAAGGAATACC
TCTCCTTAGGAAAAAACGCCCCTACCCTCAATCCTGCAAAAGAATACCAGCCACATAGACACCAACGCCTGACACTACAGCACAGATCCGCAAA
CTATGGCATTCA~GCCAAAGCCAGACTGTGGGCTGTTTTACATTTTTAAAGGGTTGTTTTTTAAAAAGAGAAAGAGAATAAAATGCCACTGAGA
CCGTATGTGGCCTGCAAAGCCTAAGATGTTTACTCTCTGTCCCTTTAAAAAGTTTCCTCACCCCTGCTCTTCAGAAACCTCTCTTCTGATCCAA
CAGAAAAATGGGCCTTGACCCTTTGCAAGACTCCCTACTCTATCAGGCTGCAGGTATCAGAACTCTAGAATTTTTTTGTAGTGTGTTATCATTG
TATGTGTTTTCTTTGGTGAGTGTAGGGGTTTAAAGGTCTTAGGTCTCCAACTCTTTTGCGCTGAGACAAAAGATAGGTTCACGTAGGAGGGGTG
AGAGGGAACAGCCGGCAGGACATCTTCAAGAGGATCACAGCGCAAAGCTACTGGGCGGTGAGACCGTCAATCTGTCAGTCTGATCCAGAACCCC
CGGACTGCTTATCTCTCCGGTCCCAGCTTATAGCCCGGTAGGAAATGGTGGAGAATGAGACAGGGAGATTAGGAGGACAAACCGGCCTCCTGCA
GAGCTGACATTTAGACATGGAGTGGGAGTTGCGGGGGAGACGGGGTGCCTAGGGACAGCTCCCCACACGCACACACACTTTCTATTACTGCTTG
GGAGCAGTGGTTACCCGTTGGAGGGGGCAGATAGGGAGAGCTCCTCCCCATGAGAACTCCCATCCTCAAGGCCATTCTGGCCCTGGGCACTATT
ATTATCACAACTTTCCAGATGAGGAAACGGAGCACAGAACTGTTCAGCAACTTGCCCAAAGTCACATGGTTAAGTCCCGTAACCTCAGTTTCCT
TATCTGCAAAGCAGCCTTAATAATGGGAACTACCTCATAGAATTGTCGTTTACAACGATGCCTGTCACATAATACTTGCTATCATTACCATTCC
CTGCCCCCACTAAGACTCCTTCCACTCAGAATATTGCGGCAGAATATTAATAACTAATATTCGGCCAGTGTTTCCTGTGTACCACCATAGTGAA
TATTAACTCGGAAAATCCTCACATTTAGCATCGTCACCACGCCTATTTTGGCCGCCACCACCAACGTCCAGTGGCAACCTCGCTCTCGGCCCAG
CCACAACCAGCCCGCCCGCGCTACGTCATCACGGCGCGTCGCGCGGGAAGTCGCGGGGAAAAGGTAAGATGCCCCTTCCTAATTCCCTCGCTTC
CTTGCTTGCTCTCCAGACACCGCCGACCCGAAGGGCTCCTAAGTGACTGGACAGGGACGGAGGGGCGGCGGCTATGGCATCCGGGACGACAGCG
ACGATAGCCGAGGCAAGAAAAAGCTTGCACCGCAGCCCTGTCGGGAACCGCCGGCGCCTCCCTTTTACGTAGGCGCAGCACAGCTGGCGTAGCA
CGCCGACGCACCGCCCCGTCGCCTGTGAGCTCGCGGTGTGGCTCAGCCCAGCTGGCGTAGCACGCCGACGCACCGCCCCGCCGCTTGTGAGCTC
GCGAGAGGTGTGGCTCGCGCGAGGGGCGCGGCCTTGAGGCACGGTCCCCTCTGGAGGCGGGATCTGGGCGGGCAGTCGAGAGACGAGGCCCAAT
GGAAAAGAAAACCCTGAGCGCTCGCGTCCCCACACGTCGCCAGAAACTTGGTGGAGCGAGCCAAGGGCCGAGTTTGAGAATGGGGCTGCGTCCA
ATGAGTGGAGCGGTCAGTACAGCGCGTCGACGGCGGAGGCGGGAGGGGGCGGAGGCCGACCGAAGGCGGCTAGGGACTGGCTGATAGAGGGTTA
GCGAAACGTTAGCGGTCGGGTCTGGGCAGGGGGTGGAGCTGGTTGAAGGAACGGGGCAGTCCCCTGAGGAGCGGGGCTGGTTGAAACGCTAGGG
GCGGGATCTaGCQGAGTGGAAGGTACCGGTCCGGCCCGATAAGGGGTGGACTTAAGTGAATCGTTAAGGGTGGAGTCGAAGCCGGGGTCGGGGC
CGGGGCCGGCTGAGTGAAAGGGTGGGTGATTATCCCGGGAGATAGGCCGAAAGGGCAGGTTCGTGAACGAATGGGGTCTGGGCTGGGCTTAGAG
GGTCTGGGAATGGGGCTTAGGAGAGTAGAAGGGGCGGTCATTGGTTGGAAAGGGCAGGCCCTAACACGGACTGTGTGAGCCCGGGGGCTCATTG
CTCCGTGAAAGGGCAACACCAGGGAAAGAGAA2CGTGTAAAAGGGGTGGAGTCTAGCGGGCCGGGCGGGGCCGGGTAGAATGGCCACCTGAGTG
GAGGGAGAGGCCTGAGAGAGGCGGAGTTTGGAAGGCTGTGGAGAATCAGATCGCGTAAGGAATGGAATCTAATAGAGGGGGCGGAGCCTGCATA
AGGGCAGAGAGGTGCGGTCCTCAGGGCAACTAGCCCCCTCACATACCCACGCTCCTCCCCCCACCCCCAGAACCGCGGCAGGGGCCAATGGCCT
CCTCAACTATQACCTCAACCGGCCAGGATTCCACCACAACCAGGCAGCGAAGAAGTAGGCAGAACCCCCAGTCGCCCCCTCAGGACTCCAGTGA
CACTTCGGTCAGGCCCTAGACCCGCCCTGATGAGGGGGAGAGGGAGCAAGTTCGTCATGCCCTGGACTCTGACCCTTCTCTCTGATTCACAGAA
GCGAAATATTAAAAAGGGAGCCGTTCCCCGCTCTATCCCCAATCTAGCGGAGGTAAAGAAGAAAGGCAAAATGAAGAAGCTCGGCCAAGCAATG
GAAGAAGACCTAATCGTGGGACTGCAAGGGATGGTGAGCAGGGCCTGGCTGCAGTTTAGCCTCGTATGACAATCAAAACCCAAAGGTTCCCCAC
CCTCGACAGTTCCCTCTGACTCAGGGCCTAAATGGATCTGTCTCTCCTTTTTTTTTTCCTCTGCACGATCTGTAGCCTTGAGGCTGAAGCACTG
GCTGGCACTGGCTTGGTGTTGGATGAGCAGTTATGAATTCCATTGCCTCTGGGATGACAGGTGAGGCTGGGTCCTCCAAGCCTGTCTCCATAAC
CACAAAAATACACACACTTAGAGCCCATTAGCAAGAATAAATCTTTTCTTACCCCAGCCTGCATACTGCAT4CCAGATGATTTGGGGAGGTAGG
CTCACACTTGAAAGGGTTCTTTTATGTAGCTAACAAACATTTATTCAGTGCCTATTGTGTGCCAAGAGTTGGTGATACAAATGTACCAAACAAC
AGACAGGGGTCCTTCTCTAGGAGCGGATTGATGAGTAGGAGGGCAGATCATTAAACAGCCAACACCAGTATGAGGTGTTTAATGAAGACAGACT
TAAGACCAGGGGATTCAACGGTGTATAATAGAGGATCCTAAACTAGTATCCGGGCTTCCCAGAACCCTTTATAGAGGAAGAGACGTTTGTACTG
AAACAGAAGGATGAAACCTCCCGTTTGCTTTACTTTTCAAAAAGAATCAGCAAATCCTTTTGGCTATATGTTCAAAATATATTCACCATCTGAC
CTCTCCTCACCACCTCCACTGCCACCATCATCATCACTCACCTAGACTTGCAGAGGCCTCCTCCCTGGTCCCCTACTTCCAACCTCACCTCTAT
TATCTGTTCATGCACCAACCTAAAAAAATATGTATGAGTTGATGTCTTTGTTAAAATACTTTAAGGAGGCCAGGCATGGTGGCTCACGCCTATA
ATCCCAQCACTTTGGGGGGGCCAAUGCAGGTGCATCACTTGAGGTCAGGAGTTCGAGACCGGTCTGACCAACGCGATCAAACACTGTCTCTACT
AAAAATACAAAAATTAGTTGGGCGTGCTGCCACACACCTGTAATCCTAGCTACTTGGGAGGCTGAGGCAGCAGAATCGCTTGATCTGGGAGGCG
GAGGTTGCAGTGAGCCGAGATTGTGCCATTGCACCCCAGCCTGGCCAACAAGAGCAAAACTCTGTCTCAAAAAGTAAAAATAAAAAAAAAAAAA
GTACTTTAAGGGCAAACTGTTGCCCTCAAGGTAAAGTCCAAATTTTTCATCCTGGCCTCAAAGCTTCCACATGATCTGGCTCCACATCACTTTG
TGACCTCATCAGCCAATCCTTCTCGC
HUMAN SEQUENCE—mRNA
GCAAAGGCCAAGGCCAGCCAGGACACCCCCTGGGATCACACTGAGCTTGCCACATCCCCAAGGCGGCCGAACCCTCCGCAACCACCAGCCCAGG
TTAATCCCCAGAGGCTCCATGGAGTTCCCTGGCCTGGGGTCCCTGGGGACCTCAGAGCCCCTCCCCCAGTTTGTGGATCCTGCTCTGGTGTCCT
CCAC)CCAGAATCACGGGTTTTCTTCCCCTCTGGGCCTGAGGGCTTGGATGCAGCAGCTTCCTCCACTGCCCCGAGCACAGCCACCGCTGCAGC
TGCGGCACTGGCCTACTACAGGGACGCTGAGGCCTACAGACACTCCCCAGTCTTTCAGGTGTACCCATTGCTCAACTGTATGGAGGGGATCCCA
GGGGGCTCACCATATGCCGGCTGGGCCTACGGCAAGACGGGGCTCTACCCTGCCTCAACTGTGTGTCCCACCCGCGAGGACTCTCCTCCCCAGG
CCGTGAGATCTGGATGGAAAAGGCAGCACCAGCTTCCTGGAGACTTTGAAGACAGAGCGGCTGAGCCCAGACCTCCTGACCCTCAAGGACCTGC
ACTGCCTTCATCACTCCCTGTCCCCAATAGTGCTTATGGGGGCCCTGACTTTTCCAGTACCTTCTTTTCTCCCACCGGGAGCCCCCTCAATTCA
GCAGCCTATTCCTCTCCCAAGCTTCGTGGAACTCTCCCCCTGCCTCCCTGTGAGGCCAGGGAGTGTGTGAACTGCGGAGCAACAGCCACTCCAC
TGTGGCGGAGGGACAGGACAGGCCACTACCTATGCAACGCCTGCGGCCTCAATCACAAGATGAATGGGCAGAACAGGCCCCTCATCCGGCCCAA
GAAGCGCCTGATTGTCAGTAAACGGGCAGGTACTCAGTGCACCAACTGCCAGACGACCACCACGACACTGTGGCGGAGAAATGCCAGTGGGGAT
CCCGTGTGCAATGCCTGCGGCCTCTACTACAAGCTACACCAGGTGAACCGGCCACTGACCATGCGGAAGGATGGTATTCAGACTCGAAACCGCA
AGGCATCTGGAAAAGGGAAAAAGAAACGGGGCTCCAGTCTGGGAGGCACAGGAGCAGCCGAAGGACCAGCTGGTGGCTTTATGGTGGTGGCTGG
GGGCAGCGGTAGCGGGAATTGTGGGGAGGTGGCTTCAGGCCTGACACTGGGCCCCCCAGGTACTGCCCATCTCTACCAAGGCCTGGGCCCTGTG
GTGCTGTCAGGGCCTGTTAGCCACCTCATGCCTTTCCCTGGACCCCTACTGGGCTCACCCACGGGCTCCTTCCCCACAGGCCCCATGCCCCCCA
CCACCAGCACTACTGTGGTGGCTCCGCTCAGCTCATGAGGGCACAGAGCATGGCCTCCAGAGGAGGGGTGGTGTCCTTCTCCTCTTGTAGCCAG
AATTCTGGACAACCCAAGTCTCTGGGCCCCAGGCACCCCCTGGCTTGAACCTTCAAAGCTTTPGTAAAATAAAACCACCAAAGTCCTG
HUMAN SEQUENCE—CODING
ATGGAGTTCCCTGGCCTGCGGTCCCTGGGGACCTCAGAGCCCCTCCCCCAGTTTGTGGATCCTGCTCTGGTGTCCTCCACACCAGAATCAGGGG
TTTTCTTCCCCTCTGGGCCTGAGGGCTTGGATGCAGCAGCTTCCTCCACTGCCCCGAGCACAGCCACCGCTGCAGCTGCGGCACTGGCCTACTA
CAGGGACGCTGAGGCCTACAGACACTCCCCAGTCTTTCAGGTGTACCCATTGCTCAACTGTATGGAGGGGATCCCAGGGGGCTCACCATATGCC
GGCTGGGCCTACGGCAAGACGGGGCTCTACCCTGCCTCAACTGTGTGTCCCACCCGCGAGGACTCTCCTCCCCAGGCCGTGGAAGATCTGGATG
GAAAAGGCAGCACCAGCTTCCTGGAGACTTTGAAGACAGAGCGGCTGAGCCCAGACCTCCTGACCCTGGGACCTGCACTGCCTTCATCACTCCC
TGTCCCCAATAGTGCTTATGGGGGCCCTGACTTTTCCAGTACCTTCTTTTCTCCCACCGGGAGCCCCCTCAATTCAGCAGCCTATTCCTCTCCC
AAGCTTCGTGGAACTCTCCCCCTGCCTCCCTGTGAGGCCAGGGAGTGTGTGAACTGCGGAGCAACAGCCACTCCACTGTGGCGCAGGGACAGGA
CAGGCCACTACCTATGCAACGCCTGCGGCCTCTATCACAAGATGAATGGGCAGAACAGGCCCCTCATCCGGCCCAAGAAGCGCCTGATTGTCAG
TAAACGGGCAGGTACTCAGTGCACCAACTGCCAGACGACCACCACGACACTGTGGCGGAGAAATGCCAGTGGGGATCCCGTGTGCAATGCCTGC
GGCCTCTACTACAAGCTACACCAGGTGAACCGGCCACTGACCATGCGGAAGGATGGTATTCAGACTCGAAACCGCAAGGCATCTGGAAAAGGGA
AAAAGAAACGGGGCTCCAGTCTGGGAGGCACAGGAGCAGCCGAAGGACCAGCTGGTGGCTTTATGGTGGTGGCTGGGGGCAGCCGTAGCGGGAA
TTGTGGGGAGGTGGCTTCAGGCCTGACACTGGGCCCCCCAGGTACTGCCCATCTCTACCAAGGCCTGGGCCCTGTGGTGCTGTCAGGGCCTGTT
AGCCACCTCATGCCTTTCCCTGGACCCCTACTGGGCTCACCCACGGGCTCCTTCCCCACAGGCCCCATGCCCCCCACCACCAGCACTACTGTGG
TGGCTCCGCTCAGCTCATGA

[0278] TABLE 14
MOUSE NOMENCLATURE
ICSGNM Fkbp5
Celera mCG18519
HUMAN NOMENCLATURE
HGNC FKBP5
Celera hCG17659
MOUSE SEQUENCE—GENOMIC
ATAGTGAAACTGTCTCAAAAACAAAACCAGGGCTGGAGAGATAGCTCAGTGGTTAAGAGTATTGACTGCTCTTCCAGAGGTCCTGAGTTCAATT
CCCAGCAACCACATGGTGACTCACAACCATCTGTAATGGGATCTGATGCCCTCTTCTGATGTGTCTGACAGCGACAGTGTACTCACATACATGA
AATAAATAAATAATCCAATTTAAAACAATAACAAAACAAACCCAAACAACAATATGGCCTAAAGTTATAGATTCATTCCTTTGTCTCTGCCCTT
ACCAAGTGTATGTTTTATGAAGACACATTTTCTAGAACAATGCCTGAAGCAGCACACTTGTTTACTGGATTCCCTTCCAGGGACTCAAACTAGG
GCCTCATAAATAAATAAATAAATAAATAAATAAATAAATGGAGTTTTATAATTTTATGTGACTGGATATTTTTCCTGCATGTAAACCAGGGCAT
CCCTGAGACCCCAGATGGCCAGGAAAGGTGGAAGGATCCCCTAGACCTGCAGTTCCAGATGGGTGCTTGGGATTGCATCCGGCTCCTCTGGAAG
AGCAGCCAGTGCTGCTAACCATGCAGTCATCTCTGCAGCCCTGAAGGAAGCTTGAGTTAGGAAGGAGAGCACTGAGAGTACCCATCAGNNNNNN
NNNNNNNNNNNNNNNNNNNNNNNNNNNNNNNNNNNNNNNNNNNNNNNNHNNNNNNNNNNNNNNNNNNNNNNNNNNNNNNNNNNNNNNNNNNNNN
NNNNNNNNNNNNNNNNNNNNNNNNNNNNNNNNNNNNNNNNNNNNNNNNNNNNNNNACTGCTGAGGCTGAGTTAGGCTAGCAAGTAAGGCTCCGC
AGCTGCAGGGAGACCAGACTCCTGGCAACTGTCCTGATCACCACATCTGTGCTATAGCAGGATCCCCTCCTTCCCCATTAATAAACCAACTGTG
ATTTGGGTTTAGGTTCGGTTTGTTTTTGAGACAGGGTTTCTCTGTGTAGCTGCCAGTCTTCTTATCCAGTGGTTCTCACCTGTTTACCAGTGTA
GTGGGGCTCTGCCTGCTGAGGATCTTTGCAGACATTTTAGAATACATATAAGCAAATACATACACATTTCTTCCAAAAACAGAATCATGTCACA
AATTCATCTACATGTGCCATTATCTTTTCTAAGACGATTTGTTGGTGCCTGGTGTCTGGCACACATCCCTTTAAAGCACGCAGATCTCTGCTGA
ATTTGAGGCCGGCCTATTCTACATAGTGAGTPCCAGGACATCCAGGGCTATGTACAGAGAAACCCTGTGTATTAGTGTATGGGGTGGGGACGGT
TTGGCAGCTTTCTAGTTTTTGTTTGTTTGGCTTGTCAGTATTACAAGGTTGTTTATCTGCAATGGGTAAAGTTTCACTTGTTCCAGGCAGATGG
GGTTTGTAGCTGTCTTAATCCTAAGGGGGACATCGTAATGAAAACAGACATTTGACATTTAGGTGTCAGCCTGTGCAGTTGTAATCAGGTATAA
ACTGTGTCAACTGCAGTCATAATGACACATTCTGATGCATGCCTTCTCATCCGTAACTCTTCAGTGTCTAGGGGGCCAAGTCATCACTCATGCC
ATAGGGACACCCTCGATAACGGCATTCTTCGTAATGCACTTTAATGAAAGCAACAGTGTTCTTTTTCAATAAACATTTACAGATTTCTTCCCTA
GTTAGGTAACTTAAGTGTTTTTTACTGTTAGAGGTAAAATAATCTTCAATTGGACATAGATTTAGCTCATCTTTTTCACAACTGTGACATTCAT
ATAGTATGCATTTCCAAATGTTTGCACTTTCATGATTATTCACTTGAGGAATTGTTTTTTTTTTTTTAAGATTTAATTTATTTATTTATTATAT
GTAAGTACACTGTAGCTGTCTTCAGACACTCCAGAAGAGGGAGTCAGATCTCGTGATCGGATGGTTGTGAACCACCTTGTGGTTGCTGGGACCT
GAACTCCTGACCTTCGGAAGAGCAGTCGGGTGCTCTTACCCACTCAGCCATCTCACCAGCCCGAGGAATTGTTTTTATTTGTGACTGGAGAGAT
TGCTCAGTAATTGAGAGCACTGACTGCTCTTTCAAAGGATCCAGGTTCAGTTCCTAGTGCCCACAACTATCTGTAACTCCAGTCTTAGAGGAAC
TCTCTGGCCTTTGTAGGCACCAGGTATGCATCTCGTATGCATATATACATCAGGCAAACACCTATCCATATAAAATAAAATCATTTTTTAAAAT
AAGAGCATATTTTTAAAAGAAACATTTTTATTTAGCCACACTGTTAATTTAGCTCTACCTTATGCACCCTGTCGATATTTCATTCACAGCGACA
CCTGTACGCCTCCGTTTCTGATCGCGACTTTTCATTCCTTCTGGTGGTTTCCCTTATGAAGTGAAGCATGACTGGTTCTTTGTACACTTAAACC
TTTCCTTCCCTCTGCTAAAGCATTTCATGTTTCCCTCTAAACCCAGCTGCAAACGTCAGACTTTCCACCTGTCACCTTGGCATCTCTATCGACC
CCTCTCCTGCTTCACTTTCAAACPCAQGACGCACTGTTATTCTCTCTCTCCCAATCTTTACTCTTCCCCAGTCCCTCTGAAAGGCACTAGTGAA
CACCCACACTCAGCACTTCATGTCCGTCGTTTCAAAACAACCTTTACCCAAATACTCATTCTTCAGAAATGTCCTCTCTTACTCTAACCACCAT
CTGCAGAAGAGTTTGAAGTTATAGTCACAAAATTACAGACAAAGTACTCAGGGAAGTGAGCAATCACATAATAAAACATCGTGAAAAACACTAC
TAATGTCTAAAAGGTCTCTGTGACACACTAAAATTTGTCCATAGCTGCTGACCAAATAATGACCTAGAAATTCCATCATCAGAAATCTCTCCCA
ACGTAGAGTGAAAGGACAGTGATGGAAAGGAGAGAAGCGGTGGCTCCAGCCACATCTGCTGCTTGCGAGACCGTGCAGTGTGCTCTGACTCCTG
GTGCCTGGATGCTGACTCATCCTGGCCCTCTGGTTGGAGTCAGGCACCTACAGCATTTTAAAAGCTCTGTGGGTGATCCTAATGCTGGCAGTGT
TAAAAAATGACTAAGAAACCTGAACGGTAAGACAGGTCTGACATCTCTCCAACCAGACTTCAGGGCAGAGGGCCAGATTACTGCAGTGTCTGTG
CGGGGAGACCTGTAAGGATGGGAGACCCATCGGGGCTGAGGGAAGACGATAACACCTGCGTACCTCTCTCCTTACTGTAATTCTGAGAAGCAAA
AATACTTTTGTACTTTCCATAGGGAAAATACAGGAGCCACACTAGGAGCAAGAGAAGCCTGACTGGTCTATGGGACCCAACATAGGTCCTGCTC
TTGGCCCCTGAGTTCTCTAGTCAACCCCAAGTCTAGCGCTGCACTTGTAATGCCCTACTCCATGGTCACCCCACCAGGGAAGTCGTTTGCTTCT
CTGTTGGATCCATTGATCTCGTCTGCTTTCTATTCCCCGACTTCTCACAATCAGTGCTGCATGCCTACCTTTTGTTCCTGTTTTCTGGACTATT
AGGGTATTACAGACTTACTGGACCTGAGCTTGTCAPGTCCCTTCAGTGCAGAAAACAGCTTGTGTAGTATGACCTTGAGAAGCAAAAGCTTCAA
CCTGCTTGAAGCCCACGACCGTAAAATAGTAAGAGGTAAAATACTTTATTCACATTTTTCTTTATTGCATAATGTTACCATTAGGTAGTATAAT
ATTTTCTAGGGTTTTTGTTGTTGTTGTTGTTTTGTTTTGCTAGCAATACAACCCTGTGCCTCCTGCTTACTTAATCATTCAGACCAAAATGATG
ACACACACCTTTAATCCTACTCCTCAGGAATCAAGCAGGAGGATCTCTGTGAGTTCTAGGACAGCCTAGGCTACATAGAGAGACCCTATCTCAT
AACAAATAATTCACCTGGCTAAACCGCCCCAGCAAAGCAAAGCTGCACTGTGAGAATGTGTTGGGGGTTCTAGGCAAGGAGCGTCTACTTTATC
TCTTCCCAGGAGAACAGTCCCCTGTTGCTCAACTCTGCTGTGGTGGACATGGAGCTGTCAGCGAAGGGGAGGCTGCTTCCCTTGCCAGCCAGCT
CAGCAGGTCAACCCTCACAACAACGGAGTGACAGACAGAGCCACATTACCTTACATCCAAGCCGACTGAATGAAGAATGAGTCCTCCAAAGCAT
TGTGTATATTGAAGACTAGACTGAGTAGTTTCAGQCTGTGAGGTAGCAGAGCCTCTTTCTTAAACTGTCTCCTTACTGGACCTCTCAGAGCCCT
TGGCTGAGAGGCTGATGGAATCACTCCCAGAAATCCAGCTGAGGATCGAGGAAGGACACTGCAACTGAGGAAGGGAGGAAGACCTCAGAGGGAC
TTGGCACTCAGGACTCGGAAAGGTGACTCCAGCTGGCTGGCTGCCCTTGGCTGGCTGGCCGCTCCGATACATCTGTCTGATCAAGCTGTTTCTG
TTGATTTTTCACTTCTTATAAAAGTATACATGCATACGTGTATGATAAAATATACTGCTTTAGACATTTAAATGTTCCTAAGTGGCATTAAGTA
CACTCCCTCCCAATATTGTGAAACCATCACCGGTCATTCTTTTCATCACCCCAAACAGAAACTCTGTACCTTACAACACCCCCTAGTAACCTTT
AACCTACTTTGATTCTGAGTTTGACTCTGTATGTGTTGTATACATGTCTATGTGTTGGCATGTGTCTGCACTTGTGTACAGGTCTGGGGTCAGC
ATCCAGTGTTGTAAAATGTCTTCGTATTTTATTTATGATTGGTGTGTATGCATGTATATGCCACAGCATTTGTGTAGAGGCCAGAGGATACTTT
TAGGATATGGTTCTTTCCTTCCATGTGGAATCCAGGGATCAAACTCCAGATTTCAGGCATGTGTAGCAAGCGCTTTTACTTTCTAAGCCATCTC
TCCAATCCTGCACCAACTCTAGACTGTCTGGCCAGCAACCCCCTGAGATCCTTCTGTGTCAGCCCATGCTACCCTCACCCAGCATGCACCACTG
TACTGGGCTACAAACTCGGGTCCTCACATGTTCAGCTTGTGCTCTGACACTGAGCAATTACCGTCGAATCCCCAACACGTACACTCTTATTTTC
CCATGATATCCATTCTGATGGGTAGGAACCGGAATCTCTTACAGTGCTTCTTTCCCTTTAACTGGTCACTGTTGATGTGAAACATCTTGTCATT
TTCTGCATGAATGTGTATGTGTATATATATATATTTTGAGAGATTGTGTGTGTGTGTGTCTGTCCAGTCCCACCACCTCAGTATAGATAGGAGA
CATTTCTTTGGGAAAAGTAGCTGAATAATTGTAGTGTGTAATTTCACGGAGCTGTGTAGTTGTTTCCTCTACCTGTGTAGTTAGCTCTTTTTTT
TTTTTTCTTTTTTAAAGTGTATTTCTTGTCTGCCAATAAATAACTATTACTATCTCTAGCTCTAGGTTGGAATGTCTGACAGAGGTCAGACGTT
GAATTTTAAGTGAGGATTTTCCAGTCCATTCTTATAACAAAATGTCAAAATTGAGGTCCACTTAGCATGCCCTGTGTTCTGAGGTTGAGGTATG
CTTCTGTGCTGTGTCTTTTCTCTTGTGTGGAGCTGAAAGCTATAGACAACAAGCCCAGGAGTTGGCGGGGCTTAGAAACACTCGCTGTGGTTCC
TCAGTCCTTCTAACAAAGAAGCTAGGGATGCCGATGGGACACCGTGGACGAAGAGAAGCACCGGTCACATGCACAGACTCTGCAAAACCTCAGG
GTAGCTTCCCACGTGAGAGACCGTAGTTACCTGAAGTTGTCAGTACCTGTTGATGAGACACTGTCTTCTCATGTCTCTGTTGTGTCTCGGGTCA
TTGCCGACTGGTACTTTGGAGGGTGAGTGCCTATCTGCCATGTCCATAACAGGAGCACTGGGTGTTCCCCTTCTGGAGCACTGGGGTGCAGTTT
CCCTCCCTTAGCTCGTCCAGTACAGTACGCTTTATCATGGATTAGTAATAGCCTTAGGTAAACGTGACCAGAGGAAACAAGACTCTGTTAGAAA
AATACTGATATTTCCCTAGCTTTTCTTAAAGCTTTTTAAQAATTGTCTTTTTTTATGTAATACCATAAAGCAAAAAGGCTACTTATTTTGTTTG
TTTACTTATAAAAATTTATACTTCTAGTGACCTACATGAATTTAAGCGGAAATGTTTAGAAAATAAAAGGATTTGGGAAGGGAGTTGCTTTGGT
TTTTGTTTGTTTCTTTGTTTGTTTGTATTTTCTTTGTTTGGCAGCTTAGTTTTTGTTTTTTCAAAACAGTTTCTCTGTGTCTAGCCATGGCTGT
CTTAGAACTTGCTCTGTAGACCAGATTGCACTAGAACTCACAGAAATCTCCCTGCCTCTGCCAACTGAGTGCTGGGATTAAAGWTGTACAGGAT
CACCGACCAACTTAGTTTATTTCTTTATTCCTTAAGATTTAAATGGCTTTGAACCTGGAAAAAAAAAAGGTTGTTTTCTGGTTTTCCAGATTCC
TGGTGCTTCTCTTCCTGTCCACTTGGCGGTTCTGTTCCAAGTCAGTCTCAGATTTGCACGCTCGCATCCTTAAGTTGATCAACTTCCTTGGTCA
AGTTGACACTTAGCAGAACCGACAAATGGGTTGAAGGGAGTTAAGACTTACATGAATAGCAAGCCAAGTTGTTCTTTTCTTCATCTTTATTTTT
AATTTATTTATCTTTTGAGAATTTAATATATGAATACTGATTTTACATCATTTCTCCTTTAATTCCTCCCATATCCCCTTCTCAAATTTGTGCC
TTCTTATTTGTTCATTATTGTTACATGTCTGTGCATTCATACACTTGCCCGTGTCTCTCTGTGTCTGTCTGTGTGTGTGTGTGTGTATGTTTAC
CTATGAATACAGCCTGTTGAAGTCTTACAGTTTTGCTTGTATGGGTTTAGAGAGGGTCTTGTGTAGCTAAGGTTAATGCTCACCCCTCATCCTC
CTGCCTCCACCTCCTGAGTGCTCGTATTCCAGGCAGCATATGCTGCTGTCACCAGCATGGGCCTGGCTGAAAAAAAACTGTTTTTTTCTCTTTT
TTAAAAATTAATTTTGTCTTGTCTGCATGGATGTCTTCGAATCATCTGCATACAGAGGGCAGAACAACCTATCACATCTTCTAGAACTGTGTAA
CGGACAGTCGTGAGCCTCCATGTGGGTGCTGGGTATCATACATCAGTTCTCTGCATGCTCTTAACCATGGAGTCATCTCTCCAGCTTTCCCATT
AAGTATTTTTGGAAGAAATAGCACATAGATAAACTCCGCCTCCCCTTACATCGCCATGAGGCAGTTTGTCTAATTGCTGCTGTCACAGGTTTCG
TTATCGCGCACAGTGCCTGTTACAAGGATAGTTCTTAGATCAGCCCCTTCCACCTTGGAGTTTTTGAGACAGGGTATTCCTGTGACTAGGCTGG
CCTCAAACTAAGAAATCCGCCTGCCTCTGCCTCCCAAGTGCTGGGATTTAAGGCATGCGCCAACACACCCAGCCCTAGATCCAGCTTCTTAAAT
GTTCCTACTCCTGTCTCCTTTTTGCCCAAGATATTCCTAAGCAATCCCAGACATGTGGGCATATAAAATAGACATACAAGGAGAACATTTATTC
ATAATAAGTCATAGTTTATTTTAAAACAATCTTTGCTGTGCAGATATTTTTACTATTTATTCGAGATAAGCAAATATGCACACCAAAAGATGGA
TATGCTTGTTTGTCTACTACAGTTGAGTCCAAAGATAGACTGTGTTTTGATATTACCTGCCGAGAGGTGGCAGTAGGAAATATTAGCTCCTTGT
TGTATGTCCCTAAACCATGCTGTTTCTATAAGAGCAGAAACCGTTGTGCGTGCGTGCAGCAGAAACACTGCGTAGCTCACAATAGCCTTTGGTG
TGAGCTGAGGGGCTGTGAGCAGCACCGTTTAGCATTGCATGATGCAGTGGCATGCATGGTGAATTGCACGTGTGCGCTCAGCCGAGTCCCACAC
TGTGGCATGCCCAGCACTGCCAGCACACCGTGGATTCCTTGTGAATTTATTCTTGTTTGGGTTTGGCGCCAGTCTGTATTCAGAAACCATTGCT
CCTCCTCAGCTGGTCTCCCCGGGTGTGGGCTCACCACTTCCTCTTTACTTATGCTGCACATCACCTGCTAAAGGTTTATATTGCTTTGTTGGAA
AGGCCCTCTCACCTTTTCTGGTCGGTAACCTGTGGGTGAGGCTGGTGAATATTTCTCAAGAACTTTTCACCTACTGCCTTTAATGTCCTCACTG
CTTCTGTCCTGTTGTGTTGCTAGAGGCCCACGTGTCTCTGAAAACCTACCGAACCTTTCCCAAGGATAAGTCGATGAGCAGCTCCCTCCAGATA
GTTAAAGACCATTCCCTGCTGTTTAGGCCCTTCCTATAAGCTCACGCACCAGATATGTGTCACCAAGTCCTAGAAGCTGGGGGTCGGCCCCCCG
GTCTAGTTTCCCTGATTATCTAGTCCAGCATTGTGCTGAGCTAGGTACTTAACTTTGGTTGTTTGTTTGAGAACAGCTTGTTCTAGGCTTTCCC
CTACCCTGAGCCAAACATGTGGACCTTTTATTCTGGTATAAACTGTGCTAGGAAATCCACACAGGGGCTGGGCCCTGGGATTGTGCTGCTCTCT
TCGAAAATCTTTCAGCACAACAAACAGCTCAACCTGAAGAAAACTTAGCTTGTTTGGAAATGAGTTAAAACACTCATATTTTAGTTGCCCAATT
CTCAGTTCTATTAGTAAAGCGCGTTCTTTACAATACTGGGAGCTGTTTTGTGTTTGGTTTGACTGTAACCAGAGCCCCCACCAGCTGACTTGAC
TGAGCCTGGAGTCTGTCCTTACCCTAGTGTGGAATAGCTTTAGAAGTGGCCCACAGTGAGCCGGTTTTGGTAATGTCCTTAACTTTCAGTACTC
GGAACGCTGAGGAGAGAGAAATCTCCAGTTTCAAGCCAGCCTGGGCTACATAAGAACCTGATTCAGAAAATAATTGGCATTGTTATTAATTCTT
CATTTCCCTGCTCAGTCAAGGAGCAGTAGAAGATAATCCCGGCAGTAGACAAGTGTGTTTCGTTTAGCCTATTGATCACTGATATGCAGATTGG
CTTTGCAGGAGAAAAGGTAACAGCCCTCAGGAGGCAGACAGGTGGATCTCTGTTAGTTCAAGGCCAGGCCAGTCGATACATTTGAGTTCAGGAC
ACTCGGTCTCTGTGAAGCAGAGTTTGTATTCTGAGTACACTGCTCTCACTAACACTTTAGACTGCCTGAAGTAGCAGCGAAAGGCAGCCCTCCA
GAGTTCCCTGCTGAAGACTGTAATATGCAAAGCACACATCCCGTGTTCTACAAGACCCTTTATCTACCAGGAGTGCTTCATAAATATCCACATC
CAGCTGACAACAGCTAAGGAAGGGTAAAATGGCAAAACGACTTGCATGGGCATTGTGCATCTGGCTCATGAGACAAACAAGAGACACTAATCAA
ATGGGTGTGGCTCGTTATGGAAACGGACCTGGTTGGTTTGACCAGTGTGTGTGAAGGAGAGTGCCACAACACCAGAGCCCTCTCTTCTCTCTCA
ACAATATCGCTGTAGGAGAAGACTTGTTTTATGGPTCTGAGACGGCAGCTTCTCCCTGTGTTGTCCTGTTAAGGAATATAATTACCGGCAGGCC
TGACTTATACTCCTCTCATCTAGGACCGTGGCTAGACGGGAAATTGAAGAAGTCGGTCATGTTTTATTTCCTTCTCTGATGGCATCAATGCATG
CCCACAGCA4ATGCTTTTQTTATTGTTTCTGTGTTTTAACTCTATTACTCTTATGTAAGCTTAGTTCTCAGCCACTTTTCAGGTGTGTTAAGAA
GTGATACTTTGATTGAACGAAATGCATTTCTCTTGGCAGGTCTTCTACTTACAAAGGACAATGACTACTGATGACGGCACCAGTAACAATGGAG
AGAACCCAGCAGCCACCATGACTGAGCAGGGTGAAGATATCACTACGAAGATACACACAGGAGTATTAAAGGTAAGGCCACAGAAGTGTGAAGC
AGGGAGGTCTCTGTGTGGGAGCTTGTGGGTGCTTTATGCAGCCTGTCTTGTGGACGGGATAGGGTTAAGTAGCAAACACTACAGCTCACTTCCC
ATCTAGCTTCATAGCTGGGCGTAATCTCAGATTATAAATGGTGCAGCTTCCGCTGGGCTGCGTAAATTAACTCACATCTTAGGCCCTGCAGAAC
AAGTTCCAGTTATGCGTTCCCTCAAAAGAACCCCTCCTTGTTTCACAGCGTACATGTAGATTGCAGTTTAATATGCCATCTTAGTGTGCTAAAG
CTATGCAGTGACTGCAAAACAGTCTGTAGAGAAAAAGGAGAGGACTTAGTTTTTATATACAAGTACTGTTTCTATGTGTCATGATGTAACGACA
CAGAATATATATTTGGATCATCTTCCCTATTAAAGTGTGTGTGTCTGATGCATTTGTGTACACATATGATGTATACTTGCTCCTCTGTCAGGAT
ATCTTCCTCAGTCACTTTTCTACCTTATTTCTCTGTGAGACAGAGTCTGTCACCAAACCTAGAAGGAAGCCTGTTTGAGTAAGACTCGGTACCC
AGCAAGCCTCTGGGATCCGTTTGTCTCTGTCCTCCAGCACTGGGGTTGGAGACACACTCTTTCATGATTATGGTTTTACATGGGTCTAAGGAAT
CTAAGCTCGGATCCTCCTTGGACCAGCTCCATAGACATTTTTTTAATTTGCGTCTTAGCAACAGTGTTATGAGATAGTACCTTTTGATCATGGT
GGGACTGGGTATGGTTCCTAGGGTCTCACTAACTTGCCAGGCTGGCCTTGAATTACAGTGTAACCCAGCCAGGTCTTCAACCTGCCATCCTCCT
CCCTTAGTCTCCTGAGTAGTTGGGATTACAGGATTGTGTCCCCACGATGGGCCAGGTTCTCGTCTGTGGTTCTCTTCTGAATCTCCATGCATTC
CTCTTACCTTCCTCTGTGCTGTCAGTCCATTGAGATCTCTTTTTCCTCCAGCTTCTTAGCCTGGTAGCTGTAATTCCTCACCCAGAGCTCCTGG
AAGCTTCTCAAGACAGTGGAGATTCTTCAGGCTGTCCGCAGCGTCTCCTACCTCATCTTTTTCAGTGTGCTGTGTTCAGAGAACTGGTCTCCCA
GGTCCTCAGACCCTGTGTATTCTGTAACCAAGTACTGACTGATTCATGAGGGAGAAGTTTATTGTGGCTCACAGTGCTGTAGTCTCAGAACTCC
AGGAACAGAGCATTCCTGCATCACCTTGCTTCTAGTAAGGACTCATTATAGAGTGAAAGCAGAAGGCAGGCAGGCACGCAQGCAGCAACATCTC
AGAGGCACAAGGACACGTGGACAGCTTTGTACAACTTGTGCGGTGAGCCTAGTCCCTCCACAGCGAGCTCACAGAGGCAAGAGCTTGATTCCAC
CTAACTTCCCTCCTAAAGGCCTCGTATCCCAGCACTGTCCTGGTAGCAGTTGATCCAGTGTAAGCTTTTCAGCGGACAGCTCATATTCAACCCT
CACTCAGACCACAGTATCCCTCCATCGCTGCCGAGCCTGCTCAGAGCTCTTGGATAGGCAGTATGCTATAGTCTCCTTTGTCCTAGGGAGTAAG
TCTAAGAACAACAACATTTAGGTTTATTATAACTGTGTCGTTTCAACCTCTTTAGGTTATGACACCTGTTACTCTCTAGAACCTTCAAGTCACC
TCAGGGCCTTTGGTAAAGAGTCAGTATGTTTCACAGCTGTGGCCCGGAGATTTGTCAGCCTCCCTGGGTTAAGGCTTCTACTTATAAAATGTGT
AATAATAATAATAATAATAAAAGTTGGTTTTACATTTTTCATATAAATTAAAACTAGATTTTTATCTTTTAGGCAAGTTAAGATTTAASCACAA
GTTTCATCTTGCTGCCAACATAGACACACACATAAGAGGGCACTATCACGTGTPAGCTGCTGTCTTCTGCACCACTGAAATGCTCCCATTCGCA
CAGATGATTGACAGACCGATTGCACCACCACACGCCTGGGTTACATTTTGTTTTCCAAGAATTGACCAACTGCATTAGTATCTTGGCTCTCCCA
AGAATAAAAGAAGTAGTCTGGATTTTACAGTGGATAAATGTTTTTCATTTTGAAGTTCTTTTCTTCTTTTTTTTCCCTTTTCCTTTTTCTTTAC
TACAAAACAAGCTACTTCGCATCGTCTAAGTCTATATTTTACACATTATTCAAATAATGGATGTTTAAACTGTTACATCAGACCATACAGCAGA
GCGTTTGGACCCTATCTTTAGCAAAGGAGGGAAGTAAATATGCCCCCTTGACTCTTTGCTGTTTAGGAAGTCCAGCAGTCCTTTGGCTAGTTCA
GTTTCTGTACCTTTGCCTGCTCATCAGTCTGTQTTTTGAGAGATTTTACCATCTTGGCTTTCAACCAACCAAGTGAGGTTTACTCCCTTTTTCT
CTTTTGCCTTGGTGGAGATACGGTTTCACAGGATAATCTAGCTGGCCTGGAACTTACTGTGTACACCAGGCTGTCTCCGCAGTGATCCTTTTGC
CTTCCTCTGGCTTTCTAGTTTGAGAGACTAAATATTGTGGTGAGCTGTAATAATAGTCATAACACAAGGGTTAGTGAAAGGCAGTTTTCTATAG
AGCAGGACAAAGAAAGCTGTGAGGAATGGCGGTGAAACTGCCCATCTGTCTGGGTGCTGGGGAGTAGTCCTTGTSGCCTTTGTATCCTTTTACA
AGTACAAAGCTCTACACTTTTTTTCTTATGTTTGTCTTTCAGATTGTCAAAAGAGTGGGGACTAGTGACGAGGCCCCAATGTTTGGTGACAAAG
TTTATGTCCACTACAAAGGCATCTTGTCAGATGGAAAGAAGTTTCATTCCAGTCATGACAGAAAGAAGCCATTTGCCTTTAGCCTTGGCCAAGG
TAAGAGGACAATATTTTCAGGGTTTGTGTAGGTTTGATTCTGTTTTTATTTTTTATTTATTTTTTATTTTTATTTGTTTTTTAAGAGTTATTTA
TTTATAAATACCTAATAAAAATGAAAAAAAAAAAGAAAGTTCTAGAGATAGATGTGCAAAGAGAAGCCAGGCAACTGTTGGTCGCGACTGTGGA
AATAAGAGCTAGGTTGTAGCTGACAGTAACCCATTATGAATATACTTCATATAACTGGCCATAAGACTGGATAAGATGGGTTATTTCATCTTAC
ATATATCTTATTATTACCTTAAAAAATGGGCAGATGTAAACCTAATTCTGTCCACATATACTTGGAAAAAAAAAGATATTGTAAATAAGAGTAA
AAAAAAAAAAGAGTTATTTATTTATTATATGTAAGTACACTGTAGTTGTCTTCAGACACCCCAGAAGACGGTCTCAGATCTCATTATAGGTCGT
TGTQAGCCACCATGTGGTTGCTGGGATTTGAACTCGGGACCTGCGGAAGAGCAGTCAATGCTCTTAACCACTGAGCCATGTCACCAGCCCCATG
ATTCTGTTTTTATATTTCACAATAAACATGGCAAACATGGTCCATGGATCCCTAGGTGTCTCTGTGGTCCTTTTGCGACCATAGTGTAACTTCT
TTCTGTAGCAGTGTGAAGGTGATGCCGCTTTCACTTGCTCACGCTCACACTCGCAACCTAAAATCTGCAGAGGCACAAACTGCAGGGACCCTCG
TGGGCATCAGTGACACTCATCTCTGGAGCCCATTGTGTTCTCACTGCCTCTCCTGTTGGCTGTCATCTCAGTGCTTCCTAAGTCGCCCTCAGGA
AGCCTGCTACACTTTCAGTTGGGAACTGAGCTAGCTCAGTGTTGCCGTGAACACCATTCTTCCTTGCAAAGGCAGACGATGACTGTTCAGACTT
GAGAGGTATTTCCTGAAGGAGAATGAGATAAACCTGTCACTTCAAGGAAAACACCCGACACATCTTGTTGCCGTTGCAGCTTCAGGTGGAAAAC
CAGTTTTAAAATATTTGTGGCTGTCCCATGCTAACAGCTTCCTTGAGCCGTAAGACTTCTCTGTGAGAGCGGTGGGTACTAATGAGTGTGACTT
GACTTCTGGACAGTGAGGTTCGTCACTGTTAGAGTGTCTGCCTAACTCAGTTAGCCAGTATTTTCCCAGGGACCAGTGCAATACATACACCGTC
AAGTCTGCACAAGCAGTCCATTCAGGCTAGACCAGTGCTGTAGGGGCTGTAGTGTGAGAAGCCCTTTGATCCAGATGACCTGCTGAACCTCTTT
TGATAGTCATCTAGGAATTCTGTCACGCTGCCCTCCTGCCTTTTCCCAGGTCCTTGTGACTTTCTTCTWTTCTACATCTTCAGTCAGAAGCAAG
CAAATCACTTCCTCTTGGCTTATATCAAGTCAAACATTTCACTTTTGTAAAATTAAAAATCACAGCTGAGGACTGACTGGGGTGGTGTTCTGTA
CTGAGAGTGCTTCCCTGGCATCCACACAGTGACTTTGATCCTCAGGTGCAGTTTCCCACTCTAATGCCAGCACTTGGCAGATTGGAAGCAGTGG
CGTCAGAAGCACAGAGGTGTTCAGTTGACCACAGAACAGAGAAACATAAGCCAGCATAATGGCACACACCTATCTTCTCAGCAGTTGGGAGGTG
TCCTAGTTACAGTTTCTATTGCTGTGATGAAACACCATGACCCAAGGCAAQTTCGGCAACAAAAGGTTTATTTGGCTTACACTTCCACACCACT
GTTCATCATTGAAAGAAGTCAGGACACGAACTCCAACAGGGCAGGAAGCTGCAGGCAGAAGCTGATGCAGAGGTCAGGGACGAGTGCTGCTTAC
TGGTTTGCTCATCATGGCTTGCTCAGCCAGCTTTCTTATAGAACCCAGGATCACTAGCCCAGGGATGCCAGCATCCACAATGATTCTCCCCAAT
TAACCACTAATTAAGAAAATGCCTACAGCTAGATTTACCGATGCATTTTCCTGTTGAGTGCTCTCCTCAACTTCATATAAACTAACTACCACAG
GAGGCAAAGGAGAGGGCCAAGTTCAAAGCTGTGTTGTATTTCACAGCAAGACCCTCTCTCAGCAAAAGAGAAAAAAAATTAGCTACGCCATTTA
GATTTTATATTAAATATTATAACAGTTGCTGCTTCATCAAAATAAAAAAAAAAAAAAGGAAGAAGTATAAATACTGTCTCGTGAGCTCTCTAGT
CCCTTATACTATATGTCTCCCAAAGGAGTATATACAAATATTCCAAAGAGACGTTCCAGGCTAATTTTCGGATTCTAGTATGACTTCAGTGTTT
TGTTTTGTTTTAAGATATAGTCTTCCCTGCCTATCTTCGAACTCACCATGTAGAGTAGGCTGGCCTCGAACTCAAAAGAGGTCTACCTACATCT
CCTGAGTGCTCCGGCTAAAGATATGCAATACCACACCTGGCCTCATTTTAGTATTTTAAATAGGACTATTATGAGCCTCACTATAAAAACTTTA
TTGAAAAAACACATATACAATACACCACTGCCCCTCCTCCTGCTGTATGCCCACTGCCTTCCTGTACTGACTGAGCTCATCCCCTACACTGTAA
ATGACTGTTCTTACTACCAACCGCTGTGCAATGTTGGGPGAAGATAGCACACACCACTATGTACATCAGCCCAGCATAGTGCACACCTGGGTGT
TATTGTTATTACAGCAAAAGATTACTGGTGGCTTTAAAGTTTTTACTGCAGTCACAGTAAAAAACGATTGTAACTTCTTZTGTCGTAACTCTCC
TTACTGAGCAGTCATATAAACCTTTTGAAACAATGCTTAGCCAGTCTTTTTTTTTTTGTCTGAGGAACTTGGGAAAGAGAAACAGAATCAGTCT
AAGACCTGGTTGTTAGCGCAGAGGACTGTGTCCCAGGATAGAAACAGGATAGTTCCCCTCCTGTGCTTACGTTACTTTTGTTTGTCGTCCCATT
GTCCAAATTGATTTTTTTTCTCTGAAGCACCCTTCCTTGATTGTGAAGTACTAAATGATAGAAAACTTCAATGTCCACTTTTCCTTTTCTAAGG
ATGTCTCTTATCTCCCTTGCTGAAAATTACTGAGTATACACTTTTAAATATATGCTTACATTTAAACTCTCAGTATGTTTAGAGTCTGACAGCT
TGAAAGTGTTTTGTTTGTACCTGAGGAGGCACAGCTACAGAGGGTCACAGTGTCTGCTCACTTGTQCACAGTGAGTCAGCCAGGACTCACACCC
CAGGTTGTGTTCCTGAAGTTTCTTCATTCCCAAGGTGTGATACAGTCCAGTCCAGGTCTAAGTACAGCCGCAGCCTGCTCACACCAGCTGCTTT
CCTTTTTGCAGTGATGCATTGCTGTTTGTAGGACTTATAGACTCAGAATGCATGTTCTTGCTTGATGATATTGTGAAGTTAACGTGTACTTTAA
AAGAAGTGTCATACTTTCTCATAATACTAAGCCTAAAAGACATTTTACATCACAGTTAATACACTTATTAAAAGTACTGAAACTTGCTGATGCT
GGCACACGCCTTTAATCCTCCACATAATCCACCATGAGGCCATATCACATTTTGTTTCAGTCAGGTGCTGAAGGACACTTGAGTTGCTTCACCT
CTGCATCACGGTGGCTCACACTTGCTGTGACCGTGTGTATAAACATGAGACCCTCTACACAGTTCTTTTTGATCACCATCCAGAAGTGGACTGC
TGGATCATAGCTGAGTCTTGTGTTTAAATTCCTTTTTCTCTAACTTTTATTTATTTATTTATTTATTTATTTATTCTTATTTTATGTGCATCAG
TGTTTTGCCTGCTTGGTGGTAGCTGGGGATTAAAACTGGGGTCCTGAGGGAAGCAGCCTGTGCTCTTAACTGTTGAGCCGTCTCTCCAGCTCTA
ATATTTCTTTTGTGTTTCTTTTGAGACAGGGTTTCTCTGTGTAGCCCTGGCTGTCCTGGAACTCACTCTGTAGACCAGGCTGGCCTTGAACTCA
CAGATCCTCCTGCTTCTGCCTCCCGAGTATTGGGATTAAAGCCATGCTCCATCACATGGACCATATTACTCAGTCTTAAAGGAGAGGAAAACTC
TGGCACATGCTATATCAGTCATGAGCCCCAATCCTGAACCCCAAAGACATCCTACTAAATGAAATAATCCAACCCAAAAATGAAAGCTGTGTGC
CTCCACTTGTATTACATGTCTGTAGAAAAAAGTCTTTGCTGCTGCCTGAGAGGAGGAGGAGGAAATAAGGTGTGTGATCACGTATAAAGTTTCA
GACGAGTAAACCAGAACGTTCTGGAGATAGGTCGCACAGCGTATACATGTAGTCACATCAAGTGCACACTGAAAAAATGCTTAAGATGATAAAC
TTTGTTTAACCCCAGCCAAACATGTTTGAAGTCAGAGGAGTTACACAGPAAAAAAAACACTAGTCAGTTATTAATAAAGTAGTTTTTATTATCA
AGGGAAGTATTAGCATATTTAAACTATATGTTTTTTAAAGTATTGTGTGGGTTTTTTAACCACARAATGTATATATCACTACAGAAGAAAGGAA
AAAATATAGTCCATTGTTTTTATCCTGGGCTAGTGTACATTTTACTTACATATTTATTTGTGTGTGTTGTGCAGATGTGTGTCATGTTTGTACG
CATGTGTGTCGACTTCAGCCATGGGAGCTGTCCATGCTCCTTTTGAGGAAGGAGTTCTCTTTCCACCTAGGACTTCCCCATTCGGCGCCACTGG
CTGTCCCGAGCCTTGGGGTCCTCCTCTCTCTGCTTCCCAGTGCTGGCCTTAGCAGCACTGCTGCTGGGCCTGGCTTTAAGTGGAGCTGGGACTC
TAACTCAGCGCCTTACACTTGACCGCTGAGCTGTTTGCCAACATTGCCTTTAAACTCAGATTGCCTGTGTCTTTGTAAGTACAAGAGGTATGAA
TATGTATTCTTTGATACTTTGTTACAAAAAGAATAGAACTAAAATGGAAACATTGTGTTTGAGGTACTAAAATTGAGGTCCAGACCCAGATCAA
ATGTAGGACTCAATTTTTAAAAAATTTATTTTTGGAATATTCTGTCTCCAAGATAAAGATCCTGAAGATGAAGGCTCTTTGCAACATTGATGCT
TGTGGCCCACTGGTTCTCCTTCTGGGGACTAGACCTACAGCAGTCCTGCCATAGTGTTTAACCAGCTCCAGACTACCTTTTGCTCTAGTTTTCT
TTGCACATAGCCTGAGTGATACAACTAGTTCCCATGAGCTGAGCGATATTTCACACACTGTGCCCATGAGTGCCCTTGGCATTGGCCCTCTCCA
GCCACAGACCGCCAGGAGCACACTACAGTTGAACAATCTAGGTTCAGCCCCTTCCAGAAGGATGCATACAGTGGGCAGTACAGGGTTGGAGAAT
TGCATCTCACAAAGGATGTTGCGGTGCATGTCAGAAAGGATGGTGGCTACGTGTCAGGATGTTGCGGTCCATCTCAGATAGGATGGTAGGTACG
TGTCAGGATGTTGGGGTGCGTGTCAGAAAGGATGGTGGGTACGTGTCAGGATGTTGGGGTGCATGTCACAAAGGATAGTGGGTACATGTCAGGA
TGGTGGGGTGTGTGGCACAAAGAATGTTGGTAGTCTTGTGGGCTCTCGTGTGGTCTGCCAGAGTTCTGAAGAAGCAGAAGTTTGCTCTGGAGTA
GAAAGGATATTGAGTAATCCTGTGCTGGAGAATGAAGACTTGTGCCTAGAGCAGAGTGAGACGATATTAATCTATGGTGAGGTGCAACAGTTGC
CCAGAGCAGCCAGGAGACGGGGCTCTTTGATATTTTCTACGGTGTACAGTGACCTTATCTTTTATCCAAGCTTAGATGATAATTTGAAGTGTTC
TTGTTTTGTCTGAGTTTCTGATGGTTATGCAGTGACCTTGTCTGCTGTTGGTGTTTTATAAGCTTGACTGTGTGCAGTCACAGACTGATGTGGC
CTTGCTCCGAGCCCAGGCTCCCCCCAGACAACGGAGCCTGCAGCGAGTGTCAGCACCTGGCCATGGCCAAGGACTATCCTTTATTTCTCTTAGG
AAGAGTCTTTAACCTAACTACCCATGTATACTTTTTCCAAGTAGTTTGTTTCAGTAGACTTAGAAAACATCAAGATTAATGGTAAAAAGGAGGA
GGAGCTGTCTGAGAGACTTGTAGGATACPCATACAGACTTGTTACGAGCAGTGCTGAAAGCATTCTTGAAATGCCATTGACTTAGAGGTCGATA
AACAGTTAAAGTAAGTCGCCTTCAGAGCCCGTCACCAGGAGAGCCTGCATATTGATCACCTGCATTGTTCGGATCACGTTAAAGGAGTTTTTCT
GTAACCAGGATTGGCCATACTCACTGACAGAGCCTTGGCCACTAACATACTATGATTAATAACCTCGCCATATTTTAATTTTAAAAAATGAAGT
ATATGTTGTTTTGCATGATTCCTCGCTTTTAGTTTAAATTAATGTATCAGCCAGACCTGGTCCTATCAGTTACAGGCTTTCACTATACAAAGAA
CGTTACACACACGATTGTTTCTGGACTTTGATGGTAGCACAGGAAAGCAGCGACCTGGACTAGACCTGCAATACTGTGGTTAATAAAAGGGCAC
GTGTTCAGACAAAGTCAAGAAACGGGCTTTTATAATGTAAACTATGTTGAGAACCTACCGAGCCAAATAATGAATCATCTCAGTTCTAAGAATA
G~CGTCTAAAGGTTTAAAATATAACAAACAAAAATTATCTCTATAATTTAAAGGAAATTAACCAGGAAATTGACAATTTCCTTCCTTCCAAGGA
TTCAGAAGTTTTCAAATGGTGTTCTCTATGTTTCAATGTTTTCTTGGTGTTGCTTTTCAGAAATTTGATCGGGGAACTGGTAAGGTCGTCCCCA
CCTATAATTCCAGCACTAGAGGCGGAGACAGCGGAGAGCAAAGGAGAAGGAGGTCCAGCGTTAGCCTTCCTGACAGAGGAGTTGGAGGTCAGCC
TTCGAGCACATAAGATTGTCTCATTAATCACAGCAGTAACAATGCCAGGCCCTTCTGTAGCACCACTTCTGCACTGCAGGCTCCTGGAAGGGAC
AAGAGAAGGGTGTACTTTTATATTACAGTATCATTTCCTACCAGTTCTTGTGACTTTCACATGCACACATACATTAAGTAAAGTAGTCCATTTT
AAAAGAAGAGTCAGATACATCGGGCTGCTAAGGTGGCTGGGTGACCTCAGCCATCACCCCTGGACCCATGTGAAGATGGAAGGAGAAACCAACT
CTACCAAGTTGTCTTCTGGTCACCTCCACATGTGCACCAGGGCACAGGCACACGTCATACACAGCTCATACATTAATCACACAGGAGTGAGACA
GAGGAGCGCTGGCTCATTTTTTTTTAAAAGATTTATTTATTATTATAAATAAGTCTGTCCCCAGATGTACTAGAAGAGGCCATCAGATCTCATT
ACGGGTGCTTCTGAGCCACCATGTGGTTGCTGGGATTTGAACTCATGACCTTTAGAAGAACAGTCAGTGCTCTTACCCACTGAGCCATCTCACA
GCCCCGGCTCATTTCTTAAGATGACGTAGAATATTACGAGTTGAGACTAGCTGGACTCTGTAATAAGACCTTATCTCAAAAGCCCAAAAGAGAC
GGAGTTATATGTGGTGGTGAATGTGAGGGCAGCAGCTTTTCTTTATTTTACTAAATAATTTATTCTTTACTAAATACCAGACTCTTTGTGTGTA
TATACTGTGCCATGCATTTGGGGTGGGGGCTGTTATTATGTTCTCTGGGTCAGGAAACAGATTAAACTTGCACACCTTTCCAAACCAAACCTAA
GCTTCGAATCTGGTACTTTGAACCCCTACAGTGCATAATCCTCCCTTTAGTAATCAAGAAAGAAAGTCAAGCTATTAAATAAAAAGGAGTTCAG
AATTCAATGATAATACGCTGCCATATATTGAGGTGTTGGTTTGTATTGTTTTGTTTAGGTTTTTCAAGACACGVTCTCACTATGTAGTCCTGGC
TGTCTTGGCACTCTGTATGGACCAGGCTGGCCTTGATCTACCCACCTCTGCCTCCCAAGTGCTGGGATCAGTCCCCTAGAACTGAAGTTACACA
CAGCTGTGAACTGCCACGTGGTTGCTGGGAACTGAACCTGGGTCCTTGCGAAGAGTGGCCAGTGCTCTCCACCGCTGAGCCATGTCTCCAGCCC
CTAAATGAGACATAGTTCATGCTGCACATCATAAGACTATTACTCAAGCATGGTGCACACACCTGTCTGTCATCCAGGAGTCCTAGACCCAGAC
ACCATCTGCCAGAATTCAGAGTTCTAGGCCACCTTGTGCTGCATTATCAGGCTGTCTTAAACTTTCAGAACAAAGACTTGTAAATATTGACACT
GAACAGGTTGCCTGCTACAGGTCCATAAGAGACCACTAAAGCTGAGTTTCTCAAGTTGGCAAGAAAGGAAACTTCCCAAATGTTACAGTTCTTA
TGATTTGGCAGATCTGCGGTTTGTTTGAAGATTTTCTTTGACAGATTTGGTPTTPGTTTTTGTTTTCTTGTTTTCTCTTACGCCAGGTTATCAA
AGCCTGCGACATTGGGGTGTCTACTATGAAGAAAGGCGAGATCTCCCATTTATTATCTAAACCAGAATATGCTTATGGCTCGGCTCGCCACCTC
CAAAAAATTCCATCAAATGCAACTCTCTTTTTTGAGGCAAGTATGTGTAGTGCTGTGCATGTGCGGCCATGACACGGAGCTGCGCTGGCCGCTG
GCACCCTGCTCCAGCTTATTTATTTTGGAGCTTGGCTTCTTGAATTGTTTCCCACACATCCAGGGGGTGTGCCAGTGCTTTCTTAGAAATGTGT
CTGGCACAAAGTGGGCATATCCAAACAAACAAAAGTCACAGATGTGGAAGTAAAAGTTCTGGTCAGTAGAGGAAGTAAGTCATATCCATCCTGA
CACQCTQGAAATGGTGGTGGGGAGTGTAAAGTTGTGAAGGTTTCCGACTGTCTCCTCATATCCATCAGCAGCTGTCAGTCGTCGTCCATTGTTT
ACTGCCCTGAATTAATTACACATAATTGGCCAAACTGCATCTTTATCTAACACGGTGAAAGCACTTCTCAAGTCAGTTCAACCCCAGTTTCTTA
AATCTTAAGGTGGCAAGGTCACAAGTCTGGGGTGGGAAGCGGTTGTCCTCAGAGTCAGCCAAGACTGTTTTGCGCCAGCACCTTGTCCTCCTGG
CCTTTTGCCCACAAGGCAGTTGTCCTACTATTTCCTGTCTGTCTTTGCACGGCAGTCCCACAGGATGCAGTCCTAGACGGTCTCATTACACGGA
GTTCCTTCCAAGAACTGCAGAGTACATCGCTCTCATGTCCCACGTTACTCTTATCTAAGCTCTATAGATAAAGATGTAGCTTAAAGTTTTATAA
AAATAACTGTTAAACTGGCTTTCATCTTTGCATTCTAGATTGAGCTCCTTGATTTCAAAGGTGACGATTTATTTGAAGATTCAGGCGTTATCCG
TAGAATCAAACGGAAAGGCGAGGGATACTCAAACCCAAACCAACGACCAACGGTAAAAGGTGAGTAGTGAGTACTGCCGGGAGCCAGCCTTCCC
TGAGCAACCAGACATGCTTCTAAGAGAAAAAGTCATTAAACTCTCTATAAGAAGAAGAAAATCTATCTAAAACAACTACAATCACTTTCTTCAT
TTTAGCATGTATATAATATTTAGACCAATATTTTATTACACAAGTCTAGTTTGGGTTTAGTTATTTTCTTCTTGCAGTGTTATAGGTAACATGT
CATTCAGGATTGGTTCTAAACAAAGAAGCTCTCAACCAGGAACAGGAAATTGGGATCTAAGGCTGGCTCTGCACCTCTGGGCCTCTCCTGCGCC
CTCACTTCTTCCAACACTGACGCTGTGCTGGGCTTCTTGGTCTCAAAGGCTCTGCGACCCCCAATAACCCACATTGGGAGTCGTGCTTATGAAA
GTCGAAAAGGCTACAGACAGCTGTGACACAGCCACTTAAAAGCTTACTCATAACATGTTTTCATCGTTTATTATGAAAAATTCAAATCTATACA
CCAGGGTTTTTCCTGTGCTGTGGGAACTCCTCCAGAGTCAGTGATTCATAACAACTTGTTTTGTTTTGATTTAGTTTTTGAGACAGGGCATTTG
TTGAGACCAGGAAGTTAATAGGGCCATCCCCTGTCCCACTCTCGTTACCATACTAACTTCTTTTCTAGTCTGGATACAAATTCAAAACCTGGAG
CTGCATTTACCCCTCATGGCTTTATTCTATTCCAGTGAATTAGTCTTCCATCTTTGTTTCCTGTGACTTTGACACTTTTTTGTTTTTGTTTGTT
TGTTTGTTTGTTTTTCGAGACAGGGTTTTTCTGTGTAGCCCTGGCTGTCCTGTAGACCAGGCTGGCCTCAAACTCAGAAATCTGCTGCCTCTGC
CTCCCGAGTGCTGGGATTAAGGCGTGTGCCACCATCGCCCAGCAACTTTGACATTTTTGAAGACAACTTTCCATTTGCTAGTAGAATCCCATAG
TTGTTGTCTTATGCCCACAGGGACTAGATTGAGCTATTAGAAAATGCCCTGTGCGTGGCGCTATGCCCTCTTTAGCTCATCATTATCATCATCA
CCACCATCATCACCATCCCTGTCAAGAQGCATGTGGTGACTTGCCACTCCTGACTGAGGGCTAGGGTAGAGCCTCCCATGCTTCTCTTTTGTCA
AGTTATTCTTTGTTGTCAGTGCTGAGTGCTTCAGAAACGGAATCCTGCGAAGCCCCCAGCCTCTCCACAGCGTCCACAATGCACTCCGTCCACA
ATGCACTAGTGAGGTCTCTGGACAGCAGTTATCACTGTGCTGTGTGATTGGTGGTAACTTTCTCATTTTACATTCATTACTTGGAATTCTACTG
CAAGGAAGATCTGTCTCTCTTCCCTCTGTTGATTCAGCCTTTTACTTTGTCACCAACCACCTAGGCCTATTGTCCCCCTCCCATAGGATGCTTT
CCCTTGCTGCTCAGATTGCCCCAGTGTTGACTGGTGGGAACACCTTCCTTCCTGGGGTTCACCACATTGCTGCCTGTGCTTTGTTGTTGTTGTT
GAGAACATCCTTAACTCTTTTTGCTTTGTCTTCCTCACTTTATCGTGCTCTGAGATGTTCTGACATCATGCAGTTTCCAACGAGCTCTGTTCCC
TTCCACTGGAAAATAGCATCPACAAACAGTGCCGCATGCTCATGTGTGTGTGTGTGGCGGGACTTCATGTTCCTAGAGCATCTTAGCAGACAGC
TCGGTAGGACACTTCCAAAGTATAGACAAGCCTCTGCATCTGCATGGATCTCTGTGTCAGACACATTTGTATTTAAAGATTTATTTATTATTAT
ATGTGAGTACACTGTAGCTGTCTTCAGACACTTTTTTCTTCTCTCTTTGGCCCGAACATTGATTGATTGATTGATTGATTGATTGATTGATTAT
GTAAGTACACTGTAGCTGTCAGACACACTAGAAGAGGGCGTCACATCTCATTACAGGTGGTTGTAAGCCACCATGTGGTTGCTGGGATTTGAAC
TCAGAACCTTCAGAAGAGCATTCAGTGCTCTTAACCGCTGAGCCATCTCTCCAGCCCCACATTTGTATTTAAAACATGAGTACTAGGCATAGCA
GGTAACAGCACTGCTTGCTTTCTCAGAGAACATAGGTTCAGTTCTCAGTGTGTACATGGCAGCCCACAATTGTCTATAATTCCACTCCCAGGGA
ATCTCAAGCCTTGTTCTAGCCCCTGAGGGCAACAGGCACACATGTGGTCCACAAACATACACGCAAGCAAATGACCCATGCACGTAACAACTTC
TTAAAAGCTGTGAGTACACACGGTGCCGTACAGCACCACACGTTTGTTCTCCTCCCCTCATCCAGAACTTCTCTTTCCCATACAGCCACAGTGT
GTTTACGTCTGCAGTCCTAGACTGCATCAGGCCACACATTCTGGTAAACACCTAACAGTGTCTGGGTACAGTGGATGGTATGACATGGGCTACA
TAGGGACTTTGGAGGTCTTAGTCTCAACTATTGATCTTGCAATTACTGCCTAATTTACATCTTCAGACAACTTTAACACCCTTGAAGCATCAAG
TTTTCTTGTGTCTAAATGGGGCTGATTTTTCCTGTTTGAGTTGTGATAGTTGTGGCACAGGCAGGGGAACCTCTTATACAATGGCCTTTCCCTT
CTAACCCTCTCTGCTCTGTTTACATAACTTGTTTTGCTTCCTTTACCTGGATCTATGGAAGCAGTTCTTGACTCTTCATTTCCTACACCTAATC
CTTGGTTAATTTGTCTCTAGTGACAGTCTTCATTTTGATTTTATATCATCTTAATAGTGGTAGGCTTTGTTCTGACTGAGTCGGCTACATGGAA
GGCCTGCTACATCATGGTCTTCTGTGCTGCTTTTATATTTGTGAAAATCATTTTTTTCTCAAAACAGTGTGCTATTTACTCTTATCAGAATTCT
CACTCTTACAAATCAGCCATGGGTTCTCCCCTGCTTTTTCTTGCCAGATAAAATCACTGTCTTGTCGTTTGTATTTCACTGTTCTCCTTTTTCC
ATCAGATAGAGAACCAGTGTGTGCTGAGGGTTAGGGGGATTGACTATGATGACTGACACCTTAGTCGTCACACTTGAGCTTAGGTGCTAGCCCT
GCCTCCATTGCAGTGCGAAACTTTTGCTGTCATGGGCAGTCGTATTACACTGAAGTAGGGCTCTGAGTAGCCCCCATCCGTCTGGTACAAACTT
GCATTTTGGGTTTCAGCTTGTTAGTGTTGGTGATGGGAACTGACTGGGGGAGCGCAGGCTTGTGGGCTCCTTTACCCCAGGCTTTCTGCTCCAT
TTGACTGTAGCTGCAGTCTGTGGTGCAGCTCCAACTGTAATCTCCAGGTTCCTATTCTGGGAATTTTTCTTCCCTCTCACCTCCTAACCCGATA
CAGTGGTATAGGTGGAGAAGGGAGAGATPTACTCTGTAAAAAGAGAAGGTCGTGGTGGTCCACACCTTAGAACCTAGCACTCTGGAGGCAGTGG
TAGGAGGACCTCTGTGACTTCAAGGCCAGCCTGGTCTACTATCGAGTTCCAGGGTAGCTCCAGCTACATAGAGAGACCCTGTCTCAAAAGTTAA
AAAGAAGAGAGAGACAGAGAGAGATGGATTAGAATTGTGAACTTATCAAATATATAAAGTAGACCGGCTCGGACTGACGGAAACTGGATTCTAT
AAATCCAACCCAAACCAGGTGTTGAGAAGACCTCTGTAGAGGTACATACCGTTCTTCCCAACCAGCTCTGGCAGAACTCCAAGCTCACAGTCAG
CTGGTCCAAGGGAGCCACAGCAGGCTCTGGGGCAATCATCAGACCTGCTATAAAGCAATATGGGGCAGCCACCCGCACCAGGAAGCCTCTGCTG
CAAGAAATCTCAGTCTTGGCTAGTGGGGACGATCTCAGTGCCCAAGCCTCCAACCCATTAAATATATCTCAGGGGAGAAACTGGCAGAGGCAAA
TAGTTTTTAAACTCCCCAGTGACTCTAGTGTCCAGCCAACGTCTGAAAATGGACTGCCTGAGGGTCTATCTCACTGTGATCTCTCCTCAAAAGC
TAAAGCCTAGTTCTAGACTGCAGCAGGGAGCCTCAGAGGCTGCAGGGGTCAGAGGTAGACTGCAGAGCAGACTAGTGTCCACTGTCTTGGAAAT
TCTTAATTATGTACTGGGCGTGGCAGAACCCCACAATAGTAATGTTGTCAAGGGTTCTTTCTCTAAAAGGAATCTTTTCCATACATCAACAGTA
AGGCAGGGCATCCCCAACCTTTTATATATAGCTGCCTAATAATACATAAGGAATCTGCACCTATATCCTTCACAATCACCCTGTTGGGAATGGA
CTGTCATGTGCCCTGCTTAGATATCAGTGACAGCTACCTGCAGTCATTTGAACATCTTTAGGTGTATGTGTGCAGATGGTGAGCATTGGTCAGC
AAGTATGAGACGGTCTAAGGCAGATGAACAGAAAACTCAGAAGTCGTTTAAGAGACAATTCAGAACTAACAAAACCAAAAACCCATCCACACTT
CTGAAAATGGCGACGATAAGGAACTCTGGAAATTGATGTTCAGTAACATTGACCTCCAGACTTAGAGCAGACGCGTGCGCGGGCAGGTCCTCTA
GTCCAGACTGGTGATCTGAGCAGTCGGCAAGGGACCAAGGCAAGAAGTGGGGGTGGGGAACAGTAAGGAAGGAGCAAAATAACCGTTCATCTCA
TCAGTCACAGACAGAAAGTGTGTTAAGACTTAGAAAGGGCAGGTGACAGWGACAAGCAGGAAGAAGTAGCTTTTCATTCAGTTATACTCTTGAT
GAAATTGCTAAATTCTTACAAGATATAGTAGAATTTGCTAGAAAAATATCCGGGCCAGCAAAAGAACACTTGAGGGCTGGAGCCCAATGCCTGA
CACCATGTTGGGTGACACACAATACAACTCCAGTTGCAGGACACTGATGCCCTCTTAGGCCCCTAACGCATCTTCTACATGTGTGCATATACAC
ATACACTGACTGCACACACCATCTTTGTTTAAAGCTGACTTAGGGTGGTGTGGTAGAACAGGGGAGAGAGGCCCTTAGAGTTCATTGGCCATCC
AGTCTAGTCAAATCAATAAATTTTAGGTCCTGTCACAGACCCTGTTTTTAAAATACTAAGGTAGAGCCTAGCATAGTCCCATCCGTCTTTAATG
CCAGCACTTGGGAGGCAGAGGCAGGTGGAGCTCTGTGAGTTTGAGGCCAGCCTGAGCTACACAGAGAAACCCTGTCTCAAACAAAAGGTGGAGA
ACCACTGAGGAAAATACCCACCATCAACCACTGCCCTTCACATGACATGCATGCATGGATCAATGACAGCTGCCAAAGGCACCAGGACTCAGAA
TGTCGACATGGTCAGGCTATTTATTCCTTGTACTTGAAGTAAGAAAAACATATCTAAAATTAAAAGTAGAGTAGAGGCTTCATGTATCTTCATG
CTAATGTCTGAGTGAGCTGTGTGTTGTTCACATGCCTTTCAAACATPGAGTGATGGCTAGCAAATGACCACAGGAAGAAAGCACAGGGTTTTCT
TTGCTTTTTATCTTAGGTTTTGTTTTGTTTTAAGACAAGGTTCCTCTGTATAGCCCTGGCCATCCTGGAACTCACTCTCTAAACCAGCTGTCCT
CAAACTCACAGAGATGCCTCCGCCTCTGCCTCCACCTCCACCTCCTGAACACTGGGATTAAAGGTGTGTGACACCACTCCCCAGCAAAATCACA
GGTTTTTAAAACTATTTCATTGTGTCTCAGAAAATAGCACTATATTCTTTTCAGGTGTTTTAGAGGTAGATAGCTCCTTTTTCTAGAAAGTATC
TCCAGGTCTTCAAGTGGAGTGAATCATAATAGAAAAAAAAAAAAAAAGAAAGCAAAACAAAACAAACAAAAATCCAAGCCACTAATGAAGTGTT
CATTTTAGGATTTCGTACAGGATAAAAGCTCTGGTGCAGTGCTGCATTGACAGCCTCCTGCAGCTTGTTAAAATCAGAGTACTGGACAGACAAA
ACAAAAGCCAGTGTGGTGGTACTCCACACATTTCGGCCCAGCGCTCGGAAGCAGAGGCTGCTGGATCACAAATTTGACCCTAACCTGGTTTACA
GAGGGCGTTCCAGGACAGCAAGGACTATACAGAGAAACCCTGTCTCAAAAAACCAAAAATAAGTAAATAAATAAGGATGTTGACTGATAGATTC
AGAAAGGAAAAATCCTATAAATTGGTGTAAATTGCCACTGTTTTCTCTGCTTTCAGATTAGTCATTAAGTAAATACTTATATAGGGGTCCTGAG
CTGTGTGCTAACTGTTGTGGCATACAAAGGCAGTGTGGAGCTCTGGGCTGGCCTGCTGGGACTCTTCCTTCTACTTGACAACTGTGTGGGACAA
AAGTGCATTCTTACAGGGATCCTAAAGTGTTCATTGGAGGGCACCTCCCTACTAATGTGAGGAATAACCCTGTATGTTGTTCCCTGAGTTCATC
TCCACACCCACACGTAATGCACTGCTTGCCTATCAACAGATGAATGAATGAAATGCCAGCTCTGTTCAAATGCTTTAATGTAGCGCCTGTCTTC
TTTTTTCTCTTTTACAATTAAAAAAAAAAATCAGTTGTATGCTTATGCATGCTTTACCTGCGTGTATGTCTGTCTACCATATGTATGACTGGTG
CCTGAGGAGGGCAGAAGAGGGCATCCTATCCTCTGGAACTGGAGTGATAGGTAGTTGTGAGCCACTTGTGGCTGCTAGGAACTGAACCCAGGCC
CTCTCTACAAGAGCAACAAGTGCTAACAGCCAAGCCATCTGTCCAGCCCCTTTGTTTTCTTCAGAGACAAGGTCTCCTGTCACTAAGGCTGGCC
TTGAAATACTGGTCCTCTTGCCTCTCTCTGCCTCTTGAQTTGAGTGATAATCCCCCAAAGTGCCCGTGCCACTATGCCCACTCTAAACTCTTAG
TTATTTACTTTGTGTGGGTCTGGGACTCATACCTCGTGCTTCAAGAGTGCCGAGTAAGCACTCTACTCTGAGTCCTATCACCAAGCTCCTCAGT
ACTTAAAACTCCCTGTTGTTGTTGCTGCTATGTGTGTTTGCTTGACAACACGTCTCACCAGGTAGCTCTCAACCTCCCAGCTCTTTATGAAGCC
CTAGCTGCTCTCAAACAGGCTGGGATCCTCTTGCCTCTGCTTGCCAGACGCCACTACACTTAGCTTTGGAATGCTTCGCTTCTCCTAGCAGTTT
CAGGCTAGCCAGGATCATCTCACCAACCGAGGAGAGACCACAGACAGAGTTGTTAGGCGGCAGAATCACACTGGCTAATGTTGAGGTGTGCTCA
AGTCCTCTGCTGTTGTAAAAGGAAGACCAGTTAAGATCATAAAAGCCATTCCAGTAGTCAGGACCCGCGCCTGCCCTGGGCTAGGGTCTGGCTC
GCAGTGCACCCTTCCCCTGAGTTAGAGCAGGAAGGGAGGCTGTGTCGGGGGAGTCTGAGCACCATGCCTGACAGGAATGATGTCCTTGTGGTCA
GTGGTTAATGTACCTCGCTGCTTTACAAGACTCCCGGCTTGCCTTCTTGGGGCATAATAACATCCACTCTCCTGGGAACCCTTGCCCAGTGTCA
TTGACTGGTCCCACCCTGGGTTCTGCTAGCCACATCACCAGTCTTTCCTAGTAGTGATGCCATTACAACACTGCCGTTCAGAGCCCATCACCCA
GTCTTTGGGGACGAGTGCAGAGCTATCAGACACCAGCTACTATAATTAGAAAAGGGAAAGCAGGCGCTCACCGAGCTCACATCTTAGGCTGGGG
CATTTACAGCACTTTTTTTAAAAAGTTGCAGCCTCTTCCTCACTTTTGCTTCCTGAAATACAAGCTGTACACTTTTGGGGTTCTCACATTTCAG
TTTTTGTTACTGCTGTATGCTCCCCACCCCCATTTTAATCGGAGAACAAATTGCTGTCAGCACATCGAGTTCATGTGCCAGCCACATTCAGAAC
AGGGTGTTCTGTGCTCTTCAAAACAAAATTGCTCTAGGGCAGTAACAGAACAATAACTCAGAGCTCAGTTTAAGTGATGTCTGCAGTGACCAGA
CTCACTTGATGTGCTTACACTCTGGATTGCACAGCTGAACTTGGCTAGTTTGGTTTGCTTTGACTTTGTGGGGTTTGTTGGAGTACCCCCCTTA
CAGGTTACATAGACTTTTAAGTCAAGAGAAAATATTGCCAGTTTTAAACTTGTTTGTTTCTCTTTACCAAAAAAAAAAAAAAAAAAAATCCCTA
AGAAAAGCCTCCTGTGTGCACTTGTGTTCACTTGGACACCATTGTAGATCATTTGCTTCCTGTAAATCATGCPGCATCAGATTAGCAGCAGACC
TCCTGAGCCCTAGAGGCTGAGCTCCCGAGTGAGTCATGGTGGCTTGTATTAAATATTTATGATATGAGTATTTGTGCTATGGAATACAAAGTCA
AAAGCACCCACAGGTCTTCCAGAGTCAGAGCAGGGGAAGTGGCATTACTACCAACCCGGCGCCTCTGCATGGATCCGCTCAGACCAAGTCCTTA
CTGTGCAGAGGCCTGCCAGGGCCCTGGTGCTGCCAGCTCTCGTCAGCAACCTTCCACGACTTGTCACACCAGTGTTCAGAAGCCAAACAATCCA
GCCTGTGGTGACCTTTCTCCATGTACATGGAGACAATCATGGGCTCTGTTTACCAGCTCTGACCCTTCATTTTTCCTGACTTAACATTCCATCA
TGTCCTGAAGTGATTGGTGCATGCATGTATGTGTGAGGAATCGGGAATGTCACCTAAGATCTCTAATTTGTATTATTATGTATGTAAGTCTCCA
CGTACAGTGAGAAGAAATGATTCCCCTCTTCTACCACTGACGCCCAGGTAATAAGATTGGGACATCAGGTGCACGCAACCTTGCGCTAGCTGCT
GATTTTCCAGACACAATTGGACAACTTAAAAAATCCACGTAACTCCATGTTCTAGGGCTCTGATGCCCTCTTCTGACCTCTGTGGGCACCTGTA
CATGCATAGCATATAGTCAAACACACACGTATGTAAATTAATAAAACCTTTTTTTTTCCTTTTTAGATTTTTATGTGTATATCTTTTTTTGTCT
GAATGTATCCATGCAGTGCCCATGGAACCCAGAAGACGGCATTAGACCCCAGGAGCTGGAGGCACAGACAGTTATTACAGTTACTGGCTTCCAT
ACAGATGCTAGGAATGGAACCCCAGCTCTGTGGCACAAGCAGCAGGTTCTCTTCCCCACTGTCTCCAGCCCCAGCAATTGCCTTCCTGCTCTCC
CTTTGTCACATCCTGACTTTCTGGTTACTTTTTGCTTTCTTCTGACATTCATTCATCTTTCCTGCACACAGCGATGCTTAGCACACCCAAAGAG
AATGTCTGAAATTTTTTACAGACTCTGGGAATCTCACTTAGGTCTTTGGTTTTGTTTTGTTTTTTTAAGATTTATTTATTATATGCAGCTGTTT
TCAGACACACCAGAAGAGGGTATGGGATCCCATTACAGATGGTTGTGAACCACCCTGTGGTTGCTGGCAATTGAACTCAGGACCTCTGGAAGAG
CAGTCAGTCAGTCTGCTGAGCCCTCTCTCCAGCCCCCTGTTGTGGATAGCCCTGGGGCTAATTATATTTGTTAATTCTGTTCTCCTGTGAGTAG
TTTAGAACAAGGAATGAGTCAGCACTCACGTGATTTCCTCTAAACCTGCTTCCCACCTTAATTTGTAAAATAAAGGAGAGCTGATGATTGGGCA
GATAAAGGQAAGGTGGAGAGGAAGGTGAGAAGAGAAGAAGGACAAAATGCCAGAGAGAGAGGATGCAGAGGAGGAGAAAQAAGAAAAGCGGACT
AGAAGCACATGGTCTGCAGAAACCGCAAGTTCTTTTTTTTTTTCCACTTTTTATTAGGTATTTAGCTCATTTACGTTTCCAATGCTATACCAAA
AGTCCCCCATACGCACCCACCCGAAACCGCAAGTTCTAAGGGATCTCTTAGATGGAGAAGATGGCAGTGTAGCGGTAGATCTGCCCAAACTAGG
CACACATCATGTATTCATATTAATTGAGTTGTGTTTTCATTGCCGGAGCATATTTGGGTTAGACAAATTTACCGCAACAGCCCCCCTCCCCACA
CACTTAAGATTTTTAATTACACTTTTATATATTATGTAGATAAGCTTGTACATAGAGGTAAGACATTCCACTCTGCAAATCAGCAAACTGATTG
GGGATCCTTTGCAGAACTCTGGATTTCCTCTTTTGAAAACACATTCACATTTGATCAACCAAAAGCCACAACAAATGTAGTTATAATTTCCTCC
GTGCTGAAGGCACTCCATTGTAGGGAGGAAGQTGATCGTGTGACAGTAGACCTCAQTTCTCTTCCCTCGAAAGTCTGTTCAGTTGGCAGTGCCC
AGACTGATAAATCTCAGTACCAAAGAGCTGCTTCCGTGGCTCGCCAGGAGTTCCTGCACTCACGGACAGCACCATCCATTAGTCTAAATTCAGT
TATCTGCACAAATTTAAAAACAGTAGTTACATGAACTTATAGTTTTCTTTGATTGGTTCTTCCATGTATATTTATTTATTGTGGTTGTTGGGAC
GGACCTCAGCCTCTGTACCTGTTAGGCAGGTCCCTAGCACCAAGCTACACTTCTTTCCCTGCCTCTCCCTTTACCTCTCATCCTTAGCTAGCCT
ATGGCTGTCTGAAGACCTGGGCCTACAGGCCCAAGTCAGGCTCAGCTTAGACACCTAACCTAAGAACCAGGAGACACCACCTCTTCTCCACAGA
GAACCCCATAAGCCTCAGGGTGTGCCCAAGCCTCTGATGCTCACACTTTACAATATGGTTAATTCTTTGTTTAAACTACAAGATGCTGTTGACT
CCATCTGCTGCCACCCAGCTGGGTGCCTCTGTGCTGTATGCAGCCTCCCTTGGTTTTGTTTTTTGTTTTTCCTGTTGTATGTGCACTAAAAGTG
GGGGGGGGGGGGCTGTAAGTTAGCTGTTTTATCTAGAACATTCCAAAAGTTAATATAATATATAGAAGTCATCATATAAATGAGTATGGCTATA
AAACAAGAGACAGTAGGCGACATCTGAGAGCTAGGCTCCTGTAGCCTTTGTCTTGTAGGAACTGACTTACGATTTGACTTGACAGCAGTAAGAG
CAGCCAAGATGGTGTCTTTCCTAGCTTTACTCCGACTCTGAGGTCCTGATGTATAGCTTACCCCTGTTTATCTTCCAAATTTTCTCTCATTTCT
CAGGCCTAGACTAATGGTGATCCGCTCAGATGATTAATTAATTAATGTGGAATTAGCTTTGAAGCTAGTTTCCAGGACGAAACAGTCATAGACT
TTGAGGGCTTTTAACAGACTGTTGAGATCAGATAGTAAAAGTAGAGTAAGTTGTAATTGGATTGCTTGGAAGATGATACTATGGAACTAATGTT
TAAGAGAGGGTGGTTTCTCAACACTAAGGCAAATTACTGGCCCAAAATAAGTTAAGCGGCCTTGTCAAGAAATATTTTAGGAAATTACTATATT
TGAGGTAGAAACTACTCTTCTTGTCAAAGAGAGATCATGGTGCCTATCGAACTATCTCACAAGCCGTCCATTTTTCTTACTGAGTAAAAGGCCT
AATTGAAAAGGCACATAGCATGAGTATTACAAGTAGTTGAGCTGGGGGGTCACTTAGTGCTTGAGTGATGGCCPTATTGCACAAGTCCCTCGAG
TCTCCATGACCACACAAGAGAACTGGATACATGCCTATAGTACTAATGCGCTTGGAATACACGGCCAAGAGCAAGAAGAGTTTCAGGCCAGCCT
GACCACGTCACCTTCATCTAACATGTATGCAGTATTGGAGAGCTAGCATCGAGACCTTCATCTAACGTGTACAGTATTCGAGAGCTAGCATGGA
GTCCTAGGCTTTATTTCTTGCTTATATACTTTTTCCCAAGCATCTCAAACCAAAATACTGTCACAGATGGTTAAGCCATTGTATGTATTCAATA
CTAGATATATGGCATTCTCCTAATGGTGTGTTTAAATGAGCTAGTGTATCTTGACTCTGTGTCACAGATAACAAAATAAGTATACATTTAACTT
AAAATGGAAAAACTTTTGTTCTTAAACTTTCAGACTAGGTGGGCAAAGCTTCCAGAAGACACTGTGTGTCTTATGAACTGCAGGCGAAGTAGTG
TTACTGCACTGTGGGCCACTCACTTGGCAGGCAGTGCTGAGGGGTGGCTTGTGACTGTCCTCTGTCCTCACCCTCAGTCCACCTGGAAZGCTGC
TGTGGTGGAAGGACATTTGATTGCCCAGATGTGGTGTTCGTTGTTGGGGAAGGAGAAGACCACGAACATTCCGATTGGCATCGACAAAGCCCTG
GTCAACATGCAGAGACAAGAACAGTGTATTCTATATCTTGGACCACGGTAAGACGTGAGCGCCCCTTTCAGTGCAGTGCAGCCCGGCCGCCTGA
AGACCAAGGACTGCTTGCTCACTCTCATTCTCACTCTCWCAGTCCCTTGTTGGCGCAGGGAAGCCATTCCATTGACTTGTGTGATGGTTACTCT
GAAACTTGGGGCCTCACACCACCATAGAAGTTTGCGAGTGAGTTGGCTCAGCTGGAGTATATCTAAGAATACGACTATCAGTGTAGCCTTGATT
TTGATTTGTTTAGCTGCCAGGATGCCACATCAGCAAAGATTGACTTGATCCTGTGGCTCTCCTGCTCTGCTTTTCTCTGAATTCAGCGAGGGCT
TTCGGAACTGCAGTAGTGCATGATTTACTACACTTGAATCCATGCCACGTTCTTCTATGGAGTCCCTGAAGGAAGAAAGAGCCAGCTTGTTCTT
CCTGGACCTAAAGGCAGCGGAGATGACTCATTTTTGCCTAACTTTTTCCCGTCATAAGGATAGCCATTAGCACTGCCAAGCTTAGAACCATCCG
GCATCACAGTCTCCTGTGAAAACATGCTTCCTATTATTTTTAGATCTAAAATTATACCATAAATTCATCTCTTCTATCTTGAGAAATGGGCCCC
TGAGGATGCAGGAGTGCTGCCTGTGTGCAATCGCATCTGCTTGTTGCCACTGCTAAGACTGAGACTCTGTGGGCTGCCCTCACCAAACGGAACA
CAGTGCTTTTGTCCTGTCTCTTGCCTTCGACGGCTTTTGCTATAATTCACTCTCCAATAAAGCTATTTCATTTTTATTGAAAGAGCTTTCCCCC
CTTACAGAGTAGGTTCTTCATAACCTACAGTCACTAATCTGTTTTTTGTTTGTTTATGAGATGTATTCTTTTATGTTGTAGCCCTGACTGCCCT
AAAACTCAGTATGTAGACCAAGCTGGCCTTGAACTCACAGAGATCCACCTCCTTCTGGCTCCCAAGTGCTGGGATTAAAGTTCTCTGATTATGT
TTAATCTACCATTCCAAAATTATAGTAGCTCTACACTCAGGTATCTCACGTATGGTCTTACAGTTCACTTCTTTAAAGATGGCTCTGTAAAGTC
TGAGCATTCAGAAACACATAGCCCAGATCTAAGTTTTAACCTTGCGGTAGATGCTPTGGAGAGCAGACTTACCAAACTTAACAGCAGAGTGAAT
CAAACTGCCTCTGTTTATTAGTGCAGCTAGTTCTCTCCACGTGTACAGTTCCTGGCTGAACGACTCTCTGCAGCCTACCAGTGGTGGCACCTGG
GCAAGTCACCTAACTCCCCAAGCCTTGCAAGGTTGCAGAGGCCCACATGGAGTAATGAGGCAGATCACTTAGCACACCGCCCCACCCTGCCCAT
TAGCTGTTACTGTCTCACCGATGCCTTTCATTCATTTTCCCCTTAGACCACGAGAAAATAGAAATCTCTGCAACAAATGGTATTTTTCAAATCT
TTTCAGGCATAAAAAGAACGTCAAGTTCTCCTACGTTGTATATAAAGGGGTTCCTCCCCTCATTGGGGGTGGGGCGTGTGAGTCCATATGTTAG
TACATCTCCAGGGCGTTTGCTGGTACATGGAGTTCTCCCAATACATTCTATGTAATGCTCTCCATACTGTCTCCATGTGTGTGTGTCACACTGC
CCATGTACGTAGAGCATCCCTAAGCAGATTGGCTTGTCCTACTCAGAGTCCACCGAGTCTGGGTTGCTTATAAAATGCAGATGGAATTCGTACT
CAGTGTCTTCTGCATTTCCCTTCTACCCTACCCCAACCTCACCCCCACCTTGACATCTGTAGCCTCCPTGGCAGGACGTTTTCATAAGAAACTA
ATAAAGCATTCAAGTTTCTCTCTCTCTGGAACACTATCTTTTCTTGGTAGTGTTCTTTACAATATTGTGGCAAGGGTGTACCCTATTTGAGACA
TTGCACCCTCAGATTTTTTTTCTCAATTTTTAAAAATTTGCTGTTCTCCTCAAATAGATAATTAAATATTGTGACTGATTTCTATCTAGGCTAA
GTATAGATGACTACTTTTTCCTTCCTTTTTCTTTATACCTGTTTTGTAACAGTCCCAGACAAACCATAGGCTGTTGAGAGTGGTCAGTGTGTGT
CAGCCTTAGTTATCTTAGGACAGGAAGGTCTGAATGTGGTTCTGCCTCTATATCACCTCTCAGAAAGCACATGTCTCTGCCCTCCGCTCTCTCA
CCTGTAAGAAGTAGCTGGCGAGCGCATTCACAATGCTGTGTTCTGCAGGGTTGGCTGTCCCTCCACGCCCTTAGTGTATCTTCCCTCCAAGGCA
GCTGCCGTCCAGAGGCCTTGACTCTGGACTTCCATTTCTGATGGTTGTGAGCCACCATGTAGTTGCTGGAAATTGAACTCAGGACCTCTGAAAG
AGGTCAGTGCTCTTAACAACTGGCCCATCTCTCCAGCCTGTAAGTTTCTTTTACACAGGTTTTCATGTCCTCAGTACTATGGATGTTTGTGGTG
GATCCCAGTTGTGGCAGAAGAGGGTTGTCCTTGTCCCATAAGGTGTGCAGTAATATCTCTCACACCTACCTGCCATCCAATAGCAACTCTACGC
ATTGCTTAATGTTCCTCTGACAAAGAAGGGTTAAACATCAATCCACGTAAGTGACATGGTTCCAAAGTGATGCCAGGTCATCTGTCATATTCTT
TCCTCCCTGGTAAAGACTGCCAATCATAGCATGCTCTCAGCAACAGACTTCAGAAGTACCCATCTGTATGCCTTCTTTGCAGCGAAGAGAGGGA
CAGACCTTACCACAGGCAACACACACACATTCATACTCCAGGGAAAAAACCCTGGCTACGTTTCCAACATTGCCACTGGCCATTGCTCCCTTTT
CGAGTGATGCCCTCTGCACGCTGTTAAGGCTGCCACCCAGTTCTTCCCCAGCTCTGTGTGCCTCTGCTCCAGCTCTGCCTTTTCTTTTCTTTTT
TTTTTTTTTTTTTTTTTTTTTCGAGACCGGGTTTCTCWGTATAGCCCTGGCTGTCCTGGAACTCACAACTCACTTTGTAGACCAGGCTGGCCTT
GAACTCACAGAGATCCATCCATCTGCCTCTGTCCCCCAAGTGCTGGGATCGAAGATGTGTGCCACCACCTTGTATTTGTGCCTTTTAAAGTCTT
TAATGCCACGAGACTTTAGGATCATGAGAGCTGTTGTCTCTGCWAATGTGTTGCCCCCTGCAGTTTTTCTGATTGGAGGTAGTACTCTTGGAAG
TTGACCCTTCCTTAAAGTGAAAAGCTTGTTTTGAGTACACATGGACATGTGGGAAAGAGTTCCTGTGCGGGAGGGAGTGGTGAGGGAGCTGGGG
TAAAATGAGAAATTCTATATACAAGTACGAAACTGTAACAGAACAGTAAAAACAATTGTAATAAAATAGCAAAAATGTTAAAAGTATTCAAACA
GAATTATAGTGATTTTTACTACTATAATAATTATAGTAATAGACTCTTCTGTCCTTTCWGCTCATAAAGCTTAAAGGAAAAAAGTCCTTGTAAC
CAAACAGAAAAGAATAAAGTCTAAAACCAGGCATCGATATTGAACAGCATGCTAAGCACACTGTCCTAGGGAGTACAGGAACTGTGCGCCTGCG
CTAAGAGAGCATGCGCTAAGAGAACACGATGCAGCAGGTCTCAGGAAACCACAGCAGGGATTCCACACAGAAAACCAAAGAAGTATACCAGTCC
TCCTGAGTCTTGTTTTTTCCTCTCCGTTTCAGCTATGGTTTTGGAGAAGCCGGGAAGCCTAAGTTTGCCATTGACCCCAATCCTCAGCTTATGT
ACGAGGTCACCCTTAAGAGCTTCGAGAAGGTGAGCAAACCCAACTTCGCTAAAGCTGTGGTGTGGGGTCTTCTCATCCTGTGCCTGTAACTGTG
CCGTACATCACTTCGCTAAATAGTGTTTGTTTCTGTGTTTGCTTTTCTTCATCCATGACTCTTGTCCCCCACACTTCTGCTCCGAGCGTGGGAA
GCTGACACAACACAGTTCATACACGAGAGGAGCTGGTGTTCTTATTTTTTACTGTGTGTTAGCCTCTTTTTTTCTTTTAACTTTTGGGTAGAAT
CCAAGACTTGTTCCTGTATTTCTTCCTAGGCTTCTTCTTTTTGTACTTTTTTTTCCTGAGTTGAGGACAAAAAAGTTCACGTACTGCCAAGCAG
CTCCTTAGGGGAGTTGGGGTGCAGCCTTTCAGTGCTGAAGGAATTGCACACTCCACAGGAGTTACAAAGAGGCCTCCGCTGGGGCTCCAGGTTA
CAATCCCAGTGTCTCAGCCTCGGGACCAGCAGCTGCAACCAAGGAGAAGAAACAAACGPACCCAGGCTGTTTCTCATACGTGTCCAAGAACAGG
ACAGCGAACTTGCCGTCGCCTTCAGGCTGGTGTACCTCCTCGCACAGCCTCCAACTCTGGGCTGTCTTTGCAGGCTCCCACCTGTACTCCACGG
TGTCCCCATAAGCTGAGTAAGCTGTCATCCTCAGCTGTGGCTCCCCTCAGAGACCGCCTTTCTTATTACGATTTTATTCCTCTGAAATGACCCC
ATGCTCTGTCCACCCTCGACTATCGGGGCCTCGAGTTTCCCTCCCCTTTCCATAGTGGAACCTCTACCCTTCTCCGTGCTTTGTGACAACATGG
CATGCCTGCCATCTAATCCTGTCACTCGGGAGGATCAGAAGTCAGTCTCAGCTACGTAGTAAATGGAGGCTTGCCTGAGATACATCCAGTGCTG
TCTGGAAAAAAGAAAAGAAAAAGTTCCCCAGGTCCACACCTGCAAACTGATCCTGTTAGAGGCCATACTGCATCTGGTTCTGTGAATTCGGAGA
CACCTGCCTGAACTGGGATTTTAGAAGTGCTCCATGCACGTGCAGCTTGGCCTGGACCATAAGTAGCAATCTCACTTCCAAGCTGGAAAGCAAG
CCTGACAGAAACAGCCTGCTAACGTGACAGCAGCCCATAGTGAGGGAGCTTTGGGGCTCCAGGTTACGATCCCAGTGTCTCTAAGGACGGAGGC
TTGCTTTGTCACCCTCAAAATCCAGTCTGTGAGAGTGCTCCGTGCTTGTGTTCCTTGGACAACACAGGTCACACCACAGCTTGCTATGGCATGT
GCTCTTAGTGGAACACCGGTGCATTGGCCTGCTGGTATCCCAGCAGCGGCCCACAGTTGCTGGGGTCTCATAGAGATCGCTGCTGTCCCCCAGG
CATGAACTGCTGCGTTTCCTCCTCTCCTCACCTAACTGACGCCACAAATCTCTACACAGGCCAAAGAATCTTGGGAGATGGACACCAAAGAAAA
GCTGACGCAGGCTGCCATCGTGAAAGACAAGGGAACTGTGTACTTCAAGGTGTGTGAGTCTCTAAGTCCTTTCCATGTGGGGATACCTACCCAG
TATCCATCAGCACCCTGTGCTCACACGCACCCTCAGTTCTCACAGGCCTGCTGTGCTCTGTAGGAGGATTAGTGAGCAGAGTGAGTTCGTGTGC
ACQACGTAATGCAGAGGCCTCTTCTGTGTGCTGTGAGCAGGTGGACCTTCCTCAGGAGCACCCGAGGTGGACCAGACCTGGCTCCCTCCAGTGT
GTGTGTCCCAGGTCAGAGTTCACAGGGGCGGCTCCAGCCCGCTCCCCCCWGACACGTGAGACAGGAAAGGCCWTGCAGATCCCCCAGTTCACTT
TGGATGATCTCTCTCACGTTGCCGTQCTGTGGCTGCTTTTATGTAACTACAATGAAGGCAAGTCTCCTCCTGATTGTTTTAATTATAATTTTCA
ATTGAAATTTTTTTTAGGCTGGAGAGATGGCTCAGCAGTTAAGAGCATTGGCTGCTTTTCCAAAGGTTCTGAGTTAAATTCCCAGCACCTACAT
GGTGGCTCACAGCCATCTGTACAGGGATCCCATGCTCTCTTCTGACATGCACGTGCGCATGTGCAQAGTACTCATAAATAAAATAAGTAAATAA
AAAATAAAAACAAATCTTAAAAATGTTTTAAAACATTTTCGCTCTTTAAATTAAAACAGCAGCTTTCACAGCAAATATCCTCAAAATAAATGTT
TAATATTTAAGGTTTTATCAAGAAATATATCATTACTTATCAGTACCACTATTAACTGAGCAACAAGATAAAGATGCCATTAATGATACTGGCT
GAGGGGCTGGCGAGATGGTTCATCGGGTAAGAGCACTGACTGCTCTTCCACAGGTCCTGAGTTCAAATCCCAGCAACTACATGGTGGTTCACAA
CCACCCATAATGAGATCTGATGCCCTCTTCTQGTGCGTCTGAAGTCAGCTACACTGTACTTACATATAATAATAAATAAATCTAAAAAAAAAAA
AAAATGATACTGGCTGGGTACCAAAAAGGCCCTGCAGACCCGCATGGATGACCAGGCTCCGCCCTCCCAAGAACCTGATGAGGAGAAAACACTG
AGCCTTGTGGCCACAGTGATAAGATGTCACTTACAGCTGCCCCAGGGAATTACflCCTCTCCAGAGCCCTGTCTCCTCAGGACCCAGGAACCAG
TGCTTTATCCCCCAGGGCTGACACCCACACTCATTAAGTGAAATTTCGGAGTGCTGTGCCCATTGCTTGCCAGCCCACTTCCAAATTCCTGCTG
TCTCCACATCAAGTGAAGGGCTTCTCGATGAGTGTTCACAGCGGCCACTCTTCTGCTCGCCCAAGTGATCCTCTGCAAGTCCCTGACTCCTCTC
TCTGCCTTGTAGTGTGGAGACCCAAGCCACAAGCCAGCTTTGTTCGCACACCTTTAAGCACAGGGCTCTGGAGGCAAGTGTATGTATGTGACTT
TGAGGCTAGCCTGGCCTACAGAGCAAATTCCAAACAACTAGGGCAACACAGTGAAGCCCTGCCTCAAAAAAAAAAAAAAAAGGACTTGGAGGGA
ACCCAAGTTTTCTTTGCTTTTTCTTTCTTTTACCAGCAGACTTTAAACACAATTATTGGGGTTTTTGTTTGTTGTTTGGGTTTTTTTTTTTTTT
TAAGATTTTATTTATATGTAAGTACACTGTAGCTATCTTCAGACACTCCAGAAGAGGGAGTCAGATCTCATTACGGATGGTTGTGAGCCACCAT
GTGGTTGCTCGCATTTCAACTTCAGACCTTTTGAACTCTGGACCTTCGGAAGAGCAGTCGGGTGCTCTAATCCACTGAGCCATCTCACCAGCCC
CCTGGGTTTTGTTTTCTTTTGTTTTGTTTTGTTTTTTATAGCACTATAAAGCAGAGACCTGAGGCTACTCTTCATGAGCCTCTGTACTGAGAAA
TGCTGTCCATCTACTACTCACTTACATTAGGGGGTTGGACAAGAACACCATGTGGGACAACTGCAGAACTATGGGGCCATAGTCAAACCTCAAA
AGAAACACTGGCAGAGACAGTCTGTATTTGTAACAAAGTTATAAACTAACGTATGACTCATGGGCAGCCAAGCAGATGGCGATAGGAGCCCTGA
GCAGGGATCTGCAAATGGAGCTGTCCCTTCCATGTCATTGAGGCCAATCACCTGTGTTGCAGGGAGCCTTTCAGGCGTGATAAGTAPASTTCAA
CATGTTTCAAATCTTCCTAAAATGACCAATCTGGATAAAATCTGGATCACTAGTCACACATACGGAACACATTATTTTTAACATGTAATCTGAT
AGACAGGATCTTTCAAAACATCAGTCTGTTGGGGGGAAAAAAATTAATGAAAGGTTCAAAATCACTGACCTAAGACTTACCCCAGAATGTCTCT
GAACATTTTGTCTCACCAAGCACTTCCTCGACGCTCCTTCCTCATTCTACGTGAGGAGCAAGGGCACCGCCCACCGCCGCCCCACCCCCCCACC
CCCCCAGTCAGGCTGTCTGCTTCACACCCTGGAGGACTGCCTTCTGTCTGCTTGTCCCTTCTCCCTTCAAAGTTTAAGGAGCCTTTCTTTTCGC
TGTGCTGCTCTGGCCAGCGTCATCTTCCCACAGTATCTGACGTGATGTGTGCCATGTGCAGAGTGTGGGTGACTGTAGGGATGGGCTGGACTAC
AGTTCTATGTCCCTTAATATCTGCATGATCTATTCACCTGCCAGGCCAGTTTCAGCTGTGGGCAGAGAGGGACTGAATGTGGTATTTAGACTGA
TCTTCAAACTTCCTTTCAACCTCTGAACACTCATGCAGAGACACAGAAAGCACTGTCCTCATCCGGTTCTGAAAGTTACTGTCAGGCACTGTAG
CACTGTCACTGCACAAAGGAAGGCTAAGGACGCTCTGCTGTGTGCGGGCATCTTGCGCCCCCTAGTGCTCCTTGGGAAGGAAGTGTGGCCGCGG
CTGGCTGATTGTGCTTGAGAGCTGGAGTGTTGTAGGAAGAGCTCTACATCGTCATGGCTCCCTCTCCCGAGTGCAGTCAGGTCTCCCATCCCTT
GTACAGTCGTACACGAAGGGTCCTCTGTATTCAAGCTTGTAATPACTGTGCAGAAAAGAACTGTCACCTATATTCCAGGTTTACTCGTGTTGTT
ACAAGCTGCCATTCCGTGGTGCAGCTGTACCTACAGTAGTCAGCACGCTGTCTCCACCCCACAGTTTGTTGTTTAGGCCATGTGCTATGTACAA
CATTCAGTGTTTACAACTCTCAGAACTCAGTAGTAACCACGACCATATCTAGAGTCTGGTTACTCTGAAACAGCGCCTCACAGGGGTCACATAT
CAGATATCAGGTGTCTACGTTCTGATTCATAACAGTAGCAAAATTACAGTTATGAAGTAGCAACAGAAAACGTTTCATGGTPGCGAGTTTTATG
GTTATGAGAAAGGGGGTCATAGCGTTACGAAGGCTGAGAAGCACTGCCTGGGAGCTGAGGCAGGAAGACTGAGTTTGGCACTAGACTTGTCAAT
TTAGCAAGGCCTTTTCTGTCTGAAATAAAAACATCAGCCTAGAAATAGAGCAGGGATGCTGCTTGCTTACTATCCATGAGGCCTTGCTACGGCG
GAGGAGGCTGCTAGACCAGACAAGAGCAGGACAGTCTCTCACACGGTAAGCTTGCTCTTTAGCGTTATGTACACTGTGTGCTATCAATCCCCGT
GGTCAGCACAGGGCATTCTGGCCCACCCACTCTTAACAATCACATGGTGCCGGGGTAGAGCCCCGGCACTGCAGCTCTGCCGTGCTGCCTCTGC
TTTCACTGCTACTGAGAGCCGAGCGTTTGCACAATCTGCTTTAGACACGCCTGCTGTGTCGGGACTCCCACTTACCATATTGCAGTATTTACTA
TCAGTGCTGAATGCCAACAGAAAAGAGGAAAGTCACCTCCTCTTCCATAAGCCAAATGGCTCACCATCCTTTTGAAAGACTGAGGAATGTTGGT
TCCAAACAGTGTAACCTCCTGCTGCCAGGCTGAAAGAACACTGAAGCAGCCATGCGGTGCCATTACCCTGCTCCAGGCCACCTCACAGGCCAGC
AGAGCTTCCGCAGAACTAGGGAGGGACAGGAGATACAGTGGCGCTGACATCCACAACTATTCCGTGTGAGCACTCGGCTAGGGCACGCCACGCT
CACACTTCACTGCATCCTTTCCAGATGGATACAAGTTGTTGGGGGCTTTTTTCTCCTAGGGAGGCAAGTACACGCAGGCCGTGATTCAGTACAG
CAACATAGTCTCCTGGCTGGAGATGGAATACGGCCTGTCAGAGAAGGAGTCCAAAGCCTCAGAGTCCTTCCTCCTCGCAGCCTTCCTGAACCTG
GCCATGTGCTACCTGAAGCTCCGAGACTACAACAAAGCCGTGGAGTGCTGCGACAAGGTGGGTGAGCCGTACTTCACTCTCCGTTTATCTGTGT
CGCACCTCTGCCCCCTTCAGGCTGTTCCTCTATGGTCACCATGACCTGGGACGCCATAAAGGATGGGGCTTTTTGTGCACTACTTTTATCCTGC
ATTTTACATAAAGCCATTAACAGAATTGATAAGAQTCTTCATCTGTGGTCTTCCTTACCCTGGTCCTTTGTGGCAGAGGAGACAAAGACCCTTG
AGGTTCCCTCTTTATTCTTTTGTTWGCAAGGCTGGGGATTGAACCCAGGGCACTGTCCATCCTAGGCAAACACTTTACCACTGAGCCATACAGC
CTACCCCCAGTGACACACTTCCTCCAACAACCCACACTTCCTAATTTCTAATCCTTCTAATCCTTTGAAACAATTCCATTCCCTGGTGATGATG
TATTCAAATATATAAGCCTGGGGGGGGGGGGGGGACACATTCTTATTCAGAGCATTTACCACCATGGTTAATGCCTATGGTCTCAGCATGTGAG
AGGCAAAACACAAGAATTGAGAGTTCAAGGCTCCCCTGCQCTACATGAGTTCTTGTCTCAAAAAATAACTATTATCAAGATACCTCAGCTGGTA
AAGCCACTTCCTGTCAAGCCTGATGACAGGAGTTTCATTCCTAGGACCTTGTGGGAAAGAAAGAACAACTTTGTCATATGTCCTCTGGCCTCTT
CCTCATTCATAGTATTACATGTGCATACACAAAGGTAATAATAATATATTATTTTAGAGATTTATTGATGTGTATGAGGACTCTGTACCGGCCC
ACCAGAAGAGGGCATCAGTCCTCATTACAGATGGTTATGAGCCATCATGTGTTTGCTGGCACTTGAACTCAGAATCCCTGGAAGAGCAGTCAGT
GTTCTTAACTGCTGAGCCATCTTTCTAGCACAATAATACATTTTTTATAAACAACAAAAAATAGATATAAAGTGGCAAAAAAGACATTTTATAT
AAGAGTTTAGTTGGCTTGTTTTGCCTTGAGAGAGGAATATTATTGTTAATTATACTTTTTAAAGTTTGTGCTGTTTTTTTTTTAAATATATAGC
TGTTACAAAGTTCAGAATTTAAGCACACAAGAAAGCCCAGCTATCAAAAAAAAAAAAAAAAAAAAAAAAAAAAAAAAAAAAAAGCCAGGCAGTT
GGGGCTCATGCTTTTTTTTTTTTTTTTTTTTTTTTTTTTTTTTTTTTTCCGGTTTTTGAAACAGGGTTTCTTTGTATAGCTCTGGCTGTCCTGG
AACTCACTTTGTAAACCAGGCTGTCCTCAAACTCAAAAATCTGCCTGCCTTTGCCTCCGAGGGCTGGGATTAAAGGGGGGCCCCACACAAAAAA
ACCCTCACTCGAAAAAACAAAAACAAAGAAAAAGAAAAAAAGCCCAGCTATAATATTCCCATCAACTTTCTCTCCCAAAGCCACTCATTTAAAG
ATTTACTTTATCTTTAAAATATTTGTACATGTACAGATAATATTTGTGTTATCTGTATCTGGCGCCCGCACGCGTGTGTGTGTGTGTGTGTGTG
TGTGTGTGTGTGTGTGTATGCCCAGGTGCTCCCTGGGTCCAGCAGAGGGAGTCTGATCGTTAGAGCTTGAGTCCCAGGCAGCTGTGATAGGGTT
GCTGGGCTCCTGGGAACTCAACTCGAGGCTTCTGCAAGAGCCATGCTCTTAGCCCGGGAATGGCTTCTCCAATCCTTTAGACATTTACTATGGT
AGGAGAGGTTGTCTCCATGTGCGTGTGCACATGGTACACACATCGGCGGCCTGGGGGTAGTTCTCCTTCCCCCATCCTCAACQACCAAGCTCAC
TGAAGCTCATCACCAGGTGCCCTTCCCACTGAGTGTCTCTCTCCCCTCCCAGAGCATCTTTCTCTATAGAGTCCTAGTTTTTCCAAATGAAGAA
TAACTGCTTTATTTTTTTCAGTCAAACTCTCATATCCCAGTTTGACTTAAGACTTGCTTTGTAGCTGAACTTCTGGTCCTCCTGCCTCCACCTC
CTGTTGGTGGTTTGTTTTATTTGTTTGTTTGTTTTTGTTTTTGGTGGTGGTTTTTTGAGAGAGGGTTTCTCTGTGTAGCCCTGGCTGTCCTCGA
ACTCACTTTGTAGATACGGCTGGCCTCAAACTCAGAAATTCACCTGCCTCCACCTCCCGAGTGCTGGGATTAAAGGCGTGTGCCACCACCGCCC
GGCTGTTTTGTTTTTAAGATAGGGATAAAATTCAGTATTTTGTATATACTAGGCAAGCTAAGATAAACCCCAGACTTTGCATATGTATTCTTAA
AATATGTACATTTACGACTGGAAAGGTCGTCAGAGGCTGTAAGAGTACTCACTGTGCAAGCATATACGGCCCCAGTTNNNNNNNNNNNNNNNNN
NNNNNNNNNNNNNNNNNNNNNNNNNNNNNNNNNNNNNNNNNNNNNNNNNNNNNNNNNNNNNNNNNNNNNNNNNNNNNNNNNNNNNNNNNNNNNN
NNNNNNNNNNNNNNNNNNNNNNNNNNNNNNNNNNNNNNNNNNNNNNNNNNNNNNNNNNNNNNNNNNNNNNNNNNNNNNNNNNNNNNNNNNNNNN
NNNNNNNNNNNNNNNNNNNNNNNNNNNNNNNNNNNNNNNNNNNNNNNNNNNNNNNNNNNNNNNNNNNNNNNNNNNNNNNNNNNNNNNNNNNNNN
NNNNNNNNNNNNNNNNNNNNNNNNNNNNNNNNNNNNNNNNNNNNNNNNNNNNNNNNNNNNNNNNNNNNNNNNNNNNNNNNNNNNNNNNNNNNNN
NTATATATATATATATATATATATATATATATATATACACTAAATAGAGAAAGATTTGGACATAGTTATTATGTGAAAGCAGCAGTCTTTCCAC
GTCAGATGAGTGCATTCTACACTTGTCCCTCACTGAGCTTGGTGTGAAAAGACTCACCTCTTTAGATCCATTCTGTGAACCATGGGGTTTCACT
TAACTGATCCTCACACGAAGATTTTCAGGCCTTGTTTTTATTATAAGCGTCATAATAATAACCATAATAATAATAAAGGCAGTGGTGGTGCAAG
CCTTTAATCCCAGCACTTGGGAGGCAGAGGCAGGCGGATTTCTGAGTTCGAGGGCAGCCTGGTCTACAGAGTGAGGTCCAGTCAAAGCTCTCAG
CACCATCACGQGCTCAAGCTTCACCCCCGAGCTGCAGACATTTTATACTAAAATACTGACAAGTGGGTGGACCGTGGTTGATTGTTGCGTGACT
CTTGTGCATAGTTCTCCTCACCTCCGTGTGATTGCGCTGCCTCAGCACTGAGGTGACAGGAGCGGCAGTTGTCCCTTCCAACCTGTGACCTCCC
CACCTCTCCTTCTGTTCTTAGGCCCTTGGACTGGACACTGCCAATGAGAAAGCCTTCTACAGAAGCCGCCAGCCCCAGCTGCTCATGAATGACT
TTGAGTCGGCCAAGGGCGACTTCGACAACGTGTTGGCAGTCAATCCTCAGAACAGGGCCGCTCGCCTGCAGATCTCCATCTGCCACAGCAACGC
GAAGGAGCACAACGAGCGGGACCGCAGGGTGTACGCCAACATGTTCAAGAAGTTCGCAGAGCGGGACGCAAACGTAGTGTGCCCACAGCCCCAG
GCTTGTAACCACGCTAGCCTAGCGACAACCTTCGCCACCCTCGCTCGAACAAATAAGACTTAGGAAGQGACTCCATGTGGGCAGAGACACACGT
GGGAGGCCCTGGCGTCTCCCTGAGACCTCAGCCCTGACTCCTGAGGTGGAGCAGTGCTCTTCTTGTTCTCTGTTTTGTTCTTAAAATGGTTTCT
CTTTGTGGACCCAGCTAGCTCATCTCAGAGATCCTCCTGCCTCTGGCGATGAGCGTTAGGATTATAGGCATCTGCCACCAAACCAAGTTCTCTT
GTTATTTTTAAAAAATAAATAACGAGTTACAGAGACAAAGTGTGGAGCAGAGACTGAAAGAATGACCATCCAGAGACTGCCCCACCTGGGGATC
CATCCCATAAACCACCACCAAACCCACTATGGCAGATTCCAACAAGAGCTTGCTGACAGGAGCCTGATATACCTGTCTCCTGAGAGGCTCTGCC
AGTACCTGACTAATACAGAAGTGGATGCTCACAGCCATCCATTAGACGGAGCACAGGGCCCCCAATGAAGGAGCTAGACAAAGTACCCAAGGAG
CTGAAGGGGTTTACAGCCCCCTGGGAGGAACAACAATATGAACTAACCAGTACCCCCAGAGCTCCCTGGGACTAAACCACCAATCAAAGAAAAC
ACACGGAGGGACTCATGGCTCTAGCTGCATATGTAGCAGAGGATGGCCTAGTCAGTCATCAATGGGAGGAGACACCCTTGGTCCTGTGAAGGCT
CTATGCCCCAGTATCGGGGACTGCCAGGGCCAGGAATAGGAGTTAGGTGGGTTGGGGAGCAGGGGGAGGGQAQAGGGATAACCGAATTTTCAGA
GGGGAAACTAGGAAAGGAGATAAAATTTGAAATGTAAATAAAGAAAATATCTAATAATGAATTAGTTAAAAATAAATAAATGCAGCCAGGCAGT
GGTGGCGCACACCTTTGATCCCAGTGCCTGAGAAACAGAGGCCAAGGTAGGCAGTTGTCTGAACAGGAGGCCACATACACACAGAAACCCTGTC
TGGAAAAAATGACAACAGCCCTAAGCCCTTCAGTGTTGTTTCTCTGGGGAGACTTCCTAGTAAAGTCCAGGTTGGATTGGAAACCGGTGTGCCT
GTGGTGGCCTTTACTGTATTCTCTGCTGTCATCGGGAGCCTCGCTGGCAGTGGGTGTGTCTGAACACAGGTCAACTTCCTGCCCCATGGCCACC
CTGTGGTCCCACGTCTGTCCTCCATCTTCAGCTATGAGTAGCATAAGGACTTGAGCTACTCAGCAGCTGCCTGAGGTAGGCAGCTCCTCATTGC
TTCCCACCCCTACTTACCCAGTGTGCACCCCAGATCCAAGCGTACACACTTGCTGCAGACCTGATGGACCATCTCGGGAAGGCAGTGGTTGAGT
GAGCTCCTCTTCTCCTTTCACCTCAGGAGGAAGCCAGCAAAGCTGGGAGCAAGAAGGCTGTAGAAGGAGCCGCTGGCAAACAACACGAGAGTCA
GGCCATGGAAGAAGGAAAGGCCAAAGGCCATGTATGACGCTGCGCCACGGAGGGAAGAGAGTCCTAATGAACTCGCCCCTCCTCGCTGGGCTCG
CCTCCAACTCAGGACTGAACAGTGTTTAGTGTAAGGTTTGTTACAGTCTCTGTGATTCTGGAAGCAAATGCCATACCAGTAGCTTCCCAAATGA
CCACCTGCTGCTGCGGGGGGGTGGGGGTGGGGGACATGCCAGGAAACAGCAGAGAAGGCCGCTGGTGTGAAGAGACCAGGCCAGCAGCTCAGTC
CAGCCCATTTCAGTTTGTCACCTTTCAGTGTCCAGCACAGCATCCCTGTGAACCTAGGGCCCAGCTGCTGTGGGTTCTACATCGGCACTAGGGT
CACACTGCAGAAACCGTTGATAAAACAAACTCAGTGATCTCTGCTTTCCTATTGGTGGGCATGGCAGGGGCGGGTGATGAGATTTGCTTAGCAC
TGACTGACTGGCCTGCTAAGAACACAAGCCCACAGCCAGGGGCTCCCTGGTCCACAGCTGGGTCTCAGGCCCCTTACCTGCCTTCCAAGTCCTT
TCGCAGACTCTTGAGTGTGGCTTTCTGTCCTAGCCAGCATGTCCCACAGACTCTGTTGTTCCTCCAACGCCCGTCATTAGTGACAGCTTTCTCT
CTGAGTTTCTCTGGTGTGGAGAGTGGGTAGAAGTAGGTTTATCTTTCCCGCTGTCTGCCCCACTCAAGGACGATGTTAGCGCTCAGCCATCCCT
GCCCAGCACACCTCCTCAGCCTCATGCTCCCACCCGCACCCTTGCTGTCCACAACCTAAGCCTTGCTCCCGTCCCAGACTCGAGTGGACGCACA
TCCATGTCCACCCAGGATTGACGAAGGAAGGAACTTCACACTCCTCTATCATGCAAAAATAGTTTTCAATTTTTACTTTTTAGCTTGGGTTTTG
AAAGGCAAACTCTAGGAGGCTTAAAACGGGCAGTTACTCTTAAGGCGAGGTAGATACCTCATCCTGCACCGCAGCCTCTGTATTCTGGTGCCAC
CTGTAAGGGTTGCCGGCTTCCGGTGTCCCATGCATCAAGCCAAAGTCTCCAAAACTTGGGCATTGAATTACCGCAAATCTTAAATAGTTTTGGG
GTTGGATTTTAGTCCTACAGGTGATGATTGAACGTGGCTGGCTTCTCCACAGCCTAAGGAACCCCCATGGGGACACACCCACCACCCAATGACC
CATGCACCTCTCCCTGGACAGCTCACTTCCAGCCCTAAGGACCACTGTGCTCAACATGTGTGGCTGTAGTAAGACAGTCTCATGTCAGGCATTA
AGTCAAGGCCTTCCTTCACACCTGCGGGACAGCGCTTCTGAGGCTCCAGTTCTGCTCTGCTCGAAGCAGGAGGGATGGGTTGTGAACGACTCTG
GGATGTGACTGGGACCCTCGCATCTCACACTCGGCACTCTGCCTCTTTCCATCCATGTTTGAGAGCCCTGGTCTCACCAGGAAGTGCAGAGCAG
GAGCCGACTGTGTGTGTAATGCTCTAGTGTTTGTAGTTCTCTTCACTACCCTTGCAGCGCCAGGGAGGCCGGGCTGGAATTTGAGCCTAACATG
TTAGGTTTTTACGGGAAAGCTCTTTTTCCAGCTGTCTCCCAAGTGCGTATTGTGGGCCAAGGAGACTGGTATGGGAAGGGGGGATGGTCAAGGT
TCCAAGCCAGAAATGGAAGGTGCCCAGCACCCCTGGATTTTACATGTTCTTGTATTCAGTAATCTCAGACGATTTACACGGAAATCAGAAGATG
TCTTCAAATACCCTTAGACTGGATAGAGTGATGGGGAAGCAGATGATGCATTGAAATTTTGGTTTTTAAAAAATCACTTAGATGCTGGGAGTAA
TGGTGACACACACCCTTGGTCCCGTGACCTGGGAGGCCCTGTCTCAAAACAAAACAAAAAATCATTTACATCCATTTTGTGTTCCTTAAATAAA
TTTTTTAAAAAGTGGTTTTTCATTGTTCATGGCTTTTTGTTTTTGTTGTTTGTTTGATTTTTGAAGTTTACTTTTATCTTTGTCTGCTAGAGTT
TTGTGTCCAGCTGCCCTTGGGGACCAGAAAGGGACTTTGAATCTCCTTGAAATGAAGATACAGTTGTTAGCCAGATGTGGGTGTTGAGAACTGA
ACCCAAGTCCTCTGAAAAGCAGGAAGTGCTCTTAACTGCTGGGCTGCCCCTCTCCCACCCCTCCATTGTTTGGGTTTCACTTAAACACTTGATT
TTPTTTATGATTTTTTTAAACAGATTTATTTATTGTATGTATGTGAATACGCTGTTGTTGTCTTCAGGCACAGCAGAAGAAGGCATTGGATCCC
ATTACAGATGGTTGTGAGCCACCATGTGGGTGCTGGGAATTGAACTCAGGCCCTCTGGAAGATCAGTCAGTGCTCTTATCCACTGAGCCATCTC
TCCAGCCCCTTTTTATGATTTTATTTTATGTGTATGCACACTTTTTTGTGATGCTTTATTGAGTTCCTATGGAACCCTTCTAACCCCCTACCTC
AGGTAGGCGACAAAGAAGGTTAGAGGGGGGAAGGGGGCATAGATCTTTTCAGACTGCTTCTTGCTGATTAGGGGCATCGAGTTCCTTGGGTCAA
CTTCAAACTTCATTGTCAGAATATCCAATCTACTCGTCTCTTTGCTCACAGCCTTGTGACAAGCCACAGCAGCAACAGACACAGTAGCCTCCTC
TGCAGAGCGCACTCCCACCTGATAGCCCCTCTCAGAGCTCGGCATTTATACCCTATGAGAAGTTCCCACAATCCCAGACTTCACAGAAACTGTC
TGCAGCTGGCAAAACCACGCCTCTCCCAGAGCACGAGGCAAATGATAGTCAGCTGCTGTGAAGCAGTCACCTATCTCACAACATAGTCACATGA
CATACCTCGGTTTTTTAGGAAACCGAAATTCTCACATGTTTACCTGCATGCATATACATACATCATGTCCATGTATTCCCCAGGGAAGGTAGAA
GAAGGCATCAGAGTCCATGGAACTGGAGTTACAAGATGGTTGTAAGCTGCCGTATGGTTCTTGGAACTGAACCCACATCCTATGCAAGAGCAGC
CAGTGTTTTTAACCACTGAGCCATCTCTCCAGCCCCTGATTAAATAGTATAAAAAGGAAAAAAAGGTCTACAGCCATCATGCCCTAAACCCACT
CAATCTCCACTGATCTCAGAAGCTAAACAGACTGGCCTTAGTCTATTCCTCTGATAACACACCATGACCAAGGTAATAATATAAGGAAAAGATT
ATTTGGAGCTTGCTGTTTCAAAGTTAAGAGAACCCATGTAGGGGGCTGGAGAGATGGCTCAGAGGTGGAGAGCACTGACTGCTCPTTCAGAGGT
CCTGAGTTCAATTCCCAGCAGCCACATGGTGACTCACAACCATCTGTAATGGAATCTAATGCCCTCTTCTGGCATGAAGGCATATATGTAGGCA
GGCAGACTATTGTGTACATAATTAATAAATAATCTCTCTTTTCTTAAAGAGTACATGGTGACAGGCAAAGTGGAAGAAATGTCAGAGAGAGCTA
TCTGCGAATAACATGAGTTTGTCAAACCTTCAACCCTATTCCTAGQAACACCTCTAACAAGCCACACCTCCTAATCTTTCCCAAGAAGTTCCAC
CTAGTAGAATTCATTGAAGAATGTGGTTGAGGGGCTGGAGAGATGGCTCACCAAAGGTTAAAGAGCACTAGCTGCTCTTCCAGAGGTCCTGAGT
TCAATTCCCGGAACACACGGTGGCTCACGACCATTTGTAATGGGATCTGATCCCCTCTTCTGCTGTCTCTGTAGAGAGCTACATGGTGTACTCA
TATACAATAAATAAATAAACAAACAAACAGACAAACAGACCAGTTCTCCAACTGAACCAAAGTGCATCCATTTTGCTGGGCTGTCTGGCCAATA
AGTATTCAGGGACCTACCTATCTACATAACCCCAGTTCCCCACTTCCAGATGTGGTGCCCTCTCTACCCAGCTGTGTCTGCACTATGCCGTGGA
TCCTGGGGATCCACTCGGGTCCGTAGTCTAAAGTAGGAGCTTTCCCAGCTGAGCCATCTCCCCTGTTCCTTACTTTGCCTTTTTGACACACAGT
CTCCACATTTGTCTGAGTTTCCACTCTCCAGACTTTGCCTCCTGTTTGCCAACCACCTGGTTCTCTTGGGAGACATATTGAGGGCTTACATAAT
TTGCATAATGAGATGAAACCTATCTACCCTCAACAAGCATACCAGTTAAGCATTGCTGAGCCACACTGCCCCAACCAGTGGAGACACATGCTCA
TGGTTGTTGGGAACTGCTGGAAATAGAAGGGTACTGAACCACAAATGCCCCATCTCCTTGTGTGCACAAAGAGCAAACATTTGGCTTCATAAAT
TGATTTTGGTTTAGTTTGGTTTTGCGTTTGCACTTGAAATTAAGAACTAATCCCTCTTTTTGGCACGTGTGTGTGTGTGTGTGTGTGCCTGGTA
CGGAGGTGCATTTGCACAGGTGTGCTTGGGAGTACAGATCAGAAGTTCACATCAGGGCTGGATGATGGCTCAGCGGTTATAGGGCACTACCTGT
TTGCTCTTCCAGAGGTCCTGAGTTCAATTCCCAGCAACCACATGGTGGCTCACAACCATCTGTAACGGGATCCGATGCCTTCTTCTGGTGTGTC
TGAAGAGAGCAACAGTGTACTTACAAACATTAAACAAGTAAATTGTTAAAAGAAGAAAGGAGGGAAGGAAAAGAAAGAAGGAATGTCTGCCTTT
TTCTTTGTTCCCAGCTTATACATGCAGACAGAGCCTCTCCCCCTGAATCCACAACTTGTCAAGTCAGCTCAAACTAGCCATCTTGCACGGAGGT
CCCCTGTCCCCACCTCACAAGCACTGGGGTCACAAGGTGGGCACCCTTGCACTTTCTTCACTATTTTCGTTTTTAGTTCCATTTGGACATGAGT
AGCCTCTCTGTTTTCTTCAATGCAAATACTGCTGCCTGGTGTAAAAGGCACTTCCTGTGCCCTTGGAGGCACAGCTTTCTTCCCTGAAATCCCA
GACGCTGCCAGAGACAGACAGACAGAGAGAACGCTCGCACACAGGATCACACATGCACACCAGTGAGTGCAGGTCTCCCCAGGGGCCAACAGAG
AGCATGCGATTCCCCGGGGTTACAGGCAGTTGTGAGCTGCCATGTGTGCTTGCTTGGGAAATGAATGTGGATCCTTTGAAAGAGTAATACCAGC
TCTCCATTGCTGAACCATTTTCCTGTGGGGCCGTGGTCCGCGAGAGGAAGTCTGGTAAGGTCGAGCTGGGCTTGAAGCTCCAGGGACCCAGAAG
GGACAGTAGGAGCTTCACCTGCTCCCAACATCAGGCCCCTGTCACTGTCACAGCCACCCATAGAGAGATTTGTGGCCATCAGTCACATAGGCGC
AGCACCCCCCAACCCCTCCACATGTAGATGAGGCATCCCTATACATCTCAGACCAAGCCAATAGGAAGCACCTCCTGTCAGACCCCACCCCCAC
CCCAAAACGGTGCATAATATCCTATCCAGAGGAATAAAGGTCTGTGTGAGAGTTACTCCATCATCTGGGAGCATCTGTCTTAGATGAGCTGCTG
TTACACTGCCTGCGAAGAACAGCAGCAQCCAAGGCAGCAGCAGCAGCAGCAGCAGCGCATCGGTGGTGGCTGCGGGCAAGAGGTCTCTGCAGAT
AGACTTAGGTACGCAGACCAGCAGTTCCCTAGCCCCAAGATCTTGTCTCTTTTTAATACAGACTTATCGGCCCTATCTTCCCTTCTGGCTTGCC
ACAGCACATATGCATTGGTATGGCGATTTTTGTTTTGCCTGCACGTGTTGATGTATTTAAAAAAAGATAGAGAGAGAGGGGAATATGGTCTATG
GAGATGTGATGAGGTATAGGGCAGGGGGGTGCCTCCTCCAGCCCATGGCTGGCATCCCTTCAGAACTGAGTGACCAGCCACATGATGGTATAGT
ATAGAATAGAGTTTATTCAGGGCATGGGGAGGGGAGTTAAAAGGGTAGTAGAGGCAGAGAAAGGCAGAGAGAGGGAGAAGAGTAATAGGGAGAA
GTAGAATAGAGGCCGGCCATGAACACATGGACAAATGGGGAAGGGACTAGGGAAGGGAGGGGAGGAGGGAAACGCCTACGAGGGCAAGAGAGAA
ACAACAGAACAAGGAGGCGGCAAGCAGCTCCTTTTATAGTGAGCCAGCCCTACCTGGCTATTGCCAGGTTACTGTGGGGTGGAGTTTAGACAGA
ATGCTAACACGTACGCCTGTGCACCACCTCTGTGGACCACATGTGTACCCAGTGCCTCTGGAGGGCACATGCGAGTCAGATGCCCCAGAGCTGG
AGTCACAGGCAGTTGTGAATGCCACATGGGTGCCAGGATTGAACCCGCGTCCTTTGCGAGAGCAGCTGGTGCTTGTATAGCGATTGAGCCGGGT
CTCCAGGCTGCATTTTTTGTCTTGATTCATCCCAAGGAATTTTCTAATTTCCTTCATAATTTTTTCTTTCACCCTCAGCTTGCTAAAGAGTCGG
CTTCCTTCCCACATATTTGTATCCTTTTCCAACTGCCTGCCTCCCTTCTGTTATTAATCTGATTTCATTCCACTGTGGTGAGAGTGCACACCAT
GTACATTCTTTGTTTGACTTACGTTATTTTAATATATTGAGACTTTTTGCGGCCACATATGGTCACCCCGACCCTCCCCCCGGAGATATCCGTC
CTGCTTTTAAGAAGATCTCATACATGTTTTTGCTTGGCATTTTAAAAAGCTTTTAGTTTCACATTTTATATTGCTTGCGAATATACATGTGTGA
GTGTGCCTGTCAGCAGACATGTCTAGGTCAGAGGACAACTTGGGGAATCCACCCCCTGGCCCAGGGTGGCATTATTCGCGTGTGAGGTCGGCTG
GGTTTCCAGTGCATGTGGCTCGGGCTTGTCTGGTTCCTTTCTGGACGTATGGTATTTGCAGCCTCTGTCCTGACTGATGATACTAGCTTGATTT
GCCTTTGCATTCTCCAGCTTGGCTTCCTATATTTTGGGGCTTGGTGTGCACACGTGTTTCTAATAATATCTTTCTCATGGGTTAACCCATTTCT
TTTTCTTTTCTTTTTTTTTTTAAAGATGTATTATTATTATACATAAGTACACTGTAGCTGTCTTCAGACACACCAGAAGAGGGTGTCAGATCTT
GTTATGGAATCGTTGTGAGCCACCCTCTGGTTGCTGCGATTTGAACTCAGCACCTTCGTAGACCGATCAGTGCTCTTACCCGCTGAGCCTTTTC
ATGGTGAGATCTTGGGTTCATCCTTCAAGAGTGCTTGCTGCTCTTCCAGCAGACCCATGTTCAGGTCCCAGCATGCCACATCAACACCTTACGC
TGCCATCTCAACTGCTCCCCCGACTCCAGTTTGCACGTGTTCTCTCTCACTGCTCTGCCCTGTTTGTCATTCTTGGCCACCGCCTTAGTTTGTG
TTACATAAATATTTTCCAGTGTGTCATTCCAATTTCCTTATCTTTTAACATCTTAAATTTTTTTTAAAGATTTATTTATCTTATATATGTAAGT
ACACTGTAGCTGTCTTCAGACACACCAGAAGAGAGCATCAGATCCCATTACAGATGGCTGTGAGCCACCATGTGATTGCTGGGAATTGAACTCA
GGGCCTCTGAAAAAGCGGCCAGTGCTCCTAACTGCTGAGCCATCTCTCCAACCCTTAACATCATAATTTAATAGGATATAATTTGAGCCCATAC
CGATGTAATTTCAATAGCCAAGCATGGGGGGCAATGATGGTGCACGCTCTTAATCCCACTGCAGAGTCAGAAGTAGGCAGATCTCTGAATTCCA
GGCCAGGTCTGTGTAGTGAGTTCCAGGACAGTTGGGGCTACACAGAGAAACCCTGTCTGGAAGAAAACAAACCAAACAAACAATCACACACACA
CACACACACACAAATTGTTAGCCAAACATAGTAGCAAGTTCCAGTCCTTCAGATAAGAAAGCAGGAGGGTTAGAATTTCAAGACCAACCTGGGC
TGCATGAAACCCTATCTTAGAAAAAAATTAATCTATTTCTCTATCACTCCTTTCTCCCTATCGCCCCCTCTGACACCGTGAGCCGGCCAGAGCA
TAGTTTTTCCTTTGTTTCTTTGGGTACATATGCTGCTAGCTCCTAGCTTATGAGCCATCTCTCTATTCCTCTCTCTGTCTGTACACCTGGATTT
GATTTCTGTCTTTGGTGTTCCTGCCCCCCTTCTACCCTTCCCCCCAGCTATGGGGTTTGGGTTGGGGAATGTGTTTTTTATTTTATTGTTTAAG
GTTTATTTAATATGAATACACTGTAGCTGTCTTCAGACACACCAGAGAGGGCGTCAGATCTCATTAAGCTGGTTGTGAGTCACCAATAATGCTT
GCTGGGAATTGAACTCAGTACCTCTGGAGAGCAGTTAGTGCTCTTACCTCTGATCCATCTCTCCAGGCCCCTTGTGTTTTTTTCTTTTTGTATC
TGAATTTCAACAGTGATCAAATCATTTGCTCCTTTTTATGGAGTTTAGATCCTTGCAAAAGATCTGGGGGCAGGAGGGTTTTATTACCATAAGG
CCTTGCTGGGGGACACCAGGAAACAGCTTTGTTTTCTCTCGGAGCAGCTGCTCACTCTGACTCCCCTGCCATTGTACATGGGTTGCTTACACCA
GCTCTCCTCTGCTCCAGGATTCCGTGCTCCGGAAACCGCAGGGAGGGCCCAGGCAGCCATAGACATGGGGTCAGCTTCACCAAGTTAATGCAGG
AACCCAAGAGTCTCAGAAGCGCGGCTGTGCCTCCCCCCCCCCCCCCCGCCTCGCTCCCCTCCACCCCCCAGGCTGATTTAAGCTCCCAGCAGTG
AGCCTCTGGGCAGCTGGTGAGGCTTCACCAAGTCAATGGAGCCTCAGCCACTGTCCACCTGGACGGGAAGAGGGTCCCCACCTCTCTCTGCCCT
TCAGCGAGATCAGTTCCACCACTCTGCCCTCTGCCGCAGCGGCAGGCGCGCGCCCACCAGTAGCCACCACGTGAGGCCCGGGCTCTGATGTATC
TTTCTGGACTTGCAGCTCAGTCCTCCCTGCCCTCCCCTGCGTGCCTGGCAGCTTCCTGTAATTCCAGGTAAGCACCCTCCACGAAGCCGCGGTG
TGCAAGCCTGCTGCGTGATCTGGTGACTGGCTAGGACGTGGGTGGAAGTCTGGAAGGAACCTGGGCCCTTTGGTTCAGCACAGCAAGGTGCCAC
TGAGCAGCGTGCTAGGGGTGGGGACATCAGAGAAGATGCAGAGTCACCTCTGCCACCCTCTTCAATTCGGACACCATTGCAGCCATGTGCAGGA
GGGGGACAGGGCAGAGATGCACCAGAACCTGGCTTTAGGAAAGAAAACAAAACAAACAAACAAAACCAAACCAACCAGCCCAGCTGNNNNNNNN
NNNNNNNNNNNNNNNNNNNNNNNNNNNNNNNNNNNNNNNNNNNNNNNNNNNNNNNNNNNNNNNNNCTGAGCCGGGCAGTGCTGGCGCACGCCTT
TAATCCCAGCACTTGGGTAGGCAGAGACAGGCGGATTTCTGAGTTCGAGGCCAGCCTGGTCTATAGAGTGAGTTCCAGGACAGCAAAGACTATA
CAGAGAAACCCTGTCTCGAAAAACCAAAAAAAAAAAAAAAAAAAAAAAAAAAAAAAAAAATCAAGCTGTATAGTGCTGGTGAGATGGCTCAGCG
GTTAAGAGCACCGACTGCTCTTCCAGAGGTCCTGAGTTCAAATCCCAGCACCCACATGGTGCCTCACAGCCATCTATAATGGGGTCTGACTCCC
TCTTCTGGTGTGTCTGAAGTCAGCTACAGAGTACTCACATAAATAAATAAACAAACAAACAGACAAGTAAATAAATATCAGCCTCCAGGGATGC
CAGCTCTGGAGGAAAACCTGACACAGGGCAGAGGCTGCAGCTCAGTTCTCAGTGTGCGACCAGGAAGCACAAAGCCCTGACTTCCACCCCTATC
CTCAGGAGGTGGAGGCAGGAGGATCAGTGGCCATCTTCAACTACATTGCTTCTTAGAGCCTGCTCGCCTTGAGACCCCATCTCAAAAATAAATC
ACTATAAAAAGAAAAGCCAGAGGCTGGTGAGATGGCTCAGTGGGTAAGAGCACCGACTGCTCTTCTAAAGGTTCAAATCCCAGCAACCACATGG
TGGCTCACAACCATCTGTAACAAGTATCTGACTCCCTCTTCTGGAGTGTCTGAAGACAGCTACAGTGTACTTACATATAATAAATAAATAAATC
TTTAAAAAAAAAAAAAGAAAGAAAGAAAAGAAAAGCCAGCCGGGTGTGGTGGCACATGCCTTTAATCCCAGAGGCAAGCGGATTTCTGAGTTCA
AGACCAGAATGCTCTACACAGTCAGTTCCAGGGAAGAAGAGAGAGAAGAAGAAGAAGAACAAGAAGAAGAGGAGGAGGAGGACGAGGAGGAGGN
NNNNNNNNNNNNNNNNNNNNNNNNNNNNNNNNNNNNNNNNNNNNNNNNNNNNNNNNNNNNNNNNNNNNNNNNNNNNNNNNNNNNNNNNNNNNNN
NNNNNNNNNNNNNNNNNNNNNNNNNNNNNNNNNNNNNNNNNNNNNNNNNNNNNNNNNNNNNNNNNNNNNNNNNNNNNNNNNNNNNNNNNNNNNN
NNNNNNNNNNACGTGAATAGGGCGGGCAGAACCTGGAGCCCGCTGGCCTCAAGATTGAGCGGGATTTTGGTGGATGCGTTTTGTGGTCTGAAGG
CACCCTGCTGGCCGGTCCTGGCCTGCCCTAAAGGTGACCGGAAGAGAAACGAAGAQTTQGGGAACACTTCCGGTGCGGGGGATAGTAGGTACAG
AAGCTAACTGACCCCTGGAGGATTTGCTGTTGATCCTGGCACCTTCCCTTTCCCCCAGGCTGAGCTCTGCCCTGCAGCCTCTTGCCCCAGTGAC
CTCGTTCTAGAACTAACCTGGCAGGTGGTCCATCCTGTAGTGAGGGAGGCCCAGCTTGGAGGCCATGCCTG
MOUSE SEQUENCE—mRNA
GTCCGGCGCGCGGCTGAGCGACCGAGCGTGCGGACGGAGCGGCGGCCTGCTGGGCGGGCTGAGCGGCGCGCGCGGCGGCGGAGAGACCCGGAGC
GAGGGACGCGGCGGCGGCGGACGCGGCGACAGGTCTTCThCTTACAAAGGACAATGACTACTGATGAGGGCACCAGTAACAATGGAGAGAACCC
AGCAGCCACCATGACTGAGCAGGGTGAAGATATCACTACGAAGAAAGACAGAGGAGTATTAAACATTGTCAAAAGAGTGGGGACTAGTGACGAG
GCCCCAATGTTTGGTGACAAAGTTTATGTCCACTACAAAGGGATGTTGTCAGATGGAAAGAAGTTTGATTCCAGTCATGACAGAAAGAAGCCAT
TTCCCTTTAGCCTTGGCCAAGGCCAGGTTATCAAACCCTGGGACATTGGGGTGTCTACTATCAAGAAAGGCGAGATCTGCCATTTATTATGTAA
ACCACAATATGCTTATGGCTCGGCTGGCCACCTCCAAAAAATTCCATCAAATGCAACTCTCTTTTTTGAGATTGAGCTCCTTGATTTCAAAGGT
GAGCATTTATTTCAACATTCAGGCGTTATCCGTAGAATCAAACGGAAAGGCGAGGGATACTCAAACCCAAACGAAGGAGCAACGGTAAAAGTCC
ACCTGGAAGGCTGCTGTGGTGGAAGCACATTTGATTGCCGAGATGTGGTGTTCGTTGTTGGGGAAGGAGAAGACCACGACATTCCGATTGGGAT
CGACAAACCCCTGGTGAAGATGCAGAGACAAGAACAGTGTATTCTATATCTTGGACCACGCTATGGTTTTGGAGAAGCCGGGAAGCCTAAGTTT
GGCATTGACCCCAATGCTGAGCTTATGTACGAGGTCACCCTTAAGAGCTTCGAGAAGGCCAAAGAATCTTGGGAGATGGACACCAAAGAAAAGC
TGACGCAGGCTGCCATCGTGAAAGACAAGGGAACTGTGTACTTCAACGCAGCCAAGTACACGCAGGCCGTGATTCAGTACAGGAAGATAGTGTC
CTGGCTGGACATCGAATACGGCCTGTCAGAGAAGGAGTCCAAAGCCTCAGAGTCGTTCCTCCTCGCAGCCTTCCTGAACCTGGCCATGTGCTAC
CTGAAGCTCCGAGAGTACAACAAAGCCGTGGAGTGCTGCGACAAGGCCCTTGGACTGGACAGTGCCAATGAGAAAGGCTTGTACAGAAGGGGCG
AGGCCCAGCTGCTCATGAATGACTTTGAGTCGGCCAACGGCGACTTCGAGAAGGTGTTGCCAGTCAATCCTCAGAACAGGGCCGCTCGCCTGCA
GATCTCCATGTGCCAGAGGAAGGCGAAGGAGCACAACGAGCGGGACCGCAGGGTGTACGCCAACATGTTCAAGAAGTTCGCAGAGCGGGACGCA
AAGGAGGAAGCCAGCAAAGCTGGGAGCAAGAAGGCTGTAGAAGGAGCCGCTGGCAAACAACACGAGAGTCAGGCCATGGAAGAAGGAAAGGCCA
AAGGCCATGTATGACGCTGCGCCACGGAGGGAAGAGAGTCCTAATGAACTCGGCCCTCCTCGCTGGGCTCGCCTCCAACTCAGGACTGAACAGT
GTTTAGTGTAAGGTTTGTTACAGTCTCTGTGATTCTGGAAGCAAATGGCATACCAGTAGCTTCCCAAATGACCACCTGCTGCTGCGGGGGGGTG
GGGGTGGGGGACATGCCAGGAAACAGCAGAGAAGGCCGCTCGTCTGAAGAGACCAGGCCAGCAGCTCAGTCCAGCCCATTTCAGTTTGTCACCT
TTCAGTGTCCAGCACAGCATCCCTGTGAACCTAGGGCCCAGCTGCTGTGGGTTCTACATCGGCACTAGGGPCACACTGCAGAAACCGTTGATAA
AACAAACTCAGTGATCTCTGCTTTCCTATTGGTGGGCATGGCAGGGGCGGGTGATGAGATTTGCTTAGCACTGACTGACTGGCCTGCTAAGAAC
ACAAGCCCACAGCCAGGGGCTCCCTGGTCCACAGCTGGGTCTCAGGCCCCTTACCTGCCTTCCAAGTCCTTTCGCAGACTCTTGAGTGTGGCTT
TCTGTCCTACCCAGCATGTCCCACAGACTCTGTTGTTCCTCCAACGCCCGTCATTAGTGACAGCTTTCTCTCTGAGTTTCTGTGGTGTGGAGAG
TGGGTAGAAGTAGGTTTATCTTTCCCGCTGTCTGCCCCACTCAAGGACGATGTTAGCGCTCAGCCATCCCTGCCCAGCACAGCTGCTCAGCCTC
ATGCTCCCACCCGCACCCTTGCTGTCCAGAACCTAAGGCTTGCTCCCGTCCCAGACTCGAGTGGACGGACATCCATGTCCACCCAGGATTGACG
AAGGAAGGAACTTCACACTCCTCTATCATGCAAAAATAGTTTTCAATTTTTACTTTTTAGCTTGGGTTTTGAAAGGCAAACTCTAGGAGGCTTA
AAACGGGCAGTTACTCTTAAGGCGAGGTAGATACCTCATCCTGCACCGCAGCCTCTGTATTCTGGTGGGAGCTGTAAGGGTTGCGGGCTTCCGG
TGTCCATGCATCAAGCCAAAGTCTCCAAAACTTGGGCATTCAATTAGGGCAAATCTTAAATAGTTTTGGGGTTGGATTTTAGTCCTACAGGTGA
TGATTGAACGT
MOUSE SEQUENCE—CODING
ATGACTACTGATCAGGGCACCAGTAACAATGGAGAGAACCCAGCAGCCACCATGACTGAGCACGGTGAAGATATCACTACGAAGAAAGACAGAG
GAGTATTAAAGATTGTCAAAAGAGTGGGCACTAGTGACGAGGCCCCAATGTTTGGTGACAAAGTTTATGTCCACTACAAAGGGATGTTGTCAGA
TGGAAAGAAGTTTGATTCCAGTCATGACAGAAAGAAGCCATTTGCCTTTAGCCTTGGCCAAGGCCAGGTTATCAAAGCCTGGGACATTGGGGTG
TCTACTATGAAGAAAGGCGAGATCTGCCATTTATTATGTAAACCAGAATATGCTTATGGCTCGGCTGGCCACCTCCAAAAAATTCCATCAAATG
CAACTCTCTTTTTTGAGATTGAGCTCCTTGATTTCAAAGGTGAGGATTTATTTGAAGATTCAGGCGTTATCCGTAGAATCAAACGGAAAGGCGA
GGGATACTCAAACCCAAACGAAGGAGCAACGGTAAAAGTCCACCTGGAAGGCTGCTGTGGTGGAAGGACATTTGATTGCCGAGATGTGGTGTTC
CTTCTTGGGGAAGGAGAAGACCACGACATTCCGATTGGGATCGACAAAGCCCTGGTGAAGATGCAGAGAGAAGAACAGTGTATTCTATATCTTG
GACCACGCTATGGTTTTGGAGAAGCCGGGAAGCCTAAGTTTGGCATTGACCCCAATGCTGAGCTTATGTACGAGGTCACCCTTAAGAGCTTCGA
GAAGGCCAAAGAATCTTGGGAGATGGACACCAAAGAAAAGCTGACGCAGGCTGCCATCGTGAAAGAGAAGGGAACTGTGTACTTCAAGGGAGGC
AAGTACACGCAGGCCGTGATTCAGTACAGGAAGATAGTGTCCTGGCTGGAGATGGAATACGGCCTGTCAGAGAAGGAGTCCAAAGCCTCAGAGT
CGTTCCTCCTCGCAGCCTTCCTGAACCTGGCCATGTGCTACCTGAAGCTCCGAGAGTACAACAAAGCCGTGGAGTGCTGCGACAAGGCCCTTGG
ACTGGACAGTGCCAATGAGAAAGCCTTGTACAGAAGGGGCGAGGCCCAGCTGCTCATGAATGACTTTGAGTCGCCCAAGGGCGACTTCGAGAAG
GTGTTGGCAGTCAATCCTCAGAACAGGGCCGCTCGCCTGCAGATCTCCATGTGCCAGAGGAAGGCGAAGGAGCACAACGAGCGGGACCGCAGGG
TGTACGCCAACATGTTCAAGAAGTTCGCAGAGCGGGACCCAAAGGAGGAAGCCAGCAAAGCTGGGAGCAAGAAGGCTGTAGAAGGAGCCGCTGG
CAAACAACACGAGAGTCAGGCCATGGAAGAAGGAAAGGCCAAAGGCCATGTATGA
HUMAN SEQUENCE—GENOMIC
CAAAAACCAGCAAGTTTTTATTAGGGATTTTCAAAAGGGGAGGGAGTGTGTGAAGAGTTGTGGGTGACAGACATCAAGTACTTAACAGGGTAAT
AGAATATCACAAAGCAAGTGGAGGCAGGGCGAGATCACAGGACCACAGGACAGAGGCGAAATTAAAATTGCTAATAAAGTTTCGGGCACCATTG
TCATTGATAACATCTTATCAGGAGACAGGGTTTTGAGAGCAACTAGTCTGACCAAAGTTTATTAGGCGGGAATTTCCTCTTCCTAATAAGCCTG
GGAGCGCTATGGGAGACTCGAGTTTATTTCACCTCTGCAATCTCGACCATAAGAGACAGGTATGCCCCGGGGGGGCCAGTTCAGAGACCTACCC
CTAGGTGCGCATTCTCTTTTCTCAGGGACTTTCCATGCTGAGAAAAGGAATTCAGTAATATTTCTCCCATTTGCTTTTGAAAGAACAGAAATAT
GGCTCTGTTCTGCCCGGCTCACCGGCGGTCAGAGTTTAAGGTTATCTCTCTTATTCCCTGAACAATTGCTGTTATCCTGTTCTTTTTTCAGGGT
GCCCACATTTCATATTGCTCAAACACACATGCTGTACAATTTGTGTACTTAACGCAATTATTACAGGGTCCTGAGACGATATACATCCTTCTCG
GCTGACAGGATTAAGAGATTAAAGTAAAGACAGGCATAGGAAATCACAAGGGTAPTGATTGGGGAAGTGATAAGTGTCCATGAAATCTTTACAA
TTTATGTTTAGAGAGTGCAGTAAAGACAGGCATAAGAAATTACAAAAATATTAATTTGGGGAACTAATAAATGTCCATAAAATCTTCATAATCC
ACGTTCTTCTGTCATGGCTTCACCCGGTTCCTCCGTTTGGGGTCCCTGACTTCCTGCAACACCTTCTTATATGTATCAAAACTCATACTGAACA
ATGAGTTCTGGGTTGCAAAAGAGGATTTATTTTTTGCACCTAACCATAAGTCTTTGTCCACAAGTTAAACAAAAACAGTGTAGTATACAGTATT
TTTAATAATTTTGTGCATTAAATAAAATTTGTGTACCTTGAATCATTAGAAAACAAGTATTAGGTGTGGAGTTTTTCACTTGTGGCATCATGTT
AGAATTCAAAAAGTTTCAGAGTTTGGAGCATCTTGGATTTCGGATTTTTCCAATTAGGAATGCTCAACCTAATCAGAAGTAAGACTTGGATATT
AAAAGTTTGAAAGCCACGGTTTTATTTGCTTAGTAGTATATAACTGCAACAGTACTTTTTATCTGAATTATTGTGTAGAATCTGATGACTCCCC
AACATATAACTGTCACCCACACTTCTCTCCTGAGCTCAGGCCTTATCTCTGATAACCTTCTGGACATCGCACAAGCACCCCTTGCTCAACATAC
CCCAGCCAGAGTTCTCTTGCTCTCCATAAAAAGCAATCTGAAATGTTCGAATTAAATTGAAGAGAAAGAATAAAAAGTCCTGATGAGTGGAACC
ATGAAATGTTTCATCTTTTTTCCCTAAGTTTAAAAAGATCATGAAAGTAATACATGTTTAATGTTAAACTATTTAAATAATATAAAAATAAAAT
CTAAGAAGTGAAAATTCCTTCTTATCTTCCCAAATCTCATTCTCCAGAGGTAACACTGTTTGAGCAGTTTGGTAAGTTATCTTTCCAAACTTCT
TCTATATATAAGCAAATATACAAACACATATATACTTTTTTCCTCTTGGAAATAGGATCATGTTACAAATCATTCTGCAACTCACCATTCACTT
AAThGTACATCTTCAAAATCCATCTGTCTTTTCATGTGAGTATTAGAAGATTGTTTATGTGGAATGGGTAAGACGTCACCTGCTCCATATTAGT
GATATTTTCAGAGATTACCTGTCTTAAAGGGAAAACAGTGAAAAAGACATTTTGGCATGTAATCAACAATATTTGCATAATTGTAATCCAGTGC
TCTAAAATGATCATACCCACCCACCCACCAAAATCTACAAACAACTGGGAACCATGGTTGGTGGCTGCXAATATATTGGTATAAATTACACTGT
TTGTGCCAGGTGCGGTGGCTCATGTCTGTGATCCCAGCACTTTGGGAGGCTGAGGCGGGCGGGTCACTTGAGCTGAAGGAGTTCGAGACCAGCA
TGGCTAACATGGCGAAACCCCATCTCTACTAAAAATACAAAAATTAGCCCGGCATTGGTGGCGCACACCTGTAATCCCAGCTACTCAGGAGGCT
GAGGCAGGAGTATCATTTCAACCTAGGAGGCGGAGATTGCAGTCAGCCAAGATCAGGCCACTGCACTCCAGCCTGGGCAACACAGCAAGAGTCT
GTCTCAAAAAATTTAAAAAAATAAAAAATAAATTACACTGTTTCTGTTACATGTATTAGCCCATTGTGGCATCATCAACTGACTTTTTTTTTTT
TCAATGGTCCAGATAACCAAATCATCACTGGGCACTATGCACCATTAACAATACACTTCATTTACTACAATGCTATTCTTTTTTCCTTTTTTTT
TTTTTTTTGGACAATATCTTGCTCTGTTGCCCAGCCTGCAGTGCAGTGGTGCAACCATGGCGTGATACTCCTGCCTCAGCCTCTCCAGTAGCTG
GGACCACAGGCGTGTATTTTTTATTTTTAGCAGAGATCGGGTCTCACTGTGTTGCCCAAGCTGGTCTCAAACTCCTGGGCTCAAGCCTTGACAT
CCCAAAGTACTGGGATTACAGGTGTGAGCCACTGCGCCTGGCATTCTTTTATAATCGATGAACATTTACAAAATATTTTCCCAATTTAGTTGTT
TGGATGTTTTTGTTTAGACTCTTAGCTAAATGATTCTCTACTGTATAGATTTATCTCATGCTTTTCAAAAACTGTATATTTTTATAGTATGCAT
TTGCCAATTTTTAGTCTAACATTCCCATGACCATCCTTTTAAGGAAAAACTTTCAAATACTTTTATTTAGCCATACGGTTAAAATTTAGCTGGA
ACTAAGTGATCTGTGTTTAGTTGATGAACTGATCCATGCTATTCTTGCATCATGACTTTTTCATCTTCCCTTGATTCTTTTCCCTATATGCATT
TAAGCCTGTCTGGTTCTTTTCTCAAGCCTTTGCTCTCTACTCCCCTTTCACTCAAAGCATTTCATGTTTCGCCTTTATAACCCTAGTATAAGTA
TCAAACTTCTCACCTGTGACTTTTGCCTCTCTCTACATCTCTCPTCTACTTTTAACTTTCATGTTTACAATAAGCTACCTTTCTCTTATTTTCA
GTTCTTACCTTCTCAAACTTCAGAGAATCCCCACTGCTTAGTGTTCTTGGGAGATGCTAGAGGTTACACAAAATGCCACCTCCCAGAAGGTCGA
GGCATTTTTTTTCTTTAAAAAAAAAAAAACCTTTTAGCCAAATACTTACTCATAAGAAATGCTCCATTTTATTCTCAGTAGTATCTTCAGAAAG
ATTTCAGAGGTAATTGCATCTACAAAATAAAGACTTAGTGCTAAGAAAATGAGCAATCCGATAAGAATATGTAAAATAAAAAACATTATTACTA
AATTCTTTTTTTTTTTTTTTTTTTTAGACAGAGTCTTGCTCTGTCGCCCACGCTGGAGTGCAGTGGTGCGATCTTGGCTCACTGCAAGCTCTGC
CTCCCGGGTTCACGCCATTCTTCTGCCWCAGCCTCCCAAGTAGCTGGAACTACAGGCGCTCGCCACCACGCCCGGCTAATATTTTGTATTTTTA
GTAGAGACAGGGTTTCACCATATTAGCCAGGATGGTCTCGATCTCCTCACTTTGTGATCCGTCTGCCTTGGCCTCCCAAAGTGCTGGGATTACA
GATGTGAGCCATCCCGCCTCGCCTTTTTTTATTTTTATTTTTTGAGATGGAGTTTCACTCTTATCCTCCAGGCTGGAGTGCAATCCCACAATCT
CCACTCACTACAACCTCCGTCTCCAGCGTTCAAGCGATTCTCCTGTCTCAGCCACCTGAATAGCTGGAATTACAGGTGCCCGCCACCATGCCCA
GCCAGTTTTTGTATTTTCAGTAGAGATGGGGTTTTTCCATATTAGCCAGGCTTGTCTCAAACTCCTGACCTCAAGTCATCTGGCTGCTCTGGCC
TCCCAAATTGCTAGGATTACAGGCTTGAGCCACCTCACCTGGCCACTAAATTCTTTTAAAAATCTCTTGAGCACACTAAATGATATATTGAATA
TAGCTGATGACCAAATGGTGTTGTAAAAATTCCATCAGGCCAGGTGTGGTGGCTCACTCTTAATAATCCTAGCACTTTGAGAGGACGAAGTGGG
AGGATCACTTGAGCCCAGGATCACTTCAAGACCAGCCTGGGCAACATAGTGAGACCCTGTCTCTTCTGAGAAAAATAATAAAAAAATAACATTA
GGTGTGGTGGCACATGTCTATAGTTTGAACTACTAGGGTGGCTGAAGGGGAGGATTGCTTGACCCCAGGAATTCAAGGCTGCAGTGAGCTATGA
CGGTACCACTGCACTCCAGCCTGGGCAACAGAGCAAGACCCTGTCTCTTAAGAGACAATAAGAAATAAATAAAAATTCCATCAAAGAATTTCTC
TTAGGCTATAAAGCCAGAGACAAAGATCAAAAATCGGAGAAATGTCCAGTGGTTCTCAACCATGTCTGACTCCACATTAGGATCATCTAACATG
GTTTTTGAAAACACCATTACCCTGGCCCCACCACAGACCAATTAAATCCAGACTCTCTGGGCTGGAGTCCAGACATCAGTAGCTTTTTTAAGCT
CCTCACGTCATTCTGTTGTTTAGCCCAGGTTTAGAAAAATACTTAAGAAACCTGAAGAATAATACCAATATCTCCGAACTCTATCTAATAATAC
TTCTAGAAGTAGAGGACAGAGACATCAAAGGAAAAGAAATAATGCTAGAAAATTTTTCTGGAGATTCTGCAAAGACTTCTCTTCAGCAGTTAAC
GGCCAGAATATCAAGQCCCCTGCAGGAATTAAGCAAAGAAGACAAGTACCTTGACATATCCTTTCGATGCGTCTCAACTCCAAAAATAAGGATT
ATTATGTCTTCCAGAGAAGAAAAGATGGGAGCCACAGTGTGCACTCTGGAAGGAAAGAAACCTACCTGGCCTAACTGATCCAAACACAGTTTCT
GCTTTTTCCCCCAGATGCTGCTCTCCAGTGCATTCCCCTAGCTCACTCCTGCTTTCTGGGGCTGACCCCACACCTTGAGCTTCTCCAGGCTCCC
TCGGAAGAGCTGCTCTTAACAGTTCGTGTTTGGGAGGCAACTTTCTCTTCTTTGCTCTCTCCTTCGGTCTCACCTCATCTGCTCTGTAGTGTTC
AGAAATTCCCCCAAAGTTCTGGTTCAGTTAGGAACATGTCTTCTTTTCCACCTCAGAGTTTTCCACATTTTAAAAACTTTTTCTTGTCATCCCA
GCATCTTCCTCZGGAGAGGAAGTTGATGACTTAGTCCTGTCGTTCAACCTTTTTGAGGCCAAATAGGGTAAGATCATATTAAGGGGAATAATCC
TGTATTCAGGTTCATCCTTTAGTATATAATGGTAACATTTGGATAGTCTAATATTTTCTGGGGTTTTTTTGTTTGTTTTAATATAATCCTTTGC
TTTCTGCTTACTTGAAAACAGTAATTTATCCAACTCAGCACTCAGAGTCAGGGGAACTGTGGTCTCTTAGCTTTGTTTTCTTCAGTAATTATTT
GTTCCGAGAAGAAAAATAAGTTTACCAAAGAAATATCTTTCTGAAAACTCTCCTGTTAGTAGCATAATCTGAGGCAAGACACTGATATTTTAAC
AAAGAGAACAATACACTAATTTACATAATATACATAGGCAATTGGTAGATATGGCTTTAAAATGACTTCTCATTTGGGGGACCTGATAGPTTAG
TTATGTTAACTGAAATTTTTAGTACACTGTTGATAAAATATTAAGTGTATTCTCATTTTTCTGTTATGTCTCAGGTGTTTGCTGACTACCACTT
TGGAGAGTGTATGCTTATCTGCCATGTCCATAACAGAACGAACTGTGTTCCCTTTCTGATGCATTGGGTACCAATTTTCCGCCTTTGGACAGTT
CAGCACAGTAAGCTTTATCATAGATTAATATCCATAGCTACATAGTGATTTTAAATCCACAATAAATCTAGGGTGAGGGAAAGAAGAAAAGTCT
CTCTTATAAAAATGGTCAAACTGTCTCAGTGTGTCATTACAGTTTTTAGGAATTGTCTGTCCTTACTGTCTTTTTTATATAACATTCAATCAAG
CAAAAACTTTTATTTGTTTTGTTAGCTTACAAAAACCTATACTCCTAATCCCTTAACTGGAATTAAGGGGAAATACTTGGAAAGATCAGTTTAT
CTCTTTATTCTTCCACCTTTATCTGCTTTTGAAAGTTCAAAAGTTTGTTTTCTTGTTGTTTTTATCTTTCTGTTTTAATTATTCATAGTACTTC
TCTTCATATGGACTCAGTACTACTGACAAGAGCCATCCTCTGAGATTACTAAGATGACTTGCATCCCTTGAAGTGTTGGAGCCAAAACATGAAG
AGCTAATTCCTTTATCAGATGGGATTTACAAAGCTAGTAAATCAGCTTATACAGGTTGCCTATTTACTCGAATTTAAACAAGCCATTGTTTGCA
AAATAGCAAGGTGAGAACCAAAAGAAAATGTTTCTTTTTTTCCTCTCTCTTTTTTTTGAGAAAGAGTCTTGCTCTCTCACCCAGCCTAGAGTGC
AGTGGCATGACCTCGGCTCACTGCAACTTCTGCCTCCCAGGTTCAAGTGATTCTTGTGCCTCAGCCACCCGAGTAGCTGGGATTACAGGCGTGT
GCCACCACGCCTGGCTAATTTTTGTATTTTTAGTAGAGACGGGGTTTCATCATGTTGGCCACGCTGGTCTCAAACTCCTGGCCTCAAGTGATCC
CACCCGCCTCAGCCTCCCAAAGTGTTGAGATTACAGGCGTAAGCCACTGTTCCCAGCCTGAGAACATTTCTTCATTGACAGTATTTTCATTTAA
AAATTTAGCTGAACTCCAAATGATGAACATTCAAAAGAAAGCATTGTCTTTGGATGATTTGAAAGCAAGTGGCAGATATCATGACACCTCACCC
CTAAATACTACAGCATGTGTCTCCTATGAACAAGGATATTACTCTGCATAAAACCATAATACTATATCACATTCCAAAAGGCTGACATATAGTA
GTAATAAGCTAATATGCAGTCTCCTGTTCCAAGTTCTTATATTTTGTCCCCTAATCCAGGATCCAGCCAAGGATCACTGATTACACTTGGTTGT
CATATCTCTATAGTCTCCTTTAATCTGCAACAGACCTCCCGTCTCTCCCTCTCTCTCTTTCTCTCTCTTTTTTTATCTTTTAAGAGATGGGGTC
TCACCCTTCGGCCCAGGCTGGAGTACAGTGGCATGATCACAGTTCACTGCAGTCTCAAACTCCTGAGCTCAATCAATAGTCCTTCCATCTCAGC
CACCTCACTAGTTGGGACTACAGGTCCACGCCACCTTTTTGCTTCTTTATGTTGTTAACATTTTTTCAGGAGTGTAGGCCAATCCTCTTCTACA
QTGCTCCACAATCTGTTTTTGTCTTTTCTTCCTGGTTAGTTTCAGCTTAAACATTTTTGATACCCATACCACATAGGTGATAGCACATCTATAT
CACATCACTACATCATATTACCAGACAGAGTAATAGCACTTTTTTTCATTATTGGTGATGCAGAGTTTGGTTATGATGCAGATCATTTGTTAAA
GTGTTATCAGTCAGATTGTTTTACTTGAAAGGTCTTTTTCCTTTTTTAATAATAAGTAATCTGTGGGGTACTTTCCCAATATCCTCTCACCTGG
TGGTTTTCATTTGTTCAGTGCTTTACACCCAGACATCTATTGATGGATGTCAGCATCTCTGTGAATCCCCAGGAAATTTTTTTGTGTGCATATA
TTTTCCCAGGCATACAGTCCAGGACCCTCCAAATATTTAAGAGATCTTTTCCCTCTGTTATCAAGGTGCCTTTTACGTGTTTCTGTGCATCACA
GAAGCATATTATAAGCAGTGGGTTTCTAGAAGCTGGGAACCAATCCCGTTCTTCTGATTTTCCTGATTATCTAGCTCACCTCATGTAGAGCTAG
GTACATAATTTTTGTTGTTTGTTTGAGAACGATTGTTCTGGCCTTTCGCTTATCCTGAGCCAAACATTTGGATCTTTCATGTTTGGTATAAAGC
GTACTACAAACTAGAGCAGACAGACTTAGCCCCTGCTTTTTGGTGTTCTCATTTCAAGATTTTGGGGCACATCAATTCQATTTGTGTCTCTGTT
GAACTGAATAGTGGTCATTTGGAAATGAGTTAAAACACTACAGTATATGTTTTAGTTGTCTAATTATAGTTQTATCAATAAQACATTTTCTCCA
AGTGCAGAAAGACTCTTTGACTCTGTAGACAAGAAGGCTCAGGAGATGAGTTTAGGGGGCATTAAGTTTGTTATTAGCCTAATGTGTAATAGCT
CTAGGACTGATTCCTTCTTGATTTTCCCTGCCCAAACAGGGAGCAGTGTGGAATTCATCATGGCAGTGGTTAGGTGTGTTTTGCTTAGCCTATG
ATTAGCCTGTTGGTTACATTGGCTTGCCTTGCATGAAAAAATGTCTCTCAGGTGACTACCAATAACAATAAGAGCTAACATTTGAATAGTATAC
CTTAAAAATACACATTATACCACTTCAGAAGATTATCTGTGAAAACAGATATTTTTATTCTAATCACATAGGTAAGGAAAAAATCTTAGAGAAG
TTAAGGTAGCCAACATCAAACAGCTTGTAAGGAGCAGAGGAAGAACACCCCCAAATTCCATTACAAATTCCTTGCACTTTTTGTCTTACCATTC
TCAAAGGTAGAGGCATTCTAGGGAATCTAAATATGAACAAAGCATGGACCTTGCTCTGAAGGATCTTTTAAACCTAACAGGCGCATAGTCTTAT
GAATCTCTTACAGACAACAAATCGAGAGAAGAGCTAAGGAAGTACGTAAAAGGGCAAAATGCCCTACAAATACAGCGTCAAGGTTCGTATGACA
GAAGTAGGATTTGAGAGAGGTGGATGTTTTGGAAACAAGAAAGGGAGTGACCAGAAGAATGACTATGCGAAAGCACTGCGTTTGTTGTAGAGGT
GGAATTGGCCTAGTTTCCCTCGAGCATCAGCTGCATCAAACAAAGTAAAATAAAATAATGGCAGCTAGAACTCAAAGATAGATTAGGGCCAGAT
TGTGAAGCGCCTTGAATGCCACATGGAAGAACATTCTGTAGGTATTTTGGGCAGGAGATGAAAAATGACCCTACAGAAGGCCCAAAAATGATGA
TAAATGGTTAAATATGTTTAAGTTACCAATCTATGCTAATCTTTTAAGAAATGTTATCTCACTGTAACTATGAATAGTGTACTGTGTCCATTTT
GCAGATGAAAAATGAAGGCTCAGCAAGATTAAGGAAACTGGAAATGTCAAGAGCTGCACCTAGGACCCAGACTTCGGTCTGTTCCATTCTAAAT
CCTGTTCTGTGTCTCACTCTGATTCATATATTGTCACTTCTTTTATTAGAACTGATAAGGTCTTAATCCTCTGTCAAGAATATGCCTGTTAGAA
AAAGCATCTTTTCAAAGTTGTGAAGQGACTGCTTCTCACCATGTTATGTTAAGGAATGTAATCACTACCCAACTTGACTTGTACTGTTCTCTGT
TTTGAGACCAGAGCTAGATGGGAAATTAAAGAATTGGATGATGTTTTATTTACATGCCTGATGACATCAATACATGCTCATAGCAAATGCCTTT
GTTTTCATTTTCAGTATCTAAGCTTATTGGCCCTAAGTAAATCTTAGGTTACGTAGACCTCAGTTCCCAGGGGCATTCAAGATTCATAAAGAAG
TCATATTTTTCCCAGCTAAAATATTTTTCTTCTTACCAGGTTCTCTACTTAAAACACAATCACTACTCATGAAGCTCCCAACAACAATGAAGAA
AGCCCCACAGCCACTGTTGCTGAGCAGGGAGAGGATATTACCTCCAAAAAAGACAGGGGAGTATTAAAGGTGAGGCCACAAAGCTGAGTGACAT
ACAAGGAAACCTGCTGTCTGGAAAGATTATAGCATCTCTTTCTGAGGGGGGCTGGGGTGGATAATGTTTATTGATGGTTACTAAGTGCCAAACA
CTAGAGCTAGATTCTCATTTTGTCTTCATAACTTCAAGGTTTTTTTTAAGAGTTGAGTCTCGTTATCTTGCCCACGCTCGTCTTCACCTCCTGG
CTTCAAGTGATCTTCCCATCTCAGCTTCCTGAGTAGCTGGGATTTTCTTTTTAAATTAATTAATTAAATTTTTGAGAGAGGGCATCTCATTATG
TTGCTCAGGCAAGTCTTCAAATCCTGCCCTCAACCAATCCTCCCACCTCAGCCTTCTGAGTAGCTGGGATTATAGGCACGAGCCACTGTGCCCA
GCTAGACATTTTAATTTTTAATCCCAGATTATAGATGTTGAAATTGATACTGGGCTAGGTAAATTAACTTGCCTAATATCATATATCTTAGTAA
TGCAGATTTACCTGGGGTTCAGGTCCAAGTTATATCTCACTCTAAAGCGCTATATTTCCCTATTCTCACAGTATACAAATAGGTTACTATTTTA
ATGTATCCTTTTACTACACTAAAGCTAGCTAATGACAATTTTGAAGACTTTTTAAGGAAAGAAAAGCTAACTTGAAAAATTCAAAGGGGTTTTA
TTTTATTTTATTTTATTTTATTTTATTTTATTTTATTTTATTTTGAGACAGAGTCTCCCTCTGTTGCCTGGGCTAGAGTGCAGTGGTATGATCT
CAGCTCACTGCAACCTCCGCCTCCTGGATTCAAGCAATTCTGCCTCAGCCTCCCGAGTAGCTGGGATTACAGGCGCCTGCTACCATGCCTCGCT
AATTTTTGTAGACACAGGGTTTCACCATGTTGGCCAGGCTGGTCTTGAACTCCTGACCTCAGGTGATCCGCCTGCCTTGGCCTCGCAAAGTGTT
GGCATTACAGGCATGAGCCACCGTGCCCGGCCCAAAGGGGTTTATTTTTATATATAAATATTGTTCCTGTGTACAGTGAAGATATCTTTTGCGA
TTTCCTCTTAGAATATATCTTACTTTTGAATTAGCTTTCCTACTTATTAAAGCACTATACAGTCATTCACCATATAATGACATTTCAGTCAGTG
ACAGACTGCACCTTCAGCAGTCGTCCCATAAGATTATAATGGGGCCGAAAAGTTCCTATGGCCTAGTGGTGCCATAGCTGTTGTAGCATGGGTA
GTACAGTGTATTATGTGTTTGTGGTGATGTGGGTGTAAACAAACCTACTGCACTGCAGTCACAGTTATCTATAGTACATAATACTTGATAATAA
ATGTTTATATTACTGGTTTATGTGTTTACTATACTTTCTATCATTATTTTAGAGTGTGCTTCTTATTTTTTAAAAAGTTAACTGTAAAACACCC
TTGGCTGAGTGCAGTGGCTCATGCCTGTAATCCCAGCACCCTGGGAGGCCAAAQCAAGAGGATCACTTGAGGCCAGGAGTTCAAGACCACCCTG
GGCAACATAGTAAGACCCCTATCTCTACAAAAAAAATTAAAAAAATTAGCCAGGCATAGTGGCATGTACCTGTAGTTTCTACTACTCAGGACAC
TGAGGCAGGAGGATCATGTAAGCCTGGCAGTTCCAAGCTGCACTGAACTATCATCATACCACTGCATTCTACCCTCGGTGAGAGTQAGATCCTG
TCTCAAAAACAAATGAACAAACAAAAAACAGCCTTGGGCAGGTCCCTCAGGAGGTATTCAAGAAGAACGCATTGTTATTATAGGAGACAGCAGC
TCCATGCATGTTACTGTCCTGAAGACCTTCCAGTGGGACAAGATGTGTTGGTGGAAGACACTGATACTCATCATCCTCACCCTCTGTAGGCCTA
GGTTTATGTATGTGTTTCTGTCTTAGTTWTAAACAAAAAAAAGWTTAAAAAGTAAAAGAATAAAAAATTTAAAAAACAGAAAAATGCTTATAGA
ATAAGGATATAAAGAAAGAAAATATTTTTGTACAGCTGTACAGTGTTTGTGTTCTAAGTGTCATTACAAGAGTCAAAGCTAAAAAAAAAGTTTA
CACAGTAAAAATGTTATAGTAAGCTAAGATTGATTTATTATTAAAGAAAGAAGAAAAATTTTAAAATAAATGTAGTCTAGCTGTCCAGTGTTTA
TAAAGTCTACGGTAGTGTATGGTAATATCCTAGGCCTTCATGTTCACTCACTGCTCACTCGCTGACTCATCCACAACAACTTCCAGTCCTGCAA
GTTCCATTCATGGTAAGTGTTCTGTATAGGTGTACCATTTTTTTTCTTGTATACCTTTTATTACTGTACCTTTTTCTATGTTGAGATATGCTTA
CATACACAAATACCACTGTTTTACAATTGCCTGCAGTATTCAGTCCAGTAACACAATGTACAGGTTTGTAGCCTTGGAGCAGTAGGCCAAACCA
CCTAACGTGGGTGTGTACAAGTAGGCCAGGCCATCTAGGTTTGTGTAAGTACACTCTGCGATGTTCACATAAGGATGAGATCATCTAAGAACAC
ATTTCTCAGAACATATCCCTGTCCTTAAGCGATGCATGACTGTGTGTGTTTCTTCACTCTATAGTTAATCATTTTCACGTGCATTTCTTTTCTT
TTGTTTCTTACAACAATGTGGTGAGACAATCAGAGCATCTCTTGATTCTTCCATCTTATAAGTGAATAAACTCAATCTGACAAAGGTTAAGTGG
CTTTAGTCACATTAAATAGTTATTTCTCCTACACCATTGTTAACACATGTAAGTTTTGTATAGTTAAGTTTTGTTTTTCCTGAAAAGATTATCT
GATCCATTCTGATATTACCAGGATGCTGAGTTTTAATATCTCTTGTCCCAGCAGTAGCAAGTAAGAATTTTTGTTTTTGTGTAACTTTGCTTAT
GTGAAACCCTTCTGTGCCTGGATCTCTTCTGAATATATGTGAATTGCTATTATCTGCTAAGTCAAATTTTGGGGACTTGCAGCTATAGAATAAG
GGCTTTATGCTATAGATTTACATCCTATTGTCTTTTTTTAGAAGGCTTCTCAACCTTGTAGCTATAGTTACTCATCCTAAATTCCAGGAAGCTT
CTAGAAACAGTGGAGACTTTGCAGGCTTTCCTCAGCATCTCCCTGCCTCTGTTTACGACTTACCCTTTCATCTTTTCAGAGTGCCCATGCCCAG
AGAACATGATCCCCAACTTGCCTCAGACCCTGTTCTGTTCTAGGGAGGAAATCTAATTGCAAGATTTTTAGGCTTATTAAGAAACATTTGAGAT
TTGAAGCCCTTTAAATTATATCATTTATCATTGTCTAGAGCCTCGGATTTCACCATCAGGCTTTTGGTTAAGATTTAAATAGGTCTAGTAACTG
TGCAAGCTAGGGCAATTTAGTTAACCTCTCTGTGATTAAGTTCCTGTTTGTAAAATTAGAATAATAATGCCATCAACCTCATAGAGTTATTAGG
ATTAGGTGAAGCACTTAGCATAGTGCCTGTCCTATAGTAATCTATCTTATTAACTATTACGTATTTTTAAAAAAAGAACCAGTGCTGGTTTGGA
AATTCACTAACTATCTGAGGAAGATAAAAGATGGATTTATATTTTAAAAATGAATACAACCTAGATTGTGTTCTTAAGGCAACTCTAGATTTAG
GTACAAATTCATCTTGCTAGGGAAGCCTGAAGTGATACCATAGTACCACTTGCTGGTGTGGATGGCTCTCTGACTCTCTGGTAGCCATTCATCC
CACATGCCCAGTTACTGTTTATAGTCCTAGAAATGCAGATTCCTTCCACGTGAGGCTTACAGTTGAGCATAGCCTCCCAAATACCACATGCAGT
TCGTGAACATGAGCACTTGTAGAATATTGTGTAATATCTTTTAGATTAATGTTTTGAGACTTTTTTTTTCTTTTGAAGTCCTAGAAGGCCAGTA
GTGTTTCTTTGCCTTTAAAGAATATTTGGGGCTGGGTGCGATAGCTTATACCAGTAATCTCAGCACTTTAGGAGGCTGAGGCGGGAGAATCATT
GGAACTCAGGAGTTCCAAACCAGCCTGGGCAATGTAGCAAGATCTCATCTCTACTAAAAATAAAAAAATTTGCCAGGCGTGGTGGCATGTGCCT
GTAGTCTCTGCTACTCGGGAGGCTGAGGTGGGATGATCACTTGAGCTGAGTGATAGAGGCTACAGTCAGCTATGATTGTACCACCGCATGCACT
CTAGCCTGGGTAAAAGAGCAAGACCCTGTCTCAAAAAATAAAATAAAGATGTTTGGGCTTTTGAGTTAAGAAAGCTGTGGAATTTAAGTTCACA
GTCTTTATGTGATATTTATGTTACGTGGACGGTATACTTGTAAAAAAAGAATTTAGCAGCAAATAATCGAATTATTTAAATAAAACTCAAAGCA
AACTCCTTCCCCAAAAAGATGTTCATCAGATGTTAGCTACCATCCTCTGTTATCTACCAAAAATGATTAATTTGGCATAGATTACAAATTAACA
AATTACACCATCACACACCTGGGTTTGATTTTCTTTTCCCAGAACTGACCAAATACATTAGCAGCTTGCTCTGCCAAGAACAAAATAAATACAC
TGGATTTTACAGTAGTTAAATACTTTACTAGAAAACAAGTTATTCAGTATCATATCAACCAGTGCAATGATACTCATGTTTTTTACAGATAGAC
TATGTTTCAAATAATAGGAAATGTAACCTGTTTTACCAGGAATTGGGCTTTCTGAAAATAAACAAGCAGAATCTAGTCAGGAGCTAATGTTATT
TAGCAAAGGAGGGAAATAAAATTACACCTTTCAAGCTTTGCTTAAGCTTCTTTTTCAATATTTTAAAAGTCCACCATTCTTTCTGGTCTAAGTC
CGTGTCTATATGGACTAGCTCACAAGCCTGTGTTAGAGAGTTTAGTGTCGGGCGCGGTGGCTCATGCTTGTAATCCCAGCACTTTGGGAGGCTG
AGGCGGGTGGATCACGAGCTCAGGAGTTCGAGACCAGCCTCQCCAACATGGTGAAACCCCATCTCTACTATAATACAGTAAATTAGCTGAGCAC
GGAGGCGCACGCCTGTAATCCCAGCTACTCGGGAGGCTGAGGCAGGAGAATTGCTTCAACCTGGGAGGCAGAGGTTGCAGTGAGCCGAGATCGT
GCCATTGCACTCCAGCCTGGGCGACAGGGCAAGACTCCGTCTCAAAAAAAAAAAAAAAAAAAAAAAAGAGTTTACTGTCAAAATATAGGGCATT
AAACCAATGAACAGCATTTATTGGTTAATTCTTTGAAGGAATAAATAGTGCGATTAGCAATAAAAGTAGATATAACATAAAAGACAAGTTGGTA
AAGGACAGTTTTCTAACAATGAGTTATTGTGAGGAATGAAGGGAGGCATTAGAAAGAATGGATAATAGTAPATTTGCATATCTGCCTGGATGTC
TTGGGATGGACTGTGTGACCTTTTTATTCTCTGATTACAAGTAAAAAGTTTGACCTCCTTTTTCTTAATGTTTGTCTTTTCTAGATTGTCAAAA
GAGTGGGGAATGGTGAGGAAACGCCGATGATTGGAGACAAAGTTTATGTCCATTACAAAGGAAAATTGTCAAATGGAAAGAAGTTTGATTCCAG
TCATGATAGAAATGAACCATTTGTCTTTAGTCTTGGCAAAGGTAAGAGGCTATTTTTTTGACTTGTGTTTTACTTAACTTTATTACTATTTGTA
ATATATAGGAGCAGAGGATTCTATCCTTTCTAATAAGTAATGAAATTTTAGAGTAGTAGTACTCAAAGAATGGTCTGACAATCCTAGGGCTCCC
TGAGATCTTTTTAGGCGGTCCCAAATGTCATTTATTTTCATAACAATACTAACATATTATTTCCCATTTTACTGTATTGACATTTATTTCCACT
GATGGTACAAAAGCTGCAGTTGTAAAAAAACTGCTGGTTCCTTAACACAAATCAAGGCAGTGGTAACCAGCTGTTCCAGTAGTCATCGTATTTT
CCACTCCCACTCCTTCACTATTTACATAAGGGAAAAAGCTAGTTTCACGTAAAAATGTCCTGATAAAGCAGTAAAAATTATTAGTTTTATTGAA
ACCCAATCTTTGAGTTTCACATCACTTTGATATTCTGTGACAGAAAGGGAAGCACGTGTAGACCACTTCTGTCCCCCAAAGTATGATGGTTGTC
TCAAGGAAAAGTACTTGTGCTCTTGTTTTAGTTGACATCTGAACTAACTGCATTTATTTCATGAGATACCATTTTTACTTGAAAGGGCAAATCT
GATTATGCAGACTTGATTCAGTATTTGGCAGGTGTTTTTCTGACAATGAATGGAGTAAGTCTGTCATTTCAAGGAAAAACAACTGACAATGTTT
TTTGCCATTAAGTTTTCAAGTAAAAATTATAGTTTAGGAGAACTCCTATTTGCCACTGTGGGCTTATTTGCCACTGTGGGCTTGACAGCTTCCG
AAGACTTTTCTGATGAGATTGGTGGGTATTAATGAATGTGGTTTTAAATATACAATGAAATGTGTCCACATTTGGAAGATCTGTATAACTAAGA
ATGAATATTTTCTCAGTGACCAATGCAACATCTTACAAGATCATGTGTGAATAAACAATTCATTCAAAGTTACACCAACAGATTTTAATCTAAC
AGTATGAAAAGTTCACTGATACACTTTCAGTTTCCACATTCTAATTGACTTTTATGAATCTTACAAGTTCTACAGTTTTGATGTAGTATCAGAT
AATTATATTCACAATTATCTAAAAGGTTGTTAAAGGGCTCCTACCCTTTTCAACTATCTATCTTTGTGGGTTTGGATTTTCTTCTCTATGTACT
TCAACCAAAATTGCAACACATCAATGCAGAAATAGGAGAATCTGGTTGTCTCGTGTTACAACTCAAACACATTTCCACATGTATAACATTCTAA
AACAATGACACTCGTCTCACTAATTTTTTTTTTATTTTGGAAAATACAAAATATACAAATACTTTGTACAAAATTAAATTACTTATATTAACAT
GGGGTTATTCTAAAATGAATTATTAAATAACTACTTTTTTACTAAATCTCAGTAGATATGTCAAATAAACAACTTCTTTGGAGTCCTCAATTTT
TAATATGTTAAGGGGTCCTGAGGAAAAAAGGTTGAGAACTACTATTTTCAAGTATTAAGTATGATTTTTACTAAATTATTTTCAAATGCCTTTT
TTTTTTGAGACAGGGTCTCGATCTGTCACCCCQGCCGCCTCACTGTAGCCTCAACCTCTCAGGCTCAAGTGATCCTCCCAACTCAGCCCCGCAA
ATAGCTGGCATTACAGGTGCGTGCCACCATGTCTGGCTCGCTCTGTTGCCCAGGCTGGAGTCTAGTAGCACCATCTCGGCCCACTGCAGCCTCC
ACTTCCGAGGTTCAAGCAAGATTATCATGCCTAAGCCCCCCAACTAGCTGGGACTACAGGCGTACACCACCACACCTGGCTAATTTTTGTGTTT
TTTGTAGACATCCGGCTTTGCCATGTTGGCCAGGCTAGCCATGAACTCCTCACCTCAACTGATCCGCCCACCTCAGCCCACCCAAACACCTGGG
ATTACAGGCATGAGCCACCATGCCCAGCCWAATTTTTTTTTTTTTTTTTTTTTGTAGAGACAGGGTTTCACCATGTTGCCCAGGCTAGTCTTGA
ACTCCTGGGCTCAAGCAATCTCCCCGCCTCACCCTCCCAAAGTGCTAGGATTATAGGCATGAGCCACCACACCTGGCCTCAAATGCTGTTAAAT
GTCTTTAGTTCATTTAATGTTCTTATTTTTTAATCTTGTAGGAATAATAGCCCATACATCAAATTAAACTTTGTAGAACATGTGGCTTATTGGA
AGTTGGTGCCTGAGTTACATCTTTTATTCTTGTCTGCCACAGACAAGCAACTGTAGTTTGTTCCTAGATTAGGGAAAAAAGTATTCCCCCTATT
CACCACCATGGCTATGTGTGGACTTCATTCCCTTGTCCTTCAGCTCTGTATCTAGGTGAATTGCTAACTAAGCATGGATCTGGAAAGGAAATAT
AGTAAGCAGAAACTGAGGAGTTACTTTCTGTCTCTTGCCACTCAGCCTTCCCTGCTTCCTGTATCATTTCTGTGCCTGGTGAATTCTGCTTCCC
GTCCACCTCTGCTCTTTCCAAGCTCCAGTTCTGGCCACGCCCCTGCTCTCTTCTCCTTTGGGTCTTTAGTAGGTTAATGGCTCATGAGATATTA
ATTTTTTGTTTGAATAAGATAGCAGTAAAAATCAAATACAGTCTTGTGGCAGATAATTATGACAGTTATTTTAGAATTTTGTTGTTGTTGTTGT
TCTTCATTTAGCCATATGAACCTCCAGGGCTGCCAGAATGGGTGTCGCATCATTATTTAGGTGACCTAAGAGTGACTGACCTTGTCAGACCCCC
TTGTTCCTGCCACCTGCTAAATCCTTACTCTATCCTTAGAATTCCTGTCTTAAACAAGCTGAGAGTTAAGATAACAGGTCCTTTTAGCAGTTAT
CTTGGTGAGCAGAATTAAGAATTGTTGAGAATTTATATTGGTATCTTCTCTACTGAGATTTTCTCAGTAAAACACTATGGTGAATGAGTTTCCT
GGAATTTTAAGCAGAGTAAGAAGATTTTCTGAGTTATTTTTTTAAAATACAAGTTGGGAGAAAAAAAGAGGCAACTTTCAGTTGACTTTGTACC
TCTGACACACCTGTCTACAGTCAGTGCGGTCTCATGGAAAAAGCTTCCACCCCGCCATTAGGAACCCACGGTTCCTGTCTTCCCTGTTCCTTGT
CCTGTGTTAACATGAGTAAGCCACTTAATCTTACCTGCTTCTGTAAAAAGAAGTCTGTGGAGAGCTTATGTCATTCCATTCTTGTTCCTTCTGT
AAAGAATGCGGGAACAAAAACCATAAAAGACTAATACCAACACAAAGAGACCCTTAGAGGCCTCCTTAAGATGGTAATTGGAAATACTAGGATA
GAGCAATATACCTCTGGTAAAACATCTATAACATAACGTATTTAGTTGCCTACAAAACAAGAAACATTGGTTAGGCAGTTTATAGTTTTGTGGG
GTTTTWTTTTTCCTTTTTTTTTTTTTTTTTGAGATGGAATCTCACTCTGTAGCCCAAGCTGAAGTGCAGTGGCGTGATCTTGGCTCACTGCAAC
GTCTGCCTCTGGGGCTCAAGTGATTCTCGTCCCTCACCCTCCCCAGTATCTGGGACTTCAGGCGCGCCCCACCACGCTTGGCTAATTTTTTGTG
TTTTAGTAGAGACAGGGTTTCACCATGTTGCCCAGGGTGGTCTCGAACTTTTGAGCTCAGGTGATCCGCCTGCCTTATCCTCCCAAAGTGCTGG
GATTACAGGCATGAGCCACTGTGCCCAGACTATAGTTTTATACTTATATTTTATAGCATTAGGTAGTTTATCAAAATGAAGAAAATAATATAAA
TGGACAGTAGTATAAATATTATTCATTGAACTCCATTGATCCCTTATATTGTACCTCTCCCAAGGGAATAAATAGAAATATTTCAATGGAAAGT
CATCCTAATTTGGGGATTCTAGTATGACTTCAGTATTTAACATAGAACTATAAGACCCTATCTGTAAAAATCCCATTGAAAAGATAAACATATC
ATAAAATACACAAATTCAAGCTATACCTACACTTGCTTTGTATATGTCTTTTGCTTTGTGTATGTCTGTTGCTTTTATCATACCATCTTTTTCT
CTTTTCTTTTTTTTTTTTTCTTTCTGAGACGGAGTTTTACTCTTGTTGCCCAAGCTGGAGTGCAATGGCATGATCTCAGCTCACTGTGACCTCC
ACCTCCCAGGTTCAACCAATTCTCCTGCCTCAGCCTCCCAAGTAGCTGGGATTACAGGCATGCGCCACCACACCTGGCTAATTTTGTATTTTTA
GTAGAGACGGACTTTCACCATGTTGGCCAGGCTGGTTTTGAACTCCTGACCTCAGGTGATCCACCCGTTTTCGCCTCCCAACGTGCTGGGATTA
CAGGCATGAGCTACCGCGCCTGGCTAGCCGTACCATCTTTTAAACTCTATTCTTTACTTTCTTCATCTAAGGTTATGATAATCATATATACTAC
ATATATTATATATGATTATATAAGTATATATTATTATGTTGAGGATTAAGATAATGTACACCATCGCCTAGCATTCAGCCTAACAAATGGTAAG
CACTCAGATGTTGATTATTATTGTGGCAGTGTTAGGATTTTTCACTGGTTTTATAATGGAATCGTAAAAGCTGTGTTATAACATCTTGGGTCCT
GACTTCATCTGTTGACTATGCATGCCTACAAACCTTGGAAACAATGCTCAGCCATCTTGCTTAGCCCCAGGAAGTTGGGAAAGACAGAATCAAT
CTAAGGGAACTGATTATTACTACTGTGGAATATGTThCAGAAATTAGAGTGAAGAGGTGATGATTTCTCTTACTAGGTTTTCTTAACTAAATAT
TAGAGGTTGTGAATTATTAGAACTGGTCATAGCCCATTTAAAAAGAAGCTGAATTAAGAACAAGGATTTTCATACATACTTCTATAATAGGGGT
TCTGTTCTTTTACCCTACTCCCCCCAGCAAATATATTTTCACTAAAATGGAAGAGGGCAATAGATTTGGAGGATGAAACAATTATTTCTACCCT
TTTTTTTTTTTTTTTTTTTTGAGACAGAGTCTTGCTGTGTCGCCCAGGCTGGAGTGCAGTGGCGTGATCTCCGCTCATTGCAACCTCCGCCTCC
CGGATTCAAGCGATTCTCTTGCCTCAGCCTCCTGAGTAGCTGGGACTACAGGTGCATACTACCATGCCTGGCTAATTTTTGTATTTTTAGTAGA
GATGGGGTTTCACCATGTTGGCCAGGATGGTCTTGATCTCCTGACCTCGTGATCCACCCACCTCGGCCTCCCAAAGTGCTGAGATTACAGGCGT
GAGCCACCACACCCAGCCTCAATCTTACTATTTTTTGGATTCTTTGTACAATTAGTATAATTTAGGTGACAATCATATTAATATTTGTGTCGAA
QCCACTTTGGTTTTTTTATTGAGGTATTATTTACGTATAATAAAQTTTACCCTTTTAAGTATATAGTTTGATGAATTTTGATAATATTTCTGTA
ACTACCACCACAATCAAAATATAAAACAATTTCTTTACCCTAAAAAGTATTTTTATGTCCTTTTGCAGTCACTTTCCTTCCTGGACCCTGAGCC
CCAGGCAGTCACTAACTTCGTTTCTGTTACTATAATTTTCCCTTTTGTACAATTTCATATAAACAGAATCTTGTATTATCTTTGGTGTTGACTT
CTTTCACTTAACATAATGACTTTGGGATTCATGCATGTTGAATTCCTGAGAAGTATTCCACAATTTGGCAATCCCACAGTTTGTTCACCCATTC
AAAAATAGGACATTTGGTTGTTTGCAATTTGGGGCTATTCAGTTTTTCATATCCTTATTAACACGTAGTATTGTCGATCTTTTTAACTTTAGCC
ATTCTAGTAAGTATCAAGTAGTATCTCACCTTGGTTTTTGTTTGCATTTCCCTGATGACTAGTGATGATTGAGGGTCTCTCTTCTTGTGCCTAG
TGGGCATTTGTATGTTTTCTTTTGTAAAGTGTCTGTTCAGATCTTCTGCCCATTTTAAAACATCAGTTGTTTGTCTTACTGAGTTGTACTTAAA
AGGACAAGCACTTTGGCAAATATGATCTCCCAGTCTATCTTGCCTTTTTATTTTCTTAATTGGTCTTCGGAAAAGTAAAAGTTTTTACTTCTGA
TTAAGTCAGCTTTATCAGTTTTTTCTTTTATGGTTTGGTTACCTACTGTTATTAACCATTTTTGGTTTGATGTGATTTTTTGTTTACTATATTA
CAGACTAAGGTACAGAGAAGCTCGGTAAATTGCCCAAGGCTATACAGTAAGTGGCAGAGCCAGGATTCAATTCCAGCTAGTCTTTCTTAACTTA
TGTTAGATCTTAAGGTTTAAAACATAGCCCAAACCAGGTACAGAAATGAAGTAGGTCCTGGTTAGCAGTATTTATCGAGTGCCTGATATACAGT
AGAAATTTCTCTTTTTTTTTGAGACGGAGTCTCGCTCTCACTCAGGCTGGAGTGCAGTGGCACGATCTCGGCTCACTGCAACCTCTGCCTCCCG
GGTTCAAGTGATTCTCCTGCCTCAGCCTCCTCACTACCTGGGATTACAGGCATGCACCACCATGCCTGGCTAATTTTTATATTTTTAGTAGACA
CGGQGTTTCACCATGTTGGCGAGGATGGTCTCAATCTCCAGACCTCQTGATCCGCCTGCCTTGGCCCCCAAAGTGCTGGTATTACAGGCCTGAG
CCACTGCACCCAGCCACAGTAGACATTTCTTACCAGTAATGATATGTCATACTAAGGTTTATCAAAAGCACTGGCGCTTGTGTTCGCTCGCTCT
CTCTCTCTCTCTCTCTCTTTCTTCCTCCPCCTCCCTCTTTCTCTCTCTCTTTCTCTCCAGAGACTTGCTCTGTTATTGGGGCTGGAATGCAATG
GCACCATCATAACTCACTACAGCATTGAACTCCTAGGCTTCAGTGATCCTCCTGCCTCAGCCTCCCAGAGTGCTCGGATTACAAGCATGAGTCA
CTGCACTCAGCCAATATATTCTTAGTATCTGTTTACTTTTTTTTACATGCAGTTTAGGAGCATTCAGGAGATTTTTAAGGAAAGCTTTTAGGCT
AAAATATTTAATTTTTTTAATTGTCCCCAAAAGTGTGAGCCAGAAAGACAGCAAACTTTAAGAAAGTACTTACTTTGGTTTTTCCTGGTACTTT
GCGATAGAGGAGGAATGCTTCCAATTTCCACTGCTGAGTGGATATCAGGGAGGAGCTGATTTAGGCTGTGGAAAGCTGAGCAAATTTCTCACTC
CATTTAAATTCGATATTACATCATGCCTTTGTTCTCTTTTTGAGTACAGTGTTGTGGTGCTATAGTTCTTTGCAAAGAGTAATTAAAACATGAC
CCCTACCTTCAAGTATGTAACAATTTAGTCTGGCAGAGTTGATCCTTAAGGCTGTCCCAGGACAGATAATCCTACCATATCTGTTTTCTTTCCC
TGTTTGTTTGTTTGTTTGTTTTAATTATAAGCCATGAACGTCGGGAGCGATTATCCTGTGATTAGTTCTCTTAGTAGTTAGAGAAATGACAAAA
ATACAATGTAACATAAGATATGAACACTTTAAAAGAGTCTTAAACATAAATTACTGTAATCTCAGCAGTTTGGGAGGCCAAGGCAGGAGGATGA
GTTGAACCCAAGCGTTCAAGACCAGCCTGCACAACATGGTGAAACCCCATCTCTACAAAAAATACAAAAATTACCCACGCCTGCTGCTGCACGC
CTATAGTCCCAGCTTTCTCACGAGGCTGAGATCGGAGGAPCACTGGAGCCCAGGAGGTCCAGGCTGCAGTGAGCTATGATCACATGCCTTCACT
CCAGCCTGGGTGACAGAGCGAGACACTGACTCAAAACAAAATACATAAATTAATTTGTTTAATTCATGATTAGTTACTATTGGTAGGGAGTAGG
GATGATTATTAGAGCCCTTTTATAGCTATTTTAAAATAAAACTAGGCCAGGCGTGGTGGCTCATGCCTGTAATCCCGGCACTTTGGGAGGCCGA
GGCGGGCAGATCACCTGAGTTTAGAAGTTCAAGACCACCCTGGCCAACATAGTGAAACCCTGTCTCTACTACAAATACAAAAATTAGCTGGTGT
GGTGGCACATGCCTATAATCCCAGCTACTGQGGAGGCTGAGGCAGGAGAATCACTTGAGCCTGGGAGTGGAGGTTGCAGTAAGCCGAGATTGTG
CCATTGCACTCCAGCCTGGGCGACACAGCAAGATTCCATCTCAAAAAAACAAAAACAAAAAAACCTAAAATATATGAGGAAAAGGTATACAGGA
AAAATAATTTGCTTTATTTAGTATAAAAGAAGAAAGGATTTCTGTATTATCTGTTATATGAGGTTTTTCTTATTTTTAACATAAAAAATTAGCA
GAATATGCAAGTAGTTAAAATAGAGAWCAGAAATTGGTACTGAGTCCTAGGAATCCCTCAAGGAAGGTGAAGCAGGAATGAATCAGATGCATTT
TTATTACCTGAAGCTTATTAGTGATTAACCTTGTTTGTCAGCTTTTATATTTTGAAAGCAAATCTTTTACAGTTAAAATATTTACCTTTCTTGT
TCTTTTCTACTCCCATATGAAAAAGTAATTTTTTTTCTGTATGATATGGTGTAGCTTTCATCCTATAGTGTGTTCAAGATGCTCATATTCAAAT
GTAAATGTACATTTAAAAGGTAGTGATTTTTCAACAAGGGTGCCAAGACCATTCAGTGGGAGAAAGAACAGTCTTTTCAACAAATCGTGTTGGA
AAAGCTAGATATCCACATGTAAAAGAATGAAATTGGGTCCTTATCTTACACCATCTGCAAAAATTAACTCAAAATGGATCAAAGACCTAAATGC
AAGATCTAAACCTTGCATTAGAAACCTTCCCATAAGAATATGGAGGAAGGCCGGGCACAGTCGCTCACACCTCTAATGCCAGCACTTTCGCAGC
CCGAGGCGGGCGGATCACCTGAGGTTAGGAATTCAAGACCAGCCCTGACCAATATGGTGAAACCCCGTCTCTACTAAAAAAAAAAAAAAAAAAA
AAAATTAGCTGGGCATGCTGGCGCATGCCTATAATCCCAGCTACTTGGGAGGTGGAGGCAGCAGAATCGCTTGAACCCGGGAGGCAGAAGTTGC
AGTGAGCCAACATCACACCATTGCACTCCAGCCTAGGCAACAAGAACGAAACTATGTCTCAAAAAAAGAAAAAAGAAAAGATAAAGAAATATGG
AGGAAAGGCTTCATGACATTGGATTTTGCACTGGTTTCTTGGCATGACATCAAAAGTACAGGCAACAAAAGTAAAACAATTAAACATAAATTAC
TGTACATCATAAATTAAACATAAATTAGAATACATCAAAATTAAAAACTTTTGTGCATCAAACAGTAACAGAATGAAAGGCAGCCTATGGAATG
GGAGAAAAATGTTTGCAAATCTTATATCTGATAAGGCATTAATACCCAGAATACACAAACAACTCCTATAACTCAACAAAAACAACAAATTAGC
CCAATTTAAAAATGGGTAAAGGACCAGTTGCAGTGGCCATACCTGTAATCCCAGCATTTTGGGAGACCTAGGTGGGAGGGTCACTTAGACGCCA
GGAGTTCAAGACCAGTCTGCGCAACATAGCGATACCCTGTCTCTAAAAACTTTTTAAAAACTCAGGCAAAGGGCTTGAAATTTCTCCAAGAAGA
TATAAATGGACAJCAAGCATATGAAAGATGTTCAACATCACTAATCATTAGGGAAATGCAAGTCATTAAACCACAGTGAAGTATTACCCTCAAT
ACCGGTTAGAATGGGTACTGTTAAAAAAAGAGAAAACAACAAGTGTTGATGAGGATGTAGAGAAATTGGAACCCTTATGCGCTGTTGGTGGGAA
TGTAAAATAGTGCAGCTGCTGTCGAAAACGGTATGGAAGTTCCTCAAAAAATTAAAAATAGAGTTACCATGTTGATCTAGCAGTTCTACTTGTG
GGCATATAACCAACAGAATTGAAAGCAGGGTCTTGAAGAGATATTTGTACACTCATGTTTGTAGCAGCATTATTAACAGCAACCAAAAGGTGGA
AGCAACTCAAGTGTCCTTCAATAGATGAATAGATAAACAAAATCTGATATAAACGTACAGTGGAATATTTACGTTTTAAAGAAAAATTCTGGCA
GATGCTACAACATGQACGAACCTTGAGGGCATTATACTAAGTGAAGTAATCCACTCACAAAAAGAAAAGTACTGTCTGATTCCACTTATATGAG
TTATCTATCCAGAGTAGTCAATTCATAAAAACAAAGTAGAATAGAAGTTGCCAAAGATTAGGGAAGGAGGAAATGCTTAATGGGTATAAAATTT
TTAGTTTTCCAAGATGAAAAAGTTCTGGAGATTGCTTCCACAACAATGTGAATATACTTAAAAATAGTGAACTGTGCACTTTAAAATAGCTAAG
ATGGTAAATGCTTTTTTTTATCCCCCCACAATTAAGCGTTTTTTTTAAAACTCAAGGACAAAACATTATGTAGTCAGAATGTTCTGAAGTGGTC
ACTATAGTCTTTACTATAAATGAAACTGTTAAGTCATTAAAATGTTGTATCTTAAAATATGTTATATAATTTTTTTAAACCAGAAAAAAGTGTA
ACATTACAGAACCAAGAAAAAGTATAATGCATTGCTTTTATACTGGCCTTTGTATCCTTTTAAACTTTTTCACCTGCCTATAGTTACATACGTA
TAAAAAGCATTTAAATTTAGTAATAGCTATATTATACATTTGTATACATATATATTCTTCTTTTATATTTTATTACAAATGGAATAAGACTCCT
GAAATTCATAAATTGTGTATAAGCTAGTAAAACTGAAGTCCAGATCAAGTGTAAGAATAAATTGACGTGGCCAGGCACGGTGGCTCACGCCTGT
AATCCCAGCACTTTGGGACGCTGAGGCAGGCGGATCACGAGGTCAGGAGATCGAGACCATCCTGGCTAACACCATGAAACTCCATCTCTACTAA
AAATACAAAAAATTAGCCAGGAGTGGTGGCTAGCGCCTGTAGTCCCAGCTACTCGGGAGGCTGAGGCAGGAGAATGGCGTGAACCCGGGAGGCG
GAGCTTGCGGTGAGCAGAGATAGCGCCACTGCACCCCAGCCTGGGCGACAGAGCGAGACTCCATCTCAAAAATAAATAAATAAATAAATAAATA
AATTGACATTATGTATTCTTGGTGTGTTTTTTTTTGAGACGGAGTCTTGCTCTGTCGCCCAGGCTGGAGTGCAGTGGCGCAATCTCGGCTCACT
GAAAGCTCCGCCTCCCGGGTTCACGCCATTCTCCTCCCTCAGCCTCCCGAGTAGCTGGGACTACAGGCACTCACCACCACGCCCGGCTAATTTT
TTGTATTTTTAGTAGAGACGGCATTTCACCGTGTTAGCCAGGATGGTCTCAATCCTCTGACCTCGTGATCTGCCCACCTCATCCTCCCAAAGTG
CTGAGATTACAGGCGTGAGCCACTGCACCGGCCTATTCTTGGTGTATGTTACCTATGACTGAGATCCTGAAGATGAAGAATCTTTAAAATGTTT
ATGCTTTGGGGGTTGGGCATGGTGACTCACACCTGTAATCCCAGCACTTCGGGAGGCCGAGGTGGGCAGACCACTTGAGGTCAGGAGTTTGAGA
CCAGCCTGACCAACGTGGTGAAACCCTGTCTCTACCAAAAAATACAAAAATTACCTAAGCGTAGTGGCACGTCCCTGTAATCCCAGCTACTTCG
GACTCTGAGGCACGAGAATTGCTTGAACCCACCACGCAGAGGTTGCAATGAGCCAAGATCGTCCCACTGCACTCCAGCCTGGGCAACAAAGTGA
GACCGTGTCTCAAAAAGAAGAAAATATTTATGTTTTTGGTCCAGTAATTCTACATCWAGGAATTTAACCTAAGGAAATGTCTAGAAGCTTGCTT
AACCCTCTCCAGACTAATTGATGCTCTCCATTCTGTTTGCATATATACTCAGTGATACAACTGGTTTCTTGTTCTGTGGTGTGGTCTCACACAT
TGCTCCCGTCACTGAGTGGGCCTTGTCAGTGCCCTGCAGCCACAGACCACTAGGAACACACCTATAGTTCAACACGTTGGTTCATTACTTGTGA
GGGAGGATGCACACCATGCGAACTGTGGAGTATCTCAGTAAGAGTGTTAGGAGGAATATTTTATAGGACTTGTGCTTGTATTACCTCATTTTGG
GGAGTTTAAGAAAGCAGAGCTTTCTCGATTGGATGCTGTTAGCATGTGCCGTCATTGATGTTTGGGTATCTTAATAAATCTTATTACGACGTGG
GCCAACTACAGTAGAGTCAGACCAAAGCTAGAACTGGTAGAGAAGCAGCAGTCACTCATATTAGCCAGGAGAGGGGGATGTTTGGTATTTTGTG
AAAATGCTCAGTGACCTTGTTTTTTTCCTCTGGGCTTAGACAAAAAAAAATTTTTTTTTCTTTTTTGAAATGGAGCTGGGGTGCAGTGGCGTGA
TCTCAGCTCACTGCAACCTCCAGCTCCCAGGTTCAAGCAATTCTTCTGCCTCAGCCTCCCAAGTACCTGGGATTACAGGCGTGAGCCACCGTGC
CCGGCCAGACAAAATTTTGAAGTATTTTTGTTTTGTCTCACTTGAACACAGTCTCAGAGTGACCTTGTCTCATGTTGATATTTTGCGAGATTGT
TTATGTCCCACAGGAGAATAATATGGCCTCCCTATGATCCCTAGGCCAGCTTCAAACAGCACTGAGGTCCAGCTGTAAGTGTTCAAGCAGTTTC
CAGACGTTGGGGAGGCTTTTTCTTTCTCAAACTCTTGTTAAGAATCAGTTGAAGCCAGGTGCCTGTAGTCTCAGCCACTCAGAAGCTGAGGTGG
GAGGATCACTTGAGCCAGGAGTTTGAGTCCAGCCTGAGCAACATAGCAAGACCCTGTCTCTTAAAAAGGAAAAAAACTGGGCTGATGCAATGGC
TCACACCTQTAATCCCAGCACTCTCGAAAGCTGAAGCAGAAGTATCACTTGAGGCTACGACTTCAAGACCGACCTGGGCAATGTAGCAAGACTC
CATATCTACAGAAAATCATGGTGGTATTCACCTGTAGTCCTAGCTACTAGGGAGGCAGAGGCAGGAGATTCTCTTGAGCCCAGGAGCTCAAGAC
CAGCCTGGGCAACATGGTGAGACTGTCTACAAAAAAAAAAAAAAGAAGAAGAAAAGAAAATTAGCCCAATGTGGTGGTACATGTCTGTGGTCCC
AGCTACTTGGGAGGCTAAGGTGGGAGGACCGCTTGAGCCTGGGAGGTTGAGGCTGCAGTAAGCTATACTCACATCATTGCACTCCAGTCTGTGT
GACAGAGCAAGACCCTGTCTCTTAAAAAAAAAAAAAGTGATGTAGCCATTTCGTAAAGACAGTTGGGCAATAACTATCAAATTTAAAATGCATA
TCACCTTTGCACTTCCAGGAATTTACATTCCAAATATACTTATGCAAAGTAGGCAAACATACATGCACAAGTAGTCTCATTAGATTACTGTTGG
TAATATATGCATCAATAGAAGATTGTAGTATTATACACCCATTAAGAATGAGGTAGCTCTATTTGCATTTATTATGATGATGATGTCTTTCCTT
TATCAAATACATATTATGTGCCGGGCACCGTGCCATGCATTTGATGTGTTTTATCTAATAACTCTTTATTTATTTATTTATTTTTGAGACGGAG
TCTCGCTCTTTCGCCCAGGCTGGAGTGCAGTGGCGCTATCTCGGCTCACCGAAAGCTCCTCCTTCTGGGTTCACGCCATTCTCCTGCCTCAGCC
TCCCGAGTAGCTGCGACTACAGCCGCTAGCCACCACGCCTGGCTAATTTTTTGTATTTTTAGTCGACATCCGGTTTCACCGTGTGAGCCAGGAT
GGTTTCGATCTCCTGACTTTGTGATCCGCCCGCCTCAGCCTCCCAAAGTGCTGGGATTACAGCCGTGAGCCACCACGCCCGGCCTTATCTAATA
ATTCTTAAAACAACTATTAATATATGGCAAGTACTGTTAWTATTTACATTTTGCAGGTGAGGAQACTAACCACAGACATTAAATAACTTGCACA
AGTTTACACAGATAGTAAAGGGCAAACTTGGTATTCAAATCCAGGTATTCTGAAGTTAGAGTATGCTGCATTTTTGACCTCTAAAATGTACATC
CTCCTTTCTACTGATGGAGAAAGAGGATGAAGATATATAATAAATGAAAAAGTAGTTTAGAACTGAATGTCTAGTTTGCTGTCATTTGTATTTT
AAATTTTTTTAAAAAGTGACAGCACACAGTAGGATACCAAAGAAACGTAACAGTTACTTATAAGGAGCAGATGGATGGCCTTTCAGCTTTCACT
TTCCATCCTTTCATGGGTGTTTTAATAATAGGCATGTATTACTTGATTTTTTTTTTTTTTTTAAGAGACAGGGTCTCGCTCTGTCACCTAGTCT
GGAGTGCAGTGACATAATCATTGCTCACTGTAGCCTCTTACTCCTAGGCTCAAGCTCTTCTCCTGGCTTAACCTCCAAAGTAGCTGGAGCTACA
AGCATATGCCACCATGCCGCACTAATTTTTTAAATTTTTGTAGAGATGGAGTTTCACTATGTTGCCCTGGCCGGTCTTAAAACTCTTGCGCTCA
AGTGGATGCTCCTGCTTTGGCCTTCCAAAATGCTGAGATGAGAGGTATGAGCCACTATTCCTGGCCACTTACATATATTTTTAACTGAAATAAA
TGTAGCTGACATTTTGAAAAGTTGTAATATTTAATGAAGATTAAGCTAAAGTCATGAATAAAAAATGGTTTATCTATCCCTGCTTACATACTGT
TATGTAGGGTTTCCCTTGTCCTAATATCCTACCACCAGCTCACTTCAAATTCACTTCCTCTGGGGTTCATCTCTTATCTGATCCTACTTTTGAA
TACTTACATTTTTTGTTTTTGTTTTTTQAGACAGGACAGQGTCTCCACTCTCTGCCCAGGCTGGAGTCCAGTCGCATGATCTCACCTCACTGCA
GCCTTCACCTCCTCCACTCAACTACTCCTCTCTCCTCAGCCTCCTCAGTAGCTGGCAAGCACCACCACCCCTGGCTCATTTTTTAAATATATTT
TTTTGTGGAGATGCCGTTTCACCATCTTGCCTGCCCTCGTCTCAAACTCCTAAGCTCAAGGGATCTGCCCGCCTTGGCCTCCCAAAGTGCTGGG
ATTACAGCTGGGATTACAGGCGCGAGCCAACGTGCCCAGCCCCCAGATACTTAATATTTCTGATTGACAGAGTACCTCATTTGTCATTTAGCCT
TTTTTTTTTTTTTTTTGGAGACAGAGTCTTGCTGTGTCGCCCAGGCTGGAGTGCAGTGGCATGATCTCTACTCACTGCAACCTCCGCCTCCCAC
GTTCAAGCAATTCTCCTGCCTCAGCCTCCTAAGTAGCTGCGATTACAGCCACGCACTACCATGCCTGCCTAATTTTTGTATTTTTAGTAGAGAC
GGGGTTTCACCATGTTGGCCAGGCTTGAATTCCTGGCCTCAAGTGATCCGCCTGTCTTGGCCTCCCAAAGTTCTGGGATTACAGGCGTGAGCCA
CCATCCCCCACCAAAATCTTAATTTAGCCTTTTAAATCGCCTAAATTPTCATTGTTTCCGAAAGGACTTGATACTGCTTACAGTAAGATAATGA
TGCACATCATAGGAACTATAAACATTGAGATTACAATTATATAGCCTAATATAGTTCTACAATTGAGCAGTAAATTTAACTTAGTTTCCTGGAA
GTAGGCAAAAAATAAAATATTTTAAGTTCTGTAGTTGTGGTTTGACAAAAAGACACATATGTTTTTGTTTAAAGGAACATTTTTCTGATTCTAA
ATTTTGAGAAGAAATGTGTTTCATGGACCCTTTTATGCAATTTATCCTGTTCTGGTTACTTCTTGTTTTGTTGTTTTTTTTGTCTACCCAACTA
AATTATAAGCTTCCTTAGGACACACTCTATTTTTCAATACTATTTTTGTTCTATCTCTGCCTAGAAAATTTGCGCTTATTATAGTTGAAATGAT
AAATTACGCAACAATTGCAACATAGCCATATTTCATGGATAATGTTACCACCACTTTTCAAAGACTTAATTTTTGACTACTTTAGGAATTTATA
TTACTTTCATCCCTTTCAGCAGGGAATCCTTTTTGAGACAGGGTCTCACTCTGTCACCCAGGCTAGAGTGCAGTGGCATAATCATGACTCACTG
AAGCCTCAATCTCCTGGGCTCCCAGGCTTAAGCTGTCCTCCCACCACAGCCTCCGGAGTAGCTGGGACTACAGGTGTGCACCATACCCAGCTGT
GTTCTTTGGTTCTTTGGGGTGTTTTTTTTTTTTTTTTAGAGATGAGGTCTTGCTGTGTTGCCCAGGCTGGTGTCAAATTCCTGGACTCAAGCAG
TCCTCCCACCTCAGCCTCCCAAACTGCTGGGCCGATCAACAGGGAATCTTTTGTGATAGCCTTCAAAAAAAATAATTTATTTATTTGTATGTAG
CACTCTCTCATCTTGTAGCCCATACTTTCTAGCTGAGTATGTAGTATGAAAAACTGGAAATTAGAACTTTGGTTTTATGAAAGTTAAATCTTTT
TAAATACGGCTTATACCTTTCAACTACCTTTTCCTTTCCCTTAGGCCAAGTCATCAAGGCATGGGACATTGGGGTGGCTACCATGAAGAAAGCA
GAGATATGCCATTTACTGTGCAAACCAGAATATGCATATGGCTCGGCTGGCACTCTCCCTAAAATTCCCTCGAATGCAACTCTCTTTTTTGAGG
CAAGTATGTGTGTGATGTTGCCTTGTCACCATCTGCTCTACAATAGCAATGGCTTTGAAGCAACAGGCAGTGGGAAAAGGAGCTAAGCTTGCTA
TAGAGAATCAGATCCAACTTACTTATTTTGGAGCATGGCTTCTTGAATTGTTTCCCACAAACCCAAGGCTGCGCGTGCCAGTGCTTGCTTACAA
ACGTGTTTCTAGCACAAAAAGGTCATATCCAAATAAACAAAAGACGCTACACTTAGAAATAAAGATTCTGGTCCATGGTGTGAGTGTGACATAC
TCAAAATTGACCAGAGTACAGGATGGAAATGTTGGCGATAAATGTTGAAATATGCCTATGTCACCTTGCGGCGTATTTACATATTATAAAAATT
TATGTGTCACAGATCTCACTTCTCTAGAAGCCGTTGGTGGTGATAAAACATTATTCATCCTATGTTGAATTACATATATTTCGCAAAACTTGAT
TTTTAAGAACCACCCCAGCTACGTAAAATACACCTTTAATCAGTCGTAGGTCACATCCATGAGATTTATTCTTACATTTTGAGAAGGCAACTCC
ATAAACCCAGGATGGGAAAGTTGTGGCCTCAAACAAAATAGTTCTACACCAGCACCTTGTAGCTCTGGCTTTTTGCCCACAGGGTAGTTTTCCT
AGTATTTCCTATCTTTGCACTGCAGTCCCTTAGGATATAGTTCTAGACATTAGCATTACATGAAATTCTTTCCAAGTATGGAAAAGTATAGTGG
GTTTTTTTTTTTTTGCTACTTTTCCAATAATTAAGATGCATAAATGAATGTATATATTTTAAAACAGCTTTATTTTGTAAAATGAAATAATTGG
TTCCCCTTGCCTTCACATATGTTCAGTTGGCTTTATTTGGTCTTTTCTCAGCTGAATTCCTTTTTTCTTTCTAGATTGAGCTCCTTGATTTCAA
AGGAGAGGATTTATTTGAAGATGGAGGCATTATCCGGAGAACCAAACGGAAAGGAGAGGGATATTCAAATCCAAACGAAGGAGCAACAGTAGAA
AGTAAGTATTAAAGTAAGAGGGAACTAGTCCTTAAAAGTTGGGCCATTTATGTGGACGAAATGGAGACTTAAAAAAAAATGTTTGTAGAAATGA
ATATATCGGCTGTGCGCAGTGACTCACGCCTGTAATCCCACCACTTTGGCAGCTCCAGCCGGQTGGATTGCCTGAGCTCAGGAGTTTGAGACCA
GCCTGGCCAGCATGGCGAAACCCCATCTCTACTAAAATACAAAAAACTAGCCAGCTGTGGTGGTCCACGCCTGTATTCCCAGCTACTTCGCGAG
GCTGAGGCATGAGAATCACTTGAACCCGGGAGGCAGGCGTTGCAGTGAGTCGAGATGGTGCTACTGCACTCCAGCCTGGATGACAAACCAAGAC
TCTGTCTCAAAAAAAAAGTATTGAATATATCTCAAAGATAGTCTTAGCTGGGCACAGTCGCTCATCCCTGTAATTCCAGCACTTTGGGAGGCCG
AGGCAGGAGGATCTCTTGAGCTTAGGAATTCCAGACCAGCCAGCACAGCATAGTGAGGCCCCATCTCTACTAAAAACCATCAAGAGAATTAGTC
AAGTGTGGTGTCACGTCCCTGTAGTCCCAGCTACTTGCGAGGCTGAGGTGGAAGAATCACTTGAGCTCTGGAGATGAATGCTACAGCAGAGAGC
CGTGATTGTGCCATTGTGCTTCAGCCTGGACAACAGCAAGATTCTGTCCAAAAAAAAAATAGTTTCAGGTTCAACATTTATTTAATAATTTTAT
TTAGTAAATATTAATTCAACATCTACGTGTCAGGCATGCTACCAGCCTCTACAAACTCAAAAATGAATACAAAGTAATTCCATCCACAAGAAAT
TCTCAAWCTGTGGACTCTCTGGTGTGCCAACAACTATATTAGTTGCCTGATATGTTTGTTCATTTATTTCTCACAACCTTAAGAGGTAAAATTT
CTTGTCCCCAGATGAGAAAAGTTAATTCAGAGATGTTAAATAAATTGCCCAGCGTTACAGAGTTACTAAACAGAGCAGTAGATTATAATCCCTT
TTAGGACTCAAATACATCTCATCAGCTGTCATCAAGATTAAAAAATAGTTCATCATTTAGATCAATATTGGATAATAATGTTCATTCTATTCCA
TATCAGGAGACCTAGGTTCAAGTCCTGCTTTGGTGTTTATTGAGTAACCTGAAGCTATTCCGTTTCTTCATTTGCTAAGTGGGAGTAGGGGCAG
CTCTGAGGACTGAGATAGCTAACTCTTCTTCCCTCCCAGAGCAAATTATATGTACCACTGTGTATACTACTTGPCACTTTACATTGTAATCAGT
ATTTGCCCATTTCTCCCAGTATACTTTGAGTGCTTGAGGACCAGAATCTTTCTTCATCCTTTTGTGTTCAGCATTTCCTGCAGTGCCTGACACA
CATTTCGTCTTCAGTAAAGGCTTTCTGCATGGATAAGTGCTTGAGAAGTGTCATTAGTGAGCTGAAATCCTTCAAAAGAGAGTTGTGAGAAAAC
AGAGAAATACTTCCATTAAGAACAAAAATCAAATCATTCAACAAGGATGGGAACATGAACTATTATTATAAAAGCTCTGTTTAAAATAATTATT
TCAAAAGCCAGGTGTAATGGTGTGCACCTGTAGTCCCAGCTACTTGGGACGCTGACATAGGAGGATCACTAGAGGCCAGGAGTTCGAGGCTATA
GCGTGCTATGGTTACACCAGTGAATAGCCAGTGCACTCTAGCCTAGGTACCATACTGACACCTTGTCTCCTTAAAAAAAAAAAGTAAAGAGTTC
ATTTAAACAGAAAACAAGAATAGCTGAGTTTCTTTCTTTTAAAGTATATACTATTTTCAACCCATATTTCATTTCTACGAGTCTGGCAAATCAG
TTTAATTCTGTTGTTTTGGGAAGCAGTTACAATATTATTTATCCCAATTGCCATTTGGGATAAGTTTTTGAATACATGAAGAGTAGCTTTAAAT
GTAGAATACCAGGGAAATAGCTCCAGACTAGGAGTTGGGAGATAGGGTTCCAGCCTCAGCCCTGGCCTCAGGCTGGCTTCAACTAGACTTCACC
TCTGGGCGTTAGCTTCCTTCCTATCCAGTGACGCAAGCTTGAACCTCTTQATTTTTAACGTCCTACTAGCCCTAAAACTCCATCATACAATTCT
AAATATTTACAAAAGTTGTAGGAATGATAGAAAATCATCTTCACTATATTAGTAAGCACTTAAGCTTGTCTATAATGTCTATTTTAAATTTTTC
TTATGAAAAATTTCAAATGTATGTACAAAGGTAGAGGTTTACTCCTATCGATACAGGCACACCCTAGATTCAGTAATTTATAATATATATTTTT
AAACTGGAGGGTTTTCTCAACTAAGAGGAAAAACTTTTCCCAATTATACACAATATCACAAAATTACCGCTCTGGAGATGACTTTAGAGCAGAC
TAAATTAAATCAGATCTTGCTTTTGGTAATACTTGCGATGGGAGTCAATTTTTTTTTAACTTTTTGTTTTGAAATAATTTTAGAATTACACAAA
AGTTGCAAAACTAGTATAGCCCGTTCCCTTATATGCTTTACACAGCTTCCTCTAAATGTTAACATCTTACCTAATCACAGTACATTTATCAAAA
TCAGGAAGTTAACATTGATGTAGTACCAGTAACTGTTTTCCAGATCTTATTTGAATTTCACCAGTTACTACACTACTGTCGTTTTCTGGTCTAA
GATCAAACTCAGGATCCAGCATTGTATTTACTTTTTTTTTTTTTTTTTTTTTTTTTGAGATGGACTCTTGCTCTGTCATCCAGGCTAGAGTGCA
GTGATGCTATCGCAGCTCACTGCAACCTCCACCTCCTGGGTTCAAGCAATTCTCCTGTCTCAGCCTCCCAAGTACCTGGGACTATAGGCGCACG
CCACCATGCCCGACTAATTTTTGTATTTTTATTAGAGACAGGGTTTCTAACATGTTGGTCAGGCTGGTCCTCAAGCTCCTGACCTTGGGTGATA
CACCCCCCTCACCCTCCCAAAATGCTGGQATTACAGCCATGAGCCACCGCACCCAGCCTACTCTACTATTTTGAATACAACTGACCGTTTTGTA
GAATATCCCTCAATTTGGGTTTCTGGGATGTTTTTAGATTGAGGTTATGCATTTTTTGAAAATACCACTGAAGTGATGTGCCTTTCATCATTAT
CAAGAGGTATATGATATTGATCTCTCATTACTGGTGATGTTACCTTCGAACACTCGGTTAAGGTGGGAAACCATGTTTCACTACTGCAACGTTA
CTATTTTCCCTTTGTAATTAAAAAGTATTAGGAGTGAAGTACTATCTTGTTTTGTATCACAACTTTACACACTCATTTTGACATTTGTTGATTT
TTGCTTGCAACAGTTATTACTGTGGCATTTGACTAATGGTAAATTTTCTATTGCTGTTATTCTCTCTACATTAATTTGAATCCTACTGTATATT
TATTCAGTTTATTTATATCATTATGGATCTGTGTATATTTATTCCATAACTTATTATTCATTACTATTCTTATTTATTTTGTTGTTCACATTGT
CCCAGATTTGACCATTGGAAACTCCTTTAAGTTTGTTTTTGTGTCCTTTCAATATTATCCCCATTTTTTTTAAGTGCTTCCTTATTTTCTGGTA
CCACAAGACACTCATGGCTCATCTTAAAATTTTCCTGCCCTAGACCTGGAACCAACCATTTCTCCAAAGAGCCCTGATTCCTTTTATTGGAGAA
AGGCATTTAGAAACCAAGATCTGACTGCTACGTTTGCTCCTGCTATGGGATATCATCATTCCTAGACCCACTTAGCAGACAGAGAGATAGAGAA
TATATGGACCTCAACATACATACGTATACATCTATATGTATTTCTACATCAGCCTCTGTGTGTGTGTGTGTGTGTGTGTGTGTGTGTGTAGTTG
TTGTTGTTGTTGTTGTTGTTGTTGTTTGCGACAGAGTCTCACTCTGTCGCCCAGCCTCGAGTACAGTGGTGCAATCTCAGCTCGCTGCAACTTC
CCCCTCCCAGGTTCAAGTGGTTCTCCTGTCTCACTCTCCGGAGTAGCTGGGATTTACAGGTGCCTGCCACCACGCCCAGCTATTTTTTGTATTT
TCAGTAGAGATGGGATTTCACCATGTTGGCCAGGCTGGTCTCGAACTCCTGACCTCGTGATCTGCCTGCCTTGGCCTCCCAAAGTGCTGGAATT
ACAGGAATCAGCCACCGTGCCCGGCCAGCCTGTATGTATATGTTAAAAACCAGGGATACTCACTGGCAGTTGCAGTTCCAGTTCCAATCCAACA
CCACAAGTTTATTTGCCCTTTGCTCATTTGAAACTCCATTCTCCAGAAGTGAGAAAATGCTCTCATTCTCCACAGCATACTCATTGCTCCCATC
CTAGTGTATATGTAAGATGGTTTTAGAATTGCTAACCTAGACCCCTGTGACAAACTGACTTTAGGAAATATTTGTTTATAGTACCTTTGGTGAT
CAGTCTTATAGTGTATATTCAAAACACTTGCTTTCCAACTGACGTAACTTCTTTCTTCCTCACCCCCTTCAATGTGATTATGTTACTCAATTGT
AACAAATTATTCATTTGTTACCCTGTATATTCCATTTTGCGTTCCTGCCATGCTCTGGTTAATTTTAATTATTCGTTTTATTTTGGATATGTGA
AACATTACCATGATTTTAAACTATATAAAAAACGATATACTCAAAAGTGTCATTTCCCCCTCATCCTTATTAACCTGTTCCCACTTCCCCATTA
TTTCCACCCTATTCCAGTCTCATTAGTTATATCATTAGATCCTGGTTTTTCTTCCTGTATTTTATTACGTTTTATGTCATTTTATTTTTTTCTG
TTTCTGTTAACAAAGGGAGCCAGTCGTGGTGGCTCACACCTGTAATCCCAGCACTTTCGGAGGCTGAGGCAGGAGGATGGCTTGACCTCAGGAA
TTTGAGACCATCCTGAGCAACATACAGACCTTGTCTCTGCAAAAAGTTTAACATTTACCCACATGTGATGGCACATGCCTCTACTCCCAGCTAC
CCAGAAGACTCAGCTACCAGGATCTCTTGAGCCCAGGAGTTCAAGGCTGCAGACAGTTGTGATCATGCCACTGTACTCCACCCTGGGCAACAGA
ACAAGGCTCTGTCTCAGTTTGAAAAAAAGAGAGAAAGAACAAAAGAAAGGGCAATGACTAATCTTTTGTCTTTCATCTTGTTAGAATGTACTTT
CCTGGGAAATTTTAGATTAAATGCTTGATTTTACTTTTTCACTCAAAAGACCGTCTTGGTTTTCTGGAACAAATCTATTTCATAGAAATTTATT
GTGTTATACTTTCATTTATCAAGGTTAAAATGTCCTGGTTTTTCCTCCTTTAAACAAGTTAGCTATCTGGGGGAGGAGAAAAAAGATTACCCTA
AAGGTGGTCCTGTTCAAAACCAACATCACCTTGTTCTTTTTGAAATCTTCTCAGTCTTTACTGGTTTGCCTTTTCTTTATAGCATCACCAAATA
CACTTACATGTGAAACCAGATATAAAACCTGGAACTAGGCCAGGTGCGGTGGCTCACGCCTGTAATCCCAGCACTTTCGGAGGCCGACGTCGGC
AGATCACGTGAGGTCAGGAATTTGAGACCAGTCTGGCCAACATGGCAAAACCCCATCTCTACTAAAAATACAAACAATTAGCTGGGAGTGGTTG
TGGGCACCTGTAATCCCAGCTACTTGCGACCGTGAGGCAGGAGAATTGCTTGATCCTCGGAGGTGGAGGTTGCAGTGAGCAGAGATTACGCCAC
TACACTCCAGCCTGGGTGACAGAGGGAAACTCCGTCTCAAAAAAATAAATAAATAAAATAAATAAAACCTGGAACTAAAGCCGGCTATAGAGTG
AACAAGAACAATAGACACTGATCACCCATTACAATATGTTGTTATAGATACGTGATTTACTAAATTTCTGTCATTTCTGTGTAAAGACACAATG
AAGTGGTATGGACGAGCGGACAGATAGACTTTGTAAGTGATGGACTTCATTTTTGAATCTTGGAATTGCTACCTGATACTTTTATGACTTTAGA
CAAGTTACTTAACTACGTGGAGCATTCAGTTTTTTTAATCTGTCAAATGGGAATAGTTTTCACTCCCACAGGTTGTGTGACAGTGATAACGGTT
TGGCTGTGTGCCTACCCAAATCTCGTCTTCAATTGTAGTTCCCACAATCCCCACGTGTCCTGGGAAGCACCCACTGGGAGCTAACTCAATCGGG
GGGGCATTTTCTCCCATGCTGTTCTCATGATAGAGTGAGTTGTCACGAGATCTGATCGTTTTATAAGGGTCTGGCAGGGAAACCCTGCTGGCTC
TTCCCTCTTCTGCCGCCATGTGAAGAAGGGTGTGTTTGCTTCCCCTTCTGCCATGATTGTAAGTTTCCTGAGGCTTCCCCAGCCATGTGAAACT
GTAAGTCAATTAAACCTCTTTTCTTTATAAATTACCCAGTCTCAGGCAGTTCTTCATGGCAGCGTGAGAATCGACTAATACAAACAGTTACAAA
GAAGAGTGTCAGACATTTAGTGGACACTTAATTTCTTCTACCCTATATATTGTGTTTCACTAATTTGTTTTGCTTCCTTTTAATTGATCTAAGG
AAAAAGATCCTTGACTCCTCTTTTTCTTTTTCTGTTGCCCAAGCTGGAGTGCAGTGGGCCAGGCTGGAGTGCAATGGCGCATCTTAGCTCACTG
CAACTGCTGCCTTCCGGGTTCAGGTGATTCTCCCACCTCATCCTCCCAAGTAGCTAGGACTACAGGCACGTGCCACCACACCCAGCTAATTTTT
GTATTTTTAGCAAAGACGGGGTTTCGTCATCTTAGCCAGACTGGTCTTGAACTCCTGACCTCAGGTGATCCACCTACCTTGGCCTCCCTAAGTG
CTGGGATTACACGCGTGAGCCACTGTGCCTGGCTGACTCCTCTTTTTCTTATCTCCTACATGTCATCCATCAGCAAATCCTCTTGGCTCTACCT
ACCATGGTTATTAGAGACCTAAAATTGTCTCTAATAACACTCTTCAAATTAATGATATATCTTAATACTAATCTTATCTAAATCACATTTCTCA
ACGTTCCGGGGAAAGAATAACATTATGGACTCAAAAAGGTTTTTACTGAATTGTAAACTTTTACTTCCTTTTCATAATTTGTCTCTGTGTGGAA
GAGAAAACTTAGGTTAGTTTGATGGGATTTATTCTTTCTCAAGGAAATTTTGATTTTTACTCTTTATATGAGGATCCTAATGGTTACAAATCAG
TTTTTAGAATCTGTCCCCCTACGCTTTTTCTTGTGTCAGTTAAGATGACCATCTTGTAATTTTTATTCAAAGTTTTTCTTTCATTTAAAAAGTT
ACTGTGTTCTAAGGTACTCTAATTGATATGATTATGATQACTGATACTTCACTCTTTAAGTTTAATTGCAGGTCTTGGCTACATTGCTACTTTT
CAGCTTTGCTTTCTTAGAAAATCAAATCTGACTTACATAAGGTTCTAAATAGCTACCAGTTACTCTTCCCCCATCCCCCAGTCTCTCACATCGT
CTGATTTGTCAACTTTAGTGGTTGGAAGAQGCCCATCAAAATCCTCGCTGTATGTGGTTCTCTCGCCTCTCAGTACTTTCAGCCACATTTGAAT
GCAAAGAATGCAGACAGTCAGCAGTATTTTTAAATGTGAAATTTTCAACAGAGTGTTCTACAGGTTCCAGTTGTTGGCGTACCTCCTTTCCCTC
TCCAAATCTCACTGAAATGATAGATGGAGGGAACAAAGATTTTCAAAAGAAGAAGAAGAGATCAATAATAGTCCTGGAAAGGAGAGGAATGTAA
GAGTGGATCAGAAATTATGGAGAATTTCTGGAATATGTAAAGTTGATGAAGTTQAACCAATGGAAACTAGTCTCAGCAAATCCAACCCGAGACA
GGTGTAAAGAGGACTTAAGCAGAGGTACACACTGTTCTTCTCAACAGGCTTAGGCGGAACTCCAAGCTCATGCTCATCTGGTGTGAGGGAGCCC
AACCACGCTATGCACCAATCATCACCGTTGTTATAAAACAAGATGGAACAGCGGGGCCAGTAAACCTCCAGTCCACTAGTTCTCAACTTTTCCT
GAATTTAGAATTACCTAGGGAGCTTTTAAAAATTCTGACACCCAGACCAGTTAAATAAGAATCTCACATCTCAGAAGATGGAACTCCAGGCACA
AGTATTTTTTTTTAAACTCCCAGATTATTCTAGTTTGCAGGCAAGGACTGAAAACTACTAGACTACGGTCTGACTGTGACTTTTTCTCCCAAGC
TAAAACCAGTAAGGCCAGGTTCTAAAATAAAATAGAAAAATAATAAAATAAATTTAAAAATAAATAATAAAACAAAATGTGCCTCAAAAGACTC
CAAGTGTTAGGACTTCGACTAGGGAAAATGAATGTATTTTTTGAAACTTTTTTTTTTTTTTTTTTTTTTTTGAGACGGAGTCTTGCTCTGTCAC
TCAGGCTATAGTGCAGTGGCGCGGTCTTGGCTCACTGCAAGCTCCGCCTCTCGGGTTCACGCCATTCTCCTCCCTCAGCCTCCTGAGTAGCTGG
GACTACAGGCACCTCCCACCACCCCCACCTGATTTTTTTTGTATTTTTAGTAGAGACGGGGTTTCACCGTGTTAGCCACGATGGTCTCGATCTC
CTGACCTCGTGATCCACCTGCCTCAGCCTCCCAAAGTGCTGAGATTATACGTGTCAACCACCACGCCCGGCCTTTTTTGAACTTTTAAAACAAA
TTTAAAGGGGAAAAAAGTGTAAAGACAGCTTTTCACAGTAAATAATACTAAAGTGTTCTGCTCCTAAAGTCAACTTTCCTGTGCCCATCATGCC
CAGCTCATAGTAAATGCTTAATAAATATTTGTGAAATCTTCACCCTTAGATCCCCGCAATCAGCCCATCCTTTTGCAGAATGGCCTGCCATGGA
AACATATCCAACTGCTTAGAAAAATGGTGCCAGCTAACTATAGTCATTTGATCATCCAGAATCCTTCCTTTATAATACGGCCAGACAGCAAAGA
ATCATCAGCAAATATCACGAAAAAGCAGCACTAAAATGGACTAACAGAAGAAGTAGAJ4GAGAACCTTATAAATACTAATTATTGTCTTCAGAA
ATTGTTAACAGCACATCAGATTCATAAGTCAAAAAGCCAACTTCCCTGAAAAAGGAAAGGGAGGACAAGAAAGTTTCTGGAAGTTAGAGCATCA
TTAATCAAAACTGAAACTCAGAGGAAGCCTTGAAGACCAAAATGGACAGTCCCTGAAATCAGGTGATCTGAAAGATAGCCAAGGATTTCTCAGA
ACACAAGAAAAAAGATGGATGAAAAGTGAAAAAGAAATTAGAAGATATGGATAATAAATCCAGCAGACGTAATATGCATCCAATCAAACATCTA
ATAGAAAATTTCCTACACGGAATAAAAGAAAAAGATTCTTAAGATCGAAAGGGCCAGTTGATAGTGGTACCCAGGAGGAAGGAGTGGTTTTTCA
CCCAGATATATCCTGGTGAAATTTCTGAATTCTGCAGCTTACAAGAAAATTCTGAACTCTTCCAGGGAAGAACAAGCTATGTACAAAGGAATAA
GAATCTTATTCATTACACTAAAGACAATGCTTTTGATCATTGTCTATACCTATGTGTATTTTGAACCTAGAATTCCGTACTCAGCCCAACTGTC
ATTTATGTATGAGAACAAAATTAACTTTTTGGAATTTGCAGACTCATATTCTTTTCGATTAAAATACTGTGGGATGTACCAAAACAAAAAAATA
AGTCAAGAAGCAACAACTCAAQQCATAAGAAACAGTAGCGAGAAAAAAAAAATAATTTCCATATTGCATACATTTATCCTQAAAGATCTCTGAA
GCAGTACAGCTGTAATGTTAGAAGTAATATTAATAATGAAACAGTCTGGCCTGCCCACACTGQCCCACACCTGTAATCCCTACACTTTGGGAGG
GCGTCACTTGAGGCCAGGACTTCAAGACCAGCCTGGCCAACATGGCAAAACCCCATCTCTAGTAAAAATACAAGATTTAGCCAGGCATGATGGC
ACATGCCTATAATCCCAGCTACTCAAGAGGCTGAGGCAGGAGAATCACTTCAACCCAGGAGACAGAGGTGGCAGTGAGCCAAGATTGTACCACT
GCCTAGGTGACAGAGGGAGACTCTGTGTCAAAATAATAATAATAATAATAAAACAATAATAACAGTCTGGATTCTGGGTTATTTTAACAATAGG
TGGTGAGGATAGGAAATGAAGAGGGCAAGCCAAAATTGTCTAAGATTATTTTCTTTTTTAAAACATTTTTTGGAGATCAGCTCTTGCTCTGTTG
CCCAGGCTGGCATCCACTGGCACAGTTGTCGCTCACTGCAGCCTCAAATTCCTGCCCTCAAGCCATCCTCCCACCTCAGCCACCGGAGTAGCTG
GAACTGCAGGTGCACACCCAGCTAACTTTTTTTATCCTTTTAGAGACGGGGTCTTCCTATATTGCTCAACCTGGTCTTGAACTCCAGGGCATAA
GCGATCAGCCTGCTTCAGCCTCCCAAGTAGTTGACATTACAGGCTCGTGTACTACCACAACCAGCTGCCTTAATTTCTTGTTCCAGGGGAGATT
ATGCTGATTAATTCTTTTATTTTAAGATTCACCGGCGACATGTGCCAGTTTGCTACATGGATATATTGTCTGTAATGCCGAGGTTTGGGCTTCT
ATTGAACCCATCATCCAGATAGTGAACATAGAATATAGCCCTTGTACCCCTCCATCCTTTTTTGCTTTTGGAGTCCCCAGTGTCTCTTGTCCTC
ATCTTTATGTCTGTGTATACTCAGGGTTTAGCTCCTACTTATAAGTGAGAACATGCAGTATTTGGTTTTCTGTTTCTGTGTTAATTCACTTAGG
TTACTGGCCTCCAGCTGCATCTCTCTTGCTGTAGGGGACATCCTTTCATTCTTTTTTATGGCTGCATAGTATTTCATGGTATATATGTACCACA
TTTTCTTTTTTTTTTTTTATTTCAAGTCTGTCAACCTATTCTTTATTTCGGAGAGAGGGCAGGGCAGAGTGCTCAGTCCTTGGCAGCGGCTTTT
GTCATGGTGGCCAGGACATTGCTCAGCTCCTCCTGCTTCCTCTTGGTGCATCCCCACCCTTGTCTTGATGAACTTGAGGGCCCATTTGTCCTTG
GAGACCTTCAQTAACTCCATGGTGCACCGCTCGTATGGGGTGAAGCCACACACCTCTCAGATCATCTCCGGCACGAACTTGGTATATTTGGTCA
GGTGCCTGCAGCAGTGGCTGTGCCTGGGCGTCCTCATGTTCTCGGTCACCTTGTGGCCCTTGTTGAGGCCCATGGCCATAGGGCAGCACAGAGC
CATGGCCGCTGCTCTCCAATGGTGGCCGTGGCAGAAGGAAGCCCACATTTTTATCCAATCCACCATTCATGCACACCTAGGTTGACTCCGTGTC
TTTGCTATTAAGAATATAACTGTGCTTAAGAGTAAGTGCTGTGTGTGGCTCATGCCTGTAATCCCAGCACTTTGGGAGGCCAAGGTGGGATGGT
CACTTGAGCCCAGGAGTTTAAGACCAAACTGGGCAACATAGTAAGACCCCATTTCTACAGAAAATAAAAAAAGGCCAAGCATGGTGGTGCATGC
CTGTAGTGCCGGCTACTCAGGAGGCTGTAGTGGGAGGATCATTTGAGTCACATTTATACCACTGCACTCTAACCTGGGCAACAAAGCGAGACCC
TGTCTCAAAACAAAACAGGCTGGGCGTGGTGGCACATGCCTGTAATCCTAGCACTTTGGGAGGCTGAGGTCGGTGGATCATTTGAGGTCAGGAG
TTCAAGACCAGCCTGGCCAACATGGTGAAACCCTGCCTCTACTAAAAATACAAAAATTAGCTGGGTGTGGTGGTGGGCGCCTGTAGTCCCAGCT
ACTTGGGAGGCTGAGGCAGAATTGCTTGAACCTGGGAGGTGGAGGTTGTAGTCAGCTGAGATTCTGCCACTGCAGTCCAGCCTGGGCAACAGAG
TGAGACTCTGTCTCAAAAAACAAACAAACACACAAACAATGCTGCAGTAAACATGTCAGTGTAAATGCCAGCTATCTTTCTGATAGATCGATTT
ATTTTCCTTTGQTTGTATACCCAGTAATGGGATTGCTGCCTCAAATGCTACTTTGATTTTTAGTTCTTCGAGAAATTTCCAAAACTGCTTTCCA
CAGGAGCTGAACTAATTTCCATTCTCATCAACACTGTTTAAGCATTCCCTTTTCTCCACAACCTTGCCAACATCTGTTCTTTTTTCACTTTTTT
TTTTTTTTTTTTTTTTTTTTTTTTTTTTTTTGAGACGGAGTCTCATTCTGTTGCCCAGGCTGGAGTGCAGTGGCGCGATCTTGCCTCACTGCAA
CTCCCGCCTCCCAGGTTCACGCCATTCTCCTGCCTCAGCCTCCCGAGTAGCTGGGACTACAGCCGCCCACCACCACCCCCCGCTAATTTTTTAA
AATATTTTTAGTCGACACGCGGTTTCACCGTGTTAGACAGGATGGTCTCGATCTCCTGACCTCATGATCTGCCTGCCTCGGCCTCCCAAAGTGC
TGGGATTAAAGGCATGAGTCACAGCCCCCGGCCTTCACTTTTTATTAATAGTCATTCTGACTCAGTTGTCAGATGGTATCTCATTGTGGTTTTG
ATTTGCATTTCTCTGATGATTAGTGATGTTCGGCATTTTTTCATGTTCGTTGGCTGCTTCTTCGTGTCCTTTGCCTACTTTTTTATGGGGCTAT
TTCCTTTTTTCTTGTTGATTTGTTTAAGTTCTTTTCTGQATATTAGTCCTTTGTCAGATGCATAATTTGCATATGTTTTCTCCCATTCTGTAGT
TTGTCCATCTGCTTCCTTGATAGCTTATTTTGCTGTGCTGAAGCTCTTTAATTAGCTCCCAACTGTCAGTTTTTCTTTTTGTTGCATTTGATTT
TGGGGACTTAATCATAAATTATTTGCCTAGGCAATGTCCAGAAGAGTATTTTCTAGCTTTTCTTCTAGGATTTATATAGTTTCAGGCCTTACAT
TTAAGCGTTTAATCCATCTTGAGTTTGTTTTTGTATATQGTGAGAGGTAGACGTCTGGTTTCCTATTTGGATGCCTTTTATTTCTTTCTCTTGC
CTCATTGCTCAGGCTAGGACTTGCCCCATACTGATTGCTGTGGCTCAGTACCATGCPGAATAGGAGTTGTTAAGAGTGGACACCCTGTTTTTTT
CCAGTTCTTAGGCGGAATGCTTCCAACTTTTGCCCGTTCAGTATGATATTGACGGCTGGGTGCAGTGGTTCACACCTGTAATCCCAAGACTTTG
GAAGGCCGAGGCAGGAGGATTGCATGAGCCTAGGAGTTCAAGACCAGCCTGGGCAGCATAGTGAAACCTTGTCTCTACTAAAAATAAAAAAAAT
TAGCCACACATAGTGGCATGCACCTGTAGTCCCAGCTTACTTGCGAGGCTGATGCAGGAGGATCACTTGAGCCTGGGTGATACAGGCTTCGGTG
AGTTATGGTTGCACCACTGCACTCCAGCCTGGGCAATGGAATAAGACCTTGTCTCAAAAAAAAAAAAAAALAAALAAAAAAAAAAGATATTGTC
ATAGGTGGCTCTTATTATTTTGAAGTATGTTCCTTTGATGCTTAGTTTATTGAGGGTTTTTTATAATGAAGGGATGTTGGATTTTATTGAATGC
TTTATGCTGATTGATTCTGAACATTGATAAAGAGGTATATATATATATCTTTAAATGATTTGTTCAGACTTTAATGGAAAGTACTAGTAAGAAT
AGCATGTAGAATTTCCAAATCACCCCATGTGCAGTGGGGAAATAGAGGAACAAGGAAAACTTCATCAATTGAGCAAAAATTGTTTTAAAAAATA
AGAAAACACGGGCCGGGCACGGTGGCTCACGCCTGTAATCCCAGCACTTTGGGAGGCCGAGGCACGTGCATCACGAGGTCAGQAATCGAGACCA
TCCTGGCTAACATGGTGAAACCCCATCTCTACTAAAAATACAAAAAATTAGCTGGGCATGGTGGCGGGCGCCTGTAGTCCCAGCTACTTGGGAG
GCAGGAGAATGCCGTGAACCCGGGAGGTGGAGGTTGTAGTGAGCCGAGATCACACCACTGCACTCCAGCCTGGGCAACAGAGCGAGACTCCATC
TCAAAAAAAAAAAGAAAACACTGTGTAGAAAACCAAAGACAAGAATAAAACCACTCATATCAGTGATTACAAAAAATATGAATGGGATAAAGTC
ACCTATTAAAGGCAAAAGGTCTCATAAAGTGAGAACAACAACAGTATCTAGCTATGTGTTCTTTATAAATGAAACACTAAAATCAAAAAGGTAC
CAAAAATTGAAAATAGAGGAAAGATTACGTCTGCCCATATTGAGATCTGATGGAGCTGTGAGACTTTACATTTTTCTTTTTCATATGCTTTTGA
AGTATTTATGAATGTCCTGGGATATAAGTCTAGGAATAGGAGCAATTCTTGAAACCATTTTATTATATGTTTTCACAAAATAATTGTAATATGG
TACTTGGTCTAAAGTGGCCAGTGTTTATTCTTTCAAATATTTTCGATTTATATAATTTCTTTCTTCCAAAAAGTTATCTTCAAGTCTTCAGGTA
GAATAAAATCATAGTAGAAAATAAGTCTTTCTGGCCAGCCATGGTGGCTCACGCTTGTAATCCCAACACTTCCGGAAGCCAAGGTGGGAGCGTT
GCTTGAGCCCAGGAGTACAAGACCAGCCTGGCAACATGGTGAGACCCCATTCTTAACAACAACAACAACAAAATAGCCAGGCGTGGTGGTGTGT
GCCTGTACTCCCAGCTACTAGGGAGGCTGAGGAAGGAGACTACCTTGAGTCCAGGAGTGTGAGGCTGCAGTGAGCCATGATCACACCACTGCAC
TCCAGGCTGGGCAACAAAGTCAGACCCCCAACTCAAAACAAAAACAATAAAGAGGCCGGGCACGGTGGCTCACACCTGTAATCCCAGCACTCTG
GGAGGCCAAGGCTCGAGGATCACTTGAGGTCGGGAGTTCAAGACCAGCCTGGCCAACATGGCGAAACCCCATCTCTACTAAAAACACAAAAATT
AGCTCGGCATGGTGGTGCGGGCCTGTACTCCCAGCTACTTGGGAGTCTGAGGCACAACAACTCCTTGAACTCGGGAGGCAGATGGTTGCAGTAA
GTGAAGGTTGTAGTGACCCAAGATCACGCCACTACACTCCAGCCTCGGCAACAGAACGAGACTCTGTCTCAAAAAAACAAAGAAAACAGTCTTT
TCTTCCTGCTGCTGCTGTTGTTGTTGTTACAAATATTATTAAATTTCCAGCCAATTGGCCATTTATTTTAGAATAGTATTAAAAAACAAACTTT
CCATATCAATATAAAATTTGTATAGCTTCCTAGAATTTATTAAAATAGGAATACTAATAGATTCAAAAAGGAAAATTTGTATAAATTAGTGAAA
ATTACCACCCTGTCCTTAATGCCCTATTTTAAGATTAGTCATTAAATAAATATTTACTTGCTGCCCCTGAACTCTGTGCTGGGTACTGTGAGGC
ACAAAAGAAGTACAAGATACTGCCTTTGCCTACTAACAATTTTATTCATACTTTGACAGCTTTCTGTGTTCAACCAGTAAATGTTTTCTTACAC
AGAGCTCTAAAACATGTTTAATCTGGTATAATTTACCACTAGGCACAGCAAAATAATTATAGCTAACATTCCTPTACTTTGTCTCTGTATATCC
ACACTTAACAACAGCATTTTCACATGATAGACACCCTGACATATGAATGAATGAATGAATGAATATCAGGTGCTAGATTAAAAGCTCTAATTCA
GTATCTAATTTAATCCTCTCAACAATTATCATTTAGCTAGTGTATTATCCACATTCTATCAGTGAAGAAACTGAGCTTCAGATCACTTTAATTA
CCTTGCCCAAAGTCATAATTGAAGTGGCAGAATGGGACTGGAATCCAGGTCTAACTCAAGTGCTATAGTGGTGTGAAGGGAAGACTGGTAAGGG
TTGGTGTTCATGGAGAATTTGTTGCTGCCTGTATACTTCTTGTTTAGATTTCCTGTTTTGAAAACATTCAAACTTCATCAACCAAAACAAATCA
TTTGCATAAATGTTATTCAGTTCCAGGAGCCAGCTTCCACGCCTGTTAGCATCTGTCCGTCAGTTCTGTAAGCAATCTTACAGTGGTGTGTGTT
CATCCTAAGTAGTACAAAACAGTGCAGAGGAGGAAGGCGGACAGCTTAGGGGAAATCTGACCACCATGCGTGTTGGAAGTATTTCTCTTGTTCT
CCTGCTTTTAGAAACCCATCTCTGCTTGCTTTTTCAGGGGGTTATTAAGATCCTACTCTCTTGGATACTGTGCTCTATTAGGCAGGAGACACAG
GCAGAAAGAAGCTCACTTGGCATGAATTAGGCAACACAGAAAACTCTTCCTCAGTGGCAGTAACCTGTCACAACCTGGTTTTCTCTGGCCACAT
AACCAGTCTTCTCCAGTAGTAATGCCATTACAACATTCCCATTCAGATCCTCATGACCCAGTAATTGTTTTGAGAATGAGTGCAAAGCTATCAG
ACACCAACTACTATAATTAGAAAAGGGAAAAATAGACACTTACCAGAGCTAATGTCTTTAGGCTGGAGCATTTACAGCTTTTTGTTTTTTGGTT
TTTAAGTTATGGAGCCTCTTTCTCAGTTTTGCTTCCTAAAATACAAATTGCATGGTTTAGGGGTTCTTGCATTTCATTTTTGTTACTGCTGTGC
ACTCTCTTTCCTTTTTTCCCCCCTATTTTAATCGGAGTACAAATTGCTGTCAGCACATCGAGTTCATGTGCCAGCCACATTCAGAACAGGGTGT
TCTGTGCTCTTCAAAACAAAATTGCTCTAGGGCAGTAAGAGAACAATAAGTCAGAGCTCCAGTTTAAGTGATGTTTTGCAGCTCGCTTGATGTG
GTTACACTCCGATTGCGCAGCTAAGCTTGGCTAATTTGGTTTGGTGACTTTTTGTGGGGATTTCGAGCACCTCCCTCCCCCTTTAAGTTACATA
GTCTTTAAGTCAACAAAAAAATGTTGTCTCTTTTTAACTTGTTTATTTCTTTCTCTACCAAAAAAGCCCTAAGTAGAAGCATCCTGTATGTACT
TTTATTCTCTTTGGGCATGTCATAGATGATTTACTTCCCGTAAATCATGCTGGTTGGGATTAGCAACAGACCTCCTGAGCCCTACAGGCTGCAC
TCCCAGTGAGTCACGATGGTTATTATTAAATATTTATTAAGTTAGTATTTGCACTAAAAGATGCCAGGTCAAAAAGCAACCACAGGGCTTCCAC
AGCCAGAGCTGCCATGGTTTTTGTTCTGTTTTGTTTTGGTAGGAATTTTTAAGATAACATTAAAAAGAATAAGTCGAGCTATAGGAGCTAGGCT
CATCTGCATCTGTTACCGCAATCAGGGCCCCTACTGTGGCAATCAGCAGTCTTTCCGTGGCTCCAAGTGGTGTGTGAGTTCTTGTCAGCAGTCT
CGTAGAACTTTTCACATCAGTGTTCCAAGTTTAGAAACCAGTTAACCCAGCAATGCCCTTTGCTACTTGTAGATGTAGAGAATCAATGGGCTGT
ATTCACCATGAGGCTGTGATACCTCCTTTTACTCTGACATTCCGAATGTTGTCAGTATTACAAGGCGATGGTTTTGGTTTTTTATATAAACTGG
GGTGTATATGTCTGGATGTATATCCGTTTAAGATTTTATAGTACTGCAGGGTCCAATTGTGAAGGGTTAGATTTACCAGGAAAAAAAAGATTAG
TCCACATGTAAAGTAGAAAATATTTATAAGAGCTATCACAAATGTTTACTGTCCTATTACAGCATCAGACACTAGTTCTGTCATTTATTGTCTC
TCTGAGAAGACTAGCTACAATGAATGTTTTGCTTTCTTAATTATGCCTTTGTTACAGTTTGACTTTTTTTTGGCATGGTTACTTCATTTATCTT
TCCCAACATGTTTATTAGTAGCCAATCTTTTTCCCTCACTAATGATGGGTTATCACATCTAAAGAGAACTTCTGAAATTACTCATTTAATTTTA
ATATCAAGTACATACATCAAGCTGAAAAACAGCCTAGGAAACTAACGCACAGGCAGGAATCCTTGCAGAGTCTCTGGATTTCCTGTTTTGAAAA
CATTCAAACTTGATCAACCAAAACCCACAACAAATGTACTGATAATTTCCTCCCCCACTAAATCTACTCTCCTTAAGGGAGGAAGATGATACTT
CCAACAATAAACTTCAGACAAAAAAAATCTGTTAACTAAGTTGTGAGCTACTACGACAATAAATCTCTATACTTGAGACATTCCACAATACATG
AGAAATTTACTTTGCTCAGCAAATCTTTTTTTTTTTTTATGAAAAGTGTTATTAGTCTAAATTTCTTGGGCAGAGTTTTAAATATTTAGAAATG
CAAACTTTTTAGAACTCTTAACCTCCTTAGAAATATCAATTTTTACTCCAGTAAAAATATCTTTTTTTTTTTGAGACGGTCTCACTCTGTCACC
CAGGCTAGATTACAGTGCCGCAATAACAACTCACTGCAGCCTGGAACTCCTAGGTTCAAGCAATCCTCCCACCTCAGCCTCTCGAGTAGCTGGG
ACTTATAGGTGTGCGTCACCACCCTCAGCGAATTCAGTAAAAATATCTTAAGCCTCAGACTCCCTGTAGAACCTCTCTAGTATGCATGTACAGT
CATATGCTGCATAACATTTTGTTTAACAGCAGATTGCACATAGGACAGTGGTCCCGTGAGATTATAATTCCATATCTTTACCTTCTCAATGTTT
AGATACACAAGTACTTACCATTGTGTTACAGTTCCCTACAATATTCAGTACAATAACATGCTATACAGATTTATAGCCTAGGAGCAATATGCTA
TACCACTTAGCCGAGGTTATAGTAGGCTGTTCCATCTAGATTTGTGTAAGAACATTCTAAGATGTTCCCACAGTGATGAGAATACCTGATCACA
CATCTCTCAGAATGTATCCCCATCCTTAAGTGAAGCATGACTGTATTTGAAAAAGTTTAAATTTGAATTTATTTTTTAAATGTTTTCCAATTCA
GAATGAACTTTCAATTTGCTACAAGTTAATTTTATCTAGAGCATTCTAAAAGTAAGTCTAACAGAAGGAATTATCAGCATTTATGAGTGTGGGA
CATAAACTAAAATGCCATATGCGAGCTCTACCAAGCCACTCCAACTCTAGCCCTTGTTTGGAGGAGCTGACTCAAGAGTTAGGCCCTTTCTAGT
TTGGCCCAAGTTTCTTAGACCCCATTCTQTGTCTGCAAGCGGAACACATCAAGATGGTATTAATACTGGTGAGTTAAAAAAGAGTAGTGAGTAC
TCACTTCGGCAGCACATATACWAAAATTGGAACAATACAGAGAAGATTTAGCAAATCGAAAAAAGAGAAGAAAAGGGTAGAACCCTTTAGAGCA
TAAATGTCCACGGCACATTTCGGCCCCTAGTGTCTACACCATTTCTGTTCATTCTTCAGTTTTTCTCATTTCTCAGGCCTGGGCTAGGGGTAAT
TCAATTAAATTATTAACTGCAGGAATTAGATTTGAAGCTGGTTTCTGGACTATACTGATATTGAGAGTGATATTACCAGGTCATAGAATCATAG
AATTTTAGAGCTTCATTGAGATCATGTAGTTCAAAAGTAGAATAAGTTAGATTTGAATTTTTATTTCGAAGGTAATAGTTGTTTTATTGGGCAT
GGAATGAGTATAACAGAACGAGTGATTTTTAGTCTCTCTACAAGTTGTTGATCTAAAGTAGATCAGCCAGTGTTAGAAAAGAAGCATTTTAGGA
AATCTCTAGATTTGAATATAGGCTATTATGTTACAGAAGTAGGAATAAAGGATTTTCTTTCTTTTTTATTTTPATTTATTTATTTTTTTATTTA
TTTTGAGATGGAGTCTCCCTCTGTTGCCCAGGCTGGAGGCTGGAGTGCAGTAGCGCAATCTCACTTCACTGCAACCTCCGCCTCCCACGCTCAA
GTGATTCTTCTGCCTCAGCCCAAGTACCTGGGATTACAGGCACGTGCCACCACACCTGGCTATTTTTTGTATTTTTAGTAAAGATGGGGTTTTG
CCATGTTGGCCAGGCTAGTCTCAAACTCCTCACCTCAGGTGATCCACCCGCCTCGGCCTCCCAAAGTGTGGGATTACAGGCGTGAGCACCGCGC
CCACTCACGATTTTCTTATGAAATCCAAATTATCATATTGCTTGGTGACTGTTATGCTGTCATACCAGCCATCCATTTTTCTTATTACATCAAA
AACTTAAAATAGAATACCCTTAATATTAAAAGTAGTTGTAAAGTTTCAGAGAATTGTTTTTCCTAGAAATAAAGAGTCTAGGCCAGACCTGGTG
GCGCATACCTGTAATCCCAGCGCTTTGGGAGGCTGAGGCGGGTGCATCACCTGAGGTCAGGAGTTCGAGACCAGCCTGGGCAACATCGTGAAAC
CCTGTCTCTACTAAAAATAACAAAATTAGCTGGGTGTGGTGGCACACACCTGTAATCCCAGCTACTTCGGAGGCTGAGACAGGAGAATTGTTTG
AACCCAGGAAGTGGAGGCTGCAGTGAGCAGATATCACGCCACTGCACTCCAGCCTGGGTGAGACAGAGCAAGACTGCGTCTCAAAAAAGTCTAA
CTCATCAAGAAAAAATAGATATCTGTATGCATTTTTTCTATTTTGTCTTAAAATATGAGAAAAAGCCTCTTATTTTAATATGAAATTACTCTGG
GAAAGAGCTTGGTAAATTGGGGTGGAACGGGGAATTAGQCCTCCCAAAATTGACCTCCTAATATTTCAGGGGAGGTTATTAAGTAATTTGATTT
GTGAAGTTATAGTAGACTATTGATTCTTTCACACTTTACATTTATTATTTCCAGTAAGGGATATAGCTAAGATAGTTATTGATGTTGTTGTCTT
TGGATTTACCATTTTTATTCAGATATATTTGTGAATGAGATTAGGACTCTTAAAGAAGAAGGAGCATCTGTATTCATTTAATCTTTGTATATCA
TTGGAGAAATAGCCATTTAGTTGGCTTTTTCGCCCAAGCATCTGAAGCCAAGATGCAGTTACAGATGTTTATATATTTGATATTAAATTTGTGG
CATTTGATAACTTTATTAAATAATTCAGCATCTCTTGACTTTGTATTATAGGTGAGGAAACTTCTGTCACATAGTAGGCTTAGAATAAACCTGT
GTTTCTGGTTTGTTACCTACTAAACTGTCTTATTGATACAAATATCAGTAATTACAAGTTTAATTTACAAATATGGTTGCTCCTAAACTTTCAG
ACTGGGTAGACTAAGCTTCACCAAGACACACTGTGTGTGTCTCTTGATGAAATGAGAAAGGGGAAATGGTATTTGCTACATTCTCGACCACTCA
TTTATCACTTCACTGAATTAGCCAGTCCTAAGAAGCAGCTCTGTTGACTCTCCTGTCTCCTTGCCCTCAGTCCACCTGGAAGCCCGCTGTGGTG
GAAGGATGTTTGACTGCAGAGATCTGGCATTCACTGTGGGCGAAGGAGAAGACCACGACATTCCAATTGGAATTGACAAAGCTCTGGAGAAAAT
CCACCGGGAAGAACAATGTATTTTATATCTTGGACCAAGGTAAGCAGCATACCAGTTTGGAACACAGTGAAGTCACCTAAAGGACAGCCATATG
CTTGCTTTTTCATTCAGTGTTTTGGCATTTTCACTCAAGTTAATCCAACAACGCAAACAATTAAATCAGGCTGCAGTTAGTCATCACGTAAATT
AATCCGCCTTACAATATCATAQAGGTTTGTGAGCATGTTTACTTGATTGATATATGTTCAGAACAGGTCTTACAQCCACTTTTTQCTTTTCTGA
TGATTTGTTTTGCCTGCAGTATTGCCAAGACAGGCAGCTATGGACCCCTCTCATATGTGGTTCTCTTACCCCCTCTTCCCTTTTCTCTAAGTTA
GGCAGGAGGCAGGAAAACATGGGGGTTGGGAGTCAAAGAAGCATTTGGATGATTTACTACCACTTGAACTTGTGCCACTTGTTCTTATACAGAG
TCCCTGAAAAAAAAAGCACATTCTTCCTGGATCTAAAGCCAACACAGATGACTCATTTTTTGTCTAAGTTTTTCCCATCATAAGCATATCCATT
AGCACTTTCAAGCTTAGAACCATCAGACACTGACAGTCTCTCTTGTGAAAACATGTTTAGTAGTATTTTTACATCTAAAATTATACCATGAATC
CAACTCTTCTGTCTTGAGAAACAGACCCCTGAGAGAACCCGGGGTGTTTTGATTTTGTCTGCATGAGAGTGCATCTGCTTATCTAGTGTATCCT
CCCTCCCGCTCCATGGATTTCAGACAGTGGGATTCTGAGTTACTGAGAATCTTGATGACCTGCACTTGCCAGTAQGTGATGTTAAGCCTTTTGT
GGTGTCATTTTATAGACTCTCTAGTAATCCAATGTCAGTTTACCTTTGCCCCAGCACTTGATCCATAATCATATATATATATATTTTGAGATGG
AGTCTTGCTCTGCCACCCAGGCTAGAGTGCAGTGGCATGATCCTGGCTCACTGCAACCTCTACCTCTGGGTTCAAGCAATTTTCCTGCCTCAGC
CTCCCGAGTAGCTGGCATTACAGGCACCCGCCACCATGCCTGTCTAATTTTTGTATTTCTACTAGAGACGAGGTTTCACCATTTTGGCCAGGCT
GGTCTCAAACGCCTGACTTCAAGTGATCCTCCCGCCTCAGCCTCCCAAAGTGCTGGGATTACAGGTGTGAGCCACCACGCCCAQCCCATAATCA
TATTTTTGAGGTGATCTACCCATGCAACTACCACTTCAAAATCCTTCCAAAGTGCTCTACCTTGAACTCTTCATAGCCGTCACTCAGQCACCCT
TTGTATAATGCCTTCTTTTTCTCTACCTGGTTCCTCTTTCCACTAACTATAGCCCCCACTTCAATGTGTCTTATTTATATTAATATTTACTCTA
TATTTGTAGTTTATTCTTAGGTGAAACTAATTCTGTTTCTAGGAGATACTCCTTATAAATTCAGATAGAGCATAGAAAAGCTATCTCTTCCATA
TCCAAATAATCTCTAATTACTTTTTTTTTTTTGGTAACAGGATCTCACTCTGTCCCCCAGGCTAGAGTCCACTGGCACAGTCACGCTCACTCTA
GCCTCAACCTCCAGGGCTCAGGTGATCCTCCCACTTCAGTCTCTAGAGTAGCTGGGACTACAGGTGTCTGCCACCACACCCGCCTACTTTTTGT
ATTTTTTGTGCAGACAGGGTTTTGCCATGTTGCCCAGGCTGGTCTCCAACTCCTGGACTCAAGTGATCCGCCTGTCTCACCCTCCCAAAGTGCT
GGGATTGATTACAGGCATGAGCCACTGCGCCAGGCCATCTCTGATTACTTTTAATCAGCATTTCAAAATTACAGTAGTTCTAAACTCAGAGAGG
TGGATTTATGTGTAATGTATATTTTCAAAATTTAAGCTCCCTTAGGATAAATTCTGTATGTATTATGACAACATAATGTTATAGGAACCAGTTT
ATATACATTACATTTTAGCCTGGCTGACAAGGCAATTGTGGGCACAGATGTCTCAAGTTTAGTGACAAAGAAAAATAGAAATTGTCTTTAAATT
TTTTAACGCAAACAGTTCTTTTCAGATTTAAACTGTTTGTTGTATCATTAGTGGTTACACTTTGCTCTGTGCGCTTGGCCAAGGCACTTAACCC
TCCTAAGCTTCAGTTTCCCCTCTCTAAATGGGGATGACAGTATCCATCTCATAAAGTTATGGAGAGCTAAATAAAATCCTGCACATATAGGGCA
CACATCACCCCCCAGTGTGTGAGCTTTTGTTGCTATTGTGACGGCTCACCTTCTCTTCCATTTTACCCTCGGACCACAAGAAAAAGGAAATCCT
GTTTAACATGAGATCAATCTTTCAGATCTTTTCAGGCATAAAAGTTGTCAATAGGTTTTCATAAATTTCTAGGTATAAAAGTTTATGAGTTTTA
TGGAAATAATTTAGCATATTTAGAAAGGAACATTATTTTTGTTCAAGGTGTTGGTATGTTGTAGAATTATGTGAGTGCATTCTCTGTTAATATG
AGACTGCTGCATATGCATTGCGTAGTACTACATATATATGTACAAAACCCCTACGTGCPATATATGTGTGTGCGTATGCATACTGTGTGTATAG
AAAACCCCCTACATGCTATATATGTGTGTGTGTATGCATGCTGTGTGTGTGTATAGAAAACCCCTACATGCTAAGCATGTTTTCAGTGCAGGCA
GTGAATTTACTTGTTTTATTCAGCTTCCCACTTTCATAAAACATTGCATCTAAATGTTGCTATAAGTATGGCTGTTGCAGAAAATATCTGCAAA
TAGCTCTTAGTGTCATCTGTATTTCATTCTCCAGAAAATTTCCAAGGCAGACCTTCTCTGTGACTCTGATACTCTGATAGACTCTCGGGAAGAA
TGTTTTCTTTCTGTCCCTCCCCCACCCCCCGAGACAGGGTCTCACTTTCACCTAGGCTGGAGTAGGGTGGCATAATCTGTAGCCTCGAACTCCT
GGGCTCAAGGGATCCTCCCACCTCAAGCTCCTGGGTAGCTGCCACTACAGGTGTGCTCCATCCTGCCTGGCTGATTTTTTTCATTTTGTAGAAA
CAGGGTCTTACTATGTTGTCCAGGCTGGTCTCAAACTCTTGGGCTCAAGCAGTCCTCCAGCCTCAGCCTCCCAAAGTCCTTCGCATTACAGGTG
TGAGCCACCACACCTGGCCTAGAATGTCTTCATAATAAGAAAGTCATAAAACATTTCCAGACAATCCATTTTTCTTTCTCCTCATTGGGACAAT
ATCTTCCCTTTGTATTGTTTTAAATACTGACACTAATAAATCTTTTTTGTTTTAGGTCAAGTGTATATAGTGTTAACTTTTTTTTCCGTCCTTT
CCTTATGTTTCTGTCACGCATGAACCCCAAACAAAAACACACGCTATTGGTCAGGCAAGGTGGCTCACACCTGTAATCCCAGCACTTTGGGAGG
CCGAGGCGGGAGGATCACTTGAGGTCAGGAGTTCGCGACCAGCCTGGCCAACATGGTGAAACCCCGTCTCTACTAAAAATATAAAAATTAGCTG
GGCGTGGTGGTGCATGCCTCTAATTCCGGCTACTCGGGAGGCTGAGGCAGGAGAATCGCTTGAACCCAGGAGGCGGAGGTTGCAGTGAGCTGAC
ATCATGCCACTGCACGATGCCTGGGGTGACAGAGTGAAACTCTTGTCTCAAAAATAAAAATAAAAAAACAGACTACCAAGAGCCATAATGTCTA
GTTATGAGGCAGTATGAGTCCAAAAAACCTGATTTTCTGGGGACACACAGGGTCTCAATTTAAACCTGGCTCTACCACTGCCTGTGTGTGACTT
CTCAGGAAGCACTCTGTGTCTTTATCTGCAAAAACCGACCAATTGGTAAGAGCTTGTAGTCCAAGTGCTTCTTATATCCACATTAAGGCTTAAT
GGTCATTCATAGTCATTATTTGTATCTCTATTCTCTGGAGGAAACTCTTAATTCAACGGCATTAACGCTGAATTCCTTCTGTTACCATACTCTA
GATTATCTTTTGCTTAGGTCTTCCGATTCCTCTTGTGQTGTTTTGTTTTTCAGTCACATCAGTTCCGTGCCCTGGTTCCTTCTTCACCCAGGCT
GACAACTTTCTGTGTAATATGGAAGTCAGGGTAGGTGCTGCCAGAATATCTTGCCGTGGGCTTCCACCTCTGCAGGATCATGTCCGCCACACGT
ATCTTGACTGAATCGCTTCATTTTAACCTGGGAGAGATTGTAGAAATAATATTTTTCTTTAGTCTTCTTTAATCCCATCAATAATAGGACACTT
GGTGCCTCCCTTGATACAGCCCCACATTCCCCACAGCCAQATTTTCTCATCCTCAGCACTGTTGACACTTTGGGCTTGCTAATCCTTGGTCATA
GGGGGCTGTCACGTGCATTGTAGAATATCCAGCAGTATTCCTGGCCTCTTCCCACCAGATACCAGTAGCACCCCCATAGTTGTGACAACCCATA
ATATTTCTAGACATTGCCAAAGGTTTCCTGGAGGGAAGAGGAGTTAAAATCAACCTCGTTGAGATCTGCTGGTCTAAGGCAAATGCCAGATCAT
TTGTTGCATTTGCAACTGCTTAGCACAGGACTCCAAATATAACATGCTCTCAGAAAATATGTGCTTAGCAAGGACTCACCTACCTACCTGGGTA
GTTAAGCAATTTTTTTAAAATTTATTAGATGGCAGAAACAAGGTAGTAGGTATATACATCTAAGACCTCAAAGTAGAAAATTAGGCATCACTTC
TTAAAATTGGTCACTGGTAATTATGTCTTTGTGGAAGATACCCTTTGCCCCGCTCCTCATTCCTACCAGCTCTCGTATCTCTATTCCTCTTTTT
GGCTCCAGCTTCCATTTTCTGTCTAACAGTGGAGGTGAGTGAGTAAGCATTTTTATTCCTGGAAAATCCAGGCAAAGGGTAAAGAAAGTGGTGC
AAGCAACAAAATTTGAGTGTTCCCACTCTAGTCCCTTTCCCCCACAGAAAACTCGACGTATTAGATTAAGTCGGTTTTGACATCTTTCAACCTG
TACCTTGAAAGCTTGAGTTTACTAAGTTTTTTGTAATACCATTTCATATATTAAAGAACAGCTTTGCTTGCAACAAATGGGAACATAATATATT
TCAGTGAACACTTGACTAATATGCTGGGCCTTGTTCTAAACAAACACTGGGAAACAGGTGAACCAGACAGAGCTCTGCTACAGCTCCCATTCTA
GTAAATATCTCCTTCCCCAATACATTTAATTTGCTGGAGATCTTACATGATCCCAAGAAAACAAATGTATATGTCCTCAGTTATTTTTTTCAGT
AAGTTTTCGCTAAAAGCTATAGAATCCTACACTCTGATAGCTATAAGCCATAAGAATATTTCTCTAGAGGAGGTCTCAGAACTTGCTAGGGCAG
CTATTTTTGAGTATATCATTATGTTATTTGTGTTTCTTCATGTGCTTTTAAAAAAACTTAAATAGTGTGAAAACTTTTCTCTCCTGATGTGTGA
GCCTTTCCCCTTCACTTATGTGACTGCAAGTGGTACTACTAGAAGTGACAGCACTTTAAAGTTAAAACCTTATTAAAACATACCTCCCGTGAGT
ACCACTCTAACAATTACAGTGGCTGTGTCTTCTCTGTCCTTTTTGCTGATAAAACTTAGGGGAAAATTCCTGGCAGCTAAATCATGGCCATTTT
ATTAAAAAAAAAAACTAGATATGAAATCAAGTAGAGAAAAAAGACAGTGACATTTAAAATCCCATGAATCAAGCTGCCCCAAGGAGTACAGGTG
TTGCATTACATGTGAATGTGAAGGAGAAAAGAAAACTAAACCTAGCCTCGTTTCTAAGAAAACTGTAGCAGTGAAGATACTTCACACTGTATCT
TCTGGTCAACATCTGGTTTGTCTTCAGGGTCTCTGACACATGTAGCTTGCAAATGATAGCTCTGTTGATGCCTCAAAATACTGAAGGAAGTGCC
TGGAAATACACCAATCCTTTTAAAGTTTTATTTTTTACTCTCCATTTCAGATATGGTTTTGGAGAGGCAGGGAAGCCTAAATTTGGCATTGAAC
CTAATGCTGAGCTTATATATGAAGTTACACTTAAGAGCTTCGAAAAGGTGAGAAAATACCAACTTCCTTAAAATTATGGTAGGTTTCTTCTCCA
TCCACTTCCTATAAATCAGTATCTTATCTTAGTAGGTGGTATAGATACATCGTCTTTATTCATTATCAAGTTTGTCTCTTGCCTCCAACACTGC
TGCTGAACAATAGAACAACTGACATACCACAGCTGATATACAACCAACGACCTCCGTGTTCTTATTTTGTTCCTATGTGTCAGCTTTTTTTTTT
TTTTTTAACTTTTTTGGGTAGAATCCAAGACTTGTTCCCTTATTTGTTCCTAGACTTGTTCTTTTTGTACTTTTTTTTTCCTGGGTTGAGGACA
GAAAGGTTCACGTTCTGCCAAGTGGCTCCTTGGGGGAGTGGGGTGCAGCTTTTCAGAGCTGAACGGATTGTACCCTTCACAGGAGTCACGAAGA
GGCCTGCACTGTGGCTCCAAGTTGTTATCCCAACTGCAAGTCCTCGAGGGCCACTAGGCTCTGTGACCAGAGATACAAGAAAGAAAGCAGCTAA
CCCGAAGCCATTTTTTTTTTATACTTCTCCAAGTAGAGAAGAGAGAGAATTTGTCAGTTGCCTTGGATTCCAGAAACAGCATGCCTCCTTGAAC
ATATTTCCATCTCAGTTTCACTCTGGAGGCTCCCAGCAGCAGCCGACCTGGACACACACAGCATATACCTCAGCTACGTATGCTGTTGTCTTCG
GCCACGTGCCCCTGGCATTTCCAAAGCCCCACCCTTTGTGGAGCTCAAGGACTGCAGTTGTGTTCCTTTTTTATTCCTGCACAGTGCTACCTCC
ACGTTCTGTACATTCAACTTTTTTTTTTTTGAGATAGGGTCTCACTCTTGTCACCCAGGCTGGAATACAGTGAGCGCGATCATAGCTCACTCCA
GCCTCAACTTCCTGGCCTCAAGCAGTCCTCTCACCTCAGCCTTCCAACPAGCTGGGACTACAGGCACACGCTACCACACCCAGCTAATTTTGTT
TATTTTTTGTAGACATGGGGTCTCACTGTGTTGCCCCAGCTGGTCTCAAACTCCTGGGCTTGAGCCATCCTCCTGCCTTGGCCTCCCAAAGTGC
TGGGATTGTAGGGGTGAGCCACTGTGCCTGACCACATTAAGCACATTAATATAAATGGAAACATGACCATTTATATTTTGTTAGATTCAGAAAA
GAAATCATTGTCCTGTGGGCCTGTACCTTTGGGCTAAGAAAGWGAGGGGAGGCCTGCTTTGGGATTCACCCCCAGTAGTGACATTCCTAATCAT
ACCTCTTCTACTTCATGTTCCCCCAAACAAACATATGTCTGGTTATGACCACTGATTGTTGTCATGTAACCTCTTCTGAAGGCCTGCTAGCTCA
GCACTGATCCCCCAATGCTGTTGTCATAGCATATGGTGTTTTTTTATTGTTAAAGAGAGAGAAGATAATCTTTAGCATGTGGTTATTTAGACCT
ATGGCTTTACTATTTCCATTTTTGTAAAGCAGCCTCTTGCCCCTTCCTTCTCGTGGCCCAGTGGACATTGCTTATTTAGGAGCACTCTCCCAGT
GGTGTGCCACAGCAAGCCTGTGCTCTGTCATCACTCCAAGAGTATATTCATGCACTGCTGCTTGGTATATTTGAAATCACATGAAGGTATATCA
TGTTGTTTGCGGCAATGTGATTTAATCCTCTGCCTTGTTAAGAATAGACTAGGCCAGGCTGGGCGCTGTGGCTCACGCCTGTAATCCTAGCACT
TTGGGATGCCGAGGTAGGTGGATCACCTGAGGTCAGGAGTTTGAGACCAGCCTGGCCAACATGGTGAAAACCCATCTATGCTAAAAATAGAAAA
ATTACCTCGACGTGGTGGCAGGTCCCTGTAATCTCAGCTATTCGCGAAGCTGAGACAGGTGAATCGCTTGAACCCAGGAGGTGGAGGTTCCCGT
GAGCCGAGATCATGCCACTGCACTCCAGCCTGAGAGACAGAGCAAGACTCCGTCTCAGAGGAAAAAAAAAAAAATATATATATATATATATAAA
AATATATATATATATAAAAATATATATATAAATATATACACACACACACATACACACACATACTTATATTCCAGGCATGGTGGCTCACACCTAT
AAATCCCAGCACTTTGGGAGGCCAAGGCAGGATTACTTGAGCCGAGGAGTTCAAAACCAGCTTGGGCAACATAGTGAGACCCCCCTCTCTGCAA
AAAAATTTAAAATTTTCCTGCGTCTGGTAGCACATTCCTATATTTCCAGCTACTCAGCAGGCCAATATAGCAGGATGGCTTGAGCCCAAGAGTT
TGAGACCAGCCTGAGCAACATAGTGAGACCCCGTCTCTACCAAAAAAAAAAAAAAAAAATTAGCTGGACATGGTGGCACATGCCTGTGGTCCCA
ACTACTCGGGAGGCTGAGGCAGGAGGATTGCTTGAGCCTGGGAAATCGAGGCTACAGTGACCCGCGATCQTGCCACTGCACTCCAGCCTGCACG
ACAGAGCAAGATCCTGTCTCAAAAAAAGAAAAAATAAAAGAGTATCCTGTCTCAAAAAAAGAAAAGACAACAGAGCAAGATCCTGTCTTAGAAA
AAGAAAAAATAAAAAAAAATTCCATAAAGACTGAAGCCAACCTAAGAAATACAAAGAGACTTATTAACTAGGTGTTCTTTGTTTTTGTTTTTTG
GGTGCTAAAACCTGGAATTGAACCATAACTAGGTTTTTGAGTAATTTGAGCTACATTATTAGGAAGCAGAATTACATGAGTTGCCAGAAACATG
AGTAACCCTTTTATTATTCACTTTTAAAAAGTACAGGATAGTCACTGGGCGCGGTAGCTCACGCCTGTAATCCCACCTGAGGTGGGTCGATCAC
CTGAGGTTGGGAGTTTGAGACCAGCCTGACCAATATCGAGAAACCCCGTCTCTACTAAAAATACAAAAAATTAGCCGGGCATGGTGGTGCATGC
CTGTAATCCCACCTACTCCGGAGGCTGAGGCAGGAGAATCACTTGAACCCGGGAGGCAGACGTTGTGGTGACCCAAGATCACACCATTGCACTC
CAGCCTGGACAACAAGACCGAAACTCCGTCTCAAAAAAAAAATAATAATAATAATAATAATAAAAGTAGAGGATAGCAGGGGCTGTGACACCAG
GAACACACACTCGTTATCTTTTGAATACAGAGAATTTTAGTTACCCATTTAAACTTCATAATTTATATCCACTAAATAGCACTGACCACACCCA
CTGTCACTTTTCCTAAACGCTCCCAGATTGTTCTCTTGACTCTGGTCCTTCTAAATCCAGCTTGTAAATGGCAACTGCAGTTATTTCTGGATTT
GTATCTGTAATGGTGGAAGTAATAATACACACAATACAAGCTAGCAGATGATAATGAAGTCATTTATTTATGGCTCTAAAGTGATATTTTTGCA
TGAQCTTTACTCCCAATTATGTTTTCCTTGAAGTCCCCCCCAGTATACATCTGCAAGTTGATACAATTTAGCAGTATTATTAGTATATCTCGTT
QTTTTAGAGTGGCAAGACAACCTGACCCAGAATTTTGAAAATTCTGTATQAATATACAAACTACAACTTGACTACAGTCATCTTCCCATTTTAG
AGTTGAAAAACAGGCTTGAGAGAAACACCCTAGTGGAGAGCTTTGCAGAGGGAGATAAGGCATGGCCTTAACTTTGTGTGGGTTCACCTTGTAT
TTCTATATATTCACTTTGTAGCAGTGCTTACCAGAGTACGTTCCTTACTGTGTTTTTGCGGCTCCTCTCTCTTGAGCAACATTGTTCAAGCTAC
AGCTTGGTCATGATGGAAAGTGAGTTCTTCAAACAGTATGAAGAAGCACTGGCCTAGCAGTAAATTGGCACTGACACACAATTTCAACAGCCAC
AGTGTTTTCAGTTTGCAGTATCTTCTAGAATTAGCTGCTCTTTGTTCCAATAGGCCTCAACTGATGCTTTTCTCTCTGTTCATCTAACCATTGT
CACAAATTTACACACAGGCCAAAGAATCCTGGGAGATGGATACCAAAGAAAAATTGGAGCACGCTGCCATTGTCAAAGAGAAGGCAACCGTATA
CTTCAAGGTGTGTGAGTCCCTATGCAATCCTTTCCATCTCAAAGAATTTATTCAAGTGTTGGTGAATTGTGCTGATATTCCCTACTCTGAATTT
TGTCAACACTGCTTGCTAAGAATAAGCTGCAATTTTTATAAATCTGTCATTTTCAATATGAAAAATGGTGAGAAAACAATCATGTGGAAAAAAA
AAAAAGTACAGATTCCTCTTTTACACATTCTGCTCTAGATTGTAACCTTCCATACAGGCAGACCAGGTCTGGCATCCCCACCCACCACAGTATC
ACTCACTCCTAAAGCATCTTGCTTGGTACATAGTTGGCACTCAACAAGTGTTTTTGGAATGAAAATAAGAATGAATAGAATAATTGTAGCAAAG
AATGGAATTCATAAGGGTAAGTTTCACATCATTTTTCTTTCTTCCTTTTTTTTTTTTTGTATGAGACACAGGGTCTCCCTTTCTTTCCCAGGCT
GGTCTCAAACTTCTAGCCTCAAGCAATCCTCCCACCTCAGCTTCCCAAACTGCTGAGATTACAGGCGTGAGCCACTGCACCGGGCCCATCTTCC
TTTAGACTGTCTTGATGAACTCACTAGAGCATATCATAAAAGGAGAGAGCACATGCACAAATTTCAAAACAAACTCACAGGAGAGTATTGATTG
CTTCTAATGGCCAAGATGATTCCTGCACACTTGCTTTTATGAGCAATCTCCGGATATTCCTGAATGATATTCATCATAAATTGCTTCTCAGAAA
CCCTTCTTGGAGCAACTAGGAGTGTGATATTTTCTCACTTAGATCTTAAACCTCTAGATGTAAGAAAAAAAGAAACCGCCCTTCATTCTGTTTT
AATCAGTQTTCTACCCATTGCTTCCCCACCCCAAATATATGCCTTCTCCATGTCAAGCAGAAAGGGCTTAGTCATCAGAATTAGACGGAGAATG
GGAGTTCTGTCAAGGTTTCTTTCGTTTTCTGCCACTGCAATACAGAAATTAGATGTTTTTCAGCAGTATAAAGCAGTGAGGCATAAGTGTACTT
TAACAAGTCTTTATGGGGCATCTGCTATAAGACATGCTATTATTAAGTTACAACCTTGTCAGGAGGGAGGAGTGGCAATGTTAATCCAAATGAA
ACAACTAGAGAATTATGTAAGAATATATAATCAACCCAAAATTAACACAGCCAGAGGGCACCATGTCTTTTCAGAATTTCAGCTGAGACAATAT
TGGGTCATGAAATCAGTTTTGTGGAAGTGTATTGCAATATGTPATAAGGATCAGTTTTGTTGCATAAAACTTTGCTTGTGTATGAGTAAGTACT
GGATTGCATATTTCTTACTCTGGGTGGTATTCAAACAAATTTTAAATCATGGGTTTAGATAACTATAAATATATAAATATGTTATTTATCATTA
TTTACTATGTATACTAAACTCTTATGGATCACCAGAAAGCATGGGGGTATGATAGAATAAGCTCAGAATTGGGAAAAATGGGCTTTATTGCTCT
TCAAATGATTTAGTCATTTAAGGTCCAAAGAGGTTATATTTTCAAGTGAAAAATAGGGGAGTTAGATGTTCCCCAAGTTTCTTTCCAGCCTGAA
TTTCTGTGAGTTTCTAAACTCTCAAGAACAAGTGTTATTTTTTTGGTTTTGTTTTGTTTTTAATTCTAATTGAGGTATATTGGATACTTCTAAA
CTATTCAAGTAAGATTCCAAGTGGGTTATTTGTATATCCAAATACATAATACACTAGAGGGAAAAATGTTTCTACAAAATTTCTTAAGATCGTG
AGTCCTTAACAGTATTTTCTATATTTCCGAAGTCCATAAAAATCCTTAACTATATTTTATATATTTCCTCAATACTTCCAAATAGAATATTAAC
AGTTTGGGAACATTTGACGCTTTTGGCCTTTGACTAGAATTATATCGATTCAGTGTACTAAAACAGCTCAGCTATTCAGAGGCTCTAATCGGTG
CTATGATACAGAATTTTGGAGAACATTATTGGTAATGAAATAATGTTATGAAGCCATCTGTCATATAGCTGTGTTCTGAATATATACAGAGAGA
TGGCCAGAATTAGTGATCAGTAGCAGAAAGCAATGAGTGTCTGTACAGTTACTTAACTTTGTTGCTTATCAGCATCACAACTGCAAGAGTGATA
CTATTATGAACCTACTTAAAATTACCAATCTTTGGATAAAATCTGGATCAGCAGTCACACACATGGAAAAAATTAPTTTTAACATGGAATTTCA
TAGGCAAAATTTTTCAAAACATTAGTCCATTGGGGAAAAATTAATGAAAGGTTCAAAACCACTGACCTGAGACTTTTCTCCCAGAATGTCTCTG
AACATTTTGTACCACTAAAAACTTCCCTGGAGGCACCTTTATAATTATAGGTAAAAGATCCCAGCAGTAGTCCTAGCGTTAGCTGTAAAACTTC
AAAATGGTTAGTAGATAGTTTCCTGTACATATTCCCTTCCCAACTCAGGGCAGGTTTCAATCTGCCATACTGCCCTCCCGCGCCTTGFCTTTCC
AGGGTGTCTGACTTGGCATGTTATGCATTTGCACAGAGTCCAGATGTGTAGCTGAGAGCAGAGATCGCCTGAACTAAAGATCTGTATTTCATGC
CATCTGCATATTGGAATTCTGTTTCCATTGATCTGTTGGTTTGGTTTATACCTAAATGGGTAAAGCCTCTCTCCTGACTAGGATTGAATTGTAC
TCAGCTTTTAAGTGGGAATGATTTTGCCATTGAAGATGTAAAGTCCTCATTTCAACCTCTGAATACTAAAGAGAAGAAAAATAGAGAACTCTAT
TTGGCTCTGAAAATAATTATTAAGTACAGGTAACAGCATAATATTAAGCCAGGCATTGTGCAAGCCAGTTAAACAGACACCATTTTTGCCCTCA
TAGCTGACAGTGTTCTGCAGGACAGGAGCATTAACTCACACCTGGTCAGTGTTTTTCTTTTTTCTGACTTGGCAGCAGAGTGGCAAGAAGGCTA
AGAACACTGAAGTGATGTGGGATTCTTGCGCCCCCTTGTGCTTCTCCTGGGAAGAAAGCATTTCTAAAACAAACTAGTTGAGGAGAATTGTTCA
ACCTCTAAACTCTTCAGATAAATCCGGCTTTGCTATATTTTCACCACCCTTGCTGTTCCAAGATACCACTAATGTGATTTAGAAACAAGCCGTT
TATGACTCTACCATTTGATGTTTTAAAAAAAATTCCTAAGAAGAGTCCACCCTGTCTTTCATCTCTTTCCTTTAGTGCAGAATTTTTCAACCTC
AGTACTATCAACATTTGGAGTGGGATAATTCTTGATTGTGTGGGGCTGTCTTGTGCATTGTAGAATATTTAGCAGCATTCCTGGCCTCTGCCCA
TTACATCCCAGTAQCATCCTACCCACTTATGACAACTAAAAATCCCTCCAGACCTGCCAGGTGTTCCCTGGGGGGCAAAATCACCCCCCAGTTG
AGAACTGCTTTAGTACCTCAGAAGCAGGCAGTACAAGACAGACTTTTCGCTAATTGGAAGTTCAAGTCTAAATAAAGTTACATGATATATATGC
AAGAGCTTTCAAAAAATTAAAATGCCCTATGTGAAGGAACTATTAAGAAGTCTAATACCTGTTTTTTGTGTTTTGTTTTGTTTTACCATGGCCT
TCTACCATTCTGATTATTCAGAACTTATTGAAATGTTAAGATCTAGGTTTTTGTCCTCCCTCGCTCTTCTTTTCTTTCCCTATACAATATATTA
GGAGATAATCAGAAAAGTTAAGTTAATCAATGCATTAGAGAGGGAGGAGGAGAGAGGATGAAGAAATGAGGCATGACAGGGGAAATGCCTGTCC
TTCCTATCTCATCTCAGTGAAACAACACTTTTCATTTCCACCCACACATTTTTTGCTCCCAATGATAGCAAAAGGTTTTGTTGTTGGTATTGTT
TTTAGAGAGAGAGGGTCTTACTCTGTCACCCAGGCTGGAGTGCAGTCGCACAAGCATAGCTAACTGCAGCTTCGAACTCCTGGACTTAAGAGAT
CCTCCTGCCTCAGCTTCCCAAACTGCTGGGACTATAGGCGTGACCCACCACACCACTTTAGAAAAAGTCTTGATTCCATATTTACATTCCTTTG
ATTTCAATATTTACTCAACAAACCTTTATTAAAGACCTCTTGGTGCTAAACCCTGAATATTCCAAAAGGGAGAGGACAATGCTGCCTGTCCTCA
AAGACCAGCAAGAGAAAAGGCAGTGACAGAAAGAAAATGCCGACCTGAAACTGGTGAGGACTTTATTCTTTTTTTTTTGTAGCATCCAAAAAAG
GAGTGGTAGGCCTAAGACTATGACAAAATTTAAGTATTGTCTTAGCTTGGGCTGCCACAGTAAAATACCATACACTGGGTGGCTTCAACAACAG
GAATTTACTTCTGGAGACTGTAAGTCCCAGATCAAGGTGTTAGCAGGATCAGTGTCTGGGGAGGGCCTCTCCTCTGGTTCCTTCTAGCTCCCTT
CTTGCTGTGTTCTCACATGGCCTTTCCACATGCATGTGAGTGGAGAGAGGGCAGAGGGCAGCAAGCACCCGAGTTTCTTCTTATAAAGGCTCTA
ATCCCCATCATGAGGCCCCACCCTCATGACCACTCTAACCTAATTCCCTCCCCAAATGCTCCATCTGCAAATATCACATTCGGGGTGAGGGCTT
CAACATAGGAATTTAGGATGGGGGACACAATTCAGTCCATAGCAAATCTAATTTCCTCAAGAATTTCAGCATTTAAAATAAAATGCCCTGGTTT
CGTGTTCTTATGAATGACCTGTATCACACACTTCTGAGGCAGAGAGGGTGACAGACTTTGATTTTAGTGCCAGTCTTCCCTCTCCTAAGTGAGT
GACTTCGGAAGAAGGATGTTCGAGGGATGTAGCCTGGCCCTCATTCACACCCAGCCCCTCCAGCTGGATCAGGTCTGCCCCATCTTCATCACCA
GAAAATCCACACCAGGGCTTCCTTTCTACAGGCAGAGCTCGTTTCTTACATCACCCACTTGAAGTCCTGTATTACAGGCATGTCCTCTTAGACC
TGCTCTATGGTTTTTCTCTTACTCAGACTCCTTGCGTGAGGGTTGGAGTATTTGTGGGGAGAGACAACTCGGCAGTGAGATGTACCCGCTGCTT
GGGCTGTGGTAAATCCTAGTAACATGGTCTTAACACTGTTGGTCAGGCATTGAATTTAATGTCCTAATAGGTCTGGCTGCTCCTCTGCCATCTG
GCAGGATGTATCATCTGTGGTTTTGAGCTTATCACCTCCTCAAAGGAGAATCCCCACTTGTACTCCTGTTTCTATTTGCGTATTTACCAGCCAT
TCCCCAGTGCTTTCATTTACCTTAAAATCACAGTGGACACATTGTCTCAGCCCTGGAGGGGTTTTCTTTTCTTTTGTTTTGTTTTGTTTTTGAG
CAGTCTCGCTCTGTCACCCAGGCTGGAGTGCAGWGGCATGATCTTGGCTCACTGCGTACCTCTGCCTCTTAGGTTCAATGCAGTTCTCCTGCCT
GCCTCCTAAGTAGCCGGGATTACAGGCATATGCCACCATGCCTGGCTCATTTTTGTATTTTTAGTAGAGACGGCAGGCTGGTCTCCTTACTCCT
CACCTCAGGTGATCCACCTGTCTCGGCCTCCAAAGTCCTGGCATTACAGGTATGAGCCACTGTGCTCAGCCCCCAGCGTTTCTCATATGAGCAT
GTATATATATATATATTATATATATATTATATATGTTTATATTTATATATATTATATATAACTGACAGACCTTTCTGATGTATATTCTTTTATA
GTTGTTATTATGTTGTATGCTACTATCCASACTATTCATATTCCCATTGCCTATAGATCAGGGGTCAGCAAACTACAGTTTGCTGGCCAAATCT
GGTCCCTGCCTGTTTTTGTAAGTACAGTTTAACTGAAACACAGCTGCACCCATTGATTTACATACTGTCTAGAGCAGCTTTTGCACTACTATTG
ATAACAATTTAGTAGTTGCAACACAGACTGCTTCAAATAGGATTGGCTGTGTTTGGAACTAGCACTTCCCAGATGTTGTATTTGCTGTGTAAGT
GCTGAAAAGAAAAGTAACTTCCTTTTCATTTTTTTAGTGGCATAGTCTAAAACTGCTCACAATCCTTTTGAAAGACTAAAGAATAGGCCAGGTG
TGGTGGCTCATGCCTGTAATCCCACCACTTTCGGAGGCCAAGGCAGGCGGATCACTCGTCAGGAGTTCTAGACCAGCCTGGCCGATCATAGTGA
AACGCTGTCTCTACTAAAAATACAAAAAAAAATAGCTGGGCTTGGTGGCGGCCACCGGTAGTCCCCAGCTACTCGGCAGGCTGAGGCAGGAGAT
TCGCTGGAACCCGGGAGGCGGAGGTTGCAGTGAGCTGAGATGGCGCCATTGCACTCCAGCCCTGGAGACAGTGCGAGACTGTGTCTCAAAAAAA
AAAAAAAAAAAAAAAAAAAAAAAGACTAAAGAATATTAGCACCAAACAACATAGCCCAGAAGCCTTGCTGTACTACACCTGCTGATGGGATGGA
TGGAAATGCTGCAGAGCAGCACTAGGCAGTGCTCAGGCACTGCCCCAAACCAGCCCACAGGCCATCGAGGCCTCCAAGGGAGTGGGAAAGGTAC
CTGCAGAGCCATCTCCAGAAGGAAAGAAACAAACCAGCTGTACCAGGCTTTGCTAAAGGGGTTGCTTCACTTTCAGGATTTGCTTTTCTTTTGT
ACCCCCTCAACAGCTGAGTACAAGTAATGACGCTTTGGTTATCCTAGGCAGGCAAATACATGCAGGCGGTGATTCAGTATGGGAGATAGTGTCC
TGGTTAGAGATGGAATATGCTTTATCAGAAAAGGAATCGAAAGCTTCTGAATCATTTCTCCTTGCTGCCTTTCTGATCCTGGCCATGTGCTACC
TGAAGCTTAGAGAATACACCAAAGCTCTTGAATGCTGTCACAAGCTAACATCGTGTCTCCTGTGAGATGGACTTTAGATACTCCAGATCTTTTC
TCCATCTCTGTCTTTTGCTTCCTCTCAGCCAAAGGTTGCAGGATTTTTCATTTTCCTTTTTTTTATTTATTTGAATGTTTGGGATTATTTGTTT
CTCAGTATGAATTGGGAAATTCAGCAAGATTTTTATTACAGTCAGACTTTTATGATACCTAGACTGTTTATCATAATGCATTCTGAAGAAAAGT
TTTGATTAAATTAAATATTTTTATCCACGACCTTCCTTTAATAACTGTAGTATTTATATCAGAGTAGACGTATAACTCCTCAGGTTCAGTTTAA
TAAGAGAAGATTTAACTTAAGCTTTTCTGGACTTTAACAGACTGCAACTGTTCATATAAAGCATATATATAGGTCAATTTTTATTATAATCATT
TATTCACTGATATGCATAAATAATATGAAAGGTCCACAGAGCATCAGCACCCTTTTTATTTTTACATTTGTCTTATTTATACTATCTTTGGTCT
TTTGAGTGCTTACACACAGTACTCTATAACAGTGGTTTATCATCTGTATCGTTATGTATCGTTCTGATATATTTATACACCAGCCGATACTATT
TTAGGTATCTGGTCTCAGAGTGAACAGTATATATTATACTGTGGGTAAAAGTAAAAACTAATCATTGGATGTATCTTAAAGGTAGACATAAAAG
GATAAGAAAAGCAAGGCAACTATTTTGTACATTCTTTGTGAGATTATTTTTGAATTTTGTGGATCAGTGTTTCCTATCGCATCCTCTCTCCCAA
GACCAGTTATTAATTTTATATGTATTTTTTCGTTTTTTTCATACAQAGCGGAGAGAGAGAGAGAGAGAGTGTGTGCGCGCGCGCGTGTGTGTGT
TTTGTTTGTTTTAGAGACAAGTTGTTGCTATTTTGCCCAGGCTGGGGTGCGGTGGCTATTAATACACATGAACATAATGTACTACAGCCTCAAA
CTCTGGGGCCCAAGCTATCCTCCCACCTCAGCCTCCTGAGTAGCTGGGACTACAAGTGCATGCCACCACACACCCTGCTAATTTTTAAATTTAC
TTTTGTAGAGATGGGGGTCTTCCAAAGAGCTGGGATTAAAGTTGTGAGGTACCACACCCAGCACAGCCTTGACTACATTATTTTTCTGTCTTCT
ATTGACACAAGCACTCATATAGCATCACTATTAACCCTATCTTTCGCAATAGGAAGCCTGTTCTCCTTATTTTCCTCTTTTTTTTTTTTTTTGG
AGATGGAGTCTTTCTCTGTTACCCAGTCTGCAGTGCAATGGCACAATCTTGGCTCACTCTACCTCCACCTCCCGAGTTCAGCCATTCTCCTAGA
CCTCAGCCTCCCAGTAGCTTAGACCACAGGTGCCGACCACCACACCAGGCTAiTTTTTGTATTTTTACTAGAGAATAGCGTTTCACCATCTTGG
CCCGGCTGCTTTCCAATTCCTGACCTCACGTGATTTGCCACCTCAGCTTCCCAAAGTGCTGGGATTACAGGTGTGAGCCACCACTACCCAGCAA
TTTTCTTTTAGCTTTGTTGATTATATCTTTCTCTTTAAAGAAGGTTTTAATGTTTATGTAGTAGATTTGTCGTCTCCTTTCTAGTTAGGATAGG
ACTTCCCCACACCAAGATTATAAAAATAACTGAAGCCAGGCACAGTGGTTTACACCTGTGACCTGTATCCCCAGGACTTTCGGAGGCTGAGGCC
AGAGGATTGCCTGAGCCCAGGAGATAGAGGCTGCAGTGAGCTGTGATTGAGCCACTGCCCTCCAGCCTGGGCGACAGAGTGAGACCCTGCCTCA
AAAAAATAATGATTATATTTTACATATTTTAAAATAAAAAATAATTGAAACATTTTATGGTTTTTTTTAATATGTAAATATGGTTGATCTAGAA
TTTACTTTTGTGCTTACAATATGAGGTAAGACTTTTTTTTTTTTTTTTTTTTGGAGACGAGAGTCTGTACTCTGTCACCCAGCCTGGAGTGCAG
TGGCACGATCTCAGCCCACTCCAACCTCCACCTCCCTGGTTCAAGCAATTCTCCTGCCTCAGCCTCCATGGTAGCTGGGATTACAGGCGCCTGC
CACCATGCCCAGCTAATTTTTGTATTTTCAGTAGAGACACGATTTCGCCATCTTGGCCAGGCTGGTCTCGAGCTCCTCACCTCAGGTGATCACC
TGCCTCAGCCTCCCAAAGTGCTGGGATTAGGGTGTGAACCACTGCACCCGGCCTTAGCTCTTATTTTCTATGTGGATAGCTGCCATCCTGGCCC
CGTTTATTTTAAGTTAACTCTCCACTGATTCACATTACCACCTTTGTCATTTTCTGATGTTTTTATATGCAGACACATGACTGTTTCTGAAATG
ATTCGTTCTGTTCCACTCAGCTGTTTGTCCACATGCTAGTAACCAAACTGTCTTAATTTCAGTAGTTTTAGTTTGTCTTTTTCTCTGGTATGAG
ACAAGTGCCTCTTATTTTTTTCTTTTTTCCCAAATTTTTTCAGCCATTCTTGGGCACTTATTTGTTCCAATGAACTTTAAAATGAACTTCTCAA
GAGCCCCCTCTCAAATCTCCTTGGGATCTTTCTAGAAATTGCATTAAATGCAGAAAATAATTTGGGTAGTAAATTTTGATCAGTAGTATGTAAT
TATCTTGAGCCCCATTTTTTTAAATACACTTTTTCCATCTCCTTTGGCAAGAGAACTTTGGTAAGCTGTTTACTGAATTTATTAAAATTCGTCC
TTTCTAAATATAGACCATCTATTCCTAGGCCCTTGGACTGGACAGTGCCAATGAGAATGGCTTGTATAGGAGGGGTGATAGCCCAGCTGCTCAT
GAACGAGTTTGAGTCAGCCAAGGGTGACTTTGAGAAGTGCTGGAAGTAACCCCCAGATTTACGCTGCAGTAGACTGCAGATCTCCATGTGCCAG
AAAAAGGCCAAGGAGCACAACGAGCGGGACCGCAGGATATACGCCAACATGTTCCCGGATGTTTGCAGAGCAGGATGCCTAGGTGTGTGAGAGC
CTGATGACTGCAGGTGGATCAAGAGCCTGACCATGCCCCTTTGATTTTAGGGGACAGGAACAGCTAAACAACCCAAGAGGCTCAAGAGCAGGGA
AAACGATTTCCAATCTAATCTGAGGCTGCTTTGGATCCAAGGTCGAGTACCGCAGTTCCAGTCACCAAACGCACACGTCATCAGAGATGAGAAA
AACTAAATTCCCTTCAGATGTATTAGATTGGTTCAAAAGTAATTGTGGTTTTTACCATTACTTTCAATGGCAAAAACAGCAATTTTGCACCAAC
TCCCCCCGCCCGCCCCCCGGGCCCCTGCCCGAGTCAGAGTCTCACTCTGTCACCCAGACTGTAATGCAGTCGTGCTAATGCGACTCACTGCAGC
CTTGACTTCTCTGGATCAAGTGATCCTCCCACCTCAGCCTCCTGAGTAGCTAGGACAAGCACACTACCACACTGGGCTACTTTTTTTAAATTTT
TTGTAAAGATAGGGTTTCACTTTGTTGTCTAGGCTGGTCTCGAACCCCTGGCTTCGATGGGTTCCTCCTGCTTTGGTCTCCCATGTGCTGGGAT
TATAGACATGAGCCACCATGCCCAGCCCTTTTGTCATTTTTGAAAAATTCTAAACCCATCAGGATTTTTTTTTCAGTGTAGACTTACGATTTTC
CCAGGAAATGGGATCTTATAGGAGCCCCATCATCACACCTGTTATCTTGAGGGTCGGCAGCCAGCCTGAAATATGTGGCAGGAGAGGTCTGTCT
GCAGAGAGGGCGGCCTCCCTACAGCATAGTTGGCATTCTGGTCCTGTCCCCAGTCTCCAGGAATTGCCCAGACTTCATTATCCACAGCTGTCCC
ATGTGTCAACCAAAGAAGGTGAAGCTCCCACTCTAACTATTGGTAGCACAGCCCTGACCTACCCACCTAGATATCCTAGAGAATGCTCATTGCA
ATACCTCGTGTTTGGCACCTGATACACAGTCTCGAGGACCCAGQAATTATTTCACTTCTTTATTCTCTTACCTTCTTGATTGCTTATTTCTTCC
TTAGGAAGAGGCCAATAAAGCAATGGGCAAGAAGACTTCAGAAGGGGTCACTAATGAAAAAGGAACAGACAGTCAAGCAATGGAAGAAGAGAAA
CCTGAGGGCCACGTATGACGCCACGCCAAGGAGGGAAGAGWCCCAGTGAACTCGGCCCCTCCTCAATCGGCTTTCCCCCAACTCAGGACAGAAC
AGTGTTTAATGTAAAGTTTGTTATAGTCTATGTGATTCTGGAAGCAAATGGCAAAACCAGTAGCTTCCAATGAGCAGCCCCCCTGCTGCTGCCC
GGAGGGTTCACTGAGGGGTGCCACGGGACCACTCCAGGTGGAACAAACAGAAATGACTGTGGTGTGGAGGGAGTGAGCCAGCAGCTTAAGTCCA
GCTCATTTCAGTTTCTATC~CCTTCAAGTATCCAATTCAGGGTCCCTGGAGATCATCCTAACAATGTGGGGCTGTTAGGTTTTACCTTTGAAAC
TTTCATAGCACTGCAGAAACCTTTAAAAAAAAAATGCTTCATGAATTTCTCCTTTCCTACAGTTGGGTAGGGTACGGGAGCAGGATTAGGCTTT
TGTTTTTTAAATGACTGAAGTGCTATAAATGTAGTCTGTTGCATTTTTAACCAACAGAACCCACAGTAGAGGGGTCTCATGTCTCCCCAGTTCC
ACAGCAGTGTCACAGACGTGAAAGCCAGAACCTCAGAGGCCACTTGCTTGCTGACTTAGCCTCCTCCCAAAGTCCCCCTCCTCAGCCAGCCTCC
TTGTGAGAGTGGCTTTCTACCACACACAGCCTGTCCCTGGCGGAGTAATTCTCTCATTCCTAAAACACCCTTCAGCAATCATTATGAGCACATG
AGAGTTTCTGGATTAGCTTTTCCTATTTTCGATGAAGTTCTGAGATACTCAAATGTGAAAAGAGCAATCAGAATTGTGCTTTTTCTCCCCTCCT
CTATTCCTTTTAGGGAATAATATTCAATACACAGTACTTCCTCCCAGCATTGCTACTGCTCAGCTTCTTCTTTCATTCTAATCCTTGCTATTAA
GAATTTAAGACTTGTGCTTACAATATTTTTGACCTGGAGTGGATCTATTTACATAGTCATTTAGGATCCATGCAGCTTTTTTTGTCTTTTTAAG
ATTATTGGCTCATAAGCATATGTATACTGGTTTATGGAACTTTATTTACACTCCTCTATCATGCAAAAAAATTTTGACTTTTTAGTACTATGCT
TAATTTTTAAAAACAAAATCTGTAGGGTTGACAAATAAATAGTTGCTCTTCTACACTAGGGGTTTCACCTCCAGGTTTGACACGCAGTTGCTCG
CTTTTCCTGCCCTGTCAAGCTTCTCTGTTCTGGCGTGAGTTGTGAAAGAGTTGAAGACAGCTTCCCATGCCGGTACACAGCCAGTAGCCTAATT
CTCCAGTACTTGAGCTGACCATTGAACTAGGGCAGTCTTAATGTGTACATGTAGTTGAATTTCAGTCCTTACGGGTATCAACAGATTGAGCATG
GCTCTCTATTCCCTCAGCCTAAGAACACTCATGGGAATGCATTTGGCAACCCAACGAACCATTTGCTTAAACCTGGAACATCTCACCTTTTTTA
AATCCTAAAAAACACTGGCAGTTATATTTTAAATTAGTTTTTATTTTTATGATGGTTTTATCAAAAGACTTTTATTATTAGATTGGGACCCCCT
TCAAACCTAAAAATCAAGTTATTTCCTTTTATAATACTTTTCTTCCCCATGGAACAAATGGGATCAATTTGTGAGTTTTTTCCTTTAATGATAA
CTAAATCCCCTCTAATTTCTCATTTATGCTTTTGTCTTTTTTATGAAATATTTCTTTTAAAAGCCCCAGTCTCACCTACGAAATATGAAGAGCA
AAAGCTGATTTTGCTTACTTCCTAAACTGTTGCGAAAGCTCTGTAGACCATGGTTCCAGTGAGGCCAAGATTGATTTGATACTAAATGTCGGCC
ACCTAGCTTTTTGCAGATAACAAACAAGAAAGCTATTCGAGACTCAGATGATGCCAGCTGTCTCCCACGTGTGTATTATGGTTACAGTAGGGGG
AACTGGCAAAAGTGTGTGTGGGGAGGGGAGGGTGTCTGAGTGGTTCTGAGCAATAACTACACGGTGCCCATTACCACTCCGGATAGGACACTTC
ACGTATTCTTCTATCAAATTCAATAATCTTAAACAATTTCTGTAGAAGTCCACAGACAPCTTTCAACCACCTTTTAGCCTGCATATCGATTGCC
AAGTCAGCATATGAGGAATTAAAGACATTGTTTTTTAAAAAAAAAAATCATTTAGATGCACTTTTTTGTGTGTTCTTTAAATAAATCCAAAAAA
AATGTGACTTCCCATTGTTTTTGGTTTTGCTTAAGTGATTTTCAGCGAAAGCTATATTGGTTAAAAAACCATGGTGGGGGCCAACTTGATAGAC
TTACACATCAGAGACGTCAGGCGTAGTGGCTCATCCCTGTAATCCCAGCACTTTGGGAGGCCAAGGCAGGTCCATCACCTGAGGTCAGGAGTTT
GAGACCACCCTGGCCAATGTCCTAAAACCCTGTCTCTACTAAAAATACAAAAATTAGCCAGGTGTGGTCGTGCACACCTGTAATCCCAGCTACT
CAGGAGGCTGAGGCAGGACAATCACTTCAACCTGGGAAGTGGAAGTTGCAGTGAGCCAAGATTGTGCCACTGCACTCTGGCCTGGGTGACAGTG
AGACTTGGTCTCAAAAAAAAAAAAAAAAAAAAAAAATCAGAAAATCGGCAATGGACAGTATCATCCTACACTTTGCTCTAAGGTGAACCTGAAA
CCAACATTGGGGTGAAAGTGGCAGAACAATGCATCATTGCTAAAAAGAACCAAGTAATGGGAAAAATAAAAAGGTTTTGTTTTTTCATTAGCCA
GCGGATATTTCACCTTTTTAAGCTGATTTTAAGGTAGGCTCGACTTGCAAAATAAAATTTAATTGTGCCCTTTAATAAATATATGAAACATAAG
TAAGGCTATCTAAGGTGGTGGTCCATATTGAGCATGCATTTTCTTTCTTAAGTAGCATATATCATCAATACTCATCATCACAGACTCTCAAGGC
CTAAGGAGATGTCACATATACTGCAAATCCTCATTTTCACACTGCAAAAGAAGGTGGCACAGTGCTGGAAGGTACTTAGTAGGACCTCTGAGGT
CTACAGACAGGTTGATGCAGGTTCTAGGCACCCTTTATTCCCTCTGAATTCTTGGCTTCATCTCTGGATTTGAATTATATTTCTCCCTCCTCCC
TGTTAAATTATTTGGTAATGAAATAAATTCCTAGCTACGTCCGGTTGCTTATGCTTATAACCCCAGCACTTTGGCAGGCCGAGGTGGGAACCTT
GCTTGAGCCCAGGAGTTCGAGACCAGCCTGGGCAACATGGCAAGACCCTGTCTCTACAAAAAGTACAAAAATTAGACAGACATGATGGTATGCA
GCTTTAGGCCCAGTTACAGGCTGAGGTGGGAGGATCACTTGAGCCCTGGGAGGTTGAGGCTGCAGTGAGCCATGATCATGCCACTGCACTCCAG
CCTGGCTGACAGAGCAAGACCCTATCTCAACCATAATAATTCCCTTTATTTGCGTGCTTTTTTTTTGTAAGAAAAATAATGATCACCCTAGGGA
TCTTGAGGATGAGCCAGAGAAGATTCCTGGCTGTAAATGTGTGATCTCAGAATTCAGAGGCAGCTTGCACAACCTCCAAAAACGAGGACTGCCA
GTGAACGGCTTTGTCTATACTTACTTGGCCTTAGCAGCACACTGAACTCCACTTTTAGTATGGTACATCTGAAGCCTGTATTCTCTGGGGCTGG
AGACTATCTCCAGTATTGGTGACAAAACGCATTGAATTTGAGCCAGTTAGTCAAAATCCTGAAACTCAGAATTCCCCAACCCAGCTGTGTATTT
TTTCCATCAGGTGGCTACTTATGCATCTGAATGACAGTGACTGACGAAGTACATAAACGACATTCTCTGATGGCTTGAAAAAAGTTTTGGTAGA
CCTTCAGTACTTCCCTTCAGATTTTTCTCTACTACATGTCTGACATGGAGATTTCTGTGGGAGGAGAAAGGCACTATCTGTAATTGCCCAGATC
TCCACGTGTGACCTTAATAATACACGGCAAGAAAGAGACAGCGTTAAATACAACTCTTAAGATTTTTGACAGCATCTTGTTTGGGTAACTGCAG
CCTATAGTTAGAAAAATTAAAGCACAGTTTATAAGGCAGGGATTCTTTGTCTTCTAAAGATGAGGGAACCTTGGAGAAATCAAGATATGGGGAG
GACCCAGAATGGTGATGCAGCCTGCCCATGGCCGTCAGGTCACCTGATGCCCTTGCACCATTTTAAAATAGGTCTTTTTCTAGTATGATGAGTG
ATGCTCTTGGTGTATGGAAGGAGATGTTGGTACTTCCTTAGAATTCCCACATTCGGTGGAACTGAAATGGCAGCAGAGCCATGGGCCTCATAGT
CTACTTTGGAATAATCTATGGTGGGAAGCTTGCCAACGTGTTAAGCAGAGGCATCTTTTTAAAATACACTTTAGGGGCCAGGGGATGGTGGCTC
ACACCTGTAATCCCAGCACTTTGAGAGGCTGAGGCAGGAGGATTGCTTGAGGCCAGGAGTTCAAGACCAGCCTGGGCAACATAGTGAGACCCAA
TCACTACCACACACACACACACAAATTAATTAGCTACACATGCTGGTGCATGCCTATAGTCCCAGCTACTTGAGAGGCTGAGGTGAGAGGATAC
TTGAACCCATGAGTCGTACGCTTCAGTCAGCTATGATCACGCCACTGCACTCCAGCCTGGCCAACAGAGTGAGACCTTCTCTCTAAATTTAGAA
AAAAAAATCTGGCTGCTACATTGTTTCCACCTCTCAAATCTCCACAAGGTCATTGGTCCTTCCTAACCCAGAACTAAGCAGGGAAGGAATTCTG
GGACATGTGTTTCCAACTTGGCTTAGTTGACACATTGCAAATACAACATCTGGCTAAGGCTTTCTTTTTTGTTTTTGTTTTTGAGAGGGAGTTT
TGTTCTTGTTGCCCAGGCTGGAGTGCAGTGGCACAATCTCGGCTCACTGCAACCTCTGCCTCCAGTATTCAAGTGATTCTCCTGCCTCAGCCTC
CTGAGTAGCTGGGATTACAGGGTCCGCCACCACACCCAGCTAATTTTTTGTATTTTTAGTAGAGATGGGGTTTCACCATGTTGGCCAGGCTGGT
CTCCAGCTCCTGACCTCACGTGATCAACTTGCGTCAGCCTCCCAAAATGCTGGGATTACAGCCGTGAGCCACCGGGTCCGGTCTGTATCTAAGC
CTTTCTTGAGGTATTAAATATTTCCAGCCTGGGTCTGCTCTGGGATAATGTGTTTTCATAAGATAACTCCTTATTGTAGGCATTGTTCTTGGCT
TAAAGTTATCTCCTTAAGCTTCTGACTAGGGAAATAAGTGGTAAGAATAAACAGTTGATGAGTATTTGGGGATGCAATGACTAAATTCTAGTTA
CTCTAGTTCTAGTZAATGACTTCATGAGTTTGTATTGTATCTGCTCACAACCGTGTTTCCACACTAAGGACTCCTGAAATTTTTTTGTCTTAAA
ACTTAAACCCGCTGGGTGTCCTGGCTCACACCTGTAATCCCAGCACTTTGGGAGGCCGAGGAGGGCGGATCACGAGGTCAGGAGATCAAGACCA
TCCTGACTAACATGGTGAAACCCCATCTCTACTGAAAATATGAAAAATTCGCCAGGCTTGGTGGTGGGCGCCCATAATCCCAGCTACTCAGGAG
GCTGAGGCAAGAGAATGACGCGAACCCAGGAGGCGGAGCTTGCAGTGAGCTGAGATCGCCCCAGTGCACTCCAGCCTGGGCGACAGAGCGAGAC
TCTGTCTCAAAAAATAAAAATAAAAAACTTAAACCCATGTGTATCCTATTGCCCTCTGTGGCTACCAGAGTCTTCCTAACATGAAACCAGCCTT
TACCTGTAGTTAACAAAATGTGATTCCCCTTCTCCCACTCAGGGATCAGGAACACTGCCTTACTCATCACCATCCTCAGCACCCAGTCCATCAT
CCCCAAACTAGAACATAGTAGATACTCGGTAACCTGGCTTTGTCCCTCCTCTGAAGCCAGCCTCTTCTCTGTATCCCAGTGGCCCTTCACTCCT
GTTACCTGAGATGTGGAGGCCAAAGCCCCATGATACTGTCGTTGTCCCTGCAGCCTGATTTTGTGTCTTGAATTCTTTTCCAAGTGCTGAACCA
GCAGCAACTTGAATTTTGGGAGCCCATAACTGTAAAATGGGTCCATCGTCTTCACGCTACATTCATCTTATATCTATTTTTAGTCACAATTGAT
AACTCACAGTTCACCAAATACGAAGATCAAATATAAAATATTTTCCTTAAAAGTATTCThAGACCACCCCGCCCAGTCTGGTGCCCTGGTCAGC
CAGCCCCCAAACATTTACGGCCCATCTCTTGTGAACTGGGTACTGTTCCACTGACGTGAAGQATGGGCCCCCCTGGCCTGAGCGACTCGCAGAC
AAGTGAAAAATGAGGCATGCAGATGGCTGCATCATCACAGAGCATCTGCCATCTGCTACTGACATCTACAAAATAGGGAACAGCAGGAAACTCA
AGCCTGCCTCTCCAGCTCTCCCCACTCATTCAGAGCCACACTGGAGACCGAGTCAAGCCAGGGCCCACCCCACTGCTGACATCCAGCCCAGTCC
TACTGGGCAAGCCCTTCCTCAGCACTGCCCCCAGCTGGCCACTGTTCCACCCCTGTGCTTCTCTCCAAGCATCCGGGCTGCAAAAAGTGCCCAG
CCCTACCCTGAGCTATACCAGCCCTCTTGCCCTGGGCCCAGCCAGGATGGTTTCTCCTGGTGGCAGGATGTTAATCTCTTTGGCACACCAGGCA
GAAGTCTAGGAGCAGAGAGCTATGTCCTTAGGTCTGTTTTTCAGTTACCTGCCTACTGGAATACAGCTGCAAGAAAACTGTGTCCTTTATTTAC
GAGACAACTGTACAGATACACCATGCCTAACTTTGCTTACTGCATGGTCACTAGGATGTACTGAGTTTCAAGGAAATATGTTTTTGCTACATTT
TAATTAGCACTACCCCCCTTAGGTGAAATTTGGGCCAGGTGCAGTGGCTCACACCTGTCATCGTAGCACTTTGGGAGGCCAAGGCAGGAGGATC
ACTTGAAGCCAGGAGTTTGAGACCAGCCTAGGAAACAAAGCAAGACCCTGTCTCTACGAAAAAATTTTAAAATCAGCCGGGCGTGATGGCGCAT
GCCTGPAGPCCCTCCTACTCAGATGGATGAGGTGGGACGACTGCTTGAGCTCAGGACGTCCAACCTGCAGTGACCTCTGATCATGCCACTGCAC
TCCAGCCTGGGTGACAGAGTGAGACCCTGTCTCAAAATAAATAAATAAATAGGCTGGGCTCGGTGGCTCTCACCTGTAATCCCAACACTTTGGG
AGGCCGATGGGGGCGGATCATGAGGTCAGGAGATTGAGACCATCCTGGCTAACACGGTGAAACCCCGTCTCTACTAAAAATACAAAAAATTACC
CGGGCGTGGTGGTGGCTGCCTGTAGTCCCAGACACTCGGGAGGCTGAGGCAGGAGAATGGCATGAACCTGGGAGGCAGAACTTGCAGTGAGCTG
AGATTGTGCCATTGCACTCCAGCCTGGGCGATAGAGTGAGACTCCGTCTCAAAAAATAATAATAACTAAGTAAATAAACTTCCTCACTGTTCTG
CGAACCCTCACCCCTTTGTCACCAACACACTTTCCCTGCAGAGAAAGCTACACTGCTTGACTCAGTTGGTAAATGCTCCTCTCTCTCTCCACTC
TGTCTCTCGCAAGGGCACGCAAGGCTTTCTATATGGGCTTCTAAGCTTTCTCTGAACCCAGCTGTCTGGTTGACAAGGAGCAGATTGTAATAAG
ACAATACAGTGACGTTTGCACCCTTCTACCCTTCAGCGGPTACCAAATGTGACAGTAGGTAACTAAACCAAGCCACCTTCAGCCTGCAAGTCGG
GGCCGACAGAACCAAGTTATAACCTGAGATAACCCCAGTTGGCWGATGATTGCCGAGACCAGACTTCCTACAGACAGTGCTGCCCACTTCTGCG
GTGATAACTGCAAAACAGGGCCCCTCATAATGTCCTCATCAGGACCTCCTCAATCTGAGGAACACACAGGCCTCCAATGTTTGCCAAGAGCACT
CGTTTGGGTCCAGCTCTGTGTTGGGATCTCTTGTTTCCTCACCTGTGAAATAACAATGGCTAATATTTATACAACTCTTTTAATTATAGTAGAA
AACACATACCATGAAATTTATCATCTTAACAATTTTTCAGGTTTTTTTTTTCTTTTTTGAGACAGAGTCTCTCGTTCTGTTGCCCAGGCTGCAG
TGCAGTGGCACAATCTTGGCTCACTGCAACCTCCACCTCCCCCGTTCAAGTAATTCTTGTTCCTCACCCTCCCAAGTAACTGGCCATGGGCCAT
CATGCCCGGCTTTTTTCTTATTTTTAGTAGAGACGGGGTTTCACCATGTTGGCCAGGCTAGTGTTAAATACAGTAAGAAGTTCTTCTCAAAGGT
TTAGCTTGTTTAAGTTTCCTTGTCCTCTGTTCCCTCCTTTCAAGGCCAGACTTCCTTACTCTCTGTGTCCCCCTGCCCTGGTAAACAACCTTCC
CACCAGTCCTTATCTATACAGCCCACATTCCACATCTGCTACCCACTCTGTGAATTACCCCTCCCGTCACAACGACCCTCCCCGCAGAAACTGT
TCCTCCCACCCCCCACCAGTGTAACCGCATTCTTGCACTTTTCAAGTTAGCCAACCGGGTTCAGCTTGGATTGGTCCAGCTCCAGCCAATGGAG
ACAGGACACAGTAGCGGGCACAAGCTGTGTTAGGAATAAAAACCCCTTCCCTCCTTTGTTTGGCGTGCTCTCGTGGCGACCAGACCTACAAGAA
GCACCCTTCTCCAGAACCAAATTTGCCTTGCTGAGACATCCTTTCTCTCAGTGCTGCTTCTTCTTTCCAGCACTCAGCATTTGTTTCCAACAAA
TTTGGTGGCCCATATGCGGACCTCATTCTCCTCCGGGAAAGGGTCTCTGATCACTTCTCATGAGGAGACGCATCCCGCTAACTCATTGCAGTGG
CCTCAAGGGTAAAGAATCGGGACCCACCCAGTGCAACCAATAAACCCAGACTCTTAGCAACACAGGAAGAAAAGGCCTACAGTTACTGTGGTGA
CCAGGTAACGCTATGCACAGACCAAGCTAAGAAAAACTGTQGGGGCGCTGAAGTACTTCCTTGGTGGTAGGGACAGTTTGGAGGTTAAAAGTGT
GTAAATAAGATGCACAATTAAGTGCAAAGCGAGTGTCGAGTAAAGTAAAGGAGTGCAAGAAATCTCCAGTGGGGGAGCTGAGCCTCCAGGGAAA
GGGAGCAAAAAAAAAACAATCTCTAGTAAAAGAGGTTGACCCAGGAGGCCGAGGCGGGTGAATCACGAGGTCAGGAGATCCAGACCGTCCTGCC
TAACACAGCGAAACCCCATCTCTACTAAAAATACAAAAAAAAAAAAAAAATTAGCCGGGCGTGATGGCGGGCGCCTGTAGTCCCAGCTACTCGG
GAGGCTGACGCCAGGGAATGGCGTGAACCTGGGAGGTGGAGCTTGCAGTGAGCCAAGATCGTGCCACTGCACTCCAGCCTGGGTGACAAAGCGA
GACTCTGTGTCAAAAAAAAAAAAAAAAAAAGAGGTTGAGCCCCACACACACTCAGGTTGAGCCTTCAGGGAAAAGGGTGCAAGAAATCTCTAAT
AGGAGAGACTGAGCCCCCATTAACTTCCAGGATGGGAAATACCCCTACTAAAACAAGAACTACAAAGGACCAAACATAAGAAAAAGCAACAGAT
GATAAAATATTGTTGTTTTTTTTGAACCAAAGAAACTATTCTTAAACCTTTAGTTTTCTGGCCAAGTTTTGGGTCAAATAAGGATTAGATTTGT
CAACTTTTAATAAAGTATGTAAATAACAAAACTCCTGTCTCCCAGGAAGAAATAGACTATGCCCTGCACTGGCGGCACCCCCCTGTCCTCTACC
CCCTAAAAACTGCAGGAAAAAAAGCCAGAAAATACCTCCCCTAAAGAAAGTAAAATCCCTAACCCCAAACAGTCCACTAGCACATGGGATTCAA
AATTTCCCTTTCCCCTCCTCCTCAAAAAACTCTACCCCAACCCTTTTTCCCTTAACGCAACTGCCTCTAGGACGAGGCCAAATTGGCTTTGTAA
ATGCCCCTTAACTAGTTCAGAGGTCAGAAACCTAAGGAAGAAACTTAAACCACTATTAGATGATCTTTTTAGGGTTGTGGATCAAATTAACCGA
TTTTTAGGACCACAAGTATACACTTGGGCTGAGCTAATGTCCATCTTAAGTATTCTCTTTTCGGGAGAGGAAAGAACCATGATCCGCAGGCCTG
CTATGATAGTCTGAGAGCGCAAACACCTTCCCAGTCAAAATATCCCWGCAGCAGAACAAAAATCGCCGGCCCAAAACCCCCAATCGGATAATAA
CAATGCAGCCCACCAAGAAAACATGAAAGGCCTTAGGAAAATGATAGTTAAAGGGATTCGGGAATCAGTGCCTCAAACCCAAAATATTTCCCGA
GCATTTAATATCCAGCAACGAAAAAACAAAGGGCCCACGGAGTTTTTAAACAGACTCAAGCAACAGGTAAGAAAATATACAGGCTTAAACATAA
AGGATCCCCTTGGACAGGGGATGTTAAAGCTCCATTTGGTTACTAGTAGCCAAATATCACAAAGAAATTACAAAAACAGAGAACTGGAAAGATC
AGCCTATAGAGGGAATGGAGGCAGTCAGGGAGAGAGAGAAAGAGAGGCAAAGAGAGAAGATGGACAGGCAAGGAGAGACAGA
HUMAN SEQUENCE—mRNA
GGGCCGGCTCGCGGGCGCTGCCAGTCTCCGGCGGCGGTGTCCGGCGCGCCCCCGGCCTGCTGGGCGGCCTGAAGGGTTAGCGGACCACCGGCAA
GGCGGAGAGTGACGGAGTCGGCGAGCCCCCGCGGCGACAGGTTCTCTACTTAAAAGACAATGACTACTGATGAAGGTGCCAAGAACAATGAAGA
AAGCCCCACAGCCACTGTTGCTGAGCAGGGAGAGGATATTACCTCCAAAAAAGACAGGGGAGTATTAAAGATTGTCAAAAGAGTGGGGAATGGT
GAGGAAACGCCGATGATTGGAGACAAACTTTATGTCCATTACAAAGGAAAATTGTCAAATGGAAAGAAGTTTGATTCCAGTCATGATAGAAATG
AACCATTTCTCTTTAGTCTTGGCAAAGGCCAAGTCATCAACGCATGGGACATTGGGGTGGCTACCATGAAGAAAGGAGAGATATGCCATTTACT
GTGCAAACCAGAATATCCATATGGCTCGGCTGGCAGTCTCCCTAAAATTCCCTCGAATGCAACTCTCTTTTTTGAGATTGAGCTCCTTGATTTC
AAAGGAGAGGATTGGAATTTGAGATGGAGGCATTATCCGGAGACCAAACGGAAAGGAGAGGCATATTCAAATCCAAACGAAGGAGCAACAGTAG
AAATCCACCTGGAAGGCCGCTGTGGTGGAAGGATGTTTGACTGCAGAGATGTGGCATTCACTGTGGGCGAAGGAGAAGACCACGACATTCCAAT
TGGAATTGACAAAGCTCTGGAGAAAATGCAGCGGGAAGAACAATGTATTTTATATCTTGGACCAAGATATGGTTTTGGAGAGGCAGGGAACCCT
AAATTTGCCATTGAACCTAATGCTGAGCTTATATATGAAGTTACACTTAAGAGCTTCGAAAAGGCCAAAGAATCCTGGGAGATGGATACCAAAG
AAAAATTGGAGCAGGCTGCCATTGTCAAAGAGAAGGGAACCGTATACTTCAAGGGAGGCAAATACATGCAGGCGGTGATTCAGTATGGGAAGAT
AGTGTCCTGGTTAGAGATGGAATATGGTTTATCAGAAAAGCAATCGAAAGCTTCTGAATCATTTCTCCTTGCTGCCTTTCTCAACCTGGCCATG
TGCPACCTGAAGCTTAGAGAATACACCAAAGCTGTTGAATGCTGTGACAAGGCCCTTGGACTGGACAGTGCCAATCAGAAAGGCTTGTATAGGA
GGGGTGAAGCCCAGCTGCTCATGAACGAGTTTGAGTCAGCCAAGGGTGACTTTGAGAAAGTGCTGGAAGTAAACCCCCAGAATAAGGCTGCAAG
ACTGCAGATCTCCATGTGCCAGAAAAAGGCCAAGGAGCACAACGAGCGGGACCGCAGGATATACGCCAACATGTTCAAGAAGTTTGCAGAGCAG
GATGCCAAGGAAGAGGCCAATAAAGCAATGGGCAAGAAGACTTCAGAAGGGGTCACTAATGAAAAAGGAACAGACAGTCAAGCAATGGAAGAAG
AGAAACCTGAGGGCCACGTATGACGCCACGCCAAGGAGCGAAGAGTCCCAGTGAACTCGGCCCCTCCTCAATGGGCTTTCCCCCAACTCAGGAC
AGAACAGTGTTTAATGTAAAGTTTGTTATAGTCTATGTGATTCTGGAAGCAAATGGCAAAACCAGTAGCTTCCCAAAAACAGCCCCCCTGCTGC
TG
HUMAN SEQUENCE—CODING
ATGACTACTGATGAAGGTGCCAAGAACAATGAAGAAACCCCCACAGCCACTGTTGCTGAGCAGGGAGAGGATATTACCTCCAAAAAAGACAGGG
GAGTATTAAAGATTGTCAAAAGAGTGGGGAATGGTGAGGAAACGCCGATGATTGGAGACAAAGTTTATGTCCATTACAAAGGAAAATTGTCAAA
TGGAAAGAAGTTTGATTCCAGTCATGATAGAAATGAACCATTTGTCTTTAGTCTTGGCAAAGGCCAAGTCATCAAGGCATGGGACATTGGGGTC
GCTACCATGAAGAAAGGAGAGATATGCCATTTACTGTCCAAACCAGAATATGCATATGGCTCGCCTGGCAGTCTCCCTAAAGTTCCCTCGAATG
CAACTCTCTTTTTTGAGATTGAGCTCCTTGATTTCAAAGGAGAGGATTTATTTGAAZATGGAGGCATTATCCGGAGAACCAAACGGAAAGGAGA
GGGATATTCAAATCCAAACGAAGGAGCAACAGTAGAAATCCACCTGGAAGGCCGCTGTGGTGGAAGGATCTTTGACTGCAGAGATGTGGCATTC
ACTGTGGGCGAAGGAGAAGACCACGACATTCCAATTGGAATTGACAAAGCTCTGGAGAAAATGCAGCGGGAAGAACAATGTATTTTATATCTTG
GACCAAGATATGGTTTTGGAGAGGCAGGGAAGCCTAAATTTGGCATTGAACCTAATGCTGAGCTTATATATGAAGTTACACTTAAGAGCTTCGA
AAAGGCCAAAGAATCCTGGGAGATGGATACCAAAGAAAAATTGGAGCAGGCTCCCATTGTCAAAGAQAACGGAACCGTATACTTCAAGGGAGGC
AAATACATGCAGGCGGTGATTCAGTATGGGAAGATAGTGTCCTGGTTAGAGATGGAATATGGTTTATCAGAAAAGGAATCGAAAGCTTCTGAAT
CATTTCTCCTTGCTGCCTTTCTGAACCTGGCCATGTGCTACCTGAAGCTTAGAGAATACACCAAAGCTGTTGAATGCTGTGACAAGGCCCTTGG
ACTGGACAGTGCCAATCAGAAAGGCTTGTATAGGAGGGGTGAAGCCCAGCTGCTCATGAACGAGTTTGAGTCAGCCAAGCCTGACTTTGAGAAA
GTGCTGGAAGTAAACCCCCAGAATAAGGCTGCAAGACTGCAGATCTCCATGTGCCAGAAAAAGGCCAAGGAGCACAACGAGCGGGACCGCAGGA
TATACGCCAACATGTTCAAGAAGTTTGCAGAGCAGGATGCCAAGGAAGAGGCCAATAAAGCAATGGGCAAGAAGACTTCAGAAGGGGTCACTAA
TGAAAAAGGAACAGACAGTCAAGCAATGGAAGAAGAGAAACCTGAGGGCCACGTATGA

[0279] TABLE 15

MOUSE NOMENCLATURE

| | |
|---|---|
| ICSGNM | Rel |
| Celera | mCG8770 |

HUMAN NOMENCLATURE

| | |
|---|---|
| HGNC | REL |
| Celera | hCG15154 |

MOUSE SEQUENCE - GENOMIC
GTCCAAAAAAAGACTCCTTTTTCATATTAATAAACCATAGACAATAACAACAGTTATTAAACTATCAGGTAAGAATTGTATTCATAATTGTTCT
GGTTTAAGCATTCAAGAGATAGATGGAAAGGTGGAAGCACTAGAAGACTCGATGGTCATGCATTACAAGCAGCAGCCCAATGGGCTGGAGCGCC
AGAAGAAGACATTTGAGCCACAGTCTCTAGAAACTGTTCTCAGGATGAACTTAGAAAAGCTTTGAGCACAAGCAGTGCTGACTGAGGTGTATAT
ACCAAAGTGTCATACGCTATTTGACAGAAGGAAGGTCTTCTGTACTAAATAAAACAGGAGAGAAGAGACCATGCTCCACTGCCTTATGCCCATT
CAGGTCTAACCACTTTAACTGGAATGGCATATCCATGATCCCGCTAGAAAGCAGACACTAATGCTGGGACATAATCTCTCTCCATACTTAGAAC
AATGTTTAGCATGAAGTGTGTACTGAATCATGAATTGATTCAACAAACATTTATAGCTTGACTTTTATTTATATATTCATAATCCCATGACAAC
TTACAGAATTAATATGACTATGACAAACATGTATTCATTTTATTCAGTAAATCTAGAGATATAAAAGTACACTTTTATCAATTGTACTATTAGT
TCAAGCAAGCACCAAATAACACTGAAGGTGTACCTAAACACAACATGGGTATTCCCCATACCTAAGAGGAGGCAGGAGGATTGAGACTTTGAGG
TCAGCCTGAGATATACAATGAGACATTGGCTCAAATAAATAAATAAATACATAAATAAATATATTTACTATGAAAATGAAAATACTACCTGGAA
TATGAAAAAATAAAATTCAGTGTTAGATAAAAGTTATACTTGTCTTCAAGTTACATTAGATATCTAAATATAGGTCTTTCTTTTTTAGTCAATA
ATTTACAAAGCCCAGATTCCAGTTCATATTTTTCCATTCTCCCAATCTTCTAACTCCATGGTCATTCAGAATCTTTAACCTGAGAGGATATGGC
AGTCTCAGAATGTTCCCAGTTTCCTAGAACAGCTGCTTTCCACCCAGTCCTATTTCTGAGCTCAGTATAAAATCCCTGTAGCACAATGGCAAAA
TGCAAAACAAAAAAATATGTGCATCCTACATCCGCCATTTAGCGAGACACCCCCTTGCTTGATGCTTCCTCACTACTGAGGTTGTCAGGAAGTG
TAAACATTTCCCTAGAAACTGGAGGGAAAAAGAAAAAGTCCACTTGTGTTAAAGATTCTATGTCCAGTTAGAGTGTTACAGAAGAGACAGATTA
TCTTGGGCTATTTTTATTCTTCTTAAATATATATAAAATTAGCCGGGCAGTGGTGGAGCACAAAGTTAATTCCAGCACTCAGGAGGCAGAGGCA
GGCAGATCAGAGTTCAAGGCCAGCCTGGTCTACAGAATGCGTTCTGGGACAGCCAAGGTTACACAGAGAAACCCTGACTGGATAAACAAATGTA
TATATAATTCATTTTCCACGCCTGTGTCCAACCTAATATCCTCATAACTGTCTAAAACTTTAAAATGCAGTTTTAACAGACTTCTAATCTAAGA
AGACCCTCAGATAGCACCTGAGGCTTGCACCTCCCACTCTGTAACCAACAGACCAGATACAGATGAAGTACCTAAGGGTGTTCCGTGTCCTCAC
TTGTGAGATATGAGCTGGAATGAGTGGAGTCAGGAGTTCAGGTATGGCGGCACATCCTGCCCCACAAGTTCAACATTGGTTTGGGCCATAATGA
GTTCAAAGGTTAGTTACAGCAAGTCTCTGTCCAGGGAGGTCTGACAGATGGATCCCACGTGACCTCAGATGTCATTCCTGTTACAGAAATGAAG
TCACCCTGTGTCACACTTACAAGCGCTGCTATATGCACAAAACTGGCTTCGTCCTCTAGGCCTTACCTAGGATAAGCGTACAGACCGAAAGCCA
GAAGTTTCTGGATGGTTTACGACCTGCCTTTAGGAGTTCTCATGTACTCAAATTTAGTTTCTCTGGGACTTCACTAACCCAATGTTTCAGTTCC
TTTTAGCCTAGCTGAGTGGGGCCGCTTTCTCAAAGCTGTTTCTCACCTTGGGGACTGTCCCTCTTTCCTGCAGCTGACTTTACAAAGGGTGTGC
ACGCCCTCCTTGTTGGACAGGAGAGGTTACAGACAAAGCTGATGGCAGGGTTCAGGTGATGCCACTGTCTGAATTATCACTAATTTTTGAAGTA
GTCATACATATTTCTTGCTGTACCCAGAGCATCTCAGACTTGCACTTGTATCCAGTTCCTACCCCCAGTTCTCTAAATCCATTCAGTCAGGAAG
GTGGACAGCTTCTCCTCGATCCTTTCCTGAATATTTTCATTCCGTTTAAGTTTGACTTCATATGCTGGCTGGCCGAGGCTTATTTGCTTCACCA
CAGTGACTTCTACATCAAGTGTTTCTGCTTCCCACCTGGTTTTCCTCAGACGCAGCCTCTGTTACAGCGCTCCCTGGTTTAAGAGCTTGTCACA
TTTCTCTCTGGATACAACCTGTACAGTGGATCTCAGTCCCATATAACCGAAGGTATGGGTTGGGCCAACATAAATTTGGCAACAGTCAAAAGTT
TCTGAACTTTTAGAATCTTCTGAACTACATGAAATTAATTCAAATTAAACCTCATAAAGACTCTGCTATGTTTCCGAGGAACTCACCAGCTTTG
GATCACAGGAACTCCCTGCAGCCTTGTGTCTGGAACACACATGTGCTAGCCACAAACACATGCCATCACACAACGCCAGGCCAGTATCTGCAGC
CGAAACGGTTCGTACTTTACCTGTGCTTTGATTGTGTGGATGAGTTTTCTGTCCTTATAGAACATTATAGCACCTAATAGCATTCCTCAGCATT
TATGCATATAGTTAGTCTGTCTGTCTTTCTTTCTTTCTTTCTTTCTTTCTTTCTTTCTTTCTTTCTTTCTTCTTCCTTCCTTCCTTCCTTCCTT
CCTTCCTTCCTTCCTTCCCTCCTCCTCCTCCTCCTCCTCCTCCTCCTCCTCCTTCTTCTTCATCTTCTTCTTCTTCTTTTTTAATATTTGAGCT
GCTAATTTGAGTTTCATTTAAAGATCATTAAAGTAATTTTGATCTTGTTTAGGATCAGAATTTCTAACAATTTCTAAAACAGACCCACACACGC
TTCTGGTATTTTGCATCACATATTTATAAGGCAGCATTTTCAGCATTCAGTGTTCTGCCTGCATGCATGCCTTCAGGCCAGAAGAGGGCATCAA
ATCCCATTGCAGAGGGTTGCGAGCCACCATGTGGTTGCTGGGAATTGAACTCAGGACCTCTGGAAGAGCAGTCAGTACTCTTAACCACTGAGCC
ATCTCTCCAGCCCAAGAATTATTCTAAAATAATTTCTAAAATAGTTTCTCTGAGATTTGCTATTAATAAATGGTTTGTAAACCTCTTTGTGTGT
GTGTACACACATACATATATATACATATGTATATATATAATAAAAATATAATAAATACATTACTCAAAAAAAGAGCACCTCCCTCGTGAAACAA
AATACTCCATTGTCAATAGATTTTTTCCCTATTTCCTTTTTTTCCTAATCTAATATATACCCATATTAGTCAATATTAGCTACTTTACCAAACA
TAGTAGTTCAATAAAGGGGAGTTTTAAAAAATCTCTACCTTTTTTTTTTAACTGTCTGCTCTACACAATCACTCGGGCTCCTTCTGTCTCTTTT
CTCAGCCATCTCTAGAAGCCTGCTCAGCAAAGGGGATGGAATTACAATATAGGATCAACAGCTTGTAGTAGGATCGACAGGTTAGCTTAACATA
AAACAAAAGTGCTTTCTACAAGCCTCTGGCTGAGGGCAGGTGAAACATATCTCTGATGAAGAAACGCTGAATGCTTACGTGGCCATGCAGAGAC
CATGATGGTGAAGGCAGCTCTCCCAGAGGGAGGCTTAGTTGTTGACCCTGTGACCTCTCCAGATATGGGAAACTCAACTGCATAGCTGTTACAG
TGAGGAACTGTATTCAAACTCTCCTCTGTTAAATAAAATTAAAAGAAAAGGAAAAGGTGAGAGACCAAGTGCAGCAGAGCAACTAAGTTACAAG
TAGACATTTTGGTGAGAAGAGGTATTAAGATGAGGTCTCACTATATAGCCCAGGCTGGCCTCAAATTCACTGTGGAACCCCATCTGACTTCACC
TTATGGCAGTCCTGCCTTAGCCTCTCAAGCAACAACATCTCTGGCTAGCTGCCATCAAACCGAAGAGGTGGAATTATAACCAAGTTTCAGAATA
AACTCCAGTATAGACCTTCATAGGCTCAGAACTGTAGTGTTAACTCCTGAAAACAAATGAGTGTGTGTGTGTGGGGGGGGGGGTCACAGCTAGG
ACAAGGTGATTATTTACAATACTGACATTTCCAATCCATAGACATGGCATGTCTCTAGAAAGGAGTATTCTGGGCAGAGGGAGAAGAACGAAAG
CAGATAAATAAGAAACCATCTTGTTTATACATCTCAGGGTCTATAGAGCAGTTCAAAATGTATAAAATATAAGATATAGATTGTAAGAAATGAG
GCATGGCCTCCTGGAAGCAGCCAGACTATGGAAGAGTTTGGAAGCCATGTATTTGAACCCAAGGACGGTTTTAAATTGCAAATTTGGTGTGGCT
TGATGTGTATCCCCACAGGTAACTGGGGCAGCAATATATTCGAATATATTTTTAAAGGGGACAGAATTAAAAAACACTTAGAACACTCCAGTAG
TTTAGAAGAAACCTAACAAAGATGTCCCAATGATGATGGCAGTCAAAATAAAGAAGAGGCATAGCTGTTGGCATAACTCAGTGGCAGCCTTAGC
ATGCTTATGGTCCATATGTGCCCTAGGATAGCTATGGGGCAACCCAACACAAAACCATGAACACTTAAAACAGCATGAGCAGATTGTTTTTGCA
AGTTTTTTTTTTTCAATCTACCTATGCTTTTCCCAAATGTGAACTTTATAGGTGACAGTGTATCATAACAATGTCAAAAGACTGTACATTTCTC
CAAGCCTTAAATTTAACCCCTAGCAACAGAAGAAGAAGAAGGATTCATCACAATAGACTATATGGTGAATGGATACTGTAAGGTAGGCTGAGGT
GATAGGAGGGCCAGTCATGGCTCTCAGTCTGCAGAGATATCTCAGCAAGTAAAGTGCTTGCTGAACAAGCATGAGGAGCAGAGTTTGGACCCTC
AAGAGAAGCCAGATGCAAGTCTGTAATTCCAGAGTGCCTTACTTCAGCTAGAGTAAAGGGTACAGAGCCAAAACAAAGAGGCCATCTTCCATCC
CACACTTACACAGGTGGTTCTCAACATGTAGATTGTAACTCCTGAGGGTGGGGGTGGGAGGTCGGGGGTCAAATGCTCCTTTTACAGAGGTCAC
ATATCAGATATACTGTACATCAGATATACTGTACCATGATTCATAACTAGCAAATTACAATTATGAAGTAGTAATGAAAATAATTTTATAGTTG
GGGTCACCACAACCTGAGAAACTGTATTAAGTGTCACAGCATTAGGAAGGTTGAGAACCACTGCTTTAATAAAGTCTTTTAGAAACAAGTGAGT
AGTCAATGCTCTTTAGCAAAGGCAACGCCTACATTCCTTCCTTGGTACAGCAGAGGTATCCTGTTCTAGCACCATCTGCACACTAAAGCTCCAC
CCTGGTACCATTCACTTCCTTTACTACCTAGTCCTGACTTTACCCTGCACGATGAATGGCCTGGGAACCCAACTGCCATGCCAGAGACTGAAGT
GCTCACTGATAGTTGTGTTTGTTTGCTCCTTCTGCATTTTCAGTCTTACTCTGTAGCCCACATTGGCCTGAAACTTGTAACAATCCTGTTCCAG
TCTCCTAAGTGCTAGGATTATAGCTATGAGCCAATAAGCTTGCTTCTCATTTTCCTTTAGCAATTTCTGTTTCCCAATCTCTTTGGAGGCTAAG
GCAGTATATGCTGTCCTGGTGTGCAGTAATAGTAAGGCAGACTGTGCCTGGCGCACATTCATCTTTCACTTGTCCTCCTTTTCCCTCCCTTGGT
AAGGCAGCCTTAAAGGTGTTAGACATTTGTTATAGGCACGTGTGGCAGAAACATGGACAGACATATTTGTCTTTCTATAATCTCAGAATGTACT
GAGTAAAAATAAATCCACAACCTACATCAGTTTTGTTGGCTAGAGTTTCCCAAATCTCCAGCAGACAGTTGGGAATCAGTTCTTTTAACTGTAA
TTATTAGCATTAATTCTCAGACCCACAGTATATACATGTTGTGTGTATATATGCACATATGTAACAGGATAAATGATGTCTAAGAGAGGCTACA
GAATTCTGAGGCTTTCCTGAAGTCAAAGAAAGAAAGCAGATACAAGCAACAGGAAGAGTCTGCATGCATTGGACTAGAAGTCTTACAAACTGCA
GGCATGGACCGGTTCACATCAAATACCAGTCCAAGTGACAGGACATTTCCAGGGTCAGTTTGATGTGAGCCAAGTGTCACCTGCCGGAGTCTCT
TTGCTTATGCTGGAGACTGAGGCAAGGGCAAAAGGAGTGCTTGATATAACAATTATCCTATATGAGGCTTATGATAGGTAGCGGGGACAATTGT
CATACCTGTCATGTTTTGGTCTTGGGGCACTACTTCTTTTCTAGTCCCAGGTCAGGGGATGGATTACATGTAACATGTCAGTTCATGTGTGCTG
TGCTTCTGATTACCATTTGATATATTTAGCTCTTGGTTTATGTTTCACACTGTGCTGGCAGATAATGATTGTTTGCTTGTGCAAGCAAGATATA
GACTCATTCTTTCTTGGCACTCATACTCAAAACAGAGTAACTCTGGTCATGGTTGTTGCTTTGTAAAATGGAATAACTCAAGGCAAGTATGGTG
GTTTGAATGAGAACACTCCCATGGGCTCATATAGTTTAACTTGGTCTAAAGTAGGTGGAACTATTTGGGAAGGATTAGGAGGTGTGTCACTGTG
GGTAGGCTCTGATGTTTCAAAAGCCATTCCCTGTCAGCTTTCTGACTTGTGGTTGTTGTCTCAAGATGTAAGCTCCCAGCTAGTGCTCCAGTGC
TCTGGCTTTCATGCTCCCCACCAAGATGGCCATGAACTAACCCTCTGAAACCATGAGCCCTCAAATTAAATGCGTTCTTTTACAAATTGCCTTG
GTCATTCCTTTGTTTTATGACTGTAATAGAAAAGTTACTGAGGTCACTAGGCATAGCCTAAAAGGTGATATTCCACATCATAGACCTGGTCAGA
GCAGTCCCAGCCCATTCTCTCAGCATTAGTATGCAGTATGCAAGGTGCCTGGATCACCCCTGAAAGGGAGCCAGAGGTTGTTACTGATAGCCCG
CGCACACTATAAGTCCACACCCTGCATCAGCTAATACTCCATTTCTGTTTTCTTTGACACTCTTCTAAAAGTTTATACCTACCACATCCATCAT
TCTCTCCTCAACCTGCTTCAATTTGGCTTTTATAATGATCCTTTTAAAGGCACACTTCTCAAGTCACAAATGTCCTCCATTCTTTATCTATTTC
ATAGACAGGGTCTCCCAAAATAGCCTAGGCTATTCTTGAACTTCAGAATGTCTGGCATGAGCCTGCCTAGTCCTGGGATTACTGGAAAGAGCTA
TGCCACCCAATTTAATGACCTCCATTTTGCCATACTCATTTAGAGTTCATTCAGAAAAGAATCCTCAACTGTTTCACTTCTAGCAGCTGGCCCT
GCCATCAAACATGCCTGTCACCATGTCTTCTGTACAAACACTTGTCTAAATCACCTTTCTAAAATTTCCATCATGGCAACAGTGCCCCACCCTC
ACCCCTAGGTAGCATATACTAACAGTGTACCATACCAGCCAGGGTAAGTCTTCAAATGTACTGCATCAACTGCATGACTAAAGTTTCCAGTAGC
AACCACTGACTCAGCTCAAACATGGCCTCTACAGAATGTCCTTCTAGAGAGCCCAGTTGGTTTCTACTACCCCCACTACCTTATTTTCTTTATA
GAAATGCAGTGACATCAAGACTTATGCATGCTTGTGTTTTGAGACAGACTCCCTCATAGCTCAGGCTGGCTTTATAAACTCATTATATAGTGGA
GGATGACCTAGAACCCCTGCTGGTCCTACCTCCACCTCCCAAATGCTGGGATTACAGACATGCCACCCAGTACTAAAATTACCACGTGTTAGTC
TCTGTAAACCCCAATGACAAGCAGCCTTATCAGGTGTACAGTGACACCTTCCCCTAGCACAAGGTCTAAAAATATCCATGAGAATTTCAACCTC
CTATTTACTTTTTCTTTGAATAAAGACAGTAAGTAGAAACTATGTCATTCAGATATGGTTGAGTTAAAAGCTGAAGTATGCCTGCATTCATGTG
TGTGTGTGTATTGGTGTGTTCAGTGTTTTGTGGCTCATCCTATCTTCAAAGTTATGATTCTGTGGTCTTGACCTCTGGAGCGCTGAACATAGTT
CACCCTGCTAATTGTTTTATTTTATTTTATATCTTTGTGACTTGTTTATGATTGTGTTTAACTAAAAACACAACTGCTATTTATACTCTTTGAG
AAGACAATTTGGAACTAGCAGATTTTAATTATTTCCTTCACTTTGGGGGAGTTGTATAACAGGATGAATTTTTTATGACAGGATAGTATATATT
TTAATTATCCAACCCCCCCCCCCCACACACACACACACACTTTGGCGTTCTTTGAAGCGCATGTAGAGGTAAGAGGACAACTTTTGGAAGTTGA
TTCTGTCCTTCCATGGATCAAACTCAATTTGTCAGGCTTGGTAGCAAGCGCAATTATTCTCTAAGCTATCTTGTTGGCCATGCAAGATGATATT
CTCTATTTCCCCTCCATTACTTGTTTTAGTCAGTAAATGACTGGAGAACGTAAGAGGTGGAGCCAGATAACCCTGAGTTATTTCTGTTGTTGAG
ACAGTCCACCTACCTCAGCCTCCCGCGTGCTGGGAGTGCAGTGCGCTAAACGGGGCTGGATAATCTTAAGCTTAAATCGTGCAATTCCTTTCTA
GAACTCTAAAGTATGGACAAGCTACTCAGCTTCTCCAAACCCCAATCAACCCTAATACTCGTGTATACAATGACATGCTAATACATCATAGACT
AAGAGAACAGGTGCGTATTAGCAACTGAAGGCAAACAAGATTCCGCCTGACCTGTCAAAGCACCAAAGTTCGGTCCAGGCCTCAGGCCGTGGGT
ATCTCGGCCAATCTCTGGACGTCGTGTACATTTATACAGAATGGGGTTAGCGGCCTCGCAGTGCAGCTGAAAAACTTTGGTAGGTAAAAGACGT
AATGTAGATATAGAGGGAAAATAAGGCTGCGGGGGTCCCCGTATGCAAATCTGCGCCTTACTGCCGAACGCGGGCGCTGGCGCTTCCGCACTTC
CCCTCCAGAGCACCCGGACAACTCTCTGGCGCGGGGGCGGAGATTTGCATGTGCGAAATCGGGAAGAGGGGGAACCACCGGTCGAAAACCCCGG
GCGGGCCTCGGGCGGCCAAGGAGCGCGCCCGGTGCACCGCCCGGCCCGCCTCCGGCCGCTCGGCCAGCATGACGTCACGAACACGCCCCTCGGC
TTTAAGCGGCGCTCTCAAGGACTCTGGAGGAGGGGGATTTCTCAGGGACCGACGGCTTCTCACGCGCGGAGTCGTCGCTGCGCGCCCTCACGGA
GCTCCCGGCGCGAGCGTGCAGGCTGTGGTGGCTCTGGAGGAAGTAAGCGCACTGGCCCGCGCGGGGTCGCGCGCCCGCCGCGAGGCTCCGCCCC
CCGCCCCGGGTAGGCGGTGGCGCGAGTGACGTAAGCAGCGGGAAATCCCCCCCCCTCCCCCCACGTTCCGCCGGGCGGTCCGCCCCGCCCCCTG
CCCCTGCCGCGGCATCCTGGCAAGGCGACGCCAGGACACTAGTGACCGGAGCGCGAAGATTCGGGGGTGGGAAGGTGTGAGCCGCAAACCCAGA
GGAGCCGGGAAAGAAGAGGAGGCCCGGGGGTGGTCCGAGGACAGGCGTCCCGGCTGCGGAGGCTGCTCAGCCTCCTCACTGGTTGGCTGACTGA
CGGGCTAGCTGGCTGACTGCCTGCCTGACCGACTGCCTGGCTGACTGACTCACTGACTGACTGACTGGCTGCCTTGCAGCCTCGGGCCGGACGC
TGGAAGCTGCAGCGAGCGGCGCGCGGAGCCGAGCCATGGCCTCGAGTGAGTACCGGGGCGAGCACTCGCGGGTCACGGGGAGGAGCTGTCGGGG
GCTCCGTTTGGGGTTAGGACGGTCTGCCTTTCAAGTCTTCTCATCTGGCAAATTGTCAGCCGTTTGAAAAGTTGCCCGCTCCGGGGTTTGCGTG
TGAAATCAAAGCGGCGCACTGTAATCTGATCTTCTCCTAATAGCCAGAACCTTCGAAATTCCCAACGGTGTGCTTTTAGGATCACAGGGGGTAA
TCTCAGTAAAGGAGAGCAGAGAAGCCTCGCGTTTAAAGACTCAGTGGTATGGAGACCCAGTTTTACATTTTTGAACAAAAAAGAGGAACCTCCG
GACCTCAGACGAGCTTTCTTTTTTTAAGTCCAATCGTGCTAGCGGCTGACACTGGTACAGAATGTGGCGTGGCTGTGAAAGTCCTCAGTGGCGT
TTTAATTCGTTCCAAGCGAAAACACTACCCCCGCCCCCACGAGCTAAAGATGTTGCTTGTCTAATTTACCGTGTAGAGACCTCGATCCCTTCAA
CCCCCAACCCCAAACCTGCACGCGCGTTTTGTTAGCAGCAAGAGGACGAGATTTGATTATACTTTAAAGTAACTGGTAGGGTTGAAAATGTCAT
CGTTTAATGTCAGTGTTTTATCTGCCACTAGTAAGTTTTGGATCATCTGCTTTGAGGGGGACATTTATAAGAAACAGTTTACAGGACAGGGGAG
TTTAGTATGACAGTCGTACTATATGTAAAGCAAGCACTTGAAGCAGCTGAGATGGTGGTGGGAGCTAAAAATGACACCTTCTGTCTGTAGCAGG
ACGCTGACCCTTATCTTCCCAGTGACCCTCAGTAGAAGGCAGCCGACGTCTGGCAGAGAAGAGGAAGTAGAAAGCTTAGTGAACTCTTTAAGAG
TTGAGCAGAACAATATCATAACTCCTGCTGTAAAGGAAACTGGGGTGTTTCACATGACACTTGATTTCAGTTTGTCTGTGGTTTTCATGAGAAA
ACAAGTGTAGTTTAAAATATTTCAACTTTCTCTTTACCCATTTAAATGAAGCCAGGCTTTCAGATGCTCTAGTAAATTTGTAAATTTAACTCAT
GTTCTGATTAGAAGCACAAAAAGGCTTTAAGTATTTAATTCATTGGTAATCAGAAAGAGATTTTTGTATGACATTTGTAAAGAGTGGCAAGCTT
TGTTAAAACAGTTCTGTCCTTGTCTACCTAATAGAATCTTATTATATAGTGTATGAATGCAATACTTGAATTTTTTTCAACAGAAAAGTCATTT
ATTAAAGAACTGTAAGACAGATATGATTTTAAAATGTAATACAATTGCAATTTGCCTAAGGACATATATTTTGTGCTGTTATAGAAATGATTCC
AAAAGTTAAAGTGGGGAACTTTTTAAAAGAAATGGCAAGTTTTAAGGATTTAGAAGTTGGGTTGGGCTTGCCCAGCTTCTGTGAAGCCCTGGGT
TCAGTTCTCAGTACTGTCAGAGAAAAAAAAAAAATCCCAACAAACATAGAAAACAAATCTGCAAGTTGTAGTATCATTATCTTCTTGCTTTTTG
ATCTTTTATCAAGGGTTGCACTAAATGAGACTACTTAAAATACACCATGTCATTTAAATTGTAATTCTGCTATTTGAAGTTTCTAGGCAAAAAT
ATAGTTTAAAGGAGTCTGGGTACCTTATATCAGTTATAAAGACCAAATAGAGAAAAATTATGAAATAAATTTAAAATTCCCATTCCCTTTGAAA
TACTAATTTAAAAGCAACAAAACTGTTTAACTTATGATTATGTAATTTAGATCCTTTTTTTTGCAATATAGTACTGAAACCTAGGAAAGTATTC
ATATTGATTACCAAGCATTGAGATCATTTGTTCATTCCTCTCCGATGTCATATGTAAATAGGTATGTGTAATTGAATAGGTGGTGCTTATAAAT
GTAAAGTGTCGTAGATAATAATCTCCTGGGCAGAATTATATAAATGTTGTGAAAAGACAGGATTTTATATGATGATACTAATTATTGTTCAGGT
AAATTAGCAAGTTAAGACTTCCTAGCTAGCCATTAAGCTGTTTTTCATTGCCTTTTAAACAATACTGTGCTTTGTTCTAGCTTTTTGATAAGAT
TAATTATAGCAGGCAACATGGGAAAAAAATGTTCCTGATCAAAGATCTGCATATTTAAGCAGTCATTATTCAAACAATTGTATTCTATTTAAGT
TAGCTGTCTTGTGTCCATATCTAAAATTTTCACTATTTCNNNNNNNNNNNNNNNNNNNNNTGGAGGGAGGTGCACAGTTGCCTTGTAAGATACA
TACTATTTTACTAATGATTAAGATTGTCTTTGGTGAAATGTACTTTAAAATTTAGAAAGTTTGTATTTAGTCACATTTTTTTTCTTTAACATGA
TTCTGCTGTGTCACATAACAGGAAGTATAGGAAGGAATTATTTTTGTGGACCTTACTACTCACCAACTTTTTGTATGAATTTCAAGATAACCTT
TTCCCCCCCCCCAATAAAAGTGAACATAGCTGTGTGACAACTTACACTTTAATAATAGAGCTGGAAGTTAGGAGTGGCCAGCTAAAACAAATGA
CTTCCTTTTTTAAGAAGGAAGACTGTTCACAAATACAGATGTTTCAGAAACGCAGCACATGAAAAAGAGATAAAGGTGTTGTAATAGTAGGTGA
TGTAACAACAAGAATGAATGGAGAAAATGGTGGATACAGGGTATATGTGGTCTCTTTCTCAATTTTTTTGTTTCAATTTTCTCCCATATGGGTT
CTCTGCATGATTGTGTTTATGGGCACATGAGCTGAATATTGCAGAGGAAGATATATTTTCAAAAAAAGTGTTCCTTTGAAATTTGTACTTAATT
GGATCTCTTGTATTTTTAAGTCTGAAATCTTTTTTTTTTTAAAGATTTATTTATTTATTATATGTAAGTACACTGTAGCTGTCTTCAGACACTC
CAGAAGAGGGAGTCAGATCTCATTACGGATGATTGTGAGCCACCATGTGGTTGCTGGGATTTGAACTTGGGACCTTTGGAAGAGCAGTCGGGTG
CTCTTACCCACTGAGCCATCTCACCAGCCCATCTGAAATCTTAATAGAGATGATTTGGCCCTGCCATGAATTTTTTATTTGAGGAAAGACTTTT
AAACATTACTTTTGTATTCTAGTAGGTAAAAACCTCTCAGGACTGGTTTTTAGTTTGTTGTTTGTTTTGTTTTTCCCGTATCCACAGCAGTGAT
ATCTTACTGCAAACCGTTTACACGGCTTTGGTTGGCCTTGTGATGAATACTCAGCAGAAAGTTCTGGATGGAGATGATATTTGGAAGTGTATGA
TTATTAGCTGCTTGCTCCTTTGCGTTCCAGGCAAAAGCTGTTTCCCTAGGATTTCATGAGAAAGAAGCACACTAGTCAGCTCTTCTCAACCATG
CTTACTATGACTGCCATTTCTGTGCTGCCTTGTAAATAACAAGGCTCAGATATGTTTTATATAAAGGGAAATCAAAGGCCATCTTTTGAATGTT
TTCTTTGTTTCAGTTGAATGAGGTTGGTTGGTTGGTTGGTTGGTTGGTTGGGTGACTGGGAGAGTGACAACTTGCCAGACATTTTTTGCCTGTC
TTATCCATAATTATGTCTATGCTTGGATCCGAGCATTGGGTTACTTCCCTGAACACTTTGCATTGTTGTTTTTACTTCTTCATGTCTTAGGCAG
TTGGTCTTCAGAGTATTCAGATTAATTTGGGATGTTTCTGCAGAAATCTGTCTGCACTTTATTCTTGAAGTGTTTCATTTCTCCTCAGATCTCT
GTGAGGTTAGATAGTGGTTTGGCTTCTGATATACAGCCCCAGAACAAACTCTGTTCTAGGGACTTTGAATCTAAATATTCACCTTATATTCTTA
AGATAGTTGTATTTGTTTTAGGTTATAGGTTATGGCCATATCTGTTATTGAGGTTTTATGCTTAACAACTTTTTTCTTGTTACATAAATTTAAA
AGTTGATTTTATTTTGAAACTTGGTTGTAATTACACCTCTGCAGTTTAAAGACACCTATGACTTTTATTCTTTAAAAAAATAATCTCATGGAAG
AGTTTCACGCTATCATTCTTTCCCTAGCTCTTCTGTGGCTATGGACCCAGAAGACATACATCCATTTGGTAGTCAGATTTGTTAGTTCCTTGGA
TTATGACTGCCTCACTGCTATATTATTAAAAATTGTTACTGTACTGTGTATATATGTGTTTATGACAGGCATAGTGGTCCATTCCTTCAATCCC
AGCACTTGGAGGCAGAGGCAGGCAGAGCTCTGAATTCAAGGCCATTCTGCTTTATAAAGCAAGTTACAGGCCATCCAGACCATACAATGAGGCT
GTCTCAAAAAAAAAAAACAATAATAATAATCCTTTTCCTCAAAATTTTATATTATTTTGAAGTTTTAGCATCTCTAAAATGAACAGCAGTTCTC
TTTATGAAGAGTAAAGTTAAGAGAATCTGTGAGAAATACCTATGTGTGTGTTTTAATTGGTATTATAATTAATTATATGTAACATATTCTCATT
GTGTACTTAATTATGGCTTCTCATTCTAGCAATAGTATTTTTGTTGATATACCTATTTTATATATAATTGTGGCAATTGATCTATTTTTAATGT
TTCTAATGTGAAAGAAATTTCTAATTCCTTTTTAATCTTAAAATCTAATTTTTAATTTTTTTAATCTTAAAACTCATACTTGAGATTTTAAATA
GGCTCAGTGTTTTCAAATAGCATTCTCTTGCACCTAAATGCAAATGAAATCATAACTATAGTGCAAGCATTTTAGTTATAATTCAAAACTTATT
CTAGTAGATATTAGCAATTCAAAATTTATAAAAATATATTTAAAAAATATGGAGACCAATCCAGACTTTACACTTGTCCTGGTTTAAAGAAAAT
ACCTTAATTAAATTGTTTAGAAACAACTTTGAAAACATTTCTGTGCTTTTAAAACTCATAGTGACTTTCTGTAACCTTAGGTAAGAGTATTTGT
TTTCCCTAAGGTTCCTTGGTTTATAATTTTTCCTTCGTACTCTCCATAGAGGACTACAGTTTTTAATTTTTCATCTTCAAGAGGAATGGCATTG
TAAAACAGTACCAAGGAAGAACATGATTGGATCATTCTACTGACACATGATACCAATGATTTCCTAGCTAGGAGGGCTACAGTTAAATCAGAAT
ATGAACACATATGAGGAAGCATGAAGGTGTAGTTGTTCTGGTACCTACAAAGTACTGGGTTTTTTTTTCCAGTTATTGAGGAATATAATAAGGA
GGGACTGATAATCATTAATATAGTCCTTTAATTTTTGAATCACTGACACAAAAGAGCTTTGGAATTTTAATTTTCACACAGATATTAATTTAGG
ACATTAATAAGTAATACAATTTCTGCCATTCAGTAACTTGAAGAAGTAAAACATGTAGTTTCATTTCAATAACAAAGCTGGGTATGGTGGTAGA
AATCTGTAGTCGTGGTATTTGGAAGATCGGAAGTTCAAGGAAAGCCTCAAGCTACACATTGAGTGAGGCCTGCGTAGATTACTTGAGAGCCTGT
CTCAAAAAAGGATGTAGCTCAATTGATAGAGTAGCTGCCCAGCCTTGAGGAGCCCTGATTGGACCCAGCATTGTACAAAGTCTGTGGTAGTGGA
GCCTATAATTTCAACACTAGGAAAGTGGAGGCCAGAGGCTTAGAAGTTCAAGATCAGCCTAGGCTACAAAACAAGTTAGAGGTTAGCCCTAGAT
AGATAAGACACTGTCTCAAAACATAAAGAACACAATAGTTAATTTTCCCTAAACTAATGGTTTTTTTGGGGGGGGGGTTGGTTTTGTTTTGTTT
TGTTTTGCTTTGTTTGGAATAATTGCTCTTAAAAATTACCTTGATTGTTTGTTTACAGGACGGAAAAGTTATTCCCAATAGGGAATGTAGACTA
TAAATTCTGAAATTTGTTTTTGAGTGAGACTTGTTATCAATGAAGAGTTCCTTTTTATTGTTGGTATATTTTTGATTTTTTGTTTTTTGAGACA
GGGTTTCTCTGTGTATCCCTGGCTGTCCTGGAACTCTCTGTAGTCCAGGCTGGCCTCAAAAATCAGAGATCCACCTGCCTCTGCCTTCCCAGTG
CCAGGACTAAAGTTGTGCCCAACTATTTCCTGGCTCAATGGAGAATTTCTACAAGAAGAAAAATAAATATAAATGCATGAAATTACATGACAAT
ATTTAGGTAATTCTTATTACTTTAAGAAATTTTAAAAATACTTAGTCTTAGGTCCTTTGTATTTCATAGTTTTATAAATACACTCACTGGTTTA
AAGAAATGTGTAACTTGCTTTGAATAACCCTGCAATGTTTTTTATATTTCTCCTTTAAAAAAAATCCAGCTATCATTAATGATATCATTAATTA
TCAATTTCTCACCAGAACACCTTTTAAGTAGTGGGCTGGGATTTATTTGACCATTTAGTTCAACCATATAAGTTCTTTAAGATGCCACTGAAAA
AAATCATGTTGAATTTAACACATTTGAAGAGAAAGGTACATTCTCTTAAGTAGTCCTACAAGAATGCATAGGCATATAAGATATTTAAAATTAC
GATGTAATTTTTACATATACAGTGATACACACATTGTAAAATATTCATTTGCCTTATATTTCCAGTAATTACTATGGACTTTGTTGGATTAAAG
TAGTTTTCTCTTTTGTGTGTGTGTGTGTGTGTGTGTGTGTGTGTGTGTGTGTGTTTATTGTTTATTTGTGTTCTTTTGTTTTGTTTCTGGTGGT
ACTGAGTTTGTACCCAGATCCTTCAGCCTGCTTTCTGTCATTTGAATAAGCAAATGAGTGATAGATTCAAATGCAAGAGGTCTAAATCAGAATG
AATAAAATTAAAGGTAGCAGCAATAATTTATTGAAAAACCACATGGCCACAATTGATTCTCCCCTTTGCCCCCACCCCCTGTGTGTCTCTCTCA
CAGGGACCTAGTACTCACTCATTAGGCTAGTCTGGCAAGCCAGTGACTGCCAAGGTTCCTCCTATCTCCTCTCCAGCACTGGCTTACAGGGATA
TGCTACCATGCCTGGCTGTTTTTATGGATGCTGGGGCTTGAACTCAGGATCTTGTACTTGAATGTCACGCATTTTTCTGACTGGGCTGTTTTCC
CAGACTCTTACCACTAGTGGTTTATTTCTCTTTGATGTTTAGATACCAAAATATGTCAGTTTTGTTTTTTGAAATAATCTTTTTTCTTTATAAC
AGCTATATTTCAGACATATCCACATTTTTGCTCATATGACAATACTCTCCACTTACCTATAGTCTGATTTTTTTCAGTTCATTTATTTGTAATC
AACTGTAGTCCAAAATGTTAAAAGAAAAATTTCATAAAGTTTTAAATAACTTGTTTTAGTCATTTGTTGTAATTCTATTATATTGTTGTTAACC
TCTTATATGTGTGTATGTATGTATGTGTGTGTATGTATGTATGTGTGTGTGTGTTTATAGGATAAAATGTATGTGCATGTATGTAAGTCGTCTT
AAACTGATTCTTTTCTTTTCTTTTTTTTTTTTTAGTCTAACCACTACCATCAGAATTCTTTCTCTAGAAAGCTAATCTGAGCCTTTGATTTCCT
GAATAAAAGCATTGATTGCTTTTCACATATACAACAAAATCCATATTACTGGATGTGCTTGGACTTTTGGTTCTCTTTCTAAGAGTGGTAGTGC
ACTCTACTTCCATTGGTGGTTGATGTCATGGACAATTACTTCCCTTTTTCTAAAATGTCTTTCCACTCTTGTTTTGTTACATTTTCCCTCTCTT
AAACTGTTAGATTCCTCTTTTGTTCTTATTATAACTTTCTGCAGAATTTTGTTAGTATTTCCCCCTTCTGTACACTAACATCATTGCGATGACT
AGTATAGTCATTGCTTGCTGTTGGGTATAGGGTCCTTCCGAGTAGCAGCTGTGATAGTGAGGGTGTCACTTTCTTCAAGAGAGCAACATCTGAA
GTAATAGTAGTACCATTTACTGATTACCACTTGTATGTGTGATACTTGGAAGAATTTAACACATATTTTACAGAGCATATTAATAATAAGATAT
TATTAAACACAGGGTCTTGCTAGACTCTTGCTGGATCTTATTTTGTTTTGATAGTAGAACTCAGGAGGCAAAAAAATCACTGCAAGTTCATGGT
CAATTGGGTCTACATATACATAGTAAATTCTACAAGGAAAAGAAAAAGTGCCCAGTTTGGAATAGACCATGTCCCATGCTATACTAAAAACTCA
TTGTTTCACCATTTCTGAAGCTTGTTTACATTCTACAGGATAAGCCTTAGTGAAATGGGTTTATGGTTTGGGGAATTTATACTCCTGAAGTAAA
ATCACATGGTTACCTGCCTTAACATGAAAACACAGTTATTTTATGGACCTTCTATTTCCATGACTTGGCTAAAGGGTGAAGATGCATATATTTT
TAAAGTTTTATTGACATATACTTAAAACTCATTATAATATAATAATTATATATAAACTTTTTTTTTAGTTTTTTTTTTTTTTTGATATGAGATC
TCATTATGTAGCCCTGCTGGCCTGGAACTTGCTATATAGTTAAGACTGGTCTTGAACTCACAGAGATCAGCCTACCTCTATTAAGGCCTGGCCC
TCCATACTTGGAAATACCATCCTTCAAACTTTCTCATCTACCAAGTTTAGACAAATAGTGATCACCTTTTTTTTCATTATAGATTAGCTTACAT
TTCTGGAGTTTCATGTAAATGGATCATATAGTATGTGCTTCTTTTACTCAACACACTTACTTTGGTAGTTATATTTATAGTGTTTTATCCTAAG
GGTACGTATGTTGAATTACATTTGTTATGGAAGGTAAATGACTTTGTTATCTCCACATTATGTGTTACATTTTGGAGAAGATTTAGATGGGACC
GATTTGAAAGTTCAGTTGAGCTTAAAGTCAGTATACTGTTTTAGTATATTGTGTACAGATCCTTTGATAATCCAGACTCGCCTATGCAAGGACG
TAAGTCCACTTTAATTTTTAATGAGTGTTCTTTCATGCAGTGATTGTCTAATTTAAAATAAAGCAGTTAAGTACATTTTACTCAGTTTTGGAAT
ATAATGTACTTCTGAATACTATTTTCTTCACCTTTCTTGGGAAATGTTGGAAGAAAAACTTTATAATTGCCCTCATGTGGACAGGTAACTCTAA
GAGTTGTTATCTCACAACTTAATACACTCATTAGGTATAGATATTAAGCAATAAAGAACTCACCAGTTATGTGTTAATACTACATAGGAATTTA
GTTTGTATAAGGAAATGTTATCTTCATCATTTAATCTTTGAAGATTACATTTTACTTTGTTATTTAATGTTGGGAAGGAAAAAAGATCTTTGTT
TTTTTTAAAAAAAAATATATCCATTAATGTCTATTATATTACTATTCTAATCTCATTGCACTGTTCTTTTTAAAATTTTCAGGTGGATATAATC
CATACGTAGAAATAATTGAACAGCCAAGGCAGAGGGGAATGCGGTTTAGATACAAGTGTGAAGGGCGATCAGCAGGTAGCATCCCAGGGGAGCG
CAGCACAGACAACAACCGGACATACCCGTCTGTCCAGGTAATGGCCTTTCTTCAGTATCTCACTTTTAAGGGTTCAGTTTGTTTTACTGTTTTC
TAGACAGGGTTTCTCTGTGTGGTCCTGGCTGTCCTGGAACTCATTCTGTATAGACAAGACTGGTCAGAGATCTCCCTGCCTCTGCCTCCCAAGT
TAAGGGTGTGCATTACCACCACCTGGCAGAAGACTCAGTTTAACAGTCTTTTGCAACCCCCTTTCTTCTTTGCATTTGCTCTCCAATAGCTAGA
TGTGTAGGGTTATCTCTTAAAGGAATCTTTCCTGCTTTTAAAGTTCATGTAGTAATATAACTGCAGTGATTCACAGTGCTTACTGTACACTGAC
AGCTTTGGATCGGATCCCTCTTGTAACACAAAGCATTTAATGAGGAAAAAGCATTCTGTACGTATACTGGTCAAGGGAATTATTGTATAAGTTA
AAGATGGATTTGGAACATTTTTTGACCTTTTAGTATAGAGGGTATTAATAACTTTCCCCTTCTTTTTTTCATACCTTTATGCTTACCTCCCAAA
CTCTGAGTTATTAACATCATTTAAAGTATCGTTCCTTTTCTGTGTGTGTAAAGTGCTCTTTTGTGTGTGTGAATGTGGACACTCGGGTACCTTA
GTGTCCATGTGGGAGTCAGGACAGCATTCGGCAGGTTGGCGTCTTATTCTTGTGTTTTGAGACAGGGTGTCTTTGCTGTTTTTCCACTCTATCT
ATACACCTGGTCCACTAGTTTCCAGGGTTCTTCTCTTTCTGACGCTCATCTCCTGATAGGAGTGCTGCTACTACAGGCTCAAGCTACTGGTCTC
TTTATCTTTATTGACAGTACTAGGGATTGAACCTAGAATATTAGGAATGATAAACAAGTGTTCTACCACTGTTATATATCCCTAGCCTGTGAAA
ACAGTGTTTTTGGTTGAAAGTGAATTTAGCAAATATACCATTTTTATAATGTATGTTTATATTTGATATTTATAAATTACATTTCCTTTTAATT
TTTATAATCTATTTATTCATTTATTCATGTTTAGTGTTTTCAAACAAAATTGTTAGCCCCAAACTTGTAGTGATCTTGCCTCTTGCCTCTGTTT
CTTCATACTGGAATTACAGACATGTGCAATCATGCCTAGCTAATTTTTATCGTTTAAGTGCCAATTAAAATCCTTAATAGCGAGTTGGTCTGGT
AGTACATGACAAGCATTGGGAAGCATAAACAGGTAGATATTGAGTTGTGGACTACTTACCTATATAAGAAGTTCCAGGCCAGACTGGGCTATTT
AAACAAGACCTTGTCTCTACAAACAAATGAAAACAAAGTTAATAGAAGTCAGGGGCAGTGTCACCCATCAAAATCTCATCTACTTGGGAGGCTG
TGGTGGGTAGATGCCTTGGGCCTAGAAACTTGTATGGATAAAAGGAAGACTATCTCAAAATGGAGTTTGAAATGTCCTTAATTTTTCACCAATA
GATCTGAAATTACTGTTTTGTAACTAGCTTATTATTTACAGTTTATTTTATTGAGCCTAAGAAGAATTACAAAATTGCCAAGTTATATATAGAT
TCCCAAATTTCTGTTTTTATATTTTTAACTGATACAGATGCTTAAATTGTACATTTTAATGGGATGTCATGTAATATATAATACATGTATACAT
CATGTAATGCTTCAATCAAGTTAAACATACTTAGCTCCTCAAACATTTATCATTCCTTGTGGAAACATTCAAAGTCCTCCTAGTTTTTTGAAAT
ATATAGTGTATTTGTACAATAATATGCCTAAAGGCTTTTGTCCTATCTACTGTACGAACTTAATTTTAAGAAAATATTTTATATATGCACACAC
ATACATATATATATATGTATATGAATGTGTGAGTATGTGTGTACATGTGTGTGCACGCATAGGCCCATGGAGGCCAGAAGAGAGTATCAGATCC
CTTGAAGCTGGAGTTACAGGCAATTGTGAACTGTGTACCATGAATTCTGCGGTCTGAACTCTGGTCCTCTGGAAGATCAGCAAGTGCTTTTAGC
TGCTGAGCTATCACTCCAGGCCCATAACTTCATGTTTTTAAATCACACTATTTGCAATAATATTGCTTTGAATTATCTAAATTCTTTCTAAGTG
TTCAAAGACATACAATGAAAAGTTAATTTAAAATTCTTTTTTTCCAACATTGTGAGTCATTTTTGGCTTCTCTTAAAAAAATTGTGTTCCTAAA
GCATTCCAGAGCAGTGTGTCTTAACTCCTTACTCCCCTACTCCAGTTCATCCTGGTAGACCTGGAAGTAACACATGCAGCTCAGAGCACAGTTT
GCTGCTGTCTACAGGGTGCAGCCAGACACACAACCAGTTCTGGAGATGGTTCTTCAGATAAATTTTGAGGAGATGTTTCAGATACTTTTGAAAG
AAGGTGCCTCTGAAGAGGCAGGTCTTGCTCTCACTCCTTTGATGGTCACACCCTCCACCAAGATCCCAGCTTTCCCTTCACCTGTGGCGTGGGT
ACAGTCAGGGATGAATTTCAAAACCTGCTTCTATTTTTACTTCCTTTACCACAAAGTTTTTTGTTGGCTATGTGGTCTTAGAGGACTCAGGCTT
TTTTTTTTTTTTTTTTTTTGACACTTCTCTCTCTCTCTCTCTGTCTCTCTGTCTCTCTCTCTGTCTCTCTCTCTCTCTCTCTCTGTGTGTGTGT
GTGTGTGTGTGTGTGTGTGTGTGTGTGTGTGTGTGTTCTCTCCTTATGCTACTGTGAGATACAGAGATTGAAGTTGTTAGTGGCAAATGCCTTT
ACCTGCCGCACCATCTTACCAGCCCTTAGTTCTTCTTAAATCATCTTACTTTATTCATCAAAATTATATGTACAGTTTGTATTTTTTCTGTCCC
AACAAGTCTTTGCTGTAGTAATATATAATCAGGGGTTTCTACTCTGCCTTGGATCATTTAGTTCCCAAATTAAAAACTTAAAACCTTTATATTT
ATGTTAAGCCTTTAAAGCACTAGAGCTGGGCAGATATCTACCCTCTAAGTTATTAGTATCTACTTTCTGAGTTACAACTTGACATGCTATGCCT
GGGCCACTCTTACTGCAATTGGCCAGCCCTTATGGCCATGCTTTCATGATTCACCTACCCCATGGTATCTTTTCCTCTCTCCACCTTCTCCTTC
TTCCCTCATGGTCTCCTGCCTCAGTCCCCACGCCCAGGAACCAAAACTTTACCCATCTCTCTTCTGCCCAGCTCTAGGCTATCTGCATCTTTAT
TGACCAATCAGGGATAAGTTGGGGGTCAAGGTTATATTTGGTGTACATGAGGATCTTCCATCTCCTGAAGCAACCAGGGCCAGTTTTTAGCATT
ACAATACATAGCAACAGACCAAACCTCAACAGTTTTAAGTTAAGGAGCAAGTTTTGTACAAAAAAGGCTGGTAAATATAAGAACTATTTATTTT
GGATTTTTGAGGCAGGGTCTCTTTGTGTTGCCCTGGCTGTCCTGGAACTCACTCTGTAGACCAGGCTGGCCTTGAACTCACAGAGATCTGTCTG
CCTCTGCCTCCCAAACTCTGGGATTAAAAGTGCACCATAATGCCTGGCCTGCTTACCTGCTTTAAAAGGAAAATAAACAGATGATAAAGCTAGA
TAAAATAAGGGCAGAAAGAAACATTTTAGGAATTGAAAGATAAGTTTTCCCAGCTGATATATTCTCTGAAAACTTTAATCTCAAGTAAACTGCT
GACTATTTGAATTTTATTGCATGCTGACTACATTATATAAATTGAACTTAAATTAATGGATCAATTCTTTTTATTTGTTTGCTTTTTAAAAGGG
GCATTATTGTAGGTAGCCCTGGCTGGCCTTGAACTTGTGCTGATCCTGCTCAGCCTTCCAAATGCTGGGGCTATAGGCATATGCTACAATACCT
ACCTATTGTTAACAAGATATACATACAGACTGTATATTTAATTTCCCTTTTCAGATTATGAACTACTATGGAAAAGGAAAAATAAGAATTACAT
TAGTAACAAAGAATGATCCATATAAGCCTCATCCTCATGATTTAGTTGGAAAAGATTGCAGAGATGGATACTATGAAGCAGAATTTGGACCAGA
ACGCAGACCTTTGTTGTAAGTATACAGTGACAGAAACCTTCAGCAATAGGACAAAGATATAATTTTAGTTTATAGCAAAATAATTCTGTATTTA
ACTTACTGTAACATGTACATTACATTTTAATTACACTTTGTTACCTGTGGGGAGGACACACGTGCTTGGGGTGCATGTGGAGGTCAGAGTTGGC
TCAGCTGGTGGAGTCGGTTCTCTTCTCCACCACGTGGACCCTGAGGATTAAACTCAGGTTGCCAGACACCTTTACCCACTGAGCCATCTCACCA
ACCTGATATTAAAATTTTTGTTCTTACCACTTGCATTCATCCTTTATTAATAGGTACGCACATGATAGTTAGTAGAAATTCTTCCTAATGGCAC
CTAGACTGGGCTCAAACTTACTATGTAGAATGTCTTTGTACTTACCTTCCTGCCTCCAACTCCCAAGTCCTGACATTAGAGGTAACACCACCCT
GTCTGGCTCAGTAGGAGTATTTTTTATGTTATTATTTTGTTTTCCTTTGTTGTTCTTTTGTTTTTTTCAAAACAATTTCTCTGTGTAGCCCTCA
CTGTCTTGGAACTTGCTCTGTACACCAGGCTGGCCTCAAACTCAACCTGCCTCTGCCTCCCCAGTGCTGGGACTAAAGGCGTGCCCTACCTCTG
CCTGGCTTCCCCCCCCCCCCTTAAGACAGAGTTTCCTGTAGGCTAGGGTTGCCTTCCAGAGGATTCAGATACTGAGAATTAGAGGTGTGAGATC
ATAGCCTTAAGACCCTGCCTCCAGTTTATGAGGATTGAACGTAAGACTTTATACATGTTAGGCTAGAAATCTGCCAACATATCCACCACTTCTT
ATTTTTTAACTTTTGACTGTTTTGAGACAGAATCTCACTGTGTAGCTCAGCTTAGCTTCCAACGTGTAGTGATCCTCCTTCCTCAGCCTCCAGA
GCACCGGGGTTATAAGTAAGCATGCATTACCATGTCTGGATAGGTATACCTCTTTATATTGTTGAAAGTAAGAAAACATATGTTGTGATTAATC
TCTTCGTTCTGTATGTTCTACAAAATAATTGTGACTATCCTGTAATACACAGACATAATCTCCAAAAAGTTCTTCTTATTAATAGTAATGACAC
AAAACACAAAAAGCCCTAGAAGTACACACTTGACAAGAAATCTTAACGCCTGCATGTCTTGATCTTCCAGCAGTGTTTCAAACTTTCAGTCAGT
CATTTGTGTCTTGAATACTCTTTCTTGATTTCTGTGAAGACAAACTTGTTGTAACCTGTAGTTTTCTGGCTGTTGTTCGATGGCCCCTGGTTTT
TATCTTTTGTCCCACTCTAGTGATATATATATATATATTAGTTGTTGGGGTTTTTGTTTGTTTGTTCGTTTTTGAAACAGGGTTTCCTCTGTAT
AGCCCTAGATGTCCTGGAACTTACTCTTTAGACCAAGTTGGTCTTGAACTCAGAGATCTACCTGCCTTTGCCTCCCAAGTACTAGGTCTAAAGG
TGTATGCCTCCACTGTCCAGCTTAGTGCCTCTGATCTTATACTGCAGTCAGGAGAGTGTTCCTTCAGTCTCTGTTCACAGTGTTCTTTCAGAGA
GATGTGATTTACTTAGTTCACAAGACTTGAGCTAGCAGGGTTGTTGTTTGTTTGTTTGTTTTTAAATTCTAGTAGTATCATAGGCCTTGTAAGC
CCTTTGGACTCTTATGTCCTACTCAGTGGCAGGAAAACATCCACAAAAGATATGTGAGTGAATGAACATGCATGTGTTCCAATACAAACTTTAT
TTGCAAAATGAGCAGTATGCTGAATTTGGCCCATGATTTAGAGTTTGCCAACCGTCCATTCCAGACACTAAGTTCCATGAAGAGAGGAAAATGT
ATCTCCATTCCCTTTGGGAGTTTTAGTGCACAATTGGAACTCCAGAACGTGTTGAATGACTATGAAAAAGTACATTGAGTGAATGATCAGACGC
CCCATGATTCTTAGCTTCCTTAAGTCAGTGCTTTCGCCTCTTTCCCTTCTTTCCTTTCTTTAGTACTGGGCTGATTCCAGGGTATGATGTGCTA
GACAGGTACCACACTACTGAGCTAACCCTCTGTGCATACCCGATGAGGTTATTCAGATGAAAGAAAACCAAGTCGTGTATGTTAGGGTGAAGAA
TTATTTTGTTGCAGGATTTCAAGAAAGGATTAAGAATTGACAATTTATTTTTTGTTATTGGAGGAGGAGGAGGAAGGAAGTGGCAAAGTTATTT
TAGGTGCTAATGAAGTCACAGGTGTGAGTGCCAAGCATGAAGCATGAACATACAGTAATAGGAACATGGAGTAAGGCAAACCAGGCAGCCTCTG
GCTGCAAGTGCCAAGTGAAGTTTGAAGAAACAGTGATGTTCTTATCATTTGAGTTTTGCTTCCTTATTCACACCCACCCATCTCAGATGATGTC
ATGGTTTTTCCATGTGGGAACAAGTATGACTGGATGGTGGTAGGGGAGTTCCCCCATCATCATTTGTATTACACATATGCAAATGAGTAATATT
TGTAGCTATTGAGAAGTTTTCCATAAATGACCCTTTGAAACTGTTGCTAAATATTGTTAGTATTAACCCTCTCTAATAAAAATACTTCATTTCC
TATATTGTAATCATATAACATGGCATAAAGTGTATTCTGTTGTCAATGAAAAAAATTGAGGCCAGGCTAAAGTACACAGCAAGACCTTGTACAG
CTGTGTTTTCATATATTTCATGGTACATTTTTTAGTGATGAGCTAGGCAGGCATCATAACTGAGCAGAGGGAATCAAATATAAGAAGGCTAGCC
CGGTTCCTCATCAGAGTGGATAACTGTGTGTAAGTGGGGTTACAGGTGCTCAGCTCTAACAGATTGTCTCTGTGCCCAAGGAGTGCTAGCAAAC
CTCTGAAATGTTCATGAAACCAGAAGAGCTGATGCTCAGCTCTGATCACCTCACTCTTAAGTTTGGTAATGTATATATATAATTTTTAAAATGC
ACTAGCCACTTCTATACATTTTTTAAAAATACATAGGTTAACACTGCTATAAGTTTAGCAAAACATACCTGCATATTTCAGGGTCCAGCTGTCT
TTGTACCTTTTGATACACCAATTTTAGTAAATTGATCATGAGTTTGTTTGGAAGGTGAAACTTTGCTTCTTGATGGTTTTGTTTGTTTTACTTG
TAATGTTTATCTACCTTGGTATATTTGACTAAGCCTATTGGCAAAATGTAATTATAAAATAGTATATTTGACAGTTATATAATACTCTATATAC
TTTTTTAGTTTGGGACAGGTTTTCCCATAATCCAGGGTAGCCTAAAAGTTGCTAGGTAACCAAGGTACCACTTGCCTCCATCTCCTAGTGCTAG
AATTAAAGGCATGTCACCATGTGCTCTATTTTTCTATTAACAATTCTCTTAGGCAGGCCTATGTTTGTTTCTCTTGTATCTTCTTTATTATCAC
AGTCAGAAACAGGATCTGTGACCTAGAGGTTGGTGTGGCAGAGAGCTGACTTTCTGAGTATGTTTGATTTTTGTCATACTTTTGTTTAACTATG
ATGTGATTTTGAAAGTTTCATTTTTTGCTTTTAGTTTTCAAAATTTGGGTATTCGGTGTGTAAAGAAAAAGGAAGTGAAAGAAGCTATTATTTT
AAGGATTAGTGCAGGAATCAATCCTTTCAATGGTAAGTGCTTTGTTATAATTTCTACTATTTGTATTATCAGTGGACTGTGATTTCTATTTATA
GTATAATTCTACTTGTTGACTTGTATTTAAGTGGAAGCCTCCCCTCCCTTGTTGTTTATTTTGACGTGAGGTCTTTATATGTAGCTCTGGCTGC
TCTGTTACTCACTACGTACTCCAGATTGGCCATGAACTCCTAGCAATCCATCCTCATTGGCCCCCAGGTTCTGGGATTGTAGATGTGAGCCACC
ATGCTCAGCTAAAACAGAAAACCCCAAAACTGAAACCTTCTCCAAGTGTTTTTGATTCTTTCAATATGCTTCTTCTTTATGCCAGTCTACCAAC
CATCAGGATCACCCTTCTTTCTGAGTGTTGGATGGACACTATGTTATAAAGTATTTTCCTCCTTTACCACCACTGTTATTTAATAGTGATCTCA
TACAGCCCAGCCAGCTTGAATTGCTGCTTTGCTGAGGCCGGCCTTGGGCTCTTGATCTTCACCTTCTAAGTTGTCATTACAGGCAAGAGCTCCA
TACCTGGCCACTCAAAATATTTTTTAGACTTCTCTTGATTTTTTGTATGAATGTTTTGCTTGCATGTATGTATGTGTACCACAAATATAGCTGG
AGGTCAGATCTCTCAGAACTTGAGTTGCAAATGTATGTCACATCTGCAAGATGTGACTTGGAATTAAACCCAGGTCCTCTGCAAGAACAACAAG
TACTCTTAGGTACTAAGGCATCTCTTCAGCCCTTCAAAATATTTTTGTAGTCTGTTTTTGTATTGGTAAAATAAATCTTACTGTTTAGTACATT
TTATTGTGAATAGCACTTACTAAGTGGTTTGTTTTTATTTTATTGTTTTGGGGACAAAGCCTTACCACATTAAAAAAGGCTAATTTCAGATGCC
TTGTCCTCCTATCTCAAGTCTCCCTCCTGCTGGGGTTATAGACACATACCACCATTTATAGTTTAAGCATTTGATGTTTGTTGTTGTTTTTGTT
TCTGTTTCTGCTTTTGAGACAGGGTCTCATGTATTCTGCACTGGTCTCAAACTCACTATGTAGCCAAGAATGACCTTGAATTTTCTGATCCCCT
GCTCCACCTCCCAGTACTGGGATCCTTCACATTCATCATAACACTTGGCTTATGAATCATTGGAGATTAAACTCAAGGTTTTGTGTGTGCTAAA
GAAGCACTCTGCCAAATGAGCTGCTTCCTTGGCCTTTATGACACTCTTGGCTATGGCATCTGGTACCTTTAGCATTCTATATTGTTAAGTAGGT
AAATGATTCCTAAGTGTATGCAGTTATTCTATGTACCTATTTTAGTAGTTTTGTTTGCCTAGGCATGGTAGAACACACGTGTAATTCAAGCTAC
TTGAGATTGCATCCTTAAACTTACTGTGTAGCTAGGGGTAACCTTGAATTCTGTTTGAGCCTTTAGTCATTTGAAGGAAGGTAATAACCAATTG
TATGTATCCTATCTTCAGTGTTTAGTGAAAATACAAAGATGTAGCAGATACACCCATTCTGAGTGCATAAGACTTTGCCTGATAGGATAGAAGT
GGCACTTGTAGGTGACAGTCATGTAAGATTAAAACCTAAGTACAGGGGGCTGGTGAGATGGCTCAGCGGTTAAGAGCACTGACTGATCTTCCCG
GGGTCCTGAGTTCAAATCCCAGCAACCACATGGTGGCTCACAACCATCTGTAATGAGATCTGAAGACAGCTAAAGTGTACTTACATATAATAAA
TAAATAAAATCTTAAAAAAAAAAAAACCTAAGTACAGATCTGGTGCTGCGCTGACTGAGAGAGAAGGGATATTTTTTTGTATTCCAGGATAAAG
TTTAGGCTTTATAGAAAATTAGTTCCGGGTAGGGAATATGACCAAGTAAGTGAAGTAAGCATGAAGATCTGAGTTCAATCTCAGCATCCCTTTG
ACAAGAGCTAGGTATTCTCAACACCAGGGAGGTAGCTCCAGGTGGAGTTCTGGAGCTGGCAAGGCTCAGTGGGAGACCCTGTCTCAAAAATACT
TAGTGCTGATACTTAGTGCTGATCTCTACGTCCTCACGTATGCTTATCTGTACATACTGTATACACACACAAAGCAGTTATTAATTGAATTTTC
AGCTTTTACTCTGATCCAGATATCCCTTGTGATTCCTGGTTGTCAGTAGTTTTTAACCATGTCGTACAGAGATGGGAATAATATTGATAAAATA
AAAACTGGTTTTCTACATACTGAAAAAATTCAAAGCAAAATATCCCAAATTATAATCTTTTGTGAAAATAGAATTTCTTGTCTTTGATAGAATC
ATGGGATGCTAAATACATTTATATTTTAGTTTATTAGCCATTTTATTTTTCTTTAATAAATCATTTTACTACTTTAAACTCTTATACTTGAATA
AATCCACCCAGATACAGTCTTTCATGTAACCTCAAGGCAAAGAAACATTTCCCCCACTCCCAAATTGTCTTTGATCTTTCTCAATCATTTCTTT
CCTTCCAGCTCTTGCCCCAGTCAACAGCTCATCTCCTTTTTGTCAGCACACCTAATTTTTCTAGGGTTTTATAGAAATGGAAGTATTCTTTTAT
ATTCTATATTCTTTCCTGCCTGGCTCCACTTGGTCTTACTGGTTTTGCAGTGTATATTGTTGGAAAATATAACCATAGTTTGTTCTTTATTGCT
GAGTATTTGTTCATTGTATGACTATACTACAACTTGTTTCTATTAACAGAAATTTATTTGTAAACTGTCAGGAGCACCTAGCCATTCATTGTTT
TTGTCTGTCTGTCTTTCTGTCTGTCTGTTTTGTTTTAATATTGATTACTCACTTTGAAATGAAGACACTGAAACCTTGAGCTCTTAAATTTATA
TTGCTATTAAATGAGACTTTCAGTAGTCCTGCACTCTTACTGCCTGTCCTGGTCCCAGCAACTGTGCTACTGTGATACAGGTGCTGCCCTCTTA
GCATTTTGAACCTCATATTTTCCCCTTGAACATGGTATGAGGGTGCGTACCTAGGTATGGAGGCAAAAGGACTGCCTCAGATGTTTGCCTCCAA
CATTTTCTGCCTCCCTTTTTTGAACTGGGGTTCTCATCTGCGGGCTTAGATGGCGACCAGTACCCTGCTTCTGCCTTCCTGGCACTGAGAATAT
TATCAGGAGCCTGACTACTACTGCACCTGGCTTCATTGCATGGGTTGGAGGGTTGAGCTCATACTTGCAAGGAAAGTACTTTACCGACTGAATC
ATCTCTCTCAGCCCCATTTTGACCTTTCTAGTTGTACAAGTATGTTTTCATAGACTCAAATGTTAGGCTTAAGAATGCTGATACTGGAATAAAT
TTCAGTGTTAGCATAACTCCTGAGACTATTTGACTGGCTTTGTGTGAGATATGTTTTTTTAAATAAGTTATCACCTGTAAGACTGGGGAATTTA
GCTAATTATTTTTCATATTTAATCTTTTAATTTTAATACTAGTGTCCTTTCCAAGTAAATTTTTCATGTAATTTAATGAATTTTATGTTTTTAA
AATATGGCATATATTAGTAACAATTTATTGCTATAGGCTTAAAATATTTCAAAACGCAGCAATATTTTVTTTTAGAAATGGGCTTCTTTTCAAA
TATCAATGCAAGAGACTATTGTACTATATTCTGTGGCAAGTTTTTGTATTTTTTTTTTCAGAACTGTAAAAATGCCCTGGTGTGCAGTTTGTTT
TTAAGCTGACTTGACTTACACATAAAGTTATATCATCTGATATCTTTTTCACATTGCATCTCTAAAATGCTGGTGCAATATGTTAATAAGTTAA
TATGACCCTCTGCTTCAAATTTCCATGCTATTATTTAGCTGTAAAATTTATTATTTAGACAAATAATGTCATCTCCTTAAAATCAATGTCTTAC
CTATAAGAACAGGGATGATGGTGATTTTTGCTAGATTTAGAACGTAATTACAGACTGGGCCAAGTGTTATGTTAAATGAAGTATGCATGTTTCC
CATTGTCTATAACTTGTATCCATATTTAAGATTTTTGATTTTGGTGGTCAGTTTATGATTCTGCCCTTAAGTTCCTAGTCCCTGGTATAGTCTC
TCTCTGAGCATGGCTACAGTCTGTTATATACTGTTAAATAGTAACTGTACAATAATGAAAACTGTTCTTGAGATTGAACCCCATCTTAGTTTTC
TGCAGACGTAGGTGCGGGTTAAGGTTATTGGATGTTGTGGGCAGAGAGAAAGACAGCAGGATTTTGGTAATAATAAAGTATTAGTATTATGTGT
TCTACATTCTAAATCTGAGATTGTACTGTTCAGTCCCTGAACAGCAGCTGCTGGACATTGAAGACTGCGACCTCAATGTGGTGAGGCTGTGTTT
TCAAGTTTTCCTTCCTGATGAACATGGTAACTTCACAACTGCTCTGCCTCCCATTGTTTCTAACCCAATTTATGACAACCGTAAGTGCTTTAAT
TTTCTTATGTCTGTACTTTTAGCTTGTTTCATTTCCTTAACTGCTGAAAAGTTTAAAGGATTTTTGCAATTTGAAAAGGAGTATGTTAGGTGGG
ATTGGTGGTTTGTGCATATAATTCTAGCAACCAGAAGGCTGAGGCAGGAGGATAAAGTTTGAAGGCATAATGGACTACACATTGAGACCTTGTC
TCAAGAAACAAGAAGAAGCCAGGGGTGGCGGTGCATGTCTTTAATCCCAGTACTCAGAGATAGAGATAGGCAGATCCCTGTGGGTTCAAGGCCA
TCCTTGTCTACCCTGTGATTTCCAGGATTACATAAAAAGATCCTGTCTCAGACAAAAAACAAACAAATAAACAAAGCACTGTTCATTATAGAAA
AAAAAACCCTCAAGCATATATACATATATAAGAAAGAAGAGCAAATCACCATTAGTCTCCTCCTAAATGGCCACTGTCCTCAAGCATACACTGT
AGTCCCTTTGAATAAGCACAGACACCACCATCTTCCTCATCAACCCCATTCACCCACTAAGTTTGGCAACTTAAAAAAAAAGATCAATGATATT
TTAAAAAAAAACAACTTTTTTTCAAGCCAGTAGTGGTAGTGCATGCCTATAATAATAGCACTTGGGAAGTCCAAGCAGGCAGATCAGGAGTTAA
GTTTTCCTTTACCATGTTTAAAAATGGGAATTCAAGACCCTACTGTGTCACATGGGATCCTTCCTCAATAGATAGAGACAGAAAATCCCAGAAC
TTTTCTCTTTGCAATGTATCTTGAACCTTTTTCAATCACTTTTTCTTTTCTTTTTTCTTTTTAAACACTGCTGGCATTTAACCAGGACATTGTA
CAGAGCTATACCCCAAACCCCACTTAGGTTTCCAGTAGCTGAATATTTATCTCCTTCCTTCCTTCCTTCCTTCCTTCCTTCCTTCCTTCCTTCC
TTCCTTCCTTCTTCCTTCCTTCTTCTTCCTTTCTTTGTGTTGCTTTATACTTTTTTCTTTTTCTTTTTTCTCAAGAAAGGGTTTCTCTGTGTAT
CAGTCCTGGTTGTCCTAAACTCACTGTAGATCAGGCTGGCCTTGAACCACAGAGATCCACCTGCCTCTACTTTTGCCTCTGCCTCCCAAGTGCT
GGTATTAAAGGCCAGTGTCACCTTGTTCAGAAGCATATTTTTTTATATGTCTATATATTAATTTTAAGAAATCATTAATATGGAGTATAAAAAA
TAAAAAAGATGACTTTTAAGAATCATATTTAAGAATATATTTGGTTTGTTTCCTTTTGTAAGCAAATTATACCAAAGTAGATATATTTATGTGT
GCATTTAAAGACAACTCTCTATGGATCATGTATCTGCCTGTTTATATGTGTGTGGTCAGAAGACAACTTACAGGACTTGGCTGTGCTCTTTCAT
CATGTGTTTCCCTGAGATCAAACTCAAGTTGTCAGGCTTTGCTGCCTTAACTATGTCACTGGCTCCTGAATGTTTATCTCTTATGCAAATATTT
CTGACATTTATTTTTAAAAGAATAACTTTTGACAGATACCTACATCAAAGGATATAGAAGTTTATTTGAAAAGATTTTAAAACTTTCCTCCAAA
ATATTTTGTGTATATACACACACATTCACCAGTAGTATATGCCACACCTGATTTGCATGTAGAATACTGGACCATAGGAGTATAGAGGTAGATT
ATTCTTAACAGAGAGCCTTGGGTACCTTTAAGAACTATCATAATAATATTCGGAAGATAAATGAGAACTGCATTGCCCTAGGGATATAGCCAGT
GATATAAAATGACTCATTTATTCACAGTGTGCCTTTACCAAGAAACAGGAGGAAGAGGCAAGAACTGCTCAAGTTAAAAGGCCAACTAGCCTGG
TGTACATAGCCATAAGTAACAAAGAGACTGTCTCAAAAGAGGTAGGAGTTGAGGGCTAGCAAGCACCTGAAGTTGTCCTCTGACCTCTTCCACA
CATATGCTGTGACATATGCTCACCTGGGCCTACATATAACCACACTCAGACATACTATAGTTATAATACATACATAACCACACTCAGACATACC
TCAGCATAGCTATAATACACACATAACTACACTCAGACATACCTCAGCATAGCTATAATACACACATAACTACACTCAGACATACCACAACATA
GCTATAATACACACAAAAAACATTTAGTTTCCTTTATCTATACATTAAAATTTTATCTATTCTCTAAATTATTTTCCTGAAATTCTTCCCCTTG
TACTTGTACTGGCTAGTTTTATGTCAACTGACACAAACTAGAGTCATCAGAGAGGGAACCTCAATTGAGAAATTCTCCTTGGAAGATCTGGATA
TAGGAAAACCTGTGGGGCATGTTCTTAATTAGTGACTCACAGGGGAGGGCCAAGTCCATGGTGGGTAGGGCCGCCCCTGGGCTGGTAGTTCTGG
GTTCTGTAAGAAAGCAGGCTGAGCAAGCCATGAAGAGCACTCCACTAAACAGCACCCATCCAGGGCCTCTGGATCGGTTCCGGCCTCCAGATTC
CTGCCCTCACTGCTCGTTTTCTCTTTTGATTTATTTGTTTTATTTATATCAGTACACAGTTGCTCTTTTCAGACATGCCAAAAAAAAAAAAAAA
TCATCCCGTTACAGATGATTGTAAACCATCATGTGGTCACTGGGAATTGAACTCAGGACCTATGGAAGAGCATCTGAACCCTCTCTCCCATCCA
CCCTCACTGCTTCTGATGATGCACTGTTACATGGAACTATGAGGGAAATAACCCTTTTCTCCTCAGGCGACTTTTGGTCATGGTGTTTCATCAC
AACAACTAACATTAACTAAGACAATGCCGAGACCCAATGTTTTTTTTTTTAATCCTTTGCATTTAGGTGCCCCAAATACTGCAGAATTAAGGAT
CTGCCGTGTGAACAAGAACTGTGGAAGTGTCAGGGGAGGAGATGAAATATTTCTGCTTTGTGACAAAGTTCAGAAAGGTATTTATCAGCTTTGT
TTAATTGAATTAGTAGTACATATTTGATTAATATATGTATTGTACCGTTTCCCCATTGTTATTATTCTTTGGCATCTTATTCACTAGATGATAT
AGAAGTTCGTTTTGTGTTGAATGACTGGGAAGCCAGAGGTGTTTTTTCACAAGCTGATGTACACCGCCAAGTAGCCATTGTTTTCAAGACTCCT
CCGTATTGCAAAGCTATACTGGAGCCTGTGACAGTGAAAATGCAGCTGCGGAGGCCTTCTGACCAGGAAGTTAGTGAGTCTATGGATTTCAGAT
ACCTGCCAGATGAAAAAGGTATGGCAAGTTGGGAGTAATGTGTATACGTGTGTGTGTGTGTGTGTGTGTGTGTGTGTGTGCTCACTAGAAACAG
CTATGTAGCTACAGATGGATCTTAGCTGAGTGTGGGGATTACAGCAGTGTGCCTTGTGCTGTCCCTGCTGCCTTTTTAAATGTGCTGCTAGGAA
TTGGACTTAGACTTTTATGTACACTAGCAAGTGATGAGCTGACCAAGTGACAGTCTCTGCTGAAGGACAGATCGTCTAAAGCTGATCATGCTTG
TAATATTGTAAAATAAACATTCGAGTGCAGTTTTATATCTTCAGAATCTGTATTTTTTTTCCCCTAGAAGTTTTCACTTGTGTGTTTTGGTTTG
GTTTGGGTTTTTTTTTTTTCTCCTACTCTTTGCATTTCTTAAGAGTTTGAATAATTTTAGAGTTCTTTTTTTTTTTTTTTTTTTTTTTTTGGTT
TTCCGAGACAGGGTTTCTCTGTGTAGCCCTGGCTGTCCTGGAACTCACTCTGTAGACCAGGCTGGCCTCGAACTCAGAAATCCACCTGCCTCCC
GAGTGCTGTTTCTCAACTGTTAGATTATATTTTCCATCTATATATGTATTTTTGAATTTATTTTCTGTACTTTTTATACCCTTTTATAGGTGGG
AAATTTGGTAATCATAAAGTTGTATCTATTTTGGTCCAATGTGTTAGTTCATGTTGACTTACAGTTATTTTTAGGATGAAAAATTATTATTTTA
AGCTTTTTAAAATTAAGAGTAAAGTGTCCTTTATAACTGGTACTGGATGTATTGTACAGTAGCATACTTCCAGCCTGTACTGTTCGCATGTATT
TTAAGCATTGCCACACTCTGATAAGGCGCTTGTTCCTGGTGCAGGAAGGAAGAATCCCATGACTTACCGCTTTCCCACTTTTCTTTCTTAATCA
GATGCATATGGCAATAAATCAAAGAAACAAAAAACAACTCTGATTTTTCAGAAACTGCTGCAAGATTGTGGTAAGAATATTTTGGATTGAGTTA
TAGTTAAGTAAATGTGTCTTATTTGCTTTATTCTGTTTTTAAATTTTTTAAGTGATAAGCTGTTTTTCAAATTACACTTAATAATAGAAAAACT
TATCATACCAGGTCACTTTACTGAGAAACCAAGAACTGCCCCTCTGGGATCAACTGGAGAAGGAAGATTCATCAAAAAAGGTATTTTATCCACT
TTTTAGGAATAACTGCTTTTTAAGTCTCTTTCTTTCCTACAATCCCGCACACTCTCACTATTGAGTGCAGCTAGGCTGTACCTCTGCAGGTTGT
GTTGGAACTAATTATATTTGAGGGATTTTATTGTTCAAGAAATTACATTTTGTCCACACACTGGTGCTTTTGCTTTTTTTTTTTTTTTTTTTTT
TTTTTTTTTTTGGTTTTTCGAGACAGGGTTTCTTTGTGTAGCCCTGGCTGTCCTAGAACTCACTCTGTAGACCAGGCTGGCCTCAAACTCAGAA
ATCCGCCTGTCTCTGCCTCCCGAGTGCTGGGATTAAAGGCGTGTGCAACCACTGCCTGGCTCATTGGTGCTTTTACTAATTTGACTGTTACCAT
GTAAGAAATGGCATGGATGTGGTAGGCACCTGTTTATAGCTGCTTACACTTTGAACAAGGCTGTGGCCCTTGGGGTCATGTACTGTCTCTCAGG
GCCACTTTAAAAGGGGTAGGACCACAGGCATGCTGACCACCTGCTGTCATGCCCAGACCTAGAGTCCCCTCTCTCTTCTGCTACAGCAACAGAG
CTGGACAGTTCCCACAGAGATTGCTTCCCACATAAACCTTAAAACTGTCTGGCCTTTTAGAGAGGATATTTTGCAATCCCCTAACAAACTCTCT
GTCTTGTACCCTTACATTGGTGCTTTATCCTGGTTTCTGTAGGGCTTGTGTAATATGTACATAAATGCGGGCACTGTCCCTCAGTTGTCTGTGG
TGGGGAATTTTGTGAGACCTTAGGTCATGTCTTAAGTGATAAAAGCTATGTGCAGTTGTCAGTCCTCTCCTTCTTCCCATTCTCCCTAAAAGCA
GAGACTAGAAGATCATTTTGGCCACTAGGTACCTGTTTGTTGAAATTCTAATATTTAAAAATGTGCCTATATGGCACAAGAAGCTGGATTTTCA
TATTTAACTGGAAGAAAATTACACATGCCAAAATAACTTTGAAAAACATTTTCATATATTTATATGGAAATTTGCATGTTACAGACTTTAGTTT
TGAATTCAAGTAATAATTTTATGCTTTAATTTATTTGATATGTGTCAGTGCCCTAGAAAGTTTTTAGTATGTTTTTATAATTTCAATTCAGAAA
TAATGCTTTATATCAATTTATTCATCTTACTCTATAAAATATATTTTTCCTCTACAGAATCAAACTTATTTTCTCATGGTACAGTTTTTACCAG
AAATGCCCAGGTCTTCAGGAGTTCCAGGGCAAGCTGAACCTTACTATTCTTCATGCGGGTCCATCTCGAGTGGATTGCCACATCACCCACCAGC
CATACCCTCAGTGGCCCATCAGCCTACAAGCTGGCCACCAGTGACTCACCCCACCTCACACCCAGTCAGTACAAATACCCTGAGTACTTTCTCA
GCGGGAACACTTTCCTCTAATTCACAAGGTATCCTTCCATTCCTAGAAGGGCCTGGTGTCAGCGACTTGAGTGCATCTAATTCGTGCCTTTATA
ATCCTGATGACCTAGCTAGAATGGAAACGCCATCCATGTCACCAACTGACTTATACAGTATCTCTGATGTCAACATGCTATCTACTCGGCCTCT
GAGTGTGATGGCACCCAGCACTGATGGCATGGGGGACACTGACAACCCAAGACTTGTGAGCATCAATCTTGAAAACCCCTCATGTAATGCCAGG
CTAGGCCCAAGAGACCTGAGACAACTACATCAGATGTCTCCTGCCAGTCTGTCCGCCGGGCACCAGCTCCAGTTCTGTTTTGTTTCACAGTCAG
ATGCATTTGATAGATCAAACTTCAGTTGTGTAGATAATGGCCTGATGAATGAGCCTGGACTATCAGATGACGCAAATAATCCTACCTTTGTTCA
GAGCAGTCACTATTCAAGTGTTAACACTCTGCAAAGTGAGCAACTGAGTGATCCCTTCACATATGGTTTTTTTAAAATATAAGTTGTAGGACTT
AAATAAGTATATAGAATATTAAGAGAAAGTTCAGAAGTCAAAACTTTAAAAGCCGCTACTGTTTCTTACTTTGAAAGATATGCCTAAAGTCCAC
GTGCTTGCTGTGAGTTGTTTTCTGTATTTCCCCAAGACAAACTATGTATCTTTGCTAATGTATTAGTTAAATGAGATGATATTTGCTTTCAAGC
AGATTTAAGGTGAAAAACGTGTAATGGCTATGCCATTGGGAAATAAACTCATTATTATTGTTGAGGCCCATAGGCCAAAGTGACCCCTAAGGGG
TTTTCTGAGGTTTCTTGGTATTTTTAGGGTGTGTGTGTGTTAAAGTAAGCTTTCAAGGCATGGAAGTTTTTTTTTTTTTCTATTTTCTATTATT
TAGGCTTTTATCTTTAAAGTTACATGTGAAATTAGCTTGATATCTGTATTTTCAAGAAAAGTTTTCTTGAGCCTTTTCTTTTTAGATGTTCTCA
TTCCGTTTGATCTCCTAAAGCCTGTCTGCTTCACTATAAAGAATCTAACCAGGTATTTTGGGCTCATGTCAGTAATTTCCCTACTTGAGATCGT
AAGTTCAAAACCTGCCTGAACTACATAGTAAGTTAAATACCAGCTTGAACAGCTTATGGAAATCTTGTCTCAGAAATAGAAAAGACCAAGGGTG
TGACTCAGTGGAGGAGCTTGCGTAACATTTGCTAGGCCCTGTGTTCAGCCCTATGAAGAAGAAAACAAAATAACAAGTTCGTTTTAGCTCAGTA
TATCCATACAGAGTTTTGAACTTCTCTCCCAGCCTTGTGTCTCCTTCAGCCTTCCCTGCTCTGTATATTGTCACGCCATGCTTCCCGTTGCTAA
GCACCTTGGTGCGCCTTTATTCTTCCTTTACCTCCCACATCTGTCTATTCCATCGTCAAACCCAGAAGGCCATTTCCTCAGTATGCATCCGAAG
CCCACCGTCTCCTTTGAACTTTTGTGTGAGACAGGCTGGCCTCAACCTGCTATGTAGCCAACGATGAACTCAGCCTTCAGTTCTCCTGCTCTGC
CTCGGGAGTGCTGGGATTACTAGTGTGCACCCCCCCCCCCACACACACACAGAGGTTTGTGTGGTGCTAGAGACAAAAACAGGTCTTTCCTGGG
AGAAGTATTCTCACAGTTGAGCTATCTGCTCAGCTCAGACCAACCACAAGCATTTTGTATTAGTAAAACTGATAAACCCAGACGCAGCTATTAG
AGAGCTCAACAGATGGTACTCACACAGTGACTTATTTCACAGTTTTTCCTCTAAGTTGAACTAAGGTCTGTCTACATCTGCATTTAGAGTATTT
TCAATTGACGTTTTATTTTCCAGTGCCTCTTACTGATCACATCATTCAGTTTATACCTTACAATGCATTTAGCAACATGTTTTTCCTTTCTCTA
TGGCTGCGTTTGTATTTCACATGGTTTTGAAAGAATTGGCCTTCTTTTCCAGATTCTGCTTGTGCACAGCGTCTCTCCTCCTGTCCCCATGTCA
CCAGTTAGTTCTTGCTTCCTTTGCATAAACAGAGTAAGTATCTTCTTGAGCTTAAAAGGAAAGGTTAAAAAATTTCCCCTCTAAATACCAAGAG
CCCTTCCCCCACAGTGCCCTGTCCTCCACATTTTGCCTCTTCCATCTTCTCACCTCTCGCTCGCTCCTTCACCTTCCATCTCTGTCTTTAGTTT
TCCCAGTTCCTTGTCTTCCTGTCAGCCTTTACCCTCCTTGTCTGTGCTGTCCATAGCCTGGCACCTCCTGAAGGACAGGATCCTGTGGGACGGG
GCTGTGTTGTCTGCACTCTCCTCAGCACCGCAGCTTCTCCTGCTGTGGGATGCTCTTGGTAAGCAGCTGCNNNNNNNNNNNNNNNNNNNNNNNN
NNNNNNNNNNNNNNNNNNNNNNNCTGGAAATCTTTATTCTTTTTCTTCAGTGAATATCTTTTCCATATGTTTAAGGTTTTTTTTTTTTTGATAC
CTTATTCCTCTTAGACGTTGTAGTTGGAACATGTTGAATTTATTCCCACAGGTGTCTATAGATGTAACCTATTCTGCCTGTGCTCCCAACACTT
AGCTTTTAACAGCAGGCTTCTCTGCAAGGCTTGGTCCTGCTGCTACAGCTGAGAGGTGCAGCTCTGCCTCTCTCTGCTCCTATATTACAGACCT
TCAGCGGATGGTAGTCAGTTAAGTGCTTCTCACTTATCTCTGGGACTCTAGCATTTGACGTACACTCTGGCCTAACTGGTGCTGTATAAATAGT
AGCTATTTATTAGAAAAGGGGGATAATTATAAAATCATATTTGAGGATATAGTTTTTAATGGGAAAGGTGCTTCACCCTGCAGGAAAAGTAATG
ATGCCAAGATAACCTGTCCTGTGAGACATACTTCTCTTCTGGTCGACTGCTGCTCTTCCTCCTCCTCTTCTTCCCCCTCCTCCTTCTTCTTCCT
CTTTCCTCCTCCTTCAAAAAACTATACAGACACTGGCACATGCTTCATGGTAGAGCATGGCCCTGTGTTTGATACCCAGAATTGCAACAACAAC
AACAAAATTATAAAACAAAAGTATAAAAACTACCCTGAGGCTCTTTGATACCCAAAGCTGTTCTCTTGGAAATCGTAGTACCACCAGTATAGTA
TCAGGTAGAAATCCTGCCTCTGTATGGAAGGTTATATCCTACATACCCCAGCGGTACCCCTTGACAGTTTACCATGCATAGACATGTAAGTAGC
CTGTATTCATAACATTTTTGTAACTGTATATTGTACAATGTACCCTGTTCCATGTAGAAAATAAGAGGGGAATGGTATTCAACTTTTGTTCTCA
AAGATATGTTTCTTTTCTTATGAAGAATCACATATATAGTCAACCACAGAAACATGGACAAACTTTAAGGTATAATTTGAAGAATTTTTGATTA
TATTAAAACAATGCAACCACTATGCTTGGGACCCCAGAAGTTCTCCGCACCTCCAAACCACTGTTCTGATTTTTGAGAGCCTGCTGACTTCCTA
TCCTTTTCTTTTGCTAATTAGTTCTCCATTTGGAAAACCTTAGTGTAGAGTAAGTCAGTTTGTTTTACTATGCTGTGTCGTGTTTCCACAGTCT
CAGAAAAACTATATTTTTGTGGAGAGACTTAAAATTGGTGATCCAGGTTGTCTAATTGTACCATATCAAGTTTTAATCATAAGTTGGAATATTG
AAAGTTTACCATAAGCTGTCAGACAGCATGCAACAAGATAAAGAAGAGAGACTGATTTTAGTCAGTTAGCCTAAATGGACCTGCTGGTCTTCAG
AAACTCAGGCAGAAAATCACAAGTTTAAGGCCTGCACAGTCTGCAGAGTGACTTCAAGGGAACAACTTTGTGAGCTCCTATCTCAAAATATAAA
GTGGAAAAAAGGGCGTCCTGAGCTATAGTTCAGTGATAGAGCACCTAGCATGTACAGCTAAAGACTCGGTGCCTAACTCCAAAGAACTAAAAAC
CTGGCCTTCCTACTTCCTAGGGTGTGGTTTGTGCTAAGAAATGTCTGAATAGAAACACCGAGTTAAAGATTGTGTTTCTCATGGGCCCTGATTA
GTCTATTATCCAAACATTCTTAACCACTTGATACCCAGAGAGAAAAATCACAGGGTGGATAAACACTTTGGGAGACCTATGAGAAAAGCAGGTT
TCTCTTTAGACAAACGTCTTTAAGTTGCCCCATATGGACCTGGCTCTCTCCGAGGACACTTTCTTATCAAGGGAAGTCAGTTACTGGCTTTACT
TTTGGTATTTTGTGACTTGATTTCTTTGTGTAAGTTGAGAGTCTTTGGGAGTACTTTAACTCCTGTGACGTTGCCACTGCAGGGTTTCAGGTCT
GTTCAGAGGTTGGATGTGCACGGAAGAGGATAGAATGCTTTTGTGTCTAGGAATGGAAAGCCCACGCTATTCTTGGAAGCCCAGCAGTGGGCCA
TAGGCATGAAGGTGCCACCCAAGTCTATCCAGTTTCATCCCTTGAATATTTAAGCCGAACATCATGGCAGAATTTAAACCTCAAGGTCAACAGT
GGATGAGATCAAATCTCAAAAGTGATCAGGTCTGATTGTTTTCATGTCTGTAGAAAGGCCGAAACCCACGCATGTCCTCATCATCTTTTGTCTT
TTTGGTTGGCTTTGGGGAGGTTGGGTTTGGTTTGGTTTGGTTTGGTTTGGTTTGGTTTGGTTTGGTTTGGTTTGGTTTGGTTTGGTTTTTTTCC
CAAACAGGGTTTCTCCGTGTTGCCCTGGCTGTCCTGGAACTCATGGAAGTCTGCTGCCTCCCAGACTTTATTTATTTTTTTTTTTAGCTTTCAG
AACTTTAAAGAATCACAAACAAGCCAGGTGGCACTAACACACTCCTTTAAAACCAGCACCCAGGGGGCAGAGGCAGGCAGATTTCTGTTAGTTT
GGGCTGGACACTTACTCTGTAGTAAGTGTCAGGCCAGATGGGGATACACAGAGAAAACTTGTCTCAAAAAACAACAAACCCAAAAACAAACCAA
TACAACAACAAAAGAATCACAAACAAAATAAAAAGAAATGTTGACTCCTCAACAAATTGAGTTTTTAGCAGCTTTATAATTTTTGGTAAAATAC
CAAATTTACCTATGGTAATTTTTTTCTAAGCTTCTTTAGCCAAAATGTAACTTCTCATGAGCTGGAGTAAAGTAAGGCTGAGGCATCTTGGGAT
AACTATGACTTCACTGCTCTTAGTGAAGCAGCCATAGTGATATATCCTGTAGCTCCAATACTTGGAAGGATGAGGCAGGAGGGATGCTTGAGGG
AGACCTCAGCTAGTCAGTCACCAGAGAACTTTAAAACACTATTGGCTATGGTTAATAGACCCCTACAAAACAGGGGAATCTTTGCTGTTGTTTT
GACCTTAAATTGAATATTGACCTGCCTCTCCCTTCTGAGTACTAGGATTGTAGGCATATGTCACCACACCTCACCTAATGTAAAATATTTAGAT
TTCAGAGAGGAGGGGAGCATCATGCTGGGATTGAACCCAGGGTCTCATACAAGTTATGGTTGGTGTTAGCTCTCTACCACTAAGTTGTCTGCAT
TTCAAACTGATTTTATATGCTTGATGATGAATGAATTTCAAGGCTCTGATGAAATTATTTTTTTTTAAGTTCTCAAGATACTGGTACTTAAGAA
GTTAAGCTTTGTATCAAGATGAAATATTTTTTTAATGTCAAGATGCCTTTTATTATATAGCATATTGTGTTACTTTTGTAATATCTTTGTATAC
TGTGATTTTTGTTGATGTAATAAATAGACCATTTTCTAAAAATGCTTGTTACAGTTTTGCTGTTTGCTTACGAAATATCAGATTTCTTTTTTTT
TTTGTTTTTTGTTTTTTACTTTTTCATTATAAGGGGTAGCTATTTGGGATTGTTTAGGAATAGTAGGCATTTTTATAAAATGTTCTCAGGATAC
AGTCTATCTGTAACTACCCTTTGAAATAGTAGTCTCAAGAAGTACTTGAAATGCCCTTTCAAGGAGTCTTGGGTTGGTTAGATGGTTAGTTGGT
TGGTTTTTGAGATAGGATTTCACTGGGGTTTTGGGCATGAACCACCATGCTGTTTTAACAAGGCACTGAGCATGGAATCTAGGGACTCATGCAT
GCTAAGCAAGCATTCTGCTGCCTGAGCTACATCTTCAGTCCTTGCAGGCTTTGGTCTTTATTATTTTGGAACAGGGTCAAGCTGGCCTAGATCT
TGCTGCATACTTCAAATTCATGGTCTTCCCACCTCTGCCATCTGAGTCCTAGGATTTCAGGTTGAGTCACCATTCCTGCCTCTCCAACTTCATT
CTGGTTTAAGCTCACTTCAATTGCTTGGTTTTTCTTCTGATTCCATACATATCTTTGATGGGTCTGCTAAAAATATCATTGGAATTATGATTGC
TTTTGTCATATTAACCCATCCTTGAAGTAATCCCACATGGTCACAGTGAGCTACCTTTTGAGTATGCTGTTCAGTTTGCCTTGATAGCATCTTA
AATTTTTTCATGTATGTTCATCAGGGGTACTGGCCTGAGTTTTGTCTTAATGATGTCTTTGTTGGATTCTGCCATCAGAATTTGGCAGCAATTC
CTCTCTGCTTGCTTTAGAAGTCTTGCTGCCAAGCCTGATGACCCAATTTACATCCCCAGAAACCACATGGTATTCAAGAACTAAACTTACTCCC
ACAAATTATCCTGACTTCCTTACAAATGCTGTATCACATATGGACATGCACATGATAAATATAAGAAATTTATTCTAGAAAAAATACCATTTTC
CACAAATGGAACCTGATCTTTTTAGAGAAACTGCCTATTTTGTGGCTAGTGTAGAGGAAATACAAAGCCTGGGATATTTTTATTTTACAAGAAT
ATGCTCAAAGAACGATGGAGATAATGTTAGAAGGGCATAGGAATGAGCTTGAGAATTCTCACTGCTCAGAGTAATATATAGAAATAATATCAGT
GGCAAATTACCAAGTCATTGAATAAAATGAGAATCTATTGGTGACAGTGCTGCTTTGTCTTGGTTCAGTCCCTAACACCACAAAACAACAAAAA
ACAAAACAAAAAAAACACAACCCAGGCTTCAGTCCACATCCATAAAGTAAGGAAATGAGAGAAGGCCCTCTCTCTCAGTGGGATGCCATTCAAT
ACATGTGAAAAGAATGACACACATTAGCAGTTATACTTAGAATCAGTAGTAACTGAGTCAGGTAGAGATCTTTGGTGGATTCCAATCAAATGAG
TGAAAATCTGGTCTATCTGCAAGGCACTGAGTAGAGAGGGAAAGGACAGTAAGACTGGAAGAGTTTGATAGACAACACCCACCCCTCAGGGACT
AGAAAGTTTGGCAAGATGCAAGGAGGAAGCATCTCCTCCGTGGTGTCCTCACATCTTAAATCTAGTACCAGGCAAACTGGAGCTGAGCATAGCC
CACTAAATAACTGGGCTGAAGCTGTGCAACCGCTTCATGAAGCTTAGCATACACCGACTACAAAGCAGGAGGGCTCGGTCATGAAGCCAGTGAC
AGACAAACTGATGGACAACCTCAGCGATGTCTTCCGACTAGATAATGGTGGTCTGTCAGAGCTCACTTCCTGGTATGGTGGGTGGCCTGTGATT
TACAAGATGTCTTCTAGGAATTATGCACTATGTATGTATTTGAAATGGTGAGGTGGTGCTGACTCAGCACCTCTGTGGGAAAGTTCCTTTGTAC
TTTTTAGTTAAGTTTTGAATCATTTTGAAAGGAAAAAAAAATTAAGATATGAAAGTAATTCTTTTTTCATAATAATAAAACACAGATTCTGCCA
GCTAGTTTTTATGTTAACTTTATACAGGCTAGGCTATCTGGGAAGAGGGAATCTTGCTTACTGATTGATGTGGGAGGGCCCGGCCCACTGTGGT
TAGAGCCACATGGTCAGGGCTCATGGCCCTGGATGCTATGCAAGAGCAGACTGAGCAAGCCATATAGAGCAAGCCAGTGAGTAGCACTGCTCCG
TGCCTTCTGCTTGAGTTCCTGCCCTGACTTCTGTCAGTGATGGAAGTGTAAGAGAAATAAACCCTTTCTTCCTCATGTCCATTTTAAAACCAGT
CAGAAAAGCTTACATCTGGACTGGGGGTTGTGGCTCCTGAGTATAATCCAGACACTTTGAGAGGCAGAGGAAGGAGAATCATAAATTCAAGTCT
AGTCCAAGCTACAAAGTGAAACCCTCTCTCTTGTGGCCTCCCTCACAAAGCTACTTCACTCAGTTCCTTCTCAAGTGGAGATTTAAAAATAAGA
CTCAGGAGTAGAAATAGTAGATGAGCTGGCTGATGAGGACTGCTGAGACATAACCTTCTCAACAACATCACTTGACTGTAGCAATCATGACCTC
ATGGTAACTGAAGATGCTTGAGTGGGTAGGGAGAGATCACGGGGCTCTGTGTCTCCCCAAGAACTACTAGCTGTTGATAGATGCTTGAAGAGGC
ATCATCTTAAATGTTGCTTCTGTTTGCGAGTTCACTAATGTTTTACATCCCTGCCCACAAAGGTAGTTAATACTGTAAGACCCCCGAAGCTGGG
CCTCTGCTCAAGTCCCGGGATGAGCTGGCCAGCACCCCAGTGTCCTGAGAGAAAACCACACCTGATGCAAACTGCAAGAGCCATGCAGGGCAGG
GGAGTTCAACCCAGAGCGGTGACAGTAGGGGGCTTTTAACAGCTAGCTGAGGAATTGGGAGGAGTTGGGGAGAGAGTTCTCTTCAGCATGTCCT
TGGTGAAATTTACAAGGCGGGAGTGGGGAGTGAGTTCTTTCTGAATTTTTATCTCCGTGTCCTCGGCACTGGAACGCAGGCATCTCTGGTTGTA
AAGTATAGAAACAAAAAGGCTTTTTGCTGGCTATAGAGAACAACGAGCTTCTTTCTGGCTGTATTTTTAGAGATCAGGGAAAACAAGCTTGGGG
GACGTCCAGGGGCTTTACCTTCCAGGGAGAAACGCTCTAAGTTGGGGGTCTCACAATACCAGTGGGTCACAAAACAAAGGCATTACAGTACGAA
GAGGTCTTGTAGGGAGGCCTTTTGTTGGGGGTGTTGGGGGATAAAGTAGGGGTCAATGTGCTAGTACAGGCCATGAATCCCAAGTGCCTTGGAG
GAAGGCAGAAACTTGTGAGCTCTAGGACAACCAGGACTACAGAGAGAAACCCTGTCTTGGAAACAATACAGAAAAAGGACTGGGTAAGTGTGAC
CACTGTGTTATATTCATGTATGAGACTGGCAAAAATAAATTTAAAAACAAAGAATACAGCCCCAAGTGAAAGAGAATGCTTGTTGTCTTTTAGG
AAATAGAAATTTAACTTGTTAAGTTACTTCATCTAACTTGCAAAGGTAACCAGTTATCTTACTAGGAAGATTCTCCTTTATCAAGTCTTTTTTT
CCTTGCTTTCTCTCGCTCTCCAGAGTTGGGTGGTTTTTTCCCTTCTGAAAATAAGCTACAGCTTATATCTGCAACACAGATAAGAAGAGAGAGC
TCATTCTGCAGATGACATAAACATTGCTTCTAAGTTAAACAAAGCATAGAGAAGAGGATACACTGTAAGCCAAGTGACACAAACCCACAAGACT
TCCTAGCCCTGTGTCCTCACTCCCAAAGACATTGTCTATAGCTACTGTTTACCTTTCAACAGGAAATAATTCAAGGAATGCTTTGTTGGAAGTT
CCTGACCTTCATGTTTTGGGTCCAGTACATTCAAAACTGAGCTAAAAAAAAAACAATGCTCAAAGACTTTTCCCAAATTATTTAATCTTTTAGC
AAAATTTCATCAGAAGCTGAGAAACATTACATAGAAGTCTTTAACTTTTCACTTTTCATCAGTTAGTTTCTGTTATCTCCTTTTCAATTTTCTG
ACAATGAAAAACCCTTTGCTATTATTCACACATGATGAAACAAGGTTTCAAAGGAGCAGGCTGCCCTTTCATCGCAATCAAAAACATCTTCCTG
ATATAATACATCTTTCAGAGTCAGTATGAATTGTGTGCAAAGATGAGAAACGTGAATAATCAAATGCTATTCAAATCAATGCATCAAAAAAAGT
CAAGAAGTTGCACTAGCTGATGAAAATTTTACTTAAGTCAAAATTTTATTGAGCTTCCCTTCTGGTATTTTTGATGATTAATTCTTCTGGTTCA
ATATGTTTAAGATTTCTCTTCACCATGCCATTACAATTGACAATTATGAGATCATATAAGACATACCATTAGCCATTTCTTGGGGGGGTCACTT
GATATCCAAGTTCCAGAAGCCAACCTCCTGGCTTTGTAAGCCTAACTGTCCTTCTTAGGACACTGTCACCCACAGGAGATGCAGGTGCTCCTGA
CAAGGGTTTTTAGAAAGGCTCCTGGAGACACAACATCAGCTCCAGACCTGTTATAAGAGTAACTAGGTGTGTCATTTAACTTTTGTTTCCTTGT
TTATGTAATCAGATGTTAGATAGACCACTTGAAATTAGAAAACATTTGAAATTGGAAAATAATTGAAACACCAAAATATGTTTGTATTTGTTTA
GCATTATCGAATTTTCAAATTTGTAACTCTGGGACAAAAGTTACTGAAGGCACTTGTTTCTCTTTACATAAAAGACAAAAGAGGTAGGCAGTGT
CTAGAGTACGCCTCCAGGGGTAAGGTGTCACTTGCTTTGCAGGAGACACATACTGACAATTTTCGATTGTCAAAATAGTCACTTGAGGTCATAA
GGACTATGACAAATTGTTCCT
MOUSE SEQUENCE-mRNA
CACTAGTGACCGGAGCGCGAAGATTCGGGGGTGGGAAGGTGTGAGCCGCAAACCCAGAGGAGCCGGGAAAGAAGAGGAGGCCCGGGGGTGGTCC
GAGGACAGGCGTCCCGGCTGCGGAGGCTGCTCAGCCTCCTCACTGGTTGGCTGACTGACGGGCTAGCTGGCTGACTGCCTGCCTGACCGACTGC
CTGGCTGACTGACTCACTGACTGACTGACTCGTGCCTTGCAGCCTCGGGCCGGACGCTGGAAGCTGCAGCGAGCGGCGCGCGGAGCCGAGCCAT
GGCCTCGAGTGGATATAATCCATACGTAGAAATAATTGAACAGCCAAGGCAGAGGGGAATGCGGTTTAGATACAAGTGTGAAGGGCGATCAGCA
GGTAGCATCCCAGGGGAGCGCAGCACAGACAACAACCGGACATACCCGTCTGTCCAGATTATGAACTACTATGGAAAAGGAAAAATAAGAATTA
CATTAGTAACAAAGAATGATCCATATAAGCCTCATCCTCATGATTTAGTTGGAAAAGATTGCAGAGATGGATACTATGAAGCAGAATTTGGACC
AGAACGCAGACCTTTGTTTTTTCAAAATTTGGGTATTCGGTGTGTAAAGAAAAAGGAAGTGAAAGGAGCTATTATTTTAAGGATTAGTGCAGGA
ATCAATCCTTTCAATGTGGGTGAACAGCAGCTGCTGGACATTGAAGACTGCGACCTCAATGTGGTGAGGTGTGTTTTCATGTTTTTCCTTCCTG
ATGAAGATGGTAACTTCACAACTGCTCTGCCTCCCATTGTTTCTAACCCAATTTATGATAACCGTGCCCCAAATACTGCAGAATTAAGGATATG
CCGTGTGAACAAGAACTGTGGAAGTGTCAGGGGAGGAGATGAAATATTTCTGCTTTGTGACAAAGTTCAGAAAGATGATATAGAAGTTCGTTTT
GTGTTGAATGACTGGGAAGCCAGAGGTGTTTTTTCACAAGCTGATGTACACCGCCAAGTAGCCATTGTTTTCAAGACTCCTCCGTATTGCAAAG
CTATACTGGAGCCTGTGACAGTGAAAATGCAGCTGCGGAGGCCTTCTGACCAGGAAGTTAGTGAGTCTATGGATTTCAGATACCTGCCAGATGA
AAAAGATGCATATGGCAATAAATCAAAGAAACAAAAAACAACTCTGATTTTTCAGAAACTGCTGCAAGATTGTGGTCACTTTACTGAGAAACCA
AGAACTGCCCCTCTGGGATCAACTGGAGAAGGAAGATTCATCAAAAAAGAATCAAACTTATTTTCTCATGGTACAGTTTTACCAGAAATGCCCA
GGTCTTCAGGAGTTCCAGGGCAAGCTGAACCTTACTATTCTTCATGCGGGTCCATCTCGAGTGGATTGCCACATCACCCACCAGCCATTCCCTC
AGTGGCCCATCAGCCTACAAGCTGGCCACCAGTGACTCACCCCACCTCACACCCAGTCAGTACAAATACCCTGAGTACTTTCTCAGCGGGAACA
CTCTCCTCTAATTCACAAGGTATCCTTCCATTCCTAGAAGGGCCTGGTGTCAGCGACTTGAGTGCATCTAATTCGTGCCTTTATAATCCTGATG
ACCTAGCTAGAATGGAAACGCCATCCATGTCACCAACTGACTTATACAGTATCTCTGATGTCAACATGCTATCTACTCGGCCTCTGAGTGTGAT
GGCACCCAGCACTGATGGCATGGGGGACACTGACAACCCAAGACTTGTGAGCATCAATCTTGAAAACCCCTCATGTAATGCCAGGCTAGGCCCA
AGAGACCTGAGACAACTACATCAGATGTCTCCTGCCAGTCTGTCCGCGGGCACCAGCTCCAGTTCTGTTTTTGTTTCACAGTCAGATGCATTTG
ATAGATCAAACTTCAGTTGTGTAGATAATGGCCTGATGAATGAGCCTGGACTATCAGATGACGCAAATAATCCTACCTTTGTTCAGAGCAGTCA
CTATTCAGTTAACACTCTGCAAAGTGAGCAACTGAGTGATCCCTTCACATATGGTTTTTTTAAAATATAAGTTGTAGGACTTAAATAAGTATAT
AGAATATTAAGAGAAAGTTCAGAAGTCAAAACTTTAAAAGCCGCTACTGTTTCTTACTTTGAAAGATATGCCTAAAGTCCACGTGCTTGCTGTG
AGTTGTTTTCTGTATTTCCCCAAGACAAACTATGTATCTTTGCTAATGTATTAGTTAAATGAGATGATATTTGCTTTCAAGCAGATTTAAGGTG
AAAAAGTGTAATGGCTATGCATTGGGTAAATAAACTCATATTATTGTTGAGGCCCATAGGCAAAAAAAAAAAAAAAAAAAAAAAAAAAAAAAAA
AAAAAAAAAA
MOUSE SEQUENCE - CODING
ATGGCCTCGAGTGGATATAATCCATACGTAGAAATAATTGAACAGCCAAGGCAGAGGGGAATGCGGTTTAGATACAAGTGTGAAGGGCGATCAG
CAGGTAGCATCCCAGGGGAGCGCAGCACAGACAACAACCGGACATACCCGTCTGTCCAGATTATGAACTACTATGGAAAAGGAAAAATAAGAAT
TACATTAGTAACAAAGAATGATCCATATAAGCCTCATCCTCATGATTTAGTTGGAAAAGATTGCAGAGATGGATACTATGAAGCAGAATTTGGA
CCAGAACGCAGACCTTTGTTTTTTCAAAATTTGGGTATTCGGTGTGTAAAGAAAAAGGAAGTGAAAGGAGCTATTATTTTAAGGATTAGTGCAG
GAATCAATCCTTTCAATGTGGGTGAACAGCAGCTGCTGGACATTGAAGACTGCGACCTCAATGTGGTGAGGTGTGTTTTCATGTTTTTCCTTCC
TGATGAAGATGGTAACTTCACAACTGCTCTGCCTCCCATTGTTTCTAACCCAATTTATGATAACCGTGCCCCAAATACTGCAGAATTAAGGATA
TGCCGTGTGAACAAGAACTGTGGAAGTGTCAGGGGAGGAGATGAAATATTTCTGCTTTGTGACAAAGTTCAGAAAGATGATATAGAAGTTCGTT
TTGTGTTGAATGACTGGGAAGCCAGAGGTGTTTTTTCACAAGCTGATGTACACCGCCAAGTAGCCATTGTTTTCAAGACTCCTCCGTATTGCAA
AGCTATACTGGAGCCTGTGACAGTGAAAATGCAGCTGCGGAGGCCTTCTGACCAGGAAGTTAGTGAGTCTATGGATTTCAGATACCTGCCAGAT
GAAAAAGATGCATATGGCAATAAATCAAAGAAACAAAAAACAACTCTGATTTTTCAGAAACTGCTGCAAGATTGTGGTCACTTTACTGAGAAAC
CAAGAACTGCCCCTCTGGGATCAACTGGAGAAGGAAGATTCATCAAAAAAGAATCAAACTTATTTTCTCATGGTACAGTTTTACCAGAAATGCC
CAGGTCTTCAGGAGTTCCAGGGCAAGCTGAACCTTACTATTCTTCATGCGGGTCCATCTCGAGTGGATTGCCACATCACCCACCAGCCATTCCC
TCAGTGGCCCATCAGCCTACAAGCTGGCCACCAGTGACTCACCCCACCTCACACCCAGTCAGTACAAATACCCTGAGTACTTTCTCAGCGGGAA
CACTCTCCTCTAATTCACAAGGTATCCTTCCATTCCTAGAAGGGCCTGGTGTCAGCGACTTGAGTGCATCTAATTCGTGCCTTTATAATCCTGA
TGACCTAGCTAGAATGGAAACGCCATCCATGTCACCAACTGACTTATACAGTATCTCTGATGTCAACATGCTATCTACTCGGCCTCTGAGTGTG
ATGGCACCCAGCACTGATGGCATGGGGGACACTGACAACCCAAGACTTGTGAGCATCAATCTTGAAAACCCCTCATGTAATGCCAGGCTAGGCC
CAAGAGACCTGAGACAACTACATCAGATGTCTCCTGCCAGTCTGTCCGCGGGCACCAGCTCCAGTTCTGTTTTTGTTTCACAGTCAGATGCATT
TGATAGATCAAACTTCAGTTGTGTAGATAATGGCCTGATGAATGAGCCTGGACTATCAGATGACGCAAATAATCCTACCTTTGTTCAGAGCAGT
CACTATTCAGTTAACACTCTGCAAAGTGAGCAACTGAGTGATCCCTTCACATATGGTTTTTTTAAAATATAA
HUMAN SEQUENCE - GENOMIC
AAACCAAAGCCTGCATATGAAAAAGCTCTAGAAGACAACACATACACACATACTCACACATGCACGTAGGTGATGTCTGTATTAGTGAGGCAGA
ATTATAAGTGAGTTTTCTTCTTTTCTCCAATCTTTATTTAATTTTGTTTATTTGTTTTGTTTTATAGAGACAGGGTCTCACCATGTTGCCCAGG
CTGGTCTTGAACTCCTAGCCTCAACTGATCCTGCCACCATGGTCTCCCAAACTGCTGGGATTACAGGTGTGAGCCACCATGCCCAGCCTTTCTT
TAATGTTTTATATGTGTCTTTTTTTAGGTTGTAATTTAAAAATAAACATATTTTAGCAAAAAATTAAAGACTTTGAATGTTATTAAAGAATTTA
GGTCCGGGAGTAGTGGTTCACGCCTATAATCCCAGCACTTTGGCAGGCTGAGGTGGGAGGGCTGCTTGAGCCCAGGAGTTTGAGACCAGCTCTG
GGCAACAATAGTGAGATTCCATCTCAATCTAAAAATAAATAAGTAAAATATACATATGAACTTAGTAACTGGTTGGCCCAGCTTGCTTGCTTTC
ATGACAGTAATCCATGATTTTGATACCCGTCTTAATATAATCACTATCATACCTCTCTGCAGGCATAGTTATCACTTTGGGTAGGAGTTGAGCC
TTGTGCCTCTTTTTGTTTTTCTTGATGGTATCTAACGCCCAGTGGTGATACATTGTCACTCATATCAATACTGGTGTGATTCAATGTGTAATAA
TTTATATTTTATTCGACATTTAATGAGCATCTACAATGCTAAAGGCACTGTACTAGCCACTCTAGGGAATAAAAGATGAACAAGACACAGTCAA
TGCCTTTAATTAAAGAAGTAAATGCACTGATTTTTACTTTTCCTACACAGGTATTGAATTGAGAATTTTGGGGAAAAGAACATGAAGAGTCTTA
AAAGATATGGAACCTGTGAACGCTAAACCTTCATATATTTGCATTTTTATTAGTAAGATTATGGCTGCCAGTTATATTGTTTTATATCTTAGGT
CATATTTTGAAATGTGATGTGACATAGTGAAAAAGAAACAAAGAGTCTGGAGGTCTGGTTTCAAGTTTCAACTCAGCAATTAACTACCTAATGA
ACACGGGCAAGGTACTTAAACTTCCTGTGCCTCATTTTCCTCATGTGTAAAACGAGGGAGATGAACTAAATGATCTACAGGGTTCCTTCCAACC
TTAAAATTGAACTAACTCTCTCCTGTTGAGACATAAAAGAGGCACCATATGACTTGAAGGTGATGATGACTTCATTACTTGTTCTGAAAAATGT
TAATTCTAAATTGGAACAAGTAATCACTGGATCTCATGGTTGTGACACATCAGACATTACTACAGTTAGAGAAACCCAAGTTAGCACACTGTGT
CATACTTCTAGGCAGTGCTATATACGCAAAACTAGCATACCACAGTATAGGGCCTACACAATATAAACAAAAAGATTAAAAAGAGATTTTTTTT
TTTTTTGAGATGTAGTCTTGCTTTGTCGCCCAGGCTGGAGTGCGGTGGCACGAGATCGGCTCACTGCAACCTCTACCTCCCAGGTTCAAGCGAT
TCTCCTGCCTCAGCCTCCTGAGTAGCTGGGATTACAGGCGTGCACCACCATGCCCAGCTAATTTTTTGTATTTTTAGTAGAGATGGGTTTTCAC
CATGATGGCCAAGCTGGTTTCAAACTCCTGACCTCAAGTGATATGCCCGCCTCGGCCTCCCAAAGTGCTAGGATTACAGGCGTGAGCCACTGCG
CCCTGCCATTTTTTTTTTTTTTTTTTAAATAGAGACAGGGTCTCGCTATGTTGCCCAGGCTGGTTTTGAAATCCTGGGCTCAAGCAATCCTCCT
GCCTCAGCCTCCCAAAATGTTGAGATTACAGGTGTGAGCCGCTGTGCCCAGCCAAGAAAATTTTTAACAATGGATATTTTACGAATGCTTTTTG
GAGTTTTTATGTACTAAGATTTCATTTCTCTGGGTGTTCATTAATCTTATGTTTCAGTTCCTTAAATGAAAATAGGTGAGTGGGGCAGGTTTCC
TCAGAGGTATAGTTTTTACTTTAGGGACTATCCCTTTCTCCTAAAGTGTGCTTTAAAGACGGCAGCACATGAACTTGTCTTAGATAGGAGGGAC
AGCAGGCAAAAGTGATGACAGGATCTGGGTCTGCTGCCACACACCAAACTATTTATGAATTTTTTTTAAGAGACAGGGTCTTGCTCTGTCACCC
AGACTGGAGTGCAGTGGTGTGTTCATAGCTCACTGCAGCCTCAAACTCCTGGGTTCAAGTGATCCTCCCACCTCAGTCTCTCAAGTAGCTAATA
TTACAGGTGCATGCCCCCAAACCTGGCTAATTTTTTTTTGTTTTTTTTTGTACAGATGGGGGTCTCACTATGCTGCCCAGGTTGGTCTCCAACT
CCTGGTCTCCAAAGTGCTGGAATTACATGGGTGAGCCACCACACCTGGCTCTCATTCTTTATGGGTTTTTTGTTTTTTTTTTTTTTGCCCTTAA
GTTTTGTTTTTTACAACCTTATAAATCACATAATTGAGTTTCAGAGATCTCAAACAATACTAATGCAGTAAGTAAACAGGAGAGCAGGAGTGGG
GTTTGGCCAACAGTACTGGTAAAATTCACTCATAGTGGTTGAACCCAGCTGTTGCAGCTATTTGTCCTTAATAGGAAGGACACCTCCTCACTAC
AGAGAGTTGGGCAGTGATTTGCAGTATGCTAACTGGGACTAGGGCATACTCTCGATAAGGTTTAATTTTTTGTAAGAGAACCATGTGGCTTAAA
TTGATGTAAAGCATCTACATAAACTACATAACGGAAGACAGGTAACTCAGATAATGGGGGTATCAAAGACGAAATTTGGCCATTTATCTAGAAT
TATCTGAGGGAGAACCCCAATGAATCCAACAGATACAATCACTCTGGTTATTAGAGTAGTGTAAGAATCACAGTCATACGTGCTGACTTATTCA
GAGGGCAAAGTACCAGTGTCTGCAACTTATTTTGAAATACATTTTTAAAAACCAGATAGATGAATGGATAGACAGAGGGATGGAAAAATAAACA
GACAGGTGATAAGGCAAGTGCAGCAAAATGTTAATGGTGGAATCTAGTTAGTGGGTATACATATGTTCCCGGAAAAAAAATCTTTCAGTTTGGC
TGTATATTTGAATTTTTTTTTTTTTTTTTTTTGAGACGGGTCTTTCTCTGTTGCCCAGGCTGGAATGCAGTGCCAGGATCATGGCTCACTATAG
CCTTGACCTTCTGGGCTTAGCTGGAACCACAGGTATGTGTCACCACACCTGGCTAATTAAAAAAAAAAAAATCTTTTGTAGAGATGGTGTCTCA
TTTTGTTGTCCAGGCTGGTCTTGAACTCCTGGATCAAGCGATCCTCCCACCTTGGCATCCCAAAGTGCTAGGATTACAGGCATGAGCCACCATG
CCTGGCCCCAAACATTTTTATGATAAAACAGGAAAAAAACCTGCCAACATTTCTGAGGGCTTTCCCTGTGTCAGGCACTTTGTATTAGTGATCT
CAATTAGCCCTCACAAGAAGCCTGTGAGGTAGGTACCATATTACTACCCCTATTTTACAGATAAGCAAACAGGCACAGAGAGGCTAAGGGACTT
GCCCAGAGTCTCACAGCTAACAATCTAGGACAAGCTAAGATTCAAATCCAGGCCTGTGTGTTTGCAAAGCCAGGGCCTTTAGCTGTGAAACACA
GAGAATTCCGCAGATGTTTTTCAGAGCCTCCATTAAATATTACTGAGTATTATAAAACTTCTAGAACATAGGAAAATATTTTCATAACCTCAGT
CCAAGAAGAGTTCTCTAACATTCACAAAAAACACTATCAAAGAAAATAAATCAGACTTAATTAACACTAAGTTAAAAAGCTTCACTAAGATAAT
GAAAAGGCAAGCCACAGACTAGGAGAGGATACTTGCAATGCATATATTTTATAACAATTCTGTGGCATCCATAGAGGTGCTCTGCTCAGATCTC
CATTCTAGAGAGGATCTGCCTCAGCTTTCAAGCCAAAGCCACATATTTCCTTGGAGCCACCTACCCAATTATTAAGTACAGAGGTAGTATAAGG
GCTAACTATCTCTGTGCACAGTGTTTGTGTTAGAGCTCCCCATTGGATTTACTGAGACTTCCTCAAAGATGCACTCCCATCTCATTTTCTTTCT
ACCAAATTTACCTTCCTTCCCCCTTTCTTTTCACCAGTGTCAGACCTGCATCTTAAGATTTTCCCTGCCTATAACTTTTTTCTTTCCCCTTTAT
CTTTCATAGATGTTACCCCCAATAAATCTCTTGCACTGTTAATTTCATATTGGTACTTGCTTCCCAAAGGACCCAACTGGTATACTCATATCCA
GAATACATAAAGAATGTCTACAAATCAATAAGAAAAAGATAGATAATCCAATTTTTTTTTTTTTTTGAGATGTTTTCTCGCTCTGTCCCCCGGC
TGGAGTCTAGTAGTGGTGACATGGCTCACTGCAAATCTCTCGTCCCCAGGTTCAAGCAATTCTCCTGCCTGAGCCTCCCCCGTAGCTGGGATTA
CAGGCACCTGCCACTGCACCCAGCTAATTTTTTATAGTTTTTAATAGAGACGGGGTTTCACCATCTTGGCCAGGCTGGTCTTGAACTCCTGACC
TCATGATCCACCCATAATTTTGTTATGTAAGCCCTATCATTATTATTATTATTATCATTATTATTATTATTATTAAGACAGAGTCTTGCTCTGT
TGCCCAGGCTGGAGTGCAGTGGTACAATCTCGGCTCACTACAACCCCTGTCACCCAGGTTCGAGTGATTCTTGTGCTTCAGCCACCTGAGTAGC
TGGGATTACAGGCATTCGCCACCACACCTGGCTAATTTTTGTATTTTTAGTAGAGACAGGGTTTCGCCATGCTGGACAGGCTGGTCTCAAACTC
TTGGATTCAAGTGACCCACCTGCCTCAGCCTCCCAAAGTGCTGGGATTATAGGAGTGAGCCACCNNNNNNNNNNNNNNNNNNNNNNNNNNNNNN
NNNNNNNNNNNNNNNNNNNNNNNNNNNNNNNNNNNNNNNNNNNNNNNNNNNNNNNNNNNNNNNNNNNNNNNNNNNNNNNNNNNNNNNNNNNNNN
NNNNNNNNNNNNNNNNNNNNNNNNNNNNNNNNNNNNNNNNNNNNNNNNNNNNNNNNNNNNNNNNNNNNNNNNNNNNNNNNNNNNNNNNNNNNNN
NNNNNNNNNNNNNNNNNNNNNNNNNNNNNNNNNNNNNNNNNNNNNNNNNNNNNNNNNNNNNNNNNNNNNNNNNNNNNNNNNNNNNNNNNNNNNN
NNNNNNNNNNNNNNNNNNNNNNNNNNNNNNNNNNNNNNNNNNNNNNNNNNNNNNNNNNNNNNNNNNNNNNNNNNNNNNNNNNNNNNNNNNNNNN
NNNNNNNNNNNNNNNNNNNNNNNNNNNNNNNNNNNNNNNNNNNNNNNNNNNNNNNNNNNNNNNNNNNNNNNNNNNNNNNNNNNNNNNNNNNNNN
NNNNNNNNNNNNNNNNNNNNNNNNNNNNNNNNNNNNNNNNNNNNNNNNNNNNNNNNNNNNNNNNNNNNNNNNNNNNNNNNNNNNNNNNNNNNNN
NNNNNNNNNNNNNNNNNNNNNNNNNNNNNNNNNNNNNNNNNNNNNNNNNNNNNNNNNNNNNNNNNNNNNNNNNNNNNNNNNNNNNNNNNNNNNN
NNNNNNNNNNNNNNNNNNNNNNNNNNNNNNNNNNNNNNNNNNNNNNNNNNNNNNNNNNNNNNNNNNNNNNNNNNNNNNNNNNNNNNNNNNNNNN
NNNNNNNNNNNNNNNNNNNNNNNNNNNNNNNNNNNNNNNNNNNNNNNNNNNNNNNNNNNNNNNNNNNNNNNNNNNNNNNNNNNNNNNNNNNNNN
NNNNNNNNNNNNNNNNNNNNNNNNNNNNNNNNNNNNNNNNNNNNNNNNNNNNNNNNNNNNNNNNNNNNNNNNNNNNNNNNNNNNNNNNNNNNNN
NNNNNNNNNNNNNNNNNNNNNNNNNNNNNNNNNNNNNNNNNNNNNNNNNNNNNNNNNNNNNNNNNNNNNNNNNNNNNNNNNNNNNNNNNNNNNN
NNNNNNNNNNNNNNNNNNNNNNNNNNNNNNNNNNNNNNNNNNNNNNNNNNNNNNNNNNNNNNNNNNNNNNNNNNNNNNNNNNNNNNNNNNNNNN
NNNNNNNNNNNNNNNNNNNNNNNNNNNNNNNNNNNNNNNNNNNNNNNNNNNNNNNNNNNNNNNNNNNNNNNNNNNNNNNNNNNNNNNNNNNNNN
NNNNNNNNNNNNNNNNNNNNNNNNNNNNNNNNNNNNNNNNNNNNNNNNNNNNNNNNNNNNNNNNNNNNNNNNNNNNNNNNNNNNNNNNNNNNNN
NNNNNNNNNNNNNNNNNNNNNNNNNNNNNNNNNNNNNNNNNNNNNNNNNNNNNNNNNNNNNNNNNNNNNNNNNNNNNNNNNNNNNNNNNNNNNN
NNNNNNNNNNNNNNNNNNNNNNNNNNNNNNNNNNNNNNNNNNNNNNNNNNNNNNNNNNNNNNNNNNNNNNNNNNNNNNNNNNNNNNNNNNNNNN
NNNNNNNNNNNNNNNNNNNNNNNNNNNNNNNNNNNNNNNNNNNNNNNNNNNNNNNNNNNNNNNNNNNNNNNNNNNNNNNNNNNNNNNNNNNNNN
NNNNNNNNNNNNNNNNNNNNNNNNNNNNNNNNNNNNNNNNNNNNNNNNNNNNNNNNNNNNNNNNNNNNNNNNNNNNNNNNNNNNNNNNNNNNNN
NNNNNNNNNNNNNNNNNNNNNNNNNNNNNNNNNNNNNNNNNNNNNNNNNNNNNNNNNNNNNNNNNNNNNNNNNNNNNNNNNNNNNNNNNNNNNN
NNNNNNNNNNNNNNNNNNNNNNNNNNNNNNNNNNNNNNNNNNNNNNNNNNNNNNNNNNNNNNNNNNNNNNNNNNNNNNNNNNNNNNNNNNNNNN
NNNNNNNNNNNNNNNNNNNNNNNNNNNNNNNNNNNNNNNNNNNNNNNNNNNNNNNNNNNNNNNNNNNNNNNNNNNNNNNNNNNNNNNNNNNNNN
NNNNNNNNNNNNNNNNNNNNNNNNNNNNNNNNNNNNNNNNNNNNNNNNNNNNNNNNNNNNNNNNNNNNNNNNNNNNNNNNNNNNNNNNNNNNNN
NNNNNNNNNNNNNNNNNNNNNNNNNNNNNNNNNNNNNNNNNNNNNNNNNNNNNNNNNNNNNNNNNNNNNNNNNNNNNNNNNNNNNNNNNNNNNN
NNNNNNNNNNNNNNNNNNNNNNNNNNNNNNNNNNNNNNNNNNNNNNNNNNNNNNNNNNNNNNNNNNNNNNNNNNNNNNNNNNNNNNNNNNNNNN
NNNNNNNNNNNNNNNNNNNNNNNNNNNNNNNNNNNNNNNNNNNNNNNNNNNNNNNNNNNNNNNNNNNNNNNNNNNNNNNNNNNNNNNNNNNNNN
NNNNNNNNNNNNNNNNNNNNNNNNNNNNNNNNNNNNNNNNNNNNNNNNNNNNNNNNNNNNNNNNNNNNNNNNNNNNNNNNNNNNNNNNNNNNNN
NNNNNNNNNNNNNNNNNNNNNNNNNNNNNNNNNNNNNNNNNNNNNNNNNNNNNNNNNNNNNNNNNNNNNNNNNNNNNNNNNNNNNNNNNNNNNN
NNNNNNNNNNNNNNNNNNNNNNNNNNNNNNNNNNNNNNNNNNNNNNNNNNNNNNNNNNNNNNNNNNNNNNNNNNNNNNNNNNNNNNNNNNNNNN
NNNNNNNNNNNNNNNNNNNNNNNNNNNNNNNNNNNNNNNNNNNNNNNNNNNNNNNNNNNNNNNNNNNNNNNNNNNNNNNNNNNNNNNNNNNNNN
NNNNNNNNNNNNNNNNNNNNNNNNNNNNNNNNNNNNNNNNNNNNNNNNNNNNNNNNNNNNNNNNNNNNNNNNNNNNNNNNNNNNNNNNNNNNNN
NNNNNNNNNNNNNNNNNNNNNNNNNNNNNNNNNNNNNNNNNNNNNNNGAGTCTCGCTCTGTCGCCCAGGCTGGAGTGCAAGTGGCATGATCTCG
GCTCACTGCAACCTCCGCCTCCCAGGTTCAAGCAATTCTCTACCTCAGCCTCCTGAGTAGCTGGGGTTACAGGCGCCCGCCACCACGCCTGGCT
AATTTTTGTATTTTTAGTAGAGACGGGGTTTCACCATCTTGGCCAGACTGGTCTTGAACTCCCAACCTCGTGATCCACTTGCCTCAGCCTCCCA
AAGTGCTGGGATTACAGGCATGAGCCACTGCGCCTGGCCGGCTCTTTCTTAAACTGAGGACTCAGCTCAAATGTCACCTCCTCAGAACTTTCCT
CTCCCCCAGTCACTTTTCATTTTGAAATTCCTTCAGAGAACTGAAAATGTTTTCCGTCTCTTTGAAATGTATGTACATATTTTAAAAAGCTAAA
TAAGCCTCTTGCTAGTTTTGCGTCCTCAGAAGGTCTTTCTTGCGGGCCTCGGAGCCATCTCTTGGAAATGTGAACATCAAGGATGGTGCTCCAT
GTTTCTGTCTCTAGGAGGGTTTAAGCCTTGGCTCTTGGTTCCAAGATAACTTCCCATTATTTTCCTTTGGATAAAGACAATTAATAGGTATGTA
ATGGATTGTACGTGCCTGACCATATGAAAAGGTGAGATTTCCTTTTTTTTGGTCTTTGCACTCTCTTCAGTGGATTGCCTGTGATGTGCATCAT
GGTACGTTTTAGTACATATCCAATAATAAAACTGTTTCATTCTTTTGTTGTACATTGCGCATTTCGTGGAAAGAACAGTTTGGGGTTGGCAGGA
TATTTTAAATTATTTGCCCATATGGGTCCCCCAGTTTTGGGCACTTGTATGGCAGGCTGATATTCCCCATTACCTCTCCGTACTAATTTTAACT
AGTAAGGGACAGGGGCAAGGGCATGGAGCTTTGGAGTCAGACAACCCTGGCTTTAAACTGTGCCTTTTATCAGCATTCTGAAGTACTGTATGTT
GAAGTAACTTCTCTGAACCCCGAATACTTCATCTATAAAGTTAGGAATAATAAATACGTCATAGATTAAGTATGGACATTATCTGATGCATAGC
AGGTACTATTCAAATGAAGGAAACGAAGTTATCCTAGGTCCTTTAATGCACTAAATGTGTGCTCCATTTCCGCCTTTCTTGGCATCTGTGTGAA
ATCTCAGGATATAGTGTCCACTAAACTTCAGTGCACTGCCTAATGAGACAACGAACTCCAAGTGCGGACCTTTTGAGTTTAAACGGGTTTCAGT
AGGTAAAATACGTAAAGTTCACAGTACCCTCGCAATTTAGATGGAGGAAAAAAAATCAGTCGGGGGGGGGGTCCCCGTATGCAAATACAGGAAT
TACAGAAGAAGACAGGACCCCCGCCGCAGCACCACTTCCCCCTACAGGGCGCAACGTCCCGCCGCTGGCGCGGGGGTGGAGATTTGCATGTGCG
AAGTCGGGAAGAGGGGGAACCACCTCTCGAAAACCCCGGCCGTCGCCCTCCCAGGCCGGGAGAGTCGGCCCCGCGCGCCCCCAAAAGCTCCCCA
GCGGCCGGCCCTCTCTACGTCATCCGCACCCTCCCGCCCGCTCCTGAACTTTAAACCACACTCGGAAGAACAACCTGGAGGAGGGGGATTTCTC
AGGAGCCAGCGGCCTTCTCACGCTGCTAGCCGTCACCTCCCGGCTCCCGCCGTTCCCTGCGCTCCCAAAGCCCACCCCAAGCTCCCGCTCCCTC
GACCCCCTCCCAAGCCAGCCGCCGCAGCAGCGCCGGGGGCGTATGCGTGGGGGCCGGCGGGGAGCGTGCGCGGGGACAGGCAGGGGCGGGGCGC
TGGGGGCGGTCGCGCGCGCGGCGGCCGCGAGGTCGCCCCGCCCACGCCTCCGGGTGAGGGTTGCTGCGTCGGGCCTACGTCAGCCGCGGGAAAT
TCCCCTCCCGCCAGGCTGCTCGCCTCTCGGCTGGGCCAGCACTCGGCTCTCCCCGCTCCGCCCCCTGCCCCTGGCTCCCGTACGGTGGACGGCG
ACGCTGGGTGACCCGGGGTGCAAGAATTCAGGGGTTGGGAAGGTGTGAGCCGCAAACCCAGCGGAGGGCGGGAAGAAGGAGGAGGCCTCTAGGG
TGGTCGGGGGACTGGGGGCCCCGCCGGCAGAGGTCCCTCGGCCTCCTGACTGACTGACTGCGGCCGCCTCCGGCCAGGACGCTGGGAGCTGCCT
GCGGAAGGTGCGGGGAGCGGAGCCATGGCCTCCGGTGAGTGTTCATGGGGCGCGGGCCTGGGCCGGGGGAAAGGAGCTCTTCTGAAGGGGGGTC
CTGCCGCAGTGAGTTTAGGGAGCTCAGTTTTTGCTGGGGCGCGTTCTGTCTTTAAAATCTCATATGGTAAAATTGTCAGCTTTTAAAAAAGTTA
CCTGCTTCAGGGTTTGCGTGCAGAATCCAAGCCACGCTCTGTAATTCGATCCTGTTGTCATAGCAGGAACCTTAGAAATTCCCAACGACTTGAT
TTTAGGATTAGGGAAGTCATAAGCGAACCAAAGGAGGACGAAGAGTTCTCATTAAAAATGTATATGTATTGAAGATGGTGGTTTTATGTTTTAG
AACAGGAATGAGGAACCTTCAGACCTCGGGCAAGCTCTCTCCCCCTTTTTAGTTTAATTTCATCAAATGCAAAGAGGTGATCCCCCTTGTACTG
ACAGTTGTACAAAATGTGTCACGGCTTTAAAAATCATCCGTGGTATTTTAACACGAATTAGAAAATCCGTGGTATTTTAAGTGTTAATGTTGCT
TCGACCAAGTGTAGGCCGGGCGCGGTGGCTCATGCCTGTATTCCCAGCACTTTGGGAGGCCGAGGCGGGTGGATAACCAGAGGTCAGGAGTTTG
AGACCAGCCTGGCAAACATGGTGAAACCCCGTCTCTACTAAAAATACAAAAATCAGCGGGGCGTGGTGGCGCGCGCCTGTAATCCCAGCTACTC
GGGAAGCTGAGGCAGGAGAATCGCTTGAACCTGGGAGGTGGAGGTTGCAGTGAGCCGAGATCGCGCCCCTGCACTCCAGCCTGGGCGACAGAGG
GAGACCCTGTCTCTATTTAAAAAAAAAAAAAATGTAGTTTTTACTGTGAGATAAAGCTCAAGGTTCCTAATCTGACGAATAGAGACGTTGAATC
CCCCTTCCTCCTCGCTGGAAATAAGGGGAAAGAGGAGTTTTAGAATATCCGAGCTTTAAAATAATGAGTAGGAATGAATACAACTTTATCACTT
ATGTGACTATATATTTTCCCTTAATAAATGCTCGATCTCTCCCTTTGGGGGGGAATAAGTTTGTAAGAAACATTGCAGAGCAAGAAAGTCTCCT
ATATACACAGATGTGGTTGGGGCTGCCTGGAGCTTAAGGTTGAGGGGGACGGGAGAGCCGGGGCGGGGGGATAAATCAAGTAGCCTGGGGTCGA
GTTGGTCTTTTACCAGGATTTTGGCAAGGTGAGTGGGGGACACTTTCCAGACAGAGGAAGCAGCGTGAGCAAAGGCAGGGAGGGCTAAATGCAT
GTTAAATGCTGTACTAAGAGAATGAAGAGGGGGCCCCGTTTATGAACTTGACTCTTATCCCCAAACTGCCTGGTCCAGTGACCCTCAGAAGTAG
GCTGATGTCTAGTAGAGATGAGGAAGTAGGAAGCTTAAAGAACCTTTTTAAAAGGTTGAGCAGAACAATGCCATAGCTATTGCTGTAGGCAGAA
AAGGAAATTGGGGTGTTTCACATGACATTTGATTTCAGTTTGTTTGTGGTTGTGAGAATACTAAGTGTAGTTTAAAATATTTCAACTTTCCCTT
TTCCCACTTAAGTGACACCAGACTTTCAGATAATCGTGTAAATTTATGAATTCAAAGCATGTGTAGATTAGAAGTGCTAAGATGACTTCAAATA
TTTTGTTAATGTATTGGTTATCAGAAAGATTTTGTTTGGAAGTAATGGAGAATGCCTAGCATTATAAGTAAGTTCAGGCTCTTGGCGATTTAAT
CAAACTTTATTGATATATTGCATGAATTTAATACTTCTAATTTTTTCAGTTGAGAGAGGAAACAACCATTTCTATATAGAGTATTGTAAGACCC
ACAGGATTTTAAAATTTGATACAATTTAAATTTGTTCATTGACACTGTATTTTGTGCTGTTGTGAGGAGGAAGGATTCCCTAAAAGTAAGGAGG
AAATGTTTAAAGAAATGGAAAGTTTTAAAGGTTTAGAAGTTGAAGGGTGATTAACTTTTTTTTTTTTTTTTTTGGTCTTTTCTAAGAGTTGCAT
TAAAATGGGACTATTTAAAATGTAACAAGTTATTTAAATTGTAATTCAGTTGTTAGAAAACTGCCAGGCCTGGAATAAAAAAAAAAAAATGTTT
ACAGGAATCTGTGTACTTTTCCTTAATCTGTTATAAAGACCTTAGAGAAAGAAAAAGATTCACTAATAAAATTCTAAATTCCTATTCTGTTTTG
AAACAGTAATTTAACCGGAAGAGTGACCAAAAAAAAAAAAAAAAAGAAATTGCTTAGTTTTTCATTGTCTAGTTTAGATTCTGTTTGTAGTAAG
GTAGTATTAAAACCTCAGAAAGTAACTTTTATTCATTACGAAGTATTTAAGAGCATTTCTTCATTTCTTACCAGATGTCATATGTAAATAGGTA
TATGTAGTTGAATATGTGATAGCTATAATGTAAAAGTAACATAAATCATAATCTTATAAGCAAAATTATGTAAGTTAGAATGTAGTTTAAAATC
ATGTATATAATATGATTCTAAATTTTGTTTAGATAAGTTAGCAGATTAATTAGGATTTCACAGCTTGTATTAAGCTGCCTTTCGTTGCTTTTTA
AAAAAATTACACCTTGATCACAGTCTTTTGACATAATTAATAATAGATATAGTGAAGAAAAATGTTCCCAAACCCATCTAAGGTATGCATAGTA
GGCAGTTGTTGCTTTTGTATATTTATTCTATTTAATATAAGTAAAATTAGATATTTTATGTCTGAATTTAAACCTTCTCATTGTTCCAGTAAAA
AGAGCAAAATGTCTTTGTGTGGCATATAGCTCTGTTAACTAATAATTAGTGCTGTCTTTGGTAAAATGTTTTAAAATTTAGATAATTTATTTTT
CTTCACATTTTTCTTAGTATGGTTCTTCTGTGTCACACAATAGGAAGGAAGTACAGAAATGAATTGTTTTTGTAAACCTCACTTCTTACCAACT
ATTTGTAGTGTGAATTTCAAGAGAATTGTTGTTTTTCTCGATTAAAGGGGAGAAATGGAAGTAAGTGTGAGGCAACTTAATCTTTAATAACAGA
GCTGGAAGTTAGGAATGGATAGCTACAGTAAATGACTTCTTTTTTTAAGTAAAATGCCACACATGAGCATGAATGTTTCAGAAATGCAACACAT
GAAAAAATAGAAATAACAATGGAGTTAAATAATTAAGGTGACGTATGATAGGCACAGATAAAGGGAATGAGTTAATGTAATGACTAGGGAGGAG
CCAGACAATGAATCATAATTAGGAACATCTAGGTTATGCATAGTATCTTTCTCAAATACAATTTAAGGGACTCAGAATTTCATTTTGTTCCAAC
TTTCTCTCATATGGGTTCTCTGAAAATGATTTTGTTTGTAGGCACATGACCCAAATATTGCATGGGATAAAATTGTTTTTCTGAAATTCATATT
TATCTGGGCCTCCTCTGTTTTTATTTTTAAAACAGAGGTGATTTGGTCTTGCCATTTGTTTTTAACTTTAATACCTGTATAATCTAGGACAGCT
TTTAAAATTTATTTATTTTACCCCTGGCACGTGCAAGAGTTTTTTCAAGACTTACTTTTTTCCCCCTTGGTAACAGAATCCCTATTGCCAGAAT
CTTTTACAGTTTTTACCTTGTAGTGCATAAATCAGTTGAATACTCATCTGAAAATTTCCTTTCTTTGATTCTTAAGGCCCAGTTGAAAGTCAGC
CTGATGTATTGGAGTAATAAAGTCAGCCTGATATATTGGCATAGCCTTTGGCTGATGAGAGACCTAGTTTGAGGAAAAAAATAATAGATCTTAT
TTTCTTTTTCTCCAAATTGAGTAGAGGTGATATTTGGAAAAATATATATTGTTAGCTCCATTGGCTCCTTTAGGTCTCAGGCAAAGTCTGTCAC
CGAGGACCTTTATGAGAGACATGCAGTCTAGTCAGCTATTCTCAACTGTGGTGTTGACACACTGGTGTGACAATCATTTGTGTGATGTGTTGCA
AGAGTTAAAATATTTGTGTTGTAAATTATTTACTTTTTAAATAAATGAAAGCATTTGAAGGTTATCTCTATATTGTCATTTTTTCTTGCTTGCA
TTTGAATAAGGTTCTTTTTTAAGTGGGAGATAAACACAAGTTCAAGTTACAAGTAGCCAGAATTGCTTTGCCTAATTTACTCACGTCCCAGTCC
ATATTTGTACCTGAATTTTTAGATTACTTCTCTCAATATGTGCATTGTTGCTTCCACTTCATGTTTTAAGACAATTATTCTTAATCAGGAGTGT
GTTAGAATTTTCTTGGAAGGCTTTTTCAGCAACGTGTATCTGGGCTTTAAAAACTATGAAGATTTCTTTATCTTCTAAACATCTCAAGTGGGTA
AGGACATGTATGTTTTTGAAAAAACTACCTAGGTGATTCTGATGTACATCCCCAGTATGAACTCTGTTCTAGGGATTTCTTTGGATCTAATACT
CATTTGGCTATACCAGGATGCATTATCTTCTTAAATTAAGTTGCATTTATTTTAGATTGCAGATTATGTGCTGTATCAGTTATTACCTCCAGTT
GCTTTTATGCTTGTTTTTTAAATTTGGCATGCCATATTAGCATACCATTCATAATTCATTTTTTATTATAACTTCATATAATTTTCAACTTTAG
TTTTATCATGTGTAAGATGGGATAATAATTTCTATTATTTTTCAAATGGAGATTAAAGTTAAGAGGATCAAATGAGAAATGTATATAAAGGGGT
CTTAAAATAATGTTATAATTACAATAATTAGCTTTTTTTTCTGTATACTTGATGCTGGTTGCTAATTCTAGCAATAAAGTGTTTGTTAATAATG
TGTCTATTTCCGATAATTTATGATCCATTTAAACATTTCAATGTAATTTTTTTATTTTAAAAGCTCATGCTTTATTAGATAGGCACTATGTTTT
AAAATAGCACTCTTTCTTGCCTAAGCGCAAATAAAAACATAGATATATCTTACAAACATTTTGGCTGTATTTTAGAAGTTATTCTGATGTATAT
TAGCCTTTTAAAATACTATTCAGAATATAGGGGTCAGTCCCAGCTTTGCATAGTGTTGCTTAAAGAAAAATACAGTAATCAATTTGTTTAGAGT
CAATTTTGGAGACGTTTTGGTGCTTTTCAAAACTGTGGCGATTTGAGGTTATCTTAGTTAAGAGTACTTATTTTCCCTACAATTTCCTGATTTA
TGTTTTACCCTCTTGCACTCCATAGATGACTACATTTCAACACATTTTATATTCAGGAAGAATGGCATTGTGCAAAGCACAGTACTGAGGAAGG
AGATAACTGGTGCATTGTACTGATGCATTATATAAATGATTTATAGCTGGGAAGTTTTTTAAAAATCATAAACACAGATAAATCAAAATAGGAA
TGAGTATGAGGAAATACTGAGGTGTAGCAATCCTGGTACCTATAAAGCACTATTTTTTTTTCCTTAGTAGTGGAATCTAATTAAAAAATCTGAC
TAATCACTTATATGATTATTTAACGTTTGAATAACTTGTATAAACAAAAGACCTTAAGATTTTTTAGTCATTCATTCAATAGATGTTTAATGAA
TATCTCTGTACAAGGCACTGATGAGTTAAACACAATTTCTGCCTTCAAGTAGCTTGAAGAAATAAAACAAGTAGCTTTATCTCAAGAAGAAATA
AGACGGTAAGTTTTCCCTAAATTACAGTTATTTGGAATAATTGCTATACACAGAATACTATGGTAGTTTAAAGGAGGGGAGATTATTTCCAGCT
GGGGGAATGTAGAGTATTACAGTATACTGTGTTACTTGGTTGTAATACTCTACATTCCCCCAGCTTGTTAATTTTTACCAATTAAGAGCTTCTG
CAGTAGGAAAAATAAATTCCAAGGACTTTAAATACTCAATATTATATGATAACTGATATTTATGTAGTTTTTACTATTTAAAAATATTTAATCT
TTTCAACAACTACTTTTCTGTTCTTTTTGTAAACAATCTAAAGAAGTGTCATGTAACCAATGAAGTTTTGGGTTTTTTTGTTGTTGTTTTTGTG
TTTTGTTTGTTTTTTTTTTTGAGACGGAGTCTCACTCTGTCACCCAGGCTAGAGTGCAGTGGTACAATCTTGGCTCACTGCAGCCTCCACCTCC
TGGGTTCAAGCAATTCTCTTGCCTCAGTCTCCCAAGTAGCTGGGATTACAGGTGCCTGCCACCACATCCCGCTAATTTTTTGTATTTTTAGTAG
AGATGGGGTTTCACCATGTTTTCCAGGCTGGTCTGGAACTCCTGACCTCAAGTGATCCACCCACTTTGGCCTCCCAAAGTGCTGGGATTACAGG
TATGAGCCACCATGCCCAGCCTCAGTGAAATATTTGAATGCTCACTATGAACCTAGCAGTTTTATTCACACTCTCTCTTCCCAAAGTTAAACAC
TTATCATTAACGATGTCATTTTATATCAGTTTCCCACCAAGACACCTTTAAATAAGTAGTGGGCAGGGATTTATTTGGCCTTTACTTCAGCCAC
ATAAATTATTTAAAATGTGACTTAAAAAGTAATGTTGATTTTAACAGTTTTTAAGAGGAAAATATACTTTCTTAAATACTCCTACAAGGATATA
TAAGGGTATGAAATATTTGAAATTGCAATGTGAATTTGAAATCTTTAAAATATGCAAGGATAAAATCGTGAAATACTCATCTGCATATCTTATG
TTTTTGAGTAAAACTGAAATAAGGATTATGAACTTGTTTAGGTTAAAGTCAGTTTTCTCTGGCTCTTCATCTTCTGAATAAACAAATAGGTAGT
AGATTCAAACACAGGGAGTTTACACCATACAGAATAAAATTGAAAGTTACAGTAATACTTTATTCAGTAACCCAAAGTAGAAGCCATGGAATCA
TCAATGATTCTTTAATTTCTGAGCTATCAGTGATTCTTTAATTTCTCTTAACCCTACTGTTCAGGCACCAGGTGCTGTCAATTTTATCTTTTAA
ATAATCCTTCATTCATCTTATCACTGCCATATATCAGAGATACCCTCATCATTGCCCACATTATTATAGTGGTCTCTAAACTGATGACATTGCT
TTCTTTTTTCTATCTGTTCACTGTGACTAAAACTTTTACTCTAAAATGCAAATCTGATCATGTGATTTGCCTGCATCAAAATATTCATTGATTT
CATCACACATAAAATGAAATCCACATTGCCAAGTGTGCTCTGACTTTTAGTTCTCTTTTTAAGAGAGAAAGTGTGTTCCATTTACATTGGTGAT
TCTTAAATAAACCCTCCTCTGTGGACACACTGTTCCCTTTTCCCTAGAATACCTACCTTTTTCCTCTTCATTTCCTCCGCTCTTTTGCTTCATT
AACCGCTCTTTTTCCACTGACACAGTTGGGCATTCCTGACTCTTTCGCTCTTATTTCCGCAGAATTTTGTTAGTGCTTTCCTTCCTTCTGTAGT
CTAATAATATATGTTGTTTGCCTTGCTCTTCTATAAGGTCCTTTAGAGTGACAGTTGGGATACCACCATAGTATCACTAAATCATTGTTTTCAA
GAAAGCATCTGAAATAATAGACACCATTTTTTTTTATTTTTTATTTTTTTACACTTTAAGTTTTAGGGTACATGTACACATCGTGCGGCTTTGT
TACATATGTATACATGTGCCATGTTGGTGTGCTGCACCCATTAACTTGTCATTTAACATTAGGTATATCTCCTAATGCTTTCCCTCCCCCCTTC
CCCCACCCCACAACAGGCCCTGGTGTGTGATGTTCCCCTTCCTGTGTCCATGTGTTCTCATTGATCAATTCCCACCCATGAGTGAGAACATGCG
GTGTTTGGTTTTTTTGTCCTCACGATAGTTTCCAGCTTCATCTATGTCCCTACAAAGGACATGAGCTTATCCTTTTTTATGGCTGCATAGTATT
CCATGGTGTATATGTGCCACATTTTCTTAATCCAGTCTATCATTGTTGGACATTTGGGTTGGTTCCAAGTCTTTGCTATTGTGAAGAGTGCCGC
AATAAACATACTTGTGCATGTGTCTTTATAGCAGCATGATTTATAATCTTTTGGGTATATACCCAGTAATGGGATGGCTGGGTAAAATGGTATT
TCTAGTTCTAGATCCCTGAGGAATCGCCACACTGACTTCCACAATGGTTGAACTAGCTTACAGTCCCACCAACTGTGTAAAAGTGTTCCTATTT
CTTCACATCCTCTCCAGCACCTGTTGTTTCCTGACTTTTTAATGATCGCCATTCTAACTGGTGTAAGATGGTATCTCATTGTGGTTTTGATTTG
CATTTCTCTGATGGCCAGTGATGATGAGCATTTTTTCACGTAGACAACATTTATTGAATGTGTATGTATATATGACACTTCGTAAGAATTTAGC
ACATATAATCTGTCATCTTCACAACAACCCAATGAGGTAGGTGCTATTATGATTATTCCTATTTTACAGAGGAGGAAACTAAGAGATTTTTAAT
TTTAATCACATTTCCTTGGTCTTACTGTTAAGAAGTAGCTGGGGTAGGATTCTAAAGGCCTCTTCTCCATACTGTTCTGATAAGGCCCACTGTG
TTACCATTTCTCAGGATTGCTTGCGTTCTAACAGGATAAGCCTTAGTCAGCACTAAAGTGATTAAGGGACACATTATTATTATTTTTTAATGGA
AAACATCTTCACACCCCTATTAACTCCCCTACTTGCAAGTACAGTTGAGTGTCTATTTACCTTTTCCCCCACAATTTGGATAATAAAAGTAAAG
TTGCATACATTTTAAATAGCTTTATTGACATATAATTTATGTACAACAAACTGTACTTTTAAAGTATGCAATTTGACAAGTTTTGACATATGTA
TACAACCCTGGAATCATCATCACAAGATAATGTCCCCCCTGCCTTTCCTATCCACCATATATCCCTGTTCTTAGGCAACCAGTGATCTGCTATC
GTTCATTGTATATTACTTTACATATCCTAGGGTTTCATATAAATGGAATCATACAGTATGTGCTCTTCTGGTCTAACTTCTTTCACTCAGCATA
ATCATTTTGAGAGTCGTCCATGTTATTATATGTAGCAGCAGTTCATTCTGCAGATGCATATTTTGAATTTTAGTTATTATAGAAAGTGAATACT
TTTTTTTCTCTATTATGTCTTTAGAAAAGGTTTGCATGGGACTGATTGCACATTCTTTGAGCCTAAAGTCCCTCCTGGGGCTTGTTTTGATATA
CTGTGTGTAAGTCCTTTAATATTTGAATGGAGATATAAAAAACTTACATATGCTTCTGCAAGGATTTAAATGCATTTTCATTTTCAGTGAATGG
TCTTTTCATTCAGTATTATGAATATGATGTAAAATCAAGCAGTTAAATATATTTAACTCACTTTAGGAGTGTGATATTTTACTTCTGAATACTG
CCTTCTTTACCCTTCTTGGGGAATCTTGGGGGAAACCCTTCTGCTAGGTCTCACGTGGGAGGCAGATATCTCTGAAGTGGTTATCTCAGAACTT
CATATTGACGTTAGCTATAGATATTAAGCTATAAAGTGCTAACCAGTCAATATGGTTTGAATGACTTGTTTTGACACTACATAGGGACTCAATT
TGAATGGGAAAAAAAGGTGCCTCTCCCAGCCAATCTCCAAGATAACATTTCGGTCTTGTTATTTAATGTTAGGAGGAAAAAAATCTTTGTTTTA
GTCTGCTGTTATAAAAAAAACAGAATGTTAAAATCCATTATTAATTGCTATATTAATCTCACTGACCTCCTCCTTTTTAAAAACTTTTCAGGTG
CGTATAACCGTATATAGAGATAATTGAACAACCCAGGCAGAGGGGAATGCGTTTTTAGATACAAATGTGAAGGGCGATCAGCAGGCAGCATTCC
AGGGGAGCACAGCACAGACAACAACCGAACATACCCTTCTATCCAGGTAATAGACCCTTCTTCTGTGTCTATCTCACTATTAGTTGCTTCATAT
ACTAGCTATAGCAATTATTTTTAAAGGGCCAGTTTCTTCACAGTCATCTCCACAGGTTTATCTTTTCTTTTTTCCTTTTTTTTTTTAAACGGAT
CTGTCAAAAAGACATCTATTAGATAGATGTCTAAGGACATTTCTTAAATATAAAATGGAGTCTTCCCCACTGCAGATAGTTCTATGGTGCTTGT
GTATTAACCTAAGTAGAGCGACTCAATGTTGAGAGTACACTGGCAACTTTTGGATCATGTTCTTTTTCATGGAACACAGAGATAATAAGGAAAA
CCCATTCTCTGCAGAGGTGAGTGATATTATTCTGTAGATTAAACATGGATTTGAGAACTCAATCATAATTCTTCTTGGCTAGTCTTAGGGCTAG
AACATTTTTTTCTCCTTTTTCTTAACTTTATTGCTTGTCTCTGATTCTCTGGGTCATTGACTGATTTGAAATACCACTTTATAAATACAGTTTT
TTCACATTAGCATAAATTTTAAAAAGCTTTTGACCAAAAATGACTTTGGTAAACATACTAATAGTTATAAGATGTACTAAATTTATTTATTTAT
TTATTTTTGAGACGGAGTTTCACACTTGTCGCCCAGGCTGGAGTGCAATGTCGTGATCTCAGCTCACTGCAACCTCCGCCTCCTGGGTTCAAGT
GATTCTCCTGCCTCAGCCTACCGAGTAGCTGGGATTACAGACGCCCACCACCACGCCCAGCTGATTTTTGTATTTTTTAGTAGAGACGGGGTTT
CACCATGTTGGCCAGGCTGGTCTCCAACTCTTGACATCAGGTGATCCACCCATCTCGGCCTCCCAAAGCGCTGGGATTATAGGCGTGAGCCACT
GCGTCCAGCCAAGATGTACTAAATTTATTTATTTTTTTATTTTTTATTTTTTTGAGACGGAGTCTCACTCTGTTGCCCAGGCTGGAGGGCAGTG
GCGTGATCTCAGCTCACTGCAAGCTCCACCTCCCAGGTTCAAGCAGTTCTCCCGTCTCAGCCTCCCGAGTAGCTGGGACTACAGGCGCCCCCTA
CCACGCCCAGCTAATTTTTGTATTTTTAGTAGAGACAGGGTTTCACCATGTTAGCCAGGATGGTCTCAATCTCCTGACCTCGTGATCCGCCTGC
CTTGGTCTCCCAAAGTGCTGAGATTATAGGTGTGAGCCAACATGCCCAGCCCAATGTACTAAATTTCTATTTTCTATTTGTAAACTATTTTTCT
TTGACTTTCAATGAAGGGTTTATCCTTTAAATGCCAATTAAAAACTTTAATGGCAAAGTAGATTTTGAAAAGTGTTGCTTTTTGTTTTTGTTTT
TGAAAAGTGTTACTTTTATCAACAGATCTTAATTCACTGTTTTATAACTAGATTATTTACAAAATCTATTCTGTTGATGAACTTAAAGGGAATT
GCTGAATTATAGAATAAACCAATGGCAAAATTATATATATTGAATTCCAGATTTCTATTTTTATCACATTTTTGGCAGTAATATGGATTTGGGT
TATCTAAGTCTTTTAAATGTTAAAATGGATGAGATGCTAATAAAAAGGAAATAAGGAAATACTATTTGTCCAGTTTTTTGAGTCATTTTTAAAC
TTTTCTTCATAATTCATCTTATCCTATGCATCTCTATTTCTAAGATATGTATTTTTACCATTCCAGTAGGTCCTAAACACTTTACAGCTTGAGT
TTTGTATTTGCCTACTTATAGTCTTGAGCAATTACCTTCTCTTTCATACAGAAAGAAATGTAATACTTCTTGGTTACTTTCAAATTCTATTTAA
ATTCAAAATTATGGATTTTAGTGCCCTCTACCTTGTAAGCTACCCATTCTTACTTTACCTTGCTCCTTTGTGGTATGCTGGTTTTTATAGTCCC
TGCTTTGTTCTTGCAACTTTACTAGCTTTCAAACTAAGCATTAATTCCTGTCCTCCTTCCTCTTCCATGTTAAACTCTCCTTTTTACTCTGTGT
TCTAGCTATACTTTCTATGTGAAATTTGATGTTGTTAAACTCAATTTGATTTATTGCCTATTCTAGAGTAAACACTTGGGGTATGCTTACTGAA
CAAATATTTTTGTGAAGTGAAATGTCATATATTAAGTAAAATGATCATATTTATGTGCTATCCTTTCCAATACGGCTTAAATATATTTTCAAGG
AATGTTTATGGTATGACAGTACGTTAAAGAGCTGGGCATTTAGTGACTTAACATCTGTTTTCTCATGTTCTATGGATAAAATTTGGGTAGAGTT
TTACTTGTTTTGAAAGGAAAATAAGCCCAGTCAAATGATATGACCAATTGAAATTAGGGCAGAAAATATGTCAAGAAACTGAGAGGTAAGTTTT
TCTGTACTGGTATTCTCTGGAAAGTTTCATCTAAACTGCAGTTGTTCGTCAGCTGGATTTTATTTATCTAGTGCCAATTACATTATAATTAATG
TAAATTGAATTCTCATTTAGTAGATCAGTTTATAATGCAATCTATTTGGATCATGTATTTAATTTCCCCCTTTTTTCAGATTATGAACTATTAT
GGAAAAGGAAAAGTGAGAATTACATTAGTAACAAAGAATGACCCATATAAACCTCATCCTCATGATTTAGTTGGAAAAGACTGCAGAGACGGCT
ACTATGAAGCAGAATTTGGACAAGAACGCAGACCTTTGTTGTAAGTACACAGTTACAGACATCTTCAGAAATAAGATAAGACATAGGATGTTCT
GTTTCTTCTCCATGACAATCTGTTACTTTTTAGCAGAATAATTTTCTCATTCTACTTCTATTTACTGTATTTTACACTTACATTTTTACTATTT
GCATTAGAACTACCCTTTCATTCTTTATTAGTAGACACATCTTATGATAGTTAGCAGGAAGACATTTTTATTGTTATTAAAAGTAAACGTAAAC
TTCTTGTATACTGTGATTTCCTTTCTTGGGGTGGACAGTTTTTGAAATAATTATTCACTCTGTCTTTTTTTTTTTTTTTTTTTTTTGAGATGGA
GTTTTACCCTTGTTGCCTAGGCTAAAGTGCAATGGCGCAATCTCGGCTCACTGCAACCTCCACCTCCTGGGTTCAAGCGATTCTTCTGCCTCAG
CCTCCCGAGTAGCTGGGATTACAGGCATGCACCACCACGCCTGGCTAATTTTTTTGTATTTTTAGTAGAGATGGGGTTTCTCCATGTTGGTCAG
GCTGGTCTGGAACTCCCGACCTCAGGTGATCTGCCTGCCTCGGCCTCCCAAAGTGCTGGGATTACAGGTGTGAGACACCGTGCCTAGCCTCTGT
CTTTTCATTTATAGTTAACTTATTATTATTATTATTTTGAGACAAGGTCTCGCTCTGTTACCCAGGCTGGAGTGCAGTGGCATGATCTCGGCCC
ATTGCAACCTTCACCTCCAGACTCAAGTGATCTTCAGCCTCAGCCTCCTGAGTAGCTGGGACTGCAGGCATGTACCACCATGCCCGGCTAATTT
TTGTATTTTTTGTAGAGATGGGGTTTTGCTTGTTGCCGAGGGTGGTCTTGAACTCCTGGACTCAGGCAGTCTGTCCACCTTGGCCTCCCAAAGT
GCTTGGGATTACAGGCGTGAGCTGCTGTGCCACGCCCATTTACAGTTAACATAAAAATGCCTGGATGTGAGAAAAATCAACTGGAAAACTCTAG
AGTTATTATTTAGAAAGTGGCAGGTTATAGAATTAACATACAACAATAGTTCTAAGATAAAAATAGTCATGTAATACTTCATGATAGTGAGGCT
ACCAGAAGATGGGCCCATTCATCATGTTAGAATGTAAATTAATAAAGACGTCTGGTAGGCAATTTAACTACATGGCAAAAGCCTGAAAAATATT
AATGCCTCTTGAGCCAGCTGTTCCACTTCTAGGAGTTTAGCCTCAGAAAATAATTAAGTGTGTTCAGACATTATGCTCTAATGCTGTTCATTGC
AGTTCTCTTTGTAATGGCAAAAAGCTAGAAGCAATCCAAATAGTAAGCAAAGGGGATTAATTAAATAAACTGATACATTCATGCAATGTACTCC
TGTACAGCCTTAAAAATCATATTGCCAATATGTCTATTGGTATGTAAATATAGTCACAATATATTAGATAAATAGGTTTTCTGTTTTTTGTTTT
TTTTTTTCTTTTTGAGACAGTCTTGCTTTGTTGCCCAGGCTGCAGTGAAGTGGTGTGATTTCGGCTCACTGCAACCTCCACCTCCCTGGTTCAA
GTGATTCTCCTGCCTCAGCCTCCCATGTTAGCTGATATTACAGGCATGTGCCACCATGCCCAGCTAATTTTTTGGTATTTAAACCATTAGAGAC
AGGGTTTCACCATGTTGGCTGGGCTGGTCTCGAATTCCTGACCTCAGGTGATCCACGTGCCTCAGCCTCCCAAAGTGCTGGGATTACAAGCGTG
AGCCACGGCACCTGGCCAGATAAATAGGTTTTAAAACAATATGTAAAGAATAATTTTATTTTTGTTTAAGATAAATTTATACATATACATGATG
TGTATATGTTAATACTAAGGTATTAATAGTAGTTGTCTGGGTGGGTAAGATTGTAGGGTTTTATGTTTTTCTTTTAACTTATATTTTATAATTC
ATTTTTGTAATGAACATGTATTGGCTTTTGGGGAAAAATGAACTAATGGCAACAGAAAAGAGATTAATAGTCTCCACATATATTAGTAATAACC
ATTTAGAAAAAAATACTTTAAATGCTCCTCTTACAATAATAACACAAAAGAAAATATCTAGTATTATACACACTTGGCAAATATTTGTCTATAT
TACTTGACCTCCCAACAACATTTTACACTGTGATCACTCCTTACTTGAAACATTTTTATTCCTTGCTTTCTGTGAAAACAAACTTCCATTTTAC
TTCCTGCTTTTCTGGCTGTTCTTTCTTAGTTACAGGCAGTTAAATTTTTGGACCACCTCACTTATTGTCCTAATAATGCTCTTTATGGCTGTTC
CAACTCTCTCCCCAATTCAGGATCCCATTAAGGATTACACACTATAGGTAACATTATATTTAACATGAATAACATGAATAATATTTTCATGTTA
ACATGAAACATTTTGGGCAAGAAATCTATAGAAGTGATGCAGTATAACTCTAAAAATATCCCTTCAGTTTTTTACATTATTGGCGATATTATCT
TGGCATTCTATTATAAAGAAGAACTTTCCCTTCCTCTCTTTCTCCATTTAAAAAGTATCACTGTAAACTCATGCATTCTTGTATTTAATATATT
ATAGTTATTCTGTTATTCTTTTGATTTTCAAATTGACCCAGATTTGACTAATGCAAGCCTCTTCAAACTGTCTCCTGTGTTTTTTTGATATGCC
GTCATCTTTCTTTGAGCACTTTTTTACTTTCTGACAAAATGAAATGTTCAAGACTTGTGCTTTTCTTTTTTCTTTTTTTTTTTCCTTTTTTTTT
GAGACAGAGCCTTGCTCTGTTGCCCAGGCTGGAGTGCGGTGGTGCGATCTCACCTCACTGCAACCTTCCCCTCCCAAGTTCATGCAATTTTTGT
GCCTTGGCCTCCCAAGTAGCTGGAATTACAGGCGTGCACTACCACACCCAGGTAATTTTTGTATTTTTAGTAGATACGGGGTTTCATCATGTTG
GCCAGGCTTGTCTCAAACTCGTGACCTCAGGTGATCCTCCTGCCTCAGCCTCCCGAAATGCTGAGATTACAGGCATGAGCCACCGTGCCTGGCC
AACTTGTGCTTTGCTTGCCCCAGCCCTGAAGTCATCAGCTTTTTCCAGAGATTCTTGGTTCCTTCTGGTGGGGAATGGTAGTAAGTCTGATTGC
CTTCTCAACATATTCCCTTAAATGTCTCAAAAGTACCTTAAGTAGCGGGGCACAGTGGCCCATGCCTGTAGTTACAGCTACTCAGGAGGCCAAA
GCAGGAGGATTGCTTGAGCCCAGGAGTTTGAGTCCAGCCTGGGCAACAGAGCGAGATTGTATCTCTTTAAAAAAAAAAAAAAAAAGCACTTCAA
ATAGAATATTCCCCAAACGTGATTTTACTGTGATCATATCTCTTTCCCCTCATAACTGGTCTTCTTCCAATGTGCCGTATGTTAGTGATTGCGA
TAAAAGACCTATAGGTGTCATCTCTGACATTCCTCATCCAGGTGTACACATTGAATCTACTAACAGTTACCTTCTCAACTGGTTTTGAATCTAT
CCACTTCACTCAGTGAAATTCATCACCGTCATACTACCACTATAGCCTAAACTGGGGCTGCTGGAATAACCTCCTGACTGGTCTTGCATTAACC
ATTTTGTACCTTTTCCAAACCCTCTATCTTTCCTCGCTTTAGCCAGTGTGATCTTTTAAAATACAAATGAAATTGTCTTTCCCTTGCTTAAAAC
ATTTTAATGGGTTTATTTGGCTCTTGGAATAAAGACAGCATTCCTTCTATATAGCCTATAAGGCCCACATGACCCACCTTTATTTCTAGCCTTC
TATTAAACTCTGCTTTCCTTAATTTTTATACTCCACTCACAATGCCTTCCTTTAGTTTCCTCTGTTTCCACTGCTCTTTTCTAGGGGTCTTTGT
GTGGCCTGTTCCTTTTGCCTGGAAGTGTTTTTCTTCTGTTCCAGCATAGGCTCCCATAACATCATGTATACCTCCTTCATAAAACTTGTTATGA
TTGCAGTTTAGCATTTGTGTATGTGTGATTATTTAATGTATATCCACTTGACCAGAGACTACCAGACTTTTTCTGTAAAGTACTAGATAGTAAA
TGTTTGGGGTTTTGCAAGCTGTATGGTCTCTGTTGCTCAGCTCTGCTGTTGTAGCATGAAAGCAGCCATAGATAATATGTAAACATCAGTTTGG
CTGTGTTCCAATAAAACTTTATTTGCAAAGACAGACAAGATGTTGGATTTGGTCCATGAGTTACAGTTTGCCAATCTTTCCACTAGACTGTAAG
CTTCTTGAGGAAAGGGATTGTATATCCCCATTACTTTGCAGAGTTTTTGGTATATAGTACGAACCCCAAAGCTTGTTGAATGTCTGTGAATGAA
TGAATGAATAATTGATTCAAACAATCTCTTGATCCTTCATTTCAGAATTTCAAAAATTACCACCACCCCTAATATTCCGTGAATAGCAGTCAAA
TATGAGATTATTCAGATGAAACAAAATGAAGTAATATAAATGTATTAATATGAAGAATTCTATAAAATCTTTTTACCAAAGAAAAAGAATCAAC
CAAGAATCTTTCAAAGAAGTGGAAATACTTTTGAGGAAGAGGATTATAGTTGCAAGATTTCAAGAAAGGATTAAGAATTCAAGATTTAGCTGAC
CAAGCATAGTGGCTCATGCCTATAATCCGAGCACTTTGGGAGGCTGAGGCAGGTGGACTGCTTGAGTCCAGGAGCTTAAGACCAGCCTGGGCAA
CCTGGTGAAACCCTGGCTCTACAAAAATACAAAAATTAGCCAGGTAGGGTGTCATGTACCTGTAGTCCAGCTACTCAGGAGGCTGAGGTGGGAG
GATCACCCGAGCCTGGGAGGCAGAGGTTGCAGTGAGCCGGTATGGTGCCACTGCATTCCAGCCTGGGTGGCAGAGTGAGATCATCTCAAAAAAA
AATGTTTTTTAAGATTTATTTTTGTAGTTATTGGAGGCAGAGGAAGGAAATGTGAAAGATATTTTAGATGCTAGCAAAATTGTAGATGTGAAGA
ACATGAGCATAAGACAGCATGAGTATGGAGACAGGCAGACAAAGTAGCCTCCGGTTGCAAGTGCCATGTGAAGTTTGAACAATAGTAATGTTAT
TATAATTGAGTTTTTGCTTCCTTATTCACGCCCACCCAATTTTACTGATGTCATGGTTTTCCATGTGGGAACAAGTATGACTGGTGGTGGTGGG
GGAGTTCCCCCCACCATCGTCTATGCTACACATATGCAAATTAGTAGTATTTGTAGCTATTGGGAAGTTTTTCATAAATGACATTTTGAAACTT
GTTAAATATTGTTAGCATTAAACTTCTTTCTAATACAAAAACATTTTAGTAATTTTTTATGATGAATGGCTATAACTTTATATAATGTGGCACA
AAACATATTCTACTGCTAATAACAGTGAATTCAGGGGCTCAAAAAGCAATCTCTGTGGAGCTAGGCAAGCAGCATAAATGAGTGGTGTGGATCA
AGTGTAGGAGGACTAACAGGCACTGTAGCAAACTAAAGAGCCCTGAATAAATGGGGCTTAGTCCCTAGCCTGTTGTTTCTGTGCCAACCTAGTA
TTGCCAGGTCTTTAAAATGTACAAGAGAAGCCGGAAATCCAGATGTTCATATGCAATTACCTGATTTCTAAATGTAGATAACCTGTGCAGATTT
TTAAAAATATAGGCAACACTTTTGTGAGCCTAGCAAAACATACCTGTGGGCTTCAACCTGTGAACATCTCTTTACAGCTTTTGCTTTACATTAT
CAAACAGACTTTATTGATTTGATTCTGAATTTGTTTGGGAGGCAAATTTTACCATTTAATATTGCTTTACTGTTAATCTATATTTTGGTATGTT
TGACATAGGCATATTAGTAATTGTAAAACACTGTATGTTAAAATGATATAGTATATATTATTTTTCTTTTAACAGTTCTTAGAAGTACAACCCC
ACTTCTTTTTTTTTTTTTGAGGCAGAGTTTTGCTTTTGTTGCCCAGGCTGGAGTGCAATGGCGTGATCTCGGCTTACCGCAACCTCTGCCTCCC
AGGCTCAAGTGATTCTCCTGCCTCAGCCTCCCGAGTAGCTGAGATTACAAGCATGTGCCACTATGCCTGGCTAATTTTGTATTTTTAGTAGAGA
CGGGGTTTCTCCATGTTGATCAGGCTGGTCTGGAACTCCTGACCTCAGGTGATCCACCTGCCTTGGCCTCCCAAAGTGCTGGGATTACAGGCAC
AAGCCACGCGCCCAGCCATATAATCCCACTTCTTACTCTCTCATCTTTATCAGAGCAATTGGAAGCACGTTCATGCTTTGGTATGTACAACTGA
CAGCATGATAACTTCAGTATTGCTATATGTTTGATTTTTGCAATATTCCTTGTGTTTATAATGCAGTTTTGAATATTGTTTTTTTCCTGCTAGT
TTCCAAAATTTGGGTATTCGATGTGTGAAGAAAAAAGAAGTAAAAGAAGCTATTATTACAAGAATAAAGGCAGGAATCAATCCATTCAATGGTA
AGTATGTTTGATAAAATCATTTCTATTTATTGGGTGTTGATTTCTGTTTCTTTTTTTCTTCCCTTTTTTTTTTTTTTTTTTTTTTTGAGACGGA
GTTTTGCTCTTGTCGCCAGGCTGGAGTGCAATGGCGCGATCTCAGCTCACTGCAACCTCCGCCTCCCAGGTTCAAGCAATTCTCCTGCCTCAGC
CTCAGCCTCCGGAGTAGCTGGGATTATAGGCGCCCACCATCACACCCAGCTAATTTTTGTATTTTAAGTAGAGACGGGGTTTCACCATGTTAGC
CAGGCTGGTCTCGAACTCCTGACATCAGGTGATCTACCCGCTTTGGCATCCCAAAGTGCTGGGATTACAGGCGTGAGCCATTGTGCCCAGCTAT
TTATATCTTCAACCTGTGTTTTAAGTTCTGTGTTTACTTTTCTACTTGTTGACATGTACCTGTATCTGAGGAATGACGTATACTATTTAAAATA
GTTTCTTCACAGTTGTTGAAAAAAATCTTATGCACAGAGAGGTTTTTGGTATTGTTGGAGAGTGTCACTGTTTTATATAATAAAACTTCAAAAT
GTTGTGATCCTTTTGAACATGGCCTTCCTTATGCCACTTCCAGCAGACAACATACACTCCCCCCTTTTGAGTGTTAAATAGGCACTGTGTTTAT
AAGGTATTGGAGTGCATTTAGCTCAAGGGTAACACTTAATCCCAATGTGGAAGAAGAAGCATAGAAATAATAGAAATCACACAAAGTATTTTCA
TAGCATATTTGTGTATATGACTAGATATTTACTGTTCAGTGAATTTTATTGGGGATAGCATTTATTAAGTATTTATACTTATGGTACTATCTGC
CTCATGCTGTAAGTATAAATGCTTAATACTCCCTGGCTAACTGTTACTTGTAAGCACTCTGTATTGTTTGAATAGATAAGTACTACCACACTAG
ATGTGGCATCCTATACTTAGAGTAGCCTCCATTCTGAAGTCTTTGCAGCTACTTAAATATGCAGAAGTCAGGAATTAAATGACTGTAATATTTT
TCAAAGAATATATTTCTTGGTCATATTTGAGACATCCTTATACTGTTGGTTTGTATTTTTCCTGGATGTATAAAAATAATTTAAGAGATATGTT
GATAATTTAAGGAATATATTCACAGGTAATTACTGTTTTATGAACCATAAGATCTGCATCTCTTTAGGTTTTATTTTTCACACTATTTAGTATA
AAGCGGAAAGTAAAAGTCACCTTCTTCCCTTCCAGTCTTACCAGGGGAGACTGCTATTAAGTTTGATGTATATTTTTCTAGAATTTTCTTTATA
CATGTGTAGTTATATGTAGACATATATATTTTATAAAAAAGGAATCATGCTATATATCCTATTCTACTCCTTCATTTTTTTCCACTCAGGAATA
TACCTTAAACTTTCCATGTCAATACTTACAAATCTGTTTTTTTTTTTTAACAGAATATTTTATTGTTTGGGTAGAACATAATTTGTTTATTTAG
TCATCTTTTTTTTTTTTTTTTTTGAGGTAGTCTTGCTCTGTCGCCCAGGATGGAGTGCAGTGATGTGATCACAGATCACTGCGGCGTTGACATC
CTGGGCTCAAGCGGTCATCCCACCTCAGCCTCCCAAGTTGTTGGTGCACCACCATGCCCATGCCCAGCTAGTTTTTGTATTTTTTGTAGAGACA
GGGTCTCGCCATGTTGCCCAGGCTGGTCTCAAAACTCCTGAGCTCAGCAATCCACTTGCCTCGGCCTTCTAAAGTGCTGGGATTACAGGCATGA
GCCACTGCACCCGGTCTATTTAGTCTTCTATTAATGAACATGTATGTTGTTTTCATTTTGTTTTAAAAGCTCCACTGAATATACACTGTGAGCT
CTTGTGTGATTATTTCCCTAGGATAAATTTTTGGAAGTGGAAAATTTCTGGGTCAAGAGTATGCTCATTTAAAATTGTGATTCATTGCCAAATT
AATAGGCCAGACTTTTAAAGAGGCAGGTAAGTCTAGATGCAATATAAAACAAGGAAATTATAAGTGATAGCTATCATTTATTAAGCACTTCTTG
TATGTCAGGGAGTAAACGTTAGTGCTTTATGCACACTACTTTATTTAATCGTTGGAACAATTCTGCTTTATGGAAGAGAATGCCAAGACTTTTG
TTATTTAACTGTCCCAAATCATGCTGCAAATATAAGTGGCAGACCTGGAATTCATATGCAGGTTCCTTGACTCCAGTGGTAAAGGCATTAAAAA
GGAGATGCTGTCTGTGGAATTTCTTTTTCTTAGTTTTGGCAGCTCAGAATCAGGCTTGTTTTTTTGAGATGCCCGGGCTGGAGTGCAGTGATGT
GATCACAGCTCACTGCAGCCTTGACCTCCCAGGCTCAGGTGATTCTCCCACCTCAGCCTCCTAAGTAGCTGGGATTACAGGTGTGCATCACCAT
GCCCAGCTAATTTTTTTTTTTGAGACAGAGTCTCACTCTGTCACCCAGGCTGGAGTGCAGTGTCACAATCTCGACTTGCTGCAACCCTCACCTC
CTGGGTTCAAGCGATTCTCGTGCCTCAGCCTCTCGAGTAGTTGGAATTGTAGATGTATACTACGCCTGGCTAATTTTTGTATTTTTATTAGACA
CAGGGTTTCACCATGTCAGCCAGCCTGGTGTTGAACTCCCAACCTCAAGTGATCCTCCTGCCTCAGCCTCCCAAAGTGTTGGGATTACAGGTGT
TAGCCACCACGCCTGGCCAGAGTTTCTGTATTTTTTGTAGAGATGGGTTTTGCCATATTCTCCAGGCTGATTTCAAACTCCTGGGGTCCAGTGA
TCCGCCTGCCTTGGCCTCCCAAAGTGCTGGGATTACAGGTGTGAGCCACTGGGCCCGACTCAGGCATGATATTAATAGTGAATTCTCATAATGG
CAATTAAAATAGTTGTTGGTAGATAGTAAGTGCTTTATATATTTTATTTCATTTAATCCTTATAACAGCCTACGAAATAGGTACTATTAATAAC
TCAATTTTAAAAATAAGAAAATGGAAGCATAGAAAAGTGAACTCAGGCTTGTAATCCCAGCACTTTGGGAGGCCGAGGTGGGGGGATCACGAGA
TCAGGAGTTCGAGACCAGCCTGACCAACATGGTGAAACCTTGTCTCTACTAAAAACACAAAAAATTGGCTGGACGTGGTGGCACGCGCCTGTAG
TCCCAGCTACTTGGGAGGCTGAAGCAGGAGATTCGCTTGAACCCAGGAGGTGGAGGTTGCAGTAAGCCAAGATTGCTCCACTGCACTCCAGCCT
GGGCGACAGAACGAGACTCTGTCTCAATTAAAAAAAAAAAAAAAATTAGCCGGGCGTGGTGGCGCACACCTGTGATCCCAGCTACTCAGGAGGC
TAAGGCAGGAGAATCGCTTGAACCCAGGAGGCGGAGGTTGTGGTGAGCCGAGATCACGCCATTGGACTCCAACCTGGGCAACAAGAGTGAAACT
CCATCTCAAAAAAAATAATTAAAAAAAAAAAAAATCAAGTAGGCCAGGCACGGTGTCTTATGCCTGTAATCCCAGCACTTTGGGAGGCCAAGGT
GGAGAGGATTGCTTGAGCCCAGGAGTTTGAGATCAGCCTGGGCAACATGGTAAAACCCCATCTCTACAAAAATTTTTTTTAATTAACCAGATGC
AGGGGTGCACAACTGTGGTCTTAGCTACTCAGGAGGCCGAGGTAGGAAAATTGCTTCAGCCTGGGAGGTCAAGGCTGCAGTGAACGGTGTTCTC
ACTATTGCACTTCAGCCTGAGCGACGGAACAAGACCCCGTCTCTAAGTAAAGAAAAGGAAAGTAATTTGTTCAAGGTTATATAGCTGATGAGTC
GTAGAGCTAGGATTTGAACATAGGGAGCCCCTGACTCTAAGGTCATGGTTTTAACAACTCTACCATGCCGCCTGGATGAATATTGATTTGGGGA
AGGAACAATCCTGCCAGTTAATCCTTCCCACTATTATGTTTCCTGTTGTTGTTTACTTGTTTTTTCTTTGTTTTGTTTGTGATGGAGTCTCCCT
CTGTCGCCAGGCTGGAGTGCAGTGGCACGATCTCGGCTCACTGCAAGCTCCGCCTCCCGGGTTCACACCATTCTCCTGCCTCAGCCTCCCCGAG
TAGCTGGGACTATAGGCACCCGCCACCGCACCCGGCTAATTTTTTTTGTATTTTAGTAGAGATGGGTTTCATCGTGTTAGCCAGGATGGTCTCA
ATCTCCTGACCTTGTGATCCGCCCGCCTCAGCCTCCCAAAGTGCTGGGATTACAGGCATGAGCCACCACACCCAGCCTGTTTGCAAATTCATTC
CTTCCCGAGCCTTTCAGCAGTGGTTCTCAATTTGAATGTGCATAGGAATATCTTAGTACTGTTAAAAATGTAGATTTCAGGCCACACTTCCACT
AATTTGATAGGGCTGGTATGGGTCCTGGGAATCTACATTTTAAAAAATATTTTTAAAATAATAACTTATCCGAGTCACATGGCACCAAAGTGTG
TTAGCAGCCAAAAGTATCTGTTCGGGTCTGCAGCAGCCCCAATTCTTGCCTCCTCAGGAGACAGAAGGAGAGACCGAGACAAGTTTTAGAGCAG
GAGTGAAAGTTTATTAAAAAGCCTTAGAGCAGGAAGGAAAGGAAGAAAAATACACTTGGAAGAGGGCCAAGCAGGTGACTTGAAAGACAGGTGT
GCTGGGAATCTGCATTTTAACAAACATCTAGATCAGTATTTCTTAACTCTTTCACCATGACCCACAGTAAGAAATAGATTTTGTTTTTGAGTTC
AATATATATACATACACCACACCCTTAGGACAGCGATACCCTATGTATTAGTCCGTTTTCACTCTGCTGATAAAGACACACCTGAGACTGTGAA
GAAAAAGAAGTTTAATTGGACTTACAGTTCCACATGGCTGGGGAGGCCTCAGAATCATGGCGGAGGTGAAAGGCACTTCTTAGATGGTGGCAGC
AAGAGAAAATGAGGAAAATGCAAAAGCGGAAATCCCTGATAAAACCATCATATCTTGTGAGACTTATTCACTACCACGAGAGCAGTATGGGGGA
AACCACCCCCATGATTCAAATTATCTCCCACTGGGTCCCTCCCACAACACATGAGAATTATGGGAGTACAATTCAAGATGAGATTTGGGTGGAG
ACACAGAGCCAAACCATATCGCCCCACTACATGCAGTGTACTCAATTCTATTCTGTACCTTTCCTTTCCCTTCTTTTTCTTTCTCTCTTGCATT
GTTAGTGCTTACCCAGCCCACTAAATTAATTTTACAATCAGTGGTTCCCAAGCTACAATTTGAAAATCTCTATCTGAGATGATTCTGATGCAAG
TGATCCACAGAGTATACTCTGAGAAACTTTGATCTGATCTACATGCTGAGTTCAGCTTCTCAAATATGGCCTTTAAAGCCCTTCATAATCTGGA
AGCCTTCCTTTCCATTCTAGCTTTCATTCTGTACCTCAGCTTCCTACCCCTCCTTCCTCTACCACTGAGTGCACACATGCACTTACTTGTTTTT
GCCGTTCTGAACTATCTGCACTGTTAGAAGAGCCATGTTCTTTCTTACCTCTGTGCTTTTATACATGCAGTTCCTTTGCATGAAATACCCTGAT
CTGCCTGGTGAATTTTTCTTACTCACCCTCCAAGTTTAAGGATCACATCGTCTTTAAAGCCTTCCCTGACCTTCTCTCTGTTTTCCCAAAGTAC
CTGTGTGTGTGTGTATATATATATGTGTGTGTATGTATGTGTGTGTGTGTGCGTGTGTGTATGTGTGTGTGTGTATATATATATATATATATAT
ATATTTTTTTTTTTTTTTTTTTCTTTTCCGAGACAGAGTTTCGCTCTTGTTGCCCAGGCTGGAGTGCAATGGTGCAATCTTGGCTTACCGCAAC
CTCCACCTCCCAGGTTCAAGCAATTCTCCTGCCTCAGNNNNNNNNNNNNNNNNNNNNNNNNNNNNNNNNNNNNNNNNNNNNNNNNNNNNNNNNN
NNNNNNNNNNNNNNNNNNNNNNNNNNNNNNNNNNNNNNNNNNNNNNNNNNNNNNNNNNNNNNNNNNNNNNNNNNNNNNNNNNNNNNNNNNNNNN
NNNNNNNNNNNNNNNNNNNNNNNNNNNNNNNNNNNNNNNNNNNNNNNNNNNNNNNNNNNNNNNNNNNNNNNNNNNNNNNNNNNNNNNNNNNNNN
NNNNNNNNNNNNNNNNNNNNNNNNNNNNNNNNNNNNNNNNNNNNNNNNNNNNNNNNNNNNNNNNNNNNNNNNNNNNNNNNNNNNNNNNNNNNNN
NNNNNNNNNNNNNNNNNNNNNNNNNNNNNNNNNNNNNNNNNNNNNNNNNNNNNNNNNNNNNNNNNNNNNNNNNNNNNNNNNNNNNNNNNNNNNN
NNNNNNNNNNNNNNNNNNNNNNNNNNNNNCTGGAGTGCAGTGGTGTGATCTCGGCTCACTGCAAGCTCTGTCTCCCAGGTTCACACCATTCTCC
TGCCTCAGCCTCCCGAGTAGCTAGGACTACAGGTGCCCGCCACCATGCCCAGCTAATTTTTTTGTATTTTTTAGTAGAGACAGGGTTCCACCGT
GTTAGCCAGGATGGCCTCGGTCTCCTGATCTCGTGTTCCGTCCACCTCGGCCTCCCAAAGTGCTGGGATTACAGGCTTGAGCCACCACGCCCCG
CCTTATTTGTACTTTTCTACCAAAAATATCACAGTTGTTTTCCTTACCTGAGATGCCCTGAAAGCCTTCTCAGTTCTCTTAAGTCTGAGATAAC
ATCTTCCTAATTATACGGTATACTCAGCAATTAATCATTGAAAGTTTTGTGTTATCTGTTAGATCATTTGATTCTTCAGGAATTTTCTTAAAAT
ATTAATTTCATGCTACTTGTGGACAGGGTCTGTGATGGAATCTTGTTTCCATTTCACTTTGGCACCTAAACAATGTATTTGTTTTACTGTTATC
TCTATCTTCTCAGCTAAGTGCCTTGAGCTATTGAGTTTCCTACCTGCACACAATAGATTCCCCAACTAGTGTGTTTTAAGGCCGGCCTTTATCT
TTCTTGCCATTTGTTCTTTAAAACTAAGAAACAGTCTCTAGCAAACGGGGCATAAAGCAGTCTAATACTGTCAAATTTGAGGCTTCAAGTAAAG
GATTATTCAAATTGTCTAATTGCCAAAGTCTAAATTGGGTGAGGAATTTAATTAGGGACTCCAATATCAGATTTTAACAGTGTTTACTTAGCTA
GAACAAGAGTGGCAGTTAGACTTTGTAGAGGACTCTTAACTGCAAAAGCTGAAAAAAATTTGTAATTATATATCATTTTCTAGTTATGTACTTT
GGTAATGAAATGTTAGGATTTCTAGTATGCGGCAGTTAAACTCCATAGAATATCTAAACTGTATATTAAATTTTGTGCAATAAAATTGATTTTG
ACAATAAAGAATTTGCAATTAAGTTTTATTAGGTAGTTTACTGTTTTCCCATGTAGAGAATCTTGAGTTGTTATGAGAGTAAAAGGCTGCTATA
CAGTTGAGTTTGGGAAAACTACATTACTTAGTAGTCTGAAAGGGAATACAGTTTAATAAGTAGTCTAACATAGATTCTTATCTCTAAAGTCTGG
TCTAATACAAGAAAAAGCCTTTCCTTACAACTGAAAACTTAAAGTTTGAAAAAATGGCTCATGTGTACTTCATTGTCCTTTCTTTATTGCAGTC
AGAGTTTTCGAAGCCTTTTTTTCATTACCCTAGGCAGAACTTGTGTACTTTCTTGCTTTCAGTATTCCTTGAGCATATTTCCATTATAAAGTTT
TTCATGTTGTATTATATAATTTTAGTTTATGTATCTATTTCTCATCCAGATACTCATCTCACTAAGGTCAGGCATTGTCTTTTCAAATTTGTAT
CTAACACTTTACTATGGTAGCACATAATAGATACTCAATAAGTATGTTGAAAGGTTGAGTAAATTAATGATATACTTCTAGTATACTTCTAGCA
CCTTTACTGTTTGCCTGGCACATGAACACTTAAATGTCAACTTTTATTATTATACATAGGGGATACTTTATATACTTTTTAAGTAACAAAAATG
TAAATTAATTATAACTAAATTTTATATTTTTCCTTAAGTGAGACTTAGTTCATTTTTTTTTTTTCTATTATTTGTAGAGACAGGGTCTCCGTAT
GTTGCCCAGGCTGGTCTTGAACTCCTGGGCTTAAGTGATCCTCCTGCCTCGGTTTCCAAAAGTGCTGAGATTACAGGCATGAGCCACCATGCCC
GACTGAGACATAGTTCTTAAAATTGTTATTCCAGGCTGGGCGCAGTGGCTCACGCCTGTAATCCCAGCACTTTGGGAGGCCGAGATGGGCGGAT
CACGAGGTCAAGAGATACAGACCATCCTGGCCAACATAATGAAACCCTATCTCTACTAAAAATACAAAAATTAGCTGGGCATGGTGGCGTGCAC
CTCAGTCCTAGCTACTTGGGAGGCTGAGGCAGGAGGAGAATCAGTTGAACCAGGAGGCGGGGGGTTGCAGTCAGCTGAGATGGCGCCACTGCAC
TCCAGCCTGGCGACAGAGCAAGACTCCATCTCAAAAAAATAAAATTATTATTCCATATGCTGTGTATTTTTGCCTTGTTATTTATTTTTTATTT
CAGTAGTGTTTGACAGTATTAGAATTTTAGAAATGTTACACTTCTAGAGCTAGTAGACATAATTGATTTTTAAAATTTAATTCCTGCTTATGAA
AAATATAGCATGATAATATCTTCTTGGTTAAGAATGAAATTCTCATTACACACCTACTGATTTTAGGGTTAAAGGAGTGATATTTCTTTCTAAA
GGTAGATTAAACATTTAACATAAAAAGGAAGGGGCTGGGCACGGTGGCTCACACCTGTAATCCCAGCACTTTGGGAGGCTGAGGTGCGCAGATC
ACGAGTTCAGGAGATCAAGACCATCCTGGCTAACAGGGTGAAACTCCGTCTCTACTAAAAATACAAAAAATTAGCCGGGCATGGTGGCGGGCGC
CTGTAGTCCCAGCTACTCGGGAGGCTGAGACGGGAGAATGGCGTGAACCCGGGAGGCCGGAGCTTGCAGGGAGCCAAGCTCACATCATGCACTC
CAGCCTGGGTGACAGAGTGAGACTCCATCTCAAAAAAAAAAACAAAAAAAAAAAAAAAAAAACATAAAAAGGAAGGAGAACAGGAGAACAGTTA
TTACCTTATATTTTGACTAACTACAAAGTGAAATTTTAAACTAGTTTAAGAGGAATTTGAGAGAAGTCGATTGGTCTCATGCTTCCTTCCGTTA
GTTTCTGCAAATGTTAAAACTGAGTATCAGGCCAGGCACGGCCACTCACACCTGTAATCCCAACACTGGGGGCCCAAGGTGGGTGGATCACTTG
AGGTCAGGAGTTCCAGACCACCTTGGCCAACATGGTGAAACCCCGTCTCTACTAAAAATACAAAACTTAGCCAGGCATGGTGGTGCATGCCTGT
AATCCTAGCTGCTTGGGAGGCTGAGGCGTTAGAATCTCTTGAACCCTGGAGGCAGAGGCTGCAGTGAGCCAAGATCACAACACTGCACTCTAAC
CTGGGCGACAGAGTGAGACTCTGTCTCAAACAAAACAAACAAAACTGAGTATCAATTTTGACATTACAGAATAAAACACTGCATTTTGTATTAT
AGAATGATATGTATCTATTAAAATGCCTACAGCAAGCATTATCCTAAATAAGAGAAATATCAGAAACATTCGCTTTGAAGTTAAGAATGAGAAA
CCAAGGCACACTTTTACCACTTGTATTCAACATCGTAGTGAAGGTCATAGCCAGACAGTGAGCATTGTAGCCAGTGTACAGTAAGACCCCCCCA
AAAAGTAGAGGCATAGGATTGAAAAATGAGGAAATAAAACTATAATTATTTGAAATTATTATAGTGATAACCCAAAAGATATATAAATGGATTA
TTTAGATAAGTTTAAAAGAGTGAGCTTTGTGCATTGGCAGTATAGCCAAGTGAGGTTTATCTTAGGAGTGGTTATTGTTAATTGAAAACTTTTT
CCTAATATCCTGCTGTCATGACTTGCAGTATAGTCAGCATTGGCAATTTTTTGACAGTCTTTTTGGAGACTGAATAAAAATAAAGTTTAAAAGG
GTTAGTGGATGTAAAATTAATATATAAAGGTCAGTCATATTTCCATATCTCAGCAGCAAATAACTGGAAAACATCATTAAAACAAATATTGTCA
GGAGATATGAAGTATGTAGAAACAAATCAAAGAAATGATAAGATTTCTTTAGGGAAAATTATAAAATTTTATTATGAGATCTTAGAGAATACTT
AAATAAATGGAGAGGTATTCCGTGTTCTCTAATAGTAATATTGTAAAAATGTCATTTTCCCAGGCCGGGCGTGGTAGCTCACACCTGTAATCCC
AGCACTTTGGGAGGCCGAGGCGGGCGGATCACAAGGTCAAGAGGTTGAGACCATCCTGGCCAAGATGATGAAACCCCATCTCTACTTAAAATAC
AAAATTAGCTGGGCGTGGTGGCACAGGCCTGTAGTCCCAGCTACTCGGGAGGCTGAGGCAGGAGAATCACTTGAACCCGGGAGGCGGAGGTTGC
AGTGAGCTGAGATCGTGCCACTGCACTCCAGCCTGGGCAAAGAGCAAGACTGTCTCAAAAAAAAAAAAAAAAAAAAAAAAAAGTCATTTTCCCC
AATTGATAAGTAGATTCAATGCAACTCCATATTAAATGTGATAATTCTAAACAGGAACAGAATATAGAAAAAGAACAATGAGGAGAAATTGACC
TCATCAGATAGAAGTATTAATACTAATTAAGGCAGTGTCATATTGGGATAAGAATAGATAGATTGACTCATTGGAGTAGAATTGAGAGCCCAGA
AGAGACTCCAATCACCTGTGACCCTGAACTGGAATAATTGGGTAAATCATTATCTTAACTTGTTTTTATTAATCTTTCTTAAATGTATGTATAG
CTCAGATTTATTTCAATATTTAATATTGCAAGCGTTTTGGTCTTATAAATTTAGTGATGTTTTTGTGACCCATAGTCTGCCGTAGAAACTTAAC
TCTTATTAATATTGATTAGCCTATGGTAAAATTGGTTTTATTATGGTGTTGTTTCGCTTGAAGTTGCAATTTCCAAGAACCTATAGACATCATC
CTAGAAGACATTAAGTGAAGACTTACTGTGTATATAAGCAGATTTGAAATTAAAAATATAAAAGATCTTCTGAAGTTGCAACAGTGCTCAGAAG
TATTATAAAATAGAAATAAATCATTTCCAAAAGAGAGATTTCATTTTTGCCCAAAATCTTTCTTCTAAGCTATAAAAGACAAAACTGTTCAATA
CACAGTTTTGTCAATTTAAATCTACATATTCACCCAATTTTTATAAGATAAAATAAAAATGTATAATTATTGAAAAAAGAATTGAGAGCCCAGA
AACAGAGCTAAGGAAATATGCGACTTTAGTGTATGACAGAGGTGGCATGTCATATCAAGAGGAAAGGAGGAAATGTTTGAGAAATGAAGCTTGA
AAAAAAAATAGTTATTTAATTAAGTCGGATTCCCTACCTCACATCATATACAAATATCAGCTGAAGATGGATTAAAGGCTTTAAAAGTGAATCA
ACATTTTAAAAACTTTTGGTAGACTATGTTGGTAAACATTTTAATCCTTGAGGTATAAAAAGACAAGACACAAAGTGTTTTCTATAAAACTTTT
GATAAATTTGATTATATTCTTAATTTCAATTTATTATATTTTTCAGTTCTAGAATTTGATTCCTTTTTTTCAGTTTCAAGTTCTCCAGTAAACT
CTCAATCTTAATTCCTTGAATATATTAAGTATAGTTACTTTAAATTATATGTCTGAAAACTTCATTATTTGGATCCTTTGTGGTATGTTTTTAT
TGCCTGTTGCTTTCTTTTAAAAAAAAATTTTTTATTTTGCCTCCTCATATGTGTGGTTATTTAAGATAAAATACCAGTCATTTTCTGTGAAAAA
GAGTAAAGATTTTAGGCCTACAATATTATCTCCCTGCAGAAAATTTTCTTCTGGCTAGTGGCCGGGTACACTAGCAATCCCAGGTCACCTAAAA
TCAGTGAATGATTTTAGGTTATTTGAAGTTGGGCTTTCATCCCTGAAATCTGATATGTTTCCAGTTCACCCTACTCCTAGGGTATAGCTCTTTC
AGACCTCAAATCCCCCAAAGCCTTGGGTATTTATCAGATCCCACATCCTTGGCAAACTCTCAACTCCTTTATTTTTTCCCTATAGTTTATTGAG
AGTTCATCTCAATCTTCTTAACCATCTCTTAGAAAATTGTCAGGCTATATTCAGATAAAAGTGGCCTCTCATTCTGAACTGTGGGTTTTCTTCT
CTCATATCTTGGTCGCATGGTTTTTCATGACCTTGTTAGCTCTCTAATGTCATTAGAGAAATTTTGTTTCATATTTTGTCCACTTTATTCTCAT
GGTTGAATTGGTCCAGTTTACAGATTATCATCTATCATTACCAAAGTAGAACTTCTTTTTATTAACGTTTACTTTATGCTTTCTTCAGTAACTT
GTAAAAGTATCTAAATGTTTGGTTGTTCAATAGGACTTTAAGTAATTCTTCAGTCATTTATGTTAATTGAGAAAATGTATAATAAATATCACTA
CTAGGTTCAACACCTAGTGGAGATACATCAGACATCCCTTCTGACTTCATTTGAAACTTTGTCTAATAGGATAGAAGAGGCATACATAAATGAT
TATCATGTAAGATTTTAAAACTTTTAAGGGCATAAGAAAGGTATAGGTCAAGTCTTGCACTGATTTAGAGAGGAGAAATATTCCCTCCATTGCA
GAGGATGAAGTTAGGCTTTATAGAAAAGAAGCTTTGAGCTGGGGTTTCAGCCTTACACTGAATCTTGCATTGGGTAAAAACGGGTATCTGTCAT
GATTCTTGCCTGTCAGTAGTTTTTAACCATGTTGTGCAGAGATGAAAGTAATTCTGATGCAGTAGTAATTGTATTTCCACACATTGAGAAGATT
CAAAGCAAAATCTCATAAACAGTGATTTTTTTTGAGAAGTAAGTAGAATTTCTTCCCTGTAGTAGAACTATTATGTGACTAAATGTTTTTGAAC
TTTGGCTTATTGACCAGTTTGTTTATTTTTCTTTTATGTGCCATTTAAAAATATTTAAAATAAACTTTTATTGAGATACAATAAAATCTACCCG
AATATGTCCTGCTACATAACCACAATCAAGCTATGGAACATTTCCATCACCCCCTAAAATTTCCCTGGTCCCCTTCTCGCTCAGTTCCCTACCC
TGCCTCTGCCTCAGGCAATTACTAATCTGCCTTCTGTCACTGGAGATTAATCTTTTCTAAAACTGCATGTAAATGGAAGCATACAGTATACTTT
TGTATCTGGTTTCTTTTGCTCAACATGGTTTTGAGATACATTCATTTGGGAGTGTATACCCATAGCTTGTTTTTTTGTTTTTTTTTTTTTTTTT
GAGATGGAGTCTTGCTCTGTCGCCCAGGCTGGAGTGCAGTGGCACAATTTCGGCTCACTGCAACGCTCTGCCTCTGGGTTCACCATTCTCCTGC
CTCAGCCTCCCAAGTAGCTGGGATTATAGGCGCCCGCCACCACGCCTGGCTAATTTTTTGTATTTTTAGTAGAGGCGGGGTTTCACCGTGTTAG
CCAGGATGGTCTCGATCTCCCAACCTCATGATCCACCCACCTCGGCCTCCCAAAGTGCTGGGATTACAGGTGTGAGCCACCACGCCTGGCCAGT
TTGTTCTCTTTTATTGCTGAGTTTATTCCATTGTAGGTCTATACCACACTTTGTTTATCCATTCACAGAGTTCACATAGGTTTGTTTTTAAACT
TACCAGGAACATCTAGCTACAAATTATCTTTTTTTGCATATTGATTACTCATCTTTGCAATTGAGAGACACTAATATCTTGAATGCTACATTTA
TAATGCTGTAAAAATGGATTTTGAAGAGGTAGCTCTCATATTGCCTACACAATAGTGCCAGTAGAGTATGCTGCTGTAACACAAGTGTTGGTAT
CATAACATTTTGACCTTTCAGTTGTACAGAGTACAGATGTGTTTTTATGCACTGTTTCAAAGATTAAGCATAAGAATGCTAATACTGGGATACT
TATAAATGTTGTGATAGCTAAGTAGACTCTCAATGTCATTAAATAAAAACAGTACAAAATACATTATCAGTTTTATTAGTTATTGCCTGTAAAA
TAAGGAATTTGGGCTTAACTATGTTTCTAAATTTAGTGTTTCAAAATTTAATACTTTGCAAAGTAAAATTGTTATGTAAATAATGTGCATGTCT
TGCTTTTTAAAAATATGACTTATTGCTATAGCTTATGGCATTTGAAAAGGCAATATTTTCTTTTGGAACTGGATTTCTGGTTCAAATACTAATT
TAACAAACTATTATACTATATTCTATCATGAGCTTTTCTAGTTTTATAGAACTGTAAAATTTTTAATTAAAACATTTTTTAAGTTTGCACGTAA
AATTTCTTATGGAAACTAGCTATCTTAACATTTTTTTGTTTCTTGGTATTTCATCCTTAAAATGTTGATCCACATTTAGTAGATACTCTTGTGT
ATGTCATTTTTATGTACAACACATGTACAATTTTCTAATAGATTTCAATTTTTAAAAGCATAGGCTCTAAATTTAATGACTTGAGTTCACATTT
CCACCCTGTCACTGTGAAACTTTGGGCAAGTAATTCATCTCTTTACAGTCAGTTCCAGGCCAGGCTCAGTGGCTCACGCCCATAATCCCAACAC
TTTGGGAGGCCAAGGTGGGTGGATCACTTGAGCCTGGGAGTTTGAGACCACCCTGGGCAACATAGTGAAACCCCATCTCTACAAAAAAATAGAA
AAATTAGCTGGGCGTGGTGGCATGTGCCTGTAGTCCCAGCTACTCAGGAGGCTGAGATGGGAAGATCACTTGAGCCTGGGAGGCGGAGGTTGAG
GTGAACCAAAATCGCATCACTGCACTCCAGCCTGGGCAACAGAGTGAGACCCCCATGTCAAAAAAACGAACTAAACTCAGTTCCTCGTTTGTAA
AATGGGGATGAAAGTAATTCTTGTACAGATTTAGGAGATAATTTACAGAGTCCTTAACACAACAACTGGACCAAATACATACTTGTTGAATGAA
TGGGTAAATGCCATTCTTTGTTGTGTACAAACCTGCAACTATTTTTTAAAACTTTGATTTGTTATTAATGTCAACTTGGGATTTTGCTTTAAAT
CCCAGGTGAGGGGATAGTTACTTCCTGAACATGGCTATAATTTATCAAATACTGTTAGATAGTGATTACTTGATAAGAATGATAAAAGGCATTC
TTGAGATTGTATACTGTTCTATTTTTATTCATACATATTTGGATGCTATTCAAGGTTATTGGCTATAATGGGCAGGGAGGAGGACCTAGCAAGT
CTTTAGGTCTATGTGACTATTACATTTAAAAAATTTTTTTTTTCTATTCAGTCCCTGAAAAACAGCTGAATGATATTGAAGATTGTGACCTCAA
TGTGGTGAGACTGTGTTTTCAAGTTTTTCTCCCTGATGAACATGGTAATTTGACGACTGCTCTTCCTCCTGTTGTCTCGAACCCAATTTATGAC
AACCGTAAGTACTTCATTTTCTTATATTTGTAGTCTTAACTTGTTTTTTGTAATAGTTTAATTCTTAAAATTATTTTGGTAATTAGGAAAACAA
TATATTCATGATAGGAAAACTTCCAGACATTAGAGAAATATATAACAGAAAGGAAATCTTCTCTAATCTCATCCTCCAGAGATAATCACTATCC
TTAGGTGCATATTTTACCAGTTTCTTCTTCCTGTATATACACAGATACATTGTCATCATCATCATTTTTGACACAGTACAATTTTGGCAACTTA
AAATCATAAGTGATGATTGTTTTAAAAACTAACTTTCTTCTTACCATATATCTTGGACATTTTCCTTTTAATCACCTTATTCTTTTCAGTAGCA
GCATATTTTATTATGTAGTTATATCATAATTTTATTAATTACCCTCTTACAAGGCATTTGGTTTGTTTCTTTTCTCATTTTTTCTTTTTGGCCT
AGCAAACTGTACTGCAATACATATTCTTGTATATTTTTTTTTATTGGTTTTTTTTTTTTTTTTGGAGACAGGGTCTCACTCTGTCACCCAGGCT
GGAGTGCAGTGGTGCAGTCATGGCTCACTGCATGGCAAATGCTGGCTCAAAGGATATGGATATATCTCATTTTGAAAGATTATGAAACTTTCCC
CCAAAATACTGTGTGTGTGTGTGTGTGTGTGTGTGTGTGTGTATGTGTGTGTGTGTGTACATAGACTTAGATATACGTCCACCAATGGTGTATG
ATATACCTGTTTTATGTGTAGAAGGATAGAGAGACTTAGGGCTATAAAGGAAGCATGAAAGTTGTATTGCCATAGGGAGATGTATTGCCATAGG
GAAAATTGTATTGCCATGGGGATGTGGTCATGATTTATGAAGATTAATCTGGTGACAGTGGGTAGGATTGATTGGCGGAATCAGAATTTAGAAG
CAGGGAGATGTAATTAGAGAATATGTCATTACCTAGAAATGAAGCCACAAAGTCTAAAGTAAAGCAGTTAGAAAGGAAGTGGACAGATAAATAG
ATGATTAATGTATTTAGTGTCATTTATCTATACACTAAAACTTTTATTCTGTGAATGCTTTTCCTCAAATTCTTCCCTGCAAAAAGAAATAAAA
TATTACTAAGGTAGCAACTCATTTTTTTGAAAATCCTTTATATTTAGGTGCTCCAAATACTGCAGAATTAAGGATTTGTCGTGTAAACAAGAAT
TGTGGAAGTGTCAGAGGAGGAGATGAAATATTTCTACTTTGTGACAAAGTTCAGAAAGGTATTTATTTATTTCATTGAATTTAGAATAAATTTT
AGATTAATAGATGCAGTTACTTTGTTTTCCCATTTTTTTTTTTTTGGTTTCTTATTGACTAGATGACATAGAAGTTCGTTTTGTGTTGAACGAT
TGGGAAGCAAAAGGCATCTTTTCACAAGCTGATGTACACCGTCAAGTAGCCATTGTTTTCAAAACTCCACCATATTGCAAAGCTATCACAGAAC
CCGTAACAGTAAAAATGCAGTTGCGGAGACTTCTGACCAGGAAGTTAGTGAATCTATGGATTTTAGATATCTGCCAGATGAAAAAAGGTATGAC
ATTTTGCTGGTAATAATTTATATATTTCTTGAAGTGGTCCTGCTAATAACATCTTCTTGTAATATTCATTTGAGTACAGTTATGTATATTCATA
ATTTATGTTTCTTTTCCTGGAAGCTTTCTGTTGGTTTTTTCTTTATGCTCTTTGCATCTCTTTATTTGTTGGGTTGTTTTTTGTTTTGTTTTGT
TTTGTTTTTGAGACAGAGTCTCACTGTCACCCAGGCTAGAGTGCAGTGGCGCAATCTTAGCTCACTGTAACCTCCTCCTCCCGGGTTCAAGCGA
TTCTTCTGCCTCAGCCTCCTGAGTAGCTGGGACTATAGGCACGTGCCACCACGCTGGGCTACTACTTTTGTATTTTTAGTAGAGACAGGGTTTC
ACCATGTTGGCTAGGCTGGTCTCTGCATCTCTTTCTTCAAGAAGAGGTTTGATTAGTATGGAATAATTTCAAAGTATCTAAACTGCTTACTAAA
ATTTCTATTTTATTTTTGAAGGTCTGTTTTAGTCTTTGTGCACTTACCACTCAGAGAGTAGTCTCTATATTGGTTTCTTATCAAACCTTATTGC
ATTAGTTGACATTATTGACTTGTGTGATAAGAAAACAAGATGAATATTTTAAACAGCTTGTTTTGGGTTTTTTTTGAGACAGGGTCTCACTCTG
TCACTCAAGCTGGAGTACAGTGGCATGATCGTGGCTCACCAGAGCCTCAGCCTCCTGGGCTCAGGTGATCATCCCACCTCAGCCTCGTGAGTAC
CTGGGACTATAGGTGCGCACCACCACACTTGGCTAATTTTTGTGGGGTTTTTTTGTTTTTTTGTTTTTTTGTTTTTGAGATGGAGTCTTGCTCT
GTCTTGCCCAGGCTGGAGTACAGTGGCGCAATCCTGGCTCACTGCAGCTTCTGCCTCCTGGGTTCAAGCAATTCTCCTGTCTCAGCCTCCCAGG
TAGCTGGGACTACAGGCATGCGCCACCACACCCGACTCATTTTGTATTTTTAGTAGAGATGGGGTTTCACCATGTTGGCCAGGCTGGTCTCAAA
CTCCTGACCTCAGGTGATTCACCCACCTCAGCCTCCCAAAGTGCTGGGATTGCAGGTATGAGCCACTGCGCCTGGCCAATTTTTCTGTTTTTTT
ATGGAGACAGGGTTTTGTCATGTTGCTTAGGTTGGCCTCAAACTCCTGCGCTCAAGTGATCCACCTGCCTCAGCCTCCCAAAGTGCTGAGATTA
CTTTAAACAATTTTTTACTAAGAGAAAAATATCCTTTTCTACTGATACTACTGATTTGGGACATATTCTATAATACTTATTAAATCCAACTTAC
ATACATATTTATTGAAAACATTTTCTATATGTGAATAAAATATTTGTTTATTAAAGGAGAGGATACAATCCTATAATTTTTTATCTGCTTTCCT
GGTTTCTTTCTAATCAGATACTTACGGCAATAAAGCAAAGAAACAAAAGACAACTCTGCTTTTCCAGAAACTGTGCCAGGATCACGGTAAGAAT
AGTTTGGATCGATTCATATTTAAATAGGTTTTGTTTTATTTACTTTATTCAGTTTTTCAAATTTTATTATTTTTGTTTTGTTTTGTTGTTTGTT
TGTTTTTTGAGATAGCATCTCTCTCTGTCACCCAGGCTGGAGTGCAGTAGGGCAATCTCAACTCACTGCAACCTCTGCCCCCCAGGTTCAACAA
TTCTCCTGCCTCAGCCTCCCGGGTAGCTGAGATTACAGGCATGTGCCACCACACCCGGCTAATTTTTGTATTTTTAGTAGAAACAGGGTTTCGC
CATGTTGACCAGGATGGTCTTGAACTCCTGACATCAGGTGATCCACCCACCTTGGCCTCCCAAAGTGCTGGGATTACAGGTGGGAGCCACCACG
CCCGGCCAGTTTTTCAGATTTTAACTGATAATGTTATTTTTCAAATGACATTTAATAATGGAAAAACTTTATCCTAACAGTTAATTTTCCTGAG
AGACCAAGACCTGGTCTCCTCGGTTCAATTGGAGAAGGAAGATACTTCAAAAAAGGTATTTTATTTCCTATAGCATATTTCTTGTGATCAGAAA
GACCAGTACTTTGCACAATATATTGGAATTCTATTTTTAGGAATGAATAACTGCTTCTTTGAAAATTTTCTCTCCAGATTTTTCATGCTTTCAG
TATAGAATGAATTAAGCATGGCTTCTGAAGGTTGTGTTAGAAACTGATTATGTTTTTGGGATTTATTGTTCAAGAAATTACATGTTGTTCATAT
GGTAGCAATTTTATTAATTACATTGCGTTATGAAAAAATGTTACTGATTTGGTTAGTTACCTGTTTTTATAAATAACATTTTACTGGAACACGG
CCATGAATATTTGATTAAATATTATCTCTAAACTGCTTTTTTTTTTTAACACTATGGCAACAGGGTTGAATAGTTCCAACAGAGGCTGTATATA
GCTCACAAAGCCTAAAATATTTACAATCTGACTTTTTACAGAAAAAAAAATTGCCAATCCCTAGTTTAGGTAATTCAACCGAGGGCTAATTAGA
AGAAGTCTTTTTTCCCCCACGTACATTCTTAAATCATTGCTTTTTCCTGGTTTAGTTTGTAAAGCATTTGTATAATATGTAAATAGATACAGAA
TTAATTTTTTCTGTAATTTTTTTCTGACTGTGAATTTTATAGTCTCTTAGGGTTCTGTTGTAATATATCTTAAAAGTTATGTGTATTTTCTTAT
CCCTAATGAGTGTTGTCTCCATCCTTCCATTTTCTCCTAAAAGTGAAGAGTAAGAGATGATTTTGGCTATTTGGAATCCCATTAATTGTAATTC
TAATATTTATCTTTTAGTTTTCAAAAATACCTTTATAGAGCCTCAGAAACTAGATTTTCATATTTAATTGAAGTGAAATTACATATGCCAAAGT
AACTTGCCAAAATCATTTTACCTGTATTTGTAAAATGGTATATACGTTACAGAATTTCATTTTGGATTCGTGTAATAATTTTAGTGCTTTTTAC
ATTTTTTTATTTGAAATGTTACATTGGTTTCCTTGACATTTTTCTTTATATATATTTGTGTGCTTATGCAATTTTAATTTAGAAATGCTTTTTA
TAATTTTGTTCATTTTAATTTCGTAAAATAAATTTTTCCTCCCACAGAACCAAACTTGTTTTCTCATGATGCAGTTGTGAGAGAAATGCCTACA
GGGGTTTCAAGTCAAGCAGAATCCTACTATCCCTCACCTGGGCCCATCTCAAGTGGATTGTCACATCATGCCTCAATGGCACCTCTGCCTTCTT
CAAGCTGGTCATCAGTGGCCCACCCCACCCCACGCTCAGGCAATACAAACCCACTGAGTAGTTTTTCAACAAGGACACTTCCTTCTAATTCGCA
AGGTATCCCACCATTCCTGAGAATACCTGTTGGGAATGATTTAAATGCTTCTAATGCTTGCATTTACAACAATGCCGATGACATAGTCGGAATG
GAAGCGTCATCCATGCCATCAGCAGATTTATATGGTATTTCTGATCCCAACATGCTGTCTAATTGTTCTGTGAATATGATGACAACCAGCAGTG
ACAGCATGGGAGAGACTGATAATCCAAGACTTCTGAGCATGAATCTTGAAAACCCCTCATGTAATTCAGTGTTAGACCCAAGAGACTTGAGACA
GCTCCATCAGATGTCCTCTTCCAGTATGTCAGCAGGCGCCAATTCCAATACTACTGTTTTTGTTTCACAATCAGATGCATTTGAGGGATCTGAC
TTCAGTTGTGCAGATAACAGCATGATAAATGAGTCGGGACCATCAAACAGTACTAATCCAAACAGTCATGGTTTTGTTCAAGATAGTCAGTATT
CAGGTATTGGCAGTATGCAAAATGAGCAATTGAGTGACTCCTTTCCATATGAATTTTTTCAAGTATAACTTGCAAGATTTAAATCCTTTTAAAT
CTTGATACCACCTATATAGATGCAGCATTTTGTATTTGTCTAACTGGGGATATAATACTATATTTATACTGTATATATAATACTGACTGAGAAT
ATAATACTGTATTTGAGAATATAAAAAACTTTTTTCAGGGAAGAAGCATACAACTTTGGACATAGCGAATACAAAATTGGAAGCTGTCATAAAA
AGACAACTCAGAGGCCAGGCGCAGGGGCTCACACCTGTAATCCTAGCACTTTGGGAGGCCAAGGCGGGTGGATCACTTGAGACCAGGAATTCGA
GACCAGCCTGGCCAACATGGTGAAACCCCGTCTCTACTAAAAATACAAAAATTAGCTGAGCATGGTGGTACGTGCCTGTACTGTCAGCTACTTG
GGAGGCTGAGGCACAATAATTGTTTGAACCCAGGAAGCAGAGGTTGCAGTGAGCTGAGATCACACCACCGCACTCCAGCCTGGGTGACAGAGTG
AGACTCTGTCTCAAAAAAAAAAAAACAAAAAAAACACACTTTTTTATATTTCTTTTTATAATGTTTTAATGTATTCTTAAATTTCAAGCAAATT
TAAGATAAAACTTGTAATGGCTATGCCATTGAAAAACTTAATTTTTTATTTTTGAGGCCCATGGGCCAAGGTAACCCCTAAGGGGTTTTCTTAG
GCTTCTTGGAGCTTAGATTTGTATGTATATCAAAATGTCTTTAAAATGTTAAGTTGGGCAGAAGGCAGTTGAAGTGAGCTTTCAAGGTATGGGA
GGTTTTCTACATTTTATACTATTTCAATCTATGCCTTTAAAGTTGCTTATGATTTTAGCTGTACACTCATTTTTTAAGGGGAAGAAGTTTCCTT
GGACCATTCGCCTTTCTTAGATGTCCTCACTCCCTGTGATCTCATAAAACTGCCTATTTGACATCTCTATCTAGAAATCTAATTAAAGCTCACA
CTCAGCATATCCAAAACTGAATTCTTGGTCTTCCCTCCCAAACTTGCTTCTCCTTCAGTCTTCTCCAACTCAGTAAATGGCAATGCCATACTTC
TGGTTGCTCAGGCCAAAAACCCTGAAGTCATCCTTGATTCTTCTTTTAGCACCCATATCCAATCCATTAGCAAATCTGGTAGACCCTACCTTCA
CAATATATCTAAAGCTGACCACCTCTTTTGACCTCTACTATTAACGCCCTATTCCAAGCCACCATCATCTCTTCCCTGGATTGAAGCTGTCATC
TACAAAAATTCTTCTTATATCCTTGCATTCCTACAGTCTGTTCCCCATAAAGTAGCCAGAATGATTATTTTTAAAACAAGTCAACTCATACCAT
TCATCTGCTCAAAACCATTCATTGGCTTCTCATCTCACTCAGAGCAGTCAAAGTCCTTAAAAGTTGCAGGCCTAGACTCCCTGTCCTACCTCAG
GTACCACCATATCCCACCTCCTCATGCAGCTCCAGGCACCTTGGCCTCAGTGCTCCTCAAAGCATCAAGTATGCACTTGCCTTGGACAGTCTGT
ACTTGGTATTCCCTCTGCCTTGAATGTTGTTCTCCCAGAAAAATGCATAGTTCACTCTTACATCCTTCAGGTGTCACTCCACTGTTACCTGAGC
AGGTCGTCCTTGAATATATACATCAGCATTCCCTTTCCCCCCTGCTTTATGTATGTCCATAGCACTCACCACGATCTGACTTTACTAAGTATTT
ATTCATTTACTGTTTGTTTTCCCATACCGAAATATAAACTTTCTAAGGACAGAAATTTTTGTGCTTTATTGTTGAATCTCCAATTTGTAGAAAA
ATGCCTACCTTATATTAAACACTCAGTAAATGTTTATTGAACATTAAAAGTATTACTAATAGAACTTTGGTTTTTGAAAGAAATAATAACTTTA
ATTATAAGACGTATATGATTTTTGCAGTTTTACTTAGTGTGACATTGGGTTTATGAGAATCGTGTACATTCAAGTCCAGGAATAATAATGGTCA
TCCAAATTGTTTGAAAGGAAAATAATCCCAGTGGCAAAATGATGGTAGAATTTGGGTAATCTTTTTTTTCCTTTTATGAAAAGAGATTTTATTG
AAGGTAAAACATTAGAGGTTCATTGAGAATCTCTAAATCCATGTTTTGACATTGTCAAGCTCATTGCAACTTCCAGATTGAGTAACACTTATAA
CACATTTCCTTTTCAAAGTGCAAGATTTTTAAAAGAGACTTGTCACATATTCATTTGGCTGGTTTCAAATGGTGAGCTGAATGCTGGGTAATCT
CTACTAGCTCCTTAATCAGATTTAAAATTCTCAGTGTTTCCTAGTTGTTTCTGCATACTTTATGTGAGTTGTTATAGCTGTAACATTACACTTT
ATTTGCTGTTTGTGTTTCGTGACTTTTGGTAATTCTGGCATTTAGAAACCTTTCACTTTGCTTCAAAACGTAGTTATATTTTGGAGTTTTCATT
TGATATATAATTATTTATTTTGCCCTTTTATTTCCCAAAGACATTGTAAGGGTTAATTAGATCATTATATTTTATTATTACAGATTAAAGTTGG
GCAGTAATCTTAATTATGATGGAATTATCATTATGCTAAGTAATTAACTTTACCTAGTTTGTTTTACAACTAGAACCTGCCCTAAATGTTGAAT
ATCTTCCTAGCAAGAAACAGTCTGTCATTTTACTTACACGATGTCTAACCAAACCATAACTTTACATAAACTAGTCGTTTCGGTCAAATAGAAA
AATGTGTGAATGCCATAAAAACAAAAATTCTCAGTTAAATGATACTGGGAAATAGGGAAGACAGCAAAGTGAGACTTGGGCTCAGGATGGTTCA
GGAAGAAAAAAAAAGAAAGACCCCCTGAGTACCATTAATATTCCTCAGAAATTATTATTTCAAAAGGAAATATTTCTGTATTATAAATTTTCAT
GAGCAGCCATTATGAAATCTCACAAGAATCATAGAATTCAATAAAAAAAGGTAGAAAGTAATTTTTTTACTTAAAAATATAAATTAAATAAATT
TTTAAAATCATAAGCACATAAATAGAACTTACCAGGGAGAAAGAAAAACCTGAAGGCACAATTTCTTTTCTGTTCAAAATGTGAACCCAGGATG
TCTCTAGATGATGATGGATGATAGGTGGGGAGATTTTTTTTTTTTTTAATACAGAATCTCATAGTTTTGGATTAATTAGCACCAATCAGTTTAA
ACACTGACTGTTAGAATAGCTGCATGGGTTTTTTTCTTTAAACTAATTAAGCGTTGGCTACTTAGTATAAGTAAGTATAAGCCGAATTAAGGTT
CTGCTACATCTGTGTTTAGAATATTTTTTTAAAACTAAATAAGTGTTGGCTAGTTTTGCGGTGTAAGCAGAATTAAGGTTCTGCTACCTCTGTG
TTTAGAATATTCCCAATGGATTTTTCATTTTTCAGGTGCTATTTTTTGACCCTGTATAGACTTTAATTTAAAATGAATTTGGTAACGTTTCTCC
TCTGTCTCTACATATATTCATGCTTTCACCTGCTCTTTTAACACCTGCTTTTAGTATCTGAGGCACTTTTTCTGAACTCTACTTGTGCACTGGA
TCCCTCCTCCTTTCTCTGCCAGGCTGTGTTTACTTTATCCTTACATCACCACTTAGTGATTCCTTTCTTTGTATAAACATGGTAAATGTCTTCA
TTAGCCTAAAAGGAAAGACCAAATAAAACCTTTCCTACCACTTGGATGCATTTGCATCCTGACTTCTGAAATGCCTCCAGCCTCCATTTTCTCC
CTTCCCAGTTATTCCTTAGCCCAGCCATCTCTGTCTTTAGCTCCTACAATTTTCTTAGGATATTCTGGGAAAGATGAGCGGAGACTGCCCGCCT
TGTCAAATCTAGTGTCTTTTTTTCAGTCCTCACACTGCTTGACCTATGTATAACCTCCTATACTTCCCTCTTTGCATACTCCTCTGGGTTTTCT
GTGGTAGTCAAGATTCCTCCCTGAGATTTATTTCCCATGAGTCTTGACCCCTCCCCTCAGTTGGTGCTATTTCCCCCTACCCGCCCTCCGATGA
TCTTATCAGAGCCCACAGGTTCAGTTTTCTTTCATGCTACCTGAATGTCCTGATAAACTGGCTCGCTCTCTTCTTTACCTTCCATAATGGCATT
ACCATTTACCACGCCACCCAAGATACTTACTAGGAACCTCAAAGTATTGTATTCTTTTTCTCCATCACACTCATACTTAATCATCAAGTCCTTT
TGAGCTTGTCTCCTCTTGAATATGTCCCTTCTTAATTCCTGCTGCCTTCTTAGTAAAGGCCTTCATTCTTTTTTCCCTAGTAATAATCTTTTCC
ATATGTTCCAGTTAAAATACCATGTTCTCCCTATTCCTTATTACATAGCTAGCATTCCTTGAAAAAAAACAATTCTCTCAGGCCTCCATACCTT
TAGCATGTTACCCACTCTGCCTCTGCTCTTCTGGAACTAGAACACTCATCCTTGAAGGCTGGGCTTCTGTATGAAGGTTGGTCCTGCCTCCTTA
CTTGAGGTGAAGCTTTGTACATGCCTGTATTACGGACATCCTCTTATTTAAGTGTTTGTCTCTTTCGTCATTGGGACTCCAGCACCCAGCATAG
TCCCTAGTATACTAGTTGGTGCCGAATAAATAGTAGCTATTATTAGAAAAGGAAGGGTGAAATTGACATGGGAGTTAGTAAAATGTATATGGAA
ATGATTTTTAAAGGGAAAGGTAATGATTTTCTGGCAGGAAAAGCAGCAATGACAAGATTACTTAAGTCTTGTGAAATAACACTTCTCTTCCTTG
ACCTGCTGCTTCCCTTTTTTACCACACACACACGCACACATACCACAGCCCTTTGAGACTGAAAGCAGCTCTATTGAGAATAGTAGTGTCAACT
GTATTATGTAGAAATTCTAAAGTTTTTGGGATTATTTCATAGCCCTGACCTTGCTACTTCTCTCCACTTTATGTGGCAGGTTTAATCTCAGGTC
TCCCTCATACACTTCTCAGCCTCAGCACCTAACCCTCACACAACACTCCAGTATTGATGCAGTCAATCTTGTATAACATTTTTTGAATGTCCAA
TGTGCAAAGCACGATGTTGGAAATTATACAGAGGTGAATAAGACAAAAACTCTTGCTCTCAAAGATGTCAGTCTTTTTCTTTGCAAGGATAACA
GACATTTCCAGCACCCCTGAAATTTCCTTCATGCCCCTTCCCAGTCTGTACCTACACCTCTAAATCTATTTTCAATCTTAATGGCCTTTTAAAT
AACTGGGCTTCTCACAACCATAGTGAACAGAAACAGCTGGGTTGTCAACCTCTAACCTAATACTTCAGGAAAACTCATGATGGTTTCCATGTTA
AGAGAGACATGGAGCAGGGCACTGGCATGGTGGATGGATCACGCCTGTAATCCCAGCACTTTGGGAGGCCGAGGTAGGGGGATTGCTTGAGCCC
AGGAGTTCAAGACTAGCCTGGGTAATATAAGGAAAACCTGTCTCTGCAAAAAAAAAAAAAAAAAGAGGATACAACCAAATGGAAGAACATTCCA
TGCTCATGGGTAGGAAGAATCAATATCGTGAAAATGGCCATACTGCCCAAGGTAATTTACAGATTCAGTGCCATCCCCATCAAGCTACCAATGC
CTTTCTTCACAGAATTGGAAAAAACTACTTTAAAGTTCATATGGAACCAAAAAAGAGCCCATATCGCCAAGTCAATCCTAAGCCAAAAGAACAA
AGCTGGAGGCATCACACTACCTGACTTCAAACTATACTACAAGGCTACAGTAACCAAAACAGCATGGTACTGGTACCAAAACAGAGATATAGAT
CACTGGAACAGAACAGAGCCCTCAGAAATAACGCCGCATATCTACAACTATCTGATCTTTGACAAACCTGAGAAAAACAAGCAATGGGGAAAGG
ATTCCCTATTTAATAAATGGTGCTGGGAAAACTGGCTAGCCATATGTAGAAAGCTGAAACTGGATCCCTTCCTTACACCTTATACAAAAATCAA
TTCAAGATGGATTAAAGACTTAAACGTTAGACCTAAAACCATAAAAACCCTAGAAGAAAACCTAGGCATTACCATTCAGGACATAGGCATGGGC
AAGGACTTCATGTCTAAAACACCAAAAGCAATGGCAACAAAAGCCAAAATTGACAAATGGGATCTAATTAAACTAAAGAGCTGCTGCACAGCAA
AAGAAACTACCATCAGAGTGAACAGGCAACCTACAAAATGGGAGAAAATTTTCGCAACCTACTTATCTGACAAAGGGCTAATATCCAGAATCTA
CAATGAACTCAACAAATTTACAAGAAAAAAAACAACCCCATCAAAAAGTGGGCGAAGGACATGAACAGACACTTCTCAAAAGAAGACATTTATG
CAGCCAAAAAACACATGAAAAAATGCTCATCATGACTGGCCATCAGAGAAATGCAAATCAAAACCACAATGAGATACCATCTCACACCAGTTAG
AATGGCAATCATTAAAAAGTCAGGAGACAACAGGTGCTGGAGAGGATGTGGAGAAATAGGAACACTTTTACACTGTTGGTGGGACTGTAAACTA
GTTCAACCATTGTGGAAGTCAGTGTGGCGATTCCTCAGGGATGTAGAACTGGAAATACCGTTTGACCCAGCCATCCCATTACTGGGTATATACC
CAAAGGACTATAAATCATGCTGCTATAAAGACACATGCACACGTATGTTTATTGCGGCATTATTCACAATAGCAAAGACTTGGAACCAACCCAA
ATGTCCAACAATGATAGACTGGATTAAGAAAATGTGGCACATATACACCATGGAATACTATGCAGCCATAAAAAATGATGAATTCATGTCCTTT
GTAGGGACATGGATGAAATTGGAAAACATCATTCTCAGTAAACTATCGCAAGAACAAGAAACCAAACACCACATATTCTCACTCATAGGTGGGA
ATTGAACAATGAGAACACATGGACACAGGAAGGGGAATATCACACTGGGGACTGTTGTGGGGTGGGGGGAGGGGGGAGGGATAGCATTGGGAGA
TATACCTAATGCTAGATGACGAGTTAGTGGGTGCAGTGCACCAGCATGGCACATGTATACATATGTAAGTAACCTGCACAATGTGCACATGTAC
CCTAAAGCTTAAAGTATAATAAAAAATAAATAAATAAATAAATAAGAAAAAGAAAGCCAGGCATGGTGACATGTGCCTGTGGTCCCAGCTATTA
GGGAGGCTGAGGTGGGAGGATCCCTTGAACCCCAGGAGGTTGAGTCTGTAGTGAGCAGTGATTACGCCACTGCACTCCAGCCTGGGCAAGACCT
GTCTCAAAAAAAAAAAAGACTTAGAATTGGTGATCCAGGCCGCCTAATGGCATCAAATAATTTGTTATATCTTTAATTTATTGAAGGATCACCA
CATGCTTTTAAATAGCATGGAGAAATGGAAAGAATAGGGACTTTTTACTCAGGTAATACCCAGCCTGCTACCTAACAGGTTGTGTTGTACTAAA
TAAAATGGTACATAAGAAGAAACACTGTAAATTATATAGTGCGAATCAAATATTGTTAATAAACCAATATCTGTATATCCTATGTCCCGGATTA
ATCTTTAATTTAGATACTCCTTCTAGTTATCTAATACACAGCAGAGTGAGAAAAATCATTATGGATTAGGTTCTTTAGTAAGAAACCTGAGATG
GACTTCTCATTAGCATTAACTAGTTATTGCCCAGCTTTGGAGAGCCTTCTTTTGGCTTATCATTTATTATAAGCCCAGAAATAGGTGACTAATC
AGAGATAAATGTATGGGTTGTCTGTATCTAGTTTTATGCCTTTTTTTTGCCTAAGACGTAGTCAAATTAATATTTTAACTAATACATCTTAGCA
GAGTTTAGTTAAGCACAAAGTTAACAGTGGGTAGGATTGAATCTTGAAAGTAATCATGTCTGTAATGTTTTTCATGCATGCAAAAAGCACAGAC
AAAACCACTCATGCCCTATTAATAAACAAAATACAGATCAAAGTTTTCAAAAGTAATCACTCTATTTATTCTAAATGTCTGTGGCTTTAGGAAA
ATACCACCAGCTAGTACTTACCTATTTAAAGATGTAGAATTTATTATCCTCTAATATTCTTATCAGTTGTTTCCACAACTTTAGTTTACTATTG
GACTTTCAAAAATTTAAAGAATTACAAGTAAAATTCATTAAACACTTGTGTGTGAATAGTAATACACAGTAATTAGTACAGCATGTTGCTTCTT
CAACAAATTGAGTTTTCAGGGAAATCAGCAAGTAAATGAAATATAAATTTTTGGTAAAAGTATCAAACATTCATCTTGCCCATTTTTCCTCTTA
AACTTTATTATCTAATCAAACATAGTTTTCCATAAGATGTAATAAAATATAGATAAGGTTGGAATATTTGAGGATCCATTTGTGGAACTGAATT
TAATGAGACTTCATTGGTGATACACTCAATTTTTACTGGGTAATTAGCTAATAATGTTGGTCACTGTCTCACAGTTCAAGTAGCTTTAAGATGA
TGTGGCAAGGAAAACACAAAGCTTTTGGGTAACCAGCGTTCTTAAATGTATGGTTTTTGACCAGGTGAACCCTTTAGAAGTGATTTCTGTTTTA
AAAGTATGTACTTAAAATACCTTTGGCTGTGATGAATGTAGATCCCAGCAGAATACCAAAATCCTATTTTTTTTGACTGAGTATTTGTAGATGC
TTAATGACTGAAATGAATTTGGAGGCACTGATGAAAGTGATTTTTTTAAAGTTCTCAGGTACTGTTCAATTATTTAATGTTAAGTTTAGTATCA
AGATACAGTTGTTTTTAAAATGCCAAAATGCTGTTTATTATACAGAATATTTTATTACATTTGCAATATCTTTGTATATAGTGATTTTTTTCTT
GATAATAAATGGAAAAATTCTAAAACACTTGCTGAAATTTTGTTGCTATTTAACTTTTAAAATATCAGATTTTCTTCATATTTATAGCATCTTC
CTAACAGGAAAAGGTAGTTTTAGTTGCTTAGAAACATTAGACATTTTTATGGAATGCTGTTGCTGAATATGGTTGCATTTGTAACTGTCCTTTG
AAATAATTTTGTAGAGTACTGAAGTGCCTTTTTACAAGATTTTTTTCCTTTTTCCTTTTCTGGCTTAACCAACAAAAATCTGTTTTCAGAGTCC
TGGAGGCTGAAAGTCCGAGATCAGGGGTACTAGGACGGTTTCTGCTGAGGCTCTCCTCCTGGCTTGCAGAGGGCTGCCTTCCCATCATCCTCAC
ATGGTAGAGAGAGAGAAGGATGGAGATCTAGGGTGTCTCTTCTCTTTTTTGAGACAGAGTCTCACTCTGTCATCAAGGCTGGAGTGCAGTGGCA
CAATCACATCTCACTGCAACTTCTGCCTCCTGGGCTCAAGAGATCCTCCCGCCTCAGCCTCCCAAGTAGCTGGGACTACAGGCGCATGCCACCA
TGCCTGGCCAATTTTTGTATTTTTTGTCAGAGTTTCATCATGTTACCCAGGCTGGTCTCAAACTCTTGGGCTCAAGTGATTCACCCGCCTTGGC
CTCCCAAAGTGCTGGGATTACAAGCGTGAGTCACCATAGCTGGCCTGGCCTCCTCTTTTCTTAAATCCTTTTTTTTTTAATTGACAAAACTGTA
TATATTAATATTTATCTTGTTCAACATGATGTTTTGAAATATGCATACGTTGTGGAATGGCTAAACTGAGCTAATGAACATGTATTACTTCACT
TAGTTATTTTGTAAGAACACTTAAGATCTACTCTTAGCAACTTTGAAGAATATATTTGTTATTAACTATAGTCACCATGTTGTACAGTAGATCT
CTTAAACTTATTCCTATCAAGCTGAAATTTTAAATCCTTTGACCAACATCTCCCCAACTCCGCAACCCCTATCCCACTCTCACCTCCGCAGTTC
TAGTAACAACCATTCTACCCTACTTCTATGAGTTCAACTATTTTAGATTCCACATATAGGTGAGATCATGCAGTAGTTGTCTTTCTGTGCCTGA
CTTATTTCACTTAACATAATGTTCTTCAGGTTCATCCACGTTGTTTCAAATGACAGAATTTCCTTTCTTATGGGTGAATAATATTTCATTGTAC
ATATACACCACATTTTCTTCATTTATCT
HUMAN SEQUENCE - mRNA
CGGAAGGTGTGAGCCGCAAACCCAGCGGAGGGCGGGAAGAAGGAGGAGGCCTCTAGGGTGNTCGGGGGACTGGGGGCCCCGCCGGCAGAGGTCC
CTCGGCCTCCTGACTGACTGACTGCGGCCGCCTCCGGCCAGGACGCTGGGAGCTGCCTGCGGGAAGGTGCGGGGAGCGGAGCCATGGCCTCCGG
TGCGTATAACCCGTATATAGAGATAATTGAACAACCCAGGCAGAGGGGAATGCGTTTTAGATACAAATGTGAAGGGCGATCAGCAGGCAGCATT
CCAGGGGAGCACAGCACAGACAACAACCGAACATACCCTTCTATCCAGATTATGAACTATTATGGAAAAGGAAAAGTGAGAATTACATTAGTAA
CCAGGGGAGCACAGCACAGACAACAACCGAACATACCCTTCTATCCAGATTATGAACTATTATGGAAAAGGAAAAGTGAGAATTACATTAGTAA
CAAAGAATGACCCATATAAACCTCATCCTCATGATTTAGTTGGAAAAGACTGCAGAGACGGCTACTATGAAGCAGAATTTGGACAAGAACGCAG
ACCTTTGTTTTTCCAAAATTTGGGTATTCGATGTGTGAAGAAAAAAGAAGTAAAAGAAGCTATTATTACAAGAATAAAGGCAGGAATCAATCCA
TTCAATGTCCCTGAAAAACAGCTGAATGATATTGAAGATTGTGACCTCAATGTGGTGAGACTGTGTTTTCAAGTTTTTCTCCCTGATGAACATG
GTAATTTGACGACTGCTCTTCCTCCTGTTGTCTCGAACCCAATTTATGACAACCGTGCTCCAAATACTGCAGAATTAAGGATTTGTCGTGTAAA
CAAGAATTGTGGAAGTGTCAGAGGAGGAGATGAAATATTTCTACTTTGTGACAAAGTTCAGAAAGATGACATAGAAGTTCGTTTTGTGTTGAAC
GATTGGGAAGCAAAAGGCATCTTTTCACAAGCTGATGTACACCGTCAAGTAGCCATTGTTTTCAAAACTCCACCATATTGCAAAGCTATCACAG
AACCCGTAACAGTAAAAATGCAGTTGCGGAGACCTTCTGACCAGGAAGTTAGTGAATCTATGGATTTTAGATATCTGCCAGATGAAAAAGATAC
TTACGGCAATAAAGCAAAGAAACAAAAGACAACTCTGCTTTTCCAGAAACTGTGCCAGGATCACGTAGAAACAGGGTTTCGCCATGTTGACCAG
GATGGTCTTGAACTCCTGACATCAGGTGATCCACCCACCTTGGCCTCCCAAAGTGCTGGGATTACAGTTAATTTTCCTGAGAGACCAAGACCTG
GTCTCCTCGGTTCAATTGGAGAAGGAAGATACTTCAAAAAAGAACCAAACTTGTTTTCTCATGATGCAGTTGTGAGAGAAATGCCTACAGGGGT
TTCAAGTCAAGCAGAATCCTACTATCCCTCACCTGGGCCCATCTCAAGTGGATTGTCACATCATGCCTCAATGGCACCTCTGCCTTCTTCAAGC
TGGTCATCAGTGGCCCACCCCACCCCACGTCAGGCAATACAAACCCATGAGTTAGTTTTTTCAACAAGGACACTTCCTTCTAATTCGCAAGGTA
TCCCACCATTCCTGAGAATACCTGTTGGGAATGATTTAAATGCTTCTAATGCTTGCATTTACAACAATGCCGATGACATAGTCGGAATGGAAGC
GTCATCCATGCCATCAGCAGATTTATATGGTATTTCTGATCCCAACATGCTGTCTAATTGTTCTGTGAATATGATGACAACCAGCAGTGACAGC
ATGGGAGAGACTGATAATCCAAGACTTCTGAGCATGAATCTTGAAAACCCCTCATGTAATTCAGTGTTAGACCCAAGAGACTTGAGACAGCTCC
ATCAGATGTCCTCTTCCAGTATGTCAGCAGGCGCCCAATTCCAATACTACTGTTTTGTTTCACAATCAGATGCATTTGAGGGATCTGACTTCAG
TTGTGCAGATAACAGCATGATAAATGAGTCGGGACCATCAAACAGTACTAATCCAAACAGTCATGGTTTTGTTCAAGATAGTCAGTATTCAGGT
ATTGGCAGTATGCAAAATGAGCAATTGAGTGACTCCTTTCCATATGAATTTTTTCAAGTATAACTTGCAAGATTTAAATCCTTTTAAATCTTGA
TACCACCTATATAGATGCAGCATTTTGTATTTGTCTAACTGGGGATATAATACTATATTTATACTGTATATATAATACTGACTGAGAATATAAT
ACTGTATTTGAGAATATAAAAAACTTTTTTCAGGGAAGAAGCATACAACTTTGGACATAGCGAATACAAAATTGGAAGCTGTCATAAAAAGACA
ACTCAGAGGCCAGGCGCAGGNGCTCACACCTGTAATCCTAGCACTTTGGGAGGCCAAGGCGGGTGGATCACTTGAGACCAG
HUMAN SEQUENCE - CODING
ATGGCCTCCGGTGCGTATAACCCGTATATAGAGATAATTGAACAACCCAGGCAGAGGGGAATGCGTTTTAGATACAAATGTGAAGGGCGATCAG
CAGGCAGCATTCCAGGGGAGCACAGCACAGACAACAACCGAACATACCCTTCTATCCAGATTATGAACTATTATGGAAAAGGAAAAGTGAGAAT
TACATTAGTAACAAAGAATGACCCATATAAACCTCATCCTCATGATTTAGTTGGAAAAGACTGCAGAGACGGCTACTATGAAGCAGAATTTGGA
CAAGAACGCAGACCTTTGTTTTTCCAAAATTTGGGTATTCGATGTGTGAAGAAAAAAGAAGTAAAAGAAGCTATTATTACAAGAATAAAGGCAG
GAATCAATCCATTCAATGTCCCTGAAAAACAGCTGAATGATATTGAAGATTGTGACCTCAATGTGGTGAGACTGTGTTTTCAAGTTTTTCTCCC
TGATGAACATGGTAATTTGACGACTGCTCTTCCTCCTGTTGTCTCGAACCCAATTTATGACAACCGTGCTCCAAATACTGCAGAATTAAGGATT
TGTCGTGTAAACAAGAATTGTGGAAGTGTCAGAGGAGGAGATGAAATATTTCTACTTTGTGACAAAGTTCAGAAAGATGACATAGAAGTTCGTT
TTGTGTTGAACGATTGGGAAGCAAAAGGCATCTTTTCACAAGCTGATGTACACCGTCAAGTAGCCATTGTTTTCAAAACTCCACCATATTGCAA
AGCTATCACAGAACCCGTAACAGTAAAAATGCAGTTGCGGAGACCTTCTGACCAGGAAGTTAGTGAATCTATGGATTTTAGATATCTGCCAGAT
GAAAAAGATACTTACGGCAATAAAGCAAAGAAACAAAAGACAACTCTGCTTTTCCAGAAACTGTGCCAGGATCACGTAGAAACAGGGTTTCGCC
ATGTTGACCAGGATGGTCTTGAACTCCTGACATCAGGTGATCCACCCACCTTGGCCTCCCAAAGTGCTGGGATTACAGTTAATTTTCCTGAGAG
ACCAAGACCTGGTCTCCTCGGTTCAATTGGAGAAGGAAGATACTTCAAAAAAGAACCAAACTTGTTTTCTCATGATGCAGTTGTGAGAGAAATG
CCTACAGGGGTTTCAAGTCAAGCAGAATCCTACTATCCCTCACCTGGGCCCATCTCAAGTGGATTGTCACATCATGCCTCAATGGCACCTCTGC
CTTCTTCAAGCTGGTCATCAGTGGCCCACCCCACCCCACGCTCAGGCAATACAAACCCACTGAGTAGTTTTTCAACAAGGACACTTCCTTCTAA
TTCGCAAGGTATCCCACCATTCCTGAGAATACCTGTTGGGAATGATTTAAATGCTTCTAATGCTTGCATTTACAACAATGCCGATGACATAGTC
GGAATGGAAGCGTCATCCATGCCATCAGCAGATTTATATGGTATTTCTGATCCCAACATGCTGTCTAATTGTTCTGTGAATATGATGACAACCA
GCAGTGACAGCATGGGAGAGACTGATAATCCAAGACTTCTGAGCATGAATCTTGAAAACCCCTCATGTAATTCAGTGTTAGACCCAAGAGACTT
GAGACAGCTCCATCAGATGTCCTCTTCCAGTATGTCAGCAGGCGCCAATTCCAATACTACTGTTTTTGTTTCACAATCAGATGCATTTGAGGGA
TCTGACTTCAGTTGTGCAGATAACAGCATGATAAATGAGTCGGGACCATCAAACAGTACTAATCCAAACAGTCATGGTTTTGTTCAAGATAGTC
AGTATTCAGGTATTGGCAGTATGCAAAATGAGCAATTGAGTGACTCCTTTCCATATGAATTTTTTCAAGTATAA

[0280] TABLE 16

MOUSE NOMENCLATURE

| | |
|---|---|
| ICSGNM | Icsbp |
| Celera | mCG21199 |

HUMAN NOMENCLATURE

| | |
|---|---|
| HGNC | ICSBP1 |
| Celera | hCG17046 |

MOUSE SEQUENCE - GENOMIC
GCAGGAGGATGGAAAGTTGGAGGGTAGCCTGACTGTATAACAAGTTCAAGGCCAGCCTGAGATACATAGTGAAATCCTGTCTCAAATACAAAAC
AAAACAAAACAAAACAAAACAAAACAAAACAAAACAAAAAAAAAAAAAACAAAAACCCACCCCAGGCGTGATGGTGCATGCCTTTAATCTCAGC
ACTCAGGAGGTAGAGGCTGGAGAGTCTTTGTGAGTTCAAGGCCAGGCTGCTCTACAAAGAGAGCTCCAGGACAGCCAGGGGTACCTAGAGAGAC
CCTGACCAAAACAAAACAAAACAAAACAATCAAAAAACAACTTAACAATCCTTCCAACTCTCCAAACCCAACGCCACCCCCAAATCAACATCAA
ACTCTCTCAAGTCCCGGAAAGCAACCAAACAGACAACACCTAACCAAGCTGAGAAGCGGACAGCACTGGAGCCTTCTGAAGCACTAACCTCTTT
TAAAGAGGGGGCGCAGCCCAATTCACCAGTGAGCAGATTGGCTTAGAAAGGGGCAAGCGCTCCTTGTGGGACACAGTCACCACTTGTTGATGAG
GTTGCTTGCAGGGTTGACGCCATGGCTCAGCAGGTAGAGTCACTTGCCACCAAGCCTGACACCTGATCTGCATCCCAGGAGCCACAGGGTGAAA
AGAAAAAGCAACCCTCTGGCTTCCACACAGGCACCATGGCATGGGCTCCCTGCTAAACACGTATGCGTGCGCACACGCACATGCATATGCATGC
ATGCACATTCATATGCACACACATAGCGCACACATACACAAAATTATTAATTAAAATGTAATTTAGATTCGGAGTGGACACGGCGGTCGCCGCC
TCTAAAGAGAAGACTCACCACATCTATGGCTGGGGTTCTGAGCTCAGTGTTTCAGAGGCCTCCAGGCAGACTGCAGACTGTGAAGGAAGGTGCA
GAATCTCTCATTGGTACAGAATGGATTCGTCACACATTTACCAGTTCAAGAATTCCCGATAAAGTGTTTCGGCCTAGACCTGAAGATCATGAAA
AGTACAGCGGGGACCCCCAGAGGCCTCATAGACTGTACATTGTCATAAGAATAGGAAGTACAAAGAGGCATCCAGGGCTGGAGAGATGGCTCAG
CGGGTAAGAGCATTGACTGCTCTTCCGAAGGTCCTGAGTTCAAATTCCAGCAACCACATGGTGGTTCACAACCATCTGTAATGAGAGCTGACTC
CCTCCTCTGGAGTGTCTGAAGACAGCTACAGTGCACTTACATATAATAAATAAATAATTCTTAAAAAAATAAAAGAGGCGTCCATACTGGGAAA
AAGATACGATCAAGATGCTCGGACTACAGAAGGCACACAGCCCTCAAATTCACAAGAACATCCCACCGGTGGATGCAAAGCTGAAAGTGGTTAA
ACCCTAGATAGGCATCCAGCGCCTGGAGCTGCCACAGGGACTTCCCACAGAAAAGACCATGTCCAGCGCGTGCCTCAGGGGCACCGGGGAGTTG
GTCATGTGGTGGCATCTGAAGCCTGTGGAGCTGGAAGTGACGTCCTGACGCCACACAGCTTCAGCTCACAGACACACTTACTGAGGAAGCCGTT
CTCATTAAAGTGTATGCTCATCAAAAAAAAAAAAAAAGTAACTTAATTTAAAAAAGGATTTCTTGTAAGCGATGTCAGTAATCTGGTGAGTTGG
TGACTCTGTTTCTGGGTACCCTATCTGCTGTTGTACTAAGTTTTTCCTGTGCCTAAGCCGTCTTCCTATTAGAGATGTAGACTTGCTGTGTGTC
TGGTCACTTGTACACAGGTGGGGATACATCGTTCTGAATTCATTGAAATTTCTGAGTGTGTGGCTCCCCTGGCCCTGCCCGAAATATGTTAGGT
ACATCTTCCTGGGGGTTTGTGTGTGTCATAAGCACACTGGTATGAGTCATGTGTGGTTTATATTAAACACACAAACGTGTATTCTTTACAGGGT
CTCATGTAGCCCAGGCTGGCCTCTAACTCATTTAGTTCAGGATAACCTGAATCCCAGAGCCTTCTGTCTCCGCCTCCCAGGTGCTGGGTTACAG
GTGTGTGCCAACAAACCCAGGGAAATCTACGTTTTCAGTAAATTGATATCTCTTGGCAATAGTTCCCAAGAGAGTTCAAAGACATGTTTTATGT
ACACTTACAATCCATTTACTTGGAAGAGTTGTTCTTTCTAGGACTGTTCTAGGCACTTCCATGGATAATAAATGCAAGCGACCTCCAGCCCCTG
CAGGCAGGAGTTGCTGAATGCTTCCTGCGTTTCCCCCTTATCTTAACTCTTCATCAGCTTTGATGCATCTTGCAGGCGTGCTCTGAACATGACA
GCTAGCACACTCTGGGTATTTAATAAGCAGCCGATTCATGAACTAAAGCTACCCTCAAAGGTGAAAGCAGTTTATTTAAGCTACAAATAAACAC
AGGTGGGTCTCAGATTTGGCTTGTTTCTTCTCTGAAGCAATGGATGGGGTATTGTTATCACCTAGTCAACTGTTGCCCGAGTCCACCTTGAGCA
AATAGAATGGACGGATCCTGTAAAAGAGAAACTGGGGCTAAGAGAACAGGGCAAAGGCCACCTCTATAGCACAGATAAGTTTCGCCACAGTCCT
GAATGGCTTGCTAAGTCCCAATTAGCTAGCTTGAAGTAATCTCACTTTTATTGGTAGGAGGTGCTTCCTGCATGAAAGAAAAATCCACTTGTGC
ATGAGTACATGCACAACCCACACACACACTCACACACGTGCACATACCACACACATGTACTCGCACACAACATGCACACCCGCGCACACACACA
TAGATGCACACCACACATACACACACACACACACACACACACACACAGGAGCACTCACATGCACACACTCACATGCATACACCACAAACATGCA
CATACATGCATGCACACGCACACAGACTCATGACTGTATGCATATGGTCCTGAGCATCCTGAAATGCTGAGATCCTGTGCTGGGTTTAGTAAAA
GAATTGATGACTCTTCCCTTATCTTCTGGGATCGACTATAGCCTTTGACATTCTCTTTGCCTTTCCCCAGGTGAGTCACTTGAAGCCCTGCACC
CGCAGCCTGGGCTCAAGCCTCCACTCTGGCCCTAGGAGTATTCTGAGCCTGGCTGAATGCCACTCTGATCATTGTGGTTTTGTGTGGCTTTGTG
TCCTGTCAATTTACGTGTCCAGCAGGATGGCTTTCCCTTGGATGTATGTCACTCTACACCACTCAGACACCACTCAGATGAACACGCCACGTGC
CCCGGCTCTGTGTTGTGTGTCCAGTGGTCTTGGTTCCCACTCAGCCCCACCTCCGCCCACAGGAGAGCTCTCCTGAGCATCCCAGCAGCTAGCC
TGACTGCTTTTCAAGTGCACACCCACGAGACTCTGAGGCCTCCGTCCGCTTTGTTCCCTCAGTCTGGTGTCAGAGGTCCATCCTGTGCTGTGGC
TGGATGCAGAATAGCCCGTTCTGATTACTGCAGTGCCCTCCACAGTGGGGTTGCTAATGCTTGTGTGTGTCCTAGTCACCATTCTATTGCTGTG
AAGAGACACTGTGGCCACCACAACTCTTATGAGAGTTTAACTGGGGCTGGCTTGCAGTTCAGAGGTTTAGCCCATTTTCATGATGGCGGGAAGC
ATGGCGGTGTGCAGGCAGATATTGGACCAGTAGACCTACATCCTGACAGTGGGCACAGGGAGAGAGAGAGACAGAGAGACAGAGACAGAGAGAG
ACAAGACAGAGAGATGGAGAGAGACAGAGAGGAGACACACACACACACACACACACACACACAGATGTGGAGTCTGGGGTAGGCTTTTGAAACC
TCAAATCCTACCTCCTCTAACAAGGCCATACCTCCCAATCCTTCCGATCCTTTCAAATACTCACCCCCTTGCTACTAAACACTCCAATACATGT
TCCTATAAGGGCCATCCTTATTCAAACCACCACAGTGGTTGTGCTATTTGAGAAATTTGTGATTTTTTTCCCCTAAAGACTTTTGCTTGTTTTC
TTTTTTTTCTTTTTTCTTGAGACAAGGTCTTATGCAGCCCAGCTTGTCCTCAAACTCACTAATATAGCCAAGCATGGCCTTGGACTTCTGATCT
CCCTGCCCGTCTCCTGTGTGCTAGGATTACAGGCATGTACCTGCATGCCTGGCTTAGGCAGTGCTGGGGACCCAACCAGGGCTTTGTGTCTAGC
CGAGAGTTTTACAGCTACAGCCCTGACCCTCCAGGGATTTGGGGAGCATGAAGGAACTGGACTCTGCCTTTGTGGACGTCCTGCCTTCACTTCT
CTGGGGTGTGCTTAGCAGCTGGCCTGCCTGACTTAGAGGAGGTTCCAGCTGTTTGCCAAAGTGCTTTAAAGGAATGGCAGTCTCATCCTTCACG
TGGTTCCAGCATCTGCACTGTGTTTTATAATTCTAGTCATCTTGGAGAGTGACAACATCACCTTATAGTCAGCTCCCCCTGGGAGATTTGGACC
ATTTTCTTTTCTCCCTTTCCTTTCCTTTCCTTTCCTTTCCTTTCCTTTCCTTTCCTTTCCTTTCCTTTCCTTCCCTTCCCTTCCCTTCCCTTCC
CTTCCCTTCCCTTCCCTTCCCTTCCCTTCCCTTCCCTTCCCTTCCCTTCTTTTGTTTTTTTGTTTTTTTGTTTTTTTTGTTTTTTTGTTTTTTG
AGACAGAGTTTCTCTGTGCAGCCCTGGCTGTCCTGGAACTCACTCTGTAGACCAGGCTGGCCTTGAACTCAGAAATTCGCCTGCCTCTGCCTCC
CAAATGCTGGGATTAAAGGCGTGCACCACCAAGCCCGGCAGATTTGGACCATTTTCATCAGGACTCTAGGCTGTTCTGAGTGCCATGGCTGTTT
AAGCTTTTTGATTCCCCCTCCATTTTTCCTTCCCTCCCTCCTCTTTCCCCTCCTCCCTCTTTCCTTTCTCCCTTTCTCCTTTCCCTCCTTCCCT
CCCTCCTTTCCCTTGCCCTCCCCCTCCTCCCTCTCCTCCCTCCCTCCTTCTCCTTACTCTGTCAGTCTTTCCCTCTCTCCTCCTCTTTCAGCTT
GCTTGCTGGAGACAAGTCTGTGCACTCAGGGCTTGGTAAGTTAAGCCTACTTAATGCCGATACTCCTAAGAGGGACCAACTCAGAGTTGGCATT
TGTTTTGTGTCCTTTTCCTCACAAAGATATTTTGAGATCGTTAATGACCCCCATAGTTGGTCAGCTTTGTGCAAATAAATAATTTCGGGGGTGG
GGCAGAAACCCTGAACACTTGCTTGGGCTAGAGGGATAACCCACGGATGCACAGAGGCTGCGCTAGAGACAGACAGTGGCTATGAAGTCTTCAG
ACTCTGGCCTTTGTTGCCAGGGTTACAGGATTAGTACTCTAATAGCCCAGATGCTCTTGTGAGCCACAGCTGTCTCTGCATCGTGCTCCGAGGA
GGTAGTGTTCAAACACATACGAAGTGGCTTCTGGGATTTGACCAGACAGAAGTGATTCTTCTTGGGACGGGAGGAACCAGCACGCGCTGGTTTT
TCTTCTTTCACGGTGCCGGCTTCGGAACTCAGCGCCCCTGCTTGGGTTAAACATGGCCTCTACCGCGGAGCTGTACTACAGCTCAGTTTGTCGT
TTGTCTTCTCTTATTGACTCACAGGAATTTTACAAAGTGTTCTGAGTAGAAGTCCTTTCTTTTTCTTTTTGAGACAGAGGCTCAATGTGTTCCC
CAGGCTAAAAGTTAACTCCCAGTGCGAGGATCACAGGCTTGCCCCGCCACCTTGGCCTAGCCAATCCGGGTTCTGGAATCCCAGGTGCTGCCTC
GCCCTCCTCTGGTTTACCCAATCCTAGTGCTGGGATCCCAGGTGTTGCCCCGCCCACCTCTGGTTTAGCTGCTCTTTCTAGACCACTTGGTGTC
TCTCCAGCCTTGGCTCCTCCCACTACTCAGAATACCAATTCACACTTTTTTTTTTTTTAAAGATTTATTTATTTATTATATGTAAGTACACTGT
AGCTGTCTTCAGACACTCCAGAAGAGGGCGTCAGATCTTGTTACAGATGGTTGTGAGCCACCATGTGGTTGCTGGGATTTGAACTCCGGACCTT
CGGAAGACCAGTCGGGTGCTCTTACCCACTGAGCCATCTCACCAGCCCCTGGAGAGATGGCTCAGCCGTTAAAGGCTAGGCTCACAACCAATTC
ACACTTTTATCAGTTTTATTTATTGTGTGTGTGTGTGAGTGTGCATGTATATATGTGTGTGTGTGAGTGTGCATGTGTGTATATGTGCGTGTGC
TTCTGTGCATGTGTGCTGTGCATATGCGGGTATGTGTGTGCATGTGAGTGTGCGTATGAATGTGTGTGTGCTGGGAACCCCATCAGACTGCAGG
TGGTAGACCTGCATAGATGAGAAAGGCTTTGAAAAAAATGCAGGGTTTTTTGGGGGGGGGCACACATAGAGGGTAACATGCTCACTGGGGAGCA
ACCTCCCTACACAGGAAAGGGGTTGGCAAAGCTTGCTTCAGTAGGACACAGGGGACTTTGATCACGAACAAAGAGGAGTAAGTTGGACTACACA
CTCACATACATACACACATGCACATGAGTATACAGACATACACATATACACACATACACACATGCACGCACACATATACATACATATACACACA
CACATGCACACAGATTTAGAATAAATTTAAAAAAATTAAAGCATGAAATGTAATTTTTAAAAGATATCAGTGTGGCTGGAATCTGGGTTTTTTA
AAATTAAGGTCCATGAAGGCCGGCATAGGAAAGAGGTCAGAAGCTGGATCTTGAGGAGAAGGAGGTGGTAGGAGAACAATGGCTCCCCAAAGAT
GTCCAAGTCAAAATCCACAGAACCAAGAATGATGTCAGGGACTGATACTCCTCATCTGACGTTGACTAGAGCAACGACTCTGGGTCATCCAGCT
GAACCCAGTACAGCCACGAAACCCTTAGTGCAGTGGCCCTCAACCTTCCCAATGCTGTGGCCTTTTAACCCAGTTCCTCCTGCTGTGCTGACCC
AGACCATGACATTATTTTGCTGCTACCTCATAACTGTAATTTTGCTACTGATATGGATCATAATGTAAATATCTGATATGCAGACGGTCTTAGG
CAACTCTGTGAAAGGGGTCCCGACCTACAGGTTGAGAACCGCTGCCTTAGTGGACCAGGGAGGTTGTAGAGAAGAGCCAGGGACATGAATGCAC
ATTTGCTGGCTTTGGAGATGAACGAGCTCACAAGCCAAGGATTTCCCTGGACATGGCCTCTCTGAGCACCGATTCTCCTCAGAAGGACCTGCTG
ACACAAGTGGGTGAGGAGTGCCTGTCTTTGTTCTAGTGGCCATACACAGTGAGTGGAGAGGAGGCAGTTTTTAGGTGACAGGAAGGTGTGTGTG
TGTGTGTGTGIGTGAGAGAGAGAGAGAGAGAGAGAGAGAGAGAGACAGAGACAGAAAGGGGACAGGGACAGAGGGACACGGACAGAGAGACTGA
GACAGGGACAGAGATTTGGTGACAGTACCCATAGCAAGGAACCTCAGAAAAAGCCTGGGTCACAGCAACAGCAGCCTGGTCTCTCTGGGTCGGG
GTGTGCTCTCTGGGTGTCTTAGTCAGGGTCTCTATTCCTGCACAAAACATCATGGCCAAGAAGCAAGTTGGGGAGGAAAGGGTTTATTCAGCTT
ACACGTCCACATTGTTCCTTATCACCAAAGGAAGTCAGGATTCGAACTCAAGCAGGTCAGGAAGCAGGAGCTGATGCCCAGCCCACGGGGGGAT
GCTACTTACTGGCTTGCTTCCCCTGGCTTCCTCAGCCTACTTTCATATAGAACCCAGCAGTACCAGCCCAGGGATGGCACCACCCACCATGGTC
TGGGCCCTCCCACCCTTGATCACTAATTGAGAAAATGCCTTACACCTGGATCTCATGGAGGCATTTCCTCAAGGGAGGCTCTTTTCTCTGTGAT
AACTCCAGGTTGTGTCAGGTTGTCCCAGAGAACCAGTCAGTACACTGGGTCTGGAGGACATGTTTAATTGCCTCCTCTGGAGAGGCTGGGAGGT
GGTGATGGACTCTCTACAACACTTCGGGGCCTCTTCTCCTTAGTTAACCCCTGCACATGCCTCTTCTCTTATGCAGTCATCTGACCTAGCTCCA
CCCCCGACATATGACTTATGCCAGGAGATCCTACACTGAATCTCTCCTGAGTGGCTATCGCTGGCGTGTGGGAAATGTACACGTGGCTCACATG
AGACACCACCTTCATAGCTTCACCCTCAAAGACCCCATCAATATTCAGCTGTGAGTCAGTGCCCATTGTAGGTGGCTTGGGTTCTCTTAGGTCC
TGAGTGGAGCTATTTCAGACTTCTAGCAAAACAGTTAGAAAAAAATAGACCCCACTCACACCCCGATCTATATGGCTTCAGGACAGTTGTCAGG
CAGGCTGGGCTGGTGTCTTCTAGTGTGTACAGAGACACCTGCTGCTAGGACCAGAAGCTAGGGCTGGTGTCCCTAATCTCTCTCTACCTTTAGC
TAAGAGGCAGGCACACTGCGTGGACATTTGGGATCTGTTCTGTGCCTTTGATATTTGTAAGTAGGAAAATCTGCATACGCTTATAAGGTGCCTA
TTTGGGAAATGAAAGGGGTATAAATGCACACAGGAGTCTGTTGTAGTAATCTGAGCGTGTCTGACTTCTGGACTCTGCCCTTCACAGCAAACAC
TTATTAAAACACTCCCATATTACTATTAAAGAATTTGAGCTGGACTATGGTGGCACACACCTTTAATCCCAGCCCTTGGGAGGCAGAGGCTAGC
AGATCTCTGTGAATTTGAGGCCAGCCTGGTCTAGTTCGGGGACAGCCAGGGCTACAGGGAAACCCTGTCTTGGAAAACAAACAATAAACCCAAT
AATAATAGTAATAAAACAAATGAGCTTTAAAAAGTAGTTTTCATTTGAAATTCCTTGGCTCCAGGGAACTCCACTTGGCTTTTGACTGTTGGAT
GGTATTTATCATTGAACTAATACCCGGTAATGTCTTAAGTGCCTTTCAGGTATACCACAATGCTCATCAGGATAAACTAGAGTTAGAAGGTTCT
GTTTGGAAAATCCTTATTTGAATTCGTATTTATTTGAAACCTAGCCGTATACTTCTTGTATTTGTGGACCAATCAAAAATTCTTGTCGCGGCTC
GTTTGGAAAATCCTTATTTGAATTCGTATTTATTTGAAACCTAGCCGTATACTTCTTGTATTTGTGGACCAATCAAAAATTCTTGTCGCGGCTC
CAACGTTTTCCTAAGTATTTTAAAAGCCAGACGGGTGAGAGTCCTGTAAGCGTGGCCGCAGGTGTGTAATTGGGCAGCCTGCAACCAAAGTCCC
TCTCGACCCTCACCTAAGGCTCCCCGCTCCCACATCCTACTCAGGTTGGGAACAGGCTCGACCGGGCTCCTGACATCACTGGGGGACACAAGGG
AACCGATAATGCGTAGCCTTCCTGGGGGCATCCCAGCCTCAGCGCTCGCGACTCCCCTGGTTTCCCACATTTCCTGCGCAATTTCAGGCGGTCA
TCCTCCATCCAGGAGGGCGCGCTGCAAGTGGCTGTCACCCAGCACGCAGCTCTGGGACTGGTCTTTGCTCTGAAACTCCAGCCTGAGCAGCTGA
CACTCAGGGTGCCCCTGGACACGTGCCCGGGGACAGAGGCTCTCCAAACCTGAACGACACCCGAGGATGATCCGTGCATCACCAGCCTCCTTGA
CCTTAGGCAGACGCCCCCAGCCCCCCGGCCATTTTTGGGGCAGCCCCCTCCCCCGCCGCCCCCGGAGTAAAGAGAGAAAAGGACTCCACGGGGT
CGGGGACGTGCAAAAGTGATTTCTCGGAAAGAGAGCGCTTCAGAGAAGGCGGATTTGGCAGGCTGCGCTGATTGGGCCGCGCCACCGCCCCTCC
CGCTCCTCAATTAGCTCGCGCGACCGTCGCTCTCCGCGCCGGACCCGCCTTCTCCCCCGCCCCATCTATAAAAGCAGGCGCGCGCGTACGCGCC
TCCAGGAGCCCGCGGGCGGTCCCGGAGGCGCGGGCAGCGTGGGAACCGGCGGCAGGTAGGACGCGATGGGGTGGGCGCGGGGGCCGGGGCTGTG
GCTCTCCCACCTTCGCCCAAACGGAGTGCACAGCACGTTAGCAGGTGCTTGCTCTGGCTGCTCTCCAAAAACAACAACAACAACCAACAACAAC
AACAACAACAAAACCCAACCAAATGAACAAACACCTCTCCCTTTAAAATCTGCCTGATGGCCAACTTCATAATGAAGAGAAATAGATCTGCCAA
TCACCGCGCGGCAGCCCGGCTTCCATGCATGAACTATCCAAAGCTCGCGACTGGGCTCGCCCAGGGACCGACTGGCTTTGATTCTGACTAGTGG
CAATCTGATTGCCCAGTGGCGCTGGACTTCTCTGATTGTCCAGTGGCCCAGCTGGCCCCGGAAGGAAAGTCTTCCGTGTGGGTCCCACACAGCT
CTCAAGACCAGATTTGCTGTCAGCTTGGCCCCAGGCTATAGAGQCAGACTTTTCCCCTGGTGAGAAAGATTACTTACCCACAGCCGGGAAGGGC
GTTCACGGGCTAGAAACTAATAGAAACCATTCACTAGAATCTTAAAATGGTAGATCACTGTTTTGTTTGTTTTTGTTTTGTTTCTGATACAGGG
TATCACTCTCTAGCCCAGGCTCATTCCAATGAGCTCCCGGTTATCCGCCTACCTCTTCTGAGTGTTAGGATTTCAGGCGGAGCTTGGGGGGTGC
CCAGGTGCTCAATGGCCCTGTTTTTTTCTTTTAAAGTCAAACGATAAGAGCAGTTTCGTGACAGTTCTAGGTTTGTCCCTTTAAGTTATGGCAG
GCTCCTTCATGAAGAACTGGGACCGATTCAGTGTCCCTGAGGAAGCTTGGGGCCAGAAAGAGATGGGTCTGTGATGGATTTCCGTTCAGTGGTG
GTCAGACTGTGGCCCAGGGCTGAATGAAAGGGATTACGGTGTGGTGTGAGCCCCGCCAAACATGGCTGGTGCACATGTTGACAGCTGTGTTAGG
CGAGCCTCTGTCCCCTGCCTTGTGAGAAGCCTCACCTAAGACACGTTGCTCTAGATGTAAGTTAGCTGTAGGCAGGATTGGGCCCACAGGGAAT
CCTGCCTCAAAATCAAGAAGAGCAAGCTAGAATCATGTGAGCGTGTTTATAAACCATTAATTGTCCATAGTTGTAACAGAGTCAGGCTATCCCT
GTCTAGGACCTCACATTGGCCTCCAAGGCAATAGAGGAGATTGTCCAGGTGCTGAGAGCCGGACCCTGTCAGGTGTTCTTTCATCTGCAGAATG
AATGAAAGAAAGCATCCCTTCTGTGTGTACTGTCACTGGCACGCTGCTGGCAGTTTGTGCTGTGCCTGCCCACGGGATGGTGGTCCCTCCCAGT
CTCTCCCCCTTCCGAGTGTAGAAGAGGCTGGGTTAGAGAATTTTAACCTCCTAGCTTCCATGGTCTGCCATTCACCTTTCCTTTTAAACACCCC
TTTTCTCTGTCACCCACCAAGACATCTGTCTTTCACAGTTCTGGGGTGTTGGGTACCCCAGGATCCCTGACAAGAAAGTGCCATTCCTGTTCTG
GAAAAAACTCCAGCCATGCCAGGGAAGTCCCTTCAGATTTCAGGAGGCTCAGGGACCATGGGGGTATGGGTCACAAATCTATCTCCAGGAGCTG
AGTTGAGGCTTTCAATGGACACATCCTCAGATACTCTGGACCCCTGACCCCAGCTCCCACCCCACCCTCATCCTTAGAGGCCACACAAGACACT
ACCAAACCAGGAGAGCCTCCTATCTCCTCTCCAGAACAAGCTGTTGGAGCCAGGACTCTACTTGGTTTTAGGGGTACCCAATGCCATTTCAGTT
CTCTCCCTAGGTATTCCTTTCTGACTTGTCACTTATGAACTCAGTGGTCTTAGAATACTGGGTTTCTTCAGATAACCTTTCTTTCCTGCCTTTC
TTGTGAGGGTCCTTAGACTTAGGAGCCAATGGCTTCCCAACGTGAAGAGCCCCTGCTGAGGTCAGGGTTTCCCAGCCGTCTTGATGATTTGCTT
GAGAGGTGCCTCAGGTGGCACCGCACTTGCCTAGCAGGCACAAGCTCTGGGTCCAGTCCTCAGCACGGGGGAAACGGAGGCAGAAAGAAAGATC
AGGCGTCCAAGGCCATCTTCATCAAACTAGGGAGTTGGAGATCAGCCTGCGATACAAAACCCTGCCTCAAAAATAAAACTCAAAACTGACTGGA
GTCTGACTCCGCTTTAGCCCTCGCTCCCTTCCAAGCCCACTGGTGGCAGTTAGGGCTGCTGTGTGGCTAAAACCAGCCCTGGAGAGACCTCATC
TCCCTCCTCTCAGGCTGCTGCCGTCTTTCCTGGCCCCACTACCACCTGCAAGCGGCCTGGAGTTTCTGACCCTCAGGCCTCTTTCCAGCAATCC
TGACTTTGTGGGACATGCTGGCTCTGGATGTGACTATGTTCTTGGGGATATCTTGACTTCTCACTGATCATAACTTCTTTTTTTTTTTTTTTTC
CCTACCCCAAGAGGTCATTTTAGTTGGAAGACTAGAAGTGCTGTGTTCTGGTTTTCAGGGTGGGGCGTCTGTCCAACTGCTTGGGGATTTCCAG
GCTGTTCTAGTAAATGCTGGCTGCAAGTCCCTGTGCACAAATGCCCTCTCTCCCCACGTGTAGGAAAAGCAGACCCCGAGAGTGTCCAAGTGTG
CCATTAGGTGTCTGGGGATGGCGGGCCTGGATATGGAGTCCCTGAGCTGGCTTTGTACTGTCCCTTTGTTCTCACTGAGGGCTGATTGTAAGAG
GGACTCCCTGTGTTGTTGGAGGAGTCCTCTAGGATACAGGCTCTGATTGCAGGTACTGTACACACAGCTCCCAGACCGAATCCTTAACACTCTA
AGGTTTATTGGCTTCAAGGACACCCAGCCAGCACAGGACTCCAGCTCTAACTCCATCCCAGTGGGAACAGGACCCTATACTGTCTGATATTACT
ATTACTATCCTAGCTGGCAAAGGGCAACCTGCAAGCAGCCTTGAGGGTGTCCTCTTTCTCGGGTGGTGCTGGGATCAAACTCTGTGAGGAACAC
TGGCCCCTTGGGTATCAGTAGTCACGCTGGTTCTTAGAGAGGCGAGCAGCTCAGAGAAAGCACAGCATTGTAGGAGAGGGACTTCTTCCTAGCA
GGTGCCCTCAGTGTCTGGGACAGGGGGTCAGGGAAGAGCTGGACCCAGAGCCAGAGCTGTGGGTGGGGCACATCTGTGAACAGCCTTTCGGTTT
TCCTTTGGGTTTAGGGCCACCGGGCACTGCTGATTTCTCATGGCACTGGTCCAGATGTCTTCCTGAGCCGGCACCTTTGCGTGGACCTCTGATC
TTCCGGCAGTCAGTTCCGGGACTGCTCTGACTCACAGAGATGTATTTGTTATCCTGAAAGATTTGCTTTCTTTCCAAGGATGTGTGACCGGAAC
GGCGGGCGGCGGCTGCGGCAGTGGCTGATCGAACAGATCGACAGCAGCATGTACCCGGGGCTGATCTGGGAAAATGATGAGAAGACCATGTTCC
GTATCCCCTGGAAGCATGCCGGCAAGCAGGATTACAATCAGGAGGTGGATGCTTCCATCTTCAAGGTAAAGCCTCCTGCGTACCCACTCAGTGG
TTTTTGGTTTCCCTCTGGCTCTGGAGGTATTTAGGGATATCCTATGACTAAACAGCCCACTATTTCAAGAGAAACAAGGAGGAGTGTCTGATTC
TGGCACGTTCCCTCATGAGGTTGAGAGTGACTTTCCTGCCCATTCCGCTCTTCTTGCTGCGGTGTACTGACATGCTCTGCTTGGTGTACTAAGG
AAGGCTTTGCTCTTTCAAAGTGCGACTCCTTGGCATGCAGGGATCAGCTATAAAGGGCGACAGGCTTCCACAACTGCTTCTGGGTCAGGTTTGA
GGGACACCCTGAGCTTGTGTTTTAATGTTTCCCCTCTGAGAGGATTGAGTGCGATCACCGAGGGCAAGTCACACAGCTGGCCTGAGAGGAGTCG
GCACCCTCTCATCTCACCCTGGGTGGCAGGTGATGCTCCTGTTTGCACTCTGTACTGCCACGGAGAGAAGCCACTTCTCCGGGATCTCATAGCT
CCTGTGTGATGGAGCCTGTGTTTGGGACTGGGTGGTCCAAGGTCTTAACCCTTTATAGTATAGAGAACTAGGGTAATTTCTCATTAAGGACCAG
CCCAGCCCAGTTCTGCAGGCAGGCAGGGTCAGACATCCCCTGAGGGTTGTTACACTCATGTATGAGTGTCCCTAAGGTTTTAGGCACCTACATT
CGTCTCTGGGAGTTTCAGAGTCTTAGGTCATGGCCAGCCCACACTTCTACTTTGTGAACAGCTGCAGCCTTGGTGGTTTGACCCAGAGTCCAGG
TTGTAAACCACTGCCTTTAGCTCAGTATGTCTGGGGCAGGGTGGAAGGTTATGAGGCCCACTGAACTCAGAGGACCAGAAGCTGACTCAAGACC
GTTTTCAAGCAGGAAGCAGGGCCTGCAGAGACTCTGACTACCAAAACTGTCTTGGATGGGTCCCTCCTGGGGCACAGTCTTCCCTTTCCAGTGA
GAACTCTGAACCAAGCATATGGTGACTAGCATTGACACTAAACTCGGAGGCACAGTGTGCTTGGCTGAAAGGCCATCACGAATCTTCCAGAAAA
AAGGGCAGAGTCCTGGACCAGGGGCCTCAGTTGTTGCAGGAGACAGCAGGCCTCGCTTCATCCAGTTCCCTGCTTCAGCAAAGCAGGAGTCCTG
AAATAAAGCCCCAGATTTATGCATCTTATGCAACGTTCTTCACGGCCAGCAAGCCGTTTCAACAGCCCTGAGGAGAATGTGCAAGATTCCCGAT
GTTTCCGTTGGTTACGCAGTCGCTCTGTGTGGCAATCTGAAATGAGACATCAATCTCAGCAGGAATGGCGGGAGATCAACGGGCGGGCGGGCGG
GCGGGCAAGTGGCAGGAGATTCAGGGCAGAGAGGGTCTTCTCTGAGCTGTCCTGAGTGGGGCGGGTACCTCCGCATCTTCAGTCAGACTCAACT
TGACTGTTGAAGGAACCGTAGGATGAGGCCTTGGGCAGATAGAGCCATCTTAGGGGCCGTCTGCTTAAGTAAGAAACCCACTTTTCTCAGCCAG
TTAAAACCTTTAAGAAATGTAGGTGTTAAGGAAAAGTTATATGCTTGCTTCTCTACCAGGGAAAGGGATTACACCAGAGAGCCCTTGTGCTGTC
TCCGGGCAGCGTCTTGCGGCTTGCTTCCTGTGTAGACCGCAGGGGGGAGAATGAAAAAGATCCTGAGCTTACCTCAGCCAGGCAAGGGCTGAGA
TTCCTTGGGCCTCGCTCGAGATAGGCCTGACCGTTTACCACTTACTCTGTGTGCAGAGGGTCTTGAAGGACGGAATAGGGGTTAATTTTCACTT
TACTTTATTTTGAGTTTGGAACTTAGGTAGTTCAGGTTGATCTCGAACTTGCTCTGTAGCTGGGTATAACCTTGACCTTCTGATCTTCCTGCCT
CTATCTCCTGCGTGTTCGGATTACTGGTGTGGGCCACCATACGTGGTGTATATGGTGCTGAGGATTGAACCCGAGGCTCTTGCATGCCGGACAA
GTACTCCTTTATCAACTGAGCTACACTCCTAGTATTAATTTTTCAAACACAGTGCAACACAATGTCAGCAGAGAAGAGCTTCAAGCAGTGGGCG
CCCCTGCGGGTCCCAGGACAACTCACTCTGTGCCTTCAGCCCTGAGAGACCATGCAGCTAAGATAGCCCTGCAGAGATGGTTTCTGGCCAGATG
TGGCAAGGCTCAGGGTAGGCCTGTGCTAGTACCCAGTGCTGTCTCACGATGCTCCCTGACCATGGAGTCTGATTTGATTGGTACCTGGTATCTC
CAGGCTTTCCTCCCCGAGGAAGCATGAGACCAGAATGGAGGGATAAACTGGGCAGTACTGCTGAGATCCCACCGTTCTGGCATGCGCCAGCTGA
CCGAGATACTGCTGGGGTATCTGTGCTTTCTCGGGTGCCATTGGAGAGTGGGTTCACCCAATGACTTAAGGGGTGTGGTTTTTCACTTGTGTGC
CAGATATTCTGGGCTGCTACATCCAGGGAGAGGTACTGCTGGGGAATGCCTTACCGTGTAGGGTGGTCTTCACTGTGTCTGTGGCAAAGAGGCA
GAGGTTTCCATGTAGCCCAGCCCCAAAGTCACTGTTCCAGTCTGCTTTGGAGTTCACAACAGCCCACAAGTCAATGTGTAGCCAGCAGTGCCAT
TTACAATAAAGGCCAGAATTGGAACTGTCTACTTAAAAAAATTTTTTCTAAAAGTGGGTTTGCAGCCATGTCAGAGAGGAAGTGACCACTCAGG
CTCGGGGGTAGGAATGTTCCTCCAGCTTCTTGCTGAGCATAGATACAGAACTTGGCATCAACAGTGCAGAGAGCATTGGCCTGGAACATAAGTG
TCCCCGGTAGGTGTACATGTGTGTGTGTGTGTGCATTTGGAGGCCAGAGGTCTATCATTGTCCACAAAAAACGATTTCACTGAACCTGGAGCTC
AGGGATTAGGCTAGGTTGACTGCCAACGAACCCTGGGGATCCTGTTATCGTGACCCCAGGGCTGGGGTCACAGGCACACATACCCATCTTTTTC
TGTGGGCACCGGGGATTTGAACCTGGGCCTTTATGTTTACATGGTAAGCACTGTATTAAGTTGGCCCCTGCTTTGAATTTCTGGCCTTTGCTTA
AAGCACAAGCTTTGGATGGGTCAGAAAAAAGAAATTAAATAAAAAGAAAAAAAAAAAAGAGGCACTTAACAGGGACAACAGTTGGCTGCATCTT
AAAGGGCTAGAATCATGCAAAAAAAAAAAAAAAAAGCCCAAACAGATGTTCTATTAAGAGGAGAGACCGGTGGATACACATGTGTTCCTTTTCA
TGCTGGAGGTGTTATGTGACAAAGCAGAAAGTCTTTGACGGTGCTGGTGAAGCCATCCACATTTTCCTCTTTGGACTTCATGACCTAAGACACC
CCTCTTGCCTCCTCCCCAGGTCCTTCAAGCCAGAGGACTTTGCCAAAGCTGCATCCTAGGCTGTGGGGAGCCTGGGTTCAAATTCCAGCTTTGC
TGAGTGTTTTGGGGCACCCTTACCCAGCTCTTGTCTGTTGAGATACAGTGGTCTTCCTGAAGTCCAATTGGGTGCTGACCTTGGACAAGGGTTG
ATGGCCAGGAAAGGCTCTGGGGGAAGGGGGCGGGCGGTATGCAGCCGGCCTTTGAGTTGAACTCTGTGGTTTGTGTCCCTCTGTGTTTACTGAG
TTTCTCTCTCGTTCTTCAGGCCTGGGCAGTTTTTAAAGGGAAGTTTAAAGAGGGAGACAAAGCTGAACCAGCCACGTGGAAGACGAGGTTACGC
TGTGCTCTGAACAAGAGCCCAGATTTTGAAGAAGTGACTGACCGGTCCCAGCTGGACATTTCTGAGCCATATAAAGTTTACCGAATTGTCCCCG
AGGAAGAACAAAAATGTAACTATCTGTTGGGACCAGGAAGCCCTCTAGGAACCTCCTTCACCCCCCCCCCCCCCACGCTTAGCTCCTGAAGCCC
TCAGTCTCCACAGGGCTAGAGCAGACATGCCACCCACAGGGTTTGGGTGCCTGGTTTTAGCTCACCAGAGTTGTTCTCTCTTGTGTAAGCAGAC
ATAGAGAGCTGCTCTGCTGACCTCATACGCCATGTGCTGTCAAGTGGCAGCTTCCTGCAGAGGGAGTGGCCCAGTGGAGGCAGGGAAGGGTGGT
GGACTCTGGGTCATGACAGCCAGAACCTGGAGGGAGCGAGTCCCCGGAGCTCAGCATAAACTCCTCCAAATGGGTTPGAGGCTCTGCTGAAGTC
TGTGATGCAGGATTCCCTGCTGCTTCCAGGCAGTCTACAGAGGAGGCTGGGGAGGAGTGGGCAAGGCAGGGACGGGCGGTAAGGTCCAGGGAAA
AGTTCTCCAGTTAGACGGGCCGGCAGTGGGGACATCACTGATGGCTTCGGTGTGTCACTGCTGGAGAGGATAACATCAATGCCGAGGTCTTTTC
CAGCGGTAATGTCCTAAGAGCATCTGTAAAGGAATGAACGCACACTGGCCTTCCCCAGCAGAGCCTCGTGGCTCCCAGGGCCTGGTCCGTTCTG
TACTGCTTCTGGAAGGCCGGCTCCTTTGTCTTCGCAGTGATTTGAAGCAATAGGGAAGTTTCTTTCAGAGCCCTGCTCCCCCAGGACCAGCCAG
GCTTGATCTGGTTAATGACCCTGACTTGTTTATAGTGTGGGTGGAGCCCCCTCACCTGCAGGTTTGGGGGTGAAGGAGAGGCAGAAGGACATAG
CATTTGCATGGCATTTGTCTTGGTATACTGTACTGTGAAGTTGAGTGGTTTGCCTGCCTCTCTGGCTGGCTGGGTGGGTGGGTGGGGCTCTCAA
CCTCTGCTTGCCCAGCCATGGCTTCTAGGTGAGTCTCTCCACCTGGATGAAGCAATGGGGAGAGATGATACAGGTTCCTGGGGGTGGGGAGCCT
GGCGGNNNNNNNNNNNNNNNNNNNNNNNNNNNNNNNNNNNNNNNNNNNNNNNNNNNNNNNNNNNNNNNNNNNNNNNNNNNNNNNNNNNNNNNNN
NNNNNNNNNNNNNNNNNNACAAAGTGGGTCAGCACCCATCTGGGACCAGGTATACTGGCCGATGAAAGCATTGGTCCCCTGGGGAGGCAGGCAG
CAGGCTGTGAAATGTCATGTGTGTGACTTCCCCATGTGGCACGTATACACACACACACACACACACACACACACACACACACACACACACACAC
ACGCACACACGCACACACGCACATGCACACGTATAAAAGGGCAAAAAGATTTTCTGTTACCTGGCACTCCCTACCTTCCAGGAAATCTCTGGGT
GTTTGATAAAAACCCAGCCTAGCAAACTTACCTTCAGTATATGGGCCATAAATGCCTGGTATAAAATGCACCCGGTGGGGTTCAGATAGAAGGA
AGAAGCCAAAGTCTGGCGCTTGTCCTTCACAAGCCAGTGTTTACAACCCCTCCACCACCCACCACTTCTCCCTTTTTGACTTGGCAGATCAGAT
GACCCGGCCATGAGAAGCAAGGGCTGAGCCTTTCCCAAACCTTCCAGCAGCTGCTGGTCAAAACCAGCGAGGACGCTCACTACTCCCGTTTCCT
TAATTCAGCATTTTAAGAAAAGGTTGCAGTGTGCTCGGCTGCCCTGGGTCATGGTGTCTGTCCCCTTTCCCATAGGCAAGCTGGGCGTGGCACC
TGCAGGCTGCATGAGCGAAGTTCCTGAGATGGAGTGTGGCCGCTCAGAGATTGAGGAGCTGATCAAGGAAGTGAGTGGAGGGGGTCTCAGGCGT
CTTCCAGGGAGGATGGGACATTGCTTCTAACCCTCAGAGGCACTGAGAGCCTCAGGCTCTGCAGGGAAGTGAGGGACACCCCAGCTACCTCCCC
AGGCCAGCCTCCCTTTACTGGTCAGGCCCTGCCCATCCAAGCATAGTTAAACCCATTGAATAGCAGCTTTGAAGGTCTCCATGGAGTCTTAGCC
TTGTTTCTTAGCCAAGCTTCATATGGAGGTCTCCATCGCTTCTGGTCATCCCGTCGGCCCTCATGGTAACTAGATGGCTTGCTTTTCAAGACAC
AGGTTTTATTCCTGAGTGTGTTATAAGATTGGATGACTGAGGCCCGTAGGATCCACTAAAGGTGGTGGGGACCAGCCTGTGGCTCAGCGCTCAC
CTATCGTGTACGACAGTTCCCAGCAGCATACACAAAACACACATCTTAGAATAATCCCCCATCACATGCATGGTTGGCAGCCTGGAACTGAAGG
CTCAGTGGCTCCGTTTAAGTTAAACAGATGGCTTTTTTTGTGTGTCTGTTTTTAGCCTTTATATTGTGTCTGTACAAGGTGGGGTTTCCATAGC
TGAAACAACCCTTTAAGCTTATATAAGCAAGATGAGGTCTCTTTAGACGGCAGCTGGCCCAGACCCTGTCACCTCAGCTACTCAGGAGGCGGAG
GCAGGAGGGGTTAAGACCTGCTTGAGCTGCAGAATGAATTCAAGGTAGAAAACTTCACGAGACCCTGCCTTGAAATCAAAGAGGGAAAAAGGCT
GGCAATGACATAGCTCCGTGGTAGAGCGCTCGCCTCGCGTGCACAAAGTCCCGGTTTCCATCCCCAGCTCAGTGACATCATAAAAATAAAACCA
AGACTGTTGTTAGCAACGACACATCAGCTGTGTGGTCTGCAGCATTCTGTGGAGCACTGCAGCCGGCCAGCATCACCTTCCCAAGCTGCCCAGC
TCTGCGGCACATGGCCGTTGTGATGTTCTGGGTGGTCTTGGTTCTGTGTCTCCCCCACCCCCACCTTGTCTTGTTTTCGGTATAAGCCTTTACT
GCCAACTTGCCTGAGCCAGTAGATGGTGATGATGTCACACCAGGGTCACAAGCAAAGGAGGTTTCAGGACGTCTCCTAATTGGACCCATCCACC
ACTGAAGGCCCGAGAGCCCTGTGGCTCTCTGAGTGAGATTCTCAGCACAGTAGAATTGGCTTGGTGTCACCCCAGAGGGTTGCCCCAGAACTGG
GCTATGTCTCCCAGCATCTGAAGGCCAGTGAACTCTTTCATAGCCAAGGCTAGTCAGGATGCCAGCCCAGTGGGTTTGTAGCTTAGGGTCTGAT
GAATTGCAAAGGGAAGCTCTGCTTTTCTCTCATGAGATAAAAGTTGTGGATTTAGTTGTGTGTCTGATATTGGGTTTTACAAACATGGGGTCAG
GTGAGTGCTGTGCTGGTGACCCGGGACTCAACTGCTCTTTTCTGTCACCTGGGTCTACAGCCTTCTGTGGATGAGTACATGGGTATGACCAAGA
GGAGCCCATCCCCACCAGAGGCCTGCAGGAGCCAGATCCTCCCTGACTGGTGGGTCCAGCAGCCCAGTGCAGGTGAGTGTGGCTGTCCGGCACT
AGCAACCACTAGGCTCTTTATGTTAGGGTAGGAGGTGCTTGCCACTGCTAGGATCCATGTCCTGTGGAAGGGTCATGAGTCACAGCCGGGGACC
GAGACAGCCAAGCTGCAGCCTCTCAGGCAGGCACAAAGGTCTTGGTAGTCATGCATGGTCAGTCCCTCCTGTAGTCCCCCGGAAGCTGAGAGGA
GCCTGCCAACATCCCCAAGCCTCAAGGGAGGTCCCAGCTCTCAGCCACCTGTCTCTTCCTGGCTCACTGTCAGGGCAGCCCCAGAGCCAGAGAG
AGCCAGGGCGTTAGGAGCGGGAGGGGAGCTCAGTCAGGAATAGGCGTTAGTTTGGAACCACTTTGGGCAGTTTTCATGTCTTGGTGGTGCCTCT
TGTTTGCTCATCCATAAAATGGGCCACCAGGACCTGCCTGGTAGGATCCACAAGTTAAATAAAGGATTCACCCCTTTGATAGTATCTGGGAGGT
ACACCCATGCTGTAGCTACTTAGAGGGTCATTCACCTGGGCCCCCTACCTCAGTGTGTGAGCAACTTTTATGGCTCACAGACATCTTGGTTCCT
CTTTTGCCTCTCTCCTGCTAAGACAGGAACTGCTGGGAGGTCTTAACTGGCCTTGCAGGACTGTGAGGTTTCCAGGCTGTGGGTGTTAGTGTCC
TGCAAGGGGCCTTGCGCTGCAGGGGTGTGTCTTTGGCAAAACTGCCTGGGACTCCAGCTTCCTTGTGAGACAAGTCCCCAACCATTGTGTATGG
TCCTTGGGGTAGCAAGGAAGCTTAGCACAAGGACAGGAACCTGTAGTGCAGAGGAAGTCCCCTCCATCATGGTAGGTTTCTGTGTCTCACGTAG
AGTGAGGTCTGCCCACTAATGTTGACACCAGCAGTGTCAGCCTCTCATCTATAGCTCAGGGATACTTGGGTCCTCCCTGCACCAGCCCAGCAAG
GCATATCCTTTCTTTTCTCTGCTTACAGGCCTGCCACTGGTGACCGGATATGCCGCCTATGACACACACCATTCAGGTACCAGGGTACTCTGGG
AGAGCATGGCACAGGCTCTGCTTGAAAATAGCCCCATGATGTAGATGGGGTCATGAGGTCCCACAGACAAGTGTGGCCTAGGGGTAGGCTCCAG
AGACTGATTCTTCTTCCTCGTTCTGTGTGGTTTGGGAGCAGTTATAGTCATCCAAGAGTGTCCTCAGGGACAGCTCTGCAGCCGGGAATGTAGG
TTGCTGGACTGCCTTGGCCTCGCGTGGTGGGATCTGACCTCTTGGGGCGTCAGGTTCATCATGTGTGAAATGCTGTACTATTCCTAACACGGTC
TAGTAGGGACACAGCTGGCCAGTGTCTCCCATGTAGGGTCTGTCACCTCCTCTCACTTCCAACTCTGTAGCAAGAGTCCTAGAGATGGTTGTAC
TGATATACTGATGGTGCTGAGGCTGGTGCAGATGTTGGTGGTGCTGATGGTGCTGATGTAGATGATACTGATAGTGCAGATGTTGATGGTGCTG
AATGGCTATGATGCTGCAGATGCTGCTGATGCTGGTATGGATGCTGATGGTGATGATGTGGTTGCATCAGTGCTGTCTATAGAAGTTGGACCTG
GTTCCTCCTCCCAGCCCCCATGCTCCCAGACTCAAGATAATATTTACAGATACCTGTATGAAGCTAGGCTCTTCTCTGACTAGATCATAACCTA
AAATAACCCATTTATTTTAATCTACATTCTGCCACGTGGCTGGTTACCTGTGCTCAGGGACCATGTGTCCCTCTCATCACAACTTCCCGGGAGA
ATCTCCCGCACTTCGCCCTATCCCAGAATTTTCTCTCCCTCCGGGATGTCTCTCTTCCTATTTCCTGCCTAAGCCATAGGCCGTCAGATTGACT
GTTTCCAGGAACAATGTCCATACAGATGTATGAAGTTCCCTCTACAGCTGCCTTAATGAGTGAAATGATTCTTTCTCCTGGAGCACTGTAGATG
AAGAGCGAGCCTTCATCTGAATTCTCCCCTCCCTCCCGCTCCCTCCCCACCTGCGGTCTTCTGGCTGTCTCCTCTGCGGTCTGTGTTATTTTGT
CTCTCTGTTGTGTGTGTCTGATGTCTGTCTGTCCCTGACAAAGTGCTTTGCTCTGTATTTATGGAACAGCACAATAGGTACAGTATGGGAAAGG
ACTAAGGGATTATCTTTTTATAGAGATCTGGAGTTTTTTTTCAAGTTAAGACGTTACTTTGCTGACCCCCGCTGACTGAGAATAGCGTGCGGCC
CTGCAGACATGCTATTGATTTATATCCTCGTGTGCCTTCCAACTCTTAGGGGATATTTCTTTTGATTATGGTTGCTTTTAACCTATTGGCTGTT
TTCAGCGAACGATTACCATAGTGTGTACAATGTATGCATGCACACACACACACACACACACACACACACACACTACTCTGGTCATAGGCACGGA
AGGGTATATAATTTGAGATTTAAGCTATGCATTTAGCTTGTGTTTTAAAAGCTGATTGAGAATCTGGGAAACTGAGGCGACATAAGGTTGGTTG
CATGGGTCTTTCAAAGGCAGGTTAAACGGGCCGAGAACACAGTATGGAGGCAGAGCAAGGACGTAATTTTAAATGGTCTCAAGGCCAATGGTTA
ACCTGGTTGCAGAGCCTGACAAAAGTTCAGTTGCTGAAGGCAAGAGGTGTTTCTGGAAAAAAACTATTTCTATAGGTGACGGCGCTCCTGATGG
TGGTGATGGTGGTGGTGGTGCTGCTGCTGAGACTGATGGTGCTGGTGATGATGATGGTGGTGGTGATGTTGAGGATCCTGATGGTGGTGGCGAT
CATGGTACTGATGGTGATAACGCTGGCAACCATGGTCATGGTGCTGATAGTGATGGCTGGTGTTTGTAGTGTGATTTTGGGTGCCAGAGTCAAG
GGTGACATTCTTGTGGGCTCTTGTCTCTTTCCCATGCTATTAACCTCCTCTAGGTTATGAAGACAGGTCGTTTCCCATTTCAAGGCCCTGGGCA
GTGTGACTGATGGGTCTCAGAGTGGGGATCTGCCATCCTCACTGCTGCTCGCTGTGAGGCAGGTGGCATCTCTGTGCCGTCCTGCGAGCCACCG
TGCTGCCTGGTTTCAGGACAGGCTCGGTGGGGCTCAGGGAGAAGCCCTGGGAGCTGTCACGAAGGTAGAGGCAGGTGCTCACCAAGTAAGAAAA
ACACAAATAGACGTTCGCCCCTCTCTCTAGTGCTGGCCTGTCCATGTGTTGGGGTCCTTTTAGATCTGGCTGTGGATGGCGAGCTTAGCTTGTA
CAGCTTCCACAAGCATTTGTCTTCTCGACTGCCCTCAAGGCTTCTGTAACCCACTCAGGAGGCCCGGGGTCACGGGCTGAGCCTTTGGCCTTGT
CAGCCCCGGGCTGTGGCCCTGAGAATCTGCTGACCAATGCATTCTGGGGCCACACTGGCCGGGCCAGACCTGGGGCCTTCTGAGTGAGAGGTAA
AGGCAGGCTGTGGGGAGGAAGTGCCCTTGAGCCTTGCACAGCTGCCTCAGCACAAGTGAGGGAAGCGAGGTGCCCTCAGCCACAGCTGGGAGCT
CTTCTTCCAGAACCCAGGCCACATGCCCCGTCTCTGTAGATACGCTGCAGCCGGGCTTCCTGACTGCAGAGATGACCTGGGGTGAGATGGGTGA
GGCAGGGGGACCACAGGGAGTAAGGGAGACCATGGCACTGTGCAGAGCCTTGACTCTGAGGTCTAACCCATGGTAGCTGCCTCCCTGTGGTAAG
CAGTGTTATAGGTCTTGAGACCAGGCTAGGATAGACTTCCTATTTATCAGAAAAACCCAGACCTCTGGCTTTTAAATTTTATTTTATTCATTGA
TTTATTGATTTATTTTTAGAACAATCTTGAGAGATGTGTAGCTCGAGATGGTCATGAAGTCACAATCCTCCTGCCTCGGCCTCGAGTGCTCTGG
CATGAGGCACCCCTCTCTGTATTTGCCACCCACGCCAAGGCTTTCTCAGAGGTGCTCTGCTGTCAGACCTCTTGAGGCTGCCAATTTGTTCCCA
GCCTGTGTGCATCTAAGGAATGGGTCAAACAGCAAGGCTTTTTTTGGTGTGTCAGCACTTCAGGGTGAGGCAGAGCCAGCCTGCTGTGGAGAAA
AATGCCAGGCTCCCCCAGCAGACAGCTGGAGTGGCAGGGCTTGCCCTTTCACCTCTTCAGCCTGCAAAATGGCTGCGGTGACCAGCGATGTACC
ACAGGGGCCAGATGTATGGATATGCCCAACCCCCGCAGAACCAGGGATTTCAGTACGTAGTCTCAGGGGTCTCACCTGTGGACCATATTTTGTC
CCGTTTCCCTGGCTCCTGTGGTCTCACAAGAGACCCCCCCACAAAGCTGGCGCTCTTGTCATCGCTACCTTGCTGATGAAGAGCAGGCACAGAG
AGGTGGAGCCGCTTGCCTCAAGTCACACAGCTGTGAGGAAGCAGTGCTAGAATTCAGTACGAAGGCGATGCAGATGGCGATGCTGATGATGCTG
ATAGCGATTTTAACGGTGGGCCTGGGAGTGAATGTGGGGCGAGCTGCTGGTGTCACCCACACAGGCCCACCCAGGCAGTGGTGCAGTTGGTGAC
TGCACAGCTTTAGGACACCATGAGTTTGGGGAGCTATCAACTTGTGTGGCTCCAGAGAGAAGCCTGGATTGGCCTGAGGTGGCGAGGCGAAGCT
TAGGATGCACAAGGCTGCCGACAGTGGAGAATTCAGTTTATAGCAGTTACAAAGCTTCTCCAACAACAAGCCTCTAGCTCTGGGCTCCTGGTGT
CCGAGCTTCCCTCCCAGGAGTCCCGCCTCTATGATTCCCTCCCTGGAGCCCCGCCTCCACACTAGCTGTTAGTCAGGGGCCGCTGGGCCCTCTG
CCTTGTGTTTTTCTCATCTTTCCACTTTGTAACCTTATCTGGAATCCGGTTGTCCTTGCCTGCAAGAGGACGTCAGTACCTTCAGTACCGCCTG
CTAGACAGGAAGCCAGAGGCCGGAAGAAAAGGAAAGTCAACGAAAGCCAAATACTGGGTTGGCACGTTTCCAGCCTCAGGGTTCAAGTTCAAAG
TCTCCCTCCCACCCAAAAAAGATCGTTGGGATTATTATGGTCGGTTGGTGCCAGACTGAAGCTTTTCTCTCTTTTTAAAACTTTTTTGTTTTTT
GTTTTGTTTTTGTTTTTCGATTGATGGGTTTACGTTGTGGCACTGGGGATGAAGCCTAGGACTTGAGTGCGTGAGGGAGCGCTTCCCCTCCGAC
CTGCACCCCAGCTCCTGAGGTGACAGAGAGAAGGGTTGGCTAGGATGTAGCCTATGGTCACAGCTCCTGCCTGTGCTGCTCATAGGTGGAGAGA
AGGCTTCTAGGTCTTTCTGGAGGACAGGCTGTGTGTAGGATTGTACAGAGGCTTTCGATCTGAGTCCAGGTCACAGTGTTTGTGATAATGTTGA
TACCTTCACAGGTGGGTTTCTTCCCATCTCTAATGGGGGCTACCGAGTGCAGGGTGACTCGGGAACCAGAGCCATAGGCAGCTCATGAGAATTA
CATTGGCATGCTTGTATGTCTTGAGCTTGGTACAGGCCTTCCTAGATCTCTCTGTGTTTGCGCATGTGCATGCACATGTGCACATGTATGCATG
AATGCATGTTCACACCTGTGCTCATGTGTGTGGAGATGTGTGTGTATATGAATATGTGTTCATATGTGTGTAGGTTCATGTGTATGTGAATGCG
TGTTCACACGTATGTACACGTGGAAGCCAGAGGCAAGTCTCAGGTATCATTTCTTGGGCATTGCCCGTCTTATTTTTTGAGACAGGGTCTCCTG
CTGGCTTGGATCTGACCAACTAGGTGAGACTGGCTGGCCAGCCAGCCTCCGGGGTCAGCCTTTCTCTGCCTCTCATGGGCTGAGATTACCAGCA
AACAGCACTTGGAATGAGGAATAGACTCTGAGCCTTTAGGGGAGGCACTGGGGCTCCCCATCTTCTAGGCCTGATGGCCCTGTGCTCTTGGCTC
CCACAGCTTTCTCCCAGATGGTCATCAGCTTCTACTACGGGGGCAAGCTGGTGGGCCAGGCCACCACCACCTGCCTTGAAGGCTGCCGTCTCTC
CCTGAGCCAGCCGGGGCTGCCTAAGTTGTATGGGCCGGATGGCCTGGAACCCGTGTGCTTTCCGACGGCCGACACCATCCCCAGTGAGCGGCAG
AGGCAGGTGACCCGGAAGCTGTTTGGGCACCTGGAACGTGGCGTGCTACTGCACAGCAACCGCAAGGGCGTGTTCGTGAAGCGGCTGTGCCAGG
GCCGCGTGTTCTGCAGCGGCAACGCGGTGGTGTGCAAGGGCAGGCCCAACAAGCTGGAGCGGGACGAGGTGGTGCAGGTCTTTGACACCAACCA
GTTCATCCGAGGTCAGTACCAAGTCACCTCGCTGCCACCCACTGTCCCTGCCTTAGAGGTCACACCCACCTCCTTCCTTGTGCCTCCTGTATCA
TGGGCCAAGTGCACTCTTGCATGGCTTTGGCAGTGGTATAGCTGGGGGAACCCTTGGAAGCCTAGCCTGCCTGTGCTTTCTGAGCGCCTGGGCA
ACCCTTTCCTCACCTCCCCCTCGGTATAAGGACAGCAGAGTTGGAGCCTTTCCTTTTGGAGTTGACGAAGCTGATGGTTGTTCCTAGCCTGGGA
ACGGCTTAGCAATGCAGACTCCAGGGCCTCAGCCTGCCCAGGCTCGGCTTCTTTACCCTGACAGGGTCCCTAGGGGATGTGGCATGATTTAGTG
GGCAGGAGGATCATGGAGAGAGAGTTCCAGGCCAGCCTGCACTGCACAGTGAGATCCTGTCTCCCCAAAACAAATCCAGACCAACAAAAAGTTC
CCCAAATCGCCTAGCAGTATTCGGGAGTGACAAATCCCATGGGTCCTTGGTTGGCTTCTAGCTAAGCAGCCTTGTATCCTAGGCCCCTTTCCTT
GGCTGTTGGGGGATCTGTGACTTCCTTCCAAGTTCTGTACCCCAGCCCTGGGCCCTGGCTACACACAGCTCAGCGGTTCACTGGTGTCTGTGTT
CTTCCAGAGCTGCAGCAATTCTACGCCACCCAGAGCCGCCTACCTGACAGCAGGGTGGTCCTGTGCTTCGGGGAGGAGTTTCCGGACACTGTGC
CCTTGCGCTCCAAACTCATTCTGGTGCAGGTGAGAGCCGGCAGCAGTGTCTGCCTGTGCCCAGGGTGAGAAGAGACAGCAAGGACTGGGGGCTC
CACCTGGGCAGAGGTCGGGGACTAGATCATACGTGGCTCTTGTCACCTCTGTGATGGCTTCCCACGTTGGGACTCTCTTCATTTGTGTTTCCTT
CTTCCCCTCTCTGCTTGCTCCTACTTTCCCTCCCTCTGTTCTCCTGTTCCTCCCTCTTCAGGAAATTTCTGCTTGTCCAGTGGCCCTAAGATCT
AAGTGACAGATCACGGTCTATTTGACTATGGTCTGAACGGTGGCACTCTTGTAGATGTAATGGTGACAGTCTGAGGAGCAGCCAGCCTGGTTGG
AGCAGTTCTGGGAGAACACTCTTAGCCATGTGCAGGAACGCTGCCCACCTGGCTCCATCTTGTCTCGGAGGGGATTGGAGGACCTGTGGTGGAG
GATGGCCCCAGTTCCCCTCCACCTTGATTCTGACTTTGCACATGGCCCTTGCAGGTAGAGCAGCTGTATGCCAGGCAGCTGGTGGAGGAAGCGG
GCAAGAGCTGCGGTGCTGGCTCCCTGATGCCAGCCCTGGAGGAGCCCCAGCCGGACCAGGCTTTCCGCATGTTTCCGGATATCTGTACCTCACA
CCAGAGACCCTTTTTTAGAGAAAATCAACAGATCACCGTCTAAGCCTCAGTCCGGGCACCCCACCTCGCCTGAGCTCAAGCTTCAAGAGTCTGT
GACTAAGAGAATTCCGAAAGGATGTGGAGCCCTCTGACTGGGGTGGGCGGGTGTCCTCCAAGGGGCCTCCGGAAGCCCACAGAGGGATGCGCTC
CTGCTCAGGCAGGTGTCAGAAGCTTGCAGGGGCTGTGGCCGCAACCTGTGATTAAAGCATTCCTTTCCTGCGTTTCCCCCTTCACCACTAATGG
CTGGCCTTTCTGTGTGCTGAGGTCTTTCGACAGTTCAAATCATCTGGTGGCAGCAGACTCGCCTTTGCCCTTCTGCGGCCGAGGGCGGAGATTT
ATGACTTTCTCTGCTTGGTTGGAGAAGAAGAATCTTTACTATTCAGCTTCTTTTCTTTTTGGCCAGAACTCTGAAAAAAAAAAAAACTCTTTTT
AAGACAATATTTGTATTCTCACAGGCTCAGCTGTCAATCACTTGAGACCTTCCCTGTAAAGTGGGGCAGATTTTAAATATGGGTGTAGATACTG
CTTGCAGCCTTCGCAGGAATTTTGGTTGTGGTTCATTGATTCACACAGACTCTGTGTCAGCTGACAGGGCTGTGTGGGGCATCAAAGGAGGACC
AGGCACTGTGGAGAAGACCCATTCACTGGCATCTCACCCTTCCTTGTCCAGCTCCATACCCAGTCCTAAGACCCAGTGAAAAGCCACGTCCAAA
CTGTGCTCTGGGCTCATCAGTGCCCACCCACGTACCAGGGAAAGGCACACACCCTACCCAGTGGGCACAGAGCGGAATGTCCCCCTACCGCACC
ATTTGCGCCCCCAATCTGGCTGTCCAACCTAGTTTGTAAGTAATCTAAATCAGTGACTATAGCCCCGCCTAAGGGACACTTCCCGGAGGAGGGA
GCCGCTGAAAAGGAGTTAGTTTGAGGGTCAGTACACAACAGGGGCAGAAAGCCAAGCAGATGTGGGGGCAGGGAGAGTCATCATCTGCTTTTGT
CTGAGAGAAGGAGAGCTTCTCCGTTTGTTCAACTTTGTAACAAGCTGGGTTACATGCTCCACGCAGCTAGAGAAGCCTAGGTGCTCTGCATTCC
CTGGGGAACTGCAGGAAAGCCTTACCTGCTGACTGTTGCTCTGGGGAAAAGCCTGAGGGTCCAGAGCAGCTACAAGCTACAGGCCATACCTTAC
AACCTGAAAAGCTAAGGACCACGGTGACCTTCCCGGCTACTGTGTGAAGGTGCTGGGTGGGGCCTGCTCAACAGACAGGGTCGACAGAGTGTGT
GATACATGCAAACAGAATCCTTGGAGTGTGTGATACATGCAAACAGAATCCTGGGCCCCTGCTTCTCCCCCTCAGTCAAAGCAGGAGTGTCCCT
TCCGAAGCCAGGACAACCTGTTCACAAGGCCCCTTGTCACATGTCACCTTCCACCTGCCTCAAGGAGTGCTAGTGTCCAAATATTTATTTTTGT
ATTCTCTTAAGAAGTATTGATTTCATCCTTTATTAAAAAAAGTTGCTCTTTCACAAAGTAATGTTTGTTTCTTTTTTTTAAAAAATCACTTTTG
AATATAGTTTTCATTAGATTCCAGGATTTTTTTTTCTTTTTAAATTTTGATGTTAAAAAACGAGACCAGAGGTCTGGAGAGATGGCTCAGTGGT
TAAGAGCACTGACTGCTCTTCCAGAGGTCCTGAGTTTAATTCCCAGCAACCACATGGTGGCTCACAACCATCTGTAATGGGATCTGATGCCCTC
TTCTGGGATGTCTGAAGACAGCGACGGTGTACTTATCTACATAAAGTAAATTTATTTTTAAAAAGTCTTTAAAAAAAATGAGACCAGATCTGAC
TCTGCAGCCCAGGCTTTGAACTCATTGCAATCTTCCTGCCTCAGCCTCCTTAGCAAGGGGAGGAGAGGTGTGAGTCACTGTGAATCCTTAAAGG
AATCTTTAAAATAAATCTTTAATTTACTTTTAAGAAATAATGGATTGAGATTTTCAAGGATTTAGGGATTTTTTTTTCTTCTCTTAAGACAATA
GCAGAAAGCTCTGGAGAATAACAGACACAGGAGAGCACAGAGGGCGGGCAATCCACGCTGTTCTACCAGATGTAGATTAGGGTTTCAGTGAGCC
CAGGCCTCGTGCAGCATGGGAGGGCATGGAGGAAGGAGACTATGCTGACAGCACCCTTCTGGAAGCTTCTAGAAGCATTAGTGGGACGGTCACC
AGTCATAGCGCTGAGGTGTGATCTTCCATTCGTGCACACATACTTATGCCAGACACCGGCTCAGAATGACCCTCACTGGTGCTATAACCAGCCC
AGGGGCCATTTCAGTAGCAACTGGGAACAAAGGCCCTCCCCACCCCCACACCGCAGGTGGGCACAGACTGCTAGTTCTGCTGTCTCTGAGGCAG
TGTGCACTGTCTCTGCTCTCATGGGATCTCAGAGACAGGGCCAGTTAGTCCCAGCTTACCCATGTGGAAAGTGCGGGAGAGGGCCATGTTTGGC
TTGAGTGAGGCCTCCCTTGTTCCGGGAGTGCAGTTAGAGCTTCTGCAAGATCCTTGGCCCAGAGGACAGCTGACTGCAGAGCAAAGTAAAGCAG
CCATTTCTGCAGGGAGTCCCGTTGGCTTCAGAGGGCTCCAACGGGGGTCTTGTGTATAAACAGCTCCTCTCTGGATGTGCAAAGTGAATCCAGT
CCTGTTTGTGTCTCTCAGAGTTCAACCTCTGGGCCAAGAGTGGATGCTGTCTCCCTGAAGTGCGGGAGGGAATTTGGCATCTCTGAAGGCTGGG
GCCTCCTGGGACAGGACTTGGGTCCTCAAAGGAATGTGACTTTCTCTGGGTGGAGACTGTTTGGTCCTGAAGGAAAGGCCAGCTACCTAACCAC
CACTCTTGGGATCATATAAAACCCTTATTAGGTTAGTGTGTGTTAACATGACTCTGAGTGGCTACTTAGTTCCCTAATGTCTGCAAGGTCCACC
TGAGCAGAACAAACTTTCTGCTTCCCTTCATACCAGTCACAGAAGACAAGGACCCTAGAGACATCGAGGGAAGAGCAGGGTGGGGTGAGGCAAG
TGCCCTGGGGTGCCTGCTGTGTGAGGTATTGGCTGGGCCGGTGAAAGACAAGGGTTGATTGTGTGGCCAGAGGACAGGCTAGGGTTCCACTCAT
CATGCTTCTGTCTCCCATTTCCCTCACCATCGAGAGGGATTTGATACCACACACAAAGAGGCTTAACAGGCCCGAAGAGCACAGAGCAGAGCCT
GCCGCTCAGAAAATACCCAAAATAACCGTATTTCTGTTTACCACTCATCTGTAATTAAGCCAGGAGTGATTAGAGAGCTGAACTATAAATATTA
AATAGTCCTTGCTGACACGCTACAACGCCAATGGTTAAGTAAGTGTGTGTGTGTGTGTGTGTGTGTGTGTGTGTCAATCAACTATGTCAATAAT
GTAATTGTTAATAGGGTGTGGTGGTGCACTCCTGTAAGCCAAGCATTCCAGAAGCTGAGGCAGGAGGATGGTGAGTTCCAGACCATGCTGGGCT
ACACAGTGAAACACTGTCTCAAGAAACCAAGCTGCAACAATAGTGGAATTAGCACTCAATTGTTTGGAGTGATAAAGAAACGTATGACTGTGCA
GAGTTATATGTTTTCCCTTTATTTATGGACACCGATTTAATTGAATATGATATTAATGTGGTCATTTCTGAGCCTTCCATTGTAAACAGTAATG
AATTTATTAAACTTCTCTCATTAGGTTCCTTACACAGAGTCTGTGCTAGCCTAGTGGAAGGGCTGCCTTGCTGACTCCCCGATCCTGGCTTCCC
TTCCGGACCAGAGCCTGGAGTTCTGTAGCTTTCTCTTTTACTATTATTATTTTGTTTGTTTGTTTCTGAGAAAGAATCTTAATCTATATTCCAG
GCTGACCTCAAACTTGGTTTTGATGCTCACGGCAGGTGGTGGGACAGGCCAGTGAGGCGTTGCCTGTGATCCACCCACCGGGAGCCCTGTGATG
GGAAGAAGGGATCAGTGGTTGGCTCAGGGCTTGGGAGAGACTTGAGATCCCCTCATGAAGGTGATCCCATGTTGCTTTAGGCAGTCCTACGGAC
TCGCACATCCTGCAGGAGGAGTCGCTGTGAGCATCCCTTAGAGGACATCAAAATAGTGTGCTTTTGGTTTAGCCTTTCCTATGCGGTGGGAGGG
GAAGGGGCGGGAGAGGGAAGGAAGGGCAGAATCTGGGCTCTAGGATCCCTTGTGGTGAGGTTTGGGGAAGGGAATAGGCTTTCGTGGATGCTGC
CCGGTGAGCAGGGTCCTCCTGTCCTGCCCCCCCATCCCGTTAGCATGTGCAAGTGGAGGACTGAGCTCTGAGTGACCCTGGCTTGGAGCTGTGT
TGCAGATTGGGACTGAACTCAATATATGTTGGCATTATGGGTCATACCTTTGTGCTGAGGGCTATCCCTACTATCCCCTACTTTGTGCTGAGGG
CTATCCCTACTATCCCCTACTTTGCTTTTGTCTGAAGTATATAGAAAAAAAACTTAAAAAATTGCCCAACCCCAAAAGGGGACATGGGAGGTAT
CCCCTTAGCAGGTCCTTAGCCAGCTTTGGGGGAGAAAAACCAGTGTCTCAGCCACCCTGGATCCCCTTTTCCTTCCTGTCCGTGGCTTCTGCAA
GGGTCTCTCAGCCTCTAGTGCCATGAGCGGGGCATTGGTCAATGCAGGGTAGAGATCCCGAGGCCAGAATAAAGTGACTCTTGCCAAGGCCTCT
GAGAACAAGTCAAACATCTGATGATGGGAGAGTCTTCTTGATTATCCATGCAAGCCAGTGTCACAGGGTTGAGTCAGAACTATGAAGAAGGGAC
ACGTGGGTCAGAGCCAGAGAAGACACGTGACACGGCAGGACAGGATTTAGTTGGGCTGAGATGACTCTTGAAGCTGAGGACTGGCAGGGAAACA
CAGGAGGTTCTAGAAGGAACCACCACCCCAATCTGTAGTCCTGACCTTGGGGACTGTCAGGGAACGGGTGTGTGCTGTTTTTAAGTCACTGCTA
CAGCACTGTCCACAGCCATAGGACAGTGACACAGAATGTTGACCTTCAGAGGAGAAACCCAGGACTCCCGGGATGGGAGTTAGGGATCCTGGGT
TGGATGGCGGGTCACATCATCCCCTTTTCTCCGGACTCAACTTCCTCCCAGCTGTCTCTCTTTCATCAGCATCCTGTCCTTCTCACATGGGAGC
CACACTGCCCCCCAGTACTTGGGGACACTGGGGTGGAAACCCCAAGGTTGAAAATAGCCCTGTATTATTCTTGGTTAAGTTTCTGCTCTTTCCC
CGAGGCAGCCGGCTGAGAAAGCCACTTCCTTCTGCCAGCCTGCCGTCCATACTGGCATCTGTCTTCTGTCCTGCTGGGCTTTCAGCCACCTGGG
GCTGGCCCAGAGGTGGGCTTCTGTGGAAAGATTTTCCCTGTGTTCCTGCCCTGACTTGTGGCAGAAGTTTTGGNNNNNNNNNNNNNNNNNNNNN
NNNNNNNNNNNNNNNNNNNNNNNNNNNNNNNNNNNNNNNNNNNNNNNNNNNNNNNNNNNNNNNNNNNNNNNNNNNNNNNNNNNNNNNNNCAAGC
TTGACCTTAAAGGACCGGTTGCCACTGAGAGATGTAAATGACGCCATAGGACACAGATCGCCTTAGGTGTGGGAGGAGAATGACACTTTTAAAG
AGGGGCTTCCCGAAGGCAAAGCTTCAGATGATGGCTTGTCTCGCTCACCACAGAGCAGGCCAGAGATGTTTGTCCAGTGAAATGGATGTGGATG
TGTAAGCGAGGAGCCGCTGGGTCTGATGGGACTTGAAGGTTCTAGAACATATGGTCACCCTCTCTGCTAAGTGTGACCCATGTGCTGATCCCTT
GAAATCATTCTCCAGGTGGATTACAGTGCCTCGAGTGTCTTCTGGACTAGAAGACAACCCGGTGGGGACAGCGATCCATTCCAGCATGCTGGAT
TCTACCCACGATCCTGAGTGGCCCCAGTGATATCCAGGGCAGGTCCCCTCACCCATGAGTTGCATGCCTCAGCCACGTCCAGGGGCAGGTCACC
TCAGTCATGATCAGGAAGACTCTGTGACAGGTGGTGGAACCCCCATCCCATCTCCCTCCACTTCAAGAACATCACTCTCACTATTCAGATAGAG
AAATTAAGACCCAGAGGTGAGCTATAAATGGCAGAGCCGCTTGTAGTGGTCATGAGGTGGCCCAGTGCTTAGTGGAAGATGGGAGGTCAGCAGC
CTGACAGGTTCCTTACCACAGAACCCTAACTGTGTCAGGCACTCTGTCTCCCTCTGTGTGTTTCAGGGGAGGGTCCCATTCTCACCCAGCTATG
GGCCTTGACATCTCTGAGGCAATGGTTCTTCCAGAAGGGTCTGTGACTGGATAACATCCAGGGAATACAAGGGAAGGCTCCACTGGGCTTCTGG
GAGGTTCTTCCAGCCCTTCTTAGCCAATGAACAGGTACGAGGACTCTCCAGCCTTGAGTCTCCATCTTTACTGCATCACACGGGAAACTCCTTC
TTCTTACCTTGCTTGGCCTCCTGTGATGTGGGACTCTCCTATATGTCATGGATAGGAGCAAAGGGTGAGGCATATGAAGCAAGGTGAGTCCGAG
AGACCACCTAGCCGGGAGAGGTTGGGTGTCACCCAGCTCTCTTGCAGGTCTGTTTCAGACACTGATACAGAACCTAGTGTTCTGGAGCAGAACT
AGACCAACCTCACACCTCGAGCATTCCTGGATGGGTGCTGGGTGGACTTCCTGGAATGCTTAGTTCATATCAGAAAAGAGTGGGGATTTTTTTT
TTGGCCGCTGTGTTGTCTTGTCCACGAGACCCTTATCATGGGCTGCTTTGCCATCCTGGTTCACCTCCTTTAGCCGCTCAATAATGTCCTGAGA
TGGTTGTCTCTGTTGACACCAAGGAAGCAGAGGAACAGCAGGGTCATAACGACTTGCTCAGGGCTGATTGGTGGTGTTGTCTGAAGCCAGTCTC
CTTATCCACCATTGCTGTCCTCACAGAGGTTCACTGCAGAGCCCACGAAGGTTACAACCTGAGGGTTACAACAAACATTGGACTCCTTGTTGCT
TGGAGGAGATGACCTTGTTACAAAGTTGCTTGCTGGAGTGACAGTTGACAGCTAAGTCTCCGCCTCTGTGTTTTTCTGGAAATTAGAGGCTAAA
GTCCAGGACCACATATCGTGAATAGAATCTCCCACCACTCAACTCAAGCCATGATGGACCCAGCCCGGGGTGGCCTCTGCTCCTGACACGGATA
ACCCCTGCAGGGAACTAACCAACCTTAGCACACTTTTGTTAATGAAATCCCACACTTTTCTGGTATTTATTAAATGTCTCCTCTCCCTTTTACC
TATCTTGGGACCCATCATGATCCCATATCCTAGGGTAGTCACATCTCTTTGACTGTGACTCCTTCAGACTGCCTGGCTTGCATAGCCTTGACTA
TTTTGAGGTGTCCTACAGAGGCTCCCCCCAGCTGGGACTCTGTAGTCTTTTCCTCCTGTTTAACGGAGGATACTGAGACCAGACATGGAGATGC
ATGCCTTTAATCACAGCATTCAGGAGGCAGAGGCAGGCAAGTCTCTCAGAGTTAGAGGCCAGCCTGGTCTACATAATGACTTTGAGGACAGCCA
GGGCTACACAGTGAGACCCTGTCTCAAAATAAATAAATTAAAAATAAAATAAAATAAAACCACAAGCTGCTGGGATGTCAGGCACACTACACAG
GTGGATTTTTTATGGGTGCTGGTCTTGGTCTCCCAGGAAATTGTTCCCCCTGTTCACAGAGGATTCTCCAAGTCCAAAGGCCAATAACAATGGG
ACAGTTCAGGGCTCAGGAACATGTGCTCTGCCAGGGGATACAGGCTGAGACATCTTTGTGACCCCCACGGGTCCCCCCCAGTTCCTGGGGTCTC
CAGCAGTTCCTACATACTTTACTTTTATTTTCTATTTTTTAAGAATGCTCTTCAGAAAGTCAACCTGAACAGTTTTCCCAAAGGTCCAGAGATG
ACACGCCTGCGACACTCTGGATCCCCAGCCTGGTTTCTCTCTGAGCAGCTTCTCCTTCCTGCCACCTCAGCCACGACAGCTTCCTTTCGCTTTT
CTCAGGATCCACACACCCTTCCAGTGATCTCAGAGCCAGTGCACCCACCACTTCCTCTGCCTGGAATCTGCTTCCTTCCCTCGTAAGCTGGTTG
ACAGCTTCCTCCTTCAGACTCCTCTGCCAACCTCCAGAATAAAATAAACAACTCCCTTTGCACTGTGGGAGCTCAGTACAAAGGGAGGCTCCTC
TATAGTACACTCAAGGAAGGCAAGACTCCTTCCATTTGTGTTCCCTGGTGTATCTTCAGGCCTGCAGCCCAGAGCCAGGTGGATGATAAAGGGT
CTAGTACTCTTGTGACTCCATCCATCCACCGATCAATCCACCTGTCACTTGCTCTTGAATTCACTTAGCACTTATCCACCCAAACATCTATCTA
TTCATCCACCCATTCATTTATCCACTTGATAATGCATCTATTCATCCACTCAAATATCCACNNNNNNNNNNNNNNNNNNNNNNNNNNNNNNNNN
NNNNNNNNNNNNNNNNNNNNNNNNNNNNNNNNNNNNNNNNNNNNNNNNNNNNNNNNNNNNNNNNNNNNNNNNNNNNNNNNNNNNNNNNNNNNNN
NNNNNNNNNNNNNNNNNNNNNNNNNNNNNNNNNNNNNNNNNNNNNNNNNNNNNNNNNNNNNNNNNNNNNNNNNNNNNNNNNNNNNNNNNNNNNN
NNNNNNNNNNNNNNNNNNNNNNNNNNNNNNNNNNNNNNNNNNNNNNNNNNNNNNNNNNNNNNNNNNNNNNNNNNNNNNNNNNNNNNNNNNNNNN
NNNNNNNNNNNNNNNNNNNNNNNNNNNNNNNNNNNNNNNNNNNNNNNNNNNNNNNNNNNNNNNNNNNNNNNNNNNNNNNNNNNNNNNNNNNNNN
NNNNNNNNNNNNNNNNNNNNNNNNNNNNNNNNNNNNNNNNNNNNNNNNNNNNNNNNNNNNNNNNNNNNNNNNNNNNNNNNNNNNNNNNNNNNNN
NNNNNNNNNNNNNNNNNNNNNNNNNNNNNNNNNNNNNNNNNNNNNNNNNNNNNNNNNNNNNNNNNNNNNNNNNNNNNNNNNNNNNNNNNNNNNN
NNNNNNNNNNNNNNNNNNNNNNNNNNNNNNNNNNNNNNNNNNNNNNNNNNNNNNNNNNNNNNNNNNNNNNNNNNNNNNNNNNNNNNNNNNNNNN
NNNNNNNNNNNNNNNNNNNNNNNNNNNNNNNNNNNNNNNNNNNNNNNNNNNNNNNNNNNNNNNNNNNNNNNNNNNNNNNNNNNNNNNNNNNNNN
NNNNNNNNNNNNNNNNNNNNNNNNNNNNNNNNNNNNNNNNNNNNNNNNNNNNNNNNNNNNNNNNNNNNNNNNNNNNNNNNNNNNNNNNNNNNNN
NNNNNNNNNNNNNNNNNNNNNNNNNNNNNNNNNNNNNNNNNNNNNNNNNNNNNNNNNNNNNNNNNNNNNNNNNNNNNNNNNNNNNNNNNNNNNN
NNNNNNNNNNNNNNNNNNNNNNNNNNNNNNNNNNNNNNNNNNNNNNNNNNNNNNTGTAAGGTGGGGGGGAATGCTGGCCTGCAGTGTAAGGTAG
GGGGGAGTGCTGGCCTGCAGTGTGAGGTGGGGGGAGTGCTGGCCTGCAGTGTAAGGTGTGTGTGGGAGAGAGTGCTAGCCTGCAGTGTAAGGTG
TGTGTGGGGGAGAGTGCTGGCCTGCAGTATAAGAGGGGGGAGTGTTGGCTGGCCTGCAGTGTCAGGTGTGGGGGAGTGCTGGCCTGCAGTGTAA
GGTGGGGGGGGAATGCTGGCCTGCAGTGTAAGGTGGGGGGGAATGCTGGCCTGCAGTGTAAGGTAGGGGGGAGTGCTGGCCTACAGTGTGAGGT
GTGTGTGTGTGTGTGTTGCTTTCAGTGTAAGGTGGGGGTGGTGCTGGCCTGCAGTGTGGTGTGGGGGTAGTGCTGGCCTGCAATGTGAGGTGGG
GGTAGTGCTGGTCTGCAGTGTGAGGTGTGTGGGGGTGCTAGTCTGCAGTGTGAGATGGGGTGGGGTTTGCTGGTCTGCAGTGTGAGGTGTGTGT
GTATGTGGAGGGGGAGTTCCTGGCCTTCAGTGTGAGGTGTGTGTGTGGGGTGCTGGCCTGCAGTGGAAGGGAGTGGGAATGGGGCTTGGACACT
ACAGGATGCCCAAGGGAGAAGATGCCTTTTGAACAGGATGATTGTGGTGCGATGAAATACAGGCAGAGAGCAGGGATGATGTCCAGTCGTGAAA
TGGCTCTGCGGGAGCCCCAGAGATGGCTGAGAGTGGCCAAATGTCCCAGGATGTGACTGCTGTGAGTGCTGCACTGGTTATAGGGGGCTTTAGG
CTCAGGAGGCCAGAGCCATGGCTGTGACCACTGCCAGGTGTCATGTGGGCGGGGCTGGGATGGAGGGAGAATGGTTTCTGTTGCTCTAGCTGTG
GGAGGGAGCTCTGTGCCCCATGCTCTACCTTCCTCCTCTGTAAAGCCAGGATATCCTGGGACTCCTGTTTCTCAGATCCACGTGAAGGAGAAGG
GAGAGTGCCCACGTGCTGGTCCCCAGTGTGATTTCCCCACATTGATGACCCTTGTCCAGGCAGCTAGGTGGATGCAAGTGACCAGAGAAAGCCA
TAGGTCAAAGGAACAGGGCATCCAGCTGGCATGGGGGGGGGGTACTGTGAACCCCACAGAATCAGCTCTGCCTGGGGAGCTCCCAGGTTCAGAG
TCAACCCCCGTTAGCATCCTGGTGTATGCTGTGGGTTTGGCCAGGTGAAGTCCTTGTCTCTTCTGGGCTTTCTTGTAGATCATCGGTTCCAGAG
TGAACTTGGATGCTCTCTCATGACCATGTCTGCTCCCACCACAGAGCCACTGATCTGGGCTGACAAGATCCAAACCTGCTATCTTCAGTAGCAG
TGTGAGGCAAGGGACTTGCAACTGCTCAGGAACAGACTGTTCAGTTCTGGGGCCCCAGCACCTCATAGCTGGTGTCTCATCCCAACCTCGCCTG
CCTCTTGCCTGGTTACTGCATCTCTGCTAAAGTCGGCTGCAGAGATGGAAGCCTGTGCCATTAGGTTCATGACAAGCTGCTGTCATGTCCTGTG
GGGGCTCATTGCCATGGGTGCAGAAGGCAGTTTTCCCTCCAGACATTTGGCTGTGAATCTGGTCTGCTATAGCAGCTCCTAGCTCATCTCCTCT
GCTTGG
MOUSE SEQUENCE - mRNA
CCGGAGGCGCGGGCAGCGTGGGAACCGGCGGCAGGATGTGTGACCGGAACGGCGGGCGGCGGCTGCGGCAGTGGCTGATCGAACAGATCGACAG
CAGCATGTACCCGGGGCTGATCTGGGAAAATGATGAGAAGACCATGTTCCGTATCCCCTGGAAGCATGCCGGCAAGCAGGATTACAATCAGGAG
GTGGATGCTTCCATCTTCAAGGCCTGGGCAGTTTTTAAAGGGAAGTTTAAAGAGGGAGACAAAGCTGAACCAGCCACGTGGAAGACGAGGTTAC
GCTCTGCTCTGAACAAGAGCCCAGATTTTGAAGAAGTGACTGACCGGTCCCAGCTGGACATTTCTGAGCCATATAAAGTTTACCGAATTGTCCC
CGAGGAAGAACAAAAATGCAAGCTGGGCGTGGCACCTGCAGGCTGCATGAGCGAAGTTCCTGAGATGGAGTGTGGCCGCTCAGAGATTGAGGAG
CTGATCAAGGAACCTTCTGTGGATGAGTACATGGGTATGACCAAGAGGAGCCCATCCCCACCAGAGGCCTGCAGGAGCCAGATCCTCCCTGACT
GGTGGGTCCAGCAGCCCAGTGCAGGCCTGCCACTGGTGACCGGATATGCCGCCTATGACACACACCATTCAGCTTTCTCCCAGATGGTCATCAG
CTTCTACTACGGGGGCAAGCTGGTGGGCCAGGCCACCACCACCTGCCTTGAAGGCTGCCGTCTCTCCCTGAGCCAGCCGGGGCTGCCTAAGTTG
TATGGGCCGGATGGCCTGGAACCCGTGTGCTTTCCGACGGCCGACACCATCCCCAGTGAGCGGCAGAGGCAGGTGACCCGGAAGCTGTTTGGGC
ACCTGGAACGTGGCGTGCTACTGCACAGCAACCGCAAGGGCGTGTTCGTGAAGCGGCTGTGCCAGGGCCGCGTGTTCTGCAGCGGCAACGCGGT
GGTGTGCAAGGGCAGGCCCAACAAGCTGGAGCGGGACGAGGTGGTGCAGGTCTTTGACACCAACCAGTTCATCCGAGAGCTGCAGCAATTCTAC
GCCACCCAGAGCCGCCTACCTGACAGCAGGGTGGTCCTGTGCTTCGGGGAGGAGTTTCCGGACACTGTGCCCTTGCGCTCCAAACTCATTCTGG
TGCAGGTAGAGCAGCTGTATGCCAGGCAGCTGGTGGAGGAAGCGGGCAAGAGCTGCGGTGCTGGCTCCCTGATGCCAGCCCTGGAGGAGCCCCA
GCCGGACCAGGCTTTCCGCATGTTTCCGGATATCTGTACCTCACACCAGAGACCCTTTTTTAGAGAAAATCAACAGATCACCGTCTAAGCCTCA
GTCCGGGCACCCCACCTCGCCTGAGCTCAAGCTTCAAGAGTCTGTGACTAAGAGAATTCCGAAAGGATGTGGAGCCCTCTGACTGGGGTGGGCG
GGTGTCCTCCAAGGGGCCTCCGGAAGCCCACAGAGGGATGCGCTCCTGCTCAGGCAGGTGTCAGAAGCTTGCAGGGGCTGTGGCCGCAACCTGT
GATTAAAGCATTCCTTTCCTGCGTTTCCCCCTTCACCACTAATGGCTGGCCTTTCTGTGTGCTGAGGTCTTTCGACAGTTCAAATCATCTGGTG
GCAGCAGACTCGCCTTTGCCCTTCTGCGGCCGAGGGCGGAGATTTATGACTTTCTCTGCTTGGTTGGAGAAGAAGAATCTTTACTATTCAGCTT
CTTTTCTTTTTGGCCAGAACTCTGAAAAAAAAAAAAACTCTTTTTAAGACAATATTTGTATTCTCACAGGCTCAGCTGTCAATCACTTGAGACC
TTCCCTGTAAAGTGGGGCAGATTTTAAATATGGGTGTAGATACTGCTTGCAGCCTTCGCAGGAATTTTGGTTGTGGTTCATTGATTCACACAGA
CTCTGTGTCAGCTGACAGGGCTGTGTGGGGCATCAAAGGAGGACCAGGCACTGTGGAGAAGACCCATTCACTGGCATCTCACCCTTCCTTGTCC
AGCTCCATACCCAGTCCTAAGACCCAGTGAAAAGCCACGTCCAAACTGTGCTCTGGGCTCATCAGTGCCCACCCACGTACCAGGGAAAGGCACA
CACCCTACCCAGTGGGCACAGAGCGGAATGTCCCCCTACCGCACCATTTGCGCCCCCAATCTGGCTGTCCAACCTAGTTTGTAAGTAATCTAAA
TCAGTGACTATAGCCCCGCCTAAGGGACACTTCCCGGAGGAGGGAGCCGCTGAAATGGAGTTAGTTTGAGGGTCAGTACACAACAGGGGCAGAA
AGCCAAGCAGATGTGGGGGCAGGGAGAGTCATCATCTGCTTTTGTCTGAGAGAAGGAGAGCTTCTCCGTTTGTTCAACTTTGTAACAAGCTGGG
TTACATGCTCCACGCAGCTAGAGAAGCCTAGGTGCTCTGCATTCCCTGGGGAACTGCAGGAAAGCCTTACCTGCTGACTGTTGCTCTGGGGAAA
AGCCTGAGGGTCCAGAGCAGCTACAAGCTACAGGCCATACCTTACAACCTGAAAAGCTAAGGACCACGGTGACCTTCCCGGCTACTGTGTGAAG
GTGCTGGGTGGGGCCTGCTCAACAGACAGGGTCGACAGAGTGTGTGATACATGCAAACAGAATCCTTGGAGTGTGTGATACATGCAAACAGAAT
CCTGGGCCCCTGCTTCTCCCCCTCAGTCAAAGCAGGAGTGTCCCTTCCGAAGCCAGGACAACCTGTTCACAAGGCCCCTTGTCACATGTCACCT
TCCACCTGCCTCAAGGAGTGCTAGTGTCCAAATATTTATTTTTGTATTCTCTTAAGAAGTATTGATTTCATCCTTTATTAAAAAAAGTTGCTCT
TTCACAAAAAAAAAAAAAAAAAAAAAAAAAAAAAAAAAAAAAAAAAAAAAAAAAAAAA
MOUSE SEQUENCE - CODING
ATGTGTGACCGGAACGGCGGGCGGCGGCTGCGGCAGTGGCTGATCGAACAGATCGACAGCAGCATGTACCCGGGGCTGATCTGGGAAAATGATG
AGAAGACCATGTTCCGTATCCCCTGGAAGCATGCCGGCAAGCAGGATTACAATCAGGAGGTGGATGCTTCCATCTTCAAGGCCTGGGCAGTTTT
TAAAGGGAAGTTTAAAGAGGGAGACAAAGCTGAACCAGCCACGTGGAAGACGAGGTTACGCTGTGCTCTGAACAAGAGCCCAGATTTTGAAGAA
GTGACTGACCGGTCCCAGCTGGACATTTCTGAGCCATATAAAGTTTACCGAATTGTCCCCGAGGAAGAACAAAAATGCAAGCTGGGCGTGGCAC
CTGCAGGCTGCATGAGCGAAGTTCCTGAGATGGAGTGTGGCCGCTCAGAGATTGAGGAGCTGATCAAGGAACCTTCTGTGGATGAGTACATGGG
TATGACCAAGAGGAGCCCATCCCCACCAGAGGCCTGCAGGAGCCAGATCCTCCCTGACTGGTGGGTCCAGCAGCCCAGTGCAGGCCTGCCACTG
GTGACCGGATATGCCGCCTATGACACACACCATTCAGCTTTCTCCCAGATGGTCATCAGCTTCTACTACGGGGGCAAGCTGGTGGGCCAGGCCA
CCACCACCTGCCTTGAAGGCTGCCGTCTCTCCCTGAGCCAGCCGGGGCTGCCTAAGTTGTATGGGCCGGATGGCCTGGAACCCGTGTGCTTTCC
GACGGCCGACACCATCCCCAGTGAGCGGCAGAGGCAGGTGACCCGGAAGCTGTTTGGGCACCTGGAACGTGGCGTGCTACTGCACAGCAACCGC
AAGGGCGTGTTCGTGAAGCGGCTGTGCCAGGGCCGCGTGTTCTGCAGCGGCAACGCGGTGGTGTGCAAGGGCAGGCCCAACAAGCTGGAGCGGG
ACGAGGTGGTGCAGGTCTTTGACACCAACCAGTTCATCCGAGAGCTGCAGCAATTCTACGCCACCCAGAGCCGCCTACCTGACAGCAGGGTGGT
CCTGTGCTTCGGGGAGGAGTTTCCGGACACTGTGCCCTTGCGCTCCAAACTCATTCTGGTGCAGGTAGAGCAGCTGTATGCCAGGCAGCTGGTG
GAGGAAGCGGGCAAGAGCTGCGGTGCTGGCTCCCTGATGCCAGCCCTGGAGGAGCCCCAGCCGGACCAGGCTTTCCGCATGTTTCCGGATATCT
GTACCTCACACCAGAGACCCTTTTTTAGAGAAAATCAACAGATCACCGTCTAA
HUMAN SEQUENCE - GENOMIC
CACGAGGTGTGAATTAGACACCCCTGCTCTGGACTGCGCCTCCACTCCCTGAGCAAAGCAATGCAGAGCAGTGGAAAGAGTCTTGGGTTTGAAG
GCAAGAGGCTCCAGCCCCCCGAGCCTCAGTTTCCCCATCTGTCAAGTGAGGATAACCACGCCTGCCCTGCTCTACTGGGCAGGGCAAAGGAGAT
GATTTAAGAGCAAGTATTTTGTAAAAGAGAAAGCAAGCTGCAACTTTAAGTTGCTACTCCTAGTGCCCCTCAAAGCTGCCTAGCAAATTGATTC
TTCTCCGTAGTTTCCTGCATTGAGTTCTAGAACTCAGTGCTGGGAGTCAAAGGGTCCCTGTTGACTCCTGGGCCTGGGGAACCCACTCTGCCTC
GGAACCCTTCCTTGCATCCTTCCTTTGTAGGCAATCATTTGGTGCATCCCAGCCAACCATGCACTTACAGAGAAAGAAACAGCCAAAAGAAATA
GAGAGAAGGGAATTACGACCTGGGGTGCATTTGACTGCTTCAGTTCCGAAAATACTTACTAAAGACCTATTAGGTGGCAATGAAGTTGACCTCA
AATCACAGAACCTTAAAATTGGAAGGGACTTGGAGATTATGGATTAAGTAGTACACGCTCCTGAAATCACACAGCAACACTGCAATCACCTCTA
ACAGGCGGTCTAGCATGTGTTCCCTTCATGCTTCCAGGGACAGGTGGCTCCCACGTCACCAGGCACCTCATTCCACTTGTAGAAAGATTGTTAA
AGCACAGCCCATTATTAAGTGGACTGAGGTAAGCATGGGGGCAAATTCTGCCCACTGACACACAACTACCATATGCCACCAAAGTCCGAAATGA
AGCCTGCTTACAAATGAAGACAATTACAAAATCATCCGTCTTGTCTCTAAGTGCCAGGGTAAAAATGGACTTCTAGGATTGCATTTAAAAATAT
CTCTAACCACGCTCAAAGTTTGTGATTCTCCTTAGAGGTAAATTATTGTTGTTGTATTGATATTTTATTGTGCTTCTGCCATTTGTTTCTCACA
GATGCACCTGCTGCACATCTGCAAAGGTAAGCTGGAGATGAACATGGGTGAGCGTTCTGGATTATTTGGCACTGCTTGCTAAGCACATAGATTC
ATGATGCACTGAGTCAGAATCCCTGGAGGCTCCTCCTGGGAACCTACATCTTGATAAGTGTCCCACTGTTGCTTATTTATGCTAAAATTTAAAA
ACACTCATCTATATAATATACAATAATATATATTTTGTAATTGTTGACTTTGTAATTGTCTTCATTTGTAAGCAGGCTTGGAGTCCCATAGGTG
AACCCACCTCCCAGGTTTCAGCAATTCTCATGCCTCAACCTCCTGAGCAGCTGGGATTACAGGTGCCTACCACCAAGCCCAGCTAATTTTTGTA
TTTTTAGTAGAGACAGGGTTTCACCATGTTGGCCAGGCTGGTCTCGAACTCCTGACCTCAAGTGATCCACTGCCTCAGCCTCCCAAAGTGCTGG
GATTACAGGCGTGAGTCACCATGCCTGGCCCAGAATTTATATTTTTCACAAACCAGTATTTCCTGGCAATAGCCCTAAATGTTCAGGATATTTT
TGATCTATGCTTAAGAAACCTTTTACTCTTAAGTTTTTTTTTCCTCCCCTGGGACTGTTTCAAGTTCTTCCGTTAGTAATAAATGTGAATAAAA
ATTTATACCTGAAAGGCAAAACGTTATTGAATGCTTAATGAAATTTTTTCCTTTACATTAAATGTTTACATACTTTGCCACTCCTCGGAGGAGG
GTTATGAATTAAATACCTAATACATTACAGCTGCTTAATAAACAGCCAATAAATGAACGCCAATGCATTTAAAAGTAATGAGTTTTAGGATATA
AAAAATAGAAATCTCAGGTTTTTATTTGTAATCCTTCTAGAGTAAAGAAACAGATTGCGGCAATATTAGCAATTCGTAAATCACCATCCAAACC
CACCATGAACAGATAGAGCAAACTGACTCAGTGAAAGAGAAATGACTGGAAGCAAAATGGGGTCAAAGTTCATGTCTTTAGGGCAGATACATTT
TACCCAGTAATATTTCTCTTCCCAAGTCCCCTGAGTCGGTCCCAACTTACTGCCTTTTAGAGATCTCACTTTTATTGTAAGATAGCTTCTTACA
CGAAAACATTTACCACTTGTGCACGTATATATATATATATCTATACATATGCACACACATCCTTTGTATTCAACTGCCTGATAAACTGTAGTCA
TTTGTTCTGTGTTGTGGAGACTGATAAGTGAATCTTTTCCTTATCTGCCAGGGTAAACTGCCAACTTTCAAATACTCTTTGGTTTTCCCAGGTG
AGTCATGCACCTTCCAGTGTCTGTAGCCCCAGGGCTGCTCATGCATGTGACTGGGTCTTAGTTTTTTGACCTAGAGAAGGCATACCAAAGTCTG
CTTGAGCCAACATCTTTGCCAGGTGCCCTCATTGTGTTTATTTTTGTCATATAAACCTTAAGTGGATGGCAGGATTATGTTTCCACATGTGCAC
ACCTGTTTACAGACCACCCACATCAGGTAGGGCAATCCCTCTGAGGGGCCGCAGCAGATTGTGAGGGGCTTCCTGTTTTCATTCCAACCTTCCT
CTGAAACACTGGTGTGTAGTGGCAACGTTGTTCTTAAGCTTGAGCCCCCCGACCAAGTGAAGCATGAGAAAATGCAGCTTACCTTAGTCACAGG
CAGCTAAGCACAGGTAGTTAATGGCAGGTAAATTAGCCACAGGCACCTTTGGAACCAGCAGCAGGTGCGGCAGACCGGACCCTCCTCGGAACGA
GGAGCATGTGCAGAAGAGTTCGCACGGCAGGCTGGGAGTGCTGCCTCCAGGAAGGCCTGTGCTGGGGTTGAACCTTAGCTGTTGTCCGGGAACT
TGGATTTCAGGGGGGTTCCTGCCACCCTAACGGATAAAAGTGCCTCACTGTGTCCAAACTATTTGTGCAAACAGTGTGGTTTATGCTGAACACC
TGCTTTCCTTCTGGGATCTGGAGTTTTTTGGAACACGCCAGGCAGAAGGTGCCTATGTGGCCAGCACCCCCCATAAAAACCCAGGGCTCTGAGT
CTCTAGTGAGCTTCTCTGGTTGACAGCATCTCAAATGTATTGTCGCAACTTGTTGATGGAGGAATTACGTGCGTTGTCTGGGATTCCACTGGAG
AGGACTCTGGAAGCTTGGGCCTGGTTTCCTCCAGACCTCACCCCGTGTATCTTTTCCTTGTGCTGATTTCGCTCTGCATCTTTTTGCTGCAATC
AACGGTAGCTGTGAGCGCAACTATATGGCAAGTCCTGCGGGCCCTCCTCCCGCGGAATCACTGAGCCTGGGGAGTTATTGGGGCCTCAACTCAG
ACAGGTATAAAAATTAATACACCTCCTAGAGCACAGAGATGAGCAATGTTCTTCCAGCTTTCTTTCCTTTTGCCCTCCCTGAGATTTTTTTTTT
TTTTTGCAATGAGCTTATACCTTGTCTATTTAAGGCATTTTTTAATTTAGTGTTGGGATAAGTAGGGGCACTGAAATAGCATAAGATTTTCCCC
CTTACCTCAAGAATAATTCAGCAAAATAATTCATAATATAGAGCAGGTACCAAATTATGTTATAAAGATTTCAGTATAGCTGGAGTCCAGTGTT
TTTAAAATGTGGGTCAGTGAAGGCTGGAGTAGGAAGGAGGACAAGATTTAAGGTGGATCTTAAGGATGATGCGGTAGGCAGATTAATGGCCCGC
AGAGAGGTCCAAGTCACAGCCCATGAAACCTGGGATTGTGTTAGGCTACATGGCAAAGGGAAATTCATGTTGTAGATGGAATGAAGGTTGCTAA
TCAGCTGACCTTACAATAGGGAGATGATCCAGGTGGACTCAATATAATTATACGGTCCTTAAACGTGGAAAAGGGTGGTGCACCTGCAGTCCCA
GCTACTCAGGAGGCTGTGGTGGGATGATTGTTTGAGACAGGAGTTCGAGGCTGCAGTCAGGCATGATTGCAGCACTGCACTCCAGCCTGGGAGA
CAGAGCAAGCCCTTGTCTCTTAAAAAAAAGAGGGGGCAGGAGAGAAGGGCAGAGTGATGTGATGTGAGAAAGACTCACTCGCCATTCACAAAGC
CATTGTGGGCTTTGAAGATGGAAGAAAAGGCCGTGAGCCAAGGCAGGCAGCTGGAGAGAAGCTGGAAAGACAAGGAGTGGATTCTCCGCTGCAG
CCTCCAGGAGGAGCCGGCTCTGACGACACCTTCATTTTAGCCCAGTGACACCGTGTTGCACTTCTGACCCGAAGAACTATAAGATTATAAACTT
GCGGCCGGGCACGGTGGCTCTTGCCTGTAATCCCAGCACTTTGGGAGGCCGAGGCGGGTGGTTCATGAGGTCAGGAGATCGAGACCATCCTGGC
TAAAACGGTGAAACCCCGTCTCTACTAAAAAAATACAAAAAATTAGCCGGGCGTGGTGGCGGGCGCCTCTAGTCCCAGCTACTCAGGAGGCTGA
GGCAGAAGAATGGCGTGAACCCGGGAGGTGGAGCTTGCAGTGAGCCGAGATTGGGCCACTGCACTTCAGCCTGGGCAACAGAGCGAGACTCTGT
CTCAAAAAGAAAAAAGAAAAAAGAAAAAAAAAGATTGTAAACTTGTGCTGTTTTAAGCCATTAAGTTTGTGATAATTTGTGACAGCCACCATAG
GAAGTGCATTGAGATTTGTAGTATTTTGCGGGGTGAAGAGGAGGGTGAAAAGGAATGGACAAGCCTGTCAGGTCCCTGGATGGAGATTTAATGA
CGATGCCAAGACTATGGATCCTAGTGAGAATCCTGCATCCCCCATGCCCTACAGCTACCAGGGAGATGAGGCACTGGGAGAGTTAGTACTCGGC
TGGTGGTTTTGTGCCCTCTGGGCCTAGAAAGTATGTAATGCTGCCATCCCTGTATGCGCAGAAAGATGGTTAATGCAGCCCCACTCAGGGCAGT
TTGGGGGCTTACCTGAATTTCCCCACTGGGAGCCTCTCTCCTGACTTAACCTCAACAGAGGCATCTTCTTCCAAGTGCTGCTTGTAACTCAGCC
CCCAATGCCTGAAGACACACCTTCAGCCTCTCTCCTGACGTTCCCCTGCCTTTCCAGGAGGCCCTGGAGGGAAGGACCCCACACTGGCTCTCTG
CTGAGTGGCCCAGCTCTGGCCTATGGGACACGTGTGCGTTTGCCTTGCCCAGCACACGCTGGGGCTGCCACCATTCCCAGAGCAGTGCAGGCTC
TTGGCGCCACCACCCAAGTGCCCTGTCAATTTCCAGGGCAGGAGTCAGAGCCCCATCTGCAGGTGACTCTGGCTTTCTCAAGACTGAGTTGACA
CCTGTGCTCTCAGCAAACATGTTTCTGAGCACTCTTGAACTCACTTGCTAAGCTTGGCTTGGAAAGTGTGAAGGGAGAGCTGGGGTCCGCAGCT
GGAAAGACTCTCACCTCCTGCCTCTCTCCTGAACCCATTTGATGTCTCTCCTCTGGCCAAGGGGTAAATCTGCACATGTAAGTCTCATACACTT
TGGCTCTTCATGGAATTGGTCCCTGTAGAAGCCGGGCCAGAAAGAATCTAGCACCCTCTTGCACTACAATTTATTGAGCCTTTACTTTGTGTCA
GGCACCGTTCTAAGCAGTTTATATCTAAGATTGGATGGATTTCCACCACTCCTATTCCCATTTCGAGAAAGAGTACCCTTTCCCAAGACAGGAA
AAACAGCCAGGGCCATAAAGGAGGGCCTTTTGTGACATCATCAGAAGTGGAGAAGAGGTACCCAGATCCCATTAGCAAAGTGCAGCCGAAGAGT
CATGCTAAGTTCACTGTGTCCCTTGCGGCATTGCCTTCCTCAGTGCTGGCTGCCATCATACAACCCCATAGCTTGTGTGGCTTAAACAGCAGAC
ATTTATTTTCTCAGTGTTCTGGAGGCTGGAAGTCTGAGATCAGGATGCCAACATGGTCAGGTTTAGGGAGGGCTCCCTTCCTGGCTTGCAGACA
GCTGCTTTCTCACTGTGTCCTCACATGGGCAGAGAGTGAGTGAGAGCAAGCTCTCTGGTGTCCCTAGTCCCTCATCGAAACTTCATTACCCCAC
GAAGGTCCCATCTCCAAATACCATCACGTTGGGGGTTAGGGCTCAACATATGTATTTGGGGGGACATCATCTGGTCCATAGCAGGCACTGTCCG
GGTCAGAAGGCCTCCCAGGGATTTGGTCCTGAGGCTGGCTGTGGAAGGTGCCCTTGCTTCATCACCTCTGCACCTGCTCCACTGTAAGAACTGG
GGTCAGAAGGCCTCCCAGGGATTTGGTCCTGAGGCTGGCTGTGGAAGGTGCCCTTGCTTCATCACCTCTGCACCTGCTCCACTGTAAGAACTGG
GCAGACAGATTGGCAGCTTAGGCCAAGCAAGATAGATGGTACGGAGGCTCGACAGGAAGGTTTCTGGAGATCAGGAAGATAGGAATTAAGGAAG
GTGAAGAGGAAGAAAAAAGGACTCCATGAAGAGGAGAGGGTCTCTAAAAGCTGGAAACATAAGTGAGGAGGTGAGAACCAGTCTGAAGCACCCA
CCTGTGACCTGGTGGGGGCAGGAAGGTGTTAGAGGAGCTAGGGAGCTGACCAGACGGGAGGAACCCTTCCCATTCTTCATGGAGGCAGATTATC
GCTGGTCTGCAACTGGCATTCTTAGAGTTAGGAATCACTGTGTCCATTTTTCTAGACTTCTCTCATTGGTGATGATTTGACCTTTTCCTCTTGC
ACTAATGAGCAAGGTGGAGGAAAGAGATCTCTCTCTCTCACACATATACTATCTCACTCAATGCCCACCAATCCTAAGAGGCAGGAACAATTGG
GTTACGCCATAGTGAACTGCCCTTCTGTAGGTCAAAATTTAAATGTAGGTGATGTCACAGAGTTTAACCTAGTATTACCATCAATGCCATTATA
CAGATTAGGAGACTGAGGCTTCGGAAGGTTAAGTCATTTGCTCAAGCTCACACATTTGGTGAGTCAGGGAGCTTGGATGTGAACTGGGGCCTAA
CTCCCAAACCTGCTGTGGTAGGCTGCCATCCATGGAAACAGGGGTTCCTGCGGGAATGTGTAAGAGATGAGGTTGGTAAGTATGACTTTTAGAT
GCCAGGAGTTGACCTGTGTGGCTACCAATGGGAAGCCCCTGAAGACAGAAAGGTAGGGTAGCAAAGTAGAATCAACAGGGAAGGGATGAGGAGG
CCGGAGGGTAAGTAGGCCACTGCGAGATCAGGACGAAATTTACTGGGATCGTGAGATGCTGGAAGGAAGGATCAGAGAATCTGGGACCATGCTC
TGCATCTTTTTGCTGCAATAAATGGTATTGCATGAGATACCATTTATTGCCATGTGTCCTCATTGTAGTCATTTTTGTAATTTATATGACAAGA
AAAAATGACAGGGTGATTTTTACATATGTGCATACCTATTTACACACCTTCCAGATCAGGAGTGGTGATCTGAGCTCACTAGATATGCTCAATT
AGGTAATAATCAATTCAGGTCATCAAATTGATCACCCAAATCAATTTAGGAAATTGATGACCTCAATTAAGGCAAATATATACAATGAAATATA
TGCAGCTGTTAGAAAGGGCTAGATCCCATATACTAAAATGGAAAGAAAGCCCTTTGAAACCTAAGAAAACTGTGTTTCCATTATGTGAGCAGAA
ATCTTGTGTACACAGAAAAATGGTCTTTCTTCTTCCCCTCCCCTCCCCTCCCGTCCTCTGAGACGGAGTCTTGCTCTGTTGCCCAGGCTGGAGT
GCGGTGGCGTGATCTCGGCTCACTGCAACTTCCGCCTCCTGGGTTCAAACTATTTTCCTGCCTCCTGAGTAGCTGGGACTACAGGCGTGCGCCA
CCATGCCCAGCTAAGTTCTTTGTATTTTTAGTAGAGACAGGGGTTTCACCATGTTGGCCAGGCTGGTCTTGGACTCCTGACCTCAGGTGATCTG
CCCACCTCGGCCTCCCAAAATGCTGGGATTACAGGCATGAGCCACCGTGCCCAGCCAGAAAAATGGTCTTTCAATTGGAAATGTAATTCCAGAG
AATAAAGAATAGAACCACACTGTAATATGACAAGTAATAACACACACAAGCGCTAAAGGATTTTTTTTTTTTTTTTTTTTTTGCCTCCCGATAT
CTGAGGGGCAGGCTCCGTGGAGCCTCCAGGCTGAGAGGCTGAGACTGGCAGAGCAGGCTGGGTTCTGGATTCTGATACTCCTGGGCAGGAGTGT
CTCAAAGATTGAGACATTATGTTCATTCTTTGGGGCTCCTGTTCTTGGCACTATATCTAGCACATAGTAGTTGCCTCATAAATACCCATTAAAT
AAGAGCAGAACTAAACACATCTGGTTAGAAATTGTTCCTAGGCAGCAAGGAACCAACACGTGGAAAATATGGGGTTTCTGGAGCAGTGTTAATG
CAAGCCAGTTCCTGTAATGTACATAGTGACACCTACTGCCAATGACACGTGCTGGAGCCCTTCCACTGTTGATTTCCTATATTCACTTACCCTT
GTCTTTAAGTGGATGTTGGTGGAAACTTGAGGATACATCTTTGTGCAGCAGACAGCATTTGTAAGTAAATCTGTGTAGGCTTAGGGCCACATTG
ATAAAAATATATGAGAGTAAACATATACAGAAGCTGTTTTAAGAACTTCTGATGTCCTAGATGCTCTGATTTCTGGAAGCTCCATCCCACATCG
TAGCAAATATATTAAAACACTCTCATATTCTCTAAATACTCTTAAATAATGTGAGTGTTAAAACAATAGTTTCATTTGAAATTATTTGATGTTG
CGGAACTCACTTTCTAATGACTAGACTTCCCCGGCAATCACGGCATTAGGGAATTCATACCAAGTGATGTCTAAGTTATAGTTTCAAAATATAA
TGAAACATTTATCCATCAATACATTACAATTATGAAATTAACATGTTTTGGGGACCTTCATTTAAACATTTATTAATCTCAGATTTGCAGTATA
CTTTTTGTATTGTGCAGTCAATAAAATTTTCAGTCTCAAACATTTTCATAGGTCCCTGAAAAGCTCAACGCAAAAAACAGCCCCCATGTGTGAT
TCTCTACTGGGCAATAAAAGCCAATCGCGACCCTCATTTTCCCCCATTCCAGGGCTTCCCCCAGGATAGAACGCGGAAACGCTTCTTTTTCCGT
TTCCAGGGATTTCTTTCTTTTTCCAGTGTCGTTCTCCCTCTCCCCCACTTCATTTTTACAATAAATGTCAGTGCACACCCAGGAGCGGGTGGTC
CCACAGGGGACATCTTAACGCCCACCCAGGAGCGGCTGGTCCCACAGAGGACCTCTTAACGCTGACGCTTTCTGGAGAAAAGGATTTGTGATGA
AAATTTCCCCAAGGGGACCTTCTAGCGCCTAGCACCTTCGATGCTCCTGTTTCAGTCGCGGTCTCAGCGGGCAGTGGCCTCCTTTGAAGCTGGG
ATTCTCCTGCCCCTCCCGGGCAGCGCAGGCCACCGGTGACCCGGGACGGTCTGTAAACGACCTTCGCGTCCCCGTCCCCGTGGAATAACGCGCG
GCGGGCATCACTGCCCAATATCCAGCGCTCGTGAAGGCGGAGACCGGCGGGGCAGCTAGTTTCTGGTTGTGGATTCTGATTAATGGGCCGCAGG
CGCACGGTCTGCACCGTCCGGCTCGTTGCTAGTGGCTCGCTCGGGAGCCGCCGCACTCCCGGGGCTGTCCGCCCGAGCCGGCCTGGAAGGCAGA
GCACGCCTCCAGGTCGCTCCGCGGGGCCTCCGGAATTCCTGGGAAAGCCCCCCTGCAGCGCCGCCCCTGGACCCCAGGTGTGAGGAGCGGGGCT
CGGCCAGCGGCTCCAGAAGAGGCCCGGACCCCACTGCCGTGGCTGCCGGGGGCGGGAAAGTGATTTCTCGGAAAGCAGAGCACTTCGAAGAAGG
CGGGCCGCGCGAGCCAAGCTGACGCTATTGGTCGGTGTGGCCGTCGCTCTGCGCACCGCCCGTCCCCCCCACGACCCTTTTTAAGGCCGCGCGA
CCGCTGGCGCATCGCCTGGAGCGCGGCAGCAAGCGTGGGAACGCGGGCGGCGAGACGGCGGCAGGACGGCGGCAGGTAGGCACAGTGGGCGGGT
AGGGCGCCCGTGTCCCGCGCGGTCCGGTCCCGCGGGGTCCCCGACGCCAGGCGGGGCGTGGGGGTGGAACTACCTACCGTAATGTCCCCGGGCG
CAGCTCAGTGGCCACCCGTGTCCCTCTCTGCTTTTTGCCTATTTTCCAGCCACCTAAGTCCAATCTGAATGCCCAAGTCGTTGATTGTCGTTTG
CCTGTTTCCAAAGATTGGTAGATAGATGCCTTTTTAAAAATCTCATTTTTCTTTAAATCTGGTTTACATGGAAAACGTTAGGAGAGCTCATATA
ATGAACGGCAATAGCAACCCCCTATCTTGAAACGCGCTCTATCATCCCACTGAAATTCTACCACGTGGAATAATGCTTGGAGGGTCAGAGTTGT
GGAACTGCCCAATAACCAGTCGTTACTGAGGGTTAGTTTGTGAAGGAGGGGACAGACTGCTTCTAAAATTCTGTTTAATGACAGTCAATTAAGA
TTTCTGAGTCTGGCTTGAGGGCCTTTGCTTCCATCACAGCCCAGTCGTCCTTGGCAAGAGAGTCTGTATATGGGCCACAGCTCACAAAAGCATT
GTTTGAAAAAATTTATTGAAAGAACATTGTTTGTAAAATGAGTCCCAATACATAGGACAGACTTTCCTAAGGTGAGATGTGTTACTTACCCAGA
GCTGTGAAAGGCTTTACGGATGGAAACTAGAGACTGAATTTTCCAGAATTTTAAGAAGTCTCCCCAACCAATGGCCCCCCACTTTCTTTTTTTA
AACCAAAGGTAAGAACTGGTAGTTAAAATGACAGTTCAAAGCTTGTCCTTTTGGGTTACGGCAGCTTCCTCTATGAAAAGATTTGGGAGTGATT
CAGTCACTTGAGGAAGGTTGGTGCCAGAGAGAGAAATGGCTTTGGTGCTTTCTGGTCTAGTGATGCGGGTATGCTAGGCCAGAGCGAGTGCCCT
GGGCCCTCCGAGGCGGGGGAGAGGGTGGGGTCTGCTGCTGCCAGCTCAGGTGTGACCTGTAATCTGGATTAGGTGGGCCCAGGGCAACCTCTTA
TCACGTCCCTCCTGGAAAGCCTGACTGCTGTATACATTTCTAGGGCTGCAGATAGGGCTTGGCCAATAGATTACCTCAAAATCAAGAAGAGGAA
GTTATAAACATGTGATTAGACTTATTAATTTTTCCTGGCTGGGCATTTGGTGGAATTCGTTTGTTAATGTTTAATAAATCATTATGGATCATAA
CTGTAGTAGAATCTCAGGCTTTTGATGTTACTTAGAATCTTGGAGGAGACCACGAAGGACACACAGACGTGGCTGCACATGTGCAGAGATCTTG
TAATGTAACTATGGCTTTTCTCTGCACCATGTGTGAAATAAGCTGCCGCTGGCGTTGGGGCGCCGGCCTGGGTTCCAACACAGTCCGCTGGCTG
CCTCGGTATTTGCCGTGCCTCTCTGGGCCTCAGTTTTTCCTCTCTTAAATAAAGAGGGGACTGGATTAGATGATTTCTAAAGTATTTTCCAGCT
TTCAGATGCTATGACTTACTCTTCTCTTTTTCCTTTTAAAATTTCTTTTTCCTGTAAATCACCAAGATAGTTGTCCTGAACAGTTTAGATGTTA
TGAATCCATTAGGAATCCTGATAAGAAAGTGTTGACCCTCTTTCTAGAAAAATGCGTGTACTAACAAAATTTTTGCTTTTGGTTGCAGGAGGCT
CAGGAACTGTGGATTCTAGTTTAAGAAACTTGTAGCAAGGAAATCAGGGGAGTTGAAAGTCTCAGAAGCCAACCCCTATGTTGTGTTCTGGCCA
CCTCTGTGCAGCTCATTCCTCAATCTAGGAGAAATTTTTCTACCTTGCCCCAGGAAAGAGCTGCTAACTTGTTTTCGGGGAGTGTGGGGGGGTC
TTTGGTATTGGTGTTCCATTTCTCTTCTCAGGTACCCTCTCCCAAGTCTGTCCCTTCTTTATGATAAACACAGTGGCCTGCTTTAGAATTCTGG
GTCTCTTGAGATACAGCCTCTCAACTTACAGGTGAGGAAGCCTCAGGGAGAGGTTCAAGTGACGTCACAAGGTCTGGTTAGAGAAAAGCCTTTG
CCAGAGTTCAGAGTTTTCAAACCAAGGTCTAATTTGGGTGGGCGCAGTGGCTCACACCTGTAATCACAGCACTTTAGGAGGCTGATGTGGGAGG
ATCACTTGAGGCCGAGAGTTCAAGACCAGACTGGGCAACATAGCGAGATCCTGTCTCTAAAATGTATATCTGGGTGTGGTGGCATATGTCTGTA
GTTCCAGGTACTCAAGGGGCTGAGGCAGGAAGATCGCTTAAGCCCAGGAGTTCCAGGCTGCCGCGAGCTATGATGGCACCACTGCACTCCTGCC
TGGGTGACAGAGCAAGACCCTGTCTCTAAAGAAAAAAAAATTGAACTCATCCCCTTTTAAATCCATAAACGCACAACTGAGGTTGTTGGATGGG
GAATTTAAGAAATCCCACCTCCTCCTCCCTGGGACCTGGCCCTGTTTCCCGTCTCATGGCCACCTGCAGGGTGGCTGAAGTTTCCAGAATGCGT
ACTTCTTGTGAAGGTTCTGATTGATATTTTGCTTTCTGGACCAGTGTGGCTCTACCATATTTTGGGATGTTATGTCTTGTTACTGCTGATTGTT
TCAAACTCGTTTGCCCAAAGAGGTCACATTTTAATCAGAAGAACAAAAATGCTATTTTTTTTTTTTTTTGGGTGGGCGTCTATCCAGCTGTCTT
GGGGATTTCCAGCACTGTTCTTGGAAATGTTGGCTCTAAGTCGATAGGTCATGCTAGTTCTCTCTCTCTTTCTCTGTGCTGTTGGGGAAGCTGT
CTGCTTGGGTGAGAGTGTTCTTCCAAAGGATGTCTTTGGGTGCCCTGGGATGGTTAGGTCCCTAGAGTGGGACATGTTCTGGAAGAGGAGCCCA
GTGAACTTTGCCCTGTTCGGTAGCTGCAGTTTATTTCCTCACTCTTGTCCCTATCTTTCAGTTGGTCGTAGGAGTTGCCCAGGAAGGAAGTTTG
GATAATAATAATGACATCTGGCATGTAAGGTCCAGGCCCTGTCTCAGTTGCTTTCCGTGTAGCATCTGAATTCTCTTACAACCAGTACAGGTAG
TGTTTTGTTAGCTGCATCTGGGACTGGGTAGCTGATGCCCTGAGTTTAAATGCTGATCCAGCGTCTCCCAGCTGAGCGGTGGCGGGACTTGAAT
GAGATCGCGGTTCTGTCTCATTCTCAAACTGCTGCTCTTATCACTGTGAAGGAACAGCTATTTAGATGGGCTGGCCTGAGGGCCTCCTCTTTCC
CAGACGGCACGGACGCAGTATTCTATCAGGGAATGTGGGGCCAGCTGGGCATCTGGTAGCCCAGTTGGTTCTTCGGATAATGGGCTGCTCAGTG
AAGGAACCTGGTGCTGTAAAAGTGATTCCCCCTCTCCTTCCAGTCTTGGGCTAAAACTGGAGCTGTTCACTGTGGTTGTATCTGCCTGAAAGGA
AAGGGCAGATGAAAGCTGGAAGGAGCACAGCCAGCACAGTGGGAGGGGCCTGCAGGGGGCTGCTGGTGGCTGCAGGTGGCTGCAGGTTTCCCAC
GGAGCTTTCAGTTTGCACTCAGGGCTGTGAGGTCATGGAGGCCAGCATTGCCTTCTCATGGCAGGTGTCCCGGAGTCCCTGAATCTGTGGGTTT
CCCCCAAGCCAGCACCTTTGCTGCAAACCTCTGAGTTTCCTGTTAGCAGTTTTTGGGTTGCTGTGATGAATGAGACAATATCCGTAATATCACA
GCGTGTATTTCTGTCTTTCCAAGGATGTGTGACCGGAATGGTGGTCGGCGGCTTCGACAGTGGCTGATCGAGCAGATTGACAGTAGCATGTATC
CAGGACTGATTTGGGAGAATGAGGAGAAGAGCATGTTCCGGATCCCTTGGAAACACGCTGGCAAGCAAGATTATAATCAGGAAGTGGATGCCTC
CATTTTTAAGGTAAAGAGCCCAGCTCCCTTCCCCACTGTGGGCACAGTGTCTCCTTTCCCTCATGGACTAGTGGAGATGTTGAGTGACATCTTT
CTCATTTACTTAAAAATTAATCCAGTTTTTTAAAAGCAAACATTGGTTCAGGAGTGCTGAATGTGTCTCAGACATGTACATGAGCTGATTTCAC
ATCTCTTGAATTACGGAGTCACTTTTGTGGTCGCTTGTATTCTGATGAGGAGATCGAAGGCTCTTTTCTTCTCTTTTCTGCTGCTTCCTTTTCC
TGATGAGCCAAGTGGGAGAAAATACTTCGAGACCTTCACGCTAAGACCTTTCCCCACGGGCTTCCATTAGAGGCGATGCATATACCAGGGAAGG
TTTCAGTCCTTGTTCTTTCAAAGCTGATACTTCTGCCTGGCATTGTAGGGCCAGCTCAGGAGGGTGAGATGCCATCTGTCATTCCTTTGGGGGC
TGGGCCGTGTGGGGGGTTGTGAACCTGCAGCAGATGTCTAAAAATAGTCTCACCTCCCTTGAGAGTAATCGGTTCCCCATGCGTGGAGAGACGT
GATGGAGGGTTTGTTCTGTGCCAGGCCTGGCCCACGGCTTGTTTTCTGCTCACATGATCCTGTGTGGTAGATGCTGTTCCCACCCTCATTCTAT
AGAGGCACTGAGAGGAGAAGTGACTTGTTGAGGTCTCACAGCTCTTGTATGACGGAGCCAGCATTCAGATGCAAGATGGCCCAACTGTGAACCC
TTGGTCCTAACTCCAGAATAGCTGATCAACAGAGATTTCTTGCCATTACACCTAGATTCAGACAGAGGAACCAGGAATTAGGGCAGCCCAGCTC
TGCAGACCAGCTGGGCTATCGAATCCCTTGTGGGTCATCAGAGTCCTGTGTGGGCATCTCTAAGGCTCCAGATGTCCAGGTTTCACCTCTGGGA
GATTCGGAGCCCAAGGTCAAGGTCAAGCTAGACTTCCACGTTTGCCAGTGTGGACACTACACGTAGTCTGAGTCCTAGCCCAGGTTATAAGCCA
TTGCCATGTGTGCTTATTCTCTTGCATTTGGGGGCCAGAGATGGGGAGGGGAGAGTGAGTGTGGGAGAGGGGTGAAAGGGGCTGAGTTGTTGGG
GGCCAGAATCAGACCTGAGACCACAAACAAGGTGTGGAGGGGGTCAAGGCTGTAGGAGCCCATGACAGTGCTGGACTCCCAGCCACAGATGACT
GTCCCCTGACACCAGAGAACAAAAATGACAAAAGATCACACCTTAACCCCAGAGTGGACCATAAATAGGTCAAAGGTAGCTTAAGATGCATTTT
GGTCCTGCACGTCTCTGCCTGACCGATGTTTGCAGTGGGGCTGTGCGTTTCAGTAATTCTGTTAAATCTGCAATTTGAGGTTGCTGATCTTCTT
GAGAATCTGATGCCCATTACTGACCACGCCAAGGAATATGGGGACAAGGGAACGCTTTGCACTCACTTTCGAGGGGTCCCTTGGTGCCCCCACA
CGTTCCAGATTCTTTCTGATCAAGGACCCCAGGTCAGGGAGCCTCAGCACCAAGAAGTTTTGTGATGCCACTGCCTGCCTCCTCACCCTTAGTG
CCATTGTGGATTTCTCTCTTGTTTGATTGCAGATCTTTTTTTTTTTTTTTTTTTTTTTTTTTTTGCCTTTGCATCATGGTGAACTTCTCTTGGG
AAGGACTGCAAATGTAAACAGTGCCAGAGTCCCATTCAGTCGGTTGGGAACTCTGCATTATAGATAACCCCAAAAGCCGGAATTTCTCTGCCTC
GCCACTGTTGATGTCTGGGTCTGGGCAATTCTTTGTTGTAAGGGTTCCCTATGCCTTGTGGGATGTTTAGTGGCATCTCTGACCTCTACCCACC
AGATGCCAGTAGCATCCCCCTCCCCTACTGTCACAATCAAAAATGTCTTGGACATTGCCAAATATCTCCTGGTGGGGCAGAGTCTTCCCCTCCC
ATTAAGAACCCTGATAAGAGCTGGCCACTGCCAGGATCAACAGACTTAACCAGAGGTGTTGGGTGCTGAAGGCACAGTTGCAGGTTGGACATCA
GTAAAACATCTTTAAGACATGGCAGAGGGTGCTGGACTAGGCTGTGTAGCCCTGACATGTGGCATGCTGACGGAGACGAAGCTTCTCCCTTCAC
CCCATTCCCTACTTCAACTTGTGCTCGGGGGGTAATGAAATAAAGCCCCAGATTTATACATCTTATGCAATGTTCTTCATGGCCGTTTCAACAG
TGTTGAGAAAAATGTGCAAGATTCCCAATGTTTCCGTTGGTTACGCAGTCGCCTGATGTGGCAATCTGAAATGAGTCTACCATCTCAGCAGGAA
TGGGGCCAGGAGGGAGACGCGGGTGCCCACTGGAGCAGGGAGGCCATCGGGAGGGCCACCAGTGCCGGTGGAGACATGGCGCCAGCAAGAGCCC
ATCATGTGCTTCCCTGAGCTATGCTTCTTCCCATCCATCCTCTGAGAGGCCTGTCTCTGTGACGTTGGCCGGATAGATCTTTGGCTGTTGGATC
AAGTCAACCTCGGTCAGGTAGAGCCATCTTAGGGATTTTCCGGTTATGTAGACACTTGTTTCTTTCAACTGTTCAAAGAAAACCTTTCAACAAT
TTAGGAGTTAAGAAAGAAATTTATGAGTTTGGTTTCTTCCGTAATAAGTGGATGGTAAAAGGGGCCACTTATACCAGAAAATCCCTCATTGTCT
GCAGGCATCATCCTGAGGCCGGCCTCATGGTATAGATCACAGAAGAGAAATTGAAAAAACATTGAGCTCATTTTGTACCGACCCTGAGTACACT
GATGAGGCCCTGATAGCAACTCATTTAATTTTTAAAAAGTACTTTACCTTCTTGACATGACGACAAGGGGGGAAAATCTAGTTAAGTGAGGATT
ATGATTCATGGTTATTCCAGGCATCGTAACAGTCCTGAATGAGTTAAAGCTCACTTAGTAGCACAGATATTTCTCATTCAGCAGGCCTTGAAGG
GAAAAATAGCATTTAATTAAAAAAATGCAACATGAAACAATCATATTAAATTAGGAAGACCTCCTGGTCTTAGTTCAGTGCTGTCAGCCTGAGT
TGTGCGTCAACAGGAGAAATAAGTTATGGTGGAGGCTGAATGAGCCATAGTGACTGTTGCTGGCGGCAGGGGTGGGGGGGCCCTGAAATCACTC
TCATGTCTAGTTTTTGCTCTAGCTCAAGAAGGATCTCGAGAGATCATCAAGCTAAGTTGACCTTTTAATGCTGGCCAGAGAGGCTGGGAGAGGG
CCAGGTGCCTGCTGTGTCACAGAGTTCAGGGCAGGCGGCAAGCCAGGTACCCGATGGTGGCCCTGGATGCTTCCTGGCCGTGGGCCCTGCTGTG
ATGGATGATGTGGCCTGGACTTGCTCGTGGGGTGAGTGTGAGCTTGGCGTGAACGAGTGAGTATGGCAGTGCCTTGCAGGCACCGCGGTTGCGT
ATGTGTACCAGCGGATCACAACGTTGCCATGAAATCTGTGCATTTCAAGGCCCGTTTGGGATGTGGGTTAACTCAGTGGTTCTCAGGTGGGGGA
GGTATCATGATTTACCCTCCAGGGAATACTTGGCCATGTTTGGAGACCTTTTTTGGTTGTCACAGCTAGGGGAGGGGTGCTATTGGCATCTGGT
GGGTCAAGGCTAGGGATGCCGCTGAATATTCTACAATCCACAGGACCACCCCGCCACAAAGAAGGGTCCCAGCTGATATGTCAGGCTTGCCACG
GTGGGGAAACCCTGATTTAAAGTAATAAAAATTTGAAACTACAGTTGATTTAGTACATGGTTTGCTGGTTTATTTCTTTAAAAATAAACAACAG
CAACAAAACCCAAATTAATGCCCGGTCAGTGATGCAGTCAATGAAGAGAGCATTAAAGACCGTGTGCTTTAAGAAATAGTTTTAGAGGGGAGTT
TTACATCAATGTCACATGAGGAAACTACCACTTATGCTCACTAATGGGAATGTTCTTCCAGTCTCTTTACCCCAGGTAGAGGTGCAACATTTTG
CATCAACAAAGTAGGCAGCATTGGCCTTGAACAGTAAGCATTCTTGTCTTTTTTGAGAGGAAAAACAGTCTGGGCTATTTTAAAGGAGCTGTGA
CTCATGGGGGCATGATGGAGTTTCTGGAAGTGTGGTCTCCTGGGTAGCTAAATCCAAATCCCTGGAATACTGGCTAAAGACAGCTACCTGGGCC
GGGCGCGGTGGCTCACGCCTGTAAGCCCAGCACTTTGGGAGGCCGAGGCAGGCGGATCACGAGGTCAAGAGATCAAGACCATCCTGGCCAACAT
GGTGAAACCTCGTCTGTACTAAAAATACAAAAATTAGCTGGGTATGGTGGTGCACACCTGTAGTCCCAGCTACTTGGGAGGCTGAGGTAGGAGG
ATTCGCTTGAACCTGGTAGGTGGAGGTTGCAGTGAGCCAGATTGCGCCACTGCATTCCAGACTGGTGACAGAGTGAGACTCCGTCTCAAAAAAA
TAAAAAAACTAAAATAAATAAAAATAAAAAATAAAAAAAGACAGCTACCGAGACCCAACCTCCCTTCCCCAGTGAGAATCTTGAGGGGCAAGGC
CCAGGAATCTGCATTTTCACAAGCTTCCCAGGGGCAGGGGGTTGGTATATGCATTAAGCCTGAGAACACTTGCTGTGGTGGGGAAACTGTTGGG
TTGGAAGTGGGTACAGCTGGCATTTAATCCCAGACTGGGTGGCCTTGGGAAAGTTACTTACCTCTTGGAATTGCATTTTCCTGAAGTGGGTACA
GCTGGCATTTAATCCCAGACTGGGTGGCCTTGGGAAAGTTACTTACCTCTTGGAATTGCATTTTCCTGAAGTGGGTACAGCTGGCATTTAATCC
CAGACTGGGTGACCTTGCGAAAGTTACTTACCTCTTGGAATTGCATTTTCCTGAATGGGATCGGGATGTCCCTACAGATCTCCTATCATTTTAG
GCTGGAGGACACTGTCTGATTTTTCCTGAAACCGAAGATAATTCTCATCTGACTGTGGTTACCTCCTAGTTGGTGTGTCTGTATTCCAATTTTG
CAAGCTTAAAATCTGTCCATTCACCTGTCTTATTTTTTTAAAATCTGTACTGCCCCATTCTACATTATGACTTTAAGATTTCAGCTTTGAATTT
CTGGTCCTAGTTCAGATCCTAAGGTTTGGAAAAGTCAGAAAACAGATCTATTAAAAAAAACACACACACATTAAAGGGAAAGTACTTCATTACA
TTTTAAACAGCACCTGGGGGGAAAAGTCTAGAATAAATGCAAAAATGCAAAACAAAATTTCTATTAAAAGTAACAGGGCGATGGATGACCATTT
TGACTTTTTGCAAATGTTCCCTTTTCATGCTAAATTTTAGGGGTTGATCTGAAAAAGCAACAACTTGTTCTTTGTTTTGAACGCTCTGGTGAAA
CCATATGCAACTTCCTCTTTGTGCTGTGTAAACCTCAGGTGTCTCCAGCTCTTCAGCCAGGCAAGGGCTTGGCTAAAAGGTGCACTCCAGGGTT
GGAGGAGCCTTCAGCCTGGGTTCGACTTCTGACTCAGCTGTATGAACCTGGGGGACCCCCTCCCTGGCTTGGGTCTTTCCACATCTGGTCCCCA
GATGTGAAAAGACTCAAGACATCTGATTGGAGTCTCTTTGGGTCCTGAAATTGAATGAGAGTTGATGGCCAACAAAGATTCATGGGAAGGGAAG
GATGTGTGGGGTCCTGGTCATGGTGACGGATATTTGTGATTGGAGTCGGCCATGAATTTAATGTGCTTCTGTTTCTTTCTTCAGGCCTGGGCAG
TTTTTAAAGGGAAGTTTAAAGAAGGGGACAAAGCTGAACCAGCCACTTGGAAGACGAGGTTACGCTGTGCTTTGAATAAGAGCCCAGATTTTGA
GGAAGTGACGGACCGGTCCCAACTGGACATTTCCGAGCCATACAAAGTTTACCGAATTGTTCCTGAGGAAGAGCAAAAATGTAACTATCCTTTA
TGGGCATGAAACCTTCCAGAAGCTGCCCTGGCCTGTAGCCTTCACCACAGAACTTGGGTCTGGGGTAGACACAGGGTCTGGGGCACATAGTTTC
AGTTAAACAAAGCAGTTCTCTCCTTCGTGTAAGCAGAAATTGAGATCTCTTTCCAGTGACCTCAGAGGGAAGGGCGGAGGAGATTGGGTGCTGC
CCAACCTGTGCCCCACTTGCTGCCTGACCACAGACATTTGTAGGGCCTCCCTGGACAGGAACAAGCATCCTCCAGCAGTTTCTGATGAGGAATC
CTTTCATTTTCCAGCAGCTTGCAGAGGAGGCCAGGGGAAAATATGGTGACCACAGAAGGCCTGGATCATGAGGGTTGGGAGTAAAGCTCTCAGA
TGAAGTTGTCAAAGATGGCACCATGGCCTTCGTTGTTGGAGATGGGATATGCCTCAGTGTGTTACTAGATCCTGATTGTTATTTGGGAACTCCG
GGATGTGATCATTCCTGAGGTTTCTTCCAGCTCTCAAATCCCAAGAAAGCATTTGTGACAGATTAAAGCAGGACAGCAAAAACATGCCGCACCC
TGGTCCTACATCACTAAAATAAATCCCAAAGTACTGAGCTGGGATCTGGCCTCAGAAGGCTTCTCAAAGCCCTGTGCTGTGCCGCTGCCATGAA
TTGTAGCTGATTTATGAGATAAAACCTAATTACCAGCGCTGGTTTAGAACATGCTTTTAACACATTGATTTTCTTAGCCACTTGATGAGGCTTT
TAGAATAACCCACTCTGGCTTTCTCCTTCTAAGCTTCTGAGTAGTCCACGAATGCCTGTAAGAAACAGAAACCCCCAAAACTTCTTGGGGCTGT
GCAGAAGTTTGAAGTTTGCACTCTTCCCGCTGTGGGGGTGTTGACTTAGAATTTTTTAAGAAGTTAAAATGGTGATTCAAACAAATCTATAGTG
AATCTGTGTCAGAGAGTTGTGTAATCGTCATGAAGGAGGCAGCATGATGGTAAAGATGGTGGACAGAGAATCCGAGGTGCTGGTGAATGTGGCC
CATGAACGAGAAAGCTGAGCCAAAGCCGATGCCCGACCCGGACAGTACAATTGCGGTTTGGGGCGTTTGTAGCCTAATCGTCTGCAATTAGCAC
CTAACTCTACTGAGCGTGAACCCTAGTCAATACTAAATAGTAAGGCCAACAAACTGACCTTCCCTTGGAGAATCGGGTGCCCTTTAGGAGGAAA
CCTCTATATAATAGTCTGGGGTGACCCTGAAAGGCTAAGCAGTCATCTTTTTGCCTCATTTCCCAGTTTTGGACAATTTTTTTTATCACCAAAA
AGTAAAGTGTGATTTGAAGGAATAGAGAAGTTTCTTTTGGCCCCTACTGCCACCCCCAAGATCAGTCAGGCTTGAACCGGCAGGTGACCCCAAC
TTGTTTATAGCATGGGGTGCAGCCAGCATCACCTGCTAGTGATGTTAAAGAAGCAGCAGGAGGTTCTCAGGGGTGAAGCAATGTAGCATTTGCA
TAATTGCCTACAGGGGCCCACTCGCCTCTAACCTCAGTGGTTTGCAGGCTCCATGGTGGGCGCCCCACCTGCTCCCTACTTCCCCATCAGTAGC
TTCTCAGTGAATTCTTTAATCTATCGAAATGGAATCAAAATTCAGCCGGGAGGAAACAGTGGGTAAATTCTGTAGGTCACTGGGAATAATGAAT
TTTTGTAAGTGTTGGTTGTGATACGTCTCACACTGATAAACTTCATAAGGTAAGTTGTCGACTGAGGAAGCGGCATGAGAAGGGAAAGAGCAGA
GGCTGGCCCAGCGTGCCCCTGTGGACACTGTGCACCTTTAGGCGGTTTGTGATTACGGCTGGTGCCCACTGGGCATCAGTGAGGGTGCTGCGGT
GTGTGTGTGTGCATGGCTGTGTGCACTGATGCACATGTGTATATTTGGAAAGGCCAAAAAGAGATTTCCTGCCAACTGGCAATACAAAAAAGAC
CCCAACCTGCCAACACGTTTTGCCAGGAAATCGGTGAGTGTTTTCAAATGCCCTGGCTTATAAATGTAACCTTCTTAAGTTAGCAAATGCTTGC
TGTAAAGTATATCTGATACAGACTCATTTTGGATCTCAGAAAATAGAAGAAAGAGACCAAAGTGCTGTCTTTATCCTTTAAAAGTGTTAGCAGA
AACAACCACCACCACCACCACCACCAACTTCTCTCTTTTGACTTTGCTGATCAGATGACTGAAGCATGGGAAAAAAATTCTGTGCCTTTCCCAA
ACCAATGAAGACACTCACTAACTTAACGTTTCCTTAAACTCAGCATTTACAGAGTAGATTATGGCTTCAGCAAAGGCTGTGATGCCTCCGTGCC
ATGTGTCATGGTGTTTGTCTGGTTTTCTGTAGGCAAACTAGGCGTGGCAACTGCTGGCTGCGTGAATGAAGTTACAGAGATGGAGTGCGGTCGC
TCTGAAATCGACGAGCTGATCAAGGAGGTAAGCAGAGGCAGCATTTCAGGGGTCTGGCCCTGCCAGGAGGAGTCTCATGTCTTCTGGCAGGGAG
GGGCACCGTTCTTGCTGTATGAAGGCAGCCAGACCCTCGGGCTCGCTGAGGAAGTGGCATCTCCACCTGTACAGATCTGGAACGGAAGGACTGG
CTGGGCGCCCCCTCCCCAGGCCAGCTTCTGCCGACAGGTCAACCCCTCACGCCAGATCCCTCCTTCATCCCTAGGGCTGGGCCTGAGCTGCCGG
TTATGTGTCAGTGAAGTTCCTTCCAGCTCCAAACTGTTCGAACACTTTGGACAGCAGTCTTTTAAATGGCATCGTGAATTCCCTTGCCTTCCTA
GCAGGCTACAGAGAACAAAATGTAAACTTTCCTTGCTGCCTGCGCTTGTCATGATGGCGGGTGTTGTTGTACCAGCTCTCATGGCTATTTGATT
GCTTCCTTTTTAATGTGCAGTTTTTATTCCTTAACGGATTGGAAAGCTGGATAACCAAGCATGTTCACATTGCACATAAATTCCTAACAGGCTA
CAAGGGAGAGCATAATCGGGGCCTCCTTAGGCAAGAATACATGGCTTTTGTATACCCATTTCAGCTATTGGGATGCCCTTTTCTTCTGTCTTTG
GCCTCTTAACTATGCTTTTCATGGGTATTACAAGGTGGACATTTGCATGACTAAACCTCGTGCAGCCTTTGCAAAAGGTTGTGTGTGAGTACTG
CATAAATTCTTCTTCTTAATAACATAGCAATAATGGAATCCTTAAGAGTAGCTTGGCTGTCAGAGAATGAAGATAACAGAATGTAACCTACCCG
AACGGCCTTGCTCTTCTGCACAGGCAGCTGCCAAGTGTCTGGGTGGTCTTTGGCAGCCGACTGAGTGAATTCTTGGCTTCGTGGCCCTCCACCA
ATGTCCTGTTTTCTGTAGAAGGCTTTTCTGCTGACTCAGCTGAGAGAGTGAGATAATCGGATTGCCACACCGGGGTCACAAGAAAAGCAATTTC
AAAACATTTCATAATTGGATTTATCAGCCTCCTTTAAGGAATGGGCCAGAGACTGAACATCTGCATGTGGCTCGTTGAGCGAGATTCTTGAAAG
CATGGCAGCCTTTGGCCAGCATCACTGTTCACTGGTGTCTCAGAGCTTGTCTGCGTGTCCAGGGCGTTGAGGGCAATTGGATAACCTGGAACAC
TGGGTCTGCAACAGGCAGGTCCTGGAAAGGGCCAGGAAACTTATTAGTGGCCCCCAAAGAGCCTAGTAATTTGGCCACATGGTTTGAATGCTAA
GCCTGGTAGATTTAAGGCCTAGGGCCTTTCAGGTTGCAAAGTGAAACTTGACTTTTGTCTCCTGAGATAAAGGTGACAATATGGTTTTACTTAC
ACATGAACTGTTCATTTTTACAAACACTGGAGCCCCAGGTGGGAGATCAGTGACTGAGCTGCCCTCCTCTCCCTCCCCTGACTGTGCAGCCTTC
TGTGGACGATTACATGGGGATGATCAAAAGGAGCCCTTCCCCGCCGGAGGCCTGTCGGAGTCAGCTCCTTCCAGACTGGTGGGCGCAGCAGCCC
AGCACAGGTGAGGGTGGGTGGCCTAGAATTGTCACCAGGCATGGCCTGAAGGGTTTACGGCATTCCACCAGCCAGGGACGGAGTGGGGGTGGTT
GTTGCTATCATGATCCATGTCTCATTAAAGGTAGCTCAGCCCTGAGAGGTGAAGAACGATGGCCCTGGTTTCCCAACATGAGGGCAGAGCCCAG
CTGTGCCTTTGGCCCTGCTCTCCGCTGCTTCTCAGGAGGGCACAAGCTGCTTGTTCCCTAGGTGATGTCCATGCCAGCTCTCCCCACGCTCCTG
GGAAAGTCCAGGGAAGAGGGTCTAGTGAACTTGTGTAAGGCCAGAGGGAAGATGCAGCTCTTGGCCACGCTGGCGCCCCCTCCCTGGGTACTCC
CTTAGGTCGGCCAGTCTGTTACGACATTAAGGACCCCCTCAGAACCAAAGAGAGCCCAGGGCATTTGGAGGAGAGGAGAACTCAGACCAGGAAC
AGGAAGTTTGTTCAGAGCCCTAGATTTGAATCCCACGCTGGGAAGTTACAGATCTTGAGCCTCAGTTTATTCATCCGTAAAACAGAGAAACCAG
GACTTGCGCCATGGGGTCACGAGGGTTAAGTGAGGCATTCATCCTTTGATTCTCTTTTGATGAGCCACTCAGAACCCCCAGCTGCTTGAAATGC
CCCCGCCCCCCGCCAGGCCCAGGCTTCTGCAGCCCGTGAATGTGTTTGCTTCCTCCCTCGGCGTCTTCCCCTAGCCCTACATCCCCTGTGGGAG
TCTGGGAGGTGGCAGCTGGCCCCGGAGGCCTTGAAGGTTGCCAGGCCTTGGGTGTCGAGTAAGAGGTCCCTGGAAAGGCACCTCTGTCTGTGCT
GCAGGAACACCATCCGGAAAGCTAGCTTGCACCCCCAGGCTCTCCCCCAGAGATAAGCCCTGGGTGGTGGGTATGCAGTCCAGTGGTATTCTGG
GGCAAGTGCTTGAGGTGGGAAGGAAATGTGGCCCCACAGTGTCACATTGACACATGGTGCAGAAATCCCACAGCATAGAGGAAGTCCCCCCGAC
TTGCCACTCTGGTTTTCTGCATTTGTGAAACAATGGCTCTCTGCTCTGGTGGGGAAAAGCACTGAATTCAGCGGAAGCCTGTGCTCCCTGGAGC
CTCTGGCACGCCATGTGCAGCCTTTTAAGGGACTTTTGGAGAAGGAGCGATTGGGGGTTACTCCCTGTACACCACACCTGGGTGGCTCTGACTT
GCTTTTCTGTTTCTCCTGCAGGCGTGCCGCTGGTGACGGGGTQACACCACCTACGACGCGCACCATTCAGGTACGGGGTGGTCCGGCTGAGAGG
GGCGTGGGCACTGTTTGAAGACAAAGCCCAGATAACCCAAGCAGGGTTGCGGGGTTTCGAGGATGAGCAGGACCTGGTGTGGAAGTCTAGGCCT
GGTTCCAAGGATGAGCAGGACCTGGTGTGGAAGTCTAGGCTCCGTTCCGAGGATGAGCAGGACCTGGTGTGGAAGTCTAGGCCTGGTTCTGAGG
ATGAGCAGGACCTGGTGTGGAAGTCGAGGCTCCGTTCCGAGGATGAGCAGGACCTCGTGTGGAAGTCTAGGCCCGGTTCTGAGGATGAGCAGGA
CCTGGTGTGGAAGTCGAGGCCCCAATTTCTCCTCCTCACCATTTGGTCAGGAGCTGGCGAGTGGCCTCTTTTGAGGCCACTTTTCTTGGACTGG
ACCAGCAAGTAGACAGAGTACTCTTTGAGGCTGTAACTGTGCAGGAGAGACAGTGAGGGACAGGCCAGCGTCTGTCCCAGCGCTGCCTCTCTTT
TGGGGCTGCAGGTGGAGTGATGGAGCCTCTCAGAGCCTCATCTCAGGCTCCCCTGCCCACCACCTCTAGGTGGATGCAGCTGTTCCCATTTCGC
GGGCTCAGGTGGTCACGTACTTGTGTGCTCCAGACTGGGGGCCTCCCCGCGGTGGGCAGAGGTGGCCTTTGTGTGTAGTCTCAGCGGCTAAGGA
CCCTGGCTGCACTTCTGCCAGCTGCCCCTGGAAGTGACGCTCAGGCGTGGTGACGGCATCTTCTGAACAAGGAAGCTGGGGCATCTTCCAGCAT
TGGCTGGTTCTGTGGGAGGCGAGCAGCTGGTCTCATCAGATGGGCCACAGAACGTTAGGGCTGGGCCTCTGGGCAGGGGAGGAAATGGGGCAGG
GATAGAAGCGTGCTGGCTGAGGACTGCATGGGACAGTTTTGTGGGTAGCAGAGGTCGGTGCTCACCCAGGCAGGAAAACTGTCGAGATGGCAAT
GCCCTGTCCATGAAGCTCTTGTCTATTTCCTGGCAGCCCTTTGAGCTGGGGGGTTGTTTTCACTCCGGCTTCACAGATGAGGAGACTGAGGCTG
GGAGGTTCAGGATCTCATCCAGGTCGCGCAGGCCTCTGGCTGGAGCCTGTTCTTGAGGCCTCCTTGTGCCCGGCAGCCGCCATGCTCACAGGGT
CTCAGTTCTGGGAGGCCTGGGTCATGAGGCTAAGCCTCCGGGTCTGCCAGCCACTGGGCTATGGCCTGGGAGTCTGCTGACCAGTGCTTTCCGG
GGGCTGTGGAGTAGCCAGGCACAGAACTGAGCCATCTCGGTGAGATGCAGAGGCACAATTTGGGGAGAGCATGTCCTTGAATTAGTCCAGCAGG
GTCATAGCCACTGCCTCATGCACAGAACATCCTTCTAGAAGCTGTGAGCTTTGGTACCTCTGTCCAGCCCCGCCCCCACCTCTATGTAAATCCA
TGCTTCAGTTTCCTTACCTGGAAAATGGGTATAATAATAATCTACCTTACAGGGTTAAATGTGCTGGTAGGTCCCAAGCCCTGGGCACAGCACC
TGATATGAGCTGTGTAGACCATAGTCTGTGGTTTATAACTTCAGGAGTCTTGTCTGTGTAGATAAGCATTTGTCCTGTTACCCAGTTTCTTTAA
CTGGTGCTTACCTGTGCCGAGCACAAATACAAGCTCCGATAATCCTCACAGCAGCCCAGTGAGGTGGATGCTGTTTTTATCTCTACTTTGCTGA
TGAAAAGCTGAGGCACAGAGTGGGGAAGCGGCTTGCCCCAGGTCATCCAGCTGGGCAGCAGCTGGGCTGGGACCGCACGTCAGGCAGGTGGGCT
GCAGGGTCTGTGCTGCGGGTGTCTTTGTTGCTGCCTCTGTGGTCAGGCCGTTCCCCAGCAAGGCTGTTCTTGTGGGTGAGTGGCTCTATAAGGG
CAGGGCTGGGTCGCAGCAGGCCCTTACTGTTGCAGAAGGCTCACCTGCCTCACCTTGGCAGCCCTTGGTGAGCTGCTTCTCACCTGTCAGGTAC
AAGCCTGACAGCTGGAACCTTCTCTTAGCATAAGACGTTCTGGGGTGTGTGGTCACTAAGACACTCCTGCTTAGGCGTCTCTGAAGCACTTAGC
TGTTCCGGGTGAAGCTGCCAGTTCACATGACTGAGAGGTGCTGGTACCAAGATAAGGCCCCGGAAATGACAGGGCAAAGGGCCAAAGGGGTGAC
GGAGTTGCCTGAAGCGTTTCATTCATTTGGAACAAAGTTCGAAAGTTGCTTCAGGGTAAAGGGAGGGGAGTGTGTGGAGTCCGCAGGCAGTGCA
GAAGTTGCAGACTTGGCGTGGGGGGAAGATGATGAGTGAGGAAGAGCGAGACCAGCGGGGAAGATGGTGAGCAGGGAAGAGCGAGACCAGTGCT
GCCATTTCCTTCTGGGTGACCCTATCTAGGATTCAGTTTCCTGAAGTGTCAAATCAATGAGGTGGACCAGAGCTTCTGCAGCTCTAGCTTCCTA
CCCTGCATGATTCTAGAACCTGCGTAACTCCAGCATGGCTGGAAATGGAGCCCGTGAATGGTGGGTTGTCAAATAATAAGGCAGGGAGCAGAGC
CCAATGGGAGGGTCCAAGGAGTTCTGAGTGCCCAGCAGTGTCAGCAGGGAATGCAGATGGACTCAGGGCCTCCCCAGATGTGGTCAGCCTTGCA
CAACTCTAGGGGGCGCCGTGGAGTTAGGCACCTCACAACTTGTGTGGCTCCACAAGGCAGCCTCGAACCGGTCTGGGGTACTTAGAAGGAGCTG
CAAACTCACTAAGCTCATTGCTAGCGTATGTAATTCTTTTGGTTTAAGGCAATTAAAATGCAGATACCTCCCTGCATTTACATGTTATCTGCAT
TCCTACCTTAGATTAGTGTTTTCCAAACTTTGGTCACTTGAGGTCCAGTGTCACAATTGGTTTTCACAGCCTGGACTGTTACTAACATCATGTT
TTTCCTCAAATCTTAATCTTAAAATAAAACTTAAGTTTATTTTAAATGAGAACCCACTATCATTGGCTGTAAAGGAAGACCTGTGGCACCTGGT
ATAAGTAGGTAATACTGTCTGGCTAGAATTGATTAAGATTGTATTTGTCTTTCATTGAATTTGTCTTGACCTCTGACAATGCCCTGAATTTGGA
GCCCTAAGTTCAGTGCCATTATTCAAAAGGGAGGTTGACAGGTGTTAGGTGTTAGAGAGCTATCAGCACCAAACTGAGGCTTGCTTTTTGAGGT
AATCAGAGGTTGGAAGAATATTGAAGATGGAATAATCTTGTGATTACATGTATCACCCCTCCCCCATTATTCTGTGTGTGCCACTTTTGGGGAA
CCCCTGCTTTAGTTTGAGTGTTTTTCAGACTCTTTCCTGAGAACAGATTTGGATGAAGGGTTTTGCAGAGATTCTTAATCTGAAATCCAGGAAA
TACCAAGGGCGCTGTGAATTTGTTGAGAAAAAGATTATGTCTTTATTTTCTTTAACTTCAGGTTTAAATTGAGCATTTCCTTTTGTTATGAATG
TAGGCAGCAGACCGCAGTGCCCTTGGCAGTGCCTATGAGACGGAGTATTGTCATAAGAAATGAGTTGTCGAAACATCGTTTGCCCTCAGCTTGA
CGTGTAAATTACAACAGTTACCAGACCTTCTCTAGACCTTGTATTTAAAGAGTCAGTGAAGAAGTACAGAGAACACTGTTGTAGTTAATATGTT
CAGTCATTGGTTTCCTTAGTCATTCTGTGTATTTATTCATGCATATAAAAACATTACTTCTACAAGCAGTACATGGATTTCCCCAGAATATCAA
AGTGGTTCAAGACACACAAAGAGTTACCCGTGTAGGTGTGAGACAGACTGTGCACTTGGGCAGGAGGGACCCTGTATGTCTCCCCGCAGCACCG
TCATCGTGTCCCTCTTGTCCACAGCATTCTCCCAGATGGTGATCAGCTTCTACTATGGGGGCAAGCTGGTGGGCCAGGCCACCACCACCTGCCC
CGAGGGCTGCCGCCTGTCCCTGAGCCAGCCTGGGCTGCCCGGCACCAAGCTGTATGGGCCCGAGGGCCTGGAGCTGGTGCGCTTCCCGCCGGCC
GACGCCATCCCCAGCGAGCGACAGAGGCAGGTGACGCGGAAGCTGTTCGGGCACCTGGAGCGCGGGGTGCTGCTGCACAGCAGCCGGCAGGGCG
TGTTCGTCAAGCGGCTGTGCCAGGGCCGCGTGTTCTGCAGCGGCAACGCCGTGGTGTGCAAAGGCAGGCCCAACAAGCTGGAGCGTGATGAGGT
GGTCCAGGTCTTCGACACCAGCCAGTTCTTCCGAGGTCTGTACCGTCGTCACCTTGCTGCCCCCACATCTTAGAGATCACGCCTCCTATCTGTG
TGCCATTTGCAGCTCAGGGTGGCCCTGTGGTCTCATGGAGGGATGTGGAGGAGGAGTGAGGGGCATGGTGTGGCAAGGAGGTGCTCCTTTGAAT
GGCACTCTGCCCTCTCCACTGAGCGATCCTGGGGTGCTTCTCTGTGCCTCAACTTCCCCATGTGTACAGTGGGGGTGCAGAATCAGTACCCTCA
TCAGGTGATTGTCGGGAGGGTAAAGGAACTTAACCTCATGTACCTTGGAGTATGTTCCAAGGATGGTCCCTGAGCGCTGGCTAGAGACACAGAG
TCTGAGGCCCTGCTCCAGCCACAAGATCCGAACCTGCATCTTAGCAAGGTCCCTGGGGATCTGTGTACAGGTTTTGAGACACGCTGACTTTCCG
CACACTAAGTGCTCAGGATGGCAGCTGCACACACTAAGTGCTGCCTGTTAGCTTTCGTTACGCTGTAGGGAGGATGTGTAGGATACCAGCCTGG
GTGTCTCCTGGAGGGTTAGGATGGCGTCTCCCTTCTCCACGTCCCCATGCTCTCTGCTCCTCTCCCTGTAGCAGCACAGCCCGAGATAGTGTCA
GGTCTCAGCTGCCACTGGCCTGAGAACTGCCAGAGGAGGGGCCTGGAAGGGCGGGTGCAGGGGTATGTGTGAGCTCAGGGGCATAAGCCCTGAG
GAATCCCCCTAGTGAGGAGGTGTGAGGCCGCGGTTATCACCCCTGAGCAGGCAGAGCGGCACAGAAGTGCGTCCTGCAATGTACATTCCCGGGC
CTACCTCACATCCTCTGATTCCATGGGTCTGAGGCGGGGCCCAAGATTCTACATTTCTAATGAGCTCCCAGGGAAGGCGACTGCTGCCGGTCCA
CCGGCCCACTTTGAGACCCTTTCAGTTGGCTGTCAGAGATTCGGGTGAGGGCTGCAGCCCTCCCTGGGTGTCCTCAGGTCGGGGTTGCCAACTC
AGTTGCCTCCAAGGGCCAGGCAGGTAAGAGCAATGCACGAATTGAGAGATAAGAGAGAGCACTGGGCAGCTGTGCCCATGGAGAGGCGTTCAAA
CGAGGCATTAAAATCCCGGCAACAACCTGGAATGGCCAAACGAACAGCTCCTTGCTTGGAATTTGGCCCAAGGGCCACCAGTTTGAGATCCCAT
GGTGCCCTGGCCTAAATGCTACAAGCCCTGGGCCTCCTGATCCCCCAGCCCTGCTGCTGCGGGAGTTGGAGGTCATCTCGGCCTTGCTTGCAAA
CACCCTCTGCCTGTGTCATTCCAGAGCTGCAGCAGTTCTATAACAGCCAGGGCCGGCTTCCTGACGGCAGGGTGGTGCTGTGCTTTGGGGAAGA
GTTTCCGGATATGGCCCCCTTGCGCTCCAAACTCATTCTCGTGCAGGTAAGTATGGGCAGCTTTTTTTTTTTTTTTTTTTTTTTTGAGATGGAG
TCTTGCTCTGTTGCCCAGGCTGGTGTGCAATGGCGTGACCTTGGCTCACTGCAACCTCCGCCTCCCGGGTTCAAGTGATTCTCCTGCCTCAGCC
TCCCGAGTTGCTGGGACTACAGGCCCGTGCCACCACGCTCAGCTAATTTTTTGTATTTTTAGTAGAGATGGGGTTTCACCATGTTGGCCAGGAT
GGTCTTGATCTTGTGATCCTCCCAGCTTGGCCTCCCAAAGTACTGGGATTACAGGCGTGAGCCACCTCGCCCGGCAGTCTGGGCAGCTTTGAGC
CCTGCATCCAGGTCTCCTGGCCCTGTCATGTAAGGATCAAGTTTTGGGCTGGAGAAGAGGACACAAGGACAAGTTTCCACCTGTGTAGGAGGCA
GGCCTGGGCAAGACCTTCAATATGCGGGAAGCGGATTCTTGCCATCTCCGAGCCATCTTCTGGTGTCTGGGACGCGCACAGTCTGTGTGTGTGT
GTTTTCTTTTTTCTTTTTTGGTTTTTAAATCTAAGCCTCTTCTCCAGAAAGATTCTACCTGTTCAGTTGCCCGAAGGTCTAAGTGACAGATTAG
GGCATTGCCAGCCCTTATTTCATGTAGTCAAGGGAATGAATCTCTAATGGTGGGATCCTGGGTGCTGGCTGTCCCAGCTGGGACAGTACTGGGG
AGTATGGAACAGTTTTGGCAGGAGTACTGCTTGCCCTTCCTTGGCATTCTGGCTCATTCACTTGGGACTCACGTGGCACTGGGGTCATCAGAGG
ACCTGGCTAGGGTCAAAGACAGTGCCCACCCCCTTTGGAGCCTCCGCCTCTGCCTCTGACTTTCTGCACCTCCCATCTAGATTGAGCAGCTGTA
TGTCCGGCAACTGGCAGAAGAGGCTGGGAAGAGCTGTGGAGCCGGCTCTGTGATGCAGGCCCCCGAGGAGCCGCCGCCAGACCAGGTCTTCCGG
ATGTTTCCAGATATTTGTGCCTCACACCAGAGATCATTTTTCAGAGAAAACCAACAGATCACCGTCTAAGTGCGTCGCTTGGGCGCCCCACCCC
GTCTGCGTCCTGCATCCATCTCCCTGTTACAGTGGCCCGCATCATGATTAAAGAATGTGGATCCCTCTGTCTGGGGTGGGATGCCTTACTTTGC
ACTTAATTTAATAAGGGCATTCTCGGAGGAGTAGACGTTTAATACGAAGTGGCGGCATAGCCCTGCCGAGATGTCGGTGATGGCCTGGATGCTG
TAACCACAACCTGTGGCTAAAAATTTTATTTTCTATCCTTTACCCGTCATTATCATTAGTTGCTATGATTCTTTCTGCATTTTCGGTTAACTAT
CATTTCCAAAGACTTGTCATTCAGTAATATTAGCAGATAGCTGCTTCGATAAAGGAATTTGGAGTTTAAAAATCAACTTGTGAAAACAAGGTTG
TTTTTGTCTTTATCTTTTGTTAGAGTTATAGATTTATGATTTCATAGGCTTGATTCTATGTGAAATATCTTTTTACTTTTATGCATTTTAATAA
GATTTAAAAATATTTAGATTAAAGCCCCCTTTAATGAGTACAAGAAAAACTCTTGGCTTGTTAGAAGAAAGTATATTCTTTCTAGAATTTGGTG
CAGGAATATGTGTTCATATCCAGGCAAACGGGTGTGTTTTTATCTTCAGACAATGAAACCTTCTCCTCTGGGGCTTTGTTGCCAGGAAGATTAG
AACTAAATTTATTTTTTTCATTTCTGTCATGAAATCATTCCAGATACCTCTTTTCTTCTTTCCAAATGGTTTTCACATGTGTTTGAAATATTTG
TACTTTGAATTGTCGGATTTTCCATGTCCTCCTTTCTCCTTTGTGCCCAGCCTGAGTCAGCACCATCCCGCATTCAGAACCTCCCAGTGAAAGG
GCAGCCTTCATTTTGAGAAGGTGGAAGGTGTTAGGGTTTGGGAGACAGCTCATCCAATCTCCCAAGTCTCATGGTGGATTTGTGACTGTGAGAG
TTTCCGGTTTAAAATCTGAAAAGCCAGATATGCCTGTTTCCTTTTCCCAGCACCATGCCTGTGGAGGGGACAGTCAGACCCAGAGGTCCTTTAC
GTGTGGATGGAGTTCACAGGCGAATAGAGGAGAGGACCAGGGGACGTGGCTTGTCCCTTTTGTCCAACAAAGCATTATATTTTTAAGAATGGCA
GACCTGTTTGCTGAAGTGTTCATAAGATAACAATAGGCTTGAATCTCCAATTCAAATGAATGTCAAAGCACATATCTTTAATATGCTGAATGAA
TATTTATTTTTGTATCCATTAAAACAGTATATTGATCTCTTTTATTCTTTATTAAAATAAAATGCTCTTTTTTAAAGCTGCTGTGTACTGTATT
TTTTTAGTCACTGTCAAATATGATGTAATTCTCACCAGATTCTAGGTTCTGTAAAGGGGGAGTTACTGCTGCAATGTGCAGTGTTAATTCAGTG
CACTGGACTGAAACAATATCGCACTGGGATTTTAAGGATTTTTTTTTTTTTTTGAGACAAAGTCTTGCTCTGTCACCCAGGCTGAAGGGCAGTA
GTACGATCTCGGCTCCCTGCAACTTCCACCTCCCAGGTTCAAGCGATTCTCGTGCTTCAGCCTCCCAAGTAGCTGGGATTACAGGCATACGCTA
CCACATCTGCCTAATTTTTTTTTTAAAATTAGAGTTGTGATTTCACCATGTTGCCCAGGCTGGTATCGAACTTTTGGCCTCATGTGCTCTGCCC
CAACCTCTCCCCCAGCCTCCCAAAGTGCTGGGTTTACAGGTGTGAGCCACCTCACCCAACTCCTGTTTTAAGGATTTTTCTTTTTCAACCTATC
CCTTAAACAACAGCAAAAAGATACGGAGACTTAGACTGATCCTATGGAATGAAAACATTGGAGAATGTTTTTATTCCGAATGGGGGGCTGTTTG
GGTTTCTGTGAGCTGACAGATGAGTGTGCGGAAGGGTGTGGAGGAAGTGGGGTCTTGTGCTGATTTCATCCTCCTGGATGCAGCTGGGGTGATT
TGTACGAGGCGTCCCTGGTTGGGTCAGCCACACGTGGCTGGAGTGTGTGTCCTATTTACGCACATCTCGCTGTGCTAGGCCCTCAGGATACAGC
AAGGACATGAGGGACCCAGGTTGGCAGTCACAGAGATGACTTCCAGCCTAGTAGGACATTCCCATCCATCAACACAACAAAACCCATCAATTCT
GGGAGGTGCAGGGCTGGCCAACCCAGGTGGAGAGAAGTTCCCCAGCAAGCTTCATCCGCAAGGCCATGTCTGTTCTCTCCTCTGCCCTCATACG
AGCCCAGTGAGACTGGGCCTGTTCTTCATTTCTAGCTTACAGATGAGGAAACTGAGGCACAGGCTCATGCGTGGCTGACTGAGAGCCATCTATG
TCCCAGGAGGACAGCTTCGCCTGAGAGGCTTCATGAGCAGATCTCGCTGCCATCCTTGAGCTGGTGGGCTTCCTAACACCCCACGCAAGAGGTC
AGCAGCTGGGTGCGTCGCTCACTGTCTTAGGCATCTTTGCCATGAGTCACACTAATGTCCGCACGCTGCAAGTAGGAATTTTGTTTACAAGCAA
GCTCTTCTCCATCCTGTGGATTCAAGGCCAAATGTGGAAAGTTGATATCGTCTGTTGTCTCCCCAGAGTTCAACGCTCTCGTGCAGACGGTCGA
CAAATCCTTCCTACTCAACTTCTTGCAGCAAGCTCGGGGAGAGGCGGGAGAGGGGAGTGTTTTCATTTGCAGAGGAGGAAATTTGGGAACAGGA
TGCTTCTTTAAGAAGTCGGGTTTCTAGAGAATGCTGTGAGGGCCCTGGATGTGAACTGACTTTTGAGATGCTGACCCCACACTGGCCAGTTAGC
TCTGGGCCCTGGAGGGAAGCTGGTGGGGATGGGCTGACGGGACATCCTGAAAAACAAGCCATCTCCACTCTTGGTAGTTTAAAAATGTTTTAAG
AAGTTAAGGTATTTCAACAATTCCTTTCTGAGTGATTGCCACTTAGTTCATTAACTTTTGCAAAATCCCACTTTGGGAGGCCAAGACAGGTGGG
TCACTTGAGGTCTGGAGTTCGAAACCAGCCTGGCCAACATGATGAAGCTCTGTCTCTACTAAAAACAAAAACAAAAACAAAACACAAAAATTAG
CCAGGTGTGGTGGCAGGCACCTGTAATCCCAGCTACTTGGGAGGTTGAGACAAGAATCACTTGAACCCAGTGGGGTGGAGGTTGCAGTGAGCCG
AGATCACACCACTGCACTCCAGCCTGGGTGACAGAGTGAGACTCTGTCTCAGAAAAAAATGTCAAAATCCATCTGGGACACAACATTTTTGCTT
GCCCTCGTAATGTCCAGAAGGCTGGAGATGATGACCCCTGGGTCCAAGCATCCTCAGGATCCGGTGGGTCCTAGAAATCCTGGGAAAATCTTCC
TGAAAGGGCTTCACCGGGCAGCCACCCATGCCTGCCACAGGGACACTTTCTCTCCATAAAGAAGCAGCTGTGGGAATCAGGAAGAAATGACTCC
TGTGCATGATTCAGACTCTCCATAATAGAAAGTTTTGCAACCCAATGACTCGGAAATGTTTAGAAATTCTAAAGAATAATCTATAATTAATGAC
TGTAATTTTAACAACCCAGTGGGCTGAGAGTGGGGTGTGGCAGTTTCTCAGTGGAAAATCTGGCTGCTTTTACTACAAGTAGGAGGAGAATGAC
AAATATCCTGGCCCCAGGGCACACCTGATCTCAGGCTTTCTCTTCAAGCACACCGTTCATTAATCTGTTAAAAGGCCTAGCTCATGGTAAGAAG
CCCATTTAAACCAGCATTTCCCAAACTTATTTGACTTGACGTTTTGCCTTGCAGCGTGTCTGTGGATGAGAGGTGCCCACAAGCGTTCAGTCTT
TTATCACAATCCGACTGGAACATCTTAGGAGTTGAGAAGAGTGTGTACATTATTTCTTTCCTATTTTCTTTGGGCTACCTTTCAGTCTGGATGG
AGTCTGCCAGGGATGGGATGGCTTCAGTCTCCTCTTTATATGTAACTAACTATTCCTAAACTTAGTGGTATAAAAAAACGCTTTATTTTGTGGG
TCAAAATTTAGACAGGGTACAGTGGTGTTGGCTTTTCTCTGCTCTGCAATGTCTGGAATGTTAGCTGGGAACAGCTGAGAGTGACTTGAAGTCC
TGCAGATAGAACCACCTGGAAGCTTTTTCATTCACATGTCTGGTGCTTGGGCTGGAAGGAGGTGAGGCTGGGCACAGTTGGGATACCGATGAGA
ATATTGACTTTGGCCTCTCTATGGAGTTTGGGCTTCCTCACAATATGGCAGCGTCAGGGCAGTCCCGTGGACACAGGGGAAGCTGAATGGCTGT
TTGTGACCCAGCCATCACTCAACTGGACAAACAAGCCCTCCTAGGTTCAAGAGGAATGGACAGAAACACCACCTCTTGAGGAAGAAGTGTCCAG
GAATTTGCAGCCATGCTTTCAACCTGCCACGGGAGCCCCCGAAGCCTCTCCTTTGCTGCAATCCCACCTGCCTTTTATCCCCCGACCTCTCCTT
GGGCATCCTGATTCCTTTCTGACCCTATTCCTTGAGTCCCAGGCAGATGGGCCTTTTCCTCACTTTGTCTTGGGAGTATGGCAGTGGACTCTGC
CTACTTTCATAATGGAGCCTTTTTCTTGTCCATTTTGATGACCTCTCAGAGCAGGGCTCTGACACGTTACTGGGTTACAAAGACCCTCCCTGCC
AGGGCCAGCGTGCAGCACAGGGTGCTTTTGAGTTCCGGTGAACGGGGTGCTCTGGCTGGAGCCTAGTGCGAAGTTTCCCCTTCTCCGCCCATTC
CTCATCCCTCAGGGCACACAGGTCACCTTTCCTCGCCTTCTCGTCCCCACCTCTAAGGCTTGGCCAAAGTTTCTTCATAAAAGCAAGAAAGATA
ACGAAAGAGCCCCCCATGGGTTATGGTTTTTGTGGGGCCAGGAATGCCCAGTTTGAACCTCCAGTTCCGCCACCTGTAGCCGAGTGAAAGAGGC
TGGGTTATTCAGACACCCCAAGCCTCAGTTTCCCCACTTGTTGTGAGGCTTGAGTGTGCTAACACATCAAGGCAACCCAGAACAGCGCTTGGCA
GAGACTCGCAGTTTATCACTGTGAACTGTCGTTATTGGAAAGTGGGTGGAGTCGGGTTTGGATTCCCCCAGGAGCAGAGACAGAAACAAAAGGA
TTCAAGGTAAGCGGCCTGTATGGGAGGTGATCTCAGAAGTGCTGGGAGGGGAAGGGGACCTGTGGCTTTAATGGTGACCCTGTGCTACTGGAGG
CCTGGGATCTCTGAGGAATGCTGAGGCCCAAGCCCTGCAGAGCCAGCCCCGGGTTGTTAATTACTTGGCACTTTCCTCTTGCCTTATGTGCAGG
GGTGGGCTCAGGCGACTGAAGTCTCAGACACTGCTGCAGGTGCTGGCAGGGGGAGTCACAGCTGCATAAACTGGAATGGGGCAGGTGGGGTGGG
GCGGGTAAGGGGTTGTGTTTGCTTCGGAGAGGGTTTGTCAGCACTTTGAAGGAAAATTTGTGTAGTGGCCGGAACCACAGATGACCCAGGGTTT
GTGTTCCAGCCCAGGGATCATTAGCTGTGTGCGTCACTTAAACTTTCTGTTCCTCAGTTTCTTCATCTGTAAAAAAGGGGCAATAATGTTACCT
ATTGGGAGGATTAAATGACTTAATAAGTATGAGGGGCTTAGAACAGTGCCTGGCACGCAGTACATACTAAGAAAGTGGATTTGCACATATCATT
AATGCCTCCCTCCCTTTCTTTCTTTCTTGTTTATTTATTATTAAATAGTTATAAGTATAAATAATTACAATAATTTATGTCAACGAACTATAGT
GTCAACAATAACTATAGGTAATTATTTAATAATTAGTAATTATAAAATAATTGATACTAAATTAACTATAGAATTATATAGTGCCAGAGTTGTT
TGGCTATCTTTAATTATACATGTAGTTATTTAATTTCACAAATAGTTATATGAATTATGGAAGTGAAGGTACGATGGTATAACTATACAATTAT
TAGATAACTTATCATAGTGGTATACATATTTATCATGCAGTTATTAAATAATTACAATGGAATGACTTATTCGCTCTCTGCGTTTGTGCAAGGG
CAAGGATGGCCACGTCCCAGCTCTATCCAGCCCCTGGCCCAGTGCCTGGGGTTCGGTGGCGCTCAGTTCACGCTTGCAGAGCGAGCGGCGGTGA
GTGGATGCGGTGGGGTCGGGCTGTGGTGGTAAAGGTGGCCGTGAACAGGAGGGGCCACTAGAGCACACAGACGTGAATGACATGGGGCTCCAGG
AGGGGCAGGAAGAGCTACAGAAACAGCATCCCCAAAGCTGCCTGGCACGGAAGAGGTGCTGCAGAAATGGGACTTCCCTTCCCATCCTCTTCTC
CTGATAAACAACTGAAAACATAAGAGCGAGATCTTGGGGCTTCTGTGAGGTTAAATGAACGAACAAAAGTCTTACAGCGGAAATCACTGAGAAT
CTCCCCTCCCCTGTCTTCCAAGGAGAACATGATTGTGAGCCTGCTCCTCCCTTCCTGGGGGGGTTGCTTCCTGCTGGGGAGAGGCTAAGTTGAA
CTCTAGGATCAAGAAAGGGAAGGAGGCAGAGAAAGGTGAGAAAGGTGAGAAAGATGAGAAGGTGCTCGCATGGAGCGTCCGGGCAGTACCAGGC
TGGCCCGAAGGAGGTGCGGATGAGGGGGAAAGGCTGTTTACAGATGTGGTGGCTTCTCCGTGTGCATTCACCTCCTGGGTCTCAACTCGTGCAG
ATGGAGGGTCTGAGTTAATCTGAGGTTACATTTGTTTGCTCAGCTATGCTTTTTCAAGAGGCCATTCCTCTGAGACTGAGCCCCATGGCTCCTG
GCTTTACATGAGTTACACGCATCTTCTTCTCCTTTTTTCTAAATAGTAAGGGGCAGAGAGAGTTAGAAATAAAAAGGAAAGCTGAAAACAAAAA
CCTCTCAGAAGAGACTCTGGCTGTTTTTTGTTTTTTTTTAATTTTTAAGTTTTTATTAATGCTCATCTTCCCTGAAGAGCCCTGGCTGTTTTCT
TGACCAGCTTCTGGAGAGAAAAATCACAGTGCATTTGAGTAGCTCCAGATGTGATCTCCCCATTCAGCATTTCCCTTCCTGTAGCATCTGCCGA
GCCTTCCTTCTGGCTTCTCTGCTCTCCGTGCCTGAAAGGAGACATTGAGCAATCCAGGCCAGTTCGAAATCCTGAGCCCAGAAATAAAGTGACT
GTTGCTTTTGCGTCCTTGCACGTTTGCCCCGGCTCTCAGCAGAGGCAGAAGGTGATGTTTGGAGGAAGCAGATGGCCCGGTCTACTGTACATTT
CAGAACATTTCAACTGCAAGGCTGGCTGGGGCTATTGCATCACTGAGCCCGATAGGGCTGCAGGGCAGAGGCAGGGATCCCTGTGGGTGGAACT
GCTGGGTGGCAGGACGGGGTGGGGGAGCTGAGGGTGGTGTTTGGAGAGGAGGGGGAGAAGGGGGAGACAGTTTGGGGAACGTGCCTGAATTCCT
ACCCAGGTCCAGTGTGGGTTGATGCAAATGGTGCACACGGGCTGAGAGGTCAGCTAGATCTGGGTTCCGATCCCGACTCCTTACTGATGAGTTG
TGTCCTTGGAAAATGACTTCTTCTCTTTGAATTTCAGTGTCCTTGACTATATACATGATGGATTCTTCCCACATCGCATGGATGTTGTGGGGAT
TCATTGTCCTGACCTCCTGGGGTGTTGGTGAGGATTAAATGAAATCATGATTTCGTTTGACATGCTTGGACAAGAGCCCCACACACTAGAAACC
CTGGGTGTGTGTTAGCTGTTGGGAAGATTCTCCTGACCGTGATGATGGGAGAACTCGGCATAGCCCTGCGGGAGGAGTGTTGGTTCTCAACAAC
TGCGGCTGTTTGGGGGTTGTTGGCTTGTACTCCCTCTTTGTAGAGGCTCCTCGCTCCTGGCTCAGGGCTGCTCCCAGGTGCACTTTCGGTGGCA
AGGCATTCAATTGTACACGCTGACTCAGGCGTGGTGAAAGCCAGCTGGCCCTCTGGACCCTGGCCTTGGTCCTCAGCCCTATTGGTTGTCCCCG
CTGCCCGGGATTGGTTGGCCCACGGGGAGGGGCTCTCTGCCTAAGGATGGTCTCCCCAGCTCAGTGACAGAGGGATGCTTAAGCCACGCCACCA
CCTTCGTTCAACTGCCAGCATACCTGAGTGTTTGAGTCAGCCTCTCTCCCTGTGGCCCAGTGACATGGGCAGCAATGTGGGAGGCTGCCCAGTG
GGTGGGGAGTCGATCAGACGGAGCGAAGAGATTTCTCGAAGGCCCTCTTCACCAGCGTAGCTTACGACAGTGCTGGAGCGCCTACCTGAGCAGA
CCACGCTCTAAGCTTGTTTTGCTGAACACCTTCCTATTGTCCCAGAATCCACCTGCTCTCCCAGGAAGACTGATCTCTTCCAGGGACCATAAGC
AGCTTCCCCAACAGGTGCCCCAGCGGGAGACCAGAGGGAGGGAGGAGACAGGTCAGAGTGCCTACTCCCGTTTTCTCCCTGAGTCAACGTTGTT
CCTCCTGAGGCACCGGCCCCCATACCGCCTCCTCCTGGGCTCCAGCAGCCATGCTCTCTCCTGGCCCCCCCTGGTCCCCTGCCTTTAGTGACAG
CTTATCCTCGTTCCTGCTCTGTCTCCTTTGGTTCCCTTAGACCAGGTGTCAGCAAATCTGGCTTGCAGACCGAATCTGGCCACAGAGCTGCAAC
GACAGAATTCAGCGACTGCAGCAGAGGCCGTGCGGCCCCCCAGGCCGAAAATATTCACTATCTGCCTCTTTCCAGCTTTCCAGAGAAAGTCTGT
GACCTCTGTGTGAGACCCACCCACACCCATGAGATTAGTCCCTTTGCAAATCCCTTCCTTGAATTAACCTGTGTTGAGTGTGCCAATGGCTGTC
TGGGACCTACCCGGCACGCATTCTATTATCCTGACGTCCTCTTAGCCTGGCAACATTCTCGTTCTCTCCATTTTGCAGATGGGAAAGCGGAGGC
ACAGGGAGGCTAAATAACTTTGATGAGATTAGGCACACAATCAGTAGGGGGAGGTCAGTTCCAGAGTCAAAGGCAGGTGCCACCAGCACCCCAT
GGCACTTCCTGTCCTGAGCTGCTCTTACTCGCTCTCGGGACGGTCATGCCAAGGAAGTCCCCTGTCCACAGCCGGGACGCCCTGGGTGGTGCTC
GTGGCGGCAGGGCCAGTACTCGAATCAGTGTCCCTACTTTGCTTCTGTGCCCCGGGTCCCCTTGATTGACACACGACCTGTCATCTATTCTGGT
CTCTGAAGGGCCTTTGTGCGCCTCTTCTGTGCTGCACGAGGCGCTGATTTTTACGGCCTGTCCTTTGCAGAGGAAGCTTCTCTCATGAATTTCT
CAATTTTTGTGGCAAGGAGGGTCCCCAAAGCCTGGACATGTCAGCAACACTCCTGTCTTTTCCAAACCTCTCCACGCATCGCCACCAGGAAGCG
GGGCAGCAGGCTGAAGCTGGGACCCTCACTCTGCCCCTTAGAATGTGAGCAAGGGAAAGTCCCAGAGCAGATCCCAGGGCACTACCGGGCCCTT
CCCTCATCTGTAAAGGAGCTCCTTCCTCCCAGGGCCAGAGGAGGCAGCGTGTGGTAAGTGTTGAGCAGGTGTAATTATACATTTAATTACTGCC
CTCACTAAGGAAAGTGTGCAGCTGTGTCCACCGGTGGGTGGTTCTCAACCAGGGGTGGTTTGGCCTTTGGGACATCTGGCCATGTCTGGAGACA
TTTTTGGTTGCCATGATGGAAAGCAGGTGCTACTGGCATCTAGCGGGTCAAGGCCAGGGACGCCGCTCGACACCCCATAGTGTAAAGGTTGGCC
TTCACCTGCCCAGCTAGAAGGATCCAACCCCGAATGTCAGAGGCGCTGGGTTAGAGGAAGGCCGGAGTGGCCGTCTGTCTTTGTGGAGGGAGGG
CCTGTGTCTGTCTCGCTCACTGTCACATCTCCAACACGTAGTGCGGGTTTCACAAATGGTTCTTGACACATGGGCGTGTGCTGGCTGCCCACCG
GAGCTGGTCAACACGGTTCCCACTTCTAAGGCAGGCAGTGACCTGTGCTGGACCTGACACGGGCTTTAGGGGCTCAGAGGATGGGGACGAGGGC
TCCATAGAGTGGGGGGGGTCAGCTCGTCCCTGAT
HUMAN SEQUENCE - mRNA
ATGGATGGGGGAACCGGGCGGCGAGACGGCGGCAGGACGGCGGCAGGATGTGTGACCGGAATGGTGGTCGGCGGCTTCGACAGTGGCTGATCGA
GCAGATTGACAGTAGCATGTATCCAGGACTGATTTGGGAGAATGAGGAGAAGAGCATGTTCCGGATCCCTTGGAAACACGCTGGCAAGCAAGAT
TATAATCAGGAAGTGGATGCCTCCATTTTTAAGGCCTGGGCAGTTTTTAAAGGGAAGTTTAAAGAAGGGGACAAAGCTGAACCAGCCACTTGGA
AGACGAGGTTACGCTGTGCTTTGAATAAGAGCCCAGATTTTGAGGAAGTGACGGACCGGTCCCAACTGGACATTTCCGAGCCATACAAAGTTTA
CCGAATTGTTCCTGAGGAAGAGCAAAAATGCAAACTAGGCGTGGCAACTGCTGGCTGCGTGAATGAAGTTACAGAGATGGAGTGCGGTCGCTCT
GAAATCGACGAGCTGATCAAGGAGCCTTCTGTGGACGATTACATGGGGATGATCAAAAGGAGCCCTTCCCCGCCGGAGGCCTGTCGGAGTCAGC
TCCTTCCAGACTGGTGGGCGCAGCAGCCCAGCACAGGCGTGCCGCTGGTGACGGGGTACACCACCTACGACGCGCACCATTCAGCATTCTCCCA
GATGGTGATCAGCTTCTACTATGGGGGCAAGCTGGTGGGCCAGGCCACCACCACCTGCCCCGAGGGCTGCCGCCTGTCCCTGAGCCAGCCTGGG
CTGCCCGGCACCAAGCTGTATGGGCCCGAGGGCCTGGAGCTGGTGCGCTTCCCGCCGGCCGACGCCATCCCCAGCGAGCGACAGAGGCAGGTGA
CGCGGAAGCTGTTCGGGCACCTGGAGCGCGGGGTGCTGCTGCACAGCAGCCGGCAGGGCGTGTTCGTCAAGCGGCTGTGCCAGGGCCGCGTGTT
CTGCAGCGGCAACGCCGTGGTGTGCAAAGGCAGGCCCAACAAGCTGGAGCGTGATGAGGTGGTCCAGGTCTTCGACACCAGCCAGTTCTTCCGA
GAGCTGCAGCAGTTCTATAACAGCCAGGGCCGGCTTCCTGACGGCAGGGTGGTGCTGTGCTTTGGGGAAGAGTTTCCGGATATGGCCCCCTTGC
GCTCCAAACTCATTCTCGTGCAGATTGAGCAGCTGTATGTCCGGCAACTGGCAGAAGAGGCTGGGAAGAGCTGTGGAGCCGGCTCTGTGATGCA
GGCCCCCGAGGAGCCGCCGCCAGACCAGGTCTTCCGGATGTTTCCAGATATTTGTGCCTCACACCAGAGATCATTTTTCAGAGAAAACCAACAG
ATCACCGTCTAAGTGCGTCGCTTGGGCGCCCCACCCCGTCTGCGTCCTGCATCCATCTCCCTGTTACAGTGGCCCGCATCATGATTAAAGAATG
TGGATCCCTCTGTCTGGGGTGGGATGCCTTACTTTGCACTTAATTTAATAAGGGCATTCTCGGAGGAGTAGACGTTTAATACGAAGTGGCGCAT
AGCCCTGCCGAGATGTCGGTGATGGCCTGATGCG
HUMAN SEQUENCE - CODING
ATGTGTGACCGGAATGGTGGTCGGCGGCTTCGACAGTGGCTGATCGAGCAGATTGACAGTAGCATGTATCCAGGACTGATTTGGGAGAATGAGG
AGAAGAGCATGTTCCGGATCCCTTGGAAACACGCTGGCAAGCAAGATTATAATCAGGAAGTGGATGCCTCCATTTTTAAGGCCTGGGCAGTTTT
TAAAGGGAAGTTTAAAGAAGGGGACAAAGCTGAACCAGCCACTTGGAAGACGAGGTTACGCTGTGCTTTGAATAAGAGCCCAGATTTTGAGGAA
GTGACGGACCGGTCCCAACTGGACATTTCCGAGCCATACAAAGTTTACCGAATTGTTCCTGAGGAAGAGCAAAAATGCAAACTAGGCGTGGCAA
CTGCTGGCTGCGTGAATGAAGTTACAGAGATGGAGTGCGGTCGCTCTGAAATCGACGAGCTGATCAAGGAGCCTTCTGTGGACGATTACATGGG
GATGATCAAAAGGAGCCCTTCCCCGCCGGAGGCCTGTCGGAGTCAGCTCCTTCCAGACTGGTGGGCGCAGCAGCCCAGCACAGGCGTGCCGCTG
GTGACGGGGTACACCACCTACGACGCGCACCATTCAGCATTCTCCCAGATGGTGATCAGCTTCTACTATGGGGGCAAGCTGGTGGGCCAGGCCA
CCACCACCTGCCCCGAGGGCTGCCGCCTGTCCCTGAGCCAGCCTGGGCTGCCCGGCACCAAGCTGTATGGGCCCGAGGGCCTGGAGCTGGTGCG
CTTCCCGCCGGCCGACGCCATCCCCAGCGAGCGACAGAGGCAGGTGACGCGGAAGCTGTTCGGGCACCTGGAGCGCGGGGTGCTGCTGCACAGC
AGCCGGCAGGGCGTGTTCGTCAAGCGGCTGTGCCAGGGCCGCGTGTTCTGCAGCGGCAACGCCGTGGTGTGCAAAGGCAGGCCCAACAAGCTGG
AGCGTGATGAGGTGGTCCAGGTCTTCGACACCAGCCAGTTCTTCCGAGAGCTGCAGCAGTTCTATAACAGCCAGGGCCGGCTTCCTGACGGCAG
GGTGGTGCTGTGCTTTGGGGAAGAGTTTCCGGATATGGCCCCCTTGCGCTCCAAACTCATTCTCGTGCAGATTGAGCAGCTGTATGTCCGGCAA
CTGGCAGAAGAGGCTGGGAAGAGCTGTGGAGCCGGCTCTGTGATGCAGGCCCCCGAGGAGCCGCCGCCAGACCAGGTCTTCCGGATGTTTCCAG
ATATTTGTGCCTCACACCAGAGATCATTTTTCAGAGAAAACCAACAGATCACCGTCTAA

[0281] TABLE 17

MOUSE NOMENCLATURE
ICSGNM Bmi1
Celera
HUMAN NOMENCLATURE
HGNC BMI1
Celera hCG23091
MOUSE SEQUENCE—GENOMIC
TAAACCAACCTCGTATTAAAAAAAAAAAAAAAAGAAAAGAAAGAAAGAAAAAGAAAAGGAGAAAGTTAAACTTTATACAGGATTTGTCTTTGAA
GTTATGAGTCCCTAAAGAAGTAATTCATTTATACTAAAGATCTTGCCATTCCTAACCGTACTTTAGATGAGTATCTCGTATTTATTTACGAAGA
CTCTATTGAGTAATTAAAGCCACGGACGTAGTCAGTTTAGGAGCACAGAATTTATATGACAGAGTGCTTTCGAAAGGTATTTATTCGCAGTAGC
ATATAAAATTTTTTAATAATCCTGTCAAATATGTTCATGAATAATTTATTAATCTCCCAATTCTTAACTACCGGGCGTGCACACACCCGCCTGT
GTCCTGCACATCACGCAGAAATCTACTGCCATGTTCCTGAAGTGACAAAGACAAGGTAAAACTGGTATATTTAAGATGTCCTCAGCCTCACAAA
AGGGCAGCGCTGCGGGTCAGGCTGGCGAGTTAACACACGCACTCAGTCTCCCGTTGTCCCGAAGCCCAGCTTCTGGCCACACTCGCGGCGGCGG
GGTTCCCGCCCCTCCCTGCACCAGGCCCAGTGGGGACACAGCTGGTGCGGTCCCAGGTGAGCCCCAAGCGGGACCAATGGGCGTCCGCGCTCGC
CGCGGCCGAGGCCAGCGCCTCCCAGACCGTGCGACAGCCCCGCGCGTCCCGCCCGAGGCCCGCAGCCCGGCTGAGACGAGAGGCCCAGCCGCCG
CCCGAGCTTCACCCGAACCCTCCCGAACNNNNNNNNNNNNNNNNNNNNNNNNNNNNNNNNNNNNNNNNNNNNNNNNNNNNNNNNNNNNNNNNNN
NNNNNNNNNNNNNNNNNNNNNNNNNNNNNNNNNNNNNNNNNNNNNNNNNNNNNNNNNNNNNNNNNNNNNNNNNNNNNNNNNNNNNNNNNNNNNN
NNNNNNNNNNNNNNNNNNNNNNNNNNNNNNNNNNNNNNNNNNNNNNNNNNNNNNNNNNNNNNNNNNNNNNNNNNNNNNNNNNNNNNNNNNNNNN
NNNNNNNNNNNNNNNNNNNNNNNNNNNNNNNNNNNNNNNNNNNACTTGGACAACAAGTATGAAAGTGGAAGCTGTTCTTAAAGCCCCCCCCCCC
CCCCAATTAACCACTACCTGGTTTATCTCGAAGCTGTGTGTGTGTGTGTGAGAGAGAGAGAGAGAGCGAGGAGAGGTGCGGGGACTTGAAGATA
TTAATGGGATTTTGATATTTCTGTTGTGCATGCTAATGTATGCCCTCCTATCAAGCTTCTTTGATGTATTTATGTTCATGGAGTCAATTGCTCT
AAAATGTCTTTTGAAAGTTGTTCATTTTGAAATTTACTGTGTAAACTACCTTCACTTTCTCCTTTGCTTTCACTCCATCCAGCAACCACTGCCC
CCCCTTTCTTTGAGGTATTTAAAAAAAAAATACTAAGACGAAATAAAAGAAGGTAATTGAAAAGAGAGTGACAGCAUATTATTGATGTATTCTC
TTTATTGTTTTGCAGTTAACCTTGTTCATCTCATCCATTTACAATTGAATTTTTGTTATATTTTCAAAAGAGGAAGTTTTACCAAAACCAAATA
TTCCTCTTAGGAACAGGCGCCTAAAGGATTTGTAATCATTAGCAATTAATTTATTTTAGATCACCCATACTTGAAACAGATCGACCCAGTCGTT
TTAAAGCATTGTCATGCAGCAGCTGCAACTTGCATCCTGGAGGCAGGAAAGCACCAAGTTGACAAGTCTACTCTAAGGTACAGACTTTATCTAA
TGCCCGCTTACTTTGAAGTGGTATCTTTGTCATTGTAATTTCACTTTTTAAAGATAGAGACTAAACCTTGCTTTATTTCCCCCCCCTCCTGCCC
CCTTCAGCACTTATTTAGAAGACTGTAAATTTGACCGAGAGCGAATAGAACTGTTTTGCACCGAGTATCAGGTTACTTACTTTAAACTTTTAAA
TTAACAATTAGTACCCACCCCCTTTTTTCCTGCTGTTTGCAAAACTGTGTTTTCTTTCTCCTTCCCCAGAACAATAAGAATTCTCTAGAAACCC
TACTGGGAACGTAGGTACTGTGTTAGGTGTCAAGCTGCGGAGCTTTTCCCTTGTGGGTAACGAATGGAGTGTGCTGATGGGAAACAAAACTGAG
CCAAAAAAATTGGGATCCTGACCCAAAATAAAGGGCCAAAGGGCAAGTGGAATAATTGAAGTTAAGCTAATGTTTTTTTCAAGATAGAGCCTGA
CATAATCTTAGTAGGTGTGCTTTCACTCTTTTGAACATGAAGATGAGGTTCAACAGTCTTTAAGTTCAGAGTGGAATGAAACGAGTTAACAAGA
GAAAGACACCATTGAGAAAATCCTGAAAGTTTTTCTGTAGATACTACAAAATTATCATTGTCTTTCAGTATAGGCAGATCTCTCCCTCATATAA
CTGATGTTTCTTGGCGCTTGGAGTACCAGATAAAGGTAAAGATAACAAGCTTTTCTGTAGAGGGAGTTAGAGGAACTTTTTTTTAAAAAGGTTA
GAGTTAAAGACTGATGTTTTGTGTTGTTTTAGACCAACCAACTTCATAAGATGTACCGACCTGGATATTTGGTCACCTTAAATGTAGAGGTATG
TATAGATCCTTGTCTAAAAATTATGTGTAATAAAAATTTTCATTTCCTTTATATAAACAAACATTTTTTTCTTCCATAGAACAATGATTCCCAA
TCCTACCCAGAGATTAATTTTAGTTGCAACATGGAACAGTTACAGGTACAGTATTAGGACCTTTAAATGTTTCTTTCAGTGGGCATTTGAGAAC
TGTTATGGAGACTTTATAATATTCCCAGCATCAGCTAATGAAGGTTGGTTTAGGTTTTAATGGCAAAGAGAGAATGGAAAGCAGAAATTTAACA
TAGATTTCACTTTTAAAAGTAACATAGTAACATCCCCAGTAGCCTGCATTTACTGGTGCCCCTAATTGAAAAATAACTTTAAAGTTTGAGTTCA
GCACACTTTCTTTCATTCCATCATGCATCTGACTCATAAAACTCAGCAAAAGTAAGAGATTGGAGAATGCCTTTCACAAATTAAACTTCCAAAG
TTTTAAGCAGGAGTTTTAAATTACCCTATAAAGGGAAAGTTCACACAAGTTCTTAAAACTGTTAATATTTTCAGTGTAAAACTGAAGAAATTAA
AGTCTTCGTTGATTGATGGATATGCTAACGAATTTCTTACCAATTAAATAAAATGAAGATCATTCCTGAAAATTTGAATGAAATTAAATGTTCC
AAAGACATCTGTAGTCACTTTACAGTAAATATTAGCGAAACTTTAAACAGAAAATGTGTGTGAATCATAACCTTCCTTAGACAACTTGAGAGAT
AATTTAGATATTCTCAGCCTGCAAAAATTCTCTTAGAAATTCCCTTTTAACTAGAACTTGAATACCTGATTGGAGGACCAGATCCAGCAGAAGA
AGCGCTTCTTTTCCAAAGGGCTTTGCGAGCTGTTGAGCTCCCGTGGACTCCTTAGGTGTTCTTCCTTCCGACTGTGTTCTTGCAGCTGCTTCAG
AGTTGCTGCTTCCTCACTTGTATGCCCAAGTTGTGACATCATTGTACATCTTTTAGGACTTCGTGGGGAAACTTAAGGATGCTTCAAAAAGCCT
GGAAAGAGCAACTCAGTTGTAATTTGGGGAGGCTGATGACCCCAGGAGCCTAGAGGAAAACCAGACGCGCCTTGTCTCCTGCTGGACCATCGTT
CGCGCGACCTGGATGTCATTTTCAGTGCAAAAAGAGCTAGCACCCTTTTGAAGTGATGCCAACCATCAATTTTGACACTTTTTTTACACATGTG
AAATGGTTAAGAGGGAGACTCTTAAGCATCTGGATTTTCAGTATTACTCTTGCGTTCCTTCTATCTTGAGCGTCTTCAAGCCCTATTAAAGTAT
CGTACCCTGAATAAATACGGTGGTATTCCCACAAGAAGGGCGGCATTCTGTTTGGAGTTTGTGTGTGACTTTGACGACTGAGTGTGCCAAGCAC
ATCTGCCCTGCGTGGGCTCGGACGCCTGCCTTGCCCCAGGTTAAGTGTTTNNNNNNNNNNNNNNNNNNNNNNNNNNNNNNNNNNNNNNNNNNNN
NNNNNNNNNNNNNNNNNNNNNNNNNNNNNNNNNNNNNNNNNNNNNNNNNNNNNNNNNNNNNNNNNNNNNNNNNNNNNNNNNNNNNNNNNNNNNN
NNNNNNNNNNNNNNNNNNNNNNNNNNNNNNNNNNNNNNNNNNNNNNNNNNNNNNNNNNNNNNNNNNNNNNNNNNNNNNNNNNNNNNNNNNNNNN
NNNNNNNNNNNNNNNNNNNNNNNNNNNNNNNNNNNNNNNNNNNNNNNNNNNNNNNNNNNNNNNNNNNNNNNNNNNNNNNNNNNNNNNNNNNNNN
NNNNNNNNNNNNNNNNNNNNNNNNNNNNNNNNNNNNNNNNNNNNNNNNNNNNNNNNNNNNNNNNNNNNNNNNNNNNNNNNNNNNNNNNNNNNNN
NNNNNNNNNNNNNNNNNNNNNNNNNNNNNNNNNNNNNNNNNNNNNNNNNNNNNNNNNNNNNNNNNNNNNNNNNNNNNNNNNNNNNNNNNNNNNN
NNNNNNNNNNNNNNNNNNNNNNNNNNNNNNNNNNNNNNNNNNNNNNNNNNNNNNNNNNNNNNNNNNNNNNNNNNNNNNNNNNNNNNNNNNNNNN
NNNNNNNNNNNNNNNNNNNNNNNNNNNNNNNNNNNNNNNNNNNNNNNNNNNNNNNNNNNNNNNNNNNNNNNNNNNNNNNNNNNNNNNNNNNNNN
NNNNNNNNNNNNNNNNNNNNNNNNNNNNNNNNNNNNNNNNNNNNNNNNNNNNNNNNNNNNNNNNNNNNNNNNNNNNNNNNNNNNNNNNNNNNNN
NNNNNNNNNNNNNNNNNNNNNNNNNNNNNNNNNNNNNNNNNNNNNNNNNNNNNNNNNNNNNNNNNNNNNNNNNNNNNNNNNNNNNNNNNNNNNN
NNNNNNNNNNNNNNNNNNNNNNNNNNNNNNNNNNNNNNNNNNNNNNNNNNNNNNNNNNNNNNNNNNNNNNNNNNNNNNNNNNNNNNNNNNNNNN
NNNNNNNNNNNNNNNNNNNNNNNNNNNNNNNNNNNNNNNNNNNNNNNNNNNNNNNNNNNNNNNNNNNNNNNNNNNNNNNNNNNNNNNNNNNNNN
NNNNNNNNNNNNNNNNNNNNNNNNNNNNNNNNNNNNNNNNNNNNNNNNNNNNNNNNNNNNNNNNNNNNNNNNNNNNNNNNNNNNNNNNNNNNNN
NNNNNNNNNNNNNNNNNNNNNNNNNNNNNNNNNNNNNNNNNNNNNNNNNNNNNNNNNNNNNNNNNNNNNNNNNNNNNNNNNNNNNNNNNNNNNN
NNNNNNNNNNNNNNNNNNNNNNNNNNNNNNNNNNNNNNNNNNNNNNNNNNNNNNNNNNNNNNNNNNNNNNNNNNNNNNNNNNNNNNNNNNNNNN
NNNNNNNNNNNNNNNNNNNNNNNNNNNNNNNNNNNNNNNNNNNNNNNNNNNNNNNNNNNNNNNNNNNNNNNNNNNNNNNNNNNNNNNNNNNNNN
NNNNNNNNNNNNNNNNNNNNNNNNNNNNNNNNNNNNNNNNNNNNNNNNNNNNNNNNNNNNNNNNNNNNNNNNNNNNNNNNNNNNNNNNNNNNNN
NNNNNNNNNNNNNNNNNNNNNNNNNNNNNNNNNNNNNNNNNNNCACTTGTGTCTCCAGCCTGCGCGGCTCCCGCGGCCGCTGCGCCCTTTCTTG
AGAGGTAGACTTTGCTGAAACGGGGACGGGATCCCGAGATCGGGCGCTGCCTGGGTCCAGTGGCTTCCCTCCTCTCCCGAAGAAAGGGCTCTGG
AGGTCTTTGAACCTCCAGCGAACGCCCCCATTTTATACGCATCGGTACTGTGGGGAACACCCATCCCGACGAGGTGGGTGTTACCCTCCGCGGA
GCCCCGACAAAAATGTTATTAACTTAACTTGGAGGGACACTTGTGTGAAATTGGATGGCTGGTAAGATGGCGGTTCCCAGTTGTTTCCAAGGTC
TTGTGCATTTGTGTTGGAAAGGGTAAAGTTTTCAAGCTGGTATTTGTTGGGAGTCGACGACAGGGGTTCCATACGTACTTGGGGCGAGCTCTCA
AGGAGGTGGGCATTTAAAATTTGAGCTTTGTTTTGGAGTGAAGCCCGTCACTGTACGTTAGCCTTGCTGAGCGCCCTTTCTCTCTCCACTCTCA
CCCCTCCTTTTTTCTTCTTTTCTCTCGAAGACACTACAACTTTCCCCTTTGCTGTGGGATGAGCTGAGACTTAGGTCCATTGCATTTTATAGAT
TTTGCTAAATGTCAGAATAGGTCATGAAGTAATGGGATGGATGCTTCCGAGAAGGAGCACTAACGCGTTGATTGCTTATGTTTACGTAGTCATT
TGGACTTGACAGCGCTGGAGCATCATCGTTTCCCCAGAGCTTTACAGTTAATAATTGGAAATAAACAAGGACAGAGACTTTGATCATTCCCAAT
TGCAATAAAAGGATTTAGTGGGCTTAGTGGTCACGGTTCAATATCTGAAAGAGAATTGAGCATTAACCCCTTCGCTTTAAAGTAGGCAAAATTC
CGGGCATATTTACCCTAATCCAGATGTGTGGTGGCAGTTCAAGCTATTTTTATAGGAACTCCCCCAACCTTTAGCGAGACGTTGTAAAACGTAG
TAAAGACTTGATACTAGAGATTGTAAATTGTTGACCACATGAGTAAAACCAAGTTCTGACACTATGTACATTTGGGTCCTAAGTACACTAGGGA
GATAAACGACATTTAATCAAGAGGTTCATTTTTCTGTAAAATTATTATTATATGATGTGTTTATAATCTACAGTAAATTGTATTTATTTCCATG
TCTTCTATGAAAGQGAAATAATTTACAATAATCTATGAGGGCAAATTATACTCTTGTAATAATATCTTTAAAACTATCTAAAAGATTGTTTATG
CATGTGTAGACACTCAAATATAATCACATACAAACTTTTGCAAGCCATGTAAGCATTAGGATATATTTGATGTCCAGTCTACCACTAAGCTCAT
GAGCGTATGTTAAGTGTTCAAGTAGGCAAAGTTCTCCCCATCAGTCAAGTCGCCCCCAAGTTTACCCACGCTTTCCTTTGAGCAGTGAGCCCCA
AGTGGGATTATAGAGATCATTTGCATTTCTTAGGTTGCAGTGATCAAGCTGATTGTTTATCATCAGAGCTTGCTTCTGTTTTCCTTCATATTGA
CATTACTGTCCTTAGGCCTCCAACTAAAAACTGACAGCTCCAACTGACTAAGCTGTAGCTTGACTATTGAGTATTTTCAGTGTTTTATGCTTGT
TGCATTTTTATGATTTATAGGGAGTTTCTATGGTGCAAGACGTTGTTTCTTAAGTCTGACCAAGCATTCTAGAAAGTCTCCATGAGGTTGTCAG
TACTGTCCAATAGGATAAAAGAATGAAGAATTGATATTTGTATCAATAACAAAGTAAGAATTGATTAGCATTATGAATGGTTCTAGGAATAGGG
CCAGATTATTTTTATTTGAGGGAGGACAGTTGTGTGAATTCCAATTTAAAGTGAATTTGAGAGACTTTGATCAAGTTCATGTGACTGAAATGTT
CAAAGAGAACTAACTAGTGGTCACCTTCTATTGAGGTTTGACTGCTCTTTTGCGTTAGTGTTTGCAATTTTATAATAGAATGTAACATGGAGAG
GAGGAGGCAAGATAGAGAGAGCCCTTTGGTGGGAACTTGATGATGTGTGAGTATTGGATATGGTTTCTTTCATATGCAGAGCATCAGCCTCACT
CTTTTTAGGAAAGAGCCTGTGGTTTCACAAGAGAGTTGCCTTTAATCACTAAGTATGGTTGAATTTACAGCTTGCTCCTTTTGAGAGTCATAAT
TTCATTTACTCCTTCTCAGCCTGCTTTCCTTGGATTGATGCTACTTGTTGACAGAATTCCGAACAAGTAATCCGGAGCAGCTCTGATTGAAGTC
ACTAGTTTCCCCTTCAGTCACTTTCAGAGAGGCTTGGTTTGGGTTTGGACCATCTTTAGTACCCATTCCTGTTAATTGCAGCCATTGGGGCATG
CTGGTTGCTAGTTCCCTCTTGTGTATTAAATTTTCCTTAGAATAAATCTCCCAGGTGCATCTAATTGCGAATTATGCAAATTCCTAGATTTTGC
TTACAGCAACTTTGGGGCTTAACTTTTGTCAGGTGTAGAAGGTCACCCTGGCTTTAGATTCTGTGAGGAATAAAACGGACATCCCACAGCTACA
TCACCTGAGGTACTTTCTGGTGTGGCATTGCTGACAGGTCTCAACTGTCAGTTTCTAAAATGTATCTGCTGGGATTATCCTTTCATCTTGTGAT
ACTGTATGGGACTTAGGTGAGAAAAGACATTTGCCCTTCCCCCCATCTTTACTCTGCATTTAGTTATGGGCATGGGCTCGTCTCATGCCTCTTT
GTACCTTGTTACTATACCACCCACAAAAGTAGTTTTTCTTGCCTCTAGCATAGTTTATTCAAATATTCAGTTCAGTATTCAGCCCTTCCAAAAA
CTTTCCATGGCTCATCCAATCTACTCGAGGACTTATTAGAGAAGGGAGCCTTAGAAGTTCAGTTCAATAAACGTCTCTGCAACTCCAGTCTTGC
TGGGCAGGGGCTAAGTGTACAGTTGGCAATTCTCAAAAGATCTCTAAGTAAAATTTCTGACATCGCGATTGATAACAGGACAGTCACAAAAAGC
CAAGATGAGAAAGTAATTCTTCCCCCCCAATGGTCATGAAAGAGATCCGGAGAGTGCCTGGAATGGCCGGTGCACTCTTTTTGGGGTTGGGACT
CAGCTGCCGGTCACGCGAGGATCGGCACCCTGCTTCCCTGCCCCGCCCCTCCCCTCCCCTCCCCTCCCCCGCGTCCGCCACCCCGCACGCCCGC
AGAGGCTGGGCTCGGCCAGCTCAGCGCAGAGTTGCAGAGGTGGCCGGATGCCAAGTGTAAGTGTAAGTTGCTATGGAAACCCCAACGGAGGCGA
CTTCCGAATCCGGAACAAGACCTAGCCCGCGGCACTTCGGGATCCGCCCCTCACATCCCCGCTCGTGTCCGCGGTGCCCAGGCCTCAGCCGAGG
CCCACGAGGTGCTTCTTTCCTCCCTACCCAGTCCGGAAATGCCGGGGATGCAGGAGGCTCACTGAGCGCTTTCCCTTTGTGGGGCCTGAGCCCT
GCCAGGTTCTGGTTGCTTGAGCCGTCGAAACAAGAATCACGAAGTTTTTGACTAGAGTGCAGGAAATTCCACAGTAAATTCGGAGACTTAGATC
AATAGTGGCTACTGAATATCTGTGGCGGCGGCCTCGTGGTAGCCGCAGCAGAGCTGCGTGGTGTCTGCAGAGCTCGAGGACAGCTGAAGAGAGA
CAGAGCAGAATCTACTCAGTTCTCAGCCCCAGCCCCCAGCCCTTTTTATCTCGCTCCAGGAATGACCCGAAAGGCCAGAAGTAAATTTAGTTGG
ATCCTTTTACACCATTTAACAGTGGAGGTTATTCTGATCTCATTAGTAAATTCCTTTTGTGGAAAACGTTTAGAGAATCCAGCTGTCCAGTGTT
AAATGAGTTTTATAAACCGCTCAGCATTCAGGGTATACAGTTACTTCCACTTGTGGAGATAACTCAATTCTCGTTTTTTAATTATAGCCAATAC
TTTTTTGTGTCTTGCAGGATCTTTTATCAAGCAGAAATGCATCGAACAACCAGAATCAAGATCACTCAGCTAAATCCCCACTTAATGTGTGTCC
TGTGTGGAGGGTACTTCATTGATGCCACTACCATAATAGAATGTCTACATTCCTGTAAGTACACAGTGTTCGCCTTCTTGGGTCTGTGCATTTC
ACAGCTCATCCATTAAAACCAACACCATTTCCACATTCCTTGAAAATGTTAGTTCATAACTGTGAGGTTTACTTTCTTTTATATGTAGTGATTT
GTTACAGTTAGGCAGTATGTAGTTTTCAAGTTATTAATCGGTTTCACTTTTCTACTTTGAGAAAACCTAGTCATTTCCCATCCTTGAATTTTCA
GTTCTGATACAATTAACCTTTGAACCTTTACTTTCTAAACTCACAAAACCTTTTTATGTTCCTATTTCTAGTCTGTAAAACATGTATTGTACGT
TACTTGGAGACCAGCAAGTATTGTCCTATTTGTGATGTCCAGGTTCACAAAACCAGACCACTCCTGAACATAAGGTAGGAAGTGCTGTTGTCCC
TGGTGGGAAGTGCTGCTAGCATTCCTGGTTTTGCTTTGCAGGACGTTTATTTCTGATATGTGTGCTTTATAGGGGGTAGAACTTTAATTTCTTG
TTATTTTAATTACCCTGTTTAGACAAAGTTTGGTTTTGTTCAACTATTTAAAAGGTGTCTGTCTTTTAAAACTGAGTTAGTTTCCCTTTTTTGT
GCATAACTTTATTGACTTAATAACAGGCAAGAAGAGATTTTTTTCCCCAACATTTCCTTATTCTTTATTCTTGCTAGTGAGAGAATTCTCTGTT
ACATGAAAGGCCTACCTCTCTTTACTCTTGGATGTGAAGAGTTAATTACTGCAGGGCATCTGCAGGGTGGAGAACGAGCCACAGCTCTCCTCTC
TCCTCACAGGACACTCTTACACTCCACCACAACACCTCATCACTGTGCCTCAACACCAGCATGCCTACCCAAACCTTAGAACAGTTCTAGGTTT
GCCATATTAACTGTTTCTTACTTTTTCAGGTCAGATAAAACTCTTCAAGATATTGTATACAATTTAGTCCCAGGGCTTTTCAAAAGTGAGTAAA
TGGATTCACTGAAGTTTTTAAAGTGTTCGTTTTACCTATTATAGCAAATTCTACATTTCCCTTCTCACCCATTTCAGATGAGATGAAGAGAAGA
AGAGATTTTTATGCAGCTCACCCGTCAGCTGATGGTAAATTTTGGGGGGCAAAAGACATTTTATGTCAGGAAGAAAATTATTTAGTAATTTAAA
TTATTTTGTTTAAATTCTCCCTTCTATTCTCTTATACGTAAAATATTCAGTTTCTAAAATTGACTTTCAAACTGTCTTTATAGCTGCCAATGGC
TCCAATGAAGACCGACGAGAAGTTGCAGATGAGCAGAAGAGGATTATAACTGATCATGAGATAATAAGCTTGTCTATTGACTTCTTTGATCAGA
GCAGGTGAGTGCTCCTACAAAGCTACTGTGTGCTAATGTAGTTGCTAGGTACTTTGTATCACTTTGTATTTGTATTTTCTCTCTCTTAGATTGC
ATCGGAAAGTAAATAAAGAGAAGCCTAAGGAAGAGGTATGTTCTACTTGGGAGTTTAAGTTGTCCTTTAGAATATTAAGGACTTATATGATATT
ATTAAATGGCCAAGTTGTGTTAGGAGTTTGTTGAGTTAGTATTTTTAATACTAAGTTCAAAATGTAACTAGTTGAGAGTTGTTGCATATTGGTG
TGACTATTAGTATCTTTTTATCATATTTAGGCCATTCAGACTTTTTTGTTTTACCTGAAAGTTAGGAATTGGAAGAAAATTACTTTTGTAAATG
TGCTTCTAGGTGAATGATAAAAGGTACTTACGATGCCCAGCAGCAATGACTGTCATCCACTTGAGAAAGTTTCTCACCACTAAAATGGACATAC
CCAATACTTTCCAGGTACCTACCTCATGCATTTTGTGCAGATTTTCAAATTTAAATGTTTTTTTTTTTTCATTCTGGACCTTAAGAAATTTTAA
ATTTGGTAGCAAAGTTTAAGATACCTCTTAAAATGGTTCGTGAAGATGCTTTTTAATCGTTTTCGGTTAGATCTTGACGACAGAAACATACATA
TTTATCTTTGTTCTTTTGCCACTGAATACTTCAAATATATTTCAATAGATTGACGTCATGTATGAAGAGGAACCTTTAAAGGATTACTACACGC
TAATGGACATTGCCTACATTTATACCTGGAGAAGAGTAAGTAGCTCGTTACCTGGAGGCTATGTTGGCCCAGTACATATAAAGAATTGAGTGGT
TTTTCTTTTTCTTTTTAATGTTGTAGAATGGCCCACTACCTTTGAAATACAGAGTTCGGCCAACTTGCAAAAGAATGAAGATCAGTCACCAGAC
GGATGGACTGACGAATGCTGGAGAGCTGGAAAGTGACTCTGGGAGTGACAAGGCCAACAGCCCAGCCGGAGGTGTTCCCTCCACCTCTTCCTGT
TTGCCCAGTCCCAGCACTCCAGTGCAGTCTCCTCACCCACAGTTCCCTCACATTTCCAGTACCATGAATGGAACCAGCAACAGCCCCAGTGCTA
ACCACCAATCTTCCTTTGCCAGTAGACCTCGAAAATCATCACTAAATGGCTCATCAGCAACTTCATCTGGTTAGGACTGTTAAGGAAAAGATTT
TTCAACCCCCTGATTTAGATACCTTCATTCATTACAGCTTTATAGATGCTAAATACATGTGACTGTCGTCCAGTTTGCTTCCTTTTGTAGTGAC
TTTAAATTTGGCCATAAATCATGGACTAGATCTGATACTTCATATGTATGTTAAGTGGAAAGATTGATTCTTTCTCTAAAGAATTGGATTCTGA
GAAGGATTCTGTGTTAGGAAAGATGTGAAATGATTTCTGTGACCACTGTTTGGATCTGGAAATGTTCTACAGTGGGTAGACATTGGGCCATAGT
TTGTTAATCTCAATTAATGCCTACATTACATTCTCTTTGATTCTTCTTCTTATTATGCTGTTCTGTGAACCTGTAGAAAACAACTCCTTTTTAT
CTTGAAATTCAGCAAATGGAAAGAATAAGCATAGAATACTCCATTCTGTGCAGCCACGTCACTGTGAATAACAATTTCTTGCATATTTAGCCAT
TTTAATTCCTGTTTGATTTTTACTTCTCTGTTGCTACACAAAATGATCAAAGGAAACTTGTTTTACAATCTGTATGCCTAAAAAGCGGCTACTA
CCGTTTATTTTACTCACTTGTTGAAATGATTCACTTTTGTAAGAATCACATCCCATTATGCTTGTTGTACAATGCCATATTGGTATATGACATA
ACAGGAAACAGTATTGTATGATATATTTATAAATACTATGAAAATATTGTGTTTCATGCATTCAAAAACAGTTGTAAACTTCTCCAAATGGGTT
CGACCTTTGCGGATATCACAGTGCACCCAATGCTGAGGCTTACCACCAGCACAGAATTTGTTTTAATGTTGATAACCAGTTTCAAATTCTTTTT
CACTTAGAAGCAAATGGCAGATCTTCATAGTTCTGGCTTTTCTCCAATAAAACTTTCAAAATTAATATTGCAGTAATGAAAAATTTTAACCAAG
GCAAATATAGTGTTTTAATTTTCCATTGGTTAAAATAGAATTAATGTTTTTAAATTCTGTTTATCAGTGGAATTCTAAAATAGATTTTAAAGTC
AACCAGCTAATTGCTGAAGTAAACCATTTTATCTACAATTTTAATTTAGTGTATGTGGCACAAGTGTAATTTCAAATTTAACAGTTGTTTTCAT
AGTTAAAGGAATCTGCCTTCACTGTAACGTCTGGAAACAGAAACAATTTGTTATGATTTCTACAGGGATTTTTAATAGAGCAAACATGTTGAAT
TTAAAATATGAATCACCCCTCCAAGTCTCAGATTTGCTTTGGTCGAACTTAGCGTGTGTTTATCAGCCATCAGTTATTTGTGAGGATGTTAATT
CCGTATGAATATTGTTTCATGTTTGTATGGGAAACTCTAGCTAAGCATTTCATTGTCTGCAGTCTGCAGAAGAAGCACAATTGTATTGCTTTCT
CTTGCTTGTAGCCATTAAATCATTACTTTTACACACATTGCTGTTAACTTCTGCTTTCTTTAAACATTTAGTAAATGATGTTTTATGAAGCCAC
AAGATACATATATTTTTATTTTGACCTAAATTTCTACACTCCCATTGTGTGTGTGTCATTTCTAATTATAGATGTAAAATTAAATTTCATTTTT
AATTGGAAAATTCAATAAAAAGATATTCATTTAGAAAATACTATGCTCTTTAATTAAAATTTTGCTATCAAAACCACAGTCTGCAGAAGTTTTG
GGAACCCTGTAGTGGATTGTAAGAGCTAAAACCTAAGGAAAATACTTTGTTGTCTTCAAATGATGTTGTTAGTAAATGCTTTGTTGTATATTGC
TCGAAAGCCCAATGAAAGAAGTATCTGCTTATTTACAATCTTTGAAGCAAAAQTrACCAATGTTTGCCAATTTTGGTGAATTTAACTCATTTTT
CTAGACTTTTCTCCAGGTTTTCATGGTGTTACCTAAGACAAAAGACATCTCACCCTCTATGATGGACTTACTTCTGAGAGTGCGTTTGAGGCAC
TTATGGCTTACTAAGCAGTGTGTCACCATACTTGAAAACACTTCCATTTATTGTATCTGGGATGAGGCTTTTTACCCTTACTCAATTTGAAAAT
TGCTTAAGCTTAAATGATATTTCAGTCAAAATTTGTCTTTTAATAAAACAACAGAAAGATGCATCGTGGTTTGCTTCTTAAATGACCAGTCATT
GCTGCTCTTACCGTTAAGATTTAAAACCTTTCCCAACTTTTTAAAATCTTCACCTTAAGAAAGCCCCAATGGAATCTCCTTTGTAATTTACCAC
ATTAGGGTACGTCAAAAGTTGGCTTTAAAGTTTGACTTTCACTCCTAAAGGTATTCTAGCATCCTAGAATACAAAGATAATAACCAAGTAGTCT
ACAGAAAATGCCTAAATTGATCTCACAGATACTAGTTTAAAAGTAGAAAGAGAAATGGGGCCCACTGCTGTTGTGTAAATAGTGATCTATCTTG
CTTTACACATGCATAATACTTTACAAGTACTTGCACCTCCTAAATTGCCGGCCGTTAATTGCCCTGAGTAGAAAGGGGTTGCCCTTCAGTTGAC
TTAACTAGTTAAGCACATTGCCTCATTTCCATATGCGCATGTTCAGATGTTACGGTCTCTGGAAGTAAAGTACAACAGAAGCAAAGCTTTCCTT
CATCTTTTCCTGTTTTCCCAAGCGTTGGAATTAAGCTCCTGGTGACTTCTTTCATTGCACTGTACTCGTTGTGTGGGCCCATCAAGAACAAATT
CTCTTCTGAAACCTTTAAATGCCCACAGGAAATACTCCTTGCAAAGGTCAGCAAGAAGGGAAGACACCGTCTTGTCTGTGTGGTTTATGACACA
GGTTTAGGCGGAATAGGATTCACCTGGCCTGTGGCACCAGGGACCCAGTCAACACCCCCAACAAGTTGTTTTCGCTTTCTGTTCAAAAGATTTA
AGACACTTTTCCTCCCCTTGCTCCAGGAATGACAGAATGACAGAAGTTCTTATAGTGCTTACATGAGACAGACTGAAACAACAAAAGGCCGTAG
TCAAATTGTACTTAAACTAGCTTTCCATCATGTTAGAACCCTTCTCAAAAAGTGCATATCCCTTAATACACCCAATGAAGTGGAACTTGGACCC
CCTGCTCTAATTTACAGCTCTTAGATATATAGCACTTAAGGAAGTTATCTTCTTGTATAAACAGGTGGTTGTTTCCAAAATCTGTCGTCCCCCC
CCCATCCCGACATCTGCAATAGTGGCACCCCCACCCCCAATCCCTTGTTTCCAAGTGTGACCAAGGATTTATGTAAGGAAGAGAAACAAGTTAT
CACACATTCCACCCTCCACTAAGCCTGGTGAGAAACAGTCCGGAGGAGTCCTTGAACCAGACAATCACACACCAAATCCCAAGATCACCCATCT
TTGATTATGAAAGTCTCTGAAAAATGTTTACACAGTCGAGTGTTTCCTGCTTCCGCAGTTAATTTTTAAAACTTTTTTTTTCTTTTCGTTCCTA
AAACGGATTTCCTTTATTTGCATCAGTTTCTTTTTCTTAGTGTGTAATTTCTGGAGGTATTTGTCACACCAAGAACTTCACTAAAACTGCCTTC
ACCAACACAGAAATCATCTATCACTCCAGGATCCTTATGGCATTTCTGAAAACGTTCAAAGTGGAAAGCTCATCTTGGCATCTCATTTAGCCTC
TTGAATAAATAGTAAAACACCCAATAAAAACTTATGAATTAAATTCCCTTCTCTCTGACCCTTGCCAAAAACAAAACAAAACAAAACAAAACAA
ACAAACAAAAAAACAACCAACAATCTACTTCCAGAGATTATCAGAAGAACTTTTTTAAAAAGCTGCTCTTCCCTTGGTTACCTACATGTCAATA
AAAAACATCCCTGGTTGGTATTAACTTGGGGCCATGATGAAACCCAAACTACGAGCTCCAACTCTGTTCTAAATCAGGTAGAAGCCAAGCTGAC
AGGAGTGACTTGACTTAGAAGGCTATGGATCTTGGTATGGGGGAAACACGTCGAAAATTGGGACTAGCAACAGAGATTGCTGCAGTGTTTCTTC
CGAAGGACCCAGAAACCGGGGGAGATATTCCAATAAAAGAAAGTACTAGCGGAAAATAAAGCCAGGGACCAGAATGATTGTCACACCTGTCTCC
TCCACCCCCCCCCCCCCACCAAAAAAAAAAAAGTCTCCAGTTAAAGGATGGAGGGGAGCGGGATGACTGTGGAAGCAGCTTCGCTTGCACGGCA
GCGCCGCGTTCCACGTCAGGGGGAAGGTTTGAGGTACTGTCCCTCTGTCCGTCTGAGCTCTAGCTCTCCCCGCACGCACGAGAGAGCGAGCGCA
GGCCGCGAGGACCCGGGAGGCCATTTTGCGCGTGCGCCGCTCATCTCGCACCGCCCCCAGCTCGGCGGACGCGGCTCCCGCCAAATTTGAATGC
GAGCTCGTCAGGCCGGCCCGCGCTCCCGAGGCCGACGGACCCTGCGGGCTTGCGGAACCGCAGCTCCCCGGGATGGGCCGCCAGAGCCGCGGCG
CTGCAGCCTCGAAACGCCACCTTCTCTCTGAAGCCGTCCACGTCCAACCGCCGCCCCGCCGTTAGGGCGCGGACCGGAGTCCCGCGTGGACCCC
TTTACCCCGAGGCTGCAAGACAGTCACCCCTTTGTCCCCTCCTCTCTGCACGCTTTAGTTGCAAAGCCACTTCCCCTTCACCAAGGTGGTGTCT
TTGGAGCTTGGAGTCCCGTTGTTGTTGGACGGATTTGAAGCAAAGTTACTAACAGACTGGAAGCTGCCCAGGTCCCCCGCAGGTGACCAGGACC
AGGAGTATGGCGTCCTCACTTTGAGCGTGTCCATCTCCTGGGTGCACCCCCTGATGCTGCAGCGGGCGAGGACGACACAGGCGGGGCACCTCGG
GCTCTGGGAGAAGGGTCATCCAAGGGGACACCCAATCTCTACGTAGGTCGTGGAGCCGGCGAGAGGGGCGCACGGATGCGAGGGCGCACGGGCG
CAAGCGCTTCTCTGATCCGGGAGAAGCGAAAGTGGCCTCCCCGCAGGCAAGGCAAACAAACCGATCCGCTAATCAGTGCAGCAGGCTGCAGAAA
CCGCCATTTGGGCACGGATTTCGGCGAGTCTGTAGCACGCTGTGTGGGAACTCATAACTGACTCGCCCAAGAACACCCCCACACACCCCAACAC
ACACCATTTTAGCGAGTAAAAGTTCTCCCCCTGGCTTTCCTCTTCTGGGGCCTGGGAGGGACCTTTCCTCGGACCTTTGTACCCAGGGGCCGGT
GTGACAGAGAATGGAGCCCAGCTGTCCTCTGCCCACTACTGAAGGTCTTATTTCACTGTTGCTGAGGAGCATGTCTAGGTTTCCCGCCCGTGAT
CCCCACCCCAGTCTCCCACCTCACACNNNNNNNNNNNNNNNNNNNNNNNNNNNNNNNNNNNNNNNNNNNNNNNNNNNNNNNNNNNNNNNNNNNN
NNNNNNNNNNNNNNNNNNNNNNNNNNNNNNNNNNNNNNNNNNNNNNNNNNNNNNNNNNNNNNNNNNNNNNNNNNNNNNNNNNNNNNNNNNNNNN
NNNNNNNNNNNNNNNNNNNNNNNNNNNNNNNNNNNNNNNNNNNNNNNNNNNNNNNNNNNNNNNNNNNNNNNNNNNNNNNNNNNNNNNNNNNNNN
NNNNNNNNNNNNNNNNNNNNNNNNNNNNNNNNNNNNNNNNNNNNNNNNNNNNNNNNNNNNNNNNNNNNNNNNNNNNNNNNNNNNNNNNNNNNNN
NNNNNNNNNNNNNNNNNNNNNNNNNNNNNNNNNNNNNNNNNNNNNNNNNNNNNNNNNNNNNNNNNNNNNNNNNNNNNNNNNNNNNNNNNNNNNN
NNNNNNNNNNNNNNNNNNNNNNNNNNNNNNNNNNNNNNNNNNNNNNNNNNNNNNNNNNNNNNNNNNNNNNNNNNNNNNNNNNNNNNNNNNNNNN
NNNNNNNNNNNNNNNNNNNNNNNNNNNNNNNNNNNNNNNNNNNNNNNNNNNNNNNNNNNNNNNNNNNNNNNNNNNNNNNNNNNNNNNNNNNNNN
NNNNNNNNNNNNNNNNNNNNNNNNNNNNNNNNNNNNNNNNNNNNNNNNNNNNNNNNNNNNNNNNNNNNNNNNNNNNNNNNNNNNNNNNNNNNNN
NNNNNNNNNNNNNNNNNNNNNNNNNNNNNNNNNNNNNNNNNNNNNNNNNNNNNNNNNNNNNNNNNNNNNNNNNNNNNNNNNNNNNNNNNNNNNN
NNNNNNNNNNNNNNNNNNNNNNNNNNNNNNNNNNNNNNNNNNNNNNNNNNNNNNNNNNNNNNNNNNNNNNNNNNNNNNNNNNNNNNNNNNNNNN
NNNNNNNNNNNNNNNNNNNNNNNNNNNNNNNNNNNNNNNNNNNNNNNNNNNNNNNNNNNNNNNNNNNNNNNNNNNNNNNNNNNNNNNNNNNNNN
NNNNNNNNNNNNNNNNNNNNNNNNNNNNNNNNNNNNNNNNNNNNNNNNNNNNNNNNNNNNNNNNNNNNNNNNNNNNNNNNNNNNNNNNNNNNNN
NNNNNNNNNNNNNNNNNNNNNNNNNNNNNNNNNNNNNNNNNNNNNNNNNNNNNNNNNNNNNNNNNNNNNNNNNNNNNNNNNNNNNNNNNNNNNN
NNNNNNNNNNNNNNNNNNNNNNNNNNNNNNNNNNNNNNNNNNNNNNNNNNNNNNNNNNNNNNNNNNNNNNNNNNNNNNNNNNNNNNNNNNNNNN
NNNNNNNNNNNNNNNNNNNNNNNNNNNNNNNNNNNNNNNNNNNNNNNNNNNNNNNNNNNNNNNNNNNNNNNNNNNNNNNNNNNNNNNNNNNNNN
NNNNNNNNNNNNNNNNNNNNNNNNNNNNNNNNNNNNNNNNNNNNNNNNNNNNNNNNNNNNNNNNNNNNNNNNNNNNNNNNNNNNNNNNNNNNNN
NNNNNNNNNNNNNNNNNNNNNNNNNNNNNNNNNNNNNNNNNNNNNNNNNNNNNNNNNNNNNNNNNNNNNNNNNNNNNNNNNNNNNNNNNNNNNN
NNNNNNNNNNNNNNNNNNNNNNNNNNNNNNNNNNNNNNNNNNNNNNNNNNNNNNNNNNNNNNNNNNNNNNNNNNNNNNNNNNNNNNNNNNNNNN
NNNNNNNNNNNNNNNNNNNNNNNNNNNNNNNNNNNNNNNNNNNNNNNNNNNNNNNNNNNNNNNNNNNNNNNNNNNNNNNNNNNNNNNNNNNNNN
NNNNNNNNNNNNNNNNNNNNNNNNNNNNNNNNNNNNNNNNNNNNNNNNNNNNNNNNNNNNNNNNNNNNNNNNNNNNNNNNNNNNNNNNNNNNNN
NNNNNNNNNNNNNNNNNNNNNNNNNNNNNNNNNNNNNNNNNNNNNNNNNNNNNNNNNNNNNNNNNNNNNNNNNNNNNNNNNNNNNNNNNNNNNN
NNNNNNNNNNNNNNNNNNNNNNNNNNNNNNNNNNNNNNNNNNNNNNNNNNNNNNNNNNNNNNNNNNNNNNNNNNNNNNNNNNNNNNNNNNNNNN
NNNNNNNNNNNNNNNNNNNNNNNNNNNNNNNNNNNNNNNNNNNNNNNNNNNNNNNNNNNNNNNNNNNNNNNNNNNNNNNNNNNNNNNNNNNNNN
NNNNNNNNNNNNNNNNNNNNNNNNNNNNNNNNNNNNNNNNNNNNNNNNNNNNNNNNNNNNNNNNNNNNNNNNNNNNNNNNNNNNNNNNNNNNNN
NNNNNNNNNNNNNNNNNNNNNNNNNNNNNNNNNNNNNNNNNNNNNNNNNNNNNNNNNNNNNNNNNNNNNNNNNNNNNNNNNNNNNNNNNNNNNN
NNNNNNNNNNNNNNNNNNNNNNNNNNNNNNNNNNNNNNNNNNNNNNNNNNNNNNNNNNNNNNNNNNNNNNNNNNNNNNNNNNNNNNNNNNNNNN
NNNNNNNNNNNNNNNNNNNNNNNNNNNNNNNNNNNNNNNNNNNNNNNNNNNNNNNNNNNNNNNNNNNNNNNNNNNNNNNNNNNNNNNNNNNNNN
NNNNNNNNNNNNNNNNNNNNNNNNNNNNNNNNNNNNNNNNNNNNNNNNNNNNNNNNNNNNNNNNNNNNNNNNNNNNNNNNNNNNNNNNNNNNNN
NNNNNNNNNNNNNNNNNNNNNNNNNNNNNNNNNNNNNNNNNNNNNNNNNNNNNNNNNNNNNNNNNNNNNNNNNNNNNNNNNNNNNNNNNNNNNN
NNNNNNNNNNNNNNNNNNNNNNNNNNNNNNNNNNNNNNNNNNNNNNNNNNNNNNNNNNNNNNNNNNNNNNNNNNNNNNNNNNNNNNNNNNNNNN
NNNNNNNNNNNNNNNNNNNNNNNNNNNNNNNNNNNNNNNNNNNNNNNNNNNNNNNNNNNNNNNNNNNNNNNNNNNNNNNNNNNNNNNNNNNNNN
NNNNNNNNNNNNNNNNNNNNNNNNNNNNNNNNNNNNNNNNNNNNNNNNNNNNNNNNNNNNNNNNNNNNNNNNNNNNNNNNNNNNNNNNNNNNNN
NNNNNNNNNNNNNNNNNNNNNNNNNNNNNNNNNNNNNNNNNNNNNNNNNNNNNNNNNNNNNNNNNNNNNNNNNNNNNNNNNNNNNNNNNNNNNN
NNNNNNNNNNNNNNNNNNNNNNNNNNNNNNNNNNNNNNNNNNNNNNNNNNNNNNNNNNNNNNNNNNNNNNNNNNNNNNNNNNNNNNNNNNNNNN
NNNNNNNNNNNNNNNNNNNNNNNNNNNNNNNNNNNNNNNNNNNNNNNNNNNNNNNNNNNNNNNNNNNNNNNNNNNNNNNNNNNNNNNNNNNNNN
NNNNNNNNNNNNNNNNNNNNNNNNNNNNNNNNNNNNNNNNNNNNNNNNNNNNNNNNNNNNNNNNNNNNNNNNNNNNNNNNNNNNNNNNNNNNNN
NNNNNNNNNNNNNNNNNNNNNNNNNNNNNNNNNNNNNNNNNNNNNNNNNNNNNNNNNNNNNNNNNNNNNNNNNNNNNNNNNNNNNNNNNNNNNN
NNNNNNNNNNNNNNNNNNNNNNNNNNNNNNNNNNNNNNNNNNNNNNNNNNNNNNNNNNNNNNNNNNNNNNNNNNNNNNNNNNNNNNNNNNNNNN
NNNNNNNNNNNNNNNNNNNNNNNNNNNNNNNNNNNNNNNNNNNNNNNNNNNNNNNNNNNNNNNNNNNNNNNNNNNNNNNNNNNNNNNNNNNNNN
NNNNNNNNNNNNNNNNNNNNNNNNNNNNNNNNNNNNNNNNNNNNNNNNNNNNNNNNNNNNNNNNNNNNNNNNNNNNNNNNNNNNNNNNNNNNNN
NNNNNNNNNNNNNNNNNNNNNNNNNNNNNNNNNNNNNNNNNNNNNNNNNNNNNNNNNNNNNNNNNNNNNNNNNNNNNNNNNNNNNNNNNNNNNN
NNNNNNNNNNNNNNNNNNNNNNNNNNNNNNNNNNNNNNNNNNNNNNNNNNNNNNNNNNNNNNNNNNNNNNNNNNNNNNNNNNNNNNNNNNNNNN
NNNNNNNNNNNNNNNNNNNNNNNNNNNNNNNNNNNNNNNNNNNNNNNNNNNNNNNNNNNNNNNNNNNNNNNNNNNNNNNNNNNNNNNNNNNNNN
NNNNNNNNNNNNNNNNNNNNNNNNNNNNNNNNNNNNNNNNNNNNNNNNNNNNNNNNNNNNNNNNNNNNNNNNNNNNNNNNNNNNNNNNNNNNNN
NNNNNNNNNNNNNNNNNNNNNNNNNNNNNNNNNNNNNNNNNNNNNNNNNNNNNNNNNNNNNNNNNNNNNNNNNNNNNNNNNNNNNNNNNNNNNN
NNNNNNNNNNNNNNNNNNNNNNNNNNNNNNNNNNNNNNNNNNNNNNNNNNNNNNNNNNNNNNNNNNNNNNNNNNNNNNNNNNNNNNNNNNNNNN
NNNNNNNNNNNNNNNNNNNNNNNNNNNNNNNNNNNNNNNNNNNNNNNNNNNNNNNNNNNNNNNNNNNNNNNNNNNNNNNNNNNNNNNNNNNNNN
NNNNNNNNNNNNNNNNNNNNNNNNNNNNNNNNNNNNNNNNNNNNNNNNNNNNNNNNNNNNNNNNNNNNNNNN
MOUSE SEQUENCE—mRNA
CCCCCACGCGAGTCTGAAATCATAATCGTAGTATTAAAGGCAGAGATCGGGACAGACAATGCCGAGGTTGGCCAGGGAGCCCCGCGCACGCTTA
GCAACACCTCCCGGCCCCGCAGAATAATACGGCTCGGCCCCTCTGCGCGCCCTCCCCCGAGCGCGGCCGGGAGGCGGCGGCTGCGCCGAGGAGG
AGGAGAGGCCCCGAGGAGGCGGCGGCGGAGCCCGCCCCCACCCCCACGAGCCCGCGCGGGAGGAGGAGGCCGCAGCGCGCGAGCACCACCCCCG
CGGGGGAGCGGCATGAGCGGAGCGCGGCGGCCGTGGCTGCTCTCGGCCGCGCTCGGTGCCCATTGACAGCGGCGGCGGCGGCTCGCTCCAAGAT
GGCCGCTTGGCTCGCATTCATTTTATGCTGAACGACTTTTAACTTTCATTGTCTTTTCCGCCCGCTCAGATCGCCTCGCGCCGGCCGCTCTTTC
CGCCATCTTTTATCAAGCAGAAATGCATCGAACAACCAGAATCAAGATCACTGAGCTAAATCCCCACTTAATGTGTGTCCTGTGTGGAGGGTAC
TTCATTGATGCCACTACCATAATAGAATGTCTACATTCCTTCTGTAAAACATGTATTGTACGTTACTTGGAGACCAGCAAGTATTGTCCTATTT
CTGATGTCCAGGTTCACAAAACCAGACCACTCCTGAACATAAGGTCAGATAAAACTCTTCAAGATATTGTATACAAATTAGTCCCAGGGCTTTT
CAAAAATGAGATGAAGAGAAGAAGAGATTTTTATGCAGCTCACCCGTCAGCTGATGCTGCCAATGGCTCCAATGAAGACCGAGGAGAAGTTGCA
GATGAGGAGAAGAGGATTATAACTGATGATGAGATAATAAGCTTGTCTATTGAGTTCTTTGATCAGAGCAGATTGGATCGGAAAGTAAATAAAG
AGAAGCCTAAGGAAGAGGTGAATGATAAAAGGTACTTACGATGCCCAGCAGCAATCACTGTGATGCACTTGACAAAGTTTCTCAGGAGTAAAAT
GGACATACCCAATACTTTCCAGATTCACGTCATGTATGAAGAGGAACCTTTAAAGGATTACTACACGCTAATGGACATTGCCTACATTTATACC
TGGAGAAGAAATCGCCCACTACCTTTGAAATACAGAGTTCGGCCAACTTGCAAAAGAATGAAGATGAGTCACCAGAGGGATGGACTCACGAATG
CTGGAGAGCTGGAAAGTGACTCTGGGAGTGACAAGGCCAACAGCCCAGCCGGAGGTGTTCCCTCCACCTCTTCCTGTTTGCCCAGTCCCAGCAC
TCCAGTGCAGTCTCCTCACCCACAGTTCCCTCACATTTCCAGTACCATGAATGGAACCAGCAACAGCCCCAGTGCTAACCACCAATCTTCCTTT
GCCAGTAGACCTCGAAAATCATCACTAAATGGGTCATCAGCAACTTCATCTGGTTAGGACTGTTAAGGAAAACATTTTTCAACCCCCTGATTTA
GTTACCTTCATTCATTACAGCTTTATAGATGCTTAATACATGTGACTGTCGTCCAGTTTGCTTCCTTTTGTAGTGACTTTAAATTTGGCCATAA
ATGATGGACTAGATGTGATACTTCATATGGATGTTAAGTGGAAAGATTGATTCTTTCTCTAAAGAATTGGATTCTGAGAAGGATTCTGTGTTAG
GAAAGATGTGAAATGATTTCTGTGACCACTGTTTGGATCTGGAAATGTTCTACAGTGGGTAGACATTGGGCCATAGTTTGTTAATCTCAATTAA
TGCCTACATTACATTCTCTTTGATTGTTCTTGTTATTATGCTGTTCTGTGAACCTGTAGAAAACAAGTGCTTTTTATCTTGAAATTCAGCAAAT
GGAAAGAATAAGCATAGAATACTGCATTCTGTGCAGCCACGTCACTGTGAATAACAATTTCTTGCATATTTAGCCATTTTAATTCCTGTTTGAT
TTTTACTTCTCTGTTGCTACACAAAATGATCAAAGGAAACTTGTTTTACAATCTGTATGCCTAAAAAGCGGGTACTACCGTTTATTTTACTGAC
TTGTTGAAATGATTCACTTTTGTAAGAATCAGATGGCATTATGCTTGTTGTACAATGCCATATTGGTATATGACATAACAGGAAACAGTATTGT
ATGATATATTTATAAATACTATGAAAATATTGTGTTTCATGCATTCAAAAACAGTTGTAAACTTCTCCAAATGGGTTCGACCTTTGCGGATATC
ACAGTGCACCCAATGCTGAGGCTTACCACCAGCACAGAATTTGTTTTAATGTTGATAACCAGTTTCAAATTCTTTTCCACTTAGAAGCAAATGG
CAGATCTTCATAGTTCTGGCTTTTCTCCAATAAGACTTTCAAAATTAATATTGCAGTAAAGAAAAATTTTAACCAAGGCAAATATAGTGTTTAA
TTTTCCATTGGTTAAAATAGAATTAATGTTTTTAAATTCTGTTTATCAGTGGAATTCTAAAATAGATTTTAAAGTCAACCAGCTAATTGCTGAA
GTAAAGCATTTTATCTACAATTTTATTTTAGTGTATGTGGCACAAGTGTAATTTCAAATTTAAGAGTTGTTTTCATAGTTAAAGGAATCTGCCT
TCACTGTAACGTCTGGAAACAGAAACAATTTGTTATCATTTCTACAGGGATTTTTAATAGAGCAAACATGTTGAATTTAAAATATGAATGACCC
CTCCAAGTCTCAGTTTTGCTTTGGTCGAACTTAGCGTGTGTTTATCAGCCATCAGTTATTTGTGAGGATGTTAATTCCGTATGAATATTGTTTC
ATGTTTGTATGGGAAACTGTAGCTAAGCATTTCATTGTCTGCAGTCTGCAGAAGAAGCACAATTGTATTGCTTTGTCTTGCTTGTAGCCATTAA
ATCATTACTTTTACACACAAAAAAAAAAAAAAAAAAAA
MOUSE SEQUENCE—CODING
ATGCATCGAACAACCAGAATCAAGATCACTGAGCTAAATCCCCACTTAATGTGTGTCCTGTGTGGAGGGTACTTCATTGATGCCACTACCATAA
TAGAATGTCTACATTCCTTCTGTAAAACATGTATTGTACGTTACTTGGAGACCAGCAAGTATTGTCCTATTTGTGATGTCCAGGTTCACAAAAC
CAGACCACTCCTCAACATAAGGTCAGATAAAACTCTTCAAGATATTGTATACAAATTAGTCCCAGGGCTTTTCAAAAATGAGATGAAGAGAAGA
AGAGATTTTTATGCAGCTCACCCGTCAGCTGATGCTGCCAATGGCTCCAATGAAGACCGAGGAGAAGTTGCAGATGAGGAGAAGAGGATTATAA
CTGATGATGAGATAATAAGCTTGTCTATTGAGTTCTTTGATCAGAGCAGATTGGATCGGAAACTAAATAAAGAGAAGCCTAAGGAAGAGGTGAA
TGATAAAAGGTACTTACCATCCCCAGCAGCAATGACTGTGATGCACTTGACAAACTTTCTCAGGAGTAAAATGGACATACCCAATCATTTCCAG
ATTGACGTCATGTATGAAGAGGAACCTTTAAAGGATTACTACACGCTAATCGACATTGCCTACATTTATACCTGGAGAACAAATGGCCCACTAC
CTTTGAAATACAGAGTTCGGCCAACTTGCAAAAGAATGAAGATGAAGTCACCAGAGGGATGGACTGACGAATGCTGGAGAGCTGGAAAGTGA
HUMAN SEQUENCE—GENOMIC
CAAAAGCAAAATCCAGTTGCCTGAGATCGGAGCTTCCCGCAGGATTCGCGCAGAGCGAGGAGCGGGGAGGACGCCGTTTGCGGGAGGCGGGGGC
CGGCATCCCGACACCGTCCGCAGTCTCCCCGGCCTCTCTCAGGGAACCGAGCTGGTGGCCCTCCTAGGTAAGCGCCGAACCANNNNNNNNNNNN
NNNNNNNNNNNNNNNNNNNNNNNNNNNNNNNNNNNNNNNNNNNNNNNNNNNNNNNNNNNNNNNNNNNNNNCCCCGCCGCCAGCCGCCCCGAGCC
GCGTGCGCGCGCGGCCGCATCAGCTGAGCGCGCGGCGCGTGTCACCTCGTGTGCGTGTCGAAGGTCACGCCCCGCTCACAATGGAGCTCTCCGA
GTCTGTGCAGAAAGGCTTCCAGATGCTGGCGGATCCCCGCTCCTTCGACTCCAACGCCTTCACGCTTCTCCTCCGGGCGGCATTCCAGAGTCTG
CTGGACGCCCAGGCGGACGAGGCCGTGTTAGGTAAGCCGCTCGGCTCGGCTCGGAGCTGGATCCGCCGGGGTGGAGGGGCGCTCGCAGAAGAGG
AGCCGGCGGAGCGAGAAGGGGAAACCCCCGGGAAGAGGAAGTCTCCCCCCTTTGCCCTTCGCTCCGGACGCAGTCTTCGGGACGTGGCTCTGCC
AGGACTCGGAGCAGACTCTGAGCATTGTTTTGGCCCCACTTGGCACCTGCATAGAGCCAACTCCACGTTCCTGGCCCGGTTTCCCTCCCACTCT
CTTTGTTCTTTTGTAAAGCCGGTGTTCAAGTCTTGTTTGTGGCCTAAACATCTAAGGTGTTTAGCCTTGTCTGAGGCTGCGGCTGTTTTGACAG
TTCCACTTCATCTGGGGAGCTCCCTGCAATTCAAGCTTCCAGGGCTAGGCTAGCAAAGGTTTAAGGGTCTGTTTCCGAAGTAATTACTACCTCA
GACAGTGTTGACATTTGCCAACTTAGAGCATACCTCAACTTGCTATGATCACTCCACCGCTCTAGTTCAGCATGTTTACACAGGTTCTACGCCT
AGAACCTTAAACTATGATGCACAATACTTTGTTCCGCCCCAGTTACCAGGATGCGAGTGTCTTTTAAGCGATCCGGTCAGTGACTGCGGAGGTG
CAGTGTCAUTATGGATTGAAGACATATTTTAAGACCGATCGCTTTTACATCATTTTCTTAAATATAAATATCCCAACAATTCAAATTTTTGTTT
TTTTTCTGTAGTTTCATGAACTAAACACTTGTACAAAAAGTATGAAAGTGGAACTTCTTAAACGAAAATAGTAACCACCACCTGGGTTAATCTC
AAAAAAAAAATGACTGTCAAACCCTGAAAGTACTAATATAATTTTCAAATTTGTATCTTATATTCTCAACTCATGCCCTACCTTCTACCCCCTT
GATGTATTTGTTCATGGAGCCGGTTACCCTAAACTCATCATTTTTAGGATGGAAGTTTATTCTAAAATTGACACAATGTAAAATATTTATCTTG
TTTTTCCTTTGAATTTACTCCAGTGTTAGAATGACCATTGCATTGTTATATTTTCTTTGGGGGCTATAATATTTTTTAATAGTAAAAATATTAA
GGCAAAATAAGTTAATTCAACCTACTAATAGTAGAGTTCTTGTTCTGTTCTTTTTATTGTTTTTCACTTGATCTTGTTGCTCATCTCATTTACT
TATAATTGACTGTCCTTATAGTTGATGTTTTTAATCTTGTTAAAGGGTTTTTAAACCCAAATTAAAATATCCTTTTTGGAACATGACTGTAAAG
AATTTATTATCATAGCCATCACTGGAAGTTAATTTATTTTACATCATCCAGACTTGAAACATATCGACCCACTGGTTTTAAAACATTCTCATGC
AGCAGCTGCAACTTACATACTAGAGGCAGGAAAGCACCGAGCTGACAAGTCAACTCTAAGGTACAGGATTTATTTAAATATCCATTTATTTTCA
AATACTACCTTAATGATTTCAATTTCAGTTTTAAAAATGGAGACAGAACTTTGGCTTTTTTTTTCTTTCTTCTACCACTTATCTAGAAGACTCT
AAATTTGACAGAGAGCCAATACAACTGTTTTGCACGGAATATCAGCTTACTTACTTTAAAATTTTTAATTAACAGTACTATTTTTCTTTTACTT
TGTTTGTAAACATGTTTTTTTTTCTTTCTTTCTTGCTTTCTTTTTTCTCTCCAGAATAATAAGAATTCCCTAGAAATCCTACTGGGAAGCTAGG
TACTGTATAAGGTGTCAAGCTCAGGCACTTTTCACTTCCAGGTATGAATGGAGAGTGTTCCTGTCAAACAAGATCTTCCGCATCTTGACCCAAA
GAAAAGGAGCCAAAGCGCATGTCAAGCAATTCAAGTTAAGCTCATGTTTTTAAACATCGTTTATTGACATCATTTTGAAATGCTCCTTTACCAT
TCATAATTTAAAAATAAAGTTTAACAATGGTTTAAATTCAGAATGGATTAAAATGGAGTTCGGGGTGGAAAGTAGAGCCATTCTTAGTAAATAT
AAATAACTGAAAAGTTCTTCTGAGCACACTATGTACGAAGTTATCATTGCATCTTTCAGTATAGGCACATCTCTCCCTCATATAACGGATGTTT
CTTGGCGCTTGGAATATCAGATAAAGGTAAAGTTTAAGAAACTTCTCTAGCGGGGGATTTAGGGAACTTCTTAAAACCTAGAGTTAAAACCTGT
TGCGTGTTTGTTGTGTTATTTTAGACCAATCAACTTCATAGGATGTACAGACCTGCATATTTGCTGACCTTAAGTGTACACGTATTTATAGATA
AGTCTTATCCAATAATGAAATTTATAATTTCATTGATTTAAATAAACAGCGTTTCTTGTTGCGTGTTTTTTTTCCTGCCCTAGAACACTGATTC
CCCATCCTATCCAGAGATTAGTTTTAGTTGCAGCATGGAACAATTACAGGTACAGTATTAGGATCTATAAATATTCCTGTCTTTTTATAAATGT
TTACTTGAGAGTTATACTCTTGGCAAGTTCAAAAGAAAATTAATCTAACCATTTGTCAGCAGATAATCAACATTGGTTAAGGATTTAATGGGAA
AGGGGCATCAAAAGTAGTATTTTAAGATAGGCTTCACTTGAAATTAAGATGTTATTAATAGAGAATTGGTCTGTATTTCCTGTTCTTGCTGATT
GAAATAAACTTCTGTAGTGTTTAGTGTAAATTTCTTCTATTCATGATGAGTTTGGTCCAATAAGATAAACAAAATTAAGAGCATCGCTTTGAAA
ATGTCTTTGCTTTCAGAAATTGAATTAAACTGTCAAAATTCGATTTTGAAACTTTTTAAATCACTTTATAAAGGGGCAAGTATACATAACATTC
TAAAACTGTTTATATTGCCCATTTAAGACTGCCAAAATTCAAAACTACATTTATTAGTGGATATGACAACGAATTTATTTCATAGTTTTTAAAA
AATGAAGCTCATTACTGGAAATTTAAGTGAAATTGAATTTTTCAAAGGCATCTTCTGCAGAGTCGTTTTAATGTAACTATGAATCAAACTTTCA
ACTTTCACAAAATGTGTATACAGCATAACCTTTGTTAGATAACTTGACAAAATTCAGATGTATCTGGCCGCTTAAGGATCCGGTTACAAATCAT
GTTTCAGTGTGAGGGCAAATAACCCATTTGAACATGAGGTATTTCCGAGGAAACGCTTTTTTTGCCCGATAGTAGTTTGTCAAAACTTAAAATC
TTGTTGAATTTTAAACTTGTTTGGAAGGTGTGTCCTCATTTTTTTTCTTGCATCTTTCTTGAGCTTGGATACTTCTTTCCATGTTTTATCCTAA
AAACGTGGTATTGTATACACGTCTTTTAGGANNNNNNNNNNNNNNNNNNNNNNNNNNNNNNNNNNNNNNNNNNNNNNNNNNNNNNNNNNNNNNN
NNNNNNNNNNNNNNNNNNNNNNNNNNNNNNNNNNNNNNNNNNNNNNNNNNNNNNNNNNNNNNNNNNNNNNNNNNNNNNNNNNNNNNNNNNNNNN
NNNNNNNNNNNNNNNNNNNNNNNNNNNNNNNNNNNNNNNNNNNNNNNNNNNNNNNNNNNNNNNNNNNNNNNNNNNNNNNNNNNNNNNNNNNNNN
NNNNNNNNNNNNNNNNNNNNNNNNNNNNNNNNNNNNNNNNNNNNNNNNNNNNNNNNNNNNNNNNNNNNNNNNNNNNNNNNNNNNNNNNNNNNNN
NNNNNNNNNNNNNNNNNNNNNNNNNNNNNNNNNNNNNNNNNNNNNNNNNNNNNNNNNNNNNNNNNNNNNNNNNNNNNNNNNNNNNNNNNNNNNN
NNNNNNNNNNNNNNNNNNNNNNNNNNNNNNNNNNNNNNNNNNNNNNNNNNNNNNNNNNNNNNNNNNNNNNNNNNNNNNNNNNNNNNNNNNNNNN
NNNNNNNNNNNNNNNNNNNNNNNNNNNNNNNNNNNNNNNNNNNNNNNNNNNNNNNNNNNNNNNNNNNNNNNNNNNNNNNNNNNNNNNNNNNNNN
NNNNNNNNNNNNNNNNNNNNNNNNNNNNNNNNNNNNNNNNNNNNNNNNNNNNNNNNNNNNNNNNNNNNNNNNNNNNNNNNNNNNNNNNNNNNNN
NNNNNNNNNNNNNNNNNNNNNNNNNNNNNNNNNNNNNNNNNNNNNNNNNNNNNNNNNNNNNNNNNNNNNNNNNNNNNNNNNNNNNNNNNNNNNN
NNNNNNNNNNNNNNNNNNNNNNNNNNNNNNNNNNNNNNNNNNNNNNNNNNNNNNNNNNNNNNNNNNNNNNNNNNNNNNNNNNNNNNNNNNNNNN
NNNNNNNNNNNNNNNNNNNNNNNNNNNNNNNNNNNNNNNNNNNNNNNNNNNNNNNNNNNNNNNNNNNNNNNNNNNNNNNNNNNNNNNNNNNNNN
NNNNNNNNNNNNNNNNNNNNNNNNNNNNNNNNNNNNNNNNNNNNNNNNNNNNNNNNNNNNNNNNNNNNNNNNNNNNNNNNNNNNNNNNNNNNNN
NNNNNNNNNNNNNNNNNNNNNNNNNNNNNNNNNNNNNNNNNNNNNNNNNNNNNNNNNNNNNNNNNNNNNNNNNNNNNNNNNNNNNNNNNNNNNN
NNNNNNNNNNNNNNNNNNNNNNNNNNNNNNNNNNNNNNNNNNNNNNNNNNNNNNNNNNNNNNNNNNNNNNNNNNNNNNNNNNNNNNNNNNNNNN
NNNNNNNNNNNNNNNNNNNNNNNNNNNNNNNNNNNNNNNNNNNNNNNNNNNNNNNNNNNNNNNNNNNNNNNNNNNNNNNNNNNNNNNNNNNNNN
NNNNNNNNNNNNNNNNNNNNNNNNNNNNNNNNNNNNNNNNNNNNNNNNNNNNNNNNNNNNNNNNNNNNNNNNNNNNNNNNNNNNNNNNNNNNNN
NNNNNNNNNNNNNNNNNNNNNNNNNNNNNNNNNNNNNNNNNNNNNNNNNNNNNNNNNNNNNNNNNNNNNNNNNNNNNNNNNNNNNNNNNNNNNN
NNNNNNNNNNNNNNNNNNNNNNNNNNNNNNNNNNNNNNNNNNNNNNNNNNNNNNNNNNNNNNNNNNNNNNNNNNNNNNNNNNNNNNNNNNNNNN
NNNNNNCGCTCAGCCCCGGCGCGCCGCGCGCGGCCCCACGTTTTAGTTCCCCGCTCCCCCGGGCGCCCCTCCCCACCCTCGCGACGCACATGGC
CCCCGAGAGGAGTACTGGTATTTCCAGCCTCGGCCGCTCTCCCGGCCGCAGCGCCCTTTGTTGAGAGGTAGATTTGGATGAAACGGGGACGGGT
TCCTGAAATCGGCACCTGCTTCGGTCAAGTGGCTTCCCTCCTCTCCCGAAGAAAGCCCTCTCCAGGCGCTCCAGCAGCCAGAGAACGCCCCCAT
TTTATAGGGACGGGTTGCGTGGCGGCCGCCCATCCCGCCAAGGTGGGTGTTAGGCTGGAGAGAGCCCCGACGAAAATGTTATTAACTTAAGTTG
GGGGGACACTTGTCTGAGATTGGATGGCTGGTAAGATCGCGGTTCCCAGTTGTTTCCAAGGTCTCCTGCATTTGTGTTTAAAATGCTGAAGTTT
TCAAGGTGGTGTGTGTTGGGAGTCTTGGATAAGTGCTCTGAACATCGCTTGGGAGCTCCTCCCTGGGAAGTGGGCATTTCAAATTTCGAGCTTT
TTGTGGAGTGAAGATGGTGACTGGACGTTAGCTTTGCTCGAGGCTTGCTTTCTCACTACTTCTTTTTCTCCTTTTTCTTTTTTCCCCTTTTGGA
GACTGCAACTTTTCTCTCGACTTCTACTAAAGGATGCACTCAGCATCATGACTCCAGTCCACTATCTTTTACACGTTTTCCTAAATGTCAGCAT
AGGTCATTTGGCAAAGGGATGCTTTAGAAAAGAGCACTAAAAAGTTGATTGCATATGTTTACGCAGTCACTTGGGCTTGACAGTGATATGGCAT
GATCTTTTTCCCAGAGATTTACAGTTAATAATTGGAAGTAAACAAGTAGAGAGACTTTGATCATTACCACTTGCAATAAAAGGATTTAGTGGGC
TTAGTGGTCACGGTTCAATATATGAAAGAGAAGCATCTATTAACCCCTTCCCTTAATGTGGGCAAAATTCCCAGCATATTTATCCAAATGCAAG
TCTACGTTGGTGGTGTGTACAACGTTATGAGTAGTTCAACCTATATTTTATAGGAACCTTAACTCCCATGTTCTGGAAACACATTATAAGCTAC
ACTAAACAGTTGATATTTAACCATGCAAATTATTGACAGTATATAACAAGTTATGAGACTCTATATGTTAACATTTGAGTTTTAAGTAGACCCA
TCAGAAATCCCTGGGATTGATTTTATAAACAAAATTATAAGTTTTTAGATTTGACTTAATTCCATACATCTACCCCAAAGTCTACTCACAACTG
TTTGAAATAACCTACTTGTGTGAGTCTTATGCCTAGTAAAATATCTTTAAAGCCATATACAAGTCACTTTGTATGCATGTATACACATAAAGCT
TTTGTAACAAAATTAAGCATTTAATTGTACATGATAAATCCATTAATACTCTATCACTAACTTCTTGGATGTATGTTAAGTGTGCAGATAGGCT
TTCTCCCCAGGAGTCAAATTAACCCCAACTTTACCCATGCTTATGTTGGGCTGTCAACCCCAACTGGGGCTATGGAGTTCATTTGCATTTCTTA
GATTGCAGTAGGCAAGCTGATGGTTAACATAAGAACTTGCTTCTGTTTTCCTTCATTTTGACATTCCTGGTCTTACGCCTCCACCTAAAAACTG
ACAGCCCCAACTGAGTGTGTTACAATGGCAAGTTTTAACGGTTGAGTATTTTTACCATGATATGTTTCCTGCATTTTTGTTTGCTTAACTGGCA
GTTTCTGGGTTGGAACCTGGAAGGTTTTCACTTCTGAGGTGGAAGAGATTGTTTCTCAAATCTTATCAAGCACGTCAAACACTTTGGAAGTCTT
CATTAGGTTGCCACTACTTTCAAAGGGCATAAAAACATAACTGATTTTTATATAAGTAACAGTGGTATTTATTAGCATTATAAATGGTCACAGG
ATTGTGGCCAAATTCTTCTGAACTGAGGTACAGCAATTGTGTGAATTAAGACTTAAGATGAATTTGAAAGACTTTTGGTCAAGTACATGTGACT
TAAATGCTCAAAGCCAACCGGTAGATAACCCTCCACTGAGGTTTGATTGTTCTCCTTGTTAATACTTGTCTTTGTGTGGTGTTGGTTTTCTGCA
AGCTAGAGGAGAAATAAAGGCAGCTATTTTTATTGGAGCCCCTTCATGAACTTCGTGATCGGTGGTTTTTTAGTGCAGTATCCTTTCACAGGCA
AACAGAAATATCAGCTTGCTATCTTTCTAGGAAAGATCCTGTCGTTTCACAAGGAGAATTTTCTTTAAGCACCAAGAAGGCTGTTCTTTAATTT
ACCAAGTATAATTTGATTTAAATATTGCTACTCTTTAGGGTCATTGCTCTACCTACAACTCCTCCGTGCCCCGCTTAGATTTATGTTAATATGT
TGACAATATTCTCCAAAACAAGTAATCCAGAGATAACTGAGGAGTCAGTCACACAAGAAGTTTTCTGGTAGACGTCGCCAGTTGCCACTGTGGT
CACTTTCATAACAGAGGCTTTGTTTTGTTTTTTACCATTTTCTAGAGGTTACCTCTTAATTTCAGCCATTGAGCTGTGTTGATTCGTGTTTCCC
TTTACTGCATTAATACACCTTAGGAATTAAAACCGCAGGTATATCTTACTGCAAGTTTCAAAAGGTCCTGGATTTCCATTCAAGGAAGATTTGA
GAATGTACTTCAGTGAGGTCTGGAAGCTTAGTCTTATATCAGGTTCTGAAATGAATGAAGAAGGGGGGTTGAAGTTTATTTTTCAAGAATACTA
CACGAAGTATTTGACTTCCCTGACTGTCGGCTGGTGTATTGTTGCTGACACTTCCCCATTGTGACTTTCCTGTAATACAGGTATCTGTTGGGAA
TATCATTTCATCGTATGGGGGGTTTTACATTTGTTTTTCTCTCCTGTCGCTGCTTTGGGTTGACAAGCTGTTGATTTAGCGTTGGAAATGGGCT
GGTCACATGGTTCTGTACATATTGTCACTATTGTACCGATTAAAGTACTTTTTCTTGCCCCCAGCATAGTTTGTCCAAATAAAACACTGGGCTT
TGCCCTCTCCTCTTCTTGTAAAACAGATTTCAGTTTTCAGCCTTTCCAAAACTTTGTATCGCTCATTTAATCTACAGGAGAGCGTCACATTAGA
GAAGCAAGTTTTAAAGAGGTTCGGTTCAATAAACATCTCTGCAATTTGAGCCCTGACGGTTTCGGGCTAAGTGCACACTTGGCAATTCTCAAAA
AATCCCTTCGTGAAATTTCTGACCGAGTGATTGCAGACAGGACAGACCGAGAGAGTCCAGATCTCAAACCAGCTCTGCGCACCAAGTCGACGTG
AAAAGAGGCCCCCGGAGTGTCCGAAATGGCCGGGAGTGCGGTTTGCATTTTCCTTTCGCGGGCGCTGCCGCAGGCTCCGGGGTCCCCGCCGCCC
AGGACTGGGTCCCCGGTCCCCGATCCCCGCTCCCCGCTCCCCAGCGCTGTGGCCTCGTGGGGCTGCCCCGCCCCCCCGGCGTCGCCGCACCCAC
CCCGCCCCCGCGCCGGCCCCGCCCCCGCGGCGCGCCGCCCCTCCCCCGCCCGCCCGCCCGNNNNNNNNNNNNNNNNNNNNCCCCTCCCCCGCCC
GCCCGCCCGCCCGCCGCCCCGCACGCCCGCCCACGCTCGGGGCTCGGGCCGGGCTCCCCGCGGAGTTGCAGCGGTGGCCGGATGCCAAGTGTAA
GTGTAAGTTGCTATGGAAACCCCCACCGAGGCGAGTTCCGAATCCGGAGCGAGACGGAGCCCCCGGCGCCGCCGGATCCGCCCCTCGCATCCCG
GCCCCCGGGCGTCCGCCGCGCTCAGGCCCCGGCCCAGGCCGACTGGAGGTGCTCCTCCTGCGGCCCCAGCACCCGGCTCCGGAAATGCCAGGGA
TGCAGGGAGGGCAGAATTGTTTTCCCTGCGCGTCGCGTAAAAACGTGCCAGGTTCTGCTTGCTCGAACCGCCTAAAACAACCGGAACCCCCGAT
TTTCACTTGCAGATTCTTGAGGAAGTTTTATAATAAATTCGGAGACCTGGAACAAGCCCTAGTGGTTGGTAAATATCCGCGGGGATTGTGTGGC
GTCTGCAGCAGCCTTGGGGCTGCTGGGCTCGAGGACAAATGGAAGAAAGAGACCCTAATACGCTCACCTCCCAGCCCCCACCCCAGACTTTCTT
CTACCTACAGCAATGATCTGAGAGACCAGAAGTAATGTTAGTTGGATCCTTTTGCATCAGTTTGGTAGAACTGATTCCGATCTGATGAGTAAAT
TCCTTCTGTAGAAACGTTAGGACAGCCCAGCTGTACAGTGTTAAATGAGTTTTATAAATTCAGTGTTTCAGGGTTTGTGATTACTAGATGATCT
CCATTCTTGTTCTGTGAATTATGGCCATTATTTCTGTGTCTTGCAGGATTTTTTATCAAGCAGAAATGCATCGAACAACGACAATCAAGATCAC
TGAGCTAAATCCCCACCTGATGTGTGTGCTTTGTGGAGGGTACTTCATTGATGCCACAACCATAATAGAATGTCTACATTCCTGTAAGTACCGA
GCTTTAGCTCTCTTTTGTATCATGCGTATTTCACAGTTCGACCTGGAATTTGAAAACTGTTAATCATTCCTGCAATCTGTGGAAATGTTGGTAC
AAAGTGGTGAAGGCATTTTCTTCTCTTGCATCTAATGACTTTTTGTTAATATGTATTGATTGTATTACAAGCATCCAATATATGTGTTCTCAGG
ATATGAATTAGCTTATTTAGTTGGAAATGCCTTTCACCATCTTGTTTTCTACTAGTTCTGGGTTTCTAACACCAATGATTTATCCACTCATTTC
TAAACATAAAAAAACTTCACATGTTCTACTTCTAGTCTGTAAAACGTGTATTGTTCGTTACCTGGAGACCAGCAAGTATTCTCCTATTTGTGAT
GTCCAAGTTCACAAGACCAGACCACTACTGAATATAAGGTAGGAAACTGTTGAAATTCCTTGTTTGTAATTATTATTGGAGTTCTATAATTTAC
TGAAGGCAACCCTCTTTATTTCTTCACAGAAAATTTACTCTTCAATACATAACTAATATGTGTGTGCTTTGTGCAGGGTAGCCGTTTAATTTCT
TCCCATATTAATGGTGACCAAGTTTAGACAAAGTTTAGTAGTATTCAAGTGATTTTAAGATTTTTTTTTCCTAACTGTCCTTTAAAAACTGACT
TAGTTCACCTTTTTTGCATTGCTTTATGGAGTTCATGACAGGCAGGAATAAATATTTAAAAGGGCTTCCATTCCTCTTTATTCCCTATTCATAT
TAGCTAGTTTAGTAACTTGAAAGGCACACTTCTTTTGACAGAGCAAATCTGAAGAATTTATTAGTGAATATAAAATATTTTTCTACTGATTTAA
AAAGTGCTATATACAGACAACTTTTATTCTCATAGTTTTTATCTTATCAATAATAGTTATAGACAGCATCACAATCAAGTAAAATATTATAGCA
CAAAAGAAGACTATAGAAACTTATGAACATTTTTAGTTCTTGCCATCTGAATTCATAGTTTTCTATTTTAATTATTTTTCAGGTCAGATAAAAC
TCTCCAAGATATTGTATACAAATTAGTTCCAGGCCTTTTCAAAAGTGAGTAACTTGCTTAGAAAATGAATTTAAAGAGATTATTCATTAGTTCT
TTGTGTTATGCCAAATGTTTACATCTTTTTTCCCCATTCAGATGAAATGAAGAGAAGAAGGGATTTTTATGCAGCTCATCCTTCTGCTGATGGT
AAACCTTTTAGGGGAGGGAAGACATTTTATATGGGGGGAGAGCTTATCTAGGAATTAAAATGTATTAAAATTGACTTTACCACTTCCATCCTCT
TATATATAAAATTTATTAGGCATCTGATTTTTAAAAATTACATTTCACTATATCCTTATAGCTGCCAATGGCTCTAATGAAGATAGAGGAGAGG
TTGCAGATGAAGATAAGAGAATTATAACTGATGATGAGATAATAAGCTTATCCATTGAATTCTTTGACCAGAACAGGTAAAATCTTTAGGCAAT
TTATTTTATGCTAATGTTTTATTAGATTGTTTCACTAATAAATTTTCTCTTTATTAGATTGGATCGGAAAGTAAACAAAGACAAAGAGAAATCT
AAGGAGGAGGTATGTTTCATGTTACAAAAACATATAGAACAAACATTGTTTGGAATCCAGATTTTATCAGGGATTCTCTTGCCCTTTAGAATAT
TAGGCTGTTAAATAGAAGAAAATGGTCATGTTTAATGTTTAACAAAGGTCTACATGTGATATTTAATAATTAGAATTTATTTTATATATGATTG
TTAGTCTTACAAAATATTTTAAGTAGTTCACAGTTAATACTTTGGTATGCTTGAAGATTATATTAGGAATCTGTTCATTTAGTATTTGTAATCA
TAGTAAACTCAGAGTGTAATTAGTTGAGAGGTTGGTCACCTCCAATTTTGTTTGATACTAGTATCTTTTATATTCAAGCAATCAAATTGAAACT
TTCTTCATATCTTAAAGTAACTGAAAAAGTTACTTTTCTAAATGTACTTTTAGGTGAATGATAAAAGATACTTACGATGCCCAGCAGCAATGAC
TGTGATGCACTTAAGAAAGTTTCTCAGAAGTAAAATCGACATACCTAATACTTTCCAGGTATCTACTTTTATATTCTTCTTGCATTTTACATAG
ATTTTACAATTTTAATTACATTTTTCACTTTGGATTTTGAACCCAAAAAAGCAATAGAAAAAAAATGTGAAGTTAGTGCTAAAGTTGAAATTTA
TCTTAAAACATTTGGTATACATTCTCTTTTATGCTATGAAAACAAATCCCTTAACACTCTCTAGAAATAATTTTTTCTCATTTGAACTTTCAGG
AGTCTTTCTTTGTTAAAATGTTTGGAGAATATGTTTCTTAAAGCACTTTTGGATTATATTTAAATGACAAAAAATCTACATTTACCTTTCTTCT
TTTATTACTTAATAAAAATATTTTTCACTACATTGATGTCATGTATGAGGAGGAACCTTTAAAGGATTATTATACACTAATCGATATTGCCTAC
ATTTATACCTGGAGAAGGGTAAGTAGCATATCTCTTCTTAGATTATGATGGTAAACTATATTTAAAGAATTAAGAGTAATTTTTTTCCTTTTAA
CTTTGTAGAATGGTCCACTTCCATTGAAATACAGAGTTCGACCTACTTGThAAAGAATGAAGATCAGTCACCAGAGAGATGGACTGACAAATGC
TGGAGAACTGGAAAGTGACTCTGGGACTGACAAGGCCAACAGCCCAGCAGGAGGTATTCCCTCCACCTCTTCTTCTTTGCCTAGCCCCAGTACT
CCAGTCCACTCTCCTCATCCACAGTTTCCTCACATTTCCAGTACTATGAATGGAACCAGCAACACCCCCAGCGGTAACCACCAATCTTCTTTTG
CCAATAGACCTCGAAAATCATCAGTAAATGGGTCATCAGCAACTTCTTCTGGTTGATACCTGAGACTGTTAAGGAAAAAAATTTTAAACCCCTG
ATTTATATAGATATCTTCATGCCATTACAGCTTTCTAGATGCTAATACATGTGACTATCGTCCAATTTGCTTTCTTTTGTAGTGACATTAAATT
TGGCTATAAAAGATGGACTACATGTGATACTCCTATGGACGTTAATTGAAAAGAAAGATTGTTCTTATAAAGAATTGGTTTCTTGGAAAGCAGG
CAAGACTTTTTCTCTGTGTTAGGAAAGATGGGAAATGGTTTCTGTAACCATTGTTTGGATTTGGAAGTACTCTGCAGTGGACATAAGCATTGGG
CCATAGTTTGTTAATCTCAACTAACGCCTACATTACATTCTCCTTGATCGTTCTTGTTATTACGCTGTTTTGTGAACCTGTACAAAACAAGTGC
TTTTTATCTTGAAATTCAACCAACGGAAAGAATATGCATAGAATAATGCATTCTATGTAGCCATGTCACTGTGAATAACGATTTCTTGCATATT
TAGCCATTTTGATTCCTGTTTGATTTATACTTCTCTGTTGCTACGCAAAACCGATCAAAGAAAAGTCAACTTCACTTTTACAATCTCTATGCCT
AAAAGCGGGTACTACCGTTTATTTTACTGACTTCTTTAAATGATTCGCTTTTGTAAGAATCAGATGGCATTATGCTTGTTGTACAATGCCATAT
TGGTATATGACATAACAGGAAACAGTATTGTATGATATATTTATAAATGCTATAAAGAAATATTGTGTTTCATGCATTCAGAAATGATTGTTAA
AATTCTCCCAACTGGTTCGACCTTTGCAGATACCCATAACCTATGTTGAGCCTTGCTTACCAGCAAAGAATATTTTTAATGTGGATATCTAATT
CTAAAGTCTGTTCCATTAGAAGCAATTGGCACATCTTTCTATACTTTATATACTTTTCTCCAGTAATACATGTTTACTTTAAAAATTGTTGCAG
TGAAGAAAAACCTTTAACTGAGAAATATGGAAACCGTCTTAATTTTCCATTGGCTATGATGGAATTAATATTGTATTTTAAAAATGCATATTGA
TCACTATAATTCTAAAACAATTTTTTAAATAAACCAGCAGGTTGCTAAAACAACGCATTTTATCTAAAGTTATTTTAATAGGTGGTATAGCAGT
AATTTTAAATTTAAGAGTTGCTTTTACAGTTAACAATGGAATATGCCTTCTCTGCTATGTCTGAAAATAGAAGCTATTTATTATCAGCTTCTAC
AGGTATTTTTAAATAGAGCAAGCATGTTGAATTTAAAATATGAATAACCCCACCCAACAATTTTCAGTTTATTTTTTGCTTTGGTCGAACTTGG
TGTGTGTTCATCACCCATCAGTTATTTGTGAGGGTGTTTATTCTATATGAATATTGTTTCATGTTTGTATGGGAAAATTGTAGCTAAACATTTC
ATTGTCCCCAGTCTGCAAAAGAAGCACAATTCTATTGCTTTGTCTTGCTTATAGTCATTAAATCATTACTTTTACATATATTGCTGTTACTTCT
GCTTTCTTTAAAAATATAGTAAAGGATGTTTTATGAAGTCACAAGATACATATATTTTTATTTTGACCTAAATTTCTACAGTCCCATTGTAACT
GTTGTTTCTAATTATAGATGTAAAATGAAATTTCATTTGTAATTGGAAAAAATCCAATAAAAAGGATATTCATTTAGAAAATAGCTAAGATCTT
TAATAAAAATTTGATATGAAAAGCACAATGTGCAGAAGTTATCGAAAACCTATAGAGGATTACAACAGGTAAACCTTAAAGAGAATACATTGCT
GACTTATAGTCATGTGGCTAAGAAGTACATGCTTTGTTGTAAAATTGCTTGAAAGCCCATTCAAAGATGTATCTGTTTATTTACAGTCTTTGAA
GTAAAAGTTACCAATGTTTGCCAATTTTGGTGAATTTAACTCATTTTCTAGGCTTAAGTTTTTCATGATGTTTAAGACAAAGAAAAGTTAATCG
AAGTGTCAAGTGATATTTTTACCTTGGATGATCATTTGTATAAAGAATGAAAAAATATTTTTAAAAGGCTAAAAACTTTAAATGCTAGTGGACT
GTCATTTCACTTACATAAAACCAAGTTATCAACATGGAATTCAAATTTTACATCTCAATCTCTTTATGATGAATTTATTTTTGAAATTGCTTAT
TAATCAGATACTGCAGTTATGGCTTACTTAGCACTAACCATATGTGAAAATGTTTCCATTTATTTGAAAAATGATTTTTTTTCCTCCTCAATTA
GAAAATGGCATAAGCTTAAAACCATATTTCAGCCAAAATTTTTTCTGTTAATGAAAGATTATAATGTTTTGTATTCTTAAATAAGCAGCTATTA
CAGTTTGACAATTGAGATTAAAAACCTTTGCTAAATTACCATGTTACAAATTTTCAACCTTATGAAAACCCATATCAAAAGCTCCTAACTTTGT
AACTTTTAGTAGTCAAAGCAGGGTACAGGAAAAGTCAGCTTTAAGTTTGACTTTTGCTTCTGAAAATATTCTAGAACACAAAGTTAGTGCTAAC
AAAATATTTCAGAGAAAATGCCTAAATTGATTTTACAGATTTTTAGCTTAAATGCAAAGAGAAAAATGAGGCTGGTTGCTGTTGTGTAAATAGT
GATCTATCTTGCTTTACACATCCATACCATTTTACAAGTACTTTTTGCTTTTAAAATTGCCGGCCGTTAATTGCACTGCATTGAAAAAACAACT
GCCCTTCAGTTGTCTCAACCTTCCAACCATATTGCTATTTCCATATCCATACGTGATAATATTTGGACCTCTGGAGGGAAAATGCAACAGGCAG
AGTAAGCTGGTAGGAACTTTCCTTCATCCTTTCCTCTTTTCCGAATATTTTGAACGTGCAGTTAATTTGTCAAGTCTTGTTACACTCATTGTAT
GGGCCTATTAACGTTTTGTTATGAAAACAATAGGAACTTAAATACCCATGTGAAATGCGCCTTGCATTGACCAACACGAAAGGAGGACGTTTGG
TATTTTAAAATAGTTTATTTTATGGTATCTTTTGAGGGGATACGATTTACTTTTAGAAACAATCTACACATGGAATCCAGTCTCTTAAAATCCT
GGGGTGAAGCAATTGTTAATTTTTCCATTTCTCTTTGTATTTTAAAGGTTTCATAAATGATTTACATCTTTTTCTTCCTAATACACGAAGAATG
ATAGTTCGAAATTCTGATTTAGTTTAGTACTTAGTCAGAATGCAGGCCCCATAAGATTTTTAAAATACTTTCGCTGTTTTCCCCACACAGTCTT
CATTCCATTTTATCCAAAACAAAAACGTCTTGATCAAATTACATGAAAAACGACTAGACATCATTTTAGATCTGTGCTGCATCTAACAGTATAC
TAATTAAAACCTTTCAAAAACCGTCTATGCCTCTAAGACACTAATTTGGTGCAAAGATCACTGAACCCAGCTCCAACTTAAAGCTCTTGAGATA
CATGATTTCACTTTAGGATGTTTCTTCATGTACAAAATGAACACAAACACAGGTGATAATTTCTAAGGTTGCTCTAAAAAAATTGACTCCTCAA
AAAAAAGCCCTTGAACTAAATTAGGACCACAAACTTCAAAGCGAGGAGCCGAGTTCTTTACAAGGAATAGAAGGAGATATCCATATATTCCAGC
CTTGCAGAGAATCAGATTTGCAAATACCCACCGCGAAGACCTTGAGCCAGCCGATCTCCCTGCAAATCTCAAGATCGCCCAGTTTTGATTATGA
AAGTCTTCCAAAATGTTTACACAGTTGACTGTTTCCTGTTTCCCCAGTTAATTTTTTTTAACGTTTTTTTCTTCTTTTGGTTCTTGAAACGGAT
TTCCTTTATTTGCACCAGTTTCTTTTTCTTAGTGTGCAATTTCTAGAGGTCTCACATGAAGAACTTCACTATCAACTCTGTCTTCATCAAGTCG
ACGACATCAGAAGTCATGTTATATTTATCACTGGAAAGACTCCCCTGTAGCACTCTTGTGAGAAGAGTTCTGCAGAAGTTCAAGTGGAAAACTC
ATTCGGAAGTCGCTTTAGCCCTCCAAATAAATAGTAAGCGCTCAATAAAAACTTCCAACAAACCAGTTAGAACTACTCTCATTCTTCAGCCCCT
AGCCTTTAAAAATGTCCCTTCCGGGACTATCCGAAGTCACTTTCATAAATAGCAGGTGTTGTTCCCTACATTTCAGTAAAATGCTACTTCTTGC
TCTGATTGTCAGGTCATCATGGAATGCAAACTTCACCGTGGACGTGATTTCAACGTTGGTGCGGATTTCCAGATGTCCAACTCTGTCCTCAATT
AGCCAGAACTCAAGTTGAGATAAGAGACTTGGGAGGCTGCAGACCCAGGTCATAGGGAAGCGCGTCGGAAAGTGGGATGCCAGGAATCGGATGG
TGGCCGAGACCGACACCGAGGTTAGTGCAGGTGGAGAAGTAGGTCCAAAAGCCCAAGTCACAGGTCCGAAGTCCTCAGGAGCGGAAGATCTTCC
AACTAAGCCGGAGAGCGGGGCGCACCGCACGGCGTGGAGCATAACGCCCGGGCGAGGGTGATTGGGGTGGGAAACTCCACTGCTTTCCAAAAAA
CAGGTTTCTTAGGTTCTAGTGCCCGGTGGAAAGGGCACAGTACACCGGCCTGGGGGAAATCACCTGACTTCTCCTTTGGTAAAGGCCCCCTTAC
CAACGCTGCCTCTCTGGTAACGGGGTCCTTTACCAAAACACACCTTAAAGAAGAAACAGCCTCTCTCCTTTTCCTTATTTTCTAATTAGCATCT
TACAGAGGAGTGGAAACAGCTACAGCCCAGTCCCCTGCTCAAAACTGCGCCACCCCAGTTCGGCCCTGCTGGGCGCGCGAGCCAAGGCCGCGGG
GCACCGGGAGGCCATTTTGCGCGTGCGCTGCTCGCCTCGCGCCGCCCTCGGCTCTGCGGACTCGGATCCCGCCAAATTTGAACGCGAGATTGTC
AGGCCCTGAGGGGCTTGACGGGCGGGGGAACGACGCCGCTCTCCAAAGTTGGACCCCCTCGCGAGCGGCGGCGACAGCCGGGTGCTCGCTGCCT
CCCCAGGTGCTCCCTTTTCCCGCCGAAGCCCTCCACAGCGGCAGCCCGAGGCGCAGCGACGTGTCCCTGTACCCCGAGTTCAGCGCGGGCGGGA
AAACGACCTGCACCCGGGGAGGCAGCGGCTTCGCGGGCAGAGCCCACGGGAGCGCGCCCTGCTAGGAGCCAGGCCGGATAATCGCCTTTCTTTG
TCCTCCTCCCTCTTCGAGTCCAATCAATGCCCTTTCTCCTTAATGAACCAGCTCTCCTTGGAGTTTGAGGTTTTGTTGGATGATTTTAAATAAA
ATTATTAAGTTATAAAGTGGCCACCCTGAAGGTTCCCGAAGGCGACTTCATGTCTGTCACTGGAAAGGCCTAGAGAAGAGGGTCCTCCCGCTGG
GCTCCTTTAATAGAACGCGCTCGAATCCCCTGGGAAAGAGCCTTCACTGGGTGACAGGGCTGACCAGGGGTGGCTGCGCCCCGGGAATCTCAAG
ATCTGGCCAAAGGCTCGCGTCTCGGGACGCGAAGTCGACGCCAAAATGGGTCCCCGGACAAGGCGACCCTGGGAGTGCCGGCGCCCCCGGCCGG
GCAGAGGAGCGGGTGGGCCGAGGCTGGGACATCGCCTCCGAAAGCTGCCGGGACGCGGCGGCTTCCTGCAGAGCCTGCGCCTGCCGGATCCCCA
CAACACAGAAGCTTCTCGGACATGGGAGCTCCCCGTGCGCCCTAAAACCAGGAGAGGAAGCGACGACTTGGGAAAAGGGACTGGGGAAACAGCG
GAGAAGTGAAAGCGGCCTAAAATGGGCGACGGCGGGCGAGTCCTCTTTATCAGTGCACCAGGCTGCCGGACCCGCCATTTGGTGGCGGATCTCG
GTAGTTCAGTAGCACGTTGTGCTGAACGTCACAACTGGCTTGTCTACGTGGCATCGTCATTTCTTAACCGCGGTTTTACGAAATGCAAATTTCC
CCCTGGCCTTCCTCCTCCGCGGCCGTCGACCCCCCTCGCCGCTCCGGGTGGACCCCTCCGGGGCGCGCCTCCTCCCTCGGGTGGTGCACCCCCC
GCGGCCCGAGACCCGGGGAGGGCCGGGGGTACTTTCTGCGAGGCGCCTTCCCCGCGGCTTCTGCCCGCGCCAAAGCCTGGTGGAATCCAGCGCA
GACCTAAAGCACGCTTCACACCCCGATTTTTCGAGACTAGGACGACTCTCTGAGCCAGCAGCTTTCCTCTCCCTCTCGGGGAGAATCTCATTTC
CTTGGGGTGGTGAGGGTGACGGGCACTGTCTTTTGGCCCCGCGTGTCCGTTCCCCGGTCTCCCGCCTCACCCCTCTGCGAGGTGAGGACCGGAA
ACGGCGAGCTTAGGCCTGGCGGGAAGGAGCCTACCCGACGAGAGGGCTCCGCGGGGAGGGTCGGTTGCAATCCCGCCCTAGCGCCTCCTGCTCT
GCCCGGTCCCCACCGGGGACGGGGAATGCCAGTCATTTCTGTTGAGTGCTAGCAGGGCCGGTGTCACCACCTCGGGTGGCCGAGGCTTCGAGGT
TTTCATGAAAAGCCCCCGAAGCGTGAGGCGCCCGCCCAGTGGAGAACAAAGGGCCGACGGCCGAAGGCGAGGCGAGGCAGCGCGCGCGGCTCCC
TTGGCTCGACCTAGCTGGGAGTCGGGGGCGCGGGCAGGGCTCACTCCCGGCCTACAAACTGGAGCCCGCCACCCCCGCCCCGCAGGCGACCGCA
GCGATCCCATTCTTGGAGCCCGAGCTGCCATGTTGCCTTCGCGGAGGCCGCCAGTCACTTGACGCTTCCGACACAGCGAAGCCCCCAACCTGAG
AGCCCTTCGGCCGTCTTTGCCGCACAGCTGCAGTCAAGGCCCGGAGGGACTGCGGGACGCGGGCGGGAGCGACAGCCCTGTGGGCTGCCAAGCC
GGCGCGGCCGCGCCGCGGCAGCCGCTTCCCTTCCCACCTTCGTTCCACGGGCTCCGGGGCTGCGCGCTCGGCAGAGGCTCGGTTGCCAGTAGCA
ACCACACGACGGCGATTTGCAGCCAGGGCCGCCGCCGCAGCCGCTGGTACCTCTGCCTCCTCCTACACCTCGGGCTCGAGCATTTGAAACCCTG
GGGGTTGCCTTCGGTGACATCTCCCGCCCCCACCTCCAGTCCTCAGTCTCCAAAATCCTCAGCTCTGCTCAAAAGCCAGCGCCCCCGGCTGGGC
CCTGCCCCCACCGCAGACAATAGGAGCGGCTGGGACCGCACAGGGCCGCGCGCGCCCCCAGCAGCCCGCACCTCAGCCCCCAAATCCGGGCGCG
TCGCTGAGTCTCAGCCCCAGCTGCCCTCTTCGCGGAGTTGATCACCAATTCTTTTTCAGTGGCCAATTAGAAAGCTTTTCTTGACATCAGAAAT
AAGGGTGGTGCCAAAGAAAGAAGTCAAACGCCCACTCCCTTTCTAATAACATCGACACAAAGAAGAGCTCATCGTTCCGTCTGCGCTTGCTAAC
AGTGGCTTTCCTCTGGGTTAGAGCCACAGGCACAAGCACCCCCTGCTATCTTTCTTCTTCGCCTACCATGAATATTTTGCATGAAATCCAGAAT
GTAACCATTTGCGTTGACTTAACTGTTGCATCTGGATACTAGTTATTTATCAGTGGATGGAACACTTTTTTTTCCATTTCATTGGATGATCCGC
ATCAACCCTTGGCAGTGTCCACTGCGTGCTTTGAAACATAAAGAAAACGACTGGTATTAACCCTTGAGGATCTACTTTTTCTGTGGCTCTAGAA
CACCAATTTAACTTTTTTTAACAAGAGAACTCTTGTTAATGTTTTAAGCAGGTTTTATTGAAGAAAAGTCCTTAGAGTATCTAGCTAAGTCTTT
TATTTAGCTACTAGGATAACTCGGGAAATATCTGCATTCCCAAATTTCTTCGCTCTTAATAATTGTCCCGGCTTTGTTAGCTGAGTGGTCTTAA
TGGGTTAAAATTTCTTGTAAATCACAAATGTGCTGAAATTTCCAAGTTTAAAGCTCCCTGAGGATAAGCACCTGCCTTATTCATCTTTGTAAGC
GTCAGAGTCCTTTGAACATAACAAATATTTGTCGGACTTCCAGGGAATTTCAGAAGTCTCAACAACTCTTATTAGGAAAAAAACTAACTTACTG
ATAACTAGCAGAAAGCTTCGATATCTTTAATCAACTCAATCAAAAGCTAAACAATTTCCAAGCTGGTAGCATTATCAGATATTCTCATTCATGA
ATATTTAACTTAATTATATTTCAAATGCCATAGATTGTATGTTAAAATATCTGACACATGTTTTCAGGATTCTAAGGAGAATGACAAATTGTAC
ATAAGAACTTGAAACTGCTAATTTCTCATCTAGTGTCTAAAAATTTGGTTAAATACCCACAACTAAGGTGCAACTTTAAAGTGCTTTCATACTT
TCTGATAGCACAGACATGTCATTAACTGTCTTTACAGCTGGACAGGAATGCTTAAGGATCTACCGTTGCATATTGCAAATCTACTAAGACAAGG
CACCTTGAAATATCCTCTTTAATTTAAATAAGCTTTAAAGCATACTGAAAATAGTATGTCTCAATCACAAGTCATGGTAAACTCAAATTAATGC
CTCCTGAAATGACTCTTACGTATATTATTAAAAGAGGTTCACCTTTAAGCTTCACAAAATATCAAGTTCATTAAATAAGACAGTTTACCTAAAA
GAAGAAAGCACTGCTTGGTTCCTAGAGGGAGCATAACGACCTGTAGCTTGCCAAACCACCCCCATCAGCACCTTAAAAATAGGAAAGCAAGGCT
TTAGTGAAAAGTTCCTTGCTACCGTCTTTCAGGAAAGAAAAGCTCCAACAACTTGCTTTGGACCAAGTTAAACAGATTATCTCCCTTTTTCATT
ACGACTGTCTTTCAATGAATTGAAGGATAAGATCAAAGTGCATTCATATTCATGTGAATTATCGCTATTGACTTGAATAATGATGGATTTCATT
GTTTTATTTAAACTGAAACCAGGAACGCTGCTGCTTTTGACGCTACACCCCTAAGGCTGTAGAATTTCTTCTCTGAGAACTCAAAAGCCAAGCA
ATTAGGTCTGACAACCACGTCATTTCCATAATGTACTTCCGTACAGAGGACTTTTTATTGGAATCGGTTACATTTCTATAGAATCTTATTACCA
CTCAATTTTTGACTTCTTTCCAACCTTCTCAACAAAACTCCTAAGTTCGGCAAGTACACTTCCAAAAAACTTATGAGTAAATTGTACTGAGAAG
ATACAGTGATGTTTCAGAAGCTTTTATTAATAGCTGTTCATGAATCAGACAAATTAATGTTATCAGTAATTACCTCAGGAGAGTGTTTTTGTTT
TGAACATGATACATTACAGTTTTTCTAGGGTAACTGAAGAACTCAGTTACAGTAACCTTGGCAAAATGTGTTTACCAGCTGTTTCTTTCTAAAT
ATGCCTCATGACAATTTTCTTAAGACATTTTCATTGGGGTTTTCCTCAAACTGTCCCATCATTTTCTAAGGAGATGGAAGTTACTAGATTCAGT
GGAACTCCCCCTCACTTTCACCAAGTGATCACTCTGCTCAAATAATTCTTATTACAATGCTTATCAGTTTGGAGAACACTTTTTACGAAATTCA
TTACAATAAAGTAAGCTTGTCATTGAATTCTGCAAGCAACCTTTAAAATAGACTTAGGAAACTGCATTTTCCTGAACTTTAATATACACAATTT
ATATAGCCTCTCTAAACCTAAAAAGAGACTCTAGTGCAACAAAAGTCTATTACATTATCATGGTCTGCAGTGGGTTCTGGGAATATCCTTTCCC
AGAAAGAGAACTGATTCAGTTACTTGGTTTCTCTCTTAAACTTCTGCCATACATTTAAGGCATTACACATAAACCACATTTTAAAAAAAATTCA
ATGTTTTTCTATTCAGTTGGGCTACAAGAGATCTCTATTTTCATTTACCCATTGTCTGTTTTTAGTATTGCAAGACACTCTTTAAGCCAGGAAT
TATTAGTAAATTGTTTCTCTTTGGCATATGACCATATATATATTGAAATTATTTGCATACGTTCAGCTTTACTTCTAAATTTCTAAGACTGTTA
CCCTTGACTTATAAGTAAAATGATAAGCAATTGCATATTATTTCACTAGGGCAAAAAAAAAAAGCATTCCTTGAATAAAAAGCATTTCTTTATA
ATTCAATTCCTTAAGACCAGATTTGTCTTACTGATGGGAAAAGTATTACTATTTTCTTCATATAGGCAGTTCATCTTTTATATCGTTCATATAG
GAACTTTTATTTTTTCACCGTAAAAAAATTAGGTAATATTGGAGTAGGAGGTAAAGTAATCCAGCTTTAGCAATATTTAGATGTTTTCTCTGAA
ATGTCAAAAAGCAAGGGTCCAAACTGTAGTGCAAGCATCTCCTCTGAAACAATGAGATGTAGTGCCACCGTGTCCTCGAATTTAGCCTACGTTT
TAGCGGAGCTCACTCTCGGCTCAGATAATCTCTGGGGAAAAAACGGACAGATAGAGTGGTTAAACAGGAAACACTATTTTTTTTTTTCAAACGT
TTGAGAAAACTTGAAAACCATCTCTCGGTACTTTTGCAGTAATTTCCAGGAGTCAGAACATACAGTCCATTATTCTTCAGAGTAACCAACGCAC
AAGACATTTTGGCTTGGGACTTGATATCGCGAAATGACGTCAAAAAATTAAAAAAAAAAACGAAGCTCGCACATGCGCAATGACGTACAGCTGC
TTTTTATTTTTTTGTCTGTATCAGCTATTGGCTCCTATCCCCGCCTCTGGGATCCGGCCTGCGCCGCGGGGTCCTAGGGGGCCAGCAGCTGTAA
AGCGGTACGGGATTCCGCACCCTACTCCAGCAAGAAAGAGCCTGAAGCCCCTCCCCACCTTTCCCGGCCAGGGCGCTCTTCTACCTCCCGCGCG
CGGACAGCCGGGGCGAAGTACGCCGACCGCCCCCCCCGCAGCGAGTTTTCTGGCAGCGCTAGCGCCGCGGGGCCTCGGTTCCCGGGTTCCGGTC
TCCGCCGGCTCCGGGCTCGCCCCCGCGAGTTGGCCGCACCGTTCCCCCGCCCGCGTGGCAGCCGCTCCTCCGGGAGGCTCCGGCAGGGACCTTC
CCCCCGCCCCCCGACCGCCAGTGCCGCTCCAGCTGGAGGCCTGGCCCGGGAAGCAAAGTGAAAGGACACAGCCCTCCTTCCTCGCCAGCCCCCC
GCCCCCCCTTTCCCAGCTCAGGCCGGCGGCCCGCGGCGCGGAGGGAGCGAAAGAGTCGGGGCCTGCCCCCTCCACCGCCCGCATCTCGGCCGCC
GCACCCGGGTCCGCCCCGGGAGGCCCCGCGGGAGCGAACCCCCCGCCCGCTGGGCGCTTCCGCACTGACGCCTTGGGGCCCCCCGCCCCCGCCC
TTTCCTCCCGCTACACCCGCTGGGCCCCCGCCCGCGCTCCCGGCCTCCTCCCAGCGCCGCCTCCCCCGTTAGAAACTTCGCAGACACCGCGAAG
CTGCTCTTTGGAGTTGGAGAAACTTAGGAAGAATGGGAAAAGCCGAGGAAGTCGGGGAGGACCACGTTCTTCCCTTGCCCTCGGCCCGACACTC
CTGTCCACATTGGACGCGGCAGCCTGCCAGCGCCCAGGAGAGCCGACCCCGTCGACA
HUMAN SEQUENCE—mRNA
GAGAGGCAGAGATCGGGGCGAGACAATGGGGATGTGGGCGCGGGAGCCCCGTTCCGGCTTAGCAGCACCTCCCAGCCCCGCACAATAAAACCGA
TCGCGCCCCCTCCGCGCGCGCCCTCCCCCGAGTGCGGAGCGGGAGGAGGCGGCGGCGGCCGAGGAGGAGGAGGAGGAGGCCCCGGAGGAGGAGG
CGTTGGAGGTCGAGGCGGAGGCGGAGGAGGAGGAGGCCGAGGCGCCCGACGACGCCGACGCGCCCCAGCAGGAGGAGGCCGGCCGGAGGCGGCA
TGAGACGAGCGTGGCGGCCGCGGCTGCTCGGGGCCGCGCTGGTTGCCCATTGACAGCGGCGTCTGCAGCTCGCTTCAAGATGGCCGCTTGGCTC
GCATTCATTTTCTGCTGAACGACTTTTAACTTTCATTGTCTTTTCCGCCCGCTTCGATCGCCTCGCGCCGGCTGCTCTTTCCCGGATTTTTTAT
CAAGCAGAAATGCATCGAACAACGACAATCAAGATCACTGAGCTAAATCCCCACCTGATGTGTCTGCTTTGTGGAGGGTACTTCATTCATGCCA
CAACCATAATAGAATGTCTACATTCCTTCTGTAAAACTTGTATTGTTCGTTACCTGGAGACCAGCAAGTATTGTCCTATTTGTGATGTCCAAGT
TCACAAGACCAGACCACTACTGAATATAAGGTCAGATAAAACTCTCCAAGATATTGTATACAAATTAGTTCCACGCCTTTTCAAAAATGAAATG
AAGAGAAGAAGGGATTTTTATGCAGCTCATCCTTCTGCTGATGCTGCCAATGGCTCTAATGAAGATAGAGGACAGGTTCCAGATGAAGATAAGA
GAATTATAACTGATGATGAGATAATAAGCTTATCCATTGAATTCTTTGACCAGAACAGATTGGATCGGAAACTAAACAAACACAAAGAGAAATC
TAAGGAGGAGGTCAATGATAAAAGATACTTACGATGCCCAGCACCAATGACTGTGATGCACTTAAGAAAGTTTCTCAGAAGTAAAATGGACATA
CCTAATACTTTCCAGATTGATGTCATGTATGAGGAGGAACCTTTAAAGGATTATTATACACTAATGGATATTGCCTACATTTATACCTGGAGAA
GGAATGGTCCACTTCCATTGAAATACAGAGTTCGACCTACTTGTAAAAGAATGAAGATCAGTCACCAGAGAGATGGACTGACAAATGCTGGAGA
ACTGGAAACTCACTCTGCGACTGACAACGCCAACACCCCAGCAGCACGAGTTCCCTCCACCTCTTCTTCTTTCCCTAGCCCCAGTACTCCAGTG
CAGTCTCCTCATCCACAGTTTCCTCACATTTCCAGTACTATGAATGGAACCAGCAACAGCCCCAGCGGTAACCACCAATCTTCTTTTGCCAATA
GACCTCGAAAATCATCAGTAAATGGGTCATCAGCAACTTCTTCTGGTTCATACCTGACACTTTTAAGGAAAAAAATTTTAAACCCCTGATTTAT
ATAGATATCTTCAGCCATTACGACTTTCTAGAGCTAATACATGTGACTATCGTCCAATTTGCTTTCTTTTGTAGTGACATTAAATTTGGCTATA
AAAGATGGACTACATGTGATACTCCTGTCCGTCTTGGTTCAAAAGAAAGATTGTTGTTATAAAGAATTGGTTTCTTGGAAAGCAGGCAAGACTT
TTTCTCTGTGTTAGGAAAGATGGGAAATGGTTTCTGTAACCATTGTTTGGATTTGGAAGTACTCTGCAGTGGACATAAGCATTGCGCCATAGTT
TGTTAATCTCAACTAACGCCTACATTACATTCTCCTTGATCGTTCTTGTTATTACGCTGTTTTGTGAACCTCTAGAAAAACAACTCCTTTTTAT
CTTGAAATTCAACCAACGGAAAGAATATGCATAGAATAATGCATTCTATGATGCCATGTCACTGTGAATAACGATTTCTTGCAGCTATTTAGCC
ATTTTGATTGCTGTTTGATTTATACTTCTCTGTTGCTACGCAAAACCGATCAAAGAAAAGTGAACTTCAGTTTTACAATCTGTATGCCTAAAAG
CGGGTACTACCGTTTATTTTACTGACTTGTTTAAATGATTCGCTTTTGTAAGAATCAGATGGCATTATGCTTGTTGTACAATGCCATATTGGTA
TATGACATAACAGGAAACAGTATTGTATGATATATCTAThAATGCTATAAAGAAATATTGTGTTTCATGCATTCAGAAATGATTGTTAAAATTC
TCCCAACTGGTTCGACCTTTGCAGATACCCATAACCTATGTTGAGCCTTGCTTACCAGCAAAGAATATTTTTAATGTGGATATCTAATTCTAAA
TTCTGTTCCATTAGAAGCAATTGGCACATCTTTCTATACTTTATATACTTTTCTCCAGTAATACATGTTTACTTTAAAAATTGTTGCAGTGAAG
AAAAACCTTTAACTGAGAAATATGGAAACCGTCTTAATTTTCCATTGGCTATGATGGAATTAATATTCTATTTTAAAAATGCATATTGATCACT
ATAATTCTAAAACAATTTTTTAAATAAACCAGCAGGTTGCTAAAAGAAGGCATTTTATCTAAAGTTATTTTAATAGGTGGTATAGCAGTAATTT
TAAATTTAAGAGTTGCTTTTACAGTTAACAATGGAATATGCCTTCTCTGCTATGTCTGAAAATAGAAGCTATTTATTATGAGCTTCTACAGGTA
TTTTTAAATAGAGCAAGCATGTTGAATTTAAAATATGAATAACCCCACCCAACAATTTTCAGTTTATTTTTTGCTTTGGTCGAACTTGGTGTGT
GTTCATCAGTTATTTGTGACGGTGTTTATTCTATATGAATATTGTTTCATGTTTGTAGGGAAATTGTAGCTAAACATTTCATTGTCCCCAGTCT
GCAAAAGAAGCACAATTCTATTGCTTTGTCTTGCTTATAGTCATTAAATCATTACTTTTACATATATTGCTGTTACTTCTCCTTTCTTTAAAAA
TATAGTAAAGGATGTTTTATGAAGTCACAAGATACATATATTTTTATTTTGACCTAAATTTGTACAGTCCCATTGTAAGTGTTGTTTCTAATTA
TAGATGTAAAATGAAATTTCATTTGTAATTGGAAAAAATCCAATAAAAAGGATATTCATTTAGAAAATAGCTAAGATCTTTAATAAAAATTTGA
TATGAAA
HUMAN SEQUENCE—CODING
ATGCATCGAACAACGAGAATCAAGATCACTGAGCTAAATCCCCACCTGATGTGTGTGCTTTGTGGAGGGTACTTCATTGATGCCACAACCATAA
TAGAATGTCTACATTCCTTCTGTAAAACTTGTATTGTTCGTTACCTGGAGACCAGCAACTATTGTCCTATTTGTGATGTCCAAGTTCACAAGAC
CAGACCACTACTCAATATAAGGTCAGATAAAACTCTCCAAGATATTGTATACAAATTAGTTCCAGGGCTTTTCAAAAATGAAATGAAGAGAAGA
AGGGATTTTTATGCAGCTCATCCTTCTGCTGATGCTGCCAATGGCTCTAATGAAGATAGAGGAGAGCTTCCAGATGAAGATAAGAGAATTATAA
CTGATGATGAGATAATAAGCTTATCCATTGAATTCTTTGACCAGAACAGATTGGATCGGAAAGTAAACAAAGACAAAGAGAAATCTAAGGAGGA
GGTGAATGATAAAAGATACTTACGATGCCCAGCAGCAATCACTGTGATGCACTTAAGAAAGTTTCTCAGAAGTAAAATGGACATACCTAATACT
TTCCAGATTGATGTCATGTATGAGGAGGAACCTTTAAAGGATTATTATACACTAATGGATATTGCCTACATTTATACCTGGAGAAGGAATGGTC
CACTTCCATTGAAATACAGAGTTCGACCTACTTGTAAAAGAATGAAGATCAGTCACCAGAGAGATGGACTCACAAATGCTGGAGAACTGGAAAG
TGACTCTGGGAGTGACAACCCCAACAGCCCAGCAGGAGGACTTCCCTCCACCTCTTCTTCTTTGCCTAGCCCCAGTACTCCAGTGCAGTCTCCT
CATCCACAGTTTCCTCACATTTCCAGTACTATGAATGGAACCAGCAACAGCCCCAGCGGTAACCACCAATCTTCTTTTGCCAATAGACCTCGAA
AATCATCAGTAAATGGGTCATCAGCAACTTCTTCTGGTTGA

[0282] TABLE 18

MOUSE NOMENCLATURE
ICSGNM Runx1
Celera mCG13559
HUMAN NOMENCLATURE
HGNC RUNX1
Calera hCG401175
MOUSE SEQUENCE—GENOMIC
NNNNNNNNNNNNNNNNNNNNNNNNNNNNNNNNNNNNNNNNNNNNNNNNNNNNNNNNNNNNNNNNNNNNNNNNNNNNNNNNNNNNNNNNNNNNNN
NNNNNNNNNNNNNNNNNNNNNNNNNNNNNNNNNNNNNNNNNNNNNNNNNNNNNNNNNNNNNNNNNNNNNNNNNNNNNNNNNNNNNNNNNNNNNN
NNNNNNNNNNNNNNNNNNNNNNNNNNNNNNNNNNNNNNNNNNNNNNNNNNNNNNNNNNNNNNNNNNNNNNNNNNNNNNNNNNNNNNNNNNNNNN
NNNNNNNNNNNNNNNNNNNNNNNNNNNNNNNNNNNNNNNNNNNNNNNNNNNNNNNNNNNNNNNNNNNNNNNNNNNNNNNNNNNNNNNNNNNNNN
NNNNNNNNNNNNNNNNNNNNNNNNNNNNNNNNNNNNNNNNNNNNNNNNNNNNNNNNNNNNNNNNNNNNNNNNNNNNNNNNNNNNNNNNNNNNNN
NNNNNNNNNNNNNNNNNNNNNNNNNNNNNNNNNNNNNNNNNNNNNNNNNNNNNNNNNNNNNNNNNNNNNNNNNNNNNNNNNNNNNNNNNNNNNN
NNNNNNNNNNNNNNNNNNNNNNNNNNNNNNNNNNNNNNNNNNNNNNNNNNNNNNNNNNNNNNNNNNNNNNNNNNNNNNNNNNNNNNNNNNNNNN
NNNNNNNNNNNNNNNNNNNNNNNNNNNNNNNNNNNNNNNNNNNNNNNNNNNNNNNNNNNNNNNNNNNNNNNNNNNNNNNNNNNNNNNNNNNNNN
NNNNNNNNNNNNNNNNNNNNNNNNNNNNNNNNNNNNNNNNNNNNNNNNNNNNNNNNNNNNNNNNNNNNNNNNNNNNNNNNNNNNNNNNNNNNNN
NNNNNNNNNNNNNNNNNNNNNNNNNNNNNNNNNNNNNNNNNNNNNNNNNNNNNNNNNNNNNNNNNNNNNNNNNNNNNNNNNNNNNNNNNNNNNN
NNNNNNNNNNNNNNNNNNNNNNNNNNNNNNNNNNNNNNNNNNNNNNNNNNNNNNNNNNNNNNNNNNNNNNNNNNNNNNNNNNNNNNNNNNNNNN
NNNNNNNNNNNNNNNNNNNNNNNNNNNNNNNNNNNNNNNNNNNNNNNNNNNNNNNNNNNNNNNNNNNNNNNNNNNNNNNNNNNNNCTCTCTCTC
TCTTATACACCGACTTCTGTCTTCTTCAGTCTCGATCAACAGCTGGCTTCATTCCAGCCCCAGGCAGAAAAACTTACCATTTTTAACCGTCTCC
TTTGGCTACATTGTAGCAACTAGGATCAACTCTGCTTGCTGACTGGAGTCCAACTGAATAGCAACCTTAACTACTGTAAAAAGCCCTCCCTCTG
TTAACTGTTCTACAACCAGCTCATATGGGTTCCTCTCCCTCACTGTTCTGTTTAGAATGGACAATCTTAAGAGTCTATTTTAGGATTCTTCCTC
ATATTCTTGCTTCTGCTTCCTAAGTTGCTGGCAGAGTAATTGAATCTCTCCTGGTTGAGGATAAATGGGGGTGTGGAAAGGGGCCAAGGATTGC
ATACTGAGGAATGTTCTTCTACATACAAACCTGAAGCCAGGGGAAGGTGGCCTCTTACCAACCTCACCCTCCATCATTCCAATGCTGAGACACC
AAGTATAGTTCAAAGGTCATCTGGGAGACATGGAGACCATGATGAAGTATTAGGATAATCCATGAGAGGGAATCTAACCTGAGCAAGAAAGCTG
ACACATCCCCTCCGCAATCAGAACAGGGAGGGTGCTCCATAGTCCTGCAGCACAGAGCTGAAGAGCTGGCCCTGGGTTCTGGGTATGTAGAGAT
GCAAGGTTAGCAGAAGCCTCCTAGAAGGACTCGTGTAGAAAAGCTGTGGGAATCCCTTGTCAGGGTATATTCGTAAGAAATCTGACAAGAGGTC
AGAGAATTAGCCCTGGAGTGGGAGCAATTGGGATGGGCATGGGAAGAGGAGAGAAATCATAACAACCAATGCTAAAAAAAAACTACTCAGAGGA
CTTAGCAACAAAAGGAAGGGAGACACAAGTAAGTCCATGGGTTCGAATTCAGAGACTTGGTGTAACTACAATGAAAGCGGCAGCGGCAAAGCCA
GCTTGACATGCAGGACACAATTCTCAAGTGTTCTCTCTCTCTCTCTCTCTCTCTCTCTCTCTCTCTCTCTCTCTCTCTCTCTCTCTCTCTCTCT
CTCTCCCCTCCAGTCACCTATACACTTTTGGTGGACTAAATTTCTAAATTACCCACTCGGCTAGGCTGTATCCTTGGATGTAGTGGAACCCATT
GTCTTCATATTGAGGTTCAGTCCTCTCAGCTTATGTGAGATACCACACCCCACCCTCCAACTCAGTCTCTACTGGCAATGGCACAGTGACCTGA
ATTACAAGTGCCTAGCTTTGCTCTCTACGATCCTCCTCCCTGGAGCACCTTTGTCCAGCTCACCTCAGCCTCTCTAGCCCCTTCTCTGGGATTC
AGAAGGTAGAAGCTCTATTCATCTTCTAAGTCAAGGACACATCACCTGTGTTAGCACCAAAACCTCTTCTAAGCATCCCCACGTGCTGCTGCCC
CGTCCTCCCTTGTCCCTTCCCTCTTGTTCTCTGGACCATGCACACATGCTTGCCAGTAGCCATGATACCCCATTTGCTGTCTGTTATTTGTCCT
CTGTCACCAATAAGCCTAGAACCCTGACACATAAGGACCATTCTAGGAAGGCTGGGAGAAAGAAAATCAAATATTTCATGCTCTCAGAGAATCT
ACGACTTACCATTTGGAAAGACTAAAGGTCAGAAAAGACTAAAAGCCTATTATAGATTTTAAAATCTCTCAACCAAATAGCGATTGCCTGTCCA
AACACTCTCGGTGACAAGAAATAACTACAGGATAGAAATTCTACATATCTGAGATTCCCACATGAAGAATTTTTGAGATTTTTTTTTTGACAAA
ATATCTCTGCATAGCCCTGGCTGTCCTGGAACTCACTCTGTAGACCAGGCTGGCCTCGAACTCAGAAATCTGCCTGCCTCTGCCTCCCAAGTGC
TGGAATTACAAGAAATGAGGAGGAAAGAGGCGAAAGAGGACATACTAACAGTTAAATTTTTCTCAAAGCTGTCAATTGTACCTAAGAAGAAACA
TAGTTGGTCCATGCCTGTGGCTGTGCATGGGCTTGTGTATGTGTGTGAGTGTGTATACCAGTGCCTGTGTGTGCACGTGTGCATGTGTACATGT
NNNNNNNNTGTGTGTATGTGTGTGTACTCACATCTGCATGGGGTATGTGTGGTGTGGGGGTGAATGTCCATGTCTGTGCATACTTGTGCCTGTG
TCTGCACACTAAATCTGCATGTGTACATGTGCGTTCATGTGTCTCCACAGGCAAGTTTCCTAAGCTCCCTAAAGGGGAGGCTCCTGGCCTATAA
AATGGGAGTGACTATAGGATTCCCAGGATTAAGCAGGGAGACAATTCAATCACTGCTGGTTCTATGATGGCATACAGTGGGCAAGGAAGGGAGA
TCATGTCCTATCTAGCTTCCATTAATGAGTATGTAGCCTCTCGTCTCTCTCCAAGCCCCAGGGTCGCATCTTCCCCAGCTCCTGGAGGTGGAAA
TCCCTTCATAATTCCACAGGTTTGCCTTTATCTATAAGTGTCTGTTCACTGAGTTCAGCCAGTTTCCCTGTGTCCTCAAGCTGATGTCACCCAA
GCGCAGAAAGTTCTTCACAGTAACACACAGTCCTCTCCAAGCACAGTCGCTTTTGCCACGTTGGCTTTTCTCTAAGAATTGTCGAAGTATTAAG
TGTATACATACAGATCTGCGCTCCATTCTGCTTTTCCAACCACTCAGCCTGAGATGGAGAGGTGTCTCTGGGTCTCAAGAGAGAATGTCCAGGG
GGTTGGCTCTACCAGGTCTCTGGAATAAATTTACCTGTCCTAGTCAGTCCTACTGGGTCAGTCTGTTAGGTCCAATGCTCACCAGTTAGAACCA
AGCTTGCCTTAACTTCTGAGTCCATTTGTTATTTCTTACCTCATCTTACCTTAATAATTAGTGCAAATCGTTCTGTCCCTACTGTGTTCAAAAA
AAGGAAACTTTATGGAGCTTTTTTATCCCCTTGTAAACCAAGATCTTTTAAAAATTATTTTAAGGTTGTTCCTTGGAGQCCACACATTTAAGTC
CCTCAGTCTGTCATTAGAAGGCAACCCTGTGGAAGCCTTTCCTATTTTATTTGCTCTTTTTTGCTTTTGCAAAAAATATATGACTGTGGAGCTG
CAAACCTTGACCTCCTGCCTATTTAAACAGCGTCTGGAAATCTGAAGTAATTAGCTCTCTTCTTCTTCCTCTTCTTCTTCTTCCTCTTCCTCTT
CCTCTTCCTCTTCCTCTTCCTCTTCCTCTTCCTCTTCTTCTTCTTCTTCTTCTTCTTCTTCTTCTTCTTCTTCTTCTTCTTCTTCTTCTTCTTC
TTCTTCTTCTTCTTCACAACATCGTTGATAAGCCGTCTTGTCCTGCTATGGAATGTGACTACCCAAATCCTAAGGCATTGAGACCGACCATGTG
CCCTTACTGTCACTGGGTGCTGACCACTGTCAGTGTACAAAGCTAAGGAAGGGTAATTTCTAACTCACATTATCTGTAAATACTCAAGGGAATG
AGCACAGTTTTGGTGTGGGCTTCCCTGTACCTTAGAAGCAGCAGACTGCAGGGAGGAAAGTGTCTTCCTGGGATCTTAGCATATGCTGATGATT
TCCAACAATATTTAAGGCTGTGACATTTCAAGAACGAGTGGTGTCAATGTAAACAAACTGCTTTCCTAGCTGAAAAGAGGAAGGGAGAGGGAGG
GGAGGGAGGAGGGAACCAACCAAGGGGGAGGTGTTTCTGAAATGATCTACCACTAGAGGAAAGCAATTGGAACACAGAAGCACCAGGTAATCTC
TTTTAGAAAATGTATTCTGAATTGTTTATTTGGATAAATACTGGCTTTAAGGAAATAAATTGTTGGAATGATACTCAGATTTTTTTTTCTCCTT
GTGCTTAGCCTCTGCCATGTTACTGATTTTAAAACCATTTTGNNNNNNNNNNNNNNNNNNNNNNNNNNNNNNNNNNNNNNNNNNNNNNNNNNNN
NNNNNNNNNNNNNNNNNNNNNNNNNNNNNNNNNNNNNNNNNNNNNNNNNNNNNNNNNNNNNNNNNNNNNNNNNNNNNNNNNNNNNNNNNNNNNN
NNNNNNNNNNNNNNNNNNNNNNNNNNNNNNNNNNNNNNNNNNNNNNNNNNNNNNNNNNNNNNNNNNNNNNNNNNNNNNNNNNNNNNNNNNNNNN
NNNNNNNNNNNNNNNNNNNNNNNNNNNNNNNNNNNNNNNNNNNNNNNNNNNNNNNNNNNNNNNNNNNNNNNNNNNNNNNNNNNNNNNNNNNNNN
NNNNNNNNNNNNNNNNNNNNNNNNNNNNNNNNNNNNNNNNNNNNNNNNNNNNNNNNNNNNNNNNNNNNNNNNNNNNNNNNNNNNNNNNNNNNNN
NNNNNNNNNNNNNNNNNNNNNNNNNNNNNNNNNNNNNNNNNNNNNNNNNNNNNNNNNNNNNNNNNNNNNNNNNNNNNNNNNNNNNNNNNNNNNN
NNNNNNNNNNNNNNNNNNNNNNNNNNNNNNNNNNNNNNNNNNNNNNNNNNNNNNNNNNNNNNNNNNNNNNNNNNNNNNNNNNNNNNNNNNNNNN
NNNNNNNNNNNNNNNNNNNNNNNNNNNNNNNNNNNNNNNNNNNNNNNNNNNNNNNNNNNNNNNNNNNNNNNNNNNNNNNNNNNNNNNNNNNNNN
NNNNNNNNNNNNNNNNNNNNNNNNNNNNNNNNNNNNNNNNNNNNNNNNNNNNNNNNNNNNNNNNNNNNNNNNNNNNNNNNNNNNNNNNNNNNNN
NNNNNNNNNNNNNNNNNNNNNNNNNNNNNNNNNNNNNNNNNNNNNNNNNNNNNNNNNNNNNNNNNNNNNNNNNNNNNNNNNNNNNNNNNNNNNN
NNNNNNNNNNNNNNNNNNNNNNNNNNNNNNNNNNNNNNNNNNNNNNNNNNNNNNNNNNNNNNNNNNNNNNNNNNNNNNNNNNNNNNNNNNNNNN
NNNNNNNNNNNNNNNNNNNNNNNNNNNNNNNNNNNNNNNNNNNNNNNNNNNNNNNNNNNNNNNNNNNNNNNNNNNNNNNNNNNNNNNNNNNNNN
NNNNNNNNNNNNNNNNNNNNNNNNNNNNNNNNNNNNNNNNNNNNNNNNNNNNNNNNNNNNNNNNNNNNNNNNNNNNNNNNNNNNNNNNNNNNNN
NNNNNNNNNNNNNNNNNNNNNNNNNNNNNNNNNNNNNNNNNNNNNNNNNNNNNNNNNNNNNNNNNNNNNNNNNNNNNNNNNNNNNNNNNNNNNN
NNNNNNNNNNNNNNNNNNNNNNNNNNNNNNNNNNNNNNNNNNNNNNNNNNNNNNNNNNNNNNNNNNNNNNNNNNNNNNNNNNNNNNNNNNNNNN
NNNNNNNNNNNNNNNNNNNNNNNNNNNNNNNNNNNNNNNNNNNNNNNNNNNNNNNNNNNNNNNNNNNNNNNNNNNNNNNNNNNNNNNNNNNNNN
NNNNNNNNNNNNNNNNNNNNNNNNNNNNNNNNNNNNNNNNNNNNNNNNNNNNNNNNNNNNNNNNNNNNNNNNNNNNNNNNNNNNNNNNNNNNNN
NNNNNNNNNNNNNNNNNNNNNNNNNNNNNNTATTATATATTTTGGAGATGATTTCATAGAATAAGCACACAAAACTTTCAGTTTTCTGAGACCA
CTTACAGTTAGCCAGTCACGTAAGGATGTAGAAGAATAAGTCAATAAAACCGCTCCGCCCTCCATTCAAATGGTTGCCTGCCTCTCACTGAACC
AAACACTACTTTTAAAATTCATGGTAGAAAGTCCAAATCCTGTTGTGCTCACTTTTAAACTTCCCCAGCAACAAATTTGTCAGACTGTCACACA
GTAGCAGCTTAAACAAATCTTTCCCTCGCAGTTTTTTTCCTTTTTTTTTTTTAATCATGTAAATTTTAGTGTCACTCTGGGGGAAGCCTGGAAG
TGAAAGTTGTAAACCTTTCCTTTAGCTCTTGGTGAGGCAAGCGAGAGAAAGTGTGCATTGACAGTGAAATGCGCACTCTGGGTGGGAAGGAATT
CCTCATTTCCCTCTCCCGCTGCAGGACTTGCATGAACTCTGTCCAAAGCCGCAAGGACTGCGCGTTCATGGTGCCCCTCGGTAGAGTCCCAGCT
GCGCGCTTGCTGATTGCTATTTTGCACCAAAGACGGGGCGATGATTTTGTTTGTCTGTGTTTTTCAAGTGCGTGTCAAGTGGCTCAGTGACAAC
CCACACAGGTCCAGGGATGCCCGAGGCCGGATTTTTGCAGTTTTTCGTTGCTTTATCCTGATCGAGCTTCGAACTAACTGAGTTACTAGCAGTA
ACTCAGCTGAGCAGCGCTCAAGGTGCGAACCTTGAAAGCCAAACTTGGTGCCTGTGTTCATGTAACTGTCTTTCCTAGGCTTCTGCCAGACAGA
CAACCCTAAACTCCATGCGCAGTTTGAGGTTTGACCCCAACGCGATTCCTTTAATCTTTTGAAGGGCCACAGAGACACCCTTTCCCCTGGAGTC
AACGTCGAGCGTTGTCTCTGCCACACTGTTCTGATGATGCCCTGTCTCGGTTGGTCTGTGTGGATGTGCTTGGCTGTGGCTCCAGCAGCACTAG
ATCTGAAGTCGGCTGCTCAGAAAATGCATTTGAGGGGAGTCTAGCTAGCTATTTGAGGGAGTCTCGCTTCCACTGGCCATCAACTCTCCAGTAA
ATACGGCACACCAGAACCTGGCTGCACTAGGAAGCTGTGGCCCTGGCAGGCGAGCGCAGCCAGCGGGATTCGACCCCTGAATTGGGACTTCTTT
AAGATTCGTTTTAAAAGAAAAGCAAGGAGGAAAAAATGTCTTCCCAAAGCTCCGGATCCCCCCAAACGCCAGGGGACCACTGAGCTTTGCCCTG
CTGTCACGATCTTTGTGCTGAAGGAGGAAAGTCGGGCCCACTCGGGAAAATACAGAAGGCTGGAGAAGTTGAGCCTTCGCTGACAATCGCTGGA
CACCTGAGGAACTCATCGTCCTGAACTACCATAAGGCGCAGCCCAGGCAAAGAGGCTTTGAGAAGAGATGAGACCCTAATTTGGGTGGATCACG
ACAGTAGAGACCCACCAGCCGGGGGATTCCCATGCAAGCTGGACCGGCTGGCTACCACCGGTCTGAGAGACGGGGGCGCTCAGGTGGGTTCTGG
TGGCCACTTCCTAATGTCTGTCCCCAAACTCACAAGATCGACCCTAAGGACCTCCAGGTGAGACTGGTCCTCGCGCCGTCGGGGCGTGCCCAGT
GCCCTGCTCCGCTTCCCACGACCCCTAACCAGGGCCGCTGCTGCCCCCTCGCCTCCGGTCTGAGCCCCGACATGACCGTGAAAGGCCTGCCTGA
TCCTCCATCCCGCCAGCTCCTACCCGCCTGGGCCAAGACAAGCCACCCCAAACTTCAGACAAGGCCTCCGTGCCGCGACCTCCACAGCTTCTTC
CTCTTCCACGGAACCCAGGCTGCGCAGATGCGTGTCGAAGGAAGACACACGCCCGGACCAGCCAGCGACCCCAGCACAGATGAAAGTGGAGGGG
TTCGGTCAATATGTGGACAGTAGCGGGCTCCATGGAGTGGGTAGTAAGAAGTTCCGGAGGAAGCAAGGCCCAAGAGAAGTAAGGGACCCCGGAG
CACAGGCCAGCTGCTCCGGCTGGGGACAGTAGCCGGCAGCGAGCCAAGCAGGAAGCAGACCCTTAAAGCTCTTCGGCGAAAATGCCCTCGGCGC
CGCGGGGACGAACAAGGTGGGGGAGGTGCCCCTACATTGCTTAAGCGGAGTGCGTTCGTTGCCTGAAGCAGACCTCCGGACTCCCGCCGGAGCT
GGAGGGTGGATTCGAGCTCATGAGTTCGGGGTGGCCTGAGTCCCCCATGCTTTCAACTTTTTTTGTAGTCTAGAGTTCTTTGAGGCCTTGGTTA
GAAAACTATCTCCTCTCCAGCCGCTGCGCACACTCAGAACGCGGCGCGCTGCGTAATCAAGCCGCAGCCCAGCCGCAGAGAAAAGACACTAAAT
AAAGCAACTCTGCGAAGGAGAGGATGCTTAAAACCCAAAACTTCTGCGGTGGAGCAGTGGCTGGCCTTGTTTAAATGACTCGGTGCCACTTCTC
CTCAGCTGCTAGTCTGGCCCAGGGAGGCGCTCAGAGCTTCCCCCACTCGGCCATCAGCCCTCCAACCCTCTTGCGGCCGAATCCCACCCTGTCC
TCCCAGGACCCCAAGCCTTGGCTCATGGACTGCAGTGCAAGGCTGCCTAGGGACCATTCCCGGATGCCAGCCCAGGTCCCTGAAGCCTCGCGGT
GGCAGCTTTGTGTCCAGGGAGCACAGGGCGTCTCCCTCCCGCTGATCTCCAGGCCCAGGGCTTCTCCGGACGCAGCCCTCGGTCCCCAAGCCCG
ACCGGTCTCTCGATTCCTGTTTCGGGGTCTCCAGGACCGAGGCCACCAGTGGCGCCGCTGCGCCCGGCAAACCCACCCAGGGCGAGTGCACCAC
CGCGCGTGGCTGCCTGGCGTGGGATCTGAACCTGGGCCTGGCTTCGGGCAAACATGGCAGCGTGTGCCTGTGGGTGCGGGGTCGGCGTGGGTGC
GGGAGCTGGGGACGGTAGGGGCTGCCACCGAGTCCCGGGCCGGGCAGCGTACAGTAGCGCGCGGGGGCCCGCGGGCCAATTCCACGAGCGCGGC
AGCCGGCCGCGCCCAGGCTGATACCGGAAAGGCCTGTGATTGGCCGTCGGTCTCCTCTATGCAAACGAGCTGAGGGAATGCAATTCCTCGGGTC
GGGCTTACAGTAAAAGCACGTTCATTTCCAGGCACTCTCATTCATAGAGCCAGCGGGCGCGGGCAGGACGGGCGCCCCGCGGCCGGACCCAGCC
AGGGCACCACGCTGCCCGGCCCCGCGGCTGGCACTTCCATCCTGAGCTCCCCGAGACGCAACAAACTCACCCTTTGCGGCTCTTTCTAGATCTG
CGTTGGACCTTCTTGTTTTCCTTTCCTTTCCTTTTTTTTTTTTTTTAATTTTTATTTTTATTTTCCCTTTCTTACTTTTGAATGAACCGGCTTC
TAGGCTTTGGATGTTTCAACTTCTACGCTGTCAACTTTTCTCCGATTGTTTCTTTTGACAACTGCGGGAGAAAGTGTTCCGGAGTTCCAGGCGA
GCGGTGAAGTTGCGTGTGCGTGGCAGGGTGCGTGGGAGTGAGCGTGTGTAACTCGAGCCTACTGGTCTACGGTGCCTCCTCCCAGGCCCGCTCC
ACCTGCTGCGGTTACACGGTGCTCGCTCGTGGGTATTTGTGCGCCCCAGCAGAAAACCAGCCACCGCCGGGCCACCTTCGAGGAAGATCATCTT
GCCAGACTCTGGGCTGACTCACTCAACCAATGTAGACAGTGGCTGACTTCCGAAGAGTGCGAGTCTGCCTGTGTGTGTGACCCAACTGCGGCTC
AACTCCCACCAAACCACAGGATCAGCCACAAACTTAACCAGCGTTCCCAAACCAGAGTCCTCAGCTGTGQGAAGCTCTACCCTCACTGTCATCG
ACTTTGACTTTTTTTTTTTTAAGATTAGCTACAGATCTTTGTAAACCACTGACCATTTATTTGGCCAGAATTTATTGAGTAATGACAAGTGATC
CTATCCCAGCCTTCCAACTACTGAAGCTGATTTTCAAGGCTACTTAAAAAAAAAAAAACTGCAGCAAACATTAATGGATTTCTGTTGTGTTTAA
ATTCTCTACAGATTGTATTGTAAATATTTTATGAAGTAGATCATATGTATATATTTATATATACGAGCACATACATTAGTAGCACAATCTTTTA
AAGTTACGGCTCTTGCTTTTGAGAAACCAAGTGAGTTTTTCATGGTAAGAGGCGCGCTCTGTATCGAAGACACTCCTAAGTTTTGTATTTTGTT
GAGACTCTAAACAAAACTGACCCGCAAGAAAGAAAAACAAACTGACAGGCAACTAACTGCTGGAACTTCCAAATCTAGTTTTTGCTCGTCATTT
TTTGGTTCTTGTTGTTGTTCTGCGCATAAATATTTTAGGACGCGTATGGGAATTTTGCCTCCGGGACCGTTTGTAATAGCCAAACACTGAACTT
CAACTCTCAAAGCGAGGCTCTGTTGGGCATTTGACTTTGAATTCTGGTTGCCCACTTTTTAACGCACTAAGCGGCCAGTTGCTAACCCTGCTTG
GGTGTGAGGCCGATCCGTGTAACTACATCTCAGTCCCCGACTGATCCTAATTTACTCTCCTACCCCCACAACCCTCCGGTAGTAATAAAGGCTT
CTGAACTTGTATGTTGGTCTCCCGGGAGCAGCTTGCAGAAGATCCGAGCCCCTGTCGCCGTCTAGTAGGAGCTGTTTTCAGGGTCCTTACTCAA
TCGGCTTGTTGTGATGCGTATCCCCGTAGATGCCAGCACGAGCCGCCGCTTCACGCCGCCTTCCACCGCGCTGAGCCCCGGCAAGATGAGCGAG
GCGCTGCCGCTGQGCGCCCCGGATGGCGGCGCCGCCCTGGCCAGCAAGCTGAGGAGCGGCGACCGCACCATGGTCGACGTACTAGCTGACCACC
CTGGCGAGCTAGTGCGCACCGACAGCCCCAACTTCCTCTGCTCCGTGCTACCCACTCACTCGCGCTGCAACAAGACCCTGCCCATCGCTTTCAA
GGTACTCCTGCCTCAAGAGGGTGGCGGGAGGAGCAGGTGGAGGTCAGCCGATGGCCAGAGTGAGCCTAGGGGGCAGAGGCTAAGGCGGCTTCTA
GAGAAGGGTGCTGCCTCTAGTAGAAGTCTCTGGTCCTTCTCACTGAGTTTGGGATGGGGGGGGGGATGCTGCGTTACCGTGGCGACCCTCGGGA
GGGTCAGCCTCAGAGGTATCCAAGAGGGACTTTTTTTAAAAAAAAATCAGGATAATTTCACAGCGCCTACCAACCGCCTTCCTTATCTTTGCTA
CGAAATAGAAAAAGTTAGAACCTTGGATCCCGCCAGTCCATCTTCCTTAACCTTCCCCGAACCTCTGCATGAACACCCAGACCCTTTTGTATCT
CTCAAATGAAAGCATCAGGAAATAAAATAAGAGATGCTTTAGTACCTTCAGGTCAGAAGAAAAAAATAAATAAATAAACCAAGGGAAACAGCCA
GGGATCACACACACACACACACACACACACACACACACACACACACACACGCCCCGCCGCCTTTTTTTTTTTTTTTTTTTTTTAAATCGCGCTA
TAACATTCAGCGTGTCCAAAGTCCGCGGCAAGGAGTAGTTGGTTAAGTTTGCCAAAGTCCGGAGTTTTTCCGAGCCTGTAGCCTGCTCCTGCCA
GAAGCCGCAAGTATTGAATCCTGTTGCTTTTTCTGGAACCTCCAGAATATTATCGCTGGCTCACCTAAATTAAGCCCCAGGCAAGAAAGGTGAC
AAGGTGTCTACCGACACCCAAAAAGGTCCAATCCAGCAGCTTTTCTGTTTGAGCAAGCGGCCTTGTACACCCGGCAACTTCAGGTGGGCAGCTC
ACGTTGGTCAGGTCGCTTTTCACCCTGATCTTGCCCTAGCTTTGTGTTGCGTCTAAAACTTCGCTTTCAGAACCTATATATAAACAACCTCGGG
CGGTTTAAAAAAAAAAAGAATAAGAAGAAGAAGAAGAAAGAAAGAACCACCCTACAACTCTGGCAGGGAGCTGGAGGAATTTAGATTCTCTTCT
TTGGTCTTCTCCTGAGGTGGGTTTTAAAAGGTACAGCTGAGAGCAAAAAGACTCTGTCAAGTTGTGTTTTTAAAAGGCTAAGAAGGCGGGACCC
GAGCTGAAAAGGGAAGCTGCTCTCCTTTTTCTTTTTTCTTTTTTTCAATTTAGCTGAATAATTGTCTCATTTAGGAGGGAGATTAATTTAATTT
AAGCTTTTCGTAGTTCCAGGCCTCAGCTGGATCTTGATCTAATTACAATGAATAGCGCTCACTTTTTGACAAGTGCTGTCCGGTTCCCCTTTTC
ATGCTAAAAACACCATCCACATTAAAAAAAAAAATCATAGAAGTAGAATTTCCTCCTGACTCTCTCTGTACAATTGCCACCTTTACCACTGTTG
TGAAAGCAACTTTTTAAAGGGGTAGAGGTGGGGTTGAGAGTCTGAAGGGGAGCCAGGCACTCGGGTTTTCCTTCCCTTCCAAGTATTGGGGAAT
CCGTCCCAATTCCTTTAGAAAAACAAATTTAGCTGGTGTTGTCTTCTGTTTACCCTGAGAGGGACCTATCTGGGCTCAGCCCTAAGGTCACTTT
CAGAGAACAGAGAGAAATCAAACTTATTGTAGTCAAGGAAAGGGCCAGTTAAGGTAGATCTCCCTGCCAGCCTAGCTAAAGGGACTGTGGCTTC
CTTGAGGGAAGAAATTGGGTCTTTTCTGAGCTTTGTTGCTGTGGTTGTTGTTGTTGTTATTGTTGTGGTTGTGGTTGTTCTTCTTCGTCTTAGT
CTACCAGGGAATCCCAGTTTATCAAGACACTAAATAACTGATTTTTAAAATCGTCTTCAGGAGTTGACGTGGTCCCGTCTTGAGCTACCACATG
GAAATGTTTATTTTTCTTTTCAAAAGAATTAAAGACCTTACACATTGCCTTTACAAGCCACGAAAAATAATTTTTTCCTTTTAACAAAAATAAT
CACTGCCCTAGAGATTCCCCTTTACAAATGATTTTGGAAAGACCTCAGTGTGTTTCCCTGAGTGACAGCCAGGAGCCATGACAAAGGTCACGCT
GGACAGGGAAGTTGAAAAATCAGACCTCTGGATTAATATCTGTCACCACCTATGCTGTCCCACAGAGGGACGGCTGCTTCAAGGAGCTCACCAG
TCAGTAGATAGAATTTGCGGAGGGAAAGGAGATTTAAAGGCTGGGTTTAAGAGGAAGCTCGACTTCGAAACAGACCATCTTCCTTGCTGTATTT
TCTATGGCCCCTGGCCCCTCTGTGTGCCAGCTCCTACCAAACACACACAAGCAGTTTCTACCAACAGTCTTTACATTTACATGTGAATTAAGAT
TCCGGAATCTCTTTAGGGGTTAACCCTGCAGGACTTATCCTATTCCCTGCTGCCGCCACCACCCCCAGATAAAAATCGGATGATGTGAAGCCCT
GTTCAGATCACTTGTAGAGAAGCATCTCCCCGAACCTTCCGCAATCTTGTTAAGTCCTCCGCTTTAATCTTCAGAATTATCAGGAGACTTACAA
TCATGAAGTCCCTTGAAAATTGATTAAAATTATGCTAATTACTCCTCCCATCCTCCACCCCTCTTTCCACCTATAGACTGTTTATCTCACCATA
GAAGAAACACTTAATTTCACTGCCGAGAAACTGGGAAATCTGCTCCATACTACACAATATTTGCAGATACCGTCTACAAAGTTGTCTAGGTGAC
TTGCAGTAGATTTTATAATACTGTAATAAAAGAATTTGTTTAGCCCCTGGTACACCAGAGCACAAAAATATAAACATACCTTTATCAGGGAAGT
TCAAAGACCATGGGTGCTGATGGAATATGCTTTCCAATAAATAAATAAATAAATAAATAAATAAATAAATAAATAAATAAAATTCTGGCCGGAA
GACCATCATCCCTAGCTATGTGTTAAATGTCATCTCAGATAAATTCTACGTTCCATTCCACAGCCTCTTTGAAACTCTGGAAGATTAGAGAATT
TGCAGTAACTAAGTTGTTGCTTTAATTTCAACCTGTAAAATTGTTGGAAAATGCCAGTTTCAAACTAAGAATAGGCTAGCCAAGAACAGTGCTG
GGAAGTCCTCAGAGCAGAGAAGACAGCTGACATTTGGCCCAACTTCCTGATACTTGAAGAACAGGAGAAGTTCAACAAAATATGAGCTATCTTG
CGCCAGCAACTCCCTTCTTGTCTGTTTGGTCTGTACTAAATGTAAATGTTTCTCTTGCCTTACCTATTGTTTATAGCTTTTTACTGCAGACACT
GCTTTGTATTTCTGTTTGAAGTTTGATTTCTTTTCATTATTTCTATATCATCTCTCAGTGACAAAAATCTATATCAAATTGGAAGACATCTTAG
CTTTAAATAAAACAACAACAGTGCTAGTAACCTAGCCCTAAGTGTGCTTGTCATTGTTTTAAGTACAGAGTTAAATGTCCCTGGATTTAATTTT
GTCTCCTTCCCTTCTCCATCAAAACTCTTTGGAGATAAATCAAAAAGCCCAAGAAGTAGTAACCGAGCCACTCGATCCCCCCTTCCTGCTTCCT
TTAGAAATGGGGGTGATGCAATTTAAACTCCTAATTTTTAGACTTTTGAATTCCAACATCAACAAGCTTTTCTTGCCCACCATGGTCCTCTTGT
GCTGTACACGAGGGGGCCTCATGGGTTTGACCTCTTGGTAATGAGGGATCCCTGGAACAACCATGGTAAACTGAGGCACGGTGGGGCACAGTGG
GAATTCATGACTTGGCGTGCCTTTGGGCGCTCTGGAACAGGATTTATTCATTTTGGCCTCTTAGGAGATATGGGCCCCAACAGTCAGGCATTCA
GACTGGAAGCCCGGATGTCGATTCAGTGCCCTCGGAGCCCAGTGGGTGTTGAGATGAACTGGAAAGGCCTAGGTCTCCACAGGGAGATGAAGGC
AAGGAAGTGAAGCATTTTCACAGAGGGTATCTCATCCTTGTGAGCAAACTGTCCACAGGCAAATGAAAACATTGATGAGAGAGATGGCGGCAAA
AATAGACAGAAAACAGAATTTACAGCAGTAACATTTTGTAGGAATAGAAAGAAAAGATAATAATGATCAATTAACCGAGCAGCCGAATTTATTT
CAATGATGTTCTTTGAAACAAAAGAGTTGTCTTATTACCACTCCTAATTAAAGGCATCAAACATTTGTGGTGGGATAGAAACATCTAATTACAT
ATTGCTTGGAGAATAAGCGTTTTTAAAATCTCCTTTGTAGAAAACACGTCCAACAGTTGACATGAAAGGGTTAAAAGCAGAGCCAAGGGGCCGC
AGGGTCCTTGTTTCACAAAGCAAGTGAGTGAAAACAGATAAAAATTAAAGAGATAGCAAGATACATACCCAGTCCTAGAGAGCAGAGTGTCCTA
GTGATGTCCTAGGGGTCCCCTCTGTCCATTTCTCAGGGTAGCTGGGGCAATTTCCTGACATACGTTCTTTAGAACCCAGGAGATAGAGCAGCCA
CAATGAATAAAATCGCCCAGATAGCCATCTGCAGGACATCGAACAGCGGGAAGGAGACATGACTAAGCACCCAGTAAGAATGGCGAGCAGAGAG
ACCAGACCTTGATACCAGATTACCACATCTGCCGCCGCGTTATTTCATACAGAATGAGAAATATCCCTCTGATAGATTGTGAACCAGCCAGTGT
ACAAAAACTGAGAAAAACAAAGTGGCAGTAGAAGAAGAGATGTTTCTGCTGCCATCCCGGGAAAACCTGCCCGAGGATGACCACACAACTGAGA
TAAATAACAGACATCTCACCGAAGACTGACAGCATGTGTCTGGAATGGTTGGAACAAACTGAACTCTCGGGGCATGGCGATTTGAAATCCTCTG
GTCGCTTTGAATATGGAACAAGGCAAACATAACCGATATCAAGTCAAAACTGGAAACTTTAGCTGAAGTCAAAGAACGGCAGGCTTGGTGGTGC
ACACCTGTAAATCCTGACCTCGAAGGCTAAGAGGACTGGGAGTTCAAGGCCATTCTAGGCTCCATCGTGAAACCATAGCTCTCTAAAACAAAAC
CAAAAGGACCAAAGAGCAGCCAAGCAGTGGGTAATGTTTTGTGAAGCACTTTCAAGGCTTCAGAGTGTTTTAATCTGAAATTACTACTTTTTTT
GGTTTTCTGGATATAAAGTAAGCTCATCTACAAGTTGTCTTTCCAAATATACTAAGCCCTTACCTTTTCAGTGGCAGTAACGGAATCCCCCAGA
ACACACTTCATACAGATGCCAGACAGCACTCTGGTTCTACCTTTGATTTGAGCAGAATGACCACACTGGAGCACCCGTACTCACTGAGGTCATC
CCGCTTGTAATTAATAATAAAGAAGTGGCCCCTGTCTACTTTTTCTCCTTGGGTGCAAGAGTTTGCTGCTGGTGAGTGTCCAAGAGCGGCACGA
AGAGGTGCCAGAGATTAGCTGCAGACAGACAGTTTAAGTATTTCCGGGTCATCCTTGGAAGCTGCACACTGGGTGGCACACACACCTCTAACCC
CAGCACTAGCAGAGAAGACAGGAAGATCGGGGGTTCAAGATCACTCAAGGGTTCAAGATACAGTGAGGCGGGGGCCAGCCTGGGCTATCTGAGA
CCCTGCCTCAAACAACAACAACAACAACCAGTAACAAATTTAGAGCAGAACTAAATTTAAATACTTTCATCCAGGTTTCCTTAGGTGCACCAAG
AAGGGGCCAAGCAAGTAAAAGGTGGGGCCAGAGAGATGGCTCAGTGCTTACCAACATGATTCATGATACAGAGAATGGGTCTGATTCCTACAAC
CTATGTCAGGTGGCTCACATCTGCCTACAACTCCAGTCCCAGGGTAATTTGCTCCTCTGGCCTTCATGGCCTGCTCTCAAGAAAATGCCCACCC
ACATACACTTAATTCAAAATGCCAAGATAAATCTTTTTTTGAAGTGGATTAGATCACAAATCTACAAACACAAGACTTTCTGTCTTTCGAATAT
GAGGTCTTAAGAGATAACTGTACCAATGAGAAACAGTAGTAGCTTTTCAGAATTCCTGTCCCCGCTTGTCTTGTTCCCACTGTGTCCTGTCACC
TTCTGTGGCTTTTCTCCTTTAATCTCTGTGTCTTCCTTATTTGAAAATCCACACCTGTCTCTGCATCGCAGGACTCACAGCAAGCTGTTTCTGT
CACGATGATCAAATGATGACGGACGGCTCTTCTATAAACTAGAAAGTGTCACCATTAAGCATTAAGTTTAACATCAGCGCAATTGCCAGACAAA
TGACACAGCCAGGTGCCTGTGACAGCACTGATGTCTGCATTTGTCCCTTGGTTGACGTCTAGGTGGTGGCACTGGCGGACGTCCCGGATGGCAC
TCTGGTCACCGTCATGGCAGGCAACGATGAAAACTACTCGGCAGAACTGAGAAATGCTACCGCGGCCATGAAGAACCAGGTAGCGAGATTCAAC
GACCTCAGGTTTGTCGGGCGGAGCGGTAGAGGTGCGTATCTGTCACGGATGGGTGTGAAATTCGAACCCGGGTTTTCCAAATAGTAGCCGTTTC
TTATTATTGATGCAGCATAATGATATTTATTTAAGGTAATGTTTATTTGATACCTAACAACTGGATATTATCACGTTTTGATGACTAAATTGGC
TTACAACTGACTTGGAACGCACAGCGTGTGATGGACTTGCAACGCACAGTGTGTGATGCGTCAATTGTCAAGTTCAATAAAACATTCCACCGTT
TTCCTAAACTGAGATAAGTGAGCGAACCACCCCAGAATGAGGACTCAGATTCTATAATCGGTGGTCACTATGCGATAATCAAAGCCATGAGCCT
TTATCATATGGTACTTACGCTCCCTCGAACATGCGACAGGGTTTCAGTTGGTCACATCAATAATTTTGGCGGAACCCTTATTGATATAGTTTTA
AGTAAGCTTATATTCCTAGGATTAAAAAAAATGGACTCTTACTGGTACATCTGAGAGCAGTGTGACCTTCACTATGCATTCTTTGTGTATGGTT
TGGTGGGAGAAGCCAGGCTCACTTAACATTTAGATACTGCTCATGTGAGAGACCAAATTATTTCCTTACCCCAGCTGGACATGCAGTTATTATG
CCTCACCTTTAACCAGTTATTAAACTATTGGAGTAGAAAGAGGACCTGCTCTCACTGTAGGCTTGTCTGCTTTCCAGTTATCTTCCGAGGTATG
TGTTCTCTCTTCATTTCAAGGAGCTACGGCACATTTTACAAACATCAGCAGGCCGTGTGAGAGTCTAGGAGCAAGGTCTTCGCTTAAACCCTCA
CCTTTCTAATGTAGAATTGAACGATCTTAGCCGTAAATGATATCTCTAGCTTAATCAAAGCGGAATGACATATATCTAAGTCATACGATCAGTT
CTCAGAGAGGGGAAGACACAGGGAGGGGCTAGTCGTGTCCATCGCTCAGTGGTAGAGCCTTCCGTGTGAAAGGCCTTTAGTTTGATCCCCAGCA
CCAACCAAGCAAAACAAAGCAGGTAGACTGGCAACAGACAAGAAATGTCAAGCAAAGGGATTGTTACTACTCATTCTCAAGCCGTTCAGAACAG
TGGAAATTCCGTGTTCATACTGGGAAAGAGGAGAGAGTTGAGAGTGTGAGCCTGGACTTCTGTGTTTGCTCCCCTACCCCTGCCCCCAGATGCC
CAGGGCATTTTCAGAATGATGTCACAGCTGGAGAAAAAAATGTAGAGAACATATAATGTTATTGAAAATATGTGTTCGCGCTACTGTGCTAATA
ATAGGGTGATTGAAAGAAGAGTCTACCCACTTATCGAAGGCCTGGGAGAGCCTGCGCCCTTAAGTGGATCCACTTGGAATATTGAAAGTCTGCC
TTTCAGCAAATGCAATTCGCATTACGGTTCAGAGGCATGTGTTTAGAAAATATCACCGAGGTTTCAGATGAGTCGCTGGCCGAGCGGGTGGGAA
GCCAAGAAGAAAGGAAGACCCCAACAGCCAGGCCCACGCCCACCTGCCTAGCAATAAGCTTAGTTCGTAGGATCTAGCTGGGTTGCCACAGAAC
ATGTCCCCATACTCCTAGGCGTCTAAGTGGGTCTTTTTGTCATGTTTGGCTATGGAAGTTTCGAAGACTATTTAATGGACTATTCCAGTGAGAT
TTTCCCGTAGGGAGTTGCATGGTGGCTTTGTGACGACCGTGGCAGCCAGTTGATGATGATCAAGACTGCCGTTCTCAAAGCAGCGTGCCTGCCT
ACCTTGGTGGTGCTATGTGCTGGTCGCCTATCCCTCTTTGGCCATTTCTCTTTTGAGTGGGTGACTAAGAGGTGCTCCTGTTTACCTGAGGAAC
AATGGACTGTTTCCCCAAGGCGTGGAGTGTTTGCACTCTGCTGTCTGATTCGTGCCAGTGTGCACTTGAGTTTGCATAACCGCCCCCCCCCCCC
AGGAAAACAGCAGCACCCAAGGCGAGGCTGGTTTCCCATACCCTGGAATGAAAAAAATTAATCAGATGCAAAAAATTGGATTATATTTGACTTG
AGCAGGCTCTCCTCTTCATGAGGGGTAACGAGTAATTAAAACTCAGGACGACTAATTGACCACTTGACCCAGTTATGGTTTCTATATATAATGT
TGGTCTTGAGTTTTTATCCTTTAAATTTTTCATGTCAATACCAAGACAAGTGAGCTGTCGGTGTAATAAACATGGTTTTATCTCATAATTTCAC
TTTGTAGTCACAAAATATGATTTTATTTTGATTTTTCATCCCATCAAAGCCTGCTGGATATTCCCCACCCCACCCCACCCCACCCTCTCTCACT
CTCTTTCTCTCCTTCTCTCTTGCGATTTGCTTCCCATTAGAAACTGAAGAAATGACTCTCACTAATTCTCACAATTAGCCCTAATCTCCCTGGC
TGAACCTTATCCTTTAAAAGTTGCATTATGCTTTATGGAACGATCTTAAGACCCGACTATTTCATTTTTCATTTTTTTAAATGTGCCTAAAAAT
ATGCCCTCAGAGGCCACACACTGGCCCAGAACGTCCTGGCCTTCCAACACATCCACATTCCGTAAGGTCAGTTTGGGATTCTGTCAGTGATGGC
TTCTCGGAGGGCCCTGGGTACTCCGTGTGGGATAAAGGGTAGAGATGACATCAATGGACACCCTCCTTTCTTGTTACCAGATGCCAGATTTTGA
GGATTGTGACCCTCACAGAAACTGCCAGTTAACCAAGGAAGGATTTTTCTCTGTTCCAAGAAATGGATCTGTCTGGGAGCTGGCTGATGCTCAG
CTCTAACCTCAGGTTCAGCCTGTGACTGGGAAAACCTGCCTGTCTGGCTTCTAACCCCTGGCTGCCTGCTGGCCCCTGTGAAAACCTGGTGAAG
GCAGAGGAAGCTCCTGCCTGCTTCCTCCATGACCATGGCTTCCGCCTGCTCTCCTTTAGATCAGCTCGGGTGTATCTCCTCATAGGAATGTTTC
TCCCTTTGATTCCCAATCTGCATGTTGATTATCTGACGGCCTCTACAAAGGAAGCAGAGATAGCTGCTCCCGGTTGGGAGTTTAGGGTGGGGTG
AAAATCAGAGGGGATCTTGGGAGACCCTCTCTGAAGTCCAGAGATTAGGAGGGCGCTCAGGAGGCTGCCCAGAACAATGCATGCTTTAGTCACA
GGGCCTGAGATTATCACTCATCTCCGAGTTCAGGGTCAAAAAGAGATCTCTTTCATGAGGCAGCTCAATTACCTCAGCCTTTTTCTCCGTCTCT
AACTTGCTCCCATGAGCTGGGGTGTGAGGTGACAAACATTTAAGAAACCTTGGCAGTGACATCTGCAAACACCCATTTCCTGCTGGGGTGTTTC
ACCAGCTGCCGAAGACTTGATCCATCAGTGAACTTAGCTTTAACGATGCCTGTCACAGGGAAACAGATCACGCAACTACCAAACATGACAACAG
CCGTGTGGCAAATGTGAGGAGGGAGACCACAGCCAATGCTCACTTGTTCCAAGTTGGTGATTCTTTAAATCTCTCGAAGCTGTCATAGATAATT
CTGAAAATCCCCCCAAAGATTTCCTAAGGTCCAAAAAAAAAAAATGCACACGGGCCCAGATTTCTATAGTCCAGCTTAGTTTCGGGATTGTTTA
TGGATCTTCCTGGCACGTGCTGATACTAAAACGTGCGAATCTGGAACGTGTCTTGGACTGCTGAGGGTCAGTTCAATGCCAAGTCTTAAACACA
GCCCATACTCAGAAGATAAATATACATGAGGACCCACAAGGTTGACATTTTCCTGTGCTTCTCTGTTGTGTGGATGGCGGTGATATCTGTAGAC
TCAGGACCTGGTTGGTAGAGGGTAGGAAGGTATAGCAATTTAAAAGGCCAGGGCAGGCATCCGGTGGACCACTAGGCATATGGCTGGATGTAAT
CGTCTGTGTGGGAGCGAAGCCACCATTGCCAGAGCAGTCTCTTCCCTAGTGACTGTCAGTCCTGGCTGCAGTGACATGCACGCACATCCCCAGA
AGACCAGTAGTCTGCTGCTTGCCAGGAACAGGTCTCCTTTCTTAGTGGAATCTGCTGTTTACGCTGACATCCTGGCAGCTCAGAACTTCCCCAG
TTTGTGCTTTTCTGAAGTGAAATTCCTTCCTGGANNNNNNNNNNNNNNNNNNNNNNNNNNNNAATATTTATCCCGTCACAGTCTGGGCTCCTTC
ATATTTGTGTAGTGTCGGTTTCTTTAAGCATTTCCATTCCGCTTTTACGTGATTTGGGGTACAGTGTGGGATGTTGTCTCTCTCGGCTGAGCGG
AAGGCTGTCGTGGAGACGCGTTGCGGGAAGGATAAACTGTTCTGGCGCTCCAAAAAGGGAGGGCCGCCTTGGTGTGCGGCTTTTCCGGGAGAGT
TGGTCTTAGTGACTCATGATGTTATCACAGGATCCATATCATTCTCTATTTGATCACAAATTCATAGAGGAACAAGAAATCCAACTGCCACCCC
TAGGGATGTTTCTCCGAGAGCAGTCCATGTAAGCACTAGAAACTGATTGTTGGGTCTCCTAGGGAGAACAAGAAGAAGGAAAAGGTGTGCGCTA
TGTTAAAATCCAATGTCCACTTTTCTTCCATTTTCTTTCTGTTTTTTTTTTGGTTCACGGTTTGTAATAGCGCATCTAGTAAAATCTGTTTTCT
TCGGATTTAACTACAAACAAACAAAAATAAAATGGTACAAAACAAAAATAAAAACTAAGCAAAAGCCAACAAAACTAAGGGAAGCCTGGGCCCC
TCAGAGAACAAGCCCCGGCCGGTCCTAGCAAACACTTCCTTTCCACAGCAGGCCAACAAGCTTCACCCCAGAACCAACAGCACTGACTCAGAAT
CTGCCTGTAAGGATCAGGTTTCCCCTTCTCTTTATTCCACAATAAGAGGGTTAGCAACACTTTCCTCAAGCAAGCTTCTCCCTGTCCAGCTTAA
AGCGTGGGGTGGCCGGAGCCTCAGCAGGGACCAGGAGCTGCCCGCTGGACGCTGTCCCTGATGGAATTTGTACTGTCATGCTCTACCCCAGCGG
GCTTTACAAAGTGCCAGGCATGGCGGCAGGTAGCTTTTTGTAGCTGAGGTTATTTGCATGCGCAGGATTTTTCCCATGTGGGGCAGAAGCAGCC
CTCCAGCCCTCCTATCGAGCCCCCTCCATCCCTTCCCCAGCAGCTAGGCTTTCCTTATGAGCCAGCCCTTTTTGGTCAGGACTAAAGACTATCA
ATCACAAACTACCTGTGAGAGGAATAATGGTTGAGTCACTTTTAGAATTTCCTGTTTGACAGCAGCATAGACATAAACAGTGATCCAGCTAGCC
ACTCAGTCAGAATAGTTCTAACAAATCAACCTGCTACCTCGCTCTTTCTTCTTCTTCTTCTTCTTCTTCTTCTTCTTCTTCTTCTTCTTCTTCT
TCTTCTTCTTCTTCTTCTTCTTCTTCTCCTTCTTCTTCTCCCTCCTCCTCCTCCTTCTCCTCTTCCTCCCCCTTCTCTTCCTCCTCTTCTTCCT
TCTCTTCCTCCTCTTCCTCCTTCTCTTCCTCCTCCTCCTCTTCCTCTTCCTCTTCCTCTTCTTCACCTTCTTTTTGGTACTGGAAGTAGGCTAG
TTATAGAAGAATATATTCTGTTTCAGGATTTTTTTTTTAAAGAAAAATTACTTGTTGAAGCAGACAGATGGTGTAATCTCTCGTCCCTGTCTCC
TCCCTGCTGTTGATTATAAAACAAGCTGAGAACAGTAGGCGGTGTTTAAGAATGACTGCGGAGTCACGCTCGATGTCTATGGAAGGTCGGTCCA
GAAACCCCCTCCATTCAATTCAGACATCTGCAGCTGCTCCAGCCACTTATACAAAATCGCACAGCCTTAGTAACTAACCCTCAGGACACCCTCT
AACATAATTTACATCACACCTAGATTGCTTATGAATCTAGCTAACAGAATATCGCTTGCACATTAATAGTTCCTGTGGTATTGTTTAGGGAATG
ATAATAAAAAAAAATAAAAATAAAAGAAGTCCACATATATGTTCAGTACAAATGGATTTCCCCACAGATATTTGTGATTGCAACTTCTTGAACC
CAGGGGACCCATGGACATAGGACCGACTCATGGAGTGGTGTGCTGTTTCTAGACTCTGTTGGGCCGTTAGGCAGAGGAGCCTCTACTTTCATTG
AGAGAGTTCTTGGACTAAAATGTTCTTGAAGCCCCAGTGCACATGAAGCCCCAGTCAAGCAATTAACAAGAATGGGTAAGCAAGCTGTCTGTGA
AAATGTCCCAGCGTGCCAGCCACCTATCAGGGAGCGGGTGGGTAACGGTAATCTAGCTGATCACTTCATGCCTGTGTTTGTAAACATGCACTAG
TGCGTTTCAGCCAACCCCTCTATGTCCTCCGTGCCTGGCTCTGCAACGAATCTCACATCCACACATGTTTGGGCCTCTGTGGACCGTGGAGCTA
ACAGTACCGTCCAGTTTTACTCTGCACTGCGTTGGGGTTCCAGCTTACAGCCCAGCCTCTATTAGCCTATATTGGACAGTCTATCCAGTTTGGG
AACTCTATTTCCTATGCCCAGACACTCTCCAGCCAGCGAGCCAGGCTACATGGGTCCCCACGAGTGTACAGAAATCCCAGTGGTCTCCTGTCAC
AGGCTCAGGCTGCAGTGCTGCAGCCCCAGCACGTTGCCTCTGGCTTCCTAAGCCAAGCAGCAAACACTCAGGAGCCACGCAAACTCCACGCCTC
TCACAGAAGATGGAAGTGAATTGGAGCCAAATTATCTGACTCATAGTACTCCATCCTTTTAGAAACTTAAGACCCTCTTCATGAACACATGGAC
CCAAAGGTACCACCTCCCCAACACCTCATCCCAGGAGGCTCAGGTCCAGAGAATGGGAGGCCTGGCCAGTGTCCTCTAGAGAACTGTGTGCCTC
TAATCCAGTCACTTTATGCAAAGGAAGGACTTCTATGGAATTCATCCGCATCCGTATCGCATCTTTCTGGATAAGACAAGAAGGGAGGGACTGT
CTGGAGGTAGAAAGGACTCTTGTTTGATTACAGTATTGGCTGTGGGTCTTCACAGACATTTTTATTTCTATTTGAGATGTCTGTATGGAATATA
TTCAGCCTCTATCAGTTTCTGCCTCTTATTAATGAGAAGCTATCTGAGTCTGGATCATTCATAAGGCTCTTTGTCTTTTTAAACGATGTCTGCA
GAACCTGCATGCAGTAAGGGCCCCATTTTCATCCTTGTATTTAAACCACCCAAGAGGCAGGTCCCCTTCCCTCTTCTTTCCTAGGTCAGTGATT
CATCAGTTTTGATGAGCCTCTTGCTTAGTTTGTCTCTGCTGCGATGACTTTTGACCCCTAAGGGACATTTAATGAGGTCTGCAGATGTTTTTGA
TTGTCACCCACGGAGCCTGAGGGGTGGTCCCTACTATCCAGTGGATAAGGCCCAAGATCTGCTAAACACCCTATTATGTGCAGAATGGCCCCTC
CCACCCCCAACAAAGAACAATTCTAAAACTTTAATCGTGCCAGGACTGGAGAAAGCCGGACTTGACCCAACACTTCCAGAAGTTGTTAGATATC
TATCTCCCTTGCTCCTCCTCCTTCCACTCTTTTCCTTCCTTGAAAAAAAATCCGCGAAAAATTTTAATTCATGGTATTCACACTGAGTCAAAGA
GGAAACAGACAGGAGGCTCAGAAGTTCAAGATCACCCTTGGCTTTGTGTTGAGTTCCAGGCCAGCCTGGCGTATAAGAAACTGTGTGAAAAAAA
CAAACAAACAAACAAACAAAAAGAAATAGTAAATGAATAAGAACGTGTCCAGAAGCCCAGACGAATGAGCTTTCGTGATATCTCCCCCCCCCCC
CCAGAGCTGCCCAGTGGTACCCTCAGTGGACAATTCCTGCCTGGCAGGTAGGCACTCACTCACTCCTTAGATCCCTGCTTAAATGTTCAACTCT
AGGCGCTTAGCACTGTTTAACGGCTCTAGGCTGTAGACCTTACCATCTTCTTAACAGAGAGCAGAGAGGATGTCTCCCATTGACACTTAAGAGC
ACCCATTTCCTTGAGGATGCCTTTCCATCAGGGGAAAATTGGAGAATGCTTGTGTCATGCTTTGTTGAATGTTTGACAGCAACCCCCACCTTCC
TCATGGTGACAATCTGAAATACCTGCAGACTCTATCAACCCTCCTCGCCTGAGGGTGGAGAACTTCAGAACAACTTCCCTCTGTGCCTGTCGGC
TCTCTGCCGCTTTTGCCCAAGAAAGGAGAAGGAGGAGCCTTGACGATCGATTTCAGAGATAAACGCTGGATACTCGTTAGGTTATGCCTTCCCT
GGGTCAGAACAAGCTGGCTCAAGTCTCCATAATGGGTCAGGTCTCAGCAGGGACAGTATCCCTAGAGGAGACAGGGACATTGGCAGGGTCACTG
ATAGACCTGTTTCTTGTGGCTCCTTGTGGATTTCTGAGAGAGAAAGCCTCCTAGCCTACCCTTCCTGCCCAACCAGCCTCCTGGAGCTCTGAGG
GCCCGAAAGGGTTATATTCAGCGGGCACTGAGATTTTAGATTAGCAATGCGAGAGAGGAAATTAAATATGGACTGTAATATGAAGCACTGTTTT
TCATGGGAAAAGAAGTTCTCCCAACTTAGCCAGTCCAACTCTTTTGTCCAACCGTTAATAGCATGCAAATATTTATGAATCATACATGCCCCTT
CTAATTCCCGTGTGTATTTTCACAATAAACAGTGCGTTTCGACAATGGGGCAGAATAATCCCTTTGTCCCGTAGCACACCTGTGCAGGCTGGCA
CCCGGCAGCATCGCATTCTTCCCGAGTCCTAACTCCTGTCTCCACCCAAGCTTAGGGGAGGTTTATGTCTGTCTGACCCCGGTGGACGGGCTCT
GGACGGTCCTCCAGGCAGTGCTCCAGGCCACCCCGTGTTACTAGAAGCTATTCTTATCTCATTGTTTTTAATAATTTTCAAGGGAGTGCTCACA
CTTGGGTCTTCTCTGGTGGACACAGAGAGTTCATGTGCACTGAGGTTTGCTGCCACCTCTTGCTGCACCGTTGACTTCTATTCTGGCCAAATTC
CTGGACTCCGGGTCACACTAAAGCCACCTGATTCCTCTGATTCATCGCAATTCCACAGAAACACGTATCTCTTCAGAATGATTCGGCGGGTCTT
TGGAAGGCGGTGTGAGGGAGGCTGAGAAGTGCTCAGGACGCCCTGAGATCTGTGAGCCTTGGTTTTTCCTCCTGTGTAGTGGGCATGGTCGTGC
CTTTCACTCAGGCCTCACAGGGTTGTTGTTAATAATAATAGCAATAATAATAATAATAATAATAATAATAATAATAGCAAGATGGTGTACTTAT
GAGGAGACTTAGGAGACGAGGCATCGCCGCTCTTTCTACTGAAGGGTGGGATTGTTGGAAGAGAAGGGAGGAGATGACAGGAAGTTAGGGAACG
AGGTGCCCCTCCTACTGCCTCTCATCCACGACAGGGGACTTTTATCCCTTTGTTCTGCTAAGGACCTGATAAAACGGAGGCGTCACAATTACTC
ATAAATCAATGCATGCATAACAGTAATAAACAACTAATCATTTTCAGGGCCCAGTCTGGGCCCTGTGTGTTGTGCATATGCAACCTACCTCCCT
TCCCTCTGTCTCTTTGCTTACCCCGTCTCCTAAAGGCATTTAGGGAGAGCATTTCATTCATTCATTCATTCATTCATTCACTCATTCATTCTTC
TCTTTTGCTTTTTTGGAAACAGAGTGAACACTGTTCAGCCCAGGCTGGCCTGGAATTCACAGTGATCCTCCTGCCTCAGCTTGCCATGTCCCCG
TTCATCTATTTCTTCATTCATCATCGCACATCTGCTGTGCACCTATTGTGTCGGCTAGCACTAGACGACCGTGAGTCCGCTGAAGAGGCGTTCT
CAAGGTCAAGGGTTCATGAGGGGCGACAGTGAAGCAGGCCTTCACTGTTCTGTGTAGACGTCTCTGTGACAAAGGACAGGTGCAACGGGGCCAA
ATACAATTGTGTGTAACCTAGCGAAGGGCAGATGGTTTCCCCGGGCAACTCGTCTCTCTCTCTTCAAACCTATGCCAGGCAACAGAGTGTGCAT
TTGGCGGCGGTGTGGGGGCGCGACTTGTCTGTCGAGGAACCAAGACATACAAGGGTGGCCTGCTCTGGAGGCCTTGGCATACAGGGGGCTGAGG
ATGCTTTAAGGGCCTTGACATCCATCCTCGGCACTAGGTCTGATGCCAGTGACCTGGCaAGCAGCCAACAGATCCTTGGCAGAGACGTACATCG
ACACACAGGTGTGGTGCACAAACTTAGACTGCAGTGTGCAGAGTAGGGAACTTGTTTGGGGGTTCTGGGGTGCTCAGAGACCAGTCTTACTAGT
GTCTCCTCTCAGGCAGCCTCAGATCTGTGCATGGAGAGCTCGCAAATAGCCCCATTTAGCATTAGCGCCCACCTCAGGCTGGTGTCCAGCTTTC
CTCTCTTCCATTAGCATCCAGTCCACCTGCCCTGCCTCCTTTCAGAGCAGCAAACGTTCAAGAAGATGCTGAGCAGGAACTCCACACCCCAACA
CTCCCCTCCCTCCTCAATGCCCACACCCATACCCAGACTCCCTGCTGCTCCTGCCCAGGTTGCTGTGGGCATGATGCTCTAGGCCACAGGTACA
GGCGGGGGATTAGTCAGGCAGCCTTGGGAAGCCACCTTAGGCTTTTTCCCTGCATGGCCCCTACACAAGGCAGATAGACCAGCACAGCCTGGGC
AATCTGGGCATCTATCAACGAAAGAAGTCGCTGAGTGGAAGGACAGAAGAGCACGCGGCCTTAATCTAAAGAGACTCTTGTGCAAGTCTGGGCT
AAAAACAGGCTAGTCATCTGACATAATGTGGGGCTAGGATTCCAAGGGAGTAAGACAGGACAGAACATGCAGCGTGAAGAAAGAAAGCAGAGTC
CCTGGGACTCTCTTGGTGCTTTGGTGGGGTCGGCAAGCGATATAAGTGTCTGATCCAATTTTAGGATGTTTCCCAAGATGGCAGAATCTATAGA
CATCTCCTTACCTTATTAAAATGGGCACAGGTATAGCATTTGTGTGCAATCCCCTCTCTCTCCTCTTCTGTATCTAGTTTGTGTCATCTCACAA
TGACTTTACCCTACCTGTCGCACAGCAGATGCCGTATCTCTGTCCTGTATGTTTGAGCGGTGGTGGGCCGGACCCTCAGAGACAGAGACAGGAC
CCACTGCGTTCATTTTTTCCCTAAGGTTGTTTTCAACCCAGCACATCAAGTACAGCCATGCTTCCCACGCACGGGCAGCCATCGCTGAAACTCG
GCAGAACTCGTTGATTCACTTTTTCAAGCTTGTATGTGTGTGTGCACATGTGTGTGCAGGTGTGTATGTGGAAGCAGCAGCTGCTGTCCACACT
CTTTCATCACTTGGGATTTTTTTTTTTTTTGAGGAAAGGTCTCTGACTGAACCTGGAGTTCACCATTTCAGTTGGCAGCCCCCCTCCCCCAAAT
CCATTTGTATCAACCCCCAGGAATAGGGTATAGGTGCCTACTGCCCACTGGCATTTGACACAAGTGCTGGGCGTCCAAACACACGTCTTCATGC
TAGTCCAGCAAGCACCTTATCTACTGAGCATCTCCCAGCCCATCAGCCCTCCTTTTTTTGTTTTGTTTTTGTTGTTGTTGTTGGGTTTTTTTTT
TTTTTTTGGTTTTTTGTTTTTTTATTTTGTTTGGGTTTGGTTTTTGGAGCTTTCTCTGTGTAACATTGGCTGCCCTGGAACTCACTCTGTAGAC
CAGGCTGACCTCAAACTCACAGAGATCTGCTTGCCTCTGCCTCCCTAGTGCTGGGATTAAAGTGGGCTATAAGCGCCCTGCTCTATTTAATTTA
AATAACATTAGAACAAAAGACACAAATAGGGTCCAAGCCCAGCCCCTGAGCTCTACTGAGTCACTTCCAGAGAACTCCAGAGAATGTCACACAT
GGCTTTCCCATTCTCCAAGTGGATGGCTCACTCTCAAACTGCTGGTCACTCCGCACAACCAGGCAAAGGTTGTTTCTATGGAGAACTGAGTTCT
GTGCTTCAAGTTTTCAGTTAGGCTCTTGAGGCTTGGACGTTGGCCAAGAGCAGAGACTCTGGTCTGCATTCTGCCTACATGGACACAGACAGGA
CAGGGTCAGGCCAGCTGGACACAGGGCCTCTTCGCACGAATATCAGTCAGCCTACAGAAGCTGTGCAAGTCCAATGGGTTGTGTCCTGCCTATA
AGTCCCTAAGTAAATTATGCAACTCTACCGTCAACAGATCATGGTGGAAATAGCAAGAGGAAGGGAAATGGAACGGACACACGTGTAAGTGCCG
GCTGTTAGGAAGCACCGGTGGGAAAATAAGGGGGGAAATGCTAAGTGCATGCTGGGAATATCCTCCAAACACAGAAGTTATCCCTGGAATCTCG
GGGAGAGCATTCATTTCCTTGGAAAAAAAAAAGTCCCCAACCGTGTGTGTGTGTGTGTGTCTGTGTCTGTGTGTGTGTGTGGTTAGGCTTGCAC
ATGTGTACACATGTGTGGATCTCACAGGACAATTTGTGGGAACCAGTCTCCCCTTTTTCAGTATAGGTGCCAGGGACTGAACTCAGGTGGCTGG
GCTTGGCCGCAGGCCTCCACTCACTGAGCCCTGTCGCTGGCCTGGGTGCGTGCATTTCCATGCTCAGAGTTACTTGTACCCAGAATTGGACATG
GCATAATCTACGGTCCCCTGTAACCTTCGAGAATCTTCGGGGATTTCCTGAGTTTGTGAAGAGCAGACCTCCCTCCCACCCCTTCCTGGCTGTT
TTGATTTTTCAAAGGCAACATTTTAAAAAGAAAGTTTCCTTCCACTTGCTTTGGGGTGCCTAAAGTAGCAACTGTGCAGAAGGTTCCCTCAGAG
AGACACAAAGAGAGGGATGTTACCGQTACTGCTTAAGGAAAATGGCTACCCCACATCCCCCGGGCAGAAGATCCTTTGCATGTGTAATCTTCCT
TTTCGTGACAAAGGGCAAGTTTCACATCCCCAGAAACAGTCCCCAAAAGGAGAAGATGACTCATGTGTCCCAACCTACACCAAGGAGAATGAGA
GTTACGGAGCCACTGAGAACTGGGGGTGGGGGGTGGGGATAGAGCAGCCCACCCACAGGCCAAGAAGGGCAGCGGGCTCCCAGCAAGAGACTGG
AGGCCAACGGGCTTGGAGGGCCGCCCAGGGGTCAAGCTGGAATGTAGTGATGTTTAGAGCCTGGGCAAGCAGTGATCTTCAGCCACCTATCTTC
TTGCTTACTTTTTGCTTCCTGCCCTCAGCCCTCCTAGGGGAAGCCATATACAGTGTTATAGTATCTTGATCCTGCAGTTTAGTCATTTGCTACA
TGCAAAGGGAAGCAGTGTGTCTCAGGCTAGACAGAGAGGCAGGGTCCTGCTGATTCTGTATTAGACCCCAGGGCTGTCAGTGTCCACCACTCAG
TCCTCCCCTGAGGCCCTGGGACTGCCTGGCCTTGCAAAGCATCCCCCACAGCCCCAGCAAGTGTCCAGGAAGGCTCACCCCGTGACCTTCTTTC
CAACTAAATAAAGCAGTTCGTATTTTGTTCTGCCCTTTGGATCGGCAGACTCGCGTCGAGCAGGACGCCACATGTTGCTGTCTTGGCTTGTTTA
TATAGTGGATCAGCCCCTCGCTGTCATGCCTTAAAGCGTGGCCAGCTGGTGATGCAGCCATGAACCGCCAAGTTCAAGTAGAAATCAGTCTGAG
CAGCAATTCTGACACCTGTTGAGCGTTCCTCCTCTTCCCCAATTCCTCCCCCATCAGGTGTCCTTGGGCAGCTCACAAAAGCTGTTACCACTTT
GTATTTTGCAGAAGAGAAAGCTACGGCTGTGAGACAGTAACAAAGTTGCCCTTGAGTATGACTCTACAGGCAACGAGTGGGATTCGAACACGGG
TATACTGGGTTGCTGAGCTCTCACACTTAGCCCTCTCCCTATGTACTTCCAGCTCTGGAATGTTCTGAGCAAGCTTTGTCTCTGGATGCTTGGC
TCAGTCCAGACTTCCCCCTTCTTCCCCTGGTCTTTCTTTTTTGATGCTCCTTCCTCTTGCCTTCAGCCCTCTTGTCACTCCTGTCAAATATCAG
TCCTCTGGGATCACAGCCATCCACTGAAGCTGATGCGGCGGGTTCCTTCAGTACCAGGAGCAGAATAAAGATTTCGAGGCTTCCCCCTCTCTGT
CCGCCCTCTCACTGGCTCGATGATTCAGACCATCAGTGCCTTACCCCTTGCCCCTCTACCACCAAAAGCCTCTGCCTCCACCCAATGCCCCTGA
TCAGCACCAAAGTGATCTATGTCCTGGCCAGCCAGGGTTTCTGGGAAAGTGGGGTCTCCCATCAGGCAACAGACTAAAACATGAAGTCTTGGAC
AGCCCACTCTCTCTGCCCTGCCTTAGACCCTGAAGATCCCAGGAAAGCGAGTGTTATTTTGCTGACCCGTACTCCTCTAGGTCGGTCCCTTGTG
AGTCTCTCCTCTCCTGGCGGCTGCAAGTTACGGCGGAGAAAAACACTTGAGAGTGTTTCACTCTCCACGCCCATGTACTTAAAATACCAAGCCC
ATAGGTCATTTTAATAAGGGAATTTGGCTAACAACACATGTGCGCTGGAGGCCCTAGCTCCCACGTCTGCACGTGCTGGCCAACCACGGCTGTG
TCTGAGCAACCACGGGCCTGGGTGGGTGGAGAGCAGAGCTTGCAGCTTCTGTAATTCTGAGCACCGAGATCTGCCTCTGGCTACCTGGAAGCCG
TTGTCAGGGACGGGCCTAAACCCAGCTGGAAAAATACAAACAAGAATGGAGGTCAGGTTAGAACCAGGGTGACAAAAAAGTCACCATGGTCTAT
AGATCATAAGCAGATGTCCTTGTACTCAAAGCTCTTACCAGGACTGGGGAGGTGGCTCAGTTGGCAGAATCCTGGCAGCACAAGCAGGAGGTCC
CGAGTTCTATCCCTAGAGCCCAGGTTTTAAATTTTTAAATTTGTAATGCATGTTTGAAATCCCAGTTCTGGGGAAGTGGAGACAGACACATCCC
TGGGGCTCACTGCTCAGTGGCCTAGCTGAATCCATGAGTTCCAGACCAGTGAGAGATCCTGTCTCAAATCACAAGATGGGCAGAGCTTGAGGAA
TGATGTCTAAGGCTGACCTGTCGCCTCCACATAAAACTGCACATGTGTGTTTGTGCACACACATACACACACACATGCACACACGTCAGCTGCA
ACCCCAGCCCATCGTGGGGATTGCCACCAGTTTATCTCCTCCCAGGTGAACCCCATTACAGACATGCAGTCTCCCTAATCTCCCTCCCTGGTGG
GAATCACTAAGTGGAATTCCTCGTATTGACACATTAAAGGATGACCATAAAGTCATAGGAACCATGGTGCTGAGCAGTGGCCATACCAGTTGGG
GGTCACAGCTGTATTTCTTTCCTAAGTCAGCTAGTCTCTGGCTAAGCCGACACTCTCACAGTCTTACACCTTCTCCAACCGCCAGTCACCTCCA
GGAGAGACTGCCGCTGAGTCCTGAACTTGTTCGTAGGCAGCTGCCTAGAACAGCTTGCACATTACAGTCACAGGGGCAATTTTCACTTTGGAGG
ATGGTAGTTGGGCAGTGGGTGGGAGATGGGGTGAGTCGAGGCTCCTGAGTTTAGATTTTGCACAGGTGGCCATTTATACGCCAATGGTGGAAGC
ACAAAGGTTGTGAGTGTAAAGTTTAGGGTCATTCCCTCTGTGGTTAAGTGAGGTGGTTAATATTTTATGTCTGTCTGTCTGTCTGTCTGTATTA
TGTATTTGTGTGTGTGTGTGTTGTGGCTTATCTATGGAGGTTCAAGGATAACTTGTGTGAGTCAGTTCTGTCCTTCCACTATTTGGATCCCAAG
AGTGAAACTTGGGTTGTCCCGTTTGGCAGTAAGTCCCTCTGCCCACTGAGCCATCTTGCCAACCTGACCTaAGTGATTTTTCAGCATCCAAAGT
CACCTGTTTAAGTCTTTGCCTTACACTCTTTTAAGAACTGGTAAAAATCCATCTTGCTCATTTCACGGGTCTTCTCTGACAACCAAATGAAGTA
ACTTCCATCGGAATGTGTCGGAAGCATTGGAAGCTCTGCATACACCTAAACATGTCTACATTGTGAAAACGAGATTCCTCATTGTAGGCAGAGT
TATCAAAGGAGCCCTGGTGAGAATTGAGCTGTTCTAGAGTCCAGAAACCCTTGCAATGCTAAGCCCAGGATGCTCTGTATTTGTGCCAGGATGA
AGAATGTGCCTGGATGGTCTCCACCCACCCAGGATCTCTGAACATGTTCTTATTTAGAAAATTCCCCGATGCTGTGAGGTTAAGGCCATCCATG
AAGACCTTCATGTGGAGACCATATGTGTTAGCCTTCATGTTGAGCTCACCTATGATGGCCTTCATGTGGAGCTCATGCATGACAGCTTCTAAGG
ATGGGGAGATTCAGAGACAAGGGCATATAAGGAGGCAGCATACAAAGGTAGAACCAGTAATTGGGGCACTGAGACCACAGCGCCTCCAGAAGGT
CAATACTCATGACAATCTTAGGAAGTCAGGAGAAGGAGAAGGAAGGAGCCAACCACCCCCATTGCCACCTAAGGTGTCTTACACGCACCTTCAT
CTTGGCCTTGTGCCCTCCAGAACAAGAGACTGAGTCTGTGTGCATTAAGCCATAGCACTGTATTACATCAGCCCCAACATTGCTTGAACTCACT
GTTCTTGAAGTCTTTGCACTTCCGAGGCTGAAAGCAACAGATGACATGATTCTGTGTGTGGTGACAGTGTGCTAGATAGTCACAGGTTTGGAAG
ACATCATTCGAGACCTTCATGACGCATTTCAGGCAAGCCATGGCTGAAGCCAGCATTGGAGAATGTTAGATGCTACAGTACTCCCCAACCTTGA
GCTGTTACCGAGCTACAAGCTCCCATGTAGGCATCTTACTGCCTCGGGCTCAGAAGACACTATCAGAAAAGATCTGTGAGCTATTCCACAAGTA
GCTACTCTTGACCTGGGACCCAGATTGGCAAAAATGTGCGACAATCCAACTCTTCGAATGCTCTATATAGAAGCACCTGATCTTATTGTCTGTT
CACTCTCCTCACACTCGCGCATGTACACACACACATACACACACACACATACACACACACACATACACACACACACACACACACACACCAAGGG
CCAGCTCAGGACCAAGCTATGTACCTATCAGTCACTGGTGTCTTCAAGGTCCTTTACCTATTTCCCCTTTGGCTTTACAATCTTCCATTGCCTG
AGAGCCTCTTCCTGTTCTCCTTTCTCACTTCTGAGGAATGCGAGGCTTTGGAGAAATGGGCCCTCCCCCCACCCTCACCCCCACCCCCAGGCAG
ATTAAGCTTGGACCATCACAAATGCTGTCAAAGCAGAAGGCCTAATTAATCAAGGTGAAAAGTGATTTATGGGGCCAATCGGAACTAGTCACAA
GCAGACTCTTCCTTCGGGGAAGGTCACCTGGGAAGCAGGTCAGTGGGAGACTCACTGGGCCTTGAAGTTGGCAAGACTTGAGAGAGTGAATCTG
GGTGGCTGGAGAAGTGGGGTTGAGTACAGAAGTCCCAGAGTCTGGAGGCACTACTTAAAGACCTGAGCTCATGAGCTGCAGAAAGAGGGACCGG
TTCTAGGGAGAAGATTCTGGAAACTGGCTCTAGGATTCCATGTTGATGATACCAAGGTCTCGCCCGTCCATCATGCGTCCTTGGTGAGAAAGGA
AGACCCATTGTGAGGTGTGCAGGGTGCTTACCGTACAGCAGCAGGCTCGGCACTGCCTTTACACAGTCAAAGGCTACAGAGAACGATGAGCAAC
TTCCTCACGTTACACATCAGCACACCATTCTTAACATGCCCACCCTCAGCCTCTGTGGACCATCCCTCCAAGTCTGCTAGATGCTAAGGTAGAA
AACCATATGGAATATCCCCTGATGGTGTATCCGCAGGTGTCTGATGCAAGTGCCAGAGCCTGGCAGCCTTCTTCCTGGGGAAGCTGGGGAAGGA
TTCAGGTACAAAGTCTCTTGGGCCGTAGAACCCCAGTCTCCACAAACCACTCCTGTCTGGTCCACTGCGCCTCTCAAGATGCACAAGACGCCTC
CTCCTGAACCTTGCCTGACACTATTGTTCTCTTTGGCACACACTACCAGACAGACTTCAGAGGCTCTGGGGTCTTTGGGAAACTGTACTCTTGA
TACGGAGTGCTGCTTGCTCTGGTTATAGGTTGTATTCTTGGGAAATGTCTCAGTGGCCTTCCACTTTCAGCTGGAAGTGGTATGGTTTTTCTAA
GGAGGTTAGGCGGGTAAGCACGGTTTTGCAGTAGCCATTGCCTTTTGGACACAGTTTGTTCCCATTTCCCTTGAGTTTCATTGTGTACTACGTA
ACAGCAGAGATTGTACTAGCTAAGGAACTAATATTTAGGTAGAAGACTTAATATTGCACCCGGCCAAATACGGGCATTCCATACAGAGCTCTGA
GACGGGGAGAGGTGCGTGCGTGCATGTGAGCCTTCGGACCCCCATCGGCAGACACCATTACAATGCTTTACCTCATTTATCTTTCTCTCGGGCC
CAAAAGGTAGAAATTTCCGAAAATTGCCTATACCAATTTTCAGGCAAGAACACCGAGCCTGAACAAGAACACAGAGAAGTCTAGATCTAGTGGC
TTGTCTGTCAAGCATCTGGAATTTAAACCACAATCCACCCCCTGAAGCCTGCTCTGTCTGTCCTGTCTATGTCCCTTGCTCTGTCCTATCCCAG
CCATGCTTTCGTAGCATCTAGTCATTGGGTATTTATAAATACTATTTACCATCAAGCATCAATTTCTAATAGGTACAGAGAATAACATCTAATT
TAGCATGTGCTGTGTTAATAAAAAGATAGAGAATAAGAATATGTTCTATGGAGGTGTGGTCAGGTATGGGGGTAGAGGCATCCCCTCCCCCTGA
AGTACCAGCCACATGACGGTATAACATAGAATAGACTTTATTCAGGCCATGGGAAGGGGAGTTAAGAGGGTAGCAGAGACAGAAACGCAGAGAG
AGGGAGAGAGTAGAGAAGTAGAGGCTGACCATGACCACGTGGAAAGAGGGGGCAGGGAAAGGGGAAGCAGGGGCGAACGGAAGAGCCCAAGAGG
GCAAAAGAGAAGCAAGGGAGCATGAGAACAAGAGAGAGAGGAGGGGACAAGCAACCCCTTTTATAGTGGGTCAGGCCTACCTGGCTATTGTCAG
GTAACTGTGGGGTGGAGTTTAGACAGAATGCTAACAGCATGTTTTCACACTTACAAACTCAGTGTTTGTTGATTTGGTTGGCCTGCTCATTTGT
TTTGAGACAGAGTCTCATGCAGCCGAGGCTAACCTCACACTCACTGAGTAGCTGAGGGTGACTTTGAACTTTTGATCCTCCTGCCTCCGTTACC
TGAGTGCTGGGATTACAGGTGTGCAGCCTGGCACGCAGTGTATACAATGCTGGCATAGATCCTTGGGCTTCATGCTTGCTAGACCACCACCCTA
ACCGCTGACCTACCCCTGGCCCCAGAAAGTCAGTCTTCTCTAATCCTCGGAAGTACAGAGTAAAGAGAGAAATGTGTGACGGTGTCTTTTCTTA
TTCTTTTGCCTGGATTTTACAAATATGCAGGGAAGACAGAGGGAGGTTAGCAGTAGATAGGTATGAGTCCCAGCTGTCAATTCCCAAAGTCCTG
ATATGGGAGTAAATTCTGATCTCCTGGATCTTATTGGTAATTAATGATTGACTTATACCTATGTGACTATGCACTATGCCCCACCTGGTGAACC
CTCTGTGTGCATTACAGATCAGAAATAACTGGTGAACCCACTGTGTGCATTACATGGTGAACCCACTGTGTGCATTCCAGATTGGAAACAAAAC
CTAGGTGTACCAGGAGAACAAGTCCTCCTGCCCCAGCTCTGTTGCCTTTCAAGCTTGAGGGCTGGACAGCATAGACTGACATAAGGTAGAGAGG
CTCAGACCACCCCTCAATATGTTCTGTTCTGTTTCCTGTCTCCACAGGCAAGAGCTTCACTCTGACCATCACCGTCTTTACATATCCCCCACAA
GTTGCCACCTACCATAGAGCCATCAAAATCACAGTCGACGGCCCCCGAGAACCCCGAAGTAAGTGAGCCCCCTTGGGGCTGGTAACTGTCTCGG
CTGGTGTACACAAAGACCCACCAGGTCTCACAATGTATCTGTGGCTTCAGCCTCTTTCCTGAAGAGATGTCAGGCCCCTGAAGACAGGAGAAGT
TTCCAGGTCAACTCTCTCACCTCTCAAACGTTGTTTGTGTGAACTGGGTTCTTTCTAAGGCTTTGGCTTACACGTCAAAGGGAAATTAGGCCAA
CTCAGATGAGTTAAGAACACTTTGGGTTTGTTTTTGTTTTCTGAGGCAAGGAGTAGACCCCCACATATACAGCAATGTTCAGTGTGCTCAGACA
CAAGCAGTGGATAGACAATTGGCCAAGTACAGGGTGTGACAATGAAGACCTGAAGGTCACGGTGGACAAGAAGAGATGGCTTACCATCCATGCT
TGTGTTAATTTGTTAAGGCCAGAGATGAAATCTGTGAAAATCATCCTCTCTTTTTCCCTTGAAGGGATCTTATTCTAGGATTGTTTAAAATAGA
GCCTGGGCCGGGCGAAGAGTACTGGGGGAAACCAGTAAATATAGAAAGATAGCCTCCAAAATACCCCGAAACTCCTGGGAGGAGAGTGTTTAAA
AAGGAGTGGGGTTGTTTAGTCTGAAGGAAAGATGTCTTCAGAGTGACTTAAGGACTATCTTGGAGTAAACACACGAGTGACACTCTTACAGGGC
CACACCCCGGCCCAGGAGCTGCAGCTGGGCCACAGTCCAATTCTGTAGGCAGATGAGCCCGGAACGAAGAGCAGCTCACCTCCAAACCATCTCA
GGGGCCCCTGGGAAGTGATACCCTCAGAGGCTGGGATGCGAAAACATGGGGTCCCTCCTGCACCCAGAAGCTATGGTGCAGAGAGATTATTTGA
TAAGAATGAAAGGTACTGAGAACAGGGGCCCTAGAACAGTCTCAGAGCCTCCCAGAACCCCAGTTTCTTGTAGAAATGTATGTTAAGGTGACAG
CCCCATTGTGAAACTTAACTAGATGAAGCCAGGTGCCCGGTGCAGGGCATGCGCTTACAGAATGTCAGGGTCTCCGTCGGACCTTCCTTGCCTC
GACCCCTCGTTTCAGTGTGGTGGTTCCATTGAGCCTGCTGAGGTAGTTCCCTCAACAGGCAGCCCTGTCCACACACGCATCTCATCTGGGCTCT
GAGGTAGTAGCCCTTGGGAATTTGGCTCTCTGAGGCTATTCAGTGGTCACTCTGGCTATGGCAGCGTCTCCTGCTTTCATGGTCATGACTTCTG
GTATCTGGACCACCCTTGGAACCAGTCACCTCTCTGCCTCCATTTCCCCAATTTTCCCTGAACCAGTAATACACAGAGAACAGCTGCAGTCACC
AGCAATACCACAGGGCAGAGTCTTCACCCTGGCTGTGCTTCCCTCCCCTCCCTGGGCTGGGCAGCTCCCTCCACTCTGCCCACCCTGTTCCCAT
TTTTATTCCCTACCAAAACCTGTTGAGCTTTTCCTTGTTAACGTCCTTGAGATTTCCTAGCTGTGGTCAGGTTCAGGGAACTCTGGGGCTTGTG
CTGGATACCATGCCCTACTCCTTTAGAGTGTCAACAGCAGACCAACGTAGCACACAGTCCTCACACACCCCAGGAAACCTCTTGCCACTCCCTG
GTTTCCCAGAGTAGACAGTCATGACAGAACACCCGAGGGCCATGGCCCAGTGCAGGGGACTGGAGAGGAAGCAAGCCGAGGTGATGACTTAGCA
CACGGCCAGGAGAGGGGGCGAGGTGTACGAAGACTGATGCTGAGACTGACCGTGCTCATAGGATCCCTCCTTTAGGTGTCCGTGGCTCTCTAAA
GCAGCTGCTGCCTCCAGGACAGATTATACAATGGCTGTGCACGAGGAAACACCTCAAAATCGCCACCCATCAGAACCCTTCTATTTTCCTTATT
CTTCCACACCTAAGAGAGACAGGCTTTCACCTTGTGTGTATTTTTTTTCCTGGAACATTCCAGAGAAGTGAGGGGGGAGCTGAGCCTTTGAAAA
AGCAAACGCCACCGGAAAGGGAAACGGCCCCCATATTGGGGCCCCTGCTTGCCTGATGTGTATAGATCAACTACTCAGATAAAGCACTTGCCGC
CTCTGCTATTTTATAACTTGTAAGAACAGTGGACCATTAGTGCTTAATTGTACTATTATCCTCCTATTCTTTTTTATTTATTTTTCTGCTTTGA
GTTGAGAGACAGGCTCTCACTATGCTGTCCCGGTCGGCCGGAACTTGCTATGTAAGCCAAGCTGACTTTGAACTCCTGCCTCCCCAGACCCTGA
GTGCTGGGCTTACACCGTGTGCCACCACATCTCATACCGGTTCTCATACCACACGGATCATTTCCACTCGCACTCTGCCCATCACCACTTTTGG
ATGCAGTGAGAAGTGAGGACCCCGTGTGCCCGTCAGCGTGGCCAGACTGGCACACCCGTGGAGATTTACGAGCGCTGTCCCACCCCTCATTAAG
GAAGGATCATAGATTCTGGATGAGTCTGGCCCAAGAACCCTAGTGTTTGCCACACTGAGCAACATCGCTCAGTTCTCCCACTTTACCAAATCAA
AGACTCAGAGAGAAAGAACCTCTCTGATCCTTCCAAGAAAAGGAAAATCAGCCCTAGAGAAGGGAAGCAACCTTACGTTTAAACAAGATGATGA
AGCCACAGGGTGGAGGGGGAGTTTTTCACTGTCTGACTTTGGTGTCTGACTTTGGAACACACATCTGTCCATCTGTCCATCCATACCATGCTGT
CTGCACTTCACATCCTATTAGTTCTCTCTCCTGCCTTTGCAATTTTTGTGTTTAATTGTGGACTGGCTTTCATGATTTCTCATGTCGGACCCAC
CTCTGAGGCTGCCCCATAGGGCACAAGGTAACCTCGACGCTGACATGGTTGTCAGGACTGAAGCTGTATCGTAGTAGGTTGTGTGCTCCAGGGA
CTCCCCAGCCTTTTGCAGTTCAGATGGTTACTGGCCGGTCCCAGAAACCCTCTGCCCCCGAGTAAGTCAAAACTTGCTTTTCACACAGTCCATG
GGATCCTTCTACATCTCCAGCCAATACAGAAATCTGTGAGCTTCGGGGAATTCAGTTCCTTACAGGGGAAGAGTGCCACCGGAAGGTTTTTCTT
TTCAGGCAGTAAATAGACCATTTGATGACTTGTTAACATACTGGAAGATAGTGTGGTAGAACATATACTAAAAGGGTGCTGGTATATGTGTGTG
AGGGGTACATATGGGTGTGTGTGTAGTATAAGTGTGTGTGTTTATGGGTTCATGTCGAGGTCAGGGGTCAGACGTCAGCATCAACCATCATCGT
CTTCAACTCTACTTGTTCTTTAACACAGGGTCTCTCTGTGAACCTGTAGCTCATCTGCTGACCGATGCTAACTAGCCAGTAAGCTGCAAGGACC
TGTATGTGTCTATTCTCCAACACTGGGGTTAGTGCAGACATACCAAATCACCCAGCCAATTACACTCGAGGTAGGGATGGGGACATGAGTCCTC
ATACCTGGGTGGCAGACACTCTACTGACTGACCAATCTCCTTAGCACCACCCCCTGCTCCATAAAAGGGTTTTCTCTTCACAAACAGAATTTTA
AGAGTGGGTTTATGTTGCTTTGATATTTCTAGAAACATGTAAAACTCCATCTCTCAACCCACTCGTGATGAGTCTTGGGAAGTCTGGTACCTGT
GACTTGGGGAATAGACTTCATTAAAATTCAAAAAGGTCAAGAAACCAATGCTGGCTGTGTCTGCCACAGCTTCTGCCCTCTGGTAAAGCTGTCC
TTGGCAGTCACTGTTCAAGCTCTGAGATTCACAGTGACGAGAACAAGATAGACCTGTTCCTTAGAACTCAGAGCCATCAGGATGCAGGTCTCAG
TGTCTTAGTTGGGGTTTACTGCTGTGAACAGACACCATGACCAAAAGGACATTTAATACGGGCTGGCTTACACCTTAGGTCCAAGCCTCAAATC
CTTTGCATGACCCTTTCAGTCCTGCGCTGTCAACTGCAACTGAGGCTGCACCTTCACCAATGACCTAACATGCCCTCTCACAGTGCCAAACCTC
TGCTGCTCTTCATGCCCCCTTCATGCCTTCAACACCAATACCACCTGACTGACTCTTACACATTACCAAGTACCACTGCAGCATGAGGCACAAC
CTTGGCTATCTCTGGAACACAGCTTCTTTGTACTCTCAGAAAACACTTCTCAGAAGATTTCACCTCAGTGATGCTCGTCTCTTCTTAATCACTG
CTAATTTTGTAGCTCCAGCTCACGAGCATCCATTTTCCCACTACCCCCTTCTATTCTTGACTCTAAAGCTTCAGCCCAAACTGCTCAGTTCTGC
TGCTTGCTGGTGCTGGAACATGGCCCCCTTGTTCTATTACATTATCAGTGCTGGGATTAAAGGTGTGTACCACCACACCTGGACTTAAGCTTTT
CTTCACCAAGAGCTTGCTCTGGTCCCAGGCTGGCCTTGAACTCTGAGATCTTCTTGGCTTTATCTCCAAGGATAGCCCCATGCCTCGATCTAAA
TTTAGCTGAGTAGGATCTTCCCCCAAAGTCCTACTCCCTTAATCCGATATCTCCTACAACATGGGAGTTGGCTCCATTCTGCTTCCTGGTGCCC
CTTTACTATTTAAACCATATATTTTACATTTTTCCTTTCTAAGCTTGCTATGCTTGCTTAAAATGCTCTTCATGAGACTCAACCAGAGAACAAA
GTCTCTGCTCGGTGTTTCTGGACTTCCTTTGCCATTGCAATTAATCTGAGTCTCTTCTCCTTAGCCTCAGGCAGACTCTTCTGACAAGGGCTAA
AGCCACCCATATTCTTCATCAAAATACCATAAAAACAGCCTCCAGGCCATGTACTGAAATTCTTTTCCACTGAAACTTCTTGAGCCAGGTCTGC
ACAGTTCAAATCACTCTCAGCAAAGAAGTCTTCCATATTCCTAATAGGATGGCCCATTGAGCCCTAGTTAAAGCATTCCACTGCTTTCCAAATC
CAAAGTCCCAAAATCTACATTTTTTCCCTAACAAAAGTATGGTAAGGCCTATTACAGCAATACCCCATTCCCTCGTACCAACTTTTATCTTAGG
CTTTTACTGCTGTGAACAGACACCAAGACCAAGCCGGGTGTGGTGGCGCACGCCTTTAATCCCAGCACTTTCGAGGCAGAGGCAGGCAGATTTC
TGAGTTCGAGGCCAGCCTGGTCTACAAAGTGAGTTCCAGGACAGTCAGGGCTATACAGAGAAACCCTGTCTGGAAAAAAACAACAAAAGAGCAA
AACAAAACAAACAGACACCATGACCAAAGCAACTCTTATTAGGACAGCATTTAATTGGAACTGGCTTATAGGTTCAGACGCAGTCCATTATCAT
CAAGCCAGGAACATGGCAGCATCCACGCAGACATGGTGCAGGAGGAGCTGAGTTCTACATCTTCTTCTGAAGGCTATTAAGAGAATACTAGCTT
CCAGGCAGGTAGGATAAGGGTCTTAAAGCCTACACCCACAGTGACACACCTACTCTGACTGGGCCACACCTTCTAATAGTGCCACTCCCTGGGC
CAAATATATCCAAACCATCACATTCACCAACTGATCGTTTCTAGATGAAACTATCCTTAGAATGGATCAACTCAAGGGCCTGTCACCCAACTGC
TTTTTAGAGAGTTTTGTTGAAGTCGTCCTGGGAGTAAATGCACGTGCTTCTGTATGTGTGTGTGCATGCATGTACACATGTGTGACATGTGGGA
CACGCATGTTTATGCAGGTGTGCCTACAGTGTGTTCCCACGTGGAAGCTAGAGGTTCATGTCACGTGTCTTCGTCCTTCGCTCTCCTTCTGCCC
TTTCGTTTGTCTGAGTCAGGCTCTCTCACTGAACCTGGAACCTACTGAGCTTGAAATTCTCGCTAGATTGGCTCATAGTGAGTCTCCACGATTC
TTGTATGTTCACCTCACCAGTGCTAGGGTTATACGTATGCGCTGCCACACCCGCCTTTTAGACAGGGATGCTGAGGATCTAAATTCAGTTCCTC
ATACTTGTGCAACAAACACCTTACTGACTGAACTGTCTCCCAGCCTCATGAATTTATTTTCTTCTTTGATTTTCAAGGGACATAGCAGACAATA
AACAAACAAACAAACAAACACAAATAAATAAATAAAATCTTACATGTGTATGTATGCATGTATGTATATTAAACAGAACCTTTATATTTGATGA
ATAATTTCTAATGAAAAAGCAAAATGCATGAAAGACATCTGTAAACATTCGGTGATAATGGACTCAAAATCCAGACTGTTAGAAAAGAGTGAAC
TCGGTGTTTGTGGCTTTATTTCTTAACATTGAAAGCAGTGCAGATCTTTTTCAAGATATTCTTTTCTCTGGATAAGAAGAGTTACTAATAATAG
TGGCTGACATTATATAGCACTCATTATTTGCCCAGCACCTTTCAAAGTGCTGCAGGCATATTAATTTATAAAATCTTGGGAGAAACAGTTAAGG
TAGTTGAAGCAAAAGCTAATTAAGAACCCTACCCAAGGTCACCCAGCTAATCAGCCACAATGGAAGCTGTGGAATCCAGATGTTGCACACCTAG
GTCTGCTTCTGAGCACTAAGGTATTTGGGCCTCGCTCCATTGTGATGCTGTATCTTTGATAAGGAAGCCTTATCACTTGGGTGTGACTCACATG
TGGTTTTCCTATAGCTTTGAAGCTGCCCCAGACGTTTGACTGGAGTCAGTCTTCCTACCGGTGGGTGTACTGAGTTACCCACGTGCTTCCCAGG
GAGTTCCCAATCCTGCCTGCTGCCACGTGTGCTAACGATTGGCTCTGAGGGTCACTGAGGTCTGCTTGAGGACATGGTGGCAATGGGACCTAAA
CCAGGGATAATGCAAAAACCTATATGTTTCCCAAAGAGAAGAGTACGACAGTGACCGACTGGAGCAGCCCTGAGGGCAGGTGTCTAAACGGGGA
TCCCCTTTAGCAAAGGGTCCCAGGTAAAGCTTGGACACTCAGTGTGTGCTCTTGCGGTTGCCATGGCTAGTCATGGTGCTCACAGGGAACCGTG
CCACGTGCCTCCCAGGTCCTTGGAGTGTTCAGATATCAGGCGTGTCCATCAGTTCAAGGCAGAATCATGGTGCATAAAGGAAAATGGAGAGTTT
TTCCTTCCTTCCTTCCACCCAGATGGAAAGCAAAAGATAGAGCGTCAAGAGCAGTGCTCTGTATGCCTGCTCTTCCCCTCTGAAGGCATTTCAG
GTTAAGCAGAAGATTCTGGGCCGCTTCACCCAAGTATTTTAGTTCCCACTCTGCTAATCTCTCTAACTACCTAGACACTTAGGGAAGCAGTTCT
TAAAAGCATTAATAATAACTGTGCCTAAGTGTTTCTAAGGAATGTTAGAATCTCTTCCTGTTTATTATTTTAGTTATTGGACACTAGACCTACA
AGAGTTTTGTGAGCATCAAGATTTCCCTGAATTCAGGCTAAGGCCTAGAAGTTTCTCTGGGGCAACTGAGGATGTGGGAGAAAAGATCATACTT
CTGTCTTTGTGAACAGCAGCAGTCCTTCATGACACTACCCATGAACAGCAGTCCATCATGACACTGCCTGTGAACAACAGTCTATCATGACACT
ACCCATGAACAGCAGTCCATCATGACACTGCCTATGAACAAGAGTCTATCATGACACTACCCATGAACAGCAGTCCATCATGACACTGCCTGTG
AACAAGACTCTATCATGACACTACCCATGAACAGCACTCCATCATGACACTCCCTCTGAACAAGAGTCTATCATCACACTACCCATGAACAGCA
GTCCATCATGACACTGCCTGTGAACAACAGTCTATCATGACACTACCCATGAACAGCAGTCCATCATGACACTGCCTGTGAACAAGAGTCTATC
ATGACACTACCCATGAACAGCAGTCCATCATGACACTGCCTATGAACAAGTCTATCATGACACTACCCATGAACCCAGCAGTCCATCATGACAC
TACCCATGAACAGCAGTCCATCATGACACTACCCCATGAGCAACAGTTCACTATGATACTACCCATGAACAACAGCCTACCTTGATACTACCCC
AGTGAGTTTTTAGTCAGTGCCCCCCTTCTGTGCAGAAGTTGTTAAAGTTTAGGTGGCTCTTCCTGCCTGAAGCAGCTTCTTCCCAGGTACCAGG
AAGACTATACAGGCATAAGCAAGACACCTCCTCACTTTGGCGCCTGGAAAAGAGAGAAGAAACATATAATGAATGGAACCTAAACCATTTCTTT
GAATGTATTTCTTTCAGTTAGAGCACTGCAAAATCATATTGCTACTTACAATACCATCCCACTGAAACTGGCGTCTACGCTGATACACTGTCCT
TGTTAGGAATGATTGTACGAAGCGCAGAAACAGAGAAAAGAACCCAACAATGTAATACTGTCTCTGGTGAGGCTTCCGTTCTTAATCTTAAAAT
GTGTAAAAAGATTTCAGGATCCTTAACTCCGGGACCTAGGCTTTCACCCTGGCGCCATCGCGCCTGTGGGTCTGAACTTGCGCAATTATCTTAA
GTACTTTTTAGTCCTTGGTTTCCTCTTGGGTCAAACTAGGCAATGAGACGAGATAATCTCTAAATTAGTTCCCACTCGAGCTGGGGTAACAAAA
TCTTGTCAGCAAAACAGAGGTATAGCTTCTTCACAAACAGGGCCCCTTTACAGGCCACAACCCTGAGCTGAGGTCATCATCCTTCATGTCCTCA
ACCAGGGCTTCCACAGTGGTTTTCAGATTCTCCCTCTCCCTGTCCCTCTCTCTTCCCCTCCCTCCTCCTTCCCCTCTCCCTTTCTCTCTCCTCT
TTTTCCCTTCCCCTACCCTCTCTCTGTTCTTGAATGGGCTTTGTACTTCATCTTCAGTTTCTCTAGCTATAAGTAACAAGCCTAATGTCCGAAC
AGCCCTGATCTGATGCCTCTGCCACTCAGCTTGGGATGCTGCACGTCATGCTTGCCCTGCTTAGCTTTGGGATGCTGATACCTGGCTCTCTGTC
CAACAGAGACAATGGCCATCCATATCAGTGTCATGGGGTCCCTGGGAACCTTCCCTGGGACACAGTATACATTTAGAAGACGTCGGCTATTGTT
TGTATTTACCTTGGAGTCTTGTGGGAAATGAGAAAGGACTTTTGACAGAAACAACAAAGGGATCTGTGAATTCCTAAATTTAAAAATTCATGAA
GTGGCCTTAATGTTGCGTTTTTTTGAGATGTAATTAAACATTTATGCATTTTGATTTTTTTTATTTCAGATTTTTTTTTATTTAGGCCCAGTAA
ATTTCTTTTCTGGCATATTATGGCCCCTTAAAATATTCTGGGCACTGTTCCTAAGTCCCTCACGGTTCCAAAAGACTTGTCCCCAAGTGTCGTA
CTTTGTGAACAACTTGAAGAAAACTTATGTCCTGGTAACAAAGAAGCTCACACCTGACACTCGGGCCTCAGTGTATGCACGAGACAGCTGATGG
AGAGTCTTCACATTGTTCTAGAAAAGAACAGAATCCCCCCGCCCCCCATCTGCCCTTGCTGACCTTAGGGCATTTGTTCCAGGAACCAACACCT
CAGATATCTGCCACACCCAAGCCCCTCATATCAAATCGCAGATTATTTGTACATAACTTGTGAGCATCTTCCTGTAGACTGTCAGTCACCTCCG
GGTTACTGAAGTACTGGAGACAAGGCTGGATAAATGAATACCTGTGAGACTGTGTTGTTAGGGAAGTCCGTCTGTGCTCAGTGCGGCACTTTTT
CTTCCTCAAGTATTTTCAGCCTGGATTTGGTTGAATCCGGTTGTATCAGCTGCAGATGTGGAGGGATGAAAGATGACAGACAGACAGTACTGGG
ATCATCACTCCACCGTCCCTGTACACTCTAGCAAGACCTGTACGCGGTGCACACACACAAAGCACCTAGCCTAGACAGGTTTCTGAAGGGCTCC
CTCCCATTGTGTGTATGAGAGAGAGAGGAGGGGGCTCTCCTGCTACCTGTGGATGTTGCTCTGGGAGACTCAGCTGTTGTCCATCTTCCGTGGG
GACAAATGACCTCCCACCTAGCTGAAGGTCTGTGGCAGACAGCCCCTGTTGTCAGAGCACACTACCATGCCTACCTCTCCCCTTTCCCTTTCCG
AGGCAATTTCAATTCTTTCAAGGCCTAACCACTTTCCCTTTTCCGTTTTGAAGCAACTCCGGAGTTTTCCCGAGGGTTTAGGTTTTCCTGTAAA
GCTGTGTGCTGGGAAAGGCCATTAGGAAAAGCCTGGTACACAGTGTCTCAAAGGACCCGGCCACTGACACACACACACACACACACACACACAC
ACACACACACACACACACACAAGGATTTTTTTCCCCCAAAGCTTTGATCATATAAGTAAACTTCATGCTCCTCATTTTAGATCTGCGTCTAAGT
TCACTGTAGCTAATTTGAATCTGCCTCTTTTTTTCGTGTCTTGCGTCCGAAAACCTTTTGTAAGGTGTCCCGCCTTGGGGCTCTGGCAGCATTA
GATCGTGCCCTTAGGAAGGGGGTAAATTAACTCCAATCTACCTGTGAGTGTTTCTGCTGTCCTCAGACCCGGGAAAGCACCGGCTATTAGCCAG
GTGCCAAATGCCCTCTTAGTGGCTCAGTTTTCGTCAAGGTCAATCTTAAGGTTTTCCCTGGGAGAACTTGCAAGTGTATCAAACTTTCTCAGTC
TCTGTCCATAGTGAAAGCCAAGGTTAGAAAAAATATTTAAGCACCCAAAGGGAAGTCCTTTTCCTGTGGGTTCCCCCACACACACTGCCACCAA
CCCCCCGCCCCCACGCCACCCTTAAAGCAACACAGTGGAATTAATCTGCAACTCCCCAGGCCCTTGTGAAGTCCATTAATCGTGATGCATTAAT
TTTGTGCTCCTACCAATTCCATATGCCCAGGTTCCATTAAAGCAAGTATTGACTAAAACCCTCTCTGTTACTGAAAAAAAAGTCCAGCGTACTT
GCCTGCCCTGAAATGCCGAACAGTGGGCATTTTATTTGCTTGCTGGATCTTTTTACTTTTGTACGCCGTGGCTGGTAAGTCATATTCTAGTCAT
TTGAGGCAAAAATGTAAACATTTCAAATAAGTCACTTCGTAAGTTCAGGATGACTTAATGGTCCCTTTTGGAATTCTGACCCGAGTATCTCAGC
CTTACTTGCCTGTGGGGTGGCTTCACGGCGTTTCTGGTCCACTCATTTTATAATGCTACCAGCAAACGTACAGGAGGGACATTTTTACTCCTGA
TCTGACCTTGTTCCTGGGGCCCCAGTCCCAAATTTCAGAAAAGAATCAGACGGTTCGACAGGGAGTAAGAGAGGGAATTGGAGTCAGACCTCTG
ATACATACTGGCTGTGTGCCTGTTTTTCCCTCTGTAGAAGGGGTTTCCAGATGCCCACCTTCCAAAGGGGAAGATAGACCAGGTGGGCGCCATT
GCTCTGAGGCTAGCTCCCTGACTCCAGCTCCCGAACTGTCTTGGCTCTGATAACAAACCTTCCTCACAGGGATTGCAAGACCATGCATGGAGAC
TTCCATCTGAGGCTGCTTCACATAGCCCTGCACATAGCACCCTGTAACATTTAAAGCACAAACCACCAACACAGGCAAGTCAGTCTCCTTCATC
CCCAACCTTGTATTTACCAAAGGAATCACATGGAATTCTGCCGAAGTGTTCACCAAATATTTACCAATACCAAGTTATTTAAAGATGAGGGGGA
AACCTGGCAAATTGGTTCCACAGGACTCAGCACTTCGAGCCTTTTCTCTTTCAACTTGACCTCACGGTCACTTTAAATCCCGAAGCACCAGAAA
CCAAACCCAAGCCTTACCAAGGCACCACCTTGTGAAACCTGCATCGCGCCTGCCTCTTCAGAGAACAGGCAGGTGCGTCCAGATAGAGGCTTTA
TCTGTCATATGTAGCTCTGTTTCCCAGCAGAACATTGGGCATCCATGTTGCTGTCACCTACCAAACCTCCTACCATCTACAAAATTCTACTGGG
TCAGCTATGAGTACCATGGGAGGGGAGTCTCTCTACTGTATAGGCTTTCGTCTTATTTGAGTGGTATATATCAAAGTGTGGCTTATCAACTAAG
TAAGAGAAATAGCCTATCCACTAAGTAATAGGAATACAATAGATGTGAATGAGATATTTGCAAACAAACCAACCTCAAAACCGACTGCTAATGT
TTTACAGGTATTGGGCAAGATCCTTAGTGATCTTAAGGAAAATAATGATTGTTCTCTTAAAGATAATTTTGGTTTTGTTAGACTTGCTTGTTTT
ATATTTTGTGCATGAGTGTTTTGCCTGCTTGTATGTTTGTGTACCACGTGCATGCCTGGTGCCCTGGACGCCAGAAGAGGTCCTTCCATCCCTT
CAAACTGGAATTACAGTTGGTTCTGAGCTGCCATGTCGGTGCTGGGAACCAAACTCTGGTCTTCTAGAAGAGCAACACGTGCTCTTAACTGCAG
AACTATCTCTCTGCCTGAAAGATAGGTTCCGTCTCGTCTCGTCAGATTGGTGAGAATGCAGGAGAAGTCCGCATTTAAATTAGCCACCCCTGTT
AAGCTGGACTTGGAGAGGCTTTTCCCTCCTCGTTTGCCTCCCTCCACAAACTTTTTAAGGCACTTGGAAACAAAGGAAGCAGCCTTTATCCACA
GTTCAGAGTTTTGCTTAAATTCATTTTCTTTTCCAGGACCAAATAGTTTTTCTTCTGCATACGGCTCTCATGGCGGCAAAACCATAGGAGAGAA
CAGCGTAGCCTGCTGCTTCTGAGTCTATATTTCCTGTGTGTGTGTGTGTGTATGTGTGTGTGTGTGTGTGTGTGTGTGTGTGGTGTATGTATGT
ATGTATGTATGTAAGTATCTGTGTGTCTATGTATATCTGTGAGGCTGTATCGGTGACAGACAGTGTGAGAGTGTACGTCTGTGTCTGTCTCTCT
GTATGTCTATTCATGTCTATGTGTGTCTGTGTATGTTTATGTGTGTCTGTGTGTGTCTATGTGTGTCTCTATCTATGTTTATGTGTGTCTGTGT
GTCTCTGTCTGTCCCTGTTTGTATGTGTATGAATGTGTGTTAGAGAGTGTGTGTGTCTATGTCTATGAGTGTGTCTGTGTGTGAGTCTGTGTCT
GTGTGTGTCTGTGAGTGTGTGTCTATGTGAGAGTGTGTGTTTGTGAGTGTGTATGTCTGTCTGTGTATGTGTATTTATGTCTCTGTGTGTACGT
CTGTGAGTGTGTGTCTGAGTGTGTATGTCTGTTTGTCTGTGTATGTGTATTTATGTCTGTTTGTGTATGTCTGTGTGTATCTGTGAGTGTATAT
GTCTGTTTGTGTATGTCTGTGTGTGTCTGTGAGTGTATATGTCTGTGTATGTGTATTTATGTCTGTGTGTGTGTTTGTGTATGTCTGTGAGTGT
GTATGTCTGTCTGTGTATGCATATTTATGTCTGTTTGTGTGTTTGTCTGTGTGTGTGTGCCTGTTTGTATATGTGTGAGTATGTGTATAAATGT
GTGTGTTACAGTGTGTGTGTGTGTGTGTGTGTGTGTGTGTGTATCTGTGTCTCTGTGTGTGCCTGAGATTCAGTTTCTGGGAGGTGAACCCATC
CACCCTGTGCCCCGTGCCTGCCTCAAACCCTTCAGCTACTTGATGCTGAGGCTCTGGAGGCCACTGGGTAGTCCGTGCATCTGCCAACACACTG
GCTGGGGGCAGGATCACACAATCTTTTCTGCTCTGAGAGTGATTCAGCCATTCTCAAAATAAATAAGTACCAGAGTGCAGAGAGGAAGAAGTGG
AAAACATTGAAATCTGAGTCTGGAGGGCGGAGTTCTTCTCAGCAGGGCTCCTCAGGGGCAGTGCCCAATGGAAAGCCCTCAGGCCCTGCCACCT
GGCTCTGTGCAATTCTCAGCTTCTGCTGGAACTTCAGTTTTGTCATCTACAAAGTTGGGAGGAGGGTGTAGTGAGGGCTAAGGCACTGATGAAC
TCAACGCTTGATTCAATGTTTCCAGGAGCAGTTGAACTTGCAAGGCATCCTCTTCCAGCCTCTAGCAGGTCACCTGCTCTGAGGAGTGTGTCCA
AAGGGGGATGGAGAAGAGATGGCCACTGGCGGTGTGGGCGGAGGCGCTAGTGAGGACCAAGATGGAGTACCGCCAGAGGGAGGATCGACCCATC
CAGCCCAAGCTGCTGCAAAGGGACAGGAATAAATGCAGAGTGGAGTGGCTTAAGCAGGGGAAATCATCAAAACTATATTTCCCATGACTTTGGC
AGCCTTAGAAAAAAAAAAAGAAGAAAGGCGAAAAAAATCTCTAAACACACAAAGTGCTCAATTGTCCGAGCCTAATGGCCAACTTCCCAAAGCT
GGCCGGCCAGAGACCTTGGTGTTAATTCCTCACCCAACTGGAAAAAAAAAGATGGTGTGAGTTCTGTTCACTTAATTGCCAGAGCGTTGCTGAG
TGAGGCTGCACCCCCCCCCCTTGCGTATGCTAGGCCTTTCCTCATTACCTGCCCTACCTATCTCCACAATCTAGCCACAAACAGCTTTGGTTGA
CCACACCACTTCCCTATTGAAACTTAATACTGTTTGACTCATTCGGTGCTGCTTAACCCGAAGCCAAAGAAAACAAGGCAGAGAATAGCTCGCT
TGTATGGAGTCTGGAAAGCCCTGCTCGGCCCTGCTTTCAAAGTCCTATACAGTAGCCTTACTATACCTCAGCTGCAGCTGCACAGAAAATGGAG
GAAGCAGAGGTGACCCTCTGTGTGTGTGTGTGTGTGTTGGCGAGGGAGGTGGGGGTGGGGGACGGAGAAGAGAACAGGAAGGGAATGGGGTGCC
CCCCCTGGGGGGCTGGAAGAGACAACAGAGCAATCTGCCCAGTTCCGGGATTCTCTTTCTGGGCTCCAAAGTGTATCCTAACAGACAGCAGTTT
CTGGGCTGAACAGATACACTAAAAAGAAAGACTCAAAAACCCATTGGAAAAAGCGATTTTCCTATAGAAGACAGCAGAGAGAGGGGAGTTGGAT
CTCACCTGACCAGCTTCCCATAGGACAGTCCCTAGGTGACCAGCGACAACGCCCACCACTGCCAAATGTGGGAAGCACTCACAGCCAGAAGGTT
GTCTTGGGTTGATAGGGAGGTAGCCACACTGCTCCCTACTCCTTGCCTGAGATGAGGTCACCAGGGGGGCAAATGGGGGTGAGGGGTGGGGTGT
GCTTCCAAATTTGGAATGAGTACAACTCTCCCTTTGTAAGTGACCAGGCCGGTGCTCTGCAGGTACATGGCCGCTTGCTGATGCGTACTTGTGA
CTGGTAGACAAGATTCTGCTCACTCGGCCATTCCTGGATTGTAGCTGCCGCCCCTCCTCCTCCCCAGTCACACACCCCAGTGGCTGAGAGACAG
AGTCACCCCCAAACAACTTGAAAGTAACCTTTTCTTGAGTGTGGCACTCAGCCAGTGCTTTGCTAAAACACAACTGTGAACTCACAGGTGCTCA
GCGTCTGCCCTGTCCTCTCTCTTTGGTCCCTTTTCCTTGAGGCCAGCCTAGAGCTCCAATTGCCTCTTTTTTTCCTCTTCAGGTTTAGGGATTG
ATGGAGCCTTTTCTTTACCCCCTTTTCCTAAGCACGGAGGGAGAAAGATCGTTGTTGATGCTGCGAGCCGAGAACCCCAGAGAACGACATCCAA
TCAATCACTCACTCGCTCGCTTTCTCACTCCTCCGTCCAGCCAGGTTTTACAGGGACATCACTCAGCCTCCTCCAAGAGGCCTCTGTTTATCTG
GACTCTGTGCAAACATACTCAGCACCACTGCCAATCACATGTAGCATGGCAGGAACAGGAGAAGGACAGCTCATTACGACAAGTGAGAGATGCA
CGATTGCTCAGACCCAGCCCTGAGCATGGAGATGGAGGTGGGGGCCTCTGAGTGTCTTCTCCTTCCTCCCAGGCCCGTGCAACCTAGGGCTTGC
CCTGCTGAAGGCCCGAGTCCAGGTGCATTTCAGAGACTAGAGAGCTCTCCTGCCTCTGCCTGTGTCCTGCAGTCCTCCCATGGCTGTCTTCCCT
GAAGTCTATCCGTGTCAGAGCTGCTCCGGTAGATGGATAAGAACAGTTACATCAGCTTACTTTTTAATTACACTTTACAGAGGCGGGGTCCTGA
GACCGTGCTTTCAGGAGAGTTAGATAACAGTTGAGATTACAGGCTGGCAAAGGAGCAGGTCTTGCCGTGTGAGTTCCCTGCAGTTCTCCCACAG
GCAGCCACCCCCACGGAGGACCACTGCGGGTCAGGAGCACAAGATAACCAGACGGCTTCTGCTCTAAGCTACAATTACCTCCTTAGTCACCAGA
CAAAGCAGGAGGTGACGGAGGGTCATGACCACAGAGACAAACCCCTCTACTCTCAGGACACCAGGGTCCCATGGGAGCCACCACACCTGAAGTC
TGTCACTCAAGGCCCAGAATGGAGAATGACTGATAGAGACTGCTGCTTTTTTTTTCTCCCTGAATCCTGGGGCTCAAAGAGGGAGAGAGGAGTC
CTGGGGCCTCAGGGACCAGGAGACGCCGGGCCTGTCAGCCTGTTGTCTGTGACTGTCAGCCTTCGTCTGGATTTGGCCTCCGCTGGCTTTACTG
TTCCGTGTGTGGATCAAGGAATAGTTTGTGTCTGATTGAGAAATGTGAATGTGTATGTGTGCATGGGTGGATCACACACAGGTACACACACACA
CAAATATATGACAAATGCATACATATATGTGTGACTTATATGTGTGTGTGATAGATATAATACATATATAGAACATCTTATATGTATATGTGAT
ATAAACACATTGTATGTACATATAACATATATATGTGCTATCGTGTATATGTGTGTAGTAGACATGTGCTACATACATGTGTGTAGTATATATA
AACACATTACATATATATTACATATATGTATGATATGATAGAAGTATGTACTGTATACCAGCATGGTGAAGATATGAGTTGATAGGAATATATA
CACATGCACATGTCTCAGTATGTGGTACGTGTGTATGTAGATGCATGCAATGCACATGGTATAAGCATGTGGCATATGCATGTGTGCCATCAGC
ATGTGTGTGAACACACACACGTGCATCAGAGAAAAGCAGAATCCACTCTGGCTGCTGACTCATGCCAGTGTGCTGTGCTTGGCTCTGCACAAGG
CTCATGCCAGTGTGCTGTGCTTGGCTCTGCACAAGGGACTTGTCTTACTTTTCCGCATGATGAAAAGAATGGTTTGGTGACAGATTTGACTCTG
ACAGGACAGTTCTTCAGGGAGCCACACTCCCCAGCCTGAGACTTTGCCTCAGCAGGTATCTTCACACCAGTCATACTATGTCCACACAGCACTC
ACACTGCTCACACACTTAGTTCTGGATTCCTTTGCCCCAAATGAATTAATTCTACTTTCCTCTAGTCTTGGGAAGGAAGGGTGGATGGTGCTGA
TCAAGAATATCTGTTTGCTGGGTTAAAGCTGGTTGTTTAGTCAGCATTTAGCCTTAGCCGGATGTCTGCCCGGAGCCTTAGGTACTAAGGAGAC
AGCAGGATTCATGTCTCCATACACTCAACGTTCAGCAGGCACAGACACACCACAGTGACACAATGGTGCTGTGGAAAAAGCCACATGCTGAGGG
TGAAGCCAGTGGGTAGAGTTCATGCTTAGAATGCATAAAGCCTGGAGTTTAATCCCTAGCAATGTGTAAACTTGGTATAGTGTAGATACATGTC
TCTGCAGTACTCAGAAAGATCAGGAGTTCAAGCTCATCTTACATAGTGGTTTCAAGACGAGCCTGGATTACATGGCAGCCTGACACACACACAC
ACACACACACACACACACACACACACACACACACACACACACAGAGAGAGAGAGAGAGAGAGAGACAGAGAGAGAGAGAGAGAGAGAGAGAGTC
AGAGCTCTAAAGACTGTCTTAATGGTTAGGTTGGGGACAAGCTCTAAAGACCAGGTATTTGCCTAAAAGAAACACTAAGCAAATCGAGCCAAGG
CATCCCATGAAGTTGTTAAGAAGCAGCAAGCTTAGAGCCATCCAGTCAGCCCCAGCCGAGGAGATGCGGGCGGTCGGGCCCCAGACGTAATTGC
CATGGGTGCCCTTGGGAGGAATCCACCTTAGTCCTTTAATTCCAGACTTGCAGATAAGGAGCCCACAGAAGAGTCTGCAGGAAGCACAGACTTA
GAACAAGGGGTGCCACATGGGTAGTCCTGTCTCCTAGTGAGGGCCGCCTCAGCGGGCAGGAGTCAGAGGCTGCATTGACACCCTGGCCCTCAGG
GGCACTCTGAGCTCTGACCTGCTACATGTCCTAAATAGAACAATAAGCTCTGTATGAGCACCATGGTCCCTGCTGTGCTCACACTCCCTCTGAC
AGTAAGGCAGGTCCCACTTCTCCCGCAAGAATTCTGAGGAGTCTCTAACTCCATGCTACTCAACCTATGGGTTGCAATCCCGCTGGCAACCGTC
TAGCTCCAAAAATATTTACATTATGATTCATAACAGTAGTAAAAAGGTAGCAATGAAAAACAATGTTGCAGTTCGGGTTCACCACAACGTGACG
AGCTGTATTAAAGGGCCGCAGCGTTAGGAAAGCTGAGAACCACTGTTGTCACCAAGGCCATCTAGCCACAGCAGGAGATATGACAATCAGCACG
AAGAGCCTCTCTGCATATACCTAACAACGGTTTAAAAACAGACCAAAGGATCGCCAGTCTTCACACCGAATGGGGCCATCACAAAGTGGCCATG
AACTTAGAGTACAGCCAGTCTTCAGTAAATATCAGCCCTGCACGTGCCAATTCATTCAACAATGAACAGAAATGTTCTTCTTAGAACAAACAAA
CAAACAAACACATGTCTATTAAGTGGGAAGACTTTTCTTCTTGTTGTTCCCCAAAAGATACAATGTAAAAAAAAATCTGAGTTTCAGAAGATGG
AAAGAATTCAGGAAGACATGCGTGGGTTGTAGGTACAAATATGGGGCCGTTTAGATCAGAAGCTTCAATCCCACCGGCTTGGTAGTATACAGAA
ATCAACCAGTCACCCACATATACTGAGGTAGGGATTGTAAGTGGTATTTTATTCTCCAGCTCTCTGCAAAGCACAAGTCTGTAGGAGAAGGGAA
GTCATGGTGCTCATGCGAAATTCACGGGCCAGGAGGGGGAGCCCCTCCCCCCTCCTCTCACACATATACCTGGCACCAGCAATAGCGGCAGCAC
ACAGATCTTCCTAGAAACTGAAGTTATACAGGTCTTTACTCTAGACTTCCTAGCAAGAGTTTCCAAGTGCTCCGGCTATAGAGATCCCTCAGAG
GGCTGCAGACCACTGTGCCCCTCTGGCCCTCCTCACCCATGGGTCATACTGGGGACAGAAGTGGGACAAAGAGGAGTGCATGACCTGTGATCTA
AACTCAATTTGGTTGTGTCTCTGTATTTCTTCACTTAGGCAGGGAGGGGGTCACCAAAATCAAAACAACTCATTCTGGGTGCTCTGGGTGTCGG
ATGGGAGGACTGGGGCACTGAGGGTGGGTTGGGACCCGTATTCTTCCTCCATCTGGCTGCGTGAGATGGGCAAAACGTTAGAACCTCTCTGAAC
TTGGCTTGTCATCTGTCATTTTAAAAGATATGGCTGATTTCTCTGGCCCTTTTCTAGTTCTTCGGTGTAACAGCTGTGTCCTGTTTTCTTTGCA
TGATGGCACGAGAGGAAATGAAGAGACGAGATGAAACCATCTAAGTTCACATAACATCAGACAATCTGTAAAAACATACATATATAAAATGTAT
TAGGGTATATATTAGCATACATCATATAATATCATTGCATGTTTTAGGTATAGTACGTGGATTAATTTAAATGTAGTTTAATTAATTTAAATGT
TTGCTAAACTGAATTTCTCTCTCTCTCTCTCTCTTCCCCCTTTTACGATGCTAGCACTGAGACTTGGGGCCTCGTGAATGTTTGGAAGCAGTTT
CTCACTCAGCTACATGCCCAGTGCTTTGTAATATGTGAATAATATGCAATAGGAGACAGTATTTCTCAACATTTAATTAGCTGGGAGATAGCCG
GTTTGCTGGTTGGAACGCTTGTCTTACTGCAAGACAGTTCAAGGAAGGGACAGAGCTGAGTTCAGTGCAGTTAGCCACTGACTGGGACACAAAG
AAGGGCGACGGGTTCTCTACACTGCCCTTCCATAGACATAAAACTGCCCCAANNNNNNNNNNNNNNNNNNNNNNNNNNNNNNNNNNNNNNNNNN
NNNNNNNNNNNNNNNNNNNNNNNNNNNNNNNNNNNNNNNNNNNNNNNNNNNNNNNNNNNNNNNNNNNNNNNNNNNNNNNNNNNNNNNNNNNNNN
NNNNNNNNNNNNNNNNNNNNNNNNNNNNNNNNNNNNNNNNNNNNNNNNNNNNNNNNNNNNNNNNNNNNNNNNNNNNNNNNNNNNNNNNNNNNNN
NNNNNNNNNNNNNNNNNNNNNNNNNNNNNNNNNNNNNNNNNNNNNNNNNNNNNNNNNNNNNNNNNNNNNNNNNNNNNNNNNNNNNNNNNNNNNN
NNNNNNNNNNNNNNNNNNNNTATATGCCATGTGATCTATCCAAGAAAACCAGAAAAACTGCGGTCAGAAATAGGAGCTGACAGGTTGGCTAATC
AAAGGTTTCCAGGAAAATCTGGCAATTCCACCTCATTGCCTTGATAGAGAAGCAGATGCTCTATTTCAGTCATTTACAGCCGCAGACCACAGTG
GTGCCCTGGCAAAGGCAGCTGAGGTGGTAGTGAGTTGTGCATGCTATTCTGCTCTGTTTTTAACAGAAAGAAGATGGCAACTGACCTTATTATC
TACCATAAAATACAATAACGCTTAGGGGTGCTCTGATGGGCAGCCACCTCAGGGAAATAGAGAGACCTGTCTGGGATGGAGCCACTGGGCAGAG
TAGCATGAGTTTACTTTATTATATCTTTCTCTTCCCATTTTTTGTTGTTTTCTAGGCTGTGTGTTTATAATAACATTCTGAGCAGTGTTTTCTC
GAAATATGTAAAAATAATAATAGAATATCTGGGACCTCCTTTCAGCTCTGTGTGAGCTTCAGAAAGATGCACCCAGTACCTTGTGGTCACAGCT
TGAAGCCCCACTCTGGAAACCTTCACGATGGACTCGCAGTGAACTTGAAAGCCCAGGTTACCAGAATGTGTGTGTTTAGTCTATGTTACAGTCC
TCCGGTGGTTTGATCCAGTGTTCAATTCCCTGTTACCCTCCAGACCCCACTAATCACTAAGAGTGAAGCAGGGATTTCAGAGTGGGCACTTTCC
ATACTCCTGCATTTAAAATTCAGGGGGCAAATTGATATTTTAATAGCATACAGATCCAGGAAACTAAAGACATAAAGCATTCATTTTCCCCCAC
CCTGACAGTTTCCATCGGAAGCTCCTATGTTCCATGCAAAATATTGCTGTTTCCCACACAAACCCCAATCGTTTCAGAAGAGAATTAGGTCCTC
TTGATTCTAAATGCACTTGGGGCCACGCCTTGAACATGATGATGCCCTGCGTTCCCTGGGTGTCCTGGTGTTGCAACTCTCTAACACCCTGTGG
ATGTGGGGTTCAAGCTTTCTCTCAGGCAGAACCTCTCCTAAAGACTCCCAGAATGCACACGGAGAGAGCATGGAATGAAGTATTCCCTAATCCA
CACCACTACACCCAGCTCGGGACTTTCTACACTCATGCGGCTTAGGAAGCAGCTCTGAGAAGCCAGGCCCAGGCATTCCTGCCAGAGCAGGCAG
TCATCAGTTAATCTCTGTAAATGACTACGATTCTGGCAGGTGTCAGCTGCTACGAAAACAGATCACATATTAGGAGTCCTTTTTTTTTTTTTTA
ACTGAGTAACGAGGGAAGAGAAATAAAAATAATATGTCACGTGTGTTGGCCACATAGGGGCTTGTCCACTTGCCACAAACAGCTTATTCCTGTT
TGAGTTCTCAGTGATCAAGTCCCCAAATTCACAGAGCCAGATACTCAGATAGCCATTCTTCAAAGGCTGGCCAGAGACACCACCATTAACTGAT
GCTCTCACTTTAGAATGATCATGCACACAAGTGAGGGGGCTCATGCGCACGCGCGCACACACAGACACACACACAGACACACACACACACACAC
ACACACACACACACGCATTCCCTTCCTATGGCTACACACTGTCCTTCACGGTGTTCTTCCAAAATGCCACTGGGTGCCTCAGGAATGCGAGGCT
GCGACACACACAAAGCCTGCTGCAAGCTCTTCCTGACCCACATTCTTTCTGAGACCATACAAGCTATCCAGCGTCATGTTTCCCACCTTCCTCT
TCCTTGACTGGCATGAGAGACCACGGCAGACACTTAAAAGGGGCCGCATCACGCTTTAAATGGCTTTAGAGCTCAGATTCTTTTTCTGTGACAA
AGCCTGAGGTTTCTCAGGTGGGATGAGGAGTGGGGACTGATTGGGTCGCAAAGAAAAGAAGAGGGAGGATCCAGAGAGGGCTGCACACCGAACT
ACATATACTAACACTGACCAACGTAGAAGGCTCTAGAAAAAGAAGTTTTTGTACTTCTCCTCGTAAAAGGCTGGACGGCGTGGCTCGGGAACTT
GGCCTCTTTTGTCCATAGAGCTTTAAATACTCCGGCTACAAGAGGCCTCTCCCATGCGCCCCGGCCGAGCCTGCGTGACTCAGGGTGTTTGTGT
TTGAGTCCAGTGTTCTGACCTCTGAATGACAGTCCAGATTTGCCGTGGCGATACGTGCAAAGAGCGAGCGCTGCATGTGAACTACACAAATATT
ATGCTTAAGCTTTTTTTTTTTCCTCCATTTGGAGCCAAACAGGTCTTGTCAGTGATAAAAATTGCTGCAATATAGTGGGCCCTTTTTCTGGCCT
GGAATCTGAGACCGTGTCGGCAGTGCCAAGGAGGCCCATAGCAGGAAGAAATAGCAAGCCGCGGGGATTTGAAACCATAACACAACTTCTACGA
CATAATTTTATAATTCTAGCAATCGGGAACTAGGTGGTGGGCGGGGTAGCCTTGTAACCACTCCTGTGCTGGAAGAATGCTCCAGGGTCCTCCG
TGTAGCTCTGGCCTGGGCTGGGGTAGCAGCAACAGCATTTCTATGGGCACAAGCCAACGGCTTCCCCTCTCTTGTTGTGAGGCTGTGTACAGGA
GGATGATTGTGGCTCAGGCTGTGTAACCATTGACAGGAGAATGGCCCTGGCTCAGTCAACGGTTCTAGTCAAACAAACCTTGAGAACCAGGAGG
AAACAACAAAGTCGGCCTCTTAAAAGGAGGAATGGATCTCTACTGTGACTGTGTGCGAGGCTGGGCTCCTCTACAATCTCTAGTCTGCATAATA
CTTTGAAGGGGATGGAGAGGAAAAAAAAAAAAAAGCGGGAGGCCCACCCCTCCTGACTGGCCCACGTGGATGCCCCTACTTGCTGTTTCCTCGT
AACAGAGACACCTACCACCCTTACAAGACAGCAAGCATCCCACCTTGCTTTTCATTCCGAGGGAAAATCAGCAGACCAGCTGCCCACGCCCTCT
GAGCTCCCAAGGGCCTGGCCTACTAGGAATATTGGAACAGACCCACGCTGCACCTTTCTGCCTACTTCCTCCTAGGGATCCGCCCAGGGAGTGC
GCTTCAGGGAAGTAAGGATGCTTCTGAGGAGCCTGTACGAAGGAGGAAGGGGCCTGGGTGTGTGAGGGCAGAGAGGGATGCCCTGTGCCTGCCT
GCGTGTAACAGCAAATCTCACTCCTCCGCTGTCGGTTTGCAGCTGCACCCAATTTCCTGTTGAAGGGACACGCTGCTACGTTCCAGGGCCCACT
CTCGCACCTCTCAGACCTGCTGCTCGGGTTTTCAGGAAGGCAGGGCATTCTTGACCCCGCGAGGGCACCTTTCTTGGCTGCCACAGTTCTGTTC
CCAGCCTGAGGCCCACAGCCAACAAGCAACGGGCTTCTTACCCGGGGCCACCATCAGCAGTTCCGCTCACTAGTGTCTGCCCACCCGAGGGGAT
GTGCGGAGAGCTGTGCGCACCGAGTCCCAGACTGAGGCAACAGCCAGGGACCAGTCGGCTGAAGGAACCTCACCGCGCTATCAGAAGGATAGCC
CTGGTTCCCACAGGCACCCAGCCCAAGGGGCAATGTCCAACAAGCTCACGTTCGGCGTGAAGGGAGAGGCAGCCGAAAGATAAGAAAACTCCCC
TCCACAACACGTTTTCTGATCTCTTCCCTCCCTCCTTACCCTGCCTCCCTCTCCTCCTCCTCCTCCCTTCCCTACCCGGTCCCTACACTAGGAC
ACCGCAGAAACTAGATGATCACACCANNNNNNNNNNNNNNNNNNNNNNNNNNNNNNNNNNNNNNNNNNNNNNNNNNNNNNNNNNNNNNNNNNNN
NNNNNNNNNNNCGCAGAAAGCACCGGGGCTGCCAGGCCTTTCTGGGTGCTCTAAGGGAACTGTTGAAACCCCGCAGCATCAGCTGGGAGCTTAA
TGAGGAGAACGCTGTTCCATCTGCAGAGTATCTCTACTCTGAGAAGTGTGGCTGCTGAGCATGGGAGGGAATCGTGACTGTGGAAGCCATATGT
GTACATGGCTACACGCGTGTATCTCTCTTGGTACCCTTGCAGTTATCGGTTCCAGGTATCAAACTCCACAGGAGTTCAATATGTCCTAGTACTT
GCCTAGGCCTGTGGACATCATCCTGGAGACTGTAATCCGTTCTGCGGCTAGCATCTAACACGCTATTCATGCTATGTTGACAATCACCAAGTTA
TATTACGTAGGGAATCCTGACGAAAATACATTTCAATATGTGTACATTTAAAAAGCTGTATTATCAACCCACCTTCCGTTTAATCTTTAGCTAT
AGAGCCTTCAGATACAAATAGCCTCCTGTATAGAAGCTGACGAGAGGTTTTTGTAAGACTTGTTTTCTACTATGTTGTTTTCTTATCTACCCAT
TAGTCTTGAAGCCACGATACACACAGTTGCTTGCATGTATGTATCTATGTATGTATGTGTTGTGTATACATGTATAAACACACATACACATACA
AATCCAGCAAGGGGTTTTTAAGTTCTTGTTGCCTTTAGATTTTATGCTAAGTTTTCATTTAATATCTCTTCTTTCAAAATATGAAAGACGCATG
CGTGTGTATGTATGTGGTGTGGGCTGTATCAGGCAGAACATTTTCAGATCAGTAGCGTGAGTTCTGGTCACTCTGTGGGCCAGTCACCAGTGGC
AAACACGCTGTAAGATGTAATAACTGCACATACCCTCTGTGCCAAGTTACATAATCCTCACTGCATTTCCCCAGTCGGACGGCTGACGTCGGAA
TCTGTTTGTTCAGTGATATACCATTATAATAACCAAAAGGCAGTTTTCTCTGGGACAGGTGGGACACAGCTATTAATATGGCATGCTTACAGCA
ATACTCCTGCAGAGATGCAGGCCTGGGCAACTCAAATGAACGGATGAGCAGCCCATACAAAGAAAGGGGCAGAGGATGGGCAGCAGGAGTGGGG
CTCTGCCCTTCAGAGAAAGCAAAGACTAGTGTCCTCTGAGCTTCACAGGAGAAAAGCGCCCATCTACTTGATAAGCTTTTTATCTGAGCCGATT
GCTGTCTCTGGGGAGAAACACATGCAGGGCTCACAAATAGGCCCACATTTTCCAGAATGTAATATAGAAAGCCTATACCCCCAGGCATGGTATT
ACACTCAACTTATCATAGTACTTGCAGGATGCAGACAGCAGAATCAAGAGTTCAAGGCCAGCCATCGCTACGTAGCCAGCTTCAAGCCAACCAG
AGATACATGAGACCGTGTTAGCACAGCACAGCGCCTCTCTTTTATATGAACACACACAAAAATTAGGCTTTCTTCCTAGGTATGTTTAGAAAAA
GGCCACACCAAAATCCTTAGGTGTTTGTGTGTGTGTGTGTGTGTGTGTGTGTGTGTGTGTGTGTGTGTAATAGTGACGAATAATCACTCAAAAT
ACCCACACTAATTTTCCAAGGTCCCACACTGCAGCTCGGTGGTGAATTGACGCAAATGACACACTTTACGTGAGATGGATGGACTCTGGGAGAA
GGAGATATCCAAGGACATTTTTCTGCCTTCTGTTTACTCTCACTTAAGTTCACACACGTTTTCTCCGGCATCCCATGTCTAAAACCCAAAGAAA
AGCCTGTTCTCTTGCCCTCTCCTGGCTGCCCCGAGCGCCCGTGAGCTGAGAAGGAGGCTGGTCTTTTACTTACAGTCAAACCAAAACTGGTAAC
CGTCTTTAAAGCCAGTGCCAAACCATGCAGGAGCAAATTCAGATGGTTGCCTCTGCCTGCCTCATGAACCCGCACTGCTTCAGTTTGCCGTCTT
ACATACCTCGTCCCTAGAAACTGCAGAGGGTGGGTGGGCTCAAGGGAGCCCTGGGCCTTTGGAACCACCCACCTGTGCACAGAGGCATGGTCAT
CGACAGGTGGCTGCGCATCGCTGACTCTCCAGAACACTGCACTTGCTCTTAGAGTGTCCTAGGGGCTTGGTTGGTACTCTGAGAAGATGTCTGG
ACTATATTGTCGATTTTTTTTCCTCTCCACTATATAAATTTGATAAGCAGCGATTTACTGGCCTCCAGGCAGACACGCGGTTTCAAACCCCATT
GAAGATACTGCATATAAAACCAATTTCTCTTTCTTGTGTTCTCTCTCCCACCTTCTGCGTTTCTCTCCTCTCTTCTTTCTTCCTTCTCCCTTCT
CCGGCTCTTCTCTGGTATCTCTTCTTATAAGAAAGTCCTATTTTATACAAATCTAGTTTTGAGTGAACTCCTGATTTTTTTTCACCCTTGAAAT
GTAAACATTAACAGGGATAGTGTAACAGGCAAGTTCTTCACATTGTTCCTGGCGTTGCGGGCAGTTACTGCCTGGTCCTAGCCGTAGAGCACAC
GTGCCTACTTAAGGTGGGAATTTAAGCGATGCACCATGGGACTGTGGCTCTCTGAAATGGCAGTCACAGTTTTAAGAAAACTATCCCAGAAGTA
GCCAGGGCGGTGTCCCCTGGACACCACAGAGACACAGGAATGATTGTCAGCTTTAGAGGTGTCACTCACTGCAGGGGAGCCTCTGTTGAGCAGC
AGAAGACTGCAGGCTGGAGCCACCCCTTGGCTCTGCCAGCAGAGGATCATGGGTATACAATATCACATTTCCTTATCTTACCAAATAGACACCT
CGAGTGATCTGCACTGGGGTTCAGATGGAGAGGCAAGACAGTTACCATGCCACCAAACCACTGTTTTGTTTCTTCAGGTTTTAACTTTAAAACA
GCCGAGGTTAATTTCGACTTCCTATTTGAGCAAGTCTTTGAGTGGAATAGAAAGCTGTTTTGTCATGGCTGCCTGTTTACGCAAGTCAGGACAC
CATTGTTAAGTCCTGCCAAATTTCAGGGCTTTTCTCCGTTCCTTTTACAGCAGGAGTAGAGCAGATTACAGAGTTCTGGGGTAGCCGGGCCTGG
TCCCTCACACCTCCCTTTTAGGAATGGCTCCAAGCAACAGACATGCGTCATTTTAGGTCTTGQGCTCTGATTTCCCTGGGAACCATCATGAAGG
TGTCCTGACTTCTGCCTGGGGGACGGGGGGAGATGCAGATAAGGTGTAAAGATGCTGATTCCGAAATCCTTCAGACCAAATAAGTACTCTAAGC
CTCTTGCTGTAAAGTTTAACTTTCCTTGGATTCGTTGTGATGAAGCTGAGCTTAGACTTCGAGGTCTACACTGTTCTTTTTGCTCGGTAATCTC
TGGTGTGACTTCTAGACAGAAACACAGTCTCCCCAACTTCTTCCAGCTTTGTTACGGGGTGGATATGAAGTCAAATCCAGACCTCTCTGAAGGC
ACAGGCAGGAAGGTGGTGTGGAAGGACACACTTGTGCTCCTGGCTCAGGGACTGGTGTGCTACTAGGCCGACAGGCATGGAGAGGAGTTGGGCT
AGCCACTTGTGTAGAAGATGTGGACTGAATCTGTTTGGTTGTAATTGGAGGTTGATGCTGCTGTCGACGTTCATAATAACATCAGACTGTGTGC
TGGATGTCTTGCTAAGTCATGTTTCGGGGCATTTTATTTTTAAAGATGGGTAGAAAAGAAAGCCAATCAGAATACTGAAATTCTGAGCATGCCC
TAAGGGGGATCATGGGGTAAGGGGACTTCCAGCAACTCTTTCTTGGGGTAATCCCACACACATTTATGAGTCTCTCTCCTGTGGCCTTTTATAA
CTAAAGCCTTCTTCCCAAGTACCATGAGATCAGCCTACATGAGAGCAGATGCCCCCATCTCAAGCTCCACGTGACCGAGGAAGCCCACGTGCTC
TCAGGTGGCCCCCAGATTTCCAGTTTTCTAATGCATTGTCTTAGGCTCCTTCCAAGTCCCTTTGAAAAAGTTATATTCGCTACTGTCTGTGAGG
TTCTTAGAGGTAGCCTTACCATGTCAGGGCAATTCCCTCCACCCTCAGAATGTACGAACGCAAGGAAGCATTTCCACCTTCCAGAGTAAGGACC
AAACTCCTGCATCCAGAGAGCCAGGCCACAAGAGCATGTGAAAAAGGCTTGTCCTGCCCACCACCAACTCACATAGCATAACTAGCATAAGCAG
GGGGACACAAAGGGACCTGCGAGCCCTTGCCGCCCTGGGGTAAAGCATGGGACTGCTCAGCTTCGCTGCCTGCTTTTCTCTCCATTTCTGCCTG
CCCCCCCATCCCCCAATCTGTCGTCTGTGTGTGTGTGTGTGTCTGTCTCTGTGTGTGTGCATGCCTGCCTGCACCCACGCATGCGCTACCTTTT
GTGTTTGTCTCTGTCTTTCTTTGTCATATGCCTGTCTCCACCCC1AGTCACATACATATTTAAAGCCAGCGTGGGATGQGCCTGTTGATTTCCT
AGGCCATTTCCTTTGAAATGGCCATTTCATGCACACAGCGTAAAGTACTAAAAATTAACCCTTGCAGCTTGCTTATAGCACTAAGTAACTTTCC
CTTCAAAATAACTCCTGTCTGTGGCAGGCACTAAACCCGAAGAGCTGCAGGACCGGAGTTGTACACGCACAACACGCCAGAATCAGATGTTCAC
ACAATAAACAGGGCAGTGGGCAGCGGAAGGGAGAAAGAAGAACTGGATAAGAGAAAACCCTGAAAAAAAAAGAGTGCAGACTACAGAGCCCCTG
CTACATCCTGTGTGCTTCCCTGCCCCTGTCCTGTGGTATGTGTTGCCACGCCTCTGTCACATGGTATGTGCTGCCCCGCCCCTGCCACGTGGTG
TCTGCTCCCCTCTTCTCACCCCACAGTGAGAAGACAGAAGGAGTACTCCAAGTTTATAGAAAGAGAAGCGCTTCTAGGCAGCAACTGAGGATGC
CCTGTCATGTGCATATATATTCTTAGCTGGTGCAACACAAACTCTATGTCTAAAGAAAGTATGAATCTGCGGGCTAAAGAACTGTACCATAGAC
ATTCAGGAGAAGAGAAAGATGGGTGTCAGGGAGGAAGCGCCAGCAGGCCTTGGTGTTCTCCCTGTTTGGGCCCCTCATCTATTGAGCCTGAGGT
ACTAACATAACCTCCCACCTTAAGGATCGCCACAGGTGCCAGCACCTTCGCCCCTAAAACTGTTCAGTGTCACAACCCTGGTGTATTATGTATT
AACCTTACCCCCAAACACTTAATCAGCCCTTCAAAGAATCACTTACCACTTAAACTGACACTACCTTTGTAACCCAAAACCACAGTTTAATAGG
ACCTGGTTTCCAAAGCGGTTCATGACTGTTGCTCAAAGAGGTCTGCCCATGTTCTCAGGATCCTGTTAGTCCCTCGTGGATACCTTTTCTCATG
ACAAGGGAAAAGTCACTTACTATGGGACTTGGTCTCTATGATCAAATCGTCCTTCTGACGCTTCGAACTTCTCCCTAAGGGCTAATACTCTAAA
CCTTGTCCTCAGGGCCTTTCAGTGGTCTTTTGTGTATTTGCTGAATGGTGATGTTAAATATTCGAGGCTTCAAAAGGAACCAGTCCTTAGCTGC
TAAGGCGGGAAGAGTACAATCACAAACTGGCCCAAACTGGCTACGGCATATACTCTAAGATTTTTAGCAAGAAGTTTAACCTCTTAAAGCCTCT
GTCTTCCCATCTACAAAATGGGAATGGTAATTGTTCTTGTCGGAATGTCCTTTGAGCGGTCACTGTTATAATCCTTGTCGACAACACCAACTTG
GCTAGTTTTCCTGTGGCTGACACAACATACGGACCACAGATTTAGTGACTTAAAACAATGAGAGTTTATTCTCTCAAAATTGGAGGCTACAAGT
CCCAACATTAAGGTCACAAGAGGTGGCACTCCCATTGAAGGCCTAAGAGAAGGACTCTCTGGCCTCCTCTAACCCTTGCCAGCTCCAGGCACTC
ATTGGTCCATGGCTGCATCCTCCCCACCCCCTCTCTTCTGACAGCTCTTCTCTGTTCCATCTCTCCTTCTTCTTCTTTAAACGTCTCATGTTAC
TGGATCTAGACCTAGGCTACTCAAGACAGCGTCAGGCCCTTCACTTAGCTGTGTGTGTGAGAGACCAGACCCTTTGTCAGTGAGATCCTCGTCA
CAATCTAATGGTCAGAATATGGCCCTGCCCTTTCTGGTGCCACCGTTCAGTGCCAGAGATTAAAACCTGTTACATTGATGTCATCGGAACATTA
GCCGGTGGATCCCGGTCAGTCCAACGAGCCCCTTCCCATCTGTCCCTCAGAGTAGACCTAGTGTCCAGATAAATGTGATGTCATGCCTGTGTGA
CCCTCTCTTGTCATCTGCACTTCAGCATCTCAGCCCTTCATTTGCCAGAGCCATGTCCTGATTCTTCCATTCCCCAGCTCAGAGAATAGAGTTT
CTTTTTTTTTTCCTGGGCAAGATCAGCTATTTCCGAGTGTTTCTAGAGCACCCATACAGATGAAGCCAAAGGGTCAATGGTGGTCGGAAAGGGG
GGCTTCCATCCCCCTACCCCAATACCTAGGGTGTAATGTCAGAACACAGGAGGCTTGGAGCCTCCAGAATCCTGTGGCCACATAGACAGCAGCG
AGCACAGAAACAAAACTTGCCCTGATCCCCAAAGCCAGCCAGTTGCGACGTACTCAACAATTCCACCTCCAGATGAACCCAGGCCAGAGGCAGG
CATGTTGTTGTTTTGThGGACCAAGCAGCAGGCGTTAGCACAGAGTCTTGTCAACCAGATTCCCATGCCAAAAGGACCATGGTTTGCTTTGGGC
CCCGGTCATGCCAAGCCACAGATCACAGATCACACATAGCCTTTCAAGTCTGGAGGAGGGAGAGAATTTTTAACGGCAGCTGTGAAGCTTTATC
AAAGTTTACCAAAAGTTTGGCCCGAGAGAATAGTGTCAGGCTGAAAGGGCCACCTAGGCATTCTCCCAGTGCTGGGCTTTGTAAGTGCAGCCCA
AAGGCTTCATCACTCTGTCTTGTCTTGTTTCCCCCTGGCTCCAGGACACCCCATTCTAACTCTAGGGGACCATGAACTAAGGCACTTGGTGTCC
CTTATCTTCCAGACAATAGCCACCTAGTACCGAGTCTCTGCCCTGTTACCACACTTCTTGGCCCCACACAGACTCTATATTCATATTAAACAAT
TGATCGCAGAGCCGCAGAGCAGCCAATTGTTGTGGAGATTAAAGGTAGGGATCGCGGAAAGCCTGCAGACGCACTGTTTACTGACAAGCCTCCC
ATCTCTCCACAGAGTTTCCTCCCATAATCCCTTTCTGGCAGGACATTTTATGTGTCAATGCCGGGCGATTCGGTTACCCAGGCACAGTCAATAT
GACAAACTAATAAGGAGAAAAATAGAGTAGAACTCACCCTCAAAACAAACACAGATCACTCATGTGCCTCTCTGTGCATGCCTGAGAACACAGC
AAGAAAGAAGTGGGACAGGGACTGTGCTGTTTCCTTGTTCTGTTGATCTCTCTAACCAGGTGATGGAGGGTCTTCAGGCGGAGTCCTAGCTGAG
CCTGGCTCCTTTGAGCAGTGCTTACCACTTTAAAAGTAGCATTTTCAGAACAAACAGAACCATGTTTCCTGAGCTAGAATGAGCCTCTAAGCCA
CTGGTAGTAGAGGCTGGCCAGAAGGGACCCTTACTTCTGACTCAGGTTGAAAGGTCACAGAACCTGGGCCTCCCTCATTGCTCAGTGTCTCCCT
CGGGCTCATGCAAGGCTTAGAACCTTCCAGACATATTTGCAACATTTGAACCATCACTGATGGTTCAAATTCTGATCTCCATGGATCATAACCT
TATCCTTTTTACAAAGCTGGTGTCTTAGTTACGGTTTTGCTGCTGTGAACAGACACCATGACCAAGGCAAGTCTTATAAAGAACAGCATTTAAT
TGGGGCTGGCTTACAGCTTCAGAGGTTCCATCCATTGTCATCAAGGTGGGAACATGGCAGAGTGCAGACAGGCATGGTGCAGGAGGAGCTGAGA
GTTCTACATGAAGAGTAGAACTGAGAGTGCCACCTGAATCCTGCTAGCAGAATAGTGACTTCCAGGTAGCTAGGGTGAGTGAGGGTCTTAAACC
CATGCCCACAGTGACATCCCTACTCTGACAGGGCCACACTTTCTAATACTGCCACTCTCTGAGCCAAGCATATACAAACTATCACAGGTGGGTA
TTCATTTTAAACACAAAACTGCAGCCCTTTCCTCTAAGACGGCATTATGTGGGTGGAATCTCTGCTGTATCAGATGGGAAGACACCTTCCATGT
CATCCAACAACTATGGGATGCCGTCTGAGGACACCAAGTCTGTCCCTGGTTCCTTCCTGTCCCATCTTAATTCTTACACAGTTTCACTTGTTGA
GTCACTGAATTTGGGGTTCCAGGATGTAGCACAGTTAAACTCATCAAGGCTTGGGCACCGTGGTGACGAGTCAGCCCTGGGAGTTTGGCAGGGG
ATGTGCTAGAACCATGCTGCTCTGGAATGAAGAGACACCACTGATAGATTAAAGTAGAACTTCCCCAGGACAGGAAGGTCTATGAACTAGTCTT
CTCGTGGGTGGGATGGTTCACCCATTAGGACTGTCTCCAGCTTCATGGCAGGTCCTCTCCCCATCAGGCGTTCCAGGACCAGATCTGAGGCTCA
GAGCTAAATCTTCACTATTTCCTCTCCACACACTTTGAACGGCTGCTTCGGGTGGCTTTGAGAGAATATCTTCAGACAAAAAGGGGCAGAGGAC
TAATGAGACTGAGGACTGCTCGCCTTAGAGTTGCTGCTCACACAAGGGAAATGAACACGATGGCTTTATGGTGTCTCCTGGGACGACGGCGCTC
CCTCGGCCACTCTCCTTCCATTAGCACATCTCTCTGCACATATCAGATGGCAAATTACAGAACGATAGGGTTATTAAAATATCTGTAAAAGTCA
GCCCAGGCTCAAGGGCTTGACTTGGCCCTCCTGCCCGTTCGGCGGTTTATTTACATCTCCCAAGGTCAGCTCGCCAGCATCTGTATTTTGCGGT
AAACCGCCCACTCCGCAGACCAACCAGAACAGCCCACTTTTGAAGATGCGCTTCCCTTGGTTTTCCAGTAAGCCACTGGCACTCTTAAGAGTGA
GCCCAGAGCTCTTCAGACCTAATCCTACTGTCGCCCCCCACCCAATTTTAAAACTTCAGGGTAGGAGCGTGACCGTGTCTGCAGCCAGATTATC
ACCAGAGTAGTTCAGGCAAGAAAAACTATCATAATGATATTGTTGGGTTCACACATTTACCAAAGGCAATTATATAAAGCCTTCGTAGTTCATG
TTCACAGAACAGATTGCGAGTCGTCTGGTGAGGTCACAGGCAGAGGAAATACCCTCTACAAGGTTCAGGTGGCCCACTCCTTCTTTTTCATAGT
GCCTGACACTCCCCATCCCCCCATACATCTTTCTCCAGGGGGCGGGGGGGGGGAGGTGGGGGGGATGCATATGGGTGAGCACACACACACATGT
ACTCCTGAAAGTCGGAGGACAGCCTCAGGTGTGGGAGGACGGTCTCAAATGTCAGCCTCCAATAACTGCCACATTTGCTTGAGACAGGGCCTCT
TATTAGCCTTTTGCTTTGCTCAGTGATTAGGCTAGAAGGCCAGCCAACTCCAGAAGTCTGCCTGTCTGTATCTCCCATCTTGCTGTAATCCTTG
AGGTAACCGCCATATGCTGCCACACCCTGTCCTTGGGATGAAACTGAGGGCCTCATATTTGTGAGGAGAGAGCTTCACTGACTGAATCTCCCCC
TGCCTGGCACTGCTCTCTACAGTTTCCTAGGCCTTGCTCTCAGGCAAGTGAGTCACTGCTTGGTCCTAAACATTCTGTAATTGTGGGCACACTA
TCTTGAAGGGATTAGAGTCACCCCTAACACCCTCAGGGAAACCAACCTCCATGCCCTAGAGCCCCCACCCCACCCTGCTGCTTCTCATTGGCAG
ACTTTTGTGGTGCTGGTGGTGGTGGTGGTGGGGTGATACTTTTTGCTGTGTGATCAAGCTTAGAGAGGCTAAGAGCCACCATATGTTGCCAAAT
GAGAGAAGCCACTGCCCAGACATGGATCTGTCTGATTTAATATGATTTTCCATAACTGACAAAGCACCGGTTTGAAATTGAATTTGTGTAAAAT
TACAGATAGCCAGCTCAGGTGGAAGGGGAAGGAAGCCTTGCTATTCATGTTCCCGTGGCTTTTCCCGGTTTCCCCATTTCAGTCCTTCACGCCT
TGGGGGAGGGGAGACTCGGTGGACGGCCTACGGAGGGTAGCTCTTGCAGTCAGACTTTCTCCCTGGCCAGTCATGGCTTCCTCTGAGGAGGACT
CCAGAACCTGGAGATGTTGGGGCGAAAGGACAAATCCTCTGTCCATCCATCCATCCATCCATCCATCCCTCCCATCATCCAGCACAGAACTCAT
CTTCACACCTGGTCATCAGAGGGGCTCCAGGATAAACTTGGGGAGAGGGGGTACCTAGAAAAGCCTAATTCATTAGGACGGCCTCATGCCAATC
CAGAATGCTTTGGGGCTCAGACTCCGACTTTGTCCACTTTCTAGTTGTAGGTCCTTGAACGAAGGAAGCACTCAGGTCCCTGTGCCACACTGTT
GCCATCTGTAAAATGGGCACGCTCATAATGCCTGACTCATGAGATGGTCTTGAAGACGAAGTCAGCATGATTATAGTATTGGGTGGTCAGCATG
CTGTGTCTTGGTATGGTTGTGTCTTGTTCACTCCTGCAGAAACCCCTCACTGAGGCTGAGATGCGATCCTGGGATGTGTAGAGCACAGCGCCCA
GCGTGTCTAAAGTTCTCGACACTGCTCCCGCCGTCTGTGTAACCATAACTGCCATTCCTGCTACAGCTCTTGCTGCCGGCTCTCCGGCTGACAT
CAGGCCTGTCCTGCGAGGCTCACAGCCACTCTGTGACAATGGCCTTTAGAGTTTTGCTGATTTCAGTTTGGGGTCCTTGGGTAAACTCCAGCGG
GACCATCCATAGTCACTATCCACATCTTTGCCTAGCGCCTCTCCCCTGCCCCACCACCCCACCCCACCCCACCCAACACCCTGAAGGTCCAGGC
GCCCTCCATAACTGAGCTCTCCCAGGCTGTCCTCTTGTACTGAAGTCGGTCATATGGGGAACGGCTCATTTCCCCAGCGCTGGCTTAGCCTTAC
TCAGCCTTTTCCCTGTAATGGGATTTTGGCTCTGGGAGAGGGCAGGATTTAGTTTCTTATGGTCCCTTTTCTTTTCTTCGCTTAATGTTGAATT
TTATTTTTAAAACGTTTTTTTTAGAAGGAATAATTAAAATAATATATTTTAAAATGGGGTTGTTTTTTTGTTTTAAATAAACAAGGCCATACAC
GCTTTCTCATCCTCTTCAGTTCACAGCAAGCACTCCCAGACTGCTAACAGCTGTAGTGAGCTAACAGGTCACTTCCTGAAACCAGCGGCCCTGA
CTGGGCAGCGTTCAGGGGGTGGTCCCTCCCCCTCTCCGTTGCTTTCTTGAATTAGACTCACCATATATGAGTGGCCTGACTCTTCTGTGTTTTT
AATGTTACCGTCTACTAAAGGGTTTCTTTGAATGAGGTCTCATCTCCCTGACTGATTTTAAGTCAATACCTCCCTCTGCCAAATCCACCACTCT
AAGCCTGCTCTCAGCTGCAGCCCAGGCTGTCAGACCCAGAAGAGGACAACAAACAGTGTGGGAGGTGACACAGCCACAGCTGTGGGAAGGACAG
CCACTCAGGGCAGGCCCTAGGCTGGGACAGGGGGGAGGTGCCGAGTGACAGTCCCCTCGACCAGTTCAGAATGGTCCTGCCAGACTTATGTCAT
TACTCCCAGAAGACTGCATGCATGAGCCGAGACCTGTATCCAGCCAGAGGTGCCCCTGTTACAGCCAAGTCTTTGCCATGAATTCAGAGTCAGG
GCCTTGAATGGGTAGATCAGAGACTGTTTTGGAATTTGTAAGATTAGCCACCACTTTCTTCCCCCCCCCCCCCCGCCCCCCTCCCAAGCTACCA
GGGAACAGGATCCTGCATAGCTGGTGGCTTCTGGCTCCCTTCCTTAACTGAGAGACAGACCACTCCAGCATCCTGGCTCTTAAGTGATATTTAC
TTAATAGTTAACTGGGTTTCAAAAGAGAATGGGGACTTGACTCCCTTCACTAATTAGCCCTGCCGGCTGGCTTGTCATCTCCACCTTCACCACC
CACGGAGTGTGCTCTTGACAAGTCATGACCCGAACTCCCAGGGGACTTGCACTCTGGGCTTGCCTCCTCCACTGTCTGAGAAACACAAGTCTCT
AAAGAAGATAAGGCTAGAGCAATGAAGGGCATTCTGGGAAAACGTAAAGGATCCCGCCCCCCCTCCCCAGATCCCAGAGAAGCAATGGCAGCCT
GGAGGGGAAAGTGACTTGCCACAGGTGGCATACACTGTTATCCGAGTGCTTGGCTGTCTTCTCCGGTTCGQTCGCTGGACACATTCCTGGTATT
TGGAAGTAGCACAGGCACCCTTCCTGAGGAGTCCCTTCCAAACACCATCCAGGCGAACGAGGGGCTGTTGGGACAAGATAGGGCAGACCCACGT
GTGCCTGTGCACAGGGCTCCACCCAATTTCTCATCCTTATATTTTATACGTGTGTGTGTGTGTGTCTGTCTGTGTGTGTCTCAGTCTCAAATAA
CCCAAACAGGCAGGGTACTGATACTGCAGACAGTCTGCAGGCACCTGCCCAAGANNNNNNNNNNNNNNNNNNNNNNNNNNNNNNNNNNNNNNNN
NNNNNNNNNNNNNNGGAAGTCCTAGGTCAGCCAATGCTTGAATTCTTTTCCTTTCCTGTCCCCTCCTCCCTGCCCACTCCCATCCCCCCCCCAA
TTTAATAAATTTATATTTAGAAACTAAATATAGTTTCTAACCAACAGCAGCCCTGTTATGAAGAACATCTTGCAGCATAAGGAGAGACATCTCT
TAGAAAATCAATTTCCATCTGTAGAGACGTGGGATAAGGAAGGGAATGTAACCTTTAGCCCACCACCACTCAACTCTGGAACCTGAGCCCATCC
CCGTCACAACTCATCGTTGTGTCTCTTCTCGTTCTTTCTTTCCTCTGCTGACATGAGAAAGGGAATCACTCACTGGTGAGGTACCAGACATCAC
GCTACAGTCCAGCCTGCTTCTCCCACAAGGAGAGGCAGACTACTGAGCTGGCTATGGGCAGCCCCACCTGTAAACTCTGCAAAGCCAGCCCCTT
GCCCCAAGGCTCTGACAGCAATAGATAGAGCCCAGGTTGGCTCCCCTCACGGTTGGTGTCCCTGAAGGGGGATTGGTCAGCCATGAACTCATCC
TCACAGAATTGTATAGGGGAGCCTCAAAACAAGGCTTCTGCAAACTATCCCAGGCATTCTGTGATGTAAGAGCCCACGATATGGAGGCCATGTA
GGAACCCTTGGTGCTTCTCTTCCCCTCAACCCCCCACCATGTTGCCACCATGCCTCAGGGACTCAGAAAACTCACCAGTCTCCCAGTCAGCTGG
CAGCTTAGGTGCCTGTGGCCATCTTTCTCAGAGCTACAAAGAGCTCCCTTACACACCAAGCTCATCTCTGAGCACTACAGGCAAGGCAAACACT
GTTAGCTCATGGGCAACTGAGGACTGAGGAGACTTGAAGTTCCTTGAACTTCACGTTCTTCTTGTAGCATAAGTCATTGTTGCTCGGCCATCTT
GCGTCAGCCATCTTGCATCAGCCATCTTCCGTCGGCCATCTTGTGTCTCTATGTGGATATCACTGGACAGGAACAGCTTTTCAGACACGGCAGA
ATGGCCACAAAGTACAGGAATAATGACGCCTCTGACCTCAGTGTGCCTTCTGCTGCTATGACTCTTGAGTGGCAATGTAAGTGAGGATCCTGCA
GCTTCCCCTTGGCTCCTTTGCCTTCAGGTGACCATTATAAACCCCCCTAGGCCCTGTGCGTCCACCTGGTCTGATCATGTAGCCTTCAAAGGCC
ATGCCCACGGCCGAAGAAGCTATTAATGCCTTTCAAGCCAACTGAAGGCCAAAGACTTGGCGCACAGAGCTCTTTTCGCTGCCCATCAAATTCC
CTTCTCGAGCAATGCCTCCATTCCTGTGGTGTTCCAGGCTCTCCCTGGCTCCCTAGTCCATCCAAGCTCTGAAATCACTCTCAGCCAGTCACAG
GAGCAGGATGGAGGCAGGGAGTCTGGGGAAGGTACCAAGTGGATGTGAGGTTAGCTTACCTGTCTTCCTCTCTGGCTAGTCCTGTTCCCTCCTC
ACCCTGTTCCCACACTCTCCCATATTTCAGCAATCCTCACATGTCCCTTCCTACAAGGACCAAACTGAGTCCTCTCCCAGTTCCTAGACAAGCC
TGACAGTCCCTCTCACTGTAACATCTCCCCATGTCTGCTCTCTGGTTATACTTGACAGGTGGTGGCGCCAAGTGCCTTTTCCTTCACTGTCCTG
AGTGAGGCGTCATCCTGCCCAGTTAACAACCCCACCCTGCTAACCGGAGGACTGAATCTATGTGCTCCAGCATGGCCTTCCCCACACATCTGGG
CTCTGAGACCCACAGAAGGGTCAGCAGAGTCCCAAGTACCCTTGAACACTCCTTCACTTCTCTGGGTCCTCAGGAATACAGGCCACGAGGTACA
GAAACCAGTCAGTCCCTGTAGAAGCATTTTTTCTTCTGATCTTAGGAACACAGGTCAAAGTGGGACACTGGTGGGTGTGAACCCCATTTCAAAG
TTCCAGGCAGGAAACAATGCAGTGACTGGGAGGTCCCTTTGCCTCTTGACATTATGGCCCATAATGTTGTGGCCTTCGATACCCGCCCCTCCCC
ACCATGCTGTTTCCAGACCCACACCAAATACTCCTCCCATGACACCCTGCCTTCCTTCCTCTGCAGACAGCTCAGCCTCACCTGACGCAGACTT
CCACATATTTGAACCTGCTTTGCATGCTTAATTAGAGACCTAGGCCCTGAAATAAGCTGTCTTAGTTACCCACAACTTCCTAGGGATCCCAGCC
CCTACCACAGCACAATACTGCCTCCACCAGCCAGGTTCCTGCTTCCTGCCCTTCAGGGGTGTGTGTGTGTCTGCTGCTTCCTTCTCAGACCCAC
ATTTCTAGATTCTTTTTCAAATCCATCCTTCGAAACTCTTTATTTAGCGCTCTCTCTCTCTCTCTCTCTCTCTCTCTCTCTCTCTCTCTCTCTC
TCTCCCCACACACACCTTTTCACCTTAATAAAGCCTTGCCCTGGCGCCAGGGCTGGAGCTCACCTGGGAGAGTGCTTTCCTAGGGCTGTGAACC
CTAAATTCTATCCCCAGCACTTGGCACCCACCGACATCTGTACCACCTGGATTCCAGCATTCAGGAGGTGGAGGCAGGAGGATTAGAAGTTTAT
GGTCATTCTCAGCTCTCACGTATATAAGTTCAAGGCTAGTCTGACCACAAGAAATCTTTTCTTTAAAAATAATTGATCCACTGCCAAGTCAGGG
GGCTTCAGGGCCCCGTCCCCAGCTTCTGGGGACTTTACCTAGTATGACTCCTACCACGCAGGAAAGTCAGGCTTGTCTTCCTCTCATTGTCCTT
CTCTGGTCACAGGATGGTGCTCGGACAGCCAGCCAGACGCTCTCTCTCATCCACCTGTCTCCTTACCCACCATTTGTGTGAAAGAGTGTCAGAT
TGTGGCCCCAAACAGGAAGCCCTCTGGCCCTCTGGCCCGCTAATCCCCTTTGGGAGGAACCTTCACTAGGTACTCTTAGAGGGTCTTCTGTTCA
AATCAAGGGGAAAGTGGTTTGAATGAGCTGTGTTTTGTTTTGTTTTGTTTTGTTTTGTTTTTAAAGAAGACAGGAAGTTCCTGTTTTTTAGAAA
GGCTGTTCATTTTCAAAGAACCAACTTACAGAGCCAATCGACCATAGGATTGCTGCTGGATTTTTTTCCCCCAATGTGGTACACAATACATGCG
AAAAAGAAAGCGGCGACCCCCACCAATGAGAGATAGTCAGTAACACAAAGGGAGATATTATAATCGGCTTTTGTTGGTGCTTGCGTCTTCTTGT
TGAAAACCAGAAAGCCCCTGAGGTGCTGAAGTCCGGACAGAAGCTGATGTTATCGGCCCCCAGAAATCCTGCCTGGAGTCCAGTGGCAGGCAGG
ATCCGAAGCTCCCAAGACCACAGCAACTGGCCCTGCTCAGTACAAACGGTGCTTTCAGTCTCTGGTAAACAGCCTGTGCCCCAGGGCTCAAATC
CTTCAAAAGTTTGCCTAGQTAATTGCCTTTCATTGCTGTCTGCCCTGCGCTCGTCAGTCTAATCTGGAGGTTCAGACAGCCAGGCCAAAGCTTG
CGAGTCTGGAGGGGAACAAGCCCATGAATCTAATCCACTTGAAAGACAGACTAATACAAGTGCAGCTAACTCATTATTTTAAGTGATTTGAACA
GAAGGAGTATCGCACTCTCTATAAAAGGGTTTCAAGTCAGTGCAGTGCAGTGTTTGGCAGCTTAAAGCCATTAGAGGAACTGCAAAGGGTGACA
GTGTGACTCCCCGTCGCCGTCCTCATTTTATGAAGCCTGGTTCCTCCCTGTGACCACCCTAAAATGGTTTTTTCCTGTCCTGCCCTTGGTTTTT
GAGTTATTTGTGAATTATTATAGTAAAAGACTCCAACTTTTGTCTTTGATCCAGGCGTGGGTACGAAAGGAGACACAAATGTAAAGACAGAATT
CTGAGGGACCCCTCGGACCTCTGAATACCCCCAGATCTGAAAATAGGAAGAGCTACCCTCTTCAAAGCCCCAACACCCTCAGCACTTAGAGTTT
TTGAAGGTTAAGCCTTCCCATTTTGCCGGTATGATCATTAGGTAGGAGGAGGGGTGCTTTATGGAAGTAAACCTTCATCCTACCACCAACCTGT
GTGACGAACAGAGACCGTCCCTTCATCTTGCACTCCAGCTTTCTCTGAGTTGGAGCTGGCACAGGTAGCCTCTGGGGCTGCTTCCTGCCCCATC
ATTCCATGAGTCTTTGGAACAAGACCTCAGAACTGTTGACAACAATCTGCACCATTATCTAGTTACATGTGACTCATGCCCAGAAAGCCCAGGA
GAAGCAAGTGCTGGCCTGTCCCTTCCAAGGTAGCAAAGCCAGTGGTCAACTCAGGGGCAAGCTTATTGGCCATTTACACCTGTGGCTCCCCCGG
GGCTGGATTCACCCAGTGCCAAGTCTGCGTGTCAGACTGAGACTGTGACAAACCAGTTTCTGCAAACACCGATGTGGAGACCAGGTTCTCCTTA
GGCGCTGCCTAGCCATGGTTGCCCCCACCTCAGCCCCTCAGTTCATGTGTCTTCCACCCAGGCCACCGTGCTAGATTACATCTCTCGAAATCAG
AGCAGCCTCTAGAAGTCACATGCTCTGCTTCCATGTTGAAGTTGGCTGAACTACCCTATTGGTGTGACGTTCCCTGGGTCAGTCTTCCCTTGTC
ATTTTAGTTTCCCTTGACTGTGGGAGCTGAACCATTCTTTTACGGGAACTTCTTATGCACTTAACAGCTACCAGACAGCACCCCTGGTCTCTAC
CCACTCAATGTCTCTGGCTCTCCCGACTCTAATCAAGAGTAGTCCTGTTTCCTGACATTACTAAAAGTCCTCTAGAAGAGAGTTCCCTACTGGT
TTAGACCAGCCTGGGAAAGGCAGAAGTGTTTAGTCCATGCGTATAAGATGTCAATGTGCAAAACTCAGTTGATTGGGTGTCTGTCTGCAGATCA
CTTCGGCCTCTGGGTCTCTGGCACCTCCTTCCTCCACTGGCCAGTCCCACTCACTGTGTGATCAAATGTGTCGGTATGTCCCACAATCTCAACC
TGTACATAGCTTTTTTTCTTCCATCTGCGTCCAAGTCACTGAAAACCTATCGCTTCTGTATGAAAGGCTGCCTTGACCTTGTAAATCAAAGGCG
TTCTCTGGAGGGAGCTCTCCCACTGCTGGGCTCCGTTCGGTATCATCTTTCTCAGGGTGACCTCATCTATTCAAGTGTGAAGGTTGTATTTGAA
ATGTCATTTACTTTCCCTAGTCAATAAATGAAGCCATGGATCTTTAGATCATCAGAGGCCTCCTTATTACCGAGAGTCTCTACGCTGTATGGGT
ATGTGTCTTTTGAGATCTGTGTTAGAGTTTAAAAGAATTCTGTCAGACTTCCGTTTGCCTCTCTGAATCAGAGCACGGGGTGGAATTCCTCTGT
GAGTGGAGGGTGCCCCCAAATGAGTCTGCCTTTATTAGTTTGTGTCCTTTGTTCAGAGCACCAGGGATTACTTTATGAAAGCACGCGTGACTCT
TATCTTCAAAGGTCTCCCCTGCATGGCAGACTCTACCTCACCAACCTGTGTTACTAATCCATTGCCATCCCAATTAGTTCAGATCAACGTCAGT
TACTTGGGCTGTGCAAAGGGGCCGCAAATGTAAGTGAGTCAGTCCCCCTCCTGTGGTTCTCCCACGAAAATGAGAGATTACAGGCGGGGAAACA
TAGAAGCGAGAACTGTCTGGTGCCTCAGTGTTTGAGAGTGAAGTGAAGACCTCAGGGAACCCTAAACAAGCCAATGCTTGAGTAGAAATACACG
ACCCCTGCTGCGGGGAAGTTTCTTGGCCCCGTCTCCCCACCCTATTGCTGATGGCAAGCATCTGACAAATTTAGGAGCCTCGGACACACAGTTG
GGTCTGACAACATTTGCTGGGTCCACGTGGAGGAGGAACCTTGTGTTTATGCCGCGTGATAAGCACCGAGCCTCCAAAAGGCACATCTATGGAA
AAGAGGCTGGAGTTTGGTAGGTCCATAGGATGGCTCATGATAATTCCTAGCCACCCATCCCACTGTCATCTTGAGGTCATCAGCAGAGGGATGG
TAAGGTATGTGAGGGTTACATCTTTCTAGGTGGACAACAAGACCTATGAGAATACACTTCTCTGATCTACCATTGTTTCTAGTACTGTGGGGAG
GCCATGGAAGATCAAATCCAAGTGCAGTGATTAATGTCCATTCCATGGACAGTCAGACAGGACAGTTCTTGTGAAAGATGTCTTAGAACAACCC
AGATAGGAACAGCCAGGAATCATGAAAGGCTGACCACCCCCCACCCCCAAGCAGGAAAACCCTACACTTATTTATTAGATTCTTCTGATGCAGA
GAGAGACCTGTGCATAGCCTGGCTAGAGGATGGGAGAGGGAGTTCCCCGCCCCCACCCCACAGCTCTCTGAGGTGCTTCTCTTGGGCTTTGCTT
TGGGGAATTGATTCTAAGAGGACAAGTCTGGTGTGTAGGAAAGGAAAACACACCAGTGTCCCAGGTTCAGGCCAGAGAGAACAGACATTTAAGA
CCAGACCAGAACTCTGAACCTACCCCTCCACACACACACACACACACACACACACACACACACAACGCACGAGGAGAAGAACATGGGGGCAGAC
ACTGACTGGATCTCTCTTGCAAACATTTACCAAAGGGGGCTAGGCATTTCACCTCTGCGGAATTTTTCTATTTCCCCTGTGTCAGAATGTTCTT
CTGTGAGTTGAGAGTGTGCAATGAAGGCTCTTAAAGAAAAAACAACCCTTTGACATGACTCACACCTCAGAAGACAAAGAACAATGAATCCCTG
GCTTGCAATTCAGCTTTCAGACCCTGTGTCCTGGCAGGCACAGCGCCACCCTGCCATGAACCTGCGTTCTGCAGAGCGGGTACGGACTCCCTCT
GGAGCTGTGGTGTTCAGGGAAGAGACGCTCCCTCATGCTGCGTCTCCGCGCTGGCACTTAGCCACCGGAACCACACACGCATCGTTGTGGGAAC
CACGGTTTGCACCCTGGAACTCTGGCTGGCTGGGACAAGTCCTATTCCTGGTAGCCTTCCGGTGTCTCTGCTATGTGGACCACCGGCAGTGAGG
ATAAAGAGTCTGTGCTGGACAAGCCCAAGCAGTCCTCACTCTGGACATCACTACCATTCCCTGAAAGGGTAGCAAGGGGAGACTCTCTTGCCTT
TTCTTACTACAACTGAACTGCTAATGGTCAGGCCAAGATACTATCTCACCCTAACAGTACCTCACAGGCTGATGCAATGACCCCTCCTCACAGG
AGGGGAGTATGCCCACTTGCCTCAACAGTAAGAGCCAAACTGGTGTCTCCTTTGCAACCTCTCAGACTGGAGAGTCATGCCCTTGCTCTCTTGT
TGCCTGAGCACTGTTGGTCCGGGAATAGGGAACACTGGAGCGGTACCCAGATACTAGAGATGCCTGGAGCCAGTACAAGCCACAGCACAACCGG
CATCATCTGTTCTGTTTTGGGGAATATTCTACAGGATATTGCATTGCATCGTCTTTTCTGTCCCCATGAATATCAATTTCTCTTAATACTCTGC
GGAAGAATGAACGCTGTGATCTCTGCTTAATACCCTGGTCAGAGGAACACAGGGGACAGGGCCTGAGTTCTGTCCATTAAGCCACCTTAGAAAT
TCCCAAGAAGTTCTAACATTTAACAAAGTGACTAGTACAATGCTAGACTACAAGGTTGAGCACGCACACGCCATGGGGCTGGCGTAGACGTGAC
CTCTGCTCTCCCACCAGGGTCCCGAGTGTAGGCTCAGTGACAGCCCTTGGCACAGAGATCTGGGAGCTCCACAGGTAGCGGTGACCCCCAAAGG
AAACAAAGCCACCTAGTGGCTTGATAGAGCCTGGATTAGGTCGGACTTCAATCTAGGCTGGGCCCTGATTGACATTGTACAGGTAATAATAGAT
CCATCATCACCACCCTCTGCAATTCCAAAGAAGAATAGCCACTCCTTTCTTGGTGCCTACCATCACCCTAAGGCATGTTAAGGACCCTCATAAA
GTCTCAGCTGTTCACTTAATGTGACCGCCCAAGGGCCAGCTCTTACTGCATCCAGTTTTCAAAAGACAGTTGGTGCTCCCCTGAAGACCCAGCA
GCAGCCCAGAGCAAGCTGGACAGAACAAGCCACCTTCTGCAGGCAGCCCGGACCAACATCTCCAACATCCCCTGACCTGAGCCACACGAATAGA
GCCTGCAGTGTGTGCTACTGTCAGTACATTCCACTCTGTAAGACACCCACAGGCATGAGGTCCTCCCGCTCGCTCGCAGCTTCCCACACGAGGT
GTCAACAGCTTCTGTATGAGTGACGGTCTTGTCCCTCCATACAAAGGGCTGAGCCCAAGCTCCCAAACTAAACTACCTGGGGCCTCGGACCCCT
GACACTGAATTTCTCCTCACCTTATTCAAGGGAGGAGTAAGGACGAATATGAGGCTGGAGAAGAACCACTGGGGGCTGGGGACAGCAAGTCATC
TTTACCCTCAGCCTTTCGAGACTCTATAGAGGAGAAAGCAATGGAGGAGAGGATGATTCAGCAGCCGCTCCTAGGATGGCACCTGCCACATGGT
GGCTGAGCCTGACTACAGGCCTAGAAAACATAAGTGGACGTCAGAGGTGCAGGCAGCTCGTGCAATGCGGTGAGGAGTCGGGGTGGGGCTTCTT
TAACAAAGTTCGGCGAAATAACTTATCTCCAGGAAAGGACACTCCACAGACCAGACGGGGCCTTTCGTGCCCTCAGAAGCACAGTTCTGTCTGG
ACGCCAAACGCCACTCTGTCTGGAGGAGAGACGGTGCCAACAGAGAATGAGAGGTGTTATGAAAACAGCGTGTTTTCTAGAAGCGGGTGACTTA
TCCCTGAACCCTTGCACAGGGAGGACTCTGCCTAAATACAGTGCCCTTTCCAGACCTGTCTCAGACTGATCTGGCTGAGAGGAGCGGCCTCCCT
CGTGGCGAGGGCTGACCTATTTCCCCTGGGAACTCTCTGGCAGCTCTAATGAGGAATACCACTTTGCATTTATAGAGAGCCTTTCATCTGTGGA
TCTCAAAGCTGTACCACAAACATTAATTAACTCTCACACCTGGGAGCCAGGTGAGTCTGCTTACCCCCCAACCCCATTTTTAAAAAATGAGCAA
ACAGAGATTTGCCACGAAAAGGATTCTGGGGCGACCCACCGGGGTTAGGAGTGTCCCTGATGTTGGGAATAACCUTTTCAGATTTGTACCATCC
TGACCACAAAGTCAGGAGGCCTCCCCGGGATGAGTGAGGAATTTGGCTACCGGAACAGGAGATGAAGCCACACAATTCCTTCTTCCCTTTCTCA
GGTGGCCTGTCACCTCCTGGGTCTATAGATGTCATTTAGAATGGGTCCCTCAGACCCCGAAGGCCTTTGAAACAGCCTTACCAGGCAGGTCTCC
ATCCTGGCTCACTCTGGATGCCTCCCTTCAAAGTAACCGTTGGAACAGTGACCGCAGCCGAGACGCACATGACTAACCAAAATGTCTGCAGCCA
GTGGGAGACAAATGCTTGGCAAATCCCAGGGCTCTTTCACAACCCTCTTTTCTTCCAGGATCCAGAACTGGTGGGAACTGACTCCTGTTATCAC
TGGTTCTCACTGGTGTGCTTAGGCGATGCTAATCCAGTGCTGGCTACCTGCGCAGTGGGGGTTGGGGGAACGACCTCTGGGGTGACTCCCGTCT
GTTCTGACTTCTGGAGCTGTTGTGGGTTTACTGCCCACCGCAGAAGCCAAAGGAAACACTGCTCAAAACCACCAGAGGCAAGCAGCCTTTCAGT
TGGGTCACCTGCCCAACACCAGGGCTGTGAAGCTGACATTGCAGAGTGGGGGGTGGGGGTGGGGNNNNNNNNNNNNNNGNNNNNNCCTGACTCA
CATCCTGTTCTGTTCTCTGAGGCATCCGAGAGGGCATTACACCAGCTACCCATGACTGAGCTGCACTGGGAGGGCGCCCTGAGGATGACTCTGC
CTTCTGCCTTGCACAAAGAGGGGGAGTCTTCTAAGCAAAAACCCAGAACAGGCCCCTTGGGTTTATCCATTCTCAGAGCAGATTTTGCGCGTTA
AGAAGCAAGTGGCCCTGCATTGCATGGCCCACTGTTTATTTTCAATGGATCGAGGGTGAACGGCTTGTTGTTTTAGAGATGCCCGCCAAATACT
CAAGGAACAGAGCCCCGACTACAGCAGAGCCCCAACGTCCTCACCCACAAAACCCAGGCTGTGAGGTCAGGTGCCAGGGCCACCAAAGGCTCAA
GTGAACTAGGCTGATGTCCCCGCGTGTCCTTTCCTTGGACAGGGAGGGAGGGCACAAGGCTGAATCGGGATGCTTTGAGTTTTCGAAACAGGAA
CATTTATTTACTCTTCTGATTGGAGTCAGCTTCATCGACCACTTTAGATACGGCTACTTCTCTTTGCCTCGGGTGTGGGGCATTCTTTCCCCCT
CCTCATCCCATACGCAGTAGTTACTGGCGTTCTGGCTTTCCTTTCAAATATGTTTTCCGAACCAGAAATTTCCCTTCCAAAGCTGCCTCTTCTC
CAGGCCCTAAATGTTGGTGTTTTCATTTTCATTAAGTGACTGGCAGTCGACATATCTTTTCAGATCTCTTATTTGGTGGCTATGGCATCTCCAG
ATAATCTCCAATTTTTGAAGATTTCTAAGTAATAGTTCTGTTACCGGTTTTTGTTGTTGTTGTTTTGTTTTGTTTTTCGGGGGGAGGGGAGAGT
GTTGTTTGGTTTTAGTTTAAGTCCTTGTGGCCTAACGAAATACTTTGTATGATTATGCCTTCAAACCCAAGCAGTCTTCTGTGGCCTCAAGTGT
AGTCTGCCTTAGCCAGTCATCTGTGTGCCTCAGAAGAAAGGAGCGGCCTACCCGTGTTCTGTAGGCCAAACTGATACTGTCCAGGTCAGCCGAG
TCTGAATTTCTGCTTGCATGGTCTATCGGTGACTGGAAGAGGGTGCTAAAGTCTCCTGCCGTAAGGATGGGTTTCTCTGCTTTTCCTTGTATTG
CAGTTAGTGAGACCCTTTGTTCACGGGACACCTGTGAAGGAAAATGTATATTTGGTTTTCCGTACTATCATAACGTAACTTATCTCTTATCCCT
GAAAAGCTCCATCTTCAATCGGCTTTGTAGAAAACTTGATACAGCAACTCAGGCTTTCCTTGGATTGGTGTTAGCACAGCTTCTCCACCCTTTT
ATGCTTGCCCTATCTGAATCTACATTTAAATGAGCCATTTGTATGCGTCAGGTAGTTAAGTTTTATTTGTAGCTTGTTCTGACAACCTCTGTGG
TAGATTTAGACAATTCACCTTTATAGATACAGTTGCATTATGATCTGCCATGGTCTAACTTTTATGCCTGTTGCACCTGGTTCTTAGTCCCACC
CCCGGCTTTCCTGCCTCCTCTGAATGGAATCAAACATTTTATGTGACTTCATTTTAGCTTCTTTATTGCCTATCGGGTAGCAAAATGATTTTTT
TTTTTAAATAGTTTTGTGGGAGCTAGAGAGCTGGGTCAGACATTAAAGCACTGAATGCTCATCCAGTGGACCTGGGTTTGATTCCTAGTAACCA
CTAGTGGCTAAAGGCGGTCTGTTAACTCCAATCCCAGGGAAATCCAACACACGATTAAGGTCTCCCTAGGCACTACAAGCATGAGCTACACAGA
TATGATGCAAGTAATACAACACTCATATGCATTAAACAATAAATAAATAAATAAATAAATAAATAAATATTTTAAAATTGCTTCAATAATTGCT
GTAGAGTTTAAAAACTAAGCCCACAATCAAATAATGTTATTCCTTAATTGTTATATGTTACTTATATTTAAACTTTTGTTTACATTTTTAAATT
TAGTGTCTCTCTCTGTGTATATGTGTCTGCCTCTCCCTCTCCTCTTCCTCCTCCCTCCCTCCCTCCCTCCCCTCCCCTTCTCTCTGTGTGTGTG
TATGTGTGTTTGTGCGTGTATGTGTCTGTTTCTCTCTCTTTGTGTGTGTGTATGTGTGCATGTGTGTATATGGTGTGTATATGTGTCTGTCTCT
CTGTGTGTACATGTCTGTCTGTCTGTCTCTCTTTTATGTATGTGTCTGCTGTCTCTCTTTGTGTATATATGTATATGATTCTGTCTCTCTCTAT
CTATATGTCTGTTTGTCTCTATGTCTGTGTATGTATGTATGTATGTATGTAGGTATGTATGTATGTATGTGTATGTGCCTGTCTCTGTGTGTGT
GCTGTCTGTCTGTCTATCTCTCTCTCTCTGTCTCTGTGTGTGTACATGTGTATGTGCCTGTCTGTGTGTGTGTGTGTGTGTGTGTGTGTGTGTG
TGTCCTGTGCTGTACATATGGAGGTCAAAGGACAACTCACAAGAAGTAGTCGTTTCCTTCCACTATGTGCGTCCTGAGGATCAAGCTCGTGTAT
TGGACAAGCGCCACTCTGCTGAGATGTATCACTTCTTTCTTATCTGTCATTATTGCCAATTATTTTCTTGATCTTTATGCTGTAACTGTCCAAC
AAATTGTGGCTGTTATCACTTCTAACAGTTAACTTTCAGATCCGTTATGAATAGAAAATGGGTTTTATTTTATTTGATTCACTTCTTCTGGGAT
GACCTCCTTTTCACCCAAGATCTAAGTTTCTGGTCCATTTCXFTTTCTTTCTGTCTGAGGCCCTTTAAACATGTCTGTTGGTGATCATTCATTT
CCATTTCATCAGAAGATGTACTGCTTTTCCCTTTGCATTGGAAGAATAGTTTTGCTGGGTATAAAACTCTGGGTTGGTTTCACTTTGTTCCCTT
CAGACCTTTGGTGTGAGTTTTCTGTGATCGTCCAGTTGGGTTCAATGATTACAAAGCTATAGTTGACAAAGGCATGTAGTTCCCCCAGTGTCTT
TGTTACTGCCTCCCTTGTTGTCTTTGAGTTTCCCATGAACTCTGCGTTAGTCTATGCTTAAAGCTCTTTGGTTGGCAGTCTACCATAAGATGGG
AAACCATGAGAACTCAGTTGAGTTCCTGGGCCACAAACATGTTTCTCCTGGACAGTACTATAGCTCTCCAGACTTGTATTCTCATTATCAGTCT
ATATTCAGCCTCCAGCAACTTGTGACATCTCCATGTTGTACTTCCATGAGCTTCTGTTTCTAATCAACAGACCTTGGCTTGGTTTTACATGCTT
GCCTGCCTCCCAGGACTTGCGTGGTGCCCTGCTTTCCTGCTAGAATTCTGTGGGAGATACAGGAAAGTCACAGATTTTCTGTTCTACTTTTTTC
CTTGTTCTTAGGACAAGAATGGTAACTCCAAAACTCTTTACATTTTAGTGCGAAAAAAGGAAGAAGCAGGCCACTCTCGTATGAATTATTTGGC
AGCGTCATGGTGGACTCTAAAGATGTTTTGATGTTGGTACCTTTAAGACATTCTTTTCCTGAGTGAAATATGTCATGGTGCTTTGTACTGTCTC
CCTACCTTTCCCCTTATCTTTGACCTCCATTTCAAATGGAAGGGAATGGGGTTCAGGGATGTAAAAGGAGCCCCTCTTATCTATTATTTGTAAT
GGCCTGGTCATGTAATCTCATCAAAACCATTTGTCCTGAAAACAAAAACAACCAGCATACAGAAGGCTCAACTTTTCTGCTGCTTTTAAAAACA
GAAGCATGGATTGATTAAAACACCGAATTCCTGCTTTCTCTGTGTCACGAAATTCCAGACTCCTTACTCATTCAGCATCTAATCCCCAGAGCCT
ACCTCTTCTCAAGATACTCAGCTCCAAGCACTCCAGTAGTACCTCAGTCCCACCCCAGTTCAAGTGTGTGTTGCCTTACCAGATAAGTCTCTTG
GCAGGACTGAATTTCCTTTAGCAATGCAATCATGGAAATCACTCAGATTAATTAACCATTTTTGATGGCCACATATTGTGACAGGTCTTTTTCC
TGTTGCTTGCTTGTTTCTTGATGTTACTCTTGCTAGTCAGAAGAATGTAAGTCTTGCCTGAAGCTAATTTATGGTGGAGGCAAGAGTCAACCCC
AAATCTGGTTGACTTACATCCTAATGCTTTCCTGCCCTGCTCCTCCCCTCTGCAGAACATAACCATCTCACAAAAGTCACTGCTGCCCTTGCCT
CTACCTTGGAAGCAGACATTTGCAAGTCCAAATTAGTCATGTGATTTAGCAGCCAGCCTCCATTCAACCTTTACATCATCCCGTGTCTGTAAGT
CTTACAAAGTAAAGACCATAAAACCATTTCCTAGTGAATCCCTACCACTAGGGCCTGGGTGAACCAAAACTATTTGTGGGAACATGAATGAGGG
AACAAGTAAATAATTTCCCCAGCCTATGAATATACAAGTGTTTGAATGAGTGAATGGGTGAATGAATGCATGCATGAATGAATGCATGAATGAA
TGAATGAATGAATGAATGAAGCAACTCTTAGTGTGCTGACATGTGCATGAGGAAGGAACCTTTCCAAGCATCACAAAGTTAGAAGCCTTTCCCT
GATGAGCCAAGGCAGGGGCCATGTGGCTCCTAGTCACCACTATCACTGGCCACATTTCCTGTGCCTGGCACACGGTATATGTTTAACCAACTCT
TGTTCACTTGGATGAATTGGCTTACCAGAGGCAACTCCTTCAAGACTAGTACACCTGCACTTTGCCGAATGCCTAACGGTGACTCTCTCAGCCT
GTGGCCTGTTCTGGATAGCTCCCAGTTTAATCCCTCCTTGTGGCATTTCCCAGAAGGCACACAGTTACGATTTTAAGTACCTACACCTCGCCTC
CCATCCCCTACACGACTCTTCCCTGACTCTAGCAACATATAGCAAAGATGAGTTGGACTAATTTGAACGGGGAGCCTCCCCTGTTGCCACTGGA
TGGCTTTAGAGATCATCTCTCTGCCGAGAGAGAAGTATGGACGTTTGGTCTAGGGCAACTGGCCCTCTCAGCAAACCGATGGGCCTAGAGCTCC
TTTTTCTGATAGGCAATCAACAATATGGTTGTTATGATTCTAACTTTCCTGTGTTCCTAGCCCCACCTCCCCTCCCATCCTAACAACGATAGAA
CCTCTCCCACAAACGCAGAATGCACTCTATTTCCCTGCCTCTTGTGGTTTCTTTTTGTTTTTAATAGAGCATTAAAAAGCTGAAAACAACCCAA
ATTACAAGAAGAGGCTCACCACCACCACCTACTGGCCCACCCCTGGCAAAGGACCCAAGTAGGTTCCTGGTGCTGGCGGAAATGATGGTTGATG
GGCCGTGGCGTCAGTGACCCACTCAATACTGTGGTGGGAAGTAAGATGATGCCAAATCTATAACCTGTGTTTAAAAAAAAAAAAAAGAAGAAGG
CGCAGATTCTGAGCCTGAATCATAAAGGCCGTTCCACCGAAGCGAGGCTGTGAAATATTACGCAACGTTCGCACGGTTTAATTACGAGTTTAGA
AAGCCCTAGCCTGAGTTTTTCACTACAGTAAAACATGACAGAGCATGAACCCTGGCACCACACTTTATGCTTAGTGTGGTTTTAGACACAGGGC
TGGGGTGCTAGGCTGTCTACACAACAAGGCATGGATTACAATACCGCAATTCACACCCCGGGGGCCTTCATGACAATTACAGAACCTCCTTTGT
TTGCTTTTTAAGTGATTAAAATATTTGAATAGTATATGTCCATTTGCTAAGTGTGTATATTGAAAGCACTGGCATGTCTTGTGGAAAACATCTG
AGAGTGTGAGCTTTGCGCTCCCCGCACACACACAATGGAGCAAGATCCTTACACTGATGTGGGATGCAGGACGGTGTTGTTTCTACACACCTCC
GGGCCTCAGGAACAGTCGGCTGTAAAACCGCACAAGGCTCCACCTGCATCCCACCACTTGTCTGATGAGTTTAGTGTGTGCCAGCTCCCTTGTC
TGTGCCGTCCCTTCAGACAAACTCTCCACCATTGGGAGGATGGCAGGAGATCTCTTCACCGGGAGATTCTAAGTTAAAATGTTGGCCCAGGAAC
AAGCAGGTCTGTGGTCCTTACATTGTCGGGTTTGTGGTTATCGTTGTGTTCTATTTTCCCGGACATTAAAACCAAACTGAGTGAGACAAAGGAA
CAAGGCTTATTGAGCCCCGAAGTCAAGTGCACAAGAGACATTTGCTTCAACTCCCGGCTCTGTCCCTGCTCTTTCTTGGTGACAATCTATAAAA
TACATTCTCAAAGTTTTGCCCTTCAAAAACACCACTGGCCCCAAGAGTCCATGCTACCTCGTTTGGTCTGTTGTGAAGCAGCCTCATTAGTGTG
CCTGTGTTTTGGTCGTTCACCATCTTTGCACTGTCTGTCTGTCTGTATCTCTCTCTCTCTCTCTAGTCTCTCTCTCTCTACTCTCTCTCTCTCT
AGTCTCTCTCTCTCCCTCTCTCTCTCTCTCTCTCTCTGTGTACGGGGGAGAGTTATCTTTTTACTATCGCTCTCGCTATTGTTTCTATGGCATT
TGAGGAATGGCATTTGCTGAAGTAGAAAACATACACATGCCCGTGGACATTTCCTCAGGGTCCCCCACGCTCCAGACCCCCTTACATCCTTTGT
GCTTCCTGAACAAGGTCGCCATCTGAGCCGATACAATGTTTCTGGTGATGATAACTCTAATTGCTGGCCACGATGAATGTGTTATCCTGAATGT
GTCACTTAGAGTGATCCAGTACTACCAGAGTCCATTCCCAACAGTATTAGTGTGAAAAAAAAAATGTATATATATGCTATATATATTATAGATA
GGTAGATAGATAGATAGATAGATAGATAGATAGATAGATAGATAGATGGAAGGAAGAGTTAGCAAATAAAACTCCCCCTAAATCCATGAACTGT
ACTTCAGTATCTTTAATGGGCCTTCATACAACAGACTCATCAAATACTTGGGCTCTAGTGGTCTCATTAGACACAAGTGAACAAGCTGTGTAAA
CACATGTATAATCATTTAAATAATGGTTAATAGCTATCATGATGAGAACTTTTCGTCTTAAAACCCCTGCCCCACCCCATCCATGACCAACATC
CTTGTCTCCCTGCAGATGCCAGGCAGATCCAGCCATCCCCACCGTGGTCCTATGACCAGTCCTACCAGTACCTGGGATCCATCACCTCTTCCTC
TGTCCACCCAGCGACACCCATTTCACCCGGCCGTGCCAGCGGCATGACCAGCCTCTCTGCAGAACTTTCCAGTCGACTCTCAAGTAAGCCCTGT
GAAAACACACCTGCAGCGGGGCTCGAGCGGAGCATTCGGAGGACCGCGGGAGACTCGGGGAGACACAGAAAGACACAGGAAAGGCGGGACATGG
CTAATGGACCAGAAAAGGGTTCAAAGACCAAATTTCCTGCCTCTCTGCGTGTCCAGTGCCTGAGCACTGATCTTTCTTAACATGCTAAGAGATG
CCAGATGAGGAGGCAGCAATGCCTTAGTCCATCCCTTTGGGATTTGGGGTTTGCTCATATCTGGTGAGAAACGTTGGTGGCCAATGGTTACTAT
TCTGATAAGTGGAAGTGGCCTAAAGATTTTTGTACCTTTGGCCAAGAAATTAACATCCCAACTGAATTCTAGACCGAGGCTATTCTTTCCACAA
GTGGCCAGTTTTTATGGCTCCTGCATACACCACAGTGGGGTACATACTGGAATAGGACACAAATACGCCCCAAGATAAACATTCCCAGCTAAGA
GCTGTTCAGACTGAGGCTAGGAACCAGGTAGAAAGCTCAGGTGTCATGGTTAGCATAATTGTTGTTAATACGAGCTCATTACATATTAGTCATT
TAACCTATGAGCCCTTTGGGCTTGGCACACTCACCTTCGCTCCTGAGCAGCGAAATCAGAGGTACTGGGGGAAAAAAATTCCTTTGTTGAAGGC
AAAAGAAGAAACTTACTGTTTGGGGCTTTGAAATTGGAGCCGAAGCAAACTGTGAAATACTTCAGAGAGCTTCGTCCTTTAGAGGCCCGTGAAT
GCACTCCCATGTGTGCCGGGGGAGGGGCAGGCTTTGCTTTCGGACTCTTGAAGGCAGATTAGAATAGATGAGGGGGCAGGCAGAGGAGTTGGGG
CTGCTGCTTTAAATGTTCTCAAAGACTACATTTCCAGACAGCCACGATTGCTTAAGACTCCTCCAGCGGGTCAGCTGCTCCCTCACAATCACCC
TCAATTCACCCCGCCTTTCCCCAGCAACCATACTGACATTTGGGCTGTATCATCTTTTGTTGTGGGAACAGGGGACTGGCCTATGTGCCAAACA
ATAGATAGATGACCCTTGACCTCCAGATGTCAGTAGTAAATGGCCCTGTCTGTCCATCAGAAATATCTCCAAGGCTGGGGACCAGCTCAGTGGG
CAAAGCCCTTATCTTGCAAACATGAGGACCAGGTATTAAGGCAAAGTGCAGTGGCACAGGCTGCTAGTACCATCACTAGGACATGCAGACATGT
CAGTATCCACACTAGTTGAATTAGAAACCTTCACGCTTGGGAGAGACCCTGCCTCAAAAAGCCAAGTTAGATGGCTGCTGAGGAACACACACAC
GCACACGCATGAGTCTGCACTCGAGGGTACTCATCAATGAACACTCAGAATGCTCCCACTCACCCCTTACAAACACAAACCCACAGAAAATGTT
GCTGGACATTGTCACTTGTCTCAGCTGGGGGCATTGAGAACTTACTAGCTTCAACTAGGCTTGGTGCTGGACTGAAATGCCAAAGCCAGNNNNN
NNNNNNNNNNNNNAGAGAGAGAGAGAGAGAGAGAGAGAGAGAGAGAGTTTGCCACGACCCAAAAGTGACCCTCTGCTGCCCAGTAGGGAAGACC
AGAGAATGACAAACAACTGGCATAGAGTGAGCCTCAACTTGGCAAAACTCCCTCTAGAAACCAAGCCCCGAGCACAGGCCTCAAAAGCCTGTAA
TGTGTTCTCATAAACCTGGGCCAGAGAGGGTAGGTAGGGTCCCTGAAAGGAAGAGGCTGTCAGGCCCACAGCTTGTCAGCCCAACTTGACCCCT
CTGTGGCTGATGTGCCTTCTAATCCCACCAGTGACAGCTTCAAGTTCTGGGCTTTCAGCCTCCCCCAGCCCGACCTGCCTAGCTGCTCAGCACA
CACACATGCGTTCTCAGCAGACGGGCCCTGTCTGTCTCTGTCCCTTGCAGACAGACAGACTCCACACCTTGTCTGAAAGGAGCTGCCACGTGAA
GGTTTATCTTTCCTCCTCATTTCTCTTCTTCCTTTATTTTACCCTCTTCCTTTTCTTTTGGTTAATTAATGTCTAGCTGCCAACCTGGGCGACA
GACAGCGCATACTAATCTGAGTCACGCAGGAGACCCTTTTAAGGCGGTCATTATCTGCTCAGGTTCTTTAATCCTTTGGGGGCAGTGGGAGGGG
CCTGGGCTGGGACCTCTTTCATCCACATCAAGCTTTAGAGCCAACACTCTGCGCTCTGTCAAGGTAGAGACTTAGCACCATAGAGGGAGAGACA
CTGCCAGTGAAAGTGGCTGAACCTTCTAATCCTCACACTTCCTACTTTTAAAGTCTCCCCATGAATGGGAGAGGGGGCAGTTGTCACCTGAATT
GAGTGGGTGGGGGCGGCGTGCACCGGACTAGCCAAAAGAATAGAGGAGCCGTAGTTGGGTGATGTATAAATTCTGTGTGACTGCTGATGTGTAA
GGAAAGAGGTTAGACAGGATTTAAAAATGAAAACACGGCGAGCTGGTGAGGTAGCTCAGTGGTTAGGAACCTTTGTTGCTCTTCCCAGGCCCCC
CACATTAGCCCGCTCACAGCTGCCCATAACTCCAACTCGAGGGCATCTCTCTCCTTCCTCCAGTGTCTGCAAGCACACACACACACACACACAC
ACACACACACACACACACACACACACATGCGCGCGAGCACCTAACTAAAAATAAAATAGCTGTAAATGAGAACACGTATTCGAATAGAGCACTT
GAATTTGAACATATCTAAAAGGCCCATGTCTTTTTTATTACAGAGCGTATACAAAGCGAGACAGGGAGGGATGGAAGCAGAAGGGGAGGAGGGA
GAGAGAACCTGACCTCTCGTAGAAAGACGCCACACTATCTCAGATCTTCCACATACTCTCCCCCCAGCAGCTGAGACTGTAACATTACTCCTGC
GCTTATGCCCATGACAAATCACGGACTCACTCGQGATTCCGGTAACGTGGTACCATTACCACATTACCATGTAAGAACTGCGACAGACTGGCAG
AGCATGTTCAGACACGGCTCTGAAACGTGGTGACCTCTCCTTCATTTTTTTCCAGTGGATTCACCTTTTTTGTCTCAGGACAAATGAAGCAAGA
GGGATAATGGQCAGAGTCACTTGTTTGTGTCCAGTGTATTGCATCAGATGACAACACGCCGATTGTGTGTGTGCCTAATGCTCTCCCTCCTGCC
TCGGCTTCTCCCTAGACTGTATAAATCTAACTGGAAAAAAAAAATGGAGTAGAGCTTCCTGTTAACTCTCAAGCATGTCATGGCTCTCTGTAAG
CAAAACAAGTGACACAGAGTTTCCTCATAGAGGTCCCCGGTGAGGGCGCAGAGATGAAC
MOUSE SEQUENCE—mRNA
CTCATTCATAGAGCCAGCGGGCCCGGGCAGGACGGGCGCCCCGCGGCCGGACCCAGCCAGGGCACCACGCTGCCCGGCCCCGCGGCTGGCACTT
CCATCCTGAGCTCCCCGAGACGCAAGAAAGTCACCCTTTGCGGCTCTTTCTAGATCTGCGTTGGACCTTCTTGTTTTCCTTTCCTTTCCTTTTT
TTTTTTTTTTAATTTTTATTTTTATTTTCCCTTTCTTACTTTTGAATGAACCGGCTTCTAGGCTTTGGATGTTTCAACTTCTAGGCTGTCAACT
TTTCTCCGATTGTTTCTTTTGACAACTGCGGGAGAAAGTGTTCCGGAGTTCCACGCCAGCGGTGAAGTTGCGTCTGCCTGGCAGGGTGCGTGGG
AGTGAGCGTGTGTAACTCGAGCCTACTGGTCTACGGTGCCTCCTCCCAGGCCCGCTCCACCTGCTGCGGTTACACGGTGCTCGCTCGTGGGTAT
TTGTGCGCCCCAGCAGAAAACCAGCCACCGCCGGGCGACGTTGGAGGAAGATCATCTTGCCAGACTCTGGGCTGACTCACTCAACCAATGTAGA
CAGTGGCTGACTTCCCAAGAGTGCGAGTCTGCCTGTGTGTGTGACCCAACTGCGGCTCAACTCCCACCAAACCACAGGATCAGCCACAAACTTA
ACCAGCGTTCCCAAACCAGAGTCCTCAGCTGTGGGAAGCTCTACCCTGAGTGTCATCGAGTTTGACTTTTTTTTTTTTAAGATTAGCTACAGAT
CTTTGTAAAGCACTGACCATTTATTTGGCCAGAATTTATTGAGTAATGACAAGTGATCCTATCCAGCCTTCCAACTACTGAAGCTGATTTTCAA
GGCTACTTAAAAAAAAAAAAACTGCAGCAAACATTAATGGATTTCTGTTGTGTTTAAATTCTCTACAGATTGTATTGTAAATATTTTATGAAGT
AGATCATATGTATATATTTATATATACGAGCACATACATTAGTAGCACAATCTTTTAAAGTTACGGCTCTTGCTTTTGAGAAACGAAGTGAGTT
TTTCATGGTAAGAGGGGCCCTCTGTATGGAAGACACTCCTAAGTTTTGTATTTTGTTGAGACTCTAAACAAGACTGACCCGCAAGAAAGAAAAA
CAAACTGACAGGCAACTAACTGGTGGAACTTCCAAATCTAGTTTTTGCTGGTCATTTTTTGGTTGTTGTTGTTCTTCTGCGCATAAATATTTTA
GGACGCGTATGGGAATTTTGCTCCGGGACCGTTTGTAATAGCCAAAGACTGAACTTCAACTCTCAAAGCGAGGCTCTGTTGGGCATTTGACTTT
GAATTCTGGTTGCCCACTTTTTAACGCACTAAGCGGCCAGTTGCTAACCCTGCTTGGGTGTGAGGCCGATCCGTGTAACTAGATCTCAGTCCGG
GACTGATGGTAATTTAGTCTCCTACCCCCACAACCCTCCGGTAGTAATAAAGGCTTCTGAACTTGTATGTTGGTCTCCCGGGAGCAGCTTGCAG
AAGATCCGAGCCCCTGTCGCCGTCTAGTAGGAGCTGTTTTCAGGGTCCTTACTCAATCGGCTTGTTGTGATGCGTATCCCCGTAGATGCCAGCA
CGAGCCGCCGCTTCACGCCGCCTTCCACCGCGCTGAGCCCCGGCAAGATGAGCGAGGCGCTGCCGCTGGGCGCCCCGGATGGCCGCCCGGCCCT
GGCCAGCAAGCTGAGGAGCGGCGACCGCAGCATGGTGGAGGTACTAGCTGACCACCCTGGCGAGCTAGTCCGCACCGACAGCCCCAACTTCCTC
TGCTCCCTCCTACCCACTCACTGGCGCTGCAACAACACCCTCCCCATCGCTTTCAAGGTCGTCCCACTGGGGGACGTCCCGGATGGCACTCTGG
TCACCGTCATGGCAGGCAACGATGAAAACTACTCGGCAGAACTGAGAAATGCTACCGCGGCCATGAAGAACCAGGTAGCGAGATTCAACGACCT
CAGGTTTGTCGGGCGGAGCCGTACAGGCAAGAGCTTCACTCTGACCATCACCGTCTTTACAAATCCGCCACAAGTTGCCACCTACCATAGAGCC
ATCAAAATCACAGTGGACGGCCCCCGAGAACCCCGAAATGCCAGGCAGATCCAGCCATCCCCACCGTGGTCCTATGACCAGTCCTACCAGTACC
TGGGATCCATCACCTCTTCCTCTGTCCACCCAGCGACACCCATTTCACCCGGCCGTGCCAGCGGCATGACCAGCCTCTCTGCAGAACTTTCCAG
TCGACTCTCAACGGCTCCGGACCTGACCGCCTTCGGCGACCCACGCCAGTTCCCTACTCTGCCGTCCATCTCCGACCCGCGCATGCACTACCCA
GGCGCCTTCACCTACTCGCCGCCCGTCACGTCGGGCATCGGCATCGGCATGTCAGCCATCAGCTCGGCCTCTCGCTACCACACCTACCTGCCGC
CGCCCTACCCCGCCTCATCACAGGCGCAGGCCGGGCCCTTCCAGACCGGCTCGCCCTCCTACCATCTATACTACGGCGCCTCGGCCGGTTCCTA
CCAGTTCTCCATGGTGGGCGGAGAGAGATCGCCCCCCCGCATCCTGCCGCCCTGCACCAACGCATCCACCGGCGCCGCGCTGCTCAACCCCAGC
CTCCCCAGCCAGAGCGACGTGGTGGAGACCGAGGGCAGCCATAGCAACTCGCCCACCAACATGCCCCCCGCGCGCCTGGAGGAGGCCGTGTGGC
GGCCCTACTGAGCTGAGCGCCATCGCCATCGAGGGACTGGGCCTGCCGTCCATGCACAGACCCCGCCAGGAGGGCCCTTGGAGGCCACCAGGAA
GAATCCCGGAGGGAAACTGTGAATGCTTCTGATTTAGCAATGCTGTGAATAAAAGAAAGATTTTATACCCTTGACTTCACTTTTTAACCACGTT
GTTTATTCCAAAGAGTGTGGAATGTTTTCGGTTCGGGGTGGGGAAGACGCAGCCCATCCTGTTTGGCATCTATTTCTTATTTCGGAGTTTTCTT
TTCCGCACCTTATCGATTGCAAAAATGCCTGTTTGCATCTGGGTGGTCATTTATTTTTAAGTGTGTATAGATTTGAGCTTGCTTTTTTTTCTTC
CTTTGACCAACTCAAAGAAATAAAATTCCCTTCTCTGTAAGGTTTATTTAACTTTTAGACTTTCATGTAGCTTTGGGGTTTTATTTGTGTTTGG
TTTTTGTTTTTGTTTTTATTTTTAAAGAGACAGCTACAGCTTTGGGTCATTTTTTAACTACTGTATTTCCACAAAGAAATCCCTAGATATTTAT
GTATCTTGATGTTTGAACATTTACATATGTGTTGATACTTTTTTAATTATTTAAATGTACTTATATTAAGAAAGATATCAAGTACTACATTTTT
CTTTATAATAGCCAAAGTTAAATATTATTGCGTTGAAGATGTCTGGAAAAAAAAGAGATCGCTTGGTTAACTAGAAATATTGTTTACATTAAAC
TCCCTTTATGTTATTCAAACAAGTTGGTAGGTAACGCAGCAATGTTTTTAATTGGATTGTAGACACTGAGGGTCACTCCAAGGTCAGAAGTACA
AAATTTTCTGCTAGGCTCAACAAATAGTCTCATACCTGGCTCCTTCCCTTCAAAAAGAGAGGCAAACTCTGTCCTGAAAGGGTTCAGAGAGGTG
CCAAGGATTTGCTCTGAAGAGGATTTCATTTTGGCCTGGAGATATACTTGCCCCAAGGCCTCCTCATTCTGGCATGCTTTATCACAGAGCTCAA
CCAAGTAAGCTGTTGGTCAGGGGTTTACTTACATAGTATTTACATAGACCCAAACCACTGAATGTGATTTTTAAATTGCCTTCCATTAATAGTA
CCCGTTCATTGATGAAAACCAAAACTTGAGGCTGTACCCCAAAGATCCAAATAGAAGAGTTAAGACCAGGTGTCTTTGAGGCCTAAAGGCTGAG
TTTTAAGAGAGTGTACCCCAAAAGTCTGAAGGAGCCGGTTTCCTTCTCCCAGTCTTAGTGGAATCAGTCATGGGAGGCAGATGCCACGCCCACC
TGTGCAGGATGCTCCTCAGAAGCTGCCCCTTCACCAGCATCTTCTCCCACCAGGCCGAGCCCCTGACCTTTGGGGTGCATCAGTGTGATAGATC
CTGGTCTCTGCAGTCCGCCATGGCTACGGTTCAGATGTGCATCGTGTCACTGTAAATGTAATGGTACTGTTGTTACAGTGGAGGACTTGGTCAA
AATCCAGTTGTTCTACAACGTATGAAGCCTAACCGCTGGTTCTGACATACATGTGCTCAAAATGA
MOUSE SEQUENCE—CODING
ATGCGTATCCCCGTAGATGCCAGCACGACCCGCCGCTTCACGCCGCCTTCCACCGCGCTGAGCCCCGGCAAGATGAGCGAGGCGCTGCCGCTGG
GCGCCCCGGATGGCGGCCCGGCCCTGGCCAGCAAGCTGAGGAGCGGCGACCGCAGCATGGTGGAGGTACTAGCTGACCACCCTGGCGAGCTAGT
GCGCACCGACAGCCCCAACTTCCTCTGCTCCGTGCTACCCACTCACTGGCGCTGCAACAAGACCCTGCCCATCGCTTTCAAGGTGGTGGCACTG
GGGGACGTCCCGGATGGCACTCTGGTCACCGTCATGGCAGGCAACGATGAAAACTACTCGGCAGAACTGAGAAATGCTACCGCGGCCATGAAGA
ACCAGGTAGCGAGATTCAACGACCTCAGGTTTGTCGGGCGGAGCGGTAGAGGCAAGAGCTTCACTCTGACCATCACCGTCTTTACAAATCCGCC
ACAAGTTGCCACCTACCATAGAGCCATCAAAATCACAGTGGACGGCCCCCGAGAACCCCGAAATGCCAGGCAGATCCAGCCATCCCCACCGTGG
TCCTATGACCAGTCCTACCAGTACCTGGGATCCATCACCTCTTCCTCTGTCCACCCAGCGACACCCATTTCACCCGGCCGTCCCAGCGGCATGA
CCAGCCTCTCTGCAGAACTTTCCAGTCGACTCTCAACGGCTCCGGACCTGACCGCCTTCGGCGACCCACGCCAGTTCCCTACTCTGCCGTCCAT
CTCCGACCCGCGCATGCACTACCCAGGCGCCTTCACCTACTCGCCGCCCGTCACGTCGGGCATCGGCATCGGCATGTCAGCCATGAGCTCGGCC
TCTCGCTACCACACCTACCTGCCGCCGCCCTACCCCGGCTCATCACAGGCGCAGGCCGGGCCCTTCCAGACCGGCTCCCCCTCCTACCATCTAT
ACTACGGCGCCTCCGCCGGTTCCTACCAGTTCTCCATGGTGGGCGGAGAGAGATCGCCCCCGCGCATCCTGCCGCCCTGCACCAACGCATCCAC
CGGCGCCGCCCTGCTCAACCCCAGCCTCCCCAGCCACAGCGACGTGGTGGAGACCGACCCCAGCCATAGCAACTCGCCCACCAACATGCCCCCC
GCGCGCCTGGAGCAGGCCGTGTGGCGGCCCTACTCA
HUMAN SEQUENCE—GENOMIC
AATCCACTGGTGCCTTTGTGTGGGAATGAGAGTGAATCTAGAGAGATGAAGACAATTATCTGGTCGGCTGTTAGGAGGCTCAATAAAAAACACC
CCTGCTCTCCGGTGATCCACAATCAACAGTGAGATGACAAAGGAGTCAAGCAGATGGAGATAAAAATACCAGCTTGGTCACTGATAGAACTTTT
GGAGAGCATGGCTTAGGTATGTGGCTTCCTGCTACTGAGCTCCAGAAATAGGGAGACTCACTCACCAATACCCAAGCAGTGTCTCCCCAAAAGA
ATAAGGAGAGGGAAAGAGCATGCCCAGGGTACTTGTTTTCTTATTGCTGTAAAACGAGCAAATTGCCAAGCTTAGCACCTTAAACAAATTTAGC
CCACAGTTCTGCAGGTCGGAAATCTGGTGGTGCTGTACTAGATTCTCTGCTCACAGCTTCATAAGGCCAAAAATCCAGGGGTTGGATAACCTGA
GCCCTTACTTGAAGGCTTAGGGAGATAATTCACCTCCAAGCTCATGCAGGTAGTTGGCAGAATGCAATTCCATGGGGCTGTAGCATAGTGGCCC
TCGTTTCCTTGCTGGCTGTCAATCAGGGGTCACCCTCGGCATCTAGAGACTGCTCTCTAGTTCTTGCAAGTGCCTGCTCTGTCTTCTAGCTACA
ATGCTGACTTCACTTCTGCCCCAGCCTGAGAAAACACTGTGTTTGTAATGGTCTCCTGTGATTAGATTAGGGCTACCAGGAAAATCTCTCTGTT
GCATGAGTCAAAGCCAACTGATTAGTAACCTTAATTACATATGCAAAAAAAAATCTCTTTTTTTCCATGTAACATAACCAGAGCATGACAACTC
ATCATATTCCCAGCCCCAGGGATTAGGGTGGAAAGTTTGAGGGGTTCATTTTATGCTTCTGCCTTCTACAACCAGTTTCTGCTTCCAACGCTAC
TAACTAGGTAATTCAATCTTTTATGGTGGAGGAGGAATGAGGGTGTAAAAAGAGGTCAAGAGTTTTACACTAAGGAATGTTGTTCCACATGGAA
ACCTGAAGCCAGGGAAGGGGTGGTTCCACCACTTCCTCTCACCCGCCCCACCACCCAATATATTTAAATAGCTATAACCCAAAATATATTATAA
TTCAAGTCACATAGGAGATGTGGAAATGATGATAAAGCATGTGATTGGTCTTTAAGAGGCAATTTCACCTGAGGCAGAAGGATCTGCCCCCCTC
CAAGATGAGGACAGGAAGGGTAGCTCTTAATCCTGCAGAACTGTGCTAAAGACCTTGCATTGAATTCCAGATGCCCAGGAGAACACAGCAGAAC
TATGGTGCAGGAGACTAATCTGGAAGTACTGTATACAATTAGCAGGAACCCCCTTTTTCAGAGATCTTTGTAAGAAATCTTCAGAGAGGTAATC
AGAACTTGAACCAGAATGATGTCAATAGGAATTGAAAGGTGGGCGCCGAATTGTTATCAACCAAAGAAATCAAAAAGAGATCTTGGCAACAGAC
TGGAAATCAGCGCAAAGATCAATCCATGGATCCAGTCTCGAACTGGGAGAATGATGGTCCACTGGGGAAAACAAGAGGAAGACCTGGGTTGAAG
TGGAAACTGATGAATTTTATTTTCAGTAAAATACACATGGCAAACACTAATTTTCTCAGGTTGCTTCCATCTTACACACATGCACACATATATA
TACACAAACACCTCTCAACACTGGTCTTTCTCTCCTCCTGCTACCTCACCAGTTTCCCTCCCTCCTCCAACAAATTTCATTCTCTCCTTCCCTA
CATCCCATTCGCTTTCTACTCTCTGCTCCATTTCTGCTGCTGCCACTCAACTGAAGCTCCTTTGGCAAAGGTTACATGGCACTCTCTGTAGACA
AATCCAGTGGAATATTTTCATATTTTCAGTCCTTCTTTTCATGGCCCCTTTGTGGCCTTTGGGCCATGGTTTTCCTCCAAAGCTGGCATTTTCC
TTTATTCTTTTCTTTTCTTTTTATGAGACAGAGTCTCATCCTGTCTCCTAGGCTGGAGTGCAATGGCACAATCTTGGCTCACTGCAACCTCCGC
CTCCTGGGTTCTAGTGATTCTCCTGCCTCAGCCTCCTGAATAGCTGGGATTACAGGTGCCCACCACCATGTCTGGCTAATTTTTGTATTTTTAG
TAGAGACAGGGTTTTACCATGTTGGTCAGGCTGGTCTCGAACTCCTGACCTTAGGTGATCCACCTGCCTTGGCCTCCCAAAGTGCTGGGATTAC
AGGCGTTAGCCACCATGCCCGGCTGCATTTTCCTTTACTCTTATTACTTATTCTCTCCTCTTTCTTTTCCTAGCTCCATCTCCTTGGTTGCTCC
CTCTTCTGCTCACCCTGGAATGTTGATAATCCCAGAACCTGAGAATGGTCTCTTCTCACTGGAAACAGTCTCTGAAACTAGCATAGAGTTTGAT
TGTACCCTAGATACAATCTGAAACTACAATAGATATTCTAAGGATGTTCAGCTCATTATTTCTACATGAAACCTCTCCCCAGAATTCCTGTTTT
CCCCACCAGCACCTCCTATTCTGTTCTGCGCATCCAAAGCTCAGAGAGACATCACGATGTCTCTCTGTAAACCCGCTGTTTCTGGTCTTCTCTA
CTACTATTAAAGGACAGATGCTGGGGAGACTCCTCCCCCTCCCTCACCTCAATCCCCTCTTCCATCTCCATTGCTTAATCCAGATCCTCATGAC
CCCTTGTCTGACAACTGCTATAGCTCCCCACTCCTCATCTCTACTCCCTCCAACTCACCGAGCTGTTGTTGACAGACTTATTTTTCTAATATAT
ATATTAATTTTGTTATTTCCCTGTTTGGCTTTGACAGATCAATTTTCCCGCATGTTGAAGTTCACATTTCCTCAGGTTGCTTCTGCTTCCAATG
ACCTATCTACGTCTATGTATTTTTGAACTGCTGCACTCCCTCCCCCACTCCCCAACCTGGTCTCAAACCTATGCCCCAACTGTACTGGAACTGA
CACACTGATGTGTTTCATAAACTCACGCCCTTATTCATGATGCTTATTCAGCCCAGAGCACCATTTCCCCACCCCACCGTCACCTCCCTAAACC
CCTCCTCTAGCTCTTTGAACCACCTAAAAATCTACCCAACCTCCAAAAGTCAAGTCAAAAATCACCTCTGCTAGGAAGGAAGTCTTTCCTGAGC
CCACCAGGGGCTGTTGGCCCCTCTTCCTCTTATATTCCCTCCCACCAGTTCCTGGGACCCTGGACATGTGTCCACCAACAGCCATGACACTTCT
TTACTCTCATCTGTTTGGTGTTTGTCATCAGTGAGCCTAGCACCTTGCCTGGGACAGAGGAAGCATTCAAGGAATGCTGAAGGCAGGTGAATCA
AATACCTTGTATCTAGGAAAGTCCTAAAGATGCCCTTTTAAACTAGTGGAGGTGGGAAAAGACTAAAACGCCATTTTATATTATTATCAATATA
AAAGCTTCTCAGCCAAATGGACCTTGGCTTTCTCCTCAAACTCTGTGCATCACAGAAATGACATTAAAATCTGACTCCTAATGATATGAGGTTT
GCATGGTGAAGAATTTCCAAGATATTTTCTGATCTAGACCCTGAGACGGGGGGGATAAAAGTGAAAGATGAGATCAGAGTTAATTTTTTAGAAC
TCTACCAAGGATAGCCACAAAAATAATCATGATCCAAAAGGAACATAGCTTACCATGCATGTGGACCTATATGTAGATATGAATATGTGTGTGT
GTGTGTGTGTGTGTGTGTGTGTGTGTGTGTGTGTGTGTGTTTCTATGTAGGTCAAGAGTGATGTGAATTTCGCCAAGTTACCTGAACTCTCCAA
GGGTGAGGTTCCTTATCTGTAAAATGGGGGTAGCAATGATGTTCTTGTGAGGATTAAATCAGGCAAAGTATATAAAAGCACTTCACCCATTGCC
TGGCATATAATTACATTCAATGGGGGATGTAGGGAAGAGAGAGACAGAGAGAGAGCATGCAAGCTAGCACACTGGAGGATGGGCTACCAGATTC
ATTGTTCACTGTCTTAAACACACGCAACCTCCCCTCTCTTGCAGTTTGGGTTCTGGCATCTTTAACAGTTTCATGGGCAAATCACTTCAAACCT
CCACAGGTGCTACTTCACCTGGGCAGCAGTTGCTCACCCCCTACCCCTTCCCCCTCCCCAATTTAACCACACTTGCTGTGTTCTCAAGGCTGCT
GATACACAACAAACTAAGAAAGTTTTTAATAGTTACCAATCACAGTTTTCAAAATCCACTCATTTTTGCCCTTGTTTTTGGGTTTAAAAAATCC
TGGCATTTTCCTCAGAATTGCTGAACTATTAGGTGTGTAGATGAACTTGTGTTTTCTTGCTCTCCTACTCCAATTTCTTAGACTCAGACATGGA
AAAGCTTCTCTCGGTCTCAAGACATAATTTCCAGGGTGCGTGGTTCCGCTGGGTGTGCTGTCTGGTCAGTCTTACCGTTGTGGATTCCACACCC
CCACCCCACTGCCCCAACACCTATTAAAGCTGAGCTGACGTAACTTCAGGATACATTTATTATTTCTTACCTTATCATTCACAATTAGTGCAAA
TGATTAGTTCTCTGCCTTGCTCTTTAAAAAGAAAAGTCTTCATGGAGTCATTTTATCTACTTGTGAACCACAATCTCGTTTTTTTTTGGATGCT
CCTTTGACACTATACATATTTAATTCCTTTAATATTTCATCATAGAGCAGTCCTTCAGAACCTCTTATTTTAGTTGTTCCTTTTACTTTGGCAA
AAATATAAGACTAAAGAAGCTGCAAATCTTGTTTTCCTGCCTATTTAAACAGCATCTAGAAATCTGAAGTAATTGTCTCCTCTTATTTTAAAGG
TTTTTTTTTAAAAAAAAAAAAACAGCATACTAAATATTGTGGCATGGAGTTGAAAGCTTTAGGTCTGCAGCATTTGAAATGCTCAAATCCTGTC
TTTAAAGAACAGTATTTCCTCTTTGTGACTCAGTGCTGTTATCAATATACAAGGCTGATAGAGTAATTTCAAATTCACAACATTATATGTAGAT
ATTCAAAGGAAAGAAAAAGAGCTTCATGTGACTTTGCTTAATGGGTTTACCTATAGTTGTAAATGTATACTGTAAGTGATCCATATTTGGGAAT
TATCATGTAACAATTATTTCTAATAATAATTGATATAATCTATTAGAACTTGTCAGAGGTTTCGATGTAAATAATTTACCTGCCTAGCAGACAG
AAGGGAAGGAGAGTAAGCAGGGGAAAATGTTTCTAAAATGTCCTATCATTGGAAGTAAATGATCATAAATGTTTTTGCGTTAAGTTAGGGTTTG
GTTTTAATTTTCCCTTGAATTCTAATGTTCCTACACCTTCCAAATATATTTTAAATCTTCATTAAATAAATCACATTTTAATCACACACGGAGC
TTAAAACAGGTGATTCTATGACAGATATTCAGTATTAGCTAGTGAAGGAGAACATTGGTTGAAGGTACCTAAAACCACGTGCATAAGGAACAGT
TTATTTCTTATTTGGTGATTTACTATTTCAAGTCATTTTTGTGTCAAACCTATAAAAATCTCCAGTGCTAAAAAGTGTAAGAAGAAATGAGCTA
GCAAAAAAAAAAAAGTCGGGGGAAAGTTAATTTTTAAACTTGCATTACTTTTATTTTCCTACTTTCTGTTATTTCAGAATGCATACTTGGAATG
AATCCTTCTAGAGACGTCCACGGTATGTTAAATTCCAAGTTATATTTTTAAATAAAGTACACACCTTCATAGATGTGTATATGATTTTATATCT
ATGTATCTCTATGTATAACTTGTCATATAATTTAACCAAATAATTAAGCCTGTTTCTGCTGATTCCAATATACTTAAAAGCAGTTCTCCATATT
GTAAATGTTATACCATATAAAATATTTCAATGAAAGCTTAAATGATACCCTCAGTTCTACAGCGTTTACCATAGGTGCATTCTGATGCTATTAA
ATGCCTCTATACAACTCTCTAAAAACAAAACAGAGCTTGGCTTCCCTCACAGCCCAGCTTATTACCTGTGTTATAGCAGTGGTAATGCAAGATT
GTTATGAGAGTAAAATGTTTACTAAGCATTCCTAAATTTTAAAAAGATTAATTTTAAAATGTCCTCAGCTTGCTACTTCTGAGGTACACAATGG
GTTTATGAAGTGAAAGTGAAATCATCACACATTAACCATAGCATCCCACAGAAACATTCAGATGGAGGAAGGATGTAATGGAAGAACTAAGGGC
TCTCCTCCCCCCTCTCATAGTAATTAGATTTCAAAAGTGAAGTAATCTCAAAGCCACTTCAGAAGAAAAAAATGTTTAATTAAATTCCAATGTT
CAAAACTGGATAGTGTGTATGGCAGGTGATTTGTACATACATGTTACTCTTCATCAAAATTCTTTTCCATCCCTGTGACATCAATACAAACTGC
AGCTATTTGGTTCCAAACCATACCAAGATACATTCTATTTTTTAAAATGTAAATGGTCATTTAAAATACAAATAATTCTTTTAGACGTACTCCA
TTTTTACAAATGTGATTTTGGAAATATATTGCTCGCAAAGGGTAATTTTAAGAGAATTGTTGAGATTCTAATCCCATCTTTATGCATATTTTGG
GGAGGCTTTTGAAAGAGCAAAAAGGTAAAAGATTTAGTTATCTTCTCAGACCACCTATAGTTCTTTACCTAAAGTTGTAGAAGAAAAACGTCAA
TGCACTGTTACTGTTTTCCAATGAAATTATTTTTCTTCCAACTAACCAAGCAGTACTTTTTAAATCCACTGCAGAAATGTACATTTCATTCCTG
TTGTGAGCCGTTTTCAATTCTCCTCCCTCCCTCTCCCCGCAACAAAATTTGGAAAAATCTGTCACGTAGCATCCGCCCAACGTATCGCTTCGTT
GTATTTTTTTTTTTTTTAATTTTGCATTATGACAAAAGTAAATTCTAGCATTACTCCAGGGAAACACTGGGAATGAACCTGGTAATGTTTCCTT
TCCTTTCTCCCTTAGGCAAAGGAAGGGGAATTCTGTATTGTCGCTAAAATGAGCGCTCTTGGTGGAAAGGAATTCCTCACTTCGTACACGCTGT
GGCTGTCCTTGAAAGTGCAGGCTCCGTAAAATGCCCGGCCGACTAAGGGGTTCCCTTTCCCCGGAGCCCCTGCCTCTTTCCATTCATTTTAGAT
CCTCAGTAAGGAAGGGCAGAGGTTGGTCTGTTTCTTCTTTTCAAGAGGGCACCGCGCTGCGCAGTTAACAGCCTGCGCCGCTCCGGGGAAACCC
AAATGTCCCGCGATCCCATCGAGTCAAGGAGCAAAAGCTGTGATTGCTATCAGCTTTTTGTCCGCCTTCAAACTCGGGGTTTATCCGTTGAAAC
TCCTAGCTGAGCAGCTCCCACGACGCTGCCTCTGACGGCTAAACTCGGTGCATGCAAGGCTGCGACCAACTTTCCTTACTCGATAAAGGAACTT
GACTCCCTCCTGGGAGACCGCAGCCCGAGTCCGACTCGCAGCCCCCGTCGCGGGGTTTAGGGTTTTAGGCAAGCGGCCCGAGACCCAGAGGAGC
CTCCCTGGACCTTTCCGAGGGCCAAATCACCCGAGTCTGCTATTTCCCCTGGAGTCAAAAGCCTACTTTTGGAGCCGCCACACCCTCGTGCTCC
CTCCCGCATCTCGGGGGTTCCGGGGGATGCACGTGGGGGTGGCCCCAGGAGCCCTGGGTGGGATCTCGGGGAAATGCATTGGAGACCAGGCGAA
AAGGTTTCCCTTGCCCAGAACTTGCCTCTAGAGCGGGCCGCGTCCGAACCCGCAGGCAAAGGCGCTGCGGCCCCTGCGGGCGGGCGGGCGCGCG
CGATGCACTCTTCTCAGGGACACGAGTTAGAAAGTGGACGTTTGGGCGGGGGAGGGGGCGATTTACAACTGGAATTAGGCTTAAAAAAATCATT
TTAAAAGAAAAATGTAGTAAGTTTTCTTTCCGAGACCCCAGGTCCATTAAAACAAAACTGAACTCGGGTGCTGQCAGTGCCCAGGGGGAGCGGA
GGCGGAGACGGTTGAGGCCGCGGGCCGCCCGCCTTAGCCCCCCGGAAGCCCGGGCTCCTGAAGCACAGATAGCCAAGAGCGGCCCGAGTCAAGC
CCCAGGAACAGGGGCTTCGGGAAGACACCCCGACCGGCCCGCACAGCGGGGAGGCCTGGTCCGAGAGTCCCCACCTGGCCGGCTGCGACTCTAT
ATTGGAACCTCGGAAACGCGCCTTGGCCGTTCCAGCTCAAGTGGGCTCTCGGGCGGCTTCCTGTCTTTTATCCTCGAACGCTACTTCTTCCCGG
GCCACCCGAAGGCCACGAGGCGGGCCGCACAGCCCCGCGCCGTCGGGGGCGTTCCGGGAGCTCCGGGGACTGCGCGCGGCGTCCAGGGAGGCCG
GCTGCTGCCCCCTGGCGTCCGCCAGAGCCCGCGGCGCGTCCCGACAGCTCCGCGCAGTCCGGGCCCGCCCGGGAAAGGCCTCCACGCCAGTCAA
CCCCGCCCCCCTCCTGCGTCCGGGCCCGCGGCAACGCCCGGGGACACTCCCTGCGCGGCAGCGGCCACAGCACCCTAGCCCTGGGGGAGGGAGG
AGCGGGCGTCAGGGCCCCCGTGAGGTCGGCGAGGCACCCCCGCGCCGGGGAGCTTAATTGAGGGGCTCCGCGCGGACCACAAAGCAGCCCGCGG
TGGAACGGGGCCGGGATCCGGGCACTGGGTTGCAGCCCCGGGGTGGATGAGAGGCCCCGGGAGGTGCAGGGCCCGGCAGGGAGGGCGTGGAGGG
ACTCATGGTGACGGGAGCAGCCTCCGCTGGGAGGGAGCCCCCCCGGGCGGGGTCGGAGTTGCCAGCGCACGCCGGACCCCGGGCGGGGCCCTCC
GACCTCCGCCAAAATGCCCGCAGCACCGCGGCCACCGGCGCAGGGGGAAGCGCCCCCCCGCACGCGAAGCCGGGGTGGGTTCCGCACCTGGGGC
CGCTCGAGCGCACGGGGGCGGGGAGAGGAGCGGGGGCCGCTTCCGGGGAGCCGGAGGGGAGACGCGGGGCCCGGGCAGGCTGTCCGGCTGCTGC
GGGTGCCGGCGCTACAAGGCCCGGGAGCAAGCCGCGTGGCTGCTTTCAACTTTCCTTCCAGCCGCGCGTTCTTGGGGTCTTTCCTGACTAGGAA
ACTCTTCGCTGGCCGCTGACGCACGCAGCAAGTGAGACGCGCGGAGGGATCGAGCCGCGGCCCGGCCGCAGCGGTAAAAAACACCCATTACAGA
AACCGACCCAAGGGAAGACCCTGAGAGCAAACGGCACGCGCCGACGCCGTCCGGCCTCATGCAAGGAATCAGCGCCGCTTCGCCGCAGCTGCCA
GCCGGACGGTGCAGGAGCGCGGAGTGGCTCCCCCGGGCCCCGCGGCCAAATCGCACCCCCGCCCTGGAACCGGAGGCCTGGCCCTGGGCGGCCG
CGCAGGATCTGGGGCCGTCCGCCGGCTGCAGCCCGGTTCGGCACCCTCGTGGCGGCCACTGCGCCTGCCTGCAGCGGCTCGCGGGGCCGGGCCT
CTCCGGGTGCGGCGCGCCGGCCGGGTCCTCCTCGGGCCGGCGGGGCCTGCTTTCTTTTTCCAGGTCTCCCGACCGTGGCCACTCGCGGAGCCGC
ACAAAGCCTGCGTGTGGCTGCGGAAACGGGTCCGCACGCGGCGGGGCCCCGGGCCAGCATGCAGGCTTGGATGCGGGGCGCGGGGGTGGCCTCC
GACTCCCCGCCCGGGCTGCGTACAGTAGCGCGCGGCGCGGCGGCGGGGGCGCGCGGGCCAATTCCAGGAGCCGGCGGCGGCGAGCCGCGCCCTG
GCTGATACCGGAAAGGCCTGTGATTGGCCGCCGGCCGCCCCTATGCAAACGAGCTGAGGGAATGGAATTCCTCCGGCCGGGCTTACAGTAAAAG
CACGTTCATTTCCAGGCACTCTCATTCATAGAGCCAGCGGGCGCGGGCGGGACGGGCGCCCCGCGGCCGGACCCAGCCAGGGCACCACGCTGCC
CGGCCCTGCGCCGCCAGGCACTTCTTTCCCGCGCTCCTAGGGACCCCAGAAGGAAGTCAACCTCTGCTCCTTCTCCTTGGCCTGCCTTGGACCT
TCCTTTTTTTGTTGTTTTTTTTTGTTTTTCCCCTTTCTTCCTTTTGAATTAACTGGCTTCTTGGCTGGATGTTTTCAACTTCTTTCCTGGCTGC
GAACTTTTCCCCAATTGTTTTCCTTTTACAACAGGGGGAGAAAGTGCTCTGTGGTCCGAGGCGAGCCGTGAAGTTGCGTGTGCGTGGCAGTGTG
CGTCGCAGGATGTGCGTGCGTGTGTAACCCGAGCCGCCCGATCTGTTTCGATCTGCGCCGCGGAGCCCTCCCTCAAGGCCCGCTCCACCTGCTG
CGGTTACGCGGCGCTCCTCGGTGTTCGTGCCTCGGAGCAGCTAACCGGCGGGTGCTGGGCCACGGTGGAGGAGTATCCTCTCGCTGCTGCCCCA
CTCAGCGCTGAGTCACCCAGCTGATGTAGACAGTGGCTGCCTTCCGAAGAGTGCGTGTTTGCATGTGTGTCACTCTGCGGCTGCTCAACTCCCA
ACAAACCAGAGGACCAGCCACAAACTTAACCAACATCCCCAAACCCGAGTTCACAGATGTGGGAGAGCTGTAGAACCCTGAGTGTCATCGACTG
GGCCTTCTTATGATTGTTGTTTTAAGATTAGCTGAAGATCTCTGAAACGCTGAATTTTCTGCACTGAGCGTTTTGACAGAATTCATTGAGAGAA
CAGAGAACATGACAAGTACTTCTAGCTCAGCACTGCTCCAACTACTGAAGCTGATTTTCAAGCCTACTTAAAAAAATCTGCAGCGTACATTAAT
GGATTTCTGTTGTGTTTAAATTCTCCACAGATTGTATTGTAAATATT1TATGAAGTAGAGCATATGTATATATTTATATATACGTGCACATACA
TTAGTAGCACTACCTTTGGAAGTCTCAGCTCTTGCTTTTCGGGACTGAAGCCAGTTTTGCATGATAAAAGTGGCCTTGTTACGGGAGATAATTG
TGTTCTGTTGGGACTTTAGACAAAACTCACCTGCAAAAAACTGACAGGCATTAACTACTGGAACTTCCAAATAATGTGTTTGCTGATCGTTTTA
CTCTTCGCATAAATATTTTAGGAAGTGTATGAGAATTTTGCCTTCAGGAACTTTTCTAACAGCCAAAGACAGAACTTAACCTCTGCAAGCAAGA
TTCGTGGAAGATAGTCTCCACTTTTTAATGCACTAAGCAATCGGTTGCTAGGAGCCCATCCTGGGTCAGAGGCCGATCCGCAGAACCAGAACGT
TTTCCCCTCCTGGACTGTTAGTAACTTAGTCTCCCTCCTCCCCTAACCACCCCCGCCCCCCCCCACCCCCCGCAGTAATAAAGGCCCCTGAACG
TGTATGTTGGTCTCCCGGGAGCTGCTTGCTGAAGATCCGCGCCCCTGTCGCCGTCTGGTAGGAGCTGTTTGCAGGGTCCTAACTCAATCGGCTT
GTTGTGATGCCTATCCCCGTAGATGCCAGCACGAGCCGCCGCTTCACCCCCCCTTCCACCGCGCTGAGCCCAGGCAAGATGAGCGAGGCGTTGC
CGCTGGGCGCCCCGGACGCCGGCGCTGCCCTGGCCGGCAAGCTGAGGAGCGGCGACCGCAGCATGGTCGAGGTGCTGGCCGACCACCCGGGCGA
GCTGGTGCGCACCGACAGCCCCAACTTCCTCTGCTCCGTGCTGCCTACGCACTGGCGCTGCAACAAGACCCTGCCCATCGCTTTCAAGGTACTG
GCCCGGAGAGGGTGGTGGGAGGACAGGCGGAGGCCGGCGAGGCCGGGGGAGATCCGCGAGGGCAGCGGCCAGGCGGGCGGGGCCGGATTCTGGA
AAGGGGCCCCCGCAGCCCCGGGTCGGTCTTCCTAGCTTGCGATGTGGGGGATGCTGTGTTGCCGTGGCCACCCTCGGGAGGCACTCGTCTCAGC
TTTCTGGGGCGGCCTCCCAGGAGGGCTGAAAACATCAGGCTGTCCCCAAAGATATCCACTGGGAGCCCCTCGGGACCTCCCTGGCAGGCGCCTT
AGCTTTGATACAAAGTAGGAAAAGTTATAACCCAGCCCGGCAGAGACAGCCCGTCTGCTAACTTACTGCTGCCCCTACCGCTGGATTAACACCC
AAACCATTTTGTCTTCCTCAGATGAAAGGATCAGGAAATAAAATAGTAAGACTTTTCTGCCTTCAAGTCAGTGAAAAGAAACTAACTAGGGAAA
CTGTCAGGGATTTTTTTTCCCCTTCTCTAACCGCCCTATAGGAATTAGCATGTCCAAAGTCCACAGCGGGCGTAGTTAAGTTTGCAAAAGTTTT
CTGAAGAGTTCTCTGAGCTTTTTAGCCTGCTCCTGCCAGAAGCCGCAAGTATCGAATCCTGTTTCTTTTCCCGGAACCGTTCTGAATGCTATCA
TCAGCTCACCTAGATTAAGCCAGGGGTAGCCAAAGGTGACGAGGCTGTTTTCGGAGAGCCAGGGGTCCCAGCGGCCCGCTTTCCTGCTAGAGGA
GGGGGCGGCGCGTAGCCGGAGACTTCAGCGCGGCGGCGCCAAAGATCTCCCTTCACTTTTCACCCCTGATCATCCCCAAAGCTTTGAGCTGCCT
TTAAAAACCTTGACCTTCAACAGGGGTATGAAAACAACCCCAGGCGTTTCTAAACAATCACCCTACTACACTAGCAGCAAGCAGTAGGAATTTA
ATTTCTGCAGTGGAGATTCTGTTTTGTCTTTGGTGGGTTTGAAAAGATGCGACTAAGTAAAATCAGTGCGGGTCATTTCCTGTTCGTTTAAAGG
GCGAATCAAGGCAGGTGGTTCCAAGTCTAAAGATAAGCTACTAAAAAAAAAGTTTAAATAATTGTCCCCTTTAAAGGGAGATTAATTTAATATA
AGCTTTTTATAGTTCCAAGCCTCAGCTGGCTCTTGATCTTATTACAACGACGAATATTCACTTTTTAAAAAAGTATTGTTGCGGTTATTTTTAA
GCTTTATACAGTTTCCACACTTAGATTGTGATTTCTAAAACAAAACGAAATTTGCAGTTCCCTGTGTCTATAGATTGGCCTCTTTTTCCACTCA
CTTTTCTAAAAGCAGTTTTTTTTGTTTGTTTTGTrTTTTAGTGGGGGTGGAAATGAGGAGAAGCAACGAAGGAACGTCCTGGCTTGCTTGACTC
TTTTTTCCCTCCCTCCGTTTACTTAGATTTGGGTTTGGGAGACCATTTTACTTTTAAATCATTCTAACCCTTTGCCTAAATGGACTCAGCGATG
ACTCTTTAGGGCACCCGCATTGAGAGGGGACCCAACAGGGTTGGGCCATGGGGTCACTATCAGATAAAGAGCAGAGGCAAGACGGGCTGATAAC
CACCAAAGGCCATTAAAACCTGGCTGCCCCAATGCACTAGGGCTCTAAGAGATTTGTGGCTTCCTTTTGGGGGGGAAATCAGCGTCTCTTCTGA
ACTCCCTCCTCTGCCAGCGAACCCACACTCAAATATATTAAAAGACTAAATCATTAATAAATAATCTTCAGCAATTGGAGCAATTCAGAGTCTC
AAGCCATTACATGAAAGTATTTATTTTCTTCTAAAAAATGAAAAATTATACATATTGCTTTTATGAGCTGTCAGAATTCTTTCTAGCAGAAACC
ATAATAACCATAGAGTTTCCTTTTTAAAATGACTTTTGGCAATTCACTTAAAAACAATTAATTTGTTTTATTCAGTGATAATCTATACGCTACT
AAAAATCCAAATACAGAGCTCTTGAAAAAAGTTCAACCACATCCCCTGAGAACATTTACGGGAAAGGAAAGCATAGCAGAGAAATCACACCATT
TGATTATTGTCTGTCACCACCCCAATCCTCATAAAAAGACGCTTCTTCCTGCAGCAGACCTGCTCACTGCATAACTAGAAGAGTAGACAAAATG
TTCAGTGAGACAGTAAACGTCAAGGGATAAAATGTTAGGCATAAAAGCAAGCAAAACATCAAAACCTGCCTACATCCCGGQCTCATTTAGTGTG
TGTCCCTGGCTTCACTCTATCTGCCCACCCAACCACCTCACAAGCAGCTTCAACACAAATTATTACTTTAAAATTTGGATCTTAAATAAGCCGC
AGGCAATCTCCCTAGGAAGTTAACCAGTAAATAATTATTATATTCCCTATGGTAAAGAGAAGCAAATGTGAAACAATGATAAGGCCTCATGATA
TTGATGAAAAGATCACTCAAGGCCTTCTTAGGAATCTCCTGAAGTTCTGTACGTAAATCCTCTACGTCAATCTTCTGAACTAAAGAGAGATTTA
AAATTATGAATTTTCTTTAAAATAGATTACAATAACCCTACTTGCTTATTTTGAGCCCCAACCTGTTCTCCCCCTACTCCTTCCCTCCCATGGA
ACACCTTTATTTTTTACAGTATGAGAGATACATGTTTTTTACTACTAAGAAAACCTTAAGTTTGCTGTGTGTTTTGCTGTACTTACAGTATTAG
CCTAAAAAGCTGTTTTGATGACTTAGGATGTATTTGGTAATACCATGGTGTTATAGCTTGTTCAGGCCCTGGTACACCAGAGTCCAAAGACGTA
AACGTGCCTTCAGCAGGGAAGTTCGGAGGTCTTGGATTCTGATGGTAATATTCTTTTCATAAAAAGGAAATAAGTAATATTTTTGTCGGCAAGA
TCACAGTCCCTAGCTATGCCTTAAATATCATCTCAGCTGAATTCTGTGTTCCACTCCACAGCCTTCTTTGCAACACTGGAAGGTTAACGGATTT
GAAGTAAATGAATTGTAACTGTAATTTCAACCTAATTAGAATTCGTTTAAAATGCCAGTTTGGACCGTGAACAGGCTAGCCAAGAACACTATTG
GGAGGTCCATGTAATATAGAAGAGAGTTGATATTTGGCCCAACTTCCTGATACTTTAAAAACAGAGAAGTAAAACAAAATATGAGATATCTTTG
GCCAGCAAGTCCCTTCTTGCCTGTTTGGTCTGTGTTAAAATGTAAATGTTTGTGTTTCCTTACCTATTCTTTATAGCTTTTCATTCCAGTTGTT
TCTTTTTTCTGTTTCAAGTTAGATATTTTTACATTCTCTCCATATTGCCCATCAGTGACAAAACCTGTATCAAATTAGCACGCATGTTAGTTTT
GAATTAAAAAGAAACTTTTTAAACCTGGCTTAAGTATCCTTGTTAACAATTGGACGATATACAGTATTAATGAATTGCCCTGCATTTACTAGTT
CCCCTTTACCCACCCGCCTCCACCAAAAAAAAACCCTCAGAGATCAATACAAGGCCAAGTGAATCATATGTAGGTGCCCAAATATGGTTGATTC
TGCTGCATTTAAAAAAAAAGAGGACTGGGAGTTAAACTTCTAATTTTTTTCTTCTTAAGTTCCAACATCAACAGCCTTTTCTTATTTAGCCTCC
ATGATAATTTTATTCTATGTTTGTTTCGACTTGGCGAAGGTCTCCTGAATTTGCCAAATTACCAATGAGGATAGTATTGGAAAGATGAGAGAGG
CACAGGCTTGGAGCACTGTGAGGGGAACAGCAGTAGGAGGCAGATAATTCAGAATACATTCCTGTAGTTATAAAAGAACATTTATTTATTTTCA
CCTTTTTACAGATCCAGACCCAACAATGAGTTATTCAGTTTGAAACCCACGTAGTGGACGCAGTCTCTGTATACCTGCTGAATGTTGAGTTACA
ATAGACAAGCCTGGGTTACCACAGGGAGAGGAGGATGAGGAAGTAAAAATATGTGTTCAAAGAGCCCATTTCAACACTGTGAGCTAACTTTACA
ACGGGAAGTGAAAATCATGAAAAAAAGGGGAAAATTTGTTGTGAGAGACTAAAAAGAGCAAAATAAAGCAAGCCCATTTTTCGGGAATAGGAAA
AAAAAAAAAACAGTAGCAATAACCAAATAACTGATCAGGGAGATTTATTTCCGTGATATCTTTTTAAAACAAAAAGGGAATTGTCGTATCACTG
CTCTTAATTAAATGGCAACAAACACACTTATAATGGGAACTAAATAGCTAATTAGAGGGTGCTTGGGGAATAAATAGCAGAGTTTTAAAATCTC
CTATATGGAAAACATGTCCAACAATTGGAATGAAAGGATTAAAAAGAGAGAAAAGGCCCAGACCTTGTTTGGCAGTGCAAGTTGGATAAAATAG
AGGAAAATCCCTCCCTGCTTCTATGAGACTAGATTATCCTGGTCTAGTCTTGGGGTTGCAAGTATGTTCATCTCTCATAGTGAGTTAGTTCGTG
TTCTGTGCCACAAGGACTGAAGCAGTTCTAATGAATAAAAACAATACATAGTCATCTGGAZGCCACAGGGAAAGGGTGATGGCTAAGCAGATCA
TGAAAATGGGAATCTTGACAAACATGACTTCGATATCATACAAGTGAGTCTATCGCAGCCTTTTTTACATATAGAAAAAGAGCCCTGAAAATAT
ATACTACAAAAAATTATGTAGCAGTTATTAACGTAAAAATTGGGAAGTACGAGGCAGAGGAAGGAGTGATAACACTACATTAAGGAATCCTTTA
CTGTTACCAATTCAAAAACAGCAACCAAAAATGATGATGTAATTGGAATGAGTAATATAAATGTCACTACTGACTTTACCGTAAAGAATGTCAC
AAATGATCACAATAAATACAGCTTGCCGCATTTCGATTTGAAGTTGTATGACTGCTTTGAAAAATAGAAACAAAGGAAATACAGCCAATAGTAA
ATGTCTAGACCAAGAAAATAGTTTCTAGAAGGCCTAAATGATAGCCAAGAAATTGATGCTATTGTACAAACTATCTTTAGGTCATGCTTTTCAG
AGTATTTTACTTTGGAATTCATTTTCTTAATTACCTGAGTATAAAAACATTTATCTACCAGTTTTCTCCAATAGCCCTGATAAGACTTCATACT
TACTCAGTTACATTAAATAAATTCCTGGTCAAGATCAGCTGGGCTAGCAGAAAACCTCAGGCATCTGTGAGGACATGAGTTTACACACGCTGAG
ACTCACAGATACAAAAATGCAACCCAATTCCACCCCTGAATTGACGGGAGTGCATAGAAGTGAATGTCCCGTCTTTCTGAGGTCTGTTGATTTT
GTAATTAGTAAACGAAGGGTGCATTTCTGATTTTTTTTTCTTGTGTGCTAGAATTCATTGCTAGTAAAACTCAAGATAATAGCGATGAGTAGGA
GGTATCAAAGATGAACTGTAGAGGGACAGTTTAAGTTACTTAAGAATCGTCAGCAAGATGAAATCTACTTTTAGCAGAAATTGGGTTTTTTTGT
GTTTTTTTGTTTTGTTTTATTTTCTAAAAGTAAAGTCTGCACCTTGTTCAGCCTGTTAGTGGAGGTCTGAGCAAGTAAAAGATGGGTTGGATTA
TAAACTTACAAACACAGGATGTTCTGTTTCTCAAACGGGAGAAATTAAGAAGACATGCTTGTATTCACGAGACGGCATAGCTACTCAAAATCCT
TGATATCTTGCTATGGTTAGTCTTGTTCCAACTGTGCTATGTGACCTACTATGGCTTTATGAGGTAAATTTAGTATATGTGTCACTATTTGAAA
ATTTACATATAGTTATACATAATCTATTAGGTTGGTGCAAATCTAACTGCAGTTTTTCGAGTTAAAAATTGCAAACACTGCAATTACTTTTGCA
CCAACCTAAAATATAATAAAAAACTGTCTTCTCTTTATAACTTTTCTGTTGTTTTGCTTAAGTTATCATTGCTATTCCTCTGCAACCTAAAAAG
AAATCATTGAATATACATTTAATTTTAGAATAATCACTACACAAATGCCCTAAAAGTGTATGTATAACATCCCTGATGTCTGCATTTGTCCTTT
GACTGGTGTTTAGGTGGTGGCCCTACGGGATGTTCCAGATGGCACTCTGGTCACTGTCATCGCTGGCAATGATGAAAACTACTCGGCTGAGCTG
AGAAATGCTACCGCAGCCATGAAGAACCAGGTTCCAAGATTTAATGACCTCAGGTTTGTCGCTCGAACTGGAAGAGGTACCTTATCTGTCAAAA
CTATGCTTGAAACACGTTTCATGGCAACAAACCCACATTTCAAAATTCTAGTGATTTCTGTGATGGAATCCCTAGAAACTCGGTCTGTCTTAAC
ATTCTTATTGCTATGTCAAGCTCTTAAAAATATTTATTTGAAGTTTAATATTTTTAGCAGAATCTCTATATTATTGCTTTATGTTACTGAGTGG
ATTTAAGACTGATTTGCAACATGCAACGTAGGAATTGTGAATTTCAAAGAAACGCCTGAGATTTTTACTAAAATCCAAAAAATATAAAACTGAC
TTTAATGAAACTAGGATTATACAATTACAATGAGGATTCTCTCTTGGATAACAATACAAAAGCTATTTAATGGAAACTGTTGACGTATGATCTG
TGGGCTATCTGTGAAAAGTGACAGAGTTTCCAATGACCACTTCTAATAATTTTAGGGATTTCTAGTGTATGATGTTGAAACATGGTTTCAAGCA
AGCTTACCTTTTTAGAAAAAGACATGAAGAAATAATGTTAGTACCATTGATGGCAGTATGATCTTCCTCTTGTATTTCTTTTCAATGCCTTATT
TAGGAGGAGGGGTTGGGCCTGGTTAGCATTTTAGATACTAATAATATTAGAGATTGGATTATCCAAGAAATTGTTGCATTACTTCAGCTCCATG
TGTGATTTTATTTTTCCTTGCCTTTAACTCATTATCAAAGCATTAGAGCAGAAATAGGAATCTTGGCTTATTGTAATTTTTTCTGGTTTCCAAT
TATTTTCAAGTATTATGTTTTCTTTACATTGTAAGAACCAAATCATATTTTATAAATAGCAACAAGTAGTAAAAGTTTAGTTGAGGGAGGTAAG
ATAGTTTTTTAAACTCATTTTTTGTAATATAGTACCGATTAAGCTTACAAATAAGTTATTTCAAGTATAATAAAAAGACTTATCGTAAATACCT
AAATAACAGTAATAGTTCTCGTATTGAAAAAAATGGAAGCACCAATCAAACAACATTTAAAATAAGAGAAATTATTACTCTTTAAAAAGGCATT
TAAAAACAAGAAAATCTCAGTTCTCAGAGAATTTGATTAGTCAGAAAGCAGAAAGGGGTAAATGTGAGTTGATTATTTTGCTGATTATTTTTGC
TATCCTAGCTATCTGGACCATTTTCATAATAGAATCATACCTGGAGAAAATAAAAAATTTATATAATGTCATTGAAAATATATATTCATAGTAC
TATATTAATAATAGGGTAATGCAAAGAAAATTATATCCACTTTTTGAAAGCATGAGTGATGCTATAAGATATAAAAGCATAAGTCATTAAATGG
GTTCACTTGTTGTATTAAAAGTCCCCACCTTTCAGTAAATGGAATTTGCATTATGATTCAGAGATGTGTCTCTAGAAAACATCTTAAAGGCTTC
GGATCAGTAGCTGGCAGAGTGGGTGAGAAGCCAATAAAAAACAAACGCCCCACAGCCTGGTCCATGCCCATCCGCCTAGCTAACTCTCTTAATT
CAGTTCTTGTGGATTTCTGCTGTTAGGAATCAATAGCTAAGTATCATTCAATTGCTTTTCTAGAGAAAGTGTTATCATCATACTATGCATCTGT
GTGGGTCTTCAAGTTAGGTTTTGGTCATAAAAGTTTTAAAAACTATTTAGTCATCCGTGCCAGTGACATTTTCCCACAAGAAGTTCAGTAGTCC
CTTTCCGGCAATGCACAGTAAACCAGTGATAATAAAAAAATGAGATTTTGAAAGCAGTGTGCTTTCTTTTCTGGCATTGATGGCTGATCTTGCA
TCCCTCATTGACCATTTCTGTTTTGAGTCGCTGACTAATAGGTGCTTGTGTTTACTTGGGTAACAGTGAACTGTTTCCCCAACGTCTGGAGTGT
TTGCATTTGGCTGCAGGATTCGTGCCACTATGCCCTTGAGTTTGCATAAACCCCAAAAAGTAAAATACCTCCAACCAAGGCTCGGCTGTCTTCC
CATACTCTGGAATGAGAAAATTAATTGAAATGCCATAAACAGACAATATTTTGAACAGACTCTCCTTCCCACCAGTGATAATAAGCAATAAAAA
ATACGGAAACCCTAATGCAACATTTGACCCAATTGTAATTACTGTGGATATGAATATTCTTCGTCTTGAGATGTATATATATATGTGTGTGTGT
ATATATATATATATATTTTTTTTTTTTTTTTTAGTCAGCCCTACAAAAGTAAATGAGCTGTCTGAAGGCCCGATTTGACTCTGTCATAATTTCT
TTCCATAGTCATAAAATATAACTTGATTTTTCTCTTTCAAGTGTAAGTCTCAACACCAAAGCCTGCCAGATTTTTTTCTTTCTTTTTCCTTCTT
CTTCTTTTTTTTTTTTTTTGCAATTTGCTTCCCATTACGAAGAGAGCAGATCATTCTGACTAATTTTAACAATTAGTCTTAATCTTCCTCACTG
AATCTTACCTTTAACAGTTTCATTACGTTTTATTAAGTGATCTTAAGACAACTGTCTCATTTTCTGTTTTTGAAAATGTGCTTGAAAATATACC
CTTGGCATGAACACACCACGCCATGGCTCAGAAGGCCCTGGCTCTTGGCTCATCCAAACTTTCAGTGCCAATTTTGAATTCTCTCAAAAGCCAC
CAGTCTGATGGATTCTCCAAGGGGCCTAGTAAGTGGTGCAAAATGAAAGGTAGAGAAAGAAGTTCTCTTTCTGTGACCAGCTGCCAGTCCATGG
GGATTGTAAACCTCATAGAAACTGCCAGAGGTTGAACATGGAAGGGTTTTTCTCTGTTCTACAAAACGAATCTATCTGGGCGCTGGCTGCCATC
CAGGATCACAGCTCCTAACCTCGGGTTCATTCCGTAACTCCGAAAACCTGCCTGTCCGGCTTTGATGGCCTCGCTGGCTACACTGGCCCTGTAC
AAGCCTGAACCTTCTCTCTTTTCTTCCATTCCCTCCTTTTTCTCCTTGGCAGTTTAAATCTTGGTTCAGAGTGTATCTCACCCTTGGAATGTTT
CTCTCTTTGATTCAGTATCTCCATGTAAATCGACCGCTCCTTTACAAAGGAGGAAGAGATAGCAGCTCCCAGGAGATGAGGGTTAGGGAGCTCT
GGGGACCGGGCTGAACTCCAGAGGTCATCTGAGCACAGAGGTTATTCTTCAGAATAATTCACATTTTAGCCAAATGGACTGGGACTCCATGACA
CCCCCAAAAAATTGAAGTTCAGGGTCAAAAGGAATTCTCTTATGTGAAACGAATTCACTGAGCAGCTTATATCAGTTTACATCTGCAGTTGAGG
CAAGTGCTACATCACCTGCCACCTTTAGAATGACAAGAAAGTGTATCATGGCTTCAGCTGAGAGAAATTTAAGAAATTTTAGCAATTGGTATCC
GGGCACAGTGGCTCACACCTGTAATCCCAGCACTTTGGGAGGCCGAGGTCGGTGGATCACCTGAGGTCACGACTTCAAGACCAGCCTGGCCAAC
ATGGTGACACCGCCATCTCTACTAAAAATACAAAAAATTAGCCAGGTGTGGTGGCGGGCGCCTGTAATCCCAGCTACTCAGGAGGATGAGGCAG
GAGAATCGCTTCAACCCAGGAGGTAGAGGTTGCAGTGAGCCGAGGTTGCGCCACTGCACTCCAGTCTGCGCAACAAGAGCAAAACTCCATCTAA
AAAAAGAAAAAAGAAAAAGAAATTTTAGCAATGAAATCTGTGACTGCTTCATCCCAGTTGGAGTATTTAATCAGTCAGAGAATAACTGATCAAT
CAGGAAATACAGCTTTAGTAATTTCATTTCAGAACCAAAGAAGAAATCTCTCCAGCTGCTTTATCAGCTGCATTGTTGCTGCAGGAGGAAAGAT
GGTCTACTGCACATTTCTTTCTAGTTTTTTCTTAGAATATGATTTTTAATCTTTGGGGAACATCATAGATACTTTTGAAAATCCTTTGGAAGGC
TTTTTCCAAGGACAAAAAAAAAATGCACGTGTTCACTTACACACAGAATTACGTATATCATTTCAGTTTCTAGGCTACCAGAACTCATTTATGG
ACCTTCTGCGGATCCACAGACCCTACGCCAAAAATTTGTGAATTTGCAACTTTGCATTGATCATGCAGGGCCAGCTTAGCCCTATGCCGCATAT
AGTAGACACCTGAAAATGAATAAATACATGTACAAATGAGCTAGACATTTTCTTGAACCTGTGCTGTTTTGGTAACACCTGTGTTTTTGTTATC
GCCGGGGTCTGGTTTGTCTAATTAAGAAAGTAGATCTCCTTGAAACCACTGGCCAGGCCTTTGGATGGCCATCAGCTATGCCCACATATCATCA
CGCGTAAAGGGGAGGGGGCCTATTCTGTCATTGAAAGGACAGTCGCTTCCCTCGTACTGTGTCCACACCCAGCCCTGTAAGGCCAAGTGTTCTG
TGCCCTGTCAGGATGGCGTTGAGTTTCTTGGCGGAATTTGTGTTTACATTGACCTCCCTGGCAGCTTTAATCTTGCCCACTTTCAAAATAGTAT
CCTTTCCCAACACATTThTACAATGAAATTCCTTCGGTATGTTCTTGCTGTGAATATCTTCCCAGACATAATATTTATCCTGTCACAATCTGGG
TTATTGCATATTTGTGTAATGTTAGTTGCTTAAGCCATTTTCATTCTTAAATTATTCTACATTATTTGGGCTAAAGTGTGGGAGGTTGCCCTTC
AGGTGAGTGGAAGACTGTGGTCAAGAGGAAGGGAAGGTACATTTAGGGAAGGATAAACGGTACTGATATTCTAAACAAAGAGACATGGCTTGGC
TTTATGTAGCGGTTGTTACCAAGAGATGATCTGAATGACTCGCAGTATTATCGTAGGATCCCAGTCCTTCTCTATTCTATTAACACATTCATAT
AATAGAAGAAGGAAAAATTCATCTGACCACCCCAGAGTTGTTTCACGGGTAATGTTCATGGTATAAACTGGCAGTCAGATCTCCTGGAGAGAAT
ATAAGGAAAAGACATGAGTTATATTAAAATCAACTCTCCCATTTTCCCACTTTCTTCTGTTACATACTGATCTACACTTTAAAATAATATATAT
ACTGAAATCTGTATTCAGATCTCATTGCAAGCAAATATAGATGAATAAAGACCCAGTCTCTGATATACCAAGCCTCAACCAGCCCTAACAAATG
CTGCTTTTCGACGGGCAGGTCAAAAGCTTGCCTCCATGATCTGATGTAGAATTCATCTCTAGAGACCAAGTTTCTCATTTCGGTTTCACATTTG
CCAATAAAAGGATAGCAACACTTTCCTAAAGCAAGTTGCTCCCTGCCCTGCTTAAAGCCTGGGGTGGCCCAGTCATGGCAAGGACCAGCAGGAA
AAGCTTTCTTGAAAACTGCTTGTGCTTGCAACAGGCAGTTTCGCAGTTGATCCCTTCATAGTTTTCTTGCTGATTTTGTGAAGTGTCAGGCATT
GCTGATGGCGTCACACAGCTTTTTTAAATTGAGGTTATTTGTATGAACAATATTTTATAGTTTGATGGGCAGAAGCTGTACTTCTCTCCACCCA
CCCTCAACCCCTTCCTTGCCAGCCGCCTTGTGTTTGGTGGAGGCATTTCTTTTTGGTCGGGACAGAAGACTATCAATCAGAAAGTGCCTGCAAC
AGAAATAATGGTTGAGTGATTTTTAGAGCTTCCTGTTTCACCAACAAGCATTATAGACATAAACAGTGATCCAGCCAACGGCTGCAACCCTGCT
CTGGTTCTAATAAATCAGTTTTGTATTTTCTTTTTTGTGCTGGTTGGCAAGGGGCAAGAGAGGGTGGAGAAGGTTGGCTAAAGAAGAACATATT
CTGTGTTTCTGGTTTTTTTGTTGTTTTTTTTTTAACGAAAAATTACTTGTTGACAACGAGAGATGGTGTACTGTCTTTTTTTTTTTTTTTTTTT
TTTTTTGAGACAGAGTTTCCCTCTTCTTGCCTAGGCTGGAGTGCAGTCGTGTGATCTCAGCTCACTCCAACCTCCACCTCCCAGGTTCAAGCGA
TTCTCCTACCTCGGCCTCCCAAGTAGCTGCGGATTACAGGCATCCACCACCACGCCTGGCTAATTTTGTATTTTTAGTAGAGACGAGGTTTCAC
CATGTTGACTGGGCTCGTCTTGAACTCCTGATCTCGGGTGGTCCACCTGCCTTGGCCTCCCAAAGTGCTCGGATTACAGTCGTGAGCCACCGTA
CCTGGCCGGTGTACTGTCTTAAGGCTGTTTTCTTTCTGTAGATGATTATGACACAAGTTCAGATCAGTAAAGAGATGTTTATCAATAATCATAT
ACTGTCAATATGGGGAGAGTGTATGCTTTTGAAGGCTTCATTGATTCTTAGCCAGTGGACTGTGTGTGCGTGTGTGTGTGCGTGTGTGCAAGGG
GGAGAGAGAGAGAGAGAGAGAGAATGAGAATATCCATACTTCCATTGAGAGACTTCTTGCGCCAAATTATCTTTGAGGACTAAATTCATGCTAA
TAACATCTTCTCATCTAAAGCCCAAATAAAGCAATTAATGGAAATTAATAAGTGAGCAGTGTGGATTTAATGAGCTGCCTATGAATACTATGAC
ATGCGCTCGTTTTGTCGGCTCCCTGGCGGCCCATGGGGACAGATCGCAGCACTTCAACGTCTGTATTTATAAACATGCATTCCTGCACTTCAGC
CAGCGCGCATACTCCATCATTGGTTCTGCTGTGAGTCCTACATTCAACGGAGATGTATTTTGATCTCTGTTGAAGACAGAGCAATCGACGGCAT
TCAGTTTGCACTGCACTGATTTGGGATTCCAGTACATTGCCCAGTCCCTGTTAGTCTATATTGCGCAGCATGTCCCATTCAGGAGCTCCATTTC
ACATCACCGAACGTTCTCCAATGAAGGTGTCAGGCAGTTGAGGTCCATAGAGGAATCCCAGCAACTTCCTTTGAGAGGCTCACGGCCATTCTGC
TGCTAGACTGAAAATGCGTTTCCTCTGATTTCCTTAGTGAGGAAGCATTCATTTAGGAGCCATTTAAACTGTGTTTTTCTCAAAGAAGATGTAA
GTACATTTCCTGTTTATTTCTCAACTTAGATTAATTTGGGCTTTTACCTTGAGATTTAAGACCATCATTAAGAATGTATGGGCAGGGCCATCTG
CAGAACTACCCCACCTCCCCCATCACCTATCCCAAGGACGTGCCTGTCCAGTTAATACGAGGGCTGGCCACCACTCTCGGGTGGTGTATGGCCC
TAATTGACTCACCCTATGCAAACCAAGGTAAATCACAGGAATATGGGCAGATTGAGCATAATTGCTCATCTGTGTGCTCATCAGATCTCTGGAG
GTGCAAACACTCCAGTTTGCTCAAGGCATTGGGTTGGGGTCTTTACAGATTTTTTTCCTTCATTCTATTTGAAACTATTGTATAGAGGATAGTC
AGTATTAATCATCTATCTTTCTATCTATCTATAATTAGTAAGGAGCTAGTCTAACTCACATCATAATAAGGCTTTGTCTGCCTCTTTAAATGGT
GTGTCTCTAGTACCTAGGACAAATGTCCTGCCTTCATTATTCTATCTGAAACCACTGCGCAGTTTATTATCAGTATCTTGTCTCCCTGCTTATC
AATTTTGATCATAATCTTGCTCAGTGTTTCCCAGCTGGGGTGATTTGACTCCCAGAAGACATTTCGCAATATCTGCAGACATTTTTGGTGGTCG
TGTATTGGGTTGGGGAGTGCCGGTGGCATCTAGTAAGTAGAGGCCAGGCATCTACTAAACGTCCTACCATGAACCTGACAGCCTCCCCAACAAA
CACCCAAATGTCAGTTGTGCTGAGATTCACAAACTCATCTAGCTCCAGTCATGCGTGATCTCGCCCTCATCATGCATAGGTTGTAAAATGTTTC
CCTTGCCCCTTTTATTCTGACATTCTGCCTCCCTACAAACTTATCAAAATGTATGAAAAACTTATTTTAAATTTTATGAAAAACTTATTTTTAA
AACATTGCACAGAATAAAAAATAGAGAACATCACTGAATATTAAAAGTTTTTTTTAAAGGGAAAACAGCAGTGTTCTGTATGCATAGAATTGCA
CCATCCCCCTGGCGCCACTGACCCTGCCTGCTATCCTGGGTCAGGGATGTGCAGTGGCTGGAGGAGTGGCTGCAGGTCGGGGTGGTACACACAG
CAGGGCAGCTTCTCCGAGAAGGCTCCCCACTGTAGCCACCCCCTCATGAATGTCACACAGGTGAGGTCCACGAGCACTGCAGAAACTAGGAAGC
CCTCTGCCAGAGGCTCACTGCTTTTCCCTGAATACTTCAGCAGAGAGTCCATGGAGCCACTCATCTAGGAATGGCAATTGATGTCAGTGGACAG
TGTCCACTCATATTAAAAAAGTGATAAAGAGCCCGGCATGCTGGCTCACACCTGTAATCCCAGCACTTTAGGAGGCCAAGCCAGGAGGATCATC
TGAGGTCAGGAGTTTGAGACCAGCTTGGCCAACGTGGTCAAACCCCATCTCTACTAAAAATACAAAAATTAGCCAGGAGTGGTGGCACATACCT
GTAATCCCAGCTGCTCTGAAGGCTGAGGCAGGAAAATTGCTTGAACCAGGGAGGCGGAGCTTGCAGTGAGCCGAGATTATCCCAACTGCGCTCG
GCCTGGGTGACAGAGCAAGACTCCGTCTAAAAAAAAAAAAAAAAGTGATAAAAGCAAGGTCTTGGTGTGTGTCACTGACAGACAACTCCCAGAC
ACCAAATCGCTCAGTCTGCATACCCTAATAAAATGAAGGCACTACCTGGCAGGAGGGGAGACAGGACCAAGGTTTGTGCCTTTGCCGAGGCCCA
CAGGATGGGCTTGCAGATGCCACCCGCAGACAGATGGCTGGGTTCCTCTGGAGCTTTATCCCACCTGCCCCAGCATGTCAGTTTTGCCATCACC
GGTTTTTACACTGAGATTCAGGGCACCATGATTTGAAAACAAAAATCCCTAGGGAGACTCCCCTAGGTGTTCCCAGTGCATCAAGGTAGAGCCT
GCTGCAGGTTGAGTTTCTGGAATAGGTCAGGCTGTGTCTGCTTTGTTTGTTTGTCCGTTTCCTTGCTTTTCTGCTGCATGGGGACCCTCACGCC
TAATTTTCCTTCTCCGTGTATACATCTGCTTCCTTTAAGCTCCCTACAGTAGAGCAACGCTCCTAGATTCGACAGAGATCACTTGTGTGTCATG
TAATCTGTGACTAGTAAGCATTAACTATCCAAATGGGAGTTCGTGGACGGTGTCTGAGCCAGGGACTGCACAGAGCTCACGAGTTGCTGTAGGT
GTGCTCTAGAGAGAAGGTCACTGGGGAAAAAGCTTGAAAACAGCTGTGGCATGCAAGGGTGTGTGTAGGAACGGAGACCCAAGAGCACTGTGGG
GGAAGATGTGCTCAGGAGCCCCGAGGAAGTGGGCTCACAGGAATTTTCCAAAATCAAGAGATCCAGCCTTTAACTAGAAAGCTCCAGGTGGTAT
CATGAGTGACATTAGATGATGCCTGATACATGGTCTCTGAATGAATGACTGTTCAGGACTGTTTGTTTTTTTGTTTTTGTTTTTTTTTGAGATG
GAGTCTCGCCCTGTCACCAGGCTGGAATGCAGTGTCGTGATCTCAGCTCACTGCAGCCTCCGCCTCCTGTGTTCAAGCAATCCTCCTGCCTCAG
CCTCCCAAGTAGCTGGGATTACAGGCTTGCACCACCACGCCTGGATAATTTTTGTATTTTTCATAGAGACGGGGTTTCATCACGCTGGCCAGGA
TGGTCTCGATCTCGTTGACCTCGTGATCTGCCTGCCTCGGCCTCCCAAAGTGCTGGGATTACAGGCATGAGCCACTGTGCTGGGCCGGGACTGT
TTTGATGTTAGGCAGTACAGCCTAGTGGTCAGCACGTGGACTTTACTGGCTTCCCCACTGTGTTTCAACTTGGGTGTTGCTGACATTTAGGGCC
AGTTATTCTTTGCTGTGAGTGGCTTTCCTGTGCATGGTTGAACATTTAACAGCACCCCTGGCCTCTACTCAGGGGCTACTAGCACCCACCCTCC
TGGTTGTGACAACCAGAAATCTCTGAAGCCATTGCGTCATGTCCCCTGGGGGCAAATCGCCCCTGGTTGAGAACCACTGGCTTGGAGCTATCTG
TCCTTGAACAAGCTACTTGACCTGTCTAAGCCTGATTTTGCCCTTGTCTGTGGGAAGACAGAGGCACAATGAGGATTGATTACCTGAGACAAGA
CATAGGTTAGGAGTTGTTACTTTTTGCAGTGACACCAACACCATGGGGCAGACAATGGGGACTCTGTGAGTGCATAGCAAACAACAGCAAACAG
CAACAACAACCAGAGGTCTGCTTTTTTTGTTTGTCTAAATGGGTGAGCTTCCAAGGAGGAAACACAATCCTTATCCTTATTTCAGGGCCCCATA
CGGTTCTGTGGTCGTGAGAGGGTTATATGCGGCAGGCCCTCAGATTCCTGTTAGCATAGGAGAAACGAAATTAAAAATATGTACTGTAATTTGG
GCACTGCTTGTCATGGGAAAAGAAGTTCTCCCAACTCAGCCTTTCCAACTCTTTTGTCCAAACATTAATGGCATGCAAATATTTATGATTCATA
TGTGCCCCTTTTAATTCCCAATCGTATTTTAACAGTAAACACTTCATTTTAATAATGAAGCAGAATAATCCCTTTGTCCTGTCGCTGGGTTACA
CAGGCTGGCACCTGGCAGCATCACATTCTTCCTGAGTGATCATTGCTGCCTCCACCCAAGTTGAAGGGGTTTTGTAGCAGTGCCACGGCAGCTC
GCCTTGGACTACTTGAGGACTTCCGGATGTTCCGCTGGAGCCATTCTTAAGGTTGTGTCTCAGCATTTTCATAACTGCAAAAGGTGGCATCCAT
GCATATTTTTCTCTTTTGGCCACGTATAAACTCAGCACTGGTTCATCTGGCTGTCACTTGGAAGGGTTCTTACTACACTATTATCTTGCATTCT
GGCCAAATCCCTGAACTCTAGATTACACCGAACCCATTGTGTCCTATTTAATATTCCTTTGATTCGTAATGATGACATAGAGAGCACACACATC
TATTAGCGATGATTCTGTGAGTCCTAGAAAAGTAGCATAATGTAATATGAGAAGAGGGCACACCTGTAGGACTCAGATGTGCCAGCCTCAGTCT
CCCCATCTGTGTTCAATAGGTTTAAGAGTGCCTTTCATCTATGACTTATATCATCTATGTTAGGATGATAAAAGCGAGATGGGTGTGTATGTGC
TATACTTAGGAAGAAGAGCTAGGGCCCCTCTTCATGATGTTCTTCCTTCTACAGCCAGAATCCCTGAGGGAGGAGGGGAGAGAGCAAGCCAGAG
GCAGCATGGGTCTTGCTGAATTTGAAAGTTCGGAATGATGCTCTTTTTCAGGCCCCACTCCTCGATGGCAAGGAATTTATAATTCCTTCGTCCT
GCTAACGGCCTACTAAAATGAGAGTGCATGAGATAACAGCAGGCATTCCATAAGTATTCACAAGTAAAAGCCTATGTAATAATAATATAATTAC
AAACTTTTATTGGGCATTCACCCTGTGATGGAAATATAGTACCTATTCCTGTTTTATTAGAACTCTCCCTCTGCCCCACCCCCCAACGTCATTT
ACTACGCATTTCTTTCATTCATTCATTTATCAGATATACATTGTGCACCTACTCTGTGCCAGGAACTGGGCTAGCATGAGGGAAATACGACGGT
CAGCCAAAGAGAACCCACAGCCTTGGGGGCTAGTAAGGAACATGGCAATTAAGTAGGCCATCCCTGTTCTGAGTAGATAACACATGATAGATGG
GTCTGCCGGGAGCCAAGGCTCAGAGGTACAGAACCTGGTGAAGGTTCAGAGGGTCTCCCTGGACCACTTGTCATTCACTTGAGGACCTGCAGTG
ACAAGGAGACTAACCCGGTGGAGGCATGAAGAAGCATGTCCCAGCAGAGAAAGCAGAGTGAGGAAGGAGCACCTCGCCTGTTGGGAGCTGAGAG
ATGCTCCAGTGGCGGTGGTTGGGGAGTGATGGCGGGGAGCCTTACAGAGACATAGGGCGGGGATTGCCTTAACATCCACGTTGGGAATTTGGTC
TGATCCTAATGAAATGGAGAACCACTTATAACTAACTCCAGATACAAATTGTGGAAAGATACTTGGCTTACAGTTTAAAGAATGGAAAGGACAT
TTGGAGGGTGCGTGGGGAGCTTAGAGACCCATCCAGAGACTGAAAGCTCTCCTTTCTCCTTTCAACCAGCGCCAGCCATGTGTATATCCAGCTT
GCAAGGACCCCATTTGGTAGATGCCACTGTACCTACAAGTCAGCTCCCTCCTCAAGCTTGCCTCAAGCTTCCCTCTCTTCCCTCTCTACCTCCA
CACTCACCTGCCTTTCTTCCTACCTGCAGTGGCAAGTGCTGCAAGGCTGGTGAGCAGGAGCTGACGCCCCCCAAGCCTTCCTTCCCTGAAGAAT
GTCCATGCCTCAGGCCTCCCAGCTGCAGCTCTGTGTGGCCTTGGGCTGTGTGTTTGAGGCACCCGGCTAGGGGCACTATCGGGTCAAGGAGGAG
CCCAGGCCCAGGAGGTCACTTTGGTCACTTGCCCTGTGTCACCCCAGCCCAAACACACAGCCTGATGGATGAGTGAAGACTGGTAAATCTGGTG
GCTGTCCTTGGGGGAAGCACAGGGCAGCAGGTGTGGCCTTGGTCTCCAGGGGGCTGCGAATTCAGGGTTTTGGGGTGTTTTGGTTAAAACTTGG
TTGGAGGGTGCGTGGGGAGCTTAGAGACCCATCCAGAGACTGAAAGCTCTCCTTTCTCCTTTCAAGCAGCGCCAGGCATGTGTATATCCAGCTT
CATGAGAACATCATGGTCTTTTGTGGGATAGGTGATATTCTGCCAAATAAAGAGGCCCGCCCCTCCACTCCTTTTGCAAACCTGAGCTTTTCCC
CTGCCTGCAGTTGAGCCCAGCATACCTGTGCCTTGGAAAAGCAAGCTATGCCTTCCAAGTGAAATTCGACGTTGTAAAAGGACTGGCTGTCGGG
CTGAAAGTTTGCACAGTGATTCATTGATTTTTAGAGACAGGGTCTTACTCTGTCACCCAGGCTGGAGTGCAGTGGCGTGATCTCGGCTCACTGC
AACCTCCCCCTCCTGGGTTCAAGTCATTCTTGTGCCTCAGCCTCCCAACTAGCTGGGACTGCAAATGTGTGCCACCATGCCCAGCTAATTTATT
TTATTTTATTTTTTATTTTTATTTTATTTTATTTTATTTTTTATATTTTTGGTAGCAATGGGGTTTCACCAAGCTGCCCAGACTGGTCTTGAAC
TCCTGAGCTCTAGTGATCCTCCCGTCTTGGCCTCCCAAAGTGCTGGGATTACAGGCATGTGCCACCATGCCTGGCCTCATTTATCAAACTTTTC
TTTATTGCCTCAGAATAGAAGATACAAAGATGAATAAAATTCTGTCCCTGTCCTCAAACAACTCATTTTCATAGAACATCTCCAGAGAAAATGC
TTTGCATGTCTTCGGTTTTCTCCAAGTAAAACAGCTATTTTTCAAACAATCCATAATTCCAAACAAATGCCATTTCCATGGAAAACTGAGTTCT
ATATTCTAAGGACCTGATTTTCAGTCTGACTTTTGAGGGTAGTCCTGGTGCCAGTAGCTTAGGCCTCAAGTCTGCATTTTGCATGTGTGATGTG
AGTGCGATTGGATCAAGCAATCTGCAAATACAGGCACTTTGCACACAAGTATATACAGTACGCCGACATCTTAATTCAATTCAGCATCGAGGGT
CAGGAAATTATGTGCAAGTTGAAGGATTTGTATCCCGTCCAGAAATCCCCAAATAAATTAATTATACAACTCCACTGTCAAAAATAGTGGCAAA
TGTTTGGGTAAGGAAATGGAAGAGGAGCATAAGCATGAATTTTGGCTGTTAGGTTGTTCCAGTGGAAAACTGAGGAAATCAAAATTAAAGTACT
TCATAAAAAATACTCCAAATGCAGACTACTCCTGGAATCCGAGGGTACGTTAATTTTTATACTTAGTTATCCGGCAATTAAAATTAGACCCGAG
CCATCTATTCTAAAAGGAGAAATCTCCCTGCAACCTTTCAGGATCTTCTGGGATTTCCTGAATTTGCAAAGAGCAGAACCTGAGCCTTCACTGA
CTCTCTTGGTTTTTAAAAGCTGCGATGTTTTTCTTTTATTTTTCCTTTCTCACTCTTTGGGCGTTTCAAGACTCTGGGCACAACTGGCTTTCCT
GCAGACAAACACAAGACTGAAAAATGTTGCGATTGTGTTTCCTAAGCACTCTGAGCCCCCAGGGCAGACGGCTCCTTTGTGTCTGCAGCCTTCC
TTTGCGTGACAAAGGCCAAGTTTCACATCCCCTGAAACTGTCCCCAAAAGAAGAAGATGACTCATGCTTACAGACCTACACTAAGGAGAGTGAC
AGGAACAGAGTCTGCTGCAGAGCCAACTCAGGTAGACCGGGGATACCTGCAAACTAGACCTGAGGAGGCCGAGTCACAACAGGAGTCGGGGCTC
GCCCGTCAGACACGQGGTGTTATAGGAGGATTCTGCTCTGATGTGGCCTGGATGCACTTTTAAATATGTTCTTCACACCTAGGCAAGAAATGAC
CCCGAGCTGCATGTCTTTTTGCTTTGTAATCTCCTTGCCACCCTCAGCTCTTTGGGGAGCAGTGTGCACATTTGAAGCAATCCTGAGGTTTAGC
CACTTCCCAGATGTGGTGAGGAAGTGGAGAGTCCGCTGGGCCATGCGCAACTGCAGGTTCCACCCGTGGCTTTATTTGACCACAATTGGCTGTC
AAACTTCACCAGCCCCAGGGCCGCCAACGTCAAGACTAATCAAGCCTAGACCTGGGGCCTCCCCGCTGACTGGCCCTGGGGAGTGTGTCATGGC
AGCGAGTGTCCAGGAAGACTCACCCCTTGACCTTCTTCCCAACTAAATAAAGCAGTTAGTATTTTGCCCTGGCATTTGGATGGACACACTGGCG
TCGAGGGAGACAACACATGTTGCAGTCAGGAGCACTGGCCTGGCTTGTTTACATAGCATATCAGCCACTCACACTTGTGCCTTACAAAGGTCGC
CAGCTGCCGCGGCAGGAGTGAACTTGAACTTGAAGTTCAAGTTGCGTTTAGGCCTGGTAGCAGCCCCATCACCTGCTGAACACACACACACACA
CACACACACACACACACACACACACACACACGCACAAAACCCCTCCTCATGTCAGACGTCAGTGCCTACTTCATCCCCAGCTCCTTCTTACGGC
ATCTGTCACAGCTCTGGTCTTTGTGGAATCACCTTTATCATGTCTTTAATGATCATTCCACTCACATTTACTGAGACCTTTCCCTGTGCTCTGC
TTGTATATTCACCATTCCATTTAACCTGCAGAACAATGCTACGAGATGGAATGACTGTTATTAACCCCCTTTTACAGATGACAAAGCTGAGGCC
CCAGAGAGGTCAAGTAACTTGCCTGAGGTCACACAGCTAGCAAGTGGCAGAGCGAGGTTTTGAACCTAAGTAGGTTGCCTTGACAGTCCACACT
GAATGAATCACCACTGTGTTTCCACCTTCATGGGATTTTATATGGAATTCTTCTCTCTCACTGCTTCCAAGCCTACATCAAGACAAACCTCATC
TGCCCTGTTGTTTTTTGTTCTCACCTTCTTATTCAGTATGAGTCTCGTTTGGTGCTTCTAATGGTCTTCTAATCGTCCTCCTGCAACCCAAGCC
CTGGCTGGAACTGATGCTGCTGTGGTGGTCAGGGTTCAGTGAGCAGGAGCAAGGACTTGGTGTTTACCCCTTGTTTACCCCTTTCCTTGGCTTC
CTTCCATGCAGGCCACCCTGTGACCCCGTGGTCGCCCCCTCTGGAACCAAGAGCTGCCCACTTCCAGCAGCACAGACAGGATCACTCCTGGGGC
CATCTGTGCACTGACCAAAGCCTCTGCTGGCCTCACCAGACCAACGCCAGTGAGTCCTTCAGGGAGCCTTGGATCCTCCAGGCTGCCAACAGAA
ACACCGGCCCTCTCGGCAGCAGCCCCATCCTTCCACCCCTGCACTGGGTCCTGAAAAGCCCATTTTGGGGCCGTTGCTATTTAGCCAACCTGCC
CTCCCTTGCTCTCCTGTGATTTCTCACTATTCCGGCTGCAGCTCGCTGGGAGAAACACTTGAGAGTCTTTTGTGCTCCACACCCATGTACTTAA
AATACCAGGCCTATACGTCATTTCAATGAGGGAATTTGGCTCATAACACGTGTGCCCCGAGGCACAGATCCTACTTCTGCAGATGCTGGCCAAG
AAGGGCTGTGTCCCAGCCGCCATGGGGTGGGGCCACAGAGAGGGCAGGGCCACGTGGAGGGCAGAGCATGTGGCTCCTGTCAGGTGCGCCCGTT
GCTGACTGCAGCCCACTATCAAGGCTCTGCTGGGTCTCATTGGAAGAATACAAAGGACGTGTAAGGCAGTTTTCGTGCTGTGGAAAAATGTCAC
CTACACCTGTGAAGAAGTCATCACTGTGTCTGTAAGATAATAAGCAAATGTCCTTGTACCCAAAGCTGTAAACAAGAGCCCTTTGTGAGGGAGA
ACCACATGACTGGCCAAAACGCCCCACCTACTAGTGTGTGCTCGGTGGAAATGTCTTGTGACTGTGCTTAAAATGAAGGGCATCATTGGGAGGC
CAAGGTGGGCCGATCACAATGTCAGGAGTTCGAGACCACCATGGCTGACATAGTGAAACCCCATCTCTACTAAAAATACAAAAAATTAGCTGGG
TGTGGTGGTATGCACATGTAATCCCAGCTACTCGGGAGCCTGAGGCAGGAGAATCGCTTGAACCCGCCAGGCAGAGGTTGCAGTGAGCCGAGAT
CACGCCATTGCACTCCAGCCCAGGAGACACTGCAAGACTCCATCTCGAAAAAAAAAAAAAAAAAAAAAAGGATCGGCATGAAATAATGAATTCA
GATAATCACCATTCATTTCACAAATTATCACTTTGATTAAGTTTTACTCCTGATTATATAGGTTAGTCTGTGGTTTACCAGACGGGGTGTCATG
AGTGCTCAACTGCCAGAGGCCCAAACGCACCTCAGTAAGAAAATGCTTTTGAGCTATAACCCAGGTTGAGTACCATTGGTACATTAGAATCACA
GAGTCACATTTTACTTTTTCGGGCAGTGGTAGCTGTGGATAAAGTATCTCCAGTCCACATTTCTTGTACTCGTGCTATTGGCTTTGCGGGTGCA
GATTTATGACCTCAGGGATAATAACCGGAAGAACAGTGAGTAGAAAGCTCAGGGATATGAGTTTTGCTGTATATCAAAGCTGTCTGACTTTGCC
AAAATTACTTAACCTTTCTGGGCCTTAGCTTTGCTACCTATTCATCAAGAACAATAAAATCCATCTTGTTTATTTCATGAGATTGGTGTGAGGA
CCAAATCAAATAGTATATGGGAAGGTGTTTAAAAAGTTGTAAGTTCTACACGACTTAAAAATGCCAGTATTATGAATGCAACCATTCTTTGTTG
TCATTTGGGTAGTCGTGGATAGCGTGGTGGTAGGAGAGCCACTATCGGAGCAAGACTGTTCCAGAGGGTAAAACACACGCGTGCCTGTAGAGCA
GTTGTCACTGGTAGAGCCATGATGGGAGCTCTTACTACATTGCTATTTGTACTGAGTTAAATACTGTTCTCCAAAAAGTGTATGTCCACCTAGA
ACCTTAAAATATGGCTTAAGGTCTTTACACGTGTAATCGAGATAAAGTCATACTGGACTTGGGTGGGCCATAAGTCCAATGACTGATGTCCTTC
TAAGAAGAGGGAGGGGACACCCAGTAGGAAGACAGTCATGTGAAGATGGAGGCAGAGGCTAGAGTGCTGCAGCTGCAAGTCAGGAAACGCCAAG
AAATGCTCGCCACCATCCGAAGCGAGAAAGAGGCAAGGATCCTCCCTAGAGCCCTCAGGGGGAGTGTGGCCCTGCTGCCACCTTGATTTGGGAC
TTCTGACTTCCAGAATTGTGAAAGTCTTAATTTCTATTGTTGTAAGCCACCCAGTTTGTGATAATTTATTACAGCAGCCCCAGGAAACAAATAC
AGTATTTTTATGAAGTCACTGAGCTGCTAGAGTTGTAGGCAACAGAAGAATCACACGTGGACCTGCCCGCCTGCACATGGCTATGGGCATCTCA
GGCCAGCTGCATTCTTGGAAGATGAAATCAGAGAGTTGAAAGGGACATTGCATGCATCCCATGAACCCCCCTCATTTTGCTGATGAGGAAACTG
AGATCTGGAGAGGTAAAATCGTTTGTATTGCATCCCCAAACTTGTAACTCTTTTGCTGAAACAACCACCTCAGTCTCTCTCTCTCTCTCTCTCA
TACACCCACATGCACCCCTAGACCTACTCAGGACTGGGACAATGGCATTATCTATTGTTGTGTCCTCAAGGGACTTTTTTTTTTTTAATTTTAA
ATACCCCCTCTCTCCTAAAGCCCCTTCCCACTTGCACCCTTTCCCACCTTTCTGTGAGGGCTACATGGGTATATAGAAAGGGGTCCCCACCTTC
TGGGAGACTAGGTCTACACAGCCGCAAACTGCATTCAGTATGACACCCTAAATAATCAAAGGTGAAGGATGATTTATGAGGCAGCCCAAGCAGC
CATAAAGCAAAATGTACTCATCAAGGAAGGCTGCCTGGAAAACAAGTGACTGAGTGACTGCCCGTTCCCAGATGCTGAAGGGCAGGAAGACTCG
GGTGAACGGTCCAGCAAGGAGCCTTGGATTGGCGAACTGGCTGGAGGAAGGAAGACCTCAGCATCTCAATGCCATGGCTCATGGGTAGAACTCG
GAGGGTGCACACTCGGAGTCAGGTATGCGGAGGAGAGGGGGTGAGTGAGAAATTACTTGGGGCAGQGTCTTATTAGTCAGAAGATCCTAAAAGC
AGGTTCTGGAGTTCAGTCTTGATGATACAGGTGATAACCTTCATGGGTTCTTGACAGAGAGGGAACAGGCTGACCATGAGGCTTGTAGGACAAT
CTGTTAGTCAGCTCTGGAACATGTGGATGTGGCTGCTCCCCGTCTGTGGCTGTCATTGCTCCTGGATCTGTTCTTGGAAACCCAGAGACTCCCC
AGTGAGATGGGCAGTTGCCCCCACGACCTGCCTCCCTCTGCGGCAGCATCTTCCTCCACATCACATCACATACCCTGCTTGCTGGGCCTGGCCA
AGGCCTCTTCTACCCAGTCCTCTCCTTCAGCTAGATGCCACGGTAGGAAAGCATCCAGAGTGTCGCCTGATAACATCTGAACTGATGTCCTGGG
CTGGCAAATCCCCAAAGGCCAACAAGACTCGTCTCTATGTTCTGGGGACAGCCCAGTTGATGGGAAACATGGATTTGGAGCCAGAGTCTCCTCG
CATCCCTGATCCTCTGCTCCATGGAAGTCACTCCCCAGAAGCATCCTCACCTCGTTTATTCCACAGGTCAGCTGAGACTTTAGTTATAAAGGCA
CAATCGGCAGAGCAGCCTTCATCATCTAATTGTTACTTGCTATTGCTCTTTTTATTATAGACTTTAATACAGATAGAATCCACATCTTTGGGGA
GTGTTCGCTGGAGATTTCTCACGATTACCAATCGTGGCTTGCTGTCGCCAAAGATTATATTTTCATTGAGCATTTTTCTGTGCCCTTCCTTTGT
ATTAAGACACGCATGACATTTGTTTTTCTGTGGCCTTCCTTTGTATTAAGACATGTGTGACAATTGAAAATATTTTCCTTTCATCTGTCTTTGA
TTTACTTTATGCTACATGATTAAGAGGAGAAACTATGTTGATTAAAGAACTACTGTATTGATGTAGGAAGATTGAACATCAGACTTAATCAAAT
GTTAGGGTCCTATTATAGACCCGTGAGAAACAGAGAAGAGAAATAAAGCAGACAACATACACACACACACACACACACACACGCACAGACACAC
CCTGTTGAATACCGTGTGCCAGATAACTGTTTTAACAGGGTTACTCACGGTAAATCATTTAATCTCCCCTAAAACTCTCTAAGGTAGGAAAATT
TGCATGTAACCATCTTCCTGGTAAGGATACTGAGGAACATAGAGGTGTCTAGTGACTTGCCAAAGGTCAGCTAGCCAGATTTATCTTCTGAATC
ACTTTACCAACAAGAAATGTTTTTAGATTAGTAAATCTATGCAATGAAGATTTTCTCACCTTTTATAAATATATGTAAAATGTGTAATGGAAAT
TTTGTGCATTTTTTATTACTAGTACTTATTGAATCTCAGTCTGTCAGTTACATATACTTAAGTCCATTTATGAGTCATCAATTTTATTCTGACT
GATCCCATGAGTACCTCTAATAACATCTCGCATTTTCAAATAATATTTAAAATCAGCCAGACTTCGTCTTTTAAAAATATAGACAGAATGATTC
TAATTTAGCCTGTTTTCAAACTTAGAAATTCTATCTTTCCTGATCTTCAAAGGTACAAAGTAACAAGAGAAAGATGGATATGGTTTCTTCTACT
CTTATTTGCCCTCAATTATAAATAATTGGGAAAGATGGGAGCAGGGAAGTTGGGAACCAGAAGTGGAGAGCTGCCAATCTCACTCTATGGTTTC
CGGAAATCCTGACTTAACAGAAAATAAATTCTAATCTTTCTTGATCTTGTATTGTTTATTGATGATTACATTAAAGCCATATAACTATGTGAAG
TGTTACACTTAGGCAACTATCATAGGTGTGTATTCCAGAATTGAAGCAAAGCCAAAATTCCGGGAGTGTTGTCAAAACTGGTAACTTGTGCTGA
AGGGCTCGACAGCATAAATTAATCATTGGTTATTCAACAGATATGTTCAGGCCACCAACCTCATTCTGTTTTGTTCTCTATCGTCTCCCCACAG
GGAAAAGCTTCACTCTGACCATCACTGTCTTCACAAACCCACCGCAAGTCGCCACCTACCACAGAGCCATCAAAATCACAGTGGATGGGCCCCG
AGAACCTCGAAGTAAGTGCATCCACTTGGGGCTGGTACACCCTCCAGGCTGGTACACCCTCCAGGCTGGTATACTCAGGGACCATGTCTCAGAT
TCCTTGGGTTCAACCTTTCCCCCAGGGGGATGTCACCCCCCCGTAAAGCCAAAAAGTTGCATTGTCAATACTCTCGCTACTCAAAGCTTGTTTC
TGTGCACTGAGCTCTTTTTGAAGCATCCTTTTAGAGGGCAAAAGGAAATTAGGCTGACTGAATCATATGTTAGAACCATTCAGGGCAGCATGAA
ACTAAGCACTGCTTCCTCAATATACACTAAAGTTCAACAGGATCACAAACAAATAGTAAATGGAAGATTGGCCAGCCACAGAGGCAGCCCAAAG
AGGTCTGAGGGTCAGAGTGGACCACAAGGGAGTAATTACCGTCTATGCTGGCCTTTTATTAATTCATGAGGGCCAGAGATGAAAACTATGAAAA
TGACCCTTTTCTTTCTATGGCACAGATCAAAATCTTATTACAGGCATTTTTAAGATAGAGAGTGGGAGGGTAGAAGAATGTCTGGGGAAAACCA
GTAAATATAGAAAGATAGTACCAAAAAATAACTCCTGTGAGGGAAGCTTTTAAAAAAATGAGTGAGGTTGTTTAGTCTGCAGAAAAGATGTCTT
CACAGTGACTTAATGACTATCTTTGAGTAAACACCAGAGTAACGCTCTTTTCCAGAACCACACCCTTCCCCAGGATCTGAGGCTGGGTTACAGT
TCCACGTCTGTGGAACTGCCCAGCACCCCCGCCCAGCATCCACATGTCTCCAAACCGTATCAGGTCCCTGGTCGAAAATTAATATACTCTCTTC
TTGGAGTGAGGGATATTGAAAAACAGGGCTTCCTACTGTCCCCAAAAGCCAAGATGCAGGGAGGTCAGGTTCTAAAATGAAGTCGTTAAGAATT
TGGGCTTTATGGGCAAGCCAGTGGAATTCTTAAGCCTTCAGTGAGCTACAGAGCCTTCCTGAACCTCACTTTCCTCTTCTGTAAAATGGGGATA
ATAATGAGAGCTTCTTTATAAGATCAAGCCAAATGATGCTGTGTGCCTGATGCAGAGAATGAAGGCAGGAAATGTTAGTGATCCCCAGTAGGGC
ATCCCTGCTTTCATCCCTGGCTACTGCTCCAGTCCCCTCTAGATGACCTTCCCTGCATGGTGGTTTCTAGGTGGGGTTTTAAGGTAGTTCTCTG
CAGGCTATCCTGTGATCACGGCAGCTTTTATGGCAGCCTTCCCTGTGGTCCTGGCCACAACCTCATGGCATCTGCGTCACCTTCTGGAACCATT
CCCCAAGCTGCATCAACTTTCCCAAAGTCCTTGAGTGGATGGAGCTCTGCAAATAATCACCATGCCCACCAGGGGCAGGCCACCAGGATATGGT
GTTCCTCCTCTCCTTTTTCCCTTCCTTCCATTTGCTGTGCTCGGTGACTCCCTCCAGATCTGACTGCATTTTTCCCCAGAGGGCCCTCTCAGCT
TTTTCTGATCGAGACTTTCTGGCCATGCCTAGACTTGGGAGACTGTGGGACTTGATAACAGACCCTGATTCTTCTTTATGAGTGAAAAGCAGGC
CATAGACACAGACAGGACCACACAGGTCTAAGGAATGACTGTGAGCTCTTCTTAGGTTTCCAGAGTAGGAATGTCAACCTGGACATTCCTACGT
TAATGTAACCCTGCATTAAACAGAACATAAACACCAAAGCAAGTTTGTTCTCCACAGAGGACCAAAGAGGAAGCAGGCTTGAATTATGGCAAGC
CCCCTGGCTGGGAGGGAGGCAGTTGTTAGGTATAAGAAAATCGACTTTGAGGGTGACTAAACTTAGAGAAATGCTCCTTCAGGAGGCTGTAGAA
CCACTGTATTTAGAACTAGAAGCAACAGCCGTCTCTGGCACAGTTGAAATGCCGACCAGCCTGAAGAAGCCCAAGCCAGGTGACCCTCGGTATA
CCCTCTACTTCTCTTATTTCCTCATGCATAAAGAAGGCTGGGTTTTGCCTCACTGCCAGCATTTCCTGTAACATTCAAAGAAATAACAAAGTTA
TTGAGCTTCAGAAAACAAATGGTCGCGACTCTGACTTTTAAGAATTGGCAGTCAGAGGGGAAAAAAGATGTCTATGCGATTGTAACGGTCTGGC
TGTATATACAGTTTACTCTGCCCCTGCTGTTTTACAACTTAAGAAAACAGTTGTTATATGGAGAAGCACCCTCTGAGCAGACAGAAGGGATTTG
CGCCAAAGAAGCATCCATTTTTACACAGTCTTCCCTGCCAAATGGAATTTGGGGCCTGGGCAAAAACTAAATGCCTGGAATAAGTATAAGTATG
ATATATAGAGGTGCAATAGCCCCAGGTAGAAAGTCTCACATTTTACAAGGGACTTCTAGAAAAAAGCCAAGTGCATGCAGACTCCCAGGTTGAC
TTGGGTAATGCTGACTTTTCTATTTGCCCTGTGAAGCAAGAGGGGCCATCACTGCTAATTTTAGTATCCTGGTTTCTTATGCTTTGAACGTCTT
CATTCAGGGTGGGAACTTTCTATAGTAAGCTTTGCTCACAGTTGCTTTCCAGTGTAACATAAAGAGAGGACACTGCATGTAAATCAGGATGCCC
AGATGTTGCCAGATCTCTGGATGAATAAGACCTCCCGAGTCCCCTCCATGATTATGGTGCAATGAATTCTGGGAAATCCTGGCAAAATGGCCCT
GGCATTGCCAAGGTCAAATTGAATCATTTTGGAAAATTCTCTAGTTTCATAAAATCAAAGACAATGAGAGCTAGCAGGGGCCTGAGAAGAGCCT
TTAGGATCATCACCCCATAGGTAAGGGAAAATAGCCCCAGAAAAATGAAACGGTTTGCCTAGCTTTAAAAGAGATAGTTGATGATGAAGCGTTA
ACAGAATGAGGAGTTCCTGATGTCTACTTCTCTGCTGTCCTTCATTTATCTACCTGTCCATTCATCTGTTCATCTCTCTATCCATACCATACTG
TCTGTACATCATCTATTTCTTTCTTATAGACTCTTTGACCTGCCCTCGGTATCCTCACATTTAAAATGAGGACTTGGCTTATATGATTGGCTGG
CATATTTGGCTCATCTCCAAGACTGTCTATTATAGAAGGGCAAATGGTACTGCCTCATTGCAGGTGTGGAGCCTTTGACTTGAGGTATGCCTGC
AAGCTTAACTAAATAAAGCAGTTATCTGCCATTTGGAGGGACAAACTGCCATTCAACCTGCCATTCCGCTGACTAAGTTAAGGACTGACAATGA
GAAGCTGTGCCACAGCTCCTCTGTTTTTCATGCCGACGGGTAAACTTGATGCATCCCTCCCCTCTTCCAGCGTTTTCAGTGGTGAAGCTGTAGC
CAAAAGTATACGCCAAAGGGAATTTAAAGTGTTTTTCGTTTCAGATGGTTTCTTGCTCTTTTACAGTAATGGACCTCCCCCTTAGAAAATCAAA
ACTTGTTTTTCTCATATTCCATAGGATTTTAAGAAATATCTTAGAGTAATATAGAAATTATTAATTGTTGAAAAATTAACTTTATCATGGAGCA
AGAGCACCATCAAAAGGTATCCTCTGCCTGGAATCGGTTCTTACCAGCACCAAGGTGGGCTCTGTTTTCGGTTAGCACGTAGAGCACTTAGTAG
CTTGTTGATATACTCAGAGTGTCTCCTCCTTAAGCACAAAAGATAGAGCCAAAGGATTTTTCAAGAAAAGGATATTTGACAGTTTTTTCTTTGT
TTGTTTGTTTGTTTTTGAGACAGAGTCTCACTCTGTTGCCCAGGCTGGGGTGCAGTGGCACAATCTCGGCTCACTGCAACCTCTGCCCCACTCC
CAGGTTCAAGCGATTCTCCCGCCTCAGCCTCTGGAGGAGCTGGGACTACAGATGCCCACAACCACTCCCAGCTAATTTTTGTATTTTTAGTAGA
GACGGGGTTTCACCATGTTGGCCAGCCTGGTCTCCAACTCCTGACCTCAAGTGATCTGCCCACCTTCGCTTCCCAAAGTGCTGGGATTGCACGC
ATGAGCTACTACGAATGGCTGAGAGTTGTTTTTTTAATGTATGTTTTATATTTCTAGGATCTAATGAAAAACTCCAGCTCTCAGCTCACAAATC
TGTAATTTAGGTGTCTCTATGCTAATATTGAGATCCCAAAGCATCTTCTCTACAGAGATTTCATTAAATAATTTCAATCCAGGAATTGGTTCAA
TGCCATGGAGGAAGATATTTTGCCAAGGAGAGGTTGAGGAGAGTGAGCAGTGCGGACCCTAACTGACCCGTCTTGGGGCGCTGGTCCTGGTCGT
AATGGATTGGGCAGCCTTTACCTGTCTGGTCAGGTGTTTGTTACGTCTGGAACATTGAGAAACTAAATTAAAAATCAAAAGGTTAATTAACGTA
TTGGCCATTTCTGAGATAACTTCTGTCTGTCCCCAGGTTAAAGGAGTCTTTCACGTGACTGTGTTCTGCTTGAGCTCTTGATTTTTTTGTTTGT
TTGTTTAATTAAATATAGTTATTTCTATTTTAAAAGTGAAAGAGCTGGCTGTAATTTTGGAAAGGTGTAACCCAGCAGATGCCGGGAAGTACAA
ACCTGGAGGGAAGGACAGGCCTCTGCAGCTGCCCCCCTCCTCACAGGCAAGGATGACCATGTCTAGAGCTCACGGGATTCCTTTTGGGTGGAGG
CAGCGTTGCCTCTGCTCTCTGGGCAGCCCGTCCTTGAGGACCACGCTGTTAACGTACACTCTTGTGATGTGGTCTGTTTAAGGCTGCGGCTTCT
AGCATCCATACATCACGTGACATCTGGGATACTGGCTTAGAGGGCAGCTAGGGAGTAAGGTAAAATGTGCAGCTTTCTTTTTTCTTTTTTTTTT
TCTTTTTTTTTTGACGTGAAATCTCACTCTGTTGCCCATGCTGGAGTGCACTGGTGCGATCTTGGCTCACTGCAACCTCCGCCTTCCACGTTCT
AGCGAGTCTCCTGCCTCAGCCTCCTGAGTAGTTGGGATTATAGCCATCCACCACCATGCCCGGCTAATTTTTTAATTTTTTTCATAGAGATGGT
AAGGTGGAGCCATTACTTACAAACTGTAGAGTGCTTCCTGAGGCACTAGCTTTCTTTCTGTCTGATTTTTGTTTTTAGAGGGAGTTATAGTTAA
AATAGGTTGATCAAAGGGCCTAATCTTCACTCAGCTACTTTTTAAAGTACTTGGTTGAGATCATGTCATATGAGTATAATTCTTCTATCACTTT
GAGTGTGTATAGCAAACCTATTATATATCTGAACATGAGAAATAGGATCTTTATATATGGAGAATGTGCTTCAAGTGAAGAAGAGAAATGCATG
AAAAGTACCTATGGGCCAGGCGCAGTGGCTCCCGCCTGTAATCCCAGCACTTTGGGAGGCCAATGCGGGCGGCTCACTTGAGGTCAGGAGTTGG
AGACCAGCCTGGCCAACACAGGAAAACCCCATCTCTACCAGAAAATACAAAAATCGGCCTGGTCTGGTGGTACACGCCTGTAGTCCCAGCTCCT
CAGGAGGCTGAGGCAGGAGAATCGGTTGAACCCAGGAGGCGCAAGTTGCAGTGAGCCCAGATGGTGCCACTGTACTCCAGCCTGGGTGACAGAG
TGAGACCTTGTCTCAAAAAAAAAAAAAAATGAAGGAAGGAAGGGAAGGAAGGGAAGGAACCAACCTGTAAACTGGTGGTGATAATGGACCTAAA
AATAATTGCTCTTAGGATTCAGTAACACCTAGTTCACATTGTTATTTTCTCTTAATCATAAAAATACTCGATAATAGCAATAGCTAACATTAAA
TAGTGTTATTTGCCCAACACTGTTCACAGTGCTTCACGCATATTAATTTATATAATCTTCAAAAGAACAGGCAGGGAAATTGAAGAAAAAATAA
ATCGTATACCTTGCCCAAACTCACGCAACTAGTAAGCCACCATGTAAACTAAGGCGTCCAGATGCTGGCACGCACCGATGCCACCGTCTGTTTT
TAAGAACTGCACTGGCCGCTTTTTGAGCTTCATGGTAATGTAATTCCTCTATTTTTTATTGGGACAGTTTATCAGTAAAGTTCTGGGTCACATA
CAGTTTTCTTCAAGAAAGCAGAGCCCTGTTGCTTTGGCATTCATCATTTTTTTTGTACTGACAGGAGGGAATCACTGTTTTCCCCGGCAGGGCT
GCAGGAAGTACCCTCCCCTCCCACACCTCCCCAGAGTTCATAATACACAGCCATGGCCATGCTCGTCACAGGTGCCACCAGTTGGTTCTGCTTC
TGTCACCAGGGTCCACTTGGGGACCTGGCATGAAGGGGGACCTGACCCCGGGGTGTTGTACAACATAGACCTCTTCTTCCGGTGTTGGCCTTCA
CGAAAGATGGGTAAAGTGGAGTGACCTGCAGAGTAGTGGTCCAAGTCTGGGTCCCCCTTTAACAATGGGTTTCGTGGAGGGCCCGTGTGCACAG
CACGTAGCCGCCGGGGGGATGAAAAGATGTGTCACTCTTTGCTCTTGAATGATTATGAAAATGTCAGATGGTTTTATCGATCTGTGATCTCAGG
ATTGTATTACCAATCCACAATCGCATTGCTCACTGGGAATTGCTTCAAGCGTATTTTCCAGGTAGTGAATGATGAGCTACTTAATTTCCTCTTC
CCTTCAATTCATCAGATTTGGACTTGGACTTTAGTTCTTTCTAGATGCAATCCTGATCCACACACGAATTAGAAAGTAATTCTTCCTCCCCTCC
CACCTAAAGCAGGAGCAAGGCAGAGGCTCAAAGAGGAGGAAAATGCTGTCGTGACTCACATCCCCTCCTCCCCACTTTGAAAGGCATTTCAGGC
CAAGCTGAAAGTTCTGGGGGAACTTCCCCCTGGTACTTTTAATTCCTTCTGTGTTAAGCTCCTCAACTACCTGATTACTTGCCAAAGGCAGTTT
TTAAAGCATTAATAATAATCGTGCCTAAATGTTTCCAGCGAATTTTAGAATCTCTTTCTGTTGAATATTTTTAGTAGTATCAAACCAGTCCAAG
AAGAAGAATTTTACATGCATACAGACTTCCTTGACCCTAGAGTGGAGGTTAAGGTCTGAAAGGGCCCCTGGGGTGAATGGGAACCTAAGAGGAC
CGTGAAGCGAATGGGCTTCTGTCCCAGAAGCGGCAGTAACCCACCTGGTGCAGCTCTGAGTGAGCTGGCCTCGCCTGTGTATTCTTGGTAACTT
TTCCTGTCTTATACAGAAACCACTGAGGTTTTTTGTGTGTGGTTGTTGTTTTGTTTTGTTTTGTTTTGTTTTGTTTTTTGAGACAGAGTCTTGC
TCTTTCGCCCACGCTGGAGTGCAGTGGCGCCATCTCACCTCACTGCAACCTCCACCTCCTGGGTTCAAGCAATTTTCCTGCCTCAGCCTCCCGA
GTAGCTGCGACTACAGGTGTGTGCCACCACGCCCCGCTAATTTTTTGTATTTTTACTAGAGATGGGGTTTCACTGTGTTAGCCAGGATGGTCTC
CATCTCCTGACCTCAGCTCATCCACCCGCCTTGGCCTCCCAAAGTGCTGGGATTAAAGGCATGAGCCACTGTGCTTGGCCACCACTGAGATTTT
CTAAGATCGCATTTGTATTGCTATAGAAAGAAAACAAAATAAGAGTTCCTTCCACCTAATGTGAAAACCCAAAGAGATGATCTAGGCACCTTCT
CAATCCAATGTGGGAGCAGAGAAGAGGGAAGAAACTTACACCATTACATTGAATTTCTCTTTCCGTCTCGACCCTCGCAAAACCATATCACTAA
TTTGAATGCCACACCAGTGAGGTCAGGATCTAAACTAATATATTGCAGTCCTTGTTAGAATTCATTGTATGACATGCCATAAGAAAAAAAAAAC
CCTGTCTGCATTTAGCCTTCTGTTTCTTAAGCTTCAAACATGTAAAAAGTTTTCTCGATCCTGAATTTAGGGACCTGGGTTTTCACACTGGTGC
CACCAGGCCAGTGGGTGTGAACTTGAGCAATTATCTTAAATACTTTCGTCTTCATTTTCCTCTCCTGTTGAACCAGGCAATGGGACGAGATAAT
CTCTAAATTAGTTCTCATGCAAAAAGGGTAACAAAATATGGTCAGCAAAATAAAGCCGTAAGTTCGTTCCCGTAAACTGGCCCCTTAGAGGCCG
AGGCCTCCAGGCCTTCCCTGGGCAGTGCCATCCTAAATCACATCAGCCAAATCCACATGCACTCAGGTGGTACATGAGATAGACGTCGTTTTTT
TGCTGTAAAGTTTTTAAAGGGCTTTCTAATTTCTTCTGAAATTCTCTGGCTGTAAGTGCCTCCCCTGCCTTCTCTGCCACCAACATGTAATCAA
GACTAGGGGTTGAGGTCTCCATTTTGGCACTTGCTAACACTATGAGAGCCGATTCCTGGGGGAGCAGCTGGTCTGACTGAGCCTCTCCAAAACG
GGGACAGTTGGTAGTACCACCGTCACATCACTGGAAGGCTGAATGCACCAGCCTCTGTGGCTTAGAACCATGCCTGGCACACAATACATACTCA
AAAGAGGACAGGTATAATTCAGATTTAGTCTTGAAATCCTTCTGGAAATCAGAAAACTTTAACCAAAAAAGATCTGTGGCTCCTAAATTTAAAA
ATTCATGAAGTTGCCATAATGGTACACTTTTTTTTTTACATTTAATTAAACATTTATAAATTTTGATTTATTTTTCTGGATTTCGTTTTGTGTT
GAGACCCAGTAAAATTTCTTTTCTAGTATAGCATGGGCCCTCGAAACACTCTGGGCACTGTTCCTAAGTCACTAACGGGTGAAATGGCCTTGCC
CCCAAATGTTGCACTTTGTGAAAAAGTCAGAAAGAAAAGTCACGTGTGGGTGACATCAAACATCAGTGCTTAAGATCTAACACATGGGTCCTGT
TCAGTAGAGGCATGACACAGCTGCACAAGTCTCCACACTGTCCTAGAAACGTCACGTGTAATGTAGCAGGTGTCTTGCGGTCGGAATTCTTGTA
CTAGGCAAATGCAGTGTGTCTCCCAAGCGTGCCTCGGATCTCTCCCCGCAGCCAAGCTTTGCAAGCACATAAACATGGCCGGCCACCCACTGAG
TTTCCTAAATCAGTGACCAGCACTGGAGACCCTTCCATGTGTGCAACCCAGCTCCGCCTGCTGCCTGTGTCCTTTGGGGGTCTGATGGGGCAGC
CCCAGTCTGAGATGGTCAGGCCTTGTCATTGGGTGCACGTCTCCCATGGGGATGGATGGACCCACAGCTTTCAGATGGATTGCGGTTGGCAGTC
ACAGCATCCCAGCACATTAAAATACATCAACTCCTGTGCTTTCAGGTAGATTTAGAATTTTTCTCATACCCTAGCCACTTTCCATTTTTCATTT
TGAAAAATTTCTCCTTGAGTTTTCTCAAAGGCTTCAGTTTTTTTTGTTGTTGTTGTTTTTTCCTGTAAGCCATGTAACTAGGAAAGGCATTAGT
AACAATTTGATACACTGGGTCTCATGGAACTCCACTACTACCACCAAAATAATAATAGTAATAATAATAATAATAATTCCAGTTTAGCTTAAAT
AAGTAAAAGCTACCCCCTTACACCATATCTGCATTTAAATTCATTTGAGCTGATAGGCAATTTCTGTGTTCTCCTGTTCATCGCATATTCTTTT
CCTTTAAAGGCAACTTTTAGAGAAGGTTTCCTTTTTTTTGCTATCAAAGTATTAATTATGAAAAGTTGGCAATACAGAAAGGGTAAATTAGGTA
TAATCTATTACCGTACATTATGGCTATATTATCAGACATATCACAAGCCAGTGACATTTAGTTGGATGTGAAATTCCTTTTTTATAGTATGATT
GACACATGGTATATTTTCATCAACTTCTATGTGTAAATTATGCCGTGTCACTGGTAAAATTTGCTGTCATGAATAGCCAAATATTCTGGATTCA
CATTCATAGGTGAAAGCCAAGCTAATATATATATATATAATATATATTATATATATACTATATATTATAATATATACTATATATATAATATATA
TACTATATAATATATTATATATAGTATAATATATTATATATACTATGTATATAGTATATATAATATATTATATATACTATATATAATATATATA
GTATATATAATATATATATAATATATATTATATATTTTATATATAATATATATTATATATATATTATATATATATATATGTACCCAAAGCAAAG
TTCTTTTCTGTTTGCCTTTTCAAAAAGTAACACAATGGAATCAATCTGCCAACTCTCAAGACCCCTAGAAAGTTATTTAAAGGCAGTACATTGG
TTTGGTACTTTCATGATATACATATACTTAGTTTCCATTAAAGCAATTATTGACAAAAACCCAGACTGCTATTGAAATCTTTCAGTGTACTTCC
ATATACTGAAATGTCCAACATTTGATACTTGTTTGATTTTGTATTTGTTTTTGTTCACCATGGCTTAAAAGTCATATTCTGATTATTTAAAATA
AAGAGTAAACATTTGAAATAAGTTCCTAGATACTACATAGATTTATGGCCCTTTGAATATTTTCCTGGTACCACCTTATTTTCACTTACCTTTG
AAGTGGTTGTATGATATTTCCAGTTCATTCATTTGAAAGAGCTAGGAGAAATATGCGGAGCCACGTCCCACGCGCCTCTCGGACACTACTCGCC
ACGCATAGCCCAGTGTTTCAAAAGTGAACCAGGGGGCTGGGCGCGGTAGCTCACGCCTGTAATCCCAGCACTTTGGAAGCCCGAGGTGGGCCGA
TTACCTGAGGTCAGGAGTTCGAGACCAGCCTGGCCAACATGGTGAAACCCCGTCTCTACTAAAAATACAAAAATTAGCCGGGCATGGTGGCAGG
CGCCTATAATCCCAGCTACTCGGGATGCTGAGGCAGGAGAATCACTTGAACTCGAGAGGCAGAGGTTGCTGTGAGCCGACATTGCTCCACTGCA
CTCCAGCCTGGGTGACAGAGTGAGACTCTGTCTCAAAAAATAAAGTGAACCAGGGTGCTCAGGTAGCCTCGGTGAGCGAGAAAGGAGTTTGGAG
CTTCAAGTCTAAAACTGCGTTTCACAGTTTTCCCATCTGTAGAATGGACTGCATGATACCTCTCTTGCTAGGGGATGTGAGGATTAAAAGAGAT
AGCCTGAAAGGCGAGCTGGAGCAGTGGCTCATGGCGAAGCTCCAGAGCTGGCTTCCTGATTCAGCCTGGCCTCCCCTTCGGGATCAGATTAACC
TCCCCACCCTCAGCCTCCTTGGCTATAAAACCAGGAGTATGATATCCCTCTGTTGGGGATTATTGTCCGGATTGAATAAAATAATTCATGTTAG
GGCATAGCACCGTCCTGGGCACAGAAGTGTTCCTTAAATATTAGCTGCTATTATTAAAGCACATGCTCTAGACGGGTAGGCCCCTTGACCATCT
CCCAAAGACCTTATGAGAGGAAACAAATGGAATTCTGTTCAAGTGGGGGCCAAATATTTACCATTGCCAAGTACTTAAAAAAAAAGAAGAAAAA
AAAAAGCTTGGCAGATTTGGCCCTCACAATACAGTACAATAAGGGCTTTTTCTCTTTTCCTTCCATACTACCTATTATTAATTCCAATTACTGC
ATCACTGAACTGGCTTCAACAAATGTATTCCTCATTGAAACATAACCCTGTCAACCATGTTGCCCTACTTCCTTGAGGGAGAGGTGATCTTTTT
CCAATTAAAGGTTTTATCAAAATGCAGTTCTGCTTCTTAACATGAAGCACCTATGCTGTTGTCTCACCTGCAAAGCTCTCAGCATCTAGAAGCT
TCCCCTGGGTCATCTATAAGATGGGAATAATACTATGAGTTCTGCCTACTGCACAGGGTTCTTGAGGACACATTGAGATAATATATATCAATGT
GCTTTTTAAGTAGTCTGTCAATTAGATAATATAAATATAATTAGATAATTAAAAAATAGAAAATCTATTATTGTTTTGCATGTACTATATTAAA
ATCTTAGGGATTTTAAATAAAATTAATTGATTTATTGAAAGTAGATATTATCTCGTCGTGTCTTTCAGGATTGGTGAGAAGAAATTAAAGAGAA
AAAATTTAAACATTTAAATCAGACCCCACTGTGAATCCATACTTTTAGAAATTTTACCTTTTTCCATTCACATATCTTAATCTTTTCTCTACCT
ACAACTAGATACCCTTTTTAAATGTTCGAAACAAAAGAAGTAACCTTGGCAAATAGTTGAGAACTGAGTTTTATATGAATATACTTTTCTCTTG
CAAGACCAAATACAGTTTTTCTTCTAAAACTCTGTTATTCCATTTTCTTTCAATGAAATGCTCACAGAACCAGAAGGCTTGGGAAGAGGCTCAG
AGCACCTAAGAGTTGCTGAGTCCGTATTCCTTTTTTCCCCTCTGGCTTTTTATATATGCTGCTCGCCTGAGATTTCTGGATTTGATTTCAGGGA
GGTGAAATGTTACACCCCTGAGTCTCAGTGCCAGTTTCCCAGGACGAGTCAAAAACTGCAGCTGCTTGGAGGTGAGAATCTTCCAAGGCTCCAG
AGGCCAGCTCGCTGTCCTGTTCATTTGCTGACATGCTGCCGGGAGCACCTTCAGAGAAACCCGTTCTATTCTTCGGGTGATTCAGCCAGTCTCA
AAATAAATAGGTAGCTGAGTCCAGGGAGAAAGAACTGGAAACCACTGAAATTTGAGTCTTGAGGGCTGGTCTGTTCTCGGGAGCTGCTCTGTTG
AACTCTAAAAGGAATCTTGAGCCCTGGGCGAGGGAGTGGCCTGACCTGGTGGAAAGACTGCGGGCCTGCCCGTGGAGTCTATGTCTGGCCCTGC
TAGCTCAGTCAATCTCAGCAGCTCATGTCTCCTCTTAGACCCTCAGATTCCTCATCTACAGAAGGAGAAAGAAGACGAGATTGAATGATTTTTA
AGGTCTTTATCAGCTTCTAAAAGTTTGATTTGATGCTTGTAGGAGCAATTGTTCTTTCAAAGCACCATCTTCTAACCTCAGGAACGAAAGCCCA
GGGGCCCCTGGGATGTCCTGCCAAACTGGCAAGACAAAGATTGTGACTGACAAGGTGGGGGCAGGGCAGGAGAAGGGGGAAGAAGGGAGAATGG
ATCAACCCCAGGCCGGCGAAAGAGATGAATGAAGGTCCACGCCACAGTGACATGCTCTAAGTAGCGGAAATCTTCCTAACTAGAGTTCCCATGA
CTTTGGCAACATTTGAAAAAAAAAAAAAAAAAAAAAGACATCCTTAAACCCACAAAGTACTCAATTGTCCAAGCCCCATTATGGCCAACTTCCC
AAAGCTGGCTGGTCAGAGACCTTGGTGTTAATTCCTCAGCCAACTAAAAAAAGATGGTGTAAGTTCTGTTGACTTAATTGTTGGAGTGTTTCTG
AGTGGGGCCGCCTCCCTCCTCTGCCTCCTCACAGTATTATGGGCTATTCTGCATTACCTGCCCTACCTATCTTCATAATCTAGCCGCAAACAGC
TTTGGTTGACCACACCACTTCCCTATTGAAAGTTAATACTGTTTGACTCATTCTGTGTTACTAACCTGAAGCCAAAGAAAACAAGGCAGAGAAT
AACTGGCTTGTGTGGAGTTTGGAAAGCTCTTGGAGGCCCTGCTTTCAAAATCCTATACAGTAGCTTTACTATATCTCTCCGCTGCAGCTGCTGA
GAAAATGAAGGAAGCAGAAGTGGTTAAAAAAAAAAGTTGGGGGTGGGGAAGAGACTGGGAAGGCAGTGGGGCGGGGTCCCCCTCCGGCTGGGAA
AAGACAGGGTAATCTGCGGCAGTTTATGAGGGCTGTCTCCCTCACCTGAGGTCTTGCTTTCACACACCAGAGTGTTCACACAGAAGAGGGACTG
TTGAAGGAGTTAAAAGGAGAGGAAAGTTCAAAACAGTTGTTGAAAAGGCAGCTCTCCTATTGCCTGCGTAACACAGAGGAGCTGCGAGGCTGGT
CTCACCAGGCCAGGCACCCATAGGCAGAGACTCAAGGTAGACAGGCCAGGGGGAAGTTGTGTACCTTTCGAATCGGGAAAGGATTGAGGAGGGG
GAATGTTGCCGGACAGAAGGCTGTCCTGGGCGTCCATCCTTGCCCTCCATCCCTGTCTCCATCCCTGGCAAGGATGGAACCTTCCCTTCCTTCA
TTTCCTAACTCGCTCAAATGTGGTCACCAAGGTGAATAGCAGCCACTAGTGTCTTGGAATAAACACAACTTTCCCTCCCAATGTTACCTGGCAG
ACAGTGGGACCAGCATCTTCATCACCATGCTGTGCTCTGTGGGAGTCTAGGCAAACAGCCACTTGCCCATTCAGGTAACTTTAGAAGAGGTCTC
CCTCCTCACAGATGCCCTTCTCAGCAGGTGGCTGCTTCTCGCACGTGGACAACAGTGCATAGAACTGAGCCTGATGCCTGAATCAGCCTGTCAT
GACACAAACAACCGGAAGCCTTATTTGTGAGGGAGGGTCAACGTTCTGTTCAAAACAACTTGCTGCGGTTGGCTTTTGTACTAGTGAGTACTCA
GGAGCTGTGAGTGGCCAGGGTACCCTGTCCTTCTGTACCAGCCAGGACCTGCTCAGCCATCTGTCCAAGGGCTTTGCAAGGCCAGCCTAGAACC
TCAGTTGGCGTCTGTGACAGGAGAGAGCGTCAGAGTCAGATGCTGTTCCCCTGCTGTTGGGAAAGTCCCCGAGGCCCAGGGGGCAGGGCTTTTA
GAAATAGGAGGGAATTTCCTTCCCTCTTTTTAGAAGTACAGAGGAGGAGAGATCATCCTCCACACTGCTGGATCAGCATTCCAGAATAAATCTA
GTCCAGGAAAGGGGCTCACTCATTCATTCATTCACTCACTCACTCATTCATTTATTTGTCCACCATTTATGGACGCATCACCCAACCTTGGAAG
GGCCCTGCCTTTACCTCGGTCCTGTCCAAACATGCTCAGTGTCTCTGCCCATTATGTATGAGATCTGCTGCTGCGGGAGGGGAACTGAGATTCC
TGCAGGGAGGTTAGGAGGCCAGTGTGGAGAGCCTCAGTGCTGGTAACATGCTCACGCAAGCAGTGTGTGTGCGCCTCCTGGATCTTCTTCTCCT
GGCCCCCAGGTCTTGCCTGTCTACCCCAGGACTAGCCCTGCTGATGCCTGAACTCCAAAGCCATCTCAGAACCTCCAGCCACCGTTCTGTCAGT
CAGTGCTCATATCTCCATAGTGCGCCACCCGCCACCAATACTTTCTTTCTCTTCTGCAAGTCGCCTTCTCTTTAGAGTCTGTCCCTGGGCAGGA
GCTACTCTGATCAACAAATCCATGTCACTGGTGGTTACCACTCTCTGGTTACTTTTCAGTTACGCTGTAACTCGGGGTTTCCTTGAGATAACAC
CTTAACCTAGGGAGGGTTGCTAATATTTGGGATTATAGGCTGGTAGAAGAAGAAAAACCTTGAATTTGGGAGCTGTCTGCACCCTTCTTAAGAA
ACTGCCTCCACTTCCCCCACAGAGCGCTACCTCTCGTCAAGACCAAAAGCCAGCAGGTGGCTTCTCTGCCCTGAGCTCAAGTTACCTCCTTAGT
CACCAGACAGAAATGGACAGTGAGCCCTGGCGACCGGGGATGGCAGATTTAGATTTTGAGTGCTCTGCTTTTAGGAGAGGCCCGAGTCTCATGT
GAGTGGGCGAAAAACTCCACTGCTCGTGGCAATGAGCCCTGGACTCAGGGAGCAGAGTTTTGTTTGGGTTTTTGTCCCGTGAGTCTTGGGCGCA
TGGTGCAGGGCCGCTGGGGAGGGGCAGGCCTGTGTGCGTCTCTGGCTTGAAGTTGTATTGCTTCTTGATCTTGCCTTGCCGTTGGCCACCCTTT
CCTGTCCATTGACTGTTGCTTGCTACACTTGCTTGGCCCATGTTCCTGAGGGCGATCACAGAACGGTGTGTGTGTGTGAGTCGATGTATGCATG
TGTGATCGATGTATATGTATGTATGTGTATATGTGTGTATGTCAGTATGTGTGTATGTTTGTATATATGTCTCCCCATCTCTGTATATCTCCCT
GTGTGTATATGCATGTCTGTCCCTGTGTGATATATGTATATGTGTGTGTGCGTCTGTATATATGTGTCTGTCCTGGTTTGTGTCTGTATCTGTA
TGTGTGTCTGTGCATGTCTTAATATATGTGTCTGTGTGACGTATGTACATGTGTCTGTGTGTATTTATATGTGTGTATCCCCATGTGTGTTTTA
TATCTGTGTGTGTGTCCAGCTGTCTGTGTATGTCTGTGTCTGTATCTCTTTACATGCATGCCTGTGTTTGTGTGTATATGTCCATGTGTGTCTG
TATGTGTCTTTATACATGTGTGTCCATGTGTATCTATATTTTGTTTTGTTTTGTTTTTTGAGACAGAGTCTCGCTCTGTCGCTCAGGCTGGAGT
GCACTGGCATGATCTTGGCTCATTGCAACTTCTGCCTCCTGCGTTCTAGCAATTCTTCTGCCTCAGCCACTTACTTGTAACTGGGACTACAGGC
ACGTGCCACCATGCCCGGCTACTTTTTGCATTTTTTAGTAGAGATGGGGTTTCACCATACTGGCTAGGCTGCTCTCGAACTCCTGACCTCATGA
TCTGTCCGCCTCAGCCTCCCAAAGTGCTGGGATTACAGGCATGAGCCACCGCGCCCAGCTGCATCTGTATGTTTTTATGTGTATGGCTGTGTCC
GTGTGTATGTTTGTCCATGCATGTCTGTATGTGTGTATGTGTGTGCATGTGTGCCATCTGTGTTTTTGTATGTCTCTCTGTGTGTGCGTCTCAG
AGGGTACTCACTACAAAGAAACAGGAGAAGCTGGTGGACTTTGCTTATGTCAGAGTGCCACTCTCAACTCAGCAAAAGAGCCTTTGACCTATTC
TTTTTGATTTTTCACTATGAAAATAAATGAGTTTTCCTGATTGATTTAATTTTTTTTTTTTTTTTTTTTTTTGCAGACGTCTCCCTCTGTCACC
CAGTCTGGAGTGCAGTGGAGCGATCTTCCCTTACTACAGCCTCTACCTCCTGGGTTCAAGAGATTCTCCTGCCTCAGTCTCCCAAGTAGCTGGG
ACTACAGGTGCGCGCCACCATGCTTGGCTAATTTTTTTATATTTTTAGTGGAGATGGGCTTTCACAATCTTGGCCAGGCTGGTCTTGAACTCCT
GACCTCAAGTGACCCGCCTGTGTCGGCCTCCCAGAGTGCTGGGATGAGCCATCAGGCCCCGACTGATTCAACTTCTAATGAGACAATTCTCATG
AAACTCCTCAGTTATCATATTGTATTTTTTCTCAACAAGAAGTTTTTCTCTACTTACATTTCAGCTGAAAACTTTAATTACAACTTCCTTCACC
TGAAATGATTTCTGCTTTCCCACAACCTAGTGGAGGGTGATTGGACAGCACCAATCATGAAGGACCTGAGTACTCATTCATTCATTCAGCCAAC
ATTAGTGAGCCTCCTAGGCTCCAGTTGGTTTTATAGGTGCTGGAGACATGGCTGTGCAGAAAAAATACAAAATCCCTGTCTTTGTAGACTTTAC
AGTCCCATGGGTGCAGACAGACCCTGGATAACATTAACATGTGCTATGGAGAAAACCTAAGCCAAAGGGCTAGGGACTGGCTGGATGTGGGATA
GTCTGCAACTTAAAAGGGGATCTCCAGGAACTCCTCAGGGAGAAGATGACATTTCAGCAAATACTTGAAGGGTGGGAGGGATCAGCTCCACAGG
GATCTCAGGGAAGAGCTTCCTGAGCAGAGGAAACAGTAAGTGCAAAGGCCCCAGGGCAGTGACACAGGGGCAAGAGCAAGGTGGCCACTGCTGC
CGGAGCAAAGAGGGGAGCTCAACCTATCTGCCTTCTAGTTTCAAGTAGGAGGCATTTGCCTTAGAAAACAGGCTTAAGAAAATGCCACCTGACC
TCAGGTGACATCACCTGTACTTCATGTCACCTGAGAGGCCACTGTAGGACCATGGTTCGGGAAGGCCCAGAGTAGGAAAGCCCCATACACAGGT
GGACCCAGTGAGTGCTTGCTTTCCTGTTACCACCCACAAGAGTACAAAAGCTCTTTCCGACCAAAGGCTCTGCTATTCCTGCTGGTGATTCTCT
GGGGCTAAAGCATCACCCCTCTAGAAATCGCTGAGTGGGTAAAAGGGATTCCTAGTAAGTGGAGGTATCCTAGGGGACTTGCCACGATTCATCC
ACCTCTAAGAGGCTTACGGGCATCAGCTAGAGGAACAGGGGCCTGCACAGGGAGTGTGGGCGGGGTGGGTGACAGGTACTCACCTAAGACTTAT
GTGCCTACTGCCACTGATGGAAAAGGTGGGCATTCAGGGCAGATGTCTCATTGTTTTCCAACCCAGACAAGAAGCTGGCAAATGAGACCCTGGA
TGAGTGTTCCGCAGAGTGGCTTTCTTCCCAGGTGCAGCCTCTGACAACTTCCTAGCAAATTTTAAGGTGTGTTTAATGTCCCACTCCCTCTGGA
CTCACCCTTGCGATGGTAGAGGGGGAGGGGTGAAAGCAGAATGGAATGTCCCAGTCACTACCGTAGCACGAAAGCCTCTGTGAACGCTTAAGGC
AGAGAGGAGGGCACCTTTGAATACTGAAGTCCAAGGTCACTCATAACTAACTGTCCAAAGGGTCACTGATGAAACAGCTGGAGGCAGAGGGAGA
CTGAATTCTTAGGACACCTCGTGCAAAGCTGCTGACCCCCAGCACACACAAAGATAGAGCAGGCCAGGTGGGATCGCAGGCTGGGCGACCTGGT
GGGGATCAAGACAGAGCTCTGAGACCAACCTGACAGCTACACTTGGCAGTGGCTCCCGCAGCCAGGTGTCTGCCTGAAAAAAGACAAAAGGGAA
AACTTTCAAAGTCGTAACCTCATTAGAAGTTGTTCAAGAAACACCGTGCTTAGAACCAGTTGAGTAGATAATGGCAGCAGATGTAATTGTTGTG
CATGCTTTTAGAGTCCCTTGGAGTAATCCTTCTTAGTCTCTTAATTCCAGCCTTCCAGATACGGAGCCTCAGTGATGAAGAGACTTGTTCTTGT
CCACAGCAAAGGTTGGTAGAAAAGCAGATTTACAATGGAGAATTCTTAACGCCTACTCTAGCATTCACGTTTCCCTGGGACCATGTTGTTTTTC
TAGAGGGGAGGAGGATTGTGGCATCTGCATTAACACCCGGTCCTGTGGGCACTCAGAGAACTTAACTGCTGCATTTGTGGAACGGAATAAAGGT
TCCATGTAACCCTTCCCTGCCATTCCCCAAAGTCTTTCTATACATGGCACAGCAGAAATTACTTCCTACTTGAGAATCTGGGGTTCACCTTAGC
AATCAGACTGATTATCATGACAGTGACTCTGACAGAATGTGCCCAGTTATTGTAGGAGACAGAGACGGTCACACACCGGCCTATCTGCAGGGCA
CAGTTTGGGCATTTTCAGCTGCTCTGTCTCTATTGAAGAGTTAAAAAAATGAAAAGACGGCCAAATAGTTATCACCAAAAGGAGGCCGTCAGTC
ATTGCTCATGAACACAGTCTAAACACAGTTCAGGCATATTTAGTTCGCGTGTTTCTCCCCAGCACACAGCAAATCAGAACCACGCAGGAGAAGG
GAAGTAGTAATGCACATTGGAAGCTTGAGTATCAGGAGGAGCTCTCCCTCTCATGCAGATATTCCCAGCGTGCTCCCTGTATCGGCAGCCTCAG
CATCACCTGGGACCTTATTAGAACTCCAAATTCTCAGGCCCTTCACCCTAGACCAACCTACCAAACTAGAATGCCCAGGTAATTCCATTGCCCA
CTCAAGCAGGTGAAACACAGCCTCACAGCCTGCAGGTCACAGTGTGGCTGGGGCTGTCTTCTGATTCTACACACACACTGCGACCAGAAGTGAG
ATGGTTGAGGCAGAATGCAAAAGTTCAAGTGCTTTCGTGTCTCTGAGATCTAAAAGTATGAAGCATTGTGCACTTCTCCACCCTGTTCGCTTTG
AGTTCACAGAAATGTGTATTTCTAGCTGCACTGAGTGTACATCCCGAGTGTGTGTGTCGGTGGGTGTTGAATTTCTAGGCACACTGAGTGTACA
TCCCGAGTGTGTGTGTCGGTGAGTGTTGAATTTCTAGGTGCACTGAGTGTACATATCTGAGTGTGTGTGTCCGTGGGTGTTGAATTTCTAGGTG
CACTGACTGTACATTCCGAGTGTGTGTGTCGGTGGGTGTTGAGAGTGTGTGTGTTTTCAGACCTGCCCTCTTCCTGTAACTGGCCGTGTGAGAT
TGGGCAAATGACATAACCTCTCTGAACCTCACTTCCCACACATTAGTTAAAAACCAAGGCTGATTTCTGTGGCCATTCTCCAGTTCTGAAGTAC
TCCAACCTTGTCGTGTTGTCTTAGCTTAACGATATGAGAAGAAATTGGGGTZGGGCAAAGTGAGGCTACCCATAGTTACGTAGCACTGGACAAT
ATATAAGCATGCATATATAATATGAATTAGAATGTATACTGACATACTATATACCATTATATAGTTTATATTATATAGTATATATAATATACAT
GTGGTATGGTAAATAATATTGAAGAATATTTCCCAACATTAAATTAGCCAGCATATGGTTAGGTTTGCAATTAGGGAGATTTATTTTACCATCT
GCAAGGGGCTTCAGGAAGAGTCACATTCAGTACTGTCACTTTGAAATCCTAATGACCCTGCAACCTAAAGGTTAGACTGTGATACCAGGAAAAG
TAAGCTGTTCTCTACACACATTGATTTCTTTTCCATTGTCATAAAACAGTAGCAAATCAAAGGAAGAAAACCCCATATTTTTATATCCAGATTC
ATGTAGTGAGTATCCAATTGACTGGCCAACATCTTCTGAAATACAGATATCCTTTTAAAATTGACTATATAAAATTCTTATATGCTTTTAGAAG
AACCACAATTTTATACATCTATATACAGAGAGAAATATATCTTTTTGGTATTATGCTTTTGCATAGATTTGGCTCAACCGCTCATCATGACAGT
CTTCTGAGTATATACCTTCCTCATTTTTCTGCTAAGAATCTATCAACAAAACTAGTAAACCCATATCGGAAACATAGACTAATATGTTGTTGAC
TGCCAGAAAATTCTTTATTCTATCTAACCAAAATTTTCCAAGAAACGGTGGCAATTTAACCTTATCTGGTTTCTTTAATGGAAGATCATATATT
ACATTTATGTTACTTACAGCCACACATCACAATGCTGTCTTGAAAAAGGCAGCTCGGTTATCAACGAGATATGCATACCTGCTCAGTTTATTTT
GTATGGCAGAAAAGTGAAAGCTGGTCTCACTATCCGTCACAAAATATCATAACATTTAAGGATGGCCTAATGAGCAGCCAACCCCGAAAACAAT
AGGAATGCCTTTGGAATCAAGTAAAATTTTGCAAACGGCATTGACTTATTTTTATTATATACAATTTTTTCCCCTTTTTTGGATTTTTATGACT
CTGCATACATAATAAAATTCCAAGCAAGTACTTTCATTTTTTTCAAAAATGAGAAAATGGTACTAGAAGAATTTAGCACCTTTTTCAACTCTGC
TTAAGATTAAGATGTCCCAGGGTGAAATCTTGATGTGCCCACTACTTTAAACCACCGCCCTGTAAACATTCACAGTTGATTCCAAACATCCTGA
ACAACCCAAGCTGCCAGCATGCAGQTGTTCAGAGCTCCATCCTGGTTCTACCCAAGGGCTTGACCCAGGGTCGAATTCCCTGTTGCCCTCTAAA
GCCCGGTACTCAGTGAGAAAGAAGAAAAGTGAATTGGATAGTAGACATTTTCCATACTCCTCTATTTAACATTCGGGGGGCAAATGAGCCTTTT
AACTGAACACAGATACAGGAAACTGAAGACATAAAGTATTCATTTTCCCCAGCTTGAAAGTTTATATCCGAAGTTCCTATATTTCATGCAAAAT
ATTGCTATTTGCCACATGAGGTCTGATGGTTTCAGAAAGTAAGAATGAGATGTTCCTTCGATCTAGCTTGTAACTGCATCCAAACCACACCCTG
AATATGATAATGCTTCTCATTTCCCCTGTGCCTTGGTGTCACAGCTCTCCAGCACCATTGTGAGCCTGAGGGTCAAGACCCCTACCAAGGCAAT
AACGTTCCTACTGACTCCCAGGAACACACGTGGGGAGAGTGGAATGGGCTCTTCCCCAATCCTCCAGCATTAAACTCAGCCCTGAGACTCCCAG
GGCTTAGAAAACAGCTTAGAGTGAAGAATTGTTTTCTCTGAGAGTTATGCCTGAACACTTCTGCTAAAGCAGACAGTCATCAGTTAATCTCTAT
AAATGACTACAATTTTGGCAGGTATCAGCTGGTATAGAAATTGCTCACAAGTTAAAGCTCTCATTTCTAAGTATATAGTAATGAGGGGGACTAA
TTAAAATAAAAAACAAAGAAACAAACAAACAAAAAATACCTCACGTTGTGCCTGACCACACGACTGCCTTACCTGGAATGATGATTCCTGTTGG
GTGTCTCCGTGGCACAGGTCCCCACGCTTGCTGGCTAAGAGAGACACAACTGCCAAGAGCTGTTTTTCCAAGCTGTGGCTGTAGACTCTACCAC
GTCAAGTGCTGTGTATTCAGAATCACCTCGCTCACATCACTCTCCTGGGTCACCCACTGTCCTTGACACAGTGTTCTTCAAAAATCCCACTAAG
TGCCTGAGGAATGTGAAGTTTTGAAATGAGCACAAAACCTGCCGGCAGCCTTTGCCGACTGGCATTATTTCTGAGGCAGATAGAGCTCTCCACA
ATCATTGTTCCTGCCTTCTTCTTTACCCCAACTCGTAATGCCAGGCATTAGACTGTGGTAGGAGGTTAAAGGGCTGAGTTATTATGTTTTGAAT
GGTTGTTCCATTGGAATTGTTTGTTTTTCTCCAAGAAAACTGCAGATTTTTCAGTTTGATCATCAGGAAGCCAAGGATCTATGGCAGAGATAAG
AGGAGGGAGGAGCTAAGGAAGGCTTCATCCAGAGGCACTCAGTCACACCATGGCTGACCAACACAGAGCGCTCTAGAAAAAAGACATTTTCATA
CTTCTGAGGGAAAGGGATGATCGCCGTTGCTGCAAGACCTGGCCCCATGGCCTTTCATCCACAAAGCCGGTGCTTAAAATACGCAGCCAAGAAC
AGGCCTCCCACATGCATGCTCAGCCTGCGTGACTCAGGCTGTTTGCGTTCAAGTCTCCTGTTGTGGGCTGGAGCGCTCAATCAGAGTCCAGATT
TCCCTTGGTGACACATGACAAGAGGGGCCATTGCATTTGAACTACATAAATATTATGCTTAAGTGTTTTTCCTCATTTTGGAGCCAAACAGGTC
TCGTTAATGATAAAATCACTGCAATATAGTGGGCCCTTTTTTTCTGGTCTGGAATTTGAGACAATGTCAACTGTGCCAAGGGGCCTGGCAGCAG
GAAGAAATGGCCAGCCATGGAGATTTGCAGCCATCATGCAAGTTATACCATTTAATTTTATAATTGTAGCCATTGGGAGCTGGACTACAGTGCA
CTTCTCGTGGTCTGCTCTTACCCCAGGCTGCGGGAGTGGAATCAAGGGGGCCTCTTTCTAGTCTAGGATTGGGTCAGGGCATGTGAAATAGCAC
TTTATGGGGGCAGCGGGCAGGCTCTTTCTCAGTCTGGCTTTGGGGACATTTGGCAATAGGGAACAGAGGTTGTGCAATCGATCAAGGACTCTTT
ATTGGAACCATAAGGCTGAGGAAGCAGCAGGAGGCCATTGTCTTTAAAAGAGAAATGAATGGCCCAGGCCTCCTGTGGCTACCTCCCTACCTTG
GAGCCTCAGCTTTGCACCACAGCACTGGCTCTGGTTTAAGGACATTTTGAGAAAACCGTAGGCCCCAGTCCCCCATGAGTGGCCTCTGCTTCCT
GCTTCCTGGTGACGGTTGTTTTGGTGAAGAGCATGATGAGGACACTTGCTATCTAAATAGACACTGAGGGGCCCACCATCCCACCCTATATAGA
CACTGAGGGGCCCATCATCCCATCCCACCAGTCCTGAGCCCCCTGGGGAAGCTCACCAGATAGGCTGTAGCTACCTCTGGGCTCCAGTGGGCCT
ATTCTGCTGGGAATATTGGACAAGACACAGGCGAGGCCTTCCTGTCAACTCCTCCTTAGGGGTACATGGGGGAGTCGGCTTCAGCGAAGAAGGA
ATGCTTGTGAAAAGCCTGGGACGACAGGGAGAGGGAGAGGGGCTGAGGGGCTGAGGATGCCCTGCGTGTACCTGGAAATGGGACCTCCCCAGAC
GCTGTGGGTTTGCAGCCACGCCTCATTTCCTCTTGGAAGGGGCCCTACCACTAAGCTGCGGCGCCCACTTTGCCGCCTCTAAAACGTCCCAGTG
GCTGCGTTTGCAGTAAGGAACAGCCGTTCTCATGCCCCTCGGAGGCCACCTTTCCTGGCTGCCACAGCATAGCCCCTGGCATGTGGCCATGTGC
CAACAATTAATGCGCCTCTTTCCCTCCCGGCATCACCACCACCGCCAAGTTCTGTATCTCAGTGAGTTGTGCCCATTGCAAGTGGGTGTAGAGC
GTTGCGGAGGGTGCCAAGGCCCAGACTGGGGGAGCACTCTGTGGCCGAGGCGGTGAAAGGGGGCCCATTCTGCTGAGAGGACAGTGGCCCCAAA
TTCAGCTGGCATATCTCTAGCGAGTCTATGTTGGGGTGAGGGGAGAGAGAGGGGAAAGACAAGAAAAGCCCCACTTTTAGGAAATCCACAATAC
TTTTTCTGATCTCTTCCCTCCCTCCTTCCCTCCCCCCATCCCCTCCCCTCCCTGCTCCCCACAATAGGACATCGGCAGAAACTAGATGATCAGA
CCAAGCCCGGCAGCTTGTCCTTTTCCGAGCGGCTCAGGGAACTGGAGCAGCTGCGGCGCACAGCCATGAGGGTCAGCCCACACCACCCAGCCCC
CACGCCCAACCCTCGTGCCTCCCTCAACCACTCCACTGCCTTTAACCCTCAGCCTCAGAGTCAGATGCAGCGTAAGTACCAGATGGAGCCCACT
GCCCGCCTCTCCTGCACCTGGGCCACCACCCACAACTGGCCCCCATGTGCACACACCTTCCCAGACCAACTGGGGTTTCCCCTTGATGCTCAGA
GAAAGQCCTCGAACCAACAGCACCACCTGGGAGCTGTTGGAAATGCAGAGTCTTGGGCCCCACCCACCCCAGACCCACCGACTCAGATCTGCAT
TGTAACCAGATCCCCACAAGGAAAAGCACTGCTACAGAGGATACGAGGAGCTCTGGGTATGGATATCCATATTGGATAGATAGCTCTCTTGAAT
TTTTTAAGAGTTAGCTTTGCCTATGCTATTTTTTTACCTACCCATTAGCCTTGAAGACACACACCCACACACACACACACACACACGTCAAGCA
AAGTGAAGATGGGATGTTTCAAGTTCTCGCTATTGCCAGATTATTTGTGGGTTTTGTATCTAGTGTTTTTTTATTATTAAGAAATAGTTGAAAT
GTATGGATGTCATCACATCAAGGGTGTTATTTGCAAATCAATAGAGAATGCAGGTCCCCCCAGCCCATGGGCCTAGCTGGCAATTACTAAAGCG
CTGTAACATGCAATAATTGCCTAAGGCCCACTGTGCCAAATTAGATAATACAACAAGTTCATTTACACTGTAGACCAGTGACGTCAATGACTGT
TTGCTCTGTGATACCGTTTCAAAAATCCAAAATGCAGACTTTTCTCTCTGCCATGCAGGATGCAGCTGTGTGTGATATGGTTTACAGTAATATT
TCTTTCTCAAAGTAGCAGGCTTGTTAAGGAAAAGATAAGCAACACATCTGGGGAAAAGGGCAGGTGGCCAGCAATCGATGTGGTAGCTCTTTGC
CCCTCTCGGACAGCAGGAATTAGCTTCCCCAGGCATTTTCTTATGTGAGTTGTATTGTGGGATGTACAAATATCATCGVGTTCCTTTGGGTTTC
CAGGCCAGTAGCTCTCTATTTTGGGTTCAACATGGGTTCTCAGGCCGCGCGCGGTGGCTCACACGTGTAATCCCAGCACTTTGGGAGGCCAAGG
GCGGGCGGATCACCACGTCAGGAGATGGAGACCATCCTGGCTAACATGGTGAAACCCCAACTCTACTAAAAATACAAAAAATTAGGCAGGCATG
GTGGCGGGTGCCTGTAGTCCCAGCTACTCAGGAGGCTGAGGCAGGAGAATGGTGTGAACCCGGGAGGTTGGAGGTTGCAGTAAGCCGAGATTGC
ACCACTGCACTCCAGCCTGGGCAACAGAGCGAGACTCCATCTCAAAAAACAAACAAACAAACAAACAAAAACATGGGTTCTCAAAAGGCATGCC
CACTGTCTCCCATGGAGCTTGACAGCCCATGCCATTAGCTCTCACTGTTAGGTTTCTCGGGAAGGTTCTTCTACTTCATTGGAAAATTTCCAAA
TAATCTTTCCAGAAGATACTATGCACACAGCTAAGTGGCCTGTCTGTGGAGTAACCCTTTTGTAAACAAACAGAAACCTAAAAGCTTGATGTTT
TGGGGGGCTGCCTGTCATCTATAGGTTCATTTAGGTGTATTTAGGAAGACGATCCATGAAACCACTGGTTTCCTGTTACATAATAATCATTAAT
AATGATTTAAAATGTGTACATTGATTTTTTTTAAATTCCAAAATACAAGCGTATATGGTAAATTAAGTCAAATGGTATGTTCAGTGAGCGAGAT
GGGCTTGGGGCAAAACAATACTTTGCTTCCAAAGAGGATACAACTCTCAAGGAGATTCTTTCATCTTGCCTTTAAGGTCATTTAAACTAATTCA
CATAATCTTCAGAAAACTAATTCACATCATCTATTCATGTCTAAAATCAAAAGGAAGACTGTTTTCTTAGTCTCTCGTTGCCTAACTGGCCATT
TATACTACTAGGTTGATTAAGGGATTTGCCTTTTTCTGCTGATATGGGAACAAAAAGTCTTAAGCATTTTTAAAGCCAATGGAAAATTCAGCCA
CATGGGGGAAAATTGATATTGTCACCATTGAGTTGCTCTGTTTCTTGGTGAAGAGTGAATCTAATCTGATTTCCTTCTTCATCAGATATGCCTC
TTTAACAACAAAAACAAAAAAATGGGGGGAAGTTCCACATTGAGTTCTCATCCTCTGAAGCTCCTGGGCAAAAGCATTATTGTGGACCGTGTGA
TGGGCATTCGTCAGCTCTTTGGAGACCTATATGCTTAGTAGAGTATCACGTTTAACACTAAGCATCGCCCCTTTTTTGTTCCTCTTGAAAACTT
TTACTTCTCCAACATTTAAGAAATCATAACTCGCTTTTAGAGTTCCTACGGGCTTGGTTGCTACTCTAAAGAATGTGTGAACTATATTGCTGCT
GTTCTTTCTTTCCAAAATATGAATTTGATATTCAGTACTTCACTTGTAAAATTTTAGGAACAACTTTTAAAAAATAAGTATCCACAATATTTTC
ATGTGAAACAACTTTTCCTTTTCCTTTTGTTCTTTCTTTCCTATAAGAAAACGCTGTTTTACGCTAATCATGTTTTGAGTAGACCCTTGGGCTT
TTTCTCTTGAAATTGGAAAGTTAACAGGTATAATATGCAAGTCTTGTTCAGCCAAGACCTTCAGTTTGTTCTTGACAGTAGGAAAATGCTTATT
TTCCAGGCTCAGCCCTGAAATTTCTATGTTATATTTACGAAGATACTTTAAGAAATACAGCATGTGTTTCTGGCTTTCTTTGAAATGGCAGTGG
TAGTTTTCAGAAAAATATCCAATTTGTCAGAGTAGTTCCACAGTGGTGCTGTCCAGATGCATGAATGTTTTTCAGCTTTACAGAAATGTCAGTA
ACCGGGGGTTTGGCGAGCTTGCCGGGATTTATACAAAGGCTCAGGAACCCTACCTTGCTAGGACTTTGTCAGAAGGGTTATGCCAGCTCCTCTG
ACTCTGTCAGCAAGAAAATACTGATATAGAATAGCACCAATACTTACCTAGAATCACATGTGCTGGAGGGTCACTCAAAATAGACATCTCAAAT
TATCTGAAGCACGGTACAGATTGAGAGGGGGCAAGTTGTCATGCCACTAAACCACTGTTTATTTGTTGGGGTCTTAACTATTAAAGCGCTGAGG
TTTATTTCAACTTCCTATTTTACCAGGTCTTAAACTGGTAAAGCCATTTTGTCATGAAATAGAATAGAAAGCCATTTTGTCATGAGTAGACCCT
TCGGCTACACGTTTCTCCCAGTCAGGACACCATCATTAACTTCTACGATCGAGTCTTAGAATTCTTTTTTAATTTATTTCAAAAGATAGAACAG
GGCAGATTCTAGAGCTAGTGGTACCGATGCCTGTTCAGTCACAACTCCCACCTAGAGATGGGTTTGGGCAACCCGAGTGAGTGATTTTAAAATT
TCACCCCTGATTGACCAAATATGATGTATCACATTTAACGTGTCGTAATTTCCTCCTTTCTGGGAATATGAGGATGGAGTAATAGATGCTGGTA
CAGAAAACTGAAACCTAGATAAACTAGGAAGCCCATTTTGTTGTTCTTCTGCATGCTGGTTGTCATAAGCATGTAGGAAGAAGATTTAACTCTT
TAACTGGACCAGTTGTGAGCTATTTTCACGTGGGTCAGACATTTGTACATATTATTCCATTCCCTCAACAATCCTGTGGTATCATTTATAGACA
GAGAAATCGAAATTCAGAGGTTAAAAATTCCCCAGTATCTCAAAGATTGTAAGTGATGAACTTGGACGCAAACCCAGACCTTCCTTGCTACAAA
GCCAGTGCAACTGGGATGGCCGTTCCCTGGGCGTGCACTCTTGGGTCAAGGATCGATTTACTACAGCGCTGACCAGTGTCGACAACAATCCCAA
TCACCAAAGGAGGGATGGAAAAAGTGTTGGCCTATCCACTCACTTGGCATTCTTGTATTGAACATGTTCTATTATAATTAGATGTTGATAATAA
GAAGAATTTTGGGGCCAGGCTGTGTGGTGGGCACCTTAATAAACTGTCTCCTTTGGTACATGTCCATTTGTTTATAAAGTTTGGGAGAAAAGAA
AACTCAGAATAATGAATCTCTAAATAAGAGTGAAAGAGGGGGTATATGAGCAGGGAGAAGGCTTACCAGCCACTCTGTTTACTTTATTGGGGCC
ATTCCCTTCCTACTTTTGAAGTTCATTGGGACCAAGTGCTTATCATCCAAACCCAGTCAACATCTAATCCACTTTTATGAGTATGCGTGCCTCA
CTTTGAGTGTTCCATATGGCCAAGAGCGGTCCCTGACCTCTCAAATCATCTCTTGATTTTTAGTATTCCAAGTAACTTCTGTCTTGCTAATTAT
TTTCCCCCAAAATTAAAGTTACTTAGCAAGGACTATATTCTGGTGCTGCTGTCTGCAAAACTCTGAGATACTGAAATGACCCTGTTTCTCAGTT
GTATAGAGTTATTTAACTCCGTCTGATTCTCTCTTTATCATCTGGATAGACAAAAGGAAGAAAACCTTTCCACCTTCCTGTAGGAGAAGGAGAT
AAATCCTCTTTCCAGCCTTGGAGGTAAAATATCCAACTGCATTGCATTGCTTTCCTTTCTCTCTCCCTCTCCTTCCCTCTCTTCCTTACTCTTC
TAGCAATTTGAAGTTTCAAAACAAAGGGAGTAGGGACTATTTGATTACCTTGAAAGTGGAGGCTACAATCAAACACCAGAAATCCTCATATGTG
AATCTATAAATGGTCATTTAATGGTTACACAAAGTAACATATTCAGAATGTGAGAAATTAATTTATATAATAGGCTATAAACATGACAGGTGAA
TGATTTCATTTAAAAATAGCTTTTAACAAGGTGTAGTAGGGTATGAGAGCCTTTCCAGGTCTATAGCATTATAATCTTACCCCGACAACAAGCC
TCAATCAGGTGTTCACAGGAATAAATAAAAATAATTAAAGGAAAGAAGCGACAGAGAGAGAAGAAATGAAAACCAGTGGGATGACTGCACAGAT
TCACTGCAGGGCTTGATCTTAGTGATGAAATATTTCTTCTGTAGACTGCATATGTTCTGAACTTTCCCCTTATGCTTCTAAATATGTAGGCCAG
CACACCCATGCACTAAAAGGTTTCATTTGGAAGATTAATAGTTTCAGCAAAGTTGTAGTTGGAGCATGTATTTGATATTGATGGCTACATATCA
GAAGGCTTGAGCTCGGAATCTAATAGCCAAGAAAGATAGCAGATCATAGTGGCTAACAAAGAATGAGGGCTCAACAGGCACACTACCTTAGTTT
CTACCACATTCACTATAGGACTTTTGGCAACTTACTTAACCTTTTAAAGCCTTAGTTTTCTTATCTGCAAAAGACGACTAATAATTATACTAGC
AGATCCTAGGACCACTGTGAAACATAAAGCAGTGGACATTAGAGCCAGCCCATGGTTAACACTCAAAAACTGTTAGCTGTTATGATCAACATCA
ATAATATCAAGTTGTCCTAGTCTTATATATTATAGACTGGGTAATATATAAAGAAAAGTTTATTCGGCTCATGGCTATGGAGGCTGGGAAGTCC
AAGAGCAAGGTGCCATCATCTGCTGAGAGTCATCCCATGGCAGATAGGTGGAAGGGCAGAGAGCATCTGTCAGAGAGCTCACTTTTATGACAAA
GCCACCTCCATGATAACTAACTTACTCCCTCAATGGTAGCATGAATTCATTTGTGAGGATGGAGCCCTTATGACTCAATCACCTCCCAAACGCC
CCACCTCTCAACATTGCCATGATGGCAACCAGGTTTCCAACATATGAACTTTTGAGAAGACACATTCAAACCATAGCATTCCACCTCTGACCTC
CCCAAATTCATGTGATTCTCATTTTAAAAATACATTTATTCCATCCCAGTGGTCCCCAAAGTCTTAACTCTTTCCAGCATTAACTCAAAAGTCG
AAAGTCCAAAGTCTTGTCTAAACCAGATATGGGTGAGATGCAAGCAAACATTTAAAGCAAATTCCATTAGCTTTGTGAAATCAAAAACAAGTCT
ACTATAATACTTCCAAAATATAATGGTGGGACAGACACAAGGTAGAAATTCCTACTCCAAAAGAGAAAAACAGGCAAGAAAATAGGGGTAACTG
GTCCCATATAAGTTCAAAATCCAACAGGGTAAACAATATTAAGTCTTAAAACTCGAGAATAATCTCCTTTGACTCCATGTTCTGCCTTCTCGAT
ACAATGGGGCTAAGACTAGGCCCCCAAGGCCTTGGGCAGCCCTGCCCCTACAGTTTTGCTGGGCTCACCCCAAACTTCACCTCTCTCACGTTGA
AGTCTTGTGTCTGCAGCATTACCAGGCTAGAGTTGCACACTGGTGGCTCTGCAGTTCTGGGTTCTCAGGGATAGCCCCAATTCTGTGTCTCCAT
TAGGCACAGCCTTAGTGGGCACTCTTTGTGGCAGCTTCAACCTCACATTTCTGTTCAACATTGCCCTGCTAGGTACTGTCTGCAGTGGTATTCC
CCTGTGGTAGGTCTTGGCCTGAGCTTCTAGGCAGTCTGTGGCATCCTTCGTAATCTAGGTGGAGGAAGCCATGCTTCCACAGCATGTATTCTGC
ATGCCTACGGAATTAGCACCACATAGAGACCATCAAGGCATACTGCTTGTGCCCTTCAGAATGGCAGCCTAGCTATACCTAGGCCCACTGAAGC
CACAGCTGGGGTGCCCAAGGTGTGCTGCACCAGGATGCAGGAAGCAGAGACTAGAGGCAGCCCTGGGCAGTGAGCCCATGAAGGGTCCCCCAGG
CCTGTCCCCTAAAATCATTCTACCCTCCTAGAGCTCTGGGCCTATGATGGGAGGAGCAACTTGAAGATCTCTGAAATGCTTTTCGGGGTCTTTC
TCCCATTGTTTTGATGAACAGAATCTGGCTTCCTCGCATTCATACTAATCTCTTTGGCAAATGGTTGCTTGGCCACACCCTTAGTACTCTCTTC
CAAATACACTTTCACTCTTTACATGGCCAGGCTGCGAATTTTCCAAATCTTTCCACTCTGCTTCTCTTTTAATTCCAAATTTCATCTTTAAGTC
ATTCTTTTGCTATCACATCTCACTATATGTAGTTAAAAGTAGCCACACAGCAGCCTCAATGCTTTGCTGCTTAAGTATTTCTTCCACAAATATC
CTAGTTCATCCCTCTTAAGTTCTGCATTCCATTAAGTCCTAGGACACAGACACAATTTCACCCAGCTCTTTGCAACCTTATATTTTATAAATAT
GGCCTTTACTCCAGTTTCCAATACCTTGTTCCTCATTTCTATCTGCAGCCTCATCAGAATGGCCTTTACCAGCATTCTACCAGCACTCTGGTCA
CATAACTTAAGTAATCACTTAAGTAATCTCTACGAAGATTTAGACTTCCCCTAGTTCTAAGGTCTTCTTTCAGAGCCCTCACCAGGAATTGCCC
CTAATGGCAGAACCGTTCTTGGCAATGCAGGCTTTTTTCTAGCCTGCTCCTCCAAACTTGTTCAGCCTTCACGGTTATACAGTTCCAAAGCCAC
TTACACACTTTCAGGTATTTGTTGTAGTAACAACCCCACATCTTGGTACCAACTTTCTGTCTTAGTTCTTTTGTTAAATGCCTGAGACTGGGTA
ATTTATAAAGAAAATAAATTTAATTCACAGCTGGGCACACTCGCTCATGCCTGTAATCCCACCACTTTGGGAGGCCAAGGCAGCCACATCACTT
GAGGTCGGGAGTTCGAGAGCAGGCTGGCCAACATGGTGAAACCCCCATCTCTACTAAATACAAGAAAAAAAAAAATTAGCTGGGCATGGTGGCA
CACACCTGAGTCCTAGTTACCCGGGACCCTGAGGCAGGAGAATCGCTTGAGCCGGGGAGGTGGAGGTTGCAGTGAGCTGAGATCATGTTACTGC
ACTCCAGCCTGGGTGACAGAGTGACATTCTGTCTCAAAAAAAAAAAAAAAAAAAAAGAAAGAAAGAAAACAAAAGAAATTTATTTCATATGGTT
CTGGAGGCAGGGAAGTCCAAGAGCATGGTGCTGGCATCTGGTGGGGTCCTTGCTGCATTAACCCAAGGCAGAAAGCAAGGGGCACAAGAAAGCA
TGTGCAAGAGAGCTTGCTTTTATAACAAAGGCACTTCACCAATAACCCACTCACATGATTATGGCATTAATCCATTTATGAGGGCAGAATCCTC
ATGACCCGTTTGCTCCCTGCAAAGGCCTCATCAACACCACCACAGTGGGATCTAAGTTTCCAACATGTGAACTTTTGAGGGACATAATCAAACC
ACAGCACAAGTATATTAGTTTCCTGTGCCTCTTTTAACAAATAACCACAAACTTCGTCGCTTAAAACAACAGAAATGTATTCTCTCTTAGTTCT
GGAGGCCAGAAGTCCAAAATCAAAGTGTTGGCAAGACCATACATTCTCTGAAGCCTCTAGGGGAGGATACTTCCTTATCTCTTCCAGCCACTGG
TGGCATTCCTTGGCTTGTGACTGTATCAGACTGTATCATTCCAACTTCTTCTTCCCTCTTTATATGGCCTCCTTTGTGTCATCTCTTTTGTCTA
ACGATACATGTTACTATATTTAGACCCACCCAGGTAATTCATCATGAACTCAAAATCCTTCACTTAATTATAGCTTCAAAGGCCCTTTTCCAAA
TAAGCTCACATTCACAGTTCTGGGGGTGAGGAAATGGTTCTGGAGCCACCGTTCAAACTGCTGTATCTTTGTACAAAAGACAGGCGACATCAGA
CCATTGACCAGGCACAGCAGGTGAGTCCAGAGATACTCTCCCAAGTCCATCCCCCAGAACAAACATGGTAGACACGTAAATGTGAAACTGAACA
TCTCATGCACAAATGCCCCAATCGTCTTACTATAACCTCAGTCCATCATTTGTTTGAACGCAACATCATAGTATTTTTATTTCCCAGCCAGAAA
AATGTATGATTTTTTTTAGATGAGATCAGATATTTCCTTAATATTTTCTAGAGCACCTATACCGATGGAATCAGAGGTCCTGACAGTGATAGAG
AAAGAGCTCTCTTCCCTGTGTCCCCGGAGCACTCCCAGATGGGGAAACAGGAGGCCCACGTGCCTCTTGTCCTAGCCTCCAAAAGCTCATGACA
GCTTAGATCGTAGGAACAGAAAAATGGGAACAAAAGATGACATGATCACCAAAGCCAGACAGTTGGGATGGACTCAAGAATTTGACCTCCCAAA
GCCAGGCATGTCACTGTTGTTTTGAAGCAAGCTGCCTTTTAAAAAAGTGACTTGATTGCCAGGCATTGTTGACTACACACCCATTTCTAAAGGA
TGGTGATTTACAAATCGCCTGAAGATAGTCTTTCAAATTTGGACATTTAAAAAAGAAACTTTTACTGTAGTCATGAAGTAGTATCAAAGTTTAC
CACAAGTTTGTATTGAGAGAAGAACAAACAATATATGCTAATATGAAAAACAGCTCTACTTAGAAAGCTACTGCTTGGGTTTTCTTATTAGGCA
TAGTTCTCCAGACTGAGTTGGTTTTACTCATCTACATGATTTTTCCTTGCCTTATGGAACAGAAATTCACGCCCACTCGAATTCAGTTATTTTA
GGGCTCTTTAAAATCCAGTATTTGTGATTTAAATCATGCGGAGGGACTTTCATTACCTGTGTCTTTGCTTATTTCTCTCTGGCCCTCAGAACAC
CCCACCCTGACCTTTAGGGGAAATTGACAGAGGCAGAGGGTTTCACCTGCCTCAATTGTCACCAGCCCTGTTACATTCTTCCTTCCAAGCCTTA
GCCTCACAGGGACCTTCTCATTATTGAACAATTGCCTTCAAAGCAGTAGAATAGCCCAATTGTTATGGAGATTAAAGATACCGATTGCAAAACT
CCTGTAAATAAAATCTTCACTGACAAACCCAGTTTCTTTTCATAGGCTTTTCTTCTGTAATCTCTTTCTGGCAGAACATCTCATGTTTTCATGT
TAGAGATTCAGTTACCAACCACAGTAAATAAAGCAAAATAATAATAGAAAAATAGTATAGAACTCACCCTAAAAACAAACATTGGCCAACCATG
TTTATTTTTTGTCTCTCTTTGCACTCCTGAGAATTGATAGGGGAAGAATGTACCACCTCTAATTCAGGTGATTTCTGATTAGCAAGCTATGGAA
AGTCTTCAGGTTGAGTTTTAGCCAGTTCACGCTCCCCTAAATCGCATGGAATAGACTATTTTCTGTTTTAAGAAAAAATAGAACAATGGCACTA
AATGCTTGACTGAATGTTTGACTAAATGTTGACTGAATCATGGATAGGAAAGATTGGCCAGAAAAGACAGCCACTGCCTCCAGACACAGGATGC
CACAATCCTGGGCACCATCATTATTCCATACAACCTTAGGGTCATTTTTAGGGTTTAGAACTTTCTCAATAGGGTTTCAAGATTTTGAAAAGTG
TCTTCCAATTCTGATCTCCGTAGATCCTGTTATGGGAATTAACCTTTTTGGAAGGGGATTCTTGTTCTTAAAGATGAAATTCCCTACTTTCTTT
CCTGGAGGGAATCAGTATGGGCACAGGGAAGAGGAGATGGCGATTCTCACCTGTGTGTCTCATGTCACCTAACACCTATGGGGTGGCATGAAAC
TTGAGCTTTAAAACACACCAGGGGCCAGGCACAGTGQCTCATGCTGGTAATCCCAGCACTTTGQCAGACCCAGGTGGGTCGATCACCTGAGGTC
AGGAGTTCGAGACCAGCCTGCCAACATGGCAAAACCCCGTCTCTACTAAAAATACAAAAATCACCTGGGTGTGGTGGCGGGCACCTGTAATCCC
AGCTACTTGGGAGGCTGAGGCAGGAGAATCCCTTGAACCTGGGAGGCAGAGCTTCCAGTGAGCCGAGATCAGGCCATTCTACTCTAGCCTGGGT
GACAAGAGTGAAACTCCATCTGAAAAAAAAAAAAAAAAAAAAAAAAAAAAAACCCACCAGGAATGGAAATGGTGCTTAATTCCTCTACCGTCTT
GGTTCTTCCACACAATCTGAACTGGGTCACTGAATCTTAGCCTCCGTAAGTCAACATCATCAGTTCCGTTTAATAAGACTTGGGCCACTATAAT
GTCCAGCTCAATCCTCCTGGAAGTATGGACGACACTGCAGGATCCTTCAGTTGATGTCATAAAAGCAAAGCATCCCTAGGGAAGATCTGTGAGT
CAAGCCTCAAGGCCCTCGCTGAGTCAGCGCTAACTTGAGTATCACGAGCTCACCCGTCTGGGACGGTTAAGTCTCCCAGCCCTGTAAATTGCCA
GTTCCTGCTATGGATGATGTCCTCTTTACCTTACGGCTTTATGTGTTCAACCTCAGTCATTCTAAAGCCAGATCCAACACCCAGAGAGCTTATG
CTGTGCCAGTTCCTCTTTATATCACTGGAAGGACTACATATGTCCAGTTGCTTTGGGATTTTTTTAAAGAACATCTCAAGATAAAAAGGGAGGA
AGAAATAATGTGACTAGGGATTGCACTTCCTGGAGTTGCAGGTCACATGAGGGACACGAACATGGTGGTTTGATTAAGTCTCGCGGGATTATAA
CACTGTTGTGGCCACTCTCACTCCATTAGTGCATCTCTCCGCACATATCAGATAGCAAATTATATAATGATAAAGTTATTAAAATATCTGTAAA
AGTCAGCACAAGCTCAACGCCTCGACTTGGCCTTTCTGCCCACTAAGTGGTTTATTTAGCTCTCTCATCTCAAGGCCGQTTAATCTTCATCTAT
ACTTTGTTGTAAATCACCCGCTATGTGGAACAGCCATAACTGCCTGAGTTTTAAGATGCGCTTCTGTTGGTCGTCCAACAAGGCTGGTATCTTA
AAGATGAATGCAGAAGCTTTTGAAGCATGAGACTCACCCACTTCCCCGTTTTAAAATGATAGCCTTTGTTTGTGATTGTGTCTATACCTGGGTT
ATCACAGAGCAGTTATGACACCAACATTATGACAAGGACATTGCCTGGTTCACATGTTTACTGAAGGGAGTAATAAAATAATGATAGCTCCTAT
TTATAGAACAGACCAATGTTGCTGGTTCATTGAATCCCCACCACCAGTCACCTGTAGGTGCATGACATCGTTAGGGGGAAGCATTGCCCCGAAG
GTCCTGCCTGTGGTGTCTGGTTTGTTTTCACGTGACCCACCACTGTTTCCTTTACCACCAAGTCCCAGTCCCTCATCTATCATGTAAGTGATTA
ACCAGGTTGTCTTCAACACTAACATTCTGTCATTCTGGATACTGCAGTTCCCGTGAATTAATGCTCACCCCTAACTAACATTCTCAGGAAAACC
AGTAGGGTTGCCCCAGAGCCCCTCACTCTGCTGCTTATTTGGAAGGAGCCTTTATAGTTCTGCTGTGTGAGAGGCTCTGAGCCACCATATGTTC
CTAAATGAGACAAGCCGTTGCCCAGACATGGATCTGTTTAATTTAATATGATTTACCACAAATTACGAAGCATGACTTCAAAATTGAATTTGTG
CAAAATTACTGATGGCCAATTCAGTGGAAGGGAAGGCAAATCTTGTTATTCCTATTCCAGAATCTCTTCCTGATTTCCTCATTTGATTCTTTCA
CGCCTTGGGGTAGGGGAGGGGAATGCATTCGCGGCTCTATAAAGAATTGTCCTTATTTTCGAACTTTCTCCCTGGTCACACATGGCTCCCTCAG
AGGAAGACACAGCACCCTGGAGATGTTAAGGCAGAAGTCAGTTCTTCTGTCCATCCCTCTCCCCAGCCAGGATAGAGCTATCTTTTCCATCTCA
TCCTCAGAAGAGACTCAGAACAAAGATCACAGCCCTCAGAATGCACGTTATGAGGAAGGCAGAATGTGGGTCTGTAATTCCTCCGTGTCCCTTC
TCCCCCTCTGCAAACCGTCGTAACAATAATAGTTCCTAACACATGGGACAATTGTGAGGATTAAATGAGTTAGCCTGCAGAAATCACTTGATGC
ACAGCACATGGGAAGCATTGTGTCTATTTATTAATCCTTCACAAAGTCTTTGAGATATATTTTTATCAAATATTTAGCATGGATCCCGGTACAC
TTTCAATACTTAATAAATGGTCAATGTTATTCTTTTTCACTATTATTGCTATTTATGTGCTCTTATTGGCGGCATTGTTGTATCACCAGTTAGT
TGTACCCATCGGTCCTCTCCAAGTCACACAGCTACTCTGCGATAATTCCCCCGGTGTCTCCTTATTCCTCGGGAGCCCCAGAGTGGATAAAGGT
ATTGGTGGTTTTAGTGGTATTTTCATTTGAGTTTTGTTTCCTTGGATAAACCCAAACAGGACACCTTCCCATAACCACTGTTCCACAAGACCAA
ATGGTAAACTGTTAAAGTTGAAAGGACCTTAAACTTCTTTGCTCAAAGCCCTATATTTTACTCATGAGACACTCGAGGCCCAGGGAGTTTCAGT
GATTTTCCGAACTAGAGGCAGACCTAACATCCAGGTTTTCTGGCTCCTCGCCCAGTGCTCTTCCCATTCGCTGGTTCGGGTCTGCCTCAGAGGT
AGCCTCAGAACAGTCTCTAGGGTTGGTGTGGATCATTCACTTGGGCACTGAACCATGCTGTACGTCACACTGCCTTTTTCTGGAAATACACCAT
CTCAGGGAGATGCTAGGTCCCATGGTTGGGTTCAGTATCATGTGCTGCTTCTGAGTCTCCATTTTTAAAAGGTTGAATTCGTGCTAAGGAGGAG
TGATGCTTTTTTTTTTTTGAGACGGTGTTTCACTCTTGTCACCCAGGCTCACTGCAACCTCTACCTCCCGGGTTCAGGGGATTCTCCTGCCTCA
GCCTCCCCAGTAGCCGGGATTACAGACTCCGGATTACAGAGTCTGCCACCACCCCCAGCTAATATATATATTTGTATTTTTAGTACAGATGGGG
TTTCAGCATGTTGGCCAGGCTCGTCTCGAACTCCTGACCACAGGTGATCCGCCCGCCTCGGCCTCCCAAAGTGCTGAGATTACAGGCATGAGCC
ACCATGCCTGGCTGGACCAGGGATTCTTAAAGCATGCAACGAAGGGAAGTCCTCCTCAAAGCCACACCTACCCTCCTCAGCCCCACTCAGCAAG
GAAGCGAAATCCTCCTCAAAGCCACGCCCATTCTACTCAGCCCCACCCAGCAAGGAACGGATATCCTCCTCAAACCCATGCCCACCCTCCGCAG
CCCCAGCCGGCACCCCAGCCCTGCTCCCTGTTGGGGACAACCAGCTACAGGAGACCGACAGGTCACTTCCTGAGCACAAAGCCCACGTGGGTAG
CAGGCAAGGGTGAACCCTGACCTCTCCCATTACTTGCATGAATTGGATGCATTCAACAAATGTGAATCGTCAGCCTCTTTGGTGTTTTTAATGA
AGCAGCTACAAAAGGATTTCTTTTAACCAAGTTTCACCGTCCTGTGTGATTTTGAGTAAATACCATCCTGTGCCGATTCCTCCCACAAGCCCCG
CCCTTTAAGCCTGCTTCGGGCCTGTGGCTTGGGCTGGCGGGCCAGAAGCAGGATGGCAAACAGGTGTGCGAGTGTGACAGGGCAGAGGCTGGAG
CCACAGCTGTGGGAATACGAGGCTTTGGCAGGCCGAGGCCAGGAGGGGCGGGAGGCTGGTGCTGACTGATGGTCCTGTCATCCCGGTTCAGGAT
GCCACTGCCAAACTTCATGCCAATTGCTCCCAACAGAGTACACCGCTATGAGAGGGAGAGAGCTGGGACCAGATGAAGGCATCCCTGTGACGGC
CACGTCCTTGTCCATGAATTCAGGGTCAGGGTGACGAATCGCAGGGCCAAAAGCTACCCTGGAATCTCACAGGAATTTGCAGAGACCAAATGCC
CTTCTTTCAGAGGCACCAGAGTGGGGGCTCCCGCATTGACGGGTGGCTTCTGGGCCCCCTCCCTTCACTAAGACTTGGTGACTTGGTAATCCTC
CCTCCTCAATGAAACTTATCTAAGAATTGATTAGGAACACGGACTGGAGCATGGCAGTAACTAGCAGTGCAGACCTGTCATCTCCATCTTCCCC
TCCCATAGCGTGTGGCTCTTGCCATGTCATGACCACACTCCCGGGGGCTCGAGCTCTCCGCTTGCCTCAGCAGTCTGAGAACCACAAGTTTCTA
AAGAACACGTATGAGGAGGAGAGACTTTTCTTGCTCAAAGACATGGATCCACTCACAAACAGCATTCAATGGTGCTCTGAGTTTCCTCCCAACT
GTAATGACCTCCTCTGACTTGGGCACTTCTTACAGTGACTTTGAACTTCTGAGCATTAGAGATGAGTGAATCGCAGAAAACTAGACCCCTTGTT
AGATGGATGAGCCCAGAGAGGTTAAGAGACTTGCCCAGGGTCACACAGATACCACCCATATCAGAGCGCTCAGCTTTCCTTTCCCCTCCTCCCC
AGCTTGGACACATTCCTAGGATTTGGATGTAGCAATGTGAACCGTCCTGAGCAGTCCCTTCAAAACAGCACTTAGGCGAAAGAGGGGCTGTTCC
AACAAGACAGGACAAACACCCGTGTCCCTCTGCACGCTGCTCCACCCACTTTCTCATCTTTATATTACAGAAAAAGAGTCTCAAATAACCCAAA
CAGGCAGGGTATGATCTGCAGACAGTCTGCAGGCATCTGCCCAAGAAGCTGCCGQTCGGCTGGTCCATCCTCCTCTGATTTATGTTGTGTGTGT
TAAGCCTTAAATTGTTGAGTCTCTGGCTGGCTGCAGTGGTATTACTGGAGGGCTGGTGCATGTTTTCGGCTCACAGAGCTGGCTCCGGTACTGG
AGGTGTTGGCCCCGAATCAAGTCCAATCTCACACCTGTCTGAGACAATGAGGGCCTTGTTAGACACATCTCCAGTCGAGGAGGTGCAGGCTGCT
TATTTTTCACATTCAGAACCAGAAGGAGGGGGGTCTGGGACAAGGGGGATGGGAGAAGCCAAGGGCAGACGGGAAATGCTGGCGTCAGCTGCCT
CTCGCCCCCTTTCCCTCTCCTTCTCCCTCCTCCCTTCCCCCGCTCTTATTTAATAAACTTCTCCTTACTTTTGGAAATTAAAAAACAAACAAAC
AATACTAACAGTTGCCCTCTTATGAAGGATAATTTCCTACTGCAGAACAAGGAGCTCGTGGCCTGTTGTAGGATAAATTCCCAGTCATCATGGG
AGTGGAGCAGCCCAGGGGAGGAGTGGGGTGAATAGGCAGGGGCGCAGCCCCCACCCCACCCCAGCACTGAAACTTGAGCTCTTTGCACACTGAG
GGCGCCTGTCAGTGAGAGGTTTTCTCTTCTGGTTTTCCCTCCACTGCTGACATTTCAGTGACAGCCGCAGAAACTAGAGGGGACTTTGTCCCCA
GCTCCATATTATTCATTGATGAAACCGCAAACTGTTCTGTCCTGGTTCAGCCTTCCTGTCCCCTGTGATCAGAGCAGACAGAGCAGGCCACCAG
GACTTACGTCTGCAGACACTTTGCAAATCCAGTTCTCAAGAGGCCCTGACATGAGGCGGCCCCGGGCAGGAGTCCTTCTGGGTACAGGCTGGCA
CCCCTCAAGGGTGATCATCGCTCTGAAGGATCATTACTTAGTCAAACCCACCCTGAAATGACTTTCTATTGCAGGACCACACGACGTGGAGGCC
CATAGTGTAGGAGTCAGGAAAAGAGCTTCCCAGACTTATCAAAAACCACTCTTTACTGCGAGAGCCAACAGTAAGGAGCCTGTGTAGAAGAGCT
AAGAAAATCTCACACATGTAGTGGCCATGTCTTGGGGGCTTGAGTAACTCGACAAATCTCCCAGCTCTGTTTGTGATCACGTAGGCTCTTACCT
GAGCCGGGAGGCATTTAGGTGCCAGCAGTCACTCAAACAAGGAATGGGCAGCCCTATCCTTCTCATCCATACACAACTTATTTAAGCACTAAGC
CCCATTGCTGACTCCTAATTTGGCCTCAGCGACACAACAGGGAAAATCCATATGCTGTTTATTTCATTTGAGACTGAGGACTTACCAGAGATGA
GGTTGCGCCAGTCTGTTTCTTGTAGTATAAATCATTTGTAGCTCAGCCACCCTTGTATCTCTGTATGTACATCAGTTGACAATCCCAGAGAAAC
AAAAGGACAACTTTTCAGAGGCAGCAGAGTGACACACCGTGAATAGCAATGAGCATAGGCAACCTGGACTTCTGGCTACACTCCAGCCTGAGTT
TGAATCCCCTCTATGTGACCTTGAGTGACGTGTGAAGACCCAATGTGCTCACTGTTGATACTTTCCCCTTCAGAGAGTCCAGGGACTGCACTGC
ATAGGTTCCCTTAGCCCTGCACTCCTGGTAGAACCTGTCTGAATATGTCACCTTTGGAGGAAAGTCGCCGAAGAAGCAGGTGTTGCTATTTCAG
CTCAGCTGATGCCAGCGAGCCCTGATACCTATGGACACCATGGAACCACCAGTTTCCTCTCTCCTTCTCTAGCCATGCCTCCCTGCCTTGTTCT
GGGCCACAAGGTGCTCCATTCTTCCGAAGCTCATTCTTGCTCTGAAATGACCAAAAAGTCAAGCCAACCAACAGCAGGGACCCTCGACACTCAG
CTGGGTGAATGCTGCAGATCTTCCTGCTTGATCTCTGAACACCCATGACCAGTCCTGCCCACAAGCTTTGGTCCATGCTGGATGCCTACCCAGA
AACTTCCTTCCTCTCCTCCCCACCACATCCCCGAATCCTGCCATTCTTCAGGGCACCTCACCTGCCCCATCTCCTCCAGAACATCTTTGTCCTC
ACTGAGGCCCAGACTGACTCCCTTCCCGACTCCTGACTGATCTGTTGGTCTCTGTCACTTTGGCATTTCCCCACACATTCCCTTCTGCTGTTAC
CAGATAGGCTGCATGTTTGAGTGACGCTTCACCAACTGTCATGGCTATGATTTTCCACCATCTGTGCTGTAACACAGTAAAAACTCAACCACCA
CCACCGAGATGCCATCCAGGCAGGCAACCCTGAGCGTGCCCCCACCCGCTACACACTCTTCTCCCCAGAGCACATCAGGCTTCTGAGATCAACA
AGTTGGAAGGAGACTTCCACGTGGGCAGGAACGCTCTCTCCTTCCCAGGACCCCCACGAACCTAGCCCAGAGCTGCAGAGAAAGGGGTGCATGA
GTCGTTGAGGAAGGATTTTTCCTTGCTCCTGGGACAGCAAGTCAAAACTGTTTGTTTTAGGTTTTAAGTTAATTTCAGAATATCCTCCCCTAAA
CAATTTCTTTCCTTACATAGCACCAACTCTCTGCTGGGGCCCTTTGGCTGTTTCCTTTCTCCATTCTTTCCTTCTCCTTTCCCAGATCCCAGCT
GGGAACCTGGGGGGAGAGCCTGGCTGGCACCACCTGCCCTTTCTTGGGCCATTTCCCTTCTTGTTTGTGATGAGGACGAGCCTAGGAAGTCTCC
ATGCTTCTTGGCTTTCTGGCCCTCATCACTTTCACAGCCTTCTGCTAACTAAGCTAGTGAGCCCCCCTGCCCTTTCCCATTCCCTCTCTGAGGC
CAAACTCTCTCATCCCAGCTTCTTTCTTTTCATCTTCCTTCCTCTAAAGACTGCTCAGCCTCATCGGAGGCTGCCTTCTGAATCCTGACCCTGC
TTTCCACATTTTGTAAGACATCTCGGCCCCAGAGTAACAGTGCATGATTTACCTACCACTTCCTTGGATCCCAACCCCTACTCACTGCTAGCTC
CTGGCAGTGGCGTTCTTCCTCCTTCCTTGGTGTGCAGATGTGCCCCTGTGTGGCCTCCTTCTCTAAAAGCATTCTACATTGTTCTTGGTTCCAG
CACTTCTGAAACCCATCCTTCCAAGTTTACTCTTTTTCTTGCTATCCCTCGTATTTTCCCACTCCTCATGGAAGCTTCTTTCCCACACCCACCC
TGTGCCCTATGGCGGCCGCTTCAGGACCCCCAACCCCAGCCCTGGAGCGTTTCAGTGCTGCCATCCTGCTGGCTTCACTTCGTGCTTCCTCCAC
AGCAACTACAAAAGCCAAGGAACCTTCCCCAGTCCCTCCCCTCCCCACCATTCTCCTAGCAGAATTACATTTTAATTTTCAGCTGAATGCATGA
AGAACCATTCCAACACCTCTGTCTCACCCACAGTTCTCTAAAACACACAAACAAAAAAAAGTCTGGGTCAGCAGAGGGGAGACCATGGTCACTC
TCCTTGTCAACCTTCCCTTTGCCCATTCTTTGTTTTCTCTTCCCTCCACCTCTGTTCCTCTGAAACCTCTTTTCTTCAAATCAAGGGGAAGGTA
ATTCAGAGGTGCTGTTGAGACTGGTTTGCTTTTTAATTTTTTTTTTCAAAGAAGACGGGAAGTTCCTGTTTTTTGGAAAGGTTGTTCATTTCCA
AAGAAGTTACACAGCCAGTCAGCTATAGGATGATTCCTGGCTGCATTTTTTCGGGGTAGTACACAATACAAAAAAATAAGTCAATGAGACAGAG
AGAGTCAGTCAGTCAACACAAAGGGAGATGTTATAATAGGCTTTTGTTGGTACTTGCATTTTCTTGTTGAAAAACAGAGCAAAGACCCCGAGCT
GCTGAGGTGTGGACAGAAGCCTGATGTTATCAGGCCCCCAGAAATCCTGCCTGCAGTCCAGTGGCACGCAGGATCCAGAACTGGAAAAGACGCA
GGCAACTGGTCCTGCTCAGCACAAACGGTGCTTTTAGTCTTTCGTAAACAGCCTGTGCCCCACGGCTCAAATCCTTCAAAAGTTTGCCTGGGTA
ATTGCATTTCATTGCTGTCTGGCATGTGCTCATCAGTCTAATCTGGAGGTTCAGACAGCCAGGCCAAAGCTTGCGAGACTGGAGGAGAGCGAGC
CTGTGAATTTAATCCACTTGAAACACAGAATAATACAACTGCATCTAACTCATTATTTTAAGTGATGCTAGTCCAAAAGGGGATGGTGCTTTCC
ATAAAAGCATTTAAAATCAGCACGCTGCAGTTGCAGCCACTTGGCAGTTTAAGGCCATTAGAAGAAAAGGCCCACACAGGTGACAGTGTGATCC
CTGTCGCCGTCTGCTTGTCCCTGAAAGCCTTCCTCCTCCCCACGACCACCTCAAAACACAGAAGGCAAAAGGAATGGTAACTTCCATCCCTAAT
TTTGACTTTGCGTTATTTGTACATTTACACCAACAGACACCAACTTTTATTTGAGATTTCCGGTCATTTTGGCATCGTTTCAGGGTGGAGAGAA
GACATAAATGAAGTTAGGACTTCCCACTCCATCTCACCAAGCTCAGGATCTCACAGAGCTATAAGCAGGCAAACGTGTTCCCCACCAGAACCAT
CTGCACAATGTGCTTTCCAGTGACTTCTTTTTTTTTGAGGTTTACCTAGGTCTTTTTGTTCTCTCAGTACATGGTAACTAGATTGATGGCAGGG
TTATAGTTTCTAACTATCATGTAGTTAAAGCACTAGTCTACAAAGAGCCACAAGGTCTGTCCCTGCTCTGTTGCTATCTGCTGTGGAGAATAGG
GGGAGTCCCTTCACCATTCCGCACTGCAGCTTTCTCTGAGATGGGGCTGGCATGGTTGTCTCTGCTGTCTCGGACGTTGCTTTCTGCTCTATCA
TTCCATAAGACATTAGAATGAAACCTTAACTAATGTTGACGGTGATTTGCGTCATTATCTAGTTACATGTGACTCATGCCCAGGAAGCCCAGGA
GAGGCAAGTGCTACCCTGTACCCTCCCAGATGGCAAAGCCGACGGTCAGCTCAGGAGCAGTCTTGTTGGTAGTTCACACCTCCAGCTCACCCAG
GGCTCAACATGCCAGCTCTAAGTCTGGGTGCCAGGCCATGAGACTGAGAGAGCAGTCGCCTTAAACCTTACATCGGGATGGAGTTTCCCCCTGG
GTGCATCATGACTGCAGCCACCCAGGATTCTCACAAGGGCTCCAGAAAGTGCTCACCACACACCTCATCTCCTCATACCCCTCAGTTCATTTGT
ACTGTGCCCAGGGGACAATGCTGTGTTAGCTTTCCCCGATCCTGAAGAGCACCTCTAGAAGTCACATCTTCCGTCTTGTCATCATGGTAGCTGA
AACCATTGTGGCAGTGTGTGCTTTCCCTGAGCAAGGTTTTCTTTGACACTTTAGGGCACGCTTGATCTTGTGGGCAGGATCATTCTCTGTTGTA
GGGGCCATCCTGTGCATTGTAGGATGTTGAGCAGCATTCCTGGCCTCCACGTACTAGATGACAGTAGCACTCCCCCTTCCTCAGTTGTGGCAAC
CAAAAATGTCTCCAGACATTGCCAGAAATCCCCTGGAGGAGAAATCACCCGTTTGATGATCGCTATTTAAGAGTAATTGGGAAATTCACAAGGA
TCTTCTAGTCAATATACACAGGATCTCAATCCCTGAAAAAAATGTGACTTACTTAGCTATCTAAACTTGGTAGTAAGTCAATTTTGACCCTTCA
GTTCTGTAGGTCCTAGCATTCCTGTCTTCCATAGGTCATCCCTCTTGTTGACCAAGAGTTTCATAGTTGTCTGCTATCTCAACCTCTACATTTA
ATTTTTTTAAAAAAAATTACTCCATTTTAGCCCAAGTATATGGCTTCTATGAGAAAGCCTTCCTTGGCCTTGTAAATCAAAGCAGTTCTCTGGA
CGGAGGTTTCCCACTGCTGGGCTCAGTATCATCTTTCTCAGGGTGACCTCATCTATTCAACTATGAAGGTTGTATTTGAAATGCCATTTACTTT
CTCTAGTCAATAAAACGAAGCTGTGGATCTGTAGATCATCAGAGGTCTGCTTATTACCAAGCGGTTTTGTGTGTGTCATTTTTTAAATCGAGAT
CTGTGTTGGAGTTTAAAAGAATTCTGGCAGATTTCCATTTGCCTTTCTGAATCAGAGTTTGGGGTCAGCGAGTGTAGATTCCCCCTAGATGAAT
CTGACTTTATTAGTTTGTGTCCTTTGTTCAGAGCACCAGGGATGAGCTTATGAAAGCACAAATGGCTCTTATCTTCAAGTGTTTCCTTTATGCT
GCAAATTCCACCTCACCAACCTGTGTTATTAACCCACTGCAATCCCAATTAGTTCACATCAAGGTCAACTCTTTGGGGTGTGCAAAATGGCTGC
AAACTTAACTGAACAAATTCCCCTTGTGTAGCTCTCACATGAAGGTGGGGGAGAAGACTGCAGCAGGGGAACTTAGAAGAAAGAGGGAGTTTTC
TGATACCATAGAAGAAAGTGATAGTGATTCCCCTTGGCTCACAAGCCAAAGAAATCCAATTATTCCAAATAATTCAAAACTTGCATAGGAACTT
GTCACCAAATGAGGGAACATTTTAGCCTCTTATTCACTCTGTTGCTTGGTGGCAAATATTTAAGAAATTTCAAAAAATAGAGAGGTGCAAGAGA
GCTATTTCTCAGGGGCATGGAGGTTTCTTGGGGGCATTTCTCCCGGGTATAGAGGGCTGTTTCTTGGAGGCTATTTCTGTGCATGGAGAAGCCT
TGAGTTTCAGAGGTATAATAAACACTACTCCTCCAGAAATATGTCTGTGAAAAATAAGCTGGAGCGGGTGGGTCTGCAGGACACTGTGTTTAGG
AATGAAGGCTGCCTCTCCTGCCATCTCTCAGGAGCTCCCATCAGAACAGACAGTAAAGACAGGAATGGCATGTCTCCAGTTGTGGGGCAAGGCC
CCTCCTAGTGTGAAGAAAATATACTTCCTGGATCTATCATTATCTCTAGCATATCAGAGGGGGGAATAAAAACAACTGCGGTGGCAAGGCCCTG
CTGAAAGAGAAACTCATTGTTCTGCACATTCAGAGACTTCCTAGTTGTAAAGCCGTTCAGAGCTCTTGGAGGTGAAGGGGCAGCCAGGGAATCA
CATAGAGTGAAAGACCTGTGTCCAGCGGCCAGGTCAGAGGGCGTGTAGAAGACGACATGAAGCATTCCCACAGGGCAGTTCCCTGAGGTTCTCT
CCTCCAGCTCTTGCTCCAAGGAATTCTAGAAGCCTTGCCCTGATGTGTGCGAAAGGAAAACAAGGTGAACAGGATGCAGGTAGGAAAAGAAGAG
CTGTGACAAGGTAGTCAGATGGGAGGACTGCATGAGAAAAACAGAGGAAGAGAGCACAGAAGCAGCCCTTTGATTTCACTCGCGTTTATTGAAG
GGGACGAGGCACTTCCACTTGGGGAATTCTACTTCCCTTTCTCAGGATATCCTTCAAATTGCGAGCATGGAATGGAAGCTCTTAAAGAAAGAAC
GGTTGCCATTCATTGTGGQTCACACTTCACAAGACAAAGAGCAGTGAATCCTCGATTTGTAAAATGCAGCTTTCAGAATCTGTGTTGTGGCTGG
CACGGTGCAACACTGCTGTGAGGCCCTGACGCAGCTGTGTTCTGCAGGGTGGCTATGGTCCTCCTTGTGAAGCAGGAGCCTGCTGCTCTGCAGG
AGGAAGGGCTTATGTTGCATCCTAGCGGTGCATGCTACCCCGCTGGAATAGTGCACCTTGGAACTCTGGCTGCCTAAGCAAGGTCTCATTTCTG
GTGGCTTTGTGAGACCAAGCCTCTCCCTCTTCTGTTACCTGGAGCAACAACCAGCTAAGCCAACAGTACTCTCCAGACACTGTTATCCTTTCCT
GGAAGGGCAGGGGAGAGAAGACTGTTTCCTGCCTTCAAGGTGCCAGCTACTGCATTGACAATATCCGGCAGAGGGGCACATTTCACCCTCCCAG
GAATCTAAGGGACAGATGCAATAACATCTCCTTATGGGGGGAAACTGAGTCTCCAAGGCATTAAGTTACTTGCTTCAGCACACTGTGAGTGAGG
GGCCAAGCTAGGGTCTCTGTCCTTACCTCTCAGACTGCAGAACTATGCCCTTATTGTATCCTTACTGAAGCCCTTTTGGCTTTTAGAGAGACAG
CTCTGGGATGAGGTTCCCAAATCCTGAAAATCTTTZGGGCCAGAACAAACAAAAGCATCTTTATGTTAAGCCATATTTCATGTTTATTGTTTTG
AATTCTCCTTTTCCCCCATTCATATGAGTTTTTCTTCTGATTTTATTAGAATGCCATGCCTCAGAGTTTGCTGCTTAAAACCAGAATCCCTGGC
ATAAAATCCAATAAGCCTGCCTTAGGCCCCATGTCATATGGAAGCAGAAGACAACAGAGACTGCTTGCTGGGCTTCAAGCCACTCTAGAATTTT
TCAAACAGTTCTAACATTTTACAACATCAAAAAAGTGCCAAAGTAAAAACTAAGGCTGCAGCTAGGAGAATGCCCACTGAGAAACCCGTGGTTG
GGTTTGTCTAGAGAGGAAGGCTTTTGAGATCACTGCTCCATGCCCCCTCGCCCTCTCCCACCAGAGGTCTGGCTCAGGGACAGCACTTGGGCAC
AGAGAGCTGGGGCAGTGGCAGAGATGGATGCGGTAGTCACCAGACGAAGCCCAGGCTGCAAACTGGCATCACACACACCTCTCTCGAACAGATC
TCCATCTGAGCTGGGCTCAAAAGCATCGTATTCTCCAATATCGACAACTCATAGGTTAGGGGGTTCATCATTTTGTAGCCTCTGCAGTCCCAGA
CGTAAAGTCACTTCTTTTTTTTTCTTGCGTGCTGACACCCTAAGGCATTACATCGACCCTGGCAAATCTCAGCCATGTTACTTAACATGATCTG
CCCCAGCGACAGCTCTTAACTGTATCTGTTTACCCAGAGATATCACAGGTGCCTCTCTACGAAATCCCACCCGCCCCTCATCACCACAGTCGAC
ATTGGCTGTAAAGCACGGCCTTCCATGCCCAGCCTGGACTGCAGGTTGGAGATGACAGTCTCCCAACCCAGGCCTTCCAAAGCATAGACTATCG
GCGTGCACAATCCTCTTGATATCAGGTGCCACCTCAATGGAGTGTTCTTCAGAAAATTCTGTTTCTTTAGCTGTGTGCAGTCCTGGGAGATGCT
GTGCCTCTTCTGCTTGAAGCTTCCCAGCTCCCACTTGAGGTGTCAGTGATTTGTTTTACTGGAGTGAGTATCCTCATTCTCCACCAAGGGTCCA
GTCTCAGGATGGAGGCTGCTTGAGATATCCCAGCCCTCAACACAATATTTCTGGCTCATGTTTTTCAAGGAACTAAGCGGGGCAAAGGTGCCAG
AGGAGTAGAAGGGAGCAGAAAGTTGTCTTTACCCTCCTGGAGAAGAAGGACATGGAGGAGTCGAAGGAAATAAATAGGGTGGCCATAGAAGAAT
CTAAACATCCATGATGTGCTGGTGTTGCAGGAATGTACCCAACCTGTCTGTAGAGCTCCTTCAGGCCTGGAAAGTTGTATACGGGGGGCAGAGG
TGCAGAAAGTGCACAGTGCACAAGATCCTTATGGAAAAGATGTCTGCAACAAATGTTTATTTAACAAAGTACAGACAAAGAATCTCTCTGCAAG
GGAGGAGGCACCAGAAACCAGAAGGTGCCTTCTGTTCCCTCTGAACTATGGTCCCTCCAGCTGTGTGCACTGAAGGCCACTCTCCCTCTGCCTC
AGGGACACGATGCCAACTGAGAATGAGACATGTTCTAAAAACACCCATCTTTTCTGGAAGCTAGTGACCTATCCTTGAACCCTCCCTCCAAAAG
CACTCTGCCTAAATACGTAGCCCTTTCCCACACGTGTCTCAGACTCATCTGGCTGAGCGTAGCAGCCTCGTGGTGCAGGGTCAACTGTTTCCCC
TGGGAACCGTCTGACAGTGCTAATGAGCAATTGCATTTTGCGTTTATAGAGCACCTTTCATCTGTGGATCTCAAAGCTGCCCCACAAACATTAA
TTAACTCTCACACCTGTGAGGCAAGTGAGCCTGGTTACCCCCATTTTTAGAGGTGAGGAAACAGAGGTTTGAAAAGAAAAGGACTCCAGGGTGA
ACCAGCAGGGTTGGGGGCGGCCTGATGTGAGGAACCAGCATTCTTGATTCACACGGCCCTGACCACAAAGCCACAAAGCTTCCCCGGCGAGGTG
ATGAATACGGGTCCCGGAAGCAGGGAGTGGTGGAGAGGCGGACACAGGGCTCCCTTCTTCCTTCCCGCAGGCAGCCTGCCACCTCCCAGGCTGG
CAGCTCGGCAGTGAGGATCGGATCCCTCAAAACCTGAGGCCTTTAAAACAGCATACCCAGGCAGGGTTCTGCCCCGGCTTGGTCTGTCTGCTTC
TCTTCAAAGTAATTGCTGGAACAACGAATGCATCTGAGCTACACATGACTAACCAAGATGTCTGCAGCCGGCCAGAGACGAACGGTTGGCAAAT
CCTGGAGCTGTTTCACAACCTCCCTTTTTTCCAGGATCCAGAGCTGGTGCTGACTGACTCATGTTATCATGGGATTTCAATCATAAATAGCGGG
TGTGCTGACCCGGTGTCTGCTACCTGGGGGTACCTGTAGTAGGAATAGCTGACTGCTCTTCTTACTTGTGCTGTGCCGGAGCTTTGCTCCCTGC
TGCAGAGGCCAGAGGAAACACTGCTTCTCAAAGACAGTGGAACTTTCAGGGAAATGTCCCTTTCAGAGCAGAGTCACCCACCCCCAGGGACTCT
GAAAGGCCCCTGACATCACACACCTCTGACAGATGTGATGCTGGGAAGCATCTGGGGTCACCCCCTTTGTCTCCAAGGGGAGCCTAGGCCTTTC
TTCCCAGGGGTCCCACACAGTGAGATGCAAACCACCACTGGGGCTCCCCCTAACACATCACCCTGGAAACTGACTCACATCTCTGAGTCCTGAG
TCACATCCTGTTGTGTGTTCTCAGCTCTCCAAGACGGCATTACACCAGCTCCCCATGACTGAGGTGAATCTGGAGGGAACCCTGGGAACGTCCC
TACCTTCCTCCAGGATGAAGGAGGGAAAAAATTCCTCCAGGGAAATAACCAGGGCTGCCCCTAGGGTTTATATGTTCACCAAGCTGATTTGCCT
TTTTCAAAAATAGATGGTAGAACCCTGTGGTCTATGTGACTTTTATTTTTAAATAGCTCTGAGAGATGACTGAAAGACCTGGCGTTTTAAAGAT
GTCAGCCACACAATCAAGGAAGGGGCTTTCTAACTATAACCTTCTCCAAGCCCAGGATGAAGGGTGCCACCGCTCAAGGGGTGCTGTTGGAAAC
CCAGCTTCTCAGGGTGGGTGTTTAAAAGACCCTAGAGTGGACAGTCAGAGGAGGGCCGGGAGGGGTCTCTATCCATCTTCTCCCAGCGCCTGTG
GGCAGCACGAGGACAAAGAGGGATGTTTTGAACTTTTCAAAGAACAAGATATTTTCTTCTATTGATTTTGTCTATTATTTTCCTGTAACTTGTT
TCACTGGTTCCTAGTCTAATTTTTATTATTTCTTCTCTTCTGCTTGCTTGAGGTCTGTATTGCTATTTTCTCCAGTCTCCTGAGGTGGAAGCTT
CAGTGACTCATTCTGGATCTTTCTTTTCTAATATATGTATTCAATGCTATAAATTTCCCTCTAAGTACTGTTCTATCTGCATCCAAAAATTGTA
ATAAGTTGTATTTTCATTTAGTTCAAAACATTTTTTAATTTCTCTTCAGACTTTTTATTTGACTCATGTCTAATGTAGAAGTATGTTGGTTTGT
CTCCAAATATTTGGAGATTTTCCAGTTATCTATTATTGCCTTTTTAATTTAAATCCATGTGGTCTGAGAAAATACTTTGTATGCTTTCTATACT
TTTAAGGATCTTAAAGTGTGTTTTGTGGCCCAGAATATGGCTTATCTTGGTGAATCTTCCATGTGAGCTGAAGAATGTGTATTCTGCTGTTGTT
AGAGTATTCCATAAATGTTAATTAGATCAAGTTGACTGGTAGTGCCGTTTAGGTCAACTGTGTCTTAATTTTCTGCCTGCTTGATGTATCAATT
ACTGAAAGAGGGTTGTTGAAGTCTCCAATTGTAATAGCCTATTTACCTATTTCTCCGTGTAGTTCTATCAGTTTTTCCCTCATGTTTTTTGACA
CTCAGTTTTTAGGTGCACATATATTAAAGATGCTGTCTTCTTAGAGAATTCACCCACATTATCATCATGTAATTCCCTTCTTTATCCCTGAAAA
TTGTCCTTCCTCTGAAGTCAGCTTTCTATAAAATTAACATCCCTCCTCTGGCTTTCTTTCAATCAGTGTTAGCATGGTGTACCTTTTTCCATCC
CTTTACTTGTAATCTGTATAAATATTTTTATTTAAAATAGGTCCCTTGTAGACAATATGTAGTTGGGTCTTGTCTTTAATCCACACTGCCAATC
TCTGTCTTTAAATTGGTGCATTTAGAGTATTCATATTTAACCTAAGTATTAATATAACTGCAGTAGTATCAATCATATTTATAACTTTTATATT
TGTTGCACCTGATTCTTCCCCCCACACCTCTTTTTCTACCTTTTATACGTTTAACTGAACATTTTATATGATTCCATTTTATCTCCTCTGTTAG
CATATTAATCATTCTTTTTAAAAATGTTTTTAGTTACTGCCCTAAAGTTTGAAAAGTACATGTATAACTAATCTACATCTAGCATCAAATAACT
ACCACTTCTTCCTTCCTGTTTATATCATTACTGCCTTTTATTTCATTTATCCACATGCTATAATCACTCAATACTTTGTTACTATTATTGTAAA
CAGTTATCTTTCAGATCAGTTAAGAAAAATAAAACTTAATTTTACCTTAATATAGTACTTTTCTAATGCTCTTCCTTTTTTATGCAGTTCTTTT
TGACATTTCTCATAGGGCAGGTCAGCTGGCAATGGATTATTCCAGTTTTGTTTGTCAGGAAAATATCCTTATTTCTTTGAATTTGAAGGATGTT
TTGCTGAATGCAGAATAATAGTTTGGTAGCTTTTTTGTTGCAACACTTCATGTATTCTCCTTTCTTTGTGTTTGCATGGTTTCTGAAGAGAAAG
ATAATGTAATTCTTATCCTTTTTCCTCTATGGATAAGGTGTTGGCTTTTCCCCCTCTCTAGCTTCTTTCAAGATTTTCTCTTCTCTTTGGTTTT
TTGCAGTTTAAATATGATATGCCTGGGTGTAGATTTGGTATTTATTATGCTTGGTGTTCTCTGAGCTTTCTGGATCTGTGGTTTGGTATCTGTC
ATTAATTTTGGAAAATTCATAGCCATTAATACTTCAAGTATTTCTTCCACTGTTTTCTTTTTCTTCTCCATCTGGTATTCCAATTACACATTAC
ATCTTTTCAAACTTTCTCACAGTTCTTCGATGTTCTTTCTTTTTCCTCTTTATCTTTTTGTTTGGTAAGTTTCTGTATCTTCAAGTTCATTGGT
TCTTTGCTTTGTCATGTTCTGTCTACTAAGTAAGCCATTCCTCATTTCTGTTAGGGTGCTTTTGCTTTTTAGAATTTGCTTTTGAGTCTTAAGA
GTTTCAGGCTGCGCACGGTGGCTCATGCCTGTAATCCCAGCACTTTGGAAGGCCGAAGTGGCTGGATCACCTGGGGTCAGGAGTTCGAGACCAA
CCTAGCCAACATGGTGAAACCCTGTCTCTACCAAAAATTACAAAAAAAAAGAAAAAATAGCTGGGCGTGGTGGCAGGTGCCTGTAATCCCAGCT
ACTCGGGAGGCTGAGGAGGAGAATCACTTGAACCCAGCAGGCGGAGGTTGCACTAAGCCAAGATTCCGCCACTGCACTCCAGTGTGGGCGACAG
AGCGAGACACTGTCTCAAAAAAAAAAAAAAAAAGTTTTCCATCTCCCTGCCTACATCATCCATCTCTTCTTGCACCTTGTCTTCTTTTTCCACT
AGAGCCATTAACATGTTAATCATTGTTAAATTCCCTGTCTTGTAATTCCAAAATCTGTGTCACATCTGGGTCTGGTTCTGATGCTTGCTTTATC
TCTTCAGACTGTGTTTTTTTCTTGCCTTTCTTGTAATTTTTTATTGAAAGTTTAACATGATTTATCAGGCAATAGGAACTTAGTAGGCCTTTAG
CGTGAGTTATTATTCTCATGTACCCAAGAGTTGGCCTGTATTTAATCTTTTCAGAAGGTACCAGAGACTTCAAATTCCTCTAGCGTCCTTGTTT
TTGTCTCCCATGTCATCTGTGAGCTTCTCTATCAACTCCTCCTTAGTCAGTATGTTGAAGCTCTTTCAGCCATAACCCACTGTTATAATAATAT
ATTGGATCCTGTGAGAATCTGGTGGAGTTCCTGAATGAAAAACCCACAACAGTGCACTTCCTCCTGAAACTGTAGCCCCTAGGAGTGTCTTATT
CGCACACTAGTCTGTACTGAGCCTCTAGCAATCTGTCAAAATCACCATTAAGTGTTCTCATCAGTTTATGAATTCAGAAATTCTGCTCCCAGCA
AGCAGACCTCACTATGATTCTCTATATTTCCCTGCTTCTCAAAATTTGGGGTTGCAGTTTGCCCTGCAACTTCAGCTTTCCATTGGACTTAAGA
AAAGTCATGGATTTTCAGTTTGTTCAGCATTTTTTCTTATAAAAACAAGAGTGATGACTCTCAAGCTCTTTAAATTTTGGAACTGAAACTAGAA
GCAACAGGACATTCTGACATGAATTATTTAAAAGGGTCATTGTTGACTCTAGACACATTTTAATATTGCTGCATCAAAAGATAAAAGCATTCTC
CTTTCTTCTTGTCTGATATATGCCGTGTACACCTCTGAGCTCACCACTAACCTCAACTCTACCTTATCCCTAACTTCCCATTTCAAATGGAAGG
GAATGGGGATCAAGGAGTAGAAGGCCTGTTTTACCCATTATTGATGATTAAAAAGCTGAAAATAACCCATCACAAAATGGCCTCACTAAAGTGG
CTGCATCAGACATCATTTAGCCTGGAAAACCACTATGCATAAAGGCTCAAATTTAAATTTTTGAATCCAGTGTTTTTTATTTATTATTATTTTT
TTTTTTCTGAGACGGAGTCTGGCTCTGTCACCTAGGCTGGAGTGCAGTGGCACGATCTTGGCTCACTGCAAGCTCCACCTCCTGGGTTCATCCC
ATTCTCCTGCCTCAGCCTCCCGAGTAGCTGGGACTACAGGCGCCCGCCACCATGCCCGGCTAATTTTTTGTATTTTTAGTAGAGACAGGGTTTC
ACCGTGTTAGCGAGGATGGTCTCGATCTCCTAACCTCATGATCCACCCGCCTCGGCCTCCCAAAGTGCTGGGATTACAGGTATGAGCCACTGCG
CCCCGCCCTGAATCCAGTATTTTTTAATAGAACATGAGTTGGGTTGAGATACTGAGTTCCTGCCTTCTCCATCCTAATCCCAAATT1CCAATCT
TTGGAAATTTGCCCCTTTACCATTTAAGCTCCTGACCCCAGCTCCTCTCCAGCCTGAAGAGTGTGTCTGTCAAGACTGTAGCTGTGAACAAAAC
ACTATTACTTGAGCCTTATCCTGGAGCAAATGTGTGTGGTCTCACCAATGAACATCAGATAAGTCCCTTGGCATGGATTTCTTTTCCTTTTTAG
TAATACAATCATAAAGGTTATTCAGACTTATTGAGCATTGACTATGGCCAGAAAGTGTGATACTTGCTTTCCATATAGTTTATCTCACTTACTC
CTATTACCCTTTGAAGTCAGAATTCTAACTATGAATCAGAGAAAATAAGTGACCTGCCTAAGGTCATCCAGTTGGTTTATGGTGAAGGCAGGAT
GCAAACTGAAATTTGTCTGTGATTTGAGTTCGGTGCTTTCCCTAGTCTCCTCCTCTCAGAGGCAGAACATAAGCATGTAATAGATACCACTAGG
GTTCTTGTTTCTACCTTGGGAACAGCTGTTTGCAAGTCCAAATTAGGCAGCTAATCTAGCAGTTAGCCCAGATACAGCCCTTGGGCACCCTAGT
AGCTGTAACTTCCAGAAGGCAGGAACCTTCCATTCACTAGTGAG1CCCCAAAACAGTGGCCCAAGTGAAGCAAAAATGTTTGTTGGAAATATGA
GTGAATGAAAAAGTAATTTCATGAACACATCAATGAATAAATGAATGAAGCAACACCCAGTATGATGATTAATGCCACAGGAAGATGCCTTTCC
AAGCATCACAAGATCCTGGGATCTTCACTGACTGTAAGTGCCTGTGGGGCAGGGACCATGTTGGTCTTATTCATCACTCTCCTGCCAGGTAAAT
TAGCACATTCCTGGCACACTGTAAATGTTCAATAGCTTTTCTTCTTTTAGATCCATTGACTTATCACAGGCAACTCTTTCAAGAAACAACTAGC
CCTGTGCTCTGGAGAATGATTTACAGTGGTTCTCTTCCTCAGCCTGGCGCCTTTTCTGGATAACTCCCATCCTACTCTCCTCTACTTCCTCTTC
CTAGAATACACAAATTTATTATTACAGGCACCACTCTTCACCCCACATCTGATTC
HUMAN SEQUENCE—mRNA
GCGGGCGCGGGCGGGACGGGCGCCCCGCGGCCGGACCCAGCCAGGGCACCACGCTGCCCGGCCCTGCGCCGCCAGGCACTTCTTTCCGGGGCTC
CTAGGGACGCCAGAAGGAAGTCAACCTCTGCTGCTTCTCCTTGGCCTGCGTTGGACCTTCCTTTTTTTGTTGTTTTTTTTTGTTTTTCCCCTTT
CTTCCTTTTGAATTAACTGGCTTCTTGGCTGGATGTTTTCAACTTCTTTCCTGGCTGCCAACTTTTCCCCAATTGTTTTCCTTTTACAACAGGG
GCAGAAAGTGCTCTGTGGTCCCAGGCGAGCCGTGAAGTTGCGTGTGCGTGGCAGTGTGCGTGGCAGGATGTGCGTCCGTGTGTAACCCGAGCCG
CCCGATCTGTTTCGATCTGCGCCGCGGAGCCCTCCCTCAAGGCCCGCTCCACCTGCTGCGGTTACGCGGCGCTCGTGGGTGTTCGTGCCTCGGA
GCAGCTAACCGGCGGGTGCTGCGCGACGGTGGAGGACTATCGTCTCGCTGCTGCCCGAGTCAGGCCTGAGTCACCCAGCTGATGTAGACAGTGG
CTGCCTTCCGAAGAGTGCCTGTTTGCATGTGTGTGACTCTGCGGCTGCTCAACTCCCAACAAACCAGAGGACCAGCCACAAACTTAACCAACAT
CCCCAAACCCGAGTTCACAGATGTGGGAGAGCTGTAGAACCCTGAGTGTCATCGACTGGGCCTTCTTATGATTGTTGTTTTAAGATTAGCTGAA
GATCTCTGAAACGCTGAATTTTCTGCACTGACCGTTTTGACACAATTCATTGAGAGAACACAGAACATGACAAGTACTTCTAGCTCAGCACTGC
TCCAACTACTGAAGCTGATTTTCAAGGCTACTTAAAAAAATCTGCAGCGTACATTAATGGATTTCTGTTGTGTTTAAATTCTCCACAAATTGTA
TTGTAAATATTTTATGAAGTAGAGCATATGTATATATTTATATATACGTGCACATACATTAGTAGCACTACCTTTGGAAGTCTCAGCTCTTGCT
TTTCGGGACTGAAGCCAGTTTTGCATGATAAAAAGTGGCCTTGTTACGGGAGATAATTGTGTTCTGTTGGGACTTTAGACAAAACTCACCTGCG
AAACTGACAGGCATTAACTACTGCAACTTCCAATAATGTGTTTGCTGATCGTTTTACTCTTCGCATAAAAAAATATTTTAGGGGTGTATGAGGT
TTTGCCTTCAGGAACTTTTCTAACAGCCAAGACAGAACTTACCTCTGCAAGCAAGATTCGTGGAAGATAGGGTCTCCACTTTTTAATGCACTGG
GCAATCGGTTGCTACGAGCCCATCCTGAGTCAGAGGCCGATCCGCAGAACCAGAACGTTTTCCCCTCCTGGACTGTTAGTAACTTAGTCTCCCT
CCTCCCCTAACCACCCCCGCCCCCCCCCACCCCCCGCAGTAATAAAGGCCCCTGAACGTGTATGTTGGTCTCCCGGGGAGCTGCTTGCTGGGAT
CCGCGCCCCTGTCGCCGTCTGGTACCAGCTGTTTGCACGGTCCTAACTCAATCGGCTTGTTGTGATGCGTATCCCCGTAGATGCCAGCACGAGC
CGCCGCTTCACGCCGCCTTCCACCGCGCTGAGCCCAGGCAAGATGAGCGAGGCGTTGCCGCTGGGCGCCCCGGACGCCGGCGCTGCCCTGGCCG
QCAAGCTGAGGAGCGGCGACCGCAGCATGGTCGAGGTGCTGGCCGACCACCCGGGCHAGCTGGTGCGCACCGACAGCCCCAACTTCCTCTGCTC
CGTGCTGCCTACGCACTGGCGCTGCAACAAGACCCTGCCCATCCCTTTCAAGTGCTGCCCCTAGGGGATGTTCCAGGATGGCACTCTGGTCACT
GTGATGGCTGQCAATCATGAAAACTACTCCGCTGAGCTGAGAAATGCTACCGCAGCCATGAAGAACCACGTTGCAAGATTTAATGACCTCAGGT
TTCTCGGTCGAAGTGCAACAGGGAAAAGCTTCACTCTGACCATCACTGTCTTCACAAACCCACCGCAAGTCGCCACCTACCACAGAGCCATCAA
AATCACAGTGGATGGGCCCCGAGAACCTCGAAGACATCGGCAGAAACTAGATGATCAGACCAAGCCCCGGAGCTTGTCCTTTTCCGAGCGGCTC
AGTGAACTGGAGCAGCTGCGGCGCACAGCCATGAGGGTCAGCCCACACCACCCAGCCCCCACGCCCAACCCTCGTGCCTCCCTGAACCACTCCA
CTGCCTTTAACCCTCAGCCTCAGAGTCAGATGCAGGATACAAGGCAGATCCAACCATCCCCACCGTGGTCCTACGATCAGTCCTACCAATACCT
GGGATCCATTGCCTCTCCTTCTGTGCACCCAGCAACGCCCATTTCACCTGGACGTGCCAGCGGCATGACAACCCTCTCTGCAGAACTTTCCAGT
CGACTCTCAACGGCACCCGACCTGACAGCGTTCAGCGACCCGCGCCAGTTCCCCGCGCTGCCCTCCATCTCCGACCCCCGCATGCACTATCCAG
GCGCCTTCACCTACTCCCCGACGCCGGTCACCTCGGGCATCGGCATCGGCATGTCGGCCATGGGCTCGGCCACGCGCTACCACACCTACCTGCC
GCCGCCCTACCCCGGTTCGTCGCAAGCGCAGGGAGGCCCGTTCCAAGCCAGCTCGCCCTCCTACCACCTGTACTACGGCGCCTCGGCCGGCTCC
TACCAGTTCTCCATGGTGGGCGGGGAGCGCTCGCCGCCGCGCATCCTGCCGCCCTGCACCAACGCCTCCACCGGCTCCGCCCTGCTCAACCCCA
GCCTCCCGAACCAGAGCGACGTGGTGGAGGCCGAGGGCAGACACAGAAACTCCCCCACCAACATGGGGGGGGCCTCCTGTTCGCGACAAGCCCG
CCGGGATCCCGGGCCCTGGGCCCGGACACCGTCCTGGGGCCGAGGGCGCCCGACGGACAGGATCTCGCTGTAGGTCAGGCCCGCGCAGCCTCCT
GCGCCCAGAAGCCCACGCCGCCGCCGTCTGCTGGCGCCCCGGCCCTCGCGGAGGTGTCCGAGGCGACGCACCTCGAGGGTGTCCGCCGGCCCCA
GCACCCAGGGGACGCGCTGGAAAGCAAACAGGAAGATTCCCGGAGGGAAACTGTGAATGCTTCTGATTTAGCAATGCTGTGAATAAAAAGAAAG
ATTTTATACCCTTGAGAAAAAAAAAAAAA
HUMAN SEQUENCE—CODING
ATGCGTATCCCCGTAGATGCCAGCACGAGCCGCCGCTTCACGCCGCCTTCCACCGCGCTGAGCCCAGGCAAGATGAGCGAGGCGTTGCCGCTGG
GCGCCCCGGACGCCGGCGCTGCCCTGGCCGGCAAGCTGAGGAGCGGCGACCGCAGCATGGTGGAGGTGCTGGCCGACCACCCGGGCGAGCTGGT
GCGCACCGACAGCCCCAACTTCCTCTGCTCCGTGCTGCCTACGCACTGGCGCTGCAACAAGACCCTGCCCATCGCTTTCAAGGTGGTGGCCCTA
GGGGATGTTCCAGATGGCACTCTGGTCACTGTGATGGCTGGCAATGATGAAAACTACTCGGCTGAGCTGAGAAATGCTACCGCAGCCATGAAGA
ACCAGGTTGCAAGATTTAATGACCTCAGGTTTGTCGGTCGAAGTGGAAGAGGGAAAAGCTTCACTCTGACCATCACTGTCTTCACAAACCCACC
GCAAGTCGCCACCTACCACAGAGCCATCAAAATCACAGTGGATGGGCCCCGAGAACCTCGAAGACATCGGCAGAAACTAGATGATCAGACCAAG
CCCGGGAGCTTGTCCTTTTCCGAGCGGCTCAGTGAACTGGAGCAGCTGCGGCGCACAGCCATGAGGGTCAGCCCACACCACCCAGCCCCCACGC
CCAACCCTCGTGCCTCCCTGAACCACTCCACTGCCTTTAACCCTCAGCCTCAGAGTCAGATGCAGGATACAAGGCAGATCCAACCATCCCCACC
GTGGTCCTACGATCAGTCCTACCAATACCTGGGATCCATTGCCTCTCCTTCTGTGCACCCAGCAACGCCCATTTCACCTGGACGTGCCAGCGGC
ATGACAACCCTCTCTGCAGAACTTTCCAGTCGACTCTCAACGGCACCCGACCTGACAGCCTTCAGCGACCCGCGCCAGTTCCCCGCGCTGCCCT
CCATCTCCGACCCCCGCATGCACTATCCAGGCGCCTTCACCTACTCCCCGACGCCGGTCACCTCGGGCATCGGCATCGGCATGTCGGCCATGGG
CTCGGCCACGCGCTACCACACCTACCTGCCGCCGCCCTACCCCGGTTCGTCGCAAGCGCAGGGAGGCCCGTTCCAAGCCAGCTCGCCCTCCTAC
CACCTGTACTACGGCGCCTCGGCCGGCTCCTACCAGTTCTCCATGGTGGGCGGGGAGCGCTCGCCGCCGCGCATCCTGCCGCCCTGCACCAACG
CCTCCACCGGCTCCGCGCTGCTCAACCCCAGCCTCCCGAACCAGAGCGACGTGGTGGAGGCCGAGGGCAGACACAGAAACTCCCCCACCAACAT
GGGGGGGGCCTCCTGTTCGCGACAAGCCCGCCGGGATCCCGGGCCCTGGGCCCGGACACCGTCCTGGGGCCGAGGGCGCCCGACGGACAGGATC
TCGCTGTAG

[0283] TABLE 19

MOUSE NOMENCLATURE
ICSGNM I12ra
Celera mCGSSG9
HUMAN NOMENCLATURE
HGNC IL2RA
Celera hCG23482
MOUSE SEQUENCE—GENOMIC
TAATGATTAATAATAATAATAATAATAATAATAATAATAAGAAGAAGAAGAAGAAGAAGAAGAATGAGAGACCTTGGAACACTCAGCCCCTTGT
TGTGCATGGAACCCAGTAGAAGAAGTGGGAAGAATGTGAGAGCCAGAGGGGATGGAGGCCATCAAAAAAACACAATCTTCTAAATCAACATCAG
CAAAGCACCTATGAAGAGTGAAGCAGGACTGGAGAGATGGCTCAGTGGTTAAAAGCACTGACTGTTCTTGCAAAGGTCCTGAGTTCAAGTCTCA
GCAACCACATGGTGGCTCACAACCATCTGTAACAAGATATGATGCCTTTCTCGTGTGTCTAAAGACAACTACTTACACATAATCAATCAATCAA
TCAATCAATCAATCTTTGGGCTGGAGCAACAGGGGCCGGAGTGACCAGAGGTCCTGAGTTCGGTTCCCGGCAACCACATGAAGGCTCACAACTG
TCTGTACAGCTACAGTGTACTCACATACACAAAATAAATAAATAAATCTTTAGAAAAGAGAGTGAAGCAACATCCACAGGGCCTGCATGGGTCT
ACACCAGGTCCTTTGCATGTATATTATGGCTTCCAGTTTAGGGTTTTTAAAGGATTCCAAAATGTGTGAACAAGGTGGACTTGATTCTTGTACC
TTCTCTTGGGCTCTTTTCCTTCTGTCTGTTTTCTCTAAATCCAATGTCTTAGTTTTTTGTATACTTAAGGTTATAGTTAGAGTAGCATACCATA
GCATGTCCTTCACAAGCCTATTTCTTTTCTAATGAGAGACACAAAAGGAGTAGATCTGGGAGGGAAGGGATAGGAAGGGGACTGGGAGGAGTAG
AGGGAGGGAAACCATAATCAGGGTATATTATATGATGGAAAAATCTATTTTCAATAAAACGAAATAACTTTAAAGAAAGATAATTAGGGAGTAA
ATATGATCAGGTGAATATATGAATGTCTGAAAATGTCATAATGAAATACATGACTGTACACTAACTTTTTAAAAAAAGGAGTGATCTTGGGACT
ACAGACTCTTCAAAGATAACCAAAAAAAAAAAAAAAAAAAGAGAGAGCAGGCTGTTGAGCCGAATAGTGATTGAACACGAAGTGTACCGCAAAA
AGTGGGGAAGCCATGTTGAAGAGGGTAGTCTAAGGCAGATTTCTTTGGGAAGATTTGCCTGGAATTAATAGATGAGACTGGAGGAGGTGTGAGG
GCTGGCTCAGTAGCTAGGCACTTGCTTAGCATGTGCCAGGCCCTGCTTTAAATACCAGCACCGGAAAAAAAAAACATAAAGGATTGCAGAATGT
TTGAGTCAATCATCTCAGTCGGAAAGCTATAGTTANNNNNNNNNNNNNNNNNNNNCTATAGTTACATAGACCTCTAGACAAAACGTGACACAGA
CATGACTTCACCTTCCTCCCCAAACCCCACAGACTACTGCTTCAGAACCTCACAATCTTTGCTTCCACCAGTCCCTACAGGTCACCAGTGCTGG
ATCGAGAGATTGAGCGATATACTATTGTCCACCCTTGAGCTAGAACCACATCAGAGGAGCTCAGGGAGCCTTTCCTGATACCTACGTGCCAAAG
ACACAATAGAAAGTGGGATCATCGATTGGGGGGTGCATCAGCCAATGCAGTACCTGCAGTAAAAGCATGAAGACCTAGCTTTGGTGCCCAACCC
TGAGGGACCGTGTCTCAATCTCTGATGAAGAGTGATTGAGGAAGAACCTCCAACAACAACTTCCTCTGGTCCCCACACACCTGCAAACACCAGC
ACTCATGTGGGTGCGCGCGTGCGCACACACACACACACATGCACACGTATGCACACACACATACACTCATAGCCACACATACATACATATACAT
ACAAACACACACATACACAAATGCAGACACACACAAAAACAGTCATGTATACATACAAACACACATACACACATACAGGCATGTGTGTGCACAC
ACATGTACATTCATACACACATAAACACACATGCACATGTGCACACACAGCCACACATGCATATACACAGTCATGTGCGCACACACACACACAC
ATACACACACACACACACACACACACACACACACAAGGAATCTGTCTACAAGCTAGCATAAGCTGCAAATGATACCAAAGCTGCTGTTTGGTTT
TCAGTGTAGGGACTGACTTTGTGAATCTCACAAGCTGTTAGTCTCCCAGTACTTTATTAGGGGAGTAACTCACCAGTCAGATGGCCCCCTCTGG
AGCTCAGCATTTGCACAGAGGACAGCTCCTTTGCGCATACTGGATTCTGGTTTTCCACAGGACCCTCTCTAGTAAAACCTACTGGAAATTACAA
GCTGAGAAATTCAGCCTTGTGCCACAATAACAGGATGCACCTGTAGATTTCACAGAATTAGCTGCTGTCTTCTCTTAACGCCAATTTGAGAGAA
AGAAGCCTGTTTGTCTCCTGCCAAACAGGGCAGAATCTCAAGTATTCCCATATATCTGCAAATGATGGAAGTTATCAACCACAGTGACACTGTC
TTTCTAGCGGTCACTTGACAAAGACACGGACTTGCTTGCCTCTCTTTTCCACCATGCTACCCCCTTGTTGGCTCCTTTGGGACTTACCCATTTG
GAATGTGATATAGTTAATAGCGACCTGTCTGGCCCTGCCTCCCCATCTCCATTTGAGAGCACCAATCCTTTTCAATTCATTTTTGATTACACAG
TCTGGCACAGGGCCCACTTTCTAGATCCTTAACTAGTATTTTATGCAATTGAATTCTAGAAAAGTACATGAACTGTGTAAAGGTGACATCATGA
GCACTTAAATAGACATCCAAACCTATGTCCACGCAATAAAGACTCCGTGCCCCATAGGCTGACAACCACCTCTAACTAACCCAGAAATGCAGTA
AATATATAAATGATGAGTTCCCTGAGCTACTAGCCATCCTCCAAGAAAACAAAGGCCCCTTTCCTCCTCAGCTCTCTCCTTTTCGACTTTCCCT
TCCTCACCTCCATTTTCTTCCCCTCTCTTTCCACCTACCCTTTCCAGTCCTCTCTCCTACCCCTCCTCTCTCTATTCTTCCTTCCTTTCTTCTC
TCCCCTTTCTCTCCCCTTCTCTTCTTTCCACTCTTCTTTCTTCCTTCTCTTCTCTGGTTTTCTTCTCCTCTCTGCTTTTCCTCGCTCTCCCTCC
ACACCATGCCCCTCTCCTCCTCTCTCTTTTCCTCTTCTAATTCTGAGACCACAAATGAGCACATCCCTCTTCAGACAGGCAAGTGAAAAGACAG
AGTGACGGAGCTTTTATGTGGTGTCACTCGGGTAGGACAGGCAAGTCTGATAGTGCCAAGGATCCAGTGAGCAACAGCTTCCCTTTTTAAGGGC
TGGTTTCTTTTTCTCCTTGAGTAGATTATGGGCACAGACAAGGCCTTGACTTCTCTACTTCAGAGCCCAGTGTAAGAGCTTGTGTAGTTGCAGG
TGCTCAGTCAACATCAGCTCATGGCCTCCTTAACAGAAATGAAACACTTTGACCTGAGTTTCAGTTCTTCCTCTCTGTAGACTTCTCTCTAGAC
TTCTCTGTAGACTTCTCAAGACATTGATAGACAATGAATAGACAGGGGTAAAGGGGAGAAGAGAAGAGAGGGGCGAGAGAGAGACAGAGACAGA
GAGACAGAGACACTGAGAGAGACAGAGACAGAGAGACACACACAGAGAGAGATCGTGATACTCTGAACTGCACACCTCCCTCTTATGCCTGGTA
CACAAAGAAAGCCGGGCTCAGAATTCTAACACACCCTCAAACCCGATTCAACTCCAGAATGTATAAGAAAAAGTAATTTCATTTAAAAAGAACA
TCTTTGAGGTGTTGAAAAAAAAGAGTTACTGCCACAAAAGGAACTATAAACAATTACTGTCAAATGATTTTTAGGATTATTTATTTATTTAATT
GAGACAGGATTTCTTGGTGTAGCCTTGGCTGCCCTGAAACTCATTCTGTAGACCAGCCTAGCACTGAACTCAGAGATCCACCTGCCTCTGCCCC
TGGTATTACAGGCATGCGTCACCACCAACACCCCCCCCCCCCATTTTTAAGGATTTCTTTCCCTTTTTTCTTTTTAAAGATTTATTTATTGTTA
TATGTAAGTACACTGTAGCTGTCTCCAGACATGCCAGAAGAGGGAGTCAGATCTCATGACAGGTGGTTGTGAGCCACCATGTGGTTTATGGGAT
TTGAACTCAGGACCTTTGGAAGAGCACTCAGTGCTCTTACCTGCTGAGCCATTTTGCCACCCCCCTTTTTAGGATTTCTTTTACTCTCTTGATT
GTGCCCCCAAAATTGCCCCAGTCTTTCTATTCCATCTTGATACCACATTTCTTTTTCTTTTTCTCTTATTAACTCACTTTCTATGAGTATTTAT
GTGTGTGGAGTGCACACATGTGTACATGGTTGCACATGTGTGTGTATCTGAGCTCCTTGGTGTGTGCACACATACACATGCATATTTGACGTCG
GGGTGTCTTCCTTGGTCACATTCTACTTCATCTTTTTGAGGCAAGTCTTTTGCTGAACCCAGAGTTCCACTGATACAGAGTCTAGCTAGCCTGC
TCATTCTGGGGATCCCTTTCCCATCCGCCAAGTGTTGCCGTCAAAAGCAGCCACTGTGCTGCGCTTTCCCATTGGTTTTGGAGGTTTGTAGTCC
AGTCTTCACACCTGTGTGGCCAGTGCTTTATCCACTGACCCATCTCCCAGTCCTTCAGCATCTTTTCTAGAGCACCAATTTTCTCTCTCTTTGC
ATCTCTAGTTGCTGAAGCCTTACCTGCCAGGTCAAACATGTCAGAGACGCAAAGAGACAGAGAAGTTCTGGGAATCAGGGCTTCACACTTGCTA
ACCCAATACACTGTCTTTGAACTATGCCCCATCCTGAACTATGTCTTAACAACTGAAAGTAATGGTAAAATAATCCAACTGATACCTGTCTTAA
AAGATAAATATTTATTTTTACTTACTTATTTATTATTCTATGATCATTGGTGTTTTGCCTGTAAGTATGTCTGTGTGAGTGTGCCAGAACTCCT
GGAACTGAAAGTATAGATATTTGTGAGCTGCTATGTAGGTGCTGGAGATTGAACCTTGGTCCTTTGGAAGAGCAGCTAGTACTTTTCATCACTA
AGTCATTTCTCCAGACCAATTATCTTTGTTTTTTCTATGTATGAGTCTTTTGCTGTGTGTATGTATACAAATGCATCGTGTGTGTGTGTGTGTG
TATGTGTGTGTATGTGTGTGTCTGTATGTGTGTGTGTGTATGTGTGTNNNNNNNNNHNNNNNNNNNNNNNNNNNNNNNNNNNNNNNNNNNNNNN
NNNNNNNNNNNNNNNNNNNNNNNNNNNNNNNNNNNNNNNNNNNNNNNNNNNNNNNNNNNNNNNNNNNNNNNNNNNNNNNNNNNNNNNNNNNNNN
NNNNNNNNNNNNNNNNNNNNNNNNNNNNNNNNNNNNNNNNNNNNNNNNNNNNNNNNNNNNNNNNNNNNNNNNNNNNNNNNNNNNNNNNNNNNNN
NNNNNNNNNNNNNNNNNNNNNNNNNNNNNNNNNNNNNNNNNNNNNNNNNNNNNNNNNNNNNNNNNNNNNNNNNNNNNNNNNNNNNNNNNNNNNN
NNNNNNNNNNNNNNNNNNNNNNNNNNNNNNNNNNNNNNNNNNNNNNNNNNNNNNNNNNNNNNNNNNNNNNNNNNNNNNNNNNNNNNNNNNNNNN
NNNNNNNNNNNNNNNNNNNNNNNNNNNNNNNNNNNNNNNNNNNNNNNNNNNNNNNNNNNNNNNNNNNNNNNNNNNNNNNNNNNNNNNNNNNNNN
NNNNNNNNNNNNNNNNNNNNNNNNNNNNNNNNNNNNNNNNNNNNNNNNNNNNNNNNNNNNNNNNNNNNNNNNNNNNNNNNNNNNNNNNNNNNNN
NNNNNNNNNNNNNNNNNNNNNNNNNNNNNNNNNNNNNNNNNNNNNNNNNNNNNNNNNNNNNNNNNNNNNNNNNNNNNNNNNNNNNNNNNNNNNN
NNNNNNNNNNNNNNNNNNNNNNNNNNNNNNNNNNNNNNNNNNNNNNNNNNNNNNNNNNNNNNNNNNNNNNNNNNNNNNNNNNNNNNNNNNNNNN
NNNNNNNNNNNNNNNNNNNNNNNNNNNNNNNNNNNNNNNNNNNNNNNNNNNNNNNNNNNNNNNNNNNNNNNNNNNNNNNNNNNNNNNNNNNNNN
NNNNNNNNNNNNNNNNNNNNNNNNNNNNNNNNNNNNNNNNNNNNNNNNNNNNNNNNNNNNNNNNNNNNNNNNNNNNNNNNNNNNNNNNNNNNNN
NNNNNNNNNNNNNNNNNNNNNNNNNNNNNNNNNNNNNNNNNNNNNNNNNNNNNNNNNNNNNNNNNNNNNNNNNNNNNNNNNNNNNNNNNNNNNN
NNNNNNNNNNNNNNNNNNNNNNNNNNNNNNNNNNNNNNNNNNNNNNNNNNNNNNNNNNNNNNNNNNNNNNNNNNNNNNNNNNNNNNNNNNNNNN
NNNNNNNNNNNNNNNNNNNNNNNNNNNNNNNNNNNNNNNNNNNNNNNNNNNNNNNNNNNNNNNNNNNNNNNNNNNNNNNNNNNNNNNNNNNNNN
NNNNNNNNNNNNNNNNNNNNNNNNNNNNNNNNNNNNNNNNNNNNNNNNNNNNNNNNNNNNNNNNNNNNNNNNNNNNNNNNNNNNNNNNNNNNNN
NNNNNNNNNNNNNNNNNNNNNNNNNNNNNNNNNNNNNNNNNNNNNNNNNNNNNNNNNNNNNNNNNNNNNNNNNNNNNNNNNNNNNNNNNNNNNN
NNNNNNNNNNNNNNNNNNNNNNNNNNNNNNNNNNNNNNNNNNNNNNNNNNNNNNNNNNNNTTAGCACCAGACTGCATCATAACACACTGCTCGT
ATGTACTGTGATACTGCACTTCATAAGTGACTACAAACATTATCTTTCAATTCTTTTAAACAAAGAATACGCCGGGCGGTGTGGCGCATGCCTT
TAATCCCAGCACTTGGGAGGCAGAAGCAGGTGGATTTCTGAGTTCGAGGCCAGCCTGGTCTACAAAGTAAGTGCCAGGACAGCCAGGACTATAC
AGAGAAACCCTGTCTTGAAAAACCAAAAAAAACCAAAAAAACAAAAAAACAAAACAAAAAAAAAACCAAACTTTGATTCTGGAGGTGTATCACT
TAGCAACGGAGCATGTACCCCATTGATGGGACATGTATCAGTACATGTAAGACCCTGGGCTCCAACCCCAGCCACAAACTAAACAACAACAAAA
AGCCCAACTTCTTGAAAATGTTAAAAAAAAATCCTTAGTCTTTGATTTTCTTTTTTAAATGAGACATTGGGCCTTCCAGAACCAGAGAAAATAA
GAGGAATAGAAGACAAAACCTCAGTAATAGGATTTAAAAACAAACAGATGACTAGTTCTACAAAATACCTTTGTTAAAACAGTTTACATGACTA
TTTTAAACTGACCTAACAAAAAAGTAATGGAAATCTAATCTTGGCATGGTAGCCTATGCCTTTAGTCCCAGCACTTGAGAGGCAGAGGGAATAG
ATCTCTGTGAGTTCAAGGTCAGCTTCGTTTGTCTACATAAGAAGTTTCAGGGCAACCAAGGCTTCATAGAGAGACTATGTATAATATGCTAGGC
CCTCCCCCATCAATTACTAGTTAAGAAAATGCCCTACAGCCAGATCTTAGGGAGGCATTTTCTCAGTTGAGGTTCCCCTCTTTCAGATAACTCC
AGCTTGTGTAACATTGACATAAAACTAGCCACCACATTGTTTCATCCTGTTTCAACATGTCCTGTCGCTCAGATTCTATCCTTCAAAGTCTTCC
TCGCCATCAATCCAACTGACATCTCTACCCTCACATTCCTTTGGCCTCCCAGTCAACTGTACTTCTAGTTAGCTGTTGAGCACAGATTATACCT
GAAGGACCTACCTAAAAAGGCTACATTCACCCTTCAAGGACAGCAACTTATGTCTTTCCTGAACATAGTCATCCATAACGTTCTCTTTGCTAAG
CGTCTCCCGCTCTTCTTCATCATGATCACTGGGCAACTACCACCTTCTACTGTTAGAAAGAGCAAACGCTCACCTCTAACCTAAGAGGAGGCAA
TCTGGGTCACATAGTTGATGCATGATATGATGTGCAGTTTCTTCTGAGAAGTACCAGACATTTCTGATAAGAGAGTTGAGCAACTTCCTCATAT
GTGAGACTCAGCTTTATACAGTTGACCAACCAACCACCAGTCCTGAAGGAACATTAGTGACCCTTAGACAAATGTTCCTTAAATTAATCTATTG
GGGTCATCTAGCCTACCTTTTTCCTTCCTTAAAAGTCTTTGCCAGGAAACAAGTATTTGAAATAGACTTAGTGGAAACTACCTATTTCCAGCAG
GTTTGAAACAAAACTTGGACATGTGCTCACAAGCATTTGTCTGAAATGGCTTGAAATGTATCCTTGTTGTATATTCACATTCACATATCTCAAT
GCATCATGGTTGAACACCCATATGTGTTATGAAATCAGTGCTTATTTCAAAAATATATTCCATGTAGCCTGTCTCCACACCCCACACTGTGATA
CCTTTATCCTAAGATCCTCAGACTCTTATGAGTTCAAAGTGCCTGTGACACTCCTGTAACACTCCTGTCTATAAATATACTGATTATATGCTGG
CGTGCATTTTTCCCTCAAGGGAGGAAATTAAGATTTCACCAGATCTTATTTGCAAAACAAAACAGTCAGCAACTAGGCTAGAAGTAAAAAGTTA
TGTCAATAGTGGGTGAAAAGACAGCTTGGTGACACTATGAGAGAAGGCAAAGGGTTCTTTCTGAAAGGCCTCCTGGGAGAAGCTAGACTTAAAA
TCTTCCATTGCAGCTCTAAACACATCTGGACAATAGTCTGTTTTCTGCATTTGTGAATCCCACACCCATGGAACTATGAATCGTGCATCAGAGT
TATTTAAAACCACCGTGCATGGAGTGAACCAATACCGAGGTGTTTGCTTATCATTTTCCTTTGAGCACACAGCACAGCCTTGAACTCAGTGACA
CTCCTAAGAGGGCTCTAGGGTCAGGCCAACTTAGATCAGATGCTAGTCTTTAGCTAAAGATGCCCTTCCACCCCCGTTGCACGACCTTGCTTCT
CAGTCTTTGTTGAGTCTTCTGGGGGAGAATCCCCCTAGAGGACTCAGTTTACAAAACCCTAAGTGAGACCACTGCCAAGAAGTGCTTGCTCACC
CCTCCTCCCGCGGCAGGGAATCCCCCTTTCCTTGTACAGGCAAAACACAAAAAAGGACTCATAAGTGAAGCCTGATCCTTCTCACCAAACACTG
CCCACACCTCCTAGTAATTGAACTTGAAAAAAAAAACTGGTTTGAAAAATTACCGCAAACCATATTGTCATAAAAAAAAAAAAAAACACTTCCT
ATATGAGATCACAGAACAGAGTAGGCACAAGTTCCTGCTGAGCAGATCAGCCTAATGCTTAAATAGAACAACTCCTGGCTGTCATTGACATTGT
CTAAAAGCCAAGATGACAGACTGAGACCCCTGAGCCCTTCTTCTGGCATTCTCCCAGGAAGATCCAGTAAAGGGGTTGACCCAATATACTGCAG
AGAATTTCATCCAGTTCCCTCCTCCATCCTGATCCCATGTGCCAGGAAGATGGAGCCACGCTTGCTGATGTTGGGGTTTCTCTCATTAACCATA
GTACCCAGTTGTCGGGCAGGTAAGAGACCAGGAACTGCCCTGGGAACCTTGGGAAGACTAACAGAATCTTGGTAAGCCTACATCTGCTCAGCTA
TACAACCAGAGGGAACAATGAGATGGAAAACTTTGAAGAGGGAGTTGAATCATGCGTTCTAACTCTTGTCCAGGGTCCACTAGGACCTCTTTTT
GTGCCTCAGTGGTCCCTAATCTATCAACCTTTCTTAAAATAGCAGGAAGCAATTTCTCATTCATAGTCCTTTTTAGGTTTCATTCCCAGGGATG
GTTTGGCTTTGCTGTCTTGGAAGTTTCTTGTAAATATCATTTTATGGCAATTTCAGAAAACATAAATATATTCATTTTTCAGAGCATGACTTTC
CTCTGCTTCTCTGGGTGTAACGTCTGTGTGTTTTACATAAATATGAATTCCATCATCATAGATTTTGTCAGGTATAGTTTTAAGAAATAAAAAC
CATCACCAACTCAGACATCAAACAACTCTTCTTAATTGAGGATGAATTCCCTAATACCATTTTTTCTTGCTAATCCAGAAAGAGAAGTGAGGTT
TGTGGAAATACATATATTTCAAGTCTATTAGATAGATTATAGATAGATAGATAGATAGATAGATAGATAGATAGATACATAGATATGGGACTGT
CTCACTATGTAGTCTTGGGGTGCTTGGAATTTGCCATGTAAACTAGTTTCGCCTCAAACTCATAAAGATCTACCTGCTTCTGTGCATAACCCCA
CACTAGGCTGAAAATATATTTTTTGAAAGCCTACAGTTTCATATTCTTAATTTCTAGGAATTTATTCTTAAATGACCCCAGAAAAATGTATTAA
GAAGAGTAAAATAAATAACATATACACGAAGCTTGATTGCTGACTGGGGGCAAGTGATCACATTGTGTTGGGTCACTTGGGAGCATCTTGGCTT
TGGAGTTAAGATGTTTATGATTTTAGGAAGCTTTTATTGTGTGATTTCTCCCCTAAAAGTATCTATCCCTCAATGGTGTCTTTGTCAGGTTAGT
TCAAGTCAGAACAACCAAGTCTTTACAGTTATGTGTATTCTGTCTCTGAGGAAAGGCTTTCAAGTAAACTTCTGTTATCAGCTGTGCTTGATTT
ATATAAAGCTCATTTACTTGGTTTTGCAAAACATCTGTCCACTACTTCTTATGCATGTGTATATGGGGAAATGACAGCATTACAGGTTGGAACA
TGCCTGGAGCTACAGGGGTGTGGGGCTGTCAGAGAAGACTTCATGAAGATAGCGTGTCCATTGAGCCCTGGAGACTGGTAAATTTCCATAAGGA
AAGATTTTAGATGAGAAGGCACATGGATCAGGAAATAGAAGAGTCTGAGGAGTCAGTATATGTATTCTCTGAATATGGGGCTATTGGATAAAGA
ACAGAAAGATAGGAATGGGGCCAAAGGCATTAAAGCTCTGGACAGGAAGCTCAATCCTTTTCTTTTCCTGTGTTCTTGGGGATAGAAATCCAAG
GCTTTGAGCACACTAAGCAAGCACTCTAACGCTGAGCTGCATTCCTAGCCCACAACTTAAAATACTTTAGTTGTATTTGGTAGGCAACAGAAAA
CTACTTGAAAAATGTCAGGGAATGCCATTTATAGAGTACACTTGATAAATCAGATGTATACATTTTATTACAACTTCTAATCACTTTACAGTGT
GGGTGTCATGAATCAGTAGAAGTAACCCCAAAATCAGAATATCAGTGTTGCAAGGCTCACATCACTTTTGTATTTTCTATTGGAGACAAGACCA
GAGGTGATTCTGGCTGATAATAGAAAGAGATCAGGTGCAAGGAGTTATGTCAAGAGGCAACTTGGTTCCCAGTGGGAAACAGAAAGAAATGGCC
AGAGGTCAGCAAGTAGCTCAGAAACTAACCCAGGGCAAGAGATGATCTTATTTCAACTTTGTTTATCGTCCAGGAAGAATTTAGTTTAAGCAAT
TAATGGGGCTGGAGAGATGGCTCATTATTGGTTTAGAGCACTCATTACTCTTGTGATGCGTTGACAACCCAGGACCCAAGATGGTGGCTCAGAA
CCATCTGTAACTCCAGTTCCAGGTGATCTGACAACTTCTTCTGGCCTCCATAGGCACCGTACACATGGCAAATAGGCATAGATGTGGGTCAAAT
GCATATACACGTAAAAATAAATAAATATTAAACTTTAAGAAACGGTAGAAAAATAAACAAATCTTTCTATTCCTTGGGGGCAAGAGGTCTTTAA
TGAAATAAGACAGACTGTCAACAGATTCAATTTCTAGCTGATTCATAAGGCAGATTTTCATTTTGAAAATTTCCAAAGCCACCATTTAAAATTG
TGATGTGGTACAAGGGATGTATTAGTCAACCCGGGTGTTTTTAGTCTCTCTATCACTGGGCCTTGGGATGTGGTTAAAAGAGAATTCTCCCTGA
TGTTGCCAACACAGCAGCAGCTAACTGAAGCCACCTTTCTTAGAACTGTGGAAACTCTGAGCTGTCTCTTGATCATTTTTCATTCTAGGAATTC
TGTAATCAAATCCTTATCCCTCTAGAGTCAGAAGACAGAAGGTATGGAAACATGTTAAGCTGGTACGCATGTCTAGTTATCCCTTCTGGTAAAG
GCTACTGCCCACACTAGAAGTTCCGGTCTTCAGCTCCGTTATGCTTCCCAGTGCCCCGTCAGTGTCTTCACAGTGTTAGAGCTATTGTGACTTT
GTTCATCATCCAAAATAGACCTTGGAGACATGTGGTTTTGCTAAGCACTGGGAATACTTAATAAAGCAAACATTACATTTGTCCCTAAGGGTCT
AAGATAGCCTGATATGGAACTTATGCCTGTGCTTGATTTAGCTTGGAACATTGAAAAAACAGTAATTTATTTCATCCACTTACATGTCATCTGG
CCATGCTCTCAAACAACAGCTTCCGAATGCTCAACACCTCCATCACTGGGTCCCTCCCAAACGCAGGGATTTTTGTCTTCATGTATGCATATGT
GTATTTTTGTGGCTATGTGTGTAGATGAATGTGTGTGGAGGCCAAAGGTCAACTTAGGTATTAATCCTCAGGTGCCATTCACATGAGTTGGTTT
TCTTATTATTTGGGTTTTTTATTATTGTTGTCTAGAGATGGAGTTTCTTGCTGGTCTGGGACTACATGGTTACCCTAAGCTGGTTGGTCAAGAA
TCTGCCTACTTCTGCTTTCTTAGGGCTGATACTAAAGGTATGCACTGCTGTAATATATACATACATACACACACACACATATATATACATTATA
TATACATATACAATATATATACATTAAATGTATCAGTCTTTTGCCTGCATGTTTATATGCACACCACATGCCTGCCTGGTGCCCTCAGAGGTCA
AAAGAGGGCATTGGCTCACCTTGGACTGGAACTATAGAGAGTTTTCAACTCCCATGTGGGTGGTGGGAAGCAAACCTGGGTCCTCTGCCAAAGC
AGGTGCTCTTAACCTCTGAGCTATCTTTCCAGCTGCATAATCATTTATGTGAGCACCAGGGATCAGAACAGAGGTCCTCATATTTATGAGGTAA
GCACTTTATCTACTCAGCCATCTCCCCACCCCTGAACATCTCTCTCTCTCTCTCTCTCTCTCTCTCTCTCTCTCTCTCTCTCTCTCTCTCTCTC
TCAAAAACTTTGAGAATTCTAGATATTTTTGTGTAATTTCTTATGGAAACCATTCCTGTGGTAGCACTGAGTGCCATGAGGATAGGCTGCACCC
TGACATGTTCATGTCAACTCTGCTTTCCTTACTGTCCAATGATGGCCGGGCATTTTACAGATAGAGGTTGAATTCTCTTAAGAAATAGTGTGCC
ACCAGTGGTCAGTGAGAAATAGAGCTAGGAGGCAAATGAAATTTTAAAGATGTATAGTATACAACAAGGCACCTAATGATGTTAGAAAAACCAA
AGGCAAGACCTAGCAAGTCACAGCTTTCAGCAAACTTCTCTCTGCAACAGGAGAAGGTTGTTGCAAAGATCTTGAAATCCCCTTACAATTCCAT
CATTATACATCAAGAATTCTGGGGGGAAAAAGACCTACTCTCTCCTCTCCTCTATCTCTCTCTCTCTCTCTCTCTCTCTCTCTCTCTCTCTGTC
TCACAAACACACACACACACACACACACACTCACTCACAAGTCTTTTTTATCCTGGGGTACTTTTGGAAACAAGAAAAGTTCCCAACCAAAGAT
ATGCCCACTACCATGTGGATTGAAAGGTCACCGGGTATCAGCAGACCCAAGCCTGAGAGCTGGGTTCCAGGTTATTTCCCCACTCTCCAGAGTG
CAACGCTCTGCACTCCACCATCACTACTAATTCTGTACTGCTCGAGTTGTGGCTGTAGCGTAAAAACACCACTGTCTTTCGGTGAAGTCTTCTC
CCGTTTGATGCCTTGCTATGCGGATTTCTTCCTTCAAACTGTGTTCATGTCTCGAAAAAGGAGTGGGAATTTATCTCTTTCTTCTCTTTGTTTT
GAGCCATTCCCTCTGGGGGAGGGAGGGAAGGGAGAGTCTTTATTCAATGCATTACTTCAAAAAGTTATAGATCCCAGACCTGAGATGCCTCTGT
GGTTAAGAGTGCATACTACTTTTGCAGTTTGGTTCCTAGTACCCATGCTGGGAGACTTACCCTGCCTATTTCAATCCAATGACCTCTTCTGTCC
TGCATGTATGGATAGACACATACATAAATAAGACCTTGCTGTCCTGGAAATCAACCTGTAGATTAGAACACCCACCACCTCAGAGCTCCACCTG
TCTCTGTCTTCTGAGTGCTGGGCATGCACCACTTCTGCCCAGTGATCCCAGGCCTCTTGATGACTTGATTACATCTTCTGTATGCCTTTATTCT
GATTCTCAGAAGTGATATCTCTTTATCCATGCAGCCACCCATTCATGCATTAGGATTATAGAGGTGGATAAAGGTACAGTCCTTGTTCTCCAAC
ATGAAGACTAAACATCTGCTGATTGATTCTGATTAGGAAGACTGCTAAGGGAAAACTTGCATCTGCCAATGAGTCAACATTCTGTTCCCTTTCC
AACCCTCTGCCACATTTTCAAGGACATCACCCATTTGCAGGGAAAACTACAACTAAGTGATCTCTGAACATCTTCGGTGTTTTCTACTCTAATG
TTGCTCACATCTTTTTTGGCTAGTTGATTTTATGGTCATTCTAGATTTTGCCTTTATCAACAAGACAACGCAGGTCTCACCCGGAGCTGTCTGT
GGAATCATGTTTCCCAACCCCAGCTTCAGTTACAACATGCATCTGGAATGGCTGAGACTTCTTCAGACCAGTGAAGTCAGACTCTCAGGGGAGA
AGAACCAGACCTACCAATGACATTATTTTTATGTCCCCCCAAACAATGAAGATGCAGTGAGCAATGAGATCCGTCTAATATTGTAGAGAAGTAA
TATAATGGAATAATCCTACAGCCGGGCATGGTGTACATCGCTGTGACCCTTCCTTGCACTTGGGTGATTGGTGCAGGAAGATTTTGAGTTTGAG
GCCAGCACAGAGCTCCACAGTGAAACTATTTTAAAAAGAACGAACAAGAAGAGAAGGAAGAGGGGAAGGGAGAAAGGGAGGGAAGGGAAGAAGA
GAAACGCAAATGGTTTTTCATGCTGGTTAATTTCATTGCTTCATTTTTATTCTTTGAAAATAGAGGAGAACTTCTCAAACTTTACAAGACTCCT
GGGGATTTTGTTATAAAGCATTCTGTTCGGAGAGGGATTCGGTACCTTGAAATTCTGTTCAAACAGGCTCCAACACGAGATGTGTGTTGTCAGT
GCATGGGCCCAGTTCTCAGCAGCAGGCTATCATGTAACAACAACAACAACAAAAAAATGCACACTATGTAACCACACAGAGGTTTCAACTAAAA
TGGGAGACAACTTCAGAGAAGATTAAATATTGATCAAAGGTTGCACAGTCTATATAACACAGCCTATAAATATTATAAGTCGTCAGAATAAAGA
GAGCAGCCTACTGCCTGGGTAATTAAAGATGATGCTTTGAGAAGGGCTTTTGGAGAACCTAGCTCTGAATGATGCTTAAGAATAACAGAGCATT
AGCCGGGCAATGGTGGTGTACACCTTTAATCCCAGTACTTACCACGCAGAGGCAGGCTGATTTCTGAGTTCGAGGCCAGCCTGGTTTACAGAGT
AAGTTCCAGGACAGTCAGGGCTACACAGAGAAGCCCTGTCTCAAGACAACAAAACAACAACAACAAAACAAAACAAAACAAAACAACAGAAAAT
GTTAGAAGACAGTATTCTGTGATCATTCTCCCAAACCTCTACACATCCGCCATTATCCGTTTGCAGAGATGTGTGTCTGAACAAAATGATTTTC
AAGTGCACAGTGTTTCTCTGATAAAAATTAATACTTTCCCCACATAAAAAAAAAAGCTGAACATCGTGGCACATGTTTGTAATCGCATTGCTGG
GAAAACAGAGATCGGTAGATCGCTGGGGCTTACTGGTCTACCAGCCAAATCAGTGAGCTCTAGGTTGTTGGGAAACCATATCCCAAAAGAAAAG
ATAGATGGTATACACACTACACACACACACATATAGTAGTAGTAGTAGTAGTAGTAGTAGTAATAATAATAATAATAATAATAATAATAATAAT
AATAATGATAATGATAATGATAATAATAATAATGATTTTGCTCAGGCATAAGACTTTGCATGTTCCCCATCCTACTTAAATCCTCCAGTGCCCA
TAGGCATTAGTTATCTCTAGTAGATTTCTTTGACATGATGAATTACTGAGTAGCCTTGCCAGTACCACATGACACCCTGGATATAGTCAAAGAA
TTTTTTAGTTTTCTTCTACCTCTACATCTGTGTTTTTAACTATGATGCAGTCCTGTTAACCTCATACCACAAGGTCAGAATCCCATGGCTTCTA
ACACGACAGCCTCCTTTTACCCTGCCAGTTCACTAGGCTTCAACCAGCAACTCTCAAGGTAGCACCAGACATCCTACATGCAGGAGGCTGAGGC
TCACATGACTGGACTACCAACAGTAAACGGTTTCACCCAAAAGAAGCACTGTTTTTAAATTTTTATTTATTTATTTATTTATTTATTTATTTAT
TGGTTTAAATTTTTTCTTTTCTTATATGTATGGGTGTATGGATATTTGACCTGCATGTATATATGTGTACTCTCGGCATGCTTGGTGCCAAGGA
GGCCAGAATAAGGTATTGGATCCCCTGAAACTGGAATTATGGAAAGTTGTCAGCCACTATGTGGGTCCTGGGACTTGAACTCAGGTCCTCTGCA
AGAGCAGCAAGTGTTCTTAAGTTGTGAGGCTTCTCTCCAGTTCCAGAAGAAACATTTCAAACAGTGATGATCATAGCGAGAGCTTATGCTCACT
GTCTACATGCCATCTCTTAGTATTGTGTTAAATCAGTGTCTCTTGGTTCAGTTTTCAAAATAAGGTAGTTGTGTTGGCCATTGTGGTCTATGCC
TTTATGTTCAACACTTGGGAAACAAACGCAGCAGCTCTCTACACAGTGCCAGTCTCCTCTACACAGAGCAGTGTTCTCAACCTAACACTGCAGC
CCTCTAATGGAGTTCCTCACACTGTGGTGACTCCCCAACCATAAAATTATTTTTGTTCCTACCTCATAGCTGTAATTTTGCTACTTTTATGAAT
TTTAATTTAAATATCTTTTTTTCCCAATTGTCTTAGCAACCCACAGGTTGAGAATTGCTGACACAGAGAGTTCCAAGCCAGTTAGGGCCACATA
GTGAGCTCTGGAAATAAAACAACATAAAAAGCAGTTCTTATTATCTTCCCTTTGCAGTTGACCAATGGAGTCTTTGGTCAGTTAAATCAGTAGC
TGGTGTAACACAACTAGGAAGTCTCTAGAATCTGAGTTTACAGAATCTCTACCCACCATCCTGAGCCATGACCACCTTACACAGCAGCTCCACA
GTCTACCTGAATGGCCACCTGTTGAATCTCTTGTCTTTACTTTTGTGCATGTGTGTGTGTGTGTATACATATGCATGTATATACACATGTGTGT
GGAGGTCAGAGCTTCATTCACACGACATCTTCTTTTATCCCTTGACCTTATCTTTTTGAGACACTCTCTCACTGAACCTGGAGCTCACCAATTC
AGCTAGACCACCTGCTCAAAAGCTGCAGTGGTCTTGTCTTCCCCAGCCCTCTGCTGGGGCTACAAACATACATCATGGTGCTGGCATTTCTACC
TGGAGGGTAGGGAATCCAAGCCTGAGTCCTCTTGCTCTCCCAGACAGTTACACCTCAGCATACCCTCAGCCTCTTTTTTTCCCCCTGAATGTAT
GTAGCTCAGGGTGGCTTAGAAATTCATGAAGTGATTAAGGCTAATCTCAAACTCCTGATCACTCCACCTTACTTACACGTCTGGAGTTCACTCT
GGTAGGACCTCCTCAGGACCCTGCTAGTCTTAGATCCTGTATTCTCTGAATCCTTCTGTTACCTTCAAAGAGCAGCCTGGCGTGTTTTCCTTGC
ATCTGATAGCATTTCAAAGAAGTCACAGCAGCAGAGTCTGGGCTAGCAACCGGCAAAACAGAGGAAATTCTGAGCACCTTTGGCCATCAGTCAC
CACACCTTCTGAGCACCTTTGGCCATGAGTCACCACACCTTGTTCAGGAATTGCCATCTCTGCCCACAGAATCGCCCACTGTTTTCTGTGTGGG
ACCAAAATAGATACCTCCTTCATAAACTTTGTGTGTGTGTGTGTGTGTGTGTGTGTTCTCTCTCTCTCTCTCTCTCTCTCTCTCTCTCTCTCTC
TCTCTTGGTAATAAAAAACAAAAGACAAACATGGGTATGTGCTTCCAAGGGCAGACTAAGAAGCCACTTACAGGTGAGTGTGACAGCTGAGAGG
AACCGTGGCAAGGAACACCCTACCCTGGTGGCAGAGCTTCTCGATATTTGTATGTCTGCTGCTTTGCTTCTCAGTTCATTCATGATCTATTGAG
CAACTTCACGCAAGGTTAGAGAGGCAGAGATGAATAAGACCCAACTCTTGGCCTCCAGGAGCTTCTTGCTTATGCGGAGAGAATACCCAAGCTA
AGGGCTGAGATTTAAGTAAGAGCACAGAGCTGGTGGACACACACTCCACTGCCCACTCCTCCTGCAAGACCGACACACCATAAGCTAGGAACTG
CTTCCCATTATATGTACATGCAGAAGAGAGAAGGGCTCACGCTGTTTTGTCAGTGTGAGTGACTAGAATTAGAATCCAGCACTTTCCATTTTGA
GTTTAGAACAATCTGCAGAGGTTTTGTGCTTGTTTGGCTCAGCAATACCTTTCAGCGACATCTCAGGTAGGACGTACTGGGAGTCCTTCAGTAA
CAGACTGTTTCCACAGGCTCAGGAGTCTCTGAGGCACCATCTATAGGCCAACTCTCACATGTCTGAGTACATTTGAAGATCTCCCAGGTCCTCA
ACATCTATGACCTCTTCAAGGAAGAAAGGAAAAGGGGGAGGGAGGGCAGGAGGGAAGGNNNNNNNNNNNNNNNNNNNNNNNNNNNNNNNNNNNN
NNNNNNNNNNNNNNNNNNNNNNNNNNNNNNNNNNNNNNNNNNNNNNNNNNNNNNNNNNNNNNNNNNNNNNNNNNNNNNNNNNNNNNNNNNNNNN
NNNNNNNNNNNNNNNNNNNNNNNNNNNNNCTAAGGATTGAGCCCAGGGTTCAATTCACACTAAACAAAACACTTTACCTCTGAGCTGGGTCCCC
AGTTCTTACTATACTGTATAAAGCCGAAAAGAAAAGCAGTGCTTTAAAGATGTATTAATAAACTATAAGAATAATACATAATAAATTCATATGT
AAAAAACCACAATGTATATATGTAAATGAGAGCAGCCCTAAAACCAAACAGGCCTGTGTCCCCACCGAAAAGGTCACTTTATCATGTTGTGGGG
AACCGCAAAAGAAATGTTTCTAAAAGTTTCTTTTGAAGTCCCCGACATCTATGCTGACGTCAGCCTCTTCCTGCCCAGCGCTCTGAAAGTTTCC
AGGGAGTTTTGGGGCCAGTGACTTGACACAGGGTTGTATGTTTGACACTTGCTGACTGTGGGCACGTTGTGGTGGCTTTCCCTGCCTGCCAAGC
CCCACTCAGCTGAGCATCAGCATGGTATGTGCTTCCTGTCCCCGTGCTAGTGACACCTCTCTGTTCAGACCTTGATTTAGAACAAAAAAGAACC
TTTGTGAAGAGAAAACTCCTTATTTAAAGGAAAGTAAACCGAACTTTTGAGAGTCTTTTTAGAATAAAAGGGCGACTCCTCAGGAGTCCCGCTG
GTACCCCTGAGGGGAGGTGAGCCTTGAGGGCTCGCTGCTAGGTTTCCCTGTCTGGTCCCAGACATCACTTTCCCTTTCTAACTGTCTCCTCAGA
GGCCGCTTCTGGAGGTAATTTTTAGCTGCCAATGCTGAGGAACTATTGGCCAGAGCATGCCACCCTGCTTCTTAGAGAATACAACTGCCACCAT
TGAAAACCTAGGCTGTCTAACCAGTGAGCTCAGGGCGTCCGCCTGTCTCCACCTCCCTTTTCCTCCTGTGCTGGGATTTCCATGTGCACAGCCA
TATAGAGTTTATAGAGTGCTGGGGATGTGAACTCAGGTTCTCATGCTTCTGTCGCAAACCCACGAAACCATCTCCCATCCTTAGTTTTATATAT
TTCACTATACATTCATATTATAATATACATTATATATTATATAATATATATTATATAAAACATATGTAATATATATTATAATATATAATACCAT
GGTATTGGCAGTGCTTAGAATAGGTGCCCCAGATTTTCGTAACTTTTTCTTTGTTTTCTGTTTCTCTTCTAATCTTTTTTTTTTAAGTTGGTTA
TTTTATTTTTTTACATTTCAAATGTTATTCCCCTTCCTGGTTTCCTCTCCGCAGCCCCCACAATCCCATCCCCCTCCTCCCTGCTTCTAGGAGG
GTGGCTACCCCACCCACCCACCCACTCCCACCTCACTGCCCTGGTATTCCCCTTCACTGGGCATCAAGCCTTTACTGGACCAAAGGCCTCCCCT
CCCATTGATGCCAGATAAGGCCATCCTCTGCTACATATGCAGCTGGAGTCATGGGTCCCTCCATGTATGCTCTTTGGTTGATGGTTTAGTCCCT
AAGAACTTTGGGAGGTCTGGTTGGTTGATCTTGTTGTTTTTCCTATCGAGTTGCAAACCCCTTCACCTCCTACAGTCCTTGCCCTAACTTTTCC
CCTGGGGCCCCTGGGCTCAGTCCAATGGTTGGCTGCAACTTAAACAGCTGTCCCACACCATGGTTACTTCTCCAGTCTTTAATTGCATTTGTTT
AACAATTTATTTTAACAATTTATTTTCTTATGTAATATATGTGTGTGTGTGTATACATCTATATATATATGAGAGAAGAGGGCATCAGAAAACA
GAGGGTATCTGATCCCTTTACAGGTTGTGAGCCACCATGTGGTCGATGGGAATTGATTTCAGGACCTCTCTGGAAGAGCAGCCAGCGCTCTTAA
CAGTTGGGCCGTCTCTCCAGCTTGTATTTGTTTGTTTACTTATGTATTCATTTACTTATAGACAGGGTCCAGCTATGTATCCTGAACTGACTTG
CAGTGTAGCTAGGCTGGCCTCAAACTCATGGTAATCACCTCTGTCAGCCTTCTGAGTTCTGGGACTACACATGCAGGGGAAATCCCACAGATAT
CCATTTGAAACAAGCCCTCACGATTACAACTTGCTTCTCAGAAGGCTCTGTCTTTTTTCAGAAGACTGTGGGCCGGATTTACCAATTTAGCAGT
GCTCCGCTAAAAATATGGCCCCCTCCCAAGAAATCCGTTTCTAAGATTTCAGGCGAAAACTGTCTTTAGTTTTCAGAGAAAGAGGAGGAATATT
TCTTCCCAGACTTTTCTCTCTCTCTCTTTCTTTTTTAATCTGATAACACTTTAATTTAAATCAAGTTGACATTCTGTGGTAAGTTTGTGGTTAA
CTCTTTCAAGTGCTGAAGCTTGTTTTCTGAGGTGACTGGAGAGTTAGAAAAAGACAGGCAGCCCAACCACTGTACTCTGTAAGCATTACAGGCT
CCTGGATGTGACAATCTACAGGCCGCTCTGTGAGACAGAGGGCAGTTCTCAGCTCCTTGCCTGGGTTTCTCTTTCTAAGAGCAAATTCCTAGTT
TCTGTAGACCTACTGTTTGTTGTTTGTGTAACTACTGCCAAGAAGGCACAGGGTTTTCTCCAAAATGGTCTTACTAGTGAGTCACACATTCCTG
CCTTATGGAAACCCAGGCTTTGACGAAGCCTGAGAGAACTGGGCCTCAGAAACGTGTGTCAGATGACAACAGGACTCACAGACACAAAAGGCTA
ACCACCGTTCTGCAAATATTGTTATTTCACTGTTTCCCCTTTAATTTTAACAAACTTTTCTTTAATAATCACACACACACACACACACACACAC
ACACACACACACATTTTTGACAGGGTCTCACTGTGAAGCCCTGGTTGTCATGGAACTATCCTGGAACTCATTATAGAGACCAGGCTGGGCTAGA
ACTCAGAGATCCACCTGCCTCTGCCTCCCGAGTGCTGTGATTAATGGAATGTGCCACCATGTCTGGCTTTCATGAGTATTCTTTCAATCATCTT
TGGATTCATTTCCTGCTATTGGCATCGCCATATAATTTTCCACCTTTAAACAGAGTCATATCAAGAGATTTTCCACTAGTGAACCATCCATCAC
TGCTGAGATAAATTCTAATTGATCAGAATATTAGTTTTTGTCATACCTGGCTAGAACCAAGTACAAATATTGTAATCGATATTCTGTTGTCTGT
TTTTATAAGTGAGATGGTCTTACGGCCATTTTCTCTGCAGTTCATCCCAAGTTTAATAGGAACACTAACATAACTCTGTAAAAGGAATTAGAAT
CATTGAAGTGTCTGTCCTCGTCTGAATGAGAATAGCTGCCATAGGCTCATAGATTTGAATATTTAGTCCCCAGTGAGTGGAATTTCCAGTTTGG
GAAGGATTAAGAGGGCTGACCTTTATTCAGGGTTTTGAAAGACTCATGTGATATTCCAGGGTTGTTTTCTCTCTCTCTCTCTCTCTCTCTCTCT
CTCTCTCTCTCTCTCTCTCTCTCTCTCTCTCTCTCTTTCTCTCTCTCTCTCATCGCTGTGGACAGAGATCTGAGCTGTAAGCTGTTCCTTTACT
CTACCATCATGGATTCAAACTCCCTGAAACCATATGCCAAATTAAATGTTTTCTTTGTAAGTCCTGGTACCCTATCTCAGCAATGGAAAAGTTA
ACTAAGATGCCCTCTGAAACAGTTTGTATTAAGCATCTGCTACCTATTTCATATATTTGTTCACAAGTTGATTTTTTCAAATGATTGGTTTATT
AGGTATAATTCTCCTCTTTCTTCAGCTTCTTTCTCTCTTTCTAAGACAAAATGTCGCCATGTACCTCAGGCTGGGCTTGAACTCACAATCCTGC
TCATTTTTGAGTTTTTCGTGGATCAGTAGTTACACCTCCCTTTTCTTCAAACTGATGCTCTGTTGTTCTTGCTCCTTCTAGTCCTGACTATTTT
CAGAATCTACTTAAATGAATAGTTTTTAATTTGGAGGACATTCTCTGCTGGTTTTTTTTTTTTCATCTTGGTCAATCTTTCATTTACAGTTTTG
ATCTCCTTTCTTTAACATTATTCCATGGTTTTTTAACTTCCTCCAGTAAATATTAAATGGGATAATGCCTGTTCTTTGAACACGTATTTTCCTT
TGAGGTTGTAGACATCCCTGGAGAGGCTGTCCTGGCTCAGTACTGCAGGGTTTCTGGTTATCATTTTTGTTGCTATTCGGTGCAGAATATTTTA
CAGAATGAGTTCTGAGTTTCCCTTTGATCCATGGATTTGTTTGGAAGTTTGAGGTTTCTTTTTTAAAATGTGTGAAGTTTTATTGTTGTTTGTG
GTTTCGCTCTCTGTTTTTAACTTTTAATTTCATTGCGCCATGATTAGAAAATGAATCTGTGTGATGCTTATTCTTTGACACTTGTGGAAACCAC
CTCTGGTGCCTAGTAGCAGCTCAGTTCTCTTTACCACTGTCCCATCCGTGATAAAGAGAGTGTACATTGCCTATGTATTGGTCACACAACTACA
TAAATATGCACAAATCAAGCTTACTGACAACTAACAGACCTTCTTATAGAGTAACCTTTTCTTATTAGTGGTCCTTGCAACATCAGTTTCTTTT
GTAGTGAGTTCTGGGCTTAATTCTAGTTGGGTTACTTTTTGTGGTTTCCCTTGGCTTCCTGAGCTGTATTTGGTAGCATCTGATTGGCTGACCT
GCTTTTACTATAGGATTCCCATGAGTGTGGTCTCTTTGATAGTTCAGGAGTTGTCTTCTAGACACTGCAGTATGTGAAATGTATTATCTTTGGT
TATTGCCGTAGAGTCTGTGTTATGTAACTTGGAAGAGTGTAGGGTCATTTACAGCAGTGCCTCCCTTGTGTGGAGACAGCACAGTGTGTTACCT
CTTTCTGTTGTTACATCCAGTGTTGAGTCTTCACCCTTGATCCTAACCCCACTCACTCCCCTGCATCTTGGGTCTTTTGTCTCCTTCATTATTC
ATGTTGAGATTTTGTCTAAGTTTGAGGAGGACTAAGTAATGAATGGAATATGGTATAAGTTCTCTCATCTGCGATGGAAGTATATCTTACCTCC
TACCTTGTGTGTTCACAGTGTTGGCCTTGATCTCCAGAATCAACACGAATGTCAATGGTTCAGAAGCAAATATGTTCTACAACATTTATTTGCG
TTTATACAATAAAACCCTACTCAAGTAACATCTACAACACCAATGACCGTAAGAAAGTGAGGACCTAAAATCAAACACACAGAAGAGATATATA
ATAATGAAAGTTACTTATGCTTATAATATTTCTAATTATACTTATAATAATTATAAGTATACTTATACTTAATTATACTTATGTTAATTCTACT
TTCATTATTTAATTATTTAATTATTTAATTATTTAACTCTACTCTCTCTATAAAGGCCCGAGTTAGATTATTAATAAATACAACTAGATAAAGG
AGTGAGAAAAGACTAATGATGGGACACAAGGCAAACTTAACAGGCAAAGTTAAGCAAGCTGAAGCTTCCCTCTTGCGTAGGTGATGAAGATGCC
TCTTTCCCCAGCTTCTGTTTTCAGAGTTCACTGTGCTTGTGTGTGTGTGTGTGTGTGTGTGTGTGTGTGTGTGTGTATGTGTTATGGCATGTGT
TTATGTTTGTACATGTAGTGTGTATTTATGTGGTGTGTGTGTGTGTGTGCGTGCATGTGTGTGTGATATATGTGGTATGTGTGGTGTATGTGGT
GTATCTGATGTGTGTGGTGTGTGTGTGTGTGTCTGTGTGTTGCGGGTGGGCCTTGTCTTCTAGTCAAACAGGTCAAACCAAACACGACAGCACC
TGTTTGGTGCTGTTTGGTGCCGACAGACACTCGGTTCCAGATGCCTTGACAAAGTCACTGCAAGGCTATATTCACACCCCTGAGCTACCCTAGC
AAATCCCAGGACTCTGTGAGGTAGGAGTCACAAGGATGCTATTCTTGGTATCTTTTGTGATGCAGCAGGAGGGGTTGCTTTAGCAGGCCCATGG
TGAGGCATCCCCCACCTCTGGTATCAGCCGTAGGACAGCTCTAGTATAAAATGGAGTTTATTTGCGACATGGGAGTAGAGGCAGAGGAAGGAAG
GGGACAGAGAACAACAGAAAGAGAGAAGAGAGGAGGAGAGAGAAAAAGGGAAGAGGCCTTCCAGGAACATGCTGAGGGAGTGGGAGACAGAGAG
AGAGAGGGCAGAGAGAGAGAGACAGAACAGGGAGAGAGAGGAGGAGAAGGAGCAACAGGGAGGGAGAAGGGGGAGGAGGAGGAGGAACAGGAAG
GAGAGAGAGGCCAAACAATCCTTTTTATAGCAAGTCAGGCTAGTACCTGGCTCTTCCTAGGTAACTGTCGGGCAGAGCCTACAAGAAAGGCTAA
CAATTCTCACTGGCCATTCTTGTCCCTGTGCCTGCAGGAGTGAAAAATCCCCATGTCGTTGGCTAATCCTCCAACTGTCTCAGAACCTCAGAGC
AGGAGACCATGACCAAGCCAAAGCATTTAGTGCTGAGGTGCAAGTGAGGCGTCATCACTGACTGACTCATTGCCTCCTCCAAATCCCCGACAGC
TGCCCTTCCCCTCCTTATTAATAAGCGGCATGTAGCTAGGCATAATGCTGGAGAAGGAGCTGAGAGGTTGACGTCTTCATCTGCAGCCACCAGA
AAGAGATGTGTGTCACACTGGTCATAGTTTGGGCATATGTGACCTCAAAGCCAACCTTCAAAATAACACACTTCCTCCAGCAAGGCCACACCTC
CTAATAGTTCCACTCCCTATGGGTCTTTGGGGGGCCAATTACATTCAAACTACCATAGTGCCTTGGTCAGGGTTTGTATTCCCACACAAAATAT
CATGACCAAGAGGCAAATTGGGGAAGAAGAGTTTATTCAGCTTGCACTTCCATACTGTTCTTCATCTCCAAGGAAAAGTCAGGACTGGAACTCA
AGCAGGTCACAAAGCAGGAGCTGATGCAGAGGCCATGGAGCCATGTTACTTACTGGCTTGCTTCCCCTCCCTTGCTCAGCCTGCTCTCTTATAG
AACCAAGACTACCAGCCCAGAGATGGCACCACCCACAATGGGCCCACCCACCCTTGATCACTAATTGAGAAAATGCTTTACAGCTGGATCTCAT
GGAGGCATTTCCTCAAGGGAGCCTCCTTTCTCTGTGATAACTCCAGTTTCTGTCAAGTTGGCACAAAAAACCAGCCACTACACACAGCTACCCT
TAATATCCAGATAGTTTCTCACTAGTGTGACTCCTGTGTGCTTGCCTCCTGTGTGACAATTAAAAAGGACCATCACGCTAACCTACTATATGCA
AGGGAGTGCAGTAAAGAAACAGCTAACATGATTTCTCCCATGGTGTGGTTAAAGTTTTTACTGTAGAGATGAGAAAAAGCAGACAGGAAAAGAA
GCAGACTGATCATGCCCAGGACAAGGGAAGCAGGAGAGAATAGTAGTGCTCGGGACGGACCAAGACATAGACGACAGAGCCTAGTAAGACAGGG
TAAGTGAATAGAGAGAAAGAGCAGGAATAGTGGAGAATAGTGGGTTATAAGGAGGCTGCATAGGCAGGGAGAGGGAACAGCCTCGGCACTGTCA
CGGTGGCTTTGAAACATATAACATTGTTGAAATAATTAAGTAATAAGTTAATCCCAGCACCGGTTACTTCCCACCTCAATGGTTTATGTTCCCG
AACAAAACATATACACACAGTCTTTATATTTTAATATGCCTTAAACAGCACAATAGCTGGGTCACTGCCAAACCTCCATGAGGTTAATCCTGAA
TTATTACTTACTAATTCTGTGTTCTATCTTGGCTGCTCTAGACCAAGTTGGGCAGCCCCCTAGGCCATGCTCTCAGTTTCTTCACAAGATCGCT
ATGCCTCTCTGTTCTCCATTCTTCCCCCATCTCTCCTCTCCTCCACACTCCCCCTACGTGGTGGATCATCTCTTTCTCCCTCCTCAGGGTCCCA
AGCCTGGTAATCTTTAAATCCTGCTTCTGTCTGTCCTCTTCAGCCATTGGTCATTGGCATCTTAATTTACCAATCAGAATCAACTATATGTAAC
TTTATATATCAGTAAACAACAAAACAAAACAAAGCAAGATTGGGAAGTAATCTAAGCAGCCATTAAGACTTGTGGAGGATTTGTAGATAATAAA
GCAACAAGAGATTATTTCAAGGGGGGGTGCTCATCTTCCCGCCCTTTCCAGCAAGAGACCCTCCTTGTAGTCTACTGAACACAGCAATGCATTT
GTGATGATTAATCTCCTTGTTGACTTGAGGAGGGTTAGAGTCACCATGAAAGCAAATCTCAGGCATATCTGTGAGGGACTTTTCAGATTAGGTT
AGTAAGTATGAAGACTGACCCTAAAGTGTGTGGTGTCATTTCCAGTAGCTGTAGTCCTAGTTGGCATTAAAAGGAGAAAGCTAGCATCCATGAA
AGGATGGATCTCTAGCATCCATCTCTCTCTGATTCCTGATTATGGATCCGCCATGGTCACTGGCTTCAAACTCCTGCTGCTGGGACTTCCCCCC
ATGATGGACTGCACCTGAGCCAAGATAAATTCTTTCTTTCTTTCTTTCTTTCTTTCTTTCTTTCTTTCTTTCTTTCTTTCTTTCTTTCTTTCTT
CTTTTCTTTCTTTCTTTCTTTCTTTCTTTCTTTCTTTCTTTCTTTCTTTCTTTCTTTCTTTCTTCCTTCCTTCCTTCCTTCCTTCCTTCCTTCC
TTCGCTTTTGTTGGGTATTCTGTTACAGCAAAGAAGAAGTTGGTAGGCTGTGTTTCACAACGCCTATGCTAGGATGGCTTGTTTTGTTTGATCT
GAACACCCGTCAAGCCAGGGTAAACTTGAACCTGGCTATGACGCAGGGGCCAGGATTCTCCCCAATGGGCACCAATGTCAAAAGCCCAGAAGCA
CAAATCCATATGGCGAAAGGCAATGTCTTAGAGACTTTCGGATGCTGTTCTCATCATATCGCTGATTGACGGTTCAAGGAAGCTGCCACATGCT
GTTTGATTGGCATTTGGATGCTTAACATAAAGCAATAACAAAGTCAACCTTACTTGCCAAGAACTTAGCATATGTTAGACAAAAACTTCCTGGG
TCAAAAGAGAGCAAAGAGAGGGTTCCTATCCGGTGGTTAATCACAAAGCAGAAGGGCACATTGGGTTTCACTTCCGGTTGGTTTGTTCAGATGG
TATTATGGAGGCAGTTGATAGGGTAGAGAGAAGTCGTACAGAGAGAAATGGTGAGATGCTGTTGCCACACAGGTGGACAGTTGCTGAGTTGTAT
GGGAGTCTTGAACGTTAGTGGAGAGGGAGTATGAATGCCAGAGTATTGTGGCTCTTGGCAACTGAGCGGACATCAAGAATCAGAAACATGTGGA
ATTCGCTCAGATGGTGACAGTCACTAACAGAAGCAGGTCAGAAAGGGAACAGGGTGGTTTGTATGCTTATTTCTAGCTTTTTGTTTCAAGAGCA
TTGGAGATTCACACTCTCTCCTCATTCTCTTTGTTCTGTATTACACAGTCAGTTTTCTATTTAAAATAATTTCACCAAGGTAAAAGGCAATTTT
TAAAAAAAGGATAAACATAAAGGCAGCCATTAGACTCCTGGCTTTCAGTTCCCCCCACTATGAAAATGCGGTTTGGGTAGCCTGACCTCTTGGG
ACCTCAGTCTCTAACTGTATGAAGCCAGTTGAGAATATCTTCCCTTTGTGGCTGCACAGAGCATTGGAGGTAATATACACAAAGTGGAGTTCAG
AAATTAGGTCTGTTATTACATATCTTAAAAATCCAAGCAGAGGGACCTGGGTGCTCTAACTTCACAGATAATGATCTGAACTGAACCACAACAT
CAATAAACACTGCCTGGTACCCAGATGGCTTAGACAGATGAGACATCTCCCTGAAAGTGACAGCTGTCAGATGGGGAGTGGGGGCAACCTGTCT
CCTGGAGGTTACATCTCTCTGACATGGAAGGAACATTTCTGAACTTGGAGAACTCAGGGTTTTCCACAATTCACAGAAAGGGCGCAGAAAGATC
AGTTTCTTTTTTATGAGTCTATCACTCTCAGAGCATTTCATCATGTTAAACAATATTCATCATGTTCTACTGAATCGTCTTTCACATACCCAAA
CACACACACACACACACACACACACACACACACACACACACACTTTCTGTAAGGCCCAACCATTCATTTGGTCTGGAGACAACCCTGACCTTGG
CTTTCTTATCTGATCTGATGAGGAAGAGGATGGCTCTCAGGCAAAAGCCACACTGTTCATCAGGTGACTCACACTCTTTTTTCTTTTTTCTTTT
TTCTTTTTTTTTTCGAGACAGGCTTTCTCTGTGTAGCCCTGGCTGTCCTGGAACTCACTTTGTAGACCAGGCTGGCCTCGAACTCAGAAATCCG
ACTGCCTCTGCCTCCCGACTGCTGGCATTAAAGGCGTGGGCCACCACGCCCGGCGACTCACACTCTTGTTACACTCATGAGTCCCTTATATAGT
TCAGTCAATACCTGTCCCGCAGACACCATGCTTGCTGAGTGTTTTCTAACCTCCCTTCTCACTCCCAGTATATGGAAAACCAGGAGGCAGCAGG
GAGAAGAAGCCCTTACTCAGCGTTGGCTGAGCTACAGACAAAACATTTCCTTAACCACTCCTTTCTCAAACTCTGTCCACTTTCTTAGGGAGCC
CTCCTTTGGAGTCATTTACCTAGGGCACAGGAGTCCCTATCGTTCTCATCTTAAATATCATAGATAAACCAACGCTACTGTCTCCCAGCCTACC
TTTCCTCCGGCTACCGACTAGATCCCGAGTAAAAATACAAAGCACTCTGAAGGCACGTTCCAAAGCACGAAGGGTCTGCTCAGTGTGCGCTGGA
AGACAAGAGTAGCTCGGCAGGCAGTACAGACAGAAAGTAGCGTCCAGCAGCCAGAAGTTCCCCCTCAACCTTAACTATCTGCTGTGTCACAGTC
GACAGAAAGCATCACCACCGCTAGAGGGCTCACTTCTCCAGCCCAGTCTGTCTCTTCAGGAGGTTTGAATGCCTGCCACTGGGAGCTCTCTGGT
CGTCCTCCATTTAGCGGGCGCTGTCTTATTGATAAAACAACCACTTGCCTCCCGAGAACGCTTCAACTGTCAATATTGCTGTTTAATTCAAGGG
GCACAGAAGAATTCAAGGCACAATTAATTCTAGTTTCATTTTGTTTCTAAAAATAAAACTGTTAAAAAAAATCAAGGGCAACCTTTTCTATCTG
AGGAGTGGAGGCGAAGCCATAAAACCATGTAAGGAGGATGGCAGTTAGCGTAAGAAGTACGGAGCCATGTCTGTCCTCCTTGATCTTGTTACTA
CATATAGAGGTCTCTTCCTGGGAGCAGAAGGGTTTGGCGAGAAAAGCACAAATGACCTCATCCCACAGCAAGGCTCTACCCCTAAAGGTTCTGC
GATCATCCCAAACAGCGCCCCATGCTGCCGACCAAGTGTTCAAACATAGGTCCCTATGGACTGACATCCACATTCAAACCACAACAAGCACCTT
TCCCTACCTGCCCTGTGCTGCAGCCCACAGGGAGGAGGCTTTGTAATTCCCAGAGTATTCGCTGAAGGAGTCACAAGTTCCCAGAACGTCTTGT
ATTCCATTTTTCCTGGAGACACTAGATCCCCAGATAATTCCTGCATTATGGTCTTATTTCAGGGAGAGTGACTGGGGAGAGATTTGGCAAGCAT
GGGACTACCCCTCATACAAGATGGGCAACATACTCCATCCTGGAAGAGTTTGGCGTTAACTTTCCCAGTGTAGGTCTCTGGTCTGAACCCTTGT
ATTGGGTTGATTAACAACTGCTGGCCGCTTCTTTCGCCCTGTGCCTACATGAAAGGCAAAACCACATCCAAGTACCTCGGAGTCTGAGATAGGA
GTCTCCCAGGAGCCCCATATCCCAAGAATTAAGGTGGAAAAAGGCTGGGAGGTGAATTTGGGAGAAGTGGTTTGCGACTATTCAGGAGGTAAAA
GTAGAGAGGGAAGACGCCAGTCACCTGAAGTCATTTTAGACAATAAATTAGGATTCCTTTTTTAAGTTGTGTACATGGAATTCTCCTTCATGAC
CTCCCAGAGAAGCTTGTAAACAAATTATTTTTACTCATTTTTGGCTGTTGCGCTGATGTTTCTTTTATGACACCAGAGCAACAAGAGCTAAGAA
TATCCCCAATTTACTCTTAAGGGATTAAAAAGAATAAAATCTCTAGGGCTGCCTTTCCCATGGGCTCTTCTGCCTTGGAGTCTTTGAATAAGTT
TTGGAACACATTTGGCAAGGCCTTTCACGGAGAGAGAATCATAAGCAATTCTGAGAAAGGTTCTTTTAGAAATGGAAAATCTGTGAGAGTACAA
AATTCTACAACTGTCTCCGTGACCCCACATGACCTCCTTGGACACTGGACTAGTTCCGGATGACTGTGGAAATTTCCATGGCAAACCCTTGTCT
AGAAAAACATCACCGAACTCTGAGGAATGCTTAGGGGTGCAATGTCATCCCAAAGAAAACTTATCTGACCTTTCTTAAAGTTATGCATGTGAAA
GCTTTCTTAGCTTCTGCTTTGGTACCAGATTCCAAATATGATCAAGATGAATCCCTCACTATTTGCACTGACGAGTAGTTACTCAAGAATTGCT
AAATTAATTGGTTTTGTTTCAGTGAAATTAGCTATAGACGACTTATTCTTAAAAGGTTTTATTTATTATTTTAATGTATTTAATGTGCCTATCT
GTGCCTGTGTGAGTGCATGCACACTTGTGTGCATAGAAGCACATGCCTGAGTGTTATTAATGTCCATAAGATATTCCGGTGTGCCATTCTGCCT
ATTCCTTTGAGGCAGAGTCTCTCCCTGAACCTGAGGCTCAGACTCTCTCAGCTAGTCTGGAACCTACACTATTCGAGCTGTCTTCCTGTTCCTG
TCTGCACTTCCCCTCCGGGCTAGTGTTCCAGGCTTTTGCAGGAAGCCCCCATCTTCTGCAGGGGCCCTGGAATCCAAAATCTCGTCCTTGTGAT
TGTGGGGCCAAGAGCAACAGCGGATCTGTCTTTCCAGACCCCAAACATGCAGGCTTTATTTTACTAATCACTATTGTGGGGGTGGTCATTGGGG
TGTGTGTGTGTGTGATGTAAGAAAGACCTTATAGGGAAGCTATATGAATAGGTCTGATGCAACTTGATGAGTTTTGACAACTGTGCGCAAGAAT
ATGAAGAACACTCGGTTGTTTTTTTTTTTTTGCTGTCTCCTTCGAGTTGACGCTGCCTACTACAAGAAACCACTGGCCTAATTTCTCTCTGTTT
AAGTTCTCTACCCCCTCTCCCTCTCTCTCCCTCTCTCCCTCTGCCCCCCCATTTACATCTAAGTGAATCATGTAAGTGAAGTCATGTAAGTAAG
TATGACTAGCTTCTTTAGTTTCTTTTTTTTTCGACATTTCTCTATGTTGTGTGGCAGGAATTCGTTCTTTTGAATGCTTTGGTGCATTTTTGAA
TTTATACTCTATTCTCACAATGATAGGTACATATGTTACTGGGTTGGTTTTGTTGCTTTAGAGATAAGGTCTGGAGTAGCCCAGGCTGGTATCA
AACTCATAACTCTCCTGCTCCAGCTTCCGGAGATCTGGGATTATAAGTATTTCCCACCATGTCCCAACTTGCGTTCGTTATTAATTAGAAGTCT
GTGTCAAATTCTCTCTTGGTGCACATTATTTCACTACTCTGAGACAAATACTTCAGGGTGGAATTGCTACACAGGTCTATATTTAACAGTATCT
GAAATATATTCTTTAAATTATTTTAGATTTATGATGTGCTCATCAGTATTTTGCCCACATAAATATATATGCACCATACTCATGCCGGCTATTT
GCAGAGGACAGAAGACAGCATCACGTCCCCCTGGAAATGGAGTTACAGAGACTCTTGAACCACAGTGTGAGTTCTAGAAACCAAATCTTCATCC
TCTACAAGAATGCCACCTCTTAATTCCTGAGCCATCTCTCCTGTTCCATTTTAAATACCTTAAACCATTGGTTCAAAACCTTCCTGATGCTGCG
ACCCTTTAATACAGTTTCTCATACTACGGTGAGCCCCCACCCATAAAATTAGTTCGTTGCTACTTCATAACCATAATTTTGCTACTGTTATGAA
TCGGTATGTAACTATTTTTCGAGCTAGAGGTTTCCCAAATGGCTCACAACCCACAGGTTGAGAACTGCTACCATAAACAGTTTGCCCAAGTAAT
TTTATCTTGTGCTCTCAACACTATATAAAATAATTCCAGCAGCTCAGATTCCCCTTCACATTTGGTGCAGATTTCTGTCTATTTTTTTTTTTTT
TCTATTTCACCCATCCTAACGGGCAAATTCATGGTGGTTTTCAATTTGTGGCTTTTTTTTTCCCTTGAAAAAGTTATTTATTATTTGTGTGAAG
TGCATAAGCACACACGTGTGCAGGTCAGGGAGCAACTTTCAGGAGTGGGTTTTCTCCTTCATCCATGGGTTCTGTTCAGTTAACTTGGGCCATC
GGGTGTGGGGGTCAAGCACACCTAGCTTGCCTCTCTCTCTCTCCCCATCTCCCTCTCTCCCTNNNNNNNNNNNNNNNNNNNNNNNNNNNNNNNN
NNNNNNNNNNNNNNNNNNNNNNNNNNNNNNNNNNNNNNNNNNNNNNNNNNNNNNNNNNNNNNNNNNNNNNNNNNNNNNNNNNNNNNNNNNNNNN
NNNNNNNNNNNNNNNNNNNNNNNNNNNNNNNNNNNNNNNNNNNNNNNNNNNNNNNNNNNNNNNNNNNNNNNNNNNNNNNNNNNNNNNNNNNNNN
NNNNNNNNNNNNNNNNNNNNNNNNNNNNNNNNNNNNNNNNNNNNNNNNNNNNNNNNNNNNNNNNNNNNNNNNNNNNNNNNNNNNNNNNNNNNNN
NNNNNNNNNNNNNNNNNNNNNNNNNNNNNNNNNNNNNNNNNNNNNNNNNNNNNNNNNNNNNNNNNNNNNNNNNNNNNNNNNNNNNNNNNNNNNN
NNNNNNNNNNNNNNNNNNNNNNNNNNNNNNNNNNNNNNNNNNNNNNNNNNNNNNNNNNNNNNNNNNNNNNNNNNNNNNNNNNNNNNNNNNNNNN
NNNNNNNNNNNNNNNNNNNNNNNNNNNNNNNNNNNNNNNNNNNNNNNNNNNNNNNNNNNNNNNNNNNNNNNNNNNNNNNNNNNNNNNNNNNNNN
NNNNNNNNNNNNNNNNNNNNNNNNNNNNNNNNNNNNNNNNNNNNNNNNNNNNNNNNNNNNNNNNNNNNNNNNNNNNNNNNNNNNNNNNNNNNNN
NNNNNNNNNNNNNNNNNNNNNNNNNNNNNNNNNNNNNNNNNNNNNNNNNNNNNNNNNNNNNNNNNNNNNNNNNNNNNNNNNNNNNNNNNNNNNN
NNNNNNNNNNNNNNNNNNNNNNNNNNNNNNNNNNNNNNNNNNNNNNNNNNNNNNNNNNNNNNNNNNNNNNNNNNNNNNNNNNACATTTTTTCAG
GTGCTTCTCACCCCTTCCGTATTCCTCAGTTGACAATTCTTTGTTTAGCTCTGCACCCCATTTTTAATGGGGTTACTTGAATTTCTGGAGTCCA
GCTTTTTGAGCTCTTTGTATATATTGGATATTAGTCCCCTATCACATTTACGGTTGGTAAAAATCCTTTCCCAATCTGTTGGTGTCCTTTTTGT
CTTAATGACAGTATCTTTTGCCTTACTGAACCTTTGCAATTTTATCACGTCCCATTTGTTGATTCTTAATCTAACAGTACAAGCCATTGCTGTT
CTGTTTAGGAATTTTTCCCCTGTGCCCATATCTTTGAGGCTTTTCCCCACTTTCTCCTCTATAAGTTTCAGTGTCTCTGGTTTTATGTGCAGTT
TTTTGATCCACTTAGACTTGAGCTTTGTACAAGGAGATAAGAATGAACCAATTTGCATGATTCTACATGATAACTGCCAGTTGTGAAAATGCTG
TCTTTTTTTCCACTGGATGGTTTTAGCTCCCTTGTCAAAGATCAACTCACCATACGTCTGTGGCTTCATTTCTGAGTCTTCAATTCTATTCCGT
TGATCTACCTGTCTGTTGCTCTACCAGTACCTTGCAGTTTTTATCACAATTGCTCTGTAGTACAGTTTGAAGTCGGGCATGATGATTCCACCAG
AGGTTCTTTTATTGTTGAGAATAGTTTTTGGTATCCTAGGTTTTTGTTGTTGTTGTTGTTATTCCAGATGAATTTGCAAATTGCCCTTTCTAAC
TCAGTGAAGAATTGAGTTGGAATTTTGATGTGGATTGCATTCAATCTCTACATTGCTTTTGGCACGATAGCCATTTTGACTATATTAATCCTGC
CAATCCATGAGCATGGGAGATCTTTCCATCTTCTGAGATCTTCTTCAATTTCTTTCTGCAGAGACTTGAAGTTCTTATCATACAGATCTTTCAC
TTCCTTAGTTAGGGTCACACCAAGATATTTTATATTATTTGTGAAGGGTGTTGTCTCCCTAATTTCTTTCTCATCCTGTTTATCCTTTGTGTAG
AGAAAGGCCATTTGTTTTACTTAATTTTATATGCACCTACTGCACTGAAGCTGTTTATCAGGTTTAGGAATTCTCTGGTGGAATTTTTGGGGTT
CACTTATATATACTATCATATCATCTGCAAATAGTGATATTTTGACTTCTTCCTTTCCAATTTGTATCCCCTTGATCTCCTTTTGTTGTCGAAT
TGCTCTGGCTAGGACTTCAAGTACAATGTTGAATAGGTAGGGAGAAACGTGTATTTTCTTAACAGCTTGGTGACTGCCACTTCAGTGAGTGTGT
GTCTTCAATAATCACAATATTTTCTTTGGAAACATGACTATTCGAGTGTTTGTTCATCTATCGATTCAGTTGCCCTTTACTGTTGCTATGTAGG
TTTTTGTGTATTCTGGAAACAAATATTGTCATATATACATTATAAATGGTTTTCTCACAGCCTGCCACATCTCCTCCATTTTCTCATGGTCTTT
GGATTAGCTGATACTTTTGTAATTTTTTTTTCTTTTATAAAATCTTTAACCTGGAGCAGGGCATGGGAGGGTCCACTCACACCCTCTGATGCTG
GGGTTACAGGTGCTTGTGAGCTGCTTGGTTCAGGTGGCTGGGAAGCGAACATTGGTCCTCTGCAAAGGTAGCAAGCATTCTCAGCAACTGAGCC
ATCTCTCCAGCCCCCTTTTCCTTTTATATTCAGTGCATGCTCTGTCCTAACAAATCTTCACCTATCCACAACTTCTAAAGCTGTCTGCCTTTAT
TTCCTTTTAGAAGTTTTACAGTTTTAATTCTATGATTGCATGTGATACACACACACACACACACACACACACACACACACACACACACACGTTC
TTATTATGGAAGAGAAATAAGTTTTCTCTGTGGAAGGAAGCTCTTTTCCCTTTTCACATTTATCCACACGACTCAAGAGTATTTGTTGAGAACG
TTGTCCTCTTTTCATGAATTGCTTTGGTAAATCGGCGCGGGGGCAGTAATTAAATGTTCCTCAGTTTCTAGAATGTATATTCTGTCGCTGTACT
TGTTTTTCTCCCAGTTGCTTGCTGTCTTGATGGCTAGCTTTATAGTAACAGATGTTATGAGTCTCCTATCATACACTTTATCTTACAGTTATCT
TAGATACTTCCAAGGAAGTTTGAAAACAATTTTCCAATTTTACTAATATGTACATCAAACCAGTGAATTGAAGGTAAACTGACATGTCTTTTAA
AAATCAGCCCTCCAATTTATAAACAGTGTATCTTTCTCTGTTTATTTCACTTAAAAATTTTTTCTCAGCAGAAATTCTTTTGCAATTTTCAAGT
CTGTTCTTGTAGGTGTGGGTGAATTTATTCTTGAGTATTTTATGATTCTGATGTGTAATTACAATTAACTTTAGATCTTAATTAATTCATTCAG
TTTAAATATATAACAAGTGATTTGAGATAGCCACACCTACCTACTTACATACGCCATTATGTAGAATTCTCGGTACTTTCATGCAAAGAGGCAT
TTTTAGCTGTGTTAAGTGCCCTTTCCCACAAAACTACTTTCTGATAGTAACATAGCCCATATCAGCTTTCCTATGCTTATCTCTGCATATCTTT
TTCTATTCTTTCACTCAATTCATTTTGGTTTTTATATTTTAGCATTTTCTTTGTGAGATAGTATGCAGTTGTTGTGGTCTGAAAGTTTCTATTT
TAGAAAAAATTGTTCATTTATGTTTACTATAATCACTAGTAGTGGGTTGACGTTGATGTCTGCCTTCTTGCTCTTTCTTCGTGCTTCTTCATTT
CACCTAAACAGATCTGTTTAATACATATTGGAATGTTCTGTTTAATTTATTCTGTTATCTTTTAATGTGTGCTCCTGGTAGTATTTCATTATTG
GGTGCCTTCCCTGGAATATTTACTATGCATTCTTAATTTTCTATGTTCTATTTAGTTAGCATTGTACCATTTCAGACATGCTAGAAAAATTTAA
AAAGCTAAACGCCCATCAACCTCAGCTTTCTTCCCCAACTTGTCACGTTTTACATTTAAGTAGGTACTAAGATCTGTCCTGTAGGGACCAGCAC
GGTGGCTCAGTGGCTAAGAATGCATGCACACTGCTCTTCCAGAAGATCTGAGTTTAGTTCCAGGCACTCACACTGTACAGCTCACAATCACCTG
TTTCTGACCCCCTCTTCTCCTCTCTACGACAACTCCACTCACCCCCTCCCCTAACACACACACTTAAATCAAAAATAAATAAAAGACCTACCAT
ACAGTGCTATTTTTTTTTTATTTTAGACATCTCTTTCAAGAAAAAACTGGAATTTTCTCATGAATATATACTTACTAATGCCCTTCATTATTCC
CAGTAGATTTCTATTTTTGACTAATATAATTTCCCTGGGTCTTGACATTTTGTCCTTAGCTTTCTTTTCACTTTTAATATGCACTATAAGTGTG
CTAGTGGGGTTTTGTGAACTTTCTTTTACCTGAAAATGTGCTAACCCCATCCTCATTTTTGAAGGGTGTCACGTCTAATCAGGATTGAGCTGAA
AGCCTGTCTGTGTGTCTGTTTCGAGGCTGGCTCTGTTTCCCTGTTATTTTCTGGCTCCCTTTCCTCTGTCGTGAAGTCACTTCTCATCCATCAC
TGTTCCCACTAATGTGTGTGGCCTTTCCCTCTGGCTCCTTTAAGACATTCTCTTTAGATTTTTGGCAGCTTGGCATTAGATGCATAACAATTTG
CTTTTAAAAGTCTACTCTGGTGTCATGAACATCTTGGATCTGTAAGTTAACATCTGTCTTCAAGAGTCAGAAATGAGCTGGCAAGATGGGTAAG
TGTGTACAGGTGTTTCCTATTGGTGGCCCTCCCACATTTCATCCTTCCCAAACAGTTCCACCAAGCAGGACCAAGCATTCAAATATATAAGTCT
ATGAGGGACATTTTCTTTCGAACCACTAAACAGAGGGATAGAAAAGCCGGCGCGGACTCCATCTGTCGGTTGCCGTGATAGATAGAACATACTT
CTTTGCCTTCTACTTCCTGTCCCAGCTACATCTCCAGCTGACTCTTGGGTGCCTGCCCACACTGAGGGCGGGGTCTTTTCCCTATTATTTTGCT
GACCTGTAGTCAGTCTTCTCAGGCAATGTGCTTACAGATACACCCAGAAGTATGTTTCAAATTCTCTAGGCATCCATTAGAGCCTTCAGTCGAC
ACCTCAAACTAGCCGTCATGATACTCACCAGTCTAATGTATAAGCACGTGCACTGTTGGCCTCGGTGTTGGCCTCAGCATGCCGTTCCAGATGG
AGCAGGTGGGCAGGATGGCAGCTTGATTACAACCACCTTCACACACTCAGCCATCATGCCATGACAGCCCCCTGCTTTCCTGCCACTCCCACTC
CTTACCATCACTCACTCCCCCCTCCACCCCCCACCTGCTGTGGTAGTCTCCTAGTCACCTGATGTCTTCAAGCACAAGAGCTTGTTGCAATGGA
ATGGTTTTCACTTACATCAGGGTCCCTCTTCCCTTCAAGAGTCGGGCATAGAGAGCTGGCTGTGGCAGTGTGCACCTGTAATCGAAAGACTTGG
GACTGAAAGCACGATGGTAGGAGTTCATCCTCAGCTACATAACGAACTTGAGCCCAATTGGGCCTACAGGAGAACACTCCCTCTCAAAATGATT
ACATGGGAACCTCTATTTCTGGTGATCATGCTAGGACACCTGACCTGTCTCAGAAGCTTTGGCCCACCCAACCTCTCTCCTGTGTATGCTAGAC
ACAAAGTACCTTCAGAGTCAAATTCTACTTATTTGTACTTATTCCTTCTACAGTTTGCATTTTATACTGTAGAGGAACTTGAGTGAACACTCCT
ATAGCATCTCTGACACAAATATTTATCTCTTCAGTTTTATACAATGGGTTTCATTGTGACTTTTCCATAGATGCATATAATGTATTTTGATCAT
ATTCACACACACACACACATACACACACATACACACATATCATCCTCTGTGCTCCCACTGATCCCGAGGAGGTAGAGTACGTACCAATCCTTTA
AATTGAGAGAAGAAGCATGTGAGCAAGCTACTGCACAATCAAACTCATGTCTCACCAACATTCTCCTTGCCTTTGCAGAACTGTGTCTGTATGA
CCCACCCGACGTCCCCAATGCCACATTCAAAGCCCTCTCCTACAAGAACGGCACCATCCTAAACTGTGAATCCAACAGAGGTTTCCGAAGACTA
AAGGAATTGCTCTATATGCGTTGCTTAGGAAACTCCTGGAGCAGCAACTGCCAGTGCACCAGCAACTGTAAGTGTCACCCTTTTGTAACCTGGA
TGGGAAACGATCTAGAGATAAAAGGTGACAGACTCCAGCTCCCATTAATTTGGGTCAACAGATAAAAAATGTGGATAAATCTATGAATAACAGA
TTTTAAAGGCTTCTGTAATATCCACTCACCTAACGTTATTTAATGACGTCTACTTGGTCTAAGAGCTAGGCTTACTAAGTTCTTGACTAAGCCT
GAGTCAATCTGATAGATGCACGACTTTGCTGTTGGCTTCCCCTCTTCATTGAGTTCAGACTCCTCCTTCACACAGCCTGTATCCAGACTCAGTT
TCTTCTCTATTTTGCGGTGTCCATCTATTTTTTCATTGCATATATCTATTATATATAGCACTGTGTTACATAACAATATTATCATGCAGGTATA
AACTGTAGAATGAGCACTTTCTGCCCTGACCTGAAACAGCCACTCTCTTCTATATTCCCCCTCCCCTCTGTTACTAACTTTTAGATTCCTTAGA
CAGTTTTCTTTATACTTTTGGGTTATATAGACATACTTATGTTTAGTTACATAGACAAAGTCTACCAACTGCAAATGAAAGAAAACATATTTCT
CTTTCTGAAGCTGGCTTAATTTGCTTAATATTGTTATCTCTAGGTGCATTCATTTTCTTCTTTATGGCTGAAGAAAATTCCATCCTAGCTGCTG
AGCTGAGGGTAATGGCACATGTCTTTAAACTCAGCACTCAGCACCCAGAGGCAGGTGGATCTCTGTGAGTTTGAAGCCACTCTGGTCTATATAG
TCAGCTCTAGGCAAATCAGGACCAAATAATGGGATCCTGACTCATGTGTGTGTGTGTGTGTGTGTGTGTGTGTTTATGTATACATATATTAAAG
AAAAATCCATATATTCCACATTTGCTTTAATCATTCCTCTACTGTTAGACACCTAGGTGGGTCCCATAACTGATCTGTTGTTCCAGTCTCCTTT
ATTTTTGACCATGAGGATGGAATGGGTCAGTGAGCCAACCTATGGGTGGAGGGCAGAGTTTAAACATGACTGCTCTATTGAAGGGCTTGGCTTC
CTCATTTTCCAACCATGTCCCTTCATCCAAAGCTGGATTTCTATTCTCCTCTCACTGAGGTGCTTGCCTGTAACCTCTCTGCCAGTTTTTCACA
AGGGCCAGAGTTTTCTGATCATTGCCTTAAGAGCACATTTCTCCAACTTGAACTCCTTTGAACCAGGAGAGGGGAGTGGAGGAGTTAAATAAAC
GTTGTGGAGTTAGATTACTCCTACCTGTCATGTGCCACACTGGTGCCACTACTGACAACGAACAAAGCCACTTATGTTTGATCCACATCCACAC
AAGGATTTTCTAGGAGAGAATCTTGCATTTTTTTCTAGGAATGTGTTGTATCCAATGCCAATATGTATATGAGTATGGAGAGGTCAGTGCTAGT
CTAGGTGTGCTCGCCCTATCCAAGATGCCCTACTCACCCCTGCCTGGCTGGGGTGCCTGGGCACAGATGACCTGCTGCTCACGGGAGGCAGAAG
GAAAGGCAGAATGATGGTACACAGCTCATCTTTTCTCTGAAGCGCAAACGGCAGAGTCTGGGATAGATGCCATGTTTCCCACTCACCTGTGTAT
ACCTGGGTGCCACAGGTGGATCACTGTGAGTCAGGAATGTGGGTCCCCCAGTCCACACTTCCCCCTTAGGGTGCCCATATGCCAGGCAGGAAGG
GGAACGCACACCCCAAGTCAAACCCGGTTTGATTCAGAGTGAGTGCTGGGACAATGGAGTCGCTGGAACAGAGAACGCCTTCTTTAGAGATTCA
GGTGTGGCTCTTTAAGACCACGGAGATGATCTTTGTCTCTTCATACTGGTTTATTTGATGGTGGGTGTCACTACATACACTTTAGTCAGGGTGA
ACCAGGGATTAAATCCCTTTTGCCGGAAGGAAGGAATACCCAGGAAGAGCAGCTCATTGGCTGATGGCTAAGGGATACCTCATTAGCAAGGAGA
AGAATTCCAGGTGCGTATGCTATGTGACTCAGTGGCCATGGTTCTCAGTGGAGTGTCATGGTTACATATTCCAGAGCAGGTAGAGGCAAGCAGG
GAATGGCTTCACTCCTGCCATTCTCAATTCTGAGATTCCCGGGATTTAAGCTCATTCAAGCTTGCCATTTCTCATGCCTGTCTGGTAACAAGGT
CCCTCATGCCCTACACAGGAGCGGTCTTTTGCTTATCTTTGCACACCCAGCACAGATATGTCTCTGGGCACCAGAGAGGTGTCCCAGGGTAAAT
GACCGCATAGACAGCTCTTTCTATTCTGAACATTTGGGAACTTACTTGCCTCATTTCTCCCATATTCTCCAGCCCATGACAAATCGAGAAAGCA
AGTTACAGCTCAACTTGAACACCAGAAAGAGCAACAAACCACAACAGACATGCAGAAGCCAACACAGTCTATGCACCAAGAGAACCTTACAGGT
AAGACGTGCATCTCAGCAACCATCCTCTACCCCCCTCCTGGGAACTGAGAGAGATTAGTCCTGTTCTCAACAGCCACGTGCAACCCATTCTCCT
CCTCCTCTCAGATTTCCATGCACATGACAGCATTGCTGATTGTTGGCAGGCTCGCTGCTTGGGAGCATAAGAATTCAACTCCTATAGACTCAAT
TCAACTCAAAACCATGTGCTGGGAATATCTGCCATCTAAGCACCACCCACAGACGAAACACATCGAATAGACAAGGGCCTCTGCCCTTACAAAT
TGCTCCTATTTTCTCTTAAGCACATGCCAATGGACTTCAAGCAAAACCATTGATAAAAATTTGCCTTTTACAGCACAGAGTTCTAAAATGGTAA
CCCCACACACTTATTCACTACTTAATGTGGTGTGGATGTGTGGGCTCTGTGTCTACATACAGTTTCCCAGATGGAATGATAATACTTAAATTAA
GCCATAATGTCAAGAAGAAAGAGGCTTACTAGTGTTAGAGCCGGGGTTTCAGAGATCAGTCACCCTTAAGAAGACCCTAATAGTCTTATCATAA
AGTTATAACCTTACAAAGAACATTATTACATCATGTATAGTCCATCTGAACCCACAGCTGAGTGAACCAGCGAATAGGAAGATGTTCCTTGATT
ACCAAAGAAACTAAGACACAGAGCCTTGAAACGGCCCAGCTACAGTCACATCACAGAGGGAAAGCAAAACCTCTAGTCCCCCTTTCTTCTGAGA
CCTTATTTTTAGCTACTTAAGAACTAGTCACAGCATCCAGTATTGGGGTGGGGGGATAAAGTCCAATCTAGAAGCATTATTGCAATGTGATGCT
TTCATTTCCCTTTCTTTCCCAGCTCTGTCCTGGAATAGTGTTTTTCAAATACATTTAATGTTTTCTCTGCTCTCCTGGTATCTGGTGCCAACCT
CGACAGTTACTGAAAGGTCTCTGTTGGTGGGGTGTCAATATTTGTTCTTACTCAAAAGACAATCAGATGAACTTCGCATGGTTGTACATGTCTG
TAATCAAGCATCTGGGAGCAGACGCAGGAAGATGAGAAGTTCAAAGCTGTCCTGAATTGTATGATAACCTCTTCAGCCCCAAATAATGAGGGAC
GGAGAGAGAGGGGAAAAGGAAGGGAGGGNNNNNNNNNNNNNNNNNNNNNNNNNNNNNNNNNNNNNNNNNNNNNNNNNNNNNNNCCCTTTTTGGC
CCTGGTATTCCCCTGTACTGGGGCATATAAAGTTTGCAAGTCCAATCGGCCTCTCTTTCCAGTGATGGCCGACTAGGCCATCTTTTGATATATA
TGCAGCTAGAGTCAAGAGCTCCCGGGTACTGCTTAGCTCATAATGTTGTTCCACCTATAGGGTTGCAGATCCCTTTAGCTCCTTCGCTACTTTC
TCTAGCTCCTCCATTGGGAGCCCTATGATCCATCCATTAGCTGACTGTGAGCATCCACTTCTGTGTTTGCTGGGCCCCGGCATAGTCTCACAAG
AGACAGCTACATCTGCGTCCTTTCAATAAAATCTTGCTAGTGTATGCAATGGTGTCAGCGTTTGGATGCTGATTATGGCGTGGATCCCTGGCTA
TGGCAGTCTCTACATGGTCCATCCTTTCATCTCAGCTCCAAACTCCGTCTCTGTAAGGGATGTTTTATAATTTGTAATAGTTTGGGGTTTACAG
AAAAGAAAAATTAAGTTCAAACAGGTTCCATCAACTATAATGTTTCCTGGTCTTAAAATAATTTGTTCTCAGACTAAAACTCAGTCCCAGTGTT
GTTACACAAAGTGCAATGTAACAGAAAATGGCTCAGGTCAGGGCCACCCAGCTTCCTGTGGGGGCAGAGAGCTTGAATGTGGTTCTTTTGGGGA
TTGTTTTGGGTAGTCAGGTGTTTTGAAAATCTGGAAGGTTCTAAACCTACGAGTAATTTATGATTCAGAGTCCGACAGCATATATAGTTCTGTC
TGATTAAATGGAAGGCCATTGATAGGGAATTCCAAGATTAATTCAGAATAGGCCACGATCTCTCCGGCCAAACTTCAGCCAAGCCTGGGTTCCT
TCCAGTGAGTGAGAACTTGCTGGGTGTCGCGGATCTTTAGAAGGGTTGACATGGTCGATGTGGGTCGTGCTTCAGCTGTGGTTTAATCAAAGAT
CTATTTCTCTGAGATTCTCTCAGTGACTCCCCTCCTCCAGACATTAGCTTTGTCCTTGGTCAGCTCCCCCAAGTCCTAGGCTGAATGCTAACAA
TTTGTTTGTTCCTCCTCACGTGTTCAGCAGCTGTACTGAGAGGTCCGTCCATCTGCTCCACCCAGCTGCTGTGTCTCAGCAGAGTCTCAGGGTC
TTTGCAGCATGGGTCAAATGAAAAGCACATTCCACCTGGGCTCCCGGCAAGCATCCCCTCCGCACCTGCCGCTCCCACTGCCGGTCCACCTTCC
TCTGTCTTTCTCACCTCATCACCTATCCGACCCTTGTGGGAGTGACCACCATGTGACTTTTCCTGGGGAGACCTCAACAAACATCTGGTCACTA
GATAGAGCAATGACTGCAAACTAAAGAAATGATTCCACCCAAGTATCATGTAATGAACCAATCAATTCACTGGGCTTACTCTTGGGAGCAAGGA
TAGTTCAAATTCAGCTGCTTCATCAGAAACCCCACCCCAGCTTGGATAAAAACCCTCGTAAGCTGGTTTGCTGGAGGTCCCAGGGGGACCGGCG
GACAGCCCCAACAGTTTGAGTCTCCTTCTCTCCCGTCATTCTAACTCCTTATGTAACAGTAAGAGAAGAGGGGCGGTGAGCTGCAGGAGCATCC
TGTCATCTGTGGGGTTTGTTTATTTTATTTTTCTGAGTCTTAAAGAGCCGCTCTCCAATTCAGGAAATAGCTGCGCATCCCTGGGTTCCATGCC
TTCCTACAATGCCTACATTTCTGACAGCTGGAATCTATCAACACTTGTAGGTTCAGTGAAAGCAAAACAAGTAAATAAGAACCGATGTCCAGTT
TTAGCCACCAGAGTTGTTCTGGGTGCAAGAAGTAACCTAGAGGCATTTGCTGTGTCTTCCCAAACTTGCCTTCAAAATTCTCTTCCTCGTCCAG
GTCACTGCAGGGAGCCACCTCCTTGGAAACATGAAGATTCCAAGAGAATCTATCATTTCGTGGAAGGACAGAGTGTTCACTACGAGTGTATTCC
GGGATACAAGGCTCTACAGAGAGGTCCTGCTATTAGCATCTGCAAGATGAAGTGTGGGAAAACGGGGTGGACTCAGCCCCAGCTCACATGTGTA
GATGAAAGAGAACACCACCGATTTCTGGGTAAGTTGTTCCTTTCTTGTGTCCTTCCCATTCTTTCCTCATCTGGACCACACTGCCATGGGATCT
GGGAAAGCCACGTGGCCTTCTGGGTCTCACCTTTTAAAACACAGAAAGAACACTCGAAATGCTGAGGTTCCCTTAACTCTACATAGAGATGGTT
AAAGGCAGCCAAATGAGGATCTCTCCGGTGCTCCCAACCATACACGATGCTGTCTCTAGGACAGAGTGCTATCCTGTGTCTATTGAACCCAGAG
CTTCCACAACTTCTGCCCATCACCAAGATATCCTATTGTTCACAAGCGAAAGTTCAGAATCACACCCATGACTCTTCTTTGTACTTATATGTCA
TTTGTACTCTGTTCCATGCTCATTACAGTCCCCTTAAAGGTCCCCCTGATTTTCGATAAAAAGTACAAGTGTGTGGGAAGTGACTTGCCTTAGG
ATGGGCCTTCACATGCCCAGTCCTGCTCACATGCAACCTGCCTGTGCAGAGGTCTTCACCCATCATTGTTTGAAACCTTACTACTTCCATCATC
AAAAGGTGCTCATGAGTTTTTCTGGTTTCTTTGGCTACTCCCGTCTGTCACATTTCATGACTTCCTCTGTGGTTCCCTTGGCATCCTCTTTGCT
TCTCAAAACTTCCCTCCAGAGAGTCACCCCCATGGCCAGGGCATACCAATACTTCCTAGCAAGACCCTGGCTTTCTGAGTTAGGGTTACTATTG
CTGTGATAAAACACCATGATCAAAAGCAACTTGGGGAGCAGCACCCTTATTTGACTTTCATCTCCACATCATCATTTATGATAGAAGGAAGTCA
GGAAACGGCAGGAACCTCGAGGCAGGAATTGATATCATGGCCATGGAGTCATGCTGCTTATTGGCTTGCTCCTCATGGTTTGCTCAGCCTTGCT
TTCTTATAGAACCCACGACCACCAGTCCACAGGTGTCCCCACCAACAATGGGCTGACCCTTCCCACATCCATCACTTATTAAGAAAATCCCCTG
CAGGCTTGCCTACAGCTCAATGTTATGGTAGCATTCTCAATTGAAGTTCTTTCTTCTTCAACGACTGATCACAAAGGAACTGTCAAAGCTCTAT
TCGTCTCCATTTGGTAGTGGTGGTGTTCTCTCTCTCTCTCTCTCTCTCTCTCTCTCTCTCTCTCTCTGTGTGTGTGTGTGTCTGTGTGTGTGTT
ATTCTGACCCATTTCCAAGTCAGGGGTGGAATCCAGGGCTGCGTACAAAGTGTGGAGAGAAAGATTTGTCCACAGTTCCATAGATAGCCACTGT
CAGGGTTAGAATTCCCGTTTACATACTTTTCTATGGTCCCTTAACTGTTTTCAGTGCCCTAGTGTGGACCTGTATCCCAGAGACATGCCCCAGA
AAAGCTGCCAATGTTTTACCGGGTATTTCTAGGAACAGGAGCCCCAGATGGTGAGTGGAAGAAGGCATTAGATCCCATATCACCATCTTTGACT
CCAGATACATTGCTTTCTTTCTTCTGCAGCTAGTGAGGAATCTCAAGGAAGCAGAAATTCTTCTCCCGAGAGTGAGACTTCCTGCCCCATAACC
ACCACACGTATGGAGAAAACGTCCACGAACAGACAGACATTTGGCCATCAAGCAAGGCTATGCAAGCCCCTCAAGCGATGAATACAAAGAGGAA
AGGAAGCTAGCCCTACTTGCTTCCTTCTTCTCCAAAGCAAGAATATGGCCATAGCAGCATAATCAACCCAAGGCAGTCTGGGAAGATGGCTCAG
TTGGTAAAGTGCTTGTCATGCAAAGCACGAGGACCTGAGTTTGATCCCCAGAAATCACACTCTATTTTTAAAACCGCTAGTAACGCAGTGATTA
CCTATAATCCTGCCTCTGACCACGCAGAGACATGGTGATCTCTGCAGCTTGCTGGCCATCAGCTACTGTAGCAGAACTAATGAGCTCAGGTTCT
GTAAGAGATCTCCAAGAAATAACATAGTCAATTAAGAAAGACATCTGATGTTGACCTCCCGCCTCCATAGGCACACATGCACACGCCTGCACAC
ACACATGAATGTGTACACCCTCTCTCCACACACACACACAATGTAAGGAAGGAGAAACCACAGGACAGAGGTTGAAGTCTCCAGACACTCACCT
GGCCCTCACATCGCTTCCCTCAACCTGAGTTGTAGCCGCCGGCGCCCACGAATTACTGGGTTCCTGAAAGGAAAGCTCGGCATGGATGGGAAGG
ACGGTGAGACAAATAATGACCCAAGACAAAGTTCTCTGGTCAAGACTCAATCTTTAATTGTAGGGTCTTGGATTTAAAGCAAGGAGGGAGACTC
ATCCCCAACTTTGCCAGGATCTCCATTGCTTTGTCAGGTTCTCCTCAGGAAAGCAAGCTCAGCTGCTCAGCAGGTAGCTTCATGCAGGAAGCTG
CAGATGTGGCACACAATAGACTTTACCTAGGTAGGAAGACTCCACCCTAGGTGGGCTAGCCAGCTGTCGCCGAAATACGTCTGATTCAGCCGCT
CAAGGCTGGGGGAAGGGCGCACTGAGTGGCTACCTACTGGGAAGCCCCTCCTCTCCCAGCCTTGTGCAGTCCTATGCTAGCCATAAAATAACTA
TCCCCTCATCTCTCTTCTCCACAGACTTCCCACAACCCACACAAACAACTGCAATGACGGAGACATTTGTGCTCACAATCGAGTATAAGGTAGC
AGGTGGGCCAGCTCATTTACTTTACGGACAATGGTCAACCATGCAAAGACGTGGGTAGTTTAGCTGGTTGAAACGGCCACTAATTCTTTCACTA
ATGGTTGTAAGGGTAAAGAAGACTTTAATCGCTATCATTGCTCAAAATCCCATGGGTCAGCTGTAGTACGTTGGGAGTTGTATCAGCTACCTTT
TGTGTTGCTGTGACCAGAAGCCTGACAAAACAAACCGAAGGAAAGAAAGGTTTGTTCTGACTCCCAGTTCTGGGATCCAGTCCATCACTATGGG
CAACCCGTGGCAGCAGGAGACTGAGCAGCTGGTCACAGTGCATCTGTGGTCAAGAAACAGAGAAAAGCTAGCCACTCTGGTGTAAACCTTTAAT
CCCAGCACTTGGAAGCCAGAGGCCAGCCTGGTCTGCATAGTGAATTCCAGTATAGCCAGAACGACATAGTGAGACCTTGTTTCAAAGAAATAAA
AGAATTTTTAAAAAGAGAAAGATAAATGTTTGTTCCCAGCTTACTCTCCTTTTTATGGAACCTATGGAATGGGGCCCCACATTTAGAGCAGTCT
CCCTACCCATTTAGCCTAATCTTGATAACCTCTCAAGGACGTGTCCAGAACGTTATCTCTAATGTGACTCGAAAACCTGTCAATCAACATAAAC
CAAGAGCATCATCAGAGTTAAATCACCCAAAACCAGTTTCTCCCACATACATTTTCAAGAACAATGCCTCCCAAACTTTCCTCAGAGACAAAGC
AAGGATCCAGGGAGAGAAAATATAGTGTCCATACGCACCTCAGTTATTCCTGGTAGGAGGCAAAAGCAGGCCTTCCTGAACCACGGAATCAATG
GAAGCTTCTGGAAGATTCACATGTCAGCATTTGGGAAGTGTGAGCACTTCCAGGCGATATCGGTGTGTTTAGGATTTCTTATCTTGTTTCAATA
GTTCCTTTATGAAGGATCATGCTGCTAATGAGGACTATCCTCTGGGCCTTCCTCAGCTTCAGCTCTTCTGTCAAGTACCAGCCTCTTTCTATGG
CTGTTCCTTCTATGCCCCCTCTGCTCTTTGAAGGCTCCTTGATCCTTCTAAGAAATACCCAGGCAGAAGAGGAAAGAAAGAAGAAACTGCAGGC
CCCAGCTGTTCAGGAGGTCCTTGATCACCTACAGAATTTTCTCACCTGATCTACAGATCCAACCCCCGATCCATGCATTCCCAAAGCATGGTCC
TGACCTGAACTCCATCTCCCTCTCTTGACAGTGGCCAGCTGCCTCTTCCTGCTCATCAGCATCCTCCTCCTGAGCCGGCTCACCTGGCAACACA
GATGGTAAGTCCAACACTGGAAGGACCCAGCACCCCAGTGTCTCGTCCCTGGCCTGGCATCGTGAACATTGCCTAGAGCTTGACCTCAGCTGAC
ACGCTGGGAAGATGGCTCCGACGAAAGCATGAGATGGGTGTCCAATTCCTAAAAGCTTTGTTTAAAAAAAAATCGAATGTGATGATGGCATTTG
CCTATAATTGTATAATTCAAGAGCTGAGCAGCCACGCAGAGGTGGATCCCTCATACTCTCTGGCCAGCCAGCCTAGAGAAACTGGTGAACTCCA
GGTTGATCAGGAGACTCTATTTCAAAAGTAATGTGAATAATATACTAAGGAACAAGATTCCAGGTTGACCTCTAGACTCCACAGTCATTTACTC
CCTGACACACGTACTCTTACTGAATGTGTATCCCCGGTACTGAGTGGGTTACATTAGCAAATGTCACCCCTACTCTCAGAGGTCTGTGCTGTTT
AGAGATTAGGAAAACCTAGGCTTCCCGAATGTGCAGATAGCAAGAGTTTGAATCCTATTTAGAGATCTTCAACCTTGCCATCCATCCACCAGGG
CTCTACCAAGGTCGCTGGAACAGACCATGCCACCCCACCCTCCCTCCAACTCCGCTGATCATCCACTAGAAACCAGCATGGGTAGCAACGGATG
GAGAGAGGAGACGGCGACCATGGCTAGACCACGCTTGATGGTATGGATGAAGGTTGCTAGATACTCACAAGGCTTTAAAAAAAACATTCTTGCA
TTTATCATTAAATACAGTGAAAAGCTCCCGGATAGCAAGAGCAGGGGGACGCTCTCTATTCTGTGTCTGTGTGTCTGGCTGTGTCTGTGTGTCT
GCCTGTCTGGGAGTTCCCTTGTTTTTTAGGCCCTAAGTATCTTGGTCAGTGATATCTGCCATGGCTCATATAATGTCTTTTTATGGATAAACAT
ATTTTCAAGCCATGATTAAGTAAAGAGTTTTGTGTGAGACAGAAACCAGAAATCAGAAATCTAGGTGAACATACAAATTGCACGTGCATGTGTG
CACACACAGACACACACACAGACACACACACAGACACACACACACAGACATACACAGACACACATAGACACAGACATACACAGACACACAAACA
CACAGACACACAGACACACACACACACACTGGGGGGTTGGAGGAGGACTGTGTATCATGGTACATTCCATTGATCTCAGCACACAAGAGTTGGA
GACAGGAAGATCATGAGTTTGAGTTTGAAAGCAGTCGGGCTGTATAGAAATTCGAATGCCAGCCTCATAGTGAGAGCTGTCTCAAAGTAAATGA
GTAAATAAGATGCCAAGGGATGTAGTTCATTTGGTAGAGTGAGAGCTGAGCATGCCCACGAACCCCCGACTTGATCTCAGCACCATAAGAAACC
AGGTATAGCGGCATAAGCCTCTAATACCAGCGCTCACGAGGTAGAAGCAGGGAAATCCAAAGTTCAAGGTCACCCTGGGCTACATGAGATCTTA
TATTAAAAAACTAAACACATTATTTTTTAAAGATTTATTTATTTATTTATTTTATGTGAGTGCACTATAGCTGTCTTCAGACACACCAGAAGCG
GGACTTCGATCCCATTTCAGATGGTTGTGAGCCACCATGTGGTTGCTGGGAATTGAACTCAGCAATTCTGGAAGAGCAGTCAGTGCTCTTAACC
ACTGAGCCATCTCTCCAGCCCCAATACATTATTTAAAGAAGAAGAAGAATTAGAAGAAGAAGGAGAAGGAGGACGAGGAGGAGAAGAAGAAGAA
GAAGAAGAAGAAGAAGAAGAAGAAGAAGAAGAAGAAGGAGGAGGAGGAGGAGGAGGAGGAGGAGGAGCACGAGGAGGNNNNNNNNNNNNNNNNN
NNNNNNNNNNNNNNNNNNNNNNNNNNNNNNNNNNNNNNNNNNNNNNNNNNNNNGAGGAGGAGAAGGAGAAGGAGAAGGAGAAGGAAGGAGAAAA
GGAGAAGAAGAAGAAGAAGAAGAAGAAGAAGGAAGAAGAAGAAGAAGAAGAAGAAGAAGAAGAAGAAGAAGAAGAAGAAGAAGAAGAACAAAGA
GTTAAGAGTATAAAACCATCTTGAGAAAAGCCAGATACATCCTCATTAGAGTCAGCTGTCTGAGATGTTCTGTCCCTGTCTTTGTTTCATTTCC
TGTGGGTGATATAAAATACCCCAACCAAAGCAGCTTAAGAGAGAAGGGGCTTCTCTGACTTACAGGTCCAGGATGCAGTCCACCCTTGTGTGGC
AGCTAAGGTGGCCGAAACCCGAAGCCTTTACTCATATCACACCCTCCATCAAAAGCAGGGATCAATGAATTTGCATGCACACTTATCCCAGCTC
ACTTCCTCTTTCTATACAGTCTAGGACCCAAATCCATTTAGACTGGGTTTTCCCACATCCATTACAGTAATAAAAACAATCCCCTGCAGGCATG
CTCACACATGACCTAATCTAGGTAATCCACCATTGAGATTCCCTTCCGGTAACTTTAGGTTCTGTTAAATTGGCAATTAACACTAAATCATCAC
ACGCCTGACGTCAAGGGTGTGCCCCTCCTGCCCGAGCAGGTTCTGGCCAGCCCTGATACTTTAAATCTTTAATAACAGAGTCATACCTATGTGG
GTGAGAATCCAGTTTCTTCCATTCTTTTGTTGTTCATCTGGCCTCCTTCTCATTTTCCTCAACTGGAGCAAGAAGCAGAAGGCATTGAGGTCCA
CATGAGGGTACCCCGATAGTTGCTGTGCTAAGAGTTACTCATGGCCCTGACACTCTACCCATTTCCTTAAGATGTTCTTTTAGAGTTCTGGGAG
ATAAAACGTCATCTAATATCCCTTGACAGTCTAGGCCCCTCAGTCCTTGTGAGACCTTCTTCCTGCTCACCACGAGCATCTACCTGGCATGGCA
TTTTCGTTTGGTGAAGACACCAGACTCAGAACCAGAGGACAGGGCTCTTCATGAGCAACAATAGCTTAGAGTTTACAATGTGAAGCAAGGAGCT
GTCTAAGACTGTGAGATTCCCCTAGACCTCCCAGTAGCGGGGCCATTAGGGAGACTGAAATAGAATCTCAATATGACCCCTTTGGTCAAAGAAT
TTGTCCAAGAAAACAAAACAAAACACTTCTGAAATCCCAGCCACAAGGAGTCCAGCATAACAAGGTCCTGTTGCAGACACATAGGTGCCTGTGC
TCACGTTTGTACATATATATATATTTACATGTGTGTATATATGTCTGTATATATATGAAAAAAGTTTACTTTCTAGAAGCTAATTTCATCTAAT
GCTGCCCTCTTGTGGCCAATTGCAAATCTTACCTCTGAATTCTGAAAATTTCAGTCTTTGCCACTTTGGAACACTTACCAGGAGCTAGGAGGGC
ACTGGCTGGCTCACATTAGTTACGTTTTTAGGAATTTCATGGGTTTTGTTTTGTTTCGTTTCTTTTCTTTGTTTGTTTGTTTGTTTGTTTGTTT
GTTTGTTTGTTTGTTTGTTTTGAGACAGGGTTTCTTTGTGTAGCCCTGGCTGTCCTGGAACTCACTTTGTAGACCAGGCTGGCCTCGAACTCAG
AAATCCACCTCCCTCTGCCTCCCGAGTGCTGGAATTAAAGGCGTGCACCACCATGCCCGGCCTCATTTTTTGTTTTAAATGTTCGCCCTGGGAA
TTTAATCCAAGGCCTTGAGCATGCTAGACACATGTTCTATTCAGCTATGATCCAGCCCTTTGAACTGTTTTGTTAATACTTTTCTCTCTTTTTC
TGTTTCGTAATGTTGATTTTTGGGTGGGATTGGAGCACGAGCATCCGGAAGTTACAGGACAAGTTTTGAGACTTGCTTTTCTCCTTCATTCACT
AGGATTGGTGCCAAACTCCCTTACTCCCTGAGACATCTTTCTCCCCCAGTCGGATTGTTAGGTTTTGTGTGTTTGATTTGGTTTAGAGCAGTAG
TCCTTAGCCTTCCTAATTCTGTGACCCTTTAATATAGTTCTGTATGTTTAATGGCTAATCTTACTCCAACTCAGCAGTTATTAGTCCACAGGAC
TAAATGAGGAAAAATCCACAACTGCCAAGTGTCAGACATTGCACCGCAGGCCAGAGACATGCACAACCCAGCCCTGCTCGTAGGAACTAGTAGA
CTGGAAGAAAAAAAAAACTTCAAATATTTTTGTCGTCCTCAGCATACACGTCAATAGTAGAATGTTTTCTCAGCCCTGGGTTCAATCCTTAGTA
TAGAAGAAAAAGAAGAAAGGGAGATATGGGTGGAAGGAAATACGGAGGGAGGAAGGGAATGAGGGAGGGAGGGAGGGAGGGACATTTGTTGAAA
GTCTAAGATGGAGATATGTAAGCAGAAGGACATTTAATCTACATGGGAATCAAAAGACAGCTGACTGACCTGGTATACTCTGAAGTGTCAGATA
AAACGAGCCACGAAACATCTCCTGGAAGAGGAAGCTCGGGCACCTATGCAATTGTGAATCTGTGTGGTGATGTCTGAGAGAAGGTTGAGTTGTA
GGACATAAAATGAATGGGCACCATGGCCACAATGATACCACACTGCCCAGACAGTCAGAAATACTGTCATGGAAGATGAGGCCGCATTGAGGAG
CTGGGCCAAGATGCTGATGGTGGTGGCACCTCACATCACCTCACCTAGCAGAGAAACCGTTATCTTGGCCTTCTGGGTGATCTGCTGCGTAGAG
GCTTACCGTGGGCAATGTGTTGACAATATGATTGCATTATGGTGGAATAAATCCACATAGAAGTTGGTGACTGTGCTTTTCTGCGTCTGTGGAT
CTGAGTGAATGGAGGAAACAAACCAAGGGGTATAGAAAAGAATTGAGCAAATTAGTATGACTGGTAAGCTGGATAAAAAGATGGAGTATGGAAG
AAGGATGAGTCAGAGAGGGCCCGTGGCTTTCTCAGACAGGGAGCCTCTGTAGCCACTACATCCTACAGTGAAATGCAAATTGGGGGTCTCAAGC
AATGCATCCCTTAGAGGTTAGCCACAAGCATAGCCCAGTAGGACATCTTGCTCAGACCCACTCAGCTCTATAACCGGCCTAGAGTTAGTTGTGT
TGTGAGATGACCTTCTCTTTGTTTGTTTGTTTGTTTGTTTCTCAAAACACTGGGTTGAATTGCCAGTGCACAGAGCAGAGACTGAGTCCACAGC
CAGTGTTGGGCCCCTGGGTGGTTGCTGGAGCTTGAGGCTGTTTTTCGTCAGGTGGGAGGGTAACAAGATTCTGAAGTAGAACTCCAAGTTAGAC
TCTCAGCTAGGGGGCTCAAGGGGACTGTTCAGATGGAATGGGTTTGGGTGGAGACCATGTTGTTCTCAGTATACAATGGCATGCATGGCTGTGA
CAGGGTTATTCTTCTTCCAGGAGGAAGAGCAGAAGAACCATCTAGCAAGCTAGAAAAGTCAGAGCCCAGGCAACCGGATGCGAATCACAAAGCT
CAAGCCAAATCTGAGACGCCAAGCATTCACCTAACGGCTGTTTCCTTCTGATCCCTCGGTTTCTAGAACATTCTGAAGTCACAGGACATAACAG
CAACTCTATCACTAAACTGGACTTTGCCATTGAAGAATAGGATCTAACCACTTCAGCACAGCAGTTCTAAAGCTTTAATGGGACAGAGGGCCCA
ACAGTGCTCTGTGTGTTTTGTTTTTCTGTATATCTGTTGATCGGAGCTGAGATGGTGTGGTCACTTTTCATGTAACATATAGTATACAAAAAGT
AGCTTTAGGTTGACTTCATTGTTACAACCCAGTTTGGAAAGCCCAAGTAAAACTCAGCACTAATGTAAATAATTCCTCCTCCTCCTCCTCTCTC
TTTTCATCCTCCGCTCCATCTTCCTCTTCTTCCTCCTCCTTTTCCACCTCCTCTGTCCCTACCCACCCCCACCCATCCACTTTCCTTCTTCCTT
TCTGCTCTCACAAGCTCATCCTAGCTACACGTGCATGGCTGCCTCCTTTTTCAACCTCTGTTTGCCTAACTGGCTCTTCTGATTTCATCACTTA
CTGATCAGCCTTTAAAACTCTGAGCTGGCAAAGATGACTCTATCTATGTTCTTGGCTCAGTCCCAGAAGGAAACCCCCTTTTCATGAAGCTTCA
GTTTTGACATCCTGAAGAACAGAAACTGTGGCAGAACAATCTTCAGATAACATCAAAACAAAGTGGAGAAGCCACGGGAACTGTGGAGCTCTGG
TATTCAGAAGCCTGTGTCTAGGGTCTGCGCCAGGAGCAGAAGGCTGAAGGAAGTCCCAGGACGTGCACTTAGATGCTTTCCCAGCAGGCCACTC
TAAGCGCTGGTTTCTTTGGGACAGCTGTCAATTGTACGCTCAATTTAGCCTGCACTAATCTGATGCTTACAGGTGAACACTCAACGCACAGGTA
TGGACTTGGTACATACCGTGAAAACACTGGAAAGAAAAGAATACTTTCAAGTTTACAGAAGGAAGGAAGGAAAAAGGAAGCAGAGGTGGTGATT
ATACAAAAGATTAGCTGTAGACTGGATATCCCAGGCATCCTCGGATAATGCCCCCGCCCCAGCACCCTGATCCAGGTCACCAAAGCCTTGTGAG
ATCAGACTGCAGAGCCAGTCTGTCTCTGAGTCAGTAAATGTAGAATTTGGATTTCTCACAAGTTCCTGGCGGTGTCTTTTTTTTTTTTAATATT
TTTTATTAGGTATTTTCCTCATTTACATTTCCAATGCTATCCCAAAAGTCCCCCATACCCTCCCCCACACTCCCCTACCCACCCACTCCCACTT
TTTGGCCCTGGTGTTCCCCTGTACTGGGGCATATAAAGTTTGCAAGTCCTGGTGGTGTCTTTATGCTGATCTCTAGCCCACACTTTCTGAGGCA
CTGGGCTATCCCAGTGTGCTCTCCTCTTCCACAGATACCAAAAGCACCTGGGTTTGATGCTCAGACTTCTGAGCACGTTCTTGTTCAATCTCTT
GCGTAAGATTTCCTCTCAGATGAGTTGAGTCAGATTCTCATGTTTAACACTGTTTTAGGGGATTCACACAAGCCCAAACTATCAGTTTTCATTT
CTGAAAAGGCTGGAAAATTTTATGAAAAACTTTCAAAGGTCAGACAGAGCCATTTTCACTCTTTTATGTGACCAAGTATGAACCAGATCTTTCC
TATCTATGGTCTCCCCTTTCCAAAATATATCTTTTGTGGGGACACGGCAAGGAGGAAAGTTAAATAGAATCTCAAGCTACTAATTTTAGAAAAG
AAAAAAATATTAAACTCTTACTAAAGAGCTGTGGGTAGTGGTACACACCTGTAAGCCCAGCTCTCAGGAGACTGAGGCAGGAGGATTGCAGTGA
GTCAGAGATCAGCTTCACCTACAAGCAAAACCCTGCCTTACCCCTCAACCTTTCCATAAAAACAGTCTTACTTGTGTAAAATTAATTTTTAATA
CATATTTGTGCACGATGTGTGTGCCTGGTGCCCAGGGAAGCCAAAAAAATATGTTCAATGTCCCTGGAATAGGTGGTTATGAGCTGCCATGGAG
GTGATGGGATTTAAACCCCTGTTCTCTGAAAAAGCAGCTAGTTCTCTTAACCACTGAGCCATCTCTACAGCCCCATTAAATTGAATTTTATTGT
CATTACTCAATATGGGAGATGGGGTAATGATAACAATTTTTTTTTTATAATACTAAGATGTTTAGCTATTTTACTCTCCTTCACAAGTGTAGAG
TAGAATTTTCTAGAAGCTACATGCATGATATTATCGCTCTGGTGTTAACACATAATGGATTTATCTTGTTAATAAAAGAATTAGTAAATAATAT
TTTAAATTTTTTCTTTGTTTTAGTTTTAAGATGATTAATATCTATAGATACTAGTGTACATTAAGAAAGCCTTTGGGATCCTCAATCATTTTGC
ATGGTTTTAGTAATTTTTTAATAACATAAAGAAGGTCTGACAGATTATGCTAAACAGCTATTGTGGTATGGATTAGAAATGGCCCCCACAGGCT
CCTGTGTTCAAACATCAGCTAGCAGTGCTGCTTTGGGTTTTGGAACCTTTAAGAGGTGGGGCCTTGCTTAAGGAGATAGGTCACTGGAGGTGAA
CCAGACTTGCTTCCAGTCTCCCTCTCTGCTGTCCCAGGAAGCCATCATATGAGGAGTTTCACAACATACTTCTGCTGCCACAGAGTCCCTCCAG
TAAGGCACGTACTGGCCACTGTGTAGTGTACCCTCTAAAACTGAGCTAGAGCTCCCCTCTCCTCCCTACACTATCTCTGTTGATGCTTTGTCAC
GGTGATGAAGAACATAACTAAGGCAAACACAAGACATAGTTTCCAGACTCACGTGAGCATCTCAGCCAGACTCAGGCACAGCTGCGATGTGGGA
ATTATCAAGCATGAGATCCAAAGCAATGGAAAATGAATCGTTATGACAGAAGCCTACATCTAGTCTTCCCTTCTTCCCATTAGTAATAATAGCC
CGTGTTTTAGAAGAACACATCTTTTTGGTGTTCTAGGTAGCTTATATTGCAAATGTGGCACAATCTAAGAGAAATCTGGGATGAGGGAACCTCA
GTGAAAGATTCTCCTTGATCAGATTGTCCCACTGATGATTGATATCGGAAGGCCCAACCCACTGTCAAACGCACCACCCATTGGCAGGATGACT
GGGGTTATAGAAGCAAACAGGCTGAGCATGAGCCAGTGAGCAAGCCAGTAACCACTGGCTTCTCTTTGCAAGAAGCATGGCTTTCTTCCGTGGC
TTCTGTTTGATCTCTCTCAATGATAGATTGTGACCTAGAAGTATAAGCTAAAATAAACCATTTCTTACCCATAGTTCCATCGGTTGTGGTGTTT
ATTTCACAGCTACAGAAAAGTGAAACACAACATCTTTCTCCCAAGCTAATGGTGTTTGCCAGCCTCCTTCAGCTACCTGTGGGCATGTGGTTAA
GCTCTGAACACAGAGGTGTGAGTAGAAGCAGTGTGTGACGTCTGGGCTGTGCCTTGAAGAGAACATAAGTGGCATTTTCTCTCTTAGCTCTTCA
AACCAGCAGGCACATGGCCTTGTCTTGCGAGCTAGAAATCCCAATGGCAAGAACCCCATTTTAAGTTTGACAAGGAGACAAAGTTGAAGAAGTC
TAGACATTTGTCTGATGCCAGGGAGGCATTGCAACATGGCTGATTGCATTGGACTGAACTTTGGTAAAAAAACAAACCAGTTGAGGCCATGACT
TTTACCTTGTGAGGACAAAATTAACGATCACTAACACCGGTACTGTTACCAGCTATATACAAACCCTCTTCCCATAACAAATTTTTTCTTACGG
TAATACTGGCATCAAAATATTTTGAGAGAGAGAGAGAGAGAGAGAGAGAGAGAGAGAGAACGAACAATTACTTGTTTTGTGTTGAATGACTCTG
CCTGAGAGTTCCCCTCCAGCAGGCAAGTTCCTGAGATGAAATGCATGAGTTCTTATGCAGACATCACCATCTCTCGGGGCTTCTGGGTAAGTCA
TGAATCGAAAATAGAAAGCTTCTGGGGTCCCTAAAGCCCTTCCTCTTATTTCCATTCCACTCCTCAAGCGTGAAGGATAAAATACATTCCCTGT
TCTGCTGTAATATTAAGCATTTGGATTATTTTAGTCTGGTTCCTTGGCCATATATCAAAACCTTATAGTAAGGGGCCAGTGAGATGGCCAGTGG
ACAAAGGTACCTGCGGCCAAGCCTGATGACTGAATTCAATCTCTAGAACCCAGATGTTTAGAGACCTGGTGCCATTAACTCCACATGTGCACCA
TAGTACAGGCTTTTTTCCCATCACACATGCACACACACACACACACACACACACACACACACACACACGAAGCCCTTATTTGTAGCAGCAAGTT
TAGCTACACACACACACACACACACACACACACACACACACACACACACACATCAGTTAATTTTTGACTAGCTCAAAGGCTGAGCACTCCTAAA
CCTCCCTCTGCTAGCAAATGCTCCCTTCTGCTATTCCTGACACTCCTGAACCTTCCCCTGTCACCCCACGCCCAATGTAGAAGTGGCCAGTGGC
TACTCACCTGAATTCTTACATGGCTGGTTGGCTTTCTCTCCTGCAGTGCTTCCGTTCTATCCTTCTCCCCTGAGTGTTCGCCATTCTCTGTCTT
CATTTCTCCCAGTTCCTAGCCTGCGCAAATCTAAAGGTCCCACCTTAGTCTACCTGTCCAGCCATTAGCTTTTGGCTCTTTATTGATTGAACAA
AAACCAATTGCGGACAAGGACCTTCAGCGTTAGGACATGCACATTCCCAATTTGGGGGGCCAGATTAATTCAAAGCATTGGAACCAATCCCCAA
CACTTATATATTAGAGGCAGAACTTGGGGATACAGTCTCCTTGAAGCTAAATTCTTCTTTGGATAAACAACACTACTCGTGACATAGAAGAGAT
AAAAACCCTACAAACTTGGTGTTTTTGTTATTGAGACACCGTCTCACTGTGCAGCCCAAGCTGCCCTTGAGTTTACAGTCCTATTTCAGCTCTC
TGGTATTTCAGGTATGCATCAACTTACCAAGCTATAAACTTGCCTTTCTTGAGCCTTGAACTTCCTATGTATTGACAAATACCCTTGAACTTCT
GGTCCTCCTGTCTCTACCTCCTCACTGCTGGGATCACAGACACATACCACCATGCTCCATTTACACAATCCCCGAGATAGATCACAGGGCCTAG
TGCAGATTAAGCAAGTACTCTGGCAAACCAGACCAAAAAAAAAAAAACCAAAAACCAAAAACCAAAAACCAAAACCAAACCAAACCAAACCAAA
ACAAAACAAAACCTCAGACAGACACCAGTATATTAGGATACTCTTGAATCCTCCCTTTTTCGTCCCCTCCAAAATTGCAACTAGAGTTGTAAGT
TCTGCCCCCCATGCAAACAAACAGTCCAGATAAACTGAACTCTAGTGGTAAATCTCAATGAGGGGGACCTCTGATCCACATATGTCAAGATGGA
GGTTTCCAAACACTACATGCAGAAACTCCATAGCTGAAGTCACAGGATGGCGGGGTGACACTCTGTATTCCAGCTAACAAGCTAGGGAACTCGA
CTGTGTGCACGTCCCTTGTAACCACCTACACATGAACTGGGAAACCTAAGATCCCTCGATGTTAATCTGCTGGGTTGAAAAACATTCCACCTCC
TGTGTGACCAGAGAAGTCGGGGAGCAGGAAACAACAGAACTCGTTTCCTTCCTACCCACTCACAGCCTCTCTGTGATGCCAAAGGGAAAGATAC
AGAGTACTTAAGGCCAAAGCTTGAGACTTCTTGAAGCTTTGTGAGTTGTGGAGGAGAGACAGTTCTAATCCCAGAGTCCTTGTTAAGCTGAGGT
ACCTGAGAATTTAGAATGGTCTAGCTGTGTTTTGAGACCAACCACTATGAATACAAGCCCGGCAGACTGGACTTGGAAAAACAAGGGAAAATTA
GAGACGTCCTCTGAATTTTCCTTTAATAAATATGGCTCAAACAAGATCCAACTGTTCCTACCTGCCCAACTTGTAAGGCATGGTTAGCTCAGGA
CACAAACAGGCATACCTCTCAGGGGAAAGAGCTCAGGGACCCTGCCACAGGCCTGCAGCAAAGTGAGTCTCCAGATGGGCACTGTCCTGGGAAT
TGAATGGACACCCACAGACATGCAGGCTGCTACCTGCTACACTCCCTCTCCATTATACAACATCTTTGACCCCAAGGTCAAAATTTAAACCAAA
TTCGAATTGACTTAATAATTAATCTAGGAAATTCCTGCAGTGGATAAAGGAAATAAACTTGGGATGAAAAATATTCAAGCCAGGACACTGAGGG
CTTAGAATCAGATATTAACCACTATGACTATAAACTATTGTTCTTACCCTAGGTTTGGAGGCCAATCTGTTCCCTTGTCTTAGGAAAAATACAT
AATATTTTGCTCCACAAAGGACACGTTTGGGAGTCATGGCCATTTCCTTTCCTCTCCAACAATTTCCATCCCTGAAGATGTCTTGTGTGTATGT
GTGTGAATGTCTGTGTATGTGTGTGTGTGTGTGTGTGTGTGTGTGTGTGTGCATCAAACACTCAACACGAAGCAACTTAAGGGAAAAAGGTTTG
TCTGGAATTGCTGTTCTAGGGAATGTGGCTCATCTTCGCAGAGAAAGTATGACAAGAGATGTAGAAGAAGCAGGTCACATCTAAAATCTAGAAA
CAGAGGGATACTGATGGTCAGTTTGCCCATGAAACGGTACCAGACATTTCAGATGGTTCTTCCCTATTCGCAAGCATCTTAATAGACCCACACA
GAGGTGCGTTTCCATGGTGATTCTAAATTCAATCAAGTTGAAAATCGTCATTAACAATTACAAATTCAAAGAAATCCTAAAAGACACCTTATGG
AATACAAGGCGAACCCATTATGCTATCTCAAAGCAGGTACGAATGTCCATCCGTCGTTGGTGGTCCACAAGGGGAAATACTCTTCACCACACTC
GTATTTTTAACTGAAAAATACGATCGATGCATGCGTATCCATTCCTGTGCTGGCTGGTTTTGTGTCAACTTGACACACCTGGAGTTATCACAGA
GAAAGGAGCTTTAGTTGAGGAAATCCCTCCACGAGATCCAACTGTAAGGCATTTTCTCAATTAGTGAGCAAGGGTTTGGAAAGGCCCCTTGTGG
GTGGTGCCATCTCTGGGCTGCCACTCTTGGTTCTACAAGAGACCACCCTGAGCAAGCCAGGAGAAGCAAGCCAGTAAGTAACATCCCTCCATGG
CCTCTGCATCAGCTCCTGCTTCCTGACCTGCTTGAGTTCCAGTCCTGACTTCCTTGGTGATGAACAGCAGTATGGAAATGTAAGCTGAATAAAC
CCTTTCCTCCCTAACTTGCTTCTTGGTCATGATGTTTTGTCCAGGAATAGAAACCCTGACTAAGACAATTCCCCAAGCTGAAACTTAAAAGAGA
CAGCACCTGCTTCACCAACTACTCTTTGCTTTCCTTGCCTGGTAAGTTTAAAGATACGTTCTTTTTTCTATCAGTGTTTCAGGGTGTAAAGACC
AATTAGAATATACTCAGTCAATTTTTCATACAATGTAGCTCAAATACAAAACACATTTGTATGCTTACAAACCATGAATGAGCTGTCATACTTA
CTGAACCTCACCTGGCTGGTTGTGATGCATATCCAGACTTCCGGACCCACATGGAAATTACAGCTGTGCTAGCTGTCTTAGTGTTAGAAGATGC
TACTACGTAGGCTGAGGGAGAATTCTTTATAACAGTCTTACTCAGTTATGAGTCCTGTATGTTATACTACTGACCTGGCAGGCAAGATATGCTC
ACTGGTTCAAGAGCTTCATGATTGATGAGCAACTACTTTCTGATTCAATTTGAGGCCTGTTCCATTCAACTCATGTCTGGTACAGTAACCTTGA
TCAAAAGTCAGAGTCCAGGCAGGCCATAGGTACCACTAGAGAAGNNNNNNNNNNNNNNNNNNNNNNNNNNNNNNNNNNNNNNNNNNNNNNNNNN
NNNNNNNNNNNNNNNNNNNNNNNNNNNNNNNNNNNNNNNNNNNNNNNNNNNNNNNNNNNNNNNNNNNNNNNNNNNNNNNNNNNNNNNNNNNNNN
NNNNNNNNNNNNNNNNNNNNNNNNNNNNNNNNNNNNNNNNNNNNNNNNNNNNNNNNNNNNNNNNNNNNNNNNNNNNNNNNNNNNNNNNNNNNNN
NNNNNNNNNNNNNNNNNNNNNNNNNNNNNNNNNNNNNNNNNNNNNNNNNNNNNNNNNNNNNNNNNNNNNNNNNNNNNNNNNNNNNNNNNNNNNN
NNNNNNNNNNNNNNNNNNNNNNNNNNNNNNNNNNNNNNNNNNNNNNNNNNNNNNNNNNNNNNNNNNNNNNNNNNNNNNNNNNNNNNNNNNNNNN
NNNNNNNNNNNNNNNNNNNNNNNNNNNNNNNNNNNNNNNNNNNNNNNNNNNNNNNNNNNNNNNNNNNNNNNNNNNNNNNNNNNNNNNNNNNNNN
NNNNNNNNNNNNNNNNNNNNNNNNNNNNNNNNNNNNNNNNNNNNNNNNNNNNAAGAAAATGAGCTGTCTATAAACGCTCAGGAAGCCCCCTTAT
TCTTTACAATGGAGTGTTGGTAGACCCTATGCAGGTTGTGAGCATGTAATCACAGCTTCTGAGTGCAATACACATACACACACACATACACACA
CATACACACACACACACACACACACTCTGTGGAAATAGAAAGAGAACTATCTGTAATGATACAAGAGATCAGTGGTACACGACAAGCGAGTAAT
GAGCATGAATATGATGCAAGTGCATCCTATGTACATGTTTATCTGTGAGAAAAGAGACCATCAGCAGCAGGGAGGGGACAAGAGGGTAATGACC
CAAATGCATTATATATACACGTATTAAAATGTCATAATGAAGTCTATCATTATATACATCATTATGTACACAATGAATATATGTATCAACTTTA
ATTTTTTCAAAACAAGAAATTACAGCTTTCTCATTGAATCTACAGTAAATCTGGCCTCATCCACTAGTTGGCAGGAAAGCAAAAAGTCTTGTCT
AGTTTAAACAATTCTAATAGGCATTGCTGGATTTCTAATGAACAAAAATCCTTCCTCCAGATCAGCAAAATGGCTCAGCAGGGAAAGCACTTGC
CACGAAACTTGACAACTAGAATTTGATCCCTGGGATCCACGTGGCAGAAGGAGAGAAACAATTCCCACACGTTGCCCTTTGACCCGCTTCTTCC
AAGCAATGTGGAGACAGCTGGAGAGAAAACTGGCTCCATCCAACTTCACAGTTCTGTAAAGAGTCAGAGTCTACAGAGGTGACCGTCCACAAAG
GCAGTGCTCCCAGATGCAGACACTGATTCAGCCTCACAGCTCACAGTTCATTGTGAAGGGGGAGTCGGGGGCAAGAAGAGCTCAAGGCAGGAAG
TGNNNNNNNNNNNNNNNNNNNNNNNNNNNNNNNNNNNNNNNNNNNNNNNNNNNNNNNNNNNNNNNNNNNNNNNNNNNNNNNNNNNNNNNNNNNN
NNNNNNNNNNNNNNNNNNNNNNNNNNNNNNNNNNNNNNNNNNNNNNNNNNNNNNNNNNNNNNNNNNNNNNNNNNNNNNNNNNNNNNNNNNNNNN
NNNNNNNNACACTGTAGCTATCTTCAGACACACCAAAAGAGGGCATCAGATCCCATTATGGATGGTTGTGAGCCACCTCATGGTTGCTGGGAAT
TGCACTCCAGAACTCTGGAAGAGCAGTCAGTGTTCTTAAGGGCTGAGCCACCTCTGCAGCCCTATAGCACCCGGGGCAACCTGTGTAGGGATGA
TATTGCCCACAGAGAGCTCAATTGTCCCTCATCGATCATCAATCAAGAAATGCTTTAGAGACTTGCACCTCCTCAGATGAG
MOUSE SEQUENCE—mRNA
AAAAGCCAAGATGACAGACTGACAGCCTGAGCCCTTGTCTTGCATTCTCCCAGGAAGATGCAGTAAAGGGGTTGACCCAATATACTGCAGAGAA
TTTCATCCAGTTCCCTCCTCCATCCTGATCCCATGTGCCAGGAAGATGGAGCCACCCTTGCTGACGTTGGGGTTTCTCTCATTAACCATAGTAC
CCAGTTGTCGGGCAGAACTGTGTCTGTATGACCCACCCGAGGTCCCCAATGCCACATTCAAAGCCCTCTCCTACAAGAACGGCACCATCCTAAA
CTGTGAATGCAAGAGAGGTTTCCGAAGACTAAAGGAATTGGTCTATATGCCTTCCTTAGGAAACTCCTGGAGCAGCAACTGCCAGTGCACCAGC
AACTCCCATGACAAATCGAGAAAGCAAGTTACACCTCAACTTGAACACCAGAAAGACCAACAAACCACAACAGACATGCAGAAGCCAACACAGT
CTATGCACCAAGAGAACCTTGCAGGTCACTGCAGGGAGCCACCTCCTTGGAAACATGAAGATTCCAAGAGAATCTATCATTTCGTGGTTGGACA
GAGTGTTCACTACGAGTGTATTCCGGGATACAAGGCTCTACAGAGAGGTCCTGCTATTAGCATCTGCAAGATGAAGTGTGGGAAAACGGGGTGG
ACTCAGCCCCAGCTCACATGTGTAGATGAAAGAGAACACCACCGATTTCTGGCTAGTGAGGAATCTCAAGCAAGCAGAAATTCTTCTCCCGAGA
GTGAGACTTCCTGCCCCATAACCACCACAGATCTCCCACAACCCACAGAAACAACTGCAATGACGGTGACATTTGTGCTCACTATGGAGTATAA
GGTAGCAGTGGCCAGCTGCCTCTTCCTGCTCATCAGCATCCTCCTCCTGACCGCGCTCACCTGGCAACACACATCGAGGAAGAGCAGAAGAACC
ATCTAGCAAGCTAGAAAAGTCAGAGCCCAGGCAAGCGGATGAGAGCCCAGGCAAGCGGATGGGAATCACAAAGCTCAAGCCAAATCTGAGACGT
CCAAGCATTCACCTAATCGGCTGTTTCCTTCTGATCCCTGGGTTTCTAGAACATTCTGAAGTCACAGGACATAACAGCAACTCTATCACTAAAC
TGGACTTTGCCATTGAAGAATACCATCTAACCACTTCAGCACAGCAGTTCTAAAGCTTTAATGGGAGAGACCCCCCAACAGTGCTCTGTGTGTT
TTGTTTTTGTGTATATCTGTTGATCGGGAGCTGAGATGGTGTCGTCACTTTTCATGTAACATATAGTATAGAAAAAGTAGCTTTAGGTTGACTT
CATTGTTACAACCCAGTTTGGAAAGCCCAAGTAAAACTCACCACTAATGTAAAT
MOUSE SEQUENCE—CODING
ATGTGCCAGGAAGATGGAGCCACGTTGCTGATCTTCCGCTTTCTCTCATTAACCATACTACCCAGTTGTCGGGCAGAACTGTGTCTGTATGACC
CACCCGAGGTCCCCAATGCCACATTCAAAGCCCTCTCCTACAAGAACGGCACCATCCTAAAGTGTGAATGCAAGAGAGGTTTCCGAAGACTAAA
GGAATTGGTCTATATGCGTTGCTTAGGAAACTCCTGGAGCAGCAACTGCCAGTGCACCAGCAACTCCCATGACAAATCGAGAAAGCAAGTTACA
GCTCAACTTGAACACCAGAAAGAGCAACAAACCACAACAGACATGCAGAAGCCAACACAGTCTATGCACCAAGAGAACCTTACAGGTCACTGCA
GGGAGCCACCTCCTTGGAAACATGAAGATTCCAAGAGAATCTATCATTTCGTGGAAGGACAGAGTGTTCACTACGAGTGTATTCCGGGATACAA
GGCTCTACAGAGAGGTCCTGCTATTAGCATCTGCAACATGAACTGTGGGAAAACGGGGTGGACTCACCCCCAGCTCACATGTGTAGATGAAAGA
GAACACCACCCATTTCTGGCTAGTGAGGAATCTCAAGGAAGCAGAAATTCTTCTCCCGAGAGTGAGACTTCCTGCCCCATAACCACCACAGACT
TCCCACAACCCACAGAAACAACTGCAATGACGGAGACATTTGTGCTCACAATGGAGTATAACGTAGCAGTGGCCAGCTGCCTCTTCCTGCTCAT
CAGCATCCTCCTCCTGAGCGGGCTCACCTGGCAACACAGATGGAGGAAGAGCAGAAGAACCATCTAG
HUMAN SEQUENCE—GENOMIC
CTGTGCCTAGGCTGGAGTGCAGTGGCACAATCGGTAGCTCACTGCAGCCTCAACCTTCCAGGCTCAAGGATCCTGCCACCTCAGCCTGCTGAGT
AGCCGGGACTACTGGCACGCACCAACACACCCAGCTAATTTTTAATTTTTTTCTAGAGAATCTGGTCTCACTATGTTGCCTAGGCTGGTCTCAA
ATTCCTGGTCCCAAGCAATCCTCCTGCCTTAGCTTCCCAAAGTGCTGGGATTACAGGTGTGAGCCCCCACACCCAGCCCACTTCCGCTCTTAGG
GAGAGGCGAGTGCATTTCAGAGAGCACTCGATGCTCCCAAAAGAAGAAGTTGACAGAGCCCACGTCCCCTCAGCCCTTCACACAGCCTCCCCTT
GTCTTCCTCTCCTACTCAGCACTGTGGCTGCACTAGGACCCCTCATGATGACCAAGATCCTCATAAAGAGGACAAGAAGTTCATCCAGTACCAG
TCAGGCCAATATCCCAAAATTAGCATAACTGGCAGAAATGCAGAGGCATCAACAACTCCTCTTGACAACAGGGTTGGTAGAAGAATCAAGGGCC
TAATTTTGATGCCTGGCACAGGTTATGGGAGCAGCAGAGTACATGCTGCCCAGCGGCTTCCAGAAGCTCCTGGTCCACCCCGTCAAGAAGCCGG
AGGTCCTGCTGAGGTGCAACACATCTCAGTGTGCTGAGACTGCCCTCAATGTTGCCCCCAAGAACTGCAAAGCCATCCTGGAAACAGTGGCCCA
GCTGCCCATTGGAGTCACCAATCCCAGTGCCAAGCTGTGCAGCAAAGAAAAGGATTAGACTGCTCATGTGCACGTTTTATTTGTTTTTAAATTA
AAAAACAAAAAAAAGAAAGAAGGAGGAAGTGGAGGAAGAGGAAGGAGCAGCCACGACGAGGAGGAATTTACATCAGCAGGCCGATCACATACTA
GTCCTTGAATTCATGGTTGAATGTACTGACCATTCTCCCTACGGACACTTGAAGGTTTCCATCAAACCCTTCATAACATATTGCATAATTGTGG
ACTCTAGACTTGGGCCACAACTGAGTGATTTTTTTTTTCTCAAACCCAATTCCACAAAGTAAAAGCCTGATGAAATACAGTGAAGGCTGATGCC
TTATTAACTGTGTTTCCCAAATCCAGAGCTCTAAAAAGGTTCTGCATACAGTCATTCATTCAATGCTTAACGACTGAGCATTAATTCCATGCTA
AGTACTGAACTCAGCACTAGGAATAAGAAGGCGACCTAGAGGCATATCCTCTCTCTAAAGATGCATAGAGCCTCATTGGAATGATCAGCCGTGT
CTCCAGAGAGCTACAAGGCAGTTTTCAATTGGTAAATGCCCTGAGAGTGATGGGCTTGTGGCATGTGTAAGGGTTAGACAGACCTGGGACCTAG
ACATGACACCACTCCTGACGAATTATGTGAGTGTGGGTGTTTCACAACCACAATGAGATGCAATGCCTGCACTTGTAACATGGAAATAGTGATG
GCATGCCGGCCCCGCCAGATTGCTGTGAGAAGTCAGCGGCAGAGACATGCAACATTCTCAGCACAGTGCTTGCCATGTAGTAAGGGCCTAGTCA
GTGCTAGTGATTCCTTTCAATATTCCTAAGATGCAGATAAGGGAACAGCCCAGAGGAGGGGGAGCACTTCCAGAGGGAGGGATGCGGTGAGACT
TCCTTCAGCAGGGTAGCACTGGAGCTGGGTGTTAAGGAGTGAGTGAGCTTTGGGCTTATGGATTTAACAGAGGAAACCAAGAAAAGAGGAGGCG
GTGTTGCAGGAACAGTGAGCAGTTGATGATTTTTATTTTGTTCTCTGGTCTGCTTGGGAACATTTTTGTGGCAAAGACAGCATGAAGGATAGCG
AAGAATTAATACTGAAGAGATAGGCCAGGGCAGGTTATGAAGGATTTTGAATACCCGGCTAAGAAATGTGGGCTTAATTTCAAAGACATTATGG
ACACTCCTAAAATGTTACGTTGTAGATAAGGGAAAAGTATTCTTCCAGAAGATTAAATTGGGGCTGGGCACGGTGGCTCACGCCTGTGATCCCA
GCACTTTGGGAGGCGAAGTGGGCAGATCACCTGAGGTCAGGAGTTTGAGATCAGCCTGGCCAACGTGGTGAAGCCCCATCTCTACTGAAAAAAA
AAATTAGCCGGGCATGGTGGTGGGTGCCTGTAATCTCAGCTACTTGGGAGGCTGAAGCAGGAGAATCACATGAACCTGGGAGGCAGAGGTTGCA
GTGAGCCAAGATTGCACCACTGCATTCCAGTGGGCGACAGAGCAAGACTCAGTCAAAAAAAAAAAAAGATTAAACTGGAAGCAATGGGTAAGAA
TGGTGGAGTGGAGAGACACATTTGAGTGAGGGAAGCCAGCTGAAAAGCTGTACAGACGTCTAGACAAAATGTGACACAAGCATGCCTTCACCTC
CCTGCAAAGACCACAGACCACTGAGCTCCAAAGGGGGTTTGGAATCCTTGTCCTGGGCCGCCATTCGTAACTCATCAGTGCTGGCTTGAGAGAT
AAACTCTATTATCCATCCCTGAACTAAAATCATGACAGAAGTGGCCAGGGAGCTTTGCTGCTATCCCCCCAGGAAACACGTCCTCCACTCAAAT
GGAAAGAGGACCCTCTGACAACATCTGTGGGACCCAACAGCACTGGTCACCACAAGCCACAAAATGTTAACAAAGTCAGTTTTCAATTGTTAGG
GACGGAGGACTCAGTTCATGATTCATACAAACCAACTGTTCTCTCCCAGTGTTTTCTGGGTGGCACAACCCACAAGTCAACAGTGGCTTGGGAA
CTAGACATTTGAGTAGAGTTGGGTTATTTGATTCATAGTGGATTTTGGTTTTCCACGGGACCCCTGTGCCCTTGTCTAGTAGAATCTGGTGGAA
ATTACAAACTCCAGAAATTCAACTCAGTGCCGCAATAACAGGATGCACCTGTAGATTTCGTAGAATTAGCAGCAGCATTCTTTCAATACCAGTT
TGAGAGAAATAACCCTGTTTGCATAGTGCCAACTGGGGCAGAATCTGAAGTGTCTTGCCTGCCTCTCGGCCATGGGAGGCACCGATCTCAGCAA
CATCTATCCAACCGCCATCCACTTAACAAGCAAAGATGGAAGGCCCTCGTGCTCCAGGCTATCCTGCAATGGTTCATTTGCTTTTGATGGGATT
ATCACTTTGACAGATGTCCTTGCAATTAACTGGGGGCTTTCTGCTTCCAATCCAAATTCCCACAGGTGGATCACTGGCTCTTGGGGAGCAAAAA
CCCTTCTTTGTTTGTTTTTGCTTCTCCCAGAGCCTGGGCAGAGCTCCCCATTCCTGGATCCTACCTTGATATGCACTGAATTGAATTATACTAA
AGGGTGCACCCAAGAGTGCATGAGCTAAGTAAAATGTAATTTGTGGGACCTCATGTGGACATTTCAGGTCCATGTGTACAAGATAAAGGAGAGA
AAATCCTGGGGGACACCACAGGCCTGGGAAAATGACCTCCTACTAAGCCTAACAAGAACATCCAGTACATAAACAGCAGGCTCTCTGCAACCGC
TTCGGTCCTTCCACTGCCACCCTCCCAGAAAGCAAAGGGTTATCTCCTGTTCGGATTTTGGCTCTGAGACCACAGCTCAGCACATCACTCCTCT
AGAGAAAAGAAAGTCTAAGATGAGAGAGTCAGGCTGCTTTCATGTGGTGCCAGCGTATAGTGCAGGGCAGGCCTGATTGCTGAACGGATCCCTG
CAGACGTGAGCGGTCACTTCCCCTTTTGAGGGCCCATTTCTTTTCCTCTTTGAGGAGACTGTGAGCGTCCTCAGTGCAGGGCTATGTTTTAGCT
TCTTGGCTCTCCTCACAGGTTCTAGCATAATTCTTTGATTAATTGCAGTCAACGTTTATTGATGGATTATGTGACAGAGGTGAAATTCTTTGAT
CTGGGTTTCAGCTTTTCCTTTCCCCCACTCCCTCCTTTTTCTTTTTTTTTTTTTTTTTTTTTAGAGGCGAGGTCTTGCTCTGTGGCCCTGGCTG
GAGTGCAGTGGTGCAATCATAGCTCATTGCACCCTTGACCTCCTGGGGTCAAGCGAACCTCAACGTCTTGGCCTCCTGAGTAGCTGGGACTATA
GGCATGCGCCACCACGCTCAGCTTCACCTTTTCCTTTCCTTGTGCTCCCCTGGCAGATATGCTGGTAAACAATGAACCAGTCAAGAGGACAGCA
ACAGGAGGAAAATGGGAGAAACCCCATTATTCGTGGACTAAACAGGCTTCCCACTAGTCCTGGCTCACAGAGGAAGTCATGCTCCATGTTTCAA
ATGTCCTCAAAGCTCGTTCAACTCCAAAATGCATGAAGACAAAATCGGAATTTTACTCAAGATTTTTGTGGGCTGTTGGGGAGAAGAGTTAACA
TTGCAAAGCATATTGCAAACTCTTATCTTCAAATCATTTTAAAATTTTCTTCCAAGCTCTTTATTATTTCTCCAGAGCTGCCCTGCTCTTCCCA
CTCTGGGTCCTTTCTCTGCCACTCTCCTCAGCATGACTTCTCCCTAATCGGCCAGCATTTCTTTTATTCTATAGAGCAAGTTTTCTTGCCCTGG
GCACCTCTCATTTGCATGTTATACCACCACACCAAGTGAGCCTCAGAGCACCAGTGTTTTAATCCCTGAAAACAGTCCTTACGGGATTCAGCAC
AGAGGTCCTCTTGGCAGCCTGTAGTCTCCAGAGTGACACGTCCTCAACAGTCAAAGTGAGCAACCTATGGTGCCCATCACCAAGTGGGGCTCAC
CATTTCCCTCTGCGTTCACTTCTCTCCTACCTTCTTCCTTATCCCATCCTTCCTCCTTCCTTTTTTTTTCTGCATTCAATTATTCATGGTTATT
CATTTCATACGGGCATCTGTGCCACTTGGTTCTACAGGCATTTTTTTTTTTTGAGACAGACTTTTGCCCTTGTCCCCCAGGCTGGCGTGCAGCG
GTGTGATCTTGGCTCACTGCAATCTCCACCTCCTAGGTTCAAGCAAGTCTCCTGCCTTAGCCTCCGAAGTAGCTGGAATTACAGGCATGTGCCA
CCAAGCCCGGCAAATTTTTGTATTTTTAGTAGAGACAGGGTTTCACCATGTTGGCCAGGCTGGTCTCAAACTCCTGACCTCAGGTGATCTGCCT
GCCTCGGCCTCCCAAAGTGCTGGGATAACAGGCGTGAGCCATCGTGCTCGGCCGGTTCTATGGGCATTGTGGAAGTGACCGTTAACAAGCCCCA
AGGGTAAGTAAAGGAAAATGAAAGGTGATTGATTCCTCACCACCTCTCCCCTTTTTTCCTCTACTCTTTGCCCCTGCTCCCCAATCTAGACTCT
AATAAACAGAAATGATTTTTGTTGCAAGCTGAAAACTCGTTCTTGTGGTTGGGGCTAGGGGGGTGGCAAGTCAAGCTTTAGAGTTGTCTGGATA
ATAAATGCTGTCTTCAAGGACTGTCCAACATTGTAGGAACAAGAGAACAACCCAAGTGAACAACTAACTCCTGTTCACAAATGCTACTGCCTCT
CTGCCATCCCCTAACCTCAGCCTCACACACTTGAATTTCGCCAATCCATTTGATGAGCTCAAATCAGTGAATTTTCCTCCTCGCCAAGCTCACA
AATTCTGTTCCCCGCTTCTTGCCCCACATCCAGGCATTACCAACTGCATTTTCCCTTTGCCTGATATTCTGGCATCAAGCCTCCTTGCCATTCC
AATTTATTTCACCTTCCTCCAGTCCTTATGATTTCCTTCCTGAAGAGTATTTCAGCATCTCTATGCCTCAATCTTCCCTGCACACCACACCAGC
TCGGCCTCATCATCACATCACTTGGCTATCTCCCGCCTGGGTTAGACAGCTTCAGTGCCTGAAGTCCATAGATCTTATTCTGTTTTTCGACGTC
CACCTGACTCTGAATCCAGCTGATATTTCTGCCCTTAGCTTCTACCCCTCTCTACTTCTGGTTAACTATGCACCACACTCTGCTTCCTCAGGAA
CCACCTACCAAGGCCGTATCCATCCTTCAAGGACAATACGTGGGCCTTTCCTGATCACATCAGCTCAACAACTTTTCCCTCCTACATTTCAATT
GCTCTTCTTACCATAATCATTAGTATTCACCCCGCTGTACGTCTAGAAAGAAAGTGCTCTTAAACCTAAGCCAAGGCAGTCTAGCTCACAAATT
TGTTGTCCGCTGTTCTGAGCAGTTTCTTCTAGGAAGTACCAAACATTTCTGATAATAGAATTGAGCAATTTCCTGATCAAGTGAGACTCAGCTT
GCACTGTTGACCCCCTGTCCCTGGATGAACCTAGTTACTTTTAACCAAATCTTCCTTTCTTGAACTTGTTCCTTTCTTGAACTTAATCTACCAA
TGTTATCTAGATAACTTTCCTCAAAAAAAAAAAAAAAAAAAAAAACCCTCTACTAGGAAAGAAATCTTTGAACCGGACTTATTGGAAATTACCT
CCTTGCAGCAGGTTTGAAACAAAACTTTGAATTTGCCTCACAAAGAATTTGTCTGAAACTGCTTTAGTATATGCTAGTTATATTTGTATGCACA
TGTGGCTTCATACATAGTGGTTGGACACCCATATGTGTTATCCACTTTGTTAGGTGACGTAAGTTCACAGATAAACTGGACATAGGGCTATCCT
CTAGAGCCCCACAGTTTGACACCTTAACCTGAGATCCTTGGACCTTTGAAGTTCAGAGTCCCCACAACCGCTGGGTGTGGTGGCTCACACTTGT
AATCCCAGTACTCTGCAGGGCTGAGGTGGGAGGATCGCTTGAGTCCAGGAGTCTGAGACCAGCCTGGGCAACATGACAAAACCCCATCTCTACA
AAAATTACAAAAAAAATTAGCCAGGCCTGGTGGTGCATCCCTGTCGTCCCAGTTACTTGAGAGGCTGAAGTCCCAGGATCACTTGAGTCAAGGA
GGTAGAGGCTGCAGTGAGTTGACATGGCAACACTGCACTCCAGAAACCCCATCTCAAACAAAACAGAGCAAAACAAAACAAACTGCCCATAATG
CTCCTGAAACTTCCTACGGATTTATCCAGAGTATGTGCTGATGTGCATTTTTTCCAAGCAGGGAAACCAAAGGGTCTATCAAATTAAGAAAAGA
GTTTTTACCATTGTGGAAGACAGTATGGCGATTCCTCAAGCATCTAAAATCAGAAATACCATTTGACCCAGCAATCCTATTACTGGGTATATAC
CCAAAGGAATAGAAATCATTCTACTATAAAGTCACATGCACCCGTATGTTTATTGCAGCACTATTTACAATAGCAAAATGGAACCAACTGAAAT
GCCCATCAATCAGACTAGATAAAGAAAATGTGATACATATACACCATGGAATACTATCCAGCCATGAAAAGGAATGACATCATCTCCTTGGCAG
GGACATGGATGAAGCTGGAAGCCATTATCCTCAGCAAACTAACACAGGAACAGAAAACCAAATGCCGCATGTTCTCACTCATAAGTCGGAGTTG
AACAATGACAGCACATAGACATAGGGAGGGGAACATCACACGCCAGGGCCTGCTGCAGGGTGGGGGGTGGGGTGTGAGGGGAGGGAACTTAGAA
CACAGGTGACTACCTGCAGCAGACCACCATGGCGCACTTATACCTATGTAACCAACCTGCACGTTCTACACATCTATCCTGGAACTTAAATTAA
AAACAAAAAAGAGTTTTTAATCCAAAAAAGATTAACAGCAACTAGAAGAAAGAAAGAGATATAAACAGTGAATTGCAATGCAGCACCGCAGGTG
TTATGATGGAGTACAAAGGACTGGAAAAGGCCTCCTGGAGGAAGCGACACTCAAGTGTCTTTCCATTTCACCTCTAAACTCATTAAGGGCAAAA
GCTTTGCTACAGCTTCAGTATGAGATCCTGGGCAATCCGTGACAAAATGGGTCTGCTTTTGCACCCCCAACTTCTTCTCACATCCCTGCATCGT
GCCATGCAGCATCAACTGGAAACCTCAGCATCAGCAAACGACGACAGAGCGTTCATCCGTAAGGTGAACCAGAAAAGCCAGTTCAATGACTTGT
TTAACCATGGTCCATCTCAGAACCAAGAGTTGGGCCTCTTATTTACCAGAAAAATTGTGGGGGCTTTGTGATATGGCTTTAAAAAAATCTTGTA
ATTGCCAGGCGTGGTCGCTCACACCTGTAATCCCAGCACTTTGGGAGGCCGAGGTGGGTGAATCGCCTAAGGTCAGCAGTTCGAGACCAGCCTG
ACCAACATGGTGAAACTCCGTCTCTACTAAAAATACAAAAACTAGCTGGATGTGGTGACGCGTGCCTGTAATCCTAGCTACTCAGGAGGCTGAC
GCAGGAGAATCACTTGAACCTGGGAGGCAGAGGTTGCAGTGAGCCAACATTGTGCCATTGCGCTCCAAAAAAAAAAAAAAAATACATTAACATA
AATTTAAATATTTTATAATGACAATCCACATTAACTACTTAAAGCATAAGCTATTTTCCAGGAGAGGCAGCAAGTGCATTCTACTCCCATGCCC
AAGAAGAAAGGACCGTGACTTTGGTGGGAGTACTAGGAGTTTCTACTGGAGCACTTCCCCGCAGAGTGAGAAACGTTCCTAGAGAGGAAGTTAT
ACCTGCTGTGGAATTTAAGAGAATCTTGTCATATTTTGACAAGTTTTTTGAGATGGAAGTCTCACTCTGTCGCCCAGGCTCGAGTGCAGTGGCG
CAATCTCAGCTCACTGCAGCCTGCACCTCCTCGGTTCCAGCTATTCTCTTGTCTCAGCCTCCTGAGTAACTGGGATTACAGGCGCCCGCCACTA
CGCCTGGCTAATTTTTGTATTTTTACTAGAAATGGGGTTTTACCATGTTGGCCACACTGCTCTCAAACTCCCGACCTCACGTGATCTGCCTGCC
TCAGCCTCCCAAAGTGCTGGAATTACAGGCGTGTGCCACTGCGCCTGGCTAATTTTTTTTTTTTTTTTTTTTTAGTAGAGACGGTGGTTTCACC
ATGTCATCCAGGCTGGTCTCAAACTCCTGACCTCAGGTGATCCACCCACCTTGGTCTACCAAAGTGCTCGGATTACAGGCATGAGCCACCAGGC
CCAGTCAACGTGATGTGTTTTGGAACCCTGAATTCCTTGGCTTGCCCCGAGGGTTTTCTTTTTCTTAATATCTTTGCTTGCTTTCTAGTATTTA
AAAAATTGTGTTTTGCTCTAACTATGCAATGGCTTTAAGTCTTAGACAAATTTCCAGGGAGCAAAACACACTCAACCATTTCATAATAATCAGA
AGAGAGCTCTGATCAATAAATAACCAAGACTGAATTTTACAAAATAATCCAAAGTTTAAAACCAAAGCCCACTTTTTGCATGATCCTTTAAGAG
AAAGAAATCTGGAAGCAAAACACCTTATAAAATGACAATGCACTTTCAGGAGCCCAGGGCACTCTGGTGAAATGATGATGGCTAGTACAGGTTA
TAAGCCTTGGGGAATTATTTATGAATTCTCAGCATCCTTCAGTTCGCCGCATCCTTCTCCATTATTTGAATATTGGAGGCTGCCTGACCAGAAT
CTTGTCAGGACTTTGCTCCTTCATCCCAGGTGGTCCCGGCTGACTCCTGAGGACGTTACAGCCCTGAGGGGAGGACTCACCTTATGAAGTGCTG
GGTGAGACCACTGCCAAGAAGTGCTTGCTCACCCTACCTTCAACGGCAGGGGAATCTCCCTCTCCTTTTATGGGCGTAGCTGAAGAAAGGATTC
ATAAATGAAGTTCAATCCTTCTCATCAACCCCAGCCCACACCTCCAGCAATTGAACTTGAAAAAAAAAACCTGGTTTGAAAAATTACCGCAAAC
TATATTGTCATCAAAAAAAAAAAAAAAAAAAAACACTTCCTATATTTGAGATGAGAGAAGAGAGTCCTAGGCAGTTTCCTGGCTGAACACGCCA
GCCCAATACTTAAAGAGAGCAACTCCTGACTCCGATAGAGACTGGATGGACCCACAAGGGTGACAGCCCAGGCGGACCGATCTTCCCATCCCAC
ATCCTCCGGCGCGATGCCAAAAAGAGGCTGACGGCAACTGGCCCTTCTGCAGAGAAAGACCTCCGCTTCACTGCCCCGGCTGGTCCCAACGGTC
AGGAAGATGGATTCATACCTGCTGATGTGGGGACTGCTCACGTTCATCATGGTGCCTGGCTGCCAGGCAGGTAAGGGCCTGTGGGTGCCCCCGG
AATTCCCGGAAGGCTGATGGGCATCCCTCTTCCCAGCCACACAACCACAGGGAGTCCCCAGGTAGATGGTTCCAAGAAGGGAGTTGAATCTTGG
GTTCCACCTCTTGCCTGTGACCCACGGGGACCCCAGTTTATGCCTCACTGTTCCTTGGTCTGTCAAGAGAGCCTGAAATAGCATTAGGTTCTCC
TGTCCTTCTCAGTCCTTGACAATTAATTCTGGGAAGAATAGTGTGGCATGATATTTGGGATATTTGGATGTTAACAGGGTCCCCATGAGCAGGT
TTCTCAAGAAATTATCTTTTATTCTTCAATGAATTTCCTTTTATTCTCTGCACTCCCACCCCCCAACTAAGAAGCTATCAGGAAGCTCTTTAAG
TTCAGGTTAATTTGCTGGAGACATGAGTACTCATATATCAAACACTGGGAGAATTTAAGATCTCAGAAAAGTTTAGCTTCAAGGATGTATACAC
TGCTTTTACGTCTTAGGAAATAACACCTAGGAATTTCCTTACAAGTGCAACTTTACAGAAATTTTTAAAAATATGCATACTCACTTTTAGAACA
TTACTACTTCTCATAATCCTATGTATATACATGATATGTATATGTATACGTGTTTATATATGCAAATTTTAAATTTCATTCCTTGTTTCAAATG
GATTTTCTCGAACATTTTTTTTTTTTGACACTGTCTCTGTCAGCCAGACTGGACTGCAGTGGCGCGATATTGGCTTACTGCAACCTTCGCCTCC
CAGGCTTAGCGATCCTCCCACCTCAGCCTCCTGAGTAGCTGGGACTACAGGCATACGCCACCACACCTGGTTAATTTATTTTTTTGTAGAGATG
GGGTTTTTGCCATGTTGCCCAAGCTGGTCTTGAACTCCTGGGCTCAAGTGATCCACTCACCCTGGCCTCCCATACTGCTGGTACTACAGGCATG
AACCACCGTGCCTGGCCAATATTTTTTTTTAAAGAAATAAAAAACCACCAACTTCTACCTCAAACCACTCTTCCTAATTGAGTGTGAATTTTCT
AATAATGTCTTCCCTTTGCTTACTCAGGAAGACAGATAAGAAAGTTTATAGTGTTTTTTGAAAGTCTATAATGGCAACAAGTAGAATGCTAACT
GGCTGTAGAAAGAATTTATTAAGAAATGAAACATAATGATGCATTTCAGGAGTCTGCTTGCTTGTTTACCCCAAGTGCCCAGTCATGCTCGGCT
GTGTACTGGCCCAGATGTAGGAGTGTCTTTAAAGAGGGCATTTTATTTACTTATTACATTTTTATTTATTTTTTTTTTACTTTTTGAGACAGAG
TCTCACTCTGTTGCCCAGGCTGGAGTGCAGTGGCGTGATCTCAGTCCACTGCAACCTCCACCTCATGGGCTCAAGTAATTCTCCTGCCTCAGAC
TCCTGAGTACCTACGTTTACAGGTGCGTGCACCACCACGACCAGCTAATTTTTGTATTTTTAGTAGAGATGGGGTTTCACCATATTGGTCAGGC
TGGTCTCAAACTCCTGACCTTGTGGTCCACCAGCCATGGCCTCCCAAAGTGCTGGGATTACAGGTGTGAGCCATCGCGCCTGACCTATGTGTTT
TATTTTAATAGGTTTTGGAGGACAGGTGGTGTTTGGTTACATGAATAAGTTCTTTAGTGGTGATTTGTAAGATTTTGGTGCACCCATCACCTGA
GCATGTATGCTGTACCCAATGCGTTGTAAGATTTTGGTGCACCCATCACCTGAGCATGTATGCTGTACCCAGTGCGTAGTCTCTTTTCCCTCAC
CCACCTCGCACCCTTTCCCCTGAGTCCTCAGAGTCCATCGTGCCGTTCTTATAAAGAGGGCATACTTTTAGGAAGGTTTTTCAATGTGATTTCT
ACATCCACACCGTCTTTGCTAACTCAGTCTAAGCCAAGAACAGGAAAATCTTGACAATTAATCATGCTCTGCCTCTGGAAGACACATTTCAAGT
AAACTCGTGTTATTTCTAGCTATTGGTGACTTATCCAAGGGTCTGAGTGGTCTTGGAGGCAGCAGGGGAACTAGAGTCCCATAAGGACTCCTTC
ACGCCATTCTCAACATCTATCCATACCCCATCTGCCCCTCAACACTATAGGAAATACAAAAATCAGCCAGATATAGTCCTGACACTTAAGCAAC
TTATAACCTGGTGAGGAGGAGAAAAACATAGATATAAATATAGTAATACCAGTCAGAGTGTGGTAAGATCTACGGAGCGTTGGGCTATCAGAGA
AGGCTTCATGAGCATCACATCTAAACCGAGCCCCAAGGGACCAGTAAATTTCCATCAATGAGATTCCAGGGAGAGAGACCCCAATCAGCCAAAA
CACAGGAGTGCCTTAGGGAGCAGCAGGTGGTCCAATGTGCTCCTGCCCTGGACAGGGAGGGTGGGGATATGGGGAATTCAAACTGGAAACTTAG
GATGAGGTAAAATGAATCATCTAAGGCATTAGGCATTTTTAGTCTGTATATTGCTGGGCCCTGGGATGTGGTCAGAAAGAGAATTCTCCTAGTG
ATAACTTCTTAACTTCACCTAGTAGGCAATAAAGAACTACAAGAAAATTTAAAACTACCATTTATAAAGTAACTTCTATGTGCCAGATATGTGT
CCTATTGTAATCTTCATAGCCACTTTGCAGTATGGATATCATGAACCCCTAGATGAAGCAAGAACCCAAAACTCAGACTCGCACAGGCAGTGAG
AGTGCCAGGGTTTGAACCTGGTCTCCCTGGATTGTTCTGTTTCTGTTCATTGCAAACAGGGTCAGCGCTTTATGGAGATGATACTGGCATAGAG
TGGAGACAGATCAGGTGCACAGAGACAGGTCATGAGGCTCTTAAAATAGTCCAATCACAAGGCAAATGAGGACCCAGTGGCCAAAGACAATGAC
AGGGGTCAAGTTTCTGGAATCAACAGGAATTTCTAGGCATCACTCCAGGGTAAGAAACCATCTCATCACACACTTTTTCTCCAAGAGGAACCTA
GTCTTGAAACAAATCAGACTTTTTATTCCTCAGGGTAAGAGTTCTCTAATGAAATCAGACTGTCAACAGATGCAATTTCTAGCTGATTCATAAG
GGCAGATTTTCATTCTGAAAATTTCCAAAGCCACCATTTAACATGGCAACGCTTTATGAGGACATATTAGTCAACTTGAGTGTTTTTAGTCTCT
ATATTACTCGGCTCTGGGATGTGGTCAGAAACAGAATTCTCCTGGTATTACCAATATGCCACGTTATTGAAGGCACCTTTCTCAGAACTGTGGA
AATTCTGAGAGCTTGTATGTCCCTTGATCATCTTTCTTTCATTCTACGAATTCTGTGATCAAATCTTTATCCTCTAGACTCAAAAATAATTCTT
TAAAAAAACAGTGTGGAAACCCATTGAGATAATGTGTTTGTGTAATTATCCATTCTTGTAAAGACAACTGCCCACAATGGAATTTCCCATCTTC
ACCTTTGTCAGTCAAACACAAAATGTTTAACCCTTCACATTTAATCTTTCAACTTCTTGAGATCCCAAAGTATTATTGCTACTCTTACTTCATT
CATCTTCAAGACATGTCTTGAGGCTGTAAGGGCTTTCCTAAACATTGGGAGCTCTTCATAAGACAGTTGCTACTTTCCTTAAAACAGCATGCCT
TAAATAGGCAGTTTGATAAATCACCTGTGCATATACTTCATTTTAGATGTGAGAATTGAAAAAGAAAAAAATTGACTTCACAATTCTGCACCAA
AAGAATGAGTTTCACGAATGCGTCAGTTAGAGGTGCTAATATACAACGGTTGCTGAGCTCTAAAACTCCACTACTCCACCCCACTCCCCTGATA
GAGAAGTATTCCCAGACTGGTTTTTGCCTAAAGCCTTGGGTATTCTGAATACCTCTTTGTGATTTTTTTTTCTCTTCCTTTTTCACACAGGGTC
TCACTCTGTCACTCAGGCTGGAGTGCAGTGGCGAGATATTGGCTCACTGCAACCTCTGCCTCCCGGGTTCAAGTGATTCTCCTGCCTCAGCCTC
CCCAAGTAGCTGGGATTACAGGCACCTCCCACCACGCCTGGCTAATTTTTGTATTTTTAGTAGACACGGGGTTTCACCAAGTTGGCCAGGCTGG
TCTCGAACTCCTGACCTCAGGTGATCTCCCCACCTTCGCCTCCCAAAGCACTGGGATTACAGGCATGAGCCACCGCACCCAGTCCTCTTTCTGA
CTTTTTTGTTGGAGTCATTCTTCTGCGAGCTATGGATATCATCAAGGCAGGCAGTCCCTCAACGTGGCAGCTCTTCCCACCCTTCCCTGCTCCT
CTTCTTGCCCAAGGATGAGCAGAAACTTTACAGAAAAAGAGACAATTCCCTCAGGAAATGAGGCATGTTGCTTGAGGTCACAGGGAATAGAATT
AGCAGGAAAATAAACCTTGCAGGAAGCAGAAAGTGGCCCAAACCACTGAGGAGAGGACACGGGGAGGCCGTCAGTTTTTGACAGATTTCTCTCT
GTAAAATGAGGAGGTCACCCAGGGATCTTGAAACTCCCTTCCAGTTCCTTCACTCTATGTCAAGGATTCCAGAAAGGAAATAAAATAAGCTCTG
CTTAAAAGGCATTTTCAAGCTGGGGAACTTTGGGATGAAAAAGTTTCCCAAATGAAGACATACTGGCACGGTCAGGGTTGAGCGACTTTTCTGT
ATCAATCCACCCAAGCCTGATGTCTCATTGTGGGTTATTTCCAGCTCTGAAGAAGTACTGCCTCGCACCCAGCATGACCCACTCCTTCTGTAAT
TGCTGCAGTTGCAGGTGTCAACGCAAAAACTCCACTCACTCAATTCTCAAAATCTATCCAATATCTCTCATGCCCCTTTTCAATACTATAGGAA
ATGTAAAAATGAGCGACATAGTCCTGATCCTTAAGAGACTCATAAGTTGGTGAGGAGGAGAAAGGCATAGATATAGTCATGGTAACACAAGTCA
TATGTGGTAAGATCTACTGAGCATGGCGCTATCAGAGAAAGCTTCATGAGGGTGACATGGAAAGGGAGCCCTGAGGGACTGGTAAATTTCCATC
AGTGACATTCCAGGGAGAGAGGCCCCAAGACACAGGGGCAGCAGGTGGTCCACTGTGCTCCTGCCCTGGACAGGGAGGGCGGGGTCCTCTGCTG
TTTGTTTGCTTGTGTAGGAATTTTCCCCTCAAACAATGTCCTTGTCTCCCATGGGAGAAGTTTTACATGAGTGGGAACCTGTTTCTCTTCTCTA
TCCCAGGCCATTCCCTGAGAGAAGAGAAAGGGGAATCTTTTTTTTTTTTGGACAGTTTCGCTCTGTCGCCCAGGCTAGAGCACAGTGGTGCAAT
CTCAACTCACTGCAACCTTCAGCTCCTGGGTTCAACTGATTCTCCTGCCTCTGTCTCCTGAGTAGCTGGGATTACAGGTGTGCACCACCATGCC
TGGCTCCTTTTTTGTAATTTTAGTAGAGAGGGCGTTTTTGCTATGTTGCGTAGGCTGGTCTTGAACTCCGAGCCTCAAGCCATCCATCTGCATG
GGCCTTCCAAAGTGCTGGGATTACAGGCATGAGCCACTGTGCCCAGCTGAAAAGAGAATCTTAATTCAGTTGATTACTTCTAAAAGTTATAAGA
CCTTCTTCACTGAAAGAGTTCACATACAACCTCAACTTCAATCCAGCCCTCTTAAATTTCAGTTCAATATTCCCTGCACATCTCCACATCTTTA
CATGAATTCTCAGTGATATTCCTTCATCCATCCATTCATGCATGAGGATTACAGAGATGAAGAAAGTTCCAGCTCTTATCCTCTTGTGCTCACA
GTTTAACACGGGAGATGAAACTGCTGCTCAATGGCTCCCATTCTGAAGTCAGCCAACAGTGTTTGCCAATAGCCCCCACTGAATACCCCACCAT
ATTCTCAAGTAACTCACTCATTTAGGGGAAAACAATAATATAATTGTCTCTAGAAATTTTAGCTATTCTCCACTCTAAGATTACTCAGTGTTTT
GACTGATCTCAAGGCGACTCCGTGGTTTGCTTCTGTCAAAAAGAAAACACAGTTCCCACTGGGAAATGTGTGGAGAGTAATGGTTCAAAACGCC
AGCTGTACATTAGTGTATATCCAGGATGCTTTAAAAAGTGATGGCCAAGACTCATAAGATGAATTAAGCGGACTCTCTGGGGAACAGAACCGAA
CATCACAATACCTTCCCTTCCAGTTCCTTGAATACTTCCAAATCGCACTTAGGATTGAAACTCACCAAATTAGAGAGATGGAATAATGATTTCC
ATGGTTGGTCTGATTCACTAGGAACAGGTATGCTCAAGCAGTACTTCTCAACCTTTAATGCATTTGGAAATCATCCAGGGATCTTGTCACGGAG
CAAATTCTGACTCGGGAGGTCAGGGGTTACCCCCTAAGATTCTGGTGCAAACAGGTTCCACAGGAGGCCTATGTTGTGGGTGCATGAACCCCAT
TTTGAGTAACAAGGCTATCAAGTCAGAGAATAAATACGCATTGCTTTTACCCACACAGAACTTGCGACTGAAATGAGAAAATAGGCTGAGTGTG
ATAGCTCATGCCTGTAATACCTGCACTTTGGGAGGCCAAGGCAGGAGGATCCCATGAGCCCACGACTTCAAAACCAGCCTGGCCAACATAGTGA
GACTCTGCCTCTTAAAAAAAAATTAGAAAAAGGGAAAACCAATCTGGGAAAGATCAAATATTGATCAAACATTGCAAATAATGCCATAAATGAT
CAGAATAGGGAGAGTAACATGCTACCTGGAGAACTAGAAAAAAAATTCTCAGAGAAGGTGGCCCTGGGACCTCCTGGCTCTGAATGGTGGTTCT
GAATATCAGGAGAGGGGCTGGAGAATGGTGTTTTCTAGTGATGCTGCTGGAGTCGTGTACATGGACCGTGTTCCATGACTAGTGAGCTGACCAA
TTAGAGAGATGAGGGGTTTGCCAGGACAACTACATAATGACCCATATTTCAACATACATGCAGTTTTGTGTGTGTGTGCCAACCAAATGAGTCT
CAGATTCTCGGACAAAAACGAATACTTTTGCTCAGACAGACAGCATGTGAGTGCTTCTCCCCCAGCTTCAACCCTGCAGTGTCTACAGGTGTCA
TTGGTCCCCGGTAGACGTCCTCGGTTCAATGGGTCACTGATCACTTATCACCAGCACCACATGACCCTGGATGGCAGCCAAAGAGTTCCTGGGT
CTTGTTTCCCTACCTCCACATTTTTTTCCTGACCCAGCCCGAGCCACGTGCACACCACAGGGCTCGAGTCCCAGTGCTTTTGTCCTGACAGCCC
ATTCTCCCACTCCCACACCCAACCAGTTCCCCGCCGGGTTTTTGACCAGCAGCTCCGCCTGCAGCCCTCCACCCGCATCCAGGCATCCTGCTTA
AGGAGGGGTTCAGGTGGCAGGAAACTCCAGGGCAACAAAGTGTGGCTGGCATGGGTGGGGTTGACCGGAAGGTCACTGTGCTGGCAGCAAGAGG
AACGGGTGGAGGGAAGGCAAGATACGGATCAGGAGTATTGACATCCTGTGCCAGTAGAGGGGCCTGCCCCATGGTGGAAGGTGTGGCCGGATGA
GCTCGCTGGCCCATGTCCCCCCGTTTCCCAGGCTTTTTCCTCCCACGCTGTATGCAGTGCAAGAACAAGCTGGTGCAATTGGACTAGCAGCAAT
TGAGTCCTTTTACCCAAAAGAAGAAGAAAGAGCAATGTTTCAAAACAATAAAAAGGAAGCTGCAGCCAGGTGCAGTGGCTCATTCCTGTAATCC
CAGCACTTTGGGGGGCCAAGAGGGGAGGATCCCTGGAGCCCAGGAGTTTGAGACCAGCCTGGGCAACATAGTGAGACCCCACCTCTATTTTTTA
AAATGATAATTAATTTTAAATAAGGAAGTTTGTGAAAGCCATTGGTTTCTTTATTCTAAAGAGCGTGGAAAATAGGACAGTCTCCAACAGGCCC
TGATTTCCTTTGGTAAGAAAATGAGCAAAGCTATAGACTAGGAAACATGACTGGTTAAAGCCGGCCCATGCACCAACTCCGATACTCATAGTTA
TGTTTCCTTTCGTTCTTATTTGCTTCAAGCTTTGATCCAGAAAACATTTGAACACTACCTAGAACCACCACAGTGAATATCCATTGCCTAAATG
CTATCTTTCAGGTATTATGTTCAGACATAGTATTACTTTGGTTAATTCTCAAAATAAAGTAGGTCATATGATTATCCCCATTTTCTGCCTGGTG
AACTGTGGTTAAATGGGCTTACAGAGATTAAATGGGTTGCCTGATGTAGCCCAACGAGGAAGGGGCTAGGATAGGAAGCAGGCGCTCTCATTCC
AGAACCTGCCTTTTTTCCTCCTGTCTAAACTGCTGCTAAAGGTCAAAGACAAAGGTGCCATGTGAGCAGGCAAGTTATTTTTGTTTTTTACAAA
GGTGAAGTAATAGGCTCTGAGTAATGCCCACTGCTCCTTCAGCCCCAGGTACATGCAGTGAGGCGGTACCCACAGAGCCGCGTGGCACTCCTCA
ACCTGCTAGAGCAGCCGGCCTCCTGCAGGATGGCTTAAGGACCACCTGGTCCTTGGGGTCTGGGTTCTCCGGGTCCTGCTGTTCCCTGCAGCCT
TCCTTCTACCCCCAGAGCAGCTTCGGGGCATCTTTAGAGAAAGCGGCAGTGTCGCACCTGCCCCAGCAGCCACAAAACACAGCAAATTCTCAGC
ACCTCCGGGCGTGAGTCACCATACCACATTCAGGAATTGCCACCTCTGCCCACAGAATCACCCACTCTTTTCTGTTTGGGACCAAAATAGATAC
CTCCTTCAGAAGCCGCTGCTTTCTGTACTCTCAGCAATAAAAAAACAAAGGCTAGGATAGGTGTGTGCCTCTGAGGCGTGAGGGGGGGCGCGTT
TTCTCCCCTGGGAAGGTTTTCAGAGAGAAGTTGTTGCTACAGCAGTACAGGCAGCTGATGGGTTGAGGGTACAGGAGGAAGACGGAAAGTCAGG
GAGATTGGAGACAACCTCTTGTGTGGTAGGACTTCCGGCTATTGGTTTGTTCATTCCTTTGTTCATTCATTCATTCAGCAAATGTTCATTGAGG
AACTGCTATGTGTCAGGCACAGGGTTTGACACACAGAGATGAATAAGAGCCCATCCTTGACCTCTCCACACACAATTATCACACAGGCTAAGTC
CTGAGATACAAGTTTAAAGAAGCAGTCGATGGAACACACAGATCGATGTTCATTACCCCTGCAAAACCCAGCACATCTCACATCAGGGACTGCC
TCATTCACATCATGTTAGATGTGACAGAGAGGACAGCAGAGAGCGTTGTTTTGTCATCAACTACTAAAATTATTAAAACCAAACACCACTAATT
TTGAACTTCAGGTAGACAGAGGATGTAGAGTTTTCCTTTGCTCAAGAAATTCCTTTACAGAGAAAATGGGAACATTTCAAGTGGGAGTATTTCA
ATTCCTTTAATAACAACCTGTTTTCTAGCTCCCACATTCCCCAAGTATTCTAGAAGCACCTTTCATAATGGACAGCTCTGACCAACTGCCCCAC
ACACATCCATGTGAACCGTTCTCCAATCCTAAAAGTCTGTGACTTCTCCAAGGAAAGGAGGAAGCAATCGTATTAGTCCAGTTTACATTATTAT
ATACTTTGTAGCAAAGCAGCAATGTTTCCTTAAAAAATTCTATATATATATATATATATATATATATATATATATATATATATATAGCTGGGCA
TGATGGCTCACGTCTGTAATCCCAGCACTTTGGGAGGCTGAGGCGGGCACATCACCTGAGGTCAGGAGTTCGAGAACAGCTGACCAACATGGTG
AAACCCCGTCTCTACTAAAAATACAAAAGTTAGCCAGGTGTGGTGGCACATGCCTGTAATCCCAGCTACTCAGGGAGGCTGAGGCAGGAGAATC
CCCTGAACCTGGAGGCTGAGGTTGCAGTGAGCCGAGATTGAGCCACTGCACTCCAGCCTGGGTGACAGAGGGAAACTCCGTCTCAAAAAAAAAA
AGAAAAAAAAAAATATATATATATATATTTGTGTGTATTTTCTCCTCATGAAATGAGCTCCTTGAAGCAAATCGGCCCATCTTTTCAGAGAAAG
ATCAGTTTATTACGTCACCAAGTAAAGGGCAAAGGAATCATTTCTAAAAGTTTCGTTTGAAGTCCCCGGAGTTAAAGTTGACGTCAGCCTCTTC
CTGCCCTGGTGCCCCGAGAGTTTCCCGGGAGTTTTGGGGATGACACCCGGCTGCATGCGTGACATCTCGCTGGCTGGGGGCAGCCCTCCTGGCT
TCCCCGACAATGAAACCACGCAGAGCCTGCAACCCAGCTGAGCACCAGTGTGGTCTCTGCTTCCGGTCCTTGTGGTAGCACCTCTGTTTACAGC
CTGATTTAGAACAAAAAGAACTTTTCTAAAGGAGAAAACTCCTTATATTAAATGGAAACCAAAACAAACAATTACCAAAAAAAAAAAAAAGTTG
GAGGGGTGTTTCAGAATAAAAGAGCCGTCTCTCCAGACATCTGTCTGACGCCCAGGTGGCGCTGACACCACAGGGTGAGCCTTTTGGCTGGAGA
TGTTGATCCCTGGTTTACTGCACTTCGGGCTTTCACTACCTTTCACCCACCGGACCATCAGTTTCACTTTCCCTCTCCCAGCGTCTCTCAAGCT
CTGCTTCTCTGGCCCCGTTTTCAATCTACTGCAACACCACCTCTACCCACGCCACCCATCCTCCTCCTCCTCGTCCTGCACTCCCATCCCAGCT
CTGAGCACTCCCGGCCCAGGGAGGCCTTGCTGCGTGCTCTGCTTCTGTGATCTTACAGATTCCTCATGGCCACCATAGGAGATGGGGACTGTTA
GCACTATTCCCCCACCCCAACCACCTTTTTTTTGAGACAGAGTCTCACTCTGTTGCCCAGACTGGAGTGCAGTGGTATGATCTCGGCTCACTGC
AACCTCTGCCTCCCGGGTTCAAGAGATTCTCATGCCTCAGCCTCCCCAGTAGCTGGGATTACAGGCATGCCCCATCGCCATGCCTGACTAATTT
TTGTATTTTTAGTAGAGACAGGTTAGTAGAGACCATGTTGGCCAGGCTGGTCTCAAACTCCTGACCTCAATTGATCCACCAGTCTCAGCCTCCC
AAAGTGCTGGGATTACAGGCTTGAGCCACCACGCCCTGCCACCATTCCCATTTTACGGATGAGGAAACTGAGACCATGAGGCAGTAATTCACTC
TCCCAAGAAAGCAAGGAGCCAGTACATCTGAGCAGAACCCATGCATTCAGGCCGACACAGGAAGCAAGCTGTCAACAGGCACTGTTCATCTCCT
GGGCTTCCTAGGCAGGCCCTGAAGCTCTGGTTTTCAGTCACCCTGTTATTCATCCCCAAGTTAATCTCCCCTGAAAGCACCTGTCGTGATGCCC
TTTCGGCTGCAAGAGCTCCAGTCATTTCCATTGCCTCAGGGGCACTTTCCTACCTCCTCTGCCTGGCACACAACATGCTCCCCACCCAAGACTG
TTCCCTCAGCACATAGCACGCCTTGGCCAGCAGGTCTCCTCCTCTCCTTCAAAGGGAACCTCCTCATTTGTGATTTCAAAGCTGCACTCCCAGG
AACACCCTCCTCCCTTACTGGAACAATCTTCCCCATCTTGTCTGCCTACCGGAATTTTTCCCAACCAGAAAAGCGTCTTGAGAGAATGGAAAAG
TCTTATGAATTTGGAAAGTTGACAGCTTGAATTCAAATCCTAGCTTGAACTTGTGAATTTCTACTTTCCTTTACGAAAACCTTTCCATGCCATT
CTGTGCAGGCACTAGCAAGGTGGTGGGAGGGAGATGGATACAGTAGGGTGAGTGCCGTGTAAAGAAAACGGAGCAAAGTCTGGGACTGCAGAGA
AATGCCACAAACCACAGACAGAAGAGTCCCGGAGGCTTCCCAGAGAAAGATGACACCCAATCCGACACCTCCAGGGAAAGCAGGAGTTAAGAAG
GTAGAAATGCATTAGCGAAGTGTGGCATGAGCATGATGGTCAATTTCAATGTGTCCACTTGCCTCGGCTAACGGATGCCCAGATAGCTGGCTAA
ACAGTCTCTCTGGGGGTGTCTGTGAGGGTATTTCCAGGAGACACTAGCATTTGAATTGAATAGACTGGGTAAATTTCTTGTTGGTAGACTGAGT
AAAGAAAATCACCCTCACCAGTGTGGTGGGGATCATCCAACCTTAGAGGACCAGAATAGAACAAGAAGGCAGAGGAAGGTTGCATTCTCTCTGT
TCAAGCTGGGACATCCGTCGTCTGCTCTTGGACATTTGCACTCCTGGTTCTCCAGCTTTTGGACTCTGGGACTTACAGCAGGGCCCCTCTGCTC
CTCAGGCCTTCAGTCTTAGACTGACCCACACCACCAGCTTTCCTAGTTATCCAGCTCCAGCTGGCATATTGTGGGACTTCTCAGCCTCCATAAT
TGAGTGAGCCAACTCCCATTATAAATATTCTCTTATTTATCTACATACATCCTATTGCTTTTGTTTCTCTAGAGAAATTCTGTTTCCCTGAATA
ATACAATGACCAAGGCCCAAGACAAAACACATGGTGAGCTCCAAGAGCCACGCAGAGTCCCGCAAGGCAGGAGAGCTCAGGCACATAGTGGAAG
CAGAGATTTTGAAGTTGGGCATGAGCTGTGTCTTGGAGTCTCCCCATGTCACTGGGCTTAAACTGTGTCCTGGAACGAACAGAACATCCCAGAG
GGGTCTCAGTCAGGGCATGGCTTGTACTTTGGAGAGACAGCATTGGGTTTATGTGAAGAATGAAGGAAGAAGAGAAAGCACTGGGTTTATGTGA
AGAATGAAGGGAAGCAGAAAGGCAAACCCATAGGGCATTGAGTAACCTCCATGGAAGTCCATGAGGGTAGGGTTTTAACCTCGGTGGGCCTCAG
CTTCTGTTCGTATAAAATGGGAATAACACAGACCCTGCTCCGTCCTGTAAGGCTACATAAGCTAGCCTGCCTAGACTGACCAGAGCACACAGTA
GGTGCTCACTAAATGTGACTTGCTGGGCTTCTAGTCTGCATGGCCAAAGGCCCTTCCCTCGGACCTTTCCGTGTGGATGCCTCACAGGCTGCTC
AGTCTACACATCCAGAACTGTCCTCCCTCCCTGGAACCTACTCTTTCTCCTCTCTTTGCTATCTCAATGAATCCCACCCCATCCTCCCCATCGC
CCAGGAAATCTCGGCAAAATCCTCATTTCTTCCTTGCTGTCCTCCATGCACCTAATAATCCAGCCTCAATTTTTGGCAATTCCAACTTCTAAAA
TCTCTTAACGCCAGCAACCCCTCTTCTTGCTTACTTATCACCACCCACCTCAGGACTCCCATGACAGCCTTCCTGTGATGCATGACGGGCACAT
GACAAGGGCAGTTGAGGGTCACGGGCCACGGCACCACCATCCAGCCAGCACATGAGGGAGGATAGGCGCCAGCACAGGCAGACACTTGTGCGTA
AGAGCACGCACTTGTCAGGCTGCCTGGGTCCAAGTCCTAGCTCCACCACTGAGGGGCTGTGTGTCTCTGGGCAAGTCACTGCGCCTCTCTGTGC
CTTAGTTCCTGCCTCTAGAGAACGGAGATGAGAAGAACACATCACCTCATAATTAATTACTGCATAAGTAATAATTTTAATTATATTGACTATT
ATACTCTATTAGTGTATGATGTCTTTTATTATATATATTTATCATATAATATACTAATTATATTAATGAGTATACTATAGTATTTTATATAACA
TACCCTAATTGCTTATTATATATCTGTATAATTATTTTATCATATAAGATAATTTCATAAGCTAAGATGGTATTTTATATATTTCATTTATTAT
ATATTTATATTTATATACTTTATTCTATTTGAATTGTGATGTCTAATAAAATAATAGATATGTTAATTATCCTTCATATTCATAATAAGCTCCT
TCATTGGTGTCTGGGAAGCCGAGAACATTTGTGCGTGTGAGCTCTCCTGTGTGTTCGGCATGCAGTGTGTTGCGTCTCAGCTGACGTGATTGCT
GTTTTTGGTGGCCCCGAGGCACAGCGTCCATGCTACAGGCAGGAAGAGCTTTGGAGCAGGCTGACTCCTGAGCTCTCCTCTGGTGCCGTGGCTT
CTGAGGCCCCCAGGTCACAACCAGCCTTTGCCATTCTAGTGTTTCCTCTATGTTCATCCCGCGTTCTGAGTGTGGCACAGGCCACACTCCTGAC
CCCACCAGCATCAGGTGCTGTGCACATGGTATGAGGTCGGGATGGAGTGCTGTTGGCATGGGGGTTGTTCCTTGGGCTACCTGTGTCCACATGG
TCTGATTAACCCCTTCTGCACATCACCAAGGGTTCAGCACCTCCTCAGGCTTAGGGCATGCGCAGGGCATGCAGGGATTTGAGCCTCCTTGGAC
AATGCATGTTCTCCATGCAAGCATCCAGAGACATGGAGAGGGTCTTTGTCCCTTTCAGTCCTAACATTCTGTGGCTTCATAACTACTTGTCCCA
CACCCGAGTAAAAAGCAGGATCTTCTCAGCACTGTGCTGACGAAGTCTTTAAACCTTCCAGTAGGACATGGGATCCCTGCCTGCATCTTAAGTT
CCCATGTCCTTAGGAAACGTGGCCACCTTGGAATTCAGCTCTCCAAGAAGCCCAGTGTGAATGCCCATTCCACGACCATCTGAGCTCACCCCCA
CTAACCCTGAGGTATCTGTTGAAAAGAATAGAACCCACCCACTGAAACTATCAGAGATCAAATGTTGTCTGTTGACTAAGAATTTGTGTTAAGG
CAGGGATAGTTGAGCACCAATGCTTTCAAGGAACTCTGGAGAAATGCAAGCCTGTATTTCCTCTCAGCATGGCTGCAGAAGAGGGCCAGGGCAG
CAGACAGGCATTTTGACCCACTCACAGATGAATACAAAGACTAAACTCAGCAAAAGCCTTGAGGTTGCATTTATGTGTCTCAGAACAGTCCCTG
GAGCACAGGCATGGGCTTTTGGTACCACGTAACCTACAACCGTAAGCTCTCTGCTCTATGCTGTCCACTCCATCAATCCCACAGTGCCTGAAAT
GTCATTGTCTTACCCGATGTCTGGGGTAGCATCTGTGAACACACGGATTTGACACTTTTATGATGCTGTTTGTCTCTACTCAACCCTTCTTAAG
CAAAATCACAGTAGACTAGCAGATCATGGTAGTATCTGAAAGCGCCAGGACCCCAGAACCTCAATCAGTGCTCCCCACTTCCCATGGTTTTCTC
CCTGTGTTTCCACATTTGGATTGTCATTGTCTGTGAAAAGGCATGATCCCTCTCAACAACACACAGTGTATGCAATGTGTGTCTTGTGTAAAAC
GGAGTGTGAATTCTTGAGAGCAGGAAGGAAAAGGGGTACAAGAGGTTCCCCTGCGAGATGGGTGAGGACCACGGCAGAGTGAGCCTCGCTGCTG
GGAACCCCTGAGGAGAGCTCTGGAGAGGGTTCTGGACACGTGGGCTTGGTCAGCCTGACAATTAGGATTTGTGTTAACAGGACCGGCCCTCACC
TGACACCAACTGGACTGAGGTTCCCAGGAGAAACACTTAGCATCATGACTTTGGAGGTTGCCATCATTTTTGATGACTTTTTCTTTTTCCTTCT
TTTCTGTTTCCCTCTTGTCAAGTTTCTACCTCTAAGTTATACTTACTTATTTTGTGTTTCTTTACAGTCTCAGGGGAAATTCCGTTGAGTTGAA
AATTTCCTCACCTCCTCCCTCCAGTTTCTCACAAGAGTCTCTCTCCTTGCAGAAAAGACTGTGGGTGGCAGTCACCAATTTAGCATATTTCTAC
TAAAAATATGACTCCATCCCAAGAAATTGGTTTTAAAGATTTGAGGAAAAACTGCTTTTAGATTTCAGAGAAAGAAAAAGAGTGTGTTTCTACT
TCCCCCTTTTAAATCTGATAACTTTTATTTTAATCAGGTTGACATTCTGTGGTGAGCTTGTGGTTAACTCTTTCATGCCCGGAAGCCTGTTGTC
GACCGAGAAGACTCCCAGGATTAGAACATAACCAGCGCCCAACATTTCATTTGCAGAAGCATCTGAGGTCCCAAAATGTGATGGTTTAGCGGCA
GCTGCTTGTAGGGGTATTTTTGGTTTCCTGCTTCTTTTTTCCCTTCTAAGTAAAGACAAAATAACTAGATCCCTCCACCCCACCACCCCATCAT
TTCGTTGTTGTTTAACAAGTGTTGAGTAAGGCACAGTTGTTCTCCAAAAGGGTCTTACCCTGTGAGTTACTCATTTTAGGGTTACGGAAACTCT
GACTATTTGACCCAGTCAACCAGGCCTCAGAAACTGTGGGTCAGATAACAAATAACTCATGGTGCTTCTCTCCTAATTACTGCAGAGATGTGTC
CAAGTGCTCGGAGATCTCCTCCTTGAAGCCAAGGTCTCCTCCTTGAACCACACCGCCTTCTTCTCCTGTCCCGAGCCAATCACCCAACTTTTCT
TTGATGACAGCAACTTCCTTAAATCCCCCAAGCCCTGAGACAGGCACTTTACTTCTCCCACATTTCCTTCAACATTTGTGCTTGCTGAATGAAA
CAAGGAAGGTGAATGTTTGCTTGAATGAACCAATCAATGGGTAACAGCACCAGTGCTAATGCTAATACACTCAACTACTCATTCAGAACCTACC
ATGGCCCAACGCTTGTGCTCTGCTCTTGGGTGCTGATCCAGCAAAGAGTGGGTCGAGGGGGAGTGGGAGCTGAAGTCCCTATACCACCACTTAT
ATTTTGCACTGTCTTATTTTTTCCTCTGGTCACATGCATACATAAATTTTATATCTCTGTAATTATGCCATTTAAAAATCTTCCTACTGAGGTA
GAAGTTGGGACTCAACCCCCGAGGCAGGCCTCAGACATCGGACAAAATTCAGCACTAGCAAAAACAGGATTGCCGCAGAAGCACCTTTCCATAA
GACATGCTCATGAGTGTGCCATGTCAGTTTACCATTGCCATGGCAACACCCACGCCTTCCTGCTCCTTTCCATAGCAGTGACCGGATGACCCAA
AAGTTACTACCCCTTCCCTAGAAATTTCTGCAAACTGCCCCTTAAACTGCATGTAATTAAAAGCACATATAAATATGAATGCAAAACTGCCCTG
ACCTACTACTCTCTGCCTATGTGGTCGCCCTGCTCTACAGAAGCAGTCACGGAGCTGTAGCACAGCCGGAACTATAACATTGCCACTTCAATAA
AGCTGTTTTCTTTTATTCTACCACTGGCTTGCCCCTGAATTCCTTCCTGGGCAAAGCCAAGAACCCTTGCGGGCTAAGCCCCACCTCGGGGCTC
GCTTGTCCTGCATCACTACCACCTTCTCTAGGAAGATGCTCTAGGCTTAATCATTGTGCTGAATTCAGCTGCTGAGGACTGAGAGGTGATTTGG
ATGATTGACTTCATAAATAAAATTGGGAGTTAGACTTTCCCCGCTGTGGACTTGCCACTGACTTGGGGGAGACGGGGGTTTCTTTCTCTGATAA
AGTTCCACATCCACAGACAGAAGGAAAAGGCCCTGAACTAATCACTTCCTTTGGAAGAAGCTTTGGTAAAGAATTAACATTTGGGAGGTTGTCA
AGAAAAACCTATTTGTTCTATAAATATTTAAAAATTATTAAAATTTCAACCAATACAGAAAAACACAAAGATTAATATAACCAACATGTGCCCA
TCATCAGGATTCAGTAAATGTTTACAGTTTACCTTGGTTGTTTCATGTCCTTTTTGTTTATTTTAAATACATGCTCTTGTCGTGCGTGATGGCT
GATGCCTGTAATCCCAGCACCTTGGGAGGCCGAGGCAGGTAGATCACCTGAGGTCAGGAGTTCAAGACTAGCCTGGCCAACATGGTGAAACCCC
ATTTCTACTAAAAATACAAAAATTAGCCTGATGTGATCCACGCGCTTGTAATCCCAGCTTCTTGGCCGGCTGAGGCAGGAGAATCACTTAAACC
TTGGAGGCAGAGGTTGCAGTGAGCCCAGATCTCGCCATTGCACTGCAGCCTGGGTGACACAGCAACACTCCATCTCAAAAAAAAACAAAACAAA
CACAAACAAAAACAAATAAATACATGCTGTAGATACAGTGGAGCTCCCTCTCGGTCCAACCCAATCTCATTCTTCCCCTCCAGTAATTGTTCTC
TTGAATCTCGGCTGTATCTCATGATGCAATATACACTACTCGTTTGTTTTTTATTTTATACATAAATGCATAATATACTGTTTCTATTTGCAAC
TTTGCTTTTTTCACTCAGCAGTGTTTCTGAGATTCATTTTTGATGTTTATTCTTTTTAACAACTGTACATTATTACATTGTATAATAATACAGA
GTTCTTGATAATCCCAAGTTTATTAATCTAACCTTCTTTTGATGGACAATTAGATTGTATCTGATTTTTCCCTATTACAAGCAATGCTCTAATA
AACAGCCTTGAATGTGTGCACATATGCAAGAATTTCTCTAGGAATATACCTAGAAGTGAGATCACTGATCCTAGAACATGGACAGCTTCAATTT
TACTGCTATATTTAAAATGTTCTCTTTGAAATCGCTATGCTAATTTATAATCCTCATCAGCAATTTATGAAATTTCCTGAATTCCTCACATATT
CCTCATCATCACTTACCATAGGGAAATTTTAACATTTTTTCCCAATCTGATAATATAAAATAAAATCTCATTACTATCTTAAGTTTCATTGATA
CCTGGTGATATTGAGAATGCTTCCACATGTTTTTTTGGTCATCTCTGTGGCCTCCTTGTTCATATCCTTTGTCCCTATTTTTATTGGGTTGTTG
GCCTTTAACTTATTGATTTGTAAGTCTTCCTTATGTATTACGGATACTGAGTCTTTGGATAAGTATAGATTCTTGCATCTTCTAAGTAGACGTT
ATTACTTATAAATGACAATTTTATTTTTTGTTATCCACTTCTTATTCCTCTAATTTCTTTTCCTTGTTCCATTGCATTAGCTGGGGTGTTCAAT
ACAGTATACAATAAAAGCAGGAATTGTATATGTTTCCACCATTAAATAGAAGGCTTTTAAGCTATCACGTACATGTTATTTTCTGTAAGCTTTC
AGTGTCTACTGTCTATTGGTTAAATAAGTTTCTTTTTATTTCTACTACCTTAAAAGTTTTTTTTCTTTTAATCAATAATGGATATTCTTTTCAT
CATCATTAGATGCTCTTCTTCATCTATTAAAATGATTGTGTAGGTTTTCTTCCTTTATACCATAAAAGTATTTAAGTACATTGAGAGATTTTCT
AACGTTAAACCATTCACTATTGCTGGGATAAACTCTGACTGATCAGAATTTTTTTTTTTTTTTTTTTTTTTTTTTGCTTAATACATTGCTAGCA
TCAGGTGCAAATGTGTTAACATTCTCCAGTTTGACTGTAGAATTAATTTCTTTTTGTAATTCTTCACCTTATCAACCATATGTATTGTTGAGTG
TATACATGTTCAAGATTATCATAACTTCCAGAATAATTTTTATTTGTGAAAATGCCTTTTTGATCTAGTTTCTCTTATGTTATTGTAGCTATGG
AGCTTTCTTATATCTCGCTACCTTATCAACAATATGTATTGTTGAGTGTTTACAGGGTCAAGATTATTATAACTTCCACAGTGATATTTATCTG
TGAAAATACTTTTTTGGTCTAGTTTCTCCTGTTACTAAAGCTATCGAGCTTTCTTTTGGTTGCTAAATATCTCCATATAATGTGTTTTCCAGCC
CTTTAGTTCAACCTTCACATGTCACTGTATTTTAAAGACGTCTCTTGACATAACAAAAATAGACCTTGTGCAGGACTTTGGGGGAAATTTTTCC
CCCTCAATCAGAATACCTCTGTCTTTTACAAGCAAGCTTAATTGATTTATATTTATTGTACTACATTTGGACTTATTTATGCTATTTTACTTTG
AACTTTTATTAACCATTATTTTTCTTTTACTGTTGTATTTATCTTTTCTTGTCTTCTGTTAAATTGATTGACTTTCCTTTATTTTCTCTTTTCC
TTCTACTGGTTTGTGTATTATATGTTTTAATTCTACTTTTAGAATTAAGTCACCATTGGCCGGGCGCAGTGGCTCCCCCCTGTAATCCCAGCAT
TTTGGGAGGCCGAGGCGGGTGGATCACGAGGTCAGGAGATTGAGACCATCCTGGCTAACACAGTCAAACCCCGTCTCTACTAAAAATACAAAAA
AATTAGCTGGGCGTGATCGTGGGCGCCTGCAGTCCCACCTACTCGGGAGACTGAGGCAGAATGGCCTGAACCCGACAGGCGGAGCTTGCAGTGA
GCCAAGATTGCACCACTGCACTCCAGCCTGGGAGACAAAGCGAGACTCCGTCTCAAAAAAAAAAAAAAAAAAAGAATTAACTCACCCTTTAAGT
TCTCAAAGTACTCGTGATGTTAAAAGTCCACAGTTAATTAACATCTCTCCCAGTTCCAGGATCTTCTGTTCAGAACTTAGCACATTTCTGGCAA
CTAAGGATTGACAACTGTTAAAAAATATCATTTCCCATTATATTTTTGGATTGGTTGTTGCTGATATATAAAAAATGTTGAATTTTATAAATGA
ATTTTCTATCTGGCCACCTTATGAAACTCTTAATAGTTCTAATACTTTAACCGTCTTGGGTTTTCTAAGTACTTAATTAAATTCCTCACATAGA
ATGATTATTTTTATCTTCTCTTTTTCCAACAATTCTATGCCTTATCTATGTTACCAGTTTTATCAGATCACTAATAACGAGGCTTCTTTTAAAG
TCAATTGGAGTGAGAAAAACCCAAAGATGCCATTAAGTCCTTGAGTGTCTTTGGGGAAGAAAAGGTAGGTTTACGAAAAGAGAGACAAAAGGCA
AAGTGAACAACTAACACAATACCATGTATCGCAAATTTAGGTGTGATTTAATGATGGCTAAGAAAAAATTCTAAATTATATATAAAAGTGTATT
CGTATATAAGGTAGTTTAAATAAATAACAGGTAATGTGGGCAGGCAACAACCATCAAAAATGACTGGAAATATTCAAATTCAACCATGGTGATT
TGGTTGGCAGCAATCAGACAATTGACTATGCTTCAGTAGATTGAAATCCGTTATAATCTATTAATGTGAATACAGGTGACAGGAAACAACCGAA
TACAGCATTCTCATAAATAGTTCTTAGAATATGAATTCAAAAGAAACTCTATTTCCTCGTTGTGACACAATCAAGCTTTAAGCAATGAACGCTT
TAATTATTGTTTTTCAGCTTAGAAAGTAACTATATATTTTATCATTGGGTTCTAAAAACAACACCGCTCAAGAGGTCATTGTAGCAACAATCAA
AATTTGTGGAGCATTTTACAGATTTCAATGTCACTTATGTTATTTCAACTGATCCTCATATTTCCATCCTTCATACCCTCACGATTCATGCTTC
AGCAAAACATTCTACCTGTAGTCTCTTGTATCTTCCATATGATGATGCTGTTTTACACTTTTACACATTCTCTGCCAGAATGGCCTGACGTGCC
TAACCTGCCAGTTGAACTCCCACCCACCTTTCAGGCACCTTATAGTTAAGAGCAGCCTTCATTCTGTTGCCTGGCTCATGGGCAGGGGCAGGAT
TCCCAGCAAGGGGTACTATGTCAAGAGGCCTAAAAGGACATATCAGCATGGTAAAAGGAAATGGCTTGGGGTGTATCAGAAGCTCCTATGGTTA
CATGATTGGGAGGAATTCTTTTCATTTCGTGTTACAGACGGAGCATCTGAAATGAGAAGGGACCACAGTGAGCCAGTGAGTGAAAGAGGAGGAA
GATTCTGACACCCAGAGCTTTACCTTCAACATTTCCTTCTGTTTATTCCTTATCTAGACTTCCATTTTCCTACCCCATAGATACCCACTCTTTG
CCCCTAACTTGCCTTCAACTCCTCTACTGCCTTGTAAATGTCCCATGTGTGCTTGAAAAAAGAGTGGGCTCTGCTATTGTTGGAATCAAATTTG
TTAATTGTGGTTATCACATTTGATTGTTCTTACTGATTTTCTGTCTGTCCTATCCATCATAAAGGAAGACACTGTTAAAATTTCTCATTATGAT
AGTAGATTTCTAAATTTATCCTTGTTTTGTCAATATTTGCTTTGTGTATTTTGAAGTTATGTTATTGGGTGCATACAAGTACGTAAGTGTTATG
TTTTCCTGATTCTTGATTTGTATATTTTGAAGTGATGTTTTTGAGTGCATACACATATAGCATTTTTATGTTTTCCTGGTGAATTGAATCTTTA
GCAATACGTACTGACTTCTGTATTTCTATTAATCCTTCTGCCTTGAAGTCTGATGTTAATATAACTCCTTGGATTCAATTGTCCATTCTTTTAG
TTTCAAACTTTTGGAGCATTTATGCTTTAAGCATGTCTCTTATAAACATCATATAACTGCATATTTTTAAAAATATATGCAGTCCAACATTCTG
TAACTGCAGGGTTAATCTATCCACATTGATAATTATTACTGATATAGTTTGATGAATTTCCACTGTCTTATTTTGTTCTTTATTTTTTACCTTC
TCTTTCTATGCATTTCCCCCTTCTTTTGATTTAAGTAAGTTTTTATCCTATTTTATTTTCTTCCAATACCTTGTAAGTTATTCACTTTACTCTG
TCATTTTAGATGTAATTTTTAACATCTTAACATGAATCCAGACTTTACAAACCCTAGATTTAACCAATATCATAGCCTTCCTCTCAAATAATAA
ATAACCTTAGAACAAATTGCCTCCACAAACCTTTTCTACACAGTTCCCTCCTCTTCCTCCTTGCTTCTTTGTGCGCATTTATGTTTGCTATTTG
AAAGAATTTCCTGAAAGTAAAAGTGAGATTTTTTAGAAGGCTGACATGAGGGCAGCAATAGTAGACTTTCACGTGACTCCTGTCCCACCACCTT
GAGCTGTGTGGTTTAGCCAACTTACTTAATCTCTCTGAACCTCAATCTCTTGCTTTCTAAAGTGGGGATGACAGTATCTACCTTCCAGAGCCAT
GGTGAGCATTGAAGGTAATATATGCAAAGAAGCAGCACATAGGCAGCGCTCAGACATCATAGTTATTATTATATAGATAACCCCAAATGGAGGG
CCTGGGCCCTCTGACTTCTTCAAAGATAATAATCTGAACTAAACCACAACATCACACAAACACCTCCCAGCACCCAGATAGTTTAGACATAGCT
CCACCTCTTTGTAAGAGATAACCTTCAACAGATAGGTGAAAAGCACCCTCCTTCCTGAACATTATGATTCTCGGTCTTGGAAAAGCACTGAACT
AGGAGTCAGGGAACCTGGTGATCTGTTGTAATCCAAGGCTTGCCACAAACTTGTGGAATGACCACAGGCCCAGTGTTCTTATCTATAAAATGTA
GAGGTTGGCCTAAATGATCTTTGAGCTCTCTTCTAGTTCTCATATTCTATGATACCATTAAAAGGGATGTTCTACATCCCTTTTGCACCCAAAC
CACTTACTTTCTATACGGCCTAAACTTCTGGTTTGGGTTTCCCAAGGAAGCGAGAGACAACCTTCAATATTACGCATATCTTTGGAGTTCTTAT
TAAACAGTAAACCTCATCTCACTATCAAAGATAGCCTCTGGCTCCAGCGTCCTCTTTCCAGTCTCCCACAGAGATTTCCTCTGGGAGTCAACGA
GCTTAAGGTGAAATTTGGCTAGGGGTCTGGGAGGAATTCTTTTCATTTCATATTACAGACAGAGCATTTGAAATGAGAAGGGGCCACAGGGGGG
CAGTGAGCGGAACAAGAGGAAGATTCGGGTCTCTGACACCCAGAATCTATCTGATTCTGACACAGAAGATGAACCGCGTTAGAGCAAGAACCAG
ATCCCTCTTTACCCAGTGGCCCAAGCTCTTGATGCGTACCTGTGTCCCTTGTAAAGCTCAGTGAAATCATCACCTAGACATTTCCTGTGCTCCG
TGCGTTATTCTAATCTTCACTCCGTACAAGTAGAGCTTAAAGTTCTGATATATGGACAGGAAAGAGAAGAGGGATCAAGCCTTTATCCAGGGCT
GGCTGGGCTAAGAGTAAAACAACTTCACCTGGATTCACCCAAGGGGCAGAGAATCTTATCTCAGACTCGGTCCACATCTTTATCAGCCCCCTTT
TCCCTTTATCTTTCATGTTGCTCACATGGGCTCCAGGGGCCAGATGAGTTTTCTCTTACTTTGAACATCAGAGAAAAAAAATAACGACAAAAAG
TTACTCAACCGACAAACGTTTCTCACCCACACACCTTTCCTCCAGTCAATGACGTTTCCACTGCACCCTGTTAGACGCTGAGTGAGGAAGCATC
TGGGCACAAACCGCTGTGGATGCAGATTGAGCAGCACTCACTGTGCACTGGAGGGATGGGAGTCCTGTCCTCACCAAGGGGGCAGATGGAGAGG
GGGCAGAGAGAGCAGCCGGGGCTTCACTCCCTGGAAACTCTCATACTCCAAGTGCGGCCTGGGGCTCTGCAGCCCCAGCATCATGTAGGAGCTT
GTTAGAAATAGCCTCAATGTCCACACCTGCCCTGACAAATCCCAGTCTGCAAGATCCCGGGGGCTCTGCACACACGCTGCTGCGAACAACCTCA
GCATCCGTCCTGCCGGCTCTAGAGCAGCCAACCGGGATATCCTTCTTCTTCAGCAGTGGTGTCCGCTCTCTAAAATGACTGTCCCCCACATCTC
TTTCCAGGGTTGGTATTTCTGGTTAACTCAAGGGACACAAAAATAGCTCAGGGAAAAATTAATTTTCATTCTACTCCAATTCTAATAATGAAGT
GGTAAAAATTAAAGGGACAGCTTTCAGATTATGGGAGTGCAGCTGCGGGTATGTGGCAAAATCGAAGAAAGACGGCTCATAATTCCACGTCAGG
GAAGACCTGCTCGCCTGCCCAGGCTCCTGTTTATCTTTACTGTCAATGCCGCCTCTTTTTTCTTTGTTTGTTTTGTTTTGTTTTCACTTAACCT
CAGTGGCAAGAAAAATGGGGCCTCTTGCCACGAGGAGCAGAGAGTCACCCGCAAGGCAAAGACCACCTCATTTCACCAAGTTCCTCGTCTTTTA
TTTGAAATCCAAGACATAGAAGCTGCACATTTGTCCTTCTGGCAACAGTGACGACTGACTGAGAGTGGAGTCGAACACTCGAAAGGAGAGAGCA
GGTGCCTGGGAGTCAGAAAAGCTGGCTTGAATTCCTAAATCTGTCGCCGTTTGTCCTGGGTGAGGTCATTCTGGTCATCTGTGGCAGGAGGACT
ACAAATGCCTGGCTTTTCCCTTTCTAGCGGGCACACAAAGAGACAGAGAAGTTGAATCTTTAGCAATCCATTGAAGGCCAAACCCCACAATGCA
AAGAGAACCATTGTCGAGGGCCCTTCACCTGCACCCTCTGTTCTCCCAGACCTGTTCCATGATGCATTCCAGAGGAGGTGGCTCTCCGTCACTG
TCACTTGCGATTGCCAAGGCGTCAGCCAGACAAGGCAAAAGCTCCCAAGGGGTGTTACCCTTCAGCTGCATACAGAACTCCTAGAGGCAACAAA
TCCACAAGGAAAGATACACCCATGATCGTGTATTTCAGCCACAATCATGGACGTCAGCTGGAAAAGGACGAGGAACAAGTGGGATTCTGCCCAT
GTCTGTCTAATGAGCATCCACAGCAAACTCCAACGGAAGATGTGAAACACGCTCAACACTAGAAGAACTCGGTTTGACTCTGTCTTGGTGTGGG
TCCCAGGCCAAAGCCCTCGGCATTTTCAGGATTAATGATCACTGCTGGCTGTCTCTTTTTCCCTCTGCCCACATAAAAGGCACAAAAACTAAAG
AGGAAGGCCACATCACCGCAGAGCCCGTGGTTCAGGATTCTCCTCCTGCGACCCCCGATTTCTTTTCTTTTCTCACCTTAACAGTGTCCAGAGT
ACTTTTATTGCCAGAATAGAGATATAGCCTGCTCAGAGCCTCATGTGCGGCCCACCACTCAGGAACAAAGGGAGAGACAGATACTAAGCATGTG
TGCAACAGAGAAAATCCAGCCCACGAAACCGTGTGCAAGAGCAGCTCCGTCCTGCCTCAATCTGGCTTTGGGAAGCCCACCTAGAACTTGCCCT
GGCGCCAGTCACCCACTCAGAGCCTACTGCCATGAACGCAGGCCCTCACTCTCCATCCCTGCCCACACAGGGAGACCCAGGGCAAACAGAAAGT
CCCCTAGCGGGGGCCCAAGGAACCCCTCGCTCTCTCAGGGTCCCATTCAAGTTTCTGGGCTAGTCTTGCAGACTAAATACCACTCAGTTGCCTG
GTGGGAGTAGGTGCTGGGCAGGGTGGACAGGAGCCCCACTGCTTCTCAGCCCTGTGCCAACCCCTTTGTGTCAGACCCTAGTGCAGGGTGGGGA
GCCCCAATTTCTAAGCCTTGAGTGTTTACCACCCTACACCCCCACCTCCAACTCCCGAATTGATCATCTCAAATTTTCCCACAGTCCATAGGCA
CCAGACACTTCAAATAATCTCAGAAAAGAAGGTGATGTCTACATCCAGAATCGTCCCAATACTTTAAAATTACAGGGAGAAAAATATTCCCCTT
CCCCTCTTCTAAGGAAAATTCTGTCTGCCTCCCAAGCTCCCAGGTCCCTTGGTGTGAGCTGGGGGAGTGCGTAGACCTAGGAATTGGAAAATAT
TCCGGGAGAGAATGATTTATGTTGAGAAGACCCATTGGGAGAAGCAGGAAGTGGGTCTGGAAAGACACGAGCAACTGTAAAGGCAGAGAAAAGC
CCTTGTTAGCTGAATTTTGACAAGTAATTTTTGCCATTGTTAGTGAGTAAAACTAGAGAATGAGGACAGTTGTATGCTGTCTTAAAAAATAAAA
GAATGATAATATAGGGAAAGATGATTTCAACATTTTGGAGTCATATAAGTGGAATCCTCCTGTTATTACTGTGCAAGACTTTTAGACAAATTAT
TTTTTATTCTTTTTTTGGATGTTGTTCTGTTGCTGCTTTTATAACACTACACTGAGAAGGCCTAAAAAAAAAATCCCAAATTTATTCCTATTAG
ATTGAAAAAGAGCAACCCTCCAGCGTACCTTTCCACACACTCTTCTACCTCCTGCTGCCTTCAGGTGATGTTTGGCACTTCCTGACAAGGCCTT
TCAGGGAAAAGGATTATAGCCAAGCTCTTTAGTGGTTACTGACCTACAGACCTGGAGGTGTCAAGATCCTAAATTCCAGGAAAGATTCTTTATG
AAAGGAAAGTCTGTGAGAATAAGAAGTTCTGGAACTTCCCCTTGTCCCCGCATGACCTCTTCAGACACTCGCCCTAATTTATGATGACTCTGAA
AATGCCCATGACCTCATCTAGAAAAACGCACTCTCATGGAATTCAAGAGTTTCTAAGGGCACAAAATAGCTTCCAAGACAATTTGTTTCCTTCT
TTTCAAATTGATGTGTTTAGAAATGTTCTTGGCTTGTGATTGACATCTCAGATTCCAAAAACATCTGAGGTCAATCCTGGTTATTTGTGCTAAT
GAATAATTACAAAAGAGTAGCTAAATATGCTTCTCGCTCATTTTGTTGAGCTAAAATTACTTATAAAGAAATGCATAGATCTGCGGCATACAAT
TTGATGAGTTTTGACAAATGTGTACAGCTGCAAAAACGTTTTCATCACTTCTGCCTTCTGGTCAATACCCACCTACCACAAGAAACCACTGTCT
GCTTTCTATCTCTGGATATAACTTTTGTCTTTTTGTGAACTTCATATAAATGAAAGCAAAGTGTATGCACTATTTCGTGTTTAGCTTATTTTGT
TCAACATAACATTTTTGAGATTTATCAATATTGCCTGTATCAATAGTTCATTATTTTTTATTTTTGAATGGTTTCTATACTATGACTATATCAT
AAGCTACTTGTCTGTTCTCCCAATGATGGATGTTTGAATTATTGAGTTGGTTATTATTAATAAAGCTACTATGTACTAGAATGGAAGGGGCTTA
ATAAAAGAAAGAAGTTACTATAAATATTTTATAAAAGTCTTTCTGTAGACACATCCCTTCATTCCTCTTAGATAAATACCTAGAACTAGAATTG
CTGAATTGTAGGGCAGGTATATATTTAACGTCAATAAAAATACTTTCTTTTTTTGTTTTTTTTTTGTTGTTGTTTGTTTGTTTCTTTGTTTGTT
TTTGAGACAGAGTCTCACTCTGTTGCCCAGGCTGGAGGGCAGTGGCGTGATCTCAGCTCACTGCAACCTCTGCCTCCTTAGTAGAGAAAGGGTT
TCGCCATCTTGACCGGGCTGGTCTCAAACTCCTGACTTAAAATGATCCACCTGTCTCAGCCTCCTAAAGTGCTGAGATTACAGGCGTGAGCCAC
CATCCCTGGCCAAATACTTTCAGATAGTGTTCCAAAGTAATTACATTACTTACACTGCCACCAGTAACATAAGAGAGTTCTGGTAGTTCTACTT
CCTCCCCAGTATTTGACGTATCACTCTTTTATCCATTTCCTCCATTTCCCCAATGGGCTATCTCATCATTGTTTTCAACTTCCATTTTATTGAT
ATCTGATGTTAAATACACTTTCAAGTGTTTATTGATAGTCGTGTATCTTCTTTGGGGAAGTGATTGTTCAAGTCTTTGCCCATTTATTGGGCTG
TTTGCCTTTTACTCTTGCTTTGTTTTTCTTTATATATTCTGCACACAAGTATTTGTCACAAATATATATATTGCAAATATTTTCTCTCAGTCTA
TCATTTACTTTTTCATTTTTTTCTTTTTTTTTTTTTGAGATGGAGTCTCGCTCTGTCACCCAGGCTGGAGTGCAGTGACGCGATCTGGGCTCAC
TGCAAGCTCCACCTCCCAAGTTCACGCCATTCTCCTGCCTCAGCCTCCCCAGCAGGTGGGACTACAGGCGCACACCACCACACCCGGCTAATTT
TTTTGTATTTTTAGTAGAGACAGGGTTTCACCGTGTTAGCCAGGATGGTCTCCATCTCCTCACCTTCTGATCTCCCCGCCCCGGCCTCCCAAAG
TGCTGGGATTACAGGCGTCAGCCACCACACCCTGCCTACTTTTTCATTTTCTTAATGTCTCTGGATGAGTAGACATTCTCAATTTTTTTCTTTT
ATAGTCAGTGCTTTTGCATCCTCTATGAGCAATCTTTGCCTATCTCCAACTTGCAAAGTCATTTGCCTTAATTTTCTTCTGAAATCTTTTTAGT
TTTGCCTTTTATCGTTACATCTATAAGATATAGACCTAGTACATAGATCTTTATCTTTATATATATAATAAAATTAATTCTTGCATAAGATGTG
AGTTTTTTTCTCATACATTTATCCATTTGCTCCAGAAGCATTTGTCGAAAAGATTTTTCCTTTCTCATTGAATTTCCTTGGCACATTTATTTGT
TTAAAAAAAAAGCAGTTGAACAAACATGAGTTCAGTCCATTTCAGGACTTTCTGCTCTGTTTCATTACTGTTTGTCCTTATGCTAATACTACGC
TGCCTTGATTTCCATAGTTTTATAGAAAGCCTGAATATCAGATGTCATGAATCCTCCAAATGTATACATCTTTACGATTGTCTTAGATATTCTA
GGTCTTTTGTGTTTCTAAGGAGCTTTTAGAAATAACTTCCAAATTTGTACTAAAAAATTGTGTTGGATTTTTAAACTCTAGTTCCCTTGAATTA
ATTGATCAATTTAAGGTGAATAGATTTTTTAAATGAATGTTACAATCTATAAAGATAGTATATTTTTCCATTTGCTTAATTCTTTTAAAATATG
TCTCAGCAATATTTCAGAGTTTTCAGTTTAGTGGTATTACAAGTTTTTGGTAGNNNNNNNNNNNNNNNNNNNNNNNNNNNNNNNNNNNNNNNNN
NNNNNNNNNNNNNNNNNNNNNNNNNNNNNNNNNNNNNNNNNNNNNNNNNNNNNNNNNNNNNNNNNNNNNNNNNNNNNNNNNNNNNNNNNNNNNN
NNNNNNNNNNNNNNNNNNNNNNNNNNNNNNNNNNNNNNNNNNNNNNNNNNNNNNNNNNNNNNNNNNNNNNNNNNNNNNNNNNNNNNNNNNNNNN
NNNNNNNNNNNNNNNNNNNNNNNNNNNNNNNNNNNNNNNNNNNNNNNNNNNNNNNNNNNNNNNNNNNNNNNNNNNNNNNNNNNNNNNNNNNNNN
NNNNNNNNNNNNNNNNNNNNNNNNNNNNNNNNNNNNNNNNNNNNNNNNNNNNNNNNNNNNNNNNNNNNNNNNNNNNNNNNNNNNNNNNNNNNNN
NNNNNNNNNNNNNNNNNNNNNNNNNNNNNNNNNNNNNNNNNNNNNNNNNNNNNNNNNNNNNNNNNNNNNNNNNNNNNNNNNNNNNNNNNNNNNN
NNNNNNNNNNNNNNNNNNNNNNNNNNNNNNNNNNNNNNNNNNNNNNNNNNNNNNNNNNNNNNNNNNNNNNNNNNNNNNNNNNNNNNNNNNNNNN
NNNNNNNNNNNNNNNNNNNNNNNNNNNNNNNNNNNNNNNNNNNNNNNNNNNNNNNNNNNNNNNNNNNNNNNNNNNNNNNNNNNNNNNNNNNNNN
NNNNNNNNNNNNNNNNNNNNNNNNNNNNNNNNNNNNNNNNNNNNNNNNNNNNNNNNNNNNNNNNNNNNNNNNNNNNNNNNNNNNNNNNNNNNNN
NNNNNNNNNNNNNNNNNNNNNNNNNNNNNNNNNNNNNNNNNNNNNNNNNNNNNNNNNNNNNNNNNNNNNNNNNNNNNNNNNNNNNNNNNNNNNN
NNNNNNNNNNNNNNNNNNNNNNNNNNNNNNNNNNNNNNNNNNNNNNNNNNNNNNNNNNNNNNNNNNNNNNNNNNNNNNNNNNNNNNNNNNNNNN
NNNNNNNNNNNNNNNNNNNNNNNNNNNNNNNNNNNNNNNNNNNNNNNNNNNNNNNNNNNNNNNNNNNNNNNNNNNNNNNNNNNNNNNNNNNNNN
NNNNNNNNNNNNNNNNNNNNNNNNNNNNNNNNNNNNNNNNNNNNNNNNNNNNNNNNNNNNNNNNNNNNNNNNNNNNNNNNNNNNNNNNNNNNNN
NNNNNNNNNNNNNNNNNNNNNNNNNNNNNNNNNNNNNNNNNNNNNNNNNNNNNNNNNNNNNNNNNNNNNNNNNNNNNNNNNNNNNNNNNNNNNN
NNNNNNNNNNNNNNNNNNNNNNNNNNNNNNNNNNNNNNNNNNNNNNNNNNNNNNNNNNNNNNNNNNNNNNNNNNNNNNNNNNNNNNNNNNNNNN
NNNNNNNNNNNNNNNNNNNNNNNNNNNNNNNNNNNNNNNNNNNNNNNNNNNNNNNNNNNNNNNNNNNNNNNNNNNNNNNNNNNNNNNNNNNNNN
NNNNNNNNNNNNNNNNNNNNNNNNNNNNNNNNNNNNNNNNNNNNNNNNNNNNNNNNNNNNNNNNNNNNNNNNNNNNNNNNNNNNNNNNNNNNNN
NNNNNNNNNNNNNNNNNNNNNNNNNNNNNNNNNNNNNNNNNNNNNNNNNNNNNNNNNNNNNNNNNNNNNNNNNNNNNNNNNNNNNNNNNNNNNN
NNNNNNNNNNNNNNNNNNNNNNNNNNNNNNNNNNNNNNNNNNNNNNNNNNNNNNNNNNNNNNNNNNNNNNNNNNNNNNNNNNNNNNNNNNNNNN
NNNNNNNNNNNNNNNNNNNNNNNNNNNNNNNNNNNNNNNNNNNNNNNNNNNNNNNNNNNNNNNNNNNNNNNNNNNNNNNNNNNNNNNNNNNNNN
NNNNNNNNNNNNNNNNNNNNNNNNNNNNNNNNNNNNNNNNNNNNNNNNNNNNNNNNNNNNNNNNNNNNNNNNNNNNNNNNNNNNNNNNNNNNNN
NNNNNNNNNNNNNNNNNNNNNNNNNNNNNNNNNNNNNNNNNNNNNNNNNNNNNNNNNNNNNNNNNNNNNNNNNNNNNNNNNNNNNNNNNNNNNN
NNNNNNNNNNNNNNNNNNNNNNNNNNNNNNNNNNNNNNNNNNNNNNNNNNNNNNNNNNNNNNNNNNNNNNNNNNNNNNNNNNNNNNNNNNNNNN
NNNNNNNNNNNNNNNNNNNNNNNNNNNNNNNNNNNNNNNNNNNNNNNNNNNNNNNNNNNNNNNNNNNNNNNNNNNNNNNNNNNNNNNNNNNNNN
NNNNNNNNNNNNNNNNNNNNNNNNNNNNNNNNNNNNNNNNNNNNNNNNNNNNNNNNNNNNNNNNNNNNNNNNNNNNNNNNNNNNNNNNNNNNNN
NNNNNNNNNNNNNNNNNNNNNNNNNNNNNNNNNNNNNNNNNNNNNNNNNNNNNNNNNNNNNNNNNNNNNNNNNNNNNNNNNNNNNNNNNNNNNN
NNNNNNNNNNNNNNNNNNNNNNNNNNNNNNNNNNNNNNNNNNNNNNNNNNNNNNNNNNNNNNNNNNNNNNNNNNNNNNNNNNNNNNNNNNNNNN
NNNNNNNNNNNNNNNNNNNNNNNNNNNNNNNNNNNNNNNNNNNNNNNNNNNNNNNNNNNNNNNNNNNNNNNNNNNNNNNNNNNNNNNNNNNNNN
NNNNNNNNNNNNNNNNNNNNNNNNNNNNNNNNNNNNNNTCACTCACTCTGTAACCCAGGCTGGGGTGCTCGGCTGACTGCAACCTCCACCTCCC
AGGCTCAAGCAATTCTCCTGCCTCAGCCTCCCAAGTACCTGGGACTACAGACATGTGCTGCCACACTCGGCTGATCTTTTGTATTTTTAGTATA
GATGGGATGTCACCATGCTGGCCAGGCTGGTCTGGAACTCCTGACCTCAGATGATCCGCCTGCCTTGTCGCCCCAAAGTGCTGGGATTACAGGC
ATGAGCCACCACACCCAATTTTACGGGTCTGTTTCTATTGAGCACTTTTTTGAGTAGGTCAAGTATGTCACATTTTCCTGTTTCTTCACATGTC
TAGATTTTCTTTTAATTTGCTGGATATTATGAGCTATACATTATAAAGGGTCTAGATTATCTTATGGTCCTTTAAAAGGTAATGCATTTTGCTC
TGCCAGGCAGTTAAATGACTAGCGCATCCTCTTGTCTATTAGGCTTCGTTTTAATCTTTGTAAGGGCAGGTCTATTTTGGTTTTGAAATTCATC
CTAGGGATGCCTCTTTCTCTAAAGCAGGATTGGAAAACTACAACCCACAGCTCAGACACCTGTTTTTATAAATAAAACTTAGCATAACTCTTCT
TCTCTCAGCCCTCACAATGGACAATCAGGGCTAAGTTTCACTGACTTCTGCCCTGTTCAGGTTCAGACCAGCTCTTCGCTAAGAACCTGAGCTG
GACCCCTATACATAATTTTGGGGCGACCTTCATGCAGTGTCCTCTCCAGAGCCCCACCCCACAAATCCCAGTCATGTCACGTCAATGAAACCAC
TCTGCTTGGGTTCCACCTGGGTCCTCCCGGGAAGGAAAGCACCCCAGGAAGGAAGCCAGCCCAACTGTGGGCGCCTCTCACGTCTTTCCCTCCT
CCAAAATCATGTAGCCCTGAGCTGCCTGTTGTTCAGCACCTGAAAGCACTTGCTGTATACATTTGGACTGGTTTTACAGCTGTTTCAGCAGAAA
CGTAAGTTTTGGTCCCAGTTACTCTGTGATGGCTGGAAGCAGAAGTCTTCACTGGTTTTTCTCATTATTATCCATGTCTTGCTTTAGTAACAGA
TTTATCTTCTGATACTTAAAATATTGGTTGGTGTTGATCCATAATAAGTGCCAACAAATGGTACCAGTGATATGAGAAGTACAGAGAGACAAAC
TTTTGCAGGAGTTAAAGGTTAAGGTAAACTTCAGTCCAGTCTCTATCTGAATTACCATTCTCTTCTTCTGGACAGTGAGAAAAAGGAAAGGAAC
AGAACTACCATCTATTCCATACCTGTTATTTTCCAGGCTTTCTTCAAGTTACCTTAGTATATTATTTGCTATAATCATTAAATCAATAAAATAA
TAATTATTACAGCACCAACCTGAGCCTTAGAGAAGTAAAATAATAAAACTATGTACCTTGTAAGCTGCTGGAGCTAGAAGTTACAAACCCATCT
TTCTCCTTCCCACCATGCTGCTGCTCTTGCCTTATCATGAGATTACCAGCATTTATTGAGCACTTATGTTGCCTGTTCCACTGTAATTTCTGGC
CCATGGAGCCCATTTAAATTGCTTTTGCTTAGTCCCTTGTTCGTTAGAGATGCGCCAAGCTGTCTGATTTCTCCCTATCTTCGTTTTTTTTTTT
GAGACAGAGTCTTGCTGGGTTTCCCAGGCTGGAGTGCAGTGGCGTGATCTCGGCCCACTGCAACCTCTGCCTCCTGGGTTCAAGTGATTCTCCT
GCCTCAGCCTCCCAACTAACTGGGACCACAGGCACATGCCACCACGCCCGGCTAATTTTTTTGTATTTTTAGTACAGACTGTGGTTTTCACCAT
GCTGGCCAGGCTGGTTTTGAACTGCTGACCTCATGTGATCTACCCGCCTTGGCCTCCCAAAGTGCTGGAATTACAGGCATGACCCATTGCACCC
AGCCTCCCTACCTTCAGTTCTTAGGGGAGACAGGAGAGTCCTGAGCCATTGGATGGGGATGGTCTTCCGGAGGACAAGGTGCTGGGCAGAGTCT
AAGGGCACAGAGAAGCTTCACTCAACCTGAATGACCAATACACAACCGGCCAACCCACAGCCATAAGTACAGCCAGCAGCCCTGATCAGCCTCC
GTGTGGGCTTCCATTGACCGAGAGGCCACAGACTCCTGCTTTCCTGCCTCTTCCTGTCCCTGTCATCTCCCCGTCCACTTCCTTTATCCAGCAT
GTGATATTTCCCCCCAAAATCTAATCTCTTAGAGCAGAGAACTTGTTGCAAAGTAGGCAATGGAATTATTTTTCTGATTAGACCTGTGCCACTT
TTCCTTTTAATAGTTTGATGTTTGACCACTGCTTCTGGTGCCTTTAGTGAGATACCAGAGTCCATTTTTCAGGCTGAGGGAGGGTAAGGTCTTC
ATAATATAAGAAGGTATTTGGTGAACTCAGAGGTGGGCAGGTGGGTGAGAAATACACATTTCCTATTTGCCAGACATTGAGTGAAGCACTTTCT
GTATATTTCTCAAAAAATGGCGCACAGTCATTAATTATAGAAAGTCTAACAACTCGTATATCCTTAAAAGTATCTTGCACAGACATATTTTGCC
CCTCAATTAAATGTACGTAACTTTGCTTCTTCCTTTCTTCACATTCCTTGACCCTCCTCTCTCCATACTTGCTTGACATGAGGCATATTCGGAA
TAAAACCTTGTTAATTTCTACTCATCTAGTTTGAAATACATTGTGCTTTGGAGAGGAGCTTGGTTGTAGTTAATTTTTGAGCCAGCTCTGATAC
AAAGCTTTCTAAAGAACAATGGTAGCAGCCTTAGTTGCTTTCTCACAAAAAGTACGGCATACCATCTTTTAAATAAAGTGAAGAAATATGTGAT
TAAGTCATTATAGGATTAAATATGTGAGTACTTGCCTGGGGCCTCTTGAGTTCCTAATAGGCTTCTTTTGCTTTGCAGAGCTCTCTGACGATGA
CCCGCCAGAGATCCCACACGCCACATTCAAAGCCATGGCCTACAAGGAAGGAACCATGTTGAACTGTGAATGCAAGAGAGGTTTCCGCAGAATA
AAAAGCGGGTCACTCTATATGCTCTGTACAGGAAACTCTAGCCACTCGTCCTGGGACAACCAATGTCAATGCACAAGCTCTGGTAAGTGTCCCT
TCTGTCACTACCAAGAACAAAAGAACTGCAGCAAAGAGTGAGACAGAGCCCAGCTTTTGTTCACTCAGCCCTATAGACACAAATCCGCCAGTCC
AGTCTACACCATAACTAATTTTAGTGGTTCCTCAAAAGTCATTCACTAAACACAATTTTTTTTTTTTTTCCAGACAGACTCTCACTCTGTTGCC
TAGGCTGGAGTCCAATGGCACGCGATCTCGGCTCACTGCAACTTCCGCCTCCTGGCTTCAAGTGATTCTCCTGCCTCACCCTCCTCAGTAGCTG
GGATTACAGGCACCCTCCACCATGCCTGGCTAATTTTTGCATTTTTAGTAGAGATGGGGTTTCACCATGTTGGCCAGGCTGGTCTCAAACTCCT
GACCTTGAGTAATCTGCCCATCTCAGCCACCCAAAATCCTCGGATTACACGCATGAGTCACAGTGCCCGGCCACACAATTTTATTTTTATTTTT
GAGACAGTCTCGCTCTGTTGCCCAGGCTGGGGTGCGGTGGTACAATCTCAGATCACTGCAACCTCCACCTCCTGGGTTCAAGTGAATCTTGTGC
CACAGCTGCCCAAGTAGCTGGGACTACAGGTGTGCACCACCATGCCTGGCTAATTTTTTTATTTTTAGCAAAGATGGGGTTTCGCCATGTTGGC
CAGGCTGGTCTCGAACTCCTGGCCTCAAGTGATTCTCCTGCCTGGGCCTTATAGGCGCACACCACCATGCCTGCCTAATATTTTGTATTTTTTG
TTAGTGATGGGGTTTCCCCATGTTGTCCAGGCTGGTCTTAAACTCCTGGGCTCAAGCAGTCCTCCTGCCTCAGCCTCCCAATGTGCTGGAATTA
TAGGTGTGAGCCACCACACCTGACCTAGACACCCTCTTTTATCCTGAGCTGGAATACTGATCACCCCCCTCACTGGGGCACTCAGACTCAACTC
CTTTGCCAAACTCTTCACAATAGAGAGGGCTGTTCTAGAAGTTTCCTTGTCATTGTGTTAAGATGGCGTCTCTAACTTCAAGCATTCTGAACAG
CCTTAGGGAGCAAAGGATCAGTGTGTTGTGGAGTGAGACCACTCCTGCTGCTGTCAAACAACACAGAGACAATTGACAGCAAGCAAGGAGTCCC
TTTTGGTGAGAGACACACACATGCACACATAACATACATGACATACACAGACACGTAACATACATGGCATACACAGACACGTAACATACATGAC
ATGCACAGACACGTATACACACGCTCAAAAACATGTCGTGGGCATTGCCATATGCACTTGAATACCCAGAGGCCGGTGCTGGGAGGGCATACTC
TGGTTTCGTATTTGTAAGCTCAGCAGCCAGACACCACCACACACATCGTGGGCCCTGGACAGCTGTGCTTCTCAAGTGAATGAATACATCAACA
GTGTTTTCTATGAAGCATTTGTGAAATTATCTGCATCATTCCATCTATATTTTCTAGCCACTCGGAACACAACGAAACAAGTGACACCTCAACC
TGAAGAACAGAAAGAAAGCAAAACCACAGAAATGCAAAGTCCAATGCAGCCACTGCACCAAGCGAGCCTTCCAGGTGAGAGATGATTCTGTCCT
CCAGCTAACTCCTGCTAGCGCACCCTTCTCCTGCAGGCAGATGATGTGTACCCAAAGGAAGAAGGTCTCCCCTGCCTTCTATAAACACATGCAT
GTGGCTCCGTCCTCCCAAGACATCATTGCAGACAAGAATTAGTGCAGAGTTGCTCAGAGGCTGTTTGCTCAGCAACTAAAGCCAATCTGACGGC
AGCCAATCCAGCTCTCGGCTTACTCCCTGGTTTGGTAACTGGCCAAATAGAATTCAACCCAAATTCAACTCAACTTAAAAGCCTCTCTTGGGTC
TGTGTGCCAGGCCCTGCTGATAGAAGACACAAACAAGAGTGTGACAACGATCCCTGCCCTCAAGGAAACGCTCTGCGTCTTCCCCTTAAGCACA
AGACAACGCACCGCAAAAAAATTACTTGCTTCCCAGTATTTCTTCCAGGGCAAGGTTGTAAAATGTGCATGCCACACTTGTGAGTCTCAAAAGC
TCCAGATGCGTGTGTCCTGGCCAGCAGTCTGTGCATGAGTGGGCACTGTGGCTGTCCCTTGTCTCCCCTCTGCTTTCCCATGACTGAATTGGGA
TTCAGTTATGGTGTCAAGAAAATGGGCTGGGCGCAGTCGCTCACGCCTGTAATCCCAGCACTGTGGGAGTCTCAGGCAGGCAGATCACTTGAGG
TCAGGAGTTCGAGACCAGCCTGGCCAACATGGTGAAACCTTGTCTCTACAATCATACAAAAATTAAGCTGGGCATGGTGCTGGATGCCTGTAGT
CCCAGCTACTCAGGAGGCCAAGGCATGAGAATTGCTTGAAATCAGGAGGTGGAGCTTCCAGTGAGCAGAGATTGCATCACTGCACTCCAGCCTG
AGTGACAGAGGAAGACTCTGTCCCCCCTCAAAAAAACAAAACAAAAAAGAAAAAAAACCCACAGAACCTGCTAGGAAGAATTGAGCTTTCTAAG
GTCAGGCTAGCCTTAGGAGACTTCAGAGCCCTTTGCTGATTTTACAACCTTACAAAGAACTGTATCAGATACCATCCCATTTGAGCCTGGCTAT
ACAATGAGTCAGGACCAGGAAGGGTTACTTCAACTTACTGAAGAAACTGAGATGCACAAAAGATAAAAAGATTTCGTTAAGCTCACATAGTAGG
GCTGGAATCAGACCTCAGGTCTCCCAGATTAGATGAGGAAACTTTCTGCTGATTACTTATTTTAAAAGAGTTTGAATTTACTTACAGCTTCCAT
TATTTTATTTTTTAAAACAGACTAATCTAGGGGCACAGTTGCAACATGATGCTCTTACTCCTTCCCCTTCCGACTTTGTCCTGGAATGGTGTTT
CCAAGCACATTTGTTTGTTTTGTTCTACTGGCTCCCCCATAGTCACCCTGCACACATTATTGGAAGGCTTCAAAGAGGCCAATGCTTGTTGTCC
TTTCTCGAAGGCTGGCTCTGCCTGAGGGATGTTTCAAAGATTGTCTCAGTTTGGGTGTTTTCATTGGAAAGAAGCAAACCCAATTCAAACATGT
TCAGACACTTACGAATTGTACTGGCTGTCAAACAACCTTTTATCCTGAGACCAAAACACAAGTTCAGTCGTGATGTTCAAGGTGCCACATGGCA
GGAGCCAGCCTGGGACAGGGCCACCCAGCTTCCTGCTGGGGAAGAGGCTCTGGAGGATATTTACAGAGGCTCTGTTGGGTATGCAGGGTTGGGG
AGAGTCTGGAAGTTCAGAGCACGTGCGCAGTTTCACAGGCTCGGCTTAGACGGCACATACAATTCCATATGTCCAGGTTGGGGGCTGTGGGTGG
GGAATTCAGAGATTTAATCAGAACAAGACATGGTCTCACCCCACAGGTCCGTCAGGCCTGGGATGTAGTTGGGTGAGTGGAAAGTTCTGGGGAT
GGGAAATTTTGAGACGTCTTGAAAGGGCGCATCTGTGTCAACCTTCAGGTGTGGCTTGATCAGAGATGGTGCTCCATTTCTCTCAGCTTCCCTC
AGCCCGTCCCTCCTCCTGGCTTTGGTGTTGTCCCCAATCCTTCCGACATCATCCCAAGATGCCCAGCCGCTGCCCCCAAGAATGCACTTCCTCA
CTTGTCCAGCAGAAATCCAAGGTGGTCTTCATGCTCCATTGGCCCAAATAGGCTTGACCCTACCCTTGTGTCTCAGCTGAGACTGCCCCGCCCA
CTCCTGTCCACTGTCAACACCTGCACTGTCTTCCAAGAGGCAGTTGTGGCGTTCCTGTCTCGGGGCCGCACCAACCAGAATGAATCGCTCATTC
CTCTGTGTTCCCATTGCCAACGTCTGCTATCCTTCACATGCCTTTCTTACCCAATCCACTGTCCACCCCTTGCAGGAGTCACAGGGTCTTCGTG
CCTTCCTACAGGGCCTAGCAAACTTCCCCACGCTCAGACGTTCTCAACATATATTGGTTGAATGAAAGGATGAGCAAGCAGTCAAGAGAGTAAG
AACCAAGGTCCAGTCCCTAGCAAGAGGCAACCTGGACTCACTCGCGGTGCTGTCCCCAACTTGCCTTCAGAGCGTTCCTTCCATCTTCCAGGTC
ACTGCAGGGAACCTCCACCATGGGAAAATGAAGCCACAGACAGAATTTATCATTTCGTGGTGGGGCAGATGGTTTATTATCAGTGCGTCCAGGG
ATACAGGGCTCTACACAGAGGTCCTGCTGAGAGCGTCTGCAAAATGACCCACGGGAAGACAAGGTGGACCCAGCCCCAGCTCATATGCACAGGT
GAAATGGAGACCAGTCAGTTTCCAGGTACGGTCGCTCCCTTCTGGGGTCCACAATGTTGCTTTGCTCCATCAGGCTGACCAGGGTGGAATCCCT
GACCACTCCTGCTGGACAAGAGTGGTCCTTGGACAAGACCCTTGATCTCCCTGGGCTTCCATTTTTTCTCATTCTGAGAAAAAAAAAAAATTTA
AATAGACCAGATCAGATGGACTCTAAGGCCTCCTTCAATGAAGCTCCCCCTGTGCCCTGAGTGGGGAGAAAGGTTGGAGACAGAAGAGAAGGAA
AGCCCTCTCCTAAGCACCCTAGATGCTGCCTCGTAGTTGGTCCTAAGTCCACTACTTCTCTAAGCCACCAAGGCCTCCTCTGGCTCCAAGGCCA
AGTCCAGTTTCCCACTCACACATTTTTCCTCTTACTGGTGATCGTGTAAATGCATGATCTGAACAGCCCTCCGCGGTCAGCATGTTCCTTCCCC
TTGTGCCATTCCCCACCTCAGCTTGTAAAAATAAACATAAAATGTGCAGAGTCGGGACTTACTCAGTGCACATGCGCGCACACACACACACACA
CACACATACTCATGCAAATGCTCAGCCCACCGATGTCGAGGTCTCCTGCTGTCTTCCTTCTGAAATCTTATTAGTATCACGACAATCAAAAGTG
ACTTACATGCACGCTGGGCACAGTGGCTCACACCTGTAATCCCAGCACTCTGGGAGGCCAAGGCGGGCAGATCACTTTAGGTCAGGAGTTCGAG
ACCAGCCTGGCCAACATGGTGAAACCCCGTCTCTACTAAAAATACAAAAATTATCTGGGCGTGGTGGTGGGTGCCTGTAATCCCAGCTACTTGG
GAGGCTGAGGCAGGAGAATCACTTGAACCCAGGAGGTGGAGTTGCACTGAGCTGAGATCACACCACTGCACTCCAGCCTGGGCAACAGCAAGAC
TCCGTCTCAAAAAAAAAAAGTGACTTACATTCAACCACAAGTATTCCTGGTTTTCTTGCTCACTGCACTTCTCATACTCCATGTCCTTCTCTTG
GGTTCCCTAGGGAGGCTGTTTTGTTCCCTTAGCTCCTTCCCTGGGCCACCCTGACAGCCAGGGAATGCTTGCTGCTTCCTTGGAAGAGGGTGAG
AGGCAGGGCAGAGCCAGGGTTCCTCACCCCTCAGCAGAAGTGGAGAGCCTGGCACAGAAGCAGCTGTCCCTTAGTGCATCTCTGCTCCATCCAG
TGGTTCAATGCCATTCGTATTATTATGACCTGTTTCCAAGTCACAGATGGAAACCAGGACTGGGCAGGGAGGCTGGGGAGAAAGCATTGCTCAG
AGTTTTGGGGACAGCTAGGGTCAGAGTTAGAATTCAGCCTCGTCTGCTCTGCTGAGACCACTTCACCGCTTCCCAGTGCCCCTGCTGTGGAACC
ATGTGGGGTGCCATCCCTGGCGAAGTGCCCACACCAGCATTCCTGCCTCCTCGGGCGTGTCTGGGGCCGGCTGCCTGGGGCAGGCGGGGTGGGA
GTGAGGCCCTGACTCCTGTGTTTAGCTCCACCAGCATCACTTACTCTCTCCCCCAGGTGAAGAGAAGCCTCAGGCAAGCCCCGAAGGCCGTCCT
GAGAGTGAGACTTCCTGCCTCGTCACAACAACAGGTGCGGGAGAAGACAAACGCTGGACCACAGAGGCCTAGTCCAAAAGGGCAGGGGTGACCA
GGAGCCAGGCTCAGGGAGATAGGCCGAGGTGACCTGTAGGGGAGAAGCCCACAGCAGCCTCCTCTCCCTCTCAGCAGGGACAGGGCCTCAGCAA
CCTGCAGGCCCCAAAGCAAGTGTCAGAAAGAGGGAACCCAGGACCAGGACCAAGCACGGTCCCCAGGCAGAGATGGAACACCTTCCCTCACCAC
CACCACGTGTCTCCCACCAGCCTCTGAGCTTCTCATTCACAGAGACACCCTGACTTCCTTTAGCCTCGTGCTGTCCTAAAGTCACGGTAGCAGG
ACTGTCTCTCTTTATCTCTTTTTCACAGATTTTCAAATACAGACAGAAATGGCTGCAACCATGGAGACGTCCATATTTACAACAGAGTACCAGG
TAGCAGGTGAGTGGGGCACTGGCTTTGTGGACAAAATGTACACCAGGCTGAGATATGGACAGGTTGACTGGTTAGTAGGTTGGTTAGTTGGTTG
GCTGGTAGGTTGGTTACTTGGTTGATTGGTAGGTTGATAGGTAGGTTGGCTAGTTGATTGGTAAGTTGGTTCGTAGGTTGGGAGGTTAGTTGGT
TAGTTGGTTGGTTGCTTGGTTGGCAGGTTGGTTTGTATGTTGGTAGGTTACTTGATTGGTTGGTAGGTTGGTAGATTGGCAGGTTGGTGGGTTA
GTTGGTTAGTTGGTTGGTAGGTTGGTTGGCAACTTCATAGGTTGGTTGGTGGGTTGGTTGATAAGTTGATAGGTTGGTTGGTAAGTTGATAGGT
TGGTTGGTGGGTTGGTTGATAAGTTGATAGGTTGGTTGCTACGTTGGTTGTTAGGGTGGTAGATTGGCAGGTTGGTTGGTAGTTTTGTTGGTAG
TTTGGTTGGTTAGCTGGTTGGTTGGTTAGTGACTTGGTTGGTAGATAGATTGGTAGATTGGTTGGTTGGTTAGTTTGTTGGTAGGTTAGTAGGT
TTGTTAGTTGGTTAGTTGATTGGTAGGTTGGTTGGTTGACTGAAAGGACCCCTTCCTTACACTCCACAATCTGTGACTGAAAGACTAATCCAGA
TACTGACGTAACTCAGAATTCGCATGAACCAGTTACAGGATGCTGTGAGCAAACTCTCAAGTCAGCCCTATCAGCTCCTCTCAAGCTGATCTGG
AAGGGCTGTACCCCGGGCCTCTGCCAGGGGTCAAGAGTGGGAGGAAGGAGCCACGTAGCCAGTCAGAGAGGACAGGCTTCCAGAAACACTGCCA
TTGTTTCCTGGTAGGAGGGAAAAACACACTCTGAGTCTGCATCTGCCTAGAAAGTAAAGAAATGTCAGCCTCCAAAACCTCAGCAGAGCAGCAT
CTGGAAAACCCGACCTCTTTCAGGAGATGTTAATGTGCTTCTCATCATCTTCATATTTCAACATTTCTTTTACCAGCCGCTCTCGGTGTCCTTA
AACGAGGCCTGGCCTCTGAGCCTTTCTGAGGGGCTTTTGTGAGAGAAGGGTGCCTCCTGAGGGGAAGCTCCCTCCACCCTCACCCTGTCCTCCC
TGCCCTGTTCCTCAAGACTCCTAGGAAATCCCATGGGCAGCCACCTACTTCCTGAGACAGGGAAGACAGGCTCCAGCCTCCGCCTTGCTCTTTG
GGGATGTCCTCAGCCTGCCCTGTGGCCCTGGCTCCTGCTGCCCCCATGCCAAGCCCAGGGCCCTTTGCTCAACTCCCTCTCTCTATTGACAGTG
GCCGGCTGTGTTTTCCTGCTGATCAGCGTCCTCCTCCTGAGTGGGCTCACCTGGCAGCCCAGACAGTAAGTGTGGCATCACCAAGGCAGCCCTT
GGTCAGATCAAAGTCCTGTACCCAGCCCCACCCTGCCTCCCCCCTACCCCCTCCATGCTCTCTCTAATCACCTGCAGTTCAGGGAGTGGCAAAG
GGAGAGGCCAATCCATGCCTCGGAAAGAGTCAGTTAAAAAGAATTAAAGCACCGCCGGGTGCAGTGGCTCACGCTGGTAATCACAACACTTTGG
GAGGCCAAGGCTGAGTCGATCACCTGAGGTCAGGAGTTTGAGACAAGCCTGGCCAACATGGCAAAACCCCATCTCTACTAAAAATACAAAAAAT
CAGTTGGGCATGGTGGCAGGTGCCTGTAATCCCAGCTACTTGGGCGGCTGAGGCAGGAAGATTGCTTGAACCTGGGAGGCGGAGGTTGCAGTGA
ACAGAAATCTCACCACTGCACTCCAGCCTGGGTGACAGAGCAAGACTCTGTCTCAAAAAAAAAAAAAAAAAAAAATTAAACGACCAGGGAAATG
GGAAGGCAAAGGAGCCTCACATTCATTGAGCACCCACTATACACCAGGCTTGATGCTTGTTTTATAAACATTATTGAAATCTACCTTCTCAGAA
ACCTTTGGAATAGCTGTGGCCTAGAGAGATGCAACAGCTTGGAGAAGATGCCACAGCAGAGGCCAGCACTGCAACATGAATCTAGAGCCCATGA
TTTTCCCACCCAGCCCCTACCTATAGAGGACCCAGGGCAGCATCTATGCTGAGCTTTGCCTATCCTCTGCTCCCCACCCTCCCCTCCACACAAG
CTCACACCGGCATCCCCTTGACCAGGAATGTAAACCATGTGTGGTCTTTTTGCATTAACTCAGATTTTCAACCCTGCATGCATCTTAGAACATC
CAGGAGACAGTCTTCTAAAATACCACTGAGTCGCAAGATATGAGTAAATTCCACACGAAAAGGAAGGCAGTCCAAAGGGCTGTGCTTCTCCTGT
GGCTCAGTGTTATTCATAGCTGTGACATCTTTTAAGAGAGGTTTACAAGAGGGAAATCCTGTCACCAAAACCATTGTGACCCACTTTGAATTTG
GGGGGAATCTTCATTTGCAACAATAGAAGAACAAATTTCTTGCAATAGGAAATATTTTTGTAGCTTATGTAGGTTGTTCAGCCAAAACACCATA
ATAATTTAAAAAGTTAAAAGATAGCCCAGGAGTTGTGGCTCATGCCTGTAATCCCAGCACTTTGGGAGGCTGAGGCAGGTGGTTACCTGAGGTC
AGGAGTTCAGGACCAGGCTGGACAACATGGTGAAACCCTGTTTCTACTAAAAAATACAAAAATAAGCCAGGCGTGGTGGTGGGTGCCTGTAATC
CCAGCTACTTGCGAGGCTGAGACAGGAGAATCACTTGAACCCAGGAGGCGGAGGTTGCAGTGAGCCAAGATCGCGCCACTACACTCCAGCCTCG
GCAACAAGAGTGAAACTCTGTCTCAAAAAAAAAAAAGAAAAAGGTAAAAGATATCAATGATTGGGCTCCAGTCAGAATGTCTGGGGGTGAGCCC
AAGACATCAGTACGTATTTTTAATTGAGATAAAATTCATCATTTAACCATCATAAAATGTACAGTTCAGTGGTGTCTTAGCCCATTTTGTGCTA
CTGTAACAGAATGCCTGAGACTGGGTAACTTATAAAGAACAGAGATTTATAAAGAACAGAGATTTATAACTTATAAAGAACAGAGATTTCTTAC
CATTCTGGAGGCTGGGAAGTCTGAGGTCGAGGGGCCCCCATGTATCAAGCGCGTTTGTGCTACGTCATCCTGTGGCAGAAGGCAGAAGGGCAAG
AGAGTGAGAGACAGCAGGAGGGGCTGAACTCAGCTTTTATCACAAACCCACTCCTGCAATAACAACATTAATCCATTCATGAGGCAGAGCCCTC
GCGACCTGATCACCTCTTCAAGATCTCACCTGTCAACATTGCTGGATTAGGGATTAAGTTTCCAACACCTGAGCTCTGGGGGATGTATTCAAAC
CACAGTAAGTCGTATTTAGTATGTTTGCAATGTTGTACAGCCATCCCCACTGATTCCAGAATACTTCCATCATTCCCAAGAGAAGCCCCACACT
GCCAAGTTCCCCATTCTCCCCAGCCCCGGGAAACCACCACTCTATGTTCCGTCTCTATGGATTTGCCTATTCTGGACATTTCGTCTAAATGGAA
TCACGTGGCCTTTTATGTCTGGGATAGTCGTACGTTTTAAAGCCCCTCAGATGTATCTAATACATATGCATCCAGGTTTGACAACCCTACACCC
GGCCATTGGTTTTCAAACTTGAACTAGCACCAGAATCATCTGTAGGAACATAAAGAAACGATAAATGTTTGAGATGATGGATATGCTAAATACC
ATGATCTGATCACTGTACCTTGTAGGTATCAAAGCATCCCTACATACCTCATAAATATATATAACTATTATGTGTCAACTTAAAAACATTTGTT
GAAAGAATCATCTGGAGGCCTTGTTAAAGCACAGATTGCTGGGTCCCACCTGTGGAGTTTCTGACGCAGTCGTCTTGCTTAGGTCCAGGAATCT
GTATTTCTATCAGGTTCCCAGGTGATACTGACGCTGCCGTTCCAGGGAGCAGACTCTGAGGATCACCGCACTAGGCTAACAGCATTAAGAATCA
GGGAAGCTGGCCAGACTCACGCTTGTAATCCCAGCACTTTGGGAGGCCGAGGCAGGCGGATTACTTGAGGTCAGGAGTTTGAGACCAGCCTGGC
CAACATGGAGAAACCCTGTCTCTTCTAAAAATACAAAAATTAGCTGGCTGTCATGGTGCGCACCTATAATCTTAGCTACTCGGGAGGCTGATGC
AGGAGAATCGCTTGAACCCAGGAGGCAGAGGCTGCAGTGAGCTGAGATCGTACCACTGCACTCCACCCTGGGTGACACAGCAAGACTCTGTTTA
AAAAAAAAAAGAAAGAAAGAAAAAAGAAAAGAAAGAAAAAGAAAAAGTAAACTCTAGAAACTCCCTCTGTCTCTCTCTTGATTATCCAGGGCCT
CCCTGACCCCTGCCAGCATCCACTCTGGCCAACCCTGATACAAACTCCACAGTAAGACCCTCAGAAAATACAGATCCACTCCCCCAAAACCAAA
GCCCTTAGCCCAGCCAGAGACAAAAATAAAATATCTCTTCCCTTCTTATATGCGTCATCAGGTCCATAACATACTCCTAATTTTCCTCATGGGA
ATTAAAAAGTATAAATTACTGCAGTGCAAATGATAAGCCCCCTAGGGTTATTGTAGCACGAATGATTCATATACCCGGCAGTCTACCAGTTTCT
CTAAGGGGTTAGCTGACTCCTAAGGTGTCATTTTAGGCTTCCAGGAGGGGAAGGATGTGACGTGGCTCACATGTTGTACGTGTACTCAGTACTT
GCATCCTCTCCTTCCTCAGGCTGAACACCTGACAAGCCTTAACACCTTGCAAGGATTTTTTTCATTTGTTAGTTTGAAGATCAAAAGCCTTCGG
GCCCAGAGGACAAAGCTATTTGGAAGTAGGAATGGTTCAGTGTTTATGTTGTGAAACAAATAACTGTGTGAACCTATGTGAGTTCCCACAAGGT
CTCCCAGAACTACAATCTTTGGGGAGACTCAAACATACATCTAGAAATGACCCCTCTAGTCAGTTTGTCCAAAAGCCTTCCTAGAATCTGATAT
CAACCCATGGTGCCCTCTTGTGGCAACAGAAATGCTGCATTTGAATTACCGAAAGATCACTGTAGCCCAGCCAGAGAGTTTTGGTTGGGGAAAT
ATTTTTTGTTTGTTTCGGGCAATGACCAGGAGCCCGTGATGTGCTACAGAAGGCTCACAGTGGCTTGTGAGAGCCAGCGGTTAAATTTTCGGGA
CTTCTGCAAACTGGTTTTTAAGCATAGCCATTATGGAAAATTAAAGTATTTAGGCTGGGAGCAGTAGCTCCTGCCTGTAATTCCTGCACTTCGG
GAGACTAAGGTGAGAGGCTCGCTTGAGACCAGCCTGGGCAACAAAGTGAGACCTTGTCTCTACAAAAACATTTTAAACTTAGCTAGGCGAGGTG
GCACATACCTGTAGTCCCAGCTACTGGTAAGGGCGAGGTGGGAGAATCCCTTGAGTCCAGCAGTTCAAGATTGCAGTGAGCTGTGACCATGCCA
CTGCACTGCAGCCTGGGTGACAGATTGAGACGCTGTCTCAAAAAAAAAAAAAAAAAATTAAAATATTTAAATTTACAATTTAATAAATTATATT
AAAAACAAAGGCAAGAATTACTTACAACTGATCACTTCCTAATTATTTGCTACCTTTTACTGTTATCTTTGTTCGCTGGGTGGTTTACATCTAT
TGTGTCCGCATGGTGGAAATACCGTTTGACGGTGGCTACCGCGCATCTCTTCCCAACCGCGTGATCAGTGATGTCACATTGCCAGCTGGAAGCT
GTGTGTGGAGGGAGGATTGACACCAGGGAAGACAGGCAACCGTCATCAGAGAGCTGCTTGTTAAACATCACCAGCACACCTCTGCTTGGAGTCT
TGTGCTATGGGAACTCTGTGCAAAGTAGGGAGTAATTAGAAATTCCCATGAGCCAAATAAGAACTGGGAAAAGGCTAAGACCGTATTGTCCAAT
ACAGTAGCCACTAGCCACCTGTGGATACTTAAGTGTATTTAAACTCAAATAAATTAAATACAATTAAAAATTCAGTTCCTCGGTTGCACTAGCC
ACATTTCAAGCGTTCCCTAGCCACAGGTGTCTGTGTTATCGGACAGCACAACTGCAAAAGATTTCCATCATCTCAGAAAGTTCTATAGCACAGT
GCTGGCTAGAAACCAAGTGCTTTACTGCATGCACATCATTTAGCACAGTTAGTTGCTGTTTATTATTCCTGTTCCACAGCTATTGTCTGCCATA
TAAAAACTTAGGCCAGGCACAGTGGCTCACACCTGTAATCCCAGCACTTTGGAAGGCCGAGGCAGGCAGATCACAAGGTCAGGAGTTCGAGACC
AGCCTGGCCAACATAGCAAAACCCCATCTCTACTAAAAATACAAAAATTAGCCAGGCATGGTGGCGTGTGCACTGGTTTACAGTGAGGACCACA
TTTTTTTGGTGCCGTGTTACACATATGACCGTCACTTTGTTACACCACTACAGGAGGAAGAGTAGAAGAACAATCTAGAAAACCAAAAGAACAA
GAATTTCTTGGTAAGAAGCCGGGAACAGACAACAGAAGTCATGAAGCCCAAGTGAAATCAAAGGTGCTAAATGGTCGCCCAGGAGACATCCGTT
GTGCTTGCCTGCGTTTTGGAAGCTCTGAAGTCACATCACAGGACACGGGGCAGTGGCAACCTTCTCTCTATGCCAGCTCAGTCCCATCAGAGAG
CGAGCGCTACCCACTTCTAAATAGCAATTTCGCCGTTGAAGAGGAAGGGCAAAACCACTAGAACTCTCCATCTTATTTTCATGTATATGTGTTC
ATTAAAGCATGAATGGTATGGAACTCTCTCCACCCTATATGTAGTATAAAGAAAAGTAGGTTTACATTCATCTCATTCCAACTTCCCAGTTCAG
GAGTCCCAAGGAAAGCCCCAGCACTAACGTAAATACACAACACACACACTCTACCCTATACAACTGGACATTGTCTGCGTGGTTCCTTTCTCAG
CCGCTTCTGACTGCTGATTCTCCCGTTCACGTTGCCTAATAAACATCCTTCAAGAACTCTGGGCTGCTACCCAGAAATCATTTTACCCTTGGCT
CAATCCTCTAAGCTAACCCCCTTCTACTCAGCCTTCAGTCTTGAATTTCTAAAAAACAGAGGCCATGGCAGAATAATCTTTGGGTAACTTCAAA
ACAGGGCAGCCAAACCCATGAGGCAATGTCAGGAACAGAACGATGAATGAGGTCCCAGGCAGAGAATCATACTTAGCAAAGTTTTACCTGTGCG
TTACTAATTGGCCTCTTTAAGAGTTAGTTTCTTTGGGATTGCTATGAATGATACCCTGAATTTGGCCTGCACTAATTTGATGTTTACAGGTGGA
CACACAAGGTGCAAATCAATGCGTACGTTTCCTGAGAAGTCTCTAAAAACACCAAAAAGGGATCCGTACATTCAATGTTTATGCAAGGAAGGAA
AGAAAGAAGGAAGTGAAGAGGGAGAAGGGATGGAGGTCACACTGGTAGAACGTAACCACGGAAAAGAGCGCATGAGCCCTGGCACGGTGGCTCA
GGCCTATAACCCCAGCTCCCTAGGAGACCAAGGCGGGAGCATCTCTTGAGGCCAGGAGTTTGAGACCAGCCTGGGCAGCATAGCAAGACACATC
CCTACAAAAAATTAGAAATTGGCTGGATGTGGTGGCATACGCCTGTAGTCCTAGCCACTCAGGAGGCTGAGGCAGGAGGATTGCTTGAGCCCAG
GAGTTCGAGGCTGCAGTCAGTCATGATGGCACCACTGCACTCCAGCCTGGGCAACAGAGCAAGATCCTGTCTTTAAGGAAAAAAAGACAAGATG
AGCATACCAGCAGTCCTTGAACATTATCAAAAAGTTCAGCATATTAGAATCACCGGGAGGCCTTGTTAAAAGAGTTCGCTGGGCCCATCTTCAG
AGTCTCTGAGTTGTTGGTCTGGAATAGAGCCAAACGTTTTGTGTGTCTAACAATTCCCAGGTGCTGTTGCTGCTGCTACTATTCCAGGAACACA
CTTTGAGAACCATTGTTATTGCTCTGCACGCCCACCCACTCTCAACTCCCACGAAAAAAATCAACTTCCAGAGCTAAGATTTCGGTGGAAGTCC
TGGTTCCATATCTGGTGCAAGATCTCCCCTCACGAATCAGTTGAGTCAACATTCTAGCTCAACAACATCACACGATTAACATTAACGAAAATTA
TTCATTTGGGAAACTATCAGCCAGTTTTCACTTCTGAAGGGGCAGGAGAGTGTTATGAGAAATCACGGCAGTTTTCAGCACGGTCCAGATTCAG
ATTAAATAACTATTTTCTGTCATTTCTGTGACCAACCACATACAAACAGACTCATCTGTGCACTCTCCCCCTCCCCCTTCAGGTATATGTTTTC
TGAGTAAAGTTGAAAAGAATCTCAGACCAGAAAATATAGATATATATTTAAATCTTACTTGAGTAGAACTGATTACCACTTTTGGGTGTTGAGG
GGTCTATAAGATCAAAACTTTTCCATGATAATACTAAGATGTTATCGACCATTTATCTGTCCTTCTCTCAAAAGTGTATGGTGGAATTTTCCAG
AAGCTATGTGATACGTGATGATGTCATCACTCTGCTGTTAACATATAATAAATTTATTCCTATTGTTTATAAAACAATAAATGATATTTTTTAA
AAAGTCTTGGTTTTTATTATAAATATGATAAATATTGCTACCTATAATCTACATAACCAAAAACCTTTATAGTTTTTTGGTGCTTTTTTTTTGT
TTTTTTGTTTTTTTTTTTTTTGAGATGGAGTGTTGCTCCGTTGCCCAGGCTGGAGTGCAGTGCACAATCTCGGCTCACTGCAGCTTCTGCCTGC
TGGGTTCAAGTGATTCTCTTGCCTCAGCCTCCCAAGTAGCTGGGACTACAGGCACCCACCACCAACTCCAGCTAATTTTTGTATTTTTACCAGA
GACGGCGTTTCACCATGTTGGCCAGGCTGGTCTCGAACTCCTCACCTCAAGTCATCCACCCAACTCAGCCTCCCAAAGTGGTGGGATTACAGGC
GTGAGCCACGGCACCCAGCCTGGTATCCTCTATACTTTTTAATAGTTTTAAATAACATGCAAAGATCCTGTGAAATGGCCAACAAGCACATCAA
CATCACTGGTCATTTCAGAAATGCGAATCAAAACCACAATGAGATACTACTTCATACCCATTAAGATGACTTTAAGAAAAAGAATAGGAATGCT
CACACATGGCTGGTAGGAATCTCAAAATGTGCAGCCACTGTGCAAAACACACTCTGTTTTGGCAGTTCCTCAAAAAGCTAAACATAAATTTGTC
CTATAACCCAGCAATTGTATTCCTAGGTACACACCCAAGAAAGACAAAAACGTGTCTAAATACAAACTTGTACACGACTCTTTATAACAGCATT
ATTCATACTCACCAAGAGGTAGAAACACCCAAATACCCAACAACAAAGGGATGGATAAAGGCCGGGCATGGTCGCTCATGCCTGTAATCCCAGC
ACTTTCGGATGCCAAGGTGGCCACATCATTTGAGGCCAGGAGTTGGAGACCACCCTGCCCAACATGGTGAAACCTCATCTCCACTGTCTCTACT
AAAAATACAAAAAATTAGCTGGTCATAGTGGCGCGCATCTATAATCCCAGCTGCGTGGGAGGCTGAGCCACCAGAATCCCTTGAACCTGGGAGG
CAGAGGTTGCAGTGAGCCAAGATGGTGCCACTGCACTCCAGCCTGGGCGACAGAGGGACTCTTCTCTCCAAAAAAAAAAAAAAAAAAGAATTGA
TAAGCAAATCATGGCATATCCCTCCCACTGGAGTATTAGCCACAGGAAGGGATGAAGTATTGATCCATGCTGCCATTTAGATGAACCTCAAAAA
CATTATGCTGAGTGAAGGAAGCCAGACACAAAAGATCACTACTGTATGACTCATTTAACATGAAATATCTAGAATAGCCAATTCCATGGAGACA
GAAAGCAGATAAGTGTTTGCCAGGGGATTTTTCTGGGGTGGTAAAAAAGTTTTGAAACTAGAGGGAGGAGGTAGTTGCACAACATGTTGAATAC
ACGAACAGCCACTGGATTGTATACTTTATCATGGTTAATTGTGTGTTATGTGAATTTCGCCTCAACTTTTTAAAAAGGAGATCCTGAGGCCAAA
ATATTTAAATATTGCTTATCTTATTCTTGATGCTCAAAGAAGGGTCATCAGCCCAGAAGGATCCTCCTGAAGTCTTTATGGTGACTTTAGTATT
CTACTAAGTGAGTTATCAGGGGACCCTGAATTTTTGTTTTCAAAAACCAAAATTAGCATATTACTAAAGTTTATCGAAGACTCCACTTTGGTAT
TCTATCGAGAACGTAAAATTTGCATAGCTCCCAGGAAGGCTGCTGTTCCTGATGCATCACCAGAACTATCGTGAGTTGGTTTCAGTTTTTACTC
GCTGGTATTCCTTCAGCTAAATGATGAATTCCTGCCAGTGATTTTCATGGAGGGGTTGTGTTGGCTGCCTCCCAACGTGCATAATCAATTAATT
TGCTGTGGGTTGAAAATCTGAACAAACTGAAAGTCAATAACTCTTCTTAGGTCTGTAGAAGTAAGTAAGATTACAGGGTAGCTCACTGTCCCCA
ATATTGGAGAGGCAGACAGGCTGATACAGGGAAATCATAACCTCCTGGACCAGAAACCCAGGAACAAACCCTGCTACTGGAACCAGCAGAGGGG
CAGCAAAACCTAAACTGGAACTGACAAATTGCTGGAGGCTCAGTGTGGACACTTCTGAGAGATAAAAATTTCAGGGGAGCAACCCAGTCACAGG
GGGTCCCCACTTTCATGACCTTTCCCTCCAGGAACTCAATGAGGTCTTCACAGTGAAGATGGCAGAAAAACTTCCTTGTGCTTTTGACGGGGGA
AAGAGAAAAGGTACTGTCACACGCATCCGTGTGAAGAGAGTCCACCAACAGGCTTTGTGTGAGCAACAAGCCTGTTTATTTCACCTAGGTGCGG
GCGGGCTGAGTCCGAAAAAGGATTCAGCAAAGGGTGGTGGGATTATCATTAGTTCTTATAGATTTCCCATAGGCATACAAAGTACATTCACAAG
GGTGGGGAGAATATTACAAAGTACCTTCTTAAGGTCAGGGCAGAACATATCGTATCAGTTAGGGTGGGGCAGGAACAAATCACAATGGTGGAAT
GTCATCAGTTAAGGCTATTTTCACTTCTTTTGTCCATCTTCAGTTGCTTCAGGCCATCTGGATGTATACGTGCAGCTCACAGCGGATATGATGG
CTTAACTTGGGCTCAGAGGCCTGACAGGTACCATTCTCAAATATGCCAGAGCATTCAGTACTTGTCCAACAAGGCCTGCCCTCAAGAAACAGTA
TTTTCCTCACTATCTTAAATTTTACCATAGTCTAACCAACCTAAATTTTACCAGTGTCTAACCAACCTGAAAGAAGGGAAATAACCAGCTCTAG
CCTCTCTGCCCTTCTTGTCTCATCTAAGCGAGGACGCGAATGAAAAGCACTTGTGAAGGTCACAGCCCAGGGGTACAGGCTTGCTGAACGCTGA
ACCTAATCATAAGACTATGGAATGGTTCCCCTCCCCCTGCACCTTACCACCACATCAGTGGGGCTGTTGTGCGCTCACAGGCGACTACAGTGGA
AACAACTGCACATTTCAGTCCCTCTTTAAGAAGCAGTCTCTAGGGAAGCCCAAAGATGAGAGGGGAGACAAAAACAAAGACACTAGAGGGAATT
TTAGCCTCTGACATCTACAGCTACAGCAAATAGCAAACACACCCTAACTCCTAACCAGATAAACATAAAGGCTCACACTAAAGGCCTATTTACC
TTGGTTCCTTTTATGCTGTATATCAGGTCCAGCTTTCAACAAAAAATTACAAGGCATGCTAAATGGCAAAAAAACACAGATTAAAGAGGCAAAG
CAAGCATTGTAACCAGACTCGGATACTACCATGTTGGAATTATCAGACTGGGAATTTAAAACAACTACACAAATAAGCCATTATGACAGAGATT
TCTATGGTCCTGTAGATCCATTCTTCCCTTCCACCATCAGTAATAAAATCCCCAAATTTTAACCCAACACATTTCTGCCCCTAGCTAAAGACAA
CACTTTCTAGCCTCCCTTGCAGCTAAGTGTGGTCATGTGACTAAATTTGGATGAGATGTAAACCAAAAAGTATCTGAGACAGGTCTAAATCCAT
TCAGAGGTTTATATTGCCAACATTAAACACCATGACCTGTGATACAGCATCAGGAGTTCCTGAGAACATGTGACCAAGGTGGTTGAGTTACAGC
TGGGTTTGATATTAATGCATTTTAAGGAGACAGAAATTATAGGCGAAGACATAAAGCAATACATGTAAGGTATACATTGGTTCAGCCTAGAGAG
GTGGGACATGTCAAAGTGGGAGGCTTCCAGGTCATAGTTGATTCAAAAGTTTTCCGATTGGCAATTGGTTGAAAGAGTTAAGCTATGCCTGAGG
AGTTGAAGTCAGTAAAAAGAAATGCTTGAGTTAAGATAAGGGGAGTGGGGTTGTGGAAGACACTGTCCTTGTCATGTACACGAAGCTTCCAGAT
AGCAGGCTTCAGAGAGAATAGAGAGCACATATATCTTATTGCAACTTAACAGACGTCAGACTCTCTGGAAAAGACCCATTAAGAGAAGGGAGAT
TCCTCCAGTATGAAAATTAAGAGACACCTTTGCAGGGCCACTTCAAAATATGTCAAAAAATATTTTGGGGTAAAATAATTTTATTTCCTTCTTG
GCCTGTTATATGTCATGTGATGCTATACCAGAATCAAGCTGGGATTGGGTATCTTGTTGCTAAAGCATCTGTTTCTTAGGTCTTATGATCTCTA
TTTTAATGTAATCCTGGTCAGTTGATGCCTGAATTCCAAAGGAAGGGATTACAATGAGGCGTGTCAACCCCCCCACTTCTTGTCATGACCTGAA
CTAGTTTTTCAGTTTCTTGGGGATGCCCTTGGCCAAAAAGGGGCTCATTTAGTCAGTTGGGGGCTTACAATTTTATGTTTGGTTTACAGAGATA
TGAGCAGAAGGGACGTCTGTGACGCCCAGGGTGTGCCCTTGAAGAGAATGTGCACACCCTCCTTCATCTCCTCTCACTGGTGGCTGCGTGCTCT
TGCTCTCGTGAGCTAGAACCACCGGGAGGATAGAAGCCACACATGAAGCCTGAGAGGGAAAAAAAAATCCAAGGAGGCTGGGAGTCTGACCCCA
TGAGGTGCCCCAGCAGCAGTCCACACACTCGGACTGCATATCAGACAGAAATAACCCTCCCATTTGCTGCGATTTTTGCCCTTGTTAGGGCAGC
ATCCTAACTGTATCAATCACCCACACTCCTACTAAAATGACACCCTCGGCTATCGTTTGGATATGGTTTTGTTACCACAAAGGGGTCCTGCTCC
AGACCACAAGAGAGGGTTCTTGGATCTCATGCAAAAAACAATTCAGGACGAGTCTGTAAAGTAAAGTGAAACAAGTTTATTAGGAAAGTAAAGG
GATAAAAGAATGGCTACTCCATAGACAGAGCAGTTCCGAGGGCTGCTGGTTACCTATTTTTATGGTTATTCCTTGATGATACGCTAAACAAGGG
GTGGATTATTCATGCCTCCCCTTTTGAGACCATATAGGGTAACTTCCCGATGTTGCCATGGCATTTGTAAACTGTCATGGCAGCGGTGGGAGTG
TAGCACTGACGACAACCAGAGGTCACTCTTGTCTCTATTTTGGTTTTCGTCGCTTTTAGCCGGCTTCTTTACTCCAACCTGTTTTATCAGCAAG
GTCTTTATGACCTGTATCTTGTGCCAAACTCCTGTCTCATCTTGTGACTTAGAATCCCTTAACCATGTGGGAATGCAGCCCAGTAGGTCTCAGC
CTTAGTCTATCCAGCCCCTATTCAAGATGGAGTTGCTCTGGTTCAAACACCTCTAACAGTTCTTTATCCCAAGCAAATCTCATGTTGGACTGTG
ATTCCCAGTGTTGGAGGTAGACCTAATAAGAGGTGTTTGTGTCATGAGGGTGGATCCTTCATGAATAGATGATTGCCCTCCCTGGGTGAGGGGG
GTGAGTGAGTGCTCATTCTATTCATTCCCGTGAGAGCTGGTTGTTAAAAAGAGCCTGGCATCTCCCCCCACCCTTTCTTCCTCTCTCACCATGT
GACCTCTGCACACAACAGCCCCCCTTCACCTCCCACCAGGAGCAGAAGCAGCCTAAGACCTTTCCCAGTGTAGATGCCCAATCTTGAACTTTCC
AGACACCAGAACTGTGAGGCAAATAAAACTTTTTCTTTATAAATGATTCAGTCTCCAGCGGGGCATGGTGGCGCACACCTGTAATCCCAGCTAC
TCGGAGGCTGAGGCAGGAGAATCACTTGAACCCACGAGTTGGAGGTTGCAGTGAGCAGAGATCGCGCCACTGCACTCCATCCTGGCCACAGAGC
GAGACTCTGTCAAAAAAAAAAAAAAAGAGAGAGAGAGAGGGAGAGAGAGAGAAAGGAAGGAAGGAAGGAAGGAAGGAAGGAAGGAAGGAAGGAA
GGAAGGAAAAAAGCAAAGAAAGAAAGAAAGAAAGGAAAGAAAGAAAGCAAAGAAAGAAACAAAGAAAGAAAAAGAAAGAAAGAAAGAAAGAAAA
GGAAGGAAGGAAGAAAGAAAGAAAGAAAGAAAGAAAGAAAGAAAGAAAGAAAGAAAGAAAGAAAGACCAGTCTCAGGTATTCTCAGGTTACAGC
AACACAAAACAGACTAAGACACCCTCTCCACCAAAATTCTGTTTGTATAGCATATTAGTATCAAAATCTTTTCAATGGAAAATGGACTCCAGAA
TCAATATTCAACATGACAGCAGAGTTTCAAGTAAATACATGTTTTCTGTTCCATAAATATTATCTGAAAAAGATTTCCCTACAGGAGATAAACA
AGTAGATAACATAAAATAACATTCGTTCTCTTTATTAATTTCAATACTCCCCTACTTTTCTTCAGAAAATCACTGCATTCATTCTCCAACACCC
CTGAAGCCTTTCTGAAATGTTGGCTCACATGGAGATGTTCCTTTTGCCTGATGTCTTCTGGCTAAGTCAGAAACTGCAAAGGGAAACCTGCTGA
AGTTTTAAAAACTTTTCCCTGTTATTTCCGTTTCTCCTCCTAAAGAGTGCAGTGCGAAACACGTGTCCTCTTCTTCTACGATGTTGATGAACAT
ACCTTCAGAGCTAGCCTATTGATATGAAGGTAAGGATGAAAAGAAATCTGTTATCTCAGGGCAGTAGGATTATCAAGCACCATATCAGCAAATG
CATCACTCGAAACTAAATTGTAAATATAGCCATGCACCGCATAACAATGTTTTCATCAACAACAGACTGCATATACACGACAGTGGTTCCATAA
GATTATAATACCATATTTTTACCATACCTTTTCCATGTTTACACACACAAATACCCCCAGGCGCAGTGGTTCACATCTGCAATCCCAGCACTTT
GGGAGGCCAAGGCGGGTGGATCATCTGCGGTCAGAAGTTCCACACCAGCCTGACCAACATGGTGAAACCCCGACTCTACTAAAAATACAAAGTT
AGCCAGGTGTGGTGGCGCATGCTTGTAATCCCATCTACTTGAGAGGCTGAGGCAGGAGAATCGCTCGAACCTGGGAAGCGGAGGTTGCAGTGAG
CCAAGATTACACCGTTGCACTCCAGCCTGGGCAACAGAGTGAGACTCTCTCTCAAACAAACAAACAAACAAACAAAAAGATACACAAATATATA
CCTTAGTATCACAATTGCCTGCAGTATTCAGTATAGTAACCTGCTTTACAGGTTTGTAGCTACGGACGACACGCTATAGCAGCCCCAGAGTGCA
GTAGGCTCTACCATCTAGGTTTGTGTAAGTTCACTCTGCGACGTTTGCACAAAAACAAAATCACCTAACAATGCATTTCTCAGAAAGTATCCCC
ATCATTAAGTGACTCGTGACTGTAATAGAAAATGAAAACCCACTGTCTCTCATAACTGTGTACCCTCCAGTGGTGCTTCCTGCATGGCTCAGCA
ACCTTATCAAGAACCTGGTTATGGGTATTTTTTCTTCTCTCTTTTCTGTCTCCAATGATGTCAAATTTATTCAAAGACCAGCTTAGCCTCGTGA
TAGCCAACAGGTTGTAGCTATTCCAGAATTAATATCAGATTATCACATCTAGAAATAAGAAAAGACATAAGGTTCCCTCGTTGGAGCTTCCAGC
AAATGTCTTCTCCAGTCTTGTTGACTCAAACTAGGTCTCATATCTACTCCTGCACTGTGACCAGAAGATGTGAGATGATTCTGATTTCGTAAGG
CCCAAGCCACAGACCTCACTCCTAGAACCAGTAATAAAGAGAAGATCTTAAAAGCAGCCAGAGAAAAACGAACCTTTGCAGAGAAATATAAATA
AGGACGACAGCCAGACCCGATGGCTCATGCCTATAATCCCAGCACTTTGGGAGGTCGAGGCAGGTGGATCACTCGAGGTCAGGAGTTGAGACTA
GCCTGGCCAACATGGTGAAATCTTGTCTTTACTAAAAATACAAAAATTACCCAGGCATCGTGGCACATCCCTGTAATCCCAACTACTCAGCAGA
CTGAGGCAGGAGAATCACTTGAACCCAAGAGGTGGAGGTTGCAGTGAGCCAAGATCGCACCACTGCACTCCACCCTGGGTGGCAGAGTGAGATT
CTGTCTCAAAATAAATAAATAAATGCAGATTTCTCTCTGGTAACAGTATAAGTGGAGCAATATCTTTAAACTACTGAAAGAAAAAACTGTCAAC
CTAAAGTTCTATATGCAGGGAAAATAGCCTTCAAAAATGAAGATGAAATAAGTATTTTTAGACATATAAAAGTTGAAAGACTTCATAACCAGCA
GGCTTACATGCCAATAAATATTAAAGGACTCGGCTAAAATTTCACTGGGTTGAATAATGTCTCCCCAGAATTCATGCCTACTTGGAACCGACAA
ATGTGGCCTTGTTTGAAAATACAATCTTTGGAAATGTAACAAGTTAAGATGAAGTCATACCACATTAGGCTGGACCTTAAACCCAATATGACTG
GTGTTCTCATAAGAACAGCGAAATCTGCACGCAGACCCACACACAGGGAAGACAGCCAGGTGAAGACAGAGTCAGAGATTGGAGGATTTTTTTT
TTTTTTGACACAGACTCTCACTCTCTCACTTAGGCTGGAGTACGGTGGCACCATCTCTGCTCACTGCAGCCTCTGCCTCCCGGGCTGAAGAGAT
TCTCATGCCTCAGCCGCCCAAGTTGCTGAGATTAGACGTGTATGCCACGACACCTGGCTAATTTTTGTATTTTTTTGAGTAGAGACCGGGTTTT
GCCATATTTCTCAGGCTGGTTTCAGACTCCCGGTCTCAAGTAATCCACTTGCCTTGGCCTCCCAAAGTGCTGGGTTAGAGAAGTGAGCCACTGC
GCCCCGCTGGAGAGGTTGGAGCTTGATGCCACGAGCTGAGGAACACCAAGGATTGTCAGCAATAATCAGGTTATACACTGTTTGACTCCATTTA
TATAAATTTCTAGAAAATCCCAACTGCCCTATACTGACACAAAGCAGATCAAACACTGTCAGGGGAAGATGACAAAGGAACATTATCTTGATTG
TGGTTTTAGGGGTGTGTACTCATGCCAAAACTTACCAAACTGTCTACTTCGAATATGTGCAGTTTTTCAATGTTCACTAAACCCCCAATAAAAC
TCTTTCTCAAAAAATTACCTGTTTGAAATTCCT
HUMAN SEQUENCE—mRNA
GAGAGACTGGATGCACCCACAAGGGTGACAGCCCAGCCGCACCGATCTTCCCATCCCACATCCTCCGGCGCGATGCCAAAAAGAGGCTCACGGC
AACTGGGCCTTCTGCAGAGAAAGACCTCCGCTTCACTGCCCCGGCTGGTCCCAAGGGTCAGGAAGATGGATTCATACCTGCTGATGTGGGGACT
GCTCACGTTCATCATGGTGCCTCGCTGCCAGGCAGAGCTCTGTGACGATGACCCGCCAGAGATCCCACACGCCACATTCAAAGCCATCGCCTAC
AAGGAAGCAACCATGTTGAACTGTGAATGCAAGAGAGGTTTCCGCAGAATAAAAAGCGGGTCACTCTATATGCTCTGTACAGGAAACTCTAGCC
ACTCGTCCTGCCACAACCAATGTCAATCCACAAGCTCTGCCACTCGGAACACAACGAAACAAGTGACACCTCAACCTGAAGAACAGAAAGAAAG
GAAAACCACAGAAATGCAAAGTCCAATGCAGCCAGTGGACCAAGCGAGCCTTCCAGGTCACTGCAGGGAACCTCCACCATGGGAAAATCAAGCC
ACAGAGAGAATTTATCATTTCGTGGTGGGGCAGATGGTTTATTATCAGTGCGTCCAGGGATACAGGGCTCTACACAGAGGTCCTGCTGAGAGCG
TCTGCAAAATGACCCACGGGAAGACAAGGTGGACCCAGCCCCAGCTCATATGCACAGGTGAAATGGAGACCAGTCAGTTTCCAGGTGAAGAGAA
GCCTCAGGCAAGCCCCGAAGGCCGTCCTGAGAGTGAGACTTCCTGCCTCGTCACAACAACAGATTTTCAAATACAGACAGAAATGGCTGCAACC
ATGGAGACGTCCATATTTACAACAGAGTACCAGGTAGCAGTGGCCGGCTGTGTTTTCCTGCTGATCAGCGTCCTCCTCCTGAGTGGGCTCACCT
GGCAGCGGAGACAGAGGAAGAGTAGAAGAACAATCTAGAAAACCAAAAGAACAAGAATTTCTTGGTAAGAAGCCGGGAACAGACAACAGAAGTC
ATGAAGCCCAAGTGAAATCAAAGGTGCTAAATGGTCGCCCAGGAGACATCCGTTGTGCTTGCCTGCGTTTTGGAAGCTCTGAAGTCACATCACA
GGACACGGGGCAGTGGCAACCTTGTCTCTATGCCAGCTCAGTCCCATCAGAGAGCGAGCGCTACCCACTTCTAAATAGCAATTTCGCCGTTGAA
GAGGAAGGGCAAAACCACTAGAACTCTCCATCTTATTTTCATGTATATGTGTTCATTAAAGCATGAATGGTATGGAACTCTCTCCACCCTATAT
GTAGTATAAAGAAAAGTAGGTTTACATTCATCTCATTCCAACTTCCCAGTTCAGGAGTCCCAAGGAAAGCCCCAGCACTAACGTAAATACACAA
CACACACACTCTACCCTATACAACTGGACATTGTCTGCGTGGTTCCTTTCTCAGCCGCTTCTGACTGCTGATTCTCCCGTTCACGTTGCCTAAT
AAACATCCTTCAAGAACTCTGGGCTGCTACCCAGAAATCATTTTACCCTTGGCTCAATCCTCTAAGCTAACCCCCTTCTACTGAGCCTTCAGTC
TTGAATTTCTAAAAAACAGAGGCCATGGCAGAATAATCTTTGGGTAACTTCAAAACGGGGCAGCCAAACCCATGAGGCAATGTCAGGAACAGAA
GGATGAATGAGGTCCCAGGCAGAGAATCATACTTAGCAAAGTTTTACCTGTGCGTTACTAATTGGCCTCTTTAAGAGTTAGTTTCTTTGGGATT
GCTATGAATGATACCCTGAATTTGGCCTGCACTAATTTGATGTTTACAGGTGGACACACAAGGTGCAAATCAATGCGTACGTTTCCTGAGAAGT
GTCTAAAAACACCAAAAAGGGATCCGTACATTCAATGTTTATGCAAGGAAGGAAAGAAAGAAGGAAGTGAAGAGGGAGAAGGGATGGAGGTCAC
ACTGGTAGAACGTAACCACGGAAAAGAGCGCATCAGGCCTGGCACGGTGGCTCAGGCCTATAACCCCAGCTCCCTAGGAGACCAAGGCGGGAGC
ATCTCTTGAGGCCAGGAGTTTGAGACCAGCCTGGGCAGCATAGCAAGACACATCCCTACAAAAAATTAGAAATTGGCTGGATGTGGTGGCATAC
GCCTGTAGTCCTAGCCACTCAGGAGGCTGAGGCAGGAGGATTGCTTGAGCCCAGGAGTTCGAGGCTGCAGTCAGTCATGATGGCACCACTGCAC
TCCAGCCTGGGCAACAGAGCAAGATCCTGTCTTTAAGGAAAAAAAGACAAGG
HUMAN SEQUENCE—CODING
ATGGATTCATACCTGCTGATGTGGGGACTGCTCACGTTCATCATGGTGCCTGGCTGCCAGGCAGAGCTCTGTGACGATGACCCGCCAGAGATCC
CACACGCCACATTCAAAGCCATGGCCTACAAGGAAGGAACCATGTTGAACTGTGAATGCAAGAGAGGTTTCCGCAGAATAAAAAGCGGGTCACT
CTATATGCTCTGTACAGGAAACTCTAGCCACTCGTCCTGGGACAACCAATGTCAATGCACAAGCTCTGCCACTCGGAACACAACGAAACAAGTG
ACACCTCAACCTGAAGAACAGAAAGAAAGGAAAACCACAGAAATGCAAAGTCCAATGCAGCCAGTGGACCAAGCGAGCCTTCCAGGTCACTGCA
GGGAACCTCCACCATGGGAAAATGAAGCCACAGAGAGAATTTATCATTTCGTGGTGGGGCAGATGGTTTATTATCAGTGCGTCCAGGGATACAG
GGCTCTACACAGAGGTCCTGCTGAGAGCGTCTGCAAAATGACCCACGGGAAGACAAGGTGGACCCAGCCCCAGCTCATATGCACAGGTGAAATG
GAGACCAGTCAGTTTCCAGGTGAAGAGAAGCCTCAGGCAAGCCCCGAAGGCCGTCCTGAGAGTGAGACTTCCTGCCTCGTCACAACAACAGATT
TTCAAATACAGACAGAAATGGCTGCAACCATGGAGACGTCCATATTTACAACAGAGTACCAGGTAGCAGTGGCCGGCTGTGTTTTCCTGCTGAT
CAGCGTCCTCCTCCTGAGTGGGCTCACCTGGCAGCGGAGACAGAGGAAGAGTAGAAGAACAATCTAG

[0284] TABLE 20

MOUSE NOMENCLATURE
ICSGNM Nfkb1
Celera mCG22374
HUMAN NOMENCLATURE
HGNC NFKB1
Celera hCG39336
MOUSE SEQUENCE—GENOMIC
TCTTCTGAATATCATGTTTAGATTATGTAAGTATTCACCGGCTTTCTGTCACTATAAACCAATACCTCAGTTGATTAATCAATAAAGAAAAAAA
GGTTTAGTTGATGAGTTTTGAAGGTTCCAGTCTACCAGTCTGTTACTGCAGACGTCCACCGTCATAGTATGTCATGGCCAGAGCACCTGGCAAA
GCATAAACTACCTGCTCGTCAATCAGGAAGCAAATAGAAAAGAGAACTGGTTGCGGTCCCACAACATCCTTCCAGGTCATGTCTTAGTAGAGCA
CTTCTCCCAGGAGAAGCACCCTCTTGCCCTTGCCGTCAACACATGAACAGCTTGGGGACTCCTACTGAGGTAACAGTACCCATTCTGCATACAT
TCCCTGAGATTAACTGAGACTTGATTCATGGCCCGCTGTTTTGTCTGCCTTTGTGAGTGTTCTGCTTGCAGCCCTACTAAACACAGATGCCCAA
TGTGGTATTCAGAGTAGTGGGCCTTTAAGAGGTTATGAGGTCATAGCACATACCCTGCCCCTGCCATGAATAGGATTTTAAAGGGGGCTGATGA
AGGAGGGTTGTCCCCTCTGACTCTTCCACCTTTACTGTGTGACAATACAGTGATTGTTTCCTCGTGACATTCCTCATTTGCGTGCTTTGACCTT
GCACTTCTTGCCTCCAGAGTGATAAAAAATAAACTTATGTTTTTTATAAACTACCCAGACTCAAGTACTGTTTAACAGTACAGACATATGAAGA
CAGTTGGTCCTGTTTGTAGTCACCACCGAAAGAGGAAAGTTGAAAACTTCCACTCTACTTGTGGATTTCTGTCTCTTCCACAAATGTTTAGGTC
TACTACTTTGTACTTCATGTATTTTGGAGACCTATTAATAAGTGCATGCAGGTGGAGGTCATTATTTTTATAAGGGCTCAGTAGTGCATACATA
TAAGGTTCCAACACTCAGCATCTAGAGGCAGGAGGGTTGCTGGGAGTTTGAGCCCAGCCAGAGCTATCTATAGAGACCCTGTCATAAAACAACA
AAATTATTACTGCCCATTGATGACCTCGCCCCTTTATTCTTATATATATATCCTTCTTTGCCCTTAGTAATATTCCACCCCCTGATCTTCTCTA
TTGGTGGTTATGATATAAACTACTTTGCTGTGTTTAGTATTTGTATTATTAGCACAGTATCCCAGGCTTCTGCTTTTAAACACTTTGCGTCTTT
CATGTTAAAAATAATTCATAGGAAAAGCATTTTCTTGCGTCTTGCTTTTTCTGTACTGTTTACCATGAATGCTTTTTATAGCTGAGTTTATTTT
ATTTGCATTTAATATTCGACCTCTTCTTTATCCACATTTTGTCTTTCATTGTCATCTTTTAAATGAAATAAACGTACCACTTGAAGAGTTCCAT
TTTATCTCCCGTCTGGTAGTTCTGTAAAACGGTGGCTTTCTGTACTACGACTTTCTGCATCCTGCGTCTATAGCGAGTGAAGCGCTATGTACCT
AATGTGCAAGCTTTGATTTGTTCTCACCTCTCTGCTAGTGCTGGTAGACTTTTTTCCCTCCATGGGTTCAGAATACTCCATAATATATTGTGTT
GTTCAATGTGTTTGTTGTACAGTAAGTTTGAACATACTGCAAAGCGAAAGCCCCATGTGCCCACACCTTTATCACCAGTAGTGTTTTCCTTGTT
TCTTAAAGGTCCAATTCTATCTCATTTCCCTTCACCACAAAGATCTGCTTTTAGGATGTCTTCTGTCACTTCTACGCGTTATGAATTCTCTCAG
CTCTGCTTTATTAGAAAGTGTCAGTTTACCTTTATTGTCAAACCATTCTGGGACAAAGCTACCTGCTTCTTTGTGGCTTCAATGTTTTTGTTGT
TCATTATAGATATCATGATGTGAAGAGTTTGCATGTTTTTCTTTTATTCAGAGTTGAGTTTTGTCCTAGTAGGCCTTACTAACATGCATTTAAA
GTCGCCCTTATTTTATGATGTGTTCTTGACTCTTATAACACGGTTTTCCCCTAGACTGCTATAAGCACACATCTTCAGAACGTTTACTGATGTC
TCTTCAGCCCACGTGATTGCACCCTCAGTGTCTCTCAGCTCTGTATGCCGTCTCTAATCTTATCAGAGCATTTATAGAACAACAGTGGCTTTCA
CTGAGCTTTTTGGGATCTCTGTTAGGATTTCATCAGAGTAAAGGTGGGCTGATTATAGATTTTTGAGGCTTTGCACATATACCATTTCTCTGAC
CAATGAGATCACTGCTCTTTATTTGAACTCTGCTTCCTGTGGCCTGGATTAGAAAGTGCCCTCAGTCAGAAGGTGAGCTTGGAGTTCACTTAAA
CTGTGCAGCCTGTATCTCTTGTTTAGTGTCTCAGGCTATTGTGTTTCATAATTACATATGAATTTGCCAAGATCAAATAGTGGTTGATTTATAA
TGACTGAAATTAGATTTGTGTGGATTTTTAAAGATTTTTTTTTTCAACACAGGGTTTCTCTGTGTAGCCCTGGCTGTCCTGGAACCCACTCTGT
AGACCAGGCTGATCTTGAACTCAGATCTACCTGCCTCTGCCTCTGGAGTGCTAGGATTAAAGGCATGCTCCACCACTGCCCAGCTGTAGCATGC
TATTAATGATTTTGAAAGACATTATTCCAGGGCATTTATATATTCAATATGTTGGCTAGCTAGCATTTCTCTACAGCTTTGTTTTGAAACTTTC
TCATCATCCCAGAAGAGTGCCTTGAATGTGGTAAATGATGGCTCCCTTCCCAGTCTTCACTCACTCCCCTGGCCTCTGGCAAGCAATGATGTGT
TCCTCTTCCTACGAATGTGCTTGTTCTTGGTATTCAATGTGAAGGGAATTGAGTATAGGTGAGCGACCCTTTCTGTCTGGTTTCAGTATAAATC
ATTTAGTCTACTGGTTTTGAAATACAAAATCAAAACTCCCATTCCTGGCTGTAAGGCACACCATTTAAGGAGACTGTAAATATATAATGTATGA
TTAAGTTGCATAGAAACAGTGAACCATAGTGCAAAACCACCAGGAAATGTTATAGACCTTATCGACTGAGGCGATAACAGTGGAACAGAAAATA
CAGGTTTTATGGAAGAAGTTGATTTTGAAGTACCATGTTGTGGAATACATAATATCTAAACAGGATAGAATCTCGAGTGTGAAGAGATGTACAC
ACTGGAAAGAAATGACATAGAGCTGTTACATGTGTGTCTGTACACATCCGTGTGTGCGTGTATGCAGTGAGCATTCACATGTGTAGAGGTCAAA
GGACAATTTTGGAAGCTGCTTCTTTCCTTCGAGCATGTAAGTTCCAAGTAAGGACTTAGGTCCTTGGGCTTAGCAGCAAGTGTTTTTACCTGCA
GAGCCCTCTTGTTGGCCAAGCAATGCATCTTTAAATGATTGATTTCCCTATAGTAAAGTGCTTGTGTTGGATCATGGTGATAGTTGTGGTGCTT
ATATAATATATAATATAATATAATCATATGCTGAGTAGTTGCTCTTTGGACTTCACTATGTAAAGCACCTGGCTGTGATCTGAAAGATATTTAA
TCAGGAAGATACCCTCCCATGCGGGTGAGCGGTAGAAAAGCTGTTTCTGTCAGAGTGAGGTAATAAGGTCTGCCCTACCGTGTGGCTATGGACA
TAGAAAGGAAGTGCACACACAAGAAACAGTGTGAGGAAAGAAGTGAGCGACAACAAGACTGTTCACTGCATTGGTTGGAGAAGGCTACATTTGC
AAGAATGACACAGTCAGGAGTCCGGCTTGTTCTCCAGTAGTAAACTGTAGACATTAGGGTTGATGGGTTTAATGTATCATTAACTTGTTTTCTA
ATGGCATCGTTACCTAAAGCTAACAGGGGCTCATTACCAAATACACCTTCAGAGCCTTAACAGTTCTAATCATGTACTGATGTCACGGGGGTTG
GGCTCGTATCTTGGATAGCTTGGGTTTTTTGTTTTGTTTTGTTTCTTTTTGCTCTTTCCTTTTTTTAAAAAAAATTATTTATTTTTTGTTCAAT
TGAGAACTCAGTAGCCGATGGAGAAAAGCCACTGCAAAGTCCAGACCGTGACTAAGAGTGTAATTAAAGCTGTGATACTGAATTGCCAGGGTAA
TTAACCCATGCTCCACACGCCCTCTGTTCCCATGACACTGACCAAGCTGTATCGTGTAGGCTGCTGTCTTTCCATTTACTAACCCTTCTGATTG
GCTAGCCTTTGCTGCGGCGAGATAAATCATGAAGAAGCACATAGAAACACAGATATGCCTCATTTCTTGCGACCTGTGACTGTGTGTGGTGATT
TGTCTGGCTGCTCTGTGGAGGTCCTCAGCTGCTCTGCCACCGACGGCTCAGCCTGGGAAGTCTTGGCTGAGCTCTGCTGCGTTTCCACTCCACA
CGTGGGTTCTCATCCTCCACTGGGCTGGCCAGGCCTTTCCCTTCCAGGAAAGAAAATCCAGTCATTGAACGGCTTCTTGAAAGCCATGTTCATG
ACTCATGTCTGCATCCTCCTGTTGGTCAGGGCCTGCCAAGGGCCTGACAACATTCAAGGGGCAGAGATGTCAATTTTATTGTCCCTGTGTTGTG
AGGGATAGAAAAGGGCAGTGGCCATTGTTTTGAGCCTACTACAGCTATAAGCCCTGAGTTCAGACTATGCCACTCTTGTGTAGTTTTGTTTCTT
TGGAAACTCACAGGGTAGCCAAACCTCTTTCTGATGGGTTGATGAAGGGCCAAAAACATCCAGGTAACATTTCAAACATGGTTTCCCTGTGATA
CAGACCATGGCATACACAAGTATCACAAATCTGTTCCTACAGCACTGTGGATGACACACACACACACTCTCTCTCTCTTTCTCTCTCTCTCTCT
CTCTCTCTCTCTCTCTCACACACACACACACACACATGTTTTAATTTTTAGTTTAGCTAACTGTGGCTTTTGTGAGATATTCTCTCTCTCTCTC
TCTCTCTCTCTCTCTCTCTCTCTCTCTCTCTCTCTCTCTCTCTCTTTCTCTCTCTCTCTTTCTCTCTCTCCCTTCACGTTTGGATTGCCTTGTA
AGTAGCTCATCTGAAATTCATGCACTGTAAGGTCCTATTCTGTTCTCTGGGTTACTCTGTAGAAGAGTTCTATGGGCTCACCAGGTACTAGATG
TAGGAACAGAAAGCACACTCGGGAGAAGGCATGTTGCAGAAACGAGAGAAACATGCTGAGACTCCTAATGTGCATCTCCCCAGTGGAGACAACA
CAATTTGACTGGACAGTGTGTGCATGAAGGCTAAAGAGCGCTCAGGGAATATAGAGGGAGCCTCTTCCCGCTCCAGTCACCGTGACAGCATGCT
ACTTCGTGTGTTGGCATGCACAAAATTGGCAGAACGCCTCAAGTGTGGAGAATTCACCATTATAACAAGATTATAGTAAGCAAAAAATCACTCC
ACATCACGTAGAAGAGGGAGTTGGCAAAGGCGGCTGCTTTAAACCAGCTCTTTGCAATCTTCTCTAGACCGTCTTATCTGAAAGCAAACAAAAA
ACAACAGGAACAGCTTGAATGTTAGCAGTTATCCTGGCAGGCAGCACTCCAACCCAGCCCACCCCACCCAGCCCCCAGCACAGGTGTGTAACCC
TTTAGTAGCCTACTTAATATCGCTGAAGAGATAGATGGCTTAACTAGTAAGAGTGCTTACTGCTCTTGCAGACGACTCAGGCTGGTTCCTAACT
CCCACATGATGACTGACAACCTCCTGTCACGCTGGTTCCAGGGGATCTGGCACTCCCCTCCTTGCCTCTGCCAGTACCCTTACATTTGTGGTGC
ACAGTCATGCTTGCAGGCAAAACACTCAAGCCACATAAAATAAAAATTAATAAAACCTTGAAAAAAAGATCCTAGCTAGCAGTTAATATCATGA
GTAGACTAGCTCCAGCCAGAACTTTTGAGAGGCTTGAAGCAAAGATGTTTTTAAATGAATAATACTTCTGTCAAGAGGAAAATCACATCACCCA
TTACGCTAGTACAAGGGCCATAAGCTGTGCAGTTAGAGAGGCCAGCTCTAGTCTGTCAGCCTGAGCAAATGACTCATTCTCTCTGAAGCTTGGC
TCTTCAGGTGGACTCTACTTTCTGGGCTCAGCATAGCAAGAGGGCAGCATACGTAAGCATTACCTCCCCTTCCTTAGTTATGTGGAAGCACTCT
GTCAAGCTTAGCTTTCCCCATACAAAGGAGAGCACTTCTCCTGAGGCCAGAGCACTCACTGGCTTCTCCTCCTCAGCCTAACTGGCACCAGGGA
TTAGGTAAATTGTCCCTGGGTTAATCCTGAGCCTTCCAGGATCTTTGGATCACTTCTAGAAGATGGTAGGACCAGCCATCCAGTCCTGTGAGCC
CAGAATACTTCAGACAATAACTTCTAAACTCCCCCTCAGGGAAAAATACAAGTTATAGCGTAATGCCATGCAACCACTTCAGACTCAAATATGT
TAGACTGTCAGTAGCTATTGGCAGAAAATTTATCTGTCTTTGCTACAGTTCTATTGCTCTGAAGAGACATCATGACCAAGGCAACTCTTCTAAA
AGAAAGCCTTTAAATGGGCCTGGCGTACAATTGTAGACGTTTAGTCCATTATCATGATGGCAGAGAGCAGAGGACACAGGCAGGCACAGAATCA
GGAGCTGAGAGTTCTGCATCATCGTCTGTAGCCAGAGAAAGACAGACTCTGGACTTGGCATGGGCTTTTGAAACCTCAGTGCTCCTCCTCAGTG
ACAGACTTCCTCTAACAAGGCCACACTTCGTAATCCTTTTAATCCTTTCAAATAGTGTCACTCCCTGGTGACTAAGCACACAAATATATGAGCC
TGTGTCTTTCTCAGGACAACGAAAAGTTTATCTTGCATCTTTCTTCCTATAATTTATCATGAGTGAGCTATTAGACTGTCTGGTGAGTTAACAT
ATGTTCTGTATCTCCCACTCACTAATAACCTTCGCATGGATTAGCTAGCTGAGTGTTTCCCATGGGTCTGCCACCCCATTAGGCTGACACTCCA
TCATGAATGGGTTTCTTCGTCAGCTCTCAGATTTGCATTTGCAGTGCGTGCATGTATTGTTCTAGGTCATTGTCACGATGCTCCTGGTGAAATA
ATATTGAAAATAAAAGAACTCCGAAACCAGGTTCTGTAAATCTCAGTGTGGTAGCATGCACAGAAACATTGATTTATTTTTAAAAGAAAGCTTT
TAGAAATCAGCATTACTGAAAAAAAAAAAGTCCATTGCCAGCCTTTATCATTAGTGTGACATACTGTCAGACAGGAGGACACACAGAAAGGGGG
ACGCTTCTGAAGAGCAGTCAGGAATAATTAGGAGTGTTGACGAATTCATACTTCATATTTTATTTAACACTGTCAGGGCATTTTAGGTTCAATG
ATTTAAATTTAGATTCAGCCCCCTTTTTATTCTAATACATGTCTAATGTCTATTAGATAAATTTCCATGTCACTGTACAAATCTCCCCATTGTT
ATAGCAATTCCATAATATTTAACTTACAGTTGTACAACAAGAATGCAAACAGTTAGATCAGAGCACATCACAAACTCCTGAAAATCGACTTGCA
GAATTTACGCCCTCTGAATATTTTACATGGTATACACTTTATGTGGCCATAGCCCTTACATTATGTTTTCTTCAAAAAATTCTCTATGCAAAAG
AAACTTTAACATTTTATAATTTAATCTTTAGCAATTTATTGTGCGTCCAAGATACAAAACAAAAAATGTTGTGAAAAGTCTCTTTTCCCAGTAT
CTTTGCCCCATTGCTAAACAAAACAGTACATTAAATGACACCTAAGTGACACCTGTTATGGTTACTAGAATTTTAAACCACCCTGCCACCCCAC
CCCCTCCCTGATTTCCAAGTGCACCTTCTAGCTGGTGTCTGACCGCCTACTTTTCATAGTGCGCATTGTGGTTCTCTTTCGATTATGGTATTTT
AATGGGTTTGGAAATTTAGAGAGCCTTTTCCCCCAAAGAAATCGAACAGAACAGAAAGAGTTGTTGGTGTTGGTGGTGTTGTTGTTGGTGGTGC
TTACAGTGAGTCAGGCCTCGGCTGCCTATATCTCTGAACCTAGATGCTATATAGTTACTGACAGGAATTCTCCTGACTTTGTCCTTGATCGCAT
ACAGCCATGCCTTTAGAATTTCTCCACTCAGTCCAGCTGCTTCACCAAGATGCCCCTGTGTCAGATTGAGTTACTAGGAAGATTGCCACAGGAA
TGCAGGAAACAGTTCGTTCAGCATTCATAGAATATGTCACATACTCAGGACTTGGCTGGTTTTGTTACATTGTGCTTTGTATCAAAACCACAAC
TCCCCGGATATTTGCTGAGACCTAGCTACATTTTCTGCGTCTCCTTATGTGGTGAGAAGATCCCTAAAGATTCCTGGTTGGGGTAGACAAATGC
ATAAATGAGACCCAGGCTTGTCTCTCCCTTTGTGTCTCAAGGTCCTTCCTCAAAAGCGCAAAAGCAAACTGGGGGGAAGGCTGAGAAAGCAGGG
GTACATAAGGGACTTTCCCACTGCTTTCTCATCCCCAGCTCCAAAGCTTAGTCGATATTTCAACATTTTAGGTATAAACTTGCTTTTGCAATCA
ATGCAAATATTACTCAGTGATTCATCCTTTCCAACTGACTCTCGGTTTCTTTCTTTTGACATTTAATTTAAAATTAGAAATTAGCATTTATATC
ATGCTAGAGCTGCACTTACCTTTCAACGCCTCAGTAATGGCCAAGGCTTTATGCGTCAAGATTCTAAGGCACCCGAGTGTTCCTTGAGCTTCTG
TAGTACCTGACGGAGTTAAGTTTTTAGCCACATATAATCTAGAAACCGTAGGAGAGGGTGCCATGATGACAAGGTGCCCAGTATGGTCGTTTGT
CAGACATTTAAAGTCGAGCCGTCTTCATTAGGGCCTCATGTAGGGAATGGACCAGGAGGATACCCTTACCTCTGTCAAGTGCGGTTCGACTTGA
ATCTTCCAAGTTGGAGTGAGACTTCTTTATGTTAAATTCCCCCACTCAAACTTCTACAAATCATCCAATTTTAAAGAATGATTTTTAAGATGAT
AATATATTATATCATTTCCCCTTCCCCTGCCTCCAAGTTCTTTCATGTACCTCTCTCTCAAAACTTCATGACCTCTTTTTCTTTAATTGATGTA
TCTTTTTCTAAGTACAAAAAAAAAAAAATCAATCTGCTCCATCCATCTAATGTTACTTGTATGAATGTTTCCATTGGCATTGACTAACCAATCA
GTGTACATTTTTGGGAAACACAATTTCTCATGCTCTCAGCTTTCCCTATGTGCCTCTAGTTCTTAGTCTAGGGTTGAGACCTCCTGAGCAATCT
CCCTTTCACATTGCCTGTCTGTTGGTGCCATCCTTGTTCAGGTACACACAGAATCAATCACATAAAGGTACTAAGTGGGTTTCGACAGTTTAAT
AAGGCAATAATCTCACCTCCACCTTAGAAGATTGTCTTTGGATTGTTAGGAAAGAATATCATCACCCAGGTTAATGGAAAACCTAGAGTCATAA
GGATAGTGTAAAACATTGTTTGTGGAAATTAATTAGTATCCAAAGTCACATACCAGACAGTGGCAGAACCCTGGTATTTTCAATGATGTCATAC
CCCTTTACTGCATCAAGTCAAAATTCCCCTGTTTTAACTTTTTTGTCTGAATAAATATGTTTAGTTCCAGCTGCTTAGAGAGTTTTGTTTTGTT
TGTTTCATTTTGTTTTAAGACAAGAATCTTACTGTGTAGCCCTGGAACTCACCATGTAGACCAGGCTAACCTCTACCACAAAGACATCTACTTG
CCTCTGCCTCCCAAATGCTGAGATTAAAGGCGTGTGCCACTACACCCAGCTCGTGTTTTCTTTTTAAGTATGTATGTAAATTGTGTGTTTGTGT
GTGCCTGCATAAGTTTATGTATACTTTATGTGTGCAGGTACCCTCAGAGGCCAGAACAGGGTGTCAGAGCCCTTGTAACTGGAGTTTGACGGTC
GTGAGCTGCGCATGTAAGTACTGGGAACTCAATCAGGGCCTTCTGCACGCTTAACTGTTGAGCCACCTCTCCAGCTTGTGTTTAAACATTTTCA
AGTGTTTCTTGTTTTAAACAACCCCACTTCCTTGCACACACCTTTGTGAAGTTGTGCCAAAGGACTTAGACCTCCTACTTTTCCTTTAGTTGGT
GCTGGCCCTGCTCCATGTGGCCCTGGGAGTTCTCCAGAGCCTCCCGTGCATCCCATTAGTCACGTGGTGTTATAGCACAGAGCCTTTCACTGGA
AATGAAGCCTCAAGTTATGGGAATGTCCCGAGATGTTTTTATTAGTGTAAGATAGGCTTTTGATGGAGGCTAGACAGTACATTGGATTGAAAAC
TAACTAGCCTCCATTCTTCCATCAGCCTATGTTCAAGCTCCAAGGTGGGCACAACAGCCCCATCCTTTGATACAGAGTCTGTTCCCTCATGTGC
TAGAAGCCAGGGCTTTTCTACATTTGGGTTTTATTCAGCATGGAACGCAGTTTTTTAAAAAAAGATTTATTTATTTATTTAATGTATGTGAGTA
CACTGTAGCTGTACAGATGGTTGTGAGCCTTCATGTAGTTGTTGGGAATTGAATTTTTAGGACCTCTGCTCACTCTCCTCGGCCCTGCTCACTC
CAGCCCAAAGATTTACTATTATACATAAGTACACTGTAGCTGACTTCAGACGCATCAGAAGAGGGCATCAGATCTCATTACAGGTGGGTGTGAG
CCACCATGTGGTTGCTGGGATTTGAACTCAGGGCCTTCAGAAGAGCACTCAGTGCTCTTACGCGATGAGCCATCTCACCAGCCCAGAATGTGAT
TTTGAGGTGCAGATAGATGGTTCTATGTGTTTATCAGGGTCTCTGGGTGCCTGAAGGCCGCTGAGGCTGCTTATATTAATAGCTTGCTAAGTTC
AGTAACTTTCAGACTTTCAGGTTTGATGTTTTCACTGGTTATTTTTTTAGTGCACTCTTTAGAGTTACAGAATTTTCATTGCACTTTGACAAAG
GCAGAATGACTCTCACCAGTCCTCACAAGAGGGCAGGGGGTGTCGTTCTATGCCCACTCAAGTGTTATGTAAAATGGTATCAGGACTTCCTCAG
CCTCTCAACCGAGTCTAGACAGTCCTAGGACCATCTCAGAGTTCATGAGAAAAAAAATGCACAAAGTAGAAGTGGCCACAGGGTTCCATCTGGA
CCTGATTTTTACCCAGAGGTAGGACCAGCTGTATCAAACCGAGGACCCTGAGCTTAGCCAAAGGGTTTAGATCCCGTGGTCTCCCTACAATGAG
AGGTAGATGCCAAGGAGGTACAGCACGCATGATGCCCTCCTACAGAGGTCTTTTTTGCACACATTTCTGGTCCCTGTAGAAATACAGCCTAGCC
CTGCATATGTGCCAGAGTTGTAGGATCTTTAAGATTCACTCCAGTGCTACAGCTTTCATTTCTTGTTCTGTTTTGTACAGCTTCACCATGGCAG
ACGATGATCCCTACGGAACTGGGCAAGTAAGTCCTCAGCTCACTAGCAACTTTGTTTCAACGCGTTCTTATCCCAAACACACAGAGGCAACGCT
AGTAACTCAGTATCAAGCAAACCCTAAATTAGTAAACACTACTCTTAATTTATTTTCAGTTTTTCTGTTCTTCCAGAGTTGGAGAGGGCCCTTT
CTTATGTATTTTTGCATAAAACCGTATATACTACATGCCAGAAAGTAGCCACTGAGTCAGTTGTGGTGTTGAAGGTCTGACCCCAGTATTTCAT
ATGGTGACTGGTATATTAAAAAAATTGCTATTCAGTGAGATTTCTAGGGCTGCTATTAACATCGCTACAAACCTGGTGACTTGACACAATAGAA
GTGTATCCTTTCATAGGTCTCGAGGCAAGAACTCTGAATTTGGGGCTGGCAGAATAGTTCCCACCTCCTACCACTGCTGGGTGTGTTTACAGAT
CCTTGGCATCACACCAGCCACAGTCTGTTCTTGTGTGGCTTTCCTCCACGTCTTCACACATACCATCTCCTCTCTCTTAAAAACACATCACTTT
TTGGATGTAGGATCCATCTCTGTCTAGTGTGAATTCATCTTAACATATATAAAGGCAAAGGCTGCCGTGTCCAAATAAGTCACATCAAGGAGGA
GCACTTATGAATTCTGAATATATTTTTTTTCAAAGGTACTGTAGTTAAGCCCACTGCAGTCTGTGGGAGTGAGTGTGCTTTGAGAGCGGAGCAG
TGTTTATCATCACGTCATTGTCGCTGTCATCATAGGTGTGACAGCAGCCATGACACAGACTGACACGAGGATATCTGTATCTTCACTTTCCTTC
TAGTTTTTTCTCTTAAAAAATCTAAACCCATAGAAGTGTTAGACAGTCTGATGATACTTCCATTTCTTTCTCTTCTCCCCATAGAGAATATAGG
GAGCATAGAACTGATTCTTGAAAGCAGTTTCTAGCTGCTAGCATGATTACAGTGGCAATATTAAAAGTGGACTCTAATGGTCTATTAAATTATT
TAAAATACTGGTATCTCTTTGCTCCTCAGCTATCTACTGAGACTTTATAGAAGACTTTATGCCCAGAACATTAGCATCCTAGAGACGAAGGGAC
AGGTGATATGCTCACTGGGCTCAGGACTGCATCCCGGCTGGAGTAACGGAACCACACTTTACACAGTCTGTGGATGTTGCCATGGTTCACTGAG
AGACAGAAGCAGTTGGAGGGATTGCTGTGTGTTCCTTTAGGGAAAGAGCAGGTTAAGGATGACTTTGCAAAGGAGGACTAAGCTGAGCTTTGAA
AGCTACAACCAGTGCAGGGGCACTATTTACCAAGGTAGCCCTGCCACAACATTCATTACTACTTCACATTTAAATTTTGGTGGTAAACACCCGA
GACTACCATTTCCCAAATTTATGCTCGCAAAGAGTCAGCCAAAAATAAAACTGAAAATGAAATATTTGGGGGAGACCTGGTGTTTCTATAGTCA
CACAGCCCCAGAGCCGCAGTCAGAGCTGCCATGGCCTGCACCGTAGTGACAGCTGCAGTGGCCTCAGAGCTGCAGTCAGAGCCGCAGTGGCCCT
CTTCTTCTCACCCAGCGGGCGGAGTGAGCATGCACCATCCGCTCCTGACCATGTTATAAAGATGGTGGTACTGGGTAAACCTAAGGATGTTTTC
TTTTATGGCAGCATAAAAGACACCTGGCAACCATACGCTCAAACCCCTTGTTTAACCTTTCACTTTTAATGGGCCTCCTCTAACACAGGCCAGC
CCTCACCACCATGAGAGCTGTCTGCTTGGTTTCAAACCATGCTTTTCTGTCTGTACACAGGAAATCTTAGCAACCAGAGATGGTCTTTTATGCC
ACAAAACAGTAAGACCTGCCAACCACAGTCATTTTCAAAGTGTCTCATGTGGGCAGCAGTTCTGAGCTCATTAGCACCGTCGCCATCTTCTGAT
AGTTCAGTTGTGCGGCAAGCGGAGGCCCTTGGAGGCTTTTAAGTTTTTGTCTTTGGGTTGGTTTTTTCTTCCTGTCTTAAGCTTTAAGTCTATC
TCTTCTAAAGTTTCCGATTTTTCAGGGAGGTGTCCTCCGTGTTTTAGCCACACTGGAGTTTGTTCTCCACCTGTCACCAAGCAAACACCACATG
CCGCCTTCAACAGGACGTCTGTCTTAGTGGGCTTCTCCCCCAGCCAGATCACTCCAGACAGACGCGCAACCACAGCAAAGGACTTCTTTGTGAG
GTCGTTCTCTTTGCTCAGAGATGGAGGCCTGGAGCTTATTATAAAACCTAGTTTCCCATTCAGTGTGTCTTTCATGGTTAATAGCGAATGGCAC
AGATGCGCTTTGCTTTTAAGGATTGAAATATAACACACTCTTTGCTCCTCAGTTGAAAATTTGCATCCCTCAAAAGTGGATTTGAAGTGACTCG
CATTTAAACATCACATTTTAGGGGCCAGTAAGATTTTTCAGAGAGCAAAGTGCTTACTAAGTTAGCTTGACTTTGACTTCCTCCACTACCCACA
CATAAGCACACTCATGTTACACACACACACATATCCATCTCATGTTAAACACACATACTACACATACATATGCACTCTTACACTATGCACACAT
ACACACCTTACACAAACATATATGTCCATACACTCAAACACACACACTCACATACTCCCACTACACATACATACACTTTCACACTATACACACA
TACATGCACACACACTCACACTACATATACATACATACTTTCATACTACACATGCATACACACATACTACGCATACATATACACTCTCATACCA
CACACACATACACTCACACTACACACACACATACACATTCTCACACTACACACACAAATGTAATAAACATGCAAGCATTACTCTTCTTATTCTT
GATTTAACTAGACATAGTAGGATTTGAGGTACCCAAGAATATCTAGTGATTTACTAATAAGGACAAAAAATCCCAAAAACCAAAAACCAAAAAA
AAAAAGAAAGAAAGAAAAAAACCGTCTAGCTTGCAAGCTGACCAGAGAAAGTAAAAGAAATAATTTGGTTTCTATGTTGTCCATAAACATTTCA
ACAAGTCACTTCTGGTCAGTGACACAGATAGTAAGCTCACACATACAAATGTGATTTTCTAAATGAGCTAACTCGGAAAATTCCTTTTGGAGTA
ATTATTAGTCATAACTTACCAAGGTAGAGCTTAATTCTATCAAAACGTTATATCTTCACTTTTTCAGTTTTCTTAGTTGTGTGTTGTTTCTGTA
ACAAGTTACCATAGTATTTGAAACAACACAAATATCTTCTAAAGATTAGAATAAAAATGTCAGAGTCGAGGCATCAACAGGGCTACACTCCTAG
CAGCGTTTATTTCTTCTCTTCCAAGCTCTAGCCGCTGCCTGTAAGTCCTGCTATCATCCCCCACTCCTCCCTCTGTACGCCTGGGTGAGTCCTG
CTAGCATCCCTGACTCCTGCTTCTGTAGGCACACTGCACTTTGATTTCTCACTCTCCTAAGTAGCTCACTTGGATATTCCAGCATAATCCTGTC
ATTTAATTGTCCTACATTGATGGCACATGCAATATATCTTTTGCCACAGAAACCATAGGTTCTGGGGAATAGGAAGGTTCTGTGGAGTAGCATG
TAGACATCTTTAGAGCCATTGTTCACTGTCCCTTCATCTACTACATTCAGGTATTTATATTGTAATAGAAAATAGAGCTCGGCAGTGGTGGCAC
ATGCCTTTAATCTCAGCACTTGGGAGGTAGAGGCAGGTGGATTTCTCAGTTCGAGGCCAGCCTGGTCTACAAAGTGAGTTCCAGGACAGCCAGG
GCTACACAGAGAGACCCTGTCTCGATAAAAAAAAAAGAAAGAAACAAAGAAAGAAAGAAAGAAAGAAAGAAAGAAAGAAAGAAAGAAAGAAGAC
GACGACGACGACGACGACGACGACGAAAAGAAAAACAAAATAGAGGCGGGAGAAAGTGAGCCCTCTGCTCCATCATGTTCTCAGTTGTATTGCC
AGTCATTTTGTAAGTTGTCTAACTCCTGCCTGTAATTCTTTCAAGGCCTTGAAGTTCTGTAGCTCAGTAAGTAATCTATTTATCATCAGAACAG
AAGCATACATATCTAAGATCATGTGCACGTATGTGCTGTCTGTCTGTACGTGTACATTCACAAGTGTGTGGAGGCTGAAGGTGGCTCCCCATCT
TTGATTTTGAGAAACCGTCTCTAACCTAACCTACAGCTCCTGGATTCAGCTAAGACCTCCAGCCAGCAAATCTTCATGTCTCCACCTTCCTGTA
GCTGGGACTGCAGACAACTGCCGCCAGCCCAGCTTTTCACTCGCGTACTGGGGCTCTGGACTCAGGTTCTTGTGCTCTACAGCAAGCACCTTAT
CAACTGGGCCATCTCCCCACCCTCTCGGATGTAATGAACTCAAGTTCCTAAGAGGGTGCGAGATTCAGATCACTTACTCTACACATTTTTCTGA
AGGGTCCAGCATGCCTGAAGCTCTCTTGGCTCCGAAGATGCACAGCTTGCGGGATCCACCAGGCCCTTGTCTTTAGGGACCCCATAGCCATTAT
TCTCCTCAAATTTCTTTGTTACATAAGTTACACACACAGGCGCCTAAGAAGGTCCCAGAAAGGCACGTTAAAATTTTGATTTCAGGAATCCTAT
TTTTGCGTTTTTATTTCTAGTTTTCAATCATGTAATTAGTTTTCTGCCTTTGTGTATTAGTGCAAGAAGAGAAATTAAAATATTTGTATTTTCT
TCTTTACAGATGTTTCATTTGAACACTGCTTTGACTCACTCAATATTTAATCCAGAATTATATTCACCAGAAATACCACTGTCAACAGGTAAGA
AAAACACCCCCTTTTCCTGTTGTTTTGCTTTCCCTTAAAAATATTTGGGGTCAGGAGTCAGGCAGATGTGGATCAACCAAACTAAGTATATATG
AAATTACTATAAGGAAATCTGTTGCTTTGTGGGTGCTTGGGACCTACCCCAGCCCCTCTGGAAGAGCCACAAGCACTTTTAACCACAGAACCAT
CTCTTTAGCCACAACAGTCTCTTTTAAAATTCAACAATATTCATAGGAAGGAAGTGGTGATCCGTCTTTTAAAACCACCCTTTCAGTATGCTTT
CTGGAAATGTGTCTCACAAAAATGCTCCGGCGTGCGCGCACACACATCGTTTTAGCAACTGTGGTTTCTGGTCTCTGTTAGAATACCCTGAAGC
CCTGTCTTCACCCCGTGTAAGGACTTTCCTCTTCTCCGTATCTCATTACGCATTAGTGCTCCTTTTTGCTTTACCGCAGCTCACAGAGAGCCAG
TCTTAGCCCCTCAGTTCTGTATCTGAGGGCCAGTCTTGTCAGCCAGGACACGAGGCTCTGGGGAAACAGTAGGAAAGTAACCTTTATATTCTGA
CCAGACCAAGCGTACAGAACTAATGCTCCTGACATGACTGCTAATTAACGAACCCACAAACTGTTTAAGGTCCCTTTATCCTATAGCGCACGGG
CTTCCTTTAGACTCATTATTGACTGGCATGTCTGTAGCCTTGGCCTGATGGCTCTTTTGCTGCTTTGATCACCTGTTGGAGCTAACCCGTCTTC
AGCAGCCACTTGTTAGTTGGTGGAGATGCGTATGCAACTCATTGTCCATTACTGAGGTGGACAGCAGGTGCTTTGTGTGCTCCGGATTTCTGTG
TCTCGTGATGTAGTTTTTATCATTCTCATTTAAAATGACTATGGTTTTGCCAGCGCCTGCCTTACGGAAAGTTTTCTACAGACGTGGGAGGAAG
GAGAGTTAGTATGTCACCCTCCTCACTGGTGCCCAGAAGTTACATCACGCAGCCCTGTCTGTCCTTACCCCAAATAACCACCACAGTTTATCTG
TAATCTTAAGCTGTCCAACACGCTCTAGGTCCCCTTCTTGTGACCAAGTAAATGCAGGGGAGGCAACCGTGTTTCCTGTGAACTTCTAAACTCT
GAGACCCCAAGAGCTTCCTTTAGCATTTCTGCTTTATTGAAAATGTTGCAGACTCGGTTCTGCCCTCAGGGAAAGCACAGGTTTCTAGAAAATG
CCTCTAATTAGTTAGAATACTAAACAGCATCCTGCAGGCAGATCATATTCTAATGTGTTCTCCTTTTCCTTTGGTTTATGGACTTAGAAATAAA
GTTATCCAAAGAATCATCTCAGAAAGTCGTTGGTGTTCATATCATTGCGCTTCGGGAATCTTCTTTTCCATAGTGTTAGAGAATCCTTCAGAAT
TGCATCCAAGATGCATTCTTTTCCTGTTGTAATGGCTCCTTGCTTGCACTAGCTCTCCGGCTCTGTTTCAGTCCGTTGTCCTGTTTTTATAGTC
CAAGATGGATGGGACATTTTGTTCAGATTTTAAAGGACTAGAAAGGCTATCTGTGACACTGTTTGCTTGTAATTTTCATGTGGATTTTTTTTCA
ATCTTCTCAACTTCTTAAAATCTCAACGTATTAGTATTTCTAACCCTGTGTTGGGAACTCTCTAACAAGGGACAGCTGATAGGTCTGTGTCATT
TTGCTGTGATTTAATTTTCTTTTTACAATGGAAGATCATTTTTTTTCTGGCACAGAAATGTAGCCAACAGAATATTAGCCTTAAAACAAGTATC
TGTGTATCAGCTCCAGTGTTCTACTTCTCTTACCCTTGGGTGTGCTCTTCTAAGGGTAATGATTGCCCCCTCTCCCCATGGAACTTCACATATG
TAAGGAAAACCTAAAACCAATCCTGTGAGTGTTTCAGACGGGCTGTTAAGAAGGAAGAGACTTGGAGCCTAACACGAGGATGTGTCCTCTGCCT
CCATATTTCAGCAGCATCTTATCCAAATGCTACCACCTTCCTGGCCTGGCTTCTCAGTAGGCTCTTTTGGATGCCTAGAGGAAATGTATATTTT
TAATATTGTTATACAAGCTGTCTGATATGCCTAGCATGAAATCTTTTTCTAATCAGTTTTATTTCCTCATAAAAGTTAAATTCGAGCAATTTTC
TTTTTGAAATTTAAAGTTAACAGTTACCTTTCTAAAAGTTTAAAGTGTCAAGAGATGAATCCCATGAGACAGAAGAAGGTAATTTGCTACATTA
CTGACCCCAGTAACCACCCATCTGTCTTTCTTATTTGGCTTCAAATTAGCTTTCCAATTGCTTTCCTGGTACAGTCTTTAGCCTTCCGTGTTAT
CTGATCAGTCATAATATTGAGAAGGTAAAATGTATTCTCTTTGAAGTTACAGTTTATTAAAAATTACAACCTGAACTTTTATCTCACCTCAAAT
TTACATATGCAAAATAACCCTTAACCTTCAGCCGAGAAAGTGAATTTTCAAATGAGCACAGAAGTGTTCTTCTAGACTGTCTTCAGCTTCAAGT
CTTAATTTTCACTCAAACAACTATAAAATGTCGAATATGTTTGTGTATTACACAGCTATTGGTTATCATACTGGGACATAGAAGCCATCTCACG
CCCTTATCGAATTTTTTATCATAACATTTATATTTATTTATTTTGAAATTTCAAGTCAGATATCATTGGTATATAAATTGAGCCTTTAGGTCCT
TTTCATAGTAATTAATTGGCATGCATTTATCTTCAATTACATTATTTTTGGTATTTTATCATAACTCTGGGCTGTTTTAGAACAGAGTTCTTAT
GAGCACACACTGTTAGATACTTTATTATATCTGCATCAAAAGCTGTGAGTAAGATGCCAGGGTAGTGGTCCATGCTTTTAATCCCAGCACTTGG
CAAGAAAATCTCTGTGAGTTTGAGGCCAACTTTGTCTACATAGTGAGCTCCAGGCGAGCCAAGGATACATGGTGAGTCTCTGTCTAACAAAACA
AAACAAGCCATGGAGAAGCAAGAAAAGTTCTTCAGGTCTCACAGAGGGCAAGGAAGAAGCCAGTTAGGCAACAGTGGCTGTCCCTTGGCTTGAA
GTAAGGGAAAGACTACATTTCAGGAGCACTGTTAGGAGAGGCAGGTCGCCCAGGATCTCCCTTCTGTGGGTTTCTAGCTTCAGTTCTTCATTTA
CTCCTGGGCAGTTCTCTTTGAGGGAGGAAAGTAGTCTGCAGGTGAAGGCCACCTGACACCACAGCACTCAGAGCTGCTCCCTGCACTCAGCTGT
ATTGTGCCCTAAATGTTTGTTGACACATGAGTCTGAGGACGGCTCGGATCAGAATCTCTGTCAGCATTCAGACCTTTTGTTCAGTGCCAGTGGT
GTACCATTACCATTCAGAAAAAGCCACTTATTTACCGTTAGTCACTTAAACTATAAAACTANNNNNNNNNNNNNNNNNNNNATCAGACACTCTC
ATCTGGCTTCCTTGGGCACTAAGCAAAGCACTTATGAGCAAAAAATAAATATTTTTTAAAACATTTATTTAATATTTCAAATGATAACACAGAT
CAGTAGAACACACTTCACCTATAAAAATTGATTTGAAATCTCTGTTTAAAGCATAACTTCACCATTTGTCTTGCTTTGTATTTCATACAAGATT
CCAGAAGTCTCACAGTTTTCTTTTGGTTTTCTTGTGTTTTCCTTGTTTTTAACAGATGGCCCATACCTTCAAATATTAGAGCAACCAAAACAGG
TAAGCGTAAAGCCGTCGGCTGTTTCGTAATATTACATCTCATGGTAAGGCTCGGTCTCTGAGTAATAGTTAAATCTGATGACAGAGGTAAGGGT
TTTATCTGAATAATCGGCAGCCTGCCGTGTTATGCAATAACTTCCTGTGTCTACATTTTTCTTACAAATGGCTTTGAAACATCAGTTAATTATA
AATCCTTGCTAGTCTGTCCTTTTTCCAGCTTAGCTCATCAGCTGCTTCCAGGGAAAGCACTAAAGAGTCTCATTCATGAAGAAATACTCACACA
CACACACGTTCACAGCCACTCTGACGCTCTATTGCTCATGGCCATGCCCACAGGGTACCCCTCCTGCCTTCATAAGCTCTGGCCTTTTCTGTGC
ATAGAATGTCTAGCTTAACGCAGTAAACCCACTGCGACACATTAGAGTGGACTGGGAGATCTCCCCTCCACCCCTCTGGCTTTAATCCCAGCCT
TTTTGAAGCAAGGAGAGGATTTTTTTGTTTGGTTGTTGTTGTTGTTTTTGTTTGTGTTTTTGTCTGGCTCTTTCGCTTTCTACTAAATATTGTG
TTCACCAGCTGAAGATTAAAATAGCCTCAAAACTGCAAATATGCTCATTAGAAGTTGCATGCCTCTAGTACTGTAAGAGAGAAGAGAATCTTCA
ATATCTGCCGACAGAACATTTCAGTCATTATGGGATGGAAGTTATGGTATAGCCTCCCACACAGTGAGAACCAAGTCACTAGATCTCTCGGTGG
ATATGCTCATCACAGCCGTGGCGCTGAAGGACTGTATACCTGGCCTACCGAGTTGTGTCACCCAATGTCTTTTCTAGGCTGTTCCTTCTTCTAA
CTCAGGAGAGTGGGTTAACACATTGTGTTGTATGACACTCAATGCTAAGAAGTGAATGCTGACAGCATTCGGTGCTGTGCTGTAGAATTCTGAT
GTGGTCAGCTGTTAAATAGGAGAAACATCTTAGGGATGTCCATGCTACTTTGTAAAGCTGAAATCAGATGGAAATGTTAATTATAAAGACAGGA
ATGTCACATGGAACTTTGGGGCATTGTTTGGTTGCTTATAGGCGGCCTCTTAACACACACACACACACACACACACACACACACACACACACAC
ACGCACACACACATACTTATACACATGTACACCCTCCCTGGGCTGCAGATAACACCTGCCCTTGCTTTATCTCCACGTCCATCTTTGTAAAGAT
GATTTCTCACATAAACTCGCTGTTCTCGGAGCTCTTCAGTAGAGTTGTGTTCTGTGAAATTCTGCCCAGTAATCTGGAATCCTGGAAAATGTCC
TAGCCTGGAAGATTTGGTGAATTCATAAAACTGATGAGTCCAAAATGTACCTACACATCAAATAGATTTTTCAGATCCTTTAGAAAATTTTAAA
TAATTTATTTAATTTTATTTTGTGCGCATTGGTGTGATGGCGTCAGAGCCCTTGCAACTGGAATTACAGACACTTGTGAGCTATGACGTGGGTG
CTGGGAATTGAGCGCAGGTTCCTTGGGAGAGCGGACAGTGCTCTGCTGAAACATTTCTCTAGCTCCCCTTTTTAACAATATTAAAATTGCATTG
ATTTATTTTTTAATGTGTTGCTCTCTTTGCCCCCACCCCGTGTGTGTGTGTGTGTGTGTGTGTGTGTTATTATGAACCCCAAAGTCATAGGTAT
TTATGATGTGTTTGAACAGCTAGTATAGTTCCAGAATTTAAAATTTAATTCATTTTGTGTGAATATATAAAATCATATATGTATAAAACATCAT
GTTTGATTGCCAGTCCGATTTTATTTTGGTATCTGGCTTTAGTGAAAGTAAGAAGGTTGTATGTAAGCCAGGCTTTTTCACTGGATGTATGGAG
TCTCTCTGAGGTTAATGACTCATTTGAAGTAAATGGCGTTCCTGAGATGAACAGCGATAGATGCTGAACGTTTAATTTCAGAATACTAGAATTA
GAAATGTGTCCAGAGCGTGCATTTTAACACTTCCTAATTTTACGTTGTTATTTAATTTAAAACATTAGTTTATTTCTGAGTCAAAAAATGTCTG
TAGTCATTGCTGGCTTCAAACTGGTGCCAGTTTTCCTACCTCCCCTCTCCAAGTGATAAGATGACAGGTGTGAGCCACCATGCCCAGCTCAAAG
GCATCGATGCTCCAGCCGAACAGCGCAATACACATTACAACCTTCACAATAAATCCTCCCTTGGATAGGACGTTCAATATTCTTATTCCACCGA
GAATAATACACAGTGTCACACGCTGTGCAATAAATCATGCTGGCTACAGCGTTAAACGTCACTCCCCATAAGGTATGAGAGGTACAGGTACAGA
TTTTTCCAATGCCACAAAGAAATTTTGTAATTAAAGATAAGGAACCACTATGTTAAGTTTTTGAGTTAGAAATGTTCTTTTTCTTGGAGGCCTT
TTGGGCACAGATGATGAAAATGAACCAAACCACACACTACATGTCTTTAGACTGTCCAGTTCCGTGGCATGTTTCTCACTGTTAACTGTTTATT
CATGTTGTGTTGTGTTGTGTTGTGCTGTGTGAGTTTTGTACTGCTTTGTTTCGAGGCAGGGTCTCAGCAGTGTAGCCTTGGCTGGCCCCAAACT
CACAGAGCTCCATTTACGTGCCTCTGCCTCACAAGCACTGGGGTAAGATGTGTGGCAGTTATAATCTCAAGGTGTGTTTGAATTTTCTCAGTTA
AGTGGATCCCCATCCTAACGGCAGCCCATTTGGGGCTCTTGGTGTTATACATGCTATTATTGTATAGTTTGGGGGTGATTGAGTTCAAGCGTTA
TCCAGACTGGATCCCAGTAATATTAATTTTTACAAACTTTATGATCTTATTCCTTGAAGTGCTCAGAAGACTGCTAGAGTCACAGTGTCGTAGC
ATACAGCATGTCTGTAACACAGATGCACTTAATCCTCCAGAGACTTCACAACCGCCACCAGGAGAAGGGGGATGTGGGGGGCGACCACCCTCTC
AGAGTCGAGGAGGAGGAGGAATGGGGTGAGGAACTTGGGGGGGTGATGTAAATAAATAAAATAATTCTTAAAAAGACACCTTTATGGTCTGTGA
TCAGAGCAGATAAACGAACTCCTTTAAGTAATTAGCATAACTTTTACTGATGGCAGAGCGGAGAGCTTGGCAGCAGCCATTGGTAACGAGAGGC
TCCAGTTGAATAAAGTGCTAACGTATATCCAAAGCCTTAAACTCTTCATCACTCCTGTGTTGAAGGTGGGTGCCTGGCTTCTCCGCCACTGCTC
AGTGCATCATTTTCATACTGGCTGTTAGAAAGCATTTCTCCGTCTGCAGAGTTGTCTTCCACAGTTTTGCATGTTTAGAGACGTGTGTGTACAT
CTGTCATTGTTGCGTTCAGTAAATACCGCTGTGTTCACCTCTGCACAGGGGATTTCGATTCCGCTATGTGTGTGAAGGCCCATCACACGGAGGG
CTTCCGGGAGCCTCTAGTGAGAAGAACAAGAAATCCTACCCACAGGTCAAAGTAAGTTTGAAACCTCTGCTCTCACTGCCCAGGAGCAAAGCCA
AAACGTTCAAGTGAATGTGACTGGGATCTTCCTTTGCCCCTCAGCGGGAGTGTTTACATGGTTCTTAGAATTTTTAAATAGAAATTCACCTCAT
GAAAATGACGAATCGTCAAAACACCATTAACATCTCCATTTAAGTGAGATGGTTCCAACATCAACTAAGAAAAACTTAACTACCTCTCCAGTCA
TCTTAAAGCTGTCTTTTCATCTTAAAGTATTTTTAAATATTCTCTGATGTTTTAGTAAAACTTGCAGCCAGGTGTCATAGTGCATACCTGTAGT
CACTGGACTTAAGAGGCTAGCAACAGGACTGTTAGATATCCCAAGCTACCCTGAGCTACATAGCATGCTTGAGCTCAGCCTGGGCTAGGTGAGA
CCCTTATCTCGTAAGAAAACGAAGAAAATAAAAAATGTCTTTCAGCCAAATTTCAAATACTGGGTTTATAGAGATTTCATGACAAGACCCTTGA
CAGAATATATCGGCTATCGAGTATATTAATTATTTAAGATCATAAGTTCAGACCCAAGTGATGGAATAAACAGGTTGTAAGCAGGCTTATCTCA
CTGACCAAACATATAAATACACAAATACCACTAGCATGTACTTCACAAGGTCTTTTACAGTTTCAATGAGGAAATATGCTTAAGTTCTCTGTAG
AGAGCCTGAGAGAAACCGTGTGCAGCTACCATGAATGAGTTCTGTAGCATGGGGGGCAGAGGGGTGGGGGAAGCTTCACTGTCTTTACCTTGGG
GTGTCGGGTGTAGCTTCGCTGCTCTTCGCTTTTTACCTTCTTGATCTAGTTGAGACTACCTTCCTCTAGTTCAGAGTTTCTACTTTCCTAATCC
AGTGTTGTGTTTCAGAGACTGACAGTGATTTTCCAAGGAAACAGTTAAAAACTTTCGAGTGGTTTAAAAGGTTTTATTTATTTGCTAATCTGGG
CTTAGACTAAATGTTACCAGCAGTAAACGTTATGGCACTCCAGCCTCTGTCTTTCTGCTGGCTTGAGATCTCAGACGCTCTTGCCCTCAGCTGA
GCTGACACTGGGGAAGTTATCTTCAGTTTTGCCTCCTAGGTTGCTTGTCCCCCTTTTAATGTTGTACTTCCAGGCTCAGGCCTTCCAGGTTCTT
GCCCTCTCTCTAACACAAAACAGCCATACCATCCTTTATCTTTCCAGTCAAAAAAATGTGAAAAAGCCATACCATCCTTTATCTTTCCACTGAA
ACTCAGCTCCTGGCTTGGGTCCTGAGAGTCACATTTTCATTTTAAGGCTCCCAGCTCTAGTTGTGGAATGAGCCGTTTTTTTTTTCTCAGTAAA
GGTAACTGAACGTGGAAGTGCAGTGGCTTTAGTGCACAGAAGGCCACAGTTATATTAGACAGTGTTTTTCAGAGAAGTCGAACCAGGTCGGTGA
AGACAGGGAGATAGTTAGATGGTTGACTGAGCGATAGCGGAGGAGATGAGAGTAATCGGCCTCAGCTGTGACGATTATGAACGACACCAAGACC
CACTCTGCAGCGTCTGTAAAATGTGCGCAGGGACACTGCTAGGATTCCAGCACAGAAGCCTGGGCGCCCTGTAACCAAGGGGACTCTTCACTAA
ATCTGGGCGTGGCTATGCTTTTCCTCTAAAGGCAGGAGAGGTTGGACTGCTGATGCCCTGGAGGGGCAAGAAATGAAGAGTGTCCTCCCTCCCA
TTCAGGTGGGGCAGTAGCCGGAGGGAGGGAAGGAGAGGATTCTCTGGTGTTTTGGTCCAGCAGGTCTTCTAGCTGAAGGGAAGCTCTTCCATCA
GTCCAGCAAACTTTCCAGTGTCCTCTGGAAACGTGCACACAGCTAGGAAGCAAATGCTTTATCAGCTTTCAGCATCTGCCCAGTGTAGTCGACT
GCACACCGGAAACTTCCCTCAGGACAGTCTGTGGCTTCCAGTCCTGCAGAGGCCAGGCAAGGAATGCACAGCAGAGCACCGGCGAAGAAAACGG
TTATTCCACACCCCTGGTGGTCCTCGTGTCTCCCATCTGTTCCCTCCTGTAGCCTTATTAACACTGAGGAGCTCAGGCTGAGGTTAACTGGCCC
TCTTCAAAGGTGCTGGGCTTCTTTCTCCTGCAGCTCACTGGCCCTCCCATGTGAGCGTGTGCAGCTGAGGGGCCACGCGCCAGCGGCTGAAGAA
CAAGTCAAGAAGGACTGATAAATCAAGTCAGGGAGGATGAGCATTCTGAACAGCAAAGAAGAAATGGGGGCAGAAGTCATCAGGGGTCAGATCT
AGAATTTCCTACCTGTGTGTGTCCTGTACAAATATTGTGTGCAATTATGTGTCCTTATCTGCACCAGGGTCACTGAACATCCCTTGTCAGCACT
GATACTGATCATAACTACTTAAGAACCGATGTTAGGAGAAAAAAGTAGGGTTTTTTTCTCTATTGGCCTTCTACCAAAAAAAAAAGAAAGAAAA
TGTACATTGTGTTCTATTTATGAACTCTTTCCTTCTGAGGCACTAGAATTCTGTGGTCTGCCATGCATGAAAGATGGGAGTGTCTGTAGAAAGA
GGCTTCCAGGGGTATCATGGCTTACTGCATACCCACCCATAATTCATCGTAGAGGTGGGTCCATGTACTTCCTGAGGGAGCGACTCTTCCGTAG
CCTTGCACATGCAAGGCTGTGACTTGCATGAAGTATATGTCTTCACACTCACCTTTTCTTCACCCCCACTGACAATCTCTGTCTCCCTGGACTC
AGGCCCTCTTTCCTGCCCTGCCTCTTCAAGCACCCCTCCCTGCTGTCCTTAGGGAGCGCCCCTGCAAGGTTAGTGGTTGATGTGATGTGAAGAT
TGCAGTGAAGATCTGAAGGCTCTTGAAAGCTTTGGGAACTGGTCATGACTTAAGGCTGCAGAAACCAAGCTTTGCTTTATGGAGCTTGTAAACT
TACATCTTGTTTGGTCGTCTACTTGTTGACTGTTTGAAGCATCAGGTTGACTTGCAAGCTAACTCTAGGAATCTCCCAAAACCAGCACTTCCTA
TTAGAAGTATTTCCACGCTGTCGTAGATGCTGGGATGCAACCTCAGTCGTCACCCCCTCCCCCCACTGAGGTACCACCTTTTCTAGAACTCAGG
CGGCTGTACCATGTGTATGTTCCTCTCGTGTAGTTGAGAAGAAAGAACCTCTTTGGCTCTCTAGGATCTTGTTGTACAACTCTTCACGTTCTTA
TTTCCTCTCTCTCTTTTGATTAATTTCTCTGCGATTACTGGTTCCTATGTCCTCACAGCTATCATCAATGGTTTCTTCAGATTGAAGCATTCCT
TCCACTGCCTTCAGGAGCTCGGGGTGGGTGAATAGTCTCTTTTAAACCAGCTACTTCATATTTCAAAATATTTTAAGCATACAAGTTGTAAAGT
TCTATATAACAAATACCATGTACCAAAATTAATAAATTTAATAGATGGTAATATTTTGCCTATTTGCTATCTGTCTATCTGTTCTCTCTCTCTC
TCTCTCTCTCTCTCTGATTCTCTCTGAAGTACAACATAGTTACAGTGGGAGCCCCTACTCAGCCACTGCTCTGTCCTCTTATCCTCTTTCTTTG
CCCAAAGGAAAACCACTGTTCTGAACATTCTTTATCTGAGATGCATTCATATCATATACTAAAATCACTTTCAAGAAAGTTACTTTTTACTATC
TTTAATCCAAAGTTTTTTATTATATATGGTGGCTCTTTTTCAAACTATATCCAGGTTAAAACTGGGCCCCTGAAGGCTTAAACATTGATTGCTT
TAATCCAGTCTCTTCCTCTTTATTGTTTGACTAAAAATGTCTTCAGTCACAGTGTGGAATTTATCCTGACCCTTAAAGCAAAAAATCATATTCA
TGAGGAAGCTAGGGAAAATAAATATCCAGAATTTAAGAAAGTTTTCCACTTTTAAAAAATGGAGTAATCCACTGTCTAGCCTGTAAGCTCTCCC
TCCAGTGTTTGCTTGGTTCTGACTTTATCTGCGGCTCCTGGGAGAACAGGAGAGACAGCAGAGCTCCTCTGGGCCAAGCCTGTCGCTACCTGTT
CTTGACTCAGCAAGGAGTGCCAGGGAAGGCTCACTGCCCTCCTTTTCCCGAAAGTGGTGCAGAAAAATTTTAAATCAAAGTGTCTTCCTTGAGC
AAATGGAACAGGGCCAAGAGGAGAAGCCACACGTGGCTTTAGGAATGCGCCTGCAGCCCGTCCTCACTTGCTTGAGTCCTTCTGTGCTGGGCAC
CTTGTGAACATTGCACTTGGACATCAGTGACTTTCATTTCTAAAACACAGTTTGTTTCTAATCATCCAATGCCAGGAGGTTGGAACACAGTGAT
GCTAATATGACGATTCTCATCAGCTTTCCTGGCAGCTGCCCTGCCTGCCACTCTCCTGGGGTTTGATGGTTAAAGAACGGGTTTATTGGAATGT
TTCTGTGAACAACACCTTTGGCTCCCTTCTCCCACCTCCTGTAGTGTGCACTCTTACGTGCCTCTCACTGAACAGTCCTTAATGTTACGTTTCC
GTCAAGGTTAATAAAGCCCGGCTGATCTGCTGTAGGCTTGAGGATATCACATATCTTTGCAAAAGCGCCCTTTCCCTTGCACAGGCTTGTCTGC
ATCCGGAGACTTGCCATCCTAAAGATCTAGTTCCAATACTAATTTTCAATAATTTAGCCTCATCCAGTTACCTAACATGCCAGGGGGGAAAGAT
CACCACAACAGATTGGGCATTCAGAACCTACCTAGTTCATAGCATTTATTAGAATGTCCTTTGACACTTCCAAGTGTTTACTGTGCTCAAATAA
AAGAAAAGAGCTATGTTCCCTACCAATACTATAGTCTGTGCTTTGTAACACACACACACACACACACACACACAAACACAGAGTTTATTAAAAC
AAGGGCTTTGTAACCCAAGGTTCATGGATCCTTTTGTGGTTTCAGAAAGGTTTGCAACCTCTGACTCTACACATAGAGTTTTATCCATATTTGT
ATGCATTTTTAAAGACTCGAACATGTGTAAAAGTAATGCTGAAGGCCATTGGCTTTTTTACCACAGCTGATTAAATCGATCTCTACAATTTTGG
AGGGATCCGCCCGGGGGCGGGGGGAGGGCGACTGGCTCTCACTGTGTAGCTTAGGCTGGCCTTGAACTCATCTTCCTACCTCTGCCTCCAGAGT
ATTGAGAAATTCCAGGGATGCAACTGTCTTCAATGTTTTTCTTCTTTCTTTTTTCATTTCAAAAATTTACATTTACACTTTTTAGTTTTACCCA
TTTTAGGCAAGTTGAAGCGCTTTGTGTTTCTCAGCATGTAATTCAAGCTAGTTGCTCTTTAGTATTCCATTGACTGGAAAAGATGTGAGATTTA
GCGCCTCCTCACACACACACACACACCACACCCCACCCCCGCCTTTCTGTTCTCTCCTTCCTCCCCTCTCCTCCCTCTCTCCCACTCCCACCGA
GTCTCTTGGCACTGACTAAATACGATGGTTCAAAACCAAAAACAAAACAGAATCATTTCCCTGATATTCACTCAGCACGGTGGCAAGTCCTGCA
CTACAAGGAGCTAACATCCTCTGCGTGGCCATAATAATCTACACTTCTGCATAACTTTTCTTCTACGTATCCCAGGCGTTTTGCGATTGCCTCC
ATGAGTAAAATACTGACTTGTTAAAAAACAAACAAACAAACAAAAAAACCAGCCCTTTATTTCACTGTTAGCATTAGAAGTTAGAGAAAGCTGC
TTACTGAAGGAAACTGTTGAGCAGTGAGAATTGATCCTGAGAGTTAGGAGAGCCAAGCTCCTGAGGGTTGCAGGTTGTCTCACTTTCCAGGCTT
GGTATGCTGGCCTGCCTCGCCTCCCATTTCCTCTTCCCCTCTCCTGTTTCTCTGCATACTCATTGCTCTTGGGATGCTTGTTCCTAGTGGCAGT
GTTCAGTCTGAAATCATCTCTGATCAAAGTGGTCTCTGTTTGAAGACGATCATTACATTCAGGCCGGGAATCCCGGTTTCGTAAAGCCACATGT
GAAGATTGGTTTTGATCACCCAGAGTCAGTAACCAGAGCCTATGATCCTCATGTCCCCAGCCACCTTCTCCATAGTCAGGGTCTAGGGTCTTTG
GTGGGTCTACGGATGTTCTGCTGGCTCTCCTGCAGTCCCCATCTTCCCCCTCCCACTCTAAGTGGATTTTAGGTCAGTCTTCCAAACAACTTTC
ACTTTCTTGAGGTCTAATGGAGGTGAGTGGGAGGATATCTGGGCAGACATGTGAAACAATCCAGTCTGAAGACCAGGGGAATGCAGAGTAAGTC
CCCAGCATCTTCAGATAACCGAGTTATCTATCCATTGCTTGATAGATAAGTACAAAACAGGTTTGCTTGTATTAGAGAAGACTTGGAATTGAAA
ACAAGCCAGAAGAAGGTAAGGCCAAACACACATTTTTCAAATCACATATCATTGAAATGGTCTAGACATTGGAAAAACAATGATCAGGTGGGAG
AGTGGATAATGACGTTTCTCGCCGTCGAACACAGAACCCTGCAGGCTGGCAGAAAGCGAGAGCTGAAAGCAGAGCAGAGGGTGTCTAGCTGAAG
TCCTGCGACAAACTAACATGGCTGCATGTGTGTGTGTCTCCTTCTCTACGCACAGCTCTCAGATTGGCATGCAGTACTCAGCTTGTGGGCAACA
TATTCACGGTGTTAAGCACCAGCTGTGAACTGATGGCCAGCGTGGGGTGTGACATTACTTCCTAGATTCTCATTGGCTAAGCTTTGTGAACTGA
TGGCCAGCGTGGGGTGTGACGTCACTTCCTAGATTCTCATTGGCTAAGCTTTGTGAACTGATGGCCAGTGTGCAGAGTCTCACTGGCTAAGCTG
CAGCTTCTTCATCTGTAAAGCTGACGTAGAGAACCAACTCAATGGAACATGTGCGTACATTCAGTTGCTCAATGCCGGCACACAGTCAGCCTGG
AAACACAATTACACCCGTTTTCATATAAAATTTCAGGAAATTGGGTACTACTCCAAAAGCTTGTGTTTAGAGCTAACACATGATGTCATACGAA
ACTCACAGAAAACAAGAGGATAGAAACAAGTGTTAGGTTTTGTTAGGTCCCTTCACTGTGTCCTGGTAGGCCCTATGTGTCTAATTTGCACAAC
GCTGTATTCATTCCTAGGTTGCCATAACAAATAACTGCAACCTGGGTCATATTAAACAACAGAGTTTATTGTTCCAAAGTTCTGGAGGCCCAGA
GTCCACAGTGAAGTTGCCAGTGTGGTCTTGCTTCCCACAGAGGCTTCAGGAAAGAGTCAATCCTGGCCTCTTCCAGTTTCGGGTACTTGTTGGC
AGTCCTCAGCAAGCTCTAGCTGCAGCCACTTCTCTGATCTCTGCTTCTGTCTTCACAGCCCTCTTCTCCCTGACTTTCTATCTGAATCTCTCCC
TCCTTTCCCTCGTAAAGACACCAGTCAGCGTGGTTAGGGACCACCACGCTGTGTAGCAGGACCTCTTCTTGACCAATCGCATGTGTAGGAAGCC
TGTGTGTAGATGAAATCATGTTCTTAGCTCCTGCATAGGCCCGAGTCCTGGGAGATGCTCTTCTCACTTACTACAGGCACGATGTGCAGTGGTT
ACAGAGTGTTCCCGAGTGTGTGCATTTAAGGCCATGTCGTTCCGTGCTGTGCTCAGAAAGAAGCCTGTGTGCACCACGTGCTCCCCTGTGTACC
TTTGTTAGATTCAGGTAGTGGAAGAAAATCTCTCAGGTCTGAGCAAATTCCTCTACTACGGTTTTCAACATTTATTCTAGTAGATGGAAGGTGT
GCTAGAAAGTGTCTGGCATCAGACTCTTGGATGGCACTCTGAATTGTAGCATCTGCCAGTTTCCTTCCCATAGTAAATTTCAGGCTGCTAACAT
GAAGTCAACTGGCTTGCAATAAATAAATAAATAGATAAATAAATAAATATTTTAAAAAACAGTGAAAATTTAACTATTCTCAAATTAACTCCAT
GAACTAGTCAACCGGTTTCTAACCTACTAGGTGTTAAGCCAGCAAAGTTAGAGCGAGAGAAGGTGATACATTGTTTCCTGTAGGAGCTACTTTC
TATGCACATGTTACATAATATAAAGATGTGCAGGCTATGAGGGAACCCGATAGGTGTTACAGCTGGGACTTCATTGTGTGATAGTTAAAGAGAG
CTGCGCTTGAGTGGGATTACTGCTGTTTAGAAGCAAGGCTAGACCTCGGTCCCATTCTGCCACTCGCTCGCAGGTGGGGTGTTCTTCAGAAAGT
TGCTAAAGATCTTCAAACTTGGTTTTGTTTATGAGATGAAAGTAGAAACAACTCCTTCACAGGAACCATGCGTGCTTACGTAAAAAACTGACCT
CTTAGAAAGGCAGCTGCCATACTCCTGGCACATCTGCGTCATTAAGTGCTCATTCGGACACGTGTGTAGAAAGAGCCATGGAGATGACTGTTTT
TTTCCTGAGAGCAGAAGCTTGCAGGTACTTTGTCAACAGCACCTAGAAGGATGCCCATCTATAGCACACAGGCAGCACTTACTTGTACAGTGAG
CAGGTCGTCAGTGCTCAGAAGCTGGAAGGATCATCTAAGGAGGCACTTGTCCTCCCATGCTGCCGCTAACCAAGTCACTCGAGTGGCCACCAGG
TCTCCACCTGTCACTGCTGCTCACTCCCCACCAGCCTGCTCCTCTTTGCTTCTCCAGCCTGCCATCACTCCCAGCCAGCACAGCCACATCCCAG
ACCTGGCTGTACACTGTACTGTAGCTCTTAGACATAGCACCAATCTATTCTGGGTTGAAACTGGCTTTTCTGCCTTAGTTTCTAAACCTATTTT
AACTGTCCAATTGCAAAATAACACTTAAAGAAACTAAAAAGGTTTAAGCAAAATAGACATTTATTTATTTTAAAAACTGAAAATTCTAAGGGAA
GAAGTAGAAAAAAGAAACCCAAACAAACAAACAAATTTGCCAAATCCGTAGAAAAACTCCCATTGGGCTTTTTAGCATCTCGACTTCTACCTTA
GAGGCCACTCAGCAGCAGCACGCTCACTGTCAGAAGACCTGCATTCCCAAAGCTGACATCAAAGCTTATGAGACACCCAACTGGCAGTTCCTAG
GCCTTTGGTACTCTGAGTTGTTCCACTGCCTGCCCCTGCAGCAGTGAGACAGGGGATAGGGTTGAGCCCTGTGTCCGTCAGTCGCATACTCTGC
CGCTGGTTCTACAACTGGGATTAGTCACTGACTAGGAACATGGGGAATGAACTGAGGTTAGGATTCACTGAGCAAAGAGCTATGCGCTAGTGAC
ACGCGGATGCTCCAAGATCACAAGGATTAGCTCATTCGTCCATCCCGTGACCAGCCTACAGTTTCTGAACTCTCATTCCTAACAGTTGGTAAAC
CCGGGTTCCTCTCTTGAGAATGACTGTTCCATGCTACTCCTAATATATGAAACTTTTGTTTTTAAAATAAACCAAAAAGTTTTTTGTTTATTTA
CAGATATCACTTGCATTTAATAAAATTTCAAGAAACACAAAGTTATAGGTAGTAAGTCCCCTTCTGTCCAAGATTCCTTTGTTCCCTGGAGAGG
AGAGCTGTTACCGGCTTCTCAAGTGCACTCCCAACCGTGCCTGCCGTGTGTTTACCATGTGTGTTTATACCTGCTGGCACACTTCCACTCACGC
TTCCTCGTGTAAGTAAGCATTAGTGTAGCGCTTGTGAGCACGCATGTAGTCTACTAATCTATGAACCATCTGCTCCTTACTTTTTTCACTTACT
GAGTCTGAAATTTGCTCAGATTAACAGCAAACTCCACAGCTGGCAAATCCAGATTCAAGTCCAGCTCTCTCCCCTCAGTAACTGTGTAACCTTG
AGCTAACTGACCACCTTCTCTGTGCCCCTATCCAACTAGCATAAGAACAACTCCATGTCTCATAGTGTTGTTGGGAGTACTAATTGAATTAGTG
TTGAAAGACCAATGTCTGCTCCAGCGAAGAGTTCTGATGTTGAATTTCCTACCCATCTACTCTGTAAA~GCTGTGTGCTTTCCATGGCTGCTTG
GGGCATGCTGTCTTCTCTAAGCTCCATCTGTCTTCTATCACAGGCCAACCTTAGTAACCCTGCATGATAGTAACTTCTCCCTTATCCTGGGGTC
TTTGTCACTTTGGGATGTTTTGTTATTGAGATAGCTTTTTAAAAATACTTATTCATTTTTATTTTATGTGTCTGAGTGTTTTTGCATACATGTA
TGTATGTGCACCATATGTATCCAGTGCCCACGGGGGCCAGAAGAGGGCGTTCGAATCCCTGAAACTGCCGTTGCAGTTGGTTTTGAGCAGCCAT
GGGGATTTGCTAGAAGAGCAGAAAGTGTTTTTAACCACAGAGCCATTTCTCCAGCCCAGAGATACCATTTTAAAATTATAATCTGTGACTGTTT
TGTTTTGTTTTGTTTTGTTGAAACTAGGTTTTACCATGAAGCCCCCTAGCTGGCCAGCAACCCACTGTATACACAAGTCTGGAATGGGACTCAC
AGAGGTTGGCCTGCCTCTGCCTCCCAAGTGCTGAGATTAAATGCATGTGCCACTGTGTCTAACCCTTTCTTAATGTAGTGTGTTTATTCTTTGA
AGAGTCATAAACTAGATTTTCACCATATTCACTTCCCACTCTTCTTTTTAGCTCTTCTGAGGTCTACCTCCTACCTCCTCTCACTTTCTTCCTT
CCTTCCTCCCTCCCTTCCTTCCTTCCTCCCTTCCTTCCTTCCTTCCTTAATTCATTCATTCCTTTCTTTCTGCCTATGTACTAATGGATATGAC
ACTATCCACTGACCATGGTCATTCCTATAAACATTTTCCTTTCATAAATGTTACTCTATGCATGTCGAGGTCAGACGCAGCTTTCTAAGGTCAG
TTCTCACTTTCTGCCTGTCTCTCTTGTTCCCCACTGTGATGCATCCTCCAGACTTGATGGCCCTGGAGCTCCCAGCTGGTTCTCCTGTCTCTGC
CTCCCATCTCTCTATGGGGTGTTGGGATTATAGATGTGCATCACCTAATAGGGCTTTTTACCTGGGTCCCAGGGTCTCAAACTCAAGTTGCTGT
GATAGGCATATATAACAATGCTTTTACTCATGAGCCTCCCTGGATGCTGAATTTTTTTTTATCATAGCTTTATTTTGACTCTTTATTGTGCCAT
TTGCTTCTTATATGTTTAATGATGTGTTTTTCAATGTGATGACCCTTTCAGAGAGTCTGCCCTGAGTTGTTCCCAGGCCTCGCCCACTTGAGTG
TGTTCTGGGGATGCCTTCCTAATGAGCCCCATGCCGACTCTGATGGCTGCCGTACTATGTCTTACTCAGATGTGCCCCTCCTCATTTCTAGACC
TTATTTCATGTGCATAAGAACTCTGTCTTTTTAGATTCCCTAACACTGTGCTCAGTTAAATTCCTTTTCATTCTTGCGTACTAGGTGATTACCC
CAGTTAGCAATAGAAATATGCAATTAGTATTAGACATAAGAGGAAACATGTCTCTCCCGTTCATCTCTTACTGAGCTCTTGCTGTGTCTCACAG
CCAATCATATTCAGCTCCACCAGGGAGGCGTTGGTATCCTAGTTTTCAATTGGGTTTGATGAACACTTGGCCAAAAACAGCTTGTCTGTCTACC
TTTCTTATGTACATGCACACACACATATCTCCTAATTACTTTCCCCAGCCTACACTTCTCCAGAAAACCAGGCTTCAGATCTCGCTACTTGGTC
GACTTTACCATTTGGATACCTGGTAGGCTTGCTGAGCTCAAAGTTGAATGCTTGATTCCCTACTTGAAGTTGTCCACTCTTACAAAATGGTAAC
CCATCCCCCAGTTTCTCAGACCAAGCGGTCTTCAAGTTATTCTTGACGCTCCTCTTCTTGATCACCACTTATAATCTACCCTACTCGCTATTTC
TTCAAACTAATTAGAATCTACTTGCTTGTTGCCACCTCCACCCCATGAGCCCTGG1ATAAACCATCCGCCTCCTAATGGCTGCCATTTGCATGG
GTGATCCCTGTCTCAAGCAGGTATTGCTAACTGATTACAAATTTAGGGTTTGCTCTATCATTTTTTTTGTTAGATAGCATTTATCTTTTTGTAC
TTTTCAAAGTAGTTTTCTCTTCTTCACACTCACTAAAAAATATTTCAGACTAGTTTAAATGTTTCTAATCTAAAAACACAAAGTCAAAAAATGC
TCTGAAAGAACCAGGGGAAAATGAATGGGGGTGGGTGGGGCGGTAAAGTACTTGTCATACAAGCATGAAGAGCTTGAGTCCCCAGAACCCACAC
GACAGCTCAATGCAGTATAGTAGTGCAAGGCTCTATAATCTCATTGCTCCTGTACAGAAATGGGAGGTAGGCACTGGAGACTCCCTGGAAATTT
ACCTGTGGTCCTGAGCGTGTCAGCTCAGTGCAGTTCTGGATCCTCTTCTCATCCGGGAGCCACGCATCACTCCTGCCATGATTTACTGTGATAT
TTGAACGGTGCTTGTCACCAACCAGCAGAAGTGTTGCATGCCAGCTCTCGTGTCCGCTAGACCTCCCTCCCCCACTGCTAACTGACTGGGCTCA
TCCTCCATCTCCTGCTCTGTCCTGAAATGGCTCATCTGTCCAAGGGACCTGATTCCTTAGCACAGTCGCTTTTCCTAGGTTTTCCTGAGGCTCC
ATCATTCATCTTTTTTGTTGTTGTTGTTTTTAAGTCTTGAGTTCAGACCCTATTTCACACATCTCATTGTTGCCATCATCACACACTCTCCTTC
CCTCCCCATCCTAGGTTTGTATCTCCTTTTCCCAATAAAATGCAAACCCTCATTGCCAATAACACTAGAAGTGCCTACTCAGTTGATTGGTCCT
ACAATACTTCCAAACACATGGGGAGATAGTATGGTTTCAGGATGACGACGCCAGTATCAGCCCTACCAACTTAACAAAGAGTTGCGTTTTCTTT
TTATTTCTTTAACCAAAATTCAGCAGGGAATAATCAACCAGAATAGCGTTTTCATGGGTTACATTCTTTTCCTTCTAGGAAACTGCGTTACCAT
TGAACTATAGGGTTAGAATACTTTGTTTATGATGAATCTTAAGAGTTTTCCTATTCCTGCTGATTTTGTTTTATTTTTGAATGGTGGCATGTAT
CGGCCTCAATTACCTTCCATTTGTGTGAGATAAACTGGACGATTTGCCAACTATCATAAAGTCCGTTTGCTTTATTACCTTTTAATCAGAGAGA
GGAACAAAGAGTTCTGGGATGGTTATTCTGGAATGTGAACCCAGTAAGCTCACGTTGTCACATGGGGTGTTCCATTTCTATATTTGGAGCCCTC
TTAGTCTTCCTCACAGTCACAGAGTACACACATATATGCTTCTCGCACATAGGCTTCGTCCTGGCTCTGCCGTCACAGACACGAATGAGTTTAT
TCCTCTGCCCCGAGGTTACAGAGAGTAGCCAAGCAGCAGACACGTATGAGATGATACTGCGGTGTTTCCTTGGAATTTGGGGAGGATGCTCTGC
AGTGGGGTGCATATGTGTATGTGTGTGTATGTTCCTGAAGTGGGTGGCCTTCCCTGAATGCATTCCTACTGTGTAGTCATTCCAAACTTCTGAT
GGTGGAATGCCAGCATCACAGAGCACTTTTCATACTGGATGTCAGAGCCATGGCCCCTTCACAACACACGTGCTTCACTCTCAGAGCGGTGGGC
CTGTCACACTGCGTGTGCCTCACAGATAACATAATCTTCCAAGCTGGTGATGTCATCCTGGAGAGACAGAGCCAACGATGAGCCCCAGGGGATT
GTTCCTAACCATTTTAACAAGTCTCAGCCCTAAAGTCTTTATGGTTCTTATCAAGTTTTTTGACAAGAAGTGGTAGATAACAAATACTTTAAAT
TCAAATTAATCTTGAAAACTGGAGCGAAGTGCCAAACTCTTCAGCCTTCATGTTGAACAGAGACACACACATCCAGAAAAAAAACAATGAATCC
ACAAAAGTACAGAGCAGAGGGGTGAGTCAGCAGCAGTACATGCGGAGAGAGTAGAGTTGACGTGCCTAGCAAGAGCTAGCAAGGCCTGCAGCTG
CCAAAGAAGTCGCTCCTCACTAGGCAACAGTAATGGAAATATGATGTATAACAGCCAAGAGGTGATAGTCTCATGGCCACCCTGCAGGAAGATC
ACACTAGATGCGTGCAGCCTGCTGGGCAGAGCACAGTAGTCGGCTGTGGGCGGGGCGGGGCCAGATCAGGATGGTTGTGTGACCACACTGGAAT
GGCTTACAGGATGGTCCTGGCTGTCCTCGGTGTTTGAATAGCTATTATAAGAAAATGGAAATGGACCCCACCATCACAAGACAGGGGAAAGAGG
GAGCGGTGAGCTGAAGTCCCACAAGACACCAGCTTCCTGCGAATCACAGCCACCACAGGACGGGGTGACTTTGTCGTCACTGCTCTGAACTAAC
CTGAAAGACGGTAGAGGAAGAAAGGGAGGCTGCGTGGGCTTCAGCTTCACAGCCTCGGAGTCTCTGGCTCTCCATCCCTGTTTTATATGGCATT
AGACAGAGTTTTGCTTAGTAAATCATACCTTTGTAACAAGGGCTGATCAAGATTTGGGTACAAGGAAGTTATAATTTCATAATTTCATGATAGA
TAAGAAAATATAACAATAGATGCTAGTGACTTGCTGGCCATTTTCTCCATGGGTCAAAGTGCATGACTTATTTTTTTACACTAGTATGTCAGTT
TATTAACACAGGCCGAACAGTTTAGTCACAGCTTGAAAGGGTTTGGTTTGGTTTCGTCCTGAAAGACCACGTACAGAGTGATACCAGATTTTTC
CAACAACTTGCTGGCATTATCCTAGAAATCAGTAGAAGTTTTGGTGTTTACCCCTCCATGCCTTCGTCTACATCATGCTATGCAGATGGCACAC
TGCTTTGGTTAACCTCACTCTGACACGCAGATCGTGACTTCTCTTCTGCCATGCTCCTGTCTGGGGGCGTGATGTGACCGATGAAGTGTCACCA
AGAAATAAGACAAAATTTCCCAGGTCTACTCACTGGCAATTCTCTTTATTTAGTAGGGGTTTTCCACACGAAATTGCAGGAGAAGAGTTGAAGT
GCTCTTTGTCTTGTGTACTTTCCTCTGACTTTTCTCCTTCCCAGAGTGGCCCACATTGCCTTGTAAAGGAGCTGTGTTGACCATGATACTGATC
AAAGTCAGAGTGCGTTCTGCCAGTCAGCTAAAGCCTGATTGCTCCTCTGCAGTGGACTTCTGTAGTTAAACTCTGTTTTCCAAACATGAAAACA
CATAAACAAGGACTGGAGATATGGCTCAGCAGCTAAGATCACATACTTCTTCTGCAGAAGACCCAGGTTCCGTTCTAAGCACCCACATCGGGCA
ACTCACAACTGCCTATAACTCCAGCTCCAGGGGACCCAACACACTCCTCTGGCCTCTATGTGCACCTGCACTCATGGGCACATATTCACACATA
TATACATAATTTAAAATAAAAATCTTTTAAAAATTAACGAACATATACCCAGAGAGTAAGTATTTGTCTCTAAGAAGAAATAAATCGGTGATAT
TAATCTGAAACAAATTTCGACATCACAGAATCAAAAATATTTCTGATTATCCTAAATTAAGATCAAAATCATTTTAAGGGAATTCTGGAGAGGT
GGCTCATTGGCTAAGCTCTTCTCTGCTCTTGCAAAAGACCCAGGTTTAGCACCCAGGACCCACATGGCAGCTTGGCAACTCACAGCCATCTGTT
GTCCCAGTGCCAGGAGACCTGACACCCTCTTCTGGCCTCTGCAAGCACCTGCACACACATGGTGCACGTATTTCACGGAAAACAATTATAGACA
TAAAATTCAAATTAATTTTAAAATGTCATTGTAAGATCATGCTAGATAAATTTTGTATAAATCATGTCTGTTTTCAGACAGGGATTCTGTACAA
ATCTAACATGCATTTTAGACGACTTAGTTTTGAAGTTTACACAAACTTTTTTTAAAACTTTGCTTAAAATAGCTAATTATGACTTCATTTGCCT
GTTTTGGCCCTGCCCCCCATGCCCAAAGCCTGCTGACATCCCCAGGACCAATAGTCCCTTATTCTCAGTACTATAATAAGTACTGAGCTCCCAG
GGCAGAGCCTGCACTGCAGTCACTGAAAAGCACTGTGTTGAGTACCCAGACCCAGCCTGGATGGGAAAAGTTAATATCATTGCCTAACATGAAG
GTTTTCTTTGTCTCTAAATTTTGATTTTTCCATGCTATCAGAGGCCCCCTTGCAACAGGTAATCTGAGTGTTGTCTGTTTTCTCCGTCCGTCAT
CGTGGTTAAGTGTATTTTAGATGCTCACAATTGTAAAGCTAAATTGACTTGACAAGGTTCTTTCCGACCCAAATTCTGTGATGTCCGACTCTTT
TTTTCTTCTTTTATTTTGGATTTGTGATTGTTGACCATTGTCCTGTATGTCTTACATATATACTTTAGGGAACCATAAGCATTTTAGAGCTGGA
AGCCATGCTAGCTGTGGGCTAGGACTAGACATTTTGCAAAGAAAGCATTAGGAGACCAAAGTGGTTAGTGATTCAAACAAATTCATAGCAGTAG
CTAAAGACTAAAATTCTGACCATCTTCAGAGGACTAAAAATAATCAAAGTGTTATCTGAAAATTTCTAACTCCAAGCCAGGTATATATATATAT
ATATATATATATATATATATATATATATGTATGTATATATATTTACCCCAAACAAATTAAAGCTTCCTATAATTCTGTACTCATATATGTATAT
GGGGTGTGTGTGTGGAGAGAGAGAGAGACAGGGAAAGAGAAGGGGAATTAAATATTTTTGATAAACGTAAGCTTTGATAAGATCTGCCTGACAC
AAAATACAAAATGCATTTGGTATAAACAGCATCATTCTCCCTTTATACCAAAAACGGAAATTTCTTCGCATTCTATACATTTGAGAATGACACG
TCGGGNNNNNNNNNNNNNNNNNNNNNNNNNNNNNNNNNNNNNNNNNNNNNNNNNNNNNNNNNNNNNNNNNNNNNNNNNNNNNNNNNNNNNNNNN
NNNNNNNNNNNNNNNNNNNNNNNNNNNNNNNNNNNNNNNNNNNNNNNNNNNNNNNNNNNNNNNNNNNNNNNNNNNNNNNNNNNNNNNNNNNNNN
NNNNNNNNNNNNNNNNNNNNNNNNNNNNNNNNNNNNNNNNNNNNNNNNNNNNNNNNNNNNNNNNNNNNNNNNNNNNNNNNNNNNNNNNNNNNNN
NNNNNNNNNNNNNNNNNNNNNNNNNNNNNNNNNNNNNNNNNNNNNNNNNNNNNNNNNNNNNNNNNNNNNNNNNNNNNNNNNNNNNNNNNNNNNN
NNNNNNNNNNNNNNNNNNNNNNNNNNNNNNNNNNNNNNNNNNNNNNNNNNNNNNNNNNNNNNNNNNNNNNNNNNNNNNNNNNNNNNNNNNNNNN
NNNNNNNNNNNNNNNNNNNNNNNNNNNNNNNNNNNNNNNNNNNNNNNNNNNNNNNNNNNNNNNNNNNNNNNNNNNNNNNNNNNNNNNNNNNNNN
NNNNNNNNNNNNNNNNNNNNNNNNNNNNNNNNNNNNNNNNNNNNNNNNNNNNNNNNNNNNNNNNNNNNNNNNNNNNNNNNNNNNNNNNNNNNNN
NNNNNNNNNNNNNNNNNNNNNNNNNNNNNNNNNNNNNNNNNNNNNNNNNNNNNNNNNNNNNNNNNNNNNNNNNNNNNNNNNNNNNNNNNNNNNN
NNNNNNNNNNNNNNNNNNNNNNNNNNNNNNNNNNNNNNNNNNNNNNNNNNNNNNNCCGTGTTTGCTGCTCTGTACTGGCTATAACCTGCACAAG
TAATGGCCTCAATACAACTGTTTTCTAATAAAAGCATCCGTGATGTTATACCTCTAAACTAAGATTGGTTTATGTAGGTCTGCCATTGAGAGTG
GTTATGGGAGGATTCCTGTCCAGCATTGGGACTGTATCTAAAAACAGCAGTCTAGCTAGAAAAAAACAGCACCTGTACAAAAAAACAAAAACAA
AAACAAAAAAAGCAGCAGACTCAAAATAGGAATCTCACAGGTCTAATGGGAATCCTGAGTACTTCTGCTGCAGAAAAGTATCCTTAAGAGAGCC
CAGGTGAAATAGTGTTCGAAAGAAAAACAGGGACATGTTGTGCAAAAAAGATAGACTATTGCTTTGTTTGTAAGGAGATGGGTCACCCGTACGC
GTTTTAATAGAGTGGTAATGAGCATCACTAATCCCTGAGCTTCAGAGCACAGACTCGGCGTCTGTCTGCAAAGGGGGCTGAGTTGGAGCACTGT
TGTGATTGATTCCTCTTCAGTTAGACTTAGAGTTCAAGCTAAGATGGATAGGCAAGGCAGTGAGATCAGAGGAAAGGGCTGAGCACGGGGGGAG
GGGCAGGGGACGAGGAGGGAAGTGCCCTGGCTCTGAAATTTGGCAGTTAAGTGGAGATAAGAGGCAGCGCACTCCCACACACTAGGACGGTTTT
GGTACAGTGGCTCTGTTCAACAGGAGGCAACGTTAGGTTTAAGAAAAAAGGTAAGCTGGGCGTGGTGGTGCACGCCTTTAATCCTAGCACTCGG
GAAGCAGAGCCAGGCGGATTTCTGACTTCAAGACCACCCTCGTCTTCAGAGTGACTTCCAGGACAGCCAGGGCTACACAGAGAAACCCTGTCTC
GAAAAACCAAAAAAAAACAAAACAAAAAAAAAGAAGGAAGGTAATTAGTTAGGCTTGGGCACATGGAGTGATAAACTGCTGTGAACAGAAGGGC
TTCCTGCTAACGGCTAGAAATGTCACACATGCTTATCTGAGAGATGAAAACACTGGGTTATTGGAGGGGGCTGTGAGAGCGAGCGAGCACAGCC
CGGGCATCTGTTTGAGGACACGACCCTAAGCAGACCCAGACGTATCAGCTCACACTGCTGCTGGCGCTGCAGGCGGTTGTGAGCCTCTCCAAAC
AACGCGGCCATGAACAACCAAATTCAGATCCACTGCAAGAGCAGCAGGCTCTTAACCAACAAGCATCTGTCCAGCCTGTAGACTCTAAGTTAGT
ATCATATGGAGTAGATGACACAACTCCATCTTGTGGATGGATATCAGATAATGTGATGACTTCCAGAAAGAGACTAAGAGTCCTGGACCGGCGC
TTGTGAGCTCTTTCAGAAGGCGAATGTAGCCAACCACCTCGTGATGGGGGAGAAGGGAGGTCAGAGGGACCACGTTTCAGGGATTGTCATAGGT
CAAACCATAAGTGACTCATGGGTTTGGAAACTTAAGGCAGTCAGAACCGTTAAGCAACCTTTATTTGAAGACTAGTAGAAGTACTTAACTTTCA
GAAGACTTCGATGTGAGAAGCTGTTTCTCCCTGGTGACTAGAGTTGTTCTTGAACGCTTGGGTGTAGAGAAAGGAATTCAAGCAACACTGGGTA
GACTCTTTTAAGAACCTTTCTCACAGACTTAGAAGAAGAAAAAAAAAAAAAAAACGTCAAATGAAACAAACAACCCCCCACCCCAAGCCAGCCC
TGTTTTCTTGGAGTGGCACCTGCCGCCATGTGTTTGAATAAATGATAGCCTTTACCATCATCAAGAAAGGGCTGCTATTTTTAGAATAAGAAAG
CAAAGGAACTATGTGGATAGCTAAGGGGAAGGGTCATTTAGATGCTTTGTAGGGGTGGAGAGTAATTAGGGGATCTAGAATAAATATTGTGGGT
AAAACAAGATGGCTTTTCCTGGAAAAGGGAAGAGACACAGTTCTCTGAATTAGTGACAAGAACAGGTCCTGAGCTTCAGTAACAGAAAGGAGAG
ACATTTGTGGAGGACCATTGTGGAGGCTTCTCGTTAGATCTCAGGAAATCCCAGCAGCAGATGTCTGTGACGGCAAGAAGAGATAAAGGAGAAT
TATTTTGCATCAAGAACTGTTCTAAGCAATTTAAATTATCTCTTCTTAATCCTTCTGAAAACTCAGAGACTATGACATTGAAAGTTAAACAACT
TTCCCAGAGCCTGATATCAGCTTGTTATGGAGGGTCTAGGATTCAGAGCTATTCTGTCTGACTCCAACGCCTGTGTTCTTATGGTGAGAGGACT
CACTAGTTTCAGGTCTTCGAAGTTCACCCCTATATCATACCACGATGAGAACTTTGACGGAGGTCCATCTGTCCATCAGAGAAGGATGCTCTAA
TATATTGGTTCTCAACCTACCTAATGCTGTGACTCTTTAATACAGTTCCTCATGTTGTGGTGACCCCCAACTATAAACTTATCTTTGTTGCTAC
TTCATTGCTGTAATTCTCCTACTGTTATGAATCATAATCTAAATATCTGATAGCAGGATGATCTTGGGTAACCCCTGTAAAAGGGTGGTTCAGC
CCCCCAAAGAGTCTCTACCACGGGTTGAAAACTGCTGCTCTCGTGAGAAATTGTGAGGCTGAGAAATTGGGGTGGAACAAAACTCTAGACCCTG
TAAGTCTGACAGAAGTTAAGATAAATGGACAGAAGACAATGTGAGGCAGATGCAGGAGACAAGAGGCCTCAGGTCAGCAGCCAACTGGAAACAG
GAGGGAAGGCAAACGAGGGTTCTGACTTCATGGGGACAGCTGTTGGCTTGACTTGACTTTCTGCTGGTGATGACTCAACAGTCTATTTCCACAG
CTGCTGTCATTTCTTTGGAGGTTTCGGTACCAATTCTGGTCTAGAGACAAGACCAGGGTCCTAGACACACAGTTAAGCTTAGGTTGTTCTCTGG
TATTTAATAAACAAGCTGTAACTCAAATAGCTTGTTGAGAGGCTGTGTTGGGATCCAGGTATCTTTAAAGGCAAAAGAAAAAGCATATATCACT
TTAATTTCTTCCTACCTAATATAACTGTTTACACTTTAGTAGTTTGCCTTCGATAAAGAACATTTAGTGCTATCTCAATTGTTAGTCACGCCCA
CGTTAACAAGGTAAAGTTACAGGAAGTACTGTGAGCACAAGGAATAGGAAGGACGGGTGAAAGGAACGCTTCTGTTCTTATAGTCCTTCCATTC
TCACATAGAAGATAGGACATTATTGATACAGGGGACATGTTACATACTTAACAGTTATTAACATACAGAGAAAAGATGAAGCAGGGCAGAGAGC
AGAAGATGGGGTGGTCGGAGCTTAGGTGGAGGAAGATTCGAAAAACACTTGTCTGAGAAGAGAGCTGTGCACAGACTGGAGCTGGACAGAAGAC
AGCAGACATCCTGGAACAATGTCCCAGCTAAGCACGCAAGTCCAAAAGCTCTCTGGTGGGAGCCCTCTTGGCAAGTTCTGCAACAGCAGGGTCT
ACTATAGATGCATTGGAAATACAAGAATCAAGGTTGAATCAGGACCCCACTCCCCCAAAACCCCCGAGGCTCCCTCAGCCCCTGTCCAGCCTTT
TTAAGAATAGAGACATTAAAATGTTTTATTTACTTCTGTTCTTTAACATGGGAAATTGTAACCATGTATTCCCAGATCTGTGTGTTGAGGCCCT
TGTGCTAATCACTCAATTAACATGGGAAATTGTCATGTATTCACACAACTGTGTGTTGAGCCCCTGTGCTAATCACCCAGTTCCAAGTGTTTTC
ATTTTTGGAATTTTGAACTGAGGAATGATGACTTAGCATGTCCTGACTTGAACAAAACTCACTCAGAACAGGTTCTGAGGAGGCAGGCAGGGAG
CCAGGGAGTAGCCTGAGAAGTGGTTATTTGGGGCTTCGTTTGAAGATCTGGCTTGATTTTATTTATTTTCTAATTTTTTTCAAAAGAAGAACTG
AAAAGGCAAATAGAACAGTGAAAAGAGAAAGGTAATAAAGAGGACCCAGCCCAGGGAGCACCCCTTCACACTTCACCTTCTACCTAGACGTGTA
CCTGCCTGGCAAAGGGCTGGCAGAGGGAATATTTCTAACACCATCCTATAAATGACAAGCCACATTCCTATGCTCTTATGGAATCATGGAGTAT
TAAGCCCCCACACAAAGGTGAGGATTTGTCACATGTCACCAAAGCATTGAGACCCAATTGTACCTGAGGTACCTAGGGGCGCTTGACCTCTAGA
TATTTATGATGCATGTGATAAGTTTCAAAATTAAAAGCAAACCAAAAAGAAAACAAGGAAGCCCTGCATCAAGGCTGATCAGGTGAAACTTTCA
GAACAGGGGTACATGCAGGTAGAGGTGTTTCTCTCTTCTCTTCTCTTCTCTTCTCTTCTCTTCTCTTCTCTTCTCTTCTCTTCTTTTTTCTCTT
CTCTCTTCTCTTCTCTTCTCTTCTCTTCTCTTCGTGTGTGTGTGTGTGTGTGTCTGTGTGTGTGTGTGTGTGTGTGTGTGTATAGACTAGAGTT
TATTCAGGGCCTGGGGAGGGGAGTTAAGAGGGTACTGGAGTCAGAGAAAGGCAGAGAGAGGGAGAGAGTAGAGAAGTAGTTGCTGGCCATGACC
ATGTGGAGAGAGAGGAGAAGGGAATGGGGAGAGAAGGGGACCAAGAGGGAGAGGCAAGAGAGCAAGGCAAGAGTGAGGTGTTACCCTCTTTCAG
AGCAGGATGTCTGCAGGTAGAGGTATTACCTTCTTTCAGACCACAGGTGTGGGCAGTTAGAGGTGTTACCCTCTTTCAGGGCAGGGGTGTAGGC
AGATAGAGCTTTTACTTGCCTGCTCTATATGAAACCCTCCTATCTGAGTGGTGGTTTGCCATTGTAGTTCCAGCCTGACTCTTGAGATGTTGAT
CACACTAGTAGGGAGTGTCAGGAACAGTGCAAATCCATGAACCCTGGTGAAGGTCCAAGTGTGCCAGCAATAGTGGTGAATCAAAGAGGTTTTC
ATGTATCCTGTCCCTGCTTTGCATTCCCACACCAATATTCAGAGGGCTAAGAGTGAACTCCACAGTGTTCTGCATCTTCGCTGTCTCTCCAAAG
CTTACATCACTTGCTCAGGCTGTCTAAACTTGCCTTCTTATCTGCAAGTTAGGGTACTACTAGTGCCAACCCTGCCTATCTCAGGGTCATCAGA
AAGCCCAGATGTTCTCCATAGATAAGAGGGAAGGACAAANNNNNNNNNNNNNNNNNNNNNNNNNNNNNNNNNNNNNNNNNNNNNNNNNNNNNNN
NNNNNNNNNNNNNNNNNNNNNNNNNNNNNNNNNNNNNNNNNNNNNNNNNNNNNNNNNNNNNNNNNNNNNNNNCAAGACCGACGAGACCAGTGTC
ATGAGTCCTTCCTATGCCATTAGCTATAATCCCGTTTAGCAGGCTTGATCTGTGCTTCCTGGTTGCACAAATAAATAATAAAGAACAGTAAACT
GACTCCCTGTCATCCTTGAGAGGACATACATTATTAAACCAATATACTATTTCGTCTCTCTCCCTCCCTCCCTCCTTTCCTTCTTTATAATTTG
ACTTGACTCAAGAAGAGTAAGCAAGTAGCCTTTTTTTTTTTTTTTCTTTAAATGGAAAAGACTTTCAGGATGACAAGGGCACTCTTGCTCCTCC
TTTTCACACCTAGCATGACCCCTTTCTCACAATATGCCTCACCAGTGCCAACAAACAAGCAGGACTCTCTGTAGCTGTACCTCTGCTCAGATCG
GTGATTACACCCATGGCGCATTAAAGCCAGTTAGAGAGAGAAAAATAACCGAGCCGAGTGTTGACATGCTGCCGTGGAAATGTGAATAGACTTT
GGGGAGGCAATGGCAGACCCCGAGTTCAGGGCACCACCACCTTACCCCAAACCATTGGAACCAGGTGGTGCATGTTACTTGAGCTTGCAAAGGG
CTGGTTCTTTCCCCGGTGATATGGGGTGCCACTACTGACCCCACATCGCTATTGTGGGGATTTCTCCCTCCTCGGCTGTAGAGACAGAATATGC
ACATAGACTTAGATGAGCACGTGCTCTGGGAAATGAACAAGCATGCGAAGTAAGGCGTTATTTAACTCTTACTAGCCAGTCACATATCACTTTC
CTACCCTATGTCCTCCAGTCATTCTCGAAAAGGGCACAGTCGTGGACCCATGATGGGCTGACATTGTGAGGAACGTGGGAAACACAAGACACAC
GGGCTATTGGTGCAGCTGCTTGAAGGAACTCCTCCTGTGCGCTGTTAATGAGCAGGATGAGCGCTCGAGAGCACTGAGCACCCTGCGAGCATGA
CTGCGCTCGACCTGCTGAGAATGCCTTTCGAGCATGCGCTCTACCCGCCCGCAGAGAACGCCTGCCAAGCTGCCTCATCCTCCACTTGCTCCTT
GCTTACTCAGCTCAACTCTGCCTTCAAATCTCAGTCCGCATGAGTTAAACACACGGAAGCTTTCTCTCACTTCCCAACCGTGCCAGACACTGTT
ATTAGACATTCTGTTTGATGAGTTCTCCAGTTAGGTTTTACCTGTATTGTTGAAGTTATCCAGTTAGCGTCAGTCCCACTGTTTAATTCCGTGA
GAGAAAGAAATTGGGCTTGTTCTGAACGAGGTGTAGCCCCCACTCTCTGACCTTCTACAGTGTGGGGCTCTTAGAAAGGGGCGTAACAAACTAA
ACTGGTAAACTTTAGTACTCAGTGAAATAATGGGCTAGATAAGAAACAATTTTCTGAGATTGTTGATATCATCAGGAACCAAGTGTTGTCTTAA
CTCCTTTAATCTTAAAACAGTCCGGTGATACTTCGTCATTAATTTGATTTTTGAACCTGGAGAAGCTGACACACGTCACTCCACGACAGCTGGG
GGATTTGAGCCTGGCTTTGAGAGATCTTAACCTAACCATGACCTGCTGTCGTAAAGAGCAAGGTTGGGTTCACAAGCAGAGCCAGGCCCTGTTA
GAACCCTGAGGATGTTCGAAAGAAAAAATCAGCACAAAAGAATGATTTTAGGTATGATGTCTTACATTTATGCTGCTTCTGCTTTCTGTCAGAG
TACGTTAGCCGAATTCACCCAGAGAGCAGCCTCGCTTTTGAAACTGTGATTCTGACGAAGTTCTACGCCACTCATCTCTTGTTACCCCTTTGAA
GAAACAGCAAATGCTTTTCCACAGTAGGTCAGGGCTATCTGAGGTTAAAAAAAAAAAAAAGTACGTGGCTGACTAAGAGGGCTATACCTGAGCC
CATGACTTGTAGTTTTTATTCTAAAAGGAGCTCTGACCCATGGACCCAGAATTCTAGAAGAGTTTTCCTTCATCAGGGAAGGCCAAGGAAGTCT
GATTGTCCCCAAGAAGGGCAGCTGACACTAGAATAACATAGTATTTTGTAGAAAAATAAAACATACCAAAAGAAAGAAAATAAATGTATTTGTA
GAAAACTAACAAAACACTGCAATGTAGGAAAAAAGAAAAACCTTCCCCTTGGAATTGATGTGGGCCAAGTATCTTCCAGCCACTTGCTTCAAAT
GGACCTATTAGACATCCTCTAAGTGAGGGAGCATCTGACAGTCTGACATAGCCCCTGAGGGTTGTCCTCTCCTCTGCTGAGTACTCTTGTGAAG
TGTTTGTGTACTTGAATGTATATATTCCTCATTAACAGCCCCTTGAACATTACTGAACAGGTGAAGAGACCAAGCAAGGTCACACAGACTGGAA
CTGCCTCTCGCCCCCAGCCAGCCTAGCCTGTCTCTGAAGTCCACACTCTTCCCATTCCGAGCAGCTGACTATCCAGGATGGCTCCTTTCGCTTC
TTACCTGTGCTTGAGTGCTTACAATTAACAGTCTCTGTTCAGATTCTACTCTCAGAAACACCTTCCTAGTAGACAGTTGCCCTCTATAAACTTT
ATCTTCAAGAGACGTAATACTTCCATTCCCTTCCCAGAATAAGTTTCTACATTGGTGTTGAATACCTCTTGGCCACTATGGCATGATAAATGAT
GGTTCCAAGAAATCGTTGTCAAGGTTTGCCTGTGCCGCACAGCTGTCCCCACAAGTAAGGCTTTCTTTCTCTCAGATGGCATCTTGGAAAGTAC
AGAAAGCCCAGGGCCCTCCCTGTTTTCATTCTGTGGTCTGTGTAAAAACCAAATGCTACCATCCCGACTACACTCTTTCAGATCGATCAAACAG
CACATTGGTCACTGGCAGATCTTTCAGGTCCCTCACCTCAGAGTCCTCCCAGTTCCTCATTCTTGCCGCCCTTCAACCATGAAGTTAGTCGTAA
GAAAAACAGTAAGTGCTTCTTGAATCCACCTCCCACCTCTTTCCATCAGCGCCAGTCACTAACTAGCCTGTCAGCGCAGCTTCAGAAGGCTCGG
ATTCCAAACTCTCAGGCCTTCTCCCATGAGGCCTTTCTGCTTAAGTGGAAAGCCTGCCTGATTTCACCCAAGTGAAGCGCTTCCTTGAGCCTTC
CTGTGCTGTGTTCCTGTGCACACTGTCAGTTAAAACTGGGATCACGTGACTCGCTGCCTCTGCCGATCATTAGCAGACCGATGTGATCAGCCAT
CCAGAGCTCGAATCAGCCATCCAGGGACTTTGTAGGAACACCATCATCAGCCTTTGAGCAAAACCAGAACTTGGTATTCATTCTCCTACACTTA
AATGGGGAAGTATTTGGCCTGTGAAGAAAGACGACTTGCTAAATTCACTTCATTTTAATATCAGAGAGAGTTTTAAGTTCTGTGCCTAAGAAAG
CAACTCATCCTTTGGGACAGTCAAGGTTAAACTTAGTACAAAACCTTTCTCTGAATTACGTCACTCTGTAACTATCCGAAGGCAGTCCTCCTGA
TGGCCTCGCCGCTCTGGAAGAAGTATGCCCTGGTCTGTTTTATCTTCTGTTGGTTGACAAGCAAATTACACAGGATTAAAGTTTGCTTGGGCTG
GGGTTTGAAGCCTGGCAGGGTTCAGGTTGTTGGTCAGCCATATCTCACAGGAACTTTGCAGCCCACCACAAGACAGGAAATTACATAACAAGAG
AGGCCATCTTGGCTGAAGTATCTCTTCCTCTTTGTATAGCTCACAGCTCCGTAGATGAGGGCTGGCTCTTATGGTGTATTCGATTTTACCTCCT
AAAGATCAACTTCCAGACACCATCACTGCATTACATTTCTAGGCTCAAAACGTCTCATCAGTTTCGGGGTGGGTTCAGAAGCAACTCATTATAA
TGTTGTATCAGGGCTCAGGCAGGCAGGCCTCCTTGGGGAGTCTAGAGAGCTGCCTCGCTGGCCAGAAGGGAGACCCTTCGTTGTTCAGGGCAAT
GGTATCTTTTCTCCATACTCTCTGGGGAGTTACGCGAGCAGTGATCAGCTTCCCGGCTCTGACCATCAAAGGTTACACTGGACAAAATCCATAT
TGAGAGCAAACTCTGTAGAGCCCTGCCTCCGTGGAGTCTGGACCCCGCTGATAGTAGTGATATTATAAGTGAGCAGGCTGAGGAAGGCTGTGTG
TCTTTACAGGAAGCTCCTTTAGCAGATGCAGGCTCTTCACGTTCACGTTGACATTTATCCAGAGAGGCGACGTACCTCATGCATTTCTAACAAT
AGGTGGGATTTATGGCAGGTTCTGACTTAATCGAATTCAGAGGGGAGTAATGCCTCCGAGCTACTCATGGTGTGAGTCTCATGGTGTGATTTCC
ACGGTGTGATTCTCATGGTGTGGTTCTCATGTTGGGCCATCTTGACGAAAAGTTCTACACTGTAGAGGTCGGGATGGTCAACTAGACAAGAAAG
ACTTGGTCATCTCCTCTCTCCTGTCCTGTCCATTGCTGTTCTTACCACGTTACAAATACACAAGTGAAATGATCGCCTCACATGGAAAACTTAA
CTTTGTAAAACAAGAGCTAAACAACCAAATGTGAAACCTACAAATTTTTAGTCAGAAAGTTTGCTTTTTTTATTTAAGAAACTCACAGACTCCT
GAACATATACAGTATAATGTCAGAACCCATGCCTGGGGAAACTACTGAAGAGTAGTGGGTGTCCTGTTAGGTGATGTGGACCAAGCCATGGGCT
TATGTCATTAAAAACAGCCTCCAGAGCCAAGCCCCTGAACAAGACTACCTTTCTGGTAATCACATGACAAGGAGTTAGGACTCAGTCTTTGTTT
GTCTCTCTTACTTCATCAGTCACCCATTCCCTTCTCGTGCATGGTTTGCCCAGTTTTCATCACTGAAAATCGTGACAAGGTTTCAGAGAAGAAA
CAGTGTTGGTTAGTAAGGACCCTTGTGACAGTCCTACCTAATGAGGCATACTCTGTTTTCAGTGACTTGTTTCCTGGACATATAAACAACCCCC
ACTACCATTTTGATTTATTTCCATCCTGTCATGTGTTCATTGTATATTTTTTAAGTTGAGCTATAGTCAAATATGTATATATCTGCAAAATGTT
GTATTTATGCTGATTGGTTCCATGTTACAGTCAGGTCAGATGTACTAACTGTTGAAAATGTGCTTCTCATATAGATTTGCAACTATGTGGGGCC
TGCAAAGGTTATCGTTCAGTTGGTCACAAATGCAAAAAACATCCACCTGCACGCCCACAGCCTGGTCGGCAAGCACTGTGAGGACGGGGTATGC
ACCGTAACAGCAGGACCCAAGGACATGGTGGTTGGGTAAGTGGGCTGTGTGGTATGGAGGGAGCGGGAACACGCGGGTGTGAAATCCATAGGCC
CCTTTCCTTGTGGACCTGTGCAAAGCCTGAGAGGGTCTCACACACGCGCAACCAGATAAAGCCAGGGGAATGTGTGTCCTCTCCTTTGAACTGC
TAAGGAAATAGAGGTGACCAGATATCTGTCCTGCCTGAGACAATCCTTGCATCTGTAGTCTTGGCCTCTCAAGGATGGGTTTGGACAATGTTAT
AATTATAAGCCCTTGACCTAAGAGGCATTTGTGCCACTTTCAATTATATTTTTCTTCTCCTGGAATTAAAGATGAAGAAAAGAATGAAACAACT
ACCTTAACTATATAGAAATGATTACCATGGAGATGCTTTTTCCTTCCTTGAAACAGCATCTCCACTATAGTTTAAGCTTACCTTGAACTCACAT
AGATCCTGTTGTCTCTACCTCCCAAGTGTTTGGGTGCTCGGATTAGAGATGTGTACCCCCCCACACACACACAGAGCTCTGATTTTTGCCTATT
TGGGATTTTCTTAATAGAGTTCTAGTGGGAACATTTGAGACATGAAGCAGATAAGTAAATATTGTTTCAACTCTGCGCTACTTATAAAATGTGT
GCTTTTTAAGTCAACAAGACATGCAAATTGGTTTGGGCACTCATTTGATCTGGAACATAAGTAGAAATTAGTGTATTCTTTCAAAGTCAGTCAA
ATACAACAATTTTTAGTGAATGAAATTTTATAGAAGTAATCTTACTTCAAAAGAATCACAAAATATTTAATAAGACATAATTATGGGCTGAGAG
AGGATGAGTTTAGTTTGCAAGTATGATGGCCCAAGTTCAAACCCCTGCCCTCTCATAGCAGCGCTTTTCAGAGCACAGGCATTTATCCTCCCAG
CTCCTGCAGGGGAGCAAGACGCAAAGACACGAGAATCTGGAATCTCATGCAGTAGCTGGCCTGCTGTGGTGGACAGACACCAAACAGATCCCAT
GTCAAACCTGAAGTTCTCCTCAGACCTCCATATGCACAGCACATCACATAGTCAGCTCCGTTCGCACACATAAAATAAGGGCACTCACTATGCT
AAGGTTTTATATTTCATTATCCTGAAACACTAAAATAGCAGACAATGTAGTAACTTAAACAGCAAAAAATGATGTAAGCATTCAGTCATCTCAA
ATACAGATAACTCCTATTTTCCAGACTCTTAAAAAGCAAAGGGGATGATTCAGTGGGTAAGTGCACTTTCCACCAAATCTGAGAGCCTGAGTCC
AACTCCTGTAAGCCACATGGCAGGAGAGAACCAACTTCCACAAATTATTCTCCAACCTCCACATGCAACAAAGGTATAAGTGCACACACACACC
ATGTAATATAATTTTTAAATAAAAAAAAGTTAACTAAAATATTTTTAAAGCCAGAAGGTAAGAACTGGGGAGACAGGTCAGTGGGTAAAGTATT
TGCAATGCAAACTTCAGCGCCTGAGTTCTGAGCTCCAGCGCCCACATGAAAATCCAGGTGTTAAAAAAACCAAACTGATAAATAAAATAAAACC
GGGAAAGGGCAGAGCACAGCGGTGCATGCCTTTAATCCTAGCACTCAGGAGGCAGAGTCTAAGGCCAGCCTGGTCTACAGAGTGAGTTCCAGGA
CCGCCAGGGCTACACAGAGAGAGTCTGTCTCACTGCCCCCCAAAGCCAGGTGTAGTGATGCACCTGGAACCCCAATGTCTGGCCACAGGGATGG
AGCAGATCCGCGGGGCTCACAAGCCAGTCAGAAAGCACGGCCCAGTCCATGACCCTGTCTCAAAAACCCGAGAAGTGACTGAGGAAAATTCCCT
GCCTGTGTTCTCTGTGGTCCATGCAGATACATTGTTGTTAATTTTATTTAATTGTGTACATCATCATTCAGAGTTCTCCACTCTTACATCAAGT
AGTGTCTGGGAAGACCCCAGTGAATGTGTGCTTTTTTTAGGAGATTGCTTAGCCAGCCTTGATGAAGTCTGACTCTGTTGCCCTGCAATCTTGG
GAGGTTCAGCTTTCAAAGTCCCAGGCATCATTTCTTCATTTGACGACGAAGATGCTCAAGTGTGAGAAGCTCCCAGAGAGAGGGCCCTTCCCTT
TAAGTCATTCATCTCTGCTGCTTTTTCACGTTAGGGAGAAAAGTATCCGAATTGGAGGAAGCTCAAGTTAGTTCTCGTCGACTTCAGCTTGTCT
CGGCATCTCCTGGCTGCCCTGCTTCTCAATCTGCCGAAACTGACATGCAGGGTGACTGTCAGTTTTAGACAACTGATCGGTTAGTGTATTCCCT
GATTGATTGGCCACATCATAGCCAATCGTTTTCAACCATTTCCGTTCTTTTCGTCTTGCTTAATCTCTCTTACAATCATATGTTCTTAAGGAAA
TCACAGGTGAACTTTTCTATCAGTATTTCTGTCAGTAATATTTATTATTATAAAACTTGCAGAGTGTTGCTTCTCTGTTGGGTTTAATAATCTT
TCATGATTTAGAAGAAACTAATCGTGGCTGTGTCTGCTGCTCTGAGGTAGACACAAGGCCTTGGGTTGCTCTCCCCTGCAGCACTACCGCCACT
AAAAACACTAATGGCTGTTTATGCTGGAGCCTAGGTTGCAGCGATGGAGGTAAATTCAGTACCTGTAAGCAGAGCGGAGAGGTCCGTCGGTGTC
TTTTAGTGTAGTGGGGCACGCGGCTCTAGAGTTGGGAGTGTGCATTACTCATGATTTAGCAAACATTTTCGACATCCGATTCCTGACTAGGCTC
CCTGTGGTTTGATCTAGTCATAGCTGGGTGGGATTTTCTAAGGTGAGGAAACTTTCTCGGAGAGATGCAGTCGAGGAGATGCCGCCTGAGTGAT
AGGGGGTAACCACAGTAGCTTTTCCCACCCAAGAATCTCTCACTGTAGAATGTCTGCAGTCGCTTTCCCGGTTGGCATTTAGCTGAGAGAATTC
TGCTCATGGTATTTTCCCCAGACACCATTTTCTTCGTGATTCCCTTGTCTCTGTGTCTCTGAGTTTCTAACACGGTCCTACACCTTTTGCCTTT
TCTTCTGTTTCTCTTCGATGGAAAAGCAGCGTCCTAGCAGCCGGGAAGTCAGACCTCCTCTATGCTTCTGTCACTCTGCACGCCAGAAGGGATG
GAGGCCAACTTGCATCACTTTCTAAAGACTTGAATTCCTTTCCTTACAAAATCAGAAAGACACAGCCTCTCTCTATCTCCAGGCACTCAGTGTT
TAACCCTCTAGACCAAGCCCACATTAGCTAATGTTATAAAACAGCAGGAGGAAACTTGCCACTATCTCCTCATGGTATGACATCGCTTATTTTA
TTTAGTTCTCACTTGTAGGCCACAAGTTTAGGAAGGCAGCCAAAGGTGTTTCTTAGACTTGTCAATACTAGAAATAGAACCAAGATAACATTTT
CCAATACTACAGATTAGACTGAATATAGATTCACAAACAAGGCACCAGTCCAAACTATCAACATATGTAAAAATGACCCCAAGAAGACCAAGCT
TTGAACACATCAAAACCAAACCGACCCCCTTTGTTTACAGTGTCTTTCACACTTTCTTCTCTGTTTGAATTCTTAATAAGTTTAGTTTCTATTT
TTCCAAATTATTTTATCAGTATTAGAACTATCATCTCTTGGGGTTTGATTATGGATTTGATTGTTTTAATATAGGCTCATTAACTTCAGTTAGC
TTTCATTAGACCTCTTGTCTCTTATGCACTTAGTTAGACTTCACTGCCTTTCTTAATAAAAAAAAGAAGAAGAATCCTGTTTAGTATTCTATTT
TGACCAGAATGTTAATATTTTTAGCAACACTCTAGTTCTCTGAAATTTTTTGTTCAGTGGAAAATGTCTGTGCATTTCTACTTTGCTGTCGGCC
ACGTCCACCAAAAGTCACCACACCCTGTTTGCTTACTGGCAACCTGGGTTGAAAGAGATGTACAGTTCTTTTTATTTCCCCCTCCCAACTAATT
TATGTAGCTTATTGCAGTTGGTAAGCAGGAGAGCAGAGATTCTCAACCTGTCGGTTGCAACCCCTTTGGGCGTCAAATCGTCTTTTCACAGAGC
ATGCCTATGGACATTTATATTAAGCTTTATAACAGTGGCAAAATTACAGTTATGAAGCAGCAATGGAATAATTTTATGGTTGGAGGTCACCACA
GCATGAGGAACTGTTAAAGTGTTGAAGCATGAGGAAGGCTGAGAGCCACTGCCCTGGATGATAGTAGATATGAGAACACACAGGAGAGCCTTTG
GGCTCCCTCAGGAGAACTGCTACCTTAAATTACTGCTGGACAGATCCAGTGTAATTGTGTAGCTAAACACTAGCCCACAGGAGAGGCACTGCCT
AGAGAAGGTTGGACAAATATGGACTTAGGTTCAAGGTGTGCCGTACCAAGTTGGTGTATGCACTGTGAGACGAGAGCTGCTTTTGAACACTGAA
ATCAAGGTCTGAAACAACAAACGCCAAAGAGGGCCCACTGTGAGCCCCAACCCAGTGTTAGACACATCAAAATTTGAGCAACAGCTTCCAAATG
ATGATGAAGATGAAACATCTCACCTACTTCACCATCTTTATTCATCCCTACAGGTTTCACTCAGCCTCCGTCACTTCATAGAAAACTGATGCCA
GCCTCCATCCCATAGAGTGGGATTTCACAGAGCAGTGAAAAGCCAGGCCCTCCAGCCTCAGCATTCCTCTTGAGTTAATGGAAAGGTTTGTTTG
AAAAGTCCTGATTCCGTAGGGTTCGATGGACCCCCACATTTTTAGTAAATTCTAAAACAACACTGATCTTGCTACTTAAACACTCCCATGTTGT
GAATATGAGACGAAGAAGCAAGGTTGTGGTTTCAGCCCTTTTATTAGTCGTTGTAGCCTTTCTGTTTTTAAAATCTCATTGCTCCAACACTCCT
CCTCTCCAGTGTTCATTTCTCTGAATTTTGATAATCATGTGGCTACTCCTGATCTGACGCTGATCAGTTCTCTTTGGTTTTATGTCTCAAAGTC
GTCCCTTCATCTTCTCTGTTCAAAGGTGTTTTTTGAAGAGCAGAGGATTCTAAGTTGACAATATGTACTTTCATGTGCTGGTTTTATGTTGATT
CACCGTCTCAGGTCTTGACCTGTTTCCAGCAAGAGCTCTCTGTAGGTCTGCCTCGGCTCTACTGTTCCCAGAGTGTGATTGTTTCTCTAGCAGC
GTCTTGACTTCTCTTTAGCACTCGTAAGCACTGTGAGTTTTGATGGGTTTGAGCGTAGCTTTCTTTTTAAGCTTGAGCTTCTTAGTCGTCATAG
ATCCTTGGATTTACATTTCTTATTAAATCTTAAACCTTTTCAACTGTTAAGTTTTCTGTCACTGTCACTGCCCCTGCTCCCCATTCCTGTTCTC
TGTCACTTTCTCTCTTCCAGACTAGGGTTGAGTTGGCACAGTGACTAAGAGAATACCTTCTGAATAGTCAATCTGATGCCTCATGTATTCCGAG
GCTTCCTGTTTATGAGAATAGTAGCTCTTTCCCTTAGCCTAACAGGGCTTTCTCACAAATGTTTCCTTTGGATTTTTGAAAATCTGTGATGCTC
TGGATATAAATCCTAATCTTCTTAACCTCAAGTCTTTGCAACTGCAGAGCCCTAGCTGGCTGCCTGGGTTCTCCTTCCCATCCTGCAACCTAAG
CATTAAGCCAGGTAATTGTAAGAGTACCTTTCTATTTTTTTTTCTCGGATGACTGTTGTCTGTCACCTATCTCCAGACCATGACAATCGTTTTC
TCGTGTGTTTTGGCTATTTAATTCTAGAGGAACCGTCTAGGTCTATATTACTCCACCATGGCCTGTGGTGGAACACTGGTGTGTTGTTTACTAG
GGTAAACCCTTCCTTCATGATTCATATAATAAATAAGCATGATGCCTTTCTCCAGATGTGAAGCTGGGTTACGTGTAAGAAGTGCAGCCGAGGT
GATGGTCACTCATGTTCCCAGGAGATGAGCCTGGGCTCCTAGCGGGGGAGCAGTCTGCACAAGAGTGAGACCCAAAAGGGCAGACACAAGATCT
GTTAGACACAAGGACCTCCAAGCACATTACCACGTTGGGTGCATAATGTTTGTGATGCTCCCTCCCTTCAAGCTTTCCTGTGGTCAGCAGGCAC
CTGCTGAGGACCCACATGTCAGCCTGCATTCTAAGACCTGGGGATCTCTGTCCTGAAGGAGCTGTGGAAACACAGCATGTTGACTTCTCTGTGT
CCCTGTAACTCACTCCACATCTCGCCTTCTGTCTGTGTCTGTTTCCTTCTGCCTTCACCTCTTCTCCTCCCTTTCTCCAGTTTATATGACCTTT
GCACAGTAGCTTCTTCTCATGTGTGCAGGCAAGTTGTCAGATCTCTTTTATTGTCATTTTATATTACATTTACCGTGTGTGTGTGTGTGTGTGT
GTGTGTGTGTGTGTGTATGTGTATTTCTGCTTGTCGGGGGAGGCTATCTGTTCTCTCTCTCTCTCTCTCTCTCTCTCTCTCTCTCTCTCTCTCT
CTGTGTGTGTGTGTGTGTGTGTGTGTGTGTGTGTGTGTGTGTGTGTGTCAGTGTCAAAGCCCAGAACAACTTGTGGAAGCCGCTTCTCTTCCCC
TCCTATGTGGGTTCTACGGATTGAACTCATGTCACCAAGCTTGGCAGCTAGTGTTCTTACTGACTTAGCCATCTCACTGACCTGTATCATTTTC
TTCCTTCTACTAATATTTATTTTACTTTTAGAGTAAAAGTCCTTACAAACATCTATATGGCTCTGAGAGACCCAGGCCCTGCACTTTTCTCTTT
GAGTTCATCTGTCCCCTCTGACTCTGCTCCTTACCCTCAGCCCATGTGCCACCTTTCTGCCACTGTCAAAAACAGCAGAGTGGCCCTGCCATGC
GGTCTTCACATTCACCAGAGTGGTCCTGCCATGAGGTCCTCACACTCACCTGTCTGCAGCTCTGATACTTAGAATCCACTTCTTCTGACCTCCC
TCAGGACTGGCTCAGCTGTGATCTCAGGGTCCTGTCTGGGTTCTCCCTGTCTGGCTCTCCTACCCTCTCACCCCTCCCAGGCCTGTCTTCTTTT
TCTTGTTTACATGTATTTCTCTTTTAAGTTACACTGTGAAATCTATCATCGTGTACGCTAGCATGTGCATTGTGTGAGAGCACAGTGAAGCCAC
ACAAGCCTTCCCTAGTAAAGCATACGTACAAGGGCACCCGTACTCTGTGACTCCTGAGTTGACATCTAATATGTTCTGAGACGTAAGGTGATTC
AAGTTTTCCTCCAACTCTTTTAGTAACCCAGTTTAACCTGGTCTGACAAATCCACTTCTCTGATCAGTCTCGTTAGACGCCTCTCTGCAGAAAT
GTCAATCAGCTGAGTCCATGGTGCACCCCAGCCCTGCCAACAGTGTCTAGTGACGTACAGCATATGCCATATATCACCCTCATAAAGTCCCAAA
TTCTGATGTTCATCTGACTTTGGTCTCTCTAAGATGCTGAGTGCTTGTGTACTTTTTTCGGTGTGCTGTCTGCTGACCTGAAGCCCGCCCCCCG
GCCATGACCTGCCTGACTTCTCCTCTCACTGTTTTTCTCCAGCTTTGCAAACCTGGGAATACTTCATGTCACTAAGAAAAACGTATTTGAAACA
CTGGAAGCACGCATGACAGAGGCGTGTATTAGGGGCTATAATCCTGCACTTCTGGTCCATTCTGACCTTGCCTATCTACAAGCACAAGGCGGAG
GAGACCGGCAACTCACAGCTGAGCCAGCTGACCCAGCCTTAATTAAGGCTTCTATGTTCCACGATCACTCCACCCATCACCCTGCCACGCTATC
AGAGGGAACGGGATCAGTGCAGCCCGGTCTTTCCTTTCTGTGCTGGGCACCGTGGAGAAGCCGAGCCCACACACAAAGACTCTGCATGCTTGTT
CTCACCTATGTCTGCGCAGCCGGCGGTGCAGAGACGTGCATTTCCCTGTACTCCTCGCATTCTATCTGTGCCTTAACTCTTAGCAAGCGTAGGA
GAGTACATCGGTGAGCATGGGAGAAGACAATATTTACAATACTCCAGAGAAAACGCAGCTTACCTTTGATGGGTTTTTAGGCAATTTAATAAGA
CCATTGTGTAAAATTTTACTAACAGTTTAAAGAATTTCAGGCCAAAGTAACCAAAAGAAAAAAGAAGACTCAGTTATTAAAATTAAAGGTGAAA
ATCAGGGAAACATTACCAGAGGTAATGGTCAAATCCAAAGAATCATTAGGGCTTTGAAAATATGTATTACAGCAAATTAGAATATCTCACAGAA
ATGGGTAAGTTCACAGGTACATCTGACCTGCCAGTGTTAAACTAAGAAGATAGAAACAACTTACACAGACCTAAGACAAGCAATAAAATATCTC
CCAACTGAAAAATACCCGGTCCTAAATGGAATCATGGCTGAATTCTGTCAGATATTTCAAGAGATAACGTAAATCCTCCTTAAACTGTTCCATA
AAGTAGAAAGGGGAAGAATATCAACAAACTTATTTTCCAAAGCCAGCATTACTTTTATACCCAAACCAGGTAAAAGAAGAAAAGAAAAGAAAAG
AAAAGAAAAGAAAAGAAAAGAAAAGAAAAGAAAAGAGAAAAGGAAGGAAAGGATAAGCCGATTCATACATTCCCAATAAAATAATAGAATGAAA
TGAAAAATATACAAACGGGAAAGGAAGAGATGAAAGAGCCCTATCCACAGACAATATTGTCCCACACACAACACCCCAGGGCTGCACTGGAGAG
GCTTAGCTCTGATTGAGGATCAGCCCTGCGTCATCACCACACAGACCCCGTGGTTTTCCTATATCGATAGTGAGTGTGTCGAGAAAGAAGTCAG
CAAACGCGACGGCCCAGCACAGTCACACGCATCCCCCATAGCTTCAACATGAGCAAATAAAACTCCTCGCAATAAACTAACCATGTGAAAAGTC
CTTTACAGTGAACATGTTAAGACACCGAAGAAGAAAGAGATGTCAATCAATGATGGAAAGGCCTCCCATGTTCCTGGCAGTTAACAGAGTTACT
ACCACAAAAATATGGCCAAGTGTGGTCTGTAGATTGAATGCAATCCACAATGCCAATACCGTTCCTCCTAGAAAATAAAGTTCACTTGGGACGA
CAAAAGGTCTCAGGTAGCCAAAGCTATAGGATAGTAAGAATATTTCAGAGGTATCACAGCTGCTGATATCAGAGGTATCATAGCTGCTGATTCC
AGGTCACACTACACAGCCATGGTAACAAAAAAAGCATGGAAGTGGGGTCAAAACAGACGTGTAAATCAGCAGAAGAGGAGAGTCAGAAAGGAAC
ACAATGTAGCCACCTGATACCCGAGAAAGATGCCAAAATGTGCATTAGAGAAAAGACGGGCTGGAGAAGAAGTGATGCCGGTGGCGAACCGGCT
AGCACATATAAGGAAGGGAACCAGATCCCAGGCTCCTACCCTACCAACCAATTCAACACGGAGCAGAGATCTTAATGGAAAAGGTAATGCTCTG
AAACAGCTAAAGGAAAACATGCAGAAAACGCTTCGTGATGTAGGCAAGCCCTTTCCGAAAAGGGCTCCAGCAACTCAGGAAATAAAATGGAGAA
CTAGCAACTGAGATTCAAAGGCGTCACAGCAGACGAAACAGTTTCCTGAGTTGCAGAGACGACAGCCTTCAGTGGGGCAAAGAATTGTTCCTAG
CTATGTAGCTGACAGATTAGTATCTAGGTTCTATAAAAACTCAAAAAAAATTAAATTCTCCAAACAAACAACCCAGTAAATAAATGCGCTCAGA
AGAAAGAGAGGGTTCTCCAACAATGAGTGCAAACAGCCAACAAATGTGAAAGCATGCTTCACACCCTTAGTCTTTAAAGTTCCTCTGAGGTCCC
ACCTCACCCTGGTCAGAAGTCATTAAGAAAACAAGTCCAGGAGCCTGCCAAGTAGCTCAGGTGGTACAGTACTTACCTCTTGTGTAAGAAGTCC
TGGGTTTGATTCCCAGCACTCCCTACAAACGGCTGCACTCCCAGATGAGTTCAAGGTCGTCCCCAGATGTGTGTAGCAGATGTCTTAGCAGGTA
ACCCATACAAAGCCTGCTGCCCTGAATTCAGTCTCCAGGACCCACATGGTAGAAGGAGAGAACCCCTCCCCTCAGGTGGTCCTCTACCCTAAAC
ACACGTGTGTTATGACCAACAAATGCAAGAATGTAAATAAGAAAATCAAAATGGAGATTTAGAATAACATGAAGTAAAACTGCATAGACACAGC
TATCCACTCCTGCGGATATTTACAAAACTCTAACTCCACGTACTATAACATACATATTTCCCTGCACATATGTGTTTATTTCAGCCATATTCAA
GAGCTACATCAAACAACCACCGTAGCTCTCCATTAGCAGATGATGGATTAAGAAAGCATGATATACATGAGTAATGGAGTTTTTTTTTCAGCCA
TTAAAAAAAAAAAAAGAAAAAAGAAAGAAGGGCTGGAGAGATGGCTCAGCAGTTAAGAGCACTGACTGCTCTTCCACAGGTCCTGAGTTCAAAT
CCCAGCAACCACATGGTGGCTCACAACCATCTGTCATGGAACTCGATACCCTCTTCTCTTGTGTCTGAAGACAGCTATAGTCTACTCACATACA
TAAAATAAAAATAAATCTTTATTTTTAAAAAAGAAGGGAAGAAAAAGAAAAGAAACATTTGCAGGGCAGTGTATGCAACTGGAGATCTCTGTAT
CAAGAGAAATAAGCCAGAACAAAGAAGATGAACATCACCTACCGTCTCTCTCGGTTCTAGATCCTAGGTTTTATATAGATGTACATAAGATATT
TTGCATATCCGTGCATAGGATATGAAAGTAAGAGGAAGGTACTCCGTTGGTAGGGAGGGGACGAGTGGATATGAGGAGGGGAGAAGGGGCCTTA
GGTACGGTCACAGTGCTTGTTCTACGATCAAAATGTTTTCAGGGAGTTATCCCGATGAGCACTGAGTATATGCCAAGAAAGACTTTAACGAAGT
GTTTCTAGAGGAAAAGAATTGGTCTTTGAGGCCATTTCCTGTCAAATGTTCACACTCTGACCTGCCTGGGCATGAGCAGACTGTTCTCTGTGAC
GCTAGACAGAGAGAAGGAGATCATCCGCCAGCCAGCCGTGCAGCAGACCAAGCAGATGCACCTGAGCCTGGTGCGCCTCATGTTCACAGCCTTC
CTCCCTGACAGCACTGGCAGCTTCACTCGGAGACTGGAGCCTGTGGTGTCAGACGCCATCTATGATAGCAGTGAGTACTCGTTCCCAAGATGGG
ACAGTTTCATCTAGCTGCATGGAGGGCAGGGCCACCATGTCACTTACTCCCCAGAGCTGAGGCCTGCAGACTGGGACCTAGTCACATAGAGCCT
CTAGTTTATTGTCTACAAAGTTAATACTGCAGTCTACGGTAAAGGGTCAATATCCAGTTAAGCGTCTTAAGAACATGTCTGCCAAGGTAACACG
TCTTCCTCAGAGAGTGCATTATATTCCTTACATGTAACACCAGTTTCTTACTATGAACACATGACTGTAAGCATAGATTGCTCCTGCTCTAAAA
AAAATTACCTTAATTTTTGCACCTGGCAGCACGGAAGAAAAATTGATAGAAGACAAGTATCCCTCTTGTCTCTCTTTATCCCCAGTTTGAAATA
CATTTATTAAGACAGGAACGTCAAGGTAACTAAATAAATGAATAGTATGTCAAAATCATCTTTCAGGCTGCAGATAATAGAATGTGCAGGGTTT
CCAGTAGCTTGTAGAATTTACTGTGTGGCTCTATTGTTCGATATGCATTGGGCTTAACAAACAGTTGTTTCAGGAACCCTGCAAGCCTCACTGA
ATGGTCATAGAATACGATGCACAAGGAAATCCCATGTTCTGCATCCAGCCACGCATGCGTCTGTCTGATTTAAACAAGTGTGAACGGAAGTGAA
AAGTTTATTGAATGGAAAAGAGTCTTACTGAACAGAGATGAGCTACAGCTGTTGGAGTTTTTAAAGGGGGAAGCTTTGCCCCACTCACCACTAT
GGGCAGCTTTGCCCCAAACCACACAGAATGCTAATTTAGCTTGGGGGAAAAAAAACCAGAACATCTTCACTTTTCTTTGAAGAATATGTGTGTG
TGTGTGTGTGTGTGTAAATGTGTGTGTATATATATATATATATATATATATATATATATATATATTAGCTTAAAATGTCATTTTCTTAAAATTT
TTAAGAATTTTACAAATGACATAAAGTTAGCATGAAACAAGCCATTGGTCCAGAAACATCAGACAGCTCTCTCCTTCCTCATCAGCCTGTGTGT
TAGAGAAGCCATATGCCACCATCCCTCCCTGACCTGCTCCTTTCTGGGGAACCATGAGTGCCCCAGACCCAAGAACTCCTCCTAGTACCTTGGA
AGTCTTTCTTGCTCTATTTGTGTCTTGTTAAAGGCAGTAAGAGTGAGCACCATCATGGAATCTTTGTGAGGCTAATGCTAAGCCAGGGTATGCA
TTCTCTTCTCCCTTTGAACACAAGCCCCGAATGCATCCAACCTGAAAATCGTGAGAATGGACAGAACAGCAGGATGTGTGACGGGAGGGGAGGA
GATTTACCTTCTCTGTCACAAGGTTCAGAAAGGTACGTACACACCTGGTCTCTAGATGTAGGGTGTGGCTGTCAGAGTTCTCTGGAAACAGCCG
ACCAGGGGTGTTCTCCTTTTGCTGTGGGAGTCTCAAAAAGACAGCGTTCTTCAACACCATTACACGCATTGCAATCACATGCTTGAATACGCCC
GTTTGCAGATGACATCCAGATTCGGTTTTATGAAGAGGAAGAAAATGGCGGAGTTTCGGAAGGATTTGGGCACTTTTCCCCCACGGATGTTCAT
AGACAGGTAGGTGGGTTATTATTGCGGGTTTTATTTTAATGCACTTCTGCCTTGGTCAAATTCAGTCCTCAGTTTCCACATATTAACAAAGAAA
CCGTCATAAGTCTCTTTGACATCCATACAGCAATGCTATGTTTATGGCTCTTCCAGTACTCTGACATAGAGGCTGAGAAGTCTAAAGGGCTGAA
GCTGATGCTGTCCTGATGAGCTGCTGTCTCTGCCTCATTCGTTACATGACCAGGCTCTCCCAGCTGATGACATGAGCCACCACAGTAATAGTCA
CTCTTTGACAGTGACTGAGAAATGGTGTTTCAAATAATTGGCAACAACCCAAATGTTAGCCAGTAAATGACTAATTAGATAGTGGTGTATCTAT
GTAATGGAACATCATACAGTTACTAGAAAAGAACGCTCTGTGAATGAACAAAGACCTCAAAATAGAATGCAAAGATTTGTAACAATCGATATGG
AACACACTGTATGTAGAAACAATTCTATGTAGAAACAATTCTGTGTTCACCTGCACACGAAGCCTGAGACAATAACAACATCAGCTCCCTCTAG
GATCTCAAGTTAGTGCATGAGTGGGAAGCGGGGAGGCAGGGAGAACTGTCAGCATATGCTACCTATTGCTCATCCTATATTTGATGACATCTTG
ATCCTTATAAACATAGAAAGACCGAAACTAAGTCTCTCCAGTTCCTTATTATCCCAGCACTGCCCAGGACTAGCATGTGACACCTCCTGCGCAG
CCTCACTTAGCATCACTGTCTGCGGGCTGTCAGGGGCAGCCCTGGTTCTGTCTGCTTCCACATCCACTCCTTCTCTTGCTGCTGGCAGTGATCC
TGGATGTTTTCAAGGCTAATCTGAAAGAGAAATGGCTGAGTCGCGTGATCCGCCATCATGCTGTTGTGTTTTACTTTCACGGGGGCAGTATAAG
TGTGGGTATAAGGTACTAACTGCCAACTTTCTCCAGGTGCTGGGTTTGCACACACTTTATTTAAGTTCAGAGTATACATAGACGTGTATAGAAT
GTGCCTGATGCTCACCGACACTAGAAAACAAATGTCCTACACTAATGTTTGGGTCTTTTGCACCCTGCAGTTTGCCATTGTCTTCAAAACGCCA
AAGTATAAGGATGTCAACATTACAAAGCCAGCTTCCGTGTTTGTTCAGCTTCGGAGGAAATCAGACCTGGAAACTAGTGAACCGAAACCCTTTC
TCTACTACCCTGAAATCAAAGGTACCTGCCTCCTTTAGACTCTTGTGCTTGCTCTGAAAGACCAGTGGGCCCCTCCTCTACTCAGCCTCCCAGA
AGCTGCTGCCTGGATGCCTGGATGCACGCTGCATAGTGTTAGGGGCAAGGAAGGTCATATGCCAAGGTCATGGAATTAGCCCCAGGAATTTATG
TTACTATATTGCTGCCAAACTTATATGACACTTACACATTTGGCTATTGTTGGGTATTAGAATCTAGTATGGAGCCAGCAAGATGGGTAAAAGC
ACTTGCTGTCAGGGCTGACCTGAGCCTGAGTCCCAAACCTGTGTGCTGAAAGGAGAGACGTACCTGCCAGAAGATGTGGGTGGTCCTCCACCAG
GAGGGGGCTGGGCGGGGAAGAAAGGGAAAGTAAAAAAAAAAAAAAAAAAAGTAAGGATTTTTTCAGCTACTCAGAAGCCCTTAAGAATTAACCA
GAAGGCTTAGCCACTCTCCAGCCCAGAACTATAAAATGAGATGGTCACTATACTTTCCTCACAAAAGACACCTCAGGAAAGGTGCACTATAGTT
AAAATGCAGATTACGATTCTTTTTGACGTGCTAGACATCATATTCTCTGGGCCTTGTAGACACTAGGCAGCTCCTCTACCATTGAGCTGTAACC
CTGGTTCTCAAATGATAAGTACCCAAAGGGAAGCATCCACAAACTGTATCAAATAGTTGAGGAGACAGTCCTGGATTCCTTGGTCTAAAGAATC
AGCCAAAGAATTTCTCTTCAGTGGGAAGCCACTTACCACATTATGAAGGTGAATGGAAGTCAAGGCTCTGTTTATGAAAGAGAGATGTTCAGAG
GCAGAGGTGTGGCAGCTGGTGTTTGTCCTGGGAGAAATGATTACTGTGAATCTGTGTGGACTGAGGAAGGTTGATTTAGGCGAGGGAGGCCAGG
TCCACGCAGTGAAGCCTTTCTCTGGTAGCTGGAGGTTTTTGCTTTGACTCTGATGCCTAGGCCTGCCTGCTCACTGTCTGGAATGATGTGGTCA
GAATGTTGCTACAATTCAGTGGTGCCTCAGCAGAGTTAGAAAGGGTTCTAGCAGCCAGAAGTTAGCATCCAGCACATACTTCTATGTTGGTGCT
GTGGAGACCTGGACCTTGGGTGAAGAGAAAGGAAGAGAGACTCGAGAGTCTCAGATTGTTCTAGGGTTTCCAGACTACAAGTGTATGTATGGAG
TGGTTAAGTGGATAAGAGGAACAAGAGAGAAGAGTCTGAGAATGAAAGAGAAGCTTAGTGTAAACATATTTCAGTTGGGGTCAAGTGCAGGAAG
GGGGCCAGTCAAAGCCATGACTCAAGTGGGTGCGGGCTCAGCACTGAAGAGAATCCCGGCCCCACAGAGTTTAAGTGTAGGGACGCACAGTGCT
GCCGTCAACCTCTCTGTACCTCTGTTTCGTAAGTTTTGTCTTCACCGCCATGGTTCTGAGAAGAGATCCATGAACTTGGAGGCTACACAAGGCC
TGGGATCTGATAAAATCAGAAATGTCTGGCTCAGAGAGAATGGGGCTGGAGAGGATGTCACCAGGTACAGGGTCCTAGGTCCAGCGCCACCAAG
GCCCCCAGGTATCCGTCCCTTGAAGGCAAAGCCTGATGGTGCCCAGGAGTTTCTGGGAGGCCATGTCTCTTTTTGAGGTATGGCCTCCCCATTC
CTGGGTCAGGCTTATGGTGAGCTCTGTGGCTGGCCTACTTCCTTCCTCACCAGCTTGAGGTCTTCTAGATCCTTCTGTCCAGACAAGGCAACAT
GAAATTACTGCTTTACCTGAAGCCTCTGCCCTCTGAAAACAGGAAAAAAACATTATTTTTCTAAGAAAAAAAAAAAAAAAAAAACAGTGTATCT
CCTGAAATGTGCCTTTAAAAGAGCGTTGTCATTGCTGATGCAGAATCATGAGAAAAAGAAAAGAACTGCAGGTTCCCTGTGCAGGATGTGAGCC
TTGAAACGCTGAGAGTTTGGTTGCCACGCAACCTCTCCTCCTAGTGTCTGCATCTGAAGAGTACAGTAGACAAGGCCCAGCTTCCTGGGCACTC
CACGCCAGCAGAGTGGGAGTTTTCTAATGCCTGGATTAGAGGATTGGGGTTCCCTGAAGTCCTGGTTACCTCACATCTTCTAGCTCATCATGAA
TACAAATGGTATACTTGAAATACAAATGAGGCTCCACCTACACACAGGATGGCTGAGGTACCTGTTGTGTTCCGTGTTTCTACACTGGAAACAT
TTTCTCTGTGAGATCCACAGTTCATCCACTGACTAAATGAATATAGCTATTGGTTTTGGTATAACTCCTGGGAAAACTTTATAAATATTTCTCC
GAGCCATCAGTTAGAAAGTAGACAGTCTCTTCACCTCAGCCTCACTCCTTTCTGGCCGAAAGCCGTTTTCTTCCTAATCATCCTGGTGTGCCCA
GGGTTGGTTTCCCAGGGACTGGCAAAGTCCACCATGCTCTCCTGCTTTCCCCATCAGCTGCAGTAGACAGTCCAACATAGTCCAAAAGTCCTTG
TGCCACACCGTGGGGTGATGGAAACACCCACAGAACTAGAGAAGTAGGGATCTTTCTGAACATAGACCATGATGAAAGCCAGCATTAATCAGTC
AGACACAGGACGATTGTTCAGTATTGGCCTATTTCCTGGATAGAAAGCACCATGTTGACTATTTAATGTAAACACAAAACCACCTTCACTTCTC
AGCCCCAAACACAAAGAAAACAAACAAACAAATATCTGCTAGGATACTCCCAGACCACAAAGGAACAGGAGCACCATGTCAGATCTCCCACACA
GTAACAGGACTGAGAACATGGTGGCTGAAGATCACACGGGCCATGACAGAACTCAGGGCACATGGCTGTCGATCACATTGCAGTAACAGAATTA
GGGGGGCTGTCTGGGTTAGTAAGGAACACAGACAGTGAAAGACAAGAGGAACACAGAACTCTGTGAAGAGCACCAAGATAAGTCTCGGACCACC
TGGACCTGGGCAGGCCACTGTCCCAGAGGTCACTCACTGTCCCAGAGGCCATCTTTATTTTGGAGTCCGAGATCTCACGAGCCAAAACATCTCT
GTACACCCTCTCTGTGTTTCTAGGATCGACATTATATCTCTTACCACAATAACCAGTAAGGACTCGGTCTCCATTGCCTCATGCCTGCACTGTC
TTCCTTAGAGTTTGACTCTAGATGTCCTGTATACAGTGATAGATGTAGCTCCTAAAATGCTGTCCTCTATGTCATTCTCTCAGACATTCAGCAA
GTCCCTCACATTCCTATCCCTGAGGCTCCTCAGCATGGGTGACCCCAGTCCTCCTTTAACCTTTATTATCAAAAGCACCCACCCATGTTATCCC
TCTGAGAAGCCCTGTGTCTTCCCAGAATATCATGTTCTTCGGCCATAGTTGTTAGCCTTTATAGAGGCTTGTCATGCTGTAAATCTGTTTTCAC
GTGATTTCACATCATCGTATGATGCATACCACCATAATCCATCCCACTAAATCCCTCTTTGCCTTGAAATTGACGGTCCTTGACACCAGAGATG
TGTGTTATGTTTCTGTCCATCCCAGCACCTTCCTCAGTCTATGTACCCAATAAATGTAAGCTGGTTATTATAGTTGTCTTAGGTGAACAAGGAC
AACTGTTCTGAACGTTAGCTGGGTGTGGTGGTGCACACCTCTAATCCTAGTGTTCACGAGGCAAACGCAGTTTTGAGTCTTGTTCAAAACCAAG
CTAGTCTACATAGTGAGTTCCAGGCAGCTACAGTTACATCGTGAGACCCTATCTCAAAATAAAGAAGTAAAAGTGCTTTAAAAAGAAAAAAATA
TGTGTATCTTTGGGTTATCTGAATCTTGAGAAGCAATGAGATCTCTCACCATCTTGTTACCACTGGCAACTTAGGAGGGGGCGCTCAGGAGAGT
TGGGTGTGTGCCGCACTGTGGTCTCTGAGGCGTGCTCTTGGTCTTCTCGTCCATTGGAATAAAAACCATGCTTCCTCCTCGGGTGCCTGTTATT
TCCCTTTAATGCATTTAAAAATATCATGAGAATCAATCGTCTCTCTGCGGCTGCTGGTGGAACCCGATCAGTCTTTCCCCCCTGGTTTCCCTTC
CTGTAAATACACACAAAGAGGAAGTGCAAAGGAAACGCCAGAAGCTTATGCCGAACTTCTCGGACAGCTTCGGCGGCGGCAGTGGAGCCGGAGC
CGGTGGTGGAGGCATGTTCGGTAGTGGCGGTGGCGGAGGGAGTACCGGAAGCCCTGGCCCAGGTACGAGAAACATCTCTTCTATCTAAAGCCTT
TCATGAAGAGGAGGGGGTAGTTTTCTTTCCCAGGTTGCCAAACATGTCTGCCCATGGAGTGATGGTGTCATTACTAATTATTAGATTTCAATTA
ATGGAAAATTTCCTACAGATGTAAAAGAATTTTTGTTCTCAAAGAAATGTATGTCCAACTCAAGGCACAGCCACTCCCCACCCACCCACCCATC
AAGTTTCACTTTCTCTCGTTTCAGTTACACGCGGTCAGCTTGAGTCTAAAAATATTACCATTGTGTTGACAGAGACAGACCACACACACAAAAC
TGTCTTCACAGTCTGCTGTTGTGACTGCCCTATTACTCTGTGTTCTTGGTCTCCTTCTGTCTTTTTACGTTGTGAACTTTACCCACGTCTGTAT
GCATCTGCAGTTTTAGGGATACACTGGGGGTCTCGGACGTTCTCTTTCAGGATAATATGTGTCTAGTCCCGAAAAGTGTAAGAAAAAAGTCAAC
TGAAGGGTTTCTGGAAGAAAACCTTTCTCAAATCATTTTTGACTGTTTCCCTCCTCCCCCTCCCCTTTGCTTTTGGAGAAGCAGTTAGTCTATT
ATTCTGAGAAAATATTAAAACAACTATCATACCCACCGCATGGTAGATGGGTATAATATGCCTACACAGCATACTCTGGGCTGGAGACACTGTA
CTGTAAACAAACTGAGTCACAGAAAATCATGCCAGGGAAGCACTTCAATGGTGTGTAAACTACTCCTCCTAACTGCCACGCATACGGCACAGTC
AGTATTTATGTGTTCCTCTCGGGTCCGGCTATGATCCCCGTGCGTGGATTTCCAGCCATCTAGTTACACTCAGTTTTTAAGCATCGTTGCATCA
TGCTTGTCGATGCTGAGTAACGCTGCTTTTGCCTCACATCTACCTACCTTAAGCATTTCAATGGAAATACAGTTCTTATAGCAGCATAAGTGTG
CTGTTTAATGACTCACACCTGTAGCGTAAGTGACTTGAATGCTGTTTCCTGTCTCCTCTGTAAAATAACTGTGCTGAGCATGGCCTTTCTTTAT
TCCAGATAACATGTAAATGCTTTAAATGTCAGAGAGTGTAGTGCTAAGTGCTCGCTGCCCCTCTAAATTTATCATTCATTTCTCCACTAAAGTA
TCATTATATTACGTATTGGGTTCTTCTCACCAGGGGTCTTCATATTTAACTATTTTTTTCTGTACCTCTAAGTCTTGGTGTGAGTACTTACCGT
TAGCTTTTCCCTTCACCTGGAAGAAAGGGACCTGCTCAGCCTTAAGTCCTCCAAGCTGCTAGTCTCGGCACTGCCTGTTTGTTCAGCTGTCTGT
TTCCCACAGTGATTCTGCTAACTCTCGGGCAGAGCCAGCCTGTGTAGGCTTGTGCCTCCCCATGCCACAGCCTGCCTCCCTGAGTGGGTCCCCA
TACTGTTAACAATCTCCCTGATGTTCCCTTTGTCTCATTGCTGGTTCAGCGTATGCCTACTCGAACTACGGATTTCCTCCCTACGGTGGGATTA
CATTCCATCCCGGAGTCACGAAATCCAACGCAGGGGTCACCCATGGTAAGTCGGATCGGAATACCCAGAGCACTGCTCGGGCAACAGGATCATC
TCTAAAAGCTTTGGAAAATTACTTTCCAATAAATTAATATTCTCAGGTTATTCTAGGACAGCATAAGGGACACCCCTGACACGTATTTGCTCAT
CACATTGTGTGGAAGCAGGACAGACGCTCTAGACAAAAGATGAGACTTGACTACGCAAACACACAAATACCACCTTCACATCTGTCCCTTTACC
CCAAGTCCTATCCTTCTGAAATCAGTTTTCATTTTGTAGGGTTGGCCTTTTCCCACTCTTGGGCATCCTCTGAGTAGCTGTGGCTACAGGCTGC
TCGTGGTTTATATAAAGCTGCATTCTTCTGTACCATGGAAATTATTCTATAAAGTCTTTCCATATATAATGCCAATTCATGCCAGATGCGTACA
TCACTGTAATCTTTTTTAAAGATTTTTAACTGGCATTGTCGTTTATCCTATAATCGGGTAACCATTCATCCCATAAAATAGAACTATTCTTTCC
ATTACCTATAACCTCATGACCCCTGTGCAAGGCCAGTGCTAGGCTTGGCACCTTCTGGACAGAGGTGAGGTTCAGAAACTTGACTTTCAGAAGA
CACTGTAGCAGGATTGGGTTTTGCTCCAGGTTTGCCCAGGAGTCTTACTGTCACTCTCTCACATAACGAGGTTCCTACAGCAACCACAGTCAGT
CTAGTGATGGTGCCCTAGAGCCCTCCTGGCCACACAGAATGGAAATGAGCTCTGCTCGGCTCCCTTTCCCTTGCCACTCAGGATTAGGAAAGAA
AATAACTCCTTTCGAGAACTTTCCAACTGGCTATCAGCGCACAGAACTTTATCTCATTTTTCTTCTTCACACATAAACAAAATGACATCCATGC
CTTGTTTCTGTTTGGTTTTGTTTCAGAGAGAGACAGAGACAGAGAATATCACTGTCTAACCTTGACCTTCTGGGACATTGTCGGTGGAGCTCAC
TACAGCTGGCTACAGAATGAGTTTTGGGAAGGCAGGCTTTTAAATTGTTTCTGAATATTTAAAGTATTTCCGAAACATCCCAGGTTTTTTTGGT
ACACACCTTTAATCCCAGCACTTTTTGTGAGTTTAAGGCCAACCAAAGCTACACAGCAAGACCCTGTCTCAAAAAGTAAATAGAGAAGGAAATA
TAAACTATGTCCAGAACATATTATTTGTGTTATAAACATTTATAGTTTTCCATTTCCTGCAGATAAGCCTTCTTCCTATTTTCCTTTTTTCTGC
CCTATGTTGAGACAGTGAGCTATACCTTAATAGATTTTCTACGTTTTTTTCCCTAGGCACCATAAACACCAAATTTAAAAATGGCCCTAAAGAT
TGTGCCAAGAGTGATGACGAGGACAGTCTGACTCTCCCTGAGAACCAAACTGAACGTCAACCGCCCACCCTCCCCATGGCCTGCACCAAGACCG
AACCCATCGCCTTGGCATCCACCATGGAAGACAAGGAGCAGGACATGGGATTTCAGGGTAGGTGAGCTTGCCCACGAGGGCTTCCAGGGACAGC
TGGGGTGGGGTTTCAGGGTAGGTGAGCAAGCCCACAAGGGCTTCCAGGGACAGCTGGGTAGGGGCAATTCTAGGTACAGGAAGCTGTCTCCAGA
AGACAGGTTTCCTTCCTGTTAATCTAAAGCTGATGAGTCAGCATCTCCTCTGAGTGCTCTGCACCGTGCCCTGTGCCCTGCAAGAGAGGCGTCC
TGTGGATCCAGTCATCTTTCCAGCCTCAGCTCTGATTATAAACTGCACAAACTTGCATGTACATTGCCTAGTCTGTGCAGTTCTGGGTATGAGA
AGAGGCAACTCACTTTGTCCCTGGCCCAGGTAACAAGTCTCCATGTCCTTCGCGCACCTCCCTCCCAGCAGCCGGCTCAGCTGCCACACTGAAG
ACGTTTGCCTGAAAATGGGAGTTTTCCTTTATTCTCTTGTCCTCCTTGAAGAAGTAGAATTGAAAGGGAACGTTCCATCTGAGCAGGCCTCATT
GGCATATGAGTCATGATTCTCGATCAGACGCCATCTGTAAAGAGATAGTAACTATTTACACATAGTGGCCGTACACATGGTTACTATCACATAT
TTTTTTCCCTTTTTTCTGTTTTTAAAATACTTCTTCTGAGATGCACAGTATATGTGTACAGAGCCATATGGAAACAGGGTAGATTTGCCCATTT
GGGTTGAGGTTAGTCTGCTGTCCCTTGACCTTAAGATAATAAAATTTCCAAAACCCCTGGGGTTTCTGAGACTGCCTGCCACCCAAGGGTGTGT
TTCCTCACTTTGACTCAGACAGGATTCCAGAAGAGACTTTGTTTGTAAAGTGATTGGCTATTTAAAATTATGGCAAAAGCCAAGTACCCTGAGA
TTGGTTGCTCCCCTTCAATCATAGACACTGATTGTTCTTCTCAAAATAGCAGATGTTTCTAGATTGTTCCTCACAGACACTTTAAAATCAACCT
CTTAACTGTATTATCTGTCAGTGAGACAATGCCCGAAATGCCCGATTGTGCTTGTTCTAGTCAACACAATCCAGAGGCAGCAAAAGGAGCATTT
TCAGCTAAAATCGTCTGCCATGCCGCACACGCGGGGCCACCAAATCACACTCAGCTGTGCTTGTGGGCATTACCTTGCAGATAACCTCTTTCTC
GAGAAGGCTCTGCAGCTCCCCAGGCGACACGCCAACGCCCTTTTCCACTACCCACTGACGGGGGATGTCAACATGTTGCTGGCCGTGCAACGCC
ATCTCACCGCCGTGCAGGATGAGAATGGGGACAGGTCAGTTGAGTGGGGACTGTTGCACAGCAAGCTCTGTTTCAGGACGGCGAAAGCCAAGGA
TACTGCCCCCACAAACTGCCTTTGAAAGGGAGCTGCCCTCATCTGACAAGACCTCGAGTATGCTGTCTCCCTAGGCAAGAAGGCTCAGATCTGT
GTAATCATGCTAATTTTACACCCCTGCTTTGTGTACTAAAATAGTAATTGAGAAAATTATTGACAGCCCTGCAAACTCCCTGAAGTGTTATTGT
CATAGTGTACCCAAGAAAGCCAGGTAAGAACAACATTAGTAGAGTAACTAAGAGGAAATGCCATTCTCTCCTAGCTACTAGCTGCTTCTCTGTG
GCCTCTGTTAAGGGTCACGAGGATGTGAGTGGGTCACGCTCTCCCTCAGCTCCAGGCCAGGCTGTGTCCGACTCTGACATTCCACATCCCATGC
CTGCTGTCTCTTCCTGAGGTTCTGTGCACATAGCTACCTGGCTCCTTCCTAAATGGTTCTCTTAGTCCTTCCATTGAGACTTCTGAAATGATCT
AAAAGCCTATAAATATAGCCAGAGACAGCAGTCTTGAGATTCAAGTGCTTTATCTAAGTGATCCTAAAATAGCGTTAACACTGAAAAGAAGCCC
TTTGCTGTGGAAGCATTCTGGAGTGCTGTGTGCTGAGTCTCAGTTTAAAAACAAAGCGCTTTAGGAGAATGCCAACCTCAGCGGTTTCGTACAA
GGACCTTTGTCCTCGTCACTTGCAGTGTAACTAAGGATGTGGTATAACCGCTGCTCTTATCCTACACAGTACAAGAGGAACCCAGACGACCTTC
TGTGAAAAAAGCTCTGAATAACACAACGCCCCTTTAGAAGGAAATCATCCAGTTAGCATTCAATAGCAAATAACCACAAAACACAGCAGATAAC
CAGAGCAGGACACCGGTGCTCCAAGGGTCATCTTTAAGGACTGGCGAAATTCATGAGTAGTGAGGGCGAGTGGATTAAGCAATTAGGAAGTGAG
ATGCTGCTGTCTGAAGGAGAGGCTGTGGAAAGGGATGCCAGGCACATGCAGTCCAGCAAGTGTGTGCAGAGGAATGCAGGAACATGTGTGTAAG
GACCTGGGTCTTCATGGGGCAGCTGAGACACTGGCCTTCATTCCCAACTGGGTACAATACCCAGAGCCTCGTCAAGCCAAGACTTAAACAAGCA
GGCTCCGTGTAAGGTTAGGGGTATGACACCTGGGAGACACAGAGGACCCACTCAGGAGTATACATAAGGGACTATTCTGGTTTCTCTTCTTTAT
TCATCTTGTCATATTTGGCTTATAATCTGGACCCTGTCACCATTAGTCATCATAGAAATACAATAAAGAGAAACTATAGAACCCTCTGGTATCG
GGGAACTTCCCCCAGCGGTATGAAGATCTGAAGGGGAGGGGACGTGCTTCTGTGAAGTGCTGAGCTGCACATGCAAATGTTGAAGTAGCTTTTG
AAGCCCTTTTACTCCACGTGTGTCTGTCCGCATCACCTCTCACAAGCCTCCTGTCAGGGTCCCATCAGGAGCACCACAGGAGCCTGAGGTGTGG
CTGCGGTGCTTCTCGTCAAAGCGTGCGTGCTTCACTTGCAGTTAACACACGCCTGGGGTCATCTAAAGACGCCACCATGATCTTCCCTGAGAAG
TATTGCTAAGTGAAATATCTCAGGGATAAATAACAAGACCTTGTTTAGAAATAGAAGTCACTTCTCATTGTTACGGACCAAGAGACCTCCGCAG
CTGAGTTTTCCCAAGCTGCTCCTAAGCCTAGGCATTACCTTTCTTCATGGTCTTGTATGTCAGGGAGAGACCAGGGAGAGCTGCCAGGGACAGA
GGCATGGACACAGAGCTGGCTTGGAGCTTAATGCCATTTGGTTTCCCACCCGCCAGCTGCCTTTGCACTTCATGTGTCTGGTCAGATGTTAACA
CTCCGGGGGCAGGTGGGCACGATCAGTGTGTAGTAGCCTGCGATAGGCAGTGGAGAGGAAGTTCTCCAGAGAAATAATGTCACCTCTGATCAGT
ACATTCAGTACATGGTAGGGCCAAGGAAAGCTACACATAGTAGCTAGTCTTCAGCTCCAGTCATTTCTTGACATGTTTTTGTTTCTGTCGCTTG
CTACATCCCCAGTTAATTATTGCCACTGTGTGTCATTCCAGTGTCTTACACTTAGCCATCATCCACCTCCACGCTCAGCTTGTGAGGGATCTGC
TGGAAGTCACATCTGGTTTGATCTCTGATGACATCATCAACATGAGAAATGACCTGTATCACCTAAGCAGCCACCACAAGGCCGTCGAGAAGAG
AAAAGGTTGCCTTAGTAACACGTGCGTGAGCTGTTCTCAGTGATGGGAAACAGGAAAACAGCATCTTCTCAGAAGTGGCATCTTAAAACCATCC
TTAGTTGGGAATGTCATTTTACAGAGAGATGCGTTGGGATCATGGGTTTGATGGCAATCACACTCCATGGAAATTCACCATCTTCTAGAAAAGG
CAGACTTTAAGACCTAGAAGTCAGAGTTGATAAAGTTTTGAGGGCAAACCTCAGAGGGGAAAAAGTCACAGCTGTCAGCAGAGACATGTTAAAA
AGAAATCCAAGTTTCAAAAGCCAGACTTACAGAGACAAAGTTTCGACCTCAGATGAAAGGATGGACCATCCAGAGACTGTCCCAGCCGGGGATC
CATCCCATAATCAGCCACAAAACGCAGACACTATTGCATATGCCTGCAACATTTTCCGCAAAGGACCCTGATATAGCTGTTTCTTGTGAGGCTA
TGCTGGGGCCTAGCAAACACACAAGTGGATGCTCACATTCAGCTATTGGATGGATCACAGGGCTCCAAATGGAGGAGCTAGAGAAAACACCCAA
GGAGCTGAAGGGGTCTGCAACCCTATAGGTGGAACAACAATATGAACTAACCAATACCCCCAGAGCTCATGTCTCTAGCTGCATATGTAGCAGA
AAATGGCATAGTCGACCATCACTGGAAAGAGAGGCCCCTTGGTCTTACAAACTTTATATGCCCCAGTACAGGGGAACGCCAGGGCCAAGAAGCA
GGAGTGGGTAGGTAGGCGAACAGGCCGGGAGGAGGGTATAGGGGACTTTCGGGATACCATTTGAAATCCAAATGAAGAAAATACCTAATAAAAA
ATTGGAAAAAAAGAATATTTTCAAATTAAAAAAAAAAAAAGAATTTTGAGGTCTGCGGAAGGAAGGGTATTCGCACAGCAACTGGATCAAGTGT
ATGTCAAAGAAAGGCTCTGAGGTCAGCTCCTGGAGAGGTGAAAGGCTGTAAGAACAGGAAGAGGCACCTCAGAGTCCCATCCAGCTCAGGTGTG
AGAACGTAAGCGAGCCCCGAAAACTCCAGAGGAAACCACCTGCAGATGGCACAGTGAGCTGAGGACAGAGGCAGATGGTAGGGGAAAGCAAACC
AGAAACTCCACTGGCAGACACAGTCTGGGAGCTGTGGCCTGGCCCAGGATGCTGCCCTGCTCTACGGCTCCTTCCTCTCTCACCTCTATTTCTC
TCCAACCCTTTTGTGCCCCTACCCCTCTCTCTGGGCCTGTTGCTCTTATCCTCTTGTTGGCTTCTAAGTTCCTCTGCACTCTCTTGCCCAGAGT
GTCATTCTGATCCCCACAGCCAGGCCCATGCTGAGACCTCTGCTTCCAGGTCATATTGCTTTCATTGAAAAACTGTGGCCAGCAACCGTGAATA
ATTTGTTATTTAGAAGAGATGAGATGACAACTAGTGGAATTCTTACTTGTTTGTTTGTTTGTTTGTGATGTTTTTTGTTGTTGTTGTTGGTTTT
TTTGGTTTGGTTTGGTGCTTGGGACTGTACCCAAAGCTGAGCACAAACCCTTCCAGCAATCTACAACCATGTTACTCCATTTTTAAAACAAGTT
ATTCAAGTTGTTATCTCTTCTTATCCATGCTTCTCTCTGTCTCCCTCTGTGTCTCTCTCTGTCTCTCTCTTGTCTGTCTGTCTGTCTCTGTGTG
TGTGTGTATCCCTCTCTATCAATCTCTCTCTGTCTCTCTGTCTCTCTCTTTCTCTCCCTGTGTCTGTGTATCTCTCTCTATCAATCTCTCTCTG
TCTCTCTCTCTCTCTCTTTCTCTCCCTGTGTCTGTGTATCTCTCTCTATCAATCTCTCTCTGTCATTCTGTCTCCGTCTCTCCCCCCCCCCCAA
TGTGTGTGTATCTCTCTCTGTTGATCTCTCTCTAGCGTACCCAGGCTCGCACTGAGCCATCAGTGTCCTACCTCAGCCTCCCAAATCATAGGCT
TGACAAGCATGTGCCTGGCATGTTATCTCATTTTTAATTTAAAAAAAAATCATTATTTTAGAAGAAATTAAAAAGAAACAAAGAGATGACTCAG
TGGACGAAGTATCTGCTGTACAAGTGTGAAGACCATGTTCAGATCCCCAGACCATCGCCAGCCAGATTTAGTACCACACCCCCCCACACCCCGC
CCCCGCCCCCCCCTCCCCAGTCAGGGCAGGAGACAAGCATCTTGCATATGCGGGGGGGGGGGGCGGACAAAAGACCCTGCCTTATAACCTTGCA
CAAGGCAGGCCGCAGTACACACGTTGCCCTCTGACCTCATGCACCTCCCTGCACCCACACGCTCAGAGAAGGAAAGAAGGGAAGGAAGAAAGGA
GGGAGGGAGGGAGGGAGGGAGGGAGGAAAGGAAGGAAACTAACTGCACATACACACTAAAACAAAAGAGCTAAAAAATTTTTATTTTAAAGGAA
ATCATTAAATTCTTATTTTTTAATACAATATTTTAAAGTTACTTTGAAAATATGAATTGGAGGCTGGAAGTGGCTCACATGCTTAAAGCCTTGA
GTTCGTTCGCTCCCCACACCAAAGAAAAGGCTGAAGCTGTTAGTTCGTTGGCCTGTAGCTCTCAGACTTTGCCGTTTTCAGAGGAGCACAGCTG
CTTTCTGCACAGCACTCTGCACTTCTCTGTCTGCAGTGATTCCTATCCAGGGGAGATGACTAGGCTAAGGTGTTATTTTAGATGTGTTCTTCAA
GATCTGTCTTCCTCGGGCTTCCATGCCATCTTGGGATACTATTGGTATTTGGAAAGTCATTGGGCCCCGAAAGTTGAATTCTCCAAACTTTTAG
GCAGATGGCACTTTTTAAAAACTTTGTATTGATTCTCTGTGAGTTTTGCATCCTTTTTTTTTTTTTTTTTTTTTTTTTTTTTGGTTTTTCGAGA
CAGGGTTTCTCTGTGTAGCCCTGGCTGTCCTGGCACTCACTTTGTAGACTAGGCATCATGCACCCCAGTCCCACTCATCTCCCTGTCCCCTCAT
ATCTGCCCTCTGCCCTTGCAGCCTCCCTCCCACAAAATAAACACTCAAGTAACAGGAAAGACAAAAACAAAAAAAGCATAGAGAACATCTCGAT
GTGGGAGCGATAGTGTGTCACCGGGCATCCCACAGTGTATCCCTCTGTCCACACATCTTCACTTGCAATGAGTGTTTGGTTCTCTGTGACACGG
TAATTCTGAGTTCCCCAAAGTATAAGCTTTTATGTTATTTCAAGATTATGCTTATACTCAATTTACAATAATAACAAACATGTGGCAAAAGTGA
GAGCCTGAGAACTAACGACATAAAAGGCCGTGTCACATGCCGGAGAATGCAAGAACAGAACGCAGTTTAAAGACTCACACTTGGCCTAGTCTAG
AGAGTGGGTGGCTTCCAACAGGGATCTGATAGTGACACATGGTCACAGAAATGTACTATGGTTAGTCGAAGATCTTTGGGGAGAATGTTTGAGA
TAATTTACAAATAATCCAAATTACTTAGAGAACTCTATACTTTTCTGCCAAGAATAGTTATTATGTCATGCATCATCGTGCATATCTATAATTC
CAGCCCAGAGGAGTCTGAGGCAGGAGGATTGTTGTGAGTTTTGGGCCATTCTGGCCTATACAGTGGGTTCCAATTTTGTCTGTATTATATTATA
GGGTCTTGTTTAAACAACAAGAACAACAACAACACAAAACCAAACAAGCAAAGAAAAAAAACCCTCCAAATTAAAAAGAAACTAGTTCCCAAGC
TGGGTGTGGGGCACACATTTGTAGTTCTAACACCCAAGAAGACACAGGACGACTGACAGCTTCATGTCAATCTGGGCTACACAGCAAGTTCTGG
GCCAGCCTCAAACACAGGAAGACCCTCTCTCAAACAAAACAAAGCAAAACAACTCCACAAAGCCAAACAAAGAAACCCAAAAGTTATGAGAATC
ACAAACGCTGCCTGTCTATGTCCTTGAGGCTAAGAAGCTCCTATGGCAGGGAATGTTTGTGCCCATTAACTGACTGAAGCCAAGGTGGGAAAAA
CTGGGGAGAAAGGTCTGAGGGCTCCAAATCAGAGCAGCTTTGCCTTCACCTCAGGGGAGAGGTTCCATCCACAAACAGCTGGGTCGCACACAAT
AGAGCCTGCTTCCGCAGATCCTATCACCAACAGCCAGCAGGGCTTCCTGAATCCAACCTCCAGCAGCCGAGGGAAGCAGGTTTTGCAAAGAGGA
TTGGCAAGTAGCAACTTCCTCTTCTTCAGTTTATTCTTATACTTGTGATGGTTAAAAATGCAATCTGCCACTTGTCTGCTATGAGGTAGCCTGG
GTGCAGGCCTCATGCCTTCCTCCACCTCGCCTCTCACTACCTCTACAGGCAGTCAGGAGAGCTGGCCTGGGCTCATGCAAGGGGGTGAGCTAGC
CCTGTCCTTCACAGGCTTTCGAGAGCAGGCCTTCCATCTAGCCTGTGCTGCAGAGTAGAGAGGACCCTCGTCGAGGGAGCACAGTGAGCAGCCC
TGAGGGTGTGAGAGCAGGAGAACTGGCCCTGCCCCTCACTCACAGGCTGTAGTGTATCGGACAGTGGGTCCTGCCCTTTGGGCAGCACAGTGGA
GCCAGCTCTGCAGGCATAGGGAGATCCGACAGCTCCCTATTTCCAGATGTGACTGTTGCATGTATACAGGAAGAGTGCTCTTCCAGTGTTGGCT
ACAGACAGCTGCTCTGGGAAGACATGTATTCTTTAGTGTCCTCACATGCACTCCACACGGTTTTATACATACATTTCCTATCCCACATCAGCCT
TTCCCTTTAAGTTTCAATTTAAAATACTTTCTCAATTCATAATTTTTGCAAAATTCAACTGAGAGGACCTGTATATTTCCTGAGATTGAACCAG
ACGCTTACCTCCTAAGTTCCCCCAGCAGTTACATCCTACTTAACACAATAATACAATTACCAATTGCAACAGATTCTAGTCAGATCTCAATATT
TGTATGTACTCATATGCATGGATAGCTCTGTAACATTTTTTTTTCCTAAGCTGAACATGGTGGTATTGTGTTTTAGTTCCTGTTATTCAGGTAG
CTAAGGCAGGAAGAGTCCTTGAATATAGATGTTCCGATGTAGCCTGGCCAGAAAGCAAGACTGTTTCTAAGCAGAGTGAATGAATGAATGAATG
AATGGTCAATCCATGTGCTTGTGGATGTGTATGTAGCATTGTACTGTGTCCCTGTCTTGGGTCTTCACGCTGTTTATCCTTTAGTTTCATAGAC
AGCTGGTTTGTTCTCATTGCTCCTGAAGACAATGCTGTCATGTCCCCTAACTAGCTGCTCACTGTCCACACGCTGTGCACTGCAGTGAGCACCT
GCACTGTACCCATGGGTGCCACAAGTGGGTTTCAAGGGCAGTGTGAGCCCTGAGCTCCACAGATGGATTCTAGGGATTCCTTGAGGCACGCATT
TTATGCGTGTGTAAAATGTAACCCTTGGGTGTTGGTGGCCCACCAGCCACTGCTTCCCAGCAGGAAGAACTCCCTGAATGGGAGGTCGGGCAAG
TCCTCACTACACAGCCTGGGCTTCAGTGTAAACCGCCTACAACACAGACTGGCTGGCATTGAGAGTTGCTGCTACTCTCTACCAGTGATCTCAG
CTTTTTGACAGACACTTTTGTGATTGGGTTAGCCCCACTTGTTTCTGAAAACAGTTTTCCATGCGTCCTACTTACAACCATGGAAGCACAGCTT
TGAGGTCAGGGTAGTCAGAAAGACCTCCCAGAGCCTATTATGCACAGTGCCTGGGATTCTTTTCTCCCTCAACTTTCTTAGGGAGAGTGCTGTA
TTGGCTAACTATGCCCTGAGGATCTGGTAGCACCTGTGATAGTATTACAGTGCAGCTTGTATCTGTGCGTCTCTTGAAGCCAGCCTGCAGCAGT
GTGTTCTGGTTTAGCCTATGTACTTCCACACCATTCTGGAAGGATGACATCTTTCTTGATTGCTTTCTTTTAATACTCTATTTATCTTTTGTTG
TTAAAAACACAGCATTGGTTCGATTTGCAAATGTATAGAATTACCAGCTATAGATAGATACCTATCAGAAATTCAGAGAAATTAAATTTTCTTC
TACAAGAGTTAAAAAAAATCATGTACCAAACGTATCCCATAACCCCGACTGTTGAATGCTGGTTCCCTCCGTGGGCCTTTGAGCCTGGCATGCA
GAACACGAAGCTCCTTGAGTGACAAATGTCCCTACAGTATGACTCCATAACGTAGCCTGAAGCCAGGGGCTACAGACATCCCTAAGCAATGGCT
CTCCCTCTCCTTCTCTGTGTACACACCTCTGCACTTGGCCGTGATCACCAAGCAGGAACATCTACTAGAGGATTTGCTGAGGGTTGGGGCTGAC
CTGAGCCTTCTGGACCGCTGGGGCAACTCTGTCCTGCACCTAGCTCCCAAAGAAGGACACGACAGAATCCTCAGCATCCTGCTCAAGAGCAGAA
AAGCAGCGCCCCTTATCGACCACCCCAATGGGGAAGGTAAGAGCAGTCGCCTTGCTGGCTAACCCTCCCCTCTCGGCTGCAGCATAAGGGCTTG
GCATTTGACAAATGCGTCTGACATGACTTTCACCATGAATACTCTCCTCGGCCAGCTGGAGTTTGTCATATCTTGTGGTTATTTCTGCTGTTTA
TTACAGCAAACGCCCTTAAAGAGTATTTGTGAGTATTGCTTAGTAAGTGGAAAAGCAAGCCCGAGCAAACATTAGTCTTTATAAAGCATCGTGT
GTGTGTGTGTGTGTGTGTGTGTGTGTGTGTGTGTGTGTGGAGAACGTTTACATAGTAGCTCAGTGTCTCCCCAGAACACAGTGGGAGCTTGTGG
CTTCTGAAAGTAGAACAGTGGACCGTCTGAGGCTTTGAAGCACGCCCTGAACAGAAACCGGAAGTGCTGCGACCTGGTGGTGTCCCTCCTCCCC
GCAGCCCAGCTCTGTCAGTCTCACCCACATCTCTGCCTTTGTTCGGCCTTAGGTCTAAATCCCATCCACATAGCTGTGATGAGCAATAGCCTGC
CATGTCTGCTGCTGCTGGTGCCTGCCGGGGCAGAAGTCAATGCTCAGGAGCAGAAGTCTGGGCGCACAGCGCTGCACCTGGCCGTGGAGTACGA
CAACATCTCCTTGGCTCGCTGCCTGCTTCTGGAGGTAAAGGCGTACTTGTGATCTTGACCTAAATCCCCCTGGAAGTTTTAGGGAAGTCTTTTC
AAAGAATGACTCTAGGGCCAGCTCGCTGTCAGTATTCCACTGTCTGCTTTCTGCATCCCCAGCTCCACCCCAGCTCTCAACCTGGGGATGCCAG
TGACAGAGCCAGCCCAGTATAGCAGTTGGGTGAATGATGTAACCTGAGGTGCAACGGAGATGTGGAGGTAGACAGTGCAGGAGACAGCCCCTGC
TAACTCTTTCTTTGTGGGCGGATTTAGGGTGATGCCCACCTCCACAGTACCACCTATGATGGGACTACACCTCTGCATATACCCGCCCGAAGAG
GGTCCACCAGACTGGCAGCTCTTCTCAAAGCAGCAGGTAAGACGCTGTGGTCACTGATACCAGCAAAGCAAACTGCCTGCAAGTTCAAAGCTGC
CTGCGGAAGCTGCGGTTCTGCCCTGGGAAAGTGCCGGTAAAGGAGACCTGCACCCGGGCCACTCTGCAGCGGCTGCACTGGAGGCTCTGCTTGG
CCTCGCGTTTACCTTGATGCTCACGCTAGTTCCCACTCTCTGGTTATCTACGTTGCCTTTGGGTTGTTGAGGTTTACTCGGTACCTATAAAATC
TTGAGCTGTGTCAGCTTCTGGTCATATTACAAGTCTCCCAGAAGGAATATCTAAAGACTTCCTTTTGCAAAAAAAAAAAAAAAAAAAAAGTCTC
TTAGAAGCTGAAAGCATGGGAAAAGCAAATGAGCCCTGTATTTGTGTTACTGTGCACGAGGCACTAAGACTTGCTGGCCTCCACTGCCTTTCCT
CGGCTCCAGGCACCATGCTCGCATCCCATATTCACAGTCTCCTTTACCACATCTACTCCTCAGTAACTCTCTGAGATAACAACTGTTGCTATTA
ATCCCATCTGAGCACCAAGAAGGCAGACTACAAAGATGATCAAGCCCCACTCCCAGTGTCCCGGAAAGCTGAGTCACAGCACCGCAGCCTGACT
GCAGACTCTTATTCTTCACGCTGTCTTTCTTTCTGCTCTGCCTGGGGTTCTAGTCCTTCCTGTAAACCACTCAGAAACATTCCAGCTCATCTCC
TGTCTCCGGCGCTTTCTGTGTTCAGTGTTAACACATGCTTGATGAGGTTGGCTGGCCTTCCGGGCCTGCCCAGACACACCTGATTTACTTCAGA
GGTTGATAAGGGAGGATTTGTGAACGACACATTCCTTATAGATTCAGGCAAAGAGGCCTTGGTTGTAATGTGTTGAGTCATTTTGGAAGTCACT
GATTATACTGGGGGAAAAAAAAAAGGTTGTCTCTTAGTCAGACACCTGAAATCTCAACATTCAGAAGGCTGAGGCAGGAGAATGGCCACAAGCT
TAGGCTACCTTGGTCCACATAGTTCTAGGCAGAACAAAGATACATAGTGAGATACTGTCTCGACAGTAAATACATAAATGTAAACACTTTTACT
TGAATTCACCATGAAAAGGTAGCAAATAATATCTTGTGTGACATAAAGAAAACCACACAAAAAGCCTAGCCCTGACCTCCTCGGAGTCACAAAG
GTCACTTCAGGGACATGTGTAGCCCTCGGGTCTTCAAACTCATTTCCCAGTCATGTTCCTTCCCATGTTTTGCTCACGTTATAAAAGAGCAAGT
GAGGCAGCAGAGAGTGGCAAGGCAGCAGTGTTGGCCCAAGTCAGAGGTTCTGTCGGCAGAACTGAAGCAAACACTTCATTCCAAAAGGCTGTGC
TGAGCCTGCCTGCCTGCCTGCCACTGTTCGCCTACCCGGAGCCGGACACCCATAGGTAGAATAGCCAGGAAGGCATCACAGGTAACTCCACTAA
CATTAGGCTTACGTTTTATGTTGTCTTGCTCGGAGCTGAAGAACAGGCAATATCCCCAAGATTTGTTAGCACATTTTTTCCCCATAACAACACA
TCCTGCCTAGCATAGCGGCCTTGTGGTGTCCATTTCTCTGTTGCTTAGGAACTAGAACTAGGGCCCCAACAGTACAGCACTCAAGGACAGAGCT
GACCAAGCAAATCTGCTCCACACAAGTAAGCGAGAGTGTCAGAAGTGTGTATTGGTAGATGTAAATGTGAAGGTTCAGGACTTTACCCCTGTGG
GTGCATAAATTGCCACCTACTAGTCCTTAGGTTAAAATGTATCCTTTGTAGTATAATAATAATAAGAATAATAATCCTGCAGAGTTACAAATCC
CAGGAGTACTTGAAGTCTTTCATGTATTTACTTTACATCCTGATCACGTCCTCCCCTCCTCCCAGTGCCCTCCACATGGCTCCTCCTCCCCACC
CCCTCCCTCTCTCTTCACAGGGTCCTTGGCTACCTACTTCCATAGAAGTGAATTAAAATTTTTTAAAAAGTTGTTTTAAATTTCACTAGAAATG
AAAAGTTATCCTGTAATTGCCTTAATGAGCTAGAGGTAACCTGTCCCTCGACATGGGAATCCTGTGTCTGATTGGAGGCGGACAAGCTTTTTCT
TTTACACAACACTGTATTTCCCTCACTCCATAGGAGCAGACCCCCTGGTGGAGAACTTTGAGCCTCTCTATGACCTGCACGACTCTTGGGAGAA
GGCTGGAGAAGATCAGCCAGTGGTGCCAGGTACCACACCCCTGGACATGGCTGCCAACTGGCAGGTGAGCTCTGGCCAGCCCATCTCATGGGTA
TTTACGGGGGAGCCAGTGGCTCAGGAATATAAAACAGATGGTCTTCTTGGCATGCTCCTCCCTAAAGAACATGCCTTTGTTTTTATCAGGTCTT
GTTACCGAGAGGGTCTTAATCTTCAAAGATGGTCTTCATCCATGAAACATCAACGTCCGGTGAGCCAGAGTGTAAAGCTGTTTGCGTAACTGGA
TTAGAGTTCAGATATGAGAGGTTAGAAAAGCACAAAATGCACAGAAGAGTTACCCTGTCAGCACACGACCAGAGTTCTTGCCATTTCTGTCAGA
AGCTAGCTTGCTCAGAGCTTAAGTAAGAGGTTTCTGAACATAAAAATAAACTAGAAATTCTCTTGTCCATTTCCATAAACATATTAAAAACCTT
CCTTAAAACACAATAGGGCTTACACTTAAAGGAGAAAACGCTAGGTGTTTGGACCAAGAGAAAAGACCCAGAACCCAAAGTAGGCAGTGTACGG
GTCCAACACAGTCGGGTTTGTAGGAATCTAGACTCTCTGTGCACGTCTAGGAGGCTGTTTGCTGGCTGGGTTCCTACACGGAACACAGAAGACT
GACCCCTGACCTGATTCCTACCCTGTGTACCATCAGCAAATTCACCTCAGAGAACACCAGGACTTTTAAAAATCATTTCTGTGAATATTTTCTC
ATGTTTTTCTATCCGACACCTATTTGACATACTAAATGGGAAACCGTATGAGCCTGTGTTCACATCTGATCATATACTACCACAAGGTGAGGTG
TGGCAGGACAGATTCTCTCAGCCAGTGTTGCCCCATGCTGTGGTTTACAGGAGGAGAGGAGAGGCCAGCCTGGGCGAGGGTGTACTGCAAACCG
TCTAGATCTTATCTCAGAATCTGAGATCCCTGGACGTGTGGCCCTGAGCTGCTAGAAGCACCTACTGCTGCTCCTGAGCAGGGCCTCTCCACTT
GGCAGAAGCTTGGTGGCCTCCATCAGAAGTTGCACAATGACCTGTCCTCTCAGATTGATTGTCCCTGGAAGGTTAAAGCAGTCATGTTTCTTCC
TTAGGGGACATGAAGCAGCTGACACAAGACACGAGGCTACAACTCTGCAAACTGCTGGAAATTCCTGATCCAGACAAAAACTGGGCCACTCTGG
CACAGAAGTTGGGTCTGGGGATATTGAACAATGCCTTCCGGCTGAGTCCTGCTCCTTCTAAAACTCTCATGCACAACTATGAGGTAACGCGCCG
CCGTACCATTTAGAGTTGTCTGTGTAACTATTGGTAGTTGACCGTGTCAGCTCCACTGAGCAGCACAGCCTACCCCCTTACATAGTAACTTTAT
GGAAGGAAACCAGTCATTGCCTGGAAGGCAAAGGGAGCCAGGCCAGGATGGTGCCTTTTTCTTGAGAAGACTGGTTACCCGTCTCTCGGCATTC
CCTGTTTTCAAATTCTCAGAGCCTTCCTGTCAAAATACTACTGCCCACAGGATGGGGACCCCTCCAAGCTGTGATCGGTGTGTGCATCCCTGTT
TGCAAGAGGGAGCCCCCCAGGGCCATGGCTTCATTGTTCTGTCGGGTGACTCCTATTAGAGCAATTCCAAACTAAAAAATAGACAAACATGGGC
GAGCTACTCCGAATGACCCTGTCATTGCTAGCTCCTCTCTTCCCTGGATTTCTGTGCGTAGACATCACCGTAGGCAGTCTCCTGTCTCCTGTCT
CCATGAACTCACAGGCTTCTTTCCCTTCCTTCCCCTCTTTTTTCTTATCTCTCTCCCCNNNNNNNNNNNNNNNNNNNNNNNNNNNNNNNNNNNN
NNNNNNNNNNNNNNNNNNNNNNNNNNNNNNNNNNNNNNNNNNNNNNNNNNNNNNNNNNNNNNNNNNNNNNNNNNNNNNNNNNNNNNNNNNNNNN
NNNNNNNNNNNNNNNNNNNNNNNNNNNNNNNNNNNNNNNNNNNNNNNNNNNNNNNNNNNNNNNNNNNNNNNNNNNNNNNNNNNNNNNNNNNNNN
NNNNNNNNNNNNNNNNNNNNNNNNNNNNNNNNNNNNNNNNNNNNNNNNNNNNNNNNNNNNNNNNNNNNNNNNNNNNNNNNNNNNNNNNNNNNNN
NNNNNNNNNNNNNNNNNNNNNCTACACAGACGCCATTGAAGTGATCCAGGCAGCCTTCCGCACCCCGGCAACCACAGCCTCCAGCCCCGTGACC
ACTGCTCAGCTCCACTGTCTGCCTCTCTCGTCTTCCTCCACGACCCAGCACATAGGTAAAGACCCTGAGAGAGTTCCTTTCCTCGCTGCCAAGG
TCTTTGTGCTCTGGGACGTGGCACTACACTCCCTTTCCCTAGTCTTTTTCCTGACATGTGTTCCTCTGTGGCATGCCACCCGCTCCCTCCCCAC
AGTCCTCCTCTGCGCACACAGGAACAGGCAGTTCCCACAGACACTCACATTGGCATATAGGTCACTTAGAATCCCAGTACACACTGGACATGGC
GGGGAGGGTTAAAGAAACACTACTTCTCATATTTGTTAAATTTGGAGAAAGATTCTAAGAAAGGTGCACAGCCCTGGGCCACAGGACAAGAAGT
AGGACCCAGGAAATATGCATACTGTATGACCCTTCCTTTCATGCCACCACCCTTCAGGTCCCCCACCTCCTCCCTCCCTCGGCACTCCCCGTCC
TTCAGCTCCCACCCTGCTCATGGTCCTGCCTTTGTCTTCCCACACTAACATCCACCTGTCACCCCCAACACATGCATTTCTACGAATGGATCTC
GGTACAGGCTTGAATTATGTCATTGTTCCCGGCCCGTCCTTTCTCTAACCTCTGCACCCTTTCTTCTTGTTCATTTTCTACCCTAGCCACAAAC
TCCACTGAGACCAGGAACAACTAGCATTCTCCCATCTTTGTATTATGCCAGCACCCCGGTGGCAGGCCTTCCATCTGGGCTCAGTAGGTTATGT
CTGCCTTCCACCTGGGGCAGTCCTCCCCTGGGAGCCTGCCTGTCACCTTCAGCAGGTCCTGGACACCTGATTCTTGCCTCTTTGTCCTGTACTG
TCCTTCCTTCCCCACCTGCTGTGGAGAACCTCTTGCTAGGATGTAACTTCTCATCTTTAAACACTGGCCCGCCTGGCCACAGGCTGCTTAGCCC
CGCTTTGATTAATGTTACATCTCAATGAATGGCTTTGTCCATTGATAGCGCTTTGGTTACCTCATGTTTTCACGTTTCTATCATACATGCTGTT
ATTTTTGTTCGCATTTCTCATATGGGGGGAATCTACAGGTAAACACAGCCTCCAAGTTCAGTAGAAAAATGTCATCATAAGAGTATTATATCCA
ATAAACAGTAAACAGATTTTTTAAAAGAGAAAGAAATTTAGAGAAAAACGAGACATCACTTCCTTGTTACACCCTTTAGTTGAGTTCAAACTTC
TCAGAAGAATATGATAACTGCTGGTCACCTCACCACCTCTGTCTCCCATCTCCTTCTGTCCCCTCCTCTCCTANNNNNNNNNNNNNNNNNNNNT
CCCATTTTCACATGTGTTCCCTACCCTTTCCATCCCTTTAAAGCCTGTTTTCCCCCCCCTGGAGGCCTTTGCTAGTTTTCTGGCCTCTGCTCAC
GCTCACTTCCACATGAATATACATACGTGACTGTTGGAAGCTAGGATCCACACGTGAGAGAGAACGAATGGTATTTATGTCTCTGGGCTGCCTT
GATTAGTATTCTCCATTAACCTGCAAGTTTCATCTCTCTTTACGGCCGAATAAACTTTTATCATCTTCACACAACTCTTGGCTCTTGCACAAAC
TCATACTGGCCATGACTGTCAAAAGTATAGCCAGGCTGTAACAAAATCTAAGAGTGGCAATGAATACTTTCTGGCATTCAGGTCCTCATGCTTA
ACCCTGAAAGGGCATCTCTTCTTGGCAGATGCCAAGTTCCGCCCATCCTCACTGCTTGCCTGAACTCCAACAGTGGCTCCTACTCAGCCTCTTT
GACTCTTTCCTTGCCCCTCCATCAGTTCTCTGCACCACAGTGATGTCACATGATAGGGCTCCAGTCACAATTAAAAACTAAATACTTAGCAGCT
AGGAACACGGCAAGTGTCCCCTCCTCTACCTTTGGGAAAGCCAGGTAGGGTGACAAATATGTACAACCCGATAGCCCACTCATAGAGGAAAGGA
CACCGAGAGAGGTGGATCCACGGGACTCACTGGCCAGTCTCTAAAAACAAGATGGAGAAGGAACAAGGAAGTCACACAATGTTGACCTCCCCAC
ACCCCACACCTCCACATGAGCACACATCCCACAAACACAAAGCAAATACTTAAATACTGTATTAAATTTCCATCATTGTGACCAACTTAGGAGA
GATTTGGTTGGGCACACAGTTTTTATAGGTCCCATGGTCCACTGCCTTCGCGCTATAGCAAAACCCTTCATCACGGAGGAAGCACATGGTAGAG
GAATCCTACTCACTTCAAGGTGTTTGGAAGTACACAGAGATGGGGAGGAGCCCCAGTACAGATCTCTTTCAAAGCCACGCCCTCCATGACCTAA
CTTCCTTCTGTGAGGCCCCATAGTCAAAGAGTTGTATCACCTCCAGATAATGTCACAGGCTAGAAACCAAGCCTTTACTTAGCACACAGCCTTT
GTGGGACATTTTAAGATCCGAACCATAATACACAGTAAGCCTTTCAAATGCTGCCCAGTCCCTGTTACACAACAGACAGTTGACTGGATGAGGT
AACACCAGGACACCGCTCTGGCATGGTCATTGAGTCTCAGTGTTCTGACGTTAAGATTCAATGATGAGAGTCAAACATTTGCTTAGTAAGTGTT
ATGCTTCTGTTTCTTTAGTCACTCTGTACAGAAATAATCTGCTCTGGTTCCCAGGAATGCTTTTCAGGTGATAGAATTTAACTTAAGCTTTTGG
TATAGACACATTTAAAAAAAAAAAAAAAAAGCCTCATTTTCTTGCACCAAAAGAAAATTTTCTAGGCAATGTGTATTCTTTAAAAGCTCATACA
GCTCAGAGAAAGGTGCCATTTTTAGTTCCTGCTTCTGTTATGAGTTTATTTTGCCTTGTATTCAGCAGTTTGCCCACCCGTTAAAAAAAAAAAA
AAAAAAAAAAAAGACAAAAGGTAAAATGATAGAGCAGTTAGAAAAATATGCCTCACTTTACAAAGGAAAACATGTTTATCCTGAACCAAGAGAA
TTCAGAACAGATTCTGTTCAACAGAAAGACTGATGTACCCTGTAGCACTCTCTAATGTCATTTGATAACCCTGCCATTCACACAGCCAAGCAGC
ACCGGTGGCATGATGGGGAGGTGGGATGCCGTGCTCCGCAGGAGCTAGCAAGCACAACCCTCCATACCATAGTCCACACCGAGCCTGGGAGGGA
GCCCACTGCTGTGGATGGTGCTCTAGGGCACTGTGACAAAGCTCTCTGGGTTTATGTCAGAAGGGATTCAGGGCAGGAACCCAAAGACTTTGAA
TCTGAAACTGCTGAGCACCCCGGCTTGCTGCCTCATGGGCTCATGCTCCGCTACCTTTCTTTTCCTTTTTTTGTTTTGTTTTTTTTTTTTTTTT
TTTCGAGACAGGGTTTCTCTACATAGCCCTGGCTGTCCTGGAGCTCACTTTGTAGACCAGGCTGGCCTCGAACTCAGAAATCCGCCTGCCTCTG
CCTCCCGAGTGCTGGGATTAAACGCGTGCGCCACCATGCCCGTCTTCCGCTAGCTTTCTTACACAGCCCTGGACTGCCTCTCAGGGAGTGGTGC
TGTCTACACAGGATAGGCCCTCCTCCCGATCAGTTAACTGTCAGGACACCCCCACAGACCAGTCTCATCTGGCTGGGCCCTCCCTCATCTGCAC
CTCCCTCCTCAAGTGATTCTAGACGTGTGAAGTTGACAGTTGAAGGTGACAGGGACAGCAGGCAGAACAAACCCCTTGCCATGGCCTAACTCAG
CCCCTCATGAGTCTGTGCTTTCTCCGCAGATGAACTCCGGGATAGTGACAGCCTCTGTGACAGTGGTGTGGAGACATCCTTCCGCAAACTCAGC
TTTACAGAGTCTCTTACTGGAGACAGCCCACTGCTATCTCTGAACAAAATGCCCCACGGTTATGGGCAGGAAGGACCTATTGAAGGCAAAATTT
AGCCTGCTGGCCGTTCCCCCACACTGTGTAAACCAAAGCCCTGACAGTCCATTGCATCGTCCCAAAGGAGGAAGGCAAAGCGAATCCAAAGGTG
CTGGAGAATCGCCGGCCTGCAGGGTCACTCGATTTCATTCAAGGCCTTCCGAATTTGGCGTCCTTTCTTGGTTCTGAAATGAAATGTAGTTGCC
ACGCACAGACGGTGTCTAGCAATCATGGCGCTCGCTCGCTCAGCTGCACTCTATGGCTCAGGTGCAGTGTCTTGAGCTTTCTCTGCTGCTACTG
GATCACATTTGCTTTGTGTTCTTACTGCTGTCCCTCCGCTGGGTTCCTGCTCTCATTAAAAGGTGTCGCTGTCCCCACCCGGTGTCCTTTCTAG
CCATCTACTGTAAGTTGTGCATTCAAATTAAGATTAAGGAAAAACATATTTTTAAATGAGTACCTTGATGCGCAATAAAAAAAAGACATTTCTT
TTTTTAATGTGGTTTATCTGTGATTTAAAAATAAAAAACACATGAACTTACAATATTTAAAACATGCTACAATCAGTGCTGAAAATAGTATTTT
CCCCGTTTTATGCATTTTACTATTGTAAATATGTTTTCTAAATCAAATACTTTAAAAGAAGAAATGTTGAATTTATAAATGCTATTTACTTTTT
TATTTTACTTTTATAATAAAAGTACAAGCACATTGTTGACCTAATCTTGTCTGATCTCTGCAAATGCTTTCTCAGAGGAGTCCCTGTGACTGTG
GGAACAGCCCCACAGCCCGTTTGTCACATCCACATTCTCCTTTAGACACATTTCTTTGAAGCTAGAAATGTTCAAACTGTGGAAATAAAAGTGT
TCTAACCCAAGACTGAGGTTCTGACCCAGGCAACATCATCTGGACGCCTAGCATCAACATTCCAATCTCTACACCGTTCCTCTCCAGCGCATGC
TGTCTGTGTCTATGAAGGATAACAGACCCCAGCTTCAGCACTTCATCTTCTGGATACGATGTGGCCGTTGCGTTCATAGCTAACTACACAAAAC
CTGTACAAGATGTGGTCCTTCATCATGTATAGAGAGGGACTGATGAAATACACACACACACACACACACACACACAGACACCACACCAACTGGC
TGTTAATAGTTGCTAGGGGAATGGGAGTCCTTTCTTCAAATGGTATAGCACATACTCCAGTAACTATTCCCTCCCCATGTTCATGCAGGCAGCC
CTAATTAAACTCACTCATACACACAAGCACAGAAGCAGGAAAGTAGGAGGCGGAAACGAGAAGGCAGCGGGGTTTGTGGATATGATCTCAGTAC
ATCCTATACATGTTTAAGATCATGAGAAAATATACATTTTAATTAAAAACTAAATTCCAACATATGTAAAAGATTTTCCAGTATGGAGTTTAGT
AAGTCTGCATGCCTGAAAGTAGAAAGAGGGAAGATTAATGGCTTGAAAGAGGTCTTAGTTTGGACTCTGCTGTGTGACCAAGGTCATTTAGTGT
GTAGTGTAAAGATCAAATCCAAAACCTTCTGGTGAAGTGGCTTGGCAGTTAAGAGCACTGATCTTCCAGAGGACCAGTCAGTAGGTTTAATTCC
TAGAACCCCTCACAGCTCACAACCACCTGTAACTTCGGTCCCAGGGAATATGATGCCCTCTTCAGGCTTCTGTGGGCACCAGGCATATAAATGG
TGCACAGATATACATGCAGGCAAAACATCCATACACACAGAAAGAAAAAACCAAAAACCTAAGGCCTTGTCATGCCACACAAGTGATCTACTAC
TGATCCCACGGAAGGGCCTGGAAACCCACCAGCTATTACCTTTGGGAACTGCCTTCACTACAAAGAGCTCTCACCCCCATTTCCATGGTAGTCA
TATGAATGCCTTTCCCATTGCTGGGACCTTCAGATCCTGGGAGACAGGCTAAAGTGATCTGGGCTATCTCCCTCACACAGCTCAAGGTACCCCA
AATAGACATCTTGTATGTCAGTGTCCATATGACAAAATATTCCAAACTTACAATGAAGAAAATGGAGGTCCAGAGAGCGCAACTCAGTTGTGGC
TAAGGTGCATCTGTGTTTATATCCAGATACTTAGCGCCTAGGCTTGTGAGTTAGAGAATGATTTTATTGCGACAAAAAAGATGATAATGACTGA
ATCTATTAGTAGGGATTTGGTATAAGATTAAGTAAAATATCATTAATGAAGAAATCATTAATTATTTAAATATATAATACAAGCTACTTAATAA
TACTTAAATTATTTAATAAATATTCTAAGTGCCTAATCATCAATTAATCGGAATCCCTTTCTACCAAAAATTCCATATGTATGAAAATTTAAAC
CATACGAATTTTAGACATACCACCAATCTTAGACAAACACCCTTGACATCGAGAAGGCCCTAATCGAGACTTCATTCTGTGATGTAAAAGCAGA
GCAGATTCTACCTCTTAGAATGCATCACAAATGAACAGAAACTGGTTAAACAGCAAATTCTGTTTTCCATTACAGTACCCTCTCTCCACCCTAA
CACACCCTTATTCTGCGTTGGAAACTTTAAGACAAAACTGTCTTGCTTTGGTGTTTCGTAATACTTCCTGGGACAGCCATGCCACCATGCCCCA
GCCAGGACTTTCTATGGCTGTTAGCTGTCCGTCTTAAAACATGGTGCTGAAGCCCTTCCCACAGAGAGACACCATTGTTTCCTGGGTTTAGGCT
CCTGAGTCCAGGCCACCTGTGGCAAGGCAGGAACGATGCTGAGTGACTTCCGAAACTAGGTCCGAATTTCTGCCAACCTTCCCGGAACTACCTT
CTCCTGGAACTCAGTCACCCTGTTCAGAGGGTGCCAAGCAGCCATGAAGAGAAGGCCAGTACAGGTGTTCAGCCAACAGCCTTAACCGAGGTCC
TAGCCAAAGCTTGCCAAGCCGACGGCTGCCACGTGACCCTGCCTAGCCTTTAGGCTGTCTCAGCAGATGCTGACCACAATAAACATGGGCTGTT
TTGCTGTTCTCAAAGGACAGATTTGAAAGCAAATTAAATACTAGTGGGGGTTTTAAGCCCTGGGTGTAGAGTGGACACCACCATTCTCCAGGCA
TTTGAAAAGACAGCTTGCCTACCATAAGTTCAGCAGAAAAGATACTGACTGGAGAGACGC
MOUSE SEQUENCE—mRNA
AGCGGCCGCCGCGGGCGCGCTCTAGCAGCGCAGGCCGGAGCTCAGGGCCCCGCGCGCCCGGCCCGCCCCGCGCTTCTCCGCCCGCGCCGCAGCC
ATGGCGCGCCGCTGACCCGCCCGCCCGCCCGCCCCCGCCCCGACCCGGCTCGGCTCCCGCCGGTCCGCGCCGCTCCGCACCGGAGCCCGCAGGC
GAGGAGAGGCCGCGCGCATCTCCAGGGTACCCTCAGAGGCCAGAAGAGGGTGTCAGAGCCCTTGTAACTCGAGTTTGACGGTCGTCAGCTGCGC
ATCTTCACCATGGCAGACGATGATCCCTACGGAACTGGGCAAATGTTTCATTTGAACACTGCTTTGACTCACTCAATATTTAATGCAGAATTAT
ATTCACCAGAAATACCACTGTCAACAGATGGCCCATACCTTCAAATATTAGAGCAACCAAAACAGAGGGGATTTCGATTCCGCTATGTGTGTGA
AGCCCCATCACACGGAGGGCTTCCGGGAGCCTCTAGTGAGAAGAACAAGAAATCCTACCCACAGGTCAAAATTTGCAACTATGTGGGGCCTGCA
AAGGTTATCGTTCAGTTGGTCACAAATCGAAAAAACATCCACCTGCACGCCCACAGCCTGGTGGGCAACCACTGTGAGGACGCGGTATGCACCG
TAACAGCAGGACCCAAGGACATGGTGGTTGGCTTTGCAAACCTGGGAATACTTCATGTCACTAAGAAAAAGGTATTTCAAACACTGGAAGCACG
GATGACAGAGGCGTGTATTAGGGGCTATAATCCTGGACTTCTGGTGCATTCTGACCTTGCCTATCTACAAGCAGAAGGCGGAGGACACCGGCAA
CTCACAGACAGAGAGAAGGAGATCATCCGCCAGGCAGCCGTGCAGCAGACCAAGGAGATGGACCTGAGCGTGCTGCGCCTCATGTTCACAGCCT
TCCTCCCTGACAGCACTGGCAGCTTCACTCGGAGACTGGAGCCTGTGGTGTCAGACGCCATCTATGATAGCAAAGCCCCGAATGCATCCAACCT
GAAAATCGTGAGAATGGACAGAACAGCAGGATGTGTGACGGGAGGGGAGGAGATTTACCTTCTCTGTGACAAGGTTCACAAAGAAGACATCCAG
ATTCGGTTTTATGAAGACCAAGAAAATGGCGGAGTTTGGGAAGCATTTGGGGACTTTTCCCCCACGGATGTTCATAGACAGTTTGCCATTGTCT
TCAAAACGCCAAAGTATAAGGATGTCAACATTACAAAGCCAGCTTCCGTGTTTGTTCAGCTTCGGAGGAAATCAGACCTGGAAACTAGTCAACC
GAAACCCTTTCTCTACTACCCTGAAATCAAAGACAAAGAGGAAGTGCAAAGGAAACGCCAGAAGCTTATGCCGAACTTCTCGGACACCTTCGGC
GGCGGCAGTGGAGCGGGAGCCGGTGGTGGAGGCATGTTCGGTACTGCCGGTGGCGGAGGGAGTACCGGAAGCCCTGGCCCAGGGTATGGCTACT
CGAACTACGGATTTCCTCCCTACGGTGGGATTACATTCCATCCCGGAGTCACGAAATCCAACGCAGGGGTCACCCATGGCACCATAAACACCAA
ATTTAAAAATGGCCCTAAACATTGTGCCAAGAGTGATGACGAGGAGAGTCTGACTCTCCCTGAGAAGGAAACTGAAGGTGAAGGGCCCAGCCTG
CCCATGGCCTGCACCAAGACGGAACCCATCGCCTTGGCATCCACCATGGAAGACAAGGAGCAGGACATGGGATTTCAGGATAACCTCTTTCTCG
AGAAGGCTCTGCAGCTCGCCAGGCGACACGCCAACGCCCTTTTCGACTACGCAGTCACGGGGGATGTGAAGATGTTGCTGGCCGTGCAACGCCA
TCTCACCGCCGTGCAGGATGAGAATGGGGACAGTGTCTTACACTTAGCCATCATCCACCTCCACGCTCAGCTCGTGAGGGATCTGCTGGAAGTC
ACATCTGGTTTGATCTCTCATGACATCATCAACATGAGAAATGACCTGTATCAGACACCTCTCCACTTGGCCGTGATCACCAAGCAGGAAGATG
TAGTAGAGCATTTGCTGAGGGTTGGGGCTGACCTGAGCCTTCTGGACCGCTGCGGCAACTCTGTCCTGCACCTAGCTGCCAAAGAAGGACACGA
CAGAATCCTCAGCATCCTGCTCAAGAGCAGAAAAGCAGCGCCCCTTATCGACCACCCCAATGGGGAAGGTCTAAATGCCATCCACATAGCTGTG
ATGAGCAATAGCCTGCCATGTCTGCTGCTGCTGGTGGCTGCCGGGGCAGAAGTCAATGCTCAGGAGCAGAAGTCTGGGCGCACGCCGCTGCACC
TGGCCGTGGAGTACGACAACATCTCCTTGGCTGGCTGCCTGCTTCTGGAGGGTGATGCCCACGTGGACAGTACCACCTATGATGGGACTACACC
TCTGCATATAGCGGCCGGAAGAGGGTCCACCAGACTGGCAGCTCTTCTCAAAGCAGCAGGAGCAGACCCCCTGGTGGAGAACTTTGAGCCTCTC
TATGACCTGGACGACTCTTGGGAGAAGGCTGGAGAAGATGAGGGAGTGGTGCCAGGTACCACACCCCTGGACATGGCTGCCAACTGGCAGGTAT
TTGACATACTAAATGGGAAACCGTATGAGCCTGTGTTCACATCTGATGATATACTACCACAAGGGGACATGAAGCAGCTGACAGAAGACACGAG
GCTACAACTCTGCAAACTGCTGGAAATTCCTGATCCAGACAAAAACTGGGCCACTCTGGCACAGAAGTTGGGTCTGGGGATATTGAACAATGCC
TTCCGGCTGAGTCCTGCTCCTTCTAAAACTCTCATGGACAACTATGAGGTCTCTGGGGGTACCATCAAAGAGCTGATGGAGGCCCTGCAACAGA
TGGGCTACACAGAGGCCATTGAAGTGATCCAGGCAGCCTTCCGCACCCCGGCAACCACAGCCTCCAGCCCCGTGACCACTGCTCAGGTCCACTG
TCTGCCTCTCTCGTCTTCCTCCACGAGGCAGCACATAGATGAACTCCGGGATAGTGACAGCGTCTGTGACAGTGGTGTGGAGACATCCTTCCGC
AAACTCAGCTTTACAGAGTCTCTTACTGGAGACAGCCCACTGCTATCTCTGAACAAAATGCCCCACGGTTATGGGCAGGAAGGACCTATTGAAG
GCAAAATTTAGCCTGCTGGCCGTTCCCCCACACTGTGTAAACCAAAGCCCTGACAGTCCATTGCATCGTCCCAAAGGAGGAAGGCAAAGCGAAT
CCAAAGGTGCTGGAGAATCGCCGGCCTGCAGGGTCACTCGATTTCATTCAAGGCCTTCCGAATTTGGCGTCCTTCTTGGTTCTGAAATGAAATG
TAGTTGCCACGCACAGACGGTGTCTAGCAATCATGGCGCTCGCTCGCTCAGGTGCAGTCTATGGCTCAGGTGCAGTGTCTTGAGCTTTCTCTGC
TGCTACTGGATCACATTTGCTTTGTGTTGTTACTGCTGTCCCTCCGCTGGGTTCCTGCTGTCATTAAAAGGTGTCGCTGTCCCCACCCGGTGTC
CTTTCTAGCCATCTACTGTAAGTTGTGCATTCAAATTAAGATTAAGGAAAAACATATTTTTAAATGAGTACCTTGATGCGCAATAAAAAAAAAG
ACATTTCTTTTTTTAATGTGGTTTATCTGTGATTTAAAAATAAAAAACACATGAACTTATCAATATTTAAAACATGCTACAATCAGTGNTGAAA
ATAGTATTTTCCCCGTTTTATGCATTTTACATTTGTAAATATGTTTTCTAATCAATACTTTAAAAGAAGAATGTTGAATTTATAAAATGCTATT
TACTTTTTTATTTATAATAAAGTACAGCACATGTGACT
MOUSE SEQUENCE—CODING
ATGGCAGACGATGATCCCTACGGAACTGGGCAAATGTTTCATTTGAACACTGCTTTGACTCACTCAATATTTAATGCAGAATTATATTCACCAG
AAATACCACTGTCAACAGATGGCCCATACCTTCAAATATTAGAGCAACCAAAACAGAGGGGATTTCGATTCCGCTATGTGTGTGAAGGCCCATC
ACACGGAGGGCTTCCGGGAGCCTCTAGTGAGAAGAACAAGAAATCCTACCCACAGGTCAAAATTTGCAACTATGTGGGGCCTGCAAAGGTTATC
GTTCAGTTGGTCACAAATGGAAAAAACATCCACCTGCACGCCCACAGCCTGGTGCGCAAGCACTGTGAGGACGGGGTATGCACCGTAACAGCAG
GACCCAAGGACATGGTGGTTGGCTTTGCAAACCTGGGAATACTTCATGTGACTAAGAAAAAGGTATTTGAAACACTGGAAGCACGGATGACAGA
GGCGTGTATTAGGGGCTATAATCCTGGACTTCTGGTGCATTCTGACCTTGCCTATCTACAAGCAGAAGGCGGAGGAGACCGGCAACTCACAGAC
AGAGAGAAGGAGATCATCCGCCAGGCAGCCGTGCAGCAGACCAAGGAGATGGACCTGAGCGTGGTGCGCCTCATGTTCACAGCCTTCCTCCCTG
ACAGCACTGGCAGCTTCACTCGGAGACTGGAGCCTGTGGTGTCAGACGCCATCTATGATAGCAAAGCCCCGAATGCATCCAACCTGAAAATCGT
GAGAATGGACAGAACAGCAGGATGTGTGACGGGAGGGGAGGAGATTTACCTTCTCTGTGACAAGGTTCAGAAAGATGACATCCAGATTCGGTTT
TATGAAGACGAACAAAATGGCGGAGTTTGGGAAGGATTTGGGGACTTTTCCCCCACGGATGTTCATAGACAGTTTGCCATTGTCTTCAAAACGC
CAAAGTATAAGGATGTCAACATTACAAAGCCAGCTTCCGTGTTTGTTCAGCTTCGGAGGAAATCAGACCTGGAAACTAGTGAACCGAAACCCTT
TCTCTACTACCCTGAAATCAAAGACAAAGAGGAAGTGCAAAGGAAACGCCAGAAGCTTATGCCGAACTTCTCGGACAGCTTCGGCGGCGGCAGT
GGAGCGGGAGCCGGTGGTGGAGGCATGTTCGGTAGTGGCGGTGGCGGAGGGAGTACCGGAAGCCCTGGCCCAGGGTATGGCTACTCGAACTACG
GATTTCCTCCCTACGGTGGGATTACATTCCATCCCGGAGTCACGAAATCCAACGCAGGGGTCACCCATGGCACCATAAACACCAAATTTAAAAA
TGGCCCTAAAGATTGTGCCAAGAGTGATGACGAGGAGAGTCTGACTCTCCCTGAGAAGGAAACTGAAGGTGAAGGGCCCAGCCTGCCCATGGCC
TGCACCAAGACGGAACCCATCGCCTTGGCATCCACCATGGAAGACAAGGAGCAGGACATGGGATTTCAGGATAACCTCTTTCTCGAGAAGGCTC
TGCAGCTCGCCAGGCGACACGCCAACGCCCTTTTCGACTACGCAGTGACGGGGGATGTGAAGATGTTGCTGGCCGTGCAACGCCATCTCACCGC
CGTGCAGGATGAGAATGGGGACAGTGTCTTACACTTAGCCATCATCCACCTCCACGCTCAGCTCGTGAGGGATCTGCTGGAAGTCACATCTGGT
TTGATCTCTGATGACATCATCAACATGAGAAATGACCTGTATCAGACACCTCTGCACTTGGCCGTGATCACCAAGCAGGAAGATGTAGTAGAGG
ATTTGCTGAGGGTTGGGGCTGACCTGAGCCTTCTGGACCGCTGGGGCAACTCTGTCCTGCACCTAGCTGCCAAAGAAGGACACGACAGAATCCT
CAGCATCCTGCTCAAGAGCACAAAAGCAGCGCCCCTTATCGACCACCCCAATGGGGAAGGTCTAAATGCCATCCACATAGCTGTGATGAGCAAT
AGCCTGCCATGTCTGCTGCTGCTGGTGGCTCCCGGGGCAGAAGTCAATGCTCAGGAGCAGAAGTCTGGGCGCACGCCGCTGCACCTGGCCGTGG
AGTACGACAACATCTCCTTGGCTCGCTGCCTGCTTCTGGAGGGTGATGCCCACGTGGACAGTACCACCTATGATGGGACTACACCTCTGCATAT
AGCGGCCGGAAGAGGGTCCACCAGACTGGCAGCTCTTCTCAAAGCAGCAGGAGCAGACCCCCTGGTGGAGAACTTTGAGCCTCTCTATGACCTG
GACGACTCTTGGGAGAAGGCTGGAGAAGATGAGGGAGTGGTGCCAGGTACCACACCCCTGGACATGGCTGCCAACTGGCAGGTATTTGACATAC
TAAATGGGAAACCGTATCAGCCTGTGTTCACATCTGATGATATACTACCACAAGGGGACATGAAGCAGCTGACAGAAGACACGAGGCTACAACT
CTGCAAACTGCTGGAAATTCCTGATCCAGACAAAAACTGGGCCACTCTGGCACAGAAGTTGGGTCTGGGGATATTGAACAATGCCTTCCGGCTG
AGTCCTGCTCCTTCTAAAACTCTCATGGACAACTATGAGGTCTCTGGGGGTACCATCAAAGAGCTGATGGAGGCCCTGCAACAGATGGGCTACA
CAGAGGCCATTGAAGTGATCCAGGCAGCCTTCCGCACCCCGGCAACCACAGCCTCCAGCCCCGTGACCACTGCTCAGGTCCACTGTCTGCCTCT
CTCGTCTTCCTCCACGAGGCAGCACATAGATGAACTCCGGGATAGTGACACCGTCTGTGACAGTGGTGTGGAGACATCCTTCCGCAAACTCAGC
TTTACAGAGTCTCTTACTGCAGACAGCCCACTGCTATCTCTGAACAAAATGCCCCACGGTTATGGGCAGGAAGGACCTATTGAAGGCAAAATTT
AG
HUMAN SEQUENCE—GENOMIC
TTGACAAGCTGGTTCTAAAATGAATTCAGAAATGCAAAGGACCTAGAATAGCCAAAACAACCTTGAAAAAGTGAACAAAGTTGGAGGACTAACA
CTTCCTGATTTCAAGACTTATTGTAAAGCTATAAAGTAATCAAAAAGGTGTGGTATTATCATATAGATAGAGAAAAGATCAATGGAACAAAATA
GAGTCCAGACATACAGATACAACTGATTTTTAACAATTTGCAAAGGCAATTTAGTGAAGAAAGGATAGTTTTTTTTTTCAACAAATGCTGCAGA
ATCAGTTGGAAATCAATAATCTAAAAAGAAAAAACTTCAATCCATATCTTGTACCACTATATGCAAAACTTAACTCAAAATGTATCATAGACCT
GAATTTAAGTCCTCAAACTACAAAAGTTCTAGAAGAAAATAGACGAGAAAATCTTAGTGAGTTTGAGTCAGGCAAAGAGTATGTGGATACAACA
CTGAAACCACAATGCAGTAAAAAACTGACAAATTATACTTCATCAAATTTAAAATCTTCTCTGCAAAAGAGGATGAAAAGACAAGTCACAGGCT
AAAAAATATGTATTTGCAAATCATATATCTGGTAAAATACTTTTATCCAGAATATAAAATGAACTCTCAAAATTCAATAATAAGAAAAAAAATA
CACCAAAAGTAAACAAAACATTTGAACATGCATTTCACCAAATGGCAAATAACCACATAAACAGATGCCCATCATCATTAGTCATTAGGGTAAA
GCAAAGTAAAGCACAATGAGATACCACTAAACATATCAATTGAGACGATTAAAATAAAAAAGACTGACCATACCAAGGATTGCAAATATATGAA
GGAGCTAGAACTCTCATTTCCTGTAGTGGGAATATAAAATAATATACTCTTTGGGAGAACAGTCTGCAGTTTCTTAAAAAGTTACATGTATGCT
AACTATACGCTCTAGCCATTTCACTTGTAGGTATTTCCCATGACAAAAGAAAGTATATGTCTATATAAACAGTTAAATAGTTACACACAAATGT
TTTAGTGGTTTTATTAATATATCCCAAAACTGGAAACAACCTAAATGTCTATGAACAGGAAAATGGATAAATAAATTGTGACTATCTATACAAT
GGAATGCTACTCAACAATAAAAAGGAATTAACTACTGATACAACAAGGTGGATGAATTTTAAGATAATCATGCTCAATGAAAGAAGTCAGATAA
AAAATAGTACCTACTGTATGATTCCATTTATATGAAACTCTAGAAAATGCAAACTAATCTATGACAGAAAGCAAATCAGTGGTTGCTTAGGAAT
GTGGAGGAGTGAGGAATGGAAATGAGGAACTGCAGAGGGCCATGAGAAAACTTTTCAGCTGATGCACATGGTCACTGTCTTTATTATGGTGATG
GTCTCATGGGTATATATATATATCAAAAACAACTCTCTCTCTCTCTCTCTCTCCAATCCCCCAACCCCATCTCTTACAACAAGAAAGTATGTCC
CTAGTATATCTGGAAGCCATCTTTTGACCAAGAGAAAAGCCAGCATGAGGAAACTGTTAACACAGGGACAGAAGAAAAGAAAATGTCTCTGAAG
GGAAGAGAGCCAGAATTGTGATTACATTAAACCTAAAGATTTTCAACGATGTGACCTGATGAAATTCCATAATGGTTAAGTCATTTTGAGTCAT
AATTTTACATCTTTTCACCTTAGGTGAAAAGCATCCTAACCAAGATAAGTATATGCTCAGCATTATATTGATAATTTATAATACGCCATTGGAA
AAAAACTCTCTTCCTGGCATTTAATTATATTACTTATTTCAAAGAAAATGCAGTAAAAAACTGATCTGTATATCTACTGATATGTCTATCAGTA
AAACAGATAAGTATATCTATGTATACCTACTATGCATAAGCCTTACAGGTGCTACATAGAGGTGATATCTGTTGTTTATACTCTTTGTCTTCCC
TTCTTCCTTTTTTTGATAACAGTGCCCCAATTTACGCTTAGCTAACCATAATCTAGCATTACTAATTCATGTCTTCCAGATGAGATAGACCCTC
CTTGTCACTAAAAGTAGACATGTGACTCACAGCATTGTAAGAAGATAGTAATGGAACACAGGTCCCCAAATTTACCCTCCCAATCTCTTCTCAA
TTACTTTCCCCAACAAGAAAAAATGCTACTGCAGGTAAGCAGGGGCATCTAAAGCAGGGTCACTTGAGGTCACAGGCTCCAGGGTCTCTAAAAG
GAAAGAGATACTCTCACTCTTCTCTGTTTTAGGTAGTCTGGAGGGCCTTGTTATAGAAAGACTTAAAACAAAGGTCTCAATTTTATGGCTTCCA
GTGAAAGTTAGCCTGAGGAAACCTATGAATGCCTTCAGGAAAGCATTACATGGGCTTATTTGTGTGTGTTCTTGGGAAGGTCAGACTAATCTGG
GTAGTGACAGGTCATATGGAGGAACGCTGCACTCATGGAAGAGTTGCTTGTAGCCCCTGAGGTTAGGCAAGCATTCTCCCTTGCACCCAGGGAG
CTCTGGGAGAAGAAAGACTTTTTTTAAAGCTTCAGCTGGGTGTGGACAGATTGCCAGTTGGTTTACTGCCAGCCCACAAAAGCAGAAACCTTTC
CCCTGGCAGGTTTGCCACTGCATAAAAGACCCTAACTACTTGTCCTGTAATTATAGGTCAGTGTATACACAGCCTGAGGTCTGAACAGGAAATG
GAAAATAATAACTTGCCCTAGTAGTACTAGCAAGCCAGAGAGGAAAACTAAGATAAACACTTCAAACAGGTGTTTTGTTGAAATAGAACTGTTA
GAAGAGCCAGGTGAAAACTTTTCTAAAAAGTAATAAATTCACTCAAGAAGATATAATTAAAGATTAGGAGTTAAATATATGATAGATGCTAGAA
TGATAAAATATACATATTTTAAAAATAGGTAATGACTCCATGTGTTTCTGACAGTATACCCTTCCTGGTTGAAATAACTAAAATGAAATAACTA
ATGGAAATAACTGAAATGCTACATAACATATTTTTAAAAATTAATACTGCTTAGCCAGCATGAAATTCAGGAATCTAAATATTTCCAAAACTGA
AAAACTGCAGGGAATAGCTGAGAAATTGACTTAGTCTGTTTTGTGTTGCTATCACAGAAAACCACAGACTGGGTAATTTATAATGAAAAGAAAT
TTGTATCTCACAGTTCTGGAGGCTGGGAAGTCCAATATCAAGGTGCCAGCATCTTGTGAAAGCTTTCTTGCTACATCATCCCATAGTGAAAGGC
AGAAGAGCAAAAGAGCAGACACTCAAGAGACAAAGTAACCTACTCCTACAATAATGGCATTCATCCATTTATGGGGGTAGAGACCTCATGACCC
AATCAGCTCTCAAAGGTCTCACCTCTCAACACTGTTGAATGGGGAGTTAAGTCCCAACACAGGAACTTTGGGGGACATGTTCAAACGATAACAC
TGCCTATCTAGTCCTTGTCACTGGACAGAAAAAGAAGAAATTCTCACCTGTGAATTCATAACCACTTACACTATATGTGATGATCAAAAGCACA
CAAGTAAAAAATTTTATTTAAGGTTTTTCCAAGTTAATAGTATACCAGATAACAGGCAAAAAGAAGCACAAATATTCCTTACTCAATTTTAACC
TAAGCTTCAAATAATTTCCAGAGATTGTTTCAAGAAACGTAAGCAATTTATTATTTATAATTCAGTTGACATATTAAACAGCATATGAAATATA
GCTGAAAAGAGAATTGATAAACTAGAAGGCAAATATAAAGAAATTATCCAGAATGAAATCCAAAGAGATAAGAGATATTAAAAGACACAGAGAT
TAGATTGAGAAGATCTAACATATACCTAATTTAAATTCCAGAAAACAAGTCTAGGGAAAATGAAAGAGAGGAAATGTTACAAAAGATAATGGAC
TAGGAATGTAACTGTTGAAACATCAAATCTTGAGACCCAGGGAGCCATATAACATGCTTCCAAAATCCAAGCTTATTATATTAATATACAAAAA
CATTAATATTAATATTATATATTAATGTTATTGTTAATATAATCATTATATTATTAAACATATAATTTATACATAAACAATATATTATATATAA
ATGTATATGATATATAATATACAATAGTTATAATATATAATAAATTATATATTGACTTCTATATAATATAGAATTATATAACTTATAAATTATA
TATAGCTTTATATATAAATCAATAATTATATATTGATGTGTACAATTATTATTTTATATTATTATTAATAATTATATAATTGGTATTATATAAA
TATTAATTTTATATTGCAATAGTTATAAAGTAAATATCATATAACATTATTAATATAATAAATATAGTATATTAATATTAATAACTTGTATTTA
TTAACAATATATTAATAAATGACATAATTTCACATTTCTTTCAGATTTCTGTAAAAGCTTATCAGGAGTTATATATATGCAAAACCATATTTAT
CTTATTAAAGAGGCATGTATAAGTGTCAGACCATCACTTATGAATAGATTTGACAGCCAGATATACAACCTTTCAGAAAACAGAAGCAAACCTC
CTCCATAAAAACAAGTAATTGGCAGCTGTCTCAATGATGTCCAGTAACTAGCCTTATTTCACTCAGAACAGTTTTGTCGGCTTCATATAGCATG
ACCAATCACCCTGGTTTACTAGAGCCTGAGGGTTTCCTGCGCAAGGGACTCTCTGTGCTAAAAGCAAGATAGTCCTGGATCAACCGGGATGAGT
TAAGTCTCTATTTCCATGCCTTCATAGAAATCATTAAAAGATATCTCTCTGTTATGGGCTGAATAATGTCACCCACCCTGAAATTCCTATGTTG
AAGTCCTAACCCCCAGTACCTCAGAATGTAACTGGATTTTGAGATAGGGTTTTTAAAGAGGTATATAAGTTAAAATGAGGACAGTGGGATGGGC
CCTAATCTAATATGACTGATGTCCTTATAAGACGAAATGATTTGGACGTGGACACAGAGGGACAACCACATGAGGACAGGGAGAAGATGGCCAT
CTGCAAGCCAAGGAGAGAAGCCCTCAAGTAAACCAATGCTGCCAACACATTGCTGTTGAACTTCCAGTCTCTAGAACCATAAAAAATATTTCTG
TTGTTTAAGCCACCCAGTCTGAGATATTTTGTTTTGGCAGCCCTAACAAACACATTCTCTAAGGGTTTATTCTCATTTTTGGTTTAGTGTATTT
CAGCTGATGATTATAGCCTAATCCTCCCCCTCTTCTTCGGGCCTCTCTTCTCTGTACTCTTCCTCCTCATATCTCACACAGGCAGATTTGTTCC
TGCCTCCTCACCTACATTACGAGCTCCGCACAGTCTCCTTTCTTCTGGCTCCGGCTCCCTCATTAATCTTTCTGTTATTAACGCTATTAACTCG
TTAAACTATCTCTCCACCTTTCCAAACTTCCATTAACTCTGGCACTCCATAAGTGTTAGTCAAATAAATGAAGAATCACACTAACTCCTCTTTC
CTTCCCTCTCACTCCAAACTCTTGGTGAGATTCTTTTGCACTTATGCCCTCGTTTCCCCATTTCCCACTCACTTGTCAGTCTCCTCATTCTTGG
TTTTCCTCATTATATTGAAACACATCTGAAAAACTCATGTAAGACCACAGCCACTGCGTATCAGTGCTATTTGAGAGTTAATAAAGTTCCCTTT
TCCTCCAAGACAGCGAGCAGAGTGAACAGAAGAAAGACTGGTTTCTGCCCTTGGCTGCACAGCCATGCCCCGAGGCCGGGCTTAGGATTTTATA
ATTCACAAAGTCAACTGTCTCTTCCCCTCTCCATCCTTTAGGAACTGTCTGCAGTATCTGACACTGTTGAGAGCTCTCATACCCTTTAAACTCT
CTCTTCTCTGGCTTTCTGAGCTTTCCTCCCACTTTTGATGGCACTGCAGGAGTTTTTAAGCATCTCTCTCTCATACCAACCCCAGAAATAAAGT
CATTCCTCGAATTCCTGTACTTAGCCCCTTGTCTCCTAACTCTTTGACCACTAATGTTTTAGAAACACTCTCCTGACAACTATCGCATCTTTGC
AGTTGTTTCCATTTCCAACGCCATGTCTCTCTGAGCAGCAGCCTTGAGTTTTCAATTGCATATTTATTAGTCATTTCCATATGGACATCTCACT
AAATCTGTCATACTAAACATGTCTAAAATATGTATGTTTACATGTTACATGTATGTTTGGTATGTGGGAATGCATTACATTCCCACAGATTTTT
TCCCAGTTACAGTGTTACTATTCTAATCACTCAGACTAGAACACTCACAGCTATCTATGAGTCTTCCTCTCACTCAAACTGCATATATAATCTA
TAAACAGGTCCTGTTGACCTCATCTTCTAAAAATCTCTTACATGCTCCTTTTTATATCATTGGATAATAGTTTAGTGTGCTGCTTAATATCATG
CACACTGGAGCCAAATCTGTTAGGTTCAAATCCTCACTCTCCTTCTATTTACTAATTATGAAACCTTAGGAAAATTATTCAACTTTTCATCTGT
AAATATGGGGATTATAATGGTGATCCACTTTATATGACTGACAACCAAATAAGTGAATACGTGTATAGCAGCTATTAACCATATGCTTAGCCGA
CCTATTTCAACCTCCTAACCAACCAGAAGAACTGTAGTTCCCTGCTCTCTTGCATCTAAGTGGGGCCATGGAATGTGGGCAGAAGTGTTGTGTC
ACCTTTACTCAGACGCAATTAAAAAGAAGACATACTTTTCCTATGTTCTCATTGCCAATGAACACACTACACAGATCTCAACCTCAGAATTCTC
TCCACACTGGTATTTCCAAAATAGCTTCATGAGAAGGGAAATTTGTGTAGTTTCAATGATTTAGTGATGCTATGGTTTGGGTATTTGTCTCCTC
TAAACCTCATGTTGAAATGTGACCCCAATTTTGGAGGTGGGGCCTAATGGGAGATGTTTCGGTCATGGAGCTGGATCCCTCACAAATAGATTGA
TGCTATTCCCTCCAAGGAGGAGAGGATGAGTGACTTCTCACTGCATTAGTTCCTATGAGAGCTGGTTGCTAAAAAGTTTGGCATCTCTCCCCTC
TCTCTCGCCATACGATCTCTCTGCACACACCACCCGCCTTTGCCTTCCATTGAGTGGAAGCAGCCTGAGGCCCTCACCAGACGCATATGCTGGT
GCCATGCTTCTTGTACAGTCTGAAGACTGTGAGCCTAATAAACCTCTTTTCATTATAAGCTACCTAGTCTTGTGTATTCTGCCATAGCAACACA
AATGAACTAAGACAAGTGACAAACACAAAATAACTTGTCTTTTAGACAATATTGATGTCTGAAATTCCACATTGAGGCATTTTTTTCCTCTTCG
TAGCCTGATAATGGCAAATACCTTCTGACACCTTAGGATGGATGAATTTGTAAGAGATATTCCTGGAAGCAGGTTTGTACAGTGTAGAGAAAAT
GTTGGGTAACAAACCAGGAATGGAGGACGGTTAATCAGCAAGCCAAAAAGCTTTTATAGTTTTGCCTGCTCTGCTGCATGGAATTACATCCCCC
CAAAACATATGTTCAAGTCCTAACCACAGGTACCTGTGAACATGAGTTTATTTGGAACTAGGATCTTTGCAAATGTTATCAAGTTAAGATGAGG
TAATACTGGATTGGGGTGGGCTCTAAATCCAATGACTGGTGTCTTCATAAAAGAAAGGTGAGGGAGAGTTGAATATAGCGACACAAAGGAAACA
CGGGGAAGGAGACCATGTGACAATGTAGGCACAGAATGGAGTGTTGCAGCCAAGCCAAGAATGGCAAGGATTGCTGGAGCTACCAGAAGCTAGG
AGGAGGCAAAGGATTCTTCCCTAGAGCCTTCAGAGGGATCATGGCCTTAATGGCACCTTCAGTTCAGAATTTTAGGCTCCAGGACTGTGACAGA
ATAAATTCCCGTTGTAAGCTGTTCAGTCGGTGGTAAATTTTTACAGCAGCCCCAGGAAAATATGCCTGCTCAACACCCTACCCTGAATTTTAAG
TTCATTTTATGGAATCATTTTGAGTTTGCAGTTTGATTTAATCCTTTTCAGTAATTAACGCTCTTCATTTTTTACTCCCAAATATGTCACACTG
GCTCTACTCTTATAACAATTGTATTTATCTATCTTTTGGTAATGGGGCTGCCACCCCTTGCAGAATGAAAAGTAGAGTGTGTATGCTCACACCT
CCCTCCCTCCCTCCCTCTCTCCCTCCCTCTCTCTTTCTTTCTTTCTCAGAGTATCGCTCTGTCTCGCCCAGGCTGGAGTGCAGTGGCGCAATCT
TGGCTCACTGCAACCTCTGCCTCCAGGGTTCAAGCGATTCTCCTGCCTCAGCCTCTGGAGTAGCTGGGATTACAGGCGCCCGCCACCACGCCCG
GCTAATTTTTTTGTATTGTTAGTAGAGATGGGGTTTCACCATATTGGTCAGGCTGGTCTCAAACTCCTGACCTCAGGGGATCCACCCGCCTTGG
CCTCCCAAAGTGCTGGGATTACAGGTGTGAGCCACCGCACCCGGCTCACAGAATTTCTTAAAAAGTCATTGTCTTCAGTCTTTATGGATCCTCT
AAATTCCAGCTGCTCAGCCTCCCGGAGCTAAATGAGATCACTTAAAGGTCGACTGTTGGGGCCTCCAAGGTCGCCTCGGAGACTCACCTCATAG
GCAATCAAATCCATCGCTGGGTTTTTGTGTGTGTGGGTTTTTTTTCTTTATTTTTTTTTTCCAGAAAAACACTCCACCAAGAAGGTTTTTATAA
CCTACTGGAGGAGGAGGATGGAGAGTGGGCACGAAAGGACTAGGATGAACATGCCATAAGCAATCTAAATGCCACTGCAATATTGCCTGGTGAG
GACCTGATTACTGATGTTTTAAAGCTAAGCTTTCAGTTGTCACTCCACCCAGTAGTGAAACAATGAGCTCTAAAATATATATTTCGGCTCAAGC
TTTCTTATGTGGGGAGGTAATCCACCCGAAGGTATCCCCAGCCTGTACCTAATACAGTGCCCAGCACTAAAGCAGCTCAGATGCCAGTGAATGG
TGGCCACTGGGAGGCCTCTCAGTGGGTGCCAGTACCGGTCTCTTCAGAGAAAAAGAAAACTCCCCTCTGCCAGATCAGTATTTTATGAGCTGTG
AACCAAAACCATTGCTACCACCATCACTATAATTCTATCCACAGTAATTATCATAAAGGCCTAACAATGCCTTGTAGATGAACATTCTGAGTAA
CTGCTCTATAACCAGGAGATTTAAGACCGCACCAAAAACCAGTAGAGGGTTATACTTTACTGGGCACAAGTCGTTTATGATAACGAAATTGTAG
TTTAATCTGTGAAGAGATGTGAATGTAACTGAGACACGCTTAAATGGAATATACAGATGAGCTTTATTTTTATATCTGGCATGCTTGGATCCAT
GCCGACCCTCCAGCTGCTCCGGCCTGCCCTTAGGGCCTATGGACCGCATGACTCTATCAGCGGCACTGCCACCGCCGCCGCCTCCGTGCTGCCT
GCGTTCCCCGACCATTGATTGGGCCCGGCAGGCGCTTCCTGGGGGCTTCCCTACCGGCTCCAGCCCTTGGGATTCGGGAGCGCCCTGCTAGGAA
GCCAGAGCCCCGCAGGGGCCGCGGCGTCCAGGCCGCCTAACGCGCGCCCCTCGCCCGGCGCCCCGAAGCGGCCCCGAGGGGCGGGAGCCGAGGC
GAGCGGCAAGGCCGGGCCGGCGGCGCACAGCGCCCCTACAAGTGCGGGCTTCCCCCACCCCCGGCAGCGACCCTACCTCCCGCCCCCGCTGCGT
GCGCGCGTGTGTCCGTCTGTCTGTATGCTCTCTCGACGTCAGTGGGAATTTCCAGCCAGGAAGTGAGAGAGTGAGCGAGACAGAAAGAGAGAGA
AGTGCACCAGCGAGCCGGGGCAGGAAGAGGAGGTTTCGCCACCGGAGCGGCCCGGCCACGCGCTGACAGCTTCCCCTGCCCTTCCCGTCGGTCG
GGCCGCCAGCCGCCGCAGCCCTCGGCCTGCACGCAGCCACCGGCCCCGCTCCCGGAGCCCAGCGCCCCCGAGGCCGCAGCCGCCCGGCCAGTAA
GGCGGCGCCGCCGCCCGGCCACCGCGCGCCCTGCGCTTCCCTCCGCCCGCGCTGCGGCCATGGCGCGGCGCTGACTGGCCTGGCCCGGCCCCGC
CGCGCTCCCGCTCGCCCCGACCCGCACTCGGGCCCGCCCGGGCTCCCGCCTGCCGCCGCCTCTTCCTTCTCCAGCCGGCAGGCCCGCGCCGCTT
AGGAGGGAGAGCCCACCCGCGCCAGGAGGCCGAACGCGGACTCGCCACCCGGGTAAGCCAAACTCGGGCGAGTGGGGGCCCGGCAGGCGACGCC
TGGCCCAAGTCCTGCCGCCCAGCCCTCCGCACCCCCTCCAGCCCCACTCGGACTTCCTCATTCCTGCGCTAACCGCTGGGCTAGACCGTGGGAG
GAGGTTGACAGTAGCTGAGAGGCACATGGGATTACCGACAGCGGGGAAAGACACATCCGGACCTCCCACGGGCTAGTCGGCCGAAGGGCCGCGG
CCGCCCGGCGGTCATTTCTCTTCACGTCCCTCCGCGGGGCGGGAACGCGAACCGGAGGGGAACTCTTACAAACTTTTAAAATCCCCAACCCCAG
CCCCACCTGGGGGATGGTGAGAAGGTTGGAGTGCGCTGCGGCGCGGAGGAGAGAGGGAAGGTGGTTGGTGCAGTGCAGAACCAGATTTCACCTA
AGGGCGTTCCATGAAATGAAAGCAGAAGTGCTTGTCAGTCCTCTTGGCTGGGAAAGCCCTCCCCAGCTCCCCAGAATTGAATAGGAGAGTCTAT
TCATCCCTCTCCTACTTCTAAAAGAAACCTGGCTCGCTCTCTGTCTCTCTCTCTCTCCCCCCTCCCCCCCTCCGTGCGCGCGCGCGCGCGCACA
CACACACACACACACACACACACACACACGATATAGTCACCTGCTATAGGACTTGATTCTGATCCTCCGGGGCCTGGCATTTGAGAGAGAAAAT
AAATTACCTACCTGGATACTTAGAGCACTTTTTAGACTTGATTATGTAAAACTCTTGGACAGTGCCACCATGCATTATGCATGACCCCTGAAAC
AAAAATAATGTAAAAACAAGGCCTATCCTAAATGCAAGTTTTTCTATGGTCCTTAAAAACAGACACCAGGGAATGTTTGCCCTGACTTGCTGGT
TTATCCTGAAACTCAAATGGGACTTAATGATACAGGATTTAATTATCAAGATTGACATGTTCATGGACTTTGTTAAGTAGAGGTTTTCAGCATT
ACAGTTTATGAAATAACCATATTTAACTCAAAGATTTTTTTATAAAGCTCATAATCTGAAAAAATGCTTATGGTATTACTAAAACATTTAATAG
CTCTCGCATCAAAATATTCTACATACTGGTGATCTTTTAGTAAATAGTAAAGGTTAGGGTCAAGATATTCAATAATTTTTTTCTAGCACAATCC
CACAACTGAATATTGTCAAGCAGTTTAAACTGCATTCGTGTTTCTTAAAACTTTAAAAGGGAAACTTAAAACTAAAGTATGTTGTTTTTCTGAT
TTTAATATTGTGCTTTCTAGAGATGAATCCTTTTACTGTTTGAGGCACTATAGGAATTATGTATTTAAATGTATGTATTTAAATTTGAAGCAAT
GTACTTTTTTGAGTTTATAAACTTGGGAAGACAGGAAATAAAAAGATTTGTTTCCTGTAGAATTTTACATTCATGATTTAATTCAATTGCTAAA
ATGGAAAGAACATGTACGATTAATGGAGACTTGGAATCTGAGATTATTCATCCATATTGATACACCTGCAATTCCTAAATGCCCTCCCCTGCTT
GTTTAGATAAAATGTCTTCCTGGGCTGCAGCCTACTGGACAAACTTGAACACAAAGGAACACACGTTATATGTACATTTAATACTGGAACCGAA
AAGCTGCTTGCAGTGAAAAGCAAACCACTTCTAAACTCTTTGAGACTTTTTAAAGAAGGTAGTATAATCCTTTTAGGCGTTGGTGGTGATGTGA
AAATCTATTATCTTTTTGCTGAAATTTCATTCTTATGTTAGGCATTGGCACTCACTTGTGCTGAGTAAATGCCCGTGTTTTTCAAACCCAGATA
GTAAATACTGGGGGTATACATACAAAAATAGTCCTTCCCCTTTGTAAGCATTGCTTTGATCTTTCCACTTCCTTTTTACTCTACCTCTTAAACA
AGATCTGTGTTGATTGAGTTGATTAAAGCACAATTAATCTGAAATAGGCAGAATTTTAGATTTAGTCATTATATTCCTTACATTTCTGTTGTTA
CTGTTCCTGGAAACAAATTCAAGTAGTTTGAGAAACTAATATTTATGCAGCTTCTTTTAACTACACTTTTAGACTTGCAGATAATTGATTAAGT
AAGTTACTACCTTGACTTTCAGGGATTGCTCATTGTGGTAGATACGACGTCTAGATAGGGAATTGGCAGCTACATGAATGTTGCACTATCATTC
CATCAGCAAGACCTTATTTTTACCTAATTTATGAGAGGTATTTCTCTGTTCAGAAGAGGTGAAAGTTCTGGCTTCTGGGGGGAAGTGGTTACTT
CATAACCTTCAATTGGTTTGAACTTGGGAGAAGTAAGAAAAGTAGTCGATATTTTCAAACAGTAAAATAATTGTATCTGAGTTGCTGTATGGAT
TTTTGATGAAGTACTCAAAATGTCATCTTTTGCATCTTCGGGTCTTAGTAGATGTGCTATTCTGAGTATAGAATTGACTGCAGTAGGAAGTGTA
TCTGGAAATGCACAGTACTGTTGTATAACCAATAGAGTAAATTCTCAGATTATGCTCTTCTGGTCCACAGATTGATCAGAAATCACATTAACAG
GAATGGATGTCTATGCAAAATTTCTCATTAATTTTCTTACTTTTAGTAGGAAGTTTGTTTTATTCGGTTGGTCTGTTGGTTTTCTGTTTACAAG
GTGAATTGTCTACAGTAGTGGGATTGTTATATTAGAAGAGAAGGAGAAGGAAAAATAGAAGTTAGTGCTAGAGGATATGTTAAGATGTTCTGCT
CCTACATCTACATTTGTGTCTAATCAGCATTAATTGATGACTACGTCTTGGTAAACAGTAGACCATACTGGAGCAATTTACTCTGCTTTTTGGG
AATTAGTTCTCATTTGCACTCTTGCACCTCCCATAAATACTGAACTCACTTGTAGTGTTCTTAGAGGTCAGCAATAAACCATCAACACCATATG
ATCTCTCTTTGAATTTTGTCACTACTTTGGAGACAGACAGTTTGGAAGAACTGAAGGTACTCAGCCTCAGGGAGAAAGGTTTGAACGTTTTGGC
ATAGTCCTGCAAGTCAGTTTGGCTCCTTGACTGTGAATTTTTTTAATCAAAAAAGATTAATATTTGAAACCACATAATTTGGACACTTAATAGT
TCTGGTAACATAACCAAGCCTTTTATCTTTGTAGTATTTCATTAATTAGTATCCAGTGCCTCACTTTTAGAAGAAAAAAAGAGAAAAAAGTAGT
AACATTCTTTTAATGATGATGAAATTGCTTCATACCTTTGGTCTCTCCTGTATTAGGGGTTGTTCCTGGGTGCAAATTAATATACTGTCTTTTA
CATTTCCGGAGGTTGTTGACCTGGCCTTGAAGATCAGCCAACAGTTTAGAAAATAAGTTGTCCAAATTGCATTGCTACACCTCAAATAATTTAA
AGCCTGACAGTTCTGTACAGAATAAGAGTCACATAAGATGTGATTTGTTAAAGATTATAGAAATCTCAGAAGATAGATTATGGATGAAAATATT
TGTTTAATTTAGAGTACTAATAATAAAAATAGTGCATTTTACATTTTAAAAAGAAAACAATTTTTATTGTGTCATATTTTCTGTAGTAACAAAC
AGAATTAATTATCAGTAATACAAATTTCATCTGCTTTAATTTATTCCCTGTTTTTGAAATTAGAATAATGATATATTTGGTTTAATTATCCATT
ACAAATTGCCTTATTATTTTTCATTCATCTTTCACCATTAATCCAGAAACCTTAAAATAGCTTTTATTTTGACCCATGCCTTCAGTAGATATCA
ACAGACTTGAGTTCATCTATGGATCCTATTAGTTTAAACTCTCACAAATTTTGACTGCTTAAGCTTTAGAAAAGAATTTATTCTTTAAAATAGC
CAAAATTATAAAAAATGAAATAAAGAAAAAGCTGTTTGAGAGAATCAAATACTCTAGTTTAACTAAAAATAAATAATATCTAATCAATACTGAC
GAAAGAAATATCTGATGCTTAGCATTGTACTTGTTGGTACATAGTAAGCAATCATTAACTGTTAAATGAATGAATGATATGAAGTTGTTGCAAA
ATTTTTTTTTAAATGGACAGCCATCTTCTATAAGGAACAAAAATTACATTATTTTGCTTTGCCTTCTGGAAAGAAAGGAGCACAAAATAGTCCT
TGTGTCTTAGATATTATGGAAATCTTATCTAAAGACCACTTGAAGTTTACTAGAACAAATAATTTATTAAAAAGTATCTGGCGCCTTCCAAAAG
GGGAACATTTCATTCTGAAAGAGGCATTTATGAACTAGAAAAAAAATGCCTTTTAGTTTCAAAGTTTTAGAGGCACCAGAGCAAGATTATAAAG
TAATTGGAATGATAAAACGTGCTTGTAAAATTGAAAAATGTAATTTTTTGGTGAAGTTAGAATTTCTGTACACTCCATTGAAACTGTAATATCA
AATACTAATACCTCCAAAAAAGAAACAATGCTACAAGCACTGCTTGGTAATCTAAGAATTGTTAACACTTATCTAAATTAATCAACCAAAAAGT
TAAAACAAAATATGTTATTTTGTTATGTTACCTCTAGAATTAAACACCTATCACCCATAAATCTGTCACTGTTAAAAGTTACTAGATGGCAAAC
CTCAGGAACAAGCAGGCAGTTAGCAGGGTTTACTGTACTTTCCACTTTCATACTTTAATGATTTTTCCAACACTATAGAACCTGGGGCCTCATC
CTAGCACAGTTTGTTCATTATTTTTCAGTTGTAGCATTTTTTAAAAGTTGGCCTTGAATTTCTGAATTGAACCATTTATTTTTTTGTGGACACA
GTTTTTTAAATGAAATATACCATTTAGACTAGAAAAGAGCAAAATGCCAATACTCCCTGTCCTAGTGTCATTGTGCCCCCTGGGAACCCTAATG
CAGTCCTGTGGGAAAACAACCATTTTATTGAGCGCTGCTCACTTCAGTTCATTCTGCTTTGCTGCCACTTAGTTCTGGTTCTGACCCTGATCTC
CCCTCACATCACTCACAACAAACATTCAAGTTTAAAAATTAAGTTAAAAGTTAGTTACATATATATGTAACTAATGTGTATATTAAATATACTG
ATATATATTAGTTACATATACAGATATGGCAACAACAAAAAAGGTTATATATATACATATTTGTAACTAATATGTATATTAAATATAATGATAT
ATGTATAAATACATATTTGTAACTAATATAATTATATTTAATATATATTAGTTACAAATATGTATATATAATATTTTTTCTTGTTGCCAGCAAA
ATGAGAAAGAAATTAAATGTTAACATCTATAACAATTGCACTGTAAAGCCGTCATTGTTGAAAAGTACTCCGAAGATTAATAGCGGCAGTGTTT
GTTAAAATAATAAAATAATCCAGGCACTCTGCCTGTGACTTCCCCATGAGATGGCTTCCAGAAAAAGATAAATTTTTGTGTGTTCCCTTACGAG
TTCAGTCTGCAGCTTCTGGGCATGAAGACAAGCATAAACAAAACAAACAAGGCTCTAACTTTGTTATAATCCTTACGCTACTACTACAAATGTA
TGGACAATTCATGCATTTCATATTGGAAAATAAAGCTATTAGATTTTTCTTTCAGATGAACCTTTTTTTTGTAATTTATTTTTTATTTTTTATT
TTTTTTCAGTAGAGATGGGATTTTGCTCTGTTGGCCACCCTCGTCTCAAACTCCTGACCTCAAGTGATCCACCCGCCTCAGCCTCCCAAAGTGC
CGGGATTACAGCCGTGAGCCACCTAGCTTGGCCAAGGTGAACCTTTTTGATAAATGAGGCTCACTAATATTTCTAGGATTTACTTTTCACTAAC
TTGAACTAAAGAAAGTATAAGACCTGCATAAAGTTGAGCATACCTCTATAATCTCCCATTTTAAAAAGCAATTTGTTTTTAATGACTTTTATTT
GTTAAAAGCAGTTATTTCAAAAAATTATTTTTATTATTTATCATGTCATTTGCACTGAAAATACTATACCATATTTCAGTGTTAGGGCACACCT
ATCCCTCTTTATCCCAGACGTCAATTCTACCATATAACAAGTATGTAAAAAAGAAAACATAAAAGTGATGACAGACTCCCTAATCAACCTATTT
ATTGGTTCTAAGCCCAAGCCTGCAGTTCATTTAAATACTGAAAATACATTACTTAATTGTCTTAGAAAATATCTCTTCCATGACAAGAATTTTA
GGAATGAGAAAATAACTATTTTTGGATGTTTTAACACAAATTCCCAAATCATGTTTTATTGATATTTGAAGAACCTCTTTGTCTACCAGTTCTT
AAGTATAGGCTTATTTTGTAACGCTTAAACATGTATTGGTGTTTGACTGTTAAGACTTCATCTATAACCTTCAGTGTCTTTTTCTTTTAAATGG
GGTATGGACTTGGTAATGAGGCCAGAGGAGAATACCTTACAATTTATAGCATCTGCATATAATACAAGAACCTTCATGATTTATAAAATTAAAA
TGATGATGATGTGGAATGATGGAAGAAGCATGTGTGCGTGGCTATTTATGTAGAGGAAATTAGAAGTTGAAAGCAATGTTAAGAATTAAAATTA
AATTACACTTAATTTTTTGCTCAGTTGGATAGTCAGGAAAGTACTTAAATCAGCAATTGATTTACGTAAAATCAAAACTGAAAACTGAATATAC
AATCTAGGAAATAGGAAAAAAATTTTTAGTGTGTTCATACTGCTAATTTCAAACCAAGCAAAAAACCTCGGCAACTACTTTTCAGAGGAGATGG
CTTAAAATGAACCAAAAATATAGCCATTTCTCTACCCTATTCATTTAATGCATTCATTTATTATACTGCTAATACATCATAAGCTGAATAGCTT
AAGCATCGTTTGTATATGTGTATGTGATTTTAAACCTGAGTCTTTTGAAAGATTGGTCAAAGCAAAGGATAATGAAAGCATAAAGATTTAGGGG
GAAGAGTCCTCTATAAAACTAAGACTTAAACTTTGTTATCAACTTGAATGTGAAGATAGAATAATCTAGAAAGTGAATGAGAATTATAAATAAA
AGGACAAATCATATATCTCATGGTTGAGAAATACAATGAGATAAATTGTATATCTCATCTCATGGAGGGTCATAATGAAAGAAGTAAGAGAGAT
TGCCCTTGGATAGAACCTTTCGGCAGACATTTCATAATGGATTATCATATTTTTGCTAAACTGGTAACAATGGACTTTTCACCACATTATGAAA
AAACACTTTAGAAGTCAGTTGCGATCAAGCAAATATAACTACCTGGGAAATTAAAATCAAAAGCACACCAGTCCAACAATAGTCAAATGCATTT
ACTCACTCTCATACCATATCATAGCGTTAATTTGAGATAATCTCTTTATGGTGTCTCTTTATATATTTACTCGATTTCCCATTTAAGACATTTA
ACCAAATTTAAAAAGCAATCCTTAGAAACTTTAAAAATATTTCCTATTTTAAACCATTACATAATCATTTACCCTGCAGTTACAATTCTTTTTT
TGTGATGGGTGGGGAAGTATCCCATTTCTCTTAGAAAGTCTTCTGTAATAGCCAAATAGGAGTCAATCCAAGTTGCTTAGAGAGGTAGTTCAAT
CCTGTGTTGAAATAGATGACTTTTGGAGTAATTGTGCTATATTTACTGAGTATCTGTTGAACTGTAGGAGTCCAGTCATTCAAGGCAAGCTACA
GAAATGATTTTATTGCTGAGGCACTTAAGTATCTTCACATCTATATGCCAATATTAAATTTCTCATCATCCTTCATCCCCACCCCCTTGCACAG
ATTGGTATCCCCAGCACATTAGGGAATGCGGTTGTTAGCCTGTTAGGGTCCATTCAGTAGATTTCTCATGCCAGAAATCTACAACCCCTTCTTA
TACATTCAGCTTTCTTCTTCAGTCAGTCACCAAGTTCTATCAAGGCAGCCTCCTCATCTCCAGAATCCATCCCTTCCTCGTTGAATTTCTAGAT
TTTATTTTTGCATTGTCTCCTGCTTCTAACCCATCGTTCATTTCGCATAATCGTCAGCTTTCTAAAGTGTAAATCGGATCATGTCTCTGCAGTG
AATCCCAGTTCTCTTCACAAGCTCATTCTCCCACACCTCACCCCCTTACTCCCTCCGCTGTTCCCCAACCATCCCCTAATCTCAAATCCTCCAC
ACCGACTTTCAGTTTCCTATCCACAGTTTCTGACTTTGAATGCCTTTGCTTATGCCCTCCCTGTATGAGAAGTGCCTTTTCTTTCCTAGCCATC
CTGCTAACTTCTAAACCCTTAGGCCTCGTTTGAGCATCACCATTTCTCTCACTTGCCTTTCTGTTTTCTCCCTCCCCTTTCCATAAAGAGTTAT
GTGCCCCCATTCTGTGTTCTCCTGAATTCCTGTGGGTCCTAGAAAAGAAACATCTTGAGGGCAAGGAGTTCATCTTATTTACTTTTTATTTGCA
CAGCACCTGGTGTGTTTCCTGAATAAGTAAATACCGAACAAGATATCAAGAGACAGTGCTGCCAATTAACTGTGTGGCTCTGAGCAAGTTAATT
AACTTCTCTGAGTCTTATTTTTGTTCTGTAAAAAAAATGAGGTTTGACAAAATGAGCATCTCTCTCTAAAATTATGTGTTTCTTTGATGTAATT
GTATTAATTGGAAGACTTCAGATTTTCTTGCCATATCAAGATAGGTCAACTTAAGAAAAATGCATGTGAGTAAGTACCAAGCCAATTCTTGATT
ATCAGTATGATAATATGAGGAACTGCCCATTTTGTCGATAATAAGTTATAATTTTTGGTCTCAGTGTAGGTTCTTTCTCAAATCCAGATGTTTC
TGGTGTTGCATTTTTTCATTATTATTCAGTCTCTCGCATTCATATTTCTCCAAAGAAATTTATGGAAAACTTGAGACAAAAATTGAATGTAAAG
TTTAATATTTAAATGCTAGATTGATTCAAGGTCTCACTAATTATAACTATATTTGGAGGGAGAAGAAGGGGAGGTGGTGGTAGTATGAGCTGAA
TCCTCCTCTGTTCCTTCCTAGAAGGAACACAACGTCCTACATCAAGAAAAAAGACAGAAGCATATCTTGGAGATATCAAAAGAACCACCAGGTA
AACTAAAAAGAAAAAGAGTGTTAAAAAGTCAGCCTTTAAAAAGCAGGATTGGAGATGAGGAGGGGTGGAGTAGGGGAAGCATTGCTTGTTTATA
GAAGCTCTTCCATCTTCGTATAGTGTGATTTTTATTTTTTTATTATTTTTTCCTTCCTTTTTTTTGACCTCCAGCTTTAGTATAGTACAGTTGA
CAGAAATTATATATGTTTATGGTACACAACATGATCTTTTGATATACATATGCATTGTGAAATGATTAAATCAAGCTGATTAACATAAGTAGGG
TTTTATTTCTTTAACAGTGATTTATTTGAATATATGTTGAGTCCTTTCTATGTGCCAGACACAGTTCTAAGGACAAGGCACACAGTGCCAAACA
AGACAGAAATCCAGAAATTCATGGAGCTTAAATCATGTAGTCTTTTCAGTTTTTAAAATTTTCTTGCTGGGCGTAGTGGCTCATATCTGTAATC
CCAGTACTTCAGGAGGCCGAGAAGGGAGGATTGCTTAAACCCAGGAATTTGAGACCAGCATGGACAAAATAGCGAGACCCCAGTCTCTACAAAA
AATTTAAAAATTACCTGGGCATCGTGGCACATCCCTGTCGTCCCAGCTCTTCAGGAGGCCGACGTAGGAGGTTCACTTGAGCCTGGGAGGTTGA
GGCTTCAGTGAGCAGCGATTGTGCCACTGCAGTCCAGTCTAGGCAACAAAGCAAGACTGTCTCAAAAAAGGAAAAAAAAAATAGAAAGAGAAAC
TTTATTTTTACATTAGCCTTTTTTAAGTTGAAGAATCCCATAGCTAAAAAAGTACACAAATATTAATGCTGCAACTTTAGTGATTTATCTCAAG
GTGAACACGTTTAACCTAGTGGGTGCTCAAGAAATAGAACACTCGCAGCACTCCAAAAGCATCCTATCTGCCCTTTCTTAGTTAGGACCCCTTC
CCTCCACTGTCATTTAAAAGATTTCACAAACAACTTTTGGATTATATGTATGTCAATTCTGTGACTCATATATATCCACATAGACAATGGAGCG
TTGACTGAATGAATTCATTATTCCAAGGTGCTAATAATGAGCTTCACACCAGCGGGAACTCTGCTGTGTCAGTTGGGCTCTAAGCTCAGTTCAT
TTCAGATATTCCTCACTAAACAAAATACTGTTTTTCCTCAGTTGTTAGTAAAAAATAGAAAACAGATTACATTCTCATTTACTTATTACTTATG
AATGTAAAAGTAAATATTTTGCTTAATACCAAGTAGCCAGGGTCACTGACAGAGACATGGGAGAAACAAGTATTCACATCTGATGTTATCAGAC
ATAGAAGAGAGAGGTATAGTTCACCTATTTCTCCCCACTCAGTTTATACATTGACATCTGTATGTGTGTTGTTTTGTTTTGTTTTGTTTGTTTG
TTTTGAGATGTCGTGTCGCTCTGTCACACAGGCTCGAATGCAGTGGCGCAATCATGGCTCACTGCAGCCTCGACTTCCTGGTCCCAAGCTATCC
TCCCACCTCAGCCACCCAAGTAGGTGGGACTACAGGCATGCACCACCACACCTGGCAAAATTTTAATTTTATTTTACTTTTTAAAATTTTTGTA
GAGATGGGGTCTCCCTATGTTCCCAAGGCTTGTCCCCAAATACCTGGACCTCCCAAAGTGCTGGGATTATAGGTGTGAGCCACCACACCCAGCC
ATGTATATGTTAAAGCGTTTATCTGTATGAGTGGTCAGTGTAGAAAGGGCTTCATGGAGCCTGATTTTGATGGCTTGCAAATTATTATATTTGT
GTATGTGTAATCGGAAGGCCTTCGCCGTGATTATTTCTTCAAAGGAACCCTTTGTCCCTCCAGGGTGATTGTACCCATGTTCATAGGACCAAAC
ATTGCTGGTTCACATAATGACTCTTTTTCTTTTAAAACATAAAGGACATATTTTTATGGATTTTTCAGGATTAATAGAATAAAAATCTAAAGTC
ATATTCAGATTCAAGAGAACTGGATCAGTTTCTCTGTATTTGAACAAAAGAATACTAATCTCTAATTCATAATGCATGAGGTCTACTTCTTCCT
CAGTCTGAAAATATGAATATTCCAAAATGGTACTCAAGGCAGAGGCTATATATCAAAATTAAAATTCTGTGATACTATGTTTTTAGGGAAGAAG
AAAACTGTAGCATTAGAAATGTAGACGCAAAAGGTCAGAACAAAGTCCAGTATGTCAAGTCCCTTTATAATGCCATCTGAATGAAAGACCTCAC
ACCATGAACAGAGGTATTGAAGCAGTTTTTATGTGGAAATGGTAGGCAGCAATATCTCAGGAGTGACTTTAATTATAACATTTAAGGTTTTATC
TAACTTATTATAATCCTTAGAGAACTTCTCTAGCTCTACAAGTTATTCTTGGCAGAATTTGTCCTAACATAGTATTAATAAAAATAAATTTTAC
TTGAGTATGATATAAATTACTCTTAATTACAATATAATTTTAAAATGCCCAAAACATCTTTTGATCTTATGAATTTCAGTCAGCTATGATTAAG
AAGACAACCATAGGCAAAAATTTCTTTCTTATGGAACACGTTGGAATGCATTCTAATCACTTCTCTAAGAAAATCCCTGTCCCCCATGATTATA
GTGAATATGATACAGCAATAATTTAGATGCTTCTTTCAGGGGGGTCAGGTTATGTATTCTACAGTCTATTGATTCTAAGAGGCACTTTTTTCTC
CCCCAATTTAACAGTTTTGTTTAATTATATACATTTCAGGATTTTTTGGGGATATTTTTCTATCACTGGTTTCTGATTTAATTCCACTGTATTT
AGATAACATATTCCGCATGCTTTCAATTCTTTGAAATTTATTCAGACTTACTTTATGCCTCGGGACGTGGTCTATCTTCGTGAATATTCCGTGT
GTATTTAAAAATAATGTGGACTCTGGGCCGGGCGCGGTGGCTCACGGCTGTAATCCTAGCACTTTGGGAGTCCGAGGCAGGCAAATCATGAGGT
CAGGAGATCGAGACCATCCTGGCTCACACGGTGAAACCCCATCTCTACTAAAAAAATACAAAAACTTAGCCAGGCGTTGTGGTGGGCGCCTGTA
GTCCCAGCTACTCAGGAGGCTGAGGCAGGAGAACAGCGTGAACCCAGGAGGCAGAGCTTGCAGTGAGCCGAGATGGCGCCACTGCACTCCAGCC
TGGGTGACAGAGCGAGACTCCATCTCAAAAAAAAAAAGAAAATAATAATAATAATAATGTGGACTCTAAAATCATTCAGTGGGGTGTTGTAGAC
ACACTAGGTTCTTTTGATTGACAGTTTTGTTCCTAAGCCTTCTATATCTTTCCTACCATGGTTTGAATGTGTCCCCACCAAATTCAGGTGTTGA
AACACGATCACCAATGTCATGGTACGAAAAGCTACAGCCTCTAAGAAGTGATGGGATTAGGTGCCCTTTTAAAAGCCCTTGCTGGAGGAAATTT
GTCTCCTCTTGCCTTTCCGCCCTCTGCCAGTTGCGGACACAGCATTCCTCCCCTCTAGAGGATGCATCCCTCACCAGATACCAAATGCTGGTGC
CTTGATCTTGGGCTTCCCGTTGCCAGAACTGTGAGAAATAAACCTGGGCTCTTTATAAATTACCCAGTCTCAGCTATTCTGTTATAGCAGCATT
GACAGACTAAGACATTTCCTGACACTCTGTTGATTTGCTTTGATCAATTACCGAGAGAGGAATGTTAAAAATCTTAACTGTAATTGTGGATTTG
TCATTTTTTCCATTAGTTCTGCCACGTTTTTGCTTCATGTATTTTGAAGCTTTGTTAATAGGTGCGTACACAATAAGATCATTGTTTTTCTTTG
ATGAGTTGGCCCTTTGATTCTTATATGCAATGTTCCTCTTTGTCCCTGGTAATGTTTATTCTCTTGAAGTCTACTTTATCTGATATTTTAGAAT
GTAGCCTGCTTTTCTTATATTTAGCATTTGCATGATATAACTAGCCCAGTGTACCATCTTCATACATTTAAACTGTGTCTTTAATATTAAAGTA
CAATTCTTATGAAAAGCGTATACTTTAATCTTGTTTTTTAAAAATCCAGTCTGATCATCTCTGTCTTCTAGATGAGTTCAGTCCAGTTCCATGT
AATATTATTATTATTATTATTTTTTTTTTTTTTTTTTTTTGAGACGGAGTCTCGCTCTGTCGCCCAGGCTGGAGTGCAGTGGCGGGATCTCGCC
TCACTGCAAGCTCCGCCTCCCGGGTTCACGCCATTCTCCTGCCTCAGCCTCCCAAGTAGCTGGGACTACAGGCGCCCGCCACTACGCCCGGCTA
ATTTTTTGTATTTTTAGTAGAGACGGGGTTTCACCGTTTTAGCCGCGATGGTCTCGATCTCCTGACCTCGTCATCCCCCCGCCTCGGCCTCCCA
AAGTGCTGGGATTACAGGCGTGAGCCACCGCGCCCGCCCCCATCTAATATTATTACTCGTATGTTGGGTTTAAGTCTCTCATCTTGGTAATTAA
TTATCTATTTGTGCTATCTCTTCTTTATTCTTTTTTTTCTCCTTTCCTGCCATCCTTTGAATAAATCAAGTTTAGTGTTTTAAATTCCATTTTA
TCTCCTTCATTGGTTACTTTCTAAAGTGGTTACTTTACCACTTTAGAAAAGTATTTGTTTATTACAATATGCATCTTTGAGTCTCTAATTAATG
TGAGAACTTGACAATGTTATACTTCTGTTTGTCCTTCTGTGCTGTTATTGTTATACATTTTACTTCTTTATATGTTATAAACTCCAAAATATAT
TGTCTTGTTTTGCTGTGAACAGTCAATCGTCTGTTTAGGAAATTAAGAAAGAAGAAATAAAAGTCTTCTGCTTACTCACATATTTATCATTATT
GATGCTTTTTATTCTTTCATACAGGTCCAAGTGTCTATCATTTCCCTTCAGCATGAAGAACTTCTTTTTAGCATGTCTTTTAGCAGGTCTGCTG
GTGATGAATACTCTTAGCTCTTGTTTACTTGAAAATGTCAATTTCACCTTTATTTTTAAAAGATTTATTTGCTGAATATTCTGGACCAATCTTT
TTTTTTCTTTTATCACTGTAAAGGTGCCTTTACATTGCCTTCTACCTTCTACTGTATCTAATGATCATCAGAAACATCATCCTTATCATCCTTA
TCAATTGTTCCCCCATATATAATATGTCCTTTCTTGTCCTTTGCTATTTTGGGATTTTTTTTTTCTCTAGCATTAGTTTTTAACAGTTTGGCTG
TAATATGCCTAACCATGGTTTTATTTCTCTTTATCCAGCAGAGAGATCTTTGAGATTCTTGGATCTGTGGGTTGATTTTTTAAAAATCAAATTT
ATAAAAATTCTCAACTGTTATTTTTTTGAATATTTTTTCTGTCTTTTTTCTGTTTCTCGGATTCTATGTTACAAATACGTAAGACTCCTTAATA
TTGTCCTGTAGGTCACTGAAGCTGTGTTCACTTCTTTCTGCCTTTTTTTCTCTGTAATTCAGTTTGGGTAGTTTTTATTGACCTTTCTTCTAGT
TTATTGGTACTTTCTTCTATAATGTTAAATATGCTAAGTCCATCTAGTGAAATTTCATTTCAGTTCTAAAATTTCCATTCTTTTTTTTAAAAGA
AAGGTATGCATTTCTTTGCTGATATTGCCTATCTGTTCTCTCATTATGTTCATCTTTTCCTTTACATTATTGACCATATGCTATTAGCTATTTT
TGTCATTTGTGTCATTTTTTTTCTCAGTCTTATTTTCCTATTTCTTTGCACGCTTCATTATGTTTTATTGTACATTGTCGAGAGTTTGGGTTTT
TTGTCTTCCTTTAAAACGTGTTGAGCTTTGTTGTAACAGGCAGTGAATTTACTGGTGGATCACCTAGTTTTATTAAGATAGGTTTAGAGTAGCC
CTTATTTTAGGATGTTTCTAACTCCCATCGTGTGGTCTTTCTGAAATCACAACTGAATGCTCACAATCTTCACTCATCTCTTTCCACCCTGGAT
TATTACAAATTCAGTGTCTCTCAGCACTATATGATGTCTGGAATTTCCATTTAGCTCTTAGATGCCCAGAAACTGTTTTCTATTAGGTTTTGCA
GGGTCTTGTCCTACACTATCACAGCTTGGTATTTGGCCAGTGACCAGAGATGACCCCTATGTAGATTTCTGAGCCTCTTGCTTTTTGTGTAAAG
CCTTTCTTTGTGATATTCTGCCCATTGGTGTTCTCTCTTTGGGCTCTCCCTGTGTCATGATTTGGAAAGTGTCCTCAGTCAAAAAGTGAGGGCG
AATTTAGAATTTACCTAAATCACCTTATAATATATAGCCCTATGAAGTCCAATGTCTTAAATTACATCTTTAGGTATTTTGTATGGTTTCACAG
TTGAGTATAGCAAGGAGGGAGGTTCAGATAACTGTTAATCTGTGATAACTAAAACCAGAATTTGACATTCTGACAAACTTGAAATTGCAGTGCT
TCTTAAAATTAATACAGTATTACTTAAAAAACAAAAACAAAAAAACCAGTGTTTTCCAATTTCCCAATACAAAAAAGCAAAACTCCCATCTCTA
CTTTTTAGGAACTTCTATCCATTTGACAACATCATAAATATATAGGTAAACTTAGATTGCAGTAAAACTATGCTGTCTAGTGTTAAATCACCAG
TATATATAAGTTTTATAGATATTATGTGACTACAGAGCTATAGGTTATAGGAAAAATATAGGATTTCTTGGCAGAAATTGGATTTAACTAGAGC
CTTGAAGAGTGGATGCTATTGAGGTAGAAAAGATGGCATTTCAGGATGCACGCCATATTGTGAACAAATCTACAAGATCGAAATGAGCAAGTCA
TTCTGAATGATTAATCTGTCTATCATAGAGGGTTTTGATTAGGACATAGTAGTAGTTGATGCTTATAATATGATTTAATATAATAATGTAATGT
GCTGAGTGGTTGAAGTCTTTGGACTTTATCTTATAAGTAATATGGCAATAATGTGAAAGATTCTTGAAGAGGAAGAAACCCTGCAGTGAGGGAG
AACAGTACAGAGCCTATTACTGTCATTCAGAGGTGAAGCAATAAAGGTCTCTCCTAGGATGTTGGAAAGAAGGGGCAGATCCAAGAAACAACAT
GAAGAAAATAATCAGCAGAAATTGGTTATTGACTAGATATGTGTGAAAATGATATATTGGCAGAAATTGCAAAGTCAAAAATGGGCCTCATTGC
AGCAGGAATGATGAAATTCCTTTTAGATAGACAGGTGAAGGGATTTAAAACATTAACTTGTTTTAAAGGTATCACTGCTTAAAGCTAACAGTGA
TTTATTAATATTTGCACTCTGAAAGTTTTAACAGTTTTAATTTTATGTATACACCACAGTGTTTTGGCTACTATACTTGCCTCTTTTGTTCAGT
TGGGAATTGAGTAAACTAATAGAGTAAAAAAATGAGTACAAAGTGGGCTTTGACTAGAACTCTAACAAAGTGTGATCACTGAATTACCAAGATA
ATTAACCCATACCCCACATATACTCCATTTCCCATGACACATATTATATTGCATTGTTTTTGCCTATTTCCCTTCCTACTTCCTAAACTGTTGA
ATTAGTTTCCTTTTGTTGCATTAAAAAAAAGGAGAATCACCACAAAGCAAATTAAAAGATACTGATTACTTCTTCCAATTCTGTGGGCTGCCTA
GTTCATCTGGCCTGGCCTGCTTTGGCTAATCTCTGAGGTCTTTTGGCTACTTGACTGGTACTGTTTGTAGCTACTCAGCTGGTGCCCTACTGCT
GTTTGTCTCAACTTGTTTTGGCTACTCAGCTGGTGCTAGGGAGCCTCAGCTAGGACTGCCTGTCTGTGCTCCACATGGTCTTTGATTTTCCAGT
GGCTCGTGCAGGCTTGTTTGCATGGTAACAATGTTCCAAGAAAGCAAGAATGATCATTGCAAGGCCTCTTATAAGCTGGGTTTAGAACTTGTAC
TTCTACCTCTTCCTATTGGTCAGAGTATGTCCGTAGGTCTGCCAAGACTCAAAGCACAGAGAAATAGATGTTTCCTCTTGTTGAGTGGCATATA
AAAAAAAGTGTGGCCATTGATTTCAATCTCCCACAACCGTAACCTCTGTGACTACAGCAACTGCATCACTCTTTTCCACTTTGGTGTTGTTGGC
ATAGTAGGCATAAATATTTTTAGGTGAATGACTAAATTAATGAAGGAAGGAAAACATTCAGGTAGTATTTCAATATACTGTAGTTTTAAATTAT
ATATATTATATACATTTGACATAGTTTAATATATAAGTATATACACATATAGTTTTCATATATAAGTATATTATATATTATATAAAATATTTAT
ATGTTATATATAAAGTATATATATAAAATATATAGTTTTAATATGTAAGTATATGTATATAATTATATATAATATTATAAGTATATATACTTTT
ATCATACCATCAGTGAGTATAGACATGGTTCAGGGAGAATCTCTTTATTCTCCTTCTATCTTTTCAGATAGACCAAACAAAATTTTTTTTTAAA
AAAAGAACTATCACTTGAGTTAACATTGTTTGGTATTTTTATCTTCATAGGTGATTGCCTTGTGAATAACTCATTTTGTGTATTGTCAGAATCC
TATTCTGCTTTTCAGGCTGTGCTATGGGTAGACTAGCTCTAACCAGAACACTTCGGAGACCTGAAGCAAAGATACTATATTAAAATAAGTAATG
TTATATGCCAAAGAGGAAAACCACTTCTGCCTCCTAAACAACTGAAAGAACCAGAGACTGTGGGGTCAGATTAGCTAGCATTACTATATGAACC
TGAGCAAATGACTTACTCTCTTTCAGCTTCAGTGTCTTATCTAGGACATTGGTTCTCAGGATTGGTGTGAGAATTAAGAGAAATATGTGAAGTT
CTAGCTACAGTTCTTTACCCATGAGGTAGTCAGTAAAGTTTACTTCTTTCTCCATGTGAACCAAAGCACTGTCATGATGTGATGATGTTCATTA
GGGTTTCTCATGCTCAGCGTTATTGATATTTACGGTTGCATAATCCTTTATTGTGAGGGGCCATTCTGTGCAGTATAGGATGTCTACCAGCATC
TGTAGCCTCTATACACTAGATGCCAGTAGCACCACCTATCCAGCTGTGACAGGCAAAAATGTCTTCAAACGTTGCCAAATGACCCCTCGCGGCA
AAATGCAAACAGTTTATCTAGCAGTGACACATAGCCAGCCACCTTAGAAAGGGAATTGTCAGCGTACCCATAAGTGTAGAATGGGAAACAAAAT
ACTTGAGTCTTCTCACAATGTCTAAACCTTTTGCTGTCTATATTCCTCTTTTTATAATTTACCACAAACATATATTGCTTATTATGCCATCTAA
TAAAATGGCTAACATTTGCTGTGTATTATACTCGGTGTTAATAAGCTTTGTATGAACTCACTACCTGAATGTTGTATATGTATCTGCCATACCT
GTTGGATTGACATTCCACTGTAAACAGGTACCTTATCTTTACCAGCTCCAAGCACAATGTATTTGGTATATCAGGTAGCTATTCTACATGTTAA
TTGATCACATTGCACCCAAATGAAACATGGATGTGGAAGTGGAAGGACGACCTTTAAAACATGGAAAATTAGTTTATACAAATCTAAATGTTGT
AGTGCACCAAATTGATTCCTTTTTAAAAACTTTCAGAAATCAGCTTTTAAAAAAAAAAAGTAACTAAGCCATGATCAACTTTTCTTTCATCACC
ACTAAGCCAATATCAGAAAGTTGTCAATCAACAGCTCTTTTAAACTTGAAATTTTTCTATTGTATTTCTTATGAAGATTTCAGTACTGCTTAGA
AGTTTTTGGCTCATTTATCATGTTTTATTCACTGTATCTCATTAATTGTTAAAGATCTCAGACTCAAACCTTAAATTCAGGACAGATTTAAATT
TTTCCTTTTTCCTATTTAAATATATCTTTCTAATTACATAATTCAGTTAGAAAATTACAATATAGAAACATATAACTTAGTAAAAGTTTCCAGT
TACTGTATACAGATTATATTGTATACTGTATTATTTTTAACAGTTGCATATTTAACTTATAAATGTGGATAATTATAATTAAACAATCTGTTAT
CAAAGGACATACAGATTATTTCCAGTTCCTTGCTGCAGTGAATATCCTTGTACTTATTTTTTTACACACTTGCTCAGATAATTTTTAAGTACAA
ATTCCTGACGTAGAATTGCAGAATCAAAAGATACTCTCATTTGAGTGTTTCACATTTTATGCAAAGTATTTTGTTTCCTCCAGAAAATTCCTCT
GTGGAAGAGGCTTCCTCACATTCTTTATCAGTTTATTAGCCAGCAGAGAAATGATGAAAAGCCACCCCTTTTCTTGTAGTTTCATCCTCATTGC
TATCCAAGATGACGTATTAAAATCACACCTAAGTGGTGTCTGTTGTGGCTGAATATAATCTTGAAAGTAGAGACACTTCTCTCTGATTCCCAAC
TGTACTCTCTGGATGGCACCTAAAATTTTATTTTTTCAAACTGAAAATCATTTTAATGAGTTCGAAAAGCTTTTATTTTTTAAAATGAAATCCT
ATAGAAAGAATACATTTTCTTACAGTGGGTCATGGTCAAAACTCTGAATATCTCTGATCCTAGAAAGTTTCCCCAGTTACAAGGACAGGCGTGC
CCCCAACTCCATCCTTAATGGCTCAATTCTGTGGCTTTCAAGTTAATCCACTCAGTCCTACACCCTTCACCAAGAAGCTCATGTGCTACACTTT
GGTGTTAGTCGGGGCATTGTCACACAGGTTCAGAAAATAACCCATTAGGCATTTTATACAACTCATCACATGTTCAGAACTAAGCTAGTTGTAA
CATTATGTTTTTCATGTGAAAAAACACAAGCAATTCACTGCCTATTTTATTTGTTGCTAGCTAGCTATACTTTCTATTTCTTTTTCCATGCTGT
GAAAATCTTCCTAGAAACCTCACTACTGGGAAAAGAGATGCAGAGATTAGTCCCATCTTCTCCCCTGGAAATTTACTATCGCCCTTTTGGCTTC
AAGGTCCTTCCTCAAAAGCAAAGAATTGAACAAGGGAAAGTGAGGGGAAGGGCTGGGGGAACAGGGAGGTAGAAGGGGTTTTCCCTGGTCTTTT
CTAATCCTTTAGTTCCAGACGCTTAGTTGGTATTTCAACATTTTAGAAATAAAACCTGCTTTTATAATTAATGCAAATATTACTTAGTGATTCA
TCCTTTCCAAATGATTCTTGGTTTCTTTTGACATTTCATTTTTAAATTGTGAATTAACATTGACATCACCATAGCGTTACTGTTACCTCAGCTC
TTTACAGTGAACTGTATTGCAAAGGCTATAAAAGTTCAAATTTTAACTATCACCCACGTGAGCCTTGGACTGCTGTTAGGCTTTTGAAACTGTG
ATCCTTTGGCAAGAATTGGTGTATAAATCATGGGGAGGATATTGAAGGGGAAGATCATGTTTAATTTGGCAGTTGGGTGCCTGCAATTGACAGA
TTTTCATTAAGGTTTTAGCTATAGTAGTGATCATGCATCAGTTCTAATAAAGTAGGTTTCGTTTGAATTTTAAAAATTAGAGTGAGGACTGCTT
TATGTTAACTGTTTACATTCAGAAGTCTGGAAAACCATCCACAGGTTTAAATGTATATAATCAGTATAATTAACACGTCAACAGCCTCACCTCT
GTTTTTGAGGACCATAGGCTAATATTATTTATGAAGGTTCAGGAGATCAGTCTAGATCGACAGAAAGCTTAAGGGCAAAGATGGTTTTAATATT
TTTCTTGGAAGTTTGAGCTTCTGTCCTATTCTAAGGATAGGGATTTTGACATTGATTGTTCTAGCTGGTATTCACTACTGTATTTAAGTGTAAT
GTTTTTACTAGTATTCTTCTTATAACTGAAAACTATGCTAATGATTCTTTACTATAGATATATACTCATAAATACGTGTAAAAATCCAAGTTTA
CCAAAAAATATTAAGACTTAGGGGATATGTTCTTTGAATAGGCATTTATTTCCTAATTAACATATTCTAATCTCAACAAGGTTATATTCTTTTC
AAAAATCCATTCCATCAAAATCTGTCATTTTTACAGATGAAGAAACAAACGCCACAGTGAGTTTAGTTAATATCCAAGATCACACAGCCAGCAT
GATAGAACTCTTAAATTTCAAGCGACTTACCCTCTTTACTCTATCAGGTCAAATTTCCCTTTTTTAACTGCTTGTCTTAATTGAGATTTCTTTA
ATTGTGGCTGTCTGTATATCTTCAATCAATACTTTCTTGTTTTAGACAAATGTTTCCCTGCAAATCTGCATGAACTTCATGTTCTGAAGGACTC
AGAGCTGCCCTTTCCTTTTTGTTAAAGTTGTACACTGCTCTGCATCCCCCTAGAATGCTCATCAGCTTTCTCACTCTTCCTCACTCACACAGTG
CTCCAGCAGGAGAGGATTTCTTTGAAAATCAGATTCTTTTTTGGAGCCCTTTCTGCTTATTGCAGTGTTATGTCATATATTCATTACGGTGAGG
GCTAAACTCTTTGAACAAAGAGACCTGACAGTGCATTTGGGTTAAAGAACAAAGTTTATTTCTTTCTCTCATCACCACCAGCATGAGCAGCCTG
GATGGTCAGAGCACATCTGTCTCATGGCATTGTTCAGGGATCCTCATTCCTTCCCTCTCATTTATCTGCCATCCCCTAGGCTATTAATCATCAT
GTTTTTGGTAGAACCCAGGTCTTCTCCATGTCTGAGTTTTTATGGAGGAAGCATGTCAAGCGCCTTAAGCCCACACCTGCAACTGGTATGCAAG
AGTTCTGACATTGCACTGGTGAGCATTTGGTCAGATGGCCATCTCTAACTCCAACGAAGTGTAGGGTATACACTAGGTAAGCAGTCACATTTCC
AGCTACAATACTAATTCTATGGAAAAGGAGACAACATATTTTGATGGGTAGCTGACATTCTCATCTGCAGTCCTAAGTACTCATGACTGCTAGA
TAGACTTTATGAAAAAAAAAAACAAAAATAACCCCAGCAATTAATATTTACCCTCAGCCTTGTGTTTCTTTAATTTTCTCATTTTTCATGTCAC
ATATCTAAAATTTGATCTAAATAAATTTAAATAAAATTAACCTTTATTTGAATAATAATAAGGACATTTCTCAAGGAAGTAAATCTCAAATGAT
ATGTGATTTTAGATACTATCTTTATCTGACCATGTGGTTCCTTCCTTCTATCAGGGAGGGCCTCTGGGTAATAGAAGATTGCTAGGGCCTGCAG
TATATTAATGTTTAGCTGGAGTTGATTAAATCTGAGACCTATAGCCTTGATAATAAGGACTTTTATTTTTGTATTTTTATTGCACTTTTAATAT
TACAGAGTTTCTGTACCAGCTTGACAACAGCAGAAACATGGCTTGCTTCTGTGGAACACGCTAGAGCAGCAGTCCCCAACCTTTTTGGCATCAG
GGACCAGTTTCCTGCAAGACACCGTTTCCACAGACTGCGGGCTCGGCGTGATTTTGTGATGATTCAAGCACATTACATATATTGTCCACTTTAT
TTCTATTATTATTAACATTGTAATATGTAATTAAATAATTATACAACTCACCATAATGTAGAATCAGTAGGAGACCTGAGCTGCTTTTCCCACA
ACTAGACAGTCCCATCTGGGAGTGACGGGAGACAGTGACCCATCTGGAGACAGTGACAGTGATCATCAGGCGTTAGATTCTCATAAGGAGCGGG
CAATCTAGATCCCTTGCATGCACACTTCACAATACGGTTTATGCTCCTATGAGAATCTAATGCCACTGCTGATCTCACACGACACGGAGCTCAG
GCAGTAATGCAAGCGATGGGGAGCAGCTGTATATACACATCAACCTTGGCTCGCTTGCCTACTCCTCACCTCTTTTTGTCCTGCGTTATCCATA
GCCCAGGGTTTGGGGACGCCTGCACTAGAGGACAGAGCCTGGTACACTATAGCAGTCCTCCCCTTGTGTTATGCAGAGTACTGATCAGTCCCTT
TTGAGCTTCTCAACCTTGTATAAAACTTTGAGACAGTTCTGGGACCATCACAAGGTTTATGAAGGGTTAGAAAACAATACACTTAAGGAACTAA
GACTGTAAATCGTTGAAGTTCAGAGGGCGATAAAAAGAAATGGCTTCTAAGAATCCCAGTATGTATGATTTTTTATACAAAGCATAAAGATGAT
TTGTACCAAACTCAGGACACTGTGGCGAGCTTAACACGAGGGTATTGAATCATACGTAAGTGGTAATTCCTAGATTATGCAATCTCCTTGCTGT
TAGATTTAGATACCAAAGAGGAACTACATCATGTCCTCCTCCTATGGTCTTCAAAAAAGGATTATATTTGGTCTTACTGGTATAATACAGTTTA
TTCCTGCATGAATTCCATGGTGATAGAATTTTTAAAGTTCATTCTAGTGTTACAGTTTTGTTTTGTTTTGTTTTAATACACACCTTCACAATGG
CAGAAGATGATCCATATTTGCGAAGGCCTGAACAAGTAAGTGTCATAATCTCACTGATAACTTTATTTAAATATATTCATATTTCAAAAATATG
CAAAGGCAACATTAGTAAGTTAGCATTAGGAAAATTCTAAAATTAGTAAATTTTTTTTTAATTTCAGTTTCTCTGTCCTTTCATGTGAAGTTGG
AGAGGATATGTCATGTGAAATGAGTAACTTACACCCGCTTTCACACATATTGTTGCACAAAAATTGTATATGCTACAGGATAGCTATTGTATTA
GCTTTCTAGAGCTACCATAACAGATCACCACAAACCTGATGGCTTAAAACAACAAAATACATTATTTCACAGTTCTGGGGGCTAGAAGTATGAA
ATCAAGGTGTTGGCAGGGTTGGTTCCTTCTGGAGGCTCTCAGGAAGAATCTGTTCCATGCCTCTCCCCTAGCTTCTGGTTGGTTCCTCGGAATC
CTTGGCTTGTAGCTTTATCGCTCCAATCTCTTCCTCCATTGTCACGTGCGCTTCTTCCCGCCGTGTCTCTACTCTGTCTCTAAACCTAAATCTC
CTCTTTTTTTCTTCCAAAGGCATCATTGGATTTAGGGTACACCCTTATCCAATATGACTTCATCTTAATTTGTTTATATCTGCGAAGACCCTAT
TTCCAAATAAAGTCACATTCACAGGTACCGGGGATTAGCAGTTAAACCTGTCTTTTTGGGAGGCAACACAGTTTAACCCACTACAGCCCCTTGA
CATATTTATTTAATGTGTACACATGGATGTAGAGAGTGGAATGACAGACCATGGAGATTCAGAAAGCTGACGGATGGGAGCGCAGTGGGATGGG
GGTGGATGATAAGAAGTTACTTAATGGGTACAATGTATGTTATTTGAGTGTTGGATACCCTAAAAACCCTGTTTTGACTACTATACAATCTATG
CATGTAACAAAATTGCACTTGTACCCCATCAATTTATACCAAAAAAAAATTTTATTTAAAACTCATCTAGTAAGGAGACAGATTGTTGTAGTGA
AAAGATCTTTGAACTCAGAATTTGAAGATCTTTATATAAGTACTGACTACTACAGATCAGCTCCTCAGACTTGAAGAATCACTTAGTCCCCGTA
ATCCTCACTTTTCTCATTTGTAAAATAGAAATGCTAGCACCACACTAACAGGGATGAGTCAAAAATATTCAATGAATGTGCTTTGTAAGCATAA
AACTGTTCCTATCATTATATTAGTACTTATGAAAGGATAGCAGTGTCCTTTTTTCTTTTTCTCCTATATTTTATTTTGAAAAATGTTGGAAAAA
ATAAATAGAAATGTTGGAATAATCTAACAAATCTACATTGGTTCTTAAAACCGACATTTTCGCTTTTCTCTTTGCTCTCTTTTTCGTGTGTGTG
TGTGTGTGTATATATCTATATATGTATATGTATATACATAATCATTTGGAAGCAATTTTCAGACTCTGGAGCAATTATAATGGCAATATTAAAT
TATTTATGTAATGATTCCAAGAAGTATTTAAAACATGCAGATTTCTTCATTCATCAGCTATTTATTGAGGTATTACTACGTGCCAGAACATTGG
CTTAGTGGGGAAAAAATAAGTGATATATACACTCTAATTTCAGGAACCTACTATTTTAATAGGAAGAACAGAGACATTGTTTTCATATGGTGAT
ATATGCTGTAGTAGTAGTCTGCGCAGAGCGGGATAGAAATGTTAATAAGCAGCATCACTAGGTGCTACCTTGGAGGAAGACCAGACTTACGGAG
GACTTTCCGAAGGAAGTCTTCGTAAGCTGTGTTTTGAAAGATGTAGTTTGCTAGACTAGAAAAGGTGAAGCAACACTAGGTGCCAGGATAGCCT
GGTCACATTTAAATTTTACTGCCAATCATTTAAAATACTGCATTTCTGAAATTACACGTGCAAAGAATCACCCAGAAAAATAAAAACAGAAGTG
GAATATGTTTTAAACCCTCTGGTATCATTTCTATAAATAAAATGGACATATATAGCATTTATCACTTCCGGTGATATTCTGATTGATTTAGAAA
GAATGACTGCATTGCTTTTCACATTAAGATGCTCCTTTCTAATTTTATTTTTAAAATGGTGATTTAGGATAAATCTAGCAACATTTTCTTTTAT
TGCAGCAAAGACATTTGGCTAATTGTATTATCAAAACCGTTTGTTTTACCTTTCGCTTTTAATGTGCTTTCTCTAACAATTAAGCCCGAACTAA
CCAGCATGAGGATTGTGTCTGCTTGATTTTAAACCATCCTTTCCTGTCTGTACACAGGAAATCTTATCAACAAGAGATGATTCTTTATGCCACA
GAAGACTAAAACCTGCTGAAAACATTCATTTTGAAAGTTTTTCTTATGTGGGCATCTTTGCGATCATCAGTAACAGGGGTGGGGCATATTCTGA
CATTTCCATTTTTGAGGCAAGCGGTCTTGAAGTTTTTTTCTTTCTTCGCTTGAGCTTGGTGGTTTATATTTCCTAAAGTTTGCATGTCCTCAGT
GTTTTAGTGGAGTCTGGAATTTGCTCTCCACCCTGACCTAATAAACAATGCAAGCTGCAGCACAACACAACTTCTCTCTTAGTCTGAAGTGAAG
AGTATATCTCTCTCCTAAGGTGAGCCCTTTTGCCCACTCGCCAGTCATTTAGCCACCACAGGAAACAGTTTTCCTGCTACGTTATCACCTTTGC
TCTGAGACTGTTAAAATCCTGTATGAAATGAGGCCCATTTTTGCAGAACATGGTTTTTCATTCCTGTATTTCCTTTTCAGCAAACAATGAATAG
CATCAGTGAGCTTTTAATCTTATAAGCATTGAAGTGAAGCGCATTCTTTGTTCCTCAGTTGAAAATTTGCATCCCTCAAATGGATCTGAAGTAC
TGTTTATTTAAACGAGATTTTTCTTACTCTTAATTTAACTAGGCATACGAAGATCTTCAGTACCCCAGAACTTTCAATAATTTACTACTAAGGG
CAGGAGACAAACTGTAATACTGGCTACTAAAAGAAACGAAAAGCTAGTTCAGCACACTTACTAGTCTCTCATAAAAAGTAAAATATGGCTGGTT
TCCATCCTCTCCACAGACATTTCAAACATATAACTTCTTTAGGCTAAAATAAATAGCAAGCTCAGAAATACAGTTTTAAAGTCCTAAATGAGCC
AGCGGTTACAATGTTTTTTGATAAGTAATGAATAGTAATTTATTAACATAAAATGTACTTTCTTCAAAATATTCTGCATGCCCACTCTGTTGCT
GCCCTAACACATTACCACATACTTGGGGCTTAAAACAACACAAATTTATACTTCTGAGTCAGGAGCTCAGAAATCTAGAATCAAGGTGTTGGCA
GGGCTCCTTTCCTTCTTGCGGCTCTCATCTCTTTGCCTTTTGAGCTTCTAGTGGCTGCCTGCTTTCCCTGTGCACCCTCTCATCACTCCAGCCT
CTTGCTTCCATTGTCATACTTCCTACTATTCAGTGTGATTTCCTGAACCCCTCTCATCAGGCCCACCTGGACAATTCAAGACACTCTCTTCATC
TTATTATCATTACCTTAATGACATACGTAAATTTCCTTTTGTCATATAACGTAGCACTCACAGTTTCTGAGGATTAGGATGCAGACATGTTTAG
GGGGTCGTTATTCACCTTAACACACCCACTAAATTCCAGGTATTTTGTGTTATGCTAGGAAACTGAAGGTAAAAGAAATGAGTGAGCTCAGTGC
TTAGTTGTCTACTCCTTGTACTGTCAGTTATATTTTCAGTTATTCTGTAAATAGTCCCAGAGGTGCTCTCTAGCATTCTTTCAGGCCTTGACAT
TGGATAGCTAGATGAGGGGTATATTTACCACCATAGAGGAAATACTGATTTCTAGGATTATATTATTTTGTTTATACTTCTAAGAGAGTACAAG
CTTCAAATCATTCATTCAACAACTATTTAAGTATCTGTTCTGTGATAAGCATGTACTTGGCCCTCAAGATATACCAGTAAGCAAGCTAGACCAG
GTCCCTGCCTCTGGGGACTTTATAGCCAAGTTATGCTTCTCAAATCCCTTTGTTACGTAAACGTTGTCCAACCCTATGTAAAGTTTTGTACACA
TGAGAACTACCTAGGTCTCATGAAGATCTTTTAAAACCCTCATTTAAAATATTTTCACATTTTTCTTTTTGCCTTTACTTTCATTCCTATTATT
ACATTTTAGGTGTCCCAACTTCAAATTTTTCATATAATATAGGAAAAATAATGATTGAAACATTTAAATGTTCTTCTTTACAGATGTTTCATTT
GGATCCTTCTTTGACTCATACAATATTTAATCCAGAAGTATTTCAACCACAGATGGCACTGCCAACAGGTAAGAAAACTCATCCCTGTTACCCT
GTTGTTCTGCTTTCAGTCTTAGTAAAATGCAGGATTTGTTAATAGTCTGTCCTACAAACTCAGTTGTGTACCTAGAAAGGAAATGGTGATTTGT
TTTAAAAACCAATCTTTTAACATACTTTCTTGAAATATATTTGCACAAAAATATTTCATCTCAATTACCCCTTGTATGGTTTACTGCATTTCAT
ATCTGCTAGGACTACTCAGAAGGAATTTCTTTAGTCAACATAAGGATTTTCTTTATTATCTCTGTATTCCTTTTAAGTCCTTTCTCCCAGATTC
ACACGAGGCAGTCTCCACTCTTCATTTCTGTTTCAAACATTTAAGAGGGCCTGTTGTGTACTACCAGTGTGCCAGTCACTGGGGAATCAAAGTG
TACAGAAATCATAAAAATCATCTCATTAGAAAAATCATCTTTATAAAAGCTTATAACTTTGCACTCTGACAAGTTGGATAAAACTCATAATCCT
TCCTTCTACCATGACTGTATTAATTGTGCCGATTGGCAACTGTTTAATTTCGTAAGAGTAATAAAAAAAAAACTCTCTTTCTTAAAAAAAGTGA
TTTATTTGTATGTAAGCTTGGTGTGATGGCTCTTTTTATGTTCTGTTTCTCTCCTCACTTCACCCGTCACCAGTGGGACTTAACAGATGTTCAA
AAGCAGTGTGACTGAATTATGGAAGTTATGTGTAAAACAGAGTTTGCTAATCGCTGAAGGAGGCATCAGCTCTTTTATTTACCACGCACTTGCT
TGTCTTCATTGGGGGACTTTATCCCATTTGTATTATTCTCATTTAAAATTATCATCCTTACTACAGTACTTACTTTTCTTTTGTTTTAGATCAG
AAAACTTTTTCTGCATTTATATCTTTAGTATTTCTAGGAGTTCATGGGAGGGAAAAAACTAGATCTACTATACTTTCACCTTCACTAGTAAAGG
TGTATTTCAGAGGTTTTTCTGTCTTTACCCCTACAAAACATTATTTTTAGGCTGCCATGTCTGAGATCTTGTGAAGTGCTGTCCAATTTGAGCT
CTAGGTCAGCTTCCTGTGAACAAGTAAATGTCTTGCTAGTGTGTGTGTTTCTTGGGAACTTTTTAATTCTGGAGTTCAAAGTATTTTTCTTAGT
ATTAATGTATTACTGAAAATATAAGAACTTGGTTCTGTCCACAGGAAATACACACATTTTCACTTAATGTCTTCTGAATACAAAACAGTATCCT
GAGGCAGACGTTTTCTTAATTTTATTCCTTCGGATTTATGGGCATGAAAATAAGATTATCAAGATAACCATCTCAGTAAATATTCTGTGGTCAC
AGCTTTATGTTGTAGAAATTATTTTGCCATAATATTAGAAAAACTATTCAAATTACACCTAAAAATCTAATTTGTTAGTTCTTCTTACACCATC
ATTTTTACCTGTATGTTTTTCCCTCTTCATTGCAGTGTCATAGTACAATTTTTATAGTCCAAGATATATAGGATGTTGTATTCAAATTTTTAAA
GAGGTAGAGAGGTTGATTATCTAAACCAATATTAACTTGTAACTCTAAAATGGATTATTTTAGTCTTCTAGATTTTTTGAAATCTAAAACCTTT
AGTAGATCTAGTACTTGTTGAAGACTATGGGATGCGACATAACTCTTAGGTCTAAAGTTAAATTTCTCTGCACAGTGGAATCTCCTTTTCATGG
CACAGAAATGTGGCCAAAAGAATGTTGGCCTTAAAACAACAAATACATGCATATCAAATCTAATTTTCTAGTTGATTTAACTTTAATGTGTTGC
CTGAAAGAGGAAAAATGGCTCTATTTTACATGAATTTTCACATATTTAAAGGAAATTAAATCCTACAGGAAAAATAATAGCAAATTTGCAGTTG
TTTTTAGCAGAGTTAATAAAAAGTGAGAGACTTCAACTTTAATGTAAACATGCTTCCAACTCCTCTGTATTTTTCATGACATCCAAATATTGCT
CTGTTAGAGGACTGTCTTGATATGTTCTTTCACCATTTTAACAGGGAATGTTTTTATAAGTGTTACATTGTCATACAGGCTGTATCTTAGTGTG
AAAATATTTCTATTTCTAATCAATTTTATTTCCATATCCAAAATTAAATTCTAGCCATTTGGTGGGGGAATTTTTAAATTATGATTATGTTTCT
AAAAGTAATTTAAAATGTCCAGGGGTGAATTTCATACAGACAAAAGATCGTAATTTAATACATTGACCAGTGACTCCCCCTTTTTTTTCTTGTG
TATGCTTCATTTCAGATGCATTCATTTTTGCAACTCGCTTCCTTGTAAATTTCTTGAATATAACAGGAAGTAATTATACCCTTGTTTTCTCCAG
TTCTCTAGCCTTATCCTCATTTATCATAATATTGAAAAGATAAAAATAAATTCTCTGGCCGGGTGAGGTGGCTCACGCCTGTAATCCCAGCACT
TTGGGAGGCCAAGGCAGGTAGATCACGAGCTCAGGAGTTCAAGACCAGCCTGGCCAAGATGGTGAAACCCCGTCTCTACTAAAAAAATACAAAA
ATTAGCTGGGCATGGTCCTAGGCGCCTGTAATTCCAGCTCCTCTCCAGCCTGAGGCAGAGAATTGCTTGAACCCAGGAAGCAGAGATTGTGGTG
AGCCGAGATTGTGCCATCGCACTCCAGCCTGGGTGACAGAGTCACACTCTGTCTCAAAAAAAAATAAAAAAAATTTTCAGAAAATTCTCTTTTG
TGTTATAGTTTATTTTTAATTTCAACCTGAAGGTTTATCTCCTTACAAATTTATTTAAAATAAGAGGTCTTGAGCTTCTTTCTGAGAGAAAATG
AAGATTAAAATCCACATACAAGCATTCTCCTAAAATATTTTTAGCACCAAACATCTTAATTTACATTCAAATAAATGAGAACCACCATATGCCT
TTATTTATTGCAAAGCTATGGATTATTGTACTATTGACATAAAAATCAGCTGGGAAGCTTAAGGACTTTTTCATATTGAACAGTTTGTACTTAT
GTTGTCAGACATTCTGATTTTCCTTTGAATTTTCAAGTCAGATACCATTAGGGTATGGATTAAGCCTCTACTTTTCTTTGCGTTTTTACAATAA
CTAATTTGCATGTACCTATCTTCAATTAAATTATTTTCAGTATTTTATAAAATGCCTGAGATGTTTTAGAACACAGTTTATATCATAGCACAAT
ATTCAAAATTGCTTATAAACATCAAAAGTTATGGATTAATATGAAAATTTTACCATGTCTGATAGACCACATTACATTGGGAGTGTCGGGGAGG
AAAGGGGAAACAAACTAACCAGTTAAGGAATGAAGGCAGTACTTTCCCTTCAAGTAAAGACGGGAACAGAAAACCTAGTGTAAGGAAAAAGAGA
TAGCCTGAGATCATTATCTGTCTATCAGACGTATACATACAGGTTGCTAGATCAGTATCTTTTAATTTCACATTAAGCACACTCTCTTTGAGGA
AGGAAAGTCAGTGTCTAATGATGTGAAGGCCAAAGAAAATGTCATAGTGCCCAGAAGTGGTTGCTGCTTTTAATTGGTATTTGTCATTTTAAAA
TGCTTTGTTAGCAGACAAGATTATGAAGGCTGTTGACATCAATTCTTCCCGGCCATATGCCTTTTATTGGGTTAGGAAATGTGCCATCACCTTT
CAACAAACATTTACTTATTGTGGTTCGCTAAACTCGTAAAACTATTGTTAAAATAAGGGTTAATTTAATATTTCAGACAAGGAAGAGAAATTAT
ATCCTTGTGGAATTTTAACCAAAAATTGATTTGAAATTTCTACATAAAAACATAATTTCAGTTTTTTACTTGCTTTACGTTTTATACCAAATTT
GAGAAGCCTCACAGTTTCTTTTGGTTTCTGTTTGTTGTTTTTGTTTTTAGCAGATCGCCCATACCTTCAAATATTAGAGCAACCTAAACAGGTA
AGATTAAAGGGGTGGGACTTTAAATGTTAGATTCCAGTGTCTAATATTGAGATCATAAGCACTGAAGAATAGTAAATGAGTTCTATGAAGGAAG
TAGTTTATCTGAAAGATCAACAACCTGACAAATTATGTAACAGCTTTATTCATTCACTTTACATTTCTCTTACTCATTGTTCACACTGTCCTGA
GCCTCAGTATGTAGTTCTGTAAAACTGCAGTTAATTACAGTATTAGAATTACAGTTAATTACACTATTCTGCTGTCTCTACCAGCTTAACTTAC
CAGCCACTCCCAGGAAAGGCAGAGGTGATTTCCATTCATTTTCATTTATAAGGAAATACGTATGCATACAGTTCACATCCACTGAGCGATATCC
ATCTATTATCCTTGCACATGTAGTACCTCTTAGCCTTCCTCCTTCCTTTGGTAGCCCCAGCCTTTTCTGTGCTGCCTTTGGAACATGTAACCTA
ACATACTGAAAGTACCAGTGCGAAGTAAAATGTTAGAATGAACTATTCAATTCTCTTCCCTCTGCTGTCAGCCTCTTTGGAGTCAGGAGAGGAA
CATTTTTTCAGGTGCTTCCCCTTACCACTAGAGTCTGTAGAGAATAGCTCAGAACTGAAATGGCCTCCTCACTGTATCCAACTCTGTGGATATT
TATAGGAAATTGGATGGGACCAATGCTGTGAAAGAGAAAGAAAGGCAATCTTTAATGTCTGCCTATAGGACCTTTCACTTATTAGGGAATGGAA
ATAATGGTGTAGTTCCCCACAGAATGAGGACAGTCAGTAAATCTTTGGATGGATAAACTAATCACATTTGTGTGTGACTGAGGATATGGATACC
TGTCCTCTTGCAGCTGTATTACCCAATACATTTTCTAAGTATTCTTTTCATTAGCTCAGGTGAGTGAAACACTTTTGCATTTTGTAACATTTAA
CACATGCTAACTAGGTCACAAGCTTAAATAAAGCATCCACTGCGTTGTGGTTTCCAGAATCGTGACATTATATATGTGTTATATTTGGTCAGCA
TTTGATATAAATGTCTTAATGATTGCTGAACAGGCTATCCTTATAAGGTTGAAATTAGATGAAAGTTTTTGCTGTGGGGGCAAGAATGCCACAT
GAAACTTTGGGCCATGGTTCTAGTTCTTGCAGGTGTCACATCCTGACTCCTCAGGTTGCCAGTAACACTCCATTCCTCTACCTCCATGTTCAAC
TCTTTTAAGCAGTTATTTCTCAGAGAAGGTCATCAATTCCCAGTGAAATTTTATCCCTTAAAGTTCTGTGGGCTCTGCCATCCTGGAAAATTTC
CCAGCTTTTAAGATCTAGGTAGTCTATGAAACAGAAATCAACTGAAATTTGTCTGCATATGCCAAAGTATTTTTTCCAATATCATTTTCATAAG
CATAGCACTACAATAAGAATTTTTAAATGTAATTCCTTATTATGCATCCAACAGTTATAAGGAAAAATTGGCATTTATGATTTACCTGAAGGGT
TAATGTAGTTCCAAAATTCAAAATTTAATTCATATAAAAGCTTATGTGAGTAAAACAATGTGTTTACCAAAGTGATGCTATTTTGATATCTGAA
TTCAGTGAAAGTAAGAAGGTTGTATTCAAGTCAGACTTTCTGACTGAATGGATGTAGCCTTGCCTTTGAGGTTGATGACTCATTTTGAAGCAAT
GGAGTTACTCAGATGAGTGAATGTGGATTAAAGGCAAAATTTTGATCTCAGAAATTTAGAATCAGAAATGCATCCAGACAATGCATTTGACGAC
ATCTTCCTGAAAACAGTTGTAAATTTTCATCCTCAGATTAAAAACTTCTGAGGATTTAGATACTCGTATGTAACCATGAAAAATATCTATTAAG
TATTGTCTATTTGACACCACTCCCAATAAGATATAAACACATACGTGTCTATATTTTTCCAACTGTCCCAAAGGAATTTTGTGATTAAAGATAA
TGAATTGTGTGTGTGTGGTTTTCGGGTTTTTTTTGTTTTTTTTTTTTAAGTTAGAAAAAGATTCTTTTTTCTTTGGCACCTCTTAGCCACAGAT
TTTCCCCAGCTCTGACGGAGATGAGTCATAGCATAGACTACTAATTTTTAGAACATCCAGTTCTGTTGCATATTAATCAGTGTTAATTAACTAA
TACTGTTCAAAAACTCAAGTTGTGTTTAAATTAGCAGTCAAGTAAATCTCTATTCTTATGGTTAGCTAATTCTGCAGGCTATTATACATGTGTT
GTTTTTTTCATGGTTTTAGAAATTTCATTTAATTATTTAAAAAACCAACAGTGTTTGCTTACAAAAGGCATAGGGCTGAAATTGTAAATTATTT
TTAAATATGAATTGTGTGAGAACCAAAACAAAGGAATTACCTCTGAAACTTCATCTCCAAAGGCTTCCCTTGTGTTTAGATCTGGAATCTCCCA
AGGAATTGTTTTAGGTCTCACTGTGATGAGTTGATCATAAACTTTAGACATTTGTGTGCATTAAGGAAATTTCCCAGACCGGGGAATTTACTTT
ATGCCTTACTTATCTGGTAAATGTGTTTGAGGACTGATCTTTGGAAATCAGGAAGTTTTTGGATAATATAGGAACAGTTCCAGATGCTTCCCAG
AGATTTAAATCAGTTCAAGGCACCTGGACTGCTCAGAGACTGCAAGACCCTACTTGGCATAATGAAATGTAGTATAGTCTAAGTAGTGCATACG
TTTTACATTTGTTCATGAGCTCAAAGCTGTCAAAATCTGCATGTTTGCTGGGGTTCCACAATTTAATGAGTAAGGGAGTGAACCCCCACCAGCA
GCTAGTGGGTGTGATGAGCTGATGGGCAGATCATCTAGTGCTGTATATCCACAGTTGGTCCCACAATAGAAACAAAAGGTGAGAATGTTCCTTA
AAAAATCTTAACGTATTTTCTTTTCACCAAAAAGTGAATCTGTAAAAAGAAAATCATCTGCTTAAGCGACTATGTGGTTATAAACTACTAACAC
TACCACAAATTGATTGACATCATTATAAAGTTGAATCAGGAAATACAGCCAAACCTCCCTTAATATGATGATCAGGTCATAATTATCCTTGTTT
TATTCTTTGTATACAAATATGAATAAGTTAGCTTTATAAATCATAAAAAGTTAGAACTGGAGTAGACCTTAAAGATGGTCTGGTATAATCTTCC
CTTTTGTACAAATCAAAAAATATGACACTTCTTAGGTGTTTATCAGCCCACAGTAGTTTATATAGTGAACGCTTCCAGCTAACTTCATTAATTA
ACTATATCTATAAAATTTCTGGGTTAGATAGTATTTAAGGGAACTACCTAGTTTTGGAATCATTCTGCTAGGTTAATATTCAATCTTCAGCTTG
ACCATATTAATAATCATAAAAACAAAAATCTTATCCTCTGAAATGCTGAGAGAAGCTTAACAGATGCAGGGTCTAGCACAGGGTGTGTTCTACA
ACGCTGAAACAGTATATCTAAATAAACATGTCTGTAGTCCCTGCTCAACCACCTCTAATCAGAGTAGATAAAGGAATGTCTTTAAGTAAGAGTC
AAGGAAGCATAACTTTTATTAATATGGTACAGTTCAGAGCTTGGCAGCAGCAATTTAAGACAAGGAAGCTCTGACTAGAACAAGCCGTAACATG
TTAAGTCTAAAGCCTAAACTCTTCAGCAGATTACTCTCCACACATGCATAGCATGACAGGTTCCATGGGCTTAGGTACCTGCCTTTTTAGCCAT
ATCTTAGTGTACAAATATCGATTAATACCATTTTTCGTAGTAAGATTACCGGAAAAGTGATTCTTGTTTACAGAGCCCTCTTTCAGTTTCATGT
TTTTCTTCTCTCATTTAGTAGACATAAGATTTAAAAATTTGTATGTACCTTTGTTGCCGTAATTTTTAATAAGTATTTCTCAAACTTAATTGGC
TTAACGTTCACCTTTGCAGAGAGCATTTCGTTTCCGTTATGTATGTGAAGGCCCATCCCATGGTGGACTACCTGGTGCCTCTAGTGAAAAGAAC
AAGAAGTCTTACCCTCAGGTCAAAGTAAGTTTGTGGTAGCTCTCCTTCTATTTGAATTCTGGAAATTTTGATTTCCTACGATTTCCAAGGAATT
GCTTTAAATGAGTACGGGTTGCCTTCGCTCCTAAGCTGAAGTGTTCACATGATTATTAAAATTTTTAAATAGAAATTTGTCTCCTAGCAATAGA
AGTGACAGATACTAAAACTTTGTTAACATTTCAATTTAGTAGAAATGTCTTCAGCATTAGCTAACAAACTTACTATTTCTTGATCATCTTAAAT
ATTTTTAAAAATTGGATACTTCCTGAAACTTTAGTAAGTCTTTGAAACAAATGCTTGATTTTCACTCTTTCGAGATTTAGTGAAAAACCAAACA
AGTGACTGAGTGTATGGATTATATAGTATATTATTTAAGATTATGAATTTCGATCCAGACTTTCTTATTAGCTGTGTAGCTTTGAATAGGTTTA
ACCAATACTTCTAAACTTCAGTCTCTTAATGTATAAAATACAAAAATATTAATAGTATATACTTCATAAGGTCCTTTAGAGATTAAATGAGAAA
ATGTGTACATGTTCCATAGAGAGCCTGAAAGTACCCTAGGGCCTTGGCCTGAGCAGATGTGTGGCCCTCTTGGAATCAACTGCTACGTCACATG
CTGGTGGTGTATTTGGTCATACCTTTTACCATGTTCAGGCTGTTTGTTTATTTGAGAATATTTTTCTTTAAGTTAATATGAGACTTTTAATTTC
ATAATATGCTATGTTTCATAGACTGACTGATGATAAACATAGACTGATAATCATTTTGCAGATAAACGCAGTCAACAATTGTAATTTAGTTTTT
TATAAAAGTTATTATTTAGTCAGTAATTCAAGGCTTGGACAAAATAGTTCTCACTATGTGTGTGTGCCCCTCAGGGTGTAACATACTTTTGGAC
TCAGTCTTTTTATTGGTTTGTTTTTGTAAGTAGATGAAGCTCACTAGAGCAGGCCCTCAGCAAAGTTGTCATGTAAAGAAATCTGGCCGGGCTC
GTTGACTCATGTCTGTAATCCCAGCACTTTGGGAGGCCGAGGCTAGCAGATCACAAGGTCAGGAGTTCGAGACCAGCCTGGCCAATATGGTGAA
ACCCCATCTCTACTAAAAATACAAAAATTAGCTGGGTGTGGTGGTGTACACCTGTAGTCCCAGCTAGTCAGGAGGCTGAGGCACAAGAATCGCT
TGAACCTGGGAAGCGGAGGTTGCAGTGAGCCGAGACTGTGCCACTGCACTCCATCCTGCACAACACAGCGAGACTCTGTCTCAAAAAAAAAAAA
AAAAAAAAAAGAAAGAAATCAGTCTTTGGTTTTGCCAGCCTTGCATTTTGTTTCTTCCTTTTCCTCTTATCCATCTTCTAGGCCCAGGCCTGTT
AAATTTCTTATCCTTATTCCCAAACAAAAGACAAAATGTTGTGACGTCGTTCTTTACCTTTCAAGTGAAACTCACCCATTATTTAGTATGGGTA
CTACTAGTCATAGTTGCATTTTAAGTCTCTTAGCTCCAATTGTGGAATGAAACATGTTTTTTCTATTAAAGGTAATTACGCCGGTAAATATGAT
GGCTTAAGTCCACAGAAGCAGACCACGGTCTTATGGCCTCACATCCTTTAGAACCTTGATGAGGAATGAGGAGCAGCAATAAAGAACTAATTTG
CACTTATTAAACACCAAAGACTTGCCAAGTGGTTTGTATAACATTATCTCTTTTAATCTCTTAGAAATCTCAGTAGCTAAAAAGTGCAATGCCT
GTGAACCCAAACAGACTCAGAGAATGGAATTATAATAACTGGCCTTTCTCACAAGACTAGTGGCTCTATATCCTGCAGCAGGCTATTGCTCACC
GAACCTCTCAGATATAATGTGTGCATTTGGGGTACTGGGGGCAGGGAGATAAGGGACAAATTATGGGCAGACAATGGTGTAAAAAGGCATGGTG
AATGATAACTCTTGAAAACAAGGGAGAGAGAGGCTCACTGGTCAATGGGTACTCACGTATTCCGCAAGCCAGGCCCAGCACTTACCTTTTTAAC
ACATGTGTCTGTGTGTCACATGTATAAATATTGTGCCTTTATGTATGTGTATATTTGTGAGAAGGGGATTGAAAGACACATGTTATCAGCATTG
ACACTGACTATAATGACTGAAGAATTAACTTTAACCGAAAAACTGGCAGTTTTTTCTGACTGGCTTGGCACAAAAAATATAAATTATGGTATTT
TGTTTACTTCTATTGCTCTAGTATTTTGTGACTAAGTAACAATTCTTGATACTAACAAACACATGGCATTAACTTTCTTATAAATTTATTGGCT
AAGAAAAAACTTTATACATCCATTTATTCCCAGTCTTCATACATCTTTCTCATGTAGAGGTTTCATCTACTCAAAAACATATTGCTGCCTCAGT
CACAAAATAATTTACAAATGAAACAACTTAGTGGGCATTAGATGTTCTTGTAGAATGAAAGTTTCTATATCAAGGAGTTTAGTACTTACTGGGA
AATATAGATATGTAAACGACTAATAATAAAGCAGGTTCAACTACAGTCACATTATTTCACCAAATCATTTATTTTTTATTCACTAATTCAGTAT
CCATTTATTAAGCATTTAATCAACTTGTAAGAGGAGGAGGAACTTAGAGGTTAGAGAATATGACTATACAAGCTGTCATTGTTCCCTTAGCTTG
TCATTGTTCACTGAAAATTGAAATGGTTCTGCTGTTCCTAACAGTTATAGGAAGTAATTTTATTTATCCAAGAAATTCTTAATTGGAAGGATGG
GTAGGAGAGAAAGAAACAGACAACGGCCAGGTATTTTTTTTTTCCAGAGCTCTTCTCCAAATATCCCTTTTAATAGTTATTTCTGCTCAGGATG
ACCTTTAAGTTTACAAAGGAATTTTAAATCCCCTTTTCCTCTAATGTTTAAGCAGAGGAAAAAATTGTTCTCCATGCATCTTTCTAATCAGGAA
GACCTTTAAAATTGTGCATGTCTTTTCTGTGGTACTTTACTAAGCACCTGCTCGGCGAGAGACTGTAAGGGAAACAGTGGGATAGATACATCTA
AAGTTTCTCAAACTTGGCATTATTGACATTTGGGGCTTGAAAATTCTGTGTTGTGGGAGGCTGTCTGACACGTTATAAAATATTTAGCAGCCTC
CCTGACCTTCACTCACTAGATGCTAATAGGATTCCTATAATTGTGACATCCAAAAAGTCTCCACATTGACAAATGTCCCCTGGGGGGCAAAATC
ACCCCTCTTTGAGAACCACTGATGTGGATGCAACAAAGAATCAACCTTAACCTTACCCATTTGCATACTTTTCTACTATAAAGTTGTCTCGCAT
AGATTACGTAGAATTTCCAAGTGTATTATTTTATAAACGTGCCTTTCTTGGTTATTAGTAGATATTTCTTATTTTCAAGATGGTGATCATGGTG
TCTGTATAATTTCTGTTAGAATATCAGAGTTAGTGTACCTGGATACTAAGGAGAAAGATAGAAAAGATAAAATATGTATCTTCAACATTTTGTA
TTCTGTGATGACCCTAAAAGCTAATGTGGGAGTTCTATTGACTGTTATAAACTATTACAGAAGAAAAAGTGAAAGTGGAGAGTTAGGTCCACTG
TGTGTGAACAATGGGACGGTCTATGGAATGATGCTTTCAGGTGGGCAGAGGCCTCGTGGAGGGTGGCCCCACACTCACCCCCAGAATCCAGAAG
CCATTCCCACAGGAACTTCAGAGGGAGAGCATTTACATTTACAGGAAAGAAATGATACTTCTGAGCCTACATTTGCCACATATTCATTAAGTGC
ATTTGTTCAGGCATTACAGTAAAATGCCATGGGCTGTGCTTTTCCTCAGCTACAGCCTCTCTCCCTCCAACCTCACACCCTGTCTTCCTGTCAT
GCCTTTGTGAGAGCGCCACCACTCTGCGGTCCCTGGAGAGGAACCTGCAAACGCTGATAGTTCAGTGCATACTCGGTCATATCGAGACAGCAGG
AAAGAGTCAGGGGCCAACTTGAAAGATTTGGGGCCTGGCTGTGGTTTGCAGGCTGTAGACACCAAACTATACTTTATAGAACATGTGAAAATAT
AGCCTGTATGGGTTACTCTCTTACTGATTGTCTAGATTTGATGCCTTACATTAAATCATTTTAAAACCAACTCTAGAAGTCTACTCAAATCCTG
CATTTTCTAGTGGAATAGTCTCCCATGCATAAAACCCTCTTTCGCATAGGTGTAGGCTACCTTACAGACCCTCTTACCATGTTGAGATTATTTC
TAGAACTCAGGCTACTGAACCATCTGGTGCTCTGCCTGTGTCTTTCACATAGCTAAGAAGAAAATTTCCATTTAGCTTTCTGATATCTTGCTGT
GCAAGTCTTCATGCTCTTTTTTTAAAAAAAATTTTAATTATAAATTCTTTCAACCATATACAAAGTTTAAAAATTCACATAACAGACACTATGT
ACTACAACACAAATTTAATAGGTATTAGCATCTTACCTTATTTGCTTTTGATAGCTCTCTCTCTCTCTCTCTGTCCTCTCTCTCTCTCAAATAA
AATAGTTACAGCTAAAACCCCACTTATCCATCACTTTGTCCTCCTTCCTTCTCTTAGGTAAGCTGCTACTCTGAACTTTCACTCCCCAAGATGT
TTTTATATTTTTACTACATAAGAATGCATCTATAAATACTGGCATTTTCAAGAAAGTTAATTTTTACTAACTTCAACCCAAATTTGCCATTGTA
TAGGATGGCTCCTTTTCAGGGCAAACATAGGTTCAAACTGGACGCCATTGAAGATTAACTGGTACTCACTTTGATCCTATTGATTCCTCTTTGC
TGTCTACATAAAAATGTATTTGTCACAATGTAGTTTGTACTAACTCTTATAGCAAAAAATAATATTCAGAGAAAAATCTAGGGGAAGTAAGTAT
GCAGACTAACTCTTATATCTTGTCCTTTCATAAGAAAAATTTCCCATCATTAAACATTTAATAATCTATTATACTGCCTATAAAATTTCCCTTT
AAAGTTTTTTCCATTCTAATTTCATCACGGAGCTCCTAATAGGAGAGGCTGGCAGAAAAGCACAGGAACCTTCCTCTAGGCCAAGCTTGTCCCT
GCCTGCTTTTGACTCAGCAAGGAGTGCCAGGGAAGGCTCACTTCCCTATTTTTCCCGAAAGCCACGCGTGAAGTTTTAAAAATCAAACTGTGTT
CCCTTTCACAGAGGTGGGTGACAAGAGAAGCAGCCCCATGGGACTTCAGAAACTCTCACCAATCCTCCTCTAGAGTGACCAGAAAGTACCCCTT
CCTATCCTAACTAATGTGACACGTCCTTCTGTGTGGTCCACTCTATGCAAAACCAGAAATTGACAAGAATGACTTTGATTGTAAAGTACAAATA
GCTTACCAGTTAGTATTCTTAGTTTCTCTTTAGTTATAAATATCAAATGCAACGGACTTGAAACCCAGCTGATAGAAGTGTAACTATTTTTAAT
CAAACATTTTCTGAAAGCTGGTTCTCACATATGTTGTCTTTCCTGACTGTTTTATCTTCAGTGGAAGACGTGTTGAAATGTTTAGGTCAACAAC
AGCTTTTTTGTTGTCCCCTTCCACTACTGATTTAAAAAAAAAAAAAAAAGGCTCCACTCTTCGTGCCTTTCCTTAAAAATCCTAAATGTTAAGT
TTCTGTCGAGGTCGAATAGAGACTACCCGATCTGCTGTGGCATTTGAGGATATCACATATCCTTGCATAATCTCCCTTTCCTTTGTATAGACTT
GTCTGATTCACGTGCTTTGGATCTATTTGGAGTACTAATTTAAAATAATTTAACCTGACTCAATTACTTAAAACAACACGGGAGAAAATCACCA
ATAATCAGCTATGTGTGCGTATAGAACCTAGTTCATATCATTTATTAGGATTTCCATTGAACCCCTAAGCTGTTCACTGCGCAAGTATTTAATT
AGGCAAAATAACCATACCCCTATGTACATTATACTCTGTGTTTTGTAAACCATGAGAAAAGCTGCTTATTGAACAGAAGGGCTTTGTAACCTGG
GGTCTATGGATCCCTGTTGGTGGTTTCAGACGCTTTTTAGATTCCTAAATTTATATCCACACTTACACATGTATGTATGTCCATTTTTTCTTGG
GAGATGAGTATAACTTTTTATCATATTTTCAAAGGGAAAGATTTAACATGGTTAAGAATCATGCTATAGCTTGTATCACTTTAGCTTTTTGATA
GCAGCTATCTTTTTAAATGATCTATGTAATATTTTTTAAGATTTTTTCTTTTTTTATTCTTGCATTTTTAATCAATTTTAAATCAACTGAAATG
CTTTATGTTGCTCAACACATAGCCCAGAAAGCCTCCCTTCAGTTTTCCAGTAGGTCGAAAAAAGATGAAACTGAATTGATGGCCAAAAGAGTTG
AATGGGCTTCACTGCTTTTTCTTTCTTGCTCTTCCATACATTTGCAGATTAAGCATGAAGCTCACCATTAGTGATTGAAGCCAAAAGAGAGAAG
GCAATTCATTGAACAAATATTGATTGAGCACTGTGTGTCAGGTACTGCTCTAGACAAGCAGACAAAACTCCCTCCCATATGTAACCACAATTGA
GACTTATAGGTAATTTTTGTTGCAACTACTTCAGAAGTTTTGTATTTTGTCCTAAAACAAAATATTACTTTGTAAAATATTTTTTTAAATAGCC
CTCTAAATCCGCTGTATATATTCAAAGTCACTATTATAAACTGGAGAAAGCTACTCATTAGAGAAAACCTATCACACAGATAATAGCTGGGAAG
CTTAACCCTTAGAAATTATTACGAGAGATATACACTCCTTGAATTTAAGAACTGTCTGAATTTTAAATTTTGTTTTGTCAGTTCTCGCTTGCTG
ACCTTCCTCTATTGGCCATTCCCATTTTTCTGCCCTCCACTCTTCCTTGACACATGATTATTTCTGGGACCACTGTTCAATCCGAAACAAATCT
CTGGTGGCTTCTTTTAAACCCAGTGGTCTCAGTCTGAAGGTATAGTGGGGCAACTCTCGGCATTCCATTCTGGAGTCTTGACCTCATAAAGTCA
CATATTGGCAATTCGCCTTGATAAGGTCAAGTGAACACACAGAAGCACTAAGATCCCCACATGTGTTCCACTGCCTCCTCCACAGACAAGTTGT
TTTTCAACCCATCTGCAGGTCCAGAGGTCAACCTCCACGCTACCCTCCACTCTCAGTCTTTTCTCCCCACCCTCCAGATGGATTCCAAATAAGA
AGCCTCCACACTACCTTCACCTCCCTGGGGTCTCATGGACATGGGCTGGAAAGTGCTTGCAGACTTTCACAGACAATGCTTTTTGCCTTTAGGT
CCCCTTCTACCCAACAGAATGATTATAATAATGGCTTGATGTGCTTACTTACATCATCTCATTTAATCATCACAGTAATCCACTGATGCAGGTT
CTGTGATCCGCATTTTATAAATGAGGAAATTGAAGCCTAGAGAAATTAAGAAGCTTAACTTGGGTCTCACAGGCTTTTAGAGATGGAGCCCAAG
ATTTCAGTTCATGCCATATGGTTTAAGGGCCTGCACTCTTAACCATCGTGGAATACCATTCATTATCATAATGTTAAGGATCTGTTTCTACTTT
GCAGGAATCTTTTAAATCTATGGTTCACAATCATGGGTGGGCTTCAGAATCGTCCAAAAATGTTTCAACCACAGAGACGCCTGGGAACCACTGC
ACAATTGCTAAATCACAGTGCATCATCTAGCCAATCTTGGATTCTACAATAATTCTATGACAGTTTCTAAGAATACATGCCATTATATAATGGC
AACATATTACAACACATAATTCAATAGATATTCAATGTATACCGTGGAATAGAATATTATGCCACTGTGTTTTAAAAAGATAATTAAGAGGATA
CGGCACAACGTGGAAAACTGCTTATAACATAATATTAAGGATAAACCTCAGCTGGGCATAGTGGCTCACGCCTATAATCCCAACACTTTTGGGA
GGCCAAGGCAGGAGGATTGCTTGAGCCCAGGATTTTGAGCCCAGCATGGGCAACATAGTGAGACCCTGTCTCTATAAAAAAAATTTTTTAAAGA
AAAAAAACAGGATTTCAAATTATTCCTAATATTTGTAGTGATTACAAATATTAGCTTCTTTTTATAAAGCCTGGGTGGAAGCATATAGATGTAT
CTTTAGCTTTATTTATTCATCCATGACTTAAAGAAGATTGGTTAACACCTGACTCCACCTTGAGTAGCAGAACATTGGACTGAACGAAAAAAAA
AAATGTGAAGCTGTCTTACTTAGCTACAGTTTCCAGCATGTTTTCTCAGGAGCTCTATGGGAGACAGTGCAGTGTGGCTCTCAAACCTTACTAC
CCATAAAAATCTGCTTCAAAACCTACTTAAAATATCCATTTTATTCCATTTCCAAAGCCTGGTAGAGTAGGTAATTCTCCCACTACAATACACT
TAGTAACACTAGAAAAAAAATATAACATTTTCTTTAATGCATAGCTGAGTTTATTAGAAAGTATGAAAACTACTGGGGCGCCGTAAGACAAAAG
AAAACTTTGGGAAAACACAATAGGATATGGGTGGACTTTGGGGCCACAGCTGCCCTGGAAATATTTGCTGACCTAGATAATCAAGAAGCTTGGT
TTTTAACAGCTTCCTAGAGACAAAAGATAACGCCTTGGGCCTTTCCAATCTCACCAATTGAAACTGCAATCACCCACTTAATTCAGGACTCTCT
CAGGGCTATAGTTTCTGTTGATGGGTGATCCTCAGGCAGAGAGGTGATGAGGAAGTTGCCTGTCTCAGCCTAGGGGGAATCAGAAGATAAAATG
CCTCTCTTGAGAATCAATAACTACAAGCCCAATTCTTACAGATTCAGAGTTAAGTGTATGCTCCCTGAATAGAGTAGGAAACCCCAAGTCTAGA
AATGAATATGAAGTTGTTCCACATTGGGGATACCCTCACAGCCTTGCAGAAAACCATAAAAATCTATGTGCCTCAAAGAATCATGACCTCCTCA
TCAAAAATTAGAAAATATGTATGCAAATAAGCCACTCTGTTTAAGAACTGGCAGAACAATGAAAAGCAGAATTAAATCCTCAGAATCTTCAGAT
AATTGAATTACCAATTGTTTGATATATAAATACAAAATAAGTTTGGAATAGAAAACACACCAGGCAGAATGAAAATAAAACCAAGTCGAATTTT
TAAAATTAAATGTGCGACACTGAAAATGATTCAACATAGTTAACATGGATAATTTGAAAGAAAGGATGAGCTGGCAGGTACAAAAGAAGGAGTA
AGAGGTGTCTAGTTGAAGTCCTAGAAAGAAGTATTACAACTGCAGATTTCTGGCTCTACATTTACAGTTTCTAGGTCTGGGGTGAGGTTTAGGT
GGTTGTGGACCACACTTTTAGGTTTTAAAGCATTGGCTCTGAAGTCATTTGGTTCAGGGCTGGGCATGATGTTGGTTCCTAGTTTTGCGACTTG
CAGTGTTACTTAACTTCGCTAAGCATCAGCTTCCTTATCTATGAAACTGAAAAAATAATACCTATGTCATAGGATATATGTGTAAATCAAGTTA
TTCAGTACATGCCACACAGTAACCACTTAAAAATGACAGTTGCTTCTATTTTTATATAACCAAATACACTACTACAAATATTGAGTGGCAGCTT
TGCTGGTTCATTTATGGATTCATGGAGCTACACAAAACCTTCACCAGTCTATTAATTTATTTTTAGTACAGTCTCTCTAATCAGTATTGCTTCC
ACTGTATATTGACCCCATATCCTTTCTTCTGTCTGGGGTTAAGATAGGAGACTGAGATCAGCTGTGTCAAAAGCTTTCTTTTAGATGTAACACA
TGATTTCTTATGAAAATCTCATACGTAGGATACCAGAAAGGAATTTATTAAATTCTTGTTAGGCTCCTTAGTTCTATTACTTTTGTAGGGCAGT
GTTTTAATTTAGGATACTTATGATAGAGAGCACCCCTTCCATAATCAGGAGAAACACAAGATGGAAATAAAGATTTTATTACTTAGTGGTCCTG
GGGAGCACACAGCACTCCAGGGAAGGCCACACACCAAGATCAGGGAGCATGTGGAGAAAGAGAGAGAAAGGAACTCACGGGCCATTGCCTTTAC
TGGGTCCAGGACATTATCCAAACAGGTTTCCCACACGCAGTTTTAATAGGTGGGTTTCAAGCAAGCAGGTATGAGTTCCAGGAGGTCACAGTGT
GATGAAGAAGAAGTCACTGTGGCATATCTGCACAGTCCATGCGAGGTGTGAGCATCAGTGAAGACCAGTCAGGTAGGCTATATGTAGCTGGCCC
ATGGGCAGCCGATCACCAGGTGGCAATTGTATAATGCAGATATCTAGATTGGCCACATAGAGGAACCGGGACGAGCTGTAGTACTGGAAACTGC
GTCGACGGTCACTGAGCCCTGCTTTAGGTATGAGAAAGTCCAGCTTATATTCACAATCGATGCAAAGGCAGCATAAAATTAAAAGCATTCACTG
CCAGCTGCCATAACAAGTTACCACAAACTAGGTGGTTTAAAGCAACCGAAATTTATTCTTTCACAGTTCTGGATGCTAGAAGTCCAATATCATG
GTCTTCGCAGGGCCGTGCCCCCTTTGAAGGCTCTAGGCAATAATCCTTCCTTGCCTGTTTCTAGCTTCTTGTCGTTGCTGACAATTCATGGCAG
TTTGTGACTTGCAGCTGCATCATTCCAATTTCTGTCTCCATCTTCACATGAATACTGTCTTCTCTCTGTGTCCCTGTGTCCAAATCTCCCTCTT
CTTTCTCTTAGAGACCTGTCATTGTGTTTACGGCATCCATAACCCTATGTGACCTCATCTTAACTAATCATAATTGCAACGACCCCATTTCCAG
ATAATACAATATTCTGAGCCTCTGCCTAGATGTGAATTCTGGGGGTACACCATTCAGCCCACTACAAACATATTGTCGCATTGAGGTTATAAGC
CAGTAGCCCTACAAGTATAGGATGATGCCCATTTCAGCCTGATAATACACTCCGAAAGAGATCACATGGTAACATTGTTGCCTCAGTTAATCAT
AGAAATACTCAATTAGTATAGAAATAACAAGAAAAATGCTTTGTTATTCTCATGTCTCATTTATCGAGTTCTTACTATGTATCTGTTATTGTTA
TCCTTATACACTTCTGCACAAAAGATGGTTTTATCCCAAGTTTTAGCTTAGAAACTGAGGCTTAATGAGTAACTTGACCAAGAATGGCTTCTCT
TTCTCCATTTCCTTCCTCTCATGGTGTTGTTTTATATAGATAAAATAATATATATTATTCTATTAATATAGATTAATATATGTATTTATATATG
TACATTTTATATATGTATAAAACTTATGTTGTAAGTTTTATATACATATAATATATATTCTCTTTATATATTGAATTTATATATATATAAAACT
TAACACTATTAAGTCTTAACACTATTAAGTTTCATGGTGTTGAGTTATATAGTTCTATTAATTATATATATATGGGGGGAGGGGTGTTTCTCCA
GCCTAGACTTCCACTTTGAAATGTAGTCTCCAGGCTCAGCCACTTGTTTGACATTGCCACTTGGATGTCTGGTAGACTTAACATATTCACAACT
GAATTTCAAATCTTCCCCACCAATCTGCTCTGCCTCATACCTTCCCCTTTCCGGAATGTGGTTGCTCCATCCTTCCAGTTGTACAGGCCCCAAA
TCTTGGAGTTTTCCTTGACTCCTCTCTTCTTCTCAAATCCCACATGTAATCCATCAGGTAGTCTTATTGGCTGTGCCTTCACACTTTTTTCAGA
AACTAATTATTCTTCAGCACCTCCAATGCTCCCACCCTGGTATAAGCTACCATCCTCAGCATCTTTCTTCCACTCGATTTTACCATCCATGAAT
GATTATTTCCTAAATCAATTATCAATAATTGTTATAAATTTGTGATTTTTCTATTTCTATCCTTCCTGTCACTTTTCCTGCTTTTTTTAAAAGA
GCTTTCTTCATTCTTCTTTAAAAAAAATTAAAATTAACATCAGTATGAACTCGTGGATTCTTTTGTTATTCATTCTACTATAACCCATTCCTGT
CATTATTCATTTTGATTCTTAAATTGTCCTATTCTTGGCCAGTGGGAGTCTTTCATGCTACCTCCTATGTCTTTTTGATATGTCCCTATCTTTT
TTTTCCTAACACTTTCCTTATTTCTGAAATTATAAGCTATTCTAGGTTCACCCTATACCTTCACTACCCCAGTCCAGGCATCGTCTGTCTCTCT
AAGAAGTCCTAGTTCCTTTTACCAGGAGAAGTTTTTCTAGACTCTTTCATTAGGCAGAGCTACAAAATTGATTATTTTAAAAATCTCGAGTTCA
TACACTAATTCATAATTCTAATTCCAATCCAACACTGCAGGCTTCTTCCCTCCCTCCCCTCATCCCATACTTGTATTTGCATTTGAGATATGAA
ATGTGTATCTCATATCCCATATTTCTTCAGTAACTGAAAACCCTCATCATCAATGATAGCAGCATGCTTACTCATTTTGCTCAGTCCAATAATT
CACACACATTTGTAGAAAAATAGAATAGTTTTAGAATCCCTATACCAATATCTGCAAGCTTACTATATTCGGTTCAAAATTTCTTTGTAGTTCT
TTTGACCAAATGTATTCAACAGAGAGCATTCAGTCAGAGTAATGTGTACAAAACTTACTTGGATTAAATTTTTTCCTTCTGTGTATTTATGTTT
CCATTGAGCTATAGAGTTAAGCTATTTTTTTATTTCTATTCCATTTTAGGGGTTTTCCCATCCCTGTTGATTTAGTAATTTTATTTTTTGAATA
TCAACATTTGTCAGTTTCACATCTTTCATTTATATGAGATTAACTAGACCCTTTAGAAATCATTATAAACTCAGGTTGTTCTATTAATTTTTAA
AATAGGTGTATAAAAACCAAAGCGATCAATCAGAGCCTTGATTTAAAGTACGTTCTGAATTATTTCAGACACCCGAATCCATCTAAACCCAGAA
CATTTCATTTGTAGATTTTAAAGACTTCTTGGCCTTCCTACCTTCCTTACATTTATGTAGCATGTGTTTATCCAAGGCACACCACCTGCCAGGC
ACAGTGCTGGGCTCTGTGTTGACACACATGAATGTCATCATCTTTCTGTAGCCCCCAGGTTACATCCCACCACAGCCAAGATACAGACATCTGT
GAGAGAGTAATCAGGGTATTACTCAGGATTTGCTGCAGGAATCCCTCTTCAAAGGATATTCTAAATTGGTGTGTGTGTGTGTGTGTGCGCGCGC
GCGCGCATGTGTGTGTGTGTGTGTGTTGAGGTGGACTGGGAGAAAATATACCCTCCTTGAGATCACCTCCTGGCTAGATAGTCTCTCCCTTCTC
TGTTTGTGATAGAATCCAAGTGGAATTTGACAGGTGTACTTCTCAAACTAGAAACTAGAGAGCTGCTATCTCACTCACCGTAAGAAGAACGAAT
CACACCAAACCTACATCATTGTCTTCTATGACAGGATTTCTACAAGGGTGAGATAGTGAGATGCTCCAGATCCCTGTTTTGGTAGTTCACGGAT
TCACAGCATCTCCCATGCTGGTGATGTCAACCTGAAGAGATATTTCTAGTGATAGGTTCCAGGGATCTTTCACCGAACACTTTAATATATTTTA
TCATTGTCCTGAATACAGCCCTATAAGGTTCTTACTAAATTTGCAGGTGACATGAAGTGATAGACAACAAACAATTTGAATTCAAATTAATTTT
GAAAGCTGAGACAATCCACCCAATTCTTCAGCAATTATATTTAAAAGATATAAATACATGCAGAAAACAAATTACAAGTACAGAGTCGAAGAGA
GATGATTTAGCAGCAACGCATGCAAAGAGATCTAGGAGTTTTAGTTAATAACAGACTCAACATGAACCAGCAATGCAATGTGACTACGAAACAA
GTAATTCCTCATTAGGCTGCATTAATGGAAACACGATACATAAGACCAAGGAAGTGGTGGTCTCATTTGCACTCTGTGATGAAACGCCACACCA
GGAATACAGTGTAGTACTGCTGCCCACCACATTTGTAGAGAAATAGAAACCAACTTGAGTGTCTTCAGAGCAGAATGCTGAGAGAACTCAAACT
TCATTCAAATCACCAGTAGTTACTGAGCCTGAGAAATTTATAGCCTCCAGGATTTGGTTGTCTTCAAATATATCAATGGCTGTGATGGGCAAAA
AAGGATTAAATGTGTCCTGTTGTCACAAGAGGATGAAATAAGGAGCGGTGAATGGAAGCCCCAGGCGATAGAGGTTTCAGTTGCTGCTGACAGT
CAGGGCTGTCTGAGGATGGAATGTATTGCCTCAGGACAAAGTGAGTTCATTGTCACTGAATTGGTTCAAAAATGACCAGGAAGACTACAGGGCA
GGGAAGCTAACTTGTATTACAATAAGTAATTTTTTTCTTTTTTATTTGTATGCCCTTAGAAAGATGTTTACTTAACTTGATAAATCTGTAACAA
GGGATAATCAAGATTTGGTTATAGGACAATTACAATTTTCTGACAGATCCCCCAAAATAATAGAAATTAATAGCTTACACACTACTTTATCCAA
GCTGTAGAATGTATAACTTACTTCATATACTTTGTCTTTAGTCAGTTTATACAGGCTGAACAACATAAAGTTAAGACATAAAAGGGTTTTTTTT
GCAGGTTTAAAGTACTACCATTTTTCCAAATTACTGGCTGATCCTAGAACTTTGAGAAACTTTGGTGTTTCCCCCCTTCCTACTTTTGTTTACA
TCATAGTACGTAGATGGTACAATATTTTGGTTAACCTCAGTCTGACACTTAGATTGTGTTCTGTTTTGCCCTATTAATGTCTAGAGTGTAAAAA
GACCAGTAAAGTAGCACCAAGAAATCAAAGAAAATTTCCCAGTTCTACTCACTTGTAATTCTCTTAATTTAGTAGGGGCTTTCCACAGGAAATC
ACAATAGAATAGTTGAAATGCTCTTTATCTTATGTACTTTCCTTCTGAAGAAAGGGACAGTTAATTGGCTTTGTTCCCAACATGGTCCAAATTT
TTATACAGGGCAGCTGTATTTACTGTAGTACAAAGGAGATTCTACACCGAATGATGTCTCTAAGTATTTTCAATAATTAAGAACCTAATTGCTT
CTCTAGCCAGTGGGTTTCAGTGAAACTGATAAAATAGATTTTCTAAGCAACAAAAATACATAATGAGGGTGGTTGTATACCTTTAAGAAAAAAG
AAATCAGTGATATTCAATCCCAAGTAAATTTGGATATCACAGAGTCAGAGATATTCTTAATTATTTTAAATTAAATTTGAGTCAAAAACAATGT
GTTTAAAGACTTTAAAATCATTTTAAAAGAATGTTAGAAATTTACATTAATAATTTCTATTTTCAATGAATAAATGAGAAACCTAGAATTTTTG
TTTTGGACACACTTTGATCATATCTAATCTGTTCTACTTCCTCTAATTATTTTTATGTTATTAGGATTTTTAAAAAACCTCTTAGATTAAAATT
TCTCAGTGTATCTTTGTTTGCGTGTCTTTTTTTCTCTCTCCACTTATGTAATTGAAGCATTTCTGACATATCCTCAGAACACACAGATTCTTAT
CAGGACTTAACTACCCAGGGCAGGGCCCTCCTTGGATTTACTGAAAATAAACACTTTGGGTACTCAGTCTCAGTTTTAATGACAAAAGTTGAAA
TCTTTGCCTAACATGAAGGTTTTTCTTTGTCTCTAAATTTTGATTTTCCATGCTATCAGAGGTCCCATTGCAACAGGTAATTTGAGTGTTGATT
GTATGTTTTCTCAGTTTGTAATTGTGGTGAAATGTATTTAAAATGTTCACAATTTTAAAGTTAAGTTTACCTATAAGGTTCTTTCCAACTCAGA
AATTCTCTCATGCTAAACTTTTTTTTTGTAGTTTGAAAATGTGATCTTTGGATGTTGTCTTCTGTCTCCTATGCATATGACTAGGAATCATAGA
ATTTTAGAGCTGGAAAATGAGTCAGACATTATCTAGTGATTCTGCAAATGAACAATTAAAAGGCCCAAAGAGGTTAGGTGACTCACGCAGTATC
ATAGCAGTACCTGGTGACTAGAACTCTGCCCACCTACTGCAGCACTAAAAATTAACCCAAATGTTTTTATCTGAAAATTTCCAGACTTCAGGCT
AGGCCTGTAAATAAATAAATAAGAAGTTAAAACATATTTGAGAAAGGTAAGCTTAATATGCCACATTTGGGAAAAGATGTGCCTGACACAAATG
TATTTGGTGTAATAGAGAACATTCTTCCATTATACCGAAATGAAAATTTTGAACATTCTCAAAATTCTTGAATTTTGAGACATTTATGTTAAGC
ACAGTTTATTCAGACTCTCTATAAACTGTGCTGTCATCCCTGTTGTTTTCTCCAAGCGGAATCATACTTAAATTACAACTTTAGGGAGTTTAAT
GTTTCCTATTTTTGCACTCCTGGGATATTTTTCAGTGACTCAGAAGCATAAACTGACACTGTGAAGTTAAGGCTGTGTTCCAGTGGGAATGACA
GCATGTCTCTAGGACGCTGATGGAGAAAGCCCTCCTCATGCAGCTGTCTTGCGGAGTCTCCCTCCTGGTGGTGAATGTGAGATCACACAGGGCC
AGCAGCCAGGGCAGTACATCTCTGAGTCTCGCTTCTGGTTTTACCTACAGCCAACCCTTGGTGATTGTTTGCCTCCTTGGCCAAGCCCCCACAC
AATAGCAAAACTGTGTCTCAAGGTCGAATTCTATTAATACCTGACAGCTCAATTTATAAACATTTAAGATGTTTTACCATCTCTGCAGCCAGTC
TCTCTCTAAATGAAAATTGCTTCTCGAAGTAGAAAAGCATAAGGGAGTACAACGGCTTCAAAAAAAAATCCTTTTAGGAATAAGAATATTGCCA
GGGTTAGGTGTTCCTAACTGGTTTCAAGCAGAGGAGTTAGTAAAATTCCAAAAGTTAATCAGCTTCATGTACTCAACTTTTGCTAGGACTTTGC
AGAAACTCCTCAGGGATCCCTCAGAGTTAGATTAGGGAGATGAACCCTGCCAAAGGACAGTAACCATTCAACAGCTGGATAGCCTGTTGGGCCC
CACTGTCCTCAGCCTTTCCTAATGTTGCCTGGGAACACCACTTTTCTGCTCCCTCCTTTTTCAGTGTAGCCTCGACACAATTATTTATTTATTC
ACTAGCTCTTTTAACAAATATTGATTAAGTAGGTACTGGTTCTGTTCTAGGGGTTGGAAAAACAGAGAAAATTAAATAGTGCCTTTGTCCTCAG
GAAACAATCCATTTAATAGAGAGACGAAGATATGCCCTTAAATACCTGAATCACCAGCATAACCAGCACCTGCGGCTGCCATGTGGGAATTGTT
GAACAAGATAATTTTTGAATCAAAGACTAAATGACCTAATTGCTCTAATGTAAAGATAAATTTCTAAGAGTCGGCTAGTTGGGATGATTATAGA
AGGATTCAAGGGAGAGATGTATGAAACCATAGATCTAACGAGAGAAAACAGCACAGCAGAAAAAGCAGCAAAGGCTCAAAAGTAGAAATCTCTG
AGATCGAATGGAGAATAGTAAATAATTTGCTGCAATGAAGAGCACGTGGAAGGCAAGGGTGGTAAGAAGGCTGGAGATAGTAGATAAGGCCAAA
TCATGCAAGGATTTAAACTGTATGTTTTTAGAAAATGGGTAAGCTATAGAAATTTTATATACCAATGAGAAATTATCAGCAGCATTGTGCTTTA
GGACTACAAATCTGGTAGCAATCTGCTAACTGATATTGGAAGGGAAAGGCCCAGAGACACTAGTTGGAAGAATTGCAGTGATTCTTCATGAGCT
AAACTAAGACTTCAAGCTAAGATAGATAAACTAAGGAATGACAATGGAAGAAAGGGACAAACTGAGATTTTTGGGGTCGTACTCAGCTGAACTT
TGGCAACTGGTTAAACATAAAAGACAAGAGACAGAGAGGAATCCAAGATGAAAAGACGATTTTGCTGCACTTTTTTAGAAGGCAGCATTTGTAT
TTCCATTTCCAGGAGGTGGAGTAGCTTTGAGAAGAAAGGTGATTAGTTCAGTTTTGCGCACATTGAGCTGTAACGGTATTATGGACAGGAAGAT
ACCCTACAAACAGCTGGAAATTTTGCACATGCTTAAAAAGAAGATGAGAACATGAGATTTCAATTTAGCCATCATCTGCATGGAGTAGACAATT
CAATCCAGGAGACTTGATAAGAATGTCAAGGGAGTGATCACGATAAACGTGAGAAATGGACTGAGCATCGATCTCTGCTGAAACATCTCTTTGA
GCAGGAAGAAGAGTGCCTTAGCAAAAGCAGCCAGTGAAATGGGGAGTTGGCGGAGACTTTCAAGGAGGGAATGGTAACATATCCCATTCCCAAA
GAGGTCAAGTAGGGTTGAGGAATAATAAATGGCTAGTGGGTTTGGAAACATGGAATCTGTCATGACCTTTACACACTTTTTCATTTGATGGATC
GGGGGATTACTTACATTTGCAAAGGGCCTCAGATTAAGTGGTAATGGTTCAGCATTAGTAATTAGAGATTTTCTTATGTACTTTGTAGGGACAA
ATAGAATGGCATTCAAACAGGTTTAAGTTCCTCTTAAGAACCTTTCTCATTGGATTCTACAGAAGAGCAAATGAAAGAATCGTTCACTATTTCT
TGGTATCATGCCCAGCCCATAGGTTTCAATTAATGTTAACCTTTACAGTTGTCATCATCATTATCCAGAAGGGGCTTTTTTTTAGAATAAGGAA
GAAAAGCAGTCCTCATCTGTAGACAAGGGAAAAAATCCTTTGGAAGAGAGAAAGAGAAGGGTAATTCAAGAAGATCAGGAATAAACATTAAGGG
TAAAAACAGAATGGTTAGCCCTGGAAAAGGGAACAAACATGTTTCTCTGAATTAGGAGAGGATATGTGAAGTAACAGCGATGTTTTGAGCCTCA
GTAACAGTAAGGAGAAGAGAGAGTGAAGGAACTTGCACGCAGTGACTTCTACCTTCTCATTAAAGTCAAGAGAGAATCTCAACTGCAGATATCT
GCTTAACGTAGGAAGACAGAAATAAGAATTGCTGTCATTTATTTTGTGGTTTTGATATAGCAAAAACTGTACTAGACACTTTACCTCCTTTAAT
CCTCAGAAAACTTAGAGATTATATATTTGTATTCACATTCTACAAATGAGAAAGCAAGTAAAAAAGTTAAGTAACTCTCCCAGAGTCCCCCAGA
TGGTCATCGGAGCCCACATTCAGAGCCAGCTATGTCTTACTCCAAAGCCTGTGCTCTTTATTGAAACATACTCCACTAGTTTGAGATCTTGGAG
GTGTACCCCTGCACTACTATCAGGACTACCCCTGATAAAGTCCTGTGGGGTAGTTGTTCCTATCCATCACCACAGTGAATATCAAAGAAGGGCC
CTCTCATTTGAGGAATAACAGACAGTGAAATTGAGATGGACCAGAAATCCAAATCCTGGATCCCTGAGGGAAACAACAAAATCAAGCATAGAGG
AAATATCTGAGTCTGGTGCCAAGACTCATCAGTACAAGAGAGAATGCCTAATGGGCAATAGCAGTTAGGGTGGGAAAAGAGAAGTACAAGGGGG
TGTCTTGGAATTTGAGGGAAGAACTGCTGCCTTAGTTTTCGAAGGATCATTATTCGAGAGTTGCCCTCCCTTCACTTTCTCACAGCTGGCAGAA
TTCCTACCTCTTAGTGGTTAGATTCCTTTTTACCAGATACTGTAGGCCCACTGCAGCAACCACAGCCCCCAGCCAGAAACCCTGCCTCCAATTT
AGACCAGTGTTCTGCTCTGGTGTGTAATAATCATATTCTAATTTAAATAGCCTATTGAGATGCTACATTGATATCTAGCCTTTTTTTTTTTTTT
TTTTACTTTTAAGTTTTATGTGCAGGATGTGCAGGTTTGTTACATACGTAGACCTGTCATGGCGGTTTCTTGTACTGATTATTTCATCACTCAG
GTATTAAGCCTAATATCTGTTAGTTCTTTTTCCTGGTCCTCTCTGTCCTCCCACCCTCCACCCTTTGATAGGCCCCAGTGTGTGTTGTTTCCCT
CTATGTGGCAATGTGTTCTCATCATTTAGCTCCCACTTATAAGTGACAATATGCAGTATCTGTAATAATGGGTTTTCTGTTCTCGTGTTAGTTT
GCTAAGGATAATGACCTCCAGCTCCATCCATGTCCCTGCAAAGGACATGATCTTGTTCTTTTTCATTTCTCCATAGTATTCAATTGCCCATTTT
TTAAAAGACAAAATAACAAAAAAAAGAGTACAGTTATCTCCACTCCTCACCCACTACCTGCCACCTAACCCAACCCTTTATATTTTAGTAATTG
CCTTCCATAAATAACATTTTATCCTGTCTTAATTATGCATTCATTAGTGTATTAATTATTGAATGCCCACAATATGACAAGCATTATTTCAAGC
ACTGAGGATACAGCAGAGAATAAATCAATATCCTCACTGTTTTTATTCCATTTTTTTAACAGACAGGGTCTCACCCTGTTGCCCAGGCTGGAGT
GCAGTGGTGCGATCATAGCCCAATGCCACCTTGAACTTCTGGGCTCAAAGGACACTCCTACCTCAGTCTCCCAAGTAGCCGGAACTACAGGTGC
ACACTACCACACCCAGCTTCCCCACTCTGAGCCTCCATCCTAATGGAGAAGAGAGGCAGTAATCAAAATACATGAAATGTGTAGTTATTAGATG
GTTATTAATGTATAGACAAAAATTAAGCAGAGAAAGGAGCAAGGGATTAGGGGGTCAAAGTTTTGGTAGGGGTAGAGTGGTCAGTGAAGGCCAC
CTTGAGAGATGGCAATTATGTAAAGCCTGAAAGCAGGTAAGAAATATACAGGTATACAGATGTCCCTGGAAAGAGTGTTCTAGGCAGAAGAAAT
AGAAAGTGCAAAAGCTAAGATTGCTCACCTGGCAAGTTCAAGAACAGTGAGAAACTGATGTGGCTGCATAGGAGTAAGAAGAAAAAGGACGGAG
AGGACATGAGATGGTCAGATAGCCTAGGGCCTTGTAAGCCATTATAACGATTTTGTCTTTTAATATAGAGAAATATTAAAGGTTTTTGTTTTAA
CTTTTTAACATAGAAAAATGTAATCATATACAAACACAGAATAGTATAATCAGCCCCCTTGCACTAATCACTCAGCTTTAACAGCTTTCACTTT
GGGAGGATTTTGAGTGAAGGAGTGATAAGACATGGCATGGCATGACATGGCTTGAACAGGATCACTCAGGAAAATAAGCCATGGGGAGACAGGA
CAAGCAGAGGAAACACAGGAGCAAAAGCTTAGGAGACAGATGATGGTGGCTGGAAACCAAGGGAGTAGCAGTGAAGGTCGTGAGAAGTGATCAG
ATAGAGGATATTTTTTTGAAGATTTGAATTAATATTATATATATTATACTTTAAAGAAGAATTTGAAAATGCATCTAGTGTAGTAAACATGGTA
AGAAATACAGAAAAGACCCCAGGCACAGTGGCTCATGCCAGTAATCCTAGCACTTTAGGAGGCTTAGGTGGGAAGCTCCCTTGAGGCCATGAGT
TCAAGGCCAGCCCCGGCAACATAGTGAGACTCTGTCTATATGGAAAAAAAAATTAACCAGGTGTGGTGGCATGCACCTCTAGTCCTAGCTACCT
AGGAGGCTGAGGCAGGAAGATTGCCTGAGCCACGAGGTTGAGTCTTCAGTCAGCCATGATCATACCACTGTACTCCAGCCTGAATGGCACAGCA
AGACCCTGTCCCTTTAAAAAAAAAAAAAAAGAAAGAAAGAAAAAGAAATATAAGAAATGGCACTAGAATATCAGTATTATATACATTATTTTCT
GTTTAAAAATCCACACAACTGGCAAAAAAAAGTGACATACATGAACATTTATAAGACAGTGCATTTATAAATTACAAACTCTCTGCTCCTCCCA
TATTATTTTGCAGTGATGAATGATTACGCCATCCAAACGTAAAGATTTATTTGTAATTTGCTAATGATGGAATGACACCTTTTGAGGTACAAGT
TCCCAGCAATTCTTGGAATTAGCAATAGTGTGTTACTTCTTTCTCGAAAGAAGCATGATTTGTAAGCAGCTATATCTGATGTAGTAAAACTGAA
AGTTAAAATAAAAAAGGAAACCGTGGGTCAAAGTATGAGGGAAAAGATAAAACTTTCAGAGCAAAGTTATACATAGAGATTTTATTCATCGTCT
CTGTGTAACTCACGAGAACTTCTTAGCTTATTTATTATGTCAAATGGCAGTTTGCTCTTCTAATCCCAGCCTGATATCATGAGCCATATATGCT
GTTGGTCATTCAAAAAGGGCACTAAACAAGGTGAAAGAATGTCAGTGAATCAATGCAACTCCATGAGTACTACCAGGAAAAGAAAAACAAAAAA
ACATGCCATTAATAGTGGGTCAAAGAGGATTTTTTTCATGCCATCCCCTACCTTACTCAGAATACCACATTTATATTCAGAAGACTCATAATGA
ATTCCAGAGTCCTCTGTGTCTTGGCTGTATGACTTTGGGTTATGTCACTTTGTTAATCTGTTTGAACTTCTGTTTTCTTATCTACAAAATAGGG
GTAATAGAGTCAACTCTGCCTCCCTCACAGGGACTTTCGGAGGCCCAAGGGTCTTTACAAATAATAGAGAAGGAAAGAAACTGGCACTTTAATA
GTACCTACCATGTACCAGGGACTGCGTAGTCCCCACGGCAGCCCTCTGAAGTCATGTGATTGGCCCATTGTGTAGATCTAGAGCTTAAGACTCA
GAGAGGTTATTTAATCTGTGTAAGGCCACAGAGCTAGGAGGGGGAAAAGCTGGGATTGGATCACTGACTAGATCAACTTGAAATCTCCTGCCTG
ACAGAGAAAGAAGAGACTAACTTTACTAAGCATCTTTTTATGCCACAAACTGTGTTGGACATAATTCTGTACTATCTTATTTGGTAAAGGTCAT
TCTGTCCTTCCTGGTTGCCCTGGTTGCTCAACAAGTAATAAACAATAAACCCTGACTGTTTTTCATCCCTGAGAGAAGAAATATTATTAAAATA
GCGTTATTCTCTTTCTTTCTTTCCTTTTTTTTTTTTTTGTCTGTGTCTGTGTGTGCGCCTGATAATCTGACTTGCAACCTCACAGAAAAGAATG
AATGCATGGTTTCATGTCTGTGGCATGACTCTGTGAAGGAGCCTTCCAAGGGGACAGATACACCTCTACCACTTCTTATAGCCATTCCTGAGAC
CTCTCTTCTCACAACACATACCAGCAAAGCCAAACAAACAAGGTGTTTAGGAATAACTGTCATCTATCAACACTCTCTAGGCAAAGTAGAACTA
TGAAACACTGACGAGACTGCACACACACAGAAGAAAAAATGATCATGTCACATGGTAGCACAGAGCAATGGGAAATGTGAATAGTTTGTTGAGG
TGGACAGACCCAAGCTCAAGGATTGCCTGATCGCTCCATTTATAGGAACCATGGCAACCTACCTTATCTTACTGAGCCTCAGTTCCTCCAGCTG
TGAAATGGGGTACAACCTCTGACCCCACAGGGCTGTTGTGGGGATTATCTGAGTTAGCATGTTCCATAAAACACAGTAAGTTAGAAAGTATAGC
TGTATAGGCTCTGGCAGTTTAACAAGCAAGAGAAATTTGACAGTAATCATTTAGTTACTGAACCCTGTCTTCATATTGCGCTAGGTTGCATATG
GTTTTCCTGCCTGTCCCTTCCAATCACATTTCAGAAAAAAGGAGGCAGTAGTGGAGCCTTGTGGGCTAAAGTGGTGAGGAGGGTGTCATGGAAG
ATTCAGGTTCACCTCTTCCTCTTGAAGAATGGGTGCTTCTCAATAGGGAAGTGGACGAACAACCTGGGAGTTCTCAGCTTGAAGAAAATCCTGA
GACGTGATAATGGGTAGGTCCAAGGAGGTCCTGAGTAGGACTCTGAGCACAGAGCCTTTCTTTGCATGTGCTGTTTTTCCTGCCAGCAAGACCC
TCTAAACCCTTTGGCCTCACCCACCCCCTTGCCTCCTTATACTCCTAGCCTTCTTTCAGATCTCCACCCTCAGTACTCCCTCAGGAAGCTTTCC
CTGACCTCCTGACCCAGTCAAGTGCTTCTTATATATCTCCTTTGTAAGCTCTTCTCAGTTACACTTTTACATTTATTTGTCAGATTATTTGATT
AGTGTCAGTCCCACTCTTTAATTCTCCACAAGAACAGAGATTGTGTCTGTTCTGCATTCACCATGCATCGCTTCATCCCCTAGTTTACTGCAGT
GTGTGGAACATAGGACGGGCTTTAAATACTCGCTGAATAAATAGAGAAATGTTCGTTATTAGTGAGGTATTACCTAGGTGGGACAGAGGATTTA
TATTTGGGATTGCTAATCCCATTAAGTGCCAAGCACTGCATTAACTCATTTAATCCTAAAAAAAAGTCCTATGAAATCAAGTGTATTATTCCTT
TTAACTTTAAAGACAGAGAAACTCAAATCCAGAGATGTTAACCATCTTTCCCCGTTGACACAGCTAAGTGGTAACAGTCGGTCTTGAGCCGGGC
AGCCTGGCTTCACACTTCCTAGACTTTACCACATTGTTCTGCTGCTTAGTGCAGTAGAGGACAAAGTGAGGTGCACACGTCAAGTCAGGACAGA
TTTCCGTTTGAAAATTGTGTATTTTCCCCTCCTCTTCTTCATTACCATTGTCATCATCATCATCATCAATCACTTCACAAGCAAAGCTAAGCAG
AAAAGAACTACTTCATGTATCACCTCTTACATTCATGTTAACTCTACATTCTGCCAAAGTGATTTGGCTGAATTTACCCAAAGAGCAAAGTGGA
CATTTCAAATCCTGATTCCTAGAAAATTATAGACTACATCCTGTAACCACCTTTGAAGAACCAGCATGTACTTTACCCCAACGTGACAAAATTG
TTTTAAATAAAAAGAGGTAATTTGACTAAGATTGGTATGATCTGAGACCCATGGTTTCTACATCTTATTCAAAAAGCAGATCCAGCATGTGGTC
ATCAGTAGGTATTGAGTCATAAAGCTCCTGGAAGAAAATCTTAAGTTTCATCAAGAATGCCAAGAAGTCCTGGGTGTCTCCAAGAATGATAGCT
GTTACTATAATAACATAATTACTACTGGAAAATTAGCAAAGCCCAATAAAATATGGCATGCAAAAAAATATTTACCCTGGAAATAGAAGTGACC
TAAATCAGTCGTTTATTCCAGCCACCTGCTTTTAGATAGTACTTAAAAAAAAAACTTTCAGGATGGTCATATTGTTTAAAGTTCTCTAGGTGGA
AGAGTACTTTACAGTAATAAATTAATAAATAAGACAAGTTAATGCTTTTAAACTACTATTATTTGTTGAGCATTGTTGTAAAGGCTTTACATGC
ATTAATGTATTTAGTCCTCACAACAACCCTTTGAGATACTATTATCATCATCTCCCTTTTACAGATGGGGAAACTGAGCAGTGCCCAAAGTCAC
ACAACCAGGAAATGGGGAACTATCTTCAAGCCCAGCTGGTTTGCGCCTAAAGTCCATGCTCTTACAGTGTCCCTGGGTAGCTGAGTACTCAGTT
TTGTCACCTTTGTCTCCTTCACTTTAACTGAAAGCTTAACTCTTTTTTTTTTTTTTTTTTTTTAAACGGAGTCTTGCTCTGTCACCCAGGCTGG
AGGGGCAGTGTCTTGATCTTGGCTCACTGCAACCTCCACCTCCTGGGTTCAAGTGATTCTCCTGCCGCCTGCCGAATAGCTGGGATTACAGGTG
CACACCACCATGCCCGCCTAATATTTTGTATTTTTAGTAAAGACACGCCTTCACCATGTTGGCCAGGCTGGTCTCAAACTCCTGACCTCAGGTG
ATCTACCCGTCTCGGCCTCCCAAAGTCCTCCGATTACAGGCATGAGCCACCACGCCCGGCCCGAAAGCTTAACTCTTAATAAGAGCCTGCAATG
TTCAGACGCTTTGAAAAAAACCTAACAGACACAGTTGCTCTCTATAAACTTAATTTTCAAACGAACCACTATTCAAAGAAGTAAAAGGGAGACT
GAATAAAAAGAACTAACTTCTCCCTAGAGCAAATGAATTTCTCAATCGATTGCAAACAGTTCTCCGTCATCATGACATCCTATGAAGTATGGTC
TCCCCCATGTTAGAGTGCCAGTGTCTTCATGTACCATATAACTTGCAAATAGTATCACTGTCTTCTCACACTTCAGCTTTCTTCTTTCATCAGT
ATTTTGGAAAGTCCACAAAACCCAGGGGGCTCCCTGTCTGTTGCCCTGTGGTCTCTGTCAAAACCAGATGATGCCATGCTGACTTGCACTCTTT
CAAATGGATCCAACACCACATGAGTCACTGGCAGCATGTTCAGCTCCTTTACCTCAGGAATTACCCAGTTCCTCATTCTTGCCACCCTTCAGCC
GTGAAGTAGTAATATGAAAAATACATGAGTACTTTTTGAGGATACCTCGGACCTCTTTCCTTCAGTACCAGAGACTAATTGCCTCATAATGGTA
ACATTGAAGAGCCCAGTTATCTGACGTGATTGGGCTTTAATTATGGATTCCTTCTGGTGTCCTATTAAATTGGAAAGCCTAGCTGATTTCACCC
AAATGAAGCATTACCTCATGCCTTGCTCTCTTGCATTCCTGTGCTGGTGTCACTTAAAAGTGTAATTACATGGTTTATTTCGTGTTCTTTCACT
CTTGATTTATTGCTGAAGAAGCCCCTGTGGGATATATCATCATAACAAAGACTGATTTCAGATGTCAACACCAAGAAACACAACTGGCATCAGC
AATCTATAGAGAGTATCTAGGGACAGCAGTCAGCTTTGGAGAAAACCCAGAACTTCTCATTCCCCATCCCACATTTAAGGGCAAAGACTTTCTC
CTTGTTAAAGGGAAAGCACTGAGTTCATAATTAGCTTTATACCCAGAGTTTTTTTTTTTTAAATGTTATACCTGTTTAAGAAATTTTTTCTGCT
TTGAGGTGGTCAAGATCAAATTTAATTAGCAACCCTCTTCGTGATTGGCTTGCTCTGGGGACCCTGCTCTTTGAGAACGAGGTTAGAAGCTTTA
GAAGCAAACCTTTGCAGCAGTTCTAGCCAAGTGCATGCATACAGGCCTTGAGGTGGAGCTGCACAGTTGACTGTAGCGGAGTCTGTCCTTTGTT
GACGAGTGAAACTTCTCTCCCTGCAAACCCTCTGGGGAATAATGCCAACTCTGATCAGCTTTTCGACTCTTGGATGAAATATTGGGTTGGGAAA
AAGTCCCTACTAAGAAAATTGTACCAAAACCCTGCTTCAATAAAATATGAATCCATTTAATGAAGTTTATAGTAGAAGTAGGCTAGTCGAAAAG
GATTCTGTCTCTTTCCAAGTATTATTGGCAGGTTTAGGGTCTTCCTCAAGTTTATATCATTAGGACTTCCATCAAAGAGTTATCTTTAGGTGTG
ATTCCCATCCTCCCTCCCTCTCTCCCTCCCTCCCTCCGTCCCATCGTTCCTTCCTCCCTTTCCTCCTTCCTTTTCTACCTTTCTTTTTCTCTCT
GTCTCTCTTTCTTTCAAGCTGTGGGCTCCTTGTACAGATTTATGCATTTTGAATTACTGCATAGTTGAGAGATTTGGGGCTTAGGTTATTCAGT
TCTTCAAAAAGTACAGTATGAGCTAAGCAGATACGGTGACCAACTAATCTAGGTTTTGGCTCCAAAAACCCTGTGTCCCAGAAAACCCCTCAGT
CCTAGGCAAACCAGGATAGTAGTTCATCTTGTGAGGAGATTATAGTGCATTTCCAAGTATTTAGCTGAATTTATCACAGGGCTCTGACTTGATA
GGATTTAAGAGGGTTAAAATAAGCTCTTTTCTGTTATGTTAGTGTGACTTTAGTCTTGGCACTTTCTCAAGGAAGGAATCCAGTCTACTACAGG
GGCTAGGTGACTAAGGAGAAGAAAGAGGATATCTAAGTGTTTTTTGCTAAAAATGTCATTATCTCCATGCTATTTCCTTTTTATTCCTATTGTC
ATCATTTTAAAGACATACCAATAAGAAATAAATTACTTTAAATAGAAAACTCTAATTTTATCAAGCAACACCAAACAGGGGTGAAATCTAAGGA
TTTGTACTTAAGGAGTACACTTTTTTGAATTGAAGAAACTTACTATGACCTGAGCATATGTAACTCAATTATCAGAAGTCAGAGAGGGCTACTG
AAGGCTCAGGTTTTCTAAGAGATGACTGGACGCCAAGTCCTCAGGCTTGAGTGTTTATAGCCAAACTTCAGAACCAGGTCCCTGGCAAGATTCT
CCTGTCTAATCACATGGCACAGAGTTAGGATGGACTGTTTCTGCTTACCTGCCTTCTTCCTTTGATTTCCATCAACCACCAGTTTCTTTCTCAT
CAATCATTTACCCAGCTTTTGTGACCAAGAATTTTGATGAGGATGCAGAGGAAGGCATGTTCTTGGTTAATAGGAAAGGAGGCTTCATGACAAC
ACAGCATCCTCTAAGATGTGTTGCTCCAACTTTCACAATACATATTGTGTTTTAAGTGGCCTGCTTCTTGGAGTGTATCTTCCCACTACACAAA
ACAACCACCATTAACATTTTCATTTACTTCCACCCTGTCATTTGTTCATCACATACTTTTAAAAACAGGGCTGTAATCATGTATATACATATAT
GAATAACTTTATATTGTACTTTTTATACTTACTGGCTTATCATAAACATGTTTCCATGTTGCTCCAGAGTCAGATATGCTAACTTTTCGAATGT
GCTTCTTATATAGATCTGCAACTATGTGGGACCAGCAAAGGTTATTGTTCAGTTGGTCACAAATGGAAAAAATATCCACCTGCATGCCCACAGC
CTGGTGCCAAAACACTGTGAGGATGGGATCTGCACTGTAACTCCTGGACCCAAGGACATGGTGGTCGGCTAAGTAGGGGTATATGATGCTGTGG
AAGGTAGGAACAGATAGAATATGGGATGCACGAACTTAGAATGAACAGGCCCCTTTCATTAGGGACCTTTCTGAGACCCTCAGATGACCTCAAA
AAACTGTGTAAACTTGTGCTTTCATTTGGACTCCAGCAAGTAAGGTGACCACATCTCTGGATTTGCTTGAGACAGCCCAGTTTGCCCCTGACCT
AATTGTTTATAGCACCCTCTTCTACTCTTAAAGGTGGCCCAATTTCGATGATCACTTATATGTGGTCACTTGACCTACAAGGTATTTGTGCCAC
TATTAATTTTTTTTCTCCTAGAAATAAAAATAAGGACAAATTTAAAGAAACATAACTATAGCAGAAATCATCACTTTATGTATATTTTTACATT
CTTGATGATTTCTTCAGTGGATTTATGGTGTGAATATGTAGGGCTTTAAGTGAATGCATAAATATCATTTCACCTCTCTGCTGCTTAGAAAGTA
ATGCACAGATAAGAAGCCAAGGAATGCAAATTTATTTTGGCATTCATTAGGCTTGAAATGTAAATAAAAAATGACGTATTCATTTAAGGGTTGA
TCAAATAAAACAAGCAATTTTTAATGAATGAAGTTTTATAGAAGTAATTTCAATCCAAAAGAATTAAGCTTTTAAATAAGACATATTTATTGTG
CTAAAAAACTTGTATTTTCATCTTCCTAATACACTAAAATCGCACACAGAATAATAGTGTAGCACACAATACAAACTGATATGTGCAATCAATA
ATTCTAAAAATTGTTGTTTTAAGTCTTTCTTTGGAAGTCCTTAAATGCAAAACAAGAAATTTTTAATTTTGTTTAATTTTTAAAAACATTTTTC
AGGGTTTTCTAATCCTGGTTTAAATAGTTTATGCTGAAATCCCAGTTAATCTGGCTTATTCACTCAAAAGAAAGGAATTGTTTAAATCAACTAT
AATTAAGCTGATGGTTGCATTTCAGGCTTTGAATTCCGATCAAGTTTCAAATTGGTTATTATTTTGGAGGTTGTGCTTTCATGTTCCTAGGTAT
TTCTTTGTTTGACTGTGAAAATATTTAAGTGTGAAAAACCTAGAGAGAGAGCTTTCTTTTAAGTCACTAAAATCGGATTCTTTTGATGTTAGAA
AAAAAAAAGACTCTAGATTCAAGGAAGAAGCTTAAATTGATTTGAAAAATTAAAGTGTGCTTTATATGAACTTGTTTCAACATCCTCTTGAAAG
ACTGGCGTCTCTCCTGTTGTATGTCACAGTTTGTTCATCATGTGTTGTGGAATACCCTTCCAGTTCCTGATTGACCTAGGAGAGCTTTGAAATG
CAGGCTAATTATCACAGTTTTAGACTGATTGATCACTTAGTGTTTCTGCAGATTTATTCCAGTAGCGTTCTGTCAGTTTGAAGTGTTTATTTTC
TTTGGTCTTGTTTAATCCCTATTATAATCATATCCTTTAGAGGAAATTTTAGATGAAGTTTTCTACTAGTATTTATTATTATAAAACCTCCAGT
ATGGTGTCTATAATTTGGTGTTTCTGTGGTTTGCTTTAGTAATCTTTCAGGATTTTAGAAAGAACTAATGGTTATTTAAATTTGAGACCTTAAA
GCGGGAATAGAACTAAATTGTTTCTAAGGAAAGTGAGGGATTCTTTCACTCTTGTAGTGCAGTGGGGTGTGGCCTCAGTAGTTGGGAGAACTCA
TCAGTCATTCACTCATTCAACAAACATTTTGAGCATCTCAGCTCCTGAATTTGATCATTATGATGTCTGGTTGTAGAGCAGTGAGATTTTCTAA
CCCTATATAATTTCAGTGAGAAATTTAATCAACATGCCACTTGAGAGTTACAATAGACTCAGTAGTCTTAACGTTTTTAGTGTTTCCTATGAAA
AGTCAGTACTCACTTTCTAATTTGATTTTTAGCTGAGAAATTTTTGCTTACAATGTTTCCCAAAATACACTATTTCTTTCATAATTCATTTGTT
TCTATCTCTCTCTATATATACATTTTTAAGATTTTCAATGTCAAAACTTATTGCATTTATGTAGAAAGAACATCGTGCTAGCATTCTGGAAACC
AGTATTTTATTCCCAGTACTGTTGCTCTCAACACAGGACTGGGGGCAAGTTACATGACTTCTTGCGGACCTTAATGTCTTCCCTCATAAAATGA
GAGAGTTTCACTACAGAATCTTATCTTCAGGCTGTTTACATCTCCAGAATTCTCGACTGAACTAACATTACGTAATATTATGAAATAACATGAG
CAAACTTGCCACACACATATTTATGGTATGACATTGATTATTAGTATTTAGTTCTGACTTGTAGATAAGAGTATCACATAGAGAAACTTAGGAA
GATAGCCAAAATTATGTCTTAGACTTGTCAATACTAGAAATGAAGCTAAGATAACTTGTTTTCAATAATACAGATTACCCAAAGAGTATAGATT
CACAAGCAAGACACTAATCCAACATACCAAAAAAGATATCCAAAAAATGGCAATGAGAAGACAAATAACTTTTAAATTGTCAAAACCAAAAGAA
TTACTTTCTTTGGAGTGTTTATCTTCATCTTTCCCTCAGTATGAATTCTTAATAAACTTAGTTTCTACTTTCAAAAGGATTTTATCTATGTTAT
AAATATTCATGTTTTAAATAGCCAAGTCTTGATTCTCGTTTGATTGCTGTAATGTAGGGGATTTGTCATTTTAATATTTTTTAAGTTAGCTTTA
ATTTTGTCTTTTTTAAAATTCATTTATATAATTAGCCTTTACTGCCTTTCTTGGTAAAAAATAATAATAATAATCTTAGTTTGGTGTTTTATTT
TAAACCCTGAATATCAACAATTTGTTTCAACATATTTTAGTTCGTTGACATTTTTATTCCATGGAAAATATCTGTGTTCCTTGACTTTGCTTTA
GGCCAGTTCACTTACCAGTAATCACCACACTCTCTCTGCTTTCTGGCAGTTTAGAGACATGGAATTTTTTTCCAATTAATACATATAGCATATA
CCAACTGGTAAGCACTAGGAGTAGATATATAAATATCAAAATACAGAGGAGAAACAAGGCCTTCTTCAGTGTCTGTTGTTCCCCTTTTTGTCCA
TGAGTTCTCATCATTTAGCTCCCACTTACAAGTGAGAACATGCAGTATTTGTTTTTCTGTTCCTGCATTAGTTTGCTAAGGACAGTGGCCTCTA
GCTCCATCCATGTTCCTGCAAAACATATCATCTTATTCTTTTTTATGGCTGCATAGTATTCCATGGTATATATGTACCACATTTTCTTTATTTA
TTTATGTTATTGATAGGGAATTTAGGTTGATTCCATGTCTTTGCTATTGTGGATACTGCCCCAGTGAACATTAACATGCATGTGTCTTTATGGT
AGAATGATTTATATTCCTTTCGTTGTGTACCCAACAGTGGGATTGCTGGGTCAAATGGTACTTCTATTTTTAGCTCTTTGAAAAATCACCACAC
TGCTACAAAATCAATGTGCAAAAATCACAAGCATTCCTATACACCAATAACAGACAAACAGAGAGCCAAATCATGAGTGAACTCCCATTCACAA
TTGCTTCAAACAGAATAAAATACCTAGGAATCCAACTTACAGGGGATGTGAAGGACCTCTTCAAGGAGAACTACAAACCCCTGCTTAATGAAAT
AAAAGAGCACACAAACTAATGGAAGAACATTCCATGCTCATGGATAGGAAGAATCAATATCGTGAAAATGGCCATACTGCCCAAGGTAATTTAT
AGATTCAATGCCATCCCCATCAAGCTACCAATGACTTTCTTCACAGAATTGGAAAAAACTACTTTCAAGTTCATATGGAACCAAAAAAGAGCCT
GCATTGCCAAGACAATCCTAAGCCAAAAGAACAAAGCTGCAGGCGTCACACTACCTGACTTCAAACTATACTACAAGGCTACAGTAACCAAAAC
AGCATGGTACTGGTACCAAAACAGAGATATAGACCAATGGAACAGAACAGAGCCCTCAGAAATAATACCGTACATCTACAACTATCTGATCTTT
GACAAACCTGACAAAAACAAGAAATGGGGAAAGGATTCCTATTTAATAAATGGTGCTCCGAAAACTGGCTAGCCATATGTAGAAAGCTGAAACT
GGATCCCTTCCTTACACCTTATACAAAAATTAATTCAAGATGGATTAAACACTTAAATGTTATATCTAAAACCATAAAAACCCTAGAAGAAGAC
CTAGCCAATACCATTCAGCACATGGGCATGGGCAAAGACTTCATGACTAAAACACCAAAAGCAATGGCAACCAAAGCCAAAATTGACAAATGGG
ATCTAATTAAACTAAAGAGCTTCTCCGCAGCAAAAGAAACTACCATCAGAGTGAACAGGCAACCTACAGAATGGGAGAAAATTTTTACAATGTA
TCCATCTCACAAAGGGCTAATATCCACAATCTATAAAGAACTTAAATAAATTTACAAGAAAAAATCAAACAACCCCATCAAAAAGTGGGCAAAG
GATATGAACAGACACTTCTCAAAAGAAGACATTTATGCAGCCAAAAGACACATGAAAAAATGCTCTCATTATCACTGGCCATCAGAGAAATGCC
AATCAAAACCACAATGACATACCATCTCACACCAGTTAGAATCGCAATCATTAAAAAGTCGAAACAACAGGTGCTGGACAGGTTCTGGAGAAAT
AGGAACACTTTTACACTGTTGGTGGGACTGTAAACTAGTTCAGCCATTGTGGAAGACAGTGTGGCGATTCCTCAAGGATCTAGAACTAGAAATG
CCATTTGACCCAGCCATCCCATTACTGGGTATATACCCAAAGGTTTATAAATCATGCTGCTATAAAGACACATGCACACTTATGTTTATTGCAG
CATTATTCACAATAGCAAAGACTTGGAACCAACCCAAATGTCCATCAGTGATAAACTGGATTAAGAAAATGTGGCATATATACATCATGGAATA
CTATGCAGCCATAAGAAAGGATGAGCTCATGTCCTTTGTAGGGACGTGGGTGAAGCTGGAAACCATCATTCTGAGCAAACTATCCCAAGGACAG
AAAACCAAACACTGCATGTTCTCACTCATAGGTGGAAATTGAACAATGAGAACACTTGGACACAGGGTGGGGAATATCACACCCCTGGGCCTGT
GGTGGGGTGGGGGGAGGGATAGCATTAGGAGATATACCTAATGTAAATGCTGAGTTACTGGGTGCAGCACACCAACATGGCACGTGTATACATA
TGTAACAAACCTGCACATTGTGCACATGTACCCTAGAACTTAAAGTATAATAAAAAATAAGCAAGTTTACAAGGGCAAAAATAAAACAAAAAAG
AAAAAGCACCACACTGCTTCCACAGTGGCTGAACTAATTTGCACTCCCACCAGCAGTATATAACTGTACCCTCTTCTCCACAGCCGTGCCAGCA
TCTGTTATCTTTTGACTTTTTAATAAAAGCCATTCTGACAGGTGTGAGATCATATCTCATTGTGTTTTAATTTGCGTTTCTCTACTGAGCTTTT
TCCATATGTTTGTTCGTGGCATGTGTGTCTTCTCTTGAAAAGTATCTAAAACAGTCACTTATCTTTTAAAGAAACTTTTTAAATCAGAAAAAAG
GTGTTTATATTTAACCACGTATTTATCATTTGCAGTGCTGTTCATTCTGTTTCTTAGGTCAAAATTTCTATCTGGTATCATTTTCTTCTGCCTC
AGGCACTTCCTTTTATTATACTGCTGATCTGATGCTGATTAATTCTTTCAGTAGGTGTATGTTTTCATAGCTTTTTATTTTATCTTTGTTTTTC
AAAGATATTTTGAAGAGTATAGAATTTTAGGTAGACAGGCCGGGCGCAGTGGCTCACGCCTGAAATCCCAGCACTTTGGAAGGTCGAGGCGGGC
AGGTCACCTGAGGTCAGGAGTTCAAGACCAACCTGACCAACATGGAGAAACCCCGTCTCTACTAAAAATACAAAATTAGCCAGGCATGGTGGTG
CATGCCTGTAATCCCAGCTACTCCAGAGGCCGACGCAGGAGAATCACTTGAACCTGGGAGGCACAGGTTGCGGTGAGCCGACATCGCACAATTG
CACTCCGCCCTGCCCAACAACAAACAAACTCCGTCTCAAAAAAAAAGAATTATAGGTTGACAGTATTATTCTTTCACATCCTTAAACTATGTTG
TTCCACTGTCTTCTGATTTGCCTTGTTTCCAAGAAGTCACCTGTCAATCTAATCTTTGTTCCTCTGTATATAATTTTTTTTTCTCTCTAGCAGC
TTTTCAGATTTTCTCTTCCTCACTCGTTTTAAGCAATTTGATTATATGGATATTAGCATAGTTTCCTTCATGTTGCTTGTGCTTGGCGTTCATC
GAGATCCTTAGATCTCTGGGTTTATATATTTAGTACGTTTTAAAACTTTTTGGCCATTATTTTTTCAAATATATTTTCTGTCCACTCCTCTTCA
TCTTCTTCTGGAACCCCAGTTGCACATATATTTGGCTATGTGAAATTTCCTACAGCTCACTGATGACCTGTTTTTTAAAAAATCTTTTTTTTCT
CTTTCATTTTGGAAAGTTTTATTACTGTGTCTGCACGTTCACCAATATTTTTGTCTGTAGTGTCTAATATGTTCTTAATTCCATCTAGTGTATT
TTTTCCTCTTAGACATTGTAATTTGCAATTTCTATAGATTTGTTTGGGGTCTTTTTTTTTCATATCTGCCATGTTACTCCTTAACATACCAATG
CTTTCTTCTTTTTCTGATCATATGGAATATATAATAGCTATTCAATGTACTTGTGTACAAATTCTGTCTTCTGGATCTATTTTTGTTTAGTTTT
TGTCCTAATTATGAATTATATTTTTCTATTTCTTTCCATGCCTGTTAGTTTTTTATTGGATGACAGGTATTTTGAATTTTGTATCGTTAAGTCT
TGGATTCCTTTTTTTTTTTTTTTTTTTTGATGTGCTTTTAAATACGTTTGAGGATTGGGATGAAGTTAAATTTGGGAACAGTTTGATTTTTTTG
ATTCTTTCTAAACTTACTTTTAAGCTTTATCAGAGAGACCAGACAAACCTTTACTCTAGGGTTAATTTGACATCATTGCTAAGGCAGTACCTTT
CTGAATTTTCAACCTGATGCTCCATGTATTACAAGATTTCTTGAACTATTCCAGCCCCATATGTGTTACAATAATTTTTCTGCCTCCACCTCTG
TGGTGGTTCTTTTCCCAGCTTTGACATATTTCCTCACACACAGCACTCAGCTGAAGACTCCAGTGATCTCTGAGTGTATCTCTGTTTGCGGTTT
CTTCCTTTCCGGTACTCTGCTTGTGACTTTTAGCCTCCTTGGCTTCCTCCAATATTTAACTGTCTCTCCTCAACCTCAGAGATTGCCAGGCTCT
GTTGGGGTTCCTCCTTCCTGTGCTGCAGCCTGGGACTCTTTAGGCATTAAGCCAGAGTAATTACAGGGTTCACCTTATTTATTTCCCTTTTCTT
AAAGATTACTGTTCTGTGCTGCCTGTTTTCTAGTGTCTAAAAACCATTTCTTCATGTATTTTAGATATTTAAGCTTCAAACCAGTCTGTTTTAC
TCTATCGTTACCTGAAGCAGAAGACTGACTTCTGTACTCTTTCATTTGTTAACCAGAGTAAATCCTTCATTATTCACATAATAAATTAATAAGG
ATGATGTTTTTCTCACAGGGACTAGATTAGGCAATATACATGAAAAGCATATTATTGACAGTAAAGTGTAAGATGCTACACAGATGTTTATCAT
TGCTATTACAAAGGAGATAACCCCGTTTTCCTGCAGTTAGGGAAGTTCTATATGGGAGTAAGGCTGAAAGGGCCAAAAGATATAGGTATTGTTT
CTGAAAAACTGCCTATGCTTCTATGCATATAAGTATGTCATGTTGCATATTTTTCTGTGCTGTATTAATTCATGCATTCCTTTATCAACAGATA
CTTATTAAACACTCATATGTCAGGCATTGTTCTAGGGACTAGAGATCTCTCCCTTCAAGGAGCTTATTTTCTAGTGGTATATTTTCTGTTCTGT
GTCTTAGCTATCCACTTTTTTCATCTGCCTGGACACGTGACTTATTCTGTCTCTGGGCCTCTGGTATGAGTGCTCATTTCATTCTGCCTTATAA
CTCCTATTTTCTTCCCTACTTTATCTGACCTTCCTACCTTAGCTTGTTCATTCTTTCCTTCAATCCAGTTGTCATGAAATCTCTTTCTTTCCTC
TACTAATTTTTTTTTTCTTTCTTTCTTTCTGAGTAAAAGCCAGAGATCTGCCCCCCTCCTTACCTCTCTGAATTCTTTACTTACTTCTGACAAC
TTGCTCATTTCACTCCAGCTACATTGACCTCCTTGCCTTTGTTGTGTTTTGAAAACACCGGCGTGGTCCTACCGCAGGAATTTTGTACTTACTG
TTCCTTTTGCCACATTCATCATTCATATGTTCATGTCTTCCCCATCGCTTCCTTCAAGTTTTTGCTCAGTTGTCATCTTTTTACTGAGTGTCCT
TCCTGACCTCTCCCTACTTTAAAATGTTATCCTTTTTTCTACTACCTCTCCTGTTCCTCATTCCTACCTTATTTTTCTGGATAACACTTATTGC
CTTCTAAATTGTATCGTATAATTTACTTCTTTGTTTCTTCTCCGTTGTCACACTAGCATATAAATTCAGTGAAGGTAGAGATTCTTTTACTGCT
GACAAAAGCATCTAGGACATTTCCTGGCACTGATAACGATCTGCATAAATATTTGTTGAGTGAATGAATCTCCTTGGTAAAGTCCTTTTTTGTT
TGCCTGTTATATTTATTGAATAGACTTCTTTGTTTCATGTACTTTAATTTCAAAAGTGAATGGCTGGAACATTTTATATATTTTCTTATAAATC
ATTTTCATTGCTTTTTAAGCTTATCACATATTTTGTTTTATAAATATGTAGCCTTCGTGAGATAAAAGATTCTCCATCCCTGTTTACGTGTATA
CTTAGATGACAACTCTAATGGTCATAAATAATTCCAACCTTATAGATAACTCAGGAGAAGATGAGATTATAAGTAGACTTTAAATCCCATTCAG
AAACCCAAGGACAATTCAAAAGGAAAATAATCATTCCAAATATAATATTCTTCTTATTCTTAAGAAGTTGTTAGTATTTTGAATTTTGAATTTT
TAATACAGCTCCCATAGAAAATACTTTAAAATGAACCCGGTAAGACTTCCTCATTAAGACATATAGACACATATGCTCCCACTCCCGTAATCAA
ATTTGGAAGTCAAATAAGCTCTGAAAACCAAAACATTCTTCCAAGTTTATTGCAGACTCATTTGGTAGTAAAAACCAATCTGACCTGATGTGTA
GCTGTTTATAGTCTTTATTTTTCCATTTGGTGAGTCCAATTATATATTTCGCTGAGGAAATACTAACATGTTTGACTACATTGTGTGCCCCAGA
CCTGCTTAGAGTATTATCTAATATGCAGTATAGGCCATATATTGCCTTTTTAACATCAAAAATACCCTAAATTCTGAAATGCATGTAGCCCCAA
GAGATTTGTATAAAGCATTGAGGGCCTGTGTATTTTTTTTTAATTTACAAGTGAAGCCAGATTCCCTAGACATTAAGTGCCTAACTTTTGGTTG
TTGTTGCTGCTGCTGTTACTGTTTTTTCTCCAGCTTCGCAAACCTGGGTATACTTCATGTGACAAAGAAAAAAGTATTTGAAACACTGGAAGCA
CGAATGACAGAGGCGTGTATAAGGGGCTATAATCCTCGACTCTTGGTGCACCCTGACCTTGCCTATTTGCAAGCACAAGGTGGAGGGGACCGGC
AGCTGGGAGGTAAGCATCATTTTCCTCGCCTTCATCCTCCAAGGGGTCCAGGCTTTGGTTTTCATCTGTATGAATTATATGTTCATCTGCATCC
CTTCCAGTCTCTACCCCACACTGCTGTCACCTTTTCCTTGCTCACAAACCTTTCATCGCATCCTGCTACTTCTAGGATAAAAACTATAGCTCCA
TAGCCTGTCATACAAAGCCCTGCTTCTCTGGCCCCAGCAACTTTCAGCCTCATCTCCAGCCCACCTTGCATCCTCCTCTCGCCATCTCTGCTCT
CTGAATAACTGAGGCATATTTATACCTTTGTATGTGTCTTCCTTTACCAAAAACACCCCACCGTTTCCATTTCACCCTCTCGAAAACCAATGCA
GAAATCAAGACTTTGTCTAAAGAACACCTCTGTTTTACCTTCCCCAACTCACCTTATTATAAGGCATTTTTCTTTCTTTGGGCTCTGCAGACAC
ATTATAAACTATTATCTTTATCATAAAAATTGTATGATTTTCCATTTTCTTGCCTTTTCTCAAATTTTTTTTTCAACCCCATTCCCTGTCCCAC
CACATGCCCCATTTCTACTTTTGTATTTTCTCCTTTACTCTCCCCGTCCACTCGTCATCTGATACTCATGTGATTCAAAACCGATTATCAGTTT
TCCACTAAATATACTCCATCTTCTGATACCCAGACTCAAAACCTTCCCATCCTCACTGACTCCCCCTCCTCGCCTGTGCTGCGAGGCTGTGGTC
CAGCCATTCCGTGCTCTCTGGCATTCCACACTACATTCCATTTTCATTGTTCCACTTATAGTAGTCTTCTCCCTGGTCTCTCTCCCTCCCCACT
TCTAATCAAGTTTACATCTTGTAGCCAGATAGATATTACTGAAGTTCTGTATCTTGTTGCTGCTCCGTGTCTCCGTTTTGCCTACAAAATCCAA
ATTCTGTAAGTTGGCTTTTTGGATCTCCCAAGAGCTGGCCTCAGGCTGCATTTCCAATCTATTTCCCGTTTTGCCCCTTCAGGTCAAAGTCTAC
TACTTGGTACGACCACCATCATTTCTCACTTTCCTCCCTTGCCACATTCTTTCTATTTTTGCTCTCTCCTCTTCCTGGAATGCCTTTATCCACT
CTCTTATATGAATGTGTTCAAATTCTGCCACCTTTTCAATATTCAGAGCAAATACCTCTTCTGCTCCAAAGCCCTCTGAACTCTCTCCTTCTTT
GAAATCCCACATCACTTCATTTGTAGCTCTCTTGTAGTACTTCTCTCTTGAATCACTACCTTTTATGATATTATAGCTTAATTATGACTATATC
CATCAGCGTGAAAACTCCAGCAGGAGGGAAGGAAACAGATGTCCCTGAGTCATTCAGTTCCTTCAGAAGTTGTTTTTGAGTACCTACTATGTGC
CAGGCTGTCTGCTTGGCACTGTGGAATGAGCTCACTCCCTGTGCCCAAGCAGCTCTTGGAATAATTTGCACACTTCTCAATACAGCTGGTGCCT
AGTAGGGTTATTCAATTCCATTCCATCACATCCTGTGTGCCTTTAACTCTTACTCTAGAGAGGAAAGGGAAAGGTGGGGGAAGGACAGGAGAGG
AGGGAGGCGATCTGATACACGGAAGAGAGTTTTTACTGTAATCCGGAGAAAATCCACGTCTTCTTTGATGCCTTTCATATTGGATGACATAAAT
GAGACTGTTTTTAACACTTTATTACCAATATGAAGAGTTTCAAAAGAGCAAAAATGGGTTTTTATTGTAAGTTTACATTATTTGGCCTTTATAA
AAGCATGGTCTTTTAAATGTTCACACTTCCCTGGGCATGAATGGACTGTGCTGTATGGCCCTAGATCGGGAAAAAGAGCTAATCCGCCAAGCAG
CTCTGCAGCAGACCAAGGACATGGACCTCAGCGTGGTGCGGCTCATGTTTACAGCTTTTCTTCCCGATAGCACTGGCAGCTTCACAAGGCGCCT
GGAACCCGTGGTATCAGACGCCATCTATGACAGTAGTGAGTACTTCACTTCCAACAGGGGGCACACCAAGAATACACTTCCAGCCCTGCCCTGC
CATTTACTTGCTAGCTGAGTCCTCCGGAAGGTAACTTAATCACTTTAAGCCTCAGCTTTATCATCTGTAAAATGTGAATAGGAAAATCTAGCTT
GAAAGGTTGATGTCCAGGTTAAATGAGGTATTTTAAGAGGGGCTCAATACATGTAATTCTTTTTCCTTTGATGTACATTTTTTAGTCTTTTACA
TGAAATGTCACATCTCATCTTATTTATGAATGTCTTGCTATAAAGATATATCGTTGATACTTTTAGAACGGAGAATAATCCCAATTTTCTTTGG
TGGTGGGGGGACTCTGGAAAGGAGTTTATAAAAGACAACTATTATTCTTACCCATTTTCTTTCCCATATGTTACTAGCTTTATCAAGAGAGAAA
CTTGAAGTTAAATGAATGAGTAGCATAGACAGCATGTGACTTCAAAATCCTATTTCAAGCCCGGTTTGGCGTCATGCCCTGTAGTCTCACCTAC
TTGGGAGGCTGAGGTGGGAGGATATGGAGTTTCACCCCAGCATGAGCAACATAATGAGACCCTATCTCAAAAAAAAAAAATATATATATATATA
TGTATATATATATTAATTTATAGTTCCTAGGACTTTTTAAGAGTTTTACAGTAACCTTCAGCATTTACCATGCAACTTTCTTGTTTGATTATGC
ATAGGATTGATTAGACAGGTATTTTCAAAAAGCCTGCAAGCATAGTACTCAGACTCATTGAAAGTTTATAGAATTTGGCCTGTGTGGAAAACTC
TGTGCTCCAAGTACAACAACTAACTGAATTCTCTAATTTAAACAAGTTTGAAGGGAAGTGAAAGGTTATAAAATGATACAGACTCATACCGCAG
AATCACCTTAAAATGCAGCTGTTGGAGAAAAAAAAAAAGGAAGCTTTATGCTATTACCACAAGAAAGTTTTGCCTCTTCACCACACAGAATCCT
AATTTAGTTTGGGAAAAAGAAACATAACATCCCCATTTTCCTTACCTGTAAAATAAAACGTAGTAAGTAGTTTAAGAAAACTGTACTTTTCCTA
AAGTTTTTACGACTCTTGTAAATAGAATAATAGCAGAATCATGGAAACAAATTTGGAATTGAAGTCTTCACCTCATTGAAAGCCCAGAAATCAA
TTAGCTTGGTACTTCCCAATACATCAGAAAAGCTCTTTCTCTTTTTGTGTCAGTCTCTCTGTGTTAGAGGGACAAACAAATACCTGTTCCTTTC
TACCTCATTTGTTTTGGTGATCATAAATGACCCATGCCCAAGAAGTGTTCCGAGAATTTCAGAAGCCATTCTTGTTTTATTTACTTTGTTAGTG
AAAGCATGTATTTAAGCTTTGTTTTGGTCATGTGTGCTAACGGGAGGGTCCTACCTAAAGGACTGGCTTGTTCAGCTGAGGATTAATCATCTTA
TTTGTTGTTTTTCCCCTGTGAACAGAAGCCCCCAATGCATCCAACTTGAAAATTGTAAGAATGGACAGGACAGCTGGATGTGTGACTGGACGGC
AGGAAATTTATCTTCTTTGTGACAAAGTTCAGAAAGGTAAATACATTCTGTGATCTCTGATCTCAAGAGGTGTGATCTTGACACACTACAGTTC
TGAGTGTGTCTGTGAGTCACATTTCAGCAGTGGACAAGAAACATCCCTCTGCTGCCACAGAAAGTCTTAAAAAGCATTTACCTTTTACCTCTTC
CAAATGTAAATTGTCTGTGTTATTTTTTCCTAAGTCAACTAAATCACTTTTAGATTTCCCATGGAAGTAAAAAGAAATAAGAAAACCGTGATAA
TTATAATCAGTGACTTTCAGTATCTTTATACATTAAAATTAATATCTGTACTTTGTTAAACAAAAATAAATAATAGCCCATTCTTGACACACAT
ACAAACACACACACAGAATAATGTTTTACATAGTATTAAATTGTTTTTATTTCTTTTGCAATGCTTTGATATAACACTGAGAGAACTTCTCTGA
ACACTTCCACAGATGTGATGTTTAAGAAAAGGAAAGAAAACAGGGAATACAGGGAAATTCTCAGAGCACATTTCTCTCACAATTTTCCCTTTGA
GGAAAGGTTCTTGGCGTTTATCTTTCATTAGATATATTACAACATTGATAGATTAGTAAAAGCTGAGGAAAATGTCTTATTTTCTCAAACTGCA
TTCTTTTTTTAAATAAAATGATAGTTGGAAAGTGTAGTATAATATCTATTTACTACAGGGTGAGCATTTTCAAAGTAAGCAGATACCTAACTGA
AAATATAAATAAGTAAAATAAATCAATAAAAGACATGTGGCTTTTAAAAAAATTATCATATGAGATTAAATTCTCTGAGGTATATAGTCAGAAA
AAAATGGGATCAGATTTTAAAGTAAACACATATATACTTTATCCAAAAAAATTTACAGGCCAGGCATGGTAACTCATGCCTGTAATCCCAGCAC
TTTGGGAGGCTGAGGTGGCAGGATTGCTTGAACCCAGGAGTTTGAGGCTGTAGTGAGCTATTATCATGCTGCTGTACTCCAGCCTAGATGACAG
AGCGAGACCCTGTCTCAAAAAAAAGAAGTTTACACTTTCTCTGCCTACACTAGTGTCAGCCTTCTTCCAATCCACTCTGTCCAAGTAATACTCA
TTTCCAGATTCCTGGGTGTACATACTGTGAGTAAACACAATCTGAGTACCTTTATTTGTAAATGAGATCCTTAGTCATTATCATTACATTGGAA
TGGCTTAGTAAGAAATGTCTTGTACTTGGCTTAAAGAATCTCAATAACTAGGTCCAGTGTAGTCCTACCTGAAGGCAAAGGAGATTGTAAGATG
TTTTATCCATTCCTACTATTTCTAAAATTCTACTTACATAGAGATAAAAACTTTGAACAAAGTCAATAGTCTGGCCCTTTCTATGAAACGGAAA
GTGAAGCCACGAAGATGCCAACCTAAGTTACATTGTCACATTTCTGTAGAAGTGAATAGAGTATTTATAAACATGCTGAACATGGAGTATTTAT
AAACACACTCCATGACTAGAGTGTGCAATTTAAGCATTGCATTTTAATTAGAAGGGACCTGATTATTATAGTATTTTGACCAATTACTCAATAT
GAACTAAGAGACTATTATAGTGAGACAGTTTAATAGTGTGTTAACAGCCTGGACTCTGAAATTATACTGTCTATGTTAAAATCCTGGTTCCTCC
AAGTACTAGCTGTTCACCCTTGGATAAGTACTTAACCTCTTTGGACCCCAGTTTCTCTTTTGCAAAGTGAGGATAATAATAGTACCCATCTACA
TCACAAGGTTGTGGTGAGGATGAAATCAGTTAATATGTGTATATATGAAGCACTTAGAATAGCATCTGCCATACATTAATAGTAAAACTTATAT
AAGTTAATTATTTTTATGTACATCTATATATTGAATTGCACTGCCTCGTTGGATTCTAATATTCTTCCACCATCGTTCGTCTTTCTCAGGATTG
GCTTAAGGATGGAGAACCAGTAAGGTCAAAGATTAAAACAAAATTCAAGTTAACTAGGTAAATCTAGTATTCTGTCATTGTGAATGAAAGTTGG
GGCGCATTACTGTGGTAAATAATGAAAAAAGTCAGTGATTTGTGAAGATTTTAAAAGACTGAACCTTTTGATCTTGTTTTTTAAAAGTGTAAAT
AGATAGTAGGTAGAATATTAAACCAGTTTTATTTTTCAGCATGTTTATAAATACTATTTACACTATGTGAAATTACACACTTCAATGTGATTGT
TTGCAGATGACATCCAGATTCGATTTTATGAAGAGGAAGAAAATGGTGGAGTCTGGGAAGGATTTGGAGATTTTTCCCCCACAGATGTTCATAG
ACAAGTAAGTGATTTATTATTATTATTAATCCTTATTATTTTTAGAGATGGGATCTCACTCTGACACCCAGGCTGCAGTGCAGTGGTACAATCA
CAGCTCACTGTATCCCCCAACTGTTGGGCTTGAGGGATCCTCCTGTCTCAACCTACCAAATATCTGGGACTACAGGCATGCTACCATGCCCAGC
TAGTTTCTTCAGTTTTATTTTTTTTGTAGAGATGATGTCTTGCCATCTTGCTCACGCTCGTCTTGAACTCCTGGACTTAAGCGATTATCCCACA
TTGGCCTCCCAAAATGCTGGGATTATAGGCATGATCCATATTACTATCATCATTTTATACTTTCTGCCTTATTGAAATTTAGTACTTAGCTTCC
ATCTATAAAAAAGAAAAATCATAAATATTTAACTTCCATAAAACAGTACTATTTTTAAGACTCATGCAGGTCATCCAAAAAAGTTACCTACTGT
AGAGTTATGGGCAAGGTTCTGTTACATCGTTTGCTCTGAGATGTTGGCAAGATATTTAATTGCTCCCTAATCCCCTAACCCATAAGACAGTGCC
CCACAGGTCCTTTAATGAAAATGTTTTTAAGTGTTCTACCAAAGTAATTATGATGAGACCTATTTTATGATAGCACCTAATTATGATAACACCT
TAAAAGGGTGTTCTAGGAGTCATCTTCTAATTGAAGCTGATGTCATCCTGTTAAATGAAGATTTCCCAATGGCAACTGATTAAATGATCAGTTT
AATCATTTAATAACATGATAATGCTGAGCCCCCACCTTAATTATTATTCTCCTATTTACAAGTAATTGAAGAGTATTCTCCTATTTACAAGTAA
TTATCTGGATTGGAAACAATCCAGATATTCATCAGTAAGTGGCCAGTTAAATTATGGTCTGTCCTTTTGATGAAATATCATGTAGTTATTCAAA
AGAATGACTACTCTGCGAACTAATATAGAAAGATCTCAGTTATACAGTCTTAAAATATTTTAAAAGATGGGTGTAGAACAAAGTGTCTGTAGAA
ATGATTCTATGTTCATGCATAAAGAAATTCTGGAAGGATACCTAACAAATTAATAACAGTATTTACCACTGGCTGGTACACTGTAGCAACTGCA
TGGATGGGGAACAAGAATGTCAAAGAGAATACCACTGTATGCTTTTTTATATTTTATAAGATCTTTATCCCTGTGAATATATTACATAGTCAAA
AAATCAAACTGAAAAATGCTTAAATCCCTAACATACCACCAAGAACTAATGTGTTATCATGCCAATGTAAGCAATGTTTAGTTTCTTCTCTTCA
TCACTGGCCTGTACCCATCTCTCTCTTTCCATACCCAGTCTTTCTGATGTTGCTCTAAATAATCTTGCAGGCTTTTAAGGCTGCTTTGGAAGAG
AAGAAAGTATATGCAGTGAATTTTATAAGCATGATATTTACAACTAGAAGACATTTGAAATAGACAAATGAAATAATAAAGCTTCGTAGTACAT
TAGCATAGCATTGTATTTTGATTTTACAGTAGCAATTTCATAAAAATGTATCGGTATAGAATTCTGAGTTTGGAACTTTCTCCAGGACACGGTG
TTTTTTAGTACACTGTGTCTAAACATTGGGTATAAAGAAAGCATAAGGAATGTGTTTAATGACTAGCATTACTGCAAAAAAAAAAAAAAATGTA
GTCCTACACCAACATGTGGTTCTTCGTATCCTGCAGTTTCCCATTGTCTTCAAAACTCCAAAGTATAAAGATATTAATATTACAAAACCAGCCT
CTGTGTTTGTCCACCTTCGGAGGAAATCTGACTTGGAAACTAGTGAACCAAAACCTTTCCTCTACTATCCTGAAATCAAAGGTAAGTCAGTTGT
TTAAAATCTTATGCTCATATTTTATTTTATTTTATTTTTGGTTTTTGTTTTGTTTTGTTTTGTTTTGAGACAGAGTCTGACTCTGTTGCCCAGG
CTGGAGTCCAATGGTGCAATCATAGCTCACTGCAACTTCCAACTCCTGGCCTCAAACACTTCTCCTGCCCCAGCATCTCAAATACCTGGGACTA
CAGGTGTGCGCCACCATGCCGGGCTAATTTTTTTTTTTTTTTACTTTTAATAGAAATGAGGACTTCCTACATTGTCCAGGCTGGCCTTAAACTC
CTGGCCTTAAGCAGTCCTCCGGCCTTGGCCTCCCAAAGTGCTGGCATTACAGGCTTGAGCTGCCATGTCTTGCCATTGTGCTTGTTCTGAGAAG
AGGACAAGCTAATTAGAAAAGATCAGTTAGTCACCTCCTTTGAACAGCTTTCTAGTAACAGGTCCCTGGATCCATGGTGCTTATTTTTAGAAGA
GACAGTAGTATATTATTTTGAGGTCATGGAATTAGTCTAGCTTTTTAAAATAATGTTATTTCCACCAAGCTTATATGAGATTTACACATTGAGA
ATTTGTCTTTGAATTTGAGAATCTAACATTTATTGACTAACTCAGAGTTCAAGCAGCTGAGATCAAAAAATCAGCCTTGCTGTTTAGGAGAATC
AGCCACTTAGTCAACCAGCCTCAGCCGGTGGAACAGAAAACTTGCCCAACATGCACTGTGAAACTATCAAAATGAGTAAGGCATCATTCTTTCT
CTCACAAAAGATGCTTTAAGAAAGGGCACTCATAGGTTTCTTAAATAGTTATAATGTAAATTATGATTTTAATAAGTACCGAAAGTGAAGCATC
CATAAAAATATAAGAGAATGTTGAAGAGAGAGCCCTTGGTCCCTTTATTCTAAAGCAGCCTCCAAAAAGAAGGCTTCGTCAAGGAGATATCATT
TGGCCCTCAGCATTTGGGGTATATTTCAGCAGTTGGGTGTTAAACAGAGAAGGAGAGGGTTCTCTAGGTTTAAGTTACTTGAGGAGCTTAAAGA
GAGAGGTAAACACACCCTTTATGCAGAGGGAAAAAAGTGTTCTGAGCGCTCGGATGGACATGAAGGCCAATGTGGGTAAGGAAGGCCAGGGCCA
GGCTAAACAGGGCTGTGAATGGCAGCTTAAGAATTTTGCATTAATTCTGGAGAGGGATAGCCGGGCCTGCCTAGGTTTGGAATGATGGCTCTGA
CTTCTTTATGTCACCACTGAGGGTACCATTTAGGAGCCAGATGATGAGTCAGAAGAGTAATGCAAGAATCCAAGTGAGAAACAGTGCAGTTAGT
AAAGGTCCTAGTGCCAGGAATGAAAGGAGATGGTGGACTTAAGAGAGAGTGCAGTGATACTGTGATACAGTGATACTGTCAAGAGCGCCTAGAG
GTCGGAGGTGTACGAGAGACGGGGAGTCATAGATGGGTCTAAGACTCCCTGACCAGGAAGCTTCTGATGTGGTTGACTTGATGAAAGGAACAAG
GGAGCAAAAGTAGATTTGGGTGGGAAAAGAAGGAGCTCAGAGTAAAACATGTTATATTTTAGGTCCCTGTGGGAAAATCAAGTGTAAGTTCTTA
GTAGGCAGATCAAAAGGCAGAACTGGAACTCAAGAGAGGACAGGGTGAGAAATTTAGCATTAGAATCATCTCAAAACGAGATATAACAGGCACC
AACTGAGTCATCATTCAAAGGTATTTCTTAACCTAGAGTCCACTGACCCCCAAAGAGTCTGTGGATAGAAATGTACTTTGATATCATCAGCTTC
TTTTATAATCCTGTTTTCTATTTTACATACTGAAAACCATCATTCTGAGAAGACATCCATAGAGTTCACCAGACTGCAGAAGGGGCTGTGGCAC
AAACAAAATTAGAAACCCCTCAGTTGGAGGGAAGTGAGACTGGGAAGGGAGGTCAGTAAAATGATTGCCACGGGGCACCCAGATCCTTGCTGAG
GTTGGAAACCGCAAAGGTGCAGCAGCAACAAGCCACATGGGTGGGTGTTGTCTCCTGTCAGAGCAAGATCTGATAGGTAATCTTTGAAGAGGGC
TTTCCTTTCCTAGAATTCGTGCTCCCACAGGAGTCTTTAGAAAACGCTTCTACAAGTTCTTCTTTCTTTTCTGAGGTTGTGCCCTCTCCATTGT
TTGGTCAGATTTGTAGTGCACTCTATATCCTGGTGGTTTGAAAACATTGTCAGCACAATAACTTTTCTTTCTTCACATGAGATTTCATACAAAA
TCCCAGTGTATCGACATGGTAGGCTTTGATTAAAATAGGGGTGAAGGGCCCTGCCAGCTCGGCCTTCCCAGAGGCTGTCCCACCTCTCCTTACT
TCCCTATCAGGAGCTGCTGGACCTCTTTTGAATGCTTCTGCCTACACAAAATGATGTGAAAATCACTGCTTTAATTTAAACACCCTTCTTTAAA
AGTAGACACAGAAGAAAAATATGCATAATTTTTTTAGACTTTCTGAGGAAAAAAATAGATTTCTTCTCCAGAAATATGTCTTCAAATAATGCCA
GTTTTTGCTAACACAGAGAATCATGAAGAAAGAAAACCCAGGTTACCTGTATGTGTATGAACCTACAAACATTCAAAGCTCAGCTTGGTATCTA
GGCTGCCTGTCTCCCTTTCCCAGTGGTATCTATGCCTCAGAAAAGTATCTTATAGTGGCGGTATATTCAGGTGATTACTTTAATGCCTCGTTAT
CATAGTAGGAACTATCCAATGCAGGGATTAGAGAATGGGGTCACCTGAAACTTCAAAATTGCACCTGTATGCTTCATGCACCTACCTTCCAGGC
TGTCATTGATGAAAACCTTCATACAATACAAAGTTTAACAACTGTCTGGAGAAATACTTACCCATTGAGCTCTGAAGGAAAGAATGCACAACAT
ATATATATATGAGGACAACAAATTACTTGATTCTATAGAAACCTTCTGGATTATAAAAACTCAAGATAATAGGACCAAGGAGAAATAATCTGAC
CAGGCAATATAACTGGTCAGAAAAGTAGTACGCCATTTAGCATTAGAGTAAGTACATAGAAATGGATCCAAACTGTACAACCCAGGGAAACATT
GCATACATTTCTCAGAAGTCATTGAACACACTTTTCCTTACCCCCAGTCTCTGT
HUMAN SEQUENCE—mRNA
GGCCACCGGAGCGGCCCGGCGACGATCGCTGACAGCTTCCCCTGCCCTTCCCGTCGGTCGGGCCGCCAGCCGCCGCAGCCCTCGGCCTGCACGC
AGCCACCCGCCCCGCTCCCGGAGCCCAGCGCCGCCCAGGCCGCAGCCGCCCGGCCAGTAAGGCGGCGCCGCCCCCGGCCACCCCGGGCCCTGCC
GTTCCCTCCCCCGCGCTGCGCCATGGCGCGGCGCTGACTGGCCTGGCCCCGCCCCGCCGCGCTCCCGCTCGCCCCCACCCGCACTCGGGCCCGC
CCGGGCTCCGGCCTGCCGCCGCCTCTTCCTTCTCCAGCCGGCAGCCCCCGCCGCTTAGGAGGGAGAGCCCACCCGCGCCACGAGGCCGAACGCG
GACTCGCCACCCGGCTTCAGAATGGCAGAAGATGATCCATATTTCGGAAGGCCTGAACAAATGTTTCATTTGGATCCTTCTTTGACTCATACAA
TATTTAATCCAGAACTATTTCAACCACAGATGCCACTGCCAACAGATGGCCCATACCTTCAAATATTAGACCAACCTAAACACAGAGGATTTCG
TTTCCGTTATGTATGTGAAGGCCCATCCCATGGTGGACTACCTGGTGCCTCTAGTGAAAAGAACAAGAAGTCTTACCCTCAGGTCAAAATCTGC
AACTATGTGGGACCAGCAAAGGTTATTGTTCAGTTGGTCACAAATGGAAAAAATATCCACCTGCATGCCCACAGCCTGGTGGGAAAACACTGTG
AGGATGGGATCTCCACTGTAACTGCTGGACCCAAGGACATGCTGGTCGGCTTCCCAAACCTGGGTATACTTCATGTGACAAAGAAAAAAGTATT
TGAAACACTGGAAGCACGAATGACAGAGGCGTGTATAAGGGGCTATAATCCTGGACTCTTGGTGCACCCTGACCTTGCCTATTTGCAAGCAGAA
GGTGGAGGGGACCCGCAGCTGGGAGATCCCGAAAAAGAGCTAATCCGCCAAGCAGCTCTGCAGCAGACCAAGGAGATGGACCTCAGCGTGGTGC
GGCTCATGTTTACAGCTTTTCTTCCGGATAGCACTGGCAGCTTCACAAGGCGCCTGCAACCCGTGGTATCAGACGCCATCTATGACAGTAAAGC
CCCCAATGCATCCAACTTGAAAATTGTAAGAATGCACAGGACAGCTGCATCTGTGACTGGAGCCCAGGAAATTTATCTTCTTTGTGACAAAGTT
CAGAAAGATGACATCCAGATTCGATTTTATGAAGAGGAAGAAAATGGTGGAGTCTGGGAAGGATTTGGAGATTTTTCCCCCACAGATGTTCATA
GACAATTTGCCATTGTCTTCAAAACTCCAAAGTATAAAGATATTAATATTACAAAACCAGCCTCTGTGTTTGTCCAGCTTCGGAGGAAATCTGA
CTTGGAAACTAGTGAACCAAAACCTTTCCTCTACTATCCTGAAATCAAAGATAAAGAAGAAGTGCAGAGGAAACGTCACAAGCTCATGCCCAAT
TTTTCGGATAGTTTCGCCGGCGGTAGTGGTGCCGGAGCTGGAGGCGGAGGCATGTTTGGTAGTGGCGGTGCAGGAGGGGGCACTGGAAGTACAG
GTCCAGGGTATACCTTCCCACACTATGGATTTCCTACTTATGGTGCGATTACTTTCCATCCTCGAACTACTAAATCTAATGCTGGGATCAAGCA
TGGAACCATGGACACTGAATCTAAAAAGGACCCTCAAGCTTGTGACAAAAGTGATGACAAAAACACTGTAAACCTCTTTGGGAAAGTTATTGAA
ACCACAGAGCAAGATCAGCAGCCCAGCGAGGCCACCCTTGGGAATGGTGAGCTCACTCTAACGTATGCAACAGGAACAAAAGAAGAGACTGCTG
GAGTTCAGGATAACCTCTTTCTAGAGAAGGCTATGCAGCTTGCAAACAGCCATGCCAATGCCCTTTTCGACTACGCCGTGACAGGAGACGTGAA
GATGCTGCTGGCCGTCCAGCCCCATCTCACTGCTGTGCAGGATGAGAATGGGGACAGTGTCTTACACTTAGCAATCATCCACCTTCATTCTCAA
CTTGTGAGGGATCTACTAGAAGTCACATCTGGTTTGATTTCTGATGACATTATCAACATGAGAAATGATCTGTACCAGACGCCCTTGCACTTGG
CAGTGATCACTAAGCAGGAAGATGTGGTGGAGGATTTGCTGAGGGCTGGGGCCGACCTGAGCCTTCTGGACCGCTTGGGTAACTCTGTTTTGCA
CCTAGCTGCCAAAGAAGGACATGATAAAGTTCTCAGTATCTTACTCAAGCACAAAAAGGCAGCACTACTTCTTGACCACCCCAACGGGGACGGT
CTGAATGCCATTCATCTAGCCATGATGAGCAATAGCCTGCCATGTTTGCTGCTGCTGGTGGCCCCTGGGGCTGACGTCAATGCTCAGGAGCAGA
AGTCCGGGCGCACAGCACTGCACCTGGCTGTGGAGCACGACAACATCTCATTGGCAGGCTGCCTGCTCCTGGAGGGTGATGCCCATGTGGACAG
TACTACCTACGATGGAACCACACCCCTGCATATAGCAGCTGGGAGAGGGTCCACCAGGCTGGCAGCTCTTCTCAAAGCAGCAGGAGCACATCCC
CTGGTGGAGAACTTTGAGCCTCTCTATGACCTGGATCACTCTTGGGAAAATGCAGGAGAGGATGAAGGAGTTGTGCCTCGAACCACGCCTCTAG
ATATGGCCACCAGCTGGCAGGTATTTGACATATTAAATCGGAAACCATATGAGCCAGAGTTTACATCTGATGATTTACTAGCACAAGGAGACAT
GAAACAGCTGGCTGAAGATGTGAAGCTGCAGCTGTATAAGTTACTAGAAATTCCTGATCCAGACAAAAACTGGGCTACTCTGGCGCAGAAATTA
GGTCTGGGCATACTTAATAATCCCTTCCGGCTGAGTCCTGCTCCTTCCAAAACACTTATGGACAACTATGAGGTCTCTGGGGGTACAGTCAGAG
AGCTGGTGGAGGCCCTGAGACAAATGGCCTACACCGAAGCAATTGAACTGATCCAGGCAGCCTCCACCCCAGTGAAGACCACCTCTCAGGCCCA
CTCGCTGCCTCTCTCGCCTGCCTCCACAACGCAGCAAATAGACGAGCTCCGACACAGTGACAGTGTCTCCCACACGGGCGTGGAGACATCCTTC
CGCAAACTCAGCTTTACCCAGTCTCTGACCAGTGGTGCCTCACTCCTAACTCTCAACAAAATGCCCCATGATTATGGGCAGCAAGGACCTCTAG
AAGGCAAAATTTAGCCTGCTGACAATTTCCCACACCGTGTAAACCAAAGCCCTAAAATTCCACTGCGTTCTCCACAAGACAGAAGCTGAAGTGC
ATCCAAAGGTGCTCAGACAGCCGGCCCGCCTGAATCATTCTCGATTTAACTCGAGACCTTTTCAACTTGGCTTCCTTTCTTGGTTCATAAATGA
ATTTTAGTTTGGTTCACTTACAGATAGTATCTAGCAATCACAACACTGGCTGAGCGGATGCATCTCGGGATGAGGTTGCTTACTAAGCTTTGCC
AGCTGCTGCTGGATCACAGCTGCTTTCTGTTGTCATTGCTGTTGTCCCTCTGC
HUMAN SEQUENCE—CODING
ATGGCAGAAGATGATCCATATTTGGGAAGGCCTGAACAAATGTTTCATTTGGATCCTTCTTTGACTCATACAATATTTAATCCAGAAGTATTTC
AACCACAGATGGCACTGCCAACAGATCGCCCATACCTTCAAATATTAGAGCAACCTAAACAGAGAGGATTTCGTTTCCGTTATGTATGTGAAGG
CCCATCCCATGGTGGACTACCTGGTGCCTCTAGTGAAAAGAACAAGAAGTCTTACCCTCAGGTCAAAATCTCCAACTATGTGGGACCAGCAAAG
GTTATTGTTCAGTTGGTCACAAATGGAAAAAATATCCACCTGCATGCCCACAGCCTGGTGGGAAAACACTGTGAGGATGGGATCTGCACTGTAA
CTGCTGGACCCAAGGACATGGTGGTCGGCTTCGCAAACCTGGGTATACTTCATGTGACAAAGAAAAAAGTATTTCAAACACTGGAAGCACGAAT
GACAGAGGCGTGTATAAGGGGCTATAATCCTGGACTCTTGGTGCACCCTGACCTTGCCTATTTGCAAGCAGAAGGTGGAGGGGACCGGCAGCTG
GGAGATCGGGAAAAAGAGCTAATCCGCCAAGCAGCTCTGCAGCAGACCAAGGAGATGGACCTCAGCGTGGTGCGGCTCATGTTTACAGCTTTTC
TTCCGGATAGCACTGGCAGCTTCACAAGGCGCCTGGAACCCGTGGTATCAGACGCCATCTATGACAGTAAAGCCCCCAATGCATCCAACTTGAA
AATTGTAAGAATGGACACGACAGCTGGATGTGTCACTGGAGGGGACGAAATTTATCTTCTTTGTGACAAAGTTCAGAAAGATGACATCCAGATT
CGATTTTATGAAGAGGAAGAAAATGGTGGAGTCTGGGAAGGATTTGGAGATTTTTCCCCCACAGATGTTCATAGACAATTTGCCATTGTCTTCA
AAACTCCAAAGTATAAAGATATTAATATTACAAAACCAGCCTCTGTGTTTGTCCAGCTTCGGAGCAAATCTGACTTGGAAACTAGTGAACCAAA
ACCTTTCCTCTACTATCCTGAAATCAAAGATAAAGAAGAAGTGCAGAGGAAACGTCAGAAGCTCATGCCCAATTTTTCGGATAGTTTCGGCGGT
GGTAGTGGTGCCGGAGCTGGAGGCGGAGGCATGTTTGGTAGTGGCGGTGGACGAGGGGGCACTGGAAGTACAGGTCCAGGGTATAGCTTCCCAC
ACTATCGATTTCCTACTTATGCTGGGATTACTTTCCATCCTGGAACTACTAAATCTAATGCTGGGATGAAGCATGGAACCATGGACACTGAATC
TAAAAAGGACCCTGAAGGTTGTGACAAAAGTGATGACAAAAACACTGTAAACCTCTTTGGGAAAGTTATTGAAACCACAGAGCAAGATCAGGAG
CCCAGCGAGGCCACCGTTGGGAATGGTGAGGTCACTCTAACGTATGCAACAGGAACAAAAGAAGAGAGTGCTGGAGTTCAGGATAACCTCTTTC
TAGAGAAGGCTATGCAGCTTGCAAAGAGCCATGCCAATGCCCTTTTCGACTACGCGGTGACAGGAGACGTGAAGATGCTGCTGGCCGTCCAGCG
CCATCTCACTGCTGTGCAGGATGAGAATGGGGACAGTGTCTTACACTTAGCAATCATCCACCTTCATTCTCAACTTGTGAGGGATCTACTAGAA
GTCACATCTGGTTTGATTTCTGATGACATTATCAACATGAGAAATGATCTGTACCAGACGCCCTTGCACTTGCCAGTGATCACTAAGCAGGAAG
ATGTGGTGGAGGATTTGCTGAGGGCTGGGGCCGACCTGAGCCTTCTGGACCGCTTGGGTAACTCTGTTTTGCACCTAGCTGCCAAAGAAGGACA
TGATAAAGTTCTCAGTATCTTACTCAAGCACAAAAAGGCAGCACTACTTCTTGACCACCCCAACGGGGACGGTCTGAATCCCATTCATCTAGCC
ATGATGAGCAATAGCCTGCCATGTTTGCTGCTGCTGGTGGCCGCTCGGGCTGACGTCAATGCTCAGGAGCAGAAGTCCGGGCCCACAGCACTGC
ACCTGGCTGTGGAGCACGACAACATCTCATTGGCAGGCTGCCTGCTCCTGGAGGGTGATGCCCATGTGGACAGTACTACCTACGATGGAACCAC
ACCCCTGCATATAGCAGCTGGGAGAGGGTCCACCAGGCTGGCAGCTCTTCTCAAAGCACCAGGAGCAGATCCCCTGGTGGAGAACTTTGAGCCT
CTCTATGACCTGGATGACTCTTGGGAAAATGCAGGAGAGGATGAAGGAGTTGTGCCTGGAACCACGCCTCTAGATATGGCCACCAGCTGGCAGG
TATTTGACATATTAAATGGGAAACCATATGAGCCAGAGTTTACATCTGATGATTTACTAGCACAAGGAGACATGAAACACCTGGCTGAACATGT
GAAGCTGCAGCTGTATAAGTTACTAGAAATTCCTGATCCAGACAAAAACTGGGCTACTCTGGCGCAGAAATTAGGTCTGGGGATACTTAATAAT
GCCTTCCGGCTGAGTCCTGCTCCTTCCAAAACACTTATGGACAACTATGAGGTCTCTGGGGGTACAGTCAGAGAGCTGGTGGAGGCCCTGAGAC
AAATGGGCTACACCGAAGCAATTGAAGTGATCCACGCAGCCTCCAGCCCAGTGAAGACCACCTCTCAGGCCCACTCGCTGCCTCTCTCGCCTGC
CTCCACAAGGCACCAAATAGACGAGCTCCGAGACAGTGACAGTGTCTGCGACACGGGCGTGGAGACATCCTTCCGCAAACTCAGCTTTACCGAG
TCTCTGACCAGTGGTGCCTCACTGCTAACTCTCAACAAAATGCCCCATGATTATGGGCAGGAAGGACCTCTAGAAGGCAAAATTTAG

[0285] TABLE 21
MOUSE NOMENCLATURE
ICSGNM Fyn
Celeram CG1380
HUMAN NOMENCLATURE
HGNC FYN
Celera hCG348O6
MOUSE SEQUENCE—GENOMIC
CCAACACGCAGTCCCAGTGGTTGGGAGACACAGGGCTCCCTGTCATTCTTCAGAGGAGACGCCTGCCTCACTTCAGACTTGCAATGCAGATGGC
GGCTGGCAGATTCTGCTGTGGCTGTTTCCACAACCGTGCTTCCGAGCAAAGGGGCAAGCGATGGGGATGCCACGCCCACTGTCCCAAGCTTGCT
CCTTTCGATGCGCTTTTCATGTTTTGTTTTGTTTTTTTTTTTTTTTATTACACTTTTACTTAATCTGTGTGTGTGCCCGGGCAAAGCTTCCATG
CAAGGCGTGGCATGGAAGAGTGGAGGTCAGACAACTTGGGAGCCATCAGTTCTCCCCTCTAGCAGGAATCAAACTCAGACCTGTGGGCTTTGCA
GTAGGCATCCTTACTCACTGAGCCATCCCACCCTCCGGCCATCTGCTTCTGTGAGAGCTGGATCTTCGTGACTAGTGCTACTGAATTAAAGGAA
GAGAAAGAACCCCCTGTTTTCTGAAAGGCTGGGGCTCATGCAGAATCATCTGTCCAGGAACCCCCATGCTGACTGGGGGGATCTGCGGAGTGAG
GTTTTGTCCTGCCTGAGAAGGAACCTCCTGGGCTCTCATCCTCCTCCTACCTATAGAAAGGACATTGGCGATGCCTGTTCAGGCAGCCGCTTTG
TTCTAGTGTGTTTGCTTGTGCCTATGCCAGGTGACACTGTGACTCCTGGCCCACCGCCAGTCCCGCTACAACTGTTACTAAAACAGAGGAGGCC
AGAGAGCCAGGCTTTGCGACTGAGCCGCAGATGTGACACTGGCTTTCCTGCTTGTGCTAGTTTGCGACTAGAAGCCCGTGGTTCTACAGAGCAT
GTGCAGAGTGGGGGAAACAAGCCTGACTGGATATGGGCAGTGAGAAGTGATGTATCCAGCAGACCTTAGTGTTTCAGAAGAGTGCTAAGTTGTA
TAAAGTGGGGCTGCTCCCTCCTGTGCTCCACCGGGATTCAGGAAAACTAGCTCAAAAGTCAAAGCTAGCTGGGCAGTGGTGGTGCAAGCCTTTA
ATCCCAACACTTGGGAGGCAGAGGTAGGTGGATTTCTGAGTTCGAAGCCAGCCTGGTGTACAGAGTGAGTTCCAGGGCTACACAGAGAAACCCT
GTCTCAAAAAAAAAAAAAAAAAAAAAAAGAAAAAGAAAAAAGAAAAGTCAAAGCTGTGTCAGCTGGAAAGGGTGAAAACAACAAGCATAAGGAC
AAATCCCCCTGCCTCTACAACCAGCAGCATCCAGAGAGTGAGTGCTGGTTAGACCTCCCTTCCCTAGGGCTGGCCAGTACACAGCTCAGCCCAG
TCCAAGCCCTCAGTTCCAGGAAGAGCCTGCTTAATTAAGGATTGTCATTCCTACATGGTTAGGGTCTCCAAGCATATAGGACTTAGAACTGAAG
CATATTCATTGCCCCCACCTTGTCTGCCTGTAAGACTCTGGGGAGCCTTAGCTTACCTGGGACCCCCTGAGTGAACCACGTGAAGCCGGGATCG
ATGCAAAAAGCAAGAGGAATTTATTGCTCCAGTGCACTGGGGCCATCCCAGACCCGAAGGAGTGGTGGCTACTCCCAATATCCCAGCGAGTTCT
TATATGGTTTCCAGGGGCAGAATAGAGCATCAGCAACTAGGCACAATAAGATTGGTGGAATAGTGCACCCTTTAAACTGATTGGTCTTTAGGGA
ATGAGGTGACAAAGACTTTCCTTGTCTGAAGGTGGCAACAGTCAGTACTGTGGAATGTGTCCCCACCGGCAGGTCCGATCCTGCCATGTGGTCT
GAGAAATGGTAATTAGCCTCTCCCTTCCGGAGGGTCAGGTGTTTCATGACCTTCCCAAAGTTCCTAAGCTGACCTTTTCATGCCCAGGTCTGGC
GTGATCACCCATTGCGTCCTCAGGTTTGACATCAGTGCCTCTGCTTCCCTTGCCACAGTAAGGTTTCTGCAGCTCTCTCTGTGTGTTCTCACTG
CCTGCTTGCTGCACAACCCCTCAGCACCCAGCAAGGAGTAGAAAGCACGCTCACTGCTCTTGACTGGTTAGCTATTGTGCCTTCCAGAAGTTGC
CTCTTAATGTGCTCCCCTCCCATCTCCAGTTTTATGCTTTATTACTATGTGATTGTTTCAACTTACATACAAATTCAGTTGAGAACTGAAACAA
GGGAACTTGAACTCATCAACATGGTGCATTCTCACAGTGCAGTCTCTGTCACGCGCCTGCGGTGATTCAGCCTGTCCCCCTAAAGCGCATCGCA
GGCATCCATTTTGTAGCTGGAATGGCCCAGTGCTGCCTTGACACAGCGCACTGCTTCAGAGTACTCACCGTGTCTGTTTTCTCCTCTGCTTACC
ATTCTGTCGTAGACATACCTTATAAATTCACCACCTCTCATTAAACACTTGCATGTTTTCTAATTTCCAAAGTGATGAACAGCATTTTATAAAA
CCTCACTTAGCACATACTCACAGGCCCAAAGGCAAGCCTGTCTTAGGCCCCTTGTTGACATTACCAGTTTGGTTTACCAGAAGTCCCCACAGTA
CTGTAGGAGCAAACTCATTTCAAGGGACCCTCTGTCACTGTTGGGTAGAGGATTCATCTGTGAATTTAGTTACTAATTAAATCACTTACTAATC
TAAGTGTTTCCCTGATTACTTGTGGAAACTGGTGTTTCCCCTAAAGCTTCAGTGGTGTGGGGGGAGAGGAAGGTGCTACCAATAGTGTTCCCTC
ATTTCCTGCCTAGTTGGTTTGTCTTATCTATATAAATCCATTTTTTAAAATATCTATCTACAAAATAAACTTGTACATAAATGTGGATAACAGA
ATTATTCAAAGGAGGAAGTATCCAGGATATTCATGATTTCTAAATGGATGAGCACCTTATGATATAGTCATACAGTGACAGATATTTAGTGATT
AATGTAATGATAACTTTAATACAATGCTATATTACTACACTGCAGATGAATCTTAAATGCGTTGTGCCCTGATGAAAAATAGAACGAAACCAAG
GTTGTGTATCATGTGATTAAATCCATACCAAATATCTGGATTAGGCAAACCCACAGAGACCTAGGTAGGTTAGATGGGCGTCAGGGAAGATAGG
GGTCATTGGCAAGTGGCTGCTTAGAGCACAGGGGTTTCTTTGAGGATGAAGAATGTGTTCTGGAATTAAATGGCAGTAATGGCTCCTTTATAAA
AACCAACTGTGCCACACTCTTCTGTGGTCTGGAAGAGTTGGGGAAGGTGTGCCCTGCCTCTCCAGAATCCCTTCGTACAAACAGGGCTAATACT
CTCATTTGCATCAGCACCTTCTCTCTCTCTTCTGTCGACTCAGAGATCCAAAGCAAACTGGGCGCAAGAAGCATCTCTCCCTCTCCCTGGAGCC
CTTCCATGATTCCCTGTTAAAACTTCATTTGGCCATTTAGGTTTGGGAGCCCATCCAGTGGCTGGCTGGCTGACAGCAGTGTGAATGCTCACTC
TCGGGGGCTCACGCTTCTGTCTCCCTTCCATTAAGCCTTCAGAGCTCCAGGCGCAGTGAGGGGGGTGGGGTGGGAAAAAGGAAAAGACTGCAGT
TTCTCAGCCTAGGGGTTATCTACACAAGCATCGACAGAGCTGATTCCAGGTGCCGGGAATGCGCCTCTTTTCTGCTGTGCCATGGTGTTCTATG
AGTGATTGGTTTCATCCATTGCTGTCAGGGTGGGACAGGATCCATCCTCGTCCCCTCAGAGCCTTTGCAGTGACCACACACATGGATGATCCAG
ACACTTGCTGTTTGTGAAGTAAAGCTTTGATTTGATGCGTAGCAGGTCCAGTCTTCTGGCCACTGCATGTGGTCAGTGTCTGCGTTGTGCACAC
TCCCCTGTCCCGTGGCCTTCTCACCTGAGAGACTGCAGGGTGTCAGAAGGAGCGTTTGGTAGGGGCTTTCCTTCACAGCATTCTACCACAAGTA
CATACGTCTTTTGTGTTTGGTTGGGGGTGGGGCAGATTATACGAACACTTCACTTCATGAGTTAATTTGCCTGTAAAGTGAATCATGTCTTAAA
TGCAATAGGAGAGCTCATTTTTATACCAAGGAAACTTTCCGCTACCGCCTCCCTCGTGGTATGTATAAATACCCTTGCCACAGATAGGGAAGAC
GGGGAAATTGAGGGCTGCTTTAGTTTTGTTGGCTCAAACAGTCATTAAGATGCCAAACCATACCAAGGAAGAGGTGACTCACTGTGGTTCCAGC
ACCTCCATAGAACCCACTATTCACAGTGTGGAATGTAGATGGAGACAGAGGCACCAAGGCTAACAGAGGCACTGTGCTCTCTGTCCCTGGACGT
GGTGTCAAGAGGCGTCCTTCCCTCTGACTTTCCCGCCATGCCTCTTTTGTACACTTTTGTGTGGACTTACCAGGGCTCCATGGTACAGAAAGCA
GCTTTGTTGCAGAAGTCCTGAGTTCTGGACATGGACTCTAGTCACCTGTTGTCACCTCTCGTCCCCACCCCGAGCTGAGCTGTGGACACATTCC
CCTACCTCTCTATAACAGGGCCCATGTTTGAGGACTTAGAATGTGGTGGTGGGGTTGCGTTTTCCAGTGCAGTACAGTGCAGTGCCTGGCATAC
ATGAGTATGCATACATACACTTCGGATGTTGGCTATGACTGCCAGGATGTGGAACCACCACCTCTACAGTGCCCCATCCCGTAACTAGGCATTC
ATCTTCTGCAGGCTTCGGACAGCATCCGTGTATTAGCTCACCATTCTGTGGGCCGTAAGCCGGCACGTAGCATGACCGGAATCTCTGATCAGCG
AGGCTGAACTAAGGGTGTCAGCTGAGCTGTCACTGGGGCCTTGCTAGGGAAGAATCGGTTTCCTGACTCACACAGACTCTTGATCAGTCTCAGT
TGCTCTGGTTTGCTGTGGTCTTGGAACTGACATGCCAGTTCCCTGCTCTGCCAGCTGTGAGCGCTCCTCAGCAGTGGAGAGCCCACATCTGGCC
ACGTGTTAAGAGCTGCAGGAGAGAGGATCCTCACTTTGAATGCTTCTTCTCACACTTCGGCTCTGCATGTGCAAGAAGAGCCATGACCTCCAGG
GCTTACTTGATGAGGTCAGCTCACGGGGACACTGTCCTTCCTAAGGTTGGCTACGCCAAGTGACACAGCCTAACACAGGAGCGGCTGTTTAATT
CACACATCCTGGAGACTGTACAGGAAGTTGGAAGGTAGCTTACAGTTCTGCGCACCACAGCACAACCTCAGCAGGGCCAGGGACAAATGGCTCA
CTTCTTCCATCCATCTGGCAGCAAGTATACTTTGCCAAGTGGGCAGAACTGCACTGCACTGCGCTGACACAGGGTGGACCCAGCACTAAGGCTG
TCTGCGGCTCAGCCCCCAAGGTCTTACAGTTGCACAATGCAAACCCGGCTGGATCTTTCCTTTGGCTTAGGACCTCCACCAGTGCTTATGCAAC
CAAGAGGCACCAAGGCACCCTGCTTTTTCTCCATCCACCTAATTCCTAGGACCTCTCTGACTGTACCGAAAAGACAGATAAAGACCCTTAAGCT
GCCAGGGTCATCTGGCTGTGTTCTAGGAAGAAGGAACAACCCATTGGGCAGGATGGAAAGGTGTTGGTGAATCAGGAAACTTGGCTGGCAGGTT
CTGTAACCCAGCTACCACTGCTCCGGGCATAGTGTTGAGCTGCCTAAATGAGGCTCTAGCAGTTATGTGCGGAAAACTCCTAATCAGCTGCCCT
GGCTCCTCAGGGGATTCACTGTCTGCCGAGAATCTAGTAAAGTTCCTTAAAGTCCTAGTAAAGTTACTCATCCTGTGGATGGTGTTGATTTTCT
CAGCATCAAAAGCTGTGTGCCAGGAGCCTCTCTCCTAAGGTCGCCTCACTCTGACTGTGCTCCGCCTCCTCCTGCCCTCTCTCATCCCACTGCT
GTTCATTCATGAAGCGGTCCACTTTTGCCTCTGCCCCTGACACAGTGTGAGGAGCTGCAGGGGACCTACAACTCTGCTCTGAATTCCTCATTGC
TTATGTGTCGTTGGTCCGGCTCCCATCCTTTTCTTACTCTCCATTGTCAGCTTTGCCCAAGAAAGAGCGATGCTAGAGTGGAAGGGACCATGAG
GCAAGTCGTGTCAGAGTTCTGTGGCCAGACCTCACTGTCCTTTCCCAGGCCAGCGCTGCCCACTAGGCTCCCAGGGTGAGAATGGGGCATGGGA
GGGGGATAGGGATGAAGAGCTAAGTCTAGAGCTGTCACTTCTCCCATTCCTTCTTAAGTTGGCTCCAAGGTAGCAGCCTACTCTGCTAAGATGG
CGGCTACTCATTGGCTCTTTTCCCTGTATGTTGCAGAGAAAGGCATTTGCCAGCATGCCCGGTGTCTCATCCAGGCCTTGTTACCCAGCAGCTG
TAGAACTTGATCATGGGCATTGCTCTTGGGTTGGCAGCTGAGGAAATGGAAGCTTTCTCATTGTTTGTGTGCCCAGCCTCAGAAGTTGAGAGTG
GGTACCCACCTGGGCCCACCTCTGGTCAGAACGTACCTGACCTGTGATAGCTGAGCCCCCCCCCCATACTGCAGGGCCCCCTCTGTCACAGAAG
AACTGTGTGGAGGGTTTGAGGCCACACCATGACCGTAGTATAAAGCGATCATATCTGCTGTGCTCATGGGAGGAGGGTGTGGCTGTGTTTCAGT
GTGTCTGGCAACTCTTCCCCTGTTGTGTAACTTAAATAGATTTGTGGGACTATGTCCATTTAAGGAAACAGGGTCCCTTAGCTTTCAAAGGGAT
GGAGAAACAGGCTATAATCTGGATATCTGGACTGGTCGCACAAGGTCAGGTTAGTGAAGACGCTCTGCTGCCAGCTCTTCTAGACAGACACATT
GACTAGGTACATGGATGTGGTGTCTTACGAGTCAGCACTCCAGGGCCCCAGTGTTGTCAGAGTGGCACTGACAGTGCTTTGCAGTGACCTACAA
ATCAAAAGCAACTAGAATAGTTAGTACACTTACTCCATGTTGGTGGACACAGAAAACACCGAATAATAGAGATATTCTTTTCTGGTTTTTTTTG
TTTGTTTTTTGTTTTTTGTTTTTGTTTATCGAGACAGGGTTTCTCTGAATAGCCCTGGCTGTCCTGGAACTCTCTTTGTAGACCAAGCTGGCCT
TGAACTCAGAAATCCACCTGCATCTGCCTCCCAAGTGCTAGGATTGCCGTGCACTACCACCGCCCGGCAGAGAGATTCTTATCTTAGTCCAAAT
GCCCAGAAGTTTGCCTCACAGTGAGGAGCCTGATGACACAGAATGCCATCTGTATAGTGTCTCCTCACACTCTGTCTAGGAGTAGTTAGGCTGC
CTGGGCCACATGGGAGGGTGAAGACCACAGATTCTCACACAGATCATCATGATGGACTCTTAGTGTCTGCATTATTTCTGTTTTGTCTTGCTCC
CATTTCTCTCGTTACTCCTGATTCTTCCTCTAAATCAGTCAAGAATAGAGCGAGATCCGAGTAGAAGCATATAGTTAACTCAGAACATCAAGGG
CATGCACTGCGTTCCCTCTGCAAAGATTACCTTCTCCAAAATTGTTTTTTGATCATTTTGGTTTAGTCACTTGATGTCTGTAGCATGCTTAGCT
CTGCACCAGGCTTGTAAGGTGCACACAGCTGGGAAGCAGAGGACCAGCAGCCAGGCCCTGACTTCAAGGGGATTATGCCTTTCATACCTTCACT
GTGAATTCTGTGTTAACACTGTGGAACTCTTTTTAGGGACTTTAGAATGTTGCCTTTTCTTTGTTACGTGAGACACGATATCCTGTTTTCTGCA
AGAGTTCTAATGAGGTGGCTTTGTTGCATTAAAAAGATGGTTTGCAGTGAAAGTTCTCATTGGTTTTAGGTTTCGGAGAAAATCAGGGTTTCTC
CCGGGTAATACCTGTGACACTGGGAATTGCTTGTTGCAGGAGACTATTCTGTGCCTTGTAAGAAGTTTGACAGAGTACAAGTACCCCTTTCCCT
AAGTTTTGGCAACTGAAAACATCTGCAAGCATTGCCTACTATGTCTCCTGGTGGACAGGGGTGCCAGGTGTGAGCGTGACCCTCTAATTCTAGG
CTCACATCTTCTGCTTAAACAAATCAATGAAATCCCCAAGAAAAAAAGCACTTGGAGCAAGTATGTTCTGTCTGGTCCTTGCCAAAGCTCAAAG
CAACGTTGTACCATGGAAGAGTTAAGACAAAGTCAGCGAGGTACATACCCATCTGATGGTGCAGCAGTGGTGGTGAAATGCCTCAGTAGATTAT
GCCTTGGCGATAGTTTCCTGTTGGAAACTCATTAAAATCCTTCGCTGTCCATAAACAAGAGAACGCCTTGGACACAGCATGCTGTAAATTCATC
TTGAATGATTTATGAGGAAATGGGTTCCAGATTTGGTGATCTCAGCTCAAGTAGTAGGCGACTGCCTGACAAACATTCTCATTCCCAAGAACTT
GAAGTCAACTCACTAAGCATTTGCTGAAGTGTAGGTTGTGAGAGCTCTGGAGTGTCTAATGTGTCCTGGTAAGACGAGCGCAGTGCTTAAGAAC
TGCCACCAGCATCTCCTCAGCCTGTGACAGCTCCTACGTGGATATGAGTTACCCTTTATGGTCTTGAATCTCTTCCTGGTCTGTGCCAGCCCTG
CCTTCCCCAGAGAGTGTATGCTATTAGACATCATGTCACGTGGTTCTTATTTGACGCTTTGGTCCCAAAGCGACTTTTCAGAGTCTTGGCAGGG
ACACTTCCTGCAAGTTCTGTCTGCCCACAGTGCACTTACAGTGGTAACATTCATTACCTTCCCTGTATGTCTGAGTTCTCACTTCTCACCTACA
TACCAGTAACATTAGAAAATGCAGGACAGTATGGTGATGCACAGCTTCCAGGTCATCCTAGTCTACATGGACAGCCAGTTACATAGTGAGACCC
TGTCCCCAAAAAGGGGGGATGGGGTCGAGGGAAGCAGGACATATTGTTGATGAAAGTCACTGGCAGAAAGGTTGGGTTTGGTACAGAGAGAAAG
AAAAAGAAATACAGCACAAAACAGACTTTTTCCTCATCCGGTTGTCACTTCTTCAGTAACTCCTGTGTGCTGGGCATTGGCCGTATATCTGTGA
AGAAATGGACCTTTGTCCATGGGGCAGAGGGACAGTAGACAGGCCACCTCTTAATGTGGCACAGTGGGTCCCAAGCTGAAGGAAAGCATAGAAG
CCAGTGGGCACTGGGACATGGTGGGTTCCTTGCTTGTCCGGAAGAAAGGGCAGATGTGGTCAAGGCCTCATCCCCAGCAGGAAGGTAAGAGCTG
ACGCAGGAAGAGTGAAGTAAACAGAGCAGCCCTGAGGAGGAGGCCCCTCAGGATTCGGATAGGAGCAGCTGGATCTTTGGGGATTTACCAGATG
AGGAGCCCTGGGAAGGCAGGAGAGAGGAGGGTGGGGCGGCATAGCTCAGCCTTTCCGTCCACCACTGCCTCTGGACCATAGCAACACTCTCTCT
AAATGAGCATTTAAGAATGTCAAACTCTAATAGAAAATTGAAATGCTAATTAGCAGCGTCAAGTGCTTGTGCTTCTGGAGGCTGTCATGACAGC
CTCTGGTCCTGCCCAGCTTTACTTTCACGCAGTCACTACTTCTCAGTTTTAATGCGGACCATCCTTTTGTGAGTAGTAAGTGCTCACAGTGGGA
GTGTCTGGTAAATAGTCCTGGGGCTGCATCCTCTCCTGTCCAGGTAACCCAGCATCCTCCTTAGAGGGCACTGTATTGGAAGGTTTTGCTCTAG
TGTTGAAAAACTCACTTTATTGCTCATATTAGTCCTTGCGGTGACTAAAGAAAAACCTAAGAAATTGGTGGCCAACTTTGGGCAGTGGTTGGCC
GAGGACTGAGATACCTCCTCATCCTTGCCCCTTGGCCCTGCTTTGATCAGCCTGATGCATCTCCTGCCCGTCTTCCGTGTTAGAGCAGCCAGGA
AACCTGCATGCTCACAGCCTCCTTTCTCTTCCATCAGGAGCTTGGATAATGGGCTGTGTGCAATGTAAGGATAAAGAAGCAGCGAAACTGACAG
AGGAGAGGGACGGCAGCCTGAACCAGAGCTCTGGGTACCGCTATGGCACAGACCCCACCCCTCAGCACTACCCCAGCTTCGGCGTGACCTCCAT
CCCGAACTACAACAACTTCCACGCAGCTGGGGGCCAGGGACTCACCGTCTTTGGGGGTGTGAACTCCTCCTCTCACACTGGGACCCTACGCACG
AGAGGAGGGACAGGTAAGCCATTGTCAATCAGGATGGGTGAGGGCACAGCTGTGCTCTTTCACAGTCATTGCTGTGTGTGGATGGGGTGGGTGC
AAGCATGCCACAGGTGNNNNNNNNNNNNNNNNNNNNNNNNNNNNNNNNNNNNNNNNNNNNNNNNNNNNNNNNNNNNNNNNNNNNNNNNNNNNNN
NNNNNNNNNNNNNNNNNNNNACACACACACACACACACACACACATACATATACATATACATGCTTCAGTTGACTCATTTTAACAGAGAAGTTT
TGGTCAACTTTAGGCCCAAGTTGACTATCCAAGAACCAAATGCCTGGCTTCTCAGGAGCAGGAGACCTCTTGTCACTGCTCTGAGAATTCAGCA
CCAGTTAGTGCTGCTAACTGCACTGCAGTGTCCACTGTGGCCTGTCAGCCAAGGGCTCCCAGTCCTGCCTACCCTGAATAGGGCCAGCTCTGGG
GGTACCCAAGCACTCCAGTGTGATGTACCCTTCCTGACTTACGGGGTAGTTTCTGTCCCTCTTCCCACTCTTCGGCCTGCCTGGCCAGTGTGGG
TGGTTGTCAGCATGTTCCTCATTTCCGTCTGCTTGTCAGTATTCCAGCCTGGACAGCCCTCGAGTTTTCATTCATCTCTATATTCTATTGTTAC
ATTCTCTGTGTGGGTTGTTTTGCTTTGTGTGACTTTTGAGACAGGCTGCCATTTTGTAGCCCAGGCTGTCCTCAGACTGTTAATAATCCCTCTG
CCTTAGTGAGCGTTGGGAGTACAGCCATGAAATATCACACCGGCTGTGTGAGTTTCAAGCTGAGCTCTGTGTGCCAAAACCATTTCATATTCTC
TCTCGTCCCTTCCTCCCCCAGGGCTCCTTCTGTTTCCCACCACAGGGCTGGGTTTCACCCGCACATCTATTTGCTGACTTAGCTAGTGCTCTAT
AACGTATCTGCCATACATCCTCACACACATTCCCTACAGTCTTTGTAAGCTGCCTCGTGTATTTGTAGTCTTCCAAATACTGTCCCAGAGTGTG
AACCATGGTAACCAGATATTTTGCATTATTTGTTCCAAAATTGTTTATTACAAAAGTTTAAAAGAATGTAGCGTCTCTTGGCTCATCTGGGGGC
AGATGCCTCGTGTCTGCTCTGACAACCTATCATGGCTTTTTACCCGGAGAGCTGACGCTGCCGAGGCTAGGGCTCTTTCTCTGTGGACAGCTTA
TGCAGTGGAGTTGGAAGAGGGTCCTGACCGGCCTTTGGACACGTGTCTCTTCCAGCACTGCACTGTCGATGTCTACCCTGTAGAACAAACCCTA
TGCTCACCCCTGTGCTGTAATGACACCAGCTTACCCTCAAATCCAGCCTTGTATGAGGCCCTAACCAAACCTCCATGGCCTGTACCTGCCCCCC
ACCTCAGGTGCCTGGAAAGGAAACAGACAAACAGTCTAGGGCCCTCTGTCCTTAGAAAATACAGAAGAAGAAGGAAAGCCAAATGAATACTCAA
CACACATGCACCTCCACTGTGAGAGGTGTTTGTTGAGATTTTTATGTTTGCTGACTCTTAATTAAGCAAACAGAAGCATCAACCCTGTTCATTC
ATTCATGAAGGCTGGATGTGAATCCCAAGTGAACATGTCTCATTCATTAAGGTCACCAGCATGGGCTCCTTGGATAGACTTAATGGAAGAGGCC
ATCTGACTCCTTATATTATTTGAAGTGTACACCGCCAGTACCCTGGGGCTGGAGAGGTGCCCTGGCTTAGGGGTTAAGAGCCCTTACTGCTCTG
ACAGATGACCCAGGTTCTCTTCCCAGAACCTCCATCAATGGCTAATAACCACTGGCAACTCCAGTTCAGAGGAAGCCAGTGTCCTCTTCTGGCC
CCTACAGGCTCTGGCCCACATATGGTGCACATAGGCAAAAGCACATATGTTTAAAGATATATTTTCAAGAGGCAGAGCCTGGGATATGGGCGGG
CGTTCCATCTTTGGGGAGGGGGAGTGGTTGCATTGTGTGTCCTGGGCTTTCTGGATGCCTTGCTGTCAGACCCCTAAGGTCGTGAGCAGTCTTC
ATTGCTTCCTCCTCCATCCCCAGGGCATAAAACCCCCCAGTGATGGAGAAAGAGTGCAGGAAGGGCTGTTTTCCACGAGTGAAGATGGCTTGGA
TCTGCTCTTATAAAAGAAGAGACATCTGTGAATGAAGTACGGAATCAGAGTAGGCATGGCCGTAGAGGCTCCCACAGTGTGTTCTAAGCCAGAC
TCCCCTAATCTCAGAGAAACCTTAAGAAAGGAAGACTGAAGGAGCCCAGCTCCCCGGTCAGGACATGCACCTGAGACAGATGAAAGGCAGGTCC
TCCCTGGAAAGGATGATCCCCACAGCAGTGTGGCCTTGGGAGAGGGGAAGCCAGGTGGTGATAAGCCATCACACTGGGAAATGTGCCGAAATTA
AAACAAGAAGCCAAATTACAGAGAAATTCAAAGCTCCCATTAGGTATCACATCCTGTGTAACAACCACAAAATTAACAGCTTAAACAGCACATA
CATTTATGATCTATATCTATTACCTGCGTTCTGTGGGTCTGAATCTGGAAGGGAGAGCCCGGTTAGAGGCTGTAGGCATGAGTGGCAGAATCAG
GTCCCTGGCCAGGGTTAGCCAGTCTGTCATCATGCTGGCGTGACACCCTCCTTAAGGTAGTGTGGAAGTAGAGAAGTCACCTTCTTCTGAAACA
TGTGTCACACTGGGGACATCTGTCCCCTTTGTACACTGTGTTAAGTAAATCAAGTTGTTATGTTCCTAAGGAAGAGTGTGCTGAACAAGGGCAT
GAGAACCAGGCAGGAGTCACTGTGCTCTGTCTACTGCATGGGGCAAGCCCTAGACTGAGTGGAATGCTGGGCTGATTTTTGCTGTTGGAACTTC
TGGGATGTGGGACAGTCCATGGGAGTCGGCAGGTGAGAGAACCTAAGATGGACGTGAGGATGAGGGAGTAGCCAGAGTGAGAGAAGTAAATGCA
AGGCAGAGGAAGAACCAAGGGGGCAGGAAGTAGCAACAGCAAGACCCCGGAACTGACAACCATGACCACAGCTGCGGGTGGGGGCCAAGGGCAC
TGCATCTCCCACCTGGGGTGAGCATTGCAGAGACGACTCGATGTCCCCGAGCCACAGAACAAGTCTCTTCCATTCACTGCTACCTTGTGCTAGG
GATGGAAGAGTGATCCATTTACCCAGACCTTAGCTCAACCTTCAGGGAAACACGTGGGGGATAAAGTAGGCCAGTACTTGCCACAGATTGATGT
CAGTCAGAGCCTTGTCTCTTACTCAGTGCTCATCCAGAGTCAACGTCCGTCAGCTCTAGGGTTTTGTCATAAAGCCTCCTCTATACAGACCACA
TTATAAAGCCAGCCATGTGACTATGACCATATTAATTACAATGCCTCAATATGTTTATTAATGCTAAGTGTAGATTTTTAAGGATGAGACTTTA
ACAAAAATGTGATTTCTTAGTATCAATTCCCTGTGTAATAGTCTCCGCTCTTTTTTTTGGCAGGAGTGACACTGTTTGTGGCGCTTTATGACTA
TGAAGCACGGACGGAAGATGACCTGAGTTTTCACAAAGGAGAAAAATTTCAAATATTGAACAGCTCGTAAGTTTGGGGTGGAGCACACATGCTC
TTTGGTTTGGGGGAAAGGTTCTCACAGCAAATGCATGTGCTATCTGAAAGTAAGGAAAGAATGCCTTCTGCACTCACTAGCTCATGGCATTCGA
GCCTGAGCGAACTGAGGACAAAGTGCAATACTACATGGTACTAAGTGCTAAAGAGGGCACCAGAGTCCTTTTAGAGCCTACTTCTTAAGTGTGC
ACGCGAGAGAGCAAGCTTCTGTGTGTGTGTGTGTGTGTGTTGCAAGGTCAGAGGAAGCAATCGGGTGTCCACCTCCGTCACTTTGAGGCAGCGT
CTCTCCTTGATCCTGGAGCACCTAGGTTTCAGCTCGGCTGGCAGCCAGCAAGCTTAGCAGTGGCCTCCCCCCCCCTCCCCCGCCCCACACCCCC
CTCGGCCAGCACTGCAGTTACAGGCTTGTGAGAGACACGCTGCTGGGATGCAGACTTGTGAGCGAGCACTCTTAACCACTGAGCATCTCTCTAG
CATCTCTCTAACCCCAGGGTCCGTGCGTTTGCATCTCAGTAAAGAACATAAAGCAGCCGTGCCCATCCCCGGGAAAAGCCGCATTCTCAGATGA
CTGGCGCACGGCTTGGGTGCCAGCCACGTGCTCTCTGCTCTGAGCTGCTCTCCATTATTCAGGTGTGGGCATTGTCAGAGGCCTCGCCCTTCAG
GCCAGCAACCAGATCCCCCCATCTTCACAACTGTGAAGCCTGTTGAGGTGGTTTCCTGAGGGAAAATATGGGAGTGTCTGTGCTCTTAAGAAGA
AAGCAGAGGCCTTTCACCGACTTGAGAATGTGACCACCAGGAACAACTGTCACCAGGGAGCAGGCAAACTTAGGGTAAAGGTTAACACCCTTTT
CAAGCCCCACAGTTAGCACCTGTGGAGGAAAAGCAGTTGTGCCTCTGCTTTCTGTCAGTGCCAGAGCATCACCTCCCTCAGCATGCATAGATGA
GAGAACGGAAGGAAAATCCACTCCCAAGGAGATGGTACTGTCGTGCCTCAGCACCTCAAGTGTGTTGATGAGTGCTCCCCACTCATGGGCAAAG
ACTGCCACCTGGGACGAGGCACCTGGGGTGAGGTGGGGTGGGCGCTGCTCTTGCTAAGAAGTCTGATTGCGATTTCTCTGGCTGAATTTCAAGG
CAGTTGAATGGCTTGAAGCTTGGCCCTTCTGCCCCCCCCCCAAAAAAAAAGAGGAACCTAGGGGTTGAGGTAAGAGGTAACACATACTGGAAAG
AGGAGGGTGTGGCAATGGAGAACCCCCTGTAACCTCAAGAGTGTCTCCATGGGAGGCCTGCCCTTCTCCAGGGTGCCCCTGGCTCTCAGCACTG
CACGGAGAACATTTTCAACAGCAAGACCCCATGCCTCCAGACACACTAGTAACTCTTCTAAATGCCAGCAGGCACTGTCTGCATAAAGCAGGAG
GCTTAAAATTAGGAGCAGTTGTCAACACCAGAAGAGAGGTGGCTGTGTTTTGGTGTTTTAATTTATTGAAATGCATGGCAAAGGTGTGTATAAC
CACGCCTGGTGCTGGTTGGGCAGCAGTGTATATGCTGACTTACTGTTTCGTAACCTCACATTTAAAAATACAAAAAGTGATACATTGATGTTAC
ATGTATTTTACCACAAATTTCAAGGACAGAATTTACTGTATTCTCACATACTAAGCATGTCCGTGCAGCCAGAATTACCTCCCCCTCCACCCCC
AGAGAGCTCCTGCAGGCACAGGGGTTTTTAAAATAGTAAATGGCTGCCATTTATTGAAAGTGCCGTATGCACTGACCATGTCATTGCTGTCGCT
GATCCTTCACAACAGCTGTCTGAAGTATGTGCCGTGACATCTGAGAGCACGGGTTAGGGAGCTGCCCAGTGCACCGTCCTGGCAGGTGGCAAAG
CCCAGGGTGAGATGTGGGGCTGAGAATTCAGAGTGTGGTGTCAGGTGTGACCTGGGAAAAGCCCAGATGCTGCCATCAAAGGCAGCTGGAGTGT
CTTAAGTGACGGTGGGAATGGAGGGAGGTGGCTGCAGCGTTGGAGAGAGGGGCGTTTGCCTTTGATCTCTTCCCGTTTATGATTGCTTATTGTT
AGTTTGAGTCTCAGATGAGCGCTGCTTGTCAGAGTCTATTGACTGGGTTTTGTGTAAAGCTCCCCAGTGGGTACAATGTCCTTTAACTGACAAG
GTCACTAGAAGTTTGAAACTCTGTAGGCCCTAGGAAGTAAGAAGTAGAGGGGTAGAAAAAGGCACATACAATTCTGGGCACCTGTGCACACTCC
CGACATAGGCCTGTTTTGAGGTTGCAGCCATGGCCCAGTTAGTCACTGGCAAAGTCAAGTCCCTGTCATTGTCCTTTGTTATGGAGGAGTCTAC
ACAGTCAACATGGAGGAGTCTACACAGTCAATAAAGCGGATTTTAGAGGAATGTTTAGGGGATGCAGCCTATCTCACTGTGCATTTTATTTGAC
TGCATAGCTTTTAACGGTTGCAGAGTTCTCTGGTCCTCTGACCCTGTTCTCCTAGAAGAGAACATTGCTAAGGGACTTTTCCTTTAAGGATAAA
ATTCTTTGTCCTACATGGTATTTAAGTGCCCCTTTTCACGGTTATGGAAAAGAAAAGTAAGGTTTGTACAGCAAAACGATATCCTGGAGTCAAG
GGTAATAACAGGGAAGGGAATACAGAGCAAAAGACAGAGCAGATGGTGTGAAGGCCTCCCTCCCTCCCTCCACCACCACCAGCCCTGACAGGAG
AGGAATGGGGCTCTGTCCTCCCCGGGGCAGCTGCCCCCCCATGTGTTCCTTCTGACTACCCCTCCCATCAGGACGTGCTCAGAAGGCTCCTCCC
AGTGCACACAGGGTTGGAGGGGTCCTCGCTGACCCGTTGGGAGTTCTCAGTAGTAAAAGGCTTGCGTTCACAGCACTGTAAGTTCACCTTCTCT
CCCCACCCCCGTTCTCACACTTTGTAACTGGTGATTTACCCACCTTGAAACAGCATGTCCTTAAAATGCAGTGGGTGTTTTACATAGGTGCAAT
CATGGCCTGACCCAGGACCTACTGAAAGCTAGTTTCTGTCATAATCAGGAAAAAAAAAAATTGGTTTGATTTTTTTTTTTTTTTTAATAAGTTT
GGTGGTTTGGTTTGGTGTTCAAAACAGGGTTTCTCTGTGTAGTCTTGGCTGACCTGGAACTCACTCTGTAGACAAGGCTTGTGTCCAACCCAGA
GGTCCTCCTGTCTCTGCCTCCCCAGTGCTTGAGATTAAAGGCATGTGCCACCACCACCCAGCTGGGGAAAAAAAAAGTTTGTATTACCCAGACA
TGTGATAAAAGTAGTTTCAAGAGTCTTATCTTTGAGTAAGAAGTACAGCTGTGGAATGCAGGAAGAATCCAGTATCCCTGGCTGGCCAGACAGC
TCAAGGCTGGCTGCTCTTGGCAAAGCCACTTCCTGCCTCCATCTGATCTCCAAAGTATCTGGACTTCCAGCACCTGAAGCCGCAGCCCTGTGAG
GGACTTGAGGATTAAAGACGGGATGGAAGAACAGAGTCTGTTACAAAAACTTAGAAGCCATTCTCAACCAGTGTCGGATTAAATCACGGGTTTG
GGTCAGACAATAAGACAGTATCTTACCAGGTACGAGTGAATTAAAAAGCTGAACTGTAAGAACAGTTTAAAGAACTGCAGCTTTATAGGCTGGA
GAGACAGCTCAGCAGCTCAGGCCAGGGAACCTACTACAGTTCCCAGCAGCTCAGGCCTGGGAATCTAGTCCAGACCCCAGCAGTCAGTCCTAGG
AACCTTGTCTAGTCCGCAGAAAGCTGAGTGTGGCAGGCAGCACTACTTGTAACCCATTCCTGGGAAAGCAGACAGACAGGAGGAGTCACTGCTC
ACCCAGTCTCGCTAAATGAGCTAGCTGCAGGTTCAGTGAGAGTGAGAGTCCCTTTCTCAAAAACAAAGAAGAGAATAACTGAGAAAGATGCCCA
TGTAGTCCTCTGGCCTCTGTAGACATGCAAACACACTGGCAAGAATACCTGAACAGCATGCATCACACACACACACACACACACACACACACAC
ACACACACACACACACACACACACACACACACAGGCACAGATTTTCAAATGCTGATTAACTACAGTAGCTCAAGTCAAGAATAAGGGTCCTGGG
CTGGAGAGACGGCTCAACCGTTAAAGGCTAGGCTCACAACCAAAAATATAAGTGTAAGGGTCCTGTTAGAGATCCCGCTCCAACCAACACTGT
GTGCAGGACTGTGCAGGTGAATGGGTGCTGCCAGTGAATTAAATAGTTTTTGCTTGTTTATTTACCTAACAGCTTGTAGTAGATATTTTGAGTC
TAGGACCAGTGAGAATAGAGTGTGAGAAAAATGCCACAAGATGTGACATTTGCCTTATAATGTGTGACTGTTTGTCATTTGTGTGTCACTCTTG
TGAGGGGGAAAAATGGCCCACAAACGTTAAGTCCAGAGTGGTGCTATCTTTCTTCTGAACAACTGTTACATTCTAATGTGTGTAAACTTATTTA
GATGGCTACACCAAAACAAGACAGCTGATACTAACTTAAATTGGAAATTGCCTCATTAGTGAGTCAATTCATGATTACTCAGTCACCTGAGTAA
GACTGGGCTTGTCCCCGATTGCAGCAAGATCCCCCAACATCCTGACATCACCTGAAATTGGTGCTCGCTCTTTTTCACTTTGATTTAACTACAA
GTAACTTGATGAAGGTTAGCATGCGTTAGGAGACAAGCCTGGGCTGCCAGCTCTTCATTCTTCTTCACTGTCTGGAGCGGTTCCCAGGCTGGGA
GCAGTGAAGGTTGGTTGCTGTGAAGAGCCAGTGGGTGATCTTTATGTTTTTCAATGATGAAATGTCTCCATCTAGTGGAATTTCAGAGCAGTAA
ACACTCACTATTAAAATGAAGGTAAAGCCTTTTTCTTAAACACATGGTGGTCAGTATAACTTCCAATATGCATTTAGATGCTAGACTTACAACT
ACATATATTTCTGTGGGGCTAGAAATGGGAACAGTGCTGACTTAAAATGTTAACTTGGTTTTCTCCTTGGGGGTGGGGATGGGCTCCTGGCCTT
GTGTGCACTAGGCAGGCACGCGGCCACAAAGCATCTACGTCATGAGATGTACAAGGCAGAGGCACACATGCACACATGCACGAATGGTAGCTAA
GAGAGATGTTCACTTGACAAAGGACATGGCTCTCCTTGGGGGAGTTTTGTCTATGTAAATTCTTTGATGTGTATAAATATTTCAAATAAGAATA
TGGACACAATGTGATTATAATTAAACAGTTTTCTGGGTAAGAGAACTACAGTATCACTCTCATGGTTGATCTGTTAGTTTAATAAGGTTAAAAA
GGAAAGATGCTAGGAGTTTCTTTGTTTGTTTGTTGTCTCACTATGTAGCCCTGACTGTCCTGGATCCCACTTTGTAGACCAGGCTGGCTTTGAA
CTCATTGAGATTCACCTGGCTCTATTTCCAAGTGCTTGGACTAAATGTGTGCTCTAACACCCCTAACCAAGAAATAGGTTTTATAATCCCTCAA
AATTAGAGAGATAGCTCAGGAGTTAAGAGTGTGCTGCCAGCACCCACATCAATAAGCTCATAACCATCTGTAGCTCCAGCAGGATAGAGGTCTC
TGGTATCCAAGGGCACCTCCACTCCTCTGCACATTACTGCATAGAGAGGCACACATGCCTACACATAATTTTTTAATATAATTTTTTAAAACTT
ATATTAGCACTTTGGGTGTGTGTGTGTGTATGTGTGTGTTTTCTACTGTTATTTATCTCATAGCCACACCCACTTGGATGAGTTCCCATTTTAT
TCTTTTATTCTGTGACTTTCTAAAGCCCCACCAGATGTCACTGGTCCTTGGTACCCCTGCTCAGAAGTTTTTTCTGTAGGGAACCTGAAGGAGG
GAGGACTCTGGCTTAACAGGAGGCCAGGGTGTCTACCTAATGTTGACCTGGGGAAGGTCTTCCCAGCCCAAAATCAGTACGTTTTCTTCCCTGA
CTGAGCATCAACAGAGCCCAGCCAAAGACAATTTTAAAAAAAAGAAAAAGAAAAGAAAGGCCTGAGGTTTCTCTTGTTACCTTCACAGACTAAA
AAAAGAAGAAAAGGAGGTGATGTGTCTGTAATGGTCAGAGGCTGAGGCGCCTAATATGGTGACCGGCAGGCCTGTTTCCCTGGCCCTCATAGAT
AGAGAGGCTTTCATTTGGTGCAAGTCACAGCTAAACTCCACGCACATGATCATTGGCCCACCCACTGTTAATGGGAGGAAGCTCACATGCCATA
AACCTTCATGAATCCAAGCGTATGGATAATAGTTCTATATATAGTGACTGTAAACTGAGAGTCGGAAGTGCCCTTCCTGATTCACACTCTGAGA
ATTTTGCTGCAGTGGCTCAGAGATCTCTTCTGCCCTCCAGCTACACAACTGCCTGCCCTCCATCTGAATCTGGGGGTGGGGGTGGGGGGAGCTA
TGAATGTTTAATAGAGTAACATCCTGTTGAGAGTGTCTGAGGAAATCCTGTTATGTGGTGTTCTTATACTACCTGCAGAAGGTCATGTCTTCTT
CCTACTTCGTCAAGAGCAAGCTTGATAGGTCCACTAAGCATACATCCAACCCTCACTGGGCCTCCTACTGCTTCTCCAAAGTAAACTGAGGCTG
GTGTGTGTACTCCACACACACACACACACACACACACACACACACACCCCTCATTCAAGATTGCCTCCTACCCAGAAAGATGCTCCTCCCCGAG
CCCTAAGTGGGAAAGTTTCCGTTTCAGGATCTCCTGATGATGCCCTTGAACTCCTCAACCTCCTACTGGGATTTCCACCCTTAGCTTATGTGGG
GCCGGGTATTGAACCTAGAGCCTCGTGCACGTAAGAAAAGCACTCTGACTTCAGCGCGTGGTGCTTTGGATTTCTTAGGGCCCGTGTTGAAAGT
TTGCAGAAGGGGGCACAAGGCTACAGAAAAGGCATAGGGTCGGCCTGCAGAATTCCCAGCTGGATGGTGCGTTCAATTCATGTCCCTTCTTTTC
CTTTGCAGGGAAGGAGACTGGTGGGAAGCCCGCTCCTTGACAACCGGGGAAACTGGTTACATTCCCAGCAATTACGTGGCTCCAGTTGACTCCA
TCCAGGCAGAAGAGTATGTTGTTGTTGTTGTTGTTGTCTGTCTAAATATCTGCTTTTAATTGTCACATAAAATGCCAGTGACACAGCACAGGAG
CGAGAAGACCTTTCCCAGTGGTTAAGGGTTGAGAGGCTACAGTCCTGCTGTGCTGTCGAGTCTGCGCAGTACACTGTTATTCACTTCGTGGTTT
CCTTTGAGCCCGTCCGTTTTCTGATTGAGAAGCTCTATGTGAGTACCCTAGATGAAAACCCAGTAACTTGCTCCAGATGAAAAACCAATGTGGG
GAAACCACAGCTGCAGTGTGTGTTACTGAGAGCCCACCGTGCGCCTGCAGTCTGCTCCCTGAGCACTTGGGAGGCAGATAATTATGAGAGATTA
AGCCCACACACACACACAGGAGTCCTCTGCTTGATAATCAGAAATACTGAGCCTTCTGAAAAGACATAGCTTTTTGTTCCCCAGGCAGAAGAGC
AACTTGGAAACTACTGCAGTTGTGGGCTTCGAGGGATATTTTCCTTGGACTGAGGTCTCGGTTGGTGTTGTGGCTGGTCGACCTTGACCAGCAG
TTATTTGGCCCCACCCTCCCACTGGAGGGAGGCAGTTTTGGAAAGTGGTAGGAGTCTGGGGCTCTCAAAGGATGGCTGACTGGTCATTGTTCAT
TCTCTTTCCAGAGAAACCTGTAGGAACTCTTAGGAAATGGGGAGGGAGGTTGATGTCCCAAGCTCAGGAACATGGATGGCCTCTACCCCACCTA
CAGGGACAGACCTCACCAGAAAGAGAAAGGAGTCACTGTCGGTTGCTCACGGCCTGCAGCCTGCTGTGGATTTGCGGAGGCACAGCACAGAGGA
GTAGACCTTCACCCTAGCCTAATCCTCATGCGTCCATCATTCTTCTTTAAGTCTTTTGTACTCCTACACTTCGATCTGTTTCTGCTTCTCCAGC
ACTGTGTTTTGAGCTGTTTTACCCCCTTCGTTACTAGTGTGTTTCATTATCAGAAAATAGGAAATATGTGTATTTGTATTGAATTTTTAGGACA
GATTGGTAAATATCTCCTGTGTCTTTTCGGAATTTAAAACTTAACTACAAAGTAACATTCCTTTGATTTAACTGAGAATCCACTTGGGGGTGCA
TATTTAAGTCATATTTATAATGATAAGGTTTTTTTTTAATATTTTGGGCTTTTTAGAGTATAAGTTAGCTTTTTAAAATACAGCCTGTGGTTTT
TACACGTGCAATTAATCGGTATTTTGCACAAGCAGCGTGTGGTTAAGTGTAACCTCTTGTTCTGCAGGCCTTCCTCTCACCAGTTTTACACAGC
ATTTTAATTGAGTTACTGATACAAACCAAAAAAAGACATTTCTCACATAGCTGGTGTCGTATCCTTTACAGCAGCTATTGCTACGCTGGGATTG
TGGAGAGTTTGGGTACTTCTCAAGTCACTGAAGGTGACGCTCCTTCGGTGAAATTCTTTGACTCACAGAAGGATCTGATGGTGAACTTCCTAGC
TACATTCAGGCATGGTGAATTGAAGCTTCATTTTTAAAACCATTTGCTTTCATAGATGAATACTGTGATGGTTTGGTCCTGAAAGCTGCTCCTA
CTCACAGATTCTGGTGGAATGTTCCAGAACTCTCCCTTGGGCTCTTGGCATACTTATCCTCTCATATACAATCCAGTGCTGAAATGTGAACGGA
TTGCCGGGCGTTGGTTAGGACTCAGCAGCTCAAGTGGAGAGACAAAAGACGCATTCCGGTCCTGAGGAGGCCTGTGAGGCTTCCTGCCACGGCA
CAAGTGTGCTGTCAGTGCTGTTGCAAGGGAATCTTAAAATGTCTGCACCACCGACTCATTTTTATGGACATGCCCATTAACCGTGCACAGCTTT
CTCTCAGATGTGCAGTAAGCAATCCCTGCAGCTGTGTCAGAGAAGCGCAACTGCAGGGCACAGGCCAGGTACTTGGTAAACGCTCCTCACGAAT
GCTGGACAGGGAGAGAAAATCAAACCAGGCTTCCAAGAACAGCAGCCATCTCAGATCAGGGGTAGAGCTGAGTTCCCGTCTTCAGAATTCCTGT
AGGTAGAGACTAAGTAGAAGTGTTATCTGTCTTCCTTCTTTATCCATCCTGAGTGGGCTCCTTTAAAAAAAAAATCATGCTTGATTGATGATCC
TTATACTAGAGCTGAGTCTTGGTATTTCCCAGGAGTTGTAATTATGCTCAGAAATCAAGGGTCGTACAGCTGAGCTATGGAATCGTCCCCTGCA
GTTGGCATTTCAAACAAGGTGGTGGGTTTCTCTCTGTGCGTGCAGGTGGCATTTCACACACACATCCCTGTCGTCCTGGAGGGAAGGAACACAA
TCCATGATTCAAGATTTTTTTTTTTTTAAGAATGGAAGAGATGCAGAGTGGATAGAATCAGGAAAGATTGAAAAAGGACTGAATGAAGCTAGAA
AAAACTAGTTTGGGGCAGTGGAAGCAACATTAGAGGCGAAGGAATTTGTGGAGGAAAAGCTAGCTACATTGCTCAGTCACAAGTGTATTTATTT
TCTTGCCTGTGTCTCCCTTGAAGGTGGTACTTTGGAAAACTTGGCCGCAAAGATGCTGAGAGACAGCTCCTGTCCTTTGGAAACCCAAGAGGTA
CCTTTCTTATCCGCGAGAGCGAAACCACCAAAGGTAAGCTAAGGAGAGGGCAAAACTGATGTGCTGTTCACATCTGAAGGTCTTTGGGATCGGA
AGGCGTGGCTCTTGCCTGGTCCGGGGCCTTCTAGCCTGAGCCTCCTGCTGCTCTCCACCTCCCCTGAAGACGCTCGAACTGCATTTACCTCCCA
GAGATGATCGGGCTCAGAGGGAGGCGCCTCCAGAAACAGAGGCCAGGCTTCCGCCTCAGCTCAGACTCCGTCCTGTTCTCCTGTTCGAGTCAAG
GGCGCGAACTTGGTTTTTCTTACCTTTTTGATTTGGGGTCTGTGTGTGTGTGTGTCTGTGTGTGTGTGTATTTTCAAGACAGTGTTTCTCTGTG
TAGCCCTAACTGTCTTAGAACTCACACTGTAGACCAGGCTCGCCTTGAACTCAGAGATCCACCTGCCTCTGCCTCCCAAGTGCTAAAATCAAAG
GTCTGCCTGCCCTACCACCACCCAGTTTAAATTTGTTTTTCTTTCCTTCCACTCTGTTTTGTTAGTGGAGGACTCCTTCCTCTTCCCTCTGTTT
AATAACTCACTTCAGCAGGCAGAGGGGCAGAGAACCATGCTGCCACACACTGGTGACCTGTCCCTCTGCAGATTGCCAAGCAGAGCTTTGGAGC
TTCCTGCTAGGGGATAGACTTCCATTTCTTTTGTTCCCACCCTCTGTTCCTCCCGCACCCCTGCCTCCCATCAACCACCTCTGTCCCCACCCCT
GCCTCTCCACCAACCACCTCTGTCCCTACCCCTGCCTCTCCACCAACCACCTCTGCCCCCACCATCCCTGCCTCACACACACACACACACACAC
CCACAGCCCCACCACACACACACACACACATATGCCATCCCTGTCTCCCAGCCCCTCACTATCCCTGCCTCTCAGCTAGGCCACAGGAAATGAA
AGCAGGAGGCAAGCTCACCTGGAGTCTGCTCTTCATCTATCCCAGTGGGATTTGGTCTGTGCAATATTAGACAACACAAGAAACTGAAAGGAAA
CTTTGAGAAAAACCAGAAGTTTTTAGTTCCAAGAGCAAAGTCAACTGTATTGCTAACATCTCTGAACACTGGCAGGATAGCAAAAGTTGTCTTT
GTCCTGTTACAGAGTGGAGATATATCTGTCTCTTTCGTATGTGTGTGTGTGTGTGTGTGTGTGTGTGCGCGTGCGCATATGGTTTGTAATAATT
ATTAATCAGAATAGTCACATAAATGAGGCCTGCAGAGCAGACTGGGGCTCCGATGATTGGTGTGGCTAATGCTTGCACGTTTACCAGGTGCCTA
CTCACTTTCCATCCGTGATTGGGATGATATGAAAGGGGACCACGTCAAACATTATAAAATCCGCAAGCTTGACAATGGTGGATACTATATCACA
ACGCGGGCCCAGTTTGAAACACTTCAGCAACTGGTACAGCATTACTCAGGTAACCCCAGTGCCGTCACCGTCACCGTCACCGTCACCGGTTAGA
AACTGGAGGCTGTGAGGGAGGAGGAGGAGATACGGGACAGAGTCACTAGGTAGAGCTGTCCTCTGCCCGCCCACCCCCACAGTCAGACAGACAG
ATGGAGTCCGGGGTTCTGTTGCTCTTCTGCCCCAGATAGGATTTTCCTCCTGTGTTTTCCAGAAGTTCCCCCCAGTAGAAGGCAGTAGTTTAAA
TCTTGAAAGCTGTATTTGTATATTAATTTTCATAATAAAAATCCTTGCACGTTCTTTACCTTTGCCTTCATTGCCATGCAGAACTGTGAGAGGA
AAGGAGGAAAGGAGCTGTCCCTAGGCAGGCTCAGACGGCCCCCAGGGAGCCTCACTTGATCCTTCACCGCAGCAGAGGGAAGCACATTCTTGCA
CTCTGTAGAAGAAAATCTGTGCTGCTGCAGGGTTCCCCTCCGCCCCGCCCCCACTCCCCCCCCCCCCCCAGCTTGCCTGCTGAGGCCACAGCTC
CCTTACCTCCATCTCCTGGACTTTCTTGGTTTTTTGTTTGTTTGTTTGTTTGTTTTTGTTTTTTCAATTTTTAAAGACTGGGTCTCGCTATAGC
CCTGGTGGCCTCCAACTCAGAAATCCCCCTGCCTCTGCCTCCTACTGCTGAGACTGAAGGTGTGCGCCACCATACCCGGCTACTGTGATGACTT
TAAACAAAGATTAGACTTTGTCTTTACGTCCCATAATCCTGTTCTTCTGCTGTTCTTGGCCATTCAGTTATTGGGTGTATGTGCGTTCATGTGC
GTCTTATGTAAATATGTAGCTCTATGCGCAGTGTTTAGTGTGTGCCGCTTGCCCTCCTTGGTTAACAAGTGTGTCCTGCTAAACAATGCATGTG
TACATGACCCCTCCTTTTTTCCAAGGTAAGGTCTCACTTGTAGCCCTAGGGAGCCCAGTATCCACTTTGTAGCCCAGGGTGGACTTTCAGAGTT
TGAGCAATCCTCTAGTGTCAGCATCCCAAATGCTGGGATTACGGACGGAGCCACCACACCCTTTTTACCACCATTGAAAAATACCTGTGCTGTT
TCTGCCACACCAAAGAGACTTGTAGCCTTTTAAAAATAACAATACGAAATGCCTATGTACTGATTCTGGCCACTGATGAGCAGTTAAGAAATTA
ACAGTGGCTGAGCCAGTGATTTGGGCATTAGCTCTCTCACTCTATGTGGATTCTAATGAAATACTGAGAGAAATGGAGCAGAAAACCTCCTTGC
ACTTCAGTGATATACACAAAACGCCTGTATGTTATAAGGATTTTTTTCAAATGCTGAAATATATTTCATTACAGGCAAACATCCGCAGGGTCCC
CAGGGTTTGGATCATTTGAAAATAGTGTGCTGGAAAGGGCACCTTAATAACATCATAAAGCTGAAGGAGGGAGCCGATGTGAAGCACCCTAGAC
GAGTTTTAATCTCAGGGAAAAAAATCCATCTTGAGTTAGATTTGTTTTTATATTGGCTTTTCCTCTTTCCTCTTCTCTCTTGCACATAGAATGC
CTTTGAAATACCGACACATAAATAATTTCCTGCCTAAACATCTCAGAAACAGATTTAAAAAAAAAAAAAAAGGAATGAAAAGTAAGTTAAGAAT
TCCCAGAAAAGAGACAGCCACAGTTTGTGCTTAGAATCCAAGAGGCTTCCAGGGACGTAGGGGGCTTTGGCCCCCTCGGTTCAGGGTCTCTCTG
GCCCCCATCTTTCCCTGCCTGCTTACTCTCTGTTGGCGTTTAGTCAGTCTCCCCATACCTTTGCTAGATTCTCAAAGGAATATTCTTTTCAAAA
AGAAGGGGTGGGGGAAGACCAAGTTCCCAGTAACCTGAATGGAAGCTACTGTTTCCCTGCTTTTCATGTCACTGAGTTTCTGTGAATGTTGTTA
ATTTCCATTACTTCTTTAAATCCAGACTCCTAAATTATGCATAGAAAGCTGTTTAAAAGGTCGTGTTTTTGTTTTTGTTTGCTTTTAGTGGAAA
ATTGCAAAAAAGCAATGTGAGCACACAGGAGCAGTAGAGTCAGAAGGACTGCAGAGAATGTGACATCCTCTCCCGCTGCAGGTGTCCTCCTGAG
ACCGGCTAGCTCTAACAGACCAGAGGTCTGTGGGAGGCTCCTATGCCAAAGTCACATTTTAAACAGACATTTACCAGGGAGAGTCCCTCAGTCC
CTAGATACCGGAAGGGACAGGGACAGTTTTTATTTTTATATGTACTTTTTGAAAGTAGCAAGGGCATTTTGAATTTGAGGCAGTGAATACGAGT
TCATTAGACTAAAGTACACAGAAGCCAAAGCAGGCCGTGCCTGTGAGCAGCGAGCATGCCCGATGGTACAGCGGTGTCCATATCTGACACATCC
TCATCTGCCTCCAGCAAATGTTTGCTCATGTGCGTCGAATCTCCTGTGGCCTGTGCGTGTTGTCGTTACATATTCTGCTCTTCTCTCCCTCACC
GCTGCCCTGCTCCTCCAGAGAGAGCCGCAGGTCTCTGCTGCCGCCTAGTAGTTCCCTGTCACAAAGGGATGCCAAGGCTTACCGATCTGTCTGT
CAAAACCAAAGATGTCTGGGAAATCCCTCGAGAATCCCTGCAGTTGATCAAGAGACTGGGAAATGGGCAGTTTGGGGAAGTATGGATGGGTATG
CTGAGATTCAATTACTCTCTTATTAGCTTCCTCGTTTGGAAAATCCCAAACATCAAGATGGAAGGTGGAAATAAAGATATTTTATGATCAGGAC
AAACAGACAGTTTGAATTATTCAACTTTTATTTGGAAAAATTTGGAATCTCTCAAAGAGAGCTAGAAACAGGCAAGAACTACAGCTGTCTCCAG
TTGTGCTACAGTGTTCCAACCTGGCTCAATGTTGCCGTCAGGGAAGTCACCTTCCATCTTTCCTAGTGCATGCATGATTATGGATTATAAGGAC
TGTTTTCTTTATTAATTCCCTTTCCTGTAGAGAAAGCTGATGGTTTGTGTTTTAACTTAACTGTGGTTTCATCAAGTTGTACCCCACAAACTTC
TGGATTGGCTAAAGATGCTTGGGAAGTTGCACGTGACTCGTTGTTTCTGGAGAAGAAGCTGGGGCAGGGGTGTTTCGCTGAAGTGTGGCTTGGT
AAGGCAGAGGGCACATTCTGTTTTGGCTGCATCTCAAAGCCAATGAAAAGGACAGTTTTGAACAGAAATGTGTATGTGGCCGTTGGGACAAAGA
CCCTTAACCTTTGTGACTAGATGGGCTCAAGCCACCCAGGTTTGCAGAAGTCAGTGGCACCTCGCTGTGTTCACCTGTCCTATTTCATGTGGCT
CATTAAACACCTGCAGGACAGGAACCCAGTGATGGTGACGCTTTCTCTTCCTGTGAAATGGGATGGTAAGATGCCATAGAGTAAGGTCCTGGGC
TTTCTTCACACCAAGCCTGGGTCTAAACCCTTGCTGGGTGATTAAGTATAAATGCAGGGCCTGTTTAACTCCTCTGGCTCCAGTCCTCATCTGT
AAACTTGGAATAGTACCTGCTTCGCTGGATTATTTAAGGATTATATCAGACATGGTTAAAATCTCCTGTAGATCTTGGATCCATGCACACATAT
CTTCATTGTGTGCACATTCTTCAGTAACGGCAACTGCACTGGGCCCTTGAGATGGCTTTCATAGCCCTCTGGGTCAGTTGCAACTTTACTTACA
GACAGACTATAAACTTAGACCCCTCCCCAAAATGTTTGTCCATAAAATGATAACAAAGTGTATTGGGGTCTCCCTTCCTTAGAGTCTACAAGAA
TACAACATGTACAGATGGTCGTAAGGTGTCAATCTTAAGCCATTACATAAGCACCAGGGTGTTTCCCACAGGACATCAGAGCTGGCGTAGGTGC
CTAGGCAGTTACCCAAGCTGTGAGGAGTGGAGATGGCACTATGCTTAAAGTTACAAAATGTTATCAGTCAGATCCCGTAGACCACCTAAATGAT
GTCAGAGTTCCCGTTACACCAAAAGGCAGACACTCTCTGAGATAGAAGAACTCTTTACACCTGCCACTGGTTCTTTTTCACTTGTTTTTCCCCT
GTAGGATGCATGTTGTAATTTTATGTTTTAACAGAATAATAAATGCTTCAGATATAGACCCCTTAGAGTGGAAAGTCATAGATGACACCTAGGT
AAATCTTAGTGTGAACCTGGATTCTCTTTCAAATTGTAAGCAATAGAATCTCAAATTAGATTTTTATTTTCCTTTTATAAAATTATCCTTCAAA
GCCATTGGTTAGAAATAGAACAAGCCAGAATTCTGTCTTTTTATTTGAGAACAGAAAGCCAAGCTAGTTCATTCCTGTTTTACTGATGAACTGA
CAGTGGCCATGAGCCAGGTCTGGCCTTTGGGTCAGCTTGATTTTTAAAGACGTACTTAAACATGTCACATGTACGTACTTTTCTTTCCTGGCTG
CTCTTTGATTTCCCAGCCCACCTGATAGAAGGCATTGTTCCTGTGGCTAACTCATGGGAAGCTGGAGAAATTGACCTTACCTGGGAAAGTATGG
GCAAGGAGATGGTGTGCTCCTGGCCTGTGCTTAAGGGTGCACTTAGCTTGTCTTCTGAAGGACTCAGTCAAGTGTCTCATCCAGTAGACAGTTG
AAAGCCTACTCCAAGCATCCTTGGTATGGCCAGATTTTTATAGCCTCTAAGATGGAATTTAATCTAATTTCTCTCAGGCTTTTCCTTTATCTAA
GGGACAGCTGTTGGATACTCAGGCCAATTCTAAATCCTAGACTGTCATGACTTAAATAAGAGCCCAGAGCTTTCTGGTGTAAATTCACAATTAT
ATGCATAAGCCATAAAAAGAGTGATACATATCAAATGGGAAAAGTTAGTGAATTATTAAACAGCTGTGAGTAAACTTGCTTTTCCTTAAATACT
TGACAGAGTCCTTGCCATTATCTTTGCTCGTAAGAACTACTTTAAGGTTTCAAAATTTAAAGTCTGATTTTATGCACAAAGTTGCTGGTCAAAA
TTATTTTTCCCATCAAAAGAGTACCTTTGGATTGACTTACTGTTGTGGGGTATCTGTAGGTACCTGGAATGGAAATACAAAAGTAGCCATAAAG
ACCCTTAAGCCAGGCACCATGTCTCCGGAGTCCTTCCTGGAGGAGGCGCAGATCATGAAGAAGCTGAAGCATGACAAGCTGGTGCAGCTCTACG
CGGTCGTGTCTGAGGAGCCCATTTACATCGTCACGGAGTACATGAGCAAAGGTCAGCCGCACCCCTCCCCCTCCCCTCCTCTCNNNNNNNNNNN
NNNNNNNNNTCCCTCCTCCCCTCCTCTCCCTCCTCCCCTCACAGGGCTGCCGGGGACCGGAATCCTCAGGGATTCCACTCTGCTCACTCAGGAT
AACACTTAGAAAAGGGGAACATGGAGTTTGCCCCTGGATTCCTGAGAAGTGCAGTGCCTTTTGCATGTTCCACATCAGGAACGTTCCTCTGCAC
AGTTAAAACATCCATCTTTCTATCCAAGCTAATGCAGAGCTGAGGCTGTGAGAGCTGCTGCCATTTTGAATGGGTGGCTTCTGTTCGGTTTCCC
TTTTTAGCGCTAAGTAATCAATAGCAGATGGTTGCTGAGTTAAGTTCTGTCCCCATCTCAACATCCTTCCCCCCAGCTTTCCCCTTAAACATCA
GGTGAAGAGGTGACACGCAGTCATGACCTCCCTCCCTCCCCTCTCGGCGCATGCATGTGTTGACGCACACGTGAGCATGCGTACATCATTATAA
TCAAACCGGCATTGTTGGGGAATGAAGCCAGAGATCATTTTGTTTTGGAAAAATAAATGAGCCAAACAAGAAACAGCCTTAAAAGGCTGTGTGC
ATTGTACATCAGAAGACACCAGGGTAATTTTTCTTCTCTGTGTACTTTCTTTTAAAATATAATTGGAATTTTTTCCTGGCAGATTATATGCCCT
TTGGATCCAGGGTTATTTTGTAAATAACTTTGTGATTAAAGCATTAAAAAAAAAAAAAAAAAAAAAAAAACACTGACAGCCATCCAGCCCCTGC
AAATGATTATCTCCGCCTCGGTGTCAGATCCGTGCCTCCTCACTCAGCCTCACACGAGTGGCTCTGAAGCTCTGGCTGTCCGAGGCACAGGCGT
GACTGGCTGGGATCTAATTAGGAAGCTCCTGCCCCACCCATATTCCTTGGATGCTTAAAATCTGAAAATAAGTCAGCAGTTCTGAAAGTCCCTT
GTACCTGAGGCACCTAGAGAGCTTCTAAAAATACGGGCATCTGTGTCTGACTCTGGGATTCCTGATGTAGTGGATAGAGCCTGAGGACACGCCC
TTCCAGCAAATACTGTCACTACTGTTGCTACTTGTCGGAGCCTCAGCCTGCTCACCTGAGCTGGCTCTCCACATCAGTCGCCTGTACGTCGTCG
GTTACTGGGACATGAAGGATGGTTTGGTTCCTCCTGGTGACAACATAAAAGGAGACGTTCATTTCTTCTGGTTTTACTAACTCCTTTCTCACTG
CTTATTTTCAGAAGCTACAACTCGCTTCTTAAAACATAAACTTGATTTCTTGGTTTTTGTTCAAAGCTTTCTTTTTCCATTGATGCAATTATCC
TTTTCATCTCCCTTTTACTTCCACTAAGGAAATCAAATACAGCCACTATTGAGAATCTTTGCCTCTCTGAGTAAACTAAAATTGTTTTGTTTCA
TTCATAGGAAGTTTGCTTGACTTCTTAAAAGATGGTGAAGGAAGAGCTCTGAAGTTGCCAAACCTTGTGGACATGGCGGCACAGGTGGGCCTGG
GGTCTTAATTCAGGCTGTGGCTGTACCAGCACGGACTCTCAAGGTGTTGTGGTGTAACAGCTGTGCCCCCTTCCCTGGGTTTCCACAGGTTGCT
GCAGGAATGGCTTACATCGAGCGCATGAATTATATCCACAGAGATCTGCGATCAGCAAACATTCTAGTGGGGAATGGACTAATTTGCAAGATTG
CTGACTTTGGATTGGCTCGGTTGATTGAAGACAATGAATACACAGCAAGACAAGGTGGGCACTTCCAGGGCAGTGGCTCCTGATTGATCTTTGC
CTGCACAGCCTTCTCCTTACCTTCATTTCCTCCCTCTTCCCTTTGTTTGTCTGATCTGGCGCGAGCTGCACAGTTCTCAGGTGGGAGCTAGTGG
ATCTAGTTGGCGTGTGCAGTGCTGGTCTAGTAAGTGGGCGTCTGTTCCCATGGCTTGCCTGGCTTTTGGGAAGTATCTAGGCCCACGGTGTTCC
ACTTTTGGAGAAAGAAGGCTTTGAGAAGCCAAGTTATAGCTCATTCTCCATTAGCCACCTCTGAGCAGAAATCAGGTGACACTCCAAGTCAGAC
AAGTTCCTTTACAAAGGAACAGGCGTGGTGTTGGAAAACGGAGAACATAATAAATAGCAGGGGAGCCAAGGCTCAGAATGCAACAGGAGTAGGT
AGCGCCAGAGCAAAGACACCTCCTGGTAGAGAGCCTGCACATGGAGGCGATTCCTGATCTCAGTCAGCAGCTGCCTGCCAGGCCCAGCCAGGAC
CAGCTGGGACCAGCCTGAGACTGAGCTCTGCAGAGCGCTGAGGAGAAAAGAAATGGTCTGGAGGGCCTGGACCACTGCAGTGCTGGAGAAGCCG
TCTCTTCTCCTGCCTCACCCACCCCCTGCAAAGGGTCAAAGACATTAGTTTTATGTAAACCACGTACCAGACCAGAAGCCAACCCACTTGGGGA
GGAGGGATTGTTTGTCAAGCACCAGATGTCAGGAAAGAATTCCCAAGGTGTTTTCTGCCTTCCTGGCTGGCTGCTTGCATGGCAGTGTCCAGGC
ATAGCACTGAGGAACTAGCAACAGTGGAGGCCTCTGTGTGGGTTTTAAAGCCGGAACTCAGGCAGGGAGTAGGTTTCCTTGGTGAAACTAACCG
AAGCCTGGCCACCCCAGCCAAGCTGAGCAGTAGTGGGGATGGATTACAGGATGGTGCATTCTGCAGTTTTATGTTGAATAGTAGTTGTTTCGCT
CATTTTTGGCAATTCCTTCCGCCTTTCACTTGCCTCAGAATGGAAGTGCAGTGAATGATGTGAGAAAATGTTAAACTGGGGCCCTGCCTAGGTA
CTGACACTATCCAAGTGCTCGGTTGCATGTCGGACAAACCGCCCAGCTATTTGAATTCCCCACTCCCACCCCTGGCACACGCCATCTCTTGCCC
TTGTGGGATCCTGGGGGGTACGGGGGGGGGGGGTATGCACACAGACACACACCCAAAGTCAGGGGTCACAAAAGCAGGCTGTATCTCTAAGCAG
AGAGGAATACAGACGTGACTTGGTGACAGGGCATGCCAAGAGGGTCTGAGTGAATATGATCAGAGGCCTTGCCCTGAGGGAGAGCCTGTGAGGG
TTGATAACCAGCATGTTCCATTTAGGAAATGGCTCCAAAGAAACTCAGGAGCTTCCGTCTGTGTGTGAGAAAGTCTCCGTGGCAGAGGGAGCAG
TGCAAGACTGTTTACTTTTAACTAGACTTTGAACTCTGTAGAGTCTATGGTTAACACCCTTGACCCATCTGTGAATGAGAGGTGTCAGGCCAGG
AGCTAACAGATGCTACCAGAGTACTGTTGGGATGGACTGGGTACATAAGTCATGCATCATTCATAAGGGTGCCTAAGACTGTGGCCTCAGGCGG
CTGGCACCTCTCATGTCAGGTTCTGCACTGGAACCCATCCAGGGCCCTCTCAGCCTGGCCATGCAGCCTTCCTTCCCACTTCCCACCATGACTG
CCTCTCTGCCCTGCCTCCCCCCCATGACATCCAGACCACAGTCTGAGGCCCTTTCCAAGGACAAGCCTCAGTCCTTTGTTCAGCATTTCCTTGA
CAGAAGAGTCCACCTTTCCCTCTTAGAATATTATTTCTTCTTTCTTATCTTTGTCAACTGTCTTCAGATGCATACCAAACACTGAAAAGGGTAA
GCAATAAGGGTTACAGGAGCTAGAGTATGACAGGAGAGACGGGCAGTCTGTGCTGTCCTGAAGCTGAGAACCAGGAAAGGCCAAGGCACGTCAG
GACCTGGAAGGGGCAGGAAATAGACCCATAGTTAGCATATTTGTTCATACAAATCACAAAGCTCACAAGTGGAAGGTCCGGATTTGAAAACAGT
ACAGCCCACCTGACCAGGTGTGCTCTTGAGCTGTGCCCACTGTCTCCCCCCAAGACAGTGAATCAGAGAATAGAATGGAAAACCAGAGAGAATT
AGTCCTAAGTCCCACTTCCCCTTTATTTTATGGAAAAAGCCTCAAGGGACAACCTCTCAGATTCACATGTGTCAGGGGACCAGAGAGACTTTTC
CTTTTGCAGCCTTGGCTAGCCCAGCTGTTCCTACAGTTCCTTCACTGTGCCTGCCCTGCCCTGGCCTGTCCACGAGATGGAAAGGTCCGGCATG
TGTTTGCCAATGTATTCTGCAGATGGCATGTGTGCTGCATGCCGGCGTTCCTGCCGGGGATTAATAAGCTCCTCTAGACAGCTGGTCCATGTGC
CTAATAATATTTGCAAGTCGGGTTTTATGTCACCCGCAGGCCACAGCCGTGCCGCGTGTTGATTATGGGAGTGCAGGCAGTGTTCTGAAACATG
TGCCAAATGTAGCTATTTTAGGACCATGAATGACAAATTGTTTGCAAAACAGTTGTGAGTTTCCCATCTCAAGGTGCTCTGAAATGTCTGTCAC
CACGGACAGACACACACACAAGGTGTGACAGCACAGGACACAAGGACACTGCAGTATGGAGCTCTGTTACAGGTCTTCCATGTGTCTTTGTCTC
CTACAAGCCCCATACTCACCCCCTGCCTGCCTGGCTTGTGAGGAGAAGCCCAGTGTCAAAGAAGAATTCAAGACCAGGCCTAGTGCCTATGAAG
GTTACCCTTCACTTGACAGCATTCTAGAAGCAACTAGAATCATTTGGGGTTCCTTGTAATGGCCTGGACACTTCAAAATAAGAACTAGTTCTTG
TTTAGTCATAAGCTCTGCACTAAATTCTGTCCATCTGGAGTCGCTTAAATAATCCATAGCAAGTGTTTGAATAGTTTGTTTATCAAAGGAACTT
GGCTAAAAGTTGTTAAGGAGATACCCAGGCCAAAGCAGAGGCCCTGTGTGGTCTCAGCTCCTCTGGGGACTGAAGAGGGAAGATCTCATCAGCC
CAGGAGTTCGAGACTGGCATGCACAAAACTGTAAGATTCCACGTCGAAGGAAGAAAGGAGGGAGGGGGGAACGCAGAGGAAGCCTAAGGGCACA
TAAGGACAGTTGGCTAGCATGAGAAAGAACACAAGAACATTAAACTCATGCAGCAAAGCCCAGCAATACCCACTGACTTGGGCCCTGGGCAAGC
TGGGTGATTCGTCCATGGGCAGATTACTTATTTTTAACTGCAAATGCATCTTCCCTGTCTGTGCGTGTTTGCAGCTACTGGAAAGCACTTGTGT
GTCTAACCTAGCCCCAGCGAGTAGGAACTGGACAGTGTCGCTTGCTGCTGTTCTGTTTTTACTATACAGAGGACCAGGCTGCTAGAGAATAAAC
AAATGGGTAGGTTGCAGTTGTACTGGAAAGAGCCAATTACCATTCAGGGTTAAAAAAGAAGCTAAAGGCCCTTTCCAGGAGGCAGGTGTAGGCT
ATGGTTAGAGTGGCACTGTCAGCAGCAGAGAAGGGAGAACGTCGGGGCCATCTTAACATCTCAGCGAGAGAGAATGAGTATGAGTTGGGATTTG
TTGTATTTGAGGTGTCTGTGCCGGTGCATCTAAGCCCAGAGAAGCTGCTGCAGCATCGCAGCTGATCCACTGCCACAGCAGGGTCCTCTGACCC
TCATCCTTCCCACTCTGTCACCTACGCCTCTCCTAGAACTCTACTGACAGCCACCTCTCTACCCCCAGTCCCACGATCCTTCCAGAAGTTACTG
GAGCCCCCAGCTGGGCCCAGGGCTTCGAGGTGAGGCTGTGCTCTTGAGCCACACCCTCTCCTCAGCATCAGTTGTTTGCTCCTCTGTCACAGCC
CCTGGCCATCCGTTCCTTCTCATGGAAAATGAAAATGGGTGGGAGAACTCTCCACAGACTTGGTCTTTTTCCTCATTCCTCAAGCAGCTGAGAG
CTGGCTAATGCTGATTTGAACCTGGCACACTCAGCTCAGCTAGACCTGGCCATGTTTAGCAATGACTTGCTCTTGTGGACACTTGATTTCTCTT
CTCTTCTCTTCTCTTTCTCTTATCTTCTCTTCTCTTCTCTTCTCTTTTTTTTTTCTATTTTCTTTTTTAAAATTTACATTCATCCAGTAAAGTA
GACAAATCTGGTATGCAACTGGGTATGTGTTTACATAGTTTTGAAAGCACCTCACAGAGAAAGACAGACCTATAAAGACCATTTCATTCCACTC
TAGTCCACAATCGGCCCCAGAGAGGGCTGTTTTCTGTTGCTTCAGATTCCCTCTCCCTGTAAGGAAGTTCATGAGTGTGACTTCACAGATCCCT
TCCTTAGTAAGCCACCACTCTCAGGAATAGCCTCGCCTAGCCGTGACGTACTCTTTGATCTGCTTCTTGCTTCCTGTAACAGGCCTTGGCTTCT
CACAGCAGACTGATATTTCACTGAGCAGAGGTACCATGTGCCCCATCACTGTACGGAGGAGCAGTAGGGCAAACTCTACTTGGGCTGGTACAGA
TGAAGCTGCCGGGCGGGAGACACACCCCTATCTCCCGGGTACTCACCCTGTCAGAAGGGCTGGTACTGGCTTGTCAGCAGCAGGTGCTGTCCCA
AGAACACCGATTTAAAAGGCAACTGCAGCTAGGTGACTTGCCTGGTTTGGAAATCAGAACCCCCAGGTTTAAACCACTTCTGTCACTGACACAC
AGGGTGGCCTCAAGCAAATCAGCTACCTCTTTGGAGCATCATGTTTATCCTCTGTAAAATAGATAGTAACAGGGCCTGCCTCACATGGATACTA
TATGATTGAGTAAGCAATCTATAAAAATTTGAGGGTGGTAAAATATGAAGAATTATTTTAAAACTTCAATTTTTTGTGATTGACATGTTTTCCA
TAGAGAGGGTTTTATGGTATTAAAAATCATTTAAAGAGAAAAAAATGTTAGTAATCAATAGAGGAAAGGTACTTATAAAGCCATAATACACAGC
CAGATAGGTGGATGATTGATTGATTGACTGATTGATAGATGATAGATAGGTGAGTGGATGTGTGTGGAATGTGTGCATATGAATGTGCATGTGT
ACAAGAGCACACACATATCATTATTTATAGCCCAGACCAGTCTATTTTTCTGGTTCTATCTACATGTCCCACAGACCCTCTGTTCTGAACTCAA
CGAAGGGAGAGTCAACTAACCCTGCCCCTCCATTGTCTTGGGCAGGCCTTCATTCTTTCCTCCTGTTAAGAACCATTCATGGCTGGGTGGGTAT
GGTGGTACACACCTTTAATCTCAGCACTAGGAAGTCAAAGGCAGGCAGATCTATTGAGTTTGAGGCCAGCCTGGTCTGAGTTCCAGGGCAACCA
GGGCTACATAGAGAGACTGCCCACTCCCACCCCCACCCTCACCCCCACCCCCAAAAAAGAAAGAAAAGAACTATCCACAGCCCCGAGCTGCATG
CACATGGTTTTTATTTATATTTATTATATATCATTATTGTGTCTGACATCACATATGTACATAAGTTCTCACATGAATCCTGGTAGCAATTCTC
CTGGATATCACTAACACAGGTCTCGCTGTTCCTCTGTGGGGATGGGGGCCTAAAGACTGAATACAGCCCTCATGAGCACGGAACATTTATTGGC
ACTGTCTGTGTACAGCAGTGGACATAGCTCTTATCACTGCCCTTCTCCTCGCTCTCTGCAGACACACTTTTCTGCTCTCTGTGCAGTATGTACA
GGCTTCCCAGAAATGGAGTGCTAGAATTCTGTAATCCTGCAAGAACCCTTAGAGAAGGTTGTTGCTTATGTCGGTGTTTGCTGCACACTGTGAG
CTGGTCTCTGGGGGAAGTTCAGGAGCTAGCTTCCCAGCTAGATAGACCTGTGCTCAGATGCTAGCCTAGCTCTGCCTTCCCTTGGGTTGCAGCC
TCTCTGGGCCTCAGCATAGTCATCTGGGACCCCCTCTCTGGTGGCTGTGGCTTAGAAAGGGCAGAGCTGTTTGGTGTCCTTTGCTTCTGTTCTC
CCTCACAGGACTTTCTCCTCCCAGACCTCCTACCTCCTTTCTCTGTATTCCTCACTCTGTTCAAAAAGATGGCCAGGCCTGGGCTGACTCTGAG
CCTGGCCGGAGAAGTCGTGGCATTATCTTAGTATGAGTCCTGGAATCTCTGCAGATCTGCTCGGGCACCTGGGATAAGTTGCTTTGAACCTGCC
TTCTTCTGCAAACAAAATTGTCACACGGTCTGAGAACAGACAGGAAGCACTCACCACAGAGGACTTAGTGCAGTTGGCAGTGGCATTAACAAAA
GCAGTGATAAGTTGACCCTATAGACACATACAGCCGTCCTCTGCATACACGCCCACAGATAGTACCCACGAGCCATGCTGTACAGGGCCTTCCC
ACTGCCTCCTGCCAGGCCTTGTCCCCATTTGAATCATGAAGAGCAGGAACATGGAGTTTCTCTGTGGGTTTGGTGGGTTGGTTGATTTGTTCCA
AGGCAGCAACCAAACGAGCATATAGGAAACACATGTCAAAACGATGTAATCTTTGAGTCTGTGGACTATTTGGACAAAAGGAGAACACTCAGAA
CTCTGGGTAACTTTGTTACTGGTTTATATATTAAGTAGAACAAGAAAAATGTGTCTGTTCAAATACTCCCAGTATTGAGCATTTAAATTGAATA
GATTATTGTCTAGAGTAAAATTCACTTATAAATTAGACTACAAAGAATTCATAATTGTTACAGTTTCCATGTTCATTCGTTCACGTTAAAAATT
GTTACTGCATAAATTAACACGTTCTTTCTTGGAGAACATATTTTAGAAAGATTTGTTACTTTAATAACTCTTTGTGTATTAGAAATCCCAGATG
CCGGTGCTAATTAAATGTAATCAGATTTTGGATTCAAAAAGCACAGTAGCCATTTAGCACAAAGGAGCAGGCAGCTAGGTTGACAAACACGGTC
AGGAAGGACTGGGTCCCTGATTCTTTTAGCTTTCCAGTTTCACAATGCAGAGCTGTGAATGCAGTTCCTGTCTTTCCTTTGTTCTGATGACTGG
GGATTATTAGACTCAGGCCGCCCCCCGCTGTTCCAGCTCAAGGACTCCTGCAGAATTATTAATCAGCTGCTTCAGAGGCCCTGTAATCCAGTGG
CAGATCAAGGCTGATCTCACCACGAGGTGCCCTCCCTCTGCTCCCCTCAGCGTATGAATTTCTTGTTCTCTGTCAACAACAGCATCGCCATTCC
CACACTGTGTGCTGTGACCTGAACAGCAAATGTCAGCAGAGAAGGGGGGAGGTGGAATCCTGTTAATTGTTGAATTTAATTTAATTCTTTCCTT
GCTAAAGAACTGAACCCATCTTTTAAGAAAAGCAAACCTCTTCCCGTCTCTTATTCCCCAGGCAGAGCTTTTAAAAGGCTGTAGTGAAGTGACC
AGGCCACACCACCCCACAGGCCCACACGGGGAGTTTATCATCCCCAGAGCTGCCAGAAGCCATGTGCTGAGCCCCACGTGCAGAACTGAGCCAA
GCTGCCTCCCTGAACTGTCCAGGGCCAGAGTTTGGTGCACCTCTGTCCCTGGGCAGAAGTCGGCTTCATTTGTATTCCGCTGCCTCTGTCTCTA
GGCTTCCTACCACTGGTGTCTCTGGGAGGGACAGCTTTGTTCATCTGCTGTAGCTTCCGCCTAGATTAGTAGTCAGGGGAGCAGGGCAGATGCT
GGGAAATGGAGATGAACTGTTGGGAGCATCATCCCCTCCTAGCAAGGCTGTGCTGACAGCCAGATGAAATAAACGAAGGGGGCTTTTAAATCAC
TCATTTCTCCCTAGTCCCTTTTAAGATTAAAAATGCTTGCAGGGTGGCAGGAAACTGATTTCTACCACTTCCATCCTTGGACAGCTCTGTGAGG
TGGCCTAGGGAATGCAGACAGGGCCTGGTGCCAGCACAGGTCCCTGAGCCGACTCTGAGCACCTTCCTCTGTCTGCCCAGCCCACCAGTAGTCC
TGCTTTGTGCTCACAGGGGCATCGTCCTCTCCTCTGTGCTGTTTTGGGCAGAGCTGCCTGGCAGTTGTTTATGAATGGTCAGGAGCAAGCCCTC
ACTTTGTACAGCCCACGTTTCTTGGTAATCGTCACTAAGGAAGCAGATGGTCACCCTCTGTGATTTTAAAGTGTTTAAATAGGAACTGCAGACT
GCCATCAAACATCAGAAACGTCTTCTGGCTTCCTTGTCGTACTCTGCTGGCTGGCAGAAGGAGCCTGCATTTGCATCAGCTGGAGAGTGAGGGA
CAGGCAGAGCACATGCACACTGCCTGCAGCTACGAGCCTTTCTCCTAACCAAAGGAAGGTACCTGGGCCCAACACACTGCTCTCCACAGGGTCC
CAGAAACATAGGCACTTTGCCAGATTGGAAAGCAGAAGACAGTTTAAACCAACCTGTGGTCATGCTTGTCTTCTGTACGTCCCCTCCTCTTGGG
ACGTTTTTTCTAGACTCAGAGCCAAGCCCCAGTATGATGAGCCTGTCCCACTCAGTATCCCCACTGTCCACACTGCCTAGCACAGTGTGGCCTG
GCGTCGCCCAGGTCCCTCTGGTGGGTGGCTCACTCTGTCTGTGTTCTGCTACATTCTTAACCGAGTAATGGGCCTGCCAAGAACCCTCTCTATC
CATGCTCACTGTTCAGCCCCCGGGGAGCTTGCTCACGCTTTCAGCTTGAACGTTTCTTCCATGGATTTATCCCAAACAGACCTTGGATCTGCGC
CTAGTTAATCAGCCCAGAGTTTTACATTATGTTCAGGCCCAACTCCTGTCTCCTGGCACTCAGGTTTCACTCATCTCTCCCCTCTCAGAGTCCC
TGATGAGACAGCACTGTCTTAATCCTTGTCACCTTCTCTGTCAGACTCCTTCCTCCACGCCCCATCCCCAGCCCCGTAAGCTAAAAATTTCAAA
TGGAATATCAATCATCCTTTCGTGCAGCTGGATTTTCCTTTATATTTATTCTCAAAACATGACGCTAAACTCTATGAACTTAGAGTGGAAATTT
CAGCAGAATATGTTACCAGGGGTAACTGGAAACACTCAGTTTATGATTTCAGAAGCATTTGGGAAATTTGAACGTCATCCTTGGCCTATTATGA
GAATTAGGAGTTTTCCTCTGCCAAATTTGACCGGGTTTGAAATTATTATTGTACTTGAATCACCACCAAATTCCAGGTTGGGTCAGCTTTGCTT
CAGCTCCTAACACAGGATATCCTGTCCTAGACTTCTTGCTGTCTCCACCATCCAGTCAGCTTACTGTTACTGCCATAGTCATGGCTGCTGTTCT
TCTCTAGGGTGACTGTACAGTCAAAGTACTACATACTGTTCAGCATTGTATAGGATAATTCGCACAGTCTGTGGCTTTGGAGTTAAAGAGGCTT
TGGGGGTGGCTCTTTGGTTTAGAAACCTAGGCTCTATTGTTGAAGCCAGTGCATTGGATGGCTTCCTCTGCTGCCCTGGTTCTTTGGATCGCTT
CCTCCGATGCCCTGCTTCTTTAGCTGGAGGAGATAATCTCTGAGACAGTGCAGTGGAACTGTCACCGACAGTCCCAGGCTGGACTGAGCTTGTG
GTGTGTGATGGCCCCAACAGGCTTGTATTGACCCCAGCTGTGATCCGTTCTGTGTCTGGGGAAGTCATGAGTCACACTGGTCCCTTCTCTGTCC
CCCATCTCCCTCATCTCCTCCATGGCCCGAGCCATCATCTTCGAGACAAACCACTTTGTAGCTCTGTAGGTTCAGCCCAGTAGCTGCATTCCTC
CAGCTTTAGAACATTCCTACAGGAGGCTCCCTCCTCCTGGCGACCCTGGAGTGCCCCACGCTGTGCTCAGGGACTCGGCGGCTCCCTCCTCCTG
GCGACCCTGGAGTGCCCCACGCTGTGCTCAGGGACTCAGTGGCTCCCTCCTCCTGGCGACCCTGGAGTGCCCCACGCTGTGCTCAGGGACTCGG
CGGAGGACACTTGGAATTCTCGGTGGCTGATGGATGAGTGTGGGGATTCTCTGCATCCTCTTTCCAGCTTTTGGAAGTTTCGAAGGGCAGTGAT
GCTGAGGGCCTTTGTCAGTGCAACTCCATCAAAGCATTTTCTCAGCTCTCAGCTTGTTACTTACTGGGCATCAGACACTCTGCTGAGACCTGTG
TACCTCCTGCCATCCCAAGTTACAGACAGGAAACTAACACTGGGGCTTTTTTTTTTTTTTTTTTTTTTGGTTTTTCAAGACAGGGTTTCTCTGT
GTAGCCCTGGCTGTCCTGGAACTCACTTTGTAGATCAGGCTGGCCTGGAACTCAGAAACCCGCCTGCCTCTGCCTCCCAAGTGCTGGGATTAAA
GGCATGCGCCACCACTGCCCGGCTGACAATTGGGCTTTTAAGGGTCTGGCAAACCCAGTCTGCAAGCCCAGGTTTGCCTCACTCCAAAACTCCT
TTTCTTCATTTATTTTAACGTCATTAAATTCCGTCTTTACCAGCTCCACTCGTATCTGCAGAGCCTGATTTCTACATGACCATTCTTGCCCTTT
GGAAGAACATTCTAGCCCAGCCCACCGTCGGGCTTGCTGCCACTGTCACTACAGAGAGGTGGTCCTTTTTCCTAGCTCTTCCTTTTACATCATT
CAGAAAGCAGCCTTGGGACAAAAGGTATCTGGAGTGTCCCTGTGAGCATTTCAAACATTGTCACCATCTTAACGTATGAAGGAGAGTCCGCTAC
AGGAAGCTACTAAGTCAAGACCCGTTTCTGTCTGAGGCAGAAGTAGAGGACAGGTTTCCTGGCTGACCATTGGGCATGCAGCCATTCCTTTAAC
TGGACTGTGACTTGGGCTTGGAGTGGCCCATCCTGATGTGACTCTAACCGGACATCGCGTCTTCACTTAAAGCAGAGAGCACTAGGCTGGGTAG
GCTGAGAAAAGCCATCATCTCTTACATTATTATATCGCTAGTATTTTCTTTGTAGTCAGTTTTTTTTTTGTTGTTGTTGTTTTGGGGTTTTTTT
TTGTTTTTTGTTTTTTTGGGTTTTTTGTTTTGTTTTGTTTTGTTTTTTTTAAATCTTGGTCAAAGAAGACAACATATTTGGCCATTGGGGATTG
AGTAAGTCACTGCTCAAGTGGGCCTTTGTTGTTTTGTTGTTGTCGCTGCTGCTGCTGAGCAGTTGTGGTTTAACAGCTTTAGCCAAAGTACTGG
GACAGTGTAAGTATAGAATACGCCAACCTTGAAGGTCTGCGCTGTGCTCGGAGCTACACTCAGCAGCATGGAGCACGGGGTCTAAGTGCTCTGA
CGCTGCAGCCAGTCTCCTTCCACACATCCCGTTTCCATGCCTTACACTTGTTCCTCGACGTGTTGTTCTCTCAGCTGAAGAACAGAAACGTCTG
CGTGTGTCAGATGTGCGGCACACAGAGCTAGTACCGATGATCTGTTCCATAATAGCAGGCGCTTGTAGTGTCCAGCATTAAATTGCCACTTCTG
ATCAGGTTCCTCCCAGAAGACTTCAGGAAGAAGTCTTGAGGAGACAGACAGAAGGCTGCAGCTAGGCAAGTGGAGGGAAAGATGGCATTTCAAA
CAAGCCGATACAACAGAAGGTCTGTGATCACGCCAGGTGTGGTACCTGCTACAGGAGCGAAACGCAAACTAACCTGGATTAGCTGTATGTTTGC
AATAGGAAAAACCGAGGCTGACTGGATATGTGCGCCCTGGAAACCAGGTGGTGGATTCTGATTTAATTCAGTTGGGACCCTCCCACATGGCTAC
AGAAGCTGCCATTTACAAGGATTAATTGGAGGGGCACTGCTGAAGGCTAGGTACCAAGGCAGGGGGACTCGGCAGGGGCACTGCTGAAGGCTAG
GTACCGAGGCAGGAGGACTCAGCGGGACTGGTGACTAGAATCTGGGTAATTTTGAGAGACAGGTCAAAGAGCAGAACCAAGGTGCCAGGTTAAC
AGCAAGAGGACAGTGGTCTGGAAAGAGCAAGGGGAAGAAAAGTCCCAGCTTAAGGTTTCTGCCCTGAAGCCTAGCAACACAGTGACCAAACCCC
AGAAAGGGATAGTAAAACACAAACAAATGAAGGGATTTTGTTCCTTTCTTAGATGTAAAAAGTAAGAATTAATTTCTTTTTTTCCATTTTTTAT
TAGATACTTTCTTTATTTACATTTCAAGTGTTATCCCCTTTCCTGGTTTCCCCTCCCAAAAAAAAAAAAAAAAAAAAAAAAAAAAACCCTTTCC
CCATCCCCTTCTCCCTCCTCAAAAAAAATTAATTTCTAACTCAGTCATTTGGTGACATTTTTCTGCCCACTGCAAGACTCTCTTATAATCTTGC
ACATAGTAAGATGATATACTGAACAATAAATTAAGCTTACAGTTGCTGTATTTTAGGTAAAGCCAGGAGACCCTAGAAACCCATAAATATTTGG
AAATAAAGAGCCAGGAGTTCAAATGAGAAACATCTGAATGTGCCCATCCCCCTCACACACGCAGCAGGAAAAATTAGTGACAAGAGAGGACATA
GTGGAGAGAAGAGTCGGGAACACTGAAGCCCCAATGGCTGTGGTTAGAGTGAGTGGAAGAAAATTGGACATTGGAGACGAGAGAGACAGGAAGA
GGCTATGCGTAGATCAGATGCTAGGCCTGTGGGGAAAACTCCAGGCTCACTTATGGTGGGAAGGAGAGAGCAAGCCAGCTCAGCAGCGGTCAGG
TGGGGTCTTGTTGTTGTTACTGTTCTTAGGGACAAACTTAGGTAATTGAGTAAGACCTGCCATGCCTCTTCCCCTGACTAGGCACACAGATGAT
TACAAACCTGCTTCGATGGTAAGGACCAGTGCCCAGCAAGCCAGAAATGACTACTGCCCACTTCGTCTTGCTATGACTACTGCAAGGCCCCCTG
TTGCCTGCTCTTTCTGCCACCAAAACCACTAACATCCCAGTAGCAGCCCAGGAACTGCCCCCTCCCTGGTCCCCTGAAGCATAGCTATGGCTCC
CTCTACATCTCTCAGATTCACTCTGACACTAAGGGGCTCTGAGTACTCTGCATTTGGTATTAAAATTCGGAATCTGCAAGTGTTTAGGTTTCAT
TAGTGTGTGGCAGATGCTTTCTCATTGTAGTTAATTAGCAGTTGTTAGACCCTTAAACAGCCATCCAGACATGACACTAGTACTGTCAACAAGA
ACAAGGGAAGACACCTCAGAGACAAGAGACCAAATAAGTTACCCATAGGAAACCAAGGCTAGTCAGCAGGAAGGAGAGCTGGACAGCTAACGCA
CTGCCCAGCTCTGCTCTCATCCAGTTGGTTCTCTCAGGAGTCTTCTGTGTACCAGACATGCCAGGCTCTGAGCTGGAGACACACACAGTTGTCC
CAAAGACATGTTCCAACCCTCAGAGACAGTGCTGCCAAGAGATACACTAATGATAACCTATGCATCTGTCACATTTCAAGCTATAATAACTCGG
AAAAACAGGCTGCTATGGCAGCATGGAGTTGGGGAACCTGTCCAAATGTTATTGATCAGGCAAAGTCTTTAAGCACGTAGCACTCAGGCCAAGA
GCAGAGGGGTGGGGAGGGTGGCACAGCAGGGAGTTTCATCTCCTTCTGAGTCTCTAAGCTCTCTAATTTGGCCCAAATGAAGCACTTACTCCAG
CCCCTAGCAGGACCCCTTATGTGCCCCATTGCTGGGTGACCTTAGACATACCCTTCTCAGTCTCAGGTTTTACCCCTGCACCCTGCATAGGCAT
ATGCAGAGAGACCAGGAGAAACCAACTCTCTGACATCCCACTCTCAGAACCACACTGTCAGGCCTGGGACTTTGTACCCTCTGGAGGGAGGAAG
CTAAGACAAGAGCAAATAGAAGTCGGAAACTAAGCACTGCTTACTTCTTTTCAGTAATAGCTTGTCATTGCTTCATTTTAACCTTTTGTCTTGA
AAAAGAAAACATTAATTTTATTTTTTTTTTAAAAATCTGAAAACCAATACAAACAAACAAAAACTACACCTTTAATCCTGCCAAGGCAGAGGCT
GGTGGATCTCTTGAGTTCAAGACCAGCCTCATGTATATTGTGACTTCCGGGCAGTAAGCGACACAGAGAAACCTTGTCTCAATAAACAAAAGAA
CAAACAAAAGTTGTGTTGAGGCTGGAGAGATGGCTCACTGTTCAGGCTCCAGAAGCCCTCAGTTCAGTCCCAGTACCCAAGTCAAGTGGTTTTA
CAACCTCCTATCACTCAGACTCCAAGTGAGTCCACATTCTCCTTCCGCCTCAGAGGGCACCAGCACACAAGTGCATAGACTTACACACAAATAA
AAGAAATGTTTTTAAGCTTGTGTTGAAGGTAGCTACTAAAAATATGGACAAAGCCATTCTTTAAATTTTATCCTTTTAAATACTTGTTGCTTGG
TGTGAAAAATACTTTGTCTTACAAAGCAATAATGCAAACTGACTGTATGTAAGTCCCCTCCCACCCATCACATGCATACTCACTAATGCCCTCC
TGTCAGAAACCCTCAGATGATGCAGACTCTGTTCTTTATGTAAATTTTGCGTATCTTTTTTGTCATTGTTTTGTCTTTGTTTTGTGATTTTTCT
GTGTAACAGCCTGCCTGTCCTAGAACTTGCTCTGTAGACCACGCTGGTCTAGAACTCAGAGATCCACCTGCCTCTGCCTCCCAGGTGCTGAGAT
TAAAGACATGTGCCACCACTGCCTGGTTTAATATCTTTATTATACCTTAGAAAATGAGAAAATGAGAAAGCAGATTAGTATAGCTGGCTGATAC
ATTTACTTTTTAAAACCTGAAATCTTAAAAAATCTTTACTCAGAAAATCAGAGTGAAAGCCACAGGTTACCACATCTGTAATCCCAGGACTCGA
GCCACAGAGGCAGGAAGGACCAGGAGTTGGTGGGCACAGCATCTTCAGCTACATGAGTCTGTCTCAAAGAAGGGAGACCAAGATAACTGTCTGA
ATTGTGCGTAGTTTACTGCCAGAACCCCATCCACTGGCCATTGTTGCAGGAGTCTGAGGAGGACCCCAGGATTCTTTTCCTGCCATTTATGGTA
CAGGGTTTTTATGTATGCCAGAGAGAAATATCCCATTTTACTTTAGATATTGTCAGATTATAGAGCCATGGATTGCTCTAAGTGAGGATGTATT
TAATATCTGTCCATCCATTCATTTATTTATGAACAAGAGAATTCCAGCTGAGGTGCGGTCCTGGCTGTACACTCGACACTGAGGAAAGCCTGAC
CCCCTGACCCCAGTGGCTTGGAGTTGAAGCTGGACGGACAGAATACCAAGGACAGAGAGCTGTGTAAAGAATGCTTTTAACGAAATGTTAAAAC
AAAATGACTGCTCAGAGAATCCCAGATCATGCAGGCGGTCGCCAGCACTTAAGGAAAGAGAGAAACTCACTTTAAATGGAATGCATAAGAGTGG
AAGAGAGTGATAAGCACTTGCCTGCTCCAGTGTTAGGGTGAGATGCCACAGAGAGAAATCAGAGGATTTTCTGCAATTTTGATTTCATACTGGC
ATGAAAGAGATGGAAAAGAAAATTGCATTGCTGGAAAACGCCAGGGTATATTTGTTAACATTGCTATGGTGTACTGTATTTAAAGCAAAAATGT
AATTGCTGTAATTTATCACGTCTGGCTATTAAAACCTCCATAATTTAAAGATTTTAATCATTTGCCACTTTTGCACATAGTGACTTTTCGTAGA
TGATGCTGTGACAATTCTGATTTTTATCAGCCTTTATATGCTTTGTGGCAGCTCCTAAGCATCATTAGTGTGATTTCAGCATGCTATTGTTTGC
ATAACTAATACAAAATCCTTGTGTTTTTTTCCTTTGGGCTGTTCAAGCAGTGCCCAGAACTGCTTTATAGTTGCTGACCCTAACATGAAAACGC
AGGCTGCTAGGTCCATCTTCATCTGTCCACATCTTTCTAACTCTGAGACAAGCAGGGTGGGCTGTGCCTGTCCTTTAGATGTGGAAAGCGGATT
CTTCTAATAACCAGAGACTCTTGAAAGTGTCTCTGCCTTTGAAATGAGTGTGTGTGTGTGTGTAATGTGTGTTCAGGTGTGTGTGTGTCTATGT
GTGTGTTCATTTGAATAAGAATGGTCCCCCACAGGCTCATATATTTAAATGTTAGCCATCAGACTCATAAGCTGCCATCCAGGCATGCCCTGTC
AAGATGGACAGAATGGGTAGGAGGAAGTGAGAAGTCAGCCACGGGCAAAATCATTTCCCCATGGTATGTGTAAGAAATAGAAAATATGQCCCAT
TTCAGTATAATGTATGGGCTCTATCCATTCACTCCATCCTAGGGGAAGCTGGAACTTCTGTGATTTGTGGCACCTCATAAGACCAATTTGTGAC
TTTATATACCTCAGGACACAGGAGAATAGTATGATGACCTAATCCTGTGTGTATTTATTAAAATATAGCATTATTTGAGAGAGATATGGGAGTA
TTCATGTATACATACATATTATCTTAGACACTGTTCTGTTGCTATGAGAGACACCATGACCAAGGCAACTCTTATAAAGGAAAGCATTTAATTG
CGGATGACTTACGGTTCAGAGGTTTAGTTCATTATCATCATGGTGGGAAGCATGATAGTGTGCAGTCAGATATGGTGCTGGAGCGGTAGCTGAG
AGTTCTACATGCAGATCCACAGGCATCAGGAAGAATACCACTAGCCTGCCTTGGGCTTTGAAACCCCAGAGCCCACTGACACACTCCATCCATA
AGGGCCACACCTACCCCAGCAAGGCCACACCTCCTAATCTTTATAAGTAGTGTCACTGCCTGCTGACTAAGCATTCAAATGCAGGACCCTCTGG
GGGCCATTCTTATTCAAATCACACACACACACACACACATGCACAAATCAGGAATCATACTCCAGACCAAGCACATACCATTCAGTGTGATCAT
GGAATCGTGTTCAGAAAGCTAGCTAGCTCTTCTCTTTACTGACATACAAGAGTTTTGAAGTCCAACTCTTTGAAGAAAGATTTAAAGTTATTTG
CTTAAAGTCACTGAGCCAGGCCCAGGGCATAATTCATCGCCACACCCGCTATTCCTTCACCATCTTCTTCCTGTTCTCGTCCCCCAACCTGTCC
CCTGCAGATGACTTTCCAATACTTCGTCTTCCCTCTTCACCCCAGTGTAGGATCTCCGGCTCGTGAGTAACCGCGTCTCCATTCTGCAGGTGCG
AAGTTTCCCATTAAGTGGACAGCCCCCGAAGCGGCCCTGTATGGAAGGTTCACAATCAAGTCTGACGTATGGTCTTTTGGAATCTTACTCACAG
AGCTGGTCACCAAAGGAAGAGTGCCATACCCAGGTAAGGACACAGACCCGAGAAACGGTTTGTCTGTTGGGTTCTATTTTAACTTCATTTTACA
GGAGTCTTGCCCAGCTGCCTTTCTAAGCCCTGTGCTCAGCCTTCTGCCAAGGTATTTAGCCAGGGGAATGCAGAACTCAGAATTGCCGTGACCT
GTACACCAAATTCAATGTGCTAAGCAGCTGGTATAAATGTTCCAGTTCCCACAGGTCATGGAATTTGTCCTGTCTCAGTAGGTGCATGTGTCAT
GGCTCCCACAGCAGAAATGTCCCTGGCAGAGCCTGTGCCCAAATGGAGCTTGTAGACACGTCTGGGAAAGGGAAGGAGAAAGGGTCCTGTTGCC
TTTTGATCTCGTAGCACTGACCCACAGAGCAAGCCTGGCAGGAAGATGCCCGTCCTGTTCTCTCTGAGGCTCCAGCCCCAGATGGCCCCAGGCG
GAGGTGCAGGAAAGGCAGTTTAGGCTGACCAACCCATTCTCTGCCTGTGGCTGAATGGCCAAGATACACAAAATGGAGTGTATTATGAGGGTGC
GGGGGCCTCTGGGAGCCTGCAGTTGTTCTGGGCTGTCAGATGCTCCCTCTGTGAAGAAGCTGTGGGTTAAGGTTGCCCATGCTTAAATTCATTA
ACTTAGCCAGACGGAGACATAAAGGACACGCACCATTTCGCCTCCACACTTTACTGGTTTCAGGGCAGGGACGGTCTGCTTTGTGAAATGTTAA
GGACATATTTTTCAGTTACTGCTGAGCAAAGAAAGAGCATAGCTGGCTCACTCCCTTCATTCCCTGCCTCTTAAAAAGGGAGAAAAGAAAAGGC
CCACAGTGATGGCACCGATAGTAGAGATTAATGAGGAATGTAGGGCTCTTGCAAATCCTGGGCTTGTAATCATATCTCTGCAGTCAGAGGAGCC
AGCGAGAGCCGATTAATTTGTAATCCCTTTGTTCATTTTGTCTGATTGTTTCTGGTCATCATCAGAGAACAGAGAAGTGTTCATAAAGAGCCCC
TCTGTCTAGGCTAGTACAGCCTCAAGACCTCTAAGGGAGGAAGATTGGCACTGAGGCAGGATTCACAAGTGCCAGGCTCTGAAGCCCCAGCCCA
GCATTGGGAGGTGTGGGTGTGTGCGTCTTCTTTATTGCTGCTGCTGCTGCTGCTGTGGCTGCGGCTGCTGCAGCGGCTGCTGCTTCCGGCATGC
ACAAGTGGGCAGACACTCTGGGAATAGTCAACTGGCAGAGAAGAAAGGGCTGCCCAGGAGGGGGTGGGGCCCAGCAGGGGTGCTTTTGAATTGC
TTCTCAAGGATGAAAATATACCGTCTCCAGGTTTTAAAAGTGAGAAGGCACTTTTTAAAAATTATTATTGTCTATATTTTGAACTAATTTCTTC
CTGATCTCCCCAGGTTTATAGACACCCGGTGTGTTAAAAGCAATCACAGGAAAAGGTTAATGTTGTTTTGCATTTCCGTGAAGCTTTCTCTTAC
AGTAACACAAAGATGCTTTTTGTTCTTGGGTCACACACACACACACACACACACACACACACACAGAGGCCAAGACAAAGAGGTGGGTGTGGGG
GCTCAGAAGAGGAAGTATTTGGAGACCGGGGTTTTGTCAGGTTGGGTTTTAGCACAAAGAAAATAACCTAGGTTTACAAGTCTGAGTGGATGCC
TTCACTCAGCATCATTTTGTGTGGCCTGGCCTAGCATTTGTTCCCTTGGGAAGTAGCACAAATGAGCCATTCAGCTCTCAGGTGGCACTGATGA
GTTCCTGTCCCCGAGCAGGTACTATTCGAGCTGGAGGGAAAACCATGAGCCACTAAATAGTCCTGCCCTCACGGAGCGTTACTGCGGGAGAGTG
TTTGTGCCGTGCTTATGGAGGGGAGGTTACTTAGATGGGCAGACTGTGTGTGCTCCCCGACCTGAGTTCTCATTATATATATGGCAGAATCGGG
GACACAAGATAGCCCTTCATTGAGAGACCCATGAAGAGAGCAGAGGAGTTAAGTGAGAACTGGGTCCAGCAGAGTATGTGTATTTACTATGCCT
TCCATGACTGCAGCTGCCTGCAGGGGCCATGGGCAAGGGAGAAGGCAAGTAAATGAGACCATGGAGAGCAAGAGGCTCGCTCACGATGAACAAG
ATGTGTCGTCCTGCCTGTCACCCGGAAAAGCTGCAGAGACTGTAGGGAGGGTCTGAGACGATGGATGAGGTGACGTCCTTGATGGCCTTAGAAA
GGGGACCGAGCCAGTTGTGAGGGGTCTGTGTGCTGCCGTGAAGAGCCATTGGAGCCTGGCAGGTTGACTTGATGGCCCAGAGAGCTGCCTGCAG
CAGAGAGGCCATTCCAGACCTGTTCTCATAGCCACGGACACTGCTTAGTTTTATTTTGTAACTCAGCTACTCAGTTGGGCTTCTGAAAGTGACA
GAAACTCTAAGGGAGGAGCTCCTGCAGAGACATTATAGTTACAGGGTTGCTAGCCTAGCAGAGGGTAGCACTTAGCATTGTCCACATGTCACCA
TGGTTGTCGCTGTGCCCCAGTCGGCCAGCCTGTGCTGAGTGCTCACCTTGCTTCAGCCCTCCTGCACTGGATCTCCCATTCCCTGCTGGTGGGA
GTCCAGGAGAAAGTCCAGGTCTCTGTGTATCAGATGCTTCCATTATGCACTTTGACACACTAATTTCTCAGTTTCCTAGAACATATTTTCATGT
AATTCTCTTCTCAAGAATGGAAGGTGGTGATAAACTTGCCTGAGTTCTTTCATACCTGAGATTGGCCCTTTGTCCCCACGTCACATAGGAAAGT
GCTCTGGCTCATAAGTGACAGTGAAAGGAGATGGGGGCTGACTTACAAATGAGCTTGGCAAAGATCCCCAGACATTTCCACCCAGCATGTAAGT
CAGTGCAGTCAGCGTAGAAGGGAGCCTTGGAGAAGAACTGAGTGATGCTAGAGGCGTGGCCAGATGAAGGGCAACCTAGCACTGAGTAGGCGCT
GCTGGTGTCCTCAGGCTGTGCTCACTGAACTGACCAGAGACGGAGGAAGGAAAGAAGGACACACTGAAACTGAACAAGGCCTTGAAGCCGTAGA
GGAATATTGAAGTGTTGTCCTGAGGTTAAAGGGAGCTGGTCAGGTCCCTATCCACTTCCAAGATGGGTGACAGAGACGGACACCATTGCAACGC
ACAGCTCGCCTGCTGCAGCCCTGTGGGCTAAAAATGGGGTCCCGCATCCTGCCCAGGGCTCAGGCTGCTGGGTAAGGCAGGACATGGGAAGTCT
GACTTGGTGCACCCCATGCCACTGTCAGGCTTGAGAAGCTGCAGGACCCTGCTCTGGGGGCAGGGTAGCTCATTCTGAGGTCTCTGCGGACCTG
CCGGGGTTGGCTTGGGGTCCCCGGGCCTGCACAGAGGCTGAGGACAGCAGGTTCTAGCTCTTGGGTACCACAGAATGCCTCAGAAGAGCTGAGA
ACAGAGTAGGGGCCTTAGGGGCTGGCTCTGGAAAAGAGTGGGAAGAGAGCTCAGGCTGGTTCCCGAGGGGAGGAGAGTCTTTGGCTTGCTCAGT
GGTCAACTCAGGTTGGTTAAAAGGGTGGCTGAGAATGCAGAGAGGCCTTCTGTGTGAGATTAGGTTCTGTTCTTTAGAGCATTGTTCCCCACTG
CGGGTCCCCATGAGAAGAGACAGTCCATGGTCTTAAGGTGTTTAAAGAGAAGGAAGAGACTAGGGAAGTAGAGACCGGCCATGGCCACATTGGA
GGGAGGGGGGTGCGGAGAGGAGAGCAAGAGAGAAGCAACCCAGAAACAGGAGTAAGAGAGGGAGTAGGGGGCAAACATCCCTTTTGAAACCTGA
GCTTGCCAGGTAACGGTGGGGAGGAGCATATCTGGCTGTTGCCAAGTAACCGTGGGGGTGGAGTCCAGACAGAATACCAGGAGCTTGGGGCCCT
GTGTGACTGGTGGCCACAGAATTATGGAGCTGGGGCCTCATGTCAGGAGCCCAGTGTCTGGGGGCGTAGCAAACGCCTTCTGTCCCTTGCAGGA
ACACCTGCTGGGTCTCCAGGGTTTAAACCTAACTCAACCAGAAAACAGGCTGCCTTTCACAGTCCTAGACAGCCTATCAGCTGTGCCATCCTTG
CTGGAGTCCAGCCTGCTTTCTGTATGCAGCGCTTTAAGTGTTCTTTGCATCGAGATTAGAACTGTGTTTAGGCTAAGGGATTGTTGTATGTGCG
CAATGGTAATGCTGGCGCCAAAGCTGTTTCCTGAGCTTGCTGAGTAAAATCGTAGCTTTGCATTTTAGCATGACATTTCACCTCTAGAAGCTTT
CTCAAATTCTTTCCCCCTCCGCCTTCCCTGCCCCTGCCTGTATCAGGCTGTCACCACTGGGTGGTGACCTCCTAATGGAACTTCCTGCCCCCCC
CACCCCGTTCCTCTCCCTTCCTCCCCTCATCCTCCACCATTTTGTCATTGTCGCCAGCAGAAATGTTATCCTGGAAAACAGATGAATTATCTCA
CTCTGGTCCTGATTAAAGATGCCAAGGGCTCTTGCCCTTGCCCTCCAGATAACTCCAGAAGGCCGCACCCTGCACAAGTCCACAAATATTTATT
GAATGCCTGTTATGCATTGAGTGCTTTTCCAGACCCAAGGATTATAGCAGTGAAGTAACACGAGAGTTCCTGCCCTCAGGAACGTTTTTTTTTT
CTTGAAGAATATAGGCAATACAAACCAACAAACTACACTCACCCTGGCTAGTAGCATTGAGTGGAGCAAAAGAGGAATGTGGTTAGGAGATGGT
GACAGTGGAAGTCACTAAGAGGTGCTCGCTGACTATAACTCTGATAGGAGCTAGCCTTGGGCCAGGTGGGTGTCTAGGGGCACTGTGCCACCTG
CAGGGAGCCAAGGAGCCAGGGAGCCAGAGGCCTGGAGCGATGACTGGTGGCTTGTGGGGTTGTAAGCAAGCATGCTTTTTACTCTTTTTGTTGG
GGTTTAGTTTTGAGCTTGTATTCTCGTTACAATGTTTCTCCTTGGCCTTTCCTCCTTCTAAACCTTCCTAGTTACCCCTCCCCACACACTCTTT
CAAACTCATAGCCTCTTTTTTCATCAGTTGATATTGCATGCATAGATGTGTCTGTATACACATGCATATATATTTCTAAATACAGCCTGCTAAG
TCCATACAGGGTTGCTTGTGTCACCATTCCACACTAGATGACGAGTTGGTGTGCTTTTCCCTGGGGAGGGCCACCTCTCGCTCCAGCTTCACTC
AGTTGCCAATAGTTTTTGTGTAGGGTTCAGGTCTCATTGGGCTTTTTTTCCATTCAGTTGACATAACCATTGGTGTCCTCCTTCGTCAGGTCAT
GTTTAGGCAGTGATGCTGGTGAGACTTTACAGGCGTAGCTTCTGATGTTACTAGGAGACAAAACCTCACAGAATGCTGGTCCCCTGGCTCTTAG
AGTCTTTCTGCCTCCTCTTTGCAGTGTCCGGAGCCTTAGGTGTAGCTGTGTATTGTAGGTGTGAGTGTTCTCCTAACGTGTGTGCAGTGAGCAG
TGTGAGGGGAAGACTTGACTTCGGGTGTCTCTGCTGTCTCTCTCCCTTTACATCTTGGACACCCCAAGGAATTTGTCTATGACAGCATCTCACT
GGGTTAGCCGAGAAGTGGCTATGTAGACCAAGCTGACATCAACCTCACAGAGGTCTCTCTGCCTGCCTCTGTCTGGAACTCCCGGCAGCTCTGC
CTTCCTTGAGAGGAACGGGGCATCTTCCATGTTCTGATTCCCAGCAGTGTCTGCCCACAGTAGACTCTGTAGAAGCAAATAAAGGGAATGTGTG
AATAAAAGGGGAAACATTTGAACTTTTTTTTTAAAAAAAAAAAAAAGGAAGACTCATAGGTTTTTAAACATTTTTAAAGCTGCCCCATAGCCTC
CAGAGCCTTATAACTCTGCCCGGTTATCCTCACATATGGCCAACACGGGGTGAGTGTTCCCAGCCGCAAGGTAGCCTCTGTCCCCAGAGTTCTG
AGAAGTTGACCCCACGTTCAAATTTCATATTCCAGTAACCCGATAGGCAGAATGTCCTGGCCATGCCAAGCCGTGGCCCTCGACTGAACACCTG
CTTGTGTGCTGGCGGGATCTGGCAGAACAGGGCTCTTCTCTTAAGCAAATCTGTTTGTCTGTGCATTGGAAGCCTCCTCAAATCGTTCTTTCAG
CAAGTGTCAGCTGCTTAACTTCCTTGAGCAGAACTAGTCACTTGGTAATGACCTGGAGGAGTAAGGTGAGCAAGCAAAACTGCTCGCACCTCCT
GTAAAAGCCCAAGCGCCGCTTTTTGCCCCCTTCCTTCCCCCCCCNNNNNNNNNNNNNNNNNNNNGCATGATCACATGCCATGAAGACAGGTATT
CTTGTGTTCAAGCTGCTGACAGGGGCAGACTCCCTCAAGGAGGCAAGTGTGGACTGTCCAGGTAGAGGGGCCATGAGAAACAGTCTGAAAACAG
CTGACCTTAGCAGTGCATGATGGGTCCTCTGCCTCCGCAGCCCATGGGCCCCAGGGCCAAAGCACTGCAGTACACTGTGTTCCTTCAGAGAGCT
CGGAATGCTGTCTCCTCCCCTGCAAGGTTTCTCTTGGCTGACGTGGCTGATAAGGGGAAGAAAGGATAGGAGGCTGTCCGTGAAGCTGGAGGGC
ATAAGAAGGGGCAGTCTCCCAGTACAGCCTGAGCGCAGCGCTCTGCCGCTGTCTGGTCTTAGCTGTGGTCAGGCCCCTGCCTCCCACACTGGCA
CCTTCACCCTCTTTTTTCACTCCTCTCTTCAGAGGACAGAGGAGTTCTTTGTAGCACTGTATTATCGAAAGCTCAGGCTTGGAATCCCAGCACT
TGGGAGACAGGAGCAGGATTATTACTGTTAGTTTCAGGTCAGCCTGGGCTACGTAGCAAGCCCTTGTCTCCAAAAATAAAGAAAAGAAAAACAA
GAAAGGAAAAGCCCAGAAAGTATAATGCTGCATTATCCACTTCAAATCACCTTTGTGTGCCGCAGCTCTCCCAACCAGCATTTCTGATTTTATT
AATACAGCGGTTTTAATAAAAACTGCTGCCCCAGGTGACTGGTGAGGGGGCTAACAGTAAACAAAACTAGTAATTATTGTCTTCTCAGGGTCAG
TCCTTCATCTCCATCTGTACCCTCTGGTCAGTATCCCTCTGCTCCACATTTGTACTCTGATCCATGGAGTGGCTCTCCAAACCTCCTGGTTGTT
CCTGTAAGATAAGGGAAAACACTGGGTAATCTGATAACACATGCAGCGGTGCACTGCAGGCTCGCTGAGCAAGCACCATTAACTCCACTGGCCT
CTCTCTCAGCACCCGTGTGGCAGCTCACAACAGCAAGCAGACAGATGGGTTTTTAAGAGAGCTTATACAGGGAAGCAAGGGGCCTGAGACAGAA
GGCCCCATCCATACACAATATAGTATCATTCTCTTTGAATGAAAAGCTCAGTTCGAAAAAGAAATTTGATATCAGATAGCCTGAGTATCATCTC
CATTGTTAAAACATTTATTTACACCATGCAGTTGTCCCGATTCCCACAGCCATGGTGAAGTCCACGCATGACTAGAAAATAAACCACAGACTAC
AGGTACGTCTGCTCTGAGGTCCCTTGAGAAGCCACACAAGTGGGAAGCAGTAAAGTATTAATACTTTTTTGGTGAGACCTTGTGCTAAGGTGAT
GGATAAGGTGTTCTGTTAACAAAAGGAGGCGCTGAGGCTGGAGCAAATCGGGTCCCCTGCCAAGAGGTACAGAGTCTGGAAGTGACATCTGTTC
GGCGTTCTGCCTGTTGAAGTGGCTTTTGTTCCTTTCCTCAAGAGCCAGAAAGAAAAGTGAGGAGGGTCTACTGAGTTCTTGGACAGCTCAAAGA
ATAATACTGATGCCTACAAGAAGAGGAGAGGCAAGGACCCAAAGGATAAGGGAAAGAAAACATGGGTACATATGACAGTCTGCGTGGCAACTGC
ACAATGTCTGAGTTTGAAGGAAGAGTTGGAGAGCTGACTTCTCGTGTTTGAGAAGGAAGCCAGCAAAATGACTCAGAAAGAATAATACAGAGAT
CATGTCAGGAAGTGAGTGCAGTCCACTTGGCCAGAGGCTCGCAGCTACAATGTTTTAGGCAGAAGGACTGGAGCTGTTACAGCCATGACCATGT
TTGAAAACATGAAAGAAGGAGTTGAAGGGACATCTCAGAGCAGCAGGTTGTGGAGTTCTGTGAACTCAGGCCCATCACCTGGGTCCTCGGAAAG
AGTGGAGACATGCTGTTCTCCTGAGCTCTGGAGCAGAGGAGAGCTGAGATCAAACTGGGTAACGGAAGGGTATTTTTTAAGAATATTATCATGC
ATGGTGTACTTAATTGAAGTACTGTTTATGAATGGCAAACTCACTGAGTCCTTGCTGAGCCAGAACATCTTGACCATTGCAAAGGTTCACTGCA
GAAGTGGCAGGTTTGCAGGGCCGCCCACCCACGTGTGTTCTGGCCTTTGGTTGGTTGGAAGACAGCTATTCTGTTGCACTCGTCACTCAGTCAG
TTGCAGTGTCTACTCTTTTGACAAAGCTGCCGTTGGTATGTGTCTGTTTCAGCCAGTGCGTAGAATTGTTCATATATTCCCTGGACTTTGGGAG
GTCTGGAGAGAGTACCTGGAAAAATAAAAGGAGAAATGGGGTGGGGGTTGGGTGCTGCAGGAAAGGAGGCAGCAAGCTAAGAATGCATATCAAA
GCTGACAGTGTGGCCTTGCAGTCTAGTCCAGTCCTCACTCTGCATATACTGAGTATACTGCATATATTCTGTCCCATGGACGGAGGCCTTCTCA
GCAAATGTGACATGCTGTTTTGGGTTGTCACATGTACTATGTCCAAGTCTTGGGTGGAGCACTGGAAAAATAGGCTTGACCCAAATGGCCAGTT
AAACTTTCCATTGGCAGAGACTGAATTAAACGTTTAAAGAAAAGAAGTATTTCCATTTGAGGAATTTGGATTTTTAATGAAATAAACCATTTAC
TGACAAAAAATTCACGGAATTCTGGGAAAGTAGTTAATTGAATCCTGTGGTGCTGTGCTGTGCACTCAGGGCCAGGTTAAAGCCTTGAGATGTA
TTTGGGGAGCGGTTGGAGCGGTTGGAGCTGCTCCCTAGAAGCCAGATTCTAGGGAGAGTCTACTGTCATACCTCTGAGCTTCAGGCCTCTATGG
ACCTTTCCTCCAGGGGCTCCTGGCAGGAGCCAGAACAAGGGAGATTCCTGCAGACCCAAGCTGTGTAGTTCCAGAAGCACCATGAAACTAAGAG
GTTTATCTACTTAATTGTGCAGCAAGGAATTGCCTGAGAGAATACCAGCCCCTATGTATGGCTGTGTTCTTGTCTTGGCCCTTTAGGCTTCCTG
GAATAGAGACAGGTGGCTGTCTTGGAGCCCCAGCTTCTCAGCTAACCTCCCATGGGAGCAAATGCACATTGGAATCAGACATTGTTTTAAAGGC
AGTGCACTGATGTGTTACATAACACAGAAGGGGAGTCTGGGATGGAACATAGGAAGGAAGTGCCATCAGGGCTTCACAACACAGAGGGTTTATG
GCTGCTTCATGTTTGTAGAAATTTTTAATCCCAGTCCAATGTTTCTAGCCACTTTTGACCATTTAGTTAGCAGGTAAAAGATGCACACAACCTC
TATATTTAGAGTAAGCCTCAATCAGCACTAGAGCTGGGCAGATACCTACCATCTATGCTATTAAGCCTACTTTCCTATCGATAACCCTGAGCTA
TTACTTACTGTTTCATTTGAGCTGCACTTAATTCCAATTGGCCAACCCTCAGGGCCACAGTTTCAGGCCTCCTAACCCATGGCACTTCTCCTTC
CTCCTCCACCTTCTCCTCTTCCTCATTCCCCCTTGTCCCCCACCCCAGGCCCAGGAAACCTGAACCCCACCTATGTCTCTTCTGTCCAGCTATT
GGCTGTTGGCATTTTTATTTACCAATCAAAAATAACTTGGGGGCAGAGTCACAGGTCTACATGAAAACTCCAGGTCTTGCCCCACACACACACA
CACACACAATATTACAATAGACAAGAAGACCAAACCCCAACAGGTTCAGCTCTGTTATTCTGCCGAGTGCCATTTCCTGAGCTTACTGGGGTTT
GAACTGTTCCTGAGGAAGTGCTGGCCTCCGTTCCTTCCCTTTCTGTCTGGAGTATCTCAGAAGAGAGCTGCAATCCGTGTACCTTCCCTTGCCT
TCAGCTCTCCATCCTAGATCCTGGCTCCTCAGTATCTGGGGGAGGAATTGAGCTCGTTGGCTCCAGGGAACACCCAACAGAAAAAGGTACTCCC
ACACTGGCCTCAGCATTCTCCCAAGGCAAGGGGCTTGCCTGGCTAGAGTGAAATTATTTGGTCATATTAAAGGTCTACTTAAACACAGTCAAAG
GAATGCTAAATTTTGTCACCACCAGAAATTATAAGTACAGAGAATAAAAGAGCATCCTACAAGGACTTAGACAAACAGATGACTGAAATAGTTG
TCATCCAGGAAGACCTAGCTAGGATAGGTCCAGCTTCAAAGATGAGAGCAACCCAGAAGCCTGGATGCTCCCTCCAGAGGGAAACAGGAATGTG
ACCTCTGGCCAAGTGACAGGTTCTGACCCAGTGGTCACCTCCCCCAGAATTAAAGAAGGCTGTGTTGAATATTATGTCGATTCCTTACTAGTGA
CAACCCTGAGACTCATGCTGTAAATTACAGCAGATTCTTGCTGCTGTAAACTAACTGTCAAGAGTTAGGGAAGATTTTAGATGTCAGGCTCACA
AGGTCTTGGCAGAGAGAGGGAGAAGGAAGGGAGGAAAGGGAGGGAGGGTAGGCGGGTGGGCGGACAAGGGAGAGAGTACCTGGAAGCAGCTGAG
AAGGGAGCACACTGAGTGATGCCTGCTTCAGCTTCCCATGATGCCTTCTGCTCTGCAGCCTGAGAATGTCAGCATTAGGCAGCTCCTGCAGAGG
GGCAGGGAGGTCTCAGATGATAGATGGCCGGATGCTGTCATTCATAAGCAAAGGCCCCAGAGACACCCTGCCTCCCTGTCACAGTTCCCAAACC
TCAGAGCACTGTGAGGGTCACCAGGCCAGATGGTGCCAAGCCCTGCTGGCATGAAGGCAAACCTCAGACGCCATGCCTAAGCATGAGGAAAACT
GTGACATTCACTGTAGCTCTGCACATAGAAGACCTGTTGCTTTTATTCTACAGGGTGTTTGTGTGCTTTAGTCATACAAACATTTCTTTTTTAA
TTTCTTTAACTTTACATTGGTGTTCTGCCTCCATGTCTGTCTCTGTGGGGGTGTCAGGTCCTCTGGAACTGGAACTACAGGCAGTTGAACTAAC
TGCCATGTGGGTGCTGGGATTTGAACCTGGGTCCTTTGGAAGACTGAGTCATCTTTCCATCTCCCGAAGATTCCTTTTTAATTATGTTTCTTGT
TAATTGTGTGAGGATATGTGCACGTATGTACCAGTATCTCCTGAAACCAGAGGTGTCAGTTGCTCTGGAACTGGAATGACAGGCCGCCTAGTAT
GAATGCATGCTGAGAATTGAACTTGGGTACTTTGCAACTCTAAGCAACATTCTAGCAACATTAAGCCCCTTCCCCTAGTCCTGTGTTTTACCTT
TCCTAGTGAGTATAATTTACACATAACAAAGGTTAATTTAAAAGTATACTCCCATGAGTTTTGACTAGTGAAATTTGATTGTTCACACGGACTA
ACTACACTGGGGTCATGGACTGCAGCCTGAGTTATTTCTCATGGCAGAGCATGGCTCCCAACCTGGCTTTGTTTTAAACTGTTTCAGTGACAGA
AATAAGACAGAGCTTGCATGTAGCCCACACAAACAAAATATTTGCTGTTGGCCTTTCACAGGAAAAACATGGGCATTCAACCATGGCTTCTGTC
ACCTCTCAGCTCCCTCTGCCCTTTCACCCGTGGCCCCCACCCCAACCCCAACCCCCATCCGTGCGCAGCAACCTCTGATCTGGTTTCTATCATG
CAGTCTCTGGCCTTTCTAGGGTCTCATCCAGGTGAAATCGTACAGTGCGCTGCCTCTTGTGTCTGGCTTCTTTCACGTGTAGTGCTTTGAGAGT
CACTGTCTGGGCTTTTGCATCTATGAGTTCTCCATTCCTTTGTTCCACTCCTTCGTGCTGTGATAGCCTATTACAGGCATGGTTCCCCTCCTGA
GAGGGAGGACGGCCTCCTTATGCTTTAACCTTAGCCACGTGCCCATTCTCACTGGCCCCTGTCTTCGCAGGCATGAACAACCGGGAGGTGCTGG
AGCAGGTGGAGAGAGGCTATAGGATGCCCTGCCCACAGGACTGCCCGATCTCCCTGCACGAGCTCATGATCCACTGCTGGAAAAAGGATCCGGA
AGAGCGCCCGACCTTCGAGTACTTGCAGGGCTTCCTGGAGGACTACTTTACGGCCACAGAGCCCCAGTATCAGCCCGGTGAAAACCTGTGAGAG
CCTGCGCTTCAGACGCCTCTTCCCGAGGCCTCCCTACCCCTCCCCATTAGCTTCCAATTCTGTAGCCAGCTGCCCCAGAGCAGCGAGAACCGTC
CAGGATCAGATTGCATGTGACTCTGAAGCTGAACTTCCACGGCCCTCATTAATGACACTTGTCCCCCAGTCCGAACCTCCTCTGTGAACCATCT
GAGACAGAAGCGTGTTATTTCTCAGACTTGGAAATGCATTGTATCGATGTTATGTCAAAGGCCAAACCTCTGTTCAGTGTAAATAGCTGCTCCT
GTGCCAACAATCCCAGTGCTTTCCTTTTTTAAAAAGAAAAAGCAAATCCTATGTGATTTTAACTCTGTCTTCACCTGATTCAACTAAAAAAAAA
AAAAGTATTATTTTCCAAAAGTGGCCTCTTTGTCTAAAACAATAAAATTTTTTTTCATGTTTTAACAAAAAATGATCAGGACAGGTGTTTGGGT
TTTTTTTCCCTTTTTTATACATATGATATATATGTTAACATATGTTCCTGTACATACACCATGTGGGTGCTACCATGGAGACTGGCCAGCGTAG
GCCACATAGCTACAGGACCGGAGTGGGGATTACTGCAGAACCCTGCCACCAAAGCACTGGTGTCAGCCTGCAAGCCGGTGGCCTCATTTTTTGA
CTTCTACGAAGCATGACGTCCTCTCCATTTGGACTGCACTTTTTTGGTTCCTAATCATACCTATAGATTGTTCATGTGACTTTTTTCAGGTCCC
AGGGCCTAGTCACGAGTTTTAGTGCCAGTTTTTGCTCCAGCGAACTGTGATTCGTTCTTGAAACTTAGGAGTGAGCATTTTAAGCAAAAAGCAG
CCAGCCAGTTCTACCACAAGAGCTGCAAGACGGAGACCACACAAACTTCCTGTATAAATATGAATGCTGAAGGGTTCAGGTGTTTTCCTTTTAT
TTAATAAATCTTGTAACCACATTTAAATGGTCTAAACCCATAGCATTGTAGTCATGGCAACCTACTAAACTTTCTCATGCAACTAAAAATTATG
GGAAGGCAAGGGTGGGGGGTTGTACACGTCCCATTGTAAAATAAGTGTTTTACTGTCCTGTACTGCTAATGAGTGACTCTCCGTGTCAGGAGTG
CTCCAGTGAATAACTATGCACTACTTTACATTTCATGGGGGTGCACAAAAAAAAAAAAGTATTACATTTTTAGTTGCTGTTTGTACCAACCTCG
AATTACGTATGTTTAACAACAAATCAATTCCTATTTCTATTGAGTTTTTTAATACTGACTAGCAATTCTGAAGTCTTAATTCCTTTTTTTTGTT
AATGATTTACTTGTGAGTTTACATTTTTAAATTGTTTAACTTTCCTAATTTAGTAATTAAAAAGAGAGCATTTTACATTTGAAAAAAAAATTTT
TGTTTATTTGTGTACACCACAGAAGGTACCCTAGGCGTTCTGTGACATACCTGGCCCGTCCCAGATGGTGAGGAAGCACCTGGTAAATCGGGCC
ACTGTGCAGCGATTTCCAAACGACAGAAACATGCAGAGCATCTGGAGACCCTCCCCACCAAAAGGCAAAGCAGTTATCTGGCTAACTCAGAGTG
GCTAAAGCAAAACTGGGCGTACTTGAGCGCCATAGTGTATCCCGCACTGTCTCTCGCTGGAATTCACCGTGTCCTATTTGTACAGGAGACAGTA
GTCTTTCTTGGTCTCAAGTCATAAATACATTTCCAAGTATCCTACTTCTAAAATGAAGTTGCTAAGCATGTGACCATGTGGTATGGGGGAGAGG
GGGAGGGGGGACTGGGTAGCCATCCAGGCCTGGATCTACCATGGTTCCCTGCAGAACTCCGAACCTCCCCTGCAGGCCAGTGTGTCTGGAGACA
AAGTACAGACAAGATGCTCTCCCAGCCTCTGGCAGCCCTGCCTTCTTACAACTCTAAGTCCACCGTGTCATATGGAGCCATATAAGGAGGAAAA
TCTTTCATTGTTGTGGAAATAATTACCTTTAGAAAAGATTATAGCGTTTTGGGGAGGAAGATGAAACATTTTTTAAATCAAAATTGTTACTATT
TTGGATATGAATACCATTGATAGAGTTTTGAAAACTTACGAGGTGCAGTTTTTATCACATAGGATTAGTCATTAGCAGGTTTTAGATTTTTGTT
AAGATAATTTTATTTTCAATCCTCACTTTGCATTAGACAATTTGCAAATATTCCCTGGAGGGTTTTTGTTTTGACTCATTGAAAGTCTTTGAGG
GAAAAAAAAATGCACTTTTAATTTCATACAGCTTTTTAAATTTCATCAAGTGAGTTCTCTGTGGGTTCCTGTATATAAAAGAAAACTAAGGACA
TGCATCACTGAGAGAGCACGCTTACGAGGTCAGAGTCCTGGAGCACTCTAGAATAGAAGAACTACAGTCAGGAAGAAACCAAAGAAATGTACAG
GTTTTTCCAAGAGTCCAGTGTGCTTTCTAGGGAGGCTCAACTCCCATCTGGAAGTGTCTGCTTCGTAAGTGATAGACACTGGGATCGGGAAACT
GAAGTTGCTCACCAGAAAGTTCTCTTATGACAAAGGAAAAATAGCACTTACTGTGAAGCAGGTGAAAATGTTTGGGGAGAAAACCTCTTTGTTG
TTTCTCTTTAAAAAAAAAATAATAACATTTTTATGTGTATTGGTGTAAGGGCGTCGGATCCCCTGGAACTGGAGTTACAGACAGTTGTGAGCTG
TCATGATGGGAACTGAACCTGGGTCCTCTGGAAGAGCAGCTAGTGTTCTTGACCACTGAGCCATCTCTCCAGCCCCTGTTGCTTTCCTTTAGTA
ACCCAGAATGAGGACTAAGGACTTACTCTCTGAGAGCCAACTGGGGTTACCTAGTTTGCACTTGGATACCTTTTTAATAAGCTATTCTCTTAAA
AGCTCACATAGGAAGCTCACTGGAGAAGGCCATTTTCATAACACAAGAGTAAACATTGGTTCACTCCACTGTCGTTGCACCACACACTCAGGCT
GCTGCGTTGAGGGACCTGATAGGATCCCAGCAGATGCGGGGTGCCACATGTCAGCAGCGACTCAGTGGACTTTAAGGGCCCTGCCCCAGTGACC
AGGTGTTTCCATGGGGAAAGCCAAGGGTAACCATGGTCCCTCGAAACCTGCCGTGTGACTCAAGATCTCCAGGCACCTGGCTGTGTTTACTCAC
CCGGAGACGACAGGAATCCTGTGAGTAAAGTCTTGGCAGCAGAGGATTCTCTAGTACCAGCAGAGCTATGAAATCTATCTATGATTTCTCACGG
GGCTATAACAGCGCCCGCCGTATTAATTGGGATGGTTCTTTCCTGGGAAGGTAAGATGCTCAGCGGTACACCCAGGAGAAAAGCGCCATAGCTT
TGCTGCAGAAAAGATGCCATGTCTATTGTTGGCCCTGACGCAGAACAAGGCGGCCCACAGGGTGGGCGTTTCCTAATGGTGTATTTGAGTAAAA
TGGTATTTGGTCAGTTTGTTCTGGAAGATATTTTAATACATTCAGATGGCTTTTGTTGGCTTTCTTGCCACTGTGTGTTACACTGACCTTCTTT
CTGTTAGGCTAGTGTCAGAAATATACTTTCTGGAAGGGAGATGAGACGGAGGGAAGGAAGGAGATTAGCTTTGATCCTGAAAGAAGGGGAAAAA
CAGCCTGTGGCATCATTATCTAAGTTTAATTTTTTTTTTAATTCTCAAATGTAGATTCCAACTCTACAGAATGTAATAAAAATGCCTTTATTAT
CTTCTAAATATCAAATGAACCTTCACAACTGTGTTTATATCAATATTCCATGAAGTTTTATGACAAACATCCAAACTATTCCTCATTTTTCCCG
ATGTATGAAATATACAGAATCCTATGGGAAGGACATGGAGACCTCTTTATATATCTTTATTTTAAAATAAAAGCGGGAGAATATAGCTAAGTGG
TAAGCCACTTACTTTGCATGCCTTTGTCTCTTGTCTCTCTCTGACTCCCTCTCTCTCTCTCTCTCTCTCTCTCTCTCTCTCTCTCTCTCTCTCT
CTCTCTCTCTCTCACCCTCTCACCCTCTCACCCCACCCCTCTCAAACTCTAGGCATTGAAATATAAAGCGGTTTGTGATTTTGTAGGAACCACC
CTGTAAGAATGCAGTCCTAGACAGCAGCCAGAACAAGCAGACTTCCTCTCTGGAGTCCTCAGAACTCATGTCACTGTGTGCTTCAAACCACCCG
TGTGTTCAGTAACACTTCTCTTCTTTCAGTGGGTTTTCTGTGGCAGACTGAGCACTCCTGGAGACCAGAAACTGCCCAGCATTAACGATTCTCC
TCTCCCTCACCTTGAACGGAGATGAGCTTCTGGCAGATGTGGGGCCAATGCATGAGTGGATGGTTAGATGGATGGTGCCTACCACCCAGTGGGG
TGGCGCTTTGCCTTCAGATGACACGCTTATCTCAGAGCCTGCTGGGTGTGGGGGAGCTGCGGCATGCGGCCCCAGCACTAGCCTGGCCTGCTAC
AACTCGAAGTCATCAGTCTTCAGGATAACTGTGAAAGCTTTCTCTCCAGCCTGAACCAGGCACAACCAGTGACCCCACTCCTTCCCCCAGGTCT
CGGCACAACACCCTCGGTAGAAAGTCAGACTTCTTGGACCGTGCTAGGTGACTGCCCAGAGTAAAAGACCAAGTGAGGTATAGTTCACAATGCA
TGCAAGTGAGGTGCCATTTGAATTTGATAATTTTATGACAACTGGATATTCCAGTTCCTAAGATAACCATCTTTGTGTTCATATAAAAATGTAT
CTCAACTGGGCGTGATGGTACACGCCTTTAATTCCAGCACTTGGGAGGCAGAGGCAGGCGGATTTCTGAGTTCGAGTCCGGCCTGGTCTACAGA
GTGAGTTCCAGGACAGCCAAGGCTATACAGAGAAACCCTGTCTTGAAAAATTAAAAAAAAAAAAAAAAAAGTATCTCCATGCCCTCCAGATGTT
CAGTGTCCACGGCCTGTGGCTTGCAATGCCCCTATTGCAGCTCTCATGACCCAGGTACTTCTGGCCTACGTGAGAAGCTCTGTATGAAGTGGTA
ACTTATTGTAGTGTGAAGACTAAACGTGAAAAAGGTATTGTTGCCCCCTACGCATGGGGCTTTCCTGACTTCCCCACTCAAACAAGAACAGCCT
CATGGTTGAGTGGGAGGGAAGCCAAGGGAGAGCTTTATGACAGAAAGGAAAAGATAAGCCAGCTGGAGCCTCTGGAAGCAGAGGTCAGATCAGC
TTTCCTGGCCAGTCTGTTGCAAATCAGAGCAGGAGGGATGGAAACCTTAAATAAAGGAGAAGACTGAGCTGGGAAGAGAGGCGCCCTGGTCATC
ACTCTCTGGAAGAGTGGGAGGAAGGCAGACATGACAGGAGGTACACATGAGGACTAGTTATTCCTTGCTTTAAACTTCTGATGAACGTTCACTC
CGAGCTAGACCACGTGTACCAGAAACTCAAAGGTGTATGTTAATATTCACACCCCAGTGAAGACAGAGACCCAGAGCTGTCTGTAGATGGGAAG
CCCAGGGCTGAGTCGAAGGGAGGCACCCGTGCAGCATGGGGTCTGCAGGGCAGGCAGCACACCGTGGAGTGGGTTAGGTGTCACATAATAGGGA
CAGAACTTCTTGCTTTCAAGGTGACACCTGATTCTCATGCATTGAACACAGAAGCTGGTCAGTAAATGGATCTGAACAAAGAAAAAGCAAAGCT
ACATGCATCACCTCCCCACACACATCTGTCCTTCTAGATGGAGGTGTGGTAAATGGCTGCAGTCAAAGACGGGTAAGGTGCTTCGATGTGTGGG
TGGGGGAGGTGTAGCGAGTGCATATGGAACCTTCCTTACCTGCCAGCCTGTCAGAGATGCGGTGTCACTGTGCGCCTGTCTCTGCCTCCTGCCT
TGTGCAAAGAATGTTGGGATTACAGACATATGCCTCTGCCTCCAAATTTACATGGGCACAAGAGACCCAAATTCAGTTCCTCACAAAGGCAAAG
CAAGCACTTTTTTACCCAGTGAGTCATCTCTCCAGTCCCAAGAATAAGGGACCAGACAGGGTGTTGATTCCCAGGGTCCCTGCTGGAGTATGAC
TAGGAATATAGAATCCAAGAATTGCTGGCAAAGAACTTGTACTAACTCGGTCGCTCTCCCTGGGACATTTGACAGAGCTCTCCTGTTTGTCCGT
TCTTCGCTTGTTGGCCGCTTCATTTGCTCTGTCATACAATTTGCAAATTTATAAAAGTTACTGCTCAGAGTCACAAGGTGCTCTGGTTGTTTTG
TTCTGGGTATTTTTCCTTTAGTTAATTATCTAGTGCTTGCTCTGTAATAATCAATGGGTAGCTAATTGGAAGCAAGAGAGAATGAAATGAGTAT
TATTTGAATAGTGTTTTTAATGAAAAGCACACATGAAATACTATAGGGAAACAGCACAAGAGAATTTTTTTTCTTTTTTTTTTTTTTTTTTTTT
TGCATGTGTTTACAAACAGATTCACATAAGCTTGTCACAAACCAAATCCAAGTGTATGGATCATTTTGTTTCATTTTCCAGATCCCCCCCCCCC
CAAGGGGGTGAGTGGGCATTGGAGGATACCAGGCGGAGGCCAGGCCTCAGGAGATGGAGAACTAGAGCCCCAGCCGTCCTAAATGAAGCTGAAG
GGCTGTCAGTTCCCAAAGAGTGCATGAGGAAATGGTTAGCACGAGACAGCACTTGCATAGAGAATCAGAGATGAGTAACAATGGTTCCTGGTAA
ATTAGCCATATTACATCATGCACACAGTAACGGAGGGACGATTAGGAAAAATGAATACTAATTTGCCCAAATCCTTTACATAAAATGCATTGAC
TCTTTTTTTAATTTGATAGACTTTTTGATTTTTTAAAAACATGGGCAGCTCCAGGAAGCTCCCAGCAGAGCATCATTGTGAGAGGAGGAGGAGG
AGGGGGAGGAGGAGGAGGAGGAGGAAGATAAACCATCGAAGGCCTTCATAAGCCATTTCACCCCCCTCCTCTCAACCTGCGAATATCAGAAAAT
ATTTGTTTGTACATTCCTGAAGGTCTCTAAGTGAAAATGGAAGGCATTAATCATTGTCTCTGCTATCACTAAACCATGACCTCACCATGTTGGA
GGGCAGGAAAGTGATGCTTCCTTCTATCTGTATGTCTGCGCTGACTCAGACGGTCTCTGGGTTTTGAGTAGTAGGGGGAGGATTGGAATGGAGC
AGAGCTGTACTTAAAACGGCAAAGGCAAGAACAAAAGCAGCATGCGTGCAGCCAAAGGGGACCTTGGAAGTTACACAGATGAAACAAAACGCTA
TGCTTGCCTGAGAGTCTGGTTTCCAAAGCAAACGCAAAATGGAGAGCCTTGTTCCAACCATAAAGGTCTCACCATCTATAGTTCCTTTGCAATA
AAAGGGGCCCTGTAATCTACTGTGACAGCCAGAAGCTGCACTGGTGCTCTGAATTATGATATTTGCTCACGACTAATACAGATTTTTCCAAAGC
AGCGTAGCATTTGTAGCTATAGCATCCTCTGCCCTTTGGCAGAACACAGCCATGTCCGCCAGCTTTCCCTGCTTCCGTTCCTTCCTGTCCCAGC
CCCCACGCCTTTCCACCTCTTCCCATTACAATCAGACCATTCTTGCTTCCTCCTTTGTTTGCTTCGGCACACCTCCCTTCATAGGATCCCTGTT
AATTTATTAAAATCAGACTTTTTTTTCTTTCTTTTTTAAGATGTATTCTCACTATGCATCCCAGGCTGACCTCAAACTCAAGACCTGCCTGCCT
CAGCCTCCCTCCCAACTGCTAGGATCTGGGGCGTGTATCCCTTAGGTCTCTACCCTTCAAGGCAAACCTGTGGCTGCTGGACTGCATCCTGAGC
AGGCATCCTGTAGGAGAGTTGCCCAGTCTCCTCTGGAAACTTACTGGTCTCAAAGTTGAACTTTGTAACCCTCAAATCTCAACACTTCTCTCCT
GGGAGCCCATTTTAGGTAGGCAGTTCCCTGACCCCAGTTCTCCTCCCTGCCTCGCCCCCAGCCCCCAGCCCCCAGCCCTCCCCCCGACCTATGA
TTTATCAGACTTTATACCTGAGTCTCCAGCGACTTGCTATCAATCAGCTTTATGCAAATAGAAAAGGCGACCCTACCTCAACAAGCTTTGCTGC
CATCTGCCAGGAAATTGCTACAATAAATATGCAAAAGGATAATGATTCAAATGTGAATGCCACCCTTTCAAATCCTGCAGTACAAAAAAACGGC
ACAAACTGGGGTGTCAATCCTGCAGTGTGAAATCACCGGAGCTGTCCTGAAACCCTGCATAAAATCATGGCCCCATGAAGTCAGCCTTGCCTGT
TCGTAGCAATTTTAAAATCTAAGCCTTTCAACCGTGATCAGAAACTGTGGAGAGGCGGTCCCCAGGTAGCAGCCTGTAACAATGACAGACTTCT
TTCTAGAACTCAGCCAGAGCGTGGACTCTAGTGTAGGGCACACAAAAGCATCCAAGTTAAGGAGTGGGCACACTTGACCATGAGGGTGCTAGGG
CAGAGACCATGCTCAACCAGGGTGGGGCAGGGGGTGCACCACACCCCTCTGCCTTCTCACTAATCACTCCAGCATCACCTCCACTTTCTGGTAA
TCTACAACACAAATCAACCCCAAAACCTCATGGCAGAAATAGATGCACATGGGTGCATTTTGTACAGAACTCTGCAGTTCAGAGGGACTTCTAG
CTACGACTGGCCTCTGCTCCTCAGGGCCGCAGCTGGGACTGCATGGAGGAGGCTGGGCATCTTTCACAATAGCTCCTAGCTGCTGAGCAAGAAC
CCAGCTGGGACTGTGGGTGAGGACCTGAGCTCCCAGGTGGCCCGTGGGCTGGCTCACACCGTGGGGATCAACCGTGTTGAGACATCCCAGCTGA
CTCATGGCAAAGCAGAGACAAGCTGCTCCCACCAAGCCCCGCCCAAACCAAGTTTCTAAACAAAAGAAATGACTGAGGACTCTAGCTATGAGGT
TTGGGGTTGTTTTATAGCAGCTCATCACCAGAATGTGTAGGCTATCACAGCTCCCTCGTATGCCTCCCCTCATGCTGTGTCTAGGAAAATGAAA
ACCGAATCTCCCAGGCTGCTATACTGTTTGCACCACAACCGTGAATTAGACTATACCGGTCAGATGTAGTTGTGGAAAGTTTGTAAGGCCAAAG
GGAGGTATATGCCAGGCCCCTGAAGCTTGTGCTTGTGTATGCCCTAGGAAGCAAGAACATGTAGCCACAGCTCTGTAGCAGCAGCTCCAACATT
GGTTTTCTGTCTCTCACCCTCCTGGTTCATGCAGGAGACCACAGTTCCGCTGTCTGAGTGGTTCCCTTGGTGAACCTCTTCCAGCCCTTCCAGT
AAGTCCATAAATTGTTACATTACATCTCTCTTCACTTAAAAGCCATAGGGTGGGGCATGCATCCTAGGCTGACCTGAGTCAGCATCCCCAGGTG
AGCCCCACTGTTCCATCTCCTATCTCTCTGTCCTTGCTTGCTTGCTCGTTTTCTCTCACTGGGCACTCTTGTTTTCTTTCCATGCTGAGGATGG
AACCGAAGCCTCCAATACAATACACTTATCAAGCACTCTCAGCCCGCTGGTCTTTCTTTTAGTATTTATCTATACTTGTGCCGGTGGGTTATTT
CTCTGCCCGTTGAAATGAGCCAGTTCAAGCCAGATTAGATTATATATAGGCAGGTTTATTTGGGTGGGGAGGAAGGGTGGNNNNNNNNNNNNNN
NNNNNNNNNNNNNNNNNNNNNNNNNNNNNNNNNNNNNNNNNNNNNNNNNNNNNNNNNNNNNNNNNNNNNNNNNNNNNNNNNNNNNNNNNNNNNN
NNNNNNNNNCTTCACCCCCACCTCCACACACAATCCTTCTTTTTTTTTTTTTTTTTTTTTTTTTTTTTGCTCCTCCAAAAAAAAATGTCTGGAT
TGTATAGGGAGTAGCCTCTGGGGGAAGGGCAGCCCAGCCCCTGGGCTGGAAAGTTCAGGGTTGGGGGCAGGGTATGCCAGGTAGGAACTGAGAG
ATGCTGGGAGAACCTGCAGGCCAGGTCTGCTTTGATGTGTAAAACATGCACCTAAGTCCCTAAACCCAACAGTGCCAACCCAAGTTTCTCATGG
CTGAGAAAAAAGTCCATTAGCTAATGGGAGACAAGGAGTGAGGACTAGAAAAGGACACCCTCCGGGGCCTGTTGGGTTGCTTTCTTTTGTATGT
AAAGTTTTCTAGAAACACAGCCATCCCCATTTGATTCTGTCCTGTCCAGAGCTGGCTTCACTCAACACTGACAATGTTGGGTGACTGGTTGACC
CAAAACTCTGAAAATACTTAGAATTGTCTCTCTGTGGATTCTGTAGGCACTGTGGGTCAAGTACCGCCGCGTTCGGGCTAAGCACTTCCTGAAC
ATCCCCGCTGTCATGGGGACTTCCATCTGTCATCACTATTAGTCTTTTTCTGCTGCTTTGTTTTGTTTCTGTGCAAACAAAACAAAGACTATTC
TGGAACTCACTCTGTAGACCAGCCAGGCTGTGAACTCAGAGATCTGCCTGCCTCTGCCTCCCTTACTAGTCATGGGAGTAACAAGTAATAACTT
ACTTGTCAGTTATTACTGACAAGGAAACCAATTTAGAGAGATCTGGGCCCAGTTGATTGAGCACATGGCGATGCTGTTAGCAGGGATACAAGAG
CCAAAGGAACAGAAAGGACTCATGGACTGGTGACTGGTGAGGCACCTGCAGCCCCATGTGCTGGGCTGTGCCCTCTCATGTCTTGCTACATGGC
TAGGAAGGGTTTCAAATCAATACAGCATTGGGATTCAAAGCACAGTTCTGTCACCAGCTAGCTGTGTGACTCTGGGCAAGCTATTTGACCTCTG
AGCCTCTTGCTTAGCTTCAGGGTCCTCAGTTAGTAAAGGGGACTTTTGAGGAAAAAAAAAAAGTCCTATGTGTAGGATATGAAAGCAGAAATGG
ATAGTGTGTGGAGGTGGGGTGAGGATGNNNNNNNNNNNNNNNNNNNNNNNNNNNNNNNNNNNNNNNNNNNNNNNNNNNNNNNNNNNNNNNNNNN
NNNNNNNNNNNNNNNNNNNNNNNNNNNNNNNNNNNNNNNNNNNNNNNNNNNNNNNNNNNNNNNNNNNNNNNNNNNNNNNNNNNNNNNNNNNNNN
NNNNNNNNNNNNNNNNNNNNNNNNNNNAGGTCAGGACAGGGCAGGGTGGGAGTGGGGTGGGATGGGGACTGGGTGAGGTGAGATAGGGGTGAGG
TAGGAATGAGCTGGGGCCGGGGTGGCATGGGGATGAGGTAGGGTGGGGTAAGAGTGAGGATAGGAGTGAGGTGGGGTGGGATGGAGTAGGGTGG
GGATGGGATAGGGGTGGGGTGGGAGATCAGCA
MOUSE SEQUENCE—mRNA
CCTGGGCCCCGCCGCGGACGCGCGGAGCCGCCTGGGCCGCGCCGGAGGAGGGCGGGGAGAGGACCATGTGAATGTGCTCCGGAGCTGAGCGCCA
AGCCAAGCAGTGTTTGAAAGGAAGCAGGATGCTGATCTAATCGTGGCAAAAAGTCAGTCCGACCGCTGGTTTCGAAGACATGTGGTGTATATAA
AGTTTGTGATAGTTGGTGGAAATTTGGGAGCTTGGATAATGGGCTGTGTGCAATGTAAGGATAAAGAAGCAGCGAAACTGACAGAGGAGAGGGA
CGGCAGCCTGAACCAGAGCTCTGGGTACCGCTATGGCACAGACCCCACCCCTCAGCACTACCCCAGCTTCGGCGTGACCTCCATCCCGAACTAC
AACAACTTCCACGCAGCTGGGGGCCAGGGACTCACCGTCTTTGGGGGTGTGAACTCCTCCTCTCACACTGGGACCCTACGCACGAGAGGAGGGA
CAGGAGTGACACTGTTTGTGGCGCTTTATGACTATGAAGCACGGACGGAAGATGACCTGAGTTTTCACAAAGGAGAAAAATTTCAAATATTGAA
CAGCTCGGAAGGAGATTGGTGGGAAGCCCGCTCCTTGACAACCGGGGAAACTGGTTACATTCCCAGCAATTACGTGGCTCCAGTTGACTCCATC
CAGGCAGAAGAGTGGTACTTTGGAAAACTTGGCCGCAAAGATGCTGAGAGACAGCTCCTGTCCTTTGGAAACCCAAGAGGTACCTTTCTTATCC
GCGAGAGCCAAACCACCAAAGGTGCCTACTCACTTTCCATCCGTGATTGGGATGATATGAAAGGGGACCACGTCAAACATTATAAAATCCGCAA
GCTTGACAATGGTGGATACTATATCACAACGCGGGCCCAGTTTGAAACACTTCAGCAACTGGTACAGCATTACTCAGAGAAAGCTGATGGTTTG
TGTTTTAACTTAACTGTGGTTTCATCAAGTTGTACCCCACAAACTTCTGGATTGGCTAAAGATGCTTGGGAAGTTGCACGTGACTCGTTGTTTC
TGGAGAAGAAGCTGGGGCAGGGGTGTTTCGCTGAAGTGTGGCTTGGTACCTGGAATGGAAATACAAAAGTAGCCATAAAGACCCTTAAGCCAGG
CACCATGTCTCCGGAGTCCTTCCTGGAGGAGGCGCAGATCATGAAGAAGCTGAAGCATGACAAGCTGGTGCAGCTCTACGCGGTCGTGTCTGAG
GAGCCCATTTACATCGTCACGGAGTACATGAGCAAAGGAAGTTTGCTTGACTTCTTAAAAGATGGTGAAGGAAGAGCTCTGAAGTTGCCAAACC
TTGTGGACATGGCGGCACAGGTTGCTGCAGGAATGGCTTACATCGAGCGCATGAATTATATCCACAGAGATCTGCGATCAGCAAACATTCTAGT
GGGGAATGGACTAATTTGCAAGATTGCTGACTTTGGATTGGCTCGGTTGATTGAAGACAATGAATACACAGCAAGACAAGGTGCGAAGTTTCCC
ATTAAGTGGACAGCCCCCGAAGCGGCCCTGTATGGAAGGTTCACAATCAAGTCTGACGTATGGTCTTTTGGAATCTTACTCACAGAGCTGGTCA
CCAAAGGAAGAGTGCCATACCCAGGCATGAACAACCGGGAGGTGCTGGAGCAGGTGGAGAGAGGCTATACGATGCCCTGCCCACAGGACTGCCC
GATCTCCCTGCACGAGCTCATGATCCACTGCTGGAAAAAGGATCCGGAAGAGCGCCCGACCTTCGAGTACTTGCAGGGCTTCCTGGAGGACTAC
TTTACGGCCACAGAGCCCCAGTATCAGCCCGGTGAAAACCTGTGAGAGCCTGCGCTTCAGACGCCTCTTCCCGAGGCCTCCCTACCCCTCCCCA
TTAGCTTCCAATTCTGTAGCCAGCTGCCCCAGAGCAGGAGAACCGTCCAGGATCAGATTGCATGTGACTCTTGAAGCTGAACTTCCACGGCCCT
CATTAATGACACTTGTCCCCCAGTCCGAACCTCCTCTGTGAACCATCTGAGACAGAAGCGTGTTATTTCTCAGACTTGGAAATGCATTGTATCG
ATGTTATGTCAAAGGCCAAACCTCTGTTCAGTGTAAATAGCTGCTCCTGTGCCAACAATCCCAGTGCTTTCCTTTTTTAAAAAAGAAAAAGCAA
ATCCTATGTGATTTTAACTCTGATTTCACCTGATTCAACTAAAAAAAAAAAAGTATTATTTTCCAAAAGTGGCCTCTTTGTCTAAAACAATAAA
ATTTTTTTTCATGTTTTAACAAAAAAATGATCAGGACAGGTGTTTGGGTTTTTTTTCCCTTTTTTATACATATGATATATATGTTAACATATGT
TCCTGTACATACACCATGTGGGTGCTACCATGGAGACTGGCCAGCGTAGGCCACATAGCTACAGGACCGGAGTGGGGATTACTGCAGCGTGATC
ATGCAAGCTCACCCCCTTCCAGCAAAACACTGGTGTCAGCCTGCAAGCCGGTGGCTCATTTTTTGACTTCTACGAAGCATGACGTCCTCTCCAT
TTGGACTTTTTAATAACCTAATCATACCTATAGATTGTTCATGTGACTTTTTTCAGGTCCAGGGCCTAGTCACGAGTTTTAGTGCCAGTTTTTA
GTCCAGCTCAACTGTGATTCGTCTTGAAACTTAGGAGTGAGCATTTTAGCAAAAAGCAGCCAGCCAGTTCTACCACAAGAGCTGCAAGACGGAG
ACCACACTAACTTCCTGTATAAATATGAATGCTGAAGGGTTCAGGTGTTTTCCTTTTATTTAATAAATCTTGTAACCACATTTAAATGGTCTAA
ACCCATAGCATTGGTCATGGGCAACCTAAACTTTTCTCATGCAACTAAAATTATGGGAAGGCTAAGGGTGGGGGGTTGGTACACGTCCCATTGT
AAAATAAGTGTTTTACTGTCCTGTACTGCTAATGACTGACTCTCCGTGTCAGGAGTGCTCCAGTGAATAACTATGCACTACTTTACATTTCATG
GGGGTGCACAAAAAAAAAAAGGTATTACAGTTTTTAGTTGCTGTTTGTACCAACCTCGAATTACGTATGTTTAACAACAAATCAATTCCTATTC
TATTGAGTTTTAATACTGACTAGCAATTCTGAAGTCTTAATTCCTTTTTTTTGTTAATGATTTACTTGTGAGTTTACATTTTTAAATTGTTTAA
CTTTCCTAATTTAGTAATTAAAAGAGAGCATTTTACATTTGAAAAAAAAAAAAAAAAAAAA
MOUSE SEQUENCE—CODING
ATGGGCTGTGTGCAATGTAAGGATAAAGAAGCAGCGAAACTGACAGAGGAGAGGGACGGCAGCCTGAACCAGAGCTCTGGGTACCGCTATGGCA
CAGACCCCACCCCTCAGCACTACCCCAGCTTCGGCGTGACCTCCATCCCGAACTACAACAACTTCCACGCAGCTGGGGGCCAGGGACTCACCGT
CTTTGGGGGTGTGAACTCCTCCTCTCACACTGGGACCCTACGCACGAGAGGAGGGACAGGAGTGACACTGTTTGTGGCGCTTTATGACTATGAA
GCACGGACGGAAGATGACCTGAGTTTTCACAAAGGAGAAAAATTTCAAATATTGAACAGCTCGGAAGGAGATTGGTGGGAAGCCCGCTCCTTGA
CAACCGGGGAAACTGGTTACATTCCCAGCAATTACGTGGCTCCAGTTGACTCCATCCAGGCAGAAGAGTGGTACTTTGGAAAACTTGGCCGCAA
AGATGCTGAGAGACAGCTCCTGTCCTTTGGAAACCCAAGAGGTACCTTTCTTATCCGCGAGAGCCAAACCACCAAAGGTGCCTACTCACTTTCC
ATCCGTGATTGGGATGATATGAAAGGGGACCACGTCAAACATTATAAAATCCGCAAGCTTGACAATGGTGGATACTATATCACAACGCGGGCCC
AGTTTGAAACACTTCAGCAACTGGTACAGCATTACTCAGAGAAAGCTGATGGTTTGTGTTTTAACTTAACTGTGGTTTCATCAAGTTGTACCCC
ACAAACTTCTGGATTGGCTAAAGATGCTTGGGAAGTTGCACGTGACTCGTTGTTTCTGGAGAAGAAGCTGGGGCAGGGGTGTTTCGCTGAAGTG
TGGCTTGGTACCTGGAATGGAAATACAAAAGTAGCCATAAAGACCCTTAAGCCAGGCACCATGTCTCCGGAGTCCTTCCTGGAGGAGGCGCAGA
TCATGAAGAAGCTGAAGCATGACAAGCTGGTGCAGCTCTACGCGGTCGTGTCTGAGGAGCCCATTTACATCGTCACGGAGTACATGAGCAAAGG
AAGTTTGCTTGACTTCTTAAAAGATGGTGAAGGAAGAGCTCTGAAGTTGCCAAACCTTGTGGACATGGCGGCACAGGTTGCTGCAGGAATGGCT
TACATCGAGCGCATGAATTATATCCACAGAGATCTGCGATCAGCAAACATTCTAGTGGGGAATGGACTAATTTGCAAGATTGCTGACTTTGGAT
TGGCTCGGTTGATTGAAGACAATGAATACACAGCAAGACAAGGTGCGAAGTTTCCCATTAAGTGGACAGCCCCCGAAGCGGCCCTGTATGGAAG
GTTCACAATCAAGTCTGACGTATGGTCTTTTGGAATCTTACTCACAGAGCTGGTCACCAAAGGAAGAGTGCCATACCCAGGCATGAACAACCGG
GAGGTGCTGGAGCAGGTGGAGAGAGGCTATAGGATGCCCTGCCCACAGGACTGCCCGATCTCCCTGCACGAGCTCATGATCCACTGCTGGAAAA
AGGATCCGGAAGAGCGCCCGACCTTCGAGTACTTGCAGGGCTTCCTGGAGGACTACTTTACGGCCACAGAGCCCCAGTATCAGCCCGGTGAAAA
CCTGTGA
HUMAN SEQUENCE—GENOMIC
TCTCTCCCTCTTAATTTTTCAGTTGACAAAGTATACTTCATCAATGTGTAGTTGTTTCAACTTACATACAAATTCAATCAGTAACTGATAATAT
TAAAGGGAACTTTCTTATAGAAAAATAAAGGTGATTTATTCTCATTATAAAAAAAGTACATTCTTGGTATAGACAAATCTGAGAAAAAAGACAC
AGAGAGCAAAGAAAGAACAGTTGCCCATAGTGTTATCATCTGCACACCACCATAATCTCAGCATGTTTCCTTCCAAAGAGTTTTCTAGGCATTT
GTTATATAGTTGCAATCATGTGATCCTTCCTAATATAACATGAACATCTTTCCATATTGCTGATAATTTCAGTAAATGTAAGTTTTAATTTCTG
CTTAACTTGTCTTTATGGGCATACCTTACAATTTACTTTAGCCATTGCCCTCATGCTAAACAACTAACAAGTTTTCTAATTTTTCAAATGATAA
ATAATACTTCATAGAACCTCTTCATGTCATTTTTTTAAAAGGCGTGTCTTTAGCACACATTTACAGGTTAAAGGACATGCCACCCCCGACACCC
TTTTTTTTTTTTTTTGAGGCAGTCTCACTCTGTCACCCAGGCTGGAGTGCAGTGGCGCCATCTCAGCTCACTGCAAACCTCTGCTTTCCTGGTT
CAAGCGATTCTCATGCCTCAGCCACTCGAGTAGCTAGGTTTACAGGTGCCTGCCACCACACCCATCTAATTTTTGTATTTTTAGTAGAGTTGGG
GTTTCACTATGTTGGCTAGGCTGGTCTTGAACTCCTGGCCTCAAGTGATCCACCCACTTCAGCCTCCCAAAGTGCTGGAATTACAGGTGTGAAC
CACCACACCTGGCCGAGTATGCCCATTTTTAAGAATTTTTTATATTGCCAAATTGGTTTACCAAATGGTTTTACACTGATTTCTGGTCTTCTAT
CAGCAATGTAAGAGAGTCATATTCATTTCAAGGAAACTTCATCACTATTGAGTATACTTATTTTTTTAATGTGTGAATTTAGAAGTGATACATA
GTATCTCACTAATCTAAATTGTATTTCTCTGATTACTACCAAAGGCAATATTCTCCCATATGTTTCACAAATTGTTTTTCCTTTTTTTGTTGCC
AATATATGTTTCTGTTTCCTAAACTTAGAGTTTCTCTTATCTGTATAAATTTCTTATATATTGAAATATTAATCTAAGAGAGTTGAAAACATAT
CTCCACAGAAAAACTTGAGCATGAATGTTTGTTGCAGTATTATTCATAAGAGCCAAAACGTAAAAACCCAAATGTCCATCAGTTGATGAATAGA
TAAACAACATCTGGTATATCCATACAGTAGAATATCTTTTAGCCATAAAAAGGAATGAAGTACTAATACATGTTACATGAATGAACCTGGAGAA
CATTATACCAAGCAAAGGAAGCCAATCACAAAAGACCACATATGATGTGACTCTGTTGATATGAAATGTCAAGAATAGGCAAATCCATAGAGAC
AGAAATTAGATTCGTGGTTGCCAGGGGCTGGGGAGAGAAGGGAGTGGGTAGCGATTGCTTAATGGGCATGGGTTTCTTTCTGGAGCAATGAAAA
TGTTCTGGAATTAGATAATGGAAATGGTCTCCTTTGTAAATGTACTAAAAACCATTGGACTGTGTGCTTCAAGAGGGTGAATTTTATGGTATAT
GAATTATATCTCACTTTAAATGAAATTTTAAAAATATTAACTACAAGGGGCTTTTCTATGGTCCAAAAAGGCTTGCGGGCAGGGGGTGGAGCCT
GAAAAAACTTTACAACCTGTGCTCTAATTCTTTCTGAAACCTTTGGCATAGATGGGGTTAAAACATATCATCCTTGTTTTCATCACCATTTCAC
TCTTGTCTTAACCCTGAGATCCAGAGCAAAATGAATTTAAGAAGAAAATGTTCTTACTCTTTTCTTGGAGCCTTTCCATGGTTTGGTGTTAAAG
CCTCATTTGCCCATTTAGGTTTGGGACTGGTTCCAGCATTCAGTTGACTGCAGTCTTAAATCTCACCACTCGGGTCTGATGCTTCCATTTCTCT
TTTATTGAGCGCTTTTGAGTCTTCGGGCTCGAGAAATGGAAGGCTATGCAGAAAGGAAAGAACATGTTTGTTGCAGGGATGTGAGCAGCTGCCT
CTTAGCCTGGGGGCCATTTGAACAAGAAAAGCCAGAGATGGGGACCCACAAAAATATTCTAGGTGCCAGCAGTATGGCTTATTCTTAAAGTAAC
ATGACATTTTTAAGAGTGATTTATATTACTTTGGTTCCCTTGCTGTGCGGTATGAGAGAAGGTTGATCCTCTTCCCCCTCCAGAGAACCTTTGC
AAAGTCATGCGTAAATGATCGAATGGGTTCAACTCCACTTATTTCTGAAGCAAAGCTTGGGTTTGATTTTTAAGTAGGCTCTGTTCTCCCATGA
TTGCATGTGGCTAGTGTCTGCATTGTGTATATTCCCACTTTTACATCTATCTTCTCACCTCAGAGACTGTAATATTTTAATACTTGCATTTGGC
GAGGGGCTCTCCCTCACAGGCTTCACCAAGAGTAGAAAGCTGTTATTTTGTGCTTGGTGGAGGCATTATATGTGTATCTCAGTTTATGCAGTAA
ATATGTTCCAGAAAGTTTTGCCTGTAAAGCAAATCATATTTTAAGTGCAATAGGAAAGCTGATTTTTATACCAAGGAAACCAGTGCCAACTCCT
TCATGGTACTTATGAATACCCTTGCCATGACTAGGAAAGATGAGGAAATTAAGGGCTGCTTCAGTGTCATCGGCCCAAATAGTCATTAATATGC
CAAACCGCACGAAGGAAGATGGTGACTCACTGCACCTAGTATGGTCCAGCATCTCTACAGAATCCACTGTCTTGGGGGAATGGAATGTGCATTG
GGGATGGAGGTGAGACCTAGTCCCTGAAATCAGTGCCTCCGTTAGTAATGTGTACTAGTCCATTCTCACACTGCTGTGAAGAAATACCTGAGAC
CGGGTAATTTATAAAGGAAAGAGGTTTAATTGACTTGCAGTTCCGCATTGCTGGGAAGGCCTCAGGAAGCTTACAATTATGGCAGAAGGCAAAG
GAGAAGCAGGCACCTTCTTCACAGGGCGGCAGGACGGAGTAAGTGCAAGCAGTGGAAATGCCAGATGCTTATAAAACCAACCATCAGATCTCAT
GAGAACTCACTCACTATCACGAGAACAGCATGAGGGAACTGCCCCCATAATTCGATTACCTCCACCTGGTCCTGCCCTTGACACATGGAGATTA
TAGGGATTACAATTTGAGGTGAGATTTGGCTGGGGACACAACCAAACCATATCATAATGTGTGAGATATTGAGCTCTGTGGAACCAATTCTTCC
CTATAGGATTTTTCCCTCAACACCTCCAGCCCTCACACCCACACCCTTGCATGGACTGGCCAGGATTCCATGGTCAGGAAATAGCTCTAGTATA
GAGACTCTGTGTGTTGGCCATGGAATCAGGCTATCTGGTTTCAAATCCCATCTCTATGACTGACATAGCTGTGGACAAATTCCCCAACCCCTCT
TTTCCTCCCTTGTAAAGTGTGGGGAAATAGTAATACCTGTGTTTTAGAGTTGTTACTAGATTTTAATGGGACAGCATTTTGCAGAGTCCAGCCT
GCACCTAGGCTACAGGGAACACTGATTGGATATTGGTCATGACTGCTGAAATTGGAGCCATCATCCCCATGGTGCCCATCCCACCAAAACATGT
ATTAGTTTTCTGCTGCTGCCTAACAAAGTACTACAAACTTAGTAGCTTAAAACAACATCCATCTGTTAGCTCACATTTCTGTCAGTCACAAATC
CAGGCACGGAGGGGATTCTCTGCTCAGCAAAGCCGAAATCAAATGTTAGCTGATTATGTTGTTGTTTGAAGGCTTGACTAGGGAGGAATCCATT
TCCAGGTTCATTCAGGTTCTTGACCGAGCTGTTCTCAGCTCTGACCACCCATGTGTCTGGCCACATAGCCCCTTCATCTTTAAAGGCAGCTGTG
GAGAATCTCCCCCACAATGAAGGCCTCTCTCACTTTTAATCTACTTTTCCAGGAACTGGCATACCGTTCACGGGTTCACCTGATTAGGTCAGGT
CCACCCAGGATGATCTCTCAAAGTCGGCTGTGCCAAATAACAACCCGATGATGGAGTGACTACCCCATCATTCATAAATCCTAGGGATTTGCAG
GGCACATACACCGGGAGTAGGAGTCCTGGGGGACAGCTCAGAATTCTCCCTACCACAATGTCATTTAGCAAGGCACATATTTTCACTCCCTCCA
GTTGGCAGCAAAGAGAGGACTTTCCCACATTGGCAGAGTCCTGCATGCTTTTTTTCATAGCTGGGCTGGGGCCATTGGCTGAACCCAGCATCAG
TGCTGAAAGTGTTTCATCCCTCAAGTATTAACATCTCCAGAGGGCCAACCCAGCAGTGACTTTTTCTCTGCTTCAGTACCTTGGGAAATGCTTG
TGATCCCAAGAGTGGCCAGCATAGCCCTGCTTTCTGTCCAGCCTCCCCAGTCCTCCCTGGCCCTTCTGTCCCGTCTGTCCCCAGAAGGCAGCAC
TGCCTGCACTCTCTCATGGGGTGTCAGGATCATCTGATGCAGTATGCTACAGAGGAGAAAAGCCCCATTGTAAAGGATTGAAAGGTGCTGGGAA
ATTAGGAAATTTGGGTGACAGTTTCTGTGGCCCAACCTCATTGCTGCTGATGTGGTACTCAACTGTCTCTGAATGTCCTTCTGCTCCCAGTAAT
GACAGGGGAAAACTAAAGAAGGCTTTCCTAGGCTTTCAATGGATTAACTCTCTCCACTGAGAATGTAGCAAAAGTCCCCAAGTAGATTCTTATG
GGTGTTTCTAATTTTGCGAGGATCAAGAGCCCTCTGCCATGAATCTTCTATCCTGAAGTCAAATAATTTCAGATGTGTCTCTGCCACATCTTAT
CCTTTTCCTAATGCTATTCCTGCTGACTGAAAAAGTGTGTTTGCTTGATAAGCTTCCAGTTTTTGCTTTTTTCCGAGAAAAGTGTGAAACCATG
CAGTTGATCTGCAGTTCAGCTTTAAATTCTTTTTTCAACTGCCCCCATCTCAGTTGCTTGCATTTGGTTTCTAGGTTCTTAGTTCAGTTCCCTT
CCTTGTTCTTATACTTCCATTATGATACCAGGAAACATGCCACCTCTAAGTACGGGCCAAATGTGGCTTTACCTGTCACTCTCCAAAGTCTGCT
GGAGGCTGTCAGAAGCAGGGATTATGCCTAAGGGCTGTCACTTCTTCACACCCACCTAGGTTGGCTTCTGAGACAAAAGAGCATACACCCCTGA
AATTAAAGTTATTTGTTGTCGGTTTCACTTCCTCTTCCTGCCATTCCTCCTCTGCCTGCAAGTGTATGTGTCTCAAGAGAAAGTAATTTGCTTG
TGCAGAAGACTGCCAGTGGCCTTTTTCCCATTTTGGTACCTAGCTCCTGCACACACCTGAAATCTTATCACACGTCCTGCAAGCTTATAACTTG
GGCTTACTGGCATTGCTTTATTGATTGGCACATGACGAAATATGAATGTGTCTGTGTTTAATGTGCATCTTGTAGACTGGACTGTGGTCTGTCT
ACATCAGGAGGAGGGAGTGTATGTTCAACCAGACTCATCTTGGATCGAAGCACCCTGTGCCTGTGGTAGTAAAGGATTGAATCTATCCTTTAGG
TCAGTTTCCGTCAATCACTACAGGGCTATGTGGAGAAGCATATCTCCCATAGCATGGCAGCAGAAAGGGCTGTGATCTGTTGATAATGTCTGCC
CTGCTTATGGGAGCAGGGTGCGGCGTTCCTTGAATCCTGTGTCCGGCAATTCTTCCCAGGTTGCTTAACACTATTGGCACATCTGTAAAGAACC
ACAGGACTAGGGAAATTTTAAATAGATCAAGTTTTATTTGCTTAGTAGAAAAAGGGCCCCTCCCTTTGCAAAAGGATTGGAGAATAGAGGCTTC
ACAGCTGTAATCCAGACACCTTGATCACAGGCACAGGATCCAATTGGTGAAAATGCCCTTCACCAGTTTTTCTAGGCATGATAACTTGCAGAAG
ACTATAGCCATGAGTTCATGGCGTGTGGTATTTTCCTGATCAGAGTAACTCCAGGGCTCCACATTCACGATGGCATCATTCAGTGTTTCCCGGT
GCCCCAGAGATCTATAGCAAGTGAATTAGTACATTCTATGTCACGATGCACTTACAGCATTGGACATTAAAGCCACAGCACATAACTCTGCATA
ATAAAGGATACTTTTATTTTAGCATGAATGATCAAAAGTTTGCCTTGTAGCAACGAGCCTGGGCACACTGAATACAGCTCATGTAGCGTCTTCT
GACTCTTCTGTCACGAAGCAGTTAGTCTGACTGCCCCACGGGGGAGAAAGAAGACCACAAGTTCCTACATAAATATTTTCATTGTGATTAACTT
TTAATGACTTGAAACTGCATTTACTGATTTATTTTCACTTCTTCCTATGTGTCATTGAAGAGAAAAGAGTAAGCAAGATCTGTATAGAAACATT
ACTTAACTCAGAATGTCAAATGCGTGAAGTGGTGATGGTGCTGTCTCTTCTATAAAAGAGGATTGTTTTCTCCAAAATGATTTTGATTATTTTT
AATTTATTTATTTAACTAATATTTATTGAGTGACTACTGTGTGCCAGGCACTGTTCTGGCCACGCAAGATGCAGCAGTTAAAAAAAAACAAAAA
TTCCTGCCTTCAAGGAGCTGATGATTTTTCTTCTCTATTACTTCATAAAATTATAGATAAGCTGCTAGTTGCTTATTATAGTATATTTCTTTTT
TAAAGTGGATTTTGAAAGATTATTTTTTCTTAGTTTGGTTAAATGTAGGATCCTGTTTTCTTCAGGGTTCTTATATGGGGCTTATTTTGTTTTG
CTGGAGTTGGAAGAGTGGTTTGCAATGAGTGTTCTCATTACTTCCAGGTTCTGTTTCTCTATCACAGTGCACAAGCTTCTAGAGAAAATCAGAG
CACTTCATGTCACTCTTTAAAACTGCCTGCTTCTACCTAACATGCCTGTTCGCCTGAAGAAAGCATGATGGGTTGCATGTTAATCACATCCATG
TAAGGGAAACAGCTGTTAAACTGCTTCAAAGATGTAGATATAAATTCTTTCCTTCGTGTAAATCAGGATTTCTTGACCTTGACACTATTAACAT
TTGGGGCCAGGTAACTCTTGTTTGTAGGAGGCTGTCCTGTGCATTGCAGGAAGTTTTAGCAGCATTCTTGGCCTCTACCCAGTAGGTATCAGGA
GTATCCCTCCCCTCTGAGTGTGACAACCCAAAATGTCTCCAGACATTGCCCAATATGTCTCTTGCAGGGGAGTGGTAAAGTTACCCCCAGCTGA
GAACCACTGCTGTAAGTGATATGAGTCTGTGATTCAGGTCTCACATTCTCTAATTACAGTAGATCAGTGAAATTCATGGAAAAAAAGAAAAAAC
ATCTGGGACAAGAAGTGTTTTCTGTCTGGTCTTTGCAGAAATGTGGAGCAACTTTCCACCACGAAAGAGTTAATATTATATGAGCAAGTTATCA
GTCTGATGAAGCAACATCAACAACAAATGATGAAATTCCTTTAGTACATCATGCCTTGGAAATAGCTTGCATTTCCTATTGGAAACTTGTTAAA
ATCATATCCATTTACCATAAGTTACAAAGCATGTTGGGCACGGTATACTGTAAGTTAATCTCAAATGATTTAGGAGTAAATGTGTTCCAGATTT
GGTGAGCTCAGCTCAAGCAGTAGGCGTCTCTTTTCCAAACATTTTCATTCTCAAGAACTGACATTCAATTCAATAAGTATTTATTGAAATGTGT
AATATGAGAGAGCTTTAGAACAGTCTGATACTGCTCCCATCACCCAGTCCAGCAGAAAAGCAGTGCTCAGAAGAGTGCCCAGGGAGCACTCTTC
TGATATGGCACCTCCTGCATTGGTTTGCAAGATAGTATAGAAAAGCATGCCTTCTCCTTTGCTGCCTCAAGCCCTTCCCATCCTGTGCCAGCTG
TGCCCTCCCCAGTGAATAAATGTTATTACACATGATGGCATGTGTTTCTTATGTGATTCTTTGGTCCCAAATGGGCTAGTTTGCGGTTTTGGCA
GGGACCTCCACTGGCCTGTTCTACCTGACCCCTGTTGGCTTGTTGGGGTATTGCAAGTCCAAAGGGGGACCATTTAACCAACTTGTATTTCTGA
ATCTTCTTCACTTCTCACACACATACCAGTAGATTTTAAAATGCAAGGTACACTGCTGATAAAAGTCACAGGAGGGGCCTGTCACGGTGGTTCA
CGCCTGTAATCCCAGTACTTTGGGAGGCCGAGGCGGGCGGATCACCTGAGGTCAGGAGTTCAAGACCAGCCTGACCAACATGGTGAAACCCCAT
CTCTACTAAAAATACAAAAAATTAGCTGGGTGTGGTGGCAGGCACCTGTAATCCCAGCTACTTGTGAGGCTGAGGCAGAGGTTGTAGTGAGCCA
AGATCGCTCCACTGCACTCCAGCCTCGGCAACAGAGTGAGACTCCATCTCAAAGTCACAGGAGGGATCGGCTTTAATACAGAGAGGGTAAAAGA
GAAACATAATAGGCTACAGAATCTTCACTCATCTGGTTGCTATTTATTGTTCCAGGCACTGGCAATGTAGCTGTGATGAAAACAGACAGGGTCC
CGCTTTCCTGGAACTTGCAGTCCATTGGGCAATGAGACAAATAAACAGGCCCTGTTTTAATATGGCGCCAAGGGTGCCAGAAGGAGGGAGATGA
GGATGCCATGGGAGCACTTCAGAAAGCACAACCCAGCCTGGAAGGGCAGGGCAGTCGGAGAACGCCTTGCAGAGGAAGCGGTGCCTTATTAACT
AGGACATGGATACGTCACATATCAAAGAGGAAGGGGAAAAAGTGTTCAAGGTTATGTTCCAAGGCCCGAAGCGGGTGGGGGAATGGAGTCTTTG
AGGATCTGAGAAGTTGGGCGTGTTTGAATAGGAGAGCCGAGACAGGAAGAGTGGGAAGTAAACAAGGAGGAGGAAATGAGGATGCTTCTCAGGA
TGCTGACTGGAGCAACTGGGACACTGGTGGTCCCATTTACTTAGATGAGGAGCCTGGGAGAAGAGGGTTTGAGGAGGGTGGGGTGGCAACAACT
CGAGTTTTTAATCCGCCACTAACTCTGTAACATGGGAATGATTTTTTTTTAATGTTTTTGAAGGATGTCAAAAGCTAATGGAAATTTGAAAAGT
TAATTAGCAGCTTTAAGTGATTTCATTACTGTAGACTATCATGACATCCTGCAAATATACTCTGACCTCTTAGGTTCTGCCGATTTTATTTTTC
ATCCAGTAACTAGTTCTTAGTTTTGATACTTAGCATCATCTTAGTGCTTAAAATTGACCAGTTTTGTGCCTGAAGATGTGGTACCCATGAGTGA
AGCAGTCTAGTGACTTGATTGAAGGTTGTATTCTGGCTTATCCAACACTCCTGTGCCCTCTTCCTTAAATTTCCTGTGCCCTGATGGAAGTTTT
TATTCTAATGTTGCATAGACTCATTCTACAGAGCATGTATTATTTTTTTTAGATGGCTAAAGGCAGAATTGGTAAATATGATTGGACCGTCTGT
AGGCAGGTGTATGCTGTTACAGAATTTTACGAGATACAGGCCTTATTCGAGGAAAGTTGCTGCATGGTGAACATTGTGCTCCGTGATGATGCTG
TCATCCAGAACATATGGGGAACAAATGCGATTGTGGGGTCAAGGAACTGAACTTCCTCCTAACCATCTCCCCAGCCACTGCCTTTCCTCATGCC
CCCTAATAGGCCTGAAATAGCCAACAGTGAGCCTTGTCAATTACTCCTCGTTTACTGTAGAGCAACCCAGCAACTAGGGAGCATCCCAGCTTAC
GTGCCCCCTTTTTTGTCTTTGGCAGGAATTTAGATAATGGGCTGTGTGCAATGTAAGCATAAAGAAGCAACAAAACTGACGGAGGAGAGGGACG
GCAGCCTCAACCAGAGCTCTGGGTACCGCTATGGCACAGACCCCACCCCTCAGCACTACCCCAGCTTCGGTGTGACCTCCATCCCCAACTACAA
CAACTTCCACGCAGCCGGGGGCCAAGGACTCACCGTCTTTGGAGGTGTGAACTCTTCGTCTCATACGGGGACCTTGCGTACGAGAGGAGGAACA
GGTAAGCCCCCAAAGTCACAGAGTGCAGAGAGGGGGCAGCCACCCTTAAATCTTTTGGCAATTGAACATCTGGGTTCCCATCACTTCCCTTTGA
CTAGGGGTTTCACATGTAAGTTTCTAATCTGTCTCCTCTACTAGATGAGGGGTTGTAAGAAAAGCCAGAGTTTGATGTACAAACAAAATGCTTG
GCTACAGGGTTGCAAGGTGCCCCAAGTTGCTGCTTTCTGAGGATTCTATATGGGTTAGTGAGCTACAACATTCTACTGAGGCACTGTAGGTCAA
TGACTCTCAGCCTCACCTGGCTGGTTGGCACAGAAGAACTAGGGCAGCCTTTTCAAAACACGGATGCCTGAGCCATGTCCCAGTCTTTTGAATT
AGAGGCTCCAGGACTGGGTCTGGGTGTGTGTATTTTGAGTTCTCTAGATATTAATGTACTCCCTCTTCCCACTCACTTCTTCCTAATCCTCAGC
CTGCCTTTCTTTTTTTTTTTTTTTTGGAAGTTTCCTTGTCTTTCATACCACAAGGCTATATTCTGCTGCCATGTGTATTTGCTGACTTAGCTAA
TACTTTGTAAAATATCTGGCGTACGTTCTCAGACATATGTTTTCCGAAATATTTGTAAGTTATGTCATGCATCCCTAGTCATCCAAATTTTCTC
TGAGTATGTGAACCATGGTAACTAGATATTTCACATTATTTGTTCCAGAATTATTTTGTTTATTGCAAAAGTTTGAAAGAATGCAGCATCTCTC
AGTTCATCTGGCAGCAGATGTCTTATATAAAAGTTTGAAAGAATCCAGTATCTCTCAGCCCATCTGGCAGCAGGTACCTTTTCACCTAGGGAGG
AGGCACTACTAAGGCATTAGCAAGTTTTTTTTCCCTCTGCACCCAACACACATCACACATCAGTGTAGTTGTATCAAGGAGCCTGACCCTGAGC
CTTTGGACATTATCTACTTCTCTTCTGCTAGCATAGCACACTCTGCCCAGTAGAAGAAGTATTTATGTTCACCCTCATGCTGTGGTGACTCTAG
CTTTCCTTTTAACCCAGGCCTTGCATGGGTTGAATACGTGCTAAGTACCTTTACCCATCCTTCCCACCTTCCCAAAGGTGCCTGAAGAGACACA
GACAGGCAGTCTAAGGCCATCTGTCTTCTGATGATGCAGGAGAAAAAAAGAGGCAAACACAACCCCCATCCTTGTGCCTACCGTGAGAAGCATA
AGGGCTTTGCCAGCCCAGACTGTTAATTCTACTGACACAGCCATTGTCCTTGTTCATTCATTCACGAGTGCTGGATATGGACCCCTGGGTCTGC
AGGTATCATTCATTAAAGTCACTAGAGAGGGCCACTTGTGTTGAGCATGTGGGTCTCCACCGTAGTCAGGAGGAGTCTTTGTTTAAGAGGCTAC
CTGATCCCTTATAAAATTTGAAAGTTAAAACACAGTACTCCCAAATGTTGGCAGATTTTTCTGCCTTGAGTTATTTGGTTTTAATATATATGCA
TGTCCTTTCTCCCAATACTGCCTTCAGTCCTGTAAGGCCAAGAACAACGTCTGTGTTTCTCTGTAACCTCCTTTGATTCTCCCCTCAGCTCCTG
GAACATGGAACATAAAAGCCCTCAGTGAGAACTTGTCAGCTGATGCAAGGAGAGAGTGGGGTGCTGGTCTTCATGTGCCTTGCCTTCCACACAG
TGGGGCTGGCTTGGCTTCATTTTTAAATTGTTTTTAAAGAAGGGAATCTGGTCATGGAGTGTTAAATAAGAATAGGCATGACCTTACGGGCACC
CACATTTTTGTTTTAAGCCAATCTCTTTTCTTACCTTTCAAAGAAATCTAAGGAAAGAAGGAAAGTTGCCAAATGAGCCTAGCTTTGCATGGTC
AGACCTCTGAATGCTAACTCTCCTGAGGAAAGTCCCACTTGGGATGGGGCAGAAAGACAAGCCCCACTCTTCTCTGTGGTCCTTGAATAGTGCC
ATGACACATTTCTTCCCTTGGAACTACCTACACAGCAAATTGGCAGCTTGGTAAAAAAGGTGGACTCTGGCCGGGTGCAGTAGCTCATGCCTGT
AATCCCAGCACTTTGGAAGGCTGAGGTGGGTGGATCACTTGAGCGCAGGAGTTTGAGACCATCCTGGCCAACATGGCGAAACCCCGTCTCTACT
AAAAAATACAAAAAATTAGCCAGGCGTGGTGGTGGGCGCCTGTAATCCCAGCTACTCGGGAGGCTGAGGCAGGAGAAGTGCTTAAACCCGGGAG
GCGGAGGCTGCAGTGAGCCGAGATCACGCCATTGCACTCCAGCTTGGGCAACAAGAGTGAATCTCCATCTCAAAAGAAAAAAAAAAAAGTGGGC
TCCCTGTCATTTCTGTAGGTCATAGCAGGCACTCTGAAGTGCAGAGAGACCAGAATGAAAAGGCAGACTGCAGGGAACTACTATTAGTTATCAA
CTGCTGTATAACAAATTGCCACAAAACTTAGCAGCTTAAAACAAAACACATTTAATTTCTTTTTTTTTTCAATTTCAGATGTTTTTTATTCAGA
GGTTCTTAAAAGAAATAAAACAGAAAAGCTAACAGTCTGATCAAACATACAGCTCAAAAATGTCTTTTGACGTTTAACAACAAGTCCTAGGAAA
GAAAACTACAGAGTTATCTTGAATGGGGTAAATAAGTTACCACTGGCAAGTCTGTGGCACTAGTAAAACAAAAATAAAAAATTAAATCTCGGCC
AGGCGCAGTGGCTTACACCTGTAATCCCAGCACTTTGGGAGGCTGAGGCAGGCAGATCACGATGTCAGGAGTTCAAGACCAGCCTGCCCAACAT
GGTGAAACCCCGTCTCTACTAAAAATACAAAAAATTAGCTGGGCATGGTGGCAGGCACCTGTAATCTCAGCTACTCGGGAGGCTGAGGCAGGAG
AATCACTTGAACCCGGGAGGCGGAGGTTGCAGTGAGCTGAGATTATGCCACTGCACTCCAGCCTGGGCGACAAGAGTGAAACTCCATCTCAAAA
AAAAAAAAAAAAAATTAACTCTCTTGATCATATAGATATCTCTATATCTCTTTTTTTCAATCGGGTACAAAAGATCTTTCTTCATAATTTTTTT
TATAATTTAATGGCTATCTACTATATGATGTTTAACTAATTTTTTTTTTAATATACAGAGGTTATGTTTCCCAAATCTTACCCAGACGAGTATG
GCACTTAGTTAGACATTTCTGGCAACAGATTTCCCCTCCCCTCTAACCAAACTATCAAATTTCTGCCTTAACTAATGCAGAAGTATCAACTAGT
GGGAGACCCAGGTTTATAACTGTACTAGGTACACAGAGGGTGCTGCGTTCAGCCTGGGCTTTCACAAAGCAGTAATATTCCAGGGAGCATAGAA
CCAGTGATACCGTGACTTTTAAAAAATAAAACAAAAACAAATTTATCTTATGACTATGTAATTTTCACTAGAATCTACACTTCTCAGAGCAGCC
AGGACTTTGGAAACTATGAAATGTCACTGACATTTATCATCAAATACAAGCATAAAATGTAAGAACTAAAAAATACTCAAAAGAAATAACTGCT
TAGCCCTAGCTTCTGAGCTAGGAGGATTTGGGCTGTGGAAACAGGGAGGGCCAGCAACCTGTCCCAGCACAAAAGAAAATAGACTCTGAGGTAG
ATAACTGATCATACACAGCTGACCAGACAAGTACACAGTTTTGGAAGGCAACTTAATTTACCATTGCTTTTAAGACATATGCAATTGCCTTAAT
AAAAGAGCTTTAATAACAGTGTATTATCTTATATGTACTAAAGTAGAAATAACTGTGTATTTATGAATCAGGAATTTCATAGTTTCAAAACTGG
TTTTCTTTACACTTGAACACTTGTAGTGATGACATAAAGTGTGGCACCGCTTGGATCCAAATCTTCCTTCATGCTTTTTTGTTTATGTGTGTCC
ATACATCAATTAAAATTATAAAACCTAAATTTACAGTTTCTGTGGGTCAGGAATCTGCGAATGGTCAGTTCGGTCCTTCAGAATCTCTCACAGG
CTGTAATCAAGGTACGTTGGCTGGGCTATAGTCATCTCACAGTTTAGCTGAGAATGATCTGCTTCCAAACTCATGTAGTGCTGGCAGGATTCGG
TGCCTCGCTGGCTGTTGGCCAGAGGCCACCCTCAGTTCTTGGTCACATGGGCCTCACCAGCATGGCGCCTTGCTTCATCAAAGTACACAAGCTG
AAGTGGCAATAGAGAGAGTCTGCTAGAAAGACGGAAGTCACCATCTTTTGAAGCCTAGTCACTTAAGGGACTGCACATTCTGTTGAGTAGAAGC
AAGTCGTTAGATCCAGCCCACACTCAAGGGGAGCGGCTTGCACGAGACTGAATACTAGGAGGCAGGAGTCACTGGGGACTATGCTAGAATTATG
CCTGTTGGGTTGGGCACAGTAGGTCACACCTATAATCCCAGCACTTTGGGAGGCCAAGCCAGGGGGATCACTTGCACCCAGGAATTCGAGACCA
GCCTGGGCAACATAGTGAGACCCCCGTCTCTATTTGAAAAAAAAAAAAGAATTATGCCTAATTATATGGAGGAAATCCTAGGCCAAATGACACT
GGATATTCTCTGCTGCTGCTAGCAAACTTCTGTAAACCAGGAAGGGCCTCTCTAGAGAGCCAGATGAGAGGACATAGGGTGGGTGTGAGGAAGA
GTGAGTGCTACAAGACAGTGTGAGGAGAGGTGAGTTCAAGGTAGGGGGAGGACAAGGGAGAGGGTTCCATTTTCAGCAGTGGGGCGAGCAGCAC
AAAACTGCAAAATGAACTGCAGATGCCAAGGGCAGTACATCCTCTAATTGGGGTGAATATTACAGAAACGGTCTTCTCTAAATTTCCCCAAGCT
GCAGGAGGCATTTCCTATTACGTTCTATGTTACTGTTTTACCAGGAGAAAGGGTGGTGCATTTTACCCAGAAACTAACATAGGCTCCAAGTGGA
GGAGAAGATACGACCAGCAAAGGATGTCAGTAACTGCTGCAGAGCCCTGCAAACCTGAACCCTGACGCTGACGCTGCCCTTTTGTTTGGGATGC
AATTTTAATATTTCCCTGCTCCTCAGCCCTCATTAAAAGCTATTACAGAAAGAAGCCCTTCAGGTCTAGGTTTCTTTCAGATACAGTAAGGCTT
CCCCTACAAAGACCAAGGCATAAACACAGCCCTGTGACTGTGGTTTTGACACGTTAATTACAACACTTCATCATGTTATTAGTGCTGGCTAGAT
GTAGATTGTGAGAATGAGATTTTAGTGAAGATTTAATTTCTTGGAATTAATTTCCCCTTGTGTAATAATCTCCCTTCTTGTGAATTTCGTTTCG
GCAGGAGTGACACTCTTTGTGGCCCTTTATGACTATGAAGCACGGACAGAAGATGACCTGAGTTTTCACAAAGGAGAAAAATTTCAAATATTGA
ACAGCTCGTAAGTTTGGAGAGGGAGGAGAAGCATGTATACCTTTCAGGTTGGGAAGGGGTCTTGCATTTCTGGTCTGCATCTCTTCAGATGTCT
GAAATGCTAAAAGAACATTTGCTAAATTCACTGGTTTACAACAATATACTTTGAGAAAAAGAAGAGTCAGTGACACAGTGCAGTATTTTATGGC
ACTGTGTGTCCAAGGAGATTTTTGGAGAGTACCAAAAATACTAGCACAGTCCATGTTTATTGGTTTTGGTTTAGGTTTAAAGGTTGTAAAATCA
CCAGCATCGCTCTCCACAGCCCTGAGTGTTTCTACAAACCTACAGTTTCAAGTGATTGGCACAACCCTTGGCTACCCACGTTTCGTGCTCTCTG
CCTTGAGATTTTCTTCACATTTCAGATGTTACACTAGCTAAGCCCTCACTTGAGGCTTGCAACAAGTTCTTTATTTTATAAACTGCTAAACATT
TCTTTGGTGAAGCCTGTGGAGGCGTTTCCCTATAACAAAAATTTGGGAGTGACTGGAATCTTTTGGAGCTAGAAGAAGTGATTTCACCCACTCT
TGAATGAATATGCTGCATGGTTGTTTAATGTTGGCCAGGAGGAACAACAGTTAAACAAGCAGTGGGGAGATTTCAAGAGTGAGGATCACTCACT
TTTCAAATCCTACATTCAGTACCTCCATAAGAAGAGTAAACACGGGTCAGATTTTCTTAGGGTTTATAAATACTGCCTCTATTAGATTGAGGCA
GTGTATGTGGATGAGGCCCTTCAGAAAAAAATCTAGGTTCTGAAGAAAGTGTGGGGGGGTGGGGTTCCACATCAGCAAGCCAGGCATCTCCAGC
GTCCCTATGAGTGCTCCCGGTGGTTGGGAAAGAATGCCACCCAGGGGCTGAGGGGCACACCAGGAAGTTCTTCTATGCCACCAAGTCTGGTTGC
TTCTCCTCTGCTCTCTGAGCAAATCAGATTCCATGTTGGCAGAAGGACTTGGAGCCAGGCTCCTCAGCTTTCCCAGAAGGATATGCCAGAGGGA
GTAAGAGGCAGCCCTGGTCACACTGCACATCCCAGGAAAGAGGAGTGCTGATTGCCACAGGGACCTCCTTCAGGCCTGAAAACTGCCTCCTTGG
AAAGCCCACCCTTTTCTTGAATGCCCCCTGGCTCACAGAACCATGCAGTGAGAATATGCCGCCTTTCAACAGCAAGAACTGAATACTGCCATAA
AGGGCCAACGACTCTCTTCGAGACATCAGAAGGCACAGTCTACATAGCCACAGGGTTTTCAAACATATATTAGGATTGTCATCATTAACAAAGG
TGTGGGGTGGTGTTTTTTTAACTTTTTGTTGGAACACATGCAGAAAAGTGCACGTATCAAAAGTGTACACAGTGATGTTGCACAACAGTGTGAA
CGTACTTACTGCCGCTCAACTGTACACTTAAAAATGATTAAAATGATAAATTTTATGTTGCCTATATTTTACCACAATTTTCAAAAAGTATACA
GTTTGCTGAATTTTCACAAGCTGAACATGCCTGTGTGGCCACCAGCCAGGTCAAGAAGAGTGTTACCTGCCCCCCAGGAGTCCTCCTCCTGTAG
CCACAGGAAGTTTTTAAAAAATAATAAACAGCTACCATTCATTGAAGGCTCCTGATGTACCAGCCATGAGCTAAGTTACAAACATTCTCATGCA
TTCTTCCACTACTGTCTGAGGTATGCATCGACGTCATCGTTTGATATCTGAGGAGCCAGAGGCCCAGATTAGGAAACTGCCCCAGAGCACAGAG
CTGGCAGGTGGCAGAGCCCAGGGCGAGGTGCAGGGAGGCATCCTGAGAACAGTGTCAGGTTTGATCTGGGAAAGGCCCAGATACTTTATCAAAG
GGGATGGGAACCTTCAAGTGACAGGAAGCTTTGGAGAGTTGACTGGGGCTGGGGAGGAGGGGATTGGGCTTTGATCTCTCTGGGTATACCTCCT
TGCTGTTATTTTGCTGCTTGTTGGAGTCCATTAACTTTGAATTCTGAAATCCTCCGCCCCTTAGCCTCCCCTACATGCCAAGGTTGATTAGAAA
TTTCAAGACTATTTGTAAACTTTCAACTGCAAGAACCAAGGAATAGTAAGAGTGCAGACCCAGCTCTCAGGAGGCTTTGTCCACACTGCACGTG
CGTCTGTGCATTACGCTGGAGGGCGTTGGAAAGTCAGTCCCTGCCAGTGTCAGTCCCATGGCTTCTTCCTTTGTTAATCTGGAAACGATCTGCA
GTGTCACCAAATTGAAATTTTAGAGAAACACTTAAGGAGGATCCAATCCGTCTCAATCTCTATTTTGTGACTTCCATGCACGGCCTTTGATGTT
TACGGAGTCCTTTGAGCCTCCAACCCTGTTCTTGTAGAGGAAAATATTACAAAGGTTCTCTTCCTCTTAATGTTCTTCCTTTCTGCCAATGGAA
TTCCATATCAGTGGAATTTTAAAATTCCCTTTCTCAAGGTTATAGAAAAGAAAAATAAGGTTTGTGTAACAAGACAATATCCTGAAGTCAAGGG
TAATAACAGGGAAGAGAAAATCGTGAAGGAAAAACAAAGCAATAATACAGAAGCAGATGGCACACGGCTCCTCCCCTCCCCCATCCTCTCCCGC
CTCTGGCTCTGGTCCTCAGAGGAGAGGGAGGAATGGGGCTCTGTTCTGCCAGGGCAGCTGCCACACCTCCTAGTGTGTGTCCTCCCACTCCCTT
CCCTGGTGGAGCCCTGGTGGCGCTGGAGGCCACAGGGCTGGCTTTGTTAAAGTACAACATACACCGTGGGATGTGCATGTATGTATGTACCCAG
AGGCGGTGTTCCTGCTACCCAGCAAGGGGCAAAGGTGCTTCATTGACCCGTTGTAAGTGCTCAGTGTCATGTATTAGGACATTATTAAATTTGA
ACCCCTTTTGCAAAGTATTTAAGTTCATCCATTTTATTCCTTGTTTTCACATTTCAAGACTAGTCGTTTACCATCTACGAACAGTGACTCTTTA
AAATGTAATACATGTTTTACACAGAGTGGAGTATTGGTCACAGCTGAGGGTAGGTTTGTTGTTTTTTTTTTCCTATTGTGATAAAAAGAAATCC
TGGTTTAGAGCCCCACCCAAGCATTTGATAAAATTGTTACCGACATAAAATGCTACACTACTGAGCAGATCAAGGCTGACTTCTGTTGGCAAAT
AACTACTCCCTGGCTCCAAGGCTCTAGGGCTCCCAGCTCCGGGGCCCACAAGCCTACGAGCAACTTTGGGGTTTGGGGGTAGACACTTTTCTTG
GTGTGGGGTGTGGTGGGGGCACAGAATCTTTTAGCAAGTCTTTAAATCAGAGGAACAGAGACAGCTGTTATAAAACCTTAAAAGCCATTCTAAA
CCAGCGCCAGGCTTTAAATCATATATTTGAATTAGAGCAAGATAACAAAGAATATCTCACCAAGTGCAAACTGAAAAATCTGAACTATAAGAAC
CGTTTAAAGAAATACAGCTTTAACAATGCTAATTACCCACAGTAACTCAAGAAATAAAAGATAACATAGTAGAGATCCTATTTTCCTAAATCAA
CATGAATATAGAGTATATCTATTTATAGGTGAATTGGTGCTTCTAGTGTATCAAAAAGATGACTTAATTCACTCGCTCAACGGCTCTCAATGAA
TATTTTGAGTCTGTACCAGCCTCTCTAGGCTCAACATGTGAGGTTTACTACATAATAAACATTGAATCTTTGTCACTTTATGTCTCCTTTGATG
AAGAAGATGACCCTAGAAAGCCTAGAAAAAGAGAAATCAAGGATTTTATCTTTCTCATGAGTAGCTGAAAACCCTTGTGAGATTAATAGGGTCA
AGTGAGAAAATCATGAATTCCTGATTCATGACTTCAGAATGAGCTGATAATTGCATTCTGATCTGTGCTACACTATTTAGGTACCTAGACCAAA
ATGAGATAGTTAATGCTAGATTTGAATTGGAAATGACTTCATTAATGCCAGATCACCTGAATAAGGCTGGGCTTGTCCCAACCTGCAGCAAAAT
GTATTGGCTTCCCGCCCCTATTGACAGTCTCAGATACCCTAAAATTGATGCTAGCCATTTTTTTCTTAATTTAATTCAATTAGAACTAACTTGA
TGAAGGTTATCTTGCATTAAAAAACAATAAGCCTCTGCTACAAGCACTTAATTTTTTCCTCGCCATTTTGGAGCATTTCCCAGGCTGGGCGGGA
GAGGGTGGAGGGGGAGGAGCTGGGTATTGTTATTTTTAATGATGAAATGTCTCCATCTAGTGGAACTTCAGAGCAGTAAACCTTGTCACTATAT
TAAAGTGAAGATTATGTCTCCAAAGCCATTTTCCTTAAACACATACAGTGTTTAAAGAAAAAAATAAACTTCCACATATGTTCTTAGATGATAT
CCTTACAACTGTATGTATTCCTTTTGGAAGGCATAGAAATGAGACCAGTACAAACTGTTAACATTTTTAATGTCATGATTTGAACCTCAAAGAG
AGGGGTGCTTACAATAGGGGAGCAGCACAGTGCAGATCCCACCCAGTTGGTAACGATCTAGCTCTTAAGTTGGGCAGTGGGTTCACGGGGTTCA
TATATACTGTACCTATATTCTTCAGTATGTATAAATATTTCCTAACAAAGATCTAGACATGAACTAAATTTAAGATTATGAATAAATCTAGACA
TGAACTAAATTTTATGAATAAAGAACTTTCTGAATATGAGTACTGTACTTTTGCTGGATTTGTAATAGGGTAAAAAGGAGAGATTAGGAAACTA
AATTAAAGCATAAGGTTTTAAAAACCTTTGCTGGCACCTTGGTTTTTTTTGTGGGCTATTCTGTTACTTATGCCACCAAACATTTTCCCACAGC
AGCACCCCCAGCACATGCTGGCTGGTCACCTTTGTTCTGTTGCTCTATTAAATCCTATCTGGAGGCGTTGCTCACTGCTCACCTTGCTCAGAGA
GTCCAGCTTTAGAGAGCGGCCTCTGGAGTAATGCTTGAGTTTAATGTGGAGGCTGATTATTCTCTACCTGATTAAATCTGTCTGGGGAGCATCT
TTACCATGGCCAGAAGCTAACACATTTTTTTTTTCCCCTGGCTGAAAGCTTTGACACAGAACTCAGCCAAAAGAACGATTTTTTTTTAAAATGC
CTGAAGTTTTGCTTGCTGCCTCCAAGGACCAAAAAAGGAGGAAAAGAAGGTCCTGAGCCCCAGGAGATCAGATTTGCTGGGAGGTCTGATTTGC
TTGAGGGCAATCATGTCGTTGACTGCAGGCTGGTGGAAGGTTCTGCAGATACTCAGTGGATGTCAGAGCCGCAGCGCCACATCCATGGCCTCCC
CGATGTTAATGGGAAGAGGTACACACTCCATTCCTGCTCTTCATCACAGGTAGCCCTGTTTGAATCTAAGCAGATGAATTTGAACTGCTTAATG
TACTCACTGGCTTTAAGATGAGAGTAGCTACAAGATCCCCTTTCACCTCCTCTGAGAGCTCCCCAGATTGATACCACACTGCTGTGCTGTGGCA
TGGAGCCTAAGGCAGTACAAAGTGGCGTGACTAAAAATCTCACTCCCTTGCCGAGTTTCTGTGCTTCACCTGTGCGAGCACACGCAGCCATTCC
CATCCTCACCCCTTGCCCATGAGCCTCAGGCCAGTGCTCTGGACATTTGATGGAATCACTTCAGACTGAAAATGCCTGGGGAAGGTGATCCTAC
TGTAGCATCATTCTACCTGCAGAGAGGTGTCTCCCCATCTTTTTGAGAGCAAGCCAGGCACGTGTTTAGAGCATCCCTTCATCCCTCATCAGAC
CTCCTAACCTCCCAATGTTAAGATGTTAACATTTCTAATGTCATGATTTGAACTTGAAAGAGAGGGGTGCTTACAATAGGGAAGCAGTACTGTG
CAGCTCATATTGACCTCAGACCTCCTAAAAAGCTTCCCTTCCCAGATGATCTGCAGCTAACATGTTCTGCTTAATTAGGCTGAGGCTGGATTCC
TTTTCCATCCATCCAAGTTAAGGACACTAACCAAGCAAAATGCCCCCTACCAAGAGAGACTTCTCATGGCCAGGATTCCACATTCTTAATTCAC
AAATAAGGCAAGAGACAACTGTGGGTTCATCTCATGGCTGACTCGAACTGGAACCTTCTGACCTTCACAGGGGGACTATGTTGGAGTTCAGAGT
AAAGGAATAGGTTGGAGAAATCGGGTGGCAGGATGATTAGGTGACAGTTATACACTTCAGACCACAGTGAGTCTCTAACTGCAAGCTGTTGAAA
TGGTCAACATATTTACTTTTCTTTTTTATTTACAGGGAAGGAGATTGGTGGGAAGCCCGCTCCTTGACAACTGGAGAGACAGGTTACATTCCCA
GCAATTATGTGGCTCCAGTTGACTCTATCCAGGCAGAAGAGTATGTTTCATTTTGTTTTCACTTAACTACTTGATTTTAAAAGTTGATTGCCGC
AATAAAATGCCATCAGCATTGGGCAGGAGGGAGAAGAAATTCACAGCAGTGATTAAGGCTGAGTTTTTCAGGCTTTCTGCCCCGGTTTTTACCC
TGTGTAATACTTGCACTATTATTAACTTAATGTTTCTCTTGAAGCCTGCTCACTTATTTTGAAAGAAAACTTTCTATCAATACCCTAAATGAAA
AGCCAGTAAAACTTGTCATAGATTAAAAGTAGCCATAAAAATATGAAATGCTAGCTAGAGCATATATTATTGCCAACCCAAGTTTCTAAGCCCG
CAGTCCACTCCCTCTGTTGGGAAGAGAGGGGAGAGTAGCAAGTAATTGCCACAGATTAAACTAAGATTTTTCTCCTAAGTGTGATCAGAAATAT
TAAAAGAGTGCTGAAAAGACACCTTCTATGCCCGGTAAAAGTGACTCACATACAGTGTGTCCCCCCAACTTGGGAAATACTACAGTGATTTGGA
ACCTCAGTTGGCTTCTTTGGTAGTAAACAGTGACGAGCAGTTATTTGGCCCAACTATTCAACTGGTAGCAGTTTAGGAACGTCTTCAGTAGCCT
GAAGGGATCTAAAAGGGATAACCTTTCTCCCTTCTTCTGACCCATGAGGATTAACAGGCACTCCCAAGGGGAAGAACTGCCAGTGGCTGTTTGC
CAGCCCTGAGGGAAGGAGAGATGGAGCCATGATTTCCCAAATGCAGGAACTTGGCCTCCTCCTGACACCTTGGGTCTTGCCTCTCTAAAAAGGA
AGTTGAGAAAAGTCAGTCACCAAGCCCAACCTTTGGCTCTGCTATTTAATTTCACCATGGATTTGTTTAAGTAGTGCAAGAGGGATTAGACTCC
ACACCCTAGCCAAATCCCCAGTTGGATTGTTCTATTCTTTAATTCCTTTGTATTTCCTCTAAGAGGATCTGTTTTGTTTCCCACTCTCAAATAC
TCAGTGGTTCTTAGTTGTTTCTTTCTCCTAGTGACTGTGTTTCGTCATCAGTGAATCAAGGTATTTGTATTTAATTTGTATTTTAGGGCAGATT
TGCAAACATCTTTGTGTTCTTTCAGAATAAAAAGTACCACCAAAATGTAGCATTACCCTGATTTAACTGGGAATTTGTCAGCTATATATTTAAG
TTATTTTTATAATGGTCAACTTTTTAAATATTTTGTTTTTAAAGAATATTATTTTTTAAAATAATGCCTTCGGTTTTACATATGCAATTAACTA
TCATTATCTTAAAATACTATTGTTTTGGTGCAATCCATTGTTCTAACAATTCCTTTTTCACCACTGTTTTACACGGCATTCTAATTGGGTTATT
GGTACAAACCCAGAAAGCCATTTCTCACAAATAATTGACGTACTAGTCTTTACGCCACCTAATGCTAGATTAAGAATTGTTGCACATTTTGGTG
TTTCTAAAAGTCACTGAGGAGCTAATACGCAATGTCTCTTTTCTTCAGTGAAACTTAATTCACAAAAGAATTTGACAGTGAACTCATGATACCT
ATATTCAAGCATAATGAATTGAAATTTCATTTTAGAATCTGGATTCTTTCACAGTTAAATATTCTAAAAATGGTTCCCACACACAGATTCCAAT
TGAATGCTCCAGCATTCTCCCTTGGGTTTTGGGGGCACCTGCTGCTCATTCAGCACCTAGTGCTGAAATAGTAACTAATTGCCAGGCTTGGTTA
AGGCTTGAAAGTGCAGGGGGAGGATATAAGGCAAATAACAAAAGTCTTGAGGTGACTTAATGTGATGCCTCCTAAAGTGGCACAGAGTATCATT
AGTTTCTTCAGGGATAATATATTGAAATATCTGCAACACCAAGTCATTTTAAGGGCATGCTTTTTGACTGGGCACAGATCTCAAAGGTGTACAG
TAACCAGTTCTTACAGTTGTGCCAAAGAAAAGATGTACAGGGTCCACCGTGATGGCTCCCTCCTGTAATCCCAGCACTTGGGAGGCCAGGGCGA
GAGGATCACTTGAGCCCAGGAGTTTGAGACCATGCTGGGCAACATAGGGAGACAGTCTCACTCTGTCCCCAGGCTAGAGTGCAGTGGCCCTGTC
TCGGCTCACTGCAACCTCCACATCCCTGGTTCAAGCAATTCTCGTGCCCCAGCCTCCCGAATAGCTGAGATTACAGGCACATGCCACCATGCCC
AGCTAATTTTTGTATTTTCAGTAGAGTTGGGATTTCACCATGTTGGCCAGGGTGGCCTCGAACTCCAGACCTCAGGTGATCTGCCTGCCTCAGC
CTCCCAAAGTGCTGGAATTACAATCATGAGCCACCACTCTTAGCCTCTACAAAAAAAATTTTTTTAGTTAGCAGGTGTGGTGATGTGCACCTTT
AGTCCCAGGAGGCTGAGGTAGGAAGATTCCTTGAGCCTGGAGAGGTCAAGGCTGCAGTGAGCTATGATTATGCCACTGCACTCCAGCCTGGGTG
ACAGAGTGAGACCCTGTCTCAAGAAAAAAAAAAAAAAAAGAAGAAGAAGATGATGAACACAGATCACAATCCAGGTGCTTGGTAAATAAATGCC
TTTACTTATCCAAGTCCTCACACACCTAGGGGAGGAAAACAAAATACAAGTAAGTACTCATGGGCGTTTTTCTCAGAATTCTTATAGGGAGGAA
GTTATTGAAAATACTATTCCTTTATTCATATCATATCTATCTAATCTGACTTTTTTTAATGCTTGATTATCTTCATATACATTAAGACTGTGTT
TTGTTATTTCCCAGCAGTTACAATAATGCTTAGATATCAAGAGATTCAAGAGTTTTGTTTTTTTGTTTATTTTTTGTTATGAGACAGAGTCTCG
CTCTGTTGCCCAGGCTGGAGTGCAGTGGCGCAATCCTGGCTCACTGCAACCTCCACCTTCCAGATTCAAGCAATTCTCCTGCCTCAGCCTCCTG
AGTAGCTGGGATTACAGGTGCATGCCACCACACCCAGCTAATTTTTTGTATTTTTAGTGGAGATGGGGTTTCACCATGATAGCCAGCATTGTCT
CCATCTCCTGACTTCATGATCCACCCACCTTGGCCTCCCAAAGTGCTAGGATTACAGGCATGAGCCACCATGCCTGGCGTTTGTTTTTTTTGTT
TTGTTTTGTTTTGAGACACGGCTTTGCTCTGTCACCCAGGCTGGAATACTATGGCACAATCTCAGCTCACTGCAGCCTGGGCCTCCCAGGTTCA
AGTGATTCTCCTGCCTCAGCCTCCCGAGTACCTGGGATTACAGGTGCCCACCACCACACCAAGCTAATTTTTGTATTTTTAGTAGAGCTGGGGT
TTCACCATGTTGGCCAGGCTGATCTCAAACTCCTGACCTCAGGTGATCTGCCCACCTCGGCCTCCCAAAGTGCTGGGATTACAGGTATGAGCCA
CCATGCCCAGACTAGAGTCTTTTAGATAAGTGTGGAAAGGGTCTCCTGCAGTAACCATTTCAAATCAAGGTCTTAGATTTCTGGTTTTTTGCAT
ACAGGTGGCAGTTTTAACACAAACCAGTTCTGGTCATGTCTAGAGGGGAGGAAAACAACCCACAACTCAAATCTGATTTTTTTTAAAGAGTGAA
AGAGATGAATTAGGGATAGAATCCAGGATAGATTGAAAAGGAACTGAATTAAGCTAGAAAAAAAATACATCCAGGGAAAGGTTAAGGACTAAAT
TGGAGGAGAGGGGAATTCATGGGCAAAAAAAAAGCCTATGCTGTTGCATTTTGTAAATGACTATTTCAAAATATTTTCTTTCCTTGATCTAATT
TAAAGGTGGTACTTTGGAAAACTTGGCCGAAAAGATGCTGAGCGACAGCTATTGTCCTTTGGAAACCCAAGAGGTACCTTTCTTATCCGCGAGA
GTGAAACCACCAAAGGTAAGATAACGAGTTGAAGAAGTTGGCTTGTCATTCAAATCTGTGGATTAGTCAGAGGGGATGAAAGGCTTATCTCTAA
TGTACAAGGATTTTAAAATGGCACATACCCTCCCTGCCTTGTGAGTGGAGTCCTGTTTTCAGTCTTCCCTCCAGGCTCTAAAACTGCAGACAGC
ACCAAAAGAACTACAGAGGCCCCAAATCAAGACCTTCCTCCTGAAACGGGCTGGATGCAGCTACACTGCTCCAGGCACACAAGATCGTAGAATT
TTCAGAAGTCCTTTAGAATTTTGATTTTCTGAAATCTTAGTTCCTCAGGTGCCAGTCATACAGGTTGTTTTTGCTTTCCTTTTGTTTTTTAAAT
AACTGAGGACTTCACTTCTCTTCCTCCAACTGTTGGACTTTTCATTATTTAACAACTCCTTACAACCCACAAGAGGAGACAGGTCAAGGAAGAA
AAGAGTAGTGGCCTCTACCTTAATTTGCCAGATTATCCATTCCTGTAAAAAGTGTTGTAAAGCAGAAGCTTGAAGCTCACTTCTAGAGAAACAA
GCCTTAGATTTCTTTTGCACATGCTGCTGCTACCTCCCAGTATGCCCCTGGGTAGAGAAGACAAGGGAAGCAAGCTCAGCCATTCATCGTGGTC
CTTCTTTACCCTTGGGGGAAAGGAGTGTTGGAATTGAGTCTACGCTGTATTATGCAACAAGGGGTACCGAACAGTGTGTTTAAGAAAAATGTCC
AGGAAGCTTTCAGTCTCAAGGGCAGAATCATTTTATTGCTAATATATTCTGACATTTGCAGAACATCAAGAAGCATCTTCTTCCTGTTACTGAG
TGGAGATGCTGTGTGTGTGTACATGTGTGTGTGCATCCTTGGTAATTATTAATCAGAGTCAAGAAAATGAGGCCTAAAAAGCAAGCTGATACTC
TAAATGATTGGAGCTGCTAATGCTTTCCACGTTTACCAGGTGCCTATTCACTTTCTATCCGTGATTGGGATGATATGAAAGGAGACCATGTCAA
ACATTATAAAATTCGCAAACTTGACAATGGTGGATACTACATTACCACCCGGGCCCAGTTTGAAACACTTCAGCAGCTTGTACAACATTACTCA
GGTAACCTTAATTCTAACTACCTACTAACCATTTGGATGCTGGAGGGAGTGGATAGGCCCAGAGCAGGAAAGTGGAAAGGGGTAAAACTAATAT
GTACAAAATCACTTATAGAGTATGTTTTCTTTGCCAGCCCTTAATGGTAGGGCTTGGCTGTATAGGTTCTATTGCTATTGTTCTACTGTTGTTA
TTATTAGTTCCACATGTTTGTCCGAAGATTCTATAATATTTTTGTTTCCCAAGTAGAAAGCAATAGGTTAAATTTTAAAAGTTGTTTGTTTTTT
CATCTTCAAGTTGTCTTTTCCCATTCCCCGCGTTGCATGTGAGAAAGCAGTCTCTCGGAGGGCGCTTACATGGGGACTCCTACAAGGAATATTG
TGTTTCCACTATCACTTTACCCTCAGCACTGTTGCAGGAATAGCTGCACGTACATTTCATTCTCATGCAAGCCATTTATCATGTTCCCCACCAA
TACTGCTGTTTCCTAACTAGGCTTAGACTTACACAACCCACAGCTCTTAGATCTATTATGTCTATTGTGTTAAATTAAACTTTTATAATGTACA
TCAGTTTCTGTCCTAACACCCAGATATCACCATTATTTTGTTCTTTCTGAAAACATATAATTATTAGATATGCCAGTTTATACATTTTATCAAAG
ACTCGTTTTATGTGCAATTGTTAAAATGATTGCTTTCTTTCCTAGATTAGCAAGTATTATATGCCACTATATAATACATGTTCACATGTGCCTA
TAGATATAGGTGCACATGTATAGACACATGTCTATATCCTATTAAGCCTAGAGATATTTTTTTGTGTGACCCATTTCTCCATTTTCTATTGTTC
TCCAGGACAAAGGCAAGACTCAAAAATAGTATATGATTTACCTCTACTATTGCTCTGTGCACAATCATTGAAATATGTATGTATAATTTTTGGC
ATGAAAAAGCAATCTTTCGAAAATGACAATAAGAAATGTCTGTTGATCCCTTGCACTAATGAACAATAGAAAATATTAACAGCACTTGCAGTAC
TAGTTGATTATGGCATTGGCTAACTCGGTTTATGTGGATTCTAATGAAACATTTGGGAGAAATGGAACAAAATATCTCCCTGAGCTTAAGTGAT
ATACTCAAAATGCCTGCATGTTGTAAGGATTTTTCAAATGCTGAAATATATTTCATTACAGCCAAACATCAGCAGGATCCCCAGGGTTTGGATC
ATTTGAAAATACTGTGTTCGAAAGGGCACCTTAATAACATTGTAAAGCTGGAAGGAAAGAGGGGATATGAACAATAGACACTTTTTTTAATCTC
GGGGAAAAAAAATCCATCTCACGTTAGACTTGTTTTTATATTGGCTTTCCCTCTTCCCTCTTTCTCTCTCACACAATAAAATGCCTTTGAAATG
CTGACACATAAATAATTTCCTACCTAAACATCTCAGAGCCTGATTCCATCAAAAAGAAAGGAGTAAAAAGCAAGTTACAGCCCAGCAGCACATC
TGCTTTCCCTGGGTCCGGGGGCTGCCAGGAGGGAGCGGGAGGTCTGTCCACCTCACAAGGCAGGCTCTGTCAGCTTTTGTCACTCCCTGATTTC
TTATTCTTTGTTACCTTTTTTCGCCTGACTGATTTTTACTTGGCATTTAAGTTCCCCTTAGCACTGCCAGATTCTAAAAGGTTATATTCTTTTT
AAAAAAGAAGAGAAAGAAAGAAGGAAAGAAGACAAAGAAAGAATAAAAACCTCCGAGTGTTAACTACTTTTTCCTTTCTTCTTTTTTTTATAAA
GAATACATTCTTTCACATCTTGAATTTCTGTGAATTTTAGTTTCCATTCTTTCTCCTTTCAAACCAGACACCTAAATTATACGTCGAAGACTGT
TAAAAAGTTGTTTTTTTTTTTTTAATGGAAAATATCCAAGAAGCAGCCCAGGAGTATCTGACATGGTGGAATGGAATCAGTTAGAAAGCGAAGA
AATCACTAAAAAAAGTTACTTCTTTTTTTCCCCACCAGTTATAATCTTCAACCTTACTAGTTTATAACAGTTTAATGTCCTATAGAAGGATCCT
CCACTAAAGTTATAATTTTAAGTATAGTCATATAGAGAGATCCCTAATCCCCTGGGTAATCTAGATACTAAAGGTGGGGAAGAACAGTCATATT
GACATTCTTTAATCCAAAACCACTGTTTGAAATTAGTAAGGATATTTTCAGCATTCCCAAAAACATGTTATTAGCACGTTGAGCTGAAAACGTT
TTTCTTCCTCAGTGAGTACAGAAACCAAAGCAGTCTGCGTGTATGTCTATGTATAGACTGTATCGTACCTGGGCTCATGGAGTAGTCTAAATTT
AAAACGTCCTCTCTTCTACCTCCAATGAAAATGTTTCCGTGTGTGGCGTCTGATCTTCCACCGTGTGTCTGGTCGTCTGCTGGTGTAGCGCTGT
TTAAGGAGCGCTGTGTGCTGCTAGTGTTCCACGATGTGTGTGGTCGTCTGCTGGTGTAGTAGCACTGTTTGAGGAGCACTGTGCGCCGCTAGTG
TGGGTTTACACTTATGAGTGTTGTCATTACATGTGTTCTGCTCTTCTCTCCCTCTCCTGCCCCTGCCCTGCTCCATCAGAGAGAGCTGCAGGTC
TCTGCTGCCGCCTAGTAGTTCCCTGTCACAAAGGGATGCCAAGGCTTACCGATCTGTCTGTCAAAACCAAAGATGTCTGGGAAATCCCTCGAGA
ATCCCTGCAGTTGATCAAGAGACTGGGAAATGGGCAGTTTGGGGAAGTATGGATGGGTATGCTGAGACTCAATTACTCTCTTATTAGCTTCCCC
GTTTGGAAGATCCCAAACACCAAAGATGGAAGGTGAAAATAAAGACTGCGTGACCGGGAAGAAAGTTTGAATTACTAATAGTGGGGAATAATAA
TTTCAGTTTTGGTTTTAACATTCTGGAATTCCTAAAAAAAAAAAAAAAAAAAAAAAAAGATAGTAAGTGGGCAAAATTGGCAAATGGCTCAAGT
TGTACTATTACATGACTCTCAATTCATAAACCAGCAAATGGTCCAAGGAATGTTCCAGCTGCCATAAAATATCTTGCTCTTCATTTCCAAAAGC
AAATATTTGTTGAGTGTCATCCTAACGGGCAAGTCACCTTCCATCTTTCCTAGTGCATGCATAATTATGGATTATAAGGACTGTGTTTTCTTTA
TTAATTCCCTTTCCTGTAGAGAAAGCTGATGGTTTGTGTTTTAACTTAACTGTGATTGCATCGAGTTGTACCCCACAAACTTCTGGATTGGCTA
AAGATGCTTGGGAAGTTGCACGTCGTTCGTTGTGTCTGGAGAAGAAGCTGGGTCAGGGGTGTTTCGCTGAAGTGTGGCTTGGTAAGGCAGAGGG
CACATTTTGTTTTGGCTGCATCTCAAAGCCGATTAAAAGGATGGTTTTGAACAAAAATGCACACACAGCCGTTGGGACAAAGACACTTAACCTG
GATAACTAGACGGGCACAGGCCATCCAGATTTTCAGAATATGCTGATACCTTGCTGTGCTCATCTGTCCTACTTCATGTGGTTAATTAAGGCAC
CCGCAGAACAGGAAACCAGTACACTATGAATCTGGTGTTTCCTCTTCCTAAGAAATGGGAAGGTAAGATACTGTATATGGGCAGCCATAAGAAA
GACCATGGGCGTTTTGCTCAATGGGCCTGGGTTTGAATCCTTACTAGCTAATTAACCACGAACAAGGGGCATATTTAACTCCTTTAAGCCTCAG
TTTTTTCATCTGTAAAATTGGAATGATACCTTTTTGTTGTTGTTGAGACGGAGTCTTGCTCTATCACTAGGCTGGAGTGCAATGGCGCGATATT
GGCTCACTGCAACCTCCACCTCCCAGGTTCGAGTGATTCTCCTGCCTCAGCCTCCCGAGTAGCTGGGATTACAGGTGCCTGCCACCACGCCCAG
CTAATTTTTGTATTTTTAGTAGAGACGGAGTTTCACCATGTTGGCCAGAATGGTCTCGATCTCCTGACCTGGTGGTCTGCCAGCTTCATCCTCC
CAAAGTGCTGGGATTACAGGCGTGAGCCACCACGCCCGGCTGGAATGATACTTATTTAAAGGATTATTTTTAGGATTACATGGGTTAATATGTT
TAAAGTCCCTTGCAGATAGTAGATATTCAGTAGACATACATACTTCTCTTTATTTGATTGTCATTGATAAGGCTGGCTGCACTGGGCCTTTGTA
ATTTCTTTTATAGCCCTTTTGGGTCAGTTACAGCTTTGCTTAGAAACAATTCATGGGTTTAGGCCCCACTCAAAAACATGTTTCAGTAAAACAA
TATTAATACTTATGGAATCCTCTATCTTCCTTCCTCAGAACTCATTAAAAACAATATCGATCAGTACCCTTTGCTACGTGTGGGTATAGATCTT
TAGGTGTGGTCTGCATTAAAAGAGTTAATACAGGTGGCCGGGCACAGTGGCTCACACCTGTAATCCCAGCACTTTGGGAGGCCAAGGCAGGCAG
ATCACCTGAGGTCAGGAGTTTGAGACCAGCCTGACCAGCATGGAGAAACCCTGCCTCTACTAAAAATACAAAATTAGCCGGGCATGGTGGTGCA
TGCCTGTAATCCCAGCTACTCAGGAGGCTGAGGCAGGAGAATCACTTGAACCTGGGAGGTGGAGGTTGCGGTGAGCGGAGATCGCACCATTGCA
CTCCAGCCTGGGCAACAAAAGCGAAACTCCGTCTCAAGAAAAGGAAAAAAAAGGAGTTAATACAGTTAAAGCACTTAAAACATAGCCCAGCAAA
TGATAAGTACTACAAAGATGTATGTAGGTATGTTAGGTGGATAAATAGGTAGTAGACAGACATACACATATATATGTATGAGTTAGCTAGTTTA
ATAAATCCACATTATTGTGTCCATCTCTCTCTGGACTTAATCTCAAGTATCGTAAAATATATGACCTCCTTCTTCCTCATTCACCCTCTAATAA
TAGAGGATTTTAGTCAAATTACTCACACAATCACAGAGAATTGGACCCTATTAGAAAATTTATTTTCAAATTTTACAAATATCAACTTTAAATC
ATTACATATACTGTTCACATTTTGTTTTCCAATAAACACAAGACAACATGCCCATCAGAATTGGGATGGATGTCTGTGTAATTGACGAAGTTTG
TATTACAGAGGAAGATCTTAATGTATTTAGAATTTTGGGTGCTGACTCTTAAATAGCAAAGATCACTTATAAATTGTCAAATTTCCCATGAATG
CTTAGTGGGCAGATATTTTATGAAGTTTAAATGAACTTTTCTTTAAGCCACTTGTTTTTTCATAATTTATATTTTGTAGGTTGCATGTTGTAAT
TGTATGAACCATGTCTTTAACAGGATAATAAGAACTCCAATTTACAGAATCCTTAAATTCCAAAGTCAGTTATATTAAATATAAAAATCTTAAT
TTAAACCAGTCTTCTTTTTCAAATAGAAAATAATCTAAATTAGCAGATTTCTTCCCCTTTATAAAGTTATTCTTAAGCATCATAGGTCTAATAA
TGGAATACACAAAGAACCTAGGTATGGTTTTGTTTTTTGAATGCTGGGGCTGAAAGAGACCCAAAAGATAATCCAGTTCCATTCCTATATTTTA
CAGATGAGGTAACTGAGGACAATCATAATCCAGGCCTTGCCTTCAGATTTGCTAGATTTTTTTTTAACATGCTAAATTTAAATATTTCTGTTCC
CTCTCAGCTGCTGTTTAATTTCCCCTGTCTACCTACCTGACAGAAGCCATTGTTCTTGTGGCTAGCCATCAGTAAAGCTGAGGAAATTTGCCTT
ACCTTGTTGAAGTATTGGCAAGCAGACTGTGAGCTCCTTGCCAGTGCTTATCAGCATGCTTGGCACACCTGTGCAAGGACTCAGTCAAGTAACT
TGTCCATTGCAGACATTGAAAGTCTAGAGGTAATTTCCAGACATCCTCATGTGGTGCCATATTTTTAAATGGCACACCCCATAAACTTAAATAA
TCTAATTTCTTCCATGCACACTGTACTCCCTAAGGGACAGCTATTAGATGGCCAGGCCTGTTCCAACCCCTGGACTTTCATCACTGTATGGTGC
AGAGCTTTTGGTATAAATGTGTAATCATATGACTGAGCCAAAAAAAGAGAGAGTGGTAATATATCAAAATTTAAAAAAATTTTAATGAGTTATA
AATCTTAATATAGCCATCTTAGCCATAACCACAAATAAACTCATTTTTTCTGTTAAAATACTTGACAGAGTCCTTGCAATTGAATGTCTTTGTT
CAACAAAAACTGTATTAAGTGTTTTAAATTTAAAATCTAATCTTATGCAAATAGCTGGTGGTCAAAACCTTTTTCCATCAAAAGAAGATCTTTG
GTTTGACTTCATATTCTGGGATGTTTGTAGGTACCTGGAATGGAAACACAAAAGTAGCCATAAAGACTCTTAAACCAGGCACAATGTCCCCCGA
ATCATTCCTTGAGGAAGCGCAGATCATGAAGAAGCTGAAGCACGACAAGCTGGTCCAGCTCTATGCAGTGGTGTCTGAGGAGCCCATCTACATC
GTCACCGAGTATATGAACAAAGGTTGGGCAACACCTCTCCTGTCTCCAGCTCACAGTGCCTTAAGGGGTTGTTTAGGGGAGAGAAATGGAAGTT
TCCTACTTGCTACTTTTCTAGTTTCTGCCTGGGTCAAGTATTCCCATTAGGAACCACCAGTTATGTGCTCGTTAATGAAAACATTTTTTAAAAC
AGACTAACCTTGCGTTTACCCCACCCCAAATCCTTATGAAATGCCAAATACTTTTTACATGTTATGTGTGTCAGAAATTCAAGCTCCTCTCCAT
AATTAAAACATTCATTTTTAATATCAGGGTGGTACGGAGGGTTATGATAGTTTGCTGTTATTTTGAATGTAGTAGCTTTTGTTACATTTCCTTT
TTGCAGGGCTAAACAATTAATATCAGACACTGGTCTCTAAGCTAAGTTTAGTCTCCATCATTTCAACATCTTTTTTATTTCCAGCTCTCTTCTT
AAACGTCAGGCGATGAAATTACATGCTTTCAGAGACCACATTTATTCTCACATTCTCTCCCCTACAACCCCTCTGTCTTCCTAATCAAACCAGC
ATTGTTAGGGATAAGGCCAGAGATCATTTTGTTTTGGAAAAATAGATGAACCAAACAAGAAACAGCCTTAAAAGGCAATACATTGTTTATCAGA
GGATACCAGTGTAATTTTTCTTTTCCATGTACTTTCTTTTAAAATTTAATGGGAATTTTTTTTTCTGGCAAACGGTTTGTCCTTTGTATCCAGG
GTTATTTTGTAAATAACTTTCTGATTAAAGCATAAAATATCACTGATGACCATCATAAGCCTCCAGCTTCTGCAAATGATTATCCCTGCTTTGG
TGTTAGTTCTAAGCCTTCTTAGGCTGTGTTATAATAGTGGCTCTGAAGCTTCCAATGTTTCATTTCAGATGTCTGATTTAAGGCTTGGCTGGCT
GTGATCTAATTAAGGGGAACCATCTGCCCCACCCATATTCTTCAGATTGTCTTTTCTTGATTCAAAATCTGTAAATAAGCTAAGCTAGTGAGTC
TCAAACTTTACCTTGTATTATTAGAATCACCTGTAGGCCTTCTTAAAACCCAAGTTTCTGGACCCAACCTTCAAAGTTTCTGATTTACTCGATC
TGGGATGGGACCTGAGAATTTGCATATCTAACAAGTTCCCTTGTGTTATTGTAGCTGCTGGTCCCAGGACCACAGTTTTGGACCACTCAGCTGG
GCTGTATTTTCCCCACATCAATTCTTTGTGCAGGGGTGATTGGGGAATGGGATTGAAGAGGTGCAGTTCTTCATAGGTTCCTCTTTATGACATA
CAGGGAGATTGAGTCCCATTTCTTCTAGTTTTATCAAATATATGTTGTTATTCCTAGAAATGGAATTAATGCTGTTTGTTTTTAAAAGGTAACT
GTTACTTCTCCATGCCTATACTTTTTTCTACCCTGCTTTTTTATATAAACCTTTTTGTCCCCCCATGTGGATGGCATTATTCCATTTGACTACC
TTATTACTTTTAATAAGAAAACCAAATACAGCTCTCTGTTGGGAATTATCTTTCAAAGTAAATTGAAATGATTTTATGTTTTGTTCATAGGAAG
TTTACTGGATTTCTTAAAAGATGGAGAAGGAAGAGCTCTGAAATTACCAAATCTTGTGGACATGGCAGCACAGGTAGGCCCTGCAGGGTAACTT
GATGTGCCATAGATTTAATGACGTGTCTAAGTACATTGGGTCGTGGTGTAACATGTCCTGTTCCCTGGGTTTCCACAGGTGGCTGCAGGAATGG
CTTACATCGAGCGCATGAATTATATCCATAGAGATCTGCGATCAGCAAACATTCTAGTGGGGAATGGACTCATATGCAAGATTGCTGACTTCGG
ATTGGCCCGATTGATAGAAGACAATGAGTACACAGCAAGACAAGGTGGGCACTTGAATGACAATGGCTCGTGATCACAGCTGTGAGAACAGTCA
CTTACTGCACAGCCCTTCCTTCCTCCTTCCCTTCCCTTCCTTCAGAAAATACTTGAAATGTCATTCTTCAGCTTGGTTTGGACACCTTGATCTG
GCAGGAATTTGACAGCTCTGCAGGTGGGAGACTGTTGTGGGCCCAGTGGAGGGATGAGATATTGGTTTTTGGTGGGTGGGTGGGTATTGGTATT
TGCTGCTGTGGTCCTCTTGGCTCATGCTGGTCTCCTCACAGCGTCCAGGCCTAGAATACTCTGTTTTTGGAGAAAGAGACCACATTTATTCTCA
CATTCTCACATGCCTGTGTTTTTTACAAAGGCACAGGCAGGGTTTCAGAAAGCCAACAGGGCATGGTGCAGTGTCTCAGAGCTTGTAACAGCAA
CAGAACTAAGGCCTCAAAGGTAAGGGGGCAGAGAAGTGGGCACAAGAAGTCAGAATGGGCCACTGCACAGAGAGGGCCTCCTCAGTAAAGAGAG
ACGTCAGGGATGGATCTGGGGATTCACACCCAACCCCACTCTAGCCCACTTCTGGGTCTTCTGCCAGACCCAACCAGAAGTAGAGGTCACAGGA
GCTCAGCGATGAATCCTTATGGGTCCAGAGCAGGGAGAGGGAGAGTGGAGAGTGGACTTACACTACAGATGGTAACAGCATAGTTACTCGAAAA
TCTCTACCTCCTTTCATCATCCCCGCCATCCCACCCTCTGCAAAAATTTATAGAAATTAGCCTTTAAGTAAAATATATCCCAACTCAGCAGCCA
TTCCAGTGGGGCAGCTTTTCAGGTGCTATTAGAGCACCAGATACTAGAAAGGAGTTTTTAGGAATATTTTCCTTCTTCCCAGATACTGACAAAG
TGGTCACCAGGTAAAAGTGTGTGATTAAGTATGTGGTTTGCAATCGAGTATAGGCTCCTCATGTAGAATATAATGTTTATAGCTGGGGCAAGGG
GGAACTTTCATTGTTGGTGTTTCTAACCAAAGCCTAGTCATCCCAAGCAAAGCGGAGCAGTGACTGGAATGTATTACAGGGTGATGCTTTCTAC
TGCATTTCATAATGGCCAGCTCTGGAGTCCTTTTCTTTCTCTTTTTCCTTCTCCTTCTCTTGCCCCTGTTCCTCCTCCTCTTGATTCTTTCATT
TCATGCCAATTATCCTCTCCCTTCATTTGATCTGAGAATGGAAGCATTCTTAGCAGCCTCAAGTGATGAGGAAAAATGTTAAACTAAGACCCTG
GCTGCTACCGATACTGTCCAAATGCTGAATTACATGTCGGTCAGACAGCTCAGCTATTTGAATTTCCCCAACACGTGGCAGTTCTTGTCCTGGA
GCCAAATGCCCACACAGCAAGCATACCCGTGCGTTACACACACACATACACCCCCGGTGCTGGGCCAGATGGCATGCTGTATCTCTAATCAAAG
GCGCACTGCAGCTTTGATTGGCACTGGCCGTCCAGAGAGGAATGTGCATGTGAATTTGAGGCAAGGTGAGCCGAGAGGACCTGAGTGCCAGTGG
ATCTGAGACTTGCCCTGAATGAGGGACTTTATCCTGAGGCAAGTCTGTCAGATCCCAGCTCCTCAGACTCAGAAGGAGAGTGGGCAAAGGTTGT
GAGACATGAATATTTGATTAAGGAAAGGGCTAGAATAGAGCCGTGTGCTCACCCTTCTGTGTGTGAGTCGAGTTTTTCCCCTTTTCCTGGACTT
TGAACTCTACAGGGTTTGTGGTTAACGCTCATGAACCATGGGTAAATGAAAAGGTTGCCAGGCCAGGAGCCAGAGGATGCTGGCAGGGGTGCTG
TTAATAGGGCCTGGGGGTTTAGTCCACGCCTTATTCACTGGAGTGAGGCTCCTCAGGCTGTGGCCCTAGGTGATTGGCACCCTCGCTGGTTCCC
CTCCCATCAGGCTGCTGCCCTGAGCGGGTCCCAGGCTGCTGCCCTCAGCCTGGCCCCCAGCCGTTCCTCTGCATTAGCTGTCCTGATTGCCCTT
CTGCCGGCTGCCCAGCTGCACCATCATGTCCCCAGGTGCCGTCAGAGCCCCTTTCAAAAGGCCAACCTTGTTCTTTTAGCCTTTGTACTGCGTT
TCCTTACTTAATTTCCAAATCGAGGGTCCCGTCCTTCCTTCTTCAAACATTTTTCTTCTTTCCTCCCTTTCCCAAACACCTTCAAATCCATGCC
AAACACTAGAAAGAGAGAAGTAAGAAGTAAGTGAACTGGAGAGCTGAACTGGGGGGGGGGGAAATGAAGCTTGGCAAGGCAGGTCCCAGGATGT
CCCAGGAGAATAAAAGACATGCTGTCCTGCAGCAGAGGGGTAGGGAGTGGCAGAGCCATTTATAAAACACCTTCCAAGTGCCAGGCCTGAGAGG
AAACGTGAGGACCAAGCAGGGAAACAATAGGAATAGACTCAGAGGGGTTAAGTAACTTGTACAAAGTCACACAGCTAGGAAAATAGCAGAGCCA
GGATTTGAATCCAGAAATGGCTGACCCTGTTGCATCTACCATTCTAAGCTATGCTGACCACATCTCATCAAGTCAGTGATCAAAAGAACAGAAA
ATAAAGATAGAGAGGATTAGTCATACATCCCTTTTCCCCTTTATTTTATGGGACTGTTTTTAAGGAGCACCTTCTAGTGTGTCTGTATGAGGGA
GTTGGAGAGACCTTCCTTTTCCAGCACTGGGACAACCCAGCTGTTTATAAAATTCCTCCCGAGGGCCTGCCCTGCCCTGGCTGCTTTACGAGGC
AGAAAGGGCCTGGTGTGTGTCTGCTGGTGTACTCTGCAGATGGCATGTGTGCTGTGTGCTGAAGTTTCTGCTGGGAATTAATCAGCTCCTCCAG
ACAGCTGGTCCGCATGCCTAATAATATTTGCAAGTCGGGTTTTATGTTACCCACAGGCCACAGCCATGCTGCATCTTGATTATGGGAATGCAGG
CGGCATTCGGAAACATGCACCAAACACAGATATTTTAGGACCATGAATGACAATTGTTTTCAAAACAGTTGTCAGTTTCCCATCTCAGCGTGCA
CGGAAATATCTGTCACCCCTTGGGCAGATGAGGTGGCATTGCATAGGGCACAAGCAGAATTGGAGTGTGGAGCTGGGTTCCACAGTCCTTCCTG
TGCTCCTTACTTCGCACCATCCCAGCTACCCAGGACTGAGCAGCAGCCCATGTCAGGGAGGTGGTCAAGGCCAGGCCCTGAGCCTGTGAGGTGG
TCTTCCACTGACAGCACTCTAGAAGCAACTAGAAATTTGGGGCGATTGCTTATTCTCTATTCCCTGGACATCTCACTCAATTACAGCAGATAGT
TCGTCTTTAGTTACAAACACTTTGCTAAATTCTGCCCAATCAGAGTCTCTAAATAATGCCAACATCAGTTATTTGAGTGCCTTATCTATGAAAG
GACTTTACTAGGAGCTACTGATATCAAGAAGCCTAAGACTGCACGACAGTCAGCAAGCATGAGGAGGAAGACGTGGGGGATTGTTGAAGTCAGA
TGGAACTGGTTTTGAAATCCAGCGCTACCACCTGATGTTCTGGGGTCTTAGGCAAGTTATTTAACTTTTGCCTACCTCAGTTTACTTATCTGTA
AAATGGAAAGACATTTTGTCTGCTGTATGCATTTTTGCAAAGATTAAGTGAAACAATGCATGTAAAGTGTTTAACAGGGTACCCAGCACATAGT
GATAAATGTTGCTTGTTACTGTTGGTATATCTGGTACAATACTAAGTTCTTGGGGAATAAACAAATGAGTGAATGGATTGTAGATACATGGAAA
GTCTCAAACACTATTCAGGAAAGGGAGAGAAGAATCAAAGATAATTCCCAAGTAGTCAGATGCAGGTGATTGTGAGAATGGCATTACCAATAAC
AGAAATGAGTACTTGGGAAGATCTTACTTTCAGAGAAAGAGGATGCATTTGGGTTTGGATCTGTTGAGCTTGAGGTGGTGGTCTTGGTCCTCCA
AGCCCAGAAAGATGAGTCGGGGTGCCCTCACTGGGTCTCACTGCCACAGCTGGGCCCTCAGCCTTCCAGCCCTCCCCTGAGTTCTGGTCACAGC
CACCTCCCTACCCCACCACTGCACCTTCTTCCCAGAATCATTCCAGAACTCACCACAGGCACCACAAGGATCTGCTGTCCATCTTCTTGTCCAT
ACCACACCTGTCTCCTGTGACCCCCGACATAGGCAATGTCACAAGCCTTGCTTCTGGAAATTCACAGCCCCTCCAGCCCTCACTTCCTTCAGAG
ATTGCACAAGCAGGAGAGAAGCAGTGGGAAAATCCTCTGCAGACTCTAGTTTTTTCTTCATGAGCTTTCAGTGCCGACTAATGTTGATTTAAAC
CTAACAAGTTCAGACAGACATGGCTGTGTGTAAGCATAACTTCCTTTTGTGGATACCTTTTTGTTCTTTATGAGCTATAACACACATACAGTAA
AACGAACAAATCTGAAGTGTGCAGCCCGATGAATTTTTATGTACATATATGCCCCTGAATCCACCCCGAAGATAAAGATACAGAATACCTCCAG
CACTCCAGAAGACCCCTTATTCCCACTCCCAGTCAGTAACCACCCCCACAAATAGCCTTTTTTCCCCTTTTCACCATAGATTGGTAAGTTTTGC
CTGTAAATGAACATCACAGACATGAATCCTATAGTATTACTCTTGTGTCTGGCTTCTTTCCCATTATGTCTGTGAGATTCTTCCATATTGCTGC
ATGGAACAGTAGTTCTTTTCATGGCTGAGTAGTATTCCACTGTACAAATATATCACAGAGCCTCCATTCTACTGTTCCTGAACATTTGGGGTTA
TTTCCAAATTGGGGCCATTATAAATACGGCTGCTGTGGTGATACACACATGCCCTCATCTCTCTGGGCTGTGTTCTCCAGTGGAATTGGTAATT
ACAGGGCAAACCTAGGTTAGCAATTGCAGTTACTGCCTAACAGATTTTGTGGACATATTTTTAAAAAGGTGAATACACACTTAGTGTGTCATTT
GCCAGTACTGTACTTGCCTCTAAGCTGCTAGTGAGGCAGCCTAGTGAGACTGAGGAACCAGGGGTTGGACATTAGGATCCCTGGCTTTGAATCA
GCTCTGTCACTTACAAGCTTGGTGTCCGCAGGCCAGTTACTTAAGCTCTTTGAGCCTCATTTTTATCATCTGTAAAATGGTGATAATAAAAATG
ATCACCTCACATCATTAGTGTGAAACTTACATGGGCTATCTATAAAAGTTCTTTGAGAGTTGTGAAATGTAAAAATCATCCTTATCACCTCAAC
TTTTTGTATTTGACATACATTTTCCTTGAAAACAGTCTAAAAAGTTTTTAAAGAGAATCACTATTAGTAATAAATAGGGAAAAAATCAATCTTT
CAAGAAAAAAAATACTGTCTCCCTATTTTATAGCCTAGGCCAGTCAGTGGATCTGGGCAGTCACCACTTTGATATACCTGCATGCTCCAAGGGC
CCCCTCACCCCGGACACAGCGGGGAGTCACACATCCACTGTCCTCATCTCCGGCCAGCTTGCCTATTTTCTCATATTTGCATTCTCTGTTGAGA
ACTATCCCTGCCTCTGCGCTGCCTCTCTTGTTTTTAATCTTGTGAAGTCTGAATATCAGATGGGCCTTCTCAGCATTTTCACTGAGGCATGTGC
ATACACACATCAACATGAGCACACATGAGCACACACACGCTGCATGAGCACACACACGCTGCGTGGGCACGGCTGGAGCAGTTCTCCCCAGTAT
CTGTGGAGTCGGTCTTACTGCTTCTCTATAGAAGTGATTTAGTTTAAAGACTAGCAGCGGGCCCTTGTAGACACAGAGCACATAGTAGTATTTA
ATAAATATTTGTTTACAGCAATGGAAATAACCAAGGTCACCAACCCCCCCACACTCTTGTGAGACATGCTCTCCTGCTGTCTCTCATCAATGTG
CATGGCTCTCTCTGGGAATCAAATGCTGTTGTGGCTGCAGGAACCTCCAGAAAGGGTTGTTTATTGCATTGATATTCCTTGCACACTCCAAGAT
TGTCTTTGGAGTGATGGGAAGCACAAGAGCTTTGGAGCTAGATAAGCCTGTGTTCACATCCTGACGCCGTATTCCTAGAGCATAAGTTCTGGCC
CCTCTGAGCCTCACCTTTCTCATCATAAAATAGGATTGGTGTTGGTTACCTTTAAGGTGGTTGTAAGAATTCAAGAAGACAATTAGTAGAAGTT
GTTGGTATTATTCACTTCTTCCAGCTCCTCCCCACAACACTTTGGAGTTTTTTTGTTCTGTTTTATTTTGGTTTGTTTTTTGTTTTTTGGGTTT
TTTTTGGATAGCTTGACCTCTTTTCTTCTTCCCACATACACCTCAGTCCCCTCCCAAAGAGGGCAGGGCCTGGACTGGTTAAGAGCATGACCCA
TGAGATCAAAGTGTCTTGGTATAAATCCTAGCATTGCTGCCAATTCACTGTGAGACCTTGAACAAGTTGCTTAACCTGTCTGAGCTTTTATTTC
TTCCTCTTAAAATAGGGATAATAATAGTTATCTATATCATAGAATTGTATGGCTTCCCTGTGAATAACCATAAAGCAGTTGGCACAAAGCCAAC
ACTGAGCTGATAGTGGTAGTTGGCAGTAGTAGTAATAGTAATATTATTATAATATTGATCCAATGGATGCCAATAGCTGTGTTTCTCTCTCTCT
CTCTCTCTGACACACACATACACACACACACACACACACACACCCACCCACCCACCCCACTTTGGGTTTTCCTGATCGCTCCCATCAGGGCTCC
TTCCACATGGAGGCTCTGCCTCTATCATCCTTTCTCCTGATTTGAATCCTCATGAAGGACAGGAACTGGGGTTGCTCTATGGTTTTGGTTGGTT
TGTTTTTTAAGTTCAAAATTAATGAAACAAATGTCAAGGAAACATAATCTTTGGATCTTTGGACTGTAAATAAAAATAGGAACATTCGGGTCTT
TGTATAAGACTGCTGTAAGTTTAGGCTTATGTATTAAATAGAAGAAGAAAAATGTGTCTGTTCAAATGCTCCCAGTATTGAGGGTTTAAATTGA
ATAGATTATTGTCTGGAGGAAAATTCAAGTATAAATTAGACTACGAAGAATTACTAACTGTTGCAGTTTTCATGTTAATTATTTCATGTTAAAA
AATTGTTACCGCATAAATTAACACATTCTTTCATAGAAAACATATTTTAGAAAGATTTGTTACTTTAATAACTCTTTGTGTATTAGAAATCCCA
GATGCCTGTACTAATTAAATATAATCAGATTTTAGATTCAAAAAGCACAGTAGCCATTTAACACAAACAAGCAGGCAGCTAGGTTGACAAACAC
ACTCAGGAAGAAGTGGATCCCTGTTTCTTTCGAATTTTGAATTTCACAATCCAGAACTGTGAATTCAATTCCTGTCCTTCCTTTGTATTACAAC
GACTGGGGATTATTAGACTCAGAGCGCCAGCTTTCCAGCTCAAGGGCTCCTGCAGAATTATTAATCAGCCGCTTCTGAGGCCCCTGTAATCCGG
TGGCAGATCAAGGCTGATCTCGCCATGAGATGCCCTCCCTCTGCCCCCGTCAGCACATGAATTTCTTGTTCTCTGTCAACAACAGCATTGCCAT
TCCCGCACAGTGTGCTGTGACCTGAACAGCAAATATCAGGAGAGAGAAAAGGAAGAAAAAAAAAACCTTTTTAATTACTGAATTTAATCTAATT
CTTCCCATGCTAGAGAAGCAAACCATCCTTTCATGAAAAGCAAACCCTTTAAAATGCAAGCCATTGTCTTAAGCACCGACTAGTGTGTTCCCAA
CTCAGTGGTGCCGCCATAAAATGACCATGCCAACCCCCACCTCCCCAGCCCACATTGAGAGTCTATCATCCTGAGGGCTGTCTAGGGAGAGACC
CCAGGGGACTTGCCCGACAGAATGCCCTGCCCTCCGAGGTCAGACACGGCTTTCCCGCTGAGCTGAGTCGCATGCCTGAACCGTGCTGCTTGTA
ATCAAGCTTCCCGGATCCGAGTTTGGTACACTTCAGTCACTAAGCAGAAAAGCTCCTTCATTTGTATTCTGTCGCTTCAAGCTCTGAGCTTCCA
CCTCGTTTCTGGGAGGGACGGCTTTGTTTATCTGCTGAGCCACCGTGGAGCTTCGGGGCCCAGATTAATAGTTAGGGGGAGCAGGTCAAATTGG
CAGGGAAATGGAGATGAATTGTAGAGCGCATCCATTTTCCTCCCGGAAAGGGTGTGTTGAAAGCCAAAGATTAAAATTAAAAGAAAAGGGACTC
TAAATCACCCTTTCCTACTACAGTCTCTCTTTAAAGATTAAAACTGTTTCAGGTCGGAGATGGGACCAATTTCTTTCATTCCCACCCTCGGGCA
GCTCTGACTCTGCCCAGAGGATACAAATGGATTGGAGGTAAGCAGTGGTCACCTCAAGCCCAGCTTCTTTGCACACCTTTCCCCTTTATCTGTG
CTGGTCAGTCCCATTTTGTATTCTGTGTGAGCATCTCTTTCTCCTTTGTGCTGTTTTGGGCAGAGCCTTTTGATGGTTGTTTATGAATGGTCAA
GAGCAAGTCCTCAGTCTGTGCAGCCCACGTTTCTTGGTAATCATCAAGAAGGAAGCAGATGGTCACCCTCTGTGATTTTAAAGTGTGTAAATAG
GAACTGTAGACTGCCATCAAACATCAAAAATGTCAGTTGGCTTCCTTGTCTTGCCTTGCTGGCAAAAGGAACTCCTGCATTTGCATCATCTGGG
TAATCATGGACACGCAGTACATTTGTAAACTGCCCCAAGTTCTGAAGCCTCATTTCTTACAGCCAAAGGAGGGGGCTCAGTGGCATTGCTCTGC
CATCCCCAGGGTGGCTCCCCCATTGGCACAGACACTGTACCAGATTGAAAAGGGGAGCGGTTTGAAAAAGCCACCCCAAAGTGGTGTTTGTCTT
CTGTATATCCTATTATCCTTTGATATGTTCTGAGCTCCCAGTCAAACCCCATGACCTCCAACTGTTCCCACACAGTATCCCCAAACCCAGTGCT
GCCCATGCAGCCCAGCTCGTCATGTGGCATGAAGTCAGACTGACACGGGCCCTCTGCCCCTTCTGGGGGTGGCTGGATTCTTGGCATCATTTCT
GTGTTGAGCTACATCCCACACATCCGTTGATCACTCAGGTGAGTTCCTCTCACCACCCTGGGCAGCAGTGTGCAGTTGGTTACAAAGCTCTTGT
CTTTTGTTCTGGATTGAAAGTCCGCAAACATAGCGTTTATGCTGTTGAAGCTGTGAATCAGAATTTTTATTCTGTTTGTTTTGTTTTGTTTTGT
TTTCTCTTTACAGAGGTAATCAAGTTACAGAATTTTTATTCTGATATTACTTCCTTTCTGGCTCTTCGGAAACTGGAAGGATAATTGGAATTAT
TCAGAGCCTCAGTATTCTAGAACAGCAAGCAGGGCTCCTTTTTTCTTCAGTCCCACCCAAGATAACCACTTAAATAAGCCTCCATAACACAGTC
TGTACTCCAAGGAAAGTCCCTTCGATGGTTCTCAGATTTCCTTCTTAAAAGGACTAAATACCCACAGTTTCAGGAGATGCCCATTAATGTTATC
CTCTACTTTTGTGTTCCCCCCATAAGTTACCCTGGGTTTGTCATTGGTCACCGTTGCAAGGAGGGTGATGGAGAAAGGCAAGCAGCCCAGAGTT
TCCTCCCTTCACTTCCTGGCTCCTCTAGGGATATTTGGAAGGAATGTCACAGTTTACCTTCTGGTAGCCTCCATGTCTGGATCGAATGCCCTTC
CACAATTTATCCTGCCTATCCTTCCCCGACTGCAAAACCCCAGGATTAATACCTAGAGTCCAGCCTTGCCCCTGCATTCTCCCTGGTAGCTGAG
CCTACTCCCCTGTGTCCTCTAGTTGTCCTGGGTTCAATTTTTAATACCCACTGATGGACCTTCTGTCTCTTCTCTGTCCAGTCTTGAACTCTGG
GCTCTCTTGGAACTTTCCTCACCCCTCTCAGCCTGAATATTCCTTCCATGGATTCCACTCAACCAGACTTTGGATCTGTGCCTACTTAATCAAC
CTTATCTTTGCAATATGTTCGGGCCCACCTTCCACTCCTTGGTTCTTGTCCTCCTTGGCCTAACTTGTCCCTTCTCCACTCACATCCCCGGTGG
GACAGCATTCCTCCTTCCTCCCAACCTCCCTCCTTCTCAAACTTCTTGCTCAACATTATGAAATTTCAGATGGAATATAATCTTAACCCATTGT
AACATATACTTTTCAAAAAAACATGATGCTAAAACTTTATGAACTTGAAGTAGAAGTTTCAACAGAGTGCGTCACCGGGGATAACTGGAAAACA
CCCAGTTGTATTACTTCAGAAGCATTTGGGAAATCTGAAAGTCATTCCTTTGGCCTAGTGTGAAAATTCTGAGTTTTGCTTTGCCAAGTTTCAT
TGGGTTTGAAATCATTGTTTTGTTTAAATAACCACAAAGTTCCAGGTCAGGTCAGCTTTGATTTTGCTTCTTTCACAGGATATCCTGTCCTGGT
ACCGCCTTGTCACCTCCCCCTCCTGTAAACCAAATTTCTGTTATTGGCATTGTTTGTGATTTTTTTTTTTTGTTTTATTACCCAGAGTAACTTT
CAAGTTGAATTATTGCATACTATTAAATATTGGATATAATAATTTGCAGAGTTAGTGGCTTTATAATTAAAAAGGGCTCTGGGTGGCTCTTTGG
TTCAGAAAAACAGTGTCTATTGTTGAAGTTAATGGGTTTCCTCCTTGAAAATGCTATTAGGGCACAGCTCAGATTCTCTGTAGGAAGGATTTGG
CTTCTTTTATTCAATACTGACTTCACCTTCTCCACCTTGGCCTAGTTTTTTAGCCAGAGGGGATATTCTCTGAGACTATGGAATTGGCCTGGTC
ACCAAGAAAAATAAAAAAGAGAGAGACTTGGCAGTTCAGCTCTCCGGAGATGTGAGCTGGGCCCACCCAGGCCTGTCCTGGCCCCTGCCGTGAC
CCTCCCCACCGCAAGGAGAGCCATGGGTCATGCTGCATCATTCCAATGCGGCTGCCTCTCCCTGAAGCCCTCATCTCCTGCTTATGTTCTCTTT
TCCTGTCTCTGCTGAGCCCTCTTCTTCCTAAAGGCAGTGCCACCATTTAGTTCTCTGTTGGGTTTGCCCGTGAAGTCTGTCTCCCTGGCTGCCT
AGAAACCCCAAGGGCGGAGGCAACCTGTGCTTGGTTTTCCCAGGAGCGCCTCACAGGGTGCTGGGGACATCATGGACCCTCAGAAGATTCTCAG
TGATTGGTTGATGAGTGTTTTGATTAGGAGGGTTTTTTCATCTTCTTTTCCTCTTCTGATGTTTGGAGAGCTTTGGCATTGCTGATGGCATTTG
CCAGTGCAACTCAGGGACTTTAGGCCTTTACTATCTGAATAAAATAACAGCTGGTATTTATTCAGCTATTACCAGGTACCAGACGCTGTGCTGA
GCCTTTTACATCAACTGTTCTTCCCACCACAACCTTAGGAGGTTATCATCCCCAGTTTACAGACAAGGAAACTGAGACTTAGGGATGTTTTAAA
TGATCAACCAGCAAATCCAGTGTGCAAGCACAGGGATACCTGACTCGGAAGCTCCTTTCCTAAATGATCATAGTGGTCCTTCCACAAGTGACCA
CTCAATCCCAGCTCAGCCCACAATCGGACCACTTTGCATTGTCACTGAAGAGCATCCACTCCTCGTTTCCTGGCCGGCTTATGTACTCTTACTG
CAGGAGGTGATTTGGCAGCAAAAGTATCTGCGGTCTTCATTGGAGCATTTGAAATGCCCATGCCATCATCTTAATGTATGAAAACACATAAAGA
ACAGGAAGTAACTGAGTCAAGTAAGCTATTTCTATTTGAGGCAGAAGTGAAAAACAGATTACCTGGCCACTAGGGATAGAGGGACTTCATTAAC
TGGAATGTGGCCTGGGGCTTGGGATGGGCCATCCTGACATGATGACTTTGGGCAGTCATCCTGTTGGCACTGAAAAACCGAGAGCATCAGTCAG
GCTGTGCTGTCGTATGAAAGGAAGATTTTATTCCTATAACTTTTAAGAGTGAAGAAAATTATTAGTTTATTACACCACTGTATTGACACTCTTT
GCGTTTAGTTTGATTAAGTCTGTGTAAAGGAAGAGAATTACTTTGACCGTCAGGGTGTCAGATAACTTACTGCCTGGCTGGACCCTTTAGCTAG
TTAGAGCATTTATTGCTGTTTAACCAGCCTTAGGCAAGTTGCTATGAAGAAATATGTGTCTCCAACCTCAAAGGATTTGCATTCTATTTAAGGA
GATTTTTTAAATAACTTATGAAAGAACTAGTAAAAGGACACAGAGGAGACATGGACACAGTGGAACAGTGTATAGTGTTTATGCAGTCAGGCTC
TGGCACCTTCGGTTCAAATCCCAGTTCTGTCATCTACACTTGTCCTTTGTTTGGCACATTGCTTTCCTCTCGGTGTTCCGTTTTCTCATCTGTA
GAACAAGACTATTGCTGGCATCCACCTCATGTGCCCAGTGCTTTGCATGCCTGACTCTTAGCAAGCGCTCAGTGTATGTTTAGCTATTGTGGTA
GCTGCTATTATCAAGCATTAAACTGTTGTTTCTAGCACTGGCGCTAGGTGCATTGGAGAGATTAGTGAAGGCTGGAGTAATCACAGATGGCTTC
ATGAAGGAGGTGGGACTGGAGCTGAGGAGGCTGTAGCTAAGCAGGTGAAGAGAAAGAGAGCATTTCCAAAGCCAATGTAAAAGAAACAAGTGTG
AGCATGCTAAGTGCAGGACACAGGTTATAGTAAAGCAAACTGAACTAGATTAACTGTGTTTGGGGTAGCAAGAACCAAGTTAGGTCAGGCACGG
TGGCTCACATCTGTAGTCCCAGCACTTTGGGAGACCAAGGCAGGAGGACCACTTGAGCCCAGGAATTCGAGACTAGCCTGGGCAACATAGCAAG
ATCCCATCTCTACAAAACATAAAATTAAACTAGGTGCAGTGGCTCATGCCTGTAATTGCAGCACTTTGGGAGGCCGAGGTGGGTGGATCACCTG
AGGTCAGGAGTTCAAGAGCAGCCTGACCAATATGGTGAAACACCGCCTCTACTAAAAATACAAAAATTAGCCAGGCATGGTGGCGTGCACCAAT
AGTCCCAGCTACTCAGGAGGCTGAGACAGGAGAATTGCTTGTACCCATGAGGTGGAGGTTGCAGTAAGTCAAGATTGCACCACTGCACTCCAGC
CTGGGCAACAGAGTGAGACTGTCTCAAAAAAAAAAAAAAATTAAATTAAATTAAACATTAGCCAGGCATGGTGGTGCACATCTAGCATCCTAGC
TACTCAGGAGAGGCAGGAAACTTGCTTGAGTAAGCCCAAGCAAGAAGAAGAGCCCACAGGGGAGACACACAAAATGCTTGGAAAGAAAGGAAGG
ACATGGGGAAGAATAAACTCAGAAAAATAATTCATGCATTTCTCATAGAAATGTTTGAGCTTTGCGGGTTGGAATATGCTAAGTTTTACTGCTT
TGTTACCGAAATTATTGGTATTATTCACATGTGAGAAGTGTGCTAAAATAGTACAAATGTACCCAGAGCCACTCGTTAAGTAAACATGACAGAA
GTGACAATGGAAGCATCATCTACCCAATTGCTAATTGCTGATAGACACCCATGGGCCTTGAAATGTCACGATGCTTTTGAAGAGTTTTGAAAAG
TCAAAACACTTTTCCCATTCTGTCTCATCATAAGTCATTCTCAAGGTAATGATGTGTTATCTTCCATGTTTTAAAAGACAAGGGGAAAGAACGA
CGTGGGAAGTCATCGCACTTCTGCTCACAGCCCAGTGACTTTCTGTTGCGCTTAGGATGGAATCCAAAATCCTAGTACAGGTTACAGAGTCCCA
CAAAATCTGTCCTTGTACCCCATCTTATTATTCTTCATAGCACTTTATTGTAGTTGACATATATAATAGCCATTCATTTATTTTATCTCCCTCA
AACTAAGCTTCCAGCTCCATGACTGCCAGAGACTGTGTTCCCTTTCGTCCTCCTGGCACCGAGTGCAGTGCCAGGCACTGGGGAATACTCCAGA
AATACTTGTGGTAGGAAGAAAGAACAAGCCAGCCCAGCAGTGGTGGGTGTTTGTGTTGTTATTTCTGTGGACAAACTTTGATAACTGAATAAAT
CCACAGCCCTCTCCTTTCTCTTGCTTGAAGCATGGATGATTATTAACTTTATTTTAAATGAGGAAGACCAGGGCTTGGTGAGGTCAAAATGGTT
GATGTCTAGTCACTTGCATTCATCCCAGTCTATTAAGAATTTATTCTTAATCCAGTCTATTAAGGATTTTCCACTTTGTTTCACTGTGAACTCT
CCCAAGGCCCCTTGCCACCTCGTCTTTCTGCTGTTGTAACTAACCACCCCCATCCCCAGCTGCAGCCCCAGTGAACTGGGCCCCCTTGTCCTCA
GAGAACAAAGTATGGGGCTCCCCCACTCAGATACATTCACTCCGACCCAAAGGGGATCTGAACACACTTCCTTTGGCAGTGAAAATGCAGGGTT
CTCCAGGTGTTTTAAGTTTCATTAGTGTGTGGCTGTTGCTTTTCTATTTCAATTGGCAATTCTTAGACTCTTAAAAGGACATCCAGACAGTGAC
ACTGGTGCTGTCACCAAGGACAAGTAGAAGACTCACCAGAGGGCAGGGAACTGATAATACGCTCTGTAAGGAACTGTGGTTATTCAGCCAAAAA
GGGAAGGGCTGGGAGGGCTGACCAGCTACTCATTCATTCATTCAGCACCTGTTTATCAAGTGCTTTCTCTGCAGCAGACACTGTACTCAGTACT
GGAGATGTGGCCATCTGGGAAGACATGCTCCAGCACTCAAGCACAGTATTTATCTGGGGCAGAGACAGCCTTCAGACAATTCATGCATTCATTG
CCCTTTAATAATAACAGCTTCGTTAGGCAATATTTACTGAAAAAAAGTAGTGACAACTACAAAGAGGGAGGTGCTCTGGCAGCATAGAAGTAGG
AAACCTACCGCAGTCTTTAGTGATCAGGCAAAGGTTCCCTGTGCAAGTAACACTTTGGCTAGGAGCAAAAGAGAAGTAAGAATTAGCCATGGGT
TAAGGGCTTTTGATAAAGGAAATAGCCTGTCCGTGAAGCAGGTAGGAGCTTGGCATTTGCAAAGCAGTCAAAGAAGGGCAATGGAGAGGTTGCA
GAGGAGAGAGGAGGGAAGCAGAGGAGAACAAGTCTGGGATGATAAGAAGCAGCTGGGGAAGTAGGTAGGGACCAGATTATGCATGTAGATTCTA
TTAGAAGGCTACTATAGAAACCCAGGGGGGGACATGCTGAGCAAGTGAGGACTAGAGGAAGGGTAGTGAATTCAAGATCATGAAATGGTCAGGA
TGTAATGGACCTGACACGGGCAGGGACAAAGCAGGAGAGCACAGAGATCATTCAGTAAAGATGTATTGACCTCCTTCAATAGGCAGGCCCTGTG
CTGGGATCTGAGTGCACAGTGATGAAAAATAGAGTGTCCAGGTGAGGATGATTCTCAGGATTCTGTTGTCACCAACTGGGTGGTTTACAAAGTC
ACCAAGGATTGAGAAGCCAAATTGTGGGGAAGATAAATTTTGGATGTTGCATTTGAGGGGCACTGACTTGTATAACCAATTTCATGGAGAGACA
ATTGAGAGGGAAATTGGTTATGCAAGTCAGGGACTCGAGAGAGAGGTCCCATCTGGTGATATAAATGCAGGCATCATTGGGGTCAAGATAGTCA
TTGGAGCCATGGGATTGAATAAGATCCCTGATATTACACAGAGTTTGTGACCACTTATTTCATATCTCAACAGAATTCAGAGAAACAGGATTGA
GCTCTATATCAGAAATTATTTAAAACATCGACACATTTATTCATTACAGGAATAATTCAGCCTAAGGCTAACTGGTCTTATATATGTTCCTGGG
AGTTAAATGACTAAGGCACAAAGATCCTCTTACATGGAAGTTCTAGGACATGGGTACCAGTGACAACACCAGGTTGTCAAGTTTTCACAATGAC
AAGTCGAGGTTTCGGCAATGAGTTTACCTTGGGAGTTTGGTAAAATTTGCAAATAGTACCTGGAAAACATTCAGTGGAAAACATGCTTCCAAGT
ACACACACCACACACACACACACACACACACACACACACACACACACACATATTATGGCCTTCGTGTATTGGCTTATCCTAAAGAATCCTAAAC
TGTTAAGCTAATTCAGTAAGAAATGACAGAGTGGTCACTTCTTTTTTTGAATTCATGTAAACATGGAACAAGTACAGTAAGTGTTACAGTGAAG
CTCAAGATATCAGTGACATAGATGATCATTACCTGCATAGTTTGCTCTGTTTCCTCTAAATAAAATGCAAGGAGGAGAAAACTGTTTTCATATC
TAAATCCTGCTCCCAAGCAGAAGAATTTCAAAGTGTGAATCAGCTAGTTACATAACAATACCAAGTTAACTGCATTGCGGTTCTCCTGATGTTT
TCTCCGTTGTTCTGTAAGTCCATACTACTTAGAAGACCACTTTGATTCTGACTTTTTGCCTGTCAGAACTTTACTTTCAAGGGAAAGGCAACGT
TTACACCCAGGAGATCCTTCCTTCAAGGTGTCTGAAGTCTCCTAACTTACAGAGCTCACTGCAGCAGCCCTGCAGCAGGGACATCTGTGGGATT
GTATAGGTTATGTACTACACAACCTTAGGGATGCTGTTTTCATAGACTGGGATTTTACACTGTGCAACCTGCAAGGCTAGTTTTAAAGACACCT
GCCAAAAATCCCCAGTTAACTCCACCACATTTAGAGCTGCATTTTAGGGCCAATAGCTTTGTACCCTCAGGAGGTGGGAAGCCAAGATAAGGGG
AAACAGAAGTAATGAGATGTGTCCAAGAGGAAGCAGGGATTAGCTCTTTTCAGTAGAAACCTCAGTTAATCATTAATACCTTATTGCTGCTTTG
ATTTAACCTTTTGTCTTCCTTGAAAAGGAAAATGAGTTATCTATAAAGAAGCTTCTTTTGTTGAAAGCAGCTGCTGTTTTAAGACAGAGAAGAA
GCAGGAGAAGTTGGACAAAGACATTATGTTTTATTCCTCCAAATACATTATAAATACATTGTTTGGTGTAAATATATTGCTTGCCTTAGAAAGA
AAATTAATACAAAACAAATTTAAGTAAGTTCCGACTAGTAGTAACTCAGACCACATATCTACAAATGACTTCCTTTCAAAGATTCCTTACATTA
ATGCAGCCTTTGTTTTAACATTTTTTGAAGGTTTATATATTATAATCCTTATTGTAGATTATAAAATGAGAAAATAATAAAGCTGACTAATGCA
ACTGGCTGATATTGCCGTTGGTTTTTTTTAATCTGAAATTATGAAATCCCTTGGAAAATCTAACATGACAGTATCCAAATTTTAAATAGTCACT
TTCAGCAACACACACACCTTCACCAATGTTGAGTGATTCAAAGAAGGGGAAAAACAACTCCTTTGGTTGTCATTTTATTTACAGGATTTGTCTG
CACAGCAGAGAAAAATGTTCCATTTACTTCAGAGATGGTCAGAGATTTCCAAGCCATTTGGCTCAAGAGATGGTTTAAATAGGAATGAATGTAG
TATACCTTTAATTCTCTGAAGTAAGAGAACTCCAGCTGAGGTTTGGTCCAGAGCAAAGTCTGCTCTCAACATTGAAGAAAATCTATCACATTAA
TCCCAGTGGCTCAGAGTCCAAAGCTGCGTGAACAGAATGCTAAAGGATAGGAAGTGTGAGAAGAATGCTTTGAAAGAAACCTTAAAAACAAAAC
AACTGACTATTCAGAGAATACCAGGTCTTATGTGGAATCATCTAGCACGTAAGGAAAGATATAAATAATTATGCCTGAGAAACATAACTAATTA
AAAATAACTCCATGCATAAAAGGAAAACTATAGAATAACTTTTCTGCTCCAGTGTTAATGTGAGATGCCTCATAATGAAATAGTAGGATTTTTT
TCTTTCATTTCATTTCACACAGACACATGAGAGATGGAGAGGAAAATTATATTGCCTGAAAATGCCAGGGTAGATTTACTAAAGATGTTATCAT
ATGCTGTATTTAAGACAAAAATCTAATTGCTGTAATTTATCATACCTCTGGCTATTAAAACTGTGCCAATTTAAATATTTTAATCATTCGCCAC
TTTTGTACATAGTGACTTTTTATAGAAGATTCTATGAAATGTTCTGATTTTGTCAGCCTTTGTATGATTTTCAGGAGCTCCTTAAGCAGAATGA
ACATGCTTTAAGCATGTAACTGTGTTTCCATAAGTAATAAAAATTCCTTGTGTTTTTCTTTTAGTTTGTTCAGTAAAATACCTGGAACTGCTTT
ATAATTGCTGAGCTGAATGTTTGAGAGCACAAGCTGCTGAATCCCTTTTATTTTATTTTATTTTATTTATTTATTTATTTATTTATTTTTATTT
TATTTCATTTTTTTCTGAGACGGACTCTTGCTCTGTCACCTAGGCTGGAGTATAATGGCACGATCTCGGCTCACTGCAACCTCTGCCTCCTGGG
TTCAAGTCATTCTCCCGCCTCAGCCTCCCAAGTAGCTGGGACTACAGGCTCGTGCCACCATGCCTGGCTAATTTTTGTATTTTTAGTAGAGACG
AGGTTTCACCCTGTTGGCCAGGCTGGTCTTGAACTCCTGACCTCAAATGACCGCCCGCCTCTGCCTTGTAAGGTGCTGGGATTACAGGTGTGAG
CCACCACACCCGGCCTGAATCCCTTTTAATTCCCTGCACACACATCAAGCTTGTAGAAAGCAAGGTGGACCACACCCTTCCTTTTGGTTTAGAG
ACAGGATTCTTTCAATGATCAAATAAATTTTTGAAAAAAAGGACTCCACTGACTTTGACATGAATTTGCACCTTGGTCTTGAAAAGTCAGAGAC
TCATAAGACAGTCATGGAGGCAGAACTGCTCTTTAAAAAACAAACATTAAATAGTACTCTTGCTGGGTGGTAGAAGAAAAAGTGGTAAGAAAGT
GATCTTACAGTATGGAAGAAAAAACTATCCCAGGAGTAAAGATGGCTACTACAGGGAGAAAGAATGGAGGAAAAACAGCAAATGTGGAGAGAGA
AGGAGCTGGAGGCAGATTCCTTTCCCTGCTGTGGGTGTGGGAGGCCTTTGGGAAATCTAACACATTTCAGCAGAACACATGGGCAGTATCCAGT
TGTCCCCACCCTGGGAGCAGCTCAGTGGTTTAATCAGGTTTTGTGTACCCAGTGAGACCACACTATCTTATATACCCGAGGACTCATGAGAGCA
GCATTATGACTAAATCCTATGTATGTTTATTAAAACATAGCATTATTTCAAAGTTAAATATATATATAATTTTCCTAAATCATAAGAAACCAGG
GCTTCTTCCCCCCTTTATTGAGGTACTAAGGTGCTTTGAGCTGGATTACTTACGGTCACACAGTCAAGACCAGACCCTACATCTTCCCAATCCC
AGCCCATTCCTGCTTCACCTCCTTTCTGTCTTCCCCTCTAAACCTGCTCTCAGGAAAGTAGCTTGCCAAGTGCCTTTCCCTCCCACACCCCATG
CCCATTGCAGTGCCCTCTGCCTGATGAATAACCAAGTGTTCATTCTGCAGGTGCAAAGTTCCCCATCAAGTGGACGGCCCCCGAGGCAGCCCTG
TACGGGAGGTTCACAATCAAGTCTGACGTGTGGTCTTTTGGAATCTTACTCACAGAGCTGGTCACCAAAGGAAGAGTGCCATACCCAGGTAAGA
GCAGGGCCTCACAGACATGGGCCTGAGATTGGAGGCTTTTTTGACACCATTTGGGAAAACTTCATCCACTTTGCTTTCTAAGCCCCATCCTCAG
CTTTCTGCTGAGCTTGAGTTTGAAGAACATGGCCAGGTATTCAGCGAGAGAAAAGCAGAACTGGGAGCCACCATGTATGTAGACAAGCAGCCAC
CATGAACTGTGTGCCAGGATTAATGTAAGTAGCAGCTGGTCTAAATGCTTCAGTCCCCCTCCAGTTCATAGAATCTCTCCTCTCTCAGTAGGAG
TATGTGTCTGTGGTTCCCAGAGCAGAAATGTCACTGGCAGTGCCTCTGCCCAAATGGAGTTTGCAGACATGTCTGGGAAAGAGAAGGAGAAAAG
CCCCACTGCTTTTTGATTACACTGTAGCACTGACCCATGGAGTGAGCCTGGCAGGAAGGTGCCAGGACCTGTTCTCTCCACAGGACCCAGCTCC
AGATGGCCAAAGAGAGCAGAGGCACATGTGAAATGCAATTTAGAGCCCACTCACTGCCTGTTGCTGAACAGTCAAAACATGCTATACCAAAGCA
AGTATAATGTAAAGAAATTGGAAATTCTTAGACTCTGGAATGTTTCTGTATTATCAGATTTATGCTCTCCAAAGAAACCACGAGTTTGGCTTAT
CCATGCTTAAATTGATTAACGTCGACAGATGGTGACATAAAGGACACCCATGCCATTTCACCTCCACGCTTTAGTGGTTATAGCACAGGGACGA
TCTGCTTTTTTGAAATGTTAAGGACATATTTTTCAGTTACTGCTGAGTGAAGAAAGAACATAGCTCCCCCTCATTCCCTGCGTAAGAAAGGAGC
TTAAAGAAAAAAAAAAAAAAAAAAACAATGATAGAAACGATAGTGACGATTAATGAGGAATTTAGGTCTCTTGCAAATCCTGGGTTTGTAATCA
TAGCTTTGCAGTCAGAGGAGCTAGCGAAGGCAGATTAATTTGTAATCCCTTTGTTCCTTTTTTATGATTGTTTCTGGTCATCTTCAGAGAACAC
AGAGAGGGGCACATCAAGATAATCTCGTTCTGGGTTGGTGTAGCCTTGAGACTCCTAGGAGAGCCAAGTTGACATGGAGGCAAAATTGACAAAT
TCCCAGTCTCTGAAGTGCCGGCACTGGGCGTTTAGAGATGCGGGTGTAAGTCAGTTTTATTGATGCTGCGGTGACTGCTGCTCCCGGCATGCAC
ACACGGGCAGACACTCCGGGAATCGCCAACCAGCACAGAAGAAAGGGCCGCCCTGGGGGATGGAGCACAGCGTGGGTGTTTCTGAATTGCTTCT
CAAGGGGGGAAATGTGCGGGTCTCAGGAGGGCGAGGATGTGAAGGCATCTCTTCTTTATTTATTGTCTGAATTTTGAACTGATTTCTTCCTGAT
CCCTCCCAGGTTTATAGTCACCCTGTGTGTTAAATGCAACTGGGGAGAAAAGGTTAATGTTGTTTTGCGTTTCTGTGAAGCCTTCCCTTCCAGT
AATACAAAGCAGCTTTTTGTTTCTCAGGGTCTCACACAGAAACCAAGACAAAGGGGTGGAGGTGGGGGCCTTGGAGAAGGAAGGCAGGTGCGTG
TTTCTGAGGGAGTCTTTTGTCAGGTTTGGTTTTAGCATAAAGAAAATGCCCTCATTTTACCACTTAGACCAGGATTCATTCATTCAGCGTAGCT
TCAGTCACTGTGAACTGTGCCAGGCATTTTCCTCTATCGGGGAGATAGTGCAAATAAGACCCTCATACTCTAAACAAGCCTTGATTAGTACCTG
CCTCAGGCTAGGCATTGTTAGCACAGTGGGCAAGTAAATAAATTTAGTCCCTATGTTCATGGATATTACAGTCAGATAGATAAAATATGCATCA
AATCCAGGAAGAAACCAGCCTTCTTTATTCCTTGTTTATTATCAGAGGGAGTCATCCTGAAAGGATGGACTACTTGGCTTTACCTACTATGGGG
CCTAGATCTTCATTCTGATAATGGGGTCAGGGACACCTGATCCAGGTATCCACACACAGCAGGTCCTGAGAGGGACTCTTCAAGCTGAGTCCTG
TGAGGATGGCAGAGGAGTTTGAAGTGAGAACTAACTCCAGCGGCTCCTGCAGAGAGAGCTGTGAGCAAGTGCTGGTCTGCAGTGGGCTGTGATA
ACTGCCTCTAGCTGTGGAGGAGTGCTGGAGAGGGGGCTGTGTAGGGAAGGCAAGTAAGCCAGACCTTGGAAGCCAAGTAGGTTTCCTCAAGCCC
AGAAGGCGGGAAGAGCATCCCAAGGTCTGGCACGTGGGAAGGCACATAGGCCTGGGAGGACAGTTCCAGGGACCACAGGATGAATCTGAGAAGA
TGCCATGTGCAGGGGCACACCTGGAGATGTGACTGGAAGGGTGGCCGAGAGCCTGCGTTGGGGCCTTGCTGGTTGGCAGTGGCAACCAGGGAAC
CGTGTCCTCATTGGGGGTGTCGTGAGCTGGTCCTCATTCAAAGAAAGCCACAAAAAATTGTTCCCAGGCCTGTTCCTAGCCATGGGTTCTTCCT
GGGTTTTGCTTTTTAACATAGCTATAATCCTATTTAATTGGGTTTGTGAATCCAACAGAAAACTCTTCTTGAGGGAGAAGCTTTTACAGAGGGA
TTCCAATTATAGGATTATTACCCTAACGAAGGATAATAATTCCTAAGGAACAAGAGGTTTCACGAAGCTTCCTTCAGATGTCACTGTGAAGGCA
AAGAAGGACCTTCCTCTCTGCATTCTTGCTATTTGTTGGTGTGGCAAGTCAGTCAGTGTGCGCTGAGGGGTCCTTCTCAGCTTCCCACGTTGCG
TCTTTGTGCCTGTTGCTGGTACCTCAGGACAGACTCCCAGTCCCGGTCCATCATGATTTCCATTCTGCATTTTGATGTAGTCATGTCTCATGTC
TCAGTTGGCTAGAGTATATTTTGAAGTAATTCTTTTTTGGAGAACAGTAGATGGTGGTACATTTTTCTGAGTCTTCCATACCTGAGAATAGCCT
GCTGTTTCCTTGACACATAAGAAAGCTCCTTTGCCTGGTAGGTGAAGATGGAGGTGCGGGAGGAGGGGGTGACATATAAATTGGTTTTATAAAA
GCTTTCCAGGCATCTTTGCCCAGCGTGAAAGAAGGTCCAGAAGTGACAATCCCAGAAGGAACTTAGAGTGGAGTATGTGAGGTGTGACCAAATA
AAGGGCAAAGGGAGGCGGAGATGTTAGAACATTGGCAAGTTGTGTGAGAGGAGTGGACAAAAGAAGGGAAGACGACAATCTCAAACTGAATGAT
AACCTGGAAGCCGAAGGAAAAAATACTGAAATATGATGCTGAGATTAACGGGGGTGGTAGAGAAAAGTTACATCACCTTACCAGATGAGGAAGG
TTGCTTTCGAGATGTGTAACAAGTATGGATGCAGTTCCAAAGAAGAGCTCCATCAGTTCCCCGCTAGCAGCCTGAGCTGAACGCATTCTCTGCA
TTGCAGTCTAGCTTGCTTTTCTGCAAGCAAGAGTTCAGAAGCTTTCTTTACTTCAAGATTAGAACTGATTTCATACTGATGGATTGTTGTATGT
GAGAAATAAAAACACTTAAGTAAAAGCAGTTTTCTGGGGTTGATGCATAAAATCAGTTATGCATTTTTACCTGTCATTTCACCTTAATACCTTT
CTCAAATCCTTCTTTTCCCCTCTGCTTCCAGTTTCTCCCCGCCTCCCCACCACCCACCCACCCACCATTCTATCATTGTTGCCAACAGAGTTAG
TATTCTAGAAAACACAGACCTGGTTATCTCACCCTGCTAGTTAAAAACGTCCACGGCTTCCCTTTGCCTTTCAGATAAATCCTAGAAAACGTAA
TTCTACATAGTTCTTCATAACTCTTTTTCTGTAGTCATTCCACAAATATTTATTGTGCACCTACTATATGCCAGGTACTGTTGCAAGCACCAAG
AATACAGCAGTGAAGCAATAGACAAATGCTGCTGCCCTCATAGACTTCCATTCTTCTTTGAGGAGACAAACAATAAACAAAGATAAATAAGCAA
AATATATTGAATGTTTGCTGCTGGTAACAGCTAGGGAGAAAAATAAAACAGGGAAGGGGAGAGAGGGGAGAGTGGCAAAGGAGCACCTCACTGG
TGAGTAGAAGACCTAAAGGAAGCAAGAATCCAGCCAGGTGGGTATCTGGGAGCACAGCCTTCCATCAGGGGAAGGGAGAGTGCAGAGACCCTCC
AGAATCAAAGGAGGCCAGCATGGCTGGAGCAGAGGGAGCAGGAGGTCCCAGAGGCCCCAGGGGCAAATCAGATAAGGCCTTTCTAGCTCATGGT
TGAAACTTTTGCTTTTAGTCTTAGTGAGGTGGGAAGTGAGGGGATTTGAGCAGGAGAGTGACATGATTTCTCTCTTGCTGTCTTCCATCCTTCA
CACGTTACCAAGACACATCAAGAGATGTCTCTTGAACATGCAGGTCTCTCTTTGTGGCTCCCCTGTCTGCCTCAGAACCCTTCAAAGCCCAACT
GAACATCATCTGCTTTGGAAAGCCTTCCCCATGTCCAGACCAAATGGGGTGCTCCTTCTGCTTGCCTCCATGACACCTAGCATATTTCTGTTGG
GCCCCCCGTTTGTGTGTATTTCTCAGCAGCTTCAGAGAAGGGAGTCCCTTTGATGGATTCCCGAGGTCCAGCACAGGGTCCACCCCATAGTAGA
CTGTCAGTAAGTATAAGCAAATAAATGAGTGAATGAAACAGAAAAAAAAGAACTCACCTATGAGGTTTTTGAAACAAGGTTTTTAAATTTAGCC
CATAGCCTGCAAAGCCTTTTAACTGCATTCCATCATCTTCACACATGGATATATATTTTCCTAGCCACAAGGTAGCCTCTGTCCTCAAAGTTCT
TCTGGAAAATTGACCCTGTGATCATTTCAAACATCATGTTCCAACACTATTCTAGGCAGAGTGTCCTGGCTATTCTGTGCCCTGGCTCTTAACC
GAACACCTGTTTTGTGGATTTGGCAGGACCTGGTAGAACAGGAACACTTTCTTTTTTTTTTTTTTTTTTTTTTTTTTGAGATGGATGGAATCTT
GCTCTGTCAGCCAGACGGGAATGCAGTGGCATGATCTTGGTTCACTGCAACCTCTGCCTCCTGGGTTCAAGCGATTCTCCTGCCTCAGCCTCCC
AAGAAGCTGGGATTACAGGCACCCGCCACCACGCCCGGCTAATTTTTGCATTTTTAGTAGAGCCAGGGTTTCGCCATGTTGGCCAGGCTGGTCT
CAAACTCCTGACCTCAGGTGATCCACTCTCCTTGGCCTCCCAAAGTGCTGGGATTACAGGTGTGAGCCACTGCACCAGGCCAGGAACACTTTCT
TAAGCAAACCACACTTATTCATTCATTGGAAGCACTTTCAAATCATTCAACAGGTGACTTTCTTGAATACATCTAGTCGCTTGATAATGACCTG
AAGAAATAAGGGAAATTAATGAAACTGGTGGCTTTTTCCTTAAAGGATTCCAAATGCCACTCTGGTCCTCCCTCTGCCTTAGAGCCCTGAACCG
TAGATACATTTTCCTTTGTGTTCAACATAACAACAGGAGCAGGTTTTTCATGGGAGAAGAAAGGGTTAGGACTCTCCAACCAGGAGGAGACTGG
GAAGCCGAATGAAAGCTCTCATCTTAGCCGAGGGTGCGTGTCTCTCCCTGGCTCGTCCACAGTCCCTGGGGTTTTTCCTGCAGCTCATGATGTC
CCCTCAGAGAGGGAACCCTGCCTGGAATGCCCAGAGGTCATGCTGTCACCTCCTTCTACAAGATTTCTCTTGGCCAGCATGTCTAGTGAGAGGA
GGAGGGAGACCAGGGGAGAATGCGTGTGAAGAGGGTGGCCAAAGAGGGACTTTCGGCCCCCAGTCCTGTGTTCCAGCCTCACGTGCTCCTTGTT
CTCAGGGGTGCAGTTCCGGGGCCTTCCTCATGGGCACCCTGCCTCTCTTTTTCACTCCTTTTTTTTTTTTTTTCTGGGACAAAGGAGTTCTCTA
TGATACTGTATTATCAACTTCAAATACAGAAATACCTGTGTATTCAGTTACATGAGTAGCTGTCTTTCTGTGTTTATTAATACAATGGGCTGAA
TAAAAACAGCTGTCCTGAGGTTATCTGGCAAGATGAGGAAAGAGAAACAAAGCAAGTCATTATTGTACCTTCTCAAGATAAGTTCTTTATTCTC
ATCCACACTCTTCCATCAGCATCTCCCTGCCCAGAATTTTCACAATGATCCTATACTAAAACCTAACTCAGTGTCACGGTTATTAACCAGTACG
ATAGCAAGGACACATGAGAATCTGTTAATACAAGCACATGCGATGGCGCAGGCTCATGCTGAGCAAGCACCATTAACACCCCTCCTCCTTCCCA
GCGCCAGCACAGCACTGCTCAACAGACATGTAAACACCGGGCCTTTTATGCACAGAAGCAAGGGGAGCCTCAGACCCAAGGCCCTATGCACAAC
GTTGTGTGATTCCCTTTGAACGGAAAGCTCAGTTAGCAAAAGGAATTTGGGTATCTGATAATCTAAACATCATTCCCATTGTTAAAGTGCTTAA
TTATTCACATGGCACAAAAACCCAGGTTTTGCAACCCATAGTCAAATCCAGATGCAAACATGGACGGGTAACACTTAAAATCCCTGATTGTACA
GATATGGCCCATCTGAGATCCATATTGGGAAGCTGCACAAATGGAAAGCTATAAAACACAAACACTCTTCTTTCATAAAAGACATTTTTTCAGA
TAGCTGAAAGCACAATGAATGTTGAGGTATTTTGTTAACAAATGGAGAAGCCAAGTTCAAGGGAAGTCAAGTCACTTGCTAAAAGATGCAAAGT
TAGAAGTCAAGAAGTGACATCTATTTCGGTGCTCTGCCAATGAAAGTGATTTTTATTCCTTCCCTATAGAATCTAAAAGAAGACCAGGTATAGT
GGCTCACAGCTGTAATTCCAGTGCTTTGGGAGGCTGAAGCAGGGAGGATCGCTTGAGGCCAGAAGTTCAAGATCAGCCTGGGCAACATAGCAAG
ATGCTATCTCTACAAAAAAAAAATAAATAAAAATAAAAATCAGCCAGGCATGGTGGTGCATACCTATAGTCCTAGCTGCTTGGGAGACTGAAGT
GTGAGGAGGATCGCTTGAGCCCAGGAGTTCAAGGCTGCAGTGAGCCATGATCATGCCACTGCACTCCAGGCTGGGTGACAGAGCAAGACCTTGT
CCCTTAAAAAATTTTTTTTCAAAGAATCTAAAAGGAAAAAGGGAAGACTACTGAGTTCATGTACAGCTCAAAGAAGTGGAATAGGGAAGTTTAA
AAGAAAAGGGAAAAGAAAACACACACACAACAATAGACACTGTTGGCAACCCTACAGAGTCAGAGTTTGAAAGTGAGAGTTGGAAACTTGACCT
CTGAGTTTGCTGGAGGAAGCCAGCAACATGATTTAGAAAGGATAATATAATCATAATGGCAGGAAGTGAGCACAGTCTTCTTGGCTGGAGAATC
TCAGTTGCAGTGTTTGGGGCAGACTGACTGGAAATGATGCTATGTCGGGGACCATGTTTGAAAGCCTAAAATCTGAGTTGACAAGGAGATGTTC
CATGGAGGCTCTGGGAAAGAGGGACTCGAAGGCAGACCCCCACACAGCGGACTAGTAAGGTCTCGCTCTGTCACCCAGGCTGGAGTGCAGTGGC
ACCATTTCAGCTCACTACAGCCTCAACCTCCTGGGCTCAAGCAATCTTTCCACCTCAGCCTCCTGAACAGCTGGGACCACAGGTACATGCCACC
ATGCCCAGGTAATTTTTGTACTTTTTGTACAGACAGGGTTTTAACATGTTGCCCACGCTGGTCTCGAACTCCTGAGCTCAAGCGGTCTGCCTGC
CTCAGCTTCCCGAAGTGCTGGAGGTGTTTTATGGATTGAGTACTGTTCAGTTGTACCCTATGAAAGTGACCCACCACAATGGCCTGTTTTCCTG
AGCAATTCTAGAGAGACAGCAGAAGGGGCTGGTGGCTCCCGTGAGGCTAGAAGGGCAGAACAGCAGAGGAGGAGAGGGTTGGAACAAAATTGGG
CAGTGGCCTCTGTGCTTGCTGGCTCCCCAGCCCCAAGCCGCCTCTCTGTGGGAACCAGGGAACATTCATACTGCTCGAACGTGGCTCTTCCCAC
AGTCAGACACCACTGGCCAGCCAGGATCTCCCCTCCTGTTGAAAAATGCTCTCCCTTGCAGCTCCCACTAGGAAACCTGGAAGGCCAAACTGTT
TATGACATTGTTTCCCTAAAATGTGCTCAGACACCATGTTTTATAAAGTTTCTGTCTCTTCTTTCTGTTAAGAAAGGAGAAAAAGGATCCCAGC
TACTCAGGAGGCTGAGGCATGAGAATTGCTTGAACCAGGGAGGTGGAGGTTGCAGTGAGCCGAGATTGTGCCACTGCACTCCAGCCTGGGCAAC
AGAGCGAGACTCTGTCTCAAAAAAAAAAAAAAAAAAAAAAAAGGAGAAAAAGGAAAAACATTTCCAGCACTCTTGTCCACCTCCTCAGTTGGAA
GTGTAATAAAAAGATTCTTCTGGCTGGGCATGGTGGCTCACACCTGTAATCCCAGCACTTTGGGAGGCCGAGGTGGGCAGATCACTTGAAGCCA
AGAATTCAAGACCAGCCTGGCCAACATAGTGAAACCCTGTCTCTACTAAAAATATAAAAAATTAGCCAGGTGTAGTGGCATGCACCTGTAGTCC
CAGCTACTCAGGAGGCTGAGACAGGAGAATTGCTTGAACCTGGGAGGTGGAGGCTGCAGTGAGCCGAGATCACACCACTGCACTCCACCCCAGA
TGACAGAGCCACGCTTCATCTCAAAAAAAAATAAATAAATAAAAAATAAAAGGATTCCTCTCTCTAGTGTACCCATGTCTCTCAAGACACTCTC
CCAACTGCCCTGGTGCCCAAACTCGTGTTTATTCCCTTCCTATTCACTATCCTTCACCTCTCAGGTATTAGGTAAAGCCAATGTCTTGGGGAAA
AGTGGCTAAAAAGAGGAAATGACAGTTTTCTTTCTAACAAAAATATGAAACCATCTAAGAAGAAAAAAATGAAGTAGACCTATCTTTTTGTTAG
TGTGCAGAGTAAAAGCCATTTAAAAAAAATTATTTAAAAAAACCATGATTTTCAAAATTCATATAGCTGAGAATACTGTATTTTAAATACAGGT
TAAGTATCCCTAATCCAAAAATATGAAATTCAAAATGCACCAAAATCTGGAGCTTCTTGAGCACTGACATAACACGCAAAGGGAATGCTCAACT
TACTGGTTGAGCAGCCCTATAATGCAAATATTTCAAAATCCTAAAAAATCTGAAATTTAAAACACTCCTGATCATAAGCATTTCAGAGAAGGGA
TACTCACCCTGAATTAACACAATCCATTCAATTTAGCTATTGTTTATAAAATAAAAACTAGCCCAAGCCTTGCTGAGTGGGCATATCTTGATTG
CCACCGTTATTGTTGCAGAGGTACATTGTGAAGTTGCCAGGTCTGCAGGTCAGCCCGTTGCAGGTCCTGGTTTATGGATGGTTGGAAAAGAGCT
AGTCCCATTCCAATTGTCATTGTCAGCCAAGTGCATTGTCAAAATATCCCACTTTCCTGGCAAAGCCCTCATTGGTATGTTTCCACTTGGCCCA
GTGCGTGGAATTGTTTTCATATACTCCCCTTGCTTTGAGAGGTCTGGGCAGAAGAAAGCAGGAGAAGAAGAGGAGTGGGGAAGAGCGGAGGGGT
GCAGACAGGAAAGGGGAGAGCGAGAAGGAGCCTGACCATGTGGGTCTGCCAGGACCCTGCATGGGCCAGCTTATGCCCTGTCCCCTGGCTCCAA
ATGCCCAGGAAAGACTGCCTCGGGAGACGCTACATGTTGAGGTTCACATCACCAAGTGTGCTGTGTCTGAGGCTTGGACCGAGCACTGGAAAAA
TGACCCAGTGGCCAATTAAACTTTCCATTGGCAGACATTGGATGAAAACTTTTTTTTTAAGTGAAATCTTTCCATTTGAGTAGTTTGTTTTTTA
ATGAAATGAAACATGTACTGACATGCGCTCTGTGGAGCAATAGGAGAGTGATTAATTAAACTCTGTGCTGCCATTTTGGAGGGAGGCACTCAGA
GCCAGAGTCAAGCATTAGGAGGCGTTTCAGGGGCTGTAACCGCACCCAGAAGGATCTGTCAGGCCCTTCTGCCTGTTTCCCCTCAGTTCCTGTG
GACTCCTGGAAGGGACAGAGACAAGGGAGATTTCTGCTGGTCCAAGCTCTGTCATTGCTGAAATATGAAACCAAGGACAGTACTAAAAGATGCG
GCAAGGCAAATGCTTTGGAGAGTGCCAGTTCTGCTACGTGATTACACACTCTTCCTAATCTTTCTGGGCAATATGTATGAAGAAATAAAAACAG
TAAATAGCCTCGTAATCAGTTCAGGTTTTGTGGCCAGATGAGGTCAGTTCAGATCAGTTCTGTAGTCAAGTGAGTTACAAAAACTTGATGGTGT
TCAGAGCTCGTTGGATGGTGGAATTGTGGAGAAGGAAATGCTGGCCTCTGTCCGCGTTTATCTAGAGCCGGAGGAGGCTGCCTTTCATTCCCGA
GCATGCTCCAGTTCCTCCCTTGCTTCCAGCTCCCCGCCCCCATCCCCCATTTTCAGCCATTGGAGGAGGATGTAGGCTAATTAGCCACAGCGCT
GCCTCTCACTCCTCCCATGCAACTGAGGAAGTCGCTGGTAAAGGCATGCATGGCACAGAGGCAGGGACCCTGACTCCTTCACCAAACCTCTCTC
CCTAAAATAAGGGGTCGCCCTGACACGTGAGTGAGGTTATTTTACAATAATTGCATTGAAGGCCTACTTCAGTACAGCAGAAACAATATGTGAA
TTTTTATTACCTCAAGAAATGATAATGGCAGAGAATAAGAAAGCATCCTGAAAAGGTCTGGAGAGACATGTGACTGACAGGCTGTGGTTGACAG
CCAGGAGGAGCCAGGATACACTCAGCTCCACAAGTAACAACACAACCAAGAGGACTGGCAACAGACCCCGAAGTCCGAGTGTTCCCTCTGCAGG
GGGACAGGCTGTGCTCTGGCCCAGCGCCTCTGGCTGTGCTGACAAGTTTCTAGCTAACGGGTCGCCACCTCCCCTAGAAGTAAAGGAAGCTCCA
TGCATATGGTGTGTGCTCCTGCTGGCTGTAGCCCTGGGAAATAGGGGAAGAAATCTTGGTTTCTATATGGCTTGACATCGGGTTCTTGCTCCTG
CAAATTAACCGGGTCAGATACTGGGGAGGATTCCAGATGACAGCCTCACCGGCCAGGAAGCAACCAAAGCACAGCACAGCTTGACGGGGAGCTG
GCAGAAGGTGATACAATGAAAAAGGGAAGCAAAACTAGAGAATAGTGGCTGGCAGTAGTTGGGAGGAGGTCAGGACACTGGCCACCCCCTAAGC
ATGGTAGTTCCTGTAGTGTTAAGGCAGCCAGTGTGCAGGAGGCCGCACTCTCTAAGGAGTTAGCGATCTGTCTTCTGTTAGTGCTATGCAGCCC
AGTGTTTCAACAGCTTCCCAAGAGTCAGAAAAACCTCAAATGATGGATGGCCTGGCTGAAGTCATCAGTAGAGATAGGCCCCGGACATGGTCTA
TCTCCCCATCAAATTCACCAAACCTCAGGGCACTGTGGGGTTGCAGGGCCAGACAGTGCCCAGCCACGCTGGCATGATGGCAGATCTCCAACAG
TGGGGAACTAAGAGTTTGCCCAGGCATGAAGAAAACGAATTTATGAAGTTCATAAATGGAGTTTATAAATGCTATAAACAAGGGGCAGCATGCT
TTCATTCTGTGTGGATTTTTTTGTCTGCTTTATTCATACATTGTTGTCAGTTTAATTGAAGTATAATCTACACACAATAAAATTCAACAATTTT
AAGGATGCAGTTTATTGAGTTTTGACAAACATAAACAGTCACACCACCCCATACATAATATAGAACAGGGGTTGGCAGGTCTGGCTCCCAACCT
GTGTTTGTTTTGTACGTTTTTAAAGGGTTGTTAAAAAGAAGAAGACAGGGATCATATGTGACCCGCAAAGCCAAAAATATTTACTGTCTGGCCT
TTTACAGGAAAAGTTTGTTGACCCGTTGACCCTGACAGAACATTCCCATCCCACTTGGAGTTCCCTCTGGCCCCTTGGCAGGGATTCCTCCCCT
CCCCCAGGCAGCCACTGATCTGCTTTCTATAGATGTAGTTGCGCCTTTTCTAGAATTTCGCATGAATGAAATCATACCGTATGTTGCCTGTTGT
GTCTGGCTTCCTTCACTTATCATGTTTTGAGAGTCATTCTGAATTTTTCATGTCTCAGTTCTGCACTCCTTCTTTACTCCTGAGTAGCATGGCA
GGGTTTGACTCCTGGGGGGATGGGAGTACTCCGCATGTTTTAGCCACATGCAGACGCAAAGAAGAAGAAAGGGGATCTGCAAGTGCGGCGGTCA
GGGCCTGGATCCCCGGGGTGCCCACTCTCACTGCGCTTGTCTTTGCAGGCATGAACAACCGGGAGGTGCTGGAGCAGGTGGAGCGAGGCTACAG
GATGCCCTGCCCGCAGGACTGCCCCATCTCTCTGCATGAGCTCATGATCCACTGCTGGAAAAAGGACCCTGAAGAACGCCCCACTTTTGAGTAC
TTGCAGAGCTTCCTGGAAGACTACTTTACCGCGACAGAGCCCCAGTACCAACCTGGTGAAAACCTGTAAGGCCCGGGTCTGCGGAGAGAGGCCT
TGTCCCAGAGGCTGCCCCACCCCTCCCCATTAGCTTTCAATTCCGTAGCCAGCTGCTCCCCAGCAGCGGAACCGCCCAGGATCAGATTGCATGT
GACTCTGAAGCTGACGAACTTCCATGGCCCTCATTAATGACACTTGTCCCCAAATCCGAACCTCCTCTGTGAAGCATTCGAGACAGAACCTTGT
TATTTCTCAGACTTTGGAAAATGCATTGTATCGATGTTATGTAAAAGGCCAAACCTCTGTTCAGTGTAAATAGTTACTCCAGTGCCAACAATCC
TAGTGCTTTCCTTTTTTAAAAATGCAAATCCTATGTGATTTTAACTCTGTCTTCACCTGATTCAACTAAAAAAAAAAAAGTATTATTTTCCAAA
AGTGGCCTCTTTGTCTAAAACAATAAAATTTTTTTTCATGTTTTAACAAAAACCAATCAGGACAGGTGTTTGTTTTTGTTTTCTTTTTTATAAA
TATGAATATATATAATATATATGTCCCTGTACATATACAATGTGGGTGCTAATGTGGAGACTGTGGCCGGCCTGAGCCACCAAGCTGCGGGACC
CAGAGGGAGGATTTTACTGCAAGTCAGCATCAAAGCACCGGTGTTATTCTGAAAACACCAGTGGCCTCATTTTTGGCTTTTGCAAAGCATGAAT
TTTTTCATTTGGATTGCACTTTCCTGGTTCATGACTGTACCTGTAGGTGGTTGTTACTTTGACTCTTTTCAGGAACCACCCCCCAAGCTGAATT
TACAAGTTCTGTTAGCACTATTTGCTTCAACTTACTGCGATTTGTTCTCAAAACTTAAAAATAAGCAAGCAAATGGCTGATACTACCAAGAGAA
CTGGAAGATGGATACCACACAAACTTCTTGTATAAAAATATGAATGCTGAAATGTTTCAGACATTTTTAATTTAATAAACCTGTAACCACATTT
AAGTGATCTAAAACCCATAGCATTGTAGTCATGGCAACCCGCTAAACTTTCTCATGCAACTAAAATTTCTGGGGGAAATGAGGGTGGGGGTTGT
ACATTTCCCATTGTAAAATAAGTGTTTTAAATGTCCTGTACTGCTAACGAATGACTTTCTATATGTCCAGGAGTTCTCCAGTGGAATAACTATG
CACTACTTTACATTTCATGGGGATGCACAAAAACAAAAAAGTATTACATTTTTAGTTGCTGTTTGTACCAACCTTAAATTACATATGTTTAACA
ACAACAAATCAAAAATCCTATTTCTATTGAGTTTTTAATACTGACTAGCAACTCTGAAGTCTTAATTCCTTTTTTGTTATGATTTATTTGTGAG
TTTACATTTTTAAATTGTTTAACTTTCTTAATTTAGTAATTAAAAAGAGAGCATTTTACATTTGAATTTTTTTTTTGTTTATTTGTTTAAATCA
TGGAAGGTACTCGTAGTTCTGTGGCACATCTGTCCCACACCAGATGGTATGGAATCACCTGGTGAATTTAGCCTTTGTGCGATGACTTGCAAAT
GACAGAAACATTCAGAACATCTGGAGAGTTCTTTTCCCTCTAGAAAGGGTAGGCTCTTGACCAGCTATTTCAGAGGATCATTAAAGCAAAAGTA
GGCATACCTTACCATCTGAATTTATCAGACATTTTTTCTAACCGGAATTTACTGTGTCCTGCTTGTAGGAGAAATAGACAATCACAAGAAGAAT
CTTTCTTGTCCTGGAGTCAGTATATTTATTTCCAAATGTCCCCCTACTTCTGTAATGAAGGAGCTAACGGAGCGACAACCTGGTGTGGTAGGAA
GGGCAGTGGGTGGACGCAGGCTACCTGTCCACGCCTGGCTCTGTGATCATTCAGCTTCAGGACCCTGAGCCACCTCCTGGCATCTGTCATTTTC
AGGGCCTGTCTGTAGAACTGAAGGGGTTACATGAGATTCACTCCTTAGATCTCTACAGCTCTAAGATCCTGTAATTCTAAGATCACTGATGCCA
TGCGGGGTCATACAAAGAGGATGGTTTTCTTTGTTGAAATAACCTTTACATTTAGGGAGGGCTTCCAACATTAAAAAAAAAAAGATGAAACAGG
TTCTCTGATTAATCAAAACTTTATGGTATTGTTTTTAGCATTAATAGACTTGCTAAACTGATAAAATTTATTTATTTATTTATTTATTTTTGAG
ACAGAGTCTCTGTCACCGAGGCTGGAGTGCAGTGGTGCCATCTCGGCTCACTGCAACCTCTGCCTCCCGGGTTCAAGGGATTCTCCTGCCTCGG
CCTCCTGAGTAGCTGGGATTACAGGTGTGCGCCATCATGCCTGGCTAATATTTGTATTTTTAGTAGAGAGAGGGTTTCACCATGTTGATCAGGC
TGGTCTCAAACTCCTGACCTCATGATCCGCCCGCCTTGGCCTCCCAAAGTGCTAGGATTACAGGCATAAGCCACAGTGCCCAGCTGATAAAATT
TTAAAGATCTTATACATATATTATTATCACATTATTAGGTAGTTGATTAACATATTCTATATCTTTTTCAAGATAACTTTGCTTTTAATCCTCA
CACCCCACTAAGTTGGATAATTTGCAAATATTTCTGGAGGATTTTTATGTTCTCATTCATTCAAAACAATCTGGAAAAAAAAGAACCTGTTTTA
AATAGAAATTATTTTTAAAAAAAAGTCTCTTCAAAGTATAGCCTTTAATTTATCAGTTGAGTTCATGGTGGACTGTCTTATATGAAAGAAAGCT
AAGGACTTGGGTCACCTCAAGGGCACTCTTAGGAAACAGCGTGCTGTAGAGTGAGGTTGCAGAGTGAAAGTAAGAGAACATCTGTAAATACAAA
GAAGTCAAAGACTTCCAGGTTTTTTCTTCCAAGAGGCAAATGTGCTTTCAAGAGATATTCCTGAGGTAGACCATTCCAGAGAGTCCCCACACCT
CCCAAGAAGCCTCTCTTCCTCATAAGTTGTACAAGCTTAGGGTGAGGAAACGGAATTTGCTGACCAGAAACTTCTCCTGTTAAGAAAGAAAAGT
ATCGCCTTAATGTCAGGGTGATGGTGAGTAATTTTTTGTCTTCAGTAACCTGGCAGTGAATAAGTATTTGCTTTGTTGCCTTAGGAAAGCTGGC
ATCTAGCCCTCCTCTGCTGGAAAGGGAGCCTTCCTAATAAACTATTACTTTTTACTTTTTTTTTAAGACAGGGTCTTGCTCTGTCACCCAGGCT
GGAGTGTAGTAGTGCAAACACAGTTCACTGCAGCCTCAACCTCCTGGCCTCAAGCGATCCTCCCAGCCACACTAGCTAATTTTTATCATGATTA
TTTTTTGTAGAGATAGGGCCTTGCCATGTTGCCGCAAGCTGGTCTCGAACTCCTGAGTTCAAGCAATCCTCCTGCCTTGGCCTCTCAGTGTTGG
GATTACAGACGTGAGCCACTGGGCCAACCTCTTTTTACTTCTTTCAAACAACGGGCCAGATGCGGTGGCTCACGCCTATAATCCCAGGACTTTG
GGAGGCCAAGGCGGGTGGATCACGAGGTCAAGAGATCAAGACCATCCCGGCCAACATAGTGAAACCCTGCCTCTACTAAAAATACAAAAATTAT
CCGGGCGTAGTGGCATGCGCCTGTAATCCCAGCTACTTGGGAGGCTGAGGCAGGAGAATCACTTGAATCCAGGAGGCAGAAGTTGCAATGAGCC
AAGATCGCGCCACTGCACTCCAGTCTGGCGACAGAGCGAGACTCTCTCTCAAAAAAAAAAAAAAAAAAAAAAAAAAAATCAAATAAACCTATCG
GAGAAGACCATTTGCAAAGTTCAGACATTGTAAACTGCGACTAAAGGATTTCTGTTCACTCCATTCTCTGTAGCTCCTGATCTCCTCTGATGAT
CAGTTCACGGGCTGGGAGGATTAGAAAGCCTAGGAGACAGAGGGTCCCATGCTTTAGAACATCAGGGTAGATAAAGACAAATGATGCATTTGGC
TCTGCCGTAGTCGTGACACAGAAAGATGTATGGGGAACCAGGCATTTCCGTGAGAAAAGTTAAGAGTGTATATAATCCCTCAAACACAGCCACA
CTGTTGAAGATTTCCTTACAAGCACCAGAAGGTGTTTACCTGCTTTGAGAAAGATAGGAATCCTCCTGTGGCTAAGTGTTGGCACCAGAGGATT
TTATAGTAGCATTAGTGTGGCAAAATGTTATCTGCAATTTCCCCGGGAGTCTTAAGAATGTTTACTATATTAATTGGAATGGTTCTTTCATGAA
TCTTGAAAGAGTATGGTTTTCAACAACAGGCAGAAGAGAATTGTACTAAAGCCCACAGCAAAAGGGATGTCATCTGTTCATTAGTCATGACTCA
GGACAAAGAATGTCACATGATAGGCATTTCCTAATAAGTTGCATTGGAATAAAATGATCTTTGGTCAGTTTGTTCCTGAAAGGTATTTTAATAG
GTTTAAATGACTTTTGTTGACCTTCTTACCACTATATATTATACAATACTGTTGGAATTCAATTATGCTATCAAAAATATTTGTTAGAAGGGAG
GGAGGAGACTGGTTTTGGTTTGGGGGCAGGGGAAGGAAGCTTAAACACATTTTTATTCTAAAAATGATACAGGGGGATATAGATTACTAAAGCA
ATTGCCAAATTTTAAATATATTTTTTATCTCAAAAATAGTTTATAACTACAGAGAAGAAAATAATGAAAAATAGTACCTTTACTGTATTTGAAA
TATCAAATAGACATTCATAATTTATGTACACCTATGTTCCCAGAAAATTCTCATACATAATAAACTCCTAAATCATACCTCATTCTTTCCCAAC
ATGCAAACTATTCAGAATCCTATGGAGGGACAAATATACCTTTATTTTAAAAGTTAATTCTGAGCACTGAAAATAAAAATAAATGGTTTTCCAG
TGTTGCAGGGACCATTCTAACAAAACGTAACCAGTGACAAACGACGGCTTCCTCAACAGCCAGAACACTGTGCTCCTCTCCATACGGCTTACTA
CTCTCTAATAACCTGTTTAATGCCACCAATGTGTTTAATACTGCTCTCCTCTAATGTGTTTGCCCTGCCAGACTGTGAGCCCGAGAACAGAAAC
TTCCTGATTGGTTCACCATTATTCTCCCTGCACCTAGAACAGTGATGAGCTTCTGGCAGATGCTGGCTGGACTGATGGATGGACTGTTAGGTGG
ATGAGGCCCACTGTCCAGTGGGGCCAGTGGTTTACCTTCGAATGACACATCTACCTAAGAACCTGCTAAGCACATGGGACTGACTGCATGCTGC
CCACAGTGCTAGCCCTGAGCATTATGAATGTGTGGCCACCAGTGTTCCAGATATGATTGAAGTCCCAATCTATAGCCTGAAGTGAACACCCTTG
ATACTTCCCAACTCTTTCCCCAGAACTGTCACAATGCCAGTGAGGATAAACTTGTACCTCTTGGAACCTGAGAGACAGCATGAAGTAAATGGCA
CCAAGTGATACATACTCTTATTTTGATTCCGTTTGGTTTTGAGATGGGGTCTCACTATGTTGCCCAGGCTGGATTCAAATTCCTGGCCTCAAGC
AATCCTCCCACTTCAGTCTCCCAAGTAGCTGGGACTATAAACATGTGCCACCACCCCTGGCCACAGTCTTTGTTTTTTGGGGATGCGGGGAGGC
GACAGGGTCTCACTCTGTTATCCAGGCTAAAGTGCAATGGTGTGATCATGGCTTACTGCAGCGTCGACATTTTGGGCTCAAGGCATCCTCCCAC
CCCAGGCTCCCAAGTAGCTAGGACTACAGGTGCATGCTACCACATTCGGCTACATTTTTTTTTTTTTTTTTTTTTTTTGGAGAGACAAGGTCTT
ACTATGCTGCCCAGGCTGTAGCCTTAGGTAAAGTGCCTTCAAAGGCTCGTTTTAGCTTTGTCATTTTATGAAAAGTTGATATTCTACTCCCTAA
GATATCCATCTTTGTCTTCAGATAAAAATTATTTTCCCAAGTCATCAAGTTGTGCCATGTTACCCAGCCTGTGGCTTGTAGTGTCCCTGACACA
CCCTTGCATAACGCAGGGAGCCCCTGTGCCCTGTGTGAGAAGCACAGCGTGAAGATGTTGTCCATAATATTGTACATGGAAAAGGTAACGTTAG
CCCCCATTAATGTGGATTCTCTCATCTAATTTCCTCTTTTCACCCAGCAAAGTGCCCAGTGACTGAGAATGAGACAGAAGATGAGGGCGTTTGA
GGATGAGAAGGAAGAGGAAAGTCATCAGAGCCACCTGGAAGTAGAGGTCTGGTCAGGTTGGCCTGCTTAACCAAGATGGCAGCCAGGGGAGTAG
GAAGGATGAAGACATTGCACACATTTGGAGGAAGAAACCAAAGCTGGCATGACAGGAGTCCTTTCCAGGGCTGTTCAAGGCAACGGGATGCAGG
TGGATATGACTGTAGATGGGTGTAAAGACTTACCATTCACTCCTCCAAACTTTCGTTGTATACTTATTATGGGCTAGGCCCTGGGCCTAGCCCC
AGAAATTCAAAGACAGACAATTAATATCTACAGTCTAGTAAGGATAAAGACCCATAAAAATCGTTGCAATAAGCTTTCAGATGGAAGCACAGTT
GTTAGCAAAGTAGTAACATCTAGCTCAGAATGGGGGGGTACAGCGGAGGCTTCCTGGAAGAGGTGCTGCCTGAACTCTCTTAAAGACAAATGGA
AGTAGGTTACATAGTGTTTAGCGGGGCCTGGTGCTCCTTGCCTTTGGATTTGTTTCCTTCTGATTTCTAGCCCCCATTAGGGATTACCTCATGC
TTTCAATATGGAAAACATCAACAAATGGGTCTCAATGAAGAAAAACCAAAAGTACACACAAGCATCTCAATCACTGTCTCTCTGTTTCTCTCCT
CTCTTTCTGTCTCTCTCTCTCCTCTCCCGCCACCCCATTAACAGTATATAGGTACACCATTTATTCTGATTAGTGGCCACTAAATAGAGGGGGT
GGTAGATAATAGCATTCAAGGACGGAGGAAGGTTTTAGCAGGTTGTTGGCTCCAGTGTCTCGATTAGGATATGGTCTGAAATATATTCACATTC
TCATAAAGTATGAGAATAAAAGAATTGCTAGAAAGAAGCTTGGAATAATAATAACTCTTCACTACTTCTCTTAATAACAGCTGGTGGGAGGCTT
TCTCCTATTTACAAATCCATTGTCATTCTTCCACTTACTAGCCAGGCTGTTTCGCTTGAATCATCGTCCGATATGTACATTCATCATGGAAGGT
ATATACTAGCAGTTGCATGGTGTTCTGGTTGTTTTGTTCTGGGTAGTTTTCCTTTAGTTAATTATCAAGTGCTTACTATGTAATAATCAATGAG
TAGCTAATTGGAAGCAAGAGAGAATGAAATGGGTATTATTCAGATAGTGTTTTTAATGAAAAGCATAGACGTAGTACTGTGGGGAAATATCACT
AAATAGCAAGAGATTTCATCTGTGTGTGTGTGTGTGTGTGTGTGTGTGTGTGTGTGTGTGTGTTTACAAAAGGATTCATTTAAGCCACTCATAA
ACTAAATCCAGGTATGTGAATCTTTTCTTTTTTTTTAGACTCCTCCCAATGGGTAAACATTGGAAGACACCAGGAGGGAAGCCAAGCCTCTAGA
GATTGCTCAGGAACCCAAACCACCCCAAATGGAGCCGGAAGGTCTGTCAATTCCCAGAGAGGGAGGAAATGGTAAGCAAATGGCAGCAGTTGCT
TAGAAAATTAGGGAATGAATAACAATGCTTTCTGGTAAATTAACCATATTACATTGTGCACCGGAAACCGATAGGAAAACCCTGTTAAAAATTG
AATAATAATTTGCCCACATCATTTATGCAAAATGCATAATTTTCCTACTTCAGTGGACTTTAGTTTGATTTAAAAGATGAGCAGCTCTAGGACT
ATTCACTAAAGCATAATTTGTAAGATAATTGGGAAGGGGAAGAGAAATCAGACTGTAATCAGCACAATCTTTCGTAAGTCACTTCACCTTCCTC
CTCTCACCTGCAAATTTTGGAAAATATTTGTTTACCCTTTCCTGAAGTTCTCTAAATGGAAGTGCAAAGCATTAATCATTGTCATTGCTACCAC
TAAACCATGACCTCACCATGAGAGGGGGGAAAGCCATGTTTCATTCTATTCAGTATTTTTCTGCTCTAATTCAAATAAGTACTTGTTTTGAATA
GTGGGGAAAAAAATGGAAATGTAGCAAAGCTATAGTTAAAACAACAAGCCGAGAACAAAAGCAACATGCATGCAGGCAAAGGAGACCTTGGAAG
ATACACAGATAAAACAAAAAGCTGTGCTTGGCTGGGATTCTGTTTCAGAATCAAATGCAAAATGGAGAATATTGTTCCAACTGTAAAGGTTTTG
CAATCTACAATCAGTCAGAATGAAAAGATATCATGTAATCCACCTTAACAGTCAGAAGCTGCACTATTGCTGTGAATTATGATATTTGTTCATG
ACTAATGTAGATTTTCAGACCCAGAATGGTTGAAGGTGGGCAGGAATTTGTAGGTATACCAGATACCCTTCACTTCAACAGGGCACACCCATGT
CAGCTGATGTTTATATCTCTTCCTCTCCTCCTTTTCCCTCCTCCTCACCCCTTGCTCCCCAATCTCATTAGAATCATGAAATTTTTACTTATAT
ATTCATTAATTCTCTTCATCCCCATCTCTCCACAAAAGATCATTATCTACTTATTAAATTCAGCCCTTACACAGTGTCTCATGCCTGTAATCTC
AGCTATTCGGAAGGATGAGGCGGGAGGATTGCTTGAGGTCAGGAGTTCGAGAACAGCCTGGGCAACATAGCCAGATGTCATCTCTAAAAAAATT
AAAATTAAAAATTTAATAGGGCACGGTGGCACACACCTATAGTTCCAGCTACTCAGGAGGCTGAGGTGAGAGGGGATCACTTGAACCCTGGAGG
TCAAGGCTACATTGAGCTGTGATTGTGCCACTGCACTCCAGCCTGGGCAATAAAACAAGACCCTGTCTCTGAAAAAAAAAAATTTTTTTTTTTT
AAATAAATTCAGCCCTTAGAGTTCTACCTTTCAGGGCAAACCTGTTTCCTTTGTTGGACTAATTCCTGTCTCTTCTACAAACTTGCTGGTCCCA
AAACGCTGAACTTTGAACCCCACAAATCTCAACACTTCTTATCGGTTGGGTGCCCATTCTGGTTAAGCAAAAGGACCTTCCCTAATCCTAATAC
TCGTCCCCACTCTTTCCATCTCTATCCCCAACCGCTGCTACTGGCTGAAGATTTATTAGATACTAGTTTTGTACCTATGCGTCCTGCCACTTGC
TATAAATCGCCTTTATGCAAATCGAAAAAGCTACCCTGCCTCAAGACACTTTGCTGCCATCTGCCAGGAAATTGTTGTAATAAATATGCAAAAG
GATAATGACTAGAATGTGAATGGTGCCCCTTAGAATTGTGCAGTACGCAACTGGCACAACTATATGTGACAACCCTGTTGTTTGAAATCACCTG
AACTCTCCTGGAACCCTGTGTAAAAATCACAACCACCATAGGTCAGTTTTGCCTTTTCATGACAGTTTGCCATTTCAAAATCTAAATCTTCCAC
CATGATCAGAAATTGCTGAGGGGCAGTTTCTAGGAGAGACAGAGTCCCCACGCAGCAGTAACTATAAGATTATAGGGCTCTTCCAGCATTCAGC
CCAAGCTTTGACCTGCTACCTGGGCAGATACAACCCAAACCATACTTGGTTGATTTTCGGGAAGCATCTAAGTTAGAAAGCTGGTAAGGCTGAA
TGTTGGGGTGCAGGGGGAGGTAGACCTAGCTTACATTCAGGTCAGCCATTACCCATCTCTGGCTTTGGCGGCTTCATTTCTTGTTGATTGCCCC
ATCTGTTCTCCTCCCTCCTTCCCATTCAGCACAACCTGCACGTACTGGTGATCTCTCACTACATAACAAACCACTCCAAAACTTAGTGGCAGAA
ATAGAAACAGT
HUMAN SEQUENCE—mRNA
CGCGCTTCTCCCAGCGCACCGAGGACCGCCCGGGCGCACACAAAGCCGCCGCCCGCGCCGCACCGCCCGGCGGCCGCCGCCCGCGCCAGGGAGG
GATTCGGCCGCCGGGCCGGGGACACCCCGGCGCCGCCCCCTCGGTGCTCTCGGAAGGCCCACCGGCTCCCGGGCCCGCCGGGGACCCCCCGGAG
CCGCCTCGGCCGCGCCGGAGGAGGGCGGGGAGAGGACCATGTGAGTGGGCTCCGGAGCCTCAGCGCCGCGCAGTTTTTTTGAAGAAGCAGGATG
CTGATCTAAACGTGGAAAAAGACCAGTCCTGCCTCTGTTGTAGAAGACATGTGGTGTATATAAAGTTTGTGATCGTTGGCGGACATTTTGGAAT
TTAGATAATGGGCTGTGTGCAATGTAAGGATAAAGAAGCAACAAAACTGACGGAGGAGAGGGACGGCAGCCTGAACCAGAGCTCTGGGTACCGC
TATGGCACAGACCCCACCCCTCAGCACTACCCCAGCTTCGGTGTGACCTCCATCCCCAACTACAACAACTTCCACGCAGCCGGGGGCCAAGGAC
TCACCGTCTTTGGAGGTGTGAACTCTTCGTCTCATACGGGGACCTTGCGTACGAGAGGAGGAACAGGAGTGACACTCTTTGTGGCCCTTTATGA
CTATGAAGCACGGACAGAAGATGACCTGAGTTTTCACAAAGGAGAAAAATTTCAAATATTGAACAGCTCGGAAGGAGATTGGTGGGAAGCCCGC
TCCTTGACAACTGGAGAGACAGGTTACATTCCCAGCAATTATGTGGCTCCAGTTGACTCTATCCAGGCAGAAGAGTGGTACTTTGGAAAACTTG
GCCGAAAAGATGCTGAGCGACAGCTATTGTCCTTTGGAAACCCAAGAGGTACCTTTCTTATCCGCGAGAGTGAAACCACCAAAGGTGCCTATTC
ACTTTCTATCCGTGATTGGGATGATATGAAAGGAGACCATGTCAAACATTATAAAATTCGCAAACTTGACAATGGTGGATACTACATTACCACC
CGGGCCCAGTTTGAAACACTTCAGCAGCTTGTACAACATTACTCAGAGAGAGCTGCAGGTCTCTGCTGCCGCCTAGTAGTTCCCTGTCACAAAG
GGATGCCAAGGCTTACCGATCTGTCTGTCAAAACCAAAGATGTCTGGGAAATCCCTCGAGAATCCCTGCAGTTGATCAAGAGACTGGGAAATGG
GCAGTTTGGGGAAGTATGGATGGGTACCTGGAATGGAAACACAAAAGTAGCCATAAAGACTCTTAAACCAGGCACAATGTCCCCCGAATCATTC
CTTGAGGAAGCGCAGATCATGAAGAAGCTGAAGCACGACAAGCTGGTCCAGCTCTATGCAGTGGTGTCTGAGGAGCCCATCTACATCGTCACCG
AGTATATGAACAAAGGAAGTTTACTGGATTTCTTAAAAGATGGAGAAGGAAGAGCTCTGAAATTACCAAATCTTGTGGACATGGCAGCACAGGT
GGCTGCAGGAATGGCTTACATCGAGCGCATGAATTATATCCATAGAGATCTGCGATCAGCAAACATTCTAGTGGGGAATGGACTCATATGCAAG
ATTGCTGACTTCGGATTGGCCCGATTGATAGAAGACAATGAGTACACAGCAAGACAAGGTGCAAAGTTCCCCATCAAGTGGACGGCCCCCGAGG
CAGCCCTGTACGGGAGGTTCACAATCAAGTCTGACGTGTGGTCTTTTGGAATCTTACTCACAGAGCTGGTCACCAAAGGAAGAGTGCCATACCC
AGGCATGAACAACCGGGAGGTGCTGGAGCAGGTGGAGCGAGGCTACAGGATGCCCTGCCCGCAGGACTGCCCCATCTCTCTGCATGAGCTCATG
ATCCACTGCTGGAAAAAGGACCCTGAAGAACGCCCCACTTTTGAGTACTTGCAGAGCTTCCTGGAAGACTACTTTACCGCGACAGAGCCCCAGT
ACCAACCTGGTGAAAACCTGTAAGGCCCGGGTCTGCGGAGAGAGGCCTTGTCCCAGAGGCTGCCCCACCCCTCCCCATTAGCTTTCAATTCCGT
AGCCAGCTGCTCCCCAGCAGCGGAACCGCCCAGGATCAGATTGCATGTGACTCTGAAGCTGACGAACTTCCATGGCCCTCATTAATGACACTTG
TCCCCAAATCCGAACCTCCTCTGTGAAGCATTCGAGACAGAACCTTGTTATTTCTCAGACTTTGGAAAATGCATTGTATCGATGTTATGTAAAA
GGCCAAACCTCTGTTCAGTGTAAATAGTTACTCCAGTGCCAACAATCCTAGTGCTTTCCTTTTTTAAAAATGCAAATCCTATGTGATTTTAACT
CTGTCTTCACCTGATTCAACTAAAAAAAAAAAAGTATTATTTTCCAAAAGTGGCCTCTTTGTCTAAAACAATAAAATTTTTTTTCATGTTTTAA
CAAAAACC
HUMAN SEQUENCE—CODING
ATGGGCTGTGTGCAATGTAAGGATAAAGAAGCAACAAAACTGACGGAGGAGAGGGACGGCAGCCTGAACCAGAGCTCTGGGTACCGCTATGGCA
CAGACCCCACCCCTCAGCACTACCCCAGCTTCGGTGTGACCTCCATCCCCAACTACAACAACTTCCACGCAGCCGGGGGCCAAGGACTCACCGT
CTTTGGAGGTGTGAACTCTTCGTCTCATACGGGGACCTTGCGTACGAGAGGAGGAACAGGAGTGACACTCTTTGTGGCCCTTTATGACTATGAA
GCACGGACAGAAGATGACCTGAGTTTTCACAAAGGAGAAAAATTTCAAATATTGAACAGCTCGGAAGGAGATTGGTGGGAAGCCCGCTCCTTGA
CAACTGGAGAGACAGGTTACATTCCCAGCAATTATGTGGCTCCAGTTGACTCTATCCAGGCAGAAGAGTGGTACTTTGGAAAACTTGGCCGAAA
AGATGCTGAGCGACAGCTATTGTCCTTTGGAAACCCAAGAGGTACCTTTCTTATCCGCGAGAGTGAAACCACCAAAGGTGCCTATTCACTTTCT
ATCCGTGATTGGGATGATATGAAAGGAGACCATGTCAAACATTATAAAATTCGCAAACTTGACAATGGTGGATACTACATTACCACCCGGGCCC
AGTTTGAAACACTTCAGCAGCTTGTACAACATTACTCAGAGAGAGCTGCAGGTCTCTGCTGCCGCCTAGTAGTTCCCTGTCACAAAGGGATGCC
AAGGCTTACCGATCTGTCTGTCAAAACCAAAGATGTCTGGGAAATCCCTCGAGAATCCCTGCAGTTGATCAAGAGACTGGGAAATGGGCAGTTT
GGGGAAGTATGGATGGGTACCTGGAATGGAAACACAAAAGTAGCCATAAAGACTCTTAAACCAGGCACAATGTCCCCCGAATCATTCCTTGAGG
AAGCGCAGATCATGAAGAAGCTGAAGCACGACAAGCTGGTCCAGCTCTATGCAGTGGTGTCTGAGGAGCCCATCTACATCGTCACCGAGTATAT
GAACAAAGGAAGTTTACTGGATTTCTTAAAAGATGGAGAAGGAAGAGCTCTGAAATTACCAAATCTTGTGGACATGGCAGCACAGGTGGCTGCA
GGAATGGCTTACATCGAGCGCATGAATTATATCCATAGAGATCTGCGATCAGCAAACATTCTAGTGGGGAATGGACTCATATGCAAGATTGCTG
ACTTCGGATTGGCCCGATTGATAGAAGACAATGAGTACACAGCAAGACAAGGTGCAAAGTTCCCCATCAAGTGGACGGCCCCCGAGGCAGCCCT
GTACGGGAGGTTCACAATCAAGTCTGACGTGTGGTCTTTTGGAATCTTACTCACAGAGCTGGTCACCAAAGGAAGAGTGCCATACCCAGGCATG
AACAACCGGGAGGTGCTGGAGCAGGTGGAGCGAGGCTACAGGATGCCCTGCCCGCAGGACTGCCCCATCTCTCTGCATGAGCTCATGATCCACT
GCTGGAAAAAGGACCCTGAAGAACGCCCCACTTTTGAGTACTTGCAGAGCTTCCTGGAAGACTACTTTACCGCGACAGAGCCCCAGTACCAACC
TGGTGAAAACCTGTAA

[0286] TABLE 22
MOUSE NOMENCLATURE
ICSGNM Nfkbil1
Celera mCG15940
HUMAN NOMENCLATURE
HGNC NFKBIL1
Celera hCG22180
MOUSE SEQUENCE—GENOMIC
CCTCCCAGGCCTTGGGAATACAGGAATGAGCCACTGATCCAGCTTCAGTTCCCAACTATTAAATCCACCACAAGGGGAAGGGTCAGCCAAGGAA
CTGAAAGTCTATTAGTTTTTTGGCAAGGTATAATGACATACAGCCAGAGGCACAGGCACACAGACATAGACAATGCCTCCAGATTACAATCTAT
TTTCAAAATCCTAGGAAAAAGATATATAAATACGCTAAAATGTTTCAGAGGCCAGTAAGCTTGCACACAGACAGGTTAGGAAAACAATGTCTAA
TGCTTGGTTATGCCGAGCAATGGAAACCTCAGAGATCACAAGATCTCTGGCCTCCTTTAGCATTTTGCACATACTGCCTTTCCTTTTCTTCTTC
TAGAATTCCCCCTTTTAAATCTGTCATGCTGGGCGGTTGTGGAGATGCTCGCCTTTAATCCCAGTAGAGGCAGAGGAAGGTGGATTTGACTCAA
AGGTCAGCCCAGACTGATCCAAGCTGCTCTTTCCCCACCCTAACCAGAATAGGAAGTCTGCACACATCTCTCTACTCACAGGGCCAGCTTACAA
GGCCTTTCAAACCCAGCAGGCCACTCACCCAAGCATGGAAATATATAATCTCAAAAGTTCCAAAGGATGCCAACTGTGAGGCCACACCACGTTC
CTTCACAGAGGACACAGGCCACTTGTTATGACCCCCGGAAAGCTTTAACCACTCTAGAGTTAAAGTCCACACCAGGGCTGTTTTAAGAGCATCT
AGCTTCCTCTTGCCACATACAACCCAACTCTCAAACAATCTACCAAGCAATTCAGGAGAACAGAACAGAGGCTCTGGCCAAGCCAGGTGGCAAA
GGCCTGCCCCAACTACTCAGGAACCTGTGGCAGGAGCCTCAGGTTCAAGGCCTACTATCTCTAGACTAAGGTGAGTTCAAGGCCTACCAGGACA
ACGTGGTGGTTAAGAGACAGTCGTGAACATAAAAACAAAGGACCCAGGGGTGGCTCAGTCCCACACATAGTAGCTCAAGGCTCTGGAATGGAAT
CTGCAATACCAAAACCAACTAACCACAAAGTGTTGCGGTGGTATCACCTAAAGCTACGAACTCTCAGGAACACACAGGTGTATTCACAGTATGG
AACCTGGAAGGGCAGCCACAGAAGGGTGTGGCACTAACTGAAGTCTCTCATGTGACCACACCACTGACAGCACAGGGATGCCCGAGGACAGCCA
ACCTCCCTCCCAGTGCCTGTCTCCCCACAGCCTCCTGTCCCAGGTTTCTTTCCCCCCTTACCTTGACATTCGGCATGTACTTAGAGAAGCGCTC
ATATTCCTTGCTGATCTGAAAAGCCAGCTCCCTAGTGTGACACATCACCAGCACAGACACCTTTGAGGGAGCAAATGGAGACAGACACAGTAAA
GTCAGCCCCTCGTCACAAGAGCATCCAGCAACTTGTCAGTGATGTTGGTGAACATTCCCCTTGAACTGCAGAGGACACCAGCTGAGAGCACATG
GAGCCAGAAATGGCCTCCTGGTGATTCAATCTCCACACCCTCTCCAGCACTGCCCCCAACATACCTGCCCAGTAACGGGCTCCAGCTGCTGCAG
TGTGGCCAGGACAAACACTGCTGTTTTTCCCATGCCTGACTTGGCCTGGCACAGGACATCCATCCCCAGAATGGCCTGCGGGATGCACTCATGC
TGGACTAGAAGGAGAAAGGAGAGACATTTTTGCACCATGCCAAACCCCTTTCTCCCCAGCCGACTCATCATATGTCACCTTGTCACCTTTCAGA
CCCCATCCTTTCCCTGACCCTCATCACTCTTACACTCAAGTCAAACCCTCCTACCCCAGCTCCCCAGTTCCGCTAAGAAAGAACCCTCGAGAAG
CTACCAACAGGCCACCTTCCACGTTCCTGGCTAAACTTACTTTTCTTACACCGTAACAATCTATGAATTCGACTGCCACAGGCCATTTCTCCTA
CATAGGTTGCTGTGCTTTTGGGTCATGTAACCCTGCAACCTTGAACAAAATGAAGGACTTGGTACCTGACCCAGAAGCCACAGAAGCCAGCATC
CTGATCGTTAAGGTTTCCGGAAACGACACTTGGCCTGGCCCAAAAGAAGGGAACTAAAGGTCCAACCAGGCCCTCTCTGGGAGTTCGAACAGTC
AGAATGACAAAAACCAAGCAAAAAAGCCAGGCACAGAACAAATGGCAGCCCTCGGTTTAATGGAGAACAAAAGCCTCTTCTACAGCTGCCGTCT
TGGGTACATTCTCAGAGCTTGGCCTATCCCAAATAAATTCAAATCCTATGACCCTAGACTTGAACCTCCCTTTTCTTGCACCAGAGGTGCTAAA
TAAGGTCTCTACACACAACAATAAAATGTACCCTCTGATGGATGCTCAAAGCCACAGTCAACGATGGCCCGGAGCAGCTCTGGCTTGAGTAGAA
AATCTCGGAAGCCGGAGCTATGGATGGAGACGTAGGAGCCCTTGACGTCTTTCTTGGCGGGAGCCTCGGTCCCATCTGCCCCAGCGGCTGTCTC
CACCTCGTCGTCTTCGTAGTCCAAGAGCTCATTGTCCACATCGTTCTCTGCCATAATTGGGCCGGCAGGGGGAGAAGGGAGGTCTCTGAGTTAG
GTGTCCCAGAGCAGGTGAGGAAGCAAGGGCCAAAGAGAGGGGTTGAAGAACAGCAAGGGGAAAGACACCAGTTTCCGACAGAAGAGCTGGGAGA
GGGGACAACAAAAAAACCGGAAAAACTCATCAGTCACGAATGGACTCGTCACTTCTCGTCGATCCCTACACCCGTCCTATTCTTCCCTAAACTG
TGAAACCTTTGTCCCGAAAGAAGAGTTAACAAAGAGTCTCATGACATAAGAAACGGGAACACCAGACGGGAGAGACAGAGTGGGCTCCACCGCT
AACCAGACTTTGTAACACACACTTCGACAGGCAGGAGCCAACTGGGAGACCGCAGTAAAATAAGCGTGACTAACGACTCACACGAGGGTTGAGA
CACAAAGGACAAGGGAAGACAGAGACTGCGCTTTCTCCTGCCACCTCACGGTGGTGATCCCCAACGTCAGCCATCAGTCAAGGGTGATAGATAA
GGGTCAGCACTGCGCAGAGCGCTCACTTCCCAAATGCAAACATCATGTGGCTGCCGCTATTCTCTTGCTCAGAAACCCCCGAGTGGCCGTCCCA
GCGGCGCACACCTGGACCGGGGAACAGAAGCAGGAAGGAGGGTGGTGCGGGGCGGAGAGTGGGAAGTGTATGAATGGCTCCATTTCAAGAAAAA
AAAATTTTTTTTTTGTTTTGAAAAAGATGGGTGTGTGCAGTTCAATGGCAGTGCTTGCTTAGTAACGCGAGAGGCCGCAAGGTTCGGCTCAGCG
CTGCCAAAGTTAATTTAAAAAGTCGCACTAAGGAATTAAGGTCACAGCTGAGAACGATGCAGGATTAAGAGTGTGAGCTGGGTGGCCTTAGAAA
GGAACGCCTTGCAGTGCTCTCGGAAAAGCTTCCCCAGAAGTGCGCGACACCATCGGCCACGCACAGAGGCAGCCATTCACAGAGAGCTCCAAAT
AAGGCAGCGAAAGCGGGGTCAAAGGGCTGGACGGGCCCCGGAGCGAGATCTTCCCATCCCTGGGCGAGCAAGAAAAGGCCCGGAGGGGAGATGC
GAGGGGCCCCGCCCTCCTCCTGGCGCCGCCTCCGGCCGCCGCGGCCCCGGGTGGGCAGAGGACCCACTGGAACACCCAGGAAGCGCGGAGACAC
AATGGCGGCCGAGGCCACCATTTTGGATCGTTCCCCCCTTGTCTCCCAGCTCCCCGCCAAGATCTGCTCTCAGAAAGGGGTGAAGACAACAGAA
CTGGACGCCCGCCTGCGCGCCGGCGGCCACGGCGCCGACCCGGCACCGGGTATCAGGGACCCGCGCGGCGGGGCGAGCCGCGGGAGAAGCAGAT
GGCGGTGGATGGTGCACAGGGCCAAAGCTTACCTAAGCACTGCGAGCGTGTATGGCGGCAGCAACGGGGACGGAGGCGGGAAGCTGCCTTCACT
TCCGGTTCCAGGCTCGCCCCGGCCTCCCGCCTTCCCGGCCGCCAGGGCGCACGCGCAAGGAGCCGGAAGCAGGCTTTCGCCGCGCGCGCTCCGC
GGCTGGCTTTGCAGAACGCCCACTTGAAATGAAGCTTCTGACGACGCCTCCTCCGGTCGCCAGTAGCAAGAGCGCGACAGGAAACTCACGTCTT
CCCCCGCAGAGCTCTCCATTTTGTTCTTCTACGCTTATGCAACACCCTCCGACGGTCGGCTCTACTTTAGTTTTGTTTGCCACGCCAGGCTTCT
CCCTGGGCACCTCTCTGTGGGCATGGAGGACTCCGCGATCGAATGAGAAGCGTTTCTCACGGGGTCCTTAGCCTCGTAGTCAAGGTGACCCGAG
AGCGGCTAACTCAGGCCTCTGCTGGAGGGGAGGGGGACACGTGACCACGCCCATTACAGTCGTGCAGAGAATAGGCAGGATTTACCCAAAATTA
TATCGAAAGATGGAGGCTTACATTCTGTCTAGGTGCTAAATAAATGGTGGGGTTTGAGGTTATGCACCTTTCCATAATTCTTGCTAACTAGAGC
AGCAGAATAATCTCAGTTCCATTATTCAGCCTGGACATCCCCCTCCCCCCATGTGGTATTCCCTTTGAGATGTTACATATAGCAGAAGTGTTGT
CCTGTTGCCTTGCTACATAAACACAAGCTCGGGCTTTCCCTATTAAGGACACTTAATATTAATACAAAGTAACACTAAGTATCAGTGTTGCCAA
CCAGCTGGCTGTGTCCTGCTCATCGCATAAGCTCTCTGGGCTGGGGCTTGGTAGCTTTTGATCCCTCCGCATTTGGCAGCCCTAAGCAGCAGGC
CGGCGGGTTTTGTATAAATCAGAGAGGAGTGGGAATTCCTCGGCTCTGGTAACTTATTACGAACTGTAGCTCCAGAAAGTGCGGTACCTGGGCC
TTTAGCTTTGAAGCGTTTCCAGGAACTCTCCTAGTGACCTAGTTGGCGGGCTCTTAGCCACTGTCTTCCTGTTACTGGACCTAATGTGGTGACA
TTGTGGAGGGTAGCATAGTAAGGTTTGTCCCAGCTGACCCAAGTGAGCCAAACTTTCTGCTTTACAGCCAGCAAAGGGTGTTTGCACCAAACAC
AGCAAACAGCAAACTCGTGCAAATGAAGACTTGTGTTTGCACCAATCATAATATTGTCCCTTTGGCATCAGTGATAACACATCTTCCTGCTACT
GGACTATGGGAAGTTCCACCCTCCACTGGGGGAGGAGAGAGAGGACAGAAACAATCCTGGCTGAGCCATTAGCTGTGTGGTTTCCTCAAAGACT
TTATAGAAGATTCAAAATGGCCATGCTGACAGTCCTTGTTAAGGTAGCCAGGGCAGGAAGGGATTGTCTTAACAGCTGGCTGTGATTTTAACAA
TGCTTAAAACCTGGGCCACTGGGGCCACAGCAAGGTGAGTGCCCCTCATCTGTCTTGCCATTTTTTTCTTCCTTTCTCTGTTACTGAGTTTGAG
CAGTTATATAGACTGGCCTCAAGCTCTCAATTCTCCTGCTGGAGGATTTGAATGCAGACCCATGCCCCGCTCCACTCTTCCTGTAAACATATGA
AAATAGAGAAATAAAACAAGGTGGCCAAGGCAATACAGCTAGCAGGGAAACACCAGGGTGTAAGCACCCCAATTTCCTATCACATGTGTCCCTC
CTCTTCAAAAATCTCCTTGCTTTTGTATAGCTATTTCCCCCGAAACATTTCCTCCTGATGAGAGTGGAGAAGGCTCAGGAAATTCAGAAAAAAA
GTTGCAAGACACGGAACACTTCTCCCAGATTGTGTCACCAATAAACAGCTCCTGGTGGCAGGACTCTTTGGTCTGCATACAAGTCACGCTGGTG
GGCGACTTTCTGATGGGAAGCTACTCCAGTCTCACTCCTATAAGTAACCTATCACCCACCATACTGCCAATAACTCCAGCGAGCTCTTTGGTCT
GCCAAGTGAGACTTGGGTGGTGAGATATCTTTGGTGTTTCATGACTGCCTTATTTGGCATAGATTTTTTTTTTTTCCTGAGACAGGGCTTCTCT
GTGTAGCCCTGGCTGTCCTGGAATTCACTCTGTAGACCAGGCTGGCCTTGAACTCAGAAATCCACCTGCCTCTGCCTCCCAAGTGCTGGGATTA
AAGGCATGCGCCACCACACCTGGCTTATAGATTTTTTTTTAATGTCTCTCTACAGAAAAGTCATATAAGACTATGAATTACCTCATTGATTCAA
GTTCAGGGTGAAATGAGCAGTGAAGAGAACTGATAAAGGAATGGGGGTCAGAGACCAGTAGTGTCCCACCCCCTCACCCCCTACCACCACCACC
CCAACTTCCTCCTTCCCCACCCCAGCATCTTTTTATTCCAAAGTATTCCTCAACTGCCAAGTGTGTGCCAAGTGCTATCTAGGCTCTGGGGATA
CAACGACCTTTATCATCAGATACATAATGAGAGCCAATACCCAAACATAATGTCAAGCCAGGCGTGGTGGTGCACGTCTTTAATTCCAGTACTC
AAGAGGCAGAGGCATGTGGATCTCTTGTGAGTTCAAAGCTAGCCTGGCCTAGCAAATTCCAGGGTAGTCAGAGATACTTAGTAAGATAGTAAGT
CTCTGTCTCTCTGTCTCTCTGTCTCTCTGTCTCTCTGTCTCTCTCTCTCTCTCTCTCTCTCTCTCGTGTCTGTGTGTGTGTGTGTCTGTCTGTC
TGTCTGTCTGTCTGCCTGCCTGCCTGTCTGTCTGTCTCTGTCTCTCCTGCTGATGAGCAGTGTAAAACCAGGAAAGGGACAGAGTGCTGCTCTG
CCAACATTTCCCTTACAACTATCTATGCAACTCTCTGTTCAAGAGGGGACACAGTACTGTGTCCTTTTGTTTCTCCATAAACCTTCCAGGACAG
CCCTTTGCAGTGTTTTGGAAACTATATAAATGCATAACTCTGAGGACAGCGAACCAAAGTGAGCAACGGCAAGGCAAAAAGCAGCCTCCTTTCA
CCGACAATTGACTCATCCACCAGTATTTTATTGACACTCCGCTGTTACACAAGGAGGCAAGGTGCTGAGGGCACACAAAGGAATGCATGCATGT
GAATGTCATAGATATCTTCAGCTCCCGGAAGCAGCAAGATTTGGGAAAACAGAGAAAGAGGGGGGCCAACCATGAGAAAGACCAGCTCAGGAGA
AACAGAGAGGTGCTAAGAGATTTGATATATATTTGGGACTCGGACAGAGGGGCTAAATAACATTATCATTTAACTGTTCGGGGGCATGATGTGC
CAAGGGAGAGCCAGAGAAACAAATTCTTTAGAGGGTTACTAGTGTCACAGTGGCTGAACAAAGCTGGAACACGAGGAATAAAAAAGTCAGGAGA
GGGGGTTAGAATTCTGGCAGGCACGCAGAGTGCGGTCATGATACAGGCACTCCGTCATCTGGAACTATGCTGAATTCTCACAGATAATTCACAG
CAGCCACCTTACAAAGTGAGCGTTGTTGCTGTCATTCCAGTCACAAAGATGAGGACACTGAGGCTTCCAGGTTAAATAGTTGTCCCAGTTGTGT
AACCAGCAAGGACCAGGGGTGGGAGAGGAACAGAGGTTCCCCTGCTCTGAAGTCAGGGTGCTTTCATAACTGTCACCAGGACATATATTTCACA
GAGGGGTCCGGTGGGGATGACGTGGGCATTCATTAGTAAACTTCCAGTGGGTGTCATGGAACAGAGAGATTCGGGTTTGTCGGGTTTGAACAGG
CTACTTGTAAGTCTCAGGGGGGAATATTGGATCCTGTCACATAGAAGCCTCCCCTCCAGCAACAGGTTATTATGTGAAGCGATTTGGTGGGTGG
GGGGGATGATATTATGGATTGAACCCAAGGCTCTGCGCATGCGACACAAGTGGTTTTGAGTTGGGATATTTCTCTGTGGACGGAGCTGACAGAA
GGAGTCACTCTAGGGATGTGTCCCTGAGCGATGGTTCTAGACAGTAACCCGATAGTTGGGGTCGACCTGCGGCCTGACTTCACAGACCATGCCG
AGAAGCTGAGCCAGGACGCGCTCCCGATTCCTCTGCTGGGAACTCTGCATGCCCTGAACCTGCCGTCTTGTGGCCTGCTCCACTTCAGCAGACA
GGTTCCCCTGAGAGCCCATGGCCTGGGGGATGGGGGCGGAGGAGAGAAAGAAAAAAGCAGACACAGAGAAAGGAGGGTCCCAGCATGTAGGAGG
AAGGGTTCAGAGGAAGGCCTGGGAAGCCTTTTCGAAACTATTCCCACCCCACAAAAACATGTAGATACCAAGCAGGTGGGCACAATCCTTACTT
CTGAGACTGACCATAAAACTGTCCCCACCATACAGACTGTGAACGCCGCCCCACAAGTCTCATGTACCCTTTAAAACCCTCAGACCTTACAGAT
CCCGTCAAAGCTTTACCAATGTGTGGTCCTTGTCAGAGCCTCTTCAGCTCTCAGACACCCTAATTTCTTAGTCACCTGTATACACCTGGCAAGA
GGCACCCACCGATTTGCACCTGGGTGGGGCCATCCCTGTCCCCCTCAACTCACCGCCTGCTGCTTGCTCTGAAACTCCTGCTCCCGCTCCCTGC
GGTATTGCTCCACCTCCATTTGAGCCTCCTCCTTCGCCTGCTTCAGTCGCCGCGCCTTCCCTAGAGGCAGAAGGACAGTGAGTGTACACACACA
CACACAACCAGGTGCCTTAATGGGATCAGTGCCCTCTAGAAAGTTATCCAGTTTCCTGTCAACCAACCAAATGCTAGACTGTAAAACCCACCCG
TTTCTTCTACCCTAATAGCCTCAGTCCCCCATCTGCCCTCATTGTCCTTGGGCTTTTTTTTCCTAAGGACTCAAATGCCCGCTATCCTCTATTC
CTAAATTCTCCTTCCATATTCCTAAGAGAGGAAAGGGGGGCTCACTCTTCCTGGCATCGGCCACCTTCTCCGCTGCCCGCTTCTCAGCCTGGAG
GAGCTGCTGGATACCCTGGGTCTGACTGGCCATTTTTATCACTAGAGAGGATGCTGTTCCGAAGGCGACCGAGGTACCAGACGGCTCCCACCCT
CCAGCGCCTACTCCTCCGGGCCCTTGATGCGCTCCTCCACTCCCACTGGGTCTTAGCGCTCCCGTTTTCACTCAGTCTCCTGCACCGGGAGGGT
GTCTGTCATCCTCACACTGATGACTGGTCCTCCTCTCGAACCTCACTGAGGTAGTACCCGAAACGGCCGCCCGAGGGCAGCAGAGACCAGCCCT
GTGCTGACTACTGCAGCAGGTGCAGGGCCTCTCCGTGTCACCAGGGTCCACAGAGATGGGTCTGGGGGAAGCCGAGGGCAGAGTGTTTCGGTGT
GAGATCTTGATTGGTGGTCTCGAAGGAGACACAAAGGCGATGAGAATGGTGTGGGAAGGTAAGGATGCGCTTGGACACAGTACGCTGGGTTTCA
CTTACACTCCCAACTGTGTCTCCACGCCTCCCTCCGCCCTTCCCCCCTCTTTTCAGCCTCCATCTTCTCTTCAGACTTTCCCCCCAAATCCGAA
CGTCTGCACACATCTCCCTGCTCTGTCCTACGTTTGCCTTGTTAGTGTCTAACCATGTGTTTTTCTTTTTTGATCTACCCATATATTTGGCCTC
ATTGTGGTTGTGTGGTGTGTGTGTGATTATGTGTGTGTGTGTGAGATTGTGTGTGTGTGTTTCGAGACAGGGATTCTCTCTGTAGTCCTGGCTG
TCGCTGCAGCTCGCCCTATAGACCAGGCCTGCCTCTGCCTCTGCCTCCCTTCGAAAGCTCGCCTCTCATCTTCCGCTTGCAGGAGGACCCTATG
TCGCAAATTGTCTTGTTTCCCCTCCGGAGACCTAATCACAAGTCACCCAGTCCGAGCGTTCGGTACGATTTCCGGGATGGAACACACAGTTCAT
TTCCGCCCGAAACTTGCGCGTGTGCTTGCGCCATTTCCTGCATCCTGGCGCGCCTCCTCCCTCCCCACCTCCCTTCTCCGAGCGTCTTAAGCCC
AGGCCTCCGGCCTCCGTCTCTGAGGGTCCTTGGGGGGGGCGGGGAGCAGGTCTGATGAGTAACCCCTCCCCCCAGGCCCCAGAGGAAGAAGCCT
CTACGTCTGTCTGTCGGGTACATTATATTCCATTTCTAGATCGCTCTTTGAATTTGTGACTTTTCTCCAGATTTGTGGCTAATGAAAATTGCCC
CCATCTGGCCTTACTTGATTTTTGTTGTTGTTGTTGTTTCCCTCCAAAGTTCAGAATTAACTTTTTTCTTGGGCTCTGGAACCTTAAAACAACT
ATGTATCATTTTCTCAAAAATTACATCAAAAATTAACTCTGTGATTCCCCCCTCCCCACCAGCCCCCAACTCCAACCCCATCCCCACCCTGCGC
CCCAAACTTGCCATCTGCTAAGGGATGAGAGTTTAGAATAGGCCTTATCTCTTGCTGGAGATGCAAGGGGGAGGAAATGGGAGGTAAAGGGAGA
AACGGGGAAGAGCGGAGCTGGGACCTCACCGCTGCCATTTCCCACTTCTTCCTCAGCCCCAGAGTTGTTCCATGGCCTCCGCTTCCCGCCGGCA
CCGCCGAGAGCGACGCTTCCGGCGGTACTTCTCTGCAGGACGGCTGGTGCGAGCCCAGGCTCTCCTCCAGCGACATCCCGGGCTTGATGTGGAC
GCTGGGCAGCCCCCGCCTCTCCACAGGGCCTGCGCCCGCCACGATGCCCCTGCCCTGTGCCTGCTGCTGCGTCTCGGCGCTGACCCTGCCCACC
AGGACCGCCATGGCGACACGGCGCTGCACGCTGCTGCCCGCCAGGGCCCTGATGGTGAGTGGGTCCGTGGGAACTGGTCTTGAGAAGCTGGCCA
GGTCTGAACTAGAAAGAATGCGTGGGAAATAAAGGCCTGGTGTGGTGGCGCAGGTCTTTTGACTCTGGGCAAGCAGAGGCAGGAGAATCTCTCT
AAGTATGTAGCCTACACAGTGAGCTCCAAGACTACAGAGAGACCCTGTATCACACAACAAAATAGTTGGGAAATAAGCTAGTTCTTTGGTCCTT
GGGAACTGTTGAAGATCCCTGGTTGGGATGTGGCCATACCTCTCTAGTAACAGAAAAGCTTATCCTAACATCGCCCAATCAACTAAGGGGTGTG
TGCTAGCGTGGTGTGATTGTTTGTTTGAAGATTTATTTATTTTATGTATATGAGTACACACTATAGCGGTACGGATAGTTGTGAGTCTTCATCT
GGTTGTTCGGAATTGAATTTTAGGGCAACCGCACTCTCTCCTGCCCATATTTATTATTATAAATAAGTACACTGTAGCTGACTTCAGGCGTGCC
AGAAGTGGACGTCAGATCTCAAGACAGATGGTTGTGAGCCACCATGTGGTTGCTGGGATTTGAACTCAGGACCTTCAGAAGGGCAGTCAGTGCT
CTTACCCACTGAGCCATCTCACCAGCCCGATTGTTTTTGTTTTTGAGTCAGGGTCTTACCGAGTCTCTCAGGCTGGCCTCTGCATCCCAAGTGC
TGAGGTTGTAGGCTTGTGTCTCCCACACCCAGCCGCATAGCTCGCAACTCTTTCTTTACATTTCCTAGCTTTCAGCTCAGTGACTACTTTGTTT
CTTTGATGGTTTTTTACCTTGCAGTTGACTGCTCAGGTCAGATCCCAGCTCCACTCACCCCACCCCCACCCCCTTAGTTTTGCTTCTCTCCTTG
TAATAATGCCACAAACACCTTACAAAGTATCCATGCTTTGTCACATGATCAGCTGGGCCGGCCAGAGGACTTGAAACTTTTACTTGGTGTTATG
CCGGAGATCTGCTGCTGTGTGTTAGGGATGGACTCATGTCCCTTGACACTTACCAGGCGCCAGACCAGTTTTCTTCATTCTCACCAAAATTCTG
TAACAAAAATCCTACTTAAGCTGGTGGGTGCGGTCTGGAGGCGGAGGCAGTCCGGGCTCTGCAAACTCAAGGCCAGTCTGCTCTACATAGTGAG
TTCCAAGCTAGCCGGAGCCACGGTAGAGAGACGTCAACAAAACATCTCCAGTCAGCATCGGTAGTGGCTCCACAGTGCAGACAGCCTCTTTCTA
GTTCATTTGTGTTACTTACTGGCAGATAGCCAGCCCAGAAACAGCCTCCCCGCCTAGAAAGACAGGAAGTTCACAACACACTCCTGTAATCCCA
GCCCTCGGGAACACCTCAAGGCCAGTCTGGGCAGGGCCTAAGAGTCTCAAAAAGTGAAGGAAAAAAAAGCCATCAAGCAGATCTCACCTAACCT
ACATGGCGGCTATGGTGTGACTAGTTTTATCCCGCTGAGGTTAACACTCAGGGGTTTCCTACCAGAACCCTGCACTCTCCTGCCCCTGCTCCCC
CAGCCTCTTGACCTAGCCCCAGATGGCATACTTCTAGATCAGTTTTGCCAAATCCCACAGTTCTGGAAACAGCGTAGGTGTTGCCTTTGCAGTG
ACAGCAGAAGCAGTTCCCTGGAGAGCAGCTTCCAGACTAGAACTGGAGGAGAGGCCCGTCTGTTAAGAGACGGACGGCCTTCTGCCCACAGATC
AACAACCCTGCTCACTCACTCATCTCCAGCTTGGCCTCTCCTTGATCAAAACCAAAACCAAACCCAAAATCCTCTAACACAAATAAGATGGGCC
TGCGTAGTTGATTTTCTTTAAGCTTAAAGAGAGGAAGGCTGCAGCTGCCTGGCTGAGTTTATTATGGGATACCTGAAGAGAAGAAGTCCCCAGA
CTCCTGAATACATCCTGTGGAATCTTTATATACCACCAGTAGGGCTGTTCCAAGCAGAGTAGCAAGCCGGAAGCAGCCTCACTTCCAGTTTGAG
GTTTTAAGAGCAAAAAAAATGCAATTGTGGCGTATACAGAAAGGCAGCTCTGGACAGCTGCAGCAAGCAAGCTTTGCTTACAGAAGCAGAGAGG
TAGCGGTTAGATGATCAGGCAGTTAACCTTCAGCTCAGAGTCACACTGTACAGGAATTTATGGCTGGACCAGAGACCAGTTTACTCTAAGAGCT
TATAGCCGTTCAGTTCACCCAAGGTTGTTATAGCACTTAAAGTATTCTTAGGTATGCTTTCAGGAGATGTGTACCTAGATAGAGTTCAGCAGCC
GGCTACAGTTTAAGAGGCAGCTCCTGGGTGGTAGCAGTGTGGTGCCTAGGGTTGCCGCTTACGGATCCTGAGGCCTGCACCCTTACCTCGGGAG
CTTGTTCGCCTCCGAAACGGAGGTTGTGATAACACATGAGCCACGGACTGGCTGCAGCTTTGCTACGTAATGATCAGTTCGTGCGGTTCAGTTA
ACTTGGCTGAGGATCTCCTAATGGTGGAATAGGCACCGCCACCGTCGTATTGAATTCTGAGAAACATGTGAAACATTTAACACACCGTGGCGAA
AGTGAGGCCTCCCTGGGGAGTTTCGGGAACTTGTCTGCATGTCACAGTTGAGAGGTTGCAATGGTCCAAAGAGGAAACCATCCCTCCACACTTC
TCCCAACCCCTGGTCTTTCAGACCGTTTCCCGGCACCTGCCAGTCCTGCCACGAGGTGGCGCTCTAATCCCAACTTCATCTCATTCAGCGGCTG
CCCGCTGCTTTGAAGATAGTTGAATGAGATTGATCCATTGAGCAGATTGAGCGATTGAACCTGCAGGAGTCTCCCCTCCACTCTCCTGTTAGGT
CAGAGGGCTGCCCTAGGACACTGAAATGACTGGGGAGCGGGGGGTACCACACACAGTAGGGGGCCAGAAGAGGCTCACATTTTAGGCTTTGTGT
GTGTGTGTGTGTGTGTGTGTGTGAATGTCATGGAAGATCAGTTTCAGCTGTCAGAGGGACCCATCAGTAAAGCATGCGTCAAACAGTGGCCACT
CTGCAAAGAGCAAGCATGAGTGGACACTGGCAGGCAGTATAGTTCTCTCCGTTTTTGGGGGGAGGGAAAAACAAGCTATCATTCTGATGTTAGG
GTCTGGGGTTTAAGGTTTGCTTTGGTCTTCTTTAGGGTTTGGCTTGCTGGTTTGCTTGGTTTTTTGTTTTTTGGGGGGCAGGTTGTTTGTTTTG
TTTTTGTTTGTTTGTTTGTTTGTTTTTACATAGATTCTTTCTGTAGGCTTGTCTCTTCTGGAACTCAGTATGTAGATCAGGTTATCCACAAACT
CAGAGACTGATCCGGTCCCTGAGCCTAAGTCCAGGGTTGCAGGTGTGAGCCCGCACCAAGCCTCATCCCCAGCCTTCGTTTTTCTCTCTTTAGT
GGAGACACCACCATGTAGCCCTGGCAGCTCTTGACTGATATTCCTGACCAAGACGCAGGCCTGCACCTCCAGGCTTGTTTTGTGGTTATGTGAC
ACTCACTGTGTGCTGATCCGTCAGCACGGCATAGACAGCATCCACTGCCTCCCTGATCTGCGCAGTGGAGCCAGAGACGGCCTTGTTTCAGAAT
GACTGGGCACAGTTGATGTTCCACCTATCCTTCCAGCCTCGCATTCTGCACACCCACAGACCTGTCACCTCGGCCGCAGTTGTCTTCAGTGACC
CTAGCACAGGTTTCACAAGCCTTACCCCGTCAGGAAGTGGGTTGTGAAAGAGTTTACCAGAGCCAGACATGGTGGCATAGGCCTGCAATCCCAG
CACCCAGGAGGCAGTGACGAGGATTACAAGTTCAAGGCCAGCCTTGGCTACAAGGCCATCCTGAGCTACAAGAAACCCTGCCGGGGTTTGGGGT
GCCAGAAATAAATAGAAGGCAGACAGTAGAGAGGAGCTGTCTGCACTTGGCATCAGGAAGTGTTTTCACACCATGGTACCCTGGTCGTTTAGGT
CTCGAGGGAGGGACACTTGTGTGGGCTCATGTCAGATGCTCAGCTGGATATTCCTCTACTGTGGGATACTTGTCACAGTGTAAGTTATTTCTTA
GAGTCCAAAGTTGTCATGAGTTACCAGGGGTCAGACCCTGATGGGCTGAGCCTGCTTGTTAGAGAGAATTCTCTGTAGTGCTGTTGTGAGATCG
ACTGCAGCCTGGCTCATTGAGCTTTGTTCTTCTAATCTTAAAATTTAGTTTTGTTTTTCTATCTGTGTGTAGAGGTCAGAGGATACAGTTGTTG
GTCCTCAACTCTCATTGTACTTGAGACAGAATTTTTTTTAAGATTTATTTATTTTATTTATGTAAGTACACTGTTGCTGTCTTTAGACACACCA
GAAGAGGGCATCAGATCTCATTACAGATGGTTGTGAGCCACCATGTGGTTGCTGGGATTTGAACTCAGGACCTCTGGAAGAGCAGTCAGTGCTC
TTACCCGCTGAGCCATCTCTCCAGACCATCTTGTTTGTTTTCCAACCATGTCCTCCAGGCTAGCTGGCCCATGAGTCTCTATGGACTCCCAACT
CCACCGCTTATCTTGCAGTGGGAGTATTGGGATTGCAGATGTGGGCTGCTGTGGCTGGGATTGCAGATGTGTGCTGGTATGTGGGATTTCAGGT
GTGATTGCTGGGGATGCGAACCTGAGTCCTCAAATTTCCGTGGCAAGCGCTTTACCAATATTGTGTTCTTCCAGACCCCAAATTAACTCTTTCT
GGTCTTGCTCAAAGACAGTAGCAGTCTTGCTTGATCCCAGCCCTGGGCAACCAGCCATCACAGAACATCACCCGCACACCCCTACACATGAGGC
TCACAGAAGATGGAGGCCATCATCTGGAGTTGCATCAGGGCTGAGTGCGGCCCTTGCCCACAGTGCTGATACGTCAGAGTCATGAGACCACAGG
ACATCAACTTTGTTGGAAAGAGGAGGTGGAGTTACTGTTGAAGGGGACCAGAGGTCAGAGGTCAGGCTGTGACACCAGAGCAGGGGCTCCTGGG
CGGTGGGAGGCAGCATCAGTGTTTACGTAGTGGCTGCTGTTCCTGAGGCAGCACCATCTGGAACTGAGAGACCTGAAATCAGGGAGACATTGAT
TTACCATAAGGTTGAGTAAGCAAGGGCCAAAGACACACAGCAGACTTAAAACAGAGGTTCCTGAGAGCTGAGGGAGTCCAGACGCCTAAAAGAG
CTGCTAGGAGCTGCCCCACGGAGGCTGGTGAAACCCCCGAGTTAGACAAAGCAACAGCTGCTTTGTTTCTCACTGGAATAAAGAGATGAGAAAC
ATCTGAACACCAGGGAGGCAGCACAGACTACGATCATGCAGTTCTGAGACTTGCAAATATTTGTAAGTTACAACAGGAAAGCTGTGAACATGGA
AGAGCTGTCCCTGGACAGGACCGTGTGTCACCTTGTGTGTCATAGCCATGTGGCCTTCTCGGGAGGCTCTGAGAGTCTCAGACCCAACCTTAAG
ACAATAGAATACAAGCAAAATAATGGTGAGTGTCCCCTCGTCCAAGGCCAGCATCACACTGGGCCTGTGGGGAAATGGAGGGCATTAGGGTGTG
TCTGTGTGTGTGTGTGTGTGTGTTCATGTGCGCGCCGCACCAGCCATTGGGATGGAAAAGAACCCTCTCTCTGTCTAGGGAGCCTGAAATGTTG
GGGTAAAGGTGGGACTACCCAGATAGTTTAAGAGGTCTCCTTAGGGAAAGCCAGAAAGAATCCCTTGAAATGAGCCCCTCGGTGCCTGGAGGGG
GTAGGAAGACAGAGCTTGAATTGGACAGCGGGCTTCCCAGTGCACCACTGTCGCTCTGGCAGAAGACCCAGGTTCAGTTCCCAGCACCCAGGGG
ATCTGGCCCCTCTCCTGACCTCTGTAAGCATCAGGTACCCACGTGGTGTGTATACATAAACGTTAGGAAAATGCTCAGACACATAAAATCTAAA
AACACATTTTTTTTTTAAAATGAGTTTCAAAAATTCTATCATTAGAGCTCAGAAAGGAAGAGAAATTACCTCAGCTGCTCACTAGGATCTGGAT
GTGTTTAAGGATGGCTTTCACCTGGTGCTCCCCAAAAGAAGAGAGGGCTCTCCAAGCAGTGTGCAGGAGTAGGCTGCTAGGCTTTGACTAGAAC
AACCCTACCTCCAGACACAGAACAGAGGCCTTACAGCATGGCTGCAGTCTGAGAAGAAAGGAGCTGACAGGCCTGCCCGTCCACTTAACTCTGA
AGGCTTTTGTCCTGAGAGAGGGTTGGTTTCAGGTTGTTTGTTTATATGGCTGTTTGGTTGGTTTTTGAGACAGGGTCTCTCTGTGTAGCCATAG
CTGTCCTGAAACTCACTCTGTAGACCAGGCTCGCCTTGAACTCAAAGATCTGCCTGCCTCTGCCTCCTGAGTGCTGGGATTAAAGGCAGGAGGA
AGGATTTTTATGGTAAATCCAGTTCCCAGGTTGTGTGAATGTGAAGTGCTCCCAGTCAGACTCGGAGCCGTACTCACCCTGGCACCCAGTGGCA
TAGCGCACAGGGACAGCACAACCATGAAGGGCTTGGAAGGGCCGAGTTTGGAGTGCAGCCTGGTGAGGTCCCTTCCTTGTTAGATTTGTCCCCA
CCCCCTTTCTACAAGATGGAGGGCACAGCAGCAAGGAGGTGGCACTGGATCCTGAAGGCCTTGCTTGTTCTGAGTGACACTGGGAATGAGGACC
GGGTCCCTGACAGACTGAAGGGAGCAGGGAGTCAGATCCAGGGCTCATATCCCGAGACAGTGGAACCCTGGGATGTTGTTTGTTTTTACCACCC
AGGATCTCCTAGACTTGGTGAGCAGGGTGCGTGTGCGTTAACATCTGCTTCTAAGTTCTCCCTGCCGTGGTCCTACGCTGCAGACTCTAGAAGG
GAGGGGCCCTGAGACCCAGGAGGAAGGAATTGAGGGATGTGTATCAAAGGCAGGGCACAGAGCAGGCGGTGCAGGCTGAGCGGGCTGAGCCCAA
GGATGAGTATGGCAGCCCAGCTATGCTGAGACAGCGTCTTGGGGACATTTTTATGGCAGCTTTGGGAAGGTTNNNNNNNNNNNNNNNNNNNNNN
NNNNNNNNNNNNNNNNNNNNNNNNNNNNNNNNNNNNNNNNNNNNNNNNNNNNNNNNNNNNNNNNNNNNNNNNNNNNNNNNNNNNNNNNNNNNNN
NNNNNNNNNNNNNNNNNNNNNNNNNNNNNNNNNNNNNNNNNNNNNNNNNNNNNNNNNNNNNNNNNNNNNNNNNNNNNNNNNNNNNNNNNNNNNN
NNNNNNNNNNNNNNNNNNNNNNNNNNNNNNNNNNNNNNNNNNNNNNNNNNNNNNNNNNNNNNNNNNNNNNNNNNNNNNNNNNNNNNNNNNNNNN
NNNNNNNNNNNNNNNNNNNNNNNNNNNNNNNNNNNNNNNNNNNNNNNNNNNNNNNNNNNNNNNNNNNNNNNNNNNNNNNNNNNNNNNNNNNNNN
NNNNNNNNNNNNNNNNNNNNNNNNNNNNNNNNNNNNNNNNNNNNNNNNNNNNNNNNNNNNNNNNNNNNNNNNNNNNNNNNNNNNNNNNNNNNNN
NNNNNNNNNNNNNNNNNNNNNNNNNNNNNNNNNNNNNNNNNNNNNNNNNNNNNNNNNNNNNNNNNNNNNNNNNNNNNNNNNNNNNNNNNNNNNN
NNNNNNNNNNNNNNNNNNNNNNNNNNNNNNNNNNNNNNNNNNNNNNNNNNNNNNNNNNNNNNNNNNNNNNNNNNNNNNNNNNNNNNNNNNNNNN
NNNNNNNNNNNNNNNNNNNNNNNNNNNNNNNNNNNNNNNNNNNNNNNNNNNNNNNNNNNNNNNNNNNNNNNNNNNNNNNNNNNNNNNNNNNNNN
NNNNNNNNNNNNNNNNNNNNNNNNNNNNNNNNNNNNNNNNNNNNNNNNNNNNNNNNNNNNNNNNNNNNNNNNNNNNNNNNNNNNNNNNNNNNNN
NNNNNNNNNNAGAAGAGGAAGATGGGACTTCCCCCGGGAGGAGGTGGCTGATTTTGTTTTATGCTAATATTTATCATCATCTTCTTCTCCTTCA
TCATCATCATCTCTTATTTTTGTTGCTGTCTTCTGAGACAAGGTCTCTACATAGTCTCGGCTGTTCTGGAACTCATTATGCAGTCCAGACTATC
CTGGAATAAACAGATCCTCTCACCTCTGCCTCTCCAATGCTGGGATTAAAGATTTGTGCTCCCACACATGACTTGAAAACAAATGAGCAAAATC
CTAGTTTTGTTAAAACTCAGTTTCAAAGTAACCAAAAGCCCGACAAACTTGGCAGAAAACAATCTTCATGGCCAAGACAAAATTTCTGTCACTT
GAAGGAGCTTTTGGTCAATGCTCCAGGCAGCATCTCCCAGACGCTAGTGTGAGGCAGAGGTTGGCCTTCAGCGTGGGTGCGCATGCTGCACTGC
ACCGGGTTTCACCGGGTTTCGGTGCCCCAACCAGCTCACCCTCACCTCCAAGCTGCAGACCTTGTGGCTGACGCTCTCACGTGTCAGTTTTACT
CTCGTCTTAGCTTTTCCGTTTTGGAAAAGTCCAGTCATTTCACCTTAGGAGAATCTTAATTTACACATACAGACCTTCTTCTTAACTAAAAATA
CCCTTTTCCTTTCCACCTTCCTCACCAAGAGCGCCTCTCCACACTCCATGCCTCTGCGTCTCCTGTACACTGTCTCATTTTACTCTTTACTTCC
TGACCAGAGCCTTGTCTGTTCAGCTGCATCCGGGACAAAAGGTCTCCTGGCATCACTGCAGACATGATAGCTGACTAGGGGGCGCTTGTCTGTC
CAGAGTCTTTATAACTGCTTGGATTTTTTAAAAAAGCTCTTTTTATGCTTAAAAAAAAAATGTTGAGATAGAGAATTACAGAGTATTCCATTCC
TGTAGAAGCTGACAAGGATAACAATTGACCTTGGGCGGTAATTGTCTCAGTTTAAGCCCCAGACTGGAGACATGGCCCACGGTGTTGCAACAAT
GTTGTGTGTTAACCTTGTAGTTGCAAGTTTTAGATTCTAGATGCAGTTGTTCCTGCCCCTCATCCCCTCACCCCCCCCCAAAAAAAAACAAAAC
AGAAAGAAATAGCAAGTTGTTGGGTTTCCTTGGAGGACCAGGGGGAGAGGAGAAAAAGAGAGCGGGATGGAGCAGAAGGGGTGGGGTGAAGGCT
GTTCAGTGGGGGCTGGAGATTCTGTTGGGTCCAGTGATGGCAGACTCCGTCTAGAGCAGTTGTGTTTGGGGCAGGTCCATCAGCGGGAGGAGAC
ATAGACCAGATAGTGTTTCGGCCTATGTCAGCTGCCTTGTCCAGGGCACAGATGTCAGGGTGTGATAGTTGTTCTCTGGATTTCCTACCTGAAG
TCTTTGAATGTGTGTGGATGAGAGGGAGTGCCGTTGGAGGGAAGAGTCAGAGGGGAAGGTGGGGTGCAGTCGCCAGGTGGAGGGATAGGTGCTG
GTCTCGGAGAAGCTGGTGGTTGAGTGGGACCTGGCGTGGCCATCAAGTCTGTCGCCTAAGGCTGAGTTCAAGGGAGGCCGGTATGGGAGGCACC
TGTTCTTGTCCCGTGCTGAGGCCATAAAGGGGGGATTTTTTTTTTTAATTAAAATAACACCAAAGAGATCCAAGTGTAGGACAGGAGTGAAATG
GTGTGTTGTGCTGTGGCCAGCCTAGTCTGGCCAGATTTCATTACAAAGGAAAATAAGGTTTTGTTGGCTGTGTCTTTTGAGAGGTTGAACATAG
AGTTTAAAGAATGTGAGTCAGAGGTCATGAAACCCATCATACCAGAGATGCGCGCTCACCCAGAAGGCCTCGGAGGGCAGCAGGCCTCTTTCCA
GTACTGACTTGACTGAGGTGCCCAGAACCAGGGCATCCTCTGAGAACAGAGACCTCCTGGTCCATGGGGTGAAATCCAGTTGGTCAGGCCAGAC
TGACCTCAAAGAGAGACACACAAATAGCTGGCCAGAAAAGGGGGTTCACTGCCCCTGAGAGAGTGAAATTTGGGCTACCCACGGGTCTCTTTAT
TCAGAAAGTCTGGCTGGGAGGAGGGAGGTGAGCAGAGTTTCTTATATGGTTGTCTATGGTGCTGAGGTTCCAGCCCCCAAACCTGTCCCTTTTT
CCGTGTGGTCCCTCCTCCCTCTGAGTGGAAGTGCTGTGCTGTTAAAGGTGAGGAGAGACTTACACTTTTGTCATCAAGGAAAGAGTATTTCTTC
TACAGAACTTTGCATATTCGCTTCCCTGTGTGAAAGGGTGCTCCGGCAAACATGATGGCACAAACCTCGCGGGAAGGTGGGCAGGAAGAGAAGA
TGTTAGTGAACATTAAACGCATTGATTTAGGGGCTGGAGAGGCAGCTCAGGGGTCAAGAGACCACAATGCTCCTGCAGAGGACCCAGGTTCAGT
TCCCAGCACCCAGGTTGGGCAGTTCGCAACAGCCTGTACCTGCTCCCCGTGAGAGAGTACCAGGACAGACGGGTATGTAGAGACCCTTGTATTT
TTCTGGCTACTAGTTATATTTTTCTGGTACTTGTTATATTCAAGTACACTATAGCTGTTTTCAGACACCCCAGAAGAGGGCGTCAGATCTCATT
ACAGATGGTTGTATTATTTTGTGAGTAACCTGTTCATGTCTTCATTTATTTCCTTTGGAAATTTTTTCATATTTGTACATATATGAAAATACTT
TTTAAAAAGTATTTAATCCTTAGGGCTGGAGAGAGGGCTCAACAGTTATGAGCACTTGACTGCTCTTCCAGAGCTCCTGAGTTCAATTTCCAGC
AACCACATGGTGGCTCACAACCATCTGTAATGGGATCTGATGCCCTCTTCTGGTGTGTCTGAAGAGAGTGACAGTGTGCTCACATACATAAAGT
AAATAAATACATCTTTGGGGGGGTACTTTAAAATTTATTTCGTAACTTCACTCCAGCTTTAGGAAGGTAGGTGCTGGCAGAGGCCAGGCGAGGA
AATGAGACTCCCAAAGCGGCTCTATTACCCACACATCTCTCTGTTCAGAAAAGTCTGGCTGGGACAGGGAGATGGGACTGGAACTCTCTGTAGA
TCAGACTGTCCTGAAACTTAGAGAGATCCGCCTGCCTCTGCCTCTCTGCCTCTTCCTACCAATTACTGGAATTAAAGGCCTGTGCCACTATGTC
CGCCCTAATAAAACCATTTTTAAAGATATATTTATTTATGTATCATTTATTTTATGCATACGAGTACACAGTAGCTGTACAGATGGTTGTAAGC
CATCATGTGGTTGCTGGGAATTGAACTCAGGACCTCTGTTCACTCTGGCCCAAAGATTTATTTATTGTTATATTCAAGTACACTATAGCTGTTT
TCAGACACCCCAGAAGAGGGCGTCAGATCTCATTACAGATGGTTGTGAGCCACCAGGTGGTTGCTGGGATTTGAACTCAAGATCTCTGGAAGAG
CAGTCAGTGCTCTTAACCACTGAGCCATCTCTCCATGAAGGGTTGTCATGCATGCATGCACAGTAAAGCCCAGCAGGCTTGCACATGTTCCGAC
TTAGAACACCCACCCTCGGCAGATATGTGTCCATGTCCACACTCGTGCAAGTTTAAGGCTAAAGGCTTTGGAGACACAGTCTGACAGACAGGGT
AAAGAGAGGTCTGTGTCTCAGCTCACAGTGGAACACTCATTACAGTCATCAAAGAGTGAAACAAACGGCAGGTTCCTGGGGGAAAATAAAAGAT
AAAAAGCCATGAGGAGGGAGAGCTGTTAGTTCACCCCAGCCTGACTCCACAGTGAAACCTGTCTCATAAAAACACCAAGATGAACAGCTAGCTG
CTGCTGTCAGCCTGTGTGGGATGTGTATGCCCCAAGGATTCTGTTAGCTTCAGTTGGATTGTGGTGACCCATAACAAGGTAGGAGAGTCACGAG
GTTGAGACCTAGTCTGCAGTTACAAAATGAGCTCTAGGACACCCTGGGCTGTGAGACCCTCTCACAACACACACACACTCACACATACACACAC
ACACACACACACATACCATAGCCAATAAAATAAATCGGGTATTTCAAAAGAAAACAAAAACAAAATGAAGCCAGTTGCCAAGATAGGCAAATAC
CTCTGAGTAAATGGGCATAGTGTGGCCACAGCTCCAATAACTTGCCGTGTGCACAATTGTATGGAGCAAGGTAGGACTCGAGGTTGCAGCAGAC
TGTTAGCAGTTATGATGTTAAGCTGGATATGTTGGTATACACACATACACACACAAAATAAAAAGACAGAGTTAAATCTTCCATATGAGCCTGG
GCCTACTCAGAACATATAAACACACACATAAGCACACACTATGCACTCACACACTCAAACACACTCTGTACTCTCACATAAATACACTGCATTC
TCACACATAAACTCACTGCCTCACACTCCCATAAATACACACTATGTATTGACACACTCATAAACACACACTGCACTATTGCACTTGCATAAAC
ATACATTGTGCACTCTCACACACAAACTCTGCACTATCACACATAAACATACACTGTGCACACATAAACACTGCACTCACATAAACACATACAC
TTGTTAACATAAACATACTGCATGCTTATACACACATAAACACTCAGCACTCACACACACATAAACACCACACTCACATACACACATAAACACT
ATGCATGCTCACACTCACATAAACACACAGTGTGCTCTCACACGCTCCATACACAGTCACACCCTGCAGTGAGCCCTAGTGGGAAGAAGTTGAA
GGACGGAAGCCAGAAGCAGGTCTGCTAAGTGGGACAGCTCGGGAGGGTTTGTGGCAGATCACAGCAGGAAGCCTGCCTTGCCCTGATGTGGTTT
CAGAGTGGATTGGCACCTTGGCCTGCTGTGTAGGCCCTTCCATCCTGCTGGCAGTTACAGGTCAGCCCTGCCTCTGTGCCAGCCTCCTGGTAAG
TGAGCTAACTTCCTGGAACCAGCAAGGCCTGTGTCCCATTTCCTTCTACTCTAGGAGAGGAAGTAGGGCCCCGGCCCAAATGCTGCCCCAGCCG
CTCGCCTCCCTCTGGCTCCTGATGGAGGCAGGTGGTGGTCCCAGCTGCTGGGCTTCCTTCGGTAGGGTGAAGCGATGGCATCTGGCTCCCCTCA
GTTTACCTGGTGCTCAGGCTCAGGAGCAGGCACCCAAGGTGCTTGGTCCTTCCCTGCCCTTGACCACCATCATTTAGGAGGGACTCACTCTGCG
CTGGCAGCACCTGTACGTCACTGCCACCCTTCCCTCCCCTGGGGAAGGCTGGAACATTCTCCTGAAAACTTTTATTTTACTCAGATTTATTGGG
TAGAAACAGTAAATGTACTACTATGTTTGTGTGTAGTGGTGCAGAACACAGTGTTTTGATATTCTTTATTATTATTAATTTACCATATTTGGAC
TTTTTGAGACAGGATTAATCCTGTAGCCCTGGCTGACCTGCAACTCACTCTGTAGACCAGACTGGCCTTGAACTCTCTACCTCCTGAGCACTGG
AATTAAAGTGCCACCATGCCTAATGTGATAATCTTAATATGTAATTTTAGATGAGAACAATAGTTTGTAATATGTATATAGTGATAATAGCTTC
AAAATAAAAAATAAAAATAATCAAAAGAGGGCTGAAGAGATGGCTCAGTGGTTAAGAGCACAGATTGCCCTTCCTGAGGTTCTGAGTTCAATTC
TCACCAACCACATGGTTGCTCACAACCATCAGTAACAGGATCTGATGCCCTCTTCTGGTGTGCATGAAGACAGCGACAGTGTACTCACATACAT
AAAATAAATAAAATCTTTTTTTAAAATAGTCAAAGGAATTTGAAGTCGTCCTAGGTGCCAAGGGCAAGAAAACGCGGTTGTAACACTTAGAGCA
AACTGAGATTGTCTGTGGGGAGCAAGTCAGAGCGTTCAAAACTCCACACTCGTGCCTTATGTGATTGTTAGTGGCTGTCGAGTTAAGAAAATCC
AAGATGGCAGCCTCGCGGAGCCCCAGCTGACTGCTCACGGTCTCTGCCCCTAGCTTACACGGACTTCTTCCTGCCGCTGCTGAGTCGTTGCCCA
TCTGCCATGGGGATAAAAAATAAGGATGGAGAGACTCCTGGGCAGATTCTGGGCTGGGGACCCCCCTGGGATTCTGCCGAAGAGGAAGAAGATG
AGGAGGTTTCCAAGGAGCGGGAATGGCGGCAGAAGCTACAAGGCGAGCTGGAGGATGAGTGGCAGGAGGTCATCGGGAGGTTTGAAGGTGAGGA
GCCCATTGCCACCCCCAGCCGCCCTCCCTCCCGCCCCTGCCCTGTGTCCTCTACTCCAGGCCCAATGCATGTGGCCTCTTGATTTTACTCTTTG
TCTTGTAAGTCCGCTAATCATAGCCTCTCTCCGACAACCTCATCCCACCTCCTGAACAGATGATGCCTCCCGGGACACGCAGGAGCCCGAGTCC
TTCTCAGCCTGGTCAGAGCGCCTGGCTCGGGAGCATGCCCAGAAGCAGCGGCAGCAGCTGGAGGCAGAGGGATCCTGCCGACCTCCAAGGGCTG
AGGGCTCCAGTCACAGCTGGCGACAGCACGAGGAGGAACAGCGGCTTTTCCGAGAGCGAGCCCGGGCCAAGGAGAAGGAACTGTGTGAGAGCCG
AGCCAGGAGGGCTCAAGAGGCTCAACGGGACAAAGGGCCAGAGCCTCCCAGGGCTGGGCCCAGGGCAGAACACCCACGAGGGGCAGAGAGGGGC
AGCCTCTGGCGCTTTGGCGATGTGCCCTGGCCCTGCCCTGGTGGAGGGGACCCAGAGGCCATGGCTGCAGCCTTGGTGGCCAGGGGCCCCCCTC
TGGAGGAACAGGGGGCTCTGAAGAGGTACTTGAGAGTCCAACAGGTCCGGTGGCATCCTGACCGCTTCCTGCAGCGATTCCGAAGCCAGATTGA
GACCTGGGAGCTGGGCCGAGTGATGGGAGCTGTGACAGCCCTTTCTCAGGCCCTGAACCGCCACGCAGAAGCCCTCAAGTGACCCTAGGGAATA
AGCAAGAACCTGTGGGGATGTAGCCTCAAGAATAGACGGAAGGAAGCAAGGTCGTGGATGGGGATGGACAAGAAGGGGCAGCTGCGGCACAGAG
AGGAGAGGATATGGGACGGCTAACGTAATGGTTGTGGGGGTGGGGTGGGGGAGGCTCTACCACTGCTCTGGACTGCCATTTCCTAATAAGACTT
GGTTCCACACCTCACTCCAGAGTCTCCTCTGTTTTTTCCATTGCTATGGTTTTCATCACCCACGACATCTCCTTTCCCGCCCAATTGTTGAAAC
CCACAGCTCCCACACACCTGCGGTACAGTCACAGTGCGCTCTCAATGGAGACCAGAAGCCCCTGCCCGCCCTCCTTCAGAAGGCCTGGTTCATC
GTCCAGACCCTGTCAGCTCCCCACCCCACCCCCGCCGGGGTCCTGACAAGGTTGCAGTTGAAGAAAAATGTGAACAAGAGACAGAAAAAGGAAC
AACCCCTCCCTCCATCTCCAACCACATCCTCACCCCTGCTCAGCTCAGGGCTTTCCCTCTGCTGAGTCACTGAATGAGCTGGGTTGCGCGCAGC
AGGGCTAGGGGACCACGAGGACCTGGGAGGATAGAGGATAGAACCAGAGGGGATGGAGGAAGNNNNNNNNNNNNNNNNNNNNNNNNNNNNNNNN
NNNNNNNNNNNNNNNNNNNNNNNNNNNNNNNNNNNNNNNNNNNNNNNNNNNNNNNNNNNNNNNNNNNNNNNNNNNNNNNNNNNNNNNNNNNNNN
NNNNNNNNNNNNNNNNNNNNNNNNNNNNNNNNNNNNNNNNNNNNNNNNNNNNNNNNNNNNNNNNNNNNNNNNNNNNNNNNNNNNNNNNNNNNNN
NNNNNNNNNNNNNNNNNNNNNNNNNNNNNNNNNNNNNNNNNNNNNNNNNNNNNNNNNNNNNNNNNNNNNNNNNNNNNNNNNNNNNNNNNNNNNN
NNNNNNNNNNNNNNNNNNNNNNNNNNNNNNNNNNNNNNNNNNNNNNNNNNNNNNNNNNNNNNNNNNNNNNNNNNNNNNNNNNNNNNNNNNNNNN
NNNNNNNNNNNNNNNNNNNNNNNNNNNNNNNNNNNNNNNNNNNNNNNNNNNNNNNNNNNNNNNNNNNNNNNNNNNNNNNNNNNNNNNNNNNNNN
NNNNNNNNNNNNNNNNNNNNNNNNNNNNNNNNNNNNNNNNNNNNNNNNNNNNNNNNNNNNNNNNNNNNNNNNNNNNNNNNNNNNNNNNNNNNNN
NNNNNNNNNNNNNNNNNNNNNNNNNNNNNNNNNNNNNNNNNNNNNNNNNNNNNNNNNNNNNNNNNNNNNNNNNNNNNNNNNNNNNNNNNNNNNN
NNNNNNNNNNNNNNNNNNNNNNNNNNNNNNNNNNNNNNNNNNNNNNNNNNNNNNNNNNNNNNNNNNNNNNNNNNNNNNNNNNNNNNNNNNNNNN
NNNNNNNNNNNNNNNNNNNNNNNNNNNNNNNNNNNNNNNNNNNNNNNNNNNNNNNNNNNNNNNNNNNNNNNNNNNNNNNNNNNNNNNNNNNNNN
NNNNNNNNNNNNNNNNNNNNNNNNNNNNNNNNNNNNNNNNNNNNNNNNNNNNNNNNNNNNNNNNNNNNNNNNNNNNNNNNNNNNNNNNNNNNNN
NNNNNNNNNNNNNNNNNNNNNNNNNNNNNNNNNNNNNNNNNNNNNNNNNNNNNNNNNNNNNNNNNNNNNNNNNNNNNNNNNNNNNNNNNNNNNN
NNNNNNNNNNNNNNNNNNNNNNNNNNNNNNNNNNNNNNNNNNNNNNNNNNNNNNNNNNNNNNNNNNNNNNNNNNNNNNNNNNNNNNNNNNNNNN
NNNNNNNNNNNNNNNNNNNNNNNNNNNNNNNNNNNNNNNNNNNNNNNNNNNNNNNNNNNNNNNNNNNNNNNNNNNNNNNNNNNNNNNNNNNNNN
NNNNNNNNNNNNNNNNNNNNNNNNNNNNNNNNNNNNNNNNNNNNNNNNNNNNNNNNNNNNNNNNNNNNNNNNNNNNNNNNNNNNNNNNNNNNNN
NNNNNNNNNNNNNNNNNNNNNNNNNNNNNNNNNNNNNNNNNNNNNNNNNNNNNNNNNNNNNNNNNNNNNNNNNNNNNNNNNNNNNNNNNNNNNN
NNNNNNNNNNNNNNNNNNNNNNNNNNNNNNNNNNNNNNNNNNNNNNNNNNNNNNNNNNNNNNNNNNNNNNNNNNNNNNNNNNNNNNNNNNNNNN
NNNNNNNNNNNNNNNNNNNNNNNNNNNNNNNNNNNNNNNNNNNNNNNNNNNNNNNNNNNNNNNNNNNNNNNNNNNNNNNNNNNNNNNNNNNNNN
NNNNNNNNNNNNNNNNNNNNNNNNNNNNNNNNNNNNNNNNNNNNNNNNNNNNNNNNNNNNNNNNNNNNNNNNNNNNNNNNNNNNNNNNNNNNNN
NNNNNNNNNNNNNNNNNNNNNNNNNNNNNNNNNNNNNNNNNNNNNNNNNNNNNNNNNNNNNNNNNNNNNNNNNNNNNNNNNNNNNNNNNNNNNN
NNNNNNNNNNNNNNNNNNNNNNNNNNNNNNNNNNNNNNNNNNNNNNNNNNNNNNNNNNNNNNNNNNNNNNNNNNNNNNNNNNNNNNNNNNNNNN
NNNNNNNNNNNNNNNNNNNNNNNNNNNNNNNNNNNNNNNNNNNNNNNNNNNNNNNNNNNNNNNNNNNNNNNNNNNNNNNNNNNNNNNNNNNNNN
NNNNNNNNNNNNNNNNNNNNNNNNNNNNNNNNNNNNNNNNNNNNNNNNNNNNNNNNNNNNNNNNNNNNNNNNNNNNNNNNNNNNNNNNNNNNNN
NNNNNNNNNNNNNNNNNNNNNNNNNNNNNNNNNNNNNNNNNNNNNNNNNNNNNNNNNNNNNNNNNNNNNNNNNNNNNNNNNNNNNNNNNNNNNN
NNNNNNNNNNNNNNNNNNNNNNNNNNNNNNNNNNNNNNNNNNNNNNNNNNNNNNNNNNNNNNNNNNNNNNNNNNNNNNNNNNNNNNNNNNNNNN
NNNNNNNNNNNNNNNNNNNNNNNNNNNNNNNNNNNNNNNNNNNNNNNNNNNNNNNNNNNNNNNNNNNNNNNNNNNNNNNNNNNNNNNNNNNNNN
NNNNNNNNNNNNNNNNNNNNNNNNNNNNNNNNNNNNNNNNNNNNNNNNNNNNNNNNNNNNNNNNNNNNNNNNNNNNNNNNNNNNNNNNNNNNNN
NNNNNNNNNNNNNNNNNNNNNNNNNNNNNNNNNNNNNNNNNGAAGGAAGGAAGGAAGGAAGGACTGGGCGGGGAGAAACTGTGTTGTTGGCCAC
CAAGCCTGAAAACCTGAGTTCTACCCACATAGTGGGGGAAGGGAACTGATTCCTACAAACTGTCCTCTGACCTCCATAGTGCCCTGTGGCACTC
ATGCACACCACAAATAAAAGTGTAATTAAACTTTTTTAGCCAGAAAGTGGTGGCACACACCTTTAATCCCAGCACTCTGAAGCAAAGGCAGGCG
GATCTCTGAGTTCGAGGCCAGCCTGGTCTACAGATCAAGTTCCAGGACAACCAGGGCTACACAGAGAAACCCTGTCTCATGGGTGGGGAGTTGG
AGGAATAGTGGATGGTTCCTGAGAAAGAACCAAGATTGGATTCTAGCTTCTACACACACATGCACACGGACAGGTGTACGCCTGCACAGATGAA
CATACATACATTTACACACCTGCATATACACACCCGCATATACACACCTACCAAGATGACAACTACAATATCCTATAAACTTCGTACAAAGGGA
CATGAAGATGTGCCACATGGTTATTGGTAGAACTGGGGAAGTTCTTGGATCAGCACCCGTTTCAGCTGCCTAAAGGGTTGGATGTGGCCTAGAG
CAGGAAGGTTCATGGCTGAGGAGAAAGACAGGGGTTCCGTTTCAGAGAGTTTCATGAATTCAGAAAAGACACTGCTGCACAGTGAGTAAACATG
AGGCCACTGTCAGAACCCTAGGAAAGAGGCAAAAAAAAAAAAAAAATATCCAAGCTAAATCTACAGAGAACTTGGAAGCAGCCTGCCCAAGGTA
CTACAGTGCTTGGCTCAGAACAGCCATGACCCTCAGGGGAAACGTCCTGCAATCGGGTGTGGAACCTAAGAGCTTGGGCATCTCCTTCTCCTCA
GAGGTAAAGCAGCCAGAGAAGTAGGAGAATGCAGAGGCCTGGGTGGGGGTGAGGTCAGCCAGAGAAGGAGCCTCAAGTCAAGTCGTGATGGGGC
AGCTACGACTTAGGCCTCAAAGAGATCTGCTGGGCGAGAATTGAAAGGACCTCGTAGGTTCACAAACTAGACGATTACGAATTTTAAGAGAGAC
AATTTTGTTTTATTAGAAGGGAGAGTTGCTTTTCACACTGAGGAGTGAGTGGGCGGTGAGCTGAGTGAGGGGCGGTGGGTACAAAGGATGGTGG
AGACAAGACAGGCATCATCTCTACCCACGAGTCTTGATGATGGGGAAAATCTTACCAGTTCCTGTTAGTCAAGGGGCCTTGTACTGTGAAACAC
CGCACAGAGGGAAGGCGAGAGGGAGACAGATTCCAGGGAGGGAATTTAAAACTTATCTTCAAGAAATGACACCAAATACGTCCGTGCGTTAAAC
AACATACGATGGAAAAGACACTAAGGACGGGGATGAGGCGGAGGGGGAAGGATTATAGATTGAAGGATCAATTTTGAAAAGAAAAGGTTTTTCC
AAGAAAGCTGTAAAGGGGAAGCTTTAGTTAACAGAAGGGCAAAGACGGAGGCAGGGAGGGAAGCCATCTTCAGGGGCCTTAAGCTCAGTGGAGG
GTGGGGGAGGTCGAGGGTTGTGGAGAACATTGGAGAATCCCTCGGAGACTGAAACCCGGGCGAGCAGCCTGGGGGCCCACCAGCAGCCCCTCGT
GACCGATTCTGCAGCTCAGGAGGAAAACCCAGGAAATGCCTTTCATTTCCTCAAACCGAGATCTTCAAGGTCTTCTTGGTTAAACATCGGGTGG
GAACATTTTTCAAAACTGAGAGTGTAACTGAAATTGTTGAGCCTGTTTGTTTGTGGTAAACAAAAACCAGCAAGAATTGCTGGGGGCTGGCTGG
GCTGAGAAATGGCTGGGCTGGGGGATGGGACTGGGGCTGAGGCTGGGATGAGGGAGCTGGGGAGGGGCTGAGATGGCTGGGATGGGGATGGTGC
ATTTTCCACATAAGCATGGGCACTTGGGCAGCAAGCCCAGCAATCCTACCTTGAGATAGAACATGAGGAGGGAAGGAGAATCCCCAGGCACTTG
TGGGCTAGCCTGGGCTGTGCAGCCACAAAACCTGAACCTGCCTCAAACAAGGGAGAAGGTAACACAAGCCTCCCGAGGCTGCCCACTGACCTCC
AGACACACGTGTGAAAGCGCACACAAGAATTTTTAAAATCAGAAGTAGCCCGGTGTGGTGGATTATGCCTGCAGTCCAGCCTTTAGACGTGAAG
GCAAAAGCACCGGGGGTTCAAAGTCAACTTCAGCTATATATCAAAACCAAGACCAACCTATGCTATTGGACAGTCTCAAGTCCCACATCCCCAA
AAATAAACACCAAGAAAGAATTCAGGGGGTTGGAAAGATGGCTCAGTCATTAAGAGTGCTGACTCTTCTTCCAAGGATTCTAAGTTCAAATCCC
AGCAACCACATGGTGGCTCACAACCATCTTCTGGTGTGTCTGAAGACAGTGACAGTGTAGTCATATATGTAAAATAAATAAATATTTAAAGGAA
GGAAGGAAGGAAGGAAGGAAGGAAGGAAGGAAGGAAGGAAGGAAGGAAGAGGGAGCGAGCTGCAGAGCTGGCTCAGAGGTTAAGAGCACTGATG
CTCTTCCAGAGGTCCTGAGTTCAATTCCCAGCAACCACATGGTGGTTGACAACTATCTGTAATGGGATCTGATGCTCTCTTCTGGCATGTAGGC
ATACCTACAGGTAGAACACTCATATACATAAAAAGTAAAATAAAACCAAAGAAAGAAAGAAAGGAAGGAAGGAAGGGAGGGAGGGAGGGAGGGA
GGGAGGNNNNNNNNNNNNNNNNNNNNNNNNNNNNNNNNNNNNNNNNNNNNNNNNNNNNNNNNNNNNNNNNNNNNNNNNNNNNNNNNNNNNNNNN
NNNNNNNNNNNNNNNNNNNNNNNNNNNNNNNNNNNNNNNNNNNNNNNNNNNNNNNNNNNNNNNNNNNNNNNNNNNNNNNNNNNNNNNNNNNNNN
NNNNNNNNNNNNNNNNNNNNNNNNNNNNNNNNNNNNNNNNNNNNNNNNNNNNNNNNNNNNNNNNNNNNNNNNNNNNNNNNNNNNNNNNNNNNNN
NNNNNNNNNNNNNNNNNNNNNNNNNNNNNNNNNNNNNNNNNNNNNNNNNNNNNNNNNNNNNNNNNNNNNNNNNNNNNNNNNNNNNNNNNNNNNN
NNNNNNNNNNNNNNNNNNNNNNNNNNNNNNNNNNNNNNNNNNNNNNNNNNNNNNNNNNNNNNNNNNNNNNNNNNNNNNNNNNNNNNNNNNNNNN
NNNNNNNNNNNNNNNNNNNNNNNNNNNNNNNNNNNNNNNNNNNNNNNNNNNNNNNNNNNNNNNNNNNNNNNNNNNNNNNNNNNNNNNNNNNNNN
NNNNNNNNNNNNNNNNNNNNNNNNNNNNNNNNNNNNNNNNNNNNNNNNNNNNNNNNNNNNNNNNNNNNNNNNNNNNNNNNNNNNNNNNNNNNNN
NNNNNNNNNNNNNNNNNNNNNNNNNNNNNNNNNNNNNNNNNACCCTATCTTGAATAGAAAAAAACATTGAGATAGGTCTTACTCTGTAGCCTTG
TCTATGTCTAGTCTGAGCTTCCTATGTAGGCCAGGTTTCTCTCAAACTCATAGAGATCCACCTGTCTCTCCCTCCCCAGGTCTGGGATTAATGG
CGTACACCACCACACCTGGCACCAGTGATGTGAAACTGACCTTTGAACCCCACAAGGTAGAAAGAGAAACTGAACTGATTCCCGTAAGTTGTTC
TCTAACCTGCACACATGAACCGGGGCACGTATTCACCCCTGCATACACAAAATAATTTTTAAAATGTAATTTTTTTTAATGAAAGAGAGGCTAG
AGATCTGAGTCAAAGTGAAGGATTAACTCAGTGGAGAAGAGAGGATAGAAGAAACAGGTTATTATTCCTAGGGAAAATTCAGAGATCAAAGTCT
TAAAAAAAAAAAAGAATCATTTTATCATTAATCTGTGTGTGTGTGTGTGAGTTGTGTGTTGTGTGGTTGTCCCCACAGAGACCAAAAAAAAAGG
ATCAGAGCCCTTGGGGCTGGAGTTCTGCCGCACCTGACATGAGTATTGGAAACTGAATTCCTCCTGTCCTCTGCAGAGGCAGTACATGCTCCTA
ACCAGTGAGCAGTCTCTCCAGCTCCCAGGGTTGAAGCTCTTGAAAGGCAGCCTTGCTTCCAGGGGAAGCTGAGGTGGGAAGTGTGGCCTTTCCC
AGAGAGAAGCTGAAGCTGGCCACCTTAAGGCTGGAGAGCTGAGCCCAGAGCCGAGGACAGACATGTGCACTCTGTGTGGGTTTGAAGATGGTGC
CAGGTGATGAAAGATGAAGAGAAACTGAACCAGATGTCCAAGTTGTTAGGCATACAGTACAGATGTTGATGGAGATACAACTGTGAAGACAGGA
CGAGTACGGTTCGTGCAGAGTCAGGAGCCTCTAAAGAAGAGAATCCTCTTGGTAGCATGGCCACACTCCTCCGTCACTTCTCCCTAATGCTGGT
GTCAAAGGAAGAGCTACCTTCTCCAGAGAGGGCACAGGCGTTGTCTGGTGCCTAAAGAAAACATCTTCAAAGATGAAACAGGGGATGTGCGTAG
ATATTCCACAGCAAGAGGACACTGTGAACCAGATTCACAGAAGAGTCCTTGCTGGGTAGTGAACCACAGAGGGGACCAAGGAGAAGGACATCCT
GACAGGCTCGCTTTTAGAATCCATAACAAACAGGCTCGCTTTTGGAATCCATGACAAACTATGCATTCTATCAACACCTGGCATTTATTGTGGG
GAGGCGTGGGACACTAACAGGCCCCGTGGTCCAGGGCTTTTACATCCCAGCCCACCATTATGCTGGCAGCTCCTTGTTTCCCTCTAACCCCATC
TTGCCTGTGAACCTGAATGGCTTCAGACTTAACAACTCTCTCTCTCTCTCTCTCTCTCTCTCTCTCTCTTTCTCTCTCTCTCTCTTAATAAGAT
TTATTTATTTATTTTATGTATATGAGTACACTGTAGCTGTACAGATGGTTGTGAGCCATCATCTGGTTGCTGGGAATTGAACTCAGGACTTCTG
CTCACTTTGGCCCCACTCACTCAGGCCCGCTTGCTCTGGCCCAAAGATTTATTTAATATTATATGTAAGTACAGTGTAGCTGTCTTTAGACACA
CCAGAAGAGGGCGTCAGATCTCATTACGAATGGTTGTGAGCCACCATGTGGGTGCTGGGATTTGAACTCTGGACCTTCGGAAGAGCAGTCAGTG
CTCTTTCCTGCTGAGCCATCTCTCCAGCCCCAGACTTAACAACTCTTGAGAGTGGATTTAGATCTCATGTACCCAAAGCAGCACATTTGGCTTT
TCCTGCCCACCTACCTAAGGACCCTACCTTAGCTCCCATCCAGCTCCATCACCCAGACCCCTGTTTCTCCTCTTGTTCTTCTGCAAGGCAGCAT
AGACCAGGGAGCCACCTTGTAGACCAGGCTGGCTTCAGACTCACAAAGATCCACCTGCCTCCCAATCACCACCATCCCTCCTCCACCCTCTTCT
ATCACACACACTCACACCTTCCAAAAGGTCCCACTTGAACCGGAAAGATCACAGTTGAATAAAATGTCGATACTTTGTGTCTTCCAAAAGATCA
CAGTTGAATAAAATGGAGATACTTTGTGTCTTCTCACATGGTCTGGCCCTGCCTTCCTCTCCCACTGCATCTGACCTCTTCAAGTGTCTCTGAT
GTGGTCAAGTTCAGTTTCTTGCTGTCCATCAGCATCCCTGGCTTCCTCCCTCCTCCCTACCTATCTGTCACCTGGGCCTTTTCTTCAGTGCTAC
CCTTGCTGAGAGTCACATTACTGAGTGCTGTATCCAAGAGTATTCTCTTCCACTCCCCACGCCACCCTGCCTTGTTATCCCTGTAGGACTGTTT
TACAGATTCATTTTATTTTATGGCGATGCTGGGGATGGTCCCTGGGTCTCACTCACGCTAGGCAAGTGCTCTATCTCTAAGACACATCCCTGCT
CTTTGATGTGTCTTTTCCATCTGGCCTGGCTGGAACATGATCCCTAAGAGTAAAGGATTTACTCTTAGGATTCTTTGGCTCAACTTTGTGCCAC
AGTATACTTCCTGCCTTGAACAAACTTCCTGGTTGGTACTCAGTAAACATGTATTAAAAGCTGTTGGAGGGTGCGGTGAGGTAGGACAATGTCC
AGCTCTAATTTCTGGCTCAGGTAGAAGTTCCATCTAGTATCATGCTTTGTTTGGGGTCAGTAGCTGGATAACACCAGAGACAGGGTAAGCTGTT
TCACAGGAAGGAGTTTATTTGAGAGTCCTTTGAGGGGTATGTGCTTAGATTTGAGGTTACGTTTGAATTGTGATTTGGGTGAAGGTTAAACTTG
GGTAAAATCTGAGGCTAAAAAAACAGAGACTCACAGTAGTCTTTGACTACTGTCAGTTCAGCCTGGTTTGCAGGCTCCGGAGCTTTCTGTGGCC
CTTCCTGAGAGTGGTTATAGACGATGCACAAGACTCCTAGTCATCAGCCCTCCCCCCCGGGGAAAGTCCCAGACAGCTGTTGGCCTCCCCAAGA
GAGAAACTGAATTTCACACAACCTCTAAAACTGAGATTGAAACCAAAATTGGCCCATGGCAAGGCATATCCGCCAGCGTGCTGCCAGCTCCCGT
GACACAGCTTAGCCAAGGCTTACCCTTCCTTCGTCTGTCTCCATCATCCCCTTATGCACCCTCTCCTTTCCTCTGCCCCTCCAGGTCCCAGCCT
TCTGCTCTGACTCAAATCTAATCCTCTCTCTGTCTCTCTTTCTGTCTCTCTCTGTCTCTGTCTCTGTCTTTCTCTGTCTCCGTCTCTCTGTCTC
TCTCTCCCTCTCTCTCTGCCAATTTTCATTTTAATACAGCTTAGCCAGCGTCTCGGCTACCATCAGTTAAGAGACAAAAGCAACAGGAAGCATA
AAGACTCCCAGAGAAAGAGGAACAAAGAAAAGGAGCCAAAGATGACACAATGACAGAATTAAATTCTGTCTGAGAGAACTCAGTGAAGAGAGCC
TGCTTAGCCTGCTCAGGCTGTGGGTCCCATGGCCAGTTCTGCCAAA
MOUSE SEQUENCE—mRNA
CCGGGTGCATCCTGGCGCGCCTCCTCCCTCCCCACCTCCCTTCTCCGAGCGTCTTAAGCCCAGGCCTCCGGCCTCCGTCTCTGAGGGTCCTTGG
GGGGGGCGGGGAGCAGGTCTGATGAGTAACCCCTCCCCCCAGGCCCCAGAGGAAGAAGCCTCTACGTCTGTCTGTCGGCCCCAGAGTTGTTCCA
TGGCCTCCGCTTCCCGCCGGCACCGCCGAGAGCGACGCTTCCGGCGGTACTTGTCTGCAGGACGGCTGGTGCGAGCCCAGGCTCTCCTCCAGCG
ACATCCCGGGCTTGATGTGGACGCTGGGCAGCCCCCGCCTCTCCACAGGGCCTGCGCCCGCCACGATGCCCCTGCCCTGTGCCTGCTGCTGCGT
CTCGGCGCTGACCCTGCCCACCAGGACCGCCATGGCGACACGGCGCTGCACGCTGCTGCCCGCCAGGGCCCTGATGCTTACACGGACTTCTTCC
TGCCGCTGCTGAGTCGTTGCCCATCTGCCATGGGGATAAAAAATAAGGATGGAGAGACTCCTGGGCAGATTCTGGGCTGGGGACCCCCCTGGGA
TTCTGCCGAAGAGGAAGAAGATGAGGAGGTTTCCAAGGAGCGGGAATGGCGGCAGAAGCTACAAGGCGAGCTGGAGGATGAGTGGCAGGAGGTC
ATCGGGAGGTTTGAAGATGATGCCTCCCGGGACACGCAGGAGCCCGAGTCCTTCTCAGCCTGGTCAGAGCGCCTGGCTCGGGAGCATGCCCAGA
AGCAGCGGCAGCAGCTGGAGGCAGAGGGATCCTGCCGACCTCCAAGGGCTGAGGGCTCCAGTCACAGCTGGCGACAGCACGAGGAGGAACAGCG
GCTTTTCCGAGAGCGAGCCCGGGCCAAGGAGAAGGAACTGTGTGAGAGCCGAGCCAGGAGGGCTCAAGAGGCTCAACGGGACAAAGGGCCAGAG
CCTCCCAGGGCTGGCCCCAGGGCAGAACACCCACGAGGGGCAGAGAGGCGCAGCCTCTGGCGCTTTGGCGATGTGCCCTGGCCCTGCCCTGGTG
GAGGGGACCCAGAGGCCATGGCTGCAGCCTTGGTGGCCAGGGGCCCCCCTCTGGAGGAACAGGGGGCTCTGAAGAGGTACTTGAGAGTCCAACA
GGTCCGGTGGCATCCTGACCGCTTCCTGCAGCGATTCCGAAGCCAGATTGAGACCTGGGAGCTGGGCCGAGTGATGGGAGCTGTGACAGCCCTT
TCTCAGGCCCTGAACCGCCACGCAGAAGCCCTCAAGTGACCCTAGGGAATAAGCAAGAACCTGTGGGGATGTAGCCTCAAGAATAGACGGAAGG
AAGCAAGGTCGTGGATGGGGATGGACAAGAAGGGGCAGCTGCGGCACAGAGAGGAGAGGATATGGGACGGCTAACGTAATGGTTGTGGGGGTGG
GGTGGGGGAGGCTCTACCACTGCTCTGGACTGCCATTTCCTAATAAGACTTGGTTCCACACCTCAAAAAAAAAAAAAAAAAAAAAAA
MOUSE SEQUENCE—CODING
ATGAGTAACCCCTCCCCCCAGGCCCCAGAGGAAGAAGCCTCTACGTCTGTCTGTCGGCCCCAGAGTTGTTCCATGGCCTCCGCTTCCCGCCGGC
ACCGCCGAGAGCGACGCTTCCGGCGGTACTTGTCTGCAGGACGGCTGGTGCGAGCCCAGGCTCTCCTCCAGCGACATCCCGGGCTTGATGTGGA
CGCTGGGCAGCCCCCGCCTCTCCACAGGGCCTGCGCCCGCCACGATGCCCCTGCCCTCTGCCTGCTGCTGCGTCTCGGCGCTGACCCTGCCCAC
CAGGACCGCCATGGCGACACGGCGCTGCACGCTGCTGCCCGCCAGGGCCCTGATGCTTACACGGACTTCTTCCTGCCGCTGCTGAGTCGTTGCC
CATCTGCCATGGGGATAAAAAATAAGGATGGAGAGACTCCTGGGCAGATTCTGGGCTGGGGACCCCCCTGGGATTCTGCCGAAGAGGAAGAAGA
TGAGGAGGTTTCCAAGGAGCGGGAATGGCGGCAGAAGCTACAAGGCGAGCTGGAGGATGAGTGGCAGGAGGTCATCGGGAGGTTTGAAGATGAT
GCCTCCCGGGACACGCAGGAGCCCGAGTCCTTCTCAGCCTGGTCAGAGCGCCTGGCTCGGGAGCATGCCCAGAAGCAGCGGCAGCAGCTGGAGG
CAGAGGGATCCTGCCGACCTCCAAGGGCTGAGGGCTCCAGTCACAGCTGGCGACAGCACGAGGAGGAACAGCGGCTTTTCCGAGAGCGAGCCCG
GGCCAAGGAGAAGGAACTGTGTGAGAGCCGAGCCAGGAGGGCTCAAGAGGCTCAACGGGACAAAGGGCCAGAGCCTCCCAGGGCTGGGCCCAGG
GCAGAACACCCACGAGGGGCAGAGAGGGGCAGCCTCTGGCGCTTTGGCGATGTGCCCTGGCCCTGCCCTGGTGGAGGGGACCCAGAGGCCATGG
CTGCAGCCTTGGTGGCCAGGGGCCCCCCTCTGGAGGAACAGGGGGCTCTGAAGAGGTACTTGAGAGTCCAACAGGTCCGGTGGCATCCTGACCG
CTTCCTGCAGCGATTCCGAAGCCAGATTGAGACCTGGGAGCTGGGCCGAGTGATGGGAGCTGTGACAGCCCTTTCTCAGGCCCTGAACCGCCAC
GCAGAAGCCCTCAAGTGA
HUMAN SEQUENCE—GENOMIC
TAGTTGTTTGGGGATCTGGGCCTTGGTACAGTATCAAATAACACCAGAAACTACTTTCTGGTTTCAAGGGGGAAAAGAACAACTGTGGAATCAG
ACTGTCACGACGCTAATCCTATGGTAAATCTAAAATCATTAATGAGGCCAGGTGCAGTGGCTCACTCCTGTAATCCCAGCACTTTGGGAGGCCG
AGGTGGGTGGATCACTTGAGGTCAGGAGTTCGAGACCAGCCTGGCCAACATGGCGAAACCCTGTCACTACTAAAAAAAAACAAAAATTAGCCAG
GCATGATGGCACACTGTAGTCCCAGCTACTCGGGGGGTTGAGGCGGGAGAATCGCTTGAACGTGGGAGGCGCAGGTTGCAGTGAGCTGAGATCG
CGCCACTACACTCACAGCCTGAAGGACACAGCGAGACTCCATCTCAAAACAAATAAATAAAAATAAAATAAAATAACTAACATAAGTCGACCAG
ATTTGTGGCATAACAGGAGATACAGCATCACCTATGAAGGATTCTTGCCAAAAATGCTTAACTTCAATCAGATTTTTTCTTTTTTTTTGAGATG
GGAGTCTCACTCTGCCACCCAGGCTGGAGTGTAATGGCACAATCTCAGCTCACTACAACCTCTGCTTCCTGGGTTCAAGCGATTCCCCTGCCTC
AGCCTCCCAAGCAGGTGGGACTATAGGTGTGTGCCACCATGCACGCCTAATTTTTGCATTTTTAGTAGAGACAGGGTTTCATCCTGTTGGCCAC
ATTGGTCTTAAACTCCTGACCTCAAATAATCCACACGCCTTGGCCTCCCAAACTGCTGAGATTACAGGTGTAAGCCATTGTGCACTTGGCCAGA
ATCCTCAATATTCACACACCACTGGAGCTGTTTTAAAGTTTCCGGCTTTCTCTGCCACATACCCCAAAATTATTAAACTGATATGATTCAAAGT
CAGTATAAAGTAGTAAGAAAAGGGTGGTCTTGTGTTAAGCATCATCCATAGCCCAATTACGAATCCTCCTGTTACATAGGAACTCAACACTCTG
TTACACCACAGCAAACTAAAGCTTCTCCAAAATTAAAGAGACTATTGGCCTACAAGTTTCTTATCCCTCCAACTTGCCACACCCTCACTCTCAG
GTCTCTTTACCTTGGCTTACCTTGACATTGGGCATGTATTTAGAGAAGCGCTCATATTCCTTGCTGATCTGAAAAGCCAACTCCCGAGTGTGAC
ACATCACCAGCACAGACACCTTAGGCAGGAAGTATACGGAGACATATGGTAAATGTAGCTCTTCATTATCCCCTCTAGGGAAGTGACTGTCACA
AAAACACACCTGGGCCGATAATAAATGACTTCAATTCTGTGATCTAAATCATGAACCCCACGCTTGCGACAGAACATCCCCCACAGCTGTCAGG
TTGTCAAGGGTAACAGAGGTCATGTGCTCATGGCTCTGCAAGCATCATGTAGTTAGGACAAAAACACCCTTCCCTTATAGTCCTAACCAAAATC
CCCTCCCCAGCACTCTCCCCAAATATACCTGCCCAGTAACTGGCTCCAGCTGTTGCAGTGTGGCCAAGACAAACACTGCTGTCTTTCCCATGCC
CGACTTGGCCTCCCACAGGACATCCATTCCCAGAATGGCCTGAGGGATGCACTCATGCTCGACTAAAAGTTGCCGCGGGAGGAAGATAAATTAG
ACTTCAGTCTCCAGATAACTCTACCTTTTTCACCATGCCAAGCCCATTTCTTACCACTCAATTCTCAAAGTCTAGTATTTACCTGGTTCTTGCC
AACTTCCAGACCCATTTTACCTCTCTCTCCTCAATTACATTCACCTCAAAATCAGACTCTCCTAATTCCTCCTAGCTTTAGCCTCCTCCAGATC
TAGGCCTTCCCAGTCCTAGTAACAAACCCCTTGCATCTACCAACCGCTCACCTTCAATGATCCTAGCTCTGTCCTTATTTTTCTTAATCTGTAA
CAATTCATGACATTTGAATACCTGCCACAGACCACTTCTCCTGCTTAGGTTGCTATACTTCGGGTCACGTAACTACTACAACCCTGGACAAAAT
GAAGGACTTGGTACCTGACCCAGAAGCCAGTCATCTCTAAACCAGTCATAGAGGTTTCCAGAGACCACAGTTGGCCTGGCCCAACAGAGGGAGA
CTACAGGTCCAAGCAGGACCTTTCTGGAAATTTAAAATTAGAAGTCAAGTGACAAAATTAAAAATAAGCAGACAAGAAAAGCCAGTCACAAGAA
TGAATGGCAGACCTGGAAGTCACTTTTGGATCATTAGCACTTTGGTGCTATCACGAAAGAAAGAATAAGCCTGTATAAGCCTCCTCTATCCAAA
ATTGTTTTTGATACTTATCCCGATTTTTTCTTCCTCACTGTCGCCCCGGCTGGTGCACAGTGGTGCAATCACGGCTCACTGAAGCCTCAACCTT
CACCTGCTTAATTTCTGAACGTTTTGTAGAGACAGGAGTCTCGCTATGTTGCCCAGCCTTCTCTTGCACTTTTGAGCTCAAGTGGCCACCCTCC
TGCCTCGGCCTCCCAAAGTCCTGGGATTACAGGCGTGAGCCACTGCACCTGGCCCTCATCTAGCCTTAAGTATAAACCCTTACCACCACCTGAG
CAACGACAAACACATCTTTGTATTGTACCCTTAAAGAGCCCAATGAGCACTACATGCCCAAGAGAAAATTTACCTTCTGACGGATGCTCAAAGC
CACAGTCGACAATGGCCCGGAGCAACTCTGGCTTGAGCAGGAAGTCACGAAAGCCAGAGCTGTGGATGGAGACATAGGAGCCCTTGACATCCTT
CTTGGCAGGGGCCTCAGCCCCATCTCCCCCAGCTGCTCTCTCCACCTCATCATCTTCATAGTCCAAGAGCTCATTCTCCACATCGTTCTCTGCC
ATAACTGGGCCGGCAGGGGAAGAAGGGAAGGGGGATCTGGATGGGTTCTCGCAAAATAGGTGAAAACAAGGGGTGAAGAGTAGGGGATTGAGGA
ACAGCAAAGGAAAACAAAGATACTATTTCTAACAGAAGAGCTGGAGGGGGGAAAAAAAAAGCAAGACTTAATCACGAGCACAGCCTTCACCATT
TTTCCATCCCCAGTTCCCACTTTCCCTAAACCAGGAAACTTTTACCTGGAAAGAAAAACAGATACAAAACATAAAAACGAAAAGCAAATATAAC
AGAACAGAAAAAGCAGTACCAGGGAAAGTGGTTAGGACAGAGGTTCCCAACAAGATTAGCAATCACAGTAGCGGAAACCAGAAAAGTTGGAAGG
GGAAGACCAACTTATAAATTCTTGATCTGAAAGTAACAGTGAGGAAATAGAATAGATAATAAAAGGTAAAATATGACTAATAACTTAGTAAAGT
GGAAAATGGAGATGACAAGTAGAGTCCTGAAAAGTCCTCAAAGGAAGACTCCGCTTTCCCTATTATAATCCCACCCTTATGGATGCCTAACTCA
GCAGCCATCAGTCAAGGGTGATAGATGAGGGTCATCACTGCGCAAAGCGCTCACCTTTCGAAAAGAAAACATCATATGGCCGCCGTCCACCTCC
CATAGCTCTCAGCCTCCCACTTCTCAGTATCCTCCCTTCCGCTGTTTAAGCAAGCCTTGTGTAATTAGCATGGGGGGGAGGGGCGGTGCAAGAC
AAATGGCTCGGCCACAAAAAAACAAAATTCATGTCTCCACCCTACAATAAGAAAGCTAATAGGTGACAGAGAAAGGCAATCCCCGCCCAGGCTT
TAACAGGATCTTTACCAAGTGGTCTCACATCACTGTTACGCTACGAAGGTGAGACTCCTTTTGGAGAAACATACAATGACACCAATCGTATCGT
AAACACTTGGAAGGCACTCCAAATTAAGTTGGGCAAGTCAAGGTGAGAAAAATCCAACTGGGCCCAGAAACCAGCTCCTCCTCCCAGTCCCACC
GAGGGCCGAAAAAGAGCTCAAGAAAGAACAAGGAAGGTGAGAAGAGCCCCGCCCTCCGCAAATACCAAGACCAAGGGACGCCGAGCACCGCCTC
TCATTGATGCTGAGGCCTCCAATATGAGAAGAACCCATTGGAAGAAGGGAGCAAAACGAACACAATGGCGCCGAGGACACCATCTTGGATTGGG
TCCCCCCTTAGCTTCCCTTCCTTCCCCCAGGAGCTCTTTGCTCTCGAAAGGGATGCAAGCTAAGGAAATAGCGAACCAACTAGGCCCCAGCGAC
CAGACCATCGCCTGTGAAAAGGGTATCAGGAACCCATGTGACGGGATGGGTGCGGAGAAGCGCAGATGGAAACGGATTGTAGCGAAGGCCAAAG
CTTACCTAAACAGGGAGAGCGCCTATGGCGGCAGCAACAGCGACGAAGGAGGGAAATCTGCCTTCACTTCCGGTTCCAGGCTTCCCTCTACTCC
AGCCTCCCGCCTTCTTGGCTGCAAGAGCGCAGGCGCAAGGGACCGGAAACAGGGCCTTCCGCGGTTATACAGATCCGTGCGCTCCAGGCTTGCC
TTTGGAAAATGCCTGTCTGAAATTTGTTTTAAAACCGTTTCTAACTTCACTGCTACCTCCAGTAACAAAAGATATAAAGGAAACTAACGTCTCC
CCCCCACTGTTATCTTTATTCTCTTATCCTACTCCTCTCCATGCCCCTCATCTCTTCGTTTAGGTTTTTGCCACGCAGGTCTTCTCTGTAGGCA
CCCCTCCGTGGATGCGCGAGGAACGAGTGTGGCGAAGGCTGCGAGTTCCCACGGGGTCCTTGGCCCGGTAGTGAAGGTGACCTGAGGACTGCTG
GGCACGCACTAGGAACCGGCAGGCCCTAGCTGAGGGGAGGGAGGAGGGAAGTCTCAGGGAACTGGATTGCTCGGGGGTGTTTCCCGACTCTTTC
CCAGTCGTGGGGCTGGTGGGCGGTATTTTCCCAAAAGGATGCTGTCCGAGGTAGCTGATGCCCTAGGGCCAGTGAGTCAGGAAGGTGTTCTGAA
TCCGAGCGGGAAGACGGGGTCTGGATTCGGCCCCAAGTGTTAATAGTAGGGCTTGAGGGTTATACTACATTCCATTAATACTGTTTTTGTTTTT
GTTTTGACACAGAGTCTCGCCCTGTCGCCCAGGCGGGAGTGCAATGTCCTGATCTCGGCTCACTGCAACCGCTGCTTCCCGGGTTCAAGCGATT
CTCCTGCCTCAGCCTCCCGAGTAGCTAGGATTACAGGCGCCCGCCACCACGCCCAGCAAATTTTTGTTTTTTTAGTAGAGACGGGGCTTCACCC
ATGTATGACCTCAGGTGATCCACCCACTTCGGCCTCCCAGAGTGCTGGGATTACAGGCGTGAGCCACCGCGCCCGGCCCATTAATACTGTTAAT
TCGAGCAGAATGTTCTTGGCCCCGCCCCAACAGCCCCATTGTTCAACCTGGATTTTTTTCCTGAATGAAACATTTGCTATCCCCGTCTTTGAGA
TGGGGAGCCACAAAAGTAAGACCTGATGTCCTGCTGTGTAATAAAACAACAAACGTTTGGCCCTCTCCCTGTTAACATACTTAATCATTTAATA
CTAAGGAGTAGGTACCGTTATTCTCATCTTATTGACAGAAGCGAAGCAAAGCAACATATCTCAAGCAGTACGGCTGGTGAGGTTACAGCCAGGA
TGCAAACATCTCTCATTCTCTATTGTATTCTGCCTCCCTGCTCAAAGAATCTGGTTAGTAAATACACTGCAGGTTACCTTATTGGTTCAAATTC
TTGGTGAAGTAAGCTTGTCTTCAGTGACAAATGAAGTAACTAATTCAAGAATGGTGTCATAGAAGGTATTTTCCCAAGTATCATTTAATTTATT
CAAAAGTATTTATCAACTGCCTCCCTTGTGCCACATGTTGTCCTAGGATCTGGGGACACAACGGTGAACAGCCCTGTTCTCACAGTGTTTACAT
TACAGGAAAGAAAACACATAAACACAAATATAATGTCAAGTATCGATAAGTGGTCAGGGTGCAGTGGCTCAGGCCTGTAACCCAACCCTTGAGG
AAGCCGAGCCCGAAGGATTGCTTGAGCCCAGGAGTTTCAGACCAGCCTGGGCAAGTGACACCCCATCTCTACAAAAAATTTTAAAATTAGCAAG
GCATAGTGGCACTCGCCCGTAATCCCAGCTACTCAGGAGGCTGAAGTGGGAGGATCATTTGAGTCCAGGGGGTCAAGGCTGCCGTGAGCTGGAA
CTCCAGCCTGGGCAACACAGCAGGACCTTGTCTCAAAAAACCAGTAGCAGTAAGTGCTATGAAGAAAATGCAAGGTAAAGGGGCAAAGAGCACT
TGCTCCTACACTCCAGCTTTTCTCTACAGTTGCGATCTATAGTCCTCAGATTCCCAAATGAGGAACCATGTTTCTCACTTTAGAGAAATAATAA
AGTACTACTTGTTCTTGTTTCTCCAAGAAGTTTCAAAGGATAGCCATTTGGGCTGTTTAGGGAATATGTAAACAAAAAACAAGAAAGTGACTGA
AGGCCAGGCACAGTGGCTCACACCTCTAATCTCAGCACTTTGGGAGGCCAAGGCAGGTGGATCACTTGAGGTCAGGAGTTTGAGACCAGCCTGA
CCAACATGGCGAAACCCCATCTCTACTAAAAATACAAAAAATAGCCAGGCGTGGTGGCACACACCCATAATTCCAGCAACTTGGGAGGCTGAGG
CAGGAGAATCGCTTGAACCTGGGAGGCAGAGGTTGCAATGAGCTGAGATCACGCCATTGTATTCCAGCCTGGGCAACAAGAGCAAAACTCCATC
TCAAAAAAAAAAAAAACAAAGTGACTGAAAATGAGAAATGATGAGGCAAAAGGAGGCTGCTTCAACTCACCAATTTATTTGCCAATAATTATTT
TATTGATACTTTTTTTATTGTTACAATGGGAAAGTAAGGTGTCAAGGATATAGAAAGGAAGGGCATGCATATGAGGGAACACAGTATCATTTTA
GATCTTAGAAAGCAATGAGCATCTGATAAGTCTTTGGGGAAATAGGAAAGGAGGAAAATCTAATAAAGACAAAGATCAGCAAAAGAAAAACAAA
GAGAGGCTACAAAATGCAGTTATCTACCTGGAATTATAAGAGAGGGGCTAAATGTAGTCATCTCCTCTTTTTGGAGATCAGAAGGTCTCTGGGA
AAAGAGAAGAACCAATTTTTCAGAAAATAACTAGGGTCACAGAATGAACAAGTGGAATTAGAGAGCCAGTGATGGACGTGAGGAAACAGCTGTG
TAGGTTTTGACCAGTGAGCAGGTGGTGGTAATAGTATCACAGGGTTGCTACTTACTGAATCACTGCTACAACATGCAAGGAACTGTGCTAGACT
TTACAGAATGATTCCTAATCATTGAAGCAACCCTCACAAGGTAGGCATTATTATCATCCCAGTTTCACAGACGAGGACATCGACGCTACCAAGT
TAAGTAGCTTGTCCTGGTTTCACAGCCAGCAAGTGACAGGGTCAAGAGAGGGACCCACATCGGCCAGACACTGAAGTCAGGATGTTTTCCACAT
TCCTACTTCCCCATATTACAAATTTCACAGAGGGTTTAGGTGAGAATGACTTGGAAGTTTACAAAGTCCCAGTGAGGGTTAAAGAACAACAAGG
AGATTCAGATGTGAGCAGGATATTTATAAGTGTCACAGGAAAATTATTGGATCCTGCCTCCCAGGATTTCTAGGGGATGGAAAGAAGACAGGGA
TTATGGTGGGAGGTGATTTTGATTGGAGGATTTCTTTGAGGGAGGGAACTGGCAGAAGGAGTCAGGCCCTACGGTGGCCCTAGGCAGAAATCCG
GTAGTTGGGGTGGACCTGGGGCCTGACGTCGCAGACCATGCCAAGAAGCTGGGCCAGGACACGCTCTCGGTTTCTCTGCTGGGAGCTCTGCATG
CCCTGCACCTGGCGCCTTGTAGCCTGCTCCACCTCAGCAGACAGGTTCCCCTGGGAGCCCATGGCCTGGGGGGTAGGGAGAGGGGTGGAAGAGA
GAAAGGGAAAAGCAGAAACAGACAAGGGTCCAGGCATATGAGGGGAAAGATCCTGAAACAAAGCCTAGAAGAAAGGCCCTCTCAGAAACCACCC
CCATCCCACAGAAATATCCCAACACCAAAGAGATCAACACAGTCCCCTTTCCCCTTAGACCTAACATGCAACTTCATCCTAAAACAGACCGTAA
TATCCCCACCACCTCACCATCCATGACCATAAAACTCTACCCTCCACCACAAATGTTAATCATACTCCACATAGATGTTATACTTTACACAGAC
TGTGGCATTCCGCCCACAAGCTCTATGTGGCCTTCAAAACTCCCAGACTCTCCTACATATCATCACAAAGTTTCACCAATGTTGTGGTCCCTGC
CAGGGTCCCCTCAGCCTCAGCCCTCTGCCACCATATTTTCTTGTTGAGTCACCCTTACACACCTCACTAGATGCACCCACCAACTTGCAGTGGG
GTCTCATCCCGACTCTGCCTCAACTCACCGCCTGCTGCTTGCTCTGGAATTCGTGCTCTCGCTCTCTGCGGTATTGCTCCACCTCCATCTGTGC
CTCCTCCTTTGCCTGCTTCAGTCGCCGGGCCTTCCCTGGAGGCAGAAGAAAGGACAGTGAGTGGGGATGGACCCACACACACACAATGTAATAG
CAGGAGTCAGTCCCTTCCAGAAAGTTATACAGCCTTCTCTCAGCCAACCAGGTGCCAGATTCTAATATCCATCCATTTCTTCCCTCCTAACCAG
CCTCCAGACCCTAGCTGTCTTCCCGCCAGCCTTGGGTTTTCCCAAAATGTTTGCTGTCCCCCACCCCCAATTTTCTTTCCAAACTCCTAAGGGA
GGAAAGAGGAGACTCACTCTTTCTGGCATCTGCCACCTTCTCAGCTGCCCGCTTCTCAGCTTGCAGAAGCTGCTGGATACCTTGGGACTGACTG
GCCATTTCTGTTGTTATGGCCGATGCTGTTTTGAATGCTGTCAAAGTACCAGATGGCTCCCACCCCCCACCGCTTACTTCTCCTCCTCCAGCTC
GTTGCTGCAGTCCTCCACTACCCCTGGGTCTTAGTGCTCCCCTGCTCACTCAGCCTCCTGCACCGAGTGTCTCTCCCAATCTCATCCTCCTATT
GATGACTGGTCCTCCTCTCCAGCACTTCTTGCTCAGGCAGTACCCAAAGGGGCCGCCTGGGAGCAGCAGAGACCAGGCCCAAAGCTGCGGGCTT
ACAACAGGTTAGCCATCCCAGTCGGAAAGGTCTAGGGATGAGGCAGGGGCGGAGACGGGGGAGTACTGAGGTGAGAGAAGGAGAACTTGATTGG
TGGTAACAGAGGAAGCATAAAGGGTTGTGAATGCGGTGAAAAGGTAAGGATGTCATCATGCAACCTGTGTTGGGAAAAGAGCATTCTGGGCTTA
ATTCTAAACTAACTCTCTACCTTTCTCTCTCTCTCCACCATCCCGCCCCCTCCCCTGCCTCCCGTTGTTAACATCTCCATCTTTTTCTACATAT
TTCTCAAGTCCAAATTTTTGCATCTCACTTGCCCCATCCTACGATAGTCTTCTTCCGTCTTTTGTCTGTATTTTTTCTTTTTTTTGATCTGTCC
CTGTTGTTGTCCCACTGTGGTTTTTGTTTTTGTTTTCCATGTTTAATGTGATTTTTATCCTGTCTTTATCTCCTCTATTTTCTCTGTCTTCTCA
TCTTTTCGTCCATCACTGAACCATCTCCTCTCTCTGCCAAGTTAGAGGAGGCGGGGAAAAACCTCCAAATAACTCTCTTTTCTCCCTCCCCTCC
CCTCGCCTCCTTTTCCTCGCCTCCAGTCCAGTCTTCTGGTTTCAGACGGCCCCTTTAATTTAAGTTCCCTAGTTTCCCCTGGGAGATCTGGCCA
AGAACTACCCGGTCGGGGCGGAACGACATCCGGTAACGCCCCTCACAGTTCACTTCCGTCCTCCACCTGCGTCTCTGCTTGCGCCATTTCCTCC
AGCCTGGAGTGTCTCCGCCCTTCCCGCCTCCCGTCTCCGAGCTTCTTAAACACAGGCCTTCGGCCTACGGCTCTGGGGGTACTTGGGGGGGCGG
GGGCAGGTCTGATGAGTAACCCCTCCCCCCAGGTTCCAGAGGAAGAAGCCTCCACATCTGTCTGCCGGGTACATGATATTCAATTTCTAGATCA
TTATTGGAGATTATCTGTGACTTTTTAAAACTCAGATTTCTGCTGATAAAAATTTTCCCCATCCGGCCCTGTTGGGTTTTTTTAAAGTTCTTTG
TTAAAAATTAAAAATTTACCTGGGCTCCTGAGCCTTAAACCAATTATTTACCCTTTTCTCGAATTTTACATTAAAAAAATTAAACCTCTGATCC
TATCACCCCCCTCAAAAAAAATTTTTTTTCAAATCTATCATCTGATAAAGGATCAGGGTTAGGTTAGGCCTCATCTCTTGCTGAAGATATTAAA
AAAAGACGGAACCAAAGGGAGAAACAACAGGGGATGTCAGAGATGGAGGGAGAAGGACCAGCCAAGGCTGAAGTCCTGACTGCTGCCTTTTTTC
CTTCCCCAGCCCAAGAGTTCCATGGCCTCCACTTCCCGCCGCCAACGCCGAGAACGTCGCTTTCGTCGTTACTTGTCTGCAGGACGGCTGGTCC
GGGCCCAGGCCCTCCTCCAGCGACACCCAGGCCTCGATGTAGATGCTGGGCAGCCCCCACCACTGCACCGGGCCTGTGCCCGCCACGATGCCCC
TGCCCTGTCCCTGCTGCTTCGGCTCGGGGCTGACCCTGCCCACCAGGACCGCCATGGGGACACGGCACTGCATGCTGCTGCCCGCCAGGGCCCA
GATGGTGAGTCTGCTCAGTGGGGAACAAGGTCATAAGCAGCTGACCAGACCTGAAATGAAAGCCAACCAATAGTTGAGAAATAAGCTGGTTATT
TGGTCATCAGGACCTAGGGAAGGAGTTAACCAAGTTGGCATGTGGCTGTCATTTGTCCCTTTACATTACTGAGCTACCATTGTCTGAAGAACCC
AACATTCCCCAAAGATCAACTGGTCTTCAAATTTCACATCTGTTTAGATTAGTAGCTACTTTGTTTCTTGACAGATTGTTTGCTCGTAGCCAAA
AAGTAGCATAGAAGGTAGGCTCTGGAGTTAGATTGCCTGGATTCAAACCCCAGCTCCAAATCCCAGCTCCACACTTCATAGCTACGTATTCTTG
GACAGGTTACTTGAGGCTTAGTTTGCCCATGTGTAAAAATTAAAATAATAACAACCTTTGCTATGTGCCAGACATTTCTTATAAAGTAACACAT
TTAATCCTCACAACAATCTTAGGAGGTGAGTACTGATATTATCCCCCATTTCCCAGCTGAGGAAACAGGGCATAGAGAAGTCATTTGCCAGAGT
TACAGTTATTCACTGGTAGAGCAGAGATTATAACCCAGATGGACTAGATAGAGTGTCCATGCTTTTAACAGCTACATTGTCCTGTGTTATACAT
TATAGCATTGTACATTGATTGTGCCCATGTTCAGAGTACCCATGTTGTGCCATATATGTTTTGAGAATCAACTGACATAGTACATAATTAGAGT
ACCTGGCACACACGATAAGCACTTGGTATATGCTGGCGATTGTTGTTCCTGTTTCTCTGTTTTTTGTTTTTGTTTTTGTTTTTTATGAAGTTTC
ACTCTTCTTGCCCAGGCTGGAATGCAATGGTGCGATCCTGGCTCACTGCAACCTCTACCTCCCAGGTTCAAGTGATTCTCATGCGTCAGCCTCC
CAAGTAGCTAGGATTACAGGCGCATGCCACCACGCCCAGCTAATTTTTATATTTTTAGAAGAGATGGGTTTTCGCCATGTTGGACAAGCTGATC
TCGAATGCCTGACCTCAGGTGATCCACCAACCTCAGCCTCTCAAAGTGCTGGGATTACAGGTGTGAGCCACCACACCTGGCCTTGTTCCTGTTT
TTGTTATCAACAGGTCCATACTCCCTTAACCACAATTCTAAACTCAAAAACACTCTGAGAACCAACATTTTTCATCAGGCTGCCACCAAAATTC
ATTTGGTGACAGAAACCTAATCTGAACTAAAGTAAGACTATTATTTATTTTCATCCTACTGATGTCAATATTCATACATTTCCCTGCAGAAACA
CTCATGTGTTTGGTTCTTGGGCTGCCTAGGCCCTCCTGGGCTACCTAATATAGAGTGAGTGTACTTTTAGGTCAGCCCTATCAAGTCCCAAAAA
CATTTGAATTCTGCAAAACCTTTGGCACTGAAGGATTCAAATGGGGAACCTGGTGATATTATAATAGTGGTGGAGGCCAGGTGCGGTGGGTCAT
GCCTGTAATCCCAGCACTTTGGGAGGCCAAGGCAGTCAGATCACGAGGTCAGGAGTTCGAGACCAGCCTGACCAACATAGTGAAACCCCCATCT
GTACTAAAAATACAAAAATTAGCCAGGCATGGTGGCACACACCTGTAGTCTCAGCTACTTGGGAGGCTGAGGCAGGAGAATCACTTGAACCCGG
AAGACAGAGGTTGTGGTGAGCCGAGATTGCACTACTGCATTCCAACCTGGGCAACACAGCAAGACTCCGTCTCAAAAAAAAAAAAAAGAGTGGT
GGAAGCAGCTCTTTATAGGTAGAGCCCTGCTTACTAGAATAAAAGCTGAAACCTTCTTTCCCCATCTAGAGATTTCCTTCTGGAGTAAGAACAT
TACAGGAAAACCTCTAGATCCAGATGAACAACCCTAACATCCCCCAGCTCAAGTATAGACAGAAGGCCCCTCCCCCAAAACTCCCCCAAATGGT
CAAAAAACCCCCTATTTAAAAATTTCCTTTAACGTACCTGAGATAGGCTAGCATATTCAGATTTGTTTCTTGTTGTTTTTACTTAAAACAGAGT
AGGTTTACTGAGTGCAGGCATCTAACTTGACAGCTCATATTGTAAGAGGCAGGACCCTGGAAGGCAAAAGAGCAGATTACCCCGAAGCAGACCT
GCATCCAGACCCCAGCTCTGCCATCAACAGGGACATGCAGCTTACCTCTGTGAGCCCAATTTGCCTCGCAAAAATGGGAGTTTTGTTTTTTGTT
TTGTTTTGTTTTTTTGAGATGGAGTTTCCCTGTTGTTGCCCAGGCTAGAGTGCAATGGCGCGATTTCAGCCCACCTCAACCTCTGCCTCCTGGG
TTCAAGAGATTCTCCTGCCTCAGCCTCCCAAGTAGCTGGGATTACAGGCATGCACCATCACGCCCGGCTAATTTTGTATTTTTGGTAGAGACGG
TTTCTCCGTGTTGGTCAGGCTGGTCTCAAACTCCCGACCTCAGGTGACCTGCCAGCCTAGCCTCCCAAAGTGCTGGGATTACAGGCGTGAGCCA
CCGCGCTCAGCCAAAATGCCCCTGATAGTGTGGTAGGGATTTCCTTTATTGTTTGTTTGCTTGTTTGTTTTGAGACAGGGTCTCATTCTGTCTC
CCAGCCTGGAGTGCAGTGGTGCAATCATGGCTCACTGCAGCCTCTACCTCGTGGGCTCAAGCAGTCCTCCCACCTCAGCCTCCCTAGTAGCTGG
GACTACAAGCACACACCACCATGCCCAGCTAATTGTTTGTATTTTTGGTAGAGACTGTTTTGCTATGTTATCCAGGCTGTTCTGCATCTCCTGA
GTTCAAACAGTCTGCCCACCTCGGCTTCCCAAAGTGCCGGGACTAGAGGCGTGAGCCACCACACCCAACTCCATTGTATTGAATTTTAAGAAGC
TGGTGAGACTGATATTATCCCATTTACAGATGAGGAAAGCAGGGCCCAAAAGGTTCGGGAACTTGTCTGAAATCTCACAGCTCTCAGGTCATTG
TCTTCCAAAGGGGGACCCAAGCTCAGTGCCTTCACTCCCAGACCCTGGTGTCCTCTCTGGCCTTATTTACTCCTGGTCCTCTGCCAGCCCTGCC
ACCAGATGGCCTTCTAACTCCTTGGTTGAAAGGCCCATCTCATTCAGCTTCCAGCTTCCTTTTTCTTTTCCTTTTGAGACGGAGTCTTGCTTTG
TCGCCCAGGCTGGAGTGCAGTGGCATGATCTCGGCTCACTATAACTTCTGCTTCCTGGGTTCAAGCGATTCTCCTGCTTCAGCCTCCCAAGTAG
CTGAGATTACAGGCACACACCACCATGCCCAGCTAATTTTTTTATTTTTATTTATTAATTTTTAAATTTTTATTTGTTTATTTATTTTTGAGAC
GGAGTCTCCCTCTGTTCCCCAGGCTGGAGTGCAGTGGCAGTATCTTGACTCACTGCAACCTCCGCCTCCTGGGTTCAAGTGATTCTCCTTCCTC
AGCCTCCTGAGTAGCCGGGACTACAGGAGCCTGCCACCATGCCCGACTAACTTTTGTATTTTTAATAGAGATGGGGTTTCACCATGTTGGCCAG
ACTGCTCTCGAACTCCTGACCTTAGATGATCCACCTGCCTCGGCCTCCCAAAGTGCTGGGATTACAGGCATGAGCCACCATGCCCGACCTAATT
TTTGTGTTTTTAGTAGAGATGGGGTTTCAACATGTTGGCCAGGCTGGTCTCAAACTCCTGACCTCAAGTGATCCACCCACCTCAGCCTCCCAAA
ATGTTGGGATTATAGGCATGAGCCACCGTGCCCATCCCACAGAATGTCTTTTGGTTTTGTTTTTGTTTTCTGTTTTGTTTTGTTTTGTTTGAAA
AGGAGTCTCATTCTGTCGCCCAGGCTGGAGTGCAGTGGCACAATCTCGGCTCACTGCAACCTCCACCTCCCAGGTTCAAGAGATTCTCCTGCCT
CAGCCTCCCAAGTAGCTGGGACTATAGGCGTAGGGACTGTAGGCGTATGCCACCACGCCTGGCTAATTTTTTGTATTTTTAGTAGACACGGGGT
TTCACCATGTTAGCCAGGATGGTCTCGATCTCTTGACCTTGTGATCTGCTCACCTCAGCCTCCCAAAGTGTTGGGATTACAGGCGTGAGCCACA
GCGCCTGGCCAAAATGTTTTTATGTTTATTTTTCTTAGTATGAAACTCCAGCGTATTAAAGAGCATTGAGAACGGTTGATCTGGTAAATCGCTA
TAAAGGCGGCATTTCTTTTTTTTTTTTTTTTTTTTTTTTTTGGCGAAGTGGGGGATGGAGTCTCATTCTGTCGCCCAAGCTGGAGTGCAGTAGT
GTGATCTCGGCTCACTGCAAGCTCCGCTTCCCAGGTTCAAGCCATTCTCCTGCCTCAGCCTCCCAAGTAGCTGGGATTACAGGCGCCCGCCACC
ACGCCCAGCTAATTTTTTGTATTTTTAGTAGAGACAGGGTTTCACTGTGTTGGCCAGGCTGGTCTCGAACTCCTGACCTCATGATCCGCCCGCC
TTGGCCTCCCAAAATGCTGGGATTAGAGGCGTGAGCCACCGCGCCAGGCCTAAAGGGGGCATTTCTAATACTGGAGAAAGGTGAACTTTTTTTT
TTTTTTTTTCCGAGACAGAGTCTCGCTGTGTCACCCAGGCTGGAGTGCAATGGCGCAATCTCAGCTTGCTACAACCTCCGCCTCCCGGGTTCAA
GCAATTCTCCTGCCTCAGCCTCCTGAGTAGCTGGGCACCTGCCATCATGCCCAGCTAATTTTTGTATTTTTGTAGAGATGGGGGTTTCACCGTG
TTGGCCAGGCTGGTCTTAAACTCCTGTCCTGACCTGAGGTGATCCACCCACCTCAGCTTCCCAAAGTGCTGGGATTACAGGCATGAGCCACTGT
GCCTGACCAGGTGAACTATTTTATAAATAATATTGGAACATTTGGCTCATCTAGGGAAAAACAAGAGTCCCACCTCACACCTAATCAAAAAGTA
AATTCCAGCAGATTAAATACCTGAATATGACAGGAAGGTACACACCAAATTCATGGGACAGATGGCCTGGGGAGGAATGAAACTTGGAAGGCGG
TATCACGGTAAACTACCTTTATCTGTGATGATTTTATTTCCTTAAAATAAATTATACTACAAACATGACAGTACATTAACAAACCCTGTGGTAG
GAATGGGGTTGTGTATTGTATTATACTTTGTATTTTTGAGAGTTTTTTAATTTCTTTTTTGTTGTTGTTGAGACAGAGTCTCACTCTGTCACCC
AGGCTGGAGTCCAGTCGCGCAATCTTGGCTCACTGCAACCTCTGCCTCCCGGGTTCAAGCAGTTCTCTGCCTCAGCCTCCCAAGTAGCTGGGAT
TACAGGCATCCGCCACCACGTCAGGCTAATTTTTGTATTTTTAGTGGAGACGGGGTTTCACCATCTTGGCCAGACTGGTCTTGAACTCCTGACC
TCATGATCCACCCACCTTGGGCTCCCAGAGTGCTGGGATTACAGGCATGAGCCACCGCGCCTGGCCGAGTTTTTTAATTTCTAAAAATAAAAAT
GAGTATACATCTAAAGTAGTAGAAGAAAATGCAGAGAATGTTTTATAATCTTAAAATAGAGCCTTCCTAAGAGTGAAGTGAAATAAAAAGTCAG
AAAATAATATATTGATATAGATTTAACTACATGAAAATTTTAGGCCGGGTGCGGTAGCTCACACCTGTAATCCCACACTTTGGGATGCCAAGGT
AGGCAGATCACTTGAGCCAGGAGTTCAAGACCAGCCTGAACAACACAGTGAGACCTGGTCTGTACAAAAAATACAAAATTAGCCAGGCGTGGTG
GTACGTGGCTGTCGTCCTGTAGTCCCAGTTACTCAGGAGGCTGAGGTGGGAGGATCGCTTGAGCCCAGGTGGGGCAGAGTTTGCAGTGAGCAAG
ATCATGCCACCGCACTGCAGCCTGGGCAACAGGGTGAGACCTTGTCTCAAAAAGAAAAAAAAAGCTTTTTTAAAGATAGATAGAAGAAAATGTT
TGCAATATGTATAACACATACAGTATATAGAACCCTCATATCAATATATATAATTTCCAAAGAAAAAGTGGATAAAGAATATGAGCAATTCATT
CACAAAAAATACAAATAGCCAAAAGACATGAAAAAGAAAAAAACATTGTTAATAAAATAATTTTTTAATCTATCCAACTGGCAAAATTAAAAGG
GTTGATGATATTCAATTTTGGTAAAGGAAGACATAGGCACACTTGTATATTGGCACAAACTTATTGAGAGCAGTTTGACCAAATTGCGCATGTC
CTTTGACTCAGAAATTCCACTTATGAAAATCTACCCCCACAGAAAGACTGTAAGATACTCATGAGGCTGAACATTTTTTGAAACAAAGTCTATC
GATATTGGGGTAAGGAGATTTGTTTTGTACACACAGTGGAACACTAATTATAAAGTCGTCAAAAAGTATGAGGTAGACTGTATATATTCCTGTG
GAAAAATATAAATGAGATGTTAAATGAAAGAAGCAAGTTGCCAAGCAATATTTGTAGTATGGTTACATATCTCCAAATAAATGTGTCATATGTA
TGCTTTTAGGTACACCAAGGTGGGACTGGAAGGGATCACAGTACACTGTTAATAGTTATCAAATTTGTTCGTCCTTCTTTAAAAAGAAAATTTC
AACTTAATTATATCCCTTTCACATTAAAATGTCAAATAAAATTGGGGGAAAAGCCACCTACAGCCCCACCACCCATAGGCTAGAATTTTTACAT
ATTTTTTGCCAGTCTATTTTTTTTCTTTTTTTTTTTTTTTTTTTGAGATGGGAGTCTCCCTCTGTTGCCCAGGCTGGAGTGCACTGGCATGATC
TCAGCTCACTGCAACCTCTGCCTTCCAGGTTCAAGTGATTCTCCTGACTCAGCCTCCCAAGTAGCTGGGATTACAGGCACATGCTACCACGCCT
GGCTAATTTTTGTATTTTTAGTAGAGACAGGGTTTCACCATGTTGGCCAGGCTGGTCTCGAACTCCTGACCTCAGGTGATCCACCCGCCTCAGC
CTCCCAAAGTCCTGGGATTACAGGCCATGACCCACCACGCCCGGCCTCTTTTTTTCCAACCATAGGATTTGGTCTCTTGTTTTAGACAGTTATT
ATCTGATCCTCTCTCTCTCTCTCTTTTTTTTTTTTTTTTTTTTTTTTGAGATAGAGTCTCACCCTGTCACCCAGCCTGGAATGCAGAGGCGCGA
TCTCGGCTCACTGCAACCTCCGCCTCCCAGGTTCAAGCAGTTCTCTGCCTCAACCTCCCAAGTAGCTGGGATTACAGGCGTCAGCCACCACGCC
TGGCTAATTTTATATATAATATAAAATATAATTATATATATATTTTGTTTGTTTGTTTTAGTAAAGACGGGTTTTCACCATCTTGGCCAGGCTG
GTATTGAACTCCTGACCTTGTGATCCATTGTCCCCCCCCCCAGCCTCCCAAAGTGCTGGGATTACAGGCGTGAGCCACCGTGCCTGGCCACATC
TGATCCTCTCTACAGTTTTGTAGCCAGCTTTTTTCAAACACATGCCTCAGTTGTAGTGGCTGTTTAATATTATGTTTTTATAGTTGGAGGCCCT
ACTCCTTAAAACCTATGAATGTAAACCTCCCATGCAAGCCTGAGCACTCACCATGCTCACCACCTGAGCTCAGGTGGGGAACAAGCGAATGAGA
GACAGGACCAGGTACTTTCTGGGTGGGACAAGTTGAGAGGGTCTGTGACAGGTCACAGCAGCACTAGGGAGAAGTGCCCCCCCCACCAACCCTG
ATGTGATTTGGGTAGGGATGGTGGGCCTTCGCCAGCCACACCTGGGCCATTCTGTCTTCTTGCCTTCCTGGCCTTGCCTTCCCCTATTCCAGCT
TTCTGCCAGGTAAACAGTACTTTCCAGCACTACCAAATAAAGATTTAAGGACTGCTAGCCCATTTCCTCTTACCCCGGGGAAAGAAAGTAGGTC
CACAGGAAGGAAGGCTGCCTCCCTCCCCTTCTTCTATCCCCCAAGTGAAAGAGGTGGTTGGTGGCCACAGCAGGTGGGCCTGGCCAGGATGCCT
GGGTTGGCAGTGAAGGAAGTAGCATGGCACTCAGCTAACCTTGGGCCAGATGCAGCAAGGTTGGGACTGAAGAAAAGGGGAGTTCAGGAACGTC
GGTTCCTCTCCTGTTTTCTCTCAGCCCATGGGTGAGACCCTCTGTCACACTCCACTCCCTTTCCCCTGCCCTAGGTCAGCAGTCATTTGGAAAG
AGCTTGCTCTGCCGCCGGCCATAGTTGTTGCCGGTTCACCTCCCCACCCCTCTCCCATCATCCCCTGGTAAGGCTGGCTGAGAGAAATTCCCCT
GAAAACATTTATTTTACTCAGTTTATTGATAAGTGATAATAAAAGATAAGTATTACATATTTGTGTATTTATTAATGGCCCAGAGTAGAGCATT
CAGATATTTTCCCAGTCTGATATATGGTTTCAGGTGAGAAAATAAGGGATTTATATAGTGACAATATTTTTAAGTGAAAAGTGGAATACATAGT
CAAAGAATTTGGGCACTGCCTTGGTGGCTGGAGGCAGGTCAGAAAATGTCAGTTGGCATGGTAGAACTTCTAGGATGCTGAAATAGTTTGTGGA
GACACAAGTAAGAATTTTTTTTTTTTTTTTTTGAGACGGAGTCTTGCTCTGTCACCTAGGCTGGAGTGCAGTGCCACGATCTCCGCTTACTACA
AGCTCCACCTCCCGGGTTCACATCATTCTCCTCCCTCAGCCTGCCGAGTAGCTGGGACTGCAGGCGCCCGCCACCAGGCCTGGCTAATTTTTTG
TATTTTTTAGTAGAGATGGGATTTCACCATGTTAGCCAGGATGGTCTTGATCTCCTGACCTCGTGATCCGCCCGCCTCGGACTCCCAAAGTGCT
GGGATTACAGGCGTGAGCCACCGCGCCTGGCCGAGAATATTTTAAACTACCACACTTACCATGCATGTGGTAAACTATCAGTCTGTATTTATCA
GTGATGGTTATTTCCTAATACCCAGGAGGCATCCATGTGAGCCACCCTTCCATTGCTTTAAGACCAAGGGAGCGAGTGACCAGCAGGATTCAAG
ATGGCAGCTCTGCCGAGGAGTGGGAGTCCCAGCTAACTTCTGCTCCCTGCTCTCCCACCAACAGCCTACACCGATTTCTTCCTCCCGCTGCTAA
GCCGCTGTCCCTCCGCCATGGGAATAAAGAATAAGGATGGGGAGACCCCTGGCCAAATTTTGGGCTGGGGACCCCCCTGGGATTCTGCTGAAGA
GGAGGAAGAAGATGATGCCTCCAAGGAGCGGGAATGGAGACAGAAGCTCCAGGGTGAGCTGGAGGACGAGTGGCAGGAAGTCATGGGGAGGTTT
GAAGGTGAGAAGTCCACTGCTATCCACAGCTGCCCTTCCCCACTGGCTGCTTTCCATCTGCATGAATGCGTCACACTAGGCTCCTCTGCCCCCT
CCTCTGTGCTTCCCTGCTTCTTGGGGCCCATCACCTTCTCACAGCCTCTCTCCAACTACCCCCATCCCACCCTCCCAAACAGGTGATGCCTCCC
ATGAAACCCAGGAACCTGAGTCCTTCTCAGCCTGGTCAGATCGCCTGGCCCGGGAACATGCCCAGAAGTGCCAGCAGCAGCAGCGAGAAGCAGA
GGGATCCTGTCGACCCCCACGTGCTGAGGGCTCCAGCCAGAGCTGGCGACAGCAGGAGGAGGAGCAGCGGCTCTTCAGGGAGCGAGCCCGGGCC
AAGGAGGAAGAGCTGCGTGAGAGCCGAGCCAGGAGGGCGCAGGAGGCTCTAGGGGACCGAGAACCCAAGCCAACCAGGGCCGGGCCCAGGGAAG
AGCACCCCAGAGGAGCGGGGAGGGGCAGCCTCTGGCGATTTGGTGATGTGCCCTGGCCCTGCCCTGGGGGAGGGGACCCAGAGGCCATGGCTGC
AGCCCTGGTGGCCAGGGGCCCCCCTTTGGAGGAACAGGGGGCTCTGAGGAGGTACTTGAGGGTCCAGCAGGTCCGCTGGCACCCTGACCGCTTC
CTGCAGCGATTCCGAAGCCAGATTGAGACCTGGGAGCTGGGCCGTGTGATGGGAGCAGTGACAGCCCTTTCTCAGGCCCTGAATCGCCATGCAG
AGGCCCTCAAGTGACCCTAGGGAAGAAGCAAGAAACTTCGGGGCTGCAGCCTCAGGATGAGGCAGAAGGAAGGGTAAGGGAAAGGATGGGGACC
ACAAGGAAGAGCCAGGTGCTGCTCAGCAGAGGATATGGGTGGGAGCGAAAGTTGTAACAAGTGGGGGTGGGGGGTGCGGGCCGCCACCACTGCT
CCTTGACTCTGCCGTTTCCTAATAAGACCTGGTTCCACATCTCACTCCCAGTGTCTCCTCTGTCTTTTTCCATTGCTGTGGTTTTCATCACCCA
TGACATCTCCTTTCCCGCCCCGCCTGCTGAAACCCACAGCTCCCACACACCTGCAACACACACGCACACGCTAACACGGGCTCTGAGCTGGAGG
CAAGAAGCCTCTGCATGCCCCCTCAGTTCAGCCCTAAGAAGGCCCAGTTTGCCATCCAGTCTCACTCCACTCCCTACACTGGGGTCTTGTCCAC
CCTGCAATCTGTGGCTGGAGAAATAGATGCGAACAGAGGCAAAAAGGGGAACAAAACCAGTTTCCCTCCCCTCCCTGGCTCCCCAAGCTGAACC
ACATCCTCCTCCCCACTTAACACCCCCTTCCCCCAACACAGGGCTTTCCCTTTGCTGAGTCACTGAATGAGCGAGTTGGGGGTAGCCGGCGCTG
GGGGGCCATGAGGAGGCTGGGGGAGGATGGGGAATACAAGCAGAATGGCTGGAGGAAGAGCCCTGTGGGGGAGTGGAATTTCAGTTGCTAAAAT
TAGGAGCAGGGGAAGGAGGTGGAAAGAGCAAAATTATGTAACATGGGTTGTCTGTTCTTGGGCAACTGGAGCTCCACACCCAAAGCCAGCCAGG
CTGCTGGCTCCATCCATCTCTGCCCTCTAGCTTGTCAGTTGTATCTCTCTTCCTCCAGGGCCCCAATCCTCATCTCCGCCATTCAGCTGCTGCC
CCATCCTAAACCTGAGTTCATCTCTGGGCAGCCCAGGCATGGCCTTCCCTATAAACATTTCCTTTTCCAAGAACCAGTAGTTGAAGTCCTGAGA
GGTGGAGGGAGAGTCTGGGATTCCCACGGAGGAGAGAGGGGGGCTCCCTGGAAACTAAGATAGGTAGACCCCACTACCATCGCCCAGGACACAA
CTGGGAACTTGGCAAAAAGAAAGGACAGGGCTGCAAGGAGAGTACAGACATGTGCTGGTGAGTGCACTGTCTGCATAGTTACACCAGAGCATCT
TATCAATCAGAAACTTATCTTTCAGGTTTTGAGCCCAGTTCTCTACAGGAGAATCCCAGGAGTGGAAGTGGAAGGCAGTAGAAGACAGGGAGGG
CACGCCTCTGGGAACACGGGAACATGGGTGGGCATGAGATCCTTGAATAAGACAGCCTGAAGTTCGGAAGAGACCAAGGCCTCTGAAGGACCAG
GCAGATGTTCAGGGTGCAGGAGGGGGAAGGGCTGGTGAGAAAGATCCTGTGAGAGGAAGCTGCTGTGATTCAGAGAAGAGACTTCAAGCTGTGT
GTGACCCTGGCGTCCCGTTCCTCTCACAGGCTGGAGCTTTTCGGAAGTGGCATGCAAAGAGTCCAGGTTTGGCCTTGGGGGGAGTTGGGGTTAG
GATCCCTAAGCTGGAGGTTGAGAAGTAAATTACAGAAAACTCTGGTGACCAAATTTGCTCCTCCACCCAGGAGATTTCTCACTGGTTTTTAAGC
ACATCATTTCCCCTTCTGCAAGAGTTACATAAAACCAAAGCAAAATAAGCCCTGAAACCTGGGCCCACCGGACCACAGTCTTTTCAACGTCCCT
TCCTGGTGTCTGGCCCCCAGCCCTGGTGGGGGTTCCCCTGAGATAAGGGCTGTTCACTTTCTCTGACCACATGGTTTCCGCTTCTGTGTCTCTT
GTTTCCTAGGCTGATAAAAATACTGAGCCCTAGAGGCCCTGGCTTCCTCTGACCCCTTGGGGCAGGCAGCAGGCATCCTGTCCAGCATGGTGGG
GGCAGGGACAGGGGCCAGGGATTCCCAAGGGGTGACTCAGTGCCTGCCATGAAACAGTGGGTAGGTGGAAGTGTATCTCTGCTCTCTAGAGCTG
GCACCAGGAGTTGAGTCTCAGTGGAGGATGCATTGGGATTCAATTGGAGGAACAGGCCTGGAAAAGAATAATGAGATTGAAGAGGGTCAGTTTG
AGGACTCAGGTTGGGGCAGGTTTGGATTAAGTTAGGAAAAGGATCTGGGAGGGACTCTGTTCAGTGTAGGTCAACTGAGCATTATGTAGCCCAA
AGATAAATTTAAACCCTGCTTCAAGCTTACAATCTAGTGGGGAGGCAGACCCATACCTAATTAACTGATTCAAGGCATGATGAGTAAACTTTAA
GATGATTACAGAAAGAGGGGAGATTAAGTCCATTTGAAAGCATCCAGGGAGCCTCTGAGGAGACAGCATTTGAACTTGCTCTAATGAATGGGTT
CACTAGGTGGAGGTGGATGGAAAGGTTCCATAGGCGAATAACACGTCTTGAGCGAGCCTGACAAGTCAGAAAATGCAGTATGTTCTGGGAAAGG
AGCGTCCTGAGGGAGAAGAAGCACAGGTGTGAGGGAACATGTGATGAAGAAAGGACCACAGAAAGTCAAGGTCAGAGATTGGACTGCATCCTGT
GGGCAGTGGTCCAGGTGACGATGAAAAAGAGGGAGAACAGGTGAGTGCTGCAGTACAGACAAGGAGTAAGAAAACGGCCATCATCTTGTGAATT
AATACCTACTGTGTGTTAACCAGCCCTTTTCCTAACACCACAAATCCTCTCAACGTCTGTCCAAAAGGTGGGTGGTGGTGGCCAGGCACCTCAC
TCCTGTAATCACAGCACTTTGGGAGGCCAAGGTGGGAGCACTTTGGGAGGATCACTTGAGGCCAGGAGTTCGAGACCAGCCTGGCCAACATGGT
GAAACCCCGTCTCTACTAAAAATAAAAATACTAGCTGGGTGTGGTGTTGGGCACCTGTAATCCCAGCTACTCAGGTGTCTGAGGCACAAGAATC
ACTTGAACCCGGGAGGCAGAGGTTGCAGTGAGCTGAGATCATCCCTCTGCTCTCCAGTCTGGGTGACAGAGCAAGACTCTGTATCCAAAAAAAA
AAAAAATTATTAAGCACCTATTAGGAGCAGGGCACTGCTTGACAATAGGTATAAATAATAAAGTCACTGCCTTCATAGAACTTGCAGTCTAATG
AGACAGTATACAAATAATAACTATACATTATAGTTATAATGTATAGGTATGCCTGCTTAGGGTAATAAAGTGCTCAATGAAGGTTTGAGGTACC
AGCATGACTCTCAGGTGGAGATTTCCAGAAAGCAGGTCTGGAGCTCAAGAGAAGTTGGGTCTGGAGGAACAGATTTGGGCATCATTCCCTTCCC
AGTAGAGGTTGAGCCTTTGAGTGGACAGGATCTTCAAGGGAGGGGGCGGAGTGACCAGAAGAGCCCTGAGCATGATCAAAGGAAGAGAACCAAT
AAAGGAGAGGTTGGGGAGCAGTCAGAGAAGCAGGGCACGGGGGGCGGGGGATGCCAAGCAGAGACAGGGCAGCCATGTTTGAGGCTTCAAAGAG
GTCTAGTAAATGAGGGTTGAAAAGATTGTTGGGTTCAGGAACTAGACGATTACAAATTTTGAGAAAACCGTTTCCATTTAATAGAGGGGCAGAA
ATCACTTTACATAGGTTGAGGAATGAGTGGGAGGTGAGGAAAAGGAGGTGGTGGGCATGAGGTCAGAATGGTGAACACAGAATAACTGAGAATC
ATCTCTTAGTTCTACCCACAGATTTTACAGTTGAGGGAAATTTTACCAGTTCCTGAAAAAGTGGTTCGTTAAGGGGGCTAGTCTTTTGAGACAT
CACACGAAAACGGAAGGTGAGATAGACTGGACATTTGAGGGAGAAATATTACCAAGGAAGGATCACTACTTC
HUMAN SEQUENCE—mRNA
CCGAGCTTCTTAAACACAGGCCTTGGGCTACGGCTCTGGGGGTACTTGGGGGGGCGGGGGCAGGTCTGATGAGTAACCCCTCCCCCCAGGTTCC
AGAGGAAGAAGCCTCCACATCTGTCTGCCGGCCCAAGAGTTCCATGGCCTCCACTTCCCGCCGCCAACGCCGAGAACGTCGCTTTCGTCGTTAC
TTGTCTGCAGGACGGCTGGTCCGGGCCCAGGCCCTCCTCCAGCGACACCCAGGCCTCGATGTAGATGCTGGGCAGCCCCCACCACTGCACCGGG
CCTGTGCCCGCCACGATGCCCCTCCCCTGTGCCTGCTGCTTCGGCTCGGGGCTGACCCTGCCCACCAGGACCGCCATGGGGACACGGCACTGCA
TGCTGCTGCCCGCCAGGGCCCAGATGCCTACACCGATTTCTTCCTCCCGCTGCTAAGCCGCTGTCCCTCTGCCATGGGAATAAAGAATAAGGAT
GGGGAGACCCCTGGCCAAATTTTGGGCTGGGGACCCCCCTGGGATTCTGCTGAAGAGGAGGAAGAAGATGATGCCTCCAAGGAGCGGGAATGGA
GACAGAAGCTCCAGGGTGAGCTGGAGGACGAGTGGCAGGAAGTCATGGGGAGGTTTGAAGGTGATGCCTCCCATGAAACCCAGGAACCTGAGTC
CTTCTCAGCCTGGTCAGATCGCCTGGCCCGGGAACATGCCCAGAAGTGCCAGCAGCAGCAGCGAGAAGCAGAGGGATCCTGTCGACCCCCACGT
GCTGAGGGCTCCAGCCAGAGCTGGCGACACGAGGAGGAGGAGCAGCGGCTCTTCAGGGAGCGAGCCCGGGCCAAGGAGGAAGAGCTGCGTGAGA
GCCGAGCCAGGAGGGCGCAGGAGGCTCTAGGGGACCGAGAACCCAAGCCAACCAGGGCCGGGCCCAGGGAAGAGCACCCCAGAGGAGCGGGGAG
GGGCAGCCTCTGGCGATTTGGTGATGTGCCCTGGCCCTGCCCTGGGGGAGGGGACCCAGAGGCCATGGCTGCAGCCCTGGTGGCCAGGGGCCCC
CCTTTGGAGGAACAGGGGGCTCTGAGGAGGTACTTGAGGGTCCAGCAGGTCCGCTGGCACCCTGACCGCTTCCTGCAGCGATTCCGAAGCCAGA
TTGAGACCTGGGAGCTGGGCCGTGTGATGGGAGCAGTGACAGCCCTTTCTCAGGCCCTGAATCGCCATGCAGAGGCCCTCAAGTGACCCTAGGG
AAGAAGCAAGAAACTTCGGGGCTGCAGCCTCAGGATGAGGCAGAAGGAAGGGTAAGGGAAAGGATGGGGACCACAAGGAAGAGCCAGGTGCTGC
TCAGCAGAGGATATGGGTGGGAGCGAAAGTTGTAACAAGTGGGGGTGGGGGGTGCGGGCCGCCACCACTGCTCCTTGACTCTGCCGTTTCCTAA
TAAGACCTGGTTCCACATCTCAAAAAAAAAAAAAAAAAAAAAAAAAAAA
HUMAN SEQUENCE—CODING
ATGAGTAACCCCTCCCCCCAGGTTCCAGAGGAAGAAGCCTCCACATCTGTCTGCCGGCCCAAGAGTTCCATGGCCTCCACTTCCCGCCGCCAAC
GCCGAGAACGTCGCTTTCGTCGTTACTTGTCTGCAGGACGGCTGGTCCGGGCCCAGGCCCTCCTCCAGCGACACCCAGGCCTCGATGTAGATGC
TGGGCAGCCCCCACCACTGCACCGGGCCTGTGCCCGCCACGATGCCCCTGCCCTGTGCCTGCTGCTTCGGCTCGGGGCTGACCCTGCCCACCAG
GACCGCCATGGGGACACGGCACTGCATGCTGCTGCCCGCCAGGGCCCAGATGCCTACACCGATTTCTTCCTCCCGCTGCTAAGCCGCTGTCCCT
CTGCCATGGGAATAAAGAATAAGGATGGGGAGACCCCTGGCCAAATTTTGGGCTGGGGACCCCCCTGGGATTCTGCTGAAGAGGAGGAAGAAGA
TGATGCCTCCAAGGAGCGGGAATGGAGACAGAAGCTCCAGGGTGAGCTGGAGGACGAGTGGCAGGAAGTCATGGGGAGGTTTGAAGGTGATGCC
TCCCATGAAACCCAGGAACCTGAGTCCTTCTCAGCCTGGTCAGATCGCCTGGCCCGGGAACATGCCCAGAAGTGCCAGCAGCAGCAGCGAGAAG
CAGAGGGATCCTGTCGACCCCCACGTGCTGAGGGCTCCAGCCAGAGCTGGCGACACGAGGAGGAGGAGCAGCGGCTCTTCAGGGAGCGAGCCCG
GGCCAAGGAGGAAGAGCTGCGTGAGAGCCGAGCCAGGAGGGCGCAGGAGGCTCTAGGGGACCGAGAACCCAAGCCAACCAGGGCCGGGCCCAGG
GAAGAGCACCCCAGAGGAGCGGGGAGGGGCAGCCTCTGGCGATTTGGTGATGTGCCCTGGCCCTGCCCTGGGGGAGGGGACCCAGAGGCCATGG
CTGCAGCCCTGGTGGCCAGGGGCCCCCCTTTGGAGGAACAGGGGGCTCTGAGGAGGTACTTGAGGGTCCAGCAGGTCCGCTGGCACCCTGACCG
CTTCCTGCAGCGATTCCGAAGCCAGATTGAGACCTGGGAGCTGGGCCGTGTGATGGGAGCAGTGACAGCCCTTTCTCAGGCCCTGAATCGCCAT
GCAGAGGCCCTCAAGTGA

[0287] TABLE 23

MOUSE NOMENCLATURE
ICSGNM Flt3
Celera mCG12743
HUMAN NOMENCLATURE
HGNC FLT3
Celera hCG96642
MOUSE SEQUENCE - GENOMIC
GCTCTGTACAAGGTCATTTTCCAGACAAGGCCAGCCACCTGTGTTCAGGGACACTCTCCAGACAGAGACAGGGAAGCCCCACTAAGAAAGGGAG
ACCCCATTTTGCTCTATCTGGTCTTGGTGGACTGCTACCATCATAGCGAGGTTCTCCAACAGCTTTCCTGCTCAGTCACATATACTCAGATGTC
ACCGGCTTTTCTCAGACCACATTGCAAGGGAACCCATCTGTGTATCTGACTTCGTTCTTCATGGACTGTAGCTGCCTATGGATGGGGCAGTCCT
GACGTCTATCCTTGGAGTCCCAGAACCTGGTACTAGACACGTGCCTAATGAATCCTTGTTCTGGGAATGTCCTTAGTGAGTCATGACAGTGGGC
ACTGTACTCATGCTGGGTGCCTAGGGATTGGGATGCCCGTGAGGGCTTCAGCGTAACAGCCACACATAGGTGATGCCACATAGTGTGCAGGCTT
TCGTCACGTGAGCAAGCCGAGGAAGCAGAGCAGTATAGAGGCTCACGGGGAGGCCTTGCTCATGTATATCACTCACCACATGGCTCTTTTACTT
GTACCTGGAGGAGATTATCTTACAGAGAGCCTGTCCCTGGGTCCTCAGCAAGAGGAGTATGTCCTCTCAGTTTCTGAGTCATCTCTCTAGCTCT
AAGATCTCATCCCTAATGCAAATCCTGTCTACAAAAGATGATGGGCTCTGTCTGAGTTCTTCTTCTGTTTCTTTTTTGGACTAGCCCAAACCAC
AGCTCAACTTTGTCTATGCTTTCTTTCATTAAACTGACAAATTTTTAAAAAAATCATGTATGGTAGGTCTCTATGTTGATCAGCCTGGTCTACA
AAGGAGGTTCTAAGTTAGATGGGGCTAGAACCATATATATATGTATATATATGTGTGTGTGTGTGTGTGTGTGTGTGTATGTATATATGTATGT
ATCACATATATATCATAACATGATATATGTGATATATGTATATATGATATATGTGTGTATATATGATATATATAATCCTTATACAAATATCAAT
ATCTAATTTGTAAATTTCCTTTTTACAGAAAAAGGGTTTATAAACGCTACCAGCTCGCAAGAAGAGTATGAAATTGACCCGTACGAAAAGTTCT
GCTTCTCAGTCAGGTTTAAAGCCTACCCACGAATCCGATGCANNNNNNNNNNNNNNNNNNNNNNNNNNNNNNNNNNNNNNNNNNNNNNNNNNNN
NNNNNNNNNNNNNNNNNNNNNNNNNNNNNNNNNNNNNNNNNNNNNNNNCAATTCCCCGGCCCCCATCCCCGGTATCGAGCACCTCTGTCCCCGA
GCTATAGACTTAGCCCCCTCAGTCTGTGAGTTGATTTATTGTTGAGTCAGAAAACTGAAGACTGAAAGCAAACCGCACCTGTGACCAGAGCCAC
TTTTCCTTCTCTTCCGGGACTAAAGCCTGCTGCATGAAAACAGAATCCTGGCAGTTTTCTGTCAAGAGACTGTGGTTTCCTGTCTAAGTGCTGC
GCTCTGACAGTACCGGGCGGCTAAGTGCGGTTGTGAGTGATGGGGGAGTCGGACCTCCTTGCCAACTGAAAACATCTGCCCTAGGTGTACTGAT
TTATGTTCTCAAACACAAATGCAGAAATAGCCCGAGCATAAGTCACAAAAGAGGATCTCCTTCTCCTGGGGGTTTGTTCAACTCTGGTCTAGAG
TGTTCTGGAGGCGAACGTCTCATTCCTTCTTTGAAAAGCAAAAGCCTGCTTTCCCCGGTTTCTTCTGTTAACTATGGTGCCTCTTCTGTCTTTC
TCTCCTTTACAGATTTTAGTTTTAGCCATGTGTATGTGGGTGACAGTCTGTGTGTGTGTGACTGCGGTGTCCCTGGAGGCCAGAGGCTTGGGAT
TCCCCTGGAGTTGGAGTCACAGTGGCTGTGAGCTGTCCCACGTGGGTACTGGGAACCCAGCTCAAGTCCTCTGCAACGGCACTGTGGGTTTGCT
CTTATTCGCTGCACCAAATCTGCAGCACAGCTCATGGACAAACACTGTCTCAACAACAACAACAACAGACAGACAAAAAACCAAACACACAAAA
CAGGAATGTAGAACATCTCATTAATAATTTTCACACTGAGGCTATGCTTCAATGATTGTTTGAGGTATGAGAGTTACAGAGATCAACGAATGCA
CTCAGCTTTCCCCTCTCTTTACTTCATATACATATCTGCAGGGGACTTAAAAGGAAAACGAGGCAGCTGTCTGTTGCTCTGGTCACTGTGACAA
GAGCTGACCTCTTTCTACCCTCTACGCTGCTCCTAGTGTTTCTTTCATGATAGTATGCTTTTTTTTAAAAAATTCCCATAAGTGATTTATAATT
GGTCTTTGAGAAAGTGTGTGTGTGTGTGTGTGTGCACATCTATCTGTATCTCTCTCTCTCTATGTCTGTGTTTATTCTCTCTCTCTCTCTCTCT
CTCTCTCTCTCTGTGTGTGTGTGTGTGTGTGTGTGTGTGTGTGTGTGTGTGTGTGTGTGTAGGATGGATTCCCTGGATGGAACTGGACTTATAG
GCAGTTGTGAACCACCTCATGTAGGTGCTAGGAATCGAACTCAGGTCTTCTGGAAGAGCAATGCTTGCTTTAAACCCCTGAGTTCTCTCTCTAC
CTCTAAATTTGCCTAGGGGGGTAGGGGTGTCTTGTGGGGTGTATATGTGTGTGTGTGTGTGTGTGTGTGTGTGTGTGTGTGTGTGTGCGCGCGC
GCGCGCACCCATGTGCAGAGGCCAGATCAACATCCTCTGTTGTGCTCCACTGTTTTTTAAAACAATACTTCATGTAATGCTTATGAGTGTTTTG
CCTGCATGTCTATCTATGCACGTGTGTCTGCTGGGGCATCAGGTCACTTGGAAATGGAGTTATGGGTGGTTGTAAGCCACCATGTGGATCCTAC
GAATCATGCTTTTAACCTCTGACTCATCTTTCTAACCCTCTCAACTATTTTTTTTTTTTTGAGACAGACTCTCTCATTGAACTTGGATCTTACC
ATTTTGGCTAGACTGGCTGACCTCCATACCCCAGCACTAAGGCTACAGAGCACGCACTAAGGCTACTGCACTCAACTTTTACATGGTGGGGACT
TGAATTCAGATTCTCCGGCTATACTACAAGCTTTATATACAGAGCCACCCTCTCTGCTTCCTATTTGTATTATTTATTTATTTATTTATTTATT
TATTTATTTATTTATTTATTTATTGGTGGGGAGAAGGGGACAGTTTGAGAAAGGGTTTCTTTCTCTCTGTATCCCTGGCTGTCCTGGAACTTAT
TATGTAGACCCGACTGGACCTTACACTCACTGAGATCTTCCTGCCTCTGCTTCCTGAGTGCATCAAGCTATGCACCACAACCACACCAGGCTCG
CATAAGCTCTTATCCAGAACTTGAATTCCAGAAGGAGAAGACAGGGAGGAACGGATGACCATGGAGCCTGTTTTCAGGATAGCTGGCTTGCTGG
CCCCTCTGTGGTCGTGTGAGAGCTAACACAGCCTTAGGGACTCCTGCTGCATTCCAGGATGGTTGTGAACCTGACTCAGGTGAAGGAGGGGATA
AACCTGGTTTAACCAATGGTAAGGTCGCGATGCAGCAACACATTTAATCCTAGCAGTCCAGGGGCAGAGGTGGCTCATCTTTGAGTTCTAGGCC
AGCCTAGGCTACACAGTGAGTTCTAGGCCAGCCTGGACTATACAGCAAAGGGCCATGTGAATGGGTAAGAAGCTGCCATTTTCCTTCTCTCCCA
GAGGATGCATATTGTCACTGTGTAACCTGGTGACACACAGCAGACCCTCTTGGGGTATCACGGAGCTGTGTCTGCCATGCATGCATCAGGAGCT
GGGCTAGGTAGCCGCATTTCATCCTGAGGCTCCAACCTACAAGCCTGAACTCCAGACACGTCCCATCCCAGCTAGAGCCGTCCTGTGTCCCTTT
CATTTCCAGTCACCTGAGAGCAGCTTCCCAGATGTGACATCTCAGCTCTGAGTTTAGAACCTCCATAAAGATGGCCAGGCTGTCATCTCTCTAG
CTCCGTCCCGTGCCTCATACAGGAAATGTGTGTGTGAACCAGGAAACGGACTCACTGCCACTCCTGGACATGACTTCTTGGAGAAAGCTGTGCC
TGTGTTGTCTTGCGTACAGCACACATGGCGCCCAGTGCTTGGCGTGAGATTCTCTGAAGGTTCCCAGAGAATAAAAAACATGGCAGCAAGGAAG
CCTGAGGTAAAGCAGTCAGCGCTGAACAATGTTTTTCCGTGTTCTATGATCCTTCTCTCTGCTGTGTAGGCTCTGGTTGAGGTGAGAGGTAACT
CAAGCTCTATTCAACTTTAATGGTGGAAAGTTTCAAATTTGCTAATACACCAAAGGAACTGGCATCCACTCACTCTCACTCCAGTCCAAAGATT
TACTTATTACTATATGTAAGTACACTATACCTGTCTTCAGACACACCAGAAGAGGGCATCAGATCTCATTAGGGATGGTTTTGAACCACCATGT
GGTTGCTGGGATTTGAACTCAGGACTTTCGGAAGAGCCATCAGTGCTCTTAACCGCGGAGCCACCTCTCCAGCCCAGGAGCTGGCATCCTTAGC
TCCCCACTAGATTCTGCAGTTCTGTTGCCCTGAGTTGGGATGGTAGAGGATCGAGATCATGTTTTGAGAGCTGACCTGAGTGGCGGGAGAGTTG
CTGGTTTGTTGGTTTTTTGTTTTTTTTTAATCTGTGTAGTAGCTGAACTACTGCAGAAGCCCCGATGCGGTCGTGGCACACGCCAGAAGTCTCT
CGGCTTCCCGACCATCAAAGCTTCATTTCTGCAATTTACTTCCTCAAATCACACCCTGAGGCTCCCTGGGGCTTGCCTTTCCGTGTTTGTGTCT
GGTTTCCAGCTGCCTGGAGCCCTTTTACTTCTGAAAAAGAGACTGAAGGAGATTCACCCCTTACTTTGGGGGCGAATTCTGTAGACTCACCGAT
AAATACTGAATCCGCATTAGTGTCGTGGTAGAAAAAGTATGAGCATGGCATAACTTTTCCCTGGAGCTATTTCATCCTGTCTTCCACGTATCTC
AGTCCATTCTGTCCCCTCTGAGCTCCCACTGGGTGTTTCCAAAGTGAAACAGGGGCTCTTTCCTGTGTTCGCAGTCTGGAGGACCTGCTAGGGG
CCTGCTCAGGACAAGAGTGGCCACATAGAAGCTCCTGAACAGGACCTGTGGCAGAGCTGACATTTTTGTTTTTAATGGAATGGGGCTTGAGGGT
AGGAGAGCTGTGAGCCTGAGTATATACAAAAAGGAAGGGGAAGATGTTTGTCTCTAGAGCAACACCAAGAACCCAACTAAATCTGTTTTCCCTT
TATTCATGCTGCCTGTAACCGTGCTGCCTGTAACCGTGCTGCCTGTAACCGTGCTGCCTGTAACGGTGGCCCCGGCCCTTCCTTTCTGGGGCCA
CACAGCGAGACCCTGTCTTAAACATATGTAGTAAAGTGTATTTACTGTATGGTTATATTGTTATATCTTAGTTACCATTTTTTAAAGATTTATG
TATTTTATTTATATGAGTACACTGTAGCTATCATCAGAGGGTTTCAGAGCCCACTGCAGATGGTTGTGAGCCACCATGGGGTTGCTGGGAATTG
AACTCAGGACCTCTGGAAGAGCAGTCCATGCTCTTTTTTTTTTTTTTTTTTTTTTAACATCTGCCACTCTTTTTTTTTTTTTTTTTTACATTTA
TTTATTTATTATATCTAAGTACACTGTAGCTGTCTTCAGACACTCCAGAAGAGGGCGTCAGATCTTGTTACAGATGGTTGTGAGCCACCATGTG
GTTGCTGGGATTTGAACTCTGGACCTTCCCAAGAGCAGTCGGGTGCTCTTACCCACTCAGCCATCTCACCAGCCCCCAGTCCATGCTCTTAACC
ACTGAGCCATCTCTCCAGCCCCTTAGTTATAATTTTCGTAGCTATATAGTGTTAAAGGTTTTAAAAGTTGAAACAGGGTCTCACTGTACAAGCA
CTGGGTAGCCTGGAACTGGAGACATAGATCAGACTGGCCTCAAACTCACAGAAATGACCACCTACCTGGCCCTCCATCTGACACTCTTTATGAA
TCATAAGCTGATTCCAGAGCCCTTAGCCAAGGTTGGCCTTTTTTAACTCCTCCCCCTGGGAGCTAAATACAAGCAAGCAGAAAGTGACCTGATG
GTAGAGAGGCCCTCTTCCTAATTCTAATGACACTGCATTGTCTCGGTCTCCAAAGATATGTCACTGGCAACTCAAATTTCCTCATGCCAAGTGG
GAAAGGGGAGGTGGCGGAACCTGAAAGAAAGGACGCTCTGAGCTGCCTGGTACCTGACGGTCCCTCTCCTTGCTGCTGGGGTCATATTCATGGC
AGAAAGCGAGGTGTGGTGGCACAGACCTGTCACTCTAGAACACTCGAGGCTGAAGGCAGGCCAAATGCAGGTCTGAGGCCTCCCAAGGTCAGAC
AGACAAAAGAAAGTGGTAAATCTGTCTGGACATTTGGTTCTGTGTCCCGCCAAGTTATGTGATCGATATCCTGACCTCAGGGGGCTCTGTCTGT
CTGACGCCAGGCACACCCTGTGGAGACGACAGCCCCATGGACAGAAAAGACAAATCATCATGCAGTCCTGGGCTTTGTTCCACACAACACACAC
ACACACACACACACACACACACACACACACACACACACACACACACCTATTGTGTGGTCATTACTTTCTCTCCCAAGTTGAGTGGAACTCTGAG
CATGGTCCTTGGCCAACTATGTCAGTCACCCAGTCCCTCTCCCCTCCCGGTCTCCATCACTGTCTCTGACTCCTTCTCTCCCTCTGTTTGACAT
AGGCGAGGCTCATTAGGTGAGCCACATTGGCCTTGCACTCTCTTTTTAAAGGATTTATCTATTTTTATTTGCTGTGTATTAGTGTTTCCCTGAA
TGTATGCGTTCTGTGTCCATGTGCACACCCGGTGCCCATGGAGGCCAGAAGAGGGCATTGGATGCCCTGACGGAGTACGTGCGAGCCACCCACC
ATGTGGGTGCTGGGAACTGAACCTGGATCCTCTAGAAGAGCAGCTAGCACTCTTAACTGCTGATCTTGACCTTGAACTCTCTCTTAACCCTCCC
ATTTCTGCCTGCACAGCACTGAGGTTAGAGGCATACGCATGTGCCTGTGCCCTCAGCTGCCTACCAAGCCCCCCCAGTCCCTGGTTGGCCTTTG
GGGTTCTCCCACAATCTTTCCACCATTTCATCCCTGCCCCCCAACCCCCGCCACATTTCTTCCTTGTCTAGAAGGCCAGGATAGAAAATGGGGA
ATAGGGCTGGAGAAATGGCTCAGTGGTTAAGAGCACTGACTGTTCTTTCAAACGTCCTGAGTTCAATTCCCAGCAACCACATGATGGCTCACAA
CCATCTGTAATGGCATCTGATGCCCTCTTCTGGTGTGTCTCAACACAGCCACAATGTATTCATATATGTGTGTGTGTATATATATGTATGTATA
TATATATATATATATATATATATATATATATATATATATATATCTTTAAAAAAGAATAATTTATGATATTGAGCCGGGCATGGTGCCGCATCTC
TTTAATCCCAGCACTTGGCAGGCAGAGGCAGGCGGATTTCTGAGTTCGACACCAGCCTCGTCTACAAAGTGAGTTCCAGGACAGCCAGCGCTAT
ACAGAGAAACCCTGTCTCCAAAACAAAAACAAAAAAAAAAAGAAAGAAACAAAATGGGGAGTAGTGATGTAGGTCACATGGTAAGGTGCTTGCC
TCACTCCTACAGAGCCCTGGTTCACCCTGCTTCCACAAAACCAGATCACTCACAACGCAGAAGCAGGAGTTCAAAGCCATCTTGTAGCAAGTTC
AAGGCCAGTCTGAGATGCCAGAGACTCTCTCTTTTACAAAAGATACTGGGCATAGTGGCACATTGAGTCCAGCCTCGTTTACAGAGTGAGTTTC
AGGACAGCCAGAGCTACATTGAGAAACTCTGTCTCGAAAAACTCTTCCTTGTCCTAATTCTAGGCCACTCAGGGCTACAAGAGACCCTGTCTCC
TCCCCTAGCCGCACCCCCTGCAGAAAAAGAAAGAAAAGAAAAGCGGTAAGAACTGGAAAAAAAAATGTATGCAATTCTCAGCCTTTAATTGCCG
AAAGCACTTTATTTTCCTTTGGGTGTTCCTGGGGATTGAATTCAGGGCAGTGGACATGGCAGGCAAGCATTCTAGTGCACGCTTCACCTGCAGA
CCAATGGCTGGAGGGCTCCCTCCTGGGAGGCTCAAAGAGTGACTTCCTTCTCATTAGCCGACCAGGAGCATCTGACTAAGAGATGGGCCGCTTA
GAGCGCTGGTGCCCAGGCACCCCTGGCTCAGAGCTCCATCTGTCCAGGTCTATCTTGGGGCCAACAGGGAGCCTGCAGCTGCCTTATTGCATAT
GCACACCAGCACCTGCAAGTCTGTTTAGCTCAGGGCCTCTTCTGTGTGTCCTTTCCTGCCTTTCCCTCTGTAGGAACATTCTCTGAAACCTCAA
ATTCCAACTTTAATTCTTTAGGGATGGCACTTCCCACACCCTAGCATATCTGCTCTGTTTCCCGTCCCTTTACGTGCTTTAGAGACGCTAGCTA
CTCGTGTACCCCAGCCCAGCCTCGAACCTATGATCTTCCCGCCTCAACCTCGCAAGCGCTGAGACGCAGGCGTACATCACCATGCCCACTTCCC
ATAACTGTGTCTGCTTCTAACATCACGCTGTGAATTTTAGGATCAAGAAAACACTCTGTCTTCAGATCTGCTGCAGGAGATTTGATTCTTCCCG
CGGTCAGGTCTCCGGTGGCTGAATGAACTCATGCGCTCCTAGACTCTCACTACCATCTCTAGACTTCCGGCCAATAACGTCTCCCACTAGGATC
AGGTCGATCTAAATGTTGTACATCCTATGGATTTTGTTTTCAAACGTCCAGTGAAAATGTCGTTTTCACCTCTGAATATTCTAGGCCATTTTTC
AAGGGTCCTAACCAATGGACCCCATCCTACCTCTTAGCCCTCTTTGCCCACACACCCCAGCGCCTCCTCCTGTTTCAGTCAGGAGGCCCAATTT
CTCTTCCATGCCCTGTCACCTTCCCGTCCTCAGGATTCTGGTGGCATCTCCTTAGCCCTCTCCTTTTTGCACTCGTAGCAAATGGGACTCCCGC
CTTCCCTCTGAGAAATCCACAGAACTTTCTACGCCGCCTCTGCCTCTCTTTGGCAGCTGAACGCCTTCGACTTGAAGCTTTAACTGCTTCTTTT
GTGGGGTTCCACACCTCACTTGGGCTGTGGTCTTTTTGAAGCCGAGGAGAATACCTAGGCCCTCACACACTGACACCTCGTTGCTGCGTGGAGC
CAGGAGTGACTGCAACCCTGTCTGGCAAGGCCTTGTGGGAAGTCAGTCGATGGATGAATGTGCCAGGGGATTCTGGGATGCCCCACTTCCTGTC
TTTCGCTTCCCTGCTACATCTTGTAGTCTGGCCATGTCGTACCCCCTCACCAGCCCCAGAGCAACAGGGACAACCAACAGTGGGTTCAACTTGT
GTGCTCCAATCAGATTTCTCTCTCTCTGAGTTGACTTATTTCAGCCCTCTGTTATGGTGACACAAGGCATCAGGGGAGGGGGACAAATTAGAAC
AAAGATAATGATGATGTATGAAAATCCTGTAACTAAGCCCATTAATTTGTACTTTTAAAAATAAGATTTATTTATTTCATATATGTGAATACAC
TGTTGCTGTCTTCAGACACACCAGAAGAGGTTGTCAATCCCATTACAGATGGTCGTGAGCCACCATGTGGTTGTTGGGAATTGAACTCAGGACC
TCTCGAAGAGCAGTCAGTGCTCTTAACCTCTGAGTCCTAATTTGTACTTTTTTTAAATTTTTATATCCTGTTCTTCACAGTAGCCTCTCCTGGA
AGCACCAACCTGAGTTCTTCTTTAATTCTTTCTCAAACAGCATATCTAAATTTTGCGATCATAAGAACAAGCCAGGAGAGTACATATTCTATGC
AGAAAATGATGACGCCCAGTTCACCAAAATGTTCACGCTGAATATAACAAGTAAGTTGAATCTCATCTTGTCTATTTTATTCCTCCATTAATTT
TTAATTAAGAAGAGCCAAACACAGCTTAGGAGGGACGATATCAAACTAATTTAAAAAAAAAAAAAAAGGATTATTTGCATGTATATGAGTGTTT
TGTAAGTGGTATGTATGTCTCTGGCCCACATGCATGCAGTGCCCACAAACCCCACAAGAGGGCGTCTGATCCCCTTGGAACTTGAGTTACAGAT
GGTTGTGAGCCATGATGTGGGTGTTGGGAACCCAGTTCCTCTGCAATCACAACCAGTGATCCTAGCCTCTGAGCCATCTCTCCAGCCTCTGAAA
CTGCTCTTGTAAGCGCCATCCTTCTTGTGTGTTGGCTGTAGTTATATATGTCCCTTTCTATACTTGTTCTCTCAGCTAGTACATGTTCCATCTC
CGATGTCCTCTGACTTTACTGCCTTCGCCCTATGAAAGGAACACTAAGGAAACGCTATACAGTCACCTGCTACTTATTTCTTTTAATGATTTTC
GTCTTCGTCTATGCAAAATAAGAAAAAGACACTATATTTCATTAAGGTTTTTGCAGATTTTTTTTACCTGCATTTTTTTTTTTTACTTGCATGT
ATGTCTGTGTGAAGGTGCCAGATATTGGAGTTACAGACAGCTATAAGCTGCCATGTCGATGCTGGGAATTGAACCCAGGTCCTCTGGGTGGTAT
TTTTAAAGCTAAGTGTTACATTGACGTTTGCAGATAGATGGAGGTTCTACACTTCAGCTCCCTCTAGGAGGTGAGTCATAGAGACGTGTTCCCT
CCACCAGTCAAGAAAGTTTTGTGACAGAGGAGGAAGGGACCAAACAAACTTTGAGGCATCCTAAATAAGGGGTTGTTCCAGGGGTACATAGCAC
CTGGGCTAAGAAGCAGCCTAAGTTGAAGCTAGCTCTGAACTGATTCTAGAAAAAAAAAAAAAAAATCTATCTTCCATGAGCTTACTGCGCGCTA
CTTTCTACAGAGAAACCTCAAGTGCTAGCAAATGCCTCAGCCAGCCAGGCGTCCTGTTCCTCTGATCGCTACCCGCTACCCTCTTGGACCTGGA
AGAAGTGTTCGGACAAATCTCCCAAGTAATGAGAACCCTGACGTCTCTTGAAGTGGATGAGCCAAGCCGGGCAGTGGTGGCGCATGCCTGTGAT
CCCACCACTCGGGAGGCTGAGGCAGGACGATCTTAGAGTTTGAGGCCAGCCTTGGGGAACACAGTGAGGCCCTTTCTCAAAAAACAAGAAGGAA
AAAAAGGAAAGAAGGGAAGGAAGGAGGGAGCGAGGGAGGGCAAGAGGGGCAAGGGAAAGGAGAAAGAAAAAGAAAGGAAGAAGAAAAGTGAGAA
TAAGGCATAAGATTCTATCACCTGTTGCCATGGATACAGCTTAAGAATGACATTGAAAATGCTTACCCTACAGCCACAGCTTGTTTTCTTTGGG
AACCATCTGTAGAAACCCTGCCTTCCTGTCCTACCATGACCCCACCCATCTAACTTCCTGTCCTACCATGACCCCGCCCATCTAACAATCCCTT
TCCACCATTTTTTTTTTCTTTTCAGTTGCACGGAGGAAATGGGAGAAGGAGTTTGGAATAAAAAGGCTAACAGAAAAGTGTTTGGCCAGTGGGT
GTCGAGCAGTACTCTAAATATGAGTGAGGCCGGGAAACGGCTTCTGGTCAAATGCTGTGCGTACAATTCTATGGGCACGTCTTGCGAAACCATC
TTTTTAAACTCACCAGGTGTGCAGCCATTTGCTGTTGTGATAAACACACCCTGTCCCCAGAAATTCCCCCACCTGAAGTTGGGCATTGTGGCTG
GCCTTTGCTGGGGAATTCTTATGAGATTGCCCAGTTCTGAGTGAGCATAAGGTCTTTTTGAGTCAAGCAACAATCCCCAGCAGACTGTAATTTG
ACGTTTCAGCACCCAGTTATCCTTAGGCTGTGTGACTCACAGGTCACGGAGCTGTGGAGTCTGGGAAATCCATCGTGTGAAGATTAGCCTCCAG
AGGTGCAGGAAAGCAGACTTAGTGATCTGGAATTTCTGTCCTTTTCCATTCTGTCAGTTCCCTTATTTACTTTGAGCCGGCTAGTCTAGATTTT
GGAGTTGTGTTTAGAGTCTTTCTAAAATGACACTAACAGTTTAGGGTCACCAGATAGTATTGATTAACTCCAGGGACAAAAGCAAGAGGCTCCT
AAGTTCACGTTCAGCCTGGGCTCCATAGTAAGACGCTGTCTCAGAAAAATGCCAAACAAAGCAAGCACGTAAGTCAAAATTGTGGCTTTGGTCT
CAGTAGTTAAGAACACAGGCTGCTCTTGCAGAGGACCTGGGTTTAATTCCCAGTACCCACATGGTGGCTCATAGCCATCTGTAGCTTTAGCTCC
AGCTCTGGGGGGTGGGGGGGACCTTAACGCCCTCTTCTGGCCTCTGAGGGCTCCAGGCATGTACATGGTACACAAACACACATGCAGGCTAGCA
GTCATACACATAACTTCTCTACATGTGTGTGACGAACCTTGATAACAAATACACAGACTTCTTTTTACCTGACACGGGCTCTGTAAAAGGTTTA
TATGGGCTTTATTCACGTGACATCATGGTCCAGTTTTTAAGATGGGTTCAGAATCGTTTCTGATTTTTCTGGGGACTCATTGTTTACAGAAACA
AACCAACTTTCTGTGGGGCACCCAGACAGAACACACAGATTGCTCATAAGGCCTGAAGATGGTGGTTACTTGAACAGGATGTGAGAGACTCTAA
CAAGAGACTTAAACAGGCCTGCCTGTTTTATCTCGCCCCCGCCTAGTGATTGCTTCTCTTGCAGGCCCCTTCCCTTTCATCCAAGACAACATCT
CCTTCTATGCGACCATTGGGCTCTGTCTCCCCTTCATTGTTGTTCTCATTGTGTTCATCTGCCACAAATACAAAAAGGTAAAAACCGGTTGGCG
AAGGCTCATCCCTGTCGTGACTCTGCAGCGCTGCTCACCCGCTGTTCATCTCTCAAGCAATTTAGGTACGAGAGTCAGCTGCAGATGATCCAGG
TGACTGGCCCCCTGGATAACGAGTACTTCTACGTTGACTTCAGGGACTATGAATATGACCTTAAGTGGGAGTTCCCGAGAGAGAACTTAGAGTT
TGGTAAGGATTGACTGTTCAGAGCTTCGGTGGCATTGCCTCTGCCTTGCAAACATTTTTTTAACCCGCACTTACTCCATCTTTACAGGGAAGGT
CCTGGGGTCTGGCGCTTTCGGGAGGGTGATGAACGCCACGGCCTATGGCATTAGTAAAACGGGAGTCTCAATTCAGGTGGCGGTGAAGATGCTA
AAAGCTACCAAAAGGTGGGGTTATCTCAGCAAAGTCCCTCAGAGAACGAGTCCAGCTGCCTCCCCTCCCCTTCTTCTGCCCTCTGCATTATTCT
GTCTGCTAAGCACTGAGGGTTAACGAGAAGCAGGCAGGGGCAGTCGTGAGCAAAGACTGCAAGCAGGGAAGGCAAGCCCCCACCCCTTCCTCTT
TCTCATTGTTCAGTTGGTATCAGCTTCTGTGTTACAGTTTGACACAGATTCTGGGTAGAAAACACACCGGGGACTTCTCACTTCCCACTCTGTC
CCATCCTCTCCCATCTGGCATCCACCCTCGAGCAGGGCCACCCTCAGCCGATTCTTAACCCAGCGCAGAGGATTGAATCCAGGATTTTGTGAAC
GCTAGGCAAGTCCTCTACCTCAGAAATACATCCCCAGCCTGTCATTCTATAACACGATGTCTTGCTATATAGGTCAGGCAGGCCTTGAACTCAC
AACTTCAAGAATGCTGAGATGTATCATCCCCTCGGGACTGATGGCCCATTCTTTTGCTGAGGTGTTCCCTGTAAGGATAAAGGGAGCCCCTCTC
TCCAAACACACACACACACACACACACACACACACACACACACACACACACACACACACTACAGAGAGAGTGACAGAGACAGAGAGAAACAGAC
AGAGACAGAGAGAGACGCAGAGAGAGACAGAGACAGAGAGTCACTGAAGTGCATTGCAGTACGCAGACCAAAAGGAGAAATGGCACACAGGACA
TCATGGACAGAAATCTCACAGTCACCTCCTACCCAGGTGACTGATGATGCTATACATCCTGGGTTACAGAAAGAAACGGAAGCTGGAACTGTTA
GAGGATAGCTTTAGGATACATACATTTGCCGGGCGGTCGTCGTGCACACCTTTAATCCCAGCACTTGGGAGGCAGAGGCAGGTGGATTTCTCAG
TTCGAGGCCAGCCTGGTCTACAGAGTGAGTTCCAGGACAGCCAGGACTATACTGAGAAACCCTGTCTCAAAAAAACAAAACAAAACAAAACAAA
ACAGGATACATACATTTTCTGTAGATCAAATTCAGGATGTGAAAAGGGATAGACTTTCCCCTCTGATATCTGCAAGGTACAAAACCTTGAAGCA
ATGTCAGAACACGATCACTTGTTACATCCGGAGAACAGATATGAACGTTTCTTTTTACACTGTTTTTCTTCACCCGTACATCCTAGTTCCACAG
AATAAGGAGTGTCGTCGCTGTGGTATTCCCATATGTATACTTTGGTCCAGTTCACTAGCACCGTTCCCCCTCCCCTCGTCAATTCTCTTCCTGT
CGGTCCATTTCTTCTTCTCAAATAGCTCCCCCCTCTACTTCCGTGCCTTTTCCTTTTAATCTCGATCCTACATATGAGAGATGATGCACTGCTT
GTCTTCCTGAGTTTGGCTTTTTTACTTAACATCCCAGTGTCTGGTTCCATCCATCTTCCTGCAGGTGGCCCATCCCGTTCTTCGCAGCCAAATA
CACCACTTCCTATGGATCGTATTTCCAACATCCATCCATCCATCTGTCGCAGGCCCCTAGGCTCGTTAGATAGCATGTTGATTGTAATAGTGCC
AACATCGACTTCCTGTGTGGAGTTCCTTATGCCTCCACTCGCTCCACGCACTCACCAAGGACCCCCCTCTATAACCCAGCTTCATCTCCTGTAC
CAATAGCTCTCATAACTGGTTCCCTAAGCCTTGGCTTTGTGTGCCCAAATACTTGTATCTCAGCACTGTTCATCCAGGCTGAAGTCCTCCAACC
CTGGCCTCCATCTCTACTCCAGCCTGGTAATTACTGGAACGTTTCAGTGAGACTACACATTCCACACAACCATAGAAACAAGGAAGCGGGTTCC
ATAGCTGGCTCTCTCTCAGCCTTCCCCAACAGGTTTCCTGCACACTGTCTGCTGGGCCCATCCTCATCTCTCCGTGGTCTCTGTGGTGGTCCAG
TTCTGTCTCTCCTAGAGACTCTTAATGGTAGCTTTTAAAAAGCATCCCACCGATTCTGCTAGGGGCTATGTGCTGAGGTGGGGCATGGCCACGA
TGCAGAACACCTTCTTGCTTGGCACTGCCCTAAGCATTGACAATGGCTTTCTACTGCTCTGAAAATGGTTCCCACACGGGCTGGAGAGATCCCT
CAGTCAGTGGTTAAGAGCACTGACTGCTCTTCTGAAGGTCCTGAGTTCAAATCCCAGCAACCACATGGTGGCTCACAACCATCTATAATGAGAT
CTGAATCCCTCTCCTGGTGCGTCTGAAGACAGCTACAGTGTACTCACATATAATAAATAAATAAATCTTAAAAGAAGAAAGAAAAAAGAAAGAA
AAGAAAATGGTTCCCACAACTTTGACCAGTGCAGCCGTGGCTCAGCCTTTCCGCCTCATTCTTAACCTTCTTTCGCTTCCCCAGAGTGCCTCGT
TTCCCTGCCCACAGGCTTTGCGCAGGTGAATCCTTCCACCTGCTCTTCCCCTTTTGCTGTAGGAAGCCACTTACCTCTCAAATGTCAGCTTTGA
GATCACTTCCTCAGGGACACCTCCTTTCACGCCATGGACAAGATCAAGTCCCTGGGGACCCTGGGTGTTCTAAGTGGTACAAGACATACTCAGC
ATGCTTGAGGCCCTGAGACGAATTCTAACATTAAAAATATAGTACGTCCTAAGAACACTATGTAGACTTCTCCCAGAATCGGAGACTCTAACAC
AGTTGCGTTTAGGCATTCAGTTAGGTTCTAAGCCCTCTGAAAGCGGCATGTGGCTTTTCCCGTGCTGTTGTTACTTAATACTGTGTATTCTGCT
GCCTCCGCCTGCGGTGGTCTTGTGTGACTCCTTTCGGTTCCCCACTGAGGGAGAACTACAGGGTCCTGCTTTTTCGGGCTGTCTGGTGTCCCCC
CTAGAGTTCCCCCACAGGACTTTCACTGTCTCTCTCTCATCTTGTGTGGTCATCCCTCAGTTTCTGCAGGAAGTTGGTTGCACAGTCCCCTTTG
CAGACGCCAGGGTCCCAGACGATCAGGTCCCTTCTATAACACAACAGTATGTGCATAGAACCAGGAGTCCCTGGAACAGAGACCCCAAAGAAAG
GTGTTACCCTTGTCCCCGAGGCCCCAAAACCCACGGATGCAAGGGTGCCCCAGGCAGCTATGCTAGCCTCAGTGACCAGAGCCCTGGGAGTAAC
AACCCATGCTTGCATCCTAGCAAGATCGTGGACACAGTTTGCTCCACTGCAGAGATTGCATTGGTTCATGTGTTGTCTTCTTTAACTTTCCCCC
ATTGACCACACTTACCAATGGAAGTTTCTAGACCTGAGGAGCAACTTCATGTTGGAGACATCTGTGCTTGCTGACCCTCCTCCTTCTGGTCTTC
CTATCAGCTGAATAATCTGATTTTTTTTTAACTACGAAAATCACGTTCTGTTTATCGTGTTGTCTACCTGCTTTGAGAGCTGGGTGGAAGGACT
TTTATTTTTCTCAGGGAAAGTCAAGTAGAAATGTATATTCTTGCTGGGCATGGTGGTGCATAATTTGATCCCAGCTCTCAGGAAGTAGACGTAG
GCAGGACTCAGTGAATTCGAGGCCAGCCTAATCTGCACGGTGAGTTCCACGCCAGCCAGCGCTATATAGTGAGACCCCGTCTCGAGGAAGGAAG
AGATTATACATTCATATAGTTAATATCTATAACTCACGTTTTAAAACGCTGTCTTAAAACACAGAACATTATTGTCTAAATTTATGTGTTATTT
TTGTGTCAGTTTTTCTCTTCCAGTTTTGAATGTGTGTAAGTTGTGATCTGAGCCAAGGAGAGCCTTGGTTTCTAAAACAGCATACAGTTCCCTG
AGGTCAATCCTGTTTCTGCTCCTCCACCAACAGAGAAAGCTGACAGCTGTGAAAAAGAAGCTCTCATGTCGGAGCTCAAAATGATGACCCACCT
GGGACACCATGACAACATCGTGAATCTGCTGGGGGCATGCACACTCTCAGGTAATGTCTACACATCTGCATATCGAAGCCCTGTTCCACACTAC
TGCAGCCCAAGGGAGCGAGGCCTGCGCTCTTTCCTCAGCCCCAGTTTGTAGACGATGGGTCTGTTTCTTCCTTCCAGCCCCATGCTCCCAGAAA
TAAGACTCAGACTCAAAATATATTTACAAATACCTTGACCATAGAGCTAGGCTCTCCTTTGACTAGATAAAAACTTAATATAACCCATTTATTC
TAATCTACATTCTGCCACCTGTGCTCGGGTGCCATGAGCCTCTCTCGTCTCGTTTTCTCACGTCTTCCTGGGTGAATCTCCCAAGCCTGGCTCT
ATCCCAGAATCCTTTCTGTCTCCCAGATGTCCTACCTCTTATTTCATTCCTAAACCATAGGCCATCAGACTTATATGGGCATAAGCTATTCTCT
TCACACCAGTTCAAGTGGAATTAGACGGTGTCCCCTCTGCAGAGCACATGACCCCGTCTTTCCCCTACTCTATCTGTCACAGACTCCTAACCGC
CTGAGAGAAAGCGGCCACCCTGCACATTCATGTTGTGGGGTCTGAGCTCCTCCCTAGACTGTGAAGCTGGCCTAAATGCAGTAGTGACATCAGC
TTCAGAACTCAGCACACACATACTGATATGTTGATGATGGTGAGCTCAGACGTTTAGAACTGGAGAGAAAGGCTAGAAGACAGATTCTTGTATA
CAGTGCTGAGATCGAGTGTAGTCTAATGTACGAGCTCATTTAAAGCACCTTCTGAGGGCAAGCAGAGCAGGAAAGGCCCAGGTCCTGTTGCGCT
ACAGTGTGATTTTGGAGGAAAGACCTGACCTGTGTCTAAACCTGTAACTACAATTGTAACTGTTTCAGGGCCAGTGTCTGCAGTCTGTCTAACC
TTGTAACTACAATTGTAACTGTTTCAGGGCCAGTGTACTTGATTTTTGAATATTGTTGCTATGGTGACCTCCTCAACTACCTAAGAAGTAAAAG
AGAGAAGTTTCACAGGACATGGACAGAGATTTTTAAGGAACATAATTTCAGTTTTTACCCTACTTTCCAGGCACATTCAAATTCCAGGTAAGAG
CTCCATCAGAGGTTTATGGCTGTAAACCCCGGGACAGACAGAATGACCACTGCACACACCTACCTGCAACCCCACCCGGGCAACATTCGGAGTT
GCTGTGTGTGGCCTGAGACCTAAGGCAGCTATTTGTTTATGCTGGGAATTTCTGTCCCATTATTTCTTATTTTACTTAATAAAGTTTCAATTAC
CCACCAGAAGACATGGTTCAAAGATCCTAAATAGAAAAGTCCAGAAATAAACAATCCTTAAGTTTTAAGTACCTTTACAAACAGCTTATTAATT
AACATTATACTATCTTATCATTCGTTATTATTGTTCGTGTGTTACTATGCCCAATTTATTTGTACTTTACTTACTATTATATTTCATTTATTAT
TTATTATTGTGTGAGTTTGTAGTGCTAGGGGGCAAACCCAGGGCTTTATGAATGCTTGACGCATCCTCCCTCTCTGAGCTACATGGGTAGTCTG
CCATGCATGCTCTAGAGGAACTATCCTAACACAGACGTGCGTAGCCAATAATTAGATCCTTTGGTTCATTTTTGGTCACTGGGCTATTAAATAA
ACTAAAAGCATTAAGCCTTTTTTCAAAGGCAAGGGGAGTTGAAAACTGGGATAAACTCTTATGGTGGGAAATACTGAGTCCTGACCTATTTGTA
GTGGTGCGGGCCTCTCTTTGATGCGCTTGAAAAGGTAATCTGGCCAGACAGTGGTGGTGGTGGCATGGTGCACGCCTTTAGTCCTAGCACTCGG
GAGGCAGAGACAGATCTCTGTGAGTTCAAGGCCAGCCTGGTCTACTGAGAGTTCCAGAGCAGCCAGGGATAGACAGAGAAACCCTGTCTCTAAA
AACCAGACCAAAACAAAACAAAAACAAACAAACGAAAGAATGAAAGAAAGAAAGAAAGAAAGAAAGAAAGAAAGAAAGAAAGAACAAGCAAAAG
GAAAGACAGAATCTGTTGCACCTATTTGCTTATCCCTCAGAGGAGGGGAACGTGGTTCACAGACGCTGGCTTGAAAAGATGGCGCTGGAAATGT
ACACCTTCCCACGAGGCAGAAACCTACACATCAAACACATTGATGAAAAGAATATCAAAACTCTAAATTTGTAAGCTCTGTGTTGCATGAACTC
TGAAAGGTGAAATGGCCTGTGTCTGGAGCAGCAGGATGCCCTGTAAATTGGTTCCTCTCTTTATAAACTTGAGGACATAGTAATCATTTACTGC
CCCAGTTTCTGTTTTATGTACCCAGCTTACAGCGTGACAGTGACTGAATCCCAGCTCTTATCCAGCTTCCCTCGGCAAATTCCAACACACAGAT
GTTTTTAATGTACACGGGGTACCGTTGACAAGCCAGCATCGTGCTTTCTGTTTAAAAGCCCATTTGTAACTGAAATCTGTTCCTCTGATGAATT
GTCCTTTTTGTAATAAAGTCTCTGCTCAGAGGAACAATCTAAATAACAAAGGAACAAATTTATTTTTAATAGCATGCCTGGTTCACGAGAAGTT
CAGTTACACCCGCCCTTGGATCAGCTCTCACGGTTCAATGGGAATTCAATTCATTCTGAAGGTAATGTTTTACTTTTCATTGGTATTTTACACT
CACTGAAATGAATCCAAGAGTCCCATGCCAGCTATTTTTAAACTTTTTAAAAAAATTATGACTGTATGTGTGTATGTGCATACACGTGTGCATG
CATGGTGTGTATATGTGTGTGCTGTGTGTATGTGTGTGTTTTATGTGTATATGTTTATGTGTGCTGTGTGTGTATCTGTGCATGCTATATATAC
ATATACATACATGTATATATATGTATATATATGTATTGTATGCATGTATGTGTGCTGTGAATGTTTGTATTTGTGTACATGTGTGTGTCGTATG
TGTGTGTATGTGTGTCGAGTGTGTGTATATATATATGATGAATGTGTATGTAAGGTTTGTGTTTATGTGTATATGTGTTTTTGTGTAGGGTGTG
TGTTTATATGTATGTATGTGTGTATATGTTTGTATGTGTGTATATCTGTGGAGGATATGTGTATGTAAGTATGTGTGTGTGTTTGTGTATAGAG
TATGTGTTTATGTGTATGCGTGTGTTGTATGTGTGTATGTGTGTGTTTATGTGTATGTGTGTATATATGTGTGGAATATGTGTATGTATGTGTG
TGTTTGTGTGTAGGGTATGTATGTATGTATGTTTATGTGTATGTGTGTGGTATGTATATATGTATATGTGTATGTTTGTAGGTGTATATATGTA
TGTGTGATATGTGTATGTATGTGTGTGTTTGTATGTGTGATATATATATACACACATATACATATATATGTATATGTGGGTTTGTATGTGTGTA
TATGTGTGTGATATGTATATGATGTGTGTGTATTTGTATGTGTGTGGTGTATATATATATGTATATATGTTTTGTGATATGTGTATGTATGTGT
GTGTTTGTATATTGTGATGTTTAAAGATATATATGTATATATGTATACGTGTGTGTCTGTGTGTGGTGTCTATATATATATATATTTATTTATA
TGTATATGTGTGTCTTTGTATGTGTGTCATATCTGTACATATGTATGAATCTGTCTCCTATATATATGTATGTGTGTATATATATATATCTGTC
TGTGTGTGTGTGTGTGTGTTTGTATGTGTGTGGGGTATAAGTATATATGTGTGTATGTGTTTGTATGTGTATGAAGTATATATATGTACATGTG
TGTATTTGTATATGTATGGTATATGTCTGTGTATATATATGTGTGTGTGTGTGTGTGTGTGTGTGTGTGTGTGTCTGTTTGTATGTGTATATGT
GTGTGTGCTTGTGTGTCGGCATGATCGTGCCGTGGCACCCATGAAGGTCAACTAGTAAGAGCTAGTACCAGGGCTCAGTACCAGGGTGTCAGCC
TGATGGTAGCTTTTCTCCAGTGAGCCATGCCACCAGAGTGGAAGCAGTGTGTCTTTGCTCTGGTCAAAGGCAGACTCTGTCAGTGCACACTTTC
TCGGAAAGTCAAAAGCTGATAGTTGTGAACTCTGTGTCCATGGTCAACAACAGGCACCTGAACTGTTTTCTTTGTTCGGAATATTCTTTATAAA
GTCATAAGCTAATTGGAGCCAGCTTGTACCTGGTAAGACTGTGAGCTCTAGAATCAGAGTTTGGTTATGTTCCAACTCTTTTCCTTTCGAAACA
GTTGGCTCCAGACGACAGTCCCCACTTCTCACTTATAAAATTGGTCCAATTCTACTTTCCTCATAGGACTGTTAGGAGGCATACACACAAGCTT
GTGAAGTATAAAGTACAGTCCATGAAATGTGGTACACAGTTCGTCAGTCTTTGCTTTTTTCTACTGACAGATTTACCTAGCATGAAGGGAACGA
GGGATAATGTTTGGGAGTTTTGCTTACCCTCTCTGTCTGTGCACCACCTGGGTGCAGTGCCCTTGGAGACCCAGAAAAGGGCACTCGATGCTCT
GAGACTGGAATTGTGAGCCACCATATGAGTTCAGGGAACAGAACCCAGGTCCTCTGGGAGAGCAGCCAGTGCTCTTGAATCACTGAGTCCCAAG
AAGGATTCATAATTAGTATTCCTTGTCTTAGCTCAGATGGCTTTAACAGATTATTAAAGACTGGGTATCATAAGCTACAGTATTTCTCACAGTT
TCAGAGGCTACTGCTTTCAAAACTGAGGTGCAGCAGACACTTGCTTCTCACATGCACATGCTGATCTTTCTGGGTCCTCAGGCCTCACACAGAG
GCAAGAGTACACGCTTTCTTCTCTTTAAAAAACTTTAAAAAAAAAGTATTTAGTGTGTGTCTTGTGGGGGAGCAACTTACAGGAATCCATTCTC
TCCTTCCACCATGTGGGTTCCAGGGATTAAACTCAGGTCTTTCGCCTCTGTAGAAACACCTTTACCTGACAAGCCATCTTGCCCATTCTCCTCT
TCCTATTTTATAGAGTTCATGGTCCCATTTTTATAACCTGGCCACTTCACAAACACCCTACTCCTGATACCATTGCTTGAGAGTTCGTTTGCCT
GTATGTGTGTATGCATGTATGTATACACGTATGTATGTATGTATGTATGTATGTATGTATGTATGTATGTATGTACGCACGCATATATGTATGC
ATGCATGCATGCATGTATGTATGTATATGTGTATACATGCATGTATGTACATATGTATGTCCACTGTATGTGCCTGGTACCTTTGGAGGCCAAA
ACATAGAGTCACATTCTCTCCAGCTACCATTGTTACAGACAGTTCTGAGCCATCATATGGGTGCTCCGAACCAAGCCTGGGTTCTCTGTAAGAT
CATCCAGTGTTCTTAGCTATGGACCCGTCTCTCCAGCCCCTGGGGATTTGAACAGGGCTTCATTCCAGAAAACAGAATGAGTGTTCAAGTAGAC
TAAGAGGAGACACGTTTATAGAGACAAAAAAATGACTAAGGGCAGGAAAAAAAGGGACGCAGAGATCAGGACAGGAATCACTCTGCACAACTTT
AACCCAAGCATCCAGGCGGCAGAGTGTTAGTCTGTGAGTTCAAGGTCAGCTAAGTCTACATAGTACATTTCGGGACAGCCAGGGCCACATGTTG
CTTATGAGGACAGGCTGATCATTCCAATCATTTCCCCGGGTTTGGAGTCAGGAAATGGACAAGGTGGCTAGTAGCTTAGCCCCAGGCTCCCCAG
GAGAAGCTCTTCTGTAAGGTTTGAAGCAGAGGCCATTCCATCTTCATGCCCAGGAACCTGGCCTGCGCAGAAGGTTTGATGGTTGCTTCGGATT
TCTCCGAAGGTCAAATAATCCTTTCTCTTTGTATGGCGGACCTTTTGTCTGGGTGACGCCATTCGATTTGGTCTATTGAGTCTAGAGCAGGAGA
TCAGATCAAACGCCTCTTATAAATATCTCCACACTGAGGTCGCCTTAGCTGCCTCTCACAGAGGTCTGATAGGGTACTGCCTAGTGTCTGGGGA
AAGTGACAAGTGGACGTCTTTTTACAGATGAGATTGAATATGAAAACCAGAAGAGGCTGGCAGAAGAAGAGGAGGAAGATTTGAACGTGCTGAC
GTTTGAAGACCTCCTTTGCTTTGCGTACCAAGTGGCCAAAGGCATGGAATTCCTGGAGTTCAAGTCGGTAAGTACCTTTTAAAGAGAAAACCGA
CAGAAGGCGCAAACACAGAGCCGCAGAAAGGAATGCATGCGTGCAGCTTTGAATGAGCCGTGTGTCTACGTTTGTTCCATGGTCATTTTAACAT
GCCTCCCTTGCTGTCTGCCCTGCTTCCCCTAATTCTTTTCATACCTGCAGCACGAAGGCCCAGAGTCACTGGTTAGAGCCAACGTCCCGTGGGA
TGTCTAGGGAAGTCCCAGAAAAGCCATACTGAAAGAAGCACAGTATCACAGTATCGTCATCCCTGCCAATACAGGGATTCATTCGGGTTGTTCC
CTGCAGTCGGGGGCATGAGCAGAGGCCCAAAGTTCACCAGCTCTGCCACCCCAGCCAGCCAGCCTGAACAGATTCAGCCTAGGCTAGCCACAGC
GCTGTGGAACCTGTCTCTTCTCAGTGGCTGGCCCTGTATTCACAAGTGCTGCAGCAGGAAGACTGCGGGACCCACCCCAAACCATGACCTCCCC
GTGCTGCGCTAGGCAATGCTGCTTCTCCACCCGCTGTCCCCTGTCATTCCACACTATAAGCCACCAAAGCCTCAAATCTTTATGTCTGCTGAAG
TAACATGGTAGTAAACAGATTAGCGGGGGTGGGGTGGGGGGGGGGAGACAACATCTTTAGCTGTGTACGCACCTACACAAACTATTGAAACACA
AGGAAGGGCTAGGTTGGTGTATCTTACTAAGTTTCTCCATAGGAAAAGATGTCTGTGTTTCAGAGGGGTAGTATGTTAATTAGGGCTCCCTAAA
GAAACAGAACTGATAGAATTAAAAATAATACATATATATGTATTATTTTTAATTATAAAGTTATATATAGGGCTGGAGAGATGGCTCAGTAGTT
AAGAGCACTGACTGCTCTTCCAGAGGTCCTGAGTTCAATTCTCAGCAACCACACGGTGGGTCACAACCATCTGTAATGGGATCTGATGACCACT
TCTGCTGTTTCAAGAGAGCAACAGAGTACTCATATAAAATAAATAAATAAGTAAAAATTTAAAAAGTTATATATATATAAGTATATATACATAT
AAAATTATATATTATTTTACTCTCTATGTAAAAATATTTTATGCACAGACATACACACATACACACACGCATATATGGGGGATTTGTTAGAGCG
GCTTACAGGCAGCAGTTCATGTAATCCAACAAGGTGCACGAGACTGGATGTCTCAGAAATCCCCATCTGGAGTCCCGGGGAAGTCTTAGAAAGC
AGGTGGTCCTGGGTCTACATTGGGATCCTGAAGAAGTCAGTGAGAAAGCAACCACAGCAGCAGAGCAGATGGACTTGCCAGTAAGAGTGAAGGC
AAGCAGGCAAAATGCAAACGCTTCCTCCTTCATACCCTCTATGGCTGCCACCAGAAGGCGTGGCCCAGGTGTTAGGCAGGTCTTCTGACCTCAG
AATCCAGAAATTCTCTGTCCCCCGTGCTGCAGAGCCGCAATGACCAGTTTAGATAATCCAGCACAGTTTGTTCATGTTCTCTAATTACAGCAGG
CCTTTTTATTTTTACTCTTAGGTGTGTTATGACATGGACTTTTGAAGAGCATCCAGTTTTTTTTTTTTAAAGATTTATTTATTATTATATCTAA
GTACACTGTAACTGTCTTCAGACGCACCAGAAGAGGGCATCAGATCTCATGGATGAGATGTGAGCCACCATGTGGTTGTTGGGATTTGAACTCA
GGATCTTTGCAAGAGCAGTCAGTGCTCTTAACCACTGAACCATCTCTCCAGCCCCGGGCATCCAGTTTTTAGACGGTTTGTCTTCACTGCAGCC
TTCCGCTCCAATCATGCCAAGCACTGTGCTCTTCCCCACTCTGTGACTGTGTCACACATTTGTGTGGCTCCATGCGACACTGTGCTGGGGCAGA
AAACCAATGAGGATGTGACTTCAGGGCCCACAGGTTTTATGTTTCTAGGAGAAAGACAAGCAGACCTATACATCAGATCAGTGTCTTGTGATTG
ATACTGTCACTAAAGTTAGCATGGCTACCCCAAGAAAAAAGGGGTGAGGAACAGGCAAGAGAGCAAGAGAGCCTCCCTTGGATGGAATCCAGAG
GGAGAGGGACTAGTCAAAGCCAGTCCAGGCTGGGCAGGCTTCTTGCTGGTCAGAAGGAGCCTTCCCAGAGCAGCTGGGAAGAATACGGGCAGGG
CAGGTAGTCAGGAGGACATGATGGGGATGGGGACAGACATGTAGGAGATGCCACATGAAGAAAGCCAGACTTGGAGAAGGAGGGCAGGAGTCAC
GGCACAGACATTCCTGTTTTTATAGGCTTTGTTCTTTTAAAGGCTGAGGAGAGCGTAGTGGACCCCCATGGGACACCATGTGCTCTCTTACAGA
GTTCATTCCCTTCAGAGACTCTGGGCTCTACTCTCATGTACTCCTCGAAACTCATCGTTATCTTCTGTCTGTCTGTCTGCCCCCTGTACCCTGT
ATGTGCATGTGAAAGCAAGTGTGTGTGTGTGTGTGTGTGTGTGTGTGTGTGTGTGTGTGTGTGTGTATGAGAATGTGGGGCCCATGTACCGTAG
TGTGTGTGCAGAAGTCAGAGGACAAACTGTGGGAGTTAATTCTTCCACTGTGGGACCCAGGAATCGAACTCAGGACATCAGGGTTACATGGTTA
ATGCGTTTTCTCACTGAGCTCTCATCTCTTTGGTCCCCCCAAACTCACTTCTTCTGAATGCTTTCTTCGATCTTAATCTATTTATTCATTTAGA
GACACGACCTCTATGTGTAGTCCAGGCTGGCCTCAAACTTAGAAATCCTCCTGCCTCAGCCTCTCCAGTGCTGCGATTATGGATCTGCACCACT
AGGCCTGTCAGATATGATGCACTTTTATTCTGAAAGCCAGTTCTTTATCCAAAAGGGATTCTGTTCTCGCACGCACACACGCACGCACAGGAAG
CTGGCTGTTAGAAGCGTCTCTGGAGCTAGGCGAAGGCCCCCTTTGGCACTTCTTTCGCTCATAGCTCCAGGGATGCCTCAGATGACTGCAGCTG
AGTTAACTTAGGACTCAGCCAGTGTTCTCGGGATGTATGACAGTCATGGGTCTCTGTCCTCTGTAACTGTTGTGAGTCTCTCTCTGAAGGTGTA
AGTCACAGACCATGTCATTCCAGCCTCTCTCTTCCAGTGTGTCCACAGAGACCTGGCAGCCAGGAATGTGTTGGTCACCCACGGGAAGGTGGTG
AAGATCTGTGACTTTGGACTGGCCCCAGACATCCTGAGCGACTCCACCTACGTCGTCACGGGCAACGTGACCCGTTTGCTTTTTGTCACGAGTA
CACGAAACACCTGCACTCTCTGTGATGCGTTTTTGATTTATGGTGACACCAAGGGGAGAAAAAAAAAACTCCCAGTGCTTCACTTCTTTAGGCT
CAAAACATTCTTTTGTGCTCACTAACAGCTAACCAAAATAGCCACGCATCTCTGGCGGGCTCGCCACTCAGAACAGATCCATTAGCCGTTGCCA
TGAGATCTTCACCTGAAAAAAAAAATGCCCTTACTCAGACCTGTTTCGGTTTCCTTAGCTATAAAGTGGCTTTATATGTGTTTTATGTTTCCGA
TCATGAGACAAGCTAGCATGTATAAAAAGCTTTTTGTTTTTTTTTTTTCTGAACACGCAGCACACACGTATTCACTATAAAGTTTAAAGGTGCT
GTAGTTAACTGGTAGCGTTTGTTACCCTGTTACTATATGAAGAGTTCAGGAAGACTCCAAATACAACATAACTGACATGTGTTCGTTCAAACAG
AATGTGAGGGGGCCAGAGAGATGGCTCAGTGGTTAAGAGCATAGAGTGCTTTTCCAGGGGACCCAAGTTTGATACCCAGCACCCACGGCAGGAT
GCTCGCAACCATCTATAACTCCAGCTCCAAGGAATCTAGTGCCTCTGGCCTCTTTGGACATGTGTGCTCATGTGCACATACTTACACATAAGTC
AAAATCAATTCAAAGTATGATGAGGCAAAAAATGAATGTTTAAGAAGGGAAGAAAGAGAGAGAGAAAGAAAGATAGACAGAAAATGATAGATAG
ATAAACAGACAAATGATTGATAGATAAACAGACAGAAGACATATAGACAATGATAGACAGACAGATAGACAGTGAGATGTCTCAGCAGGTAAAG
GTAGTTGCTACCAAGCCTGAGGGCTGGAGTTGCCCCCCAAAAACACATGGTGGAAAAACTGGAATGGTATAAGTTGACCTCTGACCTTCACCTG
TGTGCCGAGCATGCACCCTCCCCCAGCGCCCACACACATGCACAGGAATAAAAACATAATTATTCTTCTTTTCATTTTTCAAGACAGCGTTTCT
CTGTGTAGCCCTGGCTGTCCTGGACTCACTCTGTAGACCAGGCTGGCCTCGGNNNNNNNNNNNNNNNNNNNNNNNNNNNNNNNNNNNNNNNNNN
NNNNNNNNNNNNNNNNNNNNNNNNNNNNNNNNNNNNNNNNNNNNNNNNNNNNNNNNNNNNNNNNNNNNNNNNNNNNNNNNNNNNNNNNNNNNNN
NNNNNNNNNNNNNNNNNNNNNNNNNNNNNNNNNNNNNNNNNNNNNNNNNNNNNNNNNNNNNNNNNNNNNNNNNNNNNNNNNNNNNNNNNNNNNN
NNNNNNNNNNNNNNNNNNNNNNNNNNNNNNNNNNNNNNNNNNNNNNNNNNNNNNNNNNNNNNNNNNNNNNNNNNNNNNNNNNNNNNNNNNNNNN
NNNNNNNNNNNNNNGGAGTCTCAGTACCATCATCCCTGCTTATGAAATGACAGCAGCCCAGGCTGCCCCAGTTCCTCCTCTCTGCTCGACACTC
TCAGTACTCACTTCGGTCTGAAAATACCCACTCTGTGAAGAGGAAATTGAGACAAAGAAAAGCAACTTGCCCGCGGTTGCTAACTTGCCCCGTG
TGGATCCGAGCGTGCAGAGCCTGCATCCCTGTCGTTCACGGTGGTGTCCTCCTGACTAACTTCCTACAGGATTCTGATTTTACTTCCTAGGTTC
TCAGAAACCAACCAATACAATCAATGACATAGCCCTTTAACCCAAAATGAGAACTCCAATGAATGCTCATCTCAGGTGGCTTAGAGCCGGTTCC
CAGGGATGGTCGCTGGCTGTGGTTACAGTACACTGACCTCTCTGTGTGCTTATGGGGTTTTCACCCCACCAGTGGGCTCTCCTGTGGGAAGGTG
AATTCCGTTCAGAACCTTCTCTTAATGAATCAGGTAACCCAGCCTGGACCACAGATTGGGCCAGTGACTCCATTTGCATAGGATTTAAAAGAGG
ATTTCCTTCTGGGGCTCTTCTTTAGCCTGGCCAATTAAACACATGAGGTTCCTACTGGAACCAAATCAGAACAAAACTCCGTGCCCCAGGAGCT
AACCAGCCACTGTCTCCTGATGCAAATCAAAGCCTGTGCAAACAGAGGCCAACCCCCTGTCCCGCCTCTGGAAGTTATTCAAGCCCCCGACGGC
AGCTATGGTTACTCTAGGCATGATCACGTAAGTCCTTGAGGGCGATGCTTCTCAGTTCTGAGGAAAGCTCCCGTAAATGATTCTCCCCGCGGCC
TTGAACTTGTCGACCTCTGAGCAAATACAGAGCTCTTCCTTAACGAACGAACGGCATCGCTACGGCACTTGCCAATCCCAAGCACAAGCCTGTG
TCCAAGATGACTTTTAAAGAAGTGTATTTTGCCAGGAGTGGTGCCCTACGCCTTTAAACCCAGCTCTCAGGAGGCAAAGGCAGGTTGATTTGTG
TGTTTGAGGCCCTATTCTGCTTATGTCACCAGAGCTACATAGTGAGACCTTGTCTCAAAATAGAAAAACAGATGAGCTGGACGGTGGTGGCGCA
CGTCTTTAATCCCAGCACTTGGGAGGCAGAGGCAGGTGGATTTCTGAGTTCGAGGCCAGCCTGGTCTACAGAGTGAGTTCCAGGACAGCCAGGG
CTACACAGAGAAACCCTGTCTCAAAAAAGAAAAGAAAAAAAAAAGGAAAACAAATGATACATAGATAGATAGATAGATAGATAGATAGATAGAT
AGATAGATAGATAGAGAGAGAGAGAGAGAGATCGCTATAGGTAGGTAGGTAGATAGGTAGGTATAGACAGGTAGATAGATAAACAGATACTTAG
ATAGATGTTAAATATAGATAATAGATGATAATGGGTGGATAGATGGATAGATAGATAAGAAACGTATTTCTAAAAAGCTTCTACTTTTTCTTTT
TTTCTAGAACATCATTTTAATATTTTCAACTTAATATTCAACAGACAGAATAATTATTTTAAGATATATTTTGTTGTTATGTCTCCTTTTCATT
TCTGATGTTATTAATTTGAATACTGTCTCTGTGCCCTCTGGTTAGTCAGGCTAAGGGTCTATCTATCTTGTTTTTTCTCAAAGAACCAGCTCCT
GGTTTTGTTGATTCTTTATAGAGTTCTTTTTGTTTCTATTTGGCTGATTTCAGCCCTGAGTTTGACTATTTCCTGCCGTCTACTCCTCTTGCGT
GTATTTGCTTTGTTTTGTTCTAGAGCTTTCATGTGTGCTGTCAAGCTGCTAGTGTGTGCTCTCTCCAGTTTCTTTTTGGAAGCACTCAGAGCTA
TGAGTTTTCCTCTTAGCACTGCTTTCATTGTGTCCCATAAGCTTTGATATGATGTGCCTTCATTTTCATTAAATTCTAAAAACATAGACTTTAC
TTTCTTTTTTTATTTCTTCCTTGACCAAGTTATCATTGAGCAGAGCATTGTTCAGCTTCTGTGTGTATGTGTGCTTTCTGTTGTTTTTGTTGGT
ATTTAAGACCAGCCTTAGTCTGTGGTGATCTCATAGGGTATATGGGATTATTTCAGTCTTCTTGTATCTGTTGAGGCCTGTTTTGTGACCAATT
ATATGGTCAGTTTTGAAGAAGGTACTGTGAGGTGCTGAGAAGAAGGTATATTCTTTTGCTTTAGGATGAAATGTTCTATAAATACCTGTTAGAT
CCATTTCGTTCATAATTTCTGTTAGTTTCACTGTGTCTCGATTTAGTTTCTGTTTCCATGATCTGTCCATTGCTGAGAGTGGGGTGTTGAAGTC
TCCCGCTATTATTGTGTGGGGTGCAATGTGTGCTTTGAGCTTTAGTAAAGTCTCTTTTATGACTGTGGATGCCCTTGCATTTGGAGCATAGATG
TTCAGAACTGAGAATTCATCTTCTTAGATTTTTCCTTTGACCAGTATAAAGTGTCCTTCCTTATCTTTTTTGATAACTTTTGGTTGAAAGTTGA
TTTTATTCGATATTAGAATGGATACTCCAGCTTGTTTCCTGAAACAATTTGCTTGGAAAATTGTTTTCCAGACTTTTACTCTGAGGTCGTGTCA
GTCTTTGTCACTGAGCTGCATTTCCTGTGTGCAGCAAAATGCTGGGTCCTGTTTATGTATCCAGTCTGTTAGTCTATGTCTTTTTATTGGGGAA
TTGAGTCCATTGATGTTAATAGATATTAAGGAAAAGTGATTGTTACTTCCTGTTATTTTTGTTGTTAGAGGTGGAATTATGTTTGTGTGGCTAT
CTTCTTCTGGGTTTGTTGAAAGATTACTTTCTTGTTTTTTCTAGGATGTAGTTTCTCTTCTTGTGAAGTGTTTTCCATCTATTATCCTTTGTAG
CGCTGGATTTATGGAAAGATACTGTGTAAATTTGGTTTTGTCATGGAATATCTTGGTTTCTCTGTCTATGGCAATTTAGAGTTTTGCTGGGTAT
AATAGTCTGGGCTGGCATTTGTGTTCTCTTAGGGTCTGTATGACATCTGCCCAGGATCTTCTGGCTTTCATAGTCTCTGGTGAGAAGTCTGGTG
TAATTCTGATAGGTCTGTCTTTATATGTTACTTGACCTTTTTCCCTTACTGCTTTTAATATTATTCCTTTGTTTAGTGCATTTGGTGTTTTGAT
TATTATGTGATGGGACGAATTTCTTCTCTGGTCGAGTCTATTTGGAGTTCTGTAGGCTTCTTGTATGTTCATGGGCATCTCTTTCTTTAGGTTA
GGGAAATTTTCTTCTATAATTTTGTTAAAGATATTTACTGGCCCTTTAAGTTGGGAATCTTCACTCTCTTCTATAACTACTATCCTTAGGTTTG
GTCTTCTCATTGTATCCTGGATTTCCTGGATGTTTTGGGTTAGCAGCTTTTTTGCTTTTTGCGTTTTCTTTAACTGCAGTGCCAATGTTTTCTA
TGGTATTTTCTATACCTAAGATTCTCTCTTGTATTCTGTTGGTGATGCTTGCATCTATGACTCCTCATCTCTTCCCTAGGTTTTCTATCTCCGG
GTTTGTCTCCCTTTGTGATTTCTTTATTGTTTCTATTTCCATTTTAGATCTTGGATAGTTTTGTTCATTTCCTTCGCCTGTTTGATTGTGTTTT
CCTGTAATTCTTTAAGGGAGATATTTATCTCCTTCTTAAACTCCTCTATCATCATCATCAGGAGAAGTCATTTTAGAGCCCAATCCGGTGTGAT
GTGTATCCAGGACTTGCTATGGTGGAAGAATTCGGTTCTGATGATGCCAAGTAACCTCGGTTTCTGTTGCGTGTGTTCTTACACTTACCTCCTG
CCATCTGATTATCTCTAGCGCTACCTGCCCTGGCTATGTCTGACTGGAGCCTGTCCTTCCTGTGATCCTAGTTGTATCAGAGCTCCTCGGAGTT
CAGCTGTCTCTGGGATCCTGTGGTTCTGGGATTCTGAGATCCTGGGGTGTTCCTGGGTGCCTGGGTCCCTCCTGCTGGTCCCAGTTACTTCTGC
TCCTCCAACAGGTGTTGCTCTCCTCCTCCACCTGATCATATCCTCCTTTTCCATATCAAGCATTAAAAGTGTTCTTAGGTTTAAATTTTATCAT
CTAATGCTGGGCAATGGTGGCATACACCTTTAATCCCAGCACTCAGGAGGCAGAGGCAGGTGCATCTCTGTGAGTTTGAGGCCAGCCTGGTCTA
CAGAGCCAATTCCTGGACAGCCACGGGTGTATGAAGAAACCCTCCCTTGAAAAATAAAAATAAGTTGAGTAAATAAATAAATAAGTAGATATTG
TCATCCAATGGAAAACAAAAACTAAAACTTGGAAAGGCTGGAGAGACAGCTCAGTGGTTAAGAGCACTGCCTGTTCTTCCAGCCGATCCGCGTT
CAATTCCCAGCACCTTCATGTCAGCTCACACTTGTTTGTAACTCTAGTTCCAGGAAACACAGCACTTTTACACACAGACATCAACGCAAAACAC
CAAATAAATCTTTTTTTTTTTTAAGTGCCCTCAAGTTTTAAATTTTATCATCTAACAACAACAAAGAGGGGCTGCAGAGATTGCTCAGTGGTTA
GAGCACTGGCTGCTCTTGCTCAAGACCCAGGTTCAGTTCTCAGCACCCATATAGTGGCTCACATCCATCTACAATGTCAGTTTCAAGGGATCCG
ACACCCACTCCTGGCAGCCTCTGGCACTGTATGCATAAGGTGCACTTACATACATGCAGGCAAAACACCCATGCACATAAAATTAAAAACAAAA
CAAAACAAAACAAAAAAAAACTTTAAAAAAATCTCCAAGTCTGCATGTGGGGGAACTTCACCAGCCTCTCTTGAATCGTACACAGGCACGGCTG
CCGGTGAAGTGGATGGCACCCGAGAGCTTATTTGAAGGGATCTACACAATCAAGAGTGACGTCTGGTCCTACGGCATCCTTCTCTGGGAGATAT
TTTCACTGGGTATGTGTGGCACTCTGCAGGCCTCCTTGGGCTCTGGCTTTGTGTCCCCCACCCCTCTGTACCCTTCCTTTACCCTGCATGCCAA
GGGCCGTTAACACACCACTCAAGACCCTAGCTTCTAGTCTTGCCTCTGTTGCCAGACTTATTTGCTGACATCTGAGATCTTTCTTTCCCACACT
CTGTAATTGATTAAGAGGCTTGGGGCCCTCTGGATCCACTTGCAGCCCTCAGTACAGGGTGCGTCTGGCACTGGGGAATTCTCTTTGCTTGTTT
TCAGACAGAATGTATACCAAATAGACAAATAGGAAGAACAGTGTTTGTGAGGCCCCACTGAGCGCGTGTTTTTCTCAGGTGTGAACCCTTACCC
TGGCATTCCTGTCGACGCTAACTTCTATAAACTGATTCAGAGTCGATTTAAAATGGAGCAGCCATTCTATGCCACAGAAGGGATGTCAGTACAG
CCAGACCGCCGTTGGGTATCAACATTTACCGTGTGCTCTAAGTCCTCCAGATGCATTGCAAAAACAAAAAGCTTGATGGCTTTGTTGGTTTGTT
TGTTTCTTCTTTCTGTTTTGTTTTCTTTTTGAGCCAAGGTTCCCCTGTGTAGCCCTGGCTGTGGTGGAATTGACTCTGTAAACCAGGCTGGCCT
CAAACTCACAGATCCAGCTGTCTCTGCCTCCTGAGAGCTGTTATTAAAAATGGGCACCCCTGGGCTGGTGAGATGCCTCAGTGGTTAAGAGCGC
AGACTGCTCTTCTGAAACCCCCTAGTTCAAATCCCAGCAACTACATGGTGGCTCACAACCAAACGTAATGAAAACTCATGCCCTCTTCTGGAGT
ATCTGAGGACAGCTACAGTGTACTTACATATAATAAATAAATACATTTTTAAAAATGTGCACTGCCACCACACCTGGTTAAAACACACTTTCCT
ACGACATTGCTGAGATCTTATTTATTTATATTTATTTATTCATCTATCTATCTATCTATCTATCTATCTATCTATCTATCTATCTAATGTATGT
GAGTATACTGTCACTATCTTCAGAGATACCAGAAAAGGGCATTGGATCCCACTACAGATGGTTGTGAACCACCATGTGGTTGCTGGGAATTGAA
CTCAGGACCTCTGGAAGAGCAGTCTTAACCACTTAACCGCTGAGCCATCTCTCCAGCCCTTGTTTGCTGTTTAAAAGCAGAGACATCTTGGTAC
AGTGGCACCCACCTTTAATTCCCACAGCGAGGAAGCAGAGAGGCAGCCAGATCTCTGTGATTTGAGGCCAGCCTGGTCGACAGCCAAAGCTGTG
TAGTGAGATCCTGTCTTGAAAAAAACAATCGCCAATCAATCAATAAATTGGGGGGGGGGGGCAGGAAGGGCAAGGAGACACTTGCCTATAATCC
CAGTACTCCAGAGGTAAGGTATGAGGCTGTAGGCTAATCTGTGCTAATAGCAAGACAAGAAAGGAAGGAAGGANNNNNNNNNNNNNNNNNNNNN
NNNNNNNNNNNNNNNNNGAGGGAGGGAGGGAGGGAGGAAGGGAGAGAGAGAGAGAGAGAGAGAGAAAGAGAGAGAGAGAGAAAGGAAGGAAGGA
AGGAAGGAAGGAAGGAAGGAAGGAAGGAAGGAAGGAAGGAAGGAAGGAAAAGAAAGAAAGAAAGCTTCACGTAGCTTGCGCCCTCTTCGCCACC
CTCCAAGGCTTCATTCTTCTGCTTGTCGTACCTGAGGATTTGACTTCACCTCACTCTCTGGTGTGGTACCAATTCTAGTCTTCCCACAAAGCCA
GCAGCGCACAGTCCACAGCCCCCACCCCCCACCCCCATGCTGCCCTCGGTGTGAACTGTGGGTGGAGCCTTGCCAAGTTCATTCACACCCCCTC
AGCTCTGCTCTGTTTTGCTCTCTCACAGATACTTTGTAATGCAATCCTGCTGCGCTTTTGACTCAAGGAAGCGGCCATCCTTCCCCAACCTGAC
TTCATTTTTAGGATGTCAGCTGCCAGAGCCAGAAGAACCGCTACCTGGAGGCTTGGCTTAATCATAACGGTCCCCAGGGAGATGTGTGGGTGTC
ACACCGGGCACTAATGGCCTCAGATCCGGTTTAGCCCGACCATCTTTCTCACCTCACTTTGCCTAGATTACCCTTCCACAGTCCTGTGCAGAAG
ATGTACTATCTCCTGTGGGCTTGGGCGCCGGGCTTTCCTGTGATTTCATCCAAGTGATTAATAGGTTAAAAGCTCTTAAGGGTCCAGTGCAAAG
GGCTAGACAACTAAATAAACCTTAACTCCTCCAGGAGCCACTGGCCTTTTCTAAGTCAACATGGTGTGAGGGTGGGTATGGATGGGAAGGGCTT
TAGCCCAAAGCCCTGAGGACCCATTCAGTCTCTGCTGCTCATTCCCCACTGATCTGAACGATGGCAAGTTTCTTCTTTGGCCTCGGTGTTCCCA
TCTGTAAAATGGGTTGCAAAGGTAAATGATCCTCAAGCAGCAGGATCTTGGTATTACGTCATTAGCCCCTCCTCCTTAGCACTCTTAGCACAGG
AGAGGTCTGCTCCAGATAAGGGTGGAGCCTTGAACACTCAGACCCCAGGTTCAGATCCTGCCTCCGTCACTAGTGTCTCACATAGTGACTCACA
TAATGTCTCACATTAGTGACTTTAATGTCACTAATGTCTCACGTAGCATTTGCAACTTTAGACTTTAATGTGGACATCTTGTGGGATGATAGTT
CTGTAAAGGACAAATCACCTGCCATCTGCCCTTTTCCTACTTTTTATTAAAAATGAGTGGCGGGCTGGTGAGATGGCTCAGTGGGTAAGAACAC
CCGACTGCTCTTCCGAAGGTCCAGAGTTCAAATCCCAGCAACCACATGGTGGCTCACAACCATCCGTAACGAGATCTGACTCCCTCTTCTGGAG
TGTCTGAAGACAGCTACAGTGTACTTACATATAATTAATAAATAAATAAACAAATAAATAAATATAAATAAATAAATAAATAGATTTAGTCTTT
TAAAAAAAATCAGTGGCTGCTGTTTCAGAAAAAAACAAAACCCATGGAGGGGACTGCACAGATGGCTCAGTAGTTAGAGCACTGGCTGCTCTTG
CAGAGGATCAGGGTTCACTTCCCAGTAAACAGGGTAGCTCACAGTCACCTATACCTCCTATTCCAGGAGCTCCAGCGCCCTCTTCTGGCCATTG
CAGGCACTGCATTCAAATACTGACACAGGTGCACACTTGCACACATAAAGTAAATAAAACTTCAAAACAAGCCTGGAAACTACCCAAATTCATA
GTTTTATATTTTTAAGATTATTTTACTTTTCAATTACATGTAGTAGTGTTTACAGGGACCCTCAGAAATCAGAAGAGGGTCTCGAATCCCCTGG
GGCTGGAGTTACAAGCAATCGTGAGCCACCTCACATGGGCTCTTAGAACCAAACTCAGGTCCTCTTCAAGAGCAGCAGGTGTTCTAACCACTGA
GCCATCTCTCCAGCCCCTAAACTCATACTTCATGATCTGTATAAAAGCTAAGGTGTATTTAAGTACTGTGCTTTCTAGGCACACAGCGAGTCCT
GCTCAGCCGGTCATTCTTCTCCCTTTCCAGATGTATCAGAACATGGGTGGCAACGTCCCAGAACATCCATCCATCTACCAAAACAGGCGGCCCC
TCAGCAGAGAGGCGGGCTCAGAGCCGCCATCGCCACAGGCCCAGGTGAAGATTCACAGAGAAAGAAGTTAGCGAGGAGGNNNNNNNNNNNNNNN
NNNNNNNNNNNNNNNNNNNNNNNNNNNNNNNNNNNNNNNNNNNNNNNNNNNNNNNNNNNNNNNNNNNNNNNNNNNNNNNNNNNNNNNNNNNNNN
NNNNNNNNNNNNNNNNNNNNNNNNNNNNNNNNNNNNNNNNNNNNNNNNNNNNNNNNNNNNNNNNNNNNNNNNNNNNNNNNNNNNNNNNNNNNNN
NNNNNNNNNNNNNNNNNNNNNNNNNNNNNNNNNNNNNNNNNNNNNNNNNNNNNNNNNNNNNNNNNNNNNNNCCATGTATCTGAAATATAGTATA
TTCTTGTAAATACGTGAAACAAACCAAACCCGTTTTTTGCTAAGGGAAAGCTAAATATGATTTTTAAAAATCTATGTTTTAAAATACTATGTAA
CTTTTTCATCTATTTAGTGATATATTTTATGGATGGAAATAAACTTTCTACTGTAGAAATGTTGGTTCTTGTTCCTTTGCGTGAACTATAAGCT
CATGGCCTCATCTCTATGTGAGATTTCCTGTTTTTCTGTTTGTTTCTTTGTTTGTTTTTTCTTTCTCTTGAGCAGGTGCATTCTTGGGGGATGC
TTGGTGTTGTTTGGTTTTGAGACAGGATCTAGTTATATTGCTCAGGCTAGCCTCAAACCCGAGATCTTCCTGCCTCTGCCTCAAGTCTTGGGGT
TAACCTCATCACACCCGACGAAGGTCAGCTCTTCACCAAAGTGTTAAAGCATCCTGAGCCGACCAGGCTGAGGACCGCGGGCACCACATCTGAT
CGGTTCTCCCATTCCCTCCTCATTCACTTCTGATCTTTTGAAACTGAGCAAGCTCCAGCCCACAGGTTTATAAACTCGCCTTGCTTTGTCCCTT
TGTACGCTGGACACCACTGAGTTCTGTCCTTTATTTCTTTGTTTTGTCCTATGACAGGGTCTCATGTGTCCCAGGTTGGCCTCAGGTTGACTGT
GTACCACAGGATGACCTGGACCTTCTGGTCCTCGTGTCCCCACCTCCCGACTGCTGGGATCCCGGTGTGTGCCACCATGCCCGGCTTCGCCTGA
TTCTTTAGCTAGCCTCTTTGCCATCTAAGTCAGAGGTTCTCAACCTTCCTAATGCTGCTACCCTTTAATACAGTTCCTCATGCTGTGGTGACCC
CCAACCACGAAATTATTTCATTGCTACTTCATAACTGTAAGTTTGCTACTGTTATGAATCGCAATGTAAATAACCTGATGTGCAATGGCTAGAG
GGTCACGATCCACAGGTTGAGAATGCTGCCCTACTGTGTCGCTTAGCTGCTGCAAGTTCCGTCTCCCTAAGCATTGACTTGGTGTGTGGTATGG
TATGGTCTCTTGTAAGCACCAGGTCTCTCCATTGATCCAGCTTCCACCCCTCTGCCTCTTTGCTTCTTTCACCCCCTAGATACTACCTGCATAA
TGTTTTCTCTCTAGCCAAAACCGCCTGGATGGTCCTGGATGTGTCTGGGCGTTTCCCAGCCCCCTCTTCTGCCTCAGTCTCTGTTTCCATGCCC
ATCAAGAATAGCTGCCTCCGTGGCAACCTGTGAGATCTTCTTGTCTATATCATTAGGTTGTCTCTGCACAGACAGCCTACCTATGTGATGCTGT
AATTAGCTTTTGTGATAATGTCCTCTCTCTTCTCTCTTTATTTATTTATTTATTTACTTACTTACTTACTTAATGTATTTGAGTACAGTCATTG
TCTTCAGACACACCAGAACAGGGCGTCAGATCTCATTACAGATGGTTGTGAGTCACCATGTGGATGCTGGGAACTGAACTCAGGACCTCTGGAA
GAGCAGTCAGTGCTCTTAACCCCTAAGCCATCTCTCCAGCCCATGTCCTCTCCTTTAAGCTGGAGTTTGAGCCGTTTGAAGGCGGATGTGATTT
AAGTGAATCCAAACACTCAGCTCCACGGAGGTAATAGGTATAAACAGACATTTGGTTACTTTTTAGCCTACTCATGTAAAAGCATAAGATATGC
TTGATGGCAAACATTCAGCTAATATTGTTTTTTATTTAGGTGAGTGGTGGTTAGCCATGTAACAAGCGTTGGAACACCTCTCCAGCTGAGCTCC
GCTTCAGGTGTATCTCTCCTACCTTCCTGTCTGAATGTATTCCTACCACACACACATGAGCATGCGCAGACGCACACACATGAGCATGCGCAGA
CGCACATACATGAGCATACGCAGACGCACACACATGACCATGCGCGCGCGCACACACACACACACACACACACACACACACACACACACGAGTG
GCAAGGCGGGCCTGCAGCATGCAAATGGGAAAGAAGTCTTTGTATTAGTTACCTTACTCTTGCTATGATAAAACAGACCTTGGCTTGCTGCAGG
CTCTTGTTTACTGTTAATATTGCTGCTGAGAACATGGTATGGAAATGGAAATACCCCCCCCATCTCTCTCTCTCTCTGTCTCTCTGTCTGTCTG
TCTGTCCGTCTCTCTCTCTCTCTCTCACACACACACACTTTTTAAAATATTTTATTTTATTCTGAGACAAAGGTTTTTTTGTTTTGTTTTGTTT
TTGAGACAGAGTTTCTCTGTATAGCCCTGGCTGTCCTGGAACTCACTCTGTAGATCCCCTGCCTCTGCCTCCCGAGTGCTGAGATTAAACGTCT
GCCCCACCACCACAAGGGTTTTTTATCCACCCCAAGCTCGCCTTGAACTCGAAATCCTCCTCCTTGGCCTGCTGAGGTCCTGCACTGCTTCTTC
ACATTGGCCTTCACAGCTGTCTCTGTCGCTTACCCCTGAGAACCTAATGTGGAACCCGAGGCCAACTCTCAGCCTCCCAGGCACAGCCTAGTGG
TTTGCCGACGTTCCTTCTCTCTCTGTTAGCTACCAATGGTCTTTCTCGCTTTCTCTGTCTTCTCTGTCTTGATGGAATTGGAGGAGGCAGAAGA
GATACAGGAATTTGCAAAGCCCCTTGAGCTACTTGTCGTGAGATGTGTGTTGATAGAGCAAGGCAGAATAGTGATGTGAGCTACCCAAGCCTCT
TCCTTCTTTCAAAGTGATTTTGCCCAGGGCATGTGCACATTGTGTCTGTGACATCCCTCTGGATGGAGCCAAACACACAGTCACATCTCGAGTC
ATGTCCTTGTGTGCAGCGTTAAAACCCTCAAAGGACTTCATTTCCACGGAAATGGATATTCTCTTGTGGGTTTCGTAAAAGTGGTTTTATAGCC
TTAATACTACCAAATGCTTCTTTTAATAGCATAATATTGGGGCTGGAAAGACAGTTAATAGTCCATACTGCTATTGTGGAGGACCTGAGTTCAA
TTCCTAGCACTCACAACTGGAACATCACAGCCTCTGGCAACTCCAGTTCTGAGCGATCTGACGCCCTCTACTGGCCTCCATCGGCACTCCATGC
ACATAGTGCATACACACACTCAGGCACATACACATAGACATAAAATACATAAATCCTTCTTTTAAAAAGCGTAATATTGACTTGTTCTTCAAAG
ATGTATTCATGTTATGCAGTGATCATCCCTAATCTGAAATACTAAAACCCAGAATCTGAGCTTGATGAACATCCGCATAATACGTCACACACAC
ACACACACACACGGAAAAGAGAGAGAGAGAGAACTCGATCCCTGGCCTCCAATGAACACACGTTAGAATGAAGTGAGTTAAAATTATCACATCA
AGTTACCACCAGGCTGTGTACATAAGGCACACATGAAATCTTAACTGATCCTTTGAATTATATGTGCAAAATTATTCCAGTCATAGCAAGTTTA
GTCTGGTTCCTCTCACTCCAGCCAAGGGGTACTCTACCTGCCTTACCCCAAGCTGACATTGTCCATATTGCTGATGTCCTATGAAAACACACTC
CTTGACCACCATCTTCAAACTAAGGACATTTGAATATGCTTCTGGGCTGTGTCGGGTAGAGGTTTGGAGCATCTCCTTCATAGAAAGTGAAGTC
AGCAGAGGTGGAAACTTAAGGGCTCGTTGGAAAGTCAGTGGTGCGGGAAGGTGTTTGCTAAGGCAGACACGTGAAGGAATATTTAGCTGAAGCA
GACACAGGAGAAAAGGATGTTCTGCTAAGCCAAGCATGTGATGAAGGACTCTTTGCTAACAACACGCATGCGTTAGTCCATCTTACGTTGTGTA
GCTCTATTTGTCCGGAATCTATAGAGAGAAATGCACCAAAACAAAACAAAAACAAAAACAACTTCTGGTGGTGTATTGTGGCTTCTTGCTGCTC
CCAAGGACTCCGATTGGCAGAGTAATGTCAGCTGAGACAGTCGCACAGGATGAGGCAAGACCTGTGCAGGACACGTGATGATTGGATGGAGTAT
AAGTAGAACTCAACAGACAGTCATGGAGACTGAGCTTGGCTTGTTTATAGAGCTAGCTGTGCAATGCTTGTTGATCTCTTGTCTTCACCAGTCT
TCGATTCCCCGAGAGAGGCACAGCTAAGAACTTCTCCTGTGTCCCTCTGGGTCCTTCCTGCTGACTCTGCTAGGTAGGTTGTGCCACCGCTGCT
GATTCTCTTTGCTGTCCCCGCTCTTCCAAACTGGACTGCTGATGTTTCTGTGAAGTGTTTGTGCGTGGATCGAGCTGCTGACCTGTGAACTGAA
CTGCTAATTTCCAGACAGCACACACCGGAGTTGCTCTAAAGAACCTTTCTAAACAGGTCCACTTTCCCCGTATCCTCCCCCCCCCCCCACTTCC
TCTGGTGGGTGGTGGACTAAAACGGAGGTTAAAGCATTTAAAAGCCATCATTAAAAATAAGGATTGGCAGAGCCGCACTCAGGCACTGCAGCGC
AGCTCAGGTCTCCACCAGGCGCGCGAAGCTGAGCCAGAGCCAAGATCGCTGTCCTTTCTAAGGAATATGGATTTGTGCTTCTCACTCGTCCTGC
CACCTTTGATATGGTGCTCCACCTAGCCATCAACGTGGGCAAAGCCTGCAAGAAGGACAAGGTAGACTACCCTGTCACCTACAGCATGCATCCT
GAAAGTGGGCATATGTTCAGCTGCATTCAGCGCGCCCACCAGAACGTGTTGGAGGTACACCCTCCCTCCCTGTTTTTCCTAACGGTGGGAGGTG
TTAACTACCCCCGTATAGCTTCTGGCCTGGGCTTGGCCTTGATTTCTTGCACCAGTTCTTTACACATATCGACACCCTAGCAAGCGGTATCGAC
GAGCCACGGGGCTCTCTTGCCCTCTTTACTCTGATGGGCACCGCCATGTGCTCTCCTTCCCAGCATCCTCTCCTTCCCAGCATCTTGGCTGGAT
CAGACCGGGCTTAAGCTGCGGGTCCAGATCCTGCCACTGAGGAAAGGGGGGCCGGGGGGGGCCTTCCTATTCTCATTTGCCTCCTACGACTCAT
CCTGATTTCCAGTTCCACTGTTTAGTTTTTGTTGTTGTTTTAAATATAATAAAAACTTACCTGACATCAGCCTCATACCTAAAAATGAAGAAAT
AAAAATAAAAATAAGGATTGAAAAAGTTAAGGTTACAGTTAGGATCACAAACCATGCCCCTGTTCACTTTAGTGTGGGCCAAGCTGTGTCCCCT
GAGGGGAGGGTACCCCTCTTTTTCTTTCCCTTTCTTCCTTCCTTTCTGTCTCTTTTCTTCCTTCCTTCCTTTCTCTTTTAAAAATGTATTTATT
TTATTTGTATGGGTGCTCTATCAGTACCTGCGTGACAGAAGAGGGCATCAGATGCCATTACAGATAGTTGTGAACCACCATGTGGTTGCTGGGA
ATTGAACTCGGGGCCTCTCGAAGAGCAGTCTACTGGCTGGTTTTGTGTCAACTTGATACAGCTCGAGTTATCACAGAGAAAGGACCTTCAGTTG
AGGAAATGCCTCCATGAGATCCAGCTGTAAGGCATTTTCTCAATTAGTGATCAAGGTGGGGAGGGCCCTTTGTGGGTGGTGCCATCCCTGGGCT
GGTGGTCTTGGGTTCTATAAGAGAGCAGGCTGAAAGCCGGGCGTGGTGGCGCACGCCTTTAATCCCAGCACTTGGGANNNNNNNNNNNNNNNNN
NNNNNNNNNNNNNNNNNNNNNNNNNNNNNNNNNNNNNNNNNNNNNNNNNNNNNNNNNNNNNNNNNNNNNNNNNNNNNNNNNNNNNNNNNNNNNN
NNNNNNNNNNNNNNNNNNNNNNNNNNNNNNNNNNNNNNNNNNNNNNNNNNNNNNNNNNNNNNNNNNNNNNNNNNNNNNNNNNNNNNNNNNNNNN
NNNNNNNNNNNNNNNNNNNNNNNNNNNNNNNNNNNNNNNNNNNNNNNNNNNNNNNNNNNNNNNNNNNNNNNNNNNNNNNNNNNNNNNNNNNNNN
NNNNNNNNNNNNNNNNNNNNNNNNNNNNNNNNNNNNNNNNNNNNNNNNNNNNNNNNNNNNNNNNNNNNNNNNNNNNNNNNNNNNNNNNNNNNNN
NNNNNNNNNNNNNNNNNNNNNNNNNNNNNNNNNNNNNNNNNNNNNNNNNNNNNNNNNNNNNNNNNNNNNNNNNNNNNNNNNNNNNNNNNNNNNN
NNNNNNNNNNNNNNNNNNNNNNNNNNNNNNNNNNNNNNNNNNNNNNNNNNNNNNNNNNNNNNNNNNNNNNNNNNNNNNNNNNNNNNNNNNNNNN
NNNNNNNNNNNNNNNNNNNNNNNNNNNNNNNNNNNNNNNNNNNNNNNNNNNNNNNNNNNNNNNNNNNNNNNNNNNNNNNNNNNNNNNNNNNNNN
NNNNNNNNNNNNNNNNNNNNNNNNNNNNNNNNNNNNNNNNNNNNNNNNNNNNNNNNNNNNNNNNNNNNNNNNNNNNNNNNNNNNNNNNNNNNNN
NNNNNNNNNNNNNNNNNNNNNNNNNNNNNNNNNNNNNNNNNNNNNNNNNNNNNNNNNNNNNNNNNNNNNNNNNNNNNNNNNNNNNNNNNNNNNN
NNNNNNNNNNNNNNNNNNNNNNNNNNNNNNNNNNNNNNNNNNNNNNNNNNNNNNNNNNNNNNNNNNNNNNNNNNNNNNNNNNNNNNNNNNNNNN
NNNNNNNNNNNNNNNNNNNNNNNNNNNNNNNNNNNNNNNNNNNNNNNNNNNNNNNNNNNNNNNNNNNNNNNNNNNNNNNNNNNNNNNNNNNNNN
NNNNNNNNNNNNNNNNNNNNNNNNNNNNNNNNNNNNNNNNNNNNNNNNNNNNNNNNNNNNNNNNNNNNNNNNNNNNNNNNNNNNNNNNNNNNNN
NNNNNNATGGGCCCACTAGGGTGTGTGTGTGTGTGTGTGTGTGTGTGTGTGTGTGTGTGTAAAACAGTAATTATGGAAGATGTTAGTCATGAAC
TTGATAACCAGTTGTGGGAAGCATAGGGGGAGTTAGAAGGGAAAGAAAGGGGGGTAGATTTCAAATTTCTGAAAAAAAATTTTTTTAAAGGGAA
GACATGGCAACTAGTACCCTAGTTATGGCCCAGCAGGATCCCTCTCCATCCCCCACCCCACCCCTACCCCGTGAAGAACACCACCAGTAACAGC
CTTAGATAAACTGCTGCTGTGATAAAACACTTACCAAAAACAATCTAGGGAAGGCAAAGGTTTGTTTCAGTTTATAGTTTATAGGCTGTTGTTG
AAAGAATCCAACCCAAGAACTCAAGGTGAGAACCTGGAAGGCAGATTCAACCCTCTCTTCTTGGGCACAAACACACACACACACACACACACAC
ACACACACACACACGCTTGTACACATACAAATACACCTAATTAAAAAAAATTTTTTTTTAAACGAGACAAGATAGCACACTCCACCAGAGGCAC
CTTACCCTGTTCTGTTTACACTAATTAAGTCTATGTGGTGTTAAGCATTTAGAGTTCAAAGAAAGATTAAAACGCAGTGCCTGTGCTCTAGAGC
AACAGCAAGGACAGATGAGGTGCTTGTGAGTTACCGTGTCGGTGCTGGGGACAGAACCACGGTTGTCCCTGAGGACACTGTCCTGGTAATCCAG
GCAGGTCACAGGGCCACCTGTTTGGTCTGCATGTGGTACACAGATTACATGCAGGTAAAAGCATACGTGCACACAGACAAGATGGTAATGGCAC
CAAGTGTCTGTCTCATTACATACGGCCACCGCCGCCACCTCTTGTTATGGCAATGCCTCGGGTGGAATCATTCTTTCTGCAGAAGTCTCTGCTC
TCCTGATCATAGCCTTAAGCGGAGGTGGCGGATAGCTCAGTATTCGGGTGCTCCTCGAGCATGCGTGAGACCCTGGGTTCTGTCTCCAGCACAC
ATATTACCCCTACCACCAACAAAACAGTTAAACCTGTGTTTCTCATCGCAGGACCGTTCTGGATAAGCTCCTCCCAGAGATATTTAAACCAGGG
TCAGCTCCCCTTGCACAGGGCCAGCATGTGTGTTCAGCAAACACAACCCATGAGGAGGAATTACCTCACTCGCTCGATGACAGCGGACCACAGG
CAGGGCAGAACACTGCCTCCAGTCCAGGATCAGCCATGGACATGGTGAAGGTCAATTCCATGGACTTCGGAGAATTTGTGGATGTGTTTGGGAA
CATTGTTGAGAAATGCCCTCTGATTGCCGCTGCTGTCTGGTCCGAGCGTCCATTCTCTCGCTTGGAAGACTTAGAAAATCACTTTTTTGCCTTT
ATTGATGCTCTCCCGAGATCAGGTAAGACTTCAGGACCGTGTGCGCGAAGTCATTTTCAATATTGTATATAAAAATATTTTAGATTACTTTAGC
CTCCTTACTCAGTTATTTAGCCGGGATTATTAGAAGGATCAGTAGACATCCTTTCAAACGCTAGTCTCTTGAAGGTGGACACAAGAACATGGGG
GCGGGATCGGCAAGGTAGCATGGATGGCCGAGGACAGCGGAGGCAGACGCAGGACAATCTCTGAGGTCGAGACCAGCCTGATCTAGAGCGAGTT
CCAGGACGGCCAGGGCTATTGGAGGTCAAGAATGGGAACAGGGCAAAGGCCTTGCTGACTCAGAAGCTGAAGGCCCACTTTGGCAATGCCCTGG
ATGAAAGAGAGGATAGCGAGGACCTCCCAGGGACCCCAGAGAGGAACGGGAAGCCCTGAGCGATTTTCAAAAAAAAAGGGCCGGTTTGGACCAG
ACAAGGATGCATTCATTTAGATCCCAAGACTCTTTGCAGAGAGAAGTAAAATGGGAGCAAAGCAATGTTTTCTGGGGAGAGTGGGCCACAGGGT
GGGGAGAAGAGGGCGTAGAGGTTTATTCAGGATGGCACAGCGGCCGAACGTCCAAAGGTACATAGTCCCTGTTCATAGGCTACTATGGGTTCTG
AGAATAAACCCGACATGCCCTTGGGGAACAAAGTCAGAGGGTAGGAGTCACCTGCCCTTGAGACTGTTCTTAGTCTTCGGTCAGGAGGGTGGTC
TCACCACAGAGCAGGCACTCGCAGCTCCGTTCAGTATGGCTCTGACACTCTGTGGATTCTCAGACTCCTCTCTATGGCTGCCTATGAGAACTTA
CAGAGGAAGAGCACAGGTCCAGGTTATAAAATCAAGCTGAGGACTGGACAGATGGCTCAGCAGTTAGGAGCACTGGCTGCTCTTCCAGTGGACT
GGAGATCAATTTTAAGCACACATTCCCCACCCCCCAAAGATCCTCGCAAAGGCGTCTAACTCCAGGATCTCGTCTCCTGCTCTGGCCTCCGTAA
ACACCAAGGACACATGTGATGTGCAGACATACATGCAAACAAAACACTCAAATATGTGAAATTTAAGTGTGTGTCTGTGTGTGTGTGTGTGTGT
GTGTGTGTCTATCTGTCTGTCTATCTGTATGTATGTTTGCAAATCAACTAATCAACTCAGGGTCTTTCTTGCTTATCCTGGGCACTCTACCACT
AAGATGTACTCAATCTTTTTTCACAATGTTTCTAGAACAGAGAGAGAGAGAGAGGAGAGGAGAGGAGAGGAGAGGAGAGGAGAGGAGAGGAGAG
GAGAGGAGAGGAGAGGAGAGGAGAGGAGAGGAGAGGAGAGGAGAGGAGAGGAGAGGAGAGTCTCAATGTATTTGAAGGGTCATTTAAAAATCTT
TAATGGGAAGTGGTGGTGAAC
MOUSE SEQUENCE - mRNA
GCGGCCTGGCTACCGCGCGCTCCGGAGGCCATGCGGGCGTTGGCGCAGCGCAGCGACCGGCGGCTGCTGCTGCTTGTTCTTTTGTCAGTAATGA
TTCTTGAGACCGTTACAAACCAAGACCTGCCTGTGATCAAGTGTGTTTTAATCAGTCATGAGAACAATGGCTCATCAGCGGGAAAGCCATCATC
GTACCGAATGGTGCGAGGATCCCCAGAAGACCTCCAGTGTACCCCGAGGCGCCAGAGTGAAGGGACGGTATATGAAGCGGCCACCGTGCAGGTG
GCCGAGTCTGGGTCCATCACCCTGCAAGTGCAGCTCGCCACCCCAGGGGACCTTTCCTGCCTCTGGGTCTTTAAGCACAGCTCCCTGGGCTGCC
AGCCGCACTTTGATTTACAAAACAGAGGAATCGTTTCCATGGCCATCTTGAACGTGACACAGACCCAGGCAGGAGAATACCTACTCCATATTCA
GAGCGAACGCGCCAACTACACAGTACTGTTCACAGTGAATGTAAGAGATACACAGCTGTATGTGCTAAGGAGACCTTACTTTAGGAAGATGGAA
AACCAGGATGCACTGCTCTGCATCTCCGAGGGTGTTCCGGAGCCCACTGTGGAGTGCGTGCTCTGCAGCTCCCACAGGGAAAGCTGTAAAGAAG
AAGGCCCTGCTGTTGTCAGAAAGGAGGAAAAGGTACTTCATGAGTTGTTCGGAACAGACATCAGATGCTGTGCTAGAAATGCACTGCACCGCGA
ATGCACCAAGCTGTTCACCATAGATCTAAACCAGGCTCCTCAGAGCACACTGCCCCAGTTATTCCTGAAAGTGGGGGAACCCTTGTGGATCAGG
TGTAAGGCCATCCATGTGAACCATGGATTCGGGCTCACCTGGGAGCTGGAAGACAAAGCCCTGGAGGAGGGCAGCTACTTTGAGATGAGTACCT
ACTCCACAAACAGGACCATGATTCCGATTCTCTTGGCCTTTGTGTCTTCCGTGGGAAGGAACGACACCGGATATTACACCTGCTCTTCCTCAAA
GCACCCCAGCCAGTCAGCGTTGGTGACCATCCTAGAAAAAGGGTTTATAAACGCTACCAGCTCGCAAGAAGAGTATGAAATTGACCCGTACGAA
AAGTTCTGCTTCTCAGTCAGGTTTAAAGCGTACCCACGAATCCGATGCACGTGGATCTTCTCTCAAGCCTCATTTCCTTGTGAACAGAGAGGCC
CAAAATGTTCACGCTGAATATAAGAAAGAAACCTCAAGTGCTAGCAAATGCCTCAGCCAGCCAGGCGTCCTGTTCCTCTGATGGCTACCCGCTA
CCCTCTTGGACCTGGAAGAAGTGTTCGGACAAATCTCCCAATTGCACGGAGGAAATCCCAGAAGGAGTTTGGAATAAAAAGGCTAACAGAAAAG
TGTTTGGCCAGTGGGTGTCGAGCAGTACTCTAAATATGAGTGAGGCCGGGAAAGGGCTTCTGGTCAAATGCTGTGCGTACAATTCTATGGGCAC
GTCTTGCGAAACCATCTTTTTAAACTCACCAGGCCCCTTCCCTTTCATCCAAGACAACATCTCCTTCTATGCGACCATTGGGCTCTCGTCTCCC
TTCATTGTTGTTCTCATTGTGTTGATCTGCCACAAATACAAAAAGCAATTTAGGTACGAGAGTCAGCTGCAGATGATCCAGGTGACTGGCCCCC
TGGATAACGAGTACTTCTACGTTGACTTCAGGGACTATGAATATGACCTTAAGTGGGAGTTCCCGAGAGAGAACTTAGAGTTTGGGAAGGTCCT
GGGGTCTGGCGCTTTCGGGAGGGTGATGAACGCCACGGCCTATGGCATTAGTAAAACGGGAGTCTCAATTCAGGTGGCGGTGAAGATGCTAAAA
GAGAAAGCTGACAGCTGTGAAAAAGAAGCTCTCATGTCGGAGCTCAAAATGATGACCCACCTGGGACACCATGACAACATCGTGAATCTGCTGG
GGGCATGCACACTGTCAGGGCCAGTGTACTTGATTTTTGAATATTGTTGCTATGGTGACCTCCTCAACTACCTAAGAAGTAAAAGAGAGAAGTT
TCACAGGACATGGACAGAGATTTTTAAGGAACATAATTTCAGTTCTTACCCTACTTTCCAGGCACATTCAAATTCCAGCATGCCTGGTTCACGA
GAAGTTCAGTTACACCCGCCCTTGGATCAGCTCTCAGGGTTCAATGGGAATTCAATTCATTCTGAAGATGAGATTGAATATGAAAACCAGAAGA
GGCTGGCAGAAGAAGAGGAGGAAGATTTGAACGTGCTGACGTTTGAAGACCTCCTTTGCTTTGCGTACCAAGTGGCCAAAGGCATGGAATTCCT
GGAGTTCAAGTCGTGTGTCCACAGAGACCTGGCAGCCAGGAATGTGTTGGTCACCCACGGGAAGGTGGTGAAGATCTGTGACTTTGGACTGGCC
CGAGACATCCTGAGCGACTCCAGCTACGTCGTCAGGGGCAACGCACGGCTGCCGGTGAAGTCGATGGCACCCGAGAGCTTATTTGAACGGATCT
ACACAATCAAGAGTGACGTCTGGTCCTACGGCATCCTTCTCTGGGAGATATTTTCACTGGGTGTGAACCCTTACCCTGGCATTCCTGTCGACGC
TAACTTCTATAAACTGATTCAGAGTGGATTTAAAATGGAGCAGCCATTCTATGCCACAGAAGGGATATACTTTGTAATGCAATCCTGCTGGGCT
TTTGACTCAAGGAAGCGGCCATCCTTCCCCAACCTGACTTCATTTTTAGGATGTCAGCTGGCAGAGGCAGAAGAAGCATGTATCAGAACATCCA
TCCATCTACCAAAACAGGCGGCCCCTCAGCAGAGAGGCGGGCTCAGAGCCCAGTCGCCACAGCGCCAGGTGAAGATTCACAGAGAAAGAAGTTA
GCGAGGAGGCCTTGGACCCCGCCACCCTAGCAGGCTGTAGACCGCAGAGCCAAGATTAGCCTCGCCTCTGAGGAAGCGCCCTACAGCGCGTTGC
TTCGCTGGACTTTTCTCTAGATGCTGTCTGCCATTACTCCAAAGTGACTTCTATAAAATCAAACCTCTCCTCGCACAGGCGGGAGAGCCAATAA
TGAGACTTGTTGGTGAGCCCCCCTACCCTGGGGGCCTTTCCACGAGCTTGAGGGGAAAGCCATGTATCTGAAATATAGTATATTCTTGTAAATA
CGTGAAACAAACCAAACCCGTTTTTTGCTAAGGGAAAGCTAAATATGATTTTTAAAAATCTATCTTTTAAAATACTATGTAACTTTTTCATCTA
TTTAGTGATATATTTTATGGATGGAAATAAACTTTCTACTGT
MOUSE SEQUENCE - CODING
ATGCGGGCGTTGGCGCAGCGCAGCGACCGGCGGCTGCTGCTGCTTGTTGTTTTGTCAGTAATGATTCTTGAGACCGTTACAAACCAAGACCTGC
CTGTGATCAAGTGTGTTTTAATCAGTCATGAGAACAATGGCTCATCAGCGGGAAAGCCATCATCGTACCGAATGGTGCGAGGATCCCCAGAAGA
CCTCCAGTGTACCCCGAGGCCCCAGAGTGAAGGGACGGTATATGAAGCGGCCACCGTGGAGGTGGCCGAGTCTGGGTCCATCACCCTGCAAGTG
CAGCTCGCCACCCCAGGGGACCTTTCCTGCCTCTGGGTCTTTAAGCACAGCTCCCTGGGCTGCCAGCCGCACTTTGATTTACAAAACAGAGGAA
TCGTTTCCATGGCCATCTTGAACGTGACAGAGACCCAGGCAGGAGAATACCTACTCCATATTCAGAGCGAACGCGCCAACTACACAGTACTGTT
CACAGTGAATGTAAGAGATACACAGCTGTATGTGCTAAGGAGACCTTACTTTAGGAAGATGGAAAACCAGGATGCACTGCTCTGCATCTCCGAG
GGTGTTCCGGAGCCCACTGTGGAGTGGGTGCTCTGCAGCTCCCACAGGGAAAGCTGTAAAGAAGAAGGCCCTGCTGTTGTCAGAAAGGAGGAAA
AGGTACTTCATGAGTTGTTCGGAACAGACATCAGATGCTGTGCTAGAAATGCACTGGGCCGCGAATGCACCAAGCTGTTCACCATAGATCTAAA
CCAGGCTCCTCAGAGCACACTGCCCCAGTTATTCCTGAAAGTGGGGGAACCCTTGTGGATCAGGTGTAAGGCCATCCATGTGAACCATGGATTC
GGGCTCACCTGGGAGCTGGAAGACAAAGCCCTGGAGGAGGGCAGCTACTTTGAGATGAGTACCTACTCCACAAACAGGACCATGATTCGGATTC
TCTTGGCCTTTGTGTCTTCCGTGGGAAGGAACGACACCGGATATTACACCTGCTCTTCCTCAAAGCACCCCAGCCAGTCAGCGTTGGTGACCAT
CCTAGAAAAAGGGTTTATAAACGCTACCAGCTCGCAAGAAGAGTATGAAATTGACCCGTACGAAAAGTTCTGCTTCTCAGTCAGGTTTAAAGCG
TACCCACGAATCCGATGCACGTGGATCTTCTCTCAAGCCTCATTTCCTTGTGAACAGAGAGGCCTGGAGGATGGGTACAGCATATCTAAATTTT
GCGATCATAAGAACAAGCCAGGAGAGTACATATTCTATGCAGAAAATGATGACGCCCAGTTCACCAAAATGTTCACGCTGAATATAAGAAAGAA
ACCTCAAGTGCTAGCAAATGCCTCAGCCAGCCAGGCGTCCTGTTCCTCTGATGGCTACCCGCTACCCTCTTGGACCTGGAAGAAGTGTTCGGAC
AAATCTCCCAATTGCACGGAGGAAATCCCAGAAGGAGTTTGGAATAAAAAGGCTAACAGAAAAGTGTTTGGCCAGTGGGTGTCGAGCAGTACTC
TAAATATGAGTGAGGCCGGGAAAGGGCTTCTGGTCAAATGCTGTGCGTACAATTCTATGGGCACGTCTTGCGAAACCATCTTTTTAAACTCACC
AGGCCCCTTCCCTTTCATCCAAGACAACATCTCCTTCTATGCGACCATTGGGCTCTGTCTCCCCTTCATTGTTGTTCTCATTGTGTTGATCTGC
CACAAATACAAAAAGCAATTTAGGTACGAGAGTCAGCTGCAGATGATCCAGGTGACTGGCCCCCTGGATAACGAGTACTTCTACGTTGACTTCA
GGGACTATGAATATGACCTTAAGTGGGAGTTCCCGAGAGAGAACTTAGAGTTTGGGAAGGTCCTGGGGTCTGGCGCTTTCGGGAGGGTGATGAA
CGCCACGGCCTATGGCATTAGTAAAACGGGAGTCTCAATTCAGGTGGCGGTGAAGATGCTAAAAGAGAAAGCTGACAGCTGTGAAAAAGAAGCT
CTCATGTCGGAGCTCAAAATGATGACCCACCTGGGACACCATGACAACATCGTGAATCTGCTGGGGGCATGCACACTGTCAGGGCCAGTGTACT
TGATTTTTGAATATTGTTGCTATGGTGACCTCCTCAACTACCTAAGAAGTAAAAGAGAGAAGTTTCACAGGACATGGACAGAGATTTTTAAGGA
ACATAATTTCAGTTCTTACCCTACTTTCCAGGCACATTCAAATTCCAGCATGCCTGGTTCACGAGAAGTTCAGTTACACCCGCCCTTGGATCAG
CTCTCAGGGTTCAATGGGAATTCAATTCATTCTGAAGATGAGATTGAATATGAAAACCAGAAGAGGCTGGCAGAAGAAGAGGAGGAAGATTTGA
ACGTGCTGACGTTTGAAGACCTCCTTTGCTTTGCGTACCAAGTGGCCAAAGGCATGGAATTCCTGGAGTTCAAGTCGTGTGTCCACAGAGACCT
GGCAGCCAGGAATGTGTTGGTCACCCACGGGAAGGTGGTGAAGATCTGTGACTTTGGACTGGCCCGAGACATCCTGAGCGACTCCAGCTACGTC
GTCAGGGGCAACGCACGGCTGCCGGTGAAGTGGATGGCACCCGAGAGCTTATTTGAAGGGATCTACACAATCAAGAGTGACGTCTGGTCCTACG
GCATCCTTCTCTGGGAGATATTTTCACTGGGTGTGAACCCTTACCCTGGCATTCCTGTCGACGCTAACTTCTATAAACTGATTCAGAGTGGATT
TAAAATGGAGCAGCCATTCTATGCCACAGAAGGGATATACTTTGTAATGCAATCCTGCTGGGCTTTTGACTCAAGGAAGCGGCCATCCTTCCCC
AACCTGACTTCATTTTTAGGATGTCAGCTGGCAGAGGCAGAAGAAGCATGTATCAGAACATCCATCCATCTACCAAAACAGGCGGCCCCTCAGC
AGAGAGGCGGGCTCAGAGCCCAGTCGCCACAGCGCCAGGTGAAGATTCACAGAGAAAGAAGTTAG
HUMAN SEQUENCE - GENOMIC
CACTGAGACGCACATGTTATCTTTCAAACAAGTCAATGGACTAGAATAAATCATCCTTTCTCAGCATGTGGTCTGTTGAACAACTGTGTAAGAA
TCATCTGAGCAAATGTTTAAAATGTGGATTCCTGGCTCCCATTCCAGACATGCTGACTCAAAACTGGGGCAAAACGCTCAGACTCTGCTTTTTT
AATGAGAACCTTTGGTGATTCCTATCACAGGTCTAGATCTGTGCTGTCCGGTACGGTAGCCACCAGCCACATGTGGCTATTGAGAGCTTGAAGT
GTGTCTGGTCCAAATTGAGATGTACTCTAATTGTAAAATACACACTAGATTTTGAAGACTTAGTATGAAAAAAAGAATGTAAAATATATTATTA
ATAATTTTTATATTGGCCGGGCTCGGTGGGTCACACCTGTCATCCCAGCACTTTATGAAGCCAAGGCGGGTGGATCGCTTGATCCTAGGAGTTT
GAGACCAGCCTGGATAACATGGCAAAATCCCATCTCTACAGAAAATACAAAAATGAGTTGAGTGTGGTGGTGTACACCTTTAGTCCCAGCTACT
TGGGAGGCTGAGGTTGGAGGATTGATTGAGCCCAGGTGGTCGAGGCTGCACTAGCCATGATCACGTCACCGCACTCCAGCCTGGATCCACAGCA
AGAACCTGCCTCAAAAAGAAAAAATAATAATAAAATTAAAACAATTTTTACATTGATTATATATTAAAATGATAGTATTTTGGATATATCGCAT
TCAGCGAAATATGTTATTAAACTTAATTTCACCTGCTTCCTTTTACTTTATACAGCCAACAGAATTTGTAAATGATGTACAAGGCTTGAAGTTG
TGACTCACATTCTGTTTCATTGGCTAGCCCTGTTCTAGATGAAGAGTAGGAGTTCTTTTCACCTTGATTCCGCTAAGTGTTTGTTTCATGATTA
TTGTTACTCTTTATACCTAAAAGGGATTTGTACTAAAAGTCCCTTGTTGGGACTTTTAGAATCTCAGTGCAGGGTTTGCATGGAGTTGTCTACT
GTCTCTTACTGAAACCCCCCAATGTTCAGAGCATTCATTTTTAAAGTAATTAAGAATGCAGACTGGTCTGGGAGCTGACTGAAACACACTCCCC
CAAACTCAGGGTTTGTCAACAGTGGCGCTGCTGGCATGTTGAGCTGGATAATTCTTTGTTGTGAAGGACTGTCCCGTGCACTGTAGGATACTTT
TCAGCATCCCGGGTCTCCTCCCACTGGATGCCAGGAGCACATTCCCTTTTCCCAGTGTGACCAAAAATATCTCCAGACACTGCCAAATTGAGAA
AAATAACCCCTGGCATTTTTTTTTTTTTTTTTTTTTTGAGAACCATTGCCTTAGAGGCATCAACCCACAGTCATCGTAAGCTGTTATTCAGAAA
TATCAAGCTTTTTTTTTTTTTTTGAGACAGAGTCTTATTCTGTTGCCCAGACTGAAGTGCAGTGGCACGATCTTGGCTCACTGCAAGCTCCTGG
GTTCAAGCAATTCTCCTGCCTCAGCCTCCTAAGTAGCTGGGATTATAGGTGCATGCCACCATGCCCAGCTAATTTTTTGTATTTTTAATAGAGA
CGGGGTTTCTTCATGTTGGCCAGGCTGTTCTCGAACTCCTGACCTCAAGTGATCCAACCGCCTCACCCTCCCAAACTGCTAGAATTACAGGCGT
GAGCCACCGCGCCTGGCCCATCAAGCTTTTAAATGTAGAAGGTTGGAGAGTCAGCCCCTCTTTACCCTAGTTGACTTGATTACCACTTGGCCTG
TGTTCAGAAGGAAATCAGCATATCACTGTCCCCTCTCTCCTTTGTATCCTATCCCCATGTTAGATAAGCTCTTAGCATTATGGGAATCTCTTCT
GAACCTGATTCAAAGAGAGAAGGGGTCGATTCAATTTAGTTCAACAAATATTACTTTAATATCCTCTTGATGGGTGTGATGCTGTGATGGGCTG
CAAGAGTGAATAAGCTAATGTTGCTTTCCCTCTCCCGCAAGAATGTACACAGATTGCTACTGTGCTGGTGATATCTGGTATAACCTTTTGAGAT
TTTACAGAATCGCCAGTTGGCGACCATGTCACTGACATATGGGTCATGGGCCAATGTACTGGGCTGCTTCATGTAGTTTCATTCCATGGCTACA
ATCCATACCCATGACCCCAGATTGTTATCCTATAGAGGTAGCCAAATGAATGAATTAGGTGAGCTCCTGACTCCTATAGCGTTTTGTACCTCAC
TCATTCCTACTTATCTGGCAACAGATAAGTATGTATGTCACATCTCACCAGGGAGTTTATAAACTCTAAGAATACGTATGCTGCCATATTTCTC
TATCTTTGTACAATGCCTTGTTCAGTAAGTGTGTTTAATAAATGAATGAATTCATCATCATATCTGGAATGCAACTCACAGTGCAGTCTGGGCC
AAAGATGAGTCGACAGCATCCTCTTCACTGCAAGGACCACGCACATGGTTCTTAGCACAACACCCAGTACTCAGTGTTTATTGTTATTTGAAAG
TTCTTGAAGAGCTACAGTGTTTGTGCTAATGATCTGCATTGTTGGTACTGATAATGTACCAGGTGTTATGGGCCACTCACGACACACAGCAAAG
GAAAGATGGGCCCTCCTTCTTCATGAGAAAACATGCTCAAAGTACTGAACAAGAAACGAACAACACAAAATTTGAACACGCCTCTGAGTGCTCT
AAATGTCTTTTTCTCTCCACATGAGGCTCTATCTTGAGATGGGGATGGAGGACTAGATTATAGTCAGGGGTAATTTCCACTTTTCTTTGTTTTT
GCCTTTTTTTTTTTTTTGAGACAGAGTCTCACTCTGTCGCCCAGGCTGGAGTGCAGTGGCATGATCTTGGCTCACTGCAACCTCCGTCTCCTGG
GTTCAAGTGATTCTCCTGCCTCAGCCTCCCTAGTAGCTGAGATTACAAGCATGTGCCACCCTGCCCAGCTATTTTTTTGTATTTTTAGTAGAGA
CGGGGTTTTGCCATGTTGGCCAGGCTGGTCTCGAACTCCTGACCTCAAATGATACGCCCACCTCGGCCTGCCAAAGTGCTGGGATTACAGGTAT
GAACCACCGCGCCTGGCCCTTCTTTTTGCTTTTTTTTTTGAGACGGAGTCTCGCTCTGTCACCCAGGCTAGAGTGCAGTGGCGCAATCTTGGCT
TACTGCAACCTCCTCCTCCTGGCGGAGGTGATTAAGTGATTCTCCTCTCGGTGGAGGTGAGTAAGTGATTCTCCTGCCTCAGCCTCTCGAGTAG
CTGGGATTACAGGCATGCACCACCACACTCGGCTAATTTTTGTATTTTTAGTAGAGACGGGGTTTCACCATGTTGGCCAGGCTGGTCTCAAACT
CCTGACCTCGTGATCTGCCCGCCTTGCCCTCCCAAACTGCTGGGATTACAGCCGTGAACCACCTTTCCTGGCTTCTTTTTGCTTTTTAGAGTCA
GGGTCTTGCTATATTGCCCAGGTTGGATTCTAACTCCTGGGCTCAAGTGATCCTCCCGCCTCAGCCTCCTGAGTAGCTGCAACTTGGCGTGTGC
CACTGCACCCGTCTTTCCTTTTGACTTTTTATTATAGAAAGTTTCAAATTTACTAATAAGTTGAAATAATAGTGCATGAGCATTCTTTACCTAC
CACCTAGATTCAACAATTTAATTGAACCGAATTTGGTTTGTGAAGTACAATATTTTAGTCATGTATCAAGATTTTATAGGCAAAGTGATACAAT
TTTTTAAAAATCTGTTACTGAAAGGCCCCTGTAATAACACTACCCCTGAAAAAACTTTGGTGTGGTCATGGTATGTGCACCAGAAATCTCTCGG
CTTCCCCACTTTCATGGCTTCATTTCTCCAATTTACTTCCTCAAATATTACGCCAAAGTTTACTAGGGCTTGCCTTTATGTTTTATTAAATTAT
AACTTTCTAGCCGTCCTGGTGTCCTGGTCCTGATAAAGGTTTCCAGGATATTTCACCCATTAGTTTGTATAATTTCCTATCTCTACAGACTTAA
TTACAAATTCCAAATCTACCTTAGCTTTTTCCACTTTTATGGGAAAAAAAAAAAAAATAGGACTGTTGTAATTACTTAGTAACCTCTTCTGAAA
CCTTCTCCTTAGCCTTGCCTAAGCCTGATGTTTTCCTTTTTCCTGAAATATTTAATTTTCCAACTCTGTGAATCTAAGTTTTGCCCACAGTAGG
CACTAACCGAGTGCTTACGGGGTAAACAGCTGTGTGGTGGTCGTTTGGGTTCTGGGTGGTGAGCCAGGGTCCTGCTCAGAAGAACCACAAACTG
AAAAGCAGGCTCTCACATACAATGAGTGACACACAATTGCAGAAGATTATGGAGCCTGGGAGAGGAGTTGTTTTTTTTTTTTTCCTATTTTCTG
AAGGAGTTGAGCCTTGAGCACAGACAGAAAGGAGGGAAAATGAGGGAAAAGTTTGAGTCTAGAGAAATACCAGCAGCTCCTACCTAAATGCCGT
TCCCATTCACTTCTGCAGTTTGAGACAACATTCCTGGCTGCAGGTCTTCCCAAGACCCCACTCAGTTGTAAGTTATTAACCACATCTTAAGAAG
CCATTCTGTGAGAATAAAAGATCCTTCTTTGAGCTCTTACCATGTGCAAAATCCTATAGGTGTATTACCTCATTTAACTCTCATAATCCCATTT
TATGAAATGTGGAAATTGAGGCTAAATTACTTGCCCAATCACAGAAGGCAAAGCCAACACCCTTTATTCCTTCTTTTTTTCTGAAATTGCCTTA
TAAAAACACATAATTCCACCTCCAGAGATAACATTGCAGACTTTTTCTATGTAAGCACCATGATAGAAACATACAATATGGATCTTTGTATAAA
CATGAAATAAGGTACCATTTGTAATCTGATTTTTCACTTAAAATATATCATGAGTATCTTTCTATATTAATAAGTATGTTGTTATATCTACCTT
ATTGCTGTAATGGCTGCATAGTATTCCACTTTTCAGAAATTTTTTATTTTAACTAACTCCTGTTGATGGGCATCAACTTACTTTTTTTTCTTTC
TCTTTCTTTGACATTTTTATTTATTATTATTATTATTATTATTATTATTATTATTATTATTATTATTTCGGATGGAGGCTTGCCCTCTCACCCA
TGCTGGAGTGCAATGGTGCGATCTCGGCTCACTGCATCCTCCACCTCAAGCGATTCTCCTGCCTCAGCCTCCCGAATAGCTGGGATTACAGGCG
TGTGCCACCGTGCCCAGCTAATTTTTTGTATCTTTAGTAGAGACGCAGTTTCACCATGTTGGCCACGCTGATCTCGAACTCCTTACCTCAAGTG
ATCCTCCTCCTTTGGCCTCCCAAAGTGTTGGGATTGCAGGCGTGAGCCATCGTTCCCAGCCAAGAAACCCCTTTTCTTAGTTTTAATGAGAACG
CATCTTCTTAGACACCGAGGTATTGTTTTACTGTAAACTCAAATGTCCTGACCTCCGTCTCCTGCCGGCTGGCCATTTGTAGAAAACCCCTAGG
CGAAAGAGGAAGCTTTGCATCTCCCAATCAGCCTAATTAGTTAGTCCCCTTGGAATTCCCATGGGGTCAGGACACGGTTGTCATTGCAGTTGTC
ATTGTTTCCAGGGTTAACTGTCATAAGCATGAGGAAAGGCAGTTTAAAGCCATTGGATATTCAGTTTTGTGTTCCTGCTATTTATGTGACCAAT
TTCATACTTGGAGTTTGTTCAGAAGAGTGAAAAATGTTTCAAGTGCTATCTCTTCTAAACCATGGCAAACCACACTCTATTAAGACAGCACAAA
AGACTGAGGAAGAAAAATGTTTACGAAACATTTTGCTTTGGTCTGCCTCATGATAAGTAATTGTACTGGTCATTTCTTTTTCCACTGAATTGAC
TGGTGTCTCTGACATGCTCTCTGGTGAGCCACACTGGCTTCATTACCTCCTCTCTTCTCCTTTTTCAGGGTCTTTGGCCATTGTCCAGAGAGAA
TTACACTTTCTCTCTTAGAAGCTCACGTCTTTCTTCTCTTGGGCCACTTCCACGCCAGCCTCTTCCACACTGCCTTCCTGAGGTCGGGCACTGG
CATGGAGCTCTGTTTCCTCTTCTCCTCCCTAGGGTTGTAATCTGGCTTTCCCCCAATCTTTCTATTGTTTCCACTTCACCAGTGATTTCCTCCT
TGTTGTCCAGAAATAGGTCAGGATAAGAAATTCCCCTTTTTGACTTCTTCAGCCTTCTTGTTAACAAAGCAAAAGAAGGTTAAACACCTCATTC
AATGCTCAGCATTTTTTTTTTTTTTTTTGAGTCCGGGTCTTGCTCTGCTGCCTAGGCTGGAGTATACTGGCTCCAGCAATTCCCCTACCTCGGC
CTCCCAAGTAGCTGGGACCACAGGTGTGTGCCATCGCACCCAGCTAATTAAAAAAAAAAAATTCTGTAGAGACAAGGTCTTGCCATGTTGCCCA
CGCCGATCTCAAACTCCTGGGCTCAAGTATTCCACCCTCCTCGCCCTCTCAGAGTGCTGGGATTACAGATGTGAACCCCTGCACGCACCCAAAG
GTCAACTTTTAACTGCCTGAAACTTTTGATAGGTCAGAGAGATGAATTCTCTTGTTCACAATACACAGTCAGAATTACCTTGGCTTACGAGTTC
AGGGCACAGAACACTGGTGTCACACAAACGTGGGCTCAAAAGCTGCAATTACGCAGTGGCGTTTTCTGGATTTTTTTTGTAGAGATGGGATCTC
AGTAGATTGCCAAGGCTGGTCTCAAACTTCTGGCCTCAAGCAGTCCACCCATCTCACCCTCCCAAAGTGTTGGGATTACACGTGTGTTTTCAGT
CTTGGCGACCAACTGGGATTCTCTTCTCCCCTTTATCTTCTGTATCCAATCTAGCCCCTGCCATTTCTTTTTTTCTGGTGCCTCTAGGGTTTGC
TCTTTTCTCTCCTTTCCCATTCTCCTCCATTAAACAACGCTCCCCTTGTCATGCTCCGAAACCTCAAATCTGAACTTTTACTTCTCCTATCACA
GAAACTTCCCACACTCCAACTGCTTATTACCCCTCTACCTTCACCACCAAATTGTAAATTCTGTGAGAACAGAAACCCAATTTTTTGAATTTGC
TGTTGTGTCCTCAATTTCCGTCACAAACAGGTTCTAACATTGACAGTTGAATGAAGGAATGAATGAACGAGTTCTTGGATTGCTACAACTGCCT
TTAAACTTCCAGTAAACTTTTGCTGCCATCAGCAGGTGCATATGGGGCACTCTTCATAGGCCAAGCCACCCTGACTCATACCTGTTATCCCAGC
ACTTTGGGAGGCCGAGGTGGCGAGGATGGCTTGAGGGCAGGAGTTTGAGACCAGCCTGGGCAACATAGTGACACCCCATCTGTACAGAAAAATT
ACATAAAATAAAATTAAGGCTAGGTGCAGTGGCTCATGCCTGTAATCCCAGCACTTTTGGAGGCCAAGGAGAGAGGATCACATGAGGTCAGGAA
TTCAAGACGAGTCTGGCCAACATGGTGAACCCTGTCTCTATGAAAAATATAAAAATTAGCTGGCTGTGGTGGCGTGTGCCTGTAATCCCAGCTA
CTTGGGAGGCTGAGGCAGGAGAATTGCTTGAACCCAGGAGGCAGAGGTTGCAGTGAGCCAAGATCACGCCACTGAACTCCAGCCTGGGCGACAG
AGTGAGACTCCATCTCAAAAAAAAAAAAAAAAGTTTTATTGCAATGCTCAGGGCAGTAAGCATTGTTGTAGAAAATAAGTAATTTGTATTTTTA
AAATGCGTAATTCATCCCGGCACTTTGGGAGGCTGAGGTGGGTGGATCACTAGGTCAAGAGATCAAGATCATCCTGGCCAACATGGTGAAACCC
CGTCTCTACTAAAAATACAAAAAATTAGCCAGGCGTGGTGGCGCGCACCTGTAATCTCAGCTACTCAGGAGGCTGAGGCAGGAGAATCGCTTGA
ACCCGGGAGGCAGAGGTTGCAATAAGCCGAGATAGTGCCACTGCACTCCAACCTGGGTGACAGAGTGAGACTCCATATCAATAAATAAATAAAG
TAAGTAAATAAAATACTGTTCATGATATTCTGCTCCCATGAGAAGCTTGCCGTTCCTCCTCATTGCAGCCCTATGACTTCCCGTCTGGCGCCTT
CAGTCGCTGCTTTGTCTCCTCCTTGGATGCCTTTTCTTTTGTCCTCTCATCAAAACCAACTCATCCGTGAGGCTCCAGCTTGAGCTCTACCTCC
TCTATGAAGCCCCCGAACCTTTCCCACCGACACAGACCTCTGCCTTCTTTGATCATCTGCTGGACTTCAGTTTAATGCTTTAATGATTCCACTT
GTATCGGTCCTGTCTATCCACCCGGTTTAGGTATCTTTGAAGATAGGAGCTACCTACTTTTTAGGTCTTTTGCATCCTCCACACTCCTCATCTA
AAGCTGCGTCCACTCTGAGTCACCTTCCTAACCTGCCAGGCAGGGTCTTTTTGTTTTTTAAACTTTAAGTAGGCTAGGCCGGGCGCAGTGGCTC
ATGTATGTAATCCCAGCCCTTTGGGACTCTGAGGCAGGCAGATCACAAGGTCAGAAGATCGAGACCATCCTGGCTAACACGGTGAACCCCTGTC
TCTACTAAAAAATATAAAAAATTAGCCGGCCGTGGTGGCAGGAGCCTGTAGTCCCAGCTACTCCGGAGGCTGAGGCAGGAGAGTGGCGGGCACC
CGGGAGGCGGAGCTTGCAGTGAGCCCAGATAGTGCCACTGCACTCCACCCTGAGAGACACACCCAGACTCTCTCTCAAGAAAAAAAAAAAAAAA
CTTTCAGTAGGCTATGTGGAGGTCGAGTTAGATATCTTCGGTACAAGCCTTAGATTTCTTTTTCTGTTTTAAGGGAATTTTTTTCTTTTTCTCC
AATTTTGTTACTGTGAGTTCACCAAGGCATATTCAACAGCTCATTGCTGCCCTGCCTCTCCTGCACCATCCAACATCTCACTGCAGTATCCAGC
AACCCACAGGCCTGCTGGGCGTGGTGGACAGTCCCCAAGATCAGGTTATCCGTGTCAAAATATTGAGTGGTTGATGAGTGCTCCAAGTAGGCAC
TAGAGCCTGCTGAGAGCACTCAGAGGTTTCTGCACAAGCTCAGTGGATTTGAGCCCTCATCATTGTTCATTGCTATGTAAGTCAAGGGTTGGTC
ATAGGTCCTGCCTTGGACTGTCATTTCAGGAAGCAGGGCAGCTACAGCAGCAGTCCCCAACGTTTTTGGCACCAAGGATCCATTTTGTGGAAGA
CAATTTTTCCATAGATTGGGGGTAGGGGGATGGTTTCGGGATGAAACTGTTCTATCTCAGATCATCGGGGATTAGATTCTCTTAAGGAACGCAC
AACCTAGATCCCTGGCGTGTGCAATTCACAGTGGGGTTTCCGCTCCTGTGGGAATCTAATCCCTCTGCTGATCTCACAGGAAGCGGTAAAGCTC
TCTTCCCTGCTGCTCACTTCCTGCTGTGTGGCCCCTTTCCTAATAGGCCATGGACAGTTACCAGTCTAGAGGCTGGGGGGCTGGGGACCTCTGA
ACTACAGGCTTCTCCACCTGCACAAGTTCTGAGAAGTTAGACTATCCAGAGCAAGAGGGGCAGGAACTTCCTGGTCTCACTGAGAATCTTCGGC
CAATCTCAACTCCCAATGGGCATATGACTCACACGGTGATCATCTTAAAATGCAGATTCTGAGTCAGTGATTTGAAAGGGACCTGAAATCTTGC
AATTGTAACAAGCTCCCAGATGATACCAATGGCGATGTTGATGCTGCCTGTCTGTGGACCACACTTTGAGTAGCAAGGGTCTACAATATGGACA
TTTCCTTTTCCAGTGAACTTTAGCAAGTGAGGAGCATTTCAAGGAAGACACCTCCCATGCACACTGTCATTAGTTGCAGCATCTCCTGTAGCAA
TTGGGCTAAATCTGTCTTTAATTCTTTTTCAAACAGCATATCCAAGTTTTGCAATCATAAGCACCAGCCAGGAGAATATATATTCCATGCAGAA
AATGATGATGCCCAATTTACCAAAATGTTCACGCTGAATATAAGAAGTAAGTTAAATTGCCCAGAATTTGATTTTTATTTTTTAATTCCTTAAT
TTTTTATTAGTCTTAACTAGGAAAAGTTAAGTAATGGCTTAGAAGGCCTACTACAAAACTGTTTTTGTACGCTGAAGTGTTTTGAAACTTTACT
CTCATATCTACTGGCATTGATCATATATCTCTTTATTTTTTATGTTATTTTCTTCTGTTTCATTTTTAAGACCAGGTCTCACTCTACCACGCAC
GCTGGGGTGCCATGGCACAATCATAGATCCCTGTAGCTTCAAACTCCTGGGCTCAAGTGATCCTCCTAAGCCTCCCGAGTAGCTGGGACTACAG
GCACGCGCCACCATGCTCAGCTAATTTTAAAACCATTTTTGTAGAGAGGGGGCCTCCCTTTGTTGCCGAGGTTGGTCTCAAACTCCTGGCCTTA
AGGGATCCTCATACCTTGGCCTCCCAAAGTGCTAGGATTACAGGCGAGAGCCACTGCACCTCGCCATATATCTCTTTCTGTGTGTATCATCAGA
AGCTGAAAGACTTATTTCACATTGTCTCTGAATATGAATTAGTGTTATGACTTTATTGATTTTAGTATTTTGAAAGGTCATGTTAAGGAAAGGC
TGAAAGTCATTTTATCTCTCATTTATTTGTTTTTAATAATTTTCATTTCTTTGGCTTATAAAACAATGAGAAGTCCAACTTCTCCTGAAGCTAA
GAATCATTTTAAGGCATGCAAACAGGTGGACGTCTGTACCTCAGCTCTCTCCAGGGAGAGGCTGGCAATGGAAAAATGGTGTGTAGCAGAGAGG
TTGCATGGCAAGGAGGTTGCATGGCAAGGAGGAAAGAAGAAATTACCAGAGGTCTGGAGGCATCCTAAATGAGAAATCCTCCCAGAAGCACAAA
CTGCCCTGGAGTAAATGGGTAGCCTGTACTGTAGGCAACTTTGAAACTATTTCCAGAAAGTACCATACTCCATGAGCTTATTTTATTTTATTAT
TTTCAGAGACAGGGTCTTGCTGTCTTGCCCAGGCTGGTCTTGAACTCCTTGGCCCAAGTGATCCTCCCACCTTGGCTTCACAAAGTATTGGTAT
TATAGGAGTCAACCACTATGCCCAGCCAGTGAGCTTATTTCACACGTTCTTTTCTACAGGGAAACCTCAAGTGCTCGCAGAAGCATCGGCAAGT
CAGGCGTCCTGTTTCTCGGATGGATACCCATTACCATCTTGGACCTGGAAGAAGTGTTCAGACAAGTCTCCCAAGTAATAAGGACATTGATGCC
TCTTATAATGGAAGAACATAAAACTCTCTGACCTATTGACTCTTTCATGAATACGGTTTAGGAGGAAATGATGAAATATTTAAAATGCTAACCT
TCTCAATCAACCATAACTCTCAATAGTCATAGACTGTTTCTGATAACTTATACTGGATGAATCTCTTTTAGAACTCGCTGCAGAAATCCTAACT
TCCAATCTGATGACAGCACACCTGTCTAAATTCTTTGCCATTTTTTTTTTCAGCTGCACAGAAGAGATCACAGAAGGAGTCTGGAATAGAAAGG
CTAACAGAAAAGTGTTTGGACAGTGGGTGTCGAGCAGTACTCTAAACATGAGTGAAGCCATAAAAGGGTTCCTGGTCAAGTGCTGTGCATACAA
TTCCCTTGGCACATCTTGTGAGACGATCCTTTTAAACTCTCCAGGTACAACAGTTGTTCTTGTGATATTCCACCATCAGGAATTCCCCACTAGA
AGTTAGTCCCCATCGCTGACTTTTACTTGGGGAATTTTACAGGAGAGTATAGGGTCAGTGTGTGAGAAAAGGTTTCTTGAGTCAGGCAAGAATC
CCCAGAGAGACTGTTTCACAGGTTGGCGCGGAGTCCTCCCTGTGCCCTTGTGACTCATGTGTCACAGTGACGGGGAGAAGCAGAAACTGCCGGT
GTGGTGAATCTCCATGGAAAGATCTAACTCTAGAGAAACAGATTTTGTCACTTGGAGTCTCTGTCATTTTCCCTTTTGATTAGCCTCCTTATTT
GCCCTCAGCTTGCTGTTTTATAATTTTTGGTTTGCTTTTTAGAGCCCTCCTAAGTTAAACAGTTGTGAAACCTGGCTGCCCACCCTAGTAGTTA
GGATCACCAACCTCACAAAACTGACTTCTCCACTTTCATGTGCGACCTTCATAAAAGGGATATGAACTTCTTTTTTCTCTGACTTGTACATCCT
GTAGGTTTAAATCCATGCATTTTTTTTTTTTTGAGATGGAGTCTCGCTCTGTCACCCAGGCTGCAGTGCAGTGGCGTGATCTTGGCTCACCTCT
GCCAGGGTTCAAGCGATTCTCCTGCCTCAGCCTCCCGAGCAGCTGGGATTACAGGCACCTGCCACCACGCCCAGCTAATTTTTGAATTTTTTTA
GAGACGGGATTTCACTGTGTTGCCTGGGCTGGTGTCTAATTCTTCGACTCAAGTGATCCTCCCATCTTGGCCTCCCAAAGTGCTCCGACTACAG
GCGTGAGCCATCGTGCCTGGCCCAGATGTAATTCTTGTAAATTTACCCTAGTAAATGGTTTTAAAGAATGGATTGAGAATAATCCGCAATTTTC
TAGGGAGGAAATGTATCCTTTACAGGGACATTCCCTGATTGTCTGTGGGGAGTAGAGTATATGTAGAGTGGTTGTTAGGACTGAAAATGATTAT
TACTGAAACAGGATGTGAGAGATTATAATGAGTTGTCCACTATTTATAATGTCACACAGGAATTCTGTTTCATCGCTGAGTGACACTCTTTTGT
TGCAGGCCCCTTCCCTTTCATCCAAGACAACATCTCATTCTATGCAACAATTGGTGTTTGTCTCCTCTTCATTGTCGTTTTAACCCTGCTAATT
TGTCACAAGTACAAAAAGGTAAAAGCAAAGGTAAAAATTCATTATTCTTTCCTCTATCTGCAGAACTGCCTATTCCTAACTGACTCATCATTTC
ATCTCTGAAGCAATTTAGGTATGAAAGCCAGCTACAGATGGTACAGGTGACCCGCTCCTCAGATAATGAGTACTTCTACGTTGATTTCAGAGAA
TATGAATATGATCTCAAATGGGAGTTTCCAAGAGAAAATTTAGAGTTTGGTAAGAATGGAATGTGCCAAATGTTTCTGCAGCATTTCTTTTCCA
TTGGAAAATCTTTAAAATGCACGTACTCACCATTTGTCTTTGCAGGGAAGGTACTAGGATCAGGTGCTTTTGGAAAAGTGATGAACGCAACAGC
TTATGGAATTAGCAAAACAGGAGTCTCAATCCAGGTTGCCGTCAAAATGCTGAAAGGTACAGTATAGTGGAAGGACAGCAACAAAGATGCCCAA
AAATGGGAGGCACAGTTTCCCACCCATGCCTTCTTCTCTTTTCCATCCTTTTAATGGTTACTGTTTGCCTTGTTTCAAGGCTAAAAATGCAGTG
GATTGGGGTGTCAACCCAGTCATGAATACAAAATTCAAGTCATAAATACAAAACTCCACCTCTTCTTCCACTTCTCTCTTTGTTTATTTTTATT
TTCTTTTATTTTTTTGAGACAGGGTCTCACTCTGTCACCTAGGCTGCAGTACAGTAGTGTGATCATGGCTCACTGCAGCCTCCACCCCCTGGGC
TCAGGCTCCTCAGCAGCTGGGGCTACAGGCGTGCACCACCACGCTCAGCTAAGTTTTTTATTTTTGGTAGAGACGGGGTTTCACCATGTTGCCT
AGGCTGATCTGGGACTCCTGAGCTCAAACTATCTGCCCGCCTCGGCCTCCCAAAGTGTTGGGATTACAGGCGTGAGCCACTGTGCCAGGCCTAT
TTAGTTTTTATAGGCTTTGATATTTGGGGATACAGTTGCCACAGGCAGAAGTTCTTTCTTACATTTGTGTTGTTTTATTTTGTTTTATTTTTAG
AGACAGGATCTTGCTCTGTTACCCAGGCTAGAGTGCTGTGATCATAGCTCACTGCAGCCTCGACCTCCTTGGCTCTAGCAATGCTCTCACCTCA
GCCTCACAGGAGTGTGCCAAGACAATTGGCTAATTTTTTTTTTTTTTGGTACATACGGTGTCTCACCATATTGCCCAGGATCGTTGCAAACTCC
TGGCTCAAGTGAGGCTGCCTTGGCCTCCTAAAGTGCTGGGATTACAGGTGTGGGTTGAAACAGACTCTGGGTAGGAGAGAAAACTGGGGCCCTT
TGTATCCTCACTTCGTTGCTCCATCCATTCCGATCTGGCGTCCACCCCCATTGCTGGCCTCACCGTTACCACCGCTGACCCAGCAAAAGCATCT
CCAGCTGGCTCTCTTGCTAAGGTCAACAGTGACTTCAAACCAAACCAAGCCTAATGGATATTTTTCAGTCCTCATTACTTGATTCTTCAGCATG
AATTGATGCTGTTGATTCTTCTCTCCATCCAGAAGCTTTCTTTCTTTGGGTTTTGTGTCACCATATTCTGGTTTTCCTCCCACCCCTCTCCCCT
TCTCAGTCCTTTGTGCCCTCATCTTCTTCCATCCACCTTTTGTTGTTGTGGCTGATTTTGAAACTCAGTCCTTTGTGGGCTCATCTTCTTCCAT
CCAGCTTTTGTTGTTGTGGCTGATTTTGAAACACAGCCTTGCTCTGTTGCCCAGGCTGCAGTCCACTGGTGTGATCTCAGCTCACTGCAACCTC
CACTTCCCACGCTCAAGCCATCCTCCCACTTCAGGCCCCTGAGTAGGGGGGACTACAGGCATGCGCCACCATGCCTGGCTAATTTTTGTATTTT
TGGTAGAGATGGGGCTTCCCCATGTTGCCCAGGCTCCATCTTGCTTTTTATGGGGCATCCCTGTCCGCTTGCTCCTGGACCGCCTTGCGTTTTC
GCTCCACACACTCAACACAGTCCATCCCCACTACACCCGTGATGTCCTCCCATACACCAAGGGCCCTCATGCTTGCGTCTCCTTTCGGAGCTTC
AGGTTCATATGTTAAATGTTTGGATGTCTCAAAGGTCCCTTTAACACAGTGTATGCAAGGTGAATTCCCCTAACCCTGGCCCTGCACCAGCAGT
CCTCTCTGTGACTGGTAATGAATGCCAGTGAATAAATAACCACATTCTATATAGTTGGGCACACTAGAAACCCGTGACTTTTCCTTGACACCTT
CCTCTTTCTAACACCCTGTGAGCTAATCCTATCAGGTTTCCGATTAGTGTCTCTTGATTCCATCCTCGTCCCTCCATCTCTATGACCACCACTC
TAGTTCAAGGCTCTCTCCTGGACAAAAGCTTCCAAAGCAGGTTCCTGTATCCACTCTTGCCTCCCTTTGGCTTCTCCATACTGAGGTCCAAGTG
ACAGTGGCGAAAGGCTAAGCAGATCAAATGGCTTTCCTACTTCACATTTCCTCCACCACCCGCATGGCTGGGCCACCGCTGCCTCCCCACCTCT
TGCTCTCGGCACCCCAGAGCGCTGGCCTTCTTTCAGTTCCCCCAGCACTGTCCTCCCACCCACTGTGGGGCCTTTGCACAAGTGGATCCTTCTG
CTTCCCCTTCCCCTTTCATGTAAGTATCTCCCACTGCCCCCTCAGATCTCAGCTTAAACACCACTTCCTCTGTCTCACACCACAGACAATATTG
AGGCCCTTGCAATGTCCGACATTAGCTCTCTGCACGCTTTCCCCCGTAGAATCCATCACCTTTGTCATGACATTTTTTAACATCCAATTGTTGT
CCCATCTGTCCACTAGCCCCTGTGCCTCATGAGGGCACGGTCTGTGTCTGTGGTGCTGTGCTCTCTCCTTTCTCCACCTTTGCCCACTCTTTCA
CAACCCTCAGCACTGTTCTCCTCCCCTTCCACCATGAGTCACCTGGCCAGCTCCCATTTTTCTTCAGGACTCAGTTTAGACATTGAATGCTCCT
TTCTCCACCCCTCCAAGGCTAAGGTAGCTATCCCTTTTGACCCTACAGTACCCCTGCACTCCTTTGCCACGTTGCATTTTTTCTTTTTTTTTTG
ACACGGAGTCTCACTCTGTCGCCCAGGCTCGAGTGCAGTGGCACCATCTCAGCTCACTGTAAGCTCCGCCTCCTGGGTTCACGCCATTCTCCTG
CCTCAGCCTCCCTAGCAGCTGGGACTACAGGCACCCACCACCACGCCCGGCTAAATTTTTTTGTATTTTTAGTAGAGACAGAGTTTCACCGTGT
TAGCCAGGATGGTCTTGATCTCCTGACCTCGTGATCCGCCTGTCTCAGCCTCCCAAAGTGCTGGGATTACAGGCATGAGCCACCGTGCCCAGCC
CAACGTTGCATTTTTTCTTTTTCTTTCTTTTTTCTTTTTTTGAGATAGGGTCTCACTCTGTCACCCAGGCTGGAGTGCAGTGAAGTCATCATAG
CTCACGGCAAGCTTCAAGTCCTGGGCTCAAGTGATGGTCTGCAGCCTTTCCAGTAACTGGAACTACATGCAGGCACCACCAAGCCCAGCTAATT
TTTATTTTATTTTATTTTATTTATTTATGTATTTTTACTTTATTTTATTTTTAAGTAGAGACAAGCTCTTGCTATTTTGCCCGGGCCTTTCTTG
AACTTCTGGGTACCAGCAATTCTCCCGCTTGTCTCAGCCTCCCAAGATGTTGGGATTAGACGCGCAGGGACCCACGTCTTGCCTGCCGTATTGC
ATTTATGGCACTGTATTGTCATGGCTTATTTACTTCTCTGCCTTCTCCAGGAGACTCTAAGATCCAGGAAGACAAGGGTTGTGTCTTGTTTTTC
CTTCATTCCCCAGTGTCTAGGACATTGGCTCTTACAGAGTAGGCACTCAATAAATACTTGTTGAATGACTGAATGAAAGAGGTAATGGTACATG
AAAATGCTTAGAAGAAGCTAAGCATGCTAAAAAATGTAAGATATTATTTTAGCCATGAGGAATAGGACATGAACAAGTAAAGCCCCGAATCCCT
GTCCAGCGTGAAGCTGAAGACATGATGTATTAGGGGGTCCCAGTGCCCACAGGAAATCCCACCCCCAAGCTAAAATCTTGGAAACAAGGATACC
CCTGAGAGCTTGCCCAAACCAAAATAGACGATGTCAGCACCGGAGAAGCCACTATAAAGGTTAGGATGCCTTCCTGGACAAAATAATGGAACCT
GGCAATCGAACCAAATCTTCACTGAATGTAAAGAAGAGTTACTATATCTGGAAGAAAAAGTCTGTTCACAGAGGGGTGGTGCCTGGAGCCTGGA
GAGGGAAGTCCAGAGACCCTGCCCTTGCCCCTGTGGCTGCCCGGGCTGCCCTGACCAACTGCACATGAGCCGCAATGACGGCAGCCCTTGGATT
CCATAGCGACTTTCCTCACACTGTGCTTCTAAGTCAGCTTATAAGTACAGTTTGCTGAGCTATCTGGAATTTTCCCTAGAGAGAGAATGCATTG
GCCAACCAATATGTTCTAGCCTGCTTGGCAGTTTTATTTCTCAATGTCAATTAATGGGTCTCTTGAGCACCTGATAGTGGGAATTAGTCCTCTT
TGACCTTCTCCCATTGGACTTGCTGGCAAATCTAATGTTCTAGACCTCAGGGCCACAGGCTAGAGTCAACCATGCTCACGACACTGTTATCTCT
CTCTGACTACAACAGATCCAAGAGTTCAAACAAACAAACAAAAAGGACGTTTCTCCCTTCTGTTAACTTGTACTGAGGAGGAAAAGCATGTGTT
ATTATTTTGTTTCTTTGTTTTGAGGGCCAACTGTAAGGATTTTTATTTTGGTAGGAGTAGAGGAGTCCTGTTGAAAGGTGCATTACCAGATTCA
ACATTTATACTATAGTCTTTGTTTTGTTTTGTTTTGTTTTGTTTTTGAGACAGAGTCTCGCTCTGTCACCCAGGCTGGAGTGGTGCAGGGGCTC
AATCTCGGCTCACTGCAACCTCTGCCTCCCCAGTTCAAGGGATTCTTTTGCCTCATCCTCCTGAGTAGCTGGAATTACAGGTACGCACCGGCAC
GCCCGCCTAATTTTTTGTATGTTTAGTAGAGACAGGGTTTCACCATGTTGGCCAGCTTGGTCTTCAACTCCTGACCTTAAGTGATCCACCCGCC
TTGGCCTCCCAAAGTGTTGGGATTACAGGTGTGACCCACTGCGCCCAGCCCTATACTACAGTCTGAATTCTGCCTTAGGCTGGGCATCGTGGCT
CATGCCTGTATTCCCAGCACTTTGGGAGGCGGAGTTGGGAGGATTGCTTGAATCTAGGAGTTCAAGACCAGCCTGGGCAACATGGTGAGACCCC
ATCTCTACAAAAAATATAAAAATTAGCTGGGCATCATGGCCTGTGCTTGTACTACCAGTAACTTGGAGGGCTGAGGTAGCAGCATCACTTGAGC
CCAGGAGGCAGAGGCTACAGTAAGCTGAGATCATGTCACTACACTCCAGCCTGGGTGACAGAGTGAGATACTGTGTCAAAAAAAAAAGAAAGAA
AGAAAAGGAAAAAAAAAAAAAGAAAAAGGAGAAATTCTGTCTTAAAACACAGGATATTGTTTGTTTGTTTATTTATTTATTTATTTTAAGATGG
AGTTTCACTCTTGTTGCCCAGGCTGGAGTGCAATGGTGCAATCTCAGCTAATTGCAACCTCTGCCTCCCACATTCAAGCGATTCTCCTGCCTCA
TCCTCCCAAGTAGCTGGGATTACAGGTGCCTGCCACCACGCCTGGCTAATTTTTGTATTTTTAGTAGAGACGAGGTTTCACCATATTGGCCAGG
CCAGTCTTGAACTTCTCACCTCAAGTGATCCACCCACCTCGGCCTCCCAAAGTGCTGGGATTACAGGCATGACCCACCATGCCTGGCTTCTCTC
ATAATTTTGAATTTAAATAAATAATGCAGATTGACTCTGAGCTGAGAAAAATTTTATTTAATGACATAAAATTCGTATTTTACTTGAGTTTTAC
ATTTTTAATGCTCCTTTCTTTGACAGAAAAAGCAGACAGCTCTGAAAGAGAGGCACTCATGTCAGAACTCAAGATGATGACCCAGCTGGGAAGC
CACGAGAATATTGTGAACCTGCTGGGGGCGTGCACACTGTCAGGTAACCCACTTCCACGAAAATCACCTCATCAAAAAGACTGTAGCTTGATGA
CAAAGAGGATGTTTGCTCTCTCTCTCTCTCTCTCTTTTTAATTCTTTGTCTTTTCTCAGTCACAGTGTGAACTCTCAAACCCAAGTGGAATTAG
ACACTGAGCACTCTATAAATCAGAGGGGTCAAAATAAAGAATGCCTCATTCATCTGCTTTATCGTGATATATTGCATAATTCTCACCTGCTTAA
AAACAACAACAACAACAACATTGCAAGTACATTTGGTGGTGTCTGTGCTTCTCTCCCAGCTTGGAAGCTGGTGCACAGGCGTGGTGAGACTGGT
TACAGAGCCTGGCCACTGCCCCAGTTGGGCTGCCGTCAAATACGGCACAGCCTAGCTAGGATATCAGACTTTACTTTCCCAGAATTCTCTGGGG
CATGCCCTCTGATCTTCTCTCTTCTGCCTAGAAATACCCAAATGATGTGCCCAAGGTTCATTCTTTCTGCAGCAGCAGCCCTGGGGCTGGTACT
AAAAGGAAAAAGAGGAAAGTGAATCTGAGAGAGGACTGGGAATATATTTCTCCCTCCTCAAGCAAACAGCAAATCAGCATATAGTTACCAAGTG
TTCACCTATAATACACAGCTAGAACATTACTTTCAGTTGCCAACTGGAGAATCCAGGAGGCCAGTGGTATTGGTGAGGCCACACATACAAAAAA
GGGCCACAGAGAATGTCAAGAAGATGCTGCTTTCCAAAGAAATTTGAGCAAAAGCTGAAACTGAATTTAAAGTATAAGAAGAGCTAGGCTCAGA
AAAAGTTGTACTGTCCCCAAGTCAGCAGAGAACCAAGCCCTCCTAAGAGTATGTTGTCTGCTACATAGACTTCTGAAATAACAGTTTGCTTTGT
GTATGCCTATAATTGAAACTGTAACTATTTCAGGACCAATTTACTTGATTTTTGAATACTGTTGCTATGGTGATCTTCTCAACTATCTAAGAAG
TAAAAGAGAAAAATTTCACAGGACTTGGACAGAGATTTTCAAGCAACACAATTTCAGTTTTTACCCCACTTTCCAATCACATCCAAATTCCAGG
TAAGAGGCTGGGTCAGGGTTTCGTAATTACACATCATAGAACGTAGGCAAAGTGTGCTGTTCAAACACACTTCGTTGACCAGTTTCTAAAGGCA
CCGTGAAGTCTGTGGGTCCTGCAACCTAGAGATTTCCTGAATCTTTGCTATAGTTTCCCTGTTGACATGGAACGAGTCCTGTCCCTTTCCTTCA
GTACACCTACTATAGCTGAGCTAGTCTCTCTCCACCCATGCCTGCATCACACCATAGACGCCTATTTGGTTTCGCCAAAGGTGCATTATTCGGT
CTTTCACGACACCTGGTTCCCTCACAGGTATTGGTAGAAAGAATGAAGACTTTTTCCAAAGTCCTTAACATATGCAAAGAGAGCAGCTCGGGTC
CTGGGACTATTGCGCAAAAGAACGCTGAACTCAAATTGGATTCTAAGATATTAGGATGGATTGATCGACACGTGATGGGGACACAGTAAAGTAG
CACTAACCTTGTCTCTGCTCTGTTTATCCTCCGCATCCATCGGCATCCTGAGAGATGCTTCGTCCTGCAGGGATTTATTGCTTTACCCGGCATA
AATGAGGGCTGTAGGAGTTTGCTGGATCTCCTCCTCATCCTTGAACTTTCTTGCTAATTACTTGAGCATCATGGCTTTGTACCACCTTTCTCTG
AATGGATTCCCAGGCATTCTCATGGAGGCATTCGTTGAGCCTTGGAGCATTCTTTTTTTTTTTTTTTTTTTTTCAGACAGAGTTTCGCTCTGTT
GCCTAGGCTGGAGTGGTGCAATGGTGTGATCTCGGCTCACTGCAACCTCCACATCCCAGGTTCAAGCGATTCTCTTGCCTCAGCCTCCCGAGTA
GCTGAGATTACAGGCATGTGCCACCACGCCCAGCTAATTTTGTATTTTTAGTGGAGACAGGGTTTCACCATGTTGGTCAGGCTGCTGTTGAACT
CCTGACCTCAGTTGATCCACCCACCTAGGCCCCGCAAAGTGCTGGAATTATAGGCATGAGCCACCGCACCTGGCTGACCCTTCGCGCGTTCTTA
TTTCCCTCCCTGTATGGAAGTTCTCCCTTATTCTGAAGGGTATTTGTTTATTGGAGACTTTTTTCTTTACCAGGCGCTTTTTAGGGATACATTT
GAGAGTCCCGGCTTTGTTTTCTTAGAATGTAAGTTTTAAGTGCAGGCCTCTGGCCTTCCAGGTCTGAGACACAGACCCAGTGTCTTAAAGCCAC
CAGGCCCCACGGACATCCCCATGCACGTCCGTGTGCAGCTGCCCTTAACCTATGCATGCCCGTCACACCGTCCTCTCCTTTACATTCATTTCCC
AGCTCATCGTCTAGAAATGAGAACTCTATAAAGCCACTCATATTCTGGAACAGAGGGGCTATCCTACTGAGTCCGATGTGTGTGACCAGTATCC
ACTGGTCAGTACTTAGCCCCTTTGATTCGTTCTGTTCACTGCAATATTAAATACACTGAAATTATTCCTTTTGGAATATTTGTGGTCTGAAAGC
ATGAAGCCATTTCCTAGATAAATGTAAATTGTAAATTGGGTTAAACTCGTATATTACAATAAATTGAATCGTGATCTACTTATAATTCCTACAG
AGCTCCTCAGGGAAGAATTTTTATATACCTTAAAAGAGATTTGTATTATTGCTATTTATTAATTTCACAGTAAAAAGAAATGAGCTTTACAAAG
GCAAACTGCAAAAAAGAAGGATGCTCAAACGCTTACGGGACTCTCGGGAACATCTGTATTATGTGAGGGAAAGTCGCCTGAGTTCAGAAACCAA
AGAATGAGATCGATGTGAGTCCTGGTTCCACTCGAATCATATTTATCTCACTGTGCCTAATTTCTCTTTTATAAAATGCCACCCATCTCATAGG
TTGTGCCAACGATTGAGTGAGGTCCTTTTTGAACTGTAAGATTCTATATCGAAAACAGGGATTACTTTTATCTTAGACTCGCAAGCCCAGTTAC
ACAGATGTTTTTAATGTACACAAAAAATGGACAAATGGATCGTCTGCTTTTAATTTAAAAGTCAATTTATAACTGGAATCCATTTATTTGATGA
ATTACATTTTTAAAATAAAATGTCTGCTGAGAAGAATAATGTAAATAATGAAAAAACAAAATTTTTTAATAGCATGCCTGGTTCAAGAGAAGTT
CAGATACACCCGGACTCGGATCAAATCTCAGGGCTTCATGGGAATTCATTTCACTCTGAAGGTAATATTTTATTCTAAGTAGTAGCACTTTAAA
ATGGAAATGAATGCAAAAGTTTTATGTTAGCTATTTTTTAAAACTCTGTAAACACAAAAGCATTTTAAAATTTGCTAATTGTCAGATGATAGCT
AAAAGCCAGTTTGTATACTGTAGATTTTATGTCAACATTCAACTAATAAACACTGAGGACTATTTTATTTGGTCAGATTATTCATTTAAAGTCA
TATATTAATTACAGCCATCTTATTACCTGACAAGTGGAAGAGATAATGAGTTCCGAAGTTACATAGAATTTGGATTAACTTCTGCTTACTTTGC
TTTCTGACTGGATGACTTTGGACAAGTTATGTGACCACCAGAATCACAATTTTCTTGTTTATAAAATAGGCCTAACACTACCTTCCTCACAGGA
CTGTTAGAAGGAGTAAATGAGGGGCTGGCCGTGGTGGCTCACGCCTGTAATCACGCCTTGGGAGGCCGAGGCAGGCAGGTCACCTGACGTCAGG
AGTTCAAGACCAGCCTGGCCCAATATCGAGAAACCTTGTCTCTACTAAAAATACAAAAATTAGCTGGGTATGGTGGTGCACGCCTGCAATCCCA
GCTACTTGGGAGGCTGAGGCAGGAGGATTGCTTGAACCCAAGAGGCAGAGGTTGCAGTGAGCTGAGATTGCACCACTGCATTCCAACCTGGGCA
ACAGAGTGAGACTTCAACTCAAAAAAAAAAAAGAAAGAAAGAAAAAAAAAGGAAGGAGTAAATGGAAGAATATAAAATGCACAATATAGTTTAT
AAAATAGGATAGATGGGCCGGGCACAGTGGCTCACGCCTGTAATCCCACCACTTTGCGAGGCTCAGGTGGGTGGATCACGAGGTCACGACATCA
AGACCATCCTGGCTAACACGGTGAAACCCTTCTCTACTAAAAATACAAAAAATTAGCATGAGCCTGTAGTCCCAGCTACTCGGGAAGCTGAGGC
AGGAGAATCCAGTTGCAGCAGGCCAACATCGTGTCACTGCACTCCAGCCTCGGCCACAGAGCGAGACTCCTTCTCAAAAAAAAAAGCGATAGAC
AATTAATATTAATTCCTTTCCCACTGTGACAGCCCTACCTAGTGCAAAAGAGAAGTATCTAAAACTCCTGACTAATCAATCAGGAGGTCATCGG
TCATCAAAGCAGTTCCAAAGTTTATCTCTAACCAAAACAAGTCTCCAGTGACCCTTCATAGGCAGCATAAACAGGTCATCTCTAATGCTGCCGG
GAAGATAATGCGATAGCTTCATGTCTTAGCACCTCACCTAACTCTGGCTTGAATAACCTTCCCATAGAGATTTAATAAGGCAACTTCTTAGAGT
TTTGGCAAAAGTGAAGACTGGCTCTATTTTACAGATGAAATTGAATATGATAACCAAAAAAGGCTGGAAGAAGAGGAGGACTTGAATGTGCTTA
CATTTGAAGATCTTCTTTGCTTTGCATATCAAGTTGCCAAAGGAATGGAATTTCTCGAATTTAAGTCGGTATGCTCCTTTTAAAGAAAAAACAA
ACCAAAAAAAAGATTTGAAAAGATGTGCTTATATATGTTTTCTTGTTTATTTTAACTTGTATCCCTTAAAGTCTGCCTTTTCTCCCCTGTTCAC
TGTTGGAGTCACCTAGCGTGTTACCTTGGCTCTTGGCTAATTGTAGTAGCATAAAGGCCTGGGATCCCTTGTCAGGTCACGGCTAGCACAGCCC
TCCCAGGCTGCACAAAGTCCCCTGAAACTTCCAAGGCTGAAGGTCGAGATAGGAAGTCCTCAGAAATCCTTCCTCAAAACAAAGCGTAGCATTG
TCAGTCCCTTTCAGAACGGCTGTTCAGGTTGTGCCCTGCATGTGGGCATTCAACCCAGGGGATGAGAGGAGGCTGAAACCGAGCCAGCCACCCT
GAGTGTCTTTGTCTAATTCTCACCCTGCGTGCTGTGGGCTGGCAGCAGTCCTGCAGGCTCACTGCCTCCTCTCTTGCTAACCCCAGATCCATTC
GTTGGTAAGGCCCTGGAGCCTGCCGTGAACCATGTCTCTACCCCAATTTTGCACTCTTTTTGAACTGCCTTTCCACCCGCTGTTCTCTGTGATT
TCAAATGTCTCCTGCCTATAAGCAGATCATAGCCCACTCTCTGGCTACCTTCCTTCCTCGTTTGCTTGCCTTTCATTACCTTCTCTTTATTTCC
CAAAATTCTTCCCCCTCATTTTTCTTGCAGTCTTCTAATCTCCTCCTCCTCTTCTCCTCCACTTCCTTCCCCTTGCCTCTTCTCTCCTGTTTTC
TCTCTGAATTTGGAAAGACTACTTTCAATTGTATTTTTTTGTTTTGTTTTGTTTTGTTTTTGGAGACAGTCTCGCTCTGTTGCCCAGGCTGGAG
TCCACTGGCGTGATCTTCGCTCACTACAACCTCTCCTTCCTGGGTTCAAGCAATTCTCATGCCTCGGCCTTCCGTGTAGCTGGGACCACGGGTG
CATACCAGCATGCCTGGCTAATTTTTTGTATTTTAATAGAGATGGGAATTCACCATGTTGCCCAGGCTCGTCTTGAAATCCTGAGCTCAAGCAA
TCCACCTGCCTCAGCCTCCCAAAGTGCTGGGATTACAGGCGTCAGCCACCACACTCGGCCTTTTTTCTTTAAAAAATTACTGCCTCAGCCAGAT
GTTCATGGTGTGTCTCTGCAGTTCCAGCTACTTCGGAGGCCAAGGTGGGAGGATTGCTTGAGCCCAGGAGTTGGAAACTGCAGTGAGCTAGGAT
CGCACCACTGCACTCCATCCTGGGTGACAGAGCAAGTCTCTTTCTCTAAAAAATAAAAAATAGCCAGCCGCGCGTGGTAGCTCACGCCTGTAAT
CCCAACACTTTGGGAGGCCGAGGTGGGTGAATCACGAGGTCAGGAGATCGAGACCATCCTGGCCAACACGGTGAAACCCCGTCTCTATACAAAA
AAAATTAGCCGAGTGTGGTCGCGGCCGCCTGTAGTCCCAGCTACTTGGGAGGCTGAGGCAGGAGAATGGCATGAACCTGGGAGGCGGAGCTTGC
AGTGAGCCAAGATGGCGCCACTGCACTCCAGCCTGGGCGACAGAGTGAGACTCTGTCTCATAAAATATAATATTTAATTAAAAATAATAAATAG
GCTGGGCACAGTGGTGTACGTCTGTAATCCCAGTGCTTTTGGAGGGAAGCCCAAGAGTTCCAGGCTGCAATGAGCTATGACTATACCACTGCCC
TCCAGTCTGTCTATTCAAAATAATAATGAAATAAGCTTAAAACCAATAATAATACAAGTTTTAAAAAATTACTGTCACAGTAATATTTCCACAC
CTCTGAACTGCGACGCACATTTTTCTCTTCATTTTCCCCACCTGCTGTTTGGATTCTTCTTGCTCACGCATCTTGCCCACCTGAGTCTTTCTCT
ATTTCACTTATACAACTACAATCCTGCTTTCACAAGCATTTTGTTTTTGTTTTTGAGACAATGTCTTGCTCTGTTGCCCAGGCTGGAGTGCAGG
GGTGTGATCTCAGCTCACTGCATCCTCTGCCTCCCAGGTTCAAGCGATCCTCCTGCCTTGGCTTCCCAAGTAGCTGGGGTTACAGGTGCACACC
ACCACACCTGGCTAATTTTTTTGTATTTTTGTAGGGATAAGGTTTTGCTATGTTGGTCAGACTGGTCTCAAACTCCTGACTCAAGTGATTTGCC
CGCCTCGGCTTCCCAAAGTGCTCGGATTACAGGCGTGAGCCACTGTACCTGGCCCACGAACATCTTTATAGAGGTGGGAGAACACCTACTTAGA
TTGTCTGGCCTGGTTTGCTGCCCATAGCTAAGTAAATACTCAAACTACTCCCAACTGGCAGTCAAGGGGCACTGCTTCCCCTTCAACCCCAGGC
TTCTAATAATATGAATTTTTGAAGAACATCCACTTTCTTACGCCTTCTATCCTTTTATCTTCACATCAGGCCTCCCCTTTGAATCATGCGTGTC
ACTGTCCCCTTCTTGTCTCTCACCCCCTCCCTGATATTCCTCTGGGTGCCCCTCACTTTCCTCTGTAGGCCCTTGACTTCATCAAACATTTGTT
GAGCCCCAGCTACATGCCAAGCACTGTACTAGATCCTGGAGATACAGAGTCACTTATGATATGACTCCTGGGCTCGAAGATCTTATGAATGATA
GGGGAGACAGAGACAAGCAGACATGCAAGTCCAAGATGACACTGAGCCCGGGGGTGGGTGGCTCAGCCCTGTAGTCCCAGCACTTTCCGACGTT
GAGACGGTGGATTGCTTGAGGCCAAGAGTTCAAGACCAGCCTGGCCAACATGGCAAAACCCCATCTCTACTAAGAATAGAAAAACAGCCAGGCA
CGGTGGTGTACGCCTATAATCCCAGCTACTTAGCAGGCTGAGGCATGAGAATCGCTTGAATTGGGAGGCAGAGGTTGCAGTGAGCAGAGATTGT
ACCGCTGCACTCCAGCCTGGGTGACAGAGTGAGACTTTCTCAAAAAATAAAAATAAAAAATTTTAAAAATTTAAAAAAAGACAAGACTGTAGCA
TGATAAGTCTTCTGACTGAAGTAAGTTCTGGCAACCCAGGGGAGGGATCTGCACAGCAGACCTGGTTGGGGGAAGGCCACATGCAGTGGAAGAG
GCTTTCTGAGGGAGTGCGTGCTTCATGCTTGGACTAATGGAGATTTTTGAAGGAAAAGGAAAACCAGCAGGGAATGTGGAATAGGATAGGAAGC
ATGGAATCAGGAGGAGTTTTTTTTGGAGAAAGGTAATGAGTTGGACATACTGAATGTGAGGTGCCTTGAGCAACCAAGTAGAGCGTGGTCTAGC
AGACACTTCCACACTTCTCCTGTCTGAACCTCAAGAGAAATGTTTGGGTTGGAAATACCGATGTGCGCAATGGTGGTTGCATCCCTAGGTTTGC
ATGAAATGCCTTGGGTGAGGGTGTGCGTTGTGAGGATGCAGCCCTCAGCAGTCACAGTACGCTCGTGCACAAAGCCCCTGAGGGAGACAGGAGC
CGGCAGAGCAGTGGGGAGAAAGCAGGAGTGAACCATGCGCAGGGTTCCCAGAGGGAGGACCAGAAGCGGGAGGGGCTGGCCAACAGCAGCAGAC
ACCACAGGGAGGTCCCGTCAGATCGAGACTGTGTGGGTGCCAAGCCAGTCAGTGCAGGCCTCGGCCAGAGCAGCTTGGCCACACAGGCAGGAGG
AGGAGGCAGGTTGCAGACCTGGGGTAAAGTGGGCAAAGTGCAGGTAGATGGCACTGAAAAAACTGGGTATGGAGGAGGGAGCTCTAGAGGCGCT
GTGGCACAGGGCTGCCAGTGTTCATGGTGCTGCTTTTTATTTTTTAAAGATGAAAGAGTGTACATTGGACCTTTGCTACTAGTGCCCTGTTCCC
CTTCAGATCTTCCTTTGTAAAGTTCATTTTCTTGTCAGACCCCTTTGATTAACATCACGACATCTCTCAGCTCAGGGACTCCTTCTAATTCCAG
TTCAGTAAACCTCTCCAAACTCATTTTTAGCTTTTTGTTTTTCCGATTATTTCCCTCGATATTACTCCATTTATTCCTAAAGCTATTTTCCAGT
CAGAAAAGAGATGCTGGCCAGGCGCGGTGGCTCACCCCTGCAATCCCAGCATTTTGGGACGCCGAGGTGGGTGGATCACCTGAGGTCAGGAGTT
CGAGACCAGCCTGACCAACATGGCGAAACCCCGTCTCTACTAAAAACACAAAATTAGCTGGGCCTGCTGGCGCGTGCCTGTAATCCCAGCAACT
CGGGAGGCTGAGGCAGGAGAATCGCTTGAACCTGGGACCCAGAGGTTGCAGTGAGCCGAGATCACGCCATTGCACTCCAGCCTGGGGAACAAGA
GTGAAACTCCGTCTCAAAAAAAAAAAAAAAAAGAAAAGAGATGCTATTTCTCACACCCACAATAAGAGTACTGGAGGACAGCTCTGAGATTCCC
TCTGAAGGCTCAGGGGAGGGCCCCTGTTGGGGAGCCTCTCACTTTTGCTCGGAATCTGCAAAACATCTGCTCCTCTTTGGCCTCTGGGGATGCT
TCAGAAGCCGCACAAACAACTGCAGCCACCATAGCTGCAGAATTAGGTCTCCTATATTCACTTTGTTTGTTGCACATCATCATGGCCGCTCACG
GCACAGCCCAGTAAAGATAAGAGGCCTTCCATCACCGGTACCTCCTACTGAAGTTGAGTCTAGAAGAAAGATTGCACTCCAGGATAATACACAT
CACAGTAAATAACACTCTGGTGTCATTCTTGACAGTGTGTTCACAGAGACCTGGCCGCCAGGAACGTGCTTGTCACCCACGGGAAAGTGGTGAA
GATATCTGACTTTGGATTGGCTCGACATATCATGACTGATTCCAACTATCTTCTCAGGGGCAATGTGAGGCTGCTATTTCCTACTTATTTTTAT
ACGGCTATTTTGTGTTGTGTCGTTATCATGGTAAACAACTGCACTCACTGTGGTGCATTTTTGATTTATGGTAACATCAAAAAACCCTCACAGC
AGTCTCCTTACTTATGCTTAAAAGGTTTTTCTGCAGCTTCAGGGAATCTTCCATCTATAATAAAAGCTGAGCAAAATAGCATCACATCTGTCCT
TGGGCTAGCTAGTCACAGTAGATCAGTTAGGGGCCTTTGACTGCAATCCTCACTTTAAAAAACCCAAAATCTCAATACTTGCACTTAGTTCAGT
TATCCTAGCTATAAAGTCATGATTGAGTTATGTTTTCAATTATGTCAAAAGCTAATAGTCACAATAAACCACTTTAAAACATATATAGCACATA
CCTATAAAATGTTAAAGCTAAATACTTAAATATCAATTAATGAATATTTATCATCCTTTTACTGTTAACACAGGAAGATCTAAAACATGAGTGA
ATTGGCTGGGTGCAGTCGCTCATGCCTGTAATCCCAGCACTTTGGGAGGCCGAGGAGGGCAGATCATGAGGTCAGGAGTTCGATACCAGCCTGA
CTAATATGGTGAAACTCTGTCTCTACTGAAAATACAAAAAATTAGCTGGGCGTGGTGGCGTGTGCCTGTAATCCCAACTATTCGGGAGGCTGAG
GCAGGAGAATTGCTTGAACCCAGCAGGTGGAGGTTGCAGTGACCTGAGATCGCGCCACTGCACTCCACCCTGGGCAACAAGAGCAAAGCTCTGT
CTCAAAAAAAAAAAAAAAACAACAACAAAAAAAACAGTGTGAATTGACTTGGTAATGAAAAACTAAGCACAGATGTGTTTACAAAAAGAACTAT
TACAAGTAATAGATGACAAAATTGTGTAGTTGAAAATGTGTGTTTTTAAAGAATTACAATACCTGGCTGCGTGCTGGTGGCTCACGCCTTTAAT
CCAAGGCACTTTGAGAGGCCAAGGTGGGAGAATTGCTTGAGCCCCGGTTCAAGACCAGCCTATGGAACATGGTGAGACACTCAACTGTCTCTAT
AAAAAATAAAAAACTAGCTGAGTGTGGTGGCACACGCCTGTGGTCTCAGCTACTTGGGAGGCTGAAGTGGGAGGATCACTTGAGCCCAGGAGGT
CGAGGCTGCAGTGAGCTGTGATCACGCCACTGCACTCCAGCCTGGGCAACAGAATGAGACCCTTTTTTTTGAGACCCTGTCTCAAAAAAGAATT
CCCTACTTGTGAAATAATAATAATATTAAATGCTGACTTAGTGCTTACTATGTGCTAAACATCTAAGTGCTTTATGCATATTAATTCATTTATT
CCTCAGAGTACCCACTTGGAAACTGAGGCACAGAAAAGTAACTCGCCCATGGTTACACAGCATGTGGACTTGAACAGGAATAGTCTGAGCCCCG
AGTCTGTGCTAACCACTATGTTGTAGTGTTTCCCATGAGGGTTATGCACTTACCTCATAGCCTTCATGTGGCAAAAAGCCAATAAAACCAACGT
GAAAGCACCTTGTCCAGGGTGAACATCCAGTAAATGTGAAAAGTCAAATTAAACTGTATTCCCACTACAAACAAATAATCATCTTAGCTGATTT
ACGATCTACTCCTACTCATCATAGACTGCTCATATGTAGTCATTCAGTTTCTACCCCACCACCTGGTTGTCTCTTATGTGGGAAAGTGAATTCC
ATTTGGAACCACAATTAATTTCTTTAATTAATCAAATTAACCAGACTTGCCTGCATGAATCAATAGCTCATCAGTTTGCATACATTTAAAAGAG
GGTTTACTTGGCTGATTAAGCATGTGCTGATTAAACATGTGCTCTCAACGACTCGTCAACCCATGTAAAAGAAAATCAGTACAGCCAGGTGTGG
TGGCTCACAGCTGTAATCCCAGCACTTTGGCAGGCTGAGGCGGGTGGATCACGAGGTCAGGAGTTCAAGACCAGCCTGCCCAACATGGTGAAAT
CCCGTCTCTACGAAAAATACAAAAATTAGCTGGGCATGGTGGTGCGTACCTGTAATCCCAGCTACTCGGGAGGCTGAGGCAGGAGAACCACTTA
AACCAGGGAGTCTGAGGTTGCAGTAAGCTGAGATAGCGCCATTGCACTCCAGCCTGGGCAACAAGAGCAAAACTCCGTCTCAAAAAAAAAAGAG
AAAGAAAATCAGTACAAAGCTCTGCCCCAGTAACCTACCCATCTTGTCTCTTGATTCTAGTCTGAGACTATACTAAGTCAAAACTCCCTTTCAT
GCTAGTGGAAATTATTAAAGCCACAGAAGCCACACTGGTATCATTTCTGGAAGTGATGGCGTGGGCTCCCCTCCCGACATTATTGTGGATGACA
TTTCCACTAAAGGTCTTCCCAGAAATGCTGTAACAGAAGATCTCACTAATTCACTAGTACCCACTTACCCCTAGGCAACTGACTGGCTATTCCT
TAATGGAAAGTACCTCTTTCCAGTGGAAACATGGCAAGTTAAACTTACCCATTCCAAGCACAAGCCTTTGTTCGAGAGGAGTTGTAAAGAAATA
TGCCTTATGTTTTAGGCTAGTATTATTAGAATGTTAATTTGAAAGTGAAAACCTTTCACGTGAGGAATGTGATTTTCTCAATAAGGCATTAAGA
GTGGTCTTAGGAAGATCATGCATTTCATCTTAATACAAAACAAAAGAAGTCATGTCTGTATGTGGAAAATTCACCATCTTATCTCCTCTGGGTT
TTCCACAGGCCCGTCTGCCTGTAAAATGGATGGCCCCCGAAAGCCTGTTTGAAGGCATCTACACCATTAAGAGTGATGTCTGGTCATATGGAAT
ATTACTGTGGGAAATCTTCTCACTTGGTAAGTTGGGCAGCTGCTGGCCTCCCTTGGCTCCTGGCTTTGCATCCTCTGCTCTCTCGGTGCCCCCC
CACCCCTCCCCCCAACACTGATGGGTCTTACTTGTATTGCAGCCCATGACTTTATGTTTATTTGCTGGTGTCCTTTAGCCTCTCTTCCTCACTG
GTCTATAACCTGCTTGAGAGCGTCAACCGTGACTTCTTTTTCCCAGCCGCAGCCCGTGTGCCTCCAACAGTGTCTGGCACATGGCAGATCTCAA
TACGTGTTTAATTGAATGAATCAATAAACAAATGAAGAAATGCATGAATGGCTGCAATTGTCTAATGTTTTCCTCAGGTGTGAATCCTTACCCT
GGCATTCCGGTTGATGCTAACTTCTACAAACTGATTCAAAATGGATTTAAAATGGATCAGCCATTTTATGCTACAGAAGAAATGTAAGTTCAAG
TCAGACTGTAATTTGGTTGAAATCAGAAAGGTACAGTCTGTCTACTTCCAAATGCATGACCAAAAAAAGTCAAACTCCTTAGTGCAAAGCGTAT
AGGATTCTTTTTTTAAAAAATAGAACTCAGGTCTTGCTGTCTTGGCCAGGCTGGTCTCAAACTCCTGGCTTCAAGCAATCTTCCTGGCTCAGCC
TCTCAAAGTGCTGGGATTACAGGTGTGAGCCACCACACCTGGCTGTCTGATTCCATTTTAAAAAGAAAAGAAAACTCTTTGTTTTGGGAGTTTC
TGA
HUMAN SEQUENCE - mRNA
CCAGGCGGCATCCCAGGGCTGGGCCGGCGCCCTGGGGGACCCCGGGCTCCGGAGGCCATGCCGGCCTTCCCGCGCGACGCGGGCACCGTGCCGC
TGCTCGTTGTTTTTTCTGCAATGATATTTGCGACTATTACAAATCAAGATCTGCCTGTGATCAAGTGTGTTTTAATCAATCATAAGAACAATGA
TTCATCAGTGGGGAAGTCATCATCATATCCCATGGTATCAGAATCCCCGGAAGACCTCGGGTGTGCGTTGAGACCCCAGAGCTCAGGGACAGTG
TACGAACCTGCCGCTGTGGAACTGGATGTATCTGCTTCCATCACACTGCAAGTGCTGCTCGATGCCCCAGGGAACATTTCCTGTCTCTGGGTCT
TTAAGCACAGCTCCCTGAATTGCCAGCCACATTTTGATTTACAAAACACAGGAGTTGTTTCCATCCTCATTTTGAAAATGACAGAAACCCAAGC
TGGAGAATACCTACTTTTTATTCAGAGTGAAGCTACCAATTACACAATATTGTTTACAGTGAGTATAAGAAATACCCTGCTTTACACATTAAGA
AGACCTTACTTTAGAAAAATGGAAAACCAGGACGCCCTGGTCTGCATATCTGAGAGCGTTCCAGAGCCGATCGTGGAATGGGTGCTTTGCGATT
CACAGGGGGAAAGCTGTAAAGAAGAAAGTCCAGCTGTTGTTAAAAAGGAGGAAAAAGTGCTTCATGAATTATTTGGGACGGACATAAGGTGCTG
TGCCAGAAATGAACTGGGCAGGGAATGCACCAGGCTGTTCACAATAGATCTAAATCAAACTCCTCAGACCACATTCCCACAATTATTTCTTAAA
GTAGGGGAACCCTTATGGATAAGGTGCAAAGCTGTTCATGTGAACCATGGATTCGGGCTCACCTGGGAATTAGAAAACAAAGCACTCGAGGAGG
GCAACTACTTTGAGATGAGTACCTATTCAACAAACAGAACTATGATACGGATTCTGTTTGCTTTTGTATCATCAGTGGCAAGAAACGACACCGG
ATACTACACTTGTTCCTCTTCAAAGCATCCCAGTCAATCACCTTTCGTTACCATCGTAGGAAAGGGATTTATAAATGCTACCAATTCAAGTGAA
GATTATGAAATTGACCAATATGAAGAGTTTTGTTTTTCTGTCAGGTTTAAAGCCTACCCACAAATCAGATGTACGTGGACCTTCTCTCGAAAAT
CATTTCCTTGTGAGCAAAAGGGTCTTGATAACGGATACAGCATATCCAAGTTTTGCAATCATAAGCACCAGCCAGGAGAATATATATTCCATGC
AGAAAATGATGATGCCCAATTTACCAAAATGTTCACGCTGAATATAAGAAGGAAACCTCAAGTGCTCGCAGAAGCATCGGCAAGTCAGGCGTCC
TGTTTCTCGGATGGATACCCATTACCATCTTGGACCTGGAAGAAGTGTTCAGACAAGTCTCCCAACTGCACAGAAGAGATCAGAGAAGGAGTCT
GGAATAGAAAGGCTAACAGAAAAGTGTTTGGACAGTGGGTGTCGAGCAGTACTCTAAACATGAGTGAAGCCATAAAAGGGTTCCTGGTCAAGTG
CTGTGCATACAATTCCCTTCGCACATCTTGTGAGACGATCCTTTTAAACTCTCCAGCCCCCTTCCCTTTCATCCAAGACAAGACAACATTCTAT
GCAACAATTCGTGTTTCTCTCCTCTTCATTGTCGTTTTAACCCTGCTAATTTGTCACAAGTACAAAAAGCAATTTAGGTATGAAAGCCAGCTAC
AGATGGTACAGGTGACCGGCTCCTCAGATAATGAGTACTTCTACGTTGATTTCAGAGAATATGAATATGATCTCAAATGGGAGTTTCCAAGAGA
AAATTTAGAGTTTGGGAAGGTACTAGGATCAGGTGCTTTTGGAAAAGTGATGAACGCAACAGCTTATGGAATTAGCAAAACAGGAGTCTCAATC
CAGGTTGCCGTCAAAATGCTGAAAGAAAAAGCAGACAGCTCTGAAAGAGAGGCACTCATGTCAGAACTCAAGATGATGACCCAGCTGGGAAGCC
ACGAGAATATTGTGAACCTGCTGGGGGCGTGCACACTGTCAGGACCAATTTACTTGATTTTTGAATACTGTTGCTATGGTGATCTTCTCAACTA
TCTAAGAAGTAAAAGAGAAAAATTTCACAGGACTTGGACAGAGATTTTCAAGGAACACAATTTCAGTTTTTACCCCACTTTCCAATCACATCCA
AATTCCAGCATGCCTGGTTCAAGAGAAGTTCAGATACACCCGGACTCGGATCAAATCTCAGGGCTTCATGGGAATTCATTTCACTCTGAAGATG
AAATTGAATATGAAAACCAAAAAAGGCTGGAAGAAGAGGAGGACTTGAATGTGCTTACATTTGAAGATCTTCTTTGCTTTGCATATCAAGTTGC
CAAAGGAATGGAATTTCTGGAATTTAAGTCGTGTGTTCACAGAGACCTGGCCGCCAGGAACGTGCTTGTCACCCACGGGAAAGTGGTGAAGATA
TGTGACTTTGGATTGGCTCGAGATATCATGAGTGATTCCAACTATGTTGTCAGGGGCAATGCCCGTCTGCCTGTAAAATGGATGGCCCCCGAAA
GCCTGTTTGAAGGCATCTACACCATTAAGAGTGATGTCTGGTCATATGGAATATTACTGTGGGAAATCTTCTCACTTGGTGTGAATCCTTACCC
TGGCATTCCGGTTGATGCTAACTTCTACAAACTGATTCAAAATGGATTTAAAATGGATCAGCCATTTTATGCTACAGAAGAAATATACATTATA
ATGCAATCCTGCTGGGCTTTTGACTCAAGGAAACGGCCATCCTTCCCTAATTTGACTTCGTTTTTAGGATGTCAGCTGGCAGATGCAGAAGAAG
CGATGTATCAGAATGTGGATCGCCGTGTTTCGGAATGTCCTCACACCTACCAAAACAGGCGACCTTTCAGCAGAGAGATGGATTTGGGGCTACT
CTCTCCGCAGGCTCACGTCGAAGATTCGTAGAGGAACAATTTAGTTTTAAGGACTTCATCCCTCCACCTATCCCTAACAGGCTGTAGATTACCA
AAACAAGATTAATTTCATCACTAAAAGAAAATCTATTATCAACTGCTCCTTCACCAGACTTTTCTCTAGAAGCCGTCTGCGTTTACTCTTGTTT
TCAAAGCGACTTTTGTAAAATCAAATCATCCTGTCACAAGGCAGGAGGAGCTGATAATGAACTTTATTGGAGCATTGATCTGCATCCAAGGCCT
TCTCAGGCCGGCTTGAGTGAATTGTGTACCTGAAGTACAGTATATTCTTGTAAATACATAAAACAAAAGCATTTTGCTAAGGAGAAGCTAATAT
GATTTTTTAAGTCTATGTTTTAAAATAATATGTAAATTTTTCAGCTATTTAGTGATATATTTTATGGGTGGGAATAAAATTTCTACTACAG
HUMAN SEQUENCE - CODING
ATGCCGGCGTTGGCGCGCGACGCGGGCACCGTGCCGCTGCTCGTTGTTTTTTCTGCAATGATATTTGGGACTATTACAAATCAAGATCTGCCTG
TGATCAAGTGTGTTTTAATCAATCATAAGAACAATGATTCATCAGTGGGGAAGTCATCATCATATCCCATGGTATCAGAATCCCCGGAAGACCT
CGGGTGTGCGTTGAGACCCCAGAGCTCAGGGACAGTGTACGAAGCTGCCGCTGTGGAAGTGGATGTATCTGCTTCCATCACACTGCAAGTGCTG
GTCGATGCCCCAGGGAACATTTCCTGTCTCTGGGTCTTTAAGCACAGCTCCCTGAATTGCCAGCCACATTTTGATTTACAAAACACAGGAGTTG
TTTCCATGGTCATTTTGAAAATGACAGAAACCCAAGCTGGAGAATACCTACTTTTTATTCAGAGTGAAGCTACCAATTACACAATATTGTTTAC
AGTGAGTATAAGAAATACCCTGCTTTACACATTAAGAAGACCTTACTTTAGAAAAATGGAAAACCAGGACGCCCTGGTCTGCATATCTGAGAGC
GTTCCAGAGCCGATCGTGGAATGGGTGCTTTGCGATTCACAGGGGGAAAGCTGTAAAGAAGAAAGTCCAGCTGTTGTTAAAAAGGAGGAAAAAG
TGCTTCATGAATTATTTGGGACGGACATAAGGTGCTGTCCCAGAAATGAACTGGGCAGGGAATGCACCAGGCTGTTCACAATAGATCTAAATCA
AACTCCTCAGACCACATTGCCACAATTATTTCTTAAAGTAGGGGAACCCTTATGGATAAGGTGCAAAGCTGTTCATGTGAACCATGGATTCGGG
CTCACCTGGGAATTAGAAAACAAAGCACTCGAGGACGGCAACTACTTTGAGATCAGTACCTATTCAACAAACAGAACTATGATACGGATTCTGT
TTGCTTTTGTATCATCAGTGGCAAGAAACGACACCGGATACTACACTTGTTCCTCTTCAAAGCATCCCAGTCAATCAGCTTTGGTTACCATCGT
AGGAAAGGGATTTATAAATGCTACCAATTCAAGTGAAGATTATGAAATTGACCAATATGAAGAGTTTTGTTTTTCTGTCAGGTTTAAAGCCTAC
CCACAAATCAGATGTACGTCGACCTTCTCTCGAAAATCATTTCCTTGTGAGCAAAAGGGTCTTGATAACGGATACAGCATATCCAAGTTTTGCA
ATCATAAGCACCAGCCAGGAGAATATATATTCCATGCAGAAAATGATGATGCCCAATTTACCAAAATGTTCACGCTGAATATAAGAAGGAAACC
TCAAGTGCTCGCAGAAGCATCGGCAAGTCAGGCGTCCTGTTTCTCGGATGGATACCCATTACCATCTTGGACCTGGAAGAAGTGTTCAGACAAG
TCTCCCAACTGCACAGAAGAGATCACAGAAGGAGTCTGGAATAGAAAGGCTAACAGAAAAGTGTTTGGACAGTGGGTGTCGAGCAGTACTCTAA
ACATGAGTGAAGCCATAAAAGGGTTCCTGGTCAAGTGCTGTGCATACAATTCCCTTGGCACATCTTGTGAGACGATCCTTTTAAACTCTCCAGG
CCCCTTCCCTTTCATCCAAGACAACATCTCATTCTATGCAACAATTGGTGTTTGTCTCCTCTTCATTGTCGTTTTAACCCTGCTAATTTGTCAC
AAGTACAAAAAGCAATTTAGGTATGAAAGCCAGCTACAGATGGTACAGGTGACCGGCTCCTCAGATAATGAGTACTTCTACGTTGATTTCAGAG
AATATGAATATGATCTCAAATGGGACTTTCCAAGAGAAAATTTAGAGTTTGGGAAGGTACTAGGATCAGGTGCTTTTGGAAAAGTGATGAACGC
AACAGCTTATGGAATTAGCAAAACAGGAGTCTCAATCCAGGTTGCCGTCAAAATGCTGAAAGAAAAAGCAGACAGCTCTGAAAGAGAGGCACTC
ATGTCAGAACTCAAGATGATGACCCAGCTGGGAAGCCACGAGAATATTGTGAACCTGCTGGGGGCGTGCACACTGTCAGGACCAATTTACTTGA
TTTTTGAATACTGTTGCTATGGTGATCTTCTCAACTATCTAAGAAGTAAAAGAGAAAAATTTCACAGGACTTGCACAGAGATTTTCAAGGAACA
CAATTTCAGTTTTTACCCCACTTTCCAATCACATCCAAATTCCAGCATGCCTGGTTCAAGAGAAGTTCAGATACACCCGGACTCGGATCAAATC
TCAGGGCTTCATGGGAATTCATTTCACTCTGAAGATGAAATTGAATATGAAAACCAAAAAAGGCTGGAAGAAGAGGAGGACTTGAATGTGCTTA
CATTTGAAGATCTTCTTTGCTTTGCATATCAAGTTGCCAAAGGAATGGAATTTCTGGAATTTAAGTCGTGTGTTCACAGAGACCTGGCCGCCAG
GAACGTGCTTGTCACCCACGGGAAAGTGGTGAAGATATGTGACTTTGGATTGGCTCGAGATATCATGAGTGATTCCAACTATGTTGTCAGGGGC
AATGCCCGTCTGCCTGTAAAATGGATGGCCCCCGAAAGCCTGTTTGAAGGCATCTACACCATTAAGAGTGATGTCTGGTCATATGGAATATTAC
TGTGGGAAATCTTCTCACTTGGTGTGAATCCTTACCCTGGCATTCCGGTTGATGCTAACTTCTACAAACTGATTCAAAATGGATTTAAAATGGA
TCAGCCATTTTATGCTACAGAAGAAATATACATTATAATGCAATCCTGCTGGGCTTTTGACTCAAGGAAACGGCCATCCTTCCCTAATTTGACT
TCGTTTTTAGGATGTCAGCTGGCAGATGCAGAAGAGCGATGTATCAGAATGTGGATGGCCGTGTTTCCGGAATGTCCTCACACCTACCAAAACA
GGCGACCTTTCAGCAGAGAGATGGATTTGGGGCTACTCTCTCCGAGGCTCAGGTCGAAGATTCGTAG

[0288] TABLE 24

MOUSE NOMENCLATURE
ICSGNM Dntt
Celera mCG2378
HUMAN NOMENCLATURE
HGNC DNTT
Celera hCG24648
MOUSE SEQUENCE - GENOMIC
GATGCTCAGCCCTCCAGGGCAGGAGAGGGCTATACTCTAAGTGGAGAGATAAGCTACACTTGTCCATTTATAGAGTGGTAGGTAGGTATATTAA
CGGTGTGTTCTCTGAGGAAGTCTCCAGGACCTGAGATGAGGGATGTGTGTGGGGTCAGCATCTCTGGGGCAGTGGGAGAAGACTGGTCAGGAGG
AATCACGGTAGAGTATATCAACACAGGCAGTTGTTAGAGCTCTGTGATCATTCAGTGCTATCACCCATGGCAACAACCTCTCCCAACCATTGAT
TGGGAATTGGTGTGGGTTTCCCCTAAGGGAAGTCCTGACAGAGATGTGGAGGCATTTTCTCTGAGCCATCAGCCTCCTGTCTGAGGACCTGGGG
AGGCTTTGTCAGCATCCTCTATAGAAGGTCAGTGTCTTGGTGATCACTGTCTATGCTGGAGAGAAGAGAGAGAGGGTCTGAGGCTAAGGGGCTG
GACGTGATCAGGGGATCTTGTAGTGATATCAGTTTCTGTTTACTAGCCGTTTTACCCCCACTTAAGACAGCGTAAACTCCCAGAGCTACAGTTA
TTCCCATTGTCTTAGGTCCCCCGATAAAACTCAGGAAAGAAAACCAAAACCATTTAAAAGATCTCTTCAAGCCACGCAGGTCAGACGCTCACCA
AGTTTAGTCTAACTCGACTAACATTTTTGTTGTTGTTGTTTTGTTTTGTTTTGTTTTTTTGAGACAGGGTTTCTCTGTGCATCCCTGGCTGTCC
TGGAACTCACTCTGTAGACCAGGTTGGTCTCGAACTCGAAATCTGCCTGCCTCTACCTCCTAAGTGCTGGGATCAAAGGCGTGTGCCACCACTT
TCCTGGCTTCAACACTTTTTTTCTTTCTTTCTTTTTTTTTTTTACTGTTTTTGTTAACAGTTCTATTCGGTCTTTCAATTAGTTGTCTAAAGAC
TGCAAAAGTCACTTTTGAAATTGCTTCTTTCTGACTTGACTCCTTAGCCCAGCAAGTTTGTCCTCTAATCCCCACTCTTATGGTTTGCATCTCA
GACCCCTGCTTAAATTTTACCTTCTACTTAATTGCACTGAAAACAAGTAAAGCCTTCTCAGAGCAACTTGGTTAAAATCGGGTCCAGTCCCACC
CACAGACACCTGCCCCCTTCCTCCTTCCCACAGCATGTACACCAGCCACCTCTAGTGGATTATTTACCGTCTGTTTTTTATCTAATAAATGGTA
AGCTCTGAGAGGGCAGGGACCAGCTGTTTGAGCCTGGAAGAACTGGCTTCTGGAGGGCACCCGACAGAACTGTAGGTTGAACTCATGGCTGGAC
TCTCTGCTTCCATTAGCTCCACTCTGGCCATTGGCAACAATGTCTAGCTGGAATCACAGCTCTGAGTCTCCATCCTAATCCTCTGGGTAGATCC
TGTTAAGCCAGCATGCTCACCTCCAGCGATAGCTGAAGGTCAGGACAAATGTTAAAGTGTTTCCTAATACAGACCATCTCTATAGATGTCCACG
ATTACTAATATCTCAGCGTATTGTTGACTTCTCAGTGAAAGGGTATGTGCTCTGAAAGCTGTGACCAGAACTGAGTGAGATTTTCCAGGTTATG
GGTAGTGGCACAGGCTGGTCGACTCCATGTGTAGAAGCCACCTGAGGACAGCCACCTGAAGAGCGTGAGTGGCTGAGAGTTCAAGAGCTTGTAA
TGTTCACCTGCCATATCTACTGCTCTCTGACCCGGTACTCACGGCTTATCAGCAATCCAGAAGGAGAGGGTATTTAGCGGGTTGCCTCAAGAGT
TTACTGAGCAAAAGAGAGGCTGGAAAAGATTTCAGAGATAGTGGGGAGTGGTGGTGAATAACCCTGTCTTAGGATTTTGGAAATGTTACTAAGT
GGAATTAAATAGTCCCGGAAGTGAAGACAGAGATGCAGACCAGGCATTGGGGCTCCCACTTGTAACTTCCACACTCAAGAGATAGAGGCAGAAA
GACAGAGCGTTCAAAGTCATCCTGAGATCAAGGCAGTGCAGCCTGGCTACAGGAGACCCTACTTCAAGAAGAAAAGCAAAGAGCAAGAAGGGGA
ATGGGCTAGAGATACAAATGCAATAGAAGCCAGGAATGGCAGGGCTGGAGGGCTCTGCAGGCTACCAGGGGCCATGGATGAGAAGCCTTTCTTC
CAGCCAGCGACCAACAAGCAGTTCAGCCTGTGGTCTGGGGCTGCCATCCCACTTGAGACTCTGTTCCCATTCCCGTCTGGTCATAGTTCACATC
TCACAACTATCATCTTCTCATTGGTTCCCTCTCTCTTCTCTGATTCACCCTTGCCTAGTTGGTTTTCAGGAGGTGCCATATTGCTCAGTGGGTC
TCCATGCAAACTCATATCAACGGCTCCCACGCCTGCAAACAAAACCCCAGCTCTCCTATCTACACCTTTCCTGTGGGCAACTGCCTGTCCCTCC
TCACACCCACAGGGGATGCTCAGGATGTAGCCTGCTCATTTTGTGTTCCTCTGGAGTTTAATAAATATGGTTGGATGAAAACTAGAGGCCACCA
GTACCATGATATGTCCATCGACTCCCTTGTCCTGTCCTGTCTCACTTGGTAGATAACAAAATAAAGTGGAAATACAGAATGTTCTTGTATTAGG
CACTCAGATGATAACTATTACTGTGGGTGGCTTCTCAATGACAAGAAACTTTGAGAAACTCTATAGTTTTCCCCAGTGGGGCAGTTCCAGAAGA
CACCTGCTGTGAAGAGCCAAGAACAGCTGTGCAGGCAATAGAGGAAGCTGGCACTCACTCAGTAAAAAAACCAAACCAAAACAAGACCCTGCCT
GCAGTTGGATGGCAAAGTTCCCAGATGGGCAGCTTGACATAAAGAGGCGCTGTGAGGTGTTTGATATAAAAGAAGATAAAACCGCCGGAAACAG
ACATCTCCTCTCCTAAACTGACTCCCTCAATGTGTGCAAAGAACAACCCGGCTCAGGGTAAAAATAGTGTTTGTGGATGAAGGGGGATGTGTTT
GTCCACCCAGGGAAAGACTGCAGCTGGCCAGCCTCTTTCCTGCACAGTGGAGGGTTTGAAGGACAGTCAGATGGGTGACCAAGGAGGAGAGAGC
AGGGTGGAGATACAGATGTGGATCCATATTAAACCCAGAGGAGAAGCAACCGCTCAGGAATGGCAGAATGGTGGCCAGATGTGGCCTTTGTCTC
CTCATCCCTGTGACATCATATCCAGGCAGGAGCACCAGTCATGCCAGCTAGCACCTTGGAGTGGCAGGGTGGGAGGGCAGGGAGAATGGTGAGT
GGTGCCCAAGCAGGCCAGGCAGGCAGAGGAAGTTTTGTCTTAGGAGGCCGTGAAGGTCAGTACTCTGTTGGAAGCTGAGGAGTCCACCGGTGAC
AGAAATTGCCCAGGCAGACACACCCAAAAAGTGTCAAGTGGCTCAGGCTTGTCTAGTCCGGGGTCATGATACTCCTTACTAAGTCAATAGATTG
TCTAAGTACTGTGCAAAACAGCAAACAGAACAGGGCCGAGCCGGGCTCCAGACTCAACAAACCAAGCAGGATTCTTTATTGCAGGGCCCCATGA
GGTGTTGGACATTTTAATACTCGTTGCATAGAGTTTGTCTGATCCCTCTGACCTAACTCATTACAGAATCATCATCATCATCAACTTTATCAGC
AGTCATCAACAGAGTCTCACTGTATAATCCAGGCTGGCCTCAAACTCATGACCCTGCTGCCTCAATTTCCCCGTTTCTGGGATCTCAAGTGTGC
TCCACCATACCCAGCACTGAAGACTGTCTTGTTTGGCTTGGAGCATCTCCCTGAGACCCTGGGCTCCTTGCAGATCTCTTCACCAGATCTCTTT
ACCCTCCCTAGGATGCAGAGTCTACCTTGAGTGGCACTGGCAGAAATATTGGTGAAGTGCAAAGAGACACAGGGACGTGAAGGGGGAACAAAGA
GAAGTCACAGCCTTTCAGTTAACAGTATTGTCCTGAGAAAGCACTGCATGCCAATATTCCTGTATTTAGTCTTCATAAACACTCACAAGACAGA
AACCACTAGAACCTCACTGTGCATATTAGGGAACTGAGGCACAGGAATGTCTGGCAACACACCTGTGGGTATGTCTGTGTGTAGCTCATAATGC
TGTGTGTTATGGGCAAGACAGAAAGATGGTCGGGGCAGGAAGGGCCACCAGAAAAACCTGGGAAAACCCTCCATCACTTTGTTCACAGGGCTCC
CACCAGATCAAGTTTGGAAGTATTAGTTGATGTGGTTCAGGGAGACCAGACCTCCTTGTGTGTTCACATCAACAACTGAGAACTCTAGCCTGAG
CACAGCAGTGGGTGTTGCTTCCACTCAGGTGGGGAGAGGGTGGTCCTGGGGCCTCCCTATTCCCTTTCCTGGCATCACGCACATTCCCCATCAT
CCCCTTGACATCAGCCAGCATATAATCCTGACATGTCAGGAACATGTATTCTCCCACATCCCACATGCTCTCCTGTGGCCCTGCCATAGAGAGG
TAGACTCTTGAGGCTACTCTAACCAATAGGCAATGAACAACAGCAATGTGTATTACTTGGCATTGAGTGTGGGTACTAGGTAATCCTGCTGTGA
TCTCTGTCCGACTGCAGCAGTGGCTGAGACGGTCCAGATGTGGCAGGTACAAACATGTCAAGCTTCCATTTGGCCTGGATTTAGACTAGAGCAG
AACCCTCCAACAAGTAGCATGAAGGAAAAAAATAGACTTTGATTTGTTTAGCCAACACAAAGGATTTGGAACTAATTGGCCATTGACTGGACCA
AGGAGCCACTTAACACCTGATGCAATTAGCACCAGAAAATTATGGTATAGAAGGAAGAAATTAACTCCTGCCGCTATCAGGAATGCCAATGGAA
ATAACAAAACAATTGACTTTTGTATAGTGTTTCATAGTGTGTGTGTGTGTGTGTGTGTGTGTGTGTGTGTGTGTGTGTATTCAGAGGACAACCT
AGGATGCCACCCACTTGTTTTGAGACAATGTCTCTCACTCTAATTAGGCGAGGCTGGCTGGGCAATAAACCCTAGTAATCTGCCTGTCCCTGTC
ACCCTAGCACTGGATTACAAGTTCATGCTGTCACAACCAGCTTTTAATACGAATACCATGGGATCAAACTCACATCCTTCATGCTTGGGTGGCT
AACACTTTACCAACTGAGATAGCTCCCCAGACCCATGTTTCACAATGTTCAAGGTACTTGATAAACAGAGTTTAATTAATTCCAAAAGTGACCA
CCATGCTTCCATGATTCTGAGCAGTTTTCCACCTCCTTTCATTAAGCCGTGACTGTGTAGTCCATTTTCAGCTGTTAGAGCAAACCATCTGAAA
CTGGGTAATTTATAAGACTTATTTTGGCTAACCGTTCTGCAGGCTGGGATGTCACTGAACATAGATAAGGTTGCATTCTTCTTCCCATGGTGGG
AACAGAAAGGCAAGAGGGGTGTGTGTGGCAGGGATGAATAATGAAGGGTGGCTTTATGTTTCAACAACCCTGCATCCAACCTGTGACAAAGGCA
CTAATCCTTTTTGATGTCTAGTTGCCCCTCCAGGTCCACCTGGGAACAATGCTCCAATGGCAATAAAGTTCCCATATAGGTTTCGAGGGTAAAA
ACTATTTTCAAATCATAGTACAAAGGCTTCAGGCTACATGATGCTATTGTGAAGGACCCCGAGAGTCAGAAAACTGGGATTGGAAGCCCCAGAC
TTCATCTCCAGAGTTGCTTAGGGTGAGATTCCTAAACGGTTCTAACTCCAACCCCTCCTTTCCCCACCATCAGGGCTCTGGATCAGTAGAGTAT
TGCCTGACAGTCAGGCAGGACCTCACACAGGATGAAGCAGACACATGTCCACCCTTTATTCAGCTCACTTAAAATAATCTCACCACCTTTGAGT
CACCAAGATGTAAACACAAGAGAAAAAAATTAAAAGTAATTTACTGTTGTGGCTAAAATACAATTCCTGTCTATTGTAGGAGTCTGTTAAACAA
CAGCCAAACATAGTGTGTAGTACAAGTTGCTCCAAGAGGTGGCGTTGGGAAAGGCCTTGTAAGTTGCTGGGTTAGATCAGCCTGGGAAGCATGC
TTGACTCCATCTCAAAGAAAAATAAATAAGGAAAGGAGAGGAAGGAAAGAAATAAGTCTGTAAAAGAAAAATGCACAAAGACAAAGCTAAAAGT
CCTGCCTAAACCCCCTGAGTGGCAGGATTCTCTGTTCTGATGTAGGGCTGGTCATATGCCTCCTTGCTCCTCTCTATGAGAATTGGTCACCACG
TATTATGAGCTGGTTTTGTAATTATTAGATTGTGCACATTTACACATGCCATTAACTAGTTTATGGCATGACTTACCTGTTACCCTTTATCCAA
CAGCTGGCTAGTAGACAGCTCGTGTTGTTTCTAAACTCTATGTACAGATCAGGCCATGATGAGCTGCCTGGTATGTGCGTCTTCCTGAGTCTCT
CTTCAGATGGAGTATGCCTCTAGTGGTGTGGCTAATGCCCTGCGTGTACCTCTGCTCTCATTGTATTAAAGATTCAGTTGGGTGTTTCATACAA
GAGAGAATTTACCATAGAAGACTTCTTTTTTATTTGTTTGGTTTTTTTGTTTGTTTGTTTTTTTGACACAGGGTTTCTCTGTGTAGCCCTGGCT
GTCCTGGAACTCACTTTGTAGACCAGGCTGGCCTTGAACTTGGAAATCTGCCTGCCTCTGCCTCCCGAGTGCTGGGATTAAAGGCGTGCGCCAC
CACACCCGGCCATAGAAGACTTCTTTAATGGGCACTGGAAATCTAGGAATCAGAAAAGGACACTGAGTCAGCTCAGACTGACTGTAGAAAACAC
GTCCCACTCTTGGGTGCAGCAGTAGTTAACACTGGTCAATGTGATACTTGGATAACTTAACAATTTTATAAACTATAGATCTGATTTTAGATTG
AGCTAAGTTGACCCTCTGAACAAAATAAAAGTTACTATTGACTCTTACTTAAAGTTCTCCTCTGTGTCACGCCTTCTGTACGGGGGTGAAATGG
GCTATCTCAGTTCTTGATTTAGATGTGGGGAAAACAGGCTTAAGGAAGTGAAGCAACTACGCAAGGTCACAGCCTCCCAGCTGTGCAGATGGGA
GCTCGTGCATCCCTGGCTGCATCCTCTGTCTGTGTGCTATTCTCTGTTCCTATTGCTGCTTCTGTGGTCTCACATTGCTGTCCAGATAGAAGCT
TGTGCATCTATGGCGGCATCCTCTGTCTGTGTGCTATTCTCTGTCCCCGTTGCTGCTTCTGTGGACTCACGTTACTATGGCGATGATACCACCC
CGGGGCCTAGCTAGAGGACTGCCTTGTTCATGCTGTCAGACCACTTGGAGGCTAAGACTAATTCTATCATGTAGCTGTCTGAAACCAAGCATCT
AACAGCGGGCCAAACTGTGTGTGGGGGGAGGCTTCTCCCCACTCATTGGTCTCTATCAAGCAAACATTGCACCCTAGTCTCACAGAGCTGCACA
AAAGGCCCCTCCAGATGATTAAGTTCCTTCTGCTACATGTCCGTGAACACCGTCAAGGTCTCTACCACACAGGGAGCCCACTCTGCACTTTTGA
CAGGTGTACATACTTGCACAGAGCCAAAGTCTGTTCACTACAGCTCTCTGTCATTCTTGCATGAAACAGCCTTGTCGATGCCCGATGGCAGCTG
TCATAGCACCCTCCTTTGGCAGTGCTGAGGTGCTCATGCGTTCATACGCTCTTGAAGGCAGTAAAAGTCCCAAATGCTGTGGTGGAATACATGA
GAAGGGTCCATATTTATTACTGGGTAAGGAGGCATGACAGAAGGAGGCTGTTTGGTATGTGTATGTGTGTAAATACATGTGTGTGTGTGTACAC
ATATATATTTGTTTTTGCTTTTTGTTTTTTGTTTTTTTTTTGTTTTTTTTTTTTTTTTGTTTTGTTTTTTGAGGCAGGCTTTCTCTGTGTAGCC
CTGGCTGCCCTGGAACTGACTCTATAGACCAGGCTGACCTTGAACTCACAGAGATCTTCCTACCTCTGCCTCCTAAGTGCTGGGATTAAAGGCA
TTGTACTACCAGTCTGGTTAAGAGCATACATTTTTAATTTTGATTTTTTAGTTTATGTNNNNNNNNNNNNNNNNNNNNCTCCTTGTGGGTGAGC
CTCACCACCCATTCAATGTTCTCTCACACAGGCCCTCACACAGAAGCACCAGCTCTTAGGAGTAACTGAAAGTTTCCTGCTAGTAACCTTTGTT
AGACCCAGTTCTACCCACAATAGTTTACATAAAAATGAAGCAACAAAGGAACCCCCGGGAAGACCGTTGCTTTGAAGCACAAATGTAAACGGTC
TGGTTTCAGCACCCTCAGATTGCTTTCTGTGCAGAAAAGGGCTAAACAATCACTGCCTGCCTCACTGGCAAGGTCACATTCCTGGAATTACTCC
TTACACTGTAGGAGACGCCAGGCACAACCGCTGTTATTTGGGAGAATGTTCTTGTAAACCCTTTCTTCCTCTCTGACTGCACAGCCTTCTCTCA
AGCTCATGACCACAGCTGTGTGGGCATCTCCAGATGACACGAGGGAGCTGGTCCTCCCATAGCACTTATCTGTGATCCACTGTGGTTAACTGAC
ATTTTGTAGAGTTCTTTCCCTCTCCCTGTAGGTGAACCATCAGCCCCCCCCCCCCCGTATTATATGGGTATCTAGCTGGCAGTATGGTCTTATA
AGAATTCAGTCAGCAAAGGTTTTGAGGTCTTGCCTAGGTCCTGTAGTAGGTGTTCCAGAAGTGAGACCTACTAAGTAATATTAACTAAAGATGA
AATTTTCATTTTGCACAGGGCTGTGAAAATGTCCCTAACTCCATGCCCATGACTCTTCTCCAAAACTCATCTCGTCTCAGAGACCTATGTTAGT
TATGTAGCGACCACTCTCTGGAAACTTAGTGCACTGAAAAAATAGAAACCAAAAACAAACTAAGTTGCATCACGGTTGAAGTCTGAAGAACTGC
ATTCATGATCTCATTTGCCCCATACTCTGTGATCTGCAGTGTCTGAACCTTAGCTTTCTATAAAATGTGCTCACACACTGGAGCCTGTCGTCCT
GTGCCCACTGCAAAACGATAGTAACTAAAGCAGCAGAGTAGACAGAGCCAGGAAAATCACAGTTATGGGCTTGTTGGGAAAAAAGTGACCATGG
GGCCAGGAGAGATAGCTCAGTGATTAGGAGCACTAACTGCTCTTCCAGCAGGCCAGAGTTCAAGTCTCAGCAACCATGTGGCAGCTTACAACTG
TCTGCAATTCCAGTTCCAGGCAATCTGACACCTTCCAACACCAATGCACATAAAATAAAAAAAAATTAAAAAAAAAAAAGCAACCAGCAGAGTG
AGAAATTCAGGTGGCATTCACGTGAAATCACAACACCTGTATGTAACACATCTGTGCCAATTACAGACATCCAGTGTACCATAACGTAGGTCCG
AGAGAAAGAATAGAAGTGAGCTAGAGTAAAGCAGGAATCAATGAATAAAGTCAGCAGGAGCAGTTAGATGACTAAGTGGTGATGATAGAAGCTT
GCTACCAAGACTGACAACCCACGTTTGATTCCTGGCACCTACAACGGTGGAGGGGGAAAGATGCCTCTGACTGCCACACTCATGTCATGGCATG
CACACACATGCCCCCTTGCGCAGTAAGCAAATGTAATACATTTTTTAAAAAATGGCTTTTAAAATGCAACCTAAAGGGTTTCAACATGTCTAAA
GATAAATAACAGTACTCAACCAGTGGCGAGGTCCCCCTTTCTTCATAAGTTTATTCTGACGTACTGCCGAGATCAAGTGTATGAAAACCCAAGT
TCACTGTTCTTTCTGTCAAGAGCTCCATTTTGGGAGAAAGGACCTGATCAGAGTGAGACATTCCTTCAGCAGGAAGTTGTCACCAGGGTGGTAC
CTATGGGTCTGCTGGTGAGAGGACATCAGAGCCCTCATTCTGGAGACACCACCTGATGGCACAGACAGAGCTAGACTGTCTGCTTCCATGGATC
CACTGCAACCAGTCCACCTGGGTCCTCGGAACAAAAGACCCAGCCAGCTGGGCACCCCAGTGGCTTCCACGCCTTATGACATCCGATTTCGAGA
CTTGGTCCTCTTCATTTTGGAAAAGAAGATGGGAACAACTCGAAGACCCTTCCTCATGGAGCTGGCCCGAAGGAAAGGGTTCAGGGTGGAAAAT
GAGCTCAGGTAGGACAGCCCTGGTCACTTTGCAAGCATGCAAGAGCCCTGAGGACATCCCCAAGGGACCCAAGGGGCCAGTTGGCTAAGGGAGA
TGAGTGGGGACTAAATGAGATTATATAGAAACTAATTGGTACCAAAAAATAATATTTTTTAAAAAAAATATGGCTTTCCATGACTGACTCTGAG
ATTAAGTATCCAGGAGTGATAACCAGAAAACTAGTCAGAGAACCACATAGAAACCACTCGATTCCATTCTGTACCAAACTGAACCAACACCATT
GGGTTCAATTTTTTACATTGCTACTTTGGAGCAGGGAGGGTGTTCTGATTGTCTGGCTCTGACTTATACACACCTGCTCTGCTAAGGGTCTATG
GTGGGCTAGGCTGAGGTGAGTCACCACGGGTACCTTAATGGCCTTGGTGATGGTTTTCCAAAGGGTGGTCCAAGTGGGCTTCAGGAAGAGATGC
TGGTTAAAGATGTTTGTCTAGGGGTGACAGATGGCACCCCAGTGTGCTATGATCAGAGTCTAGGCAGGGAGGTGATTGAAGCTACCATCTGCAC
TCGTTCAGTAAGCACCAATTATCATTGTTTTGCTGACTATTGTCTACGTTCACTCTCTTGACCCAATGAAAAGAATCAAAGCGATTCAGAAAGT
CCCAGTAAAAGGCCCTGGTCTGCCTGACGCCTGCAGACACAAGTGTTCCGCTTACAGTGGGAGTGGGGGGGGCACTCAGTTCACTGCCTTCAGC
CATGCAAGTTGGGAGGGGTGCTGAACATACCGTGTCAGAGATGATCTCACTTTTACACTTGGGATTTTGGAAAGTCTTTGAATTTAAAAGAAAA
TTGCCAAACGTTTCTTGCTGATGAAATGCTGGCTTTGGAGACATTGAGGAGACACATTTCCAAGGTCAGTACTCAGGAATTTCACACTCCACAT
GCCCAGCTGAGGGGATCTTTTTAGATTTTTTGCTAAAATGTCCCCAATCAAAAATTCCTGAGGTTCTGGGCTTCTCTCTTTTCTGAGTCTTTGT
CACATGGTCTCCTATTTTTTGTTTTAAGTCATCACAGCCACTCTCAACTTCATTCCTTGATGTTCTTTTCACACAATCCATTATTTCAACTCGT
TTTTGAGTATAACTAATCTGTTAGCCTTATGTACAGTGTTAGCTTTAAAAGAAAAAGAGATTAGATAGGTAAAGGGGGAGGGATAAAACAGAAA
AAACATCTTCAAAGAGAAAGTTAAAAACAGAAATCAAAAGTTTTAGCAGCTACCAAGATGCTTTTCATGGTAAAGGAACTGAACAGGGACCAGT
CAGGAAAGGGAGAGCCATCAGGCACGGTGCCACTCACTCAGAAAGCTCTCTGATAAAAGGTCCATACATCTGTTGGAGGCCCATGGACTGAGTC
ACCAATGCAGCAAATGAGCCGAGGCAAGTGTCAGGGGTGATGATGATCACGAAGCAAGTATCTTTGCTGGAGAGGTGAATCAGAGTGGTGCCCC
AGATGCCAGCAGCCAGAGCTATGCCTGCTGCTGGGGAGACAGGAAATGGGTGAGCAAGCCGCTGCTGTGCTCAGGATGGAGCAAAGTTCTCAGG
CGGAGAGCACAGACACTTTCAACGTGTGTGTGTGTGTGTGTGTGTGTGCGCGCGTGCTGTAGAGGAAGATGAATCACAGGAAGCAGAAGCCCCG
ACGATAACAGAATTTCTGTGCCCAGATAAAGAGTCATTAATTACTGTAGGGAGAACCTTTAGGCTTCATCTCCTGGTGCTGGCCCTTTCCAGAC
CAGCAGTTNNNNNNNNNNNNNNNNNNNNNNNNNNNNNNNNNNNNNNNNNNNNNNNNNNNNNNNNNNNNNNNNNNNNNNNNNNNNNNNNNNNNNN
NNNNNNNNNNNNNNNNNNNNNNNNNNNNNNNNNNNNNNNNNNNNNNNNNNNNNNNNNNNNNNNNNNNNNNNNNNNNNNNNNNNNNNNNNNNNNN
NNNNNNNNNNNNNNNNNNNNNNNNNNNNNNNNNNNNNNNNNNNNNNNNNNNNNNNNNNNNNNNNNNNNNNNNNNNNNNNNNNNNNNNNNNNNNN
NNNNNNNNNNNNNNNNNNNNNNNNNNNNNNNNNNNNNNNNNNNNNNNNNNNNNNNNNNNNNNNNNNNNNNNNNNNNNNNNNNNNNNNNNNNNNN
NNNNNNNNNNNNNNNNNNNNNNNNNNNNNNNNNNNNNNNNNNNNNNNNNNNNNNNNNNNNNNNNNNNNNNNNNNNNNNNNNNNNNNNNNNNNNN
NNNNNNNNNNNNNNNNNNNNNNNNNNNNNNNNNNNNNNNNNNNNNNNNNNNNNNNNNNNNNNNNNNNNNNNNNNNNNNNNNNNNNNNNNNNNNN
NNNNNNNNNNNNNNNNNNNNNNNNNNNNNNNNNNNNNNNNNNNNNNNNNNNNNNNNNNNNNNNNNNNNNNNNNNNNNNNNNNNNNATTTAACCC
TTGGAACCCCAGTAAAGGAGGAAGGAAACCAGCTCTACAGAGGTGATTTCTGACCTGCACATGTGCACCATGTCATATGCTAATGTGCATATAC
AATCATTGTAATTACTGCTAGTGATGATTAATTAAAAGGAAAAATGTCAATGGTACTGATTAACAGTAATGGCTACACTTCTTTCTTAACTTGT
AAAATTCAAAGGCAAAGAGAATGCTAAGCTCTGGAACAGGCTAATGTCCACATCTCCTGTATACTTTTGGCTGCCAAGAGGCTCAGTCTTGGCT
CCTACCTTCCCTGAGATCCTCTATGTACTGAGTTCTCTGGATTGAGTCTGTTCTCTCCAACATGAATGTGTCACTTTGAGTGGAATATTCAACT
ATTCTATGTGCCAATAGAAAGCTGGTTCCTAAAACATGAAAGAGAAGAGATGCTAAGTTCCTTGAGTAGTTCTGAACATCGAAGAACAGGATAT
TGAATTTATTCTGTCACCAGCATCCTAGACTTTAGAGCAGGTTGCTAACTTCAGCTCACCTAATACAGGCTCAACAAGGGAACCAAAATCTCCT
GTTTTCCATGCCCTGATTGCATCCTGAGTTCCCATAGAGTGAGATACTTGAAAGCTCTCATCTGTCATCTCCCCTTCTCTATAAATACTTCTGC
TACCTTCCCCTGTGTCTTGAAGCAAATCACTGTAGTCAACGCAGAAGAATATGTAGCTCGGAAGGATGGCGTTCCATCTTTCTAACCATCCAGG
CGCTTCATGCTAGCTTGCTAACAATGCTCAGGTTGTTGTAAACACATCAGAGGACAGCATTGTCCTGCAATGGAAGATGCTCTCTTAGCTGAAA
GCATCACAAAAGCCTTTGAGTGCCTGCTCTGTGCAGTATGTGTGGAGCTCTGGAAAAACAGAAGAAGACATGAGCCTTGCAAGCAAAGAGCTTG
CTATGATAAGGAAATCATGAATTGTATCTTGAATTGTGCTATTATCTTAATTACTTTTCTTTCTTTTAAAAAAATATTTACTTTTATCTTCGTG
TATCAATTAATGATCTGCCTGCAGGTACGTTTATATGTATATATGCATGTATGTATGTGCATATGTATGTATGTCTGTACATATGTATGTATGT
GTACCACATGGGTACAGCCCCTTCAGATAGCAGAAGAGCGTGTTGGATGGTCTGGAACCGGGTTTACAGATGGTTGTGAGTCATGTCACACACC
ATCTCTAGGAATCGAACCTCCATCCTCTGCAAGAGCAGGATGTTCTCTTAACCACGGAACCAACTCTCCAGCCCCTCGGATTCTCTTCTTCCTC
CAATAAAGTACACTGGCAAAAGCAAATTAAGGAAGACAGGGATTAGAGCTCACAGTTTACAGTCCATCATATCAAGGAAGTCACAGCAGCAGGA
GCTTGGGAGAGCTGGTCACCTCACACAGGTGACCAGGTACAGAGAGCAGTAAATGCCTCGCGTCCTGACATGTGACTGTAGACAGACTGTGATC
AAAAACTAGCTTTAGCCTCCTCAACAACTCATTCCTTTCGGACACCTTGTAACAGGTGTGTGTTGGCTAGTCTGGCTGCCTCTCCCCCCCACCC
CCCATCTGTTCACTGTTTGACCTGTTCACAGTGCGACTTTCACTGGAAAGTCATTATCTCAGAGCATTTGCCTTCAAAGCCCACGGGGGACCTT
GTGGTAATAAAACCCACATTTTCTATTTCAAAAATTATGAGCTTCAAGTTAATGCAAAGTTTTATAATACCATTAAAGGTTGTTAAAGAATCAG
GCAAGATCCTGACCAAGGCTGGAAGAGAAAGCTGTCTCTTTTGAATGCTGCTGTGTGTAGATTAGAACCAACCTCAGCTGCCTTGCTCTCAAGG
GTTCTAAAACACATTGGTTGCTCAGAGAACTGACAGAGCTGTGGTTGGGGTGGGTTGAGCCAGCTTCTTTAAGCAGCTCAGTTTAAGTATAAAT
ATGGCTAATGTCATTGTTTTCAAAATACCCAACATGACCTCTCCCAGGTGACAAGACCATCCATGAGAGAGATAACACTCACACTCGAAAGCGT
GGTGGGTAACGATGGCTGCCTCTCTTATTCATAGAAGGCATCTTTAATTATATGCAGTGAGGCACTGCCAGCCAGGAAGAGAAGGCATGAACAG
GCAGAGTGGTATATAAGAAAGATGAGAAAAGCCAGGAGTGGTGGTGCACACCTTTAATCCCAGCACTTGGGAGGCAGAGACAGGTGAACTTCTG
AGTTCGACGCCAGCCTGGTCTACAGAGTGAGTTCCAGGACAGCCAAGGCTATACAGAGAAACCCTGTCTCAAAAAAAAAAAATGAGAAAAATAC
TCAGAGCTAAGATTTGTGAGTTAATCCCATAATACATAGTTTCCGAACACCTGGAGCCCTACCTGACAATCCTAGCAATATTTTGAACATTACA
TGAAATTATACTTCTCATATATATTCTACTTAACATATAATAACTGCATATACCTAGGGGGGATAGAATAATAATTGAATATGCATATATAGCA
TGTAAGGATCAAAGTGACTCTGTCTCTTTATAGCTCTATCATTATAGCCACCTGTCGTAGTCAGGGTTTCTATTTTCTACAAACATCAGGACCA
AGAAGCAAGTTGGGGAGGAAAGGGTTTATTCAGCTTACCCTTCCACATTGCTGTTCATCACCAAAGAAAGTCAGGACTGGAACTCAAGCAGGTC
AGGAAGCAGGAGCTGATGCAGAGGCCATGGAGGGATCTTACTTACTGGCTTGCTCAGCTTCCTCTCTTATAGAACCCAAGACCACCAGGCCAGC
GATAGCACCACCCACAAGGATCCCTTCCCCTCATTGATCACTAATTGATAAAATGCCTTACAGCTGGATCTCATGGAGGCATTTCCTCAAGGAA
GGCTCCTTTCTCTGTGATAACTCCAGCTTGTGTCAAGTTGACACACAAAACCAGCACACACACCTCCTTCCTAGGTCTCCATGATATAAACAAA
GGGCTATTGTGACCTCTGTGTGTCTGTGTTTCAGGAGGGTGAACATTACAACTTATTTCTTTTAAATGTATGTTGGTTGCCCACCTCATATGGC
TGATGTGAAGACTAAGTTTTATACACATCCCCCACACACATATCCCACACATGGTAGTGTGTCATATTTGCAAGTGGTGTAGCATCTTTACAGC
ATGTCTTTCATGCACCCATATTTTTGTTGTTTGTTGCATCCCAGGAGCTCCTCCATCCCTGAGCATCCCCAGAGCCTATGTCAGAGCATAGGCA
GGGCTTTACCTAGAGGCAGACTTAGAGAACGACATGCAGGGCAAAGCCAGGCAGTGAGAATGTGTGGGGGAGGCAGCACTGCTTGCAAGATGGA
CCTCAGGCTTCTCCACTCATCCTGGAGGGGGGCAGCAAAACCCAGAGAGCCCAGAGCAGTTGGTGGCCTCCCTGCAGATCTTCCGCCTTGGAGT
GCATCTATAGCATCTATTTTTAGATTCAGGATAGCTCTAACTTCCTCCAGTCTTGTAGTCCAGACATTCAACATAAAATACGAAGACAAAAATT
ATACCCAAGGGGGCTTCCTGGGCAGATATGTTACAGAGAGTTTCTTCATTCATATCTCTGCCCCTTGGAGGGACGGTTTGCCTTTAAGTATGGC
GCCCGTTCAGATAACCCTTCTGTGAGGAGGGTGGAAGGGAGCTCACTGAACAGGGAACTCCTCTGCTCTGCAACAAGCACTGAGTCACAGATTG
CAAACTCATGGCTACTCAAGCTCATGGGCTTTGGGTTAGAACAGATCTGTGATCAAATTTCCACCATGCAGTTATTAGCAGGGAAGGGTTTTAA
TGTCTCCCAGGGCTATCTCCTCATTGCTATGTGGGTCTGATAATCCCTGTCTCACAGCATTACTAATAATTAAATGTATGACATGTACATTTAA
TGTATTTAATATTTAATACTACTACCTGGTATAAGGCAGTGCTTCCATACTCTTGATATTTTCAATACTGAAGAAACACCTGGAGCCCAGTTCC
CAAATCCACATGTCCCCGGGGACAGATAATTGTCACTGTGCATCGATAAGGAACTCTCAGTGGACAGCAGTGGAGGAACCAAGTTGCCCTGTGA
TACTGTCTGGTGAGGCTCAGGATTGAACATGAAGTGTTTAGTCCAAGAGAATCATCTGCAGGAGGCCAGTGACAGCCACAAACCAGAAGAAACA
ATGCCAGCTCTGATTAGACAACAGGGAGACAGGATCGAGTAGACTCAGTACGAGAGATGAGAACAGAGATAGCACCAGGATGGACGTAGCCTCT
AAATTCTCGTCTTTTAAATTATTTGTAGCTAAGGACCAGTTTAACAAAAAATAAAATCATATTTATCAGTGCTTTAATCTAACCATCCATGATA
AAGCTGGTTTGGCAATGTCAAGTGGAGGAGAGTGGGTCTCATTTTGGACACTCCTTTTACTGATAACTTTGCCTTCCATCTCTAGTGATTCGGT
CACCCACATTGTGGCAGAGAACAACTCAGGGTCAGACGTCCTGGAGTGGCTCCAGCTGCAGAACATCAAAGCCAGCTCCGAGTTCGAACTCTTG
GACATCTCCTGGCTCATCGAATGCATGCGAGCTGGGAAGCCAGTGGAGATGATGGGGAGACATCAGCTTGTTGTAAGTGTCTCCTTTGCTGGGT
GGCCACTGGCATGGGCATCAGAATCCACAGACTTGGGTCGATTACAGTCTTTTCTCACGGAGTTCACTTAGCTCTGGTGGACCTCCATTTCATC
CTCTTTATATAACAATAATGCCCACCTCCTGAGATGCTGTGGAAATCGAAGTAACATGCATACATGGTGCACACTGCTGACATATTAATAGATG
GCACTATTTTCTTTAAAAAAAAAGAATTTTTAGTGTGTGTGTGTGTGTGTGTGTGTGTGTCTGTGTGTGTGTATGTGTGTGCACATGCGTGCAG
GTGTCCACAGAGGCCAGAAGAGACCAATAGATCTCCTGGAGCAGGTTGTGAGCCACTCAGGTGTTTGGCAGGAGTAGCACTCAGTCTTCACCAC
TGACCCATCTCTCCAGCCCCACAACAAGAGCTATTTTTATGAACACATTCACACACCGATATTTCAGAATCTCAGCCTGGAAACTCAGAAAAGT
AAAGAGTTTCTTTTTTTTTCCCCATTCTGATAATTCATGAAAAAAAAAAGAAAGAAAGAATATGACTTCTTAAATCTAAATCTTTTACCAATAA
TGCTAGAGTCTCTGGGAAACGGGTCTGGATCATCTCTAATAAAGGAAACAAAGGAAATAAAATTTAATAGCTGGTTCTTTAAAAAAATTTTTAT
TGGTTATTTTATTTATTGACATTTCAAATCTTATCCCCCTTTCCAGTTTCCCCTTCACAAGCCCCTTGTTCTCTCCCCACTACCCTACCTGCCC
ACCCACTCCTGCCTCAGTGCCTTAGCATTATCCCACCCTGGGTCATTGAGCCTCCACAGGACCAAGAGGCTTCCCTCCCATTGATGCCCAATAA
GGCCATCCTCTGCTCCATTTGCAGCTGGAGGCCATGGGTTCCCTCCATGTGTACTCTTTGGTTGGTGGTTTAGTCCCTGGGAGCTTTAGGGGGG
GTTGGTTGGTTGATATTGCCGTTCTTCCTATGGGGTGCAAATCCCTTCAGACCTTTCAGACCTTTCCCTAACTTCCCCATTGCGGTCCCCGTGC
TCAGTCCGTTGTTTAGCTGCATGCATCTGTATCTGTATTGGTCAGGCTCTGGCAGAGCCTCTCAGGGGACAGTTTTAACATGCTTCTGTCAGCA
AGCACTTCTTGACATCAGCAATAATGTCTGAGTTTGGTGTCTGTAGATGGGATGGATTCCCAGGTGGGGCAGTCTCTGGATGGCCTTTCCTTCA
GTCTCATTTTTGTGATTTCAAAAATATATATCCTGCACAGACTTAAGATGTCACAATGAAATTCATTATCTGGTGTAATTAATATGTACTAATA
AGAAGAACAATCATACACGCCTGTGACTATACACTAGACAGGTATGCAACACATTTTTGAGTCCTCTATGATTTTGTCCTCTTTCAGAGACAAT
CGTCATGAATTGTCTTAAACGTTTTCTTTATATTTGAGTAAATGTTTATAGTTATATGTACACTTACTATTGGCTAATTAACTGTCATTCAAAA
TGGATGCTTATGCTTTCGTGTAGGTGAATAGAAACTCCTCCCCGAGTCCTGTCCCAGGCTCCCAGAATGTTCCACCACCTGCTGTGAAGAAGAT
CTCCCAATATGCTTGCCAGCGAAGAACCACATTAAACAATTACAACCAACTATTCACGGTAACGAGGTTTTCTCAAAACCCAGGGCAAAAGGGG
GGCTTGAGGTTTCTTTCCCTGAGTCGACAAGTTAAATTATGATTTTCTCGAGATCTCAGAATGCTTCTCCATGCTTACCCACCTAACCTGACCT
CTGGTTCTTCGTCAAGTGGGCCTCCTTGTTCATAGACTCCCAGCTACTCAGGGGTCAGGGTTCATCAGAGTAAACACACTCAGGAGAGTGTCAA
GCATCGGACTTCTCCTCTCTAACTTTCGAGCTGCATCTGTGAGGAAGAGCCGGAAACGGATGGCAGCCACTGAACCCACTGAAGCACAGCTGCG
TTCTCTGCTAGGAAGGCAACATGCCTCACCTTAAATAACCCCGGCTCTGGGTCTGAGTGATGAACACAGCCTTCATCCCACAAACACCAGCTGT
GTTTTCTGACCACACTAAGAGACCTGAAAGTCTCAGGAGTGTGACAGAACCCTGGCTAAAGACTGGTCCAGAAGATAGGAAAGGGTTATACCCA
ACCCAGTCATGACTGCTGGGACACCATGGATCCCAGGTCACTACTTGATTAAACTGTTTCTAAATGTCTAATCATTGAACTCAGTTTCCTCATA
AATGCATTAGATACATATCTTTTCAGTTCAGTGACAGAGTCCCACAGGGGAGGATGCAAAGGTACAGGAGCTTGATCCTGACTCCAAAGGCGCT
CCATTAGTAAAGGGCACAGGAGGGACTTGCAAGTGACTCCCACGAGCACACCTGCTGACCTCGTTTTATTGTTTTAGGATGCCCTTGATATCCT
GGCTGAAAATGATGAGCTTAGAGAGAATGATGGTTCTTGCCTGGCATTCATGCGAGCATCCTCTGTACTGAAATCTCTGCCATTCCCCATCACC
AGCATGAAAGACACAGAGGGGATTCCTTGCCTAGGGGACAAGGTGAAGAGTATCATAGAGGTAAGGGAGAAGTGGAATTTGCTACATCTCCAAA
GAGGTGAACGGGAGACAGAACAGATCGCATAAGTATGGGCTCTCTCCTCTATTTATCTATAAATGGATCAATATAGCAAGAAACAGATATATGG
GTGTAGACATATAAAATCCATACCCAACACGATCCCAGTAGGAAGACTTTCTCGGGCAGTGACTTTTACTAGCAGCGAAAGACTCGATCGAGCC
TTAGATCTCCAGAGCAGCAGAATATTCTGCTTTCCACCCCAGTCTGGGTGGGAGACTCGGTCTCCCTCAGCCCTTCCTGTACAGCACAGGGTGA
TGTTCAATGGGCTGATTGTGCATCTCTCTGTTCTCAGGAGAGACTGGGCAGTAGTTACATGCTTAGCAACATTTAAGGACTTCCCAACGAGGCA
CCGGTGTCATCTAGTAGCAAGTTTCAATCTAACCAAATGCAAGGTACATCCTTCTAGAAAAATATCGGAGCTCCAGACAACAGAGACCAGACCT
CATAAGGACTTGATAATGGCCAGCTTTTCAGTGGGCCAACAATTAACCCGGTGGTTTAAAAAGCCCTCTTATTTCCACAACTCGAATCAACTGA
AAAGAAAATGACCAGGGTGATTTGAACAATGCTTGTCAGAGAATATTTTGTCTTAGAGTCTCTAGGTTCAGATCTTTATCTTTCTGTATCCTCG
TCAGAGGTTATGAAGGTCTAGGATCTATGGTAAACCAAGATTTTTTTTCAAGATTACAAGGAAATTCTTGCTTTCTCCAGATCAGCCAGGGAAA
AAACCCTCAAGTTTCAGGACAAACCAGTAGTTGGGTCTTGCGCGCGCTCGACTGGCCAGGAAGAACGACGCTCCAACAGGATCCTTCTCCACAC
GTTTATTGGGAGAGCTTGATTGTAGAGGGGAAAAGACTTCGAGCCCAGAACTGGTGCTGCTTTTATAGGCCTAGGAGGGGCGTGTCTCACACCC
GGATTGGTTATGCACTAAGCCTCATTTGCATCTTCCTCATCTGATTGGCTACTCTCTCTCAGTACCTTACAGAACCTCATTATCATACCTCATT
TGCATGTCTCACATCTGATTGCTTATACTCTCAGTACCTTACACAACCTCATTATCATGCCTGGGCCAGGCAGTGTCTTTGCAAAAAACTTTAC
TGCATATGTACACATTGGTTGTTTGTCCAATCTTATGCGTGGTGGCCAGCAGTAGTCAGTGCCACTCTGCAACGGCACATGTGGCTTCCCACAG
TTGGGGCTGGGCTGTCCGTTTGAGACTGGCACTTTGATTATGCAGAGACATAACTCAAAATCTTTTGTTCAACCCTCCTTGCAGGGAATTATTC
AAGATGGAGAAAGTTCTGAAGCTAAAGCTGTGTTAAATGATGAGCGATATAAATCCTTCAAAGTAAGCGACTGTACATTTGCATACTGGGGCGT
GTTTTGTTTTATTTATCCTGTTGTTTGCTGTCGATGGTTATATAACTCAGGCTGCTATACCAAATGCCACAGAGTGAACTGATTAGTCATAGAA
ATTTATTTTCTCTCAGTTCTGGAAGCACAAAGTTTAGGTTAACTTTCAGTGTAAAGATTCTGTGGAGGACTTTGTGGTTTTCAGTGGCCAGCCA
CCCTCTTGCTGCTGCCCTGACATAGCAGAGATACAGATGGACAAATGCTCATTCTCAGCTAGCTTTCTTTATTCTTACATTATTGTGTGAAGCA
CGACTCCTTGCTTAGGGAATGGCACCTTCCACAGTGGGCATCCTACATTAATTAACACACATGCCCACAGGCCAAGGTAGTATGGATAATTCCT
CATTAAGACTCCTTTCCCGGGAGATTCTAAATTGTGTTAAAAATTAAACTAACCAGCACATCCCACAAAGACACTACATGCCAAGACTTACCTA
TCACACTGAGACTACCTACCAAGAATCTGTCACTCATGGTTACAAATGTCAAAGGGACACAGGATTCAAATAGAGCAAGTGTGGTCCTGAAGCA
CAAACTCTGTCTGAAAATTCCTCATTGCACCTCAATTTCTGGGACTTAGGGTTCACCACCCTCCAATTTGTTTTTGTTTTTGTTTTTTTACCTT
AAAGTTTATGGTACTATGGCCAGTCCATTCAGTTCATAAGTGATACAGGGCCTAACATACGGCCAGAACAGGAGCTAGGCTCAGAGTACAGACA
GACCAGGGTTCAAGTTTGTACTTTGCTGTTATCCACTTGTAGATCGGGTGAATTTGCTGAGGATCTTTGAGCAAGATTTACCTCATGAGTCTCC
TTCCACCAAAGGTGTGGTTCAGGACTTCATGTAAAAGACTGCAAAATCTGAAGACAGACAGACAGACAGATAGACACCTTCTCATACAGACACA
GAACAGGCTTCTTCTTACACCGATGCCCAGCCATCTTTCACCTGTTTCGTTTTGTGACACTTTGATTATGGAAGGATCCTTCAGAAACAAAAAG
CCTCTCAACGTTACCATCCCCAGGCTCAAGAGAGAACTCCCTAAAGTGCAGACAGACTGAGCAAGAGTCCCAGAACCAACAAAAAAGCTGGGTG
TGGTAGCGCACCTTTTAAACCTAAGCACTGAAGAGTTAGAGAGAAGCAGAGTGGCCCTAAGGCTCACTCGCCAATCGTCCCAGCCTGAGGTTCA
CTTCTGGTTTCCAAATGCACAGTTATGCATGTCTGTGCAAGTACATACATGCGCGCGCACACACACACACACACACACACACACACACACACAC
ACACACTCACTCACTCCCCATCCCCTTGATGTTTTCAAGAGAAACTGGGCCAAAGGTTTACTTATACTTCTTGTTCCTGGCCTGAGACTTTGGA
AACTGTCGCTCTGTTGTCATACCAACGATTTGGGTGGATAACAGCCTACCTTTCCCTCCCTTTCAGCTCTTTACCTCTGTGTTTGGTGTGGGAC
TGAAGACAGCTGAGAAATCGTTCAGGATGGGTTTCAGAACTCTCAGCAAAATACAATCAGACAAAAGCCTGACGTTTACACAAATGCAGAAAGC
AGGTAACGGTCTTGGGGAAGTCACGGGTCATTCTGGGCTTGTCAGGGTCCAGTGACATGCAAGCCAGTTTGACTTGCTCCAGACTTGAGACTCC
GGTAAATCTTGGCTCCAGCACTTGTCACTGAGTGATCTTGAGTAAGCTAGTTAAAACCTTGAGCCTTCGTTGCCTCACTGGTGAACCTGACCTA
ACCAGGGACTAGATCAGCTTGCGCAAAGCCCTGAGAATATGACAACAAGGCCTCTTCCTGCCGTGCTATGGTTCTCTTTATCCAGAAGTTACAG
CAGAGTGCGCACTGTCCCGATTCCTACAGACACACCTTAGGTCTGGCTGTCTCCCTGTGTAAGAAGCATGCATGAAGGGTCGAGGACAGAAGGG
TAAGCTGACGTGCAAGAAGGACAGAGGGGACTACTGAACAAAGTACACTCTCGACGGCTTGGTTCACACTCGGAATGTGCGCTGGGGGCTGGAA
AACGGAAGACAAAGGGGAGAAAGTCTAGCCACAGCCTTGATCTGTCCAATCAGAGCCCTAAGCCTAGGAAGAGACAAGAGTCCAGAGCAGAGAC
GGAAGAGCTCTCATTATCATCTGAACGTCTGGCAAGCCCCGCGGCCACCACGTAGGCCAGTTCACTCCCTTCCATGGACAGTGCTGGTACCTTT
TCCAGAAATGAGCAGATGCGATTCATAGCCCCTTCTAAACGTGTGAAAATTTTTTAAAGAATTATTTATTTATGTATATGAGTACACACTGTAG
CTATACAGATAGTTGTGAACCTTTATCTGGTTGTTCGGAATTGAATTTAGTACCTCTGCTCCCTCAGGTCATCCCGGTGGTCCACCATATGGTT
GCTGAGATTTGAATTCAGGACCTTTGAAAGCACAGCCAGTCCTCTTACCCACTGAGCCACCTCACCAGGCCAACATGTGAAATTTTTAAATGTT
TCCTTTTAATGTACAATAAAAATAGAGTAAAATTGTCCTTCAAGAGGGAGTCACTGCTATAGTTCCCTAGCTTCTGGGGAAATATGTGAAGTTA
TCAAGTTTTTTTAATATGGAAGTGATAGAGTCTTCTACCAGAGGATTCTGGGTATGCGCAATTATTCAACAGCTATCTTCTGTTTAAGTGATAA
TAGAAAGACAGACAGACAGAATGAACAAAATGATATCATAAGAAGTGGTAGATGAGGTGAATCATATCTTCGGGGGGGTCCCATCAATGACACT
ATAGAAAGCCCCTATTAATCTTATAAGCCCACTAAGTTCTTTATAAAAACATTTTTATTTATTTTTAGTTTATCTATATGGGTGTTGTCTGTAT
GTTTGTGTATGTACCACATTTGTCCAGTGTCCAAGGAGGCCAGAAGAGGGTATAAGCTCCCTTGGAACTGAAGTTACAGATGGTTGTGTGTTGC
TGTTGGTGCTGGGAATCAAACCTGGGCCCTCTGGAAGAGGAGCTAGTACTCCTAGCTACTGAGTCATTTCTCAAGTTTGATGATTTCTGAGTGA
CTATTAATAAGCTTTATATAATGCCACACAGGAAATAAAAGAGTCTAAGAAAAAAACATCTAATATTTCTACTCTGGATGCCAGAAAGTGTAGT
CTAGTAAGGGTGTTTTACACCAGCTCTAGAGATGCTGTTAAAGAGAAATGTATATGACTATCAAACCTAAGGGCATGGAGATGGTTTGGAACAA
TAGTGAGGACTCCTAACACTTACAGCAGAAGTGGGGAACAGTGGAATATTTTCTCAGAAAGCCTTGAACTTGTGATGTCCTGTTTCAGCATCTT
GAGTGCTAGGAATGCAGGTTGAGGTGTTGGCTGACATCCACACAGTCTTAAAAAGTCATAACCTCACATTCTTGCACATCATCTAGTGAGTGAG
CGGAGGGATTTCCTGGCACCACCCGAGGTGAACTTAAGTGCCAGTGATGATGGCAATGTCTATATATATTAGCACCTAAAAGAATGTTGCTTCT
TAGATCAAACACACACACACACACACACACACACACACACACACACACACACTCACTCACAGCAGCCATGTCCCAATCAAAAGGCAACTGTTGA
CAACAGAACAAGAGAAGTTTATGTCGTGTCAGTTATCGATATGAAGATGGCAGATCCCCCAAGGAACTGGCTTGGTAGTAACAAGTGATAGGTG
GATTAGCATCACCATCTTTTCCTGGTCCTGAAAACACAGTTCTGCAACTGTCCCGTTTAGAGATTACAGATGACTTTGAACTTGGTAACTGTTT
ACAGTGTGCTCAAGCCAAATGACTTTCTGGTCGTGTCTCATCCTGGGGTGAGAAACAGGAGCCAATCAGCAGCCTCTAGAGAAGTACATCCCCC
TCCTGTTTATCGAGTGGCATTTGGATCCCTTAAATGAAAGTTCAGCGTCTTATATGGAAGCATGACTGTCATCAGGCTCTGACTCTCCCAGACA
TGCCCAGCTTCCCACCAGTACTTTACCCCAATCCTTGGAGATAAGCCTCCTTCTCGCTCTGCCTCCCTCCCACTGCTCTGTGGTGACAGCCAAA
TGCTCTGCTCTCCCTCGTGACCCTGCTTCTGAACGGTCATTGGTTCATAGTCCTCAGGCCAGGAAGCAGCACGTCAGCCCCTCGAAGGCACTTT
ACACTTGGCTTTGGACACTGACCCACCCCTCTTCCTCCCACTGTCTTTTCTAATGAAGCCATCACTGCCAAGTCCTGAATTTTCCTACCCCCTT
TTAAATAGTATGGCATAGCTTGTTGGTCAAGAAGGCTGGACACAGTGCTACATACATGGAATCTCAGCACTTGGGAGGTAGAGGAATTAGGAGT
TCACAGAATCTGGGCCTTTCCTCAAAGGAGCAGCAGCAGCAGAAAGAGGAGGAGGAGGGGGAAGAGGGGAGGAGGAAGAGGAGGAGGAGGAGGA
GGCAGTGTTGGATTTTCATTATAATATCAGATAGGATCAATTTAGATTCCAGAAGGATCTGAATACTTCCCCCTTGATATGAATATTGTATACT
TCTACATGAGGAAGTCAAAACTCCTTTGAAACCATGAAAAAAACCCAAGCAAGTGGGCAAGGCAGTGCCATAGATTACTGGGCTCTGTACAGAG
TCTGGCCAATGCCTAAGAGCACTGTATGAGACAGCATCCTCTCCTATCAACAGCTGGTCCTCTTATCTGTGCCTTTCTCTCCACTGGCTGATCA
GGATTCCTCTACTACGAAGACCTCGTTAGCTGTGTGAACAGGCCAGAAGCCGAGGCTGTCAGAATGCTAGTTAAGGAGGCGGTTGTGACATTTC
TTCCAGATGCCTTGGTCACCATGACTGGGGGGTTCCGCAGGTAAGTGATGTAGCTGTTTTAGAACCCCTCTTCTACCTGCCTCTGAAATGGTGC
AAAACGCCTTTTCTGACAACAGAACCAACCTCACACTGTAGCTTTGGCTCCTGCTGCCTGTGTTTCGTGTCAGAGTCTCAGATAGCTTGACACC
CCGCACACAGAGCTGTTTCTTACCTCTGTGACTTTGCTCAGGTGAAACTTTCTCTACAGTTTTGTGAATTTGGTACTAATCTGACTTCACAATT
CCTTCAGACTCAATTTAGATGCTGCCACCTCCAGGAAGCCCTCCTCGACTCCTTATAGCTCTATTCTGGGCTAGGAACTTTCTTCTGTGCTTCC
CAGGTGCCTACTGCATCATGTGTGCTTTCCCCGTGGAGCTTAGTTCCCACGGAGACCAGGGTGTGAGCCTGACCACTAAGTAGATGCTCAAGAA
ACTGGTTGAGTCAAAGAAAGCTCAATGAACAAGCCTTCAGACATGAAATCTTCAGTTGGATACAAATCCCTCCATTTCAGAAACACCCTTGTCC
CTCCACCTCTCCTTTTGAGATCTTACCTGGTCACTTGCATCAAAGAGGTTTTCTGGGCTCGGTCTGTCACTTAGCAGAGTGGCTACTTAGTATG
GAGGAAACCTGGCTTTGATTCCCAGTATCCAGTAAATCAGGTATGGTGATGTAGACCTATAATCCCAGCACTTGGGAAGTACAGGCAGGAAGAT
AAGAGGTCCAGGGTCACCCTCAGCTTCAAAACGTGCTCAAAGCCAGTCTGCATCATATAAGACTCCATCCTTAAAAAAAAAAAAAAAACAAAAA
ACAATCATAAAGAGCAATCTCTTAACCCATACCATAGTTCCAAGAACGCTACCTTGTATGGTGTTACCAAAGCTCTTGGTTGGCTGCCTATTGT
CATACATGTTTCTCTATGTATGTGATGCATATAGAAGTAATATTTATTACTTGCTTTCCATCCATATACAACAACACACATTCTGGATGAAGTT
TTTTTTTTTTCTGTCACAAATTTGTTTTGCAAGAAGTGAGTTGAACAACCAGGAATAGCTGGTTTTAAAATGTTGTGAGTATTTTGAACTACAA
ACCTCACACTTCAGACACAATAACAAAGAGTTTTGTTTTGTTGTTTTGTTTTTAAATGAAAGGCTAAAAGTCCAACTGATTTTCCTTTTGTGCT
TTTTTCCCCCCAAACTAGGGGTAAGATGACTGGACATGACGTACACTTTCTAATTACCAGCCCAGAAGCCACAGACGATGAAGACCAGCAGCTC
TTGCATAAAGTGACAGACTTTTGGAAGCAGCAGGTAAGGAGGCCAGATGGCACCTGCCATTTAAGGCTGGCTTAGATTGATTTCTGCTTGTTTC
TTTTCCGTGTGTGTGTGTGTGTGTGTGTGTGTGCTTGTGTGTGTGTGAATGTGTCTGTGAGTGTGTGTGTGTGGTATCTATGTTATGTTTGATA
TGTATGTGTGTGTACTGCTGTGCGTGTGTATGATGTGTGTATGTGTGTCTGATGTGTTTGTTATGCATGGTCTGTATGTGACACGCACATGTGT
GCATATTTTTGCATATGTGTAGGCACATGGGTGCGGACATGTCGACCCTGAGTTTGATGTTGAAAATCATCTTCCGCTACTTCTCCACCTTATT
CATGGAGGCAGGCTCTCTCAATCAAATCCAGAGCTCATCGATCTGGCTAGTCCTACTAGCCAGTTTGTTCTGGGAATCCCTTTGTCTCCACCTT
CTGAGGCTGGAATTGCAGGCAGGCTGTCATGCGTACCAAGCATTTGTATGGGTTCTGGGGATCTGAACCTTGGCCCCCTGTGTTGTAAAGCAGG
CGCTTTAACCACCGAGCCATCTCCCTAGCCCCTTGCTAATCTTAGGTGTTACATGATCAGTGTACAGTGACTACTATTCTCACTTGTTTGTAAC
ACCTCATCGCAGCACCATGTGGCTGGCATGAGACTGACCAGCTTTGGGTCCTAGGCAACACTTTACGGGCATGCATCTTGTTTGAAGAAGGAAG
ATAAGGAGGGCAAGCTGGGCCCTGCAGAGGTCATGGCCAATGGCTCACACTGGATGAAATCAAACCTGCCACGTGGCAGCCAGTGGTTAATGGT
CAAAGCTGAGTTAAGTTAACCCCACAGCCAAAAACCTCTGGCTCTCTAGTCAAGCACCATTTCCTACAGACACCAAGGGCTCTTTCCTGGGATC
CTACCTGTCTGGCTGAATGGAGGAGGCTGGACCAGAGTTTTCCTAGTACAGACAGCTTTCCCCTTCCTGGGCTGAGCTCACTGATGCACCAGAG
AGATAAGACCAGATAAAGTGAAAACTAGAAGGGGCTGGAGACATGGCTCAGTGGTTAAGATCACTGACTGCTCTACCAGAGGTCCTGAGTTCAA
TTCCCAGCAACCACGTGGTGGCTCACAACCATCTGTAATGGGATCTCATGCCCTCTTACTGGTGTATCTGACAGCTATAGTGTACTCACATAAA
ATAAGTAAATAAATCTTTGGGCTGTCGTGGCACACGCCTTTAATCCCAGCACTTGGGAGGCAGAGGCAGGAGAATTTCTGAGTTCGAGGCCAGC
CTGCTCTACAGACTGAGTTCCAGGACAGCCCTAGCTATACAGAGAAACCCTGTCTTGAAAAAACAAAAACAAAAAAAAACAAAAACAAACTACA
AATAGCCACCCCCCGAGAGCCATGAGATTTATAAATGAAAGCTAGATTTCAGATGCACATCCAAATTCATCTGTGAGACCATTCCATGTCCCCC
CCTGTCACCCCTCCTGAGAAGTCAGGAGAAGGTGCACTGGAGAACCCCTTCAGTGATAGCAAGATAGGCATGACAAAAGTCAGAATACTTTTCC
AATTCTCGATTCTCTGCTCCAGGGGTTGGGAGTGGGGGACGTTCGGGGGGTTGGGTAGGGGAGAATAGGGGAAGATTAAAGACTCACTGAAAGA
CCAAAGAATACCTCCCCACCCCCAGGCCTGTTGCCAAGGCTGGAAACTCATTGATGTTTGTTTTTGTGCCATTGTCCTATGCTAAGACATCTGC
TGGACTTGAGAGGTGACAGAGGAGCCCTCTTTGCATCCCTAGTTTCAAGGTAGTTTTCCTCTGGACCCTGGGTACAGATAGTCATTAGAAGCCC
AGGCCCTGCATTCGGAGCCAATAGTAAAACAGGCCTAAATGAGACTTTAGAAGTGCTGGTACAACCTGGGGTGGTGCTTAACAGTTCATGCCCC
ATTTTCTGTCTGTGCTAACCCGGGATTCAATGAAAGTCTCGGCAATTCAATAGAAAATCTCTGGTGTCTGACAAATGGTGGCTAAGATCAGCAG
CAGCAGGATTGCTTATTCAATTCAGTTTGAGGGCCAACCACTGGGCTGCAGGGGACCCAGGAACCAGCAGGCCAGTTCCTTCCCTTCCCTCAAG
TACCGTGATTCAGTGTCCCTGCTCTGAATGACCCATCCCCCTGAAGCCCTGGACCCATCCCCAATAACTCAATTGTGAAATCAGATGAGTTCTT
CCCATCTGGCTCCCACTTCCACTTGACTCCCTTCCCTGCCAGCCTAACCCTGAGCTTCACTTTACAGATGGCCGTGAGCACAGCTTAGTACAGT
GCATACCGGTGTACTCACAGTACACACACAGCATGCCCACAAGATGCTTAAATGTCTGCGAAGTAGGTTGAACAGCCTTTAGTGCTTTCTCCTA
TCTAAATGGTGTCCTTTGGAGACAACCCCTGGGTCAGAGGTAGGAGAAAGGAGGTGAAGAGCTTAGAAATCTCATCTCCAGGGAGGTTGTAATT
CCCCCAAACATTTGTTCTGCCTGAATTCCAAGCAGACTGCTGGTAGCTCACCTCAAAGGAAGGAGAGAGACTTCATGACTCAGGCTTGCGGTCA
GGCCTGGTAAATCGGACCGGGGTACAGGGACCCTAAGTGCTTCAGGTGGTCTGTCACCCCTGGAGTTCATGGAACTTCTGGGAGTCAAAATGTT
GAGTCTACAGAGTAAGACTGTAAGTCAGAACCAACCATGGTGGCTCACACTTCTCACCTCAGCCATTCAGGAGGCAGAGGCATGAGTTCCATTA
CAGGATACCTAGAACCAAAAGGAGTTTAAACTGGCCATGACCTTGGGTTCTGAATTCATAGGTTTCACTGACCTCAGATAGGAAAAGATACTTT
AAGAAGAAAGAAAGATAGGAAAAAAGAAAGGAAGGAAGGAAGGAAGGAAGGAAGGAAGGAAGGAAGAAAGAAAGAAAGAAAGAAAGAAAGAAAG
AAAGAAAGAAAGAAAGAAAGGAAGAAAGACCCACACCTATACTACCTATACTGAGCATCCATAGGCACCTCCTATCGTCAGTCTCTAAATACTA
CACTGTGACAACACTGCATGCACTTATATAGTATTAAGTAATTAATCTAAGAGTGATTGAAAGTCTGTGGGGATGTCTGTGGCTCATATATAAA
CATTCTTACCACTTTGCAGGAAGAACGTGATCATCTGTTGCTACCGTGATGACTGCTAGACGACTGAGGGATAACTATGGGACAACTGAGGGAC
AACTGTGGGATAACTGAGGGATGACTGAGGGATGATTGAGGGATGATTGAAGCATGACTGAGGGATGACTGAGGGATCACTGAGGGATGACTGA
GGGATGATTGAAGAATGACTGAGGGATGACTGAGGGATCACTGAGGGATGACTGAGGGATGACTGAGGGATGACTGAGGGATGACTGACGGATG
ACTGAGGGATGACTGAGGGATGGCTGTGGGATGACTGAGGGATGATTGAGGGATGACTGAGGGATGACTGAGGGATGACTGTGGGATGACTGAG
GGATGATTGAAGGATGACTGAGGGATGACTGAGGGATGACTGTGGGATGACTGAGGGATGATTGAAGGATGACTGAGGGATGACAGGGATGACT
GTGGGATGACTGAGGGATCACTGTGGGATGACAGAGGGATGATTGAGGGATGATTGAGGGATGACTGAGGGATGACTGTGGGATGACAGAGGGA
TGATTAGGGAATATTGAGGGATGATTAAGGGATGATTGCAAGATGACTGAGGGATCACTGAGGGATCACTGAGGAATGACTGAAGGATTACTGA
GGGATTACTAATGGATGACTATGGAATCACTGAGGGATGACTGAGGAATCACTGAGGGATGACTGAGAGAATCACTAAAGTTGATGACTGAGAG
ATCACTGAGGAATGACAGAGGGATCATTGAGGAATCACTGAGGAATCATTGAGGGGGGAACTACAGGATCACTGAGGGATGACTGACTGAAGAA
TAATTAAGCAATATTGAGAGATGATTAAGGGATAATTGAAAGATGACTGAGGGATCACTGAGGGATCACTGAGGGATCAATGAGCGATCACTGA
GGAATAACTATAGGATCACTGAGGAATGACTGAGGACTCTCTGAGGGATGACTGAGAGATGACTTCCCCCACTTGAGTTTGAATACTAGATTGG
TTCCTCTGACGAGAAGATGGGAAGGAACTGAAAACAAAGGTCAAGAATCCTGCCTGGAGGACTCCTCATAGAGTCCTGACAACACTTCCTGCTC
TTACACCATTGCTTGGGGTAGCCTATGGCTAATTGGTCCACTAAGTTGGAAGAGGTAGATCCTCTTTCTTGTAAGAAGCAAAGCTGAACTGCCC
TAACCCCACCCTGATCCCTCCGACCCCCATACCCTGGGAGCAGAGAGAAGGAATGGCAGGCAGAGCTCCTTCCTACCCTAGCCACTGATCTTCT
AATAGGAAGACAACCCTGGGCAGCCATGGCCGAGCCTGAGCCCAACCTCAGAGCAGTTCCAGAGGAGATAAATCACACTGAGGGACCTGGGGAC
AGGAAAGGAAACTGCAAACAGTAGGGGAAACCCAACAGAAAGCTGGCCTGGAAAGCTAGGACCACGTCTGAGGTGGTACCAGGCTCCACTACAG
ACAGCACCCAGAATCAGATGGAACGCCCCAGTCAAAGCCTCGCCAAGTTCAGGATCAATTCACCCAAGAATGTCCCATCTGTCACCAGCCAAGT
GCTACCCCCCACCCCCACCCCGTGTGCAGCACAGGAACCCCTAGGGGCTGGTGCTTGCCTAACATTCCCTTGAATTACTTATTAACTTTCTGGA
TAGAAACTTGAGATAAAGCAGGCTTCGTGGGCCTTCTTTCACTGCCTCCGAGATGGAGAGAGAGTTCTTTCAGGGCTGGGGTGTACTCAGTGGT
AGAGTGCATAGCTAGCAGGTTCAACCCTGAGCATTGCAAAAACAACACAACAACAGATGTAACAGGTCACCATGCCCCACACTGGGTCTGGAAT
TTCAGACACAACCTTTTGACCCAGTCCAGACAACCGACATGCAGGGAACAGTGTGAATTTCTGTTCACCGTGTCTTTGCTTTTCAAGGAGCAAA
GTTGTCTCTCAGAAGCAAACAAGGAGAGATGGAGGCTCTGAGGTTTTCTTATTGGGGACTTTGAGCTCACCCTTTCTGTGGAGAGAATCATGTA
TTACCTCCTCTCCCAGATGCTGGATGAGGAAGAACAAAAATGCATCCCCATTTGTTCAGCTCTGAAGAGGCTCTCTTGAGAGCACTGTAATATC
ACATGGGTGCCCCACCCCCAGCCCCCTAGGACCCTTTCTAAACCCTCCCATTGCTTTTCAGGGGTTCCTTTTGTACTGCGACATCTTAGAGTCA
ACCTTTGAAAAGTTCAAGCAGCCCAGCAGGAAGGTGGATGCTCTCGACCATTTCCAGAAATGCTTCCTGATTCTGAAGCTGGACCACGGGAGAG
TGCACAGCGAGAAGAGCGGCCAGCAGGAAGGAAAGCGCTGGAAGGCCATCCGTCTACATCTGGTCATGTGCCCCTATGATCGCCGGGCCTTCGC
CCTGCTCGGATGGACCCGCTCCAGAGTAAGAGCTGTCTCCTACTAGCTTTCCTGGCTCAGCCGAAGAAAGCTTCCGCTGCGGGGCACAACGCTG
AGAGAACTAAGGGACCATGCCCCCAAGCCTCTAAACTGGGGCATGGTTTGGGTACATGTTCACACGAGTTAGATTCATTTAGATTCCCAATGTA
TGGTTCACCAAGCCAGCAGCAGTGGCCTTACCTGGGGACAGGTTAGATTTATAAATTCTTCACTGTATACCTACCACTACATCAGAGGCTCTAG
GCAGTTAAGCTCTGACACGCATGTTTGTAAAACACCCTAGGTAACTCACACGTATCTCAGGTCAGAGCTACTGAAACCTAAGAAGTCTCAGCGT
AGTGAGTAACTCAGATGGATTCCGGTCCTAGACCTACAGAAGGACCCAACCCTGCCTCTTGGACACCTTCCTAAAGCCTATAAGATAGATGGGA
GTGGCCCCCTCTGGGGGCAGCAGTGCACAGCTGCAGGGTGGTCGACTCAAATGCTGCTCTAAGAAACTAGTGAGGGTTAAAAAAAAAAAAAACA
ACTTTCTTTTTCAAGTTTCAAGAGGCTGAAGCTGCTCTGTCCCGGGTTGCGCCGCTTTCAGGTAAATAACACTCCTCCAGCCTTCTCTCTAACA
GCGGCCCTAACCTCACAGGGCTCTGTGGAGGACTCTCTGGGACAGCAGTCCATCCACTCCTCTTACATGTCATGCCAGGCTCCTGTTAAGCCTC
TGTTGCCCTGTACCCTCTGGGGCTCAGGAAAAGACTGGATTCCTTAGTTAGGGTTATGATAGCTGTGGCAAAATACCACGATCAAAGAAACTTG
GAGACGGAAGGGTTTATTTTACTGACATTTCTTTATCACTGTTCATCATCAAAGGAAGTCAGGACAGGAACTCAGGTAGGGCAAGGACCTGGAG
GCATGAGCTGATGCAGAGGCCTTGGAGGAGTGTGGCTTACTGGCTTGCTCTCCGTGGCTTGCTCAGCCTGCTTTCTCATAGAACCACCAGCCCA
AACAAGGTACCATCCACAATAGACTGGGCCTTCTCTCATTAATCACTAATTAAGAAAAGATCCTACAGATGGATCTTACCAAGGCATTTTCTCA
ATTTAGGTTTTCCCCTTTCAGATAACTCAAGCATGTGTCAAGTTGACACAAAGCTATCCCACACAGCACAACTCTCTTGGCCATTCTGCAGCCA
TTTTGGTTTTTAATCACCTCCTTCGAGCCCTCGTTCAGTGATGCTCACCATGGAAGCCCTGCTCAGTCTGGATGCAGCACTGGCTTCCTATCGG
CCCATAGTTTTCTTATTTCTTGTTATTATAAACCATTTGTGTGCCCAGCTAGATTCTGCTCCGGAGGAACTGGCACTCTGCAGGTATTTGGCAG
GTGAACTGAATTTCTCTCTGCACCACAGAAACACTCTTGGCCTTGGCCGACGAGTTCAGGAATGTTTCTCACTCCCAAATCACACAGGGCAGGG
AACCGGGAGTACCCCATCATTGACTGCATATAACCAACCCCCATTACACCTCCAGCCTCTCCACTTGCTGGGAACCAGTGTTAGCTGTGGGAAG
ACACTGCCAGTCAAGAGCTGGGGTGAGCTAAGCAGGACCCACAACTTCCCAGACCAGCGCTAAGCAAATCTCCTTCCTCAGCAATTGTTACACA
AAGCTGGTTCCACCTACAGCTGCTTCTGTAAAGGGCTTCTGGAGGCAATGTCTCACCCAGTCTCAGAAACTTTCCAGCAGAGAGGAAATGAATT
CTTACTCCTAGAGGGTGCGACTGTCCCAATGTTTTGCCTAATCCCAGCCGGAAAGACAAAGTTCTGGACCTGGGAAGTTTCCAGGTTTCTCTCA
GGAAACCAGCAGCAGTATTTGTGATTCACTGTCCTTGTTTCTAGTGTTTGCTGGTCACTTGTCCTAGGCTTCAGATTTGCTCCCTGAAACCTCA
GGGTATTCTTTTGATCATGATAGATGTCATTCCGGGGCAGGTGACTCTTGACAGAATCTCAGATTGAGTGGACATCAAAGAAGAAAGGACCTTA
ACGTTCACTCCCTCCACCTTGGGACAAAGCAAGGTTCAGAGAACCTACGTAGTAAGGACACATAGATAGCCATAATATCTGGGCCAACATCTCC
CCACTCCTCACCCTCTATTATAATAATGATATTTGAAACTTAAAACGATTTAGGTCACATTTTCCTCTGGACCAGGTATTATTCTAGAAACAAC
GCTCCTACTGTCCATTTATCCACTCAACAGATATTCACACATCACCTCCCGCCTGTTGGGCAGTGATTGACAAGGGTCCAAGCCAATCAGCTTC
TTGTTCACATTGAGTTTCTGTTCTAGTACAGGGAGCCCAGAGCTCAGCCACCCGGGAGCTTTGCCCTGAGGAAGAAAGTCACCCCAAGAATTTA
TGTTAGAGACAGCAGTTTCAAACACCCAAGGGCTTCGGATAGCTCTAAACACCATGTACCAGAAATAATCTGGACTGGAGGGTAATTTGTTTTA
ATTCTCTTTGTAGCAGTTTGAGAGAGACTTGCGGCGCTATGCCACACACGAGAGGAAGATGATGCTGGACAACCACGCCCTGTATGACAGGACT
AAGGTAGTGTTCCCTTCTGGGGATGGGTGACTGACCTTTACCTGTAAGCCCTCCCTTTGAACAGATTTTCTAAAACAATATTCATTACACTTAT
TTATTTTTTTTACATTGGGGAAAATGGTTGCATGTAGAGGTCAGGGGAGCCAGTTCTTTCCTATCACATAGGTTCTAGGGATGGAACTCCGGGC
CTCACGTTTGGCAGCAAGTACCTTCACCTGCTGGTCCCACTTATCCCATCCCTACCCCCAACCCAAACTGATTTTAGTGTCTAGGTTTGCTTCT
TTTTGCTGCAAATGTTCTGTTCTCTGTGGATCACAGTTGAAAGGAGCTGGAAACATTGCTTCAACCCCTACTGGGCCCAGGGTGCAACTCCAGG
CTTCTACTTCAGAGAGTGAAGTAGCAGGGCTCTAGAACCAGCACATAGGTGAGCAGAGCTCAGCTGGCCGTGTTCCTGGTGTTTACGGTCTTTT
ACTCCAAAGAAAATCAGGGATTCCTGTAAATCATAAATGTCACAGGAATAACCATCCAGTGTAGGGGCAATCACCTTCTGAGGGGGTCATCAAT
GGGTGTCTCCCACAGTAGAGCGACACAGGTGCCCACAGGTGGATGGGAAGCCATCAAGCCCCAGTCACTAACCATGGGGGACTTGAGTGTCAGC
AGCATCTCATTAAAGCCACGCCTCACAAAAGTCGCAAGTTACCATGTGGCTGGCTGATGAAGAATGAACAATTCTATCGTGAAATCCATGAACA
AAAAGGTCTCCTGTTCTTCAAGTGGTCAAGGGCACCAAATTAGGCTTGGAGGGAAAAGAAGGTATAAAATCACCAAAAGCAAGAACTGATCTCC
TTGCCTCCTAGGGGTTTATTATAGTTTAAAAGAAATGGATATGCATTGGATATCTAACACTTAACCTAGAACTTTAAATAGACTGACAGCAAGG
CCTCTCTGGGACTTTTGACTTCATCAGACTGAAGTGTGATTCAAATTTCAATATATTTTATTGCGGGGGGGGGCTGGGCAGGGAGACAGAGACA
GAAACACAGAGAGAGAGACAAAGAGAGATTCAGAGANNNNNNNNNNNNNNNNNNNNNNNNNNNNNNNNNNNNNNNNNNNNNNNNNNNNNNNNNN
NNNNNNNNNNNNNNNNNNNNNNNNNNNNNNNNNNNNNNNNNNNNNNNNNNNNNNNNNNNNNNNNNNNNNNNNNNNNNNNNNNNNNNNNNNNNNN
NNNNNNNNNNNNNNNNNNNNNNNNNNNNNNNNNNNNNNNNNNNNNNNNNNNNNNNNNNNNNNNNNNNNNNNNNNNNNNNNNNNNNNNNNNNNNN
NNNNNNNNNNNNNNNNNNNNNNNNNNNNNNNNNNNNNNNNNNNNNNNNNNNNNNNNNNNNNNNNNNNNNNNNNNNNNNNNNNNNNNNNNNNNNN
NNNNNNNNNNNNNNNNNNNNNNNNNNNNNNNNNNNNNNNNNNNNNNNNNNNNNNNNNNNNNNNNNNNNNNNNNNNNNNNNNNNNNNNNNNNNNN
NNNNNNNNNNNNNNNNNNNNNNNNNNNNNNNNNNNNNNNNNNNNNNNNNNNNNNNNNNNNNNNNNNNNNNNNNNNNNNNNNNNNNNNNNNNNNN
NNNNNNNNNNNNNNNNNNNNNNNNNNNNNNNNNNNNNNNNNNNNNNNNNNNNNNNNNNNNNNNNNNNNNNNNNNNNNNNNNNNNNNNNNNNNNN
NNNNNNNNNNNNNNNNNNNNNNNNNNNNNNNNNNNNNNNNNNNNNNNNNNNNNNNNNNNNNNNNNNNNNNNNNNNNNNNNNCCCAGGAAATTGT
AAGTGCCTCAGTGAGAAACCCTGTCTCAAAAAAGTGAGGAGGGGGAAATGTTAGAGGAAGGCATCCACTGTTGACTTCTACCCTCCATATGTAA
CACGCTCATGCACATATACCCCCACACATATGCGTACACATGCATAAACATGCACTCACATACACACACAAAGGAGAATAGACACTCAGGGAAA
AAATATCCACGTGTCATTTGCTAACAGGGGAAGACTGTCACGATTTCACCTTTGGATGGGAAAGTGTCAAAACTACAGAAAGCCTTGGTCAGTT
GGTGGTTGGNNNNNNNNNNNNNNNNNNNNNNNNNNNNNNNNNNNNNNNNNNNNNNNNNNNNNNNNNNNNNNNNNNNNNNNNNNNNNNNNNNNNN
NNNNNNNNNNNNNNNNNNNNNNNNNNNNNNNNNNNNNNNNNNNNNNNNNNNNNNNNNNNNNNNNNNNNNNNNNNNNNNNNNNNNNNNNNNNNNN
NNNNNNNNNNNNNNNNNNNNNNNNNNNNNNNNNNNNNNNNNNNNNNNNNNNNNNNNNNNNNNNNNNNNNNNNNNNNNNNNNNNNNNNNNNNNNN
NNNNNNNNNNNNNNNNNNNNNNNNNNNNNCTGGCTGACTGGCTGGCTGGCTGATTGGCTGGCTGGCTGGCTGGCTGGCTGGCTGGTTGGCTGGC
TGGCTGACTGGCTGGCTAGCTGGCTGGCTGGCTGGTTGGTTGGTTGAAATTAAGGGCTCACTCTACAGCCCAAGCTCTTGCCTCTGCATGCCAA
GTACTGGGATTCCAGGTCACCACACCTTGACTTCTGACCAAAGCAGGGTGGCATGCTTTAGCCACCACTCATTCTAACAAGACACTTCAACAAG
TCTGCACTGAGGTGCCAAAGGAAAATGCCTGAGAGTGTGTTTCTCCTTGTGCTTCCAGAGGGTGTTTCTTGAAGCAGAAAGTGAAGAAGAGATC
TTTGCCCATCTGGGACTGGACTACATTGAACCATGGGAAAGAAATGCCTAAGACGGAGTTGTTGACATTTTTCTTTTCGGTTTAGACAAGCTGT
GCTCTGTGTTAGTAAAAGATGGCTTGGGAAAGTCTGGGATTCTTTGACCTCAGAGGATGCTGGCAGCAAGTGGATCATAAGTATACTATGCAGA
GAGAATATTCTAACGCAACTTTGAAGTCTTGATAAACCAGGATGCAGCCATGGTTCACATTCTTGGGCCATCTGTCCTACTGTTGCATAGAATT
CATAGTCTTTTGTCTGCTTTGTTTGAATAAAAATGGTCTTGTCATTGCAGCATCATCTAGAGAAGCGCATCAATGCCCACCTGACTCCTGTGTG
TCTGAATCTCTGTGTATTGCCAATAAAAATAGGAAACAGAAGCATGAAGTTTTCTTTGCTTTGTTCAGTTATTTTATTTCTAAACACAAATGGG
AACGTGGAAGAGTAAAAGCTTGCGGTTGATTCTGAAGGCATGCATGGGTGTAATTAGTACATCAGACGTTCCCAAGAGGACCCTGGGCCCCCTC
AGAGGTCCTGGGAGGCAGGCTGCTGATTCCTAGCTGTATCCACTCTCCTCTGAGCTGGTTCCTTTCGCACCCAGCCCTGCAATGTATCAGGGAA
GTGTTCTCATTGCTCTCTCTTGGATGCAAAAGCAATTTCCTAAACCATACAGGAAAGACTTCCTTTTCCTCCTGGAGCTCTTAAAGAGAGCGTA
GGTTTCATCTCAGGGAACCCATGGGAGGAACTCAGTCTCTGCAACAGCCCTCACCTAATCATTCTTACTTCCCATGTCCTCCAGTGGGGCACAG
GACAGATTCTATGCCTTGAAGGGACCTAAAGGCCACCTATTGAAGCAATATCACTGTCTTCACCCTCCTGTAGAGCTGGAGGCAAACTGATGAG
TGTCAGCTGTTCCCAGGGGATGAGGGCTGGAAGGAAGTTGTGCCGAGGAAGGAAAGTGATGCCCCATGAGAAGCGAGGTCCCTCACCACACGGA
CCCTCGTAGGATTCTCCTAGGAGGACAAGAGGAATCCGATGTCACTAGTTACTGTGCTTTTCCCCATAGAGGGTTAACCAGCCTGACCCAGCTG
CCTCTTCTCCAAGAAACGCTTTGCCATTTCTTAAGGCCTGGTCAAAAAACCAGGGTGGCCTTGGGTTGCAACAGGACAATCCGGTCTGCCCCAA
AAGATTCGATTGTGTCATACTACTGCTCCTCTAGGAAGACACAATCCATCTGGGACTGTCAGTCACTTGGCCAAGAGGCCACCCCCCAGTAAGG
TCCTTTCACCTAAAACTAAGGTTTTGGGAGGAATAACTAACTGTCCTTCTAAGAAGATGGTGTACTTCCCCCGAGCCCCGAAAAAACCACCCCT
TCTGTGAAGTTGCTTATAGAACTGTTATTGCAAAGCTTTGCCAACCCCACCTGCTTTGTGAAATTTACTCAAATAAGCTTAACTTTTCCTTTTC
TTAAAAAAAAAATCTCTTTTTCATACTTTTGGATATAGGCCAGAGCCTAGGCTGTCTCTGATGCTCTGGCCTTTAGTGCTTTTTTCTCTGAAGC
CATATCCTTCCACTTACCAAGTGAAGTGACTGCTTGTCTGACATCTGACTGCAGCCCTCCATGCTTAAGCAAAAAGCCCCGTTCTTCTCTCTTC
CTATATACTTCCTCTTCTTCCCTCTCTTCCATGCATCTGGCAAAATTTAAACCTTTTTTTCTTTCTTCCTTTTCTTTTCTTTCCTTAAATGCTA
ATAAAGCTATCCCAAAGCTGCTATCTGAGCTATTTTTTTTTAACCTTTCATTATTAGGCCCAAGAATTTCAAGAGCATAACCCCAAATTCCCTA
GTAACATCAACATTGCAGCAGAACACCCCAAGGCTGGGCTCGGGCAATACTGGGGGAGATGAGGCTTCAATCTGTAGCACAAAAAAGCAGCCCA
CGCCCTTGGGAAGTGAGATTCGCAGCATCAGTTTGACCAGAGCCCAGGTCTCACGGGCATCCAGCCTCAAGCCCAAAGTCTGGAAGCACATGGG
ACCCTGAAGTGAACGTGTACATGGGGCTGCTTGAATCCAAGCTCCTCCCAATACCTTAAGGGGTCTAAGAACAAAACCCTCAGGGAACCCAAGG
GTTGTCTAGCAGGGTAATAGGACATTCTGCCAACCCTTAAGGAGACAGGCCTTCCCACTGCTGGTGATTGACAGATGCCTCTCCAGCCACTTTA
GCTCTATCCATTACACCTTTAGAGTCCCATGCCACAGTCACTCAAAGGCGATCGCTCAGCACCTCTCCATGCAGGTATGTGCCCCAGTCATGGG
ATAGTGCATCAAAGGTTCACACATGACCTCAGCAGCCTGTCGAGTGGTTGAATGGCAACCAACTACATGGCATTGGCTAAACCAGTGCTCCCAG
ATTCTCCCTCATGTCCAAACATGGGCATGGGAATCTAAAGGTGATAAGTCTTCGTACCAACAGAAGTCCTGAACCTTGCAAGTTTAGTGAAAAC
AATTTGAAATGAAGATTCTAAGCAATTGATTGTAAGGAGAATTAAAATGAAGAACACAAAAACAAAAACAAAAAAACAAAATAGTCATACTTTA
TTTTATAAGTTGCAAGGCTTGCTGATCTGTATATTTCAGTCACGCCTCACAGCTCTCCTCGGGGATCAGTTTTATAAGTATAAAACTGAGGCTC
TAGGTGGCCAACATTCTAGGCTGGAGCTGAAACCCATATATGTCAAAGCCATAGTCTCTTCAAGTTCTCAGGGAGTCTAAGGTCATTACCCATC
ATGCAAGAGAAATGAGGCTTCATCCCTGGGCACAGCTGATTGAAGATGTTCAAATGTGTTTATCTAAGACCTGAGCCCATGAAATAACCCAAAA
TTGAATTTCAGAGGGGCTTTGAAAGGCAGCTGTTAACATGTGATGGTCATTGGGTTTACAGAACCATTCCCTATAGCTCAAGAAATCCAACTAT
TTCTAAACAACCAGAGGCCCCATGCAAGAAGAGTTGGTTCTCTGGGATATCAAGGTGGCTCAACAAGACCATGGATGTTTCTAAAGATGCCCTC
AGGCCTCAGCTCTCCCACTGTGAAGCATGGTGTATTTCAAGGCAGTGGCTGTGCACTAGAAGGTCACAAGGAAACTGTCTGGGGAAGTGAAGGC
AAAGATCAGGCCCGAACTGGTGAAGTTGTCCCTAGATGTCCCTTGCATAGCAGGTGTAGCTATCCCAACCCATCCCTTTGCTCCTGTGTTCATC
TTTGGTCCTCTTGATGCCTCTCCCTCACAAACATCTTTTCTTTATGGTACTTCAAAGCAAATGGCTCATTACAAAGAAAACTCATTAAAACATG
AATATCAGTTTTATATTAGCTTACTTCTCTCAGTGTTATGATAAAGTCAACTTAAGGGTGGAGGTATTTATTTTGGTTCAGTCCAAGAAAGGTG
TGGCAGCAGGAGTGTGGGGTAGCTGGCCAAACACTTTATCTGTCGTCAGGAAGGATAGTGATGAGTTCTGCATGCTCAACTTGAATTCCCAGAA
CCCCAGGCTATGGAATGATGCTGGGCCACATTCAGGTGGATCTTCTTACTCAGTTAAATCTTTCTGGAGGTGTGTCTCCTTGGTGATTCTCAAT
CCCATTGAGTTGACAGTGAAGATTAACCATCCAGGACTCGACCATCCTAAAGGTTAATATGTAATGTGTAACACAGATCTCTGTACTTGTGATT
TGGAACTTGGTTGACACCCAAGGGGAAAAAAATGGTGTGCAGAGTCGAAGTGAGGAGACTGCCAGTGACCACTAGAGTTATTTTTAAATGTCAA
AAATTCAGATTACAGGCCACAGAGAAGGTTTAGATTTCCTTGTCCACTTTGTGACTCTGGATGGATGATAAGTAGGATCGGAAGATGTGGGAAG
AACTGGGTGAAGAGGATTGATATCTCTAGTGTCTACTAAGTGGAAATTGCTTCCTTTATTCCTGCTCTAATTTTTCCAGTGGCCAAAGGAAGCA
CAGAACCCAAAACAGGCTCGGGGAGGGTAGATGAGCTCATCTGACTTCTCAAAGTGCTCAGCAGCACGTCTGACTAGGGAGTGCCTAGCTCATT
CTCAGCTGTATGACACAAATCAGCCACATACTTCCTTGTGTCGGGGCATGGACGGCTCCATGCCACCTTTATCCTGAGATATTCAAAAGGAAGA
AATGGCTTCTGTCACATGTCTTTGGTTAGGTTTTATGCCTGTCCTAACTTGTGCCAAGCTGGCCTTGGTCAATGCACCCCCCAAAAAAGCCAAC
TCTCAAAGCTTTATTATTTTTTAAATGATAACATTTGGAGCAGCTAGAGGAGAAGGCAGGACACTCGGGAGCCAAGCCGTTTCCCAAAGGCAGA
CTTCTCTCGATTCAGAAACAGCACATACGGGCCTCATCTGGACACATAGTCGACTCACCTGCGTCCCCTTGCTGATTACCCTGCAAGGTCTGAG
ATCGAATGAACCTGCCTGCAACCATCCCCTAAAGGGGCAAGGCAGCCAGATGTGTCTTGGATCTATAAATGAAATTGATGTTGAGTGACAGCCA
GCTGACTCCTCGCCTCTCCAAGCATGAACCCTGAGCACAGATTCCAGGTTTTCAGCCCTGATCCAGCTCTGGGTCTGCTCCCTGATGCGGTGAC
ATCATTCTAGGCTCAGGCTGGGTACAAGCCACCAAACTCCTCTTCTCCTTTCTAGTTCTTCAGGAGGACGGTAGGTGTCCGGCAGGGGCTCCTC
GCTTCCCGAGACAGTCTTCACATATATGTGCCCTTCTTGCCTGCCCCGTGGGTTCATTTCATGTGTGGGTGACCGCCTAGGATTCTTGAGAACA
CAACAGATTTTTAAAATGATACAGTAGAGACTCCAGCTTCCCGCTAAGATGAACTCAAACAGCCATATTGACCCTTGAATGGGAACAGCAAAAT
TCAGACCAAACATTTGAAACAATGGTTGGCAAGACAGTGCGCATCGGGAGAGTAAAGACACTGAACCTTGAGGGGCAGGAAATGAGTGACAGTT
GCCTGAGCTTGTTGTCATCAAGGGGTTTTCAGGCCATGCAACTCTCCCTGGCTAATTATTGCTGGCAGACCGTCTCCAGCTTTTAACTTTTAAT
CTATTCGAGACTATATTCAGAAAGTGTCGTTCTATGGGTTTTTTTTTTTTATAAAGTTGGCTATTGCTTTTACAGCCAACCAGATTCTCTCTGT
CTTGTAAGTGAAGCTACTTATATCTAATATGATTGTTGATCTGGGTGGGCTCAAACCCACTCTCTTGCTTCTCTTTTTCACTTGTCCTGTCTCT
TCACTTCTTAGTGGTCTTCTCCTGCTTTGTCCCCTATAAGCTTTAGAACCTTACAATGTTTACTGAAAATGTGTTGCGATTTATATCACAGATA
TATTTATTTTAATTTAAGATTGTCTATGTCTATAGATGTTTTGCCTAAATGCACACCCCTCGTATCCCACGAGGCCAGAAGTCTGCAGATGACC
TAGAATTCGAATAATACGCTGTAGTGAGCTGTTATGAGGGCCTGGAAACTGAATCCAGCTCTTCAGACAAAGCACTTATGACTGCTCAGCCGTT
CTCTAGCGCCACAATTACACGATGATAGGGATGCTAAGAGTACCACGAATTTGTGGCGGCTGACAGCTTGATGCTGCTGAGTCCAGGACCACAG
ATATAACCATCATAACTTAGCTATTGTTGAATGTCTTCTACTAAGTTTTATTATTTCCATCATAGGATTAGACATTCGATCAGATTTATTCTTT
AGCATTCTATGTATTTTATTACCACTATAAAATAGGGTTTTTATAAAATTCCTTTTTCTAACTGATAGCAATTGATATTAAGAAATACATATTG
CTTTTGAATTTTTTTTCAGTGCTGGAAATCAAACATAGGCCTTTGCTCATACAAAGTGGGTACTATACCGCAAACCTAAGTCCTCTCTATTGTT
TTTATATACAATAAACATATTTGACTATTTTCCTAAGTCCAATAATTTACCTCTAGATTATTAAGTTTTTCTATGTTGACAGTCATATATCATC
TACAAATTATGATAATTTTGCTTCTTCCTTTTCAATGTTATATTTAATTTACATATACTTATATTTGTGAATATATATTTATATATATGCTATA
TTTGTTTATATTTCCTTTCAATGTTACATTTTTCTGTCCCATTGTGTATGTTAGGCCCTAAAGTTCAGTGCTGAATGTAAGTGATGAACACTCT
TGATTCACTTCTGATCTTCAAGTCATATTCCTTTGGGTGTCCCTTTTCAGGTTACCATCCTGTTCTAGCTTGGCTTTGAAAGTCCATGTCAAGG
GCTGGGCAGAAATGGTGCTTGCTAGCAAGTATAAGGATCTGAGTTTGAATCCCCAGCCCACATCAAAGCCCAGACAAACTACAGCCACCTGCAG
CCGCAGCCCCCGCCCCCGCCCCCGCCCCCGCCCCCGCCCCAGCCCCACCCCCAGCCCCGCCCCAGCCCCGCCCCAGCCCCGCCCCAGCCCCAGC
CCCGCCCCAGCCCCAGCCCCAGCCCCAGCCCCAGCCCCGCCCCAGCCCCAGCCCCAGCCCCAGCCCCAGCCCCAGCCCCAGCCCCAGCGCTCTC
TCAGGGAGTTGGGTGGCAGAGTCAGGAGAATCCCCGGAAGCTGGTGGGCCAGCACCAGCAGAGGAAAACGGCAAAGAGACCCTTCTTAAGCAAG
GTGGGTGGGAAGGGCTGACACTGAAGTTATCCTCTGACGTCCTCTCACATACATTCCATAGTATAAATACCCACACACAACCATGTGCACACAT
ACATTGTGCATACATTAAACAAACAAGTAAAACTGCTTTATCACAAGTGACTTATCTTTTAACAAAACCCCATTTTTTTCTTATTAAGATAGCC
ACATATCTGTTTGTTTTGACCATTAAATAAACTATATTAAGCTGATTTCCTTTTTCTGCTGTTGCTATATTTTCAGGACCGGGCACAGAACCCG
ATGACTTCTACATGTTAGGTCAGCACTTTACCACTAAGCTACATCCAACCCCCCATTTTCTAATGGTCAATCAGCTTTGAATTCCTGTCTGGTC
AGTAGACACATTGAACACCTCCATTGTGCTTCCACACATTTGGTTGACCTCCTTGCCAGAAGGTCTCACCTTTGCACAAGCGCACACTTAACCC
TTACCGTGCTACACTTTCAGTCACTCTCAGGGATCATAATCAAACGTGCTTACCTCAGATATTTTCGGATTGTCATAGAGTTCTGAAATTTCAC
ATGGTATCTCAGTCTCCTAAAATGGTTAAAAATAAATACATAAATAAATAATAAATAAGTGTATGTATGTATGTATGTATGTATGTATGTATGT
ATGTGAAGGGCCATAGCTCTAACCATTCAAATCCTTGTGTTTTAAGCCACTGTGCAGATCAGAATTGCCAGAAGCCTTTAAAACAAAGCAAACA
CATATATAAGAGCCCACCTTGAGCAAAATGAACAGATAGATTTAAGAAGCATCAGTCCTCGGCTGGCATCGGGAAGAAGTGAGCAAGAGCAGAC
ATGAAACCAGACTGGCCATGAGTTGATAACTGGGTCCTCTGTGCTCTACTTCCACAGTAATGAATGTGTAGGTACAGCAACCCCCCCCCCCCCC
GCTGCACTTGCAGTGGTTTCAAGTGCCAGCCAGGAATGGGGATCTTAAGATGTTAATGGAAATTTCAGAAACCAAAGGTTTTAAATGCCCTTTT
GAACAGCGTGACAAAGCCTTGAGCCACCCTACCTCATCAGAGCCTGGATTAGAAGCCTGGCCTTCTATCTCCCTATGTTAATATCTACCAATAG
AACAGGCATGGTTGTTCATCAATAGAGAATGAAATGACAACCCAGAAACCATTTGATACAGGTATGAAGCCTTGTCAGGTAGGATGCCAGGAGT
GTATACACATCCTTTTGTATGTAAGTCATGCTCACTTAGATACAGGAGTGGACAAGGCTATGGTCTTATCATATCCCTCCCATAGACACTTCAT
CCCTCTTTGTCTCTTGTCTTCCCTCATGTTCTTACCATCTGACTTCCCCCCTTTTCCTCCCTCAGTGTAGACGACACCCCACTGCACAGAGACA
TGTTTGCATGGCATCAGTCATCTCCCTCCATTCCTATCTTTTCCCACCCTGAATGTCATCTTATTGCCACAGATTTACTCAAGCAACCAGGGAG
TTATGTGAAAATCAGCTCTGCCGGAATCTACTGACAAAGGACATCACAGAACAGAAATATTTACTGTCTTGTCCTCAGAAACAACAGAGGTTCT
GAGTTCTGACATGCTAACGCCAGACAGAGGCCAGTGCACGGACGTACCCACTCAAGCTACTCATTCACACGCAAGAAGCCAGTTATCACCTCTA
CGGGCTCATCATCGATGGTTCTTCTTCCCTGGATCAAGGTAAACAGCAAAGCCACCAGCAGGGCTGTGGCCAGCAGGGATGGGATTCCGGCTGC
CAGTCCAATAGAGGGACCACAGTCCTGTCAGAGAGAAAACTGAGTCAGAAAAGCCCAGATTCTTCAAGAATACAGCTTACACCGCGTGTTCTAG
CACACACCTTTAATCCCAGCATTCAGGACGCAGACGCAACCAAATCTCTGTGAGTTTGAGGCTAGCCTGGTCTACAAAGCAAGTCCAGGACAAC
CAGGCCTGCTTACACTGAGAAACCCTGTCTCAACAAAACAAAACAAAATGTAGGACATATTCAGTGATTAAAATAAACAAACAAAAAAGGTGCA
TGGGCTCTGACTGCATTGGAAAAATGAAATATTTCAAAAGATATCTGTACTGTATATGACTGGTGACTTGCTCTCCTAGGACCTAACTATATAG
TTTAAGCCCATTTGCACTGCTGATCATGTGTTAAAACAAGGGACAACTGATTTGAATAGTAGCCTTACTCAACAGAAGCACAAACTACCCTTCA
GAAGAAGAAAAGCCAACGTACAGTTTGGAGGCACAGTTAAATGCCATAAATGCCATGTTCACAATCGCCTTCAGCCTGAAAAAGTCAAAGCTTT
TTTAAATGTTTATTTTTAATTTTTTTTTTTAGTACTGTGGAGAGTGGTTAATGTAGAGATTTACAACTAGCCAAAGTGCAGAGAACACATGTCG
GTGGAGTGCTCCGTTGTGACTGGGATTTCTATATTTTATCTCCTCTTCTGAGGCTCAAGGAATGTTTCAGAAGAGTGGGGAGAAAAGCTAGAAG
GGCCAGAAGTTGAGAGACACTAGGGAGAAATCAGTGTCTTACACTCAAGACTGGAGCATGCCACACATGAGCTCATGGCAACTGTGTTGTCTGC
ACAAGATCAAGCTACGCAACCGCCTAGCACAGCTCCGGCTGCGCACATGGGCTCCCACAGCTGGCTGCCGAGATGCTGCAGTTAAAGGCTTTCA
GCAGAGGGAGAGCCGGGTTCTCCAGAGGTTTGGTCCCTGGTAGGTCAGCCATACTCCAGTGGTTGACACCAAAACTATGCACATAAGTCAGCAC
GAATTGGATTTAACAGTTATTAAAAAAATTTAAAAGGAGAAGAAGTTTCGAGAGGTGTGGAGGGGAATTTAAGGAGAGCTGAAGTTGAGAATGG
GGTATGAATATATTCAAATATGTTGTGTACATGCACAAAACTCTAAAAGAACAATTAAAAAGTTATATTAAAAAGAATAACCTAGATAGAGAAA
CAAAAAGTCCGCGTTGTTAGCACATCCTATGCCATCTGTTGTTATTTTGAAAACATTCATATTGCATGCATGACCCTGCTTTCAAGCGCCCACT
CTGGTCTGAGTGGTAACAGACATCCTTGATAGCACCACAACGTTTCAGGGTTCCAGCATTTTCTGGAAACACTAAAGACGATGTGCAAATTCCT
CTAAACACCCTACAAATGCAACACTAGCGGGGTGTGATTTTTACAAAAGCGTGAAAACCCGTGTCACAAATACATGGAATGAGGACTGTTTGCA
GAATGTCATTTCACACATAAAACCAAACATTTCACACAAACAGACCAAGACGTAGAATGCTCTTGTAGAATTCTCTCCATCCCTTACTTGTGAC
CACCATCCCGAAGTCTATCCCTGTAGATGCTCCTTATTTGGTTTCCAACACACAGATCCAAACATAGCCATTGACTCTTCTATCCCTGGCTGCT
TTCCTCCATGCTCTGTGAATTTGCCTGAGTATGTGTGTGTGTCTTTCCTTGCTTGCATTTTATTTATTTATTCATTCATTTATTTATTCAACGT
GCATGTATGTGCACCTTGTGCATGCAGGAGCCTTCAGAGGTCACAAGACACCATAAGACTCTCAACAGCTAGG
MOUSE SEQUENCE - mRNA
ATTCTGGAGACACCACCTGATGGTACAGACAGAGCTAGACTGTCTGCTTCCATGGATCCACTGCAAGCAGTCCACCTGGGTCCTCGGAAGAAAA
GACCCAGGCAGCTGGGCACCCCAGTGGCTTCCACGCCTTATGACATCCGATTTCGAGACTTGGTCCTCTTCATTTTGGAAAAGAAGATGGGAAC
AACTCGAAGAGCCTTCCTCATGGAGCTGGCCCGAAGGAAAGGGTTCAGGGTGGAAAATGAGCTCAGTGATTCGCTCACCCACATTGTGGCAGAG
AACAACTCAGGGTCAGACGTCCTGGAGTGGCTCCAGCTGCAGAACATCAAAGCCAGCTCCGAGCTCGAACTCTTGGACATCTCCTGGCTCATCG
AATGCATGGGAGCTGGGAAGCCAGTGGAGATGATGGGGAGACATCAGCTTGTTGTGAATAGAAACTCCTCCCCGAGTCCTGTCCCAGGCTCCCA
GAATGTTCCAGCACCTGCTGTGAAGAAGATCTCCCAATATGCTTGCCACCGAAGAACCACATTAAACAATTACAACCAACTATTCACGGATGCC
CTTGATATCCTGGCTGAAAATGATGAGCTTAGAGAGAATGAAGGTTCTTGCCTGGCATTCATGGGAGCGTCCTCTGTACTGAAATCTCTGCCAT
TCCCCATCACCAGCATGAAAGACACAGAGGGGATTCCTTGCCTAGGGGACAAGGTGAAGAGTATCATAGAGGGAATTATTGAAGATGGAGAAAG
TTCTGAAGCTAAAGCTGTGTTAAATGATGAGCGATATAAATCCTTCAAACTCTTTACCTCTGTGTTTCCTGTGGGACTGAACACACCTCAGAAA
TGGTTCAGGATGGGTTTCAGAACTCTCACCAAAATACAATCAGACAAAAGCCTGAGGTTCACAAAAATGCAGAAAGCAGGATTCCTCTACTACG
AAGACCTCGTTAGCTGTGTGAACAGGCCAGAAGCCCAGGCTGTCAGCATGCTAGTTAAGGAGGCGGTTGTGACATTTCTTCCAGATGCCTTGGT
CACCATGACTGGGGGGTTCCGCAGGGGTAAGATGACTGGACATGATGTAGACTTTCTAATTACCAGCCCAGAAGCCACAGAGGATGAAGAGCAG
CAGCTCTTGCATAAAGTGACACACTTTTGGAAGCAGCAGGGGTTGCTTTTGTACTGCGACATCTTAGAGTCAACCTTTGAAAAGTTCAAGCAGC
CCAGCAGGAAGGTGGATGCTCTCGACCATTTCCAGAAATGCTTCCTGATTCTAAAACTGGACCACGGGAGAGTGCACAGCGAGAAGAGCGGCCA
GCAGGAAGGAAAGGGCTGGAAGGCCATCCGTGTAGATCTGGTCATGTGCCCCTATGAGTGCGCCTGTGCCCTGCTTGGATGGACCGGCTCCAGA
CAGTTTGAGAGAGACCTTCGGCGCTATGCCACACACGAGAGGAAGATGATGCTCGACAACCACGCCCTGTATGACAGGACTAAGGGGAAGACTG
TCACGATTTCACCTTTGGATGGGAAAGTGTCAAAACTACAGAAAGCCTTGAGGGTGTTTCTTGAAGCAGAAAGTGAAGAAGAGATCTTTGCCCA
TCTGGGACTGGACTACATTGAACCATGGGAAAGAAATGCCTAAGACGGAGTTGTTGACATTTTTCTTTTCGGTTTAGACAAGCTGTGCTCTGTG
TTAGTAAAAGATGGCTTGGGAAAGTCTGGGATTCTTTGACCTCAGAGGATGCTGGCAGCAAGTGGATCATAAGTATACTATGCAGAGAGAATAT
TCTAAGGCAACTTTGAAGTCTTGATAAACCAGGATGCAGCCATGGTTCACAGGTCTTGGGCCATCTGGCCTACTGTTGCATAGAATTCATAGTC
TTTTGTCTGCTTTGTTTGAATAAAAATGGTGTTGTCATTGCAGCATCATCTAGAGAAGCGCATCAATGCCCACCTGACTCCTGTGTGTCTGAAT
CTCTGTGTATTGCCAATAAAAATAGGAAAC
MOUSE SEQUENCE - CODING
ATGGATCCACTGCAAGCAGTCCACCTGGGTCCTCGGAAGAAAAGACCCAGGCAGCTGGGCACCCCAGTGGCTTCCACGCCTTATGACATCCCAT
TTCCAGACTTGGTCCTCTTCATTTTGGAAAAGAAGATGCGAACAACTCGAAGAGCCTTCCTCATGGAGCTGGCCCGAAGGAAAGGGTTCAGGGT
GGAAAATGAGCTCAGTGATTCGGTCACCCACATTGTGGCAGAGAACAACTCAGGGTCAGACGTCCTGGAGTGGCTCCACCTGCAGAACATCAAA
GCCAGCTCCGAGCTCGAACTCTTGGACATCTCCTGGCTCATCGAATGCATGGGAGCTGGGAAGCCAGTGGAGATGATGGGGAGACATCAGCTTG
TTGTGAATAGAAACTCCTCCCCGAGTCCTGTCCCAGGCTCCCAGAATGTTCCAGCACCTGCTGTGAAGAAGATCTCCCAATATGCTTGCCAGCG
AAGAACCACATTAAACAATTACAACCAACTATTCACGGATGCCCTTGATATCCTGGCTGAAAATGATGAGCTTAGAGAGAATGAAGGTTCTTGC
CTGGCATTCATGGGAGCGTCCTCTGTACTGAAATCTCTGCCATTCCCCATCACCAGCATGAAAGACACACAGGGGATTCCTTGCCTAGGGGACA
AGGTGAAGAGTATCATAGAGGGAATTATTGAAGATGGAGAAAGTTCTGAAGCTAAAGCTGTGTTAAATGATGAGCGATATAAATCCTTCAAACT
CTTTACCTCTGTGTTTGGTGTGGGACTGAAGACAGCTGAGAAATGGTTCAGGATGGGTTTCAGAACTCTCAGCAAAATACAATCAGACAAAAGC
CTGAGGTTCACAAAAATGCAGAAAGCAGGATTCCTCTACTACGAAGACCTCGTTAGCTGTGTGAACAGGCCAGAAGCCCAGGCTGTCAGCATGC
TAGTTAAGCAGGCGGTTGTGACATTTCTTCCAGATGCCTTCCTCACCATGACTGGGGGGTTCCGCAGGGGTAAGATGACTGGACATGATGTAGA
CTTTCTAATTACCAGCCCAGAAGCCACAGAGCATGAAGAGCAGCAGCTCTTGCATAAAGTGACACACTTTTGGAAGCAGCAGGGCTTCCTTTTG
TACTGCGACATCTTAGAGTCAACCTTTGAAAAGTTCAAGCAGCCCAGCAGGAAGGTGGATGCTCTCGACCATTTCCAGAAATGCTTCCTGATTC
TAAAACTGGACCACGGGAGAGTGCACAGCGAGAAGAGCGGCCAGCAGGAAGGAAAGGGCTGGAAGGCCATCCGTGTAGATCTGGTCATGTGCCC
CTATGAGTGCGCCTGTGCCCTGCTTGGATGGACCGGCTCCAGACAGTTTGAGAGAGACCTTCGGCGCTATGCCACACACGAGAGGAAGATGATG
CTGGACAACCACGCCCTGTATGACAGGACTAAGGGGAAGACTGTCACGATTTCACCTTTGGATGGGAAAGTGTCAAAACTACAGAAAGCCTTGA
GGGTGTTTCTTGAAGCAGAAAGTGAAGAAGAGATCTTTGCCCATCTGGGACTGGACTACATTGAACCATGGGAAAGAAATGCCTAA
HUMAN SEQUENCE - GENOMIC
TTTGGGATTCAGATTCTATTAGTGTGCAATGGAGCCTGTTCACTGATATTTTAAAAACTCAGGTAGTTTATTGTGTAGCCAGGGTTGTGAACCA
AAGTTCTACACAGAGAACAAATATTTATGTAACAATGTATTCATGTAACAGGCAAACTGGGTTTTTGTTTGTTTGTGTTTGCTTTGTATCCATT
GCTCTGGCCTGAATGTTTGTTTCATCCACAAATTCACATGTTTTTGCCTTAATCCCCCATTTGAGATTAGGTGTATTTGGAGTTATACCTTTGG
GAGTAATTAGGACATGAGTGTGGAGCCCTCCTGAACGGGATTAGTGCCCTTAAAGGAGGAAACACGAGAGAGATGATCTCGTTCCCCACCATGT
GAGGATACAGCAAGAAGGTGGCCATCTGCAAACCAGAGCTAGTGCCCTCACCAGGAAACTTTTCAGCTGGCACCTTGATGTTGGATTTCCCAGA
CTCTAGAATGGAGAGAAATAAACTTCTCTGGTAATTTTGTTACAGCATCCTGAAGTGACTAAGACACCCTGGTGATCTGGGAGACTCCAATGTG
TGGAATTTACCTAGTTTTCCTCTAAGACCTGCCAGCCTCCTCTTGGATTTTCCTCGCACTCTTCCCCTTCTCTCCCTGTGCCCTCCTCCTAAGT
TATCTAAGGCAAACCTCTTCCTCCAGTAGAAGTTCTTTCTGTTGGACACTCTTCTGCCCTTTCTAATAGAGCTGAGATTTACTAGTAGTACATA
GGTTTACTTCCGCTGAGAATAAGTAATCTGCTCTCTCAGAAGCTTTGGAAAGGACCTAGGCCCTTTTTCACCAAGTTAAAACATTTCAGTTAAA
TATAATCACACCATTTAGCACCTAATTATAAACTATTACCTCCACAATTTAAAAATATTGAATATGAGATTTTGTTATTTTTAAAAAGTAAACA
ATTACTCACAGAGCTTTATAAAAAAAGATTACTATGTTGAAAGTGAGTCCCTACTTCCCCCTACCCCCATCAAATTATTCTCTCTGAGAAACAC
ACGTTTAAAATAAATCTCAAATTCGTTGCATTGAGAGCTGACTTTGGTACCAAATTCACGATGTGACATTGTTTCTGCTGCGCCGTTGAACCCC
TTTTTCCTCCCAGGTGGTGATGAAAGACTTTCACTTCCTGGCAAAGAATAAGAGAGGGTTTTGGCTGCATCCCCAGCAAAACCAGCTTTAGATA
AATGGTTTGGCACAAACACTTGTGGGCCTGAGCTCTCCCCTTCTATGCATTAGGGGTGTGTCACTGACAGAATTCTCACTGGTCTCTCTGGATG
GAAGAGGAATGGTGTTCACAGCCTATACTTTGGGCTGTCATCTATGTACAAAGACATGTGCTAAGCCCTCTAACACATACAAAGAAGGTTACAC
TCTAAATGGGAAGACGAGCCATACTTGTCTACATAAAGGAAGGTGGTCAGGGGCAGAAGGTAATTGAAACAGGGTAAGTATCAACAATGTGTTA
TTAAGGTGAGTTCCCAGGAAGCCAGCCCTGAGATGGGAATTTGTGTGCAGAAGTCTATTGGGGATGCCCTTGGGATCATCATCTATCGGAGCAT
GAAGGAGGAGATTGGCCAGAGAAAGAGTTGAACCACTATTTGATTGTAGTACAGATCTCAGCCAATCTAATAGGATGCTCTAGAGTTACCCTGG
CCCTTCAGAGTTGTCACCCCTTGAAATGAGATGACCTGACCTTTGTAACCTTCCCCCGATCATTGACCAATAAGTGGAGGGGTCTGTCCTTAGG
CAAGTGTCTCTCTTTGTCAGTGAGCCATCAGCTCTGCCATTCTCAGTAGCAAAAGGAATGGTGACTCCATCCTCAAGGGGTCTCTGGGCAGCTC
ACCACAGCATCCACTACAGAGGGAGATCTGTGACCTTGAAGATAAATGTGTTTTTGGTTGTTGCTGTTTTGCTTTTTTTTCTTTGAGATGGAGT
CTTGCTCTGTTGCTCAGGCTGGAGTACAGCAGTGTGATCTCGGCTCAGTGCAAGGTCTGCCTCCCAGGTTCAAGTGATTCTCCTGCCTCAGCCT
CCTGACTAGCTGAGATTACAGGTGTGTGCCACTATGCTCAGCTAATTTTTGTATTTTTAGTAGAGACAGGGTTTCACCATGTAGGTCAGGCTGG
TCTCAAACTCCTGACCTCAGTTGATCCTCCTGCCTCGGCCTCCCAAAGTGCTGGGATTACAGGTGTGAGCCACTGTGCCTGGGCCAAGCATAAA
TGTTTATAGCACGAGGGAAAAACGTACATTAGTAAGGCACTGGGAGTAACTGGGGAATCTGAAGCGTATTGTTATGATCAGTCTCTACTTGCTA
TTCATTTCACTCTGATAAGACCATCTCAATCCCCTAGTGTTATAAACACTACAAATACTACTATAGCATAAAATGTCCTCCATAAGATCCAGTA
AAGAATAGCTGAAATATTTAGCTGACTCTTTTCAAACCATAAAGGTCAAACACATTTCAAGTTTAGTTTAATTCTATTTTACAGTTTTGGTTTT
ATAACCCAAAACTATTGTTTTCCAATTCACTGTCTAAATAATTGTCAGATTCTGTCTGTCTCTCTCTTTATTTATTTATTTATGAAATCAGATC
TGGCTCTCTTGCCCAGGCTGGAGTGCAATGGCACAGTCATGGCTCATTATAGCCTCAACCTTCTGGGTTCAAGCAATCCTCCTGCTTCAGCCTT
CTGAGTACCTGCGAAGACAGGCGTGCACCACCACACTCAACTAATTTTTTTACTTTTATTTTTGTAGAGATCGAGTCCTGTTTTGTTGCCCAGG
CTGGTCTCAAACTCCTCGTCTCAAATGATCCTCCTACCTCAGCCTCTCAAAATGCTGGGATTATAGGCATGAGCCTGGCCTCAATTTTTTTTTA
AGGTAGTCTTTTTTTTTTCCAGTAGTTTTTGGGGAACAAGTGGTGTTTGGTTACATGGATAAGTTGTTTAGGTGTGATTTCTGAGACTTTGATG
TACCCATCCTCTCTCCTTTTACAATGATTTCTTTATGATGTGCCTCCTTGGTCTGGCACATTTATGCCTGTTTCCATCGCTACCATCATTAGTT
TCTTTCAGATCTTTGCTAAAATGTCACCTCCTCAATAAAGCCTAATTGGATAATCTTAGACTGCCATCCCAACCCTGGCATACGCTGTCCCCTT
TATTTCTCTCTACAGCATTTATCACCATCTGGCCTGCTTGAGATTCTTGAATAATTTTATTTATTGTCTGTTTCCTTCTAGTAACAGACAAGTA
TGTAAATCCCATCACGCAGGGGTTGTTTTATTCACTCTCTATTATTAATGCCTAGAAGTGCCTCGCACATAGTAGGCACACAGTCAATATGCAT
TGAATGAATGAATGGTCCCAGCTGAGGCTTCCACGGTTCTCTTCTGGCCATTTGCAATAGTGACCCAGCTGGAGTAGCAGCTTCAGCTCTCTGC
ACCTTCCAGGAATCCCGTTTTGGACCACGCGATATACACATCACTGCAGGGCTGCCTTCTGTGGCCCTGCCTCGGGCCTGCCACTGTCCTGCTC
AGAAGCTCCCATGACTTCTTAGTGCCAACTCAGGCTCTGGGTGGTCTCTGAGGTCTGCTCCAAACCTAACTTCTCTCCTTTTCTCCCATCTGCT
CAAATCCTTCCAGCCCTCCTGGCCCCCGACAGGCTCCCTCTCATGTGAATGCCCTTCCTGCCACCCTTTCCTGCCCTCCTCTGAATTCCTCCAG
CAGATGAGTGTAAGGGGGCAAGTTAAACATCTTCCAGGGCCTTCTGAAGAATGTGAGGATAAATGGTAAAGCATTTCACAAAGCCTAACATCTT
TAGAGATGACTATTATTGCCAGTATGTCATGATAGTATTATTGTATCATAAACTTCTCAATTCAGTAATAGATGTCTGGAAGGTTGAAGCTAAA
GCATCAAGCCACATTCTCCAGTTTACCAGTAATAAAGCTGATCTTGTGACTCTGGTCACAGTGGTGTGCTGGAGTCAGCTGCTGCCAGCTCACA
AGAACCCATGGCTAAATCTTCTGGAACTCTGCGAGCCGACTGCTAAACATTCACATGCACCCCACTGCCAACTGACCCATGCTTGTTTTGCAGT
CACTTCATAAGCTGCAGGAGAGAAAGATGTCTTTAACTGCTTACCTTAGAGACGTTATCAGTCAACAAAAAGAATTAAAAGGATCTGGTGACAG
AAGTGAAGGAACAGTTTGGGGAGTGATGATCAGTAGTTCTGTTTCAGGCATTTTGAATAATATTTTTCAGTGGAATGTAAACGGGCCTGGTGCT
GAAGAGAGAGAAATGGGCTAGAGATAAAGATTTGGAAGTTATCGGATATTGCCAGGACTGGAGGATTTTACCCCCGGATACCCAGGAGCCATGG
CCCCAACCACTGATCCACAGCACAACGTCTATCATCTCACTCAGGCTCTGTTCTCATTCTCTCCAGTGGCCCCAAGTCATATCTTATTATAATT
GTCTCCTGATTCCTTCCCTTCTTTCTCCCTCCTCAATTCACCCCATTCATTATTGCCTGATTAATTTCCCTAAGCCACCATTTTGATCACCTTC
TGTGTTTGCTTAAACACCTTCAGCAGCTCCTAACTCTTTGCAAATAAAATCCCAACTGTCCTATTCAAATTTGTCCTTGAGGCAAATCCCTGTA
CTTTCTCCCCTCCATGCCTGATATTCATGCTGTCACCCATAATTTTGTATACAGTTAAGTTTAATAAACATTTTGGAATAAAGACTAGAAGTCA
CAAATAAGCTCCTGTTGTCCATCAGTTCCATTGTTCTAACTATCACTTCTCATGTTGTAGATGAAGGTGAACCCCTGTTATAACTAAAATATAG
AAATTTCTTGTACTTGTTAGGCACCCAACATATATAGCTACCAAATGCTTCTTAATGGCAAGAAACAAATTTTCCAAGGTTTATTTTTCATTCA
AGACACTCTACACATGCTCCTGGCAAGGCAGTTCTAAGCTCCAGAAGACACTTGCTGCCAAGAACCAAACACAGCTGTTCAGGCAACAGAGGAA
GCTGGTGCTCGGTGAAAAACCAAACCAAAACAAAACCCTGCCCGCACATTTGAGGATGGCACAGGTCCCAGATCTACACCTTGAAACGAATAGA
AGATACAAGATATTTGATATAAAAGAAAATGAAAGTGCCGGAAACAGAAGTTTTCTCTCTCAAACTGACTTCCTCCAACGTGCACAGAGAATAA
CAACAGGACTCCTAAGCATAAAAATAGTGTTTGCTGATCGGAAGAGGCCTACTTCTCCACTGAACCATGGAAAACCTAAAATCCTCCCCATTGT
TTCCTGCCCCATACACTTGTACTCAATAAAGATCTCTAAGAATGATCATGTGGAGACTAAATATTACCCAAAATGGAAAAAATTTAAAAACAAT
CCCGAACTAAGGGGAGAAGTGGCTGCCTGGGAGCATCAGCATGGAAACCAGTGAGCAGCTGTGTTCTTTGTTTCCTCATAGCCATCATCACCTG
AACAGGCAGGAGCATTCGTCACATCTGCCAGCATCATGGGAGTGGCAGCATGAAAGGGAGGACAGAACAGTGGCCCAGCTCCCATGTGGACCAG
GCAGGCAGTTCTCATGCTATCTTATTCATCACTTACAATGTGAAGAAGTTGGCACTATGACTGCTATTTTACATGTTGGAAACTGCGAACCCCC
CATGGGGTAAGGGAATGGCCCAAGCTCATACATCTCGTAAGTAGCAGGTGGTTCAGGCTTGTGTAGCTCCTGAGGCACCAATACTTCCAGTTGC
ATTCAAAAGGGTGCTGTAGGTGTTCTACAAAACAAACAAAGAAAAGGTAAGCATGTTGAGAATACAGTGGGCGAACACAGTTTATTACAAACCT
TTAATGTTCTAACACACATTGTATAGAGTTTCTCTGGTTTCCCTACACTTAATTCACTGCAGAATTTTTGTTTTGCCTGGAACACTTCATGCGA
CCAGTGTTCCCATAAATCATTGCAGGACACCCCTCTGGTCTCATTAGAGTCTTAGGTCTGTTTTATTTTTTTGTCTTGTTTTGTTTTCTTTTTT
GAGACAGGGTCTCACTCTGTTACCCAGGCTGGAGAGCAGTGGCATGGACAGGGCTCTTTGCAGCCCCGATCTACTGGGCTCAAGTGATCCTCCT
GTGTCAGCTCTTCCTAAGCGGGCTGGCACCACTTTTGGAAGAGTCTAGGGAAAGCAAAAGACCATTGGGAAGGATTCTGACAGGATTACCTACA
AAGTATATCCGAACACAGGGAAGGGAAGCCCCAACAAGGAGAAACCTGCACTATTACAATAGCAATGGACAGTTCTTGGAACTTGCATGCCAGT
GGTCTTTGAAGTGCTTTAGTCCTCATAGCCACCTGTAAGATAGAAATCATTCTAACCCCCATTGCAGAGATAAGGGAAATAAAGCAAAGAAAGG
TTAGGTTTTGAATTCAGGTAGTCTGGCTCCTAACACCTGTATTCTATTTGTTCATATTGAAGAGTCTTAAATGGAGCAGAATTCTCCACCAAGT
AGCATAAACAAATAAACTTTTGTTAAGACACTGAGATTTGGAGATTATTGACCAATCTAGTAGATCAAGGAGAGTGCTCAACATCTGATGCAAA
GAGCTTCACAAAATCATAGTATAGTAAGAAGAAATCAATTCCTGCTATTGGCAGCAATGCCAAAGAGCATAACACAACTCTGTATAGTGTTTTA
TTATTTTCAAGGCACTTCATGAGCACGATTTAATTTAGTTCCTGAGAAGGCGATGAGACATCTGTGCTCTCACACCTTATTTCACACCTCCCTT
CACCACAGGGGATTCGTTTAACAGACATTAATTGCTGAAAAAGCAAAAAGACCACATTGAGGTAACTCAGAGAAACAAACTGCAAGAAGCACAC
TACACCACTGGGCTGGAGCAACAAAGGGATGGAGCTGGGATTGTTGAAAACTGGAAGTTTGCAGCAGGGCTCCCATGGAGCTGGAACACAGATC
TTTAATAAGGAAGTGCTGCCTGTCGTCCCTGGTGCCATAGAATTTCATAGGGAAACCTCTGCAGAGCTGGGGCTCAGACTTTTGAGGAGATGTC
ACCTAAGTGGTATTGATACCTCTGAAGGGTACAGTAAGACTGGGTCTGGTTGTGCAGAAAAGAAAAAAAGAAAAAGAAAAAAGCTAAAGACTAG
AACCAATCACTCCTGTCTGAGTAGAGAACCATTACTGCGAAGACCCTGACCTTTGTAGCAGCAAGCAAACAAAAAAGGTCACCTCTTTCCTCTT
ATCTAGACTTTCAGTCTCCCTCTGGTATCACCATTGGCAGAGCCTGACATAAAGTCAGCTGGCAAATGAGAAAGAGAATTTGCTCAGTCCCAGC
CTCAACCTCATGGAATCCATCAGAAAAAAGGTAGATTTGCAGCTCAGAGATGATAGCCTGATAACCAGACAGGCATCAGTACATTTGAAATTTT
TGTTGGTAATGTTTTCAATACCAGTGACTCAAAGCAAATTAAAATGTGACATTGTTTAATATGATATTTTGATCATTTAGTAGTTTCACAAAAC
ATATATATCCGATTTCAGATTGAACTCGAATGTCTCTAAAAACAAAACATAAATTACTACGAACTGACATTTATTGAAAGTGCTACCTTTGTGT
CAAGCACTCTGCCCAGCAGGTTATGTGGGCTATCTCAGTCCTCATTTTACAGATGGGGTAAACCTGAGGCTTAAAGAAGTTAAGCAACTTGCTT
TCAAGCTTCAGAGCAATAGAGACAGAATTTTTATGGGCAGCCTGACGAAGCCTGAGCTGTTAGCCACATCTCAGTACTACCTCCCCATTCCCTT
TACTGCTTACCTGGTGCACCTTTACTATTAGGTGGCTATACCTTGGGAACGAACACAACAATCCCAGACTCTTGCTAGAATCATTTACTTAACT
CCCTGCTGCAGCACCATTTGGTAGCTAAGACTGCATTCTAACATGAAGCATTCAGCTCTTCAGTAACCAAACACATAATAGTGAGGGTCAAAAT
AGACTCTCATCTTCCAGTTGATCTCTAGCAAACAGTCATAGCATCCGGGAATTTCAGGGCTGCATTATAGGCCCTTACCAGATGTCTGAATTCC
CTTCTGTTACAGCTCAATAAACAGTTATCCAGCATCTGTTTGAATACTTTTCATGACTTGTAACACACAACTGTATAAAGCTGCTCTCTGTATA
TTTTTAGACAGCTGAGTTACTAAACACGTCTTACTTGCGGAGAACTGGAATCTATTACTCTACAATTTCCACCTGAAGATTTCTGATTTTGCTT
TCTTGAGCAACACAGAGTGCTTTACCCATGCCTTAAGGCAGCTGTCACATGACTCTTCCCCTAATACGGTTGTGAGCTGCTCACGTGTTTTGGA
GATAGCAAAAGTCTCAAATAATATGGCACAGACGGCCAGCCATGGTGGCTCACACCTGTAATCCCAGCACTCTGAGAGGCCGAGGTGGGCCGAT
CACCTGAGGTCAGGAGTTCAAGACCAGCCTGACCAACATGCTGAAACCCCATCTCTACTAAAAATACAAAAATTAGCCAGGCGTGGTGGCGTGC
GCCTGTAATCCCAGCTATTCAGGAGGCTGAGGTAGCAGGATCGCTTGAACCCAGGAGGTGGAGGTTGCAGTGAGCTGAGATTGTGTCACTGCAC
TCTAGCCTGGGCAATAAGAGCGAAACTCCATCTCCAAAAAAAAAAAAAAGGACAAAGGGTGAGCAGAGCTCAGATTGGTTATTGGAGAAGACAA
TACAGAGGAAGGCTCCTTGGTGGTTAAGAGTAGTCTTTTAAAATCAGACAGATCTGAGTCCAAATCCTAGCTCAATCATTTCTCACTTGTGAAA
ATTCAGTAGCTCTGTCACCTTGGGCAAATTGTTTAGCCAAATGAGAAAGGTAGGACCACCTGACAGTGGTATTGTGAGGATCCTGTCAGCTAAG
GCTGGTAGGTGCTTGCCTTGGCCGTCTACTAGCTGCTCAGGAAATGAGATCTATAGAGTCTATTGGTGAAAGACAAATTTAATTTTGCACATAA
AGTTATGAAAATGTCTCCTTATGGCAGTGGTTATCATCTAAAACTCATACCATCCCACTGAAGAAGACCTATTTTAGGGTTTATAACAGACTAC
TCTCTGGACAACCTTAATCCACTTAAAAAACTAATATATGCATACAGCATTTGCAATCCAAAGAACTGAATTCAAGATATGGCTTCGCCCCTTA
TTCTGTCATCTTGAATAACTGAGCCTTGGTTCTCTTGCTTATAAAATCTACCTATGTAAGTGAACAGGTGGTAATACCCACCATGAAATACTAT
GGAGCAGTTAGAAGCAACAGAGCAATTACAATACGGATCTGGAAAACATAGTTCCAAGTGAAATAAAAAGGTGATTGGCAAAATGAGAAATGTA
ACAATCCCATTTATGTAAAGTCAAAACAACCACAAGCAGAATATAACACCCATGCAAATAACAGACATCCAGTACAGTGTAATGATTGTCTACA
AAAGGAGGAGAATGCAAGTGAGTTGGGAGGTTTAAAGGGGATCAATAAATAAAGACCACAGAAGGGCCTCAGTACATTTAGAAATAAATAACAT
GCAAACAATGATGCTTCCCTACCTTCCTCACGAGGTTACTCTGAGGAGCTAATGAGATTGTGCGTATGAAAACAAAAGTTAATTGACTGTCTTC
ATTATGATCTCCATATTGGACAAATGAACTGAACACAGATAAAAATTCCCCATCACACTTTGGCAGGAAGCTCTTGCCAGGGCAGCACCTGTGA
AGCCCTGGCCTGGCTTCAGAGTCTGCTGGTGAGATGACATCAAAACCCTTCGTGTAGGAGGGTGGCAGTCTCCCTCCCTTCTGGAGACACCACC
AGATGGGCCAGCCAGAGGCAGCAGCAGCCTCTTCCCATGGATCCACCACGAGCGTCCCACTTGAGCCCTCGGAAGAAGAGACCCCGGCAGACGG
GTGCCTTGATGGCCTCCTCTCCTCAAGACATCAAATTTCAAGATTTGGTCGTCTTCATTTTCGAGAAGAAAATGGGAACCACCCGCAGAGCGTT
CCTCATGGAGCTGGCCCGCAGGAAAGGGTTCAGGGTTGAAAATGAGCTCAGGTAGGACAGCATCGATCTTGCTTTGTAAATAAGCAGAGGCTTT
GTGAACAGCTTCTTGGGAACCCAAGGAACCTGTGTTTTCTTCCACATGTGGAAGAGGTGATCTTCCCACTGGGAGAACAGCACATTTGAAATCA
AAGAACAACTAGTTAAGGAAAACGAGATAAGTGGGGACTGAATACAATTATATTGAAACTAGTTGACACCAAAAGATGAGATAAATTTTTTGTT
TTTTGCTTTTCACTCCTATGAGATGTGTTATTTAGGGATGATAAGCAGAACACTAATTGGAAAATTTAATCCTGAACCACTCAATTCTATTCTT
GACCAATTTGAACAAAGTATCACTGGGTTCAACAAAAAAGTTTTGCCTACTTTGATGCAGAAAGATGATTTGGTTCCTTGGTTCTTACCTATAC
ATCTGGGCGTGCTAAGGCAGCTAGCATCTGTGGTGGGCGAGGATGACTAGCCAGCTTACCACAGCCACCCAGATGTGGCCTTGACCACATTTTT
CCAAACAGTGGTCCTAGTGGGGTTCTTAGAAAGAGAGATGCTAGGTAAAGATGTATTCACTGTTAAGACAGCTCTGTCCAGGGATGACAGACAT
CACACTGACTGAGATGTAATCAGACCCCAGGCAAGGAGGCGATAGAAGCATTTGGACCACCTAGATTCGTTCACTCACTAATCCACTCACCTTG
AACAGCAATTATTCTTGTTGTTTTTCTAACTTCTGTGTAAGCTCTTCACTGATCTCAAATACATCAAGAGAAAACAAGCAAAATCCAGAAACAA
ATGGTATTAGAACCTTGACATAAGTGATGGTTCTGGATTAAACTGTTAAGGGGCTTGCAATGAAGGAGTAATGATTTATGCAGTTGACCGCTTT
GACTGTGCAAGAAATAAATTGACCACAAATTTTCAGCCAAAACTATAAAAATTTTATGTGAAAGGACATTTTGATTGTATAAATAGTCTTTGAT
ATTTGAAAATAAAACTGACAAGCATGTCATGCACAAGAAATGTCAGCTTCCAAGTGTTGAGGAGACATATTTCAAAAGTCAGTTTTCAGATATG
TTAATGTTCGCAACACCCTGATTCATATGACATTGACTTTTCATTCATTTTTTGCTAAAATGCCCCATTCAGAAATTCCTGAATTTCCTATGGC
CCTTCTTCCACCTGATTTCTCTTTGCAAGGTCTCCTTTTCTCTCTTGCTGCCTCTTTGTAACCTCCTACAGCCACTCTGAATCTCATTTTCTAA
CATCCTTTCCAAGAAAATCCTAGATTTCATCTAACTGTTAAGCCTGCCTGATATTACAGACTTACATAGAAGGCTAGACTTCGAGAAGACAGGA
AGATTATATAGGTAAAGAAGCCAAAAAAATAGATTTTTTTTTTTTTTTTTTTGAGACAGACTCTTGCTCTGTTGCCCGGGTTGGAGTGCAGTGG
CACAATCTCGGCTCACTGCAACCTCCGCCTCCCAGGTGCAAGTGATTCTCCTGCCTCAGCCTCCCAAGTAGCTGGGACTACGGACACGCGCCAC
CACAATCACCTAATTTTTGTGTTTTTAGTAGAGACGGGGTTTCACTATCTTCACCAGGATGGTCTCTATCTCCTGACTTTGTAATCCGCCTGCC
TTGGCCTCCCAAAGTGCTGGGATTACAGGCATGAGCCACCACGTCTGGCCAAAAATAGATTTTTTGGAAAAGAAATTAAAACCCTTAGCAAATA
TGGAACTGCTTTTCATGGTAAAGAAATTTGACAAGGGTTAGGCAGGAAGGAAAGAACCAGAAGCACCACTTACTGGAAAGCTCTCCATTGAAAC
GTCCAAGCTTCCAGCAAGGACCCGCTGATTTATTATAGACACAGCAATCAATACATACAACGCGGCTGAGGCAGGCACTCAGCGAGATGATGGG
AGGTAAGTTTCTTCTGTTCGCAGGACACCTGAAGAGGCAGCTACATGCCCCAGATGCCTGCTGCCAGGGACCAAGCCCAGCTGCTCAGGCGGCG
GAGGAAGCTCACTGCTGCATGGTGAGCAAACTGCCGCTGTGCATGTGATGATGGCAAAGTTCCCAGGCTCGTAGCTCAGAAGACACATTAAATA
CAAATGTGCTCTATGGCGCAAAAATAAACCACAGGAAGTAGAAGTCCTAGGTCTCAAACGGAATTTCTGTGCATAGATATATAGACTTTAATTG
GATAGAGAAATAAAAATTATTGTAGGGGACAAATCTCTAGATACGAAATTTAGAAACCTCAAATCCTGGCTCTGAGCCTCCCCAGCCATGGGGT
ATGGGACAAGGTCCCCTCTCTCCCGACTGATTTTAATATCCTGATAAATGGCCTATCTGATGTGATCACCAAATGAGATAATGCATGTCAATGT
GCTTTGATAAATTAAAACAGTTAGACAAATGTAAAGTGTAATTATTTTCTTGTGAATTGCTGGATCCATTGACCTTTACAGCAAAACCCTAAGG
AATGGGCTCTCCCTCCACAATATGAACAAGGTCAAATGATATCAACAAATAGAACAAAGACAGGAAAGAAACCCGTCAACATGTTATAACTGGT
TTTTTGGGAGTCGCGGTTGGTAGGGAGAGATTATGGCTGTTTTTATTTTCTGGGTTTTCCAGTTTTTTTTTTTTTTTTTTTTTTTTTTTTTTTC
AGACGGAGTCTCGCTCTGTCCCAGCCTCGAGTGCAGTGGCACGATCTCGGCTCACTGCAACCTCCACCTCCCAGGTTCAAGCGATACTCCTGCC
TAAGCCTCCTGAACAGCTGGGACTACAGGCACGCGTCAGCACGCCCAGATAATCTTTTTTATTTTTAATAGAGTTGGGGTTTCACGATGTTGGC
CAGGATGGTCTCGATCTCTTGACCTCGTGATCCGCCCGCCTTGGCCTCCCAAAATGCTGGGATTACAAGCGTGAGCACCGTGCCTGGCCTCCAA
TATATTTTTTACAATAAGCATATATATATGTATGTGTCTGTGTGTGTGTATATATATATATATATATATATATATAAGCATATATATGTGTGTG
TGTGTGCATATATATATATATATATATTTTTTTTTTTTGAGGCAGGGTCTTGTTCTGTCACGCAGGCTGGAGTGCAGTGGTGCCATCTCGGCTC
ACTGCAACCTCCGTCTCCCAGACTCAACGGATCCTCTCACCTCAGCCTCCCAAGTAGCTGGGACTACACATGCCGGCCATCCCCGGCTAATTTT
TGTAGAGATGGCGTTCCGCCATGTTGCCCAGGCTGGTTTTGGACTCCTAGCTCCTGCCTTCACCTCCCAAAGCATTACACCTCTGAGCCACCGT
GCCCAGGCTACAATAAGCATGTACTTTAAAAATAAAAATAACAAAGAAAGCTGTTTTTTCAGCTCATAGGCAACAGTTTTCATTGTTCCTAACA
CATTCTTTGGCTGTCAGAAGGATTAAATTAGAGAAGAAACCTGATTCCTGCTTTACTTGGGCCTGAACACACAAATTAGAAATGGTGTACCTCA
AAGTGTTGCACTGTCTGGAGCTATTTCATTCTGCAACATGCATGCAACATAATTGGGTGGAGCTTTGCTAACATTTATGCTATATTGCAAAATA
CGTGCCATTCAATGTGCCATAGGAAGCTGGTCTTAAAACGTAGATAAGGGAAAGTATTAAAACCCTTGAGGCATTTTTGCATATTTATGAAAAG
AATACTGAATTTTATTCCATGGCTAACTTCCTAAATTTTAGAGCAATTTGCCACCCGGGTCAAGCTGGAGAAGGATCAGAACCTACTGCTTGTC
ACTTTCTTATTTCATCCTGAGTTCCAATACGTGGAGCTATTTTAAAATTTCATTCTGTTATCAACCCTCCTCCATAAACACATTACTGTCACTC
GAGTCCATGTGAAGAGACCACCAAACAGGCATTGTGTGAGCAACAAGGCTGTTTATTTCACCTGGGTGCAAGCGAGCTGAGTCTGAAAAGAGAG
TCAGCAAAGGGTGGTGGGATTATCATTAGTTCTTACAGGTTTTGGGATAGGCGGTGGAGTTAGGAGCAATGTTTTGTGGGCAGGGGGCGGATCT
CAACAAAGTACATTCTTAAAGGTGGGGAGAATTACAAAGAACCTTCTTAAGGGTGGGGGAGATTACAAAATACATTCGTTAGGGTGAGGCAGAA
ACAAATCACAATGGTGGAATGTCATCAGTTAAGGCTATTTTCACTTCTTTTGTGTATCTTCAGTTGCTTCAGGCCATCTGGATGTATACGTGCA
CGTCACAGGGGATATGATGGCCTGGCCTGGGCTCAGAGGCCTGACAATTAGTTAAGCTTACTCTCTGTGTCTTGACCCAAATCATTGATGCTGA
GGAAGAAAATGCACGACCAGGAAGGTTGGCTCTCCACCTTTGCATCTACCTAGCCGTTTAACACTTGCCAAGTTCCATTGTTCAAGCAGCTTGA
CACCCACCAGAGGATACTGTCATCCTTCCTAGACTTCCATAGTTTATCTACAAGGATGCCACTGGAAGGCATTGTCTTCAGTGAAAGCAAGATG
CAGCATCATGTCATCACCAATAAAGGGCTTTGTTAGTACCTACTCTGTGCAGTATTTGTCAGGTTGTGGAGACACAAAATAGTGGAAGACATGA
GTCCTCCAAACAAGGAGTTTACAGTCAGACAGGAAAGTCAGGAATTGTACCTTTGTCATCACCTGGAATTAAAAAAGTAGCATAGCATATATTC
CAAGTTTGAACAAGTTTTCTTTAAAAAAAAAAAAAAGTTAGCATTTGCCTGCTCATTTTTTACTTTTAGTCTTCTAGTATTATTTTGGTCTAGT
TTTATCTAAACTGCCTGCTTGCCCTTTCCATTCAGTCATTATATAATGTTTGACATGTGGATTCTGTCTCACTCATTATCCCAAAACCATCGCC
TCCAAAAGTCCCTGGCAATCTCATGGTAGTAAAATGCATTATTTTTTTCCACCTGAATGTTGGTAAACACTCTCTCCTTGACTAAACTGTAGCA
TGGCTTCTAGCAGTTAAGGCCATGTCCCTAGGATGGCCCCCTTTAAAATGCCTGCCTGAGAAAGTTCATCACTGCCAGGAGAATGTCCTGTTTA
TTCTACCCAAAGGCAGGCAACAGGGAGCTGGCCCGTGAACCCTCTCTTAAAGCAGTTACTTTAGAAAGTTGCAATGATAAATCCTTTCTCTGTC
CCTTTGAGATGTAAATCTTCTAACCATCCAGAACTGTCTTCCAAGGATCTGAAAAAAGCAACCCTTCAAAGAGGTAACTCCGACTTTCAGATTC
TGTGGGAGGGAGGGCCTAACTTCAGACGACCTTCCTCTAATTTACACCACAAAAGTTTGCTTCTCCTCCAGGAAAGCTCCAATTAACAAACCCA
GATGGCCTAGTCACACCCACCAACCCCCCTACTACCCCTCAGCGGCACACCCTTCCCCTAGCAGCACATCCCAGTTTTTTAAAAGTCTCATGCC
TTTTGTTCCCATAAACACTGGGGCCTCTTTCCTATTGCCATCATTATGACTGAATATAACCATCCTTCCCACTTTAACTAGTGTCCAGCTTTGT
TAATCTTTGGCAATGTTCTATTCTACACTTCAAATTTATGGTGTCTGAAATCAAAATATTCAAAGTCATTGTTTGCAAAATAAACAGAACATCA
GTCGAACCACGTCAGTTTCCTGCTCTAGAAAATAAAAGTTGAACTGGCCACTCTCCAGGCCAGCCCCAGAATCCAAACACAGATTCCCTGGTTT
TCTTTACAGTTTTTCTTGCTCTTTCCCTACCACCTTGAGTGCCTTCTCCCTTTACCTCTCTGCTTCCCAGACCTTAGACTCCTGAAAGCCCCCA
GAGAGAAGCTTTCCTCCCTAGAATGCTGGTGGGAGTCACTGCCTAGGGTGGGCTCCCAGCTTTTCCTTTTGATGAGCAAAGGCTCTTAATCTCA
TCCAATTACCCCTCTCTGACTCCACAAGCCACGTGTAGACCTCAGCTACAGACTTACACAATTTTCTTTCACATAGGAGGCCTCAAGAAATATT
TGCTCAGAGAATGATTTATCTGCTGAATATAAAACCAGCCCAAGCAACTTGTGTTTACCAAGAGTAATTTTTGTAATGAATTTTTTTTCTGCAA
TGCATGAGTATTAATTTTGTAATCAGCAACATAATAAATATTTTATTTTTATAAATTCAAGAGCATGAGCATGAGATATAAGCTTTTTTCTTGC
TCTGATCCAAATTACTTTGTATTTCAAAATTTGCGGCTTTAAATTAACAAAAAATTTCTTAATCCCATTTAAGGTGGGCCAAAAAAAATCGAGG
CAAGATCGTCTCAGTCATAAGTACAGCAGGGCTGGAGACAGAAACCTGTCCTTAGTGGTGCTACGTGCTAGTAAGACTTTCCAATAAAACCAAA
CAAAACTGCATGATCTTTCTGTTCCAAGGATACTGAAACAGATCAGTTGCTAAGTGAAATTGGTAGAAGGGTTTTTAAACTGTAAACAGGTCAG
TTTAACTGTAAATGACTATTTAAGTCACTGTTTACAAAATAAGTCCTATATCAGATGGGAAGAATCAGGAATCACCTCTCCCTGGGAACAAGAC
AGCAGCTGACCATCCATGAGGATCCAGAAAGTCAGACAGAGGGTGGGAAGGAGTCTATACCCAGGCAAATAAAAATAGCTGCCACTTTCCTCCT
GGAGGGTTTTTCTAATTATACTTCATGAGAGGCAGGATCAACTAGGAAAAGAAAGACAGGAAGAACAGGGAAATTATTGCCTGAGGGAAAAAAT
GCAGAACTGAAGTCTGTGAGTTAATTCCATAACCCAGGGCTTTTCAGACATCTGAGTGCCACAGTCACGATTCTTGTAATATCTTTTACCACAT
CTTTTATTATAATATATACGTAATCTGTTTATTTTGTTTGTTTATTTGTTTGGGGGGAGACAGGGCCTTGCTCTATCACCCAGGCTGGAGTGCA
GTGGCACGATCTCAGCTCACTACAATCTCCACCTCCTGGGTTCAAGCGATTCTCGTGCCTCACCCTCCCGAGTGGCTGGGATTACAGGCACGTG
CCACCACACCCAGCTAATTTTTGTATTTTTAGTAGAGACGGGGTTTCACCATGTTAGCCAGGCTGATCTTGAACTCTTGACCTCAAGTGATTCG
CCCACCTCGGCCTCCCACAGTGCTCGGATTATAGGCATAACCCACCACACCTCGCCAGTGTGTTTCTTTTAATTGTCCCTAAACTGACTCATTT
AAAATAAAATTAGCCTTGTTCTAAGGAATAATATCCATAAAACCTATGATCTGAGATGCATAATTTAAAATACAGATATAAATAAACACATAAG
CCTTTTAAATGTTCAATTGTGTACCTCCTAAAATTATGTCACGTACCTGCAGAGAAACGAGTACCATGTTGGAAAACACAGCTGTCATTGAGGC
CAAAGGCTCGAGTCGGAGTCAAATCTAGGCTGGGGCAGTTCAATAGAAAAGATCTTTCTCTACAGTGGTGTTTCTCAAAGTGGAGTTCTTCGGC
TGTGGGGTGGTTTTAAAACATAGGTCCTCCTGTGGAGAGGGAGGGGCAATTTCCCCGTCCTTTGCATCTGAGAGTGCTGGTGACTGATTCAACC
AGTAAGGTACAGTGGAAATGAGACTGTGTGACTTTCCCTGGGACACAATCTCTGCGACCCCAGAGCCTCATGTAAGACATTGGCGCCTCCTCTT
AGACCACATAAAGTTGCTTGGGTCCCCAGTCCCTAGTTGCACTGACCCCACCTTTCCAGCCATCCTCACCAAGCTGGCAGAATGTAGAACCACG
GGGAACATCACCACCTCAGCAGAAGAATACAGGGCAGAGAGATCACCCAGCCAAGCCTGCCTGAAGTGCTGACCCACGAAATTGTGAGATATAA
TAAAATAGTTGCCTTTTTAACTCATTACATTTTGGGATCACTGGTTATGCAACAGTAGATAACCAAAACACACTGACTATATCACAATCACCAA
TGGAGCTTGTCAAAATGCATATTCCTGGGCCTCAGGTGCAATTCTCCAGGAATTCTGAAGTCTCATAATGGGACCCAGTAATCTGAATTTTAAC
CTAGCTTCCTGGATGTCTCTGGTAGACACTAGAGTTTGAGAGACATTCCTTTAGAGCTATTCATTCATTCATTCATCTATCCAGTCTACCGTCA
TCTTTTTACCATTACTATAAATCTGGCCATGTGCTGGGCTCCAGGCATAACCCAGAGACCATGCCACTGTCCCTGCTCTCAGGGACACCAAGGA
CCAAGCTGGGCACCTGACAGTCAAGCACTAGTTGAAGGAGGAGACCCTGAATCTTCTTCCCTGTAGCAGACTGAGGTACCAATGCCAGTTCTCT
CAGAATTGCTATAATTTGTTCAAGACCTCCCAAACTTACTCCAAACCACTAACAATCCGTCATGGCCAAGAAATTAGGAGAAGATTGAATTCAC
TGATATTTTGGAAATAGCCATCTCAGCAGAACCTTGGGATCTCTGAGGTTGAGCTTCCCTCCCGGACGGTTTCTGTCACCTTTTATTATAAGAA
GCAAGCCAAGGTCTCTGTGGGCAAGGCAGAAACAACTTCAGCCTCAATCACAGATTCATTTGCCCTTGAAAATGACATTCATGTATATTTTCCC
CCAAGTAGAAAAGTGACCATAGATAGTTCATTACAGAAAATGAGAAAATAAAGAAAAACATTTCAAACACACAAACAAAGCTCCCCTCAGGCAT
CTAACCACAGTCTAGCAGAACGTTAAGAGGTTGCTTGAGTCAGGCACACCTGGGTTTCAACCTCGCCTTCATGTAAGCTCCCCCAGGCTTGGTT
TTCTCCTCTGTGATTACATTGCCTACTGTGCTAGGCTGTTGTGACGATTAACTAAGAATATGTGCACATGTGTGTATGTCATTATCATTATCTT
TGCTAATAGTCACAAGTATTTCTTTCTAGTCTGATTCCCTTTATATGCCAGTATTTATTGTTGGTTACTTAATAGTGCCTTGAGCCCCATCCCA
TCTGTACTCCCCAGCATTCTAATGTCCCCATCAGAGGCAGGGCTGTGTCCAGAGGAATCCTAGGTGGAGAGATGGTGGCGATGGAGCAGCAGGG
TAGGAGTGGATGGTGACAGGCCAGAATTTCCACGATCACTCCAGCGCTCCCCCTTGACACGTCCATCTCCCTCAGAGGTTTAGGGAAAACCCAG
AGCCCAGAGAGCCTGACAGCCTCCCTGTGGCTGCTCCGTCTTGATGTGTGGCTATGGCAACTGTTCTTTCAAGTTTTCTGGGGCAGTTCTACAT
GTCCTGTAGTCTAGTTTAGTCCATATAATATTGTACATAAAATAGCAAAACACAAATTCTATGTGGCAGCAGCAAGGCAATACGTTTACTGCTG
TTATATAGGAGGTCCTATTCCATCTGTATTTCTGCCCTTGGGAGGAAATCCATTTTCTTATTATTATGATACCCATCCAGATGTTACTCCCTCT
GCAACAAGAGGAAGTGAGCAGCTCCCTCCTTTTCCAAAGAACACAAAGTCATGGATGGCCAAGCACATAGACTTTGATGAGAACAGCCATAGGA
TCAAATCCCTGCTCCACCTACTAATTATTCGCTGGGTGAAATTTTTAACATTTCCAAGGCTATCTCTTCCCTTTTTTTTTTTTTTTTTTTTTTT
TTTTGAGATGGAGTTTCGCTCTGTCGCCCAGGCTGGAGTGTAGTGGCACAATCTCAACTCACTGCAACCTCCGCCTCCCAGGTTCAAGTGATTC
TTCTGCCTCAGCCTCCCGAGTAGCTGGGACTACAGGCGCGTTCCACCACGCCCAGCTAATTTTTTGTATTTTTAGTAGAGACAGGGTTTCACCG
TGTTAGCCAGGATGGTCTTGATCTCCTGACCTCATGATCTGCCCCCCTCAGCCTCCCAAAGTGCTGGGATTACAGGCATGAGCCACCGCGCCCA
GCCTCTCTTCCCATTTTTAGATGGGGATGATCATATCTATCTCATGCCATTATTGATAATTAAATGAAGTGATGTATAAAGTGTGCCTACCAGA
CTGTCTAGCATATAGTAATATTCTAATATTGTTAACATTTCCAGTATTCGAGTCTTCAGAGCAGAGAGAAAACCACTGTACCAGCAAATAGACA
AACAGCTGCCACAAGATAGTGATAACAAAGTATCAGCAGAGCACACTAGAGGCCATCGGTCTCCTTAGTAATACTGCTCGGTAAGGGCTCGGAG
CTGAAAGTCAACAACACACAGAGACTGTCAATTGCCTGTGAGGGGCTGATGGCAACCCCCACACGAGGAAGCACATCACAGCCCAGATCTAGCT
CGCCACATGCAGAGGATCAGCCGAACTCAGGCAACACAAGACGATGGGAAATACAGTCTGGGCCACAACACAGATTCTCTCAACAAAATTTCTT
AAATTATTTGTGGCAAAGGACCAGTTTTCAAAAAATGTGTTGAAGACCAATGCTTCTTTTTTTTTTTTTTAAGCCACAATAAAACTATTTTGGT
GATGTCAAATTACAATTAAAGTTTCTAAATGCTGACTTACAATTTCTGAACTTACCTTGTTGGGAACTAGTGGCAACCAATACTGAGCTCTGAG
TAGCATTGGCTTAAGAGGTTTTGTTTGACTTTTTGGTTTTTGTGTGTGCTTAAGATTATTATTGCTCTTTTGTTTTGTTTGCTAGTTGCTTATT
GAACAGGAAGTGGGAGTTTAAATCAGAGCCTTCCTTCATATGACGTACAGCCTGTCATCCACAAATTTGTTTGTATTAATTAAGAAATGCATAT
GGTTCTCACCCAACAATGTGAGCGCAGACATTCTCACACTCTCTCAGAGAATCCCAGGAGAAGAGCCAGTAGCGGGAGTGGTAAGAGTCTAGGT
GGTTAGGGGTCCCAGGGTTCCTCTTTAACATACCCTTCTCCCTCTCAGGGTTAGGTAAAACTCTATTTATTGTAATAATATTATAATAAATAAT
AATGTATCATAAGTATAATAATATAATAATAATTTTTCCCTCCAAAAGGCAGAAATATAGATGGAAAATATAGATGGAATAACACTTCCTATTA
ATCCTTGATCCAAAGAATCCTTCAGGAATTTTATTATAAATAAATTTTGAAATAATATGGATCTACAATAGGGAAGTGGTTATCCATCTTCCTT
TAATTCTTGTAGAATGTTGCTTTGCCATGACTTATTTCTGTTTAGGCACATCCTGCCATCCAGATGGTCTCAGCTCTGACCCCAGCCCACACCT
CTCTCTCAGCACCAACCTCAGATCCCAACTGTCAACCAGATATTTTAATTTGGATCTCCTGCTGTCCTTCAAATGCGGCATGCCTGAAATAAAC
TTCAGTTCCACCGCTCCACCCCTTCCCCCAAAGAGACGCAACTTCCTAAATCTGATTTCTACCAAAAGTGCCATTACTTTACTCTGATTAATAT
GCTGGAGTAATATTTGACTCCCTCCCTGAATTCATCTTTCATAGGTGAGCTGATGCAGATGTCTACCATATTTCTCCTCTGCTTTTCTGTGCCA
GACTGGGTTAAAATCATCTCACACTTACACAATCATTTCATCTTCCTAAGTAGTTCCGCAACCCTCCCTACCCCATTACGCTCCCCTCCAAATC
ACTGTATGTACCAGACTCGTCTTTTAAAATAACACTGTAGTGCTATCAATGTTCTGCTCACAAAAGCCTTCACTGGCTCCACAACCCCAGAAAA
TAAGATCAAACCTCCTCAACAGGCTTCTAAGACCTTCTAGAATGTAGTTGTCCCTACGAATTCAGCCACATCTACAATTACTTCCCAATATAAA
CTCTCCACTCCACCCAGGCCATTCTCCTCCCTGTCCTTCTGGCCCCTGACCCTTTTCTTCCAGGACGAACCCTAAGTTCTGCCTTTTAGGTGTG
TCATTCAGGACTAGACACAGTCCCAGCTCTGCCACCAACCAGCTGCCTCTCCCAGCTTACACCATGTTTTTTTCCTTCTCTGAACATGGCAGAT
CTTCATCCCTCATGTCTTGTCATAATTCACATCATAAGCCATCTGTTTCATGTAACATACTAGTGTCTAGTAACTTCCTTTTTCTTCTTTGCTA
CCCAACCTCCTCCTACTACCATCACCGCCACCACTATCACAAGGAATCTAGGGTTGTGCATATAATAGCAAATTTAAAAATACCTCATGAATCA
GATTCTATCAAAAAAAGAAGATGGAGAAAGAGGAAATCAAGGAAACAAAATAGGAGGAGAAAGAGAAAATATTGCTATGTTTTCTCTTCGATGC
TTGGGTATGCTGTGTGCTCATGCTATTGCTCAGATTTATAGACTATTTGAACTGAAAGGATCTTAAAAATCACTGGGTCCAATAATATAATGCT
GAATGTGAAGACTTATTAAAAACTAGAAATAACATATCTGGCCCAGAAAAAACAATAAAAGAAAGATGAGTATCATTTACCAGCTGTGTGACTT
TTAGAATGTCACTTGACCTCTCTGTTCCTCAGTTTCCTCATTTTTGAAGTGTGAATGATGTAACACTTATTGAGGAGCTAAATGAGATGATGTA
GGTAAAGCACATGGCCAATGCCTTAAACATGGTAAGTGCTTAGTACCTGTTAAGAAAAAGATCCCTGTCCATGCTTCGAAAACATGTAAATCAA
AATTTCTTGAAGGCTGGTTATAAATAATTAATTTATTGTTAATAATAAACTGTGAGATCATTTAATGGGGTGTTTCTATGGTCTGAATATTTGT
GTCACCCCAAAATTCATAAATTGAAACCTAATCCCCAAAGCGATGATATTAGAAGGTGGGGCCTTTGGGAGGTGAGTAGGTTATGAGGGCTCCA
CCTAGTGAATGAGAAATTAATGTCCTTAAAAAAGAGGCCCGAGAGAGCTGCCTTCCCCTTCTGCTATGTGAGGACACACAGTGGGTGCCATCTA
TGAAGAATGGGCCTTCACTGGACACCATATCTGCCGACCCCTTGATCATGGGCTTTCCAGCCTCCAGAACTGTGAGCAATAAGTTTCTGTTGTT
TATAAATTACTCAGTCTAAGGTATTTTGTTATAGCAGCCTAAATGGATTAAGACAGTTGCTTAATCCATGTAAGCATAGCTACATCTCTACCTA
TTTCTATGTCTACTTTGGATCATAATATAAAACGTATTTCTAACTGTGGGTCACTGTCAAACAAGTTTGAAGGCCATTGGATTATTAAAGTCCT
CCACTAGTAAAAATGGAGCAGCATGCCAAAACCTCATGTGGAATGCTAGGTGCTACTTTAAGAGCAGTTTTACCTTCCATCTTTTCTGGACCTT
GGTTTTCCATCAACGCCTCAGTCCTGCTAATGTTGTCTTTATTGTTCGTGCATCTGACATGTAACCCGGACCACTGTTGCCATACTAATTAATG
TAGAGAGAATTCCCTTGCATGGAGCCCTAAATTCTCCACACCTATGGTTAGGTCTAGCATGTGTCTTTCTCCATCAGATGGAATGCTCAGAAAC
CTTGAGGAAAGAGGAGAGCTTCTGATTTTGAAAGATGTTTCAGCTGGTAACTCTGTCTTGCATTTTGCAGTCATTCTGTCACCCACATCGTAGC
AGAGAACAACTCGGGTTCGGATGTTCTGGAGTGGCTTCAAGCACAGAAAGTACAAGTCAGCTCACAACCAGAGCTCCTCGATGTCTCCTGGCTG
ATCGAATGCATAAGAGCAGGGAAACCGGTGGAAATGACAGGAAAACACCAGCTTGTTGTAAGTGTCATGGGTGTGATTTTCACTGTTCTTTGCT
TGATGGTTAAGAACATAGGCTTAGGATCAACGGAGCTGGGGTAAACCCTAAATTCTCTGCTTACTACCTGTGTGACCTTCGGCAAGTCACTTAG
CTTTACTGAGCTTCAGTCTCTTCCTTTATAATATGACATAACGATAATGCCAGCCTCACAAAATGGTCATGAAGATTAGAACAACACACATGTA
AAGCGCTGAACACAATGTCTTGACTATAGCAGGCATCTAACGAGTGGTCCCTATTTTCCCGAACACATTTATACACAAATCTTTCAAAATATTT
AAGCCTTGATATTCTAGCAGCCAGAAAAGCAGGAGATTCCTTTTTTTCTCTCACTGTGATCATTCAGAAAACAAAACAAAACAAAACAAACAAA
ACAAAAAGTTAAGCTCTCAATTCCAAATATTTGAGCAATTGTGCTAAAATCTTTGGGAAGAGGGCTTGGACCATAACTACAGAAGTTCATAGAA
AACGAAGATGATATTTAATTGATAGGTCTTTTCATTTTTTTTTCTGATTTCAAAAATAATACGTGTTGATAATAGCAAGTTCAAATATTAGAGA
TGTATATAACATAAATTTTGAGTCTCCTATAATTTTATCCTCCAACTACAGACAACTACTTCCAAATTTTTTCCGTACATATCTGTTATTACTA
TTAATTTTTATTGAAAATGGATGCTTATGCATTTGTTTAGGTGAGAAGAGACTATTCAGATAGCACCAACCCAGGCCCCCCGAAGACTCCACCA
ATTGCTGTACAAAAGATCTCCCAGTATGCGTGTCAGAGAAGAACCACTTTAAACAACTGTAACCAGATATTCACGGTAACGGGACTTTACATCA
ACACCCAGGGCAAACGAAGGGCTTGCAGCTTCTTTCTGTGGACCGCAAATTAAATTATAAATTTTTCTGAAAACCTGGGAAAGTTTTCCTCCCA
CCTACCTGCACCCCTACCCTGATCTCTGATCCTTCTATCCTTCTTCTTTCTATCGAGACTGGGTCTCCTTCCTTCCTGGAAATAGACAAATACA
TTTAGGTTATATTCTTTAGAGACAGCGGATTACTATTTACAGATAGTTGTCATTAATGGGCGCAACACTTGTCAAAAGCAAATATTCTGAAAAA
ACAAATACTGGAATTAGTCCAAAACATAGTAAGAGCAAATTACATAGAAATGGTAACAATACATCAACAGCTTTTGCTGGGAAACCAAAAAATT
GAGCAAACCTAGATTCCAGCCTTTCTGATATTCACTAGTTTGGGCAAGTCAATTTCTCTCTCTGAGCCTGTCTCCTCATCTATTCAAAAAGAAA
TTGGATGGATCATATCTAAAGCTCCACTCAGCCCTCAGATTGGTAATTGTGTTTTGAATGGCCCTAAAACCCACAACTGCTTGTCTGCTAGCCT
AGAGTCAGTGGTTAGCTGGATGAAACATGTAGTAGTAGATCAATCCAGAGCTTCTCATTTCTAGACTTCCAGCTCCATGTCTGTGTTGGAAAGA
CTAGGAAATTGTAGCTACTGGATATGCTGAGCATGAGATCACACAGCTACAGCTGCTTCCTCCCCTGCTAGAAATACAAACGTGCCCTACCTTA
AATAATCCTGGCTCTGGGTCTGTGTGACCTACGACTACACTCATTCATTCAACAAGCCTGTGTTAAGTGCTGTGTTTCATGGGGCTGCTCAGTG
ATCAAGGCAGAATTCTAGCCACAGGCTAGTGGGAAGATAGTACAGAAGCAGGGATTATGCTGAGTCATGACTAGCAAGATGCTGTGAGCACCAA
AGCATTTTTTAGTTAAATCATCTGTGAATGTTTAATAGCAGTGTACTCCAAGTTTCCGCATAATGCACTCTGGTACCTGTCTTTTCAATTCAAC
TCTACTCCATGACACCAGAGAGGCATACAAGGGTATGGGAGACCCCATCCTGACCTAGAAGGAAACACGCAAGTGGTATTCCAATATTTAAAGG
AGAGCAAGAGCCGTTTGTGAGTGACCACTGGCTCAGGGGCTTGGAAGCAAATCTCCTGCTTATCTGGTTTTATCCTGCAGCATGCCTTTGATAT
ACTGGCTGAAAACTGTGAGTTTAGAGAAAATGAAGACTCCTGTGTGACATTTATGAGAGCAGCTTCTGTATTGAAATCTCTGCCATTCACAATC
ATCAGTATGAAGGACACAGAAGGAATTCCCTGCCTGGGGTCCAAGGTGAAGGGTATCATAGAGGTAAGGGTGAAATGGGATTTGTCCCACTTCC
CAATAGGTAGGTGGGAACGGGGGAGAGAGGGATGTAGCTAACAGATTTTCCTGTCAACTATGTAGATGTGGTGTACATCACAAATTTTCCTTTA
TACATATTCCTCTCTCTCTCCTCTGTCTCTCTCTCTCTCTCTCTCTGTTTATTTTTATACACATACACACACACATACACATATATATATGTTA
GGGGTTGTGAATATCCTACTCACATGGCACCAAAATACGTTAGTGGTCGCAGGTGTCAGAGTTACCGATAGTGAATCCGTTCGGGTCTGCAGCA
ACCCCAATTATTGCTTCCGCAGAAGAAAGAATTCGACTGGGGGGCATAAGGCAGAAAAAGAGACTGAGGCAAGTTTCAGAGCAGGAGTGGAAGT
TTATTAAAAAGCTTTAGAGCAGGAAAGAAAGGAAAGTACACTTGGAAGAGACCCAAGTGGGCAACTTGGAGGACAAGTGCAGCGTTTGACCTTT
TGACTTGCGGTATATGTTGGCATACTTCTGGGGTCCTGCGTCACTTTTCCCATGATTCTTCCCTTAGGGTGAGCCACCCGCATGCACAGTGCCC
TCCTTGTCCTTGCGAGGCGAGCATGTGCAGTGTGTCTACTGGAGTTGTATGCATGCTCACCTGAGGCATTCTTCCCTTTTCCGGTGGAATGCTC
CGGAAAGTCATACTCTGCCATTTTGTCTCTTAATGTGCATGCTCATGCCCACTCGCCCAATTCCTGAGATTTTAATGGAAGCTGCTGATTACCA
ATTTCAAGTGTTTTTATCTATTGGGAAATTCCCTCTCCCTGGCGCCAGTTGTGACTAATCATTTTATAGGGTGACAACTGCCAGACCATCACGG
AATTGCCTCTCTCTAGCACTGGCTGCAACCAATTATCATTTTAGAGAGACAGTGTGATAACTCCTGGACCATCACCTGATGGTCGCCTGACATT
CCTGGTTTGGAGGGGGGAGCCCTCTCCTGCCCTGCTCATGCCTGACTAGCTACCTACTCTAACATATAAATAGATACAGACGTGTTATTTATAA
TCCATACCCTAATATTATCACAGCTGGAGCTACATGGAACCAGCTAGTAGAAGCAGAACTCTCCCATACTGTTATTAATCACAGTGAAAGACTC
AAGTGGCCTAAATCTTGACAGCAGGGAAATGGTCTGATTTCCCTCAGTTCCACCTGGGGGCGCCACCTTAGAGCAGTGGTGCGTTTGACATGAA
GTGGAGGTGGTTCTACACCTCTCCAGGGAGAGCGCCAGAGGTTGTGCTTATTTACTGAACGGTGTTTAGGGATTCCCCAGCAAAGCAAGTTGGT
CATCTGGTAGTAAGTTTCTGTATAGTCAAGTGCAAGGTATATTATTCAAGGACAATTATCCCAACTCTACTCAGAGGAAGGGGGCTCTGAGCTA
GACATCACAAGGGCTTGAATGTAGATTGGCTTTTTGGTGGGTCCAAAATTAACCTTGTCAATGGAAAAGTCTTCTTATTTCAGTAAGGTCATAT
TCATTGAAGAGAAAATTATCACCAATATTTGGACATACATTTTTCAGTGAATATTTTGGTTTGGGATTCTGTAGATCTGGATCCTAACCATTTG
TATCTTTGTTCCTAAGGATCGTAAAGGGGTCCTTGGATATATGATGAGCTAGCATTTTCAAGATTGTAGGGAAATGTCTTGTTTTCTCCAGATC
AATTAGGGAAATACCCCTGCATGTGATGCATGCACATTTCATGAGAAACCAAACTACTAGGTCCATGAATTTGAGAGTCTTAGACAGTAATTGT
CCAACATCACTAATTTAAAATATTTTTCAACTGTCCATTAGGAGATTATTGAAGATGGAGAAAGTTCTGAAGTTAAAGCTGTGTTAAATGATGA
ACGATATCAATCCTTCAAAGTAAGTGATTTTACATATATTTATTGAAAATGGTTTTTCAGTTAATCTTATTACTTATTCTGGCTGGTTGTATTA
GTCAGCTTGGGCTGCAATAACAAAATACAGAGATGGCGTGGCTTAAACAACAGAAATTTATTTTCTCACCATTCTGGATCAAGATGTCAGCAGG
GTCAGTTTCTGCTGAGGGTTCTCTTTCTGGCTTCTTCCTGTGTCCTCACATGCTCCCCTGCTCACATGGTGAGAGAGAGACAGAGAGAACAAGC
AATCTTTCTGGTGTCACAAAGACACTAATCCTGCCCCGGGCACCATAGCTCATGCCTGTAATCCAAGCACTTTGGGAGGCCAAGGCGGGTGCAC
TTGAAGCCAGGAATTCGACCAGCTTGGCCAAGATGGTGAAACCCCATCATTTTACAAAAATACAAAAATTAGGTGTGGTGAGGCATGCCTGTAA
TTCCAGCTACTTGGGACATTGAGACATGAGAATCACTTGAGTCTCGGAGGCAGAGGTTGCAGTGAGCTGAGATCACGCCACTGTACTCCAGCCT
GGGTGATAGAGTGAGACTGTCTCAAAAACAAGACAAACAAAAAGACACTAATCCCATCATGAGAGCCCCACTCTCATGACCTCAAAGGCCCTGT
CTTAAATACGGTCATACTGGGGATTAGGACTTCAACATACAAATGGGTTGGGAGGGGGAATTCCGTCCATAGCTTTGGTCTAGGAAGAAAATGC
CTAAATAAATTCAGGTGCCCAGATTATTGCCATGCTGTCGTGATGTACAAATTGCCTTACCCTCCAAGAGTCTGTCACTCATGGGTACAAACAT
CATGGGACATGAGGACCATGGGGGGGTTGGTGGGCACAGGACGGAACTGCTCTTAAAGAGCAGATTTGTGTCTGAAAATCTCCTTACTGCATCT
TCATTTACTTGGAAGCAGGGTTTATTACCTCCCAATTTTCCCTACCTTAGAGTTGCAAGTGGAAGGGACTTCCACCAGTTCCTTCAAAGCAAAA
GTGATGTACAGGCCTAAAATATGGCCATGAGCAGGAGCACAGGCTTGCAGTGTAAACAGACCAGGGTTTAAGTTTGGGCTGTGCCACTTCCCAC
CTGTATGATGGTGGAGAAACTATATAACCTACATGAGCATCTCTTTTCAAAATGTGACGGTACCTATGCAGAGCATGAGTGTCGGTGACAGACC
CAGCAAAAGGGAGAGCCCTATAGAGCTAGCGTATCACTCATGGACAGCACAGGCAGGCCGTCAATTACACTATACCTTAGCCCTGCACAGGTGC
CAGAACCTGCTTGTTACTTCTGTTTCATTTTGTAATGCCACATGTCAAGAAAGGACTCACCTGAAATAAAAAATGCCCTTAAAAATAACCATCA
CCCACCTGCTCGTTATATTCAGGAGAAACTAGGTCAAAGATTTGCTTATACTTTTTCTTCATTCCCTGAGACCTAGAAAGGGTCATGACTCGGA
TGTTATAATGATTATCTTAGAGACTGATGGCATGCCTTTCCCTCCATTTTAGCTCTTTACTTCTGTATTTGGAGTGGGGCTGAAGACTTCTGAG
AAGTGGTTCAGGATGGGTTTCAGAACTCTGAGTAAAGTAAGGTCGGACAAAAGCCTGAAATTTACACGAATGCAGAAAGCAGGTAAATTGTCTC
TCCTAAAAGTCATTCTTGCTATGGGCTCGTCGGGTCCTCCTGGAGCTCTAAGTCACTTACACTGCAACTCCAATCTGGGAGAGCTGGGACACTT
CTTTGATGTCCATTGATGCTTGGATCTAAATCCTAGCTCCAGCAGTTTCCAGCTGTGTGATCTTGAGCAAGTTGGTTAAAACCTTTGAACCTTA
GTTACCTAATCTATGAAAGAGAGATAACATTGATACTTAGCTGAGAAGTCAATCAGTTAATCCAGGCAATGCCTCAGCACTGTGTCTGACACAG
AGCAAAGGCGCCCTCCACTGTGGCTGTTTGTGGTCCTTCACCCAAATGTCAAGCCAGGTTGTGCTGCTGATCTGGTCCTTACTGACTCTTCCGG
ACATTGGGTCCTGGCTGTCTCCCTGGGTAAGAGTTGTGGGTGAAGAGTCAAAGACAGAAGGGTTGGCTGCTAAGAATACTTGAACAGAGTTGTT
GCCTGGCACAAATGTGAAGATGCCCTAGAAACTGTAAAACACCAGGAAAATAGAAGGGAACTGGTGGAAATCTAGGCACAGGGTTGGTATACCC
AACCAGGACTCTTTAGCCTAAGACAAGACCGTGGTGGGACATGAGTGCTGTCATCACCCACCTGAAAGCCTGGCAGGGCCTCTCAGAGGTTGAA
GGTAGCCTGGTCACTTCCATTTATGAGGCTCCCAGTAAGTTTTTTAAAAATGAAGGAATGGCAATACAGTGTGAAAAAAACTGTGTGTTTAAAA
AAATGTTTACTTTTAACAAGCAATAAAAATACAATACAGTTGTGATTCAAAAAGGAGTCACAGCCATAGTCCCTACTCATTTTTTGTAAAGTTG
CTAATCTTTGAAAGATTGCTAATAATACAATGCCACATAGGAAATAAAAGAGTCTAAGAAAAAAAGATCCAGTATTTATATTCCAGGACCCTGA
AAGCACACGTTTAATAAGGATGATTTACACCAGTTCTCAAGATGCCATTCAAAAGAAATTTAAATAAGTATTAAACATAAGTAGCAAGTAAATG
GTTTGGAATGATGAGTAAAGACTCTCAATGCTTAGAGAGAAATTGGGAGGCAATATAGTGTTTCATTTGGATGAAACCCTTATCAAATGACGTC
CAGTGCTCTCAGGATCTAACGGCTTCCAATTCCCTAGCTTTGTAAACTGGATTTTTGTTCTTCCTGTTGAGCTTTTCCAACCCTTTGAATGAAA
CAGCTTTATTCATTTAGTCAATCAGTCATTTCCATCTAACTGTTTAATGCTACCAGTTCTATGCAGAAATCAAGGAATGCCCTCCCATTATACT
TATACCCCCACAAGTAGTTATAGGCACCCCTTGGAGCAGCACTACAATGAATGGAATTGCCAATGGGAATAGCTTAGAATACTGTGAAGGGTAA
GCTAATTGAACATATTCAAAGGACACTTCATGGTCAGATGCATAACCTGATCCAGTTTTACTCATATTTGCACTTGATTGCAGTTCCCTGAGGC
TTGAGCGTGCACATGCCACGTTTGCCTTGAAAACTCAGTTTATGAACTATAGCAGCACATATTTAACCTTATACTGTGTGATAAGTTTCCTGTA
ATAAGTTAGTCGCCTTGCCATACCAAAAAGGAAAGCCAATTAAATTACTTTCATGGATGTCAACAAATCATCATAGTCTTACATGTTCATTCCT
GATAGCTGCACATCTTCTTAAAGAAATAGTTGTGAATCCTGACTTTTGGATCGTGTATATCACTGCATAAGCACAGGTGTTTGTGGTTACCCAG
TGAGTTGTACTTTGAATATTAGTCATGATGACAGTTTCTGTATTACAGCCTAATAGAGCATTGCTTCTTAGATCAAACTCCTCATGCTCACAAA
AATGGCCATGTTGCAATAATTTTTAGAAATGTGGCTTTTTAATAAAAATAAAAAATAAGTATCATATTGAAATAAAGAAAGTAGTGTTCCACAA
GTCGCGTGCTTTGGTATTGGACACAGTTTATAGGTGTATTCATATGAATACCATTTTCTCTTCGTCTTGCCAGCATCTTTCCGTGACTGTCCCC
ATTAGAGATAACATGGGAAATTTGGCAGGGTGTGCAAGCCAAATGGCCACCCTGCTGCCTCCCTTCCACAATCCCAGGGTGAGAAACAAGGACC
AATAGATTTACTCTTGTCATTTCAGAGGGCCAGTGGCAGGTGAAATCGCAAAGAAGTAGACTTAGGCTTTTCAAAAGAAAGAACTGGCACAACA
GAGTTTACAATTAGGAAACAGGCTCCTCTGGAGCTATCAGAGTTCCCCATTATTAGAGTCAAGCAAAGTTTGAATGGCCCCCTCTTGGAGACCC
TAGATAGGAGAGCAGCGATGCTGAAGCATGATTTGATGTCCCTCAGGCTCTATGGATCTAATCACCAGGCTCATCTCCTCACCAATACTTCACC
CCAATCCTTGGAGATAAGCCTCCCTTCTCCTTTCCTCTTTCTTTCCAAATCTCCCTCCACACTGCTCTGTGGGAACCACCAAGTTAGCTTTTCA
TCATAACAACTCTGAACTTTCATTAATTCATGCTGGTCAGGCAAAGAAGCAACAAGCTAAACCACCTAAGATATTTCCTGCCTTGCTTCAGACA
CACATCTACTCTGCTCCTATTCTTGACTTTAATTTTTTAATGGATCCATCACCTTCCAACTCTAAATCTCCTCATCCCAAATCTTTATGCGTTA
CCTTTTAAAAAACAGTAGGACACAGCCTATTGATCAAGAAGGCTGGTTCTTCAGTAGGAAGTCAGATCTGAACAGTTTGGATTCCAGAGGGATG
TGAAATATTGTCTCCTTCTCAGGAAATTGTAAGCCTCTAGGTTAGAAAGCAAAGAACCACTGTTACCCTGAAAAATTCACAACCAGGAGAACCA
CATCGACTATTCTGTCTCTGTGGGAATGGAGTTTGCTGTTGATGCCTCTAGTCATGTTAGCTCTATCGTGGGGACAGAATCCCCTTCTACTCAG
GGCTGGTTGTTTCACACACGTGTCACTCTCTCCATTGACCTGTCAAATGGCCTCTCAGGATTTCTGTATTATGAAGACCTTGTCAGCTGTGTGA
CCAGGGCAGAAGCAGAGGCCGTCAGTGTGCTGGTTAAAGAGGCTGTCTGGGCATTTCTTCCGGATGCTTTCGTCACCATGACAGGAGGGTTCCG
GAGGTAAATAACTTGGGTCGCTTTGCCTCCTCTGCCCGAATACTTCAGTGGCTCCCTGACTTGGACAGGCATCTGAAACGGCACAAAAGGCTGT
GATCTGGTGCCAGCTTCTTTCTACAGCTTTATCTCCTGCCTCTCACATTTCATTTCAGCAACCCCAAATGGCTTGTCATCCCCTGCACATTCAG
AGCTGTTTCTTCCCTGTTCCTTTGCTTACTCAGACTTTTCTGCTTTGACTGCCATTCCTCAAATTGTCGCTTGGCTGACTTCCCCTCATTCTTT
AACACTCAATTTAGATGGCACCTTCTCCAGAAAGCCTTCCTTGACTCCCTCTTTCTCCATGCTGGATTAGTGCCCCTCTTCCATGCTCCCTGAG
TACCTGCAAAGCCCTTGATCCACATAGTTACAGTGATTTGTTCCTGTGTGTGGTTTCTCCACTAAGTTTGTAGAGCTTAGTTCTCAGCAAGACT
AGTTCATGATGCCTAGCACAAAGTAGGTGCTCAAGAAATCTTGGTTGAGTCAATAAATGACTGACTGAATGAATTCATGAATGAGTGAACGCTT
CACAAGGATGTATGTTGTTGTTGGATATTGAGGCCTGCATTTCAGAAAGGGATTTCTTTCCTCCCACAGCCTCCTCTACCTCTTTCTCCAGCCC
TCTCACCTGGTGGCTTTTGGCCATCCTAACAAAATAGGTTTGGGGCAAGGAAGAAAGTAAGAGAAGATCAAATCTAAGATAATGCCTTTACTCC
ATGTCATAATTCCAAGAGCGCTACCTTGTATTATGTGAATACAATTCTTAGTTTGCTTGTTGTCATCCTTGTCTCCATCTGTGTATCTGTGGGT
GCATGTAGGTTTGTGTGAGTGTGTAGAATAAATAATTTTTTTGTTATTTTTTGCCTTGATATACATAATCAGATACATGCTATGTATGACTTTT
TCTGTGTCATAAATTTATTTTGTAAGGAACAGCGATGTGTAACCAAGGATATTTTGTTTCTTAAAAAAAAGTCAAGAACCTTCTATGTTGCAAA
TCTTAAGCATAGGGCATAGAAACAAAGGTGATTTTTTAAAAATGAAGACTAATATCTAATTGATTTCCATTTTATACTGCTTTTGAAAATTAGG
GGTAAGAAGATGGGGCATGATGTAGATTTTTTAATTACCAGCCCAGGATCAACAGAGGATGAAGAGCAACTTTTACAGAAAGTGATGAACTTAT
GGGAAAAGAAGGTGAGAAGAAAGATGAAAAATACATGCACACGCAAACATTATGTTAACACTTGAATTTTGCACATTACTTGCCTTATAATTGT
GTAATGACCATCTAATCAATTCTCAATTATTTGTGGCAGCTTATACAAAGCCATATGACCTACAATAAGACTTTCCTGTTTTGGGTCCTACAGT
ACATGTTATGAATATGTCCTGTATCTTGTTTATTATACTTACCCTATTGCCAACAGGGCCAAGGGTGGCTATGCATTTCTGTTTCACATGCAGA
GGCATTAAAGCACCCAATCAAAGTGAAAAGTATGCACTATGAAGACCTGGGAAATGTAAGCTGGAAAGCTGCAAGCTTGGGTGAGGGGGCAGGA
CTGCAAAGACTGGGATAAAATCAGTCTAAGAGGTGTTGATAGTGCCTCGATAGATTCGAGGCACTTCGTGCTGAGATGGAATGAAGGAAACTAA
TGAGGGCAAGCTGAGCCCTGCAGAGGTCATGGCTCAGAAGCCCCCATACATTGCAGAGATCAGACTTGTGACAGGCCTATTGCCTGGTGGAGGA
AACCAAAGTAAGCTAAGCTAACCCTGCAGCCAGAGCCACATGCAAGCCCTGACTCCTGTCCAACTCTAGTGAGAGCCTCACTTCCTAGAGAGAC
CAGAGGGTCCTACCCTTGGGACCTGTAGATAGGTCTGGCTGGGCTGGTGTTTCTCCTCACAGCTTCCTCCTTCCTGAGTAGTTTGCATCTGTTT
GGTGTGGACCAAGCTTACTGATATCCCAGAAAAGGAAAACCTCAGATAAAGTGAAAATAAAAGCTAGAAACACAACCCTAGGGCCAGGGGCACT
GCAAGTGAAGACTCAACTTTAGAACCAGATCCAAACTGACACGAGTTTGAATACTGGGCGTCGAGTCTTCCCAGAAGGAGTTGGAGGGAATTAG
AAGCGAAGGGCAGCGAGGGAATCCTGGCTAGACAGCCTCACACTCAGCCTTGCAACCCTCCTCAGAAGGCACCTCAGACTAAATTTGGACGGAG
CCTTCCTGTCCGAGGTCAAGCTCAGTGCATCTCCCTCCTGCCCCACAGCTCTCTTCCTGAGAACTGGCCCCTCTGTACCCTGGCGAGGATGGCA
AGGATGGAGAGGTGGGGAAATGCCTCCTCCTAGTCAGGAGTTTCTCAGTGTCCAGTAGGAAAAATAAAAGAACATGCTGATGTCAATATTCAGT
CAACCAGTGGGTATTGATGCGCAAGCCACAGCCCAGAGGGCTGCCCTGTACATAGCCGGGGCTGGAGATCTAGAGGTGGCATCAGGGGTTGTGT
GCATGTTTGACAACTGTGGCCTGCTGCAGACAACCTTCTGAATATGCAGACACGAGCATTACGTTCAAGGATGCATTCTCAAACACCTTGCAAA
ATTCAAGACAAAACCCAATAAAGAATGGCCCATTTCTCTCTTACCCACCAAGTGACTGTTTACTGTTAGGAATCCAGCTTTGTGGGCTTTTTTT
TTTTTTTTAAGGGAAGGTGTGTTATTACAAATTTGGCTTTCATGTGAGACTTGTTCATATGTTTTATATCTCCTTTTTCAAATTTACATAATTG
AAATTTACACAAAAGGCTGCTATTCTGTACTAGTTTCAGCAAGTTTCCTTAAAAAGTGGAATTGTATTTTCCGGAGCTCGTGATTCGAGGTTAA
CTACGGCAACATCTACCACCTCCTCCAGAGGTTCTTCCTAACATTAGTGCTTCCCCCTTCAAATGGTGTTTTTTCTTCAAGGCGTTGAAGGGTG
AAGAGTTCCCTCTATTGAGGTCAACAAAATAAAAAGTATCTTTTTGAATTGAGATAATGTCTTGTGCAGGTTTGTAGAAGAAAGACAAAGCATG
ATTCCTAACAATAATCAATTTACCAATGATGCTCAAAGTGTGGTCCCTGGTCCGGGAACACCAGCATTGCCTGGGAACCTGTCAGAAATGCCCT
CCCTGCCCCTCCTGCATCACTCTGGGGACAGAGCCCTGCAAACTGAGCTTTAGCAAACCTTCCAATTGCTTCTGATGATAGCGCTTTTAAACAT
CTAACCTAAAGAGTACATGGTAACAAATCACACATCCCAGTAGCTTGATGACATTATTTGAGGGTTACTTGCTGTTTTTGTTGCCAGATTTAGT
GGTTGCTAGCACGTTTCTCTCTCCTGTCCCCACATCTGCCCTGTGCCATCAGGAACTCCCACCAAGAATGGCAACTCGATTGGGCACATCTTAG
AATCACTTGTCCACTTTCTGGATAGGCAACTTTAAGTGAAACATGTGTCATTAACTTTATCCCACTTTCTCCAAGGCAGGTGGACTAACACTCT
CATGAGAAAGAGTCTCCCAAGTGCTACCTAGAAATAGCAAGTCATCTTGCCCCAAAGTTAGACTCAGCCTCCACCCACAACGCTTTTGGCTGGT
TAAACCTGGTCATCAGTATAATATGAAGGGACACTGTCTTTGTCCATTTACCTTGCTATAAAGGAACACCTGAGGCTCGGTAATTTATAAAGAA
AAGACGTTTACTTGGCCCATGCTTCTGCAGGATGTATAAGAAGCACGACACCAAGCATCTGCTTCTGGTGCGGCCTCAGGCCGCTTACACTCAT
GGCAGAAGGCAAGGAAGAGCTGGCAGGTGCCGACGTCACAGGGTGAGAGAGAAAGCAAGACAGAGTGGGGAGGGGCCAGGCTCTTTGTAACCCC
CAGCTTTCACGGGAGCTAACAAAGTGAGAACTCACTCATTACCATGAGGATGAGGACGGCACAAGTCATTCATGAGAGATCTTCCCCTATGACC
CAAAGACCTCCCATTAGGCCCCACCTCCAACATTGGCGATCAAATTTCTACGTGAGATTTAGGGGGACAAACATCCAAACTATAGCAGACACTA
ACTCAAAGCTGCTCCCCAGAAACAATATGATTTTTTAAGTTTTATTATTTATTTATTTCTGAGACAGGGTCTTGCTCTGTCTCCCAGGCTAGTG
TGCACTGGTGTGATTACAGCTTACTGAAGCCTCAACCTCCCAGGCTCCAGGGATCCTTCCACCTCAGCCTCCTCAGTAGCTGGGACTATAGACA
CGTGCCATCATACCTGGCTAATTTTAAAATTTTATGTAGAAATGAGGTCTTATTATGTCACCCAGGCTGGTCTCAAATTCCTGCAGCGTGGCTT
TTTGTTTATGGTTGGTTTGTTTTTAAAGGACTGAGGAGAGCCCAGAGCACTAGCTGAGGTTCAGAAGTGGAGAGGGAGATTTTCTTGCAGTTTT
GCCATTAAGTGGCTTTGCTTCAGCCTCTCTCATCGCTAAATTCCTTTTCCGTAAAGGGAAGATAATGCAACCACTTTCTTAGTGTTTTCTCCTA
GTGTTTGCAGGTGGGCCTTTAATGCAAGGCCAAACACATGTCCATGTTCTGCTCGAATCTGAAAAGATTTCATTAAGAATCCAGTGTTAAATCA
TAGATCTTCTTCATCAGGGCCTTTTCCTGATGCCATTCTGTTTCTTTTCAGGGATTACTTTTATATTATGACCTTGTGGAGTCAACATTTGAAA
AGCTCAGGTTGCCTAGCAGGAAGGTTGATGCTTTGGATCATTTTCAAAAGTGCTTTCTGATTTTCAAATTGCCTCGTCAAAGAGTGGACAGTGA
CCAGTCCAGCTGGCAGGAAGCAAAGACCTGGAAGGCCATCCGTGTGGATTTAGTTCTGTGCCCCTACGAGCGTCGTGCCTTTGCCCTGTTGGGA
TGGACTGCCTCCCCCGTAAGTGCTACATGGACCCATCGGATGATGTTAGCTTTCTGAAAGACGTAGGCCGAGTCTACCTGGGCCCAGCGGAGAG
ATGACGGCAACAGGGGCTGGGTGACAGGGGAGGGGCCAGTACCCAGAAACCTCTAACTCAAGGCATCCTGTCCACACATGGCCAAGTATGACAG
ATTAATTTAGAACAGTTATTCCCAGTGTGTGGTCCCCAACACCAGCAGCAGCAACCTTACCCAGGAACAGGTTAGACATGGAAATTCTTCACCC
CACTCCAAACCTATGGAATCAAATCAGCATCTCTGGGGATTTCAGCCCAGAAATTTCTTTGGAAAACCCTTCTAGGTCTTTCTGATCCACCTCA
AGTAGGAGAACCACTGAAGTACAGAAACCAGCAAGGGGATTGAAATAGGAAACAATTAATAAAGTGGAGAGGCAACTCACAGATTGGGAAAAAA
TATCTGCACATCATACATCACATAAGGGCCATTATCCAGCATATACAAGGAAACCAAAAGACTCAATAACAAGAAAACAAATAATCCTATTTAA
AAATGGGCAAAGGACTTGAATAGATATTTCTCAAAAGAAGACATATAAATGGCAAGCAGATATTGCCATCTTGCTTAACATCTCTAATCATCAG
AGAAATGCAAATTAAAACCACAATAAGATGTTATCTCACATCCGTCAGATTGGCTATTATCAAAAACATGAAAGACAGCAGGTGTTAGTGAGGC
TGTGGAGAAAAGGGAACCCTCTTGTATTGTTGGTGGTGTTGTAAATTACACATTTTGGAAAATAGTATGGAAGTTCCTCAAAAAACTAAAAACA
GGGCTACCATATGATCCAGCAATCTTACTTCTGCGTATATAGCCAAAGGAAATGAACTCAGTATGTCAAAGACAGGTCTGCACTCCCGTGTTCA
TTGCAGCATGATACACCATAGCCAAGATATTATATAAAAACAACCTAAGCATCCACAGCAGATGAATGGATTTTTAAAATGTAGTATATGCACA
GTGGAGTATGACACAGCCTTTCGAAAACAGGACATTCTGTCATTTGAGACAACATGGTTGAACCTAGAGGACATTATGTTAAGTGGAATAAGTC
AGGCACAGAGAGACAAATACTGTATGATCTCGTTTCTGTATATGTAGAATCTAAAACAGTCAAACTCGTAGAAGTACAGAATAGAATGTAGAAT
GGTGGTTAGCAGAGGCTGGGGGATGAGGACAGAAAATGGACAGGGAAAAGGGTCAACAAGTACAAAGTTCCAGTCAGACAGGTGGAATAAACTC
TGTTCTATTGCACAGTATGGTGACTATAGTTAATAAAAGTGTATATTTCAAAGTAGCTAAAAGAGAGGATTTTTAATGTTCTTACCACAAAGAA
ATGGTAGATGTTTGAGGTGATGGACATGCTAATTAGTCTGATTTTATCATTCTGCAATGTATATAGATGTATCAAAATACCATATTATAACCCA
CAAATGCATACAATTATTATATGTTAATTAAAAATAAAATCAAGCTATAAAATTTTTCTGAAAGAGCACAAGTTGAGTTCATCCCAGACCTGGT
TGCAAGCTCCTGCTCTGCTTCTTGCTGTTGGGTGATCTTGGACAAGTTCCCTATATCCTGTAAAACTCAATTTTCCCGTCAGGAAAATGAGGAC
GATGACCTTAGCTACTTCCCTGAGTTGCAGAGACATTAGGTGACATGATGTTCTCAAAGCCTCAGCACCAAGCCAGCACGTGGCCAGTACTGGA
TAAGTAGTAGCTTCCATATCCTGTCACTCACAGGAGAGGACACCTGTGATTTGAGTCCCATTCGCATGTGTTCCACCCTCCCAACTAAACACCT
CACCCTGTTTCTCCTGTTTTCCCAGGTAGCTGGTTGTTGCTTTGAGTGAAATGGGTTCGTAGAGGCTTTTTTATACAGATGAATGACACAACAC
AAATTAATTGTTCTCAGCCGTGGGTTAAATGTCAGGTGTCTTTGCTTTGGACTGGAATTAATTCAGCACAGCATCTTAGCACTGGGATTTCTTA
CTCTAATCACAAATGTTGACTGACAACTAAATGCTTTTTTCATTCCTAAAAAAAGGGGAAGAAAAGAAAAAATATACCATAAATGCAACTTGTC
TGATAGACATAAATCTTTGGGAACACATAGTTGATTGAGAAAGGGGAACGTTCCAGAAAGAAGTCCTTGGTTATGCAATGTCATGCCAGTTAAG
CATCACTGGCTGAAGTGCTTGACATTTGCCCATTTTATTTTTAAGATGGACATGTTTTCAACACATTCTAGTCTGTTTCCTCAGAGTACTCACA
AATTGTTGCTGTTGGTTCTGCAAGGCACTGGCAGAGCACTAAGCTCTTTTGCTTTTTAGCTGGGTGACTTTAAACAAATAAAGGACTTCTGATT
GCAAAGTCCATCTCCTCAACCATCCCGGGTGAGCTTTCCTAAAATAGCAAATTGTTCCTTACCACTAGAGGGCACCAGTATCCCAGGCTTGCTC
CCTACTCCCACATGAAGAGGACAAAATTTCTAGATTCTGTTTCTCTCAGGAAAACTAGTCTCCATGACAATTCGTTGCCCTCCTTTCCCAAGGT
GTTCCTGTCCTCTGTCTTAGGCTTCATGTATTGCTCCCTTCAGTCTCAGAGCCCATTCCTGACTGTGGGAGATGTCATCCAGGAGCAGTTGACT
TAGACGATCAGTTTCATGGCATCTCAGTGTGAAAGGATGTTAAAGCCAGAGGGAGTCTTAATCATGTCCTTCCTCCATCCTTTCATTCACTCAA
CCAAGACTCACGGAGTCTGGATGACTTGACAGCAGATGCACAGCCAGGTAGGGACAAAGTCCAGGCTGGAACGGGTTCCCTGACTCCTCCATCC
TCTTTTACAATAACAATATTCCAAATCATGTAACACCCACCAAACTAGTATTTATCCAGCATTTACTCTCGACCAGGCATTATCCTGGTAGAAC
GCTCACGCTATTCATTTATTCATTCAATAAAACATTTGCTATACATCTTCTACATCCGAGGCACTATTTGAGGGAATACAGTTGTGGACAGAAC
AAACCAGGTTCCTGCTCTCACAGAGCTTACATTCTAGTGTGTTCATCGGAGCACGCACTTCTGTCACCAGAGAATTTGGCCCTGGGGGAGGAAA
ATCACTTTGAGAATGTTTAGTGGAGTTACATATTTCACTAGAGGGATGTAGCCACCTAATACTGAAGACATTCTAGACGTGTTAATAATTTATT
TTAACTATCTCCTATCCAGCAGTTTGAGAGAGACCTCCGGCGCTATGCCACACATGAGCGGAAGATGATTCTGGATAACCATGCTTTATATGAC
AAGACCAAGGTACAGTTCTCTTCCTAAAAGGGGCTACTTTGATCCTCATCCCCAAGGCTGGCCCCCGAGCTCTTTTCATGGACTGATTTTAGTA
TCCAGGTATGGTTTCCTTTGTCATGCGTGTTCTATTTCCAGTTCATCATAGTTGAGGGCAGCAAGAAAGATTTCCACAGACTCGCAGTTTCCAC
CCGGCCCAGAATGCAATTCGAGAGATTTTGGCTGAAACATGATGAGCTAATTGGGCTTCCAGAACAAGTCCAGCAGTGAACATTAACTGGGTTT
GGTATATCCTCGGTGTTGGCAATGAGTAACTCCAAAGTAAACCAGGGATCCCCAGAAATCACAAATACTACTTGTGTACCCCTCAAATGCAGGG
GGCAGTGGCATTTTGAGTGGCCATGTAGGCCATTAACAACAGTCTCCTGCAAGAAAGAGAGCAACAGAGCTGCCCTGAGACATAAATGAGCATC
CAGCTAGTCTCATTGACTACCCATGTCACTCATTTGGTGTGCTAGTCTTACTGTGGTCATGATCCAATTCATCCCTCAGCAAAACGATAGATGC
CTGTAGAAGTTAGAAGAGTTAAATATCCAACTGTTAAATCCACAGTTCTAAGGGCTACTCTTCTTACAGATATCAAGGACACCAAAATAGGCTC
CATGGGGAAGAAAACTCAAAATAACTAGAAGTAATGGTAGTGGCCAGGCGCAGTGGCTCACGTCTGTAATCCCAGCACTTTGGGAGGCCGAGGC
GGGTGGATCACTTGACGTCAGGAGTTCAACATCAGCCAACATGGTGAAACCCCATCTCTACTAAAAATACAAAAAATAACCAGCTGTGGCGGCT
CGCACACACCCAGCTACTTGGGAGGCTGAGGCAGGAGAATCACTTGAACCCGGGAGGCAGAGGCTGCAGTGAGCCGAGATCACACCACTGCACT
CCAGCCTGGGCAACAGAGTGAGACTCTGTGTCAGGAAAAAAAAAAAAAAAAAAAGTAATGATCATTTCCCTCTAGGAGCTTGTAGTCTAAATGA
GATGTATTCAGTTAGAGTTGTCTCAGTTACAAATGTTAGAAATCAAATCTAAAGTGGCATAAACAAAAAAGGGAACTTGGGTTATATACTGCAA
TGTCGAAGCGTTCAGGGGCAGCCGAATATGGGTGCTCAGGCAGGCTTCCCTCAGTATTGCCTTTATTCTCAGGCAGGTTTCCCCATAAGTCCCA
CTCTTCCACCTACTTCAACAGAGAAGAGCCTGTTTCCTAATAGTTCCCCCAAGAATCCTACCTGATGCTCATTGGCCAGGCCTGGGTCATGTGC
CTATCCCTGAACCCATTACTGTGGCTCTGATTGGCCAGACTTGGGTCATGTGCTGCTTCTTGGAATTGCCAGCAGCTGCACCTAACCCTCCTGG
ACTGAGAGTCAAGAGGAGTGGTTTCCCATAGALAAATCCACGTGCTGCTCACAGAAGAGGGGGCTGTGGATGCTGGCAGGAAAGCCTCGGATGC
TAAGCATGTGGGTGAAGGCAGATTCACATAGTACAATGAAGGAACACTTACAAATTAATACATTCTAAATAGTTCAATGTAAGCAAGTACCTTC
TATGTGCCTAGCACCGTGCTATGTACAAGAAGGGATGGAGGAGAACAGCTGCTTGGTCTTAAAGAGATCACAGAGTGGGATCCTGCTGGGGTTA
GAGGCAAGCATGGAAAGCTAAGGAAAACCCAACACATACAAGTATCCTATAATTACCAGCAGTACAAAATTATAACTGCATGTTAGAATTACCC
AGTGCGTTCAGATAGATTGATTATAAGATCTCTCCTGAGCTTCTGATTTCACTGGACTGGGGTATGGCTCAAGCTTCAATGTTTATTTTTTAAA
CTCCATCAGGTTGTTCTAATAAACAGCTGTGGTTCAGAACTACAGCCCGTAGGAAAAATATCCAAATGGCTTTTGCTGAATATGTTAAAGCTGT
TATGATTTTACTTTAATTCATTTAGTACCATGTTTTGGAAAGTCAGTTAAAATGACTTTTTATACTCAGAAGCAGGGAATTATGTTTGGGCTGT
AATTCATTCTGACAAGGCAATTTTATAAGTAACACTTTCACTGTGTCCACACCATGCTGCTTATGAAAAATATCTGAATGCACATATTTCTTGT
TATGTTTTCAGAGGATATTCCTCAAAGCAGAAGTGAAGAAGAAATTTTTGCGCATCTGGGATTGGATTATATTGAACCGTGGGAAAGAAAATGC
CTAGGAAAGTGTTGTCAACATTTTTTTCCTATTCTTTTCAAGTTAAATAAATTATGCTTCATATTAGTAAAAGATGCCATAGGAGACTTTGGGG
TTATTTAGGTCTTATTGAAATGCAGATTGCTACTAGAAATAAATAACTTTGGAAACATGCGAACGTGCCACTGGTAATGGGTAAGGTTCTAATA
GGCCATGTTTATGACTGTTGCATAGAATTCACAATGCATTTTTCAAGAGAAATGATGTTGTCACTGGTGGCTCATTCAGGGAAGCTCATCAAAG
CCCACTTTGTTCGCAGTGTAGCTGAAATACTGTCTATCTCTAATAAAAACAGCACGAAACAAGATGATGGAATCTGTTTTTCTTCACTCAAATA
TTATAAACTATTTTAAAACACAAGTGTAACCAAGTGGAAGAATAAAGAGCTTACAGTTTGTCTTAAGGGGACAAACAGGTTTAATTAGAAGATG
CAGAGATTCCAGAGGGGATTTGGGTCCGTTCTGGAGCTTGTGGAGGAGGGGTGCTGCCTCTGGACTGGCTCACCTCGGCTCAGTGCCTGCTCCT
TCCCGGCCATCATACAGCTGGTTCCCTAAGCATCCCACCACAGGACCACATAAAGGATGTATTCTCCCTGCCATCGTGCTGAAGGAAAGACAAT
GTCCTAAACCATCAAAGAAATATCTCCCTCTTTTTTCCATCTTGGAGCTTCTGTCTACACCTTATGGCTCAGTCTCTCTCAGGAAGTCAGTCTC
TCTTGGCTTCTTATCTGAGGGCACCCAAGGGAAGGGAGGGAGCCCTGGCTGAGGGAAATTTTGGAACTCCCAGGCTCCAGACCCATTCTTTCCT
CCTGCCTCCTCCAGCAGGCATAGACCCTTTGCCTTGAAGGCAGTTAACAGGTCATCTCTTCCAGCTGCTTCCGTCTCTTCAGCCTGCTAAAGAG
CTGGGAGGCCCATGACGACCGTTTTCCCTTCCTTCCAGTCCCTCTGGGAAGAGGATATTGGGAGATACAATACCTTTTGGCTATTGTGACTAAT
GCTGCTGTGAACATTGGCCTACAAGTATCTCTTTGAGTCCCTGCTTTCAATCCTTTTGGTACCCACCTAGTAATAAAATTGCTAGATTCAATGG
CTATTCTATACTATGTTTAACTCTTTGTGGAACCACTGTACTGTTTTCCATAACAACTGCACCGTATTACATTCTTAACCAACAGTGCGCAAGC
GTTCCAATTTCTCCACATCCTCAACACTTGTTATCTTCTGCATTATCTGTTTTATAATAGCTGTCTTAATGGGTGTGAAGTGGCGGGTGAAAAC
TTTTGCCCATCCTGGAACCCAAAGACAGTCCAGGCTGAAACTAACACACTGAAAGGGCCTCAGATGGTGTGTGTGCCTGTCACATCTTGAGTTG
ATGGCTAAAAAAAGCTGGGGACAACAAGAGGGTGGACAGCAGCCACCCCCACTGGCCTCAAATCCCAAAATCCACAAAGTATTCTAGTCTTTTC
TGCTGCCCAGTGTTTCCCAGTTATGACATTCAAGATTATTCTAGCTAGTAAGTAGATGAATATTTTCATACTGATATAATCAATAAATATTTAT
TGGGTGCTTACCATGTCAGTCATTTTTCTAGGCACAGGCCATAGAAAAGATAACAAAACTGTCAAAAATCTCTGCCTGTATGATTATAAGCATA
AAGCTTATGTTCTAGAAAGGTGTTTATTTGTGTTCGAAAGGTGTTAAGAAAATGGTTCCTTATTGATGGTAGTGATATAAAGCTTCCTTTTTGG
AATAGGTTTATTTATATAACAAAAGCGACTCAAGGTCAGGGAAATCATTTAGGAAATATTACCAGTGAAATGGGGGAGTGGCAAGAATGAGGAG
AGAGGGACGCAGGTGGCTCACATTTGGGAAATGTGCAGGTGGCCTTGTCGCCTTCACTGAGCAACTCCCCAGCCCTCTTCTCTGGAGGTCCCCA
CCACACAATAGCCCCAGGAGGTCCATGCCAGAGGAGTTTCCCCATCAGAGAACCTCACAGATTCTAAATGCTACTTTCCTTATTTGAAAAGGCC
TGTTGGAGATTCCACAAATGCCATGTCTTTTTTTTCTTTTTTGCTGTAAGCCAGAATTTTTATCAGTTCTGGACATGTTTTTTTTTTTTTTTTT
TTTTTTTTTTTGCCGTAGGCCAGAATTTTTTTCAATTATTGTGGTGACTAGTTACCAGAACTCAGCCTTCGCCTGTGCCTCCTACTTTGGCAGC
AGACCGCCCTCTGATGGCTGACAGAAGAATCCTTGGAGGCAAGCACAGTATGATATAGCAGATCAAGTAGGAAGCAGATTATCTGTTAAAAACA
TTGGAACTATATGTAAGAAGCCATGGATCACCGATGCTCTATTTGTTCACTTTTTTCCCAGCCTTTTAAATCTGTGTTTTATTTGGGGTAGTTT
TTATTGCTGTATCTTCAAGTTTACTAATCTTTTCTTCTGCAATGTCTAGTTTCATTAAACCTCTCCAGTATTTTATCTCACACATTATAGTTTT
CATCTTTAGATGTATGATTTAGTTTTTAAAAACTATCTTCCATGCTTCTATTTAACATATTCAATTTTTCCTCTAGCTTATTAAATACATGGAA
TATAGTGTAACTGTTTCAATGTCCTTGTCTACTAATGATATCATCTGTGTCAATTTTGAGTCAGTTTCTATTAACTGAGTATTCTCCTCATTAT
GGGTCACATTTTCCTCCCTCTTTGCAAGCTTGGTAATTTTATATTGGATTCTAGACATTGTGAACATTGTGAATTTTTTCCTGGATATTTTTGT
ATTCCTGTTAATATTCTTAAACTTTGTTCCAGGATGTGGTTAATTTACTTGGAAACAGTTTGATGTGTCCTCATCTTGCTTTTGAGCTTTGTTA
GGCAGGACTCATCTTACTTTTGAGCTTTGTTAGGCAGCACTAACGTAGTCTAATCCAGGGTTAATATTCTTCCCCACTACTGAGGCAATACTTT
TCTCAGTGTTCTGCCTGATGCCTGGTGAATTATGGTGTTTTCTACTCTGGCTGTTTGGGAACAGGCACGGTTTGTGGCCTCCCACTGAGAGGCC
TGGCCCATTACAGCTTAGGGTATTGTTCCCTCTAATCCCTTTGTGTGGTTCTTTCTCCAGCCTTGGGTAGTTTTCTCACATGCATATGCTGATC
AATGGAATAATCAAGAGGTCTCCTCTGTCTCTGTGCAACTCTTTCTCCAGTACTCTGCCCTGCAAATTCTATTCACCTTGACCTCCATCCACTT
CCAGCTCTATCTCACTAACAGCATGTGCAAAAGCCATGTGGTGCAAGGACCATGGTGTCAGAGAAAACGCCCACGTGGCAGGAGGGCCATGGCA
TAAAATGAGCAGAGAGAAAGCTCTTGCAGCTGGAGGTTCCCACGTGTCTGAGTTGCAGAGAGAAAGCCTATGTTTGTGGACAGACCATGGCATC
TGAAGGGCAGAGAGGAGGCCTAAGTGGTTGGGGAATAGAAACTAGAAGAGGTGGGACACAAGACTAGGCTTTCCCCAGCTCTCAAAACAAAGAC
CCATATCCTTACCTTGGCTTTCATAAGTGCGTAATCCCTGGCCACGTGAGTCAACAGTAATCACTGTTTGACTCTTCATGACAAAATCAGTCAC
ATTTATGGTAGAATTTTGTCAACATGGTTTGTTCTCGCTCACAATCAAATCTTTCAAATCATTTTAGCCTGGAAATGAAAGTCTATGATAAACT
GATTCTCTTTCATTATAAATCAGATTTTAAGCCCCAGGTTACACTCACCCTGTCCTCCAGAGGCCCCCTTCAGTTTTAGAAATAGTTCTACAGC
CTATTCGACAAACTCGGCCAACTTCCAAAATGTTCCCCAGTCTCACCTGTCCAGTTTTAGTATTTTTCACCCCTTAACTTATTGGAGTTCAGGT
AGCCTCTCTATAGGATGGAGGAGAGAGGTTTTTTTCTGAGTTTTACTTGGAGGTACAGCACTTTAATGTATGCCCTGACATAACCAGACATTTC
AGCCATTTGGAATTCTCAGAGGATTGAAGTGCTATGCCCATTTCTCCTTCTCCTCTAACTTCAGGTAAAGGAAAAAGAAGAAGAGTATAGATTC
TTATCTTATTTGAGCCCGAGAGAGATAGTTTTATGTCTTTGAGCTTAGAGGCAAAGCACCTGTATAAAAGCTTTCCTGATATTATTTCCTTGGA
TGGAGATTCACATTCAATTGGGTAGAGAAACGTTTCCACAAACACCCAGTTTAGCATTTTCATTATGCCCCCAACATTGTCTTACGACCTGGCA
GATTGTCTGACATTGGAAGGAAGCCAGTGCACATTTGTTAAATCAATTCACGCATTAAGCAATAATTCTCATCAAGATGGTGGGAGGGCAAAGG
TTATATGACTTCACAATCTTTCAAAAATTAGTTATCACTTTTTGGTCTTCAATTAACATCGCAATGTTGCAGGGAAAAACGCCTTAAGCAAAAC
TAATAATTGTTATTTCTTGGCAAAATAAAGAAGAAGTGAGTATCTGTCTCCACCAGCAAAGTCAGGAACTGAGAAGAATCATAGAGGGTATAGA
AGGCTGTCCTGATGGGAGTGAGGAACAGGCAGGCAGAAGGAGTGCTTTGCAGGGTTTGGGGAAAATCAAAGTAGAATGTTTGGACTGGATGGAT
GTAACTTTATAGATAAACCAATTCAAACACCAGATGATACAGGAGGAAATGAGACCCACACACATCGTGCAACCTGACTAAGGTCACTTAACTT
ACCAGCAGCCCTGGGTTAGGGAAGCAGAGCTTCTGACTTTGGGTCTCATCATTTTGCTTACCACACAGAGCTGCCCTCCATGAAAGACTGAATG
TCTTCTAGCCTGGCAGAGAAAGTGCCAATATCGGGAATATCCCTGGGATAATCTTGGTTCCAGGGACAGAGCCAATGTTCTCTAATATAGGCAA
AGAAAAGCCACAAACATTTTGTAGGTTCATAAGAATGGCCATTTTACTTTTCACTTCATTCCAACATAAGTTCTTGTGTATCATAGCAGAAGTA
AATGACAGAAATGCTGAACCTTTCTAGTTTAATAGAAACAATGTTTAAATATTCTAAGCCGTGGATTATAAGTAGAATTAAAATAAGTGATCCA
AAACACAAGTCATCCCTCACTTTATAGCTACATGGCTTAGTCACATGCATATTTCAATCCAGCCTTACAACCACCCCATGGGCTAAAAGGATGG
AGGATGAGAACTGCTGTCTCCACTTTACAAGTACAGAACTGAGGCTCTGGATGATCAACAATCGGCCCAAGGGCTGACACCTATAAGTATCAAA
GCCAAGGCCACGGCTGAGTTCTCAGTAAATCCAAGGTCCTTCATGACATGTAGGAGGAAGTACAAGCACCAGGATGACTGGGAATGTCTGTTTA
AAAATGGCTAAATCTGCTTGTTTAAGGTAATTAGATCCAGAGGACTTGGCACAAAACTGAGTTTCAAAAGGGGCTTTGAAGAGCAGGTATTGAC
ATGTGGCAGAGATTGGGTTCATAGAACATGTTCTTGGTTATTCAGGGAAGAGGGGCATGTTTCTGAGTAATCAGAAGCCCTGTGTGAGAAAGGA
ATATTTTCTAGGATATCTGTGTGGCTCATGGAGCTGCTGGATGAACTTAAGATCCCCTGGACCCAGGCCTTCCCACTGGGAGGCCTGGCCTGCT
AGAGGGCAATGGCTATACATGGGGGAACCAGGCTGCCTGGAAGCCTCCTCATGGGAGTGAAAGTGAAAGCCTGTCCCAAGCTGGCTGAATGGCA
GGCACGTTGCTCCTTGGCCCATTCCTGTGGTCCTGTCTCCATCCCCTTGGGTCCTCTTGATTTTTCTTTCTGCCAAACAGCTTTCCCCTAGATA
TCCAACGACTTGGTTCTTTTCTCCAAGTAGACTTGGTTCTACTCCACAGAGTAGATACAGCCCTCATTTCTAATAATCTTTTCGAAAAACTCTT
GCCTTCCCCGCGGCCCCCCATCTTTACTTTCAACACACACACAGTCCGTCGCAGAACTGCCCTCCTTAAATACTCTCTGATTACAGACACAAGT
AGGACCAATGAATCATGTGTCTCCTAGGCCAGGTGTGTGGTAGGGTAGCTGACACATGTTAGAAGGAAGTCTGCCCAAAGACACAGAGGAAATG
AAACTCATATTGAAGGCAAAAGAAGAGTACAGAAGAAAAAAAAAAAATGGCTGGGGATGGATTGGAAAATGGGAAGAGGAGTTACTGGGATAAG
AGAAAGCTGGAGGGTGGCCTCTCCTGGAGTAATCCACCCAAAATAAGGCAACCTGGTTATAGTTTGCCCAATAGGCTCAATGGGCCAACACCAC
TTGAAGTAGCCTCTCCTTTTCCATTTGGCCTCCTTGGAGACAGTCCTCAGCAAGCTGAAGCGGCAATGCTATGCGTGGGCTTAAGGGCTCTTGT
TTAATCTGAAGCCTTTAAAAAATAAAATAAAAGAAGTTGTAACTTTAACAACTATCCCTAAAGCACAAAAGTTAAAGTTATTTGAGGAACTGCC
ATCAGAGGTATCATAATGTCTTACTTTAAAAATTAAGCAAAATGTTTCATTGTAAAGACAAAGTGTTGTTTTAATATGAAACATGAATTTCCAT
CAACATTAACATCTTTAAGGTTAAATGTAACACCACCAGTCTCTGTATTTGGAATTCGGAACTTGTAAGAAACTGCCTTTTCCTGATTCATATG
AGGACACGATCACACCTAGATTGGAAGATTCACATACTACCAGCAACACCTAGAATCATCTTTAGATAACAATTTGGATCATAGGCCATGGAGA
AAGTTTGTCCTAAATGTTCCCTTGTGTGGCCCTGTGACTATGGGGAACAAATGCTGGTGATTAGCTGTTTTATCAGGCAAGCAATATGGGAAGA
GGTAGGAAGAAGGTGGTAGAGAGAGAGAACTAACATTTTGACTGGCAACTAAGTAGCAGACACTTCCCTTTATTTCTTATTTAATCTTTTCAAT
TATGACATGAGGCAAATATTTCCCCTCCTTTAAAAAAGCAAAAACTGAGGCTTGAAAATGTTAAACAACTTCTCCAAAGTCGTACAGCTGCTCA
GTGGTAGGTGTGACTTAAGAGTCCGTATTCTTTCCACTGCTGTGTGACATGATTGAGCCAGGTGCTTCCCTGTGGTCAGGGAATGTGTGGCTCC
ACATGGTTCCTACCCTGAGATATTCAGAAACAATTAACTGCTTCCTCTCACACATCCTGCATAAGTTTCATTTGTATCCCAACTTGCACCAGGC
TGACCTCAGCAACACTTCCATGAAAGTCAGATCTGATGGCTTTTTTGAGAAAAAGGATATGAAAAAAAAAGATGAGAAGGCAAGACACTCAGAA
ACCAAGCCCCTTTCCCAAAATGACAAAGAAAAGCAAATTCCCACTGGGAGCAGGAATAGGATCTAAGGACCCCATCTGGTGACTCACATGTACT
AACTAAAGCACAAGATCTGAGAGTTGGAATTAACCATGTTGGGGATGTCCCCTAAAGAGACAAATCAGCCCCAAAGTGTTCCAGAGCTGTAAAT
GAAATTTGGATTGATTAAGAAGCAGCTTGGCATCTTTCCTCTCCAAGTACAAAACCCTGGGTTTTCAACCCTGTTCCAGTGCCAGGTCTGCTGC
TCCTTGACTGAGCTGCATCATTCCAGGCTCAGTCTGGGCACAAGCCACCACAATCCCCTCCTTCTTTCCATTTCTATAGTAGGACGGTAACGGT
CATGCACAGGTTCCTCGCTTCCTGCTACAGTCTTCACATATATGTGGGCCTCTTGTGCTCCCATCGTATTCTTCTCATGTGTGGGTGATCTCCT
AGGATTCTTAAGGAAACAAATAGGTTTTTTAAAAACTACAGCAGAGAATTCTTTCATACAAGATGGACTAACAGCAACCACATTGACCCTCCCA
CCTGAAATAACCAAAATCAGACACAACATTTGAAGCAATAGTTTTCAAGACACTAGACAACAGGCAAGGAGGGACAATGGTCCTGGAGAGACAG
AAAACAAATGAGGAGAGACCCAGAATTACCTGATCTTACTGCTTTGGGAGAGCTTTCAGGCCACTCAACTATCTTTTGTTTATTGTTAACAAAG
TTTCTCATTTTTTCTCTTTTAACTGTTAATCTATTTGTGTATTTATATTTAAAGTGAGTTTTGTAGGCATCATATGATTGGACCTTCTTTTTAT
AGCCAATGTGAAATCTCTTCCTGTTAATTCGGGTATCTAGACCATTTACATTTAATGTGATCATTGATATGGTTGGGTTTAAATCTACCATCTT
GCTATTTGTTTTCTGTTTGTTCTACCTGTTTGTTGTGTCTTTTTAACTCTTTTTCTACTTTATTTCATATAGATTTTAGAAGAACCTCATTAAG
TTCCATGAAAAAAATTGATTGGGATTTATATTGAAATTACATCTGTTATATAGATCAACATTGTTTGACATCGTTATGTTATTAACACTTTCTA
TCCAGGAGCATAGTATGCAACCCCCATTATTTAGGTATTATTTAATGGGTTTTTTAACCAAAGTTTTATTATTTTCCATAAAGGTATTACATAT
TTTTGTTAGATTTATTCCATAGCATTCTACATATTTTAATACCAATTACCATCACAAATGGTAATTTTTAAAATCACTTTTTCTAATTGTTGTT
GATGTTGAAAGTATAAATTACTTTTATATATTGATTTTTCTATCCAGTAAACTTGTTAAAATTTCTTGTTAATTCAAGTAATTTTTCTGTAGAT
TTAGCTTTTCTTTTCTTTCTTTCTTTCTTCCTTTCTTTCTTTTTTTTTTCTTTTTTTAAGATGAAGTCTCACTCTTGTCCCCCAGGCTGGAGTG
TGATGGTGTGATCTCAGCTCACTGCAACCTCTGCCTCCCAGGTTCAAGTGATTCTCCTGCTTCAGCCCCCCACGAAGTAGCTGGGATTACAGGC
ACCTGCCACCACACCTGGCTAACTTTTGTGTTTTTAGTAGAGATGGGGTTCACCATGTTGGCCAGGCTGGTCTAGAACTCCTGACCTCAGGTGA
TCCACCTGCCTTGGCCTCCCAAAGTGCTGAGATTACAGGCGTGAGCCACCGCACCCAGCCAGATTTAGCTTTTCTATGTCGACAATCATACCAT
CTGCAAATAATGACAATTTTGTTTCTTCCTTTTCAGTGTTACACTTTCTAATTTTTTTTTTTGAGATGGAGTCTTGCTCTTGTCACCCGGCTGG
AGTGCAGTGGTGCGATCTCAGCTCACTGCAACCTCCACCTACCAGGTTCAAGCGATTCTCTTCCCTCAGCCTCCCGAGTAGCTGGGATTACAGA
CGACCGCCACCACACCCAGCTAATTTTTTGTATTTTTAGTACACACAGGGTTTCACCATGTTGGCCACGCTGGTCTCAAACTCCTGACCTCAGA
TGATTCACCCGCCTCAGCCTCCCAAAATGCTGGGATTACAGGCGTGACCCACTGCACCGGACCTATACTTTCTAATTTTTAAAAATCCTACTTC
ATTGACTAGGATCTAAAGTATAATATTGAATAGAAGTGGTGTTAGTGAAGATCCTTGTTTTATTTCTGATCTAAAGAGAATGCTTTCAACATTT
TACTGTTAGGTATGATGTTAGCTGTAATTTTTTGAAAAAGACATCTTTCAAGTCAAGGAAGTTCCCATTCTATTTTTAATTTGCTGAGAGTTCA
TATCACTGTTAAGTTTTTTTGAACTTTCTTCCCCTATTGAGATGGTCACATGAGTTTTCCATTTTAGTTTGTCAGTAAAATAAATTATATTAAA
TTGATTGTCTAATATTAAAGGGAGCTTGAATTTCTGTTCAGCCAATAAAAATGCACTGAGAACCTCCTTTGTGCTTGAGCTTCCTCTTGGTCAT
CTCTTTTCTACATGTGCTCATACTGTGCTTCTTTTGGTGA
HUMAN SEQUENCE - mRNA
ATGGATCCACCACGAGCGTCCCACTTGAGCCCTCGGAAGAAGAGACCCCGGCAGACGGGTGCCTTGATGGCCTCCTCTCCTCAAGACATCAAAT
TTCAAGATTTGGTCGTCTTCATTTTGGAGAAGAAAATGGGAACCACCCGCAGAGCGTTCCTCATGGAGCTGGCCCGCAGGAAAGGGTTCAGGGT
TGAAAATGAGCTCAGTGATTCTGTCACCCACATTGTAGCAGAGAACAACTCGGGTTCGGATGTTCTGGAGTGGCTTCAAGCACAGAAAGTACAA
GTCAGCTCACAACCAGAGCTCCTCGATGTCTCCTGGCTGATCGAATGCATAGGAGCAGGGAAACCGGTGGAAATGACAGGAAAACACCAGCTTG
TTGTCAGAAGACACTATTCAGATAGCACCAACCCAGGCCCCCCGAAGACTCCACCAATTGCTGTACAAAAGATCTCCCAGTATGCGTGTCAGAG
AAGAACCACTTTAAACAACTGTAACCAGATATTCACGGATGCCTTTGATATACTGGCTGAAAACTGTGAGTTTAGAGAAAATGAAGACTCCTGT
GTGACATTTATGAGAGCAGCTTCTGTATTGAAATCTCTGCCATTCACAATCATCAGTATGAAGGACACAGAAGGAATTCCCTGCCTGGGGTCCA
AGGTGAAGGGTATCATAGAGGAGATTATTGAAGATGGAGAAAGTTCTGAAGTTAAAGCTGTGTTAAATGATGAACGATATCAATCCTTCAAACT
CTTTACTTCTGTATTTGGAGTGGGGCTGAAGACTTCTGAGAAGTGGTTCAGGATGGGTTTCAGAACTCTGAGTAAAGTAAGGTCGGACAAAAGC
CTGAAATTTACACGAATGCAGAAAGCAGGATTTCTGTATTATGAAGACCTTGTCAGCTGTGTGACCAGGGCAGAAGCAGACGCCGTCAGTGTGC
TGGTTAAAGAGGCTGTCTGGGCATTTCTTCCGGATCCTTTCGTCACCATGACAGGAGGGTTCCCGAGGGGTAAGAAGATGGGGCATGATGTAGA
TTTTTTAATTACCAGCCCAGGATCAACAGAGGATGAAGAGCAACTTTTACAGAAAGTGATGAACTTATGGGAAAAGAAGGGATTACTTTTATAT
TATGACCTTGTGGAGTCAACATTTGAAAAGCTCAGGTTGCCTAGCAGGAAGGTTGATGCTTTGGATCATTTTCAAAAGTGCTTTCTGATTTTCA
AATTGCCTCGTCAAAGAGTGGACAGTGACCAGTCCAGCTGGCAGGAAGGAAAGACCTGGAAGGCCATCCGTGTGGATTTAGTTCTGTGCCCCTA
CGAGCGTCGTGCCTTTGCCCTGTTGGGATGGACTGGCTCCCCTCGGCAGTTTGAGAGAGACCTCCGGCGCTATGCCACACATGAGCGGAAGATG
ATTCTGGATAACCATGCTTTATATGACAAGACCAAGAGGATATTCCTCAAAGCAGAAAGTGAAGAAGAAATTTTTGCGCATCTGGGATTGGATT
ATATTGAACCGTGGGAAAGAAATGCCTAG
HUMAN SEQUENCE - CODING
ATGGATCCACCACGAGCGTCCCACTTGAGCCCTCGGAAGAAGAGACCCCGGCAGACGGGTGCCTTGATGGCCTCCTCTCCTCAAGACATCAAAT
TTCAAGATTTGGTCGTCTTCATTTTGGAGAAGAAAATGGGAACCACCCGCAGAGCGTTCCTCATGGAGCTGGCCCGCAGGAAAGGGTTCAGGGT
TGAAAATGAGCTCAGTGATTCTGTCACCCACATTGTAGCAGAGAACAACTCGGGTTCGGATGTTCTGGAGTGGCTTCAAGCACAGAAAGTACAA
GTCAGCTCACAACCAGAGCTCCTCGATGTCTCCTGGCTGATCGAATGCATACGAGCAGGGAAACCGGTGGAAATGACAGGAAAACACCAGCTTG
TTCTCAGAAGAGACTATTCAGATAGCACCAACCCAGGCCCCCCGAACACTCCACCAATTGCTGTACAAAAGATCTCCCAGTATGCGTGTCAGAG
AAGAACCACTTTAAACAACTGTAACCAGATATTCACGGATGCCTTTGATATACTGGCTGAAAACTGTGAGTTTAGAGAAAATGAAGACTCCTGT
GTGACATTTATGAGAGCAGCTTCTGTATTGAAATCTCTGCCATTCACAATCATCAGTATGAAGGACACAGAAGGAATTCCCTGCCTGGGGTCCA
AGGTGAAGGGTATCATAGAGGAGATTATTGAAGATGGAGAAAGTTCTGAAGTTAAAGCTGTGTTAAATGATGAACGATATCAATCCTTCAAACT
CTTTACTTCTGTATTTGGAGTGGGGCTGAAGACTTCTGAGAAGTGGTTCAGGATGGGTTTCAGAACTCTGAGTAAAGTAAGGTCGGACAAAAGC
CTGAAATTTACACGAATGCAGAAAGCAGGATTTCTGTATTATGAAGACCTTGTCAGCTGTGTGACCAGGGCAGAAGCAGAGGCCGTCAGTGTGC
TGGTTAAAGAGGCTGTCTGGGCATTTCTTCCGGATGCTTTCGTCACCATGACAGGAGGGTTCCGGAGGGGTAAGAAGATGGGGCATGATGTAGA
TTTTTTAATTACCAGCCCAGGATCAACAGAGGATGAAGAGCAACTTTTACAGAAAGTGATGAACTTATGGGAAAAGAAGGGATTACTTTTATAT
TATGACCTTGTGGAGTCAACATTTGAAAAGCTCAGGTTGCCTAGCAGGAAGGTTCATGCTTTGGATCATTTTCAAAAGTGCTTTCTGATTTTCA
AATTGCCTCGTCAAAGAGTGGACAGTGACCAGTCCAGCTGGCAGGAAGGAAAGACCTGGAAGGCCATCCGTGTGGATTTAGTTCTGTGCCCCTA
CGAGCGTCGTGCCTTTGCCCTGTTGGGATGGACTGGCTCCCCTCGGCAGTTTGAGAGAGACCTCCGGCGCTATGCCACACATGAGCGGAAGATG
ATTCTGGATAACCATGCTTTATATGACAAGACCAAGAGGATATTCCTCAAAGCAGAAAGTGAAGAAGAAATTTTTGCGCATCTGGGATTGGATT
ATATTGAACCGTGGGAAAGAAATGCCTAG

[0289] TABLE 25
MOUSE NOMENCLATURE
ICSGNM Znfn1a1
Celera mCG3994
HUMAN NOMENCLATURE
HGNC ZNFN1A1
Celera hCG1736622
MOUSE SEQUENCE - GENOMIC
TTTAGATAATTTTCTGTTGTATCACATTTTCCACTGGTAAATTTGGAGCAAATAAAATTCCACAAGATGGCTCCCTTTGACCTAATGGGGGGAA
AAATGTTTAATTTATCATCCTTTAAGAGACATGGAAATGAGTAGTTGACCTTTTGTAAGCTTATGTGAGACACTCTAAAAAGTGCCCCAGTGTT
CTTAATGGAAACTAGAGGAAGCCATCGACCCCCTAGTGCGAGCCCCACTTTTAGCCTGGAAAAAAAAAGTGGCCTTTTCTCCCTTGTTTGTGCT
GAGTTTTGGGTAGAGTAGAAAACTAAAGTGATAGAGACCTTTCATAAAAACAGATAAACTGTGTCTCTCGCTTCATCAAATGAAAGCCAGCGGC
TACGTATCTCAGGTCCCGGAAGCCAAGGTTGGCAGTTAATTTGTAAAACATGGTTTGGAAAGTTCAAGTTCTTCTCCAACCGAGAGTGCGCCAG
TGCTTTATCATGACGTTATATGTGAGGTTATATGTGTTTGATAGAATTTAAACGATTTTCACTTGAATTAAGAACATCCAGGACTTTTGTCAAA
GTCATGAACTTTTCTGAAAAGGACTTGGAGCATTGAAAACTCATTGTTGCTGTCTGTTGGGAGACTGCAGAACAGGCATTAAAACCGAGCTTCC
CTGTGTTTGGCTTTCTAAAGAGCAGTTTCTGCCCTATTATAAATAGACACGCCGATTTTTGTAACTGTACAAATGAGGAAGTTGTGAGGTTCCA
TGAGGCTCAGCTGATGACCCTTGTCTCCTGGGTTTGCATGAGGACCTTGTAGGCTGAAGGTGAAGGATTATAAAGCCGTCCAGATAGCCTGGGT
TGGCTGGGTACATCTTACACATTAGCCTCAATCTTGTGCATGGTGTGTTGTATTGGCATGACTATCATGAGGTCTGGGACAGGGGACCCTGCTT
CCTAGCCATACCATAGAATAAAACTTTTTAGAAATGTAGACATTCCTTAGGATCTAACTGGAAGGCCAATGCAGGTCGTCAAGTGGCATTTTTG
TCATTGTTCAGTTTATTGTCTGTAGTTGTTATCATATAACTGATTTTCCTTCTGTTGACACTACAGTTGTCTTGCTTATCCCCGTAGAAGTTGG
GTGAGCAAGGGTAACTTTCCAAAGTACTAAAGCCATTAAAAGACCATGATGTGACTTAGGGAACTCAGTTTTTAAATCTAAGTTATAGTACTGT
AAACATAGTTTTGAAAAAATAAGAGAACATATAACAAATTAATATTTTAATAGTTTTTATTAAAAAGTTATTTCATTTTAAGTGACTATGGTTG
ATTTTTATAGGTGCCGTCAATAACACCAACATCAGTTTCAGTACTTTCTGGAAAATGGCCACAGAGTCCATGTGGCCTACCCTAAGTGACAGCG
AGTGACAATGAGCTGGCAATCAGTAAATCATGCTCCTCTCTGGAGCAAAGACTAGATGCTCCTTAATAAGGCTGGGGTGTGCCAAAGTGGCCTT
TTATATTTAAAGAAGCAAAAGGCCAGTGTATGTCACAACAAACTCGGTGATGGTGCTGGCCTGGAGCGTGAGCAGCATCCCATCTCGTTGAGAC
GATGAGTAACATGAAAAGCATGTATGCTGGGACCTAGGAAGTTCTTCTCACTATCACAGTGAACAGTCAAGTCAGAGCACCTTCTCAGTTCCAC
TGGGTCAGTCTGCGTGTAAGGACTTCCAAACAATAGGATACCTCTATGAAGCTCTGTGTGGCTTAACTTCTTTAGGTCCAAACAAAATAAAGCC
TTTGGCAAACAAACTGGCCCAAACCCTTTTAGCTAAAGTAGAATAGCGTTGTAGAAACACCCGCATCAGAGTGCACTTGCTTAATGTTATAGAT
GTACACGTGGTTTCCCTCCACCACATACAGCTTTAAGGTTGTATTTTCAAGTATCCACTTGACTGAATTTACTTGTATGTCTACATAATTTCAC
TGCCGAAAGTCACAATGAGATATTGTNNNNNNNNNNNNNNNNNNNNNNNNNNNNNNNNNNNNNNNNNNNNNNNNTTACTTGGGAGAACCGAATT
CTACCGTCTCTTCTAACAATTACAAACTATCAGCACTTCGGGAATTATCTGTGTGGATCAGTCTTGTGGAAACCGTTGCTGTATTTTAAAGATA
GAAATCTCATTTGTGCTGCATCTCCCTTCCATCACACTCCTCTGGACTACACGTAATGGTCTTCTACAGCAAGAGGGCAGAAGACAATGCTTCT
CAACTTCGGTTTTCCGCCTTAAATGATGAAGTGTGAAAAGCCACTTATGTTTAAGGGAGCTACTTAAGAAGTGGCCAGTGTTGATGGTCCAAAT
CAGAAAGCATGCTAATTGTAACTGCGTGCCTCTCCTCAGTGGCTGTGAGTGGGTGGCTAGTATGGAGGTTAGAGAGGAAACACAGCCTTGTTGT
CTGATCATGGCTTACCTGGGGGAGGAGAGAGCCAAGGCACCACTGACTGTCATGTCAGCACACATGTGAGCCTCTTGCCTCCAATTCCATTGTC
TTTCTTATATAAAATCTACCATCTTTCTTGTTTTTTGATTCTAGCCTAGGGATTCACTCTGATGCCCAGCCTAGCCTGAAACTCATAAACTCAT
ATGTAGCCTAGGCTGCTAGTCCTGGGATTACAAGGGTGAGAGCTACAGTGCCTGGTTCCACCATTTTCTATTACGTGTCACAGAACAGGTACTC
AGTGTTGCCTTCTAATTGGGAAGCAATCTTTATTTTATTCTCTCTCTCTTTCTTTCTCCCCGCCCCGTGTGTGTGTGTACCTGTGTGTGATGGT
CTGCATGCATATGTATAAAGGCCAGAGGTCAAAATGGAGAATCTCCCTTATAGTTCCAGGCCAGAGTCTGCCCCTGACTGGCTCAATTGGCTGT
CAATCTAGCCTCACTGCTCTTTTGTGCCCACCTCCCCAGCACTGGAACTACAGTTGCCTTACTGGGCTTTCTCTGAGGGTTCCTGGGATTAAAC
TCAGGTCCTCACATTTGCCTGGCAACCGCTTACTGACTGAGGTATTCCTGTAGCCCCTTGGCTCCATTTTTAACAGACTTCCTCATTTCCCTTT
GACCCTCCTTCATATCAGTTTCTGCCCACAGAGGGGAAAATGTGAAGCCAGGGCTGCACATCTGAGTGATTTGCCTTCTGTGGCTTAGCTGACT
GGGGGAGGAGGGGCGTGGGGAACACTAAATTGGATTCCTATGCTCCTGTTTAAATCTTGTTTTTCATTGTGAGTTGTACCAGCAAAGCTCTGGG
AGATAATCATGAAAATGTGTAGATTGGCAGCTAATTTTTGAAAAAATGAAAAGAATCAGAGATGAAATAGGAGCGCTCAGAAGTTTTTATGTTC
TCCCAACCTGTTTTGTCAAATTGTTACACAAACCTAGAAGGTCTCTGACTAGATACAAAGACGTCGCATATTGCTGCTCTTTCTCGTGGAGCAT
CCCTTTTGAAAACTACAGAGTAATTCACAGTGATGTGATAAATTTGCAAAAAAAAAAATGGAATCTTCAGTGTATAGATGAAAAGACATGTCTT
TCACAGAATCATGTGTTTTATTCAAGAGGTCTGTGACCTAGGCATGTTTAATAGGTGATAGTCCCGAGCTCAACCCTGTCTTCCACATGCACAT
TTACTTCCTGCCTTCCGAGAAGGACTTTGAGTATTAAGTGGCTAGTCCCAAGTCTCCCTGGGACAGCTTCACCAGCAAGAAAGAAAACCACCAG
GCACATGTAACTGTATGGCCAGAATTTAGTTGCTGTACAAGTTCTGTTATGAGAAGTTTGTCAAGTTTCAGGCTATTGCAAAGAATGAGTTTAT
ATTCTAGCCAAATATGAGGGGCACCTTCCTCTGTCTGACATTTGGATCTTGTCTCCACTGTGGTGTGTTTATGGAGTTCTTAGAGCAGGTAGGA
AAGGCAGACACTGTCATCTGATGACTGGAAGTTCAGAGCTCAGCTCTGCTATTTGTTGGTGGTGGCCTTCGGCAGGCAACCCTTGCTTCATGAC
TCTGCTCACAGCCTCGGTCTTCTCTTCTGCAAAATGGAAATGATAAAGCAGATTCCTGTGACAAATCAGGATTGGCTGCCAGCTCCATGCTGGA
CTCTGAGGCAGGCTGCCTGAGAAAGTGCTGGGCAAGGCAGGTTGTTCACAGTCTCAGGAAGCTCGTTAGCAGTTTAGCTCTCAGATGCCTCGCA
TGTAATGGGCTGCCTCAGAGGTGCCTGTACTCCTCCTTTTCTTGCTATAGACCAGGTTCTCAAGGACCCTTATAAACACAAAAAGTTAATGTAC
ACTGTTTTTAAATCTCAGGACATTTTTCAAAGCTTATGGAAGTACAATACAGGCCAGGTAACAGACTAATGTCTACTGACCTCCACTCCTGCCT
ACAGCAAGCTTTATATGCCATGTGCTTAGCAGTTCTCCTGATAGCCATATTGTCTGGGTAACTTGAAAAGAAAGATGTTTGTGGTTTCTGCCTG
GCCTCGAGTTTTTTCATTTTGATTTAATAAATCTAGGCTCAGCTTGTGAAAATTCTGGGCCAGGCCCTGGGTTATGACATAAAGCACCACAGGA
AGAGGTGCTTGCTGAAGGGAGATCGGCCAGCACCCCTCCCTTGAGGACTTGTTGAGGTTCTGGGCTCTACTAAGTCCTCCTCTGGGCCTTGCAA
GTTAGACATGGGCCAGCACTAAGGAAGACCTGGCCTGGTGGCTTACCTGGAGACAGCAACTGCCCAGGGCTGTTGGATGCTTCTCCCAGGAGCC
AGCCAGGTTCCAGCCTGGTGGCAATGGCCTCTTCGTGGCAAGAGGAAAGGCTCCTGGCCTCCCAGGAAGACTCCCATGGTATGTAGTTTTGAAT
GTGTGCTTCCTGCCCAGTCCCCAGAGCAGTGAGGTCCTTCCTGTGCAGTCTTGAAACCTGGCTCCCAGCCTCCTCTTTCGCGCCTCTTCTCTAA
ACTTGGTGATGTGTTGAATCCTTCTGTCTGAATCAAGGGAATGAAACCTGTTTGTCCCTGTTTAATCAGAAGAAGAGAAAAACAGTCAAGAAGG
AAGAGGGTCAGGAGGGGAGAGAGGGAGACACAGAAATAAAGAGATGAGAAGAGAAGAGAGTTAGATGAAGAAGACAGGAGATGCAAAGAGATCC
CGAGGGATGGTGGGGTTATAAGGAAGGCCTCACTGCTCACTGTCCTAAAGAGCCAGCCTTGGGCAGCCTCTGTCATGCTGGCCTGCACTTATCT
CTGCATCTATTTCCCCTTGTGCAAGATTCAGAACTGCCTGCTCCAAAGAAACAATAAAAGCATTCATGTTTAGAAGAACTGCCCAGGTGAGAGC
TAGTTTACTGACATTGTGGCATGCTCTCCGGTGGGTTGCCTCTATCTGAGACTTGCTTGCTCTTCTCATGCAAAGTGGACCACCACAGCATGTT
TCTGTGACCGGCTTATTCCATCCAATACCCCTGCCCAGACCTGAAGATGGTAATAATTTGCTTTGGTGGTTAATTCCCTATAGTGAATGAAATC
TCCTTGTTTTATTTAAGGCTGAGACTGTAAGATAACTGAGCTCAAACTATTTGTCTTTTTAAGTTTTTAAAATGTATTCGATTTCTCTGACTCT
CTCTCTCTCTCTCTCTCTCTCTCTCTCTTTCATACAAGCACACATGGGGCAGGCAGTCTATGCAAGTGTATCTATGTATGAGTGTGTGTGCATG
TGGCATGTGGAGGTCAGAGGATAGCCTGTGAGAATCAGTTCTCTTCTTCTACCACGTGGCTCGTAGGGATCAAACTCAGGTTGCCAGACTTGAG
GGCATCACCATTATCTTTTAAGACATCTCTCTGGCCCTTTAAGTCCTACCCTTCCCCCTCAGATTCCCTGTATTGCTTTCACATGGCAGCAGAT
GTACTTTGTAGGTGTTTTGTAAGCAGTGCCTGGTGGTCAGCAGAGTACCCAGGATGGCCTAGACTCCTTCAGGACACTTAGGGATGTCCTTTGT
AAACTTTGCCTTAAAAGACCCCAAATGCATTTATCCCCCACTCTGCATTGGTAGGTTACTTCTTTAGTCTCTACCCCAAAAGATGCAGATCTTT
GGTTTTGGGACATTTGAGGGGCTTAAGAAGTCTCTGCAGAATTCGTAGGACACAGTACAGACTGACTCCAGCCCTTAGCTTAAAAATTATCAAG
TACCTGAAACTGTTGTTCTGAAACAAGGGACCCTGCTGGCAACCATACTAGTCACAAGTCCAGAGAGGGTGGGGTTGAAAGTGTGCATGCAAAT
CTAAGGGAGGTAGACTGTGTCACAAGGGTCCATATGCCCTGGCTGGCAGGGAAGGGAGTCTGTCGCTAAGTGACCCACAGAGCAGCCATGTACA
GAGGTGACCTACTGGGATCCTCACATGCACCTGTGTTACCACAGTACCCACTGGAACTTGCTCCAAGCACTGTTGGTGACCTCACTTGTCTGTC
CCCCTGAGGCATGACAGCTGGCTCCTTTGTCCATGAGATCACTGTTTGGAGAAGGGCAGGCACTCATACTCATGGCCCTGATAAAACATTTGTT
TCTATTTGACTTGGAAGTAGCTTGGGTATATTATCTGGGCTATCACTGCTATCATCTAGTGAACCAAGCCTTCAATGCATAGCCATTAAAATAC
AATAATGGCACTGTATAGTAGTTAAATTAAACATTTTAGCAGTACNNNNNNNNNNNNNNNNNNNNNNNNNNNNNNNNNNNNNNNNNNNNNNNNN
NNNNNNNNNNNNNNNNNNNNNNNNNNNNNNNNNNNNNNNNNNNNNNNNNNNNNNNNNNNNNNNNNNNNNNNNNNNNNNNNNNNNNNNNNNNNNN
NNNNNNNNNNNNNNNNNNNNNNNNNNNNNNNNNNNNNNNNNNNNNNNNNNNNNNNNNNNNNNNNNNNNNNNNNNNNNNNNNNNNNNNNNNNNNN
NNNNNNNNNNNNNNNNNNNNNNNNNNNNNNNNNNNNNNNNNNNNNNNNNNNNNNNNNNNNNNNNNNNNNNNNNNNNNNNNNNNNNNNNNNNNNN
NNNNNNNNNNNNNNNNNNNNNNNNNNNNNNNNNNNNNNNNNNNNNNNNNNNNNNNNNNNNNNNNNNNNNNNNNNNNNNNNNNNNNNNNNNNNNN
NNNNNNNNNNNNNNNNNNNNNNNNNNNNNNNNNNNNNNNNNNNNNNNNNNNNNNNNNNNNNNNNNNNNNNNNNNNNNNNNNNNNNNNNNNNNNN
NNNNNNNNNNNNNNNNNNNNNNNNNNNNNNNNNNNNNNNNNNNNNNNNNNNNNNNNNNNNNNNNNNNNNNNNNNNNNNNNNNNNNNNNNNNNNN
NNNNNNNNNNNNNNNNNNNNNNNNNNNNNNNNNNNNNNNNNNNNNNNNNNNNNNNNNNNNNNNNNNNNNNNNNNNNNNNNNNNNNNNNNNNNNN
NNNNNNNNNNNNNNNNNNNNNNNNNNNNNNNNNNNNNNNNNNNNNNNNNNNNNNNNNNNNNNNNNNNNNNNNNNNNNNNNNNNNNNNNNNNNNN
NNNNNNNNNNNNNNNNNNNNNNNNNNNNNNNNNNNNNNNNNNNNNNNNNNNNNNNNNNNNNNNNNNNNNNNNCCATCCACGTATACCATAAAAT
ATATTAATGATAAAAAAGATATATAAAGTTTTAATTATATAGATAACATCACAAAATTACTTATATAGCTATATGGCATGTGTATGTATACATA
TATAAAATAAATACTTTCATATATTAATATAAAACTACATGTACATATACCATGGCTTACATGTGTTCCGTGTTATATAAAACTATGTATATAG
GTGCCCTTGCCTACACAGTTTCCCAAACAACTGGAATCCCCCATCAATTTCCAGGTTTCTTTTAAACGTAGGCCTCAACCCATAGCCCCATAAC
TGAACCAAAGAGATGGAGTACCTAGAAAAAAAAACAAACAAAGGAACCTCACTTAGATTCACCAGATAACCTGAGTCTGCTGACAGCGATAGAT
GTCTAGCAGACCACGGTGAGCACTTTCAATGAAGCCACCAGAGTATTCTACTGGACATAGATTTCTTATCGAGCTACTGAGTGTTGCATACTAA
TAACATAACATCTAAGGGTACCCTAGTGCCCCGAGGTGTGGCCCAGCTAAGTCCACTGCATTCATTTTTCTCCCTCTCTGTCTCTAGGTCCCTC
CCTGATATTTGTGGTAGTCTGTGTACAGTTTATGGAGCACTCACCTGGCCCACTATAAGGCAGCCTTTTCCTATGGGTGTTTTCAATTCAAACC
AAGATGAGGAGCCAGCCACAGGCCTGCAAAGCAGGAGGTTTGAGCCCTCTCCTGGCTTGTTCTGTGATCTCTGTCTGTGAGAGAACGCTGGTGG
AGTCTGCAGCTAGAGCTGAAGAGTGGGGGACAAGGACAGAGCGTGTATTGCCCATCTGCCAGGCTGGAGGTGTATTCATTATTGATGGAGGTAG
TGCGTTGCTGTTCAGATATGCAGCCTGCCTGGGTAAATGAGACATTCTTCAGCAAATTGCTTCGTTTTTTGATTGCTGATTCTACGCGTGTCAC
CAAGCTGACTCAAGGTTCATCGATGCATGCTCAGTAAATTAGAAAGAACATAACTATGGATCAGCCAAGAGAATGAATTCTGTGCCTACAATGA
CCCAGGGCCATTTAATTTTCTGCTTAATTTTGTTGCAGTCAGTTTGCATTTTGGGTTATTATGCAGTAGGAAATTAACAATAAATAACAAATTT
GGTCCTCCTGTGCTTGTAATGATATTTTTATAAATCTTTGTAATGCTGTTTTTTAAAGGATCAAGGTCTGTGCTAGGCTGATACCCCAGCAAGT
ATGTGAAGAGGAAAATGCATTATTCTTGCTAGATAGCCTTGTTGTTAAATAGCATAAGCGTCTCTCTCTCTCTCTCTCTCTCTCTCTCTCTNNN
NNNNNNNNNNNNNNNNNNNNNNNNNNNNNNNNNNNNNNNNNNNNNNTCCCTCCCCATATTTTTGGTTTAAAGTAAAATCCATTTCTCTCTTCTC
TTCTCAGATAACCTGAAGACAATGGATGTCGATGAGGGTCAAGACATGTCCCAAGTTTCAGGTGAGACCTTGGGTGATAGTTGTATGTCCAGAA
GTTGTGCTAGCTGTCCTTCGGGAAGCTAGCAAGGCTGCCATAAAAGAAAAGGCTCAGAGCCACGTGTGTCTGTGTTCAGAGAACTTGAACATAA
AAACCTCCCAAGTGAGATTAGGTAGTGTGAACTCTAACAGCAATTCAACCCGGATTAAGGAAATGCTGTACTTTTGGAGACAGTTGTAATAGAT
TTGTCTACCAAACATACAGAACACATGCCAAAGGTGGCATTTAAAAAATAAGAGATGAGAGAGGAAGAGGAGGCCACAGCAGCAATGAAAAGAA
AGCCTAGCCAACGACGGAGCCCAGTTCAGAGTCAGAGCACTTGCCACGTGAGAACAGCAAATCCTTTCTCATCTTACCAGACTGAGAAAGCGAA
ACACTCTGGCTAATAGAAAGGTGGAGCTGGGTTCCAGGCTCTCCAGTGGGCAGCACTGACGGTGGCCCATCCAGTACATCCTGCCCTGCTCCTG
CACGCATGAGTGTATGATGTCCGGTTCTGCCTGGCCCTGCATCTGGACAGTACCTGGAAGCAGACTTCCTGGACTTGGAGATTCAGTCAGTGTT
TCTGTTTCACAGCCTCCAGGCAGTTCCCCAGTCCCATGAGCCTGTCCTCTCTATGCCACTGGCCAGCCTGCCATCTGTGCCTTGGGCAAGCTGC
CTCCTCAGGTTTTTGAAGAGTTGTTGATTTGTTTGTAAGTTTGCATTTTGGTCCAGGTGCCCCTCACAGGACCCGCCCTTAATATGTGGTGTTG
CCTGGATCACTGGGTGACCTGACCCTCTGGAGATGGGCTTGTGGCAAGTCCTGTGCTCTGTCAGCTCTTTCTTTCCATTGTAAGGCTTCAGACT
TAAACTTCCCACAATGCAAAGAATAATGAATGGCTACTTTTAAAAGGTGTTGGTCTTATGCTCTCCTAGCTGAAAGTAATGAATGTGGTCTCTT
CTCTATGCAAACAAACCTTGTTCTTGTTATACAATCTACCCACTTCAGTTTAAGGAATTCATCTTAAAAATAAACTCTTACAAGTAGACAGAGC
ATGTAAGCACATGCTCACTGTGGTGTTGTCATTAGTACTTAAAAAACTATGGTGTGTGCACAGACCCGAAGCCTCGGCTCTTAAAAAGGAGGAG
GATATGAATATGCAGGTATGGAAAGAAATCTGAAGTGTATATCAAAATGGGAAAGATACAAAGTATGATTCCATGTGGAAATATAAATTGCACA
CACGTGTGCACACATTCTGCATGCTTCCATGAACAGTTACAGTGATTCTAGAGTGTAGATTGACCTGGACTTCCCCCAAAGCTGAAGGTTAGAA
GAAATCCTGGCGTGCTGAGGGGGGAGGGGAAGACATTGTTTTTTTCTTGTACTCTGTATAGTTATTTAACTTCCTTTTCTTTTGTGTTTCTTAA
GCAAATCTGTTAAATGAAAAGATGCTGTTTAGCTTGTTGTATTTAGCTTCCCTTGCCATCGCCCAAAGCCCAGGAAAATGGTGCTAAACATAAT
TAAAATAGGGTGATGATCAGGCTCTGCTTTTGAAAGACCTCACCTACGGGCTCACCCCTTACAGCAGGATTGTTTGGAATATCACAGAAACAGG
CATGTGGAGAAACTCCAAGGGCAAGAAGAATCCCATCTGCTTGTCTTTGCTGCTTTCACCTCAGATGAGTTCTCAGTTTTTATGTTTCAAGATG
CACTCAGTGGTCCACACCCTTGGGCCACATGCCGCCTACTGTCTGACGTCCTAATACCAAAACATTAGGCTGGAGATGAGACCAACCCAGATGA
CTATCAGTGAAAAAATGGGAAAAGTGTGGTATGTGTCTATAACAGAATATTATTTAGTTATGAATGTTGGAATTGATCATTAAGGACAACATGG
ATAGACTCCAAGAGCATTGAGTTAAGTGAAAGAGCCCAGGTTCTAAAAACCAAAGGCAGGCACACACTCTGCTTCTTCTGAATTTGTTCTTATA
AATGAATGGTCTGGGTTGGTGGATTTGCCACCCACACATATTCAAGGGTTGCACACTATATGTATGACCGAAATCTCAAACATCACACTGTACC
TCATAAACATGAGCAATTATTGGACGTCAATAACAAAATTTAAAACAATAAAGATACAACTTCCCCCAGCCTCGAAAACCACCTCTAAAATGTT
AACTATGATGGGTAGTCAGTATTTTCATTTTTCCATTTGATCCCAAGACTTCCAAAAACTTTAGTTTCTTGAACTTCTTTTTCTTGCCCTTAAC
ATTATGCTGGATGGTGTGTATTGTAGGTTGTTCTCAAGGAGAGGACTGTTGAGGGCAGGGACAGCAACACAGCCTGAAAAAACCCTTCACTTTC
ATTTTTTGTCTGAAAATATTTGGTCTGAAATTTTCTCTGTATGCCCATAGCAAAGGAATGACACCCCTCACCATGATACAGCCGCTGCATTCTG
TTCAGCCTTGAACATCCTGAACGATGATTAGAGCATCATAGAGTGTGTCACACTTAGGAAAGAATTACATATTGCTTTTGCACTCCTTTAAATT
TGATAACCTCCCAATTCAAAGCAATGCTTCCTCCTTTGTCTGCTAAGACTGGGAAGAAAGTAGGAAGGGTTCATGTAGGAAGGTTGACTTGTTA
TTTTGTTTTGTTTTGTTTTTCTTTTTTTCTTGTTTTGTTTCTCTTGCATCCCTGGGGATGGAACTCAGGACTTTATTCATGCAAGACAGGCCAC
TGAGCTATAATCCTAGCCTGGGAGTTAGCTTTCTTCATAAGAAATTGAGGGATATGTTACTGAGTCATTTCTTTTTCATAAGATGTTCAAACCT
AGCAGTTTCATAGGATTCCCCCTTAACATGTGCAATACCTTAGAAACACATTCCTTACTACACCCCTCTCTTCAAGGCCCTTGCATTCTTCTTC
CCTGGGTCTACTCTAAATATGGACTGTGCTCTAATTGGTGTCACCTACAGCATCAATCCTAGAGGTTGATGGTCATTGCAGATCATGCTCACTG
ACTTGAGTCTACGAATTGTGGAAAGCTTTCTGATAGAAACTCGCAGCTGTGTCCAGCCTTATTACACTGTCATCTATCAAGACCACACTAAGGT
GCTTCCTTTGGAGGTCCTTAACTCACTTTCTGATGGAAGCTCATTTCCTGGTCTTCCCTTCATCAGAGTTTTCACGTTACTCATGCGTTTTTGT
TTGCCTTCTAAAGAAAGAGGCAGTCTATGGGAAGAACCTTCTGGGAGTTGAAAGACCAACTCCACACCCATTTCTGATTGCAGCTGTGCCACCC
AAGCCAATGCTCTTGCCTCCTAAACCATGGTGTGTCTCCTATAGCAGCAGGAACTCTGGCCAGTGAATCTCTGAGGCTCCTCTGGCTCATATCA
CCTGAACTCTGTATTTTATATTTTCTTAATGCTGTTTGTAATGTGTTTGTTGGAACGTGCACACAAGGAGTACACCCTGTAGACATACATAATC
TGTGTAGGGAAGAGGAGCCTCATATATATTAAATAACAAAAGTATTCTACCTAGTTAATCATAGTAAATCACATTGATTGAGCACTTGGAACTA
CCCAAATAACATCCTAAGCATTTTCTCATTTTTACCTTATAAAAACCCACTGAAGGAGGATGTAGTTACCTCCAAGTTGCAGAAAGCTAAGACT
CAGCCTATAAGAAATTGACAGGAAGTCCCATAGGGAGCCAGACAGTTATGAGCCTACTTCAGCCCTAGGCTAGAAGCAACTTACTCTCCTCAAG
TGGTGGCTCTGTAGTGAATACATCTATTACCCTGGTATTACTCTCCCTTAAGCCCCTCTGTATCTTACAGATGCATGCCTTTGGGAGAGATTTC
TAGAGATTTGCTGGGTAGCTGGGCAAATCATAATACACTTAAGAACTCATTTACTTTTAGTTTCCGATTAAGGGCACAATTTCTTTAATTTGAC
CACAAACTTCTCAAAGACATACTTGACACACAGGCAACAGGCAAGTTAAGTATAAATTGGTGTGATTATAATTTCACCAGAAGTGTTGTTTTCT
AAGTAAGTGAAATTTTGCTTGCCTCTTCAGAGTCATTCCATTTGACTTATTAAGCATTTGCTGTCTTCCTTTCTCCACCCTATTGCTTTTGCTA
CCTGGTAAAGGTACCACATAGCCTATGCCTCTGTGGTGTACTACAGGTTACCAAGAGTTTACTTAACAAGTTGGTGTTCATGCTTGTGATTAAT
TTTCATCATGACCTGCTGAACTATGCCCAAATCATGGATTCTAGCCTCTTGTTATACCTGAGGAGAGAATTCTAAAGTAGTGGCCATCGCTCCT
TCCCATCAGCTCTCCAATTGCTTTAATCAGACCTATAACCCAGGTTAATCATTGTATTCATAATTGGGGTGTGTTGGCTTTACCTAGCACTTGG
GGGTTTTTTTGTTTTGTTTTGTTTTTTTAAGTAATGATTCAACTGGTTAGTGGGGCAAAAGCCAATATGCACAATAACTTGGTCTATCAGAAAG
GTTTTCATGAGATGGTAAATTTTCTGCAGGAAGACCTCCCAGCAGTAAAAGAATGCAAAGATCCTTGGTCATCAAGCCCCCCTGCCCCCAGAGT
GGTGGATGTCTCTGCAACAGAACTCACACTGGGGGCTTTTAGGCAAATCAGAGGACCTCTTAAAAACCATCAGTCAGCCGTGGTGACGCAGGGT
TGAATTAATGCCACGCTCTTGGCTGCCATGTTAATGCCATGTTCCTTCAGGTCTGATTTTGTACTCTATACCCCTATACACATGGGGACTGACC
TGTTGTTCCTCCTTCTCCCTGTGTGGTTTCATCTGCTCTGAGAGTTCCTATTGATCTGTCTGACCCACACCGTTTTAGAATCACAATCCCTACT
GTTTTCATTACACCGTGTCCTTCATGTAGGAAAAGTACCAGGATATAAGATGGGAATAGAGGTGAGATGGCCTTTTAATGTACAACTTCAGCCA
GCTGTGATTCTTAAGAAGTCCAGCTGTTACTATGAACATCATCCTTAAGATAGAGTTGAGTTTTGTCCTTTCAAAGATGGATCAGCCACACTTT
TAAAACTGAGTAACCACCATGTGTCTTTTTGCATGCAATTAACTAATCATGAAATGGACTGAGAGTGTGGCCTGCTTTTATTGGCTAATCCTAG
ATCTTTATCACACATACCCCTCCCTCAAGCTCTAGTGTGGCATGGCATGTCCACAGGCCCAGAAGTATCATGGATGATAATATCAAAGTTATTA
TATGGAAGACCATCACAACAAAACAAGTCAAAGCAGTTCCATTTCCCCGTCTCCAATTCCCACTCAATATTAATGCCAGCTGGTGAATCACGGG
TCCCCATGGCTCCACTCTCCGTCTCATGTACCAGCCTCTTAGGCTATGGCGTTGTGGCCAGGGGCCCCACTCCCAATCTCATGGAGGTTCTTTT
TATAATTATTTCTTTTTTTTTTTTTTGAGGTTATAGCTGTCATTTTCCTCTCCCCTCTGCTCTTTGGGGGTTATTTACTGGCCTTTCAAAAGGC
AAGTGGTGTGGGTATCTGCTAACCAGCCTGCCACTTCCCCACTTCAATGTCTCTACATTATAAAGAATATCTGTTTAACCAGATTTCTGTGTGC
TTATTGTCTTTGAATACCTCCCTAACATCCCCAAACTTTGAAAACCTTCATTCTGGGCCATGACTCTGTATGACTGAAGCTGTCAAATTGTTTG
TATACCTTCTGCATGCTCCTGGATAGAGGCTTTCCTTGCTTATTGCAAAGATGAGAAGCAGAGCCACAAGTCCTGCCACTGTTACTGTAAATGT
CTTCTATTTAGGGTGAGGGAGACAGTGCTGACTACTGCTCCAAGATTCTAGCACAATGTGAACACTTTTAATCAGCCTCTTGGGCTTTTTGTTT
TTCTTTGGGAAATTATTATAATCTTACCCCATCTTTAACTATTTATCTCGTATCAGCTATCCAAATATACCCAATAATGCTCTTTCTGAAAATA
TGCCAGTTGCTCTAATCAAGCTAACCTGGGATAGTACATTGTGATGTCTCTTTCTTAGCGATTGTAACACTATTCCCCAAAGCATGTCTTTGGT
GCAGATTCTATTTTAAAGATTCCAGTAAAGCTTGTCTCATGTACTTATTTTAATGATCTTTTCTGGCTCCTAAAAAATGTTGGTGCAGTTCTTG
TGAGTTGATCCAATTTTCATACCATCTCTGTTCGTGTTCTCAGAAAATTTTACTCATTGGCATGTTGTTTACATAATGCTCACAAAAGTCTGGG
TTAGTGTTTGTTGGGAGGTCATTTCGCCTATTGGGCCAAGTTGCCAACTCAACGGGCACACGTCTGGTAGCCTACCTTCAGGATCTTGAGCCAG
ACTTTCTTTTGTAAGTAGCTACAATGAGTCAGTCAGCATAGATTTAGGGCCTCACTGGCTGTTTCTCCTATTCAGTTTGAGCCTGTCAATCCCT
TTAAATCAGCTCCAGAAAGGTGCACACTTTCAGAGCTCCAGCCTTGGTGAGAAGAGAGCGTTTTCTACCAGCGACAGCTTCACTGTGTCGATCT
CAATTTCTCCATCCTGGAGCTAGACAAACTTCATTCTAACCCAGCCAATGATTGCTAGGGAGATGGGATTAGGAGGGGAGTGAGGGGGTAACTG
GAAGTGAAAGTGGCCAAAAAGCTGTCTACACGTGTATGAGATTATCAAATAATAACACAGAAGGGAAGGAGGCAGAGGGAAGGACCAAAAAAAG
CTGTATATGCATGTGTGAGGTTTTCAAATAATAGCAAAGAAGGAAGAACGGGAGAGGAAGGGAGAATGGGAACCCTACTTTATGATGTGTAACA
AACTTTTATCTTTGTATGCTTTTGAGTTTGTCAAAGCACGAGAAGAGCCTCAGAAATACAGCCACCATTAGCCCAGCAGTAACATTTCCAAAGA
TGTATACAATGATGATCTTTAAGGATATGTCCAAAATTGACTGAAAGGAGGTTCAGTGCAAAATTGATTATATAGACTCAAAACAATATATAGA
GTCAAAAGAAGCAAAACAATGAACCTAATTCCTTATTTCCCCTATAAATAAAATTGTAGAAATAGGTTTGTATCAACAAATTGTATTGAGGANN
NNNNNNNNNNNNNNNNNNTATATCAATATTTATGTAGTAATTTGGTATCAGGAATAGTTAAGGCCACAGATGTTGTTTTGCTTTTTGTTGTTTT
CCTTTTGTAAATCTTTGTTCTGTCCTCTGATGTCTATTTAGTGCTTAGCAGTGATATTCATTCCTAGGAAGAGAAATATGTATTTGTCCTAACA
GGGAAGCATTAATTCAGAGCAGGTACCCCTTCAGTCTGCCCTAGTGCTGTCAAGGTGAAGCCCAGGCAGTGAGGTTTTCCCAGCAGCTGACAAC
GCCTGCCAGAAACTCAAGCTCTGATTTGTGTCTGCAGGAAAGGAGAGCCCCCCAGTCAGTGACACTCCAGATGAAGGGGATGAGCCCATGCCTG
TCCCTGAGGACCTGTCCACTACCTCTCGAGCACAGCAGAACTCCAAGAGTGATCGAGGCATGGGTAAGTGGCTCACCCTGCTGTCCTGCAGGCT
GTAGCATATGCACAGTTAGGAAATGGCTGCTGTGTAGGATAAGGTAGGTGGGCTCATTCCCTCTTGTCCTCTGAGGTCAGTCACATAACAGGGT
TTCCTCAAGTTGGGATATGGGTGATCTGCTTTAATTGATGTGTTTATTTTTAAGGTGGTTTTCTGTTGACTACAGGTGATCTTGGTGTTACTAT
GTGCTGAACAACATGGAACTGTATGAAATACATTTGTATTAATTTAAAGGTCACTTTAAATCAAGGAGTTCGGCCAGTGTTGGAGCATATAGAT
CTCCTTTGCTTAGTCCTGAAAACACCCTGTATGCTAGGGGTTCTTTTCAAAACATAAACAGATGGTCACAACCTGCCTGTGGTTCTCATCACCA
AGCGAGAGGCTCATTCTGGGAAACAGGAGAAATTGTCCTTTGACCATGCCACACAGGGAGAGCCCCTACTTCACAGTCAGGCTAAGGACTTAGT
TCTTGTGGAGAAAGAGGTGGGCTTGCCCAGAATTTCCACAGCTGCTGTGGAACCTCTGCAGAATCATCATGCTGTAGGTGTGATTTAAGGAACC
GAAAACCAGGCTGGTTCCTGGAGAGCCCGAAAGATGTGTGTATTTCACGTGTCATAGATGAATAGGTCACAAGTGCTGTGGGCACCTTGTCCCT
TTGGCCGTGTAGTGTGAGCAGGGAGCAGGCTTCGCTGGCACTGCTGGCTGGCTCCCTCACGGGCCTTTGCATCCTAAATCAAGTGCTCAGTTCC
AGGTGCCCTTGGTATGCGCACTCTGTAGAACATGTCATTCCCAGGGTCTTCTCTCCCTGACTGTCACCATGTACTATTTTCAGTTCAATTTCCT
TTCAAGATGAAGTTTAGAAAGTAATCATTTCAAACTTGAAAAATTAAAATGCCTTGGTAAACGTTTTGCCTGATTTGGCAGTAGCAGTTGACTT
GGCCCTGAAGACAGGAGGAGGCTATTTGATGTGAGCCTCAGAAACAAAGAGAGCAAAGTTTTTGGTGGACAACTAGAAGCCACAACATCACCTG
CTAGAAAAACTGAGAGCAAAAGCCCAGAGAACAGATAGTACATGGGAAAGGGATGAGAAAACCCACCATTGGAACACCCCCAGCCACACTACAT
GGTGGCCGCCTTGTCCTGTGTGATTGTTGAAGGAAATCCACCCATTTCCACATGTAGGCTATATATAGCCTGTAAGTTTCATAATGTGTAGAAT
ATAACATTAAATAGAATGGGGTAATATCTAGGAGGTATTCACAAATTACAGGAAATAAAGTTGAAGCAATACTTCACCACACTGCCTTATGGAG
TGGCTCATGAGAATCATGGATTAAAAAGGACAGGGGACCAGGAATCAGGAGAGTTTGGAATAGGATCAAAGGGCAACAGGGTCAAGCAAGAGTC
ACCATGGAAACAGGGAGGCAGGAGGGCAAGTCTCAGAAGGGACACATCCAAGATTCTCGTCCCTGACTGTGACCCTCAGGGCAGAACTTCTCAT
TTCTCTGAGCCTCCATTTTCCTCATGTGAGCGAGAGCACTACCGCATGCCCCAGAGTGGCTTTGTGGGCCAGATGAATAAAGCAGAAGACAGAA
TGGCAGACAGACTAAAAGAGAGAGAAAGTGTGTGGGTGCATCGCAGGCACAAATGTTCCTAGGGACTGTTCCTAGAGAAAAGGGATCCATGCGG
CCTCAGTAGTAAGATGAGGACAGACAACAGAGCATAAGGAAGAGATGAGTCCATTAATAAAAAACGGACCCATAAAACACGCAAAATTGAAAAC
AGCCAGGAGAGAGAGAGAAATGTGTTAGAGAAGGACAGCGACAAGAGGAGACTGACTGCAGATTGAGAGCTCAAGCCTGTGGAGTGACCAGCAG
TGAGGACGCAACAACCTGGGTCACTCAGTGGAGAGAAATGGGCCTGCTACTGACAGCTGTGACCATGCCAGGAGACTCTGTACCAGACAAGAAC
AGACAGAGTTAGAAAACAAGTGGTGAGAGACTGGAAACCAGCCCCTGACTGGCTAGTGGGTCATTCCCAGGATTAGAAAAGTTGGGGTTTCACA
CACTGCTGCTTTCTGTAATAATGCTGAAAGGACACCATAGATCTATGTATAAAAATTGGGACAATGGCAGTCAGAGGCAGAGTAATACAAGCAC
CATTATTGGGCCTCCATTTTCTTCAAAGTCTGAATAAGAAGAAAAAAAGATTTGAAGAGCTGCTTGAAGAATTTAAGTCAGACCCGAAGAAGAA
CTTTCTGGAAAGCAGGGATTTAGTCATCGGAACGGTCTACTTAATGGCACTGTGGCTTGTTCTTCTGAAGTTATCTCTTTAATAATGAGAACTC
TCAGCTCTCTGAAGTGGTTGTGTCTGAAACCATTTGAAGCTGACGAAGCACTCAATTGACCTCTTCTGGCAAACCTGAGTTTACCAAGTCTCAG
ATGTTTGCTGGAAGAAGGGCAGAGCCGATTGCACTGACACAGAACTCTAGGGCCTCATAAAGGCCTTCCTGTGGGACAGTGTCCAGGTTGATGT
CTAGAGAGCAGATGGGCAACTATAAAGAAAAGTGATGGCTCAATACTCTATTCCTTTGCTCAGTAATACATCTTCCTTCTTTCTGGTGAGTTTC
CCCCTGGTTTGGGTTTGCTCTTGTCACTTGTGGCCTAGAAGAGAACAGACCTGTGCTCTCCTTCCCAGCTGGCAAGCTGGGGATTGTGGCCAAA
CTGTGATAAAATCCAGAGCACCACTCTGTTTGAATGTGACCATAGGGAAGCTGGGACAGAGAGAGAAGGGAACCCAGAATGAAAGGTGGAATTC
CAGGCTAAATGCACAAACACCTAGAAAAAGCCAAGCCAGTATGAGGCTTGGCAGAGTCCAAGGGAAAAGCCAATAGAAGGATAGGCCTGCTCAA
GGCTGAGCTGAAAATGGGATGTTGCTAAGCAGGGGAGGCTAAGTCCATGACTGAGCACTGGACAATCTGTGCAGAACCCAGACAGAAGGAAATG
GGATTGAACTCTGAGAAGGTGCATTCTAGGATATGCACCCTTCAGTCTCCCTTTGAGTGTATCTCAATCTGATATTCATCTGCCAGATCTGAGA
GAGGCTGACCCTGTACAGCCTCTCAGTGAGTGCTTGCACCTAACTTTTACTCTTCTTAGCTTAGATGAGAAGAGAGAAAACAGATACAAAAGAA
AATCTACATTTTTCATTCTTCTAGGAATCCTGAAATAGTGAAGTGTATAAAAATATTGATCTTCGTTTTTATTTTGTTTGGTTGTCTCCTCCTC
CTCCTCCTCCTCTTCCTCTTCCTCCTCCTCTTCTTCCTCCTCCTTCCCCTCCTCCCCCTCCTCTTCCTCCTCCCCCTCTTCCTGTTCTTTTTTC
TCCTCCTCTTCCTCCTCTTTCCTTCTCCTCCTGCTCTTTCTCCTCCTTCATTTCTTCTTCTTCTTCCTCCTCCTCCTCCTTCTTCTGTATTCAT
TACATTGACTCAGCCATGAGGGCAGGGCTGAAGCAGGAACTATAAGCAATCATTTTAAGTTCTCATTGTATATAGGCAATGTACATGTTACTGT
GTCACATGAGAACATTTAGAAATATATTGTCACATATTGACAACTAATTGTCCTGTGCCAGTGTCCTCTCCCATGTGTATGTGTGGGGGTAGCA
ATAAGTTTTGGTTGGCATACAAAATCTGGGATTCACTGTATCATTTTTAAACATACTATGGCACCAGGCTTATTCGCCCCATCACTACCATCAA
CTTTAGGCAGTCAAGGATGGGTCCTCAGGATATAGAGCAGCCATGAGATTCTAGGCCTAGGAGAAAGAAGGGCTGGAGGGAGGTTTTTAGGACT
GAAAGAGAGACTGCAAGCCTGGCTGGCGAGTGGGAAGCTCGCTTCAAGTACGGATGTCAGCCCAGTTATCTAATCAGCAGCCAAAGGAAGTTGT
TTTTATCAGTGAAATGCATCTCTTCTGAAGCGACAGCCCCACTTCAGCCTAGAAGCAGCATTATCTGGCAGCATCTGAGCAGCTGCAGCAAGTG
CAGGGACTGGAGGTGCAAGTAGGCAGGATCTCCAGCCTCGGGAGCTGCCACCAGCACTGAGTTCCTCTTTTCTGGAGGTGACTGAAGTATGTAG
GTTGGCTCCGTGTGTGCCTTGATTTCTCTTTCTCCCTTCCTTGCCCCGCTTCAGAGCTGAACGTAGCAGAGCACATCTGTCAAATTCAATACTG
TTCATAATGTAACTTACTATCTCTGACCTGAAATGCTTGTAAAAGCCACTGGTACTCCACCATAGGCATTTCTAAGTCAGCTCAGAAGTATTCC
TTTTTCATGGATTTCTCAAAACATGAGACAGTAAGCAGTGGTATAAAAACTATTTTCCCACCCGCCCTCTCTTTCCATCAGAGGAATGAGAATT
GCAGGCTGCCACCCAGGTCTTTGGCCTTCTGCATGCATCTCCCTTACTCTGTCAACCAGTAGGAATCACAAAGATCTTCACAGACCATCCTAAC
AGTTGGTTATTCCTGAACGTTGAAGGGACTCTGCATATCACCTGTCATCATGGATTGGGCTTGGGTGTACACAGGGAGACCAAGCAGCAGGAAT
TTAAATCCATTCCTTGGAGGAAACAGAAACTCAAATGTGTCAGTCAGCACCTGTGTGTGCATCCTTGCTTCTGTGTATGTGGGCATTATGTGTT
GTGTGTATGATGGATGAATGCATTTATGTGCATGCTAGATGTGTATGTGCTAGTTTATGTGTTCCTGTGGGTGGCATGTGCATATATGTGTATA
TTTGTGCACATGTATAGTATATGTCCATATAAATATGTAATATTTTATGCATGTGTGTTTGATATATAAATATGTGTAGTGTATTAGGGTATGA
ATGTGTGAGGTATGTAAACAATGTATATGCATATGTTGTGCTGTGTATTTATGATGTGTTTGTACATGTAATATATACGTATGGTATATGGTAT
GTGCTATGTGTAGTATATATGTATATCTGTATGGGATGTGTATTTGTCATAGTATGTGTGTGGTATATCTATGATATTTTATGTATCACAGAGT
ATATGGGTATGGCAAGTTTATAGTGTGTATCTGTGATGAGTATGAGTGTTTGTATGATGTGTAGCAGTGTTTGAGTAGTGTGTCTGGTATATAT
TTGGTATCTGTGACTTGTGTTATATGTATGTTTGTACCATGTGTGTGGTATGTATATATGTGGCATGTATGTGTGTGGCTTGTATGTGGTATGT
GTGATTTGTGTAATATATATGTAATATTATATATGTCTGTGTCTTGTGTGTAGTGCTTATGTATGGAGTATATATGTGGTGTATATATGTTTGG
TATGTGTTATATGTGTATGGTGTGCAGGGAGCTTGTATGTGCTGTGTATGTATGTGGTATTCATGTGTGTAGTTGAACAATTTGTGTAGTACTA
TGTTGTACACACTGTGACATGTGTGGTGATATGTATATGTGTTATGTGTTATGAGATAAACGTGTGGTTGTTGCTTTTTCTACACTTACAGAAA
TTATGTTAGGGTATATGAAAGTACACGCTGCATGCCGTGGGAGCATGTATAGACATTAAAATACAACTCACAAAAGTCAGTTCTCTTTGTCCAC
CAGTGGGTTCCATGGACTGAAGTCTGGCCATTAAGCTTTGCAGAAAGCACCTTTACCGACTAAGCTATCTTACTAGCTCAAATGTGTGGATCTT
GACAGTATGCCATGGCTATTTTCTTGGAGATTCTGGCTTTCAACTAGATGCTTTAGAAATAGTTAGAAGCCCTGGTTCTGGTGTGTCCTAAGAT
CATCAGTGCTGCGGTGACTGCCATCTCTGCACCTAGGAGATGAGGGGTTCGCCTTACCTAAGCAATACATGCACATTATACTCTGACATGGAGT
TCACCCCAGCCAATATCCATGATGTTGTTAATGGCATAATATTAATGTCAATAACTCGTGTTGTGCCAATGACAAAAATTACATATCATCTCAG
TTGGGCAGCCCTTTGCCTGAGATTCCATTTGCAAGTGACATGGGGCAGAAGCCTGGACACTAAGCCTGACATGAAATCACACCCTGGGTCCCAG
AGAGGACAACTCCAGGTCTCTGAAAGAACTTCACTACCTTCCTGTCTGAACCATCAACTAGAACTCCTCCCCATAAGAGGCCTAAGCCAGCTCT
GCCAGGCCCTGGCAGAGAGAGAATGGAGACAAATAAGCTAATGTATGGTTGGGAAGAACATGGCTTTCCACTTTGGGCTAGCCTCTTCCTGTAC
ATAAAGGTCACTCTACAACCCACTTAGTGCCTTGTATTTGTAGACTGCTGACCATGAAATCCTGAAATTTCTTTAGTATCTGACCCAAAACAGA
ACCACTTACATGCAAAGCACAACCCTCCCCCAACCCGTGCTGAATTCATTTTAGTATTTGTGTACATGTTGTTTGGTCAGCTCCCAGCTTTGTT
TAGGATGTCTGGACCTCAGAGATAGAAACTCATCCCAGAAACCTTTAGTGGATAAGATGGACTCCCACTGCCTTGGAAACCTTGACAACTAAAG
AAAGCTGTAGTGCCTGTGTTACAACGACACAACGATAAACTCACAAGAATATGAGCTTTTTGTAGAGAATATATTCAAAGAATAAATAGTGTGT
CCTAACTGGGCTGAGGATTGGGGTTCACGAGGGGTTCAGATTCATGCAGTAGCTGGTATGCTCAGCAGTATGAGAGGGAGCCAGGCCTATTTTA
ACTGTAGAATGAGTTGAGCAAAGAGGGAAGAATGCTTAAAAGCAAAAGAGTAGAGGCACAAGAGGACCCCAGCATCTTGATCTGGGGTGTGAGC
AGTGGTGCAGGCAAGGGGCCAGGTGATACCTCCAGCTGCTTTACATAGTAGACTTTGTTCTCACGATAGCAACTGTTAGGAGTCTTGGTCTCAG
AGAAGGGTATTTGAACCTGTGCCAAGCAGTGTGAGTAAGGAGAAGTCAGGGAGAGATGGGGTTTGTCTACTGTCTTGGTATAGGTCCATGGGTA
TAGTGACCAACTACAGTGATTGTGGCAACAATGATAGTAATCCAGCGCTGATTAGCATAGAATCATGATAATTCTGATCCAGGGAATTGGCTGG
AATGTAGGGATGGAAGAGGCAGATGTTCCATCTATGCATAGAGTCAGCTAGGTGAGACAAGAGAGGGAACCCTTGGAGGAACACTAGCCTTTAA
CTGTAGAGAAGAGGGGTAGAGGGGAGGAGACAGTCCTGCAGTTCAGATGAAATTTCTCAGAAGAATTATAGGATGGAAGCCACAGAAAACACAT
GGGACAAAAGTGAGAAAGGTCAAAGAGAACTTAGTGAGTGCCCTTACTGAGGAGAATTTGGGCCAGTTGTGCATTTCCCAAAAGTAGCTCAACG
AGTTGCACGCAGAAACCAGACTGCCACGGAAACCAGACTGATGATCAGGGAATGGGAGGGTAGCCATGAGGGAGGATGGACAAGTCAGATGGCA
TGGGAACATGAGCTGAGAGTTGCTGGCTGAAGGGGAGATTTCCAGGCTGATACTTTAGGATGAGAATAGTTAAGAAGTAGGAAGGAGGCCAGGC
GTGGTGACACATGCCTTTAACTGCAGAAGCTGGAGGATCTCTCAGTTGCAGGCCAGCCTGGCCTACACAGGGATTTCCAGGACAGCCGGGGCTA
CACAGAGAAACCCTGTCAAAAACTAAAATTACGGGAAATAGGAAGGACTGGAGAAAAATAGACTAAGCTAAGAAGAAACCTGGGAAGCAAGCAG
GGNNNNNNNNNNNNNNNNNNNNNNNNNNNNNNNNNNNNNNNNNNNNNNNNNNNNNNNNNNNNNNNNNNNNNNNNNNNNNNNNNNNNNNNNNNNN
NNNNNNNNNNNNNNNNNNNNNNNNNNNNNNNNNNNNNNNNNNNNNNCCCAGCAGTATGGATGGAATGATGCGTGTTGCCTTATTGGGGATGAGA
AAGGGAGAGGAGCTATCAAGCAAGAGTTTTTCTAAGAGGAAACATGGCAAGATCTGATGCTCAGCACCTCAACTGTTTTAGGATACTGATTTCA
CAGTAGCACAGCTGTTGTTCAGGGCAGGGATACAGAGCCTTTGTGGGAGGCTGTCCCTGCCACACTGACCAGTAGTCCTACCCCACCCAGGTCT
CTGTGATACCCACATGTCCCCATACAGCTCCCAGGTGAGAAGCTGACTCAGATGTCAGCCACACTTCCCTCAGCGTTCCCACACTCGAGAGCTT
TCGAGTTCACACAGGACATCTTCAGCTGCCTAAGACTTTTATTGTGGTCACTAATGTTCCAGAACCCAACATAGAAATTAAAAGTATACTATAG
AGAATTTGGACCAAAAAAGATGCCCAAGCCCCACTCTCAAATGTGCAGCCCTTCTTCCGGCTTTTTTTCTCTTTGTGTCTCCAAAAATACAGGT
TAACTGTGCAAAGCGGTTTGTTTCTGTAAATAAAACCCAGCATTAATCTTATCTTCACTGTACTCTGACCACTGAAATTCAAAAATCGCATTGT
CCTCCCTTCATTTACTCAGAGAAACAAAGAGGAGTCCAAGATTAAAAGGCCCTGGAACAGATAGACAAACGCTACTTTCTGTTTCTGGGTTTGG
TCCCAGTGTTATTTTCTGCTTTGTTCTGTGTGTGTTGAAAGAGTCAGTGGCTCTTCTGTATGTAGAGCAGTCAACTGACATTCCGTTAACTTTC
CTTCTGCATGGGGTTTCAGAAGAATGGAAAAAAAAAAAAAAACAGGTTTTGTGCTGTGGTTGCCAGTTGCCACCTGTCCTCCTATCTGGTTAGG
ACATTTTTCTGATTTGGGAAGTATAAATATAACCCAGAAAAAAAAAAAAAAAACAGCTTCCCTTCCTTTTATGCAAAAGTAGAAAGGTTTAAGT
AGAGACACCAGGCTCTACCCATCACCCTTCAAGTTTGCACAGAAGCAGCTAAGCCCTGTGCAGATGCCTGCTGGGGGAGGGGAAGTGAGAAGCG
TCCCTCCTCAGGCCCTGAGTGGTTGAGTTCCAGCTTCTGACCTCTACCAGACGAGCTCAACAGAGCACAGATCTGCTCAGAATCTCAAACCTTT
TGTTGGGCTTTATTTATTTATTTATTTATTTATTTATTTATCTATCTATTTATTTATTTTGATATGAGAAACTTAGAAATAATTCAAAATGTAT
GCTCAGTTGGCAGGGAGTCAGCTGACCTCAATAGATCCATTCATGCTGCCAGACTCTTAATGAACAGCTTGAAGACCACCATGGTTCGAACTAT
TGACACCACAGATACTTGGCCAATGCTACAAGTTAGGGCTTTTTTCGTTTTGTTTTAATTTGGTTTGGGATTTGAGAGCTGGCTTGATACAATT
TTCATATCATGACACGGAAGTGTGGGGGGGTATTTTTTGGATAGCTATTTGTGCAGTAAAGGCCAATAATTGGCTCCCAGTCGCTCTCTGCCAT
TGGTATCACAAATGAGGCCTCCTGCAGCAACTGCCCTCTCCCTTGTCATGAAGAGAGAGGACTTGTGTTGAATCTGTCAGCTATGTTCCACCAG
GATGGCAATAGACATCATGAGGTGACTCCCCTCGCTGCTCCCTGAACCCATGGTGACAATTTCTCAGTAAGACTTAGCAATATGCAAATGTGGA
AGAGAATGATCAAAAGTTCACCTTACCATGGAGGGACCCCAGACTCTTGGACCCCCTGAAGCACCCCACTTGCTGGAACGCACTTCTGTGGTAA
AAAAGCCATTCATGCTACCTCTGTTAGGAGCAAGGTCAAGGCAGGCATCTCTGGCACAGGACTGGCGTGTGTCATTGGAAGGCTGGCTGCCAGG
AGAGTACTTCCCCTACAGGGGATGTGGCTGCAGGCTGTCGATTTCCACTGAAGTCACCAAGCCAGGATTCCAGTGAAGCACTGAACGTCCAGCA
TCTTCCCCATCCAGCAGGGTATGAGGTGTGATCATGTGATCCATGGATGGCATCCAGGCTGACTCCTGCTGCCTGGCAGGGCCCAGGCAATTGT
GGACATTGACTTTTTCCAAATGAGAGACCGTTACCCTAGAAGTGAAACCCTGCTGAAATGAGAAAAAGGCTTTTATTACAGCCCTGCAGGCAGC
CATATGATTATTGTTATTATTATTCTTAGAACCTGGCAAATGCTGAGTGCTTTCACAGTGTCTCCACACTCCACTTGAACTTGGTGGCAATAAA
AATAAGAATCAGCAGTGACCCCGGAGCATTTCTCTTGGCTTCTGTTGGCACCCCAATGTGTAATAATGACAATTAAGTATTGCCTGGTGTAGTG
ACCACTTGTTTGAGCCTAGTATGACAGTTGGAACTGCCTTCAGTGAGATCAGGGCTGGGGAGAGAAGGCTGACTTAAGTGCAGGCAGGGGTTTA
AATCCTAAGTCCTAAGAAGATGATGCTGGCTTGCCGTAAAGCCATGTGTGTTTCCTTACAGTTTTGGAAGACTGTTACTTCTCCGTGGGTGTTT
AGCCTAGACTTTGCACCTCTTGCGGGTTTCCGTTTCTCTGTGTGTTTCTTGTATTTCACTAACTACTTTTGTTATTGGTGGGATGCCTCTTAAG
TATTCACCCTTAGCTTAACCCGCACTGTGCCTACATACCACACGCATGCCCATACTCCCTGTCATCCCCTGGAGAGACAGACAGACACACAGGC
TCACCTTTAGCTCAAGACTTTGAAGCATGTCAACCAGGAGCAGTCCCTGTCTCGGTCAGGAGTCTCAGATGAGTGGTAGCCATTGTTTCTGGAA
TATAGCTATGCCATGCATGATTGCCTGTTTTAGTGGAGCACAGTCAGCTTGAAATGTAGTAATCTAGGTGCTAGATGCTTCTGAATTCCCTAGA
GAAAGGAATTATTTTTTTAAAGGAAAAAAATCCTTCAGGTAAAATTAATGTTAATATATTTTATTTAGTCAATATACCCAAATAGTATTACAAA
TATGTACTCACTGTACTTGTTGTCTTGTTTTTTGAAAACTTGTACTTTTCCCGTGGACTGAGTGTTTGAGTCCAGTGTTTGATGCTTATATCAC
ATCTCAGTTTGGGTTGAAGCCAGCTATTTGGAGGGGGCTGATTTTTTTTCCAGTGCTGCACTCAAACACTGAGCTGTGGGCCAAGCCTTTGGGC
AGGGATCTTGACAGTTCCTGAGGAAAGCATATAATTGCATTGTAGAGAATATAATGTGAATGCTTGCTGAGTTGTATCATCTAGTTCTTCCATA
TTTTCCTCAGTCTCAGTCCTGTCCCGTTTGTACTGTTGAGTTCCACTTGGCATCAGCATTTTAGCAGGGGCCCCACATGCATTTGCTTCCACCC
TAAGAGCAGTAGGAGCAGAAATACAGGAACCTGGAAAGCCCATCCTCTTCCCTGAGCCCAACTGACATGCGTGGGACAGGGGATGCTTCTGGCT
TTTGTTTGTATCGCTTCCGTCTATTCCTATGCTCTCCCGTGTATCACTGTGAGCCTATTCATTAAATGAAACATCTTCAAAACATGACAGTTGA
TTCATAAACAAGGCACATTACAGAAGAATACCACAGGCATCTGCTCCCACCAAACCCAGCCTCAGACACACAGTATGACTGCTGTGGAAATGGT
GGCCACTGAGTCCTGTTGCTGTTCCCTAAAAAAATAACACTGCTGCAACCTGATGAGGCAGCAGGGAGGAAGGGGTGTTGGAAAGGACTTTTAA
GGGAGAAATAGAGGCCAGCTTCCCTCCTGCAAGCTTAAAATGAAGCCTGGGATTTGCCTCACTACCCACTGTGGTTCTGAAGGCCCAGGGATAG
ATGGCTCTGGCATTCCCGCCTCTCCCACTTCACTCCCACCTGAGCCCAGCTTATACCCCCAGCCTTCGCAGACGTCTGCACGCCACTGCCCACT
GCACTTCTTACAGTTCAGGAGACAGGGTGTGTCCCTGTCCATGTGACTGCTGGGTTTCCTGAGCACGCCAGGATCCACAGAGATAGGATCTGTC
ATTGTGGCTTTCAATTGTTATTGTCTTATGATTCTCCCTCCCTACCTCTCCCCTCACCCTTCCCACCCTTCCACCCTAGTCTTTTCATTTTCTC
TCTCAGTCTTCTTNNNNNNNNNNNNNNNNNNNNNNNNNNNNNNNNNNNNNNNNNNNNNNNNNNNNNNNNNNNNNNNNNNNNNNNNNNNNNNNNN
NNNNNNNNNNNNNTCTTCTTTCTCCTCCTCTTCTTCCTCCTCATCTTCCTCTTCCTCATCTTCTTTCCTCCATTCCTTCAAACATTTGGTCATA
GATACATTGTCATCAAATTTTGGTTGCTTGCATGGATCAAAGGACCAATAGATGGGTTGATTATATTGTACTAGGCCACCCTCAGCACTGCTCA
AGAGGCACAGGCAGCTCGTCATGGATAGCCTGGCTGTCATAAGTAACCTGAAGCATCTTTAGGAGCCTATTGTCAGTAACTAGCAGAGTCAAAG
CCACATTTCTCAAGGCTTTTGTGTTTTGTGTTTTTTCTGTTTTGCTTCCTGTTAAATGAGTTAGTTGGTCATTCCCTGGATCAGGATGGATTGT
AATGAACTATGTCTAGCTGGTTGTATCACAGAAAGCTTACCACCCAGTGTCGATGGGTATGCAAGCAGGACTTCTGAGCGCATGAGAGTCTTGA
CTTTGTTGACTGCTCCAGGCTATAAACCAAGCTTTACTGTAGCAAAGTTTGAAGAAGTAGATTTGTTTTTTCCTGAATTGAGAAAACCAAAAGA
AAATCTGCATGATTACTTGACATAGTCCTCAAAGCTGTGTAGTCTTGACAATACTGCCATTGCGCCTACCTCTACCCTGGAGTGTCATGAGCAT
CACAGGTGGACATGAACCTGTTCCTTTAAAGAGTTACATGTACACCATGTCTTGCCTCTGAATCATCTTCAGATTTGGAGCTAAGGGGAGATGT
GTTCTGAGTGGCTCGAGCATTCTAGAGCTCAAGGGACAACTGAAGGTAGTATTACGAAAGACACTTGTCCAGGCACCCTGTTAGGCAGAAGCCA
CCAAGTAAGATGAGATCACAGAATTTACCCTTTGATAATATATATACATATATATACAGGGATAGAGAGTCAAGAAAATAACAAGAGAATGGTG
AGCAATAAAATATGGAAGAATATAGTTTGTGGTACAAACCACAAACCATTCTGTTGGTTTTAGACACTTAAAGTTCAATATTTATGAAATAGTC
AGCTAGGTGTAGTGAAGTTCATAGCTGCTTTTATCAAATTCTCTGATGGTAGTATGACTATTCTCCTGGGAAAGGCAAAAAATTGTCATGGGTT
AGAAAATGCCATTTGAGTCACCAGTGGACCACATGTGTCACAGTCCCATTGATGGTATCTGCTAGTCTATCATAGCTGTCTGCATCTGTTCTTA
ACCCGCTGCATCATCACATAGGACTGAGACCACCTCAGGGTGCATTTCTTCTTCAAGAATATCTATGTTTTTAAGTGATGCATTAAAGTAAGAG
CTTCTGTCCCAACATGGATGGAACAGACAGTGAATATACATCATTGGCTTTAATGTTAACGCTTTTCTCCCATGCCCCATACCCACAGAGGAAG
GCAAACACAAGCACAGCTTGTGAGCAATATCATGTTGCTGCTGTGTCAAAAGGTCCCTATTCCCATGAAATACACTGTGTAAAAGGCCACCCAG
ACCTCATCTGGACTCAGCAGTCCATTTAAAACCATCAGCAGGCAGGTCACTCGCTGTAGGTCCTGGCAGCATGGGGGGCCAGACATCAAGCACT
GAACTAAGTCTATGCATCTGCAGACCATTGCTCCTGTCTACAACATTTCCTCAGCAGCCAGAGCTCTTCCAGTTGGAGATGAGACAAACACTAA
ATACCCTTCCTTCTAATAATTCCTTTCCTTGGAATATAATAAAGACAAAGAGTGAAAAACTACAGTGTATTTGCCTTGCTTCTCACCATTCTCA
CTCTTTAGAGGTTTCTTGTCCATGTGCATTTCTCTTATATCAGTGTGGTGGCATGTCATAGCTAGCCATGAATCCAGAGTGTTCACAGATAATG
ATCTATGGGATCATGGCTTCTTAAGCACATGCTCATTGTTTATAAACTCTTAGAGTTCTGAGGACGGAAGGCTGAGTAGGAAGGCCACCTCCCT
CACAGTTGGTCTACTCTCACAAATGTGTGAGGGGTCTGCAGCCACATCCCTTGTTGCCTGCTGACCTGCAGCTCAGAAACAGTTTGTCAGAAGT
CTGAAGACACTCATAGATCTTTTGCATTCTGGAACCTTTGACATTTGGCTGAACAATGGGATCTGCTCATCTTCTTCTTGCTTGGTTTAATGTG
TCTCAGCTCAGTCTTTGGAGGTCTTTTGCAATTGCCAGACACATAGACATTGTAGAATAAGACAGGACTCCTGCCCTTAAGAGGTTCTTAGTTA
CTTCTTCGGAAGATGGCTGAAATATCCCTTGTTGCTGTTTTGATACCGTGATACTCTGTGGATAGAATGAGGGAATGATGAAGTTAGCATTGCT
GAGCTACTAAGGGTTCTGCATTGATCCCTGATGCCCTAGACAACACAGACACCTACAAGAGGAAACAGCTCATTGTCCAAGCTTACTGGCAAAG
TCATGTTTTCAAGCCATTCAAAATCCAGTTCTTTAAAGGGATCCAAAACAACTAATACACTTCAGTTAAAGGAGTAAAAACATCCAACTGCCCC
TGCACTGTTCAGTTCTCTTATTCCAGTGGAGGTTATTTTACAACGAGATTTCTCCATCAGGTCTTCTATTGAATTTCATTTTTACTTTGGCAAA
TTAATTTTCTCCTGAAATCCGTGTTTTCTGGAGAAAGGTTTGGTACCATGCCACATAAGTGTGTCAAATCACTCAAGAGCAGATGGTTTACTAT
CAATGCACAAAGAGTTCTTAGAAAGGTTAAGTGAAGGGGAACCAGGTAGAAAGAAAGCTTGATAATAATGGTAAGTGGAGAGGTGGCCATGGCT
GTTGGTACAGCCCTCCTGGTTTGTGTTAAGTGATGTTCCCTTGGTGCTGATGGAGTTCCTTACCCATTCTTCAGGCTGGGGAATCTCTCTTGAA
AGAAATAGGAGCTGGCCAGAAAGGCAGAATGTTTCGCTATAATTGAGATATAAATTTTAGCTTTGGGTTTAGAAAGAATGGCATAAATCCCAAG
ATTTTCCTTCTGTATGTATGCTGGGGCATTACCAAAATGATACCCTTGCTTCATTTCTCATCTGTCACTCACACCTCCACACTGGTAAATGCTG
GCAGAAATTGTTTGAGCTTGTCAGAAAAGTTAAGGTCTGAAACTGTTGCATTCAGAGGTACCACGCAATCTCTTCAGACCCACATGTGTCCCAA
CCAGGATAGGAGGTTTGCTGATCAGAGATGCCCCCATAATTGGGCTGTTAGTAATAATCTCACTTCAGGAAAGAAAGCGAGAACAGGGTAGGCA
TGTTCAGAAAGCTATCTGGTACATATTCTTTGAGGTAAAGCATCTTTAAAAGGTACTGCTTCCCCAACACTATGCATGAAGACTTGAAGAAGAG
TAAAGTCCTTTTGAAGAGTATGGGTATCACCCCACAACAAGCAGGGACCCTACTTACTGGAACAATAAGCTGGCCACCATTTTGTTTCAGGAAC
AAACCAACTAGACCACTATAATAGATACGGATGCCGTTGGCAATGTATCTATAGGTAGATATGTAATAAAATAAATGAGATAGGCTCGAGCAGC
TTCAACGAGCGGTTGTCATGTTTAACAGCCATTAGTAGATGTCCAGTCTCTCAGTAAGATCTATTCACACTCTGAAAAATGTGCTGCCAAGTAC
AGGGAGAGGTAGCACATGGGCCATGTGGGATAGGGTTGCTGTAGGAAACCTTGCCTCTGTGCTGTACACAGGCAGATTCCAAGCGCATGCCCAG
GGACCTGGCACAGGCTGAAAGAGTGGTCACTGTATGGAGTTGCCAGATGCCATGCTTGCTTACCTGGCTAGTTAGCTTAAGGGCTTCATTTTCT
GATCTTTGGCAGAAAATCTCTCACAGGACTATGGATCCAAGTTTTCAGATTCTTTAGGCTGTCACTGACTTTTTCTTTGTTGCTATCCAAAGAA
CAAATACTTGTTAAATGCCATTCTGAGGCCAAGTAGCTGCCATCTACTCTAATTTTGTTGGGGACATACTTGCCACGCATATAATGAGGAAAAT
GGGGGTGAATGAGATGAGCTTGAGTTTTTCTGAGGGGGCAGGATATTTTAAAAAAAAAAACCTGCAATGCATACAACAAGCAAGGAGAGAAATC
AGTTTTGAGGAGACATATGTAGGTCTTTAGATGACATATTATGTGTCTTCAAATATGGTGGAAACTGGCTTGCCGGCTTTGGCTTGGGAGTGAC
TGAAGGCCATTGAAGGAAGGCTTGAGTCAGGGATAGTCTTCAACAGGTATGAACAGGCACCCAGGATATGTAATGTTGAGAGTGACTTGGGTGG
CTTTCTCATCATCAAGTGATCCCTAGTCTAAAGCATTTGTTCTCTCACAGCCTTTTCCAAGAAAGCTGAGAGCATGACTCATCCTTATTAAAAC
CACTTGTGGCTAGGCTGAGGCAGGAGGATTGTGATTTCAAAGCAGCTGGGGCTACACAGCAAGACCCTGTCTTGAAAAGGAGTAGAGAAACTGT
CACACTGAAATTCCTGATTCTTACATGTTAACATCTTGAATGGATAAAGGTATGACTCAGTGGTAGAGTACCCATCTAGCTTGTGCAAGGCCCT
GGGTTCAATCCCCACTCCTGTGAAAACAATGAAGAGTGGGTATGTTATGGCATTGATTGAAAATAAGCAAGGGACATTTGAGGACCATCCAGGT
ACAATTTGAGTCAAGACTCTCAAAGCAAGAAGGCCTGTGTGTTTCAGTTTATAAAGGTATTCAGAGAGCCATAGGGTTGGAAGAATCAATATGA
AATAAAAAAGCCAATTTGAAAAGGCAAAATGATTCCCCAATGAGAAATACTTCATCAGCTACAGGGAGCATGTCATGTAGAGCATGGCTGCCCT
GGGGTGCACTTGGAGATGGTTCCTGACTAACTGTGCTGTCGCCTCAGTCTCAGAACTCAGGGCTGACACCCTGGGATACTTGGCCAGGTGGAGA
CATGATGTATTCTGTACTTTGTCTCCTTGAGCTTCAAGTCTGATCCCTGCTACCGGTAGTGCAAAGACCTACGAACTTTCCTCATCACCACTGG
TCCAGACCCTCTGGCTGCTGCCGTAGCTTTGCAAGCTATGGTTAGCACCCTCCTAGAAATCTAGTGTGCCAAAGCAAAAGCCGCTCCCACTCTC
TACCCTGCTCTTTAAAGAGTGTGTGCTGTGAGGGGCCCTGCAGCTGCACTACAGACCCTCAGCAACTGAATGCTGCTCAACGTTGCCGAGAGGT
GCTAACCTTGCCCACAGAGAGCTCTGCTCACTCCTGACCGTTAGAAATGTGTCACCGAAGTGTGAAAATACTTATGCTGTTAGACTTCCCATCA
TTTCTTTTCTTTCAATCCCTCTCATTTGCATGGGTTACTCATAAATGTAGATCTTGGGTATGATTTGTACAACTGCCCTGCTGTCGGTCTGTAG
GAAAGCCTTGCTGGATGGGCTTGTCTCTGGCCTTCATCTACAAGTGCTGGGTGCAAGTCAGTCACAGGTGGTGCCACAGGCAGCTGGCCTGGAG
CCGGGGGTGCAAAACACAGAGTGATAGTCGTTTGACACAATTTCAGCTCTCAAACCTGCTTTGTAAATGAAAACACTGCTTTTGGACTAAGTCA
TTCTCTCTGATTCCCAATTGTTCAATTAATCTATGTGTGTTAACACCTCTCTATAACATCATAGATAGTGCCTAGTAATGAACTCTGCGAGTTC
AGGCTGAGGAACCCTGAATGATCCGCCACTCTGCAGCTGTTCAGGAGTTGTACCCTTTTTGTGATGTGGTGAACTCTTTGAGGACTTCAGCACT
GTATTCTTAAGATACTGAAGGAGTGGGTTGAACTGTAGTAACAACAAGGATTTTGCTTTTTAAAAGGATGTCCCTGCATACAGCTTAGCAACCT
TGATTGAACTCAGCCTTTCATGGTTACACCTTAAGGTTGAAACCCATTTCATTTCATCATTTCCCAGAAGGGGCACTCAGTTCACCCATTTCCT
GTTTTTAATCTCAGGTTGTTCTGTGCTTGTTCCACATCTACTCTCCCAGTACCATGGCTATGGAAGCCAGCGTCACACTCTTGCCCCACCTGGC
ATCTATGCATTTTGCACATAGCTGCCATCCGTTCTAAGCTATCTGTGCACAGATCTGTGGACAGGGCTGGCTGTTCCCGTGGTGTCTGGTGCCA
TGGCCACTCATGGAGCTCGTCACCCCAGCACTGTTGTGCCATGTCTGACACACAAGCTCTCGTCTCCCTATGTACCACAGAGTCTCTTTAGTAT
GTCACAGAGGTGGACATGGTCGTTAAGACCAAAGCTTCTAAACTTGCTCCATCCTATTTCCAGTGGACTTGAACCACTGTGTGTAAAGAATTTT
CATTGACTGTGCTTGATACCTCCTGCCCCGACAGTCTTTAAAGATGTGTGTGTGGGGGTGGGAGGTGGGGGTGTCTGTGTGTGTGTGTGTGTGT
GTGTGTGTGTGTGTGTACTTGCACACCTTGTTGTTCCTAATGATGTTGAGTGAGACCAGCACATGACTGGCATCTGGTATACAACTGAGCCATG
CCCACACATCTACATTCATGTACCCACCCCTTCAGCGTGCCCTTCCCTGGCCTCCCATGTAACCAGAGTATTGACCTGACCCTTTCAATTCTGC
TCAGGTTTCAGATGGTTAGGACCCTAGGGACAGGAGCCATGCTTACGTTTGTTAACCCACAGGTCCTGCGGTCCACCAAAAATAAGTTGCCTTG
CCTGAGTAATCCTCGCTCTAAGCTGTCTTCTCTGTTCTCATACTGAGTCCTGTCTCTTCCTCTGTTAGGCTGCTGGAGATTAGATAAGAAACCG
TCTTTCCCCCCACCCCCACTACAGTCTGTAAAGCAGGGTCCTCACCCTCAGAGTGGGTGTCTCAGGGATTTGCCAGGAAATGCATGAGTTTCAC
TTCAGAACTTTGCTTATCTGGGTTTTAGCTGTTGTTTCTTTCCCATCCTGGGACCCTTTTCACTGCGACGTGCAGTTGGATGTGAATTACTGAG
TGATGGGGTCGGGCCAGCTACAGAGCTACTGCTCTTCTTAAGAGTGTACAAGTTCTTAGCATCGTTAGGCCACAAGACTGTCACTTTCAGCCTC
TGGTGTCTTTGGATTCTTCCTAGTTAAGCTTCTGTTGTGTTTCTGTCGCTTAAAAGTGACAGAAGCCTCCAAGTTGATGTCCAAATATGTTTCT
GTATTTGTAAAGGATGTGTTTTACAGGGGCTGGAGAGATGGCTCAGTAGTTAGGACACTGACTGCTTTTCCAGAGGTCCTGAGTTCAATTCCCA
GCAACCACATGGTAGCTCACAACCATCTGTAATGGGATCTGATGCCCTCTTCTGGTGTGAGTCTGAAGAGAGCAATAGTGTTCTCATATAACAT
AAAATAAATAAATCTTTTAAAAAGAGAGAGAGAGAGGAAAGGGGAAAAGAAGGATGTGTTTTACTTGGAACCCTCCTTGGCATCCTTTGGCAGC
ATCAGTAATGGAGACATGAATGTTTCATCGCTGCAGAGTGCACCTTTGCAGATTTCGTGCAGTGCCCGTTTCCGTCAACCGTTTTAGGTTGTTT
AAGCTTTGTTGTTGGAGAATGAGATGGTGTGGTGCTCACTGTGCTGTACAACCTCGCCTCGCTTTCACGGTCCGATTGCTTCATAAGGTTGAGA
GACACAAAGACCATGAGAGTCCTGGAGGCTGCAGCAGGACTGGCACATTGGGAGAGTGTGTGTTCCTGCACCAGCAGGTTTCCATTCACGATTT
CCCAGGAGCTTGGACTGGCAGGCCCTAATCTTCCTGACATCAGCCCTTCCCCCATCACTGGCAATGACAAGCTGTTTCAGCTTTGCCACCTCTC
CCAGGCCACTGTGGATGTCACCGCATAGCATGGCTGACTATCTAGTGCAGTCTCTGGCTGACACAGGTTAAGTGGCCATGGGTCACAAGTGATG
CTATCCTGGTCATATTGGTTAAGCTATCTATGTGACATGGCACACGTAGGACAGCCATATGTCACGTGACTACATTCAGTGATACAAGTGCGGG
CATCTACATGACCGTTAGGGTATTCTGGTAACAAATGGCACAGATAAGCACAGGCAACCAGAACCAGCACCTCCACCTAAGCTTGAGTGATCAG
TGGGGTCCCAGAGGCTCTGCTGGCAGAGGGATGGCCAAGGGCATGATTGATAAGGCTTTGCTCCAATGTTAGCTGTGTTATATCAACTGTGTTT
CTTTTATTATTTTTGTGTTTATTTCCATAAATACCTAAATTGTTAGTGAGATACTAACATTTCATTGATTACAGAGTTTCAATGACCCTCTTAG
TCGTTCTCCCCCAAGACATTCTGTGTTCAAAAATATGATGGTTTATATATGTGACACATAGAAAATACCATCCAGAGCGTCTGGCCAAGAATGT
GCCCATCAGAAGCCTTGAAGACAGCATGACAGGTGTAGGGCTGGCCAGGGTTTCTAGGGAAGGTGGACACAAGAGTCTTGAGCCCTCTTCTACA
TAGTCCTGCCCACCAGCCTCCACTAGGGGAATCTTCCCCAGCTTCCATTTTCCAGGGAAAGCCTGAGCCATCTGAAATTCCTTTCACAAAGAAA
CACACCTGGCCCATACAGGTGGACAGGTACCTTGTGCTGTGTATCATCTACGACCCAGTGTACGTAATATCTGAGTAGAAAGGTCTTGTGTAAA
GAATGCTCAGAGCACACACGAGCACAGAAGAGCCTTCACCCACTCAGTGCATGGCCTTCCCAGGGCTGGACATAAAAACACACAGATGTGTGTA
CACCACACAGTACTCTAAGCCACCAGTCTCACGTCAAAGTCCCTCCAAAGTTTCAGATGCTAGATGGCAAGACAGTAAACAAATAGGAACAGCT
CTTCAGAGCTACTAGCATAGAAAGTCTCCATGGACATCAGTTTGTTGTGAGAGCAACAGTGGCTCTGAGGTGGCTGATAATTCTCTGGAGCAGT
GAGACGGTTGGGACAGAGGCGTGTGACCTTTAATCCCTGCCTTGGTGAGGGTGCCTTCCATTTACACCAGGCCGCTCTCTCGCCTCCTCAGTGG
GGCCTGCGGGCTCTGCCACTAGCCTGTGACATGTTAGATAAGGACTTTTTCTTCTTGGTGTCCACACTCTACTAGTGGGCTGCCTTTGACTCAA
CCCTGTGCTTGCTGATTATCTCCACAAACAGAGTGCCACAGACTAACACGTTAGTTTGGAATTTTCCTCATTCTTCTAGGATATTCTCTTTCAT
CTGTTCTCTTCATTCAAAAAAACTGAGTTGTAGAGGTTTCTAAATGTGCCCTTTTTAAGTATTAATATATATAAATATATTCTCTGTTTCAGTA
GTCTACTTTTGTTGCTTGTTTGCTTGATTTTATCTCAGTCCTAACACTAGATTTTTATTAAAATGTAAGGAAATCTTATTGTGGTTTTTATTCT
CGCTGTTTAAATACAAGAGAAAAAGAACTGAGTGGCCTACCAGAAGTATCAAGAGTTCCTAGATTTTAGGATCAAATAGCAGATAGAGTCAAAT
ATGCAGGGCACAGTTGAGCAGCCCCTCTCATCCCACAAGACTAAGGTAGCCGTCATACTCTTCTGTGGAGAGTAGGAATACAGAGCTCAAACTC
TCATTTTATGTTCAAGAAAAGCTGTGTAAATACATGTATACATGCCTGTGTGTGAGAAGACACATCTGTGCATGTGTCTCTTGTATTTTTGCAT
CTGTATAGGTCTAATGGCATGTTTGCTGTTGTTCCATCTTGTGTGTGCATGCCTATTCTGTGACAGTATCTCTGCATGGGCCTATATTTGTGTG
TCTGTGTGCATGTGTGTATTGTGTGTGACCCAAGCTCTCTGCTAAACCCTCTGCATCATTCCCTAATCTTACTTCCCTTTCTGTCAGTTCTCCA
TAACTCTTTGATTTCAGTTGGGCTGGTGTCTTGAGCAGCTTCCTCTTTTCCTGCATTCCTATATTTCAGTGTTCACCCTCGTTCCTCTTCACAA
GCTCTTACCATACAGCCAAGAGGATGTGGAAACCCAGTTACAATATGTCACACAACACAGTGTCACAATCACCAAGCATGTCCCCACCTCCTGG
CGATAGTGATCAGGATGGGATAGGAGAGGCAGGGAGGGACATGGACAGAATAGAGAAGTTTGGCTCTGGGAAGCCCAGGACTTCCTGGTGCGTA
GCTGCTATGCCAGATGCATGGTGAGCAAAGTAGACCATTCCATCATTTTCTACAATGGCAGTTGGGGTTCACACATCTGCCTTGGGGCTAGGGC
CTCCCCGTCATTGCCTCATAATCCTGCTTTTCCTCCAAAATGCCTGTTCTGTTTGGCTCCCAACTTCCCTATTTCTGCCTGTTGGGTGTTATGG
TCTCCTCCCCTCCTTGGAAGTTTCTCCATCCCAAAGCCAGTTCCTACCACGTGACCAGCTGAACAAGCACCTCAGACAGTTCCTCTTGTCTGGG
AACTCCAGCTTCCATAGGGCCATAGGATGGCTCCCAGCCTATTATCTCCCCCAGCCCTGTGGATTTCAGAACACTGTCTCCATAACTCTGAGTA
GGCAGAGGATCACCTACATGCCCAATACAGGTCTCTTCCCACATACCTGACTTCTAATGAGCCCCCCTAGGAACCCAGGGCCCATGGTCCATTT
CTGCTGGTACTCCATGATGGCTCTTGGGCAGTGGCTATGTGTGTGCTGTATCTTATAGTACTGCCAAGCTAAATGCTCCTGAGCCAGAGACATC
TTTCTCCTACAATGTTCTCCAGTGACACCCTGGGGGTTAGAAGCATATTTCTAGAATGGCTGCATTCCTCCAATGATGTGTTTGGCTTGTTGGA
AAGGCCTTGTTTCAAAATCTATTAGAAGCAGAAAGTTTATTTAAAACAAAACATGTCAGGATTTAGGGAATTATCTGGGAGGAACTGGCTATGA
GGTCCCATAAACGTGGGGTGCATCCATAGCTTGCTGAGTCTCACTAGTAACCCTGGGCAGCTCTGTTGTCTGTGAGTCTTACTTCTGTCTCTGG
TAAGATTGGGGAGGGCAGTATTTATAAGGGTTGCTCCAGGAATTAAACAAGTAAATGCATGGTAGATGTTCAACACAGCTCCCTCACCTAACGA
AAGCTCGCAAGCTACTATGGGGACTGTGGGGGAACCAGTAGCCTTGACCTAGATGCTAAGTGCTTAATACGTCTGATTTTAACTGGGAAGAGCA
CATAGCTTAAACTACTCATTTCTATACATTTCCCAATAAAGTTCTATTGAATCATACAATGAAAAAAAACAGGAAAGAAGAAAGAAATTCTCTC
ATTTCAAAGAAATGCTAATAAGGACAGGACTTTTTGCAATGGCCTGGTGGTAAGAAATGGCTGGTCCCTACTAGGAAAAACATGGTATTTGAAG
GTTCTTCCCAGGAGATGTGACATTTTGATGAAAGTGCCAGTAAGCTAGGGGTTTCTGAGTAATGAGCTGAGCTCAGAGAAAGGTAATGGCACCT
GCGCAAAGGGTGCCAGCATTTCCTGAGTGCTGGGTGTCTTATCTGCCCACTCAGACCACATGGAGCCCAGAGACAGCTATTTTTCTGGATTTCC
TTGGGAGGAAGCTGAAACTTGGTGATGTCATGTGACTCTTCAGTCCCACAGAAATGATAATGTAGGGGTAGGAGGGCCTGAATAGAACTTGCTT
GCCTCTGTGGGCCCATTTTCCATGGCAGTTTCCAAAGCTTGGAGGCCAGATGTTAGGACCACAGTCATGACTAACACCTGACAGCTTTGTAATG
ATGGCCAAACAATATAGAATGTGGTCAGCATTTGTAATGCTCAGTTCCTGTAATGGGAGTCTAGAACAGAAAGGAAGAAGAAGAATAAAAGGGA
GAATGACTCTTGAAGACCTCTCTACAAAAAGAAACATCCAATGCAAAGGCTTTGTTGTGCTGAAGTTAGCAGTAAGTTCCCCCTAGACAGTGAA
GGGCTTGGACTCCCAGCATGTCCTGCCTTCTCACCATGTGAATTAGCAACCCCCAAATCTAATTCTGCCACCAGCTGCCATTCCTTGGCCAGAC
CCTCTTAACAGTGGTTCTCAACCTTCCTAATGCTACAACCGTTTAATACAGTTCCTCGTGTTGTGGTGACCCCACCCATAAAATTATTTTTTAT
TGCCACTGCATAACTATAATTGTGCTACTGTTATGAATCACAATGTAAATATCTATCTTTTCAATGGTCTTAGGTGGCCCACATTAAAAGGGTT
GCTGGACACCTCCACAAAGGGGTAACAAAACACAGGTTGAGAACCACTGCTCTATAGAAATGTGTTTCTGTTCAGATATAGAGGAAGCTCTTGC
AGGCCACATCTAACATCAGGTTCCTGCCCCCAGAGCCAGAATTCTGGAGAATGTGTCTTAGCATGGGGATAAGCTGATCTCATATTCAGAAGAG
TAGCAATGGGTCCCTATCTGTACTGTTCTCATCCTCCATGAAAATGTCCCTGTAAATATGATCTATGTGTGCTACACACCTGTACTGATGCACT
CTTGTCATGACTCTGTATACACACAACCTTGTGCTCTGGTACACCAGGCCAGCCAAGTACATCCATCCCCATGAGCACACACATATCCCAGCCA
CTGACCCAAGCTTGTTCTCCTGTACACATAGCCAGCTCTTGCAGATATCCTCTCTGCTCCTCCCCATCTGAGCTGGCACCTGAGAAACAGGTGT
TCCTGGGAGGAGCACATGGAGAAATAACCAAAGCAGAGCTGGGGTTTCGTTGCCTCCTGTGAGTGAAGTTGTCAAAAGCCTACTGACCACTCCA
ATCCTGATTTCTCAGCCTGAGTGTGCGTAAGTGCCTCTCCACAGACAAAGGCACACACTGCCAGCCAACACCTGGACCTGTGGCTGCAAAAGCT
GCAGGAAAACCGACATCCTTCCCATCAGTCCCCCTTCTTTGCTGAGTCACTCTTTGCTTGGAATTCTGACAGGTGCCCGTTGGGCTTCTGGAAG
GGAGGGACAGCAGAGGATCCACCCTCTGTGTGTCCCACGAGAGATTACATTATCTTCAGCCACCCTGAAGCTCGGCCTAGGCTTCTGGAATCGG
TGGGGCTGACACAAAGCCAGTTCTGGGGACAGGGAATGTACGGATAGCCACAAGGAGCTAAGCCATCTGATGTTCTCTTCACCTGAGCACCCTA
GGACTTAGAGTCCTCAGCTCTGCTTTGCATGTGTTCCACTCATTTCAAGGACCAGCATACCCTACACCTCACCCATGTGAGAGCTGCACGCTTC
TGAACTATATTTAAGAAGCCAGGTCAAGTACAATCCATGTAGTGTTTTCAGCCCTACATTTTGCCAATTGCTGGTTGGCATTAGCAGGCAGTTC
AACTTGTTGCTCTTGGAAGTATGTTGCTGGGAAGGTCAGTCTACCAGCCATGTGTAACCTCTTCACTCACCTCACACCTAGCAGTGGATGGAAG
CTCTCATTAGCTGGCTCATACCAATTTACTCTGATAACGACGAAGCTTGTCCTGGGACCCTTCCCCGCTTCCTCCCAAGCCTCTGTACTTCTCT
GGTGAACACGGCCACCTCTTCACTTTGTGGTAGGCGCCTCTGACTATGTCTCACCAGCACTTCTAGGGCCTGAGTTTTGGAAGATAAACACAGA
AGCCTCCTGGTGTCCCTCCTGACATCTGCAGTTAGTGCTCTGGTGCATGGCCTAATTATCCAGCAAGATTCCAGTGTATACTCTATCCTCAGTA
TACTGGCTCATGTGATCTAGTAAAGATGTCTCTCACTGCACAGAATTTCAAATGAAATGGGAAATAAGTATCTCAACTTTTAACTCATACCCAA
GACCTCAAATCATGTCACCATACTATGAGACACAAAACAAGCACCTTTGTAATAATGTTCCCCTCCTCTGCCCACACCTTGTTCACCTTACTCA
TCAGAATACTCCCATTCTCTGTTTTTAAAGCTTTCATTATTGTTTTAATTTTCTCATGCTTATGTGGTTCTTCTTGAATCCCAGGTCTTACAGG
TGATGTTTAGGAGCTTTCTCATGGCAATTTTGCATACTTTGTACCACACACATGAACAAGTAATGCTTTTGATGAAAATGTAGCACTTCTTTTA
AAAAAAAATCAAAAAAGCAAGAAACTTAAAACATTCATAAAATATCTCTAAGCTTTTTCCCCCAGACAACCAGATTTAACCTCCCAGCTGTGGG
TCTGTAAGACCCAGAGCCTGACCTAGTTGACATGAACTGTGTGTAAGAGGGCCAGGAGAGAACAGCTCAGTGTCAGAACCTGGGGGAATTACAA
ATGGCACCATAGTGATGACTTGTGGCTTCTCCTGTAAATCTGAATAGAAACATTATTGTTGCTCTCTCCTCCTCCTCTCTAAACGAAATTCTGA
ACCCATCTCTGTATTTCTAAGTCATACATTGCTTTTTCTAACCTGATTTGTTCTCTGTGACAATTTAGTACTGTGTTTGTAAAATAGAGACAAA
GCCAGGACAGGGTTGGCGGTGTGATTCAGTGGGAGAGCACATGCCTCATGTCTTCACAGCCCTGGGTCCTGCCCTCAGCACTGAAGGTAAAACT
CAGGTGTTCTACAACAACCAGAAAAAGGGGGACATTGTGTCCTCTGCATTCTCTGACAGGTGGAACTGGCAGCAAGACAAACTGATGCTGGGAA
CGACCCCAACGTCCATGTCCCCCAACAGCCTAAAGCACAGGGAAGATCACCTCAAACATACTACACATGAGATGAGTCCCCAACAAAATCCTGA
AACAGAAGAACACTGTTAGGGATTTCAGGGCTGGAACATACAAACATCCTCTACCCTGGCTCCATTGTCCTGGGTGAGCTGCCAAGCCCTCTTC
CTGCTGCTCTTCCATTTTGAGGAAGGTGACAAACGGTAGCTGGGTGTAGCCAATGTCATAGGCCCATAGGATTCTTTGTGGACAAGAAGATAAA
GCGTTATCTTCCCAGCCTGTGGCTTTGTGCTGAGCACAAAGCTAACTACTTGTCCTCTCAGCCCCGTGGAGTATTATCATGATTCCGCACACAA
ACCTGACAGAACAGATGGGATTATTCCCACTTGGTGGATAAGGAAAGTGAGCTCAGATAGTCAGCGCATGATACAGTTTCCACCAAGGAGGAAA
AGCCCAGCATCAGATGCCTCCCCCGACCTGGACATGGTCAGCTGCTTCTTCCTTCCATGAGATCATAGCCTCTAGACTTACAAATGTCTAAGTT
CAAGAACATCCAGAACCAATGGAAGCCAAGGGATTCATTTGATTGGAGAGCCAGTAGGCATAGACTGTAGTGATGTATGACACTGGATGAAATT
AATGTCAAAAATTACTTTCCCCACTGTTGACTTTGCTCTAAATATGCTTGCGTCCTAAAACTGCATGTGAACACCAACATGTTCTGCCATGTAC
TCTGACACTTCTCAATTACTGGACATGGATTTCTGAAACTATCCAACTATTGTAGTTATTAAGTAGAGAGCTTTCTAGCTGAACTGTGTCACAG
ATAACCTGTACCTCCTGTGCATGCTACCAACTGACACTGAGTCCTAGTCAGCCATGGCCTCTTTCTGAGCATGGCTATCGTCAGGTCACATGAG
CATTCAGAGCTGGGCATTTATCTGGAATACGCTTATGTGAAGACCAAAGGCCAGAGGGGGGAGGGTCTTCTGAAGAAGCGTCTCCAGGCTATGA
TCATCGGGCAGGCCCTGCAACTCCATAATACTGTGAGGACCAAACACAAAGAGTCCAGAGAGTAGGCAATCTGGTTCTAGGGGAGAGATGATCT
GGGTGTCTCCATCTCAGACCCAGAAAGTCACTTAAGCCACGAAGACACATGCAAATGGTGGCTGTGGGGTGGAGGGTGGGGCATTGCTCTGGAA
CAAGAATGTGCATGGTTAAATGGAAACCATAACATTTGCAAACATGGGTAATTTGTGAGCTTTGGTTATTGTTTTAGCATTTTCCTAAGGTCCA
TCCCTTTATTTATTGAATAGTGTGATTTGACAAGAGATCTATAATAGCAGTTGCCAGAAGTAGAGGAATTTTGACACAAGATTTTCAGTTCTCT
CACACAGCACTGTAGACTGCTGGGCCATATGGAAGTCAGATGTGATCATAGAGACTCAAGGAAGGTGACAGCCTCAGTCTGATAGACACGTGTG
CTGCGATGGGAGCCCAAAGGCCACAGCCCACAGTGCACAAAAAAACCTAGGCAGGTGGACAATGGTGAGCAGGAAGCACAGTCAGGAGGTAACA
CAGACCCAGCCTGGGCTTCGCAGTGGCAGGGGTATGATTGGAGCACATCAGGGAAACTGAGGCTCCTTCTCAAAGAAACTGGGATGATCATTGG
ACTTTGTGGGTGGCCATGGAGGAGCTCTGGTGGATTCATTGGCTAGAACCTTGTTTACTGACACACATGGAGAAATAGGAAAAAAGCTAGGCCT
TGGGGAGAGGGTGGGTTTGGAGATGGGCAGCTGTCTGGTGCCTGAAGGGCACAGGAGTGGCAGGCAGGAGGCAGCCCGGGTGCATCCTGTTCTC
TGGGCCTTGGCACAGTTCTGCTGCCTGCTCTTTCTATACTTGAATGCCTGGACGCATGCAGAGCATCGTAGCCTACACAGAAGGACCTCTGATG
TCCCAACAGGAGATGGTTGAAAGAGTTGGGACAGCCTCACAGCTCTTCTGACTCTGCATCTGGGTGAGTGGTGGAAGTCACTTGAGTAGGTGTA
AGACTGCACACCAATGCACCTCTCCACTGTGTCCACAGGTGGGACGTGGGGCTTCTTTGTATCTTAGCTGTCTCTTTGCAAGGCTGAAACCACA
ACGTCTTCTGTCAGTGATGTCATCTAGCTAGTGTCCTCTTCCCGTGAGAAAACCCTGATCAGCCCAACCAACAGGGAGGTTTAAGAAGAAATGT
ATCTGTCTATAAAATATACTGGTTCTCAAAGAGGAAGTGCTTTTGGCTTCACCCTACACTCCTGTAGAATATACCTATANNNNNNNNNNNNNNN
NNNNNNNNNNNNNNNNNNNNNNNNNNNNNNNNNNNNNNNNNNNNNNNNNNNNNNNNNNNNNNNNNNNNNNNNNNNNNNNNNNNNNNNNNNNNNN
NNNNNNNNNNNNNNNNNNNNNNNNNNNNNNNNNNNNNNNNNNNNNNNNNNNNNNNNNNNNNNNNNNNNNNNNNNNNNNNNNNNNNNNNNNNNNN
NNNNNNNNNNNNNNNNNNNNNNNNNNNNNNNNNNNNNNNNNNNNNNNNNNNNNNNNNNNNNNNNNNNNNNNNNNNNNNNNNNNNNNNNNNNNNN
NNNNNNNNNNNNNNNNNNNNNNNNNNNNNNNNNNNNNNNNNNNNNNNNNNNNNNNNNNNNNNNNNNNNNNNNNNNNNNNNNNNNNNNNNNNNNN
NNNNNNNNNNNNNNNNNNNNNNNNNNNNNNNNNNNNNNNNNNNNNNNNNNNNNNNNNNNNNNNNNNNNNNNNNNNNNNNNNNNNNNNNNNNNNN
NNNNNNNNNNNNNNNNNNNNNNNNNNNNNNNNNNNNNNNNNNNNNNNNNNNNNNNNNNNNNNNNNNNNNNNNNNNNNNNNNNNNNNNNNNNNNN
NNNNNNNNNNNNNNNNNNNNNNNNNNNNNNNNNNNNNNNNNNNNNNNNNNNNNNNNNNNNNNNNNNNNNNNNNNNNNNNNNNNNNNNNNNNNNN
NNNNNNNNNNNNNNNNNNNNNNNNNNNNNNNNNNNNNNNNNNNNNNNNNNNNNNNNNNNNNNNNNNNNNNNNNNNNNNNNNNNNNNNNNNNNNN
NNNNNNNNNNNNNNNNNNNNNNNNNNNNNNNNGAGGCCGGCAGATGGATCTCTGTGCATCCAAGGCCTGCCAAGTTTACATAGCAAGTTCTAAG
ACAGCCAGAGCTTCATAGTGTGATCCTGTCTCAAAAAATTTTGTTTTTTAATCTGTGCTATTTCATAAAACAGTGGCTTAAAGCTGCAGGTAGA
CTGTCTGAGAAAAGAGGACAAAGCCAAAAATCGCACCGTGCTCCCTAGGTCCCATTGTGGGGTGAGCTGCTTCTGATGGGATACTGTATAGACA
GGGTATCACAGGGCAATGAGCTTGCACCTGAAGATGGCTGCAAAAGAGCAAGCAGCCAGGAACTGTGTCCTGATTCAGAGCTTCTATAAGCAAT
CTGGGAACATTATCCAAGGTACTCTCAGTGACCCCTGAGCTTCCCGCCTCTGTGTGTACATGAAGAACACCAGGCTTAGCTGTGAGGACCACAG
AGCAGGCACAACTAGGCAGTTGTATTTGCAACACCCTGCAAGTTATTAGCTGGCCACGTGTTTGTCATTCGGGAAACTCTGTTGTAAATGCAGT
CACCCAGTGTGACCATATTCAGGCAAGTAAACACATATGCATGGGGGTGCACACTTAAGTGTGTGAATGCAGTGGCAAAACTTACACATTTCCC
AGTGCCTTACAACCACCCAAAAGAAGGCTGCTTGCAAAACTCTGTCTTTTGAATTATGAGGCTCATGTAACTAGCTTTGACTTTAATTTTCGTA
TTTCTGTGCTAAACACCAAAAACTTTACTTTTCACATTTACATCCTAAACACTATGCTTAATGCAAAGTATAGACCTTCCTGTCAGCCCAAGAT
CCCTTACTGCCAAAACAGTGATGGTGTCTACCTCAAAGACCCACAGTGCAGCTTAGAGGCTCCCTGTGGAAAGCAGTTTGTGTGCACCTGACAG
ACCCACTGAGTTGCTGCTGTGAGAGACTGGATTTTAGCATAGATCGGGGGTTTGCTGTTTGCCGTAATTCCTACCCACTTAGAACACCATAGAA
TGTTTTTTCTAAGTCCAGCCATTGTATCTGTATCAATTCCACTTTACTATGCCAGACAGAACTTAGCAACTGGTGCTATATTTTGCTTTTAAGC
TTTTGGTAGATTTTTGGTTAAGGATGAAAATTAGCAGATTGACTTGAGTTATGGTAGACAAATGATTAATTCTTTTGAAAGGGACTCAACATTT
CATGACCCAGCATCATGGTCTTTACATTAAATAGTAAAAATGTAAACTCCAGGCATGGCAATGAACACCTGTAATCCCCACAGTAGCAGAGGGA
GCAACAGGCGGCCCACCCCTGAGCTTTCTGGCTAGCCAGTGCAGTTGGATTGGCAATGTACAAATTCAGTGAGAAGCCCTATCTCAAAAGATGA
TGATGGGGGCTGGAGAGATGGATCAGCGGTTGAGATCACTGACTGCTCTTCCAGGGGTCCTGAGTTCAACTCCCAACACCATAATGGTGGCTCA
CAGCCATCTCTAGTGGGATCTGATGTCTTCTTCTGGTGTGCCTAAAGACAGCTACAGTTTACTCATATACATTGGATAGATAGATAGATAGATA
GATAGATAGATAGATAGATAGATACATAGATATTTTTTAAAAAAAAAGATTTGATGGTGATGATGGTGATGGTGATAATGTCTAGAGCAATTAA
AGAAACATCAGACGTTGATGTCTCCACATATGTATCCACACAACTGCACATGTACTATCCACATACATAAAGTTTTTCACGGGGAAAAAGGGAA
GGTTCTGTGCCCAAACAAATTTGAGAAACAGTAACTTAAGCAAAGTTTGATAACTATGTCTTTTTCCTGAAGTCCATCAGCCTTTTTTTCCTGC
TGAGTCAGTACTTGATCCCAGAAGTTTAATTTAGCCAGCTACTTTGTGTATACAATTCTGGCTGACATTTTGGGAAAGAAGTCATGTGAGCGTG
CACCCGGTGTGCATGCATGTACATATACACACACAGACACGTGTACAGAGTATAACAGGTCTTAGGAATTGGAACTCACTAGGAACGGCCTGCG
AAAGACTACAAGCACGGGGCTTGGTGCCATTTTCAAAGGCAACTACTAAGCAATACGGAAATCTGGTAGCTCCTTTTGGAGCAGCAATTCCCTA
TCCAACAGGCAGATGGGAAATGTTTTAATTTTCTCTGGATACATAAAAGAAAAGACAAAAAAAAAAAAGCAAATGAAGAACGTTTGAGGGGCAG
ACTACCCATGAGCAAGCACACTGATTGTGCAGACGTGTGCTTTCCCGTGTGAGACTGTGATGTGGCCAAGAGCACACTCAGCCAGTACTACTGA
ATGGTTGCTATTGGTTCTACGATGTTCTAGGCTGTTGAGGCCGTCGCAGCTTCCTCACAGTTCAGAGGTCCTGCTCTGAGGAGTGACTTTTCTG
TAGCTTGTCTGAAGACAACAATAACAAATTAGCAGCTAACTGGTGGTTTTACATAATAACATTGCCTTTTGAAAGCAGCACTGTCTTCTGCACT
CTTGTGTCCGTGATGATTTGACAACCTGGCTTTCTTTTTGCCTTCTCTATTGCAGTTGCATATGGGGCTCATGGCTTTAGGGATTTTCATGCAA
TAATTCCCAAATCTTTCTCTCGTAAGTATATGCTTTGCTTCTAGAAAACAGATGTTCATTTCATGGTCAGTTCCATCACACAGACACCACCACT
TGCATGTTCTCTCATCAACACCTTCCTTTATAACTTGAAAGTGACATGGACTAAATGTTTGCCATTCTATCATTAAACACCCAGCATCCAGTGT
GTCATTGATACAATAAACTGCAAAGACAGACCGTGAGGGTGTTGTTTGGTTTTTGTTTTGCTTCTGAGGCAGGGTTTCCCTATTATTCCTGGCT
GGCCTAGACTGCTCTGGGATGCCCAGACTCATCTTAAATTTGCAATGATATTCCTGTCTCTGCCTCTGCCCCTGCCCCTACCCCCTCCCTCTGT
CCCTGCCCCCTCCCCTCCCTCTGCCTCTGCCTCACCAATAAGGATCAGATAGTGAGAGGATTATAGGGGACTTTTGGGATACCATTTGAAATGT
AAATGAAGAAAATACCTAATAAAAAATTGGAAAAAAGAAAGAGAGAGAGAAAGAGAGAGAGAGAGAGAAAGAAAGAAAGAAAGAAAGAAAGAAA
GAAAGAAAGAAAGAAAGAAAGAAAGAAAGAAAGAGAGAAAGAAAGAAAGAAAGGTGAAGAAAGAACTAATGTAGCCACAGTGGGTGTCTCACTG
GGAGGCTGCTCAGCAGGGTCCTGATTAAAACTGTGATCAACAACTTTGTGGTCCATGCTTCCTGTCAGCATCAAACAAACCAACATCTTTTCAG
ATAACTTGTGCAATTTTGTGTGACAGGAAAAAAAAAAAAGGTGCACCCTTTTTCCCTTGCTCTGGAGTGCTAACCTCAGAACAGAGAAGAAAAA
CTCATGGGTTTCCAGCCCATTCTTCTGTGCTGGCTCGCCACGTAACCATGCACCATGTTAGCGTGCATGCAGCCTACCAGCTCTCCTCGGAGCT
GCTGTGCCGAAAACTATATGGTAATTTCATCTCTTAATACATTGAAAGTTGAAAATGATAACTATATTTGAGCAACCATAAGGAGTATTTTCAA
GAATAGAGAAGGCTTTTTTTTAATGCAAATAAAATCAATGCAAAAGAGTTACAGGTTGTTAGACCCCTTAGGTCTTAAGCCTTCAGACCTTGTA
TCAATAAAATGTTTAATCTTATGAAGCAGCAGCAGAAAGCAGAGTGTATTGGCATCACTTTGAGAAGAGCTTTGTCTGTGTGTCTTGCTTCAGA
TCAAACCAAAGCACACTCTACCACCAAATTACACCCTAAGACCAGCTTGCTGACATCTTACTACTCTAATCTTAATATTGAGATGTCAGCCGCG
TTAGGTTTATGATGTCCTGTTATCAGATATTACTTGGGAAGTACAGTACTTAGCAGTATCCATCTCAGGATGCTCCTGGTCAAAGGCCAGATAG
ACTTCCCTCTCCAGAATATTAGAAGTTTGCTAAGATATTTCTCCTATTAATTATTTCTTCAGTTCAATGTGAAGGTAAGAATTTGAGATTTCCT
TCTTCATGTAAGCATGTATGTTCACATAACATATTTTTATCTGTGAGCTGTGAGTGTGCCAGGGCAGGAAGTCATGTTAATTTTGAGCCTGCCA
ATCACAGTTTTGAAATGTTTTGGTAAGTCAAGTGCACATAAAGGTAAGACAGCACATTCTAAGACACATTTTCATTAAGCCTGAGGAATGGGCA
AAGCCCAGCATTACCTACTGACCAAGCAGATGGGTGAGGTTTTCAGGATGGGAAAAAATGACAGTGGGAGATGTTCTGAAACATGATAAATGTT
TTCATGTTTTTCATGTCTATCTGCTTATAAAGATTAGTTCATAGTAATACTATCTCTTTTTCTTTCTCTCTTCCCCTCAGTTGTATCTTTCTGG
AACAAATGGTTGGTTGAGCCTCAAGTCTCCGCCCAACAACAACCAAACTGTTCTGGGCCAATATCGCCACCTTGTGGTCATGCTTGAGAACTGA
CCTACAGGCTTCCTTCTGGAAGTTAAAACAAACTTTTGGCCTCCTCTGCCATCTTTATCCCATTTTGAGTCCCTAGATACCCCCCAAAAATTAA
ATATGCCTTAAAATTCTTCTTTCTTAATAAGTTTTCATTTTCTGATCTATTTCCATCTCTGACTTCATTGTATTTGAAGGCTAAACATCAAATA
AGATTATTTCTAAAATAGGCTTGATTAGGTAGAAACCCTATTATTTTAACTATTTTTAAATGATATTAAGTCATGCAATTTGTTCTAAATAATG
CTTACAATTTGTTCTGGATTTGAGACAAGGTGCCATGTAGTTCGGGATAGCTTCAAGTTTCCCAGGGAGTTAATGGAGGATGGCCTGGTTCCTC
CTAACCCCTTGTCTCTGCCTCCCACCACACTGCTGGCTCCTTTAGAGGAAATAAAAAACACTAGTCTCCACATACATATGTGTCTCAGGTCTTC
ACCTATTACCACAAATAAATGAAAATGTACAAATATACCTTATATATTTTAATAACTTTGCTTATTAGCTACAGTTATTATAAAGATCTTTACA
CTTGCATCTGCCTTTTTCCATTTAAAATATTGAACATTTCCTTTACCTGACATAAAACCAGGCTGGAATGACAACTTCAGAATTTTTTTTTCCA
ATGGGAAAATAACATTGTACATTCTGAAATGCTACTTTTCCAGTAAATATTAAGATGCAAGGGAAATAACAATGTAGACATCAAATCTGTGACC
CAGAGGCTACCCTGCATATTACACCTCTGCATTAAAAATGCTCAGTTGCTCACAAGGGCACACTTGGCAGCCAAGCCAGGCCTCCCAGTTCCTG
CTGGCCTGAGTTCCTTCACTTCTCCAGAGTCTTTCATTCTAACCTTTTCCTAGATGCTAGAGGCCTTGCCACACTCGGGTCAGGAGGGGCATTC
TCTTAGGACAGCAGGGTGACTATGCTGGTATACCTCTAAAATACATAATGAGAGGGTTTTTTGTTTTCTCCATTTTAAGTAACAACTGAGAAGT
AAGGTAGCTTTTATAAGGGGTTTGAAAATACCATGTTAACATAAGCCATGTTTTGTAAACACTCAAATTGGCCTCGCCCATTATCTGTCAGTAT
CTGGAAGAGTAGGTTGAACCCAGAGCTTTGGGGGGACAGGGGGAATATTCACAAGACTCCATTCATGTTTTATATTTAATCAGCTCAGTGAAGC
ACTTCATCAAGCTCCCTGTTGTTCTCAGTAGTAGACTAGGGACAGAGCTTACACAATATGTGTGAGTCTATTCCTTATATGTAGCATTTCACTG
AAGGAATACCACAGCTAAACAGTTCTAGAAAGAGTCCCTTGTTGTCATGGACAACCTTTTTGGTTGAATAGAAATCTGTCAGATTCCTTATTTA
GCAAGCACCCACTTTGCATTTATCCCCAGAGATATGAGGGCCTTTCCCATGTTTGTATAGAAACCCTTCACATAGCAGGAATCTTAAGTTCCCC
ATGCTGACAGTATAACCTGTTTTTTGCCAAATCATCTTCTCTCTGGTCACTCATCTCCGTTAGACATCACAGACCTTCCAAGTCAAAACATGGC
TGGCAGTGTCTGCATCACAGCCATAAGTCCCAGCTCAGCAAGATGTGTGCACAGCCTGCTGTGTCCCCACTACTTACGCTCCTTGGCCACACCC
ACAGGCATCTCCAGACACAGTATCTTCTTTCTGAAAAACATAAACTTTCAGTCTTTAACTTTCTGATTACTGATCATCCTTCCCGTACTATCTA
TTGACTCTCTCTCTCTCTCACTCGCTCGCTCGCTCGCTCTCTCGCTCTTACACACACACACACACACAATCATATATAATTAAAGCTCCAGTAT
AAATCAGGCCAAGTAGCTTGCACTTCATACTCTATGTCCTTGGCACCTATCCACCTATTTTTCCACATACATTTCTTACCCCCATTGTATCTGA
TTCCCACACTGACCCTGGGACAACTTGTGAGCAACCCTCATGCCTCCCGAGTTACCTTTCTCCTTTAATGCTATCACAGCTGGTGGCAGCACCA
TCTTCTAAGGCAGAAATGCCAAAGCCCTGCCTTCAGGTGCCCTAGTCACCCTAGTGATAGGCCCTCGGGGGCTTTCAGGAATCCAGTAGCCTAG
AAACCACCACCCATCACCTGATTCATAACCTGCTTCCTCCTGACTCTCCACTCTCCCTCATTTTGCAAGCAGCCTGCTAGAGGAGAGCTGCTCC
TGGTATGAGAAGCCTGAATGTTACTGCCCATGCACCCTGCTGTCCTGGCCTTCTCTGCGAAACACCCACATAGGCATTAGTGACTTGTGCCAAG
AAATCCCCCCAGAGGATTGCACATGAACTCTGCTGTTTTTATTCATACAGAAAAATGCTTACAACTGGCATGAGCTTCTCTGCCCTGCATGCAG
TGTGCTCAGGAAAGCAGCATCACAGCCTCCTTTACCTCAGTGGAGTCACGAACATGCTAAGGGGATGGATCATCCCAACACATGTTCTTCCACA
AGGTGATTTTTACCCAGCTGTGGATGCTTCCTGTTTATACACTTTGCTGCAGTTCTGTGTCTTAGCTGTCATGGCTAAAAACTTGCCACATGAG
CTATGATCCTCTTCATGGAATCTTTTACTACAGAGAGAGAGAGAGACAGAGACAGAGAGAGAGAGAGAGAGACAGAGACAGAGAGAGAGAGAGA
GAGAGAGAGAGAGAGAGAGACAGAGAGAGAGAGAATATTGAAAAATAACCAGAGGTTGAGATTTTTGTAGTTTTACTGTGCTGACGTAGTCTAT
GATCTCTTGCTATAACAAAGATTCCACACACTAGTTAGCATATAAACAATGTAAGTTCGTTTAGCTTGTAATTGTGGAGGATAAGAAGCTGAGT
GTGGTGTCTACATCTGGTAAGGGACTTAAGTGGCGAGATGGGACATTGCTCTAGCACAGGCCTGTCTTCCTCTTATTCAGCTTTGCGTTGCTAA
GTGAAAACCCAAAGCAAGGGGTTCCCAGAGGAACGTGTATCTGGTTACGCTCTAGAGGTTCCAGGCAACCCAGCAGGGAAGGCTTTGGTGAGAG
TGGCCAATGATAGTGATGGGAGCATGTGTCAGAGCCAATCACACATCAAAAGTTGGGAAGTAGAAAGTGACCAACCGGGACAATATAGTCCCAC
AGTCTTTTTGAGGGGACATCACTAGCCATCTAAGGACTTCCCACCAGGTCCCACCTCAGAACAGACTCTCACCCTGAGTGAGCCTTTGGGAAGT
GTTTTTCCAAACCATAGCCATGTGAGTGCAGATACTGGTGAATTTGAATCTACCCAAAGATAACCTAAGAATCGCTACTCCAGAGTCCAGTGTC
ATTAATCACCGCTCTGTGAACCGCAGACCTTTCCCCTCTTGCCACATGGATAGGATCTGGCCTCTCAGGGAAGTAAGGACTGCTGATTTGCAAA
GTTTCGCATCAGAGACTTGTACGGAAAAGCTTTTAGAGAATTCCCCATTACAGAATTTCTCAGTGTTGTCCTGGACATGTGCGGAATTCAGCCT
CAGAGTTCATTCTCACTTCCAGGACCTCAGAGCCCATGCTCCGGTTTGTACGTCTCATCCCATTACTAAGCCAGTAAGTCTTTTCTGCAAAGAG
CTAACAGGATAATATTGGCAGTAAGTAGGCACTGGAGACCTCTGTGTGGAGACCTCCCAGATCTAGAGCTAGCAGGTTGCTACCTCTGTGACCA
TAGCAAGTTCTTTGACTGAACCTCTACCACTACAAAATATAGGATGGTAATGGTGTGGCCCTTTTGAGTTGTTGTGAGGTTAAATGGCAAGTGC
CATTAAAGTACCAGAGGGTCTAGGACAAGGTAAGTACAGTAAGCACTGTTGGGATCAGCCAGAGCCTTGGTGGATGTCACTTCCTGTGCCCCAG
TCCACTGCTCCTTTCCTCAGTCCTCTCAGCTGCCCCAGGCTGGCCATGGCTATGAAAGCTCCTGTATTTACAGATGAGGAATGAGGCACAGAGA
AGTCAGATCACCTGCATAAAATCACTGCGCCTTTAAATAAAGGTGCCACCCCTCCAGGCCAGCCATTTTTCTCTTGGTGTCAGAACCTCAAATG
TCCCAGTCAAGAGAAATTTGGGAAATAAGATTCTCTCTCAGGCTGTGAAGCAGGTGGCCTCCTTTAACTCAATATTCTCCATTGTAAAGTAACC
TTAGGTTCCCCTCCAGGGTCGATTTAAACACACACCTGAATTCACCCCAAAATTTGGGAACCAGAAGGATTCGGGAAACCCAGAAGAGCACACT
TCAGACATCCTCTATGGCCATGTCCTGGCTGCTGCTCTGGGGACCAAACTTTGAGAATCCTTGACCAAAAGTGCTCAAATTATTATGTCAAATA
GAGGCTGGAGATCCAGATCAATGGTTAATAGTAATTGACTGTCTTGCAGAGGACCCAGATTTAGTTCTAAGCACCCACATTTGGCGCTTCACAA
AAGCCTGTAGCTCTAGTCCCACAAAGCTGCACACAGTGTGCATACATAGAAGCAGACACTCCCACATACACACAAACGAAAAGCAAATGCCTGC
TTCTTAATTATGTCACAGTCACCTCACTGGTTATTTTACTTAGAGCAGCATACCTCCCTAACTCTTATGCACCTAGAAAAAACACTGAGAAATT
ATGGCTACAGTTTCCACTGCCATTGCATGTGGGATTCACCACTGTACCATTAGTGTTTTGGGAGCATGTTTATGCAATGTGTTGTATTTTCTTT
TCAAATGAGTAGGCAAATAACAAAACTACATGACTTGTGCTGCGACTACAGCAGAGTCAATAGCGGTGTTTGTTTGTTAACCTACAAGCATCTT
CTTCTTTGAAAGACTGTTACCTGTTGCACTCATAAACTATTCCAGCTCACCTCTTAGCAAATGAAGGAGATGTGACGACACCTCCACCTTAGGG
CACAGGCTGGGGTATGCTGCTATAAGATAAAAAAGAAAGCCAATTGCTAAGAAAACGGAACTTGGACAAGGGAGTTGGAATCAGAGGTCCAAAC
AGCAAAGAGCTGTTCCAAATTTGTTGTGCATATGCGTAAGAAAATACTCACCCGTTCAGACCCGCATCTCTCCCTGCATCCCTAAGTGCATCCC
GTAGGTACCATCCACACTCTCTCGAAGCTTGGTGCATGCACCAGTCAGACTGCCCGCCCTGAGGTACAGGCTCAAAACTGCTTAGAAGCTCCAA
CTGTCTATTTGATCCCTTGTTGCTGCTGTGTTGCTATCTTGTGACTTATTTTTGCAGTGACACTGAGTGCCCTCCTGTGTTGTCTCTTTCAGCC
AGTAATGTTAAAGTAGAGACTCAGAGTGATGAAGAGAATGGGCGTGCCTGTGAAATGAATGGGGAAGAATGTGCAGAGGATTTACGAATGCTTG
ATGCCTCGGCAGAGAAAATGAATGGCTCCCACAGGGACCAAGGCAGCTCGGCTTTGTCAGGAGTTGGAGGCATTCGACTTCCTAACGGAAAACT
AAAGTGTGATATCTGTGGGATCGTTTCCATCGGGCCCAATGTGCTCATGGTTCACAAAAGAAGTCATACTGGTAAGGCCTGGGAGTTTTCCCTT
GAGTGTCTCCTGAGGTCCTGTGGGGGCTGAAGGAGCAAAATGTACTGTCAAGGGCTGGGGATGCAAGTTAGTATTGTAGAGCACCTACCTAGCA
CACACAGTCCCTAAGTTCAAAGTGCACAAGGAGGGTGGGAAAAGGAATGTCGTCTTGAAGCATGTTCCCCATAGACTAGCAGCGCGGCACTTGC
TTATAAATAGCTCCCAAGTTGTACTGAGGCACAGCTTTCTTATTCTAGGGCAGTGTCTGAAAGGTCTTCTCAGCATGTACCTAATCAACCCTGT
GAACGAAAGAGAAGGCTAACAGCATGTGTGTGTCAGCTTCTGAGACTCTGATAGTATACTCGCTAGAAAAAAAGAAAAAAAAAATCCCAGCCAC
AGTGCTGACTCTCATGTCCAATCCTTCACAAGACGAGATCAAAAGCTAGAGACACACCAAAACTGACTTCACAAATTTCTCATTGAGAAACTAC
AGAGAATACTTGTTTTAATCTTGTTAACACTTGGGATTCTCTATTCTGAGGCATTAGTGAATCATTAGTGAGCCATTAGCCTAGCAGCAAAATG
GTCTTTTCGGAAAGGGTGTAGGTCAGCATAAAGTGGTTCACCCTCCAGTCTGAGTCTCTGAGTCAGCTAGCCATATTGCCACAAGTTTTCATCA
CAGAGCAGTAGGGGACTTTCTCTCAAACTCCTATTACCGTAGAAGGTTTGCACAGGCTTTAAGACAATAAGAGAATGCAATAGTCTATTCAAAA
CTAAGAAAATGTTCAAGAGCCATGCCTACCCCTGCCACTGGCACTGTGGGAAGCCTAACCAGCTTCAGTCGGCTCTTCTACTCCTGTTCCACAT
GTATATGAACAGTCAACTCCTTGTTCAACCTAACTGTTACTCCACCACCACTAAGGACACTAAAGAGGCTTCCTAGAAACATCAGTGGTGTTCA
GGACAAGTGTTTGCATGGTATAAGGTTTCTTTGAGAAAAAAACTAAAGACAAACATTACTCTTCTTTCCATAGAAGTTTCTTGAAAGGTAGATA
TTATAACCTGGCAAATTCACCTAACTCTTATAGCCACAGAAAGCTCACATGTAAAACGTATAGAGCCTGGGCTATCACTACCCATACACTGGCT
TCTTTGGGCCCTGAGAAGGCTGGCATCTGCTAGTGCAGTGTCCAGGAGGGAGAACAACACGCACAGATGAATGATAGCGAGTTTTACTAGACTA
TCTCAAGAAGCTGAGGAAGATGGCTTGCAAAGGACAACCTTGTCTGTTTCTTACACGGGACTCAACAACCGTGCGTTATCCAAAAAGGAATCAG
GAGCTAGAACAGGTATAGAGCAGTAGTGTCATCACCAAGCAATGAAGGCGTTTCCAAGGTTGGGTTTTATATATGCACAGAAGCAGTTTCTAAA
ATTATATATTCCACGTATAGTATATGTACAAATGATTTATAACATGATACTTAAATAAATGTTTGTCTTCAACAAAAGTTTAGCTCTAAAGTTA
GGCAAATTTGGCTTTTCTGAAAGGAGCCTTTAGTTCTCAAGTGACTCGTAGAAATAGACCTGGCATACCCAGCCCTGAGAAAACCAAATGTGAA
GGTAACCTTGCTCTTGCCTTCTGTCACGCAGTGGAAATTAACATGGAGAACCCTGTGACAGATGCTCAACCAGTCTAGGGCCTGTAGCAAACCA
TTGCTGATAGAGAGCAAACCTCTGACTGTACAGTAAAAATCCCCTTACATATTTGACAAATGAATCAAATTCTCGTGTAGTAAATTGCTAACAT
ATGACTGCCTGCCTTGACTTAAAAAAAAAGAAGAAAAATTACATGTAATGATTAAACCTGCTATCAACAGATCTGGGAGGGTACCTGATATTTG
CTACATACTTTCCTCAACAAATAGTGACTAAGTATCATACCTACCCCAATATGCTAAGTTCTTCAATTATGGAACAGATAACTTACAGAAAGAG
GAAACAGGAAGAGACTACACACACGCACGCGTGCACTCATAGACAAAGTTTGGTCATTGCCAACTCCACAGTATATCTCCGTATATGTGAATAT
ACAAATCCCCAGCTAGAAGTAAAAACCCCATTTAGCCAACTAGGTTTGAATAGCTAGACAGAGCAGATGGCCTTTCTCTTCCAGGTCTGGGTGG
AATGTGTCAGCAAAGTTTTGGGCTCTGCATTCCTACAATAACAGCAGGTTATGAGAACACTGCCCACCCCTGTGAAAGGCGCTGGGAATCACTT
GGAATCTTGAGAACATGCAGGGCCTAATTCAGACTCTGGGAGAATCTGGAGAGCCAGCATTCCTATGAAGTCCTCGGAACGCTGGGCATGGAAG
CTAGAGCACAATAAGCCCCCGGGGACATCCTGCTGAGGACAGGACAATAAGCAGAGCCATCTCTGTGGCCTATGAGGAGCTGATGTACGATGTG
CTGCCCCAGTGGACAGCTAGGATGTGCACCAGAGCCTCTCTCTCTTCTTCCCATTGCCCATGACCCAGTCAACCAGCCTCATGACTTGCAGCCC
CTTTCTAGTAAACAAAGATCTCAGGGGCATAGCCCAGCTTCTACTCCTCTCACTGCGTGGCATTCCACTGCCGCCATTTTCTAAATGGCTTGTG
GGCACCGGTGTCTCACTTCCCCTTCGGTCCTCAGTTGGTTTCATGTTTGATTCAAGTGTCACAACCCCAGCGTAGCCACCAACAGCTCAGGGTG
CATCTGAGGATCACCCTGGGGTGGTAGGGAGCTGCAGAAGGGCAGCGGGGCCCACCTGTAACATCATTATTCTGAATAGCAAAGACTAGGAAGT
GGCCTGAGCAGAACAAACAGGCTGGCTTCCTGTCGTCTCCTGCCTAGCAGGTGCTGCCACAGGCCTGGTAGTTACACATCTATTCTTGTATGCC
AGGCTTTTTTTAAAATCTACCTTCTCCAGACAGGCCTTCGCATCTTCTACCAGCTCTTTTTCTTTTTTTAAAGAAGATATTCTTTATTACCCAA
GTAACAGGTCGCAAACGTTGTGACAGAATAAAAAGTGTGCAGTTCCTGGGATGGAAATTAAATTCAAAATTTGCAGTATCTAATGTCTCATCCC
AGTTAAATGTAGGTGGATACAAGCTTAAAGGACCTTAACTTAGCTACAGGCTGTTGTCCTCCAGGAAACAGGTCATGGCCACTGTCAACAGAAG
CAGACATGGGCACTGTCCCATGATCTTCGAACACACCCCCTTATGTGTAACACCTGCACTGAGTGAAATACCATATGATCCATTTTAGAAATGT
GGTCTTTAAGCCTCCCCACCATGGGCTGTACATTCATGGCCCACACAATCAATTGGAAATCAGTAGATTTACAGTAGCTCTGCCTTACCTTGCT
TTGTAGCAAGGCTTGAGACACCAGGCAAGCAGTCCCCATGGAGAGATTTTGACTCAAGTGAGAAGGCAGGTTTTAGTCCCCAAAGAATGCCCAC
CTTCCCTTCCTGTAGAAGAACAATGTGCTTTGAATTATCAAATTCAAAGAAATTGAAAGAAATTGATAATTCAAAGGCATTATTAGTCCTGTCT
GCCTCCCAATGGCCAGAACACTAGCTCGAATCACATCAGGGAGACACCTGGAGCGCCTCCCAGCTCAGAAAGGGGTCACTCAGCTGCTAAGCAC
GTGACTTGGCCCACTTGGATCACCAGGAGTGTCTTCTGAAGCTGTCCCGTGTGCTTTCCCATGCAGCCTGAGGGCCCAGCCCTCTCTGAGGAGC
AGCTACAGTGTTACGCACGTTCCACTTCCCCAGCCGGATCTTCCTGCATACACTGCTTACTTTTCTTGTTTCCGCTCCTCCAGTTGGAGCTGAA
CACTTTGTGAACACAGTGTCCGCTGAGTGTGCACTTGGGTTTCCCAGGCGAGGTGATGGTTAGTGAGGCTTCTAAATGCTAACACCTACAGTTA
TCGTTCTCCATCCTCCTTGACGTTAAACAGTGTCGTCACGTTCACCTCGGTCTAATCCAGACAGGAATTTGGGGAAACGTTGAATACTTACTGG
TTAGTATCAAGAGCCCTCTGACTGGCCATTAAATATCATTGTAAATTAATTCTAACTTTTGTGTTTGCAATGCCCAGTGAAAAAGACCTAGAGG
TAATTCGGAAATTCAGGCACCAGTATGCACATTAAAGCTTAACCTGGCACAGCTTTTAACAGTACCACCTCTGATAAAAAAAACTCTCTGCTGC
CCCTCCATTTCCGTGTTGGAGAAATGTTAATTCGGTATTTTTAACACATTGTTCACCCTTAAGAGAAATGTGTCTCGGGACATGGGTTTCATAC
ATAATGGTCTTTTAAATGAAGCATCTCTCCTTCAAAGGCAGCGTTTATAAGGCACATAATGGACACACCATTCCTGAGAGTTAAAGGCTAAGTT
AGTGTCCACCCAGCACGACAGTCACACACTCTTTACTCACAAGTAGCTCCTGCAACCATCTCCAAAGCCAGGGTGTAAGCCAAAGCTCTTGGGC
ACATAGTGCACGAACCCTGGGCTGTCTCAGTCACAAACCAAGAAACCTCCTTGGAAACGCCCTCAATGGCAGCAAGATCTGTACCTCGAACATG
ACTTGTCTACTGTGGACACAAAAATGAATTCGAAGGATCTCTGAGTTGTGAGGAAAGGGAAAGGCAGGAAGTCTCAGGCAACTCCGAGCGCGGG
AGCCAGGGGTTCCCTCTGGAGGACACGTCACGGCTGTCCTGTCCCTGAACTTCTCTTTTATTCAGTCTTTCTCCAGTCTCTCCCTCTCACGCTC
ACACTTTCTCTGTCTGTCTCTCTCCTGATTTGCCTGCTTAGGGACAGACAGGTAATGGAGAAGAAATTGAAAGGGAAAATACAGGGAAAATGTA
AATGAAAAGAAGTTATTATAACTGTTATAATGAAGTGCCTTTCATTTAAATATAAGAATGTAACGCTGAAATGAACTTGTGATCCTGAAATGCA
TTTTTAATGAGTTTCCTTTTTATTTTGCTGCTTCAGTCGCATATTTTAAAGACCCTTTGAAAAAAGCCACATTAAAAACCCCACCAAATGCCAC
AACACCCAAAATTGGATATTGGTTTATTCCAAAACTGCTGATCAGGAAGAGTGACTCTTCATCACAAAATGTTGCAGTCACTTTATTTAAATGA
GTTTGAATTTGCATTGTGATGTGCCATTCTGATTTAGGGAAAAAAAATTAGATTTTCAGATCAAATTGACCCAGCCAGTGAAGCGTTAAGCAGC
TGGCAGGTTTAGTCTCAAAGCCTCATGTTCTATCAAACCTGCAGCCGGTGGAAGTCACCAAGCCCATGGGAAACAACTTTCTCGAGGCCGCGCT
CCTGAGCAGCTCTCTCTCACTGCTTACCATGCTACCCTCTTCCCTTCTTGCCCAGGTGAACGGCCTTTCCAGTGCAACCAGTGTGGGGCCTCCT
TTACCCAGAAAGGCAACCTCCTGCGGCACATCAACCTCCACTCCGGTGAGAACCCCTTCAAATGCCATCTTTGCAACTATGCCTGCCGCCGGAG
GGACGCCCTCACCGGCCACCTGAGGACGCACTCCCGTATGTTCACTGAGCATGGCAGGGATGCCATGTAGGGACCCCGATCATGTGTTCCATGT
TCCCACCCACTGCCCTTCCAATCCACCCAGTCCACAGCCCTCTGGGGTGTTGGCCTCCTATGTGGTAATCCCTTATTCCTACTGAACCAGAGGA
AATGGGGGGGGGGGGTGCACACATGGAAACCCTGCCTCCTTGGTGTGTTTTACAAGAGCTTTCCCTCCCACCATGTCAGGTAAGTGGGTATTTT
TCTGAAGTATACTGCTCATGCCCTTAACCTTCCATACACATCCTTTTACACCTATTGCTGTCTCACTCATATCACTGGCTTATGTGGAATATAT
TGACTAGCAGTAATAAACGTAATTATTTTCGTTGCAGAGAGATAGGTTGGTCAGAATATAACCCTCTCACCCCAGCGCACACTGCCCCAGCCAG
AGAGTAACTTCCAGGCTGGAAACCAGCAGAGGCTTTGATCGGACTAATCAGTCTAGAGTTGTCAGCAAACTGCAGACAGGAAAATTTCCCTGTA
AGGATGGTCCAGATACTCTAGAGTCTCAGAAGACCATTTATATAAATGCTGGACAGTTGTCAGAATGTTCCCAACCTGTCACACAGACTCATCT
TTAGTTATCATACATCTTCTGCCTCCTGGGTGGCATCTTATCCAGTAGCCCTATAAGCCTCCAGGTCTGAGATATAGGAAATAAAAACTATATG
CTATGTTTGCTTGCAATCTAGTATTTGTAACATGCATATGTCGCTTCCATTCTGCACTGTCGTGTGGTGTCACGTGCTACACTGGCTTTAGGAG
CTCTAGGTTGAGGGGCCTTGCCCCTGCCCTCCTACAGTGCCCTGTCATAACAAGCTGTCACTCTGTCCTTGCTCAGTGACAGAAGAAAGGTCCT
CAGCTCATCTTCCCAAACAAGATCTCAAGTTATCCATCTCTTCGCCCCATATTTCCTAAGCCCCTCAACAGCGTCCTATGTGTGTGTGGCATGG
TAGAGTCCCGAGGGTCCTGCAGGAGCAGAAAGAAAAGACAGTCTGTCCTGCCTGGAGGATCCATAGAGATTCCCACAGCAGGAGCGCTACAGGG
CGGGGCCAGCTCAAGCTAAGTTTGCTTTAGAGGAACTCTAAACCAATGAGAGCAGAGGTTATTGCAGCACACATTTTAACACGTGGTATCCAGA
GCTGGGCTTTCTGGTTAGTGGTCACCTCCAGGTGGGCAGATGTAGAGAAGAAAAGAAGCTAAGGCTATGTGTCATCTCCCCTGTACTCTACTTC
CCTACCTGACTGGCAGTAAGCAGTCAGGAGACTCCTAAAAGTGTGCAGCAGAAAGTTGTGACTTGGGCGAGTTTCTTGGCACTGCCAAGAAAGG
TCGTCCCCTCCGTTGAGGAGCTGTCCTCTCAGGCAGCATCTCCGTCACAGGACGTGTCAGGAGACAGACACCTCCCTGTCTTAGGTAGGACACT
ACCTCAGATCTGGGAGGCGTTTTCTACAAGGAATGAGGAGACCCAAAGGCTTCCTGGGATGGAGGTAACTCTGTCTGTGTGTAGCTGCTCCACA
AGGTGAACGCACTCCAAGGCAGGGAGTGACATACAGACCTGGGTACGTCGCACCTGACTTAGGAGAAAGTCACAGAGACACAGTAGGCAGGTAC
CATGCACTCAGATTGGCAGCAAGCACGACTTCCCAAGCCAATGGAAAATTCCAAGACCCACTTTTACCCTGATACCACTCACAGCACTATCACC
CTTTAATTACTGGTTTACAGTATAAATCTTTCCTGCATCCCCATCCTTCAACTTAAGATAGCAAGATAACATCTTGTGAAATCAGTGCTGAGTT
TTGCGTTTTGCCTACATGCTTGATCATTGCATTTAAGGCATGGTGGTATCCTCCTCTCGGTGGGGCTAATGATTTGAATAATTATTTAAAACAG
ACAGAGGGCTCCTGACAGTTATTTCTGCCACAGAGTCACCAATCTCTCGTAAACATCTCCACCAGAGACCTGGGGCATTGGTGACTCGATTGTC
TGAAAATGTACTTAACAAACACAGCTCTGGGAGAAAAGAAACACTGTGTTTCCTTCTTCAAAACAATTTTACCAGAATGACAGGACTTCAGCCT
TTGTCTGCAAAGTCCAGGGTGTTATATTTTCTTAATGAATGGCCACGCCCACATTCCATTAGAAGCTAGGGGCAACCATAGCTTTCCCTAGCAT
CCTGTGGTGGTCTGACGTTCTAGACTCTACTGTGATGATGGAATTTGTGCTGGTATCAGGGTTGGTACTCTTTTGAAAACTACAAACTTTGTTA
CAGTCAGTTTGGTTCTCGTGTTCTAGCATTAAAGTCAATCATATACTAAGAAAAATCAGGTACCATACCATTTATATAGGGAGGCAATTTGATT
CACGAAATCACTAAAATTAAATTTTTTTCGGGAAAGGGCATGTATTAATTTCTGTAACCATAGAATATAAATGTGCAACCATATGTAATATTCG
TTCCATATTTCATCATTTGTGGTACATCACTGTCTCTAGACAAAAATTCTATATAACTGGAGAGACGGCCCAGCAGTTGGAGCACTGGCTGCTC
TTCCAGAGGACCCACATTTCATTCTAGCACCCACGTGGTGATTCATAACAATCTGTAAAGCCAGTTCCAGGGACTCCAACTCCCTCTTACAGCC
TTTGTGGGCAGACACCAGGCAAGCAAGTGGTACACAGACATACAGGCAGGAAAAAAACCCATACCCGTGAAATTAAGTAAAATAAAAATCTGTT
CTGGAGTCTATAGATGAAGCTTTCGTTTCCTTGAGAGCATCTTCATAGCATCTGGTCACTTAGGAAAGAGACTTAAGTCACACTGAATTACCAG
TTATCAAGCATTCCTGTTTGGATGGCTTTATATCATACTTAGCATGAGAAATGCAATGTGATGTTGAGGTGAAACTCTATATTCCACATAAAGT
AATTGGAGACCATCTTCTCTAAAAAAGGGTCTTTATTGAAGTCTTTAAAAACCGATATTATATGGACCCTTTCCTATTCTTCTAAAATACCTCT
CAAAAAAACCAGGAAGGACTAAACTCTTGTAGAACCACATTGCCACACATAAAAGCCACTGGCCATACTTAAGTTTTAGTAAATTAAAATTAAA
CAAAATTAAAATGTTAGTCCTAACATTAATCTAGCCAAACTTAGAAACTCCATGTAACTGGTAGCTACCATAGTAAATAATACAGTGAATGCCA
AGCTGAACAGATATGCAAAGAACACTTAGAGTGCTCAAGTCGTTAGCATGAGTTCTAATGGCCAAGGCTGATCTGGGAGTTTCATCATCTCATA
TTCTTTCGGCATAGAATAGAGGCTTTTCATATCCTCTTCCTATGCAAAACACATTGTATATCCTCCAGGTATATGAAAATGAATTTGGCTTATC
CATATCCCTTTTCATTTTGTGTTTATATATTGTATATTCTTAATATTCTTAAGTGGGATAGTATGTACTATAGTGTAAAATATATTTGTATTAT
ATAGAAAGATACAATTTAGAAATACTCATTTCTTTAAAGCCTTTTCCTGCCATGATTTCTTAGAGACTTGCGCAACCTCATTTTGCCTCCTGAA
TTTTCACCTTATTCATTAGAGGTTGTCACAGTAAGGGGTCAGCCTGGGGAGAGGCCCACCCTGACAGTGAATCTGTACTCTCCTCATGTTTCTG
TCCACACTGGAACATGGAGATAGTTTACTTTTTACCATTAAAGGAGACCCTTGAGTCCGTGTCATAGGTTAAGATCAAATTCATGAATTCTTGG
TACACTCAATGAGTCACCTGGGCATTAACATTTTTAAAATTCATTAATTTTGACTAAGTCCATAATAGTCATAGCTCAGTAGAGAGTACATTAT
TTTTTTATCTTTTTTTTTTGGTTATAAATGTATTGATTGCATCCCCATTACCCAGAAGGCCAATATTTAATTGGAGTCTTAAACTCAATTGTGT
TTTCTGCACTTGGTAAGCCTCACAAATCTGCATATTGTGGCCGGAGCTATAAACAGCGAAGCTCTTTAGAGGAGCATAAAGAGCGATGCCACAA
CTACTTGGAAAGCATGGGCCTTCCGGGCATGTACCCAGGTAACCACTGAGGCCCTGCTGAGCTGCACCCCTCCCCCTCCCACCGCCTGGCCCAG
GATGGGGCTCTGTGGCCTGTTTCAGCCACAGGAGGAACTTTTTGTCTTCTAGCAATGCATCTACACTAGGGACAAACCGTGCTTCTCTACTTCC
CAAGTTCTCAGTTGACCAGTCATACATAACCTGTCTTAAGACCTCCTTAACAGCAGTGACCCTTTTAAGAGTCTGTGTTGTGGGGTATTTTGTC
GTTGTTGTTTGCGTTGTTTGGTGTGTTTTTTTTCCCCAGGGGGTGGTGGGTGGGATTCAAACCAAGAATTGGCTAAAGCTATAGCTAAGTGATG
AATGAGCTTGCCTGGTGTGCAAGACGCCCTGAGTTTGATCTCCAGCACCACAAGTGAGAAAATAAAATAACCAAGTTAGAGTAGTGTCGTTCGT
GATTTCTTCTTTGTGTTTAAATATCCAAATAAAATGTGAGTCTTTTAAAAAAAACACTAATTACTCATGAAGGTCTTCAAAAAAAGAACTGTTA
AGCTAGAACTAAACATTGATTTAGACTGAGCTTTGAGTATCCACAGTTGGAGAGAGCAGAACTTGTTAGGAGACCTGGTTGGCACTGGTTCTGA
GCCTGAGGAAGAGTGTTGAATGTATATTGAGTACTACATTGTCGTGAGAATCAGTTTCTAATTTGTCCTGCCTGGTGTCTGTTGATTCAGAGCA
CTGCAGTGATGGCTTCATGCTCCAGTTCTTTCTCAAGAAGTGAGAAATTACTCTTGCAAGAAGCAGCAATCTGACCTCAGCATGCCCAAAGAGG
CATTTAATTACATTGGGTTCTTCCTGCCTCTGCCTCAGGGCACATTAAGATACACTAGATGATTATAGTTGCCCCCAAGCCAGTGCTACCCAGC
TTCCATCACTGTAATGGGTGTCTGAGACAACCGGTAATAATAGGAAGGAAATTCTGTTTTGCAACTTTGGAGGTTTCAAACCATGGTCAATTGG
CTCAATTGCTTTGGCCAGGTCATGCTGGGAGCACAGGTACACTGAAATCTCCTGCCAGAGAGACCCTAATAAGCCAGGGAGAAAGAGAGAAAGA
AAAGGTTAGGGACCCATGCTCCTTGTTGAGAGCATGTCCCAATGATTTAAGGACTTCCCCCAAGACCCCAGCCCTCAAGGTTCCCAGCATCTTT
TCCTTGGTTCATCCTAGAGCCAAGGCCTCCCACATGTGGGCCTGTGGGGGACCCTGCAGTTGCAAACTGTGGTTGCCTAGGTCATGTCTTACTT
CACTATTTCACCCCTGAAACCCCTGCCTTATACATATACACTGAGTGCTGGCTTAGGGAATATGGCATTGAGGCTCCATCCTGCCAATAAACAT
GTACATTCTCATTTGTCTCCTGACCCTGACCCTCCATCTCCCTCAGGTCACCTCATTACTCCCACGGACCTAGTTAGGTTGGGTCCATTAGTTG
AAAACTGCCTAACTCAAGAGATGTAAGCTCAAGAGATGTAAAAGTAAGGTTTGTTTTTCTGAATATGATTTTCTTTAGTAAAAAGGTTAAGGAT
ACCTGTTACATTTCACCTATATCTGCATAGGATAAGGAACTATCTCCTGAGCCTCACATGCACCAAGGACAGAGGAAAAAGTACTGGGCTCAGA
GGTGTGGTATGATGTCACCTGAGAGATGGAGCACCTGAGAGAAGGGAAGATATGTAAATTAGCTTGATAAATCACATGTATGAATGACTTCTAG
AATTAGATTTTATCACTTTCTGTATTTCCTCCTATTAATCAGAGTGGGCTGAATGTTGAGCTATTTAACAAGACACCCTCATAATTCACTGTTA
ACAGAATATGCCAGCAGTAGTATTTGACTAGAAATGCAGGTTTTAAAGTGACGATATAAAAAATGCATAAGGATTGTGTGGGCATGCAGGGTAC
AGAATACCCAAGTGGCAGAAACTACCAGGTCATCCTGGGCAAGGGGGAGATGTAGAAGATGATGGAGTGAATGAAGGCTGAGCCATTGTGAATA
TCCATTTATTGTAAAAAAAAATCTATCAGAAAAAAATATATTTAAATATTGACAAGACTAGGATTATGTGAAGATGTAGCTATGGGTCAAGGAA
CTCTTTGAGGAGCATGAAGATAAACTAGATAGAACCAGATAAACCTATGGTAAATCAATGGCCTGAGAAGGGAAACACACAAGGCAGGAACAGT
ATGGGAAGAGCTGTTTAAAAAGTAGAAGCTGATCACTTTACACTCTAAGCTCCTGGGGAATGAAGGAATTATATATTTTAGAAGTCCCTGCCTT
GCAAACTAGGTGTCAGGATAGAAGAGACTATGCAGGAGACAAACTTGTATCTTCTTCACTTATGGGCAGGGAGAGTTCGTATAGAAAAGCAGAT
GGAATGAGCTAACCTGTATGTCTGTGTTTACCTTAATGGCTGCTCGGCTTCCTACCCTGTGTGATTGCTGTGTGGTCATTAGACATGTGCTGTG
TGGTTGGGGACTGCTCCCTATAGAGTTGTGACTTTAGACCCTTTGTTCATTTCTGGACCAGATGATATTTGGTTCTCATTGTTGTTGTTAAATT
TGGTTAAGGCAATCTTGACAAAGACCCTCCAAAGTAACACAGTTAATTCACTGTGGTCCAACCTTGTGTCGTAGACAGCAGCTTGTTATTTTGG
TCTTAGGGATAATGTGGGTTGAACAGGTGGAGGATGGGGTCCTAGCAGGTGGCTAGTCATTGGCATTGCTGTAGCTGGTTCTGCCAGGGGCTGC
AGGATGAGAAATCGGCTCTTATTGGCACTTGACAAATCTGCAGTTAACACTGAATACAGCAAGATCTTGAAGTGCAAGCATTTCTAAACTAGCC
TCTCTAACTGTCTTTGACTTTAGTCATTAAGGAAGAAACTAACCACAACGAGATGGCAGAAGACCTGTGCAAGATAGGAGCAGAGAGGTCCCTT
GTCCTGGACAGGCTGGCAAGCAATGTCGCCAAACGTAAGAGCTCTATGCCTCAGAAATTTCTTGGTAAGAGTTAAATGTTTGCTGTCTCTTAAC
CTAGAATTATGTGGGTGTTCTAGACAAAAATTATTTGAAAGTAGAAGAAAACAAAAAAAAAATCTCCCTTTTGGAAAAAAAAAAAGCTTATTAT
TTCTTAAATACTGTAAATTTTTTCTAATAATATTATTCAAACTGATAGACCTTTTACCAGGAATTAGATAGGGTGTCATAGCATTTGGAGCCTT
TGGTATCATGTTTCTGTGGCCGCTCTGACATGGTTACATCAACTCTTTCTCCCCTCCAAGGACAGTGAGGGCTAATAAGAACCAAACAGAGATG
AGCCCCCTCAGAAGACAGCGGAAGGGTACAGCTAGACTTGCTGTTCTGATCACTGAATCCTTACCTGTCCTTGATACTATGCGGAATAATGCAG
AGGGAATGAGTTGTTCATGAGGCACTGTTGCCTGCCAGCTAAGGCGGACACTGTAAGGACAAGGAAGTAGCTGAGACAGATGCCTGAATGGCAT
CACTAGCCTCAAAGGCAAGCTTTACGTCAGAACAGAGATGCTCGTAAACTCTATGGGGGCAACATGGGGGAAATGACCCAACCTTCCCAAGCCT
GGGTTCCATTCTTTATGTGTCTCATAAGGCAACCGGAAGCATAAAATGCCCCCACAGATATAAAAAAAATTTAGAAGCCCTCAGTAGGAAGATC
AGCTACTATCATTGTCAAGAAAAGAAACCTTATGTCCAAGAAAAAAAAAATAAGGTGTTTGAGAAGCTGAGGTGGACTTTCAGAAAGGGGCAGG
ACCTCAGCAGCATGCCATACAGTGAAGGGGTCATGGAGTCTAGGCAGACAAGGAAAATTACTTTGCTGGTGTTGGGATCTAGAGCAGGACTAGT
GGGTATTTCCCAGCTTTGCGCAAGTACTCACTGGAAAGCAGTGAGTAAAGCTGTCCCATGATGCTCTGACTATAACAGTACTGGTCATTGAGGG
CCAAACTGGGCAGCATCATCTCATTTGGAATCACAGAGAAAGCAGGGGTATGCTCCCAATGGGAGCACAAGCTGAGCACATAAAGATGACATGC
GTCAAAATTATCTGGACATGGGAGATGGCAGGAGAATGGGGAGTAATTGAAAGAATGCTTTGGTGTACAAGGAATGGAGGTCACGGTAGGGCTC
GTGAAGGAAACTGTGACTTCCCTTGCTTACTGTGCCATTTGCAGAAAAGACAAAGCCACCTCTGGAAAATAAGAGTTCAGGGTTTGATGTAATT
GCTTTTAAGAATGCTACCCTGGTAAGGCTACCCCATGGAAGCTGTGCTACAAAGGATGTGCAAATAAAACGTTGGTGACACACACACACCTTTA
CAGAGCACCTACACTGAGGCAGAAAGACAGAGGTCAGGTTCTAGGAGTTGATAAGAAGGAGGGGAAGAAAGACCACTAGAAAACAAAACAGAAA
CCACTTATTAGAAATATTGTTCATACACTTGTCTCTCTGTGTATCAGCTTTTGAACCAAAAGAATGAAGGAGACTTCATATCCTGATCAAAGAA
AGAGGCAATCTTCGTCAAGGAGCCACCTCTTGGATGGCTGGGGCTTTAGAAAGTATGAGGTGCAGGGCCCTATCTTCTCCCTGAGGAGTGCACA
GAAGACAGGGACCATGATGAACTATCTGGGAGACTGGCAGAGATGAAGCAGCAAATGTGTTCAAGGGTTGTGAAGAGTAACTGACCTCAGGAGG
CAGGGTGTGACTTCCTCTTTCCAATTAGCAACCTGAACAGTGCCACATGCCTTAGTAATCAGCATCGGCAGTGCCCTGAAGCTTCAGGAGACTT
CCAGCCAAACAGAGCATCTGAAACTTTGTCATGGCTCTCCTGGCTGAATGGGCATTGTCTTGATTCACACGCTCTATGTGAAAGGGATCTACAA
AACTAGTGAAGCAATGCTGAGAGGGGAAAGCCATCTCCAGGGGAGAGGTTAAACACAAGAGGAAGTGGCCTTGTGGGAACAGGAGGACCAGGAT
AGCAGAAGTGAAGTGTGCAAGGAAGGGCTCCCAGCAGCTGTGCTCTGTTGGTGTCCCCCAGAGGTGGTTGGCAGTTCACACACTAACCAGTGCC
TCTTCCTGCTCTCGTGTCTGCCTTCCTCTCAGTGCTACATCACGACATTCCTGTCCACCCTTCCTACTGTGTCACAGTTTTCTCCCTAAAATGA
AGAGAATTGGACCTCAAAGGCTGCTCCCCACATTTAGGATGATATCGTTTTGTGTACTTGAGATGATAGATAAATAGATAGTAAGAGTTTTGAT
AGAACTATTTCATGTTTTTTCAGAAAACCAAATGCAACATCCAGAAATTACCAGTATTAAATTAGAAGAACATCATTGTAAATATCTTCCTGCC
ATATATATTTCAGTGGACAGGATTAATAATAGGTGGACTACAAATAGAGATGTGGAGGAAAGGCCTTTAAGTTCCTGCGTGCGCCACCTCAGAA
AGATTGCACCTGCTCTTCCCTCGGCTGGAGGTGTTGCCTGGCTTCCCCTCTTCCCCTGTATTGATTGAAAATCAGTTCACAGTGGCCACAGCAT
ATTCAACATGTCCTAGGAGATAAAGGCTCCTCAATGCACAGTCATTCCCAACAGGACTTGACTTTTTTAAAAGGATGACTATCAGGGAAAAAAA
ATTATTCTAAAAATTACTTTAAAAACAATCATTTTTATTGCTTTTATTTTTACATTGTACATTTCTATTCATATTCTATGCAGAAATCATTATT
CTTATATAATTTAGATATTCATCACTATATATTTTAACAGGTTACAGAATCAGACCCTGGTCTCTTAGGCTCATTTTCGTTTATTTTGATCAAT
CCCTTCATTGAATACACTTTACATTCAAGCACCCTTGTAGACATTCCATCTCCATCTCTGCTTTGAGTTTGAGGATGTCACCTGTCACCTCTCT
ACAGTAACCCCAGGAGTACGTAGCCTCTGGCCACTCTTCCTTCTCTGACATTCGCACATTTTTCTTTGTTGAATTATGTGGGTGCCAAGTACAA
CCTGACTTTCTTTTCTTTGATATTACTTTTCTCCCAAAATATGTAGTCTTCTTTCCTTGGGCCTAAGTCAACCATCATCAGTAAGAAGCTCTTT
GGTGTTTTACAGTCTACATGAAATGTAGCCTTTAAGAGTGAGAGGCTCCTTTCTTCCTCCTTGTCTTTTGGAAACATTCCTTTACATAAGTACC
AATTGTTCTATCTAACATGACTTCTATTCAAGAGTGCTGGTTTTCCATAGACTGGATAAATTGTCTCCCATCTCTGTTAGCATTTTGCTATTTT
AATTTCTTTATTTTTTTAAGTTTACTTACTGTTATTTTATATTTTTCCTGATTTAATTGAGTTCCTAGCAATGTTTATTCTAGTGTTTGCTATT
TTTAACTCATGTATTGAGTATGTATTGAATTGGATTTGGTTTTAATTCCTGAGATCTAAAATCTCCCTTTATTCTGGGTTGTTTTTTTTTTTTT
TTTTTTTTTTTTTTTTTTTTTTTTTTTAGTATTGTCTTTGAATAGCTTCAAAATCTGACTGCTTGCATATTCTAAAAACTAAAATAGCTAAAAC
TTGAAAAAAAAATTTTACCCCATGTCATCAAGTAATTATGCTTCATTGCTCCTCTTCCTGGAATTAAGTTTCTTTTTCCCCTAGGATGGACTTT
CTGGTTTGTCTTACTTCCCTTCTTGCCAAAAAAATATTTTCCCTCTAACCATCGCATTTCTTTTCATCCTGCTCATTCTACTTGGTCTAATGAG
GCTTGACTGACATTTCAACATTCTTCCCATTGTACCTGAGACTTTTCCTATGAGAACTATAAGTTTTTTAAATCCTGAAAGAATGCCAAGGATG
GTGTTGGGCGAGTTCAGGTGAGGCCAAGTACATACGGCTTCTGTTTAAAGTGTTCCCCTTTGAGAGCTCTCTCAGAGTTTTCAGATTTGGTGAA
AGCTCTAAACCAGCAGATGATGCCTTCTGTCTCCACAAGGGACATCTCAGGGCCTACTTCCCCTGAAGTACAACTCACCAAGGCCTTTGCTTGT
GTGCAGGGGAGCCAGCCCACATGCTAAGGTCTCTGGTGTCATGTGCTGCCTGAAAGTGGAATTTTCAGCTCCATCATCAAAATGAGGAGGGCAT
TTGCCCATTGGAACTCTGTCAGTGTGAGGGTTTGGAAGGAATGCTGAGAGTGTTGTGTTTCTAGAAGTGACATTACCCAAAGCTTTGTCCAGTC
TCAGGCAAGAATCTTCTGTACCTTTCCTTGGTCATATGTAGTTGAATGTAAAGTAGAAATAAGAAGATGGATGGATGGATGGATGGATGGAATA
GATAGAGATAGATAGATAGATAGATAGATAGATAGATAGATAGATAGATAGGATGGATAGATAGTAGATAGATAGGAGGGAGACAGGGAAAGAA
AGGGATGGATGAGTAGATGGGATGGATAGATAGATAGATAGATAGATAGATAGATAGATAGATAGATAGACAGACAGACAGACAGACAGACAGA
CAGACACACAGACAGATAGAATAATAGATTTCACTGGGGCACTGGAGGCTTTTATAGCTTTTAATTTTTCACATTTGGGTAGAGAAATTCTACA
GGTAGATTTGTCACCCCATGCTCATCTGGAATGTATATTGCTTTCTTTGCAACACCCACTTCTTGAAGCAGCAGGCTTCAGTCGTTGCTTAGAA
AACCACAGAACCACAGCTCTGGGGAGAAACAGGAAAGTACCACCTCTGGTGAGAGAACACAGACTTTTACAGCTAACAGAACTGGGCACCAGGC
CACACCCTCCTCCTCCATTGCTAGGGTTTGGTAGTAAATGAGATGCAAGTACAAGAATGAGTTCCTCATGTCCACATAATGAGATGGGTTCTCA
CCAAAACCACAAAAACAAACAAACAAACAAACAAACAAATAAACAAAACTCCCCCTTGAGTGGAGAGAGGAATCCCTTCATGGTTTCTACCATC
CACTACACGTGGCTTTTGCTCTGTCCAGTTTCTGAGAGTGTGTAGCTGCACATTAACACGTTTTCTTCCTGTAGCCTGACGATCATTGTATGTC
GTTACCAGAGTATGCGTTGGTTCTGGCATGAGTAGATGAAAGCAAATGAAATCAAGCCATTGTGTGGTGCACACCCAGGAAGATGAAGAAAATG
CAATCAGGAGGATACTGAATCAGGAGGAATATATTCCAGGGCTACTATAGTCACTGATTATTTTTTCAAGGACTATGGTTAGATTTATGAATTG
TGGAATACTTTTCCTACTGTAGATAAAGAGTTTGGGGGAAGTGCTCACCTCAGTGCTGGCATGAAAGACACTGGGATCATCTTCTACCACCACT
CCATCAGCTGCCTTCAGGTACCACCTGATTGAGCAGCCTCTCACCCTGGTAGCTCAGTCTGTTGCCCCACTGTGCCTGGGTAGTTCACTTTCTT
CAGACCCTTCACCAGTCCCCCTTTTTATTTGAATAAAGTCAGTCTAGTCTAAGGTTCCAGTGTATGATCCCAGCTGTACTTGGACATTCCCTAT
GCCCCCAAGAGCTCTGTCCCCTGGACCTTTAGATTGTCACCAAAGCCCCAGGCTCTCTGTCCCCTCGGGATCTTCACTGCTTCTGTTTCCAACA
GTAAGATACAAAAAGCCCCAGCTGGCTCTTATGAGATGAGAAACCTATGCAACACTCTGGTAGCAAGCCTTCCTGAGCTCGTGGGATTTCATAG
ATAGGGATGGAGTCTGCTGTCATCATTTAGTGTGTATCTCTCCTCCTAGCTGTGTATATCCAACCATACATATCCATTCTCACTGGCTTTCCTT
TTAGTCCCACTGTTGAGCCAGACATATTGAAGAGAGGAAAAAGGCATTGTGGGAGGTGAGGTATAAAAGTGCATCTGATTCGGCAGACTGCCAA
GTGCCTTCTTCTCGCTGAGAGGGCACTCAGTGACTACCTCTGCCAACAGGAATATAAACTATCCATTTACTGAATGAATATCTTCTCTGGGTCA
TGATTTCACATCAATGTATTTGGAAAATAAATGTTTAAGGAAATTCATTTTGTTTCATTATAAAACATTTTACTCCAAAATTGTATCTGAAGCC
AAATCTGGTCTCATCTTCTTCCATTGCCAGGGAAGATTTGTGTTAGCCAGATTTTCCATTATGATAGGGAAATATCTGAGATGTCCAATTTGTA
AAAAAGAAGAGGTTTGACTTAAGCCTTGGGGTATCCTTCTTCATGACTGATTAGCCCTATTGTGCTGACTCCGTGGCAGGAATGTTGTCTTGTG
GCTGTGAAGCAAAAGGGAAATATATGGGGGTCAGAGTTCCAGGACCCCCTTTAAGAATAAAGTCCCCCAAGTCTAAAATCTTCTCATTAGGCCC
TTCTTCCCTAAAGAGTTGAGAACCTTCCAACAACAGCATGTCCCTGGCTAGACACTAAGCTTCTGGGACATTGCGTTCAGCCACAATCATAGCA
CAGGTTGGACAATACCTGAAAACATGGGCCTTTGGGGACATCGAAGGTCCAGACAGTAGCAGAGTTCATGTAGTCCTACAAGCTAACCATACGA
GACCATAACTTTCTTGAGTCCCAGGTCTGCCCACTACTGAATTCTTAGTTCTGCTCATCTTTAGTATTACCTGTCTTTGTAAACAGTAAGTGAA
TGGTGCCCACCTCCAAGCCTACTCAAGTAGATCATCTCTGTTTCCTCCTTCCTGTTTCTGCTGAGCTAATTCACTACTGCTGACTAGGAAGACA
GGGTACATACAATTATGTTTAAGTATTCCTTCAACTTCACCATGCATTGGAACCCATCCACTTTTGAAATATTTATAAGAAATATATAGTTTAT
TATAAATAATATATAATCATGTTTTGAGAACATTTTTAGATTATTAAAATGATAAATGTAATATAGTATCTTAAATTTATTAAATATCATTAAT
TCATGGCTGTGTATTTTTATTAAATAATTTTGGGATAAATTAAACAGTATACATTTAGAATACTCTTTTAAAATATTTAAATTAAATATAATTG
TATGAACTTTATCATACTTAATGAAAGATGGGATTTACCCCTGTGAAATATGCCCTCTTTAATCTGACATGGATAATCTTTAGTTTCTTTTTCA
TTAATGGGTAAATAGGACTTCCTGAAGAACCTACCATAGTAAGTCCCTGGGAAACATGGCACCTTATCCCTCCTCAGCCCTCGCAGATGTGTCC
TGTCTGCTGTGACACTAGAACACCATTCAACCCCTGGGTGTAGATTTCACTTATGACCATCTACTTCCCGCAGGAGACAAGTGCCTGTCAGACA
TGCCCTATGACAGTGCCAACTATGAGAAGGAGGATATGATGACATCCCACGTGATGGACCAGGCCATCAACAATGCCATCAACTACCTGGGGGC
TGAGTCCCTGCGCCCATTGGTGCAGACACCCCCCGGTAGCTCCGAGGTGGTGCCAGTCATCAGCTCCATGTACCAGCTGCACAAGCCCCCCTCA
GATGGCCCCCCACGGTCCAACCATTCAGCACAGGACGCCGTGGATAACTTGCTGCTGCTGTCCAAGGCCAAGTCTGTGTCATCGGAGCGAGAGG
CCTCCCCGAGCAACAGCTGCCAAGACTCCACAGATACAGAGAGCAACGCGGAGGAACAGCGCAGCGGCCTTATCTACCTAACCAACCACATCAA
CCCGCATGCACGCAATGGGCTGGCTCTCAAGGAGGAGCAGCGCGCCTACGAGGTGCTGAGGGCGGCCTCAGAGAACTCGCAGGATGCCTTCCGT
GTGGTCAGCACGAGTGGCGACCACCTGAAGGTGTACAAGTGCGAACACTGCCGCGTGCTCTTCCTGGATCACGTCATCTATACCATTCACATGG
GCTGCCATGGCTTTCGGGATCCCTTTGAGTGTAACATGTGTGGTTATCACAGCCAGGACAGGTACGAGTTCTCATCCCATATCACGCGGGGGGA
GCATCGTTACCACCTGAGCTAAACCCAGCCAGGCCCCACTGAAGCACAAAGATAGCTGGTTATGCCTCCTTCCCGGCAGCTGGACCCACAGCGG
ACAATGTTGGGAGTGGATTTGCAGGCACCATTTGTTCTTTTATGTTGCTTGTTTGGCGTTTGATTTGCGTTGGAAGATAAGTTTTTAATGTTAG
TGACAGGATTCCATTGCATCAGGAACATTCACAACATCCATCCTTCTAGCCAGTTTTGTTCACTGGTAGCTGAGGTTTCCCGGATATGTGGCTT
CCTAACACTCTCCCCACCCACCCCACCCCCCAAAACAGAGCCTGAATCTTCATGAAGTGAATAAAACAATTATCCAAGAAGGAGTAAGGTGGAT
CTTGCCCTAAGCAGAGTTTATGCCACAAAGATTCTCCAAATCCCCCAAGACAGCACAGCCACTGGGGTTGAGCCATCTCAGGGAGCTCTGCAGG
TGAGCCAGACGACCAGATATAAGGCAGCTCCGGAGGAGCAGGGACATCAGCCTGTGCAGAGACCAACGCCAAACGTTGAACTTTGAAAGACTAT
TAAGTCATATATTGTATGGCAATATGCTGTCTGGACAAGTTGTGCAATGTGCTGAAGGGAAGGGATTGGAGAGCCTTGAAGACTCTTCTTCATT
TGCCTGATCAACCCGGCCTCCAGAGGGTTTTTTGCCCAGTAAGACGAGCTCAGTGCTCTTGTGATCATTTTTCTCTTATCGTTTCCATGCCGTT
GATGGCCCTGAACCTCATCACTGCATTTTAGAACCCAATCCTGAAATTGAGACCTTTTTTTAAACTTCTGATACTGTAAAACTTCTTGGAAGCC
AAAGCTTTCTTCCAAGCCCCATCCTCAGTTATCCTGGTTCCTGTTCTTCCCCGAGCTGATAGTACCAGGACCTGTTATTCCACAAAAGCACAGG
CATCCGTCACTTCAATTCAATCCCTGTTCAGATTATAGATATGGACTTTGCTATCTTGATAAATGTCTTCTCTATGTTATTTTGTCTGAAAAAC
CTATAAAACCATTATTAAGAATGACCATTTTTAGATGGAAGAAATGAGCCCAGCATCTCAGTGGCTAAAACACAAAATATCCATGCTTTTAAAC
AAAATTGTTAAATATTCCCAAGCTCTCTAGTATAAACACCAAGTAGCATGTGTTTTCACATAAAGAAGACAGGGGCCATGCAACCTTTATCAAG
TGGAGGTATTAGAATGTTGTAATGTTTGGAGACACAGTGTGACCAGTACAGGTTCCCAGAGAGGAATGCCCACCATATCACAGAAAGGTAGAGG
TGGGATCTGCTATAGCCAGACCAAGACACCGATGTCACGCTGAAGCCAAGTCAGTTAGCTGAAGATTCTCAACAGCAAGGCCTCTCTTAAGAGT
CAGTAATAGGGTTGTTACCATCCACCACCTCAACAAAACAAAAAGCTTATAATTGTAAATGTTTACAGCACTGTCTTCCCAGAAACTTTCTGAG
GTGATTCCAAAGAACTAGAGGGGAGATGGTCTATAACAGCTCTTGAAGTAAACGAGGTTCTTAGTCTCAGCTCTCCTGACATATAGGGCTTGAT
TATTACTGGTAGGGATTGTTCTGTGAATTGCTTACTACTACCCCTGGTCTCTCCCCAGTAGATGCCAGGAACATTCTAGCTGATACCTAACTGT
CTTCCCAGGTGTTCGAGGGAGCAAACCACTGATCTAAACTCTAAACGCTGAACTACGCAGGTTTTCTAAAAATGACAAGCCCTTGAAACCTTTC
CCAGTAGGCAGCCTCGAGCTGGACTTGTGTCTTTGGAATGCTGATGAATTCTATAGATCAGCATTGCAAATACACTTCAAATACGTCTGAGTTC
AAGTGCAGGGACTGAGTTCACCAAGGTGTCAACTGTGCTCAAAAAGTTCAAAAGTGTGTGTTTCTTTGTTTCTAAAACATTGTGGCATCTTTTT
CATTTGTTTCTAAAACTTTTTTTTTAGAAACAAATGAAGCACTTGGAAAGTGAAAGTAAAATTACAAATATAAGGATTTACACTGAAGAGAGAA
AAATTTTAGGAACTATACCTGTGAAAAGATTTTCTTCAAAAGGCAGGCTAGCCTTACCCAAATTCATATATGGCAGGTGTCAACCTCCCAAGCT
TACAGTTAGCAGGCAGCTTTTGCTCACTCATCCTTAGCCATGAGAGCCATTAAGTGTGGTCCAAGAAAGATGGCTCCAAACCCTACCCCCGACC
CACCAGTGGTATTCAGAGATTAAAGCAGAATTGTAAATAGTGGCTTCAGGAGCTCTTTTTTAGAATGCTTTGCCCCTTCCTCTCACTGCCTTTT
TTAGCCAATATAAATGTCAATTTGCACACCTTTTGTTGTGGTTTTATATTGTAACAGCATTTTTTTGAAACTATTGTATTTAAGATAAGGTTTC
ATATTATGTCCACAAGTAATTAAATTATGTTTGAAGGTGGCTATATGCTGTATCAGAAGTTGATGATGTTTTTCTTTAGCCGGTAAAGGAGGGT
TTTGCATGACCTCACTGTTTGTTCTGTGGTTTCTTCTGTTGTATGATGTCTCTCTTGAGTTTTGCTGTGTCATGAAGTGCGCTGAGATTCCAGT
GCCCTCAAGTTGTGTTTTAAGTAGCTATCAGAGGCAAGAGGCTTCCTAAGAGCAGGTTGACCTGTTGGCGACAGATGGCAATCACCATTTCTCA
TTCCTTCTTCTCCCTGTTACCCCAGCTTCCTGTCCCAGGTCCCTTCTGTGATTCTTACCTTAGTGTGCATGTGTGTCTGTCCTGGTGAGAGTCA
GGAGCATCGATATGTTATCATTGCATTATCACCAACGGCACGCACAGCCTAGCACCTGTTGCTTCACATACCGTCACACTCTGTTTCCAATTTA
GATACAACCACATAATAAAATGTTAGAGTCTTCAATGGGAAGCAGAGGTGCTTGTTATAAAGATGGCGGCTTATGCTTGTGTCACATTTTGTGT
TCTTTTCTTCTTTTGTTTGGTTTTAACTTAATTGTGACCCTTGTAACATCATCTTGCCAAAAAAAAAAAAAAAAGTTGAACTGGATTTATGTAG
ACATGTCAAGACGTACTATCTATTTCTTTGTCAGTTATAGCAATAAGAGTGGATAAACTCTAAAATCCAGATCTCCCACAATGAACATCCGTGT
TCTTTCTATGATTTTTCTTTCTTTATGGTGAGCCACAATTAAACTTGAGATGTACAGCCACCCAAACCCAGGAAGCTCATGTGCATCTGGTGCT
ATGGCACTCACTCTGAATAAGTGTGACCAGATATTAATATCCAATATTGTTTCCAATCCTTTCTAATACATTTTTTCATGATGTTGTGTGTGGT
TAAATCTTCCTGTATCACTACCACTTCAGATCTTCACCTCCTTGCTGACAGGTAAATGGAAGTGTGAGTAAGAAAATGAAGCCATCTCTGCAGC
CCTGACTCTAGCATGATATTAACTCATTTCTGTTTAGCTGCGAACAAGAGGTTTCCACTCGGAGCATAGAGGAGCTATCCTTTTGTACACATTT
TGCCTTAGATCACTACAGACGATCATTACAGAGCAAATAAATTCTACAAATATTCTGTCTGCCCCATCCAGTGAAGTCCAAACACAAGCATAAA
ACAAGCCCCAGTCATTGTGGGAGTCTGCTGTAGCCTCTCTGAAACCAGGAGGTGAGGGAGGAGCCCAGCCCTTGACACAAGAAGTGTGAGCAGA
TACACAGAAAGAGGCACAGCCAGTTAGCTCAGCTGGCCAGCTAGGGAGTCACTGCTAAGCCTCTGGACCTCAGCCACGTGGTGAAGTGGTGGCA
GAAGAGGAGAGCATTCAAGACAGAATGACAAACAGAATGACAGCTTTCGTGTCCTGCCTTTTATTCCTTTCCATTTTAAATAAGCACAAGATCT
CAGGATGATTTTCTGACACCGTGGAGCAAGGCTTTCTCATTCATTTATCTGCTTCACTCTGGAACAGATTGCCAGAGAAAATGATGCTAACTTC
ACTTCTAAGGAGTATGTCGATGTAAACACTGGGCTCTGTTTTCCATGTGAGCCTGGAATGCGCACTGAGGGATAGGAGGGAGGCCCAAGGTCCC
TGACCCCATTTCCAGTGTTTCTCAGTCATATTTTGATCAGCAGAATTCAGATTTCTACAAGCAGAAAATGATGTCCAAGTTCTGTGACTCCTTA
GTTAAACTTCCTTGCCTTCCTTCTTTGAACCCATTCCAATTCTCAAGAAACAAACCTTTGGGCACTAGGGATATGGCTCAGCCGGTACAGTGCT
CATCAATGCCCAGTGCCCTGGGGTTAGATCCCCACACACTGGCTGTGGTGGCAGTACTTGTAATCCCCGTATTCTGAGGAAGAGGCGGGAGTTG
AAGGTCTTTAGCTCCACAGGGAGCTCAAGGGAAGCCTTGGATTCCTGACACCCTGTTTCATAAAAAGAAAGAAACAAAACGTTGGCTGTTTCTG
AAAGTTGCCTTTTCTCATGGCTTCAACTAAGACACAGAGCTAGGAGCAAAAGAGATAGAAAATTGAGCAATTAGTGAAAGGCTCAGAGGAAGTT
CTCAGATGACCAAAGTGGGAACTCCGTGTTCCTCCATCATTCTGGAAACTTCTGGCTCTTTCTCTGCACCAGTACCCAAAGCAGCAACCAACTG
GCACAGCCCCCATATGTAGAGGTGAGGTCAAATGTTGCTATTGCCACACAGCATCCACCTCTTGTGTCTTTTCCCAGGCTACTCTCTCCACCCG
TCACATATACAACCTCTTGGGAAACCCAAAGGGATTCCCATGGCCCCTAGAATTACACTGCTTTTAGCAGCCCCAAACCCTTTGGCTTTTCTAT
TCCACTATTAACCTCCACCCTGAGCAAACCCACTCTAGGATTAGCACACAAGAAGCCCAGCCTCCAGTTCATCAACTACAACCCTGCTGGGTAT
CAGTTGCTCTAGAACTGCTATCTTAGAAGCCTCTCAAACTCTACCCTATCTTACCCCTATTGTTCAGTTGCAGCTTCCAGAGGTCACTTACTGA
ATATTCTGGAGTGGAAAGTATTCATGGGACAACCCGCGGCCCCAGCCCTGAGGTGTGTGCGTGGCCAGCCCTCCAGTACCTGAAGCAAATCATC
AGTCAGTTCACTGAGGACCAGTTAGATCCGGGACTCTCCTGAGCCTGGGCTCACAGTTGTCTGCATAGAGGAACAGTGTCTTCCCACAAATGGT
CTGAAACAGCTTAGATCTAGACAAAGGAATCAGGTGAGAAGCTGAGATGTTCATTTTGCTACTCTCAAAAGGCCAGCTTCCACGTGTAACCACC
CAGCAAAAAGCAACCACATTGAAAGATGCACATAGTCTAACCCTCAGTACCTCAGCATTTCCCCCAGTGGGCAGCTTTGACATCCAACCTGGCT
TGTGTACACTACAAAGACAGAAGGCCACATGCCAACCATCGTGGGTTTCCCTAGCTACTCCATCATAGATGATCTGATTTTCTGTGACTGTCCT
TGCAGGCCTCCTGCCTCCTGAGTCCCGCTACTGTGGTCCAACCATTCTGGGCTTTCAAAAGTGATTTGTGGAAATGGGGACCTGATCCCACATT
ACTGTCCCTACGCACAGGTCATCAGTGGTTGCACTGAAGTTTCAGAGCAGAGCAGAGTTTCCTCACCTGCGAACATGGACGTTGAGGTTGCATT
GCCTTAAGCAGGTGTCCCCCTGGGTGTGCTCCCAAAAGTATGGTCTGGTGCTTAAGAACAGAATTCTGGAGACCACCAAGTCTGTGTTTGAATG
TCTGCATTGCAGACTAAAGGAATGCAATGGTGGGCAGGTGACCTACCCTTTCCAACACCTCTTTCCTCATCATTGACAGCTGGAGAGCTGGAGG
CTAAAGCTAGTAACATCTGGCAAAACGTGAGCACTGGGCCTGGGTCATTCAAATATTCTGTTCTTTCTGACTTTTTTATATACTATCCTCTGCC
TCCTATCTTATCTCTGTGACAACCGGACAAGCCAGCAGTTCATTCGTATTCCAACCTTGGAGACCAGGTAGCTGTAGTGGGGAAGCAGCAAGCC
TCTCCTCCCTTGTAGCACCAGCCACACTGAAAAGTCCCCAGCCTTTGCAATTTCCCTGGGAGTTGCAGGGTCATGCCCCATTGGACACATGAAA
GACAGCACCTGGGAGGCCAAGCGTCACAAAAAAGATGCTGCTGTGCAGAGGTAGCTATAGCTCCAGCCCCTGCCCCAGGCCCCTTCTCCACTTG
GCTCCCGCTCCATTCTGGAATGTTCCTTGCAAAGAAAAGTGAATATAATATGATCCTCTTGAGATACAGTGTCTCTCTCAGAAAGGGAGGAAAA
TACCTACACCTATAAACTTGCCTTCAAACCACCCCTCAGCTGATCATCACCATACTGGTCCACAGGTTGCATGTCATATCAGTTTCTCACAAAG
AGTCACTATCCCCAAGACTTGCCCCAGAGCAACAAGGCAAGTGGCACAGGGCCAGAATCCAGAGCCAAATAGGAAAAAATAGTGACATGGGTAG
AGCCAGGCACAGGGAGCCAGATCTTGTTTAAATATGACAACTGTGGACATCTCTAGAGCCCAGTGCATGGTAGTTGGACGTGGGCAGCATTGTC
CACCCAAGATGTAATCGAAGCTCTGAGCTGTACTGCAGCTGCTCTGGAGGGTAGAAAACACTGCTCTGGGAGAGGGGAGAGGAACAGGAAGAGC
TGGCAAAGGAAATGAAAATGTTTGTACATGAAGGAAGGAAAGCCAGTTGAGCAGGCATCCCCAATTTTCATCTTCAAAATAAGAGACCAATTAC
AAATCCAAAAAAAAAGAAAGGCCAAATGAGGACAGCCACTGAGGTGGCCTCTGAGCCCAATATATAGTTTGCTCCAAATGACCCTGAAGGTCAA
TCATGAGTAGCAAGAGGTCATACAGCAGAGGTAGGCTCTGACCCCAGGCCTAGCTAACAAGAGAAGACTTCAAAAACACAGTGCCAAAGTTCAG
CTGCTCTCAGTTTCTTGGCCAGATTTTACAAAACAAGGAAGAAGACCCTCACTGGTATGTCTCTTGGCTCTTTCCACGTTTTGACAAGGCTAAG
AGCAGGAGCAAAGTGGACATCCTTTGACCTCTGACTCCTCCGATGACTACAGACGCAGCATGTCTAGGGAGAGGGCTACTTATTGCAGGATGCC
CTAACCTCCAGCCCAAAGAACAGTCTGGTGGCTCCTTGTACAGCAATGAGCCCCTGACCCGTACTCCATTTACAGTAAGCACTTGACCTGCGGC
AGAGCAGCTGAGCCCTGCAGACTCAGTGAATCGGCACCAAGGGAAGCAGATGTGCTCGCCATCCTCCTCACGCACAACCAGGAACCAGCCACTA
GGGGAGGAAATTTGCATAATAGGGATAATTTGGTACCAAAACTGTCCCCTGAAGTGAACTACATGGATCTCGGTATAGTTCAACAAATTTCACT
TCTTCTTTCCCATGTTTTCTCACACCAACTAGATATGAGGTAGCATGTGCAACTCGTCCAAAGGTTCGGGGGTGTTGTTTGATTTTTATTATTG
TCTCCCTTCATAAGTCAGTCCCATGCCTTTTCTCTCTTCAACCCACCACTCCCTTGTGCCCAAAGTGAGTTTCTGAGCTCCCTCAGAGACCTCT
CCCAAGCACATGCAATGTGGGGGACACCCAAATGCTCTTACCCTGCAACACAAGCAGATTCACAAACAGCAGTGGTGGTCATCTGCCTCTCTAC
TGATATACTTGACCAATGCTGCCTCACTCTGCCGCTTCCTAGAGCCTGCATGAGCTTCCTCATTGACATTATCCCTGTGGCTTTCTGTGGGCAG
AGGGTGGACCACTCCCAGGGTACAAAGGGTGTGTGGTTTCAGGGCTCCCCAGTTTCATTCCCCTTTCACGCCTCCTCCTTTCGTGGTACCACCC
TGATTCCCACCCACAGAGGCACAGCCCTTCTCTAACCCTTCGAGGGACTCCCTATTGCCCCCATAAATTCCCACTTCTGCAAGCATCAGGAGCT
ATTTTTACCATTAGTTTTATAACACCTCACAGGAAGGCTGTTGTGCATTTATATCTACTGATACTGTTACCAAATTTTACGTGACAAATACTCT
AAAATAAACCAAAGGAAAGAATAGCCTGAGAAAAAATCCCTAAGACACCACCAAGATGGCCAGATTGCTGTTAAAACACACACACACACACACA
CACACACACACACACACACACACACACACACACACACACACACCCTAAGTAGCCAGTGTGTTTTATATCAAAATTTGGGAGAAAAGAATTATAA
ACCTACACTCTCTACAGATAACACCGACAGAACAATGTGAGGTAGGCATACCCTGCCACAGGAGGTTAGGCCTAGGGCAGGCTTCCTCTTCTTC
CTGGTTGGCTGGTCCCACACGCAGAGTATGAAATGGCCTTGATGGCTGATCAGCACACACAGATGCTTAGATTCTAAACTGAAGCCTTTCGTTT
GTTGCAGCTGCTGACTTGACTTGTGGATTCAAATGAGTTAAAATAGGCTTCTTGTCTTTCCTCACTCCATTTTTTAAACATTTAATTTAATTCA
GTATATCTCAAAATACAAAAGTAAAGAGGACACTTTCTTATGAGTTCAACCTCACGGCCTCGGGGACCATAAAGTGCAGGAATCTATGGGTAAA
AAGCATTCTCCCCATCGTGACAGCCCTGTTCCCAACCCATCTGTTCAGACATCTTCCAAATCACATCTAATTCCCACACCATCCTACTCCAAGA
ACCCTGCTTACCCTCAAAGTCTTCCCACACTGCACTGGCTGCTAAAACAGAATTCTCGGCACTCGGTGTTTGGTGCTTCTTCGAGACCAGATCT
GTTCCTACACTAACTTTGCACTTGATCATTCCTGGTCCTGGCTGTTAAGTGGTAGTCTGTCCACATCAGACTAAAAGCTTAGAGGGTTCCAGGC
TCCCCAGAGCCCCCCATAATAATGGTATCCTGTGAGATCAGTCCTCCCTGTATCCTGGGCTCCCTGGCTCTCAGACGGGTCCTGTCCAAGGTGA
TGATCTGGACCCTAGCCCTTCTTTGAGGAGCTCCTTCCCATCTTTGCACTGCTTCAGCTTTCCCCTTGCGAGTGGAAAATGCAGCAGCTCTCAC
CTTGGAATCTCCAGGAGGGGCCACTCCTTGCCCCAGTATTCAGGACAAAGTATCCTGGCACAGGCAGTGGCCTTGGTGTGAAAAAAGCAAAGAG
AGGGGTCATGAGGCAGAGAAGGTGAGTGCAGCCCCTTGAAAACAGGGAAACTAGCCATTTTAGCCGCAAGTACAGGGCAGAGGGTGTCATTCAC
AGATTGGGACTTTTCTAACTTAAGTAATTGTTATTTCTATCAGAATATACTGGTATAAGCCAGTCCTATAAGCATGGTCAAGTTCCATCCCACT
GACTCTAATCAGGCCAGAAGTTGACCTGTCAGGTCCCAAGGCCAGTAATTGAAATATGACAGGACAACAGTTCACTGTTAAGGGGACACCAAAG
TTTTGCCAATAACTACAAGGTTGTTAGATGTTCAGAGTCAAGCACTGAACAGACAGGACCTAGAAACCAGTCAGGATCCACAGACCAGGGGCAT
CTCAACCAACTCTTGAAAAACAGACAGCAGAAAGAATGAATAGTGGAGACATGGAAGAGAATTAAAACCAGAGATGCCAAGTAGAGGAGGAAAC
AAAAAGAAACAAAGAAGCAGGGCGATAAATTTATTTAAAAACAGTGACATACGTAGTAGGTGCTAATCAATCTTTATCAGCAATCATGCTAAGT
GCCAGTGAACAACACACACCAATTAAAAGGCAGACACTGGCAGAATGGACCCCAGCTAAGACTTGTCTACAGGCTGTAGGCTGCTAGGTGAGAA
AGGTTACTTATGATCTTACCCAGCTGTGGGCCCTGTGTAGTACAAAACCAACCTACCGCGCAAGATGTGCCCGCTATCATAACATAATAGTTAT
GATAATAACCAACCACTTTCTGATTGGATTTTAAGCCTGCTACACTAGAGGGAAATCATACGTACTCAAAAGCCCATGATGAGGGCCTTCACAG
GCCCTGGTGAGAGCAAGGGAAGAACTTAGCTTTTACTTAAGGATGTGTTTATATCCACAGACTAGGTTTATAGCTATAAAGCAACAC
MOUSE SEQUENCE - mRNA
CCTTGGGGAGGCACAACTCTGTTGATAACCTGAAGACAATGGATGTCGATGAGGGTCAAGACATGTCCCAAGTTTCAGGAAAGCAGAGCCCCCC
AGTCAGTGACACTCCAGATGAAGGGGATGAGCCCATGCCTGTCCCTGAGGACCTGTCCACTACCTCTGGAGCACAGCAGAACTCCAAGAGTGAT
CGAGGCATGGGTGAACGGCCTTTCCAGTGCAACCAGTGTGGGGCCTCCTTTACCCAGAAAGGCAACCTCCTGCGGCACATCAAGCTGCACTCGG
GTGAGAAGCCCTTCAAATGCCATCTTTGCAACTATGCCTGCCGCCGGAGGGACGCCCTCACCGGCCACCTGAGGACGCACTCCGTTGGTAAGCC
TCACAAATGTGGATATTGTGGCCGGAGCTATAAACAGCGAAGCTCTTTAGAGGAGCATAAAGAGCGATGCCACAACTACTTGGAAAGCATGGGC
CTTCCGGGCGTGTGCCCAGTCATTAAGGAAGAAACTAACCACAACGAGATGGCAGAAGACCTGTGCAAGATAGGAGCAGAGAGGTCCCTTGTCC
TGGACAGGCTGGCAAGCAATGTCGCCAAACGTAAGAGCTCTATGCCTCAGAAATTTCTTGGAGACAAGTGCCTGTCAGACATGCCCTATGACAG
TGCCAACTATGAGAAGGAGGATATGATGACATCCCACGTGATGGACCAGGCCATCAACAATGCCATCAACTACCTGGGGGCTGAGTCCCTGCGC
CCATTGGTGCAGACACCCCCCGGTAGCTCCGAGGTGGTGCCAGTCATCAGCTCCATGTACCAGCTGCACAAGCCCCCCTCAGATGGCCCCCCAC
GGTCCAACCATTCAGCACAGGACGCCGTGGATAACTTGCTGCTGCTGTCCAAGGCCAAGTCTGTGTCATCGGAGCGAGAGGCCTCCCCGAGCAA
CAGCTGCCAAGACTCCACAGATACAGAGAGCAACGCGGAGGAACAGCGCAGCGGCCTTATCTACCTAACCAACCACATCAACCCGCATGCACGC
AATGGGCTGGCTCTCAAGGAGGAGCAGCGCGCCTACGAGGTGCTGAGGGCGGCCTCAGAGAACTCGCAGGATGCCTTCCGTGTGGTCAGCACGA
GTGGCGAGCAGCTGAAGGTGTACAAGTGCGAACACTGCCGCGTGCTCTTCCTGGATCACGTCATGTATACCATTCACATGGGCTGCCATGGCTG
CCATGGCTTTCGGGATCCCTTTGAGTGTAACATGTGTGGTTATCACAGCCAGGACAGGTACGAGTTCTCATCCCATATCACGCGGGGGGAGCAT
CGTTACCACCTGAGCTAAACCCAGCCAGGCCCCACTGAAGCACAAAGATAGCTGGTTATGCCTCCTTCCCGGCAGCTGGACCCACAGCGGACAA
TGTGGGAGTGGATTTGCAGGCAGCATTTGTTCTTTTATGTTGGTTGTTTGGCGTTTGATTTGCGTTGGAAGATAAGTTTTTAATGTTAGTGACA
GGATTGCATTGCATCAGGAACATTCACAACATCCATCCTTCTAGCC
MOUSE SEQUENCE - CODING
ATGGATGTCGATGAGGGTCAAGACATGTCCCAAGTTTCAGGAAAGGAGAGCCCCCCAGTCAGTGACACTCCAGATGAAGGGGATGAGCCCATGC
CTGTCCCTGAGGACCTGTCCACTACCTCTGGAGCACAGCAGAACTCCAAGAGTGATCGAGGCATGGGTGAACGGCCTTTCCAGTGCAACCAGTG
TGGGGCCTCCTTTACCCAGAAAGGCAACCTCCTGCGGCACATCAAGCTGCACTCGGGTGAGAAGCCCTTCAAATGCCATCTTTGCAACTATGCC
TGCCGCCGGAGGGACGCCCTCACCGGCCACCTGAGCACGCACTCCGTTGGTAAGCCTCACAAATGTGGATATTGTGGCCGGAGCTATAAACAGC
GAAGCTCTTTAGAGGAGCATAAAGAGCGATGCCACAACTACTTGGAAAGCATGGGCCTTCCGGGCGTGTGCCCAGTCATTAAGGAAGAAACTAA
CCACAACGAGATGGCAGAAGACCTGTGCAAGATAGGAGCAGAGAGGTCCCTTGTCCTGGACAGGCTGGCAAGCAATGTCGCCAAACGTAAGAGC
TCTATGCCTCAGAAATTTCTTGGAGACAAGTGCCTGTCAGACATGCCCTATGACAGTGCCAACTATGAGAAGGAGGATATGATGACATCCCACG
TGATGGACCAGGCCATCAACAATGCCATCAACTACCTGGGGGCTGAGTCCCTGCGCCCATTGGTGCAGACACCCCCCGGTAGCTCCGAGGTGGT
GCCAGTCATCAGCTCCATGTACCAGCTGCACAAGCCCCCCTCAGATGGCCCCCCACGGTCCAACCATTCAGCACAGGACGCCGTGGATAACTTG
CTGCTGCTGTCCAAGGCCAAGTCTGTGTCATCGGAGCGAGAGGCCTCCCCGAGCAACAGCTGCCAAGACTCCACAGATACAGAGAGCAACGCGG
AGGAACAGCGCAGCGGCCTTATCTACCTAACCAACCACATCAACCCGCATGCACGCAATGGGCTGGCTCTCAAGGAGGAGCAGCGCGCCTACGA
GGTGCTGAGGGCGGCCTCAGAGAACTCGCAGGATGCCTTCCGTGTGGTCAGCACGAGTGGCGAGCAGCTGAAGGTGTACAAGTGCGAACACTGC
CGCGTGCTCTTCCTGGATCACGTCATGTATACCATTCACATGGGCTGCCATGGCTGCCATGGCTTTCGGGATCCCTTTGAGTGTAACATGTGTG
GTTATCACAGCCAGGACAGGTACGAGTTCTCATCCCATATCACGCGGGGGGAGCATCGTTACCACCTGAGCTAA
HUMAN SEQUENCE - GENOMIC
AAAGTAGCATACAGGTTCTGACCTTCAAAGGATCAATAAACAAATGCATCTCCTGCTCTACACTTTAGCCATTGGAGCCAAATCCCATGGTTCT
ACCCTCAGTTTAGTCCCTCGGCTTAATCATCTTTTGATTGGCCATGGAATGTGTACCTAACTATAGTCAACAGTCTTACAAACATATATACATC
CTGTATATCTATTTGTACAAAGAATTGGATCTTCATCCTGCATATTCTCTTTTCAAAATTAGCCTTTGTTTACCATCTATAAATCAAGACAACA
TTATTCCTTCTCCCAAAATGCAGGGTTATTCAATACAACTTGTTGGAAACAAACCGGCTTGGCTGAAAATGTTTATGAGCTATAATCATAGAAA
ATAAAGGGATATTATAATGAGAAGTCAATCTTTCAGTTTAATTGCAGAACACTTTTTAAGCTACAGAAAATTGTGAATTTGAGCTCTGAAGTGG
AAATAAAGTTGCCAGTTTCAGACTGCATATCACAGAAAATGAATTCTTTTTCTTCATTAGAAAAACATATCTGCAAGTAATAAGATATTATGAG
TAAATATTACAAGAATACATTGTACTGGGCTGTGTGTAGCTACAGAATGCATTATATCTTTAAATTATTTCTAAATCACAAATTTAGAGAAAGT
CCTGCTCCTGGCATTACTAAATTATAATCTGTCTTCTTATCCTACAGAAATAAAGAGGTATCAACTCACTTAGGATAATTGCCTGATACAACCA
GAACAGGATTAGGGAAAATTCATTATGGTATTGCAGTGTTGTATTTTAAAAGTATTCTCTGCTTCCTTTTTGAAAAATGGCTTAAAAATGAGCA
GAATAATGCACATACAAGGAAAGTGTGAAATAAATTGTCAACTTTTAGTTGAAGGAAGGAAATTTGGAATATTCTGTGTTGAAGCCTTTACTGC
TAAGACAGCATTAAATAGGTGAAGAAGCAACACTTCTAGTGCATGATCGCAGAGCCCCAGACAGGACAGAAGCATAGGGAGGGATGGGGGTCTT
TCAGCTGTCAGGAGAGGAAAACACAGTCCCTCTGCATATTGGAAAACAAATGTGCCAACTCCTTGACATGTTACTTAAACAAAAATATTTTTCC
TGTAAGTAAGATAAACCCTTCAAAAGTAGCACCATGAAATGGAACTATCTGCTGAATATCTGCTCACTGTTCTAGGAACTGTGAGGAAACAAAA
TAGAAAAAAAACCAAATCTCTCCTTTCAATGAGAGCAAACAACAAATGTTACCAATGAAAACCAGAGAGAAGGCAGGAGAAAAGCTAACGCTCG
GGTGGGTCAAGGTCGTTCCCTTTCATGGAGAACAGACAATGACAACTCAACCACAATGATAATGGACCAAACACCTGAAGCCAGTAAGGGGGGT
GGGCAGGCAGAAATCCAGGGGAGAACCTTCTAGGAGACAGCAGTAAGTGAAAGGCAGTGAGCTGGTCTGGAGCACTTGAGGACTATAAGGTAGG
GCCAAGTGGCCAGAGACAGGCAAGTAAGTGGGAGAGTGGAGTCTGGCCTGCATTCAACACAGAAGCACCCCGATCTGACTCTGCTCTTCATCAA
GCTCTCTCTGGCTTCTGTGAGGGGCAGGGGTGGAAGTAGAGAGACCCCTGAGGAGGACACTGCTATTTGCAGATGAGAGGTGACCAGCCTGTCT
GCAATGGAGGGAGAGGAGGTCCGACCATGGACACCTGATACCTGCAGAGCTAGTGGGATTCCCCAATGGACTGGATGGTAAGTGAGAGAGAGAG
GCATCAAGAATGACTCCAAGGTTTTGGCCTCAGCAATTGCCAGCTGGTATTCAATGAGATGAAGGGGTCTCAGTGAAGCAAGTAAGAGAGGAAG
ATCAGGGATTCAGCTGGGAGACAGTAAATATAAGTTGCCTATTAAGCCTCCAAGTAAAGGTGTTAAGGAGGTGGGAGAGTTCAAAAGGAGGTCT
GAAGAGCAGATATTAATTTTTGGAGTAAGGGTACAGAGATGACATTGCAAACTGCTTCTGGAGAGGCCTTCAAGGAACTGACTGCGGAGGGAGA
CATGTCTGGAGAGCTGCAGCATTTTAGGAAAGAGGGGAGAAAACAGCCAATGAATAGCACAAGAGAAAAGCATGGCGAGTGGGGTGTCCTGAAG
ATCTACCTCACTGATATCGGGGTTCAATAAAATGTTCGTGCATTTTTTGGTAAATTTTAAAGTGCTAGATAAATGCTGACTTACTACCTTTGGG
ACCAGATGGACTTTGCTCCATCCATTGAGATCATTCTTTCCAGCTCTTCTTAGATTAAAAAAAAAATCCACTTTTAACTTAGTCAAGGTTAGTC
CCAACTGAGAATCTGGAGACACATTCCTGGGAATCAGAAGCTCTGCCTACTTTTGACTTGTTAGATAGCACTTTCTGAGAAATCTTACAGCCAC
CCATAAACAGGGGAAAGGGAGAAGGGCTAACTCACATTGATTACTAGGTATTACAATTGAAGACTTATGTTCATGCTTTTGTTTAATCCAAACC
ACAACTCCATGAAGCAGGATTCATTTTCCCTGTTGCAGAAATGACAGTGTGATCCTGAGAGAGGTGACGTAACTCAGCTGAGTTCACGCAGTGC
CCTCGCCATGCACCTGTGGTCCCAGTTACTTGGGAAGCTAAGGTGGAAGGATCCCTTGAGCCCAGGAGGTGGAGGCTGCAATGAGCCAAGATCG
TGCCACTGCACTCCAGCCTGAGTGACGGAGTGAGACCCTGTCTCAAAAAAATAAATAAATAAAAATAAAGAAAAGAAAAGAGAGTTGCTATCAT
AATTCAAAAATAACTAGACTAAATTTCAGTCCTACTTGATAGGCTGGAAAGGCTGTTCACATATCTTACTCTTTCCTGGACAGGTCCATTCCAT
CTGACCTCTCTACCAAGACTGTTGCTTCTAAGACTGACAATTCGGCCTTAGGGGAAATAAAAAATTTAAAGAGAAGTGAAGGAAAACGCTTCCC
ACAAATTGGAGAAAGGTGTCTTAAAACAGCAGTCCCCAACCTTTTTAGTGCCAGGAACTGGTTTCATTGAAGATAATTTTTCCACAGAGGTCAG
GAGGGGATGGTTTGGGGATGAGTCAAGAGCATTACATTTATTGTGCACTTGAGCTCTATTATTACTATTACATTGTAACATATAATGAAATAAC
AACTCACCATAATGTAGAATCAGTGGGAGCCCTGAGCTTGTTTTCCTGTAACTAGATGGTCCCATCTGGGGGTGATGGGAGACAGTGACAGATC
ATCAGCCATTAGATTCTCATAAGGATCATGCAACCTAGATCCCTCACATGTACAGTTCACAGCAGGATTTGCAATCCTAAGAGAATCTAATGCC
ACCATTGATCTGATGGGAGGTGGGGCTCAGGAGGTAATGTGAGTGATGGGGAGTGGCTATAAATACAGATGACACTTTGCTTGCTCACCCTCCC
TATACTGGTCAGTGGCCCTGAGGTTGGCAATTCCCGTCTTACAGAAATCAGTTCTTGGAGACATCTCATTTCTGTCTTGGGAAATGTGGCATAA
GCAGGAAGAAAGAGGATACGTGTGGAGCCAGAGGAGGAGCCACCATGATTCGCAAGGTAATTTGAAAAGAGAGGCCAGACGCATGGCTGAAATA
TTATAACTGGCCAAGATTTGTATCCCAGCCTGGTCACATAAAAACTGAATGCTTCAAAGTGCCGAACACTTACCCAGTGCTTGATATCTGCCAA
GGAGCCATCAAAATGTCCTTAATGTGCACTAACTCATTGAGACCTCAAACATTTCCGAGGATGTTTGTGCTATGGCAATGTTCCCATTTTACAG
AAGAGGAAACTGAGGCATGGACAAGTCTAGTAACTTGCAGAACTAACTCCAATAGTTTGGCCCCAGAGTCTCTCATTTCACAGCCACCTTCTGG
GCTTTCCATCAACCCCCAGCGAGTCCCCTTCCCTGAGCTTCAGTGTACTCATGTGAAATGGGGACCACAGTGCTAGCTTTGCTGCATCGTTAGA
TGGGAGATAATGCCTGCATGCCTGTCACAGAGCTCCCCTCAGGGTGGGGTGATAATTACAATATTACTATTAATCTTCAGTTAATTCTCTCTTT
TGAGACGGATGTTTCTAAGCTCCCCTGCCAGCCAAGTGTGGAGCAGAAAAGCATTTGCTCAGACCTCCTGTGTGATCTCTCCTCACCACCTCCC
TCCTTTTGTCCATCAAGCCTCCCCCAGTTCTGGCAACTCTTTAGTGCTATCCTTTGTGTTCCATAAGGCTCATGTCAGAATTTATTATGACACA
TTTTGCATCAGAATGAAACTATTAATTGTCCACCGACTTTACTACATTGTGAGCTCCTTAAGGGACAGATCTTCCTTTCTGCTTTCTTGTGACT
ACCTGCATCTCAAGAGCCACCTGCAATGGTACACTCTCAATAAATACAGGCTTTCTGAATAAATAAATGAATACATGCCACCAGAGTGTTTATG
CTTCCGGAAATCCTGCTCCAATCCTGTTCCTATTCAAAGAATCAACTGGAGTGACACACAGCTCTGTTCTTCTTTGTTCTGATCTCTTCAGGTC
AGATTAATATATTATTTTTTATTACTCATCAAAAACATCTTCAGAAACTTTTCATCAGAAAGATTTTTTGTGTAAACCTATCTATCTCCTCCAA
ATCACTATATCTGACTCAGTGTGATTTTTAGTCTCTTATAACCAAATGATATTGATAGAAATTTGTTGCTTTTGAGAACCTAAGTGTATTTCTC
TTACAAATTTCAAAGGGAATAAAGTGAAAGTATTATCAGGAAGTGGGAANNNNNNNNNNNNNNNNNNNNTGGGAAGAATTCATATGTCAGCTGC
AGCCCATCCCTGATTCGAAACCTACAGGCAGAGATGTGAATGGTCAGTAGTGCTAAAGGATTTCTGTGGTTCCTGCAGAACCAGGAGACACTGA
GGTGCCAAGACAGGGCCTTACAGATGTTTCAGGAAACCAACCACCCAGAGGAGTATCTTGCCAGGTTCACCAGGTGCTTCCTACCCAGGCACTG
CCAGCAGGACAGTCCTAGCTCTCCACCAGCCCCCTGCCTCTCCTCTGCATCCTGCTCCTTCACCCCCAGCAGCAGGCGGGAGCTAGTGGACTAT
GCTTAGAAATAGCCAAACCAACGAGGGAGCCCAAGAAAAAGGATCGAGGACCTCTCACCAGGCCAGTGATCATTACTTTTCAAAAACAGCAGAG
GCAGAAGCTGGAAGTCATGAAAACTGGGAAAAAGAAACCAAAGAAACAGTGTCTTTGTTGCAACAGTTTCATCCAAGTCCTGGGTATATAAATA
AAATAAAATTTTATTTTTTAGCAAAAAAAACCTTTTGCTGTTATTTAAAAATATTCTTGCTGTTTTCCAACCATCACAGGAGACATGCACTTTT
CATTGCTGTTAACAGATCTTTTTTTATTGAAGAAAAATACAATTATGATAACTTCCATAGATTATTTCATTGAATTTCACGTAATTCTATCAAG
ACCATTGTCAAGTAGATGTGCTCTGCGGATGAGAAACTGAAGCTCAGGCTTTAAACAACTTGCCAAACACAGTTACTAAGAAACAAAACTATTA
ACCATATCGTATCACCTCAATCATCCTTTTACTTTCCTTTGAAAGTAAAAAACTCACTCTCTTTTGAAAATCCCATCCAGGCTCTACCTGGACA
AAAGTGCCTAGCTGCCTCTCTTTCCATAGTGAGCTCTGAATAAGTAGCCTTTGATTAATCCTATAGGTGGTCTCTATTCTTTCGATAATACAGC
CTCATAAGAAGAAAAATTGGTGATTTAGCAATTATTGCCTGAATAAATTAAAGTGTTTTATTTAATACTTTAACATTATGAAGAGCGCAATATA
TGAATTAATATGTAAATAAAATAAAATGACTTTAGACATAATATGAAAAAAAACAGTTTTACATGTTCCAATTTCTCCCTATATGTTTTCCCAT
CCATTGTGCATTTTACTGTTGTCCCTAAGGGTTTGAACATTTGATTTATATCACCTCTCTGGTCCCTCTGAGTCTATCCACAGACCCCAGGTTA
TAATAATATAAGCTTGACTTCCTTCAACTCCACCCGGTTGGGGGCAAGGGTAAGGCATGGTACCTGCAGCCTGACTGCTGTTTTGTTTTGTTTT
GTGACAGGGTCTTGCTGTGTCCCCCAAGCTGGAGTGCAGTGGTGTCAATCATGGCTCACTGCAGCCTCAAACTTCTGGGCTCAAGGGATCCTCC
TGCCTCAGCCTCCTAAGTAGGTTGTTGGGACTGCAGGTGCATACCATAACACCTAATTTTTAAATTTTTAATACAAATGGGGTTTGATTTTTAA
AGTTTAAAATTTTTTTGTACAAACAGGGTCTTGCTTTGTTGCCCAGGCTCGTCTGGAACTCTTGGCTTGAAGTGATCTTCCCACCTTGGGCTCC
AAACTCAGGTGTGAGTCACTCCACCCAGCCAAGGAGCCTGACTCTTCACAGTGCACTCCTCATCTCATTGGCACATTGGTTGGGCTACCAGGGA
ATAACTGTTCTTACTTGGAAAGTACTCCTCTCTGTCAGGCATGTGGCAAGGTCTTCCATATGTGATCTCCTTAACCCACAAACAACCCCACCAG
GAGGGTTATATTATCACCACCAATTTACAGATGGGGAAATTCAGGCTTTGACAGATTAAGGACCTCAGTCAGATTCATAAGCCCAAACTATCTG
GGCTCTTAGCCCCACATGCTCCTGCCTCAGTGGGCTACACCTTGGTGAGATGCCTATGTTTCGGTCCACTGGTCCACTCCTGAAGACCAAGGCA
CAGGTTTAGACAGACGTACCAGCGGCTAAAGGTACTTCTGCATCCAAGAACTAGAGGTGTCCCCTGTCCCCTTTACAACATTGTTGGCCTCCCT
CTGGGCCTTGTACCTTATGTTTATTGCCTCATTTAATCCAGGTAAGGAGTCTTTAGGATTGGTGGCATGTATTCTTTTTATAGACAAGGAAGAT
GATGCTCAGGAGTTTGGATAACCTGCCCAAGGTCACGCAGTGGAGGAGAGGACTAGAAGGTAAATCAATGGACCTTTCACTACCTTCCCCTTCT
CTGGGCTGTAGCAGTGAGTTAACTGGCTCAGACTTGCCCAGCGGAATGCCCTTCAGGACACACTGAGTACTGTAGTAAGAGCTGCATATGCGCT
CAGGGAGAATGTGGATAGACGCTGTTTGTGATTCACGGGTAAAGGCCCTTCTCCCAGAGGCAGCAGAGGCACATCCTCTCTCTGGTGTGCCCTG
GCCCCCGACTTGGAGGCCTCCTGGGCCAGGCCAAGACCTTCCCCGGCAGCGATGGTCTCCAGCCACACTCAACTGCCCTGAAGGGACATTTCCT
GCTTATTCCCTTGCCCGGCTGTGTCCTCCACCCGGAAGGCCTGTGCCTTCTTCGCCTGCATGTCCTACCCTGAGGAGGCTCCCTTGGTCTTTCA
TCGCTCTCCCTATCGGTCTTCACGCCTTCCCGAACCACCGCGCCCAAGCACCACCACCTTCTCCGCCCTCTTCACAGCGCCCTCCTCCTCACAG
GGGTGCCCGGGATTTTTATTCTGTGCCTTCCTGGTGGCTCCTACAAGTCTGGAAGGGCAGGAGGCGCATCTCACTCCTCTGGGTCCCCTCCCCT
AGCGCCTGGCGGGAGCCCAGGCTGCATTTGTGGAATTCATGACTTTTTCTCTCCTGCTCAAGCTGAACACATTGCTGGCTCCTGCTCGGGTGGA
GCCCGGCTAATTAGAGTGAGGGGCTCCCCGTAGGGCGAAGGGGTGCGCTGTCAGATGTGGCATTCCCGTTTTACGGAGACACACGGTGTCTTAC
ACGCCAGGGACAGGTCTGAGACGCAAAGAGCCGTCGAGCGCCCTCCGCCATTGCTTCGCTGTCACCTCCGCCTGCAGCCACCCTTCCGCACGCA
CTTGTGTGTGCACCCAGGCCAACATGGAAGGCGCCATCCTAACTTCTGCCGTGAGCAGGTGGGAGGGAAGAGAGACGAGAGGTATTCCATTGGT
TGTCTGGGAAAATGAATTGCACCTTCCCCTCCCTTGCGGAGGATCAACTTTTCCCACCCCCTCCGGTGGGCACTCGCATCCTGGGGCCGGAGAC
TGAACCCGGGAGCCAAGGGGCCCCAGTTCCAGGGANNNNNNNNNNNNNNNNNNNNNNNNNNNNNNNNNNNNNNNNNNNNNNNNNNNNNNNNNNN
NNNNNNNNNNNNNNNNNNNNNNNNNNNNNNNNNNNNNNNNNNNNNNNNNNNNNNNNNNNNNNNNNNNNNNNNNNNNNNNNNNNNNNNNNNNNNN
NNNNNNNNNNNNNNNNNNNNNNNNNNNNNNNNNNNNNNNNNNNNNNNNNNNNNNNNNNNNNNNNNNNNNNNNNNNNNNNNNNNNNNNNNNNNNN
NNNNNNNNNNNNNNNNNNNNNNNNNNNNNNNNNNNNNNNNNNNNNNNNNNNNNNNNNNNNNNNNNNNNNNNNNNNNNNNNNNNNNNNNNNNNNN
NNNNNNNNNNNNNNNNNNNNNNNNNNNNNNNNNNNNNNNNNNNNNNNNNNNNNNNNNNNNNNNNNNNNNNNNNNNNNNNNNNNNNNNNNNNNNN
NNNNNNNNNNNNNNNNNNNNNNNNNNNNNNNNNNNNNNNNNNNNNNNNNNNNNNNNNNNNNNNNNNNNNNNNNNNNNNNNNNNNNNNNNNNNNN
NNNNNNNNNNNNNNNNNNNNNNNNNNNNNNNNNNNNNNNNNNNNNNNNNNNNNNNNNNNNNNNNNNNNNNNNNNNNNNNNNNNNNNNNNNNNNN
NNNNNNNNNNNNNNNNNNNNNNNNNNNNNNNNNNNNNNNNNNNNNNNNNNNNNNNNNNNNNNNNNNNNNNNNNNNNNNNNNNNNNNNNNNNNNN
NNNNNNNNNNNNNNNNNNNNNNNNNNNNNNNNNNNNNNNNNNNNNNNNNNNNNNNNNNNNNNNNNNNNNNNNNNNNNNNNNNNNNNNNNNNNNN
NNNNNNNNNNNNNNNNNNNNNNNNNNNNNNNNNNNNNNNNNNNNNNNNNNNNNNNNNNNNNNNNNNNNNNNNNNNNNNNNNNNNNNNNNNNNNN
NNNNNNNNNNNNNNNNNNNNNNNNNNNNNNNNNNNNNNNNNNNNNNNNNNNNNNNNNNNNNNNNNNNNNNNNNNNNNNNNNNNNNNNNNNNNNN
NNNNNNNNNNNNNNNNNNNNNNNNNNNNNNNNNNNNNNNNNNNNNNNNNNNNNNNNNNNNNNNNNNNNNNNNNNNNNNNNNNNNNNNNNNNNNN
NNNNNNNNNNNNNNNNNNNNNNNNNNNNNNNNNNNNNNNNNNNNNNNNNNNNNNNNNNNNNNNNNNNNNNNNNNNNNNNNNNNNNNNNNNNNNN
NNNNNNNNNNNNNNNNNNNNNNNNNNNNNNNNNNNNNNNNNNNNNNNNNNNNNNNNNNNNNNNNNNNNNNNNNNNNNNNNNNNNNNNNNNNNNN
NNNNNNNNNNNNNNNNNNNNNNNNNNNNNNNNNNNNNNNNNNNNNNNNNNNNNNNNNNNNNNNNNNNNNNNNNNNNNNNNNNNNNNNNNNNNNN
NNNNNNNNCGGCTGCGGGGCAGGTCGAGCAGGGACCGCCAGCGTGCGTCACCCCAAAGTTTGCGGGGTGGCAGGGCGCCCGCTCTGGCCACCCG
CCGCTCTGCGCGGCAGCTGGTGGCAACGCAAGGGCGCGGCGGGGGCGGCCGGCGCGGAGGGCCCCAGGTACGGGGCCCGCGGGCGGCGCTGTGC
GCGCGGGGCAGCCGGTCCGCCGGGAGCGCGAAAGCCTGGTCTGAGCCGGCTGGGGGCGGGGAGTGTGGCGGACAAATGGGGAACAATGCGAGTG
AGCAACTTCAGGAAGTCATTGTGAAAGAAAGCTGGGAAGAGCTCCGCGGCCAAGTTAGCAGGACACTCTAACAAGTGACTGCGCGGCCCGCGCC
CGGGGCGGTGACTGCGGCAAGCCCCCTGGGTCCCCGCCCGCCGCATCCCAGCCTGGGCGGGACGCTCGCCCGCGGCGACGCGGGCAAGCCTGGC
AGGGCAGAGGGAGCCCCCCCTCCGAGGTTGCTCTTCCCACCCGAGGATCAGTCTTGGCCCCAAAGCGCGACGCACAAATCCACGTGAGTGTTTT
CAAATTGAATTTCAATAGGAAAACTTGGGGTAACTGGTGAATTTAAAAAAAAAAAAAACACAGTAAAGAAAAGCGGTAAGGTTGGTAGACCCTG
GTGTCGCTCAGGTCCGCCTCTCTTTTCTCAGGACAGTGACAGACTTCACTTCTGTCAAGCGTCTGTTGCTCTCCACTGTGCCAGCAGGTGCACG
ACCAGGCCGACATGGGACACTTCTGAGCAGCCCCGCTGTCACCAGGAGAGGAGTTCTAGCTCCCAACCATATTTAAATTTATGTAGACCTACAT
ATACCCACGGAAGTCAGCCTTTATAAAGTCGTGTGTAAAGAGTTTTCCTTATATTTGAGCCGGGAGCTTTCTTTTTATACTATAAATATGATGA
GATCGAGTCTGAACTTAATTTCTGCAAGAGAGGAATTATCCCGGCTTTGAAAAGTTAGTCCTTTTGCTGACCGCAGGTTTGACGCTCAAGTCAC
CAAACCTTCTCAGGAAAACCCTTAGTAATATTAAGCCATCAGGTTACTTGCGGTTATATTTGAAATGTATTTTAAATATTTGTCAAGCATCGCT
GCTGATGCCTAAGGAACCTCGTGAGGGCTTGTTTTTCCTTCTAATTTGGAGGCATCTAATGACCCAAAACCGTAGCGATTCCATAGGGTCTGAC
CAGGCACAGCTTTCAAATCCAGCTTCCCTCTCTCTAGGGACTGCAGCCCACCCAGACTGAATTTCAATGCGGTGCGCTTTGCTTAGGTTACCCA
CTCACAATTTCCCACTGCGCCGCAGGCAGTATATTTCAGCTTTGAGATACCTTGTTTTAAAATTCCAGACAAAATGGTGTTGAGGAAATGTCTC
CTTACTAGTCCCATCAACTTCTGTTAAAAGAGGAAAATTTATGGAATTTGAAAATACTGCGTATGATATTTAAACTTTCATAGACATTCAAATG
CTTTTAAGGCCAGGTTCAATTTGGTTATGACTCGAGGGGTGGGGGGGACCCACATAGAAATGTCCTGGGTCCTCTTGAGTTTATTTCTTTGTTT
GAAGATGTTTGTTCAATGAGTTTTATTGTACTCATCTTTTATATGGAATTTTAAAAAGTAACAATTTCAGTATTATTTATATTAGAATGTGTCA
GAATTATTTCCGTGACAAATCAGATCATTTCGGCTATGGCTTAAAATGTACACGAGGCAAATATTCATGACAAGAAGATTCACCTTCTTACGCT
GGCATCTTCTAAAATGCACAACAAGTTAAAGAAATAATGTGTACACATACAAATAATGATGTCACATTAAAAATACTACACTATTCTTGCTTGA
TGGAATGTATCTGATTTCCAATTTCACCATGAACATATTTCATACATTTTTTACATGAAAAAAAACGTGACTCTTAAGTCTCACAGTCAATCAG
AGCTGGTCACCAGAACATTTTATTGAACTAAATGGTCATGTTTTCTTCCCCTTTTGTTTCACGGTGAGAGTTGAAGGAAGGAGTTTAGAAACTC
TCCAGTACTTGTTTAATTCATCAGTGTTCTAATTAGAGTGGTACCTCTTGGAAAACTACACACCCCCCTAATGCAGAAACATCATAGCAATAAT
CACCCACCCTCAGGGTCTCCAGGAGACCACAAGGGCTGCAGATAAAAGTCTGGATGTGTTAGGTTTGACCCTTTCGAAGAGTTTTACACAGGCT
CCTAAAGAGAAGATCAGCTGTGGCCGTTTGTAGCCATTTCCTTTGTCGAAAAACTAAGATCGCAGTCAATGTATTAGCCAAGAGGTCTAAAGCC
CTGTTGTACTGCAGGCCACTGTCTTCCTTGTTTGACTACAGACTTGGAGTTTGAGAACAGTGGTTCTTTGGTTTCGATACATTTTTTGTTCTTG
ATTTGGATGTCTGTGTTTCATGCGTGGTTAATATAGCATATTTTCAATATAAATGTCAAAAATTTTGAAATAGGAAAGAACTCTCTATATATTA
ATGTACTTATACACACACTTCAAGATTATGCATTTATTAACAGATACATGAAATAAATTCCATGTGCATATGCACATATGCACACACAGCGTGC
ACACACACAGCATGCACACAGCGTGGAGTGAGAGGCATGGGGCAGTGTGGAAGAGTTTTAACATCAAACAGACCTGAAATGAGTATTAAAGGCC
CCCTTTATTTTTAAACTTTTACTAAAACAAGATGGATTTCCCTATGTTATATAATGGTGAATTTTAGGCATAAATAACGTTTTTTGAGTGTTGC
ATAATTGTACGTATTAATGTAATGTAACTGTGGTTAACGAAGAATTCATCAAGGATATCACTGTTTTGTGGCATTTTTTTTTTCCTCCTCTAAT
CTTTGGACTTGTGAAATAATTTCACTATGAAATAAATGTTGGTTCTTGTCATATTCTAAGGGAGATTGATGTAAGTGGCTCCACTCCAGCTTAC
AGAAGGTAAACCACGACCTTTTTGCGTTCTCTGAAAACGCTTGTCTTCCGATGCCTCTGTTTCTAAGACTGACAAGCACTCTGGGGGCACTGTG
ACGCCTGCTTCTAGCGGCAGAGTTGCTGCAGCTCCTGTCCTGGCTGTGAACATTGTTCTCTCTCTCCTGTCTCTATGTTCATAACTACAGAGAC
TTCAGCTCTATTCCATTTCATATTTGTGCTGAATAATCATTCCATTTTATGGGAGAAAACACAAGATGTAAAAGCAACAAGTGACCCATCCTTT
GAAGCTTACAAGAAGAGAAACATTAATCTATTTCACGTCTTGAAAACAGATCAGTTTTATTTTGCTCAAAAAGGGCACATGTACATTTTTGATC
TAGGTCTTAGAAACGTAGAGTTTCAGAGGATCAGCATTATACACACTGTCACACACACACACACTTAAAATTCAGATGAGGAACAAGATAGGAA
TGAGGTTTTGTTAGGGACGCAGAGCACCTAAAACCAAAGGATATCGACAGTAACAAAGCTGTTTTTACTGTAGTGCTGACTGAACACTCATGCT
GGTGTCTTCATGTGGACCATGGCTTTCTTGTATTTCTTTGCAGTTTAATAAATGACTTCATATCTCAGGTTACCTTTCCACATCTCCTGGAATA
TATGTTTATGTCCTTAAAGTTTCAGTGTCGTCACTTTAGTAGCTTTAGTTTGAGTTTTTAAATGTTTGGTAATATTCCAACAAATATTTTTTAA
GACATTATGAAACCTTATGAAGTGCCATATATTACAAGTGAGATAAAACAGCAAGCAAAAGAAGGTTTGCAGAAGGTTTTTAAGTGGCGAAGTG
CGGGCCTGCCCATTTTGGTGTCTCCTTGGTGGTTACTCCTGAGAAGGGCCTGGAGGAAGAGCAACTGAGGCCTAATCTACAGGCAACTGCCAAA
TTGTTTCAGTTGACGTTTTTCCCTCTCATGTTTGACTATAATAAATAGGTAGTTGCCAGTGGAGCCTTCAGCCAACCACCTGGTAATAAACTGT
TAAAAATGGTGCAAACCCTAGGTCACAGGTGTGCGGGCCATTTGTCTTGCCTGTTAACAGGCCTGGCCTTAATTCTTTTCTCCCATGGCCATTT
CTGCCTTTGGGGAACTCACAATTCCTGTTGACTAAAAGAGCACCCTTTTCCACCACAAGCCTGACAAATCAGACGTCCACATAATTTCTGAACT
CGTTTTGGTTAGGACAGGAAGCACAGGCTCCCTTCCTGTCTGTGTTTTCCTAAGAGAAAACGGTCTTCCCTCCTTTTTTGCATATTTGGCAAGT
GGTTCCACCTTTCTCTGCACCCTCGTGGAGTGTGAAGGCAGCAGAGGAACCTTTTGCAGGAGGAAGAGGACACAGAGGCCCTGTAGCCAGGCAC
CAAGATCCCTCCCAGGTGGCTGGGTCTCACGGGAACTCCGAGCAGCCCTAGGTCCTCAAAGTCTGGATTTGTGTGGAAAAGGCAGCTCTCACTT
GGCCTTCCCGAGGCCTCGGTTGGTTGGTGAGTGCCACACCGTTTCTTTGTGTGCTTCCATGGATTGGAATAGCCATTCTGTTCTTCCGTCTTCC
CTGCTGGTGTTTCCACAGTGGGTGGCCTGAGCCCAGAGCAGCTCCCCATATCCCTGTGCAGGCCACCTGTCTCGGGTGATGGAGAGCATCATTA
TGCTCCGTCTGAACGCTCTGCTTTCGGATGGCCCCATGCTCCACCTCCTGATACCTCGTGGCGCGGGGCCACGGCTTAACGAATGGCTGAAAAT
GGGTCCTAATTAGTGGAAAAGTCCTTTGTTCATATTTTCTCACTCGAGTGTGCAGTGATTCATTTTTCTTCTGCAATCAGCTCACTGCTAAAGT
AAATCTGACTCTCTTCCCGCCATTGCACACCAAAAGTTAACTCTAATGGGTAGGAGGTTAGGTTTGTTGAGAGAGCAATGCAGTAAAAAGAGGG
GATCCAATGTGGTCTTGTCTGTCTGGTCTTCCTTTCTTCGTTTTTTCCTCCCTTGTCTTCTCTGTCATTCCCTTCCCTCCATTTGCCTTGCCTT
TCCTGTCCTTCCCTTCCCTTCCTTCCCCTCTTTCTTTCTATAATTGGTGGGGGGTTTGCACAGACTGCCAAAACACTAACAACTGTGTAAAGTG
TTTTTGAATGGCCTTACACATATTGAAGTAGATTTTTATGCTCCATTTTTGAGATCACACACTAAAATCTATACCTTTAAAGCATTTTCTGTTA
GTTTGAAACTATTTGAAAATGAACAATGTGGTTTAGATTACAGTCCTGTTCTGAAGCTACGAGTTCCACTATGAATATTGATTTATCAGTTTTT
GACAAATTTTTGTTGTTATACCAGATTTTCACTGGCAAACCTAGAGCAAATAAAATTCCACATAAGATACTTCCCTAGACCTAATGGGAAAAAT
GTTTAATTTAGAGTCTTTAGCACAAATGAGAATGAGGAATTGACCTTTTGTAACCTTACTTCTGAGGCACTCTCGAAGTGTGTTCAGTGCTTTT
AATGGAAACTAGAGAGAGCCACCAACCCCCTAGTGTGAGCCCCACTTTTAACCGGAAAAAGTGACCTTTTCCTCCTCCTTTGTGCTGAGTTTTG
CGTAGGGCAGAAAATTAAGCTGATATTCAAAGAGATTCACTGCAAAAACATATTGATAAATCGTATATTCTATTTCATTAAATTAAAACCATAC
TGCTAATTATCTCAGGTTGTTAAACATAAGGCAATTAATTATCATTTTAAAAGTTGGTAGGAAGTTGTGAGTACTTTTGCAGTATGAGTGTTTT
CCCGCTTTAGTATGAGGTTGTGTATGTTTGCTTGAATTTACAGAATTTTCACTTTAAGAGCAGACAATGTTTTGTTAAAGAAATGAAATTTGCT
AAAAAGGACCATGTAAAGTGAAACATTAAAAATAAATAATTTCAACTTACTTAAGAGCTGCAGAAAAATCTGATTGCTGTGTTTAAAATGAATT
TTCCCACATTTCGCTCTCTTATGGACAGGAGCATTTTCTGTCACGTTATAAATAAAGACATGCCCATTTTTTGTACCCCCACAAATGAGGAAGT
TGTAAGCTCTCTGAGGTTTTACTGATGAGCCCCCTCCCCCTGGGTTTGCATGAAGAGATCATAGGCCACAAATAAAGGACTACAAAATGGGGTC
TAAACTATCCTGGTGGGGCCTGATACCCACGTTTCGCATGGACCTTACGATGTGATGAATGGTTTTGGCATGAGTGTCTTAAGAATGCTTCCAG
ATTCGGGTTACAGGACAGCCAGCGCTGAGCTCCCTATTGCAGAACAAAGTAGGAATCTAGAACTTTCTTGCTAACAGGATCCAGCTAAAACACC
AAGTTAGATTCTTAAATGATGTTCTTTTCTGTCATTATTTGATTGTTGTCAGTAGCAGTAATTGTTACCAAGCCATTGATGCTTCTATTCTTCC
CTTTGCCCTTCTGAGACACAGCTCATTTTGACTTCAGTGGAACCCCTCGAAGGTGGGGTGATGAGCAAGGTGAATTTTCAAAGTAAAGCTACTA
AGAGACCAAACTACAATTTAAGGAACCTGATTTTTGAATCAAATTCCATATACTGTGGGTATAGTTCAACATAGATTAATTTCTTATAGTTATT
ATGAAAAAAATCTCATCTTGATGATAGCTGATAATTTTGTGGGTGTCGTAAACAAAACAGAGGTCAGAATTCAGTCCCTTGGGGAAAATTTCCA
ATTAGTAGGAAACCAAGTGGCCTACCTTAGTTTGAAGACACCCATCAGGATGTCTGCACCTTTTCATCCTCTCTGGAGGAAAGACTAAATACCC
ATTATTGTATATAGGTCAGGCCAAAGCAGCCTTTTATATTGCAAGGAATAAGAGGTAAATAGATATATGTGCAACAATGAATCCCCTAATGTGT
TTACTCTAGAACACATGTTCTTTCTGTATTTATATGTAGATTTTGTAGATCTTCTCTTACCACCTGCTAATGGTAGATACTGTATCTAAATAAG
TTGAGGAAAATTTATAGTACCTAGGAATGTGTCCTCAGTGGGCCAATCAATCAATCATGACTTCAGGTTATTTTTAATAAATATACACGTATGG
GTTCATAAACAATGGGATGTTCTTGTGAAGATCTAAATAATTTTACTTCTTTGGGACTAAATAAAATATAGCTTTTGCCAAATAAACTCACACA
AGCACTTATTTTAATAGAAGTCAAATGGCTTTGCAGAAACTTCAGTTTTACAGGTGCATTGTTTGAAATGTTACGGGTATACAAGTGGATTTCT
CTATTATGTACAGTGTTAAGTTTGAGTTTCAAAATGTCCACCTGAAATGATTTACTTGTACGTTAAGATAATTTAACTGCTAAGAAGGCAAGAT
AAAGCATTCTTTCTGACACCATATGGCCTTGCTGAGGGAAAAACTTACTGTTATAAGTTTGTGTTTATCTCTCTTTTTAAAAAAAAATGAAGAA
AAAAACGTTTAAAATAATGGGAACACAGCAGTTCCTGGGGTCCTCTGTCTCTTTATCTTATTATAGTAAATTACCAAAAAAATAATGACCTGGG
GCATGTCTGTGTGGACCCTTCTTTTGGAGGCAGTTTCTGTGTTTTGTAAAGCTGTAGGTTCTATTTTCATTGCACTTCATATTGCTGCACAGCT
CCTGACCATGCATGAAGGTCCTCTCAAATCGGTAAGAGGGCAGAAGAAAATGATTCTAAACTTAGATTTTTTTAACTTAAGTGATGAAGTGTGA
AACGCCATTTATATTTGAGGAAGCTACCTAGGAAGTGGCTCATGTCGATGGCCCAAATCAGAAGAGGGCCTGTAAAAGCTTCTATCAATTTTGA
CTGTGTATGCTTCTACCATGGCGGCTCAATAAACAGCAGTATTAGTTTAAGAGTGGATGGTACAGTAGTATAGACGGGAAGCCTCTCCTCTCCG
TGTGAACCGTGCACCCCTATGAGAGGGTAGAGACAATACAATATGCCTGTAACGTCAGGACAGACACTCATGGCCAGCTTGAACTCCAGCCCTG
GGCTTCTTGCAGCAACAAACGTGAACACAGAGGACTGTCTCCAACTCCACTTTCTCTATTTTTAAAACAACTTTTTGAATACAGTATCTGCCAT
CTTTTCTTATACCTCACTTTGAAACAGCTCGCTCCACTGTGGCATTTAAAATGTTCTCTTTCTTTTCCCTCTGTATCAAATACCTCTTTACCAA
GAAAACATTCAAACAGCATAGTTTTTAACTGTATTTTGAAAGGTTTCCTTAGTTCCCTTTGACCCTTCCTCTTTTGCATATCAGTTCCTGGCCA
TAAAAATAAAAAATGCTAGGACAGAATTGCACATCTGAGCTGATTTGCCCTCAAAAAGTTTCACAGTGGAACAAACCGCAGGAGGAGTTTTCTG
TGGCTCAGTTAAATGTCGGGGGAGGGTGGTGTGAAAGCCAAATTGGATTCCTGCTTTCCTGTTTAAATCTTGTTTTTCATTGTTATTTGCACCA
GCAATACTCTGTGGAATAATCATGAAAATGTGTAGATTGGCAGCTAATTTTTGAAAAATGAAAAGAATCAGAAATGAAATAAGAGTGCTCGGAA
GTTTTTATGTTCTCTCAACCTGTTTTGTCAAATTGTTACGAAAACCTATAAGGTCTCTTTGACTAGATACAAAGACTTTGCACATTGCCTTAGC
TTTCTCTTGAAGCATTTCCTTTTTTAAAATACAGTGTAATTCACAGTGATATGATAGATTTGCAAAAGTAAAATCTACCAGTCTGAAGATGAAA
GGACTTGTCTCTTAGCAGGAATAATGGGTTTTATTAAAGAGGTCTGTGACCTAAGGCATTTTAAATAAATTACAGGCTTGGTCCCTGTCTCCCC
CATGTATCTACTCCCTTCAATATAAGCATCATTGAGTATTTAAGGAAATAACCCCAAATGTAACTCTAGTGTAGCTTCACTTGTCAGGGAGGAA
AAAGTAAATAGCATACATTTGGCCAAATAACCAGAACTTTACTGTAGAAGTTTTATGATGAAATTTGCCTTTAGTGCAGAGTATTACAAAGATC
ATGTTTAGTTTCTAGCAGTATATAAGTAGCATCCATCCTTATCTGTCATGCATTTGGAGTGTGCGACCCCTGCACTGGGCTGCAACATTCTGAT
GGGCAAGAGTGCTAGGGACAAAGAGGCATCACCATCAGACTGCACGGGTTCAAGTGTCAGCTCTGTGGTTGATTAGCTGTGTGACCTGGGGAAA
GCTATTTCTCTTAGCCTTGGTTCTCTCATCTATAAAATGGAGATAATGATGCAGATGCCTTGGGTTTAATTGGGACAGTTAAAGACACATTTAC
ATATTTAGCAAGTAGGTGTTGAATTCTAGCTCTACATTGGACACTATGCCAGGTGCTCAAATAAACAAGTGGACAAGACAGACAACACCCATGG
TCTTATGAGGCTTAACCATTTGCCTCTTCAATGCCAGAAACTTAGTAGGTTGATTAGATAAAGCCAGTGAGTACCAGTATCCTTTTCTTTGCAG
CCTTTTCCTGGCACACTAAAAATACTCAGTACATATGAAATATCACTGGACAAAGAATCCCCCTTGGAGTACCAGTGGAGAAGGAAGGCATTTG
CTTAAAAGCAAACCAACAGAAAGACATTGTAAGGCAGTTGTTTAAGTCTCAGAGACCTATAATTTTTTTCTTTTTTCTTTTTTTTCATCTCGCT
CTGTCGCCCAGGCTGGAGTGCAGTGGCACAATCTCAGCTCACTGCAAGCTCCACCTTCCGGGTTCATGCCATTCTTCTGCCTCAGCCTCCCAAG
TAGCAGAGACTACAGGCGCCCGCCACCACACCTGGCTAATTTTTTGTATTTTTAGTGGAGACGGGGTTTCGCCGTGTTAGCCAGGATGGTCTTG
ATCTCCTGACCTCATGATCCGCCTGCCTCGGCCTCCCAAAGTGCTGGCATTACTGGCATGAGCCACCACGCCCGGCAACTACAATTGTTCTTAA
AGCTTGTAGAATTACTGTGTGCTACCAACAGACAGGCTAATTTTGAGTGACCCTCAGTACTTTGTACAGTTAATTTGGCACGCTGTGTACTTAG
TGGCTTTTTAACAGCTATAAATTTGGGCTGCTAGAAAAGTAGTAAAGTTGTGATTCTTGACAGGCATCTATCTGCATTTTCATTTTTACTTCAT
TTGTCTAGACTCAGCTTGTCAGAATTATGGAAGAGACTCCTTGTGTCAGGGCAAGCACTGTGAAGAGAGGTATTCACTGTCAGAAAAGAGAGGG
GAGCTGCAGGCAGCTCAGAGGCCTGAGACCCGCCTCCACAGGAGCCCCAGCAGGTTCGGTGGAGCTCTGGCCACACTCTCCTTTGGGATGCTGA
AGTCAGAATGAGTTCACTTCCCAGCCAGTCTTGCCAAGGCTCCTCACCTGGAAGCAGCAACTGCCCAGGGCTGTTGGATGTTTCTCCCCAGGGG
ACAGCCAGGTCCCAGTCCCGCCTCGGTGTGGAAGGAGGAAAGGCAGGGTCCAGGAAGCTGTTTCAGGACAGGCCCAAGGTCCCCCAGGGATGCC
TTTCAGGGTCAGCGGAGGCTGTAAATCAGCAGGGCCCACACGGCCTGGAAGAGGCCCCTGTGCTGTCGGCTTGCCCGGCTTGCCCGGCTCCTAG
TCCGGCTTCTGCTCCTCCTTTGTAAAGTTATGGATATGCTAATAGTTTCCAACTGAGACTAGGAAAGTAAGTCCTACTTGACACTGTTTGGTCA
GAAAGAGGGAGAGAAAGGAGAAGGACAGAGAGAGACTGAGAGAGAGACAGTCTCAGACAAAGGGAGACGGAGGGAGGGAGGGAGAGACAGAGAA
AGAGATGGGAGGTAGGTGTGGGAGGAGGGAGAGATGCAGAAGGCAGAGGAAAGACAGACAGAGATTTAGACCTCCCAAGTCAGTGAGCAGTCCA
GAGTTGGAGTGGAGGGTGCCTGGTGGCTTGTGACTGCAGACTCCACTCCCCGCTCCTAGAGGCACAGCCATGGACAGCTTCTGTCACGTTGGCC
CTGCACTTATCTCTGCATCTATTTCCCCTTGTGCAAGATTCAGAACTGCATGCTCCAAAAAAACAATAAAAGCATTCATGTTCATAAGAATTGC
ACACGTAAAAGGTAGTTTGCTGATATTGTTGTATTTTTTACTATCGCTTCTTTTAGCTCTTGCCTGAAATTGTTTGGGTTTCCCAGGCAAAGTA
GAAAACTGCGGTACGTTTCTGTGAAATAATTATTCCTTCTGGCATCTCCCTTTACAGACCTACTGATCTTGATTTTTCATTTAGGTGAAAGTTT
GTGAAAACATGCCATTAGCTTGCTTTGTGATTAACTCCTTTTACTGAATGTGACCTCCTTTTAAATTGAGGCCATATCAAGCTTAAATTCCATA
TTTTACCCGGCACTCTGCATTTCTTCCATGTGGGAGAGGAGGGGCTCAGTAAGTGCTTTGTAAAATACACAGCCGAAGTGATGCACGTGCTAAC
AAAGGAGTGTGACAGGACTTAAGTGCCCTTCTAGACACTTCAGGCTCCCCTTTGTAAGCTGTCTTGGAAGAGGCCACATTTCCTTTCCCTCAAA
CAGTTTCTCATTGTTTGATTATTCTTTTAGCCTTTCTCTGGAAGCAAAGCCACTTTTACGAGAAAGTCACTGCTTTTTCATCTCAAGAGATGCA
AGTTTGGAGTTTGGGGAAGTTTTCAGGTGCCCGTCAAGTCATCCTTTATGATGTCAGACGAGTCAGCCCACAGAATTCACAGGGCTCAGTGCAG
ACCGAAAACTTGAGGCCTCTTGTTCAGAAATTATTAAAAATTTTGGTGAACATCACCCCAAGCAAAGAGATCCCCTAAGCACCAGCCCCCAAGC
AACTGCACTCATAAGCCCATGAAGCCCCCTGCTGTCAGAAACAATGTGGTTGAAATTGTGTATGCACTTGGAAGTGAGATGGATTGCAAAACAC
AGGTCTCCATGCTGGGGCAGGAGTGGTGATAGGGCATGGAGTGGAAATGTCCAGCAGGCCCACGTGCGAAAATGCAGAGCTCTCTGGCTCTTGC
AGACTTGGCTGCTGACAATAGACGCGCTCCACGAAGGTGCTCGCTGTGGTGTGATCTGCTGCCCACCCCTAGCTCCCTCCAGGAGACTGGTGCG
GGGACTGTTTGCAAATGACTGCAAAAGTAAGAAGGTTCCCACAGAGCAGAGCTTGATTTGGGGACCAGCCGAGGGCAGTTTGTCAGGATTCCGG
CTTGAAACTGTTCTCACATCTCACCGCCTGAAAGGACGAGTGTGTCCAGAGGACTTAGCATTGATCACCTCTGTCTCCATGCAGCAAACTCAGA
GGCTCAGCCCGCATTCCACTGGAAGGGCGTTTGCCAGTGGTGTTGGTTGGAAGAGCCTTGACTTTGCCTTAGGAAACATCTTTTTTTAAGAATT
GAAAATAACTTGAGTATGCAACAGTAGGGCATTTGTTATATAAATTAGTTGACTAGTGTGTAGCCAGTAAAATGATGATGGTGGTGTGTATTTG
TTAAATAAAAAGATATGTGTGGTATTAAATTAAAAAATATTTTAAAACAACATATTTGTAATCTGTTTAGTGTCCTCTTTTTGTAAAAAGTACA
GAAATAAATATACAGAAAAAATAGTAGTCCTAAGTGGTAGAAATTATGAGCATTTTCTTGCCTTTAAAAAAAGTTGTAAAAGATTGTATCATTT
ATGTAGCAAAAAGTTTTAAGTCAGCATTCTAAAAATTTCGTGTTGTTATAGTTGCTGTGACAAGATTTAACTTCTGTATGCTTCACCAATCAAT
ACAGAGGTATTTAAGACCCGGTGTGTGATAGGCCGCGCTAAAATACTATACACATCTTCAGAAAACTAGAGAACTAACTTCTAACTTCCTATAT
TAGTGTGGCACGGCTGTTACAAAGATTTTTCTCATTTGAGTCTATCTTGCTTCTTTATCATTGTTTTGACAGTTTCAGAAGAATCGTGGCTTTT
CCCCTTTTTTACAGTAAAGGTACCTGAGACTCTTGACGTATTCCTTTTTGGAAATGCTTGTGCTGGTCACATGCTTGCATCTGGGCTAGTGTGT
CTGGCTTCCGTGTGCTGGTGGATGCTTACTCTGTTTTCTGAAATACTTTTTCTGTACAGTGGCGACTAGCTCTACTCCTAAGCCACACACCTAC
CTTGAAAATTCATGTCACTTTTAGAAATAGATAAAAGCCCCTCCCATCCAGAAAAAGTGACTATCATGTATATCCTCATCATGACTAATACTGA
TATTCCTGAAATTGAAAATACATATTCCATATGTACCATAAAAGGTATTAAAGATATATGGAGTGATAGATATATTATATATAACACTTCTACC
CTCACAGTTTTCAGCCTAATTGAGAGGGTAAGATCCCTGAATCATCCATCAGTTTTTCAGGTCTCTGCTGAAAGCAGGCCACAGCTCAGATCCA
CACATCTGAACCAGACACAGAGGTGCCCAAAAATAAAAAGGGGGACAGGGGGACAACCTGGTTTAGAGTCAACAAATAGACTGCATTTTCTGGT
TAGTGAAGGAGCTCTCCTGAAAGTCATATACCAGAGCATAAATGAGCAGATTTCCTTGAGGTCACCTTCTGCTGGCCATAGCTTTCTTATCTGT
GGAGCTGCCAGCTGTCATCCACTTTGGGGCACCTGAGACTGCCGAGCGGCAGGCCAGGACCCAAGTGCGAAACACAGAACACCTTTTTGTTTCT
ACTCCACTGATGCTGGGGTTCTCTCCCTGGTGTTTGTGGCTCGTAGTACACTCTGTGGAACATTCACTATGGTCATCGAAGGGCAGCATCTTCC
CAGTTGTTTCTTTCTTTTCTTTTTTTTTTTTAATTTAAACCGATCTGAGAAGCCAGCCATCTGTCAGCAAAACAGGAAGGCTCGGGCTCTCTCC
TGGGCTCGTTTTGCTCCCGTAGTGAGCGTCACTTCTCCCCGTGTAAGAGTGCTGGTGAAGGCTGAGGCAAGGGCCCAGAAAGATTGAGGGACAA
AGACAGGAGCGCCCGCATTGCCCATCTCCCAGGCTGGAGGTGTATTCATTATTGATGGAGGTAGTGCAGTTGCTGCTCAGATATGCAGCCCTGC
CTCGCTAAATCAGACATTCTTCAGCAAATTCCTTCGTTTTTTGATTGCTGATTGTACCCGTGTCACCAAGCTGACTCAAGGTTCATCGATGCAT
GCTCAGTAAATTAGAAAGAACATAACTATGGATCAGCCAAGAGAATGAATTCTGTGCCTACAATGACCCAGGGCCATTTAATTTTCTGCTTAAT
TTTGTTGCAGTCAGTTTGCATTTTGGGTTATTATGCAGTAGGAAATTAACAATAAATAACAAATTTGGTCCTCCTGTGCTTGTAATGATATTTT
TATAAATCTTTGTAATGCTGTTTTTAAAAGGATCAAGGTCTGTGCCAGTCTGATACTCCAGCAAGTATGTGAGGAGGAAAATGCATTATTCTTG
CTAGATAACCTTGTTGTTAAATAGCATAGCGGTTCTTTATCTCTCTCTCTTTCTCATATCTTATTAGTATTTTTGCTTTAAACTAAAATCCCTT
CCTCTCTTTCTCAGATAACCTGACGACCATGGATGCTGATGAGGGTCAAGACATGTCCCAAGTTTCAGGTCAGACCTTATGAGATAGCTGTGTG
GGAAGTTCATGAGAAAAGCTTCCCTGGGGCCGGAAGTCACAGTGCTTGGTATGCTCATGGGGGAGGAATAGGGGCTATTCTGCAAAAGAAAAGA
CCATGATGGAATTTGCCTGAGTGTTTCCTTCACCTGTTACAAATTATCTCACTTTGAGCTGAACAGAAAGCCTCCAAGATGAAATTAGTTTTAC
TGTTAAACTTCAGGAAAAAAAAACGGGAAGAGTTAAATACATTTTTGTACTGTTGGAAGGAAAAATGGCTGATTGGTTTAAAACCCAAACACAT
GCCAATGATGGTACTTAAAGAGAGAGAGAGAGAGAAGCTTGAAAAACATAATTGTTGGGCACAGTCATGACTGTTTGTTCATTAAGCATGGACA
CAACATTGCTCCCCTTTGCCATATATCTTTTCAAGCCGTATTGGATATAGCTCTTCTCATCCAGGAGACCCAGGAAGTGGAGAAGTCTGTAGTA
GGAAAAGCCTAAGGGTAGGTCACAGACTGTGACCATTTGGCAGCACTGAGGGTGGACGGCGAGCCAGTCCAACAAAACCGCACAGTTCCCCAGT
GCATGGACATAGGAAGACAGCTTTCTATCTGGCCCTGTATCCAGAGGCGTCAGCCCCAGTAGCAGCTTTCATGGACTTTGGGGTTTTCGGTATT
TCATATTTTTGAGCCTCACAGACTCACAGCCAGCCCCAGAGCCTGACTTATATTTGAGAAAGTTCTCAGTGGCACCTTGCCTTGGCTGAGCGCC
CTCGTGTTTTGAAGTTTCTATGGGATTCTACAAGTTGGTGCTCCTGATGAAGACCAGGACCTATGTGTGGCTGCTCCCCTGCTTGGTGGTTTCC
CTGGGGAAGGTGCAGGAGAGGATCTTCTGAGTTCCATGGAACTGGAGATAGATCTGCCAATCACAGGCTTCCTTCTCCACCACTCCTCAGCCGC
TCTATTCATGTTTCAGATTTTGGACTTAAACTCTCCCAGGTGCAAAGAACAAACAAAAGGCTAGCTTATTTTTCTTTTAGAGTGAGGCTTCGTA
TTTATTACAATATAATTGCCACATTCTTTGTGTAATTCTCACATTTATATCTTAAATATAATTCTCATGAATGAGAATTATATAATTCTCTTTT
TGTATATCATTGAATATTTTCACTTAATTTTTAATTTTTTTAATCGTCACAAAATAATTGTGTACATAGACACAAAATAATTGGGTACATAGTG
ATGTTGTGATATATACAATGTATAGTAATCGGATCAGGTAAATCAGCATATTCATCATCTCAAACATTTATCGTTTCTTTGTATTAGGAACATT
CGACATCTTCCTTCTAGCTATTTGAAACTATATATTATTGTTGACTACAGTCATCCTGCAATGGTGTAGAACACTAGAACTTATTCTTCCTACC
TAGCTGTAATTTTGTCTCCTTTAACAAATCTCTCCCTATCTTCCACTCCCCCGACCTTTCCAGCCTCTATTAGCCTCTGTCCTACTTTCTACTT
ATAATGATGACAGCAGCATTTGTTAGTTTCCACATGTGAGTGAGAACATGTGGCTTTTTAACTTTTAGAATGTGGTATTCAGGCACTTCATGGT
ACAGTTGGTAAAAGTGAAAATGTGTCCAAAAGTTTGTGATTATCTATATAAACAAAAATGGTATAAATACAAATATCAATTTTGCATTGAAGAA
CTTACCTTAGAGGTATATTCTCACAAGTGCACAGAGCATTTAAGCATTTCTTCACTGCAGCATTGTTATCAGTATTTTAAAACTATGGTACATC
CATGTACTTCCACATACAGCTCTTAAAAATAAGGAGGATATGAATGAACTAGTATGAAAAGAAGTCCAAATACATGTGAAAGTGAGAATAGCAT
GGTTCTGGATGGTATGCAAAGTATGATCTCGTTCTTTTAAAAGAAAATAAATTACATACACATACATATTTTCTATATGCTTGCCCATAACGTT
TAGGAAAATTCTTGGGTGATATTTATTAACCTGGACTTCCTCTTGGAAGACTGATGGTAGAAGGAAGGGGACGAGTTAGGGAAGAGGAGGAGAA
GGAAAACTTTGCTTTTCATCTTCTACCTTTTAGCATTATTTGAATTTATTTTCCTTAAGCGTTTACTTTGTTTCGTAAACAAAAAAGCACAAAA
ACAAAAAACGAGTTAAATGGGAAAAAAAGCAGTTTAGCTCTTTATAGCCTCTCATTTGGCTTCGCCAGCCTCTCACTGCAGCCTCAGAGAGCTG
GTCTGGGAAACACTGGTAGATGAGGACTGTAATCCTCACTCATGGAAGAGGATCTCATTCACTGGGTTTGCTGACTGTGACTAGAAGTGATTAG
GGTGTCAAAAAACCCAAGCATGTTAAAAATTTCCAGAGGCCAAAAAGATGCTTTCATTGTTCTGCTCTTCTTTTCCTTGTCGCTTTCACTTTGG
GTAGCTTCTAAATTGGTATTTTGCATGGTGCATTTAAAGAAAATGAGACCCCTTTGGCCAATGCAGGAGTCTACACTCTGATATTCTAGAGTCA
AAGCTGAATGCTGACACCTAGGAATTCATCTCTAGAATGTTTATATAAGGAATAGCCCCTCAGTATTCCGATCTCGTATCTTAGTAACGAAACT
AACAAAAGCCTGATTCTCCTCTGCTAGTTTTCTTGTCTTTACCATAATACAAAATAAGTAATTTCTTCTGCACCCTGACTGTTCAAAGGATAGG
GTAGCTGGGGGCGGGGACAAGAATGGAGACCTTATTACATAAGACTTCCTGAAAAAGGAAACTCTGTTTTTGTTTGAAATGATTTGGTCTGAAA
TTTAGTTTGTGTACACTTACCAAAGGGATTCCTATTTCTAAAACACTCATACTGCTTTTGATTCCTGTTAACCTTTGAGCACTCTACGTAATGA
TGAGAGCACTTAAAGAGTCATGTCACTTTTAGTAAAGAATCAAAGGATACTTTTTCTACTTCTTCGAGTTTGATCTCTGCTTCTCCAGTTAAAA
CCAGTATTTGTTTTTTTCATTTCTAAAGTTGGAAGAAATGACAGTTAGTTATGGCATAAGGATGTACATTTAACCAAATAGGAGTTGACATTCT
TGGTAAGAAATCTTACCAAGATTATGTTATAGATTATAAGAAATCTTAACAAGAATATGTTCCTAAATCATCCTCTTTTCCCATAAAATATTAA
AGTATCAGCAATTTCATAGGATTCAACCTAATGTATGCGAAATGCTAGATAAACAGATAAATACTTAATATCTGGCTTTTTTTCAAAGCACTGG
GTTATTTGTTCCTTGAGATTTATCCTAAATGTGGGCTATACCCTGGTTTACAGTGTCTCACAGATGTGTAGTAGTAGACACTCCATAAGTGTTT
ACTGACTTGAATCCACAGGGTACTGAGAAAATGCTACTGATAGACTTGGAGGAGAGCATATCTAAAGCAAGCTACCCTTTCCTTTAGGGCACGT
CTCACTAATTCTTTGGGTAAAGCGTATTTTTCTTCCTTTTGTGTTTTTGGCAGTCTTTCCAAAAATACGTGTTATACCTATGCATTATTTTTTG
GTTTGGTTTCTAAAGAAAGAGTCAGCCGGTGGGAAAGTGAAGGATGTGGGAACTGAGAGATCTGCATCAGCATCCCACCTCTACCTCCCACGAT
GGGACCTGAGACAGTTATTTTTCCCTCCTCGACCACTATACTATCATCTGTAACACGAGGGACTTGAGCCAGTTGATCTCTAAGGTTCCTCTGG
CACCTGTGACCCTAAATAGATATTGGATATTGGTTTAATGCTATTTGTAGTGTGTTTTTTTGGGGATATGGAAACCAGAAGTTTGTTTCCATAA
ACATAAACATAAACTGTATATATCTAAAGGATATGGAAACCTTTAGATATATATAATCTGCTTACGTAAAGAAGGTTTGTATATATTGCAGTGT
CAATGGGAATATTTTATCAAGTTAAGCATAGTAAATCACATTGATTAAATGCTTTGTATTTACCAAACATTACCCAAAGTGTTTTCTCCTTTCA
ACCTCACAAGGACCCACAGAAGAAAATACAGTTATCATTTCCAACCTGCAGGGAGCTGAGACACAGAGAATTTAAGCAACTGACCGGAAGTCCA
ACAGGGAGTCAGAGATTGCTCTGGGGTGTGATCCCCACTTGGACCCTACAGTGGAAGCTTCTCCACTACTTTATACAGTTGAGATTCTATATTT
TGAGCTTGTATTTACCCAGAGAATTATATCCTCTTGGGCAATTGTATATAATAAAACCTCATGCATTTAGGAGAGGCGGGATGACAGAACTTTG
TTGACTGAATTATAATCTACTTGAGAAATTATTTGCTTACATTTTATAAGCTAATTATACCATATCTCATCCAGTTTTCCCAGAACACTTCTCA
TAGGTAATGCTTTATTTGAAACATAGGCCATAGGTAAGTTAAGTGTAAATGTGTATTTTTATAATTTAACCAGAAGTTTATTTCATTTTTCTAA
ATAAGTGAAATTGTATTGCATCTTCTAAATTATTCTATTTAAACACTTGATGTCTTGCTGTCTCCGTCTCTGTGTGTTTGCATGTCATTGTACA
TCTTCTTAGGAAAAGTGTGGGAGCTTGACGCAATATATACCTTATGTTTCTATGTGCATATAGTTTACCAAATAATACCATAAGTTTACTTAGC
ATATTAGAATCCATGCACATTATTTTTATTTTATCTTCACCGCAACCCTGTGGGATAGACCAAAATCATGCTTTTCAGCCTCCTTTTTCCACTT
GAGGAAAGGAGTCTTAAAAAAGGGACCAGTCTCATGTTCCCATTCGTCTTACAACTAATTGGTCAAGCCAGAAAGCCAGAACTATGTCCTGGGT
CACTAACTCCTAGTCACTGTGTGTTAGTATTTGAGATGCCTGTTGGCTTGATTTAGTCATTTATTTTTTAGTGTTTTATAATCCTTCCATACTT
TTACATTTTAAATGGTTAACCAGGCAAATTGGTTTAAAATCAGTGCATAAAAATACTGTGCCTATCATGATGGGTTTCATGAAGTGATAACTTT
TCATCATGGAGATCCTCAGCTGTCACAGAAGATGAGGGGCCCTGGGTACAGAGGCTCACGTGAGGGATGAAAGTCTCAGCAGCCCGGACTTACA
CTTTGGGGCTTTTAGGCAAATCAGACAACCTCTTAAGAACTATCACTGAGTTCAGGCAAGGCCAGCTTGAATTAACACAGGGCCCTTGGTGGGC
ATGTGAATATATCTCACTTCACTACCATCCAGTTCTGACTCTTTACTAGATGCCCCTGTACATACCAAGACTGATTTTTTATTCTCCCTTCTCC
CCATGTCGTTTCTTCTGCATAGAGAGTTCCTATTGATCAGTCTCACCCATGGTATTTTAGAATTGCGATCCCTACTGTTTGATTATTCCTTTTT
CTCCCCCATGTTGAAAAAAATAAATGTCCCTGAGATGCAACATCAGGGACACTGGAGCACTGACATTTAGTTCAGTGCAGGAACTGAAGGCAGA
TGTAATTCTTAAGAAGNNNNNNNNNNNNNNNNNNNNTGTAGTGGATCTTGTTTTCTCATAGATACAGCAGTTAAATTTTTTAATAAAAGTAACT
AAGAGTTATTTGGATGTATTTTAGCATGCACTGAGCGGAAAGTACGACATTTCTTCATTGGGTAAGTCCTGATTCTTTATGATCCTCACTTGGT
TCCAGGGCCCCATGCATCTAAGGGTGTCTCAGAGCATCCTGCAGTGCTCCAGCATGATCGCAGGGAAAAGCTATAGGAGGAAAAGAGTCAATAA
AGTTTAGTTTCTCAACCTCCCACCTCCACCCCATAATAATGACAGCTGGTTAATCATGAGACGCGTGCACACCCCACACGCCCTGTACATGTTT
ACTCATTGGGATAGCATGTCAGGCCAGAAGGCTCCATGGTCATTTCTATGAAGGTACTTTAGCAGGTCTTCAAGAAGGCAAGTGGCCTGGGTCC
CTGCCTCCCCCAAATTGCAAGCTCCCTGCTTTATGTAGGAGACCTATGTGTATATTACAGTTCTGTGTAAGATTATTTTGTTATTCTTACCCCC
ACACCCACCCCCCAACCCCCCGCTGCCACCAAAAAAAAAAAAAAAAAATTCCTCTGACAACCTTCATAAAGTACCTGGGAGTTTGAACACCATT
GCTCTAGGAAGTCATCTTATACAAAAATAAGAGTTGTGAGGTGGTTCATATACCTTCCTGCGTTCTCCTATTTGGAGTTTTTCCCCATTTATGA
AAGAGGTGAAAACGCTAAGATATTTAGCAATTATTACTTTAAACATTTTCTATTTATAGGCCGGGCGCAGTGGCTCATGCCTGTAATCCCAGCG
CTTGGGAGGCCAAGGCAGGCAGATCACGAGGTCAGGAGATCGAGACCATCTTGGCTAACACGGTGAAACCCTGTCTCTACTAAAAAAATACAAA
AATTTAGTTCGGCATGGTGCGGGATACCTGTGGTCCCACCTACTCGGGAGCCTGAGACACGAGAATGGCTTGAACCTGGGAGGCCGAGCTTGCA
GTGAGCCAAGATCGCGCCACTGCACTCCAGCCTGGGTGACAGAGCAAGACTCTGTCTCGAAAAAAAAAAAAAAATTCTATTTACAGCATGAAAA
TAGTAGTGACTTAATGCACATTGCCAAGGCTTTAGCATAACATGAACACTTTCACTCAATGTCTCTCTGGCCTTTTGTTTTTCCTTGGGAAATT
CTTATAATCCTGCTCCGTCTTTAACTATTCATTTTGTATTGGCTATCCAAATATACCCAATAAGCTCTTTCTGAAAATATGCCAATTGTGGGTA
ATTACAGCTAAGCTGGAATATTAAATTGTGATGTCTGTTTTCCAGAGAATGAAGTAGTATTCCCCAGAGCATAGGCTTGGTGCCTGTGCAGGTT
CTATTTTAAATATTCCAGGAAGGGTTGTTTTATATACTGAGGATGATTTTACTGGTCTTGCCAGTCGTCTGAAATGCTGGTATTACTCTTGTGG
AAGGTTTATTCAAACAAACAAGGACATTTCACACAATACCTAGTCATGTTTTTCAGACATTTTAATGTTTGGTTCATCATTTGCACACACTCTC
AAAAATCTAGGTTTGTCTATGTGTTCATATCATTTTGCCTGTTGCCAGCTCAGTCAGCAGGCACACTCTCCCAGGCTGTTGCTGTTTTGTTAGA
CTTCTTCAGGACCTTCATCTAAAATGGTCTTCCACACGTAGCTATACTGCATAAGTTCACATCATCTGTTTCTTGCATGTGGGTTGTGTCTCAA
CTCAAGTTTAAGTTAGATTTGGAAGGGCGGAAACTATAGGAGTTGCAGCTTCAGTGGAGAAAAGAGCATTTCCTACTAGTTATGGCTTCCCAAG
GAAGGTTAGATTCCTCAGAGTAGGAGTGATTCCCCAATGCTAGAACCTTTGGTCAAATATAATTCTAATCCAGTCAAAATAAATACAGGTATTC
TGTAAAACCCGATTTCATTTTGTAAATCCTACTTTGTATAGTATAAGCAATTTTTGTATTTGTGTGGATTATATTTTATTTTCCTATTTCAAAG
AGAAGAATTTGTATTAGCAGACTCCCTTTGCATGCGGAGAGGGGATCATTTTCCCAGTAGGCATGGGGTTCCCTTCCATTCCTTGTCCAGTCTT
CTTTTCCCCACTAAGTTAAGTCAAACTAAGCAGCTGGTAAGATATTCCCTGGTTCTTGCAAAGAAAGTGAGCAGATGGCAGAATGTATAGCTCT
AAGCAGAATACCTGGTGTGGTATCCTCAAACACAAATTGACAGGAGGGTGTGGTGTGGCAAGCTCATTGTGGGGGTAAATTGGAATAAGCTTAC
AGGGGGAAGAGTTGACAAAAGATAGGAAGAACCTTAAAAATATAGATGCCTTTTATGCAGTGATAAAATGTCTAGATATTTATACTGTGGTGAT
TATTAGGAATATGTGCAAAGATTGGCTATTAGGATGTTCATTACAGTGTTGTTTAATAATTATAAAAGGACAGAAAGCAATGTGGACTCAAAAA
TAGGAAAAGAATTTAAATAAATCCTAGTGTACCCGTTATACATGAAATTATGGAAATATGACCCTGAGCATGGAAATATGTACATGAGAATGTC
TAAAAGCTAGTTCATTTTGAAAAACAAAATAATGTCACCTCATATTATTTATAGTATATAAAGATGATTTTAAGAGTGGCAGTGTCTGGGATTA
TAGGTGATTGTATTTCTTCCCTTTTGCACATCTATGTTCTCTCATTTGTATTGTGTGGGGAGAAGTGACTTTTTTTATAAAAAGAAAAAGGTAT
ATGCATCCCAGCAGAGAAGCACTGGCTCCACCCAGTACCTGCCTCCTCATGCCACCCTCTCAAGCCAAAAGCCGGGGGAAGCCCAGGCACCTTG
ACCATGACCGCCCGAGACTCACACTTCTTCTTTCTCATCAGGGAAGGAAAGCCCCCCTGTAAGCGATACTCCAGATGAGGGCGATGAGCCCATG
CCGATCCCCGAGGACCTCTCCACCACCTCGGGAGGACAGCAAAGCTCCAAGAGTGACAGAGTCGTGGGTAAGTGGGTCACCAGCGGCCTCTGTG
CCTGTGAAACCTTTATCTCTTTGTATTTTTCCAAGACAGTCATGAAGGGATGCAAGTCATTTTATCCATTGTGTTCCCTCAACTGGCATATTAA
AGAAATATGGCACAAAGATCAGCAGGATGGGGGTCCTCTGGTGTGTGGGAGGATGGACACTCACAGGCCAGCATGGCCGTGAGAGCCACACACC
CCGCAAAATGTCCAAGTTGAGGAGCAATCCTGCCCAGGGACGCGTCTCTGTCACTGTCCTCTGTCCTCACTGCACTTGCAGGAATATCAAATGT
TATGGATTGTAGATCGTGAAAATTACACACTTACGTGTTTTGGCAACAGTGCTTTTCAGTGTTTGGGGTTAGAACAAGCCACATCTGGCCATTT
TATGTTATCCCTCTAATCTCTAGTTCTTAAATTTCAGATTTAACTGAAAATAGAAAGTTTCATAAATGGTAATTTTTAAATGTTAGAAAAAAAT
CAAAGCACACATTTACATACCTTTTCCATAAAAAAGTGTGTGTGAAACCATCTGCAACTCCACTGGTTAACTTACACATGCGACAGTTTGTGTT
TGGAAAACTTCACCCACCCTCTTTATTTCAAGAAACCAAAGACGGAGAGAAGTTCAGTGAATTAACCAAGGTGAAATGACAGAGTCAGAATTGA
ACTGAATTTCTGACTGAAAAACTAGTTCTCGCTCCATTATACCATGTTCTAATGAGCTAATGAGTCAACAGTTCCCTGGAATACCTGTTTTCTT
CTTTAAAAAGAGAAAGAGCTGTGATACTGAGAGCTACCTATTGGCATAAAAGAATATGAAGGACATACAGGTAAAATGAGGTAGACTGGATCAA
TGTGGGTCAGCTACATAAGCCCCCATAGCCAAGGAGGGAACATGTATGTAAAATTCTCAGGCTTATGAGAATCACAACTGTATGTCTATAGGAC
ATCCTAATGCAATAATGGGAAAATGTGATAACTGAATTTTATCTACATGTATAGAAAACATATTTTGGGCCGGGCATGGTGGCTCAAGCTTGTA
ATCCCAGCACTTTGGGAGGCCGAGGCTGGCGGATCACAAGGTCAGGAAATCGAGACCATCCTGGCTAACACGGTGAAACCCTGTCTCTACTAAA
AATACAAAAAATTAGCCGGGCGTAGTGGTGGGCGCCTGTAGTCCCAGCTACTCGGGAGGCTGAGGCAGGAGAATGGCGTGAACCCGGCAGGCGG
AGCTTGCAGTGAGCCGAGATTGCGCCACTGCACTCCAGCCTGGATGACAGAGCCAGACTCCATCTCAAAAAAAAAAAAAAAAAGAAAAAGTAAA
GAAAACATATTTTGTATGTTTTTTATGTGTCTTAGAAACCAAGTGGACTAGGTATAATGGTTCTTTTTTTTTTTAACTCAGCAGCACAGTTAAT
GGCACAAACAGATAAAGATGGTGGCTAAAGCCATTTGGTGTAGATGAATCCAGAAAACAAGTACATTTATGAATTATTTTACCCTATTGGAAAA
TGGCTACTATATGTGGAAAGTAGAGGGGAAGAGAAATGAACTTGTGAATTATCTACTCTATTCTACCAAAGAAAGATACATATATCATTTCAGG
GTTTTCCAAAGTTGGGATGCAAAGGATCATGTTTCATTTTAATTTATGTATTTATTTTTGAGATTGTCTTCTATGTATTGCAAGTGATACTGGT
TTTACCATGCACTGTACCACTACGAGGGTTCCTTTCAAAACACATTNNNNNNNNNNNNNNNNNNNNNNNNNNNNNNNNNNNNNNNNNNNNNNNN
NNNNNNNNNNNNNNNNNNNNNNNNNNNNNNNNNNNNNNNNNNNNNNNNNNNNNNTTAGTCCCTGAAGCACCCAGCGCCAAGGGTACTGTTCTTC
CTGCTTAACACAGGAGCAAACAGATGCTCACACCCTGCCCAAGAACACAGAGGCTCAGGGACTGAACCAGAAGAAATGATCCATTAACCATGTA
AATGAACAGAGAGCCTGGATGTCAGAGTGAGGAGGCCAGCTCGGGTCGCTGTGGAGAAAGAGATGGGCTCTCCCTGGAATCCCTGCAGCTGCCC
TTAGAGGCTGTGAGCCATCGTGGCTAGGGCATCTTTAGAGAACTGAAAGTCAGGCCGATTCCTGGAGAGTGAAGAATAGCACACGTGCCTTCAA
AACAGTGTCAGTATCCTGTCCCTTACGGACGTCATATTGTTGGTGGGTTTTCCTGGGTGGGAGATCACCCAGTATCTGGTTGGCATTACTGATG
GGTTCCCAGAGCTGTCTTTTGGTTCAAAGTCCTGCCCTCGGTCCCAGCTGCCCCCAGCACAGGTGTCACCTTGGAGTCAGGGGCGGGTTTGTCA
TAGCCCATGGGTCCTGGCCCTGCCCTTTATCATGTTTGACATGATTTTCAGTCTACTTTTCCTTCAGGATGTAATTTAGAAAATATGATTTCAG
AATTGTGAAATTTAAAAACCCTAGAAAACCTCTTTGCTTTGCTTGTAAATAGCAGTTGATGCAGCCCTGTGGACAGGCGGGAACAGCCATGTGA
CGTGGGCACTGAGATGATTTGGGAGATTGAATGCTCCTCAGTGGGGCTAGAGGCCACAGGAGTGATAGGTTACTGTAAAGAAAGCAAAAAAGAT
GCAAAAGCCTACATGACAAACCAGGCACGACACAAAGGAGAGGCTTGAGAAGAGGAAGTGAAGGAGGGAGAGGATTCCACAAGACCGAAGTGCC
CAAGGAGACATGGAGGGAAGAGAGGGCTCTTCACAGAGCTGAGTTTAGAGACCACCCTCCATGGTTCTGGAAGGAAACCAGCCAGCTTTCATAT
CTGGTGACAGGCTGTTCATTAATTTGTAGTGTACAGCATTAAATAAATGAAGTATGTAGAGAACATTAGGAAACAATATAAAAAGGTAGGGGAA
TTCGTGGATAAAGGGAATAACCTGGGTACCATATTTCATCACATTATTCCATGGGAATAAGTCATCAGTGCAAAGGACTGTAAGGAGTGCACAG
CAGGAAATGAAAAGACAGAAGCAGTGGGGCCGAGAGGAGGAAATGGAGTTGCTGAAATGCAGGGTGAGCAGCAGGGGCGGAGAGTGCCCTGTGG
GTAAGGCACACCTCAGAAGGGACAGGTCCAGGCCCTCTCCTCCCTGGCCTGGAGCTTCTGGCAAGGCTTTTCTTCTCTGAGCCTCACTTTCCTC
TTTTGAAGGTGGCAATAGTAACTGAACCTGCATCACAGAATGGCCTTGAGGGTTAGATGGAACATATATAGACATAATTTGTTGAAGACAGAGT
AGCAAAGACACAAAGTAAAAAGGACAGAAAAAAGAAATGCAACTTGTGCAAAATAGAACTTTCAAAGATTTACAAGAAGGGTAAATGAAGCTAT
CGTAGCTTCACTTGGGAAAAGGGAGAGAACAGATGACCAGCACCAAGGATAGAAGAGGGATTTCTTACTTTAAAAAAAATGGTCCCAAAGAATA
AACAAACTGAAAACAGCCAAAAGAGAAAGGAAGAATTTGTTAGAATAGGGCAAGACTAAAGGACAGAGTAAGGGTGCTGGCCGCCACCTGACTC
AAGTTCAAGTCGAGCTGCCACTGTTGAAATTTCAAGGAGAAATGGTGAGAAGCTAAAAGATGCAAAAAAAAAAAAAAAGTGGGAAATTATTTGC
TAATAATAGATTGCAAGAGTGTCTGCTTTAGAAAGTGACAAGGAACACTTTTGGAAAGCTGTGAGCTGTTATGACCACTGGCATCCTTCAGTTT
TAGACAAATCTAATCTCAACAAGGATAACAGACCATATTAATAAACAAATTGATGGGAATGGTGGAAATCAGTTCCCTATGAGGAGGGTGCAAA
GTTATACTGATTGGTGAGTCACTCCCAGAATAAACAAATAATGGTTTCACACCTCATTGCTTCATTCAGTGTGGAAGGAACATTCTAGGTTTGT
GTGTAAGTTTGGGGAGAAGGAGACAGAGCCAGAGGGCAGAGCAGCCCTGCAGCCCTCAGTTGGCCTCCATTTTCTTCCCGGTCTGAAGAAAATG
AAACAAAGGATTTAAAGTGTTGCTTGAAGAATTTAAGTTAGACTTAAAGGAGAGATGTGGTCTTTACTCTCCTTTTGGCAAGGAGAGTTTAGTC
ATCAGAATGGTCTATTTAGTGAGACTGTAGCTTGTTCTTCTGAAGTGGTCTTTTTAAAAACTAGAGAACTCTCACCTCTCTGAAGTGGTTGTGT
ATGAAACTGTTTAAAGCCGAGGATGCACTCAGTGACCTCTTCAGGCAACCCCAGATTTACTCAGTCAGCCATGGCACACATGCTAGAGAAGTAA
AAAAATGAATTGAGACTTGTTCTGAAAACTCTTGAGCAGGGGCTCTTAAAAGTTTTTTGTTTAGGAATTATGTCAGGGTTGGGGTCTGGAGAGC
AGATAAGTGTTTTGTGTGAGAAAAGTAAAAACTTAGTTATTTTCTTCCCGTATTCAGTAATCCTTGCATTTTTTTCCTCCTCCTTTATACATAC
ATTTTTGCCAGTTACTCACTTCTCTCTTGTACACATTTCCGTGTCCTAAATTAACCAAGAGTCCTCAGCCACTAGGATTCTATTGACAAGCCCA
CAGGTCTGGAGGTGTGAGTAAGGGCATTCCTCCCCCATGAAATCAGGCAGCAGGGGAGGCGTTTGGGTGGGTGGAACAGAGGAGCAAAAGACCA
CAGGACAGAGAAGAAAGATTGCAGGCTAGAAAACGGGATGGCCACCCCTGAGAAAGAGGACAAGCAAATTTAGGGCTTAGAGTAGAATTGAAGA
AAAAACCCAGGGCACAGGCACAGGAATCCTGTAGGACTGAACTGGCACCATGATTGATGTAAGTGGAGATGGGTTGGTTGAATCCGTGGAAGGC
CAAAGGATTGAGGCCCATATGGGCCTGGGACAGGGCTTACTAAATGACTTGCTACCTCGCTTGATAATCGGGACAACCTCAGGCAGTAGTTATT
CAGGCGGGAGGACACATGAGTTTGAATATAGGGAGATAAGGTATATTTCTATATGCCCTGGTACATTCCAGAATGTGCTTCTCTGGCTCTGTGC
ACTGGAGCAGCCAACTCCTGAAGTTGGGAGGGGATCGCCATGGTTTCATGAGTGGTTTATTTCAGCTTGCATCTCACAGTGTGGTGTTCAGAGG
CATAGGCTCTAGGCTCCCCTGGCAGCACTGAGAGATAGAAACTGAATCAGCACAACTTAGGTCCTTCATGTTGAATAGTTTGAACAGAATTTGA
TTTACCCTAGCCTAATTGAAAAAAAAAAAAGTAGAAAAGAAATCCTAGGTATTTTCCCTCTGGACTCCAGAACAAATGATTGAGTGTGTAAAAG
CATAAATTCTTTTTATTCATTCAATTCAAGTAAAAATTTCTTTACTCAGCCATGAGTTCTAAGACTGCAGTGGGAATTGTAAGAGGATTACCAT
ATTTTAAATTGGCTATTCTGCTGCCAAATCTCCCCTTCATTTTACAGTTTCAGGCAGAAGACCACCACGGTAGTCGGGGGAGGGGGGTGGGTAG
ACAAATCGTGGTAACAGTCCTCTACACTCTGGGAGGGAAGGAGCCGTGCTGGGGACAGCTTTCACCATGGAAAGAAAGCAGCCGCTCTGCACAT
TGGCCAGCAGGCTTTTGAGCACGGATGCGGAGCCTGCTTATCTAATCAGCAGCTAGAGGAAGTTGTTTTTATCTCCGAAATGCATCTCTTCTCA
ACCGATAAACCCCATTTTAGCTGGGGAGAAATATTATCTAGCAGCATCTGAGCATTAGCTGCAGCTGAACTCAAGCATGTTCAAATGTGAGACA
AGTCTCAAGCCGAGAACTGTTTGCCGAACTTCAAGTGGCTGGAGTACTGGTTTTCAAGTTTTCTTTTCTTTCTTCTTTGAGGAATAACTGAAAG
CATATTATTTGGATTCTTGTTCACCTTGCTTTTTTAGTTCCTTTCCCNNNNNNNNNNNNNNNNNNNNNNNNNNNNNNNNNNNNNNNNNNNNNNN
NNNNNNNNNNNNNNNNNNNNNNNNNNNNNNNNNNNNNNNNNNNNNNNNNNNNNNNNNNNNNNNNNNNNNNNNNNNNNNNNNNNNNNNNNNNNNN
NNNNNNNNNNNNNNNNNNNNNNNNNNNNNNNNNNNNNNNNNNNNNNNNNNNNNNNNNNNNNNNNNNNNNNNNNNNNNNNNNNNNNNNNNNNNNN
NNNNNNNNNNNNNNNNNNNNNNNNNNNNNNNNNNNNNNNNNNNNNNNNNNNNNNNNNNNNNNNNNNNNNNNNNNNNNNNNNNNNNNNNNNNNNN
NNNNNNNNNNNNNNNNNNNNNNNNNNNNNNNNNNNNNNNNNNNNNNNNNNNNNNNNNNNNNNNNNNNNNNNNNNNNNNNNNNNNNNNNNNNNNN
NNNNNNNNNNNNNNNNNNNNNNNNNNNNNNNNNNNNNNNNNNNNNNNNNNNNNNNNNNNNNNNNNNNNNNNNNNNNNNNNNNNNNNNNNNNNNN
NNNNNNNNNNNNNNNNNNNNNNNNNNNNNNNNNNNNNNNNNNNNNNNNNNNNNNNNNNNNNNNNNNNNNNNNNNNNNNNNNNNNNNNNNNNNNN
NNNNNNNNNNNNNNNNNNNNNNNNNNNNNNNNNNNNNNNNNNNNNNNNNNNNNNNNNNNNNNNNNNNNNNNNNNNNNNNNNNNNNNNNNNNNNN
NNNNNNNNNNNNNNNNNNNNNNNNNNNNNNNNNNNNNNNNNNNNNNNNNNNNNNNNNNNNNNNNNNNNNNNNNNNNNNNNNNNNNNNNNNNNNN
NNNNNNNNNNNNNNNNNNNNNNNNNNNNNNNNNNNNNNNNNNNNNNNNNNNNNNNNNNNNNNNNNNNNNNNNNNNNNNNNNNNNNNNNNNNNNN
NNNNNNNNNNNNNNNNNNNNNNNNNNNNNNNNNNNNNNNNNNNNNNNNNNNNNNNNNNNNNNNNNNNNNNNNNNNNNNNNNNNNNNNNNNNNNN
NNNNNNNNNNNNNNNNNNNNNNNNNNNNNNNNNNNNNNNNNNNNNNNNNNNNNNNNNNNNNNNNNNNNNNNNNNNNNNNNNNNNNNNNNNNNNN
NNNNNNNNNNNNNNNNNNNNNNNNNNNNNNNNNNNNNNNNNNNNNNNNNNNNNNNNNNNNNNNNNNNNNNNNNNNNNNNNNNNNNNNNNNNNNN
NNNNNNNNNNNNNNNNNNNNNNNNNNNNNNNNNNNNNNNNNNNNNNNNNNNNNNNNNNNNNNNNNNNNNNNNNNNNNNNNNNNNNNNNNNNNNN
NNNNNNNNNNNNNNNNNNNNNNNNNNNNNNNNNNNNNNNNNNNNNNNNNNNNNNNNNNNNNNNNNNNNNNNNNNNNNNNNNNNNNNNNNNNNNN
NNNNNNNNNNNNNNNNNNNNNNNNNNNNNNNNNNNNNNNNNNNNNNNNNNNNNNNNNNNNNNNNNNNNNNNNNNNNNNNNNNNNNNNNNNNNNN
NNNNNNNNNNNNNNNNNNNNNNNNNNNNNNNNNNNNNNNNNNNNNNNNNNNNNNNNNNNNNNNNNNNNNNNNNNNNNNNNNNNNNNNNNNNNNN
NNNNNNNNNNNNNNNNNNNNNNNNNNNNNNNNNNNNNNNNNNNNNNNNNNNNNNNNNNNNNNNNNNNNNNNNNNNNNNNNNNNNNNNNNNNNNN
NNNNNNNNNNNNNNNNNNNNNNNNNNNNNNNNNNNNNNNNNNNNNNNNNNNNNNNNNNNNNNNNNNNNNNNNNNNNNNNNNNNNNNNNNNNNNN
NNNNNNNNNNNNNNNNNNNNNNNNNNNNNNNNNNNNNNNNNNNNNNNNNNNNNNNNNNNNNNNNNNNNNNNNNNNNNNNNNNNNNNNNNNNNNN
NNNNNNNNNNNNNNNNNNNNNNNNNNNNNNNNNNNNNNNNNNNNNNNNNNNNNNNNNNNNNNNTTAAAAGTGCTGTCAGAGTAGATAGATAACA
TTTTCTGTTGCCGGGTTTTTGGTCCCAGTTTTATTTTCTGCCTTGTTCCATCTGTGTTGAAAGAATAGTTAGCTCTGTGTATAAAACAACCAAC
TGACATTTCGTTAACTTTCCTTCTACATGGGGTTTCAGAAACAAATCGGGAAAAAAAGGCTGGGGGGTTGAGCTGTGGTTGCCAGTTGCCACCT
GTCCCCCTATCTGGTTAGGGCATTTTCTCATTTGGGAAGTGTAAATATAACCCAGAAAAAACAGCTTCCCCTCCTTTTATCGAAAAGTAGAAAG
CCTTAAACAGAGTACAGCCTTAACATTGCCCCGGAAAGTTTCCACAGAACCCGTTAGACTAAATGAAACCTCTTGCTCTGGGGGAGTGGGCCAT
GCCAGGAACCTGCCCTACCAAGCCCTCTCTTGCTGGCAAGGCAGGGCTGGGCCTGGGCTACTGTCTCCCACCAGATAAGCCCAGCTTTCTTCAA
GGCCCTAACAGGAACCTACATTTCACAAATTACCGCAGACATGCTCACAATTTTAAACTCTTTGCCTGTTAGGATCAGTGAGATAACAGAAACT
TATAGCGAACTCAGAAAGCATGCTCCGGTGAGCAGTGAGCCACCTAGAATCAGCCAACTGGTAATATGCGGAAAATCTGCCAGGTTGTTGGTAA
ACTTTTGGTAGCTTGAAGTCTACCGTGGTTGGGAGTATTTACACCACAGAAATCGGTGAACGCTGCAAATCAAGGCTTTTTCTTTTTGAGAGCT
GGTTTATCTGTCCACCACTAGCTTAAATACACTTTTAATGTCCTGACAGCTGAAATTTGACAGTGAAATTTGAAAGGAGGAATTCTTTTGGGTA
GGGTTGTGTGTGTGTGTGTGTGTGTGTGTGTGTGTGTGTGTGTGTGTGTGTTGTGGAGGAGGAGCTGCGAAAGGGTGAATCTATTGGGGAGGAC
TGTGGGGTACATATAATTTGTCCAACAGAAGAGTTGGTTCCAAATGACTCTTTGCTGTTGAAGTCACAAACTGGAAATGTTGGAGCAACTAGAC
TCTCCATATTCTAAACAAAACACATCTTTAGCATTTAGTTTGGTTGCTGGGGGAGTATGATTAGAAAAGGATTTGGCCAGGCATGGTGGCTTAC
GCCGTAATCCCAGCACTTTGGGAGGCCGAGGCAGGCAGATCATGAGGTCAGGAGTTTGAGACCAGCCTGGCCAATATGGTGAAACCCCATCTCT
ACTAAAATATGAAAAAAAAAATTAGCTGGGTGTGGTGGCGTGTGCCTGTAGTCCCAGCTACTGGGAAGGCTGAGGCAGAAGAATCGCTTGAATT
CGGGAGGCGGGCGTTGCAGTCAGCCAACATTGTGGCACTGTACTCCAGCCTCGGTGATAACTCCTTCTCAAAAAAAAAAAAAGAAAGAAAGAAA
GAAAAGGATTCTGTGTCTTATTTATGAGCTATTATGCTATTGCTGTTATTTGGGGCTGAATGATTTTTATTTGGGGCTGAATTATTTTTAAATG
TAAAGCAAGATGTCTAAATTACATTAATATGTTACTAAATTACTATGATTTTTCCAGAAAAATATTAGCCCATGCAATATTCTTTAATTCCTGT
GATTAAGTTGCTCTTCTGCAAAGAAATTTCTGTTGACTTCCTTAGATTAAATGCAGCCCTGAGATAGGTGTGCACCTCCAGCAAGTGGCCTGTG
CAGTTCTCCCTGTGCCTCCAGGGGTGGCTTCTTGAGGATACTTTCGCAGTAAGGGCTTAGCAATATCCGCATGTCTAAGGAGTCTATCAGAAAA
CTACCTCCACTGTGGAAGGGCTGGGGATTCTATTTTTGTGCTTTGAACCACCTGACACTTGCTGTAACTCCATTAACTGAAGAGCCGTTTGGTG
CCCTAATTTCAGGAGTGAGTTCAGCTGCAGGGATCTCAGAGAGACAGGTCTAGGGTGTGTCTCCGCAAGGCCTCCTGCCAGGAGAGTACTTCCC
CCACAGGGGATGTGGCTGCAGGCTGTCGATTTCCACTGAAATCACCAGGAGATGATTCTGGTGAAGCCCTGAACATCCGGTGTCACTCCTCACC
AGGCTGGGTGTGATCCATGGAAGGCCTTCAGCATGCCCCCCTGCTGCATGGCAGAGCCCAGTGGCACATGTGGCTGTTCTCTTTTTCAGAGTGA
AGGACTGTTACCCTAGAAGTGAAATCCTGCTGAAATGAGAAAAGTGCTGTTATTATATTTCTACAGGCAGCTATATGATCATTTTTATTATGAT
TCTTGGAACCTGGCAGAATTTTGACTGCTTTTGCAATATCTCTGTGCTCTCCAGTTGAACTTGGTGGCAATAAAATTAAGAATCTGCCAGTGCC
CCCCAAGCATTTCTACTCTGTCCATAATGTTTAGTGACAATTAACTATTACCAGGTGTAGCCACCCTTACTTAATCTTAGTGTTATGGTGCAAG
TAATCCTTAGTGAAATTATTGTTCTGTAGAGAATGCTGTGATCTAAGTGAAGTGACTTTCATCCTGAGATGACAATGGAGTTGTTTTTGTCACT
GTAAAGGCTGCATTTACTCGCAGTTTTAAAGCATTATTGCTACTTATATATGGTCTCAACACTGATTTTTATATTTGACTTTGTAGCTTTAAGT
GTAAAAATTTCTGTTAAGGTTTTATATGTGTTAGTTAATTTTTCCCATTTCAATAACCATGTTTTATTATTGATGGAGTCTCCTAAAAATATAC
CCTTAAAATCTGCTTGCCCTGTGCCTGCACACATATTTTAAATGTTGGGTATGGAGTCTTTTTTTTTTTTTTTTTTAGACAGAGTTTCACTCTG
CAGCCCACCCTGGAGTGCAGTGGTGTGATCTTGGCTCACTGCAGCCTCCACCTCTTGGGTTCAAGTGATTCTCCTGTCCCAGCCTCCCAAGCAG
CTGGGATTACACGCCCGCCACCATGCCCAGCTGATTTTTTGCATTTTTAATAGAGATGGGGTTTCACCACGTTGACCAGGCTGGTCTCGAACTC
CTGACTTCAGGTAATCCACCTGCCTCAGCCTCCCAAAGTGCTGGGATTACAGATGTGAGGCACCGTATCCAGGCTGTATGGAGTCTTTCTAATC
AGGACATAGGCAGACAGTCCTAGCCCACCTTTATGCCTTATGAGACGCAACAACGTTGAACAGTCATTGTTTGAGGGACAGAGGTTTTACAGAT
GGATGATAACTAGCATCTGTGGAACATTATTTGTGAAATATAGAAATCAGAAATTCCAGCGTAGCACTGTCCAAGGGGAACATAATTTGACCTG
CATATTTGCTGGTCCATTTTTAGTAGTCACATTAAAAAAGAAAAATGACACAGGTGAAATTAATTTGAATATATTTTCTTAATTCAGTATGCTT
AAATATTATTTAAGTATGTACTCAATATAAGCAATTGTTAATGAAATATTTTACTCTTTTTGAACTATGTGTTTGAAACCCCGGATGTATTTTT
TTTTTATCTTCACCACACATTTCAATTTGGCTTGGTCACATTTCAAGTGCTCAGGACTCACATGCAGCTAGGGGTTACCTATTGGACAGGCAGG
CAGATCTTGAGAGCTCCAAAGAACTGTGTGTCATTATATTGTGGAAAAAAAAAAAACTTTTTAGATTAACCCTTGTTGAATGTTAGCCAAAGAC
TAGTCATTTATCAACTCTCTAAAAGTAGTTTTTAAATCAATTTGCTTTTCAAAACATTTTCTCAGTGTTGTCACAAATGTATGTGAACATCTGC
TTTTTAAGTCTTTCATTTTTTGCCCACATTTGATGTAAAGAAAATCTAGGTCCAGTCCAATTTTAACATCAATTGGGTTTATTTTATGTAGCTG
TGTTTTAAGTACAGGTCTTGTACTTGTAGGCATTTTGGTTAAGTACAAAGTAACGAGAATACAACAACATGTGAACATGTCAAACAAATCAGTT
TTTCAAAGCTAAGTAGCTGAATTAAATGTAGAAAAACATGACATTTAATTTTTGTCTTCATCCCTTCATTGTATTCCCATGTACTCTATGGTAA
CTTTTTTAAGTTGGGAAGTCCTCTTTAAATTTTTGAAATGAGGTAGCTGCTTTATAGACATGAGGCAGGTTCCCAGAGAGCGCCCTTGAGGACA
GGCTGTAAGTAAACTAAGCTGCAAAGACAGACACCATCACAACTATGGAATTGTTTTGCAAAAATTGTGGAGAGTGATGCCCCTTGATACTTCC
TAAAAGATGCTTTTGCAACCTGATAAAGCAACCGAGGAGAGGTGGTGAAGGAAAGGCTTTTTTTTTTTTTTTTCAAAGAGAGAAAGAGAAGCAG
CAAGCTGCCTGCCTCCAGCCTGAGAAAGCAGTTCCACCTTCGCACCCATGTCCTCATAGCCCAAGCGGGGCCACCCTGGCATGTGAATCTGCTC
CGCAGTGTGCAGCCCAAACCCCAGCCTTCCTGTGAAAGGGACACCTCCTGCTGCTAACCGCTGCTCTTCCTGCAGTTCAGGAGACAGCGTGTGC
TCCTGTGGCGGCTGCATTTCCTGAGTACACCATGATCCAAAAAGGCACAGATTCGTCATGGAAGCTTTGATTGGGCCGTTACTGTCTTTTGACC
TTTCTTGTTTGCTTGCCCTTTTGTTTCTTTCCTCCTTTTTCCTTCCTTCCTGTCTTTCTTCTTCCTTCCTTCCTTTCTTCCTTTTTCTTTTTAA
TTTTCCTCCTTTCTCTTTCTCCTTTCTTTCCTTCCTTCTTTCCTCTTTTTTTCTTTCCTCCCTCCCTCCCTTTCTTTCTTNNNNNNNNNNNNNN
NNNNNNNNNNNNNNNNNNNNNNNNNNNNNNNNNNNNNNNNNNNNNNNNNNNNNNNNNNNNNNNNNNNNNNNNNNNNNNNNNNNNNNNNNNNNNN
NNNNNNNNNNNNNNNNNNNNNNNNNNNNNNNNNNNNNNNNNNNNNNNNNNNNNNNNNNNNNNNNNNNNNNNNNNNNNNNNNNNNNNNNNNNNNN
NNNNNNNNNNNNNNNNNNNNNNNNNNNNNNNNNNNNNNNNNNNNNNNNNNNNNNNNNNNNNNNNNNNNNNNNNNNNNNNNNNNNNNNNNNNNNN
NNNNNNNNNNNNNNNNNNNNNNNNNNNNNNNNNNNNNNNNNNNNNNNNNNNNNNNNNNNNNNNNNNNNNNNNNNNNNNNNNNNNNNNNNNNNNN
NNNNNNNNNNNNNNNNNNNNNNNNNNNNNNNNNNNNNNNNNNNNNNNNNNNNNNNNNNNNNNNNNNNNNNNNNNNNNNNNNNNNNNNNNNNNNN
NNNNNNNNNNNNNNNNNNNNNNNNNNNNNNNNNNNNNNNNNNNNNNNNNNNNNNNNNNNNNNNNNNNNNNNNNNNNNNNNNNNNNNNNNNNNNN
NNNNNNNNNNNNNNNNNNNNNNNNNNNNNNNNNNNNNNNNNNNNNNNNNNNNNNNNNNNNNNNNNNNNNNNNNNNNNNNNNNNNNNNNNNNNNN
NNNNNNNNNNNNNNNNNNNNNNNNNNNNNNNNNNNNNNNNNNNNNNNNNNNNNNNNNNNNNNNNNNNNNNNNNNNNNNNNNNNNNNNNNNNNNN
NNNNNNNNNNNNNNNNNNNNNNNNNNNNNNNNNNNNNNNNNNNNNNNNNNNNNNNNNNNNNNNNNNNNNNNNNNNNNNNNNNNNNNNNNNNNNN
NNNNNNNNNNNNNNNNNNNNNNNNNNNNNNNNNNNNNNNNNNNNNNNNNNNNNNNNNNNNNNNNNNNNNNNNNNNNNNNNNNNNNNNNNNNNNN
NNNNNNNNNNNNNNNNNNNNNNNNNNNNNNNNNNNNNNNNNNNNNNNNNNNNNNNNNNNNNNNNNNNNNNNNNNNNNNNNNNNNNNNNNNNNNN
NNNNNNNNNNNNNNNNNNNNNNNNNNNNNNNNNNNNNNNNNNNNNNNNNNNNNNNNNNNNNNNNNNNNNNNNNNNNNNNNNNNNNNNNNNNNNN
NNNNNNNNNNNNNNNNNNNNNNNNNNNNNNNNNNNNNNNNNNNNNNNNNNNNNNNNNNNNNNNNNNNNNNNNNNNNNNNNNNNNNNNNNNNNNN
NNNNNNNNNNNNNNNNNNNNNNNNNNNNNNNNNNNNNNNNNNNNNNNNNNNNNNNNNNNNNNNNNNNNNNNNNNNNNNNNNNNNNNNNNNNNNN
NNNNNNNNNNNNNNNNNNNNNNNNNNNNNNNNNNNNNNNNNNNNNNNNNNNNNNNNNNNNNNNNNNNNNNNNNNNNNNNNNNNNNNNNNNNNNN
NNNNNNNNNNNNNNNNNNNNNNNNNNNNNNNNNNNNNNNNNNNNNNNNNNNNNNNNNNNNNNNNNNNNNNNNNNNNNNNNNNNNNNNNNNNNNN
NNNNNNNNNNNNNNNNNNNNNNNNNNNNNNNNNNNNNNNNNNNNNNNNNNNNNNNNNNNNNNNNNNNNNNNNNNNNNNNNNNNNNNNNNNNNNN
NNNNNNNNNNNNNNNNNNNNNNNNNNNNNNNNNNNNNNNNNNNNNNNNNNNNNNNNNNNNNNNNNNNNNNNNNNNNNNNNNNNNNNNNNNNNNN
NNNNNNNNNNNNNNNNNNNNNNNNNNNNNNNNNNNNNNNNNNNNNNNNNNNNNNNNNNNNNNNNNNNNNNNNNNNNNNNNNNNNNNNNNNNNNN
NNNNNNNNNNNNNNNNNNNNNNNNNNNNNNNNNNNNNNNNNNNNNNNNNNNNNNNNNNNNNNNNNNNNNNNNNNNNNNNNNNNNNNNNNNNNNN
NNNNNNNNNNNNNNNNNNNNNNNNNNNNNNNNNNNNNNNNNNNNNNNNNNNNNNNNNNNNNNNNNNNNNNNNNNNNNNNNNNNNNNNNNNNNNN
NNNNNNNNNNNNNNNNNNNNNNNNNNNNNNNNNNNNNNNNNNNNNNNNNTGGTGTCAGCACTCCAGGAACACATGGGATCCCCGGGAGGTGGAA
ATTGAGCCGTCTTTGGAGAATCAGCTAATGAGACAGATGCATGTTAAATGTCTGTTGTGGCCCAGGCACTCTGCTAGGCAGAGGGGTGAACCAG
AAGAATGAGATTCATGGGGCCAAAGAATTTGCCTTCTGGTGTAAGAAAAGATGGAGGCAGCTTGGCAGAAACAAAAAAAAGGTAAAAGATAGAA
ATGAAATACAGAATAATCTATCTCCTCATCCCACAAGCAATTCTGCCTGGTTTGTGGCTCACGCCTGTAATCCCAGCACTTTGGGAGGCCGAGG
CAGGAGGATCACTTGAGGTCAGGAGTTCGAGACTAGCCTGCACCACAAGGTGAAACCTCATCTCTACTAAAAATGCAAAAAAATTTAGGGCCGG
GTGCAGTGGCAGTTCTGCCTGGTTTGAACATCTGGTTCAGTTAAAATACTTCATGAAAATATTTAGCTTCATGCACTGAAATCCATCACTGCTT
TTGTGGGATGCACTGACTGCAGTCTGACTGTTCTCCTAGTCGAAAGCGGAGCAATAGCTTCTGTCTGCATGTGCATGAAACAGATGGAAATTTA
GAAGAGATTCTAGTGCAGACAACTTCATCCCACCCCCGCTGCCCACAGAGCTAGCCATCTGCACGGTGTCTTTGAACAATGTTATGTTGCTGCT
GTGCACAGAGATCCCCAGTCTCATAAAACATACTGGATGGAAGGCTGTCGAGAGATCATCAGGCCCCAGTGCATAAGTTCTTCCTAAGCATCCT
TAACAGGTGATCACCTCGCCTATTGAGAACCCTCAGGAGGCAGCCCACTTACGGAAGCACTGATTGTTACAAAAGCCCTGAACTAAATCTGCTT
GTCTCTAAAGCCAGCCCTGCAGATGTCTGCAGTGTAACTACTTTCTCTTCTCTCAAGCAGTTCAGCCCTTCAAATCATTGACAACAGCTCTACA
AAGCCCTCTAAATAGCCCGTTCTCCTGGCTAAAGTGTGTTGGTTTCCTCAGCATATGATGAAATAAACACCATGATGCCTTTGCCTTGCTTTTT
CTTGCTGGTCTCACTCTTCCCTGGCATTCTTCAATGTGCCCAAGTCCTTCCTAGAACATTGCACCCAAAGGGCCTTCCTGGTCTTTCCAGGGAA
TGCAGAATGAAAAAGAAATCCCATCCCCTGCCTCGAAAGGAGCTCTTCTGTGTGTAAGTGTACCTTCCCCCTCAGGGCATAATGGGAAACAGTT
TGCCAAAGCTAACTGTGTAATTTCACATGACTCACTGCCGTTAGTCTGAGAAAGCATGGCATATTAAACTCATTTTCCATGCTTCCCAACTTTA
TTTACTATTCCATTTCTGAGGGGCAGAGAGCTGAGCAGGAATAACACCTTCCTTGCTCCTCCTAATGGGGCACATGTGCACATATAAAATTGTG
TTCGATCTTTGCAGCCACCACCCATGTTAACTGTCAACTGAGAACTCATGAGTCACTTTCTCAGGAACAGCCCTGAAGACATTATCTCCTGCAT
CTTGTATTTGTGCCTTTGATATTTGGAGGGAAGGGTAGGATCTGGCAATTATCGTTATCTCATTTGGTTCAGTGTATTTCATTTCAGCCTGTTA
AGATCTTTTGGAAATACTGTATGTGCTAGTTACAGGGACAGTCATAAATAAGACAGCATTCCTGTCCTTGAGATGCTATTTCCACAGCTCCATG
AGATGCCTAGTTAAAAACAGAGCCTTTTTTCGAAACAGCCTACTAATCTGTTAAAATAATAATGCAAAAAGATAAAGTTAGCATACCTGAGCTG
CAAGGGCTCCCTCCTGGTCTGATCTCTGATAAGGATCAGATCCTAGAGCCTCTGAGATCCCTGTCCTCCCTGTCTGCACAAGCACTCCCAGAAG
GAGAAACAGTTTACGGTGGTTCATCATGACTTTGAACCAAGCTTAAAGTCAAAGTCATACTCTTTAAACCATTGGAAACCAAGTTTTTGCGAGT
TGCCTAAAGTGGGCAAAAATCCCACAATGCACCTGAGCACAAGCAGGAAAACATGCCATTGTCTCCCCAGGAGCCCTCCTTGACTTCTACTTTA
CTTTATCCATTGACACTAGTCTTATAAGTAGCTTTGTCTGTCCAATTTTTAATTGAATTTCCTTTTTATTTTCGTGAGTGGAAATATCACTTTG
AAAGAAATCAGTCCTCTCCTGAAATCCAGAATTCCTGGAGCTCAGTTTACATGTTTGACGCGTGTCACATCATTCCACAAGTCACTCAAGGGCA
GGAGGATTACCATCGATACGGAAAGATTTCTTACAAAGCTTAAGTGAAAGGGAAACCAGGGAGAAAGTGTGCTTCGTGAGAATAGGTATGCGGA
CGGCTCTTTGTGACGCTCTGTGCAACCCTCGTGTTTGCATTGAACCAAGCTGTGCTGCAGATGGACACCCATCCCATTTCCCCGACTCATACCA
GGGAGGCCCACTTTGCAAGGTACACAGAGGGGACCACAGAGCAGGGGGCCATGCAGGGGACCAAGGGACATTTTAGTGTAACCAAAGTGTGAAG
TATGCCCTTTATTTCAAAAGAATAAAGAAAATCACAGGTTTTCCCGCTGATATGCCAGGGACATTTCCAAGAGAATTCCTTTTTTGAGAGAAAT
CTCCTTTGATATCCCATCAGTCAGCCATACTGCATAATTGTTAGATAGTGAAAGAAATTCATTTTTTAAGTTTGTCAGAAAAATAAATTCTTTG
AAGTCTTAAATTGTTGCCTCCGGACATGACATATCTGGCTCTTCCAGAATCCATGTTAGTCCTAGCTGAGGAAGAAGGAGAAGGAGAGGGGCGT
TTGTTGATTATTGATTTTGTAAGATGCCCCACACGTTGGCTATTAGCAGAATTCTCACTTCTAAAAGGAAAATGAGTGTGAGCTATGTTCAATG
AGAAACAGTTATTTTTGGGACATTCTTTGAGGTAAAACACCTCCTTAAGATGCTGCTTCCTTATTGCTATGGGACCAAGATTAGAGCAAGAACA
TAGTGGTTTTCAGACCCTGGACATCATCCACAGCCGCACCAGAGGCCCTGCCCACTTGAACAATGAGACAGGCCACCATTTTGTTTCGAGAATG
AGCAAAGTGAACCACCATGCCAGATATTGTTAAGTCAGCAACTCTTCTGAAGATGGACATAGTAAAAAATAAACAAACAAGGCAGCACTTGAGA
TGGTCATGGCAGAGCAATCTCAACAAGCGATTTGTTATTTTGCACAGTGATGTACCCACTCATTGAATAAAATGCACCAGAACCATGCACTACA
CATGCTAAGGAGAGTTGTCCTTCAACAAAGGAGATAGGCCCCACTGGCCGTGGGGCAGTTTATCTTATTTGGTCCTTGTCATGGGCAGGCATGG
CCCTTTCTATGCTTCACAGATGAGGAAGGTCCCTGGCACAGGTCCAGTCTCCAGCATGGCCTAGAGGTGGCAGGTGCTACTTAGCATCGCCAGC
CTCCTGCTTGGTCATGGGGTCAGCCAGTTTATAACACGAACGGAGGTTAATGAACTGATCTTCCCATCGCACAACTGGTATGAACCCACATCTT
CTGATTATAAATCTTTTGCTCTTTAACTCTTAGTCATTACCACTGTCTAGTGTAGGCCTGTGTGTTCATGCCCTTTGTTGCCACCAAAAGATCA
ACTATTAGCTGAATAACATACTGAGACATGTTGGTGTTGTGTTCTAAATAGCACTAGTAAACTGTTAGGGAAATCTGACTATATAGCTACTATC
CAGTCTAGTTTTTCTTGCGAAGTGTTTGTTGAGTGTGTAATGAGGAGTAAGGAAGGTGAATAAGAAATGGCCTGAGTCTTTATAAAATAAGCAA
GGAGAGAAAACAGTTTTGATGAGAAGCCCATGGAATTTTTAGAAGATAGGACGTGTATTATGTACCTATAAGAATGGGTAGGATTTTAGAAGAG
ATGGATGGGGAAAAGGAACAGGGAGTGGGAACAAAACGTGGACCAAGGAAGAGCAGGTTTAGCCATGGAAGCCTCACCGCCGGCTTTGGTTTAT
CGTGGGCCAAGCGGACAGACCCTGTGGCGAGGGCTGGCAGCAGGGAGGTCTTCCAGAAGTCTATCCTGCAGGCAGTAACAGCCACCCAGTCTAT
AAGCTGAGTGGGCATGGGGGTGATCGGGAATGGGTGGGGAGTTATTGGGGTAACTTACCCCAAAATGATAGCTAGCTGGAACCATTTATTCTAT
TGCATTTTATCAATAAATCTTATAGGAAGTACCATCCTAGTGAAAACCCTGTCACATTGAGGGCATTCGTGCTTATGTTTTAAAACATGTTATT
GGGTCTATGAAAAATAACGCTGAAACCTATGAGCACCCTCCATGCAAAGTTTCACTCAAGACTTTGGAAACAAGACAGTGTCTTACTCACTTTA
TAAATTCATTCAGAAAGCCGTAGGTTTGAAAATTCCAAACTTAGATGTAAGAAGCTCTGAGAAACACATGAAATCACCCCCACATCAGTAGAGA
TGTCTCAGCAGACATGGGAAGAGGGGCAGCAGGGTGTAGGGACGTCGGGCAGCCCCGGGGTGGCCCTTGCAGGCTGGGCTTGAATCCCATGGCC
ACCACCGTCCGCTGGGAGGCCTGGAGCCGGCTGCCCACTCTCTGACCAGCACATCTTCATGCTGTATCCTTGAAGGGACCCTGGTCTGACATCC
TGTGATGCAGACCTGAATCCAGCACCCACAGGGTCTGCACATTCCCTCTTTGAGGTGGAGCCCAGCTCCAGAGGCTGGTCCCTGACTCTGTTTC
TCAAGAAGCCTGTACAGATGTTCCCCTCACCACTGTTTCCAGTCACCTTTGGCTTTCACGGTGCAGATGCTAAGTTTGATTTTCAGAGCCCATC
TGGGAATTTAGTGAACTGAACAGGTAGCATTTCTGAACCCACCCATAACCCATGCCCTCCCCACTGATTTTGAAAGAGAGTTTGCTCCACGTGA
CTTTGCAGCTGGGTAGAGAATCTTGGGGCAGGATTCCGAGGCAGGCAGATGAGTGAGGATAAATTGGGTTCTGACGGCACGTTACACCAGTGGA
CTCTAACGACGACCTCACCTCGTGCACAGATAATTCTGCCTTGTGCTTAACCGTTAGAAATGTGTCACTGAAGTGTGAACATATTATGCTGTTA
CATTTCCCATCATTTCTGTTCTTTCATTCCCTCTCATTTGCATTGGTTACTCATAAATGTAGATCTTTGGTATGATTTGTACAACTGCCGGGTG
TCAATCTGTGAAAGAAATCGCAGAGCAAGCTGGGCTCTGGTAGCGCTTTATCCCTGCGTGCTGGCTTGCCCGGGTTCACTCAGAGGCAGTCTCA
CATTCAGCTGCGCTGGGGCCAAGGACCCAGGGAGCCAAGTGTGCTTCTGTTTTCTCTATTTAGCAATTTAAGACCTGCGTTTAAATACTAGCTA
TGCATTCTAGCAAAACAGGTTTATATTTTAACACAGTAACTCTTAATTGTTTAATTCACTTCGTGTGTTACCTCTCGGAATAAAATAGTGGAAG
CCAATTAACTATAGACTTCATTAGTTTGGATTTAAGATCACCAAAACATTTACCACATCTCAATTGTTCATTACATGCTCTCTCTTTTTTAATG
CAGTTTTTATAATATGGGGAGTGGGGGTGTGGATTTAACCATTATATTTTTATGATATTGGGAGTAGATTTAACCATTATGTAAACTGGATTTT
TTAATTTTAAAAAGTCACTTATCTTGATGTAAAATCATGTCTTAGTAACCTTGATAAACTAAGTTTTGCATGATTACACCTTAAGGTTAAAACA
TATTTCATTTCATCATTTCCCACAAGGGCCACTGAATTCACCCATTTCCTGTTTTTCATCTCAGAATGTTCTGTGTTTCCTCCATATCTACTTT
CCCGGCAGCAGGACCCTGGAAGCAGTCACACCAACCTCATTTACCCCACCTGAGATTTGTGTGCTTTGAACATAGTTGCAATCAAATCAACAAT
ATCTTTGCTCAGAAATGGATATGTGAAGTAAAATGTGCTGCCCTGTTCATGTATGAAATCATTCAGCTAGCTGGCCAGTGAGCCCTTCATTGCA
ACAAAGATTTTTCTACAGCCCCTGCACTATCTGGGGCTATGTCAGGCCTCACACTCCTCCTCACACGTTTGGAGGCTACCTTGGCCAGTATTAC
CTTAATCCAGCATTTAGGGGAAGGAGCATTTCAAGACTAAATTTTCTAAACTGCTCAAGCCTACCTCATTTTATTTCTTGTCTATTTTAACACT
TTTGGATGAGGACTCTTCCTAGAACCTACTAACAATTCCCCCCCGCCCCCATGCCAAGATTCTTTAAAGACTTTCTTGAAAACGCTTCAGTCTT
TTCTTCTTAGCTCAAAAGTACTATCCTAAATACTAGCTCTGGCATTACAGGGAGTTAATTTGTGGGCACACACAGTAAATTATAAACCCCTTAA
GCAGAGAAGATTGTATTATCAGTTTATTAGTTTTCTTATTCATTCCTTCAGCACACATTTCTGTTGCCTCCAATGCAGCAGAGAAATTGACTTC
TACAGTTTCCACAACAGTCCAGATTTCAACTGTGTAGTGCTCTTTCAGCCACAAACTACACTTGTGTTTCCCTGGCCATAGGTCCTGAACCTCA
CTTCTGAAAAGTCATTGTGCATAGAGAGCTAATACCTCTACCCTAAATGATCCTGGCTTTCAATTCTCTTATCTGCTTGGATAGTATTATCTGT
CTCTTCCTCTGCATTCTAATTTGCTACTTCTAATCTGCTGGGAATTACAATAAGAAAGAACCATTTAATCATTTTTACAACTGTGCCTAAAGAG
AGTGTGTCTAAGTGCCGAGAGAGTGTATGAGGGACTTGCCCATGAGTAAATCCATGAATTTTAGGTCAAGGGTTTTTTGCTTCTCTTTTGGTTG
ATTACCTCAGAGATCAGTTTTACTTTCTTTCTCATTCTTGACCTATCATCACTAGCTGATATGGATGATGTGTACAACTCTGAGTAAGAATAAT
NNNNNNNNNNNNNNNNNNNNCTGAGTAAGAATAATGTCAATGGGACGGGATGGGATTGGCTGGTGATTCTGTTGATCTTAAAGTTTATATATTT
TAAGTTTAGTGTTTCAGAATGAGACCAAAGCGGTGACATTTTCAACCTCTTCGGTCTCTCTTCAGTTTTTTCATTTTAAGTTTTTGTTGTGCTT
CTATCACTTAAAGGAACCCTCCAAGTTGAAATCAAATACTAATGACATTTTTATCTAATGTATAAATGTGTTTTTATTATTTATTAGGAAATTT
ATTTTACTTGGCCCTCAGCCATGACATATCATGGCATAATCACTATCCTAAATTTGTATATCTTATCCTTGCATAAGGTAAGACTTTCTATGAA
TTACACATATTTGTATTTTCCTCTCTTACATATTTTAAGAATTTTTTTATACTTTGTTTTCTGCAAATGAAATATTGCTCATAAGCCAGGTGAT
GGCTGTCCACGCCTCTTTTCCCCTGCTTACCCTTGCTTAGATCTTATGGTAGAATCTTTTCATAGAAGACACAGAAAGACATGAAAGAAAGAGC
TGGAGAAGCCTGACGGGCTGCCCAGTGGTCTGCTACGATGCTCTCCCACAGCCCAGGCACAGGAGGCAGGGAGAGCAATGGGGCCCTTCCCTTC
CACCAACATTCAGCAGAATTTGCAGCTCCATGTTTCCAAAGCTTCCAGGGCACTTGCATTTAGAGACAGAGAGCAAGCAAGCTGCCTTTCCTCT
TCCTCAGTTCTGCCAGCCACACTCTTCCCATGATGAGCAGTTTCAGCCAAAAGCTCCTTCCCCTGCCCTAACACCTCCTGCAAGGCCTGAGGTC
TGGAAGCCACCTGCGCCTGCTGGCCCCTCCTTTCTTGTTTCTGCAATGGATGTTGTGGCCCTGTGACGGACAAGAGAAAAAGAAGTTGCCCTCC
TCCCTCTATCCTCACCTCCTGCCATGCTGTCACCCTTATAAGAGAGAAGGGCTAACCATCCAGGCTAATCCTCCAGTGATGCAGGAGAGGACAT
CCTGGCCGGAAGAGTCAGACCTTCCAGGTGAGCTCAGGTGGGTCAGCCCCCGACGCTGTCAAGAGCCCAGGGGCCAGTAGATGCCACTTTTGCT
CCAGGAAGAATCTTCAACTGTGTCCTTTTTATTCAAGGGGCTCTCTTTTCAGCGAATCTCTAGATGTACTAGTCACAAACACTCCCATTTATTA
AAATGTATCCATGATCCCACAATCCTTTTACATATTTCTCTCCAGGAGTATCACATTTCTGAGGGCCCTGTGCCTGTTTTCTGCAGGAAGTTGC
TGTTGTCCCGGGTCCCCCTGCCCCCACCACCTCTGTTACAAGAAGCAGACCCTTCATGCCACACTGGGACCCAGGCAGGCCCCAAGCCAGGATG
CTGGGATCTTAGTAAAGGTTGGAATGATGTCAGAACATAGACGAGGCAGAATTCCCCCCATAGCATCATCCTGGAGGGCGCTGATTTGTGTGCT
CTGCCAGCTTCATCTGTGACTCAGGATTTAAAAGCCCCAGGTGTGGTGTCCCTTCTCTGCCTGCAAGGTGCGTCTTTAGCAGTTCTCCCTGGTG
TGGAAGGATCAGTGGTTCTTGCAGCCTAGGCACCCTCCACAGCAAGCCCAACACAGGTGCTGTGAGCAGCTGGTTCATGAACGGTGATCCTGGG
GAGAAGAGGAGGATGAAAATGGAAAACCAGTGCAAAGGTGTGTCATCCAGTTGGTTACTGCTGTGGGTGCCCGGGCTTCCATCCCACCAGAGCC
CCCACTAGCCAGGGCAGCCTGGCGGAGGTGAGCATCATTCTGCTTTCTGGCTGCACCTGTGTGGACAGAGCCCGTTCCAAAGCCTCCCAGGCAC
AGGGCACACATCAAGCAAGGGGCAGAGCTCGGGCGAGGGCTCTGGGTGCCCCCGTTATTGAACACAGGCCTGAAGGGAGCCTAAGAGCTGGCTG
GCAGGAGATACTACAAGGCAGAAAGACAGGGCAGCAGTCTTTGTACTGTACGTTTTTGTTTTTTAAGAGAGAACAAAAAGTCAAGGTTGAGAGA
TGAGAAATACTCTTGCCAAAAAGAGAACACCAAAATCCTGGAGTCACGGGTCTTCCATTACCCTCTCTAGCATTTCTGCTTGTCTTTTCCCTAG
TATTGGTGAAGAATTTTTAAAGTAACCAACCCATACCGTTGGTTACAGGCCCTGTGGTCACCAGGCTGTCTCCCCATGATGGGGATGGAGAGTG
GTTAGTCCAGAAACTTAGACCTCCCCTCCAGCTTGTTGAATGCCCTGAAGTTTATCTAGAAGGGAAGATACTCAAGCGTAGGATTTCAGTGATG
CATTTGGACAGCATCAGTACTATGCTTCAGCGTCAAAAACGTCACTTTGGGTAGGAACAATACATAATGCGTGGCAATGCCTTTTGTGACACCT
GTTCAGGAGATTCCCATAGGAAGCTTCTGAGGCAGAGTCCTCAGGTGAGGAGGGGGACAGGCCTGGGTCTTGGGGGAAGGTGGAGATGACCAGC
CTCATGCCTCTCTCCCCAGTGGCCTCAGTCTCCATCAGGCAAATCTTGAGAAGCCTCCTCCATTCTGCAGGCAAATGACTGAGATGTGTGAGCT
CTGCTTCCCAACAGGCGGAAATTCACATGGGGAAGGGCACCTGTGAATGGCCTTCTAGAACTATCACGAAGTTCTGGATTTAGTACCCTGTGAG
AGCAGATCCTCCTGGGTGCACTCGGATGATCCTGCCTAGCCAGCTGGATTGCAGAGTGGTCATCATTATCAGTGAGCTATTGAGGGGTTGAGAG
CAGTCAGTGTCATGTATAAGGATGGGTTGGGGTACCGGCCAACGCCCGCCTTGAGGCCTGGCCGCCGGATGGGAGGCGAGAGCACAAGAGAGTC
CTGGCTAGGTGTGCCCCCCTCTGCAGGGCCACACCATCCACTGGAAACCCTGTGCCCACTGGGCTGCGTGCTAAGAGGCTGTGGCCAATGCTCT
TGTCCAAATTTTACTGAATCTGCAGTCTCTCTTAATTCACTCCAAAGTTTAATGTGTTAGCTTGCGAATAAATAAATAAATAAATAAATAAATA
AATAAATAAATAAATGGAAAGAAACAGTCCTCAGAAAGTCCCAGTCAAATTTTAATTCCAACAGATATTCAGCAGTTTCCTCTAAGAACAATGA
GAGTTCTGGGGCTAGCCAGTGTTTCTCTTGGAAAATAAGCAAGAGGGAAAGCGGTGCATTCATTTAAAAACCTGCCCTAGGGAGGCAGCGTTCC
CTGTGAACTCCGAGCCCACAGTGAGCAGAGCAGCCTCGAGGCCTCCCGGCTCTCCTGCCCCTCCTGCCACATGCCTGTCAAAATCCTAGATAAG
GACTTTTTCTCAGCAACTTCCACGCTCCTTCAGTGGGGATGTCTTTGACTCAGAGCTCTGCCACTGGTTATCTCCACGAACAGAAAATGCCACA
GATGGGTTAATTCACTGTGTTCTTCTCATTTTCCCTCAGTTTCAGCCTTTTCTCTCCTTGCCTGTTTTCCTCGCTTAAAAAATGATGTGGGGGT
CCCTAAACGCATCTACCCCGATAGATTTATGTTTTCTTTTCCATTAGTCCACTTTGCGTCTCAGCCCTAAAATTAAGTTTTTGATTATAATGTA
AGGAAGTTTTACCATATTTTAACTCTGGCTTTTTAAATACAAAAGAAAAATAACAGAATCGGCTTCTAGAACTATCAGGAACTTCTGGATCTAG
TACCCTGTGGGGACAGATGGTCTGGAGCCAGCGCACTTGGATGATCTCTCTCAGCCATCTGGACCGTAGAGTGAACTTGTTACTGTCCCTCCAA
GGCTGACAACTATGACCTCATACTCTTCTAGCAGTTTAATTTAGACCCAAGAAAGGCTGTGTGTGTGTGAATTTGTCAGAGTGTGTGAGTGTGT
CTTTGTGCCTGTGTTTCTGTGTGTGTCTGTGTGTACATGTGTGTCTGTGGGGTGTGTCTGTGTGTGCACGGCTGTGTGTCTGCGCGTGTGCATG
GCTTTGTCTGTGTGTGTGCGCACGCACTCTGCTAAGCTACTCAATGCAATTCCTTACTCTTACTTCCCTTTCTGTCACTTCTCCATAATTCTTT
GTATTTCGGTTGGGCTGGTATCTCGCGGCGGCTTCCTCTTTTCCTGCATTCCTATATTTCATTATTTGCTCTTGTTCCTCTTCTAGGGCTTTTA
CAATATAGCCAGGAGGATGTGGAAACCCAGTTACAAGATGACACACAAGCACAGTGTCACAATCGCTGTGCTTGGGCCCTACCTCCTGGAGACC
AGGGTGGGACGGTGTCTCTGGATATGGAGGGAAGGGCGGAAGATCACGGGGTGGCAGAAGGCCCGACTGTCCGGTCTTCTGGAAGCTGGGGTCT
CGTGGTCGCTGGGCTGGTGGTGCTCTAAAACCTAGAGTAACCGAGAGCAGGATGACTGCACCCCTGACTCCCGACTCACCGGGCTTCGGAGGGC
CATGGGTGTGTGATTCCACTTGTGATCCTCCTACTTCCCCAGCCCACCCTGGTGGTCTCCCACTTCTCTCTCTCTCCCTGTGGAGTGTTATAAC
CGACTCCTTCTTCTAGGCATCTCCATCCCAACCCCAGACCAGTTCCCTTAAACCACCTCCCACCACAGGACCCCCACAAGCAGGGACCTCTCAC
AGTTCCTGTTGCCTGGGGACTTCATCTCAGCTTCCAAGGCCTCTGAAACCAGGCCCTGCATCCTGGGCATGACTGTCCCCATGATTCTCTGAGC
CAGCCANNNNNNNNNNNNNNNNNNNNNNNNNNNNNNNNNNNNNNCCACCCCCCCACCGCCAAGTCCACTGCTGACCCTGCTGTAGCCCCCCACC
TCCACTTGTTGAGATTCCCTCTTCCTGCTTCTCATTTTGAATGTCACCCTTCTGTGACTTCTCACAACCCCCCTGCCACCCCTCCCTCCAGTTG
GCATGGCTTAGTCTTCCTAAGAACATGTGCTGCTTCCCAGTACCCAGGGCTGCTGTGCACCGTGGCACGTGAGTTTCGGTGCATCTTCCTCCTG
CTGTTTATAGATTGCAACATCCCTGGACAGATCTTGGATTTTCCCTCTATAATTTCTCTGGAGACTCCCTCGGGGTTTGCACACACATCTGTGG
AATGCCCAAGTTGGAGATGGTCCTCCCTGATGTGTAGTGTGGGCTATTCAGAGGGCCTCATTTCATAAACTCATTAACAGCTAGGACGCGAAGA
CTTGGAGAAGTTAGCTCAGGACACACGGAGTGGGAGGGAGGCAACGAGTTAAGAAATGGGCTTTGGAGTGCCTCGAATTTGGCCTCCACTTTTC
TTTTCTACTGTCTTACCTGGTCTTAGGCAGGTCGGGTGACCATCTGGAGTCGGAGTTTCTCTCATTTGTAAAGCGGGGGTGATATTTTTCTCAC
AGGGCTGCTTCAAGGGTTAACAAAGTTAATGTCTAGGAAGGACATAGCATACCACCTTCACCTGGTTGCAAGCCCCTGGAGTCACATGGCAACA
GCTGTGGAACCAGGTAAATGACTTGACTTACATGTTACACGCTCTTAGTTGTTCGATTTGTAAATGGGAAGAGTGTGTGACCCAAATTAGTCGT
TTCCAGATATTTCCTGGTAAATGGTTGTTGAATCATAAAACTAGAAAGATGCGAAAGAAAGGGACGAACCCCCCTTACTTCGAAGAAGTGTTGT
TCATGTGAAGGACAGGACTTTTTGAGACACTCTCATCCTAAGAAACAGCTGATATCTACTAGGAAAAAACATGACATTTGAAGTTTCTTCCTAA
GAGATGTGAGGTTTTGACAGAAGTGCCAGGAAGCCAGAGGTGTGTGAGTAGTGGGCCAATCTCACGTGAAGGCTGTGGGACGGGCCACGAGAGG
GGCAGCCAGCATTTCCTCAGCGCCAGCTAATGGCGGGGACCTGGCACCTTTGCTCTGTGACTCTCCAGCTGTATGGTGACATGAGGCTGGCGTT
TTCTTTGGTTTCATACGTGAGGAAGCTGAGGCTTGGTGATGTCCTGTGCATGGCTCGGACTCCAGAGCTACTCAGAGGCAGAGGCCGTCTGTAA
ACACCTTCAGGTGGTTGGAGGCACGGTGCTGCAGCCAATGCTGATCACTCACAAGCCAAGGCTTTATTGTAAGGGCTAAATAAAATAACATATG
CCTAGCATTTATACAGCACGGGGCTTTTTAGGAAATAGTGAGACGACCATGGAGAGGTGGAGGAAGAGAGAAGGGAAAGAAGAAAAAGAAAAAA
AAAGCCTTAAAGAGTTTCTTAAGAGAACTATATATTACAAAGTCCTTGGAGTTTTTTTTTCCCTGGTTAGACATAAGTTTACATGAAACGTTAA
ACGGCTTAAAGTAGCCACATCTCCTTCCTTATGTCTTCTCACAGCCACTTGTGAGTTTCTTATCAAGATACAGAATTATGGCCAAGTGCGGTAG
CTCACACGTGTAATCCCAGCACTTTGAGAGACTGAGGTGGAAGGATCATGTGTGCTCAGGAGTTTCAGACCAACCTAGGCAATATGGTAAAACC
CTGTCTCTACAAAAAAATACAAAAATTAGCTGGGCATGGTGGCATATTCCAATAGTTCCAGGCACTCGGGAGGCTGAGACAGGAGGATTGCTTG
AGCCCAAGAGGTCAAGACTGCAGTGAGCTGTGATCGAGCCACTGCACTACAGCCTGGGCCACAGAGCAAGATCCTGTCTCAAAAAATAAAATAA
AATAAAATAAATTCTGCAACAAGTCACAATTCCTTGCTCAGAAATCTCTACAGGTGTGCTTCTTTGTTAAGAAATGGAGGAAACATGAATTTCA
TCCTGACTTCTGAGTCTTGTAGAGACCAGATCTGACTCCTGCAGCCTTCTGCCCACAGAGCTGGCAGGCGGGGGAATGTGCGCAGAGTGAGGAG
CAGCTGATCTGACATTCCGAACAGTGGAGACTGCTGCCTATTTGGCCGCACCACTGTCCTTCTGCATGGAAAAGTCACAGTAAATAATGGACTC
TCTACCTGTGAGTCGATTTTACTGAGCTGCCTTTTTAAATATATGTGTAGAAAGGGCGATCTCTCTGTGTCATTTGCACATGTACATACACATG
TACACACGTGCACACGTGGTCACTCATGTACACATGTGTGTGCACCAGTGCACCAGACCACATGCACCCACCCAATTCCACGCTCCTCAGCCCC
TTGCTTTCCTCTGCAGACAGCCAGTTCAGCTACAGTTATGCCAGATTGCCTGCACTCTGATCTTTACCATCACCAGACTCTCAGCTTGAGCTCA
TGCCTGAGAAATCCACTTTCTGGCAGGAAGGCAGAAGAAACTGCCAAGGCAGGACTGAAGACTTGACCTCCACCTGTAGTGGGGTCAGGTCACC
AGAGGCTGGCTGACTCCCCAGGATTTCTCAGCAGAGTATTACACAAATACCCCTTCCTTAAAGATTAGCAACCACTTAAAGACACAAAGTGTGC
AGGACTGTACCCATGGCCGAGAGCGGCGGGATTAAGAGGGCAACTGAGTTGTTCTTCCCATCCCTCCTCCTCTGTGCTGAGTCACCTTCTGCTT
GGAATTCTGACAGGGACCCGTTGGGCTTCTGGAAGGGAGGGACAGCAGAGGATCCACCCTCTGTGTGTCCTGGGGGAGATTACTTATCTCTGGC
CTCCCTGAAGCAGGGCCTGCGCTTCTGGAATCTTTGAGGCTGACACCCTGCCAGCCCTGGGGATGAGAGAGAATGGCCGTGTCTGTCTGCAGAG
CCTGAGGAGGAGCTGAGCACAGCCTCCGGAGTTCTCTTCAGTTGATCGCTTAGGTGGACAAAGGCCACAGAAATGGATTTAAACTCCTCAGCCC
TTTCTTTGCATGTTTGTTCTCATTTGAAGTCAGAAGTGATATGTCCTACACCTCAAGAACGTGTGAAATGCACATACAATAACCCCATTTCAGG
AAGCCAAGTCCAGCTTAACAGTCAAAACATTTCCTTCAGTCTTTAGTCCTTCACTTTGCCGAACTCCCTTTTACACCGGCAGCAACAGTTTAAC
CTGTTGCTTCTGTAAGAGTGTGCTACTGGGAAAACCACATCTAAAACACGTGTGCAGTTACATCAGCTAGAGCACATGCTAAACAGTTGATCAA
AGGCTCTTGCCTTGTGGCCCACGCTGCAGACACTCTGACGACTGCAGAGCTCCGCAGCCCCACGTCGTCCCTTCCGCACTGCCTGCTGTGCCTC
TCCTCTCCATGTGGCAGGGAACACAGCCAGTCATCACCATGTGGCTCTGCCCGGCGCTGCCCCAGCATGTCCTGACAGGGCCTAGATATGGAAA
GGTCGCTCTCCATGCACACACCCCAAGCCCCTCCTGCCCGCCGTGTGACCCACACTCTTATGGGCAGCCCAGTTATTTTGTAGCATTTCCCTTC
CTTATCATTTTGGCCCAGTGATCCAGCACAAATCTCCCTTATTAGAATAAAATTTGGAATGACAAAATTAAATTTCATTTTTCACTTATATTGA
GGACCTCACACTCTTCACCCCTCCCACGATCCCTGACAAGAGCCTTCCTATCTAATCATTGTTCCTCCAGCCCTCTTAGTTTTCTTCAGCCTTT
CTTGATTGCCTGAATGTCCCTTTCCCTTCTCCTTTTAAAGCATGAACCAAGCTTTCTTACCCCGTTCTCATTATCATTTTTGCATTTTCTTCTT
TGCATATGATTCTCCTTAAATTATAAAACTTGGGGGTAATTTCTAGAGGTGCCATCATAGTGCTTCTGTCTACTCAGTGTCTTTAGAATCAGCA
AATATCATTTTTACAAAAAAGTAGTATTTCTTCCAAAAAAGAGTAAGCAAGAAGGTTACAACACTGGGAAAATATCCCTAAGCCTGTTCTTCAA
CCTCTTCAATGTTTTCCCCTAAATTGTTATATGGAGATCCTGGACCCGGAAGTTGGCTGACATGAAACAGGCCTAGCAGGGCAGCTGAGGAAAT
GCTCCAACCTCAGGATCCACGAAGATTGCACATGGCACCAAAACAATCATTTAAAAGCTAATCCTGGCCACGCACAGTGCCTCACGCCTGTAAT
CCCAGCACTTTGGGAGGCCGAGGTGGGCTGATCACAAGCTCAAGAGATCGAGACCATCCTGACCAACATGGTGAAACCCCATCTCTACCAAAAG
TACAAATATTAGCTGGGCATGGTGGCGCGCGCCTGTAGTCCCAGCTACCCGGGAGGCTGAGGCAGGAGAATCACTTGAACCCGGGAGGAGGAGG
TTGCAGTGAGCCAAGATCATGCCACTGCACTCCAGCCTGGTGACAGAGCAAGACTCCATCTCAAAAAAGAAAAAAAAAGCTAATCCCATAAAAG
AACCATCATTTTGAACCTGCTGTTTCCTTTCTTGTACTCTTTAGAAGTACCCATTTCTCCCTTTCTAAGCCATAGGTGTATTAATTGGAGCTTT
TTCTATCTTAATTAGTTCACTGTGAACAATTAAAATTGTGTTAATAAAACAAAAACAAAAATAGGACTGGTGCCTAGTTGTACTACATGAAGAG
AGAAAGGGCCAGACATTGGTTTTTCCTAATCTTCTGTCAAGTTCTCCAAATCATCTGCTCTGGAAGGTAGCTCCAACAGCTGGGATTTGAAGTA
AAGCATAGTGACTTTGCCCATCACTGACATGTCCCATTTGAAGCAACCAAAACTGTCCCTCGACCTGACACTCATCCCTGAAACACCATGAGGG
TAAGTGAGGCGCTTCGGAAGGTCCACTCAACCCCATTGCCAGATAGAGTAAGTGTCTGCCAGGGGCATTTGGAGCTGAAGGGAAGACTGTACAG
ACTCACGGTTTGCAGGCACTGAAGGCGTTTTCCTGCCTTCTTTTTCACCTTCAGTCGACTTGCAAAGCACTAGCCCTATTGTTTTTCCCATCTG
GGAAACATGGTGAATGTTGGTTGGTTGTAGCTAATCCTATGGGTCTTGAGGTCTTTGTTGACAAGAAGGTAGATGTTATCTTTATCTGCGTGTG
GCTTTCTACTAAAACATGAGCTACAGGGCTCTCTTTTTTGTTTTAAAGCATTTTTCCATAAGGTTCACCCTTACTATTGCTTATCTGAATAATA
TTACCTGCTGAGAAGTTTATTCATTGCTCACCAGTTGTAGGGAGATTTTGACACAGGACTGGAGGATTTTTTTCTCATCGTAACAGTGCAGACC
CATGGAAAGCTTGGAAGCAGTTGTGACCGGATAAGAGCAGGTTGAGGATGATAATCTTAGGGCAATGAGCAGGTTGATTGAGAGGGGTGCCTGA
AAGCAAGGTCCCCATGATGCAAGCAAACAAACTCACATGCCAGACGGTGGACAGGAAACACAGGCAGGATGTGGTGCAGGCTGGGCTGCCTTGG
CTGGGCAAAGGCAGGGGCTTCATGGCCATGCTGGGATGTGACGTCGTTGGAAAACAATAAGAATGGAGACCTCTCCAAAGACCTCAGACATAAT
TTGGCCATGAGAGGCAAGGGTAGAGGCGAGCCCCCTGTGGGTTGGAATGTATGGAATCCAGATGAAGCACCATCAACATGCATGGGCTACATAG
GAGAGCTGGGTCTGGGGGAAAAGATGGGATTTGGGTTTGGGTGTACATGTTCCAGGCATGGAGGGAAGAATGGGCAGAATGACGAGGATCAAGC
CCTGGTGGAGCCCCCAGACCAGGGCCCTGGGCATATTTCCACTTGCCTTCTTCTGCAAACTTTTGTGTGCCTGTTGGGTGGAAGGTACTATGCT
GGGGCCATCCAGGATCCGGAGCAGTGTAAGACATCATGGCCTGCATGGTGTGACCCTTGACATCTGAAAAGAACGAGCTGGTGGAGTGGGAAGG
AGACAAGTGGCAGCAGAGTTGACATCATCAGGACTGACTGCAGGACAGGCGGTGAAACGAGCCACTGAGGAGTTACCCAGTGCCCTGGGGAGCT
TAGATGTGAGACTTACACCACCCAGCACTCCCCAGCTCTGTGTCCCTGGGTCCCACTGAACTTGATTGTATTTTAGTTGCCTCTTTTCTAAGAC
CGGAGCAACAATACCTTCCTTGAGTGTGCATGTGCAGTCCATAGATGGCAGCCAGTGTTCTCTTCCCATGAGAAGACTCTGAGCCTCCTCACTA
GAGGGTGGTCTAAAAACAAATGGATCCATCCACAGAAGGTCTGAAAGGTTTTCATAGAATCTTGACTTGGTAGCACTTCAGGATCTAACTCGTG
CTTTCCAGAAGTGTGGCCTGTGGTGTTCTGTCTGGAGTATTTGGTCCTCCCATCCACCTCCACCTTGCTGTCCTGTCCTGTGACTCTCACTAGC
TCAGTCACCGGGTCAGGAAGCCCTGCCATGAAATGCTAGATTTGGAGGCATTGCCAAGGTACCACAAACCATACTCAAACAAGGTCATAATAGA
CTAGTGATCTCACTGTGGCTAACAGGTTCATGTGATTTAAAGAATGACAGCATTTTTTCTAAATTTTATAAATTTTATAAATTTCTCCTAAATA
CAAATCTGAATGTGTTTACCTTTAGACAGATTTTCCCAGAAAATTGTCAGTGTTCTCGAATTTGAAAGTAGATCAGATCTCCTCCCTCTAGTTT
TGAAAATCTCAAGTAGGTTTAGCCTCTCCCCAGAGTGACAACGGCACAAGAAGTTTATAATTTTATGCACAGCTAAATGCAAACTGAAAAGTGT
CGTTTGTGGGTATTTCATTTTTCCCATAATGTTCATCAATTTGGCAATTCAAATAGGATTCAGAATCCAAGGTGTTCCCACCATTTTATATGAA
AATGTGCCTGAGAGTTTGGGGAATAGAAATTCTTACCAAATAAGTTAAATTTCCTCTTGATAAGAATATATTTTGTAAAATGTAGAAAACTGAG
AAAAAAAGTTTGACACCTGTTTTATCTGCATCCTTTTATTAAACAGTGGCCTGAATTTACTAAAGGACAGAGAACAGGGTTGAGAGGTAATCAC
TGAATAATAGCTTCGCTAATCCCACAGTGACTGCTTCTTATGACAAGCAAGACGGTCAACTTAGAGGCAGGACTGTCTTCAGGGGCAAAAGCAA
GTCAGCACCTACAAACCTCTCCAAGACACTGAGAAAAAGCAGGTTGTATCGCTCATTTTGCAGCTTGCCAGAAGCAATGTGGGAATATTGTCAG
ACTGCACAGACCTGGGGCCAGCTGGCTCCTAGAGTGCGAGGAGCTCTCAGTGACTGCTGTGCATACTCACCTGCTCTGTGACTTTGTTCAGTCC
CTACCCTGGATGTGTGGTGAAGGGTGCCAGGCTTAGCTGCTGGACCAGTGAGGTCCCTGAGGGGGCAGGGCTAAGAGGTGTAGCAGTCGCACTT
GACCAGTCATTGATTCACTGGTTGGGAATTTGTTCATTGAGGGGACACCATTACTCCCCATGCCTCACGTCCAGGTCAGTCTGTGTATATTTGC
ATTAACACACAAACACACTTATCTGTGTCCCTGTATGTGCAGCTGCAGTACCTTACACATCTTCCAGTGCCTCTCAAGCATCATAAAAACAGCT
TCCACAAAACCTCTACTACCCACCTGGCATCCACAGAGCTCCCAGTGATTGGCTCCCAAAAGATACTGAACTTTGGCATCGAACAGAGTGAGTT
TCCACATTTGCTCTTGTACATAATTACCTGTCCAGCTAGAATACTACACACTTCTTTTACTGAGCCCAGAAGTTTATGTCCCTGAACACGGATG
GTACAGGAACAAGGGTGAGCGCTTATCAATTCAGCATTACTCTGGAGACATGAAACAAACTAATAGGTACAGCTATATTTTGTTTTTTAAACAA
TTTTGTGAACCACATATTTGGGACAAAAATCAACAAGTAAATTTGAATTACACTAGGCAAAGGNNNNNNNNNNNNNNNNNNNNNNNNNNNNNNN
NNNNNNNNNNNNNNNNNNNNNNNNNNNNNNNNNNNNNNNNNNNNNNNNNNNNNNNNNACTTTCCAAAAGAAGACATACATGTGGCCCACAATCA
TATGAAATAAAGTTCATCATCATTGATCATTAGAGAAATGCAAATCAAAACCACAATGAGATACCATCTCACACCAGTCAGAATGGTTATTAAT
AAAAAGTCAAAGAATGACAGTTGCTGGTGAGGTTGTAGAGAAAAAGGAACGCTTATACACTGTTGAGGGGATTGTAAATTAGTTCAACCATGTG
GAAGACAGTGTGGCAATTCCTCAAAGACCTATATACCATTTGACCCAGCAATCCCATTACTGCATATATACCCAAAGGAATATGACTCATTCTA
CCGTAAGACACATGCACGCATTTGTTTGTTGCAGCACTATTCACGATAGCAAAAACATGGAATCAACCTACATGCCCATCAATGATAGACTGGA
TAAAGAAAATGTCGTACATATACCCCATCGAATACTATGCAGCCATAAGAAAAAGAATGAGATCATGCCCTTTGCAGGAACATGGATGGAGCTG
GAGGCCATTATCCTTAGCAAACTAACCCAGGAACAGAAAACCAAGTGCAGATGTTCTCACTTTTAAGTGTGAGCTGAATGAGGAGAATACATGG
GCACATAGACGCGCCTATCAGAGCGTGGAGGGTGGGAGAAGGAAGAGTATCAGAAAAAATAACAGGTAGTAGATTTAATACCGGATGACAAAAC
AATCTGTATAACAAACCCCCATGACATGAGTTTACCTATATAACAAACCCGCACATGTACTCCTGAACTTAAAAGTTAAATTAAAAAAAAATTA
ATGTCTAATAATATATTACAGTATTCTTCATATTCAATGGCAATGTGTGAAGTGGGAAGTGTCTTGACAGAATTCGGTGTTTCAAGGCTTACAC
TTTGATGCCCAAGACTGCACAAGGCTACATTTTCTACTGGTGAGACAAATTCCAGACGCATTCCATTCAGATCTAATCTCTTAGCTCCTTAATC
TTCAGGGTACTGGTAAACATGAAGACCTCCCCAGTGCTGTAGTCATCATGATATGTACAGCAGGTGGCTGAGCTCTGGATGTAGACTGCAGGGA
TATATTAGGAAGTTAATTCTCAAGGCAAGTCATCTTCAAGCACCATATCAGCATGATCAGCAATATAAGTAGTATCTCAGTGCTTTGTTGTTTA
GTCAGAGTTTTGTACTCTATCACCCATTGTAATGTTCCTATTTGCAAAAGGTAATACATACCCTTTAAAACATCTTTGCTTTTTCTCCCATTAT
CGAGATGCTAGCAGCTTCATAAAGCAGAATAACTAAGGGCAAACAGATTATATAAAGGGTTGGAGCTCAATGAAGACAACAAGAACAGCAAAGG
TTATTGTAAAACTGGCTGCTTGCAGGCCAACAAGCACATCCATATGGAGGCAATCAGTTTATGCTACCTCTGTCTGTTTCATCGGATTCATAAT
ATTGACTTTATCCATTAGATTTGGACTACCAGGGGAATAAAATAAGCAGATCCAGAGTAAGCATTTGCTAGGAAATAATTCAGCCAGTCACTTT
GAAAGCTGTTCAAGAAACAGCTTTCAAAGTGTCTCTCAAACTATGTTTGCCCATTATCCCAATAATTTATTTCCCAATAATTTCATGGGAAAAG
AAGGAAGTTCTGTGGTCAGATAAATCTCGAAAACACTGGTTTAAGCAAAGTTCAGTAGGTCTGCTTCCCTGCAGGTCACCTCAGAGTCTTTACT
CTGCTAACCTAGGAACTCATCCAACAAGTTTAATTTAACAGCTACACTGTGTACGTCACTTTAACAGTCACTGAGCTGTGACTCTTGGGGGAAA
GATTGTGCGTGTGTGTGTGTGTGTGTACACATGTGTGCACATGTGCAGAATCTACCAAATCTTAAGAGAAAGGAACATGCTGCCAAACTGTCCT
GTGAAAGAGAATAGAAACCTGAAGATTTGAGGCAGTGATAGCATTTATGAAAGCAGCACATAAGGACTAATCACCAAAAGGGGTAGCTCTTTTG
TTGGTTGGGGAAAACAGGAATTTTTCCCCCACCCAATGTGCTGCATTTTCTAATTTTCTATGAACACTTCCTAAGAAAAAGCTGAATGAAGAAC
ATTTGCGATGCAATCAGCTCATTAAGAAACACGCACTTTTGTGGAGATACGTGCTGTCCCAGGAGATGCTCTGCGAGGAGCCGAGTGTTTGGAC
TGGAGCTGCTGAATGGTTTCTCACAGTTCTAGAATGTTTGGGGCTGCACCCTCTAAGATGTTGAACCCATCAGTAATTGCTCCAAACCACTTTA
TGGGATATAATGCTGTGAGTTGACACCTGAGGGGATTGTGGTCCTGTTCATGAGTAATTACTTTTCTGTTGCCTATAGAAGGGCCAGCAATAGC
AGATGAGTAGCTGAACAGTGGTTTTGAGTAATAAAACGTTCTTTTTTAAAAAAAAGTAATGCTTTCTGTTAAACTCTGACTATACTCTCTCCTG
GTATCACAACCCAGCTTTCTTTTTGCCTTCTTTATTGCAGTTACATATGGGGCTGATGACTTTAGGGATTTCCATGCAATAATTCCCAAATCTT
TCTCTCGTAAGTATATCCCGTGCTTCTGCAAAACAAAAGCATGCCTTCATCTCCTATCATGTAAATATCGTACGTGCATGTTCCTTCATCAACC
CCCGAGATACATTAAATATTCACTGTTCTATTCGTTAGACACCTACCATATCATTTTTGGGTATTTATACCATAAAGTGCAAAACGAAGGTCTA
GGCAGTTGTGCGGTGTCCTGGGAGCATGGCAGTGGAGTAACAGTAAGGGTTGGAGTCACAGTAGCACTGATGGGATTGTTACTTCGCGGATGCT
GCTGGACAGCTTTGAGATTACTCCTGTAATCCTTTTTATTGACTGTGAGGATAAAATGGCCATATTTTCTGTCACCAACAAAGAACTGAACATG
GTTTCAAGATAATTTTTACAATTTTGTGGGACAGGAGAAGGAGATATGCTCTTCATCTGTGGTTCTGGAGTATTAATTTCAGAACTGAGAAGAG
AAAATTGCAGGCCTCCAGGCCGTTATTCTGTCGTCCATCCCTGCTGCACCCAACGTACTGTTCCTGCTTCGTGCCCGCAGGACCTTCTCTGATC
TGAGCTGTTAAACCAAAAACAGATGTGAATTTCATTTTTCTTTTTTAGATATTGAGCTGATAAATGATAAATATATTTGGGTAACATCCTCAAA
TGAGTACTTTAAAGAACAGAGAGTGCTTTTGAAAATGTATAGAGAGCTGAATATTTAAAGCCATACAAGTTGATAATCCCCTTAGGACCTGTAT
TAGTAAATCCTCTAATACTATAAAGCAACATCAGAAAACACGTCGCATTTGTTAACACTGTGACAATTATAATTATACCCTCTAATTTGAACAG
TGCCAGTAACAGTTAAAGACAGGTGTCTGACATCCTGGTTATCAAAAACTATCTGGTGTCTAAGCAATTTAACAGTATCAAAGTACATCTTTTT
GCTCACAAACTAGATTGGCTACTTTTCCAGCCTATAGAAGTTACAGAAATCTTTCTTTTACTGATATTCCTTTGATTCCACTTTAAAGCAATAG
CTTGATACCTACTTTTTGAGATGTATATGTATGTACATGTAAATGCTTATATATGTGTATTTGTTTACACGTCACCTTATATGAACATATAAAA
CATTATGGTATTGGACAGAGAAATGATATTGATTTGAAGAATCATATTGTTGAAGTATTTTGGGAAGTCAAATGCACTTGAGAGTAAGCTAATG
CATCCTAAAACATGTTTCTGTGAAGTCTGAGGAAGGTGTCAGCCAGAGCATATGTTGAACCAGACCCTTCAGTGAAGCCTTCAGTCTGTAAGAA
TCGCTGCATGTGAAGATGTGTTAATGTTATGATAGTTACAGTTTTTATAAAAGAGATGATATACACTTGGATATGCTTTCTGTCTATATTTATG
CAAATGTGTCCATAAGGTATTGGTGTCTCTCTTTCTCTCCCACTCTCCCCAGTGTTGGAATTGTGACTATCTTCTCACACAAGCGGCTACTTGG
TCTTGATGCCTTCCCCCGCAAAACAGCAACCAAACTGTTCTGGGCCAATATCACCACCTTGTGGTCATGATGAAGAATTGCCCCCTTTGCCCTC
AACACCTCTTTTCTTCTTGAAAATTAAAAACAACCCCTTTCACCCCCTCTACTGTCCTTATTCCAGTTTGTGTCCGTAGTTGCTGGAGGAAAGA
AAATGCCTATTGCTCTTTTTTTTATTCTCTTTATCTGTTTACTCTTCTGCCTTTCTTTTCTCTCCCTGACTTCATTCCATTTAAAGGCCTTAAA
TTGCAAATAACGAAAAAAGTATTTTCTAATAATATACCCTAGTGGGACGAAAACAACCTTCTACATTTTAAATGATATTAAGTTATAATAAATG
GTTCCATGAACTTTAAAACGCTTAAAAGTTTTATAAATCTCTTTTAGAGGCAACACAAAAATATCTATATATATATCTTCTCTTCACCTCAAAT
TTTCATTTAATTACCGTGATTCAAGATATATCTTAAATATTTCCATTTCATTTGATTTTTACTTGCTACTCACCAGTGTTGCAAGAATATTTCT
GTACCATTTTTCAAGTAAAATATTGAGCATTTCAAGCTTACATGGCCTAAACTCACACTAGAGTGACTACTTCGGACTATCTTTTCAATGGAAA
AATGCGTTCTGAGTACCAAACATTTACTTTTTCAGTAAATATGAAGACACATTCTAAAAAGGAAAGGGAAATGAAGAGGAAGCTTAATTCATTG
GTCAGCTGGGGACTAACAGTGTACATTATACCTATGCATTAAAAAATGTTTAATTATCCATCAGCACATACAGTGCCTGGCACAGATTCAGGCC
TCTTGGCTCCTCTTGGCATCTGAGTTCCTTGGATTCTCCAGATTCTTCAATCCAAACTTGTCTATCTACCAAAGTCCACCTTCCATACAGGGGT
GTGGGGTCTCTCTTAGTACTGTTGGGTGCCAATAACATAGAAGCCCTCCAAGATAGGTCAATCAGATTTTAATTTTTCCCAACTTTAAATAGCA
TCTGGGAAGGAAAGCAGCTTTTGACTAGGAGTTTGAAAACATCCACTCTTCATATTTATTGTCACATTTATTGAGTAATAAAATTGGGCTCTTG
TCCATTATCTCTCAGTCAATGAAAGAGCCCACGGTGGGCATGAGCCAAAGTGTTCCGGAGAAAGAGAGGACCAGTCTCCATTTCATGTTCTATA
TTTAATCAGTTCAATTCAGCACCTTACTGAGTTTGACATTTTTCTAAGTAATGGGGTGGGGGGTTACAAAATATTTATAACTATCTTTCCTATC
TTCAGGGAGATGTACCATTTCACTCAAGCAATACCACAGCTAAGCAGTTCCAGCTCCGAGTAACAGAGGAAGGAGTGAGCGATTTAGGAACTCA
CAGAAGGGCACGGCCAGGCAACTCGGGCCCTGGCAAATGTTCCATAGAGACAGCATCCATGGGGTTGAACCAAGCACAATGCCTGCAAATCGGG
CAGGCGGGTTCATGCAATTGATTCTAGGGCAGGTATGATCAGCACCATTTAAGGAGTGGCAGTTGTTAAGAAACTCAAGCGATTTCTCATATGG
CATTTTCAACAGAATTCAGCAGGAGCCTTGCATATCCCTTGGGATGGGTTCCGGGGTATTATGGAGCTGCCAGGAGGTGCTCAGCTTCAGTAAG
TGCCAGTCATTCCTTCCCAACCTCCTCCTTCATTAGTGGAAGTATCAGCTGGTGTCATTGCCTTCTTCAGGAGGATGGATTTCAAAATGAAGGG
CCAACAAAACTCACATTCTCGCAGAGCCTCCGTCACAACTGCATGTGTTCACTGCCATCAACAGGCCAACACCCACTTGTTCTTTTCTTCTAGG
TAAAGGAAAAGGTCTGTGGGACAAAGGCCCTGAACTCCTCACTCCTTGAATGGGAGGCATATTGGTGGAGGCTGTCACACAACTACAGGTGGCA
GGAACCTGCCATCAGGGTTCCCATCAGCCTCCAGGGCTTGCTTCTCTGCCCTGTGTGTGGACACCTTCCATCACTGGAAACCCCTCTCTCAGAA
GAACCACTTCTTGCCCTCATCTCCCACTTGCCTCTCCTCGGCACCTTCTCCACCCTCAGGGGCCAAGCTGAGGAAGTGTGCATCCTGTGCCACC
AACCTTGCTCGCAGGAATTAGTTTCAGTCCCCAGTGACTGACTCTTCCAAACCTGCACCAGCCTATGCTGCCCTTTTGAAAGGAGGCGTGCGTA
CAGCCTGGCTGGTACAGAAGATTCCAGATTTCAGTGACTACACGACGCTGTCACCCCTTCTGTTTTTCTTTTTTCTGTCCACATCTCTGATTGA
GCATACCTTCAGGGAAAACCCCAGAAACCTTTTTCACACTTACATGGGAAGCCAAGACACTCTCATCCTGCGCTTGTGTTTTTAAAATCTATAT
TTTAATTTCACAGGTCCTTACATTTATGACTAATAGATTTCAGATTTTGAGATACAATCTGTAGTTGCAACTTATGAAGATAGTTTCAAGCCCT
GATTTCTGTCATCTATGAAAACAGTAAGCAAGTTGCTTGTATTCTCCTCCTAGCTGGATAAGAGACCCCCGTTTTCATGGACAGCCTCCTTGGG
TGGACAGAAGTCTCCTGATCTTGTCTATGTAACCAGCACCCACTTTGCATTTTTCCGCAAAGAAAAGAGGAGCTTAACCCCATTTACGGGAAAT
CCACGCACTGCTTGAATCTTACGCGCCCCGTGGTGACGGTGTTGCCCACTCTGTTCCCTTCCCACCAAATCCTGCCAGCACCTGGCAGTCATCC
AGTCCTTGTCTTAGACTTCACCAACCTTTCCCGTCATAACATGGCTTAGAAGTTGTCCGAATAGTGCTAGAAGCTTTCAGCCCTGGAATGCTCA
GCATCTGCCATCTAACTTCCATTTAAAACGTTTTGAGCATTTGCTGATACAGGTTCCTCTGTCCTTTCCCCATTATTTTCAGTTCCTTGGCCTT
GCCCATAGTGATCTGTGCATATTGTCTGCATACTCTTTTTTAGAAACCTAGAGCATCGCAGTGTCCTTAATTTTCCTCTTCAAACTCTATATAT
TCCTGAGCTGATCATCCCTACTGCTGTTCCTACAGAACTGTGTGACTAATCTTCTATATATGTCCCTACATCTAGCCATCTAGGTGGAGATCTA
GGTACCTATCTCCCTAAAATTGTACTTGGTATCCACATTGACCTCAGGACAGTATGTGATAGGCTCTTGTGCCTTTTCGACTAGGAGTTTGAAA
ACATCCACTCTTCATATTTATTGTCACATTTGTTGAATAATAAAATTGGGCTCTTGTCCATTATGTCTCAGTCAGTGAAAGAGCCCAGGGTGGG
CCTGAGCCAGAGTGTTTGTGTCCCTAGTTCTCTTTTGGTTCTGTTACAGCTCTCAGTGACAGTGTCATTGAGGCTAACAAGGACAGAGTACTGC
TTTCAGCCACCATTTGTCCAATGAGTGGCTGATCTCCAGGCCTCTGGCTTTGAGAACATCTGTCATATCTAAGGCAGCATCCATTGTGGCCTTT
CCCCCATGCTTCTGTTTCCTTCCTGTCACATAGCTTTGCCTCCTCCTGCAAGCAGCCTGCTGTAGCAGAACCGGTGTTCCTGAAGCCAGAAACC
CAAAGGTCGTGTCCAATGCTTCCCTGCTGTTCTGCTCCCCACCTGCAAGCGCCCACACACTGATCAACAGCACACGCCATAGACCATGCCAAAG
AATCCCAGAAATACTCATTCTTAATGATCCAGAAGAACAAGTGATAGCTTCTGGCAAGTTCTAATACCCCATGTCTCCCCATGCGAAAGCAAGA
GTCAATTCTCTCTAGCTGGTTGCCTCTGAATTTATGAAGTCAAGCCGCGTAGGGGAACATGCCAAGAGGATTATCCCAATGCCTGTTCTGCGTG
CTGTCCTTTTTCTAGCCTCGGAAGCACTAGGCCTACACCTTCGCTATAGCCCTCGTCTTAGCGCCTGTATTTGAAAAACTTGCCACACCAATCT
TAATTTGCTCCATTGTCTTCTAATCTCATTTTAAAAACCACAAGGTAAATGATTAAAAATAATCTTAGATTAAGGAGTACACAGATCTTTGCAG
CCTCATTGTGTTTCCAGAGCGGGCTAGTGTAGACACTGGTGAACAAGGAGGGCCTAGAGAATTAGCTTTCTCCCAGAAAGATGCACAGCCTCTA
CCTGAGAGTACCAATTCCAGAGAACTCAATGGTCATTAAGCACCATTGCCTCGACAGCCAGCCAGCCTCACTTGCCTGCCTATCTCCTTTATTT
TCCAAGTATCTTGTCCCTGGCAGTGGCGAGAGGTTAGCAGGAGGCTGCTCAGATGCTCTCGGTCTCTGATCTTCAGGATCTGAAGGGGAGAGCA
TTTGAAGAATCCCCATTGCTGGATTTCTCAGGACAATCCTGCATAATGCCAGGATCTGATGGAGGAGACAGGCAGCTCTGTTAATCCTCTGGTG
CATCCTCACTTCTGTGGTCTCCAAGTCCACCATGTCCCAGTTAATTCATTTCATTATTCATCTGTAAGTCATTTCCCTAAAGAGCTAATAAGAA
AACACTGGCAGTACAATCAGCCCTCCATATCCATGGGTTCAGCCTCTGGAAATTCAACCCACTGTGGCTTGAAAATACAGTATTCAAGAGACAT
GGAACCTGTGGATATAGAACGCAGATTTTTCGTATCCATAGGTTCTATAGCGCCATTTTAGGGACTTGCACATCTACAGACCTTCAGGAGTCTC
AGAACTCATCCACTGCAGATACCAAGAGATGACTGTAAGTGGTTAGGAATTTGGATGCTGGGGCCAGGCTGCCTGCAGTTACCTTCCAGCTCTG
CCACTTGCCAGCTATGTGACCTTAGCAAGTTGTTCAACCTCTCTGTGCCTTGGCTTCTTCAACTGTAAAATAGGATAATGATAGCACTTCCCTT
ATGGAGTCCTTGTCAAGGTTAAATGGCAGAGTACAATTAATGTGCTGTGTGCCCAGCGTGTGCTATTCGCGTTACGTGAAACACTGTACTGGGA
TCACTGGGGGTGAGCCTCCATGTGCCATGCCCCAACCACTATCCTCAGCTAACTTCTTGTCTGTCAGTGTTAGGCTGGTGCTATAATAATTTCC
ATTTTCATGGATGAGGAAATCAAGGCACAGAGAAGTTACATCACTTGCCTAAGATCTCAGTGCTTTTAAATAGTGCAGCTAAGATTCCAGACCA
GGTATTTTTATTTCAGTGTCTGGACTGTAGATCTCTAAATCGAGAGGAACTCCCTGAATAAAATAAGCTTGGAGTGCTGTTAACTAAGTTGGTT
ATTTAAGACAGTTCTTCTCAGTCCTCAGTGTACATTAGAATCTTCTGGAGGGTATGTTAAAACAGACTGCTGGGCCCACCGAGAGTTCCTGAGC
CTGCAACTCTGGGTTGAGCCTGAGAGTCTCTGCTTCTACTAAGTTCTCAGGTGATGCTTATGCTGCTTCTCCCAAATTTTGAGAACCATTGATT
GAAAATGTTGATCAAAAATTATGTGGTCTAGGCTGAGCACAGTGGCTCACAACTGTAATCTCAACACTTTGCGAGGCCAAGTCAGGTGGATCAC
TGAGCTCAGGAGTTCGAGAGCACCCTGGTCAACATGACAAGACCCATCTCTACAAAAAACACCAAAAAAAAATGGCTGGATGTGGTGGTGCACA
CCTGTAGTCACAACTACTGGGGAGGCTGAGGTGGGAGGATCACTTGAGCCCGGGAGACAGAGCAAGACCCTGTCTCAAAAAAGAAACATTTAGT
CTTGATTGTCATCTATCTCATTGATCATTTTACTTGGCAAAATTTACCTACTTACTCTTATTAGTCTGTAAAAATGGTTATTAAAATGGTGGCT
TTCAGTGTAACTACAAATTCTCTTAGTCATTATAGTGTTGGATTCACCAATGTATCATCAGTCAGTGTTTCTGAAGTGTGTAANNNNNNNNNNN
NNNNNNNNNNNNNNNNNNNNNNNNNNNNNNNNNNNNNNNNNNNNNNNNNNNNNNNNNNNNNNNNNNNNNNNNNNNNNNNNNNNNNNNNNNNNNN
NNNNNNNNNNNNNNNNNNNNNNNNNNNNNNNNNNNNNNNNNNNNNNNNNNNNNNNNNNNNNNCCCTTTGGAAAAAAAAGCTCTTCCAGATACCT
ACATTCATAAACTATCCCAATTAACCCTTCAGCAAGTCGAACAACTCTAAGAAAGGATACCTCTTCTTTAGAACACAGGGTTTGTTTTTATGTT
ATTTAAGATAAACAGGAATTCAAATGGTCATGTACCAAAGCAACACAAAGAACTTCCGGAAATCTCAAAGGGAACTGTGGTCAGAACTCTGAGC
ATTTTTATGTTTACTGAGTTTTGTCCCAAAGTTTATTAATGTTTACATGCCACAAGGAAAGGTAGCATCACAATAAGAGACGTTTTTCAGGCTT
GATAACCACTTATTAGGTATTTTGCCAAACAAGTTCACACATCCTAGAGAGCTGGATTGTGTGACCCAGAACCCACCCTCTACGGCAAGGTGCC
CATCTGATCGGTAGGGTGTAGCAGTAGGCCTCAGACCACTCCTGACCTGAACCTGCTTAAAGTGAGGGCCCAATTCTAAAGTGGGAACTATGTA
AATACCTTTCTAGTGCATTTTCAGATAATCGCCACTGGGCCTATGGATGCAGAGGGCTGGCAGATCTCCCTGTAACCCCAGGTGCATCCCGAGG
CCTGCCACCGAAGCCCACTCAAGGCTGAATGCACGGCGAGCTCAGGCTGCTCTCCCCTTGGTATTTGCTAAGAACTTCTGTTTAGTAGCTCTCC
ACACCTATTTGATTGTCTTTTTGCTGCTGTGTTGTTTTGTTGACTTTTTTTTTTGCAATGACACTGAGTCCCCTCCTGTATTGTTTCTTTCAGC
CAGTAATGTTAAAGTAGACACTCAGAGTGATGAAGAGAATGGGCGTGCCTGTGAAATGAATGGGGAAGAATGTGCGGAGGATTTACGAATGCTT
GATGCCTCGGGAGAGAAAATGAATGGCTCCCACAGGGACCAAGGCAGCTCGGCTTTGTCGGGAGTTGGAGGCATTCGACTTCCTAACGGAAAAC
TAAAGTGTGATATCTGTGGGATCATTTGCATCGGGCCCAATGTGCTCATGGTTCACAAAAGAAGCCACACTGGTAACGCCTGGCTCAGTTTTTC
CTTTAGTGGCCTGGAGAAGGTGCATGGGGTTTGAAGGAGGAAAGCATCCTGTCTTCCTTGTGTTCTGAGCATGTTTCTAATTGACTGGTAGCTC
AGTTGTTCCAAGCGATTGGTTCCAAGTGGTACCGAGTCATAGAGTCCTTGTTCTGGTACAGCCTTGTAAAGGACTTCTCAACACGTACCAATTC
CACCCTATAAATAAAACAAGGGAAAAGTGAACAGCATCACATGACAGGCTTGGCGAGGGCTGCTATTATAGTAACACATACTAAGTAGTCTCAG
CTGAGCCCTCAGGGTACCTGTGCTGAGTGGTCACCCTCCACAAAACAAAAAATCCTGATACACCAAAACTTACTCCTCAAAGTTTCCACTGAGA
AACCATGAGTAAAATGTGTGTTTAAATTGTATCCAAACTAACAGGGTTTGATGTTTAGAAACAATAATCAATGATGGAATAGCAGCAAAATCGA
GTTTTCAGAAAGACCTCAGATGAGCTTTCAAATGGCTTGCCCTCTAACAGGAAAGACTTTGAATCAGATGCTTCTATTGCCACTGGTTATCAGC
TCAAATTCCTAAAGAACTTCATCCCAAATACCCTGTCTTGCTGAAAGGTTTACTGGAAGTATAAGAGAATGTCATGTTCTGTGTCCAGAAAGGA
AGGAACACCGGCACCCTAGTGTCAGCCACTTGTGCTCAGGCTCACAGGATCCCCCCTCACCAGAGGCGTGGGAACACGGCGAGCCCCAGCTGGC
CGCGCTCTGCCACTGTTTCTAATAGCCGGTCACGTTGATGGAAGTGTCACAGAGTTGTCCAACAGAACTGTCCAGTCAGAAAACCACCACTCAT
GGTGCTGGAGTGTCTTAGAAGTAAAATATGAATAACACACACTTATTTAACTGTAGGCAGGAGGTTTCTTATGAATTGAAGAGAAACTTTTCTT
TGCGTCGGAAGCTGTTCTAAAGTTGGGTAAAACACAATAGATCCACCACCTCTAGCAGCCACTGATAGCTGAAACGTGAAACATAGAGACCCTA
AGCTATCACTGCCTCTGAGCTGGCATTGTTAGGTCATCATAAAGCTAGCGTCTCCCACTGCAAAACCCAAGAGGAAAAAAATAGTTGAAAATCC
TATTTTAAAGGCCTAGCAGATTCTATAAGATACCTTGGGAAAATGATGACGATGACTTGAAATCAGACCCTCGTATGCTGCTTCCGTGGGGGCG
AACAAAAATATGTTCATCAAAAATTAAGCAGAAATGCAGAAAATTTTGTGAGCCAAAAAAGCTGTGTTATCAGGAAATGCAGATATTTGTGGGG
TTGTAATTTTTTATATTTGAATCGGGCGGTTTTCAAAATGATCTATTCCATTTGTAGTGTATCTGAAAACCTATAAAAATAAGTTGATATCAAT
AGATATCCATCTTCCATAAAAATTCAACTTCTAAAATTAAGCAAACTTTGCTTTTTCTAATGGCCCCTTTATCCTCAAATTACCCACTGAAATA
GACGGATCACACTCAGCCCTAAGTGAAGCAAGCGTGCATGAGAGTAGTCCCAGCCTCGCCTTTGTAATGAGGTGGAAATTAACATGAAGGTAGG
CTACCCTGTGATAGACACTTAACAGGATACTCGGGGACCCATGGTAATACATCCCTGATAAGGAATAGACCTCACAAATGAACTACTTGCCTGT
TAATTCATTTAAAGCCTGACTGTACAGTGAAAATTCTCTTAAATAAATATTTGATAAGTGAATCAAATTCTGGCTTACTAAATTGCCAAAATAT
AATGACTGCCTGCCTTGATAAAAAGAATAATTACATTTAATGAATAAACCTGCCAAGTACAGATATGCCAGGTGGCACCTGCTGTTTGCTGCTC
ACTTCTCCCAACAAATAGCAGCTAGGTGCCACCTGCACACCAATAAGCTGAGTTTTTCACTTACGGAACAAATAACTTTCAGAAGTCAATTTTA
TAGTTTCTGCCTTGCCCTTTGTTAAAAAAATACACACACTTGAAGCAATGAACTCATGAATTGTTTTCATCATGCATTTCCACTTGCCTAAATA
TAAAGGGTCCCAGGTAGATACAGAAATACCTGGTTTGGCCAAACTTGGTTTGAATAACTAGACATGCTAGAAAAGGTTTTCATTTTCCTGGGAT
CTGAGTGGAATATGTTACAAAAGGCATGCTTTCTGAATTCTCTATGCTTAAAACATTTCTAGAGCAGTGCTTCTCAAACTTGAAAGAGCATGTA
AATCACCTGAGATCTCGTGAACATACAACTCTGCTTCAGACCTGGGGGGAGGCAGGAGAGCAAGCATTCCTAACAAGCTCCCAGCTTGTGGAGC
ACAGAGCCGCCTCAGGCAGCAGGGCAGTGCAGCTGAGCAGTGACAGTGAACAGGGCCATTCAGAGGGCTCTCCACCTGGGGCTTAGGTACGACG
GGAATCCCCACTGGACAGGCTAGGACTTGCACTCTGGCCATTGTTCCTCCTCCTGCCCATGGCTGAGTCAGCTTCTCAGTCCCTTCCAGGATAC
ACTGAGAGGATTCAGGGGCGGTCTCGCCTCTGCCCATATCCCCACGTTGGTGAAGTACCACTGGCGCCATTTTCTAATCAGCTCATCGGCACCA
GCACGTCACTTCCCCTGTTGTGCAGCTCAGTTTTATATTTCTGACTCCCGTCTAATAGTAACATCTTCCCCACCAATGTCTCAGGGTTATTGTG
AGAACCAGAGAGGAGAGAGGTAGGAAGGAAGCAGGAAATGCAGGGTGCAAATACACCACATTATTATTCTAAATAATGGGATTTTTAATAACAA
AGACCAAGAAGATTGTCTGTGCCTATCTAGTTCCCATCTGTAAGATAAAAAGGTGCAGTCCCTGAGCCTCCTAAAAACAGCACCCTAATGGCAC
TGCTCCTCCCAGGTATCATTGCAGTAGACCTACGTCAGTTCTTGCAGTTCAAACACATTTTTTCACTTTCTTCTGAAATGCCCTCAAATTCTAT
GACATAGTATCCATGAAGACTTCCCTTTTTACCCAGTGAAGTTACTAGAGGGGCTTCAAACCTTCTTACAGAGGGTTCCTAAAATGGGAGATCT
GTGGAGTCATTGGGATTAAAAATTAAATTTCAAATTCATGACATCAATGTCCTCATCCCAGTTAAATAAAAGTAAATACAACCTTGAAGAAATT
TGACCTACTCAGCTGCAATAGCTGTTGACCTGCAGAAGGCAAATGATGGACCCCGGCCACGCAAGAACACACATGGCGTGGGCTGCGTTCTTGT
GCCCCAGCTCCATGGACGTGTCTTCTTAGCTGTGGACCCCTCCAAAGGAAACTGCTTGAGTGCAGTGCTCTGTATTGTCACTCCTGGGAATGCT
CTCTTAACACCCCCATGCCTTGTGCTATGTGTTCATACCAGCATAGGCACTCAGAAGCAAAAAAGGTTTCCAGTGAAATTTGTTTGCAGGCAGG
TATTAAGACATCAGACACTGCACCATCCAAGTGAACCCCTGCCCGCCTGCCTGCCTGCCCTGCTCTGCTCTGCAGAAGGGCATGTGTCTGTAGC
AATCTGCCCTTTCTGTCTGCGATGGGCAGAGACCCTGGCTCTGCCTCCTGTTTTCCCTGTAGCCCTCCAGACCTGGGGAGAGACATGGGACTCC
AGCACCTGCCCAGCACGGAAGGGGGTCTTTCCCAGCTGTAAGTGTAGGGCTGCATTCACTAATTTAGGGTCATACCACAAACACTGTTGTGTCA
CCAGGATGTTGTCACATGCTTATTGTGAGCATTTTTGTGACATGAGCTTTCTCCTGAGAGGCCACCCTGTCCAAATGAGAGCTGTAGTTGGAGG
CACATCCGTCTCATGCTGCCTGGGTCTCCCTGCACCAGCTCACTCTACTTTTCCTTTTTATCCACTTGGAGTTAAATGCACACATTTATGCACA
AGTGCACAGAAGGCCCAGAACTGTTCCTAATAGATAATTAAATGATCTCTCTCCAGTGGAAACTCTCCTGCGCTACCTGGCTGCTAGCTGTTTT
AGCCTCTTCATCCAGTATTGATTTACATGCATCGGTTTGTAACTCAGACAGTATAGTTAGTTAGTTTGTTTCACCATCACCTTCCAACCTGCTT
ACGTTTAAACTCCTTCTCTCTGCTTAGCTAATACACATTTCTGTAAGGATTTGGAGAAATACCAGATACCTCCTGGTTAGTATCAGGACCTCTC
CATTGGCCTATAATTGAACATCACTGTAAATTAGTTTCAGCTTTTATAGTAATGCATCTAACCCGCCAGCTTAAAAAAAAAGTGATGATAATCA
TGAAATTCAAGTGTCAATATAGACTTTTAAATCTGGTGTGGATGTTAATAGTGCCAGATATGCTTCTGTGTAATCATTTTTGAGAAGTGCTGTC
TTCTTTACCATAATCACATTAATCAATCGGGAAATGGTTAAATAGACATTTTAATACATTGTTTTTTCCTGAGAAAAAAAGTGACTCCAGGAAA
TATGTTGTTACAATATCTCAACACCAGGAATTGTGGTCACATAGCATTCTTCTTCTAAATAAAGCATTTGTTTTACAAAAGAGTTTCATGTTTA
CTTAAACGTGACAAATGTATCACTCTTCGAAGTGAGAGTTAAATGAAATGTTCCCTGATTTAGATTCCAAGACCTGTGACTACTCAGTAGGACA
ATAGCATATTTCTTTTACTCAGATACCTCTTTATCCCTTTGTCAGCTCCAGAATCCAGACACAGGTGCTGCCACACAGAGGAGAGCGTCAGGTG
TTTTCTTAGTCACAAATCCAGCAGTCTCACCCCTGAAAGAATTCCTTCATAACAACTAAATTGCACCTCTTAGAATACCTGTACTTAAAATATA
ATTTGTCTTCTATGGATATAGACAAATAATAGCTTAAATGTTTTAGGATTTGTAAAGAAAGAAAAAGCTAGAAATCTCAATGCAACTCTGACTT
GTATGTCCTGCCATAGGAAGGTTTGGGACTTTTCTTTGGAAGATGGGAGGCTTCCTTCACAGTTTCTTAACTTCTCATTTTATTCAATCTTTCT
CCATCTCTCTCTCTCTTTCTCTCATCCTCACGCTCTCTGTCTGTCTCTCTCCTGATTTGTCTGCTTAGGGACAGACAGGTAATGGAGAAGAAAT
TGAAAGGGAAAATACAGGGAAAATGTAAATGAAAAGAAGTTATTATAACTGTTATAATGAAGTGCCTTTCATTTAAATATAAGAATGTAACGCT
GAAATGAACTTGTGATCCTGAAATGCATTTTTAATGAGTTTCCTTTTTATTTTGCTGCTTCAGTGGCATATTTTAAAGACCCTTTGAAAAAAGC
CACATTAAAAAACCCCACCAAATGCCACAACACGCAAAATTGGATATTGGTTTATTCCAAAACTGCTGATCAGGAAGAGTGGCTCTTCATCACA
AAATGTTGCAGTCACTTTATTTAAATGAGTTTGAATTTGCATTGTGATGTGCCATTCTGATTTAGGGAAAAAAAATTAGATTTTCAGATCAAAT
TGACCCAGCCAGTGAAGCGTTAAGGAGCTGGCAGGTTTAGTCTGAAAGCCTCATGTTCTATCAAACCTGCAGCCGGTGGAAGTCACCAGGCCCC
CGTGGGAAACAACTTTCTCGTAGCATCGTCCTCATGTCCCCACGCTGACTTTAGTTCTCACCACCTCTCCTCTCTCCGTCCCACGAGAACGGCC
CTTCCAGTGCAATCAGTGCGGGGCCTCATTCACCCAGAAGGGCAACCTGCTCCGGCACATCAAGCTGCATTCCGGGGAGAAGCCCTTCAAATGC
CACCTCTGCAACTACGCCTGCCGCCGGAGGGACGCCCTCACTGGCCACCTGAGGACGCACTCCGGTAGGTCCCCTGGATGCAGTCCGGGGCTGT
CTGGGTGTCCCGCGATTCCTCCACTCTGCCCGCCTGGGTCCCGGATTGTGTCCTTGCTGGCTAACCCTGAGTCCCTCCCAGCTCGCAGTCCTGC
ATCGGGTGTGAGCTGTTGCTTCTTTGACATTGCCCCATCCCCCCTCCCCATATTCTCCTTTTCCCACTGCACCAGGGAGATTGCGCGCAGGACC
CCCATGCACATACACACACAGAAGTCTCACCTTAGCTAGCATGTTTCAGAACAGGCCTCCTCATCCCGTTTGTCAGGCTGGTATGCTTTCCCTA
AAGGATTTTGCGGGAAATGTTTTCACCAAGTGTACTGCTAAGACCCAAAACGTTTTCAAGTACAATTCTTTCTGTTGTTAAGTCCCGCTTTGGA
GTCTTTTACACAGGTCTAATGGATACCTTTTTTGCAGAGCTGGTAGAGAAGGGTGATTTAGGGCGCACCCACCCAGACTGAGCCCCGTGTGGCT
CTCACACCAAAAACCAGCCAAGGCCACAGTTACAGAGGCCAGTCTGGGGCTGTTACCAGATTTTAGACAGCAGCCTTTCTCTTTGAATTAGACA
GTTAAAGTACAACCCACATAATCTGGAGTCTTGACAAGATCATCATAGGCATAAACGCTCTATCATTCTCAAAACAGTCTCAGCCTGCAAAGTT
CAAATCCACTAAAGTTTGGTTAGATCCTCTGCCTCCTGAGAAATGGTCCTCGGTGTTTCATTATCCAGCAGTCCCATAATTCTACAGGGCAGAG
GAAGAGAGGGCTCTTGGCCGCCCTGTCATGGATCATGTTTGCCTACAGTGTGGTCTATACAACATGACATGGCACAGGTCTCCTTCATACCGTC
CAGTTGGGGATATTTGCTGTAGCATACTGCATGAGACTTCGGAGGCGAAAGGTTGATGGCTTTTGTCCTTCCCCTCAAGGAGCTTCCTGCCCCA
GCCAGCCACCAGCCAGGGCCCTTCTCCAAGCAGCAGCCTCTCTAAGCCGGTGCCCTGGGGGATGGCAATGCCTCAGACCAGCTACTCCTCACCC
ACCCTGGGTAGCAGGATAAGGAGGAGCCTCCCTCAGGGAGGCAGACGTGTGTTCTTTGTGAAATATCTGCAGCGGCCCAGGCCATCTCTTCCCA
AATGTGATGCGTGTATTTGATGGTTGAGGGTTTTAGAGGCTGCTCATTGTCTCCATCTCTTTATCACACATTTACTGAGCACCCCTGGGTGCCC
ATTCTGCACACAAGACCTCAGGTGCACACAAGGAAAGCACCAATGTGTTACAGGAGGCATGACAGAGTGTCTGAGGGGACAGTGGGAGCATAAG
GAAGGGGACAGTGGGTCCTGGGGTGGAAAGTCACGAGAGACTTCCCATAGAAGGGAGGGGCTTCTGAAGTACATGCTGGAAGGCGACTGTCTGA
GGTTTGCTTTAGAGACATTCTAAACTAGTCTGTGAGTCGGCAGTAATCCCAGACAGGGGTGCCGCACCCATGTTGGCAAGAACTCGGTCTCACT
CCTGGCAGGTGGTCCCTGCAGTAGTTCACCCAGTTGGCTGGAGACAAAAAGGAGAGGAGTCACAGGGGCTGGTGCATCACCTCCTCTCCATCCT
GACCTCCTTCCTGCCGGTGCACATGGAGAAGGATCCCCACATGCTCGCCATCAGAAAATTGTCATCATTTGGGTGATTTGACTTCCTAAAAACT
TCCAAGAAACGAGCTATACCAACCTCAGGAGTTGCTTGCCCGAGAGGGCGGGCAGATCAGCAGGGGGGCCATGGAGTGGGACACTTGCCTTGTT
ACAGAGGGACAGGGAGAACAGGTGGTTCCCCTGAGATAGGAAGACAGTAGCATGACGGTGAGCATCTTTAAATGTTCACATGGGTGATGAGCAT
GTATGGTGGTCCCACCTGGAGACAAAGGTGGTACCTGGGCCTGATAAGCAAGCCCCATCCAGGCCTCAGCTAAGAGAACTCTGCAGTCTGTCTG
CCATGCTAACCAGTGGTCTAGGAAGAAGCTTCACATCTGTTGTTTCTAAGGAGCCATGTAGACATAGACACAGTTGGCAGCAATATTGCCTTGG
GTTAGTGGGAACCACCACTTCCCATGTCAGTGGAAAACACAGACACTCATTCTTACGTTGACACCAACCATAGGTCATCATCACTCCTAGATTA
CTCTGATTGCAATGGAATCTCTCATGCCCATCAGTCCTTAAAAGCAGAGCTGCTCTCTTTCCTTTCTTGTTGTCGACTTAGGAACATGTAGTGG
AGTATTTTATGTTATTCTGGCTCCAGGCCTATGTATTTCATTTGAGGCATGATGGTTTCCTATTCTAAGTACCACTAAGTATTGAGTAGTTATA
AAATGGTGGTAGACTTTCCACTGTGTATTTCTATTCTGGATCCACGGATGAGCAAGTGGAGAAAACCCATCATGGATGCAGGGCTGCTGGGGAT
CTGTCTGTCCGAAAATGCTATAGAGACACACACTGCTCTTGGGGAAAAAAACAGTGATGATTTCTTCAAAATGATTTCACTGAAGTGAAATAAG
GACTTTGGCCTTGCTCTGGCAAATTCAAATGTGGCCACACTCTACTCCATTGTGGAATGGTGACTCCCCTGTCCCATGAAAAACCAGGATCAAC
ATCACAGCTTTCTCTAGCAACTGGTGGTGGCCTGAGGTCTTATGAACTAGCATGTTAGCAGGGATAGAGTTAGGGAATTTGTCCGATGCTGACA
GCAAGAGGGTGCTGGGGGAGCTGGAGGGGTGGAGAAGTGATCTCCCTTCCTGCCTCATGGCTTCCTTTGGAAGTTGCAAGCTTAGAATTTCTTT
CCCAAAGAATATTGGACTATGCTTCAAGAGACACTTCAGTTCAGTTGCTTACAGTGAACATACTTCTTATGTTCCAGAGTTAAACTCAATCATA
TTTTCAGAAAAATAGATATTCAGACATCATGTCATATTTACACGAAGCTATTTGATCATGGAATTTACTGAAGTGACAGCTTTTTCAGGAAAGG
GTATCGAGTGGTTATCTATATCCTATTAATTTCTAAAAGCAATGCTCAATAAAATGTGCAATTTTAGGCAATATTCTGTGTTTCAACATTATTT
CCTTATGTTGGGGGTACATCACTTTATATAGATAAAGAAAGATCCTTTTCATTCTCTATTAAATGGTCCAGAAGTCAAATTTTGGCTTTCATGT
TGGTCTTCTTACTGTAGCTTCTGTTCACCTAAGAAAGAGATTTAACCAACATAAGCTTTGGCTAAACCATTGTACCAAACATTTCTATTTGGAT
GCTCTTAACTTTTATACAATACTTTGAAATGTGTTCAATAAAACAACATGACAAAGAAGTAGAAGATTCTGCTATTAGGTTCGAAATTGATATT
CCTTACATAAGTGATTAAAGATACTTTATTCACTTTATCCCTTAAAATGGTATCTACTGAAGTCCTTAAACTTAGGCATGATATTAATTCCTGG
CTAGTCTTTCTTTTTCCTAAAATATCACTCAATAAAATCCAAGAAGGACTAAAACTCATTATATAGAACTGCACTGCCCAATACAGCAGCCACT
AGCCACATGCAGTATTTTTAATTATAATAAGTTAAAATTAAACAAAATTAAAACTTCAGCCCTCAGTGGCACTAGCCACACTTTTTGTGTCCAA
CAGCTACATATGGCTGGTGGCTGCCATATTGGACACCACTAATACAGAGCATTTCTATCATCATAGCAAGTTCTGTTGAACAAGGCTGATCTGG
AAGCTACACCATCCTAAAGCTCTTTGGCAAGAAAGCAGAGCTTTTCCATAAGCTCGGTTTATGAACAATATATTTTGTATTTTCTATGTATATG
TATATGAGAATACGTATACATAGAAATATATGAAAATACATATACATATAAATATACATATACATAAAATAGAAATACATATACATAGAAAATA
CAAAATATTTTGTATTACATATACATATGCATGGAAATACAAAATATTTTGTATTATATAATGCAAATATAAGATATATTTATATTATGTAAGA
AAATACATTTGTGCAATAAAACGCTTATTTCATTCAAGCATATTTGTCCAGCATGGTTTCTTAGAGACTGAAGTTACCCAGTTTAGCACCTGGA
ACTGAATTCACTCTGGCTGTGTTAGATGTAGCACCAGCGTCATGACAGATCCAGCCCACAGCATAGACTGAGGCCTACTCTGGAGGCAAATCTG
CAGACAATGTGGCCAACACATGGGCCTTCCTCACATCTCTGTCCAGTCGCTGGCATCCACGTTATAACACAGCAGTGGCTCGTTTTCTCCAGTT
AAAGGCTAGGCTTCCCTGATTGAAGCAGGAGAGAATTTGGTAGTCAGTAAAGTAGACAAACTAAGACAAAACAAGAGTCGCATGAGTTCTTGGT
ACAATTAAAGAAACCCTTGGCCACCAACGTTTTTAAATTCAGGAATTTCACCAAGTCCGTAACAGTTTTAGCTCTCAAGGGTAGAATTTTTTTT
TTAACTTTTTTGGTAATAATTGTATTGCATGCATTCCCCTTACACAGAAGGCTGGCATTTAATTGGGGTCTTGAACTCAATTGTGTTTTCTGCA
GTTGGTAAACCTCACAAATGTCCATATTCTGGCCGAAGCTATAAACAGCCAACCTCTTTAGAGGAACATAAAGAGCGCTCCCACAACTACTTGG
AAAGCATGGGCCTTCCGGGCACACTGTACCCAGGTAAGCGCTGCTGCTCGGAGGCCAGCCTGGTGGGCTCTCCCCCCAGCACGGTGGGGAAGGA
GGGCGCTCTGCATGCAGCCTTAGGAGCAGAGCCTTGGCCCTGCTTCCTGCCGGGGCTAGGAGGGACGGAAGTTTTTGGCCAATAGCATCAGTTT
CACCAGAAGCACGTTCTGCTTCCCAGCTTTCTAGGTCCTCATCTGACCAGAGAGAGCTTGATTTTAAAACCCTTCCCACTTCCAATCGGGAGAA
ACTCCTAGGATAGCAGTGACCTTGAAAGTTTTGGGGTTGTTTTTTGGATGTTGGTGATTTTAAAACAACAACAAAAAAAACACCTCAAGTAGTG
ATATTTCTTTGTAAACAAAATAAAATGTAAAATATTGTTTTGAAACAATTTTTTAACAAAGTTGATCAAATAAGAACTTTCAGGCTGTGATTTT
AAGCATCAGTTCAGACTGAGGGCAGGGTATCCACTCCTGCATGGAGTGTGAGGTTGAAGTTTGTTGGAAGCCCCTGGTAGTTGATAATATTGAG
GTTGTTGAAGGATGAGAGGAAAGGTCGCTTCTTTCTTAGGAGCTGTGATGCTCCACTGTATTGCATAACGAGATAGCACTTGATTCAGACCCCA
GAGCCTGTAGAATAAATGATGTGGAGAGAGTATTGAAAAAGGCTGGATTTATCTGGGGGAATGGCAATGTTATAAAAGGTTCTTCCCTAATTTT
TTAAGAGATAAGCAATTTATAAAGAGATCAAATAAAACTAATCTCTTTCAAAACAGTATTCATTTAGCACTACCCCTGGAAAAATCATCACTAG
ACTGTGACTCCAAATTTAACGAATCGAGGAAAATTTATTAAGCCTCATTCACCTTTCGGACTTTAACAAATCCTTCAAAAGGGAAAATTCACCA
GAGTACCCTCAGATTATTAATGGCAGATGACAGCAGGAAAAAAGAATGTTGAGAATGGCTAAAAATTGATTCCAATTAGTCTTGGCATGGAGAG
GCAACATCTCACCTGGCCAGAGCCCTGCAGCCAGAGTGCTGTCTCCTCTGCCAGTCAGCCAGGGATCTGGGGCTTACAGGCGATTCCTCCAGGC
CTCAATCTTCTCACCTGTGAAATGGGAAGATACCATTAAATTGTCATTTGGCTTCTTTCAAAATCTCAGGTCTAGAATGGAAAGGCATTGAAGG
TGAGTGGAAGAGAAGAAACTGGATGTTAAAATAATAATAATGTAACAGTTATTAATTCACATGGCCAGACCCCAGGGCAGAAGACTAATGGACG
AGAGGATGATTATGTTCCTTTGAAATAAAATGTCAACATTCAAATATTGTTTTTTTCTGTAAAAAATAAGTGAATGGGTCTTGGAAGGAAGTGC
TCCTAATGATGTAGTTTACATATTAATGCTTAATAAACCATTTTATTTACTCAACAAATATTCACTGAGGACTTATAATCAATAATACCAAGCC
CTATTGAATACAGTAATCTAATATACACATAGAATTGAAAAGACAAAATGAACAAAAGAAACAGACAGTATATCATTTCTGTTTCCTCCACTGT
TTTCATTACTAAAGAAACAAGCTGCAGTACACACCCGGCTGAGAGCTGCTTCCCGGGGAGCAGGAGAAGCAGCACTCATTTCACTCAGACCTGG
GTTTGAGTTCTCTGTTTTTGAATGTGACCCAGAGCTCATCGCTTAAATGCGACTGATAATTCGTGCCTGGCCACCCTCATAGCAGCGCTCTGAA
AGAAACATAAAGGAGTGGATACACGTGTGAGCAGGAGCCTAGACATGTGTCAGGTACTTACCTAAACATGGATGTTTAGGTCACTGACATACTG
ACACCATCAAGCTAATTCTTCTCTATTGGTCTCTATGTCAGTAAGGCTACGTGCCAGTAATGTCTATTAAATATTACCCTGTGGTGAGTATCAA
TTTCACCCTAAAATGTTCATTTATTCCCTTTGGTGGTTAAGTTACTTGGACTACCACAGTGATGCCTCTATGTCCCCACACTCAGGAGGTATGA
AAGCGTCTCTACGAAGGAGCAGTGGTCTGGTCTCAGTGTGGCAGCAGACAAAGCCAGGCTCGCACTTAATTACATTGAATTATTTCTGTCTGGT
ATGGCCTCAAAAGGTGCAAAATGATCATAAATATCTTTCGACAGTCACCTTTGGTTTTTGCCCTTGCCAGCACCTGGCCCTTGTAGGTGCTGCT
GGTTTAAGGAACTTGGAGTATTAAGGGGATCCATAAAAGGACTTTGACAGAAGTCTTCCTGAACTGTGCTTAGGGCCAGCAAGGCAGGCAGGGG
CTTGGTCATTTCAGCTGTGCTGTACCCGGATGAGTGGAAACTGTGCCTTCTGATGCATCTCTCCTCCTCTGTTCCCCTCTAAGAACCCCTTGTC
TGTGCTCACATGGATGAGCAACTAGTCTCTTCTCCCACCCCAAAAACCTCCTTAGATTGGGTGGATTCAGTAAAATCAAAGGCTCAGTTAGGCA
ATATAGGAAAAGATGAATTTTTGTGAATATAATTTTCTTTAGTAAAAGGCTTTTCGTCACCTCTTATAATTTCTCAATGTCTTTATGGAAAAAA
TAAGTTTCTCTTGAGCCTTTGGTGCACAAACAGAGTCACCAGCCCTTGGAGGTGCATGCATCTAATGACAGAGCAGCCTGTCACTCGCGAGCAT
CAGGCTCACTTGTTCCTTCCTGTGATTGTCTCTGGGGGGTGGAGGCTTTTGGGAGGCCCTGCGCCATGGTGCAGAGGAAGACCCCTGACCTCTG
GCAGCCCTGGGCAGGCTCTGGGTGTGGCTTGGCAGAGAAGGATGGACATGTCAGGAAGCATATTAGCTTAATAGATGAAGTGTGTGACCAGTGT
AATTCCGTTTTATGGATTTATATTTATCTTGCATATAAATCACGGTGTCGCCTATATATGTTTGCCCATTTAATAAAAAACACATATTCCAAAT
GTTAAAACATAAAATATACCAGCAACAATAGCCAATTTGAAATATATGTTTTCAAAGTAACATTCATAATACCAATGAAGACATAAATACTTAG
AAATGAAGAAAACCAGCAAGCCATAGTGAGGCAAGAAAGAAAACATGGGAGATTGGAGAGGTAGAGAGGTCTGGATGCCGTCCATGGGCCTCTG
CCCAAATTAGTGTATCATTTCAACATAAAACTGGCTTGTAAATTTTACTGGAATCTGGTAACCATGTATCATAAAGTATCTGGATATATACATG
AGATAATTGGCAACTTTTTAAAAGAAGAATAATGTCAAGTGATGTATGAAAATGTAGCTGAAATGGATGGAACTCTTTGAAGAATAGACAAACA
AATCAATAATAGAGATGGATACCCTACTGAAGACCCCATGATAAATCAGCATGAAATATCCGAGGCAGGAGGAAGCATAAGGCAGGAACGGTAT
TGGAAGAATTGATCAGGCATTTAAGATAATCAGTTTACATTATCATCTCCTTATACACTAGGATAAATTGCCGGGAAATGAAAGAGTTATATTT
TTATAACTCCAACCACAATAACTGATGTAAATATAGATCCAGCTATGCAGGATACAAAGTTGTATCTTCAATTATGGAAAGAGATGACATAGAA
CAATTGAGAATGACTACAAATGGCCCACACATCAGCATTTACCTCCATAATTTCTAAATTTTCTACAGCAGTCAGGGGTGCTTTGATTTTCAGG
AGTTTGTTGTATGCTCAGGGATAAGGGGCTCTGGGTTTTTCCTCCACATTGCCCAGATCTGCTGTAGGCTCTTGGGGGCCACATTTTTGTATCT
CCGTTCACTGTGCTGGTCCATGAAGTCAGATGTTAGATCACACAGTTCTTTGCGTCTCAGAGGGCTGCTGTTAGGGACTGACTGAGGTAGCAGA
TTTGGGAGTATTATGAAAAGTTAAAAGGACTTGTCAAAGGGACATCAATACTTAATCCCAGTCCAGCCTCTGGTGATGGTGGTGGTGCCTGTGC
ATTTGGACTTAAAGAGGATGATGTGTGGTGAGCAGCTGTTGGAGGAACAAGCATTTCCAGGTGGCTGGTCATTGGCATTGCTCCGGCTGCCTCT
GCCTCTCTGGAAGTGTTGCTGGGAAGATTAGAATTAATCTCTAGGAAGGGCCTGGCTCTTCTAGGCACTTAACAAATGTCACATTTAACATTGG
ACGCGACTGAACCCTTTAAACATAAGCCTTTCTAAACTGGCCTCTCTGTCTTTGACTTTAGTCATTAAAGAAGAAACTAATCACAGTGAAATGG
CAGAAGACCTGTGCAAGATAGGATCAGAGAGATCTCTCGTGCTGCACAGACTAGCAAGTAACGTCGCCAAACGTAAGAGCTCTATGCCTCAGAA
ATTTCTTGGTAAGAGTTAAATGTTTGCTGTCTCTTAAAAAAAAACTATGTCGGTGTTTTAGATGCAAGTAGAAATGAGTTGAGGGTGGAAGAAA
GGGAAAAAAATCTTATTTTTTCAAAAGGAAAAATTGGTAAGCTTAACATTCCTTAAATATCTTAGAATTTTTTCCAATAAGTATCTTAAAAATA
ACAAACCTCCCATCAGTTTTTCCTAGATTTGATTTTGCAGCATCTGGGGCCTGCCCTGTGATCTGCCTGTGGACATCGCTCTTAGGGGCGGCTG
CACCAGCGTGCACAGGGTGGAGAGTTTGGCCCTGGCTCGTCCGGGGGACACCACACTGCAGGACACTCCAGGCCTGGCCGGCTTCTCAGAGCTT
CAGATCCTCATTTTTCATATGAAGCTCCTAATGCTCCCCTTATGGGGGACTCTGAAGGGTTAATGGGAGGAATCATACAGTGACTGACCCCTGA
GAAGTGTCCAGTGAAGACAGGGCTTAGCTAGGATTGCTGTTTTGCCTAATGCTCTGCGGGATTAAAAAAAAAAAAGAAGAAGAACAAGACCATT
CGTCTCTCTAGGAGCATTGCCCAGAGTAGGTATTAGACACACCAACACCACCATCCAGCCAGACGCTGCAGGGACAGTGAGCCAGGGTCCGAGT
GGAAAGGCGCTAGGCTTGGGAACCAGCTCAGAGTCAATACAGAGCCACCGCCACTCACCAACTCTGTCAGCTTAGTAAAATGGCTCTGCCCCTA
GAGCCCTGGTTCCATCCTTTAGTATCTCACAGGGTGATTGTGAATATCCCATGACTCCAAGATTGAGAAAACGTTTAGAATCCCTCGGTGTGAA
GGTTAACTCTGTCCGGAAAGAGGACCAGTAAAAGCTTCATGAGGCTGAGATGCACTTTGGAAGAGGAATAGAGTTTCAGCACATTCTAGGTGTT
GGAGGAATGGGGGAATCTAGGCACATGTTTAAAATCAATGAGAAACCAGAATGCTGACCATGAGGGTTGGAGTGGGGGCCTAAGGACATGACGG
AGGAGCAGGGTGTGTTCCCAGCTTAACTCAGGTACCCATGGGGAAGCAGGAAAAGTGAAGGTGTCCTAGCCAGCTCTGCCACAGGATGAATGGC
TTCAGATGCCAGGTGAGCGAGGGACCCTTCATTCAGTCAGCAGGAAAGAAGCACTGGCATATTTTTTATGAGAACAAAGGCTAGGATAGTAAAG
ACAGCAAGTACCAAAAAATGACTGGAAAAGGGAGACTGTGGAGGCAGTGGCAGCAGGCATCGAAAGAACCCCTTCTCAACCGGAAGGGGTGGTG
TCAGAGGAACATAGGGCTGGGGGCAGGGATTAGGTGAGGGAAACCATGAGTCACACTGATTCTAGAGTAGTGTGCCCTTGATGAAAAGGATAAC
ACCAGGTTCTAGGAAAAGATGGGGTTCTGTTTTTGACGTGTTGATTTTCAAGGACTTCTGGTGTTTGTGACACATGGGGAAATTGTGGTGGGAG
AGAGGTGGGGCCAGAACAGGGGCTGGTGAGGCCAAGGGTCCCAGAGGGCACCTGTTGACCTGCAGGATGACATGAAGGGGGAAGGACAGAGGCA
AGGCCAAGTCCTGGGCACCAGCCTCCCTCTTGCAGCTTCAAATAGGGCTCCATTTTGACCTTTTGATTAATTAGAGGTTTGTCATACGTTGGGG
GTTGAGAGGAGCAAGGGAGAGAAGGATTCAGTGTACAAAAAGAATGAAAGCCACTGGCTCAGCCAGTGGCGAGTTGTCCACACACACATGAGCC
TTTGGACCATGAGAACGAGGGAGGCCTTGCCTTCCTGAACCGACTAGGAGTGAGGTCCTGTGCTGACCGTAAGCAGTGGGATTCCCACAGCACT
GGGCACAGAGCCCACGGGCTGCCTCCTGAGCAGCCAGCATCTGCCTGGGGTGGACACAGTGACAGAGAGATGGGTGGTGACTCGGGTATGGGCA
GAGATAAGGCAGCAAGTGTGTGCAAGCGCAGTGAAGGGTTACTGACCTTAAGAAGCAGGGATGGCGTCCTCTGTCAGGTGAGGAGCCTGGAGAA
TGCTTTCGTGAATGAACGTTTGCAGCCCCTTTTAGCTTTTCCACACTTGAAACCAAAGCAGAAATTCATCTGTGAAACTCTACTGGAGCCACTC
CCCAACCCCCACCCTTGTGAGACCACAATGTGGGCGTTGGCTTGAGATGCTTCTGTGTTAGTAGAAGAAATAAACAACACAGTGCTCTGATGAG
GCAAAGCGAAGATGAAAAAGGAGTTCCCAGGGGACATAGTAGGAACAGTGGACGAGGGTAGCAGAAGAGGAGTTTCGAGCAAAAGACTCACAAG
CAGCTGCATAATCTGTTGGTGCTTGGCAGTTCATTTGTAAAAATGATGCCTCTTCC
HUMAN SEQUENCE - mRNA
GAATTCCGGCGTCGCGGACGCATCCCAGTCTGGGCGGGACGCTCGGCCGCGGCGAGGCGGGCAAGCCTGGCAGGGCAGAGGGAGCCCCGGCTCC
GAGGTTGCTCTTCGCCCCCGAGGATCAGTCTTGGCCCCAAAGCGCGACGCACAAATCCACATAACCTGAGGACCATGGATGCTGATGAGGGTCA
AGACATGTCCCAAGTTTCAGGGAAGGAAAGCCCCCCTGTAAGCGATACTCCAGATGAGGGCGATGAGCCCATGCCGATCCCCGAGGACCTCTCC
ACCACCTCGGGAGGACAGCAAAGCTCCAAGAGTGACAGAGTCGTGGCCAGTAATGTTAAAGTAGAGACTCAGAGTGATGAAGAGAATGGGCGTG
CCTGTGAAATGAATGCGGAAGAATGTGCCGAGGATTTACGAATGCTTGATGCCTCGGGAGAGAAAATGAATGGCTCCCACAGGGACCAAGGCAG
CTCGGCTTTGTCGGGAGTTGGAGGCATTCGACTTCCTAACGGAAAACTAAAGTGTGATATCTGTGGGATCATTTGCATCGGGCCCAATGTGCTC
ATGGTTCACAAAAGAAGCCACACTGGAGAACGGCCCTTCCAGTGCAATCAGTGCGGGGCCTCATTCACCCAGAAGGGCAACCTGCTCCGGCACA
TCAAGCTGCATTCCGGGGAGAAGCCCTTCAAATGCCACCTCTGCAACTACGCCTGCCGCCGGAGGGACGCCCTCACTGGCCACCTGAGCACGCA
CTCCGTTGGTAAACCTCACAAATGTGGATATTGTGGCCGAAGCTATAAACAGCGAAGCTCTTTAGAGGAACATAAAGAGCSCTCCCACAACTAC
TTGGAAAGCATGGGCCTTCCGGGCACACTGTACCCAGTCATTAAAGAAGAAACTAATCACAGTGAAATGGCAGAAGACCTGTGCAAGATAGGAT
CAGAGAGATCTCTCGTGCTGGACAGACTAGCAAGTAACGTCGCCAAACGTAAGAGCTCTATGCCTCAGAAATTTCTTGGGGACAAGGGCCTGTC
CGACACCCCCTACGACAGCAGCGCCAGCTACGAGAAGGAGAACGAAATGATGAAGTCCCACGTGATGGACCAAGCCATCAACAACGCCATCAAC
TACCTGGGGGCCGAGTCCCTGCGCCCGCTGGTGCAGACGCCCCCGGGCGGTTCCGAGGTGGTCCCGGTCATCAGCCCGATGTACCAGCTGCACA
AGCCGCTCGCGGAGGGCACCCCGCGCTCCAACCACTCGGCCCAGGACAGCGCCGTGGAGAACCTGCTGCTGCTCTCCAAGGCCAAGTTGGTGCC
CTCGGAGCCCGAGGCGTCCCCGAGCAACAGCTGTCAAGACTCCACGGACACCGAGAGCAACAACGAGGAGCAGCGCAGCGGTCTCATCTACCTG
ACCAACCACATCGCCCCGCACGCGCGCAACGGCTTGTCGCTCAAGGAGGAGCACCGCGCCTACGACCTGCTGCGCGCCGCCTCCGAGAACTCGC
AGGACGCGCTCCGCGTGGTCAGCACCAGCGGGGAGCAGATGAAGGTGTACAAGTGCGAACACTGCCGGGT3CTCTTCCTGGATCACGTCATGTA
CACCATCCACATGGGCTGCCACGGCTTCCGTGATCCTTTTGAGTGCAACATGTGCGGCTACCACAGCCAGGACCGGTACGAGTTCTCGTCGCAC
ATAACGCGAGGGGAGCACCGCTTCCACATGAGCTAAAGCCCTCCCGCGCCCCCACCCCAGACCCCGAGCCACCCCAGGAAAAGCACAAGGACTG
CCGCCTTCTCGCTCCCGCCAGCACCATAGACTGGACTGGACCAGACAATGTTGTGTTTGGATTTGTAACTGTTTTTTGTTTTTTGTTTGAGTTG
GTTGATTGGGGTTTGATTTGCTTTTGAAAAGATTTTTATTTTTAGAGGCAGGGCTGCATTGGGACCATCCAGAACTGCTACCTTCCTAGATGTT
TCCCCAGACGCTGGCTGAGATTCCCTCACCTGTCGCTTCCTAGAATCCCCTTCTCCAAACGATTAGTCTAAATTTTCAGAGAGAAATAGATAAA
ACACGCCACAGCCTGGGAAGGAGCGTGCTCTACCCTGTGCTAAGCACGGGGTTCGCGCACCAGGTGTCTTTTTCCAGTCCCCAGAAGCAGAGAG
CACAGCCCCTGCTGTGTGGGTCTGCAGGTGAGCAGACAGGACAGGTGTGCCGCCACCCAAGTGCCAAGACACAGCAGGGCCAACAACCTGTGCC
CAGGCCAGCTTCGAGCTACATGCATCTAGGGCGGAGAGGCTGCACTTGTGAGAGAAAATACTTATTTCAAGTCATATTCTGCGGTAGGAAAATG
ATTGGGTTGGGGAAAGTCGGTGTCTGTCAGACTGCCCTGGGTGGAGGGAGACGCCGGGTTAGAGCCTTTGGGATCGTCCTGGATTCACTGGCTT
GGGGGAGGCTGTTCAGATGGCCTGAGCCTCCCGAGGCTTGCTGCCCCGTAGGAGGAGACTGTCTTCCCGTGGGCATATCTGGGGAGCCCTGTTC
CCCGCTTTTTCACTCCCATACCTTTAATGGCCCCCAAAATCTGTCACTACAATTTAAACACCAGTCCCGAAATTTGGATCTTCTTTCTTTTTGA
ATCTCTCAAACGGCAACATTCCTCAGAAACCAAAGCTTTATTTCAAATCTCTTCCTTCCCTGGCTGGTTCCATCTAGTACCAGAGGCCTCTTTT
CCTGAAGAAATCCAATCCTAGCCCTCATTTTAATTATGTACATCTGTTTGTAGCCACAAGCCTGAATTTCTCAGTGTTGGTAAGTTTCTTTACC
TACCCTCACTATATATTATTCTCGTTTTAAAACCCATAAAGGAGTGATTTAGAACATCATTAATTTTCCAACTCAATGAAAATATGTGAAGCCC
AGCATCTCTGTTGCTAACACACAGAGCTCACCTGTTGAAACCCAAGCTTTCAAACATGTTGAAGCTCTTTACTGTAAAGGCAAGCCAGCATGTG
TGTCCACACATACATAGGATGGCTGGCTCTGCACCTGTAGGATATTGGAATGCACAGGGCAATTGAGGGNCTGAGCCAGACCTTCGGAGAGTAA
TGCCACCACATCCCCTAGGAAAGACCAGGCAAATGGCACTGCACGTGAGAACCCCGCCCATCCGTGCTATGACATGGAGGCACTGAAGCCCGAG
GAAGGTGTCTGGAGATTCTAATCCCAACAAGCAAGGGTCTCCTTCAAGATTAATGCTATCAATCATTAAGGTCATTACTCTCAACCACCTAGGC
AATGAAGAATATACCATTTCAAATATTTACAGTACTTGTCTTCACCAACACTGTCCCAAGGTGAAATGAAGCAACAGAGAGGAAATTGTACATA
AGTACCTCAGCATTTAATCCAAACAGGGGTTCTTAGTCTCAGCACTATGACATTTTGGGCTGACTACTTATTTGTTAGGCGGGAGCTCTCCTGT
GCATTGTAGGATAATTAGCAGTATCCCTGGTGGCTACCCAATAGACGCCAGTAGCACCCCGAATTGACAACCCAAACTCTCCAGACATCACCAA
CTGTCCCCTGCGAGGAGAAATCACTCCTGGGGGAGAACCACTGACCCAAATGAATTC
HUMAN SEQUENCE - CODING
ATGGATGCTGATGAGGGTCAAGACATGTCCCAAGTTTCAGGGAAGGAAAGCCCCCCTGTAAGCGATACTCCAGATGAGGGCGATGAGCCCATGC
CGATCCCCGAGGACCTCTCCACCACCTCGGGAGGACAGCAAAGCTCCAAGAGTGACAGAGTCGTGGCCAGTAATGTTAAAGTAGAGACTCAGAG
TGATGAAGAGAATGGGCGTGCCTGTGAAATGAATGGGGAAGAATGTGCGGAGGATTTACGAATGCTTGATGCCTCGGCAGACAAAATGAATGGC
TCCCACAGGGACCAAGGCAGCTCGGCTTTGTCGGGAGTTGGAGGCATTCGACTTCCTAACGGAAAACTAAAGTGTGATATCTGTGGGATCATTT
GCATCGGGCCCAATGTGCTCATGGTTCACAAAAGAAGCCACACTGGAGAACGGCCCTTCCAGTGCAATCAGTGCGGGGCCTCATTCACCCAGAA
GGGCAACCTGCTCCGGCACATCAAGCTGCATTCCGGGGAGAAGCCCTTCAAATGCCACCTCTGCAACTACGCCTGCCGCCGGAGGGACGCCCTC
ACTGGCCACCTGAGGACGCACTCCGTTGGTAAACCTCACAAATGTGGATATTGTGGCCGAAGCTATAAACAGCGAAGCTCTTTAGAGGAACATA
AAGAGCGCTGCCACAACTACTTGGAAAGCATGGGCCTTCCGGGCACACTGTACCCAGTCATTAAAGAAGAAACTAATCACAGTGAAATGGCAGA
AGACCTGTGCAAGATAGGATCAGAGAGATCTCTCGTGCTGGACAGACTAGCAAGTAACGTCGCCAAACGTAAGAGCTCTATGCCTCAGAAATTT
CTTGGGGACAAGGGCCTGTCCGACACCCCCTACGACAGCAGCGCCAGCTACGAGAAGGAGAACGAAATGATGAAGTCCCACGTGATGGACCAAG
CCATCAACAACGCCATCAACTACCTCGGGGCCGAGTCCCTGCGCCCGCTGGTGCAGACGCCCCCGGGCGGTTCCGAGGTGGTCCCGGTCATCAG
CCCGATGTACCAGCTGCACAAGCCGCTCGCGGAGGGCACCCCGCGCTCCAACCACTCGGCCCAGGACAGCGCCGTGGAGAACCTGCTGCTGCTC
TCCAAGGCCAAGTTGGTGCCCTCGGAGCGCGAGGCGTCCCCGAGCAACAGCTGTCAAGACTCCACGGACACCGAGAGCAACAACGAGGAGCAGC
GCAGCGGTCTCATCTACCTGACCAACCACATCGCCCCGCACGCGCGCAACGGCTTGTCGCTCAAGGAGGAGCACCGCGCCTACGACCTGCTGCG
CGCCGCCTCCGAGAACTCGCAGGACGCGCTCCGCGTGGTCAGCACCAGCGGGGAGCAGATGAAGGTGTACAAGTGCGAACACTGCCGGGTGCTC
TTCCTGGATCACGTCATGTACACCATCCACATGGGCTGCCACGGCTTCCGTGATCCTTTTGAGTGCAACATGTGCGGCTACCACAGCCAGGACC
GGTACGAGTTCTCGTCGCACATAACGCGAGGGGAGCACCGCTTCCACATGAGCTAA

[0290] TABLE 26

MOUSE NOMENCLATURE
ICSGNM Tbx21
Celera mCG13239
HUMAN NOMENCLATURE
HGNC TBX21
Celera hCG27200
MOUSE SEQUENCE - GENOMIC
TTGGCAGCAGGGACAAGCAGAAAAACTGGGGTTTTGTCTCCAAAATCACTGAGAAAGGGATTAGAGAAAGCAGAAGCCAAATGGGGTGATATGT
CTAGGGTAGCAGGTGTTCCGAGAGGCCCCAGAGCCCAGGCCAGTGCACACAGGCACAGATATTTCCCCCTGCAGGGCAAGGAAATGGACTGGTA
TTTCAACTTCCAGCTATTGCTTCAGATGCTAAGAACTTGCCTGACCCTGATGCTAACCTCCCCTCCCTGACCCACAGTGTCAGAATCTGGTGCT
GGTGACAGGAAAAAAACAGGCGGGTATTAGGGGAGGGAGGGAGGGAGGTGTGTGTGTGGGAACTAATAGGCTACCTCACCAGCCACCCCACCCC
CAGCCATTTCTAGGTCCTGCACAGAATGCCAGCTGCCCATGGCCCTGGTGGGAGGAGGTTTCCACGGTGCCTTGTGATACACACTGGGTCGCTG
AGAGGGGTGAACTATAGACATCAGGCCTCAGGGAGATCACAGACTTGTGTGTCAGAGTGAATCTGCATCTGGGGTGATAAGTGGGGTTAATCTC
AAGGTCAGATCTAGCCAATCCATTTTCATGCCAACTTGGCCCTGGGTGCCCTGCATGGTGGCAGCTGAGACTCGGATGTCCCCTTTACTAGAGA
TGGTGCCTTGCCTGGCTTGTCTCCCCACTATGGTTATCGGTTTCCAATCATTACCTTTATTTCTATTCCATTACCTAGAGATCTAAGGACCCTG
AACGGTCCTTACTGTTCGCTGTTTTAGGAGACTCAGAAAAGAAATGGGATTGAGAGTGAAGGCTCATGGGAAAGGATGTCCAGCCTGAGGGAGG
GGCGGAGCCCTAACCCATCAGGCATCTCAGATAGATACACAAACCAGACTCTCAGCCTCTTTGCTCTGCTCCCTGGGGTTCATCGCACTGCCCT
ATGCTCTCGGGACTCACCTCAGGCTCTGCCTTTTACAGGCTGTGACTGTCACCATGTTCATAGGAAGAGGGGGGACTAGGAAAGCTCTAAGAAT
AAGCTGGAGGGCCAAAGTAGACTCCAGCAGGACTCAGAGTTGCTAAGGTGATAGAGAGGAGGCAGTTTGGAGAGGCAAGAAACTGGGTGAGTTG
GCTAGCTGTCTTTGCAGCAGTTAACCAGAGACTAGAGAGTGAGAAGGACTTCCATACAGGGTCTCTGGTGTTGGAGTGCAGGGAGTGCAATGTG
GCTAGGGTGGGCTGGGTGAAGGAAGATCTATGCTGTCCTTCCTTTAAGGAGGAATCTGTCCAGAGGGGACTAAAAAACAGAATTCCAAACAACT
CATGAACAGGGCCAGGCCAGCATCTTCTTGTCCCCAGTCCAGCCCCCGCCTCTGAAGCCCCCCCCCCCCCGCACACCTCTGGAAGCCCTCCTCA
GCACCCCCACCCCACCAAAGCCCACAGCCCTGGGGAAGCTGTGTGGCCTTGTCACCACGGACCCAGTGTCGTGCCGGCTGTGGCTTCTTCCTTC
TGACCTATTTTTTAATCATTTGATAAGATCCCCCCTCCCAAACCAAACCCCGGCCCCCGGGCCCGTCAGCTCCACCGCGTGTCAAAACCACCCT
TGTCAGTTTGCGTTGGTTTCTTAGTCCAGTAGCCCCTCCCCTCAGGGCCTGAGAGCGAAGGCTAATTACCCAGCTGCTGAGTGCATTCCCCCCA
CCCCACCCCCTGCTACTCCACCCCCAGCCCCAACAGAGGGGGCCCTGGAGGCCTGCTGCTAGAAGAAGCTGGGGCCTCCTTTCCCTCCTATTGC
AGGGCAGGAAGTCCTTCCTGCTGTCTAACCTCCATTCTTTTCTCTGTCCTGCCCCTAGTGGTGCTGAATGGCAGATGCAAGGACTGATATTCTA
GACTGGAAGGGACTTTGAGGCATCATCTCCTTTAAGGAAAGTAAAAGTCGCAGCCTCCTGACCTGGATTTAGAGATGTCCTCCTGGGTCTCACA
GAATTGTAGGGGATGGTCTCTGCCAAGGGTCTCAATTACAGGACAGAAAACTGAGATGCAGCGAGAGAAAAGGACAGGCCCAAGGTCATGTTCG
GCTGGTGGGGTAGCTAGGATCAGAACCCAGACCTTTCTGTCTTTCTGTCTGTTGCTGGGTCTCCCTCACTCCATTCTGTTTCAGTTTCTCCCTA
CCCGTGTGTGTGTGTGTGTGTGTGTGTGTGTGTGTGTGTGTGTGTGTGTGTGTGTGTTGATACACACTCTATGGGAGCTTGTGGAGGCCACAGG
TCAGTGTTAGGCATCTTCTTCAACTTGGTCTTCAAATACATTTATTTAAACATTTTTTTTCTAATGCGTGCAAGTGTTAGCATACATGTATATA
TGTCATCATATGGATGTGTGGTGCCCTTGGCCGCCAAAAGGGGAGTTACTGATGTTTGTGAACCACCATGTGGATGCTGGGACTGGACCTGGGT
CCTTTGCAAGAGTAGTCAGTGCTCTTAACCATTCAGCCATGTCTCCAACCCTCCCCGCCCACACACACTTTTATTTTTGGAGATGGGGTCTCTC
ACTGAATCTGGAGCTTGCCAGTGTGACTGGTCTGGCTGGCTGGTCACTGGGTCCCAGGAATCCTGCAGCCTCTTTCTTCCCAGAGCTGGGATAA
TAAGTGGATATGTTGTGCTTAACACAGAGGTGTGGGAGAGTTAACTCTGGTCCTCATTTCTTGAAACGAGCCCTTTATTGACTGAGCCCATTTT
TCATTCTGTCTTTGTTTTTGAGACAGAGTCTTACCATGTAGCCCAGGCTGGCCTGGAACTCAGCATCTTCCTACCTTAAACCCCCCCCCCCCAG
AGTGCTGACATTCTAGGCATGTGACACTACACCCACCTTATTTTCTCAGTGACTCAGTCCTTATTCCCTGAGCAAGGACATCACTTCGTGCCCC
TTGCGAGCCTCATCCTCAGGTCTGGGGTTGTCCAGCTTGCTCCATACACCATTAGAGATTGATCACTCCTCCAGCGTGTAGCTGCTGTCCCCTC
TTCCCTCAGACTATCAGCTGCTCCATATCAACTTACCCTGTCACATTATCGAGAAGGGCAAAGCCAAGCGTCTGTGTGTGAGAGAGGCCTCAAA
AAGGAGGCCCTGCACCAGGTATACAGGCATACAATAGAGTGCAGTTGGACTGGCCTTGAGGCTCTGACAGACTTGGAGATGCAGAGACAGACAG
ACAGACAGACAGACAGACAGACAGACAGATACAAATCCATGATAGAGATCACAGTAAGTTCTTGGAGCCAGGGATAACAGGAATACTCGAAAAG
GCAGGGACAGAGAGAGACCCTATTATTCGACATCAGCAGGCATATTTGTTATGAAATATAATGCGGCAAGGGGGTACCTGGCACAACCATGCCA
AGGTGTGTCCATGAGTAACTACACCACACAACAGAGTTGGTATAAAGAAAGTTTACTGGGAGAAGGGAGAAGAGCAAGGACTTGGAGCAGGGGT
AGAGGCAGGAGAGTGGACATGTAGACAGACGGACAGATGGGAGCAGACTCATGGGGGCAGAGAAGTGGCCAGGAGAGGGAGCAGAGAAGGACAG
GAAGAGGGAAGAAAGAATGCTGGGAACACGTGGGAACACAGAGAGAACTGGGNNNNNNNNNNNNNNNNNNNNATGTAAGCCACTGATAGGTTCC
TGGGAGGAGCCTAGTGGAACTGCTGTAAGCTAACAGTATTTATTGTTGTTTTAGTTTTAATTAATTTTCAGATAGAGTATACTGTAGTCCAGGC
TGGTCTTCAACTTGATAGGTAGGCCAGGCTAGCCTTTAACTTGATCAGGAGTTTGAGATGACCTTGACTTCCTGGTCATCCTGTCTCTACCTCT
CAAGCGCTGGCATTATAGACAAGTCCCACCAAGGCTGACAAGACAGGAGCGGTTCCACAGATCCAGACAGAGGCAGATGCGGCCAAGACCCACG
AAGCTGCAGACAGGACACAAGGCTCTACAGACATGTGCAGGCCACCACCACCAAGGCCAAGAAACACCAACCGAAAAAGCTGTAGTCCTGGTGC
TTAATCCCAGCACTCGATAAGCAGAAGCCGGCAGATCTCCGTGAGTTCGAAGCCAGTCTGGCCTACATAGTTGTAAGCCAGCCAGTGCTACAGT
CTCAGAAAATAAAGGAACGAAGAAGACAGAGAGAGCTACAGACAGACAGACAGGCTCAAGAGCCTGGGAGAAAGCAGGGCTCATGCAGATGGTG
AGGTTAGCTTGCCCGGCCTGGCACTGCTGGACTGTTCAGGAAGCTAGATAGCTTCCCGAGGAGACAGGGACAGAGGAGTCCAGCTACACAGGAG
TTAAGGTTGGCTCTCCAGCCTTGCCCTGGCTTCTCTCTCCCTTCCCTCCTCCCAGGCTCCCTTTACCCAAGGCCCTGGCATTCCCCCACCCCCA
CCCTTGGTAACCAGACCCTCCTTCCTGCTGAGATTAAGGCCTGCCTGCCAGATTCTGGGGTGGGGGGGGCAACACCTCCCCTAGGGCCTTCCTA
AAGCTTGTGCTCACCCTCAGTACCCTGGCAGCCTCTGTGATTACAGGGTTGCTCCAGTGATAGCATTAAGGGAACCCTCATCCCTAGACATGGG
GTGCCTGTGGAAAAGTTAGGGGGGAAAGGACCGTAGTTTGGGACTGAGTTGTTGTTCAGGACCAGAGGGTAAACGGTACCCATCTTAAGAGGTA
TTCAGAGTGCCAAAGGGTGACCCTCAACCCGGACATGAGATCCTGAAGCCCTTGACCTTGGAGTAAACCCCGGGTGCTGGCTACTGGGGATTCC
GACCTCTTGCAGCTGTCGCGGTTGGGGGTGGGGTGTGCTGTCCAGGTGCTGGCCACTGCCCTGCCCTCTCCCTGCTAAGCCGTCGGTTCCGGCC
ATGGGCATAGCCATGCTCTCTGAGGACTGGCTGGTCTGGGCCCTGAGCTGGGAGGGCTCCAGGGTGGGTGGATAACAGTGGGATGTGAGCAGAC
CTGAAGGCAGGATTGAGGGGTTATCTTGAGGAGGACTCTGTGTTTGGCATGTTTATGTACATGGGAGGAACCGGTGTGTGCAGGAACCTATCTG
GGTTGCCAGTCTGCCTCTGGGCATAAGTGGCCTGACGTACAGGCGAGATCTGAAGTGCATGGTCACTCACCTAGCTGGGAGCTCTTGGGGGAGA
AGGCTAATTCTAAGTTTTCAGAGTCCCCAGGCCTAGTTGATTACAACCGGCAGGAAATGGTGTACGGGGTCAGGAGGGAAGCAGGCTTGCCCCT
ACTCACTGAGAGGAGTCTCCTGAACAGGTTCGCTTCTGGCCCCAGGTCCTAGTGGAGGAGGGGGTGAGCATGAGGGGTCTTTTGTGGAGGACCC
ACAAAGCTAGATGGAAGACAGGGAAGATGTGGGTGGCTGGAAGCAAGAGACAGGCAGACAAGGCAGCACAGCCTGGGCCTCCATTCCCTTCCTT
CCTCAGGGCAAGGCTCTCGGCCTTTAGAGTCCAAATGAATCTTTTTCACTGACAAGGAAAGCAGAGCTGTCAGGATGCAGGGCAAAGGTCACCC
AGAGAGTGAGGCTTGGACTTGGGGGGTTCCCACCAAGCCACCTGTGGAAGATATTGTTTCCCTTTGTCAGGCTTTTGATACCCCAAAGCCTTTT
AGCTTCTGAGGTCTTTGCTTTCAAGGGCATCCCCCTTCCTTGTTCTCTCCCCCCCCCCAGGGGCCTGAGACTTTCTCACTGAGTCACAGCTAAG
GCTCTGACTTCATGGTTTCTTGACTCTGAATCTCTCCTGAGCATATCCTGAGCCAGGGACTCCTTCCTCTGAGCGCCTCGTTCAATCACTGTTC
TGGCCTCTGTGGTTCCAAGGCAGAGACTTGGCTCCTGGTGCCCTGGGCTCTGGGCCACCAGCCCTACCCACCCCCCACTCCGTTTCTATCCTTC
ACTGCAACCCTGGGATGGAGGACTTGGTCCTGCACACATGTTCAGGAGAGGATCAGGCCCACTGATGCACCTGAGAAGGGAGAATCTGCCCGTA
GAGTGTCCACCAGGGCACTGGAACGCCTGCGATGTGGCTTCCCTTGCCTTTCATCCACCTATTCCCTGTCCCTGGAAGTTTCTGACTTGGAGAT
AGCAGAGAGGAAGAGGGAGGATCCTGGACGTGGGATGTGAGGCATCCTCAAAGGCTATTGTCACCTTAAGTTCTTAACTCAAGACACTGTCGGG
CCCCAGCATCAACATTGTCTAAGGAGCAAGTCCCAGAAACCCACATGACAGCTTGCTGGGACAGGTGGTGGCTTAGAGGAATGACCAGGGCTGT
GTGGCCTTGGGAGAGAATCCCTGGTACTCTGTGTCTTAGACTTGAAAGAAGTCTTGCGCACTTGTAGAACAGCACATGGTGAGGAGAACCAGTG
CCAAGTTGGAGGGCTTAGGCTCAGCCCTAAGCCTGGGGTGGGAGGTGGCAGTCTCTCCCCGCTGCTCCCTGTTTCCCTAATCTTTTCTAAGAGA
CTATCAGACCTTTTCTTTTGTGTGGTGCTGGGGATGGAGCTACAGTCTCCTACATGCCAAGTGTGTCACATATGTGCGTGCATATATACCTGCT
ATACCACCATGCCCTCATCCCTTGGCTAGTTTTCATTTACTTGACTTCTGGAAAGAACGCTGGGCTGGTCATCTACCTCAGACCCTCCGCCCTA
GCTCTGTGGCTAACAGGGTGTGTGACTTCTGAAGTGTTCTGTCTCCCACGTTCCCCAGGGCCAGCCTATGGGTAGCACGTACTGGCAGGATCAG
AGAGGGGCTGGGAGCAGCAGCCACAGGGCAGAGAGGGGATCCCAAGGGGGCCTCCTTTCCTCAATCCTGGCTTCCCACCTCTCTAGCCCTGGAG
ACTGGGAAGGGGGGTTGAGGTGGCAGCAGGAGGTGTCACTGTCGGGGTTCTTCTTCTCACCCAAGCTGGCAGAGGGGCGGGACTGGCAGTGGTG
ACACCAGGGCCACTCAGCCCCCGCTTTTCACAAGCACTTTCTTTTTTGGGTGAAAGAAATTAGAGGGAGTGGGGGGGTGAGAGTGGTGAGAATC
TGAGGTTAATAAGGCAGGCTCTATCGACCCATCAGGTTATGGGGAAACCATTCTCGGGCCCCCCTCACTCCAAAGATGCACTTCCAGGACCACC
CAGCTGTGATAGTCATTCCCTTCTGCTCTGAAGAGCTTGTTGGGAGCATAGAACATTTTGTTCCGAAGCAGGGGGATGGCTCACTTGACCTGAG
GATCAGCGTGGAACATCAGGGATGGAAAGGCTGAGGAACAAGACTCCATTTGGCCTTTCACAATGGGACACTCAGCAAAAATGCTCCCCCAAAG
AGTTGTCGGTGTTCAAAAATTTTACCTCCTGGGGAAATCAGTCATTTGAATGAATCCCAGAAATCTATTTTCCACCATAGGGAGCCAAGGGTGC
AAAGGTCACCTTCTTTCAAGTCCTGGTGTCTCATTTTGACCAACAACACACAGAAGCCTTTATGGGCGAGTAGGGGGTGAGGGAGTGAGGAGGA
GGCCAGACCTCGATATCTGCTGCTGTCATGGATCCAGGCCTCATTCTCAAGAGCTGTGCTGATTGTCTGCCCCCACCTTTCCCTGGGTCATGTC
TGCCTCCTGGGGTCCCTAACTTCACCTTCCCCTGGCAGCCTGTCTCTTGGTTCAGCTCTAGTTGGAAGGAGAGTGTCCCCCTGGGTCCCTACGG
GTGAAGTCCTATTGGGCTGGGACAGAGATGTAGAGATGAAGTCACACCCCAGGGGAGAAGTGGGGTGGGGCAGAGATGAGGGAAAGAAATCTCT
TTTTAACGAAATAAAACTGCATGGAAGTATTTTTTGAAGCATTCTTTAAGATGTAAATCTTTATATATTTGACATGCAAAAAAAAAATCCATTA
CACCGTGCTGAGTGAAGAAAAAAACCAAGAACCCACGTGGTAAAGCGGACTGCGAAGTTGATGTAAAATTAGACATCTGTGTGTGTGTACAAAA
GACAGAGACACAGGAGGGTCTATACAAGGGAGGTATCCAGAAGGGTTTTCTTAAAATGTTAATACGGGAGCTAGTATGGGAGGGTGGTGGTTTG
TCTGACTTCTGTTTTTCTTCACTGCCTAGATTTTCTGTACAGAGGATGATTTTAGTCCTGAGGCCAGCAAGATGGCTCAGCAGTTAAAGGCACT
TGTTGTCCAAGCCTGATGACCTGAGTTCCAGACTCAGAACCCACATAAGGATGGAAAGAAAGGACTGACCCCACACAGCTGGACTCTGAACTCT
AAACATGCACCATGGCACAGATGTCCACACACAATAACAAGTAACTTGCTTCCTGGCGGTGACGCCCTCCCTCTGAGATTATGCCTCACTCGCA
AGGGTCTCCTTCATCACTCTCCAGAAGAGGAGAAGAGGAAACACAAGAAAAAGCGCCTGGTGCAGAGCCCCAATTCCTACTTTATGGATGTGAT
ATGCCCAGGATGATATAAAATCACCAGTCTTTTTTTAAAATTAATTTATTTATTATATGTAAGTACACTGTAGCTGTCTTCAGACACTCCAGAA
GAGGGTGCCAGATCTCATTACCGATGGTTGTGAGCTACCATGTGGTTGCTGGGATTTGAACTCAGGACCTTCGGAAGAGCAGTCAATGCTCTTA
ACCGCTGAGCCATCTCTCCAGCCCAAGTAACTCTTAAACGATACTTTACTTCTTATTTACTTACTTTTGAGATAAGATCCCCTGTAACCCAGGC
TGGCCCAAATTGTAGCTGAAGATGACCTTAAACTTCTGATCCTCTACCAACCCTCTCAAGTGCTGGGATGACAGGCATGTGCCACCATGCCCCA
TCTATACAAAGCTGGGGGTGGAACCAGAAGCGTGGGTGTATGCTAAGCAGGCACTCCATCAGTTGAACTATATCCCAGACCCCGGGGATGCTTT
TTATTTCAAAAGAAAACTCCCAATGGATTCATTTTCAGTTAGGAGGTGAGATTCTTCTCAAAATGCAGGACTTACCGTAGTTATTGGAATAGAA
CAGCGGAGGAAGGACTGTCTGTCTCCATCAGAGCAGGTGCTGGGCTCCCTGTCAGCCAGCTTGGACTACATACCTTTGTTTTTTTCTATAATAG
AATGGAAACAGAGGCACACAGACACCGGTTGGTATAAGGTACACAGCCCCTACCCCCAATACGAATATTTATTTCCCCAGCCTACCCCATCAGG
CCTGAGGGACTTTCAGGCAAAGGAAGTGACTTACCCAGGTCCTACACACCCGAGTCACAGTCAGAGTCAGCCCTGGGACTCTGAACACTGACAG
CCAAGCGCTACTTCCCGTGTCTTTCGCTAGCTGTTACGCTGCCACGTGAACGAGCTTTTGTGGGAGCATTTCAGCCAGCCCAGCCCACCGTGGG
CTGCTTTGGGTGCAATCTTCTTGGGAGACAGCTTCCAAGTTTCCTCCTGGGCTAGAGGGACAAGCATCATCCTCGGGCCTGGGGGGTGGGGTGG
GAGGCTAGCGATGGGGGGTGGGGGCGGCGGACAAGAGACAGCGAGCAAACACTTTGTGTAAAGTCACAAAGCCTGGGCATACAGGAGGCAGCAA
CAAATATCTGTTGACTATGGATAGTCTAAGTAGCTCTGAGCCTGCCAGAGGCGTGAGAATGCTCAGATGGTCCCATCTGGGGAAAGGGCCTTTG
CTGTGCCTTCCAGGACTGGCGGAACTTCCTGGGGGAGAGAAACCGTTTCTCTCCTCGAAGTTTCAGAGTTTCAGGTGGCAGGTTGACTCTTTCC
CAGATTGGGGCGACAAGAGACTTACACTTAGGAGTGGGGGTCGGGGCTTCAGTCCTCACCAAAAGCGAATTCGCGCTGTATTAGCCACGAGGGG
GCGGGGCGGGGCGGGGCCAAGGTGGCGGGGTGAGGGGACCCAAGGAGCTTCATAAAGCCACAGCAAAGGCCGCCGCGCCGCTAGTGACAGCGCG
GGCTGCAGAGAAAGCCCAGGAGCAGCTGCGCGCCTATCCAACGCGCGCTCAGGAGCCAAGCGTCCCAGCTCCCGCTCCAGTGAAGTTTCATTGG
TCTTCGGACGCCGCCCCCGTCGCCCCAGCCCTAAGGACCCTCGGGTCTCTTCGACGGCTGCTGGAAGGCGCCCAGCCCGCCTCGGATGGGCATC
GTGGAGCCGGGCTGCGGAGACATGCTGACCGGCACCGAGCCGATGCCGAGTGACGAGGGCCGGGGGCCCGGAGCGGACCAACAGCATCGTTTCT
TCTATCCCGAGCCGGGCGCACAGGACCCGACCGATCGCCGCGCAGGTAGCAGCCTGGGGACGCCCTACTCTGGGGGCGCCCTGGTGCCTGCCGC
GCCGGGTCGCTTCCTTGGATCCTTCGCCTACCCGCCCCGGGCTCAGGTGGCTGGCTTTCCCGGGCCTGGCGAGTTCTTCCCGCCGCCCGCGGGT
GCGGAGGGCTACCCGCCCGTGGATGGCTACCCTGCCCCTGACCCGCGCGCGGGGCTCTACCCAGGGCCGCGCGAGGACTACGCATTGCCCGCGG
GGTTGGAGGTGTCTGGGAAGCTGAGAGTCGCGCTCAGCAACCACCTGTTGTGGTCCAAGTTCAACCAGCACCAGACAGAGATGATCATCACTAA
GCAAGGACGGTGAGTGAGGTGCGCGCCGAGCGCAGCGAGCTCGCAGGGCGGAGCCGGCGGGAGTCTGGCCTCGGTGGCCCGCCGGAACAACGAC
TTTCCTCTTTTTTTTTTTTTTTTTTTTTGAAATCAAAATTTGAAGCTGCAGGTTGCTGAGTCTTTGTGTTCGTAGACTGAGCTTCAGTTTTAGG
AGACGGGGGAGCAGGGTTGCGGGGAGGGCACCGCAAGCTCCGGAGAGCCGCGGGTGCTGAGGGTATCAGAGGGCTCAAAAAGGATGATGCTGTC
GGCGCAATTAGAAGTTACTTTGGTGCAGAGGAAAGGATGACTCTCGCTTCACCGAGAGTTGGCCGGTGGGGGGTGGGGGGTGGGGGACTGGAGG
GGGTTAATTTGCTCCTTGCCTCAGTCTGGGATCTCAGTGGGCAGCGAGGAGTGTGTGTTATAGACCTGACTGACCGCCTTTCGGTCCTTAGGTA
TTCGGGAAATTGAAGTGTTGGGGGCAGAATATTTTTTGAGATCTCAGTGTGCCTGTTCCTTTGCTACTGCTGTGCTTAGGGTAGCTTTGGTGTA
TGGGGGAGGGGGGGAGCAGACTGGGATTTGGTGACATGGAGAAGCGGTCGCCAAGTTTCTTTTCCGGTCTTACTTTGAGATCATATGTCTAGAG
AGGGAGAGAGAGAGAGAGAGAGAGAGAGGAGTGTGTGTGTGTGTGTGTGTGTGTGTGTGTGTGTGTGTGTTGTGTAGAGAGGTGGGAAGCAGCA
AAACTTATAAAGGCACAAATAAATGCCGAGGGCCTGAACGTGCCAAGTTCAAGACCAGTTGCAGCTGGTGTCCAGTCTTGCACTGTGCTCTTTG
AGGCTAGTCCCTAAAAATATGTCCACTTTCTCACCCAGCTATTCATCAGTCCAGCCTGGGGGAAGATGGAGGGGGTCCCCTAAGCCTGTTGCAT
TAGTGGTATGGTTTGTGGCTCAGCCTGCTGCTTCCGGATCGAGTCTCTTTGCTGAAGAAAGAGAAACTTGCAGTTTCTGAGGGGTCATTTATAG
TATGCAACACCTCGAGTGGACCCTCTTGTGTCTTATGGGAAGAGGCAGCTACCTTTCCCAGTGAGGACCAGCCAGAACTTTGCCATTAGTGAGT
TAGGATGTGCGGTATTAGGATGGAGACTCAAAATGTAATTGAGAGATTGCAAGGGTGGGGTTTCTGGGAGGGGGACAGAAACCCTTGCCGGATC
CCAGGAGGCACTGCTAGAGTATATTCCCTTCGGATGATGTGGGGAGAGGGCAGATAGCTGCTAACTACAGCTGGTTTCAGGCTGCTGAGTTCTT
CCTCGCGGGGATGAACTGAGAATAAAACATTTGATTGGTTTTTGGCTCATCCTTCATCCGCAAAGACTTCTGAGGAGTTTCCTCTGCTCCCCCA
ATCCTTCTCTGAGTGTCTCTGGCACTGGCCAGGTTGCTGGTCCTAGAGAATGTCTGAACTGGAAGGATCCAGAAGTCCCTGTCTCTCACTGCAT
AGAGAAACAGACCTAGAGACAGCAGGGGACTCTTCGGAGGTTCCCCAGCTGGGACCAGGCCTCAGATGGCACCTGTCTGCTCCTTTTTTCTCCA
TTCTCCACAGCCACCTACACTGTCTGAAAGCCCTGCGTGGTACACCCAAGTGCTTTCGCTTCCATTATTTCTAGGCGAGCCAGGCAGGGCTGGC
CCGTTTCATACCCACGAATTCTGAGTTGCTGGGATAACCAGTGGCTTACGCTAGTCCCGCAGTAGACTAGGTGGGGCCTCTAACCATGGGACTT
TCTAGTATGTCAGCAACAGGAGGCCCTCTCATCCCGGGGCCTGGCCAGTCCTCTCAATGCCTTGTCAGGCCTCAGCTCCTCCAGTCAGAGAGAG
CATCAGCCACAACCTCAGTGATGGCTGAGCTGGGCTGGGGCCTGTCTGTCTGTGGGCTGGGTTGCTAGGGGAGGCATTTGGAGGGACACACTCT
ATATCACTGGGGCCTGTCTGTCTGTGGGCTGGGTTGCTAGGGGAGGCATTTGGAGGGACACACTCTATATCACTGGGGCCTGTCTGTCTGTGGG
CTGGGTTGCTAGGGGAGGTATTTGGAGGGACACACTCTTTATCATTGGCCTGGCTCTATGGACTCCTCTCCTGTGTGCGCCTATAGGATTTTTT
TCCCATGACCACTTTTGCTCTCTCCCGTTTGGATCGGTGCTCTTATTATTTTAAGTGCTGTAATTGGAACCTGGGGCCTAGTGTATACTAGTCA
TGTTTTTTTGTTTGTTTGTTTGTTTTAAAGCCAGCTGTGGTAGTGCACCCCTTAAGTAATGCACACGCATAATTGGAAACTAGCCTGTGCTACA
TAGTAACTTTCCCCTCCCTCTTTCTTTCTCTTTGCTATGTAGCAAAGGCCTCCTTTGAACTTCAGCTCTTCCTACCTCTGCCTCCCCAGTGCTG
GGATTACAAGGATGTGCCACCACGCATGTTTGACACTCTGTCTCAAGGAATCAAAACTAGTTTACTTTTCAATGCTAAGAATTGAACCCAGGGC
CTTATGTGTGCTCTGCACACACAGTCACACTGCTACTGAGCCACATCTTTAACTTCTTTTTTTTTTTTTTAAGATTTATTTATTTATTATATGT
AAGTACACTGTAGCTGTCTTCAGACACTCCAGAAGAGGGTCTCAGATCTTGTTATAGATGGTTGTGAGCCACCATCTGGTTGATGCGATTTGAA
CTCCGGACCTTCGGAAGAGCAGTCGGGTGCTCTTACCCACTGAGCCGTCTCACCAGCCCAATTTCTTATTATGACAAATCACACTGTATAAAAA
TAAAAGGCCAGGCGTGGTGGCACATTCAATCCCAGCACTCAAGAGGTAGAGGCAGGCAGAACTCTGTGAGTTCGAGGCCAGCTTAGTCTACAAA
GTGAGTTCCAGGACAGCCAGGGCTACACAGAGAAACCCTGTCTTGAAAACATCAAACAAACACACAAGACCAAAAACCCAAAAAACAAAAATAA
ACATAAAAGTAGAAAATATATCATCAGGCTTGGCTTTAAAACTATTCAGTATTGGTCTGGTCTTTTTTGTTGTGAGTTATTTTGCTTGTTTGGT
TTTTGTTTTCTTTTTGACTCGGGGTCTCACTCTACAGGCTCAGCGGGCCTGGAACTCACTATAGAGATGGGGCTAACCTTGAACTTATAGAGAT
TCCTCTGTTCTTGCCTCCTGAGTGCTGCCATTAAAGGCATTTGCCACCTTGTGGGTATTTTGAGATAGGATCTTGCCTTGCAATCAAGATTGGT
CAGCAATTGTTGATCTTTCTGCTTTGAATCTTTATGTTTCTCTGAAAATGAATTTCGGTTGAGACAAGATCTTAATTCATGTATTCCAGATTAG
CCTGGAATTCTCAACCCACCTGCTTCACCCTCGGGAATGCTGGGATCACAAGTGTGCACTGTAACCATGCTTGACTTAAAAGTGGAATTAAAAA
AAAGGGGGGGCTGGCAAAACGGCTCATTGGGTAAAGGCACTTGCTGCCACACCTGACAACCTGGGTTTGATTGCCCTGTGGGTTTGATTGCCAG
GGCCCAAATGGTTGAAGGAGAGAATTGACTCCCATAGATTGTTCTCTGAACTCCAAACATACACTATGACATGTGGGTATTGTCCACCACTTGC
ACCATCCAAGAAAAGAAAAGTAAAAATAAGAAAAACAACAACAAAACAAAACAAATAAAAAACAAAACAAAACAAAAAAATCAACCAGGGTTGA
AGAGATGGCTCAGTCAGTGAAGTGCTTGTTTTGCCAACGTGAGGACCTGGCATGAGGCAGAGACTGGCCGGTGGATCTGTGTAAATTCAAAGCC
AGGTCTACAGAGTGAATTCCAGGACAGCCAGAGCTATAAAGAGAAACTCCATCTCAAAAAACAAACAAACAAACAAAACAAAAACAAAAAATAA
AAAAATAGCCAATTACCTAGGTATGGTGGTGTTCGTAATACCTGGCCAGCCAGCCTAGAGTAATCAGAGACCTTTAGGCCAATGAAAGACCCTT
GTGTTTAGATAGATAGATAGATAGATAGATAGATAGATAGATAGATAGATAGATAGAGTAGACAGACAGACAGACAGTGCCTGAGAAATTATAT
CTGAGTTGTCTTCTGGCTTCTACATTGACATGGGCACACATACATACGTGCAAGTGCACACACACACACACATGAATAAATAATTTAAAAAATC
CAATTAGCACACCTAAAAAAGAAATTCCTAAATGCCTTCTGAGTGTTTCATAAGAGTGTGCTAGCATCATGTGTGTGTGTGTGGGGGGGGCAAT
CCTCATATTTTGGATCCTAAGGCCACACTGCATGACATGGGGTCCCTGTTGGATGGGGCAGTGACTCCCCATCATTTCCTTTGATGCCTCTCTT
CAGATCAGATCCCAGGGGTCCCATCCTGGAAAGCAGACAGGGAATACCACATCAGTTCAGCCTTACCAAGCCCTGTGGCCTCTGTATCTTCCAA
GTTTGAGCTCCAGCTATCTGGGAGGTCCTGGCTGTTTCCTTTTGCTGAGAGTTTTGGGCTCAGAGCAGAGTCCTTTCAGTCCTCCTGCTTTGGC
AGGCTGGCCTGTCCCTCTGTAGGTTTCAGTGACCTGTAAGTCACTACCACATCACCCACGGCTTTCTTTCTTTTTGAAAAATTCTTCCATCCCA
GACCTAGCCACAGCCCCTCAGCCGTTGGTCCTGGGCTGACTCAGTCTGTCCCTGGTCCCTCCTCTCCCACCCACCCTGGGCTCACCCACTAGTA
TGGATCTGTGGTAGCGATGCTTTTGGTTCTGAGTGAAGAACAGGGGGATGACGGCTGATGAGGGCGGTTCTAGTGGGGCTCAGAGAGGGAAATG
GAGCACAAGAAGAGTTTGAGGTGAGCCAGAGAAATGGCTCAGAAGTGAGGGTGCTTCCTGTAATCCTGACAAACTGAGTTCAGATCCCCCCACA
TACTCGTGCGGAGTAGGTTACCCCAACACGCAGGCATACACCTCCCTACAGAATAAAAATAATAAAATGTAATACTTGTCTTTTTCTTTGGTTC
CCCCTACCAGGGATTTTGAGACAGGCTGCCCTGGAACTCTCTCTGTAGACCAGGGTGGCCTTGAACTCAGACATCTGCCTGTCTCTGCCTCCCA
AGTGATGGGATTAAAGGCATGTGCCACCACCTTTCTATTAGATATAATACCTTAAAAACAAACAAACAAACAAACAAACAAACAAACAAACAGG
AAGAAGAGTCTGGAGTCTCCTTGGTGCACTTTTGGAGCAACCCGGGAGCACTGCGTGCAGGCTGAGCCAGTCAGTGTGTAGTGAATGGTAAATA
CAAATAATAGCCGTAGGACGAAAGGCTTTCTCAGTAGGCAAGAGAGGCCGGTCCCCGTGGGCGTGTGGGTGGGTACTAATTGCTGGTAATCCCC
ACTTTTCTGGCTGTGATTGGTTGATTATTATAATTAAGATAACTTTGGGGAGAGCTGGTGTTAAGTAGCTCGGTTTGCAGATGCGCTTGGTTAT
GTGACGTCCGGGTGGCGAAGGCGCTTCCTACTTCATGTGAGGTAGTGCCACAGCGCCTTAGTGTCTTTTCCCCATCGTCTCAACTCTCGAAATT
TTTAATTACTTTTTTTTTTTTACTTATTATTTTACTTCTAAAATTACTTTTACTTTTTAAATATGTTTTTATGAGTATATGTGTGTGGGAGGGA
TCATGTATATGCTATGAGTATGGAGGAGCCTATAGAGATTGGAGGTCAGAGCTCCTGGAACTGGAATTATATAGGTGGTATGGAGCCTATAGAG
AAGTCTAGTACAGCAGGCGTGGTGGCGCACGCCTTTAATCCCCAGCACTCGGGAGGCAAAGGCAGGCAGATTTCTGAGTTTGAGGCCAGCCTGG
TCTACAAAGTGAGTTCCAGGACAGCCAGGGCTATACAGAGAAATCCTGTCTCGAAAAACCAAAAAAAAAAAAAAAAAAAAAGATGTCAATTATG
GGTCCTCTGTAAGGGCAGAATGTATTTTTAGCCACTGAGCCATCTCTCCAGTCTTTCATTTCTTTTTCTCTTTTGGTAAGACAGAGGCTCACTC
CAGGCTAGCCTTGAGCTCCCTGTATCCAGGTTACCCTTGAATGTGCAGCACACCTTTTGCCTCAGGTTCCTAAGTGCTGAGATTTTAAGTGTAA
GACACTGTATCCCACTAAGCTTTCAGACTTTTTTTTTTTAATTTAGATTTATTTTATTTGTAAATCTAATGTTTGGAATTATAAAATCGAATGT
TTAATAATTACTCATCTAATGAATGAATGCTTTGCTCATGTGTATGTATGTCTGTACACAACATGCATGTCTGGTGTGCTCAGAAGTCAGAAGA
TGATGTTGAAGGCAGAGTTATAGGTAGTTGTGAGCCACCATGTGTGTGGGCTCTGGGTATTGAACCCAAATCCTCTGCAAGAACAAGTGCTTCT
TTTTTTTTTTTTTGTTTTGTTATGAGACAGGGTTTCTCTATGTAGCCCTGGCTGTCCTGAAACTCACTCTGTAGACCAGGCTGGCCCCGAACTC
AGAGATCCACCTGCCTCTGCCTCCTGAGTGCTGGGATTAAAGGCGTGCACCACCACACCCGGCTATAAGTGCTTCTTTAAAAACAAAAAAAAAT
ATTTATTTTTATTTTATGTACATCGGTGTTTTGCCTACATGTATGTCTGTGTTGAGTGCTGGATCCCTTGAAACAGGAGTTACAGACAGGGGTA
AGCTGCCATGTGGGTGCTTGGAATTGAAACTAGGTCCTCTTAGAAGAGCAGCCAGTGCTCTTAAGTGGTACACCATCTCTCCAGCCCCCAAAAC
AAGTGCATTTAATTGCTGAGCCACCTCTCCACCCATGGATTTTTTGTTGTTGGTGGTGCTATATTAAACCCAGGGTCTCATGGATGCTAGGCAA
TCAATGGTTTTTTTTTTAATTTTTTTTTTTATTTTTTAAGTACTTTGATGTTTTGCCTGCATGTATCTCTGTATCAGGGTGTCAGATCCCCTGG
AACGGGAGATACAGATACTTGTGAGCCGCCATGTGGGTGCTAGGAATAGAACTTGGATCTTCTGGAAGAGCAGCCAGTGCTCTTAACCCTGAGC
TGCCTCGCCAAACCCTAAACATGCACTCCTATACTGAGTTGCGACCCCAATTTAACTTCTCACATCTTTACAAAACACTTGTTTCAAGAGTCCT
CTTTCTCCTCCTCCAGAGTCTGGGCCCATGGACTAAGAATCTCAAAATCTCTTGGAAACGGCTACTCAGAAAAGCCTAGCTGTTCTTTACCTGC
TCTGAGGAGGACTCAGCTGGTCAATCCCATGGAAAGTTGATTGATGTCTGAAACTAGTCATTGCTTTGTTGTTGGAGACAGTGTCTCACTGTGT
AGCCTTGTCTGGCCTAGAACTCACTATGTTCCCTGCCATGTCCCACAGCCGTGTAAAAATCATCGCTAGGCGGGTTAGCCTTGGGGCAGCAGAG
AGTCATGGGATCTTGACTCTGTAAGTAGTTTTAAGGAGGTCAACTTGGTAGCAGATTCATCTCCACTACTGGTTTCTTCTTAGTAAAGCAACAT
GTAGATCAGGGAGCTATTTGGGGATTCTAGCTGCTGGTTATTTCAGTAGTGTGTGTGCATATGTGTGTGTGTGTGTGTGTGTGTGTATGTACAT
GTACAAGTGTGAACATTTGTGTAAAGGCCATTAGTTAACCTTGAAAGTCATTCCTCTGGAATCCTCTCTGTCTGTCTGTCTGTCTGTCTGTCTG
TCTGTCTGTCTCTCTGTGTCTCTCTTTCTCTGTCTCTCTCTCCAGAATCTCTATATGTAGGCTGGCTTCAAACTCACAGTGATCTGCCTCTGCC
TCTCAAATTCTGGGATTAAAGGCATGCGCCAGCATGCTTGGTTCATTTATTAATTAATTTGTTTGTTTGTTTATTTTTGAGACAGGGTCTCATT
AGCCTAGAGTCTACCAAGAAGGCTAGGCTGGTTGACAAGAATCTAAATGTCTCTGCTTCCCCAGTTTTGGAATTCTAAGTAGATGTCACCACAC
CAGATGTCACCACACCAGGCTGCCTCTTCCTCTTCTCCTCCTCCTCCTCTTCAGTGTGGGCACTGGGTACTCATGTCTTCGTGATTGTGCAGCA
TCTCGCCATCTTTTAAAGTGAAACTAAGACCCCCCCTCCTTTGCCTTTCACTTACAATCTTCCTGTATCTTTTGTCACCCACTATCGGGACAAC
AGTAGGACAGATGGACAGAAACCGTAGTGTGGGGTATTCATCAATCTCTCTATAAGCTTCAGTGTCTTCAGGTGTAGAGTTTCAAGACGTTTTG
TTTCTCCAAGGACTGTCTTGATGAGTTGGCTTGTGCGTAAGTGGAGGATGGATAAACATAGTATGAGGCTGGGTATGGGGCTTAGTGGCAGGGC
CCTAGCCTAACATCCGCGAGGCCCTGGGTTCTATATTTGGCACCAAAAAGGTGTTTGCTATTCTGTTCCTTTAGAATAGAAAATATGAATGAGA
CCTGGTCACTAGGTAAGAAAATATATATGTTTTATGTTTTTTTATGTGTATGAATGTTACGTCTTCATGCATGTGTTACAGGTAGTTGTGGCCC
ATCATGTGGGTGTGGAGAATCAAGCCCAGGTCGTCTGGGAAAGCAGAGCCATCTCTCCAGCCACCTTACCCTCTTAAGACAGAGTCTCCCTGTC
CCGTAGCTCTAGCTACCCTAGAACTGCATACGTAGACCAGGCTGGCCTCAGACTCATGGAGATCCATTTGCCTTTCCCTCCTGAGTGCTGGGAT
TAAAGACAAGTGCCAACCCAGGCATGCTGCGTGGACCTCTGTCGCTCAGAGGCCAGCCTCGCTCACATAGCAAATTCTAGCATAGCCAGTAATA
CATATGAAACCCTGCTTCAAAATAATAAAATACGCTAGCCAGTGGTGGCGCACACTTTTAATCCCAGCACTTGGGAGGAGAGGCAAGCAGATTT
CTGAGTTCGAGACCAGTCTGATCTACAGAGTGAGTTCCAGGACAGCCAGGGCTACTCAGAGAAACCCTGTCTCGAAAAACCAAATAAATAAATA
AATAAATAAATAAATAAATAAATAAATAATAAATAAGCAAGCAAGCTAGGCAGTGGTGACACACACCTTTAATCCCAGCATTTGGGAGGTAGAC
CCAGGTGGATCTCTAAGTTTGACACCAGTCTGGTCTACATAACAAGTTCCAGGACAGCCAGGGTTACACAGACAAACCTTGTCTTGAAAAAGAA
ACAGGGCAGGAGAGGTGTCTAATGGCTAAGAGTACTGACTGGCTGCTTTCCCAGGGGTCCTCATTTCAACTCTCAGCAACCACATGGTGGTTCA
TGACCATCTATAGAGAGATCTGATGCCCTTTTCTGGCCTGCAGGTGAACATGCAGCAGAGCACTCATATATAAAATAAAATAAAATAAAATAAA
GTCTAAAATGTTTTTTAAAAGCAACAAATATTAATAAAGACATGCACCACCATGCCCAACTCCCTATTTTTTAAACTTATTTTTATCTACATGT
ATGTGTGCTTTTGTGAGTTTATGTGCACCGTATGTGTGCAGGTTCTTGTGTAGGCCAGGGCCTGTTGAATCTCCTGTAGAGTTACAGACAACTT
GTGAGCTGCCTGGTGTGGTTCTGGGAACCAAACCCTGATCTACAGAAGAGCATTAAGCGCTTCAATTTCAGAAACTACAATCTGAATGGCTTAA
AGTGAATGGGTGAGGGAAATGGATTGAAAATATTCTCCCCACCTCGGGTTTTCCATACTTAGCTCTTGGTCTAGGGATGTAGCAAAGCTGGTAG
GATTCTTGTCTAAAATTCACTATGTCTTAGGTGGATCCCTAACACTACACAAACTGGGTATAGTGGTGTGCACCCTAATCCTTGCACTTTGGAA
GTTGAGGCAGGAAAATTCAGTCATCCTTAGCTACATTCTCAGTTTGAGGCTCCTCTAGTCTATAGGTTTCTTGATTAAGAGACAAAAGCTTTCC
TATCCCATGTCGCTCCCTGAGAGGTGGGATGTGGGACCTAAAGGGATGTCCAGTGAGTGTTTGAATCTGTTGTTCTGACCACACCGCTCTCCCC
GCCCCCTCCCCACTCCCAGCTGGGGCACAAAGGCAGAGCTCAGTCATTGGAACTGGTGATGCAGAGACTGGGCATGGTGGCTGTGGCAGTGAAG
GCTGTGGCTAGAGTGGACAGAAGAGATGGTGATGGTAGCGCTTGGAGACAAGACGGCTGTGATGGTGATAATGAAAGTCAAGACTAGCGTAATG
GCAACTGTGAGTCAGTGGCTGTAACTATGATGGAGATGGTGGGTGTGGTGACGGGAGTGACGATCGCCATGGTCATGGCGGAGGCGTAGCCAGA
GTGAGGGTGGGAGTGGTGGCTTTGACGGAGGTGGTGGTTTGAGAGATAGAAGACATGGTGAAATCGATGGATATATTAATAAGATTGTAGAGAT
GGTAGCTGCAGATGTGCTGGAGGTGGTGTCTGTAGACATGGAGGTAGCGGTGTCTGTATTATGGTGGACATGGTGGCTGTATTGGTGGTGGTGG
TGGGGTGGACGTGGTACTGGAGACAACATAGCTGTAATCATGGTAATGGCAACGGCAATGATTGTGGAAGTGATAGTAACAACCCTGGAAGTTG
TACTGGTGGAGACGGTGTCACCGTGATGGTGGAGATAGCGGTGAGAATGATAGTGGTTGTGATATGGAGGTGGTGGTTGTCGTGATCGTGATAA
TGGGGGGCAGCCATGGTGGCGGTGGTGGGCAGGCCTTTGCAGGACAGCGCTCCCTTTTCTGATGCTTTCACTTTAGAACAAGGGAGCGTCACGC
AGGGTCCCACCCACCCACCAACCTGGGACCCAAGACTAAGCATAAGAACGATTAGAGCCTTCAGGATGCCTAGGGTGTTTGATGAGTTTCTGAA
GGCCAGACTTGGGGCAGGGCACACTATAGATGTGACTGGAGTGTGGGACAGGGAGGACCTGTCAGTGACTTCCATGGGGCAGGAGTGTGTTGCA
GAGCGGGAGAGTCATCCTGGAGCTGTGGAACTCAGGCACACCCACCTTCTGGGACTATCTTTAAAGGGTTGCCTGGTGCCTTTGGCCCATGCAG
GAAGCTCACTAATGTTAGAGACAGTGGTTTCCAGATAATTATCTAGTAACTGATCTTTTGAGAGGAAAGCGTTATCAAAAGTCTGCAGGCTGGG
ATGTGGCTCAGTGCTAGACTGCTTGCCCATCATGCATTAACCCTTGGGTTTAATCAGCACCACTACAGAGGGGTAGGCACTGATTTACTGTCTC
TGCTGGTGCCCTGCAGCTGACTCTAAGCTACCAACATGACAGGGTTGAACACAGAATTGGGGGCAATGCACAGTAGCCATTGTCTCTGTTCTTC
AGCTGCCTCAGACAAAGACACAAGTAAGCTCAAGCCGGGGCCACAGTACAACACGTCAGAGCACTCAGAAGAGACTCTTGGGTTGTGTGTACCT
TGGCTTTTGGTAGAACGTGATTATTGTTAAGTGTGAACAATTTAATTTTGTTTTTGTTTTTGTTTTGTTTTTCAGGACAGGGTATCTCTGTGTA
GTCCTGGCTATCCTGAGACTTGGTTTTATAGACCAGGCTGCCCTCAAACTTCAGCGATCCTCCTGCCTACTGCTCTTAGGTGCTAAGATTAAAG
ATCTGTTCTACCACACTGCCTAGTGCAATTTAACTTTAAAAAAAAGATGTATTGCTGGGCGTGGTGGCGCACGCCTTTGATCCCAGCATTTGGG
AGGCAGAGGCAGGTGGATTTCTGACTTCGAGGCCAGCCTGGTCTACAAAGTGAGCTCCAGGACAGCCAGCGCTACACAGAGAAACTCTGTCTCA
AAAAAAAAAAACATATATTATTAATTTTGTGTGTGTGTGTGTGTGTGTGTGTGTGTGTGTATGGACATGTGGGTGTCAGTGGAATCCAGAGGCA
TTGGATCACCTTGGAGCTGGAGTTAAAGACTGTTGTAAGCTGACGTGGGTGCTGAGAACTGAACTCAGTCCCCCTGGAAGAACACTATATGCTC
TTAACCATTGAGCCATTTCTTCAGTCCTATGAATTAATTTTCTGTTACACACACACAGACACACACACGTATATTTAAATTTATTTATTTATTT
ATTTCATATATGATTACACTGCAGCTGTCTTCAGACACACCATAAGAGGACTACAGATCCCATTACAGATGGTTGTGAGCCACCATGTGGTTGC
TGGGAATTGAACTCATGCTCTCCGGAAGAGCAGTCAGTGCTCTTAACCGCTGAGCCATCTCTCCAGCCTACATCTATATTTAATAACTAACAAG
CTAGCTACCTTCTGACACACTTGTCAGTTGGCTCTTGAGGACAAGTGAAGGCCGGCTACAGCTTGACACATGCACACAGGTGACTGCCACTGAG
CCCTGGCTGATGGTCCCTGGAACTTCTCTGTTCCCCACAGGCGAATGTTCCCATTCCTGTCCTTCACCGTGGCCGGGCTGGAGCCCACAAGCCA
TTACAGGATGTTTGTGGATGTGGTCTTGGTGGACCAGCACCACTGGCGGTACCAGAGCGGCAAGTGGGTGCAGTGTGGAAAGGCAGAAGGCAGC
ATGCCAGGTACAAGCTTCGGGAGTGGTGGGCATGCGTTTCCTCCTAGACAGGGCGCCCCCTGGTGGATTACTCAAGCCCTTACCCCGATGTGAA
GGATTGAACCCTACAGCCTATCCACCCACCTCACCCTTCCTTTGGCTTCTTACCTCTTCTCTAATTTGATTTAACTGAGGTGGGGAGTGGGGGA
GGGAGAAAGAGACTCACTCTGCTCAGTCCTCTGCCCTTATCTGCCCCTGCTCAGCCTGTCTGTCCTCTCCCTTGCATCTTTCTCACGGTCCACT
CAGAAGAGGCAAAATCCCACATCTCCAGTGTCTGGTCGATACTTGACAATAAGGTTAACTGTCCACAGGGAACCGCTTATATGTCCACCCAGAC
TCCCCCAACACCGGAGCCCACTGGATGCGCCAGGAAGTTTCATTTGGGAAGCTAAAGCTCACCAACAACAAGGGGGCTTCCAACAATGTGACCC
AGGTAGGATTGTCAGACCCACCTGCCTATATGTCTGAGATCTACCCCCTGACATTTCCTAAGACCCACTTTGTACTGTTGGAGTCTCGTCTCCT
CTCCTCTCCTCTTCTCCTCTCTTCCCTACATAGCCAAGGATAACCATGAACTTCTGTTCCATCTGCTCCTGAGGGTGAGATCACAGGCATGCAC
CACCAGGCCTGATTGATGTGGTTCAATCAGATATTGCACCAGACTAGACAAAGGTGCTAGCAATTGAGCTGCTCTATGCCCCGGCTCCTTTTCT
TCCTCTCTATGAGTCTTTCCTACCCATCTTTGGGAGACAATGAGATGGGTGGACACTGGATCTCTGGCAGTGGTTGCTCCTGGGTCAACACAAG
TCAGAACAACATGAGGGCTTCTTCACTAGATCATGATCTGTCACCGAGATGGTCCTAGAGCTTCAGGGAATGGATGTTCAGTGTGAAAGTGACT
TTACATTGAACAATTATGGGTCTTGTTTTGGTTTGTTTTACACATTTACTTCATCCATCCATCCATCCATCCATCCATCCATCCATCCATCCAT
CCATTCATCCATCTATCCATCCATCCATCTATCCATCCATCCATCCATCCATCTATCTATCTATCTATCTATCTATCTATCTATCTATCTATCT
ATCTATCTATCTATCATCTATCTACTTATGTACTTATTTACTTAGTAAGTTACTCAGTTAGTTAGTTGTGGGGGAGTAAGTTGCTATGATGTGT
TTGTGGAGGTCAGAGGACAACTTGCTGAAGTTGATTCCCTTTTTCTACCACGTGGATCCCAGGGATCAAACTCAGGTCGCCAGGCTTGGCAGCA
AATGCCTTTATCTGATGAGCCATCTCCACAGACCCAGTCCTGTTTTGTTTTTTTGTTTTTTGTTTTTTTAAATTAAACAACAAAACAAAACCTG
GAGCTGGAGAGAAGATTCAGTTGGTAAAGTGTTTCCCTTGAAAGACAAAGACCTGAGTTTCATCCCTAGAACCTAGGTTAAAAGAGAAAAGAAA
AGCCAGTTGTAATGGCATGAACCAGTTATTTAAACACTGGGAGCGGGTGGCGGGGACACAGGTGGATCCCTAGGGCTCACTGGCCAGCCAGCCT
ACTTGGTGAGTTCCAGTAGGGATGCTTAGGGGAAGTTGCATGGTGGTAAGGTGGTCGAAGCCACAAGATGAACTCAGGCATCCTTTCTAGTCTG
TCTCACTGTGGGGCTAGTAGTTACGTAGGAGAGTGCATCTAGAGATGAGGCCAGCTTGAGGTCAGCAGGACCTTCCTTCCAGCTCCTTCCGTGA
CCCTGTCACCCCCTGGCCCCTCTCCAGATGATCGTCCTGCAGTCTCTCCACAAGTACCAGCCCCGGCTGCACATCGTGGAGGTGAATGATGGAG
AGCCAGAGGCTGCCTGCAGTGCTTCTAACACACACGTCTTTACTTTCCAAGAGACCCAGTTCATTGCAGTGACTGCCTACCAGAACGCAGAGGT
GAGCCCGGGGACGGGCATCTGCCAGAGGGAGGGTGGGACAGACTTCTTGAGGAGGAAGAGGGGACTCAGAGAACTCTATTTCCCCGTCTCTAGA
TCACTCAGCTGAAAATCGACAACAACCCCTTTGCCAAAGGATTCCGGGACAACTTTGAGTCGTAACTGTTCTGAGTTCAAATCCCCTTTGGTCT
TTCTGAGATGGGACTGTGGTTCAGTGCTCAACATGCCCTGTCTCTGCTTCAGGGGTCTGGGGACCATCATATTAGAAGCCTAATATAGCCTTGA
TCTCTCTTTCTCTCTCTCTGTCTCTCTCTGTCTCTCTCTGTCTCTGTCTCTCTGTATTTATTTTATTTATACGAGTACACAGTAGCTGTCTTCA
GACACACCAGAAGAGGGCATTGGATCTCATTACAGACGGCTGTGAGCCACCATGTGGTTGTTGGGAATTGAACTCAGGACCTCTGGAAGAGCAA
GCAGCCAGTGCTCTTAACTGCTGAGCCATCTCTCTAGCCCCCTCATTCATTGTTTTTATTTTTATTTATTTTTTAGCATGTACGCATCTGTTGA
TACGAGTGTCCCCTCGCCACCTGGACCCAACTGTCAACTGCTTGGGGGAGACCCCTTCTCACCTCTTCTATCCAACCAGTATCCTGTTCCCAGC
CGTTTCTACCCCGACCTTCCAGGCCAGCCCAAGGATATGATCTCACAGCCTTACTGGCTGGGGACACCTCGGGAACACAGTTATGAAGCGGACT
TCCGAGCTGTGAGCATCAAGCCCACACTCCTACCCTCTGCCCCGGGGCCCACTGTGCCCTACTACCGGGGCCAACACGTCCTGGCGCCTGGAGC
TGGTTGGCCCCTGGCCCCTCAATACCCGCCCAAGATGAGCCCACCTGCCTGGTTCCGGCCCATGCGAACTCTGCCCATGGACCCGGGCCTGGGA
TCCTCAGAGGAACAGGGCTCCTCCCCCTCGCTGTGGCCTGAGGTCACCTCCCTCCAGCCGGAGCCCAGCGACTCAGGACTAGGCGAAGGAGACA
CTAAGAGGAGGAGGATATCCCCCTATCCTTCCAGTGGCGACAGCTCCTCTCCCGCTGGGCCCCCTTCTCCTTTTGATAAGGAAACCCAACGCCA
GTTTTATAATTATTTTCCCAACTGAGAAAATGCCGCTGAATTGGAAGGTGCCCACTAACTTAGAAAACAGACGCGGGGCTGAGAGCCCCGAGCT
CTTCCCCATCCCTTCCCTGTATAGTGATTGGTTGGAGAGGAAGCGGGGCAAGAAGGATTCTGGGGTTTACTTCTTGTTTCCTGGCCCACAAGGA
AATACGACAGGAGTGTCCCCTGCCCCTTTCTCTGCCCGAACTACAGTCACGAACCTGGTGCTGCTTCTGACCCCATGGTTCCATGGAGAACGGA
GAATGGACTCCAGAGAGTTTTGGACCCAGAGGGACTTCATGGCTTTCTGCGAGGTGGAGGGGTCGGGGTGGGGAGTCCAGGAGAGCTGCTCTCT
TCCCCTGTCCAGTCAGTAACTTTCAACTCTTCGTCTGACACCTGTGTTAATCTCTGACCTGAAAGTGAAGATACACGCATTTTTACAACAGCCA
GCCAAACAGAGAAGACTCAGGTGACTGCGGGCGGACTGGGCCACCTGCGAGGAGACAAGAGAGGGTGGGTGCAGAGGAAGGGTTTGAAGGGTGC
ACATTTCACCAGGCGAGGTCACTTTGAACCGGTGTGTACACACACGGGTGTCTCTTTTTTATTTCTTCGGGAGGGGGGAGGCTATTTATTGTAG
AGAGTGGTGTCTGGATGTATTTCTTCTGTTTTGCATCACTTTCTGGAAATAAACATCGACCTGGTAAACACGCCCTCCTTCTGTGGCTGGTCGG
TAGGAGCTGTGTGTGTGTGGATCAAAGTTTGCTGATCTAGCAAAGTTGTCCTGTGGGCTCTTGATTTTGGGGGGTAACTGCCAGGAACCTAAAG
TGACCCCACTTAGGGATAAACTCAGAGTATGTCTTGTCCTCAGCACTCCACCTGATCGTTCATCCCACCACATGTGACCAAAGGACCAGCCCCT
CAGCCTATGTTGCCTGCTCAGAACCCTGGAGGGAGGCAGTGTGGGAGCAAGGTTAGGACCAGGCTGCGTCCGGTGGAGTTTAGGAAAGCCAGGA
CTCTTGATTTATCTTTGCATCACTCTCCATTTTTTAGGAGTTTGTTCAAGTGTTAAAGGCATAAGTAGAAATTATACCATGTGATGTTGCCACT
CTTTTGTAGGTCACGATCAGGCATACACTAGCAATTCCACATGAGTCACCTTAGTACACACTCGGCCAGCATTAGCCCTTCATGAAGTCCTCAG
TGTGGGAGCTGTCATTGTGAACTGGTGTGCACTCTCCTCTCTCTTTTCCCCCCACCCCTCTTATTTAGTTTTCATTCATAACCATAAACTTAAC
TCTGAAATCCAGCTAGACTTGGAGGGGAAGAAGGGAAATATGGGACCCCAGGCACTTCAGTGAGAGCAGAGATTACAGGGTGTTGCGAGCAGAT
GACGTGGGGGTGCTTTCCTGAGCTACAGAAGAAATGGTCTCGTCGGTAAGATGCTCGAAAGTCAAAAGAATTAGAGTTGTCCATGCTTGGAAGT
GGGGATCTTATTTTCCTCCTGGTTTTGCCATTCCTGGACCCCCAAACATTCCATGGCTTCCACGATGTTCATGCCTTCTCTCCCCTTCCCCTCA
GTCTTGCCAATGCAGGTAAAAAACCAGTGGGAAGCATTAATGTTTGGTCCAGCATTTGCATGGACAAGATGCCAATGACCGGGGTGCTTCAGGA
TGAAGTTCTCATGCTCAAACTTCTCCCTGTAGATGGACCTGCCGCCAGTGCCACGGTGGTGTGTGACATCACCACCTTGGCACATGAATCCTAG
AATTACTCTGTGAGAGTAGGAACCCTTACACCCAAATCCTATCTCTCCAGACAGAGCTCAGAGCACGGAAGTTCTCTGCTGCCTTTGGAACTGT
GTCTACAAACAGCTTCAAGATTATGTTGTAACCCAGGCTGGCTTCCAATTCACGGTGATCCTCCCATCTCATCCTCCCAAGAGCTAGGATTACA
GACACAAACCACCATGCCCAGCTTTCTAGCTCTCTCTTTCTGACAGAGAGAGAGAGAGACACAGAGAGAGAGAGAGAGAGAGAATTTGAGTCAG
GGGTAAATGGCTAGTTGCACAGACTGACCACCCAAGCTTGATGCCTTGAATTCATGCAACAGCTGAATCTGGTAGCACACATCTGCCATCCCAG
AGCTCCTAAGAGATGGGAGGCAGAGACAGGAGGGTGTGCTTGGCAGCTTACCAGATGACTGGCACAGTAGGACAGTAGGAAAACACTGGGGAAG
AGAACAGTTTTAACTTGGCAAGAAGAGAACCAACCTCAAAAGATTGCTCTGATTTCCAGGTTGGCCTTACAACATACACCAGGCTGGCCTCAAA
CTTACAGAGATCCACCTGCCTCTGCTTCCTGAGAGCTGGGATCAAAGATGTGCCCCACCACACCCAGCTGTGTATGTGTATATTTCTGTGGGTG
CCATGCAAACCACAAGTGGGTATCACATTCCCTGAAGCTGCAGTCAGATGTGCTTTTGACCCTCCAGATCAGTCATAGTTTGGTGGGAACCAAA
CTCAGGCCCTCTGTGACATCATCAGATGCTCTCAACTGATGAGCCACTGCTCCACACCCTAAAATTAAAAAAACAAAACAATTCAAGCCAGTTG
AGGTGGCAAGTGCCTGCAAACTCAGCACTCGGGTGACTGAGACAGGAAGGCAGACAGTTGGAGACCAACCCAGGCTGCACAGTGAGACCCTATA
GTGAGGAAAAGAATAAGGACAACTGCAAATGATATCAAATTTTGCTACACTTGAATAACTGACATTACCATTCAACGGGTTAGACAAACAGAAA
TGGTTTATAAAATTGTGACCCTACAGAAATCACGTTTTTGTCTTAATGAAAATGATTNNNNNNNNNNNNNNNNNNNNAAAAAAAATAGTCTTTG
AAAGGAACGCTGTAAGGTTAAGAAAGGTTTTTTGAGCTAGAGTTATAGATAGTTGTGAGCCACTATGTGGATGCTGGGAATTCAACCTGGGCCC
TCTGCAGGAGCAACCAGTGCTCTTAACCACTAAGCCATCTTTCCAGTGCATTAAATTCTTTTGTATTCATTTACTTGCTCATTTTTATACGGAT
TAGTGTTTTGCCTGCATCTATGGCTGTACACTTGGGTAGAGTGCCTGATGCCCACAGAGGTCAGAAGAGGGTGTCAGATGCCCTGAGACTGGAA
TTTCAGAGGGTTGTGAGCCACCATGTGGGTGTTGGGAATTGAACCTAGGACTCTCCAGAAGAGCAACCACTGCTTTACCCACTGACCTATCTAG
CTCCACACCACAAACTCCTAAGGCATTTCTCCACTATGTTTTAGTCGATACCATCTCTCTTAGGAATTATGATGCTATTTTGATTCATGATCAT
CCACTTTAAATGTAGGTGTTTCTTTCATCTTCTGTGTTCTGAATATTGAATGGCACATGTTCGTTTGAAGTCTTGTGGCAGGCTGGGAGTGGGT
ATGTGCATGTGGGTGGATGTTACTGAGGCTCAAACCCAGGGCCTCGGGTGTGCTAGGCAGGCACCCCACCAGAGAGCTACATTTCCAGTCTCAT
CGATGTTAAACCAGGGGTTCTCAACCTGTGGGTCTCGACCCCCCCCTTCCAAAGCACTGATGATTACGTTGCCATTCAAAGTTATAGTCATGAA
GCAACAAGATGATTTTGTGTGTGTGTGAGGGCAGTTCTCACCACAGCATGAGGAATTCTACTAAAGAGTTGCAGCATTAGGAAGGTGCAGAATC
AGGGCTCTGGATTCTCTTTCACATTGAAGTCTTAAATACTGGGTGATCCTTATCAACTCACATTTAGTAGCAAGGCTCTGGTAGTCCCTTTAAG
AGCACTTGCGTGTATAGGAGAAGTGGCTATCTCTCACCGGCTTCCCATAGGGTGATCCCGGAGGCTGACCCTGCAGAGAAGCTGGCAGTGGGGT
GCTGGATCTGACCTCCATTAGCTTATGAAGCCTGAATCTATTGAATCCGGTGGCACCTTTAATCCCAGAGGCAGTTGGCTCTCTGTGAGTTCAA
GACCAGCCTGGTCTACATAAGTGAGTTTCAGGACAGCTAGGGCTATATATTAGAGAAACCCTGTCTTAAAGAACAACAACAACAAAAGACCCTC
AGGCCACACTCGCATGCAATCTGTTCCTTAAGACAAAGAACTAACAGGTGCCAGCCATACCTGTTAAGAGTCCTTAACTCTGAGGGAAAAGCCA
GCCCAGCTTCACCCTCCCTCCCTTTCTCTCTTTCTCTCTCTCTCTCTCTCTTTCTCTCTCTCTCTCCTCTCTCTCTCTCTCTCTCTCTTTCTCT
CTCTCTCTCCTCTCTCTCTCTCTCTCTCTCTCTCTCTCTCTCTCTCTCTCTCTCTGGGACAGAGTTGATGAGAAATACTGGACTGTGGTCTTAC
AGTTCCACCTTATAGTCCTGTCTAGTGCCTTTTCTGTGCCCCTTGACAGGTAGGCAAGGTTAGACCATGTAATATGAAGCTTGCCCACTGAAAA
CCTGTAAGTGTCAGAAACTGCTCTCTTCATCTGCATTTGAAGGAATACCTCTCCTCTTTCCACCTTTAAGGATCCATTATGGCTGTGATAGTGT
AACTGATAGTCTGTGAGCTCAAGGGTCTGAGTGAGCCTTCATGTCCCTTCATGCCCCATCATACTAGACATGGTGAGTATCTCTCCTAATGAGG
CCACTGTCACTTCTCAGGGCCCCATGTCATGAAGCTGTTGTGAAGGGTGACCTCATCTCGGCTCCTTTCTATGAATCTGTCCATTCTCTCTTAA
GTTGAAACAGAACAACTATAGCTTTCCCTCACGGCATCCGGTGGCATCAGGTTGGTAGCTTGACATCGCCCATAGTGGGAATATTTACACTATG
GGAATAGATCCGTGCTGCAGTAAGGCACAGCCCCTCCCAAAGAGCTTGTTTCCTAACGCAAACTTGAGAGTTGGCATCCCCTGCAATATGAGTG
CACGGAGAGACCCCTCCTGAGAGGATCCATTCTCCACAGGAAAGCCCCCAGCAGCTGACAGCGCCCTGTGAGTGGGGCAGGAGAATGGAAAAAA
TGGAAGGTCACTTTTTTCACCCCCAATTTCTATGTGTTTATGGTGTGTGTGTGCATCCATGCACACGTGTGTATGTGAGTGTGTGCACGTGCAT
GTGCTATGGCATGTGCACTGACGTCAGGGGACATCCTTGGGTATCAGCCCTCCCCTCCCACCTTGTTTGAGACTCTATTATTTTTCTACCCTGT
GTATAAATTGCTGGCTTGTGAGCTTTTAGGGATTCTCCTGTCTTCATCTATCATCTCCTGGGAGCACAGGGATTACAGGTGTGTGAACTGCGTG
CCAAGCTTCTCCATGAGTGCCCCGCACATAAACAAAGCTGTATCACCTTCTATGACAACCGCTCTTACTCACTGAGCCATCTCTCTTGACCCTC
TGTGACAAGTGTGACTTTGATTTTCTTTTTTCCATTTTGCCAAACCGCTCTTACTACCTTTAGGCTCCCAAGTCCTGCCTTTCTCCTCCTCTCC
AGAGAAGGACTCTCTCCTTCTAGGTGGGGATGCTGGTGAGACGGCTCTGGGCGCTCAGCGTGAGAAGCAGACATGAGCATCTTGTCATGTCTGA
ATTCAGACTTCTGATCATCTACTAGTTCTCTGCAAGGGGCTCAACCCCCTCCTTCCACCGCAGCTGACTGCCCCTTGGGGGATGAATCAGCTCC
CTCGTTGCTAGGCCTTTTAGAAGACATGCTAATTCTCTGCTCCATTTTGTGCAATGGTGTTATTCCCAAGTCATTCTCAGCCACATAGAAAGCT
AGAGGCCAGCACAGGCTCCATAAGACCATGTCTCAAAATAATCTGTCAGATCATAGTCCTTATTTTTAAAAATTCTGTCCCCAACCTCTCCCTC
AGTAGGTCAGGTTTATATGATGGGAAGGGGTCTCCTCTTGTGCCTCACCTTATACCTTATCAGAGCTTGGTGAAAGGGGCTTGTTACATGGAGG
AGATGGGATTGAGAGTAGCTAGCAGATTCGGGTGCCCTTCAAATGGAGGCTGCGTGAACTGTGTTGTAATGGAGCTGTCAGGGAGATGGCCATG
TGGGAGGGGTGGGGTCCTTAGTGCTGTGTTGCTATGAGGATACAAGCCATGACCAAAAGCACGTGGGGTGGGGGGAGAAGTTTTTATATTTAGT
TTACACATTCTGATCTTGGTCTATTATTGAGGAAATATAAGGCAGGAGCTGAAGCGGGGACCATGGAACAATGCTGCTNNNNNNNNNNNNNNNN
NNNNNNNNNNNNNNNNNNNNNNNNNNNNNNNNNNNNNNNNNNNNNNNNNNNNNNNNNNNNNNNNNNNNNNNNNNNNNNNNNNNNNNNNNNNNNN
NNNNNNNNNNNNNNNNNNNNNNNNNNNNNNNNNNNNNNNNNNNNNNNNNNNNNNNNNNNNNNNNNNNNNNNNNNNNNNNNNNNNNNNNNNNNNN
NNNNNNNNNNNNNNNNNNNNNNNNNNNNNNNNNNNNNNNNNNNNNNNNNNNNNNNNNNNNNNNNNNNNNNNNNNNNNNNNNNNNNNNNNNNNNN
NNNNNNNNNNNNNNNNNNNNNNNNNNNNNNNNNNNNNNNNNNNNNNNNNNNNNNNNNNNNNNNNNNNNNNNNNNNNNNNNNNNNNNNNNNNNNN
NNNNNNNNNNNNNNNNNNNNNNNNNNNNNNNNNNNNNNNNNNNNNNNNNNNNNNNNNNNNNNNNNNNNNNNNNNNNNNNNNNNNNNNNNNNNNN
NNNNNNNNNNNNNNNNNNNNNNNNNNNNNNNNTCTCTCTCTCTCTCTCTCTCTCTCTCTCTCTCTCTCTCTCTCTCTCTCTCTCTCTTTCTAGC
ACAGAATTGTCTTCCCAGAAGTGGCACCACTCAGAGTGGACTATGCTCTCTCACAACAATCAGACTTGCCTACAGGTCAATCAAGTGGAGGCAG
TCCCTCAGTTGAGATGCCCACTTCCCAAATGACTGGAGTTTATGTCAAGTAGACAAAAATAAAATAAAATTAAATTAAATTAAAGCAAATTAAA
TTAAAGTAAAATAAAAATAAAATAAAATATAAACACTCTACTAGGCATCTATACTCTCATTTCTCTGGAATCTGAGGCAAGAGAGTAGCCATGA
ACTCAAAGCAAGCCCAACCTATTGAGATGAGCGTGAACCTATCTCAGTGCACAGACACAGCAACACACTGTTAGTCTTGGTGCCCCCAGCAAGA
GCACAGGAAGAAATTCCCTGGTCCCAGCTCCTCTGAGGTCGTCCTGATGCTCCCTGCGTCCTGCAGCCACTGCAGGTGCTGGCGGCAGCGTCCC
TTTGGTTTGGAGTGGGCGTCTCAAAGTCTTCAGCACATGTCACTGAGGATATCCTCGCCCAGTCATGGTAACCAGTCTCTGTGAGCAAGAGGGC
AAAGACGCGATGTACGCACTTCCTTTTATGGGAAGATGCTACCCAGCTCTTCCCACACCAATATCGGCTACCCAGGCTGGGGGTGGGATGGAGT
CAGAGACCACATCTCACCCCTGTGGACATCATTTTCAGATCAAGAAGGTGGTGTTGTCGTTCCTAGATCTTGCTGAAGTTTTTGTTCTCCTTTT
CCTTTTGAGACAGCCTTTCCTGCAGAGTTAAGGAGACAGTTCTCTGAGACAGGGTTTCTCTATGTAGTCTTGGCTGTCCTGAAACTCACTCTGT
AGACCAGGCTGGCCTCGATCTGTGTGAAAGCAAAGCTTGTGGAGTTTGCTACTGTATACTCCTAACCATGGAGTTAAAGTCAGAAAGATGGCTA
GTGATTTTTTTAAAAATATTTATTTGTTTATTTCATGTATGTGAATACACTGTTGCTGTCCTCAGACACACTAGAAGAGGGCATCTAATCCCAT
TACAGATGGTTCTGAGCCACCATGTGGTTGCTGGGAATTGAACTCAGGACCTCTGGAAGAGCAGTCAGTGCTCTTAACCGCTGAGCCATCTCTC
CAGCCCCCGTGATGTTGTTCTTCTTGAGGATGCAGGTCCTATTCCCATCACCTATCTAGCATCTCATAATCAACTGTAACTCCAGTCCCCGGGT
ATTCGATCCCCTCTTGTGGTCTCTGTATGCACAGATATACATCCACACAAAACACCCATACACATAAAAATAATATAATTTAATTTCTTATTAT
AAAAACTTTCGGAGCTGCTATGAGTTCAAGTGTGACCTGCTCTTCACATGGAATTCTGGGCAGGCCAGGGCTATGTAGTGAAAACCTGTCTCAA
GAAACAAACATTACAGACTAGGTCCATATCTTATGGTGCTCAGAAAATGACTTGTGGTTCATTCTGATTGATCTGCCACACATCGGCAGTCAAT
TTGGCTGTGGAGTTGGAAGCTGACTGATGGGCACAATCTGGGAGCAAAAATGAACCCAGATTAGTTTAATTATCCTGGGTGATGATAAAATGAG
GGAGATAGTTCTTTAAAGGAAATTCATATGAGAGTTCTTTGTCTATCTGTCCATCTGTCTGTCTGTCTCTCTATCTCTCTCTGGGTCTCTCTGT
GTGTGTNNNNNNNNNNNNNNNNNNNNNNNNNNNNNNNNNNNNNNNNNNNNNNNNNNNNNNNNNNNNNNNNNNNNNNNNNNNNNNNNNNNNNNNN
NNNNNNNNNNNNNNNNNNNNNNNNNNNNNNNNNNNNNNNNNNNNNNNNNNNNNNNNNNNNNNNNNNNNNNNNNNNNNNNNNNNNNNNNNNNNNN
NNNNNNNNNNNNNNNNNNNNNNNNNNNNNNNNNNNNNNNNNNNNNNNNNNNNNNNNNNNNNNNNNNNNNNNNNNNNNNNNNNNNNNNNNNNNNN
NNNNNNNNNNNNNNNNNNNNNNNNNNNNNNNNNNNNNNNNNNNNNNNNNNNNNNNNATTATTCACAACACTGTGTGTGTGTGTGTGTGTGTGCG
CATATATGAGTACATACAAATATAGGTATGTGTGTGTGCATATACATATTGGAGCTGCCAAAATGGCTCAGCATTTGCAACCAAATCTGATACT
GTAAGAGTAAAACGTAAAAACAAAATTCTAGGCCTTTAGGCCCAGGCTTGGGAATAAGGCCTTTGTCCTTTGTGACTCAATGTTCCAAGGTATG
CTAATCCTAAAACAGATAGCGACATCCCTCCACCCACCCACTTCCTGGGTTCAAGGAGTATTCATTCAAAGAAACTCACCCTGACCTACCCTGA
CCATTGCTGGAACCCGCTATGCAAAGGTGCTATTGTTAGGGGCTCTTAGAAACTGTCTTGAGAAATAACCCTCACAATTACCAGGTATTCCTCG
TGACTCTTGTGACTTTGCACTTCCTTGTGACTCTTAACTGGCATCTTTGGTATTTTTTTTCCAACAATGCCCTTCCCACCTCCTTGAGTTGTGG
TTTCTTCCTTTAAATACCCCCTTATCCAGCTACTCGGGGCGTCAAGGTCCTCTACCCCTGCGTGGTGTATGACCGTGGGCCTGAGAGCGCTCTT
GAATAAAAATCCTCTTGCAGTTTGCAGCAAGACCGTTTCTTGTGGGTGATTTTGGGGTGTCGCCTCTCCTGAGTCAGAACGTGGGGGAGTCCTC
ACGTTGTGGGTCTTTCAATACNNNNNNNNNNNNNNNNNNNNNNNNNNNNNNNNNNNNNNNNNNNNNNNNNNNNNNNNNNNNNNNNNNNNNNNNN
NNNNNNNNNNNNNNNNNNNNNNNNNNNNNNNNNNNNNNNNNNNNNNNNNNNNNNNNNNNNNNNNNNNNNNNNNNNNNNNNNNNNNNNNNNNNNN
NNNNNNNNNNNNNNNNNNNNNNNNNNNNNNNNNNNNNNNNNNNNNNNNNNNNNNNNNNNNNNNNNNNNNNNNNNNNNNNNNNNNNNNNNNNNNN
NNNNNNNNNNNNNNNNNNNNNNNNNNNNNNNNNNNNNNNNNNNNNNNNNNNNNNNNNNNNNNNNNNNNNNNNNNNNNNNNNNNNNNNNNNNNNN
NNNNNNNNNNNNNNNNNNNNNNNNNNNNNNNNNNNNNNNNNNNNNNNNNNNNNNNNNNNNNNNNNNNNNNNNNNNNNNNNNNNNNNNNNNNNNN
NNNNNNNNNNNNNNNNNNNNNNNNNNNNNNNNNNNNNNNNNNNNNNNNNNNNNNNNNNNNNNNNNNNNNNNNNNNNNNNNNNNNNNNNNNNNNN
NNNNNNNNNNNNNNNNNNNNNNNNNNNNNNTCCTTGATCCCCCAGAAGTCATGAGAAAAGCTGAGCACTGTGGGGTGCACCCCAACGCCCAGCA
CTGGGGGAGTGAGGACAGGCTGGTTCCAGAGGATGGCCCACCAGCCAACTTAACTTAATCAGGCGGAGTCTCCCTCCCTCCCCCAGGCAAGTGG
GCTGCATCTGGGGATCACACACACGCACATACACCACACATCTGTTCATAAACCCACATGCACATGAGAACACACACACGGTATGTTTGCATGC
ATTGGCTGCCTTTGAAGACGGTCGTGTTGAAATAGGAGCATCAATGCAGTGTTGGTGGAAGACGGAGCCTTTGAGCAGTGACCAAGAGGGATGA
AAGTCCTCTCACGGGAAGAGCGGGTCCTTGGGGAATGCGCCCAGTCCTCCTTGTTCTGTTTTATATTTACTCTCACCATCCCACTTTCTGTCAT
GTGACAGTGCCCTAGCCACATCGTGCTGTTATGTCCGTGCACACCCACCTTCCACAACCCTAATTTAGACCAACTTCTCTCTCTAAATTACCCA
GTTGTGAATATTGGCATAACAACAGAAAACGGACTGAAAGCTAAATATCCATTTACATGAAACCAAATCACAGAAGGGAATAAAATCCTTCTTG
TTCCC
MOUSE SEQUENCE - mRNA
GCGGCCGCGTCGACCGCGCGCTCAGGAGCCAAGCGTCCCAGCTCCCGCTCCAGTGAAGTTTCATTGGTCTTCGGACGCCGCCCCCGTCGCCCCA
GCCCTAAGGACCCTCGGGTCTCTTCCACGCCTCCTCGAAGGCGCCCAGCCCGCCTCGGATGCGCATCGTGGAGCCGGGCTGCGGAGACATGCTG
ACCGGCACCGAGCCGATGCCGAGTGACGAGGGCCGGGGGCCCGGAGCGGACCAACAGCATCGTTTCTTCTATCCCGAGCCGGGCGCACAGGACC
CGACCGATCGCCGCGCAGGTAGCAGCCTGGGCACGCCCTACTCTGGGGGCGCCCTGGTGCCTGCCGCGCCGGGTCGCTTCCTTGGATCCTTCGC
CTACCCGCCCCGGGCTCAGGTCGCTGGCTTTCCCGGGCCTGGCGAGTTCTTCCCGCCGCCCGCGGGTGCGGAGGGCTACCCGCCCGTGGATGGC
TACCCTGCCCCTCACCCCCGCGCGGGGCTCTACCCAGGGCCGCGCGAGGACTACGCATTGCCCGCCCCCTTCCAGCTGTCTGGGAAGCTCACAC
TCGCCCTCAGCAACCACCTGTTGTGGTCCAAGTTCAACCAGCACCAGACAGAGATGATCATCACTAACCAAGGACGGCGAATGTTCCCATTCCT
GTCCTTCACCGTGGCTGGGCTGGAGCCCACAAGCCATTACAGGATGTTTGTGGATGTGGTCTTGGTGGACCAGCACCACTGGCGGTACCAGAGC
GGCAAGTGGGTGCAGTGTGGAAAGGCAGAAGGCAGCATGCCAGGGAACCGCTTATATGTCCACCCAGACTCCCCCAACACCGGAGCCCACTGGA
TGCGCCAGGAAGTTTCATTTGGGAAGCTAAAGCTCACCAACAACAAGGGGGCTTCCAACAATGTGACCCAGATGATCGTCCTGCAGTCTCTCCA
CAAGTACCAGCCCCGGCTGCACATCGTGGAGGTGAATGATGGAGAGCCAGAGGCTGCCTGCAGTGCTTCTAACACACACGTCTTTACTTTCCAA
GAGACCCAGTTCATTGCAGTGACTGCCTACCAGAACGCAGAGATCACTCAGCTGAAAATCGACAACAACCCCTTTGCCAAAGGATTCCGGGAGA
ACTTTGAGTCCATGTACGCATCTGTTGATACGAGTGTCCCCTCGCCACCTGGACCCAACTGTCAACTGCTTGGGGGAGACCCCTTCTCACCTCT
TCTATCCAACCAGTATCCTGTTCCCAGCCGTTTCTACCCCGACCTTCCAGGCCAGCCCAAGGATATGATCTCACAGCCTTACTGGCTGGGGACA
CCTCGGGAACACAGTTATCAACCGCAGTTCCGAGCTGTGAGCATGAAGCCCACACTCCTACCCTCTGCCCCGGGGCCCACTGTGCCCTACTACC
GGGGCCAAGACGTCCTGGCGCCTGGAGCTGGTTGGCCCGTGGCCCCTCAATACCCGCCCAAGATGAGCCCAGCTGGCTGGTTCCGGCCCATGCG
AACTCTGCCCATGGACCCGGGCCTGGGATCCTCAGAGGAACAGGGCTCCTCCCCCTCGCTGTGGCCTGAGGTCACCTCCCTCCAGCCGGAGTCC
AGCGACTCAGGACTAGGCGAAGGAGACACTAAGAGGAGGAGGATATCCCCCTATCCTTCCAGTGGCGACAGCTCCTCTCCCGCTGGGGCCCCTT
CTCCTTTTGATAAGGAAACCGAAGGCCAGTTTTATAATTATTTTCCCAACTGAGAAAATGCCGCTGAATTGGAAGGTGCCCACTAACTTAGAAA
ACAGACGCGGGGCTCACAGCCCCGAGCTCTTCCCCATCCCTTCCCTGTATAGTGATTGGTTGGAGAGGAAGCGGGGCAAGAAGCATTCTCGGGT
TTACTTCTTGTTTCCTGGCCCACAAGGAAATACGACAGGAGTGTCCCCTGCCCCTTTCTCTGCCCGAACTACAGTCACGAACCTGGTGCTGCTT
CTGACCCCATCGTTCCATGGAGAACGGAGAATGCACTCCAGAGAGTTTTGGACCCAGAGGGACTTCATCGCTTTCTGCGAGGTGGAGGGGTCCG
CCTGGGGAGTCCAGGAGAGCTCCTCTCTTCCCCTGTCCAGTCAGTAACTTTCAACTGTTGGTCTGACACCTGTGTTAATCTCTGACCTGAAAGT
GAAGATACACGCATTTTTACAACAGCCAGCCAAACAGAGAAGACTCAGGTGACTGCGGGCGGACTGGGCCACCTGCGAGGAGACAAGAGAGGGT
GGGTGCAGAGGAAGGGTTTGAAGGGTGCACATTTCACCAGGCGAGGTCACTTTCAACCGGTGTGTACACACACGGGTGTCTCTTTTTTATTTCT
TCGGGAGGGGGGAGGCTATTTATTGTAGAGAGTGGTGTCTGGATGTATTTCTTCTGTTTTGCATCACTTTCTGGAAATAAACATGGACCTGGTA
AAAAAAAAAAAAAAAAAAAAAAAAAAAAAAAAAAAAAA
MOUSE SEQUENCE - CODING
ATGGGCATCGTGGAGCCGGGCTGCGGAGACATGCTGACCGGCACCGAGCCGATGCCGAGTGACGAGGGCCGGGGGCCCGGAGCGGACCAACAGC
ATCGTTTCTTCTATCCCGAGCCGGGCGCACAGGACCCGACCGATCGCCGCGCAGGTAGCAGCCTGGGGACGCCCTACTCTGGGGGCGCCCTGGT
GCCTGCCGCGCCGGGTCGCTTCCTTGGATCCTTCGCCTACCCGCCCCGGGCTCAGGTGGCTGGCTTTCCCGGGCCTGGCGAGTTCTTCCCGCCG
CCCGCGGGTGCGGAGGGCTACCCGCCCGTGGATGGCTACCCTGCCCCTGACCCGCGCGCGGGGCTCTACCCAGGGCCGCGCGAGGACTACGCAT
TGCCCGCGGGGTTGGAGGTGTCTGGGAAGCTGAGAGTCGCGCTCAGCAACCACCTGTTGTGGTCCAAGTTCAACCAGCACCAGACAGAGATGAT
CATCACTAAGCAAGGACGGCGAATGTTCCCATTCCTGTCCTTCACCGTGGCTGGGCTGGAGCCCACAAGCCATTACAGGATGTTTGTGGATGTG
GTCTTGGTGGACCAGCACCACTGGCGGTACCAGAGCGGCAAGTGGGTGCAGTGTGGAAAGGCAGAAGGCAGCATGCCAGGGAACCGCTTATATG
TCCACCCAGACTCCCCCAACACCGGAGCCCACTGGATGCGCCAGGAAGTTTCATTTGGGAAGCTAAAGCTCACCAACAACAAGGGGGCTTCCAA
CAATGTGACCCAGATGATCGTCCTGCAGTCTCTCCACAAGTACCAGCCCCGGCTGCACATCGTGGAGGTGAATGATGGAGAGCCAGAGGCTGCC
TGCAGTGCTTCTAACACACACGTCTTTACTTTCCAAGAGACCCAGTTCATTGCAGTGACTGCCTACCAGAACGCAGAGATCACTCAGCTGAAAA
TCGACAACAACCCCTTTGCCAAAGGATTCCGGGAGAACTTTGAGTCCATGTACGCATCTGTTGATACGAGTGTCCCCTCGCCACCTGGACCCAA
CTGTCAACTGCTTGGGGGAGACCCCTTCTCACCTCTTCTATCCAACCAGTATCCTGTTCCCAGCCGTTTCTACCCCGACCTTCCAGGCCAGCCC
AAGGATATGATCTCACAGCCTTACTGGCTGGGGACACCTCGGGAACACAGTTATGAAGCGGAGTTCCGAGCTGTGAGCATGAAGCCCACACTCC
TACCCTCTGCCCCGGGGCCCACTGTGCCCTACTACCGGGGCCAAGACGTCCTGGCGCCTGGAGCTGGTTGGCCCGTGGCCCCTCAATACCCGCC
CAAGATGAGCCCAGCTCGCTGGTTCCGCCCCATGCGAACTCTGCCCATGGACCCGGGCCTGGCATCCTCAGAGGAACAGGGCTCCTCCCCCTCG
CTGTGGCCTGAGGTCACCTCCCTCCAGCCGGAGTCCAGCGACTCAGGACTAGGCGAAGGAGACACTAAGAGGAGGAGGATATCCCCCTATCCTT
CCAGTGGCGACAGCTCCTCTCCCGCTGGGGCCCCTTCTCCTTTTGATAAGGAAACCGAAGGCCAGTTTTATAATTATTTTCCCAACTGA
HUMAN SEQUENCE - GENOMIC
ACCATGTTGGCCAGGATGGTCTCAATCTCCTGACCCTGTGATCCTCCCGCCTCGGCCTCCCAAAGTGCTGGGATTACAGACATGAGCCACTGTG
CCTGGCTGATACTTAACTTTTTTATATCTCAGTTTCCTTGTCTGTAAAATGGGAACAATGGTTCCCACCCAGTTGCCTTCACACCATTGTGAAG
TCTAATGAAATCAAAGGTATATTGACTAGTCTTAACCAAAAAAAAAAAAAAAAAAAAGAAGAGAGAGAGAGAGAAAGAAAGAAAGGAAATAAAG
GGTACGAGTTGCCTGGGGATGTTCTTTTTTTTTTTTTTTTTGACAGTCTCTCTCTGTTGCCCAGGCTGGAGTGCAGTGGTACAGCCTCAGCTCA
CTGCAACCTCCGCCTCCCGGGTCCAAGCAATTCTCCTGCCTCAGCCTCCCTAGTAGGTGGGATTACAGGCACCTACCACCACGACCAGATAGGT
TTTTTTGTATTTTTAGTAGAGATGGGGTTTCACCATGTTGGTCAGGCTGGTTTCGAACTCCTGATCTCAAGTGATCTGCCCACTTCGGCCTCCC
AAAGTGCTAGGATTACAGGCATGAGCCACTATGCCTGGCCGGGATATTCTCTTATCTCATCCTTTACCCCTCAACCCAGAGTGGTGATAGGAGG
AGGGGGTTAATTAGGAAGAACTGGGGTTTTTACAGTTTCCAAACTCACTGGGAGTCAAGGATTGAGACAAAGTACAAGCTAGATTTGGCAACAT
CCAGGGTCATGCATGGGAACCTGGGAGCCCCATGCCCCACTGCCTATTTGCAGGGCCCTGGGTCTTGGGTGGCCCTAGTTCAGTGTGTGCATGT
GTGTGAAATGCAAGGTGATGAGGTCAGTATCTCAACTCCCAGTTACTGGTCCAGTTGCTAAGAACTTGCCTGACCATAACCATCCTTTCCCAAC
TCACAGAATGTCAGGTTCTGATGCCAGTGATTGGAAAGAAATGGCGGTGAGCAAGGAGAGGGGGCAATGCTGGGCAGCCATGCCACCTTTATGT
CCCCTGTGGCCAGAGACGTGGGTCCAGGGCCCTTCTCAGTGCCCAGCTCGGTCCAGCCAGCTGCCCATGGCCCTGGTGGGAGGAGGTAGGCTGG
ACGCCTTCTGACACTTCCTGGGTAACTGAGCGGGGCAAGCAGCAAACAGCAGGCTCCTGGGGAAATCTCAGACTTGTGTGTCACAGCGGATCTG
TGTCTGGGGTGGTAAGTGGGGTTAAACTCAAGGTCAGACCTAGCCAATCCATTTTCGCGCCAACATGGCCTTGGGTGTCCTCCATTCCAGTGGC
TGGGACCCAGGTGCCCACTCAGCTGGAGACAGCACTGCTGGGAGCCTAATGCCTGGTTTGTCCCTCTGCTTCACACACTGGTTGCTTGCCTGAT
TTCTGCCTGTGCCTAGGATTTATAAGGAAGGGAGTTGTGGCATGTGGATCCCAGGCCTCCGTTCTACTCCCAAATTTCAGGTGCTAATCTCTCC
ATGAGTTTCAGTGACCTCAGAAAAGGAAATGGGATTAAGCTGCAATTTAAGGGGTTGTGGGAAGACAGCTGAAAGAATGTCCCAGTCTTCAGTA
GAGGAGGTGGGAGGTGGCTGTAAACTGCCTAAATCGGGGGAACACTACCAGGAATCTCAAATTGCTGTACAATGCAGACACAGTCAATCAGCCT
CCACCTACTTAGATCTCTAAGTGCTTAGAGATCACCAACCTGTCCCAGGCTCCTGAGTCTATTACCTCACTCCTCCTTGTTCTCTGCCTTTCCC
AGGCTACTGTGGTTATGATTTGTGGCAGAAGTTGGGAAGGCAGAAAAGGAGAGAAGGAGGGAAAAGGACAATCTGAGAACAAGCTGGAGGGCCA
AAGTGGACCCCTTGCAGAGTTGGCAAGATGGCAAAGGGGATGCAGTGGCAGGTGAATTAGTTCAGATGGGCAAGAAATGTAGGATAAGTCAGCA
AGCTGCCTTTGCGCAGGAGATCCCTAGGTGAGAAGGTAAGAAGGGCTTCCACATGCGGCAGTAGCCTCAGTGTTTCTGGAATGGAGTTTGTATA
TATGTTGTGGGTGGGGTAGGGGGAACAGAAGAAGAGCTGCAGCATCCTGCCTTTGAGGAGGAAGATGGTACAACAGGAAGGCCAGGAGGTGGGC
TGCAGGTAAAATGTCCCCGTGAGACAGGGTTGAGGGAAGCAGAGGGCCAGCTGCTGGGCCTGCAGCCTTCTTGCCCCCACTCCCAGCTCACCCG
CCCACTGCGAACACTCCTCAGCTCCCCCACCCCATTCTGGCCCACAGCCCTGGGGAAGCGACATGGCGTTCTCACCACGGACCCAGTGCCGGCT
GTGGCTTCTTCCCTCTGACCTATTTTTTAATCATTTGATGGGATTTTTCCCCCCCAAACCAAACCCCCAGCCCCCTGGGCCCGTCAGCTCCACC
GCGTGTCAAAACCACCCCTGTCACTTTGCGTTGGTTTCTCAGTCCAGCCAGCCCCTCCCCGCAGGGCCTGAGAGCGATGGCTAATTACCCAGCT
GCTGAACGCCCCCCACTCCTGCCCCTCCACCCCTAGCCCTGACAGAGGGGCCCTGGAGGACTGCTGGGAGAAGCTGGGGCCTCCTCACCCTCCC
ACTGCTTGGCAGGAAGTCCTTCCTGCTGTCTAACCTCCATTCTTCCCTCTGTCCTGCCCCTAGTGGTGCTGAATCGCAGACACAGAGGCTGTTG
GTACTATAAGGGTCTTTGGGATACCTCCTTAAGGGACAGAAAGGGGCAACTAGTCTTCTGTCCTGGGTTTAGGGATGTCTTCTGTCACTCTGGC
TCTCTAACAGAATTCTAGGGGATGGTCCTTGCTGTCTCATTTTACAGAGCAGAAAACTGCGACACACAGAGGGAAAGGGCCTAGCCCAAGGTGA
TCTACGCCAGTGGCGGAGCCAGAATCAGAACCTAGAGTTCCATGTTTGTCTTTCCACCTGTTTCTGGGTCCTGTTTCTGGTATGTAGAGGGCCC
ACCCCCACATACCAACTAGGTCTGTTTCTGTTTCTGTGCAACTCCGCTGCCAGCCCTGAGCAGGTGTGTTCCCTGCCATGCCCTCTCTCCCTTG
CCCCCTGGCCACACAGAGCTTCACCCTGGCATTTCAGGGCTGGGCAGCTTGCTTCAGGCACTATTTAGGAATGGGACTCTTTCCCCCAATACCA
CCCATGCCCTTTTCCCTCTTCCTCTCTCATTCATCCCTAACCAAGTCCGTAAGTCTGCTCTGTCTCACCCGCACCCTGAGACATTAACCAGGTG
GACAAGGCAAAAAGCTCTAGGCCAGACACAGGAAGGCCAGAGCCAACTCACAGATGAGGCCTAGTCCCAGATGGACAGATAGACATGCAGGAGA
TACATGGAGCGCTGGATAGCCCTGGAGACACGGACAGTGACATGAAGATGCAGAGACAGACACAAACACGCTACAGAGACAAGGCAAGTTCCGA
GGCCCACAGGTAACAGACAGACACAGAGACGCAGACAGAGGCACAGAACCTACACTCAGGACCAGCGTGCAGACCTCTCACAGGTCCCAGGGAT
AGGAGTGGACGTAAAGAGGATACACAAGACGCAGGCAAAAACACAGGGACCCAGAGAGGGGCCGAATCAGACCAGAGGAACCCAGACACTCAGG
AGCCCTGAGAGACATGGGCACACAGGGCTGCCCACAGATCCCAGGAAGCCAGAGAGAACCTTGGGGAGAGAGGAGGCCCCAGGGGGTGGGTGGC
CCTCTGAAGGACAGCGAGGCCTGGCCTGGCAGAGCCTGACTGTGCCAGGAAGTCATGCCAAGATGGCAAGATGGGAAGCAGAGAGGAGCTTGGC
AGCGTGGGGGTTAACCCCTCAGCCTGTGCCCTCCCTCCAAGTCCCTTTTCCTTGGCTCTTCTTTTTCTTCCCTCCTCTCCCAGCTCCTTTTACC
CAAAGCCCTGGATATTTCCCGCCTCCCCAGCCCAACTCCTGGTAACCAGACCCTGCTTCCTGCCTGAGATTAAGGGCCTGTCTGCTGAGAGGCA
GGAAGGGTGGGGGCACAGCCTCTCCCCAGTGCCTCCTGAAGCTTGGGCTTGCCCATCCATACTGTGGCATGCCCTCCTGATAACAGAGTTACCC
AAGTACCTGATGTCTGAATATCCCTTCAGGAGGGCGCAGGAGCCCTAGCCTGGGAGTGCAGCGGGGGCGGCCTACTGCATGCGTGGGTGTGCAT
GGAGGGTGTGGGTCTTATGTGAAATGCTGGCAGGGGTGAGAGCAGCTAGAGATAGAGAGAGGATAGATGATTCAAAATAAGATGCCACGGAGAA
GGAGGACTGAAAGGCACCCAGGCCTGGCCTGGAGCCCAGGGGTAAGGGCCGCTCAGGCTTGGTGGGGGGTGTGTGGGGAAGGGTGACCCAGCCT
GCAGATGAGAGCCTGGAGCCCTTGACCTTGGGAGGAGCCCTCTGTTCTGTGTTCACACTGACCACCTGGTGCTGGGTGCTGGGGACTCGGAACT
CCTGCAGCTGTCACGGGGCGGGGGGGTTCTACAGGTGCTTGTCCCTCCCCTTCCCCCCTCTCTGGCTGTTAATCTGATGGTTCCGGCGATGCCC
TCTGAAGGACTGGCAGTCTGGGCCCAGAGGGGGAGGGGATTCAGGGCACGCGGGGTGGGCAGAGTCAGATGCTGAAGGAGCTCTGGGATGCTGG
ATGTGGGGCAAGAGCAGGCGGTGGGGCTGCAGGGACTGGATCGCAGAGATTTCCCTAGCATAGCTCTGCATGGGGTGTGTGTGCACATGCGTGG
ATGATGGCGTGTGTGCACGTGGTGTGTTGTGAGTCTACACCCCAGGAGCAAGAGGGCTGAGGGGGTCACTTTGCTAGGAGCTCTTTGGGGGCAG
GGACTGACCCTAATTTATCTTTGTGATCCCAGATCTCCAAGGGCCTGGCTTATCCCAGCGCTCAGGTACCCAGGGAATGGTATATGGGTATCAG
GAGGGGAAGCCTGTCCCTTTCTAATATGTGAGTCTTATGAACAGAGGGGCTCTCTTTTCGCCCCAGGCCCTGAGTGGAGGCTGAGGATGGACCT
GAAGGACACTTTGTGGATGAGCCACTAAGCCAGAGGGAGGAAAGGGCAGGTGTAAGTGGCTGGGACTACAGGAAAGAGGGCTTAGCACAGTTTA
TGCCTCTGTTTTGTTTCAGCCTTAGGACAGCATCCCTCAACCTTCACATGACAGACCCAGTCAGTCCTGGCAGAGGTCTGATAGCTCCATTTAC
TGACAAAAAAAACCCAGAGAGGTTAAGATACTTTAATAGGTAGCACAGCCAGTAAGGGTTGGGATTGAGGTTCCAACCCAGCCACCCAACTAAG
TCTCCCCACCCCATTTCTCTCTGCCCCAGCTCCAGCACCCCCAGGCCTCTCTGCCTCTGCAGACTTTCCTCCCATTGGCCCATCTCTGTCTGTC
TCCTTTCTTTCATGCCCCTCTCGCAGGCCCAGCCTGAGACTTTCCCACTGAGTCACGATCTGGGTCCCTGACTTTGTGGTCCCTGTCCCTCTCT
GGGTCTAAATCTTTCTTTCAGAAATGCACCCTAAGCCTCTCACTTTGCTCTCTCTTTCTTTTCACGCCTTCTCCCCAACTCGCTGCCCCCTCTC
TTTTACTATCTACCCTCTCACAGCCTCTAAGGCTCTGCCCAGCAGGGTGGAGGGTGGAAATCCTGGGTCCTGGTGCCATGCCATGCTCCACTAA
CAGTTTCCAGTAGGCTGGGCGTGGTGGCTGATGCCTGTAATCCCAACACTTTGGGAGGCTGAGGCGGGCAGATCACGAGGTCAGGAGATCGAGA
CCAGCCTGGCCAACATGGTGAAACCCCATCTCTACTAAAAATACAAAAAATTAGCCGGTCGTGGTGGCATGTCCCTCTAGTCCCACCCACCACG
GGAGGCTGAGGCAGGAGAATTGCTTGAACCCGGGAGGTGGAGGTTGCAGTGAGCTGACATCGCACCACTGCACTCCAGCCTGGGTGACAGAGCA
AGTGACTCTGTCTCAAAAAACAAAACAAAACAAAACAAAACAAAAAAACAGTTTCCAGTAATAGCCGCTCCTCCCCAGCTGCCCCACCAAACCC
ATCCAAGAGCCTTCCAGGTGCCTAGGGAGCTCAGCACTCCATACGTTTTCAGGAGAGCACCCAGGTGGCTGGTAGACTCTGGGGTGAGGAATCA
TCTGGTCCTAGAGCATCAATAAGGAAATCTCAATGCCTGCAGCCACCCTCCTCAGGCATGAAACCTCCTCCACCGCCCTCAGTGTGCATACCCA
GCAAGCTCAAGGCACACTGACTCGCAGGATGGGACTTGGAGATGGGACAGCAAAATGGGAGGGAGCCTGAGAGTGGGGTGCATGGACTCCCTGA
AGTCCAACGCATCACCTGGAGTCCTTAAACATACAGATTCTAGAGACCCGCCACAGGCCTGGGCCTCAGAATCTCTAGAAGCAAGTCCCAGAAA
TCCACATCGTTGTGGCTTCCTGGCATAGTCTGCAGCCCACAGGTGAAGCAAGTGCTCTGTGACCTTCGGGGAGCCTCTCTCATTTTGAGTCTTC
ATGGGAAACAGTTTGAAAGGAAGCCCTGAACGTTTGCAGAGCACAACAGCCTGGAGAGAACCAGTGTCTAGGCTGTGGGATTAGGCATGATTTT
CTTTTCTGTTTTCTAAACCTTTTCTTTTCTTTTTCTTTTTGTTTCTTTGAGACCGAGTCTCCCTCTGTCACTCAGGCTGGAGTGCAGTGGCACA
GTCTCAGCTCACTGCAACCTCCTCCTCCTCGGGTCAAGTGATTCTCTTGCCTCAGCCTCCTGAGTAGCTGGGATTACAGGGGCCAGCCACCACA
CCTGCTAATTTTTATTTTTGTTTTTGTTTTTGTTTTGAGATGGAGTCTTGCTCTCTCTCCCGGGCTGGAGTGCAGCGGCACGATCTCGGCTCAC
TGCAACCTCTGCCTCCTGGGTTCAAGTGATTCTCCTGCCTCAGCCTCCTGAGTAGCTGGGATTACAGGCGCCCATCATGCCCAGCTAATTTTTG
TGTTTTTAGTAGAGATGGGGTTTTGTCATGTTGGCCAGGGTAGTCTAGAACTTCTGGCCTCAAGTGATTTGCTGGCCTTGGCATCCCAAAGTGT
TGGGATTACAGGCATGAGCCACCACGCCCGGCCTGTTTTCTAAACCTTTTCCAGTGTTAGTATGATTCTTCCTCATTCTTGTGGCAAGAGCACT
GGCCTGGGAGTCAAGAGACCTGGGTTCTAGCTTCAGCTCTGCCACAAATGCACTGTGTGAGTTTGGTGTCTTATTCCATTTTGCATAGTTACCA
TCCACCGTGTCTCATAAAATGTGATGCTGGTTCGAGGCCATGTCTCTCTCATTCCTGGACACTTATCTTGTGTTTCTTCACTCCGGTCTCACCA
GGACCACCCTCATAATGCTCCCTGTATTGATGGGATAGAGAGGGCTGGGAGGAGCAGCCATGGGGAAGTGAGGGGATCCCAGGGGGCCTCATCT
CCTCACTCCTCTTCTCCCACCTTTCCAGCCCCAGGGCCCGGGAGGAGGGTGAGGTGGCAGCTGGAGGAGAAGGTGTCACTGCCAGGGCCCTTAT
TCTCACCCAAGCTGGCAGAGGGGCGGGACTGGCAGCAGTGACACCAGGGCCACTCAGCCCCCGCTTTTCACAAGCACTTTCTTTTTTGGGTGGA
AGAAATTGGAGAGAGGGGGTGAGAAATCGGGGATTGAGGAACCAGGCTGTAAGACCCTATAACAGCCTGTCAGGTTCTAGAGAGACCACCCCCA
CCCTTCCTCTTCCTCCAGAGGCATGGCCCCAGGGCCACCTGATTCTGAGATTCATAATTCCACCTGCCCCAGAAAGCTGGGTGGGAGCTCATGT
CATCCTGTTCAGAGGCAAGGGGATGAATCACTTGACCTGAGGATTAATGTGGAAAAGAGGAGGGGGAGAGAGAGGGAGGAGCAAGACTCCATTT
GATCTTCAACAGCCAAGCACTGAGCAAAAATGTCCCCCAAAGGGGTGTCAGCATTCAACAGTCTCACATCTCCTAGGGAATCAGTCATTCAGGA
GGGTCTTACTGAAAGCTCTCATGTTTCCCCAAAAGTAGTGAAGGATCCCAAGGTCACCCTCTCTTCCAAGCAATGCTCCCCCACTTTGAACATC
AGGCAGAAACTTCCCTGTTCCTTAAGGTACGGAGAAATGGTGGGTAAGGTGTTGGGGAGGAGGCCAGTCCTGTGTTTCTGGTACTGTCATGTAT
CCGGTCTCCAACCTCAAAAGATGTGCTGATTCTCTCTCCCCCAAGCCTCCCTGGGTCATGCCCACCTCCTGGAGTCCCCAGCTTTGCCTTTGCC
TGCCAACTTGCCTCTTGGTTCAGCTCTATTTGGGAGCAGAGAGTCCCCATAGGCCCCTAAGGGTGAAGCCCTGTCAGGCTGGGACAGAAATGTA
GAGCTGGGGCCAGTTCCCAGGGGAGAACTGGGGAGGACTGGGGTGAAGGTAGAGAGAGGAGAAGTTAAACTTTAACATGACAAAAATATTAAAG
TATTTTTCAAAGTACTCTTAAAAATGTAAATCTTTATCTATATACTGATATGCAAAATATTCCATGACACCTTGTGGAGTGAAAAAAAAGTACA
CATTATAAAGCAGCATGTGTAGTGTTTATATAAATTATATATTTGTGCATGTGTGCAAAAGACAGAGACAGAGAGTATATAACGAGTGAGGTCT
CAGAGGGTGTTCACTGAAATGTTAATCCTGTTTGGCTTTAGGGGGTGGAATTTGGGGTGATTTATACAGTCTCGTTTTTACTTTTCTGTGCTGC
TTAAATTTCCTATATAAGTATGTTTCATCTTTATACACAGGAAAACTCCCAATGATGCTATTTTCAATTGGGGGGGGGGAAACGGATACTTTTC
ATCATAAAACGAGTCTAATACATTAGTTAACATAAAAGGAAAATGGAGAAAGAAAAGCCTCCATCGTCCTATCTCCGAGCCACCCCTTCAGAGC
ATGTGGTGGGTTTCCTTCCTGTCAGCCGGCTCTGAATCTGTTCAAAGCAGCTTTTCCATCCAGGTATAATAATAGATTGGAAAGTGCTGCACAC
GTACACCCTCTCATGTAAGGCTTGCAGCCCCCCTGAAAAGTAGATCTGTTTATTTCCCCCAGTCTATGGATGAGGCACGTGAGGTTGACTTTCA
GGCAAGGAAAATGACTTGCCTGGGTCACATATACCTGGCAGGCAGAGCCAGACCTGGGACTCTCAGCACTGGCAGCCCAATGCTACTTCCAGTG
CCCATGACTGCCATGCAGGGTAGGGGAGCTTTTGTGGGCCCTGCCAGGCCCAGCTCAGGGCCCTGCAAACCCCTGGCTGCTGCTGATGCAGTGC
GCTTTAAGGAACATTTCCTCTTCTCCATCAGGTTCCAGGTCTGCCCCCAGGGCTAGAGCTACAAGATGCAGCCAACTCACCACATCTGCACCTC
TGGTGGGGAGAAAGAGGGCAACCCGAAAGGTCACTTAGCACAGAGTCTGGGCACACAGTAGGTATCAATAAAGATCGATTGAATGTTCATGGTC
AAAGTTCCTTCTAGTCTGCCCGTGCTCCGAGCCTCTGAGTGCCAGGAGAATGCCCAGCGAGTCCCACTTGGGCCATCTCGGAAGGCTTCCTGTA
GGAGAGGGCCTTTGAGCTGAGACTTCAAAGCTGGGCTGAATTTCCCCGAGGGTCCACAAGAGAGCCACGGCCTGGTGTGTCACGCAGCGGAGCT
GACACTCCCAGAAAGCAAGATCTTCGAACTACAGGGTGCGCGCAGCCTCTCGCTTCTCTCCACCATGGGGGGCCCTGCAGTACTCGCCAAGAGC
GTAGAATTTGCCTAGTATTAGCCACGAGAGGGCGGGGTGGGGCGAGGCGGAGCAGCCCCGAGCTGGCGGAGTGCCGGCGACCCGGAGAGCTTCA
TAAAGCCACAGCAAAGCGCTGCGACTCTAGTCACAGCGGCCCGCTGGAGAGGAAGCCCGAGAGCTGCCGCGCGCCTGCCGGACGAGGGCGTAGA
AGCCAGGCGTCACAGCCCGGGCTCCGGTGGGGTCCCCCACCCGGCCCTCGGGTCCCCCGCCCCCTGCTCCCTGCCCATCCCAGCCCACGCGACC
CTCTCCCGCGCGGAGGGGCGGGTCCTCGACGGCTACGGGAAGGTGCCAGCCCGCCCCGGATGGGCATCGTGGAGCCGGGTTGCGGAGACATGCT
GACGGGCACCGAGCCGATGCCGGGGAGCGACGAGGGCCGGGCGCCTGGCGCCGACCCGCAGCACCGCTACTTCTACCCGGAGCCGGGCGCGCAG
GACGCGGACGAGCGTCGCCCCGCCGCCACCCTGGGGTCTCCCTACCCGGGGGGCGCCTTGGTGCCCGCCCCGCCGAGCCGCTTCCTTGGAGCCT
ACGCCTACCCGCCGCGACCCCAGGCGGCCGGCTTCCCCGGCGCGGGCGAGTCCTTCCCGCCCCCCCCGGACGCCGAGGGCTACCAGCCGGGCGA
GGGCTACGCCGCCCCGGACCCGCGCGCCGGGCTCTACCCGGGGCCGCGTGAGGACTACGCGCTACCCGCGGGACTGGAGGTGTCGGGGAAACTG
AGGGTCGCGCTCAACAACCACCTGTTGTGGTCCAAGTTTAATCAGCACCAGACAGAGATGATCATCACCAAGCAGGCACCGTCAGTGCGGCGCG
CCGGCCCTTGGGGCCTCTGTGCCCGCGCCGGAACAAGAACGTCTCGTCTGTTTTTCTGGCTCCACAATGCTTCTGACTCCGTGTCCCTCACTGC
TTTGGCTTCAGCGTAGGGAGACAGGGGAATGGGGTTGTTAGGAGGACAGGGAAAGCTCCGGAGGGGCGTCTGTGCCCAGCCTGTTGCACCAACA
GCCAGAGGACTCACAAGGGAGACGGGTGAGTGCGGGACAGTGAGAAGTCACCTTGATTTAGGGGAAGGGTGACTGTGGCTTCACCTAGAATTGG
TGTGCGCCCCTGCCCCACTCTCTACTGTAGAGGAGTCGCAGCGGGCAGTGAAAGCCTGTGCTCTGGGCGGACAGGACGCCTGGGCCTCCTGTGT
GGGAAACTGGAGGGGAAGGGAGCCCCTTATCTCCGGGCCCCCTCCGCCCACCTCCCCCGGCTCCTTTGCTGCTGGTGTGCTCAGGTCAGCTTTA
GTGGTGGTAGTGGTGGTGGTAGCGGTGGTGGTGGTGTGTGTGTACGGGGGGAGATTGGGATTTGGTGACATCGAGAAGCAGTCGCCAAGTTTCC
TTTCCGGTCTTACTTTGACATCATATGTCTGGTGTGTGTCTGTGTGTGTGTGTGTGTGTGTGTGTGTGTCTGTGTGTGTGTATGTGTGTGTGGG
TGTGTGTGTATGGGGGCTAGTGCACTAAAGCTTGTAGGGGGCACAGATCCCTTCCAGGCACAAATGCCCACGGGCTGGGCAGATCAAGCTCACC
CAGGGGTCCAGCCTGGTAGCCAGCCCCACACTGCACCCTTTGAGGCTGGTCCAGTGAAAACCTTCCCCACACTCCTGTCCAGAAATTCACCGGT
TCAGCCTGCAGAAGTGGGGAAGGGGTGTCCCATGGCTTCATGGCTCAGGGTTCCTGAGCCCCGTGCGTGATGGGGAGAGTTTGGGGCTGAGGGT
GCTGCTTCCGGATAGAGCCTCCTGCGCAAGGAAAGAAACAGAAACCTGTGACTTGTGTGGTATTTGTTTAGTAAGCAACCCCCGGAGTGGACTG
TGTCTGATGTGGGCTGTGCGCACCCACCCTTCCCAGTGCGGCCCATGTGAGCAGGGGACCAGCGAGGACCAGTGTGGAAGGGCTGTTGTCATTG
GTGGACCTGGGATGCTGGGTCCCAGGTCCGAGAGGTGTGGATACCAAACGTGGGGCTTGGGGTGGAGGGGAGAGGGAGAAGGCCATGTTGGACC
CCAGAGGTTGGTATTCGATCTGGGCATTGCTGGAACATTCTTCCCTCCAGATGATTTTTGTGGGGTAGCCTGGGACTGGGGAACCTGTTGCCAG
CCACAACTGGCTTCAAGTTACTGAGCTGTTCCACTTTCCCTGGGATGAACCCAGGAAAGTTGGCGTGTTCTTTGATGGCTCAGCCTTCATCTCT
TAAGCCTTCTGATAATTTCTCTCTGCTCCCCCCAACCCTAGTCACCCTTTGGGTGTACCCAGACACAGCCCAAGCTTCTGGTCCCAATGTGTCT
GAATTGGAAGGGACCCAGAAGATCCTGTCCCTCTCACTGCACAGACAGGGAAACAGGCCCAGAGATAGCAAGAGACTCTTCCAAGGTCACACAA
CACACTCATTGCAGGCAGAGCTGGCACTACAGCCCAGATAGTATTTGCTTGGGTTTCTTTCTCTGGCCCCCTACGGCCACCAGTAAAAACAGCC
ACCCACGCTCTCTGAAGGCCCTGATGCATTCAGAGTCCTTTCACTTCCATTATTTCACTGTGCGTTAGGTAGGCCAAGCAGTCTCCCCATTTTA
CAGTTGAGGTCACTGAGTTGCAGGGTCAGCTAGGGGCTTGCACTCCATCACACAGCAGACCAGAAGTGGGGCCTCTTAACCTTCCACTCTGTTG
TGTGGTCAGGAGGACTTCCCACCCTGGGCCCTTGCTGGGGTCTCCCCACAGCCTCTGCCAGGCCTCTGCCTCCTCCTGCCAGTCTTGAGGGATC
GGGTGGATGGAGCATCAGCCAGCACTCTAGGGAGTTGGCCAGTGCTAGGGGGCTGCCTCTCTGCCTGTAGAGCCAGCTTCAGGGAGGCTGTAGA
GCACTTCAGGGAGCCACTTGAGGGGATGATTCTCGAAGTGTGTATCACCATCTCTACTCCCATGGCCTCCTTTCCTTGGTGTTCCTGCTGAGTA
ATTCTCACTTGACAAGTTTTTTTGTCCCCCTTTTAGATACATACACTTACATTTTTTTATTATGAAAAATTCCACTACATACAAACATGGACAG
AAGAATGTAACAGACTTCCATCCCCAGCTTCCACAGTTGTCAATATGGGTCCAATCTTGTTTCTGCATCCTCACTTCGCTTCTTCTGTCTGGAA
CTATATTAGTAATATAGTAATTACTAAGTACATTCTAGATATTATTTTATCTCTGCACCTCTAAAAATGACTTTTTAAAATGAATGCATTACCA
TTAGCAAACCTGAAAAGAATTTCCTAAATATCACCAAGCTTCTCTGATTGCTTCATAAATGTGTGTGTGTGTGTGTTTTCCAATCCTCACACTT
TTTGCTCCATTCTCAGGGGCTCCATACCCGGGGTCCCTGTTGAAGGAGGCAGTGGCTCTTCACTGTTTCTTTTGGTGCTTTTTCTTGGATCAGG
CTTCATAGACCCCACGCTGCCATGGAGGGGACAGAGGACACACAACCCCAATTCAGTCCCACTAGCCCCAGGTTACCTCCATACCTTCTCAGCT
TGGGCTCCTGAGATCTGGGAAATCAGTGGCCATTTCCTCTCAAAACAGGCTTTTGGGCTTATAGCACAGCTTCCTTTCCGTCTTCCTGCTTTTG
TGGGCTGGCCTATCCCTCCGTGGGTTCCAGTGACCCACCAGTCACACCACATCACCCATGACCTTCTTCCTTTTTGAAAGGTTCTCCCACCTCA
GGCCCACCTACAGCCTACAGCCCCACGGCTTTTTGCCTTGAGCTGACTCACGCCGTCCCCGATTCTTCCTCTCCCACCCACCCTGGATCTATCC
CTCGGTATTCACCAGCGCCAGTGGCATGCTCTTCCCAACGGGCAGAAATGGGGCACCGCACACGGGGTGATTCCTGGGTCTCCAGATTGATCAA
GGCAGCTCAGATGGGGCTGAGACAGGGGAACTGAGAACAAAACCGTCGATTATCCCAGTAGGAGACTTTGGTGTCTACGTTTGTGTCTGGAGAT
TTGGGGCAGCCTGATAATGCCCCACACAGGCTTGTGCGAGGGTTTCTGTGTGGCAGTGTGTGTGTGTTGCGAATGTCTTGGCGAGTATATAATA
GTTGATGGTAGACATTCTCAGTAGAGGAAGAGAGAGGCCTCTGTCTCTGTGGGTGTGTGGGTGTGTATTAATTGCTGGCAATCCCCACTTTCTG
GGTGTGATTGGTTGATTATTATAATTAAGATAACTTTGGGTAGCTGTGTTGTGTTAAGCTCAATCTGCATTTGGATTTGTGCATGTCAAGACAG
AGGTTGGTAAAACAACAATTTCAGTCCCACACTATCCTTGCTATCCTCACAGTCATTACAATTTTTTTTTGTCTCCACTTTCCCAACTCCAAGA
ACTTTAATTTTTTTATTTCTAATATTTTTCATGGGCCAGGAAGTGGACTTGAACCTCCCACATAGATAACTTTAGTCGATAACTTTCTACATCT
TTTTTTTTTTTTGAGATGGAGTCTCACTCTGTCCCCCAGGCTGGAGTGCAGTGGCTCAATCTTGGCTCACTGCAACCTGCACCTCCCAGGTTCA
AGTGATTCTCCTGCCTCAGCCTCCCAAGTAGCTGGGATTACAGGCAGAAGCCACCAAGCCCAGCTAATTTATGTATTTTTAGTAGAGACGGGGT
TTCGCCATGTTGGCCAGGCTGGTCCCAAACACCTGACTTCAAGTGATCCCCCCCCTCGGCCTCTCAAAGTGCTGGGATTACAGGTCGGAGCCAC
CGCACCTGGCCCAACTTTTCAGATCTTAAAAAATTTTTTTTAATTTATTTTTTATGGAGACAGAATATTACTGTGTTGCCCAGGCGGTCTCAAA
TCCCTGATCTCAAGCAATCTCCCGCCTCAGCCTCCCAAAGTGCTGGGATTACAGCCATCAGCCATTGTGCCCAGCTAAAAACATTTTTTTTAGG
CTTAAGCATGCTTAACTGGTTTCATTTGTCTTGGGGCAACTGAAAACAACTTTAATTAAAAATTTTTTTTAAATGAGACATGGTCTTGCTCTGT
CACCCACCCTGGAGTGCAGTGGTGCGATTATGGCTCACTGCAGCCTCAACCTGCTGGGCTCAAGCAATCCTCCCATCCCAGCCTCCTGAGAAAC
TGGGACTATACGCGCACATCACCATGTCCGGCTAATTGTTTCTATTTTTTGTAGAGATCGGGTCTCACTATCTTGCCCAGGCTGCAGCTTTGCT
TTTTGTCTGGCTGTTTGCCACTGGCTGTCTGAGTCTATTAAGTGGATCTGAGGTTGGTAAGACGAGGAGTTCCCTTGATGCCCAAGCACATTTT
GTACTTTGGTAGGTACGACACATTGCCAGAATACCCTCCCAAAAGGTGCTACCAATTTACGCCCACACCAATAGTCTATGAGAGGACCCATTTT
CTCACAGCCTCATCAGCAGTAGATATTATCACATTTTTTTTTTTTTTGAGACAAAGTCTCGTTCTGTTGCCCAGGCTGAAGTGCAGTGGCATGA
TCTCTGCTCACCGCAACCTCCGCCTCCCAGGTTCAAGCGATTCTCCCACCTCAGCCTCCCAAGTAGCTGGGATTACCGGCATGCACCACCACGC
CTGGCTAATTTTTGTATTTTTAATAGAGATGGGGTTTCACCATGTTACCCAGGCTGGTCTCAAACTCCTGACCTCAGGTGATCCACCTGCCTCG
GCCTCCCAAAGTGCTGGGATTACAGGCGTGAGCCACCACGCCGGGCCAATATTATCAATTTTTAAACATTGACCAATATGACTGAGAAGAACTA
TCTATCTCCTTGCTATTTTAATTTGCACTTAATTACAGTGAAGCAGAGCCTGTGCCAGGAGCTCCGAATCTGGGAGACGTATGACGACCCTGTG
AACCATCCCAAGGCTACTTAGTTCTTAGGGCCAGCAGAGGAATTTGGGGTCTTGGACCCTCTCTTATCAGGGTGGGATGGTAAGTGGCCTTTAG
GGACGCTCAATTTGACACCAGACCCATCACCACTCTCGGTTCCTTCCCAGCAAAGTGTCATGTAAATCAGCGGCTATTTTGGGATTCCAGCTGG
TGGTGATTCTAGACTTTTAGGGAGAAACCGAGATCTCCTTTCTCTTCTCCCTTTTCCCCAGCCTCTTCCTGTGTCTCCATTTCCCTCTACTAGT
GATAAAAACAGGATGAGCTGGGCATGGTGGTGAGCACCTATAACCCCGCTCGGGTGACTCGGGAGGCCAAGGCAGGAGGATTGCCTGTGCCCAG
GCATTTGAGCAGAGCCTGTGCAGCATAGCAGACTCCATCTCTTAAAAAAAAATCAGTATGGCCTGGGCGCGGTGGCTCACCCCTGTAATCCCAG
CACTTTCGGAGGTCGAGGCCAGTGGATCACCTGAGGTCAGGAGTTCGAGACCAGCTTGATTAACATGGTGAAACCCCGTCTCTACTAAAAGTAC
AAAAATTAGCCAGGTGTGGTGGCGGGCGCCTGTAGTCCCAGCTACTCGGGAGGCTGAGGCAGGAGAATAATGGCGTGAACCTTGGAGGCGGAGC
TTGCAGTGAGCCAAGATCACACCACTGCACTACAGCCTGGGCAACAGAGCGAGACTCCGTCTCAAAAAAAAAAAAAAAATTAGCCAGGCGCAGT
GTTGGGTGCCTGTAGTCAAGGAGAATCTCTTGAACCTGGGAGGCAGAGGTTGCAGTGAGCCGAGATCACACCACTGCACTCCAGCCTGGGGGAC
AGAGCGAGACTCTGTCTAAAAAAAAAGAAAGAAAAAAATGAATATGAAGAAATGGGGACCACAGAGCACAGCATGCACTCTGCAGTCAGAAGAC
CTCACCTCTGCTCTCCCACCGAGGACCGTCACCAAACCTCTCGGAGCGTCAGTTTCTTCAAATATAAAATTGGAAATAACATTTTATTTTTTAT
TTTTTCTTTGAGATGGAGTCTCACACTGTTGCCCACGCTGGAGTGCAGTGGCGCCATCTCGGGTCACCGCAACCTTCGCCTCCCAGGTTCAAGC
GATTCTCCTTGCCTCAGCCTCCAAAGTAGCTGGGACTACACGTGCATGCCACCACACCAGGCTAATTTTCTGTATTTTTAGTAGATATGGGGTT
TCACTATGTTGGCCAGGCTGGTCTCGAACTCCTGAGCTCAGGAAATCCACCCTCCTCGGCCTCACAAAGTGCTGGGATTACGAGTCTGAGCCAC
TGTGCTGGGCCATCTTTCGAACTTTTTAACAGCTTTCAGAGGAAAGATGGACAGGAGTTAGACTCTCCATTTACATGTGAAGAAACTGAGATTT
GGGCTGGGTGCAGTGGCCCATGTCTATAATCCCAGCACTTTGGAAACCTGAGGCGGGTAGACCACTTGAGGTCAGGAGTTCGAGACCAGCTTGC
CCAACGTGAAACTCCATCTCTACTAAAAATACAAAAATTAGCCGGGTATGGTGGCACATGCCTGTAGTCCCAGCTCTTGGGAGGCTGAGGCAGG
AGAATCACTTGAACCTGGAAGGTGCAGGTTAGAGTGAGCTGAGATCACGCCACTGCACTCCAGCCTGCATGACAGAGCGAAACTCCATTTCAAA
AAGAAACTGAGATTTGGCTTGAGAATTAACTTATCCAGGGTCATAGCGTAGTAATCTATTTTTCTCAACTCAGGAAACTCAGGGGAAGACAGGC
GTGTGACAGCACCCTTCTAGGACACCTTCCCAAGGTTGTTAGGTAAGTTGTCCTGGGGACCTCTGGGGATTAGAAGTCCCTCAAAAACAGTTCC
TAGGCCCCTGGAACCCTCCCTCCTCCAGGTTTCCTGACTCAGATAGGTCCCTTTTTCCTCATCCTTCAGGGCTTCTCATGAGAGGAGGCGGAAG
TGTGTGGAAATGAAAAATAATTCTGATGAGGATTAGCTTCTGCCATTCTGAAAACTCTGCTCTTCCTGCTTGTGTTAGAAGAGAAAGGCTAAGC
CATTGGAGCTGGTGATGGAATTGGTGCTGGTGGAGGTGGTGGTTGTAGTGACGGTACTACTGGTGGTGGTTGTGACGGTGAAGGTGGTGGCTGT
AGATGGTGGTCCCCGTGCTGGTGCTGGTGGAGATCGTGGTTATCGTGATGGTGGAGGGGGCAGTTGTAGTGACGGTGGTTGTGATGGTGGTGAT
GGGTGGTTACAGTGCTACTGGTGGTGATGGTGCTGGTTGTAGTGGTGGTGGTGACGGGGCTAGTGAAGCTGTTAGTGGTGGAGATGGTGATGGT
AGAAGAGTGCTTCTTTTCTGAATCTGTTACTCTGGCACAACAGCGGAATCATACAGCATCCCACCCCCTAAACTTCCTCTACTTTTCCTGAAAC
AAGGACTTTGAACATGAGCCCCGTGTTCAATAGAGCCTTCTTTCAGGTGGATGGGAAGCTCCCTGTTCAACTAGGATGTGTGCAACTTCTCTAA
AGGCTGAGGGCAGACTATACCGCAGGTGGCAGACCCAGGAGCATGGGAGAGGGAGGGCCTGTGAGTGGGTGTCATGGGTCTGGGAGTGTGTTAG
CACTGTCAGAGCCACGGCAGAGACGGTGGCTGACGAACTGAGGCGTGAGGACCTTCCAGGAACTGCCTCTGGAGAGCTGGTGGTGCCCCCTCCT
AGGAAGCAGCTAAGGTTAGAGACAGGGGTGTGCAGGTAGATGTCGAGCAACTGACCCTCTGAAAGAACATTTTAAAAAACTCTGATTTGTAGTG
TTTGCTGATCCCTGTGGTGTAAATACTCCTGCTATGGATGATTTCAAGCGACTCATGTGAGTCATTGAACACAGAGCCGGGAAGAGACTCACAG
TGCACTGTGATTTAGTACCTCCTCCATGCAGCTGCGATAGACGCAAGTAACCTCGACAGTGCAGACAATAGTAAAACGTAAAATAACTGGGCAG
TGATGATTTTTTAGTTTTTACTCCTTTTTTTTTTTTTTGAGATGGAGACTTGCTCTTGTCATCCAGGCTGGACCGCAGTGGCGCGATCTCAGCT
CACTGTAACCTCTGCCTCCTGGGTTCAAGCCATTCTCCTGCCTCAGCCTCCTCAGTAGCTAGGATTACAGGCGCCCACGACCACACCCAGCTAT
TTTTGTTGTTGTTGTTGTACTTTTTAGTAGAGACGGGCTTTCGCCATGTTGGCCAGGCTGGTCTCGAACTCCTGACCTCAGGTGATCCGCCCGC
CTTGGCCTCTCAAAGTGCTGGGATTACAGGCATGAGCCACTGTGCCGGGCCTACTTTGACTGTTAATATGTCTTGAATTGCAAGTTTATATAAT
TTAATTTTTAATTATGGCTGTGTTTAACCACTGGCTGGCAAACTCCCTAAACACCTTCCAGCTGGTTCTTGTGAGTGGGACGAAGCCGGCTACA
GCACACCACTGATGCCTGGGCACTGTTGCAGGGGGGACTGGCTCTCAAGCTGGAGCTGATGGGTGCTGGGGGCTTTCTCTCTTCTCTCCAGCCG
GATGTTCCCATTCCTGTCATTTACTGTGGCCGGGCTGGAGCCCACCAGCCACTACAGGATGTTTGTGGACGTGGTCTTGGTGCACCAGCACCAC
TGGCGGTACCAGAGCGGCAAGTGGGTGCAGTGTGGAAAGGCCGAGGGCAGCATGCCAGGTGCGCGCGCCCCTGGGAGCGGTGGGCTCTGTTTCG
CTGGGACTGGGCGCCCCCTGGTGGGCCCACCAAGCCCCTACCCCTAATTCCTAGACCTTTAACCCCCTCCCACTCCATCCCACGCCATTGCATC
CCTCCTGTTTCTGGCTTCCTGCTTTGCTCTAGCCTGTCCTCTCCTCAGTCCTCTGCCCTTCCCTGCCTGGTCCTCCCCCTGTGTCCTTCCTTAC
GTCCCTCTCGGGACAGGCAAAGCCCTACATCACCAGGGTTCTGTCCCGGGGGCTGCATGTCAAAGAGGTGAACTGTCCACAGGAAACCGCCTGT
ACGTCCACCCGGACTCCCCCAACACAGGAGCGCACTGGATGCGCCACGAAGTTTCATTTGGGAAACTAAAGCTCACAAACAACAAGGGGGCGTC
CAACAATGTGACCCAGGTAGGACCTGCTCTTCAAAACGTAGCCTCGCCCTGCTCCCCACCCTGGGTCTGAGACCTCCAAGGCCACAAGGGTCCT
GCGGGGCCAGTTTGGTTCATTTTTTCTTCCTTCCTACAGGAAGGAAGGTTCGTTTTTCTTCTGTCCTAAACGAAGGGTCATTTTTCCTCCTTCC
TAAACTCTGGCTGTTTCTCACCCACCTTGGGAGGAAGATGAGATGGGATGAAGCTGAATCTTGGACGGCGGTCATATTCAGCCCACACAGCCCA
ACCCAGCCTCAGGGTTTCTTCACCAAATCATGGGTTGCCATTGCTCCGGCACCATGAAAGGCACAGACTTGCCCCTGTGGTCCCAGGGAATAGA
TGCCGAGTTTCTCTAGGTTGAACAATCCTGTTAAAAGTGCCCTTGCTGGCTGGGTGTGGTGGCTCACACCCATAATCCCAGCACTTTGGGAGGC
CAAGGCGGGTGGATCACAAGCTCAGGACTTCAAGACCAGCCTGGCCAAGATGATGAAACCCCGTCTCTACTAAAAATACAAAAATTAGCCAAGC
ATGGTGGCGGCTGCCTGTAATCCCAGCTACTCAAGAGGCGGACGCAGGAGAATCGCTTGAACCCGGGAGGCAGAGGTTACAGTGAGCTGAGATC
ATGCCATTGCACTCCAGCCTGGGTGACAGAGTGAGACTCCGTCTCAAAAAAAAAAAAAAAAGAAAAAAGAAAAAAGAAAAAAAAGTGCCCTTGC
CCTAAAGCCCTGTTTGTGCTGATACCTTGGTCTCAATTGACATCTGGAGGTAGAAGAGGGGGCAAGAGGCTAGAATTGGTGCCCCAAAGAGTCC
GGACACTGGAGTTCGAAAGCTTGGGGGAAGTTACATGGTGGCAGAGCAGGGGAATGGACAGGATGACCTCAAGGTGCTTGCTAGCCTCACGTGG
GGCCAGCTGTTGGTGGGGGTGATGGGATCCTCGAAATCCTTCCTCCCCACCCCTACAACCCTCTTGCTCTGTCTACAGATGATTGTGCTCCAGT
CCCTCCATAACTACCAGCCCCGGCTGCATATCGTTGAGGTGAACGACGGAGAGCCAGAGGCAGCCTGCAACGCTTCCAACACGCATATCTTTAC
TTTCCAAGAAACCCAGTTCATTGCCGTGACTGCCTACCAGAATGCCGAGGTGAGGGCTGCCTGAGCCCCGGTGGGGAGGAGGGCAGAGTGGGGC
CCACTGTCTTCCTTGGGAGGGATTTGGAAAGTTCCCGAGCCCCAGACTCAGGACTCAGGTGACTCTATTTCCCTTCTCTCTAGATTACTCAGCT
CAAAATTCATAATAACCCCTTTGCCAAAGGATTCCGGGAGAACTTTGAGTCGTAAGTGCCACTGGGTTCAACTCAGCTTTGGTCCCTCCTGAGA
CACATCCTCTCCCTGCCCCTGAAAACAGGAGGGTGGGGCACACATCCTACACGTCGGCAGGCCAGGGAAGGAGGGTCGCAGAAGCAATGTCTCA
AACAGGTAGGCTCACAGGTGACTGGTTCTGCTTGTGACCCGTTTTCTTGCCTTCTATTTTTTTCTAGCATCTACACATCTCTTGACACCAGCAT
CCCCTCCCCGCCTGGACCCAACTGTCAATTCCTTGGGGGAGATCACTACTCTCCTCTCCTACCCAACCAGTATCCTGTTCCCAGCCGCTTCTAC
CCCGACCTTCCTGGCCAGGCGAAGGATGTGGTTCCCCAGGCTTACTGGCTGGGGGCCCCCCGGGACCACAGCTATGAGGCTGAGTTTCGAGCAG
TCAGCATGAAGCCTGCATTCTTGCCCTCTGCCCCTGGGCCCACCATGTCCTACTACCGAGGCCAGGAGGTCCTGGCACCTGGAGCTGGCTGCCC
TGTGGCACCCCAGTACCCTCCCAAGATGGGCCCGGCCAGCTGGTTCCGCCCTATGCGGACTCTGCCCATGGAACCCGGCCCTGGAGGCTCAGAG
GGACGGGGACCACAGGACCAGGGTCCCCCCTTGGTGTGGACTGAGATTGCCCCCATCCGGCCGGAATCCAGTGATTCAGGACTGGGCGAAGGAG
ACTCTAAGAGGAGGCCCGTGTCCCCCTATCCTTCCAGTGGTGACAGCTCCTCCCCTGCTGGGGCCCCTTCTCCTTTTGATAAGGAAGCTGAAGG
ACAGTTTTATAACTATTTTCCCAACTGAGCAGATGACATGATGAAAGGAACAGAAACAGTGTTATTAGGTTGGAGGACACCGACTAATTTGGGA
AACGGATGAAGGACTGAGAAGGCCCCCGCTCCCTCTGGCCCTTCTCTCTTTAGTAGTTGCTTGGGGAAGTGGGGCTCAAGAAGGATTTTGGGGT
TCACCAGATGCTTCCTGGCCCACGATGAAACCTGAGAGGGGTGTCCCCTTGCCCCATCCTCTGCCCTAACTACAGTCGTTTACCTGGTGCTGCG
TCTTGCTTTTGGTTTCCAGCTGGAGAAAACAACACAAGAAACTCTTGCGCATGAAGCAGCTTTTTGCATCTAGTGCGTGGGAGGGGTCAGGTGT
GGGACATGGGAGCAGGAGACTCCACTTTCTTCCTTTGTACAGTAACTTTCAACCTTTTCGTTGGCATGTGTGTTAATCCCTGATCCAAAAAGAA
CAAATACACGTATGTTATAACCATCACCCCGCCAGGGTCAGGGAAAGGACTCACCTCACTTTCGACACCTGGCCTGGGCTCCCCCTGCTCAAAC
ACACTCCGGATCAGACAAAAGGGGCTGGAAAGGGGGGAATGGCCCACATCTCAAGAAGCAAGATATTCTTTGTCGTGGTTGTGTGTGGGTGTGT
GTTTTTTCTTTTTCTTTCTTTTTATTTTTTTTGAATGGGGGAGGCTATTTATTGTACTGAGAGTGGTGTCTGGATATATTCCTTTTGTCTTCAT
CACTTTCTGAAAATAAACATAAAACTGTTGAATGTGCCTGCCTCAGTGCCAGCATGGGGGGACATGGATGGGGACTCAGTTGGGGTTGTACCCA
AGCTGGTGTACCCAAGGTGTTCTGTCAGCTTTCATTTATGGGGAACCTGCTAAGACCCTGAAATGACTCCAGCTGAGTTACAGCAAGGCCACAT
GTCCTACCTTCAGCACTCAGGGGGTTGGTTGATGCTACCTCTTAAGGCATCTTGGGACGGACAGAGAAGAATCCCTTGCCCTGTGTGCACCCTG
ACATTGAAAGGAGGGGTGTGAGGGCAAGGCCAAGGGCTGGACTGGGAGCGGGGGTGCAGGGCGCTGTGAGGCGGTGGCACTTGATTTTTCTTTG
CATTTCTAGCAGCCCTCCACCTTTATCTCTAGGGTTATTCAAGGATTAAAGAAATAAATATAAAATGAGCCATGTGAAATTACCATTTTTGTAG
GTCGAAAAGCCAAATATTAGCAATTTTATGTGACTCAAGCTAATACATGTAAAGGGTTTAAGAACATTGCCTGACAAACAGTAAGCACTCACTG
TGTAAGCTACTGTTACCAACAGTTTCTAGCTGTTTCTGTCTGTCTTTTTATACACACTGAATTGTGTTTGTAAAATAATACATACTTTTTTTTT
TTTTTTTGAGACAGAGTTTTGCTCTTGTTGCCCAGGCTGGAATGCAATGGTGCGATCTCAGCTCACTGAAACCTTCGCCTCCCAGGTTCAAGTG
ATTCTCCTGCCTCACCCTCCTGAGTAGCTGGGATTACAGATGTGCACCACCATGCCTGGCTAATTTTTGTATTTTTAGTAGAGACGGTGTTTCG
CCATATTGGCCAGGCTGGTCTCGAACTCCTGACGTCAGGTGATCTACCCACCTTGGCTTCCCAAAGTGCTGGGATTACAGGCGTGCGTCACCAC
ACTCAGCCTATACATGCTTCTTTTAAATAATTCAAGCAAGGAAGAAAAGTATAAAGACAACAATAAATTATCTCAAATCTTACCCATCAAGAAT
TATCATTAACATTAGGTGGGTTAGACAGAAATAGTTTTATAAATTGGAACCATACTGAAAAGGCTTTTTCTTAATGAAAATGCTTAAATTTTAG
CTTATAGAATTTAGTCACACACACACACACACACACACACACACACATCAAGACAAGCAAAACCTCTCAAACTCTCAAGTGAAATGAAGGGAGT
TGCTAAACTTAAGATAAATTTTTCTTCACTACAAGAAATATTTTCTTGGTTTTTTTTTTTTTTGAGACAGAGTCTCGCTCTGTTGCCCAGGCTG
CAGTGCAGTCGCACGATCTCAGCTCACTGCAACCTCCACCTCCTGGCTTCAACCACTTCTCCTGCCTCACCCTCCCCAGTAGCTGAGACTACAC
GCGTGTGCCACCACGCCCGGCTTTTTTTGTGTTTTTGGTAGAGACGGGGTTTTCACCATATTAGCCAGGATGGTCTCGATCTCTTGACCTCGTG
ATCTGTCTGCCTCGGCCTCCCAAAGTGCTAGGATTATAGGCGTGAGCCACCGTGCCCAGGCAAGAAATACTTTCTAAAAGAACACTCTCAGGCT
AAGACAGGTGCTTATAGGAAACATTAAGAAGTTACAGTTACTATGTTGCCCCACCACAGTCCAGGGTGCACCCCATTCTAATGGGGAAACATCA
TCATGGGCTTTGGGTAGTTCTCCCAGTTCTGTTTAAGGTCTGGAAAACCTGTTTTTTTTTTTTTTTTTTTTTTGGTCACAGTTCACATCCCATC
CTTTTTTGCTCTCTACTCAGAGGCACCTTCTAGTTAGAAGGAAAAAATACGGTGGCATACTTGGCTCCCTTTCCTTTGAATTTCGAATCTCATA
ATTTTGTAAATGACAGGAGATCTGCCACATTGTGCTCTGTGAGTTCAGATTATTTGTCCCCCTACTCCTACCCCGTGGCTGTCACTTTCTAAAC
TTAATGGGTTGCGTCTATTTCCTTTCTTGGAGGAACTGTGGTTGATAATTATAATACTCTTTTCGCTCACCATTTAAAAATGATTTTTGCTCCC
TTCATTAGATATCAAGTTAAGTGACTTGTGATCAAGCCATACTTTACCATCTTTTCTAGAAGTCTGACTGCATGTTTTGATGTGGTGTTATTTG
ACTCATAAAGGTTCATTACTATTATTTCTTCACTATTAGATGTACCTTTTACTGTATATACTGTGTATATATACACATACCACATATATCTATA
ATATATATAACCTAAATACCACACAACTCAAGATATTTCTTCAAGATTTAAACACCAATAATATCACAACTATATTTCCTCCATCTAATCTCCT
GCCTTTCCCTCATAGATAACCAGTATCTTTAATTTTGTGTTTTGCTTTTCTTGCCTTTTATTTGTTATATTTTTTATTTTTATTTTTGTAGAGA
TAGGGTCTTGCTATGTTGCCCAGGCTGGTCTTGAACTCTTGGGCTCAAGAGATCCTCCCACCTTGGCCTTCCAAAGTGCTGAGATTACAGTCAT
GAGCCATTGCATCCAGCCCCTTTCTTGCTTCTTAAAATTAAGTGTTAACACTTTATGTAAGTCTAACTACTATGCTATGTAGTTTTACTTGTTT
TTAACTTTATAAAATAATATATATGTGTGTGTGTGTATGTATACATACACACATATATGTTTTGATTTTTGACTCAACACTGTTTTTAAGATTC
ATCCATTTGTGGCAGGTAGCTATCTATTTCATTCATTTTTCACTATTTTATGATATTCCACTATGTGTATGTTTGCTATAATTTACTTATCTAT
TTTCCTGTTGACAATTTACACATTTTTGTTATTATGAACAGTTTTTAAAATATTTTTAATGTGTCTTCAGCCACACAAGTGCTAAAATTTCTCA
AGTCAAGTCTGTATCTAGAAATGGGTAGGGTATGTGAATGTACAATTTAACAAGAGAATGCCAAATTACTTTACCAATTTACACTCTCACCAGT
AATGTACAAGAGAACATGTTGAGTTTCTTTCTTTCTTTCAGCAGTAGTAAGGTTGAGCCTTTCTTCATATCTTTTCTAATCATAGGTTTGTAAA
ATGATTTGTTCATATCTTTCGCTCATATTGCTATTAGAGTATTTGTCTTTTTCTCATTGGTTCTGGTTCTTTATATATTCTTGACTTGATATCA
ACCATTATTTGGTTATTTATATTGCAATTATCTTCCTCTAGATTATTGTTCCTCTTTTCATTTTCTTTAAAGTGGTTTTCTGATGAACAAAAAT
TTGTAGTTTTAATGTAGCTAAATTTAACAATTTTACTTTTTTTTTTTTTTTTTAAGAGACAGGGTCTTGTTCTGTCACCCAGGCTAGAATGCAG
TGGTGTCATTATAGCTCACTGCAGCTGCAAACTCCTGGCCTCAAGTGATCCTTCCACTCAGCCTCCCCAGTAGTTAGGACTACAGGCATATGCC
ACCATGCATGGCTAATTTAAATTTTTTCTGTAGCGATGAGGTCTCGCTATGTCACCCAAGCTCATCTTGAACTCCTGACCTCAAGTGACCCTCT
CGCCTTGACCTCCCAAAGTGTTGGGGTGGCATGAGCCACCACACCTGGCCAACATTTTATAGTTAGTACTTTTCCTTGTCTCATTTAAGAAAAC
TTTTTCTGCTTGAGGGTTAGAAAGATATTCATCTGTATTTTTTTTTCCATAGGATTTGAACTTTTGCATTTGACATTTAATTCCTTTTACTGTT
TGGTGTGAACCATTCATTTTTGTTTTCGTTTTCCAATTTTTCCTGTTTGTTTTTGTTGAATAGTCTTTCTTTTGCCCATGGTAGTAGTCTCACA
TACTACTTCTGGTAGAGCAACGTCCTCTTTTTAAACTTTCTTCTTCTGAAGTGCTTTGACTATGCCTAGCTCTTTGCCCTTCTATATGATATAT
ATAATAACTTGGAAATTTTCATAACAACCAGACTGAGATTTTTATTGAGGTTGGACTAAATCTATTGTTCGATTTGAGAGAAGAGATAACTTTG
TGATATTGTCTTTCTATGCATGAACATGGGATATTTCTTCATTTATTTAGGTCATCTTTAAGGTTCTTTAGCAAAGTTTTCCAATTTGTAGGTG
TAGGACTTTTATATCTTTTGTTAAATTTATTCTTGGGTATTTCTTTTTTTCTCTGTAAAAGGCATATTTTAAAATATATGTTTCCTAGCTGTTT
GTTACTAGTTTGCAGAATTACAATTGATTTTTGTATATTGATCATGAGATCCAGCCATGTTGCTAAAGTCTTTTATTATTTTGGGGGAATTTCC
TATAACTTCTTTAGAGCTATCTCTGTCGCCAATCATATTATTTGAAAAAATGAGAGTTTTAGCCGCGCATGACGGCGGGCGCCTGTAGTCCCAG
CTACTCAGGAGGCTGAGGCAGGAGAATGGCATGAACCCGGGAGGCGGAGCTTGCAGTGAGCCAAGATCGCACCGCTGCACTACAGCCTGGGTGA
CAGAGCGAGACTCTGTCTCAAAAAAAAAAAAAAAGAGAGTAAAAAAAATGAGACTTTTATTTCCTTCTTTCTAATCATTATGCTTCTAATTTAT
TTTCCTTATCTTATTCGACTGGTCATAACCTCAAGTGCTGGTTTTTTGTCTTTTGGGGGATGGTTTCTTTCACTATTTTTTGACCCCACCTCTG
ATGGGGTCTCACTCCGTCACTCAGGTTGGAGTACAATGGTGTGATCATAGCTCACTGCAGCATTGAACTTCTGGGTTCAAGTGATGCTTCTGCC
TCAGCCTCCCAAATAGCTAGGACTACAGATGTGCACATTATGAAGCCTAGCTAATTAAAATTTTTTTTTTTTTTTTTTTTTTTGTAGAAACAGG
GCCTAGTTATATTGTCCAGGCTGCTCTTCAACTCTTGGCTTCAAGTGATCCTCCTGCATTGGCCTCCCAAAGCACTGGGATTAGAAGAGTGAGC
TGCCATGCTCAGCTCAGTTTTCCCCTATTTATTACACTTTTTTTTCCTTTTACTTGTTTGCATTTCTATAATTTATTTATTTTAGTGGCTTATC
TATACATTTTAATAAGTATATTTAATAATGAATGATGTTTTATCCTCCCTTCTCGTCAGTAAGATAATTTTAGATCACTTTAATTCTGATCTTC
CTCCTTCTGACTTACTGTTCCTCCTTCTGACTTACTAATAAAAACTTACTTCCTTCTTCTGACTTATTGATAACTCTTATATTATCATTTTAGT
AGCCATTCTAATAACCTTTTTTCATTCATGTTTTTCTCCTCTCAACTTACTCATTTCAGTTCTTTCTTTTTTTAACCCCTAAAAATTAGACTCC
TTTATTATTTTATTGAGACTATGCTTTGTCTGGACTTACCTTTATGTTACCATTCTTTTTGTTCATTTTCCCTTTTTTGCATTTCTCTTTTTTG
GGGGATCATTTACCTATATCTTTAAATCCTTTATAAGTTCTTTTAGAGAAGTTCTCTTTGTAAACTTCCCCTGGGCTTGTTTCTTATAAATGTT
ATCATTTTCCCTATTGGTATTGAGTGATTGTTTTGCTGAATACACAATTTTGGGTGAATAGTATTTTATTTATTTATTTTTTTTTTTTTTTGAG
GTGAAGTCGTACTCATTGTGTCACCCAGGTTGAAGTGCAGTGGCACGATCTCGGCTCACTGCAACCTCTGCCTCCCAGGTTCAAGTCATTCTCC
TGACTCAGCCTCCTGAGTAGCTGGGATTACAGGCATCCACCACCATGTCTGGCTAATTTTTTTTATTTTTTTTTTTATTTTTAGTAGAGATGGG
GTTTCACCATGTTGGCCAGGCTGGTCTTGAACTCCCGACCTCAAGTGATCTGCTCGCCTTGGCCTCCTGAAGTGCTGGGATTACAGGCATGAGC
CACTGCACCCAGCCTTTTCTTATCATTTTATATGAGTAATTCCACTGTCTTCTGGCTTCATTGTTGTGAGATCTGCTGCTATTCTAATTATCAT
TCTTTGTTAGGTCTTCTGTGTTTTTTCTCTGCTTTCCAGATCTTCTATTTATATTCATGCCCTAAAGATTCACTACCATGTGAGAAGGCATGAT
TTTATTTTTCCTTATCCTATTTGGGATACATTGTGTTTCATGGATCTTTGCATTCATCATTTTCATGAGCTCTGAAAATTCTCAGTCATCATCT
CTTTAAATATTGCTTCTTTCTATTCTCTCCAATTTCATCCTTTAGGACTCCAATCAGATGGGTGTCTTTTTTTTTTTTTTTTTTGACAGGGTCT
GGCTCTGTTGCCCAGGCTGGAGTGCGGTGGCACTTTCTTGGCTCACTGCAACCTCCACCTCCTGGGCTTAAGCCATCCTCCCACCTCAACCTCC
TGAGTAGCTGGGACTACAGGCATGCACGACCATACCTAGCTAATTAAAAGAAATTTTTTGTGTGTGTGTGGAGACAGGGTCTCGCTATGTTGCC
TAGGTTGGTCTTAAACTCTGGGCTCAAGCCATCTTCCCACTTTGCTTTCCCAAAGTGCTGGGATTACAGGTGTGAACCATGTTTATCCTTATAA
TTGCATTATTTGTTTTTGTAAACATTCTATACCTAGCTATTCTGTATTTTCAACATCTGCTGTCCTTGTAGGGGGTGATGATAGGGTTGTTGTC
TAAATCTGTTGTTTCTTCTGATTCTCAATGATAGTGGGTTTGCCTTCTTCCTTGCTTGGTGGTCTTCTTTCTTTCTTTATTAAATTTTCCTAAA
GAAAATCTTCAAGGAGTCTTTAGGCAATAACACTTCTGAGTATTTAACATGTCTTTATTTTACTTACACATGTGAGTGATAGCTTGACCCAGTA
TAAAAGTCTAGGTTGAAATCACTTTCTCTCAGAATTTTTTTTCTTAAAGACCAGTATCATAGTACTCTCAGATTTTTTTTTTTCCTGAGATGGA
GTCTCAGTCGCTCTGTTGCCCAGGCAAGAGTGCAATGGTGCCCTCTCGGCTCACTGCAACCACTGCCTCCTGGGTTCAAGTGATTCTCCTGCCT
CAGCCACTGGAGTAGCTGGGATTAGAGGTGTACGCCACCACGCCTGGCTAATTTTTATATTTTTAGTAGAGATGCGGTTTCACCATGCTGGCCA
GGCTGGTCTCGAACTCCTGGCTTCAAGTGACCCACCTGCCTTGGCCTCCCAGAGTGCTGGGATTACAGGCATGAACCATCGCACCTGCCCTACT
TACAGAATTTTTAAACCATTTTTTTCATTGTCACTTAGTTTTTAGTATTGCTCTTAAGAAGTCTGATGCCATTTTGATTCATGATCCTTTTTGG
TAGGTTTTTAGATCCTCTCTTGCTTCCCAGTGTTTTAAACATTCTGTATTATATACCTTGGTCTGAAGCCCTTTTTCATTTGCTATTCTGGCAC
ACCCAATGAGAACTATCAACCCAGAAACGCTGTTCTTCATTCTTAGAAAGTGTCTCTTCCTTGCTGGTTCAGTGGCTCATGCCTGTAATCCCAG
CACTTTGGGAGGGTGAGGCGAGCAGATCACTTGAGGTCAGGAGTTCAAGACCAGCCTGGCCAACGTGGCAAAACTCTGTCTCTACAAAAGTACA
AAAATTAGCCGGGCGTGGTGATGCATGCCTGTAATCCCAGTCACTCAGGAGGCTGAGGCAGGAGAATCGCTTGAACCCAGGAGGCGGAAGTTCC
AGTGAGCCAAGATTGCACCATTGCACTCCAGCCTGGGCGAATGAGTGAGACACTGTCTCAAAAAGAAAGAAAGTTTCTCTTCCTTTTTAAAAAA
CATTTTTCATATTTTTAATTTTTTTTTTTTTTTTTTTTTTTTTTAGAGATGAAGTCTCACTATGTTGGTCAGGTTGGTCTTGAACTCCTGGCCA
AAAAATTCTTCAACCAAGAGCATACTTCCTCCCAGAGAGCTGGTTTACTACCACACCACTGGGAGCTGATTTATTAGGCTGGGGCCCCCACAAT
GTTAGTGTGTAGAGATATGAGTTCTCCTAAAGAGACTTTTCCAAATTTCTTACCAGCTGACTGGAGAATATTGTAGGAGTGAAATATGAGAAGA
GAAACCGAGGGGCTAATTTTTTTCTTTTGCAAGCTTTCACTTACATTTTCTTCTTCCAGCTTTGCCTCACCCTTCCTAGACACTGTCTTTGGTA
TCCCCAAGTCCCATGTCTTTTTCTTTCATTTTCTTTAGAATGACACTCTATACTTCTAGGTGGTAGTGGTAGTGAAATAGTTATTTTGTTGCTC
AGGGCGGGAAGCAGTCATGGGCATCTTGATACATCTGATTTCAGACTTTTAGCCAATCCACCAATTGTCAGTACCATGCCTCAATCCCAGCTTC
CACTGTGCCAAGTTCTGAGCCTCTTAAGCATTCTTTCGGGCTAAATCAGTTCACTCATTGTTAATCCTGTTTGTAGACACTGTGGGCTATAGCT
CCATGTTGCTTAATCATGCACTACTCCTCCGTCTGCTTTCTAGTTTCCAAAAACTTGTTGAAATGTATTGTCTGGTTCCTTTTCCTCTGCTGTT
CTCTTTGTTCCTGTGGTTTCATACATTTGAAAAATTCCTATATTATCATTTTAGTAACCAATATACAATTTTTTTTTTTTGAGACAGAGTCTCG
CTCTGTCGCCCAGACTAGAGTGCAGTGGTGCAATCTCGGCTCACTGCAGCCTCTGCCTCCTGAATTCAAGCGATTCTCCTGCCTCAGCCTCCTG
AGTAGTTGGGATTACAGGTGCGCACCACCATGCCCGGCTAATTTTTGTAGTTTTAGCTGAGACGGGGTTTCACCATGTTGGTCAGGCTGGTCTC
GAACTCCTGACCTTGTCATCTGCCCGCCTCGGCCTCCCAAAGTGCTGGGATTACAGGCATGAGCCACCGCGCCCGGCCCAAATATACAAATTTT
AACCTAAACACTCTTCATCAATTTTGAATGGAACTTGGTACATTTTTTCAGCCTTCATGGATTGGCCTTCTTCTTTCTCTACCCCACACCCCCA
AATTTCAGACAAGTTTTCTTCTATTTTGTCTCCGATTACCTCCTATCCAGCTAGTATTTATTTTTCAGAGACATTCATTACTCTTCGACTAGAT
CTCAACCCTCTGTTTCTCTCCATTTTCTTTCTTTCTTTCTTTCTTTTTTTTTTTTTTTGAGACAGAGTCTCACTCTGTTGCCCAGGCTGGAGTG
CAGTGGAGTGCCGCGATCTCGGCTCACTGCAAGCTCTGCCTCCAGGGTTCACACCATTCTCCTGCCTCACCCTCCCAAGTAGCTGGAATCACAG
GCTCCCGCCACGCCACCACACCTGGCTAATTTTTTGTATTTTTAGTAGAGATGGGGTTTCACCATGTTAGCCAGGATGGTCTCCATCTCCTGAC
CTTGTGATCCACCTGCCTTGGCCTCCTAAAGTCCTGGGATTACACGCGTGAGCCACCACGCCCGACATTTTTTTTTTTTTTTTTTTTTGAGACA
GGATCTCACTCCTGTTGCCCAGGCTCGGGTGCAGTGGCGCTATCACAGCTCACTGCCACCTCGACTTCCCAGGCTCAGGTGATTCTCCCACCTC
AGCCTCCTAAGTAGCTGGGATTACAGGCACATGCCACCATGCCCAGCTAAATTTTTGTGTTTTTAGTAGGGACAAAATTTCATCATTTTACCTA
GGCTGGTCTCAAATTCCTGGGCTCAAGCAATCTGCCCGCCTTGGCCTCTCTAAATGTTGAGATTACAGGCGTGTGCCACTGCACCCGGCCTTTG
TTTCTCTTCCTATTACTTAGTTTTCATTTTTTGACTTTATATTCTGTCCTCTGGGAGAGATTTCCAAAGTTATCTTAGTAGTGGCATATTAACT
TGGGGATGGCTCAAGATTAATTTCTAAGCAGAGAGTGATCCAGAAGGATAAATATCTGTACTTATGATTTACATGAATGCCTTTCTGAGTGTCT
GTGGTTACAGCTATCTCTTAATATGCCATATTTTGTAAGAGTTTATATGGCAAGAGTTATAAACAGCT
HUMAN SEQUENCE - mRNA
CGGCCCGCTGGAGAGGAAGCCCGAGAGCTGCCGCGCGCCTGCCGGACGAGGGCGTAGAAGCCAGGCGTCAGAGCCCGGGCTCCGGTGGGGTCCC
CCACCCGGCCCTCGGGTCCCCCGCCCCCTGCTCCCTGCCCATCCCAGCCCACGCGACCCTCTCGCGCGCGGAGGGGCGGGTCCTCGACGGCTAC
GGGAAGGTGCCAGCCCGCCCCGGATGGGCATCGTGGAGCCGGGTTGCCGAGACATGCTGACGGGCACCGAGCCGATGCCGGGGAGCGACGAGGG
CCGGGCGCCTGGCGCCGACCCGCAGCACCGCTACTTCTACCCGGAGCCGGGCGCGCAGGACGCGGACGAGCGTCGCGGGGGCGGCAGCCTGGGG
TCTCCCTACCCGGGGGGCGCCTTGGTGCCCGCCCCGCCGAGCCGCTTCCTTGGAGCCTACGCCTACCCGCCGCGACCCCAGGCGGCCGGCTTCC
CCGGCGCGGGCGAGTCCTTCCCGCCGCCCCCCCACGCCGAGGGCTACCAGCCGGGCGAGGGCTACGCCGCCCCGGACCCGCGCGCCGGGCTCTA
CCCGGGGCCGCGTCAGGACTACGCGCTACCCGCGCCACTCGAGGTGTCGGGGAAACTGAGGGTCGCCCTCAACAACCACCTGTTGTGGTCCAAG
TTTAATCAGCACCAGACAGAGATGATCATCACCAAGCAGGGACGGCGGATGTTCCCATTCCTGTCATTTACTGTGGCCGGGCTGGAGCCCACCA
GCCACTACAGGATGTTTGTGGACGTGGTCTTGGTGGACCAGCACCACTGGCGGTACCAGAGCGGCAAGTGCGTGCAGTGTGGAAAGGCCGAGGG
CAGCATGCCAGGAAACCGCCTGTACGTCCACCCGGACTCCCCCAACACAGGAGCGCACTGGATGCGCCAGGAACTTTCATTTGGGAAACTAAAG
CTCACAAACAACAAGGGGGCGTCCAACAATGTGACCCAGATGATTGTGCTCCAGTCCCTCCATAAGTACCAGCCCCGGCTGCATATCGTTGAGG
TGAACGACGGAGAGCCAGAGGCAGCCTGCAACGCTTCCAACACGCATATCTTTACTTTCCAAGAAACCCAGTTCATTGCCGTGACTGCCTACCA
GAATGCCGAGATTACTCAGCTGAAAATTGATAATAACCCCTTTGCCAAAGGATTCCGGGAGAACTTTGAGTCCATGTACACATCTGTTGACACC
AGCATCCCCTCCCCGCCTGGACCCAACTGTCAATTCCTTGGGGGAGATCACTACTCTCCTCTCCTACCCAACCAGTATCCTGTTCCCAGCCGCT
TCTACCCCGACCTTCCTGGCCAGGCGAAGGATGTGGTTCCCCAGGCTTACTGGCTGGGGGCCCCCCGGGACCACAGCTATGAGGCTGAGTTTCG
AGCAGTCAGCATGAAGCCTCCATTCTTGCCCTCTGCCCCTGGGCCCACCATGTCCTACTACCGAGGCCAGGAGGTCCTGGCACCTGGAGCTGGC
TGGCCTGTGGCACCCCAGTACCCTCCCAAGATGGGCCCGGCCAGCTGGTTCCGCCCTATGCGGACTCTGCCCATGGAACCCGGCCCTGGAGGCT
CAGAGGGACGGGGACCAGAGGACCAGGGTCCCCCCTTGGTGTGGACTGAGATTGCCCCCATCCGGCCGGAATCCAGTGATTCAGGACTGGGCGA
AGGAGACTCTAAGAGGAGGCGCGTGTCCCCCTATCCTTCCAGTGGTGACAGCTCCTCCCCTGCTGGGGCCCCTTCTCCTTTTGATAAGGAAGCT
GAAGGACAGTTTTATAACTATTTTCCCAACTGAGCAGATGACATGATGAAAGGAACAGAAACAGTGTTATTAGGTTGGAGGACACCGACTAATT
TGGGAAACGGATGAAGGACTGAGAAGGCCCCCGCTCCCTCTGGCCCTTCTCTGTTTAGTAGTTGGTTGGGGAAGTGGGGCTCAAGAAGGATTTT
GGGGTTCACCAGATGCTTCCTGGCCCACGATGAAACCTGAGAGGGGTGTCCCCTTGCCCCATCCTCTGCCCTAACTACAGTCGTTTACCTGGTG
CTGCGTCTTGCTTTTGGTTTCCAGCTGGAGAAAAGAAGACAAGAAAGTCTTGGGCATGAAGGAGCTTTTTGCATCTAGTGGGTGGGAGGGGTCA
GGTGTGGGACATGGGAGCAGGAGACTCCACTTTCTTCCTTTGTACAGTAACTTTCAACCTTTTCGTTGGCATGTGTGTTAATCCCTGATCCAAA
AAGAACAAATACACGTATGTTATAACCATCAGCCCGCCAGGGTCAGGGAAAGGACTCACCTGACTTTGGACAGCTGGCCTGGGCTCCCCCTGCT
CAAACACAGTGGGGATCAGAGAAAAGGGGCTGGAAAGGGGGGAATGGCCCACATCTCAAGAAGCAAGATATTGTTTGTGGTGGTTGTGTGTGGG
TGTGTGTTTTTTCTTTTTCTTTCTTTTTATTTTTTTTGAATGGGGGAGGCTATTTATTGTACTGAGAGTGGTGTCTGGATATATTCCTTTTGTC
TTCATCACTTTCTGAAAATAAACATAAAACTGTTAAAAAAAAAAAAAAAAA
HUMAN SEQUENCE - CODING
ATGGGCATCGTGGAGCCGGGTTGCGGAGACATGCTGACGGGCACCGAGCCGATGCCGGGGAGCGACGAGGGCCGGGCGCCTGGCGCCGACCCGC
AGCACCGCTACTTCTACCCGGAGCCGGGCGCGCAGGACGCGGACGAGCGTCGCGGGGGCGGCAGCCTGGGGTCTCCCTACCCGGGGGGCGCCTT
GGTGCCCGCCCCGCCGAGCCGCTTCCTTGGAGCCTACGCCTACCCGCCGCGACCCCAGGCGGCCGGCTTCCCCGGCGCGGGCGAGTCCTTCCCG
CCGCCCGCGGACGCCGAGGGCTACCAGCCGGGCGAGGGCTACGCCGCCCCGGACCCGCGCGCCGGGCTCTACCCGGGGCCGCGTGAGGACTACG
CGCTACCCGCGGGACTGGAGGTGTCGGGGAAACTGAGCGTCGCGCTCAACAACCACCTGTTGTGGTCCAAGTTTAATCAGCACCAGACAGAGAT
GATCATCACCAAGCAGGGACGGCGGATGTTCCCATTCCTGTCATTTACTGTGGCCGGGCTGGAGCCCACCAGCCACTACAGGATGTTTGTGGAC
GTGGTCTTGGTGGACCAGCACCACTGGCGGTACCAGAGCGGCAAGTGGGTGCAGTGTGGAAAGGCCGAGGGCAGCATGCCAGGAAACCGCCTGT
ACGTCCACCCGGACTCCCCCAACACAGGAGCGCACTGGATGCGCCAGGAAGTTTCATTTGGGAAACTAAAGCTCACAAACAACAAGGGGGCGTC
CAACAATGTGACCCAGATGATTGTGCTCCAGTCCCTCCATAAGTACCAGCCCCGGCTGCATATCGTTGAGGTGAACGACGGAGAGCCAGAGGCA
GCCTGCAACGCTTCCAACACGCATATCTTTACTTTCCAAGAAACCCAGTTCATTGCCGTGACTGCCTACCAGAATGCCGAGATTACTCAGCTGA
AAATTGATAATAACCCCTTTGCCAAAGGATTCCGGGAGAACTTTGAGTCCATGTACACATCTGTTGACACCAGCATCCCCTCCCCGCCTGGACC
CAACTGTCAATTCCTTGGGGGAGATCACTACTCTCCTCTCCTACCCAACCAGTATCCTGTTCCCAGCCGCTTCTACCCCGACCTTCCTGGCCAG
GCGAAGGATGTGGTTCCCCAGGCTTACTGGCTGGGGGCCCCCCGGGACCACAGCTATGAGGCTGAGTTTCGAGCAGTCAGCATGAAGCCTGCAT
TCTTGCCCTCTGCCCCTGGGCCCACCATGTCCTACTACCGAGGCCAGGAGGTCCTGGCACCTGGAGCTGGCTGGCCTGTGGCACCCCAGTACCC
TCCCAAGATGGGCCCGGCCAGCTGGTTCCGCCCTATGCGGACTCTGCCCATGGAACCCGGCCCTGGAGGCTCAGAGGGACGGGGACCAGAGGAC
CAGGGTCCCCCCTTGGTGTGGACTGAGATTGCCCCCATCCGGCCGGAATCCAGTGATTCAGGACTGGGCGAAGGAGACTCTAAGAGGAGGCGCG
TGTCCCCCTATCCTTCCAGTGGTGACAGCTCCTCCCCTGCTGGGGCCCCTTCTCCTTTTGATAAGGAAGCTGAAGGACAGTTTTATAACTATTT
TCCCAACTGA

[0291] TABLE 27

MOUSE NOMENCLATURE
ICSGNM Stat5b
Celera mCG20224
HUMAN NOMENCLATURE
HGNC STAT5B
Celera hCG16577
MOUSE SEQUENCE - GENOMIC
CAGGGGCGGGCACTGCTGCTTGTCTCGTCACGATTCCTCGTGATTCATCTTAGCATGTCAAGTCTGAAAATGTAGAGTGCCACTCTGCCCGCCC
TATGGGTGGGGTTGCCCAGCCCCTCCGTTAGAGTGTTGTCCACCCGATTCACCTACTGATGTGCCTTTTCCTTTCTTTTTTTTGTTTTTGAGGT
CCAGGGAACTGATAGCAGGGCCTTGTGCCTTCTAGGCCAGAGCTCTACCAGTGGGCCGTGTCTCCAACTCCTTCTCATTCTGTGACTAGTAAGA
AGCGTGCAAAGCCAAGAACATCCTGTGCCCAGAGATGGATGTTATCTATGGCTTCTGCAGCTTTGATGCTCCTTGTCTGAGTCTACTGTGTGTC
TGTATGTGTCTGTGTGTGTCTCTGTGTGTGTGTCTGTGTGTATCTCTGTGTGTATCTCTGTGTGTGTCTCTGTGTGTGTCTGTGTGTGTGGGTA
TGTCTGTGTGTATCTGTGTGTGTGTCTCTGTGTGTGTCTGTGTGTATCTGTGTGTGTGTGTGTCTGTGTCTCTGTGTGTGTATCTCTTTGTGTG
TCTCTGTGTGTGTGTCTGTGTCTCTGTGTGTATATCTGTGTGTGTGTCTCCGTGTGTGTGTCTGTATCTCTGTGTATGTATCTCTGTGTGTGTC
TGTGTGTATGTGTATCTCTGTGTGTGTCTCTGTGTGTGTGTCTCTGTGTATCTCTGTGTGTGTCCAAGTGCACGCATGTATCTGCACAAGTCTA
TAGACGCCAGAGATCAATGTTGGGTGCCTTCCTCAATTGCTTTACAGCAGCAGTTCTCAACCTCTCTGGGGCTTGAACGACCCTTTCACCAAAG
CCCATGAGAAAACACCGATATTTATATTACAACGCGTAACAGTATCAAAACTACAGTTATCGAATAGCACAAAAATAGTTTTATGGTTGGGGGC
TCACCACAACATGAGGAACCATATTAAGGGTCGCAGCGTTAGGGAAGTTGAGACTGGGTATCTCAGTGAGCCTGCAGCTTGCCCACTCAGCTGT
GGGGGCCAGCAAGCTCCAAGGATCCTTCTGAATGCCTTCCCAGAACTGGGAGCACAAGTGCCTGCTGTTCTTTAACATGGGTCCTGGGAATTGA
ACTCAGATCCTAAAGACAGCACAGTGAGTGCTTTGCCAACCAGGAGCCGTCTCCCCAGCCCAGCCTGCTTTCTTTTTGAGGGAGCACGTGTTTT
AATATAAACATGGTTGTATTTAGGTGAGAAGTTTAAATATGCGAGAATCCACTGATCTGTGCTTACTCTCTGCACGCAGCAAATAGCCACCCAA
CCCCCGCGCCCCCCTTTTACCTTCTGTCCTGTCCTTCTGTTCATTACCTCTCTTCTTCCCAAAGCGACACACGGTGGGTGAAGATTTATGACTG
TCTTCCCAGAATTTTATTATCTGTGTTGCCCGGGCAAATTTTTTCCTTTTTTGTTTCTTTGTGGGCCACTTTCACTCCTGTTCCCTTCTCATGG
GCTTATGATTTTTTTTTTCTCCCCTGAAAGAGAATCTTCTTTCTGGTTGCTTATAAGCTAGTGGTTAGGTTGTTTTGTTTTGTTTTGTTTTGTT
TAAAGGGCAGATGGTGCTAGTATTGACCTACTTTTAGATGTGGTCATTTACCCTAACCTTGCTCGGTCAGGCCAGTATGAACACAGTCTTAATC
TTCTAACACTGTGTTTCATATTTTCTGTCTCTCAAAGTCCTTGTATTCGGTGACCACTCAACACAGTAATGATGTTGACATTGACAGTGAGAGC
ATCCACATGACCAGAGACCTGGTCCCTTATCCCCCTCCCAGGATCCCTCAGTTCTCAGCGGGTGCTGGGAGGTTTAACCATTTGCAATGCTGGC
ACCTTGCCTGGAACTTTTCAGATCAGAACCAATGTTTATCCATTGAGTCCATCTGCCAACTGTCCCTAGCCTTTGCTAAAACCAGAGTCTCCCA
ACACTGCGTTTCTCCTCTCTCTTTAAATTATTAAGTGTGACAACGTGTGCACAAGCACAGAGGGTGACATGACAACTCACCACAAGTTCTCAGG
ACACAGGCGGTGCTGGGCAGTGGCAACAGGGCACTGCACAGTCACGGCCTCTTGGCACTGAGAGATGGGGTCATCTTGGTAATGGCATTAAGGG
CATGTGCCACCAGGCCTAGCTTTTTTCTCTTTTTCAGTTACAGCTTTATTGAGATAGAATCACGTGTTATAAAATTCACCTTTTTATTTAGTTT
CGGCTGTGTGTGTCTGTCTGTCTGTACCATGGCATCCTTGTCGAGGTCAGATGACAGCTAATGGATGTTTGCTCTTCACTCCACTATGGGTTTC
AGGGGTCAAACTCAGGTCATCAGACTTGAATGACCAATGCTTTTACCTGAGAGCCATTTCCCTGGCCCCATCAACATTCTAAAATGTCCAGAAT
TCAGTCTCCCGGGCGTTGTAGTCCATTACCACTGTCCACCCCAGCCTTAATGTGTTTTCCTCACTTCCTCGCTTCCCCAAAAGTTCAACCTCAC
TCTTTTCTGTGGCTCTGAATTTGCCTATTGTAGAATCACAGTGTAGTTCAGGAAGTTTGTCCTCCACAGTTTTCAGTGTTCTCCTTCTGAGTTG
GGGGAACAGGACTCACAGTGCCCCTGCCCCACCCTTCCATAGGTTCTTGTCTGTAAAGCCCTTGTGTCAGCGGGACTGATTAAGAAATCAGAGT
ATCTGGGACTGGAGACATGACTTAGCAATTAAGAGCACTGGCTGCTCCTCCACAGATCCTGAGTTCAAGTCCCAGCCACCACAGGGAGGTTCAT
AGCCATCTATAATGTGATCTATACATAAAAAGGGAAGGAAGGAATGAAAGAAGGGAGGAAGGGAGGGAGGAAGGAAGGAAGAAGAGTATTAGGC
CCAGCAAAATGACTCAGTGGATAATGATGATTGCCACCAAGCCTGACATCCTGAGTTTGATCCCCAGCACAACACACAGTAGGAGAACAAACCC
CCTACAAGTTATTCTCTAACTGCCAAAGGCGTGCTATGGTGTGTGCGCACACACGTGCATACGCGTGCGCACACAAATGCAATAAAAATAAGAA
AAAGAATACCTTATTCTTAAAGGAAGGTAACTTTTGTCCTGTGGAGCATTAGGAAGCAGGAGGATAGCAGGAGCTGCTCATCAATCAGATGAAG
TTTGGAAAAGCTTGTTGGTGGGGTGAAGATGGAGGTGGGGAGAAGGAAGTGCTAAGTGTAAGTGTGAAAGAATCATTGGCTCTCCTCAGGGGCT
GACCACACTCAGGCTCTGTGTTACATACTTACACACACACACACACACAACTCAGAAGTTATAGAAACTCCGAATAGTAAAAACTAACCTGGCA
AACCATATCTCTCTGTGAGTGTTTTAAACCCTCATCTCTCCTCAAGCCACAATTTGTTCAGTCCATTGGCAGAGTTTCGCTGGAAGCTTCCAGC
AAGAGAGCCTGCTTTCCGCCAGGGAAGTTACAGCAAAACAGTCTCTGGTGTTCTGAAAACCTTCACAGTAATGCCTTTGTTTGCAAACGCTTCT
GCTTGGGGCTGGGAGTGTGCCTCAGTTGGTACAGCTCTCGACTAACAGGCACAAATTGACCCCCAGAACTAGACTAACAGAACACACCTATAAT
CTCAGTACACAGGAGGTGGAGCAGCAGGAGCAGGTATTGAACTACATAATGAGTCCAGTGCCAGAGGCAAGCCTGGGCTACCCAGAGCTGACCT
AAATATATTTGTTAAAGAAAAAGTTTCTGATAGAATGTTAGCTATTGATACAACATAACACTGATCACCAGCATAGTAGATATCCCTTCCTTTG
GTTTCCAATAAGCCTGTGAAGTTGAGGTTTTTATAAACAGGTACTTCTGGCCCCTTATTTAACCTTCTCCACCCTTGGTCTAGGTGTTCTGGGT
CAACATAGGTGCTGGGTGTGTTTAGCCGGTATAGCACTCTGTGTCCAGGCCCTGGCCAAGCTGTGAACTCCACAAGTGTGACTGCACAGAGCTC
GGCTGACTGTCAACACTGTCCTAAAAATATGATGCTGAATCCAGTTCCCAGGGTTTAGAGCGGCCCCTGTGATGATTTACCAGCGATACAAACC
ACTTCCCTTGTCAGAATGTCACGAACTGAAAACTGAGCTGCCGGGTCAATAAGCAGAGAAGAGCATGCGCATGCGCGGGGTAGGCTGTCTCCAT
GCGGGTGGAGGAGCCGCCCGGTGGCTGGATTGACCATGGGTACAGGGCCGGTGGGGGCCCCCCCACTTACACCTGTGTGCACAATGTTTCCTGG
TGAGTGTGGAGAGTTCTGACAGGCATGGGAGAAAAGCACTAACCAGACCACAGGTCTTGAGCATTTAAACTGGTAAGGAGTGGGAAGAGTTTTT
TGTCTGGAGTGAGTTACTTACCATTTAGGAAGTGGAGGCAAGGAGCTATAATGGCTACAACAGTAACCTTCATAAATCTATGTGGATAAAACCC
ACAGTTTAAAAGTAAAACGGACATCACTGTACTATTTAGTGTGGATATATATATACATTTTTTTTATTTTAACTGACACAACTGGGAAAGGGCA
TGCTCCCTCATACAGTGTGCGATGATCAGATCAGCTTAATTGTCAGATCTGTCACTCAACATTGATGATGTGTTTGTGCTGGGAGCGTTCAGAT
TCCTTCTCCTCGTGACGGATAGTGAGCAAAATCCACACCGGAGCTCTATTTTCTATCCCTATTAAAGTACTTTTATGTCGTGAAACTATGCTGT
ATTTTTCAAGATAAGGCAATTACCACTTTGTATTTACCAGCTATTATCCTTCAAATACTGTACTATTAAAAAAAAATACCATGACACGCTCAGA
ATTGGAAACATAAAAATATTCTGACCAAAAAATTAATATATATATTTTTTTTCTGACAAATTCTCAGAGCTCAGCATTCTACTCTTTAATAAAA
ACTAAGAACAAATATAAAACCTGAAACACAAATTGCCTTTATACCATGCAGCTCCCTAGAGTTCTTCTTCTGTTTCTGCAATATTGTTTTTACA
TCTTTTGAAGCTGGACACACCTTTACTACCCACATGAGTGTAAGTGTGAGGTAAAGATAGGTGGATTTCTGTGAGTTCAAGGTTAGCTGGTCTA
CATGTTAAGTTGCAGACCAGCCAGGTCTACTGAGTGAGACTCAGTCTCAAAAAATAAACAAAGGCGTTTGGGTTTTTTTTAGGTTTGGTTTGGT
TTGGTTTTTGTTTGTTTGTTTGTTTGTTTGTTTGAGATAAAGAGAGAGAGAGAGAGAGAGAGAGAGAGAGAGAGAGAACGTATCATCTTGTAAA
CCCAGGCTGGCCTTAAACCTTGACCTGTTTACCAAGTGCTGGGATTGCAGGTGTATACCACCCCATTAAGCTGTTTCTCTCTTAAAACAACAAT
AAACTCCGGAAATATGCTCAGCCAACAGGACAGCTAATAGATTTGTGTATTTGTTCATTTAGCCTATCGGTTCCCTACCAGTGTAGGTCACAAC
CCTTTTGGGGATTGAATGACTTTCTCACAGGGTCATCTAAGACCATCGGAAAACACAGATATTTACATTACAATTCATAACAGCAAAATTACAG
TTATGAAGGAGCAATGAAATAATTTTAGAGTTGGCATGACGAACTGTATTAAAGGGTTGTAGCATTAGGAAGAGTGAGAACCACAGATTTAGCA
AATACTTGTTTACTGCTCTCTGTGCTGGGCTGCTACACATGCATTTTGGGGACAGGGCAGTTAAGACATGTCCTCTTCTATTGCGGTTCAGTGG
AAGGAGACAAATTAAAACAAAAGAAAACTAGACAGAAAAATGACAGGCCTCTGTGATGAAAGAGAGATCACCCACATAGAGTCACCCCAGTTAT
ACAGTTATAGCTGAGGAGCTCATTAAAGATGTTTCATTCTACACTGTAGAATTTCTTCTTCTTTTAAAAAAAATTTGTTTGTTTGTTTGTTTAT
TATATGAGTACACTGTAGCTGTACAGATGGGTTGTGAGCCACCATGTGGTCACTGGGAATTGAACTCAGGACCTTTGGAAGAGCAGTCAGTGCT
CTTAACTGCTGAGCCATCTCTCCGGCCCTACACCGTAGAATTTCATACTCATGTTATGTTCTGTAATAACTTTGAAAAGAGCTCATCTGAAGCT
GGAGAGACGACTCAGTCGTTAAGAGGCTGCCCTTCCAGAGGACCTGGGTTGTATTCCCAGCAACCACATGGCAACTCACAACCATCTGTAACTC
CAGTTCTAGGAGATCTGACCCCCTCTTCTGGTCTCCACAGGTACTACACACATGTGGTCCACAGACCAACATGCAGGCAAACACCCACACATTA
AGTAGATCGGAAAAATATATATCTTAAAAAAGGAAAAAGCAGACATGTCCAATTGTGTTTGCTCATATTTGTTTATTAAAGCAACAACAACAGA
ATAGTACTGCTTATCTGCCAAGCACCTATGTACATAAAGTTATCGTGTGTTTAGTAAAGATGATGCATGCCAGACAGNNNNNNNNNNNNNNNNN
NNNTTGGTGTCTGTTGGAATCACTCAAATTTTCATTAAGGGAGCTACTGTGAGGCCCCACTTCCATCTTGTCCTAGGGCTGAGTGTGTGGGCGT
GCATATGTGGATCTGAGTCTGTGTGTGTGTGTGTGCGCGCGCGTGTGCATGTGCGTCTGTGTGTGTGTGTGTGTGTGTGTGTGTATACTTATGG
AGGCTTGAGCTATTCACCTCTTAATTTTATTTTTGAAACACGGTCTCACTCTGTTGCCCTGGCTGCCCTGAAACTTTCTATATAGACCAGGCTG
ACCCTCAAACTCATGAACAGCCACCTACCTCTGCCTTGTGACTATGACACCATACGCACCCCCTTCCCTCGATGTCTTTTGAGAGAGTTTCTAA
TCTCCTGGAGTTCCTCTCTCCATCTCCCAGCTCTGAGATTACAAGTGTCCACCAGGCTTTTTACTTGGATTCTACGATTTGAACTTGGGTCCTC
TTGCTTGCAAGGCAAACACTGGCTGAATCACCTTCCTAGCCCAGTCTGCATTTGTTTGTTTTCATATATTTATGTTGACTTGCTGTGTATGAAT
GTTCTGCACACATGTATATTTGTGTACTATGTGCATGCAGTACCCTGGAAGGCCAGAGCAGGGCATCAGATACTCTGGGTCTGGAGTTACAGAT
GGTTGTGAGCCATCAGGTGGGTGCTGGGAAACAAGCCCAGGTTCTCCTCAAGAGCAACAGTGCTCTTCACCACTGAGCCATCTCTCCAGCACCC
CCCTCCTTGTTCTTAACTAAGAAAGAGTGCTACCCGAGCCCCACTCTTCGTCTGTCAGGCCTCTGCATGCTTAAATCTCCAGTCTCCTCCACTC
CCAATCTCTTTACTCTTCCTCCAAAATCATGAGCTGCTCCTGGTCTGATTTCGAAACTTCACTAAAACATTGTACAGTTGTCTTCCAGATGTTT
GACTGGGATGCAGAATTGCTCTCCTGTTCCAGTTTTCCTGTGATGAACTCACACCCACTGAACTTTGCAGTATTGGAAAATCTCACTCTTATCT
CAGCCCTGGAGCCTGAAAGCTCCGAGTTAAACCATCCAAGTATCCTATAGCCGCACACACATCTAAAATAGGTAACCAACCGGCACCCACCCTA
CACCTCACTGCTAGCTAACTGACCTGCCCCATAAATACCTCAGTGTTACTCGATCCGACACCCACTGCTCACAGAGAGATCTTTGTTTCCTGGC
ACACATGTGCGTGCAGTCTCTGGGAGTCAACAAAACCCAGGTCCAGTGCACTGGACCATGGCTGTAACACAATCCTTAGGCCAACTGTGAAAAT
CAGTAGCTAAGTCATTTTGAGATTGGATTCAAGACGCCCAGATCCGTATTACCAAAAGCAGTGTTACACCAAGTCTGGTTTTAATGTCTGAAGT
TCCTATTAACATAGCTTCTCCACTCTGGGGAATCCCAGGTCTCTGCCAAATGCACTTAATTCTCAGGTCTGTCTGAAAGGGCTCCTAGTAGTTT
CAGAAAGCATCTATTTGTTTGTTTGTTTGTTTGCTTGCTTGCTTGCTTGCTTGTTTGTTTGCATACACTGTAGCTGTCTTCAGACACACTAGAT
CCCATGACAGACGGTTGTGAGCTATCATGAACTTAGGACCTCTGGAAGTATAGTCAGTGCTCTTAACTGCTGAGCCATCTCTCCAGCCCCCAGA
AAGCCATTTTCTAAAGCGTGTTTTTGTTGGTGCAGCTTGTTTTGGTTTTGATGTTGTTTCTTTAAGAAAGAGTCACAGGAAGCCCACCCTGGCC
TTGAATTCTTGATCCTCCTGCCTTCACATTCTGAGTTCTGGGATTAAAGGTTCTACCACAAGATCCTGTTAAAAAGAAAAAAAAAAAAACAGAT
AATCTCACTATTGCTGGGACTAGTGGCGCCAAGCCTGTAGTCTTAGGTTAAATTAGAAGACAGCAAGTTTAGTGGGCCATGGTGGAACAGGCCT
TTAATCCCAGCACTCGGAAGGCAGAGGCAGGCAGATCTCTGAGTTTGAGGCCAACCTGGTCTACAAAGTGAGTTCCAGGACAACCAAGAGAAAT
CCTGTCTCAAAAAATAAAACAACAACAAAAAAGAAATAATATAAAATGAATAAATAAATGAAATAAAATAAAATGATGATAAGTTGGGCTGGAG
AGATGGCTCAGCAGTTAAGAGCACTGACTGCTCTTCCAAAGGTCCTGAGTTCAAATCCCAGCAACCACATGGTGGCTCACAACCATCTGTAATG
AGATCTGATGCCCTCTTCTGGCATGTCTGAAGACAGCTACAGTGTCCTTACATATAACAATAAATAAATCTTTAAAAAAAAGATGAAAAGTTTA
AGGTCAGCCTGGGCTACAGAGCGAGTGCATAGTCAGCCTACACAACTTAGTGAGACACTGTCTCCAAATAGAAAGTCCAAAAGGGGCCTGGAAT
ACAGGTCAGCCATGGAGCTCTTGCCCAGCATGGCCCAGGTCATAGGTTCAATCTCCATTACAAAAGGAAACAACAAACCCTACAGAAAACCAGC
CCTGCCGCTCACCATTGTCACACAGCAATCCATTCTTCTCCTAGTCCACACATACTATTTCTGTGTTGAACTGTATGTATGTGCAAATTCCATA
GCAGTAACTCCAGAGGTGAAAGAACATTGGGGAGCTTGGCCTGATAAGCCTCTGCTCTGGGTAAGAGAATGGCCACTAAGCCACTAAGATAACA
CACAGGCCTCAGTCTGTCCCGAGATTCTCCGGTCTTTCAGATCCTGTTCAAATCTTCCTGTTCATCTTCCATTTCACAAAACCCAAATACCAAA
CCTAGAGTTAGTTTTCAGTTCACTCCGCCGATCATTCACGATGACTGTTGGAAAGGATGCTTATAACCCACGGCGGTTTCAAGCAAACGCCAAG
ACCAGGTCTAGGATATTAAAGCTGTTGGCGACGCCTTCCTCAATGCCGCTCGTTTTGATGGTTCTGCTGCAATAGTCTATGCTTCATAGGTCCA
TTTGGGGCCCTTCCCACGGCCATGCTGAGTGTCTGCATTTTGAAAACCTGACAAAGCTGGAAGTCAGTTCGAGAATATTGATCCTGGGTAGCTG
AGATGGTTCAGTGGGTAAAGGCGGTTACCGAGCAACCTGGCAACCTGCGTTTGATCCCTCGAACCCACATAAAGATGCAAGGAAAGAAACAGCT
CCATAAAGTCATCCTCTGACCTCTACACATTCACCGCGGCACGTGTGCGCCTGCACACACATCACATACGATAATAAAGAAAAAAATTTTTAAA
GATTTGACCTTTAGTGTACCAAAAGGAGAGAAAGCATTCATTCACTTTTAAACCCCGTGCATATTTACTCCAGTGGCTTTGAAGGGAATGGGGA
CAAACAAACAAACAAATAAATCAAGGTCTTTGTTTAACAGGTTGTGAACCATGGCTATGTGGATACAGGCTCAGCAGCTCCAGGGCGATGCCCT
TCACCAGATGCAGGCCTTGTACGGCCAGCATTTCCCCATCGAGGTGCGACATTATTTATCACAGTGGATCGAAAGCCAAGCCTGGTAGGTGAAC
AGCTTCTAGATCATCTTTTGGGAAGTACGAGGATATTGAACTTTGATGAGAAAAATGTTCTAACTGAGACTTTAAAAGTTGTGAGTAACCTAGG
CTTAGTGGTCCCCACCTGTAACCGTCATGATCCTAGCTGAGGCAGAAGGGTTGCAAGTTTGAGGCCAGCCTGAATTGCAGAGTGAGGCCCTGTC
CCTATCTTGGAAGAAGAAGAAGAGGAGGAGGAGGAGGAGGAAGAGGAGGAGGAGGAGCTCTGTGTGTCGGGCTGGGTGTGTAGCTCAGTGGTAA
AGTACAGGCATGAGGCTCTAGACTCAGCCCTCAGGACCTGTCTCCAAGAAAAGCTGTTTGAAAATCTTCATGTAATTCATAAAAAGGTATTCAG
CCTTCTTTTAGATGCAGCCAGACGAAATAATTCTTGCAGTTTTAATTTTTGTTGTTTTTTAAATTATGTATATATGTCCACGTCTGTGTATGGA
TGCGTACACATGAGGGCACCTATCTGCAGAGGCCAGAAAACAGCTGGAGCTCGCGTTTCAAGTGGTTGCGAACCACCTGGTGTGGCCGCTGGGA
TCTGAACTCAGGTCCTCGGGAAGAGCAGGAAGCTCTCTTAACCACACAGGCCTCTCTCCACCCTCTGAGCTTGCCTTGTTTTGGTTTGTTTGTT
TGTTTGTTTGTTTTTGAGACAAGGTCTCTCACTTTTTGAGACAGGCCCTGGCTGTCCTGGAACTCAAAAGTGCTGAGATTAAAGGCAAGAAAGA
ACCATGCCTGGCTTTTTTTTTTCCCCCCAAGGTAAAGTTTCACCGTGTAGTTATGAGTGGCCTGCATTCACTATATAGACCAGACTAGTCTTGG
ACTCAAGATCAGCCTTTGTCTCCCATGTGCTGAAATTTATATCTTATAAATCAGATATTTAACATATTGATTTAATAATCAAAACATTCATAGC
TCTCTGGTTTTTTGTTTTTCTGAGATAGGGTCTCATACTATATAGCTCTGGCTGTCCCGGAACTCACTAAATGGTTTTTTTTTTTTTTCTTTTT
AAAAACTAATAATGGTTACATTTCAGTGTTGACTTAGCCAACATTTTTATCTCTATTATGAATTATATACTTGAGCTTTAAAATTGTTAGATCG
GTATAACACAGTTCAGTAGCAATGCATCTTACCGTGCAGTGCTACGACAAAGCTTACAACACACGAGACAGCTGTACCACTGAGCGGCTGCCTC
CTCAGCCCTGCCGCATCCTCACCAGCCATCAGCGGTGCCCAGCAGCGTGCAGGGCAGGGAGCTTGCCCGTCGTTGGCCTCAGTCTCTCCGTGAG
TGTCCAAGTTCATCACAAGTTCATCAGACTAGCCAGGCTTTGACCAGGGTGGTGAGCTCCTCTTTGCAGAGCCAGCCTTGTTGCTGCTGGGAGA
AGGCTGTCCCTACCCACTGGAGATGTTGCCTTACAGTAATTGCTACAGCTTGTTAGCAAGGCTCCGTTCAGAAACAAGCCTGCCGAAGGAAGGC
AATTAAAAAAAATCCCAGCTTCATATAATTAAGAGGGGGAAAAACTGACTAAATATGAGAACATCAAACACACCTCAATTAGTCCAGTCCTTTT
CCTTTTCTTTCTGTTTTAATGATTTGGGAGATTTCGGAAAACATTAATAGGAAGTTTCTGCTCATTAAAAATCTCACTTAGAGGCTAGATCAGC
GGTAGAGCATTCGTCCAGCTAAGCAGACTGGCTCCATACCACAAAAGAGAGAACAAAAGCCAACTTTCGTTTATTCGAGTACAACAGCGCATTC
CTGTAATTCCACCTACTCAGGAAGCTCAGGCAGGGGAATTACTTAAGCCTAGGAACTCGAGACAGTCCTAGGCAAATGGGCTTTCAGCCAGCAG
ATCTCCTGAGTAGTCTACTTATTGAATAAGCTTTGGGAAATTGGGGTTGATATTAAGGAAAACGTGGGTTTTAGGTAGGGTTTTGTTTTTTCCC
CATAGAGAAATAGAGATATCACCGAAGAGTTTCCAGCTCTCCGTATTGAAGCTGTCATGAAGTCTCTGATTGTAGGCTATGGTTGAGTCCAAAT
TGAGAACCAGACTCCTGTGTTCTGTTCAAAGACTGGATCCTCTCAGCCGGGCAGTGGTGGCGCACGCCTTTAATCCCACCACTTGGGAGGCAGA
GGCAGGTGGATTTCTGAGTTCAAGGCCAGCCTGGTCTACAAAGTGAGTTCCAGGACAGCCAGGGTTATACAGAGAAACCCTGTCTTGAAAAAAC
AAACAAACAAAAAAAGACTAGATCCTTTCAACAGTGGGCTCCCAGTCAGAACAGAGGAGCAACGCTGTGCCTGCAGCCCGTCTAGCCTTCCACT
TCATACATATTTTCTTCAACCCATAGAGAATACACTTCTAAAAATTCGCTTTGTCCCTACCCTTTCCAGACACAGGTTGGGTGGTCTCTGCTAA
GGTCGTCTCAGGGCTTTGGTGCGCGTCTGCCTAGCTGTTTGCCACCAGCCACTTGCTAACTTCAGGGATTTGTGGGTGGCTGTCTTTTAGCTGC
CGCTGGCTCTCTTCCCTGGCTGTGGACCTGGTCAGCAGTAATTAGATATTATTTCAGCCTGACAGCTGTTTGGTTTGTCAGCGTGCTAAGTCAC
TTAAGTATTACCCAGCAGCAATTGTTGCCTAACTTAGTAGACAAAAATCTTTTAAGGACAAAAAGAAAGAAGATAAGGAGGAAGTGGACCCAAC
CCCTGTCACCAGCTGAACAGCTCAGGATGACACGAGGTCTGGGGACTGGCTTCTCGCCTTCACTGGAGGAGTCAGTGTTATTTCCAGGTCCCAT
ATCTGCAGTGATGACAGACTATTCTCCTGGGTGTGAATACTTGTAGGCATCTTCTGTCCTCATCCCTCCCTTCCAGGCTCCCTTAGGAAGGGCA
GTGACTGGGGGCCTGGAGCCAGTCAAGGTTGGAAAGAACATGCAGAACTATATACCCTGTCCCACATACCCTCGAGATACGAGTATAAACTGGA
AGTTAGAAGACCCCTTATTCCCTTTATTCCTAGGAGGGGGTGGGTTAATATCAGAGTCAGTCAGTAAAGGGAAGGGAGGAAGGAGTATTTAGAG
AAAGAAGTGTAAAGCTCAGCTAAAAGAATTGTAGAGTCAGGCATTGTAGACATTTAGCCAACTTATGTCGGGGTGTTTCTTAACCCGTGAATTA
TAGAAGAAATCACGTTCCAGACTCCCATGATGGCTCACACCTATAATCCCAGCACCCACAAAACAAATGTAGTATGTAAAGGCTGCATGTGTAC
AGGCTCCTATGCATGTATGTATACAGATTCTGTAATTTTTTTCCCCTAGGCACTCAATAGATCTTGATAATCCACAGGAGAACATTAAGGCCAC
CCAGCTCCTGGAGGGCCTGGTGCAGGAGCTGCAGAAGAAGGCGGAGCACCAGGTGGGGGAAGATGGGTTTTTGCTGAAGATCAAGCTGGGGCAC
TATGCCACACAGCTCCAGGTGGGTACAAACACTGGCCACACTTAGGCCCTGCCCTCTTGAGGACTTCTTCATTTAATTTTCTGTAGACACGTGT
TCTGATCTTTAACCCGGCATCGTAGAAATGTGTGTTTCACGCACATGGTTTTGATTGGCTTTGTGGTTGCGGCTGTTACCTTCTTTGAGACAAG
AGTCTCACCGTGGGGCTGGAGAGTTGGTTCTGTGGTTAAGAGCGCTTCCTGCTTGTCTTAGGGTTATTATTGCTGTGATGAAACACTATGACCA
AAAGTGAATTGAGGAGAACACCGTTTATCTGGCTTACACTTCCACATCACAGTTCGTCATTGGTGGAAGTCGGGACAGGAACCCAAACAAAGCA
GGAAGTTGGTGGCAGAAGCTCATACAGAGGCCATAGAGGAATGCTGCTTACTGGCTTGCTCCCCATTGCTTGCTCAGCCTGCTTTCTCATAGCT
CCCAGAACCACCAGCCCAGGCGCGGCCCCACACACAATGGGCTGCGCCCTCCCACATCAATCACTAATTAACAAAATGCCCTATAGGCTTTCCT
ACAACCCAAACCTATCATAAGAAGGCATTTTTCTCCACTGACGCGCCCTCTTCTGATGACTCTAATTTGTCTCAGGTTGATAGAAAACCAGCCA
GCGTGCTGCTATTGTAGAGCACCTGGGTTCAGCTCTCAGCACCCACATCAGGAAACTCACAGTAACCTGGGGCTTGGAGCCCTCTTCTGACCTC
AACAGGCATCCACCCACAAGTGACATACAGACACAGAAATAAAAATAGAAACTAATCTTTATTTAAAAAGAAATGAAAAGTTTCACTATTTAGG
TCAGATTGGCCTCAAACTGCCGATCCTCCTCCATCAATTCCACTCCACCCCCAGTATGGGCTGTAGGTAAGCACCACTCCCAGCCATGACTTTT
ACTCTCTTTTAACTTCTTATTTCAAAATAATTTTGAATTTGCAGAAAGTTGCAGCAGAGGTACAACAAGGCCCCCTTCATATGCTCAGGTTCAT
TTACATCATCATCTCTCTCACGCTCCTCTCTCCCTTTCCCGCCCCCACACCTTCATGTACACATGTACACATACACACATACACACTCTCACAC
ATACACACATACTCATACAACACACACACATAGTTACACAATACACACACATACAAACATACACATACAGATGCAGACACATACACACACATAC
CTTCACGTACACATGCACACACACACACACACACACACATACACACACACACACATTTCTAGTTGCGAGTAAGTTACATACATCTCTCCCCTGA
GTATCTCACCATGTATGTTCTAAGAACATGAACTTCCCTTACAGGGTCACAATACAGTTATTCAATTTAGTGTGTTTAACATTCACACAAACTT
TTACTTACTATTCTGTCTCTATTATCCATTTGTCAACTGACTCACAAGTGTCCCTCCAGTCCAGGGTCCAGTCCAAAGCCTCATATGATATCTA
GTTCACATATCTCTTTAATGTTTTATCTGGTTTGGTTTCAACTTTGTGACGTGTCTGTTTTGGAGATAGGGCCTCCATAGTGTTGTAGCCTATG
CTAGTCTTGAACGTTAAGCATTGAACATTAAGCAGTCATCTTGTCCCAGCAGTCCTGTCCACCTTTCCCTTTTCTTTAACCTCAAAACATTCAT
TTTTCGACCTTATTTTGGCTTTGATATTAACATTTTAAAATAATCACTTATTCCCTTACTTTTAATATTTTTACATTTTATTTTTAAATTTGTG
TGTGGCTATGTATGTCCACATGAGTGTAGTGCCCTCAGGGGTCAGAAGAGGGCATCACAGCCCCTCCAGTTGGAGTTAGAAATGGTTGTGAGCT
GCCTGAGGTCGGTGCTGGGAATTGAACTCGGGTCTTCTGTGAGAGCATTATGAGGTAGGGCCTCACCATGTTGTCTAAGCTGATCTCAAATTCT
AAATAACGGATGCATTGTCCTTCTGCAATGCCCCATCCAGAGAAAGAAGATGCCGGTCTTCCCTACTGTGACAGTAATTCTGATTCTAACTGAC
AGGAAATTTCCCAGTCCTGTGTCTTGTCTGCTGTGGCCTTTTAAAGACTCACCCGTTTCCAAGAATGTTGCTGTAGTGCTTTTGGCATTGAGGT
TCAGAAAGTAAAGCAGCCTTACCTTCTTAGTGCAACTGCATTTTCATAATGTCTTTCTCTCCATCCCGCCCACACCGGGGAACAGCACTGCCCA
TGACTCCATGGTTACCGCATCTCTACCATGAGTGCTCCCTGCCCTGGGTCCGGTTAACCCACAACAGAGTGGAGCAAAGTGATGTCTGCTGTTG
TCCTCTTTCAGAGCACGTACGACCGCTGCCCCATGCAGCTGGTTCGCTGTATCCGCCACATTCTGTACAACGAACACAGGCTCGTTCGCGAAGC
CAACAACGTGAGTGTGCCCATGGTTGTGGGAGAGGAGTTGGGGTGCCCTTCTTGAGCCGTTTCCCCCTGGATCCCACTTTGTTGAGGTGACCCA
ATATGCACTAGTGTCTCTTTAGGGAGCTGACCTTAGCTTTATAACTTAAGTGAGGCTACAACCACAAAGCAAGGTGAACATGTGCAAACTAACT
TAACCAAAGCAAATCAGTTTTGTGTTGAAGCATGCTCACAATCAGGGAAATTACTTAGTAGAAATTTCTTCACACTCTCTGGGCCAGCTGCTGA
AGGAGTGGATCATACCTAGTCACTTAAACAGCCAGATCCACAGGGACCTTGTGCATGCCTCCCCCATCACTTCCTCTGAGGGGCTACAGACACC
TAGGAGCCTTCGGGTGTGGCTTCATCCACGGTAGAAGCAAATGGGTAGAAGCAAATGATTTCAGCACCAGTCTGCCTTGAGATAGATACAGACC
ATGTTTTATTCCCAATGTCTCCCCAGCGAAATCACAGTCATGGTATTGGATCAATGAGTGAATGTGGAATCAGGGTTATCATCATCAGGAGGAA
GACCCAAGTGACCTCTGGGGCATGTGGAGTTCTAGTTTCTCAAAAGAATTGGGCACACACATCCTCTGTGGGACACTCATGTGGACGCCAGAGC
TGAAACAGAAGTAGGTTTTTACCGTCAAGAAAGCCTGTCGAGTCAACCGCCTCCACTCGCTTTCCATTCTACCCCGATTCTCACATGTGGCATT
TGTGATGTCTTCTGACCTCAAATTTAACCTTCGGGGTCTTAGCTTCACCTAGGGATTAAGACCGAAGGCTTCTTCCCACCCTCCCACACTGGAT
CTCCCCACCTGTCCCCAGGGCAGCTCTCCAGCTGGAAGTCTTGCTGACGCCATGTCCCAGAAGCACCTTCAGATCAACCAAACGTTTGAGGAGC
TGCGCCTGATCACACAGGACACGGAGAACGAGCTGAAGAAGCTGCAGCAGACCCAAGAGTACTTCATCATCCAGTACCAGGAGAGCCTGCGGAT
CCAAGGTGAGGCTGGCAGTGGAATCCTGGAAGCTCCGGGGGTGGGAGTAAGGTCTAGGAGCAAGCTCTGAGGAAGCAGAAGAGATCCTGGTTCC
ATTCTGAGCTGTGCCTTTGTCTGAGCAGAGTGGAACCATTCAGGCTGAAGAAGGAGCTGGGTAGCTTAGGGAGAGAACATGGCACCTGATGGGG
AGAGTGCAGGGTCTCACTCAGGCCTTCCTGTTCTCATCAACTTTGGGGTCGCTGTAGAACATGTTTCCTTTTTGACATTTAACGTGTTCATGGG
CTGGAGAGATGGCTCAGTAGTGGAAAGCACTGGCTGCTCCTCCAGAAGGCCTGAGTTCAATTCCCAGCAACCACATAGCAGCTCACAACCATCT
GTAACTGTAGTCCCATAGCGGCCAATCCCCTCTTACGCTGTGCATATATCCACACAAAATATGCATATATATAAGTAAATAAATCTTTGCCAGG
CATGGTGGCTCACATCTTTAATCCTAGCATTTGGAATACAGAGGAAGGTGACTCTATGAGTTTGAGAACAGCCTGGACTACAAAGAGAGTTCCA
GGACAGCCAGGGCTATTACTCAGGAACTCTATCTCAAAAACAAGCAAAAAGCATTCATAGCTTAATAAATAGCTTACAGAGGACATATTATAAT
TGTATATAGTAAACATTTTCTTTTTTTAAAGATTTATTTATTTATTATATGTAAGTACACTGTAGCTGTCTTCAGACACTCCAGAAGAGGGCAT
CAGATTTTGTTACGGATGGTTGTGAGCCACCATGTGGTTGCTGGGATTTGAACTCAGGACCTTCAGAAGAGCAGTCAGTGCTCTTGACCATCTT
GCCAGCCCCAAAGTAAACATTTTTAGAGTAATTGTTTGTTTGTTTTAGACAGGGTTTCTCTGTGTAGCCCTGGGTGTCCTGAGACTCACTTTGT
AGACCAGGCTGGCCTCGAACTCAGAAATCCGCCTGCCTCTGCCTCCTGAGTGCTGGTATCAGAGGCGTGCGCAACCACTGCCGGGCCTAGTGTA
GGCATTTTATGAATGCAGCCTTGCTGGGATGCGAAGTAGGAAGTACATCACATCTAGGAGTGTGGGTGTAGCTCAGAGGTAGAATGCTTTCCTA
ATGTGTGAGAGCCTGGCCTCCATCCCCAGCACTGCAGCATCTCTATTTGTGGTGCCTGCCATTGACTTGTATGCAGTTATTCAAGACTTTCCTG
TGACCCTGTATGCCTTCTGGACAGTGTTCCCTAGCCTTTGTTCTAAGGCACACAGAATTTGAGAATTCTTCCAGGAGTTGTGGAGCCTCCGCAG
CGCTCCCTCTTAACCCTACGCTTTCTTCTCTATGCGGGCGTGCCTGCCTCAGACAGACAGAGGGGGCTGGGGCCATGGCACTAGTGATTAAGAG
CACTGGCCTCTTTTGCATAGGAGTTGGATTTGGTTCCCAGAATCCACTTGGTGGCTCAAAACTGTCTGTAACTCCACTTCCGAGTAATCCAGGA
CCCTCTTCTAACCTCTGTGGGCACCAAGCATGCACGTAGTACACAGACATACACGTATGCAAAACACTCATACGCGTGCAATAAATCTAACACC
AATTTTAAAAATAAGACTCTCAGAAGAAACCTGTCCCCACACCCGCCTAAGGTCTCCTAAGGTCATGTGTGTAAAGCATAGCGCATTGCTATGT
TGACATTATTTACTGCCTCCCAGGCTTCCCAGATGATAAATCATTGAGAAGGAACTCTGTCTATTAGCTCTGTGCCCTGAGGCCAGCATAAATT
ACAGTTGCGGGCTTATCCTGGCTGTCTTAGTGTTGCTTTTGTCCATCCCAGCTTGTGTGTCCCTGGGGCAAGGACAAGGTCATTGTGACATGGT
TTTCAGAGGCCAGCCATGAGCTTCAATGAGACATGCCCGTATGCACAAATTCTTGCCAAGACCAGAATAAGGATGCTGGGCTACTCAAGGGCCA
CCGGAGGAAACAATAATGCCAGGACTCCGGTCTTTTTCTGGGCATGGAGCAAGGAACAAGAAGGTTTGCAGGCAGTGATAGTGGACAGGTAGTT
CAACCCACGACGTACTTGATGGAGCAGAGCCGATGAGGACTCTATGTGACTCTGTCTCCTGCTTCTGTCTCCCCGGTCTGTCCATTCGTATTGA
AAGGTACCAAAAGAAAACCGACGATGTAGCTCAGTTGGGGGAGTGCTTGCCTAGAATGCAAAAAAAAAAAACAAAACAAAAAAAAAAAAAAAAA
ACCTGGTTTTATCCCCAGAGCAGCCTCCTGAGCCGCTGTCAAGAGTCTCCCTTCACAGATGGAAGACTGAAGCCGGAAATACAGGGATTTACCC
AAGTTCGACCAGCTGATAAACCACAGGGCCACTTGCACACATAGGCTAACTTCAAACCTGTGGGGAGGGCAGGATGCCCTCTGTGTGGGGAGTG
TGGAGGCACACACTACTAAGCAGTTGCTTCCCCAACAAACACCTGCTCCCGGCCTAGGAGAGGCCAGGTCAGGAGAACCTTCATCCGCCTTCTG
AGAGAGCCCCTTCATCATGGGACACCCATTGCGAGCTGGAACTCTGACTTACTGTTGATGGGGTGTCTAGATGACCCTGAGAGTGGGTGATCCT
TCAGACTTCTTACTGGACACAAGAATTGATGGTGGTGGGTGTCCTGTCCCCTCCTCCAGCTCAGTTTGCCCAGCTGGGACAGCTGAACCCCCAG
GAGCGCATGAGCAGCGAGACGGCCCTCCAGCAGAAGCAAGTGTCCCTGGAGACCTGCCTGCAGCGAGAGGCACAGACACTGCAGCAGTACCGAG
TGGTTAGTGCGTGCCCTGCGACCCTCTGCCCCAGAGGGAGCTCTGTCACCTGAGATTCAGGGCACCAGGTGGGGGACAGAGCCTCGATGGGAGC
AGGGCCCCTCTCTCCTGGGGTCGACCGGGTGTGAGGGGGCCAGGCCCTGGGTTCTACCCCAGGCACTGAGCCATGCTCGCCGGGAGCCAGAGAG
CCGCTGTTCCCTCGCACAGGAGCTGGCTGAGAAGCACCAGAAGACCCTGCAGCTGCTGCGGAAGCAGCAGACCATCATCCTGGACGACGAGCTG
ATCCAGTGGAAGCGGAGACAGCAGCTGGCCGGGAACGGGGGTCCCCCCGAGGGCAGCCTCGACCTGCTGCAGTCCTGGTGAGGGTGAGAGGTGG
GCGGGGTGGGCAGCTTCGCCAACGATCCCAGCTGCCTCTTCTGTCCCTGCCGTGGCGTGAGCAGCACATGCCCACTGTCTGTGACAGCTCTCAC
TTTAGCAGTATCTTGGCTCTTGATGGCACTCGGCTCTTCAGACCTGTGCCACCTCCCACAAGGGACAGTGGTGCCTTGGGATGGGCAGGGCTAC
CCTTGAGCTGGTTGGTTCCAAGTTGGGGCCACCCTGACTGTCTTCTGCTTTTGAAAAGTGGGACTCTGCTCAGTGTGCCTGTGCAGGAGAGCGG
TCGCCAACGCCAGCACCTTTCTGGGGCGGCCCCTCCTTTGGTGGGAAGGAGGAAGAGTAGCATGCATCTTCCTCCCCTCGCCTGGGCTGGAACA
GCAGCCGCCATCCCCCTGAAGGCCCCCGGCTCCTTGCAGGTGTGAGAAGCTGGCCGAGATCATCTGGCAGAACCGGCAGCAAATCCGCAGGGCT
GAGCACCTGTGCCAGCAGCTGCCCATCCCATGCCCCGTGGAGGAGATGCTGGCTGAGGTCAACGCCACCATCANNNNNNMNNNNNNNNNNNNNN
NNNNNNNNNNNNNNNNNNNNNNNNNNNNNNNNNNNNNNNNNNNNNNNNNNNNNNNNNNNNNNNNNNNNNNNNNNNNNNNNNNNNNNNNNNNNNN
NNNNNNNNNNNNNNNNNNNNNNNNNNNNNNNNNNNNNNNNNNNNNNNNNNNNNNNNNNNNNNNNNNNNNNNNNNNNNNNNNNNNNNNNNNNNNN
NNNNNNNNNNNNNNNNNNNNNNNNNNNNNNNNNNNNNNNNNNNNNNNNNNNNNNNNNNNNNNNNNNNNNNNNNNNNNNNNNNNNNNNNNNNNNN
NNNNNNNNNNNNNNNNNNNNNNNNNNNNNNNNNNNNNNNNNNNNNNNNNNNNNNNNNNNNNNNNNNNNNNNNNNNNNNNNNNNNNNNNNNNNNN
NNNNNNNNNNNNNNNNNNNNNNNNNNNNNNNNNNNNNNNNNNNNNNNNNNNNNNNNNNNNNNNNNNNNNNNNNNNNNNNNNNNNNNNNNNNNNN
NNNNNNNNNNNNNNNNNNNNNNNNNNNNNNNNNNNNNNNNNNNNNNNNNNNNNNNNNNNNNNNNNNNNNNNNNNNNNNNNNNNNNNNNNNNNNN
NNNNNNNNNNNNNNNNNNNNNNNNNNNNNNNNNNNNNNNNNNNNNNNNNNNNNNNNNNNNNNNNNNNNNNNNNNNNNNNNNNNNNNNNNNNNNN
NNNNNNNNNNNNNNNNNNNNNNNNNNNNNNNNNNNNNNNNNNNNNNNNNNNNNNNNNNNNNNNNNNNNNNNNNNNNNNNNNNNNNNNNNNNNNN
NNNNNNNNNNNNNNNNNNNNNNNNNNNNNNNNNNNNNNNNNNNNNNNNNNNNNNNNNNNNNNNNNNNNNNNNNNNNNNNNNNNNNNNNNNNNNN
NNNNNNNNNNNNNNNNNNNNNNNNNNNNNNNNNNNNNNNNNNNNNNNNNNNNNNNNNNNNNNNNNNNNNNNNNNNNNNNNNNNNNNNNNNNNNN
NNNNNNNNNNNNNNNNNNNNNNNNNNNNNNNNNNNNNNNNNNNNNNNNNNNNNNNNNNNNNNNNNNNNNNNNNNNNNNNNNNNNNNNNNNNNNN
NNNNNNNNNNNNNNNNNNNNNNNNNNNNNNNNNNNNNNNNNNNNNNNNNNNNNNNNNNNNNNNNNNNNNNNNNNNNNNNNNNNNNNNNNNNNNN
NNNNNNNNNNNNNNNNNNNNNNNNNNNNNNNNNNNNNNNNNNNNNNNNNNNNNNNNNNNNNNNNNNNNNNNNNNNNNNNNNNNNNNNNNNNNNN
NNNNNNNNNNNNNNNNNNNNNNNNNNNNNNNNNNNNNNNNNNNNNNNNNNNNNNNNNNNNNNNNNNNNNNNNNNNNNNNNNNNNNNNNNNNNNN
NNNNNNNNNNNNNNNNNNNNNNNNNNNNNNNNNNNNNNNNNNNNNNNNNNNNNNNNNNNNNNNNNNNNNNNNNNNNNNNNNNNNNNNNNNNNNN
NNNNNNNNNNNNNNNNNNNNNNNNNNNNNNNNNNNNNNNNNNNNNNNNNNNNNNNNNNNNNNNNNNNNNNNNNNNNNNNNNNNNNNNNNNNNNN
NNNNNNNNNNNNNNNNNNNNNNNNNNNNNNNNNNNNNNNNNNNNNNNNNNNNNNNNNNNNNNNNNNNNNNNNNNNNNNNNNNNNNNNNNNNNNN
NNNNNNNNNNNNNNNNNNNNNNNNNNNNNNNNNNNNNNNNNNNNNNNNNNNNNNNNNNNNNNNNNNNNNNNNNNNNNNNNNNNNNNNNNNNNNN
NNNNNNNNNNNNNNNNNNNNNNNNNNNNNNNNNNNNNNNNNNNNNNNNNNNNNNNNNNNNNNNNNNNNNNNNNNNNNNNNNNNNNNNNNNNNNN
NNNNNNNNNNNNNNNNNNNNNNNNNNNNNNNNNNNNNNNNNNNNNNNNNNNNNNNNNNNNNNNNNNNNNNNNNNNNNNNNNNNNNNNNNNNNNN
NNNNNNNNNNNNNNNNNNNNNNNNNNNNNNNNNNNNNNNNNNNNNNNNNNNNNNNNNNNNNNNNNNNNNNNNNNNNNNNNNNNNNNNNNNNNNN
NNNNNNNNNNNNNNNNNNNNNNNNNNNNNNNNNNNNNNNNNNNNNNNNNNNNNNNNNNNNNNNNNNNNNNNNNNNNNNNNNNNNNNNNNNNNNN
NNNNNNNNNNNNNNNNNNNNNNNNNNNNNNNNNNNNNNNNNNNNNNNNNNNNNNNNNNNNNNNNNNNNNNNNNNNNNNNNNNNNNNNNNNNNNN
NNNNNNNNNNNNNNNNNNNNNNNNNNNNNNNNNNNNNNNNNNNNNNNNNNNNNNNNNNNNNNNNNNNNNNNNNNNNNNNNNNNNNNNNNNNNNN
NNNNNNNNNNNNNNNNNNNNNNNNNNNNNNNNNNNNNNNNNNNNNNNNNNNNNNNNNNNNNNNNNNNNNNNNNNNNNNNNNNNNNNNNNNNNNN
NNNNNNNNNNNNNNNNNNNNNNNNNNNNNNNNNNNNNNNNNNNNNNNNNNNNNNNNNNNNNNNNNNNNNNNNNNNNNNNNNNNNNNNNNNNNNN
NNNNNNNNNNNNNNNNNNNNNNNNNNNNNNNNNNNNNNNNNNNNNNNNNNNNNNNNNNNNNNNNNNNNNNNNNNNNNNNNNNNNNNNNNNNNNN
NNNNNNNNNNNNNNNNNNNNNNNNNNNNNNNNNNNNNNNNNNNNNNNNNNNNNNNNNNNNNNNNNNNNNNNNNNNNNNNNNNNNNNNNNNNNNN
NNNNNNNNNNNNNNNNNNNNNNNNNNNNNNNNNNNNNNNNNNNNNNNNNNNNNNNNNNNNNNNNNNNNNNNNNNNNNNNNNNNNNNNNNNNNNN
NNNNNNNNNNNNNNNNNNNNNNNNNNNNNNNNNNNNNNNNNNNNNNNNNNNNNNNNNNNNNNNNNNNNNNNNNNNNNNNNNNNNNNNNNNNNNN
NNNNNNNNNNNNNNNNNNNNNNNNNNNNNNNNNNNNNNNNNNNNNNNNNNNNNNNNNNNNNNNNNNNNNNNNNNNNNNNNNNNNNNNNNNNNNN
NNNNNNNNNNNNNNNNNNNNNNNNNNNNNNNNNNNNNNNNNNNNNNNNNNNNNNNNNNNNNNNNNNNNNNNNNNNNNNNNNNNNNNNNNNNNNN
NNNNNNNNNNNNNNNNNNNNNNNNNNNNNNNNNNNNNNNNNNNNNNNNNNNNNNNNNNNNNNNNNNNNNNNNNNNNNNNNNNNNNNNNNNNNNN
NNNNNNNNNNNNNNNNNNNNNNNNNNNNNNNNNNNNNNNNNNNNNNNNNNNNNNNNNNNNNNNNNNNNNNNNNNNNNNNNNNNNNNNNNNNNNN
NNNNNNNNNNNNNNNNNNNNNNNNNNNNNNNNNNNNNNNNNNNNNNNNNNNNNNNNNNNNNNNNNNNNNNNNNNNNNNNNNNNNNNNNNNNNNN
NNNNNNNNNNNNNNNNNNNNNNNNNNNNNNNNNNNNNNNNNNNNNNNNNNNNNNNNNNNNNNNNNNNNNNNNNNNNNNNNNNNNNNNNNNNNNN
NNNNNNNNNNNNNNNNNNNNNNNNNNNNNNNNNNNNNNNNNNNNNNNNNNNNNNNNNNNNNNNNNNNNNNNNNNNNNNNNNNNNNNNNNNNNNN
NNNNNNNNNNNNNNNNNNNNNNNNNNNNNNNNNNNNNNNNNNNNNNNNNNNNNNNNNNNNNNNNNNNNNNNNNNNNNNNNNNNNNNNNNNNNNN
NNNNNNNNNNNNNNNNNNNNNNNNNNNNNNNNNNNNNNNNNNNNNNNNNNNNNNNNNNNNNNNNNNNNNNNNNNNNNNNNNNNNNNNNNNNNNN
NNNNNNNNNNNNNNNNNNNNNNNNNNNNNNNNNNNNNNNNNNNNNNNNNNNNNNNNNNNNNNNNNNNNNNNNNNNNNNNNNNNNNNNNNNNNNN
NNNNNNNNNNNNNNNNNNNNNNNNNNNNNNNNNNNNNNNNNNNNNNNNNNNNNNNNNNNNNNNNNNNNNNNNNNNNNNNNNNNNNNNNNNNNNN
NNNNNNNNNNNNNNNNNNNNNNNNNNNNNNNNNNNNNNNNNNNNNNNNNNNNNNNNNNNNNNNNNNNNNNNNNNNNNNNNNNNNNNNNNNNNNN
NNNNNNNNNNNNNNNNNNNNNNNNNNNNNNNNNNNNNNNNNNNNNNNNNNNNCTCACTTTTTATGGAGTACTGGGCCTAGACCCCAGAGCCTTG
TGCATGCTGGGCAAGCATTCTACCAGCTGAACTATAACTATCCCCAGCCCATGATGAACATTTTCAGAATGTCTCCATGAGGAGGGGTCCTTAT
TGCATGCTGTTAGAAGAACTTAACTCTCAGAAGCGTGATAAAAGTGTCCTCGTTATTCGACACATCCAAGTCTGTCTTTCTCTAGTGTGAGACT
CTTGGCTCTTCAACTGTCATCTTTAGAGAACCGGGCTTTATTGCAAAGGCAGGGTTTTTATGAGATCTTCCCTGTGTGTGCTGCAAAAGCAGAG
TTTAGACTCCTAAAAAATAAAAAAAAAAATTAAAAAAAAAAAGGCCACAGTACACTGCTTTCAAAGTTTCAAAGCCTTATGGATTAGATTGCTT
CACCTCCATCCCTGTTGTCCACCAAGCTTTCTGTAACCTTGACGTGCCCTGCAATGTGTAACCAGTAGGGTATCTTGTCCAAATAATATGAAAT
TTTTTACATTCTCAGTGATGCTGATGACTAAGTTATCTTGAATGCTATTTAAAAATAAATACAGAAAGTTTGATAGAGTCGACCATCTCAGTAC
TTGGGCAGCCAGGACTACATAGAGAAACCCTGTCTCAGGAAGGAGGGGGGGCGAGGGAGAGAGAGAGAGAGGGAGAGAAAGAGAAAGGGAGAGA
GAGGTGTTATGCATGTTGGAATCCAGCTGTGATTCTGGGTCCTCCATTTCCTCCCTCTCGGAGTATCCAGACACCACTGTATGCTCGGATTTAT
TCAGGATAGGCTTGTATGCATTGTATGCATACACACTTTATTCGGGGTGAACCAGGGCTGTGTATATGAACCTAGGAGAGTGGAAAGGGGTTCT
TCTTAAAGTGAAATTACATTGGCTGAGGCTTCCGGCTACCTCATTTGCATGGAGAGGCATTCCTTGAATTTCACCATGGATTATGTGACCTCCC
CCAGAGTATGGTTTGGGCTCCCCAGATCAGAAGAAGAGGAAGCCCTGCTTAGAGAAGGTTGTTTTTTTGTTTTGTTTTGTTTTGTTTTGTTTTG
TTTTGTTTTGTTTTGTTTTTTTGGTTTTGGTTTTTTGAGACAGCGTTTCTCTGTGTAGCCCTGGCTGTCCTGGAACTCACTTTGTAGACCAGGC
TGGCCTCGAACTCAGAAATCCGCCTGCCTCTGCCTCCCGAGTGCTGGGATTAAAGGCGAGAGCCACCACGCCCGACTGGTTGTTCTTCATTTTA
CACCAAGCTCAGGGAAGCTGTCCGGACATGGTAGACTATATAACCTTAGTAGTGAGGTACAACAGACAGACAGACAGATGATAGGTAGTCCCCT
GAACAGTCATGGTAATGCACTCCTGTAATCTTAGCCCTTGGGAGGTAGAGTCAGAAGGATCAGAAGTTCATGTTTATCCTGGCTATATATTAAT
TTCAAGTTCAAGGCCAGATTGGCCTGCATCAGACCTATCCCAAACTAAGAAAGGGGCTTGGGGGATGGCTTAGTAAAGTGCTTGCCATGCAAAT
ATGGAGACATGAGTTTTTATATTTTATTTTATACATGTGAGAGTTTTGCCTACATGTATATGTGTGTAGCATGTTGTGCCTGTGGCCCATGAGG
CCAGAAGAGAGCATCAGATCCCCTGGAACTGGGGTTACAGATGATTGTGAGCTGCCATGTGGGTGCTGCAAAAACAGCCAGTGCTCTTCATCAC
TTGAGCTATCTCTCCAGCCCCAATAATAAATTTTAAGAAGTGGAGAACTCATGAAAAAACACACCTGAGGTTGACCTCTGACCTCCACCTATGT
GCACATATCTGCTTCACCCTCACACACCCCCACAGGGACGGCAGCAGGAAGGAAGCAGGAAGGTGAAGAGAGAGGAAGTCCCCTCTCCTGGCCA
TCTTGGTCACTGCCCTGTGTGGTGCGAGCACCAGACCACATCCCTCTGGCCCTAACTACCCTCGTACCTACTGACCAGCCAGCTGAATAGAATG
AGAGGCAGTGTATTACAAGTTCATATTCTAACTGTTTCTCAATCAAGTTGCCAACTAGAAACTTTCCACTCCTCCATGCCAAGTTGCTTCACTG
TGAGCTAGAGTTCTTGGCAGGTGTCAAGGACAAGCAAGTATTATACTTGGGGCTGCACATGTGTGCCCTCCCTCTGCTCACTTAGAAAGCCAGG
CTTGTCTGTCTGACTGCTCTCTCTCTCTCTCTCTCTCTCTCTCACTCCCTTCTTCCCTCNNNNNNNNNNNNNNNNNNNNNNNNNNNNNNNNNNN
NNNNNNNNNNNNNNNNNNNNNNNNNNNNNNNNNNNNNNNNNNNNNNNNNNNNNNNNNNNNNNNNNNNNNNNNNNNNNNNNNNNNNNNNNNNNNN
NNNNNNNNNNNNNNNNNNNNNNNNNNNNNNNNNNNNNNNNNNNNNNNNNNNNNNNNNNNNNNNNNNNNNNNNNNNNNNNNNNNNNNNNNNNNNN
NNNNNNNNNNNNNNNNNNNNNNNNNNNNNNNNNNNNNNNNNNNNNNNNNNNNNNNNNNNNNNNNNNNNNNNNNNNNNNNNNNNNNNNNNNNNNN
NNNNNNNNNNNNNNNNNNNNNNNNNNNNNNNNNNNNNNNNNNNNNNNNNNNNNNNNNNNNNNNNNNNNNNNNNNNNNNNNNNNNNNNNNNNNNN
NNNNNNNNNNNNNNNNNNNNNNNNNNNNNNNNNNNNNNNNNNNNNNNNNNNNNNNNNNNNNNNNNNNNNNNNNNNNNNNNNNNNNNNNNNNNNN
NNNNNNNNNNNNNNNNNNNNNNNNNNNNNNNNNNNNNNNNNNNNNNNNNNNNNNNNNNNNNNNNNNNNNNNNNNNNNNNNNNNNNNNNNNNNNN
NNNNNNNNNNNNNNNNNNNNNNNNNNNNNNNNNNNNNNNNNNNNNNNNNNNNNNNNNNNNNNNNNNNNNNNNNNNNNNNNNNNNNNNNNNNNNN
NNNNNNNNNNNNNNNNNNNNNNNNNNNNNNNNNNNNNNNNNNNNNNNNNNNNNNNNNNNNNNNNNNNNNNNNNNNNNNNNNNNNNNNNNNNNNN
NNNNNNNNNNNNNNNNNNNNNNNNNNNNNNNNNNNNNNNNNNNNNNNNNNNNNNNNNNNNNNNNNNNNNNNNNNNNNNNNNNNNNNNNNNNNNN
NNNNNNNNNNNNNNNNNNNNNNNNNNNNNNNNNNNNNNNNNNNNNNNNNNNNNNNNNNNNNNNNNNNNNNNNNNNNNNNNNNNNNNNNNNNNNN
NNNNNNNNNNNNNNNNNNNNNNNNNNNNNNNNNNNNNNNNNNNNNNNNNNNNNNNNNNNNNNNNNNNNNNNNNNNNNNNNNNNNNNNNNNNNNN
NNNNNNNNNNNNNNNNNNNNNNNNNNNNNNNNNNNNNNNNNNNNNNNNNNNNNNNNNNNNNNNNNNNNNNNNNNNNNNNNNNNNNNNNNNNNNN
NNNNNNNNNNNNNNNNNNNNNNNNNNNNNNNNNNNNNNNNNNNNNNNNNNNNNNNNNNNNNNNNNNNNNNNNNNNNNNNCAGCAAGCAGCAACT
GAGGGGGGGTGGCGGGGCGGGGTGGGGGGAGTCCTGTTTACTTAGCAGTGGATTCCCTGAAGAGCAGTAAAGTAGAAGTGAAGGGGGGAGGCAT
GGCAGGGAGGGGGGATCCATCTCTCCTGAGGGGTCAGAGGAGGTTTCTGAGGAAGTGACACGTGAATAGACTTGAACAAAGTAAGGAAACTGGC
TTTGCAGAGACCCAGAGGACAAGCATCCTAGGCTGAGACACAAAGCCCACCTCGGGTGGCTGAAAAGCTCCCCAGAGCCCCTAGGCTGCCTCCA
GCCAAGCAGGAAGTTGGTGATGGGAACTGAGGCCAGGGCACCTCAGTAATGGAGGTCGGGGTGAAAGGTCAAAGCGTGCATAATCCTAAGTGCC
CTGATTTCACACACACACACACACACACACACACACACACACACACACACACACACAGTTGCAGGTCAGTAATGCATTCATGTAGCACTCTCTT
CAGGATTGCACAGGATTCCATTACCTAGTGACTTTCGAAGATCACGGTTAGGCAATTGAGATTCTTAGTATTTAATTTACTTCATTTTCACTAA
TGACTGATATTGAGATAACCTAGTACAAGTACCTTGTTCAACTATTCCTTCAGATAAATTCCTAAGCAGAATTAGGTCAAAGGGCATAAGCTTT
ATAAGCTTTTTTTTTTTTGACGCATCCAAAACTGCATTCAAAAACCCAAATTCACATTTCCCACACCTCTCTCTTCCACATCTGCTTCTCTGTC
TTTTTGCCAACCACAGAATAGCCTCCATTCATGTCTGCCAGTCTGGTTGGCATGAAAATCGTACATTATAAGTCCTGTGTGTATTTATCTGATT
CTAGGCAACCTTTGCATATGATGATTAATAATTCCAGATTAATTAGCATGGTAGCAGAAGCTAGCATTTGCTGGATGGCTCTGAGTTTCCTAGA
GTATCCGTCTTAGTCACTGTTCTACCACTGTGGAGAGACACCGTGACCAAGACAGCTCTTACAAAGGAAAACATTTCATTGAGAGCTGGCTTAT
AGTGTGACTGGAACTCCTCTTTTACAGGAAACTGAGGCATAGGGAAATCAAATAATTTGCCAAAGATCCCAGGACTGGGAAGGGGCCAAGCCAG
GGTTTCAGCTTGGCTTAGCTCCTGAACCTAGATTCTTCATCCACCAATGGCCAGCTCTGGCCATTGATAATTTTTTTCTGTGAAAAACATGTTT
GTATTTCTTCCTTGGTTTTTTGAAGTTATATTTTTATATAGAAAATATACTCATCTGAGGGTGAGATGCTCAGTCTACAGAGTACTTGCTGCGA
GTTTAATCCCTAGAGCCCATACTTTTTAAAAAGCCAGGTGATGTGGCACTTGTAATACTAGTGTATGTGTTCCTCCACATGCCTGGGCACACAC
ATGCATGTACACACATGCACATAAATATGCCGCACAGAAACATGTGTGTATATACACACACACAAGAAAAATAGTTAATCCCCTATTGATTTAT
CTATACAGAAAATCTTTTCTCTGTATTAAGTTTTATTTTCTCAAGAACAAAGACTTGTGATTTCCATAGAAACCCAATCTGTCTGTTTTTAGTG
TGTGTGTGTGTGTGTGTGTGTGTTACACACATATACCATGGTGTGCATGTGGGGAGTAGGAAGACAGTCACTGGGAGTCGGCAGTCTTCTTCCA
CTGTGTGAGTCCCAGGGGTGGGACTTGTGTGATCAAGCTTTGTGACAAGGACCTTTACCCACTGAGCTGTCTTGCCAGCTCCAACTGTGAAGTT
TTCAAAGCTTTTATTTTTCAATTATGCCTGCAAGCACAGTCATAGTCTCAGTTTGGGAGGCTGAGGCAGCAAGATCCAAAATGCAACACCTGCC
TGGGGTAGAGAGTGAGTTCAAAGCCAGCATGTGCAACTTAGCAAGACACTGTCTGAAAAGAGGTGGGGGGATCTTAGGGGTAGAGCTTTTGCCT
AGTATATACGATGCCCTAGTATATACGATGCCCTAGGTTCTTCAGTCCCCAATACCAGACAAAAAGTCAGACATAGTCATAAATTCATAAGGTA
GAGACAGGCAGATCTCTGTGAACATGAAGGCAGCCTATCCTACATAGTGAGATCCTGCTTCAAAAGAAAAAATTTTTTTTCACAAATATGCACC
ACTAGAAGTTAACTACACGCGCATGGAAGTGTCTGCCTTCTCTGTCCGCACTTTCTAAACCGTCCCACCTGACCTGGAAGGTGGCCCAATTTGT
ACTTTCAGTGCCTCACATCGGCAGCAAGCCTCCCAGAAGACAGAAATGTTACCTGCTGTGTCGGTCATGTTCTCAGTTGAGATTAAGAGGCTGT
GTCCTAACCCTAGAAAAGATAAGTTCTTGAGGGAGGTGTCTCTGAGGTCCCTGGTTTTCACTGTTCTTCTCCCCGGCAGCGAAAGCAGCTGACG
GATACGTGAAGCCACA
MOUSE SEQUENCE - mRNA
AAGGTCCTGCAACGGGGAGGGAGCGAGCGGGCGTGCGAGAGAGCGTGCGGGACCGGAGAGACCCTGGCTCTGGTGGGGCAGAACGAGGTTGTGA
ACCATGGCTATGTGGATACAGGCTCAGCAGCTCCAGGGCGATGCCCTTCACCAGATGCAGGCCTTGTACGGCCAGCATTTCCCCATCGAGGTGC
GACATTATTTATCACAGTGGATCGAAAGCCAAGCCTGGGACTCAATAGATCTTGATAATCCACAGGAGAACATTAAGGCCACCCAGCTCCTGGA
GGGCCTGGTGCAGGAGCTGCAGAAGAAGGCGGAGCACCAGGTGGGGGAAGATGGGTTTTTGCTGAAGATCAAGCTGGGGCACTATGCCACACAG
CTCCAGAGCACGTACGACCGCTGCCCCATGGAGCTGGTTCGCTGTATCCGGCACATTCTGTACAACGAACAGAGGCTGGTTCGCGAAGCCAACA
ACGGCAGCTCTCCAGCTGGAAGTCTTGCTGACGCCATGTCCCAGAAGCACCTTCAGATCAACCAAACGTTTGAGGAGCTGCGCCTGATCACACA
GGACACGGAGAACGAGCTCAAGAAGCTGCAGCAGACCCAAGAGTACTTCATCATCCAGTACCAGGAGAGCCTGCGGATCCAAGCTCAGTTTGCC
CAGCTGGGACAGCTGAACCCCCAGGAGCGCATGAGCAGGGAGACGGCCCTCCAGCAGAAGCAAGTGTCCCTGGAGACCTGGCTGCAGCGAGAGG
CACAGACACTGCAGCAGTACCCAGTGGAGCTGGCTGAGAAGCACCAGAAGACCCTGCAGCTGCTGCGGAAGCAGCAGACCATCATCCTGGACGA
CGAGCTCATCCAGTGGAAGCGGAGACAGCAGCTGCCCCGCAACCGGCGTCCCCCCGAGGGCAGCCTGGACGTGCTGCAGTCCTGGTCTGAGAAG
CTGGCCGAGATCATCTGGCAGAATCGGCAGCAGATCCGCAGGGCTGAGCACCTGTGCCAGCAGCTGCCCATCCCAGGCCCCGTGGAGGAGATGC
TGGCTGAGGTCAACGCCACCATCACGGACATCATCTCAGCCCTGGTCACCAGCACGTTCATCATCGAGAAGCAGCCTCCTCAGGTCCTGAAGAC
CCAGACCAAGTTTGCCCCCACTGTGCGCCTGCTGGTGGGGGGGAAGCTGAATCTCCACATGAACCCCCCCCAGGTGAAGGCGACCATCATCAGC
GAGCAGCAGGCCAAGTCCCTGCTCAAGAATGAGAACACCCGCAATGATTACAGCGGCGAGATCCTGAACAACTGTTGCGTCATGGAGTACCACC
AGGCCACTGGCACGCTCAGCGCCCACTTCAGAAACATGTCCCTGAAACGAATCAAGAGATCTGACCGCCGTGGTGCAGAGTCAGTAACGGAAGA
GAAGTTCACGATCCTGTTTGACTCACAGTTCAGCGTCGGTGGAAACGAGCTGCTCTTTCAAGTCAACACCTTGTCGCTCCCGGTGGTGGTGATT
GTTCACGGCAGCCAGGACAACAATGCCACAGCCACTGTCCTCTGGGACAACGCCTTTGCAGAGCCTGGCAGGGTGCCATTTGCCGTGCCTGACA
AGGTGCTGTGGCCGCAGCTGTGTGAAGCGCTCAACATGAAATTCAAGGCTGAAGTACAGAGCAACCGGGGCTTGACCAAGGAGAACCTCGTGTT
CCTGGCACAGAAACTGTTCAACATCAGCAGCAACCACCTCGACGACTACAACAGCATGTCCGTGTCCTGGTCCCAGTTCAACCGCGACAATTTG
CCAGGACCGAATTACACTTTCTGGCAGTGGTTTGATCGCGTGATGGAAGTATTGAAAAAACATCTCAAGCCTCACTGGAATGATGGGGCTATCC
TGGGTTTCGTGAACAAGCAACAGGCCCACGACCTGCTCATCAACAAGCCGCACGGGACCTTCCTGCTGCGCTTCAGCGACTCGGAAATCGGGGG
CATCACCATTCCTTGGAAGTTTGACTCTCAGGACAGAATGTTTTGGAATCTGATGCCTTTTACCACTAGAGACTTCTCTATCCGGTCCCTCGCT
GACCGCCTGGGGGACCTGAATTACCTCATATATGTGTTTCCTGATCGGCCAAAGGATGAAGTATATTCTAAGTACTACACACCGGTCCCCTGTG
AGCCCGCAACTGCGAAAGCAGCTGACGGATACGTGAAGCCACAGATCAAGCAGGTGGTCCCCGAGTTTGCAAATGCATCCACAGATGCTGGGAG
TGGCGCCACCTACATGGATCAGGCTCCTTCCCCAGTCGTGTGCCCTCAGGCTCACTACAACATGTACCCACCCAACCCGGACTCCGTCCTTGAT
ACCGATGGGGACTTCGATCTGGAAGACACGATGGACGTGGCGCGGCGCGTGGAAGAGCTCTTAGGCCGGCCCATGGACAGTCAGTGGATCCCTC
ACGCACAGTCATGACCAGACCTCACCACCTGCAGCTTCATCGCCCTCGTGGAGGAACTTCCTGTGGATGTTTTAATTCCATGAATCGCTTCTCT
TTGGAAACAATACTCGTAATGTGAAGTGTTAATACT
MOUSE SEQUENCE - CODING
ATGGCTATGTGGATACAGGCTCAGCAGCTCCAGGGCGATGCCCTTCACCAGATGCAGGCCTTGTACGGCCAGCATTTCCCCATCGAGGTCCGAC
ATTATTTATCACAGTGGATCGAAAGCCAAGCCTGGGACTCAATAGATCTTGATAATCCACAGGAGAACATTAAGGCCACCCAGCTCCTGGAGGG
CCTGGTGCAGGAGCTGCAGAAGAAGGCGGAGCACCAGGTGGGGGAAGATGGGTTTTTGCTGAAGATCAAGCTGGGGCACTATGCCACACAGCTC
CAGAGCACGTACGACCGCTGCCCCATGGAGCTGGTTCGCTGTATCCGGCACATTCTGTACAACGAACAGAGGCTGGTTCGCGAAGCCAACAACG
GCAGCTCTCCAGCTGGAAGTCTTGCTGACGCCATGTCCCAGAAGCACCTTCAGATCAACCAAACGTTTGAGGAGCTGCGCCTGATCACACAGGA
CACGGAGAACGAGCTGAAGAAGCTGCAGCAGACCCAAGAGTACTTCATCATCCAGTACCAGGAGAGCCTGCGGATCCAAGCTCAGTTTGCCCAG
CTGGGACAGCTGAACCCCCAGGAGCGCATGAGCAGGGAGACGGCCCTCCAGCAGAAGCAAGTGTCCCTGGAGACCTGGCTGCAGCGAGAGGCAC
AGACACTGCAGCAGTACCGAGTGGAGCTGGCTGAGAAGCACCAGAAGACCCTGCAGCTGCTGCGGAAGCAGCAGACCATCATCCTGGACGACGA
GCTGATCCAGTGGAAGCGGAGACAGCAGCTGGCCGGGAACGGGGGTCCCCCCGAGGGCAGCCTGGACGTGCTGCAGTCCTGGTGTGAGAAGCTG
GCCGAGATCATCTGGCAGAATCGGCAGCAGATCCGCAGGGCTGAGCACCTGTGCCAGCAGCTGCCCATCCCAGGCCCCGTGGAGGAGATGCTGG
CTGAGGTCAACGCCACCATCACGGACATCATCTCAGCCCTGGTCACCAGCACGTTCATCATCGAGAAGCAGCCTCCTCAGGTCCTGAAGACCCA
GACCAAGTTTGCGGCCACTGTGCGCCTGCTGGTGGGGGGGAAGCTGAATGTGCACATGAACCCCCCGCAGGTGAAGGCGACCATCATCAGCGAG
CAGCAGGCCAAGTCCCTGCTCAAGAATGAGAACACCCGCAATGATTACAGCGGCGAGATCCTGAACAACTGTTGCGTCATGGAGTACCACCAGG
CCACTGGCACGCTCAGCGCCCACTTCAGAAACATGTCCCTGAAACGAATCAAGAGATCTGACCGCCGTGGTGCAGAGTCAGTAACGGAAGAGAA
GTTCACGATCCTGTTTGACTCACAGTTCAGCGTCGGTGGAAACGAGCTGGTCTTTCAAGTCAAGACCTTGTCGCTCCCGGTGGTGGTGATTGTT
CACGGCAGCCAGGACAACAATGCCACAGCCACTGTCCTCTGGGACAACGCCTTTGCAGAGCCTGGCAGGGTGCCATTTGCCGTGCCTGACAAGG
TGCTGTGGCCGCAGCTGTGTGAAGCGCTCAACATGAAATTCAAGGCTGAAGTACAGAGCAACCGGGGCTTGACCAAGGAGAACCTCGTGTTCCT
GGCACAGAAACTGTTCAACATCAGCAGCAACCACCTCGAGGACTACAACAGCATGTCCGTGTCCTGGTCCCAGTTCAACCGGGAGAATTTGCCA
GGACGGAATTACACTTTCTGGCAGTGGTTTGATGGCGTGATGGAAGTATTGAAAAAACATCTCAAGCCTCACTGGAATGATGGGGCTATCCTGG
GTTTCGTGAACAAGCAACAGGCCCACGACCTGCTCATCAACAAGCCGGACGGGACCTTCCTGCTGCGCTTCAGCGACTCGGAAATCGGGGGCAT
CACCATTGCTTGGAAGTTTGACTCTCAGGAGAGAATGTTTTGGAATCTGATGCCTTTTACCACTAGAGACTTCTCTATCCGGTCCCTCGCTGAC
CGCCTGGGGGACCTGAATTACCTCATATATGTGTTTCCTGATCGGCCAAAGGATGAAGTATATTCTAAGTACTACACACCGGTCCCCTGTGAGC
CCGCAACTGCGAAAGCAGCTGACGGATACGTGAAGCCACAGATCAAGCAGGTGGTCCCCGAGTTTGCAAATGCATCCACAGATGCTGGGAGTGG
CGCCACCTACATGGATCAGGCTCCTTCCCCAGTCGTGTGCCCTCAGGCTCACTACAACATGTACCCACCCAACCCGGACTCCGTCCTTGATACC
GATGGGGACTTCGATCTGGAAGACACGATGGACGTGGCGCGGCGCGTGGAAGAGCTCTTAGGCCGGCCCATGGACAGTCAGTGGATCCCTCACG
CACAGTCATGA
HUMAN SEQUENCE - GENOMIC
AGCCCTCCCGTGCCTCCCACCCTGACCCTGTGCCCAGTGGCTGTGCCCTTGGTTGACCATCCCTCATTTGGTCTCTGACTGTAAGGCCCCGAAT
ATCTGTGTCTTTCATTGCACATTTCCCCTTCTGGGTTTTTTTTTTTTTTTTTTTTTTGAGATGGAGTTTCGCTCTCGTTGCCCAGACTGGAGTG
CAATGGCGCGATCTTGGCTCACAGCAACCTCCACCTCCAAGGTTCAAGCGATTCTCCTACCTCAGCCTCCCGAGTAGCTGGGATTACAGGCATG
TGCCACCACTCCTGGCTAATTTTGTATTTCTAATTTTGTATTTTTAGTAGAGGCGGTGTTTCTCCATGTTGGTCAGGCTGGTCTCGAACTCCCG
ACCTCAGGTGATCCACCCGCCTCGGCCTCCCAAAGTGCTGGAATTACAGGCATCAGCTACCATGCCCGGCCCCCACTCTGGCTTTTATTCTCTC
TGTGTCTCTCCCTTGTCTCCTTAGGTCTCCATCTGGTTCTCTGATTCTGTCTGGGTTTCTCTCCATTTCTTCAGGCCTGTTCTCCCTTTGAGAT
GCAGTGGGGAGGAGGAGGAGCTATGGAACTTTCCCAGGATGGGCAAAGGGCACCCAAGGGAGTAGAGGGAAGGGTGTCAGAGTTGGGTTGGGAA
GAGGTGACTGTAGTCGTGGCTCCAGATAACACAACTACCCAGAAATGTCAAATTTGGGGTTTCTTTTTGCTTTCAGTCCCCTTGTTTGTCCCCT
TGTGTGGGTGATTTCCCACCACAAAGTGCCCTGGTGATTTTGGGGAACCAGGCTGTGGAGGAGAAAACTGAGGCCACGGGATGGGGGTTCAGGA
AGATCAGAAACTGTCAAGGGTCTGACTGAGCTGCGGTCCGAGGCTGGCCTCCTTGCCCCTAACTGCTCTTCACCCCCAAATCCAAGTCACAGTA
TTAGATGGGGAGTGAGGAAGGATTTTAGAAATCTTACAGAAATATATTCCCCAGGCTAGGTGCAGTGGCTCACGCCTGTAATCCCAGCACTCTG
GGAGGCTGAGGTGGGAGGATCACTTGAGGCCAGGAGTTTGAGACCAGTCTGACCAACATGGTGAAACCTCGTGTCTACTAAAAATACAAAACAA
TTAGCTGGGCGTGGTGTCACGCACCTGTAATCCCAGCTACTCGGGAGGCTGAGGCACAAGAATCTCTTGAACACAGGAGGCGGAGGTTGCAGTG
AGCCGAGATCATACCACTGCACTCCAGCCTGGGCAACAGAGTCAGACTCTGTCTCAAAAAAAAGAAAAGAAAAAAAAAAAAAGCAATATATTCT
CCAAAAGAAGACCTCCTATATTTTATTAGGAATAATAATAGTCTGCAGCCTAGGCTTCAGTTGGCACACTATATTCGTATCCTGAACTACATCA
AGGCACATTTGTGTACAGACATGGTTGTGCTCTTCAACTCAACGGATCCTTTCAATAACCTTGAAGGCAGTCAGGGCCAGAATCACACCCTTTG
ATTAGTCCATGAAAGAAACCTGCCCAAAGCTGTCTGGCCAGTAAGTGCACAGATGGCACCAGGATCCAAGTTGCCGGGCCTTGTGGGCAGGGTC
TCAGTATAACCTTTCTAAGCTTCCCCAAGCCCAGCACACACCGGCGGAGTGAAGAGGCCTCCCTGGCCTGGGCTAGCCCACCATTTTTCTGCGG
TGCGGAGCATGGCATCTCCATTCTCGCCCAGCCTACACCCCTGCTCTATTGAATGGGACAGTGTGCTCTGTGCACACTTACATGAAGGTGGGTT
TGAGTTTATGGATTAAGAGAATTATCCCAAAGGGCCGGGCATGGTGGCTCACGCCTGTAGTCCCAGCACTTTGGGAGGCTGAGGCGGGTGCATC
ACCTGAGGTCAGGAGTTCGAGATCAGCCTGGCCAATATGGTGAAACCCCGTCTCTACTAAAAATCCAAAAATTAGCTGGGCGTGGTGGTGCACA
CCTGTAGTCCCAGCTACTCAGTACGCTGAGGCAGGATAATCACTTGAACCAGGGAGGTGGAGGTTGCAGTTAGCTGAGATCACGCCGTTGCACT
CCAGCCTGGGCAACAAAAGCGAAACTCCGTCACAAAAAGAAAAAAAAAAAAAGAGGGAGAGAGAAAGAATTATCCCAGGTCCCCTTTCTGCCTT
GCCCTTGACGATCAGGTCTGCCCATGCCCCTACCCTGGGGAGAACAGATTGAGGTCACCTTGACTTGACCTTCCTTGGGGGGTGGAGGGAGGTG
GTACAGAGATGCCTTTGTTTCCTGTGCTCCAAGTCCCTTCTTCAAGGAGAGTTCCTGTTACATGGGAGCCAGAGGGGAGGTGGGGTAGGGGTGA
AGGGCCTTCCCAAGAAAGCTGGAGGCTTTCTAGGAAGTATCTTTTCACCCTGCGGCAAAGGGGAGAAGCCCTGGAGCACTTAAACATCCTGTTT
CACCCCCACCTTGCCTCTGCTTGGACAGCCTACCTGCACTCCAGCCCCCACCGGAGAAGGCTTCTAGAAGTGGGGCCATGGGCCCATGCTCAGA
GTATACCCCACCTCTGAGGCCAGGCCCTGGTACCTCCCTATAGAAATGCCACCCCCATTCTTGTCCAAGAAGACAGATCAGGACCTAGGGAGGG
TGTGTGTTTATATGCACAGGGTGAGGACTTCTGTGCAAATCTGGGGGAAGGGAAGGAGCTGCCGGAGCTTGGGTGAAGCCCGTTCCTGCCGCTG
TCCCCTATCCACCACTCTTCAGGGAAGTCACTTTACAGTGAAGTCACCAACAGAACACAAGGCCATCCTGCCTGAGGCATAGTGACTGTCCTCT
GTTTCTGGGAATAGCATGAGGGGAAGGGTGTGGGGCTGGACAGGGTGGGTAGGAGAGGAGTCCTGCTTCCTCTGCCCAGCTGCCCAGCCTGCCT
GCCCTGGGGGAGAGGCTTGTAGGCCGGTTTCTTTCTGGACGAAGAGAAGAGGATGCAGAGTCTGTGCCAGGTTCACATTTCCCAGCCAGTCAGG
TGGGCAGGAGGAGCCCACCCTTTGCAGCCCCCTCATTGCAGGGCCAGGCCCAGGAGCCTGGAGAGAGGAGAGAGGGCACACAGAGCCAGGCAGC
TGAGTGGAATTGGCACTGTCCTGGGCAGCCCTGGGTCAAGCCTGGCTTCTCATCCTCATCCATGATGACTATCAGGCCGCTCTTCCCGCTGAGC
TAGTTTCTCCTCCTTCCAGCCCAACAAGAAATCTTTTGTGCCTTGGCCAGCCCAGTACCCAACCTCAAGCCCTCTGGGGGTTGTGTGCGAGGGG
GCTGAGCATCTTCCACGACACCTCCCAGTACTCTGCCACTTTCCTTTGTTATGACTGGAGGGGGTTCCTTTCTGTAGAATCTCTTTCTCATTGT
TTCTTCGTTTCTTAAGTCTCAGATCTACCCACATCTTCCTTGCTCCAAGCCTCAAAAAAGTGCTTCGGCCAGGCTTTTCCCCTTACGCTGGCCT
CTCAACTCCAAGCACTAGCCCCTTTCATTCCATCTACCTGGAATGTCATTCCTCCCTTGGCCACCTGGTGAAATTGGCCTCATCTTTCCTAGGG
TTAGTGTGGCCTAGAGGAAAACACAAAGGCTTTGGAGTCATAAGGTCCTGGTGCAGACCCTGGCTCTGCTGTAGGATCTTGAGTGAGTGAGTCT
GCCTCTTGGATCTAAGCATCCTCACTTGTAAAGAAATAGCAAGACCCACTGCTGGGATTTCTGTTAAGACCCAGTCACAGGCCCGGTGCGGTGG
CTCAAGCCTGTAATCCTAGCACTTTGGGAGGCTGAGGCAGGTGGATCACCTGAGCTCAGGAGTTTGAGGCCAGCCTGACCAAGCCAGCACAGAC
TCAGCATGGTGAAACCTTGTCTCTATTAAAAATAAAAAAATTAGCCAGCTGTGGTGGCAGATGCCTGTAATCCCAGCTATTTGGGAGGCTGAGG
CAGGAGAATCACTTCAACCTGGGAGGCAGAGGTGGCAGTGAGATGAGATCACACCACTGCACTCCAGCCTGCGTGACAGAGCGAGACTCTGTCT
AAAAAAAAAAGACTCAGTCACAGTGGCTGGTGCATTGTAGGTGCTCAGAGGCCTTGGCCAGTAGAGCTGGGTGTTTTTTCCTCTGCCCTTCAAT
CCCATCTGTATTACAGGCCCCTTCTTATGGCCCTAACACATTCCCTAAAGGGCTATGTCCCACTGCTTGTCCACAATAGAGTCTTCATAAATAT
CTGTTGGATTAATGAAGCCCCCTAAACCAGCACAGAACTTCCGGAGCTTTGACGGTTCAGGGCAGCCCCCTGTTCACTGACCACCCCCACCATG
GTTCCCAGAAGACTCTCCCCCTGCTGCCCTGGCCTCTGCCTGCTCTGGTCCCACTGAGCTGCTTTTCTACACACAGTGGCAGCAGCAGCCTCAT
CTTTGCCTGGTGCTGGGCTGAATTTTGAGTTCTTAACCTGCCTGGCAAGCCAGCAAGATACTGGCTGCAGTGGCACTCTGCTCCCTCCTCTGCG
TCCGCCCCACCCTCCCTCGATAATCCTCCATCCCCCAGGACTCTGCGTCGAGAGAGCCCAGTGACCCTGTCCCAAGAGGCGGGGTCGGGGGATC
CTTGGCCTTTCCAGAGAGCCCACCCTTTAGCCTTTAGCTCTCCCTGGAAGCCACCCCAGATTGGTGAGGCACACAGGAGCAAGACTGAGAGCAG
GTGTGTGAGACTCTCCAGGTGGCGAGTCCTCCATGCACCTGCACATCCATCGCTCCCGTCCTCTCCCCTCCCCTCCATGTGACAAAGCACCAGC
TCTCTCCTGGCCAGCACACTGGCTCGGATTAGGCTGAGGCAAAGAAAGAGAGAAAATGCTTTTTTATCAAGTGCCAGGCACAGTGCTTAGTTGC
CTTCACAAATGCTCTCCTTTTTCCTTTAAAAAAACTGTCTATTTTACTAATGTTTTAATAGGGAGCATCTGCACATGATATATGTATTTTGTAA
CAAAAGATTCAAAAGGGTATGTGCTGAAAAGTTAGTCTCTGCCCTTTCCTGTCCCCCAGGGCCCTTCTGGAGGGGCAACAACAGTTGCTGGGGT
CTTTTGTGCATTTAAATGCACGGAAGGATTCTGTGGATTTGAAACATATATTACACTCTACCCCCTAACTATGATTTACACGTGATGGGAAACT
GAGATCCTCAGAGACATTAAGTACCTAGACCAAAGTCACACAGCTAGTTTTTTTTTGTTTTTGTTTTTGTTTTTTTTTTTTGAGACGGAATCTC
GCTCTGTCGCCCAGGCTGGAGTGCAGTGGCGCGATCTCTGCTCACTGCAACCTCAGCCTCCCGGGTTCACGCCATTCTCCTCGCTCAGCCTCCG
GAGTAGCTGGGACTACAGGCGCCCGCCACCACGCCCGGCTAATTTTTGGTATTTTTACTAGAGTCAGGGTTTCACCGTGTTAGCCAGGATGGTC
TCGATCGCCTGACCTCCTGACCCACCCGCCTCGGCCTCCCAAAGTGCTGGGATTACAGGTGTGAGCCACCGCGCCCGGCCAACAGCTAGTAAGT
TAGCAGAGCTGGGATTTAGAACCATATCTAACTTTTCACCACCAATGCTCTGGCAGAAGTAAGCAGGGGCACTGACAGAGCCCTCCGAAACTGC
AGAGCCCATTCCAAACCGAGGCCACGCCATTCTGAGGCCTTGGAGATCTGGCATCCCCGCCTTCTTTTCTGTTGAGCATCCTATACCTTCTCCA
CATGGCTCCAGGGTCCTGTACTGACCTATCCCCCTATGGAAGGATTCATCCCCACAGGGAAAAAGGGACATTCCCACAGTGCCCTTTCTTAGCA
AATGTGTGGCCGGTGGTTGCCCAGGGTCAGCCTGACTCCTGGGATGCAGGAGGGAAGCCATAATAACGAAGGCCTCTGGTTTCTGGCCAGAGGG
CATCATCGTTGTGGCTTCAGTGACGTTCCCAGAAAATGCCCTCATGATCTCTGCGGCAGCAGTGAGCGAGCATGTGAAGCAGGGAAGCTGCCCC
CTCTGAAAGCCATGTGTTCATCTATGAGAGAGAGAGGGGAGGAGGCTGTAGGATGGGAGCAGGGGCATGCATGGACAAGGGCTGTGGACTAGAC
CCCCAGGCTCTTCCCCCAAGCCTCTCTCCTGGGTCAGGCTGGTGCACTAAGGGATGAGACCCTCCAGTGGACATTGCTGCATCTCCAGGTACCT
TCTTGGGTCATTCCTGATGGGTTGGACTGTGGGGTCTTTCAGGATCCTAGCTTCCTGTTCAGTTTCTTTCTTTCTGTCATGTCTTAAGTCTGGT
GTCCCCTCAATTTAAGGGAATATGTCCCCGAGGCCTAGAAGAAGAGGGTCCCACCCCATCAGAACTGTCAAGCAGAGAAGCAGGTGTCAGGCCT
TCCCATCCCAGGATGACAACATTCTGTTTTGCTGAGGTAGTGACCCAGAACATTCTGTCCTCAGCATCTGTGCACACACCCAGCCAGGTCTAGC
TTGGTGCCTGGTGACCATCAGTCAGAGATGTGCCTAGAGCTGCAAGAATCAAGAGGCATTCCCACCCACCCTTCAGGACATTTTTTTTTTTTTT
TCTGAGATGGAGTTTTGCTCTTGCTGCCCAGGCTGGAGTGCAATCGTCTGATTTTGGCTCACCGCAACCTCCGCCTCCCAGTTTCAAGTGATTC
TCCTGCCTCAGCCTCCCAAGTAGCTGGGATTACAGGCATGTAATCCTGTAATGGCACCACCATGCCCAGCTAATTTTGTATTTTTAGTAAAGAC
GAGGTTTCTCCACGTTGGTTAGGCTGGTCTCGAACTCCCGATCTCGGGTGATCCACCCGCCTCGGCCTCCTAAAGTGCTGGGATTACAGGCGTG
AGCCACTGCGCCCGGCCCCCTTCAGGACATTTAAACTAGCGCCCTGTGGCTGCCACAAACCAGCTGGCTTGAGTCCTAGACCGCCGGTCTTGGG
AAGAGGAGTATTCATCTTAGCTGCTACTAAACACCACAGTAGTAGTTAACCGCTATACAGTGCTTTACAGTGAAGCACTTTACATGTAGTAAAC
ACTTATTTCCCGCAACCCGATGAGGTAGGTACTGTCTCTATCACCACATTACAAACGAGAAGATAGAGGAAAACACACTCAAGATTACCCAGCT
CAAGGAATTGACAGAGTCTGGTTTGAGAACCTGTACTTTTTTTTTTTTTTCTTTTTTTGACACAGGTCTCACTCTGTCGCCCAGGCTGGAGAGC
AGTGCCACAATCATGGCTCACTACAGCTTCAGGCTCGGCACAGTGGCTCACAAATGTAATTCCAGCACTTTGGGAGGCTGAGGAGGGAGGGTTG
CTTGAGCCATAAGTTCTTGAACAGCCCAGGCAATATAATGAGACCCTGTCTTTACAAATATTTTTTTTTTTTTGAGATGGAGTCTCACTCTGTC
GCCCCAGGCTGGAGTGCAGTTTCGTGATCTCGGCTCACTGCAACCTCTGCCTCTCGGGTTCAAGCAATTCTCCTGCCTCAGCCTCCCCAGTAGC
TGGCACTACACGCGCGCACCACCACGTCCAGCTAATTTTTGTATTTTTAGTAGAGACAGGGTTTCAACATATTGGCCAGGCTGGTCTGGAACAC
CTGACCTCGTGATCCACCGACCTTGGCTTCCCAAAGTGCTGGGACTACAGGCGTGAGCCACCGTGCCCGGCCTACAAATAATTTTAAAAAATTA
ATCTGGGAGTAGTGGTGCACGTCTGTGGTCCCACTTACTCATAACGCTGAGGCAGGAGGATTGCTTGAGCCCAGGAGGTTGCCTTGAGCTGTGA
TTGTGCCACCACACCATGAGACCTTTTTCTGTGAGACTGTCTCCAAAAAATAAAAATAAAAAAAAATCATCACACCCTTGACCTCCCAGCCTCA
ACTGATCCTCCCACCTTAGCCTCCTCAGTAGCTGGGACCACAGGTGTGTGTCGCCACACCGGGCTAGACCCTGTCCTCTTAATGACTGCATAGT
CCTTGTAACCTCCATTTGCATTCCTAGAGCATAGCATTTGTTCCAAAAATATTTATTGAGTGTCTGTTCTGGGCTTGAACACGAGTAGGAGGAT
TTAAAAGTGAATAGCATATTGCGTCTCCCCTTGGGGACAGAGACAGAAACATGAAAACATGAAATTGTCCTTCAACACAAGAAGTGCTGTAATA
GAGGCATGAATAACGCGGTGGGAAACAAGGAGGGAGGTCATGCTGCCTGAAGCAAATGTCACCGAAGGGCAGACATCAAGAAGGCAGGACATTC
CAGGCACAGGGAATAGCATGTGTCCAGGGATGAAAGCTCACAAGAAAGAGAAACATGAGTCAGGTGCGGTGGCTCATGCCTGTAATCCCAGCAC
TTTGGGAGGCTGAGGCGGGCAGATTACGAGGTCAGGAGTTCGAGACCAGCCTGGCCAACATGGTGAAACCCCGTCTCTACTACAAAAATACAAA
AATTAGCCGGATGTGGTGGTGTGCGCCTGTAATCCCAGCTACTCAGGAGGCTGAGGAAGGAGAATCACTTGAACCCAGGAGGTGGAGGTTGCCG
TGAGCTGAGACCGCACCATTTCACTCCAGCCTGGGCAACAGAGAGAGACTCCGTCTCAAAAAAAAAAAAAAAGAAAAGAAAAAGAAAAGATAAA
AGAGAAATATGGACAACATGGAGCACCTGAGTGTCAAAACATCATGGGCAGTAACTGTCAGGGAGATTGCCAGAGAGCTCGGGGTTGGTTGGCG
CATCCATCCTGCTTCCTGCTTCCTTCTCTGGCCTCCAAGCTCCCTGAACCTACTCTGTGCAAAGCACTGTGCCAGGTGTTGGCCCAGAGTATGG
GACTGCAGCAGTGGCCTGGGTAGCGGAGAAGGGTTTTTTGACCAGCTGGAGACCTTTGTGGCTGGTGTCATTCTGGAGGTGAAGAGAAGGCCGC
TGGAAAGAGCTGCCCAGGGAGGACTATGGGAGAACTTGCAGCTCTGGGCCATCTCTGGACATGAACGTTTTGCATACACACAGGGGAGCTCTGT
GTGTCTGAGTGGGGGCGGGAGGGGTCCTTCTCTCTCTTTTGGCCCCTGCAGCTTGGCTTCTGGAGCTTTCCTATGTCTTGCTTTAGTGCTAGCC
CTTGGAGGGTTGCCAGGGAAACCGCTGGCCAGCTCCGGGAGATACACCTAGCACAGGAAACGACAGTGGGTGACTCAGCCTGGCTTCCCACAAC
CGCAACCCCCTCCTCAGCACGTGGAAAGGATCTGGGGGACCCCCTTCCCCTCGATCCTACAGATGACCCTGTTTATTCTTTCTTCTCTAGAGAG
AGCAGTCCCTCCCGCAGCTCTGACTGGTGGGAGCCACCCAGATTTTCCCAGGAAGGGAACCGGCCCCAGGCGCCCCGTCCCCCGTAGGTTCACC
CTGGAACTCCGACAGGTGAATTCGGCCTGGGCGAATGTGAATTCCTGCCGTGCCCATGCAGGCGGCAGGAGCCCTGGCTGAGACGCCCTCCCGG
GGGCAAACCCAGGATAATTATTGATCCGGGCCCCTGTGGACTTCTGACCTCGGCCTCGGCGGGAGAGGACCCGGAACGCGGGCCTGGGCTCCCA
GGGAGAGAGGTGGGCGGGCCGCGGAGGGGGCCAACCAAAACGACCACGACAGTGCGCCCTAGCCCTGCTAGTGGTGGTCGACCCAACCCAAACA
AAGCAGCATGTGCTTGCGGTGCGGCGTCGGCTAGGGAGCCGAGCCGGGAAGACACCCCACCCCCGCACAAAGGGGGTGCGCGCGGCGCCGGCAC
CGGCACCGCCGAGCGCGCCGCCACCTCGGGTGTGCCGAGGGGGTCCGGGTCCTTCAAGGGCGGTCGCGGAGGGGGCGCGAGGGACAGCGGGCTA
GCGAGCGCGCGCCGGGCGGAACCAGGAAGCGGGGCGCGCTCCGGGTTGCCAGCGGCGCGCGTCCCTGGGCCTCCGCGCGTGAGCGGCGCGCGCG
CCCCCGCGGGCCCCGGCGGCAGGAGAGTCCGCGGCCGGAGCCGTCACCCCGGGCGGGGACCCAGCGCAGGCAACTCCGCGCGGCGGCCCGGCCG
AGGGAGGGAGCGAGCGGGCGGGCGGGCAAGCCAGACAGCTGGGCCGGAGCAGCCGCGGGCGCCCGAGGGGCCGAGCGAGGTAGGAGCTGCGGGG
CGAGCCCTGGGCCCGGGGCCGGGGGAGCCAGGCCGGGGAGCCAGCCCGGGCGGGGCCCGCGCTCCAGCCGCTCAGCCGCCCGTCAGGGCCGCGC
CGCCGCCATCACTCCCGGGCCGCGGTGGTTGCGCGCTGGGCGAGGGGCGCGCGCGGGGAGAGGGGGTCCGGGTTGGCTGCCGGGGAGGCTGAGG
GCAATGCGGGGTGCGCGAGGGGGACTTGCGAACCCCGCGGCGCCGCGGGGGGCGTGCGCTTTAAAGGCTGCGTGCGCGTGTGCTGAGTGGGTGT
GTGGGGACCCCGCGCCGACCCCATAGGAGCTCAGGGGGCTGCTGTCAGCCGCCTCACACCTTCACGTTGCAATTCCGAATATCCCCAGCCGTCT
TCCTTGCTTTAACTTCTTTCTTTCAAAAGAGGTTCCCGCGACTCCGGGGATGGGATGAGCCTGCCGGGGTGCCTGGTGCGGTGGGGGCTATTAG
CAAAGCTTCAAGAAACAGGGCCTTATAAGGAATCAAGACAACAAATACGAACGTTTCGATAAGACTCTGGGGGGCGGCATCCCACATCAGGACC
CCCCAGCCCTGGGCTCGTGCGTGTGGCCGTCGGATGCAGTGTCCTTTTTCTTTCTAGTCAGGGATAAAGCCTTAAAAGTGCTCCTGGTGTCGGG
GGGTAGATATGGAGAGTCGGAAGGGGAGTTGTATCACAAAAGCTGGTCTGAGGCTAAAGGAATCTGGCAAGATGGTCGGGGTGAACAAAGAGGA
AAGAACTCACACGGAGCAACAGGCGGTTGCAAACACTTGTACCCAGCAGTGATGGAAAAGCCAAAGAAGAAAACCAAGTGTCAGCTTTTAGAAA
GACGGGATTAATGAAAAGCACAAGAATTTTAAAGACTAAAAGAGATACCGATTCTCTCTTTGCCAAAGACCCAGAGTCAGTTCTTTTCTTCTTG
GTCCCTGTGATCCCGCCATACCTCGTATCAAATAAATAGTGCCAAAAGTGGGTCAAAGAATGTTAGAGCTGGAAAGGAACCCAGCGATGATGCC
ATTCTTTTATTGTACAAATGAGGAAACTGAGGCCCAGATAGGTGGAGTAAGTGGCCTGCTCACGTGACACGGCTGTTTGTTGAGTATCCAGGGA
TTGAAACTTCAAGGACTCTGAGATTCGTGCTCTTCCCAAAGCATCGTGCAGTATACAGATCTTTGCCTACATACAATTCCATACATTTTCTCTG
CAGTGTCCTCAGGGAATGCCCTTTGAAAGGGCCAGCGTGACACTGAATATCATACTTGGGCTTATGTCATTTTTTTCAGTCTTCAAGTGGTGTT
TATGGTCTGCTTGGATCTTAGGTTTCCAAAGCTGTTGGATAGCCGCCTGGGCCATAATAAGCTTTCAGCTGTTGGGTCTACATTATTTCAAATA
ATTTTGTTATCTTTCAATTAAGGTAATAGAACTGTGCCTCTCTCCCCAACATTCTATTGTTGTCCATTTGCTTATGTTATATTGCGTTATGTTC
ATTGCCTGTGAGTTCCTACGTGAGGATGTATTTTATTGAGTGTCCCTTTCATGTTTTAAAATTTCATTTTGTAACACTGTAAATATTGGAGTGG
TTCTGATCACTTCAAATGGGGAGAATCTTATTGATTGATTTTATTTTAAGGCTTTGGGTTGTTTTGTTTATTCATTTGGGTACCAGTTTCCATC
TCATGGAAGATCACAGTTGTTAGAATGGACATGGCTAAATAAGAGAAGGGGCTGCTGATTTTAAGAAAAACTTCCTATGTGACAATTTGTGGTA
TCTGTTACGTTTAATTCAAACAAGTCCACACCTTGGGTCAGGTAAGCGCGTTATCTAGGAGATGACTTGTTTGCTACTGTAGCCTCTGGAAGAT
GAAATTTCAAGCTCCAGATTGAGACACAGGGAAGCAATGGAGAGGTTTTTTTTTTTTTTTTTTTTTTTTTTGTAAAGCAAACCATCAGAAAAAA
AAAGTTGATTTCTATCACCAGTAGTTTGGTTATTGCATAACTTGAAGCTAAACTCTGCACAAAATAATCTTTGCTATATACCCAACTAGGTAAA
CTATCCCACCTTCTCATCAGTTCTCACCTTTTCGGTGCTTGTATTTTTTGCCCACGGGATATTAATATGGATTGTGTTCAGAAATTTAAGGTGT
GTACTTCATAGTATGTATGATTGTAGGAGAAAAATGTGCTATCATCGTTTGGAGTGTTACAACATAAATATTTTGCTCAACACTTCCTATCCTG
CTCTGACTTTTCATCTCATCTCCATTTTCTTCCTCTCTTGATTGTTTTTATGTCATTTACATATGTAAAAGCCACATCAAGACTAAAGTTGCCA
TTTATTACTTTTTGATACTTAAGTCGAGTTTTTTCAAATCATAGTATTCTTACTATTCAAATTGTCTGTAATTTTTGTTAGGCTTATATATTAT
GAATCCATTTGTTGTGGTTTATTTGGCTTGTTGTTATGTAGGTAGGTGACACAGGTAGTCTTATTGTAAAAGGAAGACGTTATAGATAGGTAAA
TAACATGCTCAAGATTAGATGCAGGTTACACCTCCAATCGAAGGAAGCCTAACTATTTTCGTGCCCTACAAAAATGTCTGTATCTCATAAAGTT
ATTCACAGATTTCTGGACATTCTATCTCTGACACATTTTTTCCCTTTCTGTTAAGAGTGCAGATTACTGCATTATTCCTACAAAAGGAAGCAAA
ATAACCCTAGTTTGTATGATTTTTCTGATAATTTGAAACTTATTCGTTTAAAAAGCTATCTGGCAATTCCAGGTTACTGGACTCTTGAGAAGAA
TATCCTTTTATTTTGATACTATAAAATATCAAAGTATCAAAATACTTTAACTGTGCAACTTAATAAAAATAATGCTTCAAAGTTAGCTCTGCAC
TATCCCTCTCCTCAAATGTGTGGTATTTAAAGGAAGAAAATGTTTTTAATTCTGAGCTTTGTGAATAGAACTCTTCTAAAATCAGAAGTTTTTT
TTTTTCTCCTGCAGTGTTGGAAACACAACAGTTTTATGCTTATTTCTGGGAATAAGAAAGTCAAACTTAACAATCTAGTTTCCATTGATCAGAC
AGTTTTTGTACTTAAATTTAAGTTCTAAGCATCAGAGTGATAAATACTTTTTAAAATTGTATTCACTGTTAATTATAGTGGCCTTATTTGAAGT
AAAATCTTGACATTGGGTGTTTTATTAATGATGATCCTCTGCTACTGAAAAGCCTATGTCAGTTTGGAGAAGATTTTGCACATCTAAATCTATG
CTGTTTTTACTAATCAAAAGAGAAGAGCAATTTACAGGTGTTAGATTTTTAGTTGGTTGAATGAGACCCTCACTTTTGATGGTTTCAGAGTTGA
ACTGACGTTTTATTACTTTTGTTAGTTTGGGTCACACCCATCACTTCCTTGGAAGGTATCTTTGAGGTTTGGTTTCCTTTTTTTTTAAATGGTA
ATATTGGCGTCCCGGTGCTTCCTGTTTGTATTTTCAAAATTAGGTCCACATGTTAACCTTCTTGTAGTGTCACATTTTTATTTTAAACTTATAC
ACACAAACATCAGATGCCATGTGGTTTGTCTCTGACCCTTTGCGCTACTTCATGACAGCTTTACTGAGTGAAGCCTGAATACCCAATCGGGAAG
GCAAGATGTTCTTGTCTTTTCCCAACTCTCTTCAAAGTTTAACAGCCTTGGAAGGAGTCTTAGAACAGCAACAAAAGCACAATTTACAGAAAAA
TGGAGGTGCTGCTATCTCTTTCCTCGCAGGTACTTGGAAAATGTATAGCACTAAGATAGAGTTGAAACATGTTATGTAGAGCCTTGAATGTCGG
TGCTTCAAAGAGGAGTTGCTCTGGGTTTACATGATACAGAACCCCATGGTTTATATTAAGTAGTAATCATAGCCGTTTTTCTGGACTCGCTTAA
AACCCATACACAGTGTCATGGAAAAGAGTTAAGAACAAGGTGAAATTCAGGCTATGGTATTAGAGCTCAGGAGGAATCACCTTCAGCCTTAAAA
CTCTTCCTTTACTCTCCTGGATCACTTAAGTGATAGGTCACTTTTAATATAAATGTTGCAGGATGAGTTAAGTGGAGCCTTGAGAAATATGTGT
AGATTGTTTCAGTGATTAAAGCAAGTGTTCTTTTCCTGGCCTTTAACTCGCTTTATGCTAAGAAGTGTAATAACTAAATAGACTCCTAATTGAA
TTGACATTCAGATGTGTTTGCAGTTTACCCGGAGTTTACCTCTTCTAAATTTTCATTTGGATCCCATTACTAAAAGCAGTATTGCATTAGCATG
GTGCACAATTATGTACAATTCAATTTGCAAATGAAGTTAATACTTGGAGTATCTTGACTTCCTATTCCCCTCCTGCCCCAATATTCAAGAAAGG
AGAAGTTATAATTTGTCACATACAAGATGGTTTCTTCTTTAGGTTTATTCTTAATAACTATGTCCATTTTCACATGGATGACACCACTGAGATG
ATGAATACCTCTATTGATTGATTGATGAAGAACATTTATCTTTTTCTACCTACTTTTGGAAGCTAGCTTGCAAAATCTACTGCAACATTCACTC
TTCATGTATCCTTCTATTACCTTTGGTACCCTGAATAACCTTTTAAAAATTTTTGTACTTTTCTAATATGAAGAGAAGTAGCTTCATATTCTAT
GCTAGTTTTCTGAGGTGCTTGTGCTGACTCATTTTTTAAATTATACTAAGATATAGAGCATGGTTTGAGAGCAGTAATGAGATTCTCAGAAAAT
ATGAAAACTTTCCTTTCTGACTAGTTAGAGAAAGGTTGGGGAAGACAAGGGGAAATACATCAATGAGCCAATCAATTATTGTTATTTGTTGGGA
TTAATTTGGTGACTAATATTTTTAATGCCCATCAGGCTACTAAATGTGAATTTGGCTTTACCCTGTAATGATAACAGGACAAACCCAACGGGTT
TCTAACATTGCTTCTTTTCCCCTGGTAGGGGATTTCTTTGCATATGGGAAATCAGGCCGAAGTTGCCAGTAACAGCCACATCCATGATTTGTAT
TAAAAATAACTATTCATCATTCTCCGCTAGAGCTCTGCTTACCATGGCTCACCTGGGAAGATATTCTGATTATGTATCTAATCATTATGATGCC
ACCTTTCGAGAGGTGAGCAGACAATTAACAAGTCCTTCAAATTATGTTCAAAACCCAGAGTTTGAGAAAATGTTCCAACGCCTTCAAGTGTGAA
GATAATAAAAACATTACCTAATGCTTACCGTTCACTGACAGTGTGCTGGGCAGACATTGTTTTCAGCTCTGGCCTTGTGTTAACTCGTGATTCT
CAGAGGAGTGGGTATTATTCCCAGATGGAAGATGAAGAAATGGCCACAGAGAAGTTAAGTAATTTGTCCAAGGTCACATTACTGTTCTTGGCGG
GGCTGATTCCAGAGACTGCATCCCTAACTAGTGTACAGCAAAAGCGAGCTGGCCACTGCCACTTTGTTATAAGACATTTTGTTTCTTTGAGGCT
TGTATTTCTTTGTGTTCCCAAATGGAGTCTCGTTGGTTTTTGAATAGAAAATATTTTTATATGTTTAGGATTTTTTTAAATGTTGATGAAGATG
GTGATAAATATTTTTCCAATTAAAGTATATACTTCTGGTGGAAATTATATTAAAGAAGAGAAAGTCTTAATTTTTATTATAAGTTGTCTTTCAT
TCTTCTTCCCCTAGCATTACCGTGTACATCATAGAAGAAGAGCTATAAGCTGTCTCCTTGGCCTCTGTTTACAAACAAAGGGATCATTTGTGCC
AATGTAGTGGGTTTGTGTTGACATGCACGTCTGTACTGAGAACTCAACAATCCCACTCATTTTATTTACAACTTTATTTTGCGGGGATTTCTGT
CCTATTCTTGTTGCATTAAAGCTTTTTAGAGCATTAGTCATGATTTCTGAGACAGATTTAAGAATTTTACTTATTTGGGCTAATTTATTATTAT
TATTTCTTGAGACAGAGCCTCGCTCTGTCACCCAGGCTGGAATGCAGTGGCGCGATCTTGGCTCACTGCAACCTCCGTCTCCTGGGTTCAAGAG
ATTCTCCTGCCCAGCCTCCGGAGTAGCTAGGACTACAGGCATGTGCCACCATGCCCAGCTAATTTTTGTATTTTTAGTAGAGACGGGGTTTTGA
CATGTTGGCCAGGCTGGTCTCGAACTCCTGACCTCAGGTGATCCTCCTGCCTTGGCCTTCCGAAGTGCTGGGATTACAGGCATAAGCCACCATG
CCCAGCCTATTTGGGCGAATTTTTAACGCAACTGAACTATTGTATCTCTACAGCTCTGCAAAGGCCATTACAAAATAGTCTCAGATTTTTTTTT
TTTTTTCATTTATGATCCTTACTTTCTCTCAGCACTTTTCCTTGGGAGTGGATTGTGAAGTTAAGTCTTGGAAACAGAATTCACAACCCTAAAG
CGTAGTGCTTTAACTTTGGGAGATCAAGTCACAGACAACAAGAACTTCAATTCCCTGTGCAGAGTATAAACTTGTTCAAATAAACAGAGGATGT
TAGCTTCCAGGATTGTCAACTGTCACCTTTGACCAGGGTTGAATTTTCTTTGAATGTTGACAGAAGTTACAATGTCAGTGGAAAAAGCTTAATG
TGAGGTATCTATAACTCAGAATTTCCTTATGTTTGTGTCAGTCACATCCTACAATTAAAGCTGCTTCTTTTTTTCTATGTCTGATGAGTTTTAA
AAGCCTTCACTGGGGTTTTCCAGCCTTTAGGTGAGAGTAAGTTAAAAAGTTTGTGAGAAACTATTTTTTGTTGTCTAAAATTCAGAGCCTAGGT
CGGGCCCAGTGGCTCACGCCTGTAATCCTAACAATTTGGGAGGCCGAGGCAAGCGGATCACGTGAGGTCAGGAGTTGGAGACCAGCCTGGCCAA
CATCCTGAAACCCTGTCTCTACTAAAAATACAAAAATTAGCCAGGTGTGGTGGTGCACGCCTGTAATCCCAGCTACTCAGCAGCCTGACGCAGA
AGAATCACTTGAACCCAGGAGGCAGAGGTTACAGTGAGCCGAGATCGCACTACTGTGCTCCAGCCTGGGAGACGGAGCGAGACTCCATCTCAAA
AAAATAAATAAATTAAATAAATTCAGAGCCTATAGCTGGTGGCAAGTCACTGTTTTTGAAGGAGTGGGATTTTAAAAAATCTAACCTGGGCTAA
ATGTTAAGTTACATTCATACATGTCATTGTAGCCTATATAAAAAGAAACTTGAACACTTGATCTCTTAAAGTACTAAAAATTGGAATTCATCAG
CTTTGTAATATAGCATTCATTCTACACTATATTTAAATAGGTAAAATGTTCTGTTAGAAATAATGCTAATTCTGTTTTTTTGTTTAATGTTTCT
AAAAATCTTTTGGTCATCTTTTAGGTTTAGGAAAAGTAGCAAATTAGAGATCTACAGAAATCTACAGCTCTTTAAAAATGAAACAGTTCACCCT
GTGAATTTGTTTGCAGGATTGGTGATCTGTTTCTGATGCCAGGAAGGTGGGACTCCTATCTCATTTCTGATAGAAAGTGAGGGAAAGCTATGTA
TAGTGAGAACTGGATACTAGATTCTTATTCCGAAGGCATGGAAGGTTTAATATGTAAGGATACAATGTAAATAGTCCCTCTTTTTGTATTTTTC
TTTGGTTATTGTTACGTAACTATAGTCGTTTGTCACTTAATGATACATGGTGACAAAGTTCTAAGAAATGCATTAGGCGATTTTGTCATTGTGG
TACCATCATAGAGGGTACTTACACAAACCTAGATGGTGAGCCCTACTGCACACCTAGGCTGTATGATAAAGCCTATTGCTCCTAGACTACAAAC
CTGTGGAACATGTATACTGTATTGAGTACTGTAGACAATTGTAACACAAGGGTAAGTATTTGTGTATCTAAACATATCTAAATATAGAAAAGTT
ACAGTAAAAACATGGCATAAAGGATAAAAAATGGTACATCTATATAGCGTACTTAACAGGAATCGACCTTGCAGGACTGGAAGTTGCTCTGGCC
AACTCAGTCGGTGAATGGTGAGTGAATGTGAAGGCCTAGGACATTACTGTACATTACTGTAGATTTTAAAAATACTGTCTGGTTAGGCTACATT
AAATGTATTTTGAAAATTCTTTCTTTCTTCAATAATAACCTTAGCCTACTGTAATACTTTTACTTTCTAAACTTTTTACTTTTTTTTTTTTTTT
TTGAGATGGAGTCTTGCTCTTGTGGCCCACGCTGGAGTGCAGTGGCGTGATCTCGCATCACTGCAACCTCTACCTCCCGGTTCAAGCAATTCTC
CTTCCTCAGCCTCCCGAATAGCTGGGATTACAGGCGTGTGCCACCACGCCTGGCTAATTTTTGTATTTTTAGTAGAGACGGGGTTTCACCATGT
TGGCCACGCTGGTCTCAAACTTCTGACCTCAGGTGATCCACCCACTTTGACCTCCCAAAGTGCTCGGATTATAGGTGTGAGCCGCCGTGCCCGG
CCAACTGTTTACTTTTTTACACTTTTAAACTCTTTTGTAGTAACACTTAGCTTAACACATAAACATGTACAGCTGTGCAACAATATTTTCTTTA
TGTTTTTATTCTTTTACTTTTTCTCTTTTTAAATAATTTTTAATTTTTCAAAACTTTAAAAACTTTTTAATTTTTCAAAACTTTAAAAACTTTT
TCTTAAAACTGAAGGCATAAACACACACATTAGTCTAGGCCTACACAGCGTCAGGCTCATCAGTATCACTGTCTTCCACCTCCACATCTTGTTC
CACTGAAAGGTCTTCAGGGGCAGTAACACATATGGAGCTGTCATCTCTTGTGATAACAATGCCTCCTGAAGGACCTGCCTGAGGCTGTTTTACA
GTTAACTTTTTTTTTTAAGTAGAACCAGTACACTCTAAAATAACGATAAAAAGTATGGTAAATACATAAACCAGTAACATAGGCATTTATTATC
ATTATCAAGTATGTACTGCACGCAATTGTATGTGCTAGACTTTCACATGACTGGCAGTGCAGTGGGTTTGTTTACACCAGCATTGCCACAAACA
TGTGAGTCATGCATTGCATTACAACATTATGATGGCTACAGCCTCACTAGAGGATAGGAATTTTTCAGCTACGTTTTATTATCTTATGGGACCA
CAGTCATATATGTGGTCTGTCATTGACTGAAACGTCATTATGTGGTGCCTGACTACATATATGGAAACTCTGAGTGTAGTCATGTTTTACAAAT
GAGTTTATCTTGCAGTGAGTTTAAATATCAAGTAAAAATACTAATTTCATTGTAATGTATCAAGAGATTGGCCTTTCTCCTCATGTTGAAGGTA
TCAAAACAAAATAGAAAATATTTGGCTTCCTGAGTGGCATGGCTACAATTCACATGCTGAGTTGGTGATGAGGCAAGATCCCTTGACTTTGCAA
TACCAGAAAAATGCACATAGTTAAAAAAAAATAGAGACAGGGGTCTTGCTATGTCTCCAGGTGATCCCTCCCACCTCCACCTCCACACCTCCCA
CCTCAACCTTCCACAGTATTGGGATTACAGGAATGAGTCACTGCACCGGGCCAAAAAGCATATAATTTTAAGGGAATGATTTTTTTTTTTTTTT
TTTTATTTTTTGAGACAGTGTCTTGCTCTGTTGCCCAGGATGAGTGAAGTGTGCCAGGAGTGGGTCCTTAAGTAAGAAAACGTATTACTTTAGA
CACACATTTAAAATTTTGTCCAAAAATGTGATATTCTCAAAATTTATGGTTTTGAATTTTATTTATTATTTTAATTTATTATTATTATTTTTTA
AAGAGTGGGGTCTCACTATGTTGCCCGGGCTGGTCTCAAAGTCCTGAGCTCAAGTGATCCTCCCACCTCACCCTCCAGAGTAGATGGGACTGCA
GGTGTGAGCCCCTGAGCCTGGCTAGTTTTGAATTTTTATTACCCAAATGTGAAGAGGTCTAGTTTGCACAGAACTTAACATTACATTCCAGTTT
TATTGGTAAATTTGAACAGGATATAAGTGGCTTTAATAACTAATAAAAGAAGATACATCTTATAGATACACATATGTCTTTTTATATGTATACA
TAAATATTTAAAACTTCTTTATGCCAAAAAATGCCAGAAACCAAAGCTAAGTGACAAAATAAGAAAAATATTTCTAATATATATGACAAAGCAT
TATCGGTAAATATTCGTAATATATAAGTAATCTATATAAGTAGTAAGAAAAAGATGATTCCCATAATAGAAAATGAACAAAAGAAGAACTACAA
ATAGCCGATAATCATATGAAACAGTGTTCACCCATACTCGAAATCAAGAAATGCAAATAAAAATGACAAGTTTTTTCAGTTAACAGATTTATGA
AGACTAAAAATATTGAAAAATAAGAGCAGTGTTGCTTGGGAATGTGGGAAACTGGCACTTTCATACTCATTGGTTGAAATGTAAATGGGTGCTT
TTTTTGCATGGCAGTTTGATACATGTATTCAGAGCTTAAAAGAGTGCATACTCAAGCTGGGCATGGGAGCTCAGGCCTGTAATCCCAGCACTTT
GGGAAGCTAAGGCAGTCGGATCACGAGGTCAGGAGTTCAAGACCATCCCGGCCAACATGGTGAAACCCCGTCTCTACTAAAAATACAAAAATTA
GCTGGGCATGGTGGCACGTGCCTGTAATCCCAGCTACTCGGGAGGCTGAGGCAGGGAGTCAGAGGTTGCTGTGAGCCGAGATCACACTACTGCA
CTCCAGCCTGGTGACAGAGCGAGACTTCGTCTCAAAAAAAAAAAAGAAGAGTACATACCCTTTGACTTAGCAGTTTCATTTAGATGAATTTCAT
TCTAGGACATCTGAAATATGTTTAAAGATTTGTACAAATAGGCATGGGCAAGGACTTCATGTCTAAAACACCAAAAGCGATGGCAACAAAAGAC
AAAATTGACAAATGGGATCTAATTAGACTAAAGAGCTTCTGCACAGCAAAAGAAACTACCATCAGAGTGAACAGGCAACCTACAAAATGGGAGA
AAATTTTCGCAACCTACTCATCTGACAAAGGGCTAATATCCAGAATCTACAATGAACTCAAACAAATTTACAAGAAAAAAACAAACAACCCCAT
CAAAAAGTGGGCGAAGGACATGAACAGACACTTCTCAAAAGAAGACATTTATGCAGCCAAAAAACACATGAAAAAATGCTCACCATCACTGGCC
ATCAGAGAAATGCAAATCAAAACCACAATGAGATACCATCTCACACCAGTTAGAATGGCAATCATTAAAAAGTCAGGAAACAACAGGTGCTGGA
GAGGATGTGGAGAAATAGGAACACTTTTACACTGTTGATGGGACTGTAAACTAGTTCAACCATTGTGGAAGTCAGTGTGGCGATTCCTCAGGGA
TCTAGAACTAGAAATACCATTTGACCCAGCCATCCCATTACTGGCTATATACCCAAAGCACTATAAATCATCCTGCTATAAAGACACATGCACA
CGTATGTTTATTGCGGCAGTATTCACAATAGCAAAGACTTGGAACCAACCCAGATGTCCAACAACGATAGACTGGATTAAGAAAATGTGGCACA
TACACACCATGGAATACTATGCAGCCATAAAAAATGATGAGTTCATGTCCTTTGTAGGGACATGGATGAAATTGGAAATCATCATTCTCAGTAA
ACTATCGCAAGAACAAAAAACCAAACACCACATATTCTCACTCATAGGTCGGAATTGAATAATGGGAACACATGGACACAGGAAGGGGAACATC
ACACTCTGGGGACTGTTGTGGGGTGGGGGGAGGGGGGAGGGATAGCATTCGGAGATATACCTAATGCCAGATGACGAGTTAGTGGCTGCAGCAC
ACCAGCATGGCACATGTATACGTATGTAACTAACCTGCACAATGTGCACATGTACCCTAAAACTTAAAGTATAATAATAAATAAATTAAAAAAA
AAAGATTTGTACAAAAGGAGTGTTACTTAAAATAGCAATAAATTGGAAAAATCTTGGTATTTCCATTAGAGGTTTAATAAACTAAATCATTTAT
TACACCTGTGTATAGCTGTCCAATAGAATACTGTCCAGCTATTTAAATTATGTTATAAAACAATATTTAATGACCTACACAAAATTCACTATAT
ATTACTAAATGAAAAATGAAATTACAAACAATCATATACAATTGTGCCGGAAAAAAGAACAGGCGCTGAAAAAAGATTTCTTCTGGGTCGTGGA
GTTCCCTGTGTGTGTGTGTGTGTGTGTGTGTGTGTGTGTGTGTGTGCGCGCTTTCTAGTATCTTTCCATTTTTCTATAATAAACAGATTATGGC
TCCGCACAGTGACTCATGCCTATATTTCCAGCACTTTGGGAGGCTGAGGTGCGAGCATCACTTGAGTCCAGGAGTTCAAGATCAGCCTGGGCAA
CATAGCAAGACCCTATCTCTACAAAAAATTAAAAAATTAGCTGGGCCTGGTGGCACATGCCTGTGGTCTCAACTACTTGGGAAGATGAAGTAGG
AGGATCACTTGAGCCTGGGAGTTCGAGGCTGCAATGAGCTGTGATTGAGCCACTGCATTCGTCCTGGGTGACAGAGTGAGACCTTGTCTCAAAA
ACAACAAATAAAAACAAACAAAAAAACAGATGATAATACAGGGAATCCTTTTGTAATCAGGAAAAAAAAGTTATCTTTAAAATGGCTGTGTGTA
TTGATATGTCTTAGAACGTAGAATTTGTTTTTTGTTATCAGTGTTTTCTTTTTAGAAGCAGAAAAAAGAGTTTGTGATGTTTTTGTTAATTTTT
TGGTATAGTATCCTGTTTTTTGACATCTTTTGTTGAACTATGTTAAAATCATCATAATTTCATTTAACATTTTTAGAGTTTAAATAATTTGAAC
TTCAGGACTGTGTTATTTCCTGTGCTTCGTGGTAGCCTGTATATTTTTACACAGAAGCTTATGGAGAATTATATTGTTATATAATATAATAAAT
TGTTAGGGAGACAGAGGTGAAAGGATTGCTTGAACCTGGGAAGTGGAGGCTGCAGTGAGCTATAATGGTGCCATTGCACTCCCCAAGCCCGGGC
AATGGACAGAGACNNNNNNNNNNNNNNNNNNNNNNNNNNNNNNNNNNNNNNNNNNNNNNNNNNNNNNNNNNNNNNNNNNNNNNNNNNNNNNNNN
NNNNNNNNNNNNNNNNNNNNNNNNNNNNNNNNNNNNNNNNNNNNNNNNNNNNNNNNNNNNNNNNNNNNNNNNNNNNNNNNNNNNNNNNNNNNNN
NNNNNNNNNNNNNNNNNNNNNNNNNNNNNNNNNNNNNNNNNNNNNNNNNNNNNNNNNNNNNNNNNNNNNNNNNNNNNNNNNNNNNNNNNNNNNN
NNNNNNNNNNNNNNNNNNNNNNNNNNNNNNNNNNNNNNNNNNNNNNNNNNNNNNNNNNNNNNNNNNNNNNNNNNNNNNNNNNNNNNNNNNNNNN
NNNNNNNNNNNNNNNNNNNNNNNNNNNNNNNNNNNNNNNNNNNNNNNNNNNNNNNNNNNNNNNNNNNNNNNNNNNNNNNNNNNNNNNNNNNNNN
NNNNNNNNNNNNNNNNNNNNNNNNNNNNNNNNNNNNNNNNNNNNNNNNNNNNNNNNNNNNNNNNNNNNNNNNNNNNNNNNNNNNNNNNNNNNNN
NNNNNNNNNNNNNNNNNNNNNNNNNNNNNNNNNNNNNNNNNNNNNNNNNNNNNNNNNNNNNNNNNNNNNNNNNNNNNNNNNNNNNNNNNNNNNN
NNNNNNNNNNNNNNNNNNNNNNNNNNNNNNNNNNNNNNNNNNNNNNNNNNNNNNNNNNNNNNNNNNNNNNNNNNNNNNNNNNNNNNNNNNNNNN
NNNNNNNNNNNNNNNNNNNNNNNNNNNNNNNNNNNNNNNNNNNNNNNNNNNNNNNNNNNNNNNNNNNNNNNNNNNNNNNNNNNNNNNNNNNNNN
NNNNNNNNNNNNNNNNNNNNNNNNNNNNNNNNNNNNNNNNNNNNNNNNNNNNNNNNNNNNNNNNNNNNNNNNNNNNNNNNNNNNNNNNNNNNNN
NNNNNNNNNNNNNNNNNNNNNNNNNNNNNNNNNNNNNNNNNNNNNNNNNNNNNNNNNNNNNNNNNNNNNNNNNNNNNNNNNNNNNNNNNNNNNN
NNNNNNNNNNNNNNNNNNNNNNNNNNNNNNNNNNNNNNNNNNNNNNNNNNNNNNNNNNNNNNNNNNNNNNNNATCTCTATAAAAATACAAAAAT
TAGCTAGACGTGGTGCTGTGTGCCTGTACTCCCAGCTACTTGGGAGCCTGAGGTGGGAGGATGGCTTGAGCCCAGGAGGCAGAGGTTACAGTGA
GCTGAGATTGCACCACTGCACTCCAGCCTGGGTGACAGAGTGAGACCCTGTCTCAAAAATAAATAAATAAAAATAAAAAATAAAAAATCTATCT
TAACTTGGATTGTGCATTGTAATTTATTATAGTGAAATTGCTATAACAGAATTTTATTTTAAGCCAGTTTGGGGAATACCAAAACATTTTTAAA
AATCACGTAGTACTTTTTAGTGCTTTTAAAACCTAAATCCATAAAGTAGTTAATTAAAATGCATGAAGTAAATAAGTGTTTTTCTGTATTAAAG
ATAAAACTATAAACATATATTGTTCAATATGCCTACATAAATAAATCATTCTCTTCTTTTTGGTTATTTTTTGCTTATCACCTCTTACCTCCTC
TACTTCCTAAAAACATGATAATCTCGTTTAATTCAAAATTATGTTTTCTGGCCATACATGGTGGATTATGCCTGTAATCCTAACACTTTGGGAG
GCTGAGGTGGGCGGACCACTTGAGTCAGGAGGTCGAGACCAGCCTGGCCCGCTTGGTGAGACCCTGTCTCTACTAAAAATACAAAAATTAGCCG
GGCGTGCTGGCACATGTCTGTAGTCTCAGGAGGCTGAGGCAGGAGAATCATTTGAACACAGGTGGCAGATGTTGCAGTCAGCTGAGATTGCACC
ACTGCACTTCAGCCTCGGCGACAAAATGAGACTCTGTCTCAAGAAAAAAAAAAAAAAGGTAAGACATATAAACTAGGAAACTAAGCAATAATTG
TGTACAGTATGTGGAATATTTATGTTCTAGACCAGCACTGTTCAATACAAATATAATGTGAGCTCCAATTGTAATTTTCTTAGTCTGTATCACA
ATAAAAAGTAAAAATAAAATTAATTTTAACAATATACTTTAATATATAAAAATTATCATTTCAACATTTGATCAATATAAAAATTATTGATTAA
TGAGGTATTTTGGGCCAGTTTGGGGAGCCAAAGCAGGAGGATCACTTGAGTCCAGGAGTTCGAGACCAGCCTGGGCAACATAGTGAGACCCAGT
CTCTAACAACAACAACAACAAAATTAGCTAGGCATGGTGATGTGCACCTATAGTCCCAGCTACTTGGGAGGCCAAGGTGGGAGGATCACTTGAG
CCGAGGAGGTTAAGGCTGCAGTGAGTCGTGTTCGTGCTACTGCATTCCAGCCTGGGCAACAGAGTGAGACCCTGTCTCAAAAAAAAACAAACGA
ACCCAAAAGCCCACAAAAACACTCACATATTTTACATTCCTTTTTTTGTACGAATGCTTCAAAATCTGGTGTGTATCTTACAGTTATAAAATCT
CTCAATTTAGCCACCAAATTTTCACCAGAAATGCATGAACTGTGTTCAGATTTCATAAAACTTTCAGTTGATAAAGTAGATTCACATACTGAAG
GTGTTCCAAACGTACTGAAAGGTTTTCCAAGTATTAAATTGAACACCAGTTTCCAGGTTTACATTTAAGTTAATTCAAATGAGATAAAATTTGC
AATTCAGTTCCCCAGTCGCACTAGCTACATTTCAAGTGCTTAGGTAGCACATGCTGCTAGAGGCTACCATAATAAACAGTGTGGCTATAGGCCT
TCTAACGAAGGGAAATGAAATATAGGGCTGTCTCCTGCTTTATAACATCTGGCTTACAATCAACAAATACAAATAGGGTCGCTTGCTGCAGCAA
ACCACCATGGCACATGTTTACCTGTGTAACAAATCTGCACATCCTGCACATGTATCCTGGAACTTAAAATAAAACAAAACAAATAGGGTCTCTT
GCCCTGTGGGAACTGAAGCCACTGCTCTGTAGGAAATAAAAGTGTCTTTCTTTTTTGTTTTTTTTTTGAGACAGAATCTCGCTATTTTGCCCAG
TGAAGTGGCATCATCTTGGCTCACTGAAGCCTCCCCCCGACAGGTTCAAGCAATTCTCCTGCCTCAGCCTCCCAAGTAGCTGGGATTACAGGCA
CCTGCCACCACGCCCCGCTAATTTTTGTATTTTTAGTAGATACCGGGTTTCGCTGTGTTGGCCAGGCTGGTCTCAAACTCCTGACCTCAGGTGA
TCCACCCACCTTGGCCTTCCAAACTGTTAGGATTACAGGCGTGAGCCACCGCGCCCAGCACAAAAGTGTCTCTTACCTAAAGAAAGTGATGCCC
TTAAAGCTTCCTACCATTCCCTCACCCCCAAGACACACCCAGACACCCACAGATCCACCCTCTTGTTTGAAAACTGCTGCATCCTTGCATGCCT
GAAGCATTACCCATGTCCTTGAAGCTCCTGCTTTCAGAGGACCTCTCATTTCTTGGGAGTAGAAAAGCCCTCTCTGGCCAGGTGCAGTGGCTCA
CGCCTGTAATCCCAACACTTTGGGAGGCCAAGGTGGGAGGATCGCTTGAGCCCAAGAGTTTCAAGTCAGCCTGGGCAACATAGTGAGATCCCAT
CTCTGAAAACAAAATTCTGAATAAAAATAAACAGCCCACCCTGTTTCAGGTATACCTCAACTGTCAAATCACTTTTAGGCAGGGTGTTTTGTTA
TTTTTGTTTTGTTTCAGAGTGTTGTTTAACTTTATTTTTGAAACTGAATTTGTCTAGAAAAGAATCATATTCACCTTTTGGTCTTAGCTACTCT
TCATTTTTATAAAATACATCAAGTTGATGCTTAAAATTGGGGATCTAGTTACAGATGAAATTTTTCCTTTCAAAAGAGAGTTCCCCCCAGTTTT
GCTGTAGTCTTAGGAGATACTTAAGGGAGGGGAATCATTTTTAGTTCCCCCTAGGTGAGGTGGTAGCCTCCCTAAACTGCCAAGTTCACACCAT
GACTGGTAACACCACTGTGTGAGGAATACTGAACAAACGCACCTTCAGAAGGGAGACTTCCAGAGATTCTGGAATCTAGGTAATGCCACTTCCT
ACTTAGTTTATCTTAATGGTTTTGTTTGTTTGTTTGTTTTGAGACGGAGTCTCGCTCTGTTTCCCAGGCTGGAGTGCAATGGCGTGATCTCAGA
TCACTGCAACCTCCGTCTCCCAGCTTCAAGTGATTCTCGTGCCTCAGCCTCCCAGATAGCTGGGATTACAGGCAAGTTCCACCATGCCCAGCTA
ATTTTTGTATTTTTAGTAGAGACAGGGTTTCACCATGTTCGTCACGCTGGTCTCAAACTCCTGACCTCAGGTGATCCTTCCGCTTCAGCCTCCC
AAAGTGCTGGGATTACAGGCATAAGCTACCGTGCCCAGCCTTAATGGTCTTTTTAAAGGATACCTGATTTCAGAAGGAACCTTTGAAGAAATGG
CTAGAACTTCTGTGTTTCTTTGGATATTGCCTGACATCTAAGCCAAATTAGTTGACCTTTTAATGTTAAATAAAATATTCAATAACTTTTACTA
ATGGGTGGGCTTTAGGAACCCCTTTATTTTACTATGTTGCCAAAAGTAGGTTCATTATAACATTGGAAACATCCTGATGTAATTTATTGAATGT
AAAATTATTCCTCAATACATTTGAGGATGATTTCCATAAAGGGAAACAAATTCCTTTCTTCCAAATATACTGTGACAGCCTATTTTGAAATATT
TAAAATATGTCCCTAAAGATGAAAATTAAAGAGCGGACACAAAGTTGTTATGCTCTAAGGAGTCATTCTTTTGATTTAAAATTCATTATAATTC
CCTGGTTGTCTAGTGGTTAGGATTCAGCACTCTCATAAAATTCATTATATTGATTCTATAAAAGTATATTGTGTTGGATTAAGAAACACATGGA
CATTTTTAAGTGTTTCAAAATATTTTTGTTATACCTAGGTTTTCACTGTGGTGGTATTTGTTGTTTTAGTAGAATTTGACCTATATTTTATTCT
ATGGGAAAAAGAAGAAAGTAAACATTGGCTAGCTATCTACCACCCTGTACTGCTATTTGTGTGTGGTCCCATTGTGAATTTTTAACTCCATGCT
CTATATTTTTAGTGCTTTGTGAAGATTGAATCTGCAAATCACCTTTGAAAGACAAAGGATTTGATTTGATTGTGGCAATCATGAAAGTTATCCT
GTAAATAAAACTGTATGTCCTGGACCAAAGCTGGAATAATGCCACACTGAAATGATCTTAACTGTGGAATCCTTGATTGGACCCGATTTGTTTT
GCACATACAATAGCTCCATAAAGATGATAGGCTTTCACCAGGGATGAACAGATGTTCTGGTTTTATCAGAAATTGCTTTTGCATCACCAAGACT
TCACAAAACCCAGTAATCCCCCTGTTTGATGTTGTGCACCTGCTTTTAAAACTTCTTCCCAGATACTGCTTTGAACACACAGACTTTGTCATTC
ACCTGTAAGATTCAATTGTCAGGTGGTATCTGTTTTCTCCCAACAGAAATAAAGAGAAGAAGAATAAAAACAAAAACTAGAAAGTGTAGCAGGG
GCACAATTATTTATTTAAACTTTAAAGTATTTAATATTACATACCAGAATCTAAGTTACATAAAGCATGTCTGTTTTGTTCACTGCCACATTCT
TAGTACCTAGAACAGAGCCCAACATGTAATAGTTACTCAATAAGTATCTGTTAAATAAGTATAGTAGTCCTGCCTTATCCCAAGGGATGCCTGA
AACCTCAGGTAATACTGAACCCTACATATATATATTGTTTTTTCCTATGCATATATAATTATGATAAAGTTCAATTTATAAATTAGGCACAGTA
AGAGATTAAGAACAATGATAATAAAATAGAACAAGTATGTAGTCTTTTTTTTTTTTTTTTTTTTTTTTTTTGAGACAGAGTCTCGCTCTGTCAC
CCAGGCTGGAGTGCAGTGGCGCAATCTCCGTTCACTGCACGCTCTGCTTCCTGGGTTCATGCCATTCTCCTGCCTCAGCCTCCCCAGTAGCTGG
GACTACAGGCATCTCCCACCACACCCGGCTAATTTTTTGTATTTTGTTTAGTAGAGACGGGGTTTCACCATGTTAGCCAGGATGGTCTCGATCT
CCTAACCTCGTGACCTGCTCGCCTCAGCCTCCCAAAATGCTGGGATTACAGGCGTGAGCCACTGTGCCTGGCCGAATGTAGTCTATCTTAAAAT
ACTGTATCTTACTATGCTGTACTGTGGGTAACAGAAACCATAGAAAACAAAATCTCAGATAAGGAAAGACTATTGTATTCCCCTTTAATCTCAA
TACAGCAGGTGTATCCAGAGAACTTCAACCCTCAGAAGGACTGAAAGTGTGCCTTTTACTGTGGAAGAAAGAAAAGAGAGGGGGCTGGGTGCAG
TGGCTCATGCCTATAATCCCAGTACTATGGGAGGCTGAGCCAGGAGGGTCACTTGAGCCCATGAGTTAGAGACCAGCCTGGGCCACAGAGTGAG
ACGCTGTCTCAAAAAAAGTTGGGGGGATGGGGGAGAGGAGAGAGGAGACAGCAAATATCTCTTTGTTTCCTTTCGATTTCAGCATTAAAGATAG
AAAAAATGTGAGTTTATTAGGCAAAAACTCGTTTTTTAACCCCATTTTAAAGATTCTGGAGTTACGTATATATATCATAAAATTTACCATTTTT
AACCTTTTATTTTGAGATGGAGTTTCTCTGTGTCACCCAGGCTGGAGGTTAGCTCATTGCAACCTTCACCTCCTGGATTCAAGCAATTCTCCTG
CCTCAGCCTCCTGAGTAGCTGGGATTACAGGTGCACGCCACCATGCCTGGCTAATTTTGGTATTTTTAGTAGAGGTGGGGTTTCACCATGTTAA
CCAGGGTGGTCTGGAACTCCTGACCTTAGGTGAACCGCCCTCGGCCTCCCAAAGTGCTGGGATTACAGGCGCCAGCCGCTGTGCCCGGCCATTT
TCACTGTTTTAAAGTACAGTTCCGTGGCATTAAGCACATTCACATTGTTGTGTGACCGTCAGCACCTGGTCCATCTCCAGAATTTTTTCATCCT
AAACTAAAATCCTGTATTCATTAAACAGTAATGAGAATAAAACTCTCCATTTGCCCCTCCCCGCAGGCTCTGACAACCGCCATTCATTCTTTCT
GTCTCTATCAGTTTGACTACTCCACGCATCTTATATCAGTGGAATCATACACTATCTGCCCCTTTGTGTTTATTCCTTTTTTTGCAACATAATT
CTTTTCGTTGGAGACTTCACAGTTTTTCTTTCCTTTGATTGTTTAGTTTTTGCTTTGTACCTAGACCTGGCCAGTGATGCATGTGCAATGAGTA
TGCAAAGACAAGTTAATTCAGCAGCTTGTTGCATACCACTAGGGAGTTATTAAAGCTTTCAAAATGTGATTCCTCATCTGTATGCCTGTGGCTT
ATCTACTCCAAGTCTTGCTGATAAACCTGCACTGAGAGTAATAGCAAAGATTAGTCTTTCTCCATGTTTCATAAAACAAATTGTTCTCATTCTT
ACAGCCTGATTATGAACTGGAAAATTACAGGTACATTGTTGTAATTGTTTATACAGACAATGAGACATACTCTCCACAGGGGACCTCAGCTGCA
GGGGAGGTTCTGATTGCGTGTCATTAAGAAACGACAGTTAAGAAACTTTTTTTTTTTTAGACGGAGTCTCGCTCCATTGCCAGGCTGGAGTGCA
GTGGCACGATCTCGGCTCCCTGCAACCTCTGCCTCCTGGGTTCAAGTGGTTCTCCTGCCTCAGCCTCCCAAGTAGCTGGGACTACAGGCGCATG
CCACCACACCCAGCTAATTTTTGTATTTTTTGTAGACACAGGGTTTCACCATGTTGGCCAGGATGGTCTCAATCTCCTGACCTCGTGATCCGCC
TGCCTAGGCCTCCCAAAGTGTTGGGATTACAGGCATGAGCCACCGCACCGACCTTCTTTTTTTTTCCATTTTTAAAAATTTTCTATTCTCATTA
CATCTTCCTTTCTCCCTACTTTTCCTTCCCTTCCCTTCCAGTTTGTCCTTCCCTCTCTCTCTTTCTTCCTTTTTTCTTTCTTTTTCATTCTCAT
TTTTCTGAGTAGTTGCTGAAGACACACCCTCACCCTAGGGGTCCAAATATAGATGAAACAATCATACCTCTCTAGCAGTTCACCTGGAGGGAGA
GAGAAAAAGAGAGTAAGAGAACCAAAATGAAGGGGAAATATTCTTAATTTTTTTTTTTTTAAGGACAGAAACTAACTTGTTGAGGAAAAAGAGA
AATATACTGGGAGTTCTGACTGATAGGAACAAAGAGAGGACAGCTTCGAAGGATGATTTGAAAAGTAATCTATGGAATTTAGCTTTAAAGCAGG
ATCTTGCCCTGTAGACTACTTTATTATTATTATTTTTTAAGAGACAGAGTGCAGTGGTGCAGTCATGGCTCACTGTAGCCTCAAACTCCTGGGC
TCAAGCCATCCTCCCACCTCAGCCTTCTGAGTAGCTAGGATTACAGGTACATACCAGCACGCCTGGCTAATTTTTTAATTTTTATTTTGTAGAG
ATGAGGTCTTCCTGTGTTGCCCAGGCTGGTCTTGAACTCCTGGCCTCAAGTGATCCTCCTGCCTCAGCATCCCAAACTGCTGGGATGTTGTGGA
CTCCTTTAGAGCCTCTTGAAATAGGGCTAGTAAAGTGATTTTCTACCACTGTATCTGTGCTCATTTACATTGCGCAGATCACTTCTGCTTGACT
TCATAGTTTCAACCTATAACATGAGGGGTCAACAGGTAGATTCGGAACCATCAGAGTTTAGGCCGAAGCCCATAGAATATGAAAGTTATTTTTA
AAATTTATTTTTACAATGTCTACAAATGCAGTTGTTAAAGTGCCAGAGACAGAAGTATTGACAATGAGAAATTATCCAAAACCAGGCCAGGCGC
GGTGACTCACGCCTGTAATCCCAGCACTTTGGGAGGCAAAGGTGGCAAGATGACTTGAGGCCAGGAGTCACAGCCTGCAATGAGTTGTGTTCAT
GCCACTGCTCTCCAGTCTGGGCCACAGAACAAGACCCTGTCTCTAAAAATAATCATCATCATCCAAAACCAAGACTGGCTCCTATTGGAAAGGT
GGAAATGGTTGTGATGGAATTCAGCAACACCAATACCTTGGTATTTCTGACTTTCAGGATGTTAGGAGACTCTTTCAGTCCTTCCTGTTTAAAT
ATGAATGGATATGTATTGCCATTATTGCCCTGCCCCTACATCTCCCAAATTTAGATTGCTAGTATTTATGTAAGTTTACTAGTCACAAATAGAT
TCTTGCATTTCCCATCTCTTGTCATAGGGCCCTCTTTGAGTTCAATATGCTTTTATTGGCACTTACTTTGGTTTTCTTTACAGCAGCAGCTGCT
AATTAGTGACAGCTTTTGAGCAAGCAGCTTGTCATTTTTGGCAGAGATAGGGGACATCCATAGCAAGTCAAGACTATATTTTCATTTGCTAAAT
TTACTTTGCTACATGGAAATACATCTTGGATAAAAAATAGTCTGTAGTCAAAGGTGGCTGTGTTTACTGAATTATCTTCCTGAGTTGGCATTCT
GTCCTGTAGTTGAAGAACTCACAGAGATGAAAAAAAGAAAGAAGAAAGAAAGAAAGAAAGAAAGGCTTCAACGTCTATCAGACTGATGCCATAA
GTCCTGAGTCATCCTTCTAACATTAATCTACATTCTGGGTATAGAACCTCATCATCTTGTTTTGGCACAATCATAAATCTTTCTGGATTGTAGT
TAGTGGCATACATGGTAACTGAATGAGTGAATTGTTGACAAATGTGCTTTTCGTTTATACTCAGCTTCTTTCTTGAGATATAATTAAAAGAAAG
GTTAGTTTGCTTAGAGAAGATCCTTTCTTTGGAATTTTAGCTCATCTTAGCATCATCATATTTCATGTAATTCTTCTCTTTGAAATTGCTGCAA
TAAAGTGTTAGCTCTATTTTACAAACTTGTCACGATGTTTATGAGGGTGGCACAACTTGCTATTATGTTTACCTTCATTAGCACCAATGATGAG
TCAAAACCTCCGTCATGGTTTCTATAAAGTGTCATTCACTCCCATTATTCCTGTAATAAGGATTCAGATTAATCACCTCCACAGTGTTAAAAAT
ATCCTGAAGGAAATAACTGACCTACCATCCATTTCCCCCAATTTAGGTCCTTTTTGTAACATGGAGGTCTATAAAAATTGTATTCAATACACAA
TTACTAAATACCAACCATGTATATCAAGTACTATATTGGGGAAATGAAAATGAATCAGAGAGACATGGTCCTTGCTCCAGGATGGCTTACAGTC
TATTAGTTGGCCAGCAGATAACTTAGTTGCCTTGGTTCTTATGTCCAGAGTGTAGGGTAAATTCTAATTCTAGAGGAGGAAAACATCCCATCTT
TTAAAAATAAGATTATCAAAATGATCAAAGACATTGGATACAAATATTGTACTGATTCTATTTCTACCTAAAGGTGTTAAAGATTGTTTGAGGC
ACTTTTCCTAGGCTTGTGGAACTGCCAGGCATCCTTGTCCCAAATTTCCCCTTGATATATCGCACAGCACTGTTAAATTCAGAAGTTGCCTTCT
GTATCAGAGTGTCTATTTCTTGATGGCATAGCTTGGAGAACCCAGATGATCTTCTAGCATTCAACTCATACTTAATGTACATCAACAGTAACAT
AGTTATTTGTATATTTTCTTTTCTTTTTTTCTTTTTTTTTTTTTTTGAGACGGAGCCTTGCTCTGTCACCCACCCTGGAATGCAGTGGCACGAT
CTCGGCTCACTGCAACCTCCACCTCCTGGGTTCGAGCCATTCTCCTGCCTCAGCCTCCCCACTAGCTGGGATTACAGGCACGCATCACCACGCC
CAGCTAATTTTTTGTATTTTTAGTAGAGACGGGGTTTCACCATGCTGGCCAGTCTGGTCTTGAGCTCCTGACCTTGTGATTCGCCTACCTTGGC
CTCCCAAAGTGCTGAGATTACAGGTGTGAGCCACCGCACCCAATCTATTTGTATATTTTCATTTGAACATTTATTAATTATAGTAGGAATTTAT
CATGTATACCTTGTCTCCAACCCAATGCACAGTAGCATCAGGTAAGTTGCTGTTTACTTATAGGTATCATGTGAACAGGTATCCAGATGGCAGC
TAACTTCAGTATCCTTTGTTATCCTGTCTTACACACTGGGGTGTTTTACAAGTTGCTTTCTCATTTCTATTAATGACATTTCCCCCTGTATGTA
AAATGTTTTCTGCCATTACAAAGCCTAAGTTTCAGATGTTCTGTGATAAATATTGGTGATGGATAATAATGTAACTAATGGAAGCCCCTTAAGG
AATTTGCGAACAAGTTTAACAAAGTTAACAACTCAGCTTCTTATAGGAAATGTTGCATTGCTAATTCTGACCACAAGTGGTCAGGATCTAGGTT
TTGGCCTTATGGGAAAGTTACCCAAGCCCAGGACAGTTCTCGTTATTCTCCTCCCACTCACTTTTACAATCTAAAGCTTTTGGCTAATTTCTGA
TTGATTTAAAAGAATGAAGGTGAACCCCCACCCCCCAAATATGGCATCCTTTGGTTGTGCTTGAAGGTTTGTCTTCTTAGTGCTAACCCTCAGG
GAAGGGAGTCTTATTTAAAGCCTTTTTTTTTGGATTGTCAAATAATCTTTTTGTATTCATTTGTGAATTGCATTTTATGATAATTCATTTTGTG
GCTCGTGTTATAAAGGAGTTAAACTGCAGGTATCACTGTCAGGAGAAACTCATTTGACTAGCTGATGATTTTTTTTTTTTTTTTTTTGAGACAG
AGTTTCCCTCTATCACCCAGGCTGGAGTGCAGTGGCATGATCTCCACTCACTGCATCCTCCGCCTCCTAGGTTCAAGTGATTCTCCTGCCTCAG
CCTCCCGAGTAGCTGGGACTACAGGTGCCTGCCACCACGCCTGGCTAATTTTTTGTATTTTTAGTAGAGATGGGGTTTCACCATGCTAGCCAGG
ATGGTCTCGATCTCCTGACCTCATGATCCGCCCGCCTTGGCCTCCTAAAGTGCTGGGATTACAGGCATGAGCCACCGCGCCCGGCCTCGTGATG
ATTTTCAATAAGTAAACCACTGTGGTTCACAGCCTGAGCTCCGAAGGTGGACAAAACTCCTTGAATATTTATTACTACTACTGTTATTATAATT
CTATTACTACTGCTGCTAGTACTTTATTTTTCTCATTTCCCATGCTTATTCCTTTGCTATTATTTAAGGTTTGGTGATGAAGTATAGGAAGGGC
TTGGAAATGAAGTCATTTATTTTGTTTCCAACACAAAACAGTTTCTAGTGTGGGTGTGTGGGTGGCTTAATTTAACATAACAAACTAATACGTT
TTTCCTTGAACTCCATACTATCTTCATTTCAAACTAGGTATTCTCAGAGTGGGGTTAAAATACTCTCCATCATCAAAGCCCAGACATTTTAGAA
CAAGAGCTTGTCTCACAAAAAGCCTGGTGTCTCTGTTGCCACCACAACCTGAAACTAACGAGTTAGAAACCACATAGAGCCAACGACATGGGGT
AGGAGCTCGTAACATTTTCTCGCAAGTTTTGTGTAGATAAGTTAAGCCGGGAACCGATCTGGTTGAGAAAATGTTTAAAATCATCATTTTCCCT
TCCTTCTCCTTCACTTTTATACTCAAAAGGGTCTAATTTTGCTCCTCTGGGAAGATTGAATGCGTAGGCTTTCATGTAGTTTAACACTCTCTTA
ATTTAAAGAAGTCTGGGTTTGGTGCAGTGGCTCACGCCTGTCATCCCAGCACTTTGGAGGGCCGAGGTGGGTGGAGCGCTTGAGTTCAAGAGTT
CGAGACCAGCCTGGGCAACATAATGAAGCCCCGTTTCTACTAAAAATACAAAAAATGAGCCAGGCATAGTGGCACACACCTGTGGTCCCAGCTA
CTCAGGAGACTGAGACAAGAGGATTGCTAGAGCCTGGGAGGCAGAGGTTGCAGGGAGCTGAGATCACGCCACTGCACTCCAGCATGGGTGACAG
GGTGAGACCCTGTCTCAAAAAAAAAAATTATATTTTCTATCCTCTTCCCCTTTTTGTTATGTGTTTTACAGTCTTTTCTCCATGTCTAATCTAA
GAAACTTATATATTCATTGTATATATATCTACTGGTTGTCAGCATTGAACCTTGCCTGTGCCCTAGCATGTTGCAGAATGACTGACTTGACTTT
ATTTTGAGAATAAGTTCAAAATTTATTCTTTTTTTATCAGTTGACTAGGGACCTTATCTGTTGTTGCATTTATTATCTCTAAAATACCATCTTC
TTTTTCTTTTTATTTTTTTTGAGATAGAGTCTCACTCTGTTGCCCAGGCTGGAGTGCAGTGGTGCAATCTTGGCTCTCTGCTACCTCCACCTCC
CAGGTTCAAGCAATTCTCCTGCCTCAGCCTCCCGAGTAGCTGGGATTACAGTCACGCGCCACCACACCCAGCTAATTTTGTATATTTTTGGTAG
AGACGGGGTTTCACCATGCTAGCCAGACTGGTCTCAAACTCCTGACCTCAAGTGATCCACTGGCCTTGGCCTCCCAAAGTGCTGGGATTACAGG
CCTGAGCCACCTCACCCAGCCTACCATCTTATTTTTAGATGGAGACTTCTGGACATTGGTATAAAATCTGGATGGTTCCAGTCCTGACCTTTTC
TTCATGTTTAATCTCACCTTCCTAACACTTCCACCACGTTGAAAAAGCGTAGCTCCATATGATCTTACTGCCCTTCGTTCAGTCAAGCGAGACA
CTGACATTGTGTAGATTCTGGGTCTCACATTTGCTTTGTTTTTATCTGGAGCTTTACTGGAAACTAAATGCTATTGCGTACTAGCTGCAGAAGC
AGGAGGGGAAGTTGGCAAGAATTCGCTGCTTTCTGTTTGGTCTGTCTGAGGCAGCTGACCTTTTGGAAGGAAATCGCTGCTCTTCGCTTCTTCC
GGTAACAGTGCCGCCTGTGAAAGAACACATACACAGAAGGGCTCTGCCGTTATCCTGGCTGATGCCTTGCAGCATAAGCTGTTAGTTAAGAGGT
GGGAGCCTTTCAGTGCATCTGTTGTGTGCTGTAGGAGCATGCACTCAAGTTCCTACACCATGCTAAGTTGTGTGTAGATCTACTATTAGAGGTA
TAGTGAGAGACGGTCTGTTACCAGAAAAAGTAGGTTGCTTTAGCAAAAGTAATTGCATTTTATTTACTCCCACTATGAGTGCTGTAGTAAATGT
GGACAATTATTTTGTGCACAATTTTAGTTCATCTTAATGTTAAATGTCCTGGTAATTGCTTTTTATACCTGGATAACCGTTGTTGTTTTTTTTT
TTTCCCCAGCAGGACAAACATTTTGATTTGCTAAGACATGAGCTCTTATTAAATGTCATTTCTTCTCAGAATTAGAATAAGATTTTTTTTTTTT
TTTTTTTTTTTGGACAAGATCTTACAATGTCACCCAGGCTGGAGTGCAGCGACACAATCACGGCTCACAGCAGCCTCAAACTCCTGGGCTTAAG
CAGTTCTTCTGCCTGTCTCCTGAGTAGCTAGAACTACAGGCATGCGCCACCACACTGGGCTAATTTGTAAATTTTTTGTAGAGATGGAGTCTCA
CTATGTCGCCTAGGCTTGTTTCAAACTCCTGGCCTAATCAGTCTTCCCATCTCGGCCTCCCAGAGTGCTGGGTTTACAGGCATGAGCCACTGTG
CCTGGCCCAGAATTATCTTCTTCTTTTTCTCATACATTTTTTTTTTTTTTAGAGAATGAGTCTGGCTCTGTCATCCATCTGGCATCCAGTGGCG
CAATCATAGTTCACTGCAGCTACTAACTCCTAGGCTCAAGTGATTCTCCCACCTCATCCTCCCAAGTAACTAAGACTACAGGTGTGCGCCACCA
CACGCTACTACTTTTTGTTTTGCTTTCTTTGTAAAGACAGAGCCTTGATATGTTGCCCAAGCTGGTCTTGAACTCCTGAGCTCAGGTGATCCTC
CTGCCTCAGCCTCCCAAAGTGCTGAGATTACAGCTGTGAGCCACTACACCTGGCCAAGATTTAGCTTCTTAACAAACCTGCTACTCGTTGGATC
CACTTTTTCTGCAGGACTTGTTTTACTTAAACACAGCTAGTAGGACACCCCACAACTTGGGATTATTTTTGGAAAGCTGTACTTGGGTTTCATA
TCACCCAGTAAGCAAACAAGGGAACTAACCAGCTGATGAAGCGTTTCTCTCTTAAAAGAGGAGATTTCAGTTTTGTATTGTTTTAACTAAAACA
TATTCAGTTCAGTTTTTATTTTGTTATTTGAAATGACATATTCAAGTTATGTCTAAGTAAAAATGAAACATTTTAATTCATGGCAAATTAAGAG
AACACAGCTACCTGGAAAACCGGGCAAACTGCCATATCCTTCTGTATTTAGTTTTGGTTCGGTGGATAGGTGTGCTTTTCTAAGGTATTATTGG
TCTCTTCCCTAGATTTGCTGTTGATGGCAGAGATGGTTGGGTGAAGGTTTGTGTTGATGTACATAAAAGACATAGAGATTAGTACAGAGAGAAA
CATCTCACGGCCCCCTTAGCAAGATTGCCCTGCAGTGCTTCTGTTCTTGGAAACTGGTCTGATCTGTTCCACTTTCCTGGGGTAATGAAGAATC
CAGGGGGAATACAAACCCTGCGTTCGTTTTAGGTATAGGTTCTTGGCACAAAATAAATTGATATCAACAAAACAGGAAGATTTCTCCCCGGTTC
TGTTGGCCTTTGAGTAGGAGCGAAGTTAGGAACCAACAGCTGAGGTTTCCTGTGATCTGCTCTTGTAATGATAGCTTTCTAGACACCTTCAATT
GTTACTCTTGAACTGTCAACGGCCTTCACGTAAGCCAGTTGTGTTCAGGTATGTGATTAGAGGTAAGGGATGTGTTTGTTTGTGTTTAGAAATG
GGGTCTCACTTTGTGGCTCAGGCTTGAGCATAGCGGCGTGATCATAGCTCACTGCACCCTTGACCTCCTGGGAGCGCTCCTGTCTCAGCCTCCT
GAGTAGCTTGCACTGCAGAAGTGAGTCACCATGCCCAGCTAGAAAGTTTTTTATTTTAAAGAAATTCTGGTACCGTTGTGAGTGACTTTCTGTG
TATTTCGTTCTATTTACAGTTGGTACAAGTTTGGTTAGTCACATCAAAGATGAAAGAGGGCCACTAATATATATAAATATATGTCAGAATTACA
AATTAATCTGCTATTAACAGTCTTAAATCACTATTTGAAAACACATTTAAGGCACTATATATTTGAAAGTGAAAGAATTGCATTTTAAAAAAAA
TTTTTTTATAATTCTGAATTTTTACTTTATAATTCTGAATGTTCTACTTAAAATTAAAATTTTTTTATAATTCTGAATTTTTACTTTATAATTC
TGAATGTTCTACTTAAATCAAGGCTCCCCAGGTAAGACAGTGTCATAACCTGGATATTATCATGTTAGGAAATATTTCTTCCTGTGTTTTATGT
CTCTTTAAACTTGGTTCCTGTGGGATAGTCAGTAGTACCAATTCCCCATTGATTATTAAATTTATATCTTAAGTTTTACATTTTAAACACAATT
TAATCAAAAACTTTACAAAAATTGTACCAAAAAGCCCCTTCACCTAAATGTAACAACTGTTTACACTTCTCTTTGACCTTTCTCTATTTGCCCT
CTTGCATACGTGTTGCATACACTTTTCATTTAACATTCTTTTATTTCTACTCTAAAAAAATGTGTCTACAGGCCAGGTCTGATGGCTCACATCT
GTAATCCCAGCAGTTTGGGAGGCCGAGGTGGGAGCATCACAAGGCCAAGAGTTGGACACCACGCTGGCCAACATGGTGAAACCCCATCTCTACT
AAAAATACAAAAATTAGCGCTGGGCGGGGTGGCTCACGCCTGTAATTCCAGCACTTTGGGAGGCCGAGGTGGGCAGATCACCCGAGGTCAGGAG
TTCGAAACCAGCCTGGCCAACATGGTGAAAACCCGTCTCTATTAAAAATACAAAAAATTAGCCGGGCATGGTGGTCGGCACCTGTAATCCCAGC
TACTCGGGAGGCTGAGGCAGGAGAATTGCTTGAACCTGGGGGGCGGAGGTTGCAGTGAGCCAAGATCGCGCCATTACACTCCAGCCTGGGCAAT
AAGAGCAAAACTCCGTCTCAAAAAAATAAAAATAAAAAATTAGCCAGGCATTGGTGGCAGATGCCTATGGTCCCAGCTGCTCAGGAGGCTGAGA
CAAGAGAATTGCATGAACGCGAGAGGTGGGCGTTGCAGTGAGCCAAGATCATGCCACTGCACTTTAACCCTGTTGAAAGAGCAAGACTCAGCCA
GGCGCGGTAGCTCACGCCTGTAATTCCAGCACTTTGGGAGGCCAAGGTGGGCGGATCACAAGGTCATGAGGTCGAGACCATCTTGGCCAACATG
GTGAAACCCTGTCTCTACTAAAACTACAAAAATTAGCTGCGCATCGTGGCGCGTGCCTGTAGTCCCAGCTATTCGGGAGGCTGAGGCAGGAGAA
TCGCTTGAACCTGGGAGGCAGAGGTTGCAGTGAGCCGAGATCGCGCCACTGCACTCCAACCTGGGTGACAGAGTGAGACTCCATCTCAAAAAAA
AAAAAAAAAAAAAAATTAGCCAGGCATTGGTGGCAGATGCCTATCTATGGTCCCAGCTGCTCAGGAGGCTGAGACAAGAGAATTGGTTGAACAC
GAGCGGTGGGGGTTGCAGTGAGCCAAGATTGTGCCACTGCACTTTAACCCGGTTGAAAGAGCAAGACTCTGTCTCAAAAAAATAAATAAATAAA
ATAAAAATTTAAAAATGCGTCTACATGGTTTTTATATTTCAACATAGCTTTTATATTTCATTTAACTGGTTGCACCATATCCCATTAGATTAAT
ACATTATAGTCTAATCATCCCCCTATTTTGGACATTTTCGTTATTTCTGTTTGTCCCGACGGTATATATCCCTGGGAATTGGCCTGAATCAAGG
CACTTGTCAAAGAAAATTTTGCTAGGTAGAAACTAAACACTGTAATTCTCAATGGTAAGAGGGAGGCCATGAACTTTAATAGGGAAAATATTGG
TAACATGTGTGGATTTATTAATAAATTGCCTGTTTTGTTTGTTTTTAACTTTCAAACAAGAGGAAAGGGATTATATTTCATTTAAGCAGTATAG
AAACAGGGTATTCTACTAGCTGAGGAGTTTTTTTCCTGAACTAAAAGATTTGAATTGTCCAAGAGACACATTCTAAGATGAGTTGATCTTGAAT
TACAGTACAAATATAAACCTTCACTAGAAATTCTGAGGCTGGCTGGGTGTGGTGGCTCACACTTGTCATCCCAGCACTTTGGGAGGCCGAGGTA
AGAGGATCACTTGAGCCCAGGAGTTCATGACCAGCCTGGGCAACATAGCAAGACCCCATCTCTAAAAAAAAAAAAAAAAAAATTAGCCGGGCAT
GGTGGCACACACCTGTCGTCCCAGCTACTCAGGGGGCTAAGGGAGGAGGATCACCTGAACCCAGGAGGTTCAGACTGCAGTGAGCAGTGATTAC
GCCATAGCACTTCAGCCTGAGTGACAGAGTGAGACCCTGTCTCAAAAAAAAAAAAAGAAAAGAAAAGAAAGAAAAAAATTCTGAAGGTAAGATA
GGACTACATGGCAGCTTCAAATCATTTCTTATTTTTCCGTAATGCACATCGTCATTAATTTTGGGCTACAGCAAGTGCTTTTAGTCATCTGGAA
AGTGATACAGATGTAGCTTCTTCCCAAAGGGATCGCAAATCCATTATCTCCATGGATTTGGACATGGACATAATGATAACACATGTACACTGTG
GGCCACCATGGCACAAGACAGCCCAACTTGCATGCTGGTGGCCTGCAAGCTGCAGCACAACCCCTAAGAAGTCCAGATTTTTATTGACCACCAG
GGACAGTTTCAAAGTGAGAGTCAAACCTCTGCTTTCATTGCTTTGTTTTTCTTTTTTGGAATGTTTGCCCTTCATTTTGATTTTGAAAAAAGTG
TACATGACTTAAAAGTGGAAAGAATAGAACAATGAGTACTCGCATATACTTCACCTAGGTTCAGCCAGTGTTCACAGTTGTTAGATTTACTTTC
CCACACTCCCCACCACTGTCACTCTTCCGTTTCTCCTGCCAAAGTAAGATGCAGACGACATGGCCATTTACCCTCAAATACTTGACAGTGTATC
TACTCCCAGCAAGGGCATTCTTCTACGCAACCTGAATGCCATTGTCACTCTCAAGAAATTTAGCAGTGATAAAGTAATATCTAATATATAATGA
TATAATGGCCTTTAGAGCTGTGGGTGTTTTTGTTTGTTTTGAGACAGAGTCTCACTCAGTTGCCCAGCCTGGAGTGCAAGTGGCGCAATCTCAG
CTCACCACAACCTCTGCCTCCCGGGTTCAAGAGATTCTTGTGCCTCAGCCTTCAGAGTAGCTGCAACTACAGGCGTGTGCCACCACGCCCAACT
AATTTTTATATTTTTTTTTTATTTATTTTTTTTAAGTATAAACACATATATTTTTTAAAGTTTATTTTTAACATTTTTTTTTTTTAATTGATCA
TTCTTGGGTGTTTCTCGCAGAGGGGGATTTGGCAGGGTCACAGGACAATAGTGGAGGGAAGGTCAGCAGATAAACAAGTGAACAAAGGTCTCTG
GTTTTCCTAGGCAGAGGGACCCTCTGGCCTTCCGCAGTGTTTGTGTCCCTCCGTACTTGAGATTAGGGAGTGGTCATGACTCTTAAGGAGCATG
CTGCCTTCAAGCATCTGTTTAACAAAGCACATCTTGCACCGCCCTTAATCCATTCAACCCTGAGTGGATACAGCACATGTTTCAGAGAGCACAG
GGTTGGCGGTACAATTTTTGTATTTTTAGTAGAGACAGCGTTTCACCATGTTGGCCAGGCTGGTCTCGAATGCTTGACCTTGAGTGATCCTCTG
GGCTTGGCCTCCCAAAGTGCTGGGATTACAGGCATGAGCCACCACACCCAGTCGTGTTTTTGTTTTTGAATTACGCTCTTGGTTGTGTCTCTTC
AGTCTCCTTTAACCTAGAACAGTTCCACCTGTTTTGGGTGGGGGGTGGGATCATTGATTAGAGTCTCACAATTTGGATTTGTCTGATTGTTTCT
TCATGATTTAGTTTGTGTATTCTTTTCAGCAAATCATATCTGGAGGCACATAATGTCAGTTTATGCCATGATTGGGGATGTTTGATCACTCGGT
TAAGGCATTGTCCGCCAGATTTATCCACAGAAATGCACCTTTTCCCCTTTGAATAATAAGTAATATGTGAGTAGTACTTTGACACTAAATGCTG
TTCCCCAACAACTGTCACCTAATGGTTTTAGTAGCTGTGATGATCCTTGTCTCAGTCTACTCTCTTTATTTTTGAGATTGTGCATCTTTGGCCA
AGACTTTATATCCTATATTTAGATGAGAGTTTTAAATATATAGTAACCTGCTGATTGAAACCTGATTTTTATATTTAGTAAGTAGATCCTTTCT
CTACCTTCTCCTTTATTCCCTCCCTTACCCTTTTCCCCTCCTCCATTCTCTGTTCTTCCTATTGTAATATGCAGTGATTTGGCTGTGACATAAA
GATTAATGGCGCATTGTCTTCCCACAATACTATCATCTCTATGTTGCCTGGGCACATTTTTCCTTGTTTGCTTCTTTGTGAGCCAAATGCTTTT
ATTCTTTCTGTTCTCTTCCCATCTGTTTAATAATGTGATTTTTTAAAAAGAGAATTGGCTTCCTGATTGCATATAGGGTAGTATTTAGAAAAAA
AAAATTAAAGAGCAGATGGCTCTGGTATTAACCTGCTTCTAGATGTGATAGCCTTCTTACTTGATATTAGTCCAATTTTAATATGAATGAAGTC
TTAATCCTTTATTGCTGCTATTGAATATTTTTCCGTCCCTCAAAATCGCTATACTAGGCTACGCATGGTGGCTCAGCCCTGTAATCCCAACACT
TTGGGAGGCCGAGGTGGGTGGATCACTTGAGGTCAGGAGTTCAAGACCAGCCTGGCCAACATGGTAAAACCCTGCCTCTACTAAAAATCCAAAA
ATTAGCCAGACACACTGGCACATGCCTCTAATTCCAGCTACTCAGGAGGCTAAGCCAGGAGAATCTCTTGAACCCGGGAGGCAGAGCTTGCACT
GAGCCAAGATCATGCCACTGCACTCCAGCCTGGGTGACAGAGCAAGACTCTGTCTCAAAAAAAAAAAAAAATTGCTGTACTAGGTGACCACCAC
CATTTAATATATTTAATAATGTTGGTATCAACAGAAAGCAGTAAACATAATTAGGGAATTTGCTCTTTTTTTTTTTTTTTTGAGATGGAGTTAC
ACTCTTGTTGATCCATCAGCACAACTGGAGTGCAATGGTGCGATCTCAGCTCACCGCAACTTCTACCTCCCAGGTTCAAGCGATTCTCCTGCCT
CAGCATCCCAAGTAGCTGGGATTACAGGCATGCACCACCACGCCTGGCTAATTTTTTGTATTTTTAGTAGAGACAGGGTTTCTGCATGTTGGTC
AGGCTGGTCTTGAACTCCCAACCTCAGGTGATCTGCCCGCCTCTGCCTCACAAAGTATGGGATTACAAGCATCACCCACCACGCCTGGCTGGAA
CTTGCTCTTTATATTCTGTACAGAATCCTTAGTCATTCACTGGAGCTGATAGGTTTAACAGTTTTGAACCCTGGCTCCTTGCCTTGTACTTTTC
AGATCAGAAGCAATCTTTAAACGTCATCTCTTTGATCTGTCACCCAGCCCTAGCCTTTGCCAAAATCAGAGCCCCTCAGTATTAGGTTTCTTAC
TTTAATTTTTCATTCTTTGCTCTCTTTAAATTATGAAATATAACAAACAGGCAGAAAAGTACATAGAAAATGGCAAACCACCTTAAGTCCTCAA
CATGCATCCAGCCTGGTGCAGTGGTGCAAGTAAGTGCAGGTTCTCAGGTAGGTCCAGCCCAGATAGTACCCCTTAGTAGTATGGACCGACCCTG
GAGCAAGTGTTTCACCTCTTTCTCTTTTTAAAAATACCTTTACTGAGATATAATCACGCACTATAAAATTCACCCTTTGAAGTATATTCTCAGA
GTTATACAATTATCACCACTATCTAATTCCGGAACATTTTCATCATCCCCTCAAAAAGCCCTTACCTTTTAGCAATCATTCCCCATTTCTCCCT
CCCCTCAGCCCTTGGCAACCAACAATCTATTTTCCGTCTCTATGGATTTGCCTATTCCGGATATTTCATAAAAATGGAATTTACAGTATGTTCC
CTTGCATGCCTTTCACTTTACATAATGATTTCAAGGTCATCCACACTGTAGCATGCGTCAGTACTTCATTCCTTTTTAACATCTGCATAATATT
CCATTTTATTCATTGTATTTATCCATTCCTATCCATATTTATCTCTTTATCCTTTGCTGGACATTTGAGTTGTTTCCACTTTGCGGCGATTATG
AGGTGATTATGAATAATGCAGCTGTGAACATTTGTGTACCTGTTTTTTGTTTTGCTTTGTTTTTGAGACAGAGTCTTGCTGTGCTTGCCCTGTC
ATCCAGGCTGGAGTGCAGTGGCACAGATCTCGGCTCACTGCAACCTCCACCTCCCAGATTCAAGCAATTCCCCTGCCTCAGTCTCCCAAATAGC
TGGGATTACAGGCACCCGCCACCGTGCCCGGCTCATTTTTTTCTTTTTTAATTTTTAGTAGAGATGGGGTTTCGCCATGTTGGCCAGGCTGGTC
TCGAGCTCCTGACCTCAGGTGATCCACCCGCCTCAGCGTCCCAAAGTCCTGGGATTACACGCGTGAGCCACTGCACCTGGCCTGTGTACCCACT
TTCTGGGGACACATGTTTTCACTTCTCTTAGGCATATACCCAGGAGTGGAACTACTGGATAATGTACTAACTCTATGTTTACCCTTTTGTAGAA
TTGCCAGATAGTTTTCCAAAACTGTTTCACCATGTTACAATTCTACTTAATCTTGATGACCCTCAATTTCCTCATCCATAACGGGGATAATAAT
AGTGCCTACCTCTGAGCGATTTAGGATAAAGAGTAGATTCATAAAAGCACTTGTTATAACTAATATACTAAGTCCTTAGCTAGCTCTTAAATCT
GGATGGGGGATAATAATAACACTGATAAATGTTATTTATTTCTTATCCTATTTCTGAAGTTTATTTTTATTTATTAGATGAATTGAAATATTTG
TTGCTAATAATTCATAAAGCAGTATAATAAATGAAAACTTCAAATTTCATTAGTTGTTTTTTGTACTTTAATTATTAAAAGTCAGATATGTCCT
TGGAAGGAATAGGTAAAGGCATGGCTCCCTGCTGGCTTAGTCCTCTCTGTTCAACAACATATTAGAAGGAATGGAATAGGTAGTTTTCTTCTCC
TTTTTTTTTTTTTTTTTTTTTGAGACAGAGTCTTGCTCTGTCGCCAGCTTGGAGTGCAGTGGCATGATCTTGGCTCACTGCAACCTCTGCCTCC
TGGGTTCAAGCGATTCTTCTGCCTCACCCTCCTGAGTAGCTGGGACTACAGGAGCATGGCACCACGCCCAGCTAATTTTTGTATTTTTAGTAGA
GATGGGTTTTCACCATTTTGGCCAGGATGGTCTTGATCTCTTGACCTCATGATCCACCCACCTCGGCCTCCCAGAGTGCTGGGATTACAGGCAT
GAGCCACCGCACCCGGCCTCTTCTTTTTTCTTTTTTTTTTAAGAGTTTACTATGCATACGGCAAAATCAAAGCCTTGCTGTTACTGTACCACCC
TCACCCTTCACAATTCTCCATTCTTTCATTCAAAGATCAGACAACACACTTCATCCTGCCTTTCCACCACCACCTCCCAACAGTTCCTCTCTGC
AGAAGTCCTTGTGCCAGTGAAATTGATTAAGAAATAGGAATGCCATCTTTTAAAACGGCCCAGCACAGCCTGTAATCCCAGCACTTTGGGAGGC
CGAGGTGGGTGGATCACAAGGTCAGAAGTTCAAGACCAGCCTGGCCAAGATGGTAAAACTCCATCTCTACTAAAAATACAAAATTAGCCAGGCG
TGGTGGCGGGCAGCTGTAATCCCAGCTGCTTACGAGGCTGAGGCAGATAATTGCTTAAACCCGGGAGGCGGAGGTTGCAGTGAGCCCAGGTCAC
GCCACTGCACTCCAGCCTGGGTGACAGAACGAGACTCTGCCTTAAAAAAAAAAAAAAAAAAAAAGGCCAGGCACAATGGCTTCTGCCTCTAATC
CCAGCACTCTGGGGGAGGCTGACTTGGGAGGATCACTTGAGGTGAGGAGTTTGAGACCAGCCTGGGCAACATAGTAAGACCTTGTCTCTACAAA
AAAAAAAAAAAAAGTTTTTTTCTTTAATTAGCCAGGTGTGATGGCATGTGCCCACAGTCCTAGCTACTTGGGTGGCTGAGGTAGGAGTATCCCT
CAAGCCCAGGAGTTTGAGGCTGCAGTGAACCATGATCACACCACTGCACTCCAGCCTGACTGATGCAGTAAGACCCTGTCTCGGATGGATGGAT
GGATGGATGGATGGATGGATGGATGGATGGATGGATGGATAGAAAAGTTTATACTGGAGGATATTGGTTAAGGAGAAGGATAGCAAGAGCTATT
TGTGGAGGATTGATTTTTGGAAAGTTTATTAAATTGAGTTAAAATTAGAGATGGGAGAAAGAAGCCGGTTTTGTAAGTTTAAGGTAACAGTAAG
AACAGTAGTGAGTACTTACAGAGCACCTGCTCTTAGCTAGATACTGTTTTAGCTATGTACATAAAACTAATTCATTCTTACACCAGCCCCCTAA
GGGGCATAAGTATTATTATTCCCATTGTACAAATAAGAAAACTGAGGCACAGAGAGGCTTAACAGGCTGTCTTTGGCAGAACCGTATTTAGGTG
AGTTCAGCATCATCTCTAAAAGTTTAACCCCAGTTTAGAGACTTTGGCCCTGGGATGGGGGGTACGATGGAGAATCGGAATTACAAAATGCTTT
AAATTATACATATGAATCCAGCACACCAAATCTGCTGGATTCATATTATTCATATTATGCATAATATTATTCATATTAACCCCCTACTCCCACC
CCACACTAGAATTCATTCACTGAGTTGGCAGATACACAGTGGGCCTTCTAATGTCAGACACTACTCTCCACTGCAGTTTAGCTAGGGCAAGACC
TTGGTCACAGTGTTCTACAAGTCTTCAGAGAGAGAGTAATGTTTTTCTTTGTTATAGTTTATATTTTACTTTTAGAAAGGAAAAGCATCTGAGA
AAAGATATTTATGACTGAGACAAAATTATTCCAAATCCCACTCACTTATATCATTTATTTATGTGGTGGACATTCATTTTTATGGTTTTCAGTA
AGCCTGTAACATTATGAGCTATTAGACTTTGAAACTTTTATTAACAAGTGCCTGAGGGCCCGACTGATTTATTTGGCTCTCCAAGCCCATGGGT
ATATCCAGATATATAAGGTTGAGGTAGGTGCTTTATGCCTTCACAAAGTACACGGTTCTGCATCCAGGCCTGTCTTAGGTTGTTCTGAAATGTC
TGTGAACACAGAGTGCAACTCAGCCCACCTCAAATACTTCTCATCTTTGGCCTAAAAATAAGATTGTGAATCCATTTCCCAGTCTTTAGAGAAT
CCCCTGTGATGATTTACCAAAGAACAAACTACTTCCCTTGTCTGAGCATCACGCACTGAAATTGGAGCTGCCCGTAAATAAGCAGAAGATGGCG
GCTACTGGGGACAGAGGTACAGTCTTTGTAGATGCAGAGTAGCGTTCGATCCCTACATCAATGCCAGTTAGAACGATCAATGCCGGTTAGATGA
ATGCTACTCATATCAGGCATGTGGACATAGCCTGATAATGGGGTGAAGAGTTGTGACATGTATGAAGAAAAATACTACTTAACTGCCAGGCACG
CTGGCTCACGCCTGTAATCCCAGCACTTTGGGAGGCCGAGGCGGGCAGGTCACCTGAGGTCAGTAGTTCAAGACCAACCTGGCCAACATGGTGA
AACCCCATCTCTACTAAAAAAAATTAGCCAGGCGTGGTGGTGAGTGCCTGTAGTCCCAGGTACTCAGGAGGCTGAGGCAGGAGAATCGCTTGAA
CTCGGGAGGCAGAGGCTGCAGTGAGCCGAGATCATGCCACTGCACTCCAGCCTACGCCACACAGTGACACTCCGTCTCAAAAAACAAACAAACA
AAAAACCACTACATAGCTTCTAGGTGTTATTCACGTAACTCGGAGAACAGTTGGTTTTTTCCTAAACTGGGTGTTTAGAATTTATAATGATAAT
CTCAGTAAGTCATCTCATATTTCACATATAGATAATTTTCAGTTTAACAGTAAAATAAAAATGACTCTGTACTAGTTAGTGTACTTTTATTTTA
CACTTTTGAATAGCAGTGAGCAGAATCTACTCTCCAGCTCTATCAAAGCACTTATGTGTAGTGAAACTATATTGTATTTATCAAAATAAGGTGA
TTGCCACTTGGTATTTACCACCTATTATCCTTCAAATGGGATGCTATTTTAGAAAATAATTATTATGGCATGTTCATAACTAGAATCATAAAAA
TATTCTACAAATTCTAAGAGCTCAGCATTCTACTCTTTGATGAAAACTAAGAAATAATCTAAAATTTAAGGCAAAATAGAGTGACATTTTTTAA
TACCCCTACATGCATAGTATATCACCACAGTATTTCTTTCCTAAAACAGTAATAGGCTCCTAAATATGCTTCACCACCAGGGAATGTTAAATAT
TTGTTTGTGTATTTATTCGCTCCCCAAGTATTTTTTGACCACTTTCCATAGGCAAGCCACCGTACTAGACACTGGGGACACAGTCGTGAATAAG
ATGTGCTCCTGGCCGAGCGTGGTGGCTCACGCCTGTAATCCCAGCACTTTGGGAGGCCGAGGAGGGCAGATCACGAGGTCAGGAGACCAAGACC
ATCCTGGCCAACATCGTGAAACCCCATCTCTACTAAAAATACAAAACTTAGCTGGGCGTGGCGGTGTGTGCCTGTAGTCCCAGCTACTCGGGAG
GCTGAGGCAGGAGAATTGCTTGAACCCGGGAGGCAAAGCCTGCAGCGAGCTGAGATATCTGCACTCCAGTCTGGGCGACAGAGCAAGACTCCGT
CTCAAAAAAAAAAAAAATTGTAATTGATTATTTAAATGGAAATCTGTTCCATTTTCATGCCTTGGTGTTTCATACTGATATATTGTTCAATTAT
AACTTTGAAAAGAGCCAATAGAATCGGTCAAATTGTGTGTATACATTTATTTATGCAACAAAAAAATTATGATGCTTATGTGCCAGCTACCGTT
CTAGACCCAGGAGAAAGCACGGTGAACAAAACAAAGTCATTGTGTTCATGGTGATTTCACCCTGGTGGGAAGTCAGTAAGCAAATATATGATCA
ATATCACGAATTGATAAATGATAAGAAAAATAAAGCAGATTAAGAGGATAGAGAGTGACCAGAATGCCGTTTTATTTCAGTGGGCTGGCAAGGA
GTCTCTGGGGAGATAAAAGTTTTCATAGCTTTCCTTCTTTTGTCTCTGAAGTCAATTCACCTAATGAATGCAGATGCAAGAGAATTTTTGTATC
TGTTGGTATCACTCACATATTCATTGAGAGCTATGCTGACGCCCTACTTCTTACTCTTTACTACTTAGGAATACTAACACCTACATTCTTCTCT
TCATTCTTTTATCACTCTTCCATATACTTAAGTGCCTAAGCACCTTCATTCATCCATCCCTTATATAATTTTTTTTCTTGAGACAAAATCTGGC
TCTCTTGCCAGGCTGGAGTGCAGTGATGTAATCTCGGCTCACTGCCACCTCTGCCACCCAGATTCAAGCGATTCTCCTGCCTCAGCCTCCCAAG
TAGCTGGAATTATAGACGCATGCCACCACACCTGGCTAATTGTTTTGTAATTTTAGTAGAGACGGGGTTTCGCCATGTTGGCCAGGCTTGTCCC
GAACTCCTGACCTCAGGTGATCCACCCACCTCAGCCTCCTGAAGTGCTGGGATTACAAGCGTGACCCACCATGCCTGGCCATCCATTCCTTATC
CTTCATCCAAAAATCATGATTTGGTATCTGTTCTGGTTTTCCAAAATCTTGCGATATGATTTATTTGATTAAAAAATACATTGTGCAGTTAAGT
GACTTCCAGTGTTTGATTATAAAGTGGAATTGCTTCTGGAGAGAGCTCTTTTATCTAAGTGTTTTGGTGAACTCACAACCACTGAAATTTGATG
TCTTGGGTCAAATTGGGTCTACAGTGATCCCAGCCTTAATGCCTAAAAGCCCTAAATAATACACTTCTCAAGTGTTCTATAGCATTGCACTAGT
CTAAAATACATAACTGGCACTCCCCTACACCTCATTGTTGGCTAACTGACTTGTCCCATAAATAGCCCAGTGTTACGTGATCAGACAACTACAA
CTAACAGAAGAGATTTTTATTTCCTGACACACTTGTACAGTCTCTGGTAGTAAACAAAATCCAAGTCCAAGTCACCGGCCCCTAACTGTAACCT
AGTTCTTAGAAGAATTGTGCAAATCAGTAGCCAAATCATGTGGGATGGAATTCAAGATAACCCTGCCTTATACCAAACTCTACATTATGGAAAA
TAGTGTTAGAGCAAGATTCATTTTCAGTCCTTAGAGTTACCTGAAGTCCCTTCCCAGTCTACCCAAATGTTTCTGCCCTAATCTGGTTAAACTC
AAAGAGCATCTGCCAGATGAGTTAAAAATTGTCAGGTGAGTCTGACGGGGGCATCATGCTAGTTTTATAAAGCCTTTCTTTAAAAAATCAAGAG
CATGTTAAAAAAACAAACTACCGGCTGGGTGCAGTGGCTCACACCTGTAATTCCAGCACTTTGGCAGGCTGAGGTGGGCGGATCACAAGGTCAG
GATATCGAGACCATCCTGGCTAACACGGTGAAACCCCATCTCTGCTAAAAGTACAAAAAATTATCCGGGCGTGGTGGCGGGCGCCTGTAGTCCC
AGCCACTCGGGAGGCTGAGGCAGGAGAATGGCGTGAACCCGGGAGGCGGGGCTAGCAGTGAGCTGAGATCGCGTCACGGCACTCCAGCCTGGGC
AACAGAGCAAGACTCCGTCTCAAATTAAAAAAAAAAAAAAAGAAACTACCTGCTATTGGAGTATAATGGTTCATATTTCCAACTCTTAGGTGGA
ATGTATTGTTTTTGTGTCTGAAAGATTTGTAAATGCTATAATTTAACAACATTGCTTCATAAATTCCTTACCAGTAACTCAGGAGGTGAACCTT
CGGGCATTTTTCCAGATAAATCTGTGCTCTTTGTGTGCAAAGCATTGCTGCTTAGGTAACTAGTGATAATGCATAGGGTTCAATCAACACTTCA
GATATTTTCACTTTTCTTTTACTGGGCTTTTTCAAAATGGCATATGTTTATTATATTTCTGAAGTCAAAATACCAAATCTAAAACAAGTGATTT
TTTAAAAAAAATCTCTCAGCTGGGCGCAGTGGCTCACACCTATAACCCCAGCCCTTTCGGAGCTGAGATGGATCACTTGAGCTCAGGAGTTTGA
GACCATCCTGGCCAACATGGTGAAACCCCATCTCTACTGAAAATACAAAAATTAGCTGGGTGCGGTGGCGGGCACCTGTAATCTCACCTACTTG
CCACCCTGAGGCAGTAGAATTGCTTGAACCCGGGAGGCAGAGGTTCCACTCAGCCGACATCTTCCCACTGCCCTGCAGTCTGGGCAACAGAGCA
AGACTCTGTCTCAAAAAAAAAAAAAAAAAAACTCTCTGCTAATTATTTATTACTGTTGAAATGCTGCTTACCATGGCTGACAATTTTGAACAAA
AGTAAAGAATATGTCTACGATGTCAAAGTTAGCAATTCTTTCCCTAATTCTCCTTTTGTACTTTTGCTTATAAGACCTTAGTACATTTCATAGT
CAGACCTTCATAGACCCAGCTGTGTATCTTTCCATGGCCAGGCTGAGTGTCTACATTTTCAAAACATTTTAAAGTTAAAATTCAGTTCAAGAAT
ATTGTCTTTAGTCTACCAAAAGGGCTAAAAACATTTACTTTGGCCAAACGTGGTGGCTCACGCCTGTAATCCCAGCACTTTAGGAGGCTGAGGT
GGGAGGATCACTTAAGCTCAGGAGTTCGAGACCAGCCTGGCCAACACGGTGAAACCCCATCTCTACTAAAAATACAAAAATTAACCAAGCATGG
TAGTGTCCCCCTGTAATCCCAGCTACTCAGGAGGCTGAGACAGGAGAATCATTTGAACCCCGGAGGCCGACGTTGTAGTGAGCCAACATTGTGC
CACTGCACTCCAGCTTGGGTGGCAGAGCGAGACTGTCTCAAAAAAATAAAAATAAAAATAAATAATAAAATAAAAACATTTACCTTGGTAACTA
AGTGAATATTTACTCTCGTGCATCTAAGGGGAAAATAAAGAAAAAACGCCCAAAGCACTGATTGTTTGTTCAACAGATTGTAAACCATGGCTGT
CTGCATACAAGCTCAGCAGCTCCAAGGAGAAGCCCTTCATCAGATGCAAGCGTTATATGGCCAGCATTTTCCCATTGAGGTGCGGCATTATTTA
TCCCAGTGGATTGAAAGCCAAGCATGGTAGGTGAACAAGGATGTTTGCATCATATTTTGTGAAACACAAGAATATTGGAGTTTGTTTAGAAAGA
TGTCATGATGGCAACTTTCAAAGTTGTATTTTTAAACATTTTTAAATGTGATCCATAAAAAGGTATTTAAAATTTTTTTTCTTTTTATAGGTGA
AAGGTATTTAAGCCCATCTTAGATTGAGGGGATGGAATAACTCTTGCGATTTTTAAAACAGGATTTGTTCCCCTTTAATAGTAAATACTGTCTA
AAAGCATTAGAATATTACTGCTAAGAAAGAGCAGCCAACAAATATGTTTCGAGTGCCCATGGGATGCCTACCAGTGTCCTAAGTAGTAGAATTT
ATATGAAAAAAATTAAAGCCCAACATTGTGTTGTAATCCCAACACTTTGGGAGGCCAAGGCAGGTGTACTGCTTGAGCCCAGGAGTTCAAGGAA
GGCCTGAGCAACATAGCAAAACCCTGTCTCTGTACAAAATACAAAAATTAGCCAGGTGTGGTGGTGTGCACCTGTAGTACCAGCTACTTCGGAG
GCTGAGGTGGGAGGATCACTTGAGCCTGGGAGGCAAAGGTTGCTGTAACCCATGATCACACCACTACACTCCAGCCTAAGCAACAGAGTGAGAC
CCTGTCTCAAAACAAACAAACAAACAAAATTAAAGCCCTCATCTCCAGATAATTCAGTGTTTCACTGGACATGGTGGTGCACACCTATAATCCC
AGCTACCCAGGATGCTGAGGTGGGAGGATTGCTTGACCCCAGCAGTTTGAGGCCAGCCTAGGCAACATAGCAAGATCCTATGTCAAAAAATAAT
AATAATAATTTAGTGTTTAATGGGGCAGATAGGTGTGAATATGCATATAATTTAATTATAATTTATTTCTTATAGTTTATTAAATATAAATTAT
TTTACATTTCTTAATAAGTTTACATCTAACAAAAAACTAAAAATTAATAATTTAACAGTGGAGACATTGGTGTTTTTAATTTATATGTATTTTA
TATATACACATAAAGACTAAAAGAAAATTGAGTGGGTGTTGTGGCTCATGCCTGTAATCCCAGCACTTTGGGAGGCCAAGGCAGGCAGATCACT
GGAGGCCAGGAGTTCTGAGACAAGCCTGGCCAACATGGCAAAATCCCATCTCTACTGAAAATACAAAAAATTAGTTGGGCGTGGTGACGGGCGC
CTGTAATCCCAGCTACTCTGGAGGCTAAAGCATGAGAATCGCTTGAAGTCGGGAGGCAGAGGTTGCAGTGAGCCGAGATCGCACTACTGCACTC
CAGCCTGGGCAACAGAGTCAGACTGCCTTTAAAAAAAAAAAACAAAACTAAACGAAAATATACCCAAATGTTAACACTAATTACATTCTGGTGG
TAGATTTGATAACCATTTTAATTTTTCTTTATTTTCCAGATTACTGATTACATACTTGGGGGAGGGGAGAGTTGTTTTAAATTTCTTTTAGAAT
TAGTACAGTGCAGTCGACTAACAGCACAGGTTTTTAATTGGTATCATTATTACACACCAGGCAGCAGGATGTACACTGCTCTGCTCAAGGTCTG
GGAGGTTGCTGGTTGGTTACAGTCTGTCAGTCGATCTGACATATTCATTTGATACTTCAAGCCTCACCGTCTTAGCCATGGGTCCTCTTTGACA
GTCCCTGAGAGAACCAGCTTTGATGCTGCTATTTGCAAAGGGCCATATACCTGTCTGTAATGTTGCCTTAGAATAATCGCAATGCGTGTTAGTA
GCAAATTTCTGTTCAGAAACTAAAGATCACCAAACAAAGGCAATTTTCTAGGCAATTAAAAAAAAACTCAACTTCATGTAATTAAGTGAGGGAA
AAAAATTAGCTAAATATGAGAATGTCAGCTGTACCTCGTTTAGTGCTTTCCACTCCCTTTTCATTTTCTCTCCTGTTTTCTGATGTGGAGGATT
TAGAAAAACATGAGTAGGAAGTTGCTGTTAATTTCAGATTTCACTTAGCAGAGTTCTCATTTGGTGTTCTCACTGAATGAATTAAAAGACTTGT
GTTGATATTAAGGAAAACTTGAAATTTTTTAGCTTTGGTTTTCTTCAGAATATAAAGATTTTAATCAACAATTTTCAATTCTTTTTTTTTTTTG
AGATGGAGTCTCGCTCTGTCACCAGGCTGCAGTGGCGTGATCTCGGCTCACTGCAATCTCCGCCTCCCGGGTTCAAGCAATTCTCGTGCCTCAG
CTTCCCGAGTAGCTGGGACTGCAGGTGCCCGCCACCACACCGAGCTAATTTTTGTATTTTTAATAGAGACCGGGGTTCATCATGTTGGCCAGGC
TGGTCTCTAACTCCTGACCTTGTGATCTGCCCATTTCGGCCTCCCAAACTGCTGCCATTAAAAGCTTGACCCACCGGGCCCACCCAAATCTTTA
GTTCTTTATGTTTAAGCCATCTAAGCAAGTCTTTTTTTTTTTTAACAGAGAATTAAGGTTTCAAGTAAAGAACCAATACCTGACTTCTGTGAGT
TTTGCTCAGAGACTGGATCCTTTTAAGAGTGGGCTCCTGGCCGGGCACGGTGGCTCACGCCTGTAATCCCAGCACTTTGCGAGGCTGAGGTGGG
TGGATCACTTGAGATCAGGAGTTTGAGACCAGCCTGGCCAACATGGTAAAACCCCGTCTCTATTAAAAATACAAAAATTAGCCAGGCGTGGTGG
TGCACGCCTGTAATTCCAGCTACTTGGGAGGCTGAGGCAGGAGAATCACTTGAACCCGGGAGGCAGAGGTTGCAGTGAGCTAAGATCGTGCTAC
TGCATCCCAGCCTGGGTGACAGAGTGAGACTTCCTCTCAAAGAAAAAGAGTCGGTTTCCAGACCAAGGGCATTGTTGCCAGTTGAAACAGAGGT
GCAGGGCTGCCCTCATTCCTTCCAGCCTTTCATTTAATACGTATTCTATTTAATACATAGCGCACACATATTTAGAATCTGACTTGCCTTAACT
GCCTTCTCAAGGCGCACATTGGGGTGTACTATTTGATGGACTATGGTATCACTGCTTTTTTTGTTTTGTTTTGTTATGTTTTCGTAGAGAGAAT
CTTGCTTTGTCACCCAGGCTGGAGTGCAGTGGCGCAATCTTGGCTCACTGCAACCTCCACCTCCTGGGTTCAAGCACTTCTCCTGCCTCAGCCT
CCCAAGTAGCTGGGACTACACGCACATGCCGCCACGCCCGGATAATTTCTTTTGTGTTTTAGTAGAGATGGGGTTTCACCGTGTTGCCCAGGCT
GATCTCCAACTCCTGAGCTCACGTAATCCGCCTGCCTCGGCCTCCCAAAATGCTAGGATCACAGGCCTGACCCACCACGCCCGGCCGGTCTCAC
TGTTTTGATACACTTGTTGGTGCCTCTTTTTTGAAATTAGTTGCTATCTTCAGGGATTTAGGGATGGCAGAGCCTTTTAGCTACCACTATCTTG
TTTGGCTCCAGACCCAGTCAGCAGTTATTGAATGTTATTTCAGTCCGACAGCTGTTTGGTTTCTTCAGTGAGTAAGTAATTTGGTACTTCCCAG
TGTCAATTGTTGCCTAAGTAGTAGAAAGGAAGCAACCAACGGAAGGAAAGAAGGAAAGAAGGAAAGAAAGGAGGCAGCGAGACCATCCAACCCC
CGTCACCAGTTCAGTAGCTTGAAATCAATGCAAAGTCTGTAGCGTGGTTTTCCTTGTTTACTGGAAAAGTTGGCATTGCCTTCAGGTCCTGGGT
CTGCAACTAGTGACATGAATGTCTGACTCGTATAAATTCTTGTAGGCACCCTCTGCCTGAATGTCTCATTTCCAGGGCTTCTTAGAAATAGCAA
TAACTTGTTTCACCTGTCTCTACCTAAGAAACCCACAGATACCAAACTCCTTGAGGCTGGAAAGGACATGTAGAAGAGTCTTGGCCTTGTGCCT
CCTTTACACCCATGAGGGGTAACTATAAATAGGAAATTATCCAAGTCCTTATTTCCTTCAGAGTACACAGAACCCTTTCCTTTTCCTTCCATTT
CTCGGAGCAAATAGCATAAGCACCAAGCACATCATTGAGAGAAAGGAAGAAGGGCAGCACATTGTTAAAAATTTTTTTTTTTAAAAGAAGGAAA
TCTACTGTATAATCCAACTATTTAGTAAATTACAAATAGATTAACATAGGCATTGAGTCCATTTCTGTTGGGCTGTTTCTTAAAATTTGCAGTG
AGGATTAAAAACATCACTTTAGTTGAAGAAAAAGTAGGATGTGTTGAGGCTGTATTTATACAGGCTCACGTGCATGTATGTATACAGATTATGT
AATTTTTTTCCCCTAGGGACTCAGTAGATCTTGATAATCCACAGGAGAACATTAAGGCCACCCAGCTCCTGGAGGGCCTGGTGCAGGAGCTGCA
GAAGAAGGCAGAGCACCAGGTGGGGGAAGATGGGTTTTTACTGAAGATCAAGCTGGGGCACTATGCCACACAGCTCCAGGTGGGTGTGGGCTCT
GGGGTCACACTTAATTACCTTCCCTTCGGGGTCTTCTTCCTGTAGAGACTTTCTTTCTCTCCTTCAGTCCAGCATTGTTGAGTTACACGTGCAT
AAGGTTCTTGTTGTGTGGTTTTGGTCTTTTTTTTTTTTTTTACTTTTTATTTGAGAATAATTTCATACTTCCAGAAAGTTACAAGAATCATACA
AAGATTCCCCACATATCCCCATATTCACCTGTTCTTGACTTTTATGTTGTCATATACTCCTCGCTGTCTCTCGACACACACGTTTTTCAGTCAC
TGGAGAGTAAGTTGCATACCTTGTGTCCCTGCACCAGTAAGTACCTCTGTGCATTTTCTATTTATTTATTTATTTATTTATTTATTTATTTATT
TATTTATTTATTTATTTTTGAGACGGAGTCTTGCTCTGTCGCCCAGGCTGGAGTGCAGTGGAGCAATCTCAGCTCACTGCAACCTCTGCCTCCC
GGGTTCAAGCGATTCTTCTGCCTCAGCCTCTCAAGTAGCTGGGATTACAGGCTCCTGCCACCATGCCTGGCAGTTTTTTTTTTTTTTTGGTATT
TTTAGTGGAGACGGGGTTTTGCCATGTTGGCCACAGTGGTCTTCAACTCCTGACCTCAGGTGATCCGCCCACCTCAGCCTCCCAAACTGTTGAA
ATTATAGGCATGAGCCACTATGCCCGGTCCCTCTGTGCATTGTCTTTTTTTTTTTTTTTTTTTGAGATGGAGTTTCACTCTTGTTGCCCAGGCT
GGAGTGCAGTGGCGCGGTCTCGGCTCACCGCAACCTCCACCTCCCGGGTTCAAGTGATTCTCCTGCCTCAGCCTCCCAAGTAGCTGGGACTACA
GGTGCATGCCACCACACCCGCCTAATTTTTGTATTTTTAGTAGAGATGGGGTTTCTCCATGTTGGTCAGCCTGGTTTCGAACTCCCGACCTCAG
GTGATTCACCCTCCTCCGCCTCCCAAAGTGCTGGGATTACAGGCATGAGCCACCGCACCCAGCCCCTCTGTGCATTTTCTAAGAATGAACCTTG
TCTTGCATGGTTATAATACACTGATCAACTTCACTAAATTTAGCATTGATATAATACTTTTAGGTACTCATCTCGATTTCCATTTTGTCAACTA
ATTCAAACATGTCCTTTAGGGTATTTTTCCCCGCTGCAGTCCAGAATCCAGCCCAAGATCACATATTGCATCTAGTCATCATGTCTCTTTAATC
TCCTTTAATCTGGAACCATTTTGCAACCTTACTTTGTCTTTCATTACATTCGCATTTTAAAATAATTAATGTAGGCTCGGTGCAGTCGCTCACA
CCAGTAATCCCAGCACTTTGGGAGGCTGAGGCGGGTGAATCATCTGAGGTCAGGAGTTCGAGACCAGCCTGGCCAACATGGTGAAACCCCATCT
CTACTAAAAATACAGAAATTAACTGGGTGTGGCAGTGGACAACTGTAATCCCAGCTACTTGGGAGGCTGAGGCAGGAGAATCTCTTAAACCTGG
GAGGCAGAGGTTGCAGTGAGCCCAGACCGTGCCATTGCACTCCAGCCTGGGTGACAAGAGTGAAATTCCATCTCAAAAAATAATAATAATAATT
CATGTACCCCCTGCTTTTTAAACATAAAATGTTCCTCATTTGGGGTTTGTCTGATGTTTCCTCATGATTACGTTAACATTGCACATCTCCGAGC
AGACTTCTAAATATAGTTGGCTGTCCATGTCCATGGGTTCTGCATCCTGATTCCACCAACCGCAGCTCAGAAATATTCAGGAAAAGAAAAAAAG
TAAAAACAAATAGAAATAAAGATATGACAGAACAGCTATTTACATAGCATTTCTTTTGTATTAGATAGTATAAGCAATCTATAGGTGGTTTAAA
GTGTATGGGAGGATTGTATGCATTCTATGCAAAACGATGCCATTTTATATAAGGAACTTGAGCATCTGCAGATTTTGGTATCCAAGTGGGTCCT
GGAACCAGCCCCCACAGATGCCAAGGGACAATTGTAGCTGACTTGTCCTTCTCGGCTATCACATCCAGAGGGCGGCAGTGTCCCTCGTCCCCTC
ATTGGTGGTAGTAGTTTTGATTGCCCATTTGAGAGTGGCATCCAGTTTCTCCTCTTGCGAGGCTTTTAAAACTTATTTATTCCGTTTTTAAGAA
TGTTCCCCGGATACTTTAGGCAAATTAAGATGCAAAAAGTAAAACAGCACTTTGGGAGGCTAAGGCAGGTGGATCACCTGAGGTCAGGAGTTCG
AGACCAGCCTGGCCAACATGGTGGAACCCCATCTCTACTAAAAAGACAAAAATTAGCCAGGCGTGGTGGCGGGCCCCTGTAATCCCAGCTACTC
GGGGGGCTAAGGCAGGAGAATTACTTGAACCCAGGAGGCAGAGGTTGCAGTGGCCCGAGGTTGTGCCACTGCACTCCAGCCTGGGCAACAGAGT
GAGACTCAGTCTCAAAAAAAGAAAAAAGAAGTAAAACAATCTTACCTTTTCACTGCAATTGCATTTCCATGATGTGCCTTCTTGTTCCTGTTGG
TATTGGAGGAACAGTGCCTCCTGTGATTCAGGAGGTCCCTCAGGAGGCTCCCCATCCTGAGGCATGGTTAGGGCCCATAGTGTGGAGTGGCACA
AAGTGATGTCTGCTGTTGGATTCTTTCAGAACACGTATGACCGCTGCCCCATGGAGCTGGTCCGCTGCATCCGCCATATATTGTACAATGAACA
GACGTTGGTCCCAGAAGCCAACAATGTGAGTGTCCCATAGGGATGGGGAGGGCAGTCGGGAAGTCTTTTCTTACCCACCTCCCTCTGGACCCAC
CTTTGTCAAGGTGACTCAGGGTGCACTATTGGTGTCTCTTTAAAGAGAGCTTCATCCTAAGGGGCACAAAAGAAATAGGAGACTTGACTGAGTG
CAGCCCAGCACTTTGGGAGGCTGACGCACGCAGATTGCCTGAGCCCAGGAGTTCGAGACCACCCTGGGCAACATGATGAAACCCCCTCTCTACC
AAAAATACAAAAAAATTAGCTGGGCATGGTCGCATATGCCTGTAGTCCTGGCTGTTCGAAAACCTGAAGTGGGAAGATCCCTTGAGCCCAGGAG
GTAGAGGCTGCAGTGAGCCATGATCGCACCCCTGCACTCATGGGTGATGGAGTGAGACCCTGTCTCAAAAAAAAAAAAATGAAATAGAAGATGT
GCTCTCTGATCTTAACTGATTTATAACCTTGATGAGATTGCAACCACAAGACAATGTGAACAAGTGCAAAGTAATTCAACCTCAGCTGAATAAT
TTTTTAGTAAAGGCATGCTCATATTCACGTCAGAATACTTAGGAAAGACTTTTCCCTAGCCCCTCAATCAGGTGTCGAAGGAGTGGTCTGATCA
GGTCACTTACAGGGCTGGGTCCACAGAGACCTTGTTTATGCCTCCCCCATCACTTCACCCTGGGGTCTCCAGGATGCCTGCAAGAGGTTTGGCC
TCTTCCATGGTGGAAGCAAATGATTCCATCACGAGAATATCTTGAGTGAGGACACAGATGATGTGTGTTCACATGGCCCTGCTCCCCATGGCCT
CCCTAATGCTTAATGCCGTCCTTGCATTGGGTCAGTGAGTGGAAGACGAATCACTCCACCTCCTCATTAGTAGGAAAACCCAGGTGACACTGGA
CCAGGTTACGTTCTAGTTTCTCCAAAGGTAATTCAATGGACCTCGTTTGGAATACTCTGGTGGAGGTCAGATCTGAAATGGAAGCTTCTCCCAT
GCTTTGTGATCTGAGCCATGATCTGTCCGCTCACCTGTTTCTCACTTTTCCCACTCCACCCTGTGTCTCATGATGACGTTTGCTTTTCCTCCCG
ACTCAAAATTTACCTTTTGGGGTCTTACCCTGGTTGTAGGAGCTGGCTTTTCCTGGGGATTAAGGCCTCAGTCTTCCTCCCATTCGCACTGCCT
TGCACTGCCCCCCATATGTTCCCACGGTAGCTCTCCAGCTGGAAGCCTTGCTGATGCCATGTCCCAGAAACACCTCCAGATCAACCAGACGTTT
GAGGAGCTCCGACTGGTCACGCAGGACACAGAGAATGAGTTAAAAAAGCTGCAGCAGACTCAGGAGTACTTCATCATCCAGTACCAGGAGAGCC
TGAGGATCCAACGTCAGGCGCGGTGGAGGCACATTGTGCAACTTGAGGATTGGGCCTGGGGACTGGAAAGCAGCTCTGGTGGGGTTGGGAGAAA
GCACACTTTCCATTCGGAGGCAGCGACCTTTCTCTGAGTAGCAGGGACTTATTTGCATTGAAGACAGTGCTGAGAGGATGAGATTTAGGAAGGG
GAGATGACAGGACCCCCCGCTTAAGTGCATATCTCACTCAGGTCCCCACATCCAGGGAGCTTCTGAGCTGCCAGGGAAGACATTTCTTCTTTTG
AGAAGGAGCTCACAGTCTAAATAAATACTAGCAAACAATACTTTTCTATATAGTAGGCATATTATAAGTGGAGCTTTATTGAAATGATAAATAG
GAAATTATATAATTACATGTTTAAAAATTTTTCTGGCTGGGCACGGTGGCTCACACCTGTAATCCCAGCACTTTGGGAGGCTGAGGCAGGCGGA
TCACCTGAGGTCAGGAGTTCGAGACCAGCCTGGCCAACATGGTGAAACCCCGTCTCTACTAAAAATACAAAATTAGCTGGGCATCCCAGTGGCG
CATGCATGTAATCCCAGCTACTTGGGAGGCTGAGGCAAGAGAATCTCTTGAACCCGGGAGGCGGAGGTTGCAGGGAGCCGAGATCTCACCATTG
CACTCCAGCCTGGACAAAAAGAGCAAAATTCTGTCTCAAAAAAAAAAAAAAAAAATTCTAAGCTGGGAGTGGTTTTGCACACCTGTAATCCTGG
TGCTTTGGGAGGCCAGGGCAGGAGGATCACTTGAGGCCAGTAGTTTCAGACTAGCTTAGGCAACATAGTAAGACCCTATCTCTAAGGGGGAAAA
GAAACCTTTCTAACCAGGTACGTGTAAGTACTAAGGACCTGTATATGATTTCTAATGTTCTATGCAGTTATTCACAGAGGTCTTCCTGAAACAG
AGTACACTTAACGCCCCTTAGGTAGCCCTTATGGACAGAGCTTCCCTAGCCTGGTATAAATCCTGCTTAGTAGTTGGGGCACAGAGAGCTTCAG
TCTGTGGTGAGGCTGTGGAGCCCCACCAGCGCCCCCTTTTGACCCTGTAGCAGTTTGGCAGTTTGAGCTTTAATAGTTTCCTCTCTGCTTCCAT
GCCCAGCTCAGTCTCAGAGAAGCCTTGGCTCAACCACCCAGCCCCTCCAAACACACACACACACAGCACACACAGACAACACAGCACACACACA
CACCACACACATCACACACACAGCACACACACACACAGCACACACACCCCCCACAGCACACAGAGACACACAGTGCACACACACAGCACACACA
CACCACACACAGCACACACACAGACACACAGCACACACACACCACACCACACACACCACACCACACACAGCACACACACACCACACCACACACA
GCACACACACACCACACATAGCACACACACACACCACACATACACACCACACACACATAGACACACAGCACACACACACACACACAGCACATGC
TCCTCTAATTCCATGTATGTAGCTTCCATTTTATGTCTATAGTGATACTACTTATTTACTCTTTATCTTCTCCACTGGAATATAAATCTTTGAG
AAGGGACTATATCTTTTATCTCTGTACCCTGAGGCCAGCACAATGCCTGAAACATAACAGTTATTGAGTAAAGGTTGACAGGATGATTCTAGCC
TGTCTTCCTTTTTTATCTGAATCCATCCTAGACTGGCCCTAGAAGAAGGGCAGCTCCTTCAGAGAATGGAAACGGAAGATTTTGGGTGGCTATT
CCTACCCAAGTCCTTACACTGTCAACAGTATTTCTGATCCCGTGCCTGGCTTTTCTGTTTCCTGTGCATGGTGGCGGATTAGGTTTGGATTCAG
GTTGGGTTTGGATCTATCACGCAGTGTCTTCTCAGTCCCATTTGTCAAGTTCACTCAGCAGAAACACAGACTATTGATCTGCTTTTGCCAGGGA
AGGCTCAGCTGCCTCCAGTGGAGTAGGGAAATTGCTTCCCGTCTCCCTGGCCTCCTTCCCAAAAGCTTCTGCAAATTTCCAGGAGAGCCCTAAG
TGGGTCCCTTGCATACGAAGGCTGGGCCCAGGTGTTGGGATCACCACCACCCTCCCTGTGGCTGGGCAGGATTCCTGAGGTAGCCCTGCAGATA
CCTTGGATCTGTCCGTCCCTGGATGATCCTCTTCCTGCTCGATACCTGCAGTGAGATTGGAGCCATATTTCTGAGTTCTAGCTCTGGGCTGTTC
CTGGCTACATAGAGTTGCTTTTGTCTGTCCCAGCTTGTGCATCCCATGGGTCAGGGCTGGGGTCAGAGTGACCTGGCCCTCAGGGGCCAGCCAG
GAGCTCGACCAAGACATGCTGGTGCGCGCATCTTCTGACTCAGCTCAAGCAAGGACTCTGGGCTGTTGAGAAGGTGATGGGAAGGGATTAATAG
TCCCAGTGTGGTGGAGACGGGCTGTCGCTGGGAGGGTGGGGTGGGCCTGCGGTGGTGGTTGTAACTGTGGACATGTTTACTTTCTTAGCCTGGG
TTATTGATACACAGGTGCTCCTGTGTTCCACGTTCCCTGTGTCTTACCTATTTCATAATAATTTTTAAAAGGTAATGAGGCCTAACTTACTCCC
TGTCCCGCCATCAATGAGACTCCTCACAGATGGTGTGGAGGGAAGCCGCCTCCCTTCGGCCTCCCTTTCCTGAGAGAATCTTGGTGGCTCTGCA
TCCCCAGTGGCCCTGGACATGCTCTCCCTCTGCGGTCTGTCTGTCTGTCCGTGTTCCCTGGTTGGTTGGCTCGGTTCACAGTGACCTCACCTGG
ACAAACATCCTGCGCCCCTTCCAGCCTCTCAAGAATCTCATCCTCCCCTGAGGAGGGATTGCTGTGCTCAGGGACTAGACAGAGCCGCCGGGGC
TGGGTTTCCCTGAAGAGGCCTTGCTGCGGGAGGGATGGGGCCCAGCAGCTGCTTCTCTCTCTCACCTCTTCTCTCTGTCCTGTTCCCCGTTAAC
CAAGAAGCACGAACCTCACACAGAGCTCACCCATGTCAGGCAGCTTTCTGGCATCTTCCATGTCCTCATGTATTTAATCTTAATGCACCCCACT
GACGCAGGTGCCGACAATACTCCCGTTTTACACGTGGGGAAGCCAAGGCACAGGAAAGGAAAGCGATTTGCCCAGGTTCACCTGCAGTCAAGGG
CATGGGCACACTTACACCCCAGACAGCCTGGACCCATGCTGGGCCGCGAGAAGAGGGCTGGCAGCCCTGTGAGGCAGGCGGGCAGGAGGCAGGC
AGGCCTCCTCCCCAGCTGCCCCAGCACCCGTGTGCCCCCACACGGGACCGCTCACAGTCAGGAGGCTGGTGAGCAGGGCCCAGAGGCGCCTCCT
GAGGCGCCATTCATCTTGGCCCCCCTGGCTGTCAGGAACCCCGACTTGCTCTTGATGCAGTGTCTGAGCCTGGGAGGGTCTCGCTCCAGAACAG
GTGAGTGGGCTTCTCTAGGCCTCCTGTTGGACACTAGGAGGTGATGGTCATGGTTTCCTCTTCTCTCCTCTAGCTCAGTTTGCCCAGCTGGCCC
AGCTCACCCCCCAGGAGCGTCTGAGCCGGGAGACGGCCCTCCAGCAGAAGCAGGTGTCTCTGGAGGCCTGGTTGCAGCGTGAGGCACAGACACT
GCAGCAGTACCGCGTGGTGAGTGGGGTCCTGGGCCTCTCCTGGGCGTGGGTGCCATGAAGTCAGTCTCTGGGGACCCGAGGGAGGGCTGGGACC
AGCATGAGAGCAGAACCTGGGAGGGCAGGAGGCCTTTTTTCCTGGGGGCCTTGCGAGGCAGAGCAGCTTGGGGAGAGGGAACGGCCTGGGCCCT
GCCCTGCCATTTCCCAGCGAGGCCCTGCGGTGTTCTCTGGGAGCCCAGAAGGGGCTGCTCTCCTCCCTTCCCTCAGGAGCTGGCCGAGAAGCAC
CAGAAGACCCTGCAGCTGCTGCGGAAGCAGCAGACCATCATCCTGGATGACGAGCTGATCCAGTGGAAGCGGCGGCAGCAGCTGGCCGGGAACG
GCGGGCCCCCCGAGGGCAGCCTGGACGTGCTACAGTCCTGGTAATGGTGTGGGGCGGCCAGCGGGCAGGGCAGGAGGGGCTGGTGGGGATCCCG
GCTGCTTCTGCGTCCTGTGCTGGCTCCTGCAGCAGGCCCCCTCCATCCTGGGACAGCTCTTGTTTCTCCAGGGAGCCTGGTTCCTCAATCAGAC
TTTGGTCCCCATCCTGTGCACCTCCCCCAGGAAGGGGGCTGCTGTCCTGGGGGTGGGATGGGGCTCGGGTGTGTGGGGTGATGCTTGGGCTGTT
TGGGCCTAGTCAGGGTCCCCCCTCCTGTGTACGTCTCTAATTCTGGGAGGCAGGGAGCTCTGCTCTTCCCATGGGTGGCAAGTGTGGCGAAAGC
ACAGAGCCTTCCTCGGCCAACGGGAGCTGTGTCTTCGGGCCTGGCCTCTGTGCGGACCAGCCATTGTCCTCCTGTTGGCCTTGCCGCTCTCGTG
CAGGTGTGAGAAGTTGGCCGAGATCATCTGGCAGAACCGGCAGCAGATCCGCAGGGCTGAGCACCTCTGCCAGCAGCTGCCCATCCCCGGCCCA
GTGGAGGAGATGCTGGCCGAGGTCAACGCCACCATCACGGACATTATCTCAGCCCTGGTGACCAGGTGACTGCTGCCTGTTTGCCATGCCCAGG
AGCTTGGGGCAGCTCCTGCCTGCGTGGGGGGAGCCGCAGGTGCCTTCCAGACCAGCAGATCCACTTCCTGCCTCTCATCCCTCCCAACTCCATC
TCCAGTTGCTGTGGCCCTTGCCCAGTTTCTCCTGTGCACACTGCAAGAGATGCCCTTCGGCTGCAGCCCATGCCAGCTTCTGTCTTATCTCACT
CCCCTCTCCATCCTCTCCCTGGACTCTCACGGCTTCCCCAGGAACAGAGGCTGTGCCCGAGCTCTTCACCTCCTGAGCCCCTCGGGAGGCAGCC
CCACCCCCACCACAGACGGACTGAGAGCCCTTTCCCCTGCACCAGCCCCTCATCATGCATCTGTCCCTGTGTCCCCTGCAGCACGTTCATCATT
GAGAAGCAGCCTCCTCAGGTCCTGAAGACCCAGACCAAGTTTGCAGCCACTGTGCGCCTGCTGGTGGGCGGGAAGCTGAACGTGCACATGAACC
CCCCCCAGGTGAAGGCCACCATCATCAGTGAGCAGCAGGCCAAGTCTCTGCTCAAGAACGAGAACACCCGCAAGTAATTGTGCAGCTTCCTCTC
ATTCCCTGCTACTTGTCTCATGTCCTGGCAACAGGAAAAAAAGAATTCTGCCTCCTGTGTCAGATCCCTGTTTGCCCTTCTGGCCTCTTCTGGG
CATCAGCAAAGGAATATAAGGAAGTTCTTGGGCCTGGTGTGGTGGCTCACACCTGTAATCCAAGCACTTTAAGAGGCCGAGGTGGGCAGATCAC
CTGAGGTCAGGAGTTCAAGACCAGCCTGGCCAACATGGTGAAACCCTGTCTCTACTAAAAATACAAAAAATTAGCCGGGCGTGGTGGCAGGCAC
CTGTAATCCCAGCCACTAGAGAGCCTGAGGCAGGAGAATCCCTTGAACCTGGGAGGCAGAGATTGCAGTGAGCTGAGATTGCAGTGAGCTGAGA
TCACGCCACTGCACTCCAGCCTCGGCAACAAGAGCAAAACTCCGTCACAAAAAAAAAAAAAAAAGTTCTCTTACGAACTGTTTTCTGTGAAGAT
AGTTTGATCTTGTTTCATTTTGTAGAGATACGTCCGAGAAGATTACATGTATGTGTTATGTAGCTAACATTTCCTCTAAATGACGTACATTTTT
AGCAAACTTCTCTATTTCCTGCTACCCCAAATTATATTATTTACTCCGCATGTCCTGAGACCCTGGCATGGGTTTGGAGCTGGTCTCTCTCTGA
TTTGCAGTGATTACAGTGGCGACATCTTGAACAACTGCTGCCTCATGCAGTACCACCAAGCCACAGGCACCCTTAGTGCCCACTTCAGGAATAT
GGTGAGGGTGGAAGAAGAGGAAGAATGAATTTTTCCCTGGTCTTTGAGGGGAACAACTTATATCTTACGTTTCATCTTATGTTTCTTCTTTGTA
GTCCCTGAAACGAATTAAGAGGTCACACCGTCCTGGGGCAGAGTCGGTGACAGAAGAAAAATTTACAATCCTGTTTGAATCCCAGTTCACTGTT
GGTGGAAATGAGCTGCTTTTTCAAGTCAAGGTAAAGCCTTCCCTCAGCTCTGCGTGTGCGTGTGCGTGTGTGTGTGTGGTGTACTTTATGTTAC
AAAATATTTTTTTTTTATCACATAGCATCTTCTTCTTTTTGACTGTTGGTAAACTGAAAATGGACTGACCTCACCCTGAGAACTGTTTCACTTA
GGTTCTCTTAAGACATGAACAGAGGCCAAGCACAGTGGCTCATGCTTGTAATCCCAGCACTTTGGTAGGTTGAGGCAGTCAGGTCACTTGAGGT
CAAGAGTTCAAGACCAGCCTGGCTAACACAGTGAAACCCCATCTCTACTAAAAAGTACAAAAATTAGCCAGGCGTGGTGGCACGTGCCTATAAT
CCCAGCTACTCAGGAGAATCACTTGAACCTGGGAGGCTGAGGTTGTAATGAACCGAGATTGTGCCACTGCACTCCAGCCTGGGTGAAAGAGTGA
GACCCTGTCTCAAAAAAAAAAAAAAAAGACATGAACAAGCAAGCCCCAGTGCAGTCGCTCACATCTGTAATCCTAACACTTTGGGAGGCCAAGG
CAGGAGGATTGCTTGAGTTCAGGAGTTCCAGACCAGCCTGGAGCTGGTTGTGAGACCCCGTCTCAACAACAACAACAAATTAAAAAATAAAAAA
TAAAACATGAACAAACAATAATGAACTGAACTAGCTGGAGAGGTAGACTACAAAATGGATATGAGAAACATTACTTGGGATGAATTTGAGTAAA
GGTTGTGGTAAGTTTTAAATTTGTTATTTGTATTTTCTTCCCAGAAATATCTCCAATAGTCTTTTCTCTCTCCTGTTCTCCATGTAACTTTGAG
AAACTTTATCCTTCAGAAATATCTAAGCAACATTGCTTGTAAAATATTTAAAATTTCTAAGATTGTGCCAGTATGAAAAGTCATATTATTCCTG
GGGCCATTTAGATTCTGTGTCTGAGAGGAACATTAACTGAAACTTGCAAAATAAAAGTGTTGTTATAATAAGAAAAAAAAAAAAGAGAGAAGGA
GAAGAACTTGAGGCTCGTGGGCGCTCAGCCTTCTCTTGTGTCTTTTTAGACCCTGTCCCTGCCAGTGGTGGTGATCGTTCATGGCAGCCAGGAC
AACAATCCGACGGCCACTGTTCTCTGGGACAATGCTTTTGCAGAGCCTGTGAGTGTATTCCTCGGCCATCTGGGTCCCAAAATCAATGCCGGTG
TCATGAATCTCATTTATGTATTATCCTTTTAAAAAGCATAGGAAAAGGCCGGGTGCAGTGACTCACACTTGTAATCCCAGCACTTTGGGAGGCC
GAGGCGGTTGGATCACCTGAGGTCAGGAGTTCGAGACCAGCCTGGCCAACATAGCAAAATCCTGTTTCTATTAAAAAATACCGAAAAATTAGCT
GGGTGTGGTGGCACATGCCTGTAGTCCCAGCTACTTGGGAGGCTGAGGCACGACAATCACTTGAACCCGAGCGGCAGAGGTTGCAGTGAGCCGA
GATCGCACCACTGCACTCCAGCCTGGGTGACAGAGTGAGACTCCATCTCAATAATAAAAAAAAAGCATAGGAAAAAAGACGCTGTTTTCTTTAG
TGGGAGGCAGAATAGAAAGAATGTGGAAAGTGGAAAGAACATGGGCTTGACATCGGGCCAGGGTTTGAACTGACACTCCACCATTTCCTCACTC
CATGACCACATGGGCAGTTCACTTTACCTCTCTGAGCCTGAGTTTCCAGCAAGTGTCTGCAGCACAGGGATACTCTTGCTCTACAGCATTGTTA
GGAAGATTAAATTAGATAACATAGAAAATGCTTGCCACACAGTCAGTACTCAGTAAATATTATTTTGAATCCTTGGGTGAAACTATGAATGGGA
TTTGGGACTCCTAGGTTCACTCCAGAGGTTAGATCTCTCCAGAGGCTTACTTTAGCATAGAAGTTGCTTCATACCCTCTTCCTTTCAATAAATG
AAGATGCTGTTAAATGTCTTTTCCAAATTTTAGTTTCTGTGATTCATTCTAGGTCTCATGAAGAATGAGATACTTTGCCTCAAGGAAGATATAA
TTTGGTGGATTTATGCACCCAAACGCTATCTGAATCCCACTAGCATGCTGCTCGATGAGCATTTTAAAGATCTCATAGGCTGGGTGCGGTGGCT
CATGCCTATAATCCCAGCACTCCAGGAGGCCAAGGCAGGCAGATCCCTTGAGCTCCAGACTAGCCTAGGCAGCATAGCAAAATCCTGTCTCTAC
AAAAAATACCAAAAAATTAGCCAGGCATGGTACACCAGCCTCTAGTCCCAGCTACTTGGGGGGGGCTGAGGCGGGAGGATCGCCTGAGCCCAGG
AGGTCCAGGCTGCAGTGAGCCAAGATTGTGCCACTGTACTCCAGCCTGGGTGACAAAGCGACACCCTGTCTCAAAGAAAAAAATTTTTTTAGTA
GGCAAAGGTCATTTGTTACATATTTCCAATAGAGATTAGTCCATAAAAGCATGATAAAAGGGTTATCATTTGCGACATAACAGCATGTCCTTCT
CTAACTATATCCAACAAACCTTGATTATGTTTTGTTTTGTGGCTGTTAGAATATAGGATTTGACTGTTAGTTCAACAGCTCATTTACAAAACAG
CATCCACAGCATGGGTTACCTTCCAGTTGTGTGTAAAGAAGGTGAAATGGAACCTTCTGGCTCACGTGGAGAGGCTTAACGTTTCCCAACACTC
CTCTTTAGAGAAAAAGTATTTTACTGCAAAGGTGAGATTTTTAAGAGATTTACCATACTTCACTTACAAACTCTGAATCAGAAGCTCCTTTTTG
AAACTGTCTGTCTGCCTCTTGTCCTGATAAGCCTCCTAGATAAGATTGCCACATCTCTTGTTTCCTTCCCTGCCTGTCCACAGATCTCACTCTC
TGTGTACCTTTGGCATCTCCTGCACCATGTAATTACTCAAGTATCTTGTCTAAATAAATAAGCATTTTTAACATTCTCAGCTATGTTAATGACT
ACTTACATCTTATGCTATTTTTTTTTTTTTAATTTTTTTGAGACAGAGTCTTGCTCTGTCACCCAGGCTGGAGTACAGTGGCATTATCTCGGCT
CACTGCAGCTTCTGCCTTCTGCATTCAAGCGATTCTCCTGCCTCAGCCTCCCGAGAAGCTGGGATTACAGGTGCATCCCACCACGCCCAATTAA
TTTTTTATATTTTTAGTAGAGACCAGGTCTCACCATGTTGGCCAGGCTGGTCTCGAATTCTTGACCTCAAGTGATCCACCCACCTCGGCCTCCC
AAAGTGCTGGGATTATAGGCATGAGCCACTGCACCCAGCCGACCTTATGCTATGTTAAAAAAAAGACTTTCAGCTGGGCACGGTGGCTCACACC
TGTAATCCCAGCACTTTGGGAGGCCGAGGCCGGTGGATCATTTGAGGTCAGGAATTCGAGACCACCTTGGCCAACATGGTGAGACTCTCATCTC
TACTAAAAATACAAAAATTAGCTGCGCCTGCTGGTGCGTGCCTATGATCCCAGCTACTCGGGAGGCTCAGGCAGCAGAATTGCTTGAACCTGGG
AGGCAGAGGTTGTAGTGACCTGAGATGGTGCCACTGCACTCCAGCCTGGGCAACACAGTGAGACTCTGTCTCAAAAAAATAAAAAATAAAAAAT
AAATAATAAAGACTTGTGGCCAGGCACAGTGGTTTATGCCTGCAATCCCAGCACTTTGGGAGGCCAAGGCAAGCGGATCTCTTGAGCCCAGGAA
TTTGAGGCCAGCCTTGTCAACATAGCAAAACCCTGTCTCTACAAAAAACACACAAATTAGCCAGGCATGGTGGTGCACGCCTGTAGTCCCAGCT
GTTTGGGAGGCTGAGGTAGGATAATTACTTGAGCTAAGGAGGCAGAAGTTGCAATGAGCCAAGATTGGGCCACTGTACTCCAGCCTGGATGACA
GAGCGAGACCTTACCTAAAAAAAAAAATAATTGTGGAAATTTATTCTCCATATATATTTGCCTATGTGTCCTGTGGGTCAAATAACATAAGAAC
ATTGCAGCATTGTTAGTAATAGCTAAAGATGAGGCTGTAACACTGATGCCCATCTATGGGGGTCTGGTGAAATTTCTTTATGTGCTGATGGGAG
GTCTCCCAGATAGAGGATTAAGTCAAAAGAGGAAGATGCAGAACATGTGGATTTTGTCCTGTCATTTGTGAAGAAAAGGAAAAGGTATATGTCA
TTGCTGGCATGCATAGAATATCTTTGGTGGGATACACAAGAAACTGTGTTAGGTGCCTTTAAACAAAAGAACTGGGTTGCTGGCAGACAGGGAT
AGGGAGTGACTTCACTGTGTAGCCGTCTGTGCTTTTTGAATTTTAAATCATGTGAAAATCACCTATTGTAAAAAGTGTTTGTAACAAAATAAAA
TGGAGTACTATGGCTGAACGCGTTCAAAAGCAGTTTATTAAAAGTTAATCTTCTAACCTATTTCTCAATAAAGCCATCCAACTCAAAATTTCCA
CTCTTCCATACCAAGTTGTTTTACTTTGAGCTAGAATTCTTGGCAGAAGGAGTCGAGGGCAATGATTCCACGTGTGTACACACATGCCGACACG
TGTGCACACATACGCACACTCTCTCTGTTTGTACCTAGAGGACCAGTCTTTCAGATTTCTAAATTCCCAAGGTGTTTACAATCTAAGAGCCAGA
CCTTGGTTATGTTTTGGTTTCTCGCCCTTAGAACATAGGATTTGACTGTTAGTTCACCACCTCATTTACAAAACAGCATGGATAGCATGGGTTA
CCTTCTAGTTGTGTGTAAACAAGGTGAAACGGAACCTTCTGAATTTCACAGAACCGTGTACCCCAGCAGAGTCTGAATTTATCCTCAGGCCCTG
CAAGACAAATGTGTGTAACCACTCCCAGCCATCAGCGTTTTTCTTTTGTGGCTTGAGGGAATAAATCATGCAACTGTTTTCTCATCAGATTCTG
GCCTCTCTCCCTCTCAGGGCAGGGTGCCATTTGCCGTGCCTGACAAAGTGCTGTGGCCACAGCTGTGTGAGGCGCTCAACATGAAATTCAAGGC
CGAAGTGCAGAGCAACCGGGGCCTGACCAAGGAGAACCTCGTGTTCCTGGCGCAGAAACTGTTCAACAACAGCAGCAGCCACCTGGAGGACTAC
AGTGGCCTGTCTGTGTCCTCGTCCCAGTTCAACAGGGTGAGGAGCCCAGCTGCCAGCCGCTGTTAGATCAGTCCTTCCCAACCAGATGCTCTCA
GGAGTCTCCCTGCCCTGGGCCCTTATTCTTCATGTCTCTAATAAAATGTACCCAAAGTAATAGAACCTTCTGACTAGATGGACAACTTGAGAGT
TACCCAGGTCACGTGTAGAAAATTACATCTTTGCATATTTTAAATAAGTTGACCTTTGTCTACAGTTAATGCATTTTCTTCCTTTGTAAAGGAA
ATAGAGCAAAGCAGATGTTAACATAGCTCATGAGAAGCAAAGCTTTTGAGGGGATGCGAACTCTGGGCCTCTCTCCCCTTTACTCTCTTATGTT
CCCCATCTGTAATGCCAGATCAGGCTCCTATGGGACCCTCAACCCACAAAGAGGGATGCTGATGAAAGAAACTCCTCCTCTACCATCTGCTAAT
TCAGACGTCACTTTCATTTTATTTTTATTCATTTTTTTTTTTTGAGACACAGTTTCGCTCTTGTTGCCCAGGCTGGACTGCAATGGCACGATCT
TGGCTCACCGCAACCGCCGCCTCCTGGTTTCAAGCGATTCTCCTGCCTCAGCCTCCCGAGTAGCTGGGATTACAGGCATGCGGCACCACGCCCC
GCAATTTTGTATTTTTAGTGGAGACGGGGTTTCTCCATGTTGGTCAGGCTGGTCTCGAACTCCCGACCTCAGGTGATCTGCCCGCCTCGGCCTC
CCAAAGTGCTCGGATTACAGGCGTGAGTCCACTGTGCCCACCCTATTTATTTTTGTTTATTTATTTATTTTTGAGATGCTGTCTCGCTCTGTCA
CAAGCAGTGCAGTGGTACATTCTGGGCTCACTGCAACCTCCGTCTCCCAGATTCAAGTGATTCTCCTGTCTCAGCCTCCTGAGTAGCCGGGATT
ACAGGCACCCGCCACCATGTCCAGCCAATTTTTGTATTTTTAGTAGAGACGGGGTTTCACCATGTTGGCCAGGATGGTCTCAAACTCCTGACCT
CAAGTGATCTGCCTACCTCAGCCTCCCAAAGTGCTGGGATTACAGACGTGAGCCACCATGCCCGGCTATCACCTTGATTTGAATTTAATTTTTG
TTTCTTTTCCTACACCCCCCACCCCCAAGGTGTTTTAAATGTTTAATTTGGAGCCTAACAACGTGCATTTCTCAGAAGCTCCCAGGTGACACTG
ATGCTTCTGGTCACAGACCACACATCGAAACTAGCAAGGCACGGGTCAGCCCAGTCCCAGGTGAAAGTGTCTGTAGCAGGAGCCCACTGGGTGC
TGGTAACTGCAGTTTGGTATTTTCCCCTTCTTCCCTCTTTTCCTCTCCATGGGGCCATTAGGTAAAACTCACGTAGGCCGCGATATTTGTATGC
CTCTGACAAGCGTAGATGTTTGTTTCCCATTTAATTTTTCCAATTAAATATGTGTATAATATTCCAAGTGTTACTCTGGTGTTCTTATGTTCAC
TGTTGTATCTCCAACCACGACAATTTACCAGGACGGAATTACACTTTCTCCCAATGGTTTGACGGTGTGATGGAAGTGTTAAAAAAACATCTCA
AGCCTCATTGGAATGATGGGTGAGAATCATTATTTCTTAAGGCGCCGACAGAGTCTGAAGGTCTTCTCTCTGGCATCGTAAGTCACACTCTGCT
TCTGTCCTTTGTCCTTGGTGATCCAGGGCCATTTTGGGGTTTGTAAACAAGCAACAGGCCCATGACCTACTCATTAACAAGCCAGATGGGACCT
TCCTCCTGAGATTCAGTGACTCACAAATTCGCGGCATCACCATTGCTTGGAAGTTTCATTCTCGTGAGTCCCCCTCCCTTCTTATGTCCAAAGT
TAGCTGCTTTCGTTACAAAATTATTTTAACAAATAATTTAGTGGGTACTTACTATTTGTTGAGGTCAGTACTAATTATGGGAAACATAAATGTA
TAGCCATGACATACTCATAATAAGGCAGCCTATGAAAAATACTATTATGGGAAACACAATTGCTAATTTCGTTATACATGAAAGTATATGGCAG
CATGGTTACACATGAACATTTAACCATGACATGGCTACCTATGATACAAGAGTCCGTGCAGAATCTCAGTTGCTTCCCTCTTAAAATGTTTGCC
TTATTGTACTACTCTGCATAAAGCTTATTTCAGTGAAGAATTTGATGATTTGGAGTTCTTACAGTAGTAAAAATATTCCTTTATCCTAATTAAC
ATATGGATATTGCCATCAACCATTTCTACCCAAGATGTTAGTTCTTTTCTTTTTTTGAAACAGGGTCTCACTCTTTTGCCCGGGGTGGAGTGCA
GCGGCACAAACATGGCTCACTGCAGCCTTGACCTCCTGGCCTCAAGCAGTCCTCCTCCCTTAGCCTCCCGATTAGCTGGGACCACAGACGTGCA
CCACCACACCCATCTAATTTTTAAATTTTTTGTATGTTGCCCAGGCTGGTCTCGAACTCCTGGGCTCAAACAATCCCCCACTTTGGCTTCCCAA
AGTATTGGGATTACGGGCTTGAGCCACTGCACCAGGGCATCAGGAAAGTTAGTTCTCTCCTCTGACCCTCACAATAAGGGTAGCTTGCTGGTTC
ATTTTCTGTGAATTAAAGTTTTTAATAACTTTTGGCTGGGTGCGGTGGCTCATGCCTGTAATCCCAGCACTTTGGGAGCCTCAGGCAGGAGGAT
CTCTTGAGGCCAGGAGTTCAAGCCCAGCTTGGGCAACATAGTAAGACCCTGTCTCTAAGTAAATAAATAAATAAATAAGTTAATTAGGTGGGCA
TGCTGGTGCTCATGGTGTGCGCCTGTAGTCCCAGCTACTCTGGAGGCTGAGGTGGGATGATCACTTGACCCTGGGAGTTCAAGGTTACAGTGAG
TCATGATCACATCACTGTACTCCAGCCTGGGCAACAGAGTAAGACCCTGTCTCTTAAAAGAAAAAAAAAAAAAGGCTGGGTGCGGTGGCTCACG
CCTGTAATCCCAGCACTTTGGCAGGCCAAGGCAGGCGGATCATGAGCTCAGGAGATCGAGACCATCCTCGCCATCACAGTGAAACCCCCGTCTC
TACTAAAAACACAAAAAAATTAGCCGGGTGTAGTTGTGGGCACCTGTAGTCCCAGCTACTTCCGAGGCTGAGGCAGGAGAATGGCGTGAACCCG
GGAGGCGGAGCTTGCAGTGAGCCGAGATCGCCCCACTGCACTCCACCCTCGGCAACAGAGCAAGACTCCATCTCGAAAAAAAAAAAATTCATCA
CTTTTAATAGCTCTTATGCTTTCTCTGGTTGTGGGCATGCTTCCTAGCTTTTATATATCTTTGTATGGGAAATCAGGGATTGGGGGCCAGTAAA
AACTGTTTCTTCTACTGACCCCTAGAATACTGTTTGAACTTGAAACGTCTGAGATCATTGGATCTCTTGGGAAGTGATTTTTGTATTACCTGCT
TATCTACCCATCGCTTTTATTTTTATTTATTTATTTATTTATTTATTTTTGAGATGGGGTCTCTGTCACCCAGGCTGGAGTGCAGTGTCATGAT
CTCAGCTCACTGCAACCTCCACCTCCCAGCTTCAAGCCATTCTCCTACCTCAGCATAGTACCTGGGACTACGGATGAGTGCCACCACACTTGGC
TGATTTTTGTATTTTTAGTAGAGACAGGGTTCATCATGTTAGCCAGGCTGGTCTTGAACTCCTGACCTCAGGTGATCCACCTGCCTAGGCCTCC
AAAAGTGTGGGATTACAGGCATGAGCCAACATGCCTCGCCCCTACCCATGGCTTTTAAAACTATTTCAGGCCGCGCACGGTGGCTCACGCCTGT
AATCCCAGCACTTTGGGAGGCTGACGTGGGTGGATCATGAGGTCAGGAGATCAAGACCATCCTGGCTGACATAGGGAAACTCCATCTCTACTAA
AAATACAAAATTAGCCAGGTGTGGTGGCGCGTGCCTGTAATCCCAGCTACTTGCCAGGCTGAGGCAGGAGAATCGCTTGAACCAGGGAGTTGGA
GGTTGCAGTGAGCCAAGATCGCACCACTGCACTCCAACCTGGTAACAGAGTGAGACTCCGTCTCAAAATAAGTAAGTAAGTAAGTAAATAAATA
AAAGTATTTCATCTATAACCCATGGTTATTTTTAAATGGAGATTTCTATTGGAGCCATTATAATGGCAAGCTTGAATTTATAGTATGTTGGGGT
TTTAAGATTTCCTAATTCAGAAATCATGTTTAGAATGTGATTGTTCTGTTTATTGATCTAGAGGAAAGAATGTTTTGGAATCTGATGCCTTTTA
CCACCAGAGACTTCTCCATTCGGTCCCTAGCCGACCGCTTGGGAGACTTGAATTACCTTATCTACGTGTTTCCTGATCGGCCAAAAGATGAAGT
ATACTCCAAATACTACACACCAGTTCCCTGCGAGTCTGCTACTGGTAACAATGTTCGCATTCTGATTTGATTTTGTTGTGTGTGTGTGTGTGTG
TGTCTGTGTGTGTGTCTGTGCATACCTGCCTGTGTTATCTCTCTTCTCTGAAAACCCACACAATTACCATTCAGTGAGAGCAGTTTGAGCATTT
TCCAGGGCAGATGTAAACCTTGGGCTGGATTCTTCAGTCATACAGAAAACACATCTACCACTAACCCCAAATATCAAATTGAAGAAAACAAATT
CTTTTTAATACAAGCTTAGATCAAACAAAATTAGGTAAAATTTTGTTTTTCATGACAGAGATGGTTTTATTGCTTTCTGAGTTTAGAAGTATTA
CATATTTATTATAAAATTTTCAGAAGACACATAAAGGCATAAAAAAGAAAACAGGCTGGGTACGGTGGGTCATGCCTGTAATCCCAGAACTTTG
GGAGGCCAAGGCAGGCGGATCATTTGAGGTCAGGAGTTCCACACCAGCCTGGCCAACATGGTGAAACCCTATCTCTACAAAAAATACAAAAATT
AGGTGTGGTGGCAGGCACTTGTAATCGCAGGTACTCGGGAGGCTGAGGCATGAGAATCACTTGAACCCAGGAGGTGGAGATTGCAGTGAGCTGA
GACCACCCCACCACACTCCAGCCTGGGCAATAGGGTGAGACTCAGTCTCAAAAAAAAAAAAAAAAGGAAGGTCGGGCGTGGTGGCTCACACCTA
TAATCCCAGCACTTTGGGAGGCTGAGGCAGGCAGATCACCTGAGGTCGGGAGTTCAAGACCAGCCTGACCAACGTGGAGAAACCCCACCTCTAC
TGAAAATACAAAATTAGCCTGGCATGGTGGCGCATGCCTGTAATCCCAGCTACTCGGGAAGGCTGAGGCAGGAGAATTGCTTGAACCCGAGAGG
TGGAAGTTGTGGTGAGCTGAAATCGTGCCATTGCACTCCAGCCTCGGCAACAAGAGTGAAACTCTGTCTCAAAAACAAAAGAAAAGAAAACAAA
AAAACAGATACCACACAACATCTCTCATCTAGAGATTAACCTCTATGGATGATTTAGTGACTATTCTTGCACTCTATATATAGATATGTATTAT
ACATTGCATCACCCGTTGCTTGAACTTCCTGTGTGGAGGTTATCTAGCAGCAGAACGAAGACCATAAACAAGGAAACATATTCAGGCCGGGCGC
GGTGGCTCATGCCTGTAATCCCAGACTTTTGGGAGGCCGAGGCAGGCATATCACCTGAGGTCAGGAGTTTGAAACCAGCCTGGCCAACATGGTG
AAACCCCATCTCTACTAAAAATACAAAAAGTAGTCAGGTGTGGTGGTGGGCGCCTGTAATTCCAGCTACTTGGGAGACTGAGGCAGGAGAATCG
CTTGAACCAGGGAGGCAGGAGAATTGCTTGAACCAGGGAGGCAGAAGTTGCAGTGAGCCGAGACTATGCCACTGCATTCCAGTCTGGTGACAGA
GCGAGACTCCATCTCAAAAACAAACAAAACACAAATATATTAATTTAGTGATGGGCGCCCTGAAGACAAATAAAGCAAGGTAGAGGGATAGAGA
AGTGGCAGGGAGGAGAGTGGAGGTGTTATTTTACTAGAGTGGTCAAGGAGGGTTTCTCTGAGGACATGTTTGTTTTTTTTGTTGTTGTTTTGTT
TGTTTGTTTGTTTGAGATGGGGTCTCACTTTGTTGCCCAGGCTCGAGTACATTGCTCACTGCAGTCTCAAACTGCTAGACTCAAGGGATCCTCC
CACCTCAGCCTCCCACATAGTTGGGACTACAGGCATGCACCACCAATCCTCGTTAATTATTTTATTTTTATAGATATGGGGTCTTGCTGTGTTT
CCCAGACTGGTCTCAAATTCCTGGGCTCAAGCAATGTTCCTTCCTCAGTCCCCCAAGGTTCTGGGATTATAGGCATGAGCCACTCTACCTAGCC
AGGATGTGATGTTTGAAAAGACCTGAATGAAGTGAGGAAGCTAGCCATACAAAGATCTAGAGAAAAACATTGTATGCCAAGAGAACAAGTACAA
AAATCCTGGGTTGAGAATGGCCATGTCTGGAAAGCCTCAGGAGGCCCAGGGAGGCTGGAGCCTCTTGAGCAGGGAAGATAAGTGGTAGGAACTG
AGGTCACCACACTCCAGCCTTGGAGTTCAGGGTGAAAGGTTGGAGTCTAGACCATATCATATGTAATTTTTTGTGACTTTTTTTTTTTACTTGG
AAATATATCCTAGGTAGCTGGGCATGGTGGCTCATGCCTGTAATCCCAACACTTTGGGAGGCCAAGGCAGGTGGATCACTTGAGGTCAGGAGTT
TGAGACCAGCCTGGCCAACATGGTGAAACCCCATCTCTACTAAAAAACATACAAAAATTAGCCGGGCATGGTGGCAGGTACCTGTAATCCCACC
TACTCAGGAGGCTGAGGCAACAGAATCACTTGAACCCGGGAGGCGGAGCTTCCAGTGAGCCAAGATCACACCACTGCACTCCAGCCTGGGCAAC
AGAGCGAGACTCTGCCTCAAAAAAAAGAAATATATCCTATGCAGAGTTACAGCTCAGTAAATGTAATCTTCCAACCTCATTTTGATGACTGCAT
ACAATCCCACTGTATGGTGAGTTACATGTTGGTTATTTAAGATACTTATAATTTGGGCCTGGGCACAGTGGCTCATGCCTGTAATTCCAGCACA
TTAGAAGGCGGAGGAGGAAGGATTGCTTGAGCCTAGGAGTTTGAGACCAGCCTGGGCAACATAGTGAGACTCCATCTCTACAAAAAAGAAAAAG
TTAGCTGCGCTTGCTGGCGCATGCCTGTAGTCCCAGCTACTCAGAAGGCAGAGGCTGGAACATTGGTTGAGCCCAGGAATTTGAGGCTGCAATG
AGCTATGATTGTGCCATTGCACTGTAGCCTATGTGACAGAGTAAGACCCTGTCTCAGAAAAAAATAAAATCCTATTTCTGGCAGCATTTCTTTG
TTTTTAACTTCTTAGCCAATCTATAAAATACTCTGTACACTGTAAAGCACAAAAAACATGTTATGAAAAGGTCGCTCCTGACACTTGAAGCCCT
AGAAGAAGATTAGGGTAATAAGCAATTGGTGAACCCTGCAGCGTTTCACCCTCTTGGGCTACTTAAATGACAAGCTCCTTGTCCTATAATCATA
GTGTGATCGTCCTTGCCTAGTATAATTAACTTTCTACTGATTCCCATATTCACGTACCCAGAAACAAGACTTCATTCTCCCATGTCAGATAATC
ACATTCTTACCACCTGCTTACCTGGATTTCCATAGTCAGCCTTCTCAAAAGGTAACTGTGGTTGACCAGATCACGTGCAGGTTTATCTGCTCAT
CTGCCACATCCCAGTGGGGATTCTGTGGGAAGCAAAGGACACATCGCATTCTTGGCACCAACAGCACTCACTGGGACTAGTGACATCAAAGTAC
CCCAAATGCACAAACACCAGGCGTGAAGGACCGTGCAGGTGCTGGCAAAAGTAGCCTTCCCTTTCCTGAAAGACTAGACACTCACAGTTAGAGG
AACCTCAGACATCATCAGATCAGATCAGCGGCTCTCCAGTGCCTAGGCCTTTCCATTAGATCCCTGACGTGTATGCACCTCCTGCTTGAAAACC
TCCGGTGATGGCCAGGCACCGTGGCTCACACCTGTAATCTCAGCACTTTGGGAGGCCAAGGCGGGTGGATCACTTGAGGTCAGGGGTTCGAGAC
CAGCCTGACCAACATGGACAAACCCCATCTCTACCAAAAATATAAAAACTAGCTGGGCATGCTGGTGCGCACCTGTAATCCCAGCTACTCGGGA
GGCTCAACCATGAGAATCACTTGAACCCAGAAGCCAGAGGTTGCAGTGAGCTGAGATCGCACCACTGCACTCCAGTGTGGGCAACAGAGTAAGA
CTCTGTCAAAAAAGAAAAAAAAGAAAACCTCCAGTGACAAGGAAATCAGTCCTTCCTAAGATAAATCATTTCTTTTCCTGGCAGTTCTACTTAG
AACATTCTTCCCTGCATGACTGAACATTTGTCCTCTTATGACCTGCCCCTCCTGGTCCTGATTTTATCCCCTGGGTCACGTAGAACAAATCCTG
TCTCTCTGCTGCATCTTGGACTTTAAGCTTTTCAAGCTGTTTTTTTTTTTTTAATTACTATGCAATTAGTGCTTGACTTAGATTTGTATTGAAG
TACATAGTTTCCATGGTTTGAAGAATTTATTGAAACATCCAAGCCAATTTGGAAGATATCTTGAATTTCAGTTTTAGTGCTGACCTTCTCCTCT
ACCAGGTCTTCCTAACAGATTGAAATATTAAATGCTTGGCCAAGTGCGGTGGCTTATGCCTGTAATCCCAGCACCTTGGGGGGCCAAGGTGGGC
AGATAACTTGAGGTCAGGAGTTAGAAAACAGCCTGGGTGACATGGTGAAACCCCATCTCTACTAAAAATACAAAAATTAGCCAAAGTGTGGTGG
TGTACCTGTAATCCAGCTACTCAGGAGGCTGAGGCATCGGAATCATTTGAACCTGGGAGGCGGAGGCTGCAGTGAGCCGAGATTGCACCACCGT
ACTCCAGCCTGGATGAGAGAGTGAGACTGTTTCAAAAAACAAAACAAAAAAATATTAAGTGCTTGTGTCATATCCTTACATAAGTTAGGTGGTT
GTGTTGTGTCCTAAGAAAAGATGTGATTCATAAGGAAGATCACATTTTTGTTTCACTTGAGAACTTTCATTTACTACATTCTTCCCTTGGCAGC
TAAAGCTGTTGATGGATACGTGAAGCCACAGATCAAGCAAGTGGTCCCTGAGTAAGTGTCCAGGTGGCTGTGGCTCTCCTTCTGCCTCTTTCCT
CCTCCCCCAGACCCTGCCTCCCATCCTTATCCTGGCCCAGCTTTCCGCTCCCCCGGGGAAACTGTCTCAGCCCTGGGGAAGGACCTGGGCTTGG
TGATGCTATGCCAGTACCTGAGGCCCCACTCCTGTAGCTGGAGCCCCAGGGCCGAGTGGGGCACTTTGTCCTTCTACACCCTGAGAAAGACAAA
GATACCCCTTGGTCCCCTCCCCAAGTCAGCTGCCCTGGCCTCCCTGGCAGCTGAAGCTCTGTTCTCTTCCTTCTGCAGGTTTGTGAACGCATCT
GCAGATGCCGGGGGCGGCAGCGCCACGTACATGGACCAGGCCCCCTCCCCAGCTGTGTGTCCCCAGGCTCACTATAACATGTACCCACAGAAGT
AGGTGGCATTCTTGTGGGGGTCCACAGGGGAGGAACTGGGGGCTTGGCCCCAGGCTGGACCCCTGGAGGGCTGGGGTCAAAGGAATCCAGAGCT
CCTCTAGGTCTGAGACCACACAGCCCTGGCCCGGGCTCTGGCCTTTGGGAGGGAGAGATTTGACCAGAAGTGATTGGTGGTTTAGAGTCGGGTT
GGGCAAATGTCATCTGTTCCCCTCTCTCAATATGGAGATTTTTCTTGCTCTAAGGACTGAGTGGAGTTGTGATCTGTCTGGACAGCCGGTGTGA
GAGGTAACAGGGGAGGGTATTTCAGTCTGAGTTGCTGTACAGCCAGCTGTTTGAATGGTTGTTCTTTTCCCATGAAGCCCCAGGCTGAGGGCAT
AGGCTGGCTCAGACTGCTCCCCTGGTGGCCTGTGGGGCTTGGGGTGGTCTCTGGCAGGCTTTCCCCTTCCCTTCATCCCTCTTCTTTCCCTCCC
AAGCCCTGACTCAGTCCTTCACACCCATGGGGACTTCGATCTGGAGGACACAATGGACGTAGCGCGGCGTGTGGAGGAGCTCCTGGGCCGGCCA
ATGGACAGTCAGTGGATCCCGCACGCACAATCGTGACCCCGCGACCTCTCCATCTTCAGCTTCTTCATCTTCACCAGAGGAATCACTCTTGTGG
ATGTTTTAATTCCATGAATCGCTTCTCTTTTGAAACAATACTCATAATGTGAAGTGTTAATACTAGTTGTGACCTTAGTGTTTCTGTGCATGGT
GGCACCAGCGAAGGGAGTGCGAGTATGTCTTTGTGTGTGTGTGTGTGTGTGTGTGTGTGTGCGTGTTTGCACGTTATCGTGTTTCTCCCTCTCA
CTGTCTGAGAGTTTAGTTGTAGCAGAGGGGCCACAGACAGAAGCTGTGGTGGTTTTTACTTTGTGCAAAAAGGCAGTGAGTTTCGTGAAGCCTG
GAAGTTGGCCATGTGTCTTAAGAGTGGCTGGACTTTGACATGTGGCTGTTTGAATAAGAGAAGGACAAACGGAGGAGAAAGCACATGTGCTCCA
GTGAGTCTTCGTCACTCTGTCTGCCAAGCAATTGATATATAACCGTGATTCTCTCTGCTTTTCTTCTGAAATGTAGATAACTGCTTTTTGACAA
AGAGAGCCTTCCCTCTCCCCCACCCCTGTGTTCTTGGGTAGGAATGGGAAAAGGGGCAACCTACAAAGATTGTTGGGGCAAGGGAAGTCACAAG
CTTTCGGATGGGCGGTGGCTTTTCACAAAACATTTAGCTCATCTTATTCTCTCTTTGTCCTCTCTCCCCTCCTGCCCGCCCGCACCCTGGAATT
GCCACTCAGTTCCTCTGGGTGTGCACATATGTTTGGAGAAATACAGGAGAGAAAAGAGGGCCACGTAACTGAGAGCTTACAGTGCCAATGCCGT
TTGTGTTCTGGCCAGAGTGGAGTGCGCAGCCCTGACTCCCAGGCGCTGAGATTGTTGCCTGGTTACCCAGGAAGCTGCTGTTCCGGCTGCCCAG
CCTTTCTCTGAGCCAGCGGATGCACAGTCCGTGGCCTTCTTCAGGCTTATTGATGATGCTTTTTGCAAATGTTGAATCATGGTTCTGTTTCTAA
GTTGGATCTTTTTTGTTTTCTCCTTGCCACCCTAATTTGACATCAAAATTCTCTCTTGTGCATTGGGCCCTGGGTCATTCAAACCCAGGTCACC
TCATTCCCCTTCTCTGTTCACACCTAATGTCTTGAAGAGTAGGTAGCAGCAGTGTGGGCTGAACCTAGGCCAGCTTGCTTAGCGGGTCACCCTG
CTGTGAAGTCCTGGCAGGTGTTGGTAATGTGTGGAAATGCAGTCAGCAAGTTTGCTGGGGAGTTTGATAAAAGTATAAAACAAAACAAAAAAAG
CCTCGGTATAATTTTGTTCCACGACTTCTTCTGTACCTTTACACCACAACGAAGGAATGGGCTACAGCAGGTAGTGCAGGAAGAGGGGGGTGAG
CAGGTGTATTAAAATAGCTTACGGGTAAGGCCTAAAAGGTCACCCCTCGGCCCCCTCTCCAAAAGAAGGGCATGGGCACCCCCAGGAGAGGATG
GCCCCAAAAACCTTATTTTTATACATGAGAGTAAATAAACATATTTTTTTTACAAAAATAACTTCTGAATTTATCAGTGTTTTGCCGTTAAAAA
TATTCCTCTATAGTAAATTATTTATTGGAAGATGACTTTTTTAAAGCTGCCGTTTGCCTTGGCTTGGTTTCATACACTGATTTATTTTTCTATG
CCAGGCAGTAGAGTCTCTCTGCCTCTGAGGAGCAGGCTACCCGCATCCCACTCAGCCCCTCCCTACCCCTCAAGATTTGATGAAAATTCCAACC
ATGAGGATGGGTGCATCGGGGAAGGGTGAGAAGGAGAGCCTGCCTGCTCAGGGATCCACCCTCGTAGAGTCACTCCCTGCCCGTCTCCCAGAGA
TCCTTCACCAGCACCTGCCTCTGAGACCTCGCTCTCTGTTCCAGCAACCCTGGTTGGGGGGTCAGACTTGATACACTTTCAGGTTGGGAGTGGA
CCCACCCCAGGGCCTGCTGAGGACAGAGCAGCCAGGCCGTCCTGGCTCACTTTGCAGTTGGCACTGGGTTGGGGAGGAAGAGAGCTGATGAGTG
TGGCTTCCCTGAGCTGGGGTTTCCCTGCTTGTCCAGTTGTGAGCTGTCCTCGGTGTTACCGAGGCTGTGCCTAGAGAGTGGAGATTTTTGATGA
AAGGTGTCCTCGCTCTCTGCGTTCTATCTTCTCTCTCCTCCTTCTTCCTGCAAACCACAAGATAAAGGTAGTGGTGTGTCTCGACCCCATCAGC
CTCTCACCCACTCCCAGACACACACAAGTCCTCAAAAGTTTCAGCTCCGTGTGTGAGATGTGCAGGTTTTTTCTAGGGGGTAGGGGGAGACTAA
AATCGAATATAACTTAAAATGAAACTATACTTTTTATAATTTTTCTTTTTAAAACTTGGTGAAATTATTTCAGATACATATTTTAGTGTCAAGG
CAGATTAGTTATTTAGCCACCAAAAAAAAGTATTGTCTACAATTTGGGGCCTCAAATTTGACTCTGCCTCAAAAAAAAGAAATATATCCTATGC
AGAGTTACAGTCACAAAGTTGTGTATTTTATGTTACAATAAAGCCTTCCTCTGAAGGGATGGTATTGAGTCCTGTTTTTACTTTTTTCTGTCAC
ATGCCAAGGGAGGGCAGCTTGAACACGGAAAAGTTTCAAGTCATCAGCGTGACCCTGAAAAAGGGAACTGGTTGGGTGGTTGGGAGTTGGCTGC
CTCAGAGGGCACGTCATTAGCTCTGATGGCAGATGGGGCCTTTCATACCTTCCTGCTCATATGATGTTTTGAAAATAAGAATGATGGTCTCCTA
GCCTCCTGACTCCAGAAAGCTTGTTAGCCAGGATGGTCTCGATCTCCTGACCTCATGATCTGCCCACCTCAGCCTCCCAAAGTGCTGGGATTAC
AGGCGTGAGCCACTACGCCCCGCTGAAAGCCTGTCCTTAAGATTCAGCACATTTAGACTACCTGACCCTGACTTCAGCGTTGTGTGTGCGATGA
GAAATGGTGCCTTCCCTGCAGAGGCTCACAGTTGGAGAAAGCCAGCTACCACAACTGATTATGCTAGGATATCGCTTCCTGCTGCAATCAAGGC
ATCCCAAAGTCATTATGCAAAAGAACATGCAGGAAGGCCACTGAGCAACTCAAGCTTTTTTTTTATTTTATTTTTTTATTTTAATTGAGTAGCT
GGGATTACAGGCGCCACCACTCCCGGCTAATTTTTGCATTTTTAGTAGGGACGGGGTTTCACCATGTTGGCCAGGCTGGTCTGGACCTCCTGAC
CTCAGGTGATCCACCTGCCTTGGCCTCCCAAAATGCTGGGATTACAGGCGTGAACCACCATGCCCAGCCTGGAGCTGCCTCTTAAGGAACAAAT
CAGGGCCGGGCACGNNNNNNNNNNNNNNNNNNNNATAGGGCCCGGCACCGTCGCTCATGCCTGTAATCCCAGCATTTTGGGACGCCAAGGCAGG
TGGATCACCTGAGGTCGGGAGTTCGACACCAGTCTCGCCAACATGATCAAACCCCGTCTCTACTAAAAATACACAAAAATTAGCTGGGCGTGGT
GGCACGCGCCTGTAATCCCAGCTACTTGGGAGGCTGAGGCAGGAGAATCGCTTGAACCCGGCAGGCAGAGATTGCAGTGAGCCGAGATCATGCC
ATTGCATTCCAGCCTGGACAACAGAGCAAGACTCTGTCTCAAATTAAAAAAAAACAAAAAACCCAGCCATTCCACTTGTAGGTATCTACATAAG
AACCATGAGAACATATATGTACAGAAACACTTGTGACAAATGTTCATAACAGCATTATGCATAATAGCCAAACGGCAGAAACAACCCAAATGTC
CATCAACTGATGAATAAACAAAATGTATTATGGTATATCTGTACAATGGAATATACGGCAATAAAAAGGAATGAAGTGCTGACACACAGGACAT
GATGTTGTCACGGATGAACCTTCACAATATCATGCTAGATGAAAGAAGCCAGGCCGGGCACGGTGGCTCATGACTGGGACTCCAGCACTTTGGG
AGGCTGAGGCGAGGGATCACTTGAGTGCAGCAGTTCAAGACCAGCTTGGACAACACGGTGAAACCCCATCTCTACAAAAAAATACAAAAATTAG
CTGGATGTGGTGGTGCACCCCTGTAGTCCCACCTACTCAGGCAGCCTGAGGTGGGAGGATCACTTGAGCTGTGATCATGCTACTGCACTCCAGC
CTGGGTGACAGAGCGAGGAAAAAGAAAAGAAGCCAAGTACAAAAGACCGCATATTATATGATGCCATTTATAGGAAATGTCTAGGATAGGCAAA
TCTATGGAGACAGAAAGTAAATTTGAGGTTGCCTAGAGGCTGGGAAGGAGTTTGGAGGTAATAGTGAAAGGATACAGGGTTTGGGGGTTTTTTT
GTTTTGTTTTTTTTTTTGTTTGTTTTTCTTGAGACAGAGTCTCGCTCTGTCACCCAGACTGGAGTGCAGTGGCGCCATCTCGGCTCACTACAAC
CACTGCCTCCCAGTTTCAAGCGATTCTCCCACCTCAGCCTCCCAAGTAGCTGGGATTATAGGCGCCGGCCACCACACCCTGCTAATTTTTGTAT
TTTTAGTAGAGACAGTGTTTTGCCATGTTGGCCAGGCTGGTCTTGAACTCCTGACTTCAGGTGATCCACCTGCCTTGGCCTCCCAAAGTGCTGG
GATTATAGGTGTGAGCCACCACGCCCAGCCTGAGTTTGGGGTTTTTTATTTTATTTTATTTTATTTTATTTTATTTTATTTTATTTTATTTTAT
TTTATTTAACGAATTGGGCAGTCTCCTGAGGCACAGTAGGCTCAGAGAGACTCTGCAGGGTTTGTTTTTGAGGTAAGGAAAATGTTATTATCTG
TGGTGTTGGTTGCACATATCTCTGGATATACTAGATCTTGAATTCTACACTAAATGGGTGATTTGTATGGTGTGTGAATTATATCTAATAAAGC
TGTTACTGGGCCAGGTCTAGTGGCTTACACCTGTAATTCCAGCACTTTGGAAGGCCAAGGTAGGAGCATCGCTCAGACCGGGAGTTCCAGACCA
GTCTGGGCAACATAGTAAGACCCCCTGTCTCTACAAAAAAAAAAAAAAAATGTTTTTAATTAGCTGGGTGTGGTGGCACATGCCTGTAGTCCTA
GCCACTCAGAGGCTGGGGTAGGAGGATTGCTTCATCCCCGGAGTTCAAGGTTGCAATGAGCTGTGACCAGGCCACTGAACTCCAGCCTCGACAA
CAGAGCAAGACCCTGTCTTTAAATAAATAATAAAAGCAAATGCAAGATCTCAGCGAGAAAAAACGTGAAAGTGAGGTGAGTTAGCCAGAGTGAG
AACAGACCTGTTGAAAGAAGCTCAGCTGTGAAGGGAAGAGAGGTGCTCAGCAAGTAGTAGCTCTCTTCTCAAAGGTATCCAGAGGCAAGTAAGG
GGAGAAAGGGAGTGGTTTTAGTGTTTTGAGAGCCTAGGTCAAGAACACACCAGCCTGGGCAACATAGGGAGCTCTCTCGTCTCTACAAAAAATA
AAATTAGTTGAGCGTAGTGGTGCGTACCTGTAGTTCCAGTCCCTTGGGAGGCTGAGACAGGAGGATCTCTTGAGCCCAGGAGGTTGAGGTTGCA
GTGAGCTATCATCGCACCACTGCACTCCAGCCTGGGCAATAGATCAAGACCCTGTCTCAAAAACAAAAAACAAAAAAAGAGAAGTTTGTAATTT
TCCTTGGGATAAAGGCAACAGGCTAACACAGATGGTCACCCAGTAACCAGGTAAAGTTAAGATAAACTATATGTGACTGGCTGGGTGCAGTGGC
TCAGGCCTGTAATCCCAGCACTTTGGGAGGCCGAGGCAGGTGGATCACTTGAGGTCAGGAGTTTGAGACCAGCCTGGCCAACATGGTGACATGG
TGAAACCCCGTCTCTACTAAAAATACAAAAAATTAGCTGGGTGTGGTGATGCGTGCCTGTAATCCCAGCTACTCGGGAGGCTGAGGCAGGAGAA
TTGCTTGAATCTGGGAGGCGGAGGTTGCAGTGAGCTAAGATCGTGCCATTGCACTCCAGCCTGGGCAACAAGAATAGAACTCTGCCAAAAAAAC
AAAAAAAAAGAAGTTTGTAATTTTCCTTGGGATAAAGCCAGCAAGCTAACACAGATGTTCACCTAATAACCATGTAAAGTTAAGATAAACTATG
TGACTCGCTGGGTGTGGTGGCTCACACCTGTAATCCCAGCACTTTGGGAGGCCAAGGAGGGTAGATCACTTGAGGTCAAGAGTTTGAGACCAGC
CTGGCCAACATGGTGAAACCCCATCTCTACTGAAAATACAAAAATTAGCTGGGCGTGGTGGCACACACCTGTAATCCCAGCTGCTTGGGAGGCT
GGGGCAGCAGAATCGCTTGAACCTGGGAAGTGGAGGTTGCAGTGAGCTGAGATTGTGCCACTGCACTCCAGCCTGGGCAACAGAGCAAGACTGT
GTCTCAAAAAAAAAAAAAAAAAAAAAAGATAAACTATATGTGACAAGTCCTCTTACTTGAGGACTCGTTATTGTTTATCTTGAAAACGTGTATG
TAATGGGTTGTATGCGCTTGGCTATACAAAAAAGTAAGATTTCCTCCCTTCTTTGCAAGCTCTTAGCAGATCACCTGTCATGTACATCACATTG
TGGTTGAATGCTTATTCAATAATAAAATTGTTTTCTTTCTCAACTACCTTGAGGGAGAGGATGGGGTTTTTTTTGTTGTTGTTTTTGTTTTGTT
TGTTTTTGAGACGGAGTTTCGCTCATTGCCCAGGCTGGAGTACAATGGCGCAATCTCAGCTCACTGCAACCTCCGCCTCCCAAGTTCAAGTGAT
TCTTCTGCCTCAGCCTCCCAAGTAGCTGGGATTACAGGCATGTGCCACCACATCTGGCTAATTTTGTATTTTTAGTAGAGATGGGGTTTCACCA
TGTTGGTCAGGCTCGTGTCAAACTCCTGACCTCAGATGATCCACCCGCCTCAGCCTCCCAAAGTGTTGGGAATACAGGCGTGAGCCACCGCGCC
CAGCTGAGTTGGGGTTTTAAGAGTTCTTAAGCTTGCCCCTCTCCCAGCTCAAGTGGCTTAATGGCGTTCTTTCCCACACACACCTTTCTGTTCC
TTCACCTGCGCAAGTTTGAGGACCATGCTAGTCTGGTCCTAACTGCCCCAACTGCCAGCCTGGGCTAGCACCCGACATGAAGTCCTGTAGGCGA
CCTGCCCCTTTAAGAGCACCCCCCTCCTTCAGCTCCTCCCTCAGGCCTGGTGGCCGGATTTCCCAGTTGGGGCCCAGCCTTTTAAACCCATCGC
TCCTTCTTTCTGGCCGGATGTGTGCTGAGACCCAGAGTCACCCAGGGGTCTCCGTCACGTGCCAGGAGTAGGCAGAAGTGGGCTGTGACAGGTG
CATGTGGGCATGGACCCCACAGCCTGGGGCTCAGGAGGGACAAGGAGCTGGGACAGGCTGGATCCCGAGAGAAAGCAAAGCCACTCGGGAGTGG
GCAAGAGATATCGTTACGCAGCTGCTGTGTGCCCGACCGACCCTGTCCGAAACCCTTCCTGTACCTTCCCTTCCTCTTCCTTCTTTTCTCCCTT
TTTTTTCTTTTCTTTTTTTTTTTGACACGGTCTCACTCTGTTGCCCAAGCTGGGGTGCAGTCGCACGATCTTGGCTCACTGTAGCCTTGACATC
CTGGGCTCAAGGGATCCTCCCATCTCAGCCTCCCAAGTACCTGCGACTATGGGTGTGACACCACGCTGGGCTAGTTTTTCAATTTTTTGTACAG
ATGGAGTCTCCCTATGTTGCTCAGGCCGGTTGCAAACTCCTGGGCTCAAGTGATTCTCCTGCCTCAGCCTCCCAAAGTGCTGGGATTACAGATG
ATAGCCACCTCACCCGGCCCACCCCTACCTTCTGAAAGAGGCATTCTTATTCTTATTCCCATTTTGCAGATCAGGAAACAGAGCTCAGTGCAGC
CCACTAAATTGCTCAGGGCCCTACAGCTAACAAGCGGCAGAGGCAGGATCTGCACTCAGGTCAGTGGGACTCCAAAGCTTTGATAGTCTCTCCT
TTGCATCACCTGCCCCACAGGGTCCTGCCTTCTTCCCAATTTCATTTTTCCTCGGTTTTCCTGTATGCAGTAGAGCGTGGGAGGAGAAATGGAT
AATTGCTGCATGCCCCCATATCTCGGTTCCTTCCTCTTCCCAGGAGCTGCTTGGAGATGCTGCTGTGGCCACTGCTGCTGCTGCTGCTGCTGCT
GCCAACATTGGCCCTGCTCAGGCAGCAGCGGTCCCAGGATGCCAGGCTGTCCTGGCTTGCTGGCCTCCAGCACCGAGTGGCATGGGGGGCCCTG
GTCTGGGCACCCACCTGGCAGCGGCGGAGGCTGGAGCAGAGCACGCTCCATGTGCACCAGAGCCAGCAGCAGGCCCTGAGGTGGTGTCTACAGG
CAGCCCAGCGCCCCCACTGTTCCCTCAGAAGGAGCACAGGTGTGTTTCCCAGGGTCTGGGGAGGTGACCCAAAGAGAAAGAAACCCCACAGGAC
CGTCAGATTCCAGAGCCTGATGGCCCCCTTACCTCCTCCACTGCCAACGGAGTGGCCTGACCCAGAGACCCAGGACTGGCTTTCTTGTCCAAGA
TGAATTTCCCATGCTGGGTCCTTACATCCTCTCTACCCCAGGCCTATTCTCGGTTCCTCCCTCAAGGGTCTCACCAGTCTTGCCTGAAACTCTT
GGGAAACTCCCTTCCTGAGGCGTTTCTGTTGTCATTGGGGCTATAGACATAACCACCTTCCGGAATCATCTCCCTCTGACCAAGGCCAGCCAGA
CCCAGCAGGAAGACAGTGGAGAGCAGCCACTGCCCCCGACCTCAAACCAGGACCTTGGGGAGGCCTCTCTGCAGGTAATCTAGGATGGCCAGAG
CCCAGTCCTGGCCACAGCCCAGTCCCACCAGAGACCTCTGACTTGCAGCCAAACCCTCCAGTCATGGTGGGCAAAGAACCCCCAAATGGGGGCT
CTCGGTCTGGCTCTGACACCAGACCAACATTCTCTCTTTCCTCCTCCAGGCCACCTTGCTGGGTCTGGCAGCCCTAAACAAGGCCTACCCAGAA
GTGCTGGCTCAGGGACGCACTGCCCGTGTGACGCTTACATCCCCTTGGCCCCGACCCCTGCCTTGGCCTGGGAATACCCTGGGCCAGGTGGGCA
CCCCTGGAACCAAGGACCCTAGGGCCCTGCTGCTGGACGCACTCAGGTCCCCAGGGCTGAGGGCACTGGAGGCTGGGACGGCTGTCGAACTTCT
GGATGTTTTCTTGGGCCTGGAGACTGATGGTGAAGAGCTAGCTGGGGCGATAGCTGCCGGGAACCCTGGAGCGCCTCTCCGTGAACGGGCAGCT
GAGCTCCGGGAGGCCCTAGAGCAGGGGCCACGGGGACTGGCCCTTCGGCTCTGGCCAAAGCTGCAGGTGGTGGTGACTCTGGATGCAGGAGGCC
AGGCCGAGGCTGTGGCTGCCCTCGGGGCCTTGTGCTGCCAAGGACTAGCCTTCTTCTCTCCTGCTTATGCTGCCTCCGGAGGTCAGTGGGACTC
AAGGGCAGTGAGGTGGGGGCAACGGTCAGTGGTCACATGACAAGCAGCCATGCATTGGGCCCTACATAATCATCTCATTTAATCCTCCCCAACA
AGCTGCATGCTAGGGCCAGCAGCCTCCTTTTACAAGTGAAGAAATTCAGGCTCTCTAGGTTAAGAGTCTTGTAGCTGGGTGCAGTGGCTCACGC
CTGTAATCCCAGCACTTTGGGAGGCCAAGGTGGATGGATCGTTGACGTCAGCAGTTCCAGACCAGCCTGGCCAACATGGCGAAACCCCATCTCT
ACTAAAAATACAAAAACTAGCGGAGTATGGTGGTGCACGCCTATAATCCCAGCTACCTGGGAGGCTGAGGCGGGAGGATTGCTTAAACCTTGGA
GCCAGAAATTATAGTGAGCTGAGATCGCGCCATTGCACTCCAGCCTGGGTGACAGAGCAAGACCCTGTCTCAAAAAAAAAAAAAAAAAAAAAAG
GCCGGGGCAGTGGCTCACGGGTGTAATCCCAGCACTTTGGGAGAGGCTGAGGTGGGTCGATCACCTGAAGTTAGGAGTTTAAGACCAGCCTGGC
CAATGTGGTGAAACCCTGTCTCTACTAAAAATACAAAAATTAGCCAGGTGTGGTGGCAGGCGCCTGTAATCTCAGCTACTCAGGAGGCTCAGGC
AGGAGAATCACTTGAACCCACCAATCACTGAATCACTGAGCCGAGATCGCACCACTGCACTC
HUMAN SEQUENCE - mRNA
GGAGCCGTCACCCCGGGCGGCGACCCAGCGCAGGCAACTCCGCGCGGCGCCCGGCCGAGGGAGGGAGCGAGCGGGCGGGCGGGCAAGCCAGACA
GCTGGGCCGGAGCAGCCGCCGGCGCCCGAGGGGCCGAGCGAGATTGTAAACCATGGCTGTGTGGATACAAGCTCAGCAGCTCCAAGGAGAAGCC
CTTCATCAGATGCAAGCGTTATATGGCCAGCATTTTCCCATTGAGGTGCGGCATTATTTATCCCAGTGGATTGAAAGCCAAGCATGGCACTCAG
TAGATCTTGATAATCCACAGGAGAACATTAAGGCCACCCAGCTCCTGGAGGGCCTGGTGCAGGAGCTGCAGAAGAAGGCAGAGCACCAGGTGGG
GGAAGATGGGTTTTTACTGAAGATCAAGCTGGGGCACTATGCCACACAGCTCCAGAACACGTATGACCGCTGCCCCATGGAGCTGGTCCGCTGC
ATCCGCCATATATTGTACAATGAACACAGGTTGGTCCGAGAAGCCAACAATGGTAGCTCTCCAGCTGGAAGCCTTGCTGATGCCATGTCCCAGA
AACACCTCCAGATCAACCAGACGTTTGAGGAGCTGCGACTGGTCACGCAGGACACAGAGAATGAGTTAAAAAAGCTGCAGCAGACTCAGGAGTA
CTTCATCATCCAGTACCAGGAGAGCCTGAGGATCCAAGCTCAGTTTGGCCCCCTCGCCCAGCTGAGCCCCCAGGAGCGTCTGAGCCGGGAGACG
GCCCTCCAGCAGAAGCAGGTGTCTCTGGAGGCCTGGTTGCAGCGTGAGGCACAGACACTGCAGCAGTACCGCGTGGAGCTGCCCGAGAAGCACC
AGAAGACCCTGCAGCTGCTGCGGAAGCAGCAGACCATCATCCTGGATGACGAGCTGATCCAGTGGAAGCGGCGGCAGCAGCTGGCCGGGAACGG
CGGGCCCCCCGAGGGCAGCCTGGACGTGCTACAGTCCTGGTGTGAGAAGTTGGCGGAGATCATCTGGCAGAACCGGCAGCAGATCCGCAGGGCT
CAGCACCTCTGCCAGCAGCTGCCCATCCCCGGCCCAGTGGACGAGATCCTGGCCGAGGTCAACGCCACCATCACGGACATTATCTCAGCCCTGG
TGACCAGCACGTTCATCATTGAGAAGCAGCCTCCTCAGGTCCTGAAGACCCAGACCAAGTTTGCAGCCACTGTGCGCCTGCTGGTGGGCGGGAA
GCTGAACGTGCACATGAACCCCCCCCAGGTCAAGGCCACCATCATCAGTGAGCAGCAGGCCAAGTCTCTGCTCAAGAACGAGAACACCCGCAAT
GATTACAGTGGCGAGATCTTGAACAACTGCTGCGTCATGGAGTACCACCAAGCCACAGGCACCCTTAGTGCCCACTTCAGGAATATGTCCCTGA
AACGAATTAACAGGTCAGACCGTCGTGGGGCAGAGTCGGTGACAGAACAAAAATTTACAATCCTGTTTGAATCCCAGTTCAGTGTTGGTGGAAA
TGAGCTGGTTTTTCAAGTCAAGACCCTGTCCCTGCCAGTGGTGGTGATCGTTCATGGCAGCCAGGACAACAATGCGACGGCCACTGTTCTCTGG
GACAATGCTTTTGCAGAGCCTGGCAGGGTGCCATTTGCCGTGCCTGACAAAGTGCTGTGGCCACAGCTGTGTGAGGCGCTCAACATGAAATTCA
AGGCCGAAGTGCAGAGCAACCGGCGCCTGACCAAGGAGAACCTCGTGTTCCTGGCGCAGAAACTGTTCAACAACAGCAGCAGCCACCTGGAGGA
CTACAGTGGCCTGTCTGTGTCCTGGTCCCAGTTCAACAGGGAGAATTTACCAGGACGGAATTACACTTTCTGGCAATGGTTTGACGGTGTGATG
GAAGTGTTAAAAAAACATCTCAAGCCTCATTGGAATGATGGGGCCATTTTGGGGTTTGTAAACAAGCAACAGGCCCATGACCTACTGATTAACA
AGCCAGATGGGACCTTCCTCCTGAGATTCAGTGACTCACAAATTCGCGGCATCACCATTGCTTGGAAGTTTGATTCTCAGGAAAGAATGTTTTG
GAATCTGATGCCTTTTACCACCAGAGACTTCTCCATCAGGTCCCTAGCCGACCGCTTGGGAGACTTGAATTACCTTATCTACGTGTTTCCTGAT
CGGCCAAAAGATGAAGTATACTCCAAATACTACACACCAGTTCCCTGCGAGTCTGCTACTGCTAAAGCTGTTGATGGATACGTGAAGCCACAGA
TCAAGCAAGTGGTCCCTGAGTTTGTGAACGCATCTGCAGATGCCGGGGGCGGCAGCGCCACGTACATGGACCAGGCCCCCTCCCCAGCTGTGTG
TCCCCAGGCTCACTATAACATGTACCCACAGAACCCTGACTCAGTCCTTGACACCGATGGGGACTTCGATCTGGAGGACACAATGGACGTAGCG
CGGCGTGTGGAGGAGCTCCTGGGCCGGCCAATGGACAGTCAGTGGATCCCGCACGCACAATCGTGACCCCGCGACCTCTCCATCTTCAGCTTCT
TCATCTTCACCAGAGGAATCACTCTTGTGGATGTTTTAATTCCATGAATCGCTTCTCTTTTGAAACAATACTCATAATGTGAAGTGTTAATACT
AGTTGTGACCTTAGTGTTTCTGTGCATGGTGGCACCAGCGAAGGGAGTGCGAGTATGTGTTTGTGTGTGTCTGTGTGTGTGTGTGTGTGTGCGT
TGGTGCACGTTATGGTGTTTCTCCCTCTCACTGTCTGAGAGTTTAGTTGTAGCAGA
HUMAN SEQUENCE - CODING
ATGGCTGTGTGGATACAAGCTCAGCAGCTCCAAGGAGAAGCCCTTCATCAGATGCAAGCGTTATATGGCCAGCATTTTCCCATTGAGGTGCGGC
ATTATTTATCCCAGTGGATTGAAAGCCAAGCATGGGACTCAGTAGATCTTGATAATCCACAGGAGAACATTAAGGCCACCCAGCTCCTGGAGGG
CCTGGTGCAGGAGCTGCAGAAGAAGGCAGAGCACCAGGTGGGGGAAGATGGGTTTTTACTGAAGATCAAGCTGGGGCACTATGCCACACAGCTC
CAGAACACGTATGACCGCTGCCCCATGGAGCTGGTCCGCTGCATCCGCCATATATTGTACAATGAACAGAGGTTGGTCCGAGAAGCCAACAATG
GTAGCTCTCCAGCTGGAAGCCTTGCTGATGCCATGTCCCAGAAACACCTCCAGATCAACCAGACGTTTGAGGAGCTGCGACTGGTCACGCAGGA
CACAGAGAATGAGTTAAAAAAGCTGCAGCAGACTCAGGAGTACTTCATCATCCAGTACCAGGAGAGCCTGAGGATCCAAGCTCAGTTTGGCCCG
CTGGCCCAGCTGAGCCCCCAGGAGCGTCTGAGCCGGGAGACGGCCCTCCAGCAGAAGCAGGTGTCTCTGGAGGCCTGGTTGCAGCGTGAGGCAC
AGACACTGCAGCAGTACCGCGTGGAGCTGCCCGAGAAGCACCAGAAGACCCTGCAGCTGCTGCGGAAGCAGCAGACCATCATCCTGGATGACGA
GCTGATCCAGTGGAAGCGCCGGCAGCAGCTGGCCGGGAACGGCGGGCCCCCCGAGGGCAGCCTGGACGTGCTACAGTCCTGGTGTGAGAAGTTG
GCGGAGATCATCTGGCAGAACCGGCAGCAGATCCGCAGGGCTGAGCACCTCTGCCAGCAGCTGCCCATCCCCGGCCCAGTGGAGGAGATGCTGG
CCGAGGTCAACGCCACCATCACGGACATTATCTCAGCCCTGGTGACCAGCACGTTCATCATTGAGAAGCAGCCTCCTCAGGTCCTGAAGACCCA
GACCAAGTTTGCAGCCACTGTGCGCCTGCTGGTGGGCGGGAAGCTGAACGTGCACATGAACCCCCCCCAGGTGAAGGCCACCATCATCAGTGAG
CAGCAGGCCAAGTCTCTGCTCAAGAACGAGAACACCCGCAATGATTACAGTGGCGAGATCTTGAACAACTGCTGCGTCATGGAGTACCACCAAG
CCACAGGCACCCTTAGTGCCCACTTCAGGAATATGTCCCTGAAACGAATTAAGAGGTCAGACCGTCGTGGGGCAGAGTCGGTGACAGAAGAAAA
ATTTACAATCCTGTTTGAATCCCAGTTCAGTGTTGGTGGAAATGAGCTGGTTTTTCAAGTCAAGACCCTGTCCCTGCCAGTGGTGGTGATCGTT
CATGGCAGCCAGGACAACAATGCGACGGCCACTGTTCTCTGGGACAATGCTTTTGCAGAGCCTGGCAGGGTGCCATTTGCCGTGCCTGACAAAG
TGCTGTGGCCACAGCTGTGTGAGGCGCTCAACATGAAATTCAAGGCCGAAGTGCAGAGCAACCGGGGCCTGACCAAGGAGAACCTCGTGTTCCT
GGCGCAGAAACTGTTCAACAACAGCAGCAGCCACCTGGAGGACTACAGTGGCCTCTCTGTGTCCTGGTCCCAGTTCAACAGGGAGAATTTACCA
GGACGGAATTACACTTTCTGGCAATGGTTTGACGGTGTGATGGAAGTGTTAAAAAAACATCTCAAGCCTCATTGGAATGATGGGGCCATTTTGG
GGTTTGTAAACAAGCAACAGGCCCATGACCTACTGATTAACAAGCCAGATGGGACCTTCCTCCTGAGATTCAGTGACTCAGAAATTGGCCGCAT
CACCATTGCTTGGAAGTTTGATTCTCAGGAAAGAATGTTTTGGAATCTGATGCCTTTTACCACCAGAGACTTCTCCATCAGGTCCCTAGCCGAC
CGCTTGGGAGACTTGAATTACCTTATCTACGTGTTTCCTGATCGGCCAAAAGATGAAGTATACTCCAAATACTACACACCAGTTCCCTGCGAGT
CTGCTACTGCTAAAGCTGTTCATGGATACGTGAAGCCACAGATCAAGCAAGTGGTCCCTGAGTTTGTGAACGCATCTGCAGATGCCGGGGGCGG
CAGCGCCACGTACATGGACCAGGCCCCCTCCCCAGCTGTGTGTCCCCAGGCTCACTATAACATGTACCCACAGAACCCTGACTCAGTCCTTGAC
ACCGATGGGGACTTCGATCTGGAGGACACAATGGACGTAGCGCGGCCTGTGGAGGAGCTCCTGGGCCGGCCAATGGACAGTCAGTGGATCCCGC
ACGCACAATCGTGA

[0292] TABLE 28

MOUSE NOMENCLATURE
ICSGNM Sema4d
Celera mCG1273
HUMAN NOMENCLATURE
HGNC SEMA4D
Celera hCG29917
MOUSE SEQUENCE—GENOMIC
CCCACCCACCTCCTTTCACCATCATTCCGGGGCTCAGGACTCCACACAGAAATTTAGAGTGTCCTAGTAGTTCTCACGGTAGCAGCTGAAGGTT
TCTTACCCAGGGCCAGAGGGCTGCCATCTTATCCCTGGCCAGCCGCTCTCAGTACAGGTCTGCGCGGTCCGCGGGATCCAGGACTAATACCCAG
GGTCCTGGAGGAGAGTAAGAACTAGTTGGGGGCCTGTGGGGCTGGAGGAGGAGAGAATGACTCACAGGTCGCCAACCTATACAAAGAAATGGTG
TTGTCAGGATTTAAGCAGCATCATAACAATGACATGCCTTTGCCCAGGTCTCTGCAGCTGGCCGGCCACTGGTCCTCCACGGAACCCTGCTTCA
TGTCTGGCTCTCCCTGCCTCCTTAGCGCACACCCTGTTTCCGTTACTGTTCCATTGGCACCATGGCGGTCACTCTCCGTACCTGGCCACCCAGC
GTGACACCTACCCAATGCTCAGGTTTAGGGCATGAGCTGACTGAGCTAAGGCCATCTGAGGCTTGCCTGCCCCTATGAGGTAGCTTGAGATTGA
ATGCTGACCTAGATGGAGATGTCCAGCTGCTCCTGCTAGCTAGCTGGGCTTTGCCAATGTAACTACAGTAGGGCACGTCCCTGCCAACTGGAAA
TCTTGGCTCTGGGGATACTCTGAGGCCTGGGAACACCAGAGCTGGGACAACAGCTTTGTGTCAGGCAGCCACTCCGGAGCTCCTGGACCCCTCC
TGGGACTCTCCAGGGACAGGTCCTCTGGAATTCAGCAGTCAGGCTGGTGACAGTATTACCTGGGCCAGCATCGTAGAGGTGGGATACCTGGCTA
GTGGCTGGCAGGGTGAGGTTGGAAGGCCACACCCGGCTGGGAGGGAAGGTGTGGCTGCACTGTTTTCTGGAACCATAGCCACCAGAGTTTCACC
TCCTGTCTGAGCAAACGAGCAGCTAGGAATAGACAGAGCAGGCTCCTGTGGCCTGTGTCTTCAGGGGTGTGGAGTCCAGGGAACAATCTGCCGT
ACCACAACCACTCAAGATCCCCAGGTTGTGTTTGCTGTGGTGCTCAGGAGGGTGCCTGAAAGTCTATCTTGTCCCCACAGGAGCACCTAATGGT
ACCCTCTTTGTGATCTATTCCCGTTATTAGATCCCAGTGAGGAACCGTAAGTCTAAGACACAGTACGTGTATACACACACACACAGAGAGAGAG
AGAGAGAGAGAGAGAGAGAGAGAGAGGTGCATACCTAAGTGCATATCTGCAGATGTACTCACAAACATGTAGTCATGCATGTTTACACACATCT
GCAGATACATAGGTATGTGTGCACATGTGTATGCATGCACTTACATTGTTAGATGTCATGTTACATGTCATATGCATGTTATACACAGAGATAA
CATTTAACTTGGCACTTGCATGTGTGCCCATGTACATATACATAACAGACATGGCATCTGTGCACACACATGGGCATGGGTATGAGCACAGGTA
AACACATGTCAACCAGCAACACATGTCGCTGGTTGACATGCTGACACAGATGTACACAAGTTCATGTGCACAATGTGTGTGTGTCCACTCATAC
ACACACACAGTACCCTCAAGGCCATTAGCATTCTCAGGCCAGAGCAAGGTGACCATGCCCTGGCTGGGGTCGGTCCTGTCTCCAGTTGCAGCCC
CTGCTGAGATTTCCAGGGTTTGCTGGAGGCAGAGAGTTGCCCTCTGACAGCCCAGGCAGACTGCAGAGGGGGCTGCAGTTCTTTCTCCTGGGTT
TAGAGTAGGTGATCAGCCCTCTTAGTGTAGTAATGGGGCCTTCATGACCCTGTCTGTAATGGGATGTCAGGCCTTCTTCTGGAGGGCCTCAGTT
GTCGCAGGGGAGATCTCAGCTTTCCCTGGGGGAAGGGCGATGTATCTCTTTGTTTAAATTTAAACACCGAGAGCAAGGTCCTGAACTTGGCATT
GGATGGAGCCGTTCCTGGAAGGCACTGTGGCAGCCTGTCTGTGTGGGTGTGGCAGGCACATTGTTTCAAGTGAGTTTTAAATTACACCAAACAG
TGAGTAGTGTAGAGAAAAGAAGAAAAGTCAAGCCCAACGCCTTCCTCCCCTTCCTCTACTTCTCTGCTCCCCCCCTCCCCTCCTCCCCCTCCTC
TACTTCTCTGCTCCCTCCCCTCCCCTCCTCCTGTTCCCAGGGGCTTCTTTTAAAGAGCACCAGGGTGTTGGCAAGGCTTTTGCCCTCTAGTGTC
TGCCCATGGAATAACTGTGCTCTGCATTGTGGGGTTGGGTCTGCAGGGCAGGAGCCTGCAGCTGTAGTGAGCACAGCCTGGCTGAACTTGCTCT
GTGCTTCTGTTAAGGCAGCCCAGGGCCCCAGTAAACCCCACAGTTCCTACTTTTGGTCAAGACTGGCAGAGGAGTTTGCTGGCTGCCACTGAAG
GCCAGAAGGTGGCATTGGATTCCCCTGGAACTGAAGTCCCAGATGGTTGTGAGCTGCCGTGTGGGTGCTGTGAGTGGAAGCCAGGTTTTCTCAA
TCTACAAGAGCAACAACTGCTCTTAACCTCTGAGCCATCTCCCCAGCCCCTACCAATGCGTTTTATACAGCTGACATCCAAGGGCAGCCCCAGC
CAGACCACCCTGGGCTGGTGAAGAGTTTTGGTTATTTCAGCCACTTAAAAAAAAATGTTTCTCTTAAAATTTGTTTTAGTCTTGTGTCCTGACT
TTTTCACTCCAGGCACAAGCTGAGGCTCTTGCTCTCTGCCCCTTGTCATGCACCTCCACCCCTCCCCCACCCTCCTAATAAATGTATTCCCCAC
CCCCCACCCCCTTTGGTGACTGAGGCTGCACTGTGGGCCCTGGTAGCACATTCTGATTATATTTCCACTAAGGACCATTCTCTCTTCCCCTGGG
GTTCTAATTGCTCCATTTTGAGTGTTTGGTAATTCATTCTTAGCTGTTGGTGCAGCATCTTAGCCATGTTATCAGGCCCCAGCCTCTGAGACTT
TCCTTTTTGCAGCTGATAGAATGAGAAAAAAAAAAAAAACCCTTATTATTCTATGTTCACAGAATGGCTGTTAGACCTCCAGACATCTAGTCTT
GAGTTTCAGATAGCAGCATCAAGAGCGAGCTTAGGGGTCCAAATGCTGGTGGTTTTTTTTTTTTTTTTTTTTATTATTGTTGTTAGCCTATTTC
ATGGAATTGTTTCTAGTGCTTTCCACTTAGATTTCTTTAACTAGAAGCAGGGTAAGTTACAAAGGTGTTGAACTGGGCGTTCTGCCCACCAGTG
AGAGCTCAGGATCTGTTACCTAGAAGGAGGCAGGAAGTCACAGAAGCAGGAGGAGGCCAGGCTGGGTGGCAGGAGATTTGAGGGGAGGGGAGAG
CTACTGAGCGTGGGGAGGGGCAGTTGGATGAGGAAGGAGGTGCATCCAAGACAAGTTTGCAGATTGGGTGTCCTTACTAGCCATGGACCCAGCC
AGAGAGTGGGGCTGCAGGTAGGTGAGTGTGCTTTAGTGGCCAGTGCCTTCCTTGTCCTCCCGTCCACGTGGTTGACTAAGGAGCTGAGGGAGTA
GTAGGGTTTCATCCTGGGTCTCGGGGATACATGTGTCTTGTGACACTCTCACAGCTCTGAGAAGGAAGACGTTAGGTTTCTAAAATCCTGTCCT
GATGCTCGTGAACTTTAGGGGCAGCCCTTCTGCACCCTGCCCGGCATGTCCTTTCATGTTTCTCAGCCAGATGGGTCTCACTCCTTGTGGTGTC
TATGAACCACCTCCTGTCCTTCCGTGCTGTGGTGGGGCATCCTAATTAGCGGCTTGCGTGTCCATCAGCTCACAGGTTCAGGGCACCATGTTGG
GTCTGGTGTTGGGCAAAGCCCTTCTGGTCTGTTAGCCCCTGGTTCTGGACTCTCTTTCTTGGTATCTTGCTCGGCCCCACCCCACTTCTTTTCC
AGGGCTTAATTAATTAGCTTGTTGTTAATCAATTTTTGTTAATTAACAAAATAATTAATTAAATCCTGAGCCAGGACCTCACTGTGGAACCACG
GTAGGACTGGGACTCACTGTGTAGACTGGAGCTTGCCTCCCCCACCCCACCCCACCCCCCCCAGTGTTGCGATTATGGCCTGGGACTACATATA
GACTAAACTAGCAATGAACTCACAGAGCTCCCTCTGACCTATGGTTAAAGGCCTGTGCTACCACCTATTAATTTTGGAATCTGTTTTGTATCTT
TAAATTTTATTTCAGTCAGGGTCTTCTGTAGCCCAGACTGACCTCAGACTACATAGCTAAGGCTAGCCCCGAACTCCTCTTTCTTCTGCCTTCA
CCTGGTGGTGCATTGACATTCTAGGTTTATGAAGGGCTGGGGATAGAACTTTGGGGCTTTGCGCATGTGAAGCAAACATTCTACCAATAGAGAT
AAGGAATGTTTTCTTTTCTTTTTTTTTTTTTTTAAATAATCTATTTATTTATTACATGTAAGTACTGTCTTCAGACACACCAGAGGAGGGCGCC
AGATCTCATTAGGGATGGTTGTGAGCCACCATGTGGTTGCTGGGATTTGAACTCAGGACCTTCGGAAGAGCAGTCAGTGCTCTTAACCGCTGAG
CCATCTCTCCAGCCCAGGAATGTTTTCTTATAAAAAATGTTCAAGCAGGAATGTGACCTGCATGACCTTGGCTGGCGACCCTGGCAGGCGTTCA
GCCTTCTCTGTTCACACCAACATCTACTTCCATCAGGGGGATGTGAAGAGGAAAGAAATATCCATGTCCCATGCTACCTGACCCTCGCAGCTGG
AACAAATCAGAGGGCCTCCTGCGTGTCACAGCTCCCTTGTTCTGCTCATCTCCAGTTTCTGCAACACCCAGGATCTTCTGGGCTTAGACCAGTG
CCACCTGTGCCTCTGTACCTAGAGGGTGCTTGAGATCAGAGTGGTGTTGCTGTCCTGGCTTTCCTTAGCTGTGAATGCTCAGTGTTGGAGGGAG
TTGGTCACCATGGCTTGGACCCTAGCAACCCACAGCCCCCTTCCTCACTGTGGCAGGAGAATGGGCTCTTACGCGACAGGACGCAGCACTGTGA
ACTTGCTCAGCAAAACGCAGAGTTCATAATTGTCGGACTCACCACTGTCTGTTTCCCAGTCACTGCCTCAGTTCTTGGCTTCCTGCTTTCTGGT
TGGATCAGGGTAGGAGTCACCCCTTGTGCTTGGCTGCTGTGAATTTCTAGGGTAGGACAGGGGTCCGTCTGGCTCCTATTCTGTAGAACCGCTG
TCTATAATTGGAGTCACCTCTTTGCATGTCACCTGTATCTCCTTTTGAGCTATAGCGATAGTTAAGGAAAATGGTGAGCTGAACTGGCTTAGAA
TATCCCACTCCTTGGAGGAAGGAGGGGTTCGGGCTATCTTTAGGAAGCTTCTAAATCCATTGGGATAGAAACCAGACAGTCGGGGCTGGTGAGA
TGGCTCAGTGGGTAAGAGCACCCGACTGCTCTTCTGAAGGTCCAGAGTTCAAATCCCAGCAACCACATGGTGGCTCACAACCATCCGTAATGAG
ATCTGATGCCCTCTTCTGGTGTCTGAAGACAGCTACAGTGTACTTACATATAATCAATAAATAAATTATAAAAAAAAAAAAAGAGAGAGGAAGA
TAAAGAAGAGAGGGGGCACTTTCTATTTTAAAAAAAAAAAAAAAAGAAACCAGACAGTCTGTCCTTTAGTACCGGACAGACTAAGGGACTGAAT
AGAGATGCTGGAAGAGCCTGCCCTGCCCTCTGTGGGAGGAAGGGTGGGGCAGGGGAGGCCTGGCAAGTGGGTAGATGCCATGCCAGCATTGGGC
TCACATCTGGAGACTGTTGTGCTCCCTTCAGCTTCTAGTAACCACACCCAAAGGTGAGGCGGATCTGTGTATCAGGGCAGCTGGTGAGTGACTC
AGCGCTGAGCTCTGCATCCTGGGATCCTGGTGTGTGCTGGGCCTCAGGCTTGGCTAGGGCAGGTGAGGACAGGGACAGAGGCTCAAGGGACCTG
GCCACAAGTCCATCAGACAGCAAAGCCTGGTCTTCTGTTTCTTGTTTGTGGACAAATCAGAGTTAATTGCTAGTGTTTCCATGGTAATTAACGG
CTTCCTGGTGAGGCAGGAAGAGCTCGGGTTGCCTCCTGGGCTAGCTATGACTTTTGATGTGACCCACTACTCCTGCAGAATGGGGCCCTGAGGC
TATGTCTTCATGGGTACGGAGGTTAGTGTGTGCTTACATACTGTATGTATGTATGTGAGCACATGCGTGCATTTTCGTGCACATTTGTGTATGG
CTATGTGCATTCTGTGTGTCTACCCATGCATGTGCACCCTTACATGTATTCCCAGGGGAGTGCCCTGTAACCGCAAACCTCTGATGTCTGGTAA
TATTCCTGGGTTAGCATGTCAGAAGTTGGGAAGTGAGCCCTCCAGGGAAACTGAGACCCGTACTGTTCCTTTCAGTTGTGGCATGTCACCAAGC
ACCTGGCTGTCCCTCTAGCTAGTTATTTCCACCTTGGTGGGTCCATCCATCTTGGTGTGTTTTAGCCTTGTTGTCTTCTCTCTGTGGGATCTGT
CTGTCTGGCAGCCCCACAAATCCTGGATGCCTTCCATGTCCCTCAGCAGGCAGGTTCAGACAGGATAGACAGTAGAAAGGGATGGAGGGGACTG
AGAACCATCTGGAGCCGCTGGGACCTATAGTCTCGTCCTTTCCTTCTTTTGCAGGTCAGACGGGAACACCCGCAGCCTTGGCATGACGTCGTGA
AGGTGGCCATTGCTAACCTGACATGTGGGGACTCAGGAACCCCACCCCTTATGGGCTCCAGTCTGTGCTGCTGGCCCCAGCTCTGGGGCTCTAA
GAGGTCCTTGCTGCTACCCCACAGCAGCCTGCTGCCATCCATGTGTGCCCGTTGCTGAAGGCCTCGGTGGCCCCTGCCCATGAGGATGTGTGCC
CCCGTTAGGGGGCTGTTCTTGGCCCTGGTGGTAGTGTTGAGAACCGCGGGTGGCATTTGCACCTGTGCCTCGGCTCACCTGGGAACATGGAGGT
AAGTGAGTGTGAGCCATGAGTGAGTGTGAGTGTGGGTGCAGCAGCTCTGGAGAGTGTGGGGTCCCTGCTTTGGATGCTCTGTGGGGTCTGTCAG
GGCAGGCTTAAGCCGCTGGGATGTCAAAGGATGCTGTGTGACCAGGAGACCCCACAGCAAGCGCCAAGCTTAGGTTGGACGGTGTATGTGACCT
CAGTGGCTCACGGCTTACTTAATGCTGACGACATCCCAGGTACTTATGCTGCACTGTTGAGATTAGCTCAGCCTCAGAGAGGTCTCCAGGCCCG
ATTTCCAGGATGGGGACACACTGGCTGTCCCACATTCCAGGGAGGGAACTTTGTGAAGACAGAAGCCGGGAAGCAAAGTGCACTGAGAATGTCC
AACTCTGAAGCTACCTGGACACTCCGGGTGCTGACTTGTAGGCAAGTTCAGATGAAGTTCATTGATGGGGGAGGGGGCAGAATGCTGAGCTCAG
CATCACAGCAGGAACCTCCACACTCAGGAAGTTGATGCAGGAGGATCGTGAGTTCCAGGCCAGCCTGGGCCACGGAGAGAGACCCTGTCTAAGA
AGACCAGTATTGTGTATGTCCTGCCTGTGTTAACATGTTCTTAAACTGGTGCAGGTACGAAAAAGCATCACTTGTCTCTGGAAATCATTGGTAA
TGAGTGTAAATTTGTTTTGGAGAGAGATGTGTCCCCCCCACCCCCACCCCCATCATGACTTTTCTTTTTTTAAAGGGGGCACCGGGGAAAGAAC
ATAAACCCTGCACACACTAGGCAGATGTTCTACCAATGAGCATCTCAGCCCCTCGTTCCAGAGTTTTCGGTGTTGAGGGTTTCAGAGTAAGGCA
TTTACTTCACGAGTGAGAAAGTTCTCAGTCATTACGTATTTTGAGCCTACAGTGGGTGGTTAAAGACACATTAAAGAGGTAGAGTGTAAACCAA
GTGTCTTCGTCAGGGTTTCCACTGCTGAGAACAGACACCATGGCCAAGGCAACTCTTATAAAGGACACTGTTTAATTGGGGCTGGCTTACAGGT
TTAGAGATTCAGACCATTATCATCAAGGCAGGAAGCATGGCAGCATCCAGGCAGGCATGGTGCAGGAGGAGCTGAGAGTTCTACGTCTTCATCT
GAGGGCAAACAAGAAAAGACTGATTTCCAGGGAGCTGGGAATGATTCTCAAAGCCCACCTCCACAGTGACATACTTCCTCCAACAAGGACACAT
CTCCTAATAGTGCCACTCCCTGGGCCATGCATATTCAAACCACCACACCAAGTGTCTGTGATGTGCTAGAAGCCCCAGCATGAGAGGTTTGGAT
CTGGGAGACAGAAAAGGAGATCAGGAGTATAGCCTGGGGATGCATGCCATCCTCAGGGATCCAGCCGTGGGCTAGCTCCTCTCTTGTACTTGGT
GGCTGCATTGAGGTTACCTGGGGTGGGGGGGGGGNNNNNNNNNNNNNNNNNNNNNNNNNNNNNNNNNNNNNNNNNNNNNNNNNNNNNNNNNNNN
NNNNNNNNNNNNNNNNNNNNNNNNNNNNNNNNNNNNNNNNNNNNNNNNNNNNNNNNNNNNNNNNNNNNNNNNNNNNNNNNNNNNNNNNNNNNNN
NNNNNNNNNNNNNNNNNNNNNNNNNNNNNNNNNNNNNNNNNNNNNNNNNNNNNNNNNNNNNNNNNNNNNNNNNNNNNNNNNNNNNNNNNNNNNN
NNNNNNNNNNNNNNNNNNNNNNNNNNNNNNNNNNNNNNNNNNNNNNNNNNNNNNNNNNNNNNNNNNNNNNNNNNNNNNNNNNNNNNNNNNNNNN
NNNNNNNNNNNNNNNNNNNNNNNNNNNNNNNNNNNNNNNNNNNNNNNNNNNNNNNNNNNNNNNNNNNNNNNNNNNNNNNNNNNNNNNNNNNNNN
NNNNNNNNNNNNNNNNNNNNNNNNNNNNNNNNNNNNNNNNNNNNNNNNNNNNNNNNNNNNNNNNNNNNNNNNNNNNNNNNNNNNNNNNNNNNNN
NNNNNNNNNNNNNNNNNNNNNNNNNNNNNNNNNNNNNNNNNNNNNNNNNNNNNNNNNNNNNNNNNNNNNNNNNNNNNNNNNNNNNNNNNNNNNN
NNNNNNNNNNNNNNNNNNNNAACACACACACACACACACACACACACACACACACACACACACACACACAGCCTAGAAAGATAACAAACTCCCA
CAAGTTGTCCCCACACAGCCACTTACACACCATCACACATTCACATCTACACATAATAAAGACGTAATTGAGCACAAGGAGATGGCAGCAGCAT
CGTGGGGGTGGGGAGTAGGTAGGGGGAGGTGGTGAAGGGGAATTGAGGTAGCTTACACTAATCACTGGAAACGTCAAAAAAATGTAATAGAAAG
CTTTAAGGCTGATAAAAAAGAACAGATGGAAGCCCCCAGTTTTGGATAGAATTTAATTGACTATACTTTCATTATGTGGGGCTAGGGGGTCATA
GGACGACAACCTTGGGTGTCTTTCCTTGGGTGCTGGCCACTTTTAAAATTTCATTTTTTTTGAGACGTGGTCTCTCAACCAGCCTGGAGCTTGT
TAAGTAGACTGGCATGGCATCACTGCCTCCCCAGTGCACAGTGCCACACCTAGCCTTTTCACATGAATTCTGGGGATCGAATTCAGGTTTCTGT
GCTTCCTGGCAAGCACCCACTGAGCCATTCGTTGGTCTCCCCAGCCCTCTGCTGCTTTGTCCGAAGTTCAGGGCTGTGTTATCCCTGCTAGACT
GGGGATGATGGTCCCAGAACATGAGGAAGCCCTAAGGATGACTCTGGGGTCTCAGTCCCTGCCTGCTCCCTGAACCTCTTCCTAGTCTGACTTT
ATTCTGGCTGCAAACCAGTGAGCTTTGAGCTGTGGTGTGCCTTCTGTTGCTGTCTGCTTTATCCAGCAGTTCCTTGGGGTGGGGGTGGGGGGAA
CTGTGGTGAACTGGCTCTGACACGTTCCTCCCTCACAGGTATATTGGAAGGTCTCTGAAGACAAAAAATCCAAGTGTGCAGAGAAGGGGAAATC
AAAGCAGGTAATTGACCGCACGTACAAAGAGCCCACGCACACAGTTCGCAGTTATTTGGATCTTTTCCAGTAGCAGTCTTCTGCATGCCTACCT
GGTATCACGTGAGTCTGGTGGGCTCGGTCCTGCTGTCTCAACCCTACCAGCATCAGGATTGGTGCTCTCAGGCCAGTGCCCTGCATCCTCCGCA
CTGGAGAAGCCTGTTCTCACGGCTTGGCATTATGACTACAGGATGTTGTTTCTGCTGCCCACTAGTACCTGGTGTAGAATTGGCCTCCCCTATA
TGTTTCTGGCCTTCTTGAACCAGCTGAGGCCTAAGAGGTGTTGGGGATTTGATGGGATTTGTTATTGTTGGGTTTATTTTTTGTTGTTGTTGGG
TTTTGTTTTTTTGTGGGTTGTTTTTTTTTTTTTTCCTGTATTTTGTTGTCAGATACCAGTATGCGCACTCAGGGAGACTGAGCCTTGTATCCTT
TTTCTCAGGAGCTCTGAGTACCCTCTTGTGCCTGCCCACCTGGTGTCCCACCAGTGTCCCAGATGTTTTTAGATCACGAATGTTTTTAGATCAC
AGGAGCCAGGTTGTCCCCAATATTGGTCATGGTGGCTCAGCAGTGGCAGAGTTTATCAGCTGTTAGCTGATTTCAGAAACAGGGATTAAAACAA
CCACTAGGAGCCGGGCGTGGTGGTACACACCTTTAATCCCAGCACTCTGGAGGCAGAGGCAGGCGGATTTCTGATTTCGAGGCCAGCCTAGTCT
ACAGAGTGAGTTCCAGGACAGCCAGGGCTACAGAGAGAAACCCTGTCTCGGAAAACAAAAACAAAAACCAACCACTAGGTTAAACTTTCTTGCC
TAAATGGTAACTGAACACTTTCCCCGTCTTACTGGTCTCTAACTGTAGTGTTCACTCAGGACCCAAGGCAGGCAGGCATTACGATAGGCTCCCT
GCTGCAGGAAATCTGTGTAGCGGAGTGAGCTGATGCCTTGCACCACTGGATGTGGGGACCCACAGTGACCTTGGCATGGAGCCCTCCTGTGATA
CCCTGTCCATTTGAGGGTTGTTGGGGAAAAAAGCAACAACAACAACAACAACAACAAAAACCCCTTTCCCAACTTGAGATAATTTCAGGCCATA
GCCCATAGACTCTAAGTGCTGTTCTCCTGAAATAGCACATGGGCTCCAAATTGCCGTCTTTGTTTTCCCACTGGGCCCTCAGGGATACACAGCT
GGCTGTACTCTTGGGTCCAGCCTCTCTCTCAGTTCCTGCTAGTCGCTATTTCTAGTTCTGTGCTGGTGGCAAGAGTATAGGGTGGGGTCCCCAG
GAAGGTAGAAGGAGCCTGTACAATGTCTGTTTTGGCAATATGGGCCCCCAAAATGAACGGTGTGTGTTCAGCAAGGGTAAATACATTGCCATCT
GTAGTGGGCTCCCCAGTACAATTTGAGGTCAGCTCTGGTTTGGTCTTTGCTTTGCTTGGTCACCAGATACAGGCTGGCCATCTACTTAGGGATA
GAGCTAAAGTCATGCCTGGCACCTGCACTGCATGTGGACCACAGAGATAAAGTTTCCGTTGCAGAGCCTGGCTCATGGTGCAGTGTGCCCCCTC
TATGGGCATAGACAGACCAAACCTGAGCAGAGGAGAGAACAAGGCAGCAAATGACTGGCCTTTACCATGTGGATACAAGGGTTCTTTGATGGGT
GCCTGTTAATGGGGTGTTTCCCTTGCAGACGGAATGCCTAAACTACATTCGAGTACTACAGCCACTAAGCAGCACTTCCCTCTATGTGTGTGGG
ACCAATGCGTTCCAGCCCACCTGTGACCACCTGGTAAGACCACAACATATCCCTGTGTGAAGTGCTCACGTACCAGCCTGGCTAGCGACTAAAG
CAGAGCCAGCCTGTCTCAGTCAGGCTTTCTATTCCTGCACAAAACATCATGCATGACTAAGAAGCAAGCTGGGGAGGAAAGGGTTTACTCAGCT
TACACTTCCACATTGCTATTCATCACCAAGGGAAGTCAGGACTGGAACTTAAACAGGTCAGGAAGCAGGAGCTGATGTAGAGGCCATGAAGGAA
TGCTGCTTACTGGCTTGCTTCCCCTGGCTTGCTCAGTTTGCTTTCTTATAGAACCAAGACTACCATCCCAGGGATGGCACCACCCACAATGGAC
CCTCCCACCCTTGATCACTAACTGAGAAAATGCCTTACAGCTGGATCTCATGGAGGCATTTCCTCAAGGGAGGCTCCTTTCTCTGTGATAACTC
CAGCTTGTGTCAAGTTGACATGCAAAACCAGACAGTACACAGCCTCTCCTGTTCTTTCTGCAAACTGCAAGGACTAAGAACTATACAGTCGGAT
TTCTGACAGCAACAATTGCCCCGTTCCTCCTGATGAGGGTTCTGTGAGGTCCATGGGATGATCTATGGTAGCCATGAGGTAGCTGTACTTTCCA
AAAAGAATAAATACCGAGAGATCGGTGTTAGATACTGAAACATCAAATTGGATGTGCAAAACATCCAGCAGAAATCAGGGCAATCTGATTAAGG
AAGCTGGCTGGGGTTCCCAGCAGAGTTCTAGTCAGAGCAAGAATGTCCATTTGGGTGGGACTTTTAAATAAAAGAACAAACGGCAGCAGAGAGA
TGCCGTTGCCTTGGGAGCATCAGGCATCCATCAAGAACTGACTGGGGAAGTTGAGGCAGTCAGCTGGAGCCATCTCTCTGTAGCTGAGATCCCA
TGGGTGACCTCCCCCGCCATCCCCACCCTCACTCCCCAACCCCCCCACCCCGCCACTGTATTGTGAGATAAATAACAGTAAGCTCTTCTGCAGA
TGGTTCACCCCCTAGATGCTCTCAAGGGCACAGTGTTTCTCAAGGGCACAGTGTTTCTCAAGGGCACAGTGTTTTTACTCTGGGGTTGCTTGCT
CTTCTCTCTGTCACAGAGTCAGGGACCTTGGAAGACACTGGGAAAACATGCTTGGGTCTGAAATGGAGGAGGGGAAACCCTGCTGCCAGAACCA
TTTTCCCCCTTGAGCTCACACAGCACAAGAAAGCTTACCAATACGATGTATATTACAGGTCACTTACTTACTTAGCCCTTGCTGTGACCAAATA
CTTGATAAAATAAGTAGCTTAAGGGGAAAAGATTATCGAAGGCACCTCAGCCAAACAGAAGGCATCTTGTGGACAAGTAATGCTGGCCTGTAAA
CACCCAGGCGCACCCCCAGAAACCCGCTTTCACGGTAGGTCTCACTTCTACATCCACCACCTGGAGAGACACCCATGAGCCCATGGGTGACATT
TTACAAATAAAACGATAACAAATATGAAAACGTAATAGATGGGTTTCCTCTCTTCTCTGCTGGGCATAGATCCAAATTTTGCACCAAATGCCAA
AACCTTGGCTCTTCCCAAGCCTTATATTGTATACCTGATGGCCACGAGGCTAGGTGTTCAAGGAAAGGTAGCTAGCCTGTTCAAGGAAAGGTTG
GTCTGCTGAGCACGGGGTGAGTGATGCCATGCAGGGCAGGGCAGGGCAGCTCAGGAGGCAGGAGAGTAGTTCATTGCTCTGCTGCAGCCGGCTG
CAGATGACTGGAATCCCGGGTGGGGGAGGCTTCTGAAATGAAGAGCCTCATTCACCTAAACTCAGCCAGCTGAAGTTTAAAGCTTGTTCCCAGT
AAGAGTTCAGTTAGAGTTGTCTTAGTTAGGGTTGTACTGCTGTGAACAGACACCATGACCAATGCAAGGCTTACAAAGGACAACATTTAATCGG
GGCTGGCTTATAGGTTCAGAGGTTCAGTCCATTATCATTAAGGTAGGAACATGGCGGCAGCCAGGCAGTGCCTGGTGCAGGCAGAGCTGAGAGT
TCTACATCTTCATCTGAAGGCTGCTAGCAGAATACTGGCTTCCAGGCAGCTAGGATGAGGGTCTTATAGCCCATACCCACAGTGACACACCTAC
TCCAACAGGGCCACACCTTCTAATAGTGCTACTCCCTGGGCTGAGCATGTACAAACCATCACAAGAGGCTTACCTAGATTGCAAGAGATGTTTG
GTTTTGATCCCCAGGACCACAATACACTCACCACATGCCTATACACCATACATACATACACACACATACATGTACCATACATACACCATACGTA
CATACACACACACAAACTCCCCTCAGTTGGGGATATAACTAGATAGAACAGACTCATTAGAAATTCTCTTAGGCAGCTAGGTATGGTGGGAAGG
CTCCTGAGTATGAGGTCAGCCTAGCTTACAAGCTCAAAAGGAAAAAAAAAAGAGAGAGAATTAAGAAACTAAATATTTGTATAGATGTCTGAGG
AGAGAGGCCACTGCACAGGTTTGACTGGCTAAACTAACTGTGTACTGGGATACAACCAAAATTCTAGTGTGTGTGTGTGTGTGTGTGTGTGTGT
GTGTGTGTGTGTGTGTACACTTGATAAGTGCGGTCCGTGGATCCCATAGGCCTTTAGAAGCATTTCTCCTAAGAATGGGGACATTTTCCTGCCA
ACTGGTTTCATCATTGCAGATAAGGAAGCACAGTGATTGCCAGTATTCCCTCCGCCCCTCCCACCTCCCCAGTATCCTCCGCCCCTCCCGCCTC
CCCAGTATCCTCCGGCCCCTCCCACCTCCCCAGTATCCTCCGCCCCTCCCACCTCCCCAGTATCCTCCGCCCCTCCCGCCTCCCCAGTATCCTC
TGCCCCTCCCACCTCCCCAGTATCCTCCGCCCCTCCCTCTTCCCCATAGCTTAGAGCAGGGCACAGCCCCAGTGGCCTCCGGGCATCCCTGGGA
GGTGTGACGACAGATGGGTCTTATCAGGTGGGTCACACTGTCACCCCAGCTCACACTTCCTAACCTGACTGGTGGCCTTTATTGTTTTAACTGG
CCCGTTGGTCACTGCAGACACTGTGAGGTCCTGTGTGCTTGCTGGCCTCTGGCTTCCAGCCAGCAGTCTCTGGCACAGCTAGGAGCTCCTGACT
GTCGTGGGCAGCCTTGCTCCTGGCCTCTCCAGTAAGCAAAGTGTAAAGTGATGGCCTACTTGGATTGTCTCAGCAGTCCTGGAGTTCTGATAGG
CAGTCCTGTGGGTGGCTCCTGTCCCTTTAACGGGTTGCATCTGCTGATTTCTTCTGTGTGTGTTTAAACGCCTCTTTTAAATCCAGAAGTGAAA
ATTCTTCACCTTCGTTCTGTGGGCATTCCCCCCCCCCCCCACACACACACAGTTTGTCACTTGCCATTGAACTGTGTCTCATTTTTTCCCCCAC
ATGAGAACATTCTGATTCATTATGTGGTGATGTTTGGGTGGGTCTGATTCTCCTTGGATGGTGTTGGTTTCTTGTTTAGTTTTTTTTTTTTTTT
TTTTTGTCAGCTTGGCAGAAGCTGGACTTCTCTGAGAAGAGGGAACCACAGTTGAGAGAATAACACCTCATAAGATAAGATAGGTCTGTAGTCA
AGTGTCTAGGGGCATTTCACATTAGTGGTTGATGTGGGAAGAGCCAGCCCACGGAGGGGTGTATAAGAAAGCAGGCTGAGCAAGCCACGATGAG
CAAACCAGTGAGCAGCATTCCTCCATGGCCTCTGCCTCAGTTCCTGACTCTAGACTGCTGCTGCTTTGAGTTCCTGGCCTGCCTTCCCTCATTG
GTGGACTGTAAACTGTGAGCTGAAGTAAAGGCGGCCATTTATCACAACAATAAGAGAGCTAAGACACGTGAAATAGGTTTCCTTGTCAGGTGGA
AAGAGGTTATCCCAAGATTGTGTTACCTGCTGACCCTCATGAGCACACTGTGCCAGAAGCATGGACAAACACATTTGTTCTGTCCTCGCACAGT
GCCAGAATTTATTCAGCAACAATAAATTCCCAACGATTAGCAGTTTAGTAACATCAGGTTATCACTTAATCCTGCTTCCCTCAGTGATCAGGCC
GAGCAAGGCAAATGCAGATTCTTTATTCCCGTCTTTTTGTTTGTTTGATAACCATATTTCTCTGTGTAGCCCTGGCTGTCCTGGAACTTACTTT
GTAGACCAGACTGGCCTCAGACTCAGAGATCTGCCTCCCAAGTGCTGAGATTTAAAGCGTTCGACACCATGCCCTGCTCTTACCTGAATCTTAA
TTAGTAACGTTAACTGTCCAACCACACAGCACAGAGAAAATATGTGTATATGGCATGTATATGGTTATAGAGGGAATACAGGTTAAAGTCGCTT
GAGGTTTCAGACCTGGGCTCAGAGAATCTGCACTGATTTCAAACCAGACCAGTGCTGCGAGGGAGCCGCTGCAGTCAGGTGTTAGAGAGCTAGA
CACCTCCGAGAAGCTGGAAGCTAGAGTCTCCCAAGGCAGAAGCATGTCTCTGCTGAACAAACCAGGTAGCAACTGATAGTTTCGTGTGGGGCTG
TCCATCATAGTGTTGGGTGTCTATCACTTTAAGGAGACAAGGTGAGGATGTTACACCTAGGTCTATTAATTCGTAGCCCTGGCTTCCTAGGCCT
TTTTCGTACAACTGTGTGCCCTGACACACTCAGCTTGTATGAATTCATCCAATGGTGGCTCCCCTTTCTGTTCCCAGGAGTAAACCGTTTATCC
ATCTGTTTGGAGTGGATGGTGCATGGCAGACAGTGTAGCTTGCAGGTCCACCCAGGGCCTACTCATCCTTTTCCCCAAAGTGGAATCAAAAGCT
GCTTGTAAAACAGACTCTCCTAAGGCAAGGCACAGCCTGGAGACCGTTTTATACAATATGGGGCAGCTTAGAGCCAGGCACAGCCTGATCCCGG
CATGACCTGTGTTGTGGTGAGCTTGCTTTAGTAGAATGGCTTCTTCAGGAGCTGCTGGTGGTGGATGAGCGGGGGTGAGGGTTCTGTGGGTTGT
TTTCATTGGGTTTGTGTCGCCTGTTTTGTGAGGACTGTAGTTGAGCAAGCAACAACTGACCCTGCATATCTCAGGCTGTCACACACATGAGATG
TCCTTCAGCTGTCAACGGTCCCAGGGTGGGACCCACATGGATCAGGGCCCACTTACCCCACACTCTGGTCTTCTGAAGTGAAAGAATCTGTACC
TTTAAGTGATACAGGGACAGGTCCTCAGCACCGAGAGGTCAGATGTTTTCTTTTTATTCCATTGTAGAACTTGACATCCTTCAAGTTTCTGGGG
AAAAGTGAAGATGGCAAAGGAAGATGCCCCTTCGACCCCGCCCACAGCTACACATCAGTCATGGTTGGTGAGTCCTGCGTCTGAGGCTCTTTCA
CTCTCTGAGTTTATGGTGGCATGTGATGTTGCCACCTGGGACACTCAGGTCTTCCCTCTTCAGCCCTGCCTTCCTTGGCATCATCTTGGCACGA
GCTCCCTTCAGAGAAGGTGAGCGACTTGTGGCACAGACTCCTCAGTGAGAGCTTTCGCGTTTCCCATTCAGAGGGAGACTCAGGCCCCACCCTC
TGCAGCAGCATATGGCTTCTGGCTGTCGGTTTTTGTGCAGCACACAACCTGGATACTTGTGTGGCTCTGTGCCTCCCGCTGCGGTCCTGCATAT
CTGAGGCTAGGGGTCACACGCTGTCTTACAGATAGTTCATGTTGGAATCTCTCAGCCAGTGTGAAGGTTCAAGCTTCACTGTCAATGTATAACA
TTCAGTGAACTGTGAGATAGTTAATACTATATTACAAAACAGGCGTCATGTGTGACACTCCTGCGCAGTCATAGGCTAAAGTATGGGTTCTGAG
TATATTAAAGTAGACGAGCCTGGACCATGCTGCCTGGCAGTGTAGGTGCCTGCACATCTTTTTTTACTTACAGTGCTTTTTACTTAGGATGGCT
TCCCTGGGTGTCAAATACTGAGGAGTGTACTTGCCATTGCTATACTGACTGTGGCAAATTCTCATTTGTGATTAGCTATTACCCTTTAACCTGG
GAAAAAACAGTTAAATTTGGTGACTGATTGTTCTGATGAAAGATGCTGATGTAGGAAGCAGGAATGCATGTCAGAGAAGACGAGGACCCCCCCC
CCCCCGCCATCCTATAAGGAATTAATGAGGGTATAAATGAATTATGGTAGCCTGGTATGGGTGTGATAGCCTAGCAGAGGTGGAACTATGAGGC
TTGCTTACAGTCCAGCCTGGGCTAATGTCAGAACTTGTGTTAAACAGTTGTCCCTAGTCTCTGACAGAGGCTGAAGCTCTGATTGGATCTTCTC
TACTCCCTCTCCTCCACCACACGGGGCGAGCTCTACTCTGGGACGTCCTATAATTTCTTGGGCAGTGAACCCATCATCTCTCGAAACTCTTCCC
ACAGTCCCTTGAGGACGGAGTATGCCATCCCGTGGCTGAACGGTAAGTGTGTGCTGCCAGCCTTGTGGGTCTACCATTTTATTCTTCCTCTAGC
TGTCCCCAGGTCACAGGAGCCGGGGGAGGCGGGGGTGGGGTGGGGGTGGGGTGGCGGGCTGCTCATGTCAGATCCTAGGCAGTGCTCTTTGGAA
CTGCTCAAGGCCCGCACCAGAGTAGCTGTCTTGCTCACTGCTAATAGCATTGTTTAAATCTGATTCTCTGACATACCCCACCCAGCCCCACTTC
CACCCCGTCCCCCAAATGCAGTTTGGGAGACTTTAATAAAATGAAGCTCTAATGGGAAGTTGAGAATGTAGACACTGAGTTTGGGTGTCATCTT
AGATGTGGAGACTCTTGGGTCTGGCCGGGTGGTGTTGAAATGTGTCTTTACTCCCAGACAAGCATATCAGGGTGTGGATGATGGGGGCCCTTTG
TGGGTGTCTTTTTTGTGGGGATGCTGACCAGTGATGCAGGGCTTTTTCGAAGCCCCTTGATCTGGAGTCAGACCCTGGAGTCTGAGATCTGAGA
CAGCCAATTTCTCCTTGGGCCTCCCCAGGAGTCTGGAAATCCTTCGGGTGGCTGATTTGGCCCTTGTTTAAATTGGCAGATACTCTAGCATGCC
AGACCAACCACCAGCAGAGAGGCCTCACCCGGCTTCCTCTGTGGCTATCTTGGTGAAGCTGAGGAGGGTGGCGGGCGTCCTCTGGGCCTGGAGT
TCACAGTGTGGCATACATACTGTAGACGTCCTAGAAGGGAAGCTTCCAGGCTCTAAGGCTGCCCTTGCCAGCCTGCAGCACCCCAGGGAGCAGG
TAGAGAGGTGGCTTGGTAGCTCCGTGTACAGAAACCATCCTGTGATGCCACCCCACAGAGCCTAGCTTCGTCTTTGCTGACGTGATCCAGAAAA
GCCCAGATGGTCCGGAGGGTGAAGATGACAAGGTCTACTTCTTTTTTACGGAGGTATCCGTGGACTACGAATTCGTCTTCAAGTTGATGATCCC
GCGAGTTGCCAGGGTGTGCAAGGTGGGTGCTGTCTCCCTGTTCCCACCCACAGTCCTGCATGATGCCACTCCAAGATTCCTCTCTGGAAGTGTG
GCCATCTCCTATGGGTAGAGACCCCTGCGGCAAAGTTTAATGTACAGTTGAGGCACAGTAAGAGACCAGCAATAAGAGTTTTAGAGGTATGTGC
ATGGTTTCTCTTGAGACCCAAAGTAGGATTGGGAAGATGGCTTAGTGGTTAAAATGCTTACCACGGAAACAAAAGGACCAGCGTTCAGATCTCC
AGAACCTATAGATGCTGAGCGGATCCTCTGTAGAAAAGTGGAGATAGGGCCTGCTAGTGGGGCTGTCCTCATCGGCAAGCTCTGAGTTTGATTA
TGAGACCTTGCCTCAAAGAATAAGGTGGATGGTTCCTGACATCAACTTCTGGCCTCCAGATGCACCCACACACGAACACTCATATAGACACACA
CCGCACATACACACATACATGAAAGGAAAGAAACTCAAAGAGGAAAAAATTAGTCAGAGTGAGCACTTGTGATATTTTCAGTGTGTCACTAATC
ACAGGTAACTGAAATTGCAGAAAATGCAATCACGCACACGGGACCCGCCTTATTTCTTTCCAGCCCAGAGTGGAGTATAGTTTGTAACTGTCTG
TGTTGTCTCAGTCGTCAGCTCCCTGAAAATGACTAGGATTGAGCAGGCAAAGAGGGCACAAAAGGAGCTCTTAGTGGATGATCATGTGTTTGCC
CTAGGATGGTCTGCGGGGCCAGGGTCTGTGGTGGGAAGGAGGCCTCCCATCACTTGTTTAACTCCTGGGTCACAGCTGGGAATGCTGCAGGAGC
CAAAGCCAGTGGCACGCTGATGTGACACAGATGGGGTGGTTTTGCTTGTCATTGAATGTGTTTGGCTCTTTTCGTATTCTGTGATCCTGTCCCA
CATGGAAGTATTGCTTTGGTTACATAACTTGTCTTCAGTATTCTTGGGCTAGGCCGTGGTTGGGGACATATGGACGCCTGCTTCTGTGGCTAGT
CATCTGTCCTGCCTCTACCATGTGCTGTCTCTGGAATTCCAGGGCGACCAGGGCGGCCTGCGGACTTTGCAAAAAAAGTGGACCTCCTTCCTAA
AGGCCAGGCTGATCTGCTCCAAGCCAGACAGTGGCCTGGTCTTCAACATACTTCAGGATGTGTTTGTGCTGAGGGCCCCGGGCCTCAAGGAGCC
TGTGTTCTATGCGGTCTTCACCCCACAGCTGTGAGTTCACTTGTGAGTCCCTTGGCAGTTGGGGCCTGGTCACCCTGACGACCTCCTGCCCTCC
TGACACTCTCACGGATTCCCCTCCACAGGAACAATGTGGGTCTGTCAGCGGTGTGCGCCTACACACTGGCCACCGTGGAGGCAGTCTTCTCCCG
TGGAAGTACATGCAGAGTGCCACAGTGGAGCAGTCTCACACCAAGTGGGTGCGCTACAATGGCCCCAGTGCCCACTCCCCGACCTGGAGCGGTA
AGCAGGGTCTCGAGCTCTGGGGAGGGCTCATCTTCTCTGGATCTCAAGGCCCCCCAAGCATGAGACCACACAGATCCTAGTGCATCCCGGCAGA
GGGTTGCATGGCAACAGGAATCTGGGTGCTGGGCTGAGTAGCTGCCGGGCCTGGGGTGAACAGTGAAGCTGTTCCTTTCTGATCTCCTCTGTGT
TGGGTAGCAGGCCTCACTGCATGCTGCCCGGACGAGAGAGTCTACCGCCGGGCTCCTTTGAGAAGTGGACATTGCACAATGGCAGGCTTGCTTC
ATTTCCCATTTCCTGCAGACAAAAAAAACCTGTTTGTCAGCCTGGGCTGTCTCCTGAGGCAGCCTGTCCACTAGATAACAGGAATCATATTCTT
TCCTCCTAGATACAGTAAATTAGTAAAGAAAATTCTAGGGTTGCCTGCATATTGTTGCCACGTGGTGGATGGGTGTGGGTATGGAGGGGCTTGG
CTCTTGAAGCTCTCCCAGGATGGACTGTTCTGTGAGTGTCTGGCCTCGACACCTGGTTATTCTCATAACTCATAAATTCAGGTGTTCAGTAAAC
ATGGCTAGGGAGCTGGGACCAAAAAAAAAAAACTCTTTACAACTTTTTTTTCTTTTGTGCTACCCAGAATCTGGCTTTCTCTCCTCTCTCTCCT
CTCTCTCTCTCTCTCTCTCTCTCTCTTTCTCTCTCTCTCTCTCTCTCTCTCTCTCTCTCTCTCTCTCTCTCTCTCTCTCTCTCTCTCTCTTTCT
CTGTGTGTGTGTGTCTGTATAACAATATTTAACAAGCTTCCTTTGGCATACTTTCTTCTCATAGAAAAGCTGTGAAATGAGTGCTTTTTAATCT
GGAAGTTTGCTAAGTTTTTTCATTGGCTACTAATTCCTCTACTGATCCTGAGACAATTATGTCCCGTGGCTTTAAAAGCACAGCTCTTTGTCTC
TGGGGAGGTCACCTTAGCCCCTGTTACTCTTTGGAGAAGTGTGACCATGGCCCTCCAGGGCTTCTCTTCTGTGTGCTCAGTTGAAGCTAAGTGG
GCATGTGACCGCGGTGCTTTTACCCCACAGTGTATCGACAGTGAGGCCCGGGCAGCCAACTACACCAGCTCCTTGAATCTCCCAGACAAAACAC
TGCAGTTTGTAAAAGACCACCCTTTGATGGATGACTCAGTGACCCCGATAGACAACAGACCCAAGCTGATCAAAAAAGATGTAAACTACACCCA
GATAGTGGTAGACAGGACCCAGGCCCTGGATGGGACTTTCTACGACGTCATGTTCATCAGCACAGGTGGGTTCCTTGGTAAGATTGGGAAATTC
ACTTTTAGCCATCTATAGGTAGGTTTGGTCTCTCCAGGTACCAGGAAGGTTTGTGACAGCAGAAAAGGATTTCTGAGGTATCACAGCACCTGGG
ATTATGAGTCTCTGTGGCCATCAGGCACCTGGGGCACTGGTTACTAATGCAAGTCCCAACCTGTCGTACCTGGGCTGGAGTGGAGTTAAATAGT
CCCTGTTGTCATGGGACTAGTGGGACTGGCCTGGTATTTCCTAATTGGTAGTGGGAGACTCTGCCCCCTCCTAGGTAGGAGCCAGGTTCTGTCC
TGCCCCGAGCTGCCTTTGGAGATGCAACTCTCTCTCAGATGTCTTCTGGGATGGGGATGGAAAGTTGGAGCATGGCAGCTGCCAGAGCCCCAGG
GGCTACCCTTAGAGCTTCCCAGATGACTTGAACATTTTGCCCTCGTCTGCCTGCCTGGGCCCCTAACCTCCCCTGGAAGACCAGTAAAGTGCAA
CGGCCACCTTATACTGAATGTGGCTCAGGTGTCAGGGTGTAACCTTGTTGGTGAAGGTCATTGGAATCCACCATAGGACAGGGTTGTCCTCTTC
TGAGTGCCCCATTGAGGGGATGGCTTGAGTTATCCACGAGTGTGAGTGGTTGCCGCCAAGGCTGGAGTCTCTCTCCTAGTTTCATTTCTGTTGC
CGGGCGTGGTGGCGCACACCTTTAATCCCAGCACTCGGGAGGCAGAGGCAGGTGGATTTCTGAGTTCGAGGCCAGCCTGGTCTACAAAGTAAGT
TCCAGGACAGCCAGGGCTACACAGAGAAACCCTGTCTTGAAAAAACAAAAACAAAAACAAAAACAAAAAAATTAACCAGGGTGCCACCCTGGGC
CTGTCCCTCTAGGGCCTCCTTGCTCACCTGTGTTCTGACCTTGCAGACCGGGGAGCTCTGCATAAAGCAGTCATCCTCACAAAAGAGGTGCATG
TCATCGAGGAGACCCAACTCTTCCGGGACTCTGAACCGGTCCTAACTCTGCTGCTATCGTCAAAGAAGGTAATGTGGGTTTGGTTGGTTGGTTG
GTTGGTTTTAGGGGTGGGGGTCAGGTCCAGGCGCTTGTCTCCCTTGTAGCTTCTCTGTGGCTAGGACTGGCTAGCATGGGTCTCTCAAGGCTTG
GCAGCCTCTGGCCCAGGTGAACTTGGCGTACACAGCATGGGATCTGAGGCTTGGGAGGAGGCATGGGAGAGCCAGGGGCCTTGATTGTACTAAG
CCACTGGAGCTTTTGGGAGGTCCCTAACCTGGGGAAATGTCTGTGCCTTGAACCTGAAAAAAAAATGCAGATTGTGCTGGTGGGACATGACATT
TTGCTAATTTGTAAGGAGAAATAACAGGGGCTGGTGAGATGGCTCAATGGTTAAGAGCATTGACTGCTCCTCCAGAGGTCCTGAGTTCAAATCC
CAGCAACCACATGGTGGCTCATAACCATCTGTAATGAGATCTGATGCCCTCTTCTGGTGTGTCTGAAAACAACTACAGTGTACTTACATGTAAT
AAATAAATAAATCTTTTTTAAAAAAAAAAAAAGAGAACTAACAGGTCACCCTCTAGAGCTCCTGCCATACCGCCCTGTGCATCGGGCAGCCTTT
GCAGAGGCCTCAGTCACGGGGGCTCAGCTCTGCACTGTGGCTCCCACGAGCCACGGAAACACATAGATGACCAAACCTGCCCTCGAAGCCATGC
TATGTATTGCCCGAAGTTTTCATAAAAAGCTCCAGCCAGATGGTAGTAGTGCAAACCTTTGATCCTGGCACTCGGGAGGTGGAGGCAGGTAGAT
CTTTGTGAGTTCAAGGCCAGCCTGGTATACATAGTGTGTTTCAGGGCAGCCAGAACTATGTAGGGAGACCCTGTCTCAAAAATGAATGAATGAA
TGAATGAATGAATGAATGAATGAATAGGTATTTTTTAAGCCCCTAAGTGGGGTGCAGTATGGTTCATACCTCTAGTTCCAGACCTTAGAACATT
GGAAGCAGGAAGATCAGGAGTTCAAGGCTAGTCTTAGCCATATAGCAAAGTCAAGGCCAGCCTGAGCTAAGTGAGACCCCATTGCAAAAAATAA
AACAAGGTATATAGGAGTGAATAGAAATGGCCTGGGTGGGGCTGGAGAGATGGCTCAGTGGTTAAGAGCAGTGACTGCTCTTCCAAAGGTCCTG
AGTTCAATTCCCAGCAACCATTGTGGCTCACAACCATCTGGAATGGCATCTCTGATGGATGCCCTGTTCAGGTGTATCTGAAGACAGCGACAGT
GTACTCTATAAATAAAATAAGTCTTAAAAAAAAAAAAAAGCCTGGCAGTGATGGTGGCACATGCCTTTAATCCCAGCACTTGGGAGGCAGAGGC
AGACAGGTTTCTGAGTTCAAGGCCAACCTGGTCTACAGAGTGAGTTCCAGGGCAGCCAGGGCTACACAGAGAAACCCTGTCTCAAAAAACCAAA
ATGAAAAAAAGAAAAGAAATGGCCTGGGAGCTGGGCTTGGTCCACTGGCTGGAACTTGTTCCTTGTCCTCTGGCCTTGGGAAGATGTGGACACC
ACATTTTACATCTAGGATAAAACAAGGAAGTTCAGAACATGGGTTGTCTCCAAATCCTGACTACACTGCCTGCTGTCATGTTACCCTGGGCATC
ACTATATGGTCCTCTTAAGGTGGTCTCTGTGTGTGTATGCTTTTCATTAATGTGACTGTTAAGAGGACATGTGAGCCTCCTAAGTGCTGAGGGC
TGGCTTTGAGCAGCACAGAACCCAGGGAAAGCTAGGAGCAGGATCAGCTGCCACCTGCCCTGCTTCATGCCTCCTGGCCAAAGGTGCTCCCCTC
CCCTTGCTAGGGCTCTGCTGTACCCCCCTGAGAAGATGGGTCCAGGGCCACACTTTTGGCTTCAAGTGCCAGTGCTAGCCTCTTGCCTCTACCC
TTGTCTCTGATGCCTGGCTCTGGGACACTGCTGAACTGTGGCCTGGTGTGACTGTCCCCGTGGACTGCACATCTGTGGGCCCTGTGTTTCCAAT
TCAGTTCTCTTTAAGTAGCTGGCCACAGCAGTTACCAAGGGTCCATCAGTCTCACTTACCCGTGTGCTGGGCTTCTGCTAGCACCAGGTACAAT
GCTGGTCCTGGCTTGCACCCAGGAACATGGCACGCTCCTGTCCTGGAAGTCAGAGCGATGTTGATAGGCGTGGTCACATTGGCAGGCTGGATTC
AGAGATGACTGATAAGGATGTGTCCTTATCACAGGTACCTACTGTCTGGCTCAAGACAAGACTGGCATTTAAAGGTTGTGCCCTGTGGATTCCA
GCTGTAGTGCTGTGTCACTTACAGAGTCCAGGAGAGCAGTGGGGGGGGGGGGGGTCACATTAGGAGTGGGAAGCAACTGGAGAGGGCTTTTATG
TGGTTTTCTCAAGACACAAATGAAAGTCTCTTCACCCAAGATAGAGCACCAAGGATAGACCAGTCGAGCTCAGTGAGCCAGTGAGTTTTGGGGA
GGTAGCTACAGGGAAGAAGGAACAGGGGATTATTTACAAGCCCGTGGGTGGTTCGGAGGCAGCTGCATCCATATATCTCCCTTCACAGCTGGTA
GGCAGCTCGGCAGGGCAGAGTCTCCTCTCTACCGCAATTGTGTGCTGCTTATATAACCTTGGGGCAGCGGGCACTTGTGAATCTTAAACCTCGT
CAGGCTTCCTAAATTTCCTTCACTTTGAGTCTTGTGAGGCTCCCTCGGCGCTCCGGGAGGACGTGTTTCGATTGGGCAGACATAGAAACAGAGC
TGTCTCTTCTGGGAAGAGGAGCTGCTTTGGGCGTGCAGTGTGCTTAGCCCAGCTACCGAACGGTGGCGTCAGATCCCAGGCCCTGCAGTTCCTC
CACTGGCGTTTGAATCCTCCTGGGACAGGGGACACCCTGCTTTTCCAAACAAGATTTCTGTCTTAATGTGCTTTTCTGTCACTGCGATAAACCA
CTCTGACCAAAACCAGCTTGCAGGAGGAGAAAATTTCCTTCGGTTCACACTTCCAGGTTGTAGTCGCTGAGGGAANNNNNNNNNNNNNNNNNNN
NCCCTGCCCTGCCCTGCATGGCATCACTCACCCCGTGCTCAGCAGACCAACCTTTCCTTGAACAGGCTAGCTACCTTTCCTTGAACACCTAGCC
TCGTGGCCATCAGGTATACAATATAAGGCTTGGGAAGAGCCAAGGTTTTGGCATTTGGTGCAAAATTTGGATCTATGCCCAGCAGAGAAGAGAG
GAAACCCATCTATTACGTTTTCATATTTGTTATCGTTTTATTTGTAAAATGTCACCCATGGGCTCATGCGGGAATGGATTATTAAGCTTGCCCG
CTGGCTTCTGCTTAGCTGCTATCTTATAAAGTCAGGGGTGGCATCACTCACACTGGGTTGCACCCACCCTAATTACTTAGCAAATAAGAAAATG
GCCCACAGGCTGGGCGGTGGTGGCGCACGCTTTTAATCCCAGCACTTGGGAGGGAGAGGCAGGAGGCCAGCCTGGTCTACAGAGTAAGTTCCAG
GACAACCAGGGCTACACAGAAACCTTGTCTCAGAAAAGAAAAAAGAAAAAAAAAGAAGAAGAAAATGTCCCACGGACATGTCCACAGGCTAATC
TGATATAGGCAGTTCCTCAGCTGCAGTTGTCTGCCCCGCAAGTGTGGCAAGGTGACAATGAAAACCCATCAGGACACTGTCATTTAGGTCTTAG
CGGTCGGGCCTTGTCGCCTATTCTGAGTCAGTGAGTCCTTCCCTCCATGCAGTGTTTGACTGTCCTCTCTTCCCAGGAGCTGGTGGAGAAGCTA
GCAGCCCCTCCCAGTGCCTGAGTCCTCCTTACACTTGCCATCCGTCTCTCATACACAGGGGAGGAAGTTTGTCTATGCAGCCTCCAACTCTGCA
GTGCTCCAAGCGCCCCTGGCATTCTGCGAAAAGCACGGTAGCTGTGAAGACTGTGTGTTAGCACGGGACCCCTACTGTGCCTGGAGCCCAGCCA
TCAAGGCCTGTGTTACCCTGCACCAGGAAGAGGCCTCCAGCAGGTATGCCTAAGGATGGGGCTGTGTGCCTATGCCCCATGCACAAGCCATAGA
GTAATGTGCGCCTGCTGTCTTCTAGGGGCTGGATTCAGGACATGAGCGGTGACACATCCTCATGCCTGGGTGAGTGGATCTCCTTTGCTTCCCA
CCCCTGGGCTGGCAAAGCTCCCGGGGCGTCAGTTCCATGGTTTTCCTGTGCGGTCTGTCTTCCTTTCTCCTCTCTGAACAGAAGTCAAGTGTCA
CGCAGCAGACCTGTGACCTCTCCTTGTGGTGAACCTGTGATCTTTCTCTGTCCCTTTGGTTACAGAAAGAGGGCTCAAAGGCACACAGGGTGTA
TCGGTTCACTGGAAAGCACACCCTGCCCCACACCATGCTCCTCTGTTCTGCTTAGCTGGGCCCCGTAAACAAAACTGGAGCCTGCTAGGAATGA
GAGCGAAGGAGCCCTTGGGTATGACCAGATAGCCCTAGCCTAAAAACAATACTCAGGAACAGTGTGCGACAGTGTCATGCTTCAAGATGAAAAT
CCTACCCTAGAAAGAAGTGCCTTAAACGCTAAGGAGATGGCTCAGTTGGTAGGATCTGAGTTCGATCCCCAGAACCCATGTAACAGCTGGGCAT
TGGTGGTTCATGCTTGTGATCCTAGCCCCAAGGAGGGTGAGGCAGGTGGATCCCTGGAGCTTGCTAGCCTCACACAGCCTAGCCGACTTGGCAA
GTACCAGACAAATGACAGACTCCATCACAGAAAAAGACAAAGAGGGTAACTGCTATCTGAGGATGATACTCAGATTTCTGGCCTCTTTCTATAT
AAACACACATGTACGTACACACACACACACACACACACACACACACACACACAGAGCAAATGGCATCAGATTGCCTTCAGGCATGTGTAAATGT
CACACAAATTTCATGTGTAGCTTTCAGTCCCCTTCCAAAGATAGTTGTCTCGTTTTATATATGCAAATATTTCCAAGCCCAAAGCATTTTTCAT
CTTCCGTATTTCAGACAAAAGACACAGTTGTGGTTAGTTCTGGTGTCCTCTTGGGGCACCCCCTCCTGATGGCTGGCCATCAGGAAACGGCTGT
GACCAGAGGTAGGCATAGAATCTTGCCAGAATTCTAGTCTGCCTTCCCAGCCCCGTACCCCCTTCTCTGACTAGCCACATCAGAGTAAGAAGAG
GGTCCCTGGTTGCTAGCTCGCCTGCTTTAGCCATTAGCAGAAGTATTTGTCAGCTGACTGGGTGCCACTGTGAGGGAGCTGAGCCGTGCCCAGC
CCCTTCCTCAGCCTGCTGACCTTTCTCCAGGGCCAGGGTGAGAACAGAAATTCTCAGAGCTGTCGCCAGTTCCTTCAGTGTATGGAAGGGGGAC
GGGGTGGGGGCTGCTCTAGGGTCATGGATGTCTTTACCTTGGTCCTGAAGATTGCACCTGGCTCCAGTGGGTGGAAGTCTCATGCCGTCCTGTG
GGTATTAACCTGTTTTTTGAAAGCAGTCGAGCGGTCAGACGGAGTTGTTGACGGTGAGCACGTTTATTTTGATGTTCCAGATAAGAGTAAAGAA
AGTTTCAACCAGCATTTTTTCAAGCACGGCGGCACAGCGGAACTCAAATGTTTCCAAAAGTCCAACCTAGCCCGGGTGGTATGGAAGTTCCAGA
ATGGCGAGTTGAAGGCCGCAAGTCCCAAGTACGGCTTTGTGGGCAGGAAGCACCTGCTCATCTTCAACCTGTCGGACGGAGACAGCGGCGTGTA
CCAGTGCCTGTCAGAGGAAAGGGTGAGGAATAAAACGGTCTCCCAGCTGCTGGCCAAGCACGTTCTGGAAGTGAAGATGGTACCTCGGACCCCC
CCCTCACCTACCTCAGAGGATGCTCAGACAGAAGGTAGTAAGATCACATCCAAAATGCCGGTTGCATCTACCCAGGGGTCCTCTCCCCCTACCC
CGGCTCTGTGGGCAACCTCCCCCAGAGCCGCCACCCTACCTCCCAAGTCCTCCTCCGGCACATCCTGTGAACCAAAGATGGTCATCAACACGGT
CCCCCAGCTCCACTCAGAGAAGACGGTGTATCTCAAGTCCAGTGACAACCGCCTGCTCATGTCTCTCCTCCTCTTCATCTTTGTCCTCTTCCTC
TGCCTCTTTTCCTACAACTGCTACAAGGGCTACCTGCCCGGACAGTGCTTAAAATTCCGCTCAGCCCTGCTGCTTGGAAAGAAAACACCCAAGT
CAGACTTCTCTGACCTGGAGCAGAGTGTGAAGGAGACACTGGTCGAGCCTGGGAGCTTCTCCCAGCAGAACGGCGACCACCCCAAGCCAGCCCT
GGATACGGGCTATGAAACGGAGCAGGACACCATCACCAGCAAAGTCCCCACGGATCGTGAGGACTCGCAACGGATCGATGAACTCTCTGCCCGG
GACAAACCGTTTGATGTCAAGTGTGAACTGAAGTTTGCAGATTCGGATGCTGACGGGGACTGAGGCCAGCGTGTCCCAGCCCATGCCCCTCTGT
CTTCGTGGAGAGTGTTGTGTTGAGCCCATTCAGTAGCCGAGTCTTGTCACTCTGTGCCAGCCTCAGTCCTGTGTCCCTTTTTCTCTTGGGTTGA
GCCTGTGGCTCATCCCCTTTGTCCTTTTGGGAAGCAAGTATCTATTCCAGTCTCAAGTCCTGCAGTTGCTGGAGCGCTTACGCACCTGAGCCCT
TTGTGTCCTGGGGGAGAGATGGCCACCTCCGTGGGCTGCGAAGAGCCACCCCTTCCTCTTCCGATTCTCCTAGCAGCCACTCAGAGATAATTTA
ATTCCAGATTGGAAACGCCCTTTTAGTTTATCAGATTGGTAACTTACATCCTGCTCCCCAGATGGCACGGACAGTTTTCTTTCACTTAATTATT
ATTTTTTTTTTAAGGATTTTCGCTCCTATTGTGTTGATGTCTTAGGTCATTTTCTTTTTTTCTTTCTCTTTTTTTATTACCAGAGGAGATGTTT
TAATATTCATGAGAAGAGGAACATTTTCTAGATTTTTTTGTTGTTATATATTGAGATATAAAATATGGCTATGTTGCTTAAGATTCTCAGGGAT
AGACTTATTTTTGTTAACTTCATTCTTTCCTGCTCTTAGGAACATAGGCCTAAAATTGTCTCTTGAGTTTGCTCACCCTTTTGTTTTGGTAGCG
TTTTTTTGTTGTTGCTGTTATTGTTTCTAGTTTTTAATCTTATTCATTTTGAAGGATTTTTCTTTCTGAACTTTTTAAATTTTTATATTTTCCT
GCCATACATCTACAAAGTGGGTTTTGAGTGAGGGCAGGTGGCCCAGTGCCTTTGGGTGGCGACTGAGCTGGTCCCACGAGGGGAGGAGGGTTTA
TATACCCCATGACCCTGCGGCTTCTTGGCGCCTCCTGCCCATGAGGATCACATCCTGTCTCTCCTTGCTTCCATCTCTCATCACTGCCCTTGGA
CTTCCGCCTTGACTGTCCATGAAAGACAGAAATGGGTTGGGTAGTTGGCCTCCCAACCTCGGATGGTGACCGCAACATCCCGTGTGGGCGGCCG
GCCGCTCCTGCAGCCCGACTCTCCTGCCAGTGTCTTTCAGGATGTCAACGGGTGGTACGATTCTGGCATTTGTTTCTCCCTCACCGTGTGTGGA
ACACTCATTCCATGTAGAGGGTGACGAACTCTGGATTCCCCCCCACCCCCACCCCGTGCCGTGTAGACACTCATCTTCTGCATGACATGATCTA
CCATTCGGTGTAAACATTTGTGTTTATAAGATTTACTTTGTTTTTATTTTTCTACTTGGAACTGTACACATTTGAAAAGTACCCAAATAAACCA
GAAGCTTTATCGTTGACTGGGCCAGCCTTTGCCTTAGTGTGGAGGCTGGGGGCGGTGGGGTGTCCTCCTGTCCCTCTGTGACGGCCCTGGGTGG
GGGTTGGTCCTGGGATCTTGTCTGTTCTCATCCCATGTGTCCGGTTTCTTGCTTTACCTTCTCCGTCATGGGAATGGTTCTGACGACTTCTTCC
TCAGTGCCTTCTTTTGTGTCCTCTGTCTCACAGCCTCATCTCCTAAGTCCTTCCCTCCTCCTGGCTCCTCTCTATCCTGTCTGGGCCCTGACTC
ATCTTCTCCCAGAAGCCCTCGGCCGGCCTTGGCCTCGGGGCCCAACAGCCGTAAGCAGGTCACCTTACTGCCACCCTTCTTGAGTGACCAGGCG
CAGAAGGTGCAGGCGCTGGGGACCTTCTACCTCTTCTGCCAGGCCACAGGTGAGTTGAGGGGCCTGAGTGTCCATGGCTGTCCCCTCGCTCTGC
CCTTGCTCCTAGCTGTGCCTGAGGTTCAGCTGTCTGTGCTGATCCCGGGATCAACTGTCAACCCTGCAACGCTGTTGCTAGGGCTGCCGAAGGG
GTCATCCAGCCTCTCGCCGTAAAGGTACAGGTGTTGGGTCTTCTGAGCATGTAGGCTGCTGTGCCCAATGTTGTATGTCAGAAAACTGGACCTA
CAGGGCAGCAGAGAACCAGATGAGGCCACGATTTGCTAACCTGGGTTAGGTAGGGAATTCAAGGCCAACCCCAGGCAACTTATGAGAACCCTGT
CTTGGAGTTTTAAAATAGGAATTAGGATACATCCAGTGGTAGAATGTGTGACTAATGTGTACAAGGTCCCAGCCACAGCATAAATAAATACATA
AATGCGTGAAGTCCATAAGGTGGAGGTTTTCTCCCTCTGCTGGAGACTATCACATAAGGACATGGACTCTTGAAAGATGGTAGTTTACCCAAAC
CATTCTTTAGCTCAGAGATACCCATAGCCCCATCTTTCCCTGTGGGCTTTGGCCTCTGCACAGAAGTGAGGAATAGAGTTGATTTCAAGACAAA
GCAAATCCGGTTTATCTTAAAATTGCTTTTTAATTGTCGAAGCTATGGAGATCTTGAAAGTGCTATGTGTTTTGTTAAATTAGCTCTAGGATCC
CAGGGGCCTGTGTTGTCTGCTGTGAATGCAACATGCCGTTGGCAGCTGGAGGCCCCGTGGAGGCTGTGGGAGGTGGGCAGAGGTTGCTGCAGAC
CTACGTACCCTGACATGTCATCAGTGAATACATGGGCCTTGATGGCCCTTTTGAGTTGCTGTCTTAACTCTCGCTGCCCAGGCTGCTGACCCTG
GACACCTGAGCTTCAGCCCCCCTCTCCAGGTCCCTGGGTCTCCTGGTGTGTGTCACGGTGCCCAGTGATTCCCATTTTGTGCTTGCTGCTGTGG
ACCAAGCCTTCATGTCGACACCTGTTCTTGTTCCTCAGTAAGATATTTTAAGATAGATCATTTATTTATGCATGTCTACAAATCTGTGAGCGTA
TAAAGGGGCAGAAGAGACGCCTTGAAGCCAGAGTCACACATGATTGTACATCACCTGGTGTAGATGCTGAGGACTGAACTTGGGTTCAACTTGG
AACCTGCGAGAGAAGCAGGTGCTCTCAACTGCTGAGCCATCTCAGCACGTCTCTAAGGGGCAAGCCATTACATTTAGGGGAGTGTTTTCCAGTC
CCCGGTATTATTAGCAAGGCTTTCACAGGTATGGGTCCTCCGGTGTGGGAGAGGGTGAATGACTGGGGCCTTCCTTAACGAAGATAAGACTTCA
TTGTTAGATGCATAGAAACTACAACATCGGGCATTTCAACAAGGGGGAATTCGAAGCCGGGAGTTGTTTGCTAAGGTGATGGGGAACCTAGGAG
TGAGACAGGAAGGTGGGCTTCTCCAAAGACTGCTACAGGAAGCCACCAGCATGGGCAGAAGCAAAATAAAACCTCACTCACACTTGCCAGGCCT
CTGAGGTTGGGCATGACCTGCAAGGGTAGCCTTGCCGGCAATGTTCCTACCGCCGCACTCCTCAGGTACCACGAGAGACAGGAGATGCCCTTTT
TGAACTTTTTAGTGACCTAAGGGAACACTGGAAGCCACCGACTGAGGAGCCATGGCTGCGGACTGTGGGGGCCGGAAGTGTGCAGGGTGTGAGT
GGAAACTGAAGTGGAAGAGTGAGTTCCTCTCATGCCCCTCAGACCGGACTGAGCCCAGGCTGGGGAGACAGCTCACTGATTAAAGTCCTTACTG
TGGGAGTGTAAGGACTGGGGTTCTCATCCCCAGACCCCCACCTAAGTGCTGGGTAGGCTTGGTGACCCACCTGTAATTCCATCTTTAGAAAGTG
GTGATGGAATCCCCAGAGCATGCTAGCTGGCAGGATGAGCCATTTAGCAGTGCTCTGGGTTTGATTGACAGAACCTGTCACCTCAAGCCTTTGC
ATGCATCTACACACACACACACACACACACGCACGCACGCACGCACGCACGCACGCACGCACGCACGCACGCACCAAGTCTCTGTCTTGAGCAG
ACATGGGACCAAACCCTTACTCTCCCTTACCTACTTTCTCCTGTCCTTTTTTCCACAAACATTTGACCACACCCGGGGCCTGTCTTTTCAGTCC
TGTCCTCCACCAAGACAAGGCACTTTAGGGAAAGGCACCGCCAGCCTGGTGATGGCTGGGTGGGCTTTGGTGGTGTGAACATGCCAGGGCCTCT
GCTATCTTTGAGCAGGTGGCAGGTTGGGTCGGAGTTGGCAGACAATCTTATCTGAAGCAGAGGCCATGTGGTTTTGAACTCAACTCCCTGTAAC
CTTTCTACAAAAAGCAGTGTATGTCTTTGAGGTCTGCTGAGGAGGCCAAAGCAGCTGTCCCAGCTGACACCCCAGTTGGCTCTCCTAGCCCAAT
GACATGGGCAGGGCAGGGCTAGGTGGGCAGAGCAAGTTGGGACCCTTGACCTGCGTTTTTCTCTCTCCTAAAACAGCTGTTTGTATGATTTATG
TGAGTGGCTTGGGGCTAGCTGATTAAAGGCCTAGTGCGCTGTTTTTAGAACACAAGACTTAAAGAGAGGGTGAACAGGGACTCTTCACTCCCTT
GGCATGTGTCCTGGTGTCCGCTCTGGCTCTGCTGGTGACTCTGAGCTATCTTGGGGGAGCCTCACCCCTCTAGAGGGTTGATTAGAGGTCAGAT
AGACAGCAAGGCTTGTACTCAGGACTATTCTGCCCACTCCTGCTTCCACCCAGGACCTCCATGTCCTCTGGATTGGATGAGTGTTTTCCCAGTG
TATGAGGCAATTCAGACGCCCTGTTCTGCATACCCAAGTGAGATGACCAGGGAAGACATGAAAGCTGCCCCAAGCATGGCTGTGGGGGAAGGTC
AGGCTGCCTACAGCCTAAAGCTTGCAGGAACTCCCGTTTAGTTCCAGNNNNNNNNNNNNNNNNNNNNNNNNNNNNNNNNNNNNNNNNNNNNNNN
NNNNNNNNNNNNNNNNNNNNNNNNNNNNNNNNNNNNNNNNNNNNNNNNNNNNNNNNNNNNNNNNNNNNNNNNTTTAGTTCCAGGAAAGGCAGCA
GGATCCGGCTCTGACTTTTCCTCCAGTCTTTGTGCCCGGGTCTGCAGCCCAGCACTGAGGTCCGGCCATACCCAGCCAGGTGGGTGGAGGGCTG
GAGCCGCTGCACTGTCTGACCTTACACTGCAGTTGCTTCCCCGTGTGCTGATATCACTGGGAGGTGCATGTTTATTCTGTCCTGCTGCCAGCTG
CCAAAGGTTGGCATATGTACAGCACATGCCATGCCAACACACACCACACTGTGACATACACTACACCACACCACACATACCACATATACCAGGC
ACCACACATAACTCCCACCACATACTCTCCACACATAGCCCCCAACACCACACATATAATTACCCACTGCACACACAACACATTTATCCCACAT
TTCACATAACCCCCAGTACCACATGCCACACGTACCACATCTTACATCCCACACACCATGCACCACATATCACACCATACATGCTTCCTTTGTG
TACCACATATATAACATCACACATACCACATACACACTCCATACCATATATCATGCTACACATACATGTACACACTACGTACTCAGTCCATAAA
CACTGCACACATCACACAAACCCCATGTGTAGCACACAGCCACACCACCACCACATCTCACCTATACCAAATACCTACATCACAAGTCACCCAC
ACTACAAATTGCCCACACCGTAAAAGTACCACCCAATGCCATGTGCGCACAAACCCTACAAACTTAAGACACTTACCTCAGGTGCTTTACGAAC
AGCATAAGCAAATTGCTTTTACCAAGCGGGGTTCCTAAGCAAGCACCTGTACATTTTTGGGTCCCCTCATTTAGTCCCTGTTTGGGGTATGGAT
TCGGGGGGCCCTAAGAGAGCTGAGGAATTGGGGTAGTGGGGACAATGAAAGCTGCTTCCTTTCCGGGCCTCCTGGGTTCTGGGCAGCTTCAGGA
TCTGGGCTCAAAGAAACTTTTGGGGCTCCTTTCTCCTAATGGGGGCCTCTGTGGTGGCCAGGTGGGTGGGGCTGGGAAAAGGGAGTCCCTGGTA
CCTCCCTTTCTCAAGGAGGGCAGGGGCACACCAGAAAGTGGTTTCCCATATCCATGACCTTTAAGAGTGTCCTCAACCATTGGGGCACTTCCTC
ATTCTGGTTCTTCAGGGGGTGGGTGTGTTAAAGATCACATGACCCTTATAGTGAGATGCAGAACTGGGTGGGGTGTGCCTAGGGTTCCTGCTGC
TCCAATTTAGGAATCCATCATAAATGCAGACAATGATGTCTTGAGAGCATCAGCCTCATCCTTGAGCAGTATCTTTAGTCCCCCCCAGAGTCCA
GAGCCCAGCTCCCTCATTCCCAGGGCCTGTTTCAGTTCACAGTCCTAAGAAGCCACTGATGGCTACATCGTCATCTCTCAAGACTTCCAGGTGC
AGTCCCGATTACCTGCATGATGAGGTGCCTGGGGGCAGAGACAGAGAAAGGGCCTCAAGCTTAGCCTCCCCTCACAGGTAACAGACATGCTTGT
ACTTGGTCTAAATTCCAGGCTGGCCAGGGCCAAATAAGATGCCATCTGAACTAGCAGCTGTCTGGACTAATGGCATGTGACTGATGGGGGAACT
CATGAAATCTGAGGCTACGGTATGAGAGAAGTTTCTAGAAGTTGAGGGAAGCTTTGAAAGAGCCCTTGTGGCCAGAGTGCAGACTTGTGGGGAC
TGTGCAGCCCATGGGGATAGGTGGGTCAGAATCCTTCCCAGGAGGCTTAGTAGTCACTAACTTGATGTCAGGAAGAGCCCAGCCCGTGTCCATG
ACTAAATACCTGACAAAAGCGAGTCAAGGGGAGGTTTTAATTATGGTTCACAGTCTGAGTCTATGAGGAATGCAGCAGGGGCATGCACCTATAG
TCAGGAAGCAGTGTTGCTCAGTTTGTGTTTCAACATCCCCTCCTCTGGGGGCATCACTGTGTAGCCTTGGCTGGCCTGGAATTTTCTAGACTAC
CACGTCTTCCAGTTCCCAGAAATCCTCCTGACTCTGCTTCCTGAATGCTAGGATTAACGGTGTGTGCCAGCCACCATGGCCAACCTCACAGGCA
TGCCTAGAGGCACATCTCCTAGGTGATTTTAGAGTGTCTTGAGCTGACAATATCTACCATCACATGAAGGTATTTGAGGCAGGTGGCACAAGAC
AGAAACAACTGTTAGCTTCAGTGAACCCCTAGCTAGGACATGGGTGAAAGAACTCTGGGAAACCTGTGGATGGGACGTGCCTGGGCAACTGTGA
TGCATAGGTCCAGTTCTGGGTCCGCCACCCAGTGCCAGATGGCACAGTACTGAGGGGGTGGCACCGTCCACTGCTTTTAATGCTCCTTCTCCCT
CTCTTTGATTTCTGCACTCAGAAGGAATTGGATAGTTAAAGAACCAACAGAGAGTAAGTACCTCTTCACCTCTCTCATGTTTTACAGTGATGCC
ACATTTAAGTTTACAGGTGCTGTGGTGTGGGGTTTGTGGCCAATGTGACCTACATGTTTTCACCCCCCACCACAAACTTGATCTACAAACAAAC
AACAAAAGCCCGGAGTTAGTGTTTCATGTTCATTCCTTGGTTGTAATACCTCAAGAGTTAGTTGTTCCAGTTGGATTGTAGATTGATACCCAAC
TGCAGAGGAATGGCTAAAACAATATGGTTCCATGAAAGGCACTGAGTTGCAAAGGAAATGCTTGGCCCTAAGATCTACAGGTAACACCCAAGAT
CCTACCAGCTCTGAATCCAAATCCACAAAGCTGCTCCTGTCCTGGATCTACACAGGCTCTGTTGTGTCATTGTTCCTTAAACTGTTTCACAGCT
GTTTAAGTAGTGTCGGCATAGTATTAAGTACTGTAAGAAATGTAGAAATGATTCCAAGTCTCCAGGAGGAGGTACATGTAGGTTTTCTGCAAAC
ATGTCATTTGATGTCCTCAGGGATCCCCTGCAGATACTAAGGGATGACTCCAGTTGTGCTCCCCAGTTGATGGACATCTGTATACAGATGTGTG
TGCGTGCATGTGGATGCGTTCATATACACCTAAATACATGGAGTTGTCGGCGGCTAGAATTGAAAACACTTGAGTAGAAAGCAAATTTAAGTCC
GCAGGGCTTGTCCACTAGTCTGCAGCCAGGTGGGTAGGCACAGGTGCTTCCGGAACACGAGACTGGCATGTTCCTGTCTTATGTATGTTTGTTT
ACTTTTTAATTTTTTAAGTTAATTTATTTTAGAGACAGAACCTTAGCATGGATCTCTGGCTAGCCTGGAGTTATGAGACTTACTCTATAGCTCA
GGTTGGCCTTGAACTTATGGTGGTTAACCCTCTGTCTCTGCCTGCTGAGTACCGGGACTACAGGTGTGCTTCATCGTGCCCACTCAATTCTGTC
TCAGTGGCATTTTTCAATTATAAAAGTAACACTTATTTATATTTGTTATTCATAAGCTCTTGGAAATTTATTTTTAAAAATTCAAGGGTCTGGA
GAGATGCATGGGTAGTTAAGAGCACTTGTTCTTGGAAAGGACATGGGTTTGATTCCCAGCACCCGAATTGTGGCTCAGGATCCCTGCAGCTCCA
GTTCCAGAGCATGCCATGCTGCCTCCTCATGCACGTGGTGCATTGGTAACAAGCCAGCAAAACACCCATACACATACAATAAAACCCATCCCCA
GGCTGGGAGGTATTTTAGTGGACAAAGCACATGCTGTGCGGCATGTACGTAATGCCTGGCAGGCAGTTGCAGTAGCCTACCTATAATCCCAGCA
CTCCCAAGGTGGGAAAGGGAGATCCTTGGAGCATGCTGGCTAGCCAGTCTGGCTGATTCAATGAGCTCATAGTATACTTGAGACCCTGCTTCAA
TATATATATATATACACAGTGCCAAGCAATAGGCGAAGACACATGGTTGACATCCATCTCCAAGCCCCACATGTATGAGTTGCATTCTGTTAAC
CCTCTGGAGCCTCACCAAGCACTGTATGACCTACATGTTTTTCAGTTTGCTTTTTTCTGAAATCAGTTTCTCTGAGAGGGTTCTCCTGACTGTC
AGTCACTGTAGTGGCTTCCTACCATTTGTATGTGTCGTCGTCGTCCCCACCCCCGCCCCCCGGACATTTCCTGATTGTTACTAACAGAAACAAG
CCTGTGGCCCTCCAGTTGCATTACCGCTTTGGAGCCGTCCCTGGGATGGTCCAGTTGTATTTCTACTTGATCCAGTGTGAGAGGAAAGCCTGGG
ACAACAGCACAGGGGGTCATTGATGAGGGAACCAGATGATGATGAATAGAGGGTTGGTGAAGTGAGGAGACTCCAGGCCCAAAGTTATAAACTA
AAAATCTCTTCAAAAGTCCAGTCTGTGGGGCTGGCATGCTGTTGGTAGAATGGTCACTTAGTATGCATGAAGTCCTAGGTTAGATCCTCAGTAC
TCCATCAACTTGTTCAGGGGTGCAGGCCTAGAACCCCAGCACGTGGGAGGTGAAGGCAGGAGGATCACAAGCGCAAGGTCATCTTTGGCTACAT
AAAGTTCAAGGATAGCTTGGGCTACACTGAGGTCCTGTCTTAGAAAAGAAAAAATGCAACCTGTCACCTGTAACTGAGTAGTGCTAACTCCCTG
CCTGGTACCATTCCTTCCCCAGGGCAAGTTCTCCCACCCTTGGCCACCCACACACCCTGGCATCATGGCGGGGACAATGCCAGGTGATTTTAAG
AGTTCCCAGGTTCTGCCTTGGTGGTTGTTATTTGTTGTTATTTTTTGTTGTTTTTCCTGCTCAGTGTTTTGAGCCCAGGTGGAGATTGCTATTT
CTTTTCTCCCCGTTTGAATGTCTCCCATCAAGCGTGCGTGTGTGCGTGTGTGTGTGTGTGTAGATGGCATGTGAAGGTGGCAGGACCTGGCTGG
CTGGTCCTTCCTGTCCAGCTCAGCTTGGTACATCACATACCTGGTAACAGTAGCTGACAAAATGTAGCACCACGAGGCTGGTTTAAACCATTGG
GCCATCTTCAGCCAAGCCCCAGGTAGGGCCAGGGAGTGAACCATTTATGAGTGTAGCTGCTTTGTTTTGCCTTCTCCTTGGTGGATGGAGGGCA
GCCTGCCCTTGCATGGCCTGAAGCTCTGGGGATCTAGGGTGAAGTCTGAGACCCAGACTATACATACCCATAAGTCAGCACTAACAGGGAAGTG
ACCTGTTGCCATCACAGC
MOUSE SEGUENCE—mRNA
GAATTCGGCACGAGGCCATCCATGTGTGCCCGTTGCTGAAGGCCTCGGTGGCCCCTGCCCATGAGGATGTGTGCCCCCGTTAGGGGGCTGTTCT
TGGCCCTGGTGGTAGTGTTGAGAACCGCGGTGGCATTTGCACCTGTGCCTCGGCTCACCTGGGAACATGGAGAGGTAGGTCTGGTGCAGTTTCA
CAAGCCAGGCATCTTTAACTACTCGGCCTTGCTGATGAGTGAGGACAAAGACACTCTGTATGTAGGCGCCCGGGAAGCAGTCTTTGCAGTGAAT
GCGCTGAACATCTCTGAGAAGCAACATGAGGTATATTGGAAGGTCTCTGAAGACAAAAAATCCAAGTGTGCAGAGAAGGGGAAATCAAAGCAGA
CGGAATGCCTAAACTACATTCGAGTACTACAGCCACTAAGCAGCACTTCCCTCTATGTGTGTGGGACCAATGCGTTCCAGCCCACCTGTGACCA
CCTGAACTTGACATCCTTCAAGTTTCTGGGGAAAAGTGAAGATGGCAAAGGAAGATGCCCCTTCGACCCCGCCCACAGCTACACATCAGTCATG
GTTGGGGGCGAGCTCTACTCTGGGACGTCCTATAATTTCTTGGGCAGTGAACCCATCATCTCTCGAAACTCTTCCCACAGTCCCTTGAGGACGG
AGTATGCCATCCCGTGGCTGAACGAGCCTAGCTTCGTCTTTGCTGACGTGATCCAGAAAAGCCCAGATGGTCCGGAGGGTGAAGATGACAAGGT
CTACTTCTTTTTTACGGAGGTATCCGTGGAGTACGAATTCGTCTTCAAGTTGATGATCCCGCGAGTTGCCAGGGTGTGCAAGGGCCACCAGGGC
GGCCTGCGGACTTTGCAAAAAAAGTGGACCTCCTTCCTAAAGGCCAGGCTGATCTGCTCCAAGCCAGACAGTGGCCTGGTCTTCAACATACTTC
AGGATGTGTTTGTGCTGAGGGCCCCGGGCCTCAAGGAGCCTGTGTTCTATGCGGTCTTCACCCCACAGCTGAACAATGTGGGTCTGTCAGCGGT
GTGCGCCTACACACTGGCCACGGTGGAGGCAGTCTTCTCCCGTGGAAAGTACATGCAGAGTGCCACAGTGGAGCAGTCTCACACCAAGTGGGTG
CGCTACAATGGCCCAGTGCCCACTCCCCGACCTGGAGCGTGTATCGACAGTGAGGCCCGGGCAGCCAACTACACCAGCTCCTTGAATCTCCCAG
ACAAAACACTGCAGTTTGTAAAAGACCACCCTTTGATGGATGACTCAGTGACCCCGATAGACAACAGACCCAAGCTGATCAAAAAAGATGTAAA
CTACACCCAGATAGTGGTAGACAGGACCCAGGCCCTGGATGGGACTTTCTACGACGTCATGTTCATCAGCACAGACCGGGGAGCTCTGCATAAA
GCAGTCATCCTTACAAAAGAGGTGCATGTCATCGAGGAGACCCAACTCTTCCGGGACTTTGAACCGGTCCTAACTCTGCTGCTATCGTCAAAGA
AGGGGAGGAAGTTTGTCTATGCAGGCTCCAACTCTGGAGTGGTCCAAGCGCCCCTGGCATTCTGCGAAAAGCACGGTAGCTGTGAAGACTGTGT
GTTAGCACGGGACCCCTACTGTGCCTGGAGCCCAGCCATCAAGGCCTGTGTTACCCTGCACCAGGAAGAGGCCTCCAGCAGGGGCTGGATTCAG
GACATGAGCGGTGACACATCCTCATGCCTGGATAAGAGTAAAGAAAGTTTCAACCAGCATTTTTTCAAGCACGGCGGCACAGCGGAACTCAAAT
GTTTCCAAAAGTCCAACCTAGCCCGGGTGGTATGGAAGTTCCAGAATGGCGAGTTGAAGGCCGCAAGTCCCAAGTACGGCTTTGTGGGCAGGAA
GCACCTGCTCATCTTCAACCTGTCGGACGGAGACAGCGGCGTGTACCAGTGCCTGTCAGAGGAAAGGGTGAGGAATAAAACGGTCTCCCAGCTG
CTGGCCAAGCACGTTCTGGAAGTGAAGATGGTACCTCGGACCCCCCCCTCACCTACCTCAGAGGATGTTCAGACAGAAGGTAGTAAGATCACAT
CCAAAATGCCGGTTGGATCTACCCAGGGGTCCTCTCCCCCTACCCCGGCTCTGTGGGCAACCTCCCCCAGAGCCGCCACCCTACCTCCCAAGTC
CTCCTCCGGCACATCCTGTGAACCAAAGATGGTCATCAACACGGTCCCCCAGCTCCACTCAGAGAAGACGGTGTATCTCAAGTCCAGTGACAAC
CGCCTGCTCATGTCTCTCCTCCTCTTCATCTTTGTCCTCTTCCTCTGCCTCTTTTCCTACAACTGCTACAAGGGCTACCTGCCCGGACAGTGCT
TAAAATTCCGCTCAGCCCTGCTGCTTGGAAAGAAAACACCCAAGTCAGACTTCTCTGACCTGGAGCAGAGTGTGAAGGAGACACTGGTCGAGCC
TGGGAGCTTCTCCCAGCAGAACGGCGACCACCCCAAGCCAGCCCTGGATACGGGCTATGAAACGGAGCAGGACACCATCACCAGCAAAGTCCCC
ACGGATCGTGAGGACTCGCAACGGATCGATGAACTCTCTGCCCGGGACAAACCGTTTGATGTCAAGTGTGAACTGAAGTTTGCAGATTCGGATG
CTGACGGGGACTGAGGCCAGCGTGTCCCAGCCCATGCCCCTCTGTCTTCGTGGAGAGTGTTGTGTTGAGCCCATTCAGTAGCCGAGTCTTGTCA
CTCTGTGCCAGCCTCAGTCCTGTGTCCCCTTTTTCTCTGGTTT
MOUSE SEQUENCE—CODING
ATGAGGATGTGTGCCCCCGTTAGGGGGCTGTTCTTGGCCCTGGTGGTAGTGTTGAGAACCGCGGTGGCATTTGCACCTGTGCCTCGGCTCACCT
GGGAACATGGAGAGGTAGGTCTGGTGCAGTTTCACAAGCCAGGCATCTTTAACTACTCGGCCTTGCTGATGAGTGAGGACAAAGACACTCTGTA
TGTAGGCGCCCGGGAAGCAGTCTTTGCAGTGAATGCGCTGAACATCTCTGAGAAGCAACATGAGGTATATTGGAAGGTCTCTGAAGACAAAAAA
TCCAAGTGTGCAGAGAAGGGGAAATCAAAGCAGACGGAATGCCTAAACTACATTCGAGTACTACAGCCACTAAGCAGCACTTCCCTCTATGTGT
GTGGGACCAATGCGTTCCAGCCCACCTGTGACCACCTGAACTTGACATCCTTCAAGTTTCTGGGGAAAAGTGAAGATGGCAAAGGAAGATGCCC
CTTCGACCCCGCCCACAGCTACACATCAGTCATGGTTGGGGGCGAGCTCTACTCTGGGACGTCCTATAATTTCTTGGGCAGTGAACCCATCATC
TCTCGAAACTCTTCCCACAGTCCCTTGAGGACGGAGTATGCCATCCCGTGGCTGAACGAGCCTAGCTTCGTCTTTGCTGACGTGATCCAGAAAA
GCCCAGATGGTCCGGAGGGTGAAGATGACAAGGTCTACTTCTTTTTTACGGAGGTATCCGTGGAGTACGAATTCGTCTTCAAGTTGATGATCCC
GCGAGTTGCCAGGGTGTGCAAGGGCGACCAGGGCGGCCTGCGGACTTTGCAAAAAAAGTGGACCTCCTTCCTAAAGCCCAGGCTGATCTGCTCC
AAGCCAGACAGTGGCCTGGTCTTCAACATACTTCAGGATGTGTTTGTGCTGAGGGCCCCGGGCCTCAAGGAGCCTGTGTTCTATGCGGTCTTCA
CCCCACAGCTGAACAATGTGGGTCTGTCAGCGGTGTGCGCCTACACACTGGCCACGGTGGAGGCAGTCTTCTCCCGTGGAAAGTACATGCAGAG
TGCCACAGTGGAGCAGTCTCACACCAAGTGGGTGCGCTACAATCGCCCAGTGCCCACTCCCCGACCTGGAGCGTGTATCGACAGTGAGGCCCGG
GCAGCCAACTACACCAGCTCCTTGAATCTCCCAGACAAAACACTGCAGTTTGTAAAAGACCACCCTTTGATGGATGACTCAGTGACCCCGATAG
ACAACAGACCCAAGCTGATCAAAAAAGATGTAAACTACACCCAGATAGTGGTAGACAGGACCCAGGCCCTGGATGGGACTTTCTACGACGTCAT
GTTCATCAGCACAGACCGGGGAGCTCTGCATAAAGCAGTCATCCTTACAAAAGAGGTGCATGTCATCGAGGAGACCCAACTCTTCCGGGACTTT
GAACCGGTCCTAACTCTGCTGCTATCGTCAAAGAAGGGGAGGAAGTTTGTCTATGCAGGCTCCAACTCTGGAGTGGTCCAAGCGCCCCTGGCAT
TCTGCGAAAAGCACGGTAGCTGTGAAGACTGTGTGTTAGCACGGGACCCCTACTGTGCCTGGAGCCCAGCCATCAAGGCCTGTGTTACCCTGCA
CCAGGAAGAGGCCTCCAGCAGGGGCTGGATTCAGGACATGAGCGGTGACACATCCTCATGCCTGGATAAGAGTAAAGAAAGTTTCAACCAGCAT
TTTTTCAAGCACGGCGGCACAGCGGAACTCAAATGTTTCCAAAAGTCCAACCTAGCCCGGGTGGTATGGAAGTTCCAGAATGGCGAGTTGAAGG
CCGCAAGTCCCAAGTACGGCTTTGTGGGCAGGAAGCACCTGCTCATCTTCAACCTGTCGGACGGAGACAGCGGCGTGTACCAGTGCCTGTCAGA
GGAAAGGGTGAGGAATAAAACGGTCTCCCAGCTGCTGGCCAAGCACGTTCTGGAAGTGAAGATGGTACCTCGGACCCCCCCCTCACCTACCTCA
GAGGATGTTCAGACAGAAGGTAGTAAGATCACATCCAAAATGCCGGTTGGATCTACCCAGGGGTCCTCTCCCCCTACCCCGGCTCTGTGGGCAA
CCTCCCCCAGAGCCGCCACCCTACCTCCCAAGTCCTCCTCCGGCACATCCTGTGAACCAAAGATGGTCATCAACACGGTCCCCCAGCTCCACTC
AGAGAAGACGGTGTATCTCAAGTCCAGTGACAACCGCCTGCTCATGTCTCTCCTCCTCTTCATCTTTGTCCTCTTCCTCTGCCTCTTTTCCTAC
AACTGCTACAAGGGCTACCTGCCCGGACAGTGCTTAAAATTCCGCTCAGCCCTGCTGCTTGGAAAGAAAACACCCAAGTCAGACTTCTCTGACC
TGGAGCAGAGTGTGAAGGAGACACTGGTCGAGCCTGGGAGCTTCTCCCAGCAGAACGGCGACCACCCCAAGCCAGCCCTGGATACGGGCTATGA
AACGGAGCAGGACACCATCACCAGCAAAGTCCCCACGGATCGTGAGGACTCGCAACGGATCGATGAACTCTCTGCCCGGGACAAACCGTTTGAT
GTCAAGTGTGAACTGAAGTTTGCAGATTCGGATGCTGACGGGGACTGA
HUMAN SEQUENCE—GENOMIC
CCTGACCCAGTCACCTCCCAAAGGCTCCCTCTCCACAAACCATCACATTGGTGGTTAGGATTTCAACATCTGAATTTGGGGGTAATCCAGACAT
TCAGACCATAGTATCACCTTTGAAAGACATGACACCAGGCATCCCTTTAGGGCCGCAGGGTTAACACAGTCCTCCCTGAGGGGCTGGCCAGCCA
CTTCCCAGAACAACCCCACACTGTGCCTGGGAGCCAGTGTCCAGTAGGGAGACCGTTGGCCCCCTTAGAGGTGGCAGCAGGTCAACATTAGGCC
AGTGGAAGATGATTATTTTTGCTAGCACTAACCTGCTTGGGCCCAAGGATGCATGCACACACCACACACCCTCCAGAAAAGACAGTATTGTCTG
TATCCAAGTCTGAAGAATAGAGTGATGTCACACAAATGGCATGACAGTCTGCATCTCTACCATGCTGGCTGCTGCTTAGAGGGGTCCCCACTCT
TCCTCTGAAGGGCCCTGTTCGTGCCGCCACTCTGCGTGCATCCTCATAGCGCTTGTCCTGCCGACATTGCTGATAGATGGATGCCTGTGTTCTT
CACTCCCACCGCCCTCTGTCTCTCTCCCTGGGTTTCCCATTCTGTACATGCTGCACCCAGGGGTTTGGGAAGTGGGTGAGGGTTAGAGCATGTC
TCTGAGATATCCTGGCTGTGGCTCGCTTGCCCCTGCAGGGATGTGGCTTGAGGGTGAAGTAGACTGGTCCTGGCAGCTGCCCTGCTGGGTGAGT
CCGGCCCAACACAGGTCCAGGGCTAGGCATGTCCCTGCAGAGCTGGAGTGTTGGTCTCCAGGGATCCATTTTAATTCTAGGAAAACTGAAGTTG
GAACAATAAACTGTTTATTATGCTTGTGACCTAGACAGCTCCTGAAACCCATTCCTGATTCCTGATGGGATAAGGCCATTTTATCCTCAGTTTG
CAAGGCAGTGACATCAGCATCCTAACTGGAGGTGGGAGAGGGGTTTCTGGGGGCAGAGGACATCCCAGGGTGGGGATACTAAGGTGGCCAGGTA
CTGGCAGGCCATGGTTGGTGAGGGCTGCGGTGTCTTCTGTTTCCCAGCACCTGGCTGCCTGCTTCCAGCTGGGAGGGAAGATGTGGTGAGTGCG
TGTCCTCCACTGTCCTGGTTGTAGGGCCTGGAGAGACTCTAACCTTTACCTGCCCCATCTGGGCAAACCCCTGAGATAAGAAATAAGCCAGAAC
ACGCTCCCCCAGGCAGTAGTTTGCATGCAGTGAGGTCAGGGGTCCAGGTAATGACTGCCTATGTTAGATTGGCCAGTCCACACCTGTCACCAGA
GATCCCCTTTCAGTTTCCCTGGGATGCCAGCCACGGCATTTTAATGCCAGTGTTGCATCCTGTTGCTGGCAGAAGCACTGACACCTTCCATGTG
GTAGTGACTGGTGTCCCCTCTGTAATCTACCCTAGCTGCCAGACAGCTGATCCCAGGAAGCAGCCGAaACACGGGTGACTGGACACTCCCCAGA
TGGCATTTTGGTTCATGGTTCCTGCCTTACAGGACACTTGCCAGCAGTCACTATTCACATCTAAGATGCAACACTAGATCAGAATGTATGTTCT
GCAACAGAGTGACACATGCACAGATGCACATATACACACATGCACACACAGATGCGCACATACATGTCTGCGTACACATACACAGATGCGCACA
CAGATGCATGCACGTATGTGCACATATAGCTGTCCACACATACATGTATATGCATACACAGATACATATGTATGGATATATGTACACAGGCAGA
CATGCACAGGTGCACACATACATTATACACACACATACACAGATCCCCATGCATACACATATGTATACACATGCAGACATCCAAGCAGATGCAC
ATGCACTCACACAGGTGTACATATGTATGCACACAGACATACACATGCATGTGCAGACATGCAGACATACACATGTACACAACACACCTGTACA
GATCTGTACAAATGTACAAACATCGATAGCTGCACATATCTATGCGGGTTCATCTGCACACATACAGAAATACAGATGCACATGCGTCCACATA
CACAGATGCATACACACAGATGTACATGTGTCCACATATATATATACATACACGCAGACATGTATGCACAGTGGTTGCTGCGTACTCCCATTTT
CTCTGCTGTCATCTCCTGCCTTCATTTGAAGACCCCTGGGGGTGGGACAGCTGCCTTCTGACAAGTACTGACAGGCAAAAGAGTGTGGGGCTCA
GAGCCCCCTTGGAGTTCCATTCTGCTGACATTTAAAGTGGGCTCGTGCACCCTCATGAACAGCCCCAATTACGTGTAAGTAATGAGAGTGACAT
TTCACAACCCTGTCTTTCTAATGGGCTCCTGTGTCAAGTCATTCTTTCTGAATGCAAACGGCAGCAATTTCACACTGTCAGGGCAAAATGCACA
TGCATACAGCTCAGCTCCCAGCGGGATACCTTTGCTTCTCAGAAATGGCGAAGAAAGCCAGCAAAATGGCCTTTTTCTCCTTTTGTTTTAATTT
AACTATTTAGAGTGAGGTCCTTAATGTAACACCCATCAATGATTATGGAGCCACTGTTCTGAAAGAACTCGCAGGGCCGGCAGATCTGTGTGAG
TTGTGGTGTGTGCTTTGCTTAAAGCAACTTTAAAATTATATGAAACAATGCATTCTTGTTGAAAAAGGAAAAAAAAACCCTCCAGTGTCACAAA
GAAAATGTGCAGCCCCCTCCCCCTCCCTGGGAGGAGCAGTATGTGGCATGGGGTCTGTCCTGACCTTTCGCTACTCATGTGGACTGTTTTAAAG
GCCATTTGAGAAGAGCAGCAGGGCCTGATTTATGCCATCGAGAATCTGCTGTCTGCTGATGAGATCAATACACTGCAGACCTGGATATAAATCC
GTGCCAGGAAGCCTGGTGGTCAATCATTGTTCTCAGGGCAGGGCCTGGAAGCCACGTCGGGGTGCCCGTGCCCTGCTGAGCTCTACATGGCAGT
ATCTGGATTGCTCCAAGGTAAAAGCAATTAAGAAAAAGGTTTCTTTTCAACATAACCAGTTTGAGTAACCGCATAAACAGCACCAGTCCTGACA
GTCCTTCGTAACCATTTAAAGCCACACAGGAGAACCTGCTGGCTTCCACCTGGGCACCTGCTGACACTCCTGGAAATACCTTCTCTCAGCCACA
TTCGTTTGGGGATGGCTTTGCCATCCCTGGGTTTGGTCGTGGATACTATTACAAGATTTGTTTTCAATCTCTCTTCACTGGCGATTTTGTTTTG
TGGAACTTTCTACTCTTGGCTCCTTACCTTTGTCCTCTCCGGGTCTGGCCCTAGTCTTCTCACTGGGATGTTTGTGTTTCTCCTGTTCTACCTC
AACTAAGTCAGGGAGGCGTTTTTAGGTCCTTAGGCCAAGTGCTATGAAAACAATACCACAGAGGGGGATGGAGTGTGGGGGTCAGGGGAGGCAA
AGGGTGACTCTGGGATGGAGCCAGCCACCAGCAGCTCCTGGGGGTAGAACAGTCTGCAAGAGGGAGCAGCAAGTGCCAAGCCTGCAAGGCAGCC
TGAGACGGGTGGGGTGCATCGGAGGGAGGGGGCAGGAGTGGAGTGGAAGAGGCTGGCCACATTAGGTGCTGGCATTCTGCATTAAATCCTGTGC
CACTGCCCAGCACTTCGGCTTTGCGGTGAACAATCCTATTTTTACAGCGTGTTTGAGCCCCCAGATCTGGCTGCCCTAGGGACCCAGGCTCTGC
ACAGAGTCAGCTCACTCTTCCCGTCCTTGGGAGCCTCCCTTCAGGGGGTCGTGTCTTCTGCTTCTGGATCCACTGGCCTGCTTTCCCCAGGCTG
TGAGGAACCAGAACATGGATGTCTTTTTAAGGTTAATTCATTTTATGAGAGTAATTAATGCAGGTAATTTTAAAGTGAAGTAGTTCTTCTTTAA
CTTGAGAGAGGAAGCAGCACTTGCTTGTCTTGTCCCTTTGTCCCTTCCCTGCTGCCCTGAGACACTGAGTTTCAACTATTTTCACTATTTTGGT
ATTTTCCTTCAAATTAGATATGCCTACATTTCCTGACTTTCCCATCTTAGATGTTGTGTTATGATGGAAGACAGGATTGTGTTCTCTGACTCTT
GTCCCCTCCCTTTCCCTCTCTTTCTTCCCCCAGACCTCCAGTGGAGTTAGTTGTAATTTTTGTAATGGGGGCTATGCAACTGGGCAGTGATAAG
TACACTCTGGTTACATTTCCATTCATGGGTCACTCTTGCTTCCCTGGGGTTAATAACTTCATTTTCTAATCTGTGTATCTGTTCTAATTCATCT
TCAGACTCTTTCCCAGAGCCTTAAAATGCATTTCTGAGAACAAAGCCACAGATGCAATCAGTAATCCACTGTGCCTTCTCCTGCCCCGCCCCAT
TCGAGCCTCTGCCTGCTCCCCAGCTCCCCGCTCTCTCTCCCTCTCCTCCACTCGCTTCCTAAGAAAGAAGACCTGGGAAGCAGCTCCCTTGTTT
TGGTGGAGCAAATCCTGCACTAGCTTTCTGAGAAAGAAGCTGAGCGAGGTAAAACATTTCAGAACTTGTAGGTTTGAAGCAGTGTTCTGTACTG
CACTCATACTGATTGATAATTTGACTAGATGGGGAATTCTACGTATGAAGTCATCTTCCCTGGGATTCAAAGGCGTTGCTTTGCTGCCTCCAGT
GGGGCACTCACAGGTAATTTCTTTGTGGCCTGTTTCTTTCTGGAAGCCTCATGTAACCCTCCTTTCAGGATGATGTGTCTGGTGTGGGCGGGTT
CCTTTCATTCACTGTGCTCCTGGCCGCTGTTATTCCGAAAGCTCAGGTCCTTCTGTTCTAGTTATTTTCTTTTTATTACTGCTTTAATAATTCC
TCATTTTTTTTCCCGGAGCTCCTGCCAGTTCATGTGGGACTCCTCAATGGATCGTCCAGTTGTCTGTTCCCCCTTTTTTCATCTCTGCTACGTG
TGTAACTTCTAGGAAACCTCTTTAGTTTACTTTCCAGCCTTTCATTTCTTTCACCACATTTTACTTTTAAGCTTGCTTCCATTTTCCACGTTGT
GTTTCTTTGTGACTTCTTCCAGGCCCTGGCTCAACTCTGGTCTGAAATTCAAATCAGTCAGCTCTGGTGGTGTGTGACAGGGTTGGTGGTAAAC
ACAGCCACTGTTAAAAATTAAATATGTGGACTTAAAATGAAACAAATTATATTTAAAAAGGTAAAATACTCAGAACTCATTCCTTTCTAGTATC
GTGTGCATTCTACTGTTATCTGTGTGGTTGCAGTTACTCGCCTCTTGTATCTGAGATGGCAGTGCCATGTGCTGGGTGCTGCTGTGCACCTCTC
CCCAGTTCAGCGGCATCATTCTGGGAGCTCGAAAGCAGCATTTACACCACAGAAATCAGCGTGTGCTGCAAGCTGGGCACCCCCCACCTTACCC
CACCGCCCACCCCCACTGCCCACCCCGTGGAGAGCCAGTTGTTACAGCTTGCCAGCACACCGTTGGTTACTGCTCACCTATTAATAGATTCCAA
AGTCACCTCCCTCCTCCATTTTTATCCTTAAAGTTCATATCCTTTTAGAGTCATTTCATTGGGTTTCCAGAGAGAGTTGAAATAAATCTCTGTG
TTCTCCCATCTCCTGGCTCTGGACTCTTAGCCTGGCCTGACCCCAGCATGCTTATTGGGATACGCAGAGGACTGATTGCAGTTGCGGGATCTAG
ATAGGAATTAGATCCCATGTAAACCATATCTCTCCAACAGTGATCCAGCATCTTTGGTATTTGACCCGAAATGAACTGGGCCTTGTGGGTCTTG
CGTCTCTGCTCCTAGCCCTCCGGTGTGGGCACTTACTTCCTTAACGTGTCCAGGCCATGAACCCTCACAGAGGCTGCTTTTGTGACTGGCAAGG
AACTCCTAGGCCTGTTCCTTGTTGTTACTGATTTTAATAGACTTTATTTTTTAGATCAACTTTAGGTTCATAGAAAAATTGAGAAGGTGGTACA
GAGATTTCCCATATGCTCCTTCCCCACACATGCACAGCCCCCTCATTTTCAGAATCCCCCCACAGAGTGGTGCCTTTGCTACAGTCGGTGAACC
CACATAGGTACCTTATCACCCGACATCTGTATCTGGACATTAGGATTGCCAGTTGGTGTTGTACATTCTGTAGGCTCGGACAAATGCATACTGA
CATGTGTCCACCGTGGTAGTATCCCTGCCAGCCTAGTTTCCCTCCCCTAAAAACCCTCTCTCTCCCCAGCCCCTGGGAACCACTGATCTTTTTA
CTGTCTTCATGGTTTTGCCTTTCCCAGAATGTCCTATAGTTGGGATCATGCAGTATGTACTTCTACAGATTGGCTTCTTTCTCTTTAATGATAA
GCTTTTAAAGTTCCTCTGTGTCTTTTCATGGCCTAATGGCTTATTTATTTTTAATGCTGAGTAACGTTCCCCTGTCTGGATGTAGCGGTTTGTA
TACCCACTCGCCTGCCCCTGGGCTGTCTCCACGGCTGGCTTCCTGTGTCGTTGGCACGCCTTACCTCTGCAGGCTCCGCATCCGTCTTCAGAGC
GCCTTCTCCCATCCCATGGCAGCTCATTGCTGTTTCTTTTGTGTGTATGGACCTTTGCCCAGCTGGGGGACATGCCACGAGAGAGGTTGTTTCT
GCTTTATCCTTGCTGTGCACACCTTGGCACTGGCTGCGACCTGGGTCTGGGTGTGGCTTGGAGGAGCCAATGTCAGTTCATTGCGTTTCACTGG
GCTGGGACTGCAGCACATGGACCAGGCCACTGGTGTCCTTGCTGCATGCATGACAAGAACCCTCTCCAAGGCCCTGCCTGCCGCAGGCCTGCCT
CCTCCTCCTCCTCCTCTAGTGGCGCGGGAGCCAGTGTGAAGTCTCTCACAATGCGAGTGTGCAGTCCTCTTCTGCTTTAAGGGATGGGGCAGCC
TGGCCACGTTGTCACTTCTGGCTCTCACTGGCTGTATGATGTTTGTCACATGGAACGGGAGAAAGGACGCATCCTTAAAATGCCAGGGGATCAT
TGCTCCAAAAGGAGGGGTAGCTGGTTTTTAATGGGAGCTTTTCTCTTGAGGGACTGTGGATAGCTTGTCACCACTGTTACCATCCTTTCTTATG
TCTGTCATTGCATGCAATGAGGACTGAGAAGAGCAAGGCCAGCAGGACCCTGGAGGGGCATGGCATGTTTGTGGGTGCCAGGCCCTGGGCTGGT
TGCTTCCACGCAGCCCCACTCCAGGGCGTGGGTTCTGTCGGGCCAGGACTTGTTTGTTCCAGGCTTAGCAGGAGCTCCATTCGTATTTGTCAGA
GCAATAAACATTATTATTATCAGATGCTAATTGATTAGTTATATATTAATATGATTTAGCAGATAATTCTCACAACTTTGTAGGCCAAGTAGGT
CAACTTCTGTTTTGCAAACAAAAAGTGACACCATTATGGCAAGGAGCTGCAAATGTGCCTGGAATTCAGAAGATCTGAACCTATAATTTATTGA
GTCTTCTTCATTGGGAGCCTATGTAGAAACCATTACTGGTTTGGGAGCTCAAAGTGGAGCAGCTTTTGGGAGCCACTCCTAATTACCAATCAGT
TATACAGAGGAAAAGCCTCTCAGATGAATGAGACTGTGCAGTGGGATTTAGACCGGCAACTTCAGAACAGACACATCTGGAAATGTTCTAAGTG
GTGTTGACAGGCAGGAGAGACAGCCGTTACACAGCCATGCAGAGGGGCCGAGCCCTGTGTGTTCAGGTGTAGCCAGGACAGTGCAGTGGAGGGA
GTGTGGATGAGGAGCAGTTGGATGGAGGTAGAGTAGGGTTGTCCATGGCCTTGCTGGCCATGATGAAAATGTGGCCCTTATTCTGAGTGATGAG
AAGGTGTTGAAACATTTCACATGGGGAAAGGATATGATCTGGATTTATGATAAGAGCATGACTTTGGCCACTCCTACTTTGTGGCAGTGGACTG
GAGGGAGGTTGTGTCAGTTTGGAATGGTATTTGTTGGTAACAAAAATCTGCAAGCAAGTAATTTAAAGATTTTAATAATTTTATTAGCAAGTCT
GCATAGACTCATAGCCTAGGGTCTCATAGGCTCTTGTGGGTTTCACTTGGCCATTCTTAGAATGAGACTTTTATCTTCATGTTGACAGCATCGC
TGCCAGAGCTCCAGCCATCACATTCTAGTTCCAGGCAGCAGCAGGAAGAGAAGGACTGAGGGAATTGCTAGCTGAATCAGCCTCCTTTAAAGAG
CTTTCCTGGAATTGCCATCTAATAAATTCCACATACAGTTTTTTTGGCCAGAACTCTCACCAGAGAAGCTGGGAGATATAGTGAGCTGGGCACA
CTGCCAACCCAAGTAACCTCGGAATTTTGTTAGCGAGGGTGCAGGAACATGGATGCTGGGGCAGGAAGCAGTGATCTCTACCATGGAAAGCAAG
AGGCCAGGATGAGAGGTGAGCATTGCTCAGATGAGTGATCGTGGTGGAGATGGACAGGAGGAGACAAGCCCCAGATGTGTTTGAGGCTGAGCAG
CAGCACCATCTATGGATTGGGGGTGGGGGTGGGGTTAGAGGTAGATGGGGTCGGCCCCTGACTGCTCGTGCTTTTTTTTAGGTGGGGACATGGA
CTGTAGGAATTGGCTGGAAGCAGAGTGAGGTTCTGTTTCGGCTGTGTCTGGCTGGGTGTGGAAGGCGGCATGTGGAGGTGGTAGGGAGGAGTGG
GGTTCTAGAGTCTGGAGCTCAGGGGTGTGGTTGTTCCATGACCCTCACAGGACTCCTGGATAGAAGGCGGAGCAAGGGACTCAGGGATCCCAGG
TTGCTGTTTTGAGTGAACTGTTTACAGAAGTGTAATGTGAAAGTGCCCAATCACTGGGTGCCCAGCTCAGGACATTCTCATAGAGTGAACCCAG
GGGTGCAGCTGGCCCCAGATCAAGGTGCTAGACGCCCTTGGGCCAGTCCTGTGGCGGGTTACGCTGTGGGGCCCAGCAAAGGTACACCAGGACA
GTAGCCATGCAGTCATCAGAGAATGTTGGGGACATGAGAGATGGGGCCAGGAGGCCTGTGCATGCCTCTCCCACCACCAGCCCCACAATTTCAC
TAAGCAGCATTAAGCCTGTTCTTTTACTAAGGGCTGTTTCTTACTGGGCAAATCAGAGTGAGTTACCACCATTTCTATGGTGCATAGACTTCTT
TAAGTGAGACTGGAAGAGCTAGCAGGGTCCCATTTGGGGCAGGACGTCAGACACTCCTGCGTGGTGAGGCCTCACGTGCGTGTGTTTCTACAGG
TGTACATCCGTGCATGTGTGTGTGTACATATGTGTGCGCATATGTTGTCTGTGTGCATGTGTGTGCACTCACATGTACATCTTAGCTCTCTCTG
CAGCCTCTGGTTTTTCTGGCCGTTTCCTCGCTGAGCGTTACAAGGCAGAGTCTCTAAGGGAAACTGAAAACCCGAGTTCTCTTCCTTCATTTTC
ATCTCATTACCAGCTGGACACAGCAGCCACACAGGAAGGAAGCTGGGCAGCCAGCCGGCCATGTGTGTCTGCCGGGTGCCCCACACCAGGTCCC
CTCCACGTGTCTGTCCTGTGTTCTGGGCTGTTAGCTGGAGGACCGCGAAGCACTGACTCCTGAAGACCCTGGCTTCGCTTTCCTGTGTCCGTTG
GGCTGTCCACTTCTAAGACTCTCTTTGTCCCCCGCTGCCTTCCGTATTCCTCAGCAGATGGACCCGGGTGAGGATCCAGGGCAAGCAGAGGGGC
TACAGAGCAGTGAGAAGCACCTCATCACTCACCATGGGTCCTGCCTTTTCTTTCTCATGTCCTTCCAGCATTTCTTCTGAGGCCCTGAAGAACT
ATCAAGTGGGCTTTGACATTGCGGTGGTGAGAGCGACCCCTCCTCACCTGGAGAACTGGCAAATGTGGATTCTCAGGGACCGCGCTGTTCACCA
GCTCCAGGCTGTGCTGCTGGCCCTGGTCCTGGGGCGCTGAGCCGCATCTGCAATAGCACACTTGCCCGGCCACCTGCTGCCGTGAGCCTTTGCT
GCTGAAGCCCCTGGGGTCGCCTCTACCTGATGAGGATGTGCACCCCCATTAGGGGGCTGCTCATGGCCCTTGCAGTGATGTTTGGGACAGCGAT
GGCATTTGCACCCATACCCCGGATCACCTGGGAGCACAGAGGTGAGTGACGAAACCTGCAGGCGTGCTGATGGCCTGGGATGGGGACCTCACTG
CCTGGGATGCTGAGGTGGGTGGCTGGGGACGGGACAGGGACCCCACTTCCTGGGATGCTGACGCGGGTGGCTGGGAACGGGACAGGGACTCCAC
TTCCTGAGATGCTGAGGTGAGTGGCTGAGGACGGGATGGGGACCCCACTTCCTGGCATGCTGAGGCGGGTGGCTGCGGATGGCATGGGGACCCC
ACTTCCTGGAATGCTGAGCCGGGTGGCTGGGGACAGGATGGGGACTCCACTTCCTGGGATGCTGAGGCGGGTGGCTGAGGACGGGATGGGGACC
CCACTTCCTGGGATGCTGAGGTGAGTGGCTGAGGACGGGACGGGGACCCCACTTCCTGGGATGCTGAGCTGGGTGGCTGGCGATGGGATGGGGA
CCCCAATTCCTGGGATGCTGAGGCGGGTGACTGGGGATGGGATGGGGACTCCACTTCCTGGGATGCTGAGGCGGGTGGCTGAGGATGGGATGGG
GACCCCACTTCCTGGGATGCTGAGGTGAGTGGCTGAGAACGGGACAGGGACCCCACTTCCTGGGATGCTGAGGTGGGTGGCTCAGAATCCGACA
GGGACCCCACTTCCTGGGATGCTGCGGTGGGTGGCTGGGGACGGGATGCGGACCCCACTTCCTGGGATGCTGAGGTGAGTGGCTGAGGTCGGGA
TGGGGACTCCACTTCCTGGGATGCTGAGGCGGGTGGCTGGGGACGGGATGGGGACTCCACTTCCTGGGATGCTGAGGCAGGTGGCTGACGATGC
TGGCATGTGATCTGTTGGATTCTCTGCTCTCAGAACTTTTGTCTGAGCAGACAGGCCTACTCAGCTGATCTAAGGGAGAGGCTGTCACAACTGT
AGATACTCAGCAAGGCTCGTGCAGACCTCCTGATTTGGTTTCTGAATCTGGGGACCCCTGACAGGAGCTTCCCTCCCTCGTACCTAGTAAATGT
TCGCGGCGTGCTGCCAAAGCACCCGCCCCACTGAGCCTCTGCTCCAGGCGCCTGAGAAGAACAGTGAGGCATCATAAGGATGCTCGTCCTACGT
GCAGCTGAGCCTCATGCCAGCTACTTTCCTTTCCTGCTGTTTAGTTTTTTTTTACTTATTTCTTCTCTTGGAGGATGTGTCTGGGGACCCCGGT
TTCTGACTCAGTGGATTGAGAGCTTACACCCTGGGTCCTGAGCAAGGTGTTGCTTGCAGGTGGCTGAGAGCTGTCAGCAATATACGCCATTCTT
GTGCTGAGAGAGAGGACCTGCTGCCTGTGTGCATCTCTCTTCCACATGGGAAAATTAGAACAGAAAGTATGAACACCTGACTCTCTTTGTTTTT
TCTCGAAGTCAGGGTCTGGCTCTGTTGCCCAGGCTAGAGTGCAGTGGGACAATCATAGCTTACTGCAGCCTCAATCTCCTGGACACAAGCAGTC
GTCCCACCTTGGCCTCCCAAAGTGCTGGGGTTACAGGCGCCCGCCACCACACCTGGCCCACCTGACTCTTAAATAAAGCAGACTCTTGGTAATA
TGTAAAAAGCCAAGGTCAAAATGCTCAAATTGTTGTCAGGACAGTTGAAGAAACAGGTCCTAAAAAAAATAATGCTGATACATTTATATTATTC
TTAAGCAGCTATTGCTCAAATCTTCATTTTCCTAAGTAGCTATTGATACAGTAACCTAATAAGCAAAGAGACGTCACTTGTTTCTCTGTCTATA
AGTTTGTGGTGGTGATCACTGAGAATTGCATTCGTTGATGGATATATTCTCCAAAAGAAATTTTGTGAAGATTTTGAAGTAAAACATTCTTTTC
CTGAATAAGAAAATCCTAAGTCATTGTATTCCTGTACACCTAATCTGTGGATGACAAGGCATGTAGACCAGAGTTGGGTGGGCAGAGGGTGGGA
GCCATCACAGGAAGCATCTGGCAGAGCAGGGTTTGGGATTCTGGGATCTGAGGGAGCAGGAAAGGGATGTCCGACTCACAGCTTCAAGTGAGCA
CACTGGCTCCGGGCTTGAGCTCTAGGGCTGTGAGTGGTTCCCATGAGCACACCTGATGGCTACACTGTGGGTCTGGCGTTGACTGAGGCCACCT
CCACTGTAGCAGTGCCTGTTGCAGCAACACATGGCCCTCGAGACATGACTGCACCCAGACGTGCTCATTGTCACTGAGACAGGGACCTAGGATG
TGCTCAGGTTTAAAAATGCTTCCATCGCTCTTTTCTTCCTCCCACTCTGACCCTGCCCTTGCATCCCACAGAGGTGCACCTGGTGCAGTTTCAT
GAGCCAGACATCTACAACTACTCAGCCTTGCTGCTGAGCGAGGACAAGGACACCTTGTACATACGTGCCCGGGAGGCGGTCTTCACTGTGAACG
CACTCAACATCTCCGAGAAGCAGCATGAGGTACGTCCTGGGCTCCCCTGCATGTCCACATAGCCCAGCTTGAGTGGGCAGCCTCTCCTGGCCCC
ACTGTGGGGCTGGGGGCTGACTTACCTGGAGCCTCCATTCTGTAGCTGTGACCATGCAGCCCCATCTTTGGGTGTCCACCAGCAGTTCACCCGG
GGACCACCCTCTTTGCTTTTTTTTTTTGAACTTTTTATTATGAAAAAATCTCAAACATACCTATGAGCACGAGACAGCTATGCCATGAGCCCTG
TGCCCACTGCAGCTTATGCAAGGCCGGGTGTTCAGTCTTGCCTACAGTACCCTCCACCTCCTGGGGCATTGAGGCAGATCCCGACACCACATTC
TTCATCTGGGTATCTCTTACTGGAAAGGGCCCCTTGTCGTGCAAATAATCAAAAATAGCTTCTCCAAAATTTATATCATCATACATTCAGCCAG
TGTTCATATTTCACCGACTCTTGTGGATGATGCTTGTTTAGTTGGTTCAAACGTTTAGTTTGAATCAGGTTGCAACCACGCTGTCCCAATCCAT
TGCAGCTGGTCACCCTGTCCATTCAGTCTCCGCTTCTAGGAGCCAGCCTCGGTTTCCTTCCTGAGAAAGCTACTCTGCACAGCCCATCCCATGT
CCCACTCTTCACATTGCTCCTGATTCCTCGGTGTCTTTAAACATTTTAAAAAATCAAACCGAATTTAAAATTTGATTGTAGCTCACTGCAGCCT
CAAACTCCTGGGCTCAAGTGATCCTCTTGCCTCAGCCTCCTGAGTACCTGGGACTGTAAGTATGTGCCACCACACCCAGCCCCACTCATGGTGT
CTTTAGCATGCACCTCTGTCTTCACATCCCCAGCTGGGTGTCAGATCCAGGCTCATCCCTCTCAGGGCTGTGAGGCGGGCTTCTCCATGGAGGC
AGGTGTTCCTCCTCCTCACTCTCGGTGGCCTTTGACCAGCGAAGTCTAGATGCTCTTCTCATCAAAGATTGCAAAACGCAATGTTCTGATTCTA
CCTCTCCTTCTCThCTTGTTAGCTGGAAATCGTATAAAAGGGGAAGTGCCCATCACCAGCTATTTTGGTCCGTAGAGGTCCCATTTCCTTTGGG
AAATGCAGAATCGATGCTTGGAATCTTTGCCTTTATTTACCAGTTTTCAGAATAATGAGTTAATGAGTCAGTTTCCCCTCTGAAGGGCAAGAGT
GAGTTTTTTGATTGATTTTTAGTGTCACAATGAAGTCATAGATTTAAAGATATTTGCTCTTCTTTGACCCATCACAGTGAAACACCTACCTCAT
GCTCAAATCGTCGCATCCATGGTCAACAGCAGCCTGTTTGGGTTGGCTCCTGAGACCTCGCGGTGTGGGGTTAGTTTTCTTGCTCTCTGGAATC
TGTTCCAGGTTCACGCTGGACATTTTCTGCCCAGATCTCTTTTTGTTTTCATCTCCAGGGTCTAGCTTATTTCTCAATTTCTGTTTGACACATA
AATGAGCTCTGAGCATTATGCTCTGAAAACAAGTATTTGGCTGGGTGCTGTGGCTCACGCATGTTATCCTAACACTGTGGGAGGTCGAGGTAGG
CGGATTACTTGAGCTCAAGAGTTTGAGACCAGCCTGGGCAACATGGCGAAACCCTTTCTCTACAAAAACTGCAAAAAATAGCCAGGTGTGGTGG
CTCACGTCTTGGGAGTCTGAGGTCCTTGGAAGTCTGAAGTGGGAGGATCACTTGAGCCCAGGAGGTCGAGGCTGCAGTGAGCTGACATCATGCC
ACTGCAGTCCAGCCTGGGCAACAGAGCGAGACCCTGTCTCAAAAAAACAAAAACAAAGTATTCAGCACTGTGAGGCACTCTGAGCAGAAAGATG
TGGTGGTCTCACCTCACTCAGCTCTTACTCTTCGCGTGTCTGTTAAATTCTCTTCCTCTGAGCGCCTTCCTGACCACACAGGCTCACACTCGGT
CTTCCGGGAATTGTGGACAGTGTGTTTGTGCTGGCCCCACAGGTGTTCAGTGAGAGCCAGACATTGCTCTGTTAATGACACCATGGTGGTCCCT
CGGGGTTGGGGAGAGGCTTGGGGACCTCTTATACTTAAAAGAAAAAAATAAAGAGACCCCCGCCAAGCATCAGTGAAAATCCCTGCAAACGTGA
TCAAGAGTCTGTTGAAGTGTACGTTCCCTTGTCCTTATGCATTTCATGCGAGTTGACGAAATCATCTGTACTTTAAATGCTGAAGGAAGTGGCT
ATTTTAATGAGACTCTGTTCCGCTTTTGTGTGCCCCTATCAGGACTTCCATTTCTATGAAATGACACTCCCTTAGTACTGTGTACTGCAGCCTG
GGTGCTGTTCAGGAACTCACAGAGTTAGTTAGAAACCTAAAGTGGGGTTCCTCTCCTCATACTCTCCCTCCTAGAAGCCCTGTGTGCTTCCTAA
CCTCTGAGTCCTGACACCTGCTACAAGCCTTTTGGTGGAGAAAAATACATTGTTACTGGTTTCTTTTGCATCAGTTATGGAACATCACAGAGAG
AGGGGGCATTTTGGGGAAGGTGAGGCAGAGATAGATATAGAAACCTTCCCTTTTGTCTTATGTTGCTTTCTATTCTGTGGGGGCTTTGGAGGGC
AAGGGGCTAAGGCCCCCACCCCCTGGAAGTTTCTGATCACGAATTGTCCCTGGTTTGAAGAAGAGGTGGTAGGAAACATGGATCTTACTAAGAT
GGTGCCTGAGCTGAGCTGGTGGTGTTACTTCATCACTTCCTCCTGCTGCCAACATGCAAGTTTAAGGAATCGTAAATCTCCCTTTCTACTGATA
CAGTGAATATTGTGGCTTTTTTTTTTAAACTGGACTGTAGAGTCACTTTTTTTTTTTTTTTTTTTTTTTTTTTTCAGACGGAGTCTTACTCTGT
TGCCCAGGCACACGAGGCTGGAGTGCAGTCCTGCGATCTCGGCTTACTGCAACCTTCGCCTCCCCGGTTCAAGAGATTCTCCTGCCTCAGCCTC
TCGAGTAGCTGGGATTACAGGCGCCCGCCACCACTCCCAGATAATTTTTGTATTTTTAGTAAAGATGGAGTTTCACCATGTTGGCCAGGCTGGT
CTGGAACTCCTGACCTCAGGTGATCCGCCTGCCTCAGCCTCCCAAAGTGCTGGGATCACAGGTGTGAGCCACTGCGCCCGGCCTGTAGAGTCAC
TTTGAATGGATGGAAAAAAGCCCACTTTGATGTTTGAAAATACTTATCGTTTAGGTTTTTGAAAAATAATTTAATTTTCTCCACTTTCACGAGT
TTGATTTTTGCTGCTGTTTTATGGTGAGTGATGGAACTTTTCGAGCTGGTCTTCCAGACTCCACTGGTTTCAGGATAAGGATCAAAGTGAGGAT
GTTCATGAAGGCCCCAGGCTGCTCCCCTGCTCTCTGAACCTCCCTTGCAGTCTCAGAATTGATCATCTCAGGACAAACCTCTAGGCTCTAAACT
CTATCATGTGCTTTTAAAATTGTCCATTTTTATACTAGTATCTCTTTAAAAGAATATGCACTCATATGGACTCTATCCCAACAGGTGTATTGGA
AGGTCTCAGAAGACAAAAAAGCAAAATGTGCAGAAAAGGGGAAATCAAAACAGGTAAATTTCTTTTGCAAGCTACAAAGAATCCCATTCAAGTA
TTTCTTGGTTGTTTTAATCTACTGAATGCCAGCATGCCTGCAGTGCAGGCCACCCTTTTCTCCAGGCTCTCTTCATTCTGCTGGGCTTGGTTTT
GTTGTGATGCGTCTTGGAGCTCATCCCTCTATTCCTGAGTATCAGGATTCGGTTTCTCAAGCAGGTGCCAAACATATTTGGCCTTTGAGAAAAT
ACTTTTTTAAAGTTTATATGAATTGAATGTATTCAGATGGCCTGAAACTTTGACTACAGAACACTGGTGAATAGTGAAGCCCACTGGTGAATAG
TGCAGAAATTCAGGGTTTGTTCTGCTTCCTTGCACCCAGAGGCCTTAGGCTTGGAGGAGTTGCTAGTCATGCAGTTTTTCTCAACCCCTTCGTT
GGACTTGCGACAGAGATGCCCCATTTATTCGGCCTGCTGTGCTCAACCTCTTGCACGAGGGAGCACATCAGTGAGCAAGTGTGGGATCTGGCCA
GCTGTTTTGGGTGCCAGCAGGAGCAGGCTTTGTGTGAGCCCTGAGGGTGGCACCCAGGTTGGGGTGCCTGTGACCCCCGCAGCCCCAGAGGGTG
CGTTACAGTGCTCTCTTATCTCTGCTCTCCATGGACAGTGGTGTGTTATAAGCTCAGTGGGCCCCTTTTCTCATTGTGTGGGACAGCTGTCCTC
TGCCAGTGAGGGCAAAGGGCCAGTATGACAGCCTTTTTTGGGTACACACACTCAGGGTCCTGAGCTCTTGTCCGGCATCCAAGAAGAATGAGGT
TGCATGGACACTTAAAGGATGGTGGAGTCAGAGAATTTTGTTTAGTGTTGGAAGTGGCTCTCAGCGGAGATGGGAGCTTGAGAGGGAACAGGAC
GAGCAAATAATCTTCCCTGAAGTCTGGCCAGCTCTGGCCGGCTCTTCTCCAAAGTTAAGCCATTTCTCCAAAATCCAGCCATCCCTCTGAAGTC
AAGTCACCTCTCTCTAGTCCAGCACCTTCTCTTCTCTATCAACTGAGTCTGGGCTCTTATAGGCACAGGATGAGGGCAGGGTGGGCTGTGGGTA
GTTTCGGAAAAGGCAACATCTGATTGTAAAAAGATGTTCAGAAAGAACCAATCGGGAGACGGCGGGCAAACAGGGATAGAAGTTCTCACTCTGG
GCTGCGGGTTTTAGGCTTTTTGGCTCACATGTGGGGTTTTGCCAGGGACCTGCCCCTGTCTGCCTAGACTTTCTCTGGCTCCTTTCTCTATCAC
TGGGACTTTTGGATTCTTGGCACACGTCCGTCCCTTTGGTCCCTCAGGCCCCTCAGTGTGGTACTCATTCAGGGAGCCCTCGGCCGAATACTCA
TTCCCGTCTGCAGCTCTAGGTTACCCTCATCACCCTCTGAGCCATCATGTCCCTACCTGGCACTGGGCATTCTTCCTCAATGGTGGTCAAGACA
AGCTGAGTTAAAGGCAAAAAAAGAAAGAAAACCCAAAGAAGTCTATGCTAAACTTTCTTAGCAAAATGCTAAACACTTGCACTGAAGTCTTTGT
CTCTAAATCCAAAGTTAGATTAGGAAATGAGAGGAAAAGCAGGTGGTGCAGTGTAGCTCCGGTTTCCGGGGGTGTGCAGGTGGGTTGGGGTGAA
TAGTGAATTACTTCCAACCAGTCTAAAAAAGAGAACTCTCCTAATCTGGGATAATTTCAGACTATAGCACATGTAACGCAAGTACTTTTAGCCT
AAAATAGTGGGTTCTGAAATGGTATCTTTGTTTTCCTGCTTGGGCCTTTCTGATGCCAAGCCGGGCTCCAGGCTCTCCTAGTGCAGCCACTCCC
ATGGGGGCTGGACTGGGACCCTGGGTTGGGTAGACCTAGTGTCGCTGTTCCTAGTTCTGTGCAAGTTGGAGGCAGGGTGGGGTCTCCAGAAACA
GAGAGGAAATTCTGTAGGGTGGACACTTCTCCAGGCCTGGCAACAGAACAAGTGGTCCACGTACTTAGCAAGAGTAAAATATATTGCTTTCAAC
AGTGGGTGTCCCAGTAAGATTTGAGGTAAGCATTCATTGAGTTTTTTTTCAGTCACCACATCTTTGCTGAGTATCAATTAGGGACTGAAACAAA
ATCCTGTTTCGCACCTGAACAGCATCTGGACACTGCAGAGACACAATTACTCAGGCCAGTTTCAGCTTTAGGTTTGCCTAGGGGTGGGGTTCGG
GTCTCAGTGAACCTTCCACTGTACGAGAACAGGCCAGTGTGTGAAGAGGAGTTGCAGAGGGTCTAGATGACAAGACAAGGCTGAGAATGCACAC
ATGCCTCGTTGCCCTGGGGCCACCTGTGACCTGGTGTTGGTGAATGTGGGTCTGTCCCCCTGAGATGAACGGCGTGAGCAGTTTGAATAGTGGA
GGGCATCTGGGCTGGACGGTTGCTAATGGTGCATTTTTCTTCCCTGCAGACAGAGTGCCTCAACTACATCCGGGTGCTGCAGCCACTCAGCGCC
ACTTCCCTTTACGTGTGTGGGACCAACGCATTCCAGCCGGCCTGTGACCACCTGGTAAGGCTGATGGGCACCTCCCTGTGCTCACGCCAGCCTG
GTCAGCAGTTAAAGTAGAAGGGGGCTCAAAGCAGACGTAAAGCTGTCTCCACCCTAAAAAAAAATAGGATTTTCTCAGAGCCAGCTGCAGAAAA
TGGGGGCAGCTTGTGGCCCCTCTGAAAGTCTTGCACAGCTGCTGTCAGGGGCACACAGCCCACTTGGCTCCTCTAAGTTTCGGTGTCCATGGCC
AAGGGTGAGGCCTGGGGTGCAGCTCAAGGTGCTGGGAGCCCTTGGTGCTAGTGCAGAGCATGCCATGGAGGGGCGTGCTGGAAAGTACAGACAG
CCTGAACATGGCATTGGGGATGTGCTGGGAAGGACAGGTAGCCTGAACATGCTATGGGGTGAGGGGACGTGCTGGAAAGGACAGACAGCCTGGC
AGCTCTGGGCATCTGGGTCAGGTGGAAAAGTCAGGACTTGCTCCTGGCTTGTGTGTTCTTGGTTGGTGCATCTGTGCTCTGGCTGTGGGACCCA
CCCTTCTGGTCGGCTGTGGTGTGCAGCTTGCTCACTGAACCACTCCTGGGTCCACCCACTCAGGGGCAGCAGGTCAAGTGTGCTGAGCACCTTG
AGAAGCAAGTCCGGCCTCTGTCCCTCACCGGCTCACATCCTTGACTGCCCAGCCTGGTATCCGGCACCTCCCCCTGTGTGACGGTCCTTTCTAT
CCAGATAATCTGATGAGCAATGTGATGATCATCAGAGAGGGAGAAGTAGCATTTTAAATAAGTCCATGTGAACATGGAAAATGAAGCACATTTT
CTACTGTGTATCCCTGGATTTTAATGAGTCCTGATAAATGTAAAATATGCCACAGTGAAAAGCATCATTTGCTAGAACCCTAAATTAATTGGAA
TTAAAATATTTTCCAATCTTGAGTCAGAGATAAATGACAAGACAACGTATGGCCTCATTAGAGACTTGATGAGGAAGCCTGGTATTTGCACACA
GACGTCTGGGGTGAGATTCATAGTAGGGGTCTACCCAGCTGCCTGTACCACAGATGCTGGCAACGAAACCTGATAGGGGGTGCGGGTCCTTTCG
GGATAGTAAGACCCTCAGTCCTCAAAGACAGTCGTTTGTATTTACTTTTGTGCAGAAAGTACGGTTGGACCAGAAACATTTTGCACAACAAAGG
ATTTTTCTGGCTAAACTCAATCAGAAGCTTAAAGTTCTGTCATTTAAACTTACATTCTGTAGATAGGTTAGCTGTTGAGGTTAGAGGATACTGT
ATTTGGTTTAAATTTAGACCTATAATTTTTCCTAATTTTTTTTTTTTTTTGAGACGCAGTTTCACTCTTGTTGCCCAGGCTGGAGTACAGTGAT
GCGATCTCGGCTCACTGCAACCTCCATCTCCTGGGTTCAAGCGATTCTCCTGCCTCAGCCTCCCGAGTAGCTGGATTACAGGCATGTGCCACCA
CGTCTGGCTAATTTTGTATTTTTAGTAGAGATGGGGTTTCTCCATGTTGGTCAGGCTGGTCTTGAACTCCTGACCTGAGGTGATCCACCCGCCT
TGGCCTCCCAAAGTGCTGGTATTACAGGCATGAGCCACCACGCCCCGTCAATTTTTCCTAATATTTTTAATAAAAGTTTTCACACCTGCAGAAA
AGATGTATCACTTGTATATCCTGGCAACCTAGATTGCACAATTGGGAGTGTGTGTGTGCACGTGTCTGTGTGCCTGTGCATGTCTATGTGTCCA
CATGTGTGTCTGTGTACATATGTGTGCTTGCTGAACTATGACCCGTGACTCCCAAATGCCTTCACAGGCATCTCCTAAGAATAGTAACATTTTC
CTATGTAACTTCAGTTTTATCATTATATCTAAGAAAACGTTCAATCATTCCCCAGCATCATCCAGTCTCCAGTCCCCGTTCAGATTTCCCCAAC
AGCCCCGAAACCTCCTTTCAAGGTATGCTAAATGGTCACATCCAGTGGGGTTCACATTCCCTAACCTAACAGGTGAAGAGCTGTGTGCTGCTTT
AACTGGCCTTTCAAGGGTGTCAGCTGCGGCCTTCCACGTGGTCTGAGCCTTCCTGCTCTGCTTCCGAGAGCGTGTTTCCAGCCAGCCTCCTGCA
GCAGAGGTGCTGGGTGCCCTTGCCCCGCCGTGGGCCCTGCCTGTCTTCAGCATGCCCAGGCTGTTGGCTGCAAAGTGGCATCCCCACGCGTGTT
CTGTGTGCTCTCTGGTTCCCGGCACGCTCAGCCCCTCTCTCGTCTGTGCTGTCCAGATGGGTTTCTTCTGTCACTTGCTGGATTTTGCCTGTTT
TTCTCCTGGATGCCCTTTCTCACTCGTTTGTCCACACTTCTCACATCTTCAGGGATGGAGACACCTCATCTGCCATTCTGTAGGCATTTCCCCC
AGTTTGTCACATATTTAACCTTGCCGTATTATTTCCCCATGTGGAACTTTCCAGTTCTCTCTGTGGTTGGATCTGTGCATTGTTTTCCTCATGT
GGCTGTGGGCACTCTGGCCAGGTAAAGAGAGGACCCCCAGATGGAAACGCCAGCCCCTGCTCTGTTTTACTACAGTGCGGTTCTGTTTTTAGTA
TTCAGATGGTTGATCCATCTGGAGTGTGTTTTGGTGGGTGGAGCGACGTAGAGATTCTGCCTGTTTATGTTTTTCTGCTTCCTATTTATTGGGT
CACCTAGCTGCTTAGAATGCCGTCTTTATTGATGTTAAAATTCTGCTCATGGGCTTCCGATTACATACTGAGCACGTCCTGTGTTGGGTTTATC
CTGGTGGCTTTCCAGCCCTAGAGCCATCAGCGTTGCCATTTCCATTTTGCAGATGAGTAAATTGACGGTCTGAGATCTTGAGAAGCTTGGCCAG
GGCAACGGAGCAAGGGCACCAAGGTGCTGATGTCTAGACCTGAGCTGAGCAACACAAGCCCTGGCCCTAGTGGGCGGGACTCCTGTAGCTCCAC
ACCTATCTGCTCGGCCCTGTTGGTCTTCCGAGAAGAGCAAATTTGTAAAATGAAGTGGTACAGAGACACATTGTTACTATAGAAATTCAGCCAT
CTGATGATGTGCTCTCTTTTTATTCAATTGTAGAACTTAACATCCTTTAAGTTTCTGGGGAAAAATGAAGATGGCAAAGGAAGATGTCCCTTTG
ACCCAGCACACAGCTACACATCCGTCATGGTTGGTGAGTCCTGCCCCTCCAGTTCCTTCACCGTGAAGATTACAGTGGCATGTTAATTACCAAA
CAGGATATTTGGATCTTCTCTGAAGTGCTGTCTTCCTTGGCTTTGTTTAAATAGGAGCTATCCTTACAAAAGGCACATGTCACTGCATAGACCC
TTTAACTTTTGAATTCATTGTTTGCAAGGATAATAGCCGCCATGGTAAACGTCACTTTGTATCCATTGCTGGCTCATGTCATTTGGATAATCCC
CGCGTGCTGAGCAGATGCTCCTGTTTGAGAGTAAGGTTTTGACTGAGCCACATGCTGTCTGCAGTGGTCTCTCACCTCTGAGCAAGTGGTCATA
GCCTGGTGTGTACCCACTGTTGCATCTGCCAGCATTTTCCTGGATGTGGGAATTCCTTGCTCATGTTTACTTATTGCCCCATGACTCTTAAAAT
GCAGCTGAACATGGAGCATGAAATTATCCCCATCAAAGTGAGAGCACACCTGTGGTCCTAGCTACTCGGGAGGCTCAGGCGGGAGGACAGGAGT
TTGAGACCAGCCTGGGAAACAGCAAGAACTCATCTCAAGCCAGGCTCAGTGGCTCATGCCTCGATCACTTGAGGTCAGGAGTTCAAGACCAGCT
GGTCAACAGGGTTAAACCCCATCTCTACCAAAAAATGTAAAAATTAGCCAGACATGGTGGCGCGCACCTCTAGTCCAAGCTGCTTGGGAGGTTG
AGGCAGGAGAATTGCTTGAACTGGGAGGTGGAGGTGGCAGTGAGCCAAGATCGCACCACTGCACTCCAGCCTGGGTGACAGAGTGAGACTCTGT
CTCAAAACAAAACAAAAAAACCTCATCTCGAAAAAGAAAGAACTAGAAGACACAGGACACCCCAAAAGTTGAGGAGACTGTCTTTCCCTTTCCC
CAGGCAGGGACTTAATTGGGTTATAAAGGAAAACACCGTGTTGAATGTTTGTCCCAGTGTTGGTGCCATAGCCTGAGAGGTTGGTTCCCTTTTC
CTCTTTTCTTCTGGGCCCCTGCAGATGGAGAACTTTATTCGGGGACGTCGTATAATTTTTTGGGAAGTGAACCCATCATCTCCCGAAATTCTTC
CCACAGTCCTCTGAGGACAGAATATGCAATCCCTTGGCTGAACGGTAAGGAAGAGCAGTGCACCTTAGTGGGAGGTGCGTGTCTCCTCATGAGT
GCACACCTGTTGATCTCTCCTTTTCTGTCTCTGAGCCCTGGGGGCCCCCGAGCTTGTGTTAGCCCCTGTTTGTGGGGGATACTTCCCAAACTGT
CCAGCAATGGCCAGAGTCCCAGGGCACCTTGTTGGGTGTTTTCACTGGTAACAGAGTACTGTTTTAAGACAGCTCCCCACTAACCCCCCAAAAA
TGGATTTGGGAGACTCTCATAAAATTGAGAATCTGATAGTAGATGGTAAACTAAGACTAATCAGATGGGGACATGGTATAATTTCCAGAATGAT
ATTAAAGTGTGGCACCAACACTGGTGTGGGACCTGCCTCCGGGCCCAGCCTCTAGTGCCCGGTCAGATGGGCTCTGGGTGCCTTGTTGCTGCCA
GCAGCACATGTCCGATGTCCGTCTTCAATGTGCAGGAAGAAGCTGGTGGCTGTTCATGGGGGCTTTTCTTGTGGGTGCCAGCCAGTAGAGCCTT
GGGTTTTGAACCTCTTGACCTTAGGGCAGATCCCAAGACCCCAGATTCAGGGACAGTCGGCCATTCCTCAGGGTGGGGCAGGATCTGGTGGTTA
GAGTTTGTTTATGTGAAGCATGTGTTGTTTAAACCAGCAAATGCATGCCTTACGTAGGTCTCTGATGCTGGTACCATCTGGCTCCCTGCCTTCC
AGTCAGGAGGCCCAGCCTCAGTTCTTGGGGTGAACCTGGGTGGGATGCACTGCAGAACCACTGTCGGGGGCACCTCTCTGAGGCCGAGGAGGTC
GGGGTAGGGCACCATCTGGGCTCAGGGCTGTCATCATCCTCAGATCCTGGAGTTTCTGTTTGGATTGTGGCATGTGCACACTCCAGACATCCTT
GCAGGGAAGCCCTCAGGCCCCCAAGGTAGTGTTGGCCGGCCTCGTGACCTCATGGGTGCAGGCAGTCCCCCAGCTCTGTGTTCTGGGATAATCA
CTGTCCTCTCTCTGCAGAGCCTAGTTTCGTGTTTGCTGACGTGATCCGAAAAAGCCCAGACAGCCCCGACGGCGAGGATGACAGGGTCTACTTC
TTCTTCACGGAGGTGTCTGTGGAGTATGAGTTTGTGTTCAGGGTGCTGATCCCACGGATAGCAAGAGTGTGCAAGGTGAGTGCCAGGCACTCTG
GCTTCGCTTGGCCCCTGCCATGGCAATAGTGTGCCTGGATGATGGGTGGCTCCTGACCTTCGTCTCAAATGTCACTTTCCCTAGCACTTTATTC
CCTTGGGCCTCAGATGCAGCTCTCAATGGATCTTATTTCTGGGGGTTGTGGGGACTGAGGGAGTGCTGGCCCCCATGTGTGACCCATTAGCCTC
CTCTTCTCAGGAGGTTCTTTCTTTTAATGCACCCTCTTCAAACCTCTAGCTTATAAAAAGCAAGGCTTTGTGGAATGTATTCACCAGAGTCTGT
TGGAATTTCACCATTTGGCTCTTAATCTACCTAAGAGTGAAACATTAACCGACAGCTTAAGATTAAGAAGAGAGAACCAATACAGAAGTTTGTC
AAAACACAAATCTTTAAGTACATTAAAAGGGGAGGGTGCCTTTAAAATGACACACTGTAGGCACAGTGCTCAGCACAAGAGAATGGCCTATGGG
CTTGATTACAGGAAATCTCAAGGTTGCTCAGTGGCAGTTTCCAGGAGGTGGATTGTCAGGCCTCAGGGGAGCTGGGGGAAACCACATGAAACAC
AGCCGCCATGTCCCTGGCCAGGAGCTCATCTCGGAGCAGGTAGCCATTCGTCTCTCATGGAAATTGGTAGATAGTTCTTGCGTGGCCCTTTCTC
ATGTAGTCATGACCATCAGGACATCAGAGAAGCAGGGTTCCTTTCATGCCTATGGCGCACAAAAGTGGGTGCCTTTGACACCGTTCCCTTAACA
GCCCCTTGCATAAGGAAGAAGGTTGGGTGATGTGCACACCTGAGTATCCACCTGGTGCTTTGCTCCCTGCCCAGGCCTTCCGTAGCCAGGGCTC
ACTGACCAGATCCTCCAGCTGCCCCCCAGCCGTGGCTGCCATGCTCCTGTCTTGCAGACCAGGAAACCATCCTATCAACAGTATCAGTGTTGGG
GGCAAGCCAGTGCCCCTTGAGATGGGGAGGGTGCTGCAGGGCCAGAGCTCCTGGCAGGCGTGCACAGTGCTCAGAATGCTGTCAGAGCAGCACT
GGCCAGGGGACTCGAGCCCTCCCCTGCCATCGGGAAGCCAAGGATCAGACTTGCCTTGACCTTGACTTATTACCCAGCACTGAGGGTTTGCAGC
AGGATCAGTGAGCAGATTCAGCGATGCACAGAGCAGCCACCTCCACCCCCGACAAGTTTCTACAAGTCTTAGGCACACTGCTGTCATCCCCTCT
GATCCCTTTTTTTTCCCCATACTTGTTTGAACTCCTGGACTAGGGTGGTTTGAGCTTAGGCCCCACAGCTCCTGCCTACCACGCAGGCACACAT
GAACCCTTCACCTGCTGCCCGTGACCTGAAAGCCACATGAGACCCCTGACGAAAAATGTGCTAGAAATTATTCTTTGCTAAAACATCAAGGAGG
AAAATGAAGTCCTTTTATCAAAAAGAGAATTTGGGCTCCTGTAATCACACAGCAGAGATGAAGGGGGAACATTTTCCCTGTGTCCAAAATAAGT
AAGCCTGCTTCTATTTCATATTCTTCTGCACTCAGGTTTTGTGGTTTCAGTATTTCTCTCCAGACCACACACAGTCATGTGTAGTTTATAATTG
TGTCTTGGTCATCGGATCCCTGAAAAGCGTTTATAAAGAACTTAGGTTCAAAGCACTTTAGCAGATACTTTGGGTAGAAAGGAAGTGAAGGATC
TATTCCTTTAAAGGGAGGAAGGTTCACACATTTGCCCAAGACAGGCTGCAGGGCCGGTGGCTGTCCCCTGGAAGGAGGCTGCCGCCACTTGCCC
CACCCAGAGCATGTTCATTGATGGGCCCTATGTCAGGAAAGTCACACAATGCCAGGGGCCTTGGCAGTTGGAAGTGTGTGAGCACGGCAGCACC
TCTGCGGTTGCAGGACTGAATGCTGGGCACAGGCAGGCATGGACGATCAAATGAGCTTTCAGTGAGAGGGCTTTTGTCCGTTTTGTTTTGTGTG
TTAACCCAGGAGCGTTCTGGGATCCAAGCTGGAACCTGGACGTGGTGCTGCGGGCCACTCACATAATTGCGGCATCTGTCTCCTGTTGCCCGAG
CTTTGTTTCAGTCAGGCACAGCCGCGCTGTGCTGGGCCATGGAGGGGTGCACCTCTGACCTTAGTGCTTGCTCACAGGGGATCCACTCTCGGCC
CACCACGTCTTCTTGTTGGGGTTTTAGGGGGACCAGGGCGGCCTGAGGACCTTGCAGAAGAAATGGACCTCCTTCCTGAAAGCCCGACTCATCT
GCTCCCGGCCAGACAGCGGCTTGGTCTTCAATGTGCTGCGGGATGTCTTCGTGCTCAGGTCCCCGGGCCTGAAGGTGCCTGTGTTCTATGCACT
CTTCACCCCACAGCTGTAAGTGCCCTGGGTGGAGTCCCCCTCCTTGCTCCCTTGATGCCGCCAGGTGGTCCCGTCACCTCTTTCCCCTCCCCAG
GAACAACGTGGGGCTGTCGGCAGTGTGCGCCTACAACCTGTCCACAGCCGAGGAGGTCTTCTCCCACGGGAAGTACATGCAGAGCACCACAGTG
GAGCAGTCCCACACCAAGTGGGTGCGCTATAATGGCCCGGTACCCAAGCCGCGGCCTGGAGCGGTGAGCTGGGGCACTGGGGGCGGGCCGTGCT
TTCCCTTCAAGGCCCAGGGCATGGAATCCAGTACAGGCACTGGGGCCTGCTCATGGGCTGGGTACCTGCCCACGCCAAGGCTCTCTGCATTGGG
ACAGGGACGGCCGATGAGCACAGCTCATCCTTCTTCCCTTTTGCATGTTACGTAACAGCCATTGCTACACTATTGCACAAACAAGAAGGCTGGG
GCAGCTGTTTTGCACAATTAACATTGCATAACAATTAGGTCTGTTTCATTTTCAGTTTCTTACACAGAAACACATGATTCCTTGGCAAAGGCCT
CTGCACTGTCCACTAGTCAACAGGAGTCACATTTTTTCCTCCTAAATATAGTGAACTTTATGTAGAAATTGGGAATTTCCAGGCCGATTCCTTC
CCTCACATGGGGAAATGGGTGTGACAGCCATGTGCACAGCCCTCTGTGGGGCTGTCACCTACATGGGGTGTCCTGGCCCTCAGAGTTCACTGCA
GCACCAGCTCCCTCCCAAGGGCAGCTGTCCCTGACACCATCATGGCTCCTTCTATGCATAGCTTCGTAAAATGTGTTCACTCATGGTCACAGAT
TTTGGTTTACACACATCAGGGAGCTAGAACAGGAAAAAACAATCCCTCAGGCTCTTATCCTATTTTAAATTCTCCTGGTTTTAGCCATGTTTAG
CATTCTTTTCATGAGAAAGCTGCAAATCAGTGTTCTGTTTTTTAATTTCAAAAGCTCAATAAGTGTTTTTCACTTACAAATAGATACAAATTCC
TTCCCTGAGTATGTATCGTGAATGCAATTCTGTCTTCCAGATGTGTTTTATAACTGTGTCCTCTGCTGGCTGGGGAGAGGCCACCTTTCCTCAT
AGTAAAGTTATTCACTGCTACCCTCATTTCAAGGCATGCATTGTGTGGTTTCCAGGTTTTGCAGCCCCCCCTGCGTTGGCTGCTTGTGTGGAAG
CACCCGTTGCGTGGTGCGACACGAGCACGTTAACAGCGGGGATTTTCTCCCTGCAGTGCATCGACAGCGAGGCACGGGCCGCCAACTACACCAG
CTCCTTGAATTTGCCAGACAAGACGCTGCAGTTCGTTAAAGACCACCCTTTGATGGATGACTCGCTAACCCCAATAGACAACAGGCCCAGGTTA
ATCAAGAAAGATGTGAACTACACCCAGATCGTGGTGGACCGGACCCAGGCCCTGGATGGGACTGTCTATGATGTCATGTTTGTCAGCACAGGTG
GGTTCCGAGGGCTTGGCAGGCTTGACAGTGACAGCACATCTGTGTCCTCTCGTAGGAAAACTGGGAAATCCAATTATTCTTTCGTGAGTAGTTC
CATTGCCTCCCTCGAGGTGACCTGGGAGGTTTGTGGGAGCGTAAGAAGATTTCTGAGAAGTCACCACACCAGGTGGCTTTCACATCTGGGACCA
CCAGGCTACTGGAGGTACTTGTTAAAAATAAAAATGCAAGTCCTGGCCTGTGGCTGGGCTGGGCTGGGGCAGAGGAGTACTGGCCGCCGAGGAG
TTGGGGCAGTGCCCACCCAGGGGGCAGGTGTGAGCCACCTGGGAGGAGGCGTCAGCCTGGCGTTTCCTGACTGCTGGCAGAGGACCACGTCCCT
GCTTCCTGGCCGAGCAGCCAGGTTTTAGATGTGCCCTCGCATGTGGACTCTGAAATAAGCACTTCTGGAACAGGGACAGGGGCCAGGAGCCACG
GTGGCTGGCAGCGCATTGTGGCCTGCCCTTCGAGCCTCCCAGCCAACCTCACATGCCCCCTGTCCTCACCGCCTGCCTAGGGCACTTACCAGTG
ACACCCCGAGGGCTGGTCGAGCATGGGAGCCCCCTCATGTGGCACTTAGCCTCAAGTGTAATGTCGACTGTTGGTGAGGATTCTTGGGGTCAAC
CATGGAACAGTTTATTTTCCTTGGAAAAAAACTGGAATAACCCATAACACTTGGGTTTCCAGTTGTCTGTTTTGCCAAAGCCTTTTCCTTTTTT
TGTTTCTAATCCGAAATCATCATTGTTTTCTAAGTATCTGTGGAGGGAATGACTTGAGAGTGAAGAGTGTGAAGTTTGCCGCTGTGGTCACTGT
CCTTGGTTTCTGTGTCTGGGTTACTGTCACTGACCTGTAGCTTTGGCCCTGCAGACCGGGGAGCTCTGCACAAAGCCATCAGCCTCGAGCACGC
TGTTCACATCATCGAGGAGACCCAGCTCTTCCAGGACTTTGAGCCAGTCCAGACCCTGCTGCTGTCTTCAAAGAAGGTAAAGTGACGCAGCCAG
CTGGACCGGGGGCTTCTCCGCTCGGTGGCTTTGATTCTAGGTGACAGGAGAGTTGGCAAGCTGGAGTCGGGCTCCTGGGCAGGCCCCTCTGTCT
GTCTGCCCTGGGTGAGCCAACCTTCAGAGTTTGACACAGAGCCATTCCGTGAGCTGTGGGATCTGAATTGGGGAAGGCAGGAAGGCAGACCTGG
GGAGACGGGACTTTCTCTTCGAAGTTGCTGGAATGTCATTGAGTTGTTGGTGCAGCTTTACAGGCTGTGGAGAGGTGGGCACTGCTCCATGAAG
ACACCTTTTTATGCCCTGAGCTTGGGGGGTGTGCAGACTGCATCTGTGGGATATGATAGTGATACAGCTGACTCGTCACCGTGGAAAATCCACA
AGAGAAGTGGTTCGTCTCATCTGTAAAGCTGTCTCCACCTGTGGCTGAGACTCTGGTCTGGCCTGCAATACTCCCAAGCAGCCCTTGGCAGGGG
TGGGTGGGCGGGCATCCACGCTGGCCTTTAGGGGGCTGCCTCCCTGGCCCTGGCTCCTAACGCGACCTCCAACCACCTTGTGGGATCCAGGCCC
AGTCAGTCCTCTCCTCCCTCAGCTGGGAGCAACAGGCAGAGGAAGAGGGCCCCTGTCTGGCCCGGTAAGATACCTACCCTTGGCAGGTGCGTAT
TTGCAAACACCCCTCCAGGTCTTCTGTCCTCTTCCCTCCCCTGTATCCACAAAGCTTGGGAGCCTGGGTCCTTTTACGTGGTCACCTCCCCTCT
GCTAATGGAGAGTTCTCCCTCAGATCTGAAAGGAAAAGAGAATGAAATAGCCTGAGCAAGTTATAACCCACTGGGTACTGGCATCTGTTCACCA
GCCTCTCGGTCTCCAGGACACAAAGGGAGCCCTGGAGATTTGAAGGGTCGACGCTTTAGCCACTGTGGGGCCTCACCCCAGCCTCGTTGTTGAA
AGAAGGGGACCCAGAAGCTCTTCTGGGGCCATCGTGCTGTTCAGTGGCCTCAGCCAGACTGGGCAGGCACCTACAACATCTCTAAAATGTGGAC
TTCTCATTAGAATGAAGATTGCCCCCCTCGTGTGGACATTCGTGAGAATGACACTCTGTTCCAAGGGTCACTTAGGGACCCAGGCTGGTGGAGG
CTTCCAGGGCACATGGGCACTGATCCTCAAAGGCAGAAGGGGGTAGGAAGAGGAGGGCCGCACAGAGGGCGTTACGGGTCAGTGCCCACCCGCC
ATCTCCCAGAACTCGGTCACATCGCCACACCAGGGCAGCTGGCCACACAGGGAGCCTCGCGCCCAGGAGGAGGAGCCAGTGCGTTTGGGGAAGC
GCTTGCTGGTCCTACTGGACCACCCGACCCGCCTGTCTCTGTAGGAGCCTCCATTCGTCGGGACGTGGCTTAGTTGCCTGGACAAGCGGAAATA
CATCCTGCCTGCCGTGGGGTCCTGTGCCTTCTCCTTGGGCCTCAGTAGGCTCCAGGTCCGGGTGCAAGGCCCAGCTCCATGGCCATGGCAGCAG
GAAGTGGCTGTTCAGTGGTAAAAAGACTGTGCCGCCTGACCCCATCAGGCTCTCTCACGGTGATCAGCAAATGGAGAAACGGCCACTACCACGC
CCTCCCCCTGTCCTACAGCTGGGGAGGTGCGCTGTGCCTCCACCCTCACCTCCTCTCCCCTGATGACAAGCATGGGGTTTTGCTTTTTATTTTG
GTAAATACACATCAGATGAAATTTGCCGTCTTAACCATTTTTCATTGTGCACGTCAGTGGCATTAAGAACATTCACGTTGTTTTGCACCCATTA
CCACTGTCTGTCTGCAGGGTGCTTTTCATCTTCCCAAACAGAAGCTTTTTACCTGTGAAATACAAACTCTTCATTTTCCCCTCCTCCAGCCCTG
GCCAGCCGCCATTCTGCTTTCTGTTTCTGTCTGGGTACCTCATATGAGTGGAATCACACAGTATTTATCCATTTGTAACTGGCTTATTTCACTT
AACATAAAGTCCTCAAGGTTCCTCCCTGCTGTAGCAGGGGTCAGGGTTTTCCAAGGCTACATACTCCTCTGTCGTATGTGAATACCGCATTTTG
TGAGTCCCGCATTTTGTGTGTGCGTTCATCCCTTGATGGACACGGTTGCTCCCACCTTCTGGCTTCTGTGAACAGTGCTGCTGTGAACGTGGGT
GTGCAGATACCTCAAGTCCTTGCTTTCCATTCCTTGGGCGCACACAGCAGATGCGGTTTGCTCGGCCCTCTCTGAGCCCACCGAGTAGGCTGTG
TCTGTATTTTCACCAGGACTCCTTGGGATGCTGAGCTACAGCTAGCGTGGCAGAGGGCAAGGAAGGCACTTAGACAGCTCAGTTGCCTCTGATC
ACGTCCACCGTCACTCCAACCTGCCCTCGGGGTCTCACGCGCACACACAGCAGCAGAGACAGAGATGGGAGCATGAGAGCTGCCTGCAAGGGGA
CAATCCTCAGGCCCAGGGAAGGCGGACACAGGGGGCGTCGAGGGGCAGGAGTGCACAGGACAGGCTTGCTCTCAGCGGGCCTCACTCATGCTGC
CAGGTGCCTGGTCAGGCTTTTTTTCTTTGCCTTTAAAAATTTTGTCTTGAAATAATTTTAAATTTACAGAAGAGTTTTGATGATTGCACAGAAG
GATCTTCAGCGCCCCCACCTAGCTCCACATGTCCGATGTCTCACATAGCCAGTGTGCATTTATCTGAGCCAAGGTGCTGTCATGGTGCAGTGCG
TTACCTGAACCCCAGACCCTGGACCCTCCTACCTCCCGCCCACCACATTCCTGGCTCAGCACCTCAGCTTGCACTGGACACTGCATCTCCTCGG
CTTCTGCTCTGTTCCTGCCTCCCTGACCTCAGCACTCCTGGAGAGGAGTAGTCTGGTGTTTTGTGGTGTGTCTGGTGTATTCTTGTGATTATCT
TGGGGTCGTGGTTTTAGGGGGAGCACCAAAGAGGGCGCTTTCTGGGGATGGGGCATCTGTATCACTCGCACCAGCGTGATGACCTTGGTCATTC
TGTCCAAGTCACCACCGTCTTTTTCCATGTCGAGTGTGTCGGGGCATGTAGTCCACACTCGGGGTGGGGGAGAGTGAGCCCCACCTCCCAGGGG
AGTCATGTGGGAAACCCCCACAGTCATTCATGCTTATTTGTAGGGACAGACTTGGAGGCTACAGAAATGCCCTGTTCTCCCACCCACTCACATC
CACATTGACCAGTGGCTCCTGCCTGCAGCAGTTACAGCTGCCTGTCCTGACGACCAGTTCCTCCTTCCCTGTCCCCTCTTCCCTTCCACAGTCA
TCCCTTGGTCTCTGTGTGGCGTCGTTTATTTTTTAAAGCTTAGTTTCATTTGGGCTCCACCCCAGCCCCATCCGGGAGAAGCGGAAGCTGGGGC
TGAGTCTCCCGCAGGGTGCAGGAGGTGGTCTGGATCCCCTTGGGACAGGCCTTGCCCCCCAGAGCCCACCCCACCCTCCACAGCTACCCTCAAG
CCTCTCTTTGGGGTGAGGAGTCAGGCGGGCCCCACTTGGCCACCCAGGGCACCCTGCTCTGCACTGCATGGTGTTCACGCCACCTCGCAGCTGC
CCCCTGCGGGACCCAACAGGACCAGCTGTCCCTTGGAAGTTACCCAGCTTGGCTTTGCTGCCAGAGAATGTTTCCGCCACCTCCACAAGCCGCG
CGATGCCCGAACTGTGATCTGGGATGTCATCCTCAATCCTTCCCACAAACGTGGCTCACACATGGCCTCATCTGCCCAGGTCTCTGCTGCTGCT
GCTGCTGTGAGGCCACCGGCGGGCCAGGTTCCCTCTGCTGTGTATTATCACAGTTTCCATCCTTGGGGGCTTTCCCTTTCTCTCGTGGGTCTGT
GTCCGCACAGCTGGATGTGTGCCCTGGGGCTTCCTGTATTGGCATCAGGGCCTGTGATCTTCCAACCACACTCTGAAGTTGACTCCGAGCGTAT
CCTCTGAGGATGAAGGTCGTGTTTCATCTGACTGTAAACCACTAAGTCATGTGTAAATTTGGGAATCTTGTATTGTTAACCAAAAGGTGTCCCC
AGGCTGTTGAGGCACATGCCCTGGGCAGAGGCTAGAGAGCGCGCTCCACGGGCCACCTCCAGGTCTGTTGCACGCCCCCGAGCTTCAGGTGGGT
GCACTGCATGTGGGGCACCCTCCTTCCAGCTGAGTTCCGTTCAAAAGCAGTCAGCAGCCCTGGATGCCTGTGTGCTGGGCACTGCTGGTGCCAG
GTGGGCTGATCCGATGGACCTGAAGCTGGTGTCACTGGGAACCAAGTGTCCCAGAACCTGGGAGAGTCTCACCTGCCCTCTGCTCTGCGTGTGG
CTGCTCTGGACCTCGGAGGTTGACTTCCCGTCTGTGAGCTCTTCCCTTTTACATATACATAAGTGAAAAGCAAAAGGCATTCTTCCTTTTTTAT
GTTTTGTATCACGATCTCCTCATCCTTTGCATGTCGTCCGTTTGGCATCCCTGTTATGTTAGGCCTCTGCTGGATCCAGACCCTCACGAGAGGC
TCCCCGCCCACAGGTGCTCACATTCTGGCTCGGGGGACGAGGTTGCGCTTCGAGGTGGTGTGCTTCAGCCTCTGGCTGCAGCCCCTTCTCACCT
ATAGTGAGGCCGGGAAGATGACCGGGAGTGCCAGGCTCATGCATCCTCTGCTGCAGGGAGGAGATCTGGAGGTGGGGACTGAACAGCCTCCCCA
CTGGCTAAGAGAAACACGTGCAGAGAAGCGCTTTGCTGGAGGGCAGGCACCTGTCGGTGCCCAGACAGGGGAGAGAGGGATTTGCACCTAAGGC
CCAGTGAGCCCTGACATAGCACGTCGATTCTGCAGGAAGGTCACAGACCTGCCTTGTTTGCCTCTGGTTCTGAGTACCTCTCCTCCTTACTGCA
ATGTCCCCTGAAGGTACACTCTGCCTGCTTCCCACACACTGGTGCAGAAGCAGAGGCCATGCTCCTGGATGCCTCCTTGCCTGATGCTAGTTCT
TCTCTGTCTCATACACGCAGGGCAACAGGTTTGTCTATGCTGGCTCTAACTCGGGCGTGGTCCAGGCCCCGCTGGCCTTCTGTGGGAAGCACGG
CACCTGCGAGGACTGTGTGCTGGCGCGGGACCCCTACTGCGCCTGGAGCCCGCCCACAGCGACCTGCGTGGCTCTGCACCAGACCGAGAGCCCC
AGCAGGTATGGGGCGGGATGCGCTGCCTGGGGATGTCCCCCATGTGTGTGGGTGAATAACACGTGCCGGTTGTTTTGCAGGGGTTTGATTCAGG
AGATGAGCGGCGATGCTTCTGTGTGCCCGGGTGAGTGACTCCTCGACGTCCCATTTCCTTTGGGAGTGGCGAGGTCTTGTAGCCATTTCACGGT
GCTTCAGTTCTGTGGCATTTGTGTGTGTTTTGTTTTTCTTTCTCCACTCGGAACAGAGGTCAAGTGTTCTGTAGCAGACTCGTGGTCTTCTCTG
TCTTTTTTTCTTGCCGAAAGAGTACTTGAAGCCACTTAGAGTGTATCTGCTTACTGGGAAGCAGTCTCCTTCCAAAACCATCCTGTTTTCTTTC
TGCTTAGCTTGGGGCTCATTAACCAAAACCTAAGCCTGTTATAAATGGGGAGAAAGGAGCCCATGAGTGATTAATCCTCAGGCAGTGTAAGGGC
TGGGGTGGTGTTTCCCCTGGGGCTCCCACCTGGGATTCACCCGCCTGTGGATGTCTGAAATAGCACCACACCCAGAGGGAGGGGTGGCATCACG
CCAGATGCCCCTTCCCCAGCAGCCACCTTCCACGGTGCTAAAGGCAGACTTGACCCTCAGTTCTGTGTCTTCCTGACCCTGACAAGACAGCTGT
CATCAGACTAAGAAAGGTTTAGGCAGCTGGGCATGGTGGTACACGCCTGTAGTCCCAGCTACTAGGGAGGCTGAGGCAGCAGGATTGCTTGTGC
CCAGGGGTTCAAGGCTCAGTGAGCTTATCATGCCACTGCACTCCAGCCTGGGGTGACAAAGTGAGACCCAGACTCTAAAAAGAAAACAAAAGCT
GGCCGGGCACAGTGGCTCATGCCTGTAATCCCAGCATTTTGGGAGTCTGAGGCAAGAGGATCACTTGAGCTCAGGAGTTCGAGACTACCCTGGG
CAACGTGGTGAGACCCTGTCTCTACAAAAAATACAAAAATTAGCCAGGCCTGGAGGTGCTCACCTGTAGTCCCAGCTACTCTGGAGACTGAGGT
GGGAAGATCCCTTGAGCTGGGGGGGTTGAAGCTGCAGTGAGCTGTGATTGCACCACTGCACTCCAGCCTGGGCAACAGAGCCAGACCCTGTTTC
AAAAAAAAGAAAAAAAAGAAAAGTTTAGGCAGGAGGAGAGTGCTGAGATGCACTGAAAGGCCAGTCTTCCTTGCAGCCATTAGCAGAAGCGTCT
CGTGTCTGATTCAAAGAGCTGACACTAGGCACAGAACTGGCCTCTGCTCAGCTTCCCCAGCCTGACGCGTTTTCTTCTGGGACACGGGTGAGAA
ATGGGATTTCTGCTGCTCAGAGCTGCCTCCAATTTCTTTGTCCCCATGGGCTGTCATCCAGGGCTCATCTTTGCTTTTTGGTCACGCATGTCTT
TATCTCCTTAGTTGTTCTGGAAGATTCCATGTTGCTACAGTGGGTGAAACTCTTGCGTCATCTTGTGGGTATTTTAAAGAAGTTGTTAAATAGC
AAATGGGGATTGTTGACGCTGTGCACGTTTATTTTGATGTTCCAGATAAAAGTAAAGGAAGTTACCGGCAGCATTTTTTCAAGCACGGTGGCAC
AGCGGAACTGAAATGCTCCCAAAAATCCAACCTGGCCCGGGTCTTTTGGAAGTTCCAGAATGGCGTGTTGAAGGCCGAGAGCCCCAAGTACGGT
CTTATGGGCAGAAAAAACTTGCTCATCTTCAACTTGTCAGAAGGAGACAGTGGGGTGTACCAGTGCCTGTCAGAGGAGAGGGTTAAGAACAAAA
CGGTCTTCCAAGTGGTCGCCAAGCACGTCCTGGAAGTGAAGGTGGTTCCAAAGCCCGTAGTGGCCCCCACCTTGTCAGTTGTTCAGACAGAAGG
TAGTAGGATTGCCACCAAAGTGTTGGTGCACATCCACCCAAGGGTCTTCTCCCCCACCCCAGCCGTGCAGGCCACCTCCTCCGGGGCCATCACC
CTTCCTCCCAAGCCTGCGCCCACCGGCACATCCTGCGAACCAAAGATCGTCATCAACACGGTCCCCCAGCTCCACTCGGAGAAAACCATGTATC
TTAAGTCCAGCGACAACCGCCTCCTCATGTCCCTCTTCCTCTTCTTCTTTGTTCTCTTCCTCTGCCTCTTTTTCTACAACTGCTATAAGGGATA
CCTGCCCAGACAGTGCTTGAAATTCCGCTCGGCCCTACTAATTGGGAAGAAGAAGCCCAAGTCAGATTTCTGTGACCGTGAGCAGAGCCTGAAG
GAGACGTTAGTAGAGCCAGGGAGCTTCTCCCAGCAGAATGGGGAGCACCCCAAGCCAGCCCTGGACACCGGCTATGAGACCGAGCAAGACACCA
TCACCAGCAAAGNNNNNNNNNNNNNNNNNNNNNNNNNNNNNNNNNNNNNNNGACAAGCCCTTTGACGTCAAGTGTGAGCTGAAGTTCGCTGACT
CAGACGCAGATCGAGACTGAGGCCGGCTGTGCATCCCCGCTGGTGCCTCGGCTGCGACGTGTCCAGGCCGTGGAGAGTTTTGTGTTTCTCCTGT
TCAGTATCCGAGTCTCGTGCAGTGCTGCGTAGGTTAGCCCGCATCGTGCAGACAACCTCAGTCCTCTTGTCTATTTTCTCTTGGGTTGAGCCTG
TGACTTGGTTTCTCTTTGTCCTTTTGGAAAAATGACAAGCATTGCATCCCAGTCTTGTGTTCCGAAGTCAGTCGGAGTACTTGAAGAAGGCCCA
CCGGCGGCACGCAGTTCCTGAGCCCTTTCTGTAGTGGGGCAAAGGTGGCTGCACCTCTGTTGGCTGAGAAGAGCATCCCTTCAGCTTCCCCTCC
CCGTAGCAGCCACTAAAAGATTATTTAATTCCAGATTGGAAATGACATTTTAGTTTATCAGATTGGTAACTTATCGCCTGTTGTCCAGATTGGC
ACGAACCTTTTCTTCCACTTAATTATTTTTTTAGGATTTTGCTTTGATTGTGTTTATGTCATGGGTCATTTTTTTTTAGTTACAGAAGCAGTTG
TGTTAATATTTAGAAGAAGATGTATATCTTCCAGATTTTGTTATATATTTGGCATAAAATACGGCTTACGTTGCTTAAGATTCTCAGGGATAAA
CTTCCTTTTGCTAAATGCATTCTTTCTGCTTTTAGAAATGTAGACATAAACACTCCCCGGAGCCCACTCACCTTTTTTCTTTTTCTTTTTTTTT
TTTTAACTTTATTCCTTGAGGGAAGCATTGTTTTTGGAGAGATTTTCTTTCTGTACTTCGTTTTACTTTTCTTTTTTTTTAACTTTTACTCTCT
CGAAGAAGAGGACCTTCCCACATCCACGAGGTGGGTTTTGAGCAAGGGAAGGTAGCCTGGATGAGCTGAGTGGAGCCAGGCTGGCCCAGAGCTG
AGATGGGAGTGCGGTACAATCTGGAGCCCACAGCTGTCGGTCAGAACCTCCTGTGAGACAGATGGAACCTTCACAAGGGCGCCTTTGGTTCTCT
GAACATCTCCTTTCTCTTCTTGCTTCAATTGCATACCCACTGCCTGCCCAGACTTTCTATCCAGCCTCACTGAGCTGCCCACTACTGGAAGGGA
ACTGGGCCTCGGTGGCCGGGGCCGCGAGCTGTGACCACAGCACCCTCAAGCATACGGCGCTGTTCCTGCCACTGTCCTGAAGATGTGAATGGGT
GGTACGATTTCAACACTGGTTAATTTCACACTCCATCTCCCCGCTTTGTAAATACCCATCGGGAAGAGACTTTTTTTCCATGGTGAAGAGCAAT
AAACTCTGGATGTTTGTGCGCGTGTGTGGACAGTCTTATCTTCCAGCATGATAGGATTTGACCATTTTGGTGTAAACATTTGTGTTTTATAAGA
TTTACCTTGTTTTTATTTTTCTACTTTGAATTGTATACATTTGGAAAGTACCCAAATAAATGAGAAGCTTCTATCCTTGATTTGGGGAAGACAT
TCCTTAGCGGAGGCTGTGCAGCCTCCCGCCCCTGCATGGCCCAGGCGGGACAGCTGGGCTCGCTCTTTTCTGTCCGTTTCCTGCTGTGTTTTGC
CCTCTCTGGCCTGTGACGTGCTCCTGGCGACTTCTTCCTCAGTGCCCTCTCTTTTCTGTCCTCTCTGTCTCACAGCCTCGTCTCCTAAGCCCCT
CCCTCCTCCTGGCTCCTCTTCCCTGTCCTGTCTGGGCCATGTGGGGGACAGGAGGCTTTCCTCTCCCTGGACCCCCTGGCCAGCCTCGGGTGCG
GGGCCCGACAGCAGCTCGAGGGTCTCCTTGCTGCCGCCCTTCCTGAGTGACCAGGCACAGCACGTGCACGCCCTGGGGAACTTCTACCTCTTCT
GCCAGGCCACAGGTGAGTTGGGCCCTCTCTGTCCCCTGTGCCCTGTCCATCTCTCTCCTCCCACACCTGGGGGGCGGCCGGGGGCATCCTCCAC
ATCCCTCCACATGTTCCTTTACCTTCCTTATCTGTCCTGGCTGCGTCCCTCGGGTTGAGCCGTTTCACGCTTTCATTGTGGGTCCATCCCGAGG
GAAACTGTAGACAGTGTGAAGCCACTTCTAGTGTACAGGGGTCAACCAGTGTTTTCTGTAAAGGGCTAGATATTTAGGCCTTGTGGGCTGCAGG
CTGTGTCACAGCCACTAAGCTCTGCTGTTGTATTGTAAAACCAGCCATAGTCAATACACAACGAGTGGTCAGGGCTGTGTGCCAGTAAAACTTT
ATTTATAAAAATGCACGGTGGGCCAGATTTGCCCCAAAGGCCCCAGTTTCCCAACCTGTGGTATATAGGATTGCTTCTCCCTTAAAAAAAAAAA
AAATTTCAAGAGACAGGGTCTCCCTCTGTCACCAAGGCTGGAGTGCAGTGACACAATCATAGCTCACTGCAGCCCCTGCCTCCTGGGCTTAAGC
CATCCTCCTGCCTCAGCCTCCAGAGCCAGAGTGCTTCTATTTCTGCTAACAATTTGGAGGTTGATATACGTGGTATTTGGAAATTTTAAAAAAT
TAAGAGCTTCCAGAATGGGAGTTGTTTTAATGACTTGCTTCGTGGTATTTAAAAGCGGAAAAGATTGGCGGGCATAATCCCCCTGCTTTGGGAG
GCCAAGGCAGGAGGATTGCTTGAAGCCAGGAGTTTCACAGCAGCTTGAGCAACATAGCGACACCTGATCTCTACCCAAAAATGTGAAAAAAACT
AACCAGGCTTGGTGGCACGTGCCTTGAGGATTGTTTGAGCCCAGGAGTTTGAGGTTACAGTAAGGTATGATGGTGCCACTGCACTCCAGCCTAG
ATCACAGAACAAGACCCTGTCTCAAAAATCATCATCATTATAAAAACAGAAAAGATTGAGAGACTAGTGTACTCCTCTGGGACCTGGAGGCATT
TGCCCTGGATTGGAAAATACTCGGATGGGATATCTGCTCTTGAAAGATAGTAGATGTCCAGAACCACACTTCAAAGATGTATCCTGTGCTTCAG
GCAGTGCGTGGTAGCCCTGGTGGCCCCTGTGTTGTCATCTGACTGATCAGTAGATACAGAAAGAAAGGAAGTGGCCTGTTAGAGCCTGCCCCGG
GGGAGGGATGAAGTTAATGAAGAGGAAAAGCAAACCCAATTGCTCTCTTTTTAAACATGTTAAACACACTGTCAGTAGCTCCTGAGAGTTTTAA
GGTGCTGCCCTCTCCTGTTAAACAAGCTCTGAGAGCCCCAGGTGGCCCATGTCTGCTGAGGCCAGAATGTCCCTTGGCAGCCAGNNNNNNNNNN
NNNNNNNNNNNNNNNNNNNNNNNNNNNNNNNNNNNNNNNNNNNNNNNNNNNNNNNNNNNNNNNNNNNNNNNNNNNCAGCCAGCACTGGACAGGA
GAAGCTGCCGGTGAGCATGGAGCACTGTGGAGACGGAGCTTTGCTAGGCTGGCTTGTGTGGTTCCTGCCCTCCACTGGGTGCTACGGACCAAGG
GCTGTGCTGAGCCCCCTGTGGCCGCTCTCACAGCTGAATGGTGCTCCTCGGCCAGCTAGTTTGCCTTGGTGCAGGCATCCCAGAGGACTTCATG
TCTCCATGGAGACTGTGTCCTGTCGCAGCACTGGGGTCCTTCAGGCAGACTCAGGAAGCTCCTCCTCGGTGGGGAGGCTGGGAAGCGGGCGGGT
CTCTATGAACTGGCCGTGGACCCAGGGCTCCTTTGCGGGCAGATGCAGGCAGGCTGTATGGTCAGGCAATGTTGGTTGGTTATTTATTTATTTA
TTTTTGAGGCAGAGTCTTGCTCTGTTGCCCAGGCTGGAGTGCAGTGGCACGATCTTGGCTCACTGCAAGCTTCGCCTCCCAGGATCAAGCGATC
CTCCTGCATCAGCCCCCCTAGTAGCTGGGATTACAGGCACACCTCACCATGCCCAGCTAATTTTTGTATTTTTAGTAGAGACAGGGTTTCGCCA
TCTTGGCCAGGCTGGTCTCAAACTACTGACCTCAGGGGATCCACCTGCCTTGGCCTCCCAAAGTGCTGGGATTACAGGCATGAGCCACCATGCC
CGGCTGCTGTTACATTTTTAAATGTGAGGCTCCAGGTGTACCCCCTGTAGCTAGGCAGGCATACACACAAGCCCCTGGGGTCAGCAGGGAATGA
AAGATGGGTGCCCAGGGAGAAGGGACATCACTGTTACAGCAACAGAAACCACCCCAGATATTTCAACCACAGGGCATTTAACACAGGGAATTGG
TTACAAAGGTGATAGAAGGGCTGGGAACAGTGGGAAGGTGAGGTTTCCATTATCAGCCATGGGCAGGAAGAGTGAAGTGTCAAACACTCAGTCT
CACTTGCTGTGCCACCGAGGCTGTGGCCGTGTGATCTGCAGCCTCTCCCTGCCCGCCACACTGCCTTCACTGCTGGAGGTCCTACTTGAAGCCA
CAAAAATGTTTCTTCCTTCCAACTTCCTGTCTCCTGTCAATGACTCCCATGGCCAGACCTAACAGAAAGCTGGCGGTCACAGATGGATATGGGG
AATGTAGCTGTGGGCTTGCAGCAGTGTGGCCAGGAGTAGTGTGTAGAGGGTAGGGGAGCTGAGGGAGGAGGGCAGTCCTTTGCCAGTGCTCAGG
ATGGACTGAACAGATTGAGAACTGAGGCCCCCAGCCCTCCGCCACCCCCTTTTCACGTGGTCTTTACTTTCTCTCCAGAGGCATTTGGCCCCAT
CTGGGACATTCTCGTTCACTTGTTCCACTGAGGCCACAGCCTGCGAAGGCTGTGAGACCTCCCCAGGGAGCACCAGCTTAGGAGAGAGTGGCTT
CAGCCTTTTCAAGGGTGGGCCGAGGCCAGGGCATCATGGGCATGCCGTGAACTCAGAGGGGCTGTGGCTGTGAATTTCCCGAGTAGGCTCCAGG
GTTCTGTTGGGGTCTGTAGATGCTTCCTGCGACAGAGGCCACAGTGTGACTTGCAAGTCCCAGAGACTTTCCTGAGGAGAGTGAGTGCCATTTT
CTGCCTTGTGGGCCAGGAATGAGCCATTCCAGGTGAGGCCCAGAGCCTGGAGATTGCAATACAGTGCACTCAAGGCACAGGCCTACCGCTTCTG
CCTGTGTCCTCCCCCAGCCACCCAGGGCAGGGCTGCTTTGGAACTTGGCTGGGTTTTTCTTTGCTATAATGGCTGTTTTCGTGGTAGCTGTCAC
AGTGGTTTGGGGGCTGTCTGATTAAAGGGCTAGCAAAGTGTCTTTAGAATATGAAACTTAAGAGGACATTCGTGGCATCTTCAGTTCCCCATGC
TGCGTCCTGGTGCCTGTAGCTCTGCTGGGTGACCCTGTGTCTTGGGGAGCGTCTCACCCCCCAGAGAGGGCTGACTGATGGAAGGTCAGCTGGT
CAGGGTTGCACTTGGGGACTGGGTCTGCCCCAGAGCTGGTGGAGGCCCATGTGTCACCCAGGAGATGTCCCCACCTGCCCCAACACTTGGCCAG
TGCTCAGAAAGTGGCCCCAGGGACTTGGCCATCCAGGAGAGGTGAGGGCCCTCTGAGGCCAAAGCGCTTCCTGAAAGGGGATCGGGGTGGGTCT
GCACAGGGGAAAACATAGCCTGTGGTGTGTGCAGAGGCTGCCAGGGCACAAGGGCCCAACGTGGGGTGCGGTGGAGGTGATGTGGCCACGTGGG
CGGAGTAGGGCGGAGAGGCCTGTGTCCTGGGGATGCGAGAGCTTGAGGCCTGGTGGTGGGGTGGAGGCCCACCCTTGTCCTGCACCCAGGGGCC
TCAGTGCCCATCCAAGGGAGGGACAGGGCCACACCTGTGGGCCTGTGTCAGGAGCTGGGGTGGGAGATTGGCCACCAGTGCCACTCTCCACCTA
GACACATTTCATCCCTTCTCCACCACAGTTCTCGCCTCTAGGAAGTGGAATTATCAGTGGAAGATGATACGGAAAGATCCACTGATGCCCCTGG
CACAGGCCAGCCTTGTCCCTGGGGCAGGATGGGACGGTCCTGAGAAGGCCCTGGGACACCCTAGGGGTGTCATAGTGGGAACTATGCCTTTGCA
GTGCCCAGGTGAGACAGCACATGGTGTCACCCCAAGCATGGTACCCTGGGCTCAGTGACAAGAGGGGTGGGCAGCTCACGACTGCACTGCCTTG
GGGCCCGTGCCCTGGGAGCCGCTAGCCCTATGATGCCTGAGTACCTGGGGGACTGAGTGCATCGGCAGGGCCTGGAGCAGTGGGAGTGGCCGAN
NNNNNNNNNNNNNNNNNNNNNNNNNNNNNNNNNNNNNNNNNNNNNNNNNNNNNNNNNNNNNNNNNNNNNNNNNNNNNNNNNNNNNNNNNNNNNN
NNNNNNNNNNNNNNNNNNNNNNNNNNNNNNNNNNNNNNNNNNNNNNNNNNNNNNNNNNNNNNNNNNNNNNNNNNNNNNNNNNNNNNNNNNNNNN
NNNNNNNNNNNNNNNNNNNNNNNNNNNNNNNNNNNNNNNNNNNNNNNNNNNNNNNNNNNNNNNNNNNNNNNNNNNNNNNNNNNNNNNNNNNNNN
NNNNNNNNNNNNNNNNNNNNNNNNNNNNNNNNNNNNNNNNNNNNNNNNNNNNNNNNNNNNNNNNNNACCAAACACAACCACTCACACATGCACC
ACACACAGCACAGCATACAACACACATCACACACACACCAATCATACCACTGTTACACACACACCACCACACATACTGCACACACCAAAGCACA
TACACACCACATAGACACATGCACGCTACCCACACCACACCAATCACATCCACACATACACAACCATACACACACACACACACATTGTTGACTT
AGGATCGTTTCAACTCACAGTCGGTTTATTGGGATGCAGCCCCGTGGCAAGTGGAGCAGCATGTGTATTGACAAGGGCAGGAAAGCCCTCTGGA
GCTGGTGAAGTAAAGTTAGCATGCAGCCGAGCTCTGCTCGTCTGAACTGATGAACCCAAGTTCCTCATGGATCACTCAGAATACAGATGGGTGA
AAAAATAACCCCACCACCCGTGTGCCAGCACATAGCGCATCTGGCATACAAACGTAAGGATCAATAGCGATGAATGGCGATGGGTTGTGTCTAC
ATGCAGATACAAATCATGCACTTGTACATTAGTGTGCACACACAGAAACAGATCGATATAATTTTTTAACCAAAGTGCAGTCTTTACCCTGTCA
GGGCCCTGCCTTCACCTCTGCCAGGACTATCTTCCATGTCAAGTTTAGACCCGTGTCATTTTCAAAGCTAATAATGGTTCCCCCATACTTTAGG
CAGCATTTAGATATTTCCATTTGGGATGGCCTTTTATGTTTTAACTACAGTGTTAGAAATCAGAGCCCTTCCAACCACTGCGATCAGAGGGCAG
CAGCAGAAGGCGCCCTTGGTCCTCTTTGAGGGGCCCAGGGCTCCGGAGAGGGCCCCCGTTCCTAGCACCCACAGTGGCCTGTTGGCACGCATGT
GTGTGTTCCAGCTGCTCTGTGACATTTCCCTTTGTTTCAGACTCTTGAAAGGCCACGGCCGTCGTGGGAATTAGTTGACCTTGTGTGTTGGGCC
ACCCTTGCTGGACAGGACAAGGTCGTCCTATCAACTCCCTGTGCTCTGAGGTCCTTCGCATGTTAGATGACGCAGCTTCACCACAAACTATCCA
TGTCTCTTCTGTTATCTGGGATAATTCCACGTGCCTTTACAACACAGCTGTCTGGTTACCTGGGGTCTGGAAATGCCCTCGGTGCCTCAGTGGT
GCCTTCCCACAGGCCCCCCATGGGAGCCAGGCGATGCCTACAGATGCCTCAGTGGTACTTTCTCAGGTCCCTTTGCAGAGAAGACGTTCACGAT
TCCTGCCCACATTGATAAGGCGGCTTGGCCAGTAAGTGGCAGGCATGAACAGGTGCATTCCAGAAGCGCTGGGGCTGGTCCAGTGCCCTGAGTG
GTCTAGAGCATACCAGAGTGAAACGTTAGGCTGCGTCGGCCTGGTGACTGTCAGGGAGATGAGGACTCAGAGAAGGGAGCTGTCAGAATTGCTA
CCTATGTGGCAGGGGTCTCACTCTCTCCTCCCTCCTCTTGGGGCCCCTGCCTACTCTGTGACTTCAACAGAGGACAGAAAGGATGACCAACAAG
GCCTCAGGGCATACCCCCAGCTGCACTGTCCTTGTCCCCAGAAGGGTCCCCAGAGTCTGGGAGGGAGGAGGGGCCATGGCCAGGATTAGAAAAG
ACCGTGCCCCAAGGAGAGAGCACAGAGATGGGCCAGGGAAGCAGTGGGATCCTCGGGAAAAGAGGCTGGGAGCAGGTGTCCGGGTGAGGCCCGG
GCAGCGGGTACAGGCAGGGACAAGCCAGGAGTCCCATCATGGAAGACATCATGGCCAGCGGCCAGCACTGTGTGCAGAGAATGGCCCCTCTGGG
GATGTGCCCGCTGCCCCATTAGTTGCAGGAAGGCCACCTGGATGTGAGTTTGGGACATGGGCTGGCCCCGAGGCAGCCAGCCCTGAGGTCACAG
TGCGCCACATGCATGGGGATGCCGGGAGGACACAGAGGAGTGCTGCAGGAGATGGCAGTCGCGGCACTTTCCAGGATGGGCCCGAGCAACTCAG
TCACTGGGTGGATGTCTCACCACCCCTCCAGGCCTTCCTCAGGGCGAGGCCACTGCCCAGAGGGCACCTGGTTTGTCGCAGAGTAGAATCAGCT
CCATATTTTGTAATCACATCCACGAAGCTCTGAAGCCATGGTGGTCCTGGCACCAGCTGGCTCCGTTAGAGGCTTGGGGTGGGAGTGAGCAGGT
GGGAGGTGCCCCAGTGACAGGCTGAGTGCTGGAGCCCAGGCTGCCAACAGCCTCCCCAGACTCCTGAGTTGATGTAATAAACCCAGCCCTGGTG
AATAAACCTGGCCCTTGCTTATACCAAGGTGATCAGTCTTCTCACGACAGTCCTAGCTGTAGGAGAAAGATCATTACCTACGGCATCTGCCACA
GCAGTTAATTTGCCTTCAACTTAACCTAGTTCCACTGACAGGAAGGGCCAGGGGGAAATATCTGTCCTCAGGACCTCTACCCTAGATCCTTGTA
AGCCACAACAACTTCCCTTCTTTGAGGGCGCGACCAGTGTCACCTGGCTCGCCACTGGGAAGAGCCAAGGCACATCCAGGTTGGTGGCTGCTGA
GCCCCACAGCATCAGACCAGCCTCTTGTCCCCACCCCACAGAGGCCAAGGGGGTGATCTGGGAGTAGCACCCCAGCCTGGCCGCTCTCTTGAGG
TAACAGGGTTGGATGGTTAGGGAGCTTGGAGCACTGGCCCAAGCAAGAAACCAGTGGTGTTTTCAGGAGGCCCTGCTGGGAGATGGAAGACAGC
TCCCCACTGGGGGCCTAGGATTCCAGGAGCTCCCCAGCAGTCCTCCGTGGGACATACGTGGGTTTGCACCTGCTGCCCTGTCCCGCTGAGGGTG
CGGTGCTGATGGGGTGGCCCTGCACACTGATGGTAACTCTCACTTTCCCTCTCTCTCATGCATTCAGAAAGAGATGGATAGTTTAAAAACGAAT
ACATGGAACGTAAGTACTTCTTTAACATCTTTAATGTCTTATGATGATCAAGCATGTATTTAAATAGTATTTACTCATCCCTGTTAGCGGTGGT
AAGCACGTGTCTGTTTCTGCTCACACCCCAAGAGTGTAGAGCTTTGAGGGTTTTGCAGTCAGTGGTCCCATGATGGGGCGTTGGGTGATTAATC
CAATCCAGCTTAGGCCACCCAGATTCTTAGTCTCAAGGGCTTGGTCATGAGAACCTTCCACAGGCTCCTGTCACTCAGTGACTCCAGTCCCCTG
GGTGGTTCTTGGTGCAGGTCACATGAGGGAGGAGACCGGGCTTTTATAGAACTCACTTCACTGTCTGTTCAAAGAAAAGTGTTACTTGATCATA
ACAGCTCAAAAAAATCTGTTTCTTAAAATGAGATTTTACCTGGATGCCCATCAGCTGGGAAAGGGAATATCTATTCCCCAGTTGATGGGCACCT
AGATGTACATAGAGACATATGTTTGTACATCTATGTAATATGTACTTATATTTGTAGATAGATACATGGAATTATCTGTGGCCAGAGTCCAAAA
CATTTTGAGTGGGAAAAAACAAATTATAGAGTGTTAAGTTTTGTTTTTTTTTAAATTCTGCACAAAAACCAAACCTGTTCACAAGGCCTTGTCC
ACCAGGCCAGGGCCAGATGGGCCGCCAGGCAAAACAGTTTTGGAGCACCTTCTGAATTTCCTTGAGTTTACAGAATGTTTCCTTCAAAGTAACA
CTTTTATAAAAAATTATTATTATAAAAGCAATGCTTGTTTGTTATAAGTTTGGAAACTCCAGGGAAGTATAAAGAAAAAATTTAAACAATCCCA
AATTTAACCATCCAGACGTAGTTACCACCAGCATCCCGGCCATTTTTGGGCCATGACTATCTACGTTCACACATGTATACATGGGTGTGTACAT
ATATGCACACATTCCTAGATATTGTTTCACTTATTTTTCTGTGTTGCTGAATATTCTTCGATGGCACTTCGAATGAGTGACTTGTGCCCCCCTC
CTTGGACATTTCCCAACTCCTCACTGATAGAAACAGGGCTTCACTGGGCCCATCCTTGCCTCGGGACTCATTCCTAGCACTGCCCAGCTAAAGG
GTCTGAGCTTGGTCAAGTCCTTGGGAGGAGCATTCTCTGGTGATCCTGGACAGTGGGGAATTGTTGACCAAGAGACCGGACAAAGATGAGCAGA
TGCCACAGTCAGTAAAGCAGGGAAAATGCATTACTAAAGTCAGCTTCATTAAACTGGCGATCGCTTCTTTTCAAAAGTCCAGCATGTGCCACAG
AAATGGAAAGCTCTCTCCCCACTACTGTCCTGCCCAGGGAGGGGAGCGTGGGTCCACCCACACCATTTAATACCTGTAACTGGATGCACCTCTG
CCCCTACACCTGAGAACAAGGCCAGTTTTTGTGTGTGCAGGTACTTTGGACTCTTTTGGCTCTGGAATTTGTTTTACCTGCTCAGTGTTCTGAA
CTCCTTCCTTTTCACTACTAAGCATTCTCCATGAAGCCACACTTCATTTTGTCATTGTGAGGGTGATCGGCATCTAGGGCAAATCTAANNNNNN
NNNNNNNNNNNNNNNNNNNNNNNNNNNNNNNNNNNNNNNNNNNNNNNNNNNNNNNNNNNNNNNACCAATTCTTACGAGGTGTCATGGTCAAGCA
GAGGCCATGGCCGGCACTGGTCTAGGTGGCCCATGGCCCATTTGGGGGCCTTGGTGGGCCTCGAGGAAGGGCAGGTGCTGGTCAGGGAGCCGGG
TCGCTAGGCAGCAGGTGGGTGTCACCCCAGTCCACGCTGCTGCGGTGCCTGGCCTGATGCAGGCTGTGCCTGAGGGAGACAGAAGCAGCAGAGT
AGGCTGGCCGGCCTCCCCAGCCCCACCACAAGCAGGAGCTTCAGAGACAGAAGGAGCACCTGCACCCCCTCACCTGCCCTCCAGGGCCTGGCCT
GGCCCTCCCAGCTCAACTCCAG
HUMAN SEQUENCE—mRNA
CTGAGCCGCATCTGCAATAGCACACTTGCCCGGCCACCTGCTGCCGTGAGCCTTTGCTGCTGAAGCCCCTGGGGTCGCCTCTACCTGATGAGGA
TGTGCACCCCCATTAGGGGGCTGCTCATGCCCCTTGCAGTGATGTTTGGGACACCGATGGCATTTGCACCCATACCCCGGATCACCTGGGACCA
CAGAGAGGTGCACCTCGTGCAGTTTCATGAGCCAGACATCTACAACTACTCAGCCTTGCTTCTGAGCGAGGACAAGGACACCTTGTACATAGGT
GCCCGGGAGGCGGTCTTCGCTGTGAACGCACTCAACATCTCCGAGAAGCAGCATGAGGTGTATTGGAAGGTCTCAGAAGACAAAAAAGCAAAAT
GTGCAGAAAAGGGGAAATCAAAACAGACAGAGTGCCTCAACTACATCCGGGTCCTGCAGCCACTCAGCGCCACTTCCCTTTACGTGTCTGGGAC
CAACGCATTCCAGCCGGCCTGTGACCACCTGAACTTAACATCCTTTAAGTTTCTGGGGAAAAATGAAGATGGCAAAGGAAGATGTCCCTTTGAC
CCAGCACACAGCTACACATCCGTCATGGTTGATGGAGAACTTTATTCGGGGACGTCGTATAATTTTTTGGGAAGTGAACCCATCATCTCCCGAA
ATTCTTCCCACAGTCCTCTGAGGACAGAATATGCAATCCCTTGCCTCAACGAGCCTAGTTTCGTGTTTGCTGACGTGATCCGAAAAAGCCCAGA
CAGCCCCGACGGCGAGGATGACAGGGTCTACTTCTTCTTCACGGAGGTGTCTCTGCAGTATGAGTTTGTGTTCAGGGTGCTGATCCCACGGATA
GCAAGAGTGTGCAAGGGGGACCAGCGCGGCCTGAGGACCTTGCAGAAGAAATCGACCTCCTTCCTGAAAGCCCGACTCATCTCCTCCCGGCCAG
ACAGCGGCTTGGTCTTCAATGTGCTGCGGGATGTCTTCGTGCTCAGGTCCCCGGGCCTGAAGGTGCCTGTGTTCTATGCACTCTTCACCCCACA
GCTGAACAACGTGGGGCTGTCGGCAGTGTGCGCCTACAACCTGTCCACAGCCGAGGAGGTCTTCTCCCACGGGAAGTACATGCAGAGCACCACA
GTGGAGCAGTCCCACACCAAGTGGGTGCGCTATAATGGCCCGGTACCCAAGCCGCGGCCTGGAGCGTGCATCGACAGCGAGGCACGGGCCGCCA
ACTACACCAGCTCCTTGAATTTGCCAGACAAGACGCTGCAGTTCGTTAAAGACCACCCTTTGATGGATGACTCGGTAACCCCAATAGACAACAG
GCCCAGGTTAATCAAGAAAGATGTGAACTACACCCAGATCGTGGTGGACCGGACCCAGGCCCTGGATGCGACTGTCTATGATGTCATGTTTGTC
AGCACAGACCGGGGAGCTCTGCACAAAGCCATCAGCCTCGAGCACGCTGTTCACATCATCGAGGAGACCCAGCTCTTCCAGGACTTTGAGCCAG
TCCAGACCCTGCTGCTGTCTTCAAAGAAGGGCAACAGGTTTGTCTATGCTGGCTCTAACTCGGGCGTGGTCCAGGCCCCGCTGGCCTTCTGTGG
GAAGCACGGCACCTGCGAGGACTGTGTGCTGGCGCGGGACCCCTACTGCGCCTGCAGCCCGCCCACAGCGACCTGCGTGGCTCTGCACCAGACC
GAGAGCCCCAGCAGGGGTTTGATTCAGGAGATGAGCGGCGATGCTTCTGTGTGCCCGGATAAAAGTAAAGGAAGTTACCGGCAGCATTTTTTCA
AGCACGGTGGCACAGCGGAACTGAAATGCTCCCAAAAATCCAACCTGGCCCGGGTCTTTTCGAAGTTCCAGAATGGCGTGTTGAAGGCCGAGAG
CCCCAAGTACGGTCTTATGGGCAGAAAAAACTTGCTCATCTTCAACTTGTCAGAAGGAGACAGTGGGGTGTACCAGTGCCTGTCAGAGGAGAGG
GTTAAGAACAAAACGGTCTTCCAAGTGGTCGCCAAGCACGTCCTGGAAGTGAAGGTCGTTCCAAAGCCCGTAGTGGCCCCCACCTTGTCAGTTG
TTCAGACAGAAGGTAGTAGGATTGCCACCAAAGTGTTGGTGGCATCCACCCAAGGGTCTTCTCCCCCAACCCCAGCCGTGCAGGCCACCTCCTC
CGGGGCCATCACCCTTCCTCCCAAGCCTGCGCCCACCGGCACATCCTGCGAACCAAAGATCGTCATCAACACGGTCCCCCAGCTCCACTCGGAG
AAAACCATGTATCTTAAGTCCAGCGACAACCGCCTCCTCATGTCCCTCTTCCTCTTCTTCTTTGTTCTCTTCCTCTGCCTCTTTTTCTACAACT
GCTATAAGGGATACCTCCCCAGACAGTGCTTGAAATTCCGCTCGCCCCTACTAATTGGGAAGAAGAAGCCCAAGTCAGATTTCTGTCACCGTGA
GCAGAGCCTGAAGCAGACGTTAGTAGAGCCAGGGAGCTTCTCCCAGCAGAATGGGGAGCACCCCAAGCCAGCCCTGGACACCGGCTATGAGACC
GAGCAAGACACCATCACCAGCAAAGTCCCCACGCATAGCGAGGACTCACAGAGGATCGACGACCTTTCTGCCAGGGACAAGCCCTTTGACGTCA
AGTGTGAGCTGAAGTTCGCTGACTCAGACGCAGATGGAGACTGAGGCCGGCTGTGCATCCCCGCTGGTGCCTCGGCTGCGACGTGTCCAGGCGT
GGAGAGTTTTGTGTTTCTCCTGTTCAGTATCCGAGTCTCGTGCAGTGCTGCGTAGGTTAGCCCGCATCGTGCAGACAACCTCAGTCCTCTTGTC
TATTTTCTCTTGGGTTGAGCCTGTGACTTGGTTTCTCTTTGTCCTTTTGGAAAAATGACAAGCATTGCATCCCAGTCTTGTGTTCCGAAGTCAG
TCGGAGTACTTGAAGAAGGCCCACGGGCGGCACGGAGTTCCTGAGCCCTTTCTGTAGTGGGGGAAAGGTGGCTGGACCTCTGTTGGCTGAGAAG
AGCATCCCTTCAGCTTCCCCTCCCCGTAGCAGCCACTAAAAGATTATTTAATTCCAGATTGGAAATGACATTTTAGTTTATCAGATTGGTAACT
TATCGCCTGTTGTCCAGATTGGCACGAACCTTTTCTTCCACTTAATTATTTTTTTAGGATTTTGCTTTGATTGTGTTTATGTCATGGGTCATTT
TTTTTTAGTTACAGAAGCAGTTGTGTTAATATTTAGAAGAAGATGTATATCTTCCAGATTTTGTTATATATTTGGCATAAAATACGGCTTACGT
TGCTTAAGATTCTCAGGGATAAACTTCCTTTTGCTAAATGCATTCTTTCTGCTTTTAGAAATGTAGACATAAACACTCCCCGGAGCCCACTCAC
CTTTTTTCTTTTTCTTTTTTTTTTTTTAACTTTATTCCTTGAGGGAAGCATTGTTTTTGGAGAGATTTTCTTTCTGTACTTCGTTTTACTTTTC
TTTTTTTTTAACTTTTACTCTCTCGAAGAAGAGGACCTTCCCACATCCACGAGGTGGGTTTTGAGCAAGGGAAGGTAGCCTGGATGAGCTGAGT
GGAGCCAGGCTGGCCCAGAGCTGAGATGGGAGTGCGGTACAATCTGGAGCCCACAGCTGTCGGTCAGAACCTCCTGTGAGACAGATGGAACCTT
CACAAGGGCGCCTTTGGTTCTCTGAACATCTCCTTTCTCTTCTTGCTTCAATTGCTTACCCACTGCCTGCCCAGACTTTCTATCCAGCCTCACT
GAGCTGCCCACTACTGGAAGGGAACTGGGCCTCGGTGGCCGGGGCCGCGAGCTGTGACCACAGCACCCTCAAGCATACGGCGCTGTTCCTGCCA
CTGTCCTGAAGATGTGAATGGGTGGTACGATTTCAACACTGGTTAATTTCACACTCCATCTCCCCGCTTTGTAAATACCCATCGGGAAGAGACT
TTTTTTCCATGGTGAAGAGCAATAAACTCTGGATGTTTGTGCGCGTGTGTGGACAGTCTTATCTTCCAGCATGATAGGATTTGACCATTTTGGT
GTAAACATTTGTGTTTTATAAGATTTACCTTGTTTTTATTTTTCTACTTTGAATTGTATACATTTGGAAAGTACCCAAATAAATGAGAAGCTTC
TATCCTTAAAAAAAAAAAAAA
HUMAN SEQUENCE—CODING
ATGAGGATGTGCACCCCCATTAGGGGGCTGCTCATGGCCCTTGCAGTGATGTTTGGGACAGCGATGGCATTTGCACCCATACCCCGGATCACCT
GGGAGCACAGAGAGGTGCACCTGGTGCAGTTTCATGACCCAGACATCTACAACTACTCAGCCTTGCTGCTGAGCGAGGACAAGGACACCTTGTA
CATAGGTGCCCGGGAGGCGGTCTTCGCTGTGAACGCACTCAACATCTCCGAGAAGCAGCATGAGGTGTATTGGAAGGTCTCAGAAGACAAAAAA
GCAAAATGTGCAGAAAAGGGGAAATCAAAACAGACAGAGTGCCTCAACTACATCCGGGTGCTGCAGCCACTCAGCGCCACTTCCCTTTACGTGT
GTGGGACCAACGCATTCCAGCCGGCCTGTGACCACCTCAACTTAACATCCTTTAAGTTTCTGGGGAAAAATGAAGATGGCAAAGGAAGATGTCC
CTTTGACCCAGCACACAGCTACACATCCGTCATGGTTGATGGAGAACTTTATTCGGGGACGTCGTATAATTTTTTGGGAAGTGAACCCATCATC
TCCCGAAATTCTTCCCACAGTCCTCTGAGGACAGAATATGCAATCCCTTGGCTGAACGAGCCTAGTTTCGTGTTTGCTGACGTGATCCGAAAAA
GCCCAGACAGCCCCGACGGCGAGGATGACAGGGTCTACTTCTTCTTCACGGAGGTGTCTGTGGAGTATGAGTTTGTGTTCAGGGTGCTGATCCC
ACGGATAGCAAGAGTGTGCAAGGGGGACCAGGGCGGCCTGAGGACCTTGCAGAAGAAATGGACCTCCTTCCTGAAAGCCCGACTCATCTGCTCC
CGGCCAGACAGCGGCTTGGTCTTCAATGTGCTGCGGGATGTCTTCGTGCTCAGGTCCCCGGGCCTGAAGGTGCCTGTGTTCTATGCACTCTTCA
CCCCACAGCTGAACAACGTGGGGCTGTCGGCAGTGTGCGCCTACAACCTGTCCACAGCCGAGGAGGTCTTCTCCCACGGGAAGTACATGCAGAG
CACCACAGTGGAGCAGTCCCACACCAAGTGGGTGCGCTATAATGGCCCGGTACCCAAGCCGCGGCCTGGAGCGTGCATCGACAGCGAGGCACGG
GCCGCCAACTACACCAGCTCCTTGAATTTGCCAGACAAGACGCTGCAGTTCGTTAAAGACCACCCTTTGATGGATGACTCGGTAACCCCAATAG
ACAACAGGCCCAGGTTAATCAAGAAAGATGTGAACTACACCCAGATCGTGGTGGACCCGACCCAGGCCCTGGATGGGACTGTCTATGATGTCAT
GTTTGTCAGCACAGACCGGGGAGCTCTGCACAAAGCCATCAGCCTCGAGCACGCTGTTCACATCATCGAGGAGACCCAGCTCTTCCAGGACTTT
GAGCCAGTCCAGACCCTGCTGCTGTCTTCAAAGAAGGGCAACAGGTTTGTCTATGCTGGCTCTAACTCGGGCGTGGTCCAGGCCCCGCTGGCCT
TCTGTGGGAACCACGGCACCTGCGAGGACTGTGTGCTGGCGCGGGACCCCTACTGCGCCTGGAGCCCGCCCACAGCGACCTGCGTGGCTCTGCA
CCAGACCGAGAGCCCCAGCAGGGGTTTGATTCAGGAGATGAGCGGCGATGCTTCTGTGTGCCCGGATAAAAGTAAAGGAAGTTACCGGCAGCAT
TTTTTCAAGCACGGTGGCACAGCGGAACTGAAATGCTCCCAAAAATCCAACCTGGCCCGGGTCTTTTGGAAGTTCCAGAATGGCGTGTTGAAGG
CCGAGAGCCCCAAGTACGGTCTTATGGGCAGAAAAAACTTGCTCATCTTCAACTTGTCAGAAGGAGACAGTGGGGTGTACCAGTGCCTGTCAGA
GGAGAGGGTTAAGAACAAAACGGTCTTCCAAGTGGTCGCCAAGCACGTCCTGGAAGTGAAGGTGGTTCCAAAGCCCGTAGTGGCCCCCACCTTG
TCAGTTGTTCAGACAGAAGGTAGTAGGATTGCCACCAAAGTGTTGGTGGCATCCACCCAAGGGTCTTCTCCCCCAACCCCAGCCGTGCAGGCCA
CCTCCTCCGGGGCCATCACCCTTCCTCCCAAGCCTGCGCCCACCGGCACATCCTGCGAACCAAAGATCGTCATCAACACGGTCCCCCAGCTCCA
CTCGGAGAAAACCATGTATCTTAAGTCCAGCGACAACCGCCTCCTCATGTCCCTCTTCCTCTTCTTCTTTGTTCTCTTCCTCTGCCTCTTTTTC
TACAACTGCTATAAGGGATACCTGCCCAGACAGTGCTTGAAATTCCGCTCGGCCCTACTAATTGGGAAGAAGAAGCCCAAGTCAGATTTCTGTG
ACCGTGAGCAGAGCCTGAACGAGACGTTAGTAGAGCCAGGGAGCTTCTCCCAGCAGAATGGGGAGCACCCCAAGCCAGCCCTGGACACCGGCTA
TGAGACCGAGCAAGACACCATCACCAGCAAAGTCCCCACGGATAGGGAGGACTCACAGAGGATCGACGACCTTTCTGCCAGGGACAAGCCCTTT
GACGTCAAGTGTGAGCTGAAGTTCGCTGACTCAGACGCAGATGGAGACTGA

[0293] TABLE 29
MOUSE NOMENCLATURE

| | |
|---|---|
| ICSGNM | Mdm2 |
| Celera | mCG3393 |

HUMAN NOMENCLATURE

| | |
|---|---|
| HGNC | MDM2 |
| Celera | hCG19697 |

MOUSE SEQUENCE—GENOMIC
AGCGACGCAGAGCACGTGAATCTCTGAGTTCAAGCACAGCCTGGTCCCGACAGCCAGGGCTTTATAGACAAACCCTGTTACAAAACAAAAACAA
ATATGTATCAATTTAGAGAGGGTCTAACATAACTAGTGTGGTTTTGCTCTCTCGGGATGGACAATTCTCCTCTTGGGTAAAGTGAGAAACTAAA
GGCAGCCTAGAGGAAAATGTTTTGCACTCTGTGTTCCAAGCTAGGATCTGGGAGGAGGACGGCTCCATAGAGAGCGTGTTAGAGAAATGTCTTT
GCGAAGCTGTGTGGGTTTTGTTAGCCAAGCAGTGCCGTCATCCGCCATAACCCAAACACTCCTGTCACCACACTAATGCATCTATTCAGCAAAG
CAAGTCACACTACTAGAAGCCCTCATTGTTGGTCACCAGATATGGTGACACACATGTTTACTCCTAGCATTCAGGTGACAGAGGTAGGTAGATC
TCTCTGACCCTCAGCCTAGCCTGCTCTACATGGCGAACTCCAAGGCAGCCAAGGTTTTTGTAAGTAAGACTCTATCTCAAAATACAAAATAACG
CCCCCACCCCCACCCCAAGAAACTGTTGGTCTTTTATAGAGAATCCTTGCTCACTCAAACAGCTTTCAGCATAAGAATATTCAAAATTAATTGG
CAACCGCTCCCACCATGGGTGTCCCTAATTACACATACCTTGTCATATTTACGAGTGTGATGAACTTTTAGCCCGTGTCACATACACTGATAGC
CATCTCCATAGTGACATGTATTTAGATCACATTACAGTCACGACTCATAGTTTGTTTTTTTAAAATGCTCTTAAAAATTCGACTAAAACAAAAA
TAAAATAAAATAAAACAAAACAAAGTCAACGCAAGCTTTCCTTTCCTAAAGTCTCTGCTGTGCCCGCAGTTTAGACAGAGTTTCTGTCTTCTGA
CTCCGCTCACTCCACACCAGCCAAGTCCTGGTCCCAGTGAACCAATGTTCTGTCTAAGCAGAACACGCTCCAGTAGACAAGCCTTCTTTTCATA
GACTAGCAAACTACATTCCTTTCAGCCTTACGTCTGATGGAGGAAATCATTCACCTCAGGAAACAAGTAAGCCTTTCAAAACAGCACACAGAAC
TTTACTGAACCTTTAATAAAAACATAGGACTAAAAATTACATTCTTTTTTAAAAATTAGGACAAATTTTAATATACATTTATCTTATGTGTGTG
TACGTGTATGTGCGCATATGTATATATGTGTGTGTATGTATATGTCTATATACATTTATCTTGTGTGTGTACGTGTATGTGTGCATATGTATAT
GTGTGTGTGTGTGTGTGTGTATTTCTCTGTGTATATATGTATGTATGTGTGTGCATGTATGGATATGTCTGTATGTGTTTGTGTGTATGTATGT
GTGTAATGTGTGTATGTATGTATATGTCTGTATGTATGTGTGTGTATGTGTGTATGTATGTGTATGTCTATATGTGTTCCTGTGTGTGTATGTG
TCTTTGTGTCTATGTGCATGTGCATGTGTGTGTATGTGCATGCTCAAAGCAATCATGTGGCAGTCAGAGGAAAACTTGCAAGAGTTAGGCTCCC
CTTCAACTATCCAAGCTCTGAGGGTCAGACTTGGGTTGTCAGGTTTGGCAACAAGTACCTTTACTTACTAAGCCATTGTGCTGGCCCTGAATCA
GGACAGATTTAAACAAAAAGATTAACTAGGCAAACTAAATGATACCTGGAATAGTCAGATGTCCGGGCACCTTAAATTAGAAGTTGAAGCAAGA
GAAGGGACTCCAAATGTGCCTTTTCGTCCCTCTCTCTGGCTCATAGCAATCCTTTGCCACATATTTATTCATTGATAGGGTCTCACTGTAGACC
CTCTTACAGAGAGCAGGCTACCTTCGGACCTTCAGCAGTTAAGAATCCTAAGTAGTGATTTAAGTGAGAAACATCCCTCATAGGCTCATGTCCC
CAATGGCTGGTGCTGTTTGGGAAGTGTTTAGCAGCTACCCCCTTCCTGCGGGAAGTCCATCTCTGCGGAGGGATGGCCTTTGAGGGCTTGTAGC
CCCACCCTACTCTCTCTTGGCTCTCTCTGCTTCCTGTGTGCTATTGAGATATGATTCCTTCTGCTTCTTACTCCTGCCGCCATGTCTTCCCAAC
CAGTGTGGACAGCCAGCCCTCTGGAAATGTTAAGCTAAAATATAATATTTTAAATTGCCTTTGGTCATGTTATTTTATCACAGAAAAAACAAAG
TAGAAATTAATACACTGATCCTCCTGCGTCTGCCTCCCAAGTGTTGGGATTACTGGCTTGTGTCACCATATCAGCTCATCTTTATGAATCTCTG
ATTTTTGTTTTCAGTACAAGGGTTGAAGCTAGGGCCTCACAAGCAGTAGCTATGCTCTCTCCCATTGGGCTGTGTTTCCAACTCCATATTTTTT
GTTATTGTTGTTGTTTTTGTTTTTTGTTTTTCGAGGCAGGGTTTTTCTGTATAGCCCTGGCTGTCCTGGAACTCACTTTGTAGACCAGGCTGGC
CTTGAACAGAAATCCACCTGCCTCTGCCTCCCGAGTGCTGGGATTAAAGGCATGCGCCACCACGCCCAGCTCCAACCCCATATTATTAACCCCA
CTGATTCAATCATTCATCATTCATCATTCATTCATTCATTTGACTTTTCTATAATGTTTTATAAGAAGCTGCATCATTTCTTCCTTCCAGGCCT
CTCTCTCTCTCAAGCCAGGCTCACACCATAGATCTTGGTGGCAGAAGGTCTTGTCCAAAGACTGCGAGTCACACCTGTAGTGAATCCCAAAGCC
CCTTGAAGCCATGACATCATCCAGCCCAACATCTGTATGCTGACATCTAATCAGTCAACATGCTGGGACATCTTCACCAATAAGTACTGTAAAA
GAACAGAAAGTCTTTTAAATAAATGTAAAAGATGGATATTTAAGGGAGGAGGGGCAGGAGAGATAGCTCAGCGGTTAAGAGCCCTGACTGCTCT
TCCAACAGTCCTGAGTTTAATTCCCAGCAACCACATGGTGGCTCACAACTATCTGTAATGGGATCCGATGCCATCCTCTGGTGTGTCTGAAGAC
AGCGATGGTGTACCCACATACATGAAATAAATGGATAAATAAGTAGGCTGGGATGCAGCCCCGGTGATAGATGCCTGCCTACTGTGCACGAAGC
CCTGGGCTCATTCCCTCGCTACACATAAAGTCTGTGGTGGTGGCGCATTCCTGAAATCTCAGCACCAGGGAGCTCACCGTTGTCCTCAGCTACA
CGGCAAGCTTGAGGCTGGTCTGGGCACTGTAGGAGCCTTGTCTGACTGAAAAGTTATAAAAATAACTTTTCAATTAAATAAACATGCAGGGAAA
AAAGTCAAAATTCTTCACTTAAACAAAGCTACCAATGGAGATGGATAAACTGCTCAGTGACTAGAAACATCTCTCCTCTTGTATAAGGGCCCAA
GTCGAGCACACACACACACACACACACACACACACACACCCTTGAAAATAATAATGGTATCATGGTGACACACACCTTTAATCCCAGCAGTCGG
GATGCAGAGGCAGGTGAATATCTATGTTCAAGGCAAGCCTGGCTTTCACAGTGAGTTCCAAGATAACCAGAATTACATGGTAATAGCCTGTCTC
AAAAAAAAAATAGCAGACTTTATTAATATACATATATATGTATATGTGTATGTGTGTGTGTGTGTGTGTGTGTGTGTGTGTGTGTGTATGTGTG
TGTGTGTGTGTGTGTATGTATGTTTGTCTTCACAGTGCCCTCAATCCACATGTACTTCACAAGAATGTGTGTGGTGCCGTGCTTGCCGTGCACA
GACAGGGGCTGTGCTCACCGTGTGCAGGGGCCAGCCAACCTAACAGGCAAGTTTACTAGCTTCAAGCTGCTTCCAACAGAAGTGTTCAAACTCC
CTTTCTAACGATGTATTTCTAAGCTGTGTGTGTGGTGGTGCACACCTTTTTTCCCAGCACTCTGGAGGCAGAGGCAGACAGATCTCTGTGAGTT
TGAGGCCAGCCTGATCTACAGATTAGTACAGTGAAACTGGAGTCAGTGGTGGCTGTGGGTGNNNNNNNNNNNNNNNNNNNNNNNNNNNNNNNNN
NNNNNNNNNNNNNNNNNNNNNNNNNNNNNNNNNNNNNNNNNNNNNNNNNNNNNNNNNNNNNNNNNNNNNNNNNNNNNNNNNNNNNNNNNNNNNN
NNNNNNNNNNNNNNNNNNNNNNNNNNNNNNNNNNNNNNNNNNNNNNNNNNNNNNNNNNNNNNNNNNNNNNNNNNNNNNNNNNNNNNNNNNNNNN
NNNNNNNNNNNNNNNNNNNNNNNNNNNNNNNNNNNNNNNNNNNNNNNNNNNNNNNNNNNNNNNNNNNNNNNNNNNNNNNNNNNNNNNNNNNNNN
NNNNNNNNNNNNNNNNNNNNNNNNNNNNNNNNNNNNNNNNNNNNNNNNNNNNNNNNNNNNNNNNNNNNNNNNNNNNNNNNNNNNNNNNNNNNNN
NNNNNNNNNNNNNNNNNNNNNTAGGCGCTACCATTTAACCACCCCTCCAGCTCCTTGTCCATTTGGTCTTTTTTTTTTTTTTTTTTTTTTTTTT
TTTTGGGTTTCCGAGAACAGGGTTTCTCTGTATAGCCCTGGCTGTCCTGGAACTCACTTTGTAGAACCAGGCTGGCCTCGAACTCAAAAATCCG
CCTGCCTCTGCCTCCAAAGTGCTGGGATTAAAGGCGTGCGCCACCACGCCTGGCTCATTTGGTCTTTTATTCACTAGTCTACAATGACTTACTT
ATTGATTGGGTCAAGCACTCATTAAAATGCTAGAATTACATGAATGAACTAATGAAGTTAACTCGTCGAGAGTTTCTCAACTAATATGTGTTCA
ATCCATGGTCCTTTTTCTTATTTCCTTCTTATAGCACTGGGATCAAGCCCAGGGACTTGCCCATGCTAGTTAGATGCTAAGCTACAGTCTCAGC
CCAAAACACTAAGCTATGTTCCCAATTCTTTACTCTGTCAGCAGCATGGATTAAGAGCGCTCTGCAAGGCTCTTAGGAGGGTTTCTGTGAGTTT
GAGACCTGCCTGGGTATACTGGGGCTACATAGTGAGACCCTATAGCAAAAAAAAGGGGGGGGGAATGTTAAAGGGTAAACAACAAAACAGAAAG
CAAGTCCTGCATGCAGCACGCTGTACCACGCCCAGAAAAGTAGAAGGGGTGCTCTTGGTTTACTGACCAGAACAAAGCCACACACTAAACGGCT
ACATGATGACACATGAGAGATGACACTGACTGTACCATATGCTGTGACTCTGACTCACCAAAGGAACATGACTCATAATGTCTTCATCCAATTG
TTCATCAGCCAGGCTGCTCTCTCTCTGTCTCTGTCTGTCTCTCTCTCTCTCTCTGTCTCTGTCTGTCTCTCTCTGTCTGTCTCTCTCTCTCTGT
CTCTCTCTCTCTCTCTCTCTCTCTCTCTGTTTGTCTCTCTCTTTCTTTGGTTTTTCAAGACAGGGTTTCTCTGTGTAGCCCTGGCTGTCCTGGA
ACTCACTCTGTAGACCAGGCTGGCCTCAAACTCAGAAATCCGCCTGCTTCTGCCTGCTGGGATTATAGGCGTGCACCACAACTGCCTGGTTCAG
TCTGGTCTCTTAAGAATCCAGTTTTGTTTTGTTTTGTTTTTAAGATTTATTTACTTATTTTATGTATGCAAATACACCATCATTCTTTTCAGAC
ACACCAGAAAAGGCCATCAGATCCCATTATAGATGGTTGTGAGCCACCATGTGGTTGCTAGGATTTGAACTCAGGACCTCTGGAAGAGCAGTTG
GTGGTCTTAACTGCTGAGCCATCTCTCCAGCCTCCAAGAACCCAGTTTCTTTTCTTCAAATGCCTCATTGCAGTTTGTTATTGGATAGCAATAG
AGAGTCAGTTTCTCCCTTCCAACACTTCAAGCTTAAAAGATCATATGTACATATGTTGATCAGCCTATCATCCCCCCAAAATATAAGCAGTATA
TTTGACCATGGCCAAATTCCATTTCAAAGTATGTCCTTCCTGGTTAGGCTTGCAGTAGCCATTCAGGAAACTAGATGAGGGGTGTACTTATTAC
AGGCCACATAGGCTCTATGTAGTCATAACCAGACAAGTGACTGCCGTCATGTTTACAGAATAAAGCTCTAGTTCAGACTCTCTTAACTTTCAAC
TATGAGCCGGGCGTGGTGGCATACTCCTTTAATCCCAGCACTCGGGAGGCAGAGGCAGGCAGATTTCTGAGTTCGAGGCCAGCCTGGTCTACAG
AGTGAGTTTCAGGACAGCCAGGGCTACACAGAGAAACCCTGTCTTGAAAAACCAAAAAAAAAAAAAAAAAAAAAAAACCAAAAAAACCTTTCAA
CTATGAAAACCAAACTATGATGAAAACCAAAGGTGATTTTTAAAGCCAACTGCCATTTAATAATAAATAATATTCATGCCTTTATGCGATGCGT
TAGGGTTTAAGCCTTTAAATAGCATAGATCTGACCAGACATGTTTAAGAAATGTCAACAGAGCCTGGTGATGGTGCTCACCTTTGACAGAGGCA
GGCAGATCTCTGAGTTCGAGGCCAGCCTGGTCTATAGAGTTTCCAGGATGTCGAGGGATACAAAGGAGAAACTCTGTCTCAGAAAACAAACAAG
AGAAAAGTGAGGGGAGACAATGACTATTGTCATTCAGGCGTTATTTTTTTTAATCACACGGACTTACTTTTGAAATCACATAAGGTCCCCAGGC
TTGGGAACAAACCGCTAGTCAGGCTTTGCTGGGTTTTAGATGGACTCACAACTTTCTAAATCTAAACCTACTAACAAAGAAACTACACACTTCC
TCTCACAAAGTCATTTTACAACCAAAGTCTCTCTCTCTCTCTCTTCCCACTTCCTCCCTCTCCCCTCTCCCCTTTTGAGACAGTTCTCATTGTG
TGACCCAGGCTGTGAACTCCCAGGTTCAAGCAATACTCCTGAGTAGCTAGGAAGACAGGTGTGCACTGCCATGCCAGCTTTCTGTTTGAGTACT
GGTTTGTTTGTTTGTTTGTTTTAAAGATTTATTTATTATGTATACATCGTTCTGCCTGCATGTATGCCTGCAGGCCAGAAGAGGGCGTCAGGTC
TTATCACAGATGGTTGTGAGCCATCATGTGGTTGCTGGGAATTGAACTCAGGACCCCTGGAAGAGCAGTCAGTGCTCTTAACCGCTGAGCCATC
TCTCCAGNNNNNNNNNNNNNNNNNNNNNNNNNNNNNNNNNNNNNNNNNNNNNNNNNNNNNNNNNNNNNNNNNNNNNNNNNNNNNNNNNNNNNNN
NNNNNNNNNNNNNNNNNNNNNNNNNNNNNNNNNNNNNNNNNNNNNNNNNNNNNNNNNNNNNNNNNNNNNNNNNNNNNNNNNNNNNNNNNNNNNN
NNNNNNNNNNNNNNNNNNNNNNNNNNNNNNNNNNNNNNNNNNNNNNNNNNNNNNNNNNNNNNNNNNNNNNNNNNNNNNNNNNNNNNNNNNNNNN
NNNNNNNNNNNNNNNNNNNNNNNNNNNNNNNNNNNNNNNNNNNNNNNNNNNNNNNNNNNNNNNNNNNNNNNNNNNNNNNNNNNNNNNNNNNNNN
NNNNNNNNNNNNNNNNNNNNNNNNNNNNNNNNNNNNNNNNNNNNNNNNNNNNNNNNNNNNNNNNNNNNNNNNNNNNNNNNNNNNNNNNNNNNNN
NNNNNNNNNNNNNNNNNNNNNNNNNNNNNNNNNNNNNNNNNNNNNNNNNNNNNNNNNNNNNNNNNNNNNNNNNNNNNNNNNNNNNNNNNNNNNN
NNNNNNNNNNNNNNNNNNNNNNNNNNNNNNNNNNNNNNNNNNNNNNNNNNNNNNNNNNNNNNNNNNNNNNNNNNNNNNNNNNNNNNNNNNNNNN
NNNNNNNNNNNNNNNNNNNNNNNNNNNNNNNNNNNNNNNNNNNNNNNNNNNNNNNNNNNNNNNNNNNNNNNNNNNNNNNNNNNNNNNNNNNNNN
NNNNNNNNNNNNNNNNNNNNNNNNNNNNNNNNNNNNNNNNNNNNNNNNNNNNNNNNNNNNNNNNNNNNNNNNNNNNNNNNNNNNNNNNNNNNNN
NNNNNNNNNNNNNNNNNNNNNNNNNNNNNNNNNNNNNNNNNNNNNNNNNNNNNNNNNNNNNNNNNNNNNNNNNNNNNNNNNNNNNNNNNNNNNN
NNNNNNNNNNNNNNNNNNNNNNNNNNNNNNNNNNNNNNNNNNNNNNNNNNNNNNNNNNNNNNNNNNNNNNNNNNNNNNNNNNNNNNNNNNNNNN
NNNNNNNNNNNNNNNNNNNNNNNNNNNNNNNNNNNNNNNNNNNNNNNNNNNNNNNNNNNNNNNNNNNNNNNNNNNNNNNNNNNNNNNNNNNNNN
NNNNNNNNNNNNNNNNNNNNNNNNNNNNNNNNNNNNNNNNNNNNNNNNNNNNNNNNNNNNNNNNNNNNNNNNNNNNNNNNNNNNNNNNNNNNNN
NNNNNNNNNNNNNNNNNNNNNNNNNNNNNNNNNNNNNNNNNNNNNNNNNNNNNNNNNNNNNNNNNNNNNNNNNNNNNNNNNNNNNNNNNNNNNN
NNNNNNNNNNNNNNNNNNNNNNNNNNNNNNNNNNNNNNNNNNNNNNNNNNNNNNNNNNNNNNNNNNNNNNNNNNNNNNNNNNNNNNNNNNNNNN
NNNNNNNNNNNNNNNNNNNNNNNNNNNNNNNNNNNNNNNNNNNNNNNNNNNNNNNNNNNNNNNNNNNNNNNNNNNNNNNNNNNNNNNNNNNNNN
NNNNNNNNNNNNNNNNNNNNNNNNNNNNNNNNNNNNNNNNNNNNNNNNNNNNNNNNNNNNNNNNNNNNNNNNNNNNNNNNNNNNNNNNNNNNNN
NNNNNNNNNNNNNNNNNNNNNNNNNNNNNNNNNNNNNNNNNNNNNNNNNNNNNNNNNNNNNNNNNNNNNNNNNNNNNNNNNNNNNNNNNNNNNN
NNNNNNNNNNNNNNNNNNNNNNNNNNNNNNNNNNNNNNNNNNNNNNNNNNNNNNNNNNNNNNNNNNNNNNNNNNNNNNNNNNNNNNNNNNNNNN
NNNNNNNNNNNNNNNNNNNNNNNNNNNNNNNNNNNNNNNNNNNNNNNNNNNNNNNNNNNNNNNNNNNNNNNNNNNNNNNNNNNNNNNNNNNNNN
NNNNNNNNNNNNNNNNNNNNNNNNNNNNNNNNNNNNNNNNNNNNNNNNNNNNNNNNNNNNNNNNNNNNNNNNNNNNNNNNNNNNNNNNNNNNNN
NNNNNNNNNNNNNNNNNNNNNNNNNNNNNNNNNNNNNNNNNNNNNNNNNNNNNNNNNNNNNNNNNNNNNNNNNNNNNNNNNNNNNNNNNNNNNN
NNNNNNNNNNNNNNNNNNNNNNNNNNNNNNNNNNNNNNNNNNNNNNNNNNNNNNNNNNNNNNNNNNNNNNNNNNNNNNNNNNNNNNNNNNNNNN
NNNNNNNNNNNNNNNNNNNNNNNNNNNNNNNNNNNNNNNNNNNNNNNNNNNNNNNNNNNNNNNNNNNNNNNNNNNNNNNNNNNNNNNNNNNNNN
NNNNNNNNNNNNNNNNNNNNNNNNNNNNNNNNNNNNNNNNNNNNNNNNNNNNNNNNNNNNNNNNNNNNNNNNNNNNNNNNNNNNNNNNNNNNNN
NNNNNNNNNNNNNNNNNNNNNNNNNNNNNNNNNNNNNNNNNNNNNNNNNNNNNNNNNNNNNNNNNNNNNNNNNNNNNNNNNNNNNNNNNNNNNN
NNNNNNNNNNNNNNNNNNNNNNNNNNNNNNNNNNNNNNNNNNNNNNNNNNTTAAACGCTGCCCCGTTTCCGCAGCCGTCTGCTGGGCGAGCGGG
AGACCGACCGGACACCCCTGGGGGACCCTCTCGGATCACCGCGCTTCTCCTGCGGGCCTCCAGGTAAGGGACAGCTCGCCGACGTCGTTTTGCA
TTTGAGAGCTATTGCCGAAAGACGTTTTCTGTCTCCTTCGTAAATGCATGTATCTATTTGTCCCTTTTCGTAGATGTTTTATAATTTCAAGTTT
TTATCGTGTGTGTTGTTGTTTTTTTTCTACTTGTAGGCCAATGTGCAATACCAACATGTCTGTGTCTACCGAGGGTGCTGCAAGCACCTCACAG
ATTCCAGCTTCGGAACAAGAGACTCTGGTTGGTATTTCTGCCTCGAGTGTGTAAATATAGCTTGTTTTACCAGGTAATCGAGGAAACAAAATTG
AAACCTGGATTATCGCACAGTCGTTTTAAGTATTTACCTACAAACTCTTAACTTTCTCGATTGCAATTGCATTAGAGAGTGGTCACTGCGACCT
ATATTTCCACAGCCCTTCCCCTGACGCAGGCTTTAGAAGTGCACAGTGTGTGGGTGCTGCTGGTTGTGACATGATGTTCTATCACTGTTCTAAA
TGGTAAACCGAAAGTCATAGAAGCATCCGTGCTTTTTGTGAGGATTTTAGTTATGAGAGGAATGCATAAAATATATAAAGTTCCAGTCTTTGCT
CTGTATCTCTTTAAGTTTTCTACTTTATATTAGCATATAAAGGTGTTCTACAGCTTGTCAGTAAGTTACAAAATTACTTTTAATAGCTGCATAG
GATTTGATAATGCGATTGAACCTCAGCCTTTAGAATGTGTGTGTATGCAAGTACTGTACTACTGAGCTGAGCGACAGTCTCAGGCTCACGACTA
CTGGGGGATGTAAAAGTTGCCCATGTGTTTGAGTAAAGTAAGGGTGAGGAAGATAGGGAACTAGAATCCTACGTCCTGGTAACCACATTTGATT
GCAGACTGCTCACTCTGCTCAGCAGAGGTCATGGCCGTCTTCGATCCTGCCAGCACGAATATTGCCAGCCCTCGTTTTCCCTTTCTGATGTAAT
TTCATACATATTTGTGGAGAATACATGTATGCAAGTTAAGTCAGTTCCTACGGTTACTGCTCTGTGGAGTAAAATGTATTGTTTCAGTGGGCAT
GTCCCAGATCTCCAGTTAAACAGCCTGTTTGTTCTGGGTTTGCCAATGTCTCTCTCTATTTACTCTCGCTCTTCCTTTCCTCCCCCATTTTTTT
TTTTGCATATTTTAGTAGCTTGCATAATTTTCAAGTATAGTTAACCTAAGAAATTTTTTTTTACAAGGACTATAATCTGATGTCTGCCCCATTG
AAGGTATCAAATTTGTTTATTTTGATAATTTTTGAATTTTCTTGTAATGCTTTGGAGGAATTCTTCCATTTCAAGATTATGCACATATTTAAAG
TATTTTCATATAGCATTTTAAAAACCTTTTCCGGGTAGATCTTTATTCAGAACTCTCTTTGTTAAGTGTGAGATTACAGTGTTGTGTTTTTATA
GTAGTTTTTAAAATTAACTTTATCTTGTAAGCTTTGATAAGAAACTGGCTTTCCATTGTAGAGTTTTGATTTGAGTTAATTTAATATGCAAAAA
TGTAGAACTTCTTGCTTTGGCAGTACGTATGTTAAAATTGATACACTAAGGAGAAGGCTAGCATGACTTCTATATGAGTTACATAAGAAAATTA
AGCATTAGTAAGTCTTTTTCAGCTGGGCGTGGTGGCGCATGCCTTTAATCCCAGCACTTGGGAGGCAGAGGCAGGCAGATCTCTGAGTTCGAGG
CCAGCCTGGTCTACAAAGTGAGTTCCAGGACAGCCAAGGCTACACAGAGAAACCCTGTCTAGAAAAAACAAAGAAACAAAAAGTCTTTTTCAAA
TCTTGTAAGAGTGAATTACTTAATCTGAAAATAAGGTCTTAATACCCTTTTTTAAAAAACTGATTTCTATAGGCTGGAGAGATGGCTCAGAGGT
TAAGAGCACTGACTGCTCTTCCAGAGGTTCTGAGTTCAACTCCCAGCAACTACATGGTGGCTCACAACTGTCTGATGCCCTCCCTCTTCTGGTG
TGCAGGTGTACACGCAGACAGAGCACTCATACACAGAATACATAAATAACAGAGTCTTTAAAACTTTTTTCTTTATTTTTGAAATTATACCATT
TCTCCTTTCCTTTTCCTTCTTCCAAAGCCTCCAGTATACCCCTTCTCTCTTTCATGACTTTTTTCATTAATTGTTACATGCCCAGTACATGCTA
CGTTCCCAGATACAGCCTGCTCAGTCTGAATAATGCCATTTGTGTATGTATGTTTTCAGGGCTGACCTTTTGGTATTGGATAACCAGTTTGTGT
GCTCTTCTGGAATAAATAACTGAAAAGTGCATTTTAAAATTGTGCTAAAAGTAGTCTTTAAAAAAAGAAAAAGAAAAGAGTGGTGCTGGAGAGA
GGGCTCAGCAGTTAAGTGCATTTGCTGTTGTTACAGAGGACCCAGGTTGGATCCCCAGAATGGATAAGGTGGCTCAGCCCTCTTGTAACTCTAG
TTGCAGAGGATCTGATGGCCTCTTTTGGCCTCCAAGGACACTGTTTGCACACGGTGCACTTAAATACATCAGGTGAAATACCAGTATACATAAA
ATAATAATAAAAGTCTTCAAATTACCAAAAAAATCCACAGAAGTGGTGGTCTGTGTGGTTATCTCAAACTAAAACAGCTGAGTTTGCAGATACA
GAGAGCATAGTCATGTTACATGCCTTCCTTCCCAGTTTCTAAACACTCTCTCAGCTTAGTCAGCTCAGTGTACTTACTGTCCTTGAAGCACTTA
ATAGTATTTTAAAAATAAACTAAATGCCTTTAAAGGTAGTGGTTAGTCCTATTTGTCCTCAGTACTCTGCCATGAGGCCACATTCTAGCCATGT
AGACAGAGGCCTGGCACAGTGAGATCTGCAGCCATTGCAACAATAGAGCCATACAAAATAACTGTCCTGACAGAGACAGCCGGCCAAGCAGCCA
GGAGGGAGCACGACTGCTCTTCAGAGGACCTGGCTTCCACTCTCAGTACCCACATGGTGGCTCCTAGCCATCTGGAACTCCAATTCCAGGGGTC
CAGCACTGTTGTGGTATCCCTGGGGACCAGGGACACAAGTGGTGCATGGAAGTACATGCAGGCAAAACATGCATATGCATGGAACAGACAGAAA
GCCAGCAGGCTCTCCGTGCTGGGCATCCACTAGCTATAGAACACGAGTGAACAGGAGCCTTGATCATCAAAGCTGACGTGCAGGAGTGTCTTTA
GAGTATCTGTGGCCGATGGTAACATACTTTGATATCAGACTGACGTGGCTAGAGCAAGCTCAGGGACATTTATCATGGTGTTCCTTGGTATCCG
TTGTCAGGCTGCCAGGCTGGGCTCACTAGCTGCTTTGTGGGTGACACCTTGTTAGGTAGGTGACAGTTGTCCAGTTTTTATCTTTTTAAGGATT
CATTTCTTATTTTATATATAGGAATGTTTTGCCTGCATGTGTATATGTGTACCATGTGGATGTCTGGTGGCTATAGAAACCAGAAGAGGGTGTC
GGATCCCTTGGAACCAGAGTTAGATAGTTTTGATCTATCATATAGGTTCTGAGAACTAAATTCAGGGTCTCTATAAGAGCAACAAGTGGTCTTA
ACCTCTAAGCCTCAGCCCCATCAACTATTGTCTCACTACTGGGAAAGCTGGATTAGAGTCAAATTGTAGCTGGCTACTTGTTTTTATAAATAAA
GCTTAATGTTATATATTTACTCTTATAGTTTATGTAGTACTTTTGCTTTTAAGTTGGCTAGACATAGAAAAAACACTTTCTGGCTCTTCTGATA
TTACTGGCATGCTCTTTAAAGATCATTTGTCATTAGTGAGTGTGTGTGTGTGTGTGTGTGTGTGTGTGTGTGTGTGTGTGTGTGTGTGAGAGAG
AGAGAGAGAGAGAGAGAGAGAGAATATCTAGCCTTTGCATGTATTTTAAGTGATAAATAAATGATGCATAAACCACATATAAAGAAAACAATGA
GTTGTAGCTGAGGGCTGTGATTGTACTCTTTGAATTGTTCATTACCTTGTGACTTTGGTTTCTTTAGCAGTCAGGAATGTGGTATATGATAGAT
TGGTGATAGGTTTTGCCCTAAGATATAGTCTATTCTCCTACATTCTATAAGCTCCCTTTCAGTAGACTGACGGATTTGTACAGTATAGTAAGAG
ACTGGATCTCAGCTAGGTTGTGTGGTGGCAAGCAGATGATGGAGCTGTAGGAAGGAGTCAGTGCTCACTCACACACTCCCCTGTGTGTGTGTGT
GTGTGTGTGTGTGTATTTGTAGCTCCTGCCTGCAGAGACTACAGTGGATGTTGGATTGCCTAGGATGTTGGTAGCTGCCTTTTGGTGGCCCTAG
GAATCTAGAATTGGGTCCCCTGCAAAGCAGCAAGTGCTTTTAATCTCTCAGCCATCTCTCCAGCATCTTGATACCGTTTTGATCAGAACAAATT
GAGTTTGATTATTTGACATGACACCAGGATTTGATGACTTCATGATAATTTCATAGTAGCTTTTCCCAAAGCATTTTCTGTCCTAACGCTTAGT
GGTGTGCACTTGTACTTAGTGTAAAACCCAACTTTCTGAAGTGCAGCTCGGTAACAAATTGTTATAAGCACGGCGTTTGCTGCCTGTATTGGGC
TTCTTTCTGGCCATACATAAAGGGCTTGTGCTGTAGAGTATGTTCATGGTGTAACATCAGCTCTTTTTCTTTTCTTTTACAGGTTAGACCAAAA
CCATTGCTTTTGAAGTTGTTAAAGTCCGTTGGAGCGCAAAACGACACTTACACTATGAAAGAGGTGAGCAGAACTGAGGGGTGGAGAGCCGATG
GCTTCATGGTTACATACAGGCATCTGTGGTGGTTTTTCAAGTTTGAGTGAGATTGGCCATACAGATTTTGTAATGAGCAAGCACATTAAGTTTT
GTGATCATTTGAACTGTAATTTGAAGCTAAAAATTCTAATTTACATGAATTTCTTCCTCCTTTCCTTTCTTTGAGACAAGGTCTTTTTTTTAAA
AAGATGTATTTATTTATTATATGTGAGTACACTGTACCTGTCTTCAGACACTCCAGAAGAGGGCATCAGATCTCATTACAGATGGTTGCGAGCT
ACCATGTGGTTGCTGGGATTTGAACCCAAGACCTTCAGAAGAGCAATCAGTACTCTTAACCAGAGCCATCACTAGCCCCTGAGACAAAGTTTTA
CTATGTAGTCCTGACTGTCCTGGAACTCACTATGTAGACCAGCTGGCCTCAGACTCAAGAGAGATCCACCTGCCTCTGCCTCCTGAGTTCTCTT
TTCTCTTTTTNNNNNNNNNNNNNNNNNNNNNNNNNNNNNNNNNNNNNNNNNNNNNNNNNNNNNNNNNNNNNNNNNNNNNNNNNNNNNNNNNNNN
NNNNNNNNNNNNNNNNNNNNNNNNNNNNNNNNNNNNNNNNNNNNNNNNNNNNNNNNNNNNNNNNNNNNNNNNNNNNNNNNNNNNNNNNNNNNNN
NNNNNNNNNNNNNNNNNNNNNNNNNNNNNNNNNNNNNNNNNNNNNNNNNNNNNNNNNNNNNNNNNNNNNNNNNNNNNNNNNNNNNNNNNNNNNN
NNNNNAAAAAGAAAGCAAAAGAAAAAAGACCTTATACAACTGTTGGGATGCTCAGTGGGCTGATTCATAGACACAATGTTGTATTCTCTGCCTT
AACGTTTATTAGTAAAGTATTGTTTTCAGCTAGAGGTTGGTCAGTTGTAGACAGAAGTTTTGCATGGCTGAGATATAAGTGTTTCTCTGGCTCA
CTTAGGTTAAGGCTTGTTTACTTAAAACACTCAAGTTCTTGTGGCAGGTTAGGGGCTTCTTCTCAGCTACACATTTGGAAACGTCTCAAAGAAC
ACTTTGTTGGAGGAACCCAAGTGTCCTTTCTGTCCCACTGACTGTCAATACTTTGTGATCTATAGACATGTAAAAATTGCCTTTCAGATTGATT
GGCTCCTACTTAGCTAGTTAAAGTCTCTTTAAGTGTTAAGTGATGTTTTTAAGGTCATTAACTTTGGATTGACCTTTATAAAGGTTAGACAAAT
GATAAACAAGTATGGATTTAGTAGTAGGTAGATATGAGAAAATCGATGAAGGCCATCAAAAAGATTTAGTGCTTATGCTAAGCTGTGTGCAGTA
GGTCAGCTGTCCTCCTGCTCTCTGCGGGGAGTTGGCTTCAGGACACTGCCTGCCAAGTCTCTTACTTAAACCGTGAAACTGTCTCTGTATGGAC
ATCACCTCTTAGACATTAAGTTATCCCTAGAGTATCTGTAATACACAATGTGTGTAGTTGTTATACTGTATTCTTTAAGGAATAGTGACAAGGA
AAAACATTTCTACATTCAGGATGGATGCCAGGAATATTATTAGACCCACAGTCAAATGGATCTGTGGGGGTGGGACTTACAGATTGTTTATAGT
GTCTGATACCAGTTTTCAGTTACAAGATCTTTATTCTAGGACACTTGAGAATGTAGTGAGCTAGTGTGGTAGACAGTACGCTGGGATAGGTGTC
ATGTCCTGGGTTAGTTTCTCATCTCTGTTTATGTTTTTATTTTCCCCCCTGTGGTACTGGGTGTCAGATCAAGGGAGCACATTTTACCTACTGA
ACGACACTCGTGACCTTGTTTTCATACAGGAATAACAGTTCCCTGGGGTGTCAGGATGGTGAGACTGTACTGACAAACCTGTGCACTGTAAAAT
GCTGTCTAGAGTTACATTGTTGATGGGCTCGTTTTGGAATGACAAAGTATGTTGCTTAAGCTGCCATAATGGAGCACATGGAATATAATAATAG
TGATGGTTCGGGCCCTGGACTGTTTGGTGAAGACTATATTAATAACTGAGAATATTCCATTGGGAGATGTTACTCATGATGTCCTGTCTTCCTC
TGTGATGACCTCAGAGCTGTAGAAGTATACGTTTGTGACATGTCACTATTCTAATACATTGCTGTATTTTACCTTACTCTTTTTTTTTATTCAA
TTTTTTTTTAAGATTTATTTATTTATTACATGTAAGTACACTGTAGTTATCTTCAGACACCCCAGAAGAGGGCATCAGATCTCATTACAGAGCC
ACCATGTGGTTGCTGGGATTTGAACTCACAACCTTTGGAAGAGCAATCAGTGTTCTTAACCACTGGGCCATCTCTCCAGTGTCCCCCCCCCCCC
TTTTTTTTAAACCTCTTTTTTCTTTCCTAGTATCATATGTTAGTATCTAAGTTTCTGGGAAAAATTAAAATTTATAAGAAAAAAAGAAAAACAG
AAAATACATTTAAGTAATGTGGAGAAACAGTTACTTCTATTTTCATCAGTGTGGAAGTATTTAAAAGAAGCTTCTACAATACAACTGTTTGGTC
TTGTACATGATTATGGGTGTGGCTGTTAGTGTAAAGTGTAACTTGTTCAGTTAAGTGTGGTATTGCTGAATGTATAATGTATATATTCTATGTG
ATTTCCTTAGTACTTAGAAACCATATTTGTGTTTCAGATTATATTTTATATTGGCCAGTATATTATGACTAAGAGGTTATATGACGAGAAGCAG
CAGCACATTGTGTATTGTTCAAATGATCTCCTAGGAGATGTGTTTGGAGTCCCGAGTTTCTCTGTGAAGGAGCACAGGTAAGCCTTGTGCGTGG
TGGGTTATAAGAACAGCGAGCGGCTGTGCATGGGGCTGGAGAGATGCTCAGTGGTTAAGAGGACCCAGGTTCAATTCCCAGCGCCCCCATGGCA
GCTTACAACTGTTGGTACTGCCAGTTCTATAGGATCTGGTGCCCTCACACAGACATACATGCAGGTAAACATAAAAAACATCTTAAAGAAGTAC
CAGCTGGGCGGTCACTGTTTCTCACCTCTGTCAGAGAGGAACTGACCATGGATACAAAATGCTAACATTGGGTGTCATTTTTTGAGGCCCTACT
GCGATTAACAGTAGTCGTAGCATATTGTGTGGGAACCTGAACTCTGGAATCTTAGTTTTGATTGTGTGTGTGTGTATGTGCATATGCCACTGTG
AGTGTGTGGCAGTCAGGAGTCAGCTTGTCCTTCCACCATGTGGGTACTGGGGATTGAATGCAGGTTACCAGGCTTGACCTCTTTTGAGACAGGT
CGAGTCGTTAGTCTGTGGGTGTGTAAATGGATCTGACATCTCTCAGCTGTAGGCTCTCTACTCACATGTTGTTTTTTTTTTTTTTTTTTCTTTT
CTTACAAGGAAAATATATGCAATGATCTACAGAAATTTAGTGGCTGTAAGTCAGCAAGGTAGGTAATTTTGAATATTATAAACATAGTATAACT
TAATAACAGTTCTTTTTCATGTAAGATCTTATGTATCCTAGTCTAACCTTAAACTATGTAGCTACGGACCCTTGAGCCTTAAAAAAAAAAAAAA
AACCACAAACCTTTGAGTAGCTTTTTGTTGTGTATGTATCTGTATGTCTGTGTAGGGTGGGATAGATACATGGTGTATACCTGGAAGTCAAAAA
ACAGCTTGGCGGAATTGGTCTACTTTTTACATGGGTTCTGGTATCCAGCTCAGATCTGTAGGCGTGTGTGGCAGGCACTTTGACCTCCTGAAAC
ATCTTACCAGTCCCCTAATCATGTTTTAAAGACTTGGATGTTGTCTTAGTCAGGGTTTCTATTCCTGCACAAACATCATGACCAAGAAGCAAAT
TGGGAAGGAAAGGGTTTATTCGGCTTACACTTCCATACTGCTGTTGACCACCAAAGGATGCAGGACTGGAACTCAAGCAAGTCAGAAAGCAGGA
GCTGATGCAGAGGCCATGGAGGGATGTTCTTTACTGACTTGCTTCCCCTGGCTTGCTCAGCCTGCTCTCTTAAAGAACTAAGACTACCAGCCCA
GGGATGGCACCACCCACAAGGGGCCTTTCCCTCTTGATCACTATATTGAGAAAATGCCTTACAGTTGTATCTCATGGAGGCATTTCCTCAACTG
AAGCTCCTTTCTCTGTGATAACTCCAGCTGTGTCAAGTTGACACAAAACTAGCCAGTACAGATGTATACTTCATGTTTTAAAGACTTGGATGTA
TACTTCTTCGTAGAGTGCAGTTCTGGCTTTAACCCTTAGCACTCTAAAAAGGCAAAATATCACTGTGTGCTGCTTTCATTTGTGTTTGCTTCTG
GCTCTCTTTATTATTTTTAACTCTTTCATTGCCTACCAATTTTTTTTTAATAATTATTTTTGGGTGTATTAGTGTTTTGCCTGCATGTCTGTCT
GTGTACCATCTGTGTGCAGTGCCTTTGGAGGACAGAAGAGCCCATCAGGTCTCCTAGAACTTGTTACAGACAGTTAACGACTGCTGTGTGGGCT
GGGAATTGAAGCCAGAACTTCTGGTAGAGTAGCCAGGGCTCTTAACCATGAAGCTGTGTTCCCAGCCTCTACTTTTTTGTTGTTTTGAGACCAG
ATCCCCATAAATTATCCAGGCTCATTTGGAACCCAGGCTTCCTGCTCCCCAAGTAGCTGACGTTTGTTCATTTATTCAGCACTGCTGAGAGTTG
AACTTAGGCTCACACACCCTTGCGTTTAGAAAGTACTGTACTAGTTAGCTGCCCCAGCCAGGCTTTGACTCATCTCATTCTCTCTTAAAAAATT
AAAGTGACTTCTTTCATTTCACTTTATTTGTATGGGTGTTTTTTCTGTCCTGCTGTATGCATGTATACATGTGCACCACGCGTGTGCAGTGCCC
AGCAAGGTCAGAGGAGGAGCATTGAATCTCCTAGGACTGGAATTAGACTATTGCCACCTCTGGAAGACCTTCAAGTGCTCTTAAGCACCAGAGT
CATCTCTCCAGCCCCTCTTTGGAAAAAATAATTATACTGCCTGGTGTGGTTACACAGACATTTAATCTCAGCAAATGGGCGGATGGACTTGTCC
AGCCAAGTTTACATAAAGAGACCCTGTCTCAAAAAGGCAAAAAGCAAGTTTTAATTATGTGTGCGTCCCTTTATGTGAATATGTGCACATGAGT
GCAACTGATCTTAGAGGCCAGGAGTGTCAGCTTCCCTAGAGCTGGAGTTAGGGAGTTTTGAGCTGTGGTATCTAGGAACTAAGAGTAATCCAGC
CCCATGATTCTCCTTAAAAGTAAAAGAAAGTACATTTATTCGTGTTTAAGAGCATCCTTATGCCATGATGTGCATTGGGAAGTCAAATTGGATG
TCTTGTTAATCTCTGTCACGACCCTGGGTTATCAGGGTTTCTTCTGAAGGACAGGTAATGTTAAAAGCTGCTTAGTAGAAGCGTGATCAAACCT
CAGAATGCGTTGAGATGTTTCAGGAAGTAATATAATACCTAGGTAGGACCGTGAAAGAGTGGGGTTTCATCTCTTCTCTTCTCTTGCCCCCCTT
TGTATTCTTGCTCTTGTTTCTTGAGTGGACACTTAGCATTTTTAGGTAAGCATCATTTTAGCTCTCCTTGGCAGTTCTTTTTTAGTGACTTGAG
CACAGGTCCTTGTGTGTGCTTCACAAGCATCAACTCTGATGTTGAGCTACTTACTGAGAGAATTGGTTATTTTTGGGATGCAACCTTTTTGAGA
ACCTAGTAAAGGCACTTGATTTTCATTCTATAAGTGTGTACATGTGGATAGTGTTTTATTATTATTATTATGGTTTTTTGAGACAGGGTTTCTC
TGTATAGCCCTGGCTGTCCTGGAACTCACTGTTTAGACCAGGCTTGCCTCGAACTCAGAAGTCTGCCTGCCTCTGCCTCCCAAGAGCTGGGATT
AAAGGCATGCGCCACCATGCCCGGCTATTTTTTTTTTTTTTTTTAAAGAAAGAGTTTCTCTTTTTAAAGACAGGCTCTCACTATTAGCTATGGT
TGGGCTAGAACTCATTATGTAGATCAGGCAGACCTTTAACTCCCAGAGATCCATCCACCTGCCTCTGCCTTCTAGACTTACATACCGCCATGTC
TCCTATTAGTTGTATTTGAATACTAGTAGCTGTGGGCTCTGAAACCCCGTAATCCTTACCGTTACCCTTGAACATAGCTACTGTGTTCAGAAGC
TTGCTTGGTTTCTAGACTGAATCAACCATTCTCTTGCGATCCCACTATTCCCTTCTATATTCAGAAGTCACTGTGTTGTGTGTACAGTGTGTTG
TAAATGGCACCAGGATCCTCCCTAAAAAAAGAACAAAGTAATTAGTTTGGTAACTGAGACCTGTGGTTTTCGGCTTCTGCCTCATGATGCTGAG
GTTACTGGGACCTGCTAAGGCTCTTTATGTCATGCTATACAGTTATGGAATCTGATAGTATTTTACATTTTCTCTAGTAGTCACTCACTTAATA
AACTTTGACAGATTACTGACGATTTCTCTTGATGCTGTGTTTCAGTTTAGTTAAAAGTAATTTTGAAAATCCTAGGTGAGCCTGTCACTCCCGT
TACTTTATTACATCTGTTTTATAACTATACACAGCCCAAGACAGAGTTCCCAGGTAGCATAGCCTATCTATGTATTCCCTTTAAAGTTTGTATT
ATGCCATAATACAGGACAGTTCACTGCGGTCACCCAGTGTTTGAGGAGCTCGGCAGTGCCCAGCTGTGGTCTCACGGTTGATGGATGTGCTTTA
GGCGGTAGTCTAGGGTATGGATTGTGATTTTTGAGTAATTTTGTCCATTCCAGTTCTGGAACTTGGATGTTTTGAGAGCTTGGTCTGTGAAACT
AAGTACAAACTACACCTGTCTATCTACATAACTCTTTTAAATTCATTATTTTTTCCAAGCTAAATCGTTCACCTCCCTCACCTCTCTTGGTGAG
TGGTACCACACATTCTTCATCTAGTTAGACTCTTGGGATCACTTCCTTTTCCTTACAGACATCTAGTCTTAACCAGTTTTTATGTCTTAATTTT
TCTCAAGTTGATTGTCTTAGTTAGGGTTTGCATTGCTGTGAAGAGACAACATGACCAAGGCAACTCCTGTTATTAAGAAAAACATTTAGTTGGG
GCTTGACTTAATACTTCAGAGGATTAGTCCATTATCCTCAAGGCAGTAAGCATGGCAGCATGCAGGCAGATGTGGTGCTGGAGGAGCTGAGAGT
TCTATACCCTTATCCAAAGGTGGAAGGCAAGTAAGAGGCAGGTTTCTTCCACATTGGGCGGGGCCTGAGCAAGGGAGCCTTAGAGCCCACGCCC
ACAGAGACACACCTCTTCCAACCAGGTCACACCTCCTCTAGCCAGGCCACACCCTGGGCCAAGCATATTCAAACCACCACTTAAATACTTTAAC
TACATGTATATATGTATTGTATGCCGACTAATGCCACANNNNNNNNNNNNNNNNNNNNTATACACACACACACATACACACACAGTTGTCTTTG
TATTTCAAATACTGTTTGCTTGTTTCTGTGCTCTGTTTGCCTTCCCGTGTGGACCTCCTACATGCTAACTGAGGCCTCCTCCACTGAATCACTA
TGGCTTGACAGTCTCACTGAGTTGCCCAGCCTGGCCTGCTGGAGATGATTGCTGTAGTGTAAATCACCGTGCCCAGTTGGGAGTGGTGGTGGGT
TTGTTGTTTTTTAAATTCTATTTTGTCAGAGTGGTTTGTTGCTTTTTTTGTTGTTGTTGTTCTTTTTTTGTTTTTTTGAGACAGGGTTTCTCTG
TGTAGCCCTGGCTGTCCTGGAACTCACTTTGTAGACCATGCTGGCCTCGAACTCAGAAATTGGCCTGCCTCTGCCTTTGCCTTCCAAGTGCTGA
GGTTAAAGGCGTGTGCCACCACCACCTGGAGGTTTGTTGCTTCTTATTTAGGAGTTTTATGATTGCTCTCTGGGGAGAATAGTTCTGTGAGCTA
GGAAATTAGCTTTATTTCTTGAACTAAAACCCTTTAATAGTGAGAAGTTGCAAGATGGCCTCAGGCAAGATTATAGAACTGCTTGAATAACTGT
TGAGAAGAATAACCTTGTATGTGACTCAGCTGAACACGCATGGCTCTGTGCACAGCGACCCTGCACTTTACTGTTTGAGTACAGAGGAGTTTAT
TATGTTGGTGTCAGTCACAGGAACTGTTTGCGTGTTCATGATTTCTCACATACTAATCCTTCAGTCTGGAGTGTCTGTCCTATGCTAACTTCAG
CGTAGGCGATTCCAGAATCTGTCCTGATAGCTCTTCAGAGCCCCTCCCCCACGTCTACTAAACATTTTTGTTTCCCCTGCTAGTATATCTTAAA
ATTTGCTTATTTTGCTTCATAATTCCTGTTGAATTTATATCTCCAGCATGCAAATGACTCTTGATACAAATGGTTAATAGTTGTTAAAAGGTTA
GATTTTGTATTGGGCATGTGTTAGACTGGTATATGTTGAATTCTTGATTTCTTTGTTTTGATCCACTTTTTACTTTCTCTTACAATCTTCAGAC
TCTGGCACATCGCTGAGTGAGAGCAGACGTCAGCCTGAAGGTGGGAGTGATCTGAAGGTAATACTTGCATAAAGTTCTTACTCTAACACACTTT
TCTCTTTAAAATATCCTGTCTGTAAGTGTGGGTGTGTGTATGTCCTCCAGCCAAAAGAAAGAGGTGATGCTCACCTGGAGCTGAGTTACAGGTG
GATGTGAGCTGCCCCAGACATGAGTGATGGAAACCAAACACACCCCAGCAAGAACAGCACATGGTCTTCTTCTCTGAGCCACCGCTCTAGCTTC
ATGACACATAGTTCTTGAAAATTGGGAGGGTTACATAAAACAGGGTGTGGAACAGCCAATGTTTAATGTTTATTTTGCAATATTTTACTTTCTT
TTATGTACTTAGGATCCTTTGCAAGCGCCACCAGAAGAGAAACCTTCATCTTCTGATTTAATTTCTAGACTCTCTACCTCATCTAGAAGGAGAT
CCATTAGTGAGACAGGTACATAGGGACATTATGTGACATACTAAACAGTTGCTTGGTGTTTCCATTTTGGGTCAAATGACCCTTTGACAGAGGT
CTGAGACCTAAGACCACTGAAAACCACATGGTTGCATTATGATTCATCACATTAGCAAAACTATGGCTATGAAGTAGCAATGAGAATAGTTTTA
TGCTTGGGATCACCACTATGAGGAACTGTATTAAAGAGTCACAGTGCCGGGCGATGGTGGCTCTCATCTTTAATCCAGCACTTGGGAGGCAGAG
GCAGGCGGATTTCTGAGTTCGAGGCCAGCCTGGTCTACAGAGTGAGTTCCAGGACAGCCAGGGGTATACAGAGAAACCCTGTTTCGAAAAACCA
AAAAAAAAGAGTCACAGTGTTAGGAAAGTTAAGAGCTGCTACCCTAGACTTCTAATAAAAGGAGATGAAGTTGTTCTTTGTTTTGGGACAGGGC
TTCTATATAGATCAGGTTGACCTTTGCATAGTCTTTTTCTTTTTTCTTTTTTTTTTTAACTTTATTTATTTAATGTATGAGTGCTCTGCTGCTC
TTAACCACTGAGCTGTTTCACCAGCCCAGCCTTATTCTTAAAGCTTACTGTTGATGGGGAAATCGTGTACTGTTGAATCAGTAAAAGCACTAGG
AGGATTAAATGAGTAACTTGTGGAGGTAACGTCCACAAAGAAGGTTGCAAGCTTAGAAGTAGAGCTTATGTGTAGCTGAACAGATCCAATGAAA
CACTGCTGACTTTTGAAACATTAATGGTTCACTTCTCTGTTTAATATAATTGAAATTAAATTTTGTTGCAAATAGGTGCTGAAGATATTTCAAT
CTCAAATCAGTCCCAGTACAGGGAGTTTTAACCCCATGTCCTTTAATCTATAGAAGAGAACACAGATGAGCTACCTGGGGAGCGGCACCGGAAG
CGCCGCAGGTCCCTGTCCTTTGATCCGAGCCTGGGTCTGTGTGAGCTGAGGGAGATGTGCAGCGGCGGCAGCAGCAGCAGTAGCAGCAGCAGCA
GCGAGTCCACAGAGACGCCCTCGCATCAGGTAGTGCTTGGGTTTAAGAAATTATCTTACTTTTTAATATGGAAGTGTCTTGTCTGCCAGAATGT
ACACCACATGCATGCAGTGCTTTGAGGCCACAGGAGGGTGTGGAGTCCCCTGGAACTGGGGTTAGGGATGGTTGGAGCCACTGTGTGGGTGCCA
GGAAAGTGGGTTGACTACCACATCTCTGCCCTAGTTTTGAGTGCTGCAGATTAAATCCAGGGCTCTGTGCCCACTGGGCAAGTGTTCTACCAGT
TAATTACATCCCCAACACCCAACAGTCAGTGAGCCAACCTCTCTGCGGATCTCTGCCTATCTAGTTTCTTAGAATAGAACCTGACCTGCTGTCA
AAACAGAATATATATATATATATATATATATATATATATATATATATATATATATATGCTCTTCTAAAAATCTTCCATATTAAAAATTTGTTAC
TTTTTAAACTTAAGTGAAAATGCTTTTAATACAACTGTGTTTTGCTTTGTTTTAACTTACTTATGAGAACATTAGTCTCAGTAGTTTTACCCTT
TATTTACAGGGAACACTATGCCTGATAGTGTTTCAAATAATTTGTTAAAGGATCCTACAACTAATTATTACATTTAATAAGACAGGCTAGAACT
TGAAAGCTCAGCGGTTAAGAGCCCTGACTGCTCTTCCAGAGGTCCTGAGTTCAACTCCCAGCAACCACATGGTCGCTCACAACCATCTATAATG
GGATCTGGTGCCCTCTTCTGGTGTGTCTGAAGACAGCAACAGTATACTTAGATATAATAATAAATTAATCTTAAAAAAAAAAGACTACTTTTAT
GTCAAGCTGACTGTATTTTCTGGAAGAGAAATGATGTGTCTGCAGTTAAGCAGCATCTTGGTAGCAAATTGAGAATGCCTGTGTCCTGAATTCT
AGAGCAGTGTATTTTTATCAGTTGTAAGTAAGTTGATTTGCGGATGAACTTAGTGTATGATTTGAAGTTGAATCTCTTGTTTGCATTTTTGTGA
GACAGGGTCTCTTATTTAGTTCTGACTCTTGGCTGTCCTGGAACTCACTGTATAGACCAGGCTGGTTTTGAACCTACAGAGATCTTCCAGTCTC
TGCCTCCTGAATGAATGCTAGGATTAAAGGCATACACCACATGCCTGGCCTGAAGTTGAATCTTTTAATCTCAGCACTCAGGAAGCAGGGACAG
CAGAGCTCTCTGAGGTAATAGCCAATATAGTGTCACATGAGGTAATAGCCAATATAGTGTCACATGAGGTAATAGCCAATATAGTGTCACATGA
GGTAATAGCCAATATAGTCTCACATGAGGTAATAGCCAATATAGTGTCACATGAGGTAATAGCCAATATAGTGTCACATCAGGTAATAGCCAAT
ATAGTGTCACATGAGGTAATAGCCAATATAGTGTCACATGAGGTAATAGCCAATATAGTGTCACATGAGGTAATAGCCAATATAGTGTCACATG
AGGTAATAGCCAATATAGTGTCACATGAGGTAATAGCCAATATAGTGTCACATGAGGTAATAGCCAATATAGTGTCACATGAGGTAATAGCCAA
TATAGTGTCACATGAGGCCCCAGGCCAACTAAGGCTGCATCGGAAAACCCAGATGCCAGCTTCGTGTTTGTGTCTCGTCACTAGCACTCCGTCA
CACTAGCCTGTGAGTCAGGGAGGCCTTCGTCTTCCTGTGTTTAATAGGATAAACTCACAGTGGTGCTTCAGATAATAGTGGGTGTGCATATAAT
CACACACGTAGGAAAGGTCATTGTGGAAGATCTTTTTATGGTATTGTGGGAACCTTAACCAAAGAAAGATGAGTGGGGCTTAGAAACTCAGATT
ATCTTACTGAGAAAAAGTTAGTGTGTGGATTGATTTAGGAAACAAGATGTGGCTGGAGCATGGGTATTGAATAGGGTGGAGGGTGTGTTTAGCT
GGACATTTGAAAATGTTAATGCAGTCATTCTGAGTGTAACCTCGGGGCTAAGGGGCTCTGACTTTTCCTTCATGAGGTAGGACTTTTGAGTAAG
GTAGTAACCTTGAACCCAGTCTATGTGGTCTGGGGCTGAGAAGGAAATAGTGGCTCGGGATGAACCCGGGAGCTCTAAATGAGGCCCAGAGGCA
ATGCATTTACATTCGCTGCATTCTTCCTCCATAGGATCTTGACGATGGCGTAAGTGAGCATTCTGGTGATTGCCTGGATCAGGATTCAGTTTCT
GATCAGTTTAGCGTGGAATTTGAAGTTGAGTCTCTGGACTCGGAAGATTACAGCCTGAGTGACGAAGGGCACGAGCTCTCAGATGAGGATGATG
AGGTGGGTTTCTGTGTCTGTCAGCCTTTTAGTAAGATGAAGAGGCCATCTATTCAGAGTCTCTGGAAAGTCTTGCTTTTTCATTTGTTCAAGAT
AGAATATTGCTTTGTGGATTTGAGGTGAAATTTTATAGTTTCTTTGCTTGATTTATTTATTTAGATTTATTTGTTATGTATACAGCATTCTGCC
TGCATGTATGTCTGCAGGCCAGAAGAGGGCACTACATATGCTTACTAGCCACCATGTGGTTGCTGGGAATTGAACTCAGGACCTTTGGAAGAAC
AGACAGTGCTCTTAACCTCTGAGTCATCTCTCCAGCCCTTTGCTTGATTTATTATAGTCTCACATTACTAAATAAAAAACTTAGAGGAGAGTTT
GAACAATGTTTTTAAACTTTTTTTGAGTTGATGGGGTGTTTTTGTTTTGTTTGTTTTGCTTTTTGAGACTTGGTTTTTTTTTTTTGTTTTTGTT
TTTGTTTTTGTTTTTTTTTTTGGTTTTTCGAGACAGGGTTTCTCTGTGTAGCCGTGGCTGTCCTGGAACTCACTTTGTAGACCAGGCTGGCCTC
GAACTCAGAAATCCACCTGCCTCTGCCTCCCAAGTGCTGGGATTAAAGGCCTTCGCCACCACGCCCGGCGAGACTTGGTTTTTCTGTATGGCCC
TAGCTGTCCTGGAACTTGCTTTGTAGACCAGGCTGGCCTCAGATCTGCCTGCCTTTGCTTCCCAAGTCCTGGAATTAAAGGTCTGCGCCACCAC
TGCTCTGCTAATGATGGATGAACATTCTCATAATGGCTGGACCACAAAGTTCTCCATTTGGTCTTCCCATTTATGTATGTATGTGTGTGTGTGT
ATTTGTTTTTGAGACAGGGTACCACCGTGTATCCCTGGCTGACCCTGAACTGGCTATCTAGACCAGCCTGGCCTCAAACTCATGGGAATCCTCT
TGCCTCTGCCTCCTGATTGCTGGGATGAAAGGTGTGAGCCCCTACTTCTGCCCCTCCCTTCTCAGTACTGATTTGTTTTTCACCAATGTAAAGC
ATGCAACGAACAGTGTCCAATAGGACCCGAGTATCTCTTTCTCGGGAGCAACTCTACATTTCTAGTTCTTTTCTGTCTAATAACTCTAAATTTA
TAAAATGTCTTCTTGAGTGTTTTGTTTGGTTTTAAGTATCTAACAACTCTTGCCATTGCGACTAAAGGTTTTCCTATCCTGCGTTTCCTGCTTG
CCTTGAACTGCATTTAACTTTCTTTCAGAACTCTTCGTCCACAGTTAATGGCTCAAGCTGTTTGTTTTAAGACTTACTGAGAATTCTGGCTTCT
TGGTTGAAGGGTTGAATTGATGCTAATGAATTTGTCTTACTAGGTCTATCGGGTCACAGTCTATCAGACAGGAGAAAGCGATACAGACTCTTTT
GAAGGAGATCCTGAGATTTCCTTAGCTCTAAGTATATAGATTCTTCAAAGAAATAAAACACAATGTTGAGATCAGAATTAGGACTATAGGTAGT
TGTGAGCCACCACCTGTGTGCTCAGAACCTGAGCCATCTCTAGCCTGTCACTATTTCATATAGGTCACCTTTTGTGTGTGTGTGTGTGTGTAGG
GGAAAGTACCTAGAGTCTACTCTATTAGCTAATTTCTGGTATATAGTATTAGATATATTCCTCATGTTCTTTGCCTATTTATGTAAAATATGAA
ATGCTGAAAATTAAGCTACATGGTATACTTTTACCTTAGCCACATTGAAGTTATTAGCCTTGCTATGAACACTGACTGAAGAGTTACTGTCTTT
TTTATTGAAGGACTATTGGAAGTGTACCTCATGCAATGAAATGAATCCTCCCCTTCCATCACACTGCAAAAGATGCTGGACCCTTCGTGAGAAC
TGGCTTCCAGACGATAAGGGGAAAGATAAAGTGGAAATCTCTGAAAAAGCCAAACTGGAAAACTCAGCTCAGGCAGAAGAAGGCTTGGATGTGC
CTGATGGCAAAAAGCTGACAGAGAATGATGCTAAAGAGCCATGTGCTGAGGAGGACAGCGACGAGAAGGCCGAACAGACGCCCCTGTCCCAGGA
GAGTGACGACTATTCCCAACCATCGACTTCCAGCAGCATTGTTTATAGCAGCCAAGAAAGCGTGAAAGAGTTGAAGGAGGAAACGCAGGACAAA
GACGAGAGTGTGGAATCTAGCTTCTCCCTGAATGCCATCGAACCATGTGTGATCTGCCAGGGGCGGCCTAAAAATGGCTGCATTGTTCACGGCA
AGACTGGACACCTCATGTCATGTTTCACGTGTGCAAAGAAGCTAAAAAAAAGAAACAAGCCCTGCCCAGTGTGCAGACAGCCAATCCAAATGAT
TGTGCTAACTTACTTCAACTAGCTGACCTGCTCACAAAAATAGAATTTTATATTTCTAACTATATGACCCCCAAATTAGACAACATGGGTATTA
TTTTTATACATTAAAGCCAGAAAACTGTCTTAGTCCACATAAAATTCACTTATAATTTATCCTGGAGAGTAAATATCGTGAATATTTTCTTCCT
TTTTAGGGAAATTTCACTTGTTTATTTTATATTTGTGTTTTAAGTAATTTGCATTGGCTGTTTATATTTTCCTTATATTTTAAATAATCTCCGC
TTGGAAGGACTTTGGAAGTGTATGTGAGAAGTCCTTTCCATCTCCTGCAGATGATGGTGGACCTTCCTCATCAAGGGCTACACAAGTACTTGAT
TTCTGTTTTTTTTGTTAATAATAAGAACATTTAATTTATTTAGTGTCTTTCATGTAAAGAGTTAAAGACTATGTGAAGGATTGTATATTTAAGT
TATTGAAATTCTGAAACTGTAGTAATCTAAAATGTGTGAGTTGTGGGCTGCAGAGAAGACTCAGCCAGTAAAGGCACCTGCTGTGTACACCCAC
TGACACACATTTGATCCTTGGAACCCCCAGGAAGAGTGAACCAGTTCCACAAAGTTGTTCCCTGATCTTCAAATCGATGCACGCACGCACGCAC
ACACACGCGCGCGTGCGCACACACACACACACACACACACACACACACACACACAGTTTTAAAGGCATGAATTGCATCTGGTGGTATGTAAGTG
AAAACACACGCCTTATTTTCCAGCATTTTCAGCTTTTTGTCATAGGGGTGTGGCACAAGTGTTGCAGTTTGTCCCAGGTTGAAAAGCCTGAGGC
TGGTAGAAGCGCCTTTTTGCCTCAGCTCCGTGGTTCCTCGTCCTTGCCTATGTTTCAGGCCTGTACTTAGGCTAGGTTTAGAAACCAGCCCATT
CAGAAAGACTGAATCAGAACATGGATAAAGTGAACTCATTCTAAGATGACTCGTCTATCCATGTAGATTAATCTCCTCCTTCATAATAGGCCTC
TTCCCTTTGATTGAAGGGTCACGTCTAAGTATAGAAAACATAAAACTGTAAGGTAGAGGAAGCCAACCATACCTTTGTATTAATGTTGCGTTAA
AGCTTCAGAGACAAGAACAAGAACACTCCTCCCACGTGACAGCATTTGAATAGGAGGCGGTGGGTGCGGCAGCCTGGGCAGCTTCAGTCCCGAT
TTACAATAAAGTACCTTGTGTGTTATTAGTTCTTAAATGTTTATTTAGAAATGCCATTGATGTTATTTATTTGCAAATAAATGGTTTATTGAAG
AATTGTCAAAGAGATTTGTCTTACACATTTTTTTGTCAGTGATTTTGTTTTTAAAGATTTGTTCATTATATGTGAGTACACTGTAGCTGTCTTC
AGACGCACCAGAAGAGGGCGTCAGATCTCATTACAGATGGTTGTGACCCACCATGTGGTGGCTGGGAGTTGAACTCACGACCTTTGGAAGAGCA
GTCAGTGCTCTTAACCACCGAGCCATCTCAGCAGCCCCCATCAGTGATCTTTTTATAATTCATTTTTATTTTATGTTCATTGGTGTTATGGCTA
TATGTCTGTGAGGGTGACAGAAACCCTGGAACTGGAGTTACAGACAGGTGTGAGCTGCCCTGTGGGTGCTGGGTAATTGATCCATTGCTCTCCA
CCTTTTTAAAATTTGTGTGTATGAATAATTCGTCCACATGTATATGTATTGTGTGCATACACTGCCTTGAACTACATGCATGCAGTGCCTGAAG
AGGCCGGAAGAGGGCATCAGATCCTTAGGACCCGAGTTCCAGGCTAGGAGCCTAACCCTGTCCTCTGTAAGAGCAGATGCTGCTCTTGACCACA
CAGCTGTCTACATGCCGCCTTTTTTTTTTTTTTTAAGGTTTATATATTTTATGTATATGAGTACACTGTAGCTGTACAGATGGTTGTGAGCCTT
CATATGGTTGTTGGGAATTGAATTTTAGGACCTCTGCTGGCTGCTTGCTCCGGCTCAAAGCTTTATTTATTATAAGTACACTGTAGCTGTCTTA
CTATAAGAGGGCATCAAGTCTCACTACAGGTGGTTGTGAGCCACCATGTAGTTGCTGGGATTTGAACTCACAATTTCTGGGAGAGCAGCCAGTG
TTCTTAACCACTCAGCTATCTCTCCAGCCCCTAATAGCTACAAATTTAAATACTTTAGGCAATTTTGCCTAGGGATTTCCCAATATATTATATT
GCAATGGATTTTCTTTTGAGTCCGAGAAATCTTTGCGATTTAACTTAAAGTTAAGATACTTGTGTGGAGGAGATGGCTCAGTGCTTGTCTTGTG
CCCTGATTCCATCCCCAGAAACCGTGGATATGGTGGCACTCATCTGTAACCACAGCATGAGAGATGACAGGCAGACCCACAGGCGAATCATCTG
GAAGCTTGCTGGTCAGCTGGCTTGCAGTATGCATCATGACACAAACAAGAGGCTACCACAAGGTGGAAGGCCGGAGACTGTTAGGTTTTGGGTG
TTGCTAAATACTGGCCCTGGTTGCCTCCAGGGGCTGGGAAATTCTCACTTAAACCCAGATGATGCTCTGTAATCTTCTCCCCCAAGTTATCCCC
GATTGGCGAATAAAGATGCCTGCAGCCTGTAGCTGTGTGGAAGAGAGACAGGTGGGGTTTGGGGGTCTGACGCAGGAAGAAGAAAGAGGTGGAG
AGAGGAGAGTGTAGGTGAGTCTGGAAGAAGTCAGTGCTCTTAATCCCTGAGCCATCTTTCTAGCCCCATATAGCAGTCTTTTCTAGTTTGTAGA
TTTTTGTTATGTTTGCAAACAAAACACTAGTGGAAAGAGACAACATTCACTATATGAATATTCTTTATTGATAATCAGATAATGTAAATAAAAT
AAGCTCAGAGGTAGTCATGGTCCCTCCCAAGCAAACGTTGTAATCTTAGATAATCTGAGAATTTATTTATTTTTCTGTGTAGCCCTGGCTGTCT
TGGAACTCACTGTGTACACCAGGCAGGCTGGATTTGAACTCAGAGTCCCCTCTGCCTCTGCCTCTGGAGTACTGGGATTAAAGGCGTGGTCCAC
CACTGCCACCACTCAACCTGGGCACCTTTAATAGCTTCTGCTTCTGTGCTTTTAATGGCAGGAATCACTTAGAAGCTTGTTAAACAAAAACCCG
CATGAAGTCTCTCGCACACAGCTGTGGGTTGGCTTGTGAGCTTAAGGTTTGATTAAACGGCCTGTGAGACACAGTACAGCATCTTATTAGTGAT
GCAAGTCTAGAACAAACTCGGTGAACAATCTGTTGTAGGCACCAAGAACCCCATGCTCTTCACCTAATCCAGCATCATTCTCTCCCGTACCTGA
GGTCACCAGGAAGGCAGAATTGAGCTCACAAACCTTCACTAGATGCCCCCTCCGAGACTGAGAATGAAACTCCTGTTGCAATAGGAAAATAAGT
GTGCTATATGGCTTTGTATATTTTTCCTAGAAACAGATACGTCTCAACCCAGCTTCAGCTCATACATTGGAAAGCAGATCTGATGTTAATACCA
TTTTAGTACAGGCAGAGTCTGAGAAAACTGGGACTGTTTTTGCTTGTTTGAAACGGGGGTTTTTCTGCGTAGCCCTGGCGGTCCCAGAACTCTG
TAGAAAAGACTCGCCTTGAACTCACAGAGATCCACCTGCCTCTGCTGCCTGGGTGCTAGGATTTTACCATCTCAATTCAAAAATCCGCACGCAT
GTAAACTAGGCACTTTGTGAAAGTTTCCTTGAAAACGACGTGGTTTTTGGTAACCAGCATTTCCGTTTTCAGGTCACCTTTAGTAAGGTATATT
GCTTTCAAAACAGTTACAGACCCAAGTATTCCTTCTGCTTTCTCTACCTGGCAGAGGGCAACAGAATAATTTCCTGGTTATGTTTTGTCTTGGG
GGTAGTTAATGGAGATTAGACCCAAGCCTTTGCATATGCTAAGTACACTGTCACTGAGCTACACCCCTCACCCTGTTTTAGTGATTTTTACACT
GGGTTTTGATATATATTTCTGATTTAAGTAATGTAACCTGAATATGGACACAGCGGACCAGGTCTGTAATAGCTACTCCAGCGTCTACGGCAGG
CAGATCCAAAGCCAGTTTGGCTTACTATGAGTTCCAAGTGCAGCCTACACAGCTTAGTGAAATGCTGTGTCTGAACAAAAAGTAACAAAATAAA
GACGTAGCTGTGGCTCAATGGCCCTGTGCAAAGCCCTGGCACAGTCTCTGGTAAGACACGGGCACTTGCAAGTTGTTTCAGTACCAAGTCTCCG
GTTAGGCCCATGAGCAGCTCAGCGAACACCTCATTTCCTTTCACGGAATCTTAGGAAAGGGTCAACCAGTCAGAACTCAGAACACCAGCTGATG
GCGAACCAAGTTTGCTCTTACATATCTTACTGGTTTTGCTTTTCTAAGATGGCTAGTCCAGGCTAGCCTTGAGCTGTGTCGATCTTGCCTCAGC
CTCCCAAGCGCTGGGATAATAGTTCACCACCACACCTGGCTTCGTCTTATATATATACTTCAAATGTAATATACCCAGATCCCTTTTTGAACTA
TTAATACGCGCCTTCTGGGATATAAGTTAATGCTTATTTAAATAAAATGATCAAGATACTCATGCTATTTCCAAATTTAGAAGCGCTTAAAAAG
CTATGCAGACTATTGATATTAAAATATAGATTAGGTTTGGCACCAAGAAAGGGCACCACGGTGCCCACGTATCTCTTTAGAGTCTCAAGCCTTC
ATCGCCTGTCAAACCCCGCATGTTCTTACTTCCTCTGGGAAATGCATGTCACTTAGAAACCTGCACCTCGGAGTTACTGTTAATGTTCCTGTTT
GATATTTATCCTTTTTTTTTTCTTTTAATTTATTTACTTTTGAGACAGGGTCTGTCTGTGTAAACGAAGACATCCGCCCACCTCTGCCTTCTGA
GTGTTGGGATTAAAGGTGTGCGCCAACACGCCCAGCTTTCTCTTCTTCTAATGTTAGAATAAAGTTACTTTTACAGGGGACACTTTACTTCGAA
CTGTAAGAATTTGTTTTCTGGTCTAGAAGGCAGATTGGCTAACAGCTAATGCCTTTCCCTCAAGCCTCACAGCTCACCCATTTGCATTTATCTT
TGGATTTTGTTCTTTGACATACACGTGAAAAGTGTGTATGTGTGTGTGTGTGTACTAGTAAGCTGAATGTTGCCAAACATAAAACGCATTTACA
CAAAATTACTCAGATCCTTAGCGTTCTGGAAAGGTCTGTAGCCGTAGCTGAGACACTTCCCCATCCATTTATTTCCTGTTTTTTGGCTAGACTC
TGAGAAATTATTTCTCAAGCAGATCCTTGTCTTAAAGAGCTCATGGCGTGCTAGAGAAGGCCAGCACAGAGCAGTTCCACACCACGATGCTGTA
AAGTCACTAGTCAAAGGAACTTCTTTGAAGGATCGGCCTTGAACTTGACCACCTGGAACTCCATGGGCTTCCCCGTTCAACACGATGCTTGGAA
TTCTTCCTTTTAAAAAATTTATTTATTTTACGTGTATGACTACATGGTTGCTGTCTTCAGACACACCAGAACGCAGCCTCGGATCCCATTACAG
ATGGCTGTGAGCCACCATGTGGTGGCTGGGAATTGACCTCAGGACCTCTGGAAGAGCAGTCAGTGCTCTTAACCCCCCATGGAATGGAGTTTTA
CTGACCAGGAAACAAGACGTGACACAATCAGAATCCAGACCTCGCACCGACAGCACTTACTGTGTTGTGTTTAGGGAGCAGGAGAGCTTTGGGC
AGCCCAGCTCCCCAGGTTCTGTGTGGAAGACGGACTTGGCGAAAATACCCATGACCAGCAGCTGGGTCAGCGGCGGAGGGACGCTAACTGGCCT
GGAGAGGCTGTATACAGCAGCTTCCAGTGACTGGATATGGGAATCGAACAGCCTTGCATGGCGTCTCAACAGTCAACCGGATGAACTGCAGTTC
CTAGGCATCGTAGTCAGGTGGGTGTGTCTGCTGAGCAGCTGGAGTTGCATCTGAGGCTCACGCAAGCGACTGGGGTTATACAGGAGGGGTCATC
TTCCTACGACTGTGGCATCAGGTGCAGGGGGCAAGCGCAAACGCACGCGAGACAGAGGCCACTGCATCTGTACCCACATCAGACATGTTTGTCC
ATTTTCTCTCATTTGGCCTTAGACCATTGGCAAGAGTAAATGCTCTTAGTCCCGTTATCTAGAAATTTCTTCCTTTGCGGAGAACCACTTATAG
ACAATATCAGCTCTCTACAAATAACACGAAAGGTCGTAACACAGCAAGTGACCAGAAAGTGCCCGTCCTTGCGGCTCTGATCCACGTGGCTCTC
CGTAGACAAATTGTTTTTCTTGTAGGGATATCTGTTTTGCTTCTGAACTTTCTTACAAGTGTTTGGGACTCCTTCGGGGTGGCGTTTGTGTGGG
CAGCATGAGCTAACCAGTGACCTCCACTTTATCCAGACTGAAGATGGATTTGGTCGTTACAGGTCGCTCTAGGCCAGGTTTGGAAACATCCGGT
TTTCTTCTTAAGGAAAACAGTGGAGTCTGTCCCAATCGCAGTCCCACAGGAGGGAGGGTTGCCATAACCGGGAGTAACCAATCCCTGATTCCCG
GAAGTCGAGTTTCACACCTTGCTTTATTTAAAAAATACGTACAAAAGAGTCATGAAAAACACCCCCAGACTAGGCTTTGTGGCAGCCGAGTGGC
TTGGCATGAATTTGTACAGCGGAATCATCGGGCACGAAGGATTGGATACGGAGATGGAATCCGGCTGCCATCGCAGCGGGAGGTGAAAATCCTT
TTTAAGAGCACTGAAGGGCTGGGATTTCCCTGGAATAGTAAGCTTCGTGAGGTAGGAGTCGTGTCCAGGGACTGTAACCTGAGAAGGAACAAGA
AACAATTACTTGAGTGATTTCAGATGGGTGTGAGGTCCACGCAGAAGACAGATCTCCACCCCTTTGAGCGGTGCATGCGTGGCTTGAAAGCGGT
CCACGCCTCCGGGGCTATACCCCCCGGAAAGTTGCCAGTGTTTCTTGATGTAGGCCTTTGGTGCAAATGCTACCAAGAATTACAAAATGAAGTA
AGAACAGAGAGGGGGTTCAGCATCTAGTGAAGGAAAAGACTAAATGGAGGAAGCCACGACTGATTCTGCCACGGTCATTTTCAGTGTGCCGGGG
TAAAGGTGCTTTTTTTGGACCAAGCCTAGAGTATCCTTATTGGATATCAAGATTGTGAGTAGATTCTTCCTTCAACTTACTCCCATTCTCCTTG
CCACTGACCTAAGGTGTATAACTCTACTTCACTCCCCACCCCTCCTTTTTAAAAAGAAAGAAAGAAACAAAACAAAACCAAACCCAAAACCTTG
CACAAGAGCGGTTTTTTTGCCTGCACGTGTCTACCACTTGCATGCAGTCCTTACAGAGGCCAGAAGAGGGCAACAGATTTCCTAGAACTGGAGT
CGCGGATGGTCAGTTGTGAGCCACCCGGTGGATTCCAGAACTTCAACCCAGACCTTCGGAGCCCTTCTACCACTTTCTTTTAAAACTTTTAATT
GTGCCAGGCGGTGGTGGCGCATGCCTTTAAGCCCAGCACTTGGGAGGCTGAGACAGGCGGATTTCTGAGATCGAGGCCAGCCTGGCCTACAAAG
TGAGTTCCAGGACACCCAGGACTATACAGAGAAACCCTGTTTTGAAAAAACAAACAAACAAACAAAACCCCCAAAACCAAAACCAAAACCAAAC
AACTTTCAATTGTTTTAAAAACTAGTTTTGTTCTTGTGAATCTTCAGGTAGGTTCCGATTGCTCTTGGAGTTGCTACATAGACCAGGTTGACCT
CAAACTCACTGGGTCCACCTGCCTCTGGGCAGTGCTGGCATTCAGGGCTTCCTTTTGAGCACTTTATATATTCTAGAAACTCATCTCTTAATGG
AGAAGTCATTTGCAGATCTTTTTCCCCAGGTCTGAAGACACACGGACAATCTGCTCTTGGCTCCTTTGCCATGCTTCCTGGTTCGTTTTTCTTT
GTCTATCTTAATTTTGTGCCTTTGGGGCTCTATCTAAAAAAAACCCATCGCTTTACATAAATGGCTTGAAGTGTTTCCATTGTTTTCAAGCACG
CACACACACACACACACACACACACACACACACACACACACACACAATTTATACCTAGGAGAAGCTCAAACATCTGCATCTGCAGCTGTGCCCA
GGAGAAGTGAATGGTAGGTCTGGAGCCACCCGGTAGCTCTGTTCCTGGAGCTGGGGGACCCAGCTGGCACCACCTGTCTAAGTTCCTGATTGAC
AGGTAGGACTGAGGGGCTGTCTTGCTACAGTGCCAATGCTGTGGTTGGCAGGGACTCCCCTAGATCTCGTGGGGCCAGACTGAGACAGCACCGG
GGCTTGTGGCATGCCACATGGTAGCAGGGGGGGGGGGCTGTCTTTTCTTCAGTAAAATGTGCTCTGGACCAAGGCTTCAGCCAGAGTCCAAGAT
GGCTGACAGCTCCTATGCCAAGATGGTGTTTGGCAGTGGCTATGGAAGGGCAAGGAAAATGACAAAGAAAAGCCACTTTCAGAAGAGCTCTCTA
GATTGGATTTAAACCTTGGGATTCCTCATTCATGGTTCCCTGCCACACTGGTGCTTGCTGGCATCTCCCATCGTCCTCAGTTCACAGGCAGGCC
TGGGTGCCAGCGCTCAAGCTGCTGAGTGTTTCTCTCTTTCCTCTCCGGTCATTTCCAGGCACACCTTTGTGCATCTTCCTAATTCCCCCTCTTT
CGCTCCTACCATGTGGTGTCTGCTTAGCTGCCCTGACTTCTCTGGCAGGGCTACCTGTAAGGCACCTTGGCTTACACTGGCTTCCTCCTGGGCT
GATTGATTAGGTTATCCGTGTGTCTGTGTGTGTGTGTGTGTGTGTGTGTGTGTGTGTCTGTGTACGCGTTAGAATAGCCGTCTTGAGCTGGGGA
TGGTTCACTCGGTGAAAGCGCTTGCCCAGCAACCCCGACATGATTCAGTCTCTAGAATGTATGCTGGAAGGAGCAAACTGCCCTCAAAGCTGCT
TACCAACTTCTCCAAGTGTGCTATAGCCCACAGATGCGTACATAATTGAGAAAACATGGTAGGTGCTTGGTTAGGAAAACATATGACTTTCCTC
CCGGAGACAGTGTTTCTCTGTATAGCCCTGGCTGTCCTGGAACTAACTCTGTAGACCAGGCTGGCCTTGAACTCAGATCTGCCTCCCTCCGCCT
CCCGAGTGCTGGGGTCAAAGGCACATGCCACTGAGATGCCAAAGCTTTGAAATTCAGACTCCATTTTAGAAAACCTGACCTAAGTGTGAACTCA
GGTAGACCAACAGGCTGGTATCTAATAGCATTAGTTTCCAAGTTGCCCCCCAACAGAACCTGAGCCTAGCTCCCGTCTCTAGTCTAATCCCCAA
CAAGAGCAGAGTTTCCAGGTTACACCCTCAACAGGACCAGTGTCTCCAGGCTATTTCCCCAACAAATCTGCACCCCCAAGTTACAAGCCTACCC
TCTGCCTAACGACCACCAATGCAGAGGGGAGCAGAAGTTAAGTCTATGATAGACTCCCAGCACCAGCCAATCATGTTAAAGGCCACAGGAGCTT
TCCAATGAGATGCTTGCACATGTACTCCCTGCTTGCTGCTTACTATAAAGCCTTGACCCATAGACATTCTGGGCTCCCCACCACCACCACCAAA
ACTGTCCTGCCCTGCGTAATGGTGGTGCGTTGGGGGATGGGCGGGAGGGTTGTTCGAACAGAATAAAGACCCTGGTGAGTTGCACCAGATTGGC
TCCTGTGTGTGTTTTGGGGGATCACTAACATTTCCCTGGCGCAACACCATCACTGCGAGACTATATGTGATTCCCCCTCATTGGTTTGTTTCTG
CCTTCCACTCCTCTCCTATTGCAGGCCTCATGTTAACCTTGCCTTCCAAGCCTTGCTG
MOUSE SEQUENCE—mRNA
GAGGAGCCGCCGCCTTCTCGTCGCTCGAGCTCTGGACGACCATGGTCGCTCAGGCCCCGTCCGCGGGGCCTCCGCGCTCCCCGTGAAGGGTCGG
AAGATGCGCGGGAAGTAGCAGCCGTCTGCTGGGCGAGCGGGAGACCGACCCGACACCCCTGGGGGACCCTCTCGGATCACCGCGCTTCTCCTGC
GGCCTCCAGGCCAATGTGCAATACCAACATGTCTGTGTCTACCGAGGGTGCTGCAAGCACCTCACAGATTCCAGCTTCGGAACAAGACACTCTG
GTTAGACCAAAACCATTGCTTTTGAAGTTGTTAAAGTCCGTTGGAGCGCAAAACGACACTTACACTATGAAAGAGATTATATTTTATATTGGCC
AGTATATTATGACTAAGAGGTTATATGACGAGAAGCAGCAGCACATTGTGTATTGTTCAAATGATCTCCTAGGAGATGTGTTTGGAGTCCCGAG
TTTCTCTGTGAAGGAGCACAGGAAAATATATGCAATGATCTACAGAAATTTAGTGGCTGTAAGTCAGCAAGACTCTGGCACATCGCTGAGTGAG
AGCAGACGTCAGCCTGAAGGTGGGAGTGATCTGAAGGATCCTTTGCAAGCGCCACCAGAAGAGAAACCTTCATCTTCTGATTTAATTTCTAGAC
TGTCTACCTCATCTAGAAGGAGATCCATTAGTGAGACAGAAGAGAACACAGATGAGCTACCTGGGGAGCGGCACCGGAAGCGCCGCAGGTCCCT
GTCCTTTGATCCGAGCCTGGGTCTGTGTGAGCTGAGGGAGATGTGCAGCGGCGGCACGAGCAGCAGTAGCACCAGCAGCAGCGAGTCCACAGAG
ACGCCCTCGCATCAGGATCTTGACGATGGCGTAAGTGAGCATTCTGGTGATTGCCTGGATCAGGATTCAGTTTCTGATCAGTTTAGCGTGGAAT
TTGAAGTTGAGTCTCTGGACTCGGAAGATTACAGCCTGAGTGACGAAGGGCACGAGCTCTCAGATGAGGATGATGAGGTCTATCGGGTCACAGT
CTATCAGACAGGAGAAAGCGATACAGACTCTTTTGAAGGAGATCCTGAGATTTCCTTAGCTGACTATTGGAAGTGTACCTCATGCAATGAAATG
AATCCTCCCCTTCCATCACACTGCAAAAGATGCTGGACCCTTCGTGAGAACTGGCTTCCAGACGATAAGGGGAAAGATAAAGTGGAAATCTCTG
AAAAAGCCAAACTGGAAAACTCAGCTCAGGCAGAAGAAGGCTTGGATGTGCCTGATGGCAAAAAGCTGACAGAGAATGATGCTAAAGAGCCATG
TGCTGAGGAGGACAGCGAGGAGAAGGCCGAACAGACGCCCCTGTCCCAGGAGAGTGACGACTATTCCCAACCATCGACTTCCAGCAGCATTGTT
TATAGCAGCCAAGAAAGCGTGAAAGAGTTGAAGGAGGAAACGCAGCACAAAGACGAGAGTGTGGAATCTAGCTTCTCCCTGAATGCCATCGAAC
CATGTGTGATCTGCCAGGGGCGGCCTAAAAATGGCTGCATTGTTCACGGCAAGACTGGACACCTCATGTCATGTTTCACGTGTGCAAAGAAGCT
AAAAAAAAGAAACAAGCCCTGCCCAGTGTGCAGACAGCCAATCCAAATGATTGTGCTAAGTTACTTCAACTAGCTGACCTGCTCACAAAAATAG
AATTTTATATTTCTAACT
MOUSE SEQUENCE—CODING
ATGTGCAATACCAACATGTCTGTGTCTACCGAGGGTGCTGCAAGCACCTCACAGATTCCAGCTTCGGAACAAGAGACTCTGGTTAGACCAAAAC
CATTGCTTTTGAAGTTGTTAAAGTCCGTTGGAGCGCAAAACGACACTTACACTATGAAAGAGATTATATTTTATATTGGCCAGTATATTATGAC
TAAGAGGTTATATGACGAGAAGCAGCAGCACATTGTGTATTGTTCAAATGATCTCCTAGGAGATGTGTTTGGAGTCCCGAGTTTCTCTGTGAAG
GAGCACAGGAAAATATATGCAATGATCTACAGAAATTTAGTGGCTGTAAGTCAGCAAGACTCTGGCACATCGCTGAGTGAGAGCAGACGTCAGC
CTGAAGGTGGGAGTGATCTGAAGGATCCTTTGCAAGCGCCACCAGAAGAGAAACCTTCATCTTCTGATTTAATTTCTAGACTGTCTACCTCATC
TAGAAGGAGATCCATTAGTGAGACAGAAGAGAACACAGATGAGCTACCTGGGGAGCGGCACCGGAAGCGCCGCAGGTCCCTGTCCTTTGATCCG
AGCCTGGGTCTGTGTGAGCTGAGGGAGATGTGCAGCGGCCGCACGAGCAGCAGTAGCAGCAGCAGCAGCGAGTCCACAGAGACGCCCTCGCATC
AGGATCTTGACGATGGCGTAAGTGAGCATTCTGGTGATTGCCTGGATCAGGATTCAGTTTCTGATCAGTTTAGCGTGGAATTTGAAGTTGAGTC
TCTGGACTCGGAAGATTACAGCCTGAGTGACGAAGGGCACGAGCTCTCAGATGAGGATGATGAGGTCTATCGGGTCACAGTCTATCAGACAGGA
GAAAGCGATACAGACTCTTTTGAAGGAGATCCTGAGATTTCCTTAGCTGACTATTGGAAGTGTACCTCATGCAATGAAATGAATCCTCCCCTTC
CATCACACTGCAAAAGATGCTGGACCCTTCGTGAGAACTGGCTTCCAGACGATAAGGGGAAAGATAAAGTGGAAATCTCTGAAAAAGCCAAACT
GGAAAACTCAGCTCAGGCAGAAGAAGGCTTGGATGTGCCTGATGGCAAAAAGCTGACAGAGAATGATGCTAAAGAGCCATGTGCTGAGGAGGAC
AGCGAGGAGAAGGCCGAACAGACGCCCCTGTCCCAGGAGAGTGACGACTATTCCCAACCATCGACTTCCAGCAGCATTGTTTATAGCAGCCAAG
AAAGCGTGAAAGAGTTGAAGGAGGAAACGCAGCACAAAGACGAGAGTGTGGAATCTAGCTTCTCCCTGAATGCCATCGAACCATGTGTGATCTG
CCAGGGGCGGCCTAAAAATGGCTGCATTGTTCACGGCAAGACTGGACACCTCATGTCATGTTTCACGTGTGCAAAGAAGCTAAAAAAAAGAAAC
AAGCCCTGCCCAGTGTGCAGACAGCCAATCCAAATGATTGTGCTAAGTTACTTCAACTAG
HUMAN SEQUENCE—GENOMIC
CGAGTAGCTGGGATTACAGGCACCTGCCACCACGCCTGGCTAATTTTTGTATTTCTAGTAGAAACGGGGTTTCACCATGTTGGCCAGGCTGGTC
TCGAACTCCTGACCTCAGATGATCCGCCCGCCTCGGCCTCTCAAAGTGCTGGGATTACTGGCGTGAGCCACCGCACTTGGCAGTTCTTTTTTTT
CTTTTTTCTTTGAGATGGAGTCTCGCTGTGTCGCCGAGGCTGGAGTGCAGTGGCGCGATCTGGGCTCACTGCAAGCTCCGCCTCCTGGGTTCAT
GCCATTCTCCTGCCTCAGCCTCCAGAGTAGCTGGGACTACAGGCGCCCACTACCACACCTGGCTAATTTTTTTGTATTTTTTTAGTAGAGACGG
AGTTTCACCATGTTAGCCAGGATGGTCTCGATCTCCTGACCTCGTGATCCACCCGCCTCAGCCTCCCAAAGTGCTGGGATGACAGGTATGAGCC
ACCACGCCCGGCCAGTTCTTTTAGTTTTTAAAGCAGTCTCATTTCAGTTATTAATATTGACTTCTTCATTTTGAAACTTCAAATAATATTTGAT
TCAAAGCTTTCCTCCTCTTACCAGAGCAGGCTGGACCTGTGGCCCTGGTGACCTGGAATTGGAAATGGGGGTGTGGGATGTAGGGCATAGGTCT
TCTTGTCACATCCCATTCTGTCTTCCCAATTATTACTTGTGGTACTCAGAATTCCAAGAATGACTCCCAGTGACCTTGCCTATGGATGATCCCC
TCCCCTTTAAGCGTGGGAGGAACCTGTGAATATGAGGAGATATTACTCCCATCATTCTGTTACATTACATGGCAAAAGGGAGATGATCTGGGTT
GGCCTCATCAAATCACATGAGCCTTTGAAGTCAGAGTTTTTTTCTGGCTGATAGCAGGAGAGTAAGTCAGGTTCAAAGCACAAGGGTGATTCAA
CACCCTGTTGCTGGCTTGAAGATGGAGGGGAGTGTGTAGCAAGGAATGCAGGAAGCCTTCAGGAGCTGAGAGTGGTCCTCACTGCTAGCAAGAA
AAAGGGGACTACCGTCCTACAACCACAAGGAACTGAATTTGGCTGACAATTTGAATAAGCTAGAAAGCAGGTTCTTCCCTAGATCCTTAAGAGC
CCAAGCTGGCCCACACCTTGATTTAGGCTTTATGACACCTGGAGCAGAGGAACCAGGTGAGCCTACCTGGATTTCTGATATATGGACTGTGAGC
TAATAATTTGTGTTGCTTTAAGCTACTACATTTATGGTAATTTGTTACACAGCCATAGAAAACCACACATGACTCCTGCCATCCCGATACCAGT
TGGGGTGGCAAGGAGGAAGGAGAGGAAAATTACATTTCTTTACATAATTGCCCTTCAAAATTAGTTGCCCTTTTATTAGCAGGACATAACTGTG
GTTCATTGTATGAACAACCTCAACTAGATCATGGGAAACATTTCTGTCCCTTTCTGTTGGTTGTCCCAGTTTCTCTGATTATTACCAATTGACC
ACCAGTTCTCTTCATCTGGCAGGTGTCCAAATGATATTTCTCCAGAAAGACTCGTGGCATGGTCCTGGTAGGAAGTTGAGTAGGGGTATATGAA
TGAAGCTCAACTTCTTTCTCCCTAGTCCAGCACATTCTACCAATAGATATTCTATGTCTTTTGCTTCCAGGGTTCTATTACCCAGGTAGTGGCC
ATTTTAGGAGTTACCAGCAGAACTGCTTATACTCCTTCCATCTTCTCCAGGAACCACTTAATCTGGGGGAAACTCCAGCAACCTTTCCACCCCA
AAGAGTGGGGATGCTGTTCAACTTCACTACCTTTCTTCTGCCAGCTGAATGGCTCTGTAACTTTCAGACTAGATACGATCACAGATCTCAGATT
TAGGTCAGCTGGGAGATTATAAACTCTTCGTTCCACGAAAAGATGACCTCTATTATTCCTGGTCCTTCCTTAAAACTCTTAAACGTGGCCGGGT
GCAGTGGCGCACGCCTATAATCCCAGCACTTTGGGAGGCTGAGGCGGGTGGATCACCTGAGGTCAGGAGTTCACGACCAGCCTGACTAACATGA
TGAAACATGTCTCTACTAAATACAAAAAATTAGCTGGGTGTGGTGGCACATGCCTGTAATCTGAGCTACTTCGGAGGCTGAGACAGGAGAATCA
CTTGTATCTGGGAGGCGGAGGTTGCACTGAGCCGAGATCAAGCCATTGCACTCCAGCCTGGGCAATAAGAGCAAAACTCCGTCTCAAAAAGAAA
AAAAAAACTCTCAATGGTAAAAGTTATCAAACCAGTTCAGCCTGTATTGCCCTTGTGGGAACCAGAGTCTCAGGCCAAGAATTGGGCCTTATTT
GAACTTAGCTTTAGAGAATTGAGCGTTCTTAACAGGGCAATATTCCTACTAAAATCTCTGAAATATTTGTTATCTTCTAAGAGCAGGAACTCAA
TTATGCTCCCATATCATTGTGTAATATTTTTCCTCTTAAAAATTCAGTTCATAAATGTCCAAAAAAAGAGATCTATTGTAACTAAGTAGAATTT
TATCTGAGTAAAACAAGGAAGGTCAATATTGGAAATCTATCAATATAATCTCACCACATAGACAGATTAAAGGAGAAAAGCCACAGGGTCATTT
CTAGGTGCATAAAAAAGCAGTGTATAAAACTGAACACTGATTCATACTTTTTTATAAGCTCAAAAAACCAGGAATAGAAGGAAACTTTTATGTA
ATAAAGAGCATCTACCTAAAATTTACAGCAAACATCACATTTTAAAAGCATTTTTACTAATGTCATGAATAAGATGAGGATGCCCACTATCATT
GCTACTATTCCATTCCAATGGTTGTAAGAAAATGAAAAAGAGGTTTAAGGAAGAGACAAGTTAGTGATTTTTGCATATGATATTATTAACATAG
AAAATCCAAGAGCATCTACTGAAAAACTAATAGTACTGTATAACAAAACAAAATACAGCCTGTAATCCCAGCACTTTGGGAGGCCAAGGTGGGT
GGATCACGAGGTCAGGAGTTCGAGACCAGCCTGGCCAAGATGGCGAAACCCCATCTCTAGTAAAAATATAAAAATTAGCCAGGTGTGGTGGCAC
GCACCTGTAGTGCCAGATACTCAGGAGGCTAAGGCAGAAGAATCCTTTGAACCAGGGAGGCAGACACTGCAGTGAGCCGAGATTGTGCCACTGC
ACTCCCGTCTGGGTGACAGAGTGAGACTCCGTCTCAAAAAAAACCCAAAAAACAAAAAACAAAAACAGAAAGAACAAAAAAGCAGTATTGCTGG
CTGGCTATAAGATCAAAACACAAAAATGAGTAATTGTTTCATATGTTAGCAATAACCAAATAGAAAATAAAATGTTACGGCTGGGCATGGTGGC
TCACGCCTGTAATCCCAGCACTTTGGGAGGCCGAGGTGGGCGGATCACGAGGTCAGAAGATCGAGACCATCCTGGCTAACACGGTGAAACCTTG
TCTCTACTAAAAATACAAAAAAAAAATAGCCGGGCGTGGTGGCAGGCGCCTGTAGTCCCAGCTACTCCGGAGGCTGAGGCAGGAGAATGGCATG
AACCCGGGAGGCGGAGCTTACAGTGAGCCAACATCGCACCACTGCACTCCAGCCTGGCTGACAGAGCGAAACTCCACCTCAAAAAAAAAGAAAA
GAAAATTTTAAAAGGTGTAATTTAAAAACAGCAATAAAACTTATAAAGCACTTCAGAAAAAAGCCAGCCAAACATACAACAGCTTTAAGGAGGA
AACAATAAAGCATTATTAAAGGATGTTAAGACAGACCTAAAAATGGAGTGATATATCATGTTCTTATCTGGGAAGAATTCATACTGAAAATAAG
TCAAATTAGTCTAACAATCCAATGCAATGAAAAGCAAAATCCCAAGAGGATTCTTTTTGTGAATTAGACAAACTGGTTCTAAAAGTTAACATCC
AGGAAGAGCCAAAACAATACTGAAAAAGATAAAGAGAGCTTTTCCTGTTACATATTGAAACTTACTCTAAGGTTTACTATTCTGTTGCCCAGCA
AGTCCTCTTATAGGTATGCAGCCTACTGTCCGTCTTGTTTATGGATTCATAAATTTACAGTGAATGTATAAAACACAGACTTAGTGGACAGGCA
TCAAATTGATCATTATCAAGAGAACGGAGGGGAATGGGATAAAGAATAACAGTGAAATTTTAATTTTTTAAGCAATGTTTCATTAAAAAAATTT
ATTTAGGCCAGGCTCAGTGGCTCACACCTGTAATCCTAGCATTTTGGGAGGCCAAGGCAGGTGGATTGCTTGAGGTCGGGAGTTTGAGACCAGC
CTGGCCAACATGGTAAAACCCCATCTCTACTAAAAATACTAAAGATTAGCCAGGCATAGTGGTACAATCTTGGCTCACTGCACTCAGTGTGGGC
GACAGAGCAAGACTCTGTTTCAAAAATAAATAAATAAATAATAAAAAAAATATGTTTGATGCAGGAATGACAAATGTGAATTCTGGGTAGTGGT
TTCTTTTTTTCTTTTTTTGTTCTTCAGAGCAGAAGAACTTGAGGCGGTGCTTTCTTTTGTTGAATATTAATTGTTCTGTGAATGTTTCTGTATG
TTTCAGTCAAACAAAAACTTGATTAATTTTCAAAGTAAAAACAAAAAGTCTTTGTATTCACTACTTGCTGGGATTTTGCTTTTTATTTTTTACT
TTATTTATTTATTTATTTTTTGAGATGGAGTCTCACTCTCACTCTGTCTCCCAGGCTGGAGCGCACTGGCATGATCTCTGCCTCCCAGGTTTAA
GCAATTCTCCTGCCTCAGCCTCTGGAGTAGCTGGGATTACAGGCGTGCACCACCATACCCGGCTAATTTTTTGTATTTTAGTAGAGACAGGGTT
TCACCATGCTGGCCCAGGCTGGTCTCGAACTCCTGGCCTCAGGTGATCCACTCGCCTCACCCTGCCAAAGTGGTGGGATTACAGGCATGAGCCA
CCATGCCCGGCCTATTTTTTACTTTTTTATTTTCCAGGACAGAGTCTTGCTCTGCCGCCCAGGCTCGAGTGCAGTGGCGCGATCTCGGCTCACT
GCAACATCTGCCTCCCAGGTTCAAGAGATTCTGCTGCCTCAGCCTCCCGAGCAGCTGAGATTACAGGCTTGCACCACCATGCCCGCCTAATTTT
TGTATTTTTAGCAGGGACGGGGTTTTACATGCTCGTCTCAAACTCCTGACCTTCAGTGATCTGCCTGTCTTGGCCTCCCAAAGTACTGGGATTA
CAGGCGTGAGCCACTGCGTCCGGCCCGGATTTTGCCTTTTAAATAACACTATTCAGTTCCAGATGTTTGGAAAGACATAAGGAATTTGAACTAC
TTCTGTAATTTTAGATGGTCTCATAAATATTGTGAAACTCAGCATTCTAAACACGCTTTCTGAGCTAAATCTTGTTTAGTTTTCACCATGCTTT
AAAGATTAGTTGTGGCCAGGCACAGTGGCTCACGCCTGTAATCCCAGCATTTTGGGAGGGTGAGACGGGTGGATCACCTGAGGCCAGGAGTTCG
AGACCAGCCTGGCCAACATAGTGAAATCCCGTCTCTACTAAAAATACAAAAATTAGCCGGGTATGGTGGCACAAGCTTGTAATCCCAGCTACTC
GGGAGGCTGAGGCAGGAGAATCACTTGAACCCAGGAGGTGGAGGCTGCAATCAGCTGAGATCGTGCCACTGCACTCCAACCTGGGTGACAGAGT
GAGACTCCGTCTCAAAAAAAAAAAAAAAAGAAAGACAAAAGATTAGTTATGACTAATAAATACAAGTACGAAGTGGCCCTTGGGTCAAGATAAG
TCTGTTGTAGACTTTTTTTTTTCCCCTTGACACATGGTCTCACTCTGTCACATACGCTGGAGTGCAGTGGCAGGATCACACCACAACCTATCCG
GGCTCAAGCCATCCTCCCAGCTCTGGCTCCCAAGTAGCTACGACTATAGGTGAGTGCCACCACGCCTGGCTAATTTTTTTTTGCAATTTATAGA
GACAGGGTTTCGCCATGTTGCTCAGGCTGGTCTCAAACTCTTGGCCTCAATAGATCCTCCAGCCTTGGCCTCCCACAGTGCTGGGATTACAGGT
GTGAGCCTTGTTTGCAGAGTTTAGGTCCCAGAGAATATAAAGACACTCAAAGTATCTCAACCTCTTGCAACACCTCTTGGGCATCAACAACAAC
GCTACTAGAAATAAGCAGTTTGCCTCTAGAGAAACTTCAAGTAAGCACAACAAAGGGCAAAGTGACACAAGATAACTGTGGAATGCAAGCAAAC
AGCAGCAGCTGGTCTGTATTTTTTTAAATGGCAAAGTCACAAACAACAGCAACTGCTTTTAGAGTGAGCAGGTAGTTTGCTTTCTTTTTTTTCA
AATGCAACTCACTTTTTAAGTGATGACATGCACTTGCGGGTGGGTAGGTGTGAGTTCATTTGTGTTTTGAAATCCCAAATTAATGAGCATGATA
AACCGCTATTGCTGGCCCTGTCTGACTCTCTACTCTGAGTAATTGGTGGGTTCCCCCCAACCTTCTCCTAACCCTCACCCTTTTTCCCTTTCCA
TTGACTTGGGACAGTCCTTGTCAAAGTGCCAATCACAGTGGGAAGGAGGAGAAGGGGGGAGGTCACAGTGCATGGGATTCAAGGTCACAGTGGG
CGGAGCAACGGGGATCACCACGCAAGTAAGTCAAGTTCCCGCTGCTCAAGTCCAGCTGTCTCCCACGGTAGTGCAACCCTTGGCGGACGACCCA
GGACGCGTTGACGCGGCAGTCGCGCCATCTCTTCTTGCCTGCATTTATCTGCGCTGTTTGAAGCCGTCTGACCCATCAGGACCCAGAGGCTGTC
TGATCACATTATTGGGCTGTCTGCTGTCTTCGGCTTAGGAGATCCTGGTTGGCCTGAAGGGAAGAAGATCAGAGGAAGACCTATCGAGGATGGG
TTTCTCCTGCTTCTCCTCGGGTTGGCGCTGCCCAGGATCCGCTTCCTGGCCTCGGTGTACTCGGCTTCCCACTGTGCCAGGGACTTGACTGGAA
GGGCGGGCCTGCTAGCGGACTTGGGGCTGCTGACCACACCGTTGCTGGTGGGCCTCTTGAGGATGCGGACCTGTGGAGGGGGTCCCGCGGGAAA
ATTATCATCCTGAATCACAATGGGCACTTTGGGAGATTTGAATTTCCTGCTTTCTGTGTGATCTTCAGTTTTTTTTCCAGACGTCTATTTCCCC
GCTGTCTGCCCTCTCCTCCCAGCTCTCAGCAACCTCCTCATATTCCATCTTACTCGCCACTTTCCAGATCGCTTGCTTTCTTATTTCCACATTT
TCTCTGACTTTTGCAGTATTCAATATTATTACCTGATTCTGATTTTTCAGACATCACTATATGGTCCTTGGCTTTTTGGTCGTTCCTCTCATTC
CTTTCCTGTTTCAAGCTCTGTTCCCAGCCTAAGCTTTTTACCACCGAATTCTGTTCTGTGACCCATAACTTAAAACTAACCCAACTTTTCATTC
CCTCCAGACTTTTTTTCGTAAGCAGTATCATCATGCTTTAGGTGGACACTGAGTCATACTGCTGTGGTAGTGCTGCTACACGTAGTTTTGAATA
CCAGGTTCTTGAGTGAATCCTTTTTACTTCTCTCTCTCTCCCCCACCCCCGCTTCTCCCTTCTGCCTTCATTTCTGACCCTTCTTTTCTGGTTC
CATTAGAAAAGGACTAATCTTATCAGTTCTGCCTTTTTTTTTCTGCTCTAATAATTTTGTCAAGATAATTTTTTCAAAGCACAAGGCCAATGAC
AAGGGGGAAAGTCGGTCCAGAAGGCAGCCGGCCCGACTATTCTGAGTTTGAATCTACTCTTCGTGGTCCTGTTAAAATACAGTTTGAAGCAAAT
CACTTGTTTTTATGCTTCTAATGTCTACTCTGTCGAAAGCCCAAATTTCCTTGCTTGGCATTTAAGGAGACTCCAAGTTCTTAAAACTTCTTCT
TGACTTTCATGCAAGTCAAACGGATTTATTTATTGTATCTCAAACAGTCCTCTTATATTTTCCTTTCTGTATTTTTTGATAATTTTCTTGTGCC
TGCAATATTCTCTGCTTTTATTTAAGTCTCACCATCTTTCAACACACAAAATATGTGTGATCTCTCAGGCCTTTGTGAACTGCCTCCAGCATTT
ACTAAGCAATTAATTCTGTCTCTGAACTTTTATAGCACAAACCCATTCGTTCACTTGATATTTAACAAATATCAACCTCTATCACTTATCTCTT
TTTTTTTTTTTTTTCTTCTCAGATGGAGTCTTGCTCTGTCACCCAGGCTGGACTGCAGTGGCGCGATCTCCCCTCACTGCAACCTCTGCCTCCC
GAGATCAAGCGATTCTTCTGCCTCAGCCTCCCAAGTGGCTAGGATTACAGGCGCCCGCCACGGGGCCCGGCTAATTTTTGTATTTTTAGTAGAG
ACAAGGTTTCACCATCTTGGCCAGGCTGGTCTCGAACTCCTAACCTCGTGATCCACCCACCTCAGCCTCCCAAAGTGCTGGGATTACAAGCGTG
AGCCACCGTGCGCAGCCTATCACTTATCTTTTCATGCTTACATTTTCTCACTGCTTGAGATTTTCTTTCATCCAGGGTCAAGCACTGACTCTAT
TAGAAACCCCACTGTATATGATCTGATGAAGATGACATTATCTTTTTAAAAGCCACATATTAAATCTCTTAAGTTAATAATATTGGCAATCAAC
TTAAATCAACTGAGTGACCACTATGTTTAAGGAAGTTTCCTTTCTGGTAGGCTGGGAACCGCGAGAAGGGAAGGATATAACTTTATAAAAAAAA
AAAAGCTGCAGAAGGGAAGGATATAACTTTATAAAAAAAGGTCCTTGTTCACAAGGAGCTAATCACTTACTGGCCACACAACAAACGTGTTCCT
TCTTTGCAATGGCTGTGTTTTTGGGTTTAGCTAACTCAATTCTTTATGTCCTCAATTTATGAGACCGCATCAAAAACGTTTTTGCCACATCTCT
GTGCGAAAGTAGGTGAGTCAGAATGAGTGCATAATATATAAGTATATATTTTAATCATAATGAATGTGTAGATTAACAAACCCAAACTTTGTTT
TTGTTTTTTTGAGAGTCTTGCCCTGTCGCCCAGGCTGGAGTGCAATGGCATGATCTTGGCTCACTCCAGCCTCTGCCTCCCGGGTTCACAGGAT
TGTCCTCCCTCAGCCTCCGGAGTAGAGTAGCTGGGATTACAGGTGACCGCCACCACGCCCGACTAATTTTTGTAGTTTTTAGTAGAGACGGCGT
TTCCCATGTTGGCCAGCTTGGTCTTGAACTCCTGACCTCAAGTGATCCACCCGCCTCGGCCTACCCAAAGTGATGGGATTACAAGCGTGAGCCA
CCGCGCCCAGCCAAACCCAAACATTCTAAAAGCGCAGAGTAACCGCTCCCCTCCCCGCCAACGGTAACCAGCATCTTCGTTCTCCAACCAGAAC
AGCTGTATGCACCGGTGTATAAGCCTGCCTTAAGTGCTATTTTTAATCTTTTTTAAAAACAGGCCTTAAAATAACTCATTTGGGTACAACTCCA
GCGGCTGGTGGAGTGGGCTTAATATATTAAACAGCTGTTAATTTTGGTTTCTTTTTGGTAACAGCCACACGGAGATCCGCATTTGTCGCAGTTT
CCACCGCGGGCGGGAAGTGTAAACACAAGAAATACAAACATAGCGCAACGGCTAAAGGAGTGTCACAGCGCCAAACCTTGCTGGCTCCGCGCCA
GGCCGAGCCCCACCCTCTCAGCTCGCGGCCAACACCCCCACCCCGCCTCACAGCCCGCCGCGCCCGCGGGGCGACACCCCCCACTCCATCATCC
CGGAGGTGGTGCGGCCGAGCCCCGGACCCAATTGGCGGAACCGCCGCCGGTTGTGTGCGCGCGCACAAATGCCCGGATGCGCCGCGACGACCCG
CGCGCTCCCCTCGGGCGGTAGGGGGCGCGCACCGAGGCACCGCGGCGAGCTTGGCTGCTTCTGGGGCCTGTGTGGCCCTGTGTGTCGGAAAGAT
GGAGCAAGAAGCCGAGCCCGAGGGGCGGCCGCGACCCCTCTCACCGAGATCCTGCTGCTTTCGCAGCCAGGAGCACCGTCCCTCCCCGGATTAG
TGCGTACGAGCGCCCAGTGCCCTGGCCCGGAGAGTGGAATGATCCCCGAGGCCCAGGGCGTCCTGCTTCCGCGCGCCCCGTGAAGGAAACTGGG
GAGTCTTGAGGGACCCCCGACTCCAAGCGCGAAAACCCCGGATCGTGAGGAGCAGGTACTGGCCCGGCAGCGACCGGTCACTTTTGGGTCTGGG
CTCTGACGGTGTCCCCTCTATCGCTGGTTCCCAGCCTCTGCCCGTTCGCAGCCTTTGTGCGGTTCGTGGCTGGGGGCTCGGGGCGCGGGGCGCG
GGGCATGGGGCACGTGGCTTTGCGGAGGTTTTGTTGGACTGGGGCTAGGCAGTCGCCGCCAGCCAGGACCCCGCCATTTCCCACCGCTCTCGCG
GCGGTGGGGGTGGGGGTGGTTCCGAGGTCTCCCCGGGAGTTCAGGGTAAAGGTCACGGGGGCCGGGGGCTGCGGGGCCGCTTCGGCGCGGGAGG
TCCGGATGATCGCAGGTGCCTGTCGGGTCACTAGTGTGAACGCTGCGCGTAGTCTGGGCGGGATTGGGCCGGTTCAGTGGGCAGGTTGACTCAG
CTTTTCCTCTTGAGCTGGTCAAGTTCAGACACGTTCCGAAACTGCAGTAAAAGGAGTTAAGTCCTGACTTGTCTCCAGCTGGGGCTATTTAAAC
CATGCATTTTCCCAGCTGTGTTCAGTGGCGATTGGAGGGTAGACCTGTGGGCACGGACGCACGCCACTTTTTCTCTGCTGATCCAGCTAAGCAC
CGACTTGCTTGTAGCTTTAGTTTTAACTGTTGTTTATGTTCTTTATATATGATGTATTTTCCACAGATGTTTCATGATTTCCAGTTTTCATCGT
GTCTTTTTTTTCCTTGTAGGCAAATCTGCAATACCAACATGTCTGTACCTACTGATGGTGCTGTAACCACCTCACAGATTCCAGCTTCGGAACA
AGAGACCCTGGTTAGTATTTTTGTCTCGTGTAACTTTTAAGAATAATTTATTTTATGAAGTGATAAACTAAATTTCGTATACCTCAATTGTAGC
ATGGCTCTGTAAATAAAATTGTATGTGCATAGCTTAAAGTGTGCTACCTCTGGCGTAACTGCGTGGAGTTAAAAACTGTTAAGAACTGGTCAGT
ATTTTTTTAGCCATTTGCCACATTTGCTTTAAAAATTAGTTCCATTACATTGTTAAGCGTGGTTGAAGTTACGTTTGTTACGTGACTGATTTTT
TTTTCCTTTTTGACCTCCCAGTATTTAATTTTTAAAAATGGTTTCTAAAAGTCAAAAAAATTATTCGTGCTTGTTTTAAAGATTTTTGTCATTA
GAGAAATTTTAAAGTAAAACCTGAAAATTCCAGGCTTTTTGCTCCATGTTTCCTTTTAGATTTTTTGTGTGCGTACCCACATATATTTACATTT
GAATTTAAATCTATGTTATTGTCCTGTTTGTTGTACTAACAAGATGAAACTGTAGTTGTTCTGTGACTTGCATCCTTGTCAATAAATAAAGTCT
ACAGAATTCTTTTTAATGGCTGCATAGTATTCCACAGCATGAGTATACCATTTTAAAAATTATTTATGCCTTTACTGATAGGTTTTTAAAAATT
GCCTCCTGTTTTTGAGTATTACAGATAGTGCCGCTTTGTACATGCATCCCGTGTGACTATTTCTGTAAGAAAGATTTTATAGAATTATAGGCTG
GCCTCGGTGGCTCACCCCTGTAATCCCATCACTTTGGGAGCCCAAGGCGGACCGATCACCTGAGATGAGGAGTTCAAGACTAGCCTGGCCAACA
TGGTGAAAACCTGTCTCTACTAAAAATACAAAAATTAGTCGGGCATGGTGGCGCGCGCCTATAATCCCCTGCTGAGGAGGCTGGGGCAGGAGAA
TCGCTTGAACCCAGGAGGCAGAGGTTGCGGTGAGCCAAGATTGCGCCATTTCACTCCAGCCTGGGCGATAAGAGCGAAACTCCGTCTAAAAAAA
AAAAAAAGAAAAGAAAAAGATTTTAGAGAATTAGAACTCCTGAGTTCTCAATTTTACTATTTGATTGCTACTGGTAACTTGCTCACCAAAAGGC
TCTAACAGTTTCACTCCTGCCAATACTGAATATCACCAATCTTTAATTATTATTATTATTTTTTTTTTTGAGGCGGAGTCTTGCTCTGTCTCCC
AGGCTGGAGTGCAGTGGCACAATCTCGGCTCACTGCAATCTCCGTTCCCCGGGTTCACGCCATTCCCCTGCCTCACCCTCCCGAGTAGCTGGGA
CTACAGGCGCCCACCACCACGCCCCCCTAATTTTTTGTATTTTTAGTAGAGACGGGGTTTCACCATGTTAGCCAGGATGATCTTGATCCCCTGA
CCTGGTGATCCGCCCGCCTCGGCCTCCCAAAGTCCTCGGATTACACCCGTGAGTCACTCCGCCTGGCCTCTTTTATTATTATTACTATTTTTTT
GATAAAAGGTACTGTACCATTGTTTAAATTCATTTTTCTCTAGTTTCTTGGTGAGGCTGGGCACCTTTCCTTTTTGTTTTTGTTTTTGTTTTTT
TTCAGACAGAGTTTCACTCCTGTTGCCCAGGCTGGAGTGCAATGGCGAGATCTTGTCTCATTGCAACCTCTGCCTCACGGGTTCAAGCGATTCT
CTTGCCTCAGCCTCTGGAGTAGCTGGGATTACAGGCATGCGCCACCACGCTCAGCTAATTTTGTATTTTTAGTAGAGATGGGGTTTTTCCATGT
TGGTCAGGCTGGTCTTGAACTCCCAACTTCAGGTGATCTGCCTGCCTCGGCCTCCCAAAGTGCTGGGATTACAGGCGTCAATCACTGCACCAGG
CCTCCATTTTGTTAAGTCATTTATTTCTTCTGGGACTTGCCTAGTCTTATCTGTCCATTTTCCTTTTAGTTTTTTAAAATTTTTCTTAGTAATT
GGAGTAGCTCTATGTGTTTCAAGTATATTTAACTTTTGTTGTTTACTAATGTAGCATTTAATTTTATGTTGTCTTTTCCCCATTGAGAACAATT
CTGTGAAGTAAAATTTGTTGGCTTTTGAATTTCATATCATGCTTTGGAAGAACTCTCCTGTCCCAAGATCTTGCAAATATATTCCTATATTTTC
TTCTACATTTAAATTTTTTAAATATTTAGATCTTCACCTGTAATTTACCTTCTTGTTCTTCAATGTAAGATTACAAATGCTATTATCTTTTATA
GCTGTTTTCTCATTAATACATGTCTTTTAAGTCACTAATATACTGATGCCTTTCCATTACAGATTTTTTTTTTTTTTTTTTTTTGAGACTGAGT
CTTGGTCTGTTGCCCAGGCTGGAGTGCAGTGGCATGATCTCGGCTCACTGCAACCTCTGCTTCCTGGGTTCAAGCAATTCTCCCGCAGCCTCCC
GAGTAGCTGGGATTACAGGCACCCACCTCCACACCCGGATAATTTTTGTACTTTTAGTAGAGATAGGGTTTCACCATGTTGTCCAGGCTGGTCT
TGAACTTCTGACCTCCTGATCTGCCTGTCTTGGCCTCCCAAACTGCTGGGATTAAAGGCATGAGCCACTGCGCCTGGCCCACACCTGGGTAATT
TTTGTATATTTAATAGACACGCAGTTTCACTGTGTTGGCCAGGCTGGTCTCACACTCCTGACCTCAGGTGATCTGCCTGCCTCGGCCTCCCAAA
GTGCTGGGATTACAGACCTGAGCCACTGCACCTGGCTTCCATTACAGATTTTTACTTTGAATTATTTTATCTAATTTGAAGCTAATATAGCATA
TAATAAAAATTCAGGAGAAAAAAGGTTATTTTTAAATCTTTTTTGAGAGAGTCCATTCTTTAGCCTGAAAGTAAAGTGCATATGTAAGCACAGT
TAAAAAAAAAAAAGTGATCAGAAAAATTAATAATTCAATTCTATATGTATTTTAAATTTTTCAATTCTTAAATAATATTTGTTTTATTGATTAG
CTGGAAATAGGCAATTTTTAAAAATCTGTTTTTAAGGCATCCCCAATGGGGGTGCTGTCAGATTTTAAAGTTAGACAGAGGACCGGCGCATATT
AAAGAGAGGTGCAGAGGTACCAGTTTGTGTGGTAGTGGCAAGCTGTAAAGATACTTGAGTTTTGCAGATTTTGATAAACCAAAAGGAAGGGAGA
AAGTGCATAGTATATTACATTCCCCTCCCCCATGACAATTATTTTTCTCAAGACCATTTGTAAAACCTCTAGATAAGGGGCAGGCAAATGTTAG
CCTGTCAGCCAACTTTGGCCTGTTACCTGTTTTTGTTTTAGTTTTTAAATTTTTTTTGTAGAGGTGGAGTCTCTCAGTGTCGCCCACGCTGGTC
TTGAACACCTAGCCTCAAGCAAACCTCTAGCACTGTCTCCCAAAGTGCTGGGGTTATAGGCAAGAGCCACCTCTCCCAGCCAGCTGCCTTTCTT
TCTGTAACGAAAATTTTACTGGAATGCAACCATGCCCGTTGGTTTACATAGTAGCCATGCTTTTTACTTGGATAGAACCATTTGTATGAAAAGC
TTAAAATACTTACAGTCTGGCTCTTTACAGAAAAAAATTGACCCCTAATCTAGTTGGCAGGCTCCTTGCATACAGGTCATATGTCTTATTTGTA
ATTTCTTTTGCAGTACCTACCACTGTCCAGTGCATAGTAGAAGCTCAATAAATCTTTCTCAAGTAGATATTTGAAATCTACACTAACTAAGAGG
CAGCATGATATAGTAGGAAGAAAATGCTGAGTTGTAGTTGAGGGACCTGGGTTGTTATCTCTGATCTGTTCTTAATTACCCTTGTCAGCTTGGG
TTAGTTAGTTAGGTTCTCTAGCCTTCAGGAACCTAATCTTTAGAAAGAGAAGATTGATAACAGGACCCACTCTAAAGATTTATTCATTTCTCTT
TGATTCTCTAAGTTAGCTTGCAATAAGCTCGTTGGATCAGTACGGTAAGCTCATTGGATCTCAGTAATTTATGGTTGTTTGTAAGGCAGTAAGC
AGGTAATATAAATAGCTGAAGGAAAAAGTAATCTTTGCTCTTTTGGATTGGATACTATCTGTGATCACAACTGATACTTGATGATTCCATGATA
CTTGCATAATCATTAGATCCTCCCCAGCATTTTTTCCAAATCCCCTTTATTGAACTTGATGGATATGTTTGCTGCAGGGCCTATAGTTCTGGGA
TAATTTTGGAAGTATAATAGCAGTTCTTTTCTCTTTATAGGTTAGACCAAAGCCATTGCTTTTGAAGTTATTAAAGTCTGTTGGTGCACAAAAA
GACACTTATACTATGAAAGAGGTAAGCTGAATCAAGAGATAAGTAGTATCTCACTAGTTACATGTAGCCATACTTAAAGTTTTCAAGACCATGT
GGAGAAATTGGCCATATAGAAGGATTTTTCATTAAGCAGCAACATTTAATTTTGTGGTCGTTTGGACTATATTTTAAAGCTGAAAATTCTAATT
ATACTCGAGTTTCATTTCTCAGCTAGGAACTCAGATAAATGGAAGCCCCGTAAGGGTGCTTGACCATTTTATGCTGTCAACCCTTTGGTAGACT
CCTTCCCAGAATCATGTTTTTAAATGTATCAAATAAAATGTATACAATTACAAAGGAAACATACTAAAATACGGTTACCAAAATAGTAAACTAG
TTTGTGATATGTGTGCTTTTGTTATTAACATAATAAATACTAAGATTTAGAAGAAGATATAATAAATATAATGTTTTTTTGTTTTTTGAGACGA
AGTCTCGCTCTGTCACCCAAGCTGGAGTGCAGTGGCACGATCTCAGCTCACTGCAACCTCCGCCTCCTAGATTCAAGCCCTTCTTCTGCCTTAC
CCTTCCAAGTAGCTGGGATTATAGGCACCTGCCACCACGCCTCGCTAATTTTTTGTCTTTTTAGTAGAGATGGGGTTTCTCCATGTTGGCCAGG
CTGGTCTTGAACTCCTAGTCTCAGGTGATCCACTTGCCTTGGCCTCCCAAAATGCTGGGATTATAGGCATGAGCCACCATGCCTGGCCAATAAA
TATTATCTTGATATAGTGAGGAATATAAGTCATATTTTGAAATGTTTGCCATAAGTACAGTATGATAGGAAAACACCTCTGATTTTTGTTGGTG
ATGAAATCACAGGTATTAATACTGTTGTGATTTGTTGCCTACATTTATAATCGAAGGAAAAGCTAAATTCTAGTTAGAAGTTTGTGAAAATAAG
AATAGAATTTTTTTTTTCCCATCCAAATTAATGGACCCCCTGAATTCTATCCAAGGACTTCTTGGGCATCCCTGGATCCCAGGTTAAGAACTTC
TGCACTAGAGATACATGAGTACACTATACTGATCTTTCTGGGATAGAGGTGAGCTGATTCATCACCATATATTCTATCTAATGGTTCCAGCATT
TTAATGCATTCCCCACCTTTAAATTTGTGCACAGAAGCATGATTTTCAGTGACAGATTGAGCCACCTTAGGCAGAATTTCAGTGTGATTGAAAT
ATGCCTGTTCTCTGTCTCTCCCACTTAGTTTATGGGACTCAGATTACTTAAAACATTTAAGTTTCTTTCTTACAACGGTATAGTGGGGCAGGAA
GAGCTTCCATTTTTCTTTTTCCTCTCCAGCTATACTTTTAGAAACTTCCTTAAAGGATGTTTGGTAGAATAAATCTAAGTTCTCTTCCTTTTTC
CTTTCCCACTGCTGGACAGCAATCTGTCCAATCCACAGTCACATAAGAATATTCCTTTAAGGCCGATGCCTGCTTAGCCAGTTAAATCCAAAGA
CAGTGTTTGTAGGAAAGGGCCAGGTTAAATGGTATTTTTAAGGCTAATTTGGGATTGACCTTATTATCATTGGATAATCAGTTAAGGAAACAAA
AAAGTATGGATTTAGCAGTAGATAGAAATGAGAAAATTGGCCAAGGCCATCATAAAGACTTAGAATGCTTATGCTAAACTATGTAACAGTAGTG
TATGTATTGTCTGATATAGTTCTCAGTTATAGGATCTTTGTTCTGGGGCACACAGGAAGGTAGTGAAAGCTAGTATGGGTAGTAAAAAGAGCGT
TGGATTAAGAGTCAGAAGAGCTGGGGCCAGTTTCTTCTTCTTTTTTTTTTTTTTTTTTTTTTTTATGTGACAGTTTCTCACTCTCTTGCCCAGG
CTGGAGTGCAGTGGCATGATCACTGCTCGCTGCAGCCTGGACCTCGTGGGCTCAGGTGATCCTCCCACCTCAGTGTCTGCAGTAGCTAGGACTA
CAGGCTTGTACCACTATGCCTGGCTAATTTTTGTATTTTTTTGTAGAGATGGAGTTTCACTATCTTCCCCAGGCTGGTCTGGAACTCCTGGGCT
CAAGGGATCTGCTTACCTCGGCCTCCTAAAGTGCTAGATTTACAGGTGTGAGCCACTGTGCCCAACGCAATTTCTTCATTTCTAATACAGTGAT
AATAATCTTATGAAATATCAGAATGAGATAATACTTATAAAAGTACATTGTAAACTGTAAAATGCCATATGTATTTAGGTAGTTGTTAATAGGT
TTATATCTGGATATCTTAAAAATGTATTGCCAACTTCTTGTCTTAATGCAGCACAGGGAATATAATTTAACTTTTATTAATGGTTCAAACTCAT
TATTTTGATTATTTATCATAATATGGAGTAAATTGATACCTTAGAGGGTTTATTTCATTCTCAGAATTCTCTCAAACTGTTTTGTAGCTGTCAT
TGATTGATTGTTTTTCTGTCTTCCTCCTCTGGTGACCTCAGAGGCTATTGAGGTTTATAGTATTTATGACTATTTACTAAGTGGCTCCAGACCA
CTGCCATATTTTAGTTGATTTTTGTTTCTGCAACTTTTTTGGCTATCAGTTTTTTATTTTCCTGCCTTTTCCCTTCCTAATATGTTAGTATCTA
AGTATCTGGGCAGAGTTAAAGTCTACAAGGAAAAAAACCTCACATTTTAACGTTTGCTTAAGTAAATAGAGAAGCAGTTATTTCTGCTTCTGTC
AAATTAAATGGAAAAGGCTTAAAAGTAGCTTTTTTTTTTTTTTTTTTTTTTTTTTTCAGATGAAGTCTCACTCTGTTGCTTAAGCCGGAGTGCA
GTGGCGCAATCTCGGCTCACTGCAGCCTCCACCTCCTGGGTTCAAGCAATTCTCCTGCCTCAGCCTCCCTAATAGCTGGGATTACAGGTGTCTG
CCACCATGCCTGGCTAACTTTTGTATTTTTAGTAGAGATGGGACCAGGATGGTCTTTATCTCCTGACCTCGTGATCCATCCCCTTCGGCCTCCC
GAAGTACTGGGATTACAGGTGTGAGCCACTGCGCCCAGCCAAAAGTAGCTTCTAAGTACAAAATGGTTGTTCTACATAGTTCTGGATATGGTTC
CTGGTTGTTTACCCCTATTCAGATAAATAGGATATTATTAAATGTATTTACAACTAACATTTAGTTTTCTTTAATGCTCAGAAATCATATTTGT
ATTTCAGGTTCTTTTTTATCTTGGCCAGTATATTATGACTAAACCATTATATGATGAGAAGCAACAACATATTGTATATTGTTCAAATGATCTT
CTAGGAGATTTGTTTGGCGTGCCAAGCTTCTCTGTGAAAGAGCACAGGTAATTCTTCAGTTTAGTCCATTGTAAAAAGCCATCTGGGCTAACAT
TTCAGTTCACCTCTACCCTCATTCACTTTTGTCAGAGAAAAACTGTTCAAACATATTAAAGACATGCTGAAACTTAATTTTTTAGCTCTGCGGC
ATATTATTTGAGAACCTGAGCTCTGGCATCTTATAAACCAGTGTTTGAAACCTAGCCCAATCATTTACTAGTTTTGTGACTAGATAAATTAACC
TTTTTAAACCTGCTTCCCCATTTATAAAATAGGGATAATTAAATACTTCATGTGGAGGTTAAAGCTCTTGAAGAGAGACGTTGTATAAAAAAGC
ATAGTTTTGGGCACATACAAAGCATTCAACTATTACCTGTACCTATTATAACTTTTTATTCCAGAAACAGTATACCACCACGTGGTAAAGCCTT
ACATTTGAGCCTTAGTTATTTTGGAGATCATTTTCATTGTCACCTATCATTATGGCACTTAACCAGCAGAATTTAACCCAGGTAATATTTCTAG
AAATAGGCCTGGTGCGGTGGCTCACACCTGTAATCCCAGCACTTTGAGAGGCCAAGGCGGGTGGATCACCTGAGGTTGGGAGTTGGAGACCAGC
CTGACCAACATGGAGAAACCCTGTCTCTACTAAAAATACAAAATTAGCTGGGTGTGGTGGTGCATGCCTCTAATTCCAGCTACTCGGGAGGCTG
AGGCAGTAGAATCACTTGAACCAGGCAGGTGGAGGTTGTGGTTGAGGTGAGCCGAGATTGCGCCACTGCACTCCAGCCTGGGCAACGAGCAAAA
CTGCATCTGAAAAAAAAATTTTTTTAATATATATTTTTCTAAAATTATTCTTTTTTTTGTTTGTTTGTTTTGAGAGGGAGTCTTGCTCTATGGC
CCACGCTGGAGTCCAGTGGCATCATCTTGGCTCACTGCAACCTCCGTCTCCTGGGTTCAAGTGATTCTCCTGCCTCGGCTTCCCGAGTAGCTGG
GATTACAGGTGCCTGCTGCCATGCCTAATTTTTGTATTTTTAGTAGAGACAGGCTTTCACGATGTTGACCAGGCTGGTCTTGAGCTCCTAACCT
TCGGTAATCCACCTGCCATGGCCTCCCAAAGTGCTGGGATTACAGATGTGAGCAACCACACCCGGCCTACATTTCGAATTCTTTGTCACATTTG
GTTTAGCACAGGCAATCCGTGTTGAGCCTTAGCATTCATTACATTAATAAATGGAATGAATACGTTCACCTGAGACAATTAACTAGCTTCTGCT
AGTATTTAATGCTCAGTAGTATAGCTGAAAAGATGATAATTAAATGGGATTTTATTTTATTAAAAAACATAACTTCCTCAGCTGAGCAAGGGAT
TTTATAACTTTAAAACAACCTTATTATTGTAAACATAGTATATATTATTATTGAACATTAGGAGATGACAGAAAACTAACAAAAGTAAAGGAAA
AAAAACGACTGTAGTTTGTTAACAAAAGGTATTTTTACCAGTCATTTGTGTATTATGTGCAACTGTGTGTTTTAACCTAGTTATGAATATAGTA
CTATATTTAAATTTCATCTAGCTTCTTAATTTGTATTATAATTTGTATATTATATATTATAATATACATATAATATAATTATATATATTACAAA
TATATGTATAATTATTATTTTTTATTGATGAGTCACTTCTGTTTAATATCCATATATGTTGTCATTTTATACGTGGCCTTGGTATATATGGTTT
AATTTTATAAATTTTAAAAATAACTATATTGGTATATTGGTGATTTCTTTACCTATTGAATATTGAATCTTCTATTTTTTTTCTTTTTTTTTTG
AGATGAAGTCTTGCTCTGTTGCCCAGGCTGCAACCTCTGCCTCCTGGGTTCAACCGATTCTCTTGCCTCAGCCTCCTGAGTAGCTGGGATTACA
GGTGCACACTACTATGAGCAGCTAATTTTTTGTATTTTTAGTAGAGATGCGGTTTTCCCATGTTGGCCAGGCTGGTCTCGAACTCCTCACTTCA
AGTGATCTGCCTGTCTTGGCCTCCCAAAGTGCTGGGATTACAGACGTGAGCCACTGTGCCTGGTCTGAATATTGAATCTTCGGATAATGTTTGG
AAGTATCATTTCCTTCCACTTGAATTCTAAATGTTGAGAGATAAGAAATAGGAGAAATTACTGACTTGAAAAGGATATGAATTAAAAATATTGT
GGGTTTAGGTTGCTGTATCCTTATTCCCAAGGATGAAAAAAGATAGTTGGGATTCATATTTCCTCTTAATATTGAGTGAGAAACAATATTTTGT
CACAAACACTCTCTTAAATCCTTAGTTTAAAAACAAAAGGAAAAATCCATTGTGACATCAACGAATACTGGGGTAAATGAATTATCCTCCTCTT
AGGATATAAACTTCATGAGGGCATATACATTTCTGTTTCATTCTTTGTTTTCCCCCGTGTCTGGTACATACTACCAGTGACTGGTACGTGGTAG
GTTTTCAGTCTGTATTTATTGAATGAATGAGTACTGCTTTATCTGTTAATAAGTTTCTTTTTTTTCTTCCCTGAGTCGGAGTTTTGCTCTTGTT
GCCCAGGCTCGACTGCAATGGCCTGATCTTGGCTCACCGCAACCTCTGCCTCCCGGGTTTAAGTGATTATCCCGCCTCAGTCTCCTGAGTAGCT
GGGATTACAGGCATGCGCCACCATGCCCAGCTAATTTTATATTTTTAGTAGAGATGGGGTTTCTCCATGTTGGTCAGGCTGGTCTTGAGCTCCA
GGCCTCGGGTGATCTGCCGGACTCGGCCTTCCGAAGTGCTGGGATTACAGGTGTCTGTGAGCCACTGCGCCCGGCCTCTGTTAATACGTTTTAA
GATCAAGAAAGGAAGTTGAAGCTTGATGAAAGTCAAGATTATAATCAAATTCCTATTTAATGGATTTTGCGTAACTCAATAGTTTTTTTGGCAG
TTTGTATTTAATGGATTTTGCATAACTCAATGCTTTTTTTTGGCAGTTTGCTACTAAGCACAGAGCTAAAAACATTCCTGTTTGAAAATAAGTA
TGTTCAACCTCTTCCTGCTTGCATACTCATTTTTTGGGGGTCTTCTGGTAAAGTCCAAACAAAGCACATTTCAGGAATTGGTAGTCTGAAATCT
TTCAGCTAGAGAGACTTTAGTAATTATTAAAAGTAGCTGTACATAATCATTGTGCTACTAATTATTGTGCTTTTAAGTGCCTACAAGCTTGCCA
ATGATAAATTTGGTTTTGAATGTGTGCAGTAGTTCATACTAAGTATGTATGTAGAAGTCTGGTTAGATCCAGCTTAATACAAATTTTTATTCTA
AAATGTACATCTCTTGTTATTTTTTTTTTTTCTGTCTACAAGGAAAATATATACCATGATCTACAGGAACTTGGTAGTAGTCAATCAGCAGGGT
AAGTTAATTTTGAGCATCATGGATAAATACCATAAAAACGTTTTAAAGACATTTTTGTTTATGTGCATATGTTTTATAATTGTGATTCTCTTTA
AAAGTTGCTTTAATTAAATATTGTAATAAAAGTATGATAAATTTATTAGAAGTACATATGAACTAAAACCACATACTGAGGTTCTAATGTAAAG
TTAAATATCCTGTTAGATCAATTTAGACTTGGGATATCAGAGTTAGGATTTATTTTGAAAGGTCTGTAATTTCAAAAGCTCCTGTTTAGGAGTG
ATCTACCTTGAAAATGTATTGAAAGGCTTTGGGAAATAATATTGTTACCTAGGTAGGACCATGTGTAAGGATGAAGGATGAGTCTTTTTCTTTG
GTTATAGACAAAATTTTGTTTACCAATTTGTGGAAGTGGAATTTTATGTTCCTACTTCCGTTTCTTAACTGGTTATTTTTGGGTCACATCTCTC
TTTAATAAGCTGATAAAAGCATTGGGTTCTTGTTCCAGAAAGATGCACATGTATATATACATGGGTAAGTCAATAAGTGTTTTACAACCTACTT
TCCATGAGAAAAGCCCTGATTTATGTGCTTGCTGACTTCCATAGTATAATACTCTCATTTGAAGGCTAAAAACATGGAGTTGGGAAGAGATGTA
CACAGTTTGCTTTTTTTTTTTTTTTTTTTTTGAGAAGGAATCTTGCTCTGTCACTCAGGCTGGAGTGTAGTGGCATGATCTCCACTCACTGCAA
CCTCCGCCTCCCAGGTTCAAGCAATTCTTCTGCCTCAGCCTCCCGAGTAGATGGGACTACAGGCGTATGCCACCACGCCCGGCTAATTTTTGTA
TTTTTAGTAGAGAGGGGGTTTCAGCATGTTGGCCAGGCTGGTCTCGAACTCCTGACCTTGTGATCTGCCTGCCTCGGCCTTCCAAAGTCCTGGG
ATTACAGGTATGAGCCACTGCACCCGGTCTCACAGTTTGCTTTTGAGTGCTGCTTAGAGCTGTCTCTAATACACTACACTGCTCCTAAAGCCCA
TCCTCGAACTACAGTTAAGAAATGCTCTTAGGCCAGGTGTGATGGCTCATGCCTATAATTCCAGCACTTTAGGAGGCTAAGGCAGGAGGATCAC
TTGAGCCGAGGAGTTCAAGACCAGCCTGGGCAGCATGGCAAAATCCTAACTCTGCAAAAACTACAAAAATCAGCTTGGTATAGTGGTGCATGCC
TGTAGTCCTAGCTACTCAGGAGGCTCAGGCAGGAGGATTTTTTGAGGCTGGGAGGTCAGGACTGTAGTGAACTGTGATCATGCCATCCAGTCCA
CGTGACAGAGCAAGACCTCATCTCTTAAAAAAGACAAAAACAAAACAAAACAAAAAAACACCTCTCAGGAGCTTGTTTAGTTCCTAGAATGAAT
TGACCACTCCCTTGTACTTCCTCTATTCCATATTCAGATTTTATTGTAAAATTGCTTTGTTTTACTTGTGGGTTTTTTTGTTTGTTTTTGAGAT
CGGCTCTCACTCTGTCACCCTGCTTGAAGTGCAGTGGTAATCTTCGCTCACTCCATCCTCCACCTCCAGGGCTCAAATGATCCTCCCCCTCAGC
CTCCCAAGTTGCTGGGACTACACATCTGCTCCACCACGCCTGGCTAATTTTTCTGTATGTTTGGTAGAGACGGTGTTGCTATGTTGCCCAGGCT
AGTCTTGACCTGAGCTCAAGAGATATTCTCACCTCGGCCTCCCAAAGTTTAGGCGTTACAGGCATGAGCCACTGCGTCTGGCTGTTGCACTTGT
TTATATTTTTGTTACCTGTGTCCTATTCAGGTTTGCATTGTGCATCACACACTATAGTGTTTTATTAATATGGTATTTAATAAATGTGTTGAAT
TGAATACTTATTCTTCCAAAGTTAGCATTTAAAGCCCAGAAAAGTATCTCCATTTTATCCCAAAATAAAAGTAGTTATTAGGCTGATGATTTGG
CATTTTATTGTTTTAAAGCTCTTTTTTTTTTTCAGCTTTAGATTGTATCCTTTTTATTTCCTTTTTTTTTAATTATTATACTTTAAGTTTTAGG
GTACATGTGTACAATGTGCAGGTTGGTTACATATGTATACCTGTTGTTTTAAAGCTCTTTAAGAAATTGTGTGATAGCTAAATATACAATTGTA
GTATTTGTAGTAGTAGTTTGAGTTTTCTGAAGTATGTAACCCTGATGTATTCATTCCTTCATTTGTTTAAATAAACTTTGGCACATTACTAGAA
AAATTGTATTATTGAGATGGAAACTTACAAATTACTTATTTGCAGTCTGAGTTTGGTTTAGATATCAGTAGAATTAACTTCAGAACTCCTATTC
CATGTTCTCAACTTTGTCACTTTTTTTTTTTTGAGATGGAGTCTCACTCTGTCACCCAGGCTGGAGTGCAGTGGTGCGATCTCGGATCACTGCA
ACCTCTGCTTCCCGGGTTTAAGTGATTCTCCTTCCTCAGCCTCCCGAGTAGGTGGGATTACAGGTGCCTGCCACCACGTCCGGTTAATTTTTGT
ATTTTTAGTAGAGAAAGGGTTTCACCATGTTGACCAGGCTGGTCTCAAACTCCTGACCTCAGGTGATCCTCCCACCTTGGCCTCCCAAAGTGCT
GGGATTACAAGTGTGAGCCACTGCACCCACCCAGCCTAGGGCTTCCTTTTTATTACATCTTTTTTGTAGCATCTGTTTATACTAATCCAAAATT
CCTGGACAATATAACCTATTATGTACAACTTAAGAAAATTAGTGTAATGCCTTACCCATAGTATAAAGAGAAAATTAATCTATGATAATGCATA
ATTTCAAAATGTTAATGTCCAGGCATGAGTTCACTGTTAAGATGAAAATGTTTCCAAGGGGGGTAGTAAAGGGTATTTGATGATAATTGTCTGT
ATATCCCAACTCTGAAACTTTGACTTTTGAGCTCAAAGTCTGTATATCCAACTACAAATGAAACCTATGTGCCTGAATAACTCAGTTTGTTATC
TTCCCATCCAATCTGTTTATCTTTCTAAAGTTTCTCTTTTAGTGAATGGTACCACTCATTTATTCACCCAAGTTGGAATCTTGGAATCATCTTA
ACTCCTTTCTTCCTTGCCTTCTATATCAAATACCAGGTCTTGTTGGTTTTTACCTATTTAATTTCTCTGGAATTTGTTTTCCATGCCTTAGTTT
AGGCTTTAATAGTTTTTAGTTTGTATTATTGCAATTGTCTAATACTGGTTTTCCTGCCTCTCCCCTCTTTTTCTTATGTTTTGCTAGAGTCATT
TCTCACTCTTCTGCTTAAAATTACCATTTAGGGGTTCATTATTGCTCTCTGGATGTAATATTTTCTGTGAGCTAGAAATCAGTTTCATTTCTTG
GACAAAAATCCTTTTTAATGGTGAGTGGCTGCAACATCGCATTAAGGAAGATTCTGAACTATCTGCGGGGAACAATGCAGTGATAAGGGAATGA
CAGCATGAGTCCTGCTTTGGCTAGACCACAGGATCCTTTACAGTCTGAACCTGCCTACATTCCAGTAATAATCAACTGCTTGTGGTGTCCTGCA
ACAGGAACTGTTGTTAGTTTGCTTTTGGATACTTTTTCACATGGCCTTTTCTTGGTCTGGAATGGCCTTTCCTAGCCCTATTTTCATATTCTCC
TACAAAATATTTCCTGATTCTTTGTTTCTCAGACACTCCCTGTCCCTACCAAAATAATCACTCTCCTGTCTCTCTCCTAATTTATCTAACAGTC
TTTTAATGTCTTGATTATACTTTACTCTTCTACATTAAAGTTGAATTATTTTATTTACATCTGCAACATTTAGTATGAGGATGCCACCTGGAAA
ATACATGTTTAATGTTTATTGAAAGGTTAAATTGCATAAGGGTTTGTGTTAGACTGATAGCATATCTACTGAGTAGCGCCCCGCCGCCCCCCGC
CCACCACCAAGTTTCTGATCCTTTTTCTTTTCTCTCAGAATCATCGGACTCAGGTACATCTGTGAGTGAGAACACGTGTCACCTTGAAGGTGGG
AGTGATCAAAAGGTAATCTAAGTAAATTTCTCATTCTAATGTAATATTATTTGCAAATTGGAAAGGTTATTTACAACAAGTTAGCTTACTCGTT
ATGTTAAGTTTGTTGTATTTTATTTTTTTCCTAAATGCTTAGGACCTTGTACAAGAGCTTCAGGAAGAGAAACCTTCATCTTCACATTTGGTTT
CTAGACCATCTACCTCATCTAGAAGGAGAGCAATTAGTGACACAGCTATATATGAATATTTATTTGACGCATTCACACAGCTTTTTGATATTCT
TTCTCTAATGAAATTAGTGCTTTTAGACTTAATTAAATTGTTCCCTTTTTTTGGTTGAGATGAATTAACCTCTGAGTTTTTTTCATTCGTGATT
TTATTTGATTTACAAATTGCTTATTTAGCAATATTTTTCTGGCTGACTACAGCAGGCACAGTTTACTCTGCCCCACTGGAGTTTATAGTTAGCC
AACTCTCTGTTAAGATAGTAGGAGGTGGCTGGGGTGTGGTGGCTCACGCCTGGCTCACGCCTGTAATCCCGCCACTTTGGGAGGCCGAGGCTGG
CGGATCACGAGGTCAGGAGTTCGAGACCAGCCTGACCAACGTGGTGAAACCCCATCTCTACTAAAAAAAATACAAAAAGTAGCTGGGCCTGGTG
GCGCACACTTGTAATCCAGCTACTCAGGAGGTTGAGGAAGGAGAATCACTTCAACCCGGGAGGTAGAAGTTACAGTGAGCCGAAATTGCGCCAC
TGCACTCCAGCCTGGGTAACCGTGTGAGACTTCGTCTAAAAAGAAAGATAATAGGAGACAGGCATATAAACTCTATTTTCACCATTATTCTTAG
TCACCTTAACAGTTAAATTTTTAAATTGTTATTTTTAATAAATGGTAGTACATACCTATGAGTTTTAAAACAGAAAGTAAATAGCATTTTAGAA
ATGAAGAGATAAGGGCCGGGCGCACTGGCTCACGCCTGTAATCCCACCACTTTGGGAGGCCGAGCCGCGTGGATCATGAGGTCAGGAGATCGAG
ACCATCCTGTCTAACATGGTGAAACCCCATCTCTACTAAAAATACAAAAAATTAGCTGGATGTGGTGGCGGGTGCCTGTAGTCCCAGCTACTCG
GGAGGCTGAGGCAGGAGAATGGCATGAACTGCGGAGGCAGAGCTTACAGTGACCCGAGATCACGCCACTGCACTCCGCCTGGGCCACACAGTGA
GACTGTCTAAAAAAAAGACAGAGAGAGAAAATAGTTGACAGAGAGAAAATAGTTGAGAACAGTTAGTAGACGTAGTAGACGAGAAGGCTGTTGC
CTGAGGAAGTCGCACTAACTAAGACCGTATGATTCAGATGAAAGAGAATGTCAGATCAGTGAAACAGAATAAATGAACCCAGACCAGAATCTCG
TACATGCGGGCAGAACACAGGAAGGGCAGAGGTGTCTAGGGCAGAGGTGGAACTAGAACAAATGGTAGTTACTTGGGGAAAAGGTGAAGTTAGA
TCTGTACCTTATGCCAAAATGAATTTCAAATGAGTTTAAAAGTTAAATGAAAAATAGAATACAACATATTTGAAAGATAGTCACTTTAAATTTG
ACTGTTAATATCTGTATTACATAAAAAGTCTTCCCAAATCAATAAGGAAAACATTAAAACTTCAAATAGCAAAAACGGCAGACAGTTCACAAAA
ATTTCTCACAGTAAATACGAATGACTAATAAATATGGGGAGAGGGTGAATTTTGGTGATTTTTAGCTTTACAGATAGTAAAAAATGCCAAAAGG
GTGTCCTTTTGATCTATCAAATTACTAAAAATAAAATTTTTACTCATCCTTACTCATCAGTGCTAATAACTTGTGTATTAGCACTGATAAACTG
TTGGTCTGTAAATTCGTAAAAGTGGGTAAAAATTGATTAAATTTTTCGGATTATAAAAAAGCTTAGATCGCCTGGTGCGGTGGCTCACACCTGT
AATCCCAGCACTTTCCAAGGCCGAAGCGGGTCGATCTCTTGAGGTTAAGAGTTCGAGACCAACCTGGCCAACATGGTGAAACCCCATCTCTATT
AAAAATACAAAAATTAGCCAGGTGTGGTGGCAGGCGCCTGTAATCCCAGCTACTTGGGAGGCTGAGGCAGGAGAATCGCTTGAACCTGGGATGT
GGAGGTTGCAGTGAACCAAGGTCGCACCACTGCACTCCAGCCTGGGGTACAGAGTGAGACTCCATCTCAAAAAAAAAAAAAAAAGAAAAGAAAA
AAAAGTCTTAGAGTTCTTAACATTATCCTAGTAACTCCATTTCTAGTAATCTATCCTAAGGATGTAATAAAAAATTCAAAGATTTATATGTAGA
GATACTAATTACAGCATTATTTATAATTGCAGCCCGGCCAAGATCACCTTTTTAAAAATAGGGAACACAAACATGATTAAGAACTCACGTGCAG
AACTTGTGATCTCGATAAAACGTAAAAATCCCGGCCAGGTCCAGTGGCTCACGCCTGTAATCCCAGCACCTTGGGAGGCCGAGGAGGGAGGATC
ACGAGGTCAGGAGATTGAGACCATCCTGGCTAACACGGTGAAACCCCGTCTCTACTAAAAATACAAAAAAAATTAGCCGGGCACAGTGGTGGGC
ACCTGTAGTCCCAGCTATTCAGGAGGCTCAGGCAGGAGAATTGCTTGAACCCAGGAGGTGGAGGTTGCAGTGTGCCGAGATTGTGCCATTATAC
TCCAGCCTGGGGGACAAGAGTGAGACTTTGTCTCAAGAAAATGATAAAAAAAGTCCTTTCAGAAATCTGTGATACTATCTCATTTTAATTTTTG
TCATTCTCATGGGTGAAAAATGATATCATTTCACTTTGCATTTCTTTGATCCCTAGGAGGTAAGAGTTTTTTTTTCTATTACTCAAGTACATGA
CTCAAGATTTTTCATATGTTTATTAGTCATTTGTATTTCTTCTGTGACTTGCTTTTTCCTGTTTCCTTAAAAGAAAATACAGTCTATCTTGATT
TGGTAGGACTTTGTATAATATGTATACTATGGGTAATTTTTACTATATATGTTGCAGATATTATCTTCGAATTTGACCTTTGCCTTTTAACTTT
TGTTTGCTATTTTATTTTGTCATGTAAACCTTGACATGGTCTAATCTTGATAGTCTTTTTATTGAGGACTTTGCAGTATTATGAAATACTTCTC
CACCCCAGCATTATAAGAATATTTTGTTATAGGTACTTGAATGGTTTTGTTCTTTATATTTAGATCTTTAATCCACCTGCAATTCATTTTTATG
TCTAGTATAAGGTAGTATTCTCATTTATGTCTAACGGATTTGTCTAACATTCTGACCCATTCAGAGATAATTTATTATTTAAAATGAAATGGAA
ACTTTTTACTGGTTTTGATTTCTCTTTAAAATATAGGGTACTCAACAGCCGGGCTTAGTGGCTTAGGCCTGTAATCCCAGCACTTTGGGAGCCT
GAGGCAGGAGGATCACTTAAGGCCAGGAGTTTGAGACCAGTGTGGCCAACATGGTGAAACCCTGTCTCTACCAAAAATACAAAAATTATCCAGG
CATGGTGGTGTGCACCTTTAATCCCAGCTACTTGGAAGCTGAAGTCACAAGAATCACTTGAACCTGGGAGGCAGAGGTTGCAATGAGCTGAGAA
TGTACCACTGCACTCCAGCCTGGGTGGTCGAGTGTGACTCTGTCTCAAAAGAAAAAGTGTAGGGTACTGAAGAAATTGAAACATTAAGAATACC
ATATGAGTAAATTAAACACTTTGGCTCTTTTCGGAAAAAAACAGATGAGCTCTTATATTTTAAAGTTTGGTTTTGACAGAAAAAAATTCCTAGA
TTTTTTGGTTAATAAAAACTTTATTAGATAGATTAAATTGTGATGTATCGACATAAAGTTCTGAAAGAAGAATACAAAGCTTTTTAAAAATAGT
ATTCTCAGCCTAGGCAACATGGTGAAACCCTGTCTATGCAAAAAATACAAAATGGTGCATTCCTATGGTACCGTTCCTATGGTACCAGCTACTC
GGGAGGCTGAGGTTGAGGTGGGAGGATCACTTGAGCCCATGAGGCAGAGGTTGCAGTGAGCCGAGATTGTGCCTCTGTACTCCAGCCTGGGTGA
CAGAGCAAGACCCTTTCTCAGACAATAAATAAATAAACAAATAAATAAATACACACAGATAGTGTTCTGCTGTAACAGTTGGACAGATTCAATA
AAACAGTGTTAACTTTTGAACTAATTTTATTGAAACTAAGTTTCTGTACAAATAGGTACTCAAAACAGCTCAATTTTCTAAATCACAGTACAGC
AATTTATTTTTTTTCCTTACATATCCAGAAGAAAATTCAGATGAATTATCTGGTGAACGACAAAGAAAACGCCACAAATCTGATAGTATTTCCC
TTTCCTTTGATGAAAGCCTGGCTCTGTGTGTAATAAGGGAGATATGTTGTGAAAGAAGCAGTAGCAGTGAATCTACAGGGACGCCATCGAATCC
GGTAATGTTCTCATTTTAAGTAAGGCAAGACTCTTACTGTTCAAAGTCTAGTCCTGGCAGTCCTAATAAGGATACGGATAGAATGTACATGTGT
CTTACGAGATTGATAGAAAACACAGTGCTAAATTTTACTTTAAAATAAAACTACTATATTGATCTCCACCTTCAACCCAAGGTATTGTGAGAAA
TGTGGAAAATAGTGGAGTAACACCGGTATTGGTAAAATTAGTAGTAGTATTAGTAATTATCAATGTCACTGTATGTATTAGAGAATATTTGTGG
ACCACTGCACCAATAGTACAGTCAAATAAATTGGAGTATACAGTTGTTTGAGAATTTGAGAGTTACACTTTTTAAAAAAGGAACAAAACCAAAA
ATTTGGTTCAGTTAAATATTTTAGCATTTTAAGGCAAATTTGACTATTTAGAGTAAAAATATATTTTATTACAGCCATCAGCAAAAAAGTCAGC
ATAGTCTGAACTTAACATTTGCCAAATAGGTCTAGACATCAGGTAAGTTCTATTTACTTATGCTGTAAAATACAGGTTTATACTGGGCTGGGTG
CGGTGGCTCATGCCTCTAATCAGTACTTTCGGAGGCTGAGGCGGGTGGATCACCTGAGGTCAGGAGTTCAAGACCAGCATGGCCAACAAGATGA
AACCATGTCTTTACTGAAAATACAAAAATTAGCCAGGCGTGGTGGCGCATGCTTGCAGTCCCAGCTACTTGGGGGCCTGAGGCAGGAGAATCGC
TCGAACCCAGGAGTTCCAGGTTGCAGTGAGCTGAGATTGTGCCACTGCACTCTAGCCTGGGTGACAGAGCGAGACTCCATCTCAAAAAAAAAAA
AAAAAAATGCAGGTTTATTATTGCATGGATGACGGCAGAGTATCAGTACTTTCTCATTACTAATACAGACTTCCAAAATATTAGTCAGCAGCAT
TTCTTAAGAGATCTCACTGAAAGAAGTTTGGTAAAAAATTTTTTTGTTAACAAGAATGCTTGACAAATGCAATATTTTGTTTTGTATGTCTTTA
ATCAACCTTGTCCAACCCATGCCCTGTGGGCCATATGCCAGGATGGCTTTCAATGTGGCCCAACACAAATTCATAAACTTTCTTAAAATATTAT
GATTTTTTTTTTTACAATTTTTTTTCTGCTCATCAGCTATTGTTAGTGTATTTTATGTGTGGCCCAAGACAATTCTTCCAATGTCGCCCACGGA
AACCAAAGGATTGGATACATTTTTTGGTAATATGGCAGTGTCTCATGGCCATTATTCTGGGTATTAGTAATCATTGTATAGTACTCTAGAACAT
GTAGGAAGTGGAACCAATTGTGATAGTAATCCTAGTCTTTTACCTATTCTTGTTACTTCCTGTATTATCTTTTTTTCTCTTCCAAAGCAGTGAT
TGTATGAACGCATACCTGCCCTCTAGAGTTACTGTACCTAACGGAGCTGTTACTTATGTAGACCGCTAGATGGCATGATGAGCTCCTGCTCAGT
CTGAGAGCAGGTTCTTCATTTGTAGATATTTAAGTTTATACCAAATTCCATACAGTTGAGATGGCACTGCAGATACAGTGGTAGTCAAGGTAGA
TATGGTTCTTGCCTTCATTGGGAGATAGATCATTAATGACAAAAATGAAAACATTTAATAAATCCAGTGGAAAAAATAGGCTCTTGAGCGGAAA
TATATGTGATAAAATTGAATCCAATTAAAACTTGATGAGTATCCAACCTACAAGTTTGGTTAAAAAGAGAATTATTATACCCTATTTATTTATT
TATTGACATTGAGTCTCTCTGTCTCCCAGGCTGGAGTGCACTGCTGCAATCTTGGCTCACTGCAACCTCCACCTCCCCGGTTCAGGCGATTCTC
ATGTCTCAGCCTCCTGAGTAGCTGGGATTACAGGCTCCCATCACCACACCTGGCTAATTTTTGTATTTTTAGTAGAGATGGGGTTTCACTATGT
TGCCCACGCTGGTCTTGAGCTCCTGACCTCAAGTGATCTGCCTCCCTTGGCCTCCCAAAGTGTTGCCATTACAGATGTGAGCCACCTGCCCGGA
CCCCTATTTAATGTATAGTTTTTGTTAAAGTTATATCAGAATTCTAGCTGAATGATATTTAGAGTCCTTGTTCCTGCTTTGTACCTGGGACACT
GCCTTGTTACTGATATGGCTTTCAGCAGTAGAGGAACACCAGGTTTTTTCTTTTGAGTTGAATTAGATAAAACCACACGGACACACGTGGAGTG
GTTTTAAGGAGCAGACCGTTTAATAGGCAAGAAGGGAGAAGGCAGAAGGAAGAAGCTCCCCCTTACACAGACAGAGGGAGGGGGGCTCTAAAGC
TGAAAGAGGAGACCTTACATTCTGACAATACTAGCCACTTTTATGTGACGGCTGGAGGGGGTGCTGTCTTATTTGCATAGGGCTCAGAGGATTG
GTTTGACCAGGCATGTCATTTAGCCCTCAAGAAAACTGGCCCTCCCACCCCACTCCTTTAATACACAAATGCAGGATGCCATGACATTTTACAC
ACGGGGTTATGTGGGCGCGGCCATGCTGTTAGGTACCTGATGGAGCAAGGGCAAGAGGACAACGGTGGGAATCGCCATGTTGGGTGGACCCTCT
TGCATTTGCATCTTAAAGGTTGCCAGCCTTTAAGAGCCAGGGCTTTTATGCTAGACAAGAAATTTTTCTGGAGCTACGAAAAACCTTCCAAGGA
CCACTTTTCCTCTCCATTTGCCTAAAATAATTTCTTAATAACTCGTGTGGAGTAGAGGGGTATTTCTTTTTTTCTTTTTGTTAGTCCTGTCCTG
CATTCTCTTAAAAAATCCTATCTATAAAAAATCTCAGCCGGGCGTGGTGGCTCATGCCTGTAATCCCAGCACTTTGGAAGGCCCAGCCGGGCGG
ATCACCTGAGGTCAGGAGTTCAGGACCAGCCTCGCCAACATGTTGTGAAAACCCATCTCTACTAAAAATACCAAAAATTAGCTGGGCATAGTGG
CGGCCACCTGTAATCTAGCTACTCAGGAGGCTGAGACAGGAGAATCGCTTGAACCCGGGAGGCGGAGGTTGCAGTGAGCTGAGATCACGCCATT
GCACTGCAGCCTGGGCAACGAGAACGAAATTCCATCTCAAACAACAACAACAAAATCTCGTTTTTCAGCTTAAGTCCCTAGTTGTCAAAGCTTT
TGGTAGGGCCAGTTTTTTTTTCTTCTTCGTTTTAATTTCCCTCATTTGAGAATGTTGTAGTCATCATTGGGTGTCATCATTCACCAGTTTGTGA
AGGGAGTTAAAGGAAAGTGCATTCCTCTCCCATCTTTTCTTTCTTTGGGGTTTAATAAATTGTGGGAAACTAAGACTGTGTTCTAGACTGTACA
CCATGCAGTTTATATTATGATCTTCTCTCATCTTTGCAGCCTCAGATTCCATTTTTAGCTAAGACTGGGGTTTTAAATAACTTGTTTAAGGTTC
CTACAACTAATTGTCACAATTGGAATTCAAACAATTCTAGGTATTTTTGACTACAAAGATCTAAGATCTTTGCAGAGCAAGCCTATCTCATGCT
TAAAAAAATATATATTTTTTAAATTTTTGAGACAGTCTCTCACTCCGTTCCCCAGGCGGGAGTGCAGCGCATCATCATGGCTTACTGCAACCTC
AACCTCCTGGGTTCAAGCAATCCTTCCTCCTCAGCCTTGAGAGTTAGCTGGGACTACAGGTGTGCACCACCACACCTGGCTAATTTTTTTTACT
TTTTTTTTTTCACAGATGAGATCTTGGCCTGTTGCCCAGGCTGGTCTCAAACCGCTGGGCTTATGTGATTCTCCTGCTTTGGCTCCCAGAGTAT
TGGGATTACAGGCATGAGCCACCACCTCCAGCCTGATGCTTTTTAAATATATACTATTTAGGTCTGGTGCAGTGGCTCATCCTTGTAATCCCAG
CACTTTGGGAGGCTGAGGCGGGCGGATCACAAGGTCAGGAGATCGAGACCATCCTGGCTAACACGGCGAAACCCCGTCTCTACTAAAAATACAA
AAAATTAGCCGGGCGTGGTCCCCGGCACCTATAGTCCCAGCCACTGGGGAGGCTGAGGCAGGAGAATGGCGTGAACCCAGCAGGTGGAGCTTGC
AGTGAGCCGACATGGTGCCACTGCACTCCAGCCTGGGTGACAGAGCGAGACTCTGTCTCCAAAAAAAAAAAAAAAAAAAAAAAATATATATATA
TATATATTTATATTTAAATAATGTATAAATATATAATATATAATTATAAATCTATTATATATTAATGTATATTATATATTACATTGTTATATAT
ATTTATATAATTATATATTTATATAAATATAAATATATATATTTATATAAATATAAAAATATAATTATATAAATATAAAAATATATATTTATGT
AAATATAAATGGGCAGGCACCTGTATATATTATATATATTACTATTTATATAAATATAAATATATATTTTAAATATTTATTTTATATATTTTAA
AAATATATATATAGAGAGATAATTTAATAGTTTCTGGGGCATTCTTTTGCGAACATTAGCCAAAACTTTAAAAACCACTCCCAATATTGCATTT
TTTCATCGTATTTTTTATAGTATTTTTATAGTATCCTAGGACAGCAGTTGGCAAACTTTCTGTAAAGAGCCACATAGTTAATTATTTGGGCTCT
GCCGGGCCATCGTTTCTCTCACAGCTACTCAGCCCCGCTCTTGTAATCCACGAGCAACTGTAGACAACAACTCAACAAATAGGCATGGCTGTCT
TCAATAAAACTTTATTTATAAAAGTCGATGGGTGATGGGCCACAGTTTGCAGACCCCTACCGTAGAGTATCTTTTCTGAGATTTAATGTTTCTT
GTGATTTACCCCCTTATTCTAAAATTAGTGCACTAAAGACTTTAGTTAGTTGAAGTATTTGGTTTGTTGGGTTACTTTGTTAGTGTTAATTGTA
TCCTAACTTGACTTGTGATTCTAATCTGATTGGTAGTAGAGCCCTTGTTAGGAATTTGAGCTGCAACTTGATGAATGTTGCTTTTACTCTCCTT
CCTAACATTACTCTAAAAAAGTCTTTTGATGTCAGAGGCTGTAAAATAATATACTTTGTTTCTGTTTTTAAAACTGATACAGATATGGAAATCA
TTTAATCTAAGCTCCTTTTCTAGATGAAGTAGCTACAGCCTTTAGAAGTTAAATGATATGGGCTGGGCGACGTGGCTCACAGGTGTAATCCCAG
CATTTTGGGAGGCGGAGGTGGCGGATCACTAGAGGTCAGGATTTCGAGACCAGCCCAGCCAACATGACGAAACCCCGTCTCCACTAAAAACATA
AAAATTAGCCGGGTGTGGTAGTGGACACCTGTAATCTCAGCTACTTGCGAGGCTGAGGCAGGAGAATAGCTTCAACCCCGGAGGCGGAGGTTGC
AGTGAGCTGAGATCATGCCACTGCATTTCATCTTGGGGGACAGAGCAAGACTCTTGTCTCAAAAAAAAAAAGGGCCGGGCATGGTGGCTCACAC
CTGTAATCCTAACACTTTGGGAGGCCAAGGCGGTTGAATTGCTTGAGGTCAGGAGTTCAAGACCAGCCTGGCCAACATGGTGAAGCCCTGCCTC
TACTAAAAATACAAAAATTAGCCAGGCATGGTGGCATGCGCCTGTAGTCCCAGCTACTTGCGAGGCTCAGGCAGGAGAATTCCTTGAACTTGGG
AGGTGTAGGTTGCAGTGAGCTGAGATCAGGCCACTGCACTCCAGCCTGGGTGATGGAGCAAGATTCCATCTCAAAATAAATAAAATAAGTTAAA
TGATGTTCTTTAAGGTTAAATTAGCTACTTAGTGGCAAGTGTAGAATAAGCCATATCCCGACTTCTAGACTTTTTCCAATTGTAGCCTTCTGCT
TATATATGCTCCTACCCTTAGCCACTGACAGCAAATATTATTGCCCTGAAGGTCTTACTACCTTCTTATACAATTTATTGAAGTCCTGAAACGA
AGAATCAGATGAGCAGCTACAGAATTTTTTTTAATTGTCTAAAGGCTCTTTAAAAGAAAATCTCAAAGTTTATTAAAAAACATAAGTATCTATG
ACTCGAGACATTTTTCTAAGAAAAAAAACCCATAAGTATTACAAGTGTTGTGTCTTGTGACGTGTATTCTACCAATTTGGACATAGAAACATGA
GTGACAGGTTTTAGCTCAAAGTATATATAATTCAGATGAGAAACATGCCTGCAAAATTATGTTTTGCATAATTTATGTGTGAGACTATATAATT
CATTATTATACAAGTAGTAAGGATAATTAAAGGTGGAAGAGCCTTTTCAGTTATGGTATTGACAAAGGCTTAGTCAAACAAGGATGAATAGGAT
TTTGAAACTGAAATTATTCTAGTTAGAGGGGGAAAGTGTGGAAGTTGAAATGCCAAGATTAGTTGAGCAAGCAATCTAGATCTGGCGGGATTAT
CCATATTTAGTAAGGGAGGAGGGGTGTCTAGTTGAAGACAGACGAAGATGTTAATACAGTCACACTGTAGGTACTTTCGATGCCAAGAGGCTTT
GGTGTTTTTCCTTTATGCAGTGGGGTTTTGAACAGGGAAAATAATGTAGTAATAACCTTGAAACCTTAATCTAGTTTCAGTATGCAGGATGGAT
CTGAGGAGGAAATGTGCGTGGCAACCGGCTCCGGGATGGCTGGCTGGGGGGCCTAGTCTTCTGCCCGCCGATCTCCCTCGGGAAGTCCCGGATC
AGAGCAGCAGGCCCATCCCCCAACTGTTACACCCTGCTGGCAGCAGCAGAGGCACAGGGATGAGTTAGGAAACAGATACAGAGGTCAAGAGGTG
ATGTTTATTAAGTTATATATTTTTTTCTTGTTTTAGGATCTTGATGCTGGTGTAAGTGAACATTCAGCTGATTGGTTGGATCAGGATTCAGTTT
CAGATCAGTTTAGTGTAGAATTTGAAGTTGAATCTCTCGACTCAGAAGATTATAGCCTTAGTGAAGAAGGACAAGAACTCTCAGATGAAGATGA
TGAGGTAGTATTTTTTTTCCCCTCTAATTATATTGGAAAATTATTAAATATTTTCTATGTTCATTGACTTTGAGATTGAAATAATATTATTCAG
ATTTCACTTGAAATCTTTACCTCTTGATTTGTTTAAACTAACACATTGGTTTGTGGACTTGAGGATTTCATAGTTCTTTATCATCTGATTTATA
TTATTATATTACTACTAATTGCCAAGAAGTCAATAGACCTCAATGAACATGCTTATTATAATGGTCTGTTCACTTTTAAAAACATATAATTCAA
CTACTGTTTTAATATTAACTTACTTTCTATAAAAGTAAAACATGCATACAGTTAAAGTCAAGTAGTACCCTTAGAGATCTGTTTCCCAGAAGTG
ACTGCCTTTAACATTTCTAGCTATTTCCCTATTATTTAATATCTCCATATTATTTATTTATGAAGTAAAACCACCTAGCTGAATGTTTTGTTTT
ATTCATCCTAAACATCCTTTGTATTGACTTTTACCATTGTGGGTAAGGATTTCTCTCTCCTCCATTTTTTCCCCCTTTACACTCACTTACTCTA
TTTGATATTGTCTAAGGCTTTCTCATATATTGTAGTACATGATATTTGTTTAGGACTTATTACTAGGAAGCCTTCTGATTGAAGGAAATACGGC
GATGAATTGATGCTAATGAATGTGTTTTATTAGGTATATCAAGTTACTGTGTATCAGGCACGGGAGAGTGATACAGATTCATTTGAAGAAGATC
CTGAAATTTCCTTAGCTGTAAGTATACATCTACTTTTTTAAGAAATAAAAATTTCATTAACCTCAAGATTAGGAGACTATATCTAGCTTCTTTC
TGAAATGAACTGATTTTTATAAAGTTAAAATGTTTTTGTAAAGTCTGAATAATTTAAAGCATTTTTCTTTTATTTGTTGTGATGAGACCTGTAG
CTATAATTTTTATTTTTAGGTGCTGGAATTTGAACTTTTTTTTTTTTTTTTTTAAACAGGGTCTTACCCTTCTCCCAAGCTGGAGTGCAGTGGT
GCAATCTCAGTGCACTGCAGCCTCCACCTCCCAGGTTCAAGTGATTCTCGTGCCTCAGTCTCCTGAGTAGCTGGAATTACAGGCATGCACCACT
ATACCCCACTAATTTTTTTATTTTTAGTAGAGATGGGGTTTCACCATGTTGGCCAGGCTGGTCATGAACTCCTGACCTCAAGTGATCTGCCCAC
CTTGGTCTCTCAAAGTGCTGGGATTACAAGCATGAGTCACTGCCCAGCTGAATTTGTACATTTTGATGTTATTTTGGAAAATTTCAGTGTATCT
CCAGTATACTCATCACCCAGCTTTAACTATTACCAACATTTTGCCAACCTTGTCAAACGTAAACTTTTTTTTTTTTCAATTGAGATAGGGTCCT
GCCCTGTCTTCCAGGCTGGAGTGCAGTGATGTGATCATGGCTCACTGCAGCCCCCACCTCCCAGGCTCAAGTGATCCTCCCACCTCAGCCTCCT
GAGTAGCTGGAATAACAGCTGCATCCCATCACACCCCAGCTAATTTTTGTATTTTTTCTACAAATGTCACCATGTTGCCCAGGATGGTCTTGAA
CTCCTGGGCTCAAGTGATCCACCTGCCTCAGTCTCCCAAAGTCCAAGGATTACAGGTGTGAGCCATCACACCCAGCCAAATGTAAACATTTTTA
TTACTGATTTGTATTATAGAATGTGGTAGGATTTGCCATTAAAGAAATTAACACTTAAATGTTTACATCTCATGCATACTTCACTGACTTCCTG
AGGTATTATAGGTTTTTTTAAAACTATTGTGCTTTAGTTTTTGTTCTTAATATTGCCTTTATTATATTTGAATAGGAAATAAATTCCATTTTTT
CTGAGTTATAGACAGTTACTAATTATTCAAGTGCAAAAAAGGATGAAAATTCAAGAGTTTCCAAAATTTTTACTGTATTAGAAAATAAATAACT
AATTGAATCATTTGATGTCAAGTTGAGTAAAATATTTTAGATACTTTTAATTTTTTAAATCTATTTTAAGACTCAAATTATTTTAGATATTCAT
CTTGGAATTTATTGGACTTTTTGATGCACTTTTACTCCCATATTGCAAGACCTTTTTCTTTGGTTTTATGACCTGTGAAAAACCCCCTTCTATA
ACTTGAAAAAAGAAGAATGAATAGTCTATCTTTATTGCTCCTGTCTTAACATCATTTGTGAGGCAATCTCAAAATGGTTACGGAAATACCTCTT
ACTTAAGAGTTTTCACTTGTTAAATGTCCTCAGGCAAGAACCATGCTTCAGCTAAGGCAACAAGATAGGTTATGTAAAAAGGCTGGGCATGTGG
GAGAGTTTGTTATCCAAATTGCATGGTGGAAAGGTTTGTGGGATAAAACGTTGGGAAAAGGAAGAAGCATTGAGCAGTTACAAAGATGAGAACA
CAGGAAAGGATAGACAGGTAAAGCAAACGATATTACGGTTAGTGACCAAGGATGATAGGTTTTAGCACCAATACTTGCTGTCAAAAATGTTTTA
GCATTTCTCTTGTGGATGGAGTTAGGGAATACTCAGTTAAGCCATGGTTTTAGAGTACTTCTAAGGTAGTTCTAGTCACTGGTGGATTAGCAAG
TCTTTCTCGAGGAGGCAGGTTTCATCTAGATTGATGGGATGGACTCTTGGAATAGCGCCTAGGGTTGAGCCTTTAAGGGAGTGGATATAGGCTG
CATGACACAGTAAAAGATCCCATAGACTTGCTTCAACTAAAGGAAGCAACTGCATTTGTATCCTGAAACAGATAACTTTATAGGTACATGATTA
ATATCACATCACACTTAATATATTTTTAGTTTAGAATTTTTCAGGATGGTAAGGGTGAAAAAAATGGGTGTACTTACTCTACTTTAGGAGAGAC
TGTTACATATTGACCTTTAAAAATCTGTTTTGTGTATAATTGAGACATATAACGTGATGTTTTGACACACATGTAAATAGTGAAATGATCACTA
CAGTCAACCAAATTAATGTAATCCATTATCTTGAATAGTTAACCTTTCTTGTGTGTATGGTTAAAATACCTAAAATCTATTCTTTTACTAAATT
TCCAGTATACCAATATATAACTAACTATAGTCCTCATGCTGTTTACAGTGACTATTTTATATAAAACATGAAACACTGAATATTGAGCCCTATG
ATATACTTTACCTTAGACATAGCAAAGTTGCTAGCATTCCTGTGACTGAGCAGTTAAAGGGTTACAGAAACTGACTGTCTGTCTTATTTCATTG
AAGGACTATTGGAAATGCACTTCATGCAATGAAATGAATCCCCCCCTTCCATCACATTGCAACAGATGTTGGGCCCTTCGTGAGAATTGGCTTC
CTGAAGATAAAGGGAAAGATAAAGGGGAAATCTCTCAGAAAGCCAAACTGGAAAACTCAACACAAGCTGAAGAGGGCTTTGATGTTCCTGATTG
TAAAAAAACTATAGTGAATGATTCCAGAGAGTCATGTGTTGAGGAAAATGATGATAAAATTACACAAGCTTCACAATCACAAGAAAGTGAAGAC
TATTCTCAGCCATCAACTTCTAGTAGCATTATTTATAGCAGCCAAGAAGATGTGAAAGAGTTTGAAAGGGAAGAAACCCAAGACAAAGAAGAGA
GTGTGGAATCTAGTTTGCCCCTTAATGCCATTGAACCTTGTGTGATTTGTCAAGGTCGACCTAAAAATGGTTGCATTGTCCATGGCAAAACAGG
ACATCTTATGGCCTGCTTTACATGTGCAAAGAAGCTAAAGAAAAGGAATAAGCCCTGCCCAGTATGTAGACAACCAATTCAAATGATTGTGCTA
ACTTATTTCCCCTAGTTGACCTGTCTATAAGAGAATTATATATTTCTAACTATATAACCCTAGGAATTTAGACAACCTGAAATTTATTCACATA
TATCAAAGTGAGAAAATGCCTCAATTCACATAGATTTCTTCTCTTTAGTATAATTGACCTACTTTGGTAGTGGAATAGTGAATACTTACTATAA
TTTGACTTGAATATGTAGCTCATCCTTTACACCAACTCCTAATTTTAAATAATTTCTACTCTGTCTTAAATGAGAAGTACTTGCTTTTTTTTTT
TCTTAAATATGTATATCACATTTAAATGTAACTTATTATTTTTTTTGAGACCGAGTCTTGCTCTGTTACCCAGGCTGGAGTGCAGTGGCGTGAT
CTTGGCTCACTGCAAGCTCTGCCTCCCGGGTTCGCACCATTCTCCTGCCTCAGCCTCCCAATTAGCTTGGCCTACAGTCATCTGCCACCACACC
TGGCTAATTTTTTGTACTTTTAGTAGAGACAGGGTTTCACCGTGTTAGCCAGGATGGTCTCGATCTCCTGACCTCGTGATCCGCCCACCTCGGC
CTCCCAAAGTGCTGGGATTACAGGCATGAGCCACCGCGTCCGGCCTAAATGTCACTTAGTACCTTTGATATAAAGAGAAAATGTGTGAAAGATT
TAGTTTTTTGTTTTTTTGTTTGTTTGTTTGTTTGTTTGTTTTGAGATGAGTCTCTCTGTCGCCCAGGCTGGAGTGCAGTGTCATGATCTAGCAG
TCTCCGCTTCCCGGGTTCAAGCCATTCTCCTGGCTCAGCCTCTGGAGCAGCTGGGATTACAGGCATGCACCACCATGCCCAGCTAATTTTTGTA
TTTTTAGTAGAGATAGGGTTTCACCATGTTGGCCACGCTGGTCACGAACTCCTGACCTCAACTGAGGTCACCCGCCTCGCCCTCCCGAAGTGCT
GGGATTGCAGATGTGAGCCACCATGTCCAGCCAAGAATTAGTATTTAAATTTTAGATACTCTTTTTTTTTTTTTTTTTTTTTTTTTTGAGACAG
AGTCTTGCTCCATCACCCATGCTAGAGTGCAGTGGAGTGATCTCGGCTCACTGCAACTTCCGCCTTCTGGGTTCAAGCTATTCTCCTGCCTCAG
CCTTCCAAGTAACTGGGATTACAGGCATGTACCACCATACCAGCTGATTTTTTTGTATTTTTAGTAAAGACAGGGTTTCACCATGTTAGCCAGG
CTGATCTTGAACTCCTAAACTCAAGTGATCTACTCACCTCAGCCTCCCAAAATGCTGGGATTACAGATGTGACGCACCTGGCCTCAGATTTTTG
ATACTCTTAAACCTTCTGATCCTTAGTTTCTCTCTCCAAAATACTCTTTCTAGGTTAAAAAAAAAAAGGCTCTTATATTGGCTGCTATGTAAAT
GAAAATGTTTTTTAGGTTTTCTTGATTTAACAATAGAGACAGGCTCTCCCTGTGTTGCCCAGGCTCCTCTCGAACTCCTGGGCTCAAGAGATCC
TCCTGTCTTGGCCTCGCAAAGTGCTAAGTAGGATTACAGGCGTTAGCCACCACACCCGGCTGTAAAAATGTACTTATTCTCCAGCCTCTTTTGT
ATAAACCATAGTAAGGCATGGGAGTAATGATGTTATCTGTGAAAATAGCCACCATTTACCCGTAAGACAAAACTTGTTAAAGCCTCCTGAGTCT
AACCTAGATTACATCAGGCCCTTTTTCACACACAAAAAAATCCTTTATGGGATTTAATGGAATCTGTTGTTTCCCCCTAAGTTGAAAAACAACT
CTAAGACACTTTAAAGTACCTTCTTGGCCTGGGTTACATGGTTCCCAGCCTAGGTTTCAGACTTTTGCTTAAGGCCAGTTTTAGAAACCCGTGA
ATTCAGAAAAGTTAATTCAGAAATTTGATAAACAGAATTGTTATTTAAAAACTAACTGGAAAGATTGTTAAGTTCTTTCTGAATTATTCAGAAA
TTATGCATCATTTTCCTTCAAGAATGACAGGGTCAGCATGTGGAATTCCAAGATACCTCTTGACTTCCTCTCAAGCTCCGTGTTTGGTCAGTGG
ACGCCCATCCGAGCTCAGCACTGAGAAGTGTTAGTTTCTTTGGGACCCATCTACCCTGACCACATCATGATGTTCATCTGCAGCTGTTGCAAGG
TGTTCAGATTGTATAAACATAAATGTCACAAAAACTTTAAAAGAAGTGCAATTCTCAAAAGGTTAGGTGGACTAAAGCATTCTGTAAAGCAACT
GCTAATAATGAGCTTACAGTGGATTTGAATTTGAAAAATATAGTAACAAGCCTGTCAAATATCTGCAAGAACTATGGAATAAAACTACTGATGC
AGTGAAGACAGTTGAAAAGATCAAACAAATGCCAAGCTATATTTATAATGAACAAATTCAAGAAAAAGGACTACGGAAAGTTCAGGACATCAAA
GAAGTCAGGCAAAACTCATCTTGACCCCTGTTGCAGGCAAAGGAACGCAGCTGGAAGAAAAGATGATATAACAGTTAACAGGATGCAGACATGG
CAGAGGTTTCCTAAAAATCTCATTATCTATAACCATTTCTATATTTACATTTGAAAATCTCCTTTGGAGACTTAGAACCTCTAAATTATTGACT
TATTTTTTATATAAGGTCACTCCGATGAAAGGTGATTACAAAATCATCTACATTGCTGTCTACAAAACAGATAATATGGATGTTTGATCGCATC
TCATTGTTAACTCTTTACTGATATGTTTGTAAATACAGAAGTGAAATGTGGACATAAAATAGTTACGCTATTTGGTTAATGGTACTAGACAACA
TGTAATTAATGACATTCAAAAATTTATGGCTAGTGATATATATAAAGTAAAATTTTCTTTGCACTAAAATATGCCCTTTATTATAGAAGGGAGG
ATATAACGAACCAACACTTTGTATGAAAATAGCTCAAATAATATCTTTTATTTTGATTTTAATATTTCTTATTTTGGTTTATTAGTGTCTTAGA
ACAAAATGGCCTTATATAATGAAGCCTAGTTATGCTGGACTGTTTGGATCTCTTTTAATTGTTCTGACAGATAGTTGGGGATGAGAGCCGAATA
AGGTTTGCCTGALATAACTGACACTATATAATTTCTGCTTTGGCAAATACTAACTTCTAACTTGTCATTCCTGGTAGAACAAGCTTTATTTTTC
GAGCCTAGCAATGATCTACAAGCAGATGTTATCTCAGTGCCTTTTGCAATTTGTTGTGTGGGTTTTTTTTTTTTTAAAGCCACACAATAATTTT
GGAAAACAATGTATGGGTAGAACATGTGTCTGTTAATTGCACACAAAACCACTTTTAATGGGTACAGAGTTAAATTTGAAGGAATAAGTTCTAG
CTGAAGTATTATGAACTCCAAATAATGCTTTCAGGACCTCCAAAGGTAAAAGTACTAATCCCTTTGGCCATTTATTGAGAGAGAGAGAGAGAGA
GAGTAGCGTGACTATAGTTAATGTATTGAATGTTCTTGCTACAAATAAATGATATTTGAGCTGATCGCTGTGCTAATTACACTGATTTCATCAA
TACCCATTGTATGTGAAACAGTACATACACCATATTTACAATTATGTATTTAACATTTAAAATTTCTAATATAAGTATCTCTCAAACTGTGGAT
TAACTTCTTGATTTATATTTAAATATGAATCTTAAGCAAAACAGTGAAAATAACCATCTTGATTTAGTGTTTTTCTCCCATATGTGAATTGTAT
ATACTTAGGTGAAGACAATAAAATCAACTGAACTGTAAGCTTAGAATAGGACTGACGTAATTCTGCACAGCAACTTTACTAATGGTACATTGTT
GCTTCAAAACTCTCTCTCTCTCTCTCTGTCTGTCTCAATAAATCGCCAAACGGATTAGTAGTTTACCTGTGGAGGTCCTCCAAGCATTATTTGG
AGTTGATAATACTTCAGCTACAACCAACCACAATCTCTTTTTTTTGGAGGTCCTCGAAGCATTATTTGGAGTTGATAATACTTCAGCTTCAATT
TGGAGTTGATAATATTTCAGCTAGAACCTAGTAGAATCTGTTTTTTTCCTTTGGAGGTCCTCAAAGCATTATTGGAGTTCATAATACTGAAGCT
AGAACCAAGCAGAATCTGTTTTTTTCTGAGGAGTATCGGTAGCATAAATGTGATTATAAACATAGTACACTTGATATATGGAGGCAGTGACAGC
TATTTTTACAAAATTTAAATCTGCAAATGGATTCAACATCTTTATGGGTTATTAAAATGGCCTGATTTCTTAGGTTCTTTATAGTACACGTGTT
GAAAATATATGATTAAGAATTGTTTCAAGAATGCAATTATTTGATCTTAAATTTTTATGACTTGTTAAAATAGAAATTATTTGAATATCATATA
TTTGGGTAACAAAAGGCACAAGTCTGAATGTGTTTCTTTTTCTGGAATGGCCATGCCTGCCCACTCTAGAAATACAAATATCACTTGGGCAGCT
TGAAGCAGTGGAGCCTCAATGAGACCACCTGAAGAATGTCGTCCCAGTTAGTAGAGTAAGAAAGGCTGGTTCTCCCTTTTTTTTTTGCGTCCCT
CGCCAGCCTGGCCTAAGTGTTCGTGATTGGTCTATAAGGGAGGTACCTGGCACAGGGAGCCGAGTTTGGGTTAGCCACCGTACCACTTGTCAGC
GTGAAAAGTAAGATTGTACTGGCCTGTTTAGTTTTCGGCCTCTTCTTTGAAAGTTCCACCAAGCTGGGAACCTCTTGATTGTGAGGCACAAATG
TAAGTACATCAGAAAAAAACAAAAAAACTGGCTTTAAAGCAGGAGCTTGTGGGCCCCTAACCCAGACGGGGACTAGCTTTTGGCATTATATAAT
TAAGATTTTTTAAATCCTTAATAAGCGTTTTATTTTATTTTTATTTATTTTTTGAGACGGAGTCTTGCTCTGTGGCTCAGGCTGGAGTACAGTG
GTGCAATCTTGGCTCACTGCAACCTCTGCCTCCTGGCTGTGTTCAAGTGGTTCTGCTTCAGCCTCCCAAGTAGCTGGGGTTACAGCACCCTCTC
ACCACGCCCCGCTAATTTTTGTATTTCTAGCAGAGATGAAGTTTCACTATCTTGGCCAGGCTGGGCTCAAACTCCTGACCTCAAGTGATCTGCC
CGCCTTGGCCCCCCAAAGTGCTGTGATTACAGGCGTGAGCCGCCACGCCCAGCCTAATAAGGGTTTTAAAGATAATTAGTGTGTAGGTCTGTAG
GCTTATGATGGTAACCACAAGTTGTTAATGGCATTGTCAAAAGTTTTTAGTTGCGCTTTATGGGTGGATCCTCAATTACATTTTGATTTGATAC
TTATAAAAAGAAAAACTATTTCTTCAGCTTAAAAAATTGTTTAAAACTTTGTGATCATATTGTCTACCATGTAGCCAGCTTTCAATTATATGTA
AGAGGGACTTTTTGACATTTACAAATAATACTTTGAGGTAGATATCTGAAAGCACCAGCACTTGGAAGGTGTTCAGAAGTAACAAATTATAAAA
TGAGCTAACAAACGAAAGGCAAAATAAAACCGTAAAGCAAGCAGATGGGAGGCGTGTTCAGTAACTTATTCATAATGCATCTGAAATGATTGCT
GTACTCAAATATTTAACGTTACAGTAATAGTATTTTGAATGAAAACCATAGTTGATTGTCTTTAGAGAGAGGAGTGGTACTGAAACATACTTGA
ATTCGTATTGCTTTCCTTTAAAGCTCTCCTTTAAAGACTTTAAAAAAAATTCGATAGGCATTTTCATGTTTCAGTCCTACAATCCCACATCTCT
GCTGCCTTCAGAATGCTACAACTTAGATGTCCAGCCAACAGCTTAAAGCCAATTTATAAAAATAGCATCTTTCCTAATTCCAAAATTTCACCTT
TTGTTTGTTTTGTTTTGAGATGCGGTCTTGCTCTGTCGCCCAGGCTGGAATGCAGTGCTGCAAACATGACTCACTACAGCCTCAACCTCCTGGG
CTCAAGCAATCCTCCCACCTCAGCCTCCCAAGTAGCTGGGGACCACAGGTGCAACCCACCAGGTCCAGCTAACCTTCCCCCCACCTCCCCCGAC
CCCGCTGCCACCCGCCCTGAGACAGAGTCTTGCTCTTTCACCCAGACTGGAGTGCAGTGGTGCAATCTCGGCTCATTGCAACCTCCACCTCCCA
GGTTCAAGCAATTCTGCCTCAGCCTCCTGAGTAGCTGGAATTATAGGTCCTCGCCAACCACACCTGGCTAATTTTTTTTGTATTTTTAGTAGAG
ATGGGGTTTCAGCATGTTGTCCAGGCTGGTCTCGAACTCCTGACCTCATGATCCGCCCACCTCGGCCTCCCAAAGTACTGGGATTACAGGCGTG
AGCCACCGTGCCCGGCCTAATTTTTGTATTTTTTGTAGAGACAGTTTCACCATGTTGCCCAGGCTGGTCTCAAACTCCTGGGGTCAAGTGATCT
GCCCGTCTTGGCTTCCCAAAGTGCTGAGATTACAGGTGTAAGCCACCACGCCAAGCCCAAAATTTCACCTTTTAAATTTATTCCATTTATTTTG
TAGGTGAATTTCATTTATTTCTCAGGGTTAAATTTTAGCGCTTTTGCCTGTGTCTATTTTTGGTTCACACCTCCCCAGCCCACTGTCCTGTATT
AAGTACGCCTTCCTTCAAGATCACACTAATATCTCCCTAAATGGATTTCACTACGTTTGGTCCTATTTTTGGTTCAGTTATAGTTTACAGATAC
CATCATGTTGCTTCCCTGATTTAAATATTGGCCGAAAAACTTGCTTTTTGGATTTTATCTCTCATGTTCTACTGGATTATTTTAGACTTTTAGA
ACACTATGAAATGGGTGCTTGCTTTTCACTTTTCAAACCTTTTTTGCTTAAACAAAGTTCATAAGCTTATTGTAGTGGGAAGTTCAAAGTCACA
GATCTCGTACTTACTCGCCTACTGACCTTAGAGACAATAAATCTATAGAGCCTAGTATGGGGTCTGGCAGGTAGTAAGCACTTTTAATGAATGG
AAGTTTAATATTCTGTTTGCATCCACTCGACCATAATCACCCCAAATCCAGCTTAGGTAGCCTTGAATTAACCCCTACTCCACCTTGAAGTTTT
TTATTTGTTTTTTGCTGAGACAGGGTCTCATTCTGTCACCCAGGCTGGAGTATAGTGGCGCAAACATGACTCACTGCAGCCTCCTGAGTAGCTG
GGAACACAGGCCTGTTGCCACCATGCCTGGCTAATATATATATTATATATAATATACATATATTACATATATATATATAATACATATGTGTTTA
TGTATGTATGTGTGTGTACATTATATATATATATATACTTTTTTTAGAGGCAGAGTCCTGCTATGTTGCCCAGGCTGGCCTTGAACTCCTGGGC
TCAAGCAATCCTCGTGTCTTGACCTTGACCTCTCAAAATGCTGGGATTACAGGTGCGAGCCACTGCATCTGGTGAATTAAGCCTTTTTTATACA
CTCAACTCTGAGGTATTCTGTTCATACCAATATGTTCCTTTGTATCTTCTTGCCATAGCAGGTTGTAACATCCTTTTGTATCTCCTTTCTTTTT
TTTTTTTTTTTTTTGAGACGGAGTCCCGCTGTTTAGCCCAGGCCGGATTGCAGTGGCGCAATCTCGGCTCACTGCAAGCTCCGCCTCCCAGGTT
CACGCCATTCTCCTCCCTCAGCCTCCCGAGTACCTGGGACTACAGGCGCCCGCCACCCCGCCTGGCTAATTTTTTGTATTTTTAGTAGAGACGG
GGTTTCACCGTGTTAGCCAAGATGGTCTCGATCTCCTGACCTTGTGATCCGCCCGCCTCGGCCTCCCAAAGTGCTGCGATTACAGGCGTGAGCC
ACCGCGCCCAGCCGTATCTCCTTTCAAATGTCAAATAAATACATTGTGTATACAGTAGTAAAGGATGTTGATTGGCATTGAAAGCAACTATCAA
GTTCTTGTTGATTTAGAAGACAAAAAGACAATTTTAAAATAACATCCTGGGCCAGGCTCTGTGACTCACGCCTGTAATCTCAACACTTTGGGAG
GCCAAGGAAGGAGGATCACTTGAGGCCAGGAGTTTGAGATCAGCCTGGGCAACATAATGACACCCTGTATCCAAAAAATTGTGGTGGCATGCAT
GCGACACTGAGGTGGGAGCATCACTTGAGCCCAGGAGTCCAATGTTACAATGAGCTATGATTGCGCCACTACACTCTGCTTAGGAGACAGATGG
AGACTTGTCTCTTAAAAAAATAAAAAATAACAGTATGTTCATTAAACATTAATCTCACTGATTGTGATTTTTTGTTTGTTTTTTTGAGATGGCG
TCTCGCTCTGTTGCCCAGGGTGGAGTGCAATGGCGTGATCTTGGCTCACTGCAGCCTCCACCTCCTGGGTTCAAGTGATTCTCCTGCTTTAGCC
TCCCAAGTAGCTGTGTTATTTCAGCTAATTTTTTCATTTTTAGTGGAGATGGGGTTTTGCCATGTTGGCCAGGCTGGTCTCGAATTCCTGACCT
CATGTGGTCCACCTGCCTCGGCCTCCCAAAGTGCTGGGATTACAGGCATTGAGCCACTGTGCCTGGCCTGATTATGATTTTTTAAAGTCCCCCC
CCAAATTATTGTTTGTGCAATAAATGGCAAAAAAGAAGCATTCTAAGAAAAAAGTAGTCTTAAAAGTTGATATGGTGTCAGAATTGTAAGAGAG
AGGGTCTTGGCTGAAAAGCCTTTTTAGAAAAAATTGCTCCCTACAAAAAAGGCCTTTTCTACCTTTTCTCACATTTGTTTCTTTTTATAGGACG
CATCTGAGAAGACCAAATCTCTTCAAAGTTAAGCTTTTTGTTTTTTTGGGGGGGACGAAGTCTCGTTCTGTCACCCAGGCTGGAGTGTAGTGGC
ATGATCTCGGCTCACTGCAACCTCTGCCTCCTGGGTTCAAGCAATTCTCCTGCCTCAGCCTCCCGAGTAGCTGGAAATTCAGGCGCCTGCCACC
ATGCCCAGCTAATTTTTGTATTTTTAATAGAGGCACGGTTTCACTATATTGGCCAGGCTGGTCTCGAACTCCTGACCTCATGATCCGCCTGCCT
CTGCCTCCCAAAGTGTTGGCATTACAGGCATGAGCCACCGCACCCAGCCCAAAGTTAAGCATTTTTTAACCACAAGGTGGGAGGTGGAAGTATC
TCGTTGGAAGACTAAAGGTGTCCACTAACGGTAGACCCTTTTTTTTTTTTTTTTGAGATGGAGTCTTACTCTGTTGCCCAGGCTGGAGTGCAAT
GGCGCGATCTCAGCTCACTGCAAGCTCCGCCTCCCAGGTTCAAGTGATTCTTCTGCCTCAGCCTCCTGAGTAGCTGCCATTACAGGTGCATGCC
ACCATGCCTGGCTATTTTTCATATTTTTACTAGAGATATGGTTTTGCCATGTTGGCCAGGCTCCTCTTGAACTCCTGATTTCAGGTGATCTATG
TGTCTTGGCCTCCCAAAGTGCTGGGATTACAGGCATGAGCCATTGCACCCGGCCTCAAAATTATTTCTAATGTGTGCAAAGATATCTGATAAAA
ACTACATGACTNNNNNNNNNNNNNNNNNNNNGCTGGAGTGTAGTGGCATGATCTCGGCTCACTGCAACCTTTGCCTCCTGGGTTCAAGCAATTC
TCCTGCCTCAGCCTCCCGACTAGCTGGAAATTCACCCCCCTGCCACCATCCCCACCTAATTTTTGTATTTTTAATAGAGGCAGGGTTTCACTAT
ATTGGCCAGGCTGGTCTCGAACTCCTGACCTCATGATCCGCCTGCCTCTGCCTCCCAAAGTGTTGGGATTACAGGCATGAGCCACCGCACCCAG
CCCAAAGTTAAGCATTTTTTAACCACAAGGTGGGAGGTGGAAGTATCTCGTTGGAAGACTAAAGGTGTCCACTAACGGTAGACCCTTTTTTTTT
TTTTTTTGACATGGAGTTTCACTGTCCCCCAGACTAGACTGAAGTGGCGCGATCTCGGCTCACTGCAACCTCTGCCCCCCAGGTTCAAGTGATT
CTCCTGCCTCAGCCTCTAGAGTAGCTAGGATTACAGGGGTCCACCACCACACCTGGCTAGTTTTTGTATTTTCAGTAGAGACGGGGTTTCACCA
TGTTCGCCAGGCTGGTCTCGAACTCCTGACCTCAGGTGACCCACCTGCTTTGCCCTCCCAAAGTGCTGGGATTACAGGTGTGACCCACTGCGCC
TGGCCGTTTTTTTTTTTGTTGTTGTTGTTGTTTGTTCGTTTGTTTGTTTTGAGACAGTCTCTCACTCCAGGTTCGAGTGCAGTGGCACTATCTC
AGCTCACTGCAAACTCTGCCTCCCAAGGTCAAATGATTCTCCTCCCTCAGCCTCCCAGTAGTTGGAATTACAGGCGCATGCCACCATGCATGGC
TAATTTTTTGTATTTTTAGTAGAGACGGGGTTTCACCATGCTAGCCTTGAACTCCTGACCTTGTGATCTGCCTGCCTCGGCCTCCCAAAGTGCT
GGGATTACAGACATGAGCCACCATGCTAGCCTTGAACTCCTGACCTCGTGATCTGCCTGCCTCGGCCTCCCA
HUMAN SEQUENCE—mRNA
GCACCGCGCGAGCTTGGCTGCTTCTGGGGCCTGTGTGGCCCTGTGTGTCGGAAAGATGCAGCAAGAAGCCGAGCCCGAGCGGCGGCCGCGACCC
CTCTGACCGAGATCCTGCTGCTTTCGCAGCCACCAGCACCGTCCCTCCCCGGATTAGTCCGTACGAGCGCCCAGTGCCCTGGCCCCCACAGTGG
AATGATCCCCGAGGCCCAGGGCGTCGTGCTTCCGCAGTAGTCAGTCCCCGTGAAGGAAACTGGGGAGTCTTGAGGGACCCCCGACTCCAAGCGC
CAAAACCCCGGATGGTGAGGAGCAGGCAAATGTGCAATACCAACATGTCTGTACCTACTGATGGTGCTCTAACCACCTCACAGATTCCAGCTTC
GGAACAAGAGACCCTGGTTACACCAAAGCCATTGCTTTTGAAGTTATTAAAGTCTCTTGCTGCACAAAAAGACACTTATACTATGAAAGAGGTT
CTTTTTTATCTTGGCCAGTATATTATGACTAAACCATTATATGATGAGAAGCAACAACATATTGTATATTGTTCAAATGATCTTCTAGGAGATT
TGTTTCGCGTGCCAAGCTTCTCTGTGAAAGAGCACAGGAAAATATATACCATGATCTACAGGAACTTGGTAGTACTCAATCAGCAGGAATCATC
GCACTCAGGTACATCTGTCAGTGAGAACAGGTGTCACCTTGAAGGTGGGAGTCATCAAAAGGACCTTGTACAAGAGCTTCAGGAACAGAAACCT
TCATCTTCACATTTGGTTTCTAGACCATCTACCTCATCTAGAAGGAGAGCAATTAGTGAGACAGAAGAAAATTCAGATGAATTATCTGGTGAAC
GACAAAGAAAACGCCACAAATCTGATACTATTTCCCTTTCCTTTGATGAAAGCCTCGCTCTGTCTGTAATAAGGGAGATATGTTGTCAAAGAAG
CACTACCAGTGAATCTACAGGGACGCCATCGAATCCGGATCTTGATCCTGGTGTAAGTGAACATTCAGGTGATTGCTTGGATCAGGATTCAGTT
TCAGATCAGTTTAGTGTAGAATTTGAAGTTGAATCTCTCGACTCAGAAGATTATAGCCTTAGTGAAGAAGGACAAGAACTCTCAGATGAAGATG
ATGAGGTATATCAAGTTACTGTGTATCAGGCAGGGGAGAGTGATACAGATTCATTTGAAGAAGATCCTGAAATTTCCTTACCTGACTATTGGAA
ATGCACTTCATGCAATGAAATGAATCCCCCCCTTCCATCACATTGCAACAGATGTTGGGCCCTTCGTGACAATTGGCTTCCTGAACATAAAGGG
AAAGATAAAGGGGAAATCTCTGAGAAAGCCAAACTGGAAAACTCAACACAAGCTGAAGAGGGCTTTGATGTTCCTGATTGTAAAAAAACTATAG
TGAATGATTCCAGAGAGTCATGTGTTGAGGAAAATGATGATAAAATTACACAACCTTCACAATCACAAGAAAGTGAAGACTATTCTCAGCCATC
AACTTCTAGTAGCATTATTTATAGCAGCCAAGAAGATGTGAAAGAGTTTGAAAGGGAAGAAACCCAAGACAAAGAAGAGAGTGTGGAATCTAGT
TTGCCCCTTAATGCCATTGAACCTTGTGTGATTTGTCAAGGTCGACCTAAAAATGGTTGCATTGTCCATGGCAAAACAGGACATCTTATGGCCT
GCTTTACATGTGCAAAGAAGCTAAAGAAAAGGAATAAGCCCTGCCCAGTATGTAGACAACCAATTCAAATGATTGTGCTAACTTATTTCCCCTA
GTTGACCTGTCTATAAGAGAATTATATATTTCTAACTATATAACCCTAGGAATTTAGACAACCTGAAATTTATTCACATATATCAAAGTGAGAA
AATGCCTCAATTCACATAGATTTCTTCTCTTTAGTATAATTCACCTACTTTGGTAGTGGAATAGTGAATACTTACTATAATTTGACTTGAATAT
GTAGCTCATCCTTTACACCAACTCCTAATTTTAAATAATTTCTACTCTGTCTTAAATGAGAAGTACTTGGTTTTTTTTTTCTTAAATATGTATA
TGACATTTAAATGTAACTTATTATTTTTTTTGAGACCGAGTCTTGCTCTGTTACCCAGGCTGGAGTGCAGTGGGTGATCTTGGCTCACTGCAAG
CTCTGCCCTCCCCGGGTTCGCACCATTCTCCTGCCTCAGCCTCCCAATTAGCTTGGCCTACAGTCATCTGCCACCACACCTGGCTAATTTTTTG
TACTTTTAGTAGAGACAGGGTTTCACCGTGTTAGCCAGGATGGTCTCGATCTCCTGACCTCGTGATCCGCCCACCTCGGCCTCCCAAAGTGCTG
GGATTACAGGCATGAGCCACCG
HUMAN SEQUENCE—CODING
ATGTGCAATACCAACATGTCTGTACCTACTGATGGTGCTGTAACCACCTCACAGATTCCAGCTTCGGAACAAGAGACCCTGGTTAGACCAAAGC
CATTGCTTTTGAAGTTATTAAAGTCTGTTGGTGCACAAAAAGACACTTATACTATGAAAGAGGTTCTTTTTTATCTTGGCCAGTATATTATGAC
TAAACGATTATATGATGAGAAGCAACAACATATTGTATATTGTTCAAATGATCTTCTAGGAGATTTGTTTCGCGTGCCAAGCTTCTCTGTGAAA
GAGCACAGGAAAATATATACCATGATCTACAGGAACTTGGTAGTAGTCAATCAGCAGGAATCATCGGACTCAGGTACATCTGTGAGTGAGAACA
GGTGTCACCTTGAAGGTGGGAGTGATCAAAAGGACCTTGTACAAGAGCTTCAGGAAGAGAAACCTTCATCTTCACATTTGGTTTCTAGACCATC
TACCTCATCTAGAAGGAGAGCAATTAGTGAGACAGAAGAAAATTCAGATGAATTATCTGGTGAACGACAAAGAAAACGCCACAAATCTGATAGT
ATTTCCCTTTCCTTTGATGAAAGCCTGGCTCTGTGTGTAATAAGGGAGATATGTTGTGAAAGAAGCAGTAGCAGTGAATCTACAGGGACGCCAT
CGAATCCGGATCTTGATGCTGGTGTAAGTGAACATTCAGGTGATTGGTTGGATCAGGATTCAGTTTCAGATCAGTTTAGTGTAGAATTTGAAGT
TGAATCTCTCGACTCAGAAGATTATAGCCTTAGTGAAGAAGGACAAGAACTCTCACATGAAGATGATGAGGTATATCAAGTTACTGTGTATCAG
GCAGGGGAGAGTGATACAGATTCATTTGAAGAAGATCCTGAAATTTCCTTAGCTGACTATTGGAAATGCACTTCATGCAATGAAATGAATCCCC
CCCTTCCATCACATTGCAACAGATGTTGGGCCCTTCGTGAGAATTGGCTTCCTGAAGATAAAGGGAAAGATAAAGGGGAAATCTCTGAGAAAGC
CAAACTGGAAAACTCAACACAAGCTGAAGAGGGCTTTGATGTTCCTGATTGTAAAAAAACTATAGTGAATGATTCCAGAGAGTCATGTGTTGAG
GAAAATGATGATAAAATTACACAAGCTTCACAATCACAAGAAAGTGAAGACTATTCTCAGCCATCAACTTCTAGTAGCATTATTTATAGCAGCC
AAGAAGATGTGAAAGAGTTTGAAAGGGAAGAAACCCAAGACAAAGAAGAGAGTGTGGAATCTAGTTTGCCCCTTAATGCCATTGAACCTTGTGT
GATTTGTCAAGGTCGACCTAAAAATGGTTGCATTGTCCATGGCAAAACAGGACATCTTATGGCCTGCTTTACATGTGCAAAGAAGCTAAAGAAA
AGGAATAAGCCCTGCCCAGTATGTAGACAACCAATTCAAATGATTGTGCTAACTTATTTCCCCTAG

[0294] TABLE 30

MOUSE NOMENCLATURE
ICSGNM Prlr
Celera mCG18319
HUMAN NOMENCLATURE
HGNC PRLR
Calera hCG37101
MOUSE SEQUENCE—GENOMIC
TCAGAATTTGACTGTCCTAAAGAACCTTCTTCCGCTGTGCGAGTCTGGGCAGGCAGAACATTCAGGAGAAACCACAGGGAAACAGGTCTGTTTT
TAAAATTTCCTTTTCATGCTCTGTTTCCCTTTTACCTCCTCTCCTGTTCTTTCCATATCTACTGTCATTTTGCTACCCAGAAAACCTAGTGATT
CCTCCCAGCTGACAGGGCTGAGCTTGTGTTTCCACGGAGTCCAGGTTCATGGCAGGCCTGTTGAATATGGCCCTGGAATGACGTGCTTTCCTGC
TCTTTATTTATCAGAGCCTATGACTCATAGGGCCTAGTGGACTACGCTTCCAAAAAGCATTAGTTTTTGTTATTTTCCAGTTAGCATACAAACT
GTTTCAGAATGACAGTCTCAGACAGACAGCCAAACAGACAGACAGAGAGATAATTTTACTTTGTTTAATTTTACCCTTGTCCCTCTTCACCCTT
CCTGCTAATCTTCCTTCACACAAACAATTCCTCTTCTGTTTCCATGTCATATAGATATGTACACTCCCCCCACACACACATACCCCACACACAC
TCACACAGACCCCTTTTACTTTCATATCAACCATTCTTTTCTATTGGGGAAGGTAGGGTAGGTATGCCCCACGGTGAGCACATAGAAGTCAGGA
GATCACTCTCCAGAGTTCTCTCCTGCCACCCTGTGGGATCCAGGGTTCAAACCTAGGTCATCAGGCCTGGACCAAAGGGCCTCTTACCACTGAC
CCATCTCACCAGCCTTATTCAGGTTTTTTCCCCTTCAATCTGCATATGATAGAAAACTTGTAGTATTTCTTGTTCAAAATCTGGCTTCTTTGAT
TTATTTGCCTCTCTAGTTCCATCTAGCATACAAACTATTTCAGAATGACACTCTTAGGTAGATAGATAGATAGATAGATAGATAGATAGATAGA
TAGATAGATGCATACATACATACATACATACATACATACATACATAGATACAGATAGACAGAGACATTTCATTTTCTACACTTAAATACATCTC
TGCTATGTCTATGCACCACATTTGCTCTATTCAGTCATCTGCTAATAGACACCCATGCTGGTTCCATATCCCTACTACTATAAATAGTGCTACA
TGAACATGAATGTACAAGTCATCTGTCTAAAATGCTGCCTCAGATTGCTTCAGGTATATACTTAGGAATGGTACAGTTTGGTCATATAGTCATT
CTTTTTTGTTTCTGATGAACCTCCATGCTAACTTCTATATGGCTACTCTGGTTACATACTCTACAGTAGCGTATGAACATCTGTTCCCCTACAT
ATCTGCTCCAGAACTTATTGGATTTTTTTTTGAGGTTGTTTTCAGCCATTGTGTATACAGTGGGATGGAATCTCAGTTCTGTTTGTTGGTTGGT
CTGTTGTTTAGAGACAGGGTCTTCCATAGCTTAGTGTACAGTATGTAGACTGTGGACCAGGCTAGTCTCAAACTCTCCCTGATGTTCCTGCTTA
TTTTTCCTAATTGTTATGATCACACATGTATGCCAACAAACCTGGCTTCATTGCAGCTTTCTGAAGTTTTATTTTTAGATTTATTTGTTTTATT
TTTATATGTTTGCCTATATGTGTGTACATGTACATGTGTGGGCCACATATGTGTGTGGTCCTTGCAGAGGTCAGAAGAGGGTGTCAGATCTCCT
GGAACTGGAGTTACAGATGGTTGTGAACCATATCTGAAAACTATACCCGAATCTTCCACAAGAGTATGTATGCTCATAACTGCTAAGACACCTC
CACAACCTCAATGTAGCTTCAATTTACATTTTCCTATGGCTAATGTTCCTATGAACAATTTTATATTTTATATGTATTTATTGGCTAATTCACT
TCTTTTGAGAACTGCCTTTTTTAATTTATCTGTCCATTCATTGATTGACTTTGTCTTTTGTAATTTTGAGTCAGGGTTAAAGTTTTTGAATTCT
TTCTATATTCTAGATATATAAAGATTAATAGTTGGCAGGAATTTTTCTCCCAAAGATCCTGAACGTTAATGCTTTCCCTCAAGGTTCACTTTAG
CTGTCTTGCTTAAAGCTTGATAAAAAAACTAAAGTCCTTTCCAATCAGACACGTGTGAGCAAGTTTTCCCTGAGCCACAAGCTGCAGTGCAGGA
AACTATCTGGATCAAAAACGTGTTCTCGTGATTTCCATTAAGGGATTGTCTCTTGTTCCCTGTCCCCTAAGCGAGTGCTGATAACAGTCCTCCA
TACCTTAGCACGTAAGTCAATCATTAACAATGGGCTGTACTTTTCACTGGGTTGTAAAGAATAAGAAGTCAGAGCTACAGAAATCTCCTTTCTT
GAGGTAGGCAGTGGAAGGAAGAGTGTCACTTGCCTGTAAACCTCATAACCAATATGTAGCAGGCTGCAGCCCAACACGCAGGGGACGTGTCCGA
ACAGAGGAGAGTCACAGGTAAGGAATACGGGTCCATTTCTGTTTCTCTATCCATTCTGATTCTCTCTTCTCACCTTTCCAATCTGTGGACTAAA
AATGAACAGGGTCAAGGTGTGATTACAGTATCAGTGGTAGAAAGAGGTTTCTATGGACTGACCTGTGTTTTAACAAGAGATGGGCATTAGATGT
TAGTTAATTCACAATCTCCGTCTGACTCCTTCAAGACTGATTTCTTACAAACATCTGACTTCTTCAAGACTCGGAGTTCCAGAGAGAAAATGTA
TGTCAGTTACAGGAGCAAAGATCAGCGCAACAGCAGTGGTCACATGACAGGCCAGTCCTTGGGGAGGATAAAGATGAATTAGTGTGGACTTGGG
AACATCTCCAGATCCTACTCAAAGGCAAAAGGAGGTTAGATGGTAAATTTGAAAGAATTGCTACAAACTGCGCCAAAGGAAAGGAATTATGCTT
ATTTCTCTTTTTTTGACAGACTTTGGGGGTTTTTTGGTGTTTTGTTTGGTTTGGTTTGGTTTGGTTTGGTTTGGTTTGGTTTGGTTTGGTTGGT
TGTTTTTTTGCAATGATTTGTTTTAAAATAAATTTGTCTTCTTTAGAAAGCTTCCAGATACTCACTTTCCTTTCTCAACGACTTTCTTCTGCTA
TTACATGTGGCATTCTTGTGACACATTTATGACGACGAACCAACGTTAGCATGCTATCTACTTAAGCTCTTACACTATCTACATTAACATTGAG
TATTTGTCTCAGATATTTTTATGGGTTTTAAGAAATGCATAATGACACATCACTGACTTGTACAAAATAGTCCCATGATCCTAAAAGTCCCATG
TTCTACCTAGTTCTCTTTCCCCACTCCCCTACCAAGCCCCTCAAAACCACTCACCATTTTTCCTGACTCCATGGCTTTACCCGGTCTAAAGGGT
CGCCTGGTTGCAATGAAGTAGAACGTGGTCTTTTCGGATTGGTTTGAATTAGTAGTGTGCTTTTGAGTTTTTTCTGCATCTTTCTGTGGCTCAG
TAGCACATCCCTCTTTGTCGCTGAGTAACATATGACTATGTGACTAAACTACAGCAAATGTATCCAGTTGGGCAAATGTTTTAGCATGGTAGAA
AGTGGAAACGATAAAGGTGGGGGGAGTTTAGAAAGTGGCAGTACTATAAACGTGATAGAAGCAAGAAGAACACGAAGTAGAAAAACTAGCTAGA
AAGCTAAACACAGATGCCTCAGTTGAAATAAAAATTTTTTTAAAAGCTCTGGTTCTAGGGTGGCGCCAGCTCTTTTCTAAGCATATAGATTATG
CTGGGAGACACATTACCTTCAACCCAAGAGCCTACACATGGTAGGCACCCCATAACATTTTTGAAGCCCCCAAACTCCAAGACTTTTTCCAAAA
AGAGGCTTCCCCAAGACACCAGCTTATTGGCTCAGAAGCCATATCAGGGAAGCTGTAGCTGCTTGGTCAGATGAGCCTTTGCATGCCATAGGAT
AAGAAAATATTCCCTTGATAACCTTTGTTTGACCGTGGCTTATGGAAGCTATGAGTATAAGCAAAGAACTCATGTTTCAACCTAATCACAGAAG
TAGCCCAAACAATTTCCATGTAACAACAACAAAGGCTATGAGAAGATGAGCCAGCTATGCCTTCAAATGTTCACCACATTCTAGAGCAGAGAAC
AGTCATGTACCATTATCAGTAGCCCATGCAATGATGTAGGAGCCCAGTCCAAGGTGATGCAGCTTACAGTATGGCTGTGTAGTTGTCCAGGGAA
ACTGATGGGCCAGCTGGGGCTTGCAGAACCTAAAGAGACCTGCAAGTAGCAATTTGCTAACTCAGTGGGGCTACCATGCAAAAAAAGCTGATCA
CCCAGGCTAGTCAATGTATTGGTTCAAAATCATCAACTGCTTAAAACCAGGTTCTCTGCCAGAGCATAGCATTGCTATTCCTTAATGCCCAGAT
TCCTTTCTTACTGTGTGATGAAATGGGGAATTAGCCAGACATGAAGATAGGACCTTGTGATTCAGAGCTTTTCATGTCCTCTACTAAGTTAACT
TACACACTCAGCACAGGCTAAAAAATACCTGAGGATTTTCTACACAAGACAAATCTGGGAACTGCTTTGCCCAAAGGCTATTCTGTAGAGTGGA
GCTCATCCAAAGACTTACAACTTACTGCTTGTCTCGGTTTATGCTTACACAACAAGAGGGCTTGACCATCATTGTAGACAGTTTAGAATGGATG
GTGGATTTGGAGGCATCGGAATAAGCAATGTGTAGCTCTCTATCCCACTCAAAGCTCCTGGATGGGAATACTTGAAGAAGGAGATGTCTATGTG
AAGACTGATTCTGTGAGCACATCTGCCGACCTAGAGATCTTCAAGCCACAGGGCAATAGAAACATCTCAAGCAACTTCCGTGTAATGAGAAATG
AGCAGAGGAGAATCAGACTCTGATTCCAACACAGCATCAGCTGGGGAAGCAGCTGCCTCTATGCATCAGCTTCTAGCCACTTCTGCTTGTCTGG
CTTGTCTCTAGAGCATATCCTGAACATAAAGTGCCTGAGACAGGAACAAGCAGTACCTAGGCTAAAGCCACAATGACACAGAACTTACCTTGCT
TGTGCAAAGCACCAGACTCACTTTCAGAACCTGGGGCAAGTCTAGATCCCCAATTTTGAAAAGCATTTTGATGATTTCATATATCTATAGGATG
GATTTTTTTGTCATTTTCATGTGAGCACATGTGTCTCCCCCTTCTCCTGCTGGAATTTTTCTCAACTGGTGTCCCATGTTCTCTTTTTCTGTGT
GTATGGTGCCAGATAATTGACTCCAAATTTTTCTGGGAGAAATGTGCATCTATATCTCAAGACTTTGTTTTCAAGGAACTAACCAAATAGGATG
TCCATCTTACTTCCTTGTTTATTTGTATTTTCTTTTATGTCTAGAAGAAATTAGTCATGAAAAATCTAAGACCAAGTCCAACATTTGGTAGTAG
GGGAGAGGAAGAGAAGGCAAGGTACTGTGTCCTGGGAATGTGACTGATTTTCCAGACAAACCTTCTCGTCTTCTTGTCCACATTTTCTCGTGAT
TTGTTTCAGAACCCTTCCTGACCTCACTCTTTTGACCTTATTTCATGCTCTTCTCTCCACCTGCCTGATAGTACTCAGCTGCAGACACAGGACA
CATTTATGCATCTCTCATCAGTATAGGGCTCAGGATTATCCCCCAAGGGATATGGCGTGGGTGCAAAGATGAGAGCACAAGGCAGAGAATGTCA
CGAGATGGACACAATCTCTTCCATAGAAGCCCTCATTTTTAGGGATATTAAAGGACAGACACTATGGCAGAAAATTGTACAATGTCCTTGGCAT
TATAAAGTTAAACTCTGGGCCCTTTGACCATCCATATGTTCTCTCCATGTAGGTTAATCAACCACAAATTATATAACAGGATAGGGGTTGGAAA
TACAAAGGTGGATGAAGTAGCCCTTGTTCCCAAAGAGCTAATGGGTGAGACTGGCTCATGGGTCCATGATGGTGGCAAAAAGTACGGTGACCTG
GGACCACATCACAGAAACTTGTAATGAGGTCAGCTCAAGAGGCCCTGGGATCACATTGTGATATACGATAGAGCTCCTAAGTACCAAACTGAAA
GATGAAGCTGAGAGGAAGATGTCTGCGGAGAGCATTACACTGGAAAGAGAAGCCCCAGAGAGCAGAGAACAGAAGCACAGAAGTAATACAGTGG
TAGCTGGAAGACTGCAGGTCAAATAAAGGAAATTGTGATGTTTGTCCTGGGGAGAAGTGATACCTGAAACAGAAACAGGGCTAGCCCCTCTGGA
TGGACTTAAGCCATGCAAGAAGATAGAGACTAAGGAAAACCATCAGAGCATTGCAGATAGATGAGGCATGAAGGGAGATTTGCATTTGAGGAAG
GAAAAGTCTGGATGGAATGTGAAGAATAGTTTAAAGGAGACAAAACAGAAGACTTGGAAAACACGTGGGAGGCTGTTGACATGAGGTGGCTTAG
AAACAGTGTTCCTAGGAAGTCTCGTTCTACACCTGTCACCTCAGGGTTCCTGATGACCCGTGAGCAAGACTTTCTAGAAAGAGCCGGTTCATTA
ATCACGTCACTTCTGTGGTATTAATAAAGCAACTATCATGGCTTTATTTTGTATCGACAACACTATCATGTAAATATTCCTTACTGATAAGGGC
CAGTCTCCCTCAGCATTTGTCAGCCACTAGGCTCAGGGAGCCAGCTACCTTGCATTTCTTCACTGCCTCTGTAAAGAGAAGTTTTCTCTTTGAT
TATGAGTAGATACACAACTGCCTTGATGCTTGTTCTAGCACAGCGGAAGAGGATAACTACCAGGGAAACTCGCCAATCACAAGGAAATCCGAGT
GTTTCTCTCGTACCCCAGTGTTGTCAGTTAGGTTTCATTTCAAAGTCAAGATTGTTCAAGCCAAAGTACAATTGGTTTTAAATGCTGTCTTTAA
AGAAGGAATATGTTAGAGAAAATTGCTTGACACTCATTAGTGTGAAGCATGAGGGCAGCACTTCATGGCTGTGACTCAGTCTAAAAATTTCATC
ATCTCTACTAGTTTGCCAGGGTGGCCATAGCGAAGCCTAGCCAACTGGGGGATCTCAAATGACAGAAAGATATTGCAGTTGGGAGGCCAGGAAA
CAGAAATCAAGGTGATCAAGGTAGCAAAAGTGGCTGTCTTCTGAAGTCAGTGAGGAAGAATCTGTTCCTTGTCTTTCTCTTCACTACTAATGGG
AATCGGTTGCACTCCTTGGCTCATAGAACACCCTTGCCTCTTTTTTAATGCTGACATGGTTCTCTCTCTCTACTCTCTCTCTCTCTCTCTCTCT
CTCTCTCTCTCTCTCTGTGTGTGAGGGGAGATTTATCTTTGTCAGTATGAACCCATATGTCTAGACCGAGCCATCCCATTTTAATAAGTTAGAC
TGAAGCAAAGCCCATCATAATGGGCTCCTCTCAGCTGCGTCCCTCTGCGATGACCTTTTTTCCAAATAAGATCCAATTCTGAGATGTCAAGTGT
TCTTATGTTTCAACATAAGAATTTGTTGTACATTGACAGATACAATTCAGTCCAAATACCACCTAATATGATTTCAAAATTAAATAAGTTATCT
TCTATTTAAAAAAAATAAAACCTTGAAGATCCTCCAGTTTCTGAGTTCTTCTTCTGTTTCTTTCTTGAGAGACTTGAAGTTCTTCTCATACAGA
TTTTTCACTTCTTTGGATAGAGTTACCCTAAGATATTTTATATTATTTGTGAATATTATGAAGGGTGTTGTTTCCCTAATTTCTTTCTCAGCCT
GTTTATCCTTTGCGTAGATGAAAGCTACTGGTTGGTTTGAGTTAATTTTATATCCAGCCACTTTGCTGAAGTTGTTTATCAGCTGGAGAAGCTC
TCAGGTTGAATTTCTGGAGTCGTTTATGTATACTATCATATCATCTCCAAATAGTGATACCTTGACTTCTTTGCCAATTTGTATCCACTTGATC
TCCTTTTGTTGTCTTATAGTTCTAGCTAGAACTTTGAGTACTATATTGAATAGATAGGGAGAGAGTGGGCAGCCTTGTCTTGTCCCTAGTTTTA
GTCGGATTGCTTCAAGTATCTCTCCATTTAACTTGATATTGGCTATTGGTTTGCTGTGTATTGCTTTTATTATATTTAAGTATGAACCTTGAAT
ACCTGATACTTCCACCACTTTTAACATGAAAGGGTGTTGTATTTTGTCAAATGCCTTTTCAGCATCCAATAAGATGTCGATGTGATTTTTTTTC
TTTCAGTTTATTTATATAGTGGATTGTATTAATGGATTTTCATAGTGAAACAACCTTCCATGCCTGGGATGAAGCCTACTTGATCATGGTGAAT
GTGGTTGATCGCTTTGATCTGTTCTTGGATTTGTTTTGTAAGAATTTTATTGAGTATTTTTGCCTCAATGTTCATAGGGAAATTATTCTGAAGT
TCTCTTTTTTTGGTTGGGTCTTTGTATAGTTTAGGTATTAGAGTAATTTTGGCTTCATAAAATGAATTAGGCAGTATTCTTAATGTTTCTATTT
TATGGAATAGTTTGAGGAGTGCTGGTATTAGCTCTTCTTCTGCACTAAAGCCATCTGGCCCTGGGCTCTTTTATTGGGGTGGGGGGATTTTTAA
TTACTTCTATTTACTTAGGGGATATGGGTCTCTTTAGATAATTTACCTGCTCTTGATTTAACTTTGGTTCATGATTCTAGTTTTGTTGATTCTT
TTATCTCTTTGTTTCTATTTGGTTGACTCAGCCCTGAGTTTGACTATTTCCTGTCATCAACTCCTTTGGGGTGTGTTTGCTTCTTTGTTGTTGT
TGTTGTTCTAGGACTTTCAGGTGTACTGTTATGTTGCTAGAGGAGAATCTGTCCAATTTCTTTACCAGGGCACTTAGTTTTTTTCAGCACTGCT
TTCATTGTGTCCCATAAGTTTAGGTATGCTGTGTCATCATTTTCATAGAATTCCAGGAAGTCTTTAATATCTTTCTTTATTTCTTCCCTGACCA
AGTTACCATTGAGTAGAGAGTTGTTCAGTTTCCAGGTGTATGTGGGTTTTCTGTTGTTTTTGTTGTTACTAAAGTCTATCCTTAGTCTGTGGTG
ATCTGATGGGATGCATGGGACTATTTCAATCTTCTTATAAAGGTTGAGGTTTGTTTTGTGACTAATTATATGGCCAATTTTGAAGAGGGTTCCA
TGAGGTGCTGAGAAGAAATTGTATTCTTTTGTTTTCGAGTGAAATGTTCTGTATATATCTGTTAAATCCATTTGGTTCATAACCTCTATTAATT
TCATTGTGTCTCTGTTTAGTTTCTGTTTCAGTGACCTGTCCATTAGTGAGAGTGGAGTGTTGAAGTCTCCCACTATTATTGTGAGGGGTTCAAT
GTATGTTTTGAGCTTTAGTAAAGTTTCTTTTATGAATGTGGGTGCCAGGATAGGAGAGTATGATGAGATACAACTGATTTTCAGTTGTCACTGA
GAGTTTGTAGTTTGGGTGAGCTAGGGCAAAATCTATGAAGTGAAGGCATTATGTCCTCCTGAAGAACCCAGAGAATGAGTTTTTCAACATTTGA
GCCTTGTTCCTATGGGCCTGGATAGGACCACCATAGTGAGTCTTAGAATGTCATTTCAACGTGCCCTGGATGGGATGAACACATGCTGCCTAGG
GGAGTAGCTGACGTGCATCAAAGTGTTTACTCGACCCAGATCACATCAGAATCAACCCTTGTAAAAATAAATAAGGTATGTTGATTTTTTGTGC
AGATGGTTAAACAAATCTGATGGGGCAAAATGAGTTCTAGGAATAAGGGATATCAGAGGGCAAAGCTGCTGAAGATAGCAAGAGCTGCACCTGG
ACAATTTTGGGGCATAGTCCCTGGCAGCTGTGAGTGGCTGTTCTAGGGGACTGCAGTGCCAAGAGAAGAATACTTGCCTGCCAAAGAGAGAAGC
TGACTCAAGGGGGCAAAGTCAAGCTGAGCTGAATTCTAGGGAAACGTAGAAGAGCAATCATCCAGAGAGGGGCTCTGATAGAGCTCCCTGGCCA
CTGTCTGCTCTTTTCAGAAGTCTGGACTCCCTGACCTCCAAGGCCTCCTCAAGGTATGGAGTTCTCTCCCTCTTGGATGTTTCTATCTCCTTTC
ACTGATGCTCAGGGAGACTTGTGACTTGAGCTGGAAAATACTGCTCTGGGAGGGAAGAACGGTCTGTTGTCCTAAAGCAGTGTGACCTTGGAAA
TGTAGCTAAACTTTTCTGGACTCGATGTCTTTCTTTGTTTTCTGAGATTCTTGGAGTTCTGGAAATCATGGGCTCTTCTGGGTGAAATGGATCT
TAGAAACCTAGCCCAGTTTTGTGGCTGAAGAAACTAATGCTGAATTGAGAGATTTCATTATTGTCAGGAAACTAATCTATTAAAGGCAGGGTAC
ATAAAACTTGAAGATCTTCCTTCTCACCAAGAACCAATTCCACAAAGGCCCTTGGTGTCAGAAGCCTACATTTGTTCCTCCTGAGAATCCTCTG
AAGTACAGTCTTCTACCTGCCTCAGACTTGTGCAAACTGGTTTCCCCAATGGCTTCCTGCTGCTGAATAAAAAGTCAGAACCTTACATGTCAGA
CACATTTCCTGCCACCTCCATTTACCCTCCTGCAGTTCCCTCTTTCTAACTGGCTTCAAGCTGAGTAGAAGCAAGGATCTGATTGTTGTGAGTG
GGCAGGTTCATCAGAGGGTACAGATAGACCAACAAAAAGACTTATTCCAAGCAATATCCAGTTTCCCAAAGGAAACTCCTATCCAATGGATGAA
AGATATTATTATGTAAGGATTGTTTTATGATTTGATATGAATTTAAATGATCCGTTGTGAAATAGAATGCAGGGATATGGCAGCACAGGTTGGA
TGGGAGCTAACTGGATGTTCTGCAGTGATTGGATTCTCCTGGATCAATATCCTCCTCCTCCCGCCCTCCCTGTCTTATCTTTGGCTTAGAGAGC
CAGGTGCATCCAAGTACAGGATTCCTGATCAGCATCAGCACCTCTCAAAATCTAAGAGAAAAGTTGGCTCCTCTGGGTAAACTGAAGCCTTAGC
AAGGTACTGATGCCTCCTCTGGGTGACTATGTTACACCTTCCAAAGTGATTTGGCTTTTATGTCCCAGTTAGATGGTTTGGTGTCAGCAGCATA
TTGTAGCTTACATTGAGGATAAGTTAAGTTATTGGTCCCACCCCCCACTTTTTTTTTTTTTTTTTTTTTTTGAAACAAGGTCTCTCACTGAACC
TGGACCAATTTGCCAAGAGTACCAAATCAAGCCATAAGCAGTCTCCTGTTTCCGCATCCCCAGCCCTAGGATCAAAGGCATGTGCTACTAACAC
CTGGGCTTATAGATGGATGCTGCAGATGTAGAACTCAGGTCCTTTTGCTTAGTGCAGCAGACACATTACAGACAAATCTGTCTCCCCAGCCCTC
ATTTTGTTCATTCAAATATCATCCAAATTTATCTGTGATAGTATAAATGAGTGAGTTGCCATTCCCCTTCTCACACTAAGCCTTTGAAATTCAG
GATGAATTTCATACTAACAGTGTGCCCTTCAATAATACAGATATATTTCCGATGGAGTCTGCTGCCATCCAGGATAACACATTTGTGCAGGAAT
ATGTGCTTTGAGCCCTGTGGTGTCTAAGGTGTATCTTTCAACCCAGATCTTTGACGTGTTAGAGAGCAGTGACATGGTTGGAGTCACGCATTCT
GTTTCAGGGATTCTGAGCAGAAACGAGCCAGGAAATAGTGACCGTTCCCTGGCTAACCATTCCTCCCCAGAAGCATCAATGTTCCAGTCCCAGG
CAGCTTTCCAGACTGCCCTAATCCCTTGACATGCCTCCAATGCTAGTTCCCAGCAGTAAGCATGTAAGACACCTGCCTTCCCTTGGTAGAGTTC
CAGTGTTAATTATTAACAAACAAATCCACGGTGCACCACAGCAAGATGTCACTGTAAGGCTACCAAGTTTCCTAGAACATGTCCAAAAGGACTT
TGTTCCCACTGGGTTCCTAGTCTGAGTCCAGACCAGTGTATACACAAACAATGGGGGTGGTATTTTTATTAGAAGAACTTCAAGCTACCAATCC
TGGAGAACACACTTGGAAGCTTTCTCTAGGAAAATGTCTGTTCCTATTTGACCCTCAACCAGACAGGTGTCTGGGAAGAAGAAAATCACACTAC
CTAAGAGGGAACTGCAGTAACCATCCATCACCTCTGGCATATTTATAGATAAATTCACCTATTGTATGCAGCAACTGTAATGGAGGATAAGCTT
TCAGGAGATTTGATTTACTAATGACATAGACACAAAGGAGTGGCATTCACACACCCTGGATATTAGAGTGGAGGGGATGTGGGAACTTTGTCCC
ATTCTAGAATATGCATGAGGCCTCTGAAGTACAGACAAGGATGGAGCCCAGAGTGCAAAACTAACAAGAAGAGGGGCAGATTGCTTCCTACCCA
AGGAGAGCTGGATATCCAAAGCTCACTTCTGTAAAGCCTTTCTAGGAGTTCCTTCAAATTTTGTTTATGTGAAACAAAGCTTTTCCTAATGATG
TAATGTGGCTTTGGCCTAAGTCACATCAAAGTACTGTCATCTTAAACTAGGGGTTAATTGTCGGGTAGTTACTATCTGTATGGCCCTGGCACAC
TCGACAGCTACTCCATTTCCGCAAGTGCAGAGCCCTGTGACTCACTGGGGACGGGCATGAGCGTTCTTGCCTTACTAGGAAGATTGAATAAGCA
CAGTCAAGGTGCTTAGCCATCTATTACAGCAGCACCATAAGTCCTGCCTTTGTTCAGGTAGCATCATGGCCTGAAGACAGGTCCAGGTAGGGTC
ATTCTCCCAGGCAGAGACAATATCCAGGTGTCTATGTAATGATACGGGTACCAGGATCTTGCCAAATCTGACCATCCTAGTCCACCCAGACTGT
TGGTATGGTTTTATCTTCTAACTTAAAACAAATGCTCTTTTGGAGGAAAAACTTTTAATTAGCTGATAATCTGATGATTATCAGGACTTCAATG
TCATCACCAGCACTAAAAGACCAAAGTCTTATGAGCAAGGGCATACAAACATACATGTCTTAGGACTCAGTCCATATAGTCAGATGGCCAGTTG
TTATCTAGATTTTAACACTCTTGGCTTACTTGTCTATTACAAATACTATGGAATTCAGGTCATTTGGAGACTGCCATCTTTCAGTTCAGAAAAA
TTATTTTGAAAATCCTTCAGTTCAGAAGAAATTGAGGTTCTTCAAAACCCATGTTTCTTGCTGTTTGCAGCCACTAATTATTCCATAACCCTGA
GGTTGCAACACTGTTCAGTAATGGGCTGTGAACCTAAAACAAAGTTATCATATGCTAATATGAATGTCTATGGCCAATCCCAGGCCAAGTAATC
CACTTATTCCCTGTGGCTTTTCCTCCAATATCAATGCAAGAGGAGTAGGGAACACACCTGCATCCTGAAGACCCTGTTTGCTATGGCCTGGAGC
TCCTTGGACCTGGTGAAATTAAATGAAAACAATATGATGATATCCTCTAGAGGGAGACCTGGGTCTGAAATCAGGATGCTCTCTGGTCATAGGA
GGCATGGTGTGGGCTTGTAAGCTTGAGTAGAGGACATGAAGCTTAAGACCAGGGCCTTTTATTACAAGCCTTTTATTGGTGATGTACCTCTAAC
AAGGTACATTTGGCAACTAAAAGTGTGTCCAGGGAAAAGCTGCTAAGAATCAGACTGAGGAGCCTAGAAACTCTGAGGAGAAGTTAGGGTGCTT
CCCCCAGAGAAACTGGATGCCAATCTATTGTTTGAAAGCCAGTCCTATAGAACAGGTCTTCTTTGTTCCAAATAATAAAAACAGGAGCTAGGTC
AAGGAAACTGTTGCAAGTTATTCTCTTACTTCTACACGCATCATGCATGCTGTCACACACACACACACACACACACACACACACACATATATAT
ATATATATATATATATATATATATATATATATATATATATATATATGCACACACATGCATACACATACAAATGTGTATGTGCATGCACATGTAC
AAACAAATGAATAAATAGGCAAATAATTGTAAAGAAAATAGTTGAAGTCAGAGCAGTGAATTGAATGAAGATTCCAAGACAGAGACCCTGGGTC
CTTTAAGCTGCCTGCTCTCTAAGGTGATGCTTTTCTTGGCATATGATGGAGAACAGGGGTACCAGCCATGGAATTGATGGGGCACTAAAGAGCC
TGTTAGAGAGATGCTAAGAGGCTCATTTGTGGATTTTAAGTGATGAACAAACAAAGTGGGTTTATGGTTTTGGTGTTCTGCAAACTGTGATTTT
CGACTTAGGCCATCCCACATATTAAAAATAAAACTAAAAATAAAATCAGGCTCCATGGGCTTTACCCATCCCATCTTAGCATGTCTGTTATTGT
TGTCCTTGCTCCATTCACGTTTAGCCAGGCATGTTGGTGAGCCTTTAAGTACAACTTCTGAAATTACTAGCAAGCACAATCTCACAGCAAACTC
CCTGATCCTCTGCCTCTGACAATCTTTCTGCCTCTCTTCCACAATGATCCCTGAGCCTTGGGTATAGGAGTGGTCTTGTAGATTGGGACTGGGA
TCCTCCATCCATTTGGATTGGTTGTGGTTTGCTGGGAGGGTTTCACTGTCTGTTGCATAGAAAGGTTTCTTCAATGAGGGGAAAACTCAGGGGT
GAGCACGACACTTCTCTGTGAGTGTAAGGACTCTAGTTAGGAACTATGCCAGCTTAGCAAAGTGCTGCTTGCAGTTTCTCCATGACGTCACTGG
CCCTTCCTAGTTGGCTGGGTTCCCAATACCAGGTGTGATTTTCCTCTTGTCAAGTGGGTCTTAGGTCCAATTAGAGAACTGTTGGTTACTACTA
AGGTATGTGTGCCAGTACTACTGAACCCTTTGTATTACCATGACATATTGGTTATAATGATAACCATATGTGTTATATGTGTGTAATATACATG
CAATATATATGCTATTTATGTGTAGTATATATATATATTTATGTGTATTATATATATATTTATGTGTTTCACATATATGTATGTGTGAGTGTAT
GTGTGTGTGTATGTGTGTGTGTGTTCCAGTTCATGGCTGTCATAGACCTACTGGCTGCTTCTCTCCTTTGGAAGCTTGCATGGTGCATTCTCTA
ACCATGAAATCTAATCCTCAAGGAACAGGCTTTCAGGTCAATTCCCGTTTGGGAGCCTCTGTCACTGCGTCTGAACTACTTGGTGTCTTCAGCA
TTAAGAACAGAATGCTAGGAAGGTGTGTTGTAAGTAGTTTGTGGTATTTTGTTTTGTTTTGTTTTGTTTTGTTGCTAAGCCAATGGGTCACAAT
AAGCAGAATGGTGATGTGGCTAAGAACATGGGCTGTGGAGGCTAAGGCCATAAGGTTCAAATGCCAAGTCTTCTCTTATTGGAGTCTGAGAATG
TGGGGCAGTTACATAATTTACTTATGACTGTGCTTTGGTGTGGAGATAGAAATGATAATGTTTGCCCCTGCTGTTATCACTAGGTTTTAATCAC
AACTATCTTTGACTCACAATGAACACTCAGTACATGCTGGAAATGATTCTCATAGAAGGAATATTACCTTTTATTTCTTAAGCCAATGTGAGAA
CTTAAAAGGCACCAGCTTGCAAACACAGAGACTATGTCTCTTTTGCATTGTGTTCTAATGAAAGGAAAATTAAATGCACATACATTTTTATTAT
AATTAGGACACAGTTCAAAAGTGATAAGCCCTCTTGGTCTAGGGAATGACTACTCCTATGACATAAAGGAAAATGAAATCAAGTCCAGTATAGA
TTTTTGGCCATGAAGCTCAGAGAGTAAGTAAGATTTCTGGAATTCCTATCATTCTATGTGGCTCTATGGCTTATTCCCCAAGAGAGGCAAACAA
TTAAGGCCCTGTGCAGAGGTGCTTCCACCCTGGTGTACACAGTGAAGTAGTAACAGCTGATGGACGACCTCATTAGCCCTCCCCTAAGCCTTTC
TGTCTCATCATGAGTCTCAGCTATGTGACCACGGGAAACAGGAGAGAAAAAGATACAATGGGGACCACGTGTCTCTCCTTAAGTACTGCTTATG
ATATTGAGGTTGGGGGTCTCTGAGCCATTTATTCCTCCTCTGGTTCTTTGGACCACTTGGGCATTGGACTCTACACCCCTGGCAGATCAAGGCA
CATTCTGTGGCTCTTGGGAGCCTTCCTGATCCTATATGGAATGACTTAGATCAATGGGAGGACAGCAGCAGACTCCTGCAGTCAGTCAAAGTGG
TTTCCACTCCTAGGAGGAACACACCAGTTTGTTTCTGTGTGAAATACAGAAATATGACAGCTTTGTCGCAACGCTAAGCAAACCATTGTGTGGC
AGAACAAGCTTCTTTTTCACGTCAGAGGTTGACACACTGGCCCCACAGACAACACCAACTGTTCCCTTTGGAAACAGAATGGTGGCAAGAATGA
GCAGTTATGTGGACATCATCATTCTGGATCATCTCTAAGATCAACATTATTTTAGAATGCTGACAATGATATGTTTTGTGGGCATGCTCCAGGG
GAGGATTCAGTACATGGAAAATACATGCTAATCATCCACACATAACTGAGGGAATCATAAAGAGTGGATGATGCCCTGAGGGAATGTGTATTAT
TTACAGAGATATCTCCATGTCAAGACCCAATGCATCAGATCCATGGGAAATCGGCAAAGCCTTCTCTGGTCTGAGTATGACTGTTGACAGTGTG
TGCAAGCACGGGTGTTCACTAACAATTTACCAGTTTGTGCAAAAGCTAGCAACTGCAGCTTCCTCCCTGCAGGTGTGTACTGCCTGAGATAGCT
CAACCTTCTTTGGAGACTAGCTAACCAACCCCCTGTCTCGTAGATAACAAAACCCCTTACGTTTCAGACTGCCTCAGTAACTGATCTCCTCCAT
GCAAAGAAGCATAGCCCATCCAAACGCAGCTACACGTGTCTGTGTCTGTCCTTTCTTCATTCCCTCACTGCTCAGTCAGGTCACCTCCAAGCTG
CACATGGAACACAGAACATCCCCATCACCTTGGGCCCAAGCGTCTGGCATATGCTTCCAATCTTCAAGTTTTGAGTGGAGAGAAAATGTGGGCT
GGAATCTACAAATGTGAGCTGGAAGCCATTCCTCATGATAACCCTCGCTCTTTCTTGCCTTTTTCTTTTCTGTGTTTTTTTTCTTCATTTATTG
CTTATGACACTAGCAACGCAACCTATTGGAATAAAAATGTGTGCTTCCCAGAACATTGTCTAACTTACTTCTCAAAGAAAGGGACCATTTCTGT
TGATAGTAAGACTTGGCTTGAAAGGGCCAGTTAACCCTGGCCCCAGTTTGTCTTGATCAACATCTCTAAGGCGTCCTATATTTGATCTAGCACC
TACAGAAAGAGTAGCTACGCTCAGAAGAAAAAAATATCTCTACAAAAGATTCACTTGTATGAAATATTTTATACACTAATCTAGCTGAATCGGT
CTCTTTCTGGTAGAAAATACAGTATCCAAATATATAGGGAGTAATTATGATAGGTAAGCCTGATAAAGAAGACCTCAGATCATGTGTGACCAGA
TAAGCCTAGCAATTGTCTGAAGACTTCAAACTACCCCTTAGGACTACTGAAAGGATGCCTGAAGAAAAACATCTAGAAACAAGTTTTGTGTGGA
CCAAACAAGGAGCAACAGAGAATTTTTGCACACAGGGAGTCTATGTAACTGCCCCAGTCATTTCTCCTAAATCTTTTTCTGCTAGAAAGACCTT
TGGTCTGGTCCCACTCATCATTTTAAAAAGACTTACAGGATTGAAATGATTTTAGCCTCTTCTTTCTTCCTTCTTTACAGAAATGAGTTCTGAG
ACGAGAAGACTTGGGTGGTTAAGTCTGATGCTGTTAAATATATCAGGGGTTGAAAAGGGCTTAGAAGTGTAACATTCAGCTGGGCATGGTGGCA
CACGCCTTTAATCCCAGCACTCCGGGGGGCAGAAGCAGGCAGATTTCTGAGTTCGAGGCCAGCCTGGTCTACAAAGTGAGTTCTAGGACAGCCA
GGGCTATACAGAGAAACCCTGTCTCGAAAAACCAAAAAGAACCCAAACAAACAAACAAACAAACAAAAATGTAACATTCTGATTGATGGCATGT
CCCTTGAAATGTTTCTGAGCTTTACTATGCATTAAATAACTTGAAATGAATGCAAGCATGCACAGTGCTTCTTTCTGTCTTACTGAATTTAAGG
ATGCCAAACAATTCTCTCATTTTTCCTTTGCTGGAAGGTGTGGCTCACCATTCTATTAGACAAAATTGTAGCTGACCTCTAATACCTAATTAGT
GCAAAACAATGCTACAATTATTGGGCATGACTTTGACACGTTTTGGCTGCTAATGCAACCACTCCTAGTTAAATAGATTGGCAATGAAGTTTCA
ATGCAAACTTTGTCAATGAGGCCAGCCTACTACTAGATATCCAACCATATAGACAGGTAATGGCTGAACAGATCTTCATTCCTACAAAACCTCA
AGAATTATCCATTTTGCAACTTAAGTATATGCTGTTCATTACTTTTGTACAAGCTTGCTCTCTCTCTCTCCCTCCACCCCCCCCCTCTCTCTCT
CTCTCTCTCTCTCGTGTGTGTGTGTGTGTGTGTGTGTGTTTTAATGGCTTACGAATCCACATAGGATTCTTGTACATATTCATTTTGGTTATTT
ATTCCCCCTTAATTAATCCCCCTTCATCTCCATGTCTCTCCCTGCCCTGCTGGACCTAACCCTCTTCTTTGCTATATTCTCTTACCCACTGTCC
TTCTTTTACATCTTTATTTCAATCATGTGGACCCGTTTCTCATTACCTAGGCTTTATCCATACTCACTTCTACTTAGAGACACATGTTTAACAG
TGAAAGGATAAGATTGCCATCTGAAAAAGGGTGTGGGGATATGGCGTGTTTATTTTTCTGAGTCTAATTTCTTGAGTTCTTTGTATATATTGGA
CATTAGCCCTCTATCAGATGTAGGATTGGTAACAATCTTTTCCCAATCTGTTGGTTGTCATTTTGTCCTATGACAGTGTCCTTTGCCTTACAGA
AGCTTTGCAATTTTATGAAGTCCTGTTTGTCAATTATTGATCTTAGAGCATAAGGCATTTATGTGCATGTGTTTGTGTGTATGTGTTTGGAAGC
AATGCTTCTCCCATTTCTTGGAGACTTTTTTTTTTTTTTGGAGAGCAGTTGCCTAGATGTTCATCAGCAGGTGAATAGAAAATGTGGTGCATAC
CTACAGTAGGATTTATTCAACAATAAAGATAAGCAAAATTACAAATTTTATAGGAAAATTGATGGAACATCTCTCTCTGTCTCTGTCTCTCTCT
CTCTCTCCCTGGTGGTGGGCATATAAAATGCAGTAGCCACTTCAGAAAACGGTCTGACAGACATCACTCAAGAGCCTCAGACAAAAGGTTGTCA
TGTGAGCAAGGGAGTCCACTATTGCCTATATATTTCTCTACGTTGGTAACAGATATAGTATGTAAAAGTGTTTGTAGCAGTACTATAACACTAT
GCATAGGTAAAAAACAGCTCAATGTCTATCAACAAATAAGGAAAAAAAATGTGCTAAGTAATATGATGGAATAGTACTCAACTGCAGAAAAGAA
TGAAGTAGATGACATAGTGATGCAGTGTAGAACACAGATAAGGATCAACAGTATTATGCTAGGCTAAAAGTCACTTATTTGTTGTCTATAGGAT
AGAACCTGAATAGGTAAATCCAAAGAGAGAAATGCTAGAGTAGTGTTTCCAGGGGCTGAGAGAAGACTAAACTGAGTGTAGATGGATTATATGT
CTTCTGCTGCTGCTCCTTCCATGTCTGGCTGACGACAGATGTTTTGACAATGGATGAGAAGCTGATGAATAATTTTTTTAAAAAAATACTGAAC
TTTACGTTTTAAAAGGGTAACTGTTATATGAGTACTCTCAATTTTAAAGGAAAAAAAGCAATGTTTAAAAGTGGGCCAATGTTGGAAGTCAACT
GTGAGAAGTTAAGAGCAGATTCACAAATAAGCACTGGAATTGGGCCTTGATTTGGGGGAATATTAAGAATATAACTAGAAGACGTTGTAAGAAA
AGTTTGGATGAGTCAGAAAATAGGGAGACCGGCTAGAGAGATGTCTCAGTGTTTAAGAGCACTGATTGTTCTTCCAAAGGTCCTGAGTTCAAGG
TCCCAGCAACCACATGGTGCCTCACGACCATCTGTAATGAGAACCAATGCCCTCTTCTGGTGTTTCTGAAAAGAGTGACAGTGTACTTGCATAA
AATAAATAAATAAATAAATCTATTTAAGAAAATAGGGGGACAATTGTGTGTTAGCAAAATACAGTAGAGACTAGACTAAGGTTCATTAAAACAC
AGGCCAATAAAGATGAGGCCACATGTATGTGTTCAGGACACATATACTGTAATACGTAAAATACATTAAAAAGTTCAGACTTCTTCAGGCTCGT
GAAAAACACACTGTGAATGCTTTAACCCTCATTGTCTGATCGTAACCCATTCCTAGTCATCTCCCTTTCCTTTCCAGCTAGTTTGCATCTTACG
TCCGCGTGTGTACATGTGCAGCTTCTATATAGGCCGCCACAGCTGATTCCTGTTTGTCCTTTTCCCAATTTTTTATTTGGTATTTTCTTCATTT
ACATTTCAAATACTATCCCGAAAGTCCCCTGTACCCTTCCCTCCCCCTCCTCTACCCATCTACTCCCACTTCTTGGCCCTGGTGTTCACCTGTA
CTGGGGCATATAAAGTTTGCAAGACCAAGGGGCCTCTCTTCCCAATGATGGCCAACTAGGCCATCTTCTGCTGCATATGCAGCTAGTACTTGGA
TGGAAGGCCACAACTGACTCTTAAAGACTGTATGTAACACCAAATATTAGAGCAATTGTCTTCACTTAGTAGCATTTCTGAGGGTTTAAGTCCC
TTTCATTTGGATTCTCAGTTTCCATGTGCAATGAATTTTTTTACAGGTGAGCAAGAAAAGTATGGAAGGAAGCCTAAGAAAGGCCGCAATGAGA
CTTTAAAAAATGATGCCAATTTTAGAACGCATCTTCTCTTTCAGACTTGGAAAATTAACTTTTATTACTGCCCTATGCAAACTAAATTTAAAAT
AAGCTTTGGATTATACCCCGTGCGTATGAGCGGACGTTATGACATTGATTGACAACGTCAGATCTACCCTCAACCCTCTGAGAGTATGATTCAC
ACATACCTGGGATCAGAAAAGAAGTGTTTTCCAGACTAGGCAAGTCACTAGAGCTCTGGTGGTACTCAGGGTAGATTTCTTCCCCATAATTCCT
AGCTAAAGATGAAAGATACAGACAAATGACCCATCCTAGGAGAATTTACAAGGGTAGTGGTAAGCAGGTAGGTTTCAGAACAGCTCATGAAACA
ATTCTGCAGCAGGAGTCAAGGAGTCCCAAAGAAGTGGCCTATATGGGACAGCAAGGAGAGACTCAAAAAAAAAAAAAAAGGAGGAAAAAAAAAC
CCTATGTGGGGCTCAGCAGTGAAGAGCACTGAGTGCTCTTTCAGAGATCCTGAGTTCAATTCCCAGCAACCACATGGTGGCTCACAACCATCTG
TAATGAGATCTGATGCCCTCTTCTGGTGTGTCTGAAGACAGCTACAGTATACTCATATACATAAATCTTTTAAAAAAAAAGTCCTATGTAAAAG
GCATAATGGTAGATGTTGCAAGAAAGCAGTGTGTGTATTGGTATCTGGCAGGAGGCTCAGGAATGTTCACATCACAGTCGTTAGGAAAGGAAAG
CAAGGGACCCCTTATTGTAGGATATATGGACAATTTAATCATGGGGTTTTTTTCCCCCAATAATAAAATTTTCAGCAGGAAAAAAAAATAACAG
TAAACAGTAAGCTACGTGTAACATAAGGATGAAAGATTTCAAAACCCGTCTTTTACAAAATGCACAGCAACAGCTTCTTTTGTGACAGCATCAT
CAGTCCCCGTGGTTTGCAGCCGGATGTAACAAGCCCTTTTGAAGAGCTAAGAGGGCAGAAAGTTTCTGTTGCCAAATATATAAGAGAAGCAGGA
AGCACTTAGCCTCGGACCAGGAAGGGCATCCTTGCAGGAGACCCTGCAGGTCTGTGCAGTTCATTGCCCAATGCTTCCCTTAAATAAAGAGCCA
CAGACTTCAGGAGTGTGTTCCCCCCTGAGTGATTCTGCAAGAGTTGTTTGCCCTCCAGCACTGGGCTGTGCTGAAAGAGTTTAGTTTCCCAGGG
AACAAGATCTGGGTCTAAGGCAAGGCAAGCAGCATCCTATGCCCAAACCAGTAACTCCGTTTTCTCAGCCTGCCAATCACATTGGAGCTTCCAG
ACCATCANNNNNNNNNNNNNNNNNNNNGCCTCAAGTCTCCAGTCCCCATCATGATAGTGAGACCCAGAGGAAAGGGAACACCTGTTGCCACCAT
TTTGAAGGGACAGTGGTGACCCATAAAGAGGGTGCTCTAAAGGAGACAGGACAATTCAAGGACTTGGATAAAATATCAAACTGACAGTGGTGAG
CAACTGTCAGGTTCTAGGACCAGTTTAATCCTGACTGGGCAGAGGATAGGGGCCATCCACACAACCCCTGGAGGGAGCGTTCTATAGAACCGGC
TGCCTTGGTCAGCTTAGGGCAACCAGCATTAAGGCAGCAGGAGGAGGGATATAACCCAGGCTCACCTCTCCCAACCCCTACACAGGGTTCCTTC
CTGCCAAGGCTCTCTACACCTTTAGTTTACAGTGGAAATCAGAAGGCAGTAGGACTCAGGTGCAGACCATATAATTCAGAACAGGAAACAGGAA
ATGTGGAAGAAGGAGGGGCTAAGGGAGAGCACAAACATTGGCCAGCTGCAGCCCGGCCCCAATTGGGACTGCAGACTTGGGTAGATGGATGGTT
GCCACATCCTGCTCTGAGCCTTTTGAGTGACTCTGAGATAGAGCGCCTCTGTGGAGTTCCACAGAGCAGGCACACAGGCTGAAATCATGAGGTT
TGTATTTTACCTCCTTGCCGGTTTGCAAGTCTTGAAAGCTCACTCCTCTAAGCTGATGGCAGCCCTCATGCAAAGCAATCTGATTGCTGTGTCT
GGGGTTCAATACACACACACACACACACACACACACACACACACACACTCAGGTGCACGTGCATACACACAAAGACAGAACAGTTTGCTTGCAA
CATTGTCATAGCTTAGTGAACAGTATAGCATTGTTCTGGCTCAAGAAGCCCTGGTTCTTCAAAGCTCCTACTTAGATGAAATTATTTGCATCAC
AAACAAAAATTGTTTTGCATTTTTTAGATAATGAAGGATCGTTTAAATATATAAATTAAGGGCTATTTAGAAAAAATAGGTGTCTTTGTGAGAC
TGGCTTAATTCACTTACCATGATCATATTCAGTTATGGTCATTTTAAATACAAATCATGTGTGTTCCAATGACGTGAGATTACAGTGAACTATC
TAGGGAAACTAACAGGAGTGGAGTAGGGACAGGAGAGGAAGAGAAACGATGGGTGATGGGCACATATGCTCAAAACCATAATGTACTGGGGCTG
GAGAGATAGCTCAGCGGTTAAGAGCACTGACTGCTCTTCCAGAGGTTCTGAGTTCAATTCCCAGCAAACACATGGTGGCCCACAACCATCTGTA
ATGGGATCGGATGCCCGCTTCTGGTGTGTCTGAAGACAGTGACAGTGTACTCACATACATAAAATAAATGCATCTTTTTTTAAAAAATCATTAT
ATACTTGCATGGAAATGACCCTATGTAACCGAGTTTCATTTAGTTGTTTTTCAATTGTTAGAGAAAGACTAAATTTTCTCTAAGATAGCCATAT
GAAGACAGTTGATCACTCTATGTCCCAGAAGCCCATCTGGAACTTAGCATTTTGAGCAAACCATAAATTTGATGAAATACCTCCTATTCAAGGC
GGCAAGCATTCATTTGCCTCACATTTCTAAGTCTGCCCCTGTGACTGCCTTAGCTCCTTCTTCCCAAATTCTCCAGTTACCTGGCCCTTAGGGG
TGGTAGCGAAATCTCCTTCCTGACAGCTTCCTTGGCCAGGTGCTTCTGTGTGGAGTCAGTGCCCAGGCCGCCAGCTGTTCAAGTGTTTGGGCAT
ATGCACACACAGGAACGACTTGGGCAACACCCTTTGCCTTGTTTCGGGATGTTCTTCTTGCAGACCCTTGCCCAGACATAGGGAGTGCCTGTGA
AGTGCTCCAGAATAAATCGGAATGTCCCACTGAAGCCAGACACCGTGGTCTTCATGTTAATGTGTAAGTAGAGTAGTGATCATTTATTTATTCT
TTGATTCCCTTTTGCAGAGTTTTTATTGCCCTGTCTGAGATATTGGAGTTTTCTGCTACAGTAAATTTAGCAGGATTTCTCCAAGGTGACTTTA
GCGCCAGTGAAGGACTTATTGTGCCTCTTCAAGTGGTTCTATCACTCTGCTTGTGCTAGGGGTAAAATGAGGTGCCAGGTGGATTCAGGACAAG
CAGACACAAGCAAGCTAGGAAACCTGGCACTCGATCCCCTCTGCGGTGCTTAGGCAAGCCTTCTCGGCTACTGAATTTTGAACTTTCACAAGAA
CAGATCGGCTGTTTGTTCAATGGTTTATTACTCCTGCCACAACAACGCATGGCATGAGGTTGGCGCGGCCTGTTTATTTCTTTGTGTATATGGA
TATGTGTTTGTGGGTGTACATGAATGGGTGGTATGTGTACACACGTGTGCATGGGGAGACATGCCCAGGGCTATTTAAATCTTCTGCCCTTTTC
CTTCACTTCCCTCCTGTTCCTTCTTAAGAACAAGCATTGCTTCACCTTTTCACTTAAATTTCTCCTCTAGAAAAAACTGTTATCATTCAACTCA
ACATGTTTTCCACTGAAACTTCTTCCATATTAATTTTTAGGTTTTCATGTTCTCGTTTTATTCGTACTTATTGGCCGCTATTTTCAAATTAATA
GAGTCCAATGTCATATTTCTGTATATTGCATCCCTGTTGCCCATCTATGCTTCTCCTCCAGACTATTTCTTCCTGTGCTTATTCGCTTAGTGAA
AGTACATTGCCAGGCTAGAAAGGTGGTTTGTTGGCTAACAGTGTTCTCTGCACAAGCCTGGGAACCCGAGCTTGGTTCCTCATATCCAAGAAAG
GAGAAAAGCAACTCTGAAAGTTGTCCTCTAACTTTTTCATGTGCACCGTAGCCCATGTGCACCCACACCCACAAATACACACCACACACACATA
CACAAAATAATAATAATAATAATTTTAAATATATCAACTGACTTACAAACATTTGTTTTTTTTTCCCGATGACATTTGTGATGTTAACGCATAA
TTTGATTCTAATTTAGTTGTAAGCATATTCTATTTTGACTCTTTGAAGTTTTTTGAAATTCAGTATCTAGCTGTGGTGGTGAGCTTTCCACATC
AACTTATCATAACCAAGAATCACTGGGAAAGAATATTTCAGTTGGAAAAATTATTTGGATCAGAGTGATCTGTGGTCAGGTCCACGAGAAAATG
TCTTGGTTGCTAATTGGTGTTGGGGGACTCACTGTGAGTAGCACCATTCACTCATCAGGGGACAGTGAGCTGTCCAAGGCAAGAGAAAACGAGA
AGACCTCAAGCAAGCAGGCCGCATGGCTATTTGTTCATGCCTGCTTGTGACTGTAGACATTATGTGATGAGCTGCCTTGAGAGTCTGCTTCAGT
TTCTCCTCAGTGACAGACGGTAACCTGGAATTGTAAGACAATAAACTCTTTCCTCCCATAAGCTGCTGCTTCTTGGATGCTTTCTTGCTACAAC
AGAAATTAAACCAAGGCATCAGCTTATATTCTGCCTGAGTGCGTATCCCAGGTGCCCAGAAGTGTTGGCTGTTGTACTCTGCACATTTCAATGG
AGTATCAGTCAGGTTATGATGTCCTTCCTAATTTTTTAGCAAATGTGGTTTATTTTATTTTTTTCAATTTTTATTATTAACTTTTATTAATTAT
TCCATTCATTTACCTCTCAAATGATATCCCCCTTCTTGGTTACCCCTCCCCAGCCCCATCCACCTTCTGTTTATTTTAATTAATTAATTAATTA
ATTAATTAACCAGTACAGAAAAAGTCCACTGAAAAATCCATGTCCTGGGCCCCAAAATACAAATAAAATCAAAAGGAGTAGAGTCCTGCTGCTC
ACATTTCTTCGTGAGTAGTTATAACTTCCCTGAGATTTTTTTATACCAGGGTTTGTTTCCTCCTGGTTTCTCCTCAGTGACGTCATCCTGAGGT
TAGTGGTTACTGTCACTGTCTCTATCCTCATCTTGACTCCATAATATTCTTCCTCTTTCGATCCAGACCCTCAGGGTTTAAGAGTAGCTTCAAG
CTGAGAAAAGGTCAATTTTCTCCAAAAAAGCTTCCATCTCCCACTGAAAATGGCCATCTCAGAGTGAAGTACACTCATTCTGAAATGTCAGGGC
CAATTGGATGGTCATCAGAAAGCTTGGCCTGGTTGATATCTTTATCAGCACAAACCTGAAAATGCACAGTCCTCCAAAGGGCGGCCTCTTTGTG
CTCATCCGAAAGTGATGGAAGGAAGGCAATACAAAAGGGGCTGAACTCTGGTCACCAGAAGTCAGAAACCATGCAAACAACCAGTAATGAATAG
TGAATTCTAGAATTCAAATTAGCAGATGTTTTAAAGAGACAAGCTTTCAATTTTCATTTTAAACATGAGCAAAACCTGTGTTCTGAAAGAAAAG
ATTTAGAGAAGAGAAAAAGCAAAAAGAATATCTAACATATTGCATGACCCACCACTCCCACAATGTGCTCCTGGTAAACTTGAATCACATCTTT
TCTCCATCCCGATAATTCTCTAACTCTCAAGGAGAGGCCTGAGTTAACTCTCTGAAATTCCATATCTTAGGCACTGGATCTTCGTGATTATCAG
GATGTGCTGTCTTTATCACTTTGAAGTGAAGACAACTGCTGTCCTGATCAATGACTTTGAATTTAACTTATTCTTTTTCCGTCTTGCTCCCTAA
AGCCTTTGGTGGACAGTTTTGTTCCTTGGTTCTTGGGCTTCCCCTTCCTAAGAGTTTTGTTTGCATGTCTATTCAGATGCTAAAATATTGTGTT
AACATCCATGGTGATTATTTTAATGTTTGTTCTTTCAGTTTGGGCAGTTTGGCATTTGGGAATTATACGTACTTTGACACTATTAAATTAGATG
AATATAGAATTGTATCCTTATGATGAATAAACCTTTTATAATTACTAAACTCATGGTTTATAAATAACAAAACTCCCTGCATCTTTTGTCTTTA
TCTGATATTAGGTGTAGCTGCATCAGCTTTCTTTTGGCTAATGTTTTGATGGTGATATCTTTTTGTATTGCTTTATTTTCAGTCTCCTACTTTC
TTTTGGATTATTTAATCCATTTACAGTTAATGTACTTACTGGATTTTAAATTTTACATCTCCCTCTCACAATTTCTTTTACTTCTATAACTTAT
ATTCTTTTATATTCTTCTTGACTTTTTAAAAATGTTAATCAATGCCAATGTTTTACTATTCTCTTTGTTCTATTTACTGTCCCGTTAATACTGT
CTACTGTGATTCTCCAAGTCATTACCCAAGGATTATATGTTCTTTCTTTGACCTGTTACAGTTTACTTTAAGTTAGTCTTTCTTTTATTTTGTA
TCCACCCTGGGAATTCCTCCTGGGGAATGATGTTATGCTAGGGTACAAGCTACCATTGAGTCACCACCCTACCCTGTTAATTATAATGAATAAT
GTAACTAACTAGCTTGCAACAGCTTAATGTCATTGCAAATATTTCTCAGCTTTCCATTATTATTATTATATACTTTCATATATATATATATATA
TATATGTTACAAGATTGTTAAAGTTACAAGATATTGTTGTATTAAATGATCAATGAATGTTAAAATTTACCAAATATTTACTCTGGTTTTTTTT
TCTTATTTTATTTATGTGAGTAAATTGTAGCTGTGTTCAGACACACCTAAAGAGGATAGCAGATTTTATTACAGATGGCTGTGAGCCACCATGT
GATTACTGGGAATTGAACTGAGGACTTCTGGCACAGCAGTCAGTGCTCTTAACCACTGAGCCATCTCTCCAGCCCTACTCTGATTATTTTTATT
CCTTCTGGTGTTAGTATCATCCTTCTGTGATCATGCTTTTTACTTTTTTATTTTTCATTTAGAATCATGTTTTCTGAGTTTTGGTAATGGCACT
CCACTGTGGGAATGTGAAATTTGGGTCATTGCCATCTAAAACTCAGTCACTTTGGCAGCATGGCTCAGTTGAATGGCCTCAAATCCCAGGACAC
TTATTTCATTATGTATCTGTCTCTGCTCCAACAATTGTCCAGAGATACTGACCAGTAACAAATCTCCCAAGACAAAAAAGAAGAAAAAAACCAC
CCAGGCCATTATCAAAATCACCTCACTTCATTGTTTTTTTCCTCCAGGATCTTAACTGCTCAGATCAAATGGACCATTTAAAGAGCTAGAAATG
ATAGATAGATAGATAGATAGATAGATAGATAGATAGATAGATAGATAGATAGATGATAATAGGTAGATAGATGATAGGTATAGATAGATAAAAG
ATTAATATTTGATAGATAAATAGATAAAAGATAGGTAGGTAGGTAGAGAGGTAGATAGATGATAGGTAGGTAGGTAGGTAGGTAGATAGATAGA
TAGATAGATAGATAGATAGATGATAGGTAGGTAGGTAGAGAGATAGATAGATAGATGATAGGTAGGTAGATAGATAGGTAGATAGATAGATAGA
TAGATAGATAGATAGATAGATAGAAGTAGTTGGTGGTAGCAGTGATGATAAGAAGATAAAAAAGCAACTTTATGTTGCCTTAGAAGTAGAATTT
GTCTTCCCATATAAAACTATATACAACACTGAATCTATTATAAAACATCCTTGAACATTATGTCATGTGGACAGACAATACTCTGTATACACAA
AAGGCAATACATTCTTTATCATCTATTTAATGGTCAGTATTAGTAACCAAGTTTAATCACAACCTTCTAGATAATACTACTGAGATGCCAATGA
CTGCTTTCAATATATAAGCCTGAATTATGAACGCTCTATAATGCAGCCATTACTTTTTGAAATTTTTAATATTTTTATTGGATATTTTCTTTAT
TTATATTTCAAATGTTTTCCCCTTTCCAGGTCTCCCCTTTGGAAACTCCCTATCCTACCCTCCCTCCCCCTGCCTCTATGAGGGTGCTCCTCCA
CCCACCTACCCACATACCGACTCCAACCTTCCCATCCTGGTATTCCCTTACACTGGGGCATGGAAGACTCTCAGGCCCAAGAAGGGCCTCTGCC
ACATATGCGACTGGAGCAATGGGTCACTCCATGTGTACTCTTTGGTTGGTGGTCCAGTCCCAGGGAGCTCCAGGGGTTCTGGCCAGTTGACCCT
GCTGCCCCCCCCACTCCACGGGGTTGCAAACCCCCCCCCCCCCTCAGCTCCTTCAGTCCCTTCTCCAACTCCTCCATCTGGGACACTGCACTCA
GTCCAATTATTGACTGTGAGCATCCGCCTCTATATTTGTCAGGGTCTGGCAGAGCCTCTCAGGAGACATATCAGGCTCCTATCAGCAAGCACTT
CTTGGCTTCGGCAATAGTGACTGGGTTTGGTGGCTGCATATGGGATGGAGCCCCAGGTGGGGCAGTCTCTGGATGGCCTTTCCTTCAATCTCTG
CTCCACCCTTTGTCTCCAAATTTCCTCCGGTAATTTGTTCTCCCTTCTAAGAAGCACTGAAGCATCCACACTTTGATTTTCCTTCTTGGGCTTC
ATATGGTCTGTTCATTTTACCTTGGGTATTCCAAACTTTTGGGCTAATATCCACTTATCAATGAGTACACACTATGTGTGTTCTTTTGTGGCTG
AGTTACCTTACTCAGGATGATATTTTCAAATTCCATCAATTTGCCTGGGAATTTCATGAAGTCATTGTTTTTAATAGCTAGATAATATTCTATT
GTGTAAATGTACCATATTTTCTGTATCCATTACTTTTATGTATCACAACTTGGATTTTTTTACAGGTTTAATTTAAGGATCTTTAAAAATAAGA
TGGGGTTAAGATTGCAAGCCTATAATCACATGTATCTGGGAAGCTGAAGCTAGACAGTTGGAAGTTCAAGAATTCCTGGGATACATAATTAGCT
CAAGGTCAGCCAGAGCAACTGACTGATACCTTATCTCATATAAAAAGTTAAAAAGAGGTGTGGACATGTATATCTGTGATTGAATGTTTCATAT
CCTAGGTGCACTTTCCAGTACTAAGAAAGAGAAAGAAAGAGAGAAAGAAAGAAAGAGAGAGAGAGAGGGAGGGAAGGATGGAGGGAGGAAGGAA
GGAAGGAAGGAAGGAAGGAAGGAAGGAAGGGAGAGAGAAGAAGAAGAAGAAGAAGAAGAAGAAGAAGAAGGAGGAGGAGGAGGAGGAGGAGGAG
GAGGAGGAGGAGGATGATGAGGATGATGAGGATAACAACAACAACAACAAGAACAAGAAGGAGGAGGAGAAGGAGGGGGGAAGAGGAGGNNNNN
NNNNNNNNNNNNNNNCTTATGTCTGTACATACGAAATACTAAAGCTTTATCTAATATTTTTCTTCAAGATTACAACAAGAACATTGAACACTAA
TACAGAGAACATCTGCAGTGATGTGATTTGAGGAAAATGAACCCAAAGGCTCACTTATCCAGGCACTTTGAATCACTTTCTTAACTCTGGCCAC
TTAATGAATGTGGGGAAAAGGAAAGAAGTTGAGAAAATTTGAGATAAGACTGTTGGAAAGCAATATGTTCTATAGTTATTGTCATGAATTATTT
TCCCCAAGAGTTTCTTTTATGGATATTGTCCTCATATAACCCAGGCTCATCACACAGGGCAGTTTATCCAAAGCAGAGCTAACTGTGGTTGGAA
ATTTTGCAAATATTGTAAAGTCTTGAGAAGCCTAAAACACATACAGAACAATGTGGAATTAACTTCTGTGAGGCAGGACCATAAAGCCTTGAAC
AACAATTCATATTTATTTAGAGAAACTAGGCTAAAGCAAAGCAAACAAACAAAAGAATTGACTGAGGGAAGTCCAAAGCGTATTTTGTTCCACC
TCCTACCTCAGCCTTGGTAAACAGAGCTCTAAATTTCTATTTACAATGATTACATAAATATTATATGGTGACATTTCTGACTGTGAACCACCAT
ACACTCAAGTATGTAAAGAAAGTGTACACACAGGAATCAATGTGTTCCAAGAAGATGCTTGAATAATTGTCTAACAAAATTTATCCCAGGAGAC
AGACTATGCCAAGTTATAGTACGAAAGTTATAGTATCTGCATTGTACAATAGCACAGGAGAGAGCAATGTTACTACACCCCAAGTTTTTCTTTT
ATGGTAATAATAATTTGTTCTTTAACATTTAAATGATTTATGAGTTGTAGATTCAAAGCATACATTGTGATTTCTCTTCTGTCTTCATTACAGG
ACAACACTGTCCTATTTTTGTCTCCTCTGTTGTTATTATGTTTACATAAAAATCTTTCAAGACAAAATAGTTATGTTCTACATACTCTCTTGCC
CTTAGCTTCCGTAACTTTTGCCATAAGAATTAGTCTTTTCTGCCCACACTGTAGTTATACCAACATGTGACTTTGAGTACCATAACTGAACTTG
AGGCATACTATATTTTCAAAGGGCATTATACATTTTTCAGCACAGGGTATTAGCCCATTGGGATACAGTGAAAAAAAAGTCTTTAAAAACTTGC
TACAGGTTTGAGTTGCAATGTATGCTTTGAATCTACAACTCATAAAGAATCTAAATGCTAAAGAACAAATTATTATTACCATAAAAGAAAAACT
TTTGGGGTGAAGTAATGTTGCTCTCTCCTGTGCTATTGTATAATGCAGAGAACTTGTAAGAAAGTGAGCCACTTGGTAGTTCAAGAAGGATGTT
AGAGAGAATCTTAATTATATAGCTATGTGAGTCCAGAAGTGTGTAATTAGTATATTATTCCATATGTGCTCTTGAGCTTTTAATTTCAAGAACT
GTATGTTGGAATGATTTTGCCAGAGGCAAGTTAATGACTGAAGGAAGGAAGGAAGGAAGGAAGGAGGGAAGGAAGGAAGGAAGGAAGGAAGGAA
GGAAGGAAGGGGAAGAAAGGAAGATGTGACTTACTAGAAGTTGATAGTAGAATTCTCACTGGACTCTAAGAGTTTAAATTTATTACAGGTTCTT
CCTCCTAGCCTCATGCTCTTAGAAATAAGACTCAGATTCAAAATATATTTTCATATACTTTGGCCATGTGGCTAGGCTCTTCTCTGACTAAAAT
CATAACTTAAAACCAACCCATTGATTTTCATCTACATACTGCCACATACCACATGTTACTTGTGCTATGTGCCTGTCTCCTCACATCTTCCTGG
GTGGAACTCTTGTCTGGCTCTATCCCAGAATTCTTTCTCCTCCCAGATGTCCCACCTCCCATTTCCTGCCTAAGCCATAGGCCATAAGCCTTTT
AATTGACAGGTGATGCACCCATACAGTACACAAGATAGTCTCTCTACAGCTAAGTTTTGACATTGTTTCCTAATGTAGAAATTATTAGGAGCTA
ATTTCTGAAAAGTTTTAAAAAGTTATGTAGACTGTCCATTAACTAACGTTTCAGAAAATTGTACACAGAGAACTCTTATTTCCTTTTGCCTAGT
AAATTACCTCTCTACATAAGAGCGTTAAACCAGATATGTATGTCATTGATAATCACTATATTTTTTCCGCTCTTTACATCCATTCCATTAGAAA
ACTTTATGGCTTTTTGGCTCCATTTTCACCAGTCTTACTGCCTCTAATCCTAATACCTTTTTGAATGGAGAACTGTTAGATCTTACAGGCAGTT
CAAATATCCAGAAATGAGACCAAAGTGGACTATAGGATGATTTCCAGAAGTTAGATAGAAACCAGGATTCCTTAGAAATTTGTAAAGCCAGTTC
CTATTTACCAAAAGGATTCACTTCTCTTGTCCCTGGCACAACGGACATAGAGCTCCACCGACATGTGCCTGTGGTTGCATTTCAAAGCCCATGC
CATCCTCCAGGCTCCTTCAGCCCCTACTGAAATATACTTGTTACACATTTCAAAGGCTATGCCAACCTCCCCAGACATCCATCCTCCTTATACC
TATTTGTTCTCTTTTCAACATGAATGATTTTCCCCTTACCCTGGCTATTTTCCCTATACTTTCCCTCTATCTCCTGCTCTCCTCTTTACTCTCT
CACTCTATGGGCTATTCTACATTCTCTCATAGATGCACTGGCCATGTCCAGTCTGCTTTGATTCTCTCTACTCTCTCTGATTCACAATAAAAAC
CTTCTCCTCACCTGTACCATGGAGAGGACATTTCAATTGTTTCCTTACTGTTTCCCTTGCAAAAGGAAGATCACCCCAAAATTTGGTGCCAATT
CTTCTACTAGTAAGCAATCCATAAATATTCAATTAGTGCGTATATAGACAAATGGACTTCTCCTCCAAATTAATAAAACTTAAAATATAACAAG
TTAAGAAGGCATGTAACATGAGGAGCTGTAAAGAATTCAGATAGCCTTCTTTGGTATTTTAATGGAAATCTGTGACTCAATTTACATGTGGAAG
TTCTAGTACACACATGCTTCATTTAGTTAAATACGTATACAGGTGGAAGTTACTATATCTCTTGCCCTTTGCCTTGCAAATTCCACTCAATCAA
TGCCAAGAACTGAACTAAGAAGACATGTTCACCTCTCTTTCCCTTCACGTTCAATGTGACTCAGTTGTGACCCTGAAAGGACAGTACATTCCAT
CTGTCTCACACCTGCCTGGTGTCTGGGATCCATCTCTGGGATTGACAGCATCTGTGTCCTCTGATTTCTACTCTTTAGAAAAAAAAAATCAATG
CCCACATCATATTGGTAACCTTTCAAAAAGCTCAAGAAGAGTGACAAGAAAGCAAAATTGCTCCCAGGGAGCTTCAATTGCTGGTGAAAGGCTG
ATCCAATAAGACCTCCTGGCAGAAAGCACAGACATTCCAGGTCATTCCAAATGCCTGTGACAATATGTCAGTACACTGTCTGACTGCGTGTGTA
GTAGTGACTCTTAACATGGTTATTTACTAACCACGTGTTGCCATGGAAACAAGGTAAAGCAACATGCTCTTGAGACACAGAGACTTAGCATGTT
AGAGAGGTGGTGCCTAAATCCCATTCTACAGCCAGTAGGCTGTTCACACAGGCAGACCACACCCCTCTAGGCCTCCTATTCTTCCTTGGGACAT
GAGAACCCTGTAGCCACTCATCCTCAAGACATGGTATCCGCTCTCCTCTTGTATTTGAGAAGCATAACATTCTGAGGCTAAAGGGCGGAGCCAG
CCATCTTCTTGACCGGTTGGGCTTACAATTATGTACTTGACAATCTCCAACATGTTTGAATCAGAGAGGAATACAGTAAAATTCATTCATATGA
TGCTCTGGTACTCCTGCTTATTGAAATAGAAAAAACAGACATACATACTTAGACTCTCAACGTTTGCAGGAAAAGAAGTTGAAAATATGTTCAA
GAGTTCAGATGGCTTCTTTGATTCGTGGTAAGTTTGAGTTCTATGGATTTGGGTTACTCGAACTCTGATTGGTCTCTGGAGTACATGTAGACGT
TAAGATGCTATATGCTCTGAGAGAACAGTGAGCTGAGAGGGAAGCCTATAAAGTAGTGACACTCAGATATAGAAACATTTTCATATGATAGTAG
TAATGGTGCCAGCACTTCTTCCACCAATGTCACTGACAAGCTTCTTGTTACTGGAAGGAGAAAAAGTCATCAGACCTTATGAAAAAAAGGTGCT
AGGAATACATGCGCAGGGATTTTCTTATGTGCAAGATTCACTGAGCTCTTTCTTATGACCATATAACCCATCTACATAAAAATATTATTAGGTG
CTAAATCCACAGCAACTCAAGCTTTGGAGCCTTGGAAAATTGGCTTTAGGAAAAGAGATCACCTGGCAAGCTCCATGTCTCCCTTTCTCACAGG
ATTTTTGGAATAGGATTAGGGTCAACAGTGATTTTTAAGTCTCACAAAGAAAACAAAAATCGATTTCTTGCAAAACTATCGCTGTGCAAGTTTG
GTTTTCCAGCATAGATCCGGGCTGCCAAGAATGCTGGCTCCAGCTAGGTCTTCATTAGCCAAGTCAGGGGATAGTCAGGGCATTCATCCAGGTG
ACCTGAGCCAACCCCACCCACTCAGAAAACCAAGACAAGTTTGCCTGGTAGAGCAAGGGGCCTCACTGGCTGCAGGCTGTGACTCCATGTGTCG
TGACTGACACCACAACCAGGTATGTCATGAGAAAAACTTTGACAAGCTGGATGGCAGCTCGTCGTTCCTTGGATTTCTTCCTTAACTTTGCTTT
CTGTGGCTAACAACTGCCATTGAATATAAGGTTATGTAGGAAGAATTTTAAGTATGCCTTAAGAAGTTAGGATTGTGTCCTTTTGTAAAAATGA
TAACCCTACAGAGGTCCCTTTCATAGCATTAACCTGTGGTCGTGTAAATGGGTACTCAGCCTTAGAGCCCATCTCTTTAGAAAGCAAATCATTA
TGCAATCAGACAACTTTAAAGTTGGAATGAAGTTACCACTATCTCAATTAGGAGTAAGGGGAGAGTATAGTCTGTAGGAGTTATGCGACTTTTG
AGGGTAACACAGGTAGCTGGGCATGCAACCAAGCATACAATACTGGCTGCGCTCTCATTCAACGTATCAAGAGTCTTCTCTGATATGTGACACA
AGCAAATAGAAAACTCATAGCCTCCAAAGAAAGATCTTAGATTCATCAGGTATGTTTGTATGCATATGTGTGCATGTGTGTGTGTGTGTGGAGA
GAGAGAGAGAGAGAGAGAGAGAGACAGAGAGACAGAGAGACAGAGAGACAGAGAGACAAAGACATTGAGGCAGAAAGAGAGAGATAGATGAAGC
AGAAAGAGAGATAGAGATATAGAGACACAGAAACAGAGAGAGACAGAGAGACAAAGACAAAGGAAATAGTAATACCTTGGGTTTCTGGCTATAT
AGTCTCTCTCTCTCAATTTCTTGTCATTGTAGCCTGAAAACATCTAAAAATCACAGGAACAGGGATGACTGTGCCTCAGCAAAACTGTTAATAA
ATATAAAAATGTGAATTTACAGCAGTTTCATGTGCTATGAAAATTTATTATGTTTTGAGGGGTTCTTTTCTACAACATAAAACCCATTCTTGGC
TCTTAGTGGACCGGATTTTGCCTAGGACAATAGTTTATCTGGCATAGGGTAATAGAACCAGCCCAGGAGAGAATGAGCTGTGGACTCTGTCCTC
CACTCGGGCTCTCTGACCTTGTAGCTGACTCCACAAGCCCCCTTTTCCTTTTCAAGGGTTCTGTCACCCTACACTGTGAAATTAGTCACTGTGT
GTCTCTTCCCAAAACATTCCTTATTTCTTAAAGTCAGTATAATTACAAGGCTTGTTTAGAGCACGGTCATAAACGTCATAGTGAGGACTGGAGC
AAATGTTGCTTTGAACATAACTCTGTGACTTCAACTAGGTGGCTATGGTAAAAAAGGAAGTACTTCCGTTTGCCCATAAACAACTGTCTTAAGG
AATTTGCTACATTCCTTGAGTCAGCTGGATCTCTGGACAGGCCTGGTTGTTTAGCTTACTAACAGCCAATCTTTCTTTCCGACTGGCCCTGAGT
ATGTGTGTCAGTAGGACAGAAGGCCCTCTGGGTGAGAGCAAGCAAATGAAGACCACTGTTTTAACTCAGATACAGGCGGTGGGGGTAAGTCTCA
GCCAAGACAGAAACGCTTTTCCCTCAGCTGTGGTGTGAGTGTTTCCTTTGCAAACTTTGTTGAAATGTTATTGATGTTGTGATAGTGTTGGTAG
ATTTAGTGTCTAACTGGTGGTGAACTGGGTCATGAGGTCTCTTGCCTTATGATTGTCTGCAGTGTGGAGAATGGGTAAGTTAGCATGGGAGGAG
TTCGCCAAGAAAGGGAAGGCTCTCTCTACATCCTTTCTCTGGCCCCTACCCTCTCTGTGTCACATAGGTTTACCTTCCTTTCTACACCAGATGA
CACAAAGTTTGAAAAACTTCAGAACCATTAGACAAGTAAAAACTTTCCCAGTCTCCCCCAGGTTTCTATAATAGTTGATAAAATTGGCTATGAC
TTGTTTTGTTTATGTTGGTGTTGTGTTTGGCATATGTTTTGGTTCCTTGACCCTCAGACCCAAAGAGAGAGGTGGTTTTCTCAAGGCCAGGATA
AAGGCACAAAGACTTTGGCTCAGAGCCACCACAGAAGAACTGTGAGAGAGTCCCAGGAGCCATAATCCAGGCGTCTTCCATATATGAAGTCTCC
AAAATCAACTAATATTGCTTACACTAATATTGATACCATTCAACATGACAACTTCTTAAAATCACTGACAGTGATGCAGTGTGGGGCCTATTAA
ATATAGTTATCAAAACTTTGAGTTGCAAGTGGCAGAAACCAAATGCAAGATGAGACATATAAGGAAACGGCCACATCAGCTTTAACTTTGGAAC
CAGCCATAAGCATGCCACTGCTTACGCATCTCTTCCCTCTCTGCTTTTCTTTGCGTTGACATCATGCATCATGTGGAGAGACACACAAGCTCTA
GCCTTCTGAGGCGCTTAGAATCCTGATAGCTCACAGTCTCAAAAAGGAAGAGATTTTATCTCCACATCTATCTCAGTAGACAAGATTTTCTGTC
CTTGTTTCAGACATTGCTCACTGTCAGACCCACCAATGGAATGGAAAAGACCCTTTTTGGGGTGGATTTTTAGATTCCCAGTGATCAGCATGGA
GCAAACAATGGGAAGTTGTGTGTGAAGGAAGGGGGGGGGTAGATGCAAGGCTAAAAGCAGTGCCTGCACCAACTGATTCCTGTATCTAATAAAA
ATGTGGCTTTTAAAAACAGTAAGCATCGTAGAACCCACCCCATGAGTGTTGAGGTGATTCTGGATAATTCTTTCCTCTCTCATTCCTGAGCCGT
CAGTCTTCCCTGGTGAAGACCTGAAATAGTACAAAAGACGATGAATGGGTTGATACTATTGTGAGAGTTTGGTATAAAACTCAGCTCTCTTTTT
GCTCGCTACACTCTTTGATTTCTACCTTTTGTTTCTACCAAGAATGATATACCAAGGAGACATTTACTAGCTGTGAATTCCTGGACTGTGGAGT
TCACAGCACCCAAAGCTGTAGGAAAAAAAAATGTATTCTTTAGAAACTACCTAGTCCTAAGTATTCTGTAAAGAGAGCACTAAGCAGGCTGCAG
TGGCTGTGGCTCCTGCAGAGTCTTACTTCCACACAGTGACAGGGGTATGTGCATTCATCGTCCCCTGCTCTTAGAAGTTGGAATGCAAATCCCT
TGAAGCCAGGGCCAGAGTCACTGTTCCACAGGGGACTGCCTTCCCTCACAATACAGGACCATCACTTTTAGCACAACCCACAGGTCTTCTGAAT
ACTCAAAAGCATGAAGCTAACAGACAGAGCCTTATATGGTGCTAAGGACAGAGTCAAGTACAGTGTTAGTTAGACACCTATAATCCCAACACAG
ACACCTGAGGCTTTTCCTTTAGAAGAGATGGGAAGCCAGGGGTGTGGAAAATTAAGGTTTTGTTCCTGCTCCCTTCTCCACTCCTCCTCCTCCC
TCTTCTTTTGGTGTTTTTGCTGGATACTGTGTTCCATGATGCAGTTTAAACTACCCCTAAATTCAAAATCCTCTTGCTTCAGCCTTCAAAGTAC
TAGGGCTATTGTCATATACTGCCATTCGCCAGCCTGTCAGTTCAGCTGTTTGACTTTTAACTGGCACATACCATTATATGTATTCATTGAGTAC
ACATGTTATTTGGAAAGGTATAGACTATAGAATAACTGGCTCTACAGTGTATTGCCTCAGTTCTGTGGTAAGAATGTCTTATATTAATTGCCAC
TGTGGTTATACCATGAACATATTCCCCTCTTACAACTGAAATCTTGTTCCCTGTAATCAACATTTTCCTACCAACCCCATAGCCTGGCCTGCAC
ACTCTTAGTCCTCTTGCTCTATACGAGTAGTAGTTTTAGGTTCTACATAGAAATGAGGTCATGTATTTGTCTTCCAGTGTCTGGCTTATTTCAC
ATAACACTCTGGAGTCATTCTTGTTATCCAAGTCTTTCTGTAACTGAAAAGTATCTCACTGGGCCTGTGTACCACATTTTTATTAGCCATGCAG
CCATGATGAATAATCAAGCTACATTTTTGATACAGCAAATATTATTGCAACCAACATGGGATATCTCTTTGCCATATTGACTTTATTTATTTTT
TTATACACAACTAGTAGTGAGATAGCTGGGTGATGTGATGTGTCTACTTTTAGGTGTCTGAGGAAACTCCATAGTGTTTTTCCTAGTGGTTGTA
CTAATTTACATTTCTACCAGCAATGTGCAAGAGTCCCTTTTCTCTTGTATCCTTGGCAACACTTATAAATTTTATCTTTTCAGAGTAGTGGTTC
TAGCAATGAGGTTGTATCTCATTGGCATTTTGACTTCCAGTTTCTCAATAAACATGATGTTAACATTTTTAAATGCACATAATAGGCACGATTG
TTTTTTTCTTTTGAGAAATGGGCATTCTATTATTTATCCATTTTGAGCCATACCCTTGTTATTAGATTGCTTTGTTCTGTATGTATTTTGAGCA
TTAAGCCCTCCTCTGATGTATAATTAGTAATTAGAATTCCTTCTATCCTTTCATTGTTCACTGGCACATTTTGAAGAGATGTGCTGTGACCTAG
TGCTGGCTTTGAAAGCATCACCCTGCCTGTTCTATTGGAGACATACAGTCTTCAGAGGCACACAGAGAGACAGGAGAGCAATGAGGAGCTTGGT
GTGATCTCCAGGGTAAAGACCTCCATTTAGGCCAGGTTGGTGCTCTAGATAAAGGTAAGAGGAAGCTGCATTCGCTCATCTCATTTAAAGACAG
AGGAAGCAGGTTTCGCCAGTTTGAACTGCCAAGTTGTATGGAAAGAGATGAGAAAAGTCAAGGATACCATCAAGGCTTTTTGTTCTGAGAAACT
GGAGTAAAAATAAACATTTGTAGTTTACTTTGTTCTTGACTCACATGAAAGGGAAGTATATTTCTGTGACAGTTAAAATAAGTACATGGGTACT
TTGAAGTATGGTTTTAAAACTGTCTTAAACTAAAGCCATGAACTTTTATTGTTCTGCCTATGCAAGCAATGTAAAAAAAATGCATGCATATGTA
TTTTTCAGAATACTAAGATATATAATAATATAATACACACACACACACACACACATATATATATAGACTGTTTGCAAAACAATGAATTCTTTTC
TGTATCATTTTATAAATGATTATGTGTCCAGGAATCAGAGTAAAGCTTTTTGGAGATGCATGTAGCAAGGGTTCCTTATTAATTTCATAATTTA
ACACATTGAGCTAATTGGTTTGCTCACAAGGGCCATAGCTGTTAGTCACTGTACCTTTATTCAAGAGGAGAGCAGCTAAAGCTGGATGGTGCAG
TAAGATGAACCTTGGTCCTGCAGTCTGTGCATGGAACTGACCCCTCTCAGCATCAGACTCTCCAGCCATTCCTTTCATTACTTTGGACCTCGGT
CCCACATCTTATAAGTGAAGGTAACAGAAGCCAGTGTCACAGATGCAAAAACAGCGTCTGCACTCCAGGTGTCCCCGATTACTAATGACCTCCA
CTGGGAGCAGTTTAGTTAAACAAATATTTGGTTCCAGCTGTATTCTAATTTATGTACTTGTTCATGTTCTTCTTTGCTATAAATGATTGCTGAC
CTTATTAACTATGGCCCTTGTGAGTGAAGATTGAAACCAATGAGCTTAATGTGTTAAAACTGTGAAATTAATAAGGAACTTTTGTTACATGTGT
CTCCAAAAAGCTTTATTCTGTTTCCTGGGCACACAACGATCTGAGCATCAGAAATGAGCAGAATAAAGCTAGACACTGTAAATCTATCATTGCT
CCTGAGAAAACTTAATTAAAAATATACTCCAATGTCTTTTTCATATTTGAAAGGTACAACCTCAGATTATTAATTTATTATGGTATTTTACTTT
GAGACAGGATCTTATGTAGCCCAGGTTGGCCTGGAACTCATTATGTAGCCAAGAGTGATCCTGATTCACCTACCACCAACTCACACTTGCTAGG
ATTATAGGCATATGTCTCCATGATCCATAGCAGATCCTTTAAAATAATGGCAATGAATAAATAAGTATATAAGCAGTGAAGAAACAGGATGACA
GTGTGAGACTAGATAACCAGATAACCCTAAACTCTAGACACTGGTATGTCTGTGTACCCTAAATTATTTAGGCTTGTGGTGCAAGACGTCAGAA
TCCTTCTTTCCTCAGATGAGAACATTGATGTCTTCATGTCTAACGTGTCTGTTTGCATTCAATGAGATTATGAATATCTCCCTGGGAACTGTTG
GCTCTATTAGTAGGGAATATATATTCACATGTTTTATTTTAAACATTGCTGTTCAGTTTTGGAAGACTGTAGCTATTTGAAGCTATCCATGCAC
TCTATTAGAAGTGGGAATTTATTTTTAATTATCAATTAAGAAGTCATCCATTGTATGTGACTGGCTTTGAACAAAAAATAATAATAATTAAAGC
ACACACACACTGTGTAGACAGACATTGTTACAATGCCAGTAAAGGGAACAACCACAGCACATATGGCATGAATGTTGCTTGAGACCTGAGTATA
ATCCTTAGGTCTTGAGCAGAATGAGACAGCTGACTTCCTGTAGCCGGAAGAAGAATGAGTGCTTGCTGTGTACAATGCTCAGGAAGGGCTGACA
GAGACACAGGCGAGCAGCGGAGGTGGGGAAGACAATTACAAAGGAAGCAACGAAATCTGAACAAATCAGAGACTCTCTAGAAGATAACCCAGGT
CTCTGTACGAATAATCAGTCTGTCAACCACTTCCTCTACCTGCTCTCTCTATATATTTTTATTAGATATTTTCTTTATTTATATTTCAAATGCT
ACCCCAAAAAATTCCCTATACCCTCCCCCCCCCCTGCCCTGCTCCCCTACCCACCCACTCCCACTTCTTGGCCCTGGCATTCCCCTGTACTGAG
GCATATAAAGTTTGCAAGACCAAGGGGCCTCTCTTCCGAGTGATGGCCGACTAGGCCATCTTCTGCTACATATGCAGCTAGAGACAGGAGCTCT
TGAATTGGAGGACTCTCTGCTAATTGTCTTGTCTATACCTGATAGCCACCCTTCACTAAGCACTCTCTGAAAGTCAGACTTTATATACACAATC
TTCTCCTCTCACCTTTAGTACTATGTCGTTATCTCCATATTCAAATGAAGGAAACTAAAGCCAAACATTTTTCCTAAAAGACAAACAGCAAGTT
TATGGAAGACGTGTAACCTAAGGCTGGGATTTTCCAGGAGCAGCTCCCATGCCTTCTTCAAGACCCTGGCTTGCCTCCATTAGCAAATGTACAC
ATCACGTGAGCATGTAGACCCCAACTGGCTTCTCCACTGTGTGCCCCGTCACCTTAGGAGTGAGAAAGTAATGATACTTGCAAACAAAGCATCC
ACGTGTTACATTATCTCCCACACACACTACAAACCACACACACTACAAATACTTAAAACCAGCCCTCAGGCTTAATTAACAAGAAGTAAACTAT
ACAATTTTCCAAATGATATCTGGACTCATGTACAGTGAGCTCATATATTCATTTATTCCCAGAGCTGTATAACTTCAAAATTAAACTAATTAAT
TCCTTGTATTGTCAAGCAAAACATTGACAATTTTTTCCTGTGACCGCCTGTTCCTAGCATGCTTGTTCTTAAATGTGTAATGATATAAAGTCTT
AGGTGATTGTTTTTGAGTTGCGTTGACTTTCATGCTAATTATCTGAGTGATGGACAATGTGTTCCATCTCCTAACTCACATGGCCTAATAGACG
TGTCAATCTAACACAGTCATGGCATGAGTGCCAGCTGTTTTTGAAACATCGATCTGTCATCTCACAAGATGAGCCTCCCAATTTTCCTTAGTGT
ACTTAGTCATGTGTAACTAGGTCTTAAAGTACCCTAAGTTTCCTTGAGGCACAGACACATGCAATTATTTTCATCGTAAGTCTTGCCTGGATGA
AATAATTGAACATGAAAAGTTGCTGCACCCCAGTGAATCCAGTTTATAAAAGCGTGTGTGATGAATGAGATAGGGCAGATTCGAGTGATCGTTA
TGGAGAAAAGGCCATTCAGATTAAGCAAACTGACTCCTTCAGTGTGTGGGTGCCACAGAAGGCATTCATACCAGAAAGCTGGAAATAGTAATTT
TTCCACCTTCCCTTGATGTTTATGATTTGTGCATTTCTCCAAAACATCTTCCTATTAGGATGAACTCAGTCACAGGATGATAGCAAACTGCGTG
CACCAATGTGTCCATGTCTCTGGCTACTTTATAACAAACCACCCTGGACTTCATGGTGCAAAGCAATGATCATTTTATTATACTCATGAATTAT
GTAGGTCAGGAAATCAGACACAGCCCAGCAGTGACTCCTCTGTCTGTTGTGTAATGTCTAGGGTCTCAGCTGTGAACAGTCAAAGACTTGGGAA
CTCGAATCACTCTTAGTGTCTGTCGAGGATGATGTCAAGAAGCTGGGCTTCTTGGCAAAGGCTTTTTTGAACGTATGCTTTCTGCAGGGCTCGC
CTCTGAGGCCTCTGAACTCTGAAGAGGACCATGCAAGATCACGTGAGATCTTAGAGCAGATGCACCTGAAGCATCGTGCACGTGCACATAAGCG
GGCCTTCTCTAGTCTAATTTTGGCATCCTTGCAGCAATGGTTCACCTGGATCAGGGAAGCACTTGACTTACTTCTTAATGGGTGAAGAACAAGA
ACATGTTACTAGAAGTTTATTCAAATTGACTGGCCGTGATTACTGGTCAGCAACAGCTGCTGTGGAACTGTTGCAGGGGCAAAGGCAGTGTTTA
GGGTCACATAGTAATTTAAATATCACCTCTCAGGTAGGACCTACATCACTTCTGCCTGCATTTTAAGGCTTGTGGAGCCACGCCTAGATTCATC
ACGCAAGGGTGGTGTCAACTGTGTACTCAGAAGGAAAAGAGAACTACCAATATTGATGAATGGTGATGGTTATGACCACTTAAAAATACTGCCT
CCATGATGAAATGTGGATGTTTCTTTCAAAGCTAGTTTTTGTAATTATTTGAATCAGTTCATACGTGTCTTCTGCCATCCACCAAATATGCTTG
ATGGGCAATGCACGTAACATAAGATGCTGGATCCGGGTGTGTATACAGCCCCCATGAAAGGCAGGAAATCACTTGAAATTTCGGTGTATGGCCT
TTTCAATTATTTCTGTCTTTATCTCCCGCAGTCATTTACTATAGTTTGCACACCCTACTGTTAGTCAAAACCCTGATGTCATAGTCATCACATC
GGTACCCTTTTGTAATCTGTGATATTGTATAGAGTGTGTAGCTATAATTAATATGGAATTGCAGGTAGATACTATTAATTGAAGTGTCCCGATT
AATTTAATTATTTCTTAAATCATTTCAAACAAGAGTTATCTTACATCAAACTCTGATAGATAGAATGGTTCGTTCTTACTTTCATTTAAAATGT
ATATAGATATTAAAAGTACAAGTAGTGGATAAATCCAGGTATAAAGCAGCTTATTTTTCGAAAGCAGAGCCTGTGGCTATACTTCAACAATAAA
AAGAGCTAAAACCAGTGTGAGACCTGCTGGGGACCAGTTTATATTTTTGTCTATAATGAGAAAATCATAGTAACAAATTGTCAAACAATCCTGA
TGCCCTATGAGAAACAATGGAGAAAAGGCAAGCTCTGGGACAGGCTCAGAGGTGACAGGGTGGATTTAATTTACTTGTAGTTTGACATCAGGGA
TGCATCTGTGCATCTGTACATGTAACAACTTTAAATGCCCACCCTTCCTTTCCACCTTGCTACATCTGGTACTGTAGAACACTGCATACTAGCT
GGCCTGGGGACTCTGAGGATTCCCCTGTCTCTGTATCCCATCTTGCTGTAGTAATGCTAGGATTACAGACTAGGAATGTAATCGTGTGTGTTTT
TATGTTTGGCTTCTCATGGGTCCTAGGATCCATTCTTCAGAGTTGTAAAGCAAGGGCTTTGAACATTGAGCCATCTCCCAGCCTTGGGGAAATG
TCTTCACAGGTAGCTCTGGCTATGTAGAAAATTGCTGGCAAGCTTAGTTAATACAGGCACTAAATTGTGCTGCAGAATGCTCCAGTGAAACTCT
CTATGGATAACTTGGTAAAAGATCAAGGCACTTCAGTTAAACAATTTACCTAATTACCTATTTAAAGGCATCTAAAAAGAGATAGAACCAAATG
AACCCATTGGAAGCATAGACTAGAAATGCAGTAATATCATGAACATGTGTTTAAATAAATGTGTACATGGCAAAAGCCATACAGCAGCATGGCT
AAGCTTCTTCATCAACATGTATTCAAAATTATGAGAAAACCTATCTCAAAAGTTACATGAGACAACTACTTGTCCAGTTTTCTGTCCTGGCACA
TCTATGTTGAATAAAACCTGTCAGTATAGGCTTATGATCAGAGTCGTAAATTTGCTAAAACAGGTACCTCTTCCCTAGGTCTGTCAAACATGGT
CAATCAGTTACAGCTTAGGGCTTAAATCTCATCTAAGGCTGAGTCAGAAGAAGTTAACATAGGTTCTATCAAAACCACACACAATGCTGGAGAT
AAACATTGTAACAATGACTTTGCCTACTATGATAATGAAATGTCAGGTCTTTTGAGGTCTCAGTCAGATGTAAAACAGACTAGATACTGATTGT
GCTAACAGAAATTTACTGAGGAACTCAGCATTTGTCTCTCAGGAATCTTAGCTACATTGTGGCAGACAATGATTATCAGGTTCATTTACTTAGT
GCTTTGCGGTCCAAAGCACACACCTCTCATAGCCCAATGCTATATTTCTTGTACCCTCCCAGAACTTTGAAGGCTGTCATGGTCACTGTTCTAT
AGTAGTGAAGAGACAATGTGACCAAGGCAACTATTATATGAAAGAAATCATTTAATTGGGAGCTTGCATACAGCTTTATAAGTTTAATCCATGA
TTATCATGGTGGGAAGCATGGCAGCAGGCATAGCAGGCATGGTACTGAAGAAGAAGTTAAGAATAAGTGGGCCTAGCATGGACTTTTGAAACCT
CAAAGCCTCCCTCAAGTGACATACTTCCTTCAACAAGGCCATATCTTCTAATCCTTGAAGTCTTTTCAAAGAGTTCCACTCTGTGTTGACTAAG
CATTCAAGTATACGAGCCAATGGAAGCCATTCCTATTCAAACCACCACAAAGGCTAATCCTCTCTCAAAAACAAAAAAGATTATGTATATGTGT
ACATTTTCATAAATATGTCTTACATATTTAAAACTCTGCATGTAGATATAATTCTAAGACTTCCTAAACATGCAGAGGGTCTATAATACACTTT
GGCTAGCTTGTGTTCAAATGACATTTTGTTGTTGTTGTTTAAAGCTAGGAATTGCCTTCTTGGAAATATCAAATCCCTACAGAACTATTAATGA
AAAATAACTATCTCTTTTAAAGTAATTTTTTTAAAAAAAAAAGCTTCTCTTAGAAAAGAAAGGGAACTTTTTCTGGGGTGCATCTGTAAAATTT
TCTTCAGTCCTCAAAACAGTCCTTTACCAATGAAAACTCCAGACAGCAAAAGATAAGGTTGAGCTCACAGGACTGGTCAACCATAGGGATTCTA
TCACAACTCTGTGCTGCCTGCATCAAAGCCCCAAGACCCTCCAGCCTCTCCCCTCAGCCTCAGTTCTTGCGCGCGCCCGACTGGCCAGCAGTAA
CGACGCTGTAACAGGATCCTTCTGCACACGTTTATTGGGAGAGCTTGATTGCACAGGCGAAGAGACCCTGAGCCCAGAACTGGTGCTGCTTTTA
TAGGCCTAGGAGAGGCGTGTCTCATACCCGGATTGGTTATGCACTACGCCTCATTTGCATGTTCCTCATCTGATTGGCTACTCTCTCTCTCTCT
CTCTCTCTCTCTCTCTCTCTCTGTACCTCACAGAGCCTCATTATCATACCTCATTTGCATGTCTCACATCTGATTGGTTATACTCTCAAAGCCT
CATTATTATGCCCAGGCCAGGCAGTGTCTTTGCAAAAAACTTTACTGCATATGTACACATTGGTTGTTTGTCCAAACTTATGCGTGGTGGCCAG
CAGTAGTCAGTGCCACTCTGCAACGGCACATGNNNNNNNNNNNNNNNNNNNNNNNNNNNNNNNNNNNNNNNNNNNNNNNNNNNNNNNNNNNNNN
NNNNNNNNNNNNNNNNNNNNNNNNNNNNNNNNNNNNNNNNNNNNNNNNNNNNNNNNNNNNNNNNNNNNNNNNNNNNNNNNNNNNNNNNNNNNNN
NNNNNNNNNNNNNNNNNNNNNNNNNNNNNNNNNNNNNNNNNNNNNNNNNNNNNNNNNNNNNNNNNNNNNNNNNNNNNNNNNNNNNNNNNNNNNN
NNNNNNNNNNNNNNNNNNNNNNNNNNNNNNNNNNNNNNNNNNNNNNNNNNNNNNNNNNNNNNNNNNNNNNNNNNNNNNNNNNNNNNNNNNNNNN
NNNNNNNNNNNNNNNNNNNNNNNNNNNNNNNNNNNNNNNNNNNNNNNNNNNNNNNNNNNNNNNNNNNNNNNNNNNNNNNNNNNNNNNNNNNNNN
NNNNNNNNNNNNNNNNNNNNNNNNNNNNNNNNNNNNNNNNNNNNNNNNNNNNNNNNNNNNNNNNNNNNNNNNNNNNNNNNNNNNNNNNNNNNNN
NNNNNNNNNNNNNNNNNNNNNNNNNNNNNNNNNNNNNNNNNNNNNNNNNNNNNNNNNNNNNNNNNNNNNNNNNNNNNNNNNNNNNNATATGTTT
GCGTGCAGCTTCTACCTCATTTAAAACTTGCTAAGACCACATGTATCTGATCTACATATATTCCCTGTTATATCACAGATGCTAGGTGTGATAT
AGCACACAGTTGATACCATCCCTTCTCAATAGTTACTGCTAGCCAATTCCCATTGAATGCCTATGGCAATTGACTATTTTGTTAATAGAGTTGG
ACTCTGTCAATCAGTTGAAAAAGTCACTTCGTAACTTTTCCACTATGCTAAAGGTCATGGCAAAGTTGTACCAGGACTTATGAAGGTTCTTTGT
TAGTCTGTTCACAGTAGCAGCACTAGAGAAAATCTTATGCAGTTGTTATGAACAGTTGTACTTAAAAATCAAAGAAAAACTAGATTAATTTGAG
GAAGTCTCTCTTCACCAACAGAGTTTAAATGCCCTCCACATTAAGTGGATGTTTTTAAGTTTTCCATGCAAGAATTCAAGTTTCTAACTCTCAC
TGGACAAGCTGTCTTATTCCCAACTCTTCCTTAGGATCTTCTTTTTGATTATATTACCATAAATGTTTATTCAACATGTGTGATACTCATGACT
ACTTACCATTGAGAGAGTAAGTGGCAGCCTAGCCAGTCCAGGGCAGCCATGTTTCCTTACACTGATGAGCGATGCCCTTAATCACCTAAATTCC
AAAACTATTACACTTCCCATGCAGCATTGAGCATCAAACCATTCCTTATAATAATACCTCAGAGGTCTGGGCCCTTTAGCTCCCTCAGTGACAA
AGCAATGACACTAAGCACTGTACAGGACCGATCTGGCTTTCAAACTAAAAACAACTATAGACAGTAGAAACAATGGCCATCATCACTTTTCTTT
CCTCTTAGGTGAAGGAACCAGAGGCTGATAAAACTTAAACCCCTACAATAGAAATTAAATAAAACAAATTTAGTGAGTCACTATGGCCCAGGAA
AGGCAATAAGTGGTTAAAAGGTAAACTGCTGTCACGATGCTTTCATTACACAGAGATTTTAGGGACATGACATGAATTTTGGCACAGAAAATCG
TGTGTAAATATCACGTGGGCTATGGTGAAAGGCTTAACTATTTATTTTCCTACCTCAGTATTAATTACCTGAGTCACATATATAAGAATGGGTG
AATAAATAGATAGATAGATAGATAGATAGATAGATAGATAGATAGATAGATAGATGAGTTCTTTTTTGTATAGTTTATAAAGAAGTTCCTAACT
AAAAACAAGTTCCAAAGTACTGTGCTCTTTTATGGACTTTCAATCAGTCTGTAAAGCTTTTGTAGGGCCTATCATGAGCCAGGCTCGGGGCAGT
TAGGAAAATGCAAATTTAATAAAGGCTTTGGCCATTAGGAGCGTGTGTGTCTTTCTAAGTTACGTCTATGCAACAACAATGCTGTCTGTACAGT
AGAGTAGAGGGCTCAGAGAAAGCAATGGAAATTCACAGAAAGAGGTGAAAGCCCTTGTAATTCATATACCCCAGAGAGGAACTTAAAGAGTGTG
TTTAGTAGGAATAGGCACCTGCCAAAGAATCTATGAACCCCAAGATATCCAAACTTCTTATAGTCCTGGAAGGAGTTTCTTCTGAGTTGGCTCA
GTTGTGCACTGACCGCTGTTTCCTGCTACATCTTCTCAGAGCAAATAGGAAAGGAAAAATGCTTCTGCTCTGTATTGTATGCTCCTTTCATTAA
ATCACCCTCGGGACAACTGAGTGTTCCAGAAATAGGTGTTGGTTAAAAAAAAAAAAAAAAAAAAAAAAACCAAAAAAACAGGTATTTCTGTGCA
ATCAGAAAGTGCCTCTGCTTTGTTACCAGCATAAAGCATTCATGAAATCAATTTTCAGCACCCACTGGATAGGGCTGATGTGCGAACTAGCTTT
GCGTAGCCCATCGTCTTCTTTCCGAGATGATTTGACAGGACTGGCATTTTATCATGAATACAAAGAGGATGAGCATATTCTCCTAATATATTCA
TTACTTCCCTCTCCGAACTGGTAAATAATATACATATGGTAATTTGAGAGACATAGTGTTCCCCATTGCTCCTTTTTATTCCTGGAACTCTGGC
TGTCTTTGTAAATGCTGCAAAAATCAAAGGCAAAATTACCTCAAAATTTGATTTTGGAGTCCTTCTAGTCTCACTTTCTGGTGCCCACACAAGA
GCTATTGCTTATTTTCTGTTCTGACCTGTATTATTCAATAGCATCACCCCTTCTGCTTGCAATCTTATTGTAGAACCTTCTAGAGTGACTCAAA
GAAGCCATCTATTTATTCATTAACAAGCACCTATTAAGTACCTACTCTGTCCCAGACACTGTGCTAAATGTTCAAAAGAATAAGGACCATGGAA
GCCTATGGCCCAGGCCCATTCTTGTTTTCTCGAGTTTTGTAATCATTTCTCACACAATTATAAAAATCCATGGCATCGTAGAAAGATAGGAAAG
ACTGTGGAGTGGATGCCGTAAACAGAACTAAATGAATAATGAATGACAAGCTGAGAAAATGTGAGTGTTTGCCAGAGCATGTGAGTCTAATTAG
CAGGCATAAACTGATATGCTAAACCAAAACGTGATGAGATTTTAGATCCAAAAGAGCCATTTTTATAGACTGGACCTGAAAGAATTGGATTTTT
AGATGGGAGTATGAAGGCAGATCTGAAGGGCAGTTTTCTTAGAACTAAGTGAAAACGAGATGTTTTACTCTGCACGGACTTGATTGACTTGCCA
TGGCTTGAACGATCAGAATACAAGTCAATTGTGATCAGTAATTTCTTCACTTGTATACTTAAAAGTGTTCATTGACCTACTGCGTTAGATGAAT
TGGTCTTTGCTGAAAGCAAAGGAAATTAAAGGTCTGCTCTTCTTGAATTTGTGTTCAGATGAATGGACAATGGGAGTAAATCAGTGTATGGAAG
CCCCAGCTAGATAGGCACCGAGACGTAGGCTGCAAAGAAGACAAATGGGTGGAAGATGTCTCTATAAATATACATGGTTGTTAGGGCAAACTGA
CCATGCACATTGGNNNNNNNNNNNNNNNNNNNNNNNNNNNNNNNNNNNNNNNNNNNNNNNNNNNNNNNNNNNNNNNNNNNNNNNNNNNNNNNNN
NNNNNNNNNNNNNNNNNNNNNNNNNNNNNNNNNNNNNNNNNNNNNNNNNNNNNNNNNNNNNNNNNNNNNNNNNNNNNNNNNNNNNNNNNNNNNN
NNNNNNNNNNNNNNNNNNNNNNNNNNNNNNNNNNNNNNNNNNTCCCATTCCACATCAAATGTGTTCCATGGCTGCAATCAAGTCCATGCTCAAC
AGTACATGAAGATATGACAGTCTGGTTTCCATTTATATAATTGTTTTGTTGCCTTCTTTATTCTTACTGGATGAGGTCTTATTGTGCTGTCCTG
ATTGACCTGAACTCTGGGTTTCAACAGTCCTGATACCCTCAGCCTTCAGAGCAAGGTGCCTCCCAGTTCTGCCTTATTTTACTCTCTCTCTCTC
TCTCTCTCTCTCTCTCTCTCTCTCTCTCTCTCTCTCTCTTTACTAACTATGAATTCACACCAACAGTTTCTAGAATCTCTTTTAAAGCATACCT
GATAATGATGCTGATATTGGTTAAAATAATGTAACAAATGCTTCTTTTATTACTTTATATGAATTACCTGTCATTTAATGCTCTGAGATGGTGT
GGGGATATAGGGCGCTGTTATCGTTCCATTTTATAGATGAGAAAACTGAGTACACAGAGATAAAGTAACTCACTTATTTCCATAAAGCAAGTAA
GTGGTGCCACTAGAGTATAAAATCAAACAACATAGTTAGAAACACTATCCTTATCTGTCTTTAGTGTTTATTTCTTCACAGCTCCATCATCTTC
ATAGACACACACACACCCTACTTAAAACCTGCATGTCCATAATTTCCACAAGCAAGCACCTTGAGCTGAAACATTCGGGGCTGTTTTAAAGTAA
ATTTTGCTATTATTCCTTTGGCAGAATTTAAATTGTGAAGGAGATTTTCAAGTGATTTCCTCTCAGGCTTCATTTAGAGGCATTGAATAAAGTA
ATAGCACCTTTGAGAATGCACCTTGACATCTTAGTGTTGGGCACCTGTAATGATAGCAACGTGGGAGTCTGAAGCAGGAGGATTTCGAGTGGCC
AGGCAGGGGAAAGAGAGAGGGGGGAGAGAGGAAGAGAGAGAAGAAAGATTCCTACTCTGGCAGACTAACTGTTTCTTTAACTATCACTATTAAA
TACACTAAATTATTCTTCAGCTCCTCCTTCACTGTGGATCCATGCCTTTAAAACAAGCACCGTTGTCCCCTTTGCCTGTGCATCCTGAGTCTCT
ATACACCTTTAGCATTCTGACCCAGGATTCTCAATTGATTGCCACTAAAACCCCAGATATGGGTACAAATCTGAGCAAATTGATCTCAATATGC
ATTAGCATAATTAGAATTATCTAGGGATGTCAGATCATCTTAAGCACCTACAAAGTCCTATTTTGAACACTTAAGTATAATTAGCATTTGTGAA
AGGTCTCTGGTTTTCAAGTGTCTTGCAAGACTCTTGTTTTTTTTTTTTTTTTTTTAGTAAGCTTCTAAAAGCTGCTTGTCTTTAGGTGTTCAGT
GAACGGGAAAGATAAACATTTGAGGCTTGCCCTTTTCCTCTTTCTGACTAAATGCGGGTCATAAAGTAGAGCCACGGATACAGCAAGCCCCATC
ACACAGATGAACACAGATAGCCCTTGCCCTCATGGAAGGGATCATGTAGAGTCCTCTCTATTCCAAAAGAACTTCACAATCTCCATAACTACGT
TTGGCATTTCACATCTGTCTTGTGCTTTTGTGACATGTGGATTAGCAGACAGTGCCTCGGGCTCTCATGATGAATGTAGGGTAATACAGCAGCC
CAGAGCCATGGCACCTAAGTATGACTTGGATGTGATCCCACTTGGATATGATCCCTAAGGGACAGGATAAGGACACTAGATCAAATTTGGATCA
AAGAAGAATTGGAAATCAAAGAGTTGAGAATAACACCCAGCCCTGCATCTGCATCTGTTTAATTAGTCTTTTCTCCATCCATTTTAAATGTGTC
AAAAATGTGTAAAGATCCATTCAAATAGAAAAATAGTAATTTTTCATGGAGTGAGGGCAGGAAATAAATGTCAGATTCCCAGTAGTAAATAAAT
ATAATTTTTAGACATATAATTAGCTTTCCTCAATCTCAGTGTCTTCATCCTAAAAGGGCTTACTTTTGGTAAAGGGGAAATAAACCTGAATTGT
TCAGTTGGAGTCCAGTGAAAGAGCAGCAGGCAAAAGAACATCACAGCTGCTACAGATCCCACTTTCTCAGGAATGAACAGCTCCTTTGAATGGT
GTCTACGTTATCCAAAATGCCACAAAACAATTGATGATAAAACTGGTGGATGGACATATAGTCTGAATGTTTCTCAAAGCTCTTAGTACTCAAA
GAACTTAAGAAAAGGGGAATAAGGAGGTTTGCCTAGAGTAGAGTGTTTCGGGCAGAATAAAGAACCCCTTTATCTTCATTTATTAAGTTGAACA
GAACAAATAAGAAGCTATCCATCTCTATAAAAAATCAAATACAGTTAGTTCCTTAATGAGTTGCGTCTTTTGCTCCTAACTGTAATACATACAA
TAGTGTATTATTTCCTTTTACCCAGATAGATTTCCTGAAACCATAATATTCAGAGGCAGAGAACTAAAGGTTAATTTAAAAAAAAAAAACCCTC
AGGGGTAAATTATTACTATTAGAGGAGAAAGTTATATTTTTAAAGCTTATAGTATTATTTTTCCAAATTAATTTTTAAAATAGTATTTTCATGT
ATTCTTGAAATGTAAGTATATTCTAGATTACGTAAATAATTGATAATGGACTACCAAGAAAAAAGTATACATGTAATATTCAATATACAAATTA
GCTTCAGTAAATCTCTCTTTTGAGTCATTATTTCCACTAAAATGTCTCTTACATTGAAATTATTCTATGAAATATGAAATTTAGAATATAATGG
ACACCTTCTTTTGTTACTTAATCATGACGTAACGCTTTGTCTCCTTTTCATATTTGAAGTGCAGAAACGCCTTTAACATCCTAGGAAAGCCATG
TGGATGTCATGATCTGGCTTTCTTTGTTCGGATAATATACTAGATTATTTTCTTTCTTCTGAACATCTTAAACTCCTAGATGAGTTTTTCCTTC
AATTTTAAATGCTTTTGAAGCAGGACTCATTTTGTTTCGAGCATTTCTTGGAATTACATAGAGTTGAGTAAATATGAATATGCCAGCATCCTTC
TAAATGGACTACCTTTAAACTGTTTCAAAAGTAAACCATGCATCAAAAGTCAACTCGGAAGACCTGTGTTCTCTCATACCCCTACACCTACCCT
GCCCCCTGTGGGTTTTTTTTTTCTTGGTAATAACAATAAGTGTCTTAGTTAGGATTTCTATTGCTATAACAAGAACACTATGACCAAAAGCAAC
TTGGGAATGAAAGGGTAGCAATAAGATTACAGGTCTACATATCACAATATATCACTGTAGGAAGTCAGGGCAGGAACTCAAACAGTGCAGGAAC
CTAGAAGAATACGCTGATGCAGGAGCCATAGAGAAGTGCTGCTCAGTGGCATGCTCCCCATGGCTTGTTCTACCTGCCTTCTTAGAACACCTAG
GACCATCAGCCCAGCCATCACACCATCCACATGGGCTAGGCCCTCCCACATCAATCACTAATCAAGAAAATGCACTACACAAACTTGCTCATGA
GCCTAGCTCCTGTAGACATTTTCTCAATTGAGAATTCATCTTCCCAAATGAAAATGACTCTAGCTTGTGTCAGGCTGTTATAAAACTCACCAGC
ACATACAGCGACCCAAAACTTCATAGGTACTTTGAAATAAGTGAATCTCCAATCATGCTGCTATCCTTTTAAGAATTTGTAACTATCCCTGCAA
ACTGTTGTGGGCTATGTCATGGTCTCTAAATGCCACCCTCTTACATCCTAAGCAGAATGAAGCATGAAATAGGAACTAAGGTGTGGCACAATGC
AGACAACTTTCCTCTGGGCTCTCCTTACAGGACACTTCTCAGCCATGAATCTTACTGGCCTCTACCTTTCACATAACCAGGGAAACCAAAACAT
ACATCCATTTTTTAATCTTGTCCTCTTCCCCACACATTCTCAATCTTTTCTCACTGTTCCTCCCTCACAAAAGAGCAAGCATAGGAACAAATGA
GAAAGTTTCTGACTGCCATTGACTCTGGGAAAATATTAGTCTTGTGCTGATTGTTGCAGTGATGTACATATAACATGAAATTTACTATCTTAAT
CATTTCAAGTGCATGGTTAAGTACAATCACACCATTATGACAATCCCCAGTATATTTAAATTTTTATCACACAGAACTGAAACACCTTATCTCT
ATGCTACACTAACCAGTCCTTTCAAAAAATTCCAAGTCGTAAGTCTAAGATTAGGCAAGACATAGCCTTTGTGCTCTTAAACACTTTTCCAAAA
TATATTCATTTTAAATTTGTATGTATAAAAATGAATAGCTATTTTAGCATACAGAATTAAATCAGTCATTTTAATGATTCTACTGATTGGCTTC
CAGGAGCATCTGTGTGTCTTCTCATTAAAGTAACCAATGCATTACAACTGTCATTGCTCTGTGACTCTTCTTCTCTTGCTTTGCTATTTAATGT
TTCTTTGAAGTCAAAGAGTAGCTCTTCATGATATGCATCCAAGTGTGCACTTAAATCATAGAACTTATTCTTAGCAAGGAAGTATGTAGTGAAG
CACCTGGTCAAATGGGAAGACAGCCTTGAGAAAGACAATGTTTTTCCTGCTGAATTTCTAGGAATAGCCAACAAAGTGGGAGTCCTGATAGGTG
AGACCAGCAGTGTGCTCTTTCATAACCTCTTTCAATTACTCTCAACTCTTCTTTATTTTTGGATCCTATGTAAAATTTTCTATAAAGAAAAGAG
GTTATACTATGTTTTGAAACAAAACATCTTGGATCTCGAGGAACGTTTTGTCTCATTATTGAGATTCATTGGAAGCCTGTCATTGAATGAAAAG
ATATCATTGAAAACATGTGGCCTTTAAACCAACCACCGACTCTCTCCAAGCCTCTTTTCTTTATGACTAGAATGAGAATAACGGTGTATATCTG
CATCTTCTAACACCTGAGAAGATTTAAAAGCAGTGAGCAGTGTGCTGCCAGCCTCCTCACCCTGCTGCCTAACAAGGTCCCTCCCACATGAGCA
GAGCAATCCAGGAAGCAGGTGACAGAGGATGAGGTAGTCCAGAGCAGAGACAGGAATATAACAGAAACTGGATCTATCTGGCTCTGGATACTAG
ATCTAGGTTGGACGTAATGACATTGGGAGCTGTGACTGATGGGTTCTCAACCAGATGCCACCTTTCTCAGTGTCTAGAGGAGTGGTATCTAACA
ATGACTAAGATGGTTTCCCAAGAGAATTTGATACTGAAATCTCACTCCCTCTCCCTCTCCTTCTCCCTTTTCCATCCCTTTTCTTCTCCCTCTC
CCCATCATCCTCCTCCCTCTTCCTCCACCTTCCTTTCCATTCCTAGTGATCAAATTCAGAGCCATCCACATGTTCGAATATTAGTTAGGCGCGC
TTTCTAGCACTGCGGTACATCATCAGCCCTGGAAAGACTTATTGCCATGAATGAATCGTTACTGGCATGTACGTGATCAAGGCAGAGCCACCAT
GGTCCATGGGTTCTGTTAAATACCTCACTCTGAACATGACAAAACCTCGATATAACAACATTAACAGCTTAACACGTCACTCGTGCTGACCTTG
AGAAACTCTACTTTTAGAGACTTTCTGACATAGGTGCCTCTCCCCATCATTGATTTCCTCTTCGTCTGGTAACCTGGAAATTCTTCAGGTTACT
TTTGTTCTGGTTCTCTTCTTTGTTCCTTTGTCCCTCTCTTCATCCCTTCTTCATAACTTTTTCCTTTCACTGACTTCACTAAGACAAGATTCTT
TTGTTTTCTTCACTAACTAGTAAATTGCTTCTTTCCCAACTCTTACTCTTAAAAGCAACAGAATAGAGCTCTCTAAGGGAAAATAACATAAAGC
TTGAAACCACATAAAACTGCATTTGTATTTGTGTAGACATGCATGGATTGTTCTTTAGGCCAGTAGATTCAGAGACAAAAACAAACAAAAACCA
TCCCCCAGTGTTACAGATAGTTAGGGGGACTGGACTGTGTAACATCAATCCCAAGAAATACCTTAAGTAAGTACTCCCAGGTTCTTTAGAATGA
AAAATCTAGGAGGTGTCTTAGTTCTATTGCTGAGAAGAGACACTATAACCAAGGCAAGTCTTATTTAAAAAAAAAAAGCATTTAATTGGGGCTG
GCTCACAGTTTCAGAGGTTTAGTCCATCCATTATCATCATGACAGAAAGCACTCAGGCAGACACGATACTGGAGAAGTAACTCAGAGTTCTACA
TCTAGATCCTGCATGCAGCAGGGAGAGAGACACAGGACCTGGCTTGGGCTTTTAAAACGCCAAACCACACCCTCAGTGATTAATTTTCTCCAAC
CAGCCTATACCTACTCCAACCAGGCCACACCTACTCCAACAAGGCCACACCTACTCCAACAAAGCCACATGTCCTAATGCTACTCCCTAAGCAT
TCAAGCATATGATCCTATGGGAGATGTTCTTATCCAAACCATCAGAGATGGTATCAGATGCCCTATAAAGGAGTAGGGCTTTCAGGCCAAACTT
ACTTTGAAAGGTTCTCAAATGATTATGAGACACAACGGGTTTGGGCAACATAAACAGGTTGTTTTTATAAATTTCAACCACTGGCTTGCTATCT
TATCACTCAACCTTTTACCAATGAGCAGATTTCAACCAAAACAACATTTTTTTTTGATTAGTTGAGTGAAATCTCAATTCATTGCATCTCAATT
TATTGTCAGACTTTAAATCAAGTGGGCAATTATTTATTCCCATCAAGGCAGCCTTTTGCTATCCTGTAGCCAAAATAATAAATACTGGTTGTTA
GTTTTATATTCAACCTTGTTCCTCAGTGTTTTAAATTATTCTGATACAGCTTTGGATGGAGAGTGAATAAAAAGAGGCATGGTCTCTGGAGCCC
CAGATCTTCTCATAAAGACCCAAGAATAAAGTGGTCTAAACAACCCTTACACACTTGCTCACTCACTCAACAACTCTTTGGAAAACTCACCCAA
TCCCAGCTCCGTCTCTTGATTTACTCTTTATTCTCATGACTGAAGAACTCAGCTGTTTATGTTTTAATAAAAAATGGTTTAAAAGACCAAGCAG
AATCCAATGGGGACTGTTTCTGAGATATCCAGCTTACTGGCATATTCTAATGTCTACTTGGCAATAACTGAAAGTGTGGCCTTTGTATTCCAAG
TAACTCTGTCTTTGAGTAGTTTGCAGATTTATCACTTGTTGGTCTACAGCCTTTAAGTTAGGGATCATATCCAAAGCTGCCTGGTTTTATAGGA
AAAGCCTAGTTGTTTCCAAAAGCAAGGCCAATTAATAGAGCATTCGAGATATTTGAGATCTATTTCCATGGAGGAAATGATCTTAAAGTGAAGT
TAATTAGGAGTGCAGAGAGCCAGAGATGATAAATTCAGAATTGCATAATAGATTTGTATACTAAAGGGGCCTGTGTCATCTCCAGTCCTAAAGA
GACCGGCTGCTGAAGAATGAGACTCAGAAAAATGGGTGGGTTATATCGCCTCCAGCTTTCCATGTCACATGCACATGTCACATGGCCTTTCATG
ACCTATATTAAAGTTCTCCAGAGAAAGAGAACCAGTGGGTTATTCTGTAAATATGTGTGTAGGTTTATATATGCATGTATATATAAATGAAGGG
AGATTTTTTTATGGCAAGGGATTGAAGTGATGATATTAAGTTTAAATTCAATCTGGAGACCTAGGAATGACAATGATGTAACTCATTCTACATC
TCAACTGAGAGATTCCTGGTGGTATAACTTTTACTTAGAGGCCAAAACCTAAGGTACAGAGTAGAGACTGGGGGAGTCTAGTGACCTGAAAACC
AAGAGCTCTCATGTCCAGAGTCAGGACAAAATGAATCTCACATCCACCAGACTTTTAGTTTTTCTGTTCTGACTCTTAAAGGATTGGATAGTAC
TCACCTAAAACAACAACAAAAAAGAAAAAAGAAGAGAAAAGAAAACAGGAAAAACCATTCTCCTTTTGAGTCAAACTCTATTCTCTTCCAGTAA
TACTGTCAGAGATACATCAGAAATAGTATCTTACCAGCTATCAAAGTACCTTTTACCCTAGTCAAGCAGACTAGGCTACACAAAATTGAAGCCT
TTATGTCCCTGTCCATAGAAGACAGGCTTAGCTGGATAATACCCAAGTCCTCTATTATAGCATCTTGCCAGCTATCAAAGTGCCTCTTAGCCTA
TCAAGCAGTCTGGGCCATGCAAAAATCACGAAGCCTCAGTATCCCCATCTGCAGGAGACAGGCTTAGCTGAATAACACCTAAGTTCTCAATTAT
ATACCAGTGCTCTATGAATGCAAAAATAAGGCTTGGAACACTCTGCCTTGACCAGTTTAAGCATCAACAGAAGCTGATCGCTGGACATGCCTTC
AATCACAACTTACACATTAACTTATTAAATTTACTAGCTAATTCCAATTTGTTTTCTATTTTGAATGGCAAAAATTTTCAACTGGGTCTCTACT
TGATTTTATCAAGAAATTGATGGTTCTGTTTGGTATAAAAGTATTTTGGTTCTTTTTCCAGAATATGGTCATCATTACTAGAGATATAAATTGA
GCTAAATAGGAGTAAAGTATCATGTCTGTGATTTCATTTAAAAATAAAGATAAAATAAAATGTGGCTAGATCACATAAGATGCTGTTTGGGCTG
GCAACATTTCTCATTAAAAACTATATTCTGAAAAAAGGTATCAGGGACCTAGGGGAGACAGATATGGGTAACATTGACTGTTCTGGGCGTGGAG
GTTCAATTTATTTATTTGCCTTTTCACCCTCTGTAGTGTGTGTGTGAGTGAGTGTGTGTGTGTGTGTGTGTGTGTGTGTGTGTGTGTGTGTGTG
TGTGTGTTAGTGAAGTGGAATCAATTTCCTGAAGCCTTGAGAGATTTAAATCTCTTCACTGAGAGTGTCTCTTCAACTGCATGCAAGCATGAAT
GAATATTAAGGGTAAGGTACTATGACTGCCCTCTTGGTTCATCTTTCCATTGCTACTGCACAAGTCCCAGAATTTTGAATATCGTTGGGTCACC
ATTTGTCCTATAGGCTTCTGTAACCTCCTTAATCATTTGTATATAATCTAGTGTGTGTTCATTACACAGATTCAAAGCTTATGTTGGAGTGTAT
CTGTAGATAGATTGGGCTTTCTCATATTCTTCCCTCTACCCTCCTTGTTTTATATCCTCACAACATCTTTTCTTTTCCTTTTTTTGTTTGTTTC
TTGTTTGTACATATGAATTTAAAACTGTGAATTTATCTGTCTTTCTATATCTGGCTTGTTTTGCTTGACACCATGACCTGTGTTTCCATCCATT
TTCCTGAAAATGATAATACTTAAATTTTTATGGCTGAATTAAACTCCATTGTGGATTTATTCTATGCTTTTATCAATTTACCTATTGAAAAGTA
CTTATACTGCTTTTATAACTCGGCTATTCCTTAATCATTTTTCTAATTCTTTCTAATAGACATCCTATTAAATAAAACTGAACAAGGTATTGTA
CCAATGAACTCAGAACACATTTACTGGCTTTACATAGAACATTACAACTTTTCCTTTGGAAGGAAAATAGATGCTGCCCTCGAGTAGGGTGCAC
ACTATGTTCATATCAATTAACATTGGTGAAAACATTACAATTCAATTGGTCCATCAGTAAGTCAGAGTTGTCTATAGAACACATGTTTATAACC
CTATATCCCGCTCTGATAGAAATAACCGGTTAGCTTCTTAAGGTTGATATAGTAAAGTTGCCACAATTAGGTGGCTTAAAAAAACAGAAACTTA
TTTTCTCCAGGTTCCAGAGTCGAACAACTTAGAATCTAGGTTTATTTGGTACTGTGCTCCAATTGAAACCCTAGATAGAACCCATTCTTGTTTC
TCCTGAACTTTTCATGAGAACCAACTGCCTTGTCATTTCTCAGCTGAAAGCTGCATCCTCCAATCTTCATCTTCATATGTGATCTCTCCTGTGT
CTATGACTTATAAGCACACCATGAGATTAAGGGCACACCCTATTTCAGGATGACTTCATCTCTACTCATTACACTTTTTCCAAACAAGGCTGTG
TTCTGAACATAGAAGGGCTTCACCATCTCTTTTTGGAAGAAGCAACTCAAACCACGAGGCCATCCAAACAAATGACACTGTGAGATGGATTCCA
TTTGAATCTTTTATCATAGCTATAGTTCCTAATTTTACAAAAATGAAGGGCTAAAGTTTACTTCCTGCCATGCCTGGGAAATAATATTCAGACA
ACATGTTCCAGGACAATGTCTAGGATCTTTAGAAACACATACTCTGTGCTATATGGCTGTTCTACAGAAGCCACCTGAGAGTCACAATAGAGAC
ATCGGATGTAAGCTTCTTCTGAAAAGAATTAATGATGCTTCTATAGCTTGCCCTTGTTATACCACGCCCACTCCTACCTAAAGTCCTTCCACTC
CATCTGAATCACTGAAAGCTTTAAATCTAACTGTGTTGATGCTGCAGCAGGAAAGCCACAAACCAAATCAGGACAAACCAACAACCCAATCAGA
AGTATTTTATACAATTATTATGTTGGAGGTTGTGGTCTTTTCTTACTTGAGTTTTTCTGCAATGAGGGAGAAATAGTGAGGACCTTTTGTATCT
CTAGGTAAATATTAAATCTGCCAGAAGAGCCAGTTACCCAACAGGTAGTCAGCTCACAGGTCAGTGCTCATTGGAAGATGTTCAGAGCCAGAAA
CCAATCCCAGCAGGGATCCTATGCAAATCTAGCAAGACCTTGGCTTTCATCTTCTATTTCCTGAAACAAGCACCCAAGTGTTAACTGGCTTGTG
AAATACCTTGGGTAAGTCTCTTGTGTGTTTAAGATTCTGGCTGATTTACATCTGCCAAAAAGGGGTATTTGTTATTTCTTGATGAGGCCCAGGC
CCTCTGCACTAACATGTATGTTTTCGATTTTCATTCCCAACCTGATGCTTGACACTCTACATGCTTTCTAGGGTGAATGAAAGAAACTGAGAAT
CAGGTTTCTCTGTCATTAGCACAGAATCAGCTAAGAAAGAACTAGGATAAAGATGGAAGAAGGGGAAATGAATATCATAAGACTAAGGAAAAAC
CTTTAATATGAATTACAATGATTAAGGATTAGCATTAGAAAGTATGTGGGTTTGACAAAGCTACTGGAATCTTTTTAGACTTTAGAGCTCTCAC
CTTTCTTGAAGTCACTTGAGTTTGCCATCTTGAGATCTTGACTATTATGTAAAACCTCTAACTGTGTTAGGTCAAACAAGAGTGTAAGAGGTGT
GAGAAGGTTGCATGATTGCTTGTGACTCTTTTGTTGCCAGCTAATGTATGAGTGTGGAACCAGAGCAGAGAATAGAATGAATGGAACAATCACC
ATATTTGCTGAATAAATGTCTTTGTCCATTTTTTGTTGCCATTCCTGTACTTTATGAAGCAAATTAGTTCACTTCCTACAAGTCTGGACATGGG
AAGTCCAAAGCTGAAAGGCAGCATATGGTGAGAACTATCCCACTAGTAAAGATGCCCTGAGAACCCCCAAGCCCCAAGTCAGCACAGGACAGCA
TATGTCAGAACAACCACGCTGACTTGTGTGTCTCTTCCTCAGATTACGAATCCACTACTCATTATGCAGACATCCCTCTCATACCTCATCGACT
CTTAATTATTCCCAAAGGTCCAAGCTCCAATCAACACTAACAGGTGGTTTGTGGGTTATGAGAGGACAAACACGGGAAGAACCTAGTGAGGCAT
TTCAACCCCAAGGATGAAGTTGGCCATCACCCTGGTTTCTTCAATAAACTGAGCAAATGAGTAACAGTAAGAAAGGAATAGTACCCTGATGCCT
AAAGTCTCAACACCAGCATCTAGAAAGGAGTGCACACGACCCCACCCCTTATCTTCCTTGCCAGTTTCTGCTTTTTATTCAGTAACCATTGACC
CTGCCACCATTCATCACCAGAAGTCACAGAGTTGCAAGGTTATGTCCTCAGTCAACTCAGCTTTGATTTGTCCCCTTGGGTCCTCACTTAGTAA
AGAAAAGAGAACAAGGCAATACTGGTAATAACCAAAACTGAGGCAGATATGGTTTGGCTTGAGAGGTGGACTTGATAAGAGGAGAACCATTTAT
CACTTGGATGCCAACTTCTCATTTGTCAAATGTTTGATGGGTTTAGTCATGAAGTCTCCAGGCCAGGAGGACTACATGTTAAATAGCTTCTTAC
TTATTGTCATCTATTCAAAACAGGTCGGCTAAGCATGGACAATGGGTGTTACGATATCTTCAAGTAAGCTGTAGACTGACAGGCTAGTTCATTT
TTTACTATCTATTGTTATAAATTCATGGATTTTTGGGGGGACATTCTCATTGTGCCCATCAAATGCCTTGATCCCACTCATGCTCATGCTACTC
TGCTACCCACCGCAGCCTCTTTTCTTGGTCTGTATTGTCTTCCCTAATGCAGCCTTTTAGAAAATACCTTCATTGTGATAAAGTGTACATGCTT
AAAGCTCATGTTTAAAATGTATACTTCAGTGGGTTTTATGTAGATACAGAGTTATAAAACTGTCATAACAATCTAATTTTAGCACATATCACCA
AGTTAAAATGTGTATGTTAGCAGGCATAGCTCATCCCCCTACTCTCTCCACTCCCGTTAGCATACAATACTCAGTCTGTGGCAATCTCTAAGTC
ACTTTGCTTTGCTATTGCAATTTTTTCATAAGTTCCTACCACTGCCTAGATCATAAAATATTTCCCCTATATTTTTCTACAGTAAATTGAACAT
TGAAGTTACATATTAAAGTCTTGATCCATTTTGAATTGATTTTTTTTTTTTTTCGAGACAGGGTTTCTCTCTGTAGCCCTGGCTGTCCTGGAAC
TCACTCTGTAGACCAGGCTGGCCTTGAAATCCGCCTGCCTCTGCCTCCCAAGTGCTGGGATTAAAGGCATGCGCCACCACTGCCCTGTTTTGAA
TTGATTTTTTGCAAAATGGGAGATACAGATTTAATTTCATTCTTCACAATGTAAATACCAGTTTTGCCAGCACAATTTATTAGGAAGGCTGTCT
TTTTATTGCCAGCTTTGTCAAAGATTAGATGACTGGAGCTGTGTGGGTTGATCTCAGGTCCTTAATTTCACTGGTCTATAGGCTTGTTCAGTAC
TTTGCTATGATATCAATAGCAAAAGTAAATTCTATTAGTGTTTATGAAGAGTGAGTGTTTATGAAGAGTGAGTGTTTGCAATATTCCTTAATGG
TAACAGCATGAATAAGATTCCGATGTCTATATCTGTGGTTTTCAACTATCTTAATCGACGGCACTTAAATGATCCTTTGCTTCCCATTGTAATA
AAACATATCTAAAATGTACAGATGAGTTTGGTTTTGTTTATGTGGGATCCAACTCCTGACTTTGTGTGCTCAGCTGACGTGTCTGTAACGGAAT
GTTCTGCCAGTCTCCAGTGCTGTCTACCAGGACCAGCTAGCCACCTAATGCTGTCTGTAATTTTAACTTCATCTTCTCACAGGCTGAGTATAAA
TGAGGAGACACAGTAGGAGATATACGGAGCAAAGAGGCTTTTAAAGGTCTTAGGATTCTTCCAGAATCACTATTCAGGATGGTCTTCCTTAAGA
ATGGCAAAACCCTGCATGTTTATCATTTGTATGTGGACAGTTCAAAGTTCAGGAGGCCTCTTGTGGATGTTTCTTGTCTTCGGAGTATTAAATA
ATACTTAACTGTCTTCTGTTCTCATCATCGAATGAATATGACTTTGTTCTTATTTCCTAGGACTATGCTGTCAGTGATTATGAATAAGATCATT
AATGTGTATTCGTTACTTCAGTTTCTTGTGTATTGTGTACCAAAAAGAAAGAACAACAACCCAAAAAGTTGGTTAGAATTAGAGACTACTGCCT
TGTCATAAAGATGTACATGCTATATTTATACAACTTTCAGATGGAGCCCCTCTGTTGGCCCATGCTGACTACATATAACACATCAGGTTCGTCA
GCATCTTATTCCTGGGATACAACTACAACAACATGCTCAAAGAAAAAGAAACCTTGGTTTTTTTGTTTTTTGGGTTTCTTTCTTTTTTTCATAA
AAGTGATTGAGTGAGTTGTATCATTAAGCAATGATGTCACTAGAACTCATAAGGGGAAATCAGAAAGGCGAACCTGGAAACGTCTCGAAGTAAA
AACCAGGAACCCCCAGCACAGTGAGTGCACGGACTCATTGCTGTCAGCTGAGGAATTGCTCTTGTGTCCCTGCTACTGGAGCTCTGACTTGGTG
ATGTAAGATGGCCATCCCCCTCACCACTCATCCATCAGCAGCACTTTTAAATTTACCTTGGAAACAAAAGAGCAAACTGAAGTACAGTGCGTGT
CATATGATGAGTTCAACTACCTCTTCGAAAGGCAACATCAGAGAGTGAGATCAACAACTAGACTAAGAAGGAGAAGTCACTGTTGTTGACACAA
GCTATTAATTTACTGCTCTGAAATGATCGTTAACTGTTTTGCTCCAAGAGAGAGAAATCTGTTCAAGGGACAGAGAGAAATATTGTTTAGATGG
TCCCTAATGAGACAGAAGTAGTAGGGAAATAGAAATGGATTTCCCCACTAGCACTGCTCCCTAAACAGGCTCCCTTATTAACCAGCATAAAGGA
TGGAAACATTTTGGCTACATAACCCTACATAATCCTAACCCTTGGATACTAAGACGAGAAAGTATTTACTCTCTGATACTTCCAGGTAAAGAGG
GGATGTTCTCAGTTCAGATCACCAGAACCATAACGGTTCTCTTAGTTAATTAGAAGAGTATGTTCTCTCCTGGTGTACGGCATTTAGTGACTTC
CAACTTTTAAAAATGTAACTTTTTATAAACCTCCTCGCGAGGATTTAAAGAACAGGACACAGGTGACATTTAAGAATGATTTTAATACTGCAAT
CAATGAGGAATTAATTTTCTTCGAGGTGAGAGTTTCCTGCGTCTGGAAACGGAATCTAGTCCTTCACACCCACTAAGCTTGCACTGGAGCACAG
ACCTGTAGTCTCAGCCTCACATATTTAAAAAAAAAAAAAAACAATTCCGGATTTTATGTGGAGGTCCTTGATCCACTTGGACTTAAGCTTTGTA
CAAAGAAATAAGAATGGATTGATTTGCATTCTTCTACATGCTAACCACCAGTTGAAAATGCTATCTTTTTTTCCACTGGATAGTTTTAGCTTCT
TTGTCAAAGATCACGTGACCAAAGTGTGTGGGTTCATTTTGGGGTCTTCAATTCTATTCCATTGATCTACCTGCCTATCTCTGCACCAGTACCA
TGCAGTTTTTATCACTATTGCTCTGTAATACAGCTTAAGGTCAGGGATGGTGATTCCCCAGAAGTTTTTTTATTGTTGAGAATAGTTTTTGCTA
TCCTGGGTTTTTTGTTATTCCAATTAATTTGCAAATTGCTCTGTCTAACTCTATGAAGAATTGAGTTAGAATTTTAATGTGTGAGTCTCAGCCT
CACAAATTTTTTAAAAAACAATTCCTAGAGTTTTCTAGAATATATATATATATATTTATCACTTAGATGCTAGGTTTTTTTCTTTTTTTTTCTT
TTTTTTATTAGATATTTATTTCATTTACATTTCCAATGCTATCCCAAAAGTCCCCCACCCGCTCCCCCACCCACCCACTTCCACTTCTTGGCCC
TGGCAAGTCTGTTTTGTTCTTTCTGGTTTTTCTGCTCTCTTCATATTAGTAGCATGGCCCTGGTTTGCGAATGCTCCACACTTGACCTGAGAAG
TGGACTTACACTGGTCTCTTAGCTAAAATAAACAGAAAGCCATTCCGTTCGGGTCCACTGCTGGTGGTCACCTCATTACCATGCCCAAACCATG
GCCACTCCAGTTAAGATGATCACTGGCCAACTTCCAAAGAACCACATTTGTGCTGCAGTTATTCATTGGACTGGAACAACCTCCTCCCCGCCCC
ACCCCCACCCCCACCTCTCTCTCTCTCTCTCTCTCTCTACCTCTCTCTCTCTCTCTCTGATTTTAAATTGTTTGTATAGCTACTTTCTTGCTTA
CAAAATCCAACTCTGAATTGTAATATTCCATGTTGGTCAATCAAGGCTCCCTGTTTTGTTTGTTTGTTTGTTTGTTTTATATCATCAGTAGTAC
TCTCTATTTATTTTATATCATTCTCAAAAATATTTAAAGTAACTCGCTTCCAATATGTCTGTAATAACCAATACCAGAACTGTAAATAGGTTAT
GACAATAAGAAAACATATAACCCTTTTGGTATTTCCCTGTTACAGAGCACATACATCCCTCCATTAGAGTCACTACCCTTTGAGAATACCAACC
TTTCTAGATGCTCCTGGTAAAGCTAGCATGTGGGAAACATTGCTCAAAAATGCCAGGGTACCTCTGATAAAACACAGGCTGGTAAGACTTTCTT
GAGTAGCAGTGTGATAGTCTACCTGTGTTCTCAACTTTGGTTTCCAAAGAAATTCCCATCATAATCTAGTGAAACTCCTAGCAGTGGAGGGTAT
GGAGCCTGAAGTTGCCTCTTCCTCTAGCCAGGTAGAACTCCCAGTGAAGGGATTAGGATAACCCACCCACAAAACCTTGGGCCCAAAATTTATC
CTGCCTATAAGAAGTGCAGGGACAAAGATGGAGCAGAGACTGAGGGAATTCTCAACCAACGACTGGCTGGCTTGAAATCCATTCCGTGGGCAAA
AACCAATCCCTGATACTACTAATGGTCAGAACCTGTTATGCTTGCAGACAGGAACCTAGCATGGCTGTCCTCTGAAAGGCTCCACCTAGTGCTG
ACTGAAACGGATGCAGAGACCCAGAGCCAAAAGTTAGAACTGAGGAATCTTATGGAAGAGTTGGGGGAGAAACTAAGGGCCTCGAAGGGAATAG
GAACTCCACAGGAAGACAACAGAGTCAACTAACCTGGACCCTCAGGGGCTCCCAGAGAATTAATCACCAACCAATGAGCAAGCTTGGGTTGCAC
CTAGGTCCCCTGAACATCCTTAGCAGGTGTGCAGCTTGGTCTTCATGAGAGTCTTCCATCAACTAAAACAGGGGCTGTCTTTGTCTCTGTTGCC
TATCTGTTGATCCTGTTTCCCTAGCTGGCTGCCTTGTATGGCCTCATTGGAGGAGAGAATGTGCCTTGTCCTGAAATGGTTTGATGTGTCAGGT
GGGCCTCACTGTTCTCAGAGGAGAAGGGGACAGAGGAAGGAGGGGAGGAGCTGTGTGAGGAAGGTCAGGGAGAAAGGGCTGGGATCAGAATGTA
AAGGGAATAAATAAATAAATTAGTGGAAAAATGTTTATCAAGAATAGTGTACACAGCCACAATTAAAAAAAAAAAGAGCCATGAATTTAAAAAA
GCAATGGGGTTATGTGATAGGGATTGAAGGAAGGAAAAGGGAGGAAGAAATGTAATCATAGTATAATTATAAAATGCTCTAAAATTTATTTAAA
TGTAAAAAAAACAGTAGGGGAAATCAAAAGTGTCAAAAGCAGAAGGAGAGATGGGCATGTTGTCATGAATCCATACAAAGAATAGGAGACATAT
GAATTCAAGAATTTAGGTTGGATGTGAGTAGTTGGAAAGAACCATGAATTTTCCCCAGCAGATTATTGCAAAAATATCCAAACATTGGAGCAAA
AGTTCTAAGTGCAGATTAAATTGTAAGTTTCTCCAATATTCTAGAACCAGAGTATTCCAAATACTGCCTTCTTATGAGTTCTGTTTATCCAACC
CAAGTAAGATCCGTGCATCTTTGCAAAGTTCTTGTCACATCTATAGTGACAATGAGCATACTTTTATCAGAATGGCCCTTATCTTCCTGGGTTG
CCATAATGATTAGAAAGTTATTCTGCTCAGTTAAAAATTTATTCTAGTTCTGGCCAGTAACAGAAAAGTAGAAAGTCCAGCAAGATGTTTCATT
AAAGTTTACTCAACCCAAGTTGGCTGCCACATAATTTCCACTGGTTTGAGAAGACAGTAATTTGGGTGGATCCTTGAAAGCTCAAATTTTGGAT
AATTAATTCTCAGGGTGTCTGTGTTGGAAAGCAAAGGGTAGAGTCTAACAAGAAGCAACTAGGTCATCACTCATGAAAGCTTTCTTAGAAAAGC
AAGTTCTGCCTGCATTATTGTCCACTCTCTGGTGTGAGCCCTCTCCTCTTTCTTGTTTTCTCTGATATGCAGTAAGTTGAACTTCCTCTTTCTA
CCTTTGGGTGATAAAGCCATAGGGCTCTCACCAGCTGTGAGAAAGAGTATTTTATCCTTGGACTTCCCAGTCTCTAGAACTATAAAATATAAGG
CAGGGGGTCCACTCTGTTCTCTCAGGCCTTTGAATATATTTTCTTGGTGGCCATGGCCATTTTGAATGAACTCAGGACAACACATAGAGTTCTT
GAGAAGAACATGTTGTCTTCCTACCTTTGGCTCCCCCTTGTCTTCTATGTTTTCTTCATCTTTTCCTTTTCCTCTGACAAGTTGCATCTAGCTC
TCATAATTCTTTAATATAACATTTTAATTTTAAAAACTGTTTGGAAGAACTCATACATTAGTCCTGTATTTACATCTCCTTTCTCTCCCTCAAT
CCTTCCTCCATCTGAGGTCCATTACCTCTTCTTCTATAATTATAGTTACACAAAATTGTGTTTGTATACAACCTCCTGAGTTCGTTTAGTGTTT
CTTTTATGTACATATGTTTAGGTCTTGGTAGTTGGGATTGGATAACCTATTACAGAACACCTTGCTGGGGAAGTCTGACTTTCCCTACACAGCC
ATTGACTGTGTATAGTTCTTCATCTAGAGATGGAGCCTTGTGAAATTTTTCCTACCCACATTGGCATGTAGACTGACCTTGTCATTATCTAGAC
CTTATTTAGATAGCCACACTGTTGATGTTTCATGAGAGCAGCATCCCTGGCATGTCTAGAAGATACTATCTAGCAGCAGGTATTTTGGTCTTCT
GGCTCATACAATCATTCCATCTCATCTGCAATAATCAAACCTCAGGTCTAAAGATTGTATTGTAGATGTGCCAGTTGGGGCTGAACACCTCACA
GTCACTCATCACTGAATTTTGACCAACTGTGGATCCCTGTAATAGCCTCTTGGATGGCATCTTTGATGAGGGTTGAGAGCTAGCTACACTTGTC
TGTGAGTATAAAACAACACAAACCATTGTCATGACCCTTGGTTGCCTTGATTGCCTCCAAGAACTTGAAGGTAAGACCCTACTTCTTAAGTCCA
AACATACTTCAGATGAGGATATGGTGGCATCAAGCTGGGACTGACCTGAATGCCCCATTTCTGAGGACAAACTCTCATAGTACTAGAAGTAATA
TGCAAATTGCTAAGGAAGAAAAGAAATAAATATTCCTTCCCAGCTAGAAGGCCTATAAACCACAGCAATGACCAGCCTGCCAAGGGACCTACAG
TGGGGTAATAGTGAAACTATTATCTTGGAGTCATCAACAGCCATCTAATTAGACTTAAAGTCCACTTACTAGAAGGAAACTCATACCTGATACT
GGAAGCCTAATGAACACATGGCTAGACCTCATAAGAGAACCTACTATGATTTTTTTTCTAAATCAATAAATTATATAATTATTTTCTAAGTGAA
TAATTACTTTATTAGTTCTTTAAGAATATCAAACATGCACACCATATATCATGTCATTCCTCCCTCTTCCCCTTAACACTGTGGTTCTCAACCT
GAGGGTCAAATGACTCTTTCAAAGGGGTCACCTAAGACCACTGGAAAATGTGACTATTTACTGTATGAACCATAACAGAAGCAAAATTACAATT
GTTAAGTAACAACAGAAATAACTTTATGATTGGGGGTCACAACAACAGGAGGAATTGTTTTAAGGTTCACAGCATTAGGAAGGTTGAGACCCAC
TGTCTTAACCCTCACAGTTCTACTCATCCACTCCCCATCCACTTTCAACTTCAAGTTCACCTTTTACTTTTATAACCCAACTAATGCAATTTCT
GCCGCCCATGTACTCAAGGGGAGAGACCATACACTGAAGCATGCTCCACCTATCAAAGGCCACACCTTTAATAAAAACCGGCTGTCCTTGACCC
CGCAGCCAGAAACTATGAATAGCTCTTCAGGCTGTGATGGGAGTTCATGAACCCTGCTCTTTGCTGGAATGCTGACCAGCTGGATCTTAAAGCA
CATCTCTGAGCTGCTGGGAGCTCAGGAGTGGGGTGGTCATGTCTTCTCCAGAAGGCACTGTTTTTCTCTGGTCTTCCTTGACCTCTGGCCCTTA
CAATCCTTCTTTGCTGGTTCCTGGAACTGGGAGAAGCATATAGCTGCTGCTTTTAAAACTCTAAAAGGCAAGAAAATTCAGTTAAAAACAATGG
AGAACTTTGGTTGAAGCCAGGATAGGTTTATTTCTGCCTCTACAGAATCATAAAACATCATACACCTGACAGGAGTGGGAATGTGTAATTGAAG
ACGGCGAGTAACTATTTATCATAAGCTAAAATTTAATATAAAGCTACTCAATGCTTTAATATCCCATCCTAAAGGGCTAAGCACTATGTAGTGC
TAGATCCTTGAGTAGAGAACAATAAACAGAGAAGACAGTTGACGTACATGAGAATCCTCAGATATTACCCAAATACGTTTCAGATAATCAATAA
CTGTTGGCTGAGTGAATATGTACATGAACAAATGAGCAACCTACTAGAGCTCATTTTCCATGATGACTTTTTACAGTTTTTCTCCAATATGTTA
CGTACATTTTAATCATTTTTTAAAATTAACTCTCTATTAAGAAGCTTGGTACTTATGAAGATTAGACAAAATCGTGTGTTCAAGTGCTCATGCT
CAGAAATAGCGTCTGGCAGTCAACAAATGTTAACTAGTGATTTTCTTCTTTTTTCTAGTTATTCTTTAAAAATAGGATTATGCTGATGCCCTCA
GGCTCACTAATCTCAAAGTCATTTCCCTAATCCACTAATGAAAAGAGATCTGGAGTTGCAATCAGTTCCTACTCTGTGCCTTTAACTAGGCCAC
CCACACCAACCCCTTGGTGCTGGCACCAATAAAATATATGCAAAATCCTAAATATTTTTTCACTTCTTCCTCTGTACTGTTTAGTTAGCCCCAA
ACTTTGGGCCAAATCTACCATGTCCAGTCAGCACTTGTCTACTCCCTGTTGGACCTGATGTCTGAACTGAATTTACCTCATTTGATTCTGTTCT
TTCTCCTTCTCTCTTAATCAGCCCAGTGAAGGTTTTGTAATTTCCTTTTGGTTCCAACAAGGCTCACTCCATTAACCCAAGTTTTGGGATTTGC
CTCTGCCACATATGGATCAAAATTTCCAAACTGCAGTTGGCATGAGTGTTGAAACTTATCCCTCAAAACTAGGAGATAGGTCTGATGTTCTTTG
TGTTTCTGTATTTCAGGAACAGAAGGGGGGAAAAAGAATTTCACCAAGCTCAGATTTCCTTCTTTTATTTCTCTGTTAGTGCTCTATGTGACTG
GCTGCCCCACTGAATCTGTTGGCTCTGCCTCAGTCTGTGGTTCTCAGACCCAGCTACTCACCAAGATTATGCCACAAATGATTTCTTGGATGCA
TGTATGTGTTCTTCCTTCAAGGGCTTGTGTTTTCAGGTTGCTATGAGTGACTAGACCTGTTGCCAGAATGCATGAATCCTCTCTGATTTTCTGA
GTATATCCGAAAATTTATTGAGCTAATATCAATAGATAAGGCACAGCTTTGGTAAATTCATCAGTTACAATGACACCAGCAGCTCTGGATAGAC
AAGAAATACTTGCTGTCTTTTTCACCTCTGACTAGTGGGAGCTTGCCATGCAGAATCTCGTCTGTTAGTTACATAAAGACCAAAACTGTGAGCT
CTGTGCTCCTGAAAAGATAAAATTCTGGACTTGCTTGCTTCATGACACACTATGCAGACCGTGTCTCCTTTTATATTGAGAGGCAAAATATTGA
ACATAGGACTCCATGTGGAACCTAATAAAGGCACTAACAAAATTACACTTTCCACTCTGTGTTTTATGCCATACTCCTAACATTGTGGCCAAAC
TGGTCTTCAACGCTTTTACTCAATTTACTCAAGTGTGTGGGTGGGGGTGGGGGGGGTCATTGTTTCCTGAATGGTTGAATTTTAAAAACAAATT
TACTCAATGTATTTTATCATATTTCTCCCTCCCCATTCCTCCCAATAACCCTCTTTCCTAACCAACCTACTTCACTTTTTTCTTGCTTAAAAAA
AAAAAAAAAAAGGTACATTTTGTGTGGTCCACCTCTTCCTGAGCATGGGGCCTTCCCTGGACTGTGGTCGATATGCCCAGTGTCATTGCATTCA
TCGAAAAGAAGTGATGTTTCCTTTCCCTCAATGACTGTCATTTGCAAATATTGTTTTCGTGTGGGTGGTACACTGTACCCATTTTTCTTTCCCC
ATACACTGATTTTGTCCTGTTCGAACTTGAGGTCTTGTGCGTGCTAGCACCATCTCTGTGAATAGCCATGAGCATCAGTCCTGTTATGTCTGAG
AAACGCTGTTTCCTTGAAGTCGCCCACCACCTCTGGCTTTTAAATTCTGCCTCTACATCAATTCCTGAGCCTTGAGGAGAGAGGTGTTATGCAG
AGATTCCATTTAGGACTGAGTGCTTTAATATTTCTCACTTTCTGCAGGTTGTCCACTTGCGGGTCTCTGAGTTAATTGCCATCTACTGAAAGAA
GTTCTCTGATGAGAGTTCTGTAATACAGTGAGCTGTGGATATAACAGTCATTTATTTTGTTAGAGGAGTTATTCTGTTGCTATGTTCATTTAGG
CTTTCCCCTAGGCCCATCATCTAGTCACAGCTTTTGAACCTCATTAACAGTGCTGACATGTGTTCCATCTCATAGAGTAACCCAGAAACCTTAC
CAAACGAGTAGTTGGTTACGCCAATAGCACCTATGCTACTATTGCATCACTGAGTGTATCTTGAAGACAGATTGCTACTACAGCTCTCAGGGAA
CATAGCTGGATGAGACTTAAAACTGCTTTTCTTCTCCAGTAGCTTGTATTATATCATCACCCAGCACGATGAATGCTAGTCGTAATAGGTCAAA
CTTCTAGTTGAGTACCAGGTTGGTTTCTCCATGTTCAATACCATAAGTGTGTGGTGTCTTCAGTAATAATCTCTTAGCATCATATTGTGGTAGG
TACTCAATATCATTGGCAATACTTTGTAATATTTAAGGGTGGTCTGTGGAACTGTTTTTGCCAATGACTCAAAAAGATATAACCACTCCCAGGT
ATAGGTTTTATGGTAACATATGATGTCCAGTTGAGACATTGTCTCCCCCATCCTATGATAACTCCATTTAAATTCCATTTATATACGCATATAT
TTTAGGAAGCATCTACAGGAATAGGCTTCTGTATGGCTTTTCAAAAGACCTTTAGGGTAAGTTGTCCCTTCCCATGGTCCCTTCTCTACTCTGT
CCACCTATCACCCTCTCCATTTAATCCTCCTATTCTAATTTCCCTTTTATTGTGTGGTAACAATATAGTTATTTCCCATTCATGGTCCCTAGAA
GATCACCTCCTCCTTCATCCTAGCTCTCTACTTTCTGTTTAACCTTGGTTATTCTGATATTGAAACACATATATCTAAAAGCTAACACTGGCAT
ATGAGGGAAAACATTCAATATTTGTCTTTCTGAGTCTCAGTTCCATCACTCTGGGTGATTGTTTCTAGGGCCATCCATTTGCCTGCAGATTTAA
TAATTTCATTTTTCTTGAAAGCCAGATAAAATTTTATTGTATAAATGTACCTCATTTACATTATCCAATTTACCAGACGGTAGACTTCAAGGCC
TTTTCCAATTTCTGGCCATTATGAATAGAACAGCTATGAGCAGGGGGCCCTTTTGTATATGAACAAGAGTTTTATAGATGGATCTTGAGATAGA
TCAATTTTTGGCTTTTGAAGGAACTTCCGTACTGACTTCCATGGTGGCTATATAAATTTGCACTCCTTCCACAATGAATAAGTGTTCTTCTTTC
TCCACATCCTTGCCAGCATCTGCTGCCGTTTGTTTTATTTATCTTGCCCATCTTGACTGGAATAAGATGAATTCTCAAAGTAGTTTTTATCTGC
ATTTCTCTAGTGATTAAATATATTGGAAAATCTTGTTTCTCACTCAGTTGTGTATTATCTTTTGAGAACTCTACTTCTGTATCCCATGTTTTAA
TTGGGATATTTGCTTTATTAATGTTGAGGGTTTTTTTTTTTTTACTTCTTTGTATATTGTAGATACTTATCCTCTGTAAGATAGATAATTAGTA
AAGATTTTTTCCTATTCTGTAGCTGATGCTTTACTCAAATAATGTTGTCTAGCATGTAGAAACTTTTTAACTTCATGAGGTTCCACCTATTAAC
TGTTGGTTTTAAACCTTGTGCTATCCAGATCCAGGGCCAGAAAGTCTTTTCCTGTGTCAATGAGTTCAAGCCTATTCCTTAAGTTCTCTTCTGT
CATTTTCACTGTATTTTGTCTTATGTTGACGCCTTTGGTCCATTTGGAGCTGAGTTTTGTGCAGAGCAATAGATATAGATATAGGTCTGTTTTT
TTTTCTTCAGCATGTAGTTTGTATGCAGTTTGACTAGATGCTGTCTTTTTCCAGTGTGTGTTTTTAGGCTTCTTTGTAAAAAAAAAAAAATAAG
AAGAAAGAGGGAAAAGAAAAAGAAAAGCTTTTCATGGTGTGTATATTTATTCGTGCATTTTCAATGTCTCTGATTTTATGCCAATGCTATGCTA
TTTTTATTGCTGTAGTTCTGTAATTAATATGAAATCTAGAGAACCTACAAAAAATGAACATATATGTGCATGACATACCAAACTTAAATCAAGA
TTAATAAAACAACTTAAACAGACTCATAACCCTTAGTGAAATGCAAGAGTAATTAAAAATCTCCCACGTAAATGAACTCCAATGCCAAATGGAT
TCAGTGTAGAATTCTACCAGACCTTCAATGAAGAACTAACACCAATACTCCTCAAATTATTCCATGAAACAGAAACTGAGGGAAATTTCTCAAT
GCTGTTTCTATCAGGATCATACAGTCACAGATAAGCTTGTCTTTTAAGAGAGAGCAATGAATGAGACTATGCAGTGTTATTGTGGGCAGGGCTG
AGAAATAAGAAATCTGTCACAACTCATCAACGTGAAAAAGAAATGAACAAGAATGAATTTCTCTGGGGCTCAGTGAAAGGCTGAACCATGGAGG
AATAATATGGCTGGAGAGACAGACCACCACTAAAACTAAGTCACAGGAAAGGTAGTTGTGGAAGGAAAGAGGGCCCTTGCATGCCCATTTCCCA
TTCTCTACCTCATGCCCCATGCCTCTACCTCTGCCTCCATCTCCAGAAGGTTGATTCTTCCAGAAGTCACTCTTCTGAAAGGCAAGAGAGCCTA
GCAGTCAGAACCATCAAACCCAGAACAGAAAAAGAATAAGCATGGAATCAAGGATTGACCGGGATTAAGTGGCATGCCAGTCATCTGATACATA
TTGAATGAATAATAGAGGTGCAAATGATGAGAGCCCAAGACCCAGCATGCAGTAAAGGCTTTAGCGGCTGCTGAAACTACAATTCCCTTGCTGT
CTCTGTGCTCCGAGTCTCTCGTCAGTACTGTGTGGTATTTCAGACTGTCCACTTCAGTGCAGCCTCTGACCTGTGTCTTGTTGCCTCTGTGACT
TTCTCCACCCTCAGCTAATACCTCTTCATTTCCAACAAGAATAGAGAGTGTTGATGGGAACAGGGAGGAGCATGGGTTGTTCCGAACAGAGTTA
GGACATTATCAAAGAGAGCTCAAATAATTTCCAGAACCTAAAACACATTCTAGAATATTTAAGAGATTCTTTTTCTTTATCTTTTTTCTTTTTT
AAAGAAAATTTGGTGCCACTGCACCCTATGGAGAAAATTTGGTGACTTACTTCTAGGAAGCTTGCCCCAGACATCTGTGTCATAAGCTGTGAGT
TCACCAGACGCCTCGTTACCAAACGTCTTGTGGATGAACATCTTTTCTATTCAAATAGCTTTCATCCTATTATGGGCTTTGATTGAAGACACAA
TCCAGCTATCTAGTCAGAGCAGCAATGTTGACACTGCAGTGACTGTGCATGAGTGTTTCAGAGTTATGAGGACACTGGTGGCCACCATGGGCCT
CCTGCTGGTCACCTTCTCCTCCTTAGCTGCATTAGCAAGAACATCCAGCACTAGCTTCCTCAAGGGATCATTCCTAGTACTCTGGAATCTGAAT
GCTAAGAAATTATTTGAAAGCCTTTTTGGCTGGTTCCACTAGCCAGTTGGCTCTCAGATGGAATTGTGAAACTAAATTGGACAATAGCTATGAA
TTTATGTTCATAAATAAAAGACATTTTAGGGGAGGGGATGTCTTGCTTCCTTTTTTGCGTGTGTATGTGATCCATGTGCATATATGTGTATATG
GCCCTTGTTTATGCATGTAGAGGCTAAAGATTNNNNNNNNNNNNNNNNNNNNTTTAAGTAAATCCTCCTAATCTAGCTATATTTGGCTGGCCTA
GGTGGCCAGCTTGCTACAGGGGTCCTGTCTCTACAGCCCATGTTTGCTGGGATCTGGGATCATAGGTAGGCCACCATGGTTCCCCAGGATGTAC
ATGAGTGCTGGAGATCTGAAATCCAGTCTCACAGTCACATGGCAGGTGCTTTATCCACTAAACAGTCATCCTAGCCCTAAAAACCAGGTTTATA
AGGCAGTTTATGCCATATAGACACCTGGTTTGCATTCAAATGTTGAAAGAGTTCCTTTCTATCTAAGATCAGCATCTCCAACTCTTATCTACTT
TGCATCTCTTAAACCCTAACCAATGGGAAACAAGAGTCTGGAATTTCATCCAAAAGCCTAGAGTCAGAAATGCTAGATGGGATAAGATTGAGGC
TGTGACACCTGGTGTAAGTACATCCCAGAAGACAAAAGCCCTCATCCGACATTTTACTGAGTCTTCCACTTCTCACTCTAAAAAGCCTTCTCCT
GCCAAAGGATGTTTGAACCACTGATGAAGGATCTAACTTGAGCTTCACATAAAAGTGAGTCTCACTCAGACAAGTTCATATCTGTATTCCTCAG
TAAATCCCACCTAGGGCCTCCAATATATTCCTTATACTTTAATTCCAGTTGGGACAGCTGGTGAAAGTGATCTATGCACTATAGATTAGATACT
GAATTAATATTAATTTCATGACACACACACATATATACATATATATATTACATATATATGTCAATGGTTTTGTATACACACACACAAACACACA
CACACACACACACACATATATATGATGAATGCCCCATTCTTAGGAGAATAAACTCAAATAATTAGGGACAAAAAAGAGGCATCGTAACTATGAC
TTACTCTCTGATGACCTGGGGAAAATGTAATTTTTGTTACATAAAAGATATAGGATGGTGAATAACATATTAATAATTCGTGTGTTTGTGTGCA
ATACGTGGGATTTATTTTTACAACTTTTTTTTCCAAGATTGACATGACTTCATAATGAAGTTGCAAAAACAAGTAAGTCCAGCTTTTCTAATGC
TCATCTATGCTCTGCAACACAGGAAGCTAGAAATGCTCTCTCCTGATTTGTCCTGTTTGAGTTAAAATGAGTCATCTTCTCTTTCAGCTAAAGA
ACGCTTCTCTGTGGAGGTGAGCATCGCAGATGTTTTGCACATGAACCCTGAAGGTAAGGAGGGTTTTACCGAGTGCCCACATAATTGCCTCCCA
TTGTCCCTCTCATACAGACAAGGGCAGGGACGTGGCTATCTTGATTCTCAAAGAGCATCATCTCAAACCATCAATACTCACACAGAGCAGTCCA
CTATCCTCAAAAGGGGGGGGGGGATCTTCAATCTCTGTTTCAGAAAACCTGATGCTCGTCTCCTTTTCTTGTTTTTCTCAAAAGCTTTTCATGG
TTGAAATCCCCTAGCTGTGCAATTAGATTTTTATTTCCTCTTTATACTTGTCTGTACTTGGGAGGATTTTTTTGACAATGTCTGGGTTACTTTT
ATAATCAGAAAGAGAAAGATTGCATCTTCTTTTATTTTTTCAACCAGCTCAATACCAATTCTGCTATCACTTCCTGAGACATCTCTCGGCCTCT
TTAATATTGTCACTACTTGGGCCTGATCCGTGCCAGCCTATATGACAATACTTATATGTGGTGGGCTCTCAGTTTTCCTCACCTACTAATACCA
AGGGAGCCCTGGGAGCCAGAACCTGCCAGCAAATAGGTCATGGAGAAATCACCCACACAAAGATTGCCTCTGCATATACCACAGTCAAAGATCT
AGGCTACTTAAGAAGATAGCAGATTGCTTTTGGTCTTTGAGACCTTTCCTTCCTGCTCTTCAAGAGAAAGTGAAAAACTCATTAAGATAGAAAA
CTGACTATTATTATTAGCTGAAGAAAAATCTAAGTGAAACGTTCCTAAGATTTCTTTGAGCCACCTTGTGATGGATGAATAGTGATTCTCCTTT
AAGGGCCATCTTTCACTCCAGTGAAGGCTGGCCTGTCCCATGGATCAAAGATGCTCAAAGATTGTCAAGACCTTCTGAGTCAAAGATCTTTTTG
TCACAAAGACTGCTCTCTGGTAGTATATTCAGCAACATTGGAATAGAATACCACTCCAAACCCAGCTTCAACAACCAACAGTGTCTAGATGTTG
CTTAAGGTCCTGGGAAGGACAAAACCACCCACCCTGGGTAGTGACAGTAATGTGTTCAGACACTGCCTGATGTCTCCTAAGTGAAACAAAAATC
CCTTCTATCAAAAAAGCACTTCTCTAAGTTACCTAAGCCCTGCCAAGACCTTCTGTTTTTTTCATTTAAGTGGATTGAAATTCATAGTGTACAG
AGTGGAAACAGGAAATGTCTACAAAAAGAATGCCATAAACACTTTGGGTATAAGAAATCTCTGTGGCATTAATGTCATTTTCTAGACAATCCAT
TAACATAAGGACTGGTGCGTCAATCCAGCAAGAGTTCTATGCATTTCTTCCTACTTTCTTGGCTTCTAACCCTTGAGTTCACATGGTACTTGAA
GGATAGAGACAGATTGAGAGTCAAAACATTATGCTAAGTTCTTTAGTAATCTTTTGCCATGTGGATTAGGAAGCATAGACAACTGGAGTCTGAA
CTATGTTGCAAACACAAGAGAAATTTGCCTGCAAATTACTTTTTTTTTTACTTTTATGTGTACTTATTTATTAACCACATGTTTGTGTAAAAAC
GTTACCTCTGACTGACTTTTCAAATCTTTTAAACATCGAGGCATAGATCCTTAACTAAAATTCATCTTTTCCACTCCAAACAGTACACAGCAGG
TGAAGTTTTGGTAACAGAGAGATGTTCCAGTGGTTGGAACAGGAGATTGAGGCTCCAATATCACATCCCAGTACACACACATAGATATCTACTG
TGCTTGCTCATCTCTAAGTACCCTTGGGGCCTTTCATCCCTCTGGTTGACCTTCTTCCCTAGCATCTACCCTAGTCTCATGTCCTCCACCCTTT
ACCCAACCTGGGATGTGGTATGCAAAGATTATACTCATGCCAGTGGATATCTGTGAAAACACAGGCAGAAACTTGAAGGCAGTTAAGACAAGTC
AAGACACACAGCAACACAGCTCTTCTTCAACATGAGAAGAACATCTAGAAACAAATGTTNNNNNNNNNNNNNNNNNNNNNNNNNNNNNNNNNNN
NNNNNNNNNNNNNNNNNNNNNNNNNNNNNNNNNNNNNNNNNNNNNNNNNNNNNNNNNNNNNNNNNNNNNNNNNNNNNNNNNNCTCCAGCTTTTC
AATTATGATCCACTAGTTGTAATCACTTCAGAGCATGGCAAAGCAAAGCACCGCCCTACCTGGCACCATACATCCTTTTACAAGAACTCTGGCA
TCGTCCAGGCTCTGCCCATTCCATGTCTTCTGCAGCTCCTGTCCATACACTTGTGACTTTAAATCTTGACAGATCTGTGAGATATAAAGACACA
GAATAATCCAAGAGCACTGTGGAGGAGTTGTCATTCACTAGGTGTCTTTTGATGCTCATCTAAAGGTCTTCACCCATTATCTTTGTATACATCA
CATGTTTCTGCCACCATCCAATTCTTGCCACTTGGGCTTCTACTTTGACTAAAATATGGTATCATTCAAAATCTGTGTGCTAATCTTGGCATAT
AGACATGTAGCTCGCTGATACATTTCTTGCTTAGTATGTGTGATACTCTGGGCTCACTCTCCAACAGAAGACAGAACAGAAAGACTTGGAGTGT
TGCCTATGAGGGTTAATACCTTAGCTTATGCATCATATTTGCTTATGAGTTGGACTTTCTTGTCCACCTGGGAAGACTTTGAACTTGGAACTCA
ATGGAGACTTAGTTTTGTTTTTGTTTTTGTTTTGTTTTGTTTTGTTTTGTAGTAGAGAAGCTGAGTGCACTGACCCTCATTCACTATGCCACTA
GCCCCAAATACCAATTTAAATATAAGCCTGTTGAAATTAAATATTAAAAATTCAGTTCCTCACTTATATTGAATCCACTCCCAATGTTCTATAG
CTGCACATGCTTAGTGGTCATGTTATTGGGCAGGGAATATCAAGAATACTTCCATTACAACATAAGTTTCTATAAGAACAAGCTGACCATCCCA
GTGAGGAGCTCTGGGAAAGTGATAAAGCTCAAACAGACAGGCTCAGCAGTGAGGGAGAGAGATGACAGAACAGGATTCTAAAAAGAAAGTGAAA
GGACCAGTCAACGTACTTCAACTAGGTCAACAATTATATCACTGATACCCAACCATGAACAAATGTACAACTACTCTACCACAAAACACTAGGA
AACAAAGAAGTAACCATCTTTGAGATGGTCTTTGAGACCCATTTTCTCCCCTGTCTAGTCTTTGGAGTCTGTGAACTCATTGTGAAACAAGAAA
CTTTTCTTCTGAATCCAGAGGCAAGAAGATCCTAAGCTGTGCTCACACATTGAAGCCAATGAACTCCCAGTCAATCGAGAAAGCAACACTCTGG
TAGCCATATACAAAAGCCTATTTAGAGCTAGGATTATTCAAACCAAAGAAAACAATACAAGGCAAAGGTACCATCTCTCTGGGGACTTTTGACT
CTATAACAAGTCCAAGGAACACAGGGGTTTCCAGGACAATTATTGTCCCTGTAATGGAGCAGATAGTGTGGTCATGGCCTCCTGCTGACAGCAG
TGGCTTATCCTTACCTAGCACATTGTCAACAAATAGATTACTTCCACAAAGTCACTCATCTTAGTCTCTCCTCACAGAGTCACCGAGGGAAGAA
GAGCAGATGTGGCCCTCTGTACTTTACATACAAAAGAGTGAAGGCACAGAAAGAGAATGAGACAAGCCATAGTTAGCAAGGTTGGTGAAATTCA
GGACCAACAATAGAAAACAGCCACCTAACCTGTCTGCAGTTCACAACTCCTCTCTCTGGAGATACAAGTCACTTAGCACCTGTTCAGGTCCCTA
AGTCTGTCATCTCCAAGGCTATGACCTCCTCATAGATAATGCTGCAAACTCAGCTTGTCACTCCATCCCTGTACAGAGTCCCCAGCAAGCTCAC
TGATGGTACCTCATCTACTCAAACTGCTGTAAGAGGGGACAGAAGCAATTGTTACTAATTCTGTTGCTGCCCTTCTCAGAAGACCCCTTCTTTC
AAGCAAAAACATACCTAGTAATTGCAGAAAAAAATCAGTGTTTGTCTCAGTGTATACACTAGGTCTACCGTCTATCTTCCTGGCAAAAGTCAGG
TGGAAAATGCTACCCCCCAAAATACTCTGTCTGCCTTGAGATACTCTTAATCATGGCAGATTTTATTTCTCTAGAAAACTGAGTTAGAATGTTT
CCATTCATATGACTTTCAATAGCCTGTAACCAAATATGATATATTCTCACACTTGAATGAACTCATCATTCATGATGTCTAATAGTCATTTGCA
TTCTTGGCTACATGAAAGATTGGATTCGATATTTTCCTTTAGCATGCAAAGATATGCAGAGTAGATATAGCCTTTATGTCTGATAAACTGTAAA
CACAAAATCCACCACTGACTAAAACAGTGAAGAGGAAGTAAGATCTAAGGCTGTTTAGATAAAATAATATTGAAGATGGCAACAAAAATTAAAA
TGCTCACTTTAAATGTTTCCCAACTAGCTGACACATCCAGCATTGTTTGGCTTGGAAACTTGACAAAGAGCAAAGAGTGAACGAATAAAGGGCA
GATACACATACAGAAAAGCCAAGTTAGCCAGGCTATGCACACTCTAAAAGAACAGCACTGTACTGGCTGGTTTTATGTGTCAACTTGACAGCTG
GAGTTATCACAGAGAAAGGAGCTTCAGTAGAGGAACTGCCTCCATGAGATCCAACTGTAAGGCATTTTAGTGATCAAGGGGGAAAGGCCCCTTG
TGGGTGGGACCATCTCTGGGCTTGTTAGTTTTGGGTAGTCTTGGTTCTATAAGAGAGCAGGCTGAGCAAGCCAGTAATGAACACCCCTCCATGG
CCTCTGCATCAGCTCCTGCTTCCTGACCTGCTTGAGTTCCAGCCCTGACTTCCTTGGTGACAAACAGCAGTATGGAAGTGTAAGCCGAATAAAC
CCTTTCCTCCCCAACTTGCTTCTTGGTCATGATATTTGTGCAGGAATAGAAACCCTGACTAAGACAGGCACCAACTCCACAGCACCCTGGAACC
TCAGCGTGTTGACTCTGTAGAGCACAGGAGGGAGAATGTGCCTAATCTCAGTAGGAAGTCTTACTAGCTATGCAATCTCAGGGCAAAAACTTCC
AGGAGGAGAAATTGTGTTGCTAGTTTTTGCCCACACTGGTCAGTTGGACTGCTTGAACACACTTTCAACATTTGCATTTGAACCAGAGGAAAGC
TTTACCATCCCTCTAAGGCTCCAACTAGGCGTGCAATCTTTGCCATTCCCATGCATCTGAGGAGTTGGTCTTTGACATGGCTGTAAACATGTCA
AACAATACATATTCACTCAGAATTTCATCTGTTCTTGACACACTCAAGACTTACGTGTGGCTCTTCATACCTAGCAATGCACCCCTTGCCTTCC
ATTACAGCAGAACCCCAGTGTTTCTCAGTCGGCATCAACCTTTCTCTTCATCTAAGCCATTACACGTTACAGTTAGACTACTGAGCTAGCTATG
TCAAGTTTTGCTATCTGCCCAAGGCAAATGGGCCACGCTCTGGAGATTCTACTTCCTCCCAGGGCTGAGTAAGTCCAGACTCTAAGCTTCTTCT
GCATCTTTTTGTGGCATGACCCCAGAGAGGATACTTGGAGCAGCAAGCCATAGCATGCCTGGCTAAAGGTGGATTAAACACTGGGCATGTAGCA
CTTTCCTAAGAAATTCTGGGAAAATCAGTTTTAGGTTTGATTTAGCAGGTCATGATAACTTCAAGGAACCAGCGTCAGGATGAACGGTAGAAGG
GGGGCTCCTCTCCCTCTTTCTTTCAGCAGAGAGGGAATTTTCTGCTATGCCTTCATCACTAGAATTTAGTGGGATGGCCATTCCTAAGGCTGCA
GTCTGGACAAAAAAAAAAAAAAGATTACAATGGCCCTGATTAGCATAGCCTGTTACTTCCTCATCCCCTGGGGCTGGATGCCTGATGCCTGACT
GGACTCTGCATAAAAACAAAGGGAGAAGTAGTTGTTGGAGAAGAAACTTATGGTATCTGCCAGGCTCATTGGGTGGATAGGACTGTGTCAAAGA
CAAGACAAGGACGTTTGTTCTCACCAGAGAGGCACCCTCCACAGGGAAGCAGCGTCATCTCCTCAACAAGGTCAGATCATTTATGACAATAGGC
ATGACACCTACAGAGCATTTTTTTCCTACACTTGTCATTTATGTGCTTTACTGGAGACTCTTTGAGAGATGGTATGTGTACACTAAAGGAGTTC
TTTCTGACAAAATTTATTTTATGTCCTGTTCTTACATCTAACTATACATAGCTAGATGAAAAGATGGGTGGATGAATGCATGGATGGATGAGTG
AGTGGGTGANNNNNNNNNNNNNNNNNNNNNNNNNNNNNNNNNNNNNNNNNNNNNNNNNNNNNNNNNNNNNNNNNNNNNNNNNNNNNNNNNNNNN
NNNNNNNNNNNNNNNNNNNNNNNNNNNNNNNNNNNNNNNNNNNNNNNNNNATGGATGGATGGATGGTTGGGTGGATGGGTGGGTGGATGGGTGG
ATGGATGGGTGGATGGCTGGCTGGGTGGATGGCTGGGTGGATGGCTGGGTGAATGGCTGGGTGGATGGCTGGGTGGATGAGTTGATGAGTAGAT
GGGTGGTTGGATGGGTGTATGGATGGGTGGATGGATGGATGGATGACTGGATGGGTGGATTGATGGGTGTGTGGATGGGTAGGTGGATGGATGA
ATAGTTGAACATTTAAATCACTAACATGGGTCAATCTACCTGTTTTCTAACCTGCCCCACTACACTCACAGCTGGATCTTTATATATTCACTCC
TTTCCATTCCCACCCAACAAGTCTACAATGAAAGTATTCACTCTATTCCCTGAACTAGCCTTGGGTCTGGTTGTTACCTCTCTGACTGGTTGGT
ACCTTTTCTGCCCAGAAGGTTGCTTCTGAAGAAGAACAAGATGGAAAAGGGAGAAGGGGAAAGCAAGTAATTATCTTGGTAGATATAGTTGCCC
AGATGTTTGAATGCAGAAGTAAGTCTGAAAGAACATCTTGTTCATGAGTGATAAAGTGTGACTCAGAAAAGTAGAGACAGGTTGTGCTCCTAAG
GGGAGCACAGAGAGGAGGGTTGACTTTGGGACTGGTTCTGAGCATTATGAGGTGGGAGAGATGTGTAGGCTTTCTGTGTTCCTGGCCCAGTCTG
TGAACCTACAATTACTACTATCCTTTAGACTTCCAGCTCCTAGTGCTTTGTATTACAAGTCTGTTGAGCCAGAGGAAAATTTACACAGAGAATC
TCACACCAGGAGCCCTGCTGAAGTTTCTTCTGAATAAGATGGCCTGGTCCTTCTCGGGGCCCCTGAAGAAGATATTTTCTGCAAAACTGCCATT
CACCTACTTGTCAGAAGCTGAATGGCAAATAATGGGTTCCTGGATGTTTTAAATGCACTCAGACACAGTAATGCAATTAGGGAAAGTAGGAGGA
AGTCTCGAAAACAACTGAGCAGCCAGTGGGCATGAGAGCTGTTGAAATCCTTCACTCTAGCTTGAGAGATAGGTACATGTTCAGCTACAAAAAT
GGTTCATGGAGGTTGGTTCTCAGCCACTGCTTTACTCATTGCCAGAGACACAGAGGTCCGATACTCTATGGTAGCCTCTGTTCACACCACTGAA
TGTCAGGTTTTCCTTAGCGAGCTGGTTTTGTTGCATTAATGATGGTGTTCAAATCTGCCTCCTCAGTTGCAATAGCAGTCACTTTTTATTTCGT
TACATTAGAAAAGTAGTCATTACCCACTTTAGAATAATATTCCCTCCCAGAGGGATTCACCATTTCTGTGTTAGCATGAATCTGTTTCGTATCC
ACTGTCTGAGCACCCGTGCAAAGACATTTGTGAGACATTAGGATCAGGCATGTCTACTTCCTGTATCTAATTATTCCTGCACTTCACCTCTGGA
AGTCATTGAAATTTTAATCACATTATGTCAAGGCTTAAATAATATTCCACTGTTGTCTATGCTATGATCTGGTTAAGCAGCCCTTTAGGATCTG
GTGTTTAGATTGTTTTCTAATAATTTGGGCTTTATAAATAACACTACAGAGGTGGACTCTCTTTATTCTAATGTTTTGTGCACCTAGGTTCACT
CAGGTTAAAGTTCTGAAGTGTATTTTCTGATTCAATGTGTATCCGTATTCTTGAGACTTAACATATGAGAAAAGTTAAACCAATGTACACTCAA
ACCACAAATCCAAATGTATTTATACACTCAGTAATACCATTCTGAAACCTCCAGGGTTGAAAAAAAAAAAAAAAAAAAAAAAAAAAGAGTAAAA
ATAAAATATTTTATATGAAAATATTTTGAAAATTAAAATTCCATTAAAATAAACATTGTCATACTATCTATTTTTAAATGACACAAGTAGAAGA
TGTCAGCTTCTTTGATGAAATATTGTGGTGTTAATAGCCTTTTTAAAGTCCCAAATCCTTGCTAACTTACCTCTCTACATTCGGCAGACACTCA
GACACTCAACACAGGTTATTTCCTCAGAACCATTTACTGAATACCCATAGAGTATAGAGCTTTGTTTTAAATTTGAGGATTAACACACACATAC
ACAAAGAATTAATCAATGAGCTTCTAGTCTAGCCTGAAGAGCTACTAGAGTGGGGAATTGCATAAAGATAAGTCAAAATCATTATCAGGACTAC
CCTGTACAACAGCTTTGTGAGACCTAAAGTGTCTGCTGGATGGGAGATGGGACAGAGAATCAGGAGGTATCTGGTCTTTCCATTGGATGACCAT
GAACCTATCTTTGCTGCTTCTAAAAATACTCATATTTTCTAGTAGCCAGAGTTCTGGATGGAAAGAGAGACATCATTTTGGGCAAAGACTTATT
TTAACAGTCTATATGGTAGGATTAATAAGATCCCAATGTTAAGTATCATCTACCATTGCTCTAGAAATCAATAGAGCTTTGTGGTGAATTAAAT
ACAAAAGGAGGGGCTGACTATACAACTGTTTGGAACCATAGTAGGACGCAGAGATTTTAGGGAAGTGTGAGGGAAAATAAGGAGGGGGGGGGGC
GCAAATATTGCCACTGTTGGAAGAACAAGACAAGGAATTTTGCCAAGTATCTAACGTGTGGTGGCCAGAGAACCCTTCAGCTTTGTCAAACTAC
AAAATCCTTGCTCTTTTTAATGCTTGGAGTGACAAGGGTCTGAGTGTAGTTTCCAGATGGGTGCCTGGTGAGAACGAAGGCCACCTACTGGAAG
CTGTGACACTTCAATACTCACCCTTCATTCTGTTCATGTGTAAGCTCTACCATGGACTCAGAACAGTGGTGCTGAAGCTGGAAACCCTTCCCTT
GAACTGTGCAGGGTATAAACTGCCCATGACCTGCTTCTCTTCTCATTTTAATCTGATGGATACCCAGGTTCCCATGTGCTTGGCACATGAGCCT
ACAGTTTTAAAGAACAAGTGGGGAGTGTAATGCCATCTTTTAGACCATAAAGGGCATGCAGAGGTTTTTTCCCAAACACCCAGGTATGTGTGAG
CCCTGCCACTTAAGGACACCTAAGAAAAGCATCTCAGGCTATTATAGTTTCAAATAAATTGACCATTGATAGAACTAAGAGTATCATCAAAGCG
ACCAATTTTTCTCCCAAATCACATTGGTTTGATAATATTAAATCAATTTCTGTTTCTAAAACTCAGCTGACAGCCTTTGGACTACACTGGTGCC
TGCCAGGCTATGGACTGAAATCCTTATGGGTGATTCCCAAGTAGAGTCTTTGTGGAAAACAGGAAAATTGAACTAACCTTTGAGTATTGACATC
CCAAACTATTATCCCTTTCATAGTTTCAGAGAGTAGTCGTTATAAGGCATGGTGCTGATTAGATGTTATGGAAACAGGCAGTCATTTTATTCTT
ATAAAGCAAAGAGTAACAATGATTTGCTGGGGATTGCCTGGTCATTGTTATGGTAGAAAAGTGTGTAGATGTTTACCTAGGCCTGTTCTACTTC
ATTGACCTGGGAAAACTACTAGTCAAATGGAAAGTGGGGCCCCGATTTGCTTGATAAATAGCAGTGTAATGGAGGACCTAAGAAATACAGAGAT
ACAGAGAAGTATTCCTTCCATAACTTAGAGCCACACTTGAGTTTTACGACATTAAGCATGCTCTGTTTTTTTTCTAATTGATAGTTTCTTTTGA
CATGTTTTTATTTACTCTTTGAATTTTTCATATAATATATTTTGATCACATTCCCTCTCCCATATCCTCCCAACCAATCTATCTATCTATATAT
CTATCTATCTATCTACCTATCTACCTATCTACCTATCTATCCATCTATCCATCTATCTCTATCTCTATCTCTATCTCTATCTCTCTCAAAATAA
AAAATAAAAAAACAAAAATCAAATCCAGTTTTCCTTGGCCAACAACTCTTTGACAGGGGACCTGTTTTGTTGCTTTTACCTTACACCACTACTT
AAAGCTCAGCTAAGCAGCTCAACTCTCTGGAACACAAATGAGATCCAGAAAGCAAACCAAATAGACATTTTGATGAAGTACATGTAATGAAAGC
CATTTATCTATAAGACAGGTGGAAAATTCCTTTGGTCCTCCCTCACAACTTATTGTCATCATTTAAATGACTTCAACTTTCTAAATTTTTATTT
TCATGTTAGCTTTCCAACTTTGCAGATCAAAAGCAGCGATGGAATGAAATGGATCTGTTTAGGCCTACTAGAAGAGAGTTAGTAGCAAAAACAG
CTATTAACTATTAAATTAAAATTTTTAGGGAGCAAAAACAATGAAGGATAGAAAGGTCGGGAGAAGAAAAAAAGACAGCTAACAAGAAAATAGC
TAGGCACTGAGGATCCTTGTGTCCTAGGTATCTGATTTAAGGGTCTTTGGTCTGTATTTACTCTCGGTATAGCATCCTGTGACCATGCCACTCA
CTATAACTGATATGTTCACAAATGATATCAGTGTTCTGATTAAGAAGTCATAGAAGTAAATAATATTTACATTTGTATCCAATTCATTAAAATA
TTTTTTATCTGAGAACATGCTTTACATAGCTAGATACATAGCTACCCTGTGATGTGTTTTCATTGAAAAATACACATTTTTTAAAAATCATTTT
ATTTCATTTGAAGATTGTACACTCGAAGTTTTGTTTGCTGCTGAAATTCCACACATTCCTTCAATTTTCAATAATTATATTTCTTATGTAATTT
GGCTATTAGCCAGATGCCCTGGAGCCAAATCTCATTGTATGTTTTAGTACATCTGTTGGCGCCAAATCTCATTGTATGTTTTAGTACATTTGTT
GCTGAGTTCAGTTTAATGCACATCAAATGGTATTGGAGGAATGCACAAGACCTTAGTCACTTGAAGTGCATCTTAATAGGAAGAAAGAATTCCC
TGATTCAAGGGTACATGTTATTGCTCCTCTCCTTACCCCCGTGGATCTGAGACTGTGAGAAGGGGTGAAAATATTATGTTCTTTATGGTTTTCT
ATAAGTGAGTCAGTCCGAGTTTGTAACTTAGTGGTAGATTGCTCACTTCAAAATCCTGACGCTCTAGGTTCAAACCCTGGCACTACAAAGAAGG
GAGAAAATGGTAAAGCAACCAGTCATTCAGCAAGTGTTACTGCACCGGTGAATGTGTGCAAAGTGACAACGCGAATGGTATAGAAGCTGAACAA
AATGACTTTGATAATAGTGTTCACAGTGACACTGAATCAGCACACCAGACATCAAAGGTTTACTTACTCATAGGTACTACTTGATTGAATACTG
TAGTTATCACCCAAAGTAAGCAGTAATAGCCAGCCATTTCCAGATTATTCATAGATTAGTCAGGCTAAGTAAAACCAAGCATTTCCGATACTCA
GTCTCTAGCTACAAAGCTTACTAACTGGATTGTTACTTCTCAGCCCTATAAAGTTCAGTAGGTTCTGAGTGGAATTCTAGAGCTTCCCTTCTGT
TCCATGATCTCTTGGGTCCACAAACTACTACAGGCCAGGAGAGAGAAAGGAATGTGCAGACAAGGATGTGGAGGGGCAGAGTGTATTTATGGAA
AGAGCTTTAAAGGTCAAGACTAGACCAAAAAAAAAAAAAAAAATGTAGCCTTTCTCCCCATTCTCCAATGCCACAGCTCAATCATCTGACCCCA
TGTAACCATAAAAGGAACAGTTAGAAGAACTTTAGCTGTAGAGAGAAAGGAAGAATAGACCCAAACTGTGGCAGGTTCTGGATCCTTTTCCTTC
TCTTGTGAGGGACTCTCAATATCCTCACTGAAGTGGTAAAGAAAAGTACAACTTAGAAAGAAGAGATAATTTTGACATATTCTTGGGGTGAATT
TCTTGTTGGACTTACTAGTTTTCTCAGATGTAGGTACAGCTCATCCTCAGTGCTCTAAAGATATTCCCATCAGACACCTGGCTATTTTCCCATT
GATGCTCAAAGGAGGCCATGGGTTACTCAAGGCCACACAGTCACTGTGAAAAGGGAAGAACTGGACCTCCCTCACACTCCTCAGGCTTAGAGAT
GAACCTGGACCAGATTTTCTCAAGTCTTTGGTTTCCTTTCAGTGCATTTTGGAGTTTTTGGATTCAAAAACTCCAAAAATCTCAAACAGGCAGC
CAGGGAGTCAGTAAACCGATAATTAATCTTTTTTATTTTCGTTTTCAATTTTCCATTTACTTCCAAGCTTGTTTCAAGAAATTAAGAAACACAC
AAAAATAGATAAGCTTGTTACCAACAGTAATTTGTGTGTGCTCATGTTTTAAAAGGAATCTAAGGTTCTTTTCTGTTTAATTAAACCGCATGCA
CACATACACATACAGCTCTGTAAAACAGAATTTTCTTCTAACAATCTGGCAAAACATATGTCTCCTCCTACTACAGTGGCCTCTTGGTAGTGAC
AGCTTGCCATAGAAACAAACTACAGTGAGATTTCTGTGACTTGAAACAACATTCATTTTTTTAAAAAAACTCTTTTTATAAGAGGCAGCAGGCT
GACTCTGGTGCTGCTGAGATTATCTGGGCTCCTCTGGGCTCTGGAGAACTTTTTGCCTTCTTGTTTTGCCACCCAATTGAGGATTTATTATCTT
ATACTAAATAGCTCCATAACTTAGAAAAGAAAACCTCAGCCACGTCCTGTGACTGTTTCTGGATGGATGGATGCAGCCAAAGTATCACCCAGTC
ACCACCACCTTTCAAATGGATGAGTCTAAAGTAACTGGATTGCAGTGTGTTCCCTTTCCAACATAATGACTCAGTATGCCTTATAATTATACAT
GCTTCCCCATGACTCGGAATAAGAAAATATTTGGGGACAATAATCCACTTAGCCTGTCCCACCACCACCTGACCTTCATTCATCGAAGTCTCAA
ATGTGGCATTTCTCAGAGAAAGCAGCCTCTCTTTCTCTTTTTCTCTGTTTACCTCTAAATGGAGCTCTCTAAATTCAGCTCCAATGTCAGTCAC
AGAATTACATTTTTCAAATGTCCCTTCCTGGGCCCTACATCCAGAGACATATGACATTAGGAGATAGTGTATACAGAAAAGTCTCTAAAGACAA
GGCCCAGGGAATGTCTACTACTATAAAAGAAGAACTACTATTGGCCTCACACAGTACCCAGCATTAGAGCCACCTTTGGGAAGTTGGTTTGAGC
ATAGAGACCCTTATCAAAACAAGGGAAAACAGCCTTGGAGAAGTCACAGTCTGTGGTAGCAAGGTCACCTTACCTGTTCCCTGCTCTCATACCA
GGTACATTTTGTATGTCTAAGATGGGGCTCCTTAAAGGTAGGATCAGTGGTCCTCTGTAGATATATAAAGTAGAAAGCATGCGATAAATATACA
AATTCTGGTGTTCAACTCCTAAGATCTTCTTCACCCACTAGCTATGTGATCTTGGGCAGTTCATAGAACATGTCTGAGCTGCAGCACCCTTATC
TGTGAGATGAGAATAATAAGGGAGATAGGGTCCTAGTGGCCTTTAATTAATAAAGATACTGAGGAAGCCATATAAAGCACAAAGATTACAAGTT
CAAAGCTTGCCTTGGACACAGGGTAAGTTGGAGATCAACATAGTCAACTTGGCAGGACTATCTCAAATATAGTTGGAAAGTGGAGTGGAGTTAT
ACCTAGTAATAAAGGGCTTTCTTAGCATGTGAAGCCCTAGGTTAAAACCTTACTACCAGGGGGAGGAGGAAGAGAAAAAGAAGAAGGGGAAGGT
AGGGGAAGAGGTATAGGGAGAGAGAGGAGGAGCAGAAAAAAGAAGAGGAAGAGACAGAAAAGGAGGAAGGTAGGGTTGGGTTCAGACTCAACCC
CACTCTTGTATATTATGTATACATAACCTATACACATCTTCCTGTACACTTTAAATCATTCCAAGATTATTTATGATGCCTAATATAAGCTAAA
TGATACATTCAGTTATCATACTACCCTATTTAGAGAATGACAAAGAGTCATATTTGGTTACAATGCAAATGCTTTCCAAATGCATTCAGTCTGG
AGTTGATGAAACTACAGATGCAGAAGCTGTGGATGTGGAGCGCCCAACCATCTTCCGAAGCTCAGGGGACACAGTATAGGAATGGAAACTCTCC
CACACTGGGAGTGTGAATCGTGGTTTGAAAGCCACTGCAGCCTGTGGAGCTAGCTGTGAAACATTCTATCCAAAACATGTTGCCTTTGCACTGT
TATTTATTGATGGATGATCTCATGAGTAACTGGTTCCTCTGGACCTCAGGCCAACATGGATTTTCTAACATCTGTCCAAACTCTGCCCTGGACA
GGGAGAATTAACATTTACCCAATTCCTATTCTTTCCTTTAAGCCAAAAAAAAAAAGCTGATTAAAAACAAAGCTCTGCAGTAAAAAGAGGCAGC
AGGGACTCTAAGTTGAGTGAGTTAGTGTAATAGGAGATGGGTGTGATGCCTCCACCTTTGGGTAAGCATCTACATGTTAAAATCACCCTAGTGC
AGAAGTGAATACAGCACTGAACTGTAATTTGCTACATCTAGCTTTGAAGATAGAACTCCCTGGGACACTACTCTGATGTTGGACCAACCTGTGC
CAGCTCCCATTTGGACCGCACTGTCTCTGCTAGTTAACTCTACATCTTACAGAATGCAGCTGTCTGCATACACAGCACATGGCCGTACACAGCA
CAGCTTCCTCTCAGGAACCTCTTCAGTTTTTGAAACAGGAAGAGAATGGGGTATGCAAACTCAGAAGTGAATGTTTTAAAGTGTCTCCATAGCT
ATTGCTAGTAGCTTTCACACAACCATGATGATCTAGCTAAACCACTGAGCAGTTATCCAAATGGCAGCCAACTTAGGATGGTGCACAGGGAGGA
CAGATCTTCTGGAAATTTTAATTGAGGATAAATTACCACCCTGTGGTGTAAGCATCTTTGCGCTAGATTCATTTTAATAAAAGAAATGCAGATC
CCTTATTCCTAGCTGGAGTTATTGCTCTGAAAGCCAACGTACAACAATCTTAATCTTCAGCATGGTGTGAAACAGCTAATCCCTTCTGTTCTTC
TCTTCCCCCTGGGAAGATTATGTCTTTTGTTTTCAAAATTAAATGCTAGCATTCTGTATTGGAAAGAAAAGTCAGACTCCTGAGAATCAAGGGG
CACATGTGAGGTTCTTACCCAGTTATTTCACCCTCTGGCCATTTAGTACTGGGGGCAATTGAGGTGATCCAGTGAGCAGAGGAGCCCAAAGGAT
GTACCTAGCAGTGCATAACACTTAATAGATAAATTTATTTAATATTAGTTTACAAATTATGGAGGCTTTTTTACATTTGGGAGACAGAAATGTT
AGAAATGGATTTAGGTTAGTGGAAGAATGTATGGCTGGCAGTACACTCAGTGCTTATAGTAAAGAACCATTGTTGGTGAGCTTTATGTGTGCAG
GGCTTTCTTATGAGGGTCTTGAGTGCTACCAGAGGGAGAGTCTGGTTTTTACCCTGATAAGTTCTCTGTTCTCTGCCACATTGCCCTACAACGT
TAAATGTACAGGTAGCAAGCGCTAAGTGGATTCAGTGAGTTTGGTTTGGTTTGGTTTGGTTTGGTTTGGTTTGGTTTGGTTTGGTTTGGTTTGG
TTTGGTTTGGTTTGGTTTGGTTTTTAAAAAAGCACATGAATTGAAAGGAATAGTGTTAGGGAGGGTTGGTGATAAATTGGTGGGGAGGAAAAGG
GGGCATCTTTGATCAAAATGTATTGTATATGTATATGAAATTCTCAAACAGCTTTTAAAGTTGTCCAAAAACCAAAAACAACCCTAACAGTAGA
ATTAATGTAGAAATTACAGTATCACATTCAGCAAAATATAAATGAAATAAAACAAAAATAAATTATGTGAAACTACATACAACAACCAGAATGT
ATCATACAACAAGGTAGAATGACAGAAACTGGATACGCACATTCATTAAATGCTTATGATGCGATTCTATTACAGGAAGTTGGGAAGTACTGTT
GGGCATGGGGTAGAGATCAGGAGGAGGCACTGGTTGGATTTCTGGGCTACTCTTTGTGATCTTTTGCAACTTAGGTGGAAGCATAGAGCTATTC
ACTTGATGATAACTTATTGCAAAATACCTAAGATTTATTCTTCTTCAAGTAAGTCTTAAATTGTCTTTGTCCATCAAAGACAAGGTTTATAAGA
GCTAAAAAGATCCTTAGACATTCTGCCGAGCTTACTGGGAACAATTCTAGGGTTAAGGAGACTGAGTCAAATAGAGAGACCACAGTGACAAAAG
AAAAAAAAAAGCAGCATGGAGAAGAAAACTGGAAGTATCTCCTAGCACCAAAGGATGGAAACAAATCCCACATCATGGGAGAGTTAAGCCTTCC
TTCAGACTTTTATAATTGATAATCTCAGTGGTGGGTGGGCCAAAGCATGCAGAGAAGTATAAGCAGAAAGGACTACATCAGAAAAGCTAACATC
AGGCAGTGATCTGGTGAGAGTTCAGATCTGTCCTATTTACCTCTTGAAGGTAATACTGTCTCCTATTATTTGGGATGCTTTCCACAATGTGGAT
GGGAGGGAATACTGTAGGCCATTGGACCCTGCCTAGTTTTCCATCTAGGAAGGAGTCATTCTAGGTTCCCAAAAGAATGAGCCGGACTATAGAT
TGCAAACTCAGCTGTTGACCTCAATGGAAGAGGGTTGGTTTAATGGAGGACAGCAATAAAGAGGGGCTTCTGGAAGGAGTGGGTCTAAGTAGGA
CCACTGTTGATGCACAAGGCATACCTAGGGGAAAATGGTTAGTTTTCTTGGCAT
MOUSE SEQUENCE—mRNA
ATGTCATCTGCACTTGCTTACATGCTGCTTGTCCTCAGCATCAGCCTCCTGAATGGACAGTCACCACCTGGAAAACCTGAAATCCACAAATGTC
GTTCCCCTGACAAGGAAACATTCACCTGCTGGTGGAATCCTGGGTCAGATGGAGGACTCCCCACCAATTATTCATTGACATACAGCAAAGAAGG
AGAGAAAAACACCTATGAATGTCCAGACTACAAAACCAGTGGCCCCAATTCCTGTTTCTTTAGCAAGCAGTACACTTCCATATGGAAAATATAC
ATCATCACAGTAAATGCCACGAACGAAATGGGAAGCAGTACCTCGGATCCACTTTATGTGGATGTGACTTACATTGTTGAACCAGAGCCTCCTC
GGAACCTGACTTTAGAAGTGAAACAACTAAAAGACAAAAAAACATATCTGTGGGTAAAATGGTTGCCACCTACCATAACTGATGTAAAAACTGG
TTGGTTTACAATGGAATATGAAATTCGATTAAAGTCTGAAGAAGCAGATGAGTGGGAGATCCACTTCACAGGTCATCAAACACAATTTAAGGTT
TTTGACTTATATCCAGGACAAAAGTATCTTGTCCAGACTCGCTGCAAGCCAGACCATGGATACTGGAGTAGATGGGGCCAGGAGAAATCTATTG
AAATACCAAATGACTTCACCTTGAAAGACACAACTGTGTGGATCATTGTGGCCGTTCTCTCTGCTGTCATCTGTTTGATTATGGTCTGGGCAGT
GGCTTTGAAGGGTTATAGCATGATGACCTGCATCTTTCCACCAGTTCCGGGGCCAAAAATAAAAGGATTTGATACTCATCTGCTAGAGAAGGGC
AAGTCTGAAGAACTGCTGAGTGCCTTGGGGTGCCAAGACTTTCCCCCCACTTCTGACTGTGAGGACTTGCTGGTGGAGTTCTTGGAAGTGGATG
ACAATGAGGACGAGCGGCTAATGCCATCCCATTCCAAAGAGTATCCGGGTCAAGGTGTTAAACCCACACACCTAGATCCTGACAGTGACTCTGG
TCATGGAAGCTATGACAGCCATTCTCTTTTGTCTGAAAAGTGTGAGGAGCCCCAGGCCTACCCCCCTGCGTTCCACATCCCTGAGATCACTGAG
AAGCCAGAGAATCCTGAGGCAAATATTCCTCCCACCCCAAATCCCCAAAATAACACCCCCAATTGTCATACAGATACATCCAAATCTACAACAT
GGCCTTTACCACCTGGCCAACACACGCGCAGATCTCCTTACCACAGCATTGCCGATGTGTGCAAGCTAGCTGGAAGTCCTGGAGATACACTGGA
CTCTTTCTTGGACAAAGCAGAGGAAAATGTTCTAAAGTTGTCTGAAGATGCTGGAGAGGAAGAAGTGGCTGTGCAAGAAGGGGCCAAAAGCTTC
CCTTCTGACAAACAAAACACATCTTGGCCACCACTCCAGGAGAAAGGCCCCATTGTCTATGCTAAACCCCCAGATTACGTGGAGATTCACAAAG
TCAACAAAGACGGAGTGCTATCATTACTCCCCAAGCAGAGAGAAAACCACCAGACAGAAAACCCTGGGGTTCCTGAAACCAGTAAGGAGTATGC
CAAGGTATCTGGGGTCACGGATAACAACATCCTGGTGTTAGTGCCAGACTCACGAGCCCAGAACACAGCGTTGTTCGAGGAATCAGCCAAGAAG
GTTCCACCATCGCTTGAACAGAACCAATCTGAGAAAGATCTGGCCAGCTTTACTGCAACCTCAAGCAACTGCAGACTCCAACTGGGCAGGCTGG
ATTACCTGGATCCTACGTGCTTCATGCACTCCTTTCACTGAGAGC
MOUSE SEQUENCE—CODING
ATGTCATCTGCACTTGCTTACATGCTGCTTGTCCTCAGCATCAGCCTCCTGAATGGACAGTCACCACCTGGAAAACCTGAAATCCACAAATGTC
GTTCCCCTGACAAGGAAACATTCACCTGCTGGTGGAATCCTGGGTCAGATGGAGGACTCCCCACCAATTATTCATTGACATACAGCAAAGAAGG
AGAGAAAAACACCTATGAATGTCCAGACTACAAAACCAGTGGCCCCAATTCCTGTTTCTTTAGCAAGCAGTACACTTCCATATGGAAAATATAC
ATCATCACAGTAAATGCCACGAACGAAATGGGAAGCAGTACCTCGGATCCACTTTATGTGGATGTGACTTACATTGTTGAACCAGAGCCTCCTC
GGAACCTGACTTTAGAAGTGAAACAACTAAAAGACAAAAAAACATATCTGTGGGTAAAATGGTTGCCACCTACCATAACTGATGTAAAAACTGG
TTGGTTTACAATGGAATATGAAATTCGATTAAAGTCTGAAGAAGCAGATGAGTGGGAGATCCACTTCACAGGTCATCAAACACAATTTAAGGTT
TTTGACTTATATCCAGGACAAAAGTATCTTGTCCAGACTCGCTGCAAGCCAGACCATGGATACTGGAGTAGATGGGGCCAGGAGAAATCTATTG
AAATACCAAATGACTTCACCTTGAAAGACACAACTGTGTGGATCATTGTGGCCGTTCTCTCTGCTGTCATCTGTTTGATTATGGTCTGGGCAGT
GGCTTTGAAGGGTTATAGCATGATGACCTGCATCTTTCCACCAGTTCCGGGGCCAAAAATAAAAGGATTTGATACTCATCTGCTAGAGAAGGGC
AAGTCTGAAGAACTGCTGAGTGCCTTGGGGTGCCAAGACTTTCCCCCCACTTCTGACTGTGAGGACTTGCTGGTGGAGTTCTTGGAAGTGGATG
ACAATGAGGACGAGCGGCTAATGCCATCCCATTCCAAAGAGTATCCGGGTCAAGGTGTTAAACCCACACACCTAGATCCTGACAGTGACTCTGG
TCATGGAAGCTATGACAGCCATTCTCTTTTGTCTGAAAAGTGTGAGGAGCCCCAGGCCTACCCCCCTGCGTTCCACATCCCTGAGATCACTGAG
AAGCCAGAGAATCCTGAGGCAAATATTCCTCCCACCCCAAATCCCCAAAATAACACCCCCAATTGTCATACAGATACATCCAAATCTACAACAT
GGCCTTTACCACCTGGCCAACACACGCGCAGATCTCCTTACCACAGCATTGCCGATGTGTGCAAGCTAGCTGGAAGTCCTGGAGATACACTGGA
CTCTTTCTTGGACAAAGCAGAGGAAAATGTTCTAAAGTTGTCTGAAGATGCTGGAGAGGAAGAAGTGGCTGTGCAAGAAGGGGCCAAAAGCTTC
CCTTCTGACAAACAAAACACATCTTGGCCACCACTCCAGGAGAAAGGCCCCATTGTCTATGCTAAACCCCCAGATTACGTGGAGATTCACAAAG
TCAACAAAGACGGAGTGCTATCATTACTCCCCAAGCAGAGAGAAAACCACCAGACAGAAAACCCTGGGGTTCCTGAAACCAGTAAGGAGTATGC
CAAGGTATCTGGGGTCACGGATAACAACATCCTGGTGTTAGTGCCAGACTCACGAGCCCAGAACACAGCGTTGTTCGAGGAATCAGCCAAGAAG
GTTCCACCATCGCTTGAACAGAACCAATCTGAGAAAGATCTGGCCAGCTTTACTGCAACCTCAAGCAACTGCAGACTCCAACTGGGCAGGCTGG
ATTACCTGGATCCTACGTGCTTCATGCACTCCTTTCACTGA
HUMAN SEQUENCE—GENOMIC
CTTCCCCAGGGACACATATTGAATAGGCCTGCAATGGGGCCTTGGAATTTGCATTTTAATGGCCACCTCATGTTATTCTGATGCACAGCTATGT
TTGAGAATTATGGCTCTAAAGCAAAGCTCTCCAAGAAAGAAGTACATACCTAGGTATACAAGATGATCCAGTGAGTTGAAGTATGAAAATAATA
TAGTAGTTATTTGGGGTATTTTTTCTAAGAAAGAAACTAATCTTTACTGGTATTTAGATTGACAATAGTGCCTTCACTGAGTTCTCAAATTAGC
TCAACACAAGTTCTGGAAACTACACAAGATAATCTCCAGAATCAAAAAGAGTTCAGCAAACACACGGGGGTTGCCATGGTACCTCCACTGCTTG
ATTGCCATTTATGTGCTACAGGTTTTCATCAATGCAGTTTATTTTATAAAAGCAAGACCTTTAGAATATGCAACTTGACAAAATAGGGAGTGAG
TATGAAAATGTCTGGTACCACACAGAAGTTTCTTGTTTAATTCATGACGAAGTAGTAAAAAAGTTGTTGGATTTAAAAATGAGTTGTCCATTTC
CTTTTACAAAACGATAATTGTTCCCAAAGTGTAAATCTCAAATGCATGATGCTGAGTGAAAGAATGCTACATACTGTACAATTCTACTTACATG
GCAGCCTGGAAAAGGGAAACTATAAGGATAGAGAACAGATTAATGGTTGCCAGGGGACAGGGTAGGGACAGGGTTTGGCTACGCAGAAGCATGA
GCGTATTTTGAGGGGCCGGGCTGCGGGGCGGTGGGGTGTGCGGGAGTAATGAAACCATTCTACATCTACATTGTGATGGTTATGTGACTTTTTG
CATTTGTCAAAGCTCCTAGAGATATACACTAATGAGTATGAATTTTATAGCAAGTTACACCCTAAAAACATTCACTTAAAAAAAAGTAAGTTTT
GCTGAACAAAAAGAAAATTTCTACCACCTTTCATGCAGTATATTTTTCAGCCATAATAGGTGTAAAACTAAAAACTGAAAATAAACTAAACTTA
GAACCAGATCTGCATATCACTGTGTCTCAAAGTGTTAAGCCAACATCTTTTTTTTTTAAAAAAAGCATACTTAATCACATTATTCTCATTAAAA
TTTTGATAATTAATAATTTCAGAACTAAATGGTTTATACCATTAAAAATAAAATTATTTATTTATTATTTTAAATAATTTTGACTTTTATTTTA
GATTCGGGAGTACGTGTGCAGGTTTGTTACATGGATGTATTGCATGACACTGAGGTTTGGGGTATGAATGATCACGTCATCCAATGAGCGCAGT
ACCGAATAGGTAGTTTTCAGTCCTTGCCCCGCTCCTTCCCTTCCCTTCTAGAATTCCTCATTGTCTATTGTTCCTATCTTTACGTCCATGCATA
CTCAAAGTTTAGCTCCCACTTATAATAGAGAACATGAGGTATTTGGTTTTCTGTTCCTGCATTAATTTGCTTAGGATAATGGCCTCCAGCTGCA
TCCATCTTACTGCCAAGTACATGATTTGGGGTTTTTATGGCTGTGTAGTATTCCATGGTCAAATTTTTGTTTCATCTTATTTCATTCTTTTAAA
ATTTCTACTTTCATTCATTTATAATACAGTAGTACATATATATAATTTATGACTAAAAATACATATGTATTTGGAAAGGCATGCTAAAAATGAT
TTTACTGCTAAGATGATAAACAGAAAACTTTGGAGGTCACTTCTCTAGAAAATAACTCTTCAAAATTTAATGTACGTAGGAACTACCTAGGGAT
CTTGTTAAAATATAAAGTCTGATGCAGCAGGAAGTCTCTCACCAGATCAAATGCTGGCACCTTGATCTTGGACTTCCCAGTCTCCAGGACTGTG
AGAAATAAATTTATGTTCTTTATAAATTAAAGAAAAAATACAAAGTCTGATTCACAAAGTAGGGATGGGGTCTGAGATCTTGCATTTCTAATAA
GATTATGATTAATCTAATAAGTTGAAATCATTTGTTTTGGTTTAAACTAATTACCAAGTCAATTCATTCTAATACCTTCCGGGTTCACTCATAG
ACTAGGCCTAGGGTTAAAATGATAATTAGTATGATGCCAGTGCACCTGGCCCTAAGACTATACTTTGAATAGCAGGACTCAGACCACAGTAGCC
CGAAGACATCTATGCAGCTATTATAGAGACTAACAACTGCTGCATTTGATTCAGCAGACTCAGTTTTCCCTCTTTGGGTTTGGGAGACATGAAT
TCTTATCAGTCAATAGGCCAGCTCTCTTAGCATCTTCCCATGGAGCAAATGATTCCCATTCCCATGCTCATAAAAGCTGATTTTACTTAGGTCA
CTGCTTATCCACCAGCGTGGGTTTCCTTAGAAGGAAGGACACATTGTCTAATAATAGCAGTGCCTTATATTTACACATGGTTTATAATTAACCA
AATGTCAACTCATATCAGCCTCACAATGACCTTTGGAGGTAGAACAAAGCAGATGTATTATAAACCCATTTGCAAGTGCTACATGACAGAAGCA
AGCACAGTGCTTTCTTTCAGAGTTGGAGTGATCAGGCAAAGCTTTAAGAAGAAAGTACCATGGAGTCTGAAGATCAAGAATGGGTAAGGTTTTT
AGATGAAGGGTGGGAAATAACATTCCAAGAAGAGAGGATGGATTCAAACACACTGTAGATATGTATTGAGCTACTACTACTCTAAAGCCCAATG
AAATCAGCAGGAGTAAAGATGTTCTAACTTTATTCTGTGGGAAGTAGATGCCATTAAAAATTTTTAATTCAGGGACTAATGTAATCAAGTTTAC
CATGAAAGCATTTGAGTTTGATGTAGGCAAGACTGGTGAAGATGAGTCCAGCCAGGGGGGCTATTGAAGAGGAAGAAGTAAAAAATGATGAAGG
CACAAATTGAGGCAATAACAGTGGAAGGGACAAAAATATTTAAGGACTTCATTCCTTTTTTTTTTTTTTATTATACTTTAAGTTTTAGGGTACA
TGTGCACATTGTGCAGGTTAGTTACATATGTATACATGTGCCATGCTGGTGCGCTGCACCCACTAACTCGTCATCTAGCATTAAGTATATCTCC
CGATGCTATCCCTCCCCCCTCCCCCCACCCCACAACAGTCCCCAGAGTGTGATATTCCCCTTCCTGTGTCCATGTGATCTCATTGTTCAGTTCC
CACCTATGAGTGAGAATATGCGGTGTTTGGTTTTTTGTTCTTGCGATAGTTTACTGAGAATGATGATTTCCAATTTCATCCATGTCCCTACAAA
GGACATGAACTCATCATTTTTTATGGCTGCATAGTATTCCATGGTGTATATGTGCCACATTTTCTTAATCCAGAAGGACTTCATTCCTAATTGG
ATGTAGAGTGTAACAGAGAGAACACTGACAGTTGAAGCCATAAAAAAAAAATAATAAGCTTTTATATCTCAAGGCCCATAAACAAGTGCATGCC
CTTTGACCTAGTTGGGCCTCACCTGGTGTTTTAGACAAAGGAAATTAATTCCCAAAGGCAACTTTTTTTTCTACACTTCCCATAAGTATGTTTA
TTACAGCATTATTTATAAGAGTAAAAATTTGGGAACAATCTAAATGTTCATAATATAGAATGATTACATAAATTATTGTGCAAAAAGATTATAA
TGATAAGATTACATTAAAAAATTGAAGGATACTTTTAAAAAGATATAAATAGATATATTTCCTGGATGGGAAGAATTAATGCCCTAACAATATC
AATTTTTCTCAAATTAATATATAAATGTAATGTAATGCCAAAAAAAGATTTTGAATTGAACAAATTGACCCTAAAATTTTATGAAAAAATAAAT
ATAGTGGACTTATCAAGACAATTTCAAAAGGAAAGTGACAGTGTGCTTTGCACTAACAGGTATTGTACTGTTTTTACAGTTACAGTAAACAAAA
GTCTATATTTTTGGCATATAAATAGGCATCTCAAAGAAACAGAGTAGTGTCCCGAATTCATATAAATATATATCAAAATGTAACACATGATATG
TGACACTAGAAATCAGTGGAGAAATTATGAATTTTTCTATAAGGGGTAAAATTAAAAATAAAATTCAGGAGAAAATTAACTGTCTACCTTATGT
AATAGTTAAAGATCTATTAAAAAAAAAACAATTTAACAGAGTTAATTGCAAAGAAGCAATACAAAAAACCCAAAAGCTGTAACAGAAAATAATT
GACAGATTTGAGTACATGAAAATTAAAAACTTTTGTGCAATGAAACAGTCCATAAACAATATCAAAGGAAGCCTGACAGGCACAAATGTTTGCT
ATACATTGAACAAAGTGTTAGTATGTTTAATAATAAAAGAGATGCCAAAAATTAATTTTAAAAAATATGGAGGCCAGGCACGGTGGCTCACGCC
TGTAATCCCAGCACTTTGGGAGGCTGAGGTTGGTGGATCATGAGGTCAGGAGATTGAGACCATCCTGGCTAACACGGTGAAACCCCGTCTCTAC
TAAAAATACAAAAAATTAGCCGGGTGTGGTGGCAGGCGCCTGTAGTCCCAGCTACTCAGGAGGCTGAGGCAGGAGAATAGCGTGAACCTGGGAG
GCAGAGCTTGCAGTGAGCCGAGATTGCACCACTGCACTCCAGCCTGGGCAACAGTGCAAGATTCCATCTGAGAAAAAAAATATATATATATACG
GGCCAGGTGTGGTGGCTCACAACTGTAATCCCAGCACTTTGGGAGGCCGAGGTGGGCGAATCAGGAGGTCAGGAGTTCAAGACCAGCCAGGCCA
ACATGTGAAACCCTGTCTCTATTAAAAACAGAAAGAAATGCTGGTCGTGGTGGTGGGCACCTGTAATCCCAGCTGCTCAGGAGGCTGAGGCAGG
AAAATTGCTTGAACCTGGAAAGTGGAGATTGCAGTGAACCGAGATCATGCCACTGCACTCCAGCCCAGGTGACAGTGCAAGACTCCATCTCAAA
AGAAAAACAGGCATAAGATTGAACAGCCACAACATAAGAGAAAAAGTCAAAATATAATAAGCACATGAACTCAACCTTGAAGGCAATCAGAACA
CTGTGAATTAGAACAACAATGAGCTATCATATTTTGCTTATCAGACTAGCAAGATAAGATTGATAAAGTCCAGTGCTAGCAAAAATGTGAGTAA
ACATCCTTGGTAAGAGTGGACACTGAAACATTTGTGGATAAAAATTGGAGGTATATATGAAAATTTAAAATGTTCCTACCCTGTGGCTCAGTAA
TCTCATTTCTAGGGCTTTCTCCAACAACATATTTGGAGAGCAATTTGGTAGCTATCAAAATTTTAATGTTCATTCTCTTTGAGCCAACCAAGTC
ATTTATTTTTTATTTTATTTATTTATTTATTTATCTATTTATTTTTTTGAGACACAGTCTCAATCTGTTGCCCATGCTGGAGTGCCATGGCACT
ATCTCGGCTCCCTGCAACCTCTGCCTCCCAGGTTCAAGCGATCCTCTGGCCTCAGCCTCCCTAGCAGCTGGGACTACAGGCGTGCACCACCACT
CCTGGCTAATTTTTGTATTTTTAGTAGAGAGAGGGTTTCACCATGTTGGGCAAGCTGGTGTGGAACTCCTGACCTCAGGTGATCTGCCTGCCTT
GGCCTTCCAAAGTGTTGGGATTACAGGCAGACGCGAGCCAACCTGCCTGCCAATCAGGCCATTCTAAGTATCTATCCTAAAGTCCATGCAAAGA
CAATCCTAGCAGCACTTCTTAAAATAAAAAGCTGGAATTACTAAAGACCTAACAATGGAAGAATGGTAGAATATATTACAAACTATGTAACCAT
TAAAAAAAAATGGAGTAAATCTATACATAGTTACCTGGAATATGTGATTTCATTAAGTTTAAAAAAGAAAAGTCACAGAAATTATTGCATTTTG
AATTTTTAAAATATTTGCATGTGCATACAGAGACATGACTATATACACATGTAAAAAAGGAGGCAACCACCAATACGTCAATGGTGGTTACCTC
TGAGACAGGATTAGATGAAGGAAGGAGGATGTGTGATTTGGAAGTACTATATTTTACTGTATAGATAAAGATGTAGATTTCTTTTTAACAGTGC
TAGGATTTGGGGTAGTTTTTTAATCTTTGGATATTTTTAGCAGTTTTCTATTTTTTTTCTAAAGAAAGAAACATAGTTCTCCCACATATGGACA
TGCCATTCTTCTGAGGATGCTTAAGTTGACCCCAGGAGGAGCCCTAGCTGCTGTTCCCCATTAGAGGCCCCTTTTCAGCAGGAAGTAGCCAGAA
AGAGTCCTTGCCCAAAACCCCCTAACAGCAGTTAGTGTGATATCGCCACAGGGAGGAATGTGGCATGAGTTATCAAGAAATTATTTTAGGCAGA
TAGAGAGTAAAAGGGGTCCTTGGGAAGTTTTCATTTTTTAAAGTATCTCCAGAAAAGTTTCTTGTAAAACCCCGGCTTTTAGAGCCAGGCGGGC
AACCTTTGATATGCAAACCTAGGCCATTAGAAACTGGGTTCACCCAAACATGCCGATTCCAGGGACCTTCTTGCCCTTGCCCCACATGTTCCTG
GCAACATGGCCGCCCCCACATATCCCTATTTGTGTAGAACATCATGGCGCCCCGCATTTGCATATTAAAAGGCTAGAGTGGGAGGGCCAGCTCT
TTCATGGGCTACGTGAATTACGTGCCTAGTCAAACCAATCCCCTGAGCCCTAGGCAAATCAAACACCGCCTCCTCCAGCCTCTGCTTATATACC
TGGCTGGTATCCGCAGCAAGTGGGGACTTACTCTTTTGGCTTTGGAGCGCCCCCCTCCCTCTGTCTCTGTACAGGGAAGCTTCTTCTTTCTTCC
TTCTCCCTTTCCTTCTTGACCCTTCTTGCCTATTAACCTCTCCACTCCTTAAAACCAAAAAAAAAAAAAAAAAAAAGAAATGTGGTTCTCAAAG
AAGACAAATGAAGTAGCAATGATAAAACTCCTTCCCTATTTGAGAAGGAGGAGAGAGAAAAGGAGCCACGGCAGAAACCAACAGAGGAATGCCA
CAGACAGAGGGGAGGCTCCCGCCAGAGGATGGCAGAGGCCTGGAAGCCAAGGCGTGAGAACTTCAAGAGGAGGAAGTGAACCGAAGCCCAGTGC
TGCAGAGAGGCCTGGAGGGCCCTCCCAGAGAGCAGCCAGTGAGTGGTAGTGATGAAAGCCAGGTGCAAAGAATTCAAGGGAGCCATTTTCCACC
CTGCCTGTGCATTTTTGTAAAAACAGAGAAGTCAGAGCCCCATTCTAAACCTCCTGCATTAGAAGCTCTGCAAGTGACACCCAGACACAGTACA
TTTTAAACACTCAGGTGATTCTTGTTCACAGCCAAGGTTGAGAACCAGTGAGTTAAGGCACTGAGAGGGAAGTAAGTAAGGAAAGCTGGTGTGC
GTAAGTCATTCTTTCACTAAGTTTGGCAGGTAAAGAAATGAGTGAATTAAACTGTAAAGCCATCAAAAGGGTCAAAGAAGATGTAGAAGTTGTA
GGTTGAGATAAAGAAGCCTATGGGGCAGAAAAGATTAAATATGCAAGAAAGGTAGAGGAAAGGGGAAGGAAAGAAAGGAACTTGATGTTTCTAG
ACTTTGTTAGATGGCACACATTTTACATATGCCATCACCATTATTATTCATTTGACTGGATTTTTGAGGCACATGCTACTGTGTCCAATTTACA
GTGAGAAACCAAGAATAGCAAGGACCTAACCCAGTGCCAGTGCTGGGCTCTTCCTCTGCATCAGGCTGAGAAGCAAGGTCTTGGAGGAAGTAAA
CGGATATGGAGTCCAGGACTCAGGTAGGGAGTCAGCTTGCAAAGGACGAACACGTCCGCTAAGACAGAGATGCAGAAATGAACTAGAGGAGGAC
ATCAGTAAAGAAGCTGTGAAGCTGGAGCACATCAGTGCATAGAGAGAAGGAGATAGTCAAAGAACCACTGTGGGGCAGAAAAGGAAAATATAGT
GGCTCACTGCGGATTTCATCATCTCAGGAAAGCTGGGGCAAGGTAACTCACTGACAATGAGTACCCGTGGCTTTGTGACAGTGCCTGTGTGCTA
CACAACAGAGCAGAAAGCCAGCCCTGCCCTTCTTACCAGTGAGGTATGGATTAGCCACGCAACGACCAGTCTGTAAGCCAGGAGTACAGACGAG
CCAAGCTGCCTGCAGCTGAGTGGGAACCACAAGGAGGAAAAGCCAAGTCCCTGCCTTCTAAGAGCTGACAGTCTGGAGTTACCCAGAGTGATCT
TCTATTTCACTAACTGTTAAAATAGTCTGATTAGAACAACTATTGTAGAATTGAGTGACCCTTTGCTTTGCAAAGGTCATATAGAAATATTCTG
CCACTGAGGATCTCATGTCGCCCAGTGGTTCTGAAAATAAATAGAAGTTGCGTACCTTCATGGACACCCATGAATGAAAGTAAATATACCCTAA
TCATCACAGGAAGCATGTGCGGTCTGCACGTGAAAGATGCATCTCCCATCAGCTAACAGAACCAGGTGGAGTCTATGTTTTAATAAGGACGTGT
TATTGATCGGGAAGTATTAGGTTATTATGCCTAGGTAGTTGCTTCTGGGATTCCAGTCCAAAAGGATCACCAAAGCATCATGGGATTTTCAATG
GCTTCCTGTGGCTTGGCAAATGCTCACTGCTAACTGTGATTTCCCAGTTATCCAGAGTAGCAGTCAAATCAAAGGGGAAAGCCTCATGTTTCAA
TAACTTAAAACAAAACAAAAAAAAAAACGGCCAGGCGCAGTGGCTCACGCCTGTAATCCCAGCACTTCAGGAGGCCAAGGTGGGTGGATCATGA
GGTCAGGAAATCAAGACCATCCTGGCTAACAGGGTGAAACCTCATCTCTACTAAAAATACAAAAAACTAGCCGGACATGGTGGCACGCGCCTGT
AGTCCCACCTACTCGGGAGGCTGAAGCAGGACAATTGCTTGAATCCAGGAGGCAGAGGTTCCAGTGAGCCGAGATGGGGTCACTGCAATCCAGC
CTGAGCGACAGAGCGAGACTCTGTCTCAAAAAAACAAACAAAAACAAACAAAAAAAAAAACTCAGTAACCTTGGTTTAAAGTATTTCCTTGGTG
GCCCTCTGGGTTGTGTAACAATCGGATGCATTAATTATTATGGCATCAAATGACACCAGCAACATACATAGTCAGAAATAACTATTTGATTCAG
GCAGGTGCTATTATTTGTTTCAGCACTGTTAAATGTGGGGTTTTTGTTTTTGCAAGAGAAAAGGCGGTTGTGTGTGGTTTCAAGAAGAAGAAAA
GTCAGAACAACATGCAGCCCATTAGAAAAGATAAATTCTTTATTTGTGGAAAACAACAGAAGTGGGGCTATTTAGGCACCGCCAATGTTTATTA
TATTCATATGGCAGAGAATAAACACAGCACACTAGAAGTTTGCGCTTTGGGTATTAAAAAAAAAAAAAAGCAAAACCTTCTTAGGTCACTGACT
ATCTTCTTTTGCTCCTTTCTATCTGACTCCTCAGGCAAGGTGCAATTCAAATCCCTGGAGAACCTCTCAAATATAGCTGCTGTTCAATGTTACT
CAGAAATAAGGAAAGAAATTTGACACGGAGACACTCCACATCTTGGCTGCCTGGAAAAATATCATCTTTGAGGTCATTCAACTCACTAAGTCAT
TTTTATTATTGTTTTGTCTGTCTATTTTCTGGTACAGTCTCAATGAAAGATATGTGGCCCTAATCATGCAAAACCGATCTGGGGGGAATCAGTT
GTTTCTTCAGGTCTTCGCAGGATTCCAGCTCCCCCAACTACCTCCGTCGCCTTCTAAAACTGGCAGGCTCTGGACGTTTTGCATGCTGAAGAAA
ATCACTGTTTTGCCTCCAGCAAGGAACATAAATGTTGCAACACTGACTCCTCCTCTCATGAAGAAAGAGTGAACAAGTGCACCGAGTTGAGCTT
CTTCTCACAGAGCCACCGGGCTGGGGACCGGGGAGCGGAGGCTGAAATCCCCAGACGCCGGTTTTCTGGGCTGGGCTTTCTGCCTTACTCACTC
CTTCTCCCTCTTTCTGGATTTTACCGACCGTTCGCGAAACAGCTTTCCACACAATGGAGCTTCATGTCCTCGTGCAGGAAGTACTCATCGACTG
ATGTGGCAGACTTTGCTCCCTGGCAAAAGTGAGTACCCATGGCGAGCTGAGGCCGCCTCCGACGGCGCGCGGCAGGGGCTGCGCGGGCGGCCGC
TCTCCGGGATGCGGGTTCGAGGCCCGCGTGCTGAAGGGGAGAGCGGGGCCACCGGCGCGGGCTCCTGGAGAGAACGCCAGCCAGGAGCCAGAGT
CGGCAGCCGGCGGGGAAGCCCGGGATCCGCCCGCCTCCCGCCCGGATGTCCCTTCTCAGAGGGGCTAAAAAATACTCTTAAGGTGCTTTGCCTC
CACCACTGCCCCCAACCCCAGCTTTTACAAACTGCACTCGGCTCGCATTCGCCTTTGTCAAAGGCATCTTCACCTGTATCCTTGAGCATGAGTT
TCGGCGTTGATTGTGGGATTCTCAGAATGCAAATTATTTGCGTCAAAATAAAAAGAAAAGAAAAAAAGAGCGGGGAGGGGGAAGGGGCGCAGAC
AGGTGATGTGATGAAAGCCGGACTCGAGACTCTCCCATCAGCAGCAGCCGCCGCCGCAGCAGCCTCGCGGGCATCCGGCGGGGAAAGTTTAGGG
TTAGCAATGCTGACCTGAAAGGTGTTGCTCCTCCCAAAAGTCAGCGGGGGTAGGGGCAGATGAGCAGCCTCCGGGCCAGAAGCCGGAGCTGGAC
GGAGGCACCTAGGCAGAGGAATTGCAGCCCGGGAGGAAGCTGGAAGGAGAGCCCGCTGGAGAAGGGAGGAGGGAAGGGAAGAGGAGTTGGTTAA
AGTCAGGCAAACTCAGGTAACTGGAGGGCCGGCCCGAGTGCTACGGCAGGGGAAGGCAAGGGCTGGAGTTCTGGCTCTTTGAGTAGAAAACTAT
CCTTTTAGTGACCTCTACCTGTATCCTGGGGAAGCAACCCACACTGCCCTGAAAACAAGCAACGTAGGGGATTCTATGACTGGACTTGAAAATG
GTTGCAAAACATTATTATTAGTCTGGAGGGATCACTTTGTCTTCATTTGTCAAGTTGACCGGGCAAGATTTCCCACCTGAAATCGTGCTTCACT
TGACCAGGGAAGTGCTGCTAATCCCAATCCTGACCATCAGCTGTGCAAACTTGGGCAAGAAACTTACCCTCTCTGGGCTTCGATTTTTTTTCTG
CAAAGTTTAGGGAATTAATTAATTATATATATATATTATAGAAATATATATAATATATATATAAATGTTTAATGAGGTGGAAGTGCTGAATAGT
GCAAGAGAGGAGCAGATGAAAATATTAATTTCAGTGGTTCTTAAAAATTAGGGGTGATAGGTCCTTTTGAGAATTAGCTGTGAGTCCTCTTCCT
GGGGGAAAATGCATATGGCATGTACATAAAATTTTACATGCAATCCCTGAGGGTTTGTGGATACTCCCTGAAAGCCATGCCTGAATCCCAGGTG
ACAATCCCTTATTCCTCCTCCTGTATCAAGACCACCCAGCCAACTCCTTGCTGCTGGTTGGGCTGACTGTGGGAGTAATCCACAGCCTTCTTGG
GGGTCTGGAGTCAGCCACGCTGCTGAAGGAGACAGCTCCCCTGTCATGGGTGAGCTCCCCACATGCTCTCTCCAGAGCTCTACCAGCCTCTGAC
TCCAGGGGACCCCTCCTCACAACCCTTTTTAATGACTCTCCTAAGGCGACAGTCCTTACCCCTAGAATTTTCAGTCCCACCAACCCTGGAGAGC
CATCTAAAGAGGATCGCTGTCTGAATCAGAGTGCTCTTCAGGTCACCTAGCTGGATGGCAGGGAGGCCAAGGCTTTGTTTGGAAATGAAGCAGT
CTTTGCTCCCTGAGGCATAGTATGAGTAGGCAGCCATATTCTTTTGAACCTCTGTACTTTGCCTTTAGAGGACTAAGGACTCACATCTCTGGGG
ACCCTGGGTGTTCCACTAGCAGTGCCAGCAAGGCACATCAGAAAACACACAGGGCTTTGGAGCTCAACAGACTGGGCTTCAGATCTTGACTCCC
ACACTGAGCAAGCCTCTGAGTTTTCCTGAGCTTCACTTTTCCTGTCAGCACAATGAAAATAATGCTGCTTTTTTTTTTTTTTTTTTGCATGGTT
GTTGGGAGAATGGAAATACTATGAATCATGCCTAGCCCATAGTCAATGATAAACTTTTTCTTAATATTAATGTGGCACCATAAATAAGTGTTCA
ATAGTCTCATGCTTTTAAGAACAGCTTACTCTCTCTCTCCTATGGGGCTTACATTAGTAGAAGAATGAGTAAAATTAGTTCTGGTCTAGTTATG
CACAAAAAGGAGTGGTGGCCTCAGAATACAGAGTCAGACTGGCTGTTCGAATTGTGCAGTGTCAAGGAGAGCACTATGTATTGCCGGCAAGTAA
AGTATGTCCAGACCGGCGTGGATACTTGACCTGTCTCTCAGTTCTCTTTTGACCCATAATCTTGAGTACAAAACAGCTAGTGCTGTGCCTGCAG
CTAAAAACAGCCAGGCATGGAAAGAAGTGTTGTGGCTGGGTCCATCTTCAGAAACTGTAGAGAGAAATATCTCCATTGTCATCTTTCACAGTTT
GGCACAGATGTAGCCAACTCAGCATGTACTCTCTCTCCATGGGGTCCTGGTGCCTCCATTGCAAGTGGTCAGATGATGTAGCAATGAAAGAAGG
AAACATCGGAAACTTAAAAGGAAATTGGATATCCACAGAGTAGCCAAAGATCTATCAGTATACTTTGGTGAGGTATTCCTGCATGCAAAGATAG
CAATATTCATGCCTACTATTTACTGAGCCTTTAAGATGTGCTAAGCACTTTCACACATTGCCTCAATTAATTCTCATAGCAAGATTGCAGAGTA
TGAGTTATCATTTAAAGCTTTACCAGTAAAGAAACTGAAACATGGAAATGTACATACACCCCCCAACCCCACACCCCACATCCGCCTAGCTCAG
GAAAGGCAGAACCAGGATCCAAGCCCAGGTCTGTCTGACTTTGGCACCCACTCTTTTTCCACTACCCAGTGCTCCCAAGCTCCCCAATATCAGG
CACTTGCATCAGCCAACCGGATTAAGATTCTTCTAAAAGGCAGGAATAGCCAAATCTAGTGGGTGCTTTTAAGTGGTGTGAACATGTGCTTGGC
TTGTGATACATATTAACGGGTAGCAACAACAAGATCACCTATGGGAGGATAATATTCCTGACCCTTCCCAAGCCCAGCCATTAGACTCAAGATT
GGCAATATCCAACATTAGCAGGTGAGGCTGGCGCTCTGTCACTGACTTCCTTGGTAATCCTTTTAGTTAAACAGAGCTCTGGAATGTTCATTCT
CTACCACCTTTAGAATCAGAACACCACTTACCTTTACCTCCCTGTGCTGAGCACGTTTTCATTCATTTATTCGACAAGCATTTGCTGAGCTCTG
TTTTGTGCTGGGCACTTGATGACACAGTGGGGAATGAGACACACAGGATCCCAGCCCTTGTGGAGCTTCTATGCCAGAGAGAGTGACAGAAAAC
AGTCGGGTGAACAAATACATAAATAAAATCATTTCAGATACTGATAAATGCTATGAAGAAAATAGAGGCTGAAGGCTACAGAGGGACAGGGCGT
GGGAGCAACTTTCAACAGGGAAGTCAGAGAAGACTGCCATACAAAGGATACCCTTGAACTTAAACCCGCATTTTCAAAAAGGGAGCCAGCCCTG
TGAAAGTCTAGGGAAAGGGCTACCTTAGCAGAACTCTCAAGAGAAAGTTCTTAAATTGGAGTAAATGAAGCAGTAAAGCTTAAAGTCTGAAGAT
GGGCCCTTTAGAAGTTGACTTGTATATAGGGGGAATTATTATTTGAATGCCTACTATACTATTCTAAGCTGTGCTGTATACTCTGTTTATCTTC
CCAATGATCTGGTGAGTTAGCTATTTTTGTTTTTATTTTACAGTTGAAGAAACCAAGAGTCATCAAGGTTAAGGAGCTAGTCCAAGGTTATGGA
GCTAGTCCAAGGTTATGAAGCTGGTATTTGAATCCCTTAGTCTATTTCACTCCAAAGCCCACAACTACTTGCTAACACAGCATGTGGGCTTTGA
GATAATGTCTTTTGGAGAAAGTAAGGAAGCCGATAGAAGGAGAATATCAAAAGTAAATTAAGTAGCTGAATGCTGACAACGATTTGTATTTGAT
GTCCCAAATTCCAGTTAGTGCACCTACAACTGAACTGTCCAATACAGTAGCCACTAGCCACATGTGCCTATTGAGCACTTGAAATGTGGCTATT
TCATATTGAGATGTACTGTAAATGTACAACGCACCCCAGATTTTTAAGACCTAGTATTCCCCCAAAAAAGTAAACTGTCTTGGCCAGGTGTGGT
GGCTCATGCCTGTAATCCAAGCACTTTAGGAGGCCAAGGCGGGTGGATTGCCTGAGCTCAGGAATTCGAGACCAGCCTGGGGAACACGGTGAAA
CCCCGTCTCTATTAAAAATGCAAAAATTAGGCAGGCATGGTGGTGGGTGCCTGCAATCCCAGCTACTTGGGAGGCTGAGGCAGGAAAGTCTCTT
GAACCCGGGAGGCGGAGGTTGCAGTGAGCCAAGATTGCGCCATTGCACTCCAGCCTGGGTGAAAGAGTGAGACTCCGTCTCAAACAAAAACAAA
AACAAAAGTAAACTGTCTCAATTTTTATATTGATTGTGTGTTGAAATGATAATATTTTAGGTATACTAGTTTAAATAAAATATATTAAAATTAA
TTTAACCTTTTTCCTTTAATGTGGCTTAATAGAAATGTTTAAATTACATATGTGACTCACATGATATTTCCGTTGAACAGCACTGATCTAGACT
AATAAGTTGACAAATACATGATAGGACCTTTTTCCCCCTTCTTCCAAACGTGACTTCTTCCTCTGTTCTTGTGTCAGGCTCCTTCTCATCTGCC
CCCATATTCAGTTATTTGGTGAAGCACGAGAGAAAAGAGGTCCCTCTTCCTTCTCCCCCACCCTCATGCTGCTGGTTAGCAGGTGATCATTTGA
AGTCCACTATACCATGTCACTTTGGGATCTGATAAAATAGACTCAGTGATTATATTCATCACCAAGACCAATCCTCTCACTCAGGTAAATCTCA
AGAGGCTTTCAAACGTCCTACAATGAAAGGGTCATTTTAAATCTGGATTTAAAGTTTTACCTTTAAATCACTTCCTAGTACATTGTCTTTGTAG
TTTTGGGCACTTTGTAAAATCAGACGAGGAGACAACTAGAGCTTCATGTTTTTGTGCAAAGCTCATTAAATAAGTAATCTCATGCAGTAATAAA
TGTTTCTCCCTGTCCTCTTGCTTAAAACAGCATGAACAAAAAGTAGTCCCAGTTGCCAGAAGGGCTACTCCAGGGGCATCACAAAAGACCACCT
TTGGTTTCTTTCTTTTGTCCACTAGCTAAAGTGGCCCTCAAATATGTCAATGAAATAAAGATATATTTTTTTTCCTGCAGTTTCATTTATTTCA
AAAAAAAGAGCAGTCAGATTCTGGTATTGCTGGAGAAAGCCTCTGAAGAGCAAAGACCTGGATTCTGCTTTTGTGTACTCTACTGGTTTGCATG
TTACCCTCTCTCTCCCTTTTTTCCCCCAACTTTCTCCCTTACTTCCTGTAGTAAGTTTGGTGTTGATGAGATAATGCCACAAAAAATGCTAATG
GTGAAATGTGCTGTACAAATTGGCCATGGTTATGATTGATAACCTGAATACAAATGGCATCTCTAGACATGTGCCTGCAGGGAGGAGTTGCCTT
TATGTAGCTGGAGCAAAACATTATGTAAGATTCTCTTGGAATAACATTTGTTCATTTCCACTTGAAATCCAAATCTGGGGGAAATGGCAGTAAA
GAAGCTGACAAGAATGAATCTTAGTGTATCTGTCACTGGTAGACTGAGTTCTTTCTCTAGTCTGTATAGGTTCCAGAGAGAGAACACCCAATTG
AAAAAGGACAAGCTGGTTTTATTCACTGGCCAGAAATGGAAAATGAGAGACCTCTTGCTCTAAAAAGTCACCTTCTCCCTAGCTGTGGGAAGCT
GCAGGATTGTGATGAGTTAGATGTGGGGCGGGGAGCTATGTAAACACATGCAGGGAGAAAGTACAGAGGCACAGACACAGATAAACATGTTTCT
CCATGCGTCCTATGGAGAGAAAATGGCGGCAGTTTTCTTCTAGGGATGGGGAGCCCAGCATTGTAACGCTATGTTAATGACCTAAACGGAACAA
GGGGTAGCCAGTTCTGGTTTGCACTGGTTTCCTGCAGGCCTCTTGTATTTGGCAAAGGATCACCAAGCTCCTGCGACATCCCAGGCCATCTGGA
GTTCTTTAAGCAAGAGTATCTATAGATAAAGAAACTAGGGAAGATAACAATTTAAGAAAATAATGAGCTTTCCCAGCTATTTCTCTAGGGCTGC
CCTGGTAATATTTCTACATCAACAGCAACACATATTTTTCAGCATTGTGTAAGCCAGGAAATCTATGCTAGACTCCACGGGGAAAATAGAAGAA
TAAAACATGGTTCTTGCTCTGGAGGAGCATAGTTCCTAGTTGGGAAGGTGGACAGAAACATAAAAGACCAGTAGCATGTAAAGAACATTTTCTA
AGTGTTACATAAATGATGCAAACAAAGTTTTGCAATTCTGGAGGGCAGCATGCCCATAACCTCTAAGGTATATTAAGAAAGACAAAGTAGAAAA
TGGGCATTGAGGGCTGGAAGCCTAAAGACACAAGGAGAGAAGGAGAGAGCCACCTCACATAAGAAAAAATGCACAGTGGTGTGGCAGTGGAAAT
GTACATGGGTTCGGGGGTGCGTGATGTGGAAAAGAACAGTTGGCTTAATCCAGTGGCTCCAGATCTGAGCTTTACATCAGAATCACCTGAGAAG
CTTTTAAAAATTACAAATGCCTCAGCCCCACTCCAGAGCTTCCATTTAATTAGTTTAAGACTGGGGACTGGTCTCAGTGGTGTTTCTGATTGAT
TTTGTTTTGTTTTTGTTTCTGTCTCAATTTCCCAGAATATTCTAATGTGAAGTCAGAGTTGAGAATCACTGAGCAAAAACCAAGATTTTTATAT
CATAGTCATGGGACATAAAATGAAAGAAGTAATCTTTTAAAGGAGATTAAATGGACAACCAAGAGTGTGACCTTTAATTTGTAGAAACTGTATA
TACATGCACATTTGTATGTAGTCTTTTAAATTCACAGATAATTCCTCGTGGTGATTCTGTCTACTTGGATGATGTGGCTGAAAGCCTTTGTAAC
CAGCTGCCTACTCTTGTCCTCTGTGTACTTTGGGGGTGTCCTATAGTGGATCCTAGCTAAGTGGGGCACAATGGGCATCTCACAGGAGCTTGTT
TCTACCAGGCTTTTTGTAATCATTGCCAAGGGCTTTATTATCATGCCTAATAGTGCCCACAGTAGCTATTTTATAAGCATCTGCAATCTTCCCT
CACCTCTCCAACTTTACAAATTGAGAAATGGAGTTTAATTACTTGCCTTGGGCCAGGAGACTAGCTGGTGATGAAGGTGAAATGAGAATTCTCA
GGGAGGTGAAATTAGAATTTCCAGCTACTGAATTCCACATACCTTATTAAACTCCCAAAGTGAGTCTACCCACTCTCCTGTTGGTGTTAGAATG
TTATTTCTTACATGAATGAATCAGTGTCACAGATCAGTAGGTGAAGATGACTGGTTTCCCTAAGCTGCCAACACTGTGATTATCTGAGTGTCAA
TGACCCATAGGCAGTCACAGTGGTCCCGAGAGCCCCGTCCCTGATGCCTGGGAGCTCTCAGTCTAGTGAAGTTTGGCCTTGCATATTTATAGTT
TATCCACTCTAACATCTGGGAAGTGAAGACTCTGGTTGCTATTCCACTGCTCCTAGCCCCACACTTTACGGCTGTTCTGATTTCCCTTCTCTGA
AGCTCTTGTTCACTGAAAGGATATCAGCTTTTTGCTACACCCCTGAAAAAAAGAGGAGAAAGCCCAGCATTTTAAACAGCTGCTTTTTTTTTTC
TTTTGGATGGAGTCTTGCTCTGTCTCCAGGCTGGAGTGCAGTGGCGCGATCTCGGCTCACCGCAACCTCTGCCTCCCGGGTTCAAGCTAGTCTC
CTGCCTCAGCCTCCCGAGTAGCTGGGACTACAGGCACGCGCCACCAAGCCCGGCTAATTTTTGTATTTTTAGTAGAGATGGGGTTTCACCATGT
TGGCCAGGATGGTCTCGATCTCTTGACCTCCTGATCTGCCCGCCTTGGCCTCCCAAAGTGCTGGGATTACAGGCATGAGCCATTGCACCCGGCC
AACAGCTACATTTTAAAGAATCCTTTATATGTGTTGGGAGCTTCTGGGTTCACTGCCCACGGTGAGACTAGGGGTGGGGACGGAGGTTCTTCTG
AAGGACAGTGCGGGGAAAAAGCCAGAGTCTTGGCAATACAGCCTCTTTAGACAAAAAGATAGGTCAATTTGTACCATTCCCAAATGGTTGGGTT
TTCTTTTCTCTGTCTCAAAATCCATTACTGATTTAAAACAATTTCCAAAAGCTTTAGCAATAGCAAAAAGCAAGCCTCTTAAACAGTGTTGCTC
CACACTGATTGCACGTGAGAATCACCTAGGGAGCTTTAGAAACAACTATAGACTCACTGAATCAATATTCTGGGAAGGGGCCTGGACATTCGTA
TTTATTTACAGTTCTCCAGGTTTATAATGTGCATCCAGGGCTAAGAGCTACTACTGGTCAGCTATGATCCAAATCTTAATTACTTATTTGTATT
TCTTCTTTTGCCTTGTTTTAGAGTCTCATGGCCCAGAAAACCATCAAACTATATTTTTGTTGAGTAGCAATTTCATCATTCTGTTCTTTAAAAA
ACATGATTTTGAGCATAATTTAAGTTTGCTACTTCTATAGAGAGACCTCACACTCAGTAGCCTCATCACTAAAATTTTCTGTGTGCAATTTAGA
AATCACATTGCCAGAAGCTTGCTAATTAATTATGAGACTGAAAGATAAAGGTTAAGCTTTCCTGCCACCTATATATTAGATTTCCCAATTGCTA
TGTTAATCTTTAGTTAACCAAGACTTGCTTTCTTGTCTCAGCCATTTTAAAGCCAATTAACTCTGTTCCTGTTCACACCCTTATTAAAAATATA
ATTACAGCAGTAGTCTCCAGGGACTGTCATTGGGTAGGCTTTACCAAGGTAAATTAGCCAAGAAATAACTAGGCTGTGTAACACCCTCTCAGAC
CCTGGAAATCATTTTGGTTGCAGAAGCTACTTAGTATCAGAGTAGGCTGGGGTACTCATAAATTTGGATTTGGAAAAAGCCAATTCCAAGTCAT
CCTAAATGTGGAAGAATCTGTGATTTTGAGAATGATTCTGGAATCAGTTATCCAGGGTCCAGCCAAGTCTGATACACCGATCCTCAGAAGGTTG
TATTAATAACAAAAAGAAACCAGGTTTTTGTATTAGATTTGATGGAAGAGGCTGGGGGACAGAAGGTGATGTAGCATTTTGTTTTCTGGGGTGC
TGAGATTGTGGGATTAGGAGAAAATAAGAAAAAAGATTGCAGGGGAGAACGATGGACAGAGGCCTCCTGTTAGTCAACTATCATGGGCATCAGA
ATTTCTTTATTCACTCAACTAATGTTTATGGAGGTTCTGCTTTGTTCCAAGGACCCATTATAGGAGCTGGAGATAGAAGGATGAAGTTCCTACT
CTAGTGTAGTTTAGATTCCAGTAAGAGGAAACAGATATCCACACTAAAAACAAACAATAAATAAAACCCAATAAATTAGTCAGTACTATGAAAA
AAATGCAATGAACTGAAGGGAATAGAGTTTGCTGAAGGCTGCTTTCAATAGCTTGTACAAGTTGCACTGTCTGAGGAGGTGCCCTTCAAGCTAG
CACATCAATACTAAAAAGAAAAGCATGCCGAGAGCTGGCAGAAAGAAGGCTTCAGGCAGAAAGAACAACAGCAAAAGTCCTAAGACTGGAAAAG
GTCTGAGTTGTTCAGGAAACAGAAAGGAGACCATTGTGGCTGGACCCGAGGTAAGAAGCAATGAGGGAAAGGTGGGAAAAGAGCAAGGAGGGCC
CGAGGTCATGGGATGGAGTTAGGCTGTTAAGTGCTTTGAGAGCCTAACATCCTAACTCATTGGGAGGTTTTCAGCAGGGTAGGAACATGGTTGG
CATTGCCTTTGAGAGCTCTTCCCAGCTTCTGTGTGGAGAATGGCTTGAAGACTGAAAGCAGAGGGTTTGTAGGAGGCTGATCGGAAGTACAAGC
AAGAGGGGAGGGTGGATCATGCCAAGGTGACAGCAAGCAAGGTGGAAGAGGTGTTGGATTCAGGATGGAATTTGGAGGTATGGCCAGCATGGCT
TTCAGATGGAGGGGACCAGCGAAAGTGCTGGAAAACCTAGTCCTGCTCAAGATGATTGTTCCTGCCCTACCCTTGTTTTAGACCCCTTGTTTTG
AACTAAAACAGAATAATATCTAGTGCTATTTAAAAACATTAGGAATTTTAACCTTAACTTGTTTAAGCAGAACAAAACAAATCCCTGCCTGGGG
AGAAACTTCTGTTTGCTGCTTTTGCCTCTTAACCATAAAAATTTCATCCTGTCTCGTAAGACTATTCTGATGGCTTTTGTTGTTTTTGATTACT
GTGCTTTTCGTAAGTGCTGGAAAGGTCACATTCGCATTACTAGTTTATCTCTTTTCTGAGTGTTTTGACACTTTGGCTGTGTTTACCAAGGCCT
TCCTGCTGTCAGACATTTACATGGGGCTTTCTACAGTTGATCAGTTTCTCCATATAAGTGCTAATATAATCGCAAGCATTTAGTGGGCACTGAC
TGTATGCAAGGCCTTGTTTTAAGAATTTCATGTTTTAACTCATTTAGTCCTTCCAGCCACCCTTTATAATAAAAAGTGTGTACTCTTATTATCA
TTTTATAGATGAGGAAACTGAGGCAAAAAAAGAGGTTAAGTCATATGCCCAAGATCATACAGCTGGTAAGTACTAAAGCCAGGTTTTGAACTGA
ATCCATCTGTACAGCTCTGGGTTCCTAGTAACTATGTTGTGCCACTTTTCTATGTAATTGAAGCTGCCACCTTCAGAAGTAGACTTGTTTCTCC
TGCAAAAACCCCAAGGTACCACTAGGAGACACTAAAACTGGGCCGGGCTTCCGGGAGTTGGACTGGTGGGGAGATGGCATAATCTAGAGGCTGA
ATGATCCAACCCCCCTCCAGGAAGGCCTCACATCTAAACCACCTGCCATCTGCCAAGGTGGGAGGATAAACCACCCCCCACCCCGCCGCCAACA
GGGCACTGGCTGGTGAAAGTTGCCAATACCAGAGGAGTCTTGATGAAATGCCCTCTCTTTTCCTCAAACTCTTTCTGCCTACTATTCATAGTAT
CTGTGTTGTACCCACCCACCTGCCACTTATCAAAGACTGAAGAAACCAAAGTTATTCAACAAGCCATGAAGCAAATTCTAATTGCTCCCCACGG
CCATCTGAGGCTGGCCTTTGGAAACTTAAAAAAAAAAAATTAAAAAAAGAGAGTCATATTAATTTATTTGTTACCACATTATTTGCTTTAAAAT
TCTGGTGGCTTCTTTCCAGTGTTTTATTAGTAGAAGCGAAATAAGCCTAGGAAACACAATATTTCATTCTGTCTTCTCTGCTTTTCACTGCATA
TCTACCTTCAAAAATGTCTTCTCTCAAGTTACTTGGTTTCTCAATAACTAGCGTGAAAGTAACAGACCTTCCTTCCTTCCTAATGATAGTAACA
ACAAGGGATTTACAGAATTGAAGTTTATATAAGGAAATGCATTAAGATTTTAACTTAAGTAAGTGAACTATTCAGCAATGGCTATAAAGACAGT
AATTGTGATGATTTGTCTTCTATATTATATGTTTAAACTAGTTATATATTTTAATTATATAAGATGCAATTTTTTTGCTCCAGTTTCCATAGGG
TAATTTTCAACAGAGATTAACATGCGTTCATTGGAAGTGTTGAATTTACCTAATCAAATCATCAATTTGTTTATTCAACTTTAATTTTCAAAAA
AATGTTATTTTAAAATATTATATGATATGTGTCAGGTATTTCTTACGGTTGACTTCCAAATTTAAAACTGCAAAGAAAACAGAAATCCATACAT
ATAGTTGCAGTAAACTATACTCAATTTTGGAAGATTGCAGTGGCAACATCAGTGAATTAAAGTTTGAAAGCTATTTCAAATCTTTGCATATTCT
CCAAATAACTCAGAATCCTACAAAAAGCTAAATATTTAAAAAAATTTATCTTCAAACCAATAATGTAAGTTTCTTCTTTATTGGGATGATTTTG
GTTAAATATTTAGCAGAAAGTAAGGGTGAATATATATTTGATATAGGTATGTCCTAAGCTAAAATCAAGTCATTTAAAGATCAGAGCAATTAAT
GGCAGTTATGTGATCACAGGAATCAGTCTATCTCCTCCCTCAGGGTTTGATTCAATGAGTTTTATTTTTCTCTTAGCAACTTTTCTTATTTTAC
TTTTCAAAGGACATCATTGAAACCATAATAGTGTTCATATCTGTGACTTTTAAATTTTTATTTATTTTTATGCATGGTTTAAAATTCATTTAGT
TCATTTAAAATTCAAAGATATAAAAGAGCATTCATAAAAATGTCCCCCTCTCCTGTCCTCCAGCCTTTACAAAAATATACCATATATATTAATA
TGGGCTAAATACCCTTTTAAAGTTATCTCACACGCAAGATGCTATGACTGTGTGAAGCCGGAGCCTACAGACTATTGCTGATCCCCCAGTAGTA
GTAGCAGTGACTCTTTAGTGGCCCTGGAGCTTCCTTTCTAAACTCAAGTGTATATTTAATGTGGCTATTTAGGGATGAACAGCAGTATTTTCAG
AGAAAAGTATAGAAGAACAGATGAAATCACACAAGATGCACACATCTGGGTATTGGTGGGCATGTACTTTCAGCAGTGAGTTTACAAATAATCT
AGACAGAGTTAAGTATCAGGTTTAAGAGTCCTAGGATCTAAGCCTGCACGGGTTCAGTCTTCTGCAGGAACTTGGGAATGTTGGGGTTCACTTA
GGCCCCCAGTGTTGGCATGTACACCCACTTTCAGGAGGCTGGAGGTATAAGTTCCTCTCTGCATTTGTCTCAGGTCATCACAGGCCTCAGAAGT
TTCTCAACAGAAAAGGATTGCATGGGTTGGATGTCCAGAAGGATACGTGGAGTTAAACATCAGTCAGTGGAGCTAGAGGCTTGCTAAGACTTGG
GAAGAGGATGAGGGAAGGCAAAACCTGTCACCTAAAGGGGAATTCTAGAATGTACTTACTACACTCATGACATTACCCTACCACCTTCATTTAT
CACCTTGTGTCAAACATAGACTTCTTGGTCAAGACCACTATGCTGTAAGCTACCTGAGGGCAGGACTATGACTTATTCTCCTTTGTTTACCCTG
CCCCAGTGCCTAACAGTGTCTTTGGAATTGGAATGTTCAATAAGTGGGTTAAACTTTTGAAACTGAATATTTCAAATAATCACAGATAACAGAT
GGTTAAAAACCAAGTCCTTCTCAGCCTAACTAGTGCCAAACCAAATCATTGTCCATGTCTCCTAAAGAAATGAAAGTTTTCTAATTACCTATAT
AGGTCTGGACTCAAAACTATAAGGCAGCACACTGTCTTTGGTGTTGACCTATGTCCCAGGTTGTCCATGGTCATCACACACTAATGACCACTTG
TATGTATTTCATCTAGAGGATCACACAGAGTGGTATGCTAGGCCCAAGGAATAAGTTTACCTGCTTATTTCACTTCTCCACTGTCATCCTACTG
TGTTTCAGGAAGAATTTCTTTTACCTCTGCTTACTCTACTAAGATGCCCCACATAAGCCCCCAACTCCTTTTCTTGTCCCCCTCCCACTTTGTT
GTCTATTTTCTTCTGTCAGACCCCTTCCTCCTCCAAACTGAACCTTCCTGAGAATATACCAAAGAACTCAATAAACCATTCAGCCCACTATAGT
TCAATAAATGAGCACTTCCAGAATTTGCATTTTAATAGTGGTTCAACCTCAAGTCTCTGTTGGTGGAAATGTCACTGTGATCTAGGTGAGGGAA
ACATTTTGAGAGCCTGTGGGAACCTCCAATAGCACCTTATAGTAGCTTCTTCTGGTGCCTGTGTAATACTACAATTTCCAGAAGCCTTGTTGAT
ATCCAGCTAAGTGAAAAGAAAGTCCTCAGTTCCAGAGTTCTTACTTCTATTTCTTTTTTTTTTCTTTTCCCTTTTGTTTTTTTTTGAGACAGAG
TCTTTTTCTGTCACCCAGGCTGCAGTGCAGTGGCGCAATCTCGGCTCACTGCAACCTCTGCCTCCTGCGTTCAAGCGATTCTCTTGCCTCAGCC
TCCTGAGTAGCTGGAACAGATGTGCGTCACCAAGCCCAGCTAATTTTTTTTTTTTTTTTTTTTTTTTTAGTAGAGACAGGATTTCACCATGTTG
ACCAAGCTGGTCTCGAACTCCTGCCTATCCACCTGCCTCAGCCTCCCAAAGTGCTGCAATTACAGGCATGCGCCACCGTGCCCGGCCCTTACTT
CTATTTCTAAATAGCAATGGATTCCACTCTTCCAAGGACCCAGAACTTGCCCTAGGGGTGAGGGTCTTTTGTACATCTTGCAACTGAGAACTTT
TGCTAGAATCAGACAGACAACATAGATCTCAGCTCTAATTTTCCAGGAGTGAAGCTGTGGAGCAAGTGAGTTACCTCTCTGTCTCACTTTTTCA
TCTGTACAATGAGGCTACTAAAACATACATTCCAGGGTTGCTGGGAGAAAAAGACAAGACAAGGTATGTACAACACTTGGCACCAAGGAAGCAC
ACAATTCATGGGAGTAATTACTATCATCCTCACCAAGAGTTCATGATTTACTGGGGGACACCAACACATGTACAGTCAACAGGGTAAAATGCTA
AGGGTGTGGGGCAAGTGTTGAGTCTGAGCTCAGTAGAAATTTATGAGCCTCAAAGGCCCTAAAACATCCTTGACCACTCAGTTCTATTTCACAC
CCTTCTTGTACTTCACCAACAAACCAGCAACATGCTTCTGGTTGGCAGCCCTTATAAAAGAATTTACCTTCTATAGTCAAGTCCAAAGCTCTTA
ACTGCTTACCACATGACAGCCAATAAGACAAGATATTGGGGCAAGGAAGATGACTTTTTTTCAGGGAGCCAGCAATCCTAGAAGATGGCAGACT
GATGTACTAAAGAACCATCTTAAGTTGATAGATTGTTAGGCTCCTTTTATGTTAGGGGAAGGGGGAATAGGTAGGGGGTTAAGGTCCACAGTTG
ACTGGTGACCACAGGCATCTGGGCATCAGCAGGGATCTAGGAGGTTGCAAAACTTCTTTGTTCATGGTCAACTATTTTCCAGATTGACCTTGTT
TCTATAAATTTTTAAGATGGCATTGTTATTTGTGTGCATACTTTCTAATCTCCTCAGGGGTCTGTTTCAAAAGAGAGATGGTCATTAGTTCTGA
AGTTAAACTATAATCTAAATTCTTTCCATCATTAGCTTGGCCTATGTATAGGAATGAGCAAAGGCAGTTAGCCTGTGAGGTTAGAAGCAAGATG
GAGTCAGCTATGTGATATTTCTCCCACTGTTACACATCTCTGAATACAAGAGGAATACATTTCTTCTTTTTGCTGTGTTTGCTTCAAGCCTGTA
CCACTGAGAAATTGGGTGATCCAGGGAAGTTTTACTTCTCTTGAACCTCAGGCTCTATCTTTGTAACAATGGAGAAATCAATGCCTGCATTCTA
GGCCCTTTTGAGGGTGGAGGAAGACAATGGTTGAGAAACTTCTCATCTATAGTTGATCCTCAATGCGTTTGCCCCTTTTCCTGTGGCACTGCTT
TGTATTTGGATGGTTCGAGCAGTGCGTCACACATGGAGGAAAGGCAATGGAATGATGACAAATAGTTTGTTGATTTGGTGCTTTGTACATTCAC
CCACAAATGGCACAGTTTCAGGGCCACTGTCCTTGCCAAATACTATCTGAAGAGCTAGGTTATGAGCCTTTGGAACCCAGATCTGATAAGCATG
GAGGAAAACTCCTCAAGGGAGATGAAGCTAGGAGATTAGCAGAATATACTTTCTCCATTTGTCCCACATTTGATGCCAGCAGGCAAACCAGAGC
CAGCTGGGCAGTGTACAATTCCCAGAAATAAGGAAAGGGTAGAAGCACCTGTTTTTCCTCTAGCAAAACCAAGGCAAATGGAAAAGCTCAGAAA
TATATCAGCACCATTAGCAAGAGGCACAACGGGGAAGGCTGGAAATGTGCTGAGGAAAATCACATTGCCGGTCAACGCATAGCTACCTGCTGGA
GAAGAGAGTCTGCAGACACACCTCAGCCTGGACAAAGGCCTCCAGGACCGGGAGCTGTGCTCTGCAGGAACTGGGCCCCAGGCACTGAGGACTG
AAAACCAGCCCAACAAAGCATACCTGTTTCCATTTGTGAGAGATGAAATGATATGGGTTTTGTGACTCACTAAACCACTTGGAAGGCCAAACAA
TTACAAAAGCAAGATGCCTGGCTTCTTCTAGCCACATGGAGGGGCCCTCAGACTTGAGTAGCTGTGTGCCACTTGTCTGGGGTGGCTGCACCAA
AAGGAACAGTGAGGTTTAGATGCTTGTTATTGTTCATTGTTCAGTTTTGGTTCTGTCTATTTACTTCTAATTCCTCAAATATTATTGTGATTAG
TGGTATAGAAAGGAAACGTTCATTTGTGAGCAAAGTGTGTAATAAGAATTTAATAATGAAATTCCCAGAAAAAAAAACTCAGATAGCTAAAGAA
ACAGCAGTAACATGAGCTCCAAATATCTTGAGTTGTATTGTTAAGGTGAGAATCCATAATGTAAAGGGAATAATGTAAAGGGAATGCTTTGAAA
TCAAAGGCATAATCCAAGTGTGATAACCTAAAAGGTTGTGGATTTCTTTTAAAGTAGAAATTACATGTGGCTTTGGGAAATCATCAGCTGAAGC
ATAAGCTATGCTTATGGATTCTCGCTGTGTTGTCACTAAGACCGATTATATAAAGACTTGGCAAATCCATGTACAAATGTAAAACTTCCCACAA
TGGTATTTCATGGGGATCTCCTTTTACAAAGTGGTCGTTGATCAGGACATTTTTCACTGATATATTCCTTTGGAAGCAATGAATTTTAGATAGG
ATATGATTATTGTACAATGTGATAGGTAGCTCTGATTATTCAAGCAGCTAGGGCATTATTCAGTGGCAAAGCATTAAGCTACTCTGGAATCTTT
CTTCTGTGTAAGCAGGCAGCTGCTGTTGAGACTTTCTCTTTGTGGGTGAATTTGCCCAACCAATGGCAAGCATTCATTGGGAGTAGGGGAATGA
CGCTGATCACTGTTAATGACAGTTGAAAATGAAATGCTTTAATGAATCTCATACTTGGACTTGGCTGCTGAGCCAGAGCCCTGTACTTGAAGAG
CTTAATTATGATGCCTCAAAATTTAGATCTTGACCCTGAACTGCTATGACTTCCTCCCACCCTCAGTTTTGAGAGAAACTTTAAATTCGCTAGG
GGATTCAATGTTTTACATGCTTGGTTATGCAAAATGGGAACAGTAGTGTCCAAACAATGGAATAGGCTTCTATATTATTATTTTCATTTAGGCA
GTATAACTGACATGATTACCAAAGTCATGTTATAGTACATGTATACAAATTAATTTCATACCGGGGGACTTCACTGGGGGGAAAAAAGGGAAGT
CCCTATTTGTGAAAACTATGATTTTGGTTTCTTTCTGAGTAAAGCACTGCTAATCTCTTTGGTGTACAGGAAAGTATGGTATTATGTTCTAAAA
ATCAGAAGCCCCAGACCTTAATTTCAACTAATCTGATGACATCATTTTGTACTCAGAGTTTCATTTCCCAACAATTTCATGTTTCTTAGTAGGT
GGGGAACCCAGAATTGAAAGGCATCAAAAACAGCTAAATATAACCAAAAACCTGCTAACTCACCAGCTTTCTAAAATTCAGGAAGTATCTTTAA
CTTGATTGCTGAATCTCCAAAGACATGATGATCAGATGACTGGTTAATGGGTATTTTTTCAGACTCTACATGATTATCAGAAATGGCTGCCCTG
GCCAATTGTATACCTACGAAGAGGTATTATGTAGAAGAACTTATATTCATCTACTTAATGTGGACCTCAAATATTAAGGATGTTCCTAATGTGT
TCTAGACCGGAGTCAGCAATACTTTTCATAAAGAGCCAGATAGTAAATATTTCTAGGCTTTTTGGGCCATATAGCCTCTGTCACAATTCCTCAA
CTCTGCTCTTGTCACACAAAAGCAGCCATAGACAATGCATAGGTGAATGAATGTGGCTGTGTTTCAATAAAACTAGACTCTCTTAATGCCAAGT
ATTTGCTGGAATAACACAAATTAATTTATCCTCAAATCTGTTTAACCTATTAATATGTCAGTCAATATTACATTAATATTTTATGAATCTGGTA
TCATATTATACATGAATTTATCTGAACATTTGGTTAATTCATGAATATTTACTCAATATTAATACTACATCATGAATCTGTTATCAAGTCATAT
ACAGATTTCTTAAAAAATTTCCCTTATTTAGCATACTTGTGAATAACATCAATAAGCAAGTATCTTAAGTTAACTATCAGGTTATATAGCAGAT
CCTCTCCCCCTTTTGTAACTCTTTCTGTTACAAGGGATTTTACATTATTATGGTATTGGGAAGTAAGTCTATTTATCCTGTCCCTATCTGTCTT
CGTATTAACCATATTCTGTTATAGCTTTTATCTTTGCAGACAGAATAGTTCAAATCTTCATGATTTGTCCTTAAACAACCCCCACTTCCTCATC
CTCTTGAACATTTTATGCCTCCATCACTGTCTCTTCAGGTCTTGTGAGTCCTTGAAGTGCAGTGACTAGGCTGGAACATGGTGTTCCAGGTTGG
TCACATCACCTCTTCCTAATGATGCCCCATTGTACCTTTTGACTATAGCAAGGAATAAACAAAGTCAGAAGTGTGAAAGTGGGGGAGAAATTGA
GAAAGTGCAGGGGATTTAGGGGAGAGAAAAATGGACTACAGGAAAAGAAAACATTGACTTTTGCAAAGTGCTCTAAACTGGCTACAAATGCATT
CCGTAATTCTTTAAACCTTAATTGTAACCGCAGTTAAGCTTTCCGGTGTGTTGGAATAAGAACAAAACTAAAATCCTTCTTTGTATAGAAATTA
TCCTGCAGTAACTTAGAGCCAATATCTCTAGTTAGGATGAGCGCAGTGGCTCATGCCTGTAGTCCCAGCACTTTGGGAGGCTGAGGCAGGTGGA
TTGCTTGCACCCAAGTAGTTTGAGACCAGCCTGGGCAACATAGCGAAATGCTGTCTCTACAAAAAAATTAAAAAATTAGACGAGCATGGTGTCA
CGCACCTGTTGTCCTAGCTACTTGGGGGCACTGAGGGGAGAGAATCACTTGAACCTGTAAGGTCAAGGCTGCAGTGAGTCATAATCACGCCACT
GCACTCCAGCCTGGATAACAGAGTTAGACCTGTCTCAAAAAAAAAGAGGAAGAGATCTCTGGTTAGAGTTTGTCTCTGATGGATACTAACCATG
CAAGTAGTTTACACAAACCACATTCTTTCTGTAGAATGAGAAAATCTTGGATATAATTTAGCATAATGAGCTAAATAACTCTAGACTGAGCTTC
GCTGCCCAGACAGGACTCTACTTGTGATCTGGGAAGATCTACCCTTGCACTGAATTCTCTCCTCTTCTCTCCTGACTCTGTGAGAAAAGTTTGC
ATGAATTTACTGAGATTAGTTATAGAAGGAACTGTGTGTCATTGAAAGTCTTGTACAGAAGTTCACATTAAAATATATCATAGTCATCTTTGGG
AATGATTCTGCAAAATTCATAAAACAAAGATCTCTGAAACCCTAAGGCACACTGTGCTGGAGGCTAAGGGAATAATAGTGAGCTGAGTGGTTTC
TGCCTACACAGAGCTTCTAATATATTGAGGAAAGAGATCTCAATCAAATTCAATTGCATTTATAAGTATGGTAAGGACAACAAAGGAGAGAGAC
ATTATTCTGTAGGAGAATAACCCTGTCAAAGTGATGACTGATTTAAGATCAAAATGGGAAGGTAAAATTTTCTCAGTACCTGCAAAGGCACTGA
GGTGGGAGGGAGCATGCCAATGTAGGGAAATGAAGAAACCCAGTGTGTATGAGCCAAGCTGAATAAAACATGAGAAGAAGCTGGAGAATGAGAG
AGACCAGTCCCCAAGCTCTCAAGGAGCAAGAGGAAGCCTTTTCGGCATTTGAAGTGGAGGGATGGCATGATCTCGTGCGTAGTTTTTAAAAGAA
CCACTCAGGCTACTCTTTTGAGAATATTGTGGGAGGCCAGAGTAGATGCCTATAGACTTATACAGAGGTTAAGGCAGTTGATAAGAGTATAAAC
AATGATGGTAGCTTACCTCACATGCTTTTTAGATTATAGGCTAGAAGGTGGCCCAAGCCCATATACCATCATGGCACAGTGAATACGTTTTCCT
TCTGGATCGTGGAAATGAATATTGTGCCACACAGCTTGATTGACACTCCCCAATGACTTTTAATACTGTGGGATCTCTGGCACATACTTCAGAA
GATGAGAAAGGAGTTTTAATTAACCTCTGTTTAGGAATTCCATAGACATAATTTTCATTAACATCTACTTGGTATTTCATCTCCATGAATTCTT
TCCAGTGATAAAGCTAGTTGGTTTATCCTCCAGGACTGCTCAGTTCTGAACAGTGGGTCTTAAGTACTCTTTGGATTTCTTTGAAGGCTTTTTT
TTATTTTTGTTGACTACCTCTCTACTCATTTTGCCCCAGAAAAAATGTAGTCATTTCTTTGATAAGTGAAATCTAAGAAAGGCTTATTTCATTT
GGTACATTAAAGAGATGGAAGAAAGTAACTTTACATAAGAATATAAATGCCAGCTGTCCAGCATATTACAGAATAGATTTCTAAATTTGCTGAA
AGGTTAGGAAAATGGATTCTTATATAGGCTTAAAATTTTTATAATTTTTTTGGCATTCTAGAATGAAATAAAGAAAATCGGTATCATCTTGATC
TCATCACCCAGAAGAAAAAAAAAACACTGATACATGGTGAAATATTTTCCTCTCTCATTTTTAAAAAGAATCAGGAATAGATTGTATACATATT
TTTCAAATTCTTTCTACTTAGTGTTATATGATAGTCAATAATATATGTGTATGTAAGTAGCAATAAATCATTCCTGAAAACTTGTTTTTTAAGC
TTGTATAACATTCCGTCATATGGATGTACTGATTTTGCTAATTTGTTAAGTTTAAAATAATATTCATTTTCATTTCTTTGACTACTAGGTATAA
TTAATTTTTTCATACACTCACTACCCTTCATACTTCTTTTATTGATTTCCTTTTTATGTTAATTATTAAGATTTCTATTTGACTCTCAACATTT
TCTTAATTTTTTTATCATTAATAGATGTAAAAAAATTCTTAATTTTTAAAAAATAAACCCTTTTCATCTTAAAGATAGCAATCTATTTTCCATA
ATACTTGTTATAAATATTTCCCCAGTTTGATGTTGGTCTTTTAATTTTGTTTAAAGTATTTTTGACAAATAAATAAGTTTTTGTGGCTTGAAGT
TTGTTCATTTTTTTCATTTGTGATTACAGTTTAGTTGTTGATTCAACACATCCTTATTGAGTGTTTTGTGTTCAGCACTAAGCGAGACACAAGA
GGTAAGACAGAAAAACAAGGTGCAGGTGGTTTTGCCACTTAGAGATTACAATTTAATGAGGGGATAGACAAACAAAACCAGGTCATTATAAAAT
AGTATACTACAAGCTATGCAAGAGGAAATACAGGTGGGAAGAAGTACCTGATCTGGACCTGGGGGATAAGGGAAGGCTTCTGGAAGGAAACAAC
CTTCTAGCTGAGAATGAAGGAAAATGGCAACATGAATTTAGAGAGAGGAAACAGTATGTGTGAAAGTGTTGTTCAGTGTCCTAAATGTTAAAGG
TCCTCTTTCCCCAGAACATGGAGTGTGTGTGTGTGTGTGTGTGTGTGTGCGCGCGCGTGGGTGTGTGAAGGAGCAGGGCAGGGTGGTGGTCAAG
TGTGAGCAGGAGGCCACTGGGGAGGCTGCGGCAGTCCGAGAGAAAGACAATGATGTTGGGCAGAGGATGTGTTGAATAACTCATCCCTTTTCAC
TGGACAAGCAATGCTTCAGTGTATATTAAGTTCTTATTCATAGCATACCGTCTATTCCAGAATAATCTAATTAGTTTTATTGCTATATCAATTC
TTGGGCCAACACCACACTGGTTTTGAGTTTAATGAAACGTCTAAACTGGTAATGCATGCATCCTCTCATCACTTTTCATTTTCAAAATTGATTT
ACCTATTCTTGCCAATGCGTCCTCCCAAGTAAACTCTAAAATAATTTCAAAAGTCACAAAAGCATACGTGTGTGTATATGCATGTGTGTAAATA
CATGTATATATGTGTATGTGTGTTTCTTCCAACCATTTTTCAGTTTTTGGAGAATAAGATGTTTTTATTCAAGTTGCTGTCAGTAAATATTTTA
TATTACATGACTTCTCTATACACACACACACACACACACACACACACACACAATCTCCCATTGGTAATTTGATTGGGAATGTGTTAAATCAGGA
GAACAGACATTCTTTTTAATATTGAGTCAGCCCATCAAGAAGCATTGAATGTTTTCCCACTTACTCAATTCTTTTATACTTCTTTTTAAGCCTT
TATAGTCTTACTCATATAGGTCCTGCATATTTATTGACGGGGTATTCTTTTTTCTTTTATAATTTTAGCTTTTAATTATGAATGGATTTTTCTT
CCATTATCTCCTCTCTGGTATTACTGGACTACAGGATAAATATTAATGATGTATATTTACTTTTTATCTGATTATTTAACTGATTATAATTAAT
TATAAGTGTTCATAGTTAATTATAAAAGTTTATAATCATGGTGTCTTTAAATAATGATAATTGTTCTCCTTCCAAAAATTGCATCTAATTTTTA
TTTGGTGTCTTACAGCATTGATCGTAACTTCTAATACTAAATAACAATGATAATAGTGAGCGTCCTGTCTTAATATCAATTTCAAGAAGAACAC
CTCTTACATAACATTTTTAAAAGTGTGTTATGTGGAAGCTAATAAAATAAACTTGGGAAATGCGACAAATGAAAATTCTCTCTCCCAGGCATTC
TTAATTCATATTAACATATTAAGATGAGATCTGCAACAAAGAGATGAGTTCAACTGAGTTTAACCCAGTATTTCTAAAATGTATTTGACTATGG
AAGTATTTTTCCCTCATTTAGAATTTTACATCAGTTATGACAGTCAAAATTATATTAATTTGATCTTCTTTCTTTTTTTAGAAAAATAATTTTC
ATACTTTCTTGTCTTTTCTGTTTGATCTCTCTTTTGCCATATGGACTATGATTTGGGTTTACTTTTAATTTTTTTCAATAATTGAGAAGCTCGT
CACCCTTCTTTTTATTTCTACAAGTGGTTACACTTAAAGTTTCCAAGACATTTCTATCCATATCTTATACTTAGCAAAGTCAAAGACATGACCA
TACAGTTTTCTAATCAACTTCAAAATGAAATGTTATCTTTGAATAACCCCATCAAAAGAAATTTAATCCATTTTTACTTCCTTCCAACCTTTCC
TCAGTATTGGTAAGAATAATTTAACATTTTTTATTCATGTTACTGTCAGTAAATATTTTATATTATATGACTTCTCTTTTGTGAATTATGTGAT
CTGTTCAGCAACATAATCCTTTACAATACATTCCTGAGCAGTTCTATGGTTATCTGATTTCTGTGTCCATAACTATTGTCTTTTTATACCATAA
ATTTCTCATTTTTTTACTTTTTAATTTTAATATCTTAAGATTCGCCACCTTTTATCCCATTTATCCTTTTAGGGTGTATAATGTAGGTCATCTA
CATTTTGAGAAGTGCCTGATTCTGTTTACTATAGTGTCAGTTTTACCCCTTACTGCCTTCAGTGGACAAATTAGTACTATTATTTCATTTCTGG
CTCCTCTACAACCCCTTTTAATCTAACCCAGCACTCTTTTCCTTCCTTACTTTTATCTCATAATGGCTACCTGTCCGTTTTCCACAGTATTTTC
TATTTCAGTTGAAGATGATAAACAGTTTTCTGACATTGACATTAAGATGATGTTTCAGTTTTCTTGTTAGACAATTTTGTTCACTGTCTAAGCT
ACTTATTTTTCATGATTACTCGTCTAGGAATAAAAATCAATCTACTTAGACCCAATATTTTTGAACACTGAGCATATGTAATGTGTTCTTAAAC
CTGTTCAATATGTACTGGGCTCTAAATGTCCTGGCCTACAGCTGGAGGGCAGAATGACATGTCCTAGTTCAATATCAGCCTCTAACAGGAATGC
TACTGATGTAGTTTTCTGCACTGAGATAGGATCTTCTTTTCTTCCATTGCCTATTCTCCTGGAGGCAAAATAGAGAACATAAAAAGTCATCATC
TTTGGTATGTTCTTCTTTAGGGGCTTTTTCTTTCTCCCAGCCCAACCCCCATAGTCCTTACTTGCTAGATGTGTGTTCCAGGATTCAGTTCACC
ACTGCCCAGTCTTCTAACATCCAATTTCATTGTTTTCTGAGAGTTGAGAATTTTCATACAGATATAGAAGGGATGCTGTGCTTGTTTGAAATGG
TTCTATTTGGCAGAGGATAGCCGAACAGTTTTTAGGCAAAGAATGAACTGTCTACTTACTTTCTTTGAAGAAGCCAACAATTTGGTTTTGTTGC
CAACAGCAAATAATATATTGGCTAATAATTGTGGTTTACAGTGACATGGGTAATGTTAGTCATAACATGTCTTCCAAGTTTCTGGCTATGGACT
AACTGTAGGTCTTGGAGTTTGGTATTATCTAGAATTTTCCTTCTCCCTCCTCCCCCACCTCTTATCTTTTAGCATAGTTGAAGATTGGAACTTC
TTCCCAGAAATCTAGCATCTTCATAAGTCCTTTCCGGTTTTAAGATTTTTATCTTATATTTTATATATATATTACATATATTTCCTGTGAATCT
TGGCTGAATTTCTCATTTAATAAAGTCCAAGTTAGTATGAATAAATAACATGTTTCCCGATTTTACACACATACAGAAATTCAAACACATAATG
AACTCTCTGGCAGCCTTTAGCATTTGTAAGTGCTCTCTCACCAGGAAAATCCTTTAATAGATAACCAAGTGTCCTGGGGAAGAAGGGTGTCAGG
AAACTTATTATATTTGTGTCACTTTCTTCAAAGGGTGATTAAGTATATGTCTCCAAAGATGTGATGTTATCATCTTTGAGTATCACTTGAATTC
AAGTCAATATTTATTGAGACCCCATGTTGTATCAGGTGCCTTACTAGAAAGTCGACATATAGAGATGCATAAGACATGATCTTTTTCAGTGGGT
AATTTAAGGTCTTTCTTCTACTGCTAGCATTGTCATGTGTAAGGCTGGTGGGTTGAGTCTTTGGAATTTGTGAAGATTCTTCCAGGTTGTTTAA
AAAATCTTTTGATTCTCACAAATGTATTTTTTCTATTTCTTAGAATTATGTTCTTTATGGCTACCAGGAAATCCTTTGAAACTGGAATTAGATT
GCATTATTCCACTGGGGTAATAGGATTGGTAAGGTAGGAGTGTCTTTGAAGAATAATGCTAAATAACCCAGACACTAAGGCTGAATCTTCAGCA
CAGCTCTTAAGGCATCCTGTAAGTACCCTCTGCTGCTTATTAGAAATCCCAAAGCCCTGCTCCCTTAGGAAAGCGGCCCATCCCCATCCTCATC
ATAAGATGCAAGGCATAGCTAAACATCTCAACTTCTCACTTGAGTATTATATACTCTCAGGCCAGGATACTTTCCAACTCAAGAGTAAGATAAC
ATTACATTCTGATCTTCTTGTGTGTGTTTTTATGTTTTTTTTTTCATTTTATTTATTATTTTTTTTTTTGAGACAGAAATTTTACTCTTGTCAC
CCAGGCTGGAATACAACGGCGCAACATTCTGATCTTCTTTTGAGAGAAAAGTTTCACACAATTAGCCTTTGAAATACACATTCCTTTAAGTACC
ATGAAAACATTGTCCCATACAACAATATTTCTAAGAAACACACATGTCCCTCCCACAATGATTTTTTCTTGTTACCACCAATAAAAATTAGAGC
TGTGTTGTTTTTGTTGTTGGGTTTGTTTTTGTTTTTGTTTTTTGGTGACTACTGTGACCCTCAAAAAATCAATCCGACTTTCTCGATCTTGATT
TGCAACACCAAGGTTACCAAACAAAGAGAATGGTTCAATGAGGGAAAGCTCAACTACCTGCCCTAAATATTTAGTATAGCAATGCTGAGCTTTT
GGTAATGGCTCAAAATTCTCATGCTTTCCCACTAAATGAAAAGGGGAGCTTTGCTACTAGTAAACCATATTCAAGAAATAATTCTTATTAATAC
TTTGCTTCTTTCCTATGAATTATTGCTTTGTAATGGATGTTTGACAAGTTACTAGCAAAGCAGTCTTCGATGAGCACAGAGACCCATCAGATCT
GTATTAACACCTCCAACCACTGGAGTTTCATTAAGTAGGTTTCTCTACCCCTCTCCTTCAGGCCACAGATAGGAAGAATGACATTGGGTCCAAA
GTTCTGGCACAAAGAATGATGTCTGCCTTCCTGTGATGATTTCAAATTCAGGGTAATAATTCCAACTATCTTTCCCTGGCCATGATAGAAAGCT
CAAGAAATCTTGGTTCCTTGTCTCTTTTCTTCCATCCAGTTGGTCTTTCTAATTACACACTCAACACAATGTTCTGCTGAGCAAGACATCTGCT
GTAGCCACTATCACCCTTGGCATAACCAGATATTTAAAGGTACCTAAAGGAGTTTAGCTATATTTTGCCAAGATCCTAAGTTCTATGGCATAAG
AATCCATCCACTTCTCTATTGCCTATAGAAAAGGACAGCTCAGTCTTTCTGAAAGAATTGTTCTCAAACAAGAAAGCATTTGAGGTAACATGTC
AACAAGGTGGACTGGTAATTGGTGTTCCTTTCAGAGCCAGTTGGAGGAAATGGCCAGCTCAGACATTCTCTTCTCCCCAGTGTCCTATGGGAAC
AAGATTTACCCAGACACAGCTGACTATGAGAAGTCTTCAGGGATTTACAACCTGTCTAAGAACAAGGCCAATGGGGGACTCACTTTGCAACACG
TCCCTATTTGATTGTCAGAGGACAGATACTCTATTAACAAAGGAATTTGCACTGGTATTTTCAGGGACACATCAAGTAATTGCCACTTGAACGT
TTTTCCAGGCTTTCAAAGGAATGTAAGAATGGCCTAAGGCTAAATTACATTCATGTCTTTAGTGAGTCATTATATTACTGGCAATAAAGTATAT
TATTACTTTACTTTCAGATGCCCTCACATATTTTTTTAAAGTAGAAAGGAGACATATTATGGTCACCATTCTTAAGAGACTTAACTAAAAGACA
CTAATTTAATCTTTTAGTTACTTAAAAATAGCTGTTGCTCACCCACTATGTGCCAGGCTCTATACCAGGCACCAATATGAAAAGGTGAGTATTC
TCTGGTCTCCCTAAGCACAGTCTAGTGGAGGAGACAGACAAAATGCAGCCATGGCCAGAAGGGGGAGCAGTTAATGAACAAGTAGGCAGAGAGT
AGGGAGGGGATTCTGAGAGACAGTACGGACGGACTGAGGGTAAGTTGTACATCCCTGATATTTTGGGCAATTGCAAATAGTTTGATGACCAAAT
CACAAGGAGAAGAAGTGACAGCAAGCATGGCTGAAAATGTAGGTTGGTGTCAAATTGTAAAAAGCCTTGAATACTGTGCTGAACGGTTTGATCC
GTGAATCAGGTAGAGGACTTGACTCAGGTCTCTTGACTCAAAGGTCATGTTTTTTCTCTGCTAGATTGCACTTATCCTTCCAAATGCTAGTGGA
CACCACACTGAATTTGATCAAAGATCTCTCAATGGAAATATGTAAATTTCCTGTAAGAAGCAATTGGTAGGTTCTCTTATTATCATCTCCATCT
CACAGATAAGGAAACTGAAGTATAAAGAACTTGAGTAACTTGTCCAAGGTCACACAGCTAGTTAGGTGATCCCAGACAATTTGGCTCCAGAGTC
ACTAGTCCTAACTACAACAATTTAGCCTCTCTTTATCTAGAGGTCTTTATGCATTTGTCTGCATTCTACTTACGTTGGTATTGGTGAGTAAAGA
TTCCCTTCCAGAATAGGTTTGATAAATTGCCAAGTCTGAAACTGAAAAATTAATATCCATGATAACAGAGGTTTTGGGGTCAAGGAGTGAAAGG
AATTCATCCCATCCTGTCTCTAAATACTTTTTTCTTTACCAATTTATGGGAATTTGAGACCAGATATCTGGAACCAAGCAGCCTCACCCTATTA
AGGGAAAGAAAAAGAACAGAAGAAAAGAGGAGAGGAGAAGAGAAGAGAAGAGAACTAAAAGTATCTGCAAAAATATTAAAGGATTTGACCGAGA
TCTCTGAGATGCTCCAAAGATTGCAATTGTGCTTACTATCCAAGTTAATGGCTGTAAATCTAAGAGAATTATGATGTGCCTGGTAAATATTGGT
TGTTTTGTTTTAAGTCTTCATGGAGAAAATGGAAAAGACATTGGCATGTAGGATGAAGTCACAGCAGGACAGACAGGTCCTGCAAGTGTTTCTT
TAGATGCATTGATATTCATAACATCCAAACAGGCCTTAAGGCTGTCTTCTTACTTTACACTTACCAAAGGGGTAAAATATCATTTTCCTTGGAC
ACACAAATAATAAACGTACTCTCACAACATCACTTGAATGTTGTGGTTTTGCAAATATACTATGTTTTAAAAGCTATAGCCCTCAAATCCCTTA
CTAGACATCAATATTTGTTGGAATTTCAACATCAAAGATTTATTGTGAAGGGGGAGGGGGAGGAGTTACTCCAAAGGCTAGAACCAGTGCATAT
ACCATAATAACAACTCTGCATGCATTATTGCTTCTAATCTTCATAATTTTGAGTACTATCTTTATTGTCACCATTTAATGAAGATGTTAAGGTT
CTGGGGGCTTAAGTGACTTGCCCAAAGTTACACAGCTTGGTAGAAACAGAATTTACCACAGAACTTGTGTGTTAAGCCAAATAATTTTCTAGTT
CCATACAACTAAAAATTGGAAGGAAAAAGTAGAGCCTTATGAATAGAGTCCTGAGCAAGAAGGATGAACAATCTGCAGATGAAGTACTCTGTAA
AGGAAAGATCTGGGTTTGAATTCTAACCCTGCCTCCGTTCATCTGTGTGATCTTCGCAAAGTCTGTTAACTCTTTAAACTGTTGGATATTTATA
AAATGGGACTGGTGCTATTTGGCCTGATATCTTACAGGGGAAGATTCAGTCAGGCCAGGCGTATGTAGGGTCTCTCTGACCTGGAAAGCCCTAT
ATAAAGACATGGTACCATTCTTAGTGTTAGGACTGAAACTACATCCCTAGTGTCCTGACACCTCATACCAATACCCAGAAACCCTAGGCTCTTC
CTTCAATCCCATACTCCTTCCTCAGCTGCCAGGACAGCTTGGTTAAGAAAAGCCTTGTTCTTGGGGAGTATATCCATGAAAGTATCTCTATTTC
GTTGCAGTTTCACATTAAGTAAAATTAGAGTGCCCTTCACGAAGAATATATAATTGAAAGCCCTCCCACTGACTGCTGGACAAAGCACTTGTCA
GTCAACAAACCAGGTAGATTGAGTCTGCCCTCAGAGTTTTTGTATTCTGAGAGTGACTAGCAACTTTCTCTCATCCTAGAGCAACAGGGCTTTC
AGAGGACAGGTTCTGGGGCAGCGTGTAGCCACGATAGAATTGGTTTGCTTTTGTGTCCAAAGTCATGATTATCAGGAGAGCTGCCATTTATCAA
CCACCTCTTTGATACTTGGTGTATAGGACAGGCGTGTTAACTATATTATTTCTAAACCACAAGATAAGTCTGTGAAGTATTTTTATCCCTGGTT
TACAAAGGAAGAAATGAGGCTCTGCGAGACATGCCAGAAAGAACATGCTCTACACAACCAACTGGTTACAATGTGCGGCTTTGTCCAGCACTAC
CTCTTCTTTCTTGGCAATCATCAGAGCCACTCAAGGCTTGGAGGACTGTGCTGGCAAAAAAGAAATCTTGTATTTTCTAAAACTCACACCCACA
CTTTGGAGGGGACAAGATTGAGATCAACCCCATTTCCTACTCTTTTCTTTATGACAGTTTATCAGAGCATTTTTTCCTTATATTCACTCAGTCC
TGAGTTTCTATTTAGTTGTGATAATAGATACATTTTTGAATTTTTAATACCTTCGGGTGCAAATTTGGAATCTATGGAGGATAAGGGAGTAACA
AAATGTTATGGAAATTGAAATATATAAATTATTAATTTTCCCTCTCCTCTACAGATTTACAATCACTTTATTTGGGGATATCAAGTAGGTTATG
TGGTTACTGTAGTACTCATTTAATAATCAGATTTTATTTAGAGAACTATAAAAGGTACAACTTAAGGGGGAAATATATTTTAGATGATGTTTTT
TTTTCAATTTCCAATTTTTGAAGAATGACGTGTTTTTAAAAACTTTTAAAGAATTTCTCCCACATTTCACTCCCTTTAAGGTAAATTGATAGCT
GTGAAAATGGCACCTTGGAAACATTTCTGTCATAATCATAGGAGAGAGTGAGAATTATTAATATTCTCAGCCATGTAGCATCATAAAGTAGATC
ACAGCTGTTTCTTTCAGAAAATGTCATTTGATTTTCGATCAGATGTATGGTCCATCTCACAATCTAACCGCTTCCACATCTGGAATATCTTAAC
TGAAAATGTCCACAGCATTACACGGCCTGGCTCAGGGGGAGAAAAGAACTAGGGCCTGCATCGAATTCTGTCTCTCACTCAGCTGATCTGCATT
CCTCCTATAGCATTTCCTTATAATTAAGAAGAGCTCATAGATTTGGGAACTGCATGAGCCTCTGTAACCTTCTGGTGAGGGTGAGAAGCTCAGA
ACTGCATTTCTATGCATTTTTCCCTAGTCTTTCCTGCTTCGGAGGAGAAGCCCTGCAAGAGCTTCCTGCCAAGGGACCCTGCTTTCTCAGCAGC
CGGATCCGGAGAGCCAGAAATCCATCTTCAGCTCCTTTGAACTTGGCTGTTGTTAATCATGCTGTGGTTGTCCTTTAAGAGCAAAGGCTTCACG
GAGAGCAGATCAGCTGGCTGTAGGGAGGGTTTCAGCTTCTCATTGTAGGCAGATCATCTGCTAACAGCTTACTGAGAGAAAGTTGAGGACATGT
GGCTGAAACACTGTCAGAGCTGCTGTGAACACAGTCCAAGTGAGCAATTTTATGACCCAAACCAAGCAGACACTAAGTGCTTTCTAGTGGTGGA
AAAGGAGCAGAGAGAAAAAGAACAAAGACCAAGTGGTGGAAACAAAAAAAATATATATTTCTTTCAGCAGCTAACATATTTTTCTGTTTAGAAG
ATTGGTATCTCCTACTTAACCACAAACTACAACACATAAGATCAAATAAGATTAAATGTCCGGTTTGCTAAATAGCAGAGCGAAGAAACTAAGG
TCAAGATTTCAGACTCTTACATCTGAGGAAAGAGAGAGGCAAAGAGAAGATACTGGAAATGCCAATATCCAGTCAATGAAATAAACAGAGGCTA
CTGTAGGCATCCCCAGAAGCTTGCCTTTTGTCCAGTGCCATGGGAACCACAGAAGGCACTCAGCTTTGCAGCTTCACTCAGAATTGGGGCAATG
CTCCACAGAGTCAAGGGCATGTTATTATAAAGTGCTCCATTTGTTTACTTTGGCAAGTGGAAGATGACTTTGCTAAGCGATACTCTGCTGGGGC
TCAGGGCCAGCACTGCTGGAGTAGGAAAAGGGAGACTTCCTGGGGCAAGGCTTCTCAATCTTCCTGCCAGCAGCATTGCAGTCGGAGCGGCACT
GAGGTGTCAACAAAAGGATGATGAACTGTGTCAGCAGTGTTAGCAAATGGCTGAAGTAGAACGGAGCTGCCCAGGATGCTGCCCTGTCGCTGGG
GAATCTGAGGGAGGCTGAAAGATATTGTAAAAGAGATTGAAGGGCTGGACTGGCTGGAGGAATGGTGCCATCGGCATCCATGCCACAATACTCC
AGGACTGCCCTGCCTTTGTCAGGACAGCCATCAGAGGCGGTTTTCCCTCTAACCAGGATGGGCATCACTCCTTGGGCTTGCCAGTCTTACCTCT
CCTCATGCAATTGCATGTCCAAGGCATGCCCTCAGGGGATGGTGCTGATCCAGGGTGGCAAACCCAAGTGGGGAGAAAATGCTGAATCTCATCC
TCTCAGAGATCTGCTGCAGTCAGCGACTATACTGAGGTGCATGATCTGAGCAGCAGTCGCTGGTTGGGGAGGCTTCTTTGTGGAGTGGGTCTCA
GCCACAGCCTGAGGGTCCTCTCTTGGGGATGCTACCAGTTAATTGGGTCATCTTCAGCCTCCACCCAAACTTAGGCCTGTAGGTCCATCAATTA
CTATATCAGCCTCAAGGACTGAACAGGTGGGAGGAAGGACTAGTGTGAGTGATGGAAGCAGCTGAGCTGAGGAGTGCTGGCACCTGTGCAAATC
CAGCAAGAATGACATCTGGCTGAGCTTCAGTCATTCACCTAAGCACCAATCGGGGGTCACTCCCAGATCTGAGCAATGAGGGAAACTTCCCAGG
GGGAACCCCGCACTTGGGTAGACCTGGGGGAGCAGCCAGAAGGAAAGGGGTTGAACCTGTAGTTGATTAAGATTCAGAGAAAGAAAAAACAAAA
ACAGAAAACGATCATAGTTTCAGACACTCCCAATGAGCCTGTGACCTCCCCAAAATCCTATAGCCAAACACACGGGTGGATCTGGCCTCACTTT
CCCATTCTCCCACTTGTGACTTTTGATTCCACATCATAGCTAAGGTCCTCGGCAAATTGGATTAAACTTTGGATTTAAAAATAAAATAGAATTA
AAATAAAATAAAAAAGTTGGGGACAGGAGAAAGTGGTTTCCAAGAACCTACACCTCTCTACCCTGAAATGACTGAATATTGTGTTCCCCTCAAA
ATTCATATGTTGAAATCCTAACCCCCAATATAATGGAGCCTTTGGGAGGCTTCATGAATGAGATTAGTGCGCTTACAAAAGGGTCCCAGAGAGC
TCTCTCACCTTTTTCCACCATGTGAGGTTACAACAGGAAGTCAGCAGTGTGCAGTCCAGAAAAGAGCCCTAACCAGAACCTGACCATGCTGGCA
ACCTGATCTCAGACTTCCAGCCTCCAGAACTGTGAGAAATTAAGTTATGTGGTTTATAAGCCACTCCGTCTAAAGCACTTTATTATAGCAGCCT
GAACTGATTAAGACACTCCTGAGAACGATTCCTTCGGGGAAGGTCTTGATTAGCCTTCACCTAGCCCAGTTTGCAAACACACTGGAGTGTCCTG
CCCATGGCAATGTTCATGTAGCAGCCTGGGAGACAGAGGAGGGGGATTCCTGCAGGAGCAATCTTCCCAAGGAGGCAGTTCCTACTAGCTAACT
TTCTTGTCCTGCTTGTGCTCATTGAAGGTCCAAACCTGTCCCCTGCCCTATGTTTGTTTTCCTCCTAATCCCCTGGCTGATGGAGTCAGGCTTT
GGAGAATTCCTTTAAGAGTCTTAGTTGGCCTTATGGATCCCAAAACACACCCTTCTCTATTGATGCCAGATTCTGAGCAGGCTGACAGTGCATG
CATGAGAACCTTTCATAAAATAGGACTATTTTTTATTCCCTTTGCTTTTTCTTTGTGTTATTTCCCCTCTTCACTCCCTGTCCTTTTACCTTAC
CATATACATTTGTCACCTCCTTGCCTGGAAAGCCTAGTGTCACCTCCCTGCCTTTTCACAGCCTATAGGATTGAGTCCAAACTTGCCAGCTTGG
CCTTTCATGGAGTGCAGGTTTAGTACAGGACTGCTAAACACAGTTTCAGAATGAACCATTCTCCTGGCCTTTATCATTGCCAATATTTCTCTTT
ATTTTATTTTATTTTATTTTATTTAGGGAGAGCCGATATTTCATAAGAGTTGATGGACTGCTTTGCCTGGAAACTTGAGAATTCATATTTTTAT
TCAAAATCGTTTTCATTTTTTTGCTTAGAGCCTGTTAAAGACTGAGGCCCTCTCTCTGTCCCTTCTACTCCCAGCCAAACCCAATAGACACATG
TGAGCAAGTTGTCACCTGACCCGAAGCTCCAGCCCCTGGAACCAACTGAAACAAAATGTATCCTTGCATTTTCCAGCAAGGAATTGCCTTGCCT
ACAAAAATACTCTGTACTTTAATATGCAGATCAATTATTAACAGTAGGCTGTACCTTTCACCAGGTTGTAAAAGGATGACTGCGTAGAGCCACA
GCATTCTCCTTGTCAGTGTAGGAAATGCAGAGGAGGATGTTACCTCCGGCACTTGCCTCTAAGACACCTAATAAAGATGAGGAAGGCTCCAGCC
TGAAGCGTGGGTGAGGTGTCCAGCTGCCCAAAGGCGACAGGTGAGATACTCAGGTCCCCTTCCTCTTTTTGCTGTCAGTTCTGATTCTCTCCTT
TCAATCTTTCTCATCTGTGATTGGGAATGGCAGGGGTGGGGTGTGTTTGGGGCATCAGTGGTGGTAAAAATGGTCTTATGGGCAGGGCCATGTT
GAATAAGAGATGAGCATGGAGACAGCGTATTAACTTAAAAGGCCAACACCGAGGCTCATTTGAGACCGTAGGAATTCCAGGGAGACAGTGTTGT
TCAGGCATGGGATCGAAGATCAGGAGGGCGGCTCAATAACACGCTGGCCCGGTCACATGACAGACCAGTCCTTGGAGTGAACTGGGAGACAAGG
AGGCTGCTTTGGCATGGAGCTGAGAACATCTCTAGATCGCACTGGAAGGCAGAGAGAGGCCAGACAGGGAACTCTGAAGAGCTGCCACAGCCTG
TGCCAGGGTGACATCAGGGTGAGTTGAGATGATTTTTTTAACAAACTTCATTTTTTGCAGCAGTCTTAGGCTTACAGAAAAATTGAACAGAAAG
TACAGACAGTTCCCACATACCCGTTTTCCCCCACAGAGTTTCTTCTATTAATAACATCTTATGTTCGTGTGGTATGTTTATCATGATGAACCGA
TGTTGATATATCATTATTAACTAACAAGTCCAGAGTTTACATTAGGGTTTACTTTTTGGGTCGTATGGTTCTATGAGTTTTAACAAATGTATAA
TGACCTGTATCTATCATTACAGTATCATACAGAATAGTTTCACTTCCCTAAAAATCACCCTCCCTTCCTTCCTGCAAATCTCTGACAACTGCTG
ATCTTTTTACTGTCTCTATACTTGTGTCTTTTCTGAAATGTCATGTAGTCAGAATCATGCAGAATGTAGTCTTTTCTGACTGCTTCTTTCACTT
AGCAATATGCTTTTAAGCTTCCTCCATGTTTTTCCAGGGCTTGGTAGCTTCTCTCCGTTTTAGCACTGAGTGATACTCCATTGTATGGATGTAC
TGTAGTCTGTTTATCCATTTGGGCAGACTTTCCAGCAAGATAGAAGGCAGAAGCAATGGAAAGGGTGGATGAAGGGAAAACTGCAAGGAACACA
GGACAAGATAGAAGCAAGAGCAGGAAGGTTTTGGAGAAGTGGAAAAACAAGCTAGAGAGATAGGCACAGAGGCCTAACCTGGGGTAAGGCAGGG
CCTTGTAACCAACGCTCAGTGAGAGAGGCAGCCCCTCACTGACCTGCACCAGGCCTTTCCTGATTTTATAGACAGAGTGTCATGAGGTCATGAG
GGCAGGAACCATGTCAGCTTCATCCTGAGAGCCCAGCACTTTGTAGGCATCTAATAAATATTTATTACACCAATGAAACCTTCAAAGTCTCTTC
TAAAAAAGCAAGTTCTCCCAGACACCAGAAGACAAATGGCCTAGCAGCCCCTGAGCCAGTCATCTCGGGCAGTTGTGAGCTGGTTGCTTATTTG
AACCCTCCATGCCACGGGGCAGCATCAAGCTTGCCTGACACACACCTCCTGAGCCAGGAATTCACCACTTTGCCACCATCTCTGCCTGGCTTGG
GAGATGCTCCGTGGACAGAACCAGAGCCGTGCTGCAGGGAAGCAGAAAAACCAAAGGAGATGCATGCCAATCTAACATGCCAGTTTAAAAAAAG
GCATTCTTGCCTCAGAGTAAGAATCCAGCTCTCCATGCACTCGTCTTTCAACCCAATCACAAGGCATCAGAATTAGCCCATATGACCTCTATGG
GACAAGAAGAGCAAGCAGGGTGATTTGGGTGCTAAGAAATAGCTGTGAGAGGATGATGCGGCAGCTGTGCCCTCCAGATGTTCGGAGAGAACAT
CTGTGCAACAATAGCAGTAGCTCCCATGCACTGATGTGAGAACCCAGCCTAAGGGGTACAGCAATCTGGGTGGTAGGGGGTAGCTCTCAGAGGG
TCTGACAATTCACCTAAAGATTGCAGGACCAATAGGAACCTGCCAGTCAGAATTTCCTAGCTCAGTGGTGCCCTCCAAGCAAGAGAGCTTATCA
GCCAGACCTGTGTCTTGGTGCAACATCACTGCTTAAAATCAAGTCCTCCCAAGGCATGGTGTCCATTTTACTTTCTCTGGATGAAATGAAGACA
GAGAATGAACCCAGTAAGATGATAGAGTGCTTTGCTTTGGATCTGTTCATATCTTACCCGTGTTTGTGCTCACATGAGTTACACAGTCAGTACA
AGGGTAGAGAGCTCTTGAGAATTTCTTACCTAAGGGAAAGAACTTGGGGGCTGCTTTGCTCAAAGGCTATTTTTCAGTGTGGGGCTTATCTAGA
GACATATATTTTGCTCCTTGTCCCCACTGCTGTTGCATAACTACGGGAGTTGAGGGTCACTATACACAGACACAGATGGTAGAGATGGGGGCAG
TGGTTGGGCAAGGAATAGCTGCCTTGCCACTTCGAAGTCTCCTAAATGGCATCTCTGAAGAAGAAGGATATGTCCACAGGGAGAAGGGCCCCAT
GGTGACTCTGTTGCTCCTAATGTGCCAGGCTCAGACTCTTCAAACCACAAGAAGTGGCCCAGCGAGTTCCATGTAACTGCAAATGCAAGCAGGA
AAAAACCACACTCAGATCTCAGCACAGCATCAGTCTTGGGGACAGCTGGCCTTTCCTAATGCAGCAGCATCTGGCTGCTTCTGCTGTACCTGGA
TGTCTTCAGGGCAGTTCTTCCACACAGAGGACCCCAAATAAAAGCAGAATTCCTACCATTAAGCTTTCCGTATCCAAAACTTTCTATGTGAAAG
ATACAGCATCTGTGTCTCACAAGAATCTGTTTTCTTGGGGCATCTGCTATTTGGCAGCTAACCAAAACAGAATTCCCATCTTATTTTCTTGTTC
ATTTGTGCTACATGGAAGGGACTGGTCCTGAATATTCAGGGCAACATCCAGCATTTGGTAGTAGTGGAGAGAAAGAGAAGAGAAAGCTCTGGAC
TGTGTTCCTCTGTCTGGGAATGTGACTCTCACACCTCCCAAATCCTCCCATTCACACTTTTTCTCCCTGACTTTCCAGAACCCTTTTTAGGCTT
AGCTCCTTTTATCTTACCCTACACGCTTTCTTTCTACCCACACTGGTGGGTACTTTTCAGCCATAGACATTGGAGCACATTTAAATATGCTGGA
GTCCTTAGAGAATTAAGAGGTGGGGGAGAGAGGAGGGCACAGAGCTGAGGATGGCACTAGCTCATTCACAAGGAGCCCTGAATTTCCAGGGACA
TTAAAGAACAGATGCTCATGACAGAGCATAGAGCTCTGCCCTAATTGTTTGTAATGTTGAACTATGTGTCATTCGTTCACTCATATATTCTCTC
AACATTGGAATTGAGCACCAATTATGTAACAGAGTAGGTCTTGGCAATACAAAGATGAATGAAACATACCCCTTGTCCCCAAGAAGTATGTGGA
CACGACAGGCACATGGACCAATGATGGTCATGTCAAGCGTGATGAAGTCCATGGTCCTGAGGGACACTTGGACCACGGCCTGCATGAGAGGGCC
TGGAACCCAACTGGGCGGATCTAGAAAGAATTCCTCTGGACTTGATTCCTGAACTTGAAGGTAGAGATGGAAGGAGAAGAGTTCTGGGTAGCAT
GTTCCTGGCAGAAGAAGCCCACTGCAAGAGCAAAGGCACTGAGGAAGCCTGGTGGTCACTGGAAAACTGGGATTCAAGTAGCTGAAATCGTAAG
GGTGCAGCCTAGGGAGAAGTGAGACCCGTGGTGGGGGGCAGAGCCAAATCTCTGTATCCAAACCTTTCTATATGAAAGATACAGTGTCTGTGTC
TCACAAGAATCTGTTTTCTTCGGGTGTCTGTTATTTGAGTGCTAACCAGAACAGAATTTCTAAAGATGGTCTTTGAGGCCAGGTAACAAGGCTG
AGGCTAAGAAGAACTATGGAAGGTCTGTTGGCAGGAGAGATGTATGATTAGATCTGCATTAGCAGAAGGAAAGTTCTGGCTGAAATCTGCAGAG
CAGTTTGGAGGGGACAAGACAGATGACATGGAGAACACTTAGGACGCTGTTATAATAAAATAGGCTAGAAATGATGTTCCTCAGAAGTCCCTTT
CTCCCTGCACACCTGGCCACCTCAGACTTCCTGTTCAAGGGGAAGGCAGGCTGGGGAGAGAGGTTTCTTGAAAATAACACATCTGGGCCGGGCG
CGGTGGCTCACGCCTGTAATCCCAGCACTTTGGGAGGCCGAGGCGGGCGGATCACGAGGTCAGGAGATCGAGACCATCCCGGCTAAAACGGTGA
AACCCCGTCTCTACTAAAAATACAAAAAATTAGCCGGGCGTAGTGGCGGGCGCCTGTAGTCCCAGCTACTTGGGAGGCTGAGGCAGGAGAATGG
CGTGAACCCGGGAGGCGGAGCTTGCAGTGAGCCGAGATTGCGCCACTGCACTCCAGCCTGGGCGACAGAGCGAGACTCCGTCTCAAAAAAAAAA
AAAAAAAAAAAAAAAAAAAAAAAAAAAAAGAAAATAACACATCTGTTAATTGGATCATTTCTGTGTGGTCAATGTCTGTAGGGGCTTTGTTTTG
GTCATCATAGTATAAAATCCCCATTATGTAATATTTCCTCCTGATAAAAGCTCACTGTGTGTCTATACCCTACCAGCTTCCTTATAGTATTTGC
TCATTACCAGGTTCAAGGACCTGTCTGTGTGGCTCTTCCCCAGAGCCTCTGTTGGAAAGAAGATTTGTCTTTGGTTATAAGTAGATACACAGTG
GTCAAGATGCTCTAGCACAGTGCAGCAGAATAAGATGGGCTCAGTAGGGAAAGATCATTCACCCCTAAAGTGTACACTTATTCTTTTCTGATTA
TGATAGGATTATGTTGAAATTAAAAATTGTTTCAACGAAAAAGCAACTGATTGCTTAGGCCAAAGCAGAACTTTTTTTTTTTTTCCTGAGGCAA
AGTCTCAGTCTGTCACCCATGCTGGAGTGCAGTGGCACAATCTCACAATCTCGGCTCACTGCAACCTCCATCTCCCCAGTTCTAGCGATTCTCC
TGCCTCAGACTTCCGAGTAGCTAGGATTACAGGCACCTGCCACTATGCCCAGCTAATTTTTGTATTTTTAGTAGAGACAGGGTTTTGCCACGTT
GGCCAGGCTGGTCTTGAACTCCTGACCTCAAGCGATCCACTCGCATCAGCCTTCCGAAGTGCTGGGATTACAGGTGTGAGCCACCATGCCCAGC
CAGAATTATTTTTAGTACTGTAGTTAAGAGGGCACATTCTGGAGCAAACTGCCTGCTAAGTGTTCGCTGTGGGGCATTGGGGAAGAACTTAATC
TCTTTGTGCCTTGGTTTCCACATGTAAAATGGGATAATTATATTGTCCCCCTGTACTGGTTTGCTGGGGCTGCCATAACAAAGTACCACAACTG
GGTGGCTTAAACAACAGAAATGTGTTGTCTCATAGTGCTGGAAGCCGACTCACCTCAGAAGCATGGACTCCCTTACCTCCAAGTCCAAGGCAAT
GGGGCTCTCTCCCTCTTGCCTCTTGAATTCCTGCATCTCATTTCACTGGGTAAACAGGGAGGCTCCTGTGCTCCAGCAGGAAAACCCTGGACTG
GGAAGCAGGATGTCTACTCTGATCCTGCTGCCCCAAAGCTGTGCGGCTTTAGACAAGTGGTTTGACCTTTCTGGGCTCAGTTTCCTTGATTTTC
ACTATTATTTGAAGGGCTTGGGGTCATGGAAATCATGAACTCTTCACACTGAGAGGAATCTTCATAATCCATTTTGTAGATAACGAACCTAAGG
CTGAAGAGGTCAGGGGCTTGCACCCAGTCATAGAGCTAAATGAGGTGCAAAGAACCTAGAACTCCGGCGTCTTGACTCCCACCTGGGACACATT
TTATCAGTAATAGTGAACTCTCATCTGTTGATAGTGTTAGAATTCTCACATTTACTCCCCATAACAACTTTCTTTTTTTTTTTTTAAACGGAGT
TTCTCTCTGTCACCCAGGCTGGAGTGCAGTGGCACGATCTCAGCTCACTACAACCTCTGCCTCCCGGGTTCAAGCTATTCTTCAGCCTCAGCCT
CCCTAGTAGCTGGGAATACAGGCATGCACCATGGCGCCTGGTTAATTTTTGTATTTTTAGTAAGGATGGGGTTTTGCCATGTTGGCCAGACTGG
TCTCAAACTCCTGACCTCAAGTGGTCCACCTGCCTCAACCTCCCAAAGTGCTGGGATCACAGGTGTAAGCCACCATGCCTGACCAGCACCCTTC
TGAAGTAGGTGCTTTCAGAAATCTGAAAGCATAGTGTCGGTTAGCAGGGTTGGATCTCTTCTGGTACTGTGAGGAAGAATCTGTGCCATGGCTG
TCTGCTAGCTTCTGGTGGTGTGCTGGTCATCCTTAGTGTTACTTGGCTTGCAGAAGCACCATCGATCTCTGCTTTCATCGTCGTGTGGTGCTGC
CCCTGCATGCATGTATCTGTGTCCAAATTTCCCCTTTTTATAAGAGCACCAATCATATTGAAATAGGGCTCACCCTCATAATCTCATCTCAACT
AATTATATCTGCAATAACCCTACTTCCAAAAAACACCACGTTCTGAGGTCCTGGGTGTTGGGATTTCAACGTATGAATTTGGGGTGGGAGGGCA
CAATTCAACCCAAACATTACCTAATAAAGTTTTCAACAGTAAGTAAATGAGTTAACTCCTGGAAAGCATTTAAAACAGTGTCTGACATTCAGAA
AGCTCTCAGTAAACGTTACATTATGCTGGGTATAAATAAAAAGCTCCCAGGACAGTGGACGGCATTGAGATTCCACCGGTTTGTATTAGTGTGG
CCTCGCCAGTAATTTACATCTTCTATCTTTTTTGGTTGGTCAGGGCTTAAGCCATACCAGGTAAATATTTTGAATAATACTCCTAGCTAAAAGG
TGCAAGGAGTAGATACTGTGGGTTCTGATTTTTCTTTCCCGTTCTCCAAGCTGTGTACACAGAACCATGCAAGTCGCCCCAACCAGGGAAAAAC
AACTGCCATTTCTTTTAAAGGGGAACCAATGAAGGTCTTGTCCTGATGAGCTCACAAAAGCAAACTTCTCCATGTCTGTCGCTCACTCAGTGGG
CTGAAGCAGAGCCTTCACGCTAAGCTTTGGAGACAAAGCTTCTTAGAGAATGTGCAACGTGGGCTGATCCCAGGCTGCCCAAGGAGCAGCTGAC
GAGTGTAAAAGTGTTTGCTCACCGATTAGAATCAGTCCTTTAAAAAATAAATAAGGTATGTTGATCTTTTATGTGATGATTAAACAAATCAGAT
GGCCCAAAATGAATTCCAGGTAAAGAGGAATAAAATATCAGAAGGCAAGCTGCTGAAATTAGCAAGAGCTGAACTCGAAAAGCCCGACTTTCCA
GGCACGGCTAGTTTCTTCCTAGCAAGTTCCTGACGGAGCTGGGTGGCTGCCCCAGGTGACTGCAGTAGCAGGAGATTAAGGAGACAGCACCTGC
CTGACAAAAAAGGTTGCTGACACAATAGGCCAAAGTTAAATTGAGCTGCCAAGGGAAAATGATTGGGGATATGCAGTTAACAGTTGAGGGAGAT
ACCAGAAGAATTTGTGTCCACAGAGAGATTTTGATGGGGCTGACTTTGCCGCTGACCGACTCACCTCAGAAGCATGGACTCCCTTACCTCCAAG
TCCAAGGCAATGGGGCTCTCTCCCTCTTGCCTCTTGAATTCCTGCATCTCATTTCACTGGGTAAACAGGGAGGCTCCTGTGCTCCAGCAGGAAA
ACCCTGGACTGGGAAGCAGGATGTCTACTCTGATCCTGCTGCCCCAAAGCTATGCGGCTTCAGACAAGTGGTTTGACCTTTCTGGGCTCAGTTT
CCTTGATTTTCACTATTATTTGAAGGGCTTGGGGTCATGGAAATCATGAACTCTTCACACTGAGAGGAATCTTCATAATCCATTTTGTAGATAA
GGAACCTAAGGCTGAAGAGGTCAGGGGCTTGCACCCAGCCATAGAGCTAAATGAGGGGCAAAGAACCTAGAACTCTGGCGTCTTGACTCCCACC
TGGGACACATTTTATCAGTAATAGTGAGCTCTCATCTGTTGATAGTGTTAGAATTCTCACATTTACTCCCCATAACAACCTTCTTCTTCTTTTT
TTTTTTTTTAAACGGAGTTTCTCTCTGTCACCCAGGCTGGAGTGCAGTGGCGTGATCTCGGCTCACCGCAACCTCTGCCTCCAGGGTTCAAGCT
ATTCTTCAGCCTCAGCCTCCCTAGTAGCCGGGAATACAGGCATGCACCATGGCGCCTGGTTAATTTTTGTATTTTTAGTAAAGATGGGGTTTCA
CCATGTTGGCCAGACTGGTCTCAAACTCCTGACCTCAAGTGGTCCACGTGCCTCAACCTCCCAAAGTGCTGGGATCACAGGTGTAAGCCACCAT
GCCTGACCAGCACCCTTCTGAAGTAGGCACTCTTATACCCATTTTACTGATCAGGAGACCGGCTTGCCCAGGATCCTGCAGCTACTGAATAGAG
GGGCCAGAACTTTGCTGGTTTGGTGCGCTTCCTGGTACACACCAGCTGCCTCCAATCTCCCTTTGATAATCCTAGCCACATGCCACCGCGGGTG
CTCTAGTGTAGGCTGGCACCAACCCCACCCAGCAAGAGCCAGGATCTGCTTCTTGAGGGCAGGCAGGTTTATCACACAGCGGGGTGCAGAAGAG
TAGTATTCATCTTCCTAGTGTAACCACTTATAACTACTTTTCAGTGAATCAAATAGATTTTTAAGCAAGAACATTGTAAAAATCTGCTTAATCA
AGGGTGGAGCAAAATGAGTTAGCCAGGGCCACCCTAGCTCAGATGGGGTGGTAGCTGCCTCTGCTCCACAATGAGGTATTTACACTTGCTCCCC
ACCCTCTCCTTTGCCCCATTATCTTTTAGTTAAAGGGCCAGGTGCACCAGAACACAGGTGCCTTGAGTAGCACCAGCACCTCTCAGGGTCATAG
GGAAGAGCTGTTTCCTCTGGGTAAACTGAGGCCTCAATAAGGCATAAATGCCTTCTCTGGGTGAAGAAGATATGCCCTCTAAGATCTCTCCAGG
GTGAATCTAGAATAAGTTGTAGTCTAGATGGCTTGGCAGCACTAGCCAGTGTGACAGTAAGTCTTGATGAACATCAGTCAGCGTCATGCTGAGG
GACAACCTCGAGGAGAGGGAATGTGTACTTGTTACAACAGCACACCCAATAGAAATAGCATGTAAGCTACAAATGTAACTTTATATTTTCTAGC
AAAAAAAAAATTTTTTAAAGAAACCAGTGCAATTCATTTTAATAGATCTTATTTGTTTCAATATATCCCAAATATTGTCCTTTCAATGTGTGAT
AATATAGTTATTAGTGAGATATTTTCCATTCCCTTTTTCATACAAAGTCTTTGATACTCAGTGTGTATTTCACTCTGACAGTGCACCTCAATGT
GGTGCAATAGGCGAGGGTCTATGTGGTACATCCCGTGCCCAGTGTGCACTTAAAGGCTGTAGATCCATATATGGCGACTGTCTCCTAGATAGAT
GAGCCCAGCAAGGCTCAGTGGGTGTTTTGAGGTCCATGGTCTCTCAGGTCCCGTTCCACCCCGACATTCGACGAATCAGAGAACACTAATATGG
TTGGGAACACTTTTATCTTGCTCCCCATAGTCTGAACAGAAAGAGACGCCACAGAATACAATCACGACTCTCTCCCTCCTACGGACTCCCTCCC
CACAAGCAATCAATGGGCTGGTCTCAGACAAAGACACCTAGTCAAGGCTGGTGAAACCTGCTCTATTTCCTAGTAGGCCTCCACCTGTAATTCT
CAGCAGTTTGTGTGTATAGATAGAATTCCTGCCTTCTACTAATGTGACTGTTCCTGCTCAGAGATCTAGAGTTAATTATTAGCAAATTCACAGT
GAACCAGAGCTAGGTCTTGCTGTAAGGCTCCTGTGTTTTTTAGAAGTACGTTGCCATGGGGATTTTTGTCCCCACTGGGTTCCTCCTCAGGACC
CCAGACAGATAGATACACAAACCCTGGGCCCATAATTTTAGTTAGAAAAGGCCCAAGCCTAGAACCTCAGGGAACTCATTTGGAAGCTTTTTTT
TTTTAGGAAACTTACCTTTCCTATTTGACATCTCAATCAAACAGGTGTTTGGGGAGAATAAAAGCATACTACCTTAGAAGGGACTGGGGTCATC
TGGCCAGACTTGTGGAATAAAGAGAATTTCATTCCTTGTATAAAATAACTCTAAATAATGGTAAGCTCTTAGGAGACTTGATCTACTGGCTACA
TATACCCACTATGAAATTAACACATTCTGGAATTTAGATGGAAGAATATGGAAATTGGTCCTTCTCAGTGTATGGACGAAGCATCAGAAATGAA
GAGAAGGGCCAAGCCTAGAGAGCAAAACTAAAGACTCACTGGTCTGTGGGCTTCCTGCCCAAGGAGAGCTGAAAGCTAAAGGATGCTTCACAAT
GTCCTACAAGTTGTTTTTCTAAAGTCCTTCCAGCGGTTGAAACTGTGTTTATGCAAAACAAAACTTTCCTTTGTTGCTATAATCTAGAGGTGGA
CTTTGGCTTAAGTCATGCCAAAATATTATCATTCTAAACCAGTAACACCTATATTTGTTGAGCATTTACTATATGTGTGGCACTATGCTAAACT
TAACTACCCCTTTTCCTCATGTGTAACAGTCAGGTGACTTCACAGCTGCCTTGTGGATACTTGTGTTATTTGAAAGATTGCATAAACACATGTA
AAATGCTTAGAAGTCTACCACCTCATCTTACCTACAGCTTTGGTGAGTCCCTGCTTTGGCCAAGTAGAATCATTCCCTGTGAGGAGGGGAAGAG
GATAAGAAACAGGCAGAGTTGACCTTACAGGTAGACACAACAGGCGAGGGTCCATGTGGTGCAATGGATCCCATGCACATGCCTGATTCAGTCA
TTCTAGTTGAGTAGGATTGTCTGGTTGGTTGTTATTATTTTGTTTTTTGTTTGTTTCTTTCTTTTGTTTTATAAGATGGAGTCTCACTCTGTCG
CCTAGGCTGGAGTGCAGTGGCTCAATCTCGGCTCACTGCTGCAACCTCTTCCTCCCGGGATCAAGCAATTCTCCTGCCTCAGCCTACCGAGTAG
CTGGGGCTACAGGGGCATGCCACCACACCTGGCTAATGTTTTGTATTTTAGTAGAAATGGGGTTTCACCGTGTTGCCCAGGCTGGTCTCAAACT
CCTGAGCTCAGGCAATCCTCCCACCTCAGCCTCCCAGAGTGCTAGGATTACAGACGTGAGCCACCGTGCCTGGCCAGTTTTTATCTTGAAAGCT
TAAGGGTCTCCCACTTAAATTCAAATACTCTTCTGAGGATAACCTTTTAATCAGCCAACTATCATGAATCTCAATTATCAGGAATTCCAGTTAT
TCCAATTATCAGGAATTCTTTATATCATCCCAGGAATCTAAAAGAGCAAGGTCTTATAGGTAAGGGCAAACTTTCTGATGCCTTGGAATTCAGA
CCCTAAGTAGAGATGGTCATTTGACATCTAGTCTGATCGACTGTAGAGTTACTTCTATACAAATAAATTCAAGTTATCACAGGGTTTCTTTCAG
TTGGGGACAATACTTTGAAAACTTTTAGGCTCTGAATGAATAACTTGGCAAAAGAAAATGTTAGGGTCCTTCAAATACCATACTTGTTGTGGTT
TTCTCACAGATACACCAGTCTATAACCCTGAGGTTTCAACACTCCACTCAGTTGTGGGCTTTTTATCTAAATCAAAACTATCACATGCCCACAT
GTGCATCTGCAGCCAACCACAAATGATCTAACAGGACCAGATTTCACTGGAGCTCTGTGACCCTTCTCCCAGTGTGAACTGAAGGGAAAAAAAC
CTGGAGCCTAAGGGACTCCCTTTTCCGTGTCCTGAAGACCACTGGCTTTGGTTAAGCCAATATGATGGGCTCATTGAGAGAGAGACTCAGGACC
TCGGATCATGCCACACTCTCTGGCCCCAGAAGGCATACCACAGGCTGCCAGCTTTGTTGGAGAACCTGAGACTTAAGGCCAGGATATATCAAGA
GCCCTGTACCCAGTTCTGTGATGTCTTAATACCTTTGACAAGAGACATTGGCAACTCACTGGGTGTCCATTGGGGGGCGACAAGGAAACAGACT
GATGAAACCAGAGAATGTGACAACTAATTACATGTTGTTTCCTGTAGAAGAGAAATTCTCAGAGGAACGTGGTGACTGTCTGTTCTTTAATGGA
CTGTCATATGAAAGCAGGAGAAGGAGATTCTTCCTTACTCCAAATGACAAAACTAGGAGCAGTGAAATGAGCTTATAAGGTGGCCGGGTTTTTC
TAGCAATTGGAGCTCTCTGCAGTGAGTGGACACTTGGCAGGGTAGTGCCTACTCCGCATTTGATGTGTTCACACCACGGCTAGAAGTAGGTGTC
GCAACTTCCAGTTGAAGAGGGAATTCTTTTCCTTGGGTGGGAGAGGGGCTAGAGAACGTCTCAGGTTGTTGCTAACTATGAGCATGGTTTTATA
ATTGTTTAAAAGTGGGTAAACAAGAAGAGTGTGTTTATGGTGTCTGTATTCCACAAACTATTATTTCCCACATTAACTGTTTCATATATGGAAA
ATCTGAGAAACAGGAATGCTAACAAGGTTGCAGTATAATTTAAAAATACTTCTGAGAGATCATTGTATCCCAAAGGCAGTGCCCAGTGAGGTTA
AGAGCGTGGTTTGTGGAATCTGAGCCCACAGGGGTTTAAATCCTGCCTCTGCCCTTCTTAGATTCTGTGAACTTGGACAGATTCCCTCACTTAT
TTAAGACTTCACTTTTCAGCCCTTGAGATCCCACCTGCTCAATTATCTAAATGAAATCTATCACTGTGGAAAGAGCAAAGGCCTCCTGCTGTTG
AGCAAAATGTTTTCCAGTCCTTTGTTTCTGTGTGAAATAAAGCAGCTCCATCCCAGTGCTAAATGATCAACTGCATATGACAGAATGAGCTTAT
TTCATGCTCCCAGTAAATACAAGACCATAGACTACTCTGGATGGTAGTTTAAGTTTAAGATGAAATTGCTTCTTCTGATTGCCTTCTTCTTTAT
TGCTTCTTTCTCTGTTGTTCCTTCCTTCTCTTGTTTATAACACTAACAGTCAAATCTATCTGTGTGGAAATCTATCTACTATATAGAACGCTAC
ATCACAATTTACAGAGGGGAAAATATTTTTGTCGGCAGTAACATTTCACTGGAAGAGGCACTATTTGGCCACCTAACTCTGGGATTTAGGCTCA
GGTAGAATCAGTGCCTCAGTTTCTTTAGGTCAGCCATTATGAGTTGTTCCTTATTTGACCTAGCACATATATAGATGGTGGTTAAATTTAGCAA
AATTCTCTTCACAAAGGTTTCATTTGTCTGGAAGACTCTAAGTACTGATCTGGTCAGAGTACCATCAAAGCCCCTTGTTTGTCATGAGACCGTG
GACCAACATGTTAGTCTTTCTCATGTAAAAAAAAAAATCATCAACAAATGCAGTGGGAGTTGGTAGTCATGAGTTTGAGGTAGTACAATATCCT
TAAAGTACACACTCAATCATGTGTGATAATTGGCCAACTCTACCTAACAACAGTTGAAGACCTCCAAACAGCTATCAGGACTACTGGAATCATG
TCTCCAGAAGAACCTGGAGAAACATTCACATTTGTGTGGACCAAGGAGGAAAGCAACCCAGACGACTTCTACTTAGAAGCACAGGCACATAGAG
CCTGTGTTATTGGCACAGGTATTTCTCTCCTAAGAGCCTTTTCTGCTTAAGAAGGCTTGAGGATCTATTCCCATTAATCATAAAAAAGGGATTT
GCTGGGCTAAATTATTTTAGCCTCCTCTTTATGCCTTACTTCACAAAGAATTGCAGTTAATCTGTAAATGAGTTCTGATGTTATGAAAATTGGA
TATGGCAAATTGTGTTATTAAGTCTATTAAGGGATGAAGAAGGACTCTTCTAAAAGAATAACGTAGTCTGAGTGGCAGCTCTCACTTAATAGAC
ATCTACCTAGAAATGTTTCTGAACTTAATGGACACATGATATAATTCAAAATTAATATAAGCACACAGCACCTCTCCCCATAACCTTATTGAAA
TTAAGGGTTCCAAATCATTCTTCTCTCCCTTTTACTTCACCTGCAACATGTGGCTCACCCTTCTTTAGACTAAGAGCTAAACTCTAATGCCTAG
TTAATGTAAAACAATGCCAGGATTATTAAGCATGATTCTGATAAGTTTTAACCCCTAATGAGATTATCCTTGGTTAAATAAATTGAATGGCTAG
TGGAATTCCAATGTAAAGTCAGCAGAGGTTAGCTGGTTGCTAGATATTTAACTATACATACCAGGAAGCTATGAGGACAAATTTCCATTTGCAC
AGAGCCTTGAGAATTGGCCATTTTAGGACTAAATGTGCTGCTCATTACTTTTACTCAAGGACATACTAATGACCAATATATGTTTAAATACCTA
CTATGTACAACTGCTTTCAAAAACACTTTCAATCTTGAATTGAGAAGGTAGGAGATCCATACCTGTATTAGGCCATCCTCACAGTGCTATAAAG
AAATATCTGAGACTGGGTAATTTATTAAAAAAAGAGGTGGATGAAGCTGGAAACCATCATTCTGAGCAAACTATCACAAGGACAGAACACCGCA
TGTTCTCACTCATAGGTGCGAATTGAACAATGAGAACACTTGGACACAGGGTGGGGAACCTCACACACCAGGGCCTGTCATGGGGTGGGGAGAG
TGGGGAGGGATAGCATTAGGAGATATACCTAATGTAAATGACAAGTTAATGGGTGCAGCACACCAACATGGCACATGTATACACGTGTAACAAA
CCTGCACGTTGTGCAGATGTACCCTAGAATTTAAAGTATAATAAAAAAAAAAGTGGGGAAAAGAAAAGAAAAGAGGTTTAATTGGCTCACGGTT
CTGCAGGCTATACAGGAAGCATGATACTGGCATCTGTTCAGCTTCTGTGGAGGCCTCGGGAAACTTACAATCATGGCAGAAGGCAAAGGGGCAA
CAGGTATGTCACATGGCCAAAGCAGGAGTGAGAGAGAGAACAAGGTGCCACACACTTTTAAACAACTACATCTCATGAGAAGTCACTCACTATC
ACGAAGAGAGCACCAAGGGAATGGTGCTAAACCAAGGTCCCCAACCCCCAGGCCACGGATCAGTATTGGTCCATGGCCTGTTAGAAACCAGGCC
ACACAGCAGGAGGTGAGTGGCGGGCAAGCAAGCAAAGTTTCATTTGTATTTACAGCTGCTCCCCATCGCTCATTACTGCCTGAGCTCAGCCTCC
TGTCAGATCAGCAGCAGCATTAGATTCTCATAGGAGTGCAAACGCTATTGTGAACTGCACATGTGAGGGATCTAGGTTGCACACTCCTTATGAG
ACTATAATGCGTGGTGATCGGTCATTGTCTCCCGTCACTCCCAAATGGGACCGCCTAGTTGCAGGAAAGCAAGCTCAGGACTCCCACTGATTTT
ACATTATGGTGAGTTGTATAATTATTTCATTAAATATTACAAGGTAATAATAATAGAAATAAAGTGCACAATAAATGTAATGTGCTTGAATCAT
CCCAAAACCACCCCCTCTCTGCCCCGTCCCAGTCCATGGAAAAATTGTCTTCCACAAAACCAATCCCTGGTGCCAAAAACTTTGGGAACTGTTG
TGCTAAACCACTCATAAGAAATCCAAACCCATGATCCAGTCACCTCCCACCAGGCCCCACCTCCAACACTGGGGATTATAATCCAACATGAAAT
TTGGGTGGGGACACACATCCAAACTATATCAATACCTTCATAAAAGCAATTAAATAACTGTACAGTGTGATAGGCAATAAATGTCAAATGTCAT
ATGTATGAGGAACATAGAGAGGTGCTGTTATCAAGTCACTGTGTGACCCACTGAGCACTCGCAATGAGGCACAGGTAGTAATGTACCTGCTCAC
TTGCTTATTGTTGTCCCACCACGCTGAATTGGGAGCTTCATGAGAGCAGGGCCCATGTCGCATCTATTACCACAACTGCCTTATTCGCGTGGCC
TGTAGCTAGCAATCAGTAAAAAATTACAGCATGGATGAAGCTACAGAAAGAAAGTAAATACTGACAGGTGGGCAAAATTTTTAGATATGGATAT
TTAATGATGGGATGAACAGATGAATCAAGACAGGAAACAAGGCTTCGCGTGGCAAATATATCCTTTCATTTGCCCAGCAAACATTTGCAGATCC
CTCACTATGTGCTAGACACTGTGGGCACATTTCTGTGTGGATTGGTGTTTTTCTCTCTCAAAACTGGAGAGATTTTGAGATCAGCCTGTATGTA
GTGAGATGAAGAGGTATGTGGTTGAGATCAGGAGTAGTTGGGATTCTGTGAGGGATAGGGCTCCTTAGGTGTAGAGAGCCTTGAGACCTTTGTT
GTGAGGATAGTGAAAATCAACAAAAGAATTTATGTTAAGGAAGGTTAAAAAGTCACTCTAAAGGTCTCAGAAGTGCCTATGACATCATGAGGAG
ATGTCCATTCCTGAAAACTTTAGCCAGGTTACAAACACTTTAAGAAATCCTATCTCAAAACTTCAAGAAAAGTGAGATCTGTATTTACACAGAT
AGAATTTCCAGGACTGGATTATATTTGCACTTTTTTGTTAAATTTTTACTTAACTAGTATATTAATATTGATAGTACTTTGTGACTTTTTTCAT
AAATATAACTTTTAAAAAATATGGTATTTCTAAAAAGGTTTGGTGCATTGTTAAAATGTGGTTTTGATTTATTCACAGACAGAAATCTTCTCTA
ACAGACTATACTTCCATTTCATAATTCAGTGAGGTAATGGGACTCAGTTATACTAAATTTATCATAGAGCAAACTTTGCTAGTTTTCATCTGTT
CATTACATTTTATGTAATGGCAGACAGTGTAATAACTAATACCGTTAACCCAACCATCTCTTCCCTATAATGTTTCTATAGGAACATACAGTGT
ACATTTTGCAGTTCTCTACACGCAGACAAATTCTACCAGTGTGTATTCTGATTACAAGCTAGTTGCTTCATAGGCCATATGTCTATCTTCAGTC
CCTATGAATCATGTAAATTACAGAGCAAACTGCCGATACTCAGTATATGTATATGACACATAAGAGTCAAGTATACTCAGCTCCTAAGAGCAAG
TGAGAAGACAAAGAAGATCTACTGTGTGTAGAAATACTTCTTAAATCATCTTTCCTGAAGGCCTAGTTTGCAACTGAGTCGCAAAAATTTGGTT
TCAAAAAGTTAAGCTTGCAATAATAAAAAGATAACCCAGTTTAACAATGGGCAAAGTGATCTGAACAGACATTTCTCAAAAAATGATATAGAAA
TGGCCAGTAAGCACAAGAAAAGATACTCATCATCATTACTAATTAGGGAAATGCAAATCAGAACGACAATGAGTCACCTCTTCACAGTCACTAG
GATGGCTATGATTAAAAAAAAAAAAGACAGGCAATAACCAGTGTTGGCAAGGATGTGGACAATTTAGAACCCTCATACACTATTGGTAGACATG
ATATATCCGCCAAACTGAAAACAGATACTCAAGCAAATACTTGTACATGAATGTTTATAGCAGCCCTATTCACACTGTCCACATACTTGAAAAC
AATTCAAATATCCATCAATGGATAAATAGATAAACAAAACGTGGTAATTTGTACAATCGAGGATTCAGCCATAGAAAAGAGTGAAGTACTGATA
CATACTAGAACATAGATGAACCTCAAAAATGTTATGGTAAGTAAAGGAAACCAGTCAAAAAAGACCACATACTTTATGATTCCATGTGTATGAT
ATGTCCAGAATAGGGAATTCCATACAGACAAAAAGTAGATGAGTGTTTGCCAGGGGCTGGGGAGAGGTGGGGATGGGGAATGACTGGCTGATGG
TTAGTTTCCTTAGGTGGTGAAAAAAATGTTTTAAAATTGATTGTAGTAATGGATCCACAGCCTTGTGAATATACCAAAAACCACTGAACTGTGT
AGGGGTGGGTTGCCCCTCCACACCTGTGGGTGTTTCTCGTAAGGTGGAACGAGAGACTTAGGAAAGAAAAAGACACAGAGACAAAGTATAGAGA
AAGAAATAAGGGGACCCGGGGAACCAGCGTTCAGCATATGGAGGATCCCGCCAGCCTCTGAGTTCCCTTAGTATTTATTGATCATTCGTGGGTG
TTTCTCGAAGAGGGGGAGGTGTCAGGGTCACAAGACAATTGTGGGGAGAGGGTCAGCAGACAAACACGTGAACAAAGGTCTTTGCATCATAGAC
ACTGTAAAGGATTAAGTGCTGTGCTTTTAGATATGCATACACATAAACATCTCAATGCTTTACAAAGCAGTATTGCTGCCCGCAGGTCCCACCT
CCAGCCCTAAGGCAGTTTTTCCCTATCTCAGTAGATGGAGCATACAATCGGGTTTTATACCAAGACATTCCATTGCCCAGGGACAGGCAGGAGA
CAGATGCCTTCCTCTTGTCTCAACTGCAAGAGGCATGCCTTCCTCTTATACTAATCCTCCTCAGCACAGACCCTTTACGGGTGTCGGGCTGGGG
GACGGTCAGGTCTTTCCCTTCCCACGAGGCCGTATTTCAGACTATCACATGGGGAGAAACCTTGGACAATACCTGGCTTTCCTAGGCAGAGGTC
CCTGCGGCCTTCCGCAGTTTTTGTGTCCCTGGGTACTTGAGATTAGGGAGTGGTGATGACTCTTAAGGAGCGTGCTGCCTTCAAGCATCTGTTT
AACAAAGCACATCTTGCACCGCCCTTAATCCATTTAACTCTGAGTTTGACACAGCACATGTTTCAGAGAGCACGGGGTTGGGGGTAAGGTTATA
GATTAACAGAATCTCAAGGCAGAAGAATTTTTCTTAGTACAGAACAAAATGGAGTCTCCTATGTCTACTTCTTTCTACACAGACACAGTAACAA
TCTGATCTCTCTTGCTTTTCCCCACAGAACTGTACACTGTAAAAGGGTGAGTTTGTGGTATGTAAATTTATCTGAATTTTTAAAATAAAAAAGA
AAGTTAAAAAATGTTAAACTTGGAATTAATGATGGTTTTTTTGAAGCAGATTAGTAACTACTGAAATTAGTCCTTGATTTTTGGAAAAGCCTTT
AAAAAATGGTAAGTGGGAGAAGTTATAAACAAAGAGATGAATGAGTCACAGAAAATTGGGAGACAAATAGATGATAACAAGGGACAGTACAGAA
AGACTCAACTGAGTTTTATCAAATCACTCAGGCAGATAAACATGGGGGCTGCATGTGCATCCGTATGTGTGTATATGTTTATTTACATCTAATA
TACACACATGATATTACATGAAATATTATAACATATAATAAATATATATTCATACTGGAAAAATTCTCAAAGAATATACCACCAAATGTTAACA
ATAGCTGTCCCTGTTTAGTGGGATTTCAGGTGACTTAGATCCTTTCCCCCTTTGGCCTCTCAGTATCTTATAACTTTGTGTGCTAAGATCATTG
ATAGTTGAACAATAAGAAGAAGAAAGTGAGTGTGGAAGGATGTTGCTAGAGAAAGTGTATTCTTGATTATATGGAGGAAGTGGGGGCAGTTTGT
GAAGTCTTCCTTACGAATAGCATCCTATTTGAGAAGACCAGTCTTCACACTGGAAAAAATGCATAGAGCAAGGTGGGCATCACTTGCAGAACAG
TTTGGCACAGGACTACCTCTGAAATATTAAGGCTTAGGAGACTTGTTCTTAGAAACTCTTCAGGCAAAGTTTACAAAAGGCCTTTTCCTCCTTG
CTTAGCAGATTCTCCCAAGGCATCCACATCTACACTCTCCGTAAGTCACTATATACTGGACCTAGCACACATCTGTCTACCCATCATTGTATTA
GTCTGTCCTCACGCTGCTTATAAAGACATACCTGAGACTGGGCAATTTACAAAAGAAACAGGTGTAATGGACTTACAGTTCCATATGGCTGGGG
AAGCCTCACAATCGTGGTGGAAGACAAGGAGGAGCAAGTTGTGTCTTACATGAATGGCAGCAGGCAAAGAGAGAGAGCTTGTGCAGGGAAACTC
CTGCTTTCAAAACTATCAGATCTTGTGAGAATTATTCACTATTATGAGAACAGCATGGGAAATACCCGCCCCCATTATTTAATTATTTCCCACC
AGGTCCCTCCCACAACACGTGCGCATTATGGGGGCTACAAGATGAGATTTGGGTGGGGACACAGAGCCAAACCATATCAACTATCTATCTATCT
ATCCATCCATCTGTCCATCCATTTATCTTTAATTGGGATACGTCTACAAGACAACTGATACCTAAAAGTATGGGAATTTCATTTGCTAAGTCAC
AAAATAACTTTTAAACCATCCTTATATTATACCTAACATGATCTGAGCACATAATATTGTCTAAGTCAGACCCATTCTTGCCTCTCTGAGCTTA
CACTCTTGTCAAGTGTGAGCCAGAAGGAGTTGGTCCAAGTAGAGCAAGTCTCACAGGCTTTGTGGTACTCAGGGTGGGGGTCTTACCCAACATT
TCCTCCCAGAAGCTGAAAGGCAGAGACAAGAAATTCATCCTGAAAGAGTTCACAAGGGTAAAGTCAAGGTGGCTGGTCCCCAGACAGGTCATAG
GAATAAGGTTCTGGTCATACAACAGGAGGCAAGGAGCCCAAGTAGAGGGACTTGGGTGTGGGGCAAGTGGGAGGGTTTCATTGAAAAACTAGGT
AGAAGACAGGGAGTAATGGTGGATAAGGCAAAGGACAGCATCTAATTCAGGCCTGTCATCAAGCTAGAGAATGTTCACAGCAGTGTTGTTTGAA
AGAGAAAGGCATGGAAAACACTTTGTTGTCTATCAGCAGGTGTGAATAATTTAATTGTGGTGTTTTCAAATAGTGAGATTTCCAGCAGAGGAAA
TTAATAAACCAGAGCTGCATGTGTCGATGTAGAAAAAAACCCAAAGTGTCCAGACATGGTGGCTCACGCCTGTAATCCTAGCACTTTGGGAGGC
CGAGGCGGGTGGATTGCCTGAGCTCAGGAGTTCGAGACCAGCCTGGGCAACATGGTGAAACTCCGTCTCCACTAAAATACAAAAAATTAGCCGG
GCGTGGCGGCCTACGCCTGTAGTCCCAGCTACTTGGGAGGCTGAGGCAGGAGAATTGCTAGAACCTGGGAGGCAGAGGTTGCAGTGAGCCGAGA
TCGCGCCACTGCATTCTAGCTTGGGTGACAGAGTGAGACTCCGTCTCTTAGCAAAAAAAAAAAAAAACCGAACACCCAGTGTTCTCACTCATAG
GTGGGAATTGAACAATGAGAACACTTGGACACAGGAAGGGGAACATCACACACCGGGGCCTGTTGTGGGGTGGGGGGAAGGAGGAGGGATAGCA
TTAGGAGATATACCTAATGTAAATGATGAGTTAATGGATGCAGCACACCAACATGGCACATTCATACATATGTAATAAACATGCACGTTGTGCA
CACGTACCCTAGAACTTAAAGTATAATAAAAAAAGTAAAAAGAAAAGAAAAGAAACAACAACAAAAAAAAACTACCCTTTAAAGGAATGCATAT
AAACAATAATTTATTTCTTTCACATTCATTTCACAGTTTGCTTACTGAAGCATCAGTGTGTCTTTCAATTGGATGTGATGTGTTTTGAAGACAT
AAGAGGCAGGAAAGTTTTGGTTGCCAAAAATAAAGAGAAACAGGGAAGAATTTAGCTTCTGAACTGGATGGTCACTCTTGCCAGAGGCCTTGGA
GGAGGGCAAGGTTTTGCATTTTGTTTGCCAATTTTTTCCTTAAATAAAGTGCCCTGGACTTCAGGTCAGTCTTGCCCCTTGAGCTGCTAAATGA
TTCTGCCAGATTCTTTCAGCTGAGCTGTGCGGGGTCCTGAAGACCTGCTTTGACTTCCTCTGCACCAAACTGACTCACTCCCCAGGGAACAAGA
TCAAGGCTGAGGAAGAGAAAAAGCAGGGCATGAATGGACCCTATACCCAAAATAGTAATTCCATTTTCTCCACCTGCCATTCTACCATCACAGT
GAAGCTTTTCTAAATTGTAAGAGGCTCTTGTAAAAATGAAGCCACTCCTGGGAGATGTTGAATTTTATCAGCCAACATGTATGTGGGTGTCCAT
GGAAAACAAGACCTTGGCAAATTATACCACAAATGGGCTGGGGCAAGTGGGAGGAGAGTGATAGGAGAACGTTTGAATCAGGACAAAACGAGTG
AACAATGTGGAGGCAAAGGGTGGGAACAAGATGTGCTTTGCCAACCAGACAAGTTTTTCAAGGCTAATTTTTCTAGAGACCATCTTAAGAACAA
TTGCAACACTAGACAAAAAGCACACAAACCAAAAAAAGAAAAAAATCTAAACCCAACAGCCTAAGTATCAGAAACCATCTTCTTATCCATATGG
TTAAAAAGTCAAAATGAATTTATTACATTTTCACAGAACCATTTCCTGGGCCGGAACTCATTTCTCCTTAAATAAATACTATAAAATTTTCCTC
AGAACAAATCAAGTCCCCTCTATAACCCCAGAAGACAAAGTACATCGGCAGTAAAAACAGACACAAAGTCTCCACTGTTGTCAGAGGTAGCATG
GCCTGGTGGGAGGACAGGGAGCTCATGCTGCCGCATCAGTCGGGAGGAGGGATTTGTCTTCTCCACAGGGCAGGATCCCTACAGGAAACAGGAC
AAACTGAGAAGGGCTTGACAATGGAACTCTTTACAAAGGTGTCAGCAGAGTATTCAAAACCACAGGAGAATTGAGTGTCAGGGCTAGCAACTGT
ACGGTTCCAGAGCCAACCCATGTCGGAAGGGTCAGAGGGTGGGACAGTCACCACAACCCCAGAAGGGAGAGTTCTGTAGAAAGGGCCATCTGGA
GGGAAGCAGTGACCTTCAGTCAGCCCAAGGTGACAGCCAGGCAGCAAGGAGATGAGTACCCTCAGCCTCACTCCTTCCCTTCCTCCAACCTCCT
ACCAAGCCTCCCTGTGGGTCAAGCTCATCCTGGGAGTCAGAAGGCAAGAGAGCCCCTAGATGCAGTCCACATAGTTCAGAGCAGGTTGCAGGTC
AGGAAGGGTGAAGACAGGAGAGGCAAAGGGAAGACATTGGGCAGGTCTTCCAGCTCACGGCCCTGTCATGCCTGCAGTCACTGTAGTACAGACT
GAATGTTCACTGTGTCCTGCTTTCAGCATTTAAGATGCCTCTGAGATAAAGAGCCTGCCTTGAGTCTCACGGGACATGCTCACATTTTCTGAAA
CCATGTAGCTTGCACTGTTAACCTCTTCCTCGGTTTAGAGGTTTTAGGGGCTCGTTTCACAAAGCTGCCCCAGCCCCTCATGTTAAACAACCTG
AGGGCTGTGACTGGGCAAAAAATAAATAAATACATTTGCATTCAACATTGACAAAATACACACTTAAGTGAGACTTTTTTGCATCACAAAAAAA
TAAGTTTTTACTTTTTTCAAAAAGTAAAGGTTCTTTAAAAGATATCATCTAGAGTAGAATTAAGGGCTATTATTAGAAAATCACAGTGGTCCCT
AGGCAAGACATTTTGAGGGATGAACTTAAGCAGGCCCCAGACTCACGTCTTCCATGTCCTACAACCCAGGCATACCCCATCATCCCATACCTTC
AATTTATCCAAATACTTCCTGTTTCAGTTGGCAAATTCCACTGCCCCAAGCTTCCAAATGTCTTCCACTGCTGGCTTAGCCTTCTTCCTAAATC
CCCTCCCCATAGTGTCCTGGACCCCATTAAAATGCCAGCAATGAAAGCATCTCCTTTCCCCTGTCTAGCACAGCCAGGTACATCTGTTCTGAGT
GGTCAGTGCCCAAAACAGCCCAGTTGCTAAACAGTTTGACCATCACCTATGCTCACACAGGAGTTACTGAGATGATGGTCCTCAACTGCAAATA
AAAAAACACAGGCCACTCTGTAGGAGCCATTAGCTCACAACTTGCTGGGCAGGCTCAAGTTTTAGGACTCAGCATGCTGAATAACACCTCTATC
CAATGGTAAATTTCTCTGGAAATGAATCCAAAAACCTCTCAGATGACAGATCCTGGGACTTTCAAGTTGTTACATAGCAGCAAGGGTTGCTGTC
ATGATTTGTTTACTCTTTGATTCCCTGCTGTGGCTCATTTGAGATCTTGGAGTGTTTGCTGCAGTAATTATGGCAGGATTTTTCCAGAGTGGTT
TTAGCATCAGTGAAAGAATTAGTGTTCATTACTCCTTAATTCTATCACTCAACAAATTATAGGGGTAAAATTAGATCCTATTAAAAAAAAAAAA
AAACAGGGAAAAACAGCAAACAGAAACAAGCCGGAAAAGAGGAAACTAAATTCACCCTCTAATACTGATAAGCAATTCTTCCCTACCACTAAAT
TTTAAACCTTCATCAGAGACAGTACTTTGTCCGTTTGTTCAATACTTTATTCTTAGTGCCTATTACAGTGCCTGGTACATAGTTGGCCCTCAAT
ATATGTTTATTTAATGAACTGATTAAATAAACTAGACTCAGGCTCTGACCCTTGTGCTAAATCTGTGCTCACAATAGATGTTTTAGGGCATATT
AAATTTTGAAGTCAGTTCATCTCTATGGAATTTATAGGCAAAGGGGCTTTCTTTTTTTAGAGGTAGGTTCTTGTTCTGTCACCCAGACTAGAGT
GCATTTTGCATTTTGAGTGCAGTGGTGTCTGCCAGTCAGACTAGAGTGCAGTGGTGTGATCATAGCTGACTGCAGCCTCAAACTTCTCGGCTCA
AACAATCCTCCCACCTCAGCTTCCTCACTAGCAGACTACAGGCACATGCCATTGCACCTGGCTAATTTTTTAATTTTATTTTTTTATTTTTGTA
GAGACAGAGGTTTGCCACATTGCCCAGGCTGGTCTAAAACTCCTGGGCTCAAGCTATCCTCCTGCCTTTATTTCTATTTTGAAGCAAACAAAAT
GATGCAAATGAATAAAGAGTCCTAGGAAGAAGTGTCCTCTGCTCTTGACTGTCCACTAACTCCAGACTTCATAGTGGCCCCCTTTGCTTAAGGC
ATATGATAAACTTCTAATGATGCTTGAATTATATTTCCACCAGCAGGATCAGTTATTTTCCTCAGACTCAAATTTTGCAATCAAAATGCACAGT
GTACACACGGCTGCTTATATTGCAGCACATAGCATCTATTTTACCATTTCAATTTGTGTGATTTCTTACATGATGGATTGTGGGATGACAATAA
TGTGTTCTCAGTGAAGCCTCTTGACTAAACCAAAATTTGCATTTTTATAAACCTCCATGAAACAGCTTTACTTAGTAAGATTCTATAATGCTAT
ACTAAAGAAAATTACGTGGTAGCTTCTAAAAGAAATACTCCCTCCATCACAGAGACCGAGCCTCATATGAAAACAGTAAGCAGCACACAGGAAA
CTCATGCTGTAGATGAATTTGGAGAGCCACCTCAGGTTATTTGCATTATAGAATGCTAAACGCAGACTATGCAAGAAACCAGCCACCTAGAGAG
ATCTATATAGAAGTAGAGAAACTTCCATACCACCAGCAATTTTGGCTTTCCAATAAATATTGAGTGATGTCCAAAAGTCGTATAATTCAAAAAG
TCTAGGGTAAGGAACAAGATAAAAGCTAACCCTTGTGGGTGTTGGTAAATCAATAATTAATTGGAGATCTTCCATGATATTTCCTCATAAGAAT
CATTGCTAAAATTGTTGTAATGACTACACAGACTCCCAAGATTGCAATAGTCAAACAACACAAACTGTTGAAGTCATGAAGGGATATGCAACAT
GGCTCCTTGGTTAACCTTTTGGTAGGGATCCAGTTTCCACCATCATGAAGTCCTGTTTTCAATATTAATTTACATCATTAGAATGCCTGCTGTT
CCATCAGCATTTTCTTGAGATTTCCTGGGCCATTCTCAGAAACCAGAGTTAGAATGCAGAAATTAATCATATTTCATTTTGACCTAACTATTAT
ACCCAGATATTTATAAGCCTGAAGTATATTTTTGCCTTACTGATAAACCAATAAGAAAGAACTTGAATATCTCATAAAATAAGGTCTTTCCGCA
AGCCACACATATCTAGATATGGATAATAGAGCTAAATAATCAGGTGTCGAGTCCAATACACTGTCAATCTATGTTTGACAAGCATCCAGTTCCT
TGCCTTGAGTCATTCAGTTCTTCGTTGTTCTTGCTGGAATGAAAGCCTATACAAAACCTAGCATTAATGAAGTTAATATGAAACTAATTAGCTG
CAATGCTACTGCGGGAAAACGGCCAATCATCATTTAATGAATGATTCTCAGTTAAGCACTTCAGAAAAGTATTTCCTCTGCCCCATAATCACCC
AGCTTCATGAAGATCCTGCTTTCCAGGTTTGAGGTGTGGGATCCAGATTCACTTATAACCTAATCAGGAAATGAACAGGATGATCTTGTACTGA
AGTCCTATATTAGTAATATATCAAATGAATAAAGAAAAATGTAAATAAAGTTAGAACTTGTAGTATCGTTTTATCAACTCGCAGTATGTGAAAT
CCATGATGTACCTGCACCATAAATAAAACAAGATCTTCAAACTTCCCAGGGCTATTTAATTCTTCCATGATTTTTGTTCACAAAGAACAATCAT
TGCTCAGCCTATTCATTGCTCCTTTTGGAATGAAATACTTTTATTACTATTCACTTCAAAATATTTTTAAATTTCTGTTGTGATTGCTCCTTAG
ACCCACGGGTTTATTAAAAGTATATTGCTTATTTTTAAATATTTAGGGATATTTTAGTTACTTGTCTGATATTGATTCCTAATTCAGTTTCTCT
GTGGTCAGAATGCATGTTCTGTATGACTTCAACCCTTTGAAATTTGCTGAAACAATGTTATGATTCAGGATATGGCCTTGGTGAATATTCCATG
AGTACTTAAAAGGAACATACATTCTACAGTTGTTGGCTGTAGTGTTTTATTATATAAACGTCAATTAAGTCATTTCTTAATCATGTTGAGAAAT
CATCTATGCCCTTACTAATTTTTTATTTTCATGTTTAATCAGATATGAGAATGGTGCGTTAACATCTTCTATGATTGTGTATTTGTCTATTTCT
GCTTTTAGTCTTGGAAGTTTTTGCTTTGTATATTTTGGGTCTATGTAATTAGATGAATGTAGATCTTTATTTTCCTGATGAATTGACCCTTTTA
TCATTATGACATGTCACTTTTTATATTTAATAGTATTTCTTGCATTAAGTTTTAATTTATCTGATATTATGTATAACTCTACCAACTTTCTTCA
GATTAGTGTTATGATGGTCTTTTTTTCCCATATCTTTATTTTCAACCTTCTTGGTCCTTATTAGAGTATTTAATCCATTTACATTTAGTGTAAT
TACTGGATTATTTGAATTTAAACCTACCATCTTAGTATTTCTTTTTCTGTTGTCTCACCTATTCTTTGTTTCTATTTTAATCCCTGCTTGCCTT
TATAAAAATTTTAAACAATGACAATTTTTAAAATATTTTCATTTATCTTCTTTGTTACCTTATTAATTAGGCCTCTGTTGTAATTCACCTAGTG
CTAACCCAGGGATTATAGCATCCATCTTTCACTCATTACAGTCTACTTAAGTTAACTTAGTCCTTTAGTTAGCATCATTTCTGTCTTCCATACT
ACTGTATGCGTTTTAATTCTACATATATTATTAAAATTATAAGACATTTTTATTGTTGTTTTAAATAGTCAGTTTAAAAAATGTACCCTATATT
TACTGTTTTCAATGAACTTTCTTTTTTCCCACATTACATACTTCCATGAACACCTCCTTTTGGCCTATAGAACTCCTATTAATATTTCTTTTAG
TTCAGAGCTGCTGGTATGTATTTTCTCAGTTTTAGTCTGGGCTCACTTTCTGTGATTCTCTCATCCCTGGATTATTGACTTTCAAAACTCAGTC
ATATTGGCAGCCCCTAGCCCAGTGACACTGTCTCAAATCCCAGAACAATTTATTTAATGCCACATCTATTCTTGCTCCAAAAATTGGCAAATGC
CTCAAGAAGAAATGAAGAGAAGCCAGTATGAGACTCGCCTCAATCTACTTCCCTTTTCTGTGGGATCTTGGATCCCTCTCATTGACCAATATCT
TTAAAGAGTTAGATGATAGATAGATAGATAGATAGATAGATAGATAGATAGATAGATAGATGATAGACAAACAGATTGATGTTATTTTTAGCAG
CAGCATTAGTGTGAATAAGCTACTCCATTTTAGCTAGAGGTAGAAGTAATTTCTTCTTAGAGAAAAAGTTTGTATAGAATTGAATTTACCATCA
TAGCCATTCTTGAATGTCAGGCCAATTGAACTCCTAAGACTCTAGCATATACAAAAAACAGAAACCACTATTTCTTATCATATGTTTAAGGGTG
TGTATTTGGAACCAATTTAGCCACAAACTTCCAGATGATGCTGACATACCAATAATTACTATTAAAAAGCAATATAATACACAGGGAAAGCAAA
TATAGTCAATTGATATATGAGCTGTTGCTCTTATTGCAAGGATTGTAAGAGTTCTGCAGTGTGGCCATTATATGTGTGCCTCACAACTTGTATT
CATTGTAAGCTTCCTTTGAGAATTTTTATCTAAGAATAAGTCTACCCTCATTTTTTGTGGAGTATCAGAGCTTCTTCTCCTATTTGTCTTCAAG
ATTGAAAGGAGAATATTGAATGCTGATTCTCTGAACATCTGCAATAATGTATTCCAAGATATTGGCAAAATCAGTCCAAAGGCTCAACCATCCC
AGCTAATTAAATTACCTGGTTAACTCTGTGGACTACCAAATCTAAATGGATGTAAGAGAGGAAGAAATTTGAAAAAAATAAAGATTACACAGTT
GAAAAAACAAGATATTCTCCAGTTATGAATTCTTTTCCCCAAGAGTGTCTTTTGTGTACATTGTTATTACAAAATCCAGTTGTCACATTAAACA
AGCCATGCTATCCAAAGCAGAGTTGATTGTGGCTGGAAATTTATTCCAATATTGAAAAGATGTGAAAGGGCTATAACACGTATCAGACAATCTA
GAATTGACCACTAGGGGACATGACCATGAAGCCTTAGACAATAATTCATATTTAGTTTGAAGTACTATTCTGAGGCAAAACAAACAAAAAAGAA
TGATTATGGAGGACTCAATCTTAAAGTGTCTCCAAGCATGTCTTGTTCTGTCTCAAACCTTGGCCTCAACAATCAAAGCTCTGTATCATTATTT
GCAACACATGAATGCTAAATGGTATCATTTCTGACTATGGACCTATGTGTAGTTAAGTTGTGTGTAGGAATATGAGGATAGAAACTATTACTAT
CAACCAAATGGTAATATTGGACATGTTTCAAAGATTGTCTGAAAGAGCTTGTCCATGGAGACTAACCCTTAACAAGTCCCAGGTTTCTCCTCTC
CTAGAATGTGAATTCCACGTTCACCAGCAGAATTCAGTTCTGCTGAAATAGTCATGGAACAGTATTGTTTTAATTTCTCAAACTTTTCAACCAT
ATGTTTATAAAGGTTTATAAGACAAATAAGACTATCCCTGGCATATAATTCTTTCAGTAAATACTTCACATATTCTTCCATAAGAATTAGCCTC
TTCTGTAAACTCTGGAGCTACCCCAAGGTAAGATCGTACTACTGTAAATAAGCCCGAATCACTAGATTCCAAAGGCCAATGGTTACCCAGGCAT
TATTTGTTTATGACCTAAGAAAATAAGTCCATAGAAATAAATTGGCTTGAACAGAACCATCAAAAACCCCTTTCAATAGACATCTCAAATGAAA
TAGGTGGTTCTACTTCCTGAGAACACCTAAAGAACCTTTGTGTAAAAGAAGAAATCATTATTTCCATTCAGTAGCAATTTTTGAATGGTGTAAC
TTGCTATCTCCTTGCCTATTGGTACAATGCAGAGAAACTGTTCAAAGGTGAGCCATTCGGTAAAGAACGATAGAGTTAATCAGAGAGTCTCTGT
TATGCAGCTACATGGAATGCAGGTGTTCATTGCTGGTGTTTTTACCCGCTTTGAGTTCTTGTTTGTTTTTGTTCCTATAGTAGGATGCTGCACT
GATTTGGGCAGGGCAAAGTGGTGGTTGATGGAAGAGCAGAACACCTGGGAAAGTCATCCAGAGTAATTTTTGATCCCAAGAAAAGATCAGCAGA
ATTCTCCTTGAGTCTCTAAGTCTTCACATTGTAGAACTGCTTAGGTAAAAACTAATTCAGGAAATGTGCAGTTATAAAACTTTAATAAGTCACC
CATTAACTGACATTTTAAATGTAAATGTACTAAGGGGACTCTTTATTTCCCTCTCATTCGTAAGTGGACCATCCTCAACACAGAGACCCAAACC
AGAAACTTAGGAATCATCTTTGATTACTCTCTTTCAATCTTATCAAATCTTATTAGCAAATCTTATCCCTGAAATCTTTGTCCCTGAAATATAT
CTCAAGTCTTACCTGTCCTCACCAGTTCCACCGCTACCATCCTAATCCTGGCATCAACTCTGAACTGGACTGAGTCCTCCAGCAGCCTGGTTCC
ACTGCTTCTATTTTTTTTCCATTGTCTCTCTCCATTTCATTGTACACACAGTTGCCAAAATAATATTTTAAAATCTGTATCACTAATTTAAACG
CTTGTGGCTTTTCAGTGTACTTAGAAGAAAATCCACACTTGTAGACCCTGATGCATTCAGCCCCTACCTGCCTCCCCAGTCTTATACCAGACTC
CATTTCTCATATATTGCAGCCATGCTTGCCTTTTCAACATCTCAAGCAATCGAAGTGCTTTCTCGATTTGAGACTTTTTGTGCTTGCTATTTTC
ATTGCCCGGAATGCCTTTTCTGAGAATCTCAAGCAGTTGACTCCTCTGCATTTTTTATGTATAAGCTTTACATGGTTCATATTCAGAGATCCCT
TCCCTGAGCACCCTTAGTAAACTGTTCTTGGCTTTGTTGGGTATTATTGGAACTTACCACTGCCTATAATTATTATGTTTGTCATCAGGTTTAC
TTGTTTCTTGCCTGTGTCCTCCACTAGATTGTAAGCCCCAGATATCAGCTAATTGGTTGTATAAGTTTCCATTCTTTATATAGTCTTTGAATAG
TAATCATGTACTTAGTAAAGCCACTAAGGCAAGTGGCCAAGGAGACGTGGACAGTTATTTATATCTAATCCAATCTGAAGAATTATTCCAAGCA
AAAATGACGTGACTGACGGCTTAAAATAGCTAAAAACTTATTTAGTTCTATCTCAAACCTCAGCTTCAATAAGCAGGCTTTCAGCCACATGTTT
TCAGTATATGAATTGCCAGAGCTTCCTACCAACTAGTCATATAGTGTGTCTACCTTAACCTGGTACCTTTACTTGGGTTGCATTTCATCAGCAG
CCAAGTCCATCTATTTGTCACAGTGTCTCTAGTACACTGCTTCTACATAGTCAGCAATCAGTGAATACTTGATGCCTGCATGCATGAATAAATG
AACTTCTCAGGAATGCTAGGGCCAGAGAAAGTTGATGTTTAAAAAGTTAGAAAATGTAGGCACTTGAGAAGGATTAAGAAATTAACATAAGCCT
TCTTTGAATTTATCATTGAAATCTATTATTCAATTTACATGTACAATTTCAGCAATACATATACTTCCTTTAGTCAAATACATCTCCCTGTAGC
ACTTACCATGTCTCTGACCCTTTGCCTTGCAAATTCCACTCTGATAATACCAGCAGTGAATAGAAATTTAAAAAGCCACTGTCCTCACTCCTTC
CACTCATGTTCTAATGTAAGCCTTTCTTTTATGCAGCCTGAATGCACAATTCACTTGTCATTATCTCGCATCCTAGCTGCTCCTCATGAAATGG
CATTCCTCTGGATTTGCTGAGTCCTAATGTTCAGGCAAAGTAAATCCCACATCATTCTGGCAGGCTTTCAGGAAGACTTAGGGACTCGTTGTCT
GCTAGTGCAAATAACAGCAAAGTGTGGTAGGACTTCCTCCTTAGTTCAGCGAAGAGCCAGGTCCTTGTCGCACGGCCATGAAAAATTAGGCTCA
CAGACGATTTCGAGGGGGAGAAAAATGAAATTTATTGGGCAAAAATGGGGAAATTAGAAACAGGGGCCCTCTCCAAAGCCAGAGTCCCTGCTAG
AGTACTTCCCACCTCACAGGTTGAATCCCAGGTGCCACCCAGGAAGAGGAGGGGCCAGACTCCTCCCCTCTGCCAGCAGAGCAAACTTCTGTGG
CTCCACCCCAGTGTGTATTCCTCCCAGTGCGCAAGTCGGTTGGAGTTTTCTGGGAACCGCCTTCCCACCTGGCTGTCTCAAAAGGACTCCCAGT
TGCAGAGGTATGTGTGATTCAACAAGATCCACTGGCAGAAAATAGAGGCAAATTAACTCAAGGAGTCCATTGGAATATATCAACGTACTCCCCT
TCCACTCACAAGGCAATGATTTCTAAAACAGTGAATCATTTTACTTACAAGGGGTCACAATGGAGACAGGATAGAGGAAACTGCCCGGGAGACA
CAGGGACGAGGCATGTGGAGAGGTAGACCTTGGATCCAGTTCTGCAGCCAGTGAGCTGCTCACTCAGACCTGTTGCTCCCCTCCAGAGCCTCCC
TTTCTTCATCTGGGGTATGAAACAACTGGACCAGCTTATCTCTGAGATCCCGCTCAGCTCTGACCCTCCTGTTGGAGAAGGCTTGCATTCTGAG
ACTGCAGTCCCAAGTAGCAATCTCTTCGGAGGGCATGTATGTGATTACGTACTTAGTGTGCTCACATAGTTTCATAAGAATCCGGTAAAATTCA
TTCTTATGCTACTTTTGTATTCCCACTTATTTTGAATGGAAAATCCTTGTACATATTTCCTCAAATTATGGATAAAAAGTATACAAAATACACC
CTAGAGGCCAAGAAGCTCCTTTTGGTAGAAAGAATGTTGAGCCCTATGAATTTGAGCTACTCAAACTTTGTGGTTTGTTTTGGGAGCCAATCTT
GAATATAAAATATTTTTTGATCCAGCAGAAAGGTGAAATCACATTGAAGTTTACAAAATAGTAATGCTAAGATAGATAGATTTTCTTGTGTGCC
ACACTTATGTTGTAACCAGAACTTAATTCACCATAATCATTGACAAGTCTTTTGTTACTGGAAAGGATAAGGGTTGGCAGGTCTTGTGACAAAT
GTTAGAATTTAATGCCCAGGATTTTTCTTGATGCACAGGACTCATTGGAAAAGCGGCAGCTATTTATTGTGACTATGAATCACGTCCACAGATG
AATATGATTAAGTGCTAAATCCATAGCAGCTCAAGTTTTTTAAAGCCTTGGAAAATTGGCTTTAAAAAATATCACCTGACAAACCTCAAGCTTT
TTCTGTCTCACAAGACTTTTGGAAAAGAACTAGGATCGACAGTGTTTTAAGGCTCACAAGGAAAAGAATCTAACACTTGTAAAATTATCTTCTG
TGCAAGTTTTATTTTCCAACGTGAATCTGGGCTGCCAAGCATACTGGCTCTAGCCAGATCTTCATTAGCCGATCCAAAAAGACAGTCGGGGCAT
TTATCCAGATAATGCAAGCCAACACTACCCTCTGAGAAAACAAAAAGTAACTTGCCTGATGAAGCAAGGAACCTCACCGATTATTCCAGATTAA
TGCATCTCCTTTTACTGGCACCATGATCAGATATTTTCAAGACAAAGTACTTGGCAAGTTGGAATCCAGCTGGGTCCTTTGATTTTTGAATTCA
CTTTGCTTCTGTGATTATGGCCACAGTTTTGAAAATAAAGTCATGTGGATAGAGTTGTGATTTTTAGGGATCAGGATGCCTCATAAAACAACAA
TGCTGTATTCTTTTGTAGAACAAGATCCTGCCTAGGCCTCTTTCCTAGTATTAATCTTTGGTCATGATGAATGTGCTCCCAACCATCCAACCTA
TCCCTTTGCAACCAGGCTTTTGTGAGATCAAATAATTTTTAGAGTTGAAATGAAGTTATTACCAGCTCTAAAATAAGGTACTACAGGAGGGAAG
TAAGGACCGACAAGAGTTAAATCACTTTCTAGGGTTGCGCAGGTAACTGGGAATGAAGCCAGGATGACAACTCTACTTGCTCTTTCATTGTATC
TTATGCTTCTCTGATGTCTTCCAAGGGATAGCAATATAATCAATAGTCTTGAAAGAAAGATCTTTGTAGAGAAAGGGTCAGCAGATTATGTTTG
TAATTGACTAGATAGAAGTAGTTTTGCTTTTGCAGGTTAAATGGCCTCTATAAAATGTAATTACCCAATGGGTTCTTCCTGCCCACTACACAAA
GACCACAGCTCTGCAGTAAAGAGTTTAACTGACACAAGGCCGGCCACGCCATGTGAGAGACAGAGTTATTACTCAAGTCAGTCTTATCGAAGGC
TTGTGGGCTAGTGGTTTTTCAAAGACAGTTTAGGGGAAGAGGTGGGGGTGGCTAGGAAATGGGTGCTTTCCACTGATTGGTTGAAGCGGAGAAG
AAATCGTAAGGGGTCAAAGCTGTCCTCTTGAGCTGATTCACTTATAGGTGGGGCCCTAAGGGTGATTTGGCAGGTCCGGGTGAAGCCATCTGGT
ACAAGTGGAGCCAACCATGTCAGACATGCAAAAAACCTGAAAACATATCTCAAAAGGCCAATCTGCAATAGTGATGTTATCTGCAGGAGTAATT
GGGGAATTTGCATATCTTGTGACCAGCCTACACCTTAGCAGAATTCAGGCTCCTCTCCTCCCCATAGACTGGGGCTCTCTCATGGCTTTACAAA
GGTGGTTGACTTTTGGGGAGGGGCTATTATCATTTAAACCATAACCTAAAAGTCTTCCAAAGTTATCTTGGCCTCAGCCCAGGAGTAATTAAGG
CAGCTTGACCACTAAAGGTAAGAGCAGAGATGGCTAAATCAGATCTCCTTCACTGCCATAATTTTCTCACTGATACAATTTTTGCAAAGGCATT
TTCACCCACTACCCAACTGTGTCATTGTAGCATGAAGGCAGCCATAGAAAGGAATAGGCATGACTGTTCCAGTGGAACTTTATGAATTAACACT
GAAATGGAAATGTCATACAATTGTGACATGTCACAGAATATTTCATTTTTAATTGTTTTCAACTATTCAAAAATGTCAAAATCATTTTTAGCTT
GGTGGTGGACTGGATTTGGTCCAGAGCAGTAGTTTGCCTGCCTCTGTTATAGAGTAACACATCTGAGCCCATGAGAGAATTGATCCTGTACCTT
GGGTAATGCTCTTCCTCTCTGGCTCCTTTCTACACCTCAGTCACTTTTCCCCTGCAAGAGTGTTGTCACATTAGACTGTAAAATTGGATCACTT
TTATATTTCATCTCTAACATGCCTTATTTAATAAAAGTCATTCTAGGTATGACTAAAGTTCCAGGGCTAACTTAGAAAAGGACTGAAGAGAAGA
ATTCCTTCTGACAAATGCGGACCCAGCCACAAATGCCAGTGATATTGTCCCAAGTATTGGTGGCTTGGGTTGCACTTGATAACAGAGGGCAAAA
GAAAGTATAAATTTTGCTTGTTAACATAGCTTTAGTGGAAAATACAGAAAATGCCCCCAAACTCCATGCTAAGATCATGAACTAAACTGTTACA
ATGAAAGGAATTACTTGGGTTTCTATAAAAACAGCTGCCTCAAGGAATTTGCCACATTCCTTGGGTCTGCCTGAGCTCTGGTGGCCCACTGCTT
GGATAGGCCTGGTTTGTTTGCTAACTTAACATGCTTGCTTAACGGCCAAACATTCCCTTGAAATTCAAGGACTTTCTGTCCCGCTGACACTGTT
TATTTGTATCAGTAGAGTGGAGGGCTCTCTGGTGACACTCTAGTTTTTTCTGGGTTATAAGCAGATGCAGGTCTGTAGTTTTTCTGACTTGGAT
GGGGCCAATGGGTCTAAGCCAAGAGGAAAATGCTTTTTTCTTTTTCGTGTTTATTTCCTTTTTTTTTTTTTTCCTATCTTGATTGGAGTACCCT
TAGAAGGAAAAGGAGAGCCATAATCGTTCTCTGGAGGCCAAAAGAAGGCCGAAGGATGCCAAAAATTGTCACAGTGGTGACTTTTGGCTGGAGC
CAGTGCAGAATGAGGGGCTATGAGTGTGTCACTAGAACTGTAATCCAGATCTCTTCCATGAGGTCAGGAACCCTGATTCGTATTGCTTTTTCCA
TGCTGTAGAACATGACACCCCACTCAATCACTTGTGCTGGTTCATTGTTACTTGTTATAGTAGTCATTGTTATCAAGACTTTTTGGTTGTAAGT
GTCAGAAACCTAACTCAAACAGAGCTAAGCAAAAATAAATCTATAAATAAATATAATTAGCTCAAAAGTCTGAACTCACTGGATTGATCTTCAG
ACATAATTGCATGCAGTGTTCAAGCAGCAGCTACCATCTCTCCTTCCCTTCCTCTCTCTTATCTCTGCTTTCCTCTGTGTTAACATCCTGCTCT
GATAAGCTTTCTCCATGTGGAATGAAAGACGGGCTCCAGCCTTTCCAGGCTCCTAAGTTCCTTGCAGCTCACGGTCCCAGAAGGAAAGAGATTG
TCTCCCAGCATCTGTCTCCATAAAAAGAAGCCACCGTCCTTGCTTGAGTCATGTTCTCACTCTTGGACTTAGCAGAGTCCAGAGGGGCTTGGAT
ACTCTCACTTGGATACTCTCAATACGTGCCAGCAAGGGGCACATATTCACCCTTCATTGGGCAAGGTAAGCCTGTTAACAGTCCCACTCGAATC
ATGGGGAGTAAGCAAAAGGAAGTTCTGAAAATGAAAGAATGTGGGACAGACATAAAACTCAAAGCTGTGCACTATGCTAGTAAATTATTCTTGT
GTACTTAATATGAATATGGCTTTTATAAACAGTAAGCAAATCAGAAGCCACCCTGTGAATCATCAGTTATCTCTAGACATTTCTGGATTCCTTC
TTTATTCCCTGATAATCTTCTTTCCTTCCTTTCACTGCGTTGTAAGTGGAAATAACACAAGCCAAAAAGACCCTCTCCTGCTCTCAATACACAC
ATGGTCTAGTTCAGGAAGACAACATATAAACAGCAGGCATACGAGCAATTTCAGTAGACTGTGATGCCTGCCCAGGGTGCTCGTGGTCTACCTT
TCATGGACCAAAGACAACAGGAATAAGAGCATTCATCTTCCTCTGCTATTGTGAGAATATAGACAGTGCAAAGACTTGGATGCCAGTGCTAACA
TCCCTGCCTGACCTGACTTTGAGAAAAGGACCGCCATTTTCAGCACAACCCACAGGTTCTCTAAATACTCAAAGTGTGAGGCTAGCAGATAAAT
TTGGCTTATAGAGGGAGCTTCATACCATGGTTAGAACACAGCAAGAAAGGAACAAATTTTTAATGTATTAATTGAAAATCAGATTTCTCAGCTG
GGAAGAAGATATTAGCTGGAACACACACAAAAAAGTATTTTTAAAGGTGCCCTTTTAAAGGCTGCCAAAACTCACCCAAAGTAGTATTCAAATA
TGAAGACAGATGTCTTTTCAAGACGGGAAATTTTAGTTCCGAGTATGAAAGAGAATTTTATTTATTTGTTTTTTCCCTTGCCTTTTCAGGCTTT
TCACTGACTTCGAGGGGATGAGGGTATGTGTGCTTAAAGTAGATGCCAGAGTGTCTTCTTGGAACTTCAGGTTTCCATGAGTAGAAGGAAGTGT
TGAATGAATGAGGACCCACGGCCCTGTCCAGTGTGGACATGCCATAACCCTGTGCTGAGCTTCCTCATCTGTGTTCTGGGCTTACATTGAATAT
GGCATAAGCAACCCCGAAGAGCCACAAAACTCTGCTCTGTTAAGGGAGGAGGGCAAGTCCTCCCTGGAAGGGGTTGTCTCATCAACCAGGAAAT
GGTGGTCAGGATGGATACAGTAGCATCTATACCTCAGCCCCCTTGAAGTATCCTGATGTCCACTCCCCACAAAATCTAGGCCTTCCATAGGAAG
TCAAGAGGATATTGTGCTGATATAAATTTGGACCACCAGTGAGTTTGCCCTCAGACCTGGTAAGAAGTGCATATTTCAGATATAAGATATTGCT
CTGGCCTCAGCTACATACAGTTTCCATAAAGGAAAACTTTGAAGGACTGCCTGCAGGAAAAGAATAGCCTCGTGTTGATGTATCTAGGGACAGA
ACTCTCAGGCAGGACAACAGCTTCCTCAAGTCTTGTGACTACACTCTTTTTCCCAAGATATCTCATTGCATCTTTAATTTAGCTCCTAATTCAA
AGCCAAGCTCATGGACTGTTTCAAGCTCTGGACCATGAGCTTAGCTCTGAATTAGGAGCTAAATTAAGGATGCAACGAGACATCCTGGGAGAAA
TAGTATAGTCACAAGACTTGAGGAAGCTTTAGTGAAAAGCAGACCCACCCAGCATGTGTAATTCTTCCATGAGGTTTCATCTCACAGTCTGCAT
GTCTTGCAAGTGGGCTTAGGGCCACAGGGGCAGGAGCTCTTGGTACTCAGAATGTTGTCTAGAAGTTTGGAGGAGAGAGATCCCTTCCAACCTA
GGTCAAAAGGCAGAACTGGTAAAGGACTTGCAGACATGATAACTTTGAGCACAATATCTGAGAGAGCAATCCATGGAAGTCATTTGAGGAAGAG
CATTGTAGACAACAGGAATAGCAAGTTCATAAGCCCTGACCTCAGGAACCTGCCCGGTACATTCAGGAGCATCAAGGAGACCATACTGGCCAAA
TGGCACAAGTGTGAGGAAAGTGTTGGTAGGAGGTGATTTCAGAGGGATGCCTGGAGGCCAGATCCTGGAGAGTCTTGTAGGTCATTGTATAACT
TTGACTTTTACTTTGAATGAGATGGTAAGCACTTATGAGCAGAAAAGTGTATGATTTAACTTACGTTCTAAAAGAAGTATTCTGGCTCCTGTAT
TAAAAATAAACTGAAGGGCAAGGAGAGAGGTGGAGAGACCCATTGGGAGGCTAACGCAGACATTTATCCAGGCAAATATCACTTAGACCTCGGT
GGTGCAAGTAAGGAAAATGAGAGGAAATTGCATTTATAAAAATCTCATTTAAAGATAGAGTCAACAGGATTCATCATTGGATTGGATTGGAGTA
AATGAGAGAGAGAGGGAAATCAAGGATGATTCAAAGTTGGTTTTGTTTTTTTTTTTGTTTTTTTTTTTTATCTTGAGCAACTGGAGAGATGGAG
ACAACATTTTAAATTACTTTGTTCTTTGGTAACATGGCAGTAAACACACTTATAAACTGTATTACAGGTGGCAATCAAAATAAGCACCTGGCTG
ATTTGAAATATGGTTTAAAAAAAATTACAAAGTAAGGAAGATGAACTTGTATTGTTCTGCCCATGCAAACAATCTGTAAAACTGTGTGCATTTA
TATATTTTTCAGTCATTAATATTTACAGCGGGAGAGAACTGTTTGTGAAATCATGAATTATCTTTTGTTTGAATTTTATTTTATTAATGAGTTA
GAAGTACCTTTGTAAGCCATTGTACCTTTTTTCTAAAGGTGAGAGCCTAAAACTACCATGTTGCAATGGAATAAGCCCTGGTTCTAGCTTCACG
CCCTGGGAGTGACTTCTATTAGCTTTGGAATCTCCGGTAACTCCTTTAATCCTTTGAATTCTCACTTTCTATGTCTTAAAGGTGATGGCTGCCC
ATTTCATCAACTGTGAAATGGCATCCAAGTCCCAGGTATCGTTAAGAACCAACGGCTTCCATTTTAAACAGAAGTTTTGTTAAACAAATATTTG
GTTTTACAAGGGTATTATAATTCATACCCTTATTCATTGTTCTTCCTTGCTCCCAATAGTCGATGGGTTTTTTTTTTAGCTGTGGCTTATGTGA
TCAAAGAGGTGAAACAAGTTAGCTCAATTGGTTATATTCTGAAATTAATAAGGTGTTCTTTTTGCATGTGTATACAAATTAACTTCCCTCTGTT
TCTTGGCCACACACCTCACCTCAGCTTCACAAATGAGTAGAATTGATTACAACATGAATCAGACAAGAGAGTGTAGATCTATCACTGTTATTGA
GAAAGCAGTTCAAAAAACAAGCATTCCCGCATGTTAGTAACATGTTTTTATAAAAGCTGTAAATGTATATTTATTCATATGATTTAATATTTTT
TATCTTCAGTTTTTATTTTAAGTTCAGGGGTACATGTACAGGATGTGCAGGTTAGTTACACAGGTAAACATGTGCCGTGGTGGTTTGCTGCACA
GATCCTCCCATCATGTAGGTATTAAGCCCAGCATCCATTAGCTATTCTTCCTGGTGCCCACCCTCCCCTGAACCCCCTCCCCTGACAGGCTCCA
GTGTGTGTTGGTCCCTGCAATGTGTCCACGCGTTCTCATCATTCAGCTCCCACTAATAAGTGAAAACATGTAGTGTTTGGTTTTCTGTTCCTGC
ATTAATTCGCTGGGGATAATGGCTTTCAGCTCCATCCATGTCCCTGAAGAAGACATGATCTCGTTTTTTTATGGCTGCATAGTATTCCATGGTG
TATACGTACCACATTTTCTTTATCCAGTCTATTATTAATGGGCATTTGGCTTGATTCCATGTATTTGCTATTGTGAATAGTGCTGCAATAAACA
TATGTGTGCATGTATCTTTATAATAGAATGGTTTATATTCCTTTGGGTATATACTCGGTAAGGGAATTGCTGGGTCAAGTGGTATTTCTGCCTC
TGGGTCTTTGAGGAATTGCCACACTGTCTTCCATAGTGGTTGAACTAATTTACACTCCCACCAACAGCATAAAAGCCTTCCTTTTTCTCTGCAA
CCTCACTAGAGTCAGTAATATTTCTTCAAATATGAAGGACTTGACCTCAGATCCTTTATGATGATCATAAATACATAAATAGATAAGTTAAAAA
ATAGGAAGGACAGTGTGATACTAAATAACTACAAAATTAGAGATGTATCAAAAAGTATTTAGGCACTAAAATAGTTGAGAGATCATTTTCAGAG
CCTCCAAGAGTTTCTATGCCTTGAATTATTTGAGCATCCAGTGCAAGCTTTCAGAGTCCTTGCTTCCTTAAATATAAAACAAGAAGTCAGATAC
CTTTGCCTCTGACTTCTCAGAGGTCTTTGAGCTTGACAGTTCTATAATTCTATGAGTTTTCTACCTAGAAACTATTCCTTCCATTCAGTTAGGA
AATATATTCAAGTATATTTTATTTAATCTTAAACTTTGGAATCCCATTTTGGTAAGCTGCTGTTATTTGAAGGTGTTGACGTATCCTCTGGGAT
CTGAGAAAATTATTATCAAAACCAATTAAAGGAATCATCTATTTTGTGCGATTGGTTTTGAAATCTGTCCAGTGGGCTCTTTCTGGAGGCAAGG
ATCCTGGTTACCAAGAGACTTTGCTGCAAATAAGGCAAACTGGGATGACATTTGGGGTTGGGATCCTTCTCAGGACCAAATGGGCACCCATCAT
CTTTGGGTCTAGAAGACTGCACTGGCATAAAGCAGCTGACTTCCTGTAGCCTTGCAGAAATAACAATGGGGTGTGTGTGTGTGTGTGTAGTGTG
TGTAGTGTGTGCAGTGTGTGTGTGTGTGTGTGTGTACAATGGTGGGGAACAGTTGGCAGAGCAATGAGCAAGAAATGGGAAACGACACTCAGAA
AAGCAGCAACCTACCCTGAGCAAATCAAAGAATTTCTTAGAATGCAACACTAGCTGTGTGTATGAATAATTGGCTTGCAAATCACTTCCTCTAT
TTGCTTGTTATATAATACCAATCATTTCAGTGTCACTGACGAAAGCCCAGAAGGGAATTACCACTTACCAGCCAGTTTTACATATGGCTTTTGT
GAGGAATAAGGCCTTGAGGATGAGGGTCTAAATCTCTGGCCCACAGATCTGGACAGGCAGATTTCAAGCTGATCATTACATATCTTTTGAGAGA
GACAATCCCAGACGAATTGGCCTGGGGGGCAACATGAGAAGGCAAGACAAAAGAACATTGTAAAGACTTCACCTAGAATCCAAATTGTAGTTCT
CTCAGCAAGTTATCAAGAAGCAAATTAACTGCTAGATTTTGTAATCCAAAGATTATTTAATCTGTTTAGCTTTGTGTTGGAAGGATCGCTACTA
ATCATCTCTTTTATTAAAATATGATAATGATAGCCATCCTTTATTAAGTGCTTATGATATACCAGGCACTTTGTATACATGATTTGCCTTATTC
AGAATAACCCTGAAGGATCAATATTATTGTCTCCATATCAAAGAGAGGGAAACTAAGGCATACAAAAGTTATTTGCTCAAGGTCAAACAGCATG
GTAAGAGGAACTGCAATTTCATTCCAGGTCTTACGGATACCAAGTCCGATGCCTGCCAGCTTGCACCTGTTAAGTCATGTGATACTTAGGAAAT
GTACACATCACCCCAGTGCAGAGGCCTTTATCCACTTCCCTTCATTTTGCCTGGATTGTTGCTGTGAGTGAGAAATAAATGACATGAAATGATC
ATGTATATCACTGTCTTCAGAGGATGGTTAGTTCCTTGCTCTGGATTGTTTTTCTCTTTTGTTGGATATTTATTTTGACTTCTCTGCAAACTAA
AAATATGCATGCTCTAGTTTCTCTTGGGTACATAACTCCCAATATATTGTGAAGAATGAAACTGGCCTACAAAGTTTAATTAAGAAGCAGTGAA
CTAGAGCTTACTTAGACAATACTTGTACTAGTGTGGGTTCATGTTGTCCATTTGTCTTTAGAGGTGTAGAACCTTGAAAGTCAGCTAATTAATC
ACTATTACTGTTGTGTACAGTATTGGCAATCTCCTATGCTAAAATTTTTTGTGATGATTTGAAGGTGGGAGGGGGCAATATTTACTAAGTCTCT
CAACCTACATGGCAATATCTGAAACCTGCTTATAATGTAGTAATAGCTTAGGCACCACCTATTTCTGAAACATAAATCATCCCACAATATAAGC
CTCCCAGTTTTATTCATGCGTCTTACCATGTATAAATATCTTTTAATATACCATTTATTTCCTTGAGGGACAGTTATTTGTAGCATAAATCTGC
CTGGATAAAATAGTAAAAATTGCTATGCCCCAGTGAATTCAGTTTACAAAAGCTTACATACGTGAATGAGACATTGGAAATGTGGTTTATAGTT
AAGGAGAATGGATCACACGGATTATACCTGTATAACTTCCCTAGAAGGTTGATACCACTAAGATATTAACACCAAAAAACTGAAAATAGTATTT
TTCATCTTACTTTGTTATGTACCCTTTGTGAATTTCTGAAAAACACCTTTCTATTATGATGGGATAAATTACGGTGTGGTAACAAACAAGCCCA
ACCTGTTTGTTCCGGTCAACTAGTTGCTTTATAACAAACCACCCCAAAATTTGTTTAAAACAGCTATCATTTGATTGTGCTCACAAGTTCTGTG
AGTTAGGAAATAAGACACAACACAGTGGTCTTATGTCTGTTGTGTAATGTCTGGGTTCTCAGCTGTGAACACTCAAATGGCTTGGAAACTGAAA
TCAGCTGGAGGCTTCCTTATTCATATGTTTGGTGCCTGGCTGGGATGACTCAGATTAGTTGGGGCTCTTGACAAAAGCACCTATACATGAACCC
TCTCAGGAGCCTTGGCTCTATGGTGGCTGGATTCTGAGAGGGAGCATGCAGAGAAAAGAATTCCAAGACAATGGATGCTCTAAGAGAAGCTACT
TGGCCTTTTCTGATCTAGTCTTGGTGGTCATGCAGCATCACTTTTGCCACCCAGATCAAAGGGGAAGAGGAGACAGACTCCACCTGTGGATGGG
AGAGTGTCAAATTCACACAGAAGTTGTATGCAAGCTATTCTTGGTCATCTTGCTCATCTATGAAATATACCCTCCTCCATGCATTGACTTACAA
CAAGGGTTTATTTCTTGCTCAAAGTCTGCTGTGAATCTAGGCAATTCTCCAGAGCAGCTGTTCTTTTGTTGGCTTAGCAATCCAAGCTGCTGCT
TCCATCTTACAGCTTTTCCATATCAACTCATGATTCCACAACCATTGCTACGAGGCAAGAGTAGTATGGAGGATCACACACTACTCTTAGAAAC
CACCAGCTGGAAGGGACTTATATCACTCCTGCTTACATTTGATGGCTCACATAGCCATGCCCAAATTCAGTAGAGCAAGCATGGCCCTCCTGTG
TACCCAGAAAGGAAGGAGAGCTAGAAATATTGGTAAATAGCAATATTGTTTACCATAGCCTCAGAGATATTGCCTCGTGGTGAAACCCTATAAT
TCCCCTCAATTCTGATTTTTGCCCTTTATCAAATCATTTTATTCATTCCTTCATCCATCCAACAAAGATGTTTTATATGCCTACTATTAGCAAC
AATCAGTAGCTTGTTCCTGGAGGGAATGCAGCTGCTCCCCGCCAAAACACCATATAATTCACTCTAGAAAACTAAAATTTCAGATGCTTTGTCA
TTGATTATTGTGGGGAGAAAATGTCTCTTTCAGCTCCGACTTTGTCCTGTCTCCTCTAAGGCATGTGAAATAAGATTTTTTTTTCCTATTCTTA
CCTCCTATGGTCCCATTTTATGGTTTTCATGCACTACTGTCAGTCAAATATTTATCATATGTCTTTCAATATCTTTCCAATATTTATCATATAT
CTTTCCCCTTGTAGGCCTTAACTTTATGACCCACTATTAAGCACGCAGCTGTATTTCCAGAAAATGTAGATGGTTTAATTCAATACTGCATGGC
AATTAACTGTCTTATAAATTAAATCATTTTAATCCATCTTAGAGTTATCATGCATAATTAGTCTGACAGCACAATTCTGTTTGTTGTTGTTTTA
AAGGAAATTTAGATATCAAGGCTGCAAAGAATGCGTAAGTCTAGGCAGAAGGCTCTTATTTTCCAAAAGCAGAGCCCATCGTTGCATTTCAACA
ATGACCGCAACAAAAACCATCAGGAGCTGTTTGGGGCCTGTTTGTGCTTTAGTCTTCAATTAGAAAAAAATGTGTTTCTGATGGAAAACCATAG
AACAATCCTCACTCTGTGGTAAGAAAGAATAAAGAGAAAGAAGTGGGCTCTATGATAGACTGAAGCAAGAATACTATTTTAGACTAGGTAGTGG
CCGGGCGTGGTGGCTCACGCCTGTAATCCTAGCACTTTGAGAGGCCAAGGTGGGCGTATCACCTGAGGTTGGGAGTTCGAGACCAGCCTGACCA
ACATGGAGAAACCCTGTCTCTACTAAAAATACAAAATTAGCTGGGCGTCGTGGCGCATGCCTGTAATCCCAGCTACTCAGGCGCACTGGCTCAC
GCCTGTACTTGGGAGGCTGAGGCAGGAGAATCGCTTGAGCCCAGGAGGCAGAGGTTGCAGTGAGCTGAGATTGCGCCATTGCACTCCAGCCTGG
GCAACAAGAGTGAAACTCTGTCTCAGAAAAAAAAAAAAGACTAGGTAGTTATCTTCCTGGGTGGTTTTGGCTATGTAGAAAATCACTCTTACTC
TCGATTAATTTATGTACCAAATCATGCTTTGAAATATCCCACTGAAAAGGTCTAAATTATTGATATCTTGGGTCAAGTTCTGACTTGAAGGCAA
ATAGTAGGAAATACAATGGCATTTATTGGAGGCACACACTACAAATATTGTAGTATCTTTAAGATGTGTTTAAATAAACAAGTAGATGATAAAA
CTATAAATTAGAGTCACTAAGACTCTCTAGCAGAGACCCTTACCTTTTGAAGTGCACCTTAAAATGGCAACAACACTTATCAGAAATTCCATAA
GAAGCTTAGTTGTCTGCTACTCTATTGCAGTATCATATGTGTGAGCTGCATGAAAACTGGATATTATTATTATCAAAGGTTATTATCAAATGGA
GCACAATTTTATTAATAACAATATTATTATTATCAAAGGTTTTAATTTGCTAAAACTATACAGCTTCCTTAGGTCTTCCAAACTAGGTCAGCCA
GTTAACCCTCAGATCTGGAGTACCACATTTGGCTGAGTCAGAAGAAATAAAGATGCTCTCAAAACCACAAACAAAACTGATAATAGACATTCTG
ATAACTTTAACTCCCACAGTAATAAATCTTGGGTCTTTTAAAGTTGGTCAGATGTACACAGAGCTGCTTACTAATTATACTAAAATAGTTACTA
AGCAACTCGACATTTTGATTTCCAAGAATTTCAGATAAAGATTATGAACTTTATTTATTTGGTGCTTTAGAGTCCAAGGCACTATTTTACAGCC
TAAAGCTGTATTTCTCAAGGCCATCTTCTTGCATTCTTCTAAAACTTAAGAGGGATCATCTGTCCTCAAAAATATAAGAAATTCTGTAAATGTG
TATTTTTGTGTATATATATATTTGATATTTAAAATTCTGTATCTATATATACTTCCAAGACCCCTTAGAACTTACACGGTACCTGTAATTTGTT
TCTTTTTTATACTTAAGTACAAGTAATGTTAGTGATACATTTAAAACTAGGAATTACCTTGTTTGCAATATCAAATTTTTGTAAAATATTGAGT
TAAAAAAGTCTCCTAAAATTAAGATTTGAACTATTATAAATGGCTTCAAAGATCCTTTCGTTTCTAAGAGAAGGAAGGAATTAGGATTTATTGT
GCATGTATTTCATACCAGGTGCTCATCTACAGTTATTGAATCCTTGCAACAATCGTATCAGGTAAACGCTGTTATTCTTCTCTTACAGATGAAA
AATCTAAACCTTCTAAAATGAAAGTTTGTCCAAGTTAACATGACCAATTAGGAGAGCTTGGATTCCAACCCAAATCTGTTCAGTATCAAAGCTC
ACTCTCTTCCATCCTTGCCCCTTCTCAGCTCACATAGTAGCTTTCAGAAAACAGTAGCTATCTACCCCAGATAAAATTAAGCCTTTTTTTCCTT
AGGAGAGGCTAGAAACTGAATCTTCTACCCCCTTTATTGGCATCACACAGGCACAAAAATCACCAATTCTCAAAAACCCTATACTCCCAAGTTC
AACCCAAATTGAATGGTTGGAATATTGTTGGTTTGTATGGAATAATTAACCCACATCTAAAAATTAATTATACAAAGTGAAGTGGAGATTGAAG
CAGTTTTCTAGATAATTAAGGCAAAAATAACTGCAATTTTTTTAAAAGACAGTTTGAAATATTTAGAAGGGTAGATTGCAAAATTATCCAACTT
AAGGTAGTCATATTCAGGGAGTTTAGCCAAAACACCTCTGAAGTTCATTGCCTTACAAATGAGTATAAAACTTAAACCTATGATTAATTCCCTG
TTGTTTTTCTATCTGTATTATACATATAAATATATTTTATATATTGTCCTCCTGAGATTTCAAGAGCAATTTTCTTCTAATTCTTCTAATTTCT
TCTATGGATTCACCATAGTGAATCCACCGACACGTCTACCCTGTGACAATCTTGTTCTCCATTTGATTGCATGAAAAATACCATATGAATTTGA
CAAATCATTGGTTTTTTTGTTTGTTTTTCTCTTTTGCTGCATATCATTGCCTATGCTTCTTGAGCACTAGAATATATTTGTGCATGTATAAACC
AAGGCCTTTCTTCTGAAAATTAATAGTACTTTGAATCTCTTCTATATTCTGGTTCTTTTAAACTGTGGTTGTTTTAAGTTTGCCTCTCTTGTTT
TAGGATTTATTCTTTATTTTGAGGCCCTGATTTTTCACAAAACATTTTTCTCAACGAATCCTGAGAACACTGGACAATCATAGCTTTTAGCTAT
CATGAGTCCCATTACCCTTTGGCCTCCAGTTAAGCTCTGTCCTGCAAGACATAAATTGTCTGATTATCAACTCCTACTTTGAGTGAAAAATGGT
TGAATGAAATGAATATGCAGTTCATTTCAACAAAGCAAGAAATTTGCTGTTTAAAATTGTGTTTTTATAATTCTTGAGATGGAAATATAGCAGA
CCTCTGTGAATCTGAGAAGGCATTTCATGCTTCCAGAAATGAGGGGAGAAGTGGCAATGATATTGCTCATGAACAATTGGAAGCAATGATACTA
GAGTATGCAGCAAATCTCAGGGAGATTTCAGTGGTACAGTAACTGGCCTCACAAAAGTGGGATTTATTGCATTAAATCTTTGCTGTCCTTTCTG
GCTGGTTTGATATTTAAGAAATTATTAAACATAAAATTGTATGAGCAGTTACCTATGGTAGGACAAAATGGACTGACCTCTAATGGCTTGGTAG
ATGGGATAATTTTGGGAAGAGAGAGTGGAGCTCAGTTCAGCATCCTACTCTCCTCCTCAACATCATTTCCCATTCTTGGCCCTTGAGTTTAGAT
AGGAGTTGGGCATGTGTGTGTGTGTATGTGTGTGTGTGGTGAAGTGGGTAGATTCCTGTTCCCAACCCAATTAGATAACTCCACTTCCATCTAT
CTTCCTTGCATCTTCTCCAGCTCATTTGCAAAAGAATGAAAGAAGCCTTGCTTCAAAAAGGTTTAGAGGGCTAAATAAGAGCACAAACTGGATT
TTCTGAAAACTGACCTGATTGCCTGGGTAATTAAACTGTCACTCCAGCAAAAGCATTTGTCTCCAAAAAGTACTGAGGTTGTCTTTCATCACTC
TAAGTCTAGACATTCTGAAACCTCCATCCTCTCCTGCAGAGAGAGGAATTAAGTCTCCACATTTCTAAACCATTGACAGTCTGTGGGGTGCCCC
ATTGTGTTCCTGACTTCCTATTCTCAGAAGGAGTTATAACGATGACAATGATGCATGCATGAGACATAGAGGTCCTCCCCAGCCCTCGGTTAGG
AAGTAAGGCAGCCACCCATGTACTGAACACAATAGTGCTTTGGAAAGAGCTCTGTTAAAAGTGAGTCTCAAAAATGTAAAGGCCTTTACGAGAG
GAACTTAATCTCCAGTGTGATAAAACGATGCACACATTACAAGGAGATGGATGTTATGAAAACAATAAGTACACCCAAGAGTACACGTACAAAT
CTGCATTGCAATTGATTTATTTGGATGCCTGTTTCTTCCTACACTATGAGCTCCTTGGGGCCATGAAATTCATTTGTTTTATCTATATATACTC
TCTTTGATATCCCCCACCCTGACAGCTAGTGCAGTCCTTTCTAAATAGTTGTTACTAAATATGTCAAATCAAATGCCTACAAGGACTGGTTGGT
AGAACCAGATTCTGGAAGTGACCAAGCAGGTCTAGCTTCATAAGAATGCCATCATCGTAGATTTGAGGGTCATGATGAAGTTGTACTAGGATTT
ATGGAGGTTCTTTGTCAACCAGTTCACACCACCAGTGACTTAAGGAAACTATATGTCGTCTATTGGGAACAGTCCTGCTTAAAGCAATTAGCAG
GGACAATTAATTTGGAGGGAAGTCTCTCTCCACTCAACAGCATTCAAATACCCTCTGCATTAGCCATGTTTTGAAAAACTCCAATTGCCTGAGT
CACTGATAGACAAACAGAAATGCAGACTATTTTGTATGCAGTTTTATAAAGAAGTTTCTAACCAGAGAAGAAAGGTGTTATTTTGAAATATTAA
GCTCTTAGTTGTTCTTTCATTTCAGTGAACATTTGTTGAGGGCCTGACATGAGCTAGGCACATGGCAAAGTTTTAGAGATGCAAAGGTAAATTA
AGACCCCTGTGTTAATTCTCATGCGGGCAAAGCAAGCACATTTTTTAAGTTGCAATAATGCAACAATGGTGGTGTGTACATAGTAGGGCAAAAG
CATAGAGAAAGCCATGGAAATCCTCAAGCCAAGTTCAAAGAGTCCTCTAATGTATGGCATACCACAACAAGGACCTTCAAAGGGTGCATTTGGT
AAGAAAAGGCAACCTCCAAAGATTCATCCAATCCTAAGGTTTCATAGAGTAGGGACTTCTTCCCTTAGCTGGAAAGGAAAGAAGTCATTTGGTG
TGCAGTAGACATAAATTAGGGGCCGTCCACTTTTTCTTGCAATGATTCATCTAATGGAGGAGCAGACCCTGGAGAGAAACATATCTCTTCTTGT
CTTCATTTTGTTCTTCTTTTATTAAATCACCCGCAGGACAACCGGATGCTCCAGCAATAGATTATAGAAAAAACAGATGGGTATTTCTGTGCAG
TCAGAAGGCTCCTGTGCCCTTTTCCAGCATAAAACGTTTATGAAAATCAATTTTCAGTGCCTGCTGAACCAGGCTGATGTGAGAACTAGCTTTC
CACAGTTCATAATATTCACTCCGGGATGATTTGACAGGGCTGATATTTTATCACGAATACAAAGGAGATGAGCACCATTCTCCTAATATATTCA
TTACTTGTCTCACCACCCTGGTAAATAATATGCATATGGTAATTTGAGAGACACAGTGTTCCCATTGCTCTTTTTTATTCCCAGAACTCTGGCT
GTCTTTTCTAAATGCTGCAAATCAAAGGCAAAGTTACCTCACGCACCTGTAGTCCCAGCTACTCAAGAGACAGAGGCTCTAGACCAGGACTTGA
AGTTCAGCCTGGGCAACACAGTGAGACCCTATGTCTTTAAAAAAAATTGCCTAAAAATTTGGCCAGGTGCGGTGGCCCATGCCTGTAATTGGAG
GAACTTTGGGAGGCCAAGGTGGGCAGATCACTTGAGGCCAGGAGTTTGAGACCATCCTGGCCAACATGGCTAAACCCTGTCTCTACTAAAAATA
CAAAAAAAAAAAAAAATTAGCCAGGCATGGTGGTGTGCACCTGTAATCCCAGCTACTTGGGAGGCTGAGGCATAAGAATCACTTGAACCTGGGA
GGCAGAGGTTGCAGTGAGCCGAGATTGTGCCACTGCTGTATTCCAGTCTGGGTGATAGAGCGAGACTCTGCCTCAAAAAAATTAAATTAAAATT
TAAAATAAAAAATTACTTAAAAATTTGATTTTACATTCCTCCTATTCTCACTTTCTGGTGCCCATACAACACATAAATTACATTCTTCTCTATG
TTTACCTGCATCTCTAGGGAACAAAGCCCCTTTCACTTGTTCTGTTACTATAGAATGTTCTACAATACCCCAATAAAGATTCATTCATTTGTTC
ATTTACAAATATCTATTAAGCACCTACTGTGTGTCAAGCAGTATGCTAAATCTTAAGCATGAAACAAAAGAAAGATAAAAGTATCTGATTCAGG
GACTGGTTGTTCTGTTGTTCTGGGTTTTTTTTTTTTTTTTTTGGAAGCTTGTTGAAAATCTGTGGCATCATACAAAACAAAAAAGAATGCAAAA
CTGGTGCCTTAAATAGAAATGTATTAATAATGAGTGTTAGAGCTAAGAGAAGGCAAAATGTCTACAGAACACATGATTTCAATTAACAACAGTG
AGTAAACGAATGATCTGGAAAAAAATTATGATCGGGCCCATGATTTTTTTTTGTCGTTTTTTAAAAATTTTGTTTGTTTTTCTCATACTCATAT
TATTCTAAGGCCCATTGATTTTAGAAAGAAAATCTGTTTTATAAACTTAGCATATTAAAAG
HUMAN SEQUENCE—mRNA
GGAGGCTGAAATCCCCAGACGCCGGTTTTCTGGGCTGGGCTTTCTGCTTACTCACTCCTTCTCCCTCTTTCTGGATTTTACCGACCGTTCGCGA
AACAGCTTTCCACACAATGGAGCTTCATGTCCTCGTGCAGGAAGTACTCATCGACTGATGTGGCAGACTTTGCTCCCTGACAAAACTAAAGAAC
TCTCCTATTCATGGAGGCGAACACTGAGGATGCTTTCCACATGAACCCTGAAGTGAACTTCTGATACATTTCCTGCAGCAAGAGAAGGCAGCCA
ACATGAAGGAAAATGTGGCATCTGCAACCGTTTTCACTCTGCTACTTTTTCTCAACACCTGCCTTCTGAATGGACAGTTACCTCCTGGAAAACC
TGAGATCTTTAAATGTCGTTCTCCCAATAAGGAAACATTCACCTGCTGGTGGAGGCCTGGGACAGATGGAGGACTTCCTACCAATTATTCACTG
ACTTACCACAGGGAAGGAGAGACACTCATGCATGAATGTCCAGACTACATAACCGGTGGCCCCAACTCCTGCCACTTTGGCAAGCAGTACACCT
CCATGTGGAGGACATACATCATGATGGTCAATGCCACTAACCAGATGGGAAGCAGTTTCTCGGATGAACTTTATGTGGACGTGACTTACATAGT
TCAGCCAGACCCTCCTTTGGAGCTGGCTGTGGAAGTAAAACAGCCAGAAGACAGAAAACCCTACCTGTGGATTAAATGGTCTCCACCTACCCTG
ATTGACTTAAAAACTGGTTGGTTCACGCTCCTGTATGAAATTCGATTAAAACCCGAGAAAGCAGCTGAGTGGGAGATCCATTTTGCTGGGCAGC
AAACAGAGTTTAAGATTCTCAGCCTACATCCAGGACAGAAATACCTTGTCCAGGTTCGCTGCAAACCAGACCATGGATACTGGAGTGCATGGAG
TCCAGCGACCTTCATTCAGATACCTAGTGACTTCACCATGAATGATACAACCGTGTGGATCTCTGTGGCTGTCCTTTCTGCTGTCATCTGTTTG
ATTATTGTCTGGGCAGTGGCTTTGAAGGGCTATAGCATGGTGACCTGCATCTTTCCGCCAGTTCCTGGGCCAAAAATAAAAGGATTTGATGCTC
ATCTGTTGGAGAAGGGCAAGTCTGAAGAACTACTGAGTGCCTTGGGATGCCAAGACTTTCCTCCCACTTCTGACTATGAGGACTTGCTGGTGGA
GTATTTAGAAGTAGATGATAGTGAGGACCAGCATCTAATGTCAGTCCATTCAAAAGAACACCCAAGTCAAGGTATGAAACCCACATACCTGGAT
CCTGACACTGACTCAGGCCGGGGGAGCTGTGACAGCCCTTCCCTTTTGTCTGAAAAGTGTGAGGAACCCCAGGCCAATCCCTCCACATTCTATG
ATCCTGAGGTCATTGAGAAGCCAGAGAATCCTGAAACAACCCACACCTGGGACCCCCAGTGCATAAGCATGGAAGGCAAAATCCCCTATTTTCA
TGCTGGTGGATCCAAATGTTCAACATGGCCCTTACCACAGCCCAGCCAGCACAACCCCAGATCCTCTTACCACAATATTACTGATGTGTGTGAG
CTGGCTGTGGGCCCTGCAGGTGCACCGGCCACTCTGTTGAATGAAGCAGGTAAAGATGCTTTAAAATCCTCTCAAACCATTAAGTCTAGAGAAG
AGGGAAAGGCAACCCAGCAGAGGGAGGTAGAAAGCTTCCATTCTGAGACTGACCAGGATACGCCCTGGCTGCTGCCCCAGGAGAAAACCCCCTT
TGGCTCCGCTAAACCCTTGGATTATGTGGAGATTCACAAGGTCAACAAAGATGGTGCATTATCATTGCTACCAAAACAGAGAGAGAACAGCGGC
AAGCCCAAGAAGCCCGGGACTCCTGAGAACAATAAGGAGTATGCCAAGGTGTCCGGGGTCATGGATAACAACATCCTGGTGTTGGTGCCAGATC
CACATGCTAAAAACGTGGCTTGCTTTGAAGAATCAGCCAAAGAGGCCCCACCATCACTTGAACAGAATCAAGCTGAGAAAGCCCTGGCCAACTT
CACTGCAACATCAAGCAAGTGCAGGCTCCAGCTGGGTGGTTTGGATTACCTGGATCCCGCATGTTTTACACACTCCTTTCACTGATAGCTTGAC
TAATGGAATGATTGGTTAAAATGTGATTTTTCTTCAGGTAACACTACAGAGTACGTGAAATGCTCAAGAATGTAGTCAGACTGACACTACTAAA
GCTCCCAGCTCCTTTCATGCTCCATTTTTAACCACTTGCCTCTTTCTCCAGCAGCTGATTCCAGAACAAATCATTATGTTTCCTAACTGTGATT
TGTAGATTTACTTTTTGCTGTTAGTTATAAAACTATGTGTTCAATGAAATAAAAGCACACTGCTTAGTATTCTTGAGGGACAATGCCAATAGGT
ATATCCTCTGGAAAAGGCTTTCATGATTTGGCATGGGACAGACGGAAATGAAATTGTCAAAATTGTTTACCATAGAAAGATGACAAAAGAAAAT
TTTCCACATAGGAAAATGCCATGAAAATTGCTTTTGAAAAACAACTGCATAACCTTTACACTCCTCGTCCATTTTATTAGGATTACCCAAATAT
AACCATTTAAAGAAAGAATGCATTCCAGAACAAATTGTTTACATAAGTTCCTATACCTTACTGACACATTGCTGATATGCAAGTAAGAAAT
HUMAN SEQUENCE—CODING
ATGAAGGAAAATGTGGCATCTGCAACCGTTTTCACTCTGCTACTTTTTCTCAACACCTGCCTTCTGAATGGACAGTTACCTCCTGGAAAACCTG
AGATCTTTAAATGTCGTTCTCCCAATAAGGAAACATTCACCTGCTGGTGGAGGCCTGGGACAGATGGAGGACTTCCTACCAATTATTCACTGAC
TTACCACAGGGAAGGAGAGACACTCATGCATGAATGTCCAGACTACATAACCGGTGGCCCCAACTCCTGCCACTTTGGCAAGCAGTACACCTCC
ATGTGGAGGACATACATCATGATGGTCAATGCCACTAACCAGATGGGAAGCAGTTTCTCGGATGAACTTTATGTGGACGTGACTTACATAGTTC
AGCCAGACCCTCCTTTGGAGCTGGCTGTGGAAGTAAAACAGCCAGAAGACAGAAAACCCTACCTGTGGATTAAATGGTCTCCACCTACCCTGAT
TGACTTAAAAACTGGTTGGTTCACGCTCCTGTATGAAATTCGATTAAAACCCGAGAAAGCAGCTGAGTGGGAGATCCATTTTGCTGGGCAGCAA
ACAGAGTTTAAGATTCTCAGCCTACATCCAGGACAGAAATACCTTGTCCAGGTTCGCTGCAAACCAGACCATGGATACTGGAGTGCATGGAGTC
CAGCGACCTTCATTCAGATACCTAGTGACTTCACCATGAATGATACAACCGTGTGGATCTCTGTGGCTGTCCTTTCTGCTGTCATCTGTTTGAT
TATTGTCTGGGCAGTGGCTTTGAAGGGCTATAGCATGGTGACCTGCATCTTTCCGCCAGTTCCTGGGCCAAAAATAAAAGGATTTGATGCTCAT
CTGTTGGAGAAGGGCAAGTCTGAAGAACTACTGAGTGCCTTGGGATGCCAAGACTTTCCTCCCACTTCTGACTATGAGGACTTGCTGGTGGAGT
ATTTAGAAGTAGATGATAGTGAGGACCAGCATCTAATGTCAGTCCATTCAAAAGAACACCCAAGTCAAGGTATGAAACCCACATACCTGGATCC
TGACACTGACTCAGGCCGGGGGAGCTGTGACAGCCCTTCCCTTTTGTCTGAAAAGTGTGAGGAACCCCAGGCCAATCCCTCCACATTCTATGAT
CCTGAGGTCATTGAGAAGCCAGAGAATCCTGAAACAACCCACACCTGGGACCCCCAGTGCATAAGCATGGAAGGCAAAATCCCCTATTTTCATG
CTGGTGGATCCAAATGTTCAACATGGCCCTTACCACAGCCCAGCCAGCACAACCCCAGATCCTCTTACCACAATATTACTGATGTGTGTGAGCT
GGCTGTGGGCCCTGCAGGTGCACCGGCCACTCTGTTGAATGAAGCAGGTAAAGATGCTTTAAAATCCTCTCAAACCATTAAGTCTAGAGAAGAG
GGAAAGGCAACCCAGCAGAGGGAGGTAGAAAGCTTCCATTCTGAGACTGACCAGGATACGCCCTGGCTGCTGCCCCAGGAGAAAACCCCCTTTG
GCTCCGCTAAACCCTTGGATTATGTGGAGATTCACAAGGTCAACAAAGATGGTGCATTATCATTGCTACCAAAACAGAGAGAGAACAGCGGCAA
GCCCAAGAAGCCCGGGACTCCTGAGAACAATAAGGAGTATGCCAAGGTGTCCGGGGTCATGGATAACAACATCCTGGTGTTGGTGCCAGATCCA
CATGCTAAAAACGTGGCTTGCTTTGAAGAATCAGCCAAAGAGGCCCCACCATCACTTGAACAGAATCAAGCTGAGAAAGCCCTGGCCAACTTCA
CTGCAACATCAAGCAAGTGCAGGCTCCAGCTGGGTGGTTTGGATTACCTGGATCCCGCATGTTTTACACACTCCTTTCACTGA

[0295] TABLE 31

MOUSE NOMENCLATURE
ICSGNM Top1
Celera mCG15357
HUMAN NOMENCLATURE
MGNC TOP1
Celera hCG38802
MOUSE SEQUENCE—GENOMIC
AGCCAGTCTTGTAAGCCTTTGTTCTTTCTTGGGGCTATGGCCGCTCGGCACTCCTTTGTGGCTTGCTCATAGATGAGCTGTTTTATCAGAGGCG
CAGCTTGCTCTGACTCTCCAAAAATACGCTCTGCTGCCTCTGTCATTTTGGCCACAAAATCTGAGAAGGATTCCTGAGGTCCCTGAACAACTTT
TGTTAATTGACCAGTGGTTTCACCTGCTCGGGAGAGCGCCTTTCAGGCCCTAATAGCCGTGGAAGAAATCTGGGCATAAGCTCCCCAATGGTAG
TTTGTCTGATCAGCAGAATAAGCTCCCTGACCCGTTAACAAATCAAAAGTCCAATCTCTCTGCTCTGGAGTCAAAGCAGCTGCGTTTGCTCGGG
CCTGCGCTTGTGCAGCTTGTGCCAAAGCGCTCTCTATTTCATATATTTGCCCATACTAGGGAGAGCGGCTTTTACAANNNNNNNNNNNNNNNNN
NNNNNNNNNNNNNNNNNNNNNNNNNNNNNNNNNNNNNNNNNNNNNNNNNNNNNNNNNNNNNNNNNNNNNNNNNNNNNNNNNNNNNNNNNNNNNN
NNNNNNTGGTTCCGTATTTACGGACCGACTCGGCAATTTCTTTAATTTGTAAGTATTCTACCGGAAGCGTGGACACGCCCACCCTCGGCTCCTT
CAAAGACTGGAAATGCCTGTTGTATTTTCCTTTGTTCCTCTCTGGGAATGAATGAGTCTGCGCACTGCCTCTCTGCGCACTGCCTCTCTGCGCA
CTGCCTCTCTGCGCATCTCTCTGCGCATTGCCTCTCTGCGCATTGCTGACGCACTACGCAGGGCGGGGGCTCCGCATAGGGCGGACCTTGAAGC
CGACTGCCCTGAGGCCAATCAGCAAACTGGCCTTCGCCAGCCGCTTTTGGCTTCTTTAACTGATTAGCTAGCACTTTACCTGGCTGGTACCCTT
TTTTCTCATAATGAGCTGCTTTTTCCTCCCAGTCTGTTTCCTCAGAGGAGAATTCTTCATCTGCTTCAGAGCTACCAAGAGCTGGCTCCCCGAG
CCCATCTAGCGATGAGCACAGGCTCCTTTTCCTAGAGACCTCCGCTAATTGATCTTTCTTTTTTTCCCTTTTTCCTCTTTTTCTTCTAATCTCT
CTCCAGGTATTCCTACCTAACCTTAACTTTTTCTCGGGTTTAAGACCCTTGGAAAGGCCTGTATACTTATTTTGTGTACCATATTTCCTTTTTG
TTCCTACTCTCTCTCCCCACTTTACTTCTGATAGCTTGTCCTGAATTTCCTCTAGAATTTTTAGCCCTATCTTAATCACTTGATAACATGTGAA
AAGGAACAAAAGGGCTCCTAACACCAGAAAAAATTCAAGGCCAAACATATTTCACTTTACTTCTGATAGACTGTCTTGAATTTCCTTAGAAAGT
TTAAGATCAGACTTACCTCGTAAAGCTGTACTCACTGGTACTCTCGTTCCCCAGCTGAAAAGTTCTGAATTCATACAGTTGAATCCTTCTTAAC
AGTCTGCTTTACGGGAACCTTTATTACCGCGACCCGCAGTTCTGGTTCTGGAATGAGGGATCTTCCTTGCGCCAGTCCCGAGTTTTTTCTCGTC
CCGGGTTTCGGCACCAATTGTTATTAAACGCGTTCTCACGACCGGCCAGGAAGAACACCACAGACCAGAATCTTCTGCGGCAAAACTTTATTGC
TTACATCTTCAGGAGCAAGAGTGTAAGAAGCAAGAGAGAGAGAAAACGAAACCCCGTCCCTTTTTTAGGAGAGTTATATTTCGCCTAGGACGTG
TCACTCCCTGATTGGCTGCAGCCCATCGGCCGAGTTGACGTCACGGGGAAGGCAGAGCACATGGAGTGGAGAACCACCCTCGGCATATGCGCAG
ATTATTTTGTTTACCACTTAGAACACAGCTGTCAGCGCCATCTTGTAACGGCGAATGTGGGCGCGGCTCCCAACAACTTATATGGTATTCTCTC
TCTCTCTTTCTTCCCCAAGGGAGTGTGAGGCTTCTCTTCCTATCACCAGCCTTTCTCTTAAGCCAGTACCTCAGCTGGGTTTGTGTGTCCTCAC
CCACCCCCACCCCCTTTTTTTTTCCAAGACAGGGCTTCTCTGTGTAGCCCTGGCTGTTCTGGAATTCCCTCTGTAGCCCAGGGTGTCCTTGAAC
ACGGAGATCTCCCTGCCTCTGCCTTCTGAGTGCTGGAATTAAAGGTGTGTGCCACCACTACTGGGCTTTTTTTTTTTTTTTTTTTTTTGAGACA
GGGTTTCCTTTATGTACCCCTGGATGTCCTGGAACTTGCTTTGTAGATCAGGCTGGCCTCCAACTCAGAGATCTTGGTAAACTCCACAGAGGGA
GTAGCTACAAATGGGGTGTGAAGAAGAGGACCAAGGATCAACTCAAGAGGATCTAAGGGTTTGAGACTCACAACTGGGCAAGGTCAACAGAAGA
AATAAGGAAGCTCAGGGAGAAAGCAGACCTCAGGACCTGAGGACTGTGATATTATCAAGTAGACCCGAGAGAGAGAGGCTGTCTGTGGGAGTCA
ACTTAGGAACTATAAAGCTACCAAGAGGGAAATCCAGAGAAGACATGCTGTTGATAAGCTGGATGGGTAACCCAGCTCGTTGGATGTTGCCTCA
GAAGTATGAGGACCCGAATCCCCAGAGCCCACGTAGAAGCTGGACGTGGCGGAACACGGAATGCCAGAGCCTCCTCTGCTTCCTGTCTGGCCAT
CCCCTTTCCAGATATCTCACATATGGAGAAGGGCACAGTGACCTAAAGACAGCTTGGGAGATCAGGAAGGTAGTCAGCGTCTGGGCATAAGGGC
TGGCTTAACTTACTTAGCCATCCTTGCCCATAAAAAGAAGGGAGCACTAGAAACCATTCCCAGTGATGAAAAAGACGAAACAAGACAAACTCGC
AGAAGCACATAGCATAGGAAAGAGCTCAAAGTAAGTAGGTAGTTTTGGGGTTTGTTTTATTTGTTGTTAAGACAGAGGTTCACTCCAGTCAGTG
GTGGCGCACGCCTTTAATCCCAGCACTTGGGAGGCAGAGGCAGACAGATTTCTGAGTTCGAGGTCAGCCTGGTCTACAGAGTGAGTTCCAGGAC
AGCCAGGGCTACACAGAGAAACCCTATCTTGAAAAACAACAACAAAAAAAGACAGAGGTTCACTATGTAGCCTTGACTGACCTAGCATTCACTA
TGTAGACCAGGCTGATCTAGAATTAACAGAGATCCTCCTGCGTCTACCTGCCATATCCTGAGATTAAAGTCCTGATGCCTGGTTTCTAAAAACG
TATTTTTAAAGAAGTCAGGAGGGCACCAGGGACAGGAGAGCAAGTGACGCTCCTGCTACAGGGACTTCTGTAGGAAAAGATGTCCCTTGTAATA
ACCAAGCTCCTGGCAGGGACAGAGGAAGGGTAGTAGAAGACTCAGGGGTTTGGAGCAGGGAAACGGGAAAGGTGGTGCTTTCAAAATCTGACCC
TGGCTTAGCGCTATCACCATCTGGTTCAGTGAGGCTCTGGCGCTCTCTCTCTCTCTCTCTCTCTCTCTCTCTCTCTCTCTCTCTCTCTCTCTCT
CCCTCTCTTCCCTCCTTCGTTCCTGAGGAGAAACGCTGAGTCAGCGCAGGGCTTCTCTAGCTCCCAGAATTTTGGGGTGTTTTTCCAGAATCCA
GGGGGCTTGCCCCTCTGCCTTGCGCTGCCTGCTGCTTCTCTGGCCAGAAGCAGTTAGACCCAAACAGCAGCGGGATAATGACCTCCTGACAGCA
TACCCTTTGAGGAGAGTCAGCAAAGGCTGCTGTCACACCCAACCACTCTGTTCCAATCTAGATGGGTCAAAGTCCTCTGTCTCTTTTATAACTC
ACATCTCCATCCCCATTCCAACTAGCCTGCTATGGTCAGTATGTCTCCCAGCTAGCCTCCCCTTCTCCATTGTCAGCTCCCCGGGACTGTCCGC
TGTCCATTCTCTGGTACTCAATGGTTTTCAGATATCATTTAAACCTAGCTCACCTTGCTGTAGCTCCACGGTTATGGGAAGGGCCTTCCCACTT
TCCCAGCCTCAATCTATGCCACAGCCTTACACTGACTTCATCTGTCATCATGATCTAAAGTCATTTATGCCCATAGCTCTCTGCCTTGGCCATT
TGCCAGCTTTTCTTGTACTATCTTCTCTTCCTCAGATATTCCATTCCTCATCTCTCAAAAAATGACACGGAACTGGAAGGTTCCCCCCACCCCC
ATATTGTCCCTCCAAAATTTCCTAATGAGTTGGATGTGCCTCCATTGCAGAGTTTCCATAGTAATTGGTAGTTTGTCACCTCTCCCCTTATTGT
TCCTTGTATCTTAGGGTAACAGTTGAGGAATGTGACTTTCTCATTATTAGACTGAGAGTTTTTCCAAAATGAAGATCAGATCTTGTTTGTATCT
GTATTTACACAGCTTAGCATAGGACCTATCTACCTCATACTATCAACTAGTCTCACATTCCTTGGGGAGTAATGGTGGAATGAGTAAATAATCT
TATCACAACAGGGGTGTCTTGTGGAAGGAAGACAACAGAGGGTTTGGCCTGTAATCTCAGTACTTTGGGTGGTTGAGGCAGGATGAGAAAGATA
ATGGAAACACACAAATAGACCCCCTCCCACCCCGCCCTCCCACCCCCCAACCCCCAGCCACACGGCAGGCTCCTAAATCTCAGCTACTCATTCT
GCTATTCAAGGCTTGGGTCTTTCCCACCGGCCTTTCCTTTTATTCAGACAATTTTCAACTTTTGCTGAGCAGCTGCTGTAGCAGCAAAAGGCAG
CAGGACATTTCTGGTTGCTGGGATCAACAGCATGAACGTTTTCCATGGATCACCAAGCAGGTTCTATTTTGAGAGTGTCCAACTCTTAACAGGG
CATTAGATCTCTAGGCAAGGCATTATGGCAAGGGGAAAACTGCCAGAAAACTGTAGTCAGGAAAGCAGTGAAGCCAAGACTAGGAGACCACTAG
GAGTGCATGCCAGTAGTAAATCCAGCACTTAGGAGATTCAGGGCAAATGATCCAGAGTTCAAGTTTGGCCTCAGCTATATAATGAGTTCAAGCC
CAACCTGGGCTTCATGAAACCCTATCTCAAAGTTACAAAGTAAAAGTTACAAAGTAGCCGGGTGTGGTGGCGCACGCCTTTAATCCCAGCACTC
AGGAGGCAGAGGCAGGCGGATTTCTGAGTTCGAGGCCAGCCTGGTCTACAAAGTGAGTTCCAGGACAGCCAGAGCCATACAGAGAAACCCTGTC
TCGAAAAAACAAACAAAAAACAAACTTACAAAGCTAGTAAAAACAAATATATTTTAAAAACTGTTAGGAGGGATATCTGGGTCCTGAACCATGA
AAATCCCAGAGTGGAACAAAAGTATAGCCAAGGCCTTGAGATTCCCTGGCTTGAAACCAGATGGAAGTTGAACATCAGTCACATGACCCAACAT
AGCTTTCAGAAGCAAAAGGAGCAATGTATTTAAGTGTACCACAAAGGTATCTCACATTGCAATGAGGCAGAATTCACAGACCTGAACTTCATTA
AGGTCTTCTCTCTGCCTGTTAGCACTCTCCTGCCCTCTCCCCTCAACCTCTCCCAGCTTCCCCTGGCCTTGACAAAATGCTGCTCCTTGACGTG
ACATAGTACAGATCTATTAGCAAGAAGAACAACCACGTTACTTTCTTCTCAATTCTAAAGCCTCTAGAAATTCCATCTGAGTGGTTCAGTGTAG
GCCACTTGTGACAACTGTCAAAGAGGAACCACAGCACATTTGTGGCTGTGCATATGGTCCCTCCAGAACCTTGTGAGTCTGGGGGAAAGTCCTA
GGAAAGCAGGAGTTGTTCAGGCATCATCACAAGTGTTTAATTCTGGAAGACAACAGTTAGACCAGACTTTAATAAAACCTGCCTGTAGCAGCCA
GTGTCCTGAGTCCATTCATTCCAAAGGAGCCCAAGCCTTAAGCAGCAGATAGGAGATGGGGGTGAGGAGAGGGGAAAGAGGAGAGAAGAAAGAA
GAGAGGGGGGGGAAAAGATTTTTCTAGGCTTAAAGATATTTTGGAGGGATGGTGCTGGTGCATGCCTTCAGTCCCAACACCGAGAAGGCAGAAG
GCAGAGGCAGAGGCAGAGGCAGAGGCAGAGGCAGAGGCAGAGGCAGAGGCAGAGGCAGAGGCAGAGGCAGAGGCAGAGGCAGAGGCAGAGGCAG
AGGCAGAGGCAGAGGCAGAGGCGCAGAGGCAGAGGCTCAGAGGCAGAGGCAGGCAAATCTCTGAGTCTGAGGATAGCCGGGTCCATAGACTAAC
TCAAAACAAATAAACAAACAAACGAATCTCCAAAAGAACCCAACCCCCCAAGGGAATAAAAAGAAAGAAGAGGAGGAGAAAAGAAGGAAAAAGA
GAGACAGACAGAGAGAGAGACACACACAGAGACAGAGACAGAGAGACAGAGAGATCCTGTTTAAGCAGGAGCTGGAGAGCTAGCTCAGTAGTTT
AGAGCATGGCTACTCTTCAAGAGAACCCAGGCTCAATTCCACCACAACTGTTTGTAATTCCAGTTCCAGGGGATCTGGCACCCCTCACACAGAT
ATGCAGGCAGGCAAAACACCAATGCATGCAAAACATAAGGAAATTTTTAAAAAGTATTTTGGAGACACTGCAGACTTAAGCACCATACAGGTAT
CAGCATATTGAAGATTCTAAACAGGACACCAAGAAAAGCTCTGTTTAACTTTAAATCATAATGATGTATGTATTTGTGTGTGGAGTGCTCCTTT
TTTGCGTAACATCTACAAATCATCCGCCTTTTACCAGTCATGCTCTGGAGACAGGCATACATCATCATCTAGTTACTTTATAAAGGCTGAGGTG
ATCCGTCAGTGAATAGTCTTGAATTAAAACAGTATTTTCCATACCTGATATATTTGCTTTTGACCTTCCTGGAGTATGTCTTATATTCCCTCTC
TGTACTATTCTTGGATTTTTTTAAAAAATAAAAGCAGTCTCATTATGTAACCCTGGTTAACCTGAAACTCACTATGCTAGGCTGGCCTCAAACT
CACAAAGATCCCTTTGTTTCTGCCTGTGGAGTAGTGAGTTAATTAAAGGTATGGGCTACCACACCCAGCTGAATATTTTTATTTAAAATTAATC
ACCCAACATCTTAAAAAAAAACCCTTGAACTTAAACAGTTATTACTGTGGGTTTTATGTGGTAGTTAAGTGTTTTCCGTCATACACATTGAAAT
AGATATAAAGCAGTAAAAAATGTAAAAGTCTGTCTGTGTGGGGCCAAAAGTCCTCTCAAGTGCTTATGACCATGTGTGGGATCATTGGTTGGAG
AAGAAAGAGTGGCCATGTGGACATCACTAGCCAAACATAGATAGAGGCGTTTAGTCTATGGTGGGATGTTGGGTGGCCATGATTGGGCCTAGGA
TACCACCTTTGATTCATCATCCTGGGGCCTGCATTCTGTTTCCATGACTACTAGCTGGTCTTCCTGGGAGGGACCTGGAAAGCAAATGACGATG
ATCCCAAGTCACCAGGGGCTGGAAGCTAAAGCAGAGGCACTATTTTTCTTGAAGGCTGAATTATTTCAGCCTAACTGCAGTAAATGGGTGGGAG
GCAGATGCTTTGCTTGGTGGCCTGGGATTGCTTTTGACATGGGAAAGCGGCTATTGAGGAGACACTAATGCAGGCAAAACTGGCTCTGGCATAC
AGCTGTGGAGAAAGAGTGCTGGAATCAGGCAGACCTAAACATCAAATGATACATATTATCTACAGGCCCTTAAACAAAGTCTTTTTGTTTGTTT
GGGATTGTCTATTAAACACAATTATCGCTGTTGTCCCGTTGTCCAGATGAAGAAACTGGGACTCAGAGTGGTTAAACAACTTGTTCAAGGTCAT
GGAAGAATAGGAAAATTCTGCTTAGGAAAGCAGAATTGAAAAATAGGCCAGTTGACTTCCAAGTGTGGACTCTTAGCCACTGCATTGTTGTGTT
TGCCTTTGTTGATTGGACTCTTCTGTCAGAGGACCTGTTGATTCCTGGGGGCTAAGTGCTGAACAAGATGGAGAGGTCCTAACCCTCACTGACC
TCGAATTATATAAAGGAGACAGAAAAGAAGTCACTAGCTCCCATATGGGTAACTTAACAACTGTGATAACTGTTATAAAGGAGAGAGGCACATG
GGTACAGCATGCGGAAAGGGGCGTGCAGCACTTCAAGCTTGGTTTTTCGGGACAGTTTCTCTAAGTAGCCCTGGTTGTCCTGGAACTCACTCTG
TAGATCAGGCTGGCCTCGAACTCAGAAATCCGCCTGCCTCTGCCTCTCAACTGTTGGGATTAAAGGCGTATGCCACCACTGCCCAGCTGGCTTG
AGTTTTGAAATATTCACAAGAATTAACCCTAAGTGTTTATCACTCAATGTTTATGAACATTTTCCGAATTTATTTATATGGGGGATTGAGCCAG
ACTGGAGATGAATTCAGCCTGGGATGTTCTTGCAAATCCAATTGCTAATGTCATTAATCCCTCAAGACAGTTTGATAGTGGTCGATGGTCCACA
CCCAGGACTGTGAGGAGTCAGGCAGACCTTATAGTATGGTGTTCCCTAAATAANNNNNNNNNNNNNNNNNNNNNNNNNNNNNNNNNNNNNNNNN
NNNNNNNNNNNNNNNNNNNNNNNNNNNNNNNNNNNNNNNNNNNNNNNNNNNNNNNNNNNNNNNNNNNNNNNNNNNNNNNNNNNNNNNNNNNNNN
NNNNNNNNNNNNNNNNNNNNNNNNNNNNNNNNNNNNNNNNNNNNNNNNNNNNNNNNNNNNNNNNNNNNNNNNNNNNNNNNNNNNNNNNNNNNNN
NNNNNNNNNNNNNNNNNNNNNNNNNNNNNNNNNNNNNNNNNNNNNNNNNNNNNNNNNNNNNNNNNNNNNNNNNTTGGAATATTAGCCCTCTCAC
ATCAAACTAATTCCTGTCTCACAGTAGGCGCTTAATAAATGTTTATAAAAAGAACAAATGCAGTAGGGTACTTGTGACACAGGGCTACATGACT
GTAAACTGGAGCTAAACCTGACTGAAAAATTAAAATAATTTTTAAAAATGGGTGTGAAGTGCTGGGCGGTGGTGGCGCACGCCTTCAATCCCAG
CACGTGGGAGGCAGAGGCAGGAGGATTTCTGAGTTCGAGGCCAGCCTGGTCTACTGAGTGAGTTCCAGGACAGTCAGGGCTACACAGAGAAACC
CTGTCTCGAACACCCCCCCCCCTACAAAAAAAAAGAATAAATAATAAATAAATGGATGTGAAGTATTCCAGAAGTCTGGACAAAGGCTGTGAGG
AGACTCCAGCTAAATGCCTTACGGCTGCTGGTGAACTAAGATCGGGGCAGCCAAGGTACGTGCGGATCAAACTTGTCTGGCTCTAGAGATGCAG
AAGCTGGAGACACGGTCCCTGGCCAGCTTAGCTGGGTCCCGCCGCGGCCTTTAAAGGCCTACCACGTGGCCGCCCGGGTGTCCAAGGTCCAGAG
GCGGTGTCCACGCTGCGCCTGCGTGCTGCTAGAGCCGGTGTCCCGCCTCTGAGAACGCCAGTCCCGTAGCAAGGCAGAAAGCAGAGAGTGGGCG
GAGTTAAGTCCGTATGCTAATAAAGGGGCGGAACTTGCGAGGCAAAACCGGCTCTGTCTCCCGGACCTCTAAGAGACCCGCCGCAACCCTCAGC
CTCTTTCCACGAGCGCTGACGTCGACGACGACGTCCCATTTAAAAGCGGCCGCGCAGGCGCAGTGAGGGGAAATGCGAACTTAGGCTGTTACAC
AACTGCTGGGGTCTGTTCTCGCTGTCCGCCCGCCCGGCAGTCTGTCAGTCGCGTCGCTACCGCCGCTGCCTCCTCCACTGTCCCGGGAGTCTCG
GGCCGGTGGCTGCTGTCGCCGTCTGTTCGTGCTTCTCAGGAGCTTCGTCCGCCCGTTCAGGCCGTCCCTGCCGTCCGCCTCTCTTCCCCCGCGC
TGCCTCTGAGCCCGCAGCGTTCGCACGCCGGCCGACATGAGCGGGGACCATCTCCACAACGATTCCCAGGTGCGACCAGCCGGCCCCCGACTCG
TCCCCAGCTGCTCGGGCCCGGGCCGGCTCCGGCCCCGGCCAGGGCCCCGGTCCCAGCCCCAGCCGGCCGCGCCGGGTTGACAGGCCCGAGTCTG
CGATGAGGGGCGGCCGGTTGGAGTCGCTTGGATGGCCGGGTCCCGGGCGGAGCCGTCAAGTTGGAGTTTGGTGGGGGGATGGCAGCCCCGGGTA
GGCCATTCGCGGGCCTCTGGGTTCCGGGGCGCCGGGTGGGCCCGAGCCCCGGCCCCCGGCCGCGCGCTCTCGTCCGCCGCCCCGGGGCTTCATG
TGCCGGTTGTTTCATCTTCCCTCTTTTCTTTCCTCAGATCGAAGCGGATTTCCGATTGAATGGTGAGTGTGCCCCCCGCCCCGCCCCAAGTGTC
CCCACACGCCGCTGCCTGCCTCCCCCGCGCCGGGCCGGAGCCGGGCAGAGGACAGACATGGCGTCCCAGAGACTAAGTCCCGGCTCCTCGCTCA
CCGGCCCCATTGTTCCCATCGGGCCGCCTCTGGACCCCCTTTCCCGGGGTCTCAGCACCCCCAGATCACGGCCTTCTCCAGAGGGGGCACCGGA
GACCCCGCGTCGACCGTCGCTGGGTCTCGGGCGGCCTTTCTCCGCCGGGATTCTTCCCGGGAAAGTCGCCTTGTCGACGGTCGGGACTTAGTCT
CTGCGCCATTTTCTTTTTCTCTCTCCTCTCCTTTCTGTGCCTGTGTCTTTCTCTCCCTCCCTCAGCTCCTTCCTTGAGCTGTCCAGAAAGAGCT
TTCTGCAGAGCAGAGCCATATAAATCACAGACCTCACCAAAGAAGGAAGGCTTAGGGACGGAATTATCTTTTATTTTTTCTTAATAGAACTTTA
TTTTGGAAGTTACTTGCTTTCTGCTTCATGTTTGCTTGCTTTCTTCTTCTTTTTTAATTTTTGTGATTCCAGAACGAAAGATTCCCTTAGGCAG
CTAAGGGTTTTATGGGTTTTTTTTGTTTCTTTTGTTTTTTGTTTTTAGTCCTTTTATTTTTTAAATGGTGAGATGTTTATAATAGCAGTTACAG
TTCTTGAAACTAAAGCCATCTTTTGTGGAGTTCTTTGTATTTTGGGATTGTTTTCCCAAGTTGTGCTGTTTGCAAAGATAACTCCCTTTAAAAA
AGTTTTCAGGTTGTCTGTGTGTCATCTAGTGTGAGTGTTGGACTTGAGCATATATTCTTTAAAAAAAATTAAAAGTATTAGTGACCAGAACTTC
CTATTGTGGCAAGGTAGAGTTTTTTGTTTTTTGGGTTATTTTTGAGACACAGTTTATTGTGCTTGTTCCGAAAGGTTGCTGAATTGCTCATTTA
GACATGGTGTGCTGGCCTTTTCTTTGGGGTCATAGGGAGTTTTAAAAAAGATTTTATTTATTGAAGTAGAGTGGCCAGCCCTGACTCCTGTCTT
CTTCCTCATTCTTCTCAGGGGCTGCTATTTTTTTCAGGAATTAAGAGTTAACTGGCTTTCCTCACATCCTTAGGCTCTTGAGCCCTTTCCAGTC
ATGTTTTCAAAATATTTCCACTAAAGTTACCCAGGGAAGAATGTTGGTGGGTGTCTCCCACCACCCCAGTAAGAAGCTCACATTTAATGGATTT
TCCAGCAATTCCATTGTAGTATGCTGGAAATTCCCACAGATTCTTATGGGTCCGATTGTGTTCAGTTAGTTTGGGTTCTGGGGAACTGAGTGGG
AGAAGCCATTGAGTAGGTTTTCTGGTGCAGCAGTCCATGGTACTGGCCTGCCCAACTGAAAGCCTTATGTTTATATTTCCAAGTTGGTCATCCA
AAGAGAGATGACACTGAGTTAGAGACTCTGTCTAGGTAAAGCTTTTCTTGAGCACCTAATATATGCCAGGTACTGTGCTAGAATTGAACCTGTC
ACCAACCACATCTGTCTTTGTTCAACTCAGCCTATTGGGGGAGTCACATCAGTTAATTACAAGGTAGGCGTTGGAGTGTATGTGTACCCAAAAT
GCTTTGGGAGCATAAAGGGCTTAATTTTATCTGGGGGTGGGGAAATTTCTTGGAGGTGACTGAGCAGGGTGTTGTATAAGACTAGGTACTGAGA
ATTGTCAGGGGTTGGATTATTTCTTGGGAGTCCATCCTATCAGGCTTTTAAACGAGGGAGATGAGACTGTCAAGCATATAGATAAGCTTCTTTG
GAAAGGGGGTAAAGAAAGGATGTGGTAGTTGTGGATGTAAAATGGTTTTGAGCTCTCTGAAGGAAGGTAGGAATTTAATATAGAAAATTTATTT
GCTTTTTAGTTGGGCCTAGTATGTAATATATTTAGCAATGAAACAAAATTGAGTCCTTTTTCCTCTTAAGTTTAACTTCCATTGTTCCCATCTA
AATACAAAAGAGCTATTGAATCTATGCATGATTATGGGCTGGGTATGTTATCTTTGCATTTTTATAGAGTGAATTGAACTGCCTATGTTAACTT
TTAGGATGTATTTCCATTTTCCAACAATGATATTTAGTATTTATTGGGCACCTAACTGTTCAGGCTTGAATCTCATCTTACTCTTTGGAAAGGA
CCCTTAGGAGTTAATTACAGTTATCTCCATTTGAGATGAAACTGAGTGTACTCAGTGAAGCCATGAACCTAGCCTCTGTGCAAACCGGATGATG
CTGGTATGAAGAAATGAAGTTTCCTGTTTTGTATGGGGCAATTAAGAGGGAAAGGGAAAAATTGATAGCATGCCGGTTACTTTTTACCAAAATC
TTGAAGAAAAAAAGCAGTTTTGTGTACCTACTACCTTAAGGTTCTAATGTTGTAGTGATTGTCTTTGTGGTTATTGTCTGGATGTTAGTGTCAG
TAACTATTTGCTCTATCAAGCGTACACTGTTAGCTAGTGATTGATAAATATAAAAGACAATTTAAAAAATTAAAACTAGTTTTTAATACCCAGG
CTTCTTAATTGATCTTTATAGTGAGAGGATATTTACTTAAACATGGTTTTAGGTGAGTCTGAACAATCACATTCATGAAGTAAAACCACATATC
CCTTGGTTTGCTTCCTCAAATCTTCTAAGATAAAAAAGATTTTCTCTCCTAACTGGAGCGGTTTTGTTTTGTTTTGTTTTAATAGTACTTAACA
TTTACAGCCTTTTGTGGGAAATTTACAACATTCTGGGTCATACTCAACTGCTGTGAAATGTTATTTGTGTGGTAAATCTATATTTAAGATATAA
GCAATGAGCTAGTCACTTCAGGAGCACAGCCCATACTTTGTATTTCCCTTTCACCTGAGTGAAAGATTCCCTTTGTCAGTAGCACTAATCATAG
TGAGCTTGAATTATTATTATAGTAGTGCACAGGATGCCTAGCTGCACAGCTGTTAACATTAGTTGAAGGTGCTGGTAATCCTTTTCTGTTTCAA
GAACTCTAAGTTCCTGTCTGTTTTACTGGAATTATGGAGCTACACAACTTCATTATATTGTAATTTGACAATGTGTAGATTATGAGTAGGTCTA
ATGGATTTAATTTGAATGAAGGGAATTGTTTTGATTGTAATGGTTGTACTTCTGTGCTTGCTGTGCATGAGTTATGATAGGCATTGAGGAGGCT
CGTGAGGCTTTAAGCCTGAAAACTGGTGATCTCTCCAAATGAAATCTGGAAATCTTTAGATTTAGTCTGGACGACTAATAGAAGTATTAGATTC
CAGTGGAGTCTTTTTACCCTTTAGAGCCAGACTCCTTGAGGGACATTTTTGAAATTAGTAAACTGCTGATATCTTAGAGCATATCAGATCTCAC
AAATTTCAGCCTGTCTATTTCTAGTAAAACAAGAAAATCTAGGGTTTCCTAAAGAAATCAGAAAAAAAAAAAAAAAAACCCTCATGGTTTAAAA
GACAAATGGGATACTATTTCTAAGCCTTGAATCTATTTTTCTTTGGTAAGCAGATAGTGTGGGACCTGGAGTTGGCTCCCAAATCTCATGTCGA
TCAATAGCACAGGGGCAGGGAAGTAGATTCTTTTTCCTGTCAGCATAAAAATGATGGATTTTAGAGTTTGAAAGATACTGATTTATTCTGGGTA
TAGTGAAGTGTGATAGCTGTTTGTATGAGTGACAGGAATCTTTATAGTTAACCTGTTTTAAGGTTATACCAAAGTTAGAATTTATAAGATTTTT
TTTTTTGTTTTCAGTGTGCGTGGCATGGGAAAGTGAAAAAAGTCTGCTTTTTAAACTTGTAAATATGTTAGAAAATTGTATATTATAGCAGCAG
TTGTCTTATGTTGATTGTGACATGGAAAATAATTTGTGTCATTTTAGAAGACCATATTGGGGCATCAGTGTATAACATATACTATAGATCTTCA
ATAACTTTTATCTAATGATGCTGAGTAAAATTGGCTTTCTTCAAAGCCAAACCCAGTCATTTTCCCAGAAGTGTGTTGTGATTTTTCTCCTATG
AAACTATGATGGACTCTAATTTAGAAGTTCACTTTGAAATGAATTCCAAGTGTAATTACTTTGAATATAGGTATAGTTTACCTTGAGACTACAA
AATGCTGGCAATATTTGGTGTTAAACCCAGAAAGTTTATATTTATTTGTTTTAAAAGAAAGAAAAGGAAGGAAGGAAGGAAGGAGGGAAGAAGG
AGGGAAGAAAGAAAGAAGAAAAAAACGGCTTAAAGGAATGGCATTTAGAAGTGGGAGTCCTTGAATGAAATTCTTTCCTGTGGTTTTAAATTAC
ATGATTATGCCTTGATTACTTTTAATCTACTAACTTGACAAATCAAAGTCATTTGGGCAAACAATTGAGAATTCACCTTCTTAAGGTGTAGAGT
TTAGGATAGAAGTTCCAGACTTAGTCAATGGAGTACTGTGTTTAAGGGAAGATTTCAGATTCTATTTACCTTAAGTAATAACCAGGTGTGTTGT
TTCTCTTTTCATTCTTTGTAAGTCTGAAGTATGAGAAGCACCATTCTATTCTGTGGCTTCAGCTCTAGTTGAAATAGGAATTCTAAAACTGAAT
ACATTAGTTTGGAAGAATTAGCTTTTTTTCAAGCACCTTCTCTTCCTACCTCCTCTTGACTGTCTAGGTGCTGGCAGTGTGCTGGGCTGATAAG
TGTGGGCCTGGGAACTTTAGAAGGGAATGAAGAAAGAAGGGTGGAGGGAAGCACTGTGGCCTAGGCTTGATTAGGAAAGAAAACGTTTAAAGCA
CAACCCTATTTAGATATTATAGTATTTTGTTACTGTTAGAGAAAGCATCTTAGAGTTGTTTAACAAGTTGGCGTTGTTTAACATGGCATCTGCT
CAGTATGTTCTCAGACAGTAGTGTTACTGTTATTTGGGGTAGTAATTCTAGATTATAATAGCATTGACTTAGATTGCCCACATCAATGTGAGTT
AACTGTTACATATGTCTCAATTTTGGTAAGGAGGCAACTTTAGTTTTTATTTCTTTTTAGTAGGTACTCATTTTTAATTTTTTGCCCTGTTTTT
AGATACATCCACTTTTCTACTATTCTCACCTATATACCATCCCTGACACTTTCTGAATTCTTATATGCTTTTCTACCAGAATATTTTATTTTAT
TTTATTTTATTTTTTTGGTTTTTCAAGACAGGGTTTCTCTGTATAGCCCTGGCTGTCCTGGAACTCACTTTGTAGACCAGGCTGGCCTGGAACT
CAGAAATCCGCCTGCCTCTACCTCCCGAGTGCTAGGATTAAAGGCGTGCGCCACCATGCCTGGCCCTTCTACCAGAATATTAATCCATATTTTA
TTTCATTTTTGTTTTGTGCCACCCTGTCCTCCCACTTTTAATTAANNNNNNNNNNNNNNNNNNNNNNNNNNNNNNNNNNNNNNNNNNNNNNNNN
NNNNNNNNNNNNNNNNNNNNNNNNNNNNNNNNNNNNNNNNNNNNNNNNNNNNNNNNNNNNNNNNNNNNNNNNNNNNNNNNNNNNNNNNNNNNNN
NNNNNNNNNNNNNNNNNNNNNNNNNNNNNNNNNNNNNNNNNNNNNNNNNNNNNNNNNNNNNNNNNNNNNNNNNNNNNNNNNNNNNNNNNNNNNN
NNNNNNNNNNNNNNNNNNNNNNNNNNNNNNNNNNNNNNNNNNNNNNNNNNNNNNNNNNNNNNNNNNNNNNNNNNNNNNNNNNNNNNNNNNNNNN
NNNNNNNNNNNNNNNNNNNNNNNNNNNNNNNNNNNNNNNNTCCTTTCCCTCTCCCTCCCTCCCCCTCCCCATATCCCTGGCTGCCCTGGATTTC
ATTATGTAGAATAAAGGTTTGGCTGATCTCAAACCTTAAACTCACAGAGAACTACTTGCCTCAACCTCCTGAGTGCTGAGATTAAAAGCATGGA
CCACCACTTTCTTGAGGCTTCCTATTTTTTCTAAGAGCCAAGAACTAGCCAACCCTTGTGGATTTCTGAGTTCGAGGCCAGCCTGGTCTACAAA
GTGAGTTCCAGGACAGCCAGGGCTACACAGAGAAACCCTGTAAACCTCCCCCTCAAGAAAAAAAAACCGCATGTTTTTTCAAAGACCCCAAAAC
ATTTTTAAGTTGCAAGACTGAAGACACCTGAGAATTATTTAATCCTTATTAATTCTGTATCTTTCTTAAAGTGGCCAACTCAGCCGTCTTGAAA
TAGGGAAATGAGTATCCACGTAAGCTCAGGCCTGTGTTCCTAGCTTCTTAGAAAGCCGAGGCAAGAGGATGATCAAATGAGTTCCATGTCAACC
TCGGCAATTTAGTGAGACCTTGTCCTAAAAATAAAAAGAGGGAGGCAGTGGTGCTTTCAGACAAGACTGCAGCTACCAAAGCCCAAAGCCCAGA
ATTTAGGACAGAGCACTTGCACCATGAATCAAACCATCAGCTTTGCTGTCCTGCTGGCAGTTTTGGTGGTGTGCTGAGGGGGAAAAGGTGCCTG
CTTGGTGATACAGAGCCTTTGTCTAGTATGTGTTCAGTCTGACACTGCACTGTGGGGTTGCCCAAGCTCATATAACACTTCTAGTCCAGCCACA
CCAACAAGCACATCGTCTTCTCAGCCAGTTTTACCAACAAGGATAGGGCACCTCTACATGCAAAACTCACCTCTAGCCAGTCTCCTGTGGTCTT
TAATCAGAATATCTCTGTGCTCAGAGACAGCTACATTGCTCAGATACAAGGATTTAAGCCTTCTGGCTCAGAATACCACATGGTGGTAGCAGCT
GTTCCTTCTTTCATTCTCCCAGATTTCATTTCTCTGCTCATTCACTCCCTTTATCCCCTCATGCTTTGGAGGGAAACACCCTGTTCCTCATAAG
GTACTACTGTACTACGACATGCCATAAACATTCCACTCACCCTACCACTTTGTTCCCTGTACACCATTGGCTGATCTTGTAATCTTCCTTCCAG
AGTTGCTTCTATTAAAAATGGCAGTCAGTACAACTCAAGAGTAGAGCACACACCTACAATGTGCAATGCTATAGGTTTGATCTCTAGTACTACA
AAAACAACCCCTAAATTAAAGCTTATATTAATAGTTGTATGAGAGGATAGGTATTTGTGAGTTGTGAAAAAGATCATGCAGTTAGAAACTTCCA
CAGTGGCTCATAAGTCTTGTTAATGCTAAATACTGAATTGTCTTGAATTTGTTATTTTTAAACTACCACTTAAAGGAAATAAAAGTCACTTAGG
AATGCTTCGCTAGTATCCATTAGACTAAACCTAATGAGTCTTAGAATAAATCTTATACCATTGATCAAGAAGATCATTATAATAGGCAAAGACT
ATATAGAATTAAGGTAGGTACTGGTACTAATGTATTTCCATATCAAATTGTTGAATAAGATGAATTATCTGGTCATAATCTTCTGGTTAAGCTC
TATAATCCTGACATTTATTTGTACAAAGCCTAGTTTTATTTTGTATAATTTGGCTGCTTAAGGATATATCCTCCCCCAACCTCAAAGCTCCAAG
GTTGGACAGTATTTGTGCTTCCTTAAGGTTGTGATATCAAATAATTCCTAATGAGGAAGGGGTTCTCTAGAGCATAGGCAATTTGGAAGTTACT
TTTTCTGTTACCCAGGCCTTAAGAGCTCAGTTGATGGAAGTGAAGGAGGACAAGCCTGCAGAAACAGTCTTACTCTAATTGAGAAGGCTCGAGA
AGGTACATGTTCAGGTTAGATTAGTCTACCTCCTGGGAAAGGAGAAGATTGCAATGAAGGGATATCCTTGTGAAAATGAGTCATACTACAGAGA
CTTATGTAGGCAAGAATAAAGCATTCTGGGCTGGAGAGATGGCTCAGCGGTTAAGAGCGCTGACTGCTCTTCCAAAGGTCCCGAGTTCAAATCA
CAGCAACCCCATGGTGGCTCACAACCATCCGTAACAAGATCTGATGCCCTCTTCTGGTGTGTCTGAAGACAACTACAGTGTACTTACATATAAT
AAATAGATCTTTAAAAAAAAAAAGAATAAAGCATTCTAACTTTAAGTATTGTCCTTAAAAGATAAGTTAGTACAAATAGTATTTGTCTTGCTCC
TGAAGTAGACTAATGCTTCAGTTTAATATACTCTGCAAACTCAGGTTTTGACTTTTAAGGGACATTGTTCAGAAGCAGTCTACTTAGTGGTAGC
CCACCCCTGTAGATTATGCTATGTGGGAAAGATGCTTCAGCTTCATGGGTGGGTCAGACAGAATTCTAGGTATGGAGTTAGGTAAGGCAAAGGG
ATTCTCAATTGTTATTATGCAGAGGAGGTCATATAGTAGAATGTTTTGGTCCCAAGTTTCTAGATTAGCAAAATCCAGTTCTGTATTGTCCTCT
ATTGTAGCTATAATATGATAATACCATATCAGGCTTTTAACAAGGTAGAAAATATACCCCTAATATAACTACCTTGATCAAGAGCCCTGAGGAG
GAAAGGACACAGGTATGGATTATCCCTTAGAACCATAGAGTAGGTTTTCTTGAGGTATCTTTAGATGATCAGCTGAGATGAGAGACCCTTCCTT
GGGGTCGTAGTTTGTCACAGTGATTTGGGGGGGGGGGGGTTTCCTAAGGGAATTTTTGGCTTCTTACCAAATTTTTGGCATCAGTTTGTCTACA
ACCACAGGTCTCCTTAATTTCTTCTCTTGTCATTACTCATATTCTCTATTTTCCCAGTGTGAGCAATTTTCTTGAGTTCTCTCACCTTTTGTCA
CATGGTATCTAATCCCAACTGTGACATCCCATTGTGCCACCTAATGCATCCCTTTTTCCATCCAAGTAGATGGCACTGTTTTCAAGAGGGCTCC
TTGGACCATCAAGGCCATCCAGTATAATGGGAGTCCCCAGGGCCATGACACCGCCAGGCTCCACAGTTGTGCTCCCTAAGTACACAAAGGCATC
TTTGGTGGTAGCAGAGCTCAAGTGCAGCAGCTGTACCTGCTGCTTTTTATTGTGGTAAAAAATAGTTATACTGAATATTGTGTCATGTCGGAGC
TGTAGCCTACCAGGCTGGCTCATGGCAGCTGGTAACTGGTACAGCAGATGCCCAGGAACAGCTACAATGTTGCAAGACACCAACATGAAAGGTA
GTGCTGCCTCCCTCCCCAACCCTACCTTCTGTAAATGGAATTCTGAGGGCTTTTCTTTGCCCTTTTTGCTCCCAATTAACAGCAGGGCATTTGT
ATGCCCACCATTGTAGTCCGTTTTAGCTTCTGAGTATAACACAGAGAACTAATAAAGTTATTAAACTGTAGGCACTATGCTGGCCATATAGTCA
TCTATTCTAACCCTCAATGGCTGCCTACTTCCCAGCCACGTGGTTCTTTACCTGCAATCTGAGTCTTCTTACCCTGGCTCGTGCTTTTCCATGT
GTGTCCTCTTGGCAACTCCCTGCTGATCTGCTTGCCACCAGCCAGTCGTCCTGTCCTTCTCCAGGTCTCTCTTCTTCCTCTTCTCTCATCTCTC
TCCCTCTCTTTTTGGGAACCCCTGACTCTGATCAGAAGCCCCACCTTATTCACTTCTGCTCAGCTATAGGCTGAATTAGATTTTATTAACCAAT
CTGAGGTGATAGAAAAGAGTTTTTACACATCTTTGAGACAGGAGATGCTCCAAATACCATGACAATGCCAACCTCCAGACTGCTGGCAGGTCCA
TCAGCATCTGAATACACTGTACAAAACTGTACAAAACCCCCTCCCCCAACAACCTTCGGTTTTGTTGAATTTAAAATACTCACATGTGACTGAT
TGCTTTCTTAGACAGTACAACTTTGAATGTAGATACAACCCAAGAGATTTAGGTTTATATTTTGCTTGAATAGATGTTTGGGGCTCTTGTAACT
TCTCCAGAAATCTGAAGACCAGTGTGTATAGTGTGTTAAAATAGAATGAATTTTCCACCTATATGTTTACATTACTTTATTTTAGATAATGTGC
TAATAGAACTTACCACTTAGAAGTTCAGATAGATCATGGTTTTACTTGACCACCTCCCACCCCCAGTGCCAAACAACAGAAAATTTAAAGTCCT
TTAGATAGAATAAGTTCTTATTTTATCTCAGTGTCCCTAAGAAGTAGTTAATGTCTATATTTGGCAAAGTAGGTTGGCTTAAATTTACACAATT
TCATGGATCAGTATTCTTTAAAATGATTAACTGTTTGCTTATAACTTCATTTGAAAGTCTAAATTTCGCTTGGGCGTGGTGGCGCACGCCTTTA
ATCCCAGCACTCAGGAGGCAGAGGCAGGCGGATTTCTGAGTTCGAGGCCAGCCTGGTCTACAGAGTGAGTTCCAGGACAGCCAGGGCTGCACAG
AGAAACCCTGTCTCGGAAAAAAAAAAAAGAAAGAAAAGAAAAAAAGGAAGTCTTAAGTTTCTAGCATGTTACCTATATCAAGTTTGCAGTTACA
TTAAGTTGCAGTTAATAATGTAAACACTACATATACATAAATTATAGAGAATCTGGTACATTTACTTTTACGTAAGAGCAGATTAGAACTATTC
TTTCCTGTATGGCCGTCAGGGTTGTTTTCTCACGTGCATGCCTATGTTGAGTATGTGCTACAGCTTATAAATAATTGCGTTCACAATTAGCTAA
GACATATTAATCTACTGAGACAAAATGATATAGCCTTGGCTGCTGAGACCACTGACAATAGATATTTAAGATCTTAACAACTTGAGTAAATTAT
GTAGAGACCAGAAATAGAACCAGTTTCCTCTCAGTTTAGCTTTGAATATTATCAGGTTTTTGGATAATAGAGTAGGAAATGCTTAGAGGTGAAA
TGAATAGCAGAAATGTAATCAATTACTATTACTCTAGCAATGTCTAAAAGGCTCTGTAATTTCACCTGTCACTATTTTCCACTTTAGAAATTTA
GGCTCAGATGTTAATTAGCTCACAGTTGTGTAATTTTTAACTAAACTCTAAAGCAAGGAGTTTAATCCACTGTTTGATTGATGCCACAGATTGA
GTTAAATGTGAAACAGAATGAGGTGAAGGGGTGCCTGAGTGACACCCCCAGGACATCATGGGAGTAGTTAAATATCCATCAGACTGTGGTTCTG
TTTGTGATGGATCTTAAGTCGATTCATAATGGCTTTTTAATGTTTTATCAGCATTTATGTCTGTGTGTCCCTGAACTGGTGTTACAGACAGGTG
TGAGCTGCCGTGTGGGTGCTAGAAATTGAACTGGGGTGGGTGTGGGTTGGGGAGTGGTGGTGGCTGTGGTTCCCTGAAAGAGCAGCCAGCACTC
TGCTGAGTCATCTCTTCAGCTTCAGCCCTATCTCTCCTTTTTTTTTTTTTTTTTTTTGGTTTTTTTTTTTTTTTTTGAGACAGGGTTTCTCTGT
GTAGCTCTGGCTGTCCCGGAACTCACTTTGTAGACCAGGCTGGCCTCGAACTCAGAAATCCGACTGCCTCTGCCTCCCAAGTGCTGGGATTAAA
GGCGTGCGCCACCACGCCCCGGGGCTCTTCCTTTTTTTAAAGACAGGTTCTTGCTATGTAGCTCTGTCGTGGAACTCACTCCAGGCGAAATAAT
AGCATTGCCTGCCTTTGCGGTTTTTAAAGGCTTGTACCACCACTCCTGGATTATTTGTTTATTTTATAGTACTGAGGATTGAATCTCCAGGGCT
TTACCCACATTTGCTATACAAGTACTCGGCTCCTGACCCACATCCCCAGCCCAGGATTTGCTTCAGAGTGAATTCTTTTTTTTTTTTTTGGCTT
TTCGAGACAGGGTTTTTCTTTATAGCCCTGGTTGTCCTGGAACTCACTCTGTAGACCAGGCTGGCCTGGAACTCAGAGATCCTCCTGACTCTGC
CTCCCGAGTGCTGGGATTAAAGGTGTGCGCCACCACACCCGGCTCAGAGTGAATTCTTTTTTCCTCTCCTTTGCAATTTCAGAATTCTTAAGAA
GAGATTTTAGTCAGGAACTCCTTGTGTCTTCTGACTTAGAAAGATTTATTAATTATGTTCTAGAATTTTGAATTCTCAATGAGAACTATTGTAA
AATAACTGCTTTTGTATAGATTTACTTAAATTAGCCACTGTTAAGATGGACCTAACACTGAGAGTAAACTAACACTTTTATTAAAGTATGAATT
GAGACAGTTGGAAAGAGGGAGTGGAATTTTTTCACTGTTCTTAACTTCCAATGACAATAAGCTTTCAGGCTTGTTAGTTCCTGGGGGGGAGATT
CATGGAGAGTCCTAGTACATGGGCACACTTGGATGTTGGGCTTTATCACCAGAGGCCAGTTTGTTATCTGTCCTAAACAAAAACAGAATTTTAA
AGCATTAGAAAGTACAAGTGCATAATATTAAGTATGTTGATTTTGTATAAACTCCAGCTTTGGGGATGTGGTTCTAAGACCAAGATGCAGGGTT
TCAGTAAGCTTTATAATAATGTCTTCTTTTTTCTTTTGTCTTTCTTTCTTCCTTTTTTTTTTTTGGTTTCTTTTTCGAGACAGGGCTTCTCTGT
GTAGCCATGGCTGTCCTGGAACTCACTCTGTAGACCAGGCTGGCCTCGAACTCAGAAATCCACCTGCCTCTGCCTCCCGAGTGCTGGGATTAAA
GTCGTGCGCCACCACACTCGGCTATGTTTTCTTTTAAAAAATTAAGTTAATTAGTCCATTCTGATAGATGGTTTATTGTTATGTTATTTTGTGG
TTCTGGAAAGCAAACCTAAGTCCTTGTACATGGGAGGCAAATCCTGTAGCACTGAGCTACATTCTAAGCCAGTGGTCCGCAGCCTTTCTAATGC
CCTGATCCTTTACTCAGGATGTGGTGACCCCGATCAAAACATTATTTTCATTGCTACTTTATAATTGTAATTTTGCTTTTTCAAATTTATAATT
TATTGTAAAATATCTGATATGTAACCCTTATAAAAGGATTGTTCAATCTCCGAAGGAGTCATGACCCACAGATTGAGAACCACTGCTAAAGCTC
TTGTTTTTATGATTTTATGATGAATTTTTTTGGAGAAAAGTTCTTGCTATGTAGCCCCAGCTAGCCTGGAATACATTATGTAGATGAGTGAAGC
TGGCCTCCAACTCACCGAGATCTCCTTAAAGGAGGATTAAAGGCATGTGCCACCAAGCACAGTGTATTGTCTTTTTTTGAGACAAGGCATTGTT
AAATATTATAGGCTGGCCTCCAGTGCCCAGTCAGTCTACTTGCCTCTGCCTCCTTAGATTACATTTAAGGGCTATCACAAGTAGTTCCAGTGTT
CATTTTGTGAACTGGTTGTATATTTGTATGTCTGAGAGGAATAGAGATTTTCTATGACAAAAGTTGTACTGTGTGTGTACCTTCTTGGGGAAGA
CAGCTTTGGATAGTATATATAACTCCTTCCTCCTACACTGTTTACACCTGTAAATACTATATTTGAAGGAGGAAAGTCATACTGTCATATAGCT
GTTATAATAAAATCTCAAAGTCTATCAAGAAAAGTTGGTGTAAAGAGTCTGGCTTCAAACATGGCTCAGAGCTCCCTTTGTACCAGAAAGTTCT
TTCTGCCTTTGTTTTTATGGAAGGAAGGAAAGGACTCTTTCTTATAGCTTGATTTGGTTACTTTAAAATCTTGGAGATTGTGAAACAGTTCTAT
AATTGTTAATGTTTGTTAATTCTTTAGTGTATCTTCTCCACGAGATGGAATTGTCTCCTAGGCAAATGCAGTACCATTGAGCCTGGGTCACTCC
CCCAGCCCGTTTCCTCTTAGAAAGTGTAAGTGTGTTTGGATTGTCTTTTGATTGCATTTAAAGAAAAATAGACTTGTCTATTTTGTTAGGTGGC
CACCTACTAAATAATGCAAACATGAATAATGCAAACAGCAGAAAAAAGAGACCCCCCCACCTCAAGGTAGAAGAGAACCAACTCCTGAAAGATA
TTCTCTCATTTCTAAAGACTTTCAAGCTTGTAGGGGTGATTCTCCTATCTATGCCACCAGTGTTGAGATTATAGGTGCCTGCCACCTCATCTGG
CATTTTATATGGGTTCTCTAGTTGTGGACTAGCATTATGACATGCTGAGCCATCTCCCTGGACCAGCCTGGAAATTCCTCAGACTTCTAAGTAC
AGGATTGTTAGAGAAGGCCAAAAAAAGTACAGGATTGTTAGAGAAGGCCAAAATTGTATTAGTTTGTCTTTGTCAGAATCTCTAAGTATAGGGG
AATAAAACCCCAAACATCTTTTATCCAATGTTGCCTTATCAGGCAAGGTACCTAGGGCATGGTTCCTGCTTTGAGTGTGTATATGTATGTATGT
ATATATGTGTGTGTGTGTGTGTGTGTGTGTGTGTGTGTGTATATATATATATATATATATATATATATATATATCCAAAGCTTTTACCTTGTAT
GCAATGACTAAGTTTAATTCAGTTCTATATAAATTAATAATGAAGATAATTAAATAATGATTGCATTTCCTAGGCAGTTGTCAGTATGTTTGTA
ATTTGTTAGAAATTAGCCAGGAATTCTGTTGAAACTATTCTGTTGATTAGCTTACCAAAACAAAACAAAACAAAAACAAAAAACCCAGTTTTTC
TGAATCCCAGCTTTTGTTTCCTCTAACAAAGAGGAACATTTTTACTAAGGACACAGATATCAAGTTTATAATGAGCAGAGATGTAAAGCTCCTG
AGACCTTTCCCATGCTGCCTTTTGAGTGGTGCTGCTGAGACAGGGTTTCCCTTTAGCTGTAGAGCAAATCTGTTTTATCTGTGTGTGGTAGAGT
TTAATTATGATTGTTCATATTCTGTCTCATTCTTTTGAAGGAGTAGGTTCTTTAGCTTCTGAGCAGTTAAAGGGGCTACAGGTATTCTCTGTCT
CATTCATCTTTTTTTTTTTTTTTTGGCTTTTCCAGACAGGGTTTCTCTGTAGCCCTGGCCCCTGGCTGTCCTGGAACTCTTTTGTAGACCAGGC
TGGGCCTTGAACTCAGAAATCTGCCTGCCTCTGCCTCCCGAGTGCTGGGATTAAAGGCGTGCGTCACCACGCCTGGTTTAAACTTTTTTTAAAA
AATATGTTCCCGATAAGAAATCAACTTCATTTNNNNNNNNNNNNNNNNNNNNCACTGCCAAAAGTACATTTTACTTAATTTTGATCAGTCATGA
GTGGATGAAATTTTCAGCAATGATAATAGTGGCTAGCTGCTGTTGCTCATTGTCCCTCCTCTCCTGCTCCTTGCTCTCTGACCCCCGACTACCC
TTCCCTCCCACACCCTCCAGCTCTCCCACCTCCAGCCCCCCAAAACAAGAACAGGGTTTCTCTGTAGCTCTGGCAACACTGGAGCTCCCTCTGT
AGATCGGTCTGGCCTAGAAGTAAGAGATCTTCCTGCCTCTGATTCCTGAGCTCTGAGATTAAAGGTATGCTTCACCACTGCACAGGTTGTTGCT
TATTTCTGGCTGTAGTTAGGCCATCTGCCAGAGTGCTTGATTCTTAATTTCCTCAGCTCCTAGTAAAAGTAGCCCAAACTGCTTTTTTCACCTT
AGCTCAATCTCTAAAACCCACTTCATAAAAGAATAGAAGTAATTTACAAGCACAAGTAAATGTAGGAAAATAGCAGTAGCAAGACATTTATAGC
ATTATTAATACAATTATTCTTTGAAGGATGGTAATATAGAAATTCGGTTATAATTCTTCAGAATAGTCTTAATTTCCTCATTGTTTTTCTTAAT
CCTTTTTTGTGTACTTAGTGTTAGTCTGCCTTTTGATTGGTTCCCTTTATCTGTCACTTGTTTTTCCTCTTAGTAAACTTGCTGTCCATTCTTC
CTTTTTCTAACTCTAGAGTCTAGAGGTAGATACCTTGAAGGTATGTTATGTCTTCAGGGTAAATTCCTAGGCACTGCTGGGTCAGAGGAGGGAT
TGAGCTAGTTATTTCATTAGACATTGTGGAATTCTCCTGCCTCAAGAATTATATTTTCCAACTAGGTATATCTTATTTAAAAAAATATAAAGCA
AAATGCATATTTAGTAAGGAATAGCTATTACCTTTGGTGAAATGTGTATATTTCCTTTTCATTAAAATGGCCACATGTTAAGAGTCTGCATGTT
GCTGGCTCTTGTTTTAATGTCCATTTGTCTTGAGTGTCTTGTGTAATGGCTATTTAAGTCCATATATTCATTTACATGATTGGATTATAAAGGA
CAGAGCCCTTGTCTGATCAGTCTTTAGTAAGGTGCTTTGAACTTGAGAAATATAATGTTTGTAAATTAAATAGCCCTTATAGTATAATCCTGCA
GCTGCTAATACAAGGATGACTTTTGTTGTGTGCATTAACCATTGAATCCTGTGTAATGCTAACTAGAAATTGCTCCTACAGTGAGAAAAAGATG
GAGGATCTTCATCATTTGGTAGTTTGTTTTCTGCTTTATTTTTAAATGTGTGTATATCTGTGCCCTTGGAATCCAGAGATGAAATTATAGGTAC
TTGTGAGTTCACCCAACATTAAGTGCTAGGAACTGAACTCAGGACCTGGAAATTTATTTACTTAAAAGCCCTTTTAATTTTAAGGAGGAATACT
TTGGATAATAATAACAAAAAGATGTTGATTTTTCTAGTGTTTTCTATTTATTCATTTACTTATGCGTTTTTCTGGAATAATTTTATTTAAATGA
CACCAAAAAATTTGTTGCACATTTCTGTCTTCAAAGACTTTAGCTAGCATTCTTCCTGTGGTTTCATCTAGAGTTTTCTTTTTTCTTTTTTATC
TTTCATATTTTATTTGCATTGATGTTTTGCCTGCATGTATGTATGTCTATGTGAGAGTGACAGATCTTGGAGTTACATTTATAGCTGCTATGTG
GGTGGTGGGATTTGAAACTGGGTCCTTCGGGAAGAGTCAGTATATTTAACTACTACTGAGCCATCTCTCCACCCACCATCCAGAGTTTTCAAAT
GTTAAGAATTGAAACAATTATTGTTTTGTATGTGAGATTGTGTATGGGTTCAAGCAGAATGTCTTAAGAGGCATAGGATATTTAGTGAATAAGA
TTTTATGGTTAGCCAGGTGTGGTGGCCCACGCCTTTAAACCCAGTCAGTGCTTGGGAGGCAGAGGCAGGTGGATTTCTGAGTTCCGAGGCCAGC
CTGGTCTACATAGTGAGTTCCAGGACAGCCAAGACTGTTACACAGAAATACCTGTTAGTGAGTTTCTTTAAAAACCCAGTTGTGTTATGTGGAT
TTTTATGGTGCTATAGTACACAGTGGTTGGCATGTTTCATTTCTTAGCTATCAAGTTTTTTACAGTTCTTTTTGCATTTGATAGATACTTCGAG
TGTCACAAATGTTTTTACAAATATTTTAACAATATCTACTTTTTGACAAATTCCAGGAGGTATACTTAATCTTTAAAGCCACTAATGTATTCTC
TATAAACAAGTATTTTCAGCATGCATGATAGAGTTCTGTGTGCTTTTACTGGGTTTTACCTTTTACTTACTGCCTCTTCCTTTGTACTGTCTAG
GTCAGGGGTCCCACTACTGCCTTATATACTTTAGACAAATAAAGTCTTTGCTTTCTGTTTTACTAGGGCCTCTGGTTCTTCCAGCTACTAGGAC
CTCAAGAATATCCCTTACCTTCCCTCCTCCTCTATACTCTTTTTCACAATAAGTTCTTAGAACTGGGTTCAACTTCTATTTTCTTGAAAAATTT
CCCATTGTTCTTAATCTTAATCTTTTGCTATTACTGTCTTCTGGTTTCTGGTTTTTTTTTTGTCTTTGTTTTTGTTTTTCTTTTTTGTTTTTTG
TTTTTCCTTTAAGTATGATTTTTGGTCTTTTACAAATTGAAGTAGCTGTCATCCTAGAGTAGAACATTCTGACCCAGGGTTAACTATTAAAATT
TATCTTTTGGCACCTACTGTGGTGGCAAAGGTCTGTTTTCCCAGTGTACTTAGGAGGTGGGGGCAGGGGGATCTTGAGTTCTATAGACAGCTTA
GCAAGCCCTTGTTTCAAAAACCCAAGGGCTGGGAATATTCAAAAGGAACCAGTTTCCAGTGTAGAACAGGACTTTGGATTTGACCCCCTAGCCC
CAATTCCAAACAAAATTGTTTTTTTTTTTCCTCAATAGATTCTCTCTTGAATTACACTTATTTTCTTCTTTTACATAATAAGGAAAAATAAAGA
ATGGAAAGGAAAATGCTTAGAGCTCATGTTCATTATCTAAATGTAAAAAGTTCCAAGGATACACATGTGTAACTGCAGTTTGATTTCCTGTGTA
CCCATCATAACTTTAATAGCTAGCAATCTTTTGCTAGTGTTTTATATATCTTTATAATTCTTGATTCTAACTCTAATTTACTCAGAAATATTTT
TTAAGTACTTTTAAAGATTTCTTTTTTCTTTTGAGACATGGGTTCTCTGTGTAGTCCTGGCTGTCCTTGAACTCAATCTGTAGACCCAGGCGGG
CCTCAAACTCTACCTGCTTCTGCCCTAAGTGCTGGGCCTAAAGGTGTGATCCACCACTGTTGGTAAAGGTTTTTTTTTTTTTTTTTTTTTTTTT
TTTTTTGGTTTTGGTTTTGGTTTTTCGAGATAGGGTTTCTCTGTGTGGCCCTGGCTGTCCTGGAATTCACTTTGTAGACCAGGCTGGCCTCAAA
ACTCAAAAATCTGCCTGCCTCTGCCTCCCCAGTGCTGGGATTAAAGGCGTGTGCCACCACACCCAGCAGGGGTAAAGGTTTTAATCTATCAGTT
TACCTACTAGTAGTATACAGGGCATCTATACAGTTAAGTTAGTAGATTATTAAGTTTTTTAAATGTTAAATGATTGTTTAACAACTTTCTTTGT
GGCAATGCTACTTGTATAGTGATTTAAATCTATTGTATCATTTTTCCTCAGATATCCAAGCCTGCCATGTAGAACTTAACTGTATTGATTTATA
GAGCTCAACAGACATTCATATCTCTTATTACACTTACATTGATTTGTATGTAGAGGTTGGTGGGCAGACAGGGTTATGGAACACATGTTCTGGT
CAGAAGACAATCCATGGAAGTCATTTTTCTGCTGTGTAGATTCCTGGGGATTGCACATAATTGTCATGTTTGGCATCAGGGACTTTTCCAGCCT
GAGCTGGAAAAGCCATAGAGATTTCAATTAAGAACTTTGTCTTCTTTGTTTTCTGCTTTGTTTTGTTTTTAATTTAAAATCTCTCACAGCATCT
GTAGCACAGTTTGAGGATATACTAGATATGTAATGACTTTGAGTTCATATTATTGGCCTAGATGTTTTGTCCATGGAATTATTTACCAGCAACC
CTAATTTTCTCTGAGATAGTTAATTTTTACATTTTTAGATAGCATTTGTTTTCAAAGGCTTGGGACCCGGTTTTAAATTCCATTTTGAAAATTT
ATGCATTTCAGGAAGATAATAATGTGAAATCTAATAGGAACTACTCTGAATTTGTATTTTAAAGTTTAGTGCTTTTTAGTGACTTTTGCATGTT
TGTATTTGACAAAAATAAATTTGTTTGTTTATTTAGACAGGGTCTCTCTGTAACCCTGGTTGTCCTGGAACTCTCTGTGTAGACCAGGCTGGCC
TTGAACTCAATCTGTCTGCCTTTGTCTCCTGAGTGCTGGGATTAAAGGCGTGTACTACCAGGTCTGGCTTCAAATTTTAAAGTTTGCTAATCTC
TAACTTTATTATAAAAGTCGTTCATTATGGAAAATAAGATGAAGCACACTTAAGAACTCAAGTTCACAAATTTCTAAATTTTAAAATTACTACA
TTCTTTTTAAAATGTATGTCTTCCAGTCTTTTTTGTATGTGGTCATGGATTTATTGAATTACATACAGTGGTGCTCATTTTCTCTCCTTTTCAG
ATAATTTCCTTGTCATGCCTTTGAACCAAAGCAGTAGATCTTAACGTTCAATATTCTGAAGCCCATTTACTGATTTCTAACTATAAACAAAACA
ACACATGCTTTATTTCAGGTTGTAGTCCTGGTGCATGCATGCATTGTCATTTTTATGCCATGAGGTAAAAGTCACCAGTTTTATCCTGATTGAC
TCAGCATGTTAAGACTTTAGACTGGAGACTTAGAAGTCAGAGGGTCCTGTACACTGCATGGGAGATTTGAGTTCAGTCTTCTAACACTATATGC
TTTACTTACTATTCTCATCTCTGTGGGATGGAAAGTTCTTAGAACCAGGGCCTTGATCTTGCAAGTATTAGTGTTTCTCTTTCCTTGGGATCTG
TCTAGAATAGACATGCAGTTATGCCAAATAGCACTTCAGTTGCTTCAGATCAGCAATACTTAATTTATATATAATCTTATTGCTGTGAAACATG
CTACTTCAAATTTAGTTGATATAGGTTGGTTATAAGTGTCAAATACATTACATTCGTTAGTCTGGTTGAATGTAAGAAAGAATTCATTTAAAAA
AAAAAGTTTTTCGGGCTGGCGAGATGGCTCAGTGGTTAAGAGCGCCGATTGCTCTTCCGAAGGTCCCGAGTTCAAATCCCAGCAACCATATGGT
GGCTCACAACCATCTGTAACGAAATCTGATGCCCTCTTCTGGAGTATCTGAGGACAGCTACAGTGTACTTACATATAATAAATAAATAAATCTT
TAAAAAAAAATAATTAAAAAAAAAAAAAGTTTTTCATAAAAATCGCATGTCACCTAGAGTAACAGTCATCTGAAGGCTAAATTGGGCTGTGGCA
TATTCACTTCCAAGATAATTTCTTCACGTGGCTATTAGAAGGAAGTATCAGTTCCTCACCACATGTTTCTTGAGTGCTGCTAGTTTGGTAGCTG
ATTTCTCACTAGAACAAGGAGAGCAAATGGGAAGTTGCAGTGCCTTTGTGAGCTAATGTTGGGTGCTGTACTGCCATTTACTTGTGCAAGTGCA
AGAGACGGACGGTGCATGTGCATTTGCAGGTCAACATCAGATGTCTATCAGGCTTGCTCTGCCTTATTTTTAAAAGATGTATCTTATTACTTGT
CCATGTGTATGTATGAGTATAGATGGCCCTGGAGGCCAGGAGAGGGTGTTAGATCTCAAGGGGCTAGAATTACAGGAGGTTGTGAGTTGCCCCT
AACATGGATGCTATGAACTGACCCCTCTGTTATCTATCTCAGCAAGTACTCTTAACTACTGAAACTTTTCTCCAGCCTCTTTTCACCTTTTTTT
TTTTTTTTTTTTTTTTTTTTAGATAAAATATTTATTGAACTGGCGCTTCCAGAGATCTGTCTCTGTTTCCCCAGAACTGTGATATAGATAGGTA
CACAGCAATAAGCCAAAATCAGAGATACATATAGCACTGTTTCCCTCCTGTATTCTTAAAAAGGCACCACAGTAAATGAGAATAGAAAGGGAAT
CAGTGGGAGTGGGGATAAGTGTGAGTAATGGAGGGGATATTATCAAAGTACTTTATATGTTTAAATATTTTCATAAGGCTTAGGATGTAGCTTT
GTGGAACTGGGTGGGGGTGAGAATGGGGGCGAGCAACTGATGTTTTGGTAAGCAAAACTCAAATCAAGAGAAAATTGATTAAATAAAATTTTAC
TAAATTTTAAAAGAGGCTCTTTGAAAAACACCTTTAGGATTTATTTATTTATGAATGAATGACTGGTCATAGTGACTACAGGGATAACTTAGCA
GTTAGGAGCACTGGCTGTTCTTCCAGAGAATGGGGTGTTGATTTCCAACACCCACATGGAGGCTCACGACCATATACAGCTCCAGTTCTAGAGA
ATCTAATGTCCTCTTCTGGCTTCCCAGGCATTGCATACACATGGTACACAGACATCCATATAAGCAAAATACCCATATATATAAATCTCTCTCT
GTTTTTTTAAAAGCCTGTTCACTTTTATACTTTCTAACACTTGAGTCTTTGAGGTTGGAAGATATGTATCCAAAATAGCAAGCCATAGTATCAT
AATATATGTGGCCAAAAATAGCAATCCAGAAGTATATAAAGAACTTACAGAGGCAGGTGGATCTCTGTGAGTCCAAGGATAGCCTGGTCTAGAC
AGAGAAACCCTGTCCTGAAAAACCAGGGGGTAGGGGGAAGAACATATACAGCTCAGTAATACAATGTACAGTCAAACAAGCAAATACTGTAGTG
AACTTGCAATAGTTATTTAAAGGATGTGAATAGTCAATAAGCACAAATAGTTTTCATTAAATATTTAATCACTAGAAGAAAATTAGGAATTAAA
TTCATAATGAGGGTGCTGGCTGGTTAAGAGCACTTGCTCTTGTAGAGGACCTAGGTTTGGCTCTAACATTTTCAGTTCCAGAGAATCCAATACT
CTTATGGCCTCCACAGGGACCCAGCACACAGGGCATTTACATACATGCAGGCAAAACATTCATGGGTAAAATTTTTAAAAATAATTAAAAAAAC
ACAGCAGGCTAATTATATATATATATATATTATGTATATATAAATAAATAAAACATCCCCAACCAAAGCAAATTTTGCAAAAGAAAGCATTTAA
CTGGGGACTTGCTTACAGTTTCATCAGAGGTTTAGTCCGTTATCATGTTTAGGAGCATGGCAGCAGGAGGTAGGCATGGAGCTAGAGAGTAGCT
GAGAGCTATATTCCGATTCTGGCCTACTGTCCAAGAGGCTCCTGGGCCTGCTTTTGGCTTTTGAAACCTCAAAGCCCACTCCTAGTGATAAACT
TTCACTAATAAAGATACAAGTTTCAAACAGTGCCACTACGATACTATGGGGGTGGGGGTGGGGTCATTCTTACTCAAATCACCATAATATACCT
TTTAGAAGAGCAAAAATTAAGACAGTAAAGGCTGTTAGCCAGGCATTGTAATGTACTCAGGAAGCAGAGGTAGGTGGGGCTCTCAGATTGAGGC
CAGCCTGATGTACATAGAGAATTACATGCTCACCAGAGCTGCATAGCAAGAGTTTGCCTTAAAGAAAAACAAACAAACAAAGCCAACACTGGTA
ATTCTAGATGTTGCTAATGATTTGTAGTAGCTTGGAACTCTTAATAATATTCATGGAAATATATGAGAGTATGCCACTTAGGAATATATAGTTG
AGCAGTTTCCAATAAAGTTAAAAGTGAATTTTTTATATGATCTAGCAGTTTTACTTCATTTAGAAGCAAAGGTTCATCAACATGTGAGTTGTAA
ATTACAGTACTTCCATGTAATGGTTTTCACTCAGCAGGAAATGAAGCCATGGAGGCAGCTTAGTGGGACAGTGCTTGCTTATTATTTATAAGTT
ACTGGATTTGAGGCAAGGCAATGGGATGTCTTTGTGAAGTCTCCTTACCAGTAGGATGTGCTTTTATGGTCACTTTGCCCTTTGACTGACTTCT
GTTTCTAAAGTTGTTTGTTAAGGCAGGTAGGCAAATGATGCCTTATGATTCCTTGTGATTGACTTGTCTCTTATGATTGCAGATTCTCACAAAC
ACAAAGATAAACACAAAGATCGAGAACACCGGCATAAGGAGCACAAGAAGGATAAGGATAAGGACCGGGAAAAGTCTAAGCATAGCAACAGGTA
AGAATTGACCAACAGCGGGGAGGGTATAGGGAACTTTCGGGATAGCATTTGAAATGTAAATAAAGAAAATATCTAATAAAGATAAATAAATAAT
TAAAAAAGAATTGATCAATAGGGAGTTAGCATCCTTGGTGTCCATGGATAGGTATCAGCTTGAGGTGAGTAGCAAAGTAAGAGACTATATCTGT
TGTAGTTACTGAAGAGACTCCTTTAAGAATTAATGCCTCACTTGGTAAGTTTAGATCTAGATGTACAGAGAAGCACAGTGAGTCTTCTTTCAAT
ATGCATTTCTTTCTTTTTTTTTTTTTTTGGTTTTTCGAGACAGGGTTTCTCTGTGTAGTCCTGGCTGTCCTGAAACTCACTCTGTAGACCAGGC
TGGCCTCGAACTCAGAAATCCGCCTGCCTCTGCCTCCCGAGTGCTAGGATTAAAGGCGTGTGCCACCACGCCCAGCAATGCCATTGTTTCTTAA
AGCTATATTTATATTTAAAATTTATATTTTAAAACTGCTTTATTGGTTTGTCTTATTGTCAGCAGACAAGTTAAAGAGAAAATTCCTATCCTTT
TTTAATAATTGTGTTTTGTTTTACCATTTTTTGAGACTTGTTTTCTTTTTATATCCTTGGCTGTCCTGGAGCTAGCTCTGTAGATTTGAGTGCT
AGGATTAAAGGTGTGTGCCACCACCACCCAGCCAGTAATAAATTTTTTGAGTCATTAAAAAACTAGTTTAATTTTCTCTTAGGATATTTCTTCT
CAAATTATGTGCTCCTCCTGTTTTTTCCCATCACATAGTCATTTCTTACAACTTAGTTTATGTTTTATTCTTAATATTGTTTTTTCCCATCTCG
TAGTCATTTCTTACAACTTAGTTTATGTTTTATTCTTAATATTAATCTCAGCACTTGAGTCAAGTTTTGCTTTTTATGCACCCTTCTTCTCAAT
CTACATTTGTCTATCTAACACTACCAAAAGAGACTTGAGAGCAAAGAACACTGCCAACAATAAAGAAACCCATTTCATGATAATACAAAGGACA
TTAAAAATGTTTCTATAGTATCATCAGAGCCTCAAAATATGCACACACAGAAACTATTAGAATTTTGAAGAGAATTCATGATTCTAGTTAATGA
TTTTATTCTTTTGTTTTCAATAATTGTTATTCGTGCATGTAAGAAATTTCCAAGGCTAAGGGAGGGTTAAATAACAGAAAACAGTATCTGAGCA
TGGTTGACTAACACCTGTATGTAACCTTAGCATTCTGAGCCTGAGCACGGTGGATAACCAGAAGATTGAGGCCAGATCTAGGCTACATGGTGCA
AGACACTAACTTACAGAAACAAACAAACAAACAAACAAACAAAAAAGTGTAGTGTTGCACAACTTGACTTAATTGACATTTACAGAATAGTGAC
ACCAAAATCTTAGGACTGTGTTCAAGTAGGTGCTGAGATAACTCGTGCTTTTAGCTAGTCTCTCTTAAAATCATCCCTTTTACTTCTCCATGCT
TTTGTGTGTGTGTGTGTGGTGTGTGTGTGTGTGTGTGCGCGCGCGCGCGCGCGCGTGCATGCATGTTTTCATTTCCTTCTAATGTGCATAGTGC
TTATCTAGGAGGCTTTGGTTGCCTTCCTCTGCTGAATTTCCCTTGTCATTTGCCTTTACCTCACACTGTTAATTGAGCATTGTAAACTTCTTTT
AAATTTCTTAGATACGACATGTTTCTGATAAACCACTAGGCCTTAAAATATGCTATGGCTATTGTAGAGTACTCTTACTCTTCACTCCTTATTC
CCCTTCTCCTATTAGAGATTGAACGTAGGGCCTTAAATGCTAGTCAACAATACCACAATATCCCTGACCCTTTTTTAGATTGATAGAGATTGGG
TCCCACCACCTTGCCCAGGCTTGTTGGTTCTTGTTCCATAGGCCCAGGCAGGCCTGGAAACTACTTCATCTTCCCAAGCACTACTGTACCTGGA
CTTTCTTGTTGCTTTCTTAATATTCTTTTAGTAATAACTTTCTAACTATGTCATATTACTAATTTCTGTGGTCTCCTGAATATATTATTTCCAT
AGTAATTACCAGGTTTGGCTGTTAGGAATAATACTGCTATGAACATTGATATTTGAACACACATTTGAAGTTCTGTTCTCAATTCCTTCAGGTG
TGTACATCTAAGAGTGGAGGTATTGGACCATGTCAGTCGTTGCTTTCTTTTTCCTTTTGAGGTACTGGGGATTGGACTGAGGTGATTGAACATG
GCCAACATTCTACAGCTGAGCTACATCTGTAACCCTTAACCCGTTTTACCCTGCTTGTTATGATGGCCTAGCTTATGTATAATGCAATAGAAAA
ACAAAGAGGTTTCGATTTGTTGGGTTTTTTTTAACTTATTTTTTCCTCTTTACCATGAAGAAGCTTTATCATCAGTAGTGATCAGAGACATGTT
TTTACAGGTCTGATCAAGACATGCTGATTTTAATGTTATTAGGAATTTATTTTGAAAATATTTAAAAGAAAGATTAATATTTAAAACAAGCTTT
TCCAAAATGATTTCATGTTCTCTTACATATTTCACCAACCACAATTTATGATTATAATGAGCGAGAGGGACAGCATAAAGCAAAAGTGTATCTA
AGGACCTAGGGACTAGTTTCTTGTACTGTTTTACTGAAATCTTTTCTTAAAACTGGTATTTTATTGTCAGAACTATTACAATAATTCAATAGCC
TCTGTCTTGGGCGTCCTGGCCTGTCCACTAATGTGTTCTATGACTTTCACTAGGTCACCCAAAACCCTTTTTCTCCAGTGCTTCACAGGAGGGC
CCAGGAGTCAATAAATGTAAAGATCTTATGAAGTGCTCTACAAATGTGAAAATATATTTTGTCCATTTTTCATAATTACAGTTTTGAGTGAGTA
AGCACACACAGATTTAGGCAGCTTTTTGTTATGCTTTGCTTTTTGACAGTGTCTAAAAATGTCTTAAATGCCAGCTTATGTTACTTCCTTTTTC
TTTGGATTCCAAGTCTCTCAAACTTGTCACGAAAAGCACTAATCACATTAAATTCTAACTTTAGGAAAACTTCATCCCCGACTGTCTACTATTT
GGCATCTGACGTTGCATGGTTTACACTAATCAAATGAAATAATTACTTATATATTTTTAATTAGATTTATCTTATGGGTATTTTTTATGTATGT
GTACCTTCATGTATGTATGTGTACCACATGTATGCCTGGTACCCTCAAAGATCAGAAGAGGACATCAAGTACCCTGGAATTGGAGTCATGTGGA
TGGTTTTGAACCACTATGTGGATGCTAGGAACTGAACCCAGGCCCTCTGCAAGAGCAGCAAGTACTCAGCTTTGCCATCTCCATAGTCCTCATT
TTTTGATAATGTAGCTATAGTTATATGTTGGTGACTTACATGAATTTGGCATAAGTTTTAGTCATTTGGAAAGAGGGAACCTCAATTGGGAAAC
TGAAAAACTGCTTCCCTAAGATCGGCCTATAGGCCATTCGTGGTGGTACACACCTTTAATCCCAGTACTTGGGAGGCAGAGGCAGGTGGATTTC
TGAGTTCGAGGCCAGCCTGGTCTACAAAGTGAGTTCCAGGACAGCCAGAGCTACACAGAAAAACCCTGTCTCCCCCCCCCCCCCCCAAAAAAAA
AAGATCGGCCTATAGGCAAGAGGTGGGGGGGGGGGTTGTTCTAGATTAATGGTTGATGTTAGAAGGCTCAATCTACTGTGGCTGAGGTGGTAGT
TGTATAAGAAGGCTGGCTGGGCGACCCATGCAGAGTAAGCCAGTAAGCAGCATTCCTTTATGGCTTCATGGCTTCTGCCTTCAGTGCGATGTGA
CCCGGGACATGTAAGCCAAATAAACCATTTTCTCCCCAAGTTCCTTTTGATCAGTGTTTTATCAGAACAATAGAAAGTAGTAATATTTTACAGA
TCAGATATTTAAAAATACACTTTGAAATAAAAGGACTGTTTTTCTAGGTCTCAAGGCATTACTGGGCTTGTAGTGTGACCAGGTAGCTCTCTTA
ATCATTCTTAATCAGATTTTCTTTAATTTGTAATATTGAAAAGCACTATAAAACAAAAGGTCAAGTTCTGCCACTCACAAACTGTATCCTAATC
TAAGCATCTTACCTTTTTTGCCTCCTTTTCATTTTTGATTGATTTCCTGCTAAGTAATTTAGATAATGATGGTGATGATGACAATTATAACAAA
ACCTAATAAAAGATCATGTAGATAAATTGCAACTGTCAGTTTTTGTAGTGGAATCTAACTCAGTAGTTAATTATTCATAAATCTGATTTGGAAC
TAGGACTTTTTAGTTATTTCTAGCTTTATAGTTGAGTACTATCATTGCTTTTAAGATTTCATGGTGGAGGCAACCTTTTTGTTTGTTTTTGCAG
ATGTTGGTTATCAAACTTGTTGATTCTGGCTCTTTTTTTTTAAAAAAAAAATCTTTTTATTCATTTAATGTATATGAGTACACTGTTGCAATCT
TCAGACACACCAGAAGAGAGCATCAGATACTATTACAGATGGTTGTGAGCCATCATGTGATTGCTGGGATTTGAACTCAGGACCTCTGAAAGAG
CAGTCAGTGCTCTTAACTACTGAGCCATCTCTCCAGCCCCCAACCTTTTTGTTTTTTTAAGACCGGGTTTCTCTGTGTAGCTCTGGCTGTTCTA
AAACTAGTTCTATAGGCCAGGCTGACCAGCAACTCAGATACCCTCCTGTTTCTGCCTCTCAAGTGCTGGGATTGAAGACATATATCACCACACC
CAGCTCATGGAGACAACATATGAAGCTAGCCACTGAAAATAGTTACGATCACAGAAGGATGAAAGGATAATGGCTAAAAAAAGAGGTATCTGGT
GGGTACAGTGGTACTTGACTTGGGAGGTTATGGCAGAAGGGTGACCAAGTTCCAAGCCAAACTGAGCTATAACTGTCTCAAATATAATTAAAGG
AGCCTTTCAGATGATAAGAAAAGCATGAAGAGGTTAAGGAATGTAGCTCCGTGTTAGTGTGTACCCCGTAGAATATACAAGCCCTATGTTTTAT
TCCCAATATCACAAGAAACAAAACATACACAAGACATGTTACTGTTGTAGCATGCATTTTGTTTCAGAATGGATCCAATTAAGTGGATACTTTA
GTTACAAAGTGTAGGACAGAAATGAGGTCTAAAATGTTGTCTTGAGATAAACTACTGCTGAAAACTGTTTTAATTCAAGAAATTGCTTTAATTT
AAAGAAGAGCTTTAGTTTTTAAAGGGAGGAAGAAGCTACTGGAAACAGTTCAGAAAGGGGAATTTATAATACAGAAATGGTTCTTGTTTTGGAC
AATTGGGCAGCTTTTTATAATAAGATAGGTAGCCACAAAAGGCTGAGCTGTAAACCAGAATATAACGTATAAATTAGAACTTCGAGAAGGAATA
GAGGTTTAGAAAGTGCACTGGTTTGGGCATCTTTGGAAACAGCCTTTTTTTTTTTTTTTTTGGAAACATCCTTTTATCTTTTCCAGTCCGCAAA
CGAAGGAATAAGTTATTCTATTTGACTTTTCTGTAATTGCACACAATTTTCCTTCCTGGGCACAAGATGCAATGATTTTTTTTCAGACAGCAAG
TTCAAACTAACCTAATAGAAAATTCCTCGTGATAAACACTAAATGAGTTTTGTTTGTTTATTTGTCTTGAAATAGTTACCCAGGCTGGATTTAA
TTAAGATCTTATGGATTATACTTATGAATGTAAGTTTAAAATGTTATGACTTTCTGAGCACCCTTAGGAAATACAACCCTGGGACTTAATTCAT
CTCTCTGACTTCTATATTCAAAATACATACATTCTTATCCGTTTGTCAATCATAATTGAAAGTTGTGTTCAATTTACCTTTATTTAATGCCTTC
AGAGTGAGAGTGTGGTGATTCAGCAATTGGGATATACCAAAAAGCGGGCAGTAAGGTGTTTCTTGTAAGTGGAAAGCAAAAGTTCTCAAAGAAG
AGCGTGAATGGTTGTGTTGAACTCCAGAAAATGATGGCTGTGTATTAATTCCTTATACCCAATTTATAGGCCAAAATTTATAGTAGATATGTTT
GTATAAGGAAATCAACCCCCACCCGGACCTCCACCCCAACCCTGCCCTTGTATATAGAGTTGGGTACTATCTGGTGTCAGGAATTCACTACATC
CAAGGTGGGCAAGTGTCCTTGTGATTTTGCTTAGTAGCCTAATGATGATGGACATTCAGCAGCCGCTATGCTTTAGAGCCTTTTGAAAACTAGC
TGCTGTACTATTGTCTGGGAGACAACTTAAAGTTACCCGGAATTCTTTTATTTAAAGCATTTAAGCTTTATTTTGATGCCTGCTTTCCTTGTAA
ACACATTAATTTCTTTCCTTCTGTATTGTTAAAGCCTACTCATTCTCTTATAGGAGTGCCTGAGATGCCATTGTCTGTCACCCTGTCTGCTGCT
TTGCATAGTTGGCAAATATTAGTGGCTAAGTTCTCTTCTCAGAAGATGAGCAGATTCTACCTAATAGTGTTTGGTTTTTGTTTGCTTTGTTTGG
GAAGAATAGAATAGAATAGAAGTAATAGAATGGTTAATTTCATGACTGGAGACAAACTGCCTGAGTTGAACTCCTCATTTTCCCTGGACAAGTT
ACTTAAGCATTCTGTGCTTTTAATTTCCAGATGTGCAAAGTTTAGATACCAGTATTCATTTCAGGGTTTTGTTGTAGCAAGATGTGTATAATAT
TAGGTGGTAATATCGTTGCTATTTGCTAAATACTTTAATTGACCATAAAGTAAACTTTAAATTTTGATGGCTTCCCATAGCCAACATCTAGCCT
TCCTGAGTATCAGACTCTGAGTTTTGCAGGAGTACTACTACTCTCTATATTTTTTTTCTAAAGATTAATTACTTTTCTAGTGCAAAAGAGGAAT
GCTTTATTTTCCCATTTTACTGCCATCCCTCACTTGTCCTTTCTCATGCCTTCCTTCTGCTTAAGGTCTTTAAAGAAACCCTGCCATTTTTTTC
TTTAGTTTGTTTAGCTTCTATGAGAATCATAGACCAGAAGTTTCATAATTGTCACCTAAGAAATAGCATGGCTATTTTCTCCCACCATCTTTAT
CATTAGTTTCTTCTCCTCCTCCTCTTCCTCTAACTCTTCCTCCTCTTCCTCTTCTTCCTCCCCCCTCCCTTCTTCATGATCATCATCATTAAAA
TTCAGTTGTTTGAAGTATAAGTCAAGCATGCACATTATGAAAAAAAGGTTTTAAGAATTTTTATTATCCTTCTTTTAAAAATTATTCTTAGAGA
TTTTGAAGACATCATTATCTATCACCTCTTTGTCTTTCTTTCTGCGCTCTCTTCTGAAGTGACCCTGAGATTTTAAAGGAGGGGGGTGCGTGTG
TTGCGTGTATTCCATTTAGGGCTATGGATATTGTCTATTTACTTTCTTAAACATGACTTGCTTATTCAACCGGTGTGGTACAGTCTTACAGAGA
AACATGAGTATTGAATCAAGGAGTCAACCTCTGTTCAGAGCCATTCATTAGGATTTTTTTTTCTTTCAGAGTGCCTCATATCTGTGGTGTTAAT
TTTATATTTCATCCAAAAGTGTAACCATTACAGAATATCCATGTAGGTCCTGAGCACTATGTTTTTCAAGTTCCTTCCTATGCTTGTTCCTAAG
CATTTCTTTTATGTATTTAATTTCTAGAAGTCTTTTCATTGGTAAAGTTGGCCACTCTCTAGCCTCTGTTGTAGCCTTTGGTTGTTAAAACTAG
CTTTGTGACTTTGACATACTGTCTATTGCTGAAAAAGTGGCAAGATCTCCTGCCCAGGTGGTGCATGCCTTTAATCCCAGCCAGCACAAAGGAG
GCAGAAGTAGGTGGATGCCTGACTTTGATATCAGCCTGGTTTACATAGTGAGTTTCAGGACAGCAGAGTTATGGGGAGAAACCCTGTCTTAATA
CCCAACTGTAAATTATCTGAGTTTAACTAGTTCAAAATACAAACCTAGTTTATGATATTCCAAACAGATGGGTATAAAGGAGACTTAGTCTGTT
TAAAAAATAAGGTTGACATTTCATCCGTTTTACTGTTATTGGTACACAAGAGGATTAATACTCCAGGAGGATCTTTGAGTTTTCTACATAGATT
CTCATTAGGCTCCCTCTTCAGAGGAAGTAACAATTTGTGTGTTTTGTTTTATTACCCTAGAGTAGTCTTGATATACCATTACTACTTACTGATT
CTTTTAGTTTGGTGTTCTAATGAATAACAAAACTGAAATCTAGAGACTCAGGTTTGCATCCTCTGATTGCCAAAAGGTCATTTTTCCACTAAGG
CAGATTAGTTTTCTAATAATTTTCATTAAGAAAGAGAATTGAGAAGAGTAGTGTAATAACTAAAGGAAGACAGAGCCTGAAGCACTCTAATTAG
CCATTTATATTTTCATAAGAAGTAATCACAAAGGTTTGATCTTTTCAAGTATTTAGAAAATACCTACTTGGTGGCAAGATATGTCAAATCTTAG
ACTTAAGTACAACACCATTTATATCTGAGGTTGAAGAGGTGGTTCAGCAGTTTAGAGTACTTACTACTTTTCAAGAGTACCCCATTACAGTCAC
TTGCACCCACATGCCAGCTCACAGCTTACTCTAGTCCCAGGGGATCTGACACCCTCTGTCTTCCTCAAATACCAGGTGTGCATGTGGTACAGAC
ATACATGCAGGCAAAACACCCACATACAATAAACAAATATTTTTAAAAACGATTTAAGTGGAAATGTAATAACAATGTACAGGTTTTCTAAACT
TCTAAATGGAAATACTAAGTTTAATCCTAGCATTGTCCTCTATAACAGAATTTGCATTAGTTTTTTGTCTTGTTTTTTTGAGACAGGGTTTCTC
TGTATAGCCGTGGCTGTACTGGAACTCACTCTGTAGACCAGGCTGGCCTTGAACTTAGAAATCTGCCTCTGCCTCTGCCTCTGCCTCCTCTGCC
TCCTCTGCCTCATGCTGGGATTAAAGGCGTATGCCACCACTGCCTCCTTCCTTCCTTCCTTCCTTCCTTACTTCCTTCCTTCCTTCCTTCCTTT
CTTTCTTTCTGATTTATTTATTAATTTTATTTATGTGATGAGTACACTGTAACTGTCTTCAGACACACCGAAGAGAGCAGCATCAGATCTCATT
ACAGATGGTTGTGAGCCACCATGTGGTTGCTGGGAATTGAGCTCAGGACCTCTGGAAGAGCAGTCAGTGTGCATCAGTTTTTTAAGTGACCATT
TCTTCTGTATATACATTTGTCTAAAAGAAAATAAAACCTCTTAGAATTATTACAGAATTGAGTAAAATAAGGGTTGTAAGACCAAGTACAGCCA
GTCAGGTGTGGCTTACACCTTTAATCTCCCAACAGGGGCCAGCAGGTCCCTGTGAGTTTAAGAACAGCCTGGTCTACATAGTGAGTTATAGGCT
AGCCAGGCTGCATATTAAGACCCAATCTCAAAGACAAGCCAAAAACCCAAAGCACACACACCATGCACACATGCTACACACACTAGTCTGTACA
TAATACTTTCTCAACATCAAAAAACAAGTGCAATGCTGTAAGGATGTTGTAAGGAGAAGATGTGTTCATCATCAAAATGCCTGCGATTGTTTCT
GGAGTTTATTTTTATGTAAAATTTGTGTAGGAGACTAAGGGTTTTTGTTGTTGTTGTTGTTGTTATAGGTTTCTATAACTATTACTATAGTACC
TTTATAATAGAAGCTAAACATGGTAATATCAAAACCATGCATATTATCATGTGTATGATATATAGTGAGTCTAGTTTTAGTCTTTGCACTATAT
AAAGGATTTTTTTATACTGATAGAAACACATCATGAAAACACAATGAGTGGAATGATGTACTGTTGGTAAAATGTGGTCTCTGTGTGTGCCATT
AGCATTCTGTGTGCCATTCAGCCTTAATGAGTGGAAGGTTTGCTGTGGAAACTTGCCCTTTAATGTATAGCTCATATAAGTAACAGCTAACGAG
TGCTGGAGGAGAATGGAAATGAGGGAGTATGTAAACAATGCAAAGTGGGCCCTCCTTCCCTCCATCTGTAGATAGTGCTGGAATCCTCCTAAAC
CTGTAGTCCTGTATCTGCTAGTCTTTACCTTCTGGTTAATTTTCTAAGAATTTGTTTTTTTGAGGCAGGGTTTCTCTGTGTGGCCCTTGGCTGT
CCTAGAACTAACTCTGTAGACCCGGCTGGCCTCGAACTCACATTTGCCTGCCTCTGCCCACCAAGTGTTGGGATCAAAGGTGTGCACTACCACT
GCTCAGCTTCAGTTTGTGTTTATAACCCAGATGCCTGTCTTAGTTATGGCTACTTTTGTGCATAGAAGTGAGTGTAACAGTAGGCGATTTGATA
TGTATTCTGTTGCTTGGCTTAATTAAATGCCATTGCTTTTTGTCTTGTTTTTAATCTTCTTTATAGACAAACACCTTTTTTAGGAAAGTGTTTA
AAGGAAAATTCTTGGGTCTCTTGAGATCATTGCCAGTGAGGCCAGCTTTTTCTGCTCTGAGTCAAACAAGTGGCAAATGAGCTGTGACAAATCT
TATAGTCCTGACTGTTTCTATTGTTTGGGCTTACAGTTAGCAATTCTGCACCTGTGATGAACCCCTAATTCAGACCACTTGAGCTTGAGTTCTG
TTTTGCTTAGCTGTGGAATAATCCAGCAGGGAGCAGGTGCCTTAACACCAAAGAAAATGACTATCCACATTGTTCTGCAACATGTGGTTTTTGC
TGCTAGTCTCTTGTCTTTATCTACATTTACAGTCAAAGGTATTTTGTATAGTCTTGTTGGGATCTGTCAGTAGTATTCTGGATGTGTACTTAAA
ATAACAAATATTCCTTAATAGTTATCTTATTTCATATAACACAGTTTCCTCTCTGGTTAATCATTTAGATTGCATCCATTTTCTCATTTTCTTT
TTCCCTTTGGATACTATAGTAAGTACCAAAATAAACATCTTCCCTAAGAGACATTTCTAGAAGATCTTATATGAACATGTATGATCATTTTAAT
GACTCTTGCCTTGTGATGTAATATCTTGCTTTCCAAAATAGAAAAATGTACTTTTACGGGGCTACTAATATGACACATACCTCTTTCAAATAAG
ACTTAGAAATATGATGAACATAGACCTTGTCCTTGCTTTCAGGTGGGTCTTATTGTGAGGAAGAGGCCTGCAGGATCTACAAACTTCATCTGTT
TCTTCGTAGTTAGTGAGAAAGCTTTTAGTGTGTTGGGCCATTCAGTTTACAATGTTTTGTCCTGAGTCTGGCACAGTCAACAAATACTTTTTTG
GGTAATTTGGATTGAGTCCTCTTACAGCAGTTGTGACTGTTGGAGATAGACCTTTCAACTGTATATTTTATTGTTAGAAAGTTACAGAAATAAG
ACTAAACCTACTGTATATTCTACTACCTTTTAAAATGCTTGCAGAGCTTACATTATGTAGTGCTTTAGAGTTTATCCACCTGCTTCAGTAAGAC
CTAATCTGAAAGCTTAACTTGTCTTTTTTTTTTTTTTAAATCTTTCTTTTGAGATGCAGGGCAAAATCCTGGCTATACTTTCTCTAACACTGAG
CTTCTCACTTGTTCTCTGAGACAACTTCCCCAGTGCCCCCTTCTGCCATGTAGTTGCTTGTTTGCCAAGTAGCTATTTGCAGACCTCCATTGCT
GAACATGCCAGCCTAATTCAGCAGCATAGATTTTTTTTTTCTTGGTCTTCCTCTTTTCTCTTTCTTTTCCTCTGGGAGGTACTGAGATTTCCAC
CTGTGTGCCCTGAACTTCCTTCTGAATCTCTTAAGTTTTTTTGTTAATGAGAGTGGGAACTCCGAATTTCCATGTAATAATTAGTCAACTATGA
AGGCATCCTAAAGAAGCTCTTGTTAGGATAGGAAACAGGTGACCATGTTCAGGATTCTAGCAACTTTATTTTTAAGGGACTTGATTGATTGCTG
AATCAACAGACACATAAAGGGCCACCATCCCCCAGGTCTCATTTGTTCCATGATAACCTCATTATGGGTCATGAAGCAAGGTTATGCCATGGAA
TCGTTTATATTTCCAGTTGTTCATGTGTTCCTAACACAGCAGTGCAGTTATACACTGGGTACATGTCTTTGTCTCTCCTGGATCACCATGGGCT
CCTGTCCCAGCAGCAACTTGTACCTAGGAGCTGAAGGGAGATCAATACAAACTCCTTATGACTTTTAGTGCTTTCTGGTTACACTCGGTGAATT
TAACCCAGGAGGTCCCCTCTGATACAGCTAGCAGTCTTTGAACCTTTTTTCAGGACTGTGTAAGCATTATAAGTTTTCATGGTGTATGGCTTTT
GAGTTGATTTTGTTGTTCTTACTCTAGGCTAACTTTTTATGTCTTATTTTTAACAGTGAACATAAAGATTCTGAAAAGAAACACAAAGAGAAAG
AGAAAACCAAACACAAAGATGGCAGCTCAGAAAAACATAAAGACAAACATAAAGACAGAGACAAGGAAAGACGAAAGGAGGAAAAGGTACAGAA
CTTTGCCTTAAGGGGAAACAAGAGTTAAGATGTACTTTTATTTTGAATACTTTAGAAGTGGTAATGAAAGTAACTTTGTTATATCTACCCTTGA
CCCTGTAGCAGACTTCAAAATTAGCAGGTAGTGCTATAGCAAAAACTACAACTAAACACTGGCTTCCTTGCAATGTACTCATTAAACTCCTCAC
TCCCCAAACAAAAAAGATTTTAGATTCAATCTGTCTGAAGCTATGATAACCAAATTATTTAACACCATGTCTTTAACAATGCAATAAGTATGTT
TATTTTATACTACAGTGTGCCTATAATGTTTCTGGAAACATCTTTTCTGTTTTAGGGAAAGTTTTGTTTTTGGAAAACCTAAAGCTTTATTGGG
TCTCCTCTGATTGAAGATTCTGGGGCTGTGTCTATACTTAGTTGATAGACTGACTAAGTTTGACTAGCATGAAGGAAGTCTTATGATTTCCAGC
ACTACTACCAACAGTTGTGTTTGTGTGTGCCTGTTATTCTAGCACTTGGGAGGTGGGGAGATAGGGCGAGTAGAAACTTAAGGTCATACTTGGG
CTACAGAGTGAGTTCAAGGTGATCCCNNNNNNNNNNNNNNNNNNNNTGTGTATGTGTCAAGGTTTTTCAATGCATTGTTTTTTTGTTTTGTTTT
GTTTTTTTGTTTTTGTTTTTTAAAGTGAAAAAGAAATTTGTAGGTGGGCAATCATACACTAGAGAGGGCAGGAAATAGACTAGTCTATTTTATG
GTACCCTCACCCCACTGTGAGGCTCGCAGCAAATTTTTGAGTAGTGGATATATTTATTGGGGAGATGAAATCTACTGTTATTTTAAGATTAAAA
AGTTGCTGTTTTGAGGAAGAACTTTCTCGATTAATTTCACCAGAATTGTCAAAAAACAGCCCTGGGAAAATGTCTTTAGTTGACCCACTTCAGT
TTTGCTAACAAGAAGAGTCAGTCCAGGATCAAGATGCTCCAAAATAGCCTGGCATGATCTTGCCATTCCCGAACACTCAATGACTGTGGTTATC
AGCACAGGACACGAGCAGTATTGAGCCTGTCAGCATTCTGTCTTGGAGAAGGGTAGATGAGGTCTCTTCCTTGAAGACTACCATCCATTAATGG
TTATTAGAGGAAGTTGAGACATTTTCTCAGGTGGTATAGTCACTGTTAAGGTGCCTATCTACACTCCTATAAGCAATTCTGATTCAACTCAGTG
GGACATCCAAAAAGCAGGAAGAAAAGACAAGTCATGGCTGGGAAGGGGATCATTAGGAACGGGGAGTGAGTAGATCCGAGTACCTCATATACTT
GCATATACCATAATGAAACCTGCTTTATGTATAATTAGTGTATGCTAACAAATTTAAAATCTCCCAAATTGATGGTAATCTTCTTGAATAAGAG
TTTTTTGTCTTGTTTTAGTATTAAAAACTTTCAAAGTACTTACTGAGAGGCTGTGGTTTTACCTTGCAGATTAGAGCTGCTGGGGATGCAAAAA
TAAAGAAGGAAAAGGAAAATGGCTTCTCTAGGTAAGACCTTTTGCTACAGCAGCTTTTTTTGGGAGGGGGGTGTGTGACTCTGCATGGTGGTGT
CTAAGCTTTTCCAACATGAACTGAACTAGCCACCTTGACAATTCAAAAAAAGTCAGTATTAAGAGCACTTGACCTAGGCAAACTTTGGTTTTTT
AATAGTTCTAGTTAGTGAGACTGAACAGCATTTATCCAGAAATCTACCAGAAATGGAGAAGGCTATCAGAATGAGGTTTTTTTTTGGTTTTTCG
AGACAGGGTTTCTCTGGCTGTCCTGGAACTCACTTTGTAGACCAGGCTGGCCTCGAACTCAGAAATCCGCCTGCCTCTGCCTCCCGAGTGCTGG
GATTAAAGGTGTGTGCCACCACGCCCGGCCAGAATGAGATTTTAAAAGTTGAGGTATATACATACCACAAAATTTGCTATGCTAGCATATATAT
AGCTTATGGGCTTTTATGGTATTTACCTCACTATTTCCCAATATTTCAAGAGAAACTCCTTGGTAGTAATTATGGAATTTCTTAGTCTTAAATT
AATTCCTCCTTTGTAATATAAGACATACGTAAACCCTTATTGGACTTAATTTTTTAATATAGTGTATATTACCTATAGGCTGTTTTTACACTCT
GCAGTCCATCTGTTCTGTTTTCCTCATTTTCAGTTCCCTAAAGTAAGTGCTCAAGTCCACTCTAGATTGAGAAGACCATTTAAGATCACATTGT
ATATTCTGATGTCTTCCATGGAACCACGGAATGGATTTGTTAAGACTTGTTGAAAGCATTTGCCTTATTGACTGTAACAGAGTTTTAAGAGCTT
TGCTTTCTTGAGACTTTGTATCCAGGTCCTTTAGAAAAAGAGAAGCAGGTGCCTTTTATAGGGATATTTTACAAATGGTGTAAGAAAGCAGAAT
AATAAAGTTGAGTAAGCATTCTACAAAGTACCCTAGGAATTCTGTTAAACAATAAAATGAGGCTCACGATGTCTATTCTTTGCCAAGAGATCCT
GCAAGATATGAATAGATTATTTGAACTTTCGTCATGAATTCACTTAATGACTTGGGGGATTAGAAGGACAGGCGTGTGTGCTTTGCCCCCGATT
GTCGTTGCTGGCCTGCTTGTCAGCAGTGAGTCCTGTAGAGAATCCAGATGCTTCACTTGAACTTCATCTTCGAAGTGTGGTAACTCACTATTTG
CTTTCACACACGACACTTAGGATGGGGCATTAACTTTGAACCATTGGATGTTGTAGTGTCTTCTTTGGATCTCCAGGGCTTTGTAATTGAAGGC
GAAACAGCTGTAGAAGTGGCATTTAGGAATTGGGGAAAATGTGCTGGAATAAGAAGAGCTAATCTTTTTAAACCTTCAGATTTTGTTGCAAGCA
AACTGGTTTTAATGCTTTTAGAAAGAAAGGAGAATACATTATCTATACTTCATGCTGTGAATATATTTTACTGTTGAGACTAGATACTTACACT
TCAGATCCACCACTTCATGAATGGCAGCTTTATTTTGGGAGGCCATTTTCTTTACTGAGTTAAGTCAGTGAGGTCTAATTTGAAGAGATGTAAC
AAGCCAACCTAGGAAAGAACATTCCAAGGTTTCTGAGTGTTTGTCCGTGTCACCGGCAATTCTCCTTCCCCTTCCCCTTCCCCCATCATCATCA
TCACTACCACCACCTCCTCCTCCTCCACCACCACCACTACCACCATCACCATATCACTATAAGATAGCTGACATACACGCTCCCCTATCTCATT
ATTAGTAAATGGCAGAGTCTTCTGAAGTTCAGAGTGGCTTGAACCATTACATAAACCAAGACGAACCTCCACTCCTGCTCCTCCTCCTTAATTG
TTGGAAGTGTTGAAATTACAGACGTGTGTACCCAACTTAATTTAAAAAAGAAAAAATTAGATATTTAAATTTTACGTGTATGAGTAAATGTTTT
GCTCATATGTATCTGTGCTTGCCTATTTCCATGGAGGTAAAAATGAAGTGTTGGATATCCTGGAGCTAGTTATAGGTGATGGTGAGCTTCCTGG
TGAGTGTTGGATAAATCTGGGCTCCTTGCAAAAACAAGTGCTCTATAAGTGCTGAGCCATCTCTCCAGACCCCCAGTTTATTCTTTCTAGTTAG
TACAGGTTTCATAATGTCATTGTACTCTGGCTCATAAATTCTCTAGATAGATAGAGATTTTGCAAAGGAAAGAAAATGTGACATTCTTTTCTCC
CTTGCTATAAACCTATCCCGTTCTATTTTCATGAAAAGATTTTTTTTTTAAATGTATATGACTATTTTAGCCTCATGTAGTTCTATACACCATG
CCTGTGCCTAGTCACTAAAGAAGATCCCCTGGAACTTGGGTCTATGCTTTCTGGAAGATTAGTAAGTGCTCCTAAACATTATGCCATCTCTCCA
TCTCCTTTCATGCCACATTTTTAAAAATTGAGGGTTTTTTGCATAATAAAGAAAACATGTTATTTCTTCTATTTTTCCCTGCAAATAACACAAT
TTTATTCTTTATGCCTGAATAAAATTCCATTGTGTATATGCCATATTTTCTTTATCCATTCATCTATTGATTAGCATCTACACTGGTTCTGGAT
TTATACTATTATGGATTTACAGAGAGATCCATGTTTTATGGTGTACTGACAAAGCTTCTCTTGGGCATATACCTAGGAGTAGTATAGCTGGGTC
ATGTTGTGGAAGACCTCTATAGGATTTTCATAGTGACTGTACCAGTTTACATCCTCAGTTGCATTTTTTTTTCACATCACCTTTTATTACTGAA
GGAATTCAGGGCAGGAACCTGGAGCTAGGAGCTGGCGCAGAGGTCATGGAGGGGTGCTGCTTACTGGCTTGCCTGTCATGGCTTGCTCAACCTG
CTTTCTCAGTGCTCAGGACCAGCAGCCCAGGGGTGGTCCTACACACAATGGACTGGGTTCTCTCACATCAATCACTAATTAAAATGCCCTACAA
CTGTATCTTTAGGGAGGTATTTTCTCAGTTGAGGTCCCTTCCTTTCCAATAACTGTAGCTTGTGTCACTCAGGTGGACATTAAACTAGGCAGGG
CACCTACTTTATGTTATTTAACACAATTCTGACAATTTAGTAATCCTTAACTAGCTGCTTTGTTCTCTCTTTAGTCCGCCACGAATTAAAGATG
AACCTGAGGATGATGGCTATTTTGCTCCTCCAAAAGAGGATATTAAGCCATTGAAGAGGCTTCGAGATGAAGATGAGTATGTATTTCTTCCATT
TTGATTAAAGTGGAACATATAAAGAAATTTCAATTTTGAAATAATGTTTGTTGCTGCCTGATTAACAATGGTAAAATTGGAATCAACCTTGTTC
ATCAACAAATGAATGGCTAATGGACGTGTGATCTGTGGGTGGATAGTAGAATGTGCTGCTCATCTCTATAGAAACATGAAATTAATAGTTTTAT
AGGAATATGGATGGATTTAAAATATGTAATAGCAAGCAAGGTCATATAATCTCAAAGAAAAAAACTCACATTCTCTCCTGGAATTCTACCAATA
CTTTGAAGGAAGAGAATAGGAAAGGCTAAGTAATTGAAACAGATGAGGAAGTACTGAATGCATTATAAACGAGGATATAAAGCTAATTGTTTTT
CTACTTCTGTTTTTATGTGGAATCTTCTTTTTTTCCTCCCCCACCCTCTTTTTCCCCATTTGGTGGTAGATAAGGGCATAAACTACATTCAGTA
TTGAAAATGTAAAATTGAACAAAGCTGTAGAACTTCATTCTGAGTGCCTGTTTAAAATATAAATGTTCATTGAACTAGATCTGTTAGTTTTAGT
ATGGTAATTTGGAAGAGTTTATATATACATGTGTGTATATATATATATGTATATATAAATTTATAAAAAATTATAAAATTATAAGAAGAGATAC
TTCATAATTTTTATTTTATTTATTTTTTGTTTGTTTGGTTTTTTGTTGTTGTTTGTTTGTTTGTTTGTTTCGAGACAGGGTTTCTCTGTATAGC
TCTGGCTGCCCTCGGAACTCAGAAATCAGCCTGCCTCTGCCTCTCAAGTGCTGGGATTAAAGGCATGCAACACCACCACCGGACTACTTCAACA
ACGTTTAAAAAGAAAAGGCCAGAGCCAGGCATGATGCCACCGCCTTTAATCCTATTACTCAAGAGGCAGAGGCAGGGGATCTCTAAGTTTAAGG
CCAGCCTGATCTATAGAACAGGGTCTAGGACTGCCAGGGCTACACAGAGATACCTTGTCTTGAAAAAATAAACAAAACAAAACAGAAGGGAAAA
TCTGTTTTAAGAATAAATATGTGTATATCTATAATTAATAATAATATATTAATTGGCATTTGTGGTTAATGGACTAATTTATGAGAAGTGGGTT
TGCTAAGCAAATTAATTTATGGGTTATGTGTAATGTGTTTTTTCTTACTAAAAAAATAATGCATATTTATTATAGATATTTCAAACTATTTCAA
AATAGAATTAGTGACGGGTAAACTATTTTAGATCCTTGGGAGTTTTTCAGTTTTGTACCACAAGTAAATTGAGAAATATTAGGTTAGGGATATA
TAGCTCAGTTGGTAGAATGCTTATCTACCACACAAAAAGCCAGGGGTTGATCCCAGAACCTCATAGAACTCATACAAACCTCATATACCAACAT
TTGGGAAGTGGAGGCAAGAAGATCAGAAATTCAGTCATTTTTGACTACAGAGTGAATTTGAGGCTAACTTGGGCTACATGAGACTCTGCTTCAA
TTCTTTTTCCTTCTAGGATCTATGCCTTTTGATATAAGGGAACCTTCAATGTACAGAGATAGTGAAGTTGATATTGTTATTTAAGGCTTACATT
TACCTCCAATGATAATGTATTCCATTTTACTAGTTTTGAGTATTATATTATATAATTATATAATACTTATTCTATTCTATGAGATAGTCACAGG
ATTTAAGATGGAATGGCTGAGGCTGTAGCACAGTTGATAAAGTACTTACTTTACAAGCATGAGGACCTGAGTTTGATCCAGAGCTCACATACAA
ATTTCAGGTGTGCTAGAGCATGCTAGGACTTGGAAAGGCAGAGACCGGAGACTCCCTAGGACTGCTGGCAATTTAGCTTAGCTTACTTAGTGAG
CTCCATGCTCCTGAGAAGCCAGGTCTCAATGGAGCTTGAGAATGTTCTTTAGGAGGACAGTACAAGTTGTCCATTGGCTTCCACATGAATATGA
GCATTCAGACGTGTGTGCACTTAAATAACATTTAAAAATCAAATAATGGCTACAGCTATAGCTTAGTTGTTAAGAGTGCTTGCTGTTCTTCTAG
AGAACTCAAGTTTGTTTGCCAGCATCCATATTAGGCAGCTCTTTATAGCCTCTAGTCTGTTTCTGTCTGTCTTTTATATTTATTTCACTTTTTA
TATTATGTCATGATCCTGAACATTTATATGTATACCATATGCATGCCTGGTACCTACAGAAGCCTAAAGAGTTCATCAGATTCTTTAGAACTGG
AGTTATAGATTGCTATGAGCTATCCCATGTGGATGCTGATAACTAAGCTGAGGTTCTCTGCAAGAGCAGCCAGTAGTCTTACCAGCTTGAACAT
CTCCCCAGACCTTAATCTCGTCTTCACTACCATTGAATTCCTATCAAGAATAACAGCAGTCACCTGCCATGGACACTTTTCAAAGAGTTGGGAG
ATCCTAATTCTATAGGTGAGATCTCTTGAGTTGTAGTTGCAATAACTCCATATTCATGTTCTCCTTTCTAGTGCTGATTATAAACCTAAGAAAA
TTAAGACAGAAGATATCAAGAAGGAGAAGAAAAGAAAATCAGAAGAGGAAGAGGTTAGTAAAAGTTTTTGAGGCATACATTTATTTGTATAAAA
TAGCCTTAAAAAGCATGAGATTATTTTTAATTGTGGGTATCATGATGCACATGTGGAAGTCAGAGGACAGCTTTGAGAAGTCGATTCTCCTGGA
AATTGAACGGGGGTTAAGTTTGACAGCAGGTACCTTTAACTGCTGCATCATCATCTCTTATGTCCTAAAATAGATCTTGAGGCCAAATGAGCTT
TAGAAAATTTTTGGTTTGTTGTAGTAGTTAGAGTGGGGAAATGTTTTGCAAACAAGTTGTGGTTGTGCTGAGTTTGCCAAGATTTTGAAGTATC
CAGATTACTCGCCACCCTTGAGTCTATTCATAGCCTGCGTTGATGTTGATAAAGTATGCCACCTGTAGGTATGCAGAAAAATGTTCATAAGGAA
CAACTCTGAAAATTCTGTCTTAACAATATTTCATGACCAATGAAGCATGCTCTTTCCTCATTTTAAATAAATGTAGCTCTAATTTAATCAGTGC
CCTCTTGGTTGTAGGATGAAATCTAAGCACTGGAGTACCTTTCCTCAGTCTGGCCTTTGCATCTTGTGCCTTGCTTCATTTTGTCCCTCCTGAG
CTCACCTTGCTCTGGCCATACTGGCTGCCTCTGTTTGTTTTTCACACCAGATTTTGTACTTCAGATTTCGGTGTGTAGTACATGTTGTTCTTCT
GTCTGGAACACACATTATTTATTCCCTTCTACTGTTTTATAATCTTCCATAATTTCATAACTTTAGTTCAAGTACTTTTTTCCAAGGATCCTAT
TTGGTGCTTGTGGTAGATATAAATAGAATAATGTAGTTATTTTCTTTATTTTTTTAATTACTTGTATTTACTTGCAAGAATTTTTTTTAAAAAA
ATCAGCAATTCTTTAGGCTCTTAAGTAGAGTTCTTAACTTTATGTTCATTCTGTGAGGTTAATCAATGTTGTGGACAAAATAGGCTTAAATGTG
GTTAGGTTAAAATGTACCAGCAGTCATAATAGTGATAATGGGGCATGGGCTTTTGAGATTGTTATCTCAGGGTGAGTATGGTGACACACACCTC
TAATCCCAGCACTCAGAAGGCAGAGGCAGGAATACATGAGTTTGCGTCTACAAAGACCTTGTATTCAGGAGGCACAGAGAAAGTAATTTGATCA
CTAAATATGCCATTTATTAAGAACTTGATATGCAGGCTGGAGAGATGGCTCAGTGGTTAAGAGCACCGACTGCTCTTCCAAAGGTCCTGAGTTC
AAATCCCAGCAACCACATGGTGGCTCACAACCATCCGTGATGAGATCTGACTCCCTCTTCTGGTGCATCTGAAGACAGCTACAGTGTACTTAGA
AATAATAAATAAATCTTTAAAAAAAAAAGATTTTAAAATTTTTGTATATCAGACCCGCTTGTACCATGTTTGTCTCAGATCCCTGCAGAAGTTA
GAAGAGAACATCAGAGAGAGAGAGACAGAGACAGAGAGATAAGGAGTTTTACTCTGTGACTCCTGGCAATCCTCCTATCTCCCCCTTGACTATA
GGTATTTTTAGACTCGAGCCACCAACAGAGTATTTGAATGCTCTTCTACTTGCACACTTGTATTCCTCATTGTTACTTAAAATGCAATAGCATA
GCATTTGCTTTTTTCATCCTTAAAATAATACTTAAAGACCTTCAAGTTTATTACTACTTTGATTACCATCTTATTACAGACTCACAGGATATTC
TCTAGCCATTTTCATTCATCATATTCTGTTGGTTTTTGTTTGTTTGATTTGAAAATATACTTAGGGTTTTATTTTGTTCAGCAGCAGTTATATA
AACTTGATCAAATGGAAACTGATTTTAGAACTATCTTGATTATTGCTGGAAGAGAAGAAACCAAATAGTTTCCATTCCATAAACCATCTTTCAT
TGCTATATAAAACTTACCAAGTAAAGCCTCATGTGATGCTGAAAATGTAGATCAAAGTTAGGTTCTTCAGAAGAAAGTAGATTCTCTGGAGTCT
GCCTCTTTACCTGTTGAGTCACATTTTTGTTGGGATGTGTTTTGGATTTGTCTTACTCTTGGGTTTGAAGCTTTTTTTTTTTTTTGTTTTTAGA
GTTACACACCCACGGTTGACCTCAAACTCAAACGATCCCTTTGTCTCTGTCTCCTGAATACTAAGATTGAAGGCATATGCTATCCCCAGCCTAT
TTTGTGTTTTTAAGATTGGAATCTGGCAGTCTGTCTTTGAACTCCTGTGGCTAAGTTACTACTGTTTAGACACACAAAGACAGGATACTCTCAA
CTTCGCTCTCAACCTCGAACTTCATCCCCTCACTCCCTTCCTTCCAATTCCTGTCCTACCTCTCTCCTAACTTTGCCTCTCATTTATTGTCTTA
ATCCACTGAGCCCACTTAGTATTTTCTTACAACATGGGTGTGGTCTGAGCATAGTTAGCCTCTCAGGACCTCAATCCCTGAAGTAAACAGACTC
TTCCCTAACCTAGCAGTAAAGGTTTTTTGGGTTTTTTTGGGTTTTTTTTGGGGGGGAGGGGGGGAATAGGGGTTCTCTGTGTTAACCCTGGCTG
TCCTGGCCTCAAACTCAAGAGGTCCACCTCCTTCTGTCTCCCTAATACTGGAATTAAACGTGTACGCTACCACTATGCCTGACTTTTTTTTTTT
TTTTTTGGTATGCTTTTACTATGTATGTATCATGACAGTTCCTGCTACAGCTTCCTTTAGTGCTAGAATCAACAGGTGTGCACTATCATGCTTG
ACTGGTGTGTTTTGTTTTTTTGTTTTTTTTTTTTTTTTTACTTTGCCACTGCGAGCAGTTCCCAGCTGAGAATACTCTTAACTTTGTGTATATA
AGCAATAGTAACTGAATCACAGAAATCTCCTTTCAGATCAAATACTAAATTTTTCTTGTATTTCTTTTCTATACTTTGTTATATTTAAAGAGAT
TAAAGATGAACACACTTTAAAATAAATGAAGAAAATACCCTGGGATTACTGTTAGTTCCCCAGGCTTTCCCTTGTGAAATTCCTAAATAATTGT
TTGCTAGAGGGACTGCGGGAAGTATTTACTCAATTGTAAAATATCAATAAATTTTTCCCTTGATTTCGGGGAGGAATTAGATATACGATCTTTT
CCAGTTCCAGGACTTCTTGTTCATAGTTTTTCTTCCTAGTGGCTTCCAAAAACAGCTTCCAGGCGTGTAAACAATCCTGATTTAAGTGCTTTCT
GTTTTTTTGTAGGATGGTAAACTTAAAAAGCCCAAGAATAAAGATAAAGATAAAAAAGTTGCTGAGCCAGATAATAAGAAAAAGAAGCCGAAAA
AGGAAGAGGAACAGAAGTGGAAATGGTAACATCTCAGCACTGGGTTAAGATCTCAGCACTTTCACTGTGCAGCCCAATTAAACAAGAGTTGAAA
TATTAAGGTTAATTTCTTGACATTTGATGGAGAAGTACTTACAGACTCTTTTGAAGAACAGATAAGTTTTCAGATCCTAGTAATTTACCAGCTC
TAAATCTAGTGGATCTCAAAACTAGTTTCTTCTCATTGAATCGGATTGAATATAGCTTATATATAGAAGGGACTTCAAAATGAATTCATTCATT
CATTCATTCATTCATTCAATCACTTCAAATTGTACCTAGTAGTATTATAATATATCAGTGTATATATACTTTATGTAATGTTTAAATCAGGCTA
AGTCTACCTATCTCATAATACATTCTATCTTTATGCTGAGAACTACCAGCATACTTTCCTGTGTCAGTTTATTATTGCTCTTACAAATGTATTC
ACTATGTAAAGGGTTCTTTTTTTTTTAATCTATAAATCATTTTCATAAAACTGCCAATTTGCATAGGTTTTCAGGTCTATTTGTCTTTTTTCCT
CTCTCAACTGACCTCATAGAGCCAACTTTACTCAGATTTAAGAAAAGCATGCATAAGCTTAAAGTGTACTAGAACACCTGCTACTCTTGCAAAG
GACTTATGTTTAGTTATCTTCTCATAATCCTCTATAGCTCCACCCTCTTCTGGACAAACATCATCTTTTTCCCCAAATAATCCATCTTTTAAGA
CAACCAAAAACAAGAACAAGAATAATTCTAAACAGATAATTCTTTACCAAAACACTTGGAGAATGGCCACTTCATCACCTATGCTAGGTTGAAG
TTTCAAGTCTTTGGGCAAAGAAAAATGTTAAAAAAGAAGCTAGGGATAAATAATATTGTATAGGAATTACTGTTGAAAGACCAGGACTTAACAG
TCTTAACAATGACAATGCTTATGCAATACATACATGCATACATACATAATTAAGAAACCTTAAAGAACAAGCATTATCATATCTTCTCCAAATC
AGAGTCTGTTCTTCATTCTAGACAGCTTCCAGAAATCTCTAGTTTTAGATTTTTATCTACAAATCTTTATTTTTCATAAATTATATAGTCTGTT
TTAAGATACCTGCTAACACCAGGAGACCTTGACTTGACAAAGTAGTAGGCCTATGCTGTTGCTCAGGCTGGCCTTGGGTTCCTGGCTTTTTTTC
CCCTTAGCCTCCCAAGTTACTGGAACTGTAAGCCAATCCCAATCCCATTATGTCCAATACGGAATTCTTTGTGTATTATATTAACTCTTTATAG
GATTTTTAACTTCTGAGCTATTTTCTATTCATTTTTAGACTGTTAAACTTTTTGTCTTTCCAAGGAAACTTTTTTGTTTTTTTTTAAATAAAAC
TGCTACCTAACTTGAATTTATAAGCCTACCCTTCTTTAGTTGGTGCTGGTGTTGGACTGTTAGAAGGCCAACACTACAGTTTTATTTGTATGGT
AGTACCGGTCTGTTTAAACTCAAGGTTTTGTGTTTAGTGATTCATTGAATCTTTGCTTAAATGGTAAGGAAGTTGTTATTTGTCCTGAAGAAAA
AAAACATGTTGAATTTGGAGGAATTGTGAAACATGGCTTGGAATCTTAATTTCAAAACAATGGAGTTGATGACAAGAATATAAAGGGAATGGTA
TTCTGAATCACTCCCCGGTTACTATATGACTATTAAAACAGATGAGTCACTTGTAGGTGCTTTCACATGCTTGCAAACATTTTTCTCTGATTTG
GAGAGTAGTAAATTTGAAGGTTACGTAGTTTCTATCTGGGCATTTGACATCAGCTAGTATAATAACGTTTTATCTGTAAAGTGGTTGTTGATTA
TACAAAGTCTTTATTGTTCCCTCTTTTTGTTTTTCGAGACAGGGTTTCTCTGTAGAGCTCTGGCTGCCCTGGAACTCACTTTGTAGACCAGGCT
GGCCTCCAACTCAGAAATCCGCCTGCCTCTGCCTCCTGACTGCTGGATTAAGGGTGTGCCACCACGCCCGGCTTATTCCCTCTTTATAAAATCT
TTAAGAAAGAAAATAATACTTCTTTCTTACAATGTAATTTAGATGTATATTTACATTTTGTCATCTTATTGTAAATAAGCTGTAATGAGAAACT
CTACATCCATTAAGAGGCAACAAAAAGAAGTTTTGGTGGGACTGAAATAGAAAAATTGGAATCTTGGAGAGAATATTCTATAGAATACAGGGAG
GTACGTCTACCAATACTCACCTTTCCTTTCTCCTTACTCCTGTTGCTCAGCCTGGCCTTGCGTTCCTGGCTTTTTTTCCTTAGCCTCCCAAGTT
ACTGGAACTGTCAGCCAATCCCATTATGTCCAATATGGAATTCTTTGTGTATTATATCAACCCTTTTTAGGATTTTTAACTTATGAGCTATTTT
CATTATGAGTTACCTCTTTTTTTCTTGAATATTCCATTTGATCCATAGGGTTTTTTGTTTTTGTTTTTGTTTTTTAAATTTTGATGTAACCCAA
CTTATCTGGTTTTGTTGCTGTTACTTTTATATTTATTGTATCCACGAAGTCACTGCCAAATTCAGTGTGATGAAGCCATTCCCTCTTATTTTCT
CCTAATGTCCAAATGAGCTTTAGTTTTTATAAATTAGAATTTTAATTCCTGATTCATATAGAGTTAATTTTTGTATATAGTATAAAGGACTTGC
CCCAGTGTCATTCTCTTCAAACTCCAGTGTTGAAACTCTGTCATCTCTAACCATAACATGATGATAATTCCTGTTTAAAATGACTTGCCAATAT
ATGTTGACAGTAATTTTATATAACAGTATTGTTACAGCTTAAACGGATTCATTTATCTCTTACCCTGTGATTCTGAATCTTTAAAATATGGGAC
TTGGAATTCATGGAATTAATTAACAGCAGAACAAGGCAGAACTATCCCAGCACTCAGGAGACAGGCAGATCAAGTTCAAGGCCAGCTTGGTCTA
CAGAGCTATTTCCAGGACAGCCAGGACTACACAGAGAAACCCTGTCTCAAAAGACAACAACTACAAACCCAAACCAAAACAGGAATCCATAAAA
TTCCTTTTGTGTAGAAGTAGCAGTAATAAGTTTGAGAAATTTAAAAGTAGTCTGTATGTATCAGATGGATTCTTTTACAACTCTGAGAGGGGTG
GTAAGATCTGTTTATCAGTGTAAAGGGTGTGTTAGAGACACATCCATATGTAATGCCCAAAATCAGTAGATTTGTACTTGTAAAATACTGGATC
TCATTGGTGAATTTATAAAAAATAAAGTGACACAAAAAAAATCAATCTGATGTTATAGTTCTATACAAGATCAGTTTTATAAAGATAATTGCTA
TAATATTTATTGAACTTTCACATCCAAAACTAATTTTGAAGTGATCAGTAAAAGTAGAAATGTAATAAATTTTAATAATTCTTTGTATATATTT
ACAGTTAATTGTTTTTATATGCTTAATTTTTTTAAACTTTTTTTAAAGATTTATTTATTATTTATTATTATATGTAAGTACACTGTAGCTGTTT
TCAGACACACCAGAAGAGAGAGTCAGATCTCGTTACGGATGGTTGTGAGCCACCATGTGGTTGCTGGGATTTGAACTCAGGACCTTCGGAAGAG
CAGTCGGGTGCTCTTACCTGTTGAGCCATCTCACCAGCCCCCTATGCTTAATTTTTAAAAAATAAAATGTTTTAGAAAGATATTTATTCTGCAG
TTTATTTAGATTTTTGTCAAGTATCTACGGGATAGTTCCCTGTATTTCAGAAGTGCCTTAAACTTAGTGCACCTCCATTAGAATCTCCTCAGTC
CTCTTGCGTTTGTATTGTTGGTTTTCTTGAGTCCAGGTCTTACTATGTAGCCTTGGCTGTCCCAGAACTCTACCTTCTGCTGGTCTCAGAATTC
CACACTCTGGAACTGAAGGCATCCAGTCTGGTTGTGCTTTGAATTTTCAAATAGGGCTGCTTTCTTCTAAACTCTCACCTGCATGTGCCATCAG
TTTAGTAATGCCTCTTTTGCATGTACCACTGTGGCATATTTTATATATAAATAGTTTTATATGGGTTTTTTGAGTGATGGATGGTCTTTTAATA
CTTAGTATCTCTAAATTGAAACTGTTGAAATGAAATTTTTTTAATTACCATATTCTTTCAGTTTGCTTGAAATTGCTGCTCTTTTCAGTGAGAC
ACAGCCTTTGAATGGGCACCACAAATTGATTAGTTAATTATTTTGAATTTAATACGTGAGGATCTTTTTACTAAGCCAGGTGATCACTTAATGA
GCTTGTGCCTTGTCTTTGAAAGGTGGGAAGAAGAACGTTATCCAGAAGGCATCAAATGGAAATTCCTAGAGCATAAAGGGCCTGTCTTCGCTCC
ACCATATGAGCCTCTGCCAGAGAGTGTCAAGTTTTACTATGATGGTGAGTTATTTCAGGTTGTTTGAATTTTGGCTAAGAATGGTTTGTTTCTA
TTCAGGGTTAGAAAATGAGGGCACTGCCTATATTGCACAGTCCTAGCTAGTTATTTCACTTTCTTTTATTGTCTATGTGTGGCTTGGGAAAAGG
AATCTCAGGTGTTTAATTCAGAAGGACCCCTTTGCTGCTTGAAAAATATGAAAAAGGGGGCTGTTAATGTCTTATCTGTAGTCTAAAAAGGTTT
ATCTGTTTGGCTCACAGCCTATAAAATACACATTGAAGGTTTTTATTTTGAGTGTGTAACTCAATAGGAAGCTGTTCTGTATTGAGTTCTCATT
TAAATAGTAGCACTTAGTGATAATATAGTATGCCAACATGCTGCTTATCACTAGAAATTGTATTAGCAAAGGATTAGTGGCCATCATTCAGCTT
ATAGGTAAGAAACCTAAGCTATGTCACTCTAAGTAGTGCAACTGTGCCTTTGACAGGTGAATTTTAAAGAAACGCTCTGCCTAGGTCTCTTAAT
TTTATTTTTTTGAGACATTTCTAACTGTGTAGCCCTGCCTGGCCTGTAACTTGATAATATAGATCAGCTGTCCTTGAATTCAGTAGATGTACCC
ATCTGCTCCTGAGGCACATGCCACCTTATCTGGCCTCCTTGGGTCTCTTGGAACTTTCTAAAATGTCTGAGAGTTCCACATCTGTGTTTTTGTC
CTTGGGTTGAGGGATCTCAGAGTAGCCTCTCACAATCCTTCGACTCACTGTGTATCAGGTAGTAATGTCCAACTCACTCCTTCATTCTAAGAGT
TCTGTCCAGAGATGCTAGAGTTCGTTCTCAAACTCTCTATGTATTTATAATTCACCAGGTTAATAGATGAGAGGTAGGACTGGGTGTTTATGAA
TCAAATAAATGTATTTACTAACAGGGAGAGACACTGGACACCAAAATAGCAAAACCATTCAGAGCTATTTGGTGTATCTCTTTTTTTTTTTTTT
TTTTTTTTTTTTTAAATTTATTTATTTATTATATGTAAGTATACTGTAGCTGTCTTCAGACACTCCAGAAGAAGAGGGCGTCAGATTTTGTTAC
AGATGGTTGTGAGCCACCATGTGGTTGCTGGGATTTGAACTCTGGACCTTCAGAAGAGCAGTCGGGTGCTCTTACCCACTGAGCCATCTCACCA
GCCCCTTGGTGTATCTCTTTAACCGCCAGCAATGGCTTTAGGAGCATAGATGCCTGTGGGTTTAGGATGAGACGGGTTTATTAGCATCCAATAA
TTGAAATCTGTATATGAAACAACTGAATTTTGACCTGGGTCTCATCCTTAAGATATTTTATTTCTCTCTCTCCCTCCCTCTTTTTTTTTTTTTT
TTTTTTCAGATAAGGTCTCATTTTTGTAGTCTTAGCTGGCTTTCATCTCAGACGCCTGCTTGTCTCTGCCTGAGTGCTGGAATTAAAGATTCCC
ATCACTGATTACTAATAATACCCAACCTGATACCTTATTTTTACAAACACACCCCCACATACCGTCATTCTCCAAAATCTAGGGGTGAAAAAAA
TGAAAATGGAAAAAAATCACATGTTTTGGGAAATGGATGTTCAACTAATATTTTCGAAAGGTTCGGAAATGTTTATTGAATATGCTTGTGTTCA
GACACCCAAGTCCCAGATAGATAGAGACTACTGATTTAATCTATGTAGGAAGTCAGTGGCATAAAACACTTGGTGGTGTGACTGGCAAGTTTTT
AGATTAGCTAACCAGTTTGACCAGAAACTGTAAGACACCCTACACACTAGATCATTCCTGAAGATTTACGAAAATACACAAATTTAAACTTCCT
AGTGAAGAGAAAAGGCCTTAAGACCTTGAAAAAGACAATTGCTGTATTCTGTAGCCTGACCTGAGCTCACTAACTTTAGACAGCTCGCTGGAAA
AGCCTCACTGTGAAAGCCAAGGTGATGACGATAGAAAGTAGTTTTTTTTTTTTTTTTTTTTTATTGTGGGGTTTCAAGGAAACTAAGGCCTGTG
GTCCCTACCTCTAGTTTCCTTTTCTCTGTTGGTCCTCCTAGGATTTCCTCCCTTTGGTTATAAAACTCCTCCAAATAAGTCAAGAGTGTTTGAC
TTACTAGTGCAAACTGATAAGTAAGTACTGGTAGGCAGGACATTGCTGCCTTGCCCTGGACTTCCCCCTGGCCGCCTCTGCACAGGACATGAGT
TGGCTGAAGCACAGAATTGCAGCCGCTGTTAAGGACCTGCCATTTCAACTCTGACTCAACAGTTTCTTTTTGTTTCCGGGAGCTCAACTTTTCC
CACAAAGTACTACGATGATTGCTGGGAACCTACACACCCTCCACCACTCCGGTGCTATAGCTGTTACTTAATCCTTCCACAGCCCATTTAAAAC
AAATCAAGTAGGTTCTTTGTGGGTGGGACAAAGCCAGTGCAGTGCAAAGGCTCCCCACCCAAAATAAGAACACTATTGGGGAATATTTAGTTTA
TGAAAACAAACATACCAGGGAACACATTCCTTAAAATTTCCTTATCTATTTTTATTTTTTGTTTTGAGATGCTGATTTTGTAGCTGAGACCAGT
TTCAAATGCACAATCCTCCTTTCCCAGCCTTCCGAATGCTACAATTATAGGCTACTGCTACCTTGTCTTTTTGCCCCCATTTGTTTGTTTGTTT
GTTTGTATTCCCCTCCATTATATTTGAATCATGTTGCTGTTTTGCTGGCAACTCTTGTTCAGACTGAGTGGGGAAAACAGGAAACACCTTACTC
AAAAAATCCTTTTCCAACACAGAATCTTGAGTGTGCTGAGGAAGAGCTACACCACCTATTTGCCTTTTAGGTTATGTCTTCTAAGCTGATAATG
TACCTGTAGCACAAGTTTGTTTTGTGATGTATTCCCTATGTTTCATACAGTCTGGTTGAGCAATACTACCCATTATGAGATGAGATGTCTCTCA
ATTATTACAATGAGTAGGCTTCTGGTTAAGTTTTAGATTTCTGTAATAAATTTTAATTCTTTTGAATTATTATTAGTACTTACATAGTTGTAAG
TGTGAGATATTAATCTCATTTAGAATGCAGCAAAATGCTATTGTGGCATAAATTGTTTCTATATAATATTATAAAGTTGATTTTTTTTTTTTTG
AGAAAAGATAGAAATTGGCCCTAGGAGTGCAATATTCTCTTTGAATATTTTGTAGATTAAGCTTTTAAGTACTTTTCTTTCACTGTCAGTTATG
ATCTATCTGAGGACACAAAATCACTTCCAGGATTTATTAACTATTGTAGTGGCTTTCCTTGTGAACCACAGGCTTTTTTGGACAGTCTTTACAT
ATACTTACTTGCTGCCTAACCCACCCTCACCTCATGCTGTGGAATGATTAGACTTTCCTGAAAGAAGTGAGTTCCTGGTGCTATTCCCAGTGTT
TCAGGTGCATGTGTACCTGTATTTCACTCTGAATACACTAGTGCTCCAAAAGTGCTTTTCTGGCTGGGAGGCTGGCTCAGTGGGTAAAGTACCT
GCTGTACCAGCCTGGTGTCTTAAGGATGTTTTTTTAGAACCACATCAAAGTAGCACACTTGTCTGCAATTGTAGCGTGTCCCTGTGGTGAGAGG
GGAAGTGGAGACGAGAATGGATGAGTCCGTGCCAGCTAGCCTCTATATATATATATAGCAGTGAACAAAGAGACCTTATCTCAAAATAAGATGG
AAGGCAAGGACTGACACCTAAGGCTCTGACCTTCCATGGGTACTGTTGTACACATACAACCCCACACATAGACATACAGTGCAGTTTTTGATTC
TAGGTATAGGACTGAGGCCCAAAACTTGGTATTTATAACAAACTTGCTTGTGATGGTTTTGGTCTGTGAACTACTTGAGTAGCAAGGTTCTAGA
GGAAGGTCTTATTTACGCTTTTTATGTGGGAAATCTGGGCTTGCCTGCTATGAATATATATTCTTATTCATATTCCACCCACGTAACTTTGAAG
AAGAAAGATGCCTATTTCTTTTCCCCACAATTCCTTTCTTCCACTCCCTGCCCCTATCCTTTCCTCCCCTTCTTGAACAGAGGCTGCTTAGCTT
AGCAGTGGCAGGAGTCCTTCTGAGGATTTGATTTTTAAAAACCATTGAAGAGGTGTAAAGGACCCTGCTTGCTGAAAGGAAAAGGAAGAGTGGC
TGGGCCTTCCCCAGGTCATCCCTGTCCTGAGCAGGCACCTGGGAACAATTAACTGGCATAGTCTCCAAAAAAAGACCCAGGTAAATATCTACTA
AAGAGAAGGAGAAATTTTTAAGTAGATCTCTGACAGTATGTTACTCTGTTGTTGTTATCACTGTGTGTCAGCAGACCTTTGTACACCTTGGAAA
GGTGAGCCATCAGTCATGACCTCTCCAGTGTTCAGTGCACATAGAATATGAATAGTGTGCCTCACTGTTTGGAACCATTTTCTTCCTTCAGGTA
AAGTTATGAAGCTGAGTCCTAAAGCAGAAGAAGTAGCTACATTCTTTGCAAAAATGCTTGACCACGAATATACTACTAAGGAAATATTCAGGAA
AAATTTCTTTAAAGATTGGAGAAAGGTATTGTGGCCCATGTGTTCATATCTTAATCATTTATAAAAGTGCTGACTTAGAGGTATAGCTCATTTG
TTAATGTCTTGTTTGTTTAAAAAATGCAAAGTATAGTTTAATGTATATCTTTTTTCCCTTACTATTTTAATGTGGTTTTTGTTCAACAAGAATA
TATCCCTTCTCAGCTTTCATGTGACTGCAGGAAGGAGCTTATCAGATTAGGTTAAACAGAAAACCTCAAATCCAGTTGAGCAAAGGAAGCATTG
TTTCTGCAGGGACTGTCCTCTGATGCCTTTACACAGGGTCAGTCTGACCATCTATTCTGTATTGATATAAAAAAGTACCATTGTTTTCAATTTG
GATAATTTTGAAAAGAGGTTGAATTAAAATTCACCATCCAAGGGCATTCTAAATTTAATAAGAGCAGATTAGTGTGCATGGGAATAAGAAAGTA
TTTCTCTTTATTGCTAAAGTAATTGATTAATATAGGTCTCTTGGATTGGTGTTTATATGTTTGAGTTTGTGTTTTTGTCAAAGATCGCTAAAAA
ATGAGTAATTTTCTTTGATAAATGACTAATGATATTTTATATGAAACTAATCATCTTATAACAGAGCAGCACCACTCCCCAGAAGCAATGGTTA
TTGAGGTTGGCTTCCCTTCTAGACACCTTTGATTAAAGGGGAAAAAGGATGAATTTTGAAGAGACAGGAAGACTTATTAATATATTTAATTTTC
TTAACCTTTTTACTCAATTAGGAAATGACTAATGACGAAAAAAATACGATTACCAACCTAAGCAAATGCGACTTTACACAGATGAGCCAGTATT
TCAAAGCGCAGTCAGAAGCTCGGAAACAGATGAGCAAGGAAGAAAAATTGGTATGATCGTCTGCTAAACTAGAAAATCTTGGATAGTGATTCTT
TGTATAATTTTTTGCTTCTTGTGACACAACAGTGAATTCATTACTTTTATATTTTTCTGTGTTAAAGATTTACTTAGTAAAGTATAATTACATG
TATGTGTTGTGCTAACTGGCAGCTATCTGTGTTGGCACATGCCTGTAATCTCAGCATCTAGACTTGAGCAAGAACTATGATGTCTCCACAAAAC
AAACAAAATATTGCATTAGACTTCTTTAAGTTCATTTTATCTGTAGTTTTCCAAATCACTGAAAAAAAGTGATTCTGAAAGTGTGCATTAAATT
TTACACTTTCACCATCAAATGCATGTTTTATGGACTTATCCCCTACCACAAAATAAACCAAAACAAAATCCATGACAGTGTTGAAACTAAAAGG
GAAAAAAATTGCTTTATACCCTTTTGTCAGTCTGTGTTTTGCATTCAATCCTTCTTTACTACCCAGCATTTACCTCTCCTCTTTCTAAGGCTCA
CATTTAAAAATACCTAGGAAGGGCTCAGTTGGTACAGGGCTTTCCTAATGTGTCTGCAACCATGATTTTGCTTCTCAGCACTGCATAAAACCAT
GTGTAGTGATGGTACATGCTTAGAGTGTCAGCCCTTGGGAAGCGGGGGATCAGAAATTCACTGTCATTCTCAGTTACATAGAGAGTTTGAAGAC
ATCTGGGGTACATGAGACCAGATACTTAAACTAAGCTACACTGAAAATAAATGACATTTATAAGTCTATACCCTTTGTAATCAAGATTAAGTGT
TGAAGCACTAGTTCACTGGTAGACACAGTTCTGTAATACTACAAAAGACAAAAGTTGAGAATCTTATTTGTGTAAAGTCAGTTATTCTTGATAG
ATCTTTTGGCAGTTTATTTTATATATCTGTAATAATATATGTACGTTTAAAATACACTACACATTTTCCTATATTTTAGTTTGTTTCTGAGTGA
TTTTAAACTTTACCTTGATCTTTCTTCTGCAAGAGATAAAAATATGTAATTCTTAGCATGTACCAGTTTGAATCCATTTTGTATACTTCCTTCC
TCTATTTTAGAAAATCAAAGAAGAAAATGAAAAGTTATTGAAAGAATACGGCTTTTCTGTAATGGATAATCATAGAGAGCGCATTGCCAACTTC
AAGATAGAGCCTCCGGGGCTTTTCCGAGGCCGAGGGAACCACCCCAAGATCGGTATGCTGAAGAGAAGGATCATGCCTGAGGACATCATCATCA
ACTGTAGCAAGTGAGCACAAAACTCTTTAGGGGGGAGAAGTGGGTGCAGGGCTATTTCCTCAAGGCTGGTTATTGGGACTATTCCTACTGTTAT
GAGAGCGGTGCAGCGCTTGCATGGGCAGGTCTCCCAAGTTTGTTCAGGATTGAGGGCAGGATCAGAGGGGACATGGTTTGTCACTTTTCATTTC
ATTTTCTTTCTGAATGGTTATGTTCATAGAGACGCAAAGGTTCCTTCTCCCCCTCCTGGACATAAATGGAAGGAAGTCCGACATGATAACAAGG
TTACTTGGCTGGTCTCCTCGACAGAGAATATCCAAGGTTCTATCAAATATATCATGCTGAATCCCAGTTCACCAATCAACGTAAGCATAAATCT
AGGCCACATCCATTGGTGGAGCTAATATAGTAATCTCATTCTCTTTTGGTTGTATTGTAATGTGCTTTCTAGACTCATTTTAACAAATGATACT
CATTTCAACAAATTAAAAACCTACCCTCTCCCTGGCTTCATGGTTAGTTAGCATTACCTAGTAAACTCTTATTAAAGATGTTTTACATTTGTGT
CCTATAGTAATCTTAGCTGTGGACATTCTCTGAAATCCCATTATGTTCTCAGTGAATGCATGTGGTAATAATGGTTGTCCACGTGCTACTGTCT
GGTGGTCAGGATGTGATGAAGTGGCTAGTAGGCTTATGTGAGAAATGTAGATACTATTTTTCTCTAAATATAGAGACAACTATAGGACCTAGAG
CTTTATATACTTTATGTTTTCTGATAAAACATACTTTGTCTCATCTGAGTAGGTTCCTTTAGGTTGTGATTGAAATATTGCTAGCCCACCATGT
ATACATACTCAATTGTTTTCAATTGTTAGATTTACTGAGAGGGACTGTCTCTGATCTTGTTAGCCAGGTAGCTATAAACTCTGTGTTCTTTAGC
ATTTTATAAGCTCCTTCCATCAGACTTTATCGATATATGAACTACAAATAAAAGAGACATTGGGTTCACAAAAAAACAGCCAAGAAAATTGGCT
CTGTGTAGCCTATAGAACTGTTTTCCATTGAAGAGTCTAAAGCTAAAGAAACCCTTGTTCCTAAGGATTTAGCTTCTGTTAAGATCCAAGAGTC
ACAGATGAAAATGCTATGTAAATTTACATGCTTTCTAGCTTATATCCTGTGTTCTGACATGTGTCTCTACCTTCTTAATGAAAAATACCATCTG
GATACTTTCTTCAAATAAATTCGAAAATAGTATCTGTTTCAGAATAAGAAAATAATCAGAAGGGAGAACTGAGACTCCTTTATTCCTTTCTTCC
ATGAGATACTTTACAGAACTACAGAAGTGGCTAAAGAAACCATGTTTTTTTTTTTTTTTCTTTATGGGTGGGCAAATTCTCTAAGGATCCAGTT
GTGTTAGAAGAAAGGTAGTCCTTCTTGTACATAAGAGTAGTTATTCTTAACATCAGAATGGACTTTTTAAAGGAAATTAGATTAAAATGAGCTC
TTTAAAGAGGTCTTCTAAATAGACCCAGGTGCTTATGGACAAAAGAGGAAGGTAAGTTGGTCTACAGGGATCTGACAAGTACCACACAGTGTCA
AGTAGGGCTGGGGAGGAAGCTCAATGGATAAGAATCCTTTTTGTAAAAAAGACCTGAGTTCACCTCTCCAGCACCCACATAAAGCTACACATAG
CCATGCAGACTTCAGTGTTGGGAACTGTCAGAAGCTAGGAGCTCCTGGCTGATTGTGGTCTTCAGTTTCTTAATCAGGTGGAGGGGCTAACGAG
ATAACTCAGTGGCTAAGTGTACTGGCTATTTTTCGTGATTGCCGGTGTTTGATATTCCTAGCGCCCATACATACAACAGTATGAGGTAGAGAAT
CTCCTCATGCTTACAGAGTTGTATGCCTACATGCATACATACATACATACATGCATACATGCATACATACATACCACACCCTGTAATGTGCATG
TACCACATATACCACAACTACCAAGTAGTAGTGGTTCTATATATAATATTATTAATATACTAAATGTCACATTAATGGTACATTCTATATATAT
ATATTCACCACAGTCAGTATATTGTCAGTCTGTGATGAGTATTATTTTAGTGTTAAAAAGCTTTTCATGTAAGTTGACATTTAATAACTATTAC
AGGCATATATTCACAAATAAATTTAGTCTGTGGGAATTAAAAAAAAAGTCCTACATCTGATAGCTGGCAACTCTTCTCAGTCTTCTTAGAATGT
AATTTAGATCTCCAATCTCATGCTTTCCCATGACATCCTGGTGTCAAATTGTGGCCAGTCTTAAATAACATGCCCAAGAAGACGGTCTTCTGTT
CCGGGAAGAGAACCCTTTAAGGACTTTGAATGAAGGCTCTCTTAAACATGGGTTACCAATTTCAGCAAGATTAGCAAGTTATTACACCAATAAA
TATAAACTACGAGAAATGCTGCTGCACAGAAGTATCAGTACCATTTAAGAGCATACCTCAGTGCTCAATCTTAGCTCAGTTTCAGGAAAGGCTT
TTCCACAAAGATAATATTTAAGGTTGTATTTGTGAGATGAATAGGAATCTCATTTGCCACTGGAAAGAAAAACAAAGGGAATTAGCATTTCAAA
GAGGGAATGAGAACTTTTCAAGTTTCTGCCATGAGAAAGAGCTCACGTGTTTGGAGAACAGAGTGCTTTGAGCAGTAAGAGAAATGAAGAAGGC
CCCGCAGAAGCAGACAGGCCAGGACTTCAGTTCCAACTTTTTAAATGAGTCTAAAAGGAAGCTACCGACCTAGACAGACGTAAAGAAGAAAATA
GGACTGGAGTGGTGACATAATTGATAGTTTTGACTACTACTTCGTCTATGTAGCCTGTATGTATTGAACACAAACAGGAAGTTAGGAGGCCTCT
AGATAGCTCTTCTTCAGGCAAGAAACTGTAGTGATCAAGGCAGGTGATAGCAGTGAGAGTGGAGGAAAAGGAGTAGATTTCAAGTATGTGGCTG
TTGTGTCCTCCTATAGGCAAAATCACAGGAAACTGTAGTTCTCACAAGAGTGAGATAGATACCTGCTAGGCAAGCCAGAGCAGCACCCCAAGGA
CAGAGGTGCTTAGTCTAGGCAGTAATAACCAGATAACTGCATAGTAAGGATTTTTCTAGGTTTCTTCAAGATGGTTTTGACCGTAAACTTGAAA
ATCACCCCATGATAGAATGCTTGACTTGATACAACTGGGATGACATTCCAAGAGTAGTCATCACAGGTCTGGAAAGGTGGAACTGCTGGCAACC
AGGGGTGAGGAGGCAGTGCCTGTGGCTTCTTGCAGTTGCTCTCAGTCTTGTCATAGGCTCCTTCATCTAGCAGAATAGCAGTGGCTTCAGAGGG
AAGAATATCATAGCACCATGAATAGTGTACTGCTACCAGAGAATTATTCCATTCTTAAATAAAGACATAGGTTCAAGCTTTAGGATTTTTTGGT
GGGAGGGGGCATGGGGTTGTTGTTGCTCTTGTTGTTTTATAGGCTTCTTTATTTTTATGTGTGAGTATTTTGCCTGCATAATGCATCCATACTG
TTTTATGTCCCTTGTGTTTGCAGAGTCCAATAAAAGGTATCAGATCCCCAGAACCAGAGGTAGTTAGGGACAGTGGCAAGCTCTTCATGGGTGC
TAGGAACCAAATGTACTTCCTTTTTAAGGGCAGAGAGTGCACTTAGTCTCTGAACAATTTTTCTAGGTCTGAGTTTTCTTTTAATGAAATAATT
CAAATATGTAAGAATGTCTTGTCTGCCATTGTCAGATCTTAGCACTTTGTCCAATATACTCAAATCAGTTAATTAAAAAAACTACTCTTGAAGG
GCGGTTGGTGAGATGGCCCAGAGGTTAAGAGCACTGACTGCTCTTCCAGAGTTCCTGAGTTCAAATCCCACCAATCACATGGTGGCTCACAACC
ACCTGTAATGAGATCTGAAGACAGCTACAGTGTACTTACATATAATAAATAAATAAATAAATCTTAAAAAAAAAATACTCTAGTGGCATAGCCT
TTATTTAACCTAATACTTGGGAGGCAGAAGAGTCGCTTTGAGCTGGGCATGGTGGCACACGCCTTTAATCCCAGCACTTGGGAGGCAGAGGCAG
GCAGATTTCTGAGTTCGAGGCCACCCTCGTCTACAAAGTCAGTTCCAGCACAGCCAGAGCTATACAGAGAACCTGTCTCAGAAAGAAAAGAAAG
AAAGAAAGAAAGAAAGAAAGAAAGAAAGAAAGAAAGAAAGAAAGAAAGAAAGAAAGAAAGAAAGAAAGAAAGAAGAGAGAGTGTGTGTGTCGCT
TTGAGTCTAAGGCTATCCTGGTTTTTGTAGCAAGTTCCAAGCTACCCAGGGCTACTAGGGAGGCCTTGTTTTTTTTTTTTTCCCTAGATTCTGA
GAGATTTCACATGTTCCATCAAGTGTTACCATGCAAATATACACATGGAGGATTTATGGGTGGCACTAACTGTTCATAAAACCAAAAACTTGAA
GTAGTAGGGGGGCATGGGGGACTTGAGGAGAAATGGATGATAGATATCATTTTATTATATAAATGTATGAACATTTCAAAAGTAAAGATAAAAT
ATGTGGCAATTCAAATTATTTTTTAAAAGCTGGGCATGGTAACACTTGCTGGTAACTCCAGCACTGGGGAGATGGGAAGGGATCCCTGGGCCTG
GCTTGTCCAACAGTCTGACCTAAGTGGTGAGTTCTGGGCCAGTGAGAGACCCTATTTCAGGTACAAGCCTCTGAGCAACCAGCTTGAGTTTGTC
TTACTCACAAACTCAAAGTATATTAGCAAATGGCATCTTCCTCAGTACAGGTCCTGTGAAGAGTTAAAAGCAAATGACTCACTTCCTGTTCTGC
CTATATTATTGAGTGGATAAGTATCTACATTTAAAAGAAGTATGGTGGCCACTGGTTTATAACTATCACTAACTAGTTTTTTCTCCATTATGGA
GAAGTTGCCAACTAGCGAAAGAGGAAAAGGAGTCAGAGACTCCTACAATATCTACCTTTGTTTTACCAAACTGATTTTCTACTCCATACTAGTA
ATGTGCTGATGTAGTAATAGAATTTGAGGGAGCACATTTCTGCCAGTGTCAGGAAGGTACTTTTTATGATGGCTTTGATGTGACTCCCTGGAAG
ACCTAGGTGGGTATTTTTTAGAAGCAGTCCTAAAGGGTTTTGAGTCTATTATCATTTTATAGGTTCTGATCAGCAGCGCTGTAAGCCACCAGGA
TAAGCGTATTTGGGAACTAGCCCTTGCCTGCTAGCCCTTCACAGGATGTCTCCTCTTCTTGATCCTCATCCTAGTGTTCTAGAGAAAACTTTGA
TTTGTTCCAGGACGCCAATCATGTCAACCAAACACTCTTTAGTCGTTTCTTCTATAAATTACTTACTTGACTTTCTCAAACTTTGTCTGCCTGA
CCACAACCAATGCTTATGTGTTTTGTAGTGGTGAAAAGACTCCACTCCCGGCTAGATAGTGTATTTTACTGAGTCTCTCAGGTGTCTTGGTGGT
GGTTTATCTAAGAAATTCTGCTAGAGGTACACCTTGCTTTGTAGCTTTGTACCAGGAGCATAGCTTGTATTGTACATTTTCT;ATTTATTCTCT
TAATGTCAAGTTGCACTTAGAGAAATCAGAGAGAATTTTCAGCTTCCTGAAAAGTTATTGAACCCCTTCTTTAAAAGCCAAACAAGCCCATACA
AATAGTACACACTCAGTTGTGAGGAAATGTTGACGACTCCCTAGCACATCCAAAAAAGCATTACTTTCTGAGCATTTGTTAAGATCTGGAAGTA
AGCCTTTTTATTCCATGCACCCCCATGCTTTCATGTGGTCCTATGGGTTAGGTCCTTTTGTCTTAGGTGGAAAACAATATACAAAAAGAAATCA
CTACCATCTCCTCTTTGTTGTAGGATCTTTAAATCTCATGTCTGTGTAGGGGCATGTGCGTTTGAGTCCTGCAGTGTGGGAGGCATTAGATTCC
TCTGGAGCTGGAGTCACAGGTCACCTCTGATATGCGTATTGAGCACAAGTCTTCTGGAAGAGAGCAGCATGCGCTCTCAATTGATAAGCCATCT
CTAACCCCAGATTCTTAGGGGATTTTCACCTTGTAAAATTCTGCCTTGTGGAATTTTCCTGATCTTTCTCACTTGACATTATTGATCCTTCCTT
TCAAGTCCTTTTCTACTCAGGGTGGTAACAGAAATCTTTTGTTGTTTAATATCAGTCTTTATTTTTTTTATAATATTTTTTATTTAGTATTTAT
ATATTTTACATAATGTACAACTCCACACTTCCCAACTACTACCAGATTCCCTACACACATCATTCTCTCAACTGTGACTCAGTTGAAATAGTGG
TGTCCATATATGCATACATAGGGGCTGTCCAATGGGGTGTGGGAAAGCTACCAGGTATCACACCTCAAAAGAGACCACTACAAATACACACTAG
CAGCTATCAAATGTCAATAGCTCCTCAGCTAGGAGTTGGGGTTTATGTATCCCTCCCCATTTCATGATGGAATGTTGATACTGTGCAAGCAACC
AGAGCAGTTCCTGAGTCCAGTGTGGCCCTACCATGTTTAGAAGACACCTTGGCCCCACTCAAGTTTGTACCTCTTTAAGTCTTTCCATCACCTT
TTCCGATGCTTCCTGATTTTGAGGTCAGAGTGTGTCATGTAGGGGTTCAATTCAATGCCTGAATATTTCACAGACATTCTGTTCTCTGTAATTT
GACCAGTCGCAGCCCTGGTATTAACCAAATCCATTGCACAACTCTTCTGATGAGGACCAAGTCTGGGGGTGTACAGATATGTGTTTAGAAAGCA
GCCTGGTGCCATGTCCATTTAGCAAAGTCTCATCAGTGCTTTTCTTAACCCATCAGACCTGTGAGTTCCCCAGCTATAGGTTCTCAGATAGGTT
TATATTACCAAGCACGTGTGACATTTTCATGGGCTTTAGGATCAGATCTCAAACTTTATGCCAAAAGCTCTTTTGTTATGTTTTTAAAGAAGCC
AGGTAGTCGTGGTTGGTGTACACCTTTAATCCTAACATTTGGAGGCAGAGGCCAGCAGATCTCTGAGTTCAAGGAAGCTAAATCTATGGAGCTA
GCTCTAGGACAGTTACGGCTATATAGAGAAACCCTGTCTTGAAAAACCAAAGAAAGAAGGAAGGTGTTCCCAGAAACATTTTTTTTCTCAGTCA
AATCAGAGACCATTTTAAATGCAGAAGTGAGAAAATGGTGAATAATTACGCCTATTCATGGAAGCTTTTGTCTTCCTTGGTAATTACATGTTGT
TGTCTTCGGTTCTGTTTCTTTGATAGGTCCCTGAAACCGCTATGGCTGTCTTCAATTTAATGGAATTCAGTGCTAGCAGAGAACTGGAGCATGC
ATTCCACACCAAGGCTGTGGTGCTTCTGAAGCAATGGAGATGCTTACATCCTTTATGTTCACAGAAGTCAGTTTGGGGGCATGCTTGGTGGATC
TCACAAGAGTGCGAACCATTTTTTAGATAGGAAAGCTTTCTTAGCAATTATACAGGACGGAGTCAGTAGAATAGCAAGTATTCTTGTCATGTTA
CATGCCCCAGACTTTCTCTTCAGTTCTATGCTTTTCCAGCTTTGGTTAAAATCAGGTTCCTGTTTTGGGGTTCAGAGCTCTAAATATTCAATGT
GTTGCTCCACTGCACCGTCAGAAAGACTGGCAGAAGTATGAGACTGCGCGGCGTCTGAAGAAGTGTGTGGACAAGATCCGAAATCAGTATCGGG
AACACTGGAAGTCCAAACAGATGAAAGTTCGTCACACACCTGTAGCACTGTACTTCATTGATAAGGTGGGGACATGTTCCTTTATCCACATTGG
ACAGTTCTGTTTACAGGTATAGGGAATGTCTACAGTATAGGGATCAGGAATGTATATGTGCTGTGTGACTTATAATCCAAATTTACTTAAGTAG
GAAGAGTAGATGTGGATACAAAGAAAGAGGCATGTACAGTATGTTGGCTATTGAGCAGTCTCTATAACAAGAGGATCTCCATAAACTGAACATT
ATTAGTTAGTTTGTTTGTTTGCTTGTTTTTGGTTTTTCCAGACAAGGTTTCTCTGTCTAGCCCTGGCTGTCCTCCAACTCACTTTGTAGACGAG
GCTGGGCTCAAACTCAGAAATCTTCCTGCCTCTGCCTCCCAAGTGCTGGGATTAAAGGCGTGTGCCACCACTGCCCGGCTGTTTGTTTTTTTAA
TAACTGTGATGCTCAAGATTTTTGACCATAATCTGCAAAAGTACTTACTTTATGTCAAAATCCAACATAACAGTTTTATTTATGTGAAATTAAA
TCGAAAGTTGCACAAACCACTGGTTAACTAGTAGCATTGAATTCTGGTGGTTATTTCTCATTTCATTCTTTTAGAAAATCACAATTATAACCTA
TACAATTCTTAAAAAAGTGTGATTTATGATAATTGCAGTTTGAAAGATAGTTTTTTTAGTGCTCAGATTTTTTTCTTCATTTTACACTTAAATT
TTAGCCCAAATTCTGAATTCACACAAAATTGATAAGTTTTTAATCTGACTGTTCTCATGAAAATATGGTCTCATTTGTTGCCTTGTTTTAATTT
TTTTCTTCTTCTATCTCTACTCTAAGGATGGAGTAGAGAAACTTGGGTCTCTGGGTATTCTGTGACTGACCTACCTACCTACCTACCTACCTAC
CTTCCTTCCCTCCTTCCCTTCTTACCTCCCTCTCTCCCTCCCTCCCTCCTCCTTCCTCCTCCTCCTCCTTCTCTCCCTTTCTCTCTCTGTCTCT
CTCTCTCTCTCTCTCTCTCTCTTACTCTTTTATTTGTTACTATATTTAAGTACACTGTAGCTGTCTTCAGACCTGAAGAGGATGTCAGATCTTA
TTACAGATGGTTGCAAGTTACCATGTGGTTGCTGGGCTCTTAACAGCTCAGCCATCTCTCTAGCCCTCTGACTTTCTTATGAGTTGAGTTTCTA
AGTTATGTAGACTGATGTTCATTCCATCTACAAAATTGGGGGCTTCTGGTTTAGAGTGTCATTGAGATTATATGTGGTCTATGTTTCTTCACTC
ATCTCTTTCTGAACAACTCTGTTCCCTTTCTTGCACAGCTTGCTCTGAGAGCAGGCAATGAGAAGGAAGAAGGAGAGACGGCAGACACTGTGGG
CTGCTGTTCACTTAGAGTGGAACACATCAATTTACACCCAGAATTCGATGGTCAGGAGTATGTCCTGCAATTTGACTTTCCTGGGAAGGACTCA
ATCAGATACTATAACAAAGTCCCAGTTGAGAAACGAGTAAGTTCATGTGGCCTGTGCTTCTTTCTCTAGCTTGCTCTTTTTACATGTTTCTTTA
TTCAGCAAATATTTTTTGAGGGCTTTTGCATGTTCTGCATTTTGATGAGCTCTAGTAAAATTGATCTCAAAGAAAGAAAAGAGATAATATTTGG
TATATGGTGTGCCTCATTTCATGCCTGCCCTGCAACCTCTGCTACATTGCTGGGAACCTGTGGCCATCTCTGGAAGCAGTTTATAACAGAGTCT
GCAGAGAGTTAGCCTTTATAGCAAACTCAATGTTAAGATTGAACACAGCCGCTTTAGTGATTTAAGCATCACAGCATCTGCTGATCACTTGTTA
TCTTGTGGTTTTTCTTAGCCCCAGTCCAAGCCCCAACTGAATAAAATGGTAATCTTTCAGTTCTCAGTCTCTGAGCTCATCTCTGTAGACCCAT
GAGATAGACATAGGTACCTACTACTTTCGCCCATTCGATAACAGTGCGTGCCAGTTCAATCGAGTAACTAGGGTAAGCATAGCTTGGCTATAAG
GGAGTGTTTTTGTTCTTAGGAAGTAGATGCCAGGATGTTTGATGCTAACAAACATCCTATTTGAGTTACAATATATACCACAAATGGCTGAGAA
CTGATACTTAGGTATTTATGTAAATTTACACATGCAGAACAAGAATTTGGGTATAATATATATAGGTTGTCTTTCTACCTTTTCTCTTTTTTGA
AAGTTATTGTGAGTTTGAAATTATTTCTAAAAAATTTTAAAATAATAATTGGACTTGTTTTACGTTTTTAAAAACTTACAACTGTTTATGGAGA
ACAAGCAGCCTGAGCACGATCTTTTTGATCGACTTAATGTGAGTAAACACAGGACACTAGGCTAAAGTCCAAGCCAATCTCAAGCTCCTGGGGT
CAAGAGTTGTCAAAGGGTATTTGGACTGTCCATTCAGTCTAGATTGTCCAGTCACATTCTACATATCCCTCCTCCCTTGGGGCACTCAGTCATC
TGTAACCAGCAGCAGACCCTCCCTCCTCCCACCCTGTGGGTGGTGCTGTGGATTCCTACCAAAGCTGCAAGGCAGAGGGAGCTGAGCTTTCCAT
GGATCTTCCCTCTTCCTTTCATCCTTTCATGCTTTCATGAGACGCCCAGCTGCCTTTGCTACAGACCTAAGGCTTTCACTTGCTTTCTTTACTG
GGAGAGATATTTATAAGAAAGAAAAAATTTGTTGTCTTGAACTTAAGATTAAAGTACTTTATAGAAAGCCACTATGCAATCCTTCCTGTATTCT
GGAATTATTTTCCCTCTTTGCTAACTTCCTCTGTGAAGGACAGGACAGTAACTGGCAGGATGGTGGCAGCACTGGCACAAGGACTCCTAGTATT
CACTGTAAGGGAAAGGGTGATTTGGTGTTTACCTCAGTTCCAATATCCTCTTTGTTGTCGTGTTTAATGCAGACTGGTATTCTAAATAAACATC
TTCAGGATCTCATGGAGGGCTTGACTGCCAAGGTGTTCCGTACCTACAATGCCTCCATCACACTACAGCAGCAGCTTAAAGAGCTCACAGCCCG
TAAGTAATACTCTGTATGGTTGTCCTTGGGATGGTGCCAGTTTCCTTCTCTTCATTCTTTCCCGCCAACCTCTTGAAGAGGCTTTGCTGTCTAA
GCAAAACCAAGGCCTTTCTTCCCACTGCTGCTGCAAACTCTACATTAATCTCATAGAATACTAACAAGAGCTTTGCATCTGGTCTAAAAATTTT
TATGTTTTATCTGTGTTACTTACAAGCTCAGAGGGTATAGGCAGTGGTGTTAAATTGGGGAGAATAGAGTTGTCATGGTTACCACAAAAATGTA
GTAGTAAATCTTTTTCTTTTTTTCTTTTTGCTCTTCATAATAGTATGTAATAATTACCTCTGGGACCTTAGAACTTCTTTTCCTCTCCATTTAA
AACAAACTCTCACACTGTAGCTAAAGGCTGGGCACATTCATCATGTGATCCAAGCTAGTGAACCTTCTGCTTCAGCCTACCCACAGCTGACGCT
GTAGGCAACCCTTCTGCTCCTGCCACTTGAATTTCCACTGCCTTCTATAAATGTATCAAATGCTCTTAGACGAGCCAGAGATGGTATGCTGGAG
ATCAGTAATTAGGATTGGTTTAAACAGTGGCTAAAAAGCCTGGATGTGTTGGTGGCAGCCCAGCACTTGGAAGCAGAGGCAAACAAATCTCTTG
AGTTTGAAGCTAGCCTGGTCTATAGAGCAAGTTCAAGGACCCTGTCTTAAAAGAACACCCCATCCCCACTCCTACCCCTCCACAAAAAAGAAAG
AAAGTCAGATCCCTAGAACTAGAGTAATACATGAAACCAAACCCAGGTTCTCTGCATGAGCAGCAAGTATTTTTTAACCACTGAGCCTTCTCTG
CAGCCCCTGCACTATAGCTTAGGATCCCTTCATCTCATTCTCCTGTAGTCATTTCTTCTAGCACAGCTGCAGCATTTGCTACATCTGCCTAGTA
AGTGGGAGACAGGGAATAAGAAAAGCAGTATAAAGCTCTGGGGGCTTTGGGTTTTTGTTTTTTGTTTTGGTTTGTTTGTTTGTTTAAAGATTTA
CTTGTTTTATGTGAGTACACTGTCACTGTCTTCAGACATACCAGAAGAGGATATTGGATTCCATTACAGATGACTATGAACCACTGTGTGGTTG
CTGGGAATTGCACTCACAACCATCTCGAAAGCAGTCAGTGCTCTTAACAGCTGAGCCATCTCTCCAGGCCCAACTCTTGAAGTTTTTAAGAAAC
AAAACCAAAAATATAGATTTCCCTGTAATGTAGACAAGCTGGGCAGTAGTTATAGCTATTCAGGAACTTAGCAGTTTAGAGACCACCTGGACTT
CATAATGAGACCTGGACACAAAATCCAGTAAGGGTAAAGAAAAATATAAAAGAGAGGCTCAGAATTCCTCCTGTGACAGAAACTCATTCAGGTT
TATGTAGAAATTTACTGCCTTTGACTCAAATGTTGACCTTGAAACTTGGTTATGATAAACTGAAGGTTTGTAAAAACATCTAGAATGCATTTCA
TGTGTATATTCTTGGTATACAAACTGACCCAGTTACTATTATATTTCTTTGTAGCTGATGAGAATGTACCAGCGAAGATTCTATCTTATAACCG
TGCCAATCGAGCTGTTGCAATTCTTTGTAACCACCAGAGGGCGCCACCAAAGACCTTTGAGAAGTCAATGATGAACTTGCAGTCTAAGGTATGG
TGGGTCCAAACGTAGGGTAGCAAAGGGAGTCCATGTCTGATGTCTTCTGACAACCAGAGGCTTCTGGAATCTGACATAGTATGGCCTGGGATAA
CAGCAGGCTAATCTGGGTCGGTTTAGAAAGATTTTTTTTCAACAAATGGAAATAATTTGATAGTATCATTCTTTTTTTTTCCTAAAATATTTGT
GCTGGAGACACAAGTTCTCTATGAGCCACTTTCTGTTTTGAAGTGCTAACTTTGACATACCACTGAATTGCTAGTTGTTGTCCTTGTTATACTT
AGGGAAAATGGAAATCTTCGTGGTAGAATGCTTGCCTTGTGTGCAGCATGCTCTGGGCTCCATCCCTAGCATGACAAAAATAAAGTCTCGGTGA
TCTGGCTAAGAAACATGACAGAAAGATACACCTCACTGGCAGAACCCACCTTTGCTTGTCTACCATATGTGAAGCCCTGGGCTTGATCCCCAAA
GCAGAAGCAGGGGAAGGGAGAGGAATCCTGTTACATTGTTTGAAGTTTAAAAGATGGTGAAGCAATGGCATTTAATTCGCTCCTAATCCTAGAA
CAACTATTTACATCGGTTGAGGTGTGTCAGATATGACTGTGTCAGGTTGTGCCCTATTGGGAGAGACTGATACCAGAACAAGTTGTTGTTTCTC
TCTCGGCACTGGCTGCTTAACTATGCATTTAAATCCACAGTGAACATGTTAAAACAGACACACACCGTTACAATGGAAAACATTTAATACACAC
AGTCTGTGGCTTAGGAATAAGTATCCTCATTTAAGATCTTGAGGTGATCCTAACAATTATAAAGTTTAACACAATGATAATAAAAGTGACATTT
CCAGAGTTCTGCAACACTGCAATGCATAACACCAAAGTATTCACCATCTGTTGGCAATAGTCACAAGACAAGTTATTTCTTTGGATTCTTGCTC
ACAGTTAAAGACGAAATAATGTCAACTAGAGAGTAGCCAAAGTACAGATGCATTTTTTTTTTAATCCAAATTTATAGAATTCTATACTTGGACA
ATTTACTTTTAGAAACTGCTTTGCAATGAAACTTAACACATATTTTCAGGCTTAGAATATTCCCCTATTGAGATTTCTGCAAGATGAGAACACA
GGCATAATGTATATTAATCTAAAGCTACAACCTAGAGATTCTGATACCCCTGGCCTGAAAGCATCTCCAGATCCACAGGGAGTGAATCTCAAAT
CTGCACCTAAGGTCAGCAAAGGACGACGGTCAGCAAGCTAAGAACCCCACAGACTGCCTTTTGAGCATCAGCCTTTGCTTTGCCCTGTTAGATC
GAGATCCTCTGATGCTGCTTACTTTCCTCATGTGTTGTCATTCCAAGCCCAGAATAAATAAAGTATGAGTACCAGGTGCTATTTACACAGTTCA
GGAGACCCTTCCTGGAGAATGAGGAGGTCATTTGTTGCTCTCATTTGAAACCACTGTTTGAGCAGCTCCCGCTCTCTGCCAAAGAAGCCCTCCA
ACTGTAGGAACCTTCTCCAGTGTGCCCACAAAGTAAACACACGCCCAGTTGCCTAGTCAGTCAATGGAGTCTTTGAGAGAATTTGACATAGCTT
GCCAGTTTAGCATTCACAGAAATGGTTACGACTGTGATTTGCTGTGTTTCTAGTCTAAGAAGCCTCTGCCTAGTTGTGGCTCCAATGCTTTTGT
GTCCAAAGTCAGTTCTAGTACAACATACATAGTCGAAGGAAGCCACTAACAGTAAACATTTAATGATTCTCTCACAATGGTGAATTGTTTCTAA
TCTTGGGCTGCATTTTATGTGGGTCCCCTACCCCCACCCCCGGAAGGGTAGAGGCTGCCAATGGGTGTGGTGTTTTTCTAACAAATTTTAGGCT
CAGTCAACAACAACCCAATGTGTGTAAGTCAACATGTATTCACTCTGGGATATTCTCTTGACCTCATAGGTCAGCAGGGTGATTATGGGGATAG
GATTCTTTAGAATCCAGCAGCACAAACTCACCAGCATTAGCTACAATATCATCATATTGCTGTTTCTAAGCAACACCCAAAGCAGAATTTAGGT
TTTGTGGGTTCAACAAGCAGCAAAGAATGATGGAATTATTCTGTCTCTTCCTTGTAGATATGGATTCCATAAGATTTCCTCTGTGGAGGGAAAA
CTTCAATTGATGCTTATTGAATGATGACTAATTTTCTTCTCACTTTAGACTCCTTTACTTTCTAAAATAGTAAGCCAAGTTGAAGCAATTCCTC
ATTGATGTCTACTTGCCAGTTTATAATTTCCTGTGATATCCTCTTTACTATATCCTTTCCCAAAGCTGGCAATTCTTTCCCAGATTTGGCAGGC
TTGCTTACTAGATGTGTGTATCTCCTCTGCTACTCTCACAAGGAATGCTAAAGGCCCAGAGTGGTCGCCCACGCCTATAATCCCAGCATTTGAA
AGTCAAGGACAGGAAGATCACTCATCACTCAGTTTAAGGCCAGCTTAGTCTACAGACTGACTTCTAGTCTCTTCCTTCCTTCCTTTTTTTTTTT
TTGAAACAGGGTTTCTCTGTATAGCCCTGGCTGTCCTGGAACTCAACTCTGTATACCAGGCTGGCCTCAAACTCAGAAATCTGCCTGCCTCTGC
CTCCCAAGTGCTGGGATTAAAGCTGTGCACCACCGGCTCCAGTCTCTTTCTAACGAACTAACTAACTCATAAAACAAACAAAAGATGCTAAAGT
CTGGCATAGGATTAATTTGAAAATAGCTGTCATCTGGGTCCTCCTCTGTTTTCTAAAGCTAGTGTGTTTTCCTGAAAGAGTACAACCAGATTTC
CAGGTTACTCTACAGAACCTTATATTGTTCACCGAAGAACGTAAATGAGCAGCAGACAGCAGCTGGATTCTTTTCTGCAGTCACTGTCCACCAT
TTTCATAAAGCCTTTTTGTACTAGGAAGCACTACAGCTCCCAGTTTTACGTTCTCAGATGAAGCTTCTTTCCCTCTCCAGGTCATTTTATTCCT
AACTGCACTGCCGTTTTTCTCTGTCTATCTAGATTGATGCCAAGAAAGATCAGTTAGCAGATGCTCGAAGGGACCTGAAAAGTGCTAAGGCTGA
TGCCAAAGTCATGAAGGATGCAAAGACCAAGAAGTATCTACCTGACACTGTACCAAGGGTTGGATAAGGGAGAACAGTTGGCACCATCACTCAG
AGGCCTGAGTGTTCCAGCTCACATCGTCTCATTATGTAGCCTTGGCTTCCTAGGATAAACCACCATTCTCAGCTGTTTTCAAATACTTCTTGAG
GAAATTTTCCATGATTTTCTCCTTTAAGCAGTATATAGGATACTTGTTTGTTCTTGTCCAGAGGTCAGTCTTAATGTATGATTCTGCCATTCTT
CCAGCGTAGTAGAGTCAAAAAAGAACGCTGTACAGAGACTAGAAGAGCAGTTGATGAAGCTGGAAGTTCAAGCCACAGATCGAGAGGAGAACAA
ACAAATTGCCTTGGGGACCTCCAAACTCAATTATCTCGACCCTAGGATCACAGTCGCTTGGTAAGTCTTAGGCCTGTGTAGATTTCCTGCTTTT
GGTTAAGGAAAGGCAGAAAGTCTCTTGGATATTGCCAGCTCCTTCATGCCGTGTCTAAGTTTACATTTCTTCCAGGAGAGCCTACAGCTCTGGT
TCCTGAGGTACATGGAATATCCTAGGTGCCCCATGGGCACATTAGTATAGTAGCCCATGCCTGCTTTCGAGATCTCTGAGATAAAGAATGAGCT
GATAAAATAAAGTCCTTTGAATATTTTTGTGCACCAGAAAGCTCTGGACCCCTGCTATGGGTTATCATTGAGCTAGACTAATCTCCTTTGTTGT
CTCCATATTTATTCCTTTCTTTTTTCTTTCTTTCTTTCTTTCTTTTTTTTTTTTTACAGGTGCAAAAAGTGGGGGGTCCCAATTCACAAGATTT
ACAACAAAACCCAGAGGGAGAAGTTTGCTTGGGCCATTGATATGACTGATGAGGACTACGAGTTTTGACCAGTCTCGGCACGGCTTCTGTGAAA
AGGAACAGTGTGGTTTGGGGAAGATGGATAAACTGAGCCTCACTTGCCCTCACACCCGAGGGAGAGGCCACAAGTCTTAACAAACCAACATCTT
TCCAAAAAGATAGACCTGGAGATACTATAAGGGAGAGCTGAGCCAGTTGTCCTATGCACAACTTATTTAAAAATATTTCAGATATCAAAATTCT
AGCTGTATGATTTGTTTTGAATTTTGTTTTTACTTTCAAGAGAGCAAGTGGATGGGAATTTGTCAGCATCCTGCCAGGCAAATTCAGTTTTGCT
CCAATGTTTGGATTCTCTCAGCTACTGTATGTGAAGTCTGATTATATTGGTGCGTTTTTACAGTTAGGGTTTTGCAATAACTTCTATATTTTAA
TAGAAACAAATTCCTAAACTCCCTCCTCTCCCCTATTTCAGGAATTTAAAATTAAGTAGAACAAAACAAAAACCCAGCGCACCTATTACAGCTG
TCATTCTATCGTCATGGGAATCAGTTTTCATTAAACTTGAAGCAGTTGTGACTTCGGCAGTGTTTTGGTTCAGACACCTATTCACAGAAAAGCA
TGATCGCAAAATATTTCCTGACTTGACTGTTCCTTTTTAAATGTGAATTTTTATTTCGTTTTAATTATTTTAAAATATTTAAGCCTTCTTCTTG
ATCTTAAAGATCGTGTAGCTTGGGGTTGGCGACGGATGAAGGGCGAGTGACTCTAACCATAATGTAATAATCAGTGACTGAAACCATTTTCCCA
TCATCCTTTGTTCTGACCATTCTTTGTACCCTTTAAGAGATCCATCTTTTTCTTTGGAAACCCCAGTCTTTCATTTGAAAGATGTTATTGTATA
AAAACTTCCACACGTCAATAAATTTAGAGGAAAATCAGCATTTGGTCCAAGAAAAACAAAAACCAAAACAAAACAAAAAAGGAAAAATAATCAA
GATTTTAGGGCTTTTATTTTTTCTTTTGTAATTGTGTAAAAAATGGAAAAAAAAACATAAAAAGGAAAATTTTAATGTGAAGACTTTTTTTTTG
CTATAATCATTAGTTTTAGAGGCATTGTTAGTTAGTGTGTGTGCAGAGTCCATTCCCACATCTTTCCTCAAGTATCTTCTATTTTTATCATGAA
TTCCCTTTTAATCAACTGTACGTTATTTAAAATAAACTCCTACAACTTAACGGAAACTTAGCGTCTGCCTGTTTGTCAATGAGCCCCCACGCCA
GAGTAAAGGCTCAGGGCTGAGATTTAGTGCAGTTCATGGTCTATTCATTCAGGTCAGCAAGGGTCGGTCCCTCCCAGTGGGAAGGTGGTATGGG
CTTGTCCTGGGAGTACATCTGTCCTGATGTGGGATAAAGAGTATCAGTTTCCATCCCTAAAGACAGCCCCACAAAGCAAGGGAATGTACAATAA
ACCTTTAGGAACTGCCTAATCCCAGTGTGGGCAGTGCCTACTGAGTGGGACAGCCTTGTTTATTTGAGAAACAATCGTAGAGAGCTTTCCATGT
GTACTGAACAGAAACAGGATAGCTAGCTTATATGGAGAAGCCTCCAGACGGAATGAAGATTCTGAATTGATTGATTGAAGGACTTAACTGTTAA
CTGTAACAAGCCCAGAGCTCTGGATACCCCAAAGTAGCCATGATCCCTACCAAGTGTTCCTTCTGTTACCCTAAGTCTGAAATTCAAGGTGAGA
AAGTGAACTCCAGACTAAAGGGAAGGTCCGAATGGGCCACCAATTGAAGGGCCCACACCTGAGCTTGCTGGCATCCGCAATCTATTCAGAACCG
CCTTTCTTAGTGGTCTGCGTTATCACTGATGCTGGGACCACAGCAGCAAACTCTTGGTCCCTTGAAGCTTGAACTTCAATTGGCTATTGAAGGC
AGCACTTACTCCTGAGAATAAAAACAGTATAACCATCACTGTTTGGAACCAACAACATTATAGCCAGGTGTTTTTGAATTCTGTAGTGTTAGAG
TTAGCCAGACAGAATGTTAAAACGGGAGGCCTTTGGTAACCAACCAATACTCTCTGGCTGGTAGCTGGTAAGAAATGAACCTTAGTTTTAGGAC
CTGGTAACAAACACAACAGCAAATAGCAAAGTGCATTCCAGGCAGTCGTGGCGGGCCTCTTGAGGAAAGCCACAGAGCACACATGAATCTCAGC
TGATCCTGACTGGGACTGAGAAGAGGCTGCCAAGATTGGGGGAGCTGATGAGTTTTAGAGGTATATAAGGCTTGCGCTTAGAGAATGGGAGTAA
ACCTGCCATCCTTGATGACCCAGCACATCTCAATTGTAGCCCATTATGCAAGAGCAGAAGCTAGGTGGGCAGTATCTGGGAAGCCCCTTTCTGT
GGGCAAAGGGCAGTGCTTCTATGTGGCACCAAGCTACACATCATCCACACTCTTGCCATCTGTGCAGCAAGTGCACTGTCTCTTCCAAAAGCTG
GGACCTAACAACTGACACATTTAAAAAGTGAAAAGAGACACTTCACACACACACACACACACACACACACACACACACACACACACACACCTCA
GCCTTTCCAGCCACAACCTCTCTTCAGTTTCACAATCAAGTAAGTACCTGCGATGAGTCACCCACTGCACTGTCTTTTCCCACCCTCTGCATCC
AGTGTCTACCACAACCCTCTCCCTGGGTTCTAACCCTGGTCACCAGTGACCACGCAACAAGGAGAGAGTGCAGTCTTCATTGACCATCTTGCCT
AAGCTCTTTTTGGGTGGAATTGAATGCTGTTACTTTACATGCCATAAATGTAACATTTTAATAAATGATTTTTAGTAACTGCTGACAAGTTCAT
CCATCATCATGGGTCAGTTTTAGATCACTTTTCATCCCTCACACCCATTTGCAGCTATTCTGCACTCCCATATGCATCCTCCACTGGTCTCAGG
TTTATTCTCTAAACATGTCTTATGGATGTTTTATTTGAAAGAGCTCATAGTATATGTCCACCCCTTGTAAAAGTGCCTCTCTGGCTCCTGTAAT
GTCGCCCAGTTTCACTCCTATTTCTGTCAGGCTGTTTGTGGCTGAGACATTTTTAATGTAGCTGCCATCGTCCTTCTCATTTCATGTAGCCAAT
GCAGTCACACTCCTGACCTCTGCACGCACAGTCAGCCACACAGTTCTGCAGGATATCCACAGAAACCTCTGGACGACAACTCAGGACTCGCTGT
TCTAAGCCTGCTGGGTCTGGGTTTCCTGTGTGTGAAAAGCACCTCACTGAACCAGGCAGACTCAGCCCTTGGCCCTTCCTTCCAAGCTCATATC
TAGTAATTTGTCCACTTTGAAATTCTTTCCTAAATACTTGTACCACATATAGCCATTTTCCCAATTTTTAAAATTTCTTACATTTTTTTAAACC
TTTTTTTTTTCTAGAACTTTTATTTCAGCCCTTGCAGATCCCTCCTATAAGACATTTTCAATTTGTTCGGAACAAAAGAGCACTTCTTGGAGAA
CATACTGCCCTGAAATGACCTCAGTCAAGCTAGTTTTGGATGCTTATGAGTAGTCCCCTGATGACAAATCAGTAAACAGGGAGGGAGGGGAGAT
TTAACAGACTTTCCCCACAACCCTAAGGAAGCAGCCTTTTTGAAATTGCCATATAGATTTTTTAGCTTAAATAATTACGCTGTACTTACATATT
TTAAAAAATCTTTCAGAGAAAATATTCCTGGAAAACAGTGCTCATCAGTGCAGAGGCTGGGGCTAGTGGTGTAGGCCAGAGGCAGGGCCCGTGA
CCCTGGGGTCTGCCCATAACACTATAAAACCACCACCACCAAAACCGTCAATGTAATCAGTTCCCAAAGTTGGGTGGAGGCTCACTATACTAAC
TGTCATGCCTGTACTTACATTGGAAAATCCTTATAGCCGGGCAGTGGTCGCGCACGCCTTTGATCCCAGCCCTTGGGAGGCACAGCCAGGCAGA
CCTCTGAGTTCGACGCCAGCCTGCATGTTTAAATTAAGGCAATTATGCTTAAATTAAAATTCCCAGTCACCGCAGATCTGCCCTATATACTGTC
TGGGTAGAAGTTACAAGCAGTATATTTTTCAAACTCAAACTTCACACGTAAGATGGGTGCATCTTAGGGCTAGAGAGATGCTTAAGGGGTTAAG
AACACTTGTTACTCTTGCAGAGGATTGGTGTTTGGAACCTAACAACTACATGGTGGCTCACAGCCAACCAAGTAACAATTCCAGGTGATCCAGT
AATCTCTCCTGACCACTGTGCACCGGGCACACAACTGGTGTGCATGCGTATACACAGGCAAAGCACTCATACACAAAGTAATTTTTAAAAGGTA
GGTACAGCTTACGTGTAAATTATTCTTCAATAAGTCTGGGCTTTCAGAAGCAGTGGGGACGATGTGCTTTGATAACATTGGATGGTTCTCTCAT
GGTGAAAAACACAGACTCAAGGCTGGAGAGATGGCTCAGCAGATAAGAGTCCTGAATTCCCAGCAACCACATGGTGGCTCACAACCACCTGTAA
TAATATCTGATGCCCTCTTCTGGTGTGCCTCAAGACAGCAACAGTGTACTCATCTATAATAAATGAATAAGTCTTTAAAAAGAGAAAAAGACAG
ACTCAAAGATTCATGCAAAGTTTACTGATAGGACTGAATGTAGGGAATCAATATTTATAAATAGTTTTTAACAATCCTATTCAAAGTATACACG
TGCCACTGAACACATACTTGGCATTTTAATCATTCATCTTTAAACCTTTGTACTTCCTTTGCAGAAACACTCCACAAAATACCTTGGGGTGACC
TTATTGTGAAAGGAATAGTTACCTCATTTGGAGAGGCTGTTTGTCATGAATACACAGCACCTCTCACTTTGTTCTCTTCCCATAATCACTAAAG
AATCTAGATAAGGTCCTTCTTGCTCCCTGTGCCTTTGTCAGACCAACCATGGCCTGTTTCTGAACAGGCTTGCTGTGTTCCTGCCCTGCTGAGA
TTCTCTAGAAGGCACAGTAGGGATGTGTGCTGGAACAAAGGGGGCGAGAGTAAAAGCAAGTCCATGCTGGTCTCAGTTTCCCCTGTCTTCAGCA
CCACATGCTTGACCTCAGTGAAACAAGCACTGTACCGGCCGTTCCTGGCTGAAGAGAGCTAATGGTAACAGTCAGTAGTGAGGCAGCCAGGGCT
GTGGACACAAGAGGTTGTTGGGAACTGTTGGCATAGATGTGAGTTATGGAGCTTTTGTTCTACAAGACAGGGTTTCTCTGTGTACCCTTGGCTA
TCCTGGAACTTGCTCTGCAGACCAGGCTGGCCTCAAACTCATAAAGATCTGCCTGCCTCTGCCTCCCAAGTGCTGGGATTAAAGGTGTGCCACC
ACCACCCAGCAGGTACGATTTTTAACTTGAGTAAAAACAAACAAAACCCCTAAAGTTCCTTTAAGGGACTGAGAATGCAACTGACTTAAGGAAA
GGAGCCCCGAGGTTATGATGTCAGAAGGGATGGGGCCCTAGATAGGTTTGCAGGTCAGAGGACAAGGGCTTATACTGCAGGTTCACTGAGGTGT
GCACTTAGGAAGTGCTTGCTGCATGTACAGTTAACAGCAGAGGAAATAAGGGACGGAACACAGCTTGATGAATGGATTAAGCAGACACTTCAAG
TCTAAGTCTTTGTCTCCCTCTGTGAACGGAACATCACTATGCTCTGACATGATGACTTCTAGAGTCAATCATTATAACGAAGAAAAGTGTGTTA
GCACTTGGTACTAGCCTGCTAAGAATGCCCTCTGTTATTTTAATCACATACATAGTCATGTGAGAATATTTTCTTATAATTTAATTCCAGGAAA
ATGTTATTCCCTTTCCACAGAACTAGTTAGCAAACATTGAGAGTCACTACTTTAGCTACTATAGAGCTCAGCCACAGCTGCCTCTTAATCGCAG
CAGCTCCATTACCACTCAACCATACTGTGATTGCCCTTATAATCACATCTCCCATTTCAACCACACAGCATTTTTGTCCTTTTCTGTTTTAAGT
GCCCTCTATTTTTCCTAAACAGCTTGGTGCAGTGGTGCCCACTGGATGTCTCAATTCTTGGGAGGCTGGCCAGGCCTCAAGTTTAAGGCCAGCC
TGGGTTCTACAAGCAAGACCATACCTGAAGAAAAATGCAGTGAACATAGCAGCGTACCTGCTTCCTGTTCAAGGAAAGACTTGTCATCACTTCT
GGAAGAAGTGTAAATAGAAATCCATCTGCCAGTCCGTCAGCTCACAAAGAGCCAGGAGGCTGAGGATGAACGTTTTGCAGAACAATCAACATCC
ATTCCAGGATAGCACTGCACAACACAGTTCCCTGGAAGTTGTCTGAGGCTGTTCGCACTCCCATCTCCTTCCTGTTGCTTCCACAATGCTGACC
TTAGGGCTGCTCCCTAAAAAGTATTCTACCCACTAACCTATCAGAGACAGCACCCTAAAACAAATTCCGACCTAGCCGGGAAGCACAGTAGCTC
ACATTTTTAATCCCAGCAAGGCTGAGTTGCTGAGTCAGGAGAATAGCTAAACTCAAGATGAGCCTGGATTTGTACAAACTTGTACAAAATAACT
AANNNNNNNNNNNNNNNNNNNNNNNNNNNNNNNNNNNNNNNNNNNNNNNNNNNNNATCTCTAGGACCCACATGGTAACTGTAAATAAAGAAGCT
CACTTAGGATACCCAAGATATAAGATACAATTTGCTAACGCATGAAATTCAAGAAGAACGAAAGACCAAAGTGTGGACACTTTGCCCCTTCTTA
GAAATGGGAACAAAACACTCATGGAAGGAGTTACAGAGACAAAATTTGGAGCTGCGACGAAAGGATGGACCATCTAGTGATTGCCATATGCAGG
GACCCATCCCATAATCAGCTTCCAAACGTTGACACCATTGCATACACTAGCAAGATTTTGCTGAAAGGACCCAGATATAGCTGTCTCTTGTGAG
ACTATGCCGGGGCCTAGCAAACACAGAAGTGGATGATCACAGTCAGCTATTGGATGGATCACACGGCCCCCAATGGAGGAGCTAGAGAAAGTAC
CCAAGGAGCTAAAGGGATCTGCAACCCTATAGGTGGAACAACAATATGAACTAACCAGTACCCCGGAGCTCTTGTCTCTAGCTGCATATGTATC
AAAAGATCGCCTAGTCAGCCATCACTGCAAAGAGAGGCCCATTGGACTTGCAAACTTTATATGCCCCAGTACAGGGGAACCCCAGGGCCAAAAA
GGGGGAGTGGGTGTGTAGGGGATTGGGGGGTGGGTATGGGGGACTTTTGGGATAGCATTGAAAATGTAAACGAGGAAAATACCTAATAAAAAAT
AAATTAAAAAAAAGAAGAAGCTCACAATATGCTTACCACTGTTCTAAGTAGTTATTAAACCCAATATGAGATCAGGCCCACAGGCCAGAGGGGC
AGCTGGGCAGTCTTTCCTTGACTCCAGGAACAGGCTTGGTATAAGCTAAGGTTGAAGCATGAGTGTTGCCTGAAATAAGCCCCAATCTGGGCTA
GTCGGGGTGACGTCACAGGCAAGTGCCTTGTGTGGGGGCTAGAGCACCTCCCAGACAGCACAAATGTATATACATTACCAGTGACACCTACACA
TCCTTATATATGCTGAGCTGGGGGAAGCCCATACTGGCTACACCCTGTGTGTGCCCTACTTTTCCCAAACTTCCTTGGGTAGAAGGAGACACCT
AAGGCCTAGGAAGCTAGGAAGAGGAAATGAGGCCCTGTTTCCCAATTATAGGCCTCGCAAACAAATTGCTCTTGGAAGAAAATCATGGAGCCCC
TGGGGGTGGGGGTGGGGTCTTGTTACAGACACAAAAGCAAAAAAGGTTTGGGCTGAACACAAGGAAGCTCCCAGAAAATAGAATTTTAAAGCAT
ACTGTAGCCTCTAGGCTGCTCGAGTTGGCACAGAAAGCTCAACAACGATTACAACATTTTAAGAGGGTGTCTCCTGAGAGAACCGGCCAGACCA
GGCAGGCAGGGAAAGGCCCTGTTCAGCTCCATCTGCCCTCTCTGTCTAATCATCCTCGCTGGCCATTCCCCTCCACTGAGTAAAAACCCCAGGG
CCTTTGCACATGCTGTTATTCATACCTGGAAAGTACTTTCCTCCAGCCTTCCCTTCAAAATACATATGTCCATCTCTTTACACCATTTGGCCTC
TCTTGAAGTCCTACAGACATAAGACACAGCTCCTCTTACTTAATGATTGGCCAGCTAGCCAATGGCCACCAGGATTACCTCTCACCCAGTGGGC
TCTCTTGTGGAACACAGACACTCAGCTTCCCACTTATTACATAGCCTGACTTCAAGTCACGGGGCTCTGAAACCTTGATTAGAAGATAATTAGG
ATCATGAGTTGTGCAAGCCAACCTCAAGTCCAGTTTCCGCCTACATCAGAGGCCTGTCACTAGGTGGCAGTCAGTCTATCTCAACTCCCCAGTC
CCTCAGGACAAAGTTCCTCAGTGGTATACAGAATTCGGACGTTCTTGAGACCACCCTCAAGGGAAATAGCGCATCTGTCACTATTTGCCTGGCA
AAGCGAAGGTGGCCCAGGTGGGTGGGTTGTCCAAACCCATACATCACAAATTCTAGTCTCAGGAATCCCAGGGGAGCTTTCCTGCAAGGGGATG
TTGTGTGGGACTTCTCACCTCTGAAATGCAGATGCTGTCCAGAGCTGCAGGGTAGCTGTCCAACTAACTGTCTGCTCATCATTGGCCAGACGGC
AGGATCAAGGGATGCCCTCGGGTTTACCCGTGCTGTTCAGAGAACGCCTTTTGGAAGATTGATTTTAAGTTATTTAACAGTCACAGACAGGTGT
CATGTCTGGAGAATAGAGGCAAAGTCCGCGGTGAGGGATGAAGCAGGAGAGATAGGGGAAGGCAAGACAGGACTGCTGGGCCACGAAGCTGTGC
TGATTTGAAGCACAGTGGGAATTCACGTACGCAATTTCAAAGGCTTTAGTGGTAAATTCTGAAGCTCAGATGCAGGCAAGACCCAAGAGGATAG
TGTACACAGAGAGAAGAGGGGTCCTCAGGATCGTGCGTAGAGTGGAGAGAGCCCCAAAGGCAGGAGGGAAGAGCCTCAGTGGATTACTTAGGGA
TGAGGGAGAGAAGAAAAAACGTTCTTGCAAGGTGTGGGGTCTTCCAAATTCAGGAGTTCACTGCCATATAGAGAAGGTGTAGCGGGTGAAAGGG
GCCATGTGATGAGGATGGCAAGCAAGGCTGTGGCGCAGATGACGAGATGCCTGGGTCGGGAGGTCAGGGGAGACCCAGGATTGGGGTCACCTGT
GTCTGCGCAGAGGGGAAGCCACCCTGCAACTGGCCCAGCACTGAGTCCAGAGGAAAATGAGGCAGAGGACAAACCAGAGCTTCGGAGACTAAGT
GCAGGTAGGGCGCGGGCGGAGCGTGACGAGGGCAGCGGACCACGCCACAGGCCTCGAAGGCCACCGGACCCGCGTCCGAGAGTCTGAGGGCCCT
GCCCACACCTGCGTGGCCCCCTCCCCAGAGGCCACACTCCAAGGCCACCCTAGAACCCGTCTGTCTGCTCAAGCCCTTGCAAAAGACGTCTGCG
CAGAGGGGGCCTGGCAGGCGTGCTGTCACTCACGGCCTGTTAGCCAATCCACGAGTGCGCCCCTCCCCGGAGAGGGTGCGCGGAGGGCCCGCCC
CCGCCGCCACCGCGGGTGTGAGGAGGCCAGGCTGGCGCGGCTCCCTCCGCCCGGCAGCCTTGCCAGGTAACCGGGTTCGGCGGGAGGGCTGGGG
GTCGCGCAGCCCCCTCGCTCCCTGGGAGGCGTGCACACTGCCGCGGCGGGTCCCGTGTGGGCCGGAGGCCCGTGCNNNNNNNNNNNNNNNNNNN
NNNNNNNNNNNNNNNNNNNNNNNNNNNNNNNNNNNNNNNNNNNNNNNNNNNNNNNNNNNNNNNNNNNNNNNNNNNNNNNNNNNNNNNNNNNNNN
NNNNNNNNNNNNNNNNNNNNNNNNNNNNNNNNNNNNNNNNNNNNNNNNNNNNNNNNNNNNNNNNNNNNNNNNNNNNNNNNNNNNNNNNNNNNNN
NNNNNNNNNNNNNNNNNNNNNNNNNNNNNNNNNNNNNNNNNNNNNNNNNNNNNNNNNNNNNNNNNNNNNNNNNNNNNNNNNNNNNNNNNNNNNN
NNNNNNNNNNNNNNNNNNNNNNNNNNNNNNNNNNNNNNNNNNNNNNNNNNNNNNNNNNNNNNNNNNNNNNNNNNNNNNNNNNNNNNNNNNNNNN
NNNNNNNNNNNNNNNNNNNNNNNNNNNNNNNNNNNNNNNNNNNNNNNNNNNNNNNNNNNNNNNNNNNNNNNNNNNNNNNNNNNNNNNNNNNNNN
NNNNNNNNNNNNNNNNNNNNNNNNNNNNNNNNNNNNNNNNNNNNNNNNNNNNNNNNNNNNNNNNNNNNNNNNNNNNNNNNNNNNNNNNNNNNNN
NNNNNNNNNNNNNNNNNNNNNNNNNNNNNNNNNNNNNNNNNNNNNNNNNNNNNNNNNNNNNNNNNNNNNNNNNNNNNNNNNNNNNNNNNNNNCC
TCGCGCCTGCCCGCCTCCCAAACACTTGGGCAAACTTTCGGGCCTCGCGCCTGGCGCCCCGTCTCCGCCCAGTCCCTGGTGGTCACTCTGGGGC
GGGTGGAGGGGGGCATCCGGGTCTTGGATCACCTGATAGGACACCCCCTCCCCCAGTAGGGGGGGAGTGTTCCAGGCACTTTGCCCTGAGGCCT
AAGAGTCCTCACTGGTTGGACAAGTGGAGTGGGATTCCGGCCCTTAGCATCGGGCGGCTGTCAGTGGCTGTCAGGGGAAGCCAAGACAGGGACC
CCCTCATCCAACCTGAGAACCTGGGGAACCGACAAGATCTTCCTGCCCACTGCCATTTCTCCAGAGTGTGCTGTCTGTGAAAACTCCTAAGAGC
TCCGGGATGGGCTTATTGGCGCAAGAACCTTTGGAATCCTCATGTAGAACTTAGGCAGATGTTGGGGTAGGGCTGGTTGTGGAGCAGAGCGGGC
CTACTCATCTCCCTCTTCTTTGGGAGGATGGGGTATGAAAGCTAAAACCGTGACTGCTTCCCCCTCCCCATGTCCCGTGGATGGTTTTTTTTTT
TTTTTTTTTTTTGCCCCAGATCTGAATTTTGGAGGTCCA
MOUSE SEQUENCE—mRNA
ATGAGTGGGGACCATCTCCACAACGATTCCCAGATCGAAGCGGATTTCCGATTGAATGATTCTCACAAACACAAAGATAAACACAAAGATCGAG
AACACCGGCATAAGGAGCACAAGAAGGATAAGGATAAGGACCGGGAAAAGTCTAAGCATAGCAACAGTGAACATAAAGATTCTGAAAAGAAACA
CAAAGAGAAAGAGAAAACCAAACACAAAGATGGCAGCTCAGAAAAACATAAAGACAAACATAAAGACAGAGACAAGGAAAGACCGAAGGAGGAA
AAGATTAGAGCTGCTGGGGATGCAAAAATAAAGAAGGAAAAGGAAAATGGCTTCTCTAGTCCGCCACGAATTAAAGATGAACCTGAGGATGATG
GCTATTTTGTTCCTCCAAAAGAGGATATTAAGCCATTGAAGAGGCTTCGAGATGAAGATGATGCTGATTATAAACCTAAGAAAATTAAGACAGA
AGATATCAAGGAGAAGAAAAGAAAACTAGAAGAGGAAGAGGATGGTAAATTAAAAAAGCCCAAGAATAAAGATAAAGATAAAAAAGTTGCTGAG
CCAGATAATAAGAAAAAGAAGCCGAAAAAGGAAGAGGAACAGAAGTGGAAATGGTGGGAAGAAGAACGTTATCCAGAAGGCATCAAATGGAAAT
TCCTAGACCATAAAGGGCCTGTCTTCGCTCCACCATATGAGCCTCTGCCAGAGACTGTCAAGTTTTACTATGATCGTAAAGTTATCAAGCTGAG
TCCTAAAGCAGAAGAAGTAGCTACATTCTTTGCAAAAATGCTTGACCACGAATATACTACTAAGGAAATATTCTGGAAAAATTTCTTTAAAGAT
TGGAGAAAGGAAATGACTAATGACGAAAAAAATACGATTACCAACCTAAGCAAATGCGACTTTACACAGATGAGCCAGTATTTCAAAGCGCAGT
CAGAAGCTCGGAAACAGATGAGCAAGGAAGAAAAATTGAAAATCAAAGAAGAAAATGAAAAGTTATTGAAAGAATACGGATTTTGTGTAATGGA
TAATCATAGAGAGCGGATTGCCAACTTCAAGATAGAGCCTCCGGGGCTTTTCCGAGGCCGAGGGAACCACCCCAAGATGGGTATGCTGAAGAGA
AGGATCATGCCTGAGGACATCATCATCAACTGTAGCAAAGACGCAAAGGTTCCTTCTCCCCCTCCTGGTCATAAATGGAAAGAAGTCCGACATG
ATAACAAGGTTACTTGGCTGGTCTCCTGGACAGAGAATATCCAAGGTTCTATCAAATATATCATGCTGAATCCCAGTTCACGAATCAAGGGTGA
GAAAGACTGGCAGAAGTATGAGACTGCGCGGCGTCTGAAGAAGTGTGTGGACAAGATCCGAAATCAGTATCGGGAAGACTGGAAGTCCAAAGAG
ATGAAGGTTCGTCAGAGAGCTGTAGCACTGTACTTCATTGATAAGCTTGCTCTGAGAGCAGGCAATGAGAAGGAAGAAGGAGAGACGGCAGACA
CTCTGGGCTGCTGTTCACTTAGAGTGGAACACATCAATTTACACCCAGAATTGGATGTTCAGGAGTATGTGGTGGAATTTGACTTTCCTTGGAA
GGACTCAATCAGATACTATAACAAAGTCCCAGTTGAGAAACGAGTTTTTAAAAACTTACAACTGTTTATGGAGAACAAGCAGCCTGAGGACGAT
CTTTTTGATCGACTTAATACTGGTATTCTAAATAAACATCTTCAGGATCTCATGGAGGGCTTGACTGCGAAGGTGTTCCGTACCTACAATGCCT
CCATCACACTACAGCAGCAGCTTAAAGAGCTCACAGCCCCTGATGAGAATGTACCAGCGAAGATTCTATCTTATAACCGTGCCAATCGAGCTGT
TGCAATTCTTTGTAACCACCAGAGGGCGCCACCAAAGACCTTTGAGAAGTCAATGATGAACTTGCAGTCTAAGATTGATGCCAAGAAAGATCAG
TTAGCAGATGCTCGAAGGGACCTGAAAAGTGCTAAGGCTGATGCCAAAGTCATGAAGGATGCAAAGACCAAGAAGGTAGTAGAGTCAAAAAAGA
AGGCTGTACAGAGACTAGAAGAGCAGTTGATGAAGCTGGAAGTTCAAGCCACAGATCGAGAGGAGAACAAACAAATTGCCTTGGGGACCTCCAA
ACTCAATTATCTGGACCCTAGGATCACAGTGGCTTGGTGCAAAAAGTGGGGGGTCCCAATTGAGAAGATTTACAACAAAACCCAGAGGGAGAAG
TTTGCTTGGGCCATTGATATGACTTATGAGGACTACGAGTTTTGACCAGTCTCGGCAGGGGTTCTGTGAAAAGGAACAGTGTGGTTTGGGGAAG
ATGGATAAACTGAGCCTCACTTGCCCTCACACCCGAGGGAGAGGCCACAAGTCTTAACAAACCAACATCTTTGCAAAAAGATAGACCTGGAGAT
ACTATAAGGGAGAGCTGAGCCAGTTGTCCTATGGACAACTTATTTAAAAATATTTCAGATATCAAAATTCTAGCTGTATGATTTGTTTTGAATT
TTGTTTTTACTTTCAAGAGAGCAAGTGGATGGGAATTTGTCAGCATCCTGCCAGGCAAATTCAGTTTTGCTGCAATGTTTGGATTCTCTCAGCT
ACTGATATGTGAAGTCTGATTATATTGGTGCGTTTTTACAGTTAGGGTTTTGCAATAACTTCTATATTTTAATAGAAACAAATTCCTAAACTCC
CTCCTCTCCCCTATTTCAGGAATTTAAAATTAAGTAGAACAAAACAAAAACCCAGCGCACCTATTACAGCTGTCATTCTATCGTTATGGGAATC
AGTTTTCATTAAACTTGAAGCAGTTGTGACATTGGCAGTGTTTTGGTTCAGACACCTATTCACAGAAAAGCATGATGGGAAAATATTTCCTGAC
TTGAGTGTTCCTTTTTAAATGTGAATTTTTATTTCGTTTTAATTATTTTAAAATATTTAAGCCTTCTTCTTGATCTTAAAGATCGTGTAGCTTG
GGGTTGGGGAGGGATGAAGGGCGAGTGAGTCTAAGGATAATGTAATAATCAGTGACTGAAACCATTTTCCCATCATCCTTTGTTCTGACCATTC
TTTGTACCCTTTAAGAGATCCATCTTTTCTTTGGAAACCCCAGTCTTTCATTTGAAAGATGTTATTGTATAAAAACTTCCACAGGTCAATAAAT
TTAGAGGAAAATGAGCATTTGGTCCAAGAAAAACAAAAACCAAAACAAAACAAAAAAGGAAAAATAATCAAGATTTTAGGGCTTTTATTTTTTC
TTTTGTAATTGTGTAAAAAATGGAAAAAAAAACATAAAAAGGAAAATTTTAATGTGAAGACTTTTTTTTTGCTATAATCATTAGTTTTAGAGGC
ATTGTTAGTTAGTGTGTGTGCAGAGTCCATTCCCACATCTTTCCTCAAGTATCTTCTATTTTTATCATGAATTC
MOUSE SEQUENCE—CODING
ATGAGTGGGGACCATCTCCACAACGATTCCCAGATCGAAGCGGATTTCCGATTGAATGATTCTCACAAACACAAAGATAAACACAAAGATCGAG
AACACCGGCATAAGGAGCACAAGAAGGATAAGGATAAGGACCGGGAAAAGTCTAAGCATAGCAACAGTGAACATAAAGATTCTGAAAAGAAACA
CAAAGAGAAAGAGAAAACCAAACACAAAGATGGCAGCTCAGAAAAACATAAAGACAAACATAAAGACAGAGACAAGGAAAGACCGAAGGAGGAA
AAGATTAGAGCTGCTGGGGATGCAAAAATAAAGAAGGAAAAGGAAAATGGCTTCTCTAGTCCGCCACGAATTAAAGATGAACCTGAGGATGATG
GCTATTTTGTTCCTCCAAAAGAGGATATTAAGCCATTGAAGAGGCTTCGAGATGAAGATGATGCTGATTATAAACCTAAGAAAATTAAGACAGA
AGATATCAAGGAGAAGAAAAGAAAACTAGAAGAGGAAGAGGATGGTAAATTAAAAAAGCCCAAGAATAAAGATAAAGATAAAAAAGTTGCTGAG
CCAGATAATAAGAAAAAGAAGCCGAAAAAGGAAGAGGAACAGAAGTGGAAATGGTGGGAAGAAGAACGTTATCCAGAAGGCATCAAATGGAAAT
TCCTAGAGCATAAAGGGCCTGTCTTCGCTCCACCATATGAGCCTCTGCCAGAGAGTGTCAAGTTTTACTATGATGGTAAAGTTATGAAGCTGAG
TCCTAAAGCAGAAGAAGTAGCTACATTCTTTGCAAAAATGCTTGACCACGAATATACTACTAAGGAAATATTCTGGAAAAATTTCTTTAAAGAT
TGGAGAAAGGAAATGACTAATGACGAAAAAAATACGATTACCAACCTAAGCAAATGCGACTTTACACAGATGAGCCAGTATTTCAAAGCGCAGT
CAGAAGCTCGGAAACAGATGAGCAAGGAAGAAAAATTGAAAATCAAAGAAGAAAATGAAAAGTTATTGAAAGAATACGGATTTTGTGTAATGGA
TAATCATAGAGAGCGGATTGCCAACTTCAAGATAGAGCCTCCGGGGCTTTTCCGAGGCCGAGGGAACCACCCCAAGATGGGTATGCTGAAGAGA
AGGATCATGCCTGAGGACATCATCATCAACTGTAGCAAAGACGCAAAGGTTCCTTCTCCCCCTCCTGGTCATAAATGGAAAGAAGTCCGACATG
ATAACAAGGTTACTTGGCTGGTCTCCTGGACAGAGAATATCCAAGGTTCTATCAAATATATCATGCTGAATCCCAGTTCACGAATCAAGGGTGA
GAAAGACTGGCAGAAGTATGAGACTGCGCGGCGTCTGAAGAAGTGTGTGGACAAGATCCGAAATCAGTATCGGGAAGACTGGAAGTCCAAAGAG
ATGAAGGTTCGTCAGAGAGCTGTAGCACTGTACTTCATTGATAAGCTTGCTCTGAGAGCAGGCAATGAGAAGGAAGAAGGAGAGACGGCAGACA
CTGTGGGCTGCTGTTCACTTAGAGTGGAACACATCAATTTACACCCAGAATTGGATGTTCAGGAGTATGTGGTGGAATTTGACTTTCCTTGGAA
GGACTCAATCAGATACTATAACAAAGTCCCAGTTGAGAAACGAGTTTTTAAAAACTTACAACTGTTTATGGAGAACAAGCAGCCTGAGGACGAT
CTTTTTGATCGACTTAATACTGGTATTCTAAATAAACATCTTCACCATCTCATGGAGGGCTTGACTGCGAAGGTGTTCCGTACCTACAATGCCT
CCATCACACTACAGCAGCAGCTTAAAGAGCTCACAGCCCCTGATGAGAATGTACCAGCGAAGATTCTATCTTATAACCGTGCCAATCGAGCTGT
TGCAATTCTTTGTAACCACCAGAGGGCGCCACCAAACACCTTTCAGAAGTCAATGATGAACTTGCAGTCTAAGATTGATGCCAAGAAAGATCAG
TTAGCAGATGCTCGAAGGGACCTGAAAAGTGCTAAGGCTGATGCCAAAGTCATGAAGGATGCAAAGACCAAGAAGGTAGTAGAGTCAAAAAAGA
AGGCTCTACAGAGACTAGAAGAGCAGTTGATGAAGCTGGAAGTTCAAGCCACAGATCGACAGGAGAACAAACAAATTGCCTTGGGGACCTCCAA
ACTCAATTATCTGGACCCTAGGATCACAGTGGCTTGGTGCAAAAAGTGGGGGGTCCCAATTGAGAAGATTTACAACAAAACCCAGAGGGAGAAG
TTTGCTTGGGCCATTGATATGACTTATGAGGACTACGAGTTTTGA
HUMAN SEQUENCE—GENOMIC
TTCAAACTCCTGGCCTCACGTAATCCCCCCACTTCAGTCTCCTGCCTAGCTAGGACTACATGTCCATACTCCCATCCCTGACTAATTTCAAAAA
CATTTTTGCGGGGAGACATGAGGTCTTCCTATCTTCCCTTGTCTGGTCTTGAACTCCTGGGCTCAAGCAATCCTTCCACCTTGGTCTCCCAAAG
CATTGAGATTACAGGTGTGACCCACCATGCCCAGCCAAGCCTCAAGTCTTGAATACTTTAAATCCATTTTCTTTCTTTTTTTTTTTTTTTTGAC
ACCCTCTTGCTCTGTTGCCCAGGCTGCAGTCCAATCGTCCAATCTCAGCTCACTGCAACCTCTGCCTCCCAGGTTTAAGCAATTATACGTGTGT
CCCACCACACCCAGCTAATTTATCTCTGTCTGTGTGTGTGTGTGTGTGTGTGTGTGTGTGTGTCTATTTTTACTACACACCGCATTTCCCCAAC
TTCCCCAGGCTGGTTTCACACTCCTCAGCTCAGCCAATCTGCCCACCTCAGCCTCCCAAGGTGCTACCATTACAGCCATGAGCCACCATGCCTC
CCCTGTAGGTAATATTTTCTAAAACACATATTATGTTCCTCCATTGCTCATAGCAACTCTCAGTGACTTCCCACTCCTATCAACATAAACTCCA
AATGCCTTAGAGACCCTGCATGAACTCCCCCTTGCTTACCTCTCCAGCTTCATCTCTCACTACTCCTCTTCACCCTCTACCCCTTACCCATACT
GAATTACCAGCAGTTCCCCACATAAACCCTGCTCTTTCCAGTTTCCAAATTTTTCCCCATCTCTTCTCTTGGCCTTGAGTGCTTGTCTCCCTCA
CTTGCCTTCTTTATTCTCCCCAACCTTTACCTGGCTGACTTCTGTTTCCATTTTGAGACCTAAGTTTAAGTGCCATTTCCACTGGAAATCCGTG
CCTCACTCTCTAATTCTGGATGGCAGTTCTTCTAAACGCCTCCTACCCCAAACACACTCTACTTTATCCTCGACGCACTCATCACAGTAAGTGA
CAATTACTTGTTCCCTTCTCTGTCTCACCCACCAGACCTGACCTCCTTGAGAGCAGGGGCCTTGTCTTTCTAGTTCACGGCTGAATTCCTAATA
CTAGCTTAGTACCTGGCTTATAGTTGATTGTGTGTGTGTGTGTGTGTGTGTGTGTGTGTGTGTGTGTGTGTGTGATGCAGGGAAGCCAAAGAAG
GGTCAGGATGCAATGATAACCTGGGGAAGGAGGGACAATTACAAAGGAAAGTCTTGGGCACATTCCATACACGTAGTAGCCACCAATGGGATGT
GGAGGACAGGATCAAGGGTTAACTCAAGAGGCTTCAAGGTTCTGAGCCTGAGTGACTGGGAGGAATAGAGCTATTCACTAAGCAGAGACCATAG
AACCCAACCCCAGTTTCAGGAGAAAAGCTGAACCCACGACCAAACCCCTCTCCCGGTCATCAAGTGGACACATGAAATAGGCATATGGGTAAAT
ATTTCTATGGTTCTAAAAAGGAGTCAAGGCTCGACACATTCATTTAAGAAGCTACCTGGCCAGGCACGGTGGCTCACGCCTGTAATCTCAGCAC
TTTCGCAAGCCAAGGTGGGCAGATCATTTGAGGTCACGACTTTCACACCAGCCTGGCCAACATGGTAAAATCTCGTCTCTACTAAAAATATAAA
AATTACCCACCTCTCCTGGTGGGCACCTCTAATCCCACCTACTCCCCACCCTCACCCACGACAATTACTTGAACCTGGGAGGTGAGGTTGCAGT
GAGCTGAGATCACACCACTGCACTCCAGCCTGGGCAACAGAGTGAGACTCCGTCTCAACATAAAAACAAGGCTACCAAGATGGGGGCATATAGA
GAGAAGACAAGTCTCATCATATAATCTTGGGGATCCATTAAATTGTGCTGAAACAACACACCCACACAGAAATCCTATTTCCACACCTAAGAAA
AAACCCACGAGAATTAATGGTCATTCGATCCAAATCCAAACCACCTCAAAGAATGTGCTCATCCACCTCATTCAGTCTTCCACGAACGTCGACA
AGAATAGGCTACTCTACTTGCAAACTACCAACTCCCTGATTAGAATAGAAGCCAGACCAACACTGTTAAAGCAATCAAAAATAAACCACAAAAG
GCAGCACATGTAGACTCTCCTTTCTGAATCTTTCAAACACAGGTGAGGGCAACAGTGACCTAACCACAACTTCCGAAGCACCTTACGGGTTCTA
AGACTGGGCTCCATACACACACTGCTTAACTTCAAATCATAGCCCCAACACTCAATAGCTGTGTGACTTTGGGCAAGTTAACTTACTTAACTTT
CCTAAGTCTCAGTTTCCTTGTCTAAAACGGTGGGACAAGTAGCCCCTGTTTCATATGGTTATTGCAATGATTATATGAAAATGTATGTGAAGCA
CTCAGCACAGGGCAGAGACGTGGTAAGCAACCAATTAACCTCACACATCAATTTTAACAGGGTCAACGAGGAAAACTGGGAGGAGGAGAAGTTG
CCATGCAGGACCGACAGAACATCCTCCCCTCAACTACGCTTTGAGGAGGTGGAAGGGAGGGGACTGACGACTTGGAGGGCTTGTGGAGAGGGAG
GATGGGGAAGTAGGCCTTTTCAAAACCCAACTTTGGCTAAAGGATCACCTGCTGGTTACTGAATGAAGCAGCTACTTCTGTTCCATTTTCTTGG
GGAGTCATGCTGACGCATCTCTAGGAGCTTCTCTCACTCCTAGAATCTTCCAGTGTTTCCTGGAGCCTGGTCTCTGCCTCTATCCCTCCCACTG
CCTGCTGCTTCTCTAGCTGGAGGCAGCTGGACTCAGGCAGCCGCAGCATCTCCCAGCAGCACACATTGGCAGACGCGCATTCAGAGAGAGCTGC
TTCACAACTTCTCTTTGCGCTATACCCTTCACACAGGCCAAATCCTTCTGTCCCCGTCACAGGTACAGATACTTTCTATCTTCAGGTATTCCAA
ATGATCTTCCATCATTAAGGTTGCTTCTGAAACACAATGGTCTCCCTCCACCTCCCAGCTAATCTGCCTATTTCCAGTGTCAGTTCCACCAAAC
TGTTCCCCCTCTGCTGCCTCTCATTCTTCTCATACCTGTTTAAAACCCTGTCATAATTCACCTTCCACTATCTCCACCAGAACTGGGAGCGCCT
CTCCCACCTGCCCACCCTACATTCCTTATATCTTCACTTTTACCCTCTCCTCCATCCTCACCAAAGCTATGGCTCTGCATATATTGCCTCTCTT
CTTGCAATATCTTTTCTTCTCTTCCACGGGCTAGCAACCCCTCATCTTTCAAGAATAGTCTCCAACTAGAAACCTTTCCTAATATTGCCCCCAC
CACCACTGGTGAGTTGGATGTGCTCCTTTACTCAAGAGTTCCCACAGCAACTGGTGGCTGGCCTCCTCTTCCCTATTATTCCTTATACCTTACT
GTTACAGCTGGAGAATACCTCTGTCTCATTATCACACTACGCACTCTTCCAAAATGAGGATTAGGTCTTATAAATAGCTCTATCTCTAGGGCTT
AGTATAGGACCTACCAACCTCAAATAGGTAAGTAGTACCTATTTGCCTTCATTCCTCAGGGAATACTGGTTGAATGAATAAATGTCCTCATTTA
GCATGTATTCTGGCAGGAAGACAATCCACATGCAAGTGGACTACTTTTCTTGCCCCAAGCCACATCCCCACCATCCTACATCTTTCTTCCTTGA
CTGCCTCTCATTTCATAATTCAACACTTGCCACCTTTCTTATTCATACTCACCTTTTTTTTTTTTTTTTTTGAGATGGAGTTTCCCTCTCGTTC
CCCAGGCTGGAGTGCAATGGCGCAATCTCGGCTCACTGCAACCTCCACCTCCCAGGTTCAAGCAATTCTCCTGCCTCAGCCTCCCTAGTAGCTG
GGATTACAGGCGTGCACCACCACGCCTGGCTAATTTTGTGGTTTTACTACACAGGGCTTTCTCCATGTTGGTCAGGCTGGTCTCGAACTCCCGA
CCTCAGGTGATCCTCCCCCCTTGGCCTCCCAAAGTGCTGGGATTACACCCCTCACCCACTCCCCCCGCCCTGATTCTGACCTTTTTATTCCACA
CATCTCAACTCTTCCTCAGCTGTTTCATTCTACCACCCAAACACCTTTTCTCGTTGTTCCTGAGATCACCAGCCTCAATCTCCTTTCTTGAGCA
CCCAGCAGTTTCTTTTCCAAGGGTATCGGAATCTTGAAACCCCACCACATTCTTAGGCATGGGCGGGGAGAGCTGCTAGAAGACATCACTGTCA
AAGAATTGGCAAAGTCAACAATGTGCCAGCATCCAAGGGTCAAAACCTCACCTGGGACATCCTGTTCCACAGCATGATAGCCCCACAAGGGGTG
CCAAAACCATCACAAAACCCTTGTGACTGCCCACCAATCAAGTACACATTACGACCAACCCATCACACTCCAATTAAGCAAAAGGCGGAATCAA
TTTAAAGGTGCCAGAACAGGAACCATGCAACCAGGCTTCAGGAGAAAGTAGGAACGAGGGTCCTGAACTTCATTCATCAGGGTCCTCTCTCTCT
CTTTTTTAACACAACGTCACACTCTGTCACCCACGCTGCACTCCAGTGGCACGATCTTCCCTCATTCCTCCCTCACCCTCTCAGGTGTTCCTCA
CCTCAGCCTCCCTAGTACCTGACACTGCAGGCACACACCACTATCCCCACCTAATTTTTGTTTCTACACACACCATTTTGCCATGTTGCATACC
CTGACTTCAAACTCCTAGGCTCAAATGATCCAGCCGCCTCACGCTCCCAAAGTGTTAGGCTTACAGCTGTGAGCCATCTGGCGGGAGGGACTTC
TATCTCTTATCTCTTCTCTTCCTCCACCCACTTTCTCCTATATCCTCCCCCACTTCCACGTTTCTCTGGCCCTTCCAACACCAACTATCGCCAG
GAGCACCTCCCTAATCTACATACTACACATCTATCCACAAGAAGACAGATGGAACCACTCTTTTCTTCTGAATTCTAGAACCTTAACCAAGTTA
ACCTGAGTGCCTCAGCTTGGATCAAGTGCCCATCCTCGTCCAAACAACTGTAGCAGCACATCTCTGTATTTGTGTATCTTGTTCCTCCATAATC
TTGCAGTCCGGGGAAAGTGTGCAGATGGATCGCTCCCTGAAAAGCAAGAGTTGTTTAGACAACGCTAGAGGTGTTCAGTTCTGCGAGACAAGAG
TTGGGCCAGGTTGATAACTAGCCTAAGAGAGTCGGAATCAGATGAATAAGAACTAGATCTTCGGTCACAACCTAGATCAAGAGTCTTGAGGTTC
AGTCATTTCAAAAAGCTCAAGTCTCATTCCTTCTTCCCCTTCTGGCTAAGATCATCTCCAGTATCTCTTCTTACCAGTTTAATATCTGATACAT
CCTCTATCTCAGGATAATATAATAAATAGATTTTTGGAGCAAGGAGATCCAATAGGAGCTTGTTCTGTCCACTCTACACATTGGCCTGGATTCC
AGTACCTCCAGGAATGGTGCACCCTCTCTACCACCCCCAAAAAGCCCAACTCTCAAGAGGTAGTCTGGAAAAAAGTGTTTTTGGATTTACCTAC
ATTTTTTTTTCCAAGATGGAGTCTCGCTCTGTCACCCAGGCTGGAGTGCAGTCGCCCCATCTTGGCTCACTGTAACCTCTGCCTCCAGGATTCA
AGCAGTTCTCCTGCCTCAGTCTCCCAAGTAGCTGGGATTACAGGTGTGTGCCAACCATGCTCAGCTAATTTTTCTATTTTTAGTAGAGACAGGG
TTTCACCATGTTGGCCAGGCAGGTCTCAAAGTCCTGACCTCAGGTGATCTGCCTGCCTTGGCCTCCCGAAGTGCTAAGATTACAGGCGTGAGCC
ACTGCGCCCGGCCTAATTTTTGTAATTTTAGTAGAGACGAGTTTTCACCATGTTGACCAGGCTGGTCTCGAACTCCTGACCTCAGGTGATCCAC
CCCCGCCCTCGGCCTCCCAAAGTGCTGGCACTACAGGCATGAGCCACCGCTCCTGGCCGGGTTTGCCTACATTTTGGAGATGCTGCACACCATG
TCCCTCTTTTCAAGAGTCACGTAAGTATTTACATATGGAAGACCCTGAGAACGCACCTGGGAAAAAACCTGTTTAACTGTAAATATAATAATGT
ATGTATTTGTATGTGGAGCTCTTCTTTTAGTCGATTATCTATAAACCGTCCACTGTTCCCAATGCATACTTTGGAGACAGACCTACACTACCAG
TTTTCACCTGCTAGTTATTTTTATAAGGGTTGGGATGGTCCATGAGTGAACAGTCTTGATTTAAAGCAGTGTTTCCCAAACCTCATTTATTTGC
CTATAGCCTTCCTGGAGTTTGTCTTATATGTCCGCTCTGTGCACTATTCCTATATGTTTTTATGTAAATCAATCACTTTTTTAAAAAGCCTCAT
CCCAGTTATATCCTTAAAACAATGGTTATTTTTTCTCATACACATCGAAATACATATCTATTAGAATTAAAATGCTTGTCCATGCACTATCAAT
AATCTCCTCAAGTACCATATGGTGGGGACATGTGTTTGAAGTGTTAGGAGTCAGGAGTGGTCTCTGTAAGACAGAGTAAGTCAGTCAACCTCTG
AGCACTGCCAGCCACACATGCTGGCAGAGAAGTTCAGCCTGTGACAAGACTGCCCGGATATTTCCATGTCTGTGCACGGGGATGTCCTCGGTCT
GCCATTGTGAAGTCTGTGCTGTTTTCATGCCTACCTAGTCTTCTTTGGAGGGGCCTGGAAAGCAAATGCAGGCTGGGTACAGTGGCTCATGCCT
GTAATCCCAGCACTTTGGGAGGCAAAGGTGGGCAGATCACGAGGTCAGGAGTTTGAGACCAGCCTGACCAACATAGTGAAACCTTCTCTCTACT
AAAATTGCAAAAATTAGCTGGGTGTGGTGGTACGTGGCTGTAATCCCAGCTACCCGGGAGGCTGAGGCAGGATAATTGCTTGAACCCAGGAGGC
GGAGGTTGCAGTAAGCCCAGATGGCACCACTGCACTCCAGCCTGGGTGACAGAGACTCCATCTCAAAAAAAAAAAAAAAAAGAAAAAAAAGCAA
ATGCAGATTCTCCCTGGGAAACGGGGGGTTGGGAGAGTGGAGTAGTGTGGATGCATTGTTATTCCTGAAGGCCGTCCTCAAATTATCTTGGACT
CACTGCAGCAAGCAGATGCCTCATCTTCTGGCCAGGGATTGATCCTGAGATGGCAAGAGTATGAGAAGAGACACCAACAGCAAGGCAAAACTGG
CTCTCGCAGCTTGCTTCAGAGAAAGAGTATAGCTTTGGAGTCAGGCCGACCTGAGTATGAATCCAAGACTCAGCACTTACTAGGTGCCTGCCCT
CAAACCATTATTTTTTGATAGTCATTACATACCCACAATGATCACCATGGAGTGGATGACGAAACAGGGACTCAGAGAAGTTAAACAACTTGCC
TGATATCACACAGGTAACAAACAGCACAGCAGAATTCAAACCTAAGTTGATTTGACTTCCAAATGTCTGCTCCTAACCAAAGCAGGGTAACCTG
CTTTGATTTGCCCATTTCTTGAGCACCTCTTCTGTAGGAGGGCCTGTTGCTGGGTGCTGGGAATTCAGTGGTAGGCAAGATGGACAAGATTCCC
CCCTCTCACAGACCTTGCTTGCTATAGGGGAAATAGACAGGAAACCAATTACTACATTTGTAACTTAATAACAAGTGTCATAAGTGTTACAAAG
CAGATAGATACTATAAGGCACCTTTTATTTTTATTTGTTTATTTATTTTTTGAGACTCACTCGCTCTGTTGCCCAGGCTGGGGTACAGTGGTGC
GGTCTCGGCTCACTGCAACCTCTGCCTCCCAGGTTCAAGCGATTCTCCTGCCTCAGCCTCCCGAGTAGCTGGGATTACAGGTGTGAACCACCAC
ACTCTGCTAATTTTTGTATTTTTAGTAGAGACAGGGTTTCACCATGTTGCCCACGCTGTTGTTGAACTCCTGACCTCAAGTGATTGATCCACAT
TGACCTCCCAAAGTGCTGTGATTACAGGCGTTAGCCACCGCGCCTGGCCTATAAGGCACCCTTGGTCAGCCAGTGGAAGCAGCGTCAGTAGTGC
GCCGGAGAGTCACTTTGAAAAAGTGATATTTAGGTTGATCTTGAAGCATTCACAAGATGTGGTAAACACATCTAATGGTAAACATGTGATGGTA
AACATTAGATGTGATAAAGATACTGATGGTCCACTGGATGAACAGTTTTCATATTTACTTCCAAATGATTTCATAGATATTATTTCACAGATAA
CACTTAGGATGAAGGTAAATAAAAAGGAGATCAATTAAAATATGAAATAATAATAGTGAAAGTGGTAATAGATGTGGCAATATCCACAAAGGAG
TAATGGTTAGATTAGCATATTGAGAAGATCACTTTGGCAATTGTTGGAATGCAGTTTACGAGAGGGCCAAGAATGGAAGCAGCAATCCCTGTTA
GAAGTGTAGTGTTTTGGAGTGCGGTGTTTTTTGTTGGTTTGTTTTTTGTTTTTTTTAAACCAGGTCTCACTCTGTTGCCCAGGCTGGAGTGCAG
TGCAGCCTCGACCTCCTCCTCGGGCTCAGGTCATCCTCCCACCTCAGCCTCCCGAGTAGCCGGGACTACAGGCACATGCCACCACACCCCGCCA
GTTTTTGTATTTTTTTGTAGAGTCAGGGTTCTGCCATGTTGCCCAGGCTGGTCTTGAACTCCTGGGTTCAAGTGATCTGCCAGCCTCGGCCTCC
CAAAGTGCTAAGATTACAAGTGTGAGACACCACCCCCAGCCACCACATTGTATTAATCCAAGCAGGAGAACGCAGACTTCAAAGGCTTATGGGC
AGCAGAGAGAAGTAGATCAAGCAAGAGATGCAATCAGCGGGACTAGTGGGAAATGAGGGAAAGGAAAGGTGTCAGGATGGGGCTTTTTCTAGCT
GAGTGGAGTTCAGTTCATTCCCAGAGAAGCTTGAGAGGTATCCAACTATAGATGCAAGGTAGCTGGCTGTTGGTCCCTTGTCTTTAGGACAGTT
TGACTTTTGTAATACAGGCGACCTCACAGAGCTATTGTGAGAATTCAGAGCTGGGCACAGAATAGATGCTCTATAAACGGTAGTTCTATTCCCC
ATTTGCCCCGTCCTCCCAGCATGCCAGGGATACAGGGGCCGATAGAGACAGGTTCAGTTCCCTTTGGTCTCTTGCATTCCCCCTTCCCTCAGCA
CAATTCCTGGGCTCATAGCGCATGCTCAATAAGTATTTGTAGAATGAACCAAAGAAATCAGACCCTTGGTGACCCAGGGCTACATGTACTCGGC
GGAAAACTGGGGTTAAACCGGACCCTTGGTTGGTTGAAAAATTAAAATAATTTTTAAAAAGTGGGCGTGAAATAATCCAGAAGTTGGAGGGCCT
GGACAAAGGGCTGGGGAGGGGACTCCTCCCACCAGGCGGCCTCAGGGTCGGCTTAGCAAGAAGGAGGCGCTGGGGAGACCTCTGCGGTCCCAGC
TGCCAAGGTACTCGCCGCTCCAAGGAGATGGGGACGCCGGATACCAGCTCTGCCCAAGATTGCTGGGTCCCGCCGCGGCCTTTAAAGGCCCACC
ACGTGGCTGCGCGGCCAGCCCTGGTCCGGAGGCGGTGCCCGGGTGGCGCCTGCGCACTGCCTAGCAGAGGGGCTGGGGTTCCGAGAAAAAGCGT
CTGGAGAGGAAGGGGAGGCTGCTTGGGGTGGGACGCCGTGGGAGGAGTCGGCTCCTTATGCAAATCACAGCGGAGCGCGCACGGTCCGGAGGCG
GGGCTTGCGATGCAAAGACAGGTCCGTCTGGCGAACAGCGAGGGGGCGGGCCGCAACCCTCTGCCTCTTTCCGCGAGCGCTGACGTCGCCGACG
TGTTGTTTAAAAGCGGCCGCGCAGGCGCAGTGAGCCCAAATGCGAACTTAGGCTGTTACACAACTGCTGGGGTCTGTTCTCGCCGCCCGCCCGG
CAGTCAGGCAGCGTCGCCGCCGTGGTAGCAGCCTCAGCCGTTTCTGGAGTCTCGGGCCCACAGTCACCGCCGCTTACCTGCGCCTCCTCCAGCC
TCCGGAGTCCCCGTCCGCCCGCACAGGCCGGTTCGCCGTCTGCGTCTCCCCCACGCCGCCTCGCCTGCCGCCGCGCTCGTCCCTCCGGGCCGAC
ATGAGTGGGCACCACCTCCACAACGATTCCCAGGTACGGCCCGGCCTGACCCTGGCGGCCCCGGACCCCGGCCTGGCCGTCCCGCGACCCCCGG
CGCAGGCCCCGACCCCAGCCCCGGCCCGGCAGCTTTGACAGGCCGGAGCCCCCGGTGAGCGGCCGCCTGCCGGAGTAGATCGGCTCGCTAGGCC
GCGAGCGAGGGCCGCGAAGTTACAGTTCGAGGCAGGGATGGCTGCCCTCTGTGGCCACCCCCGGGTCCCCGTCCTCCCCGGGGGCGCAGGGTGA
GCCAGACCCCGGCCGCGCGCGCTCGCCGCCGGAGGGGTTAAAGTGGCTGTTGTTTGATATTCTCTCCTTTTCTTTTTCCAGATCGAAGCGGATT
TCCGATTGAATGGTGAGTGTGCCCCCTGCGCCGACTCCGGGGCCCCCCAGCCGCCGGCCGCCTCCCCCGCGCCCTGCCGGTGCCGGGCAGAGGA
CAGACATGGCGTCCCAGAGACTAAGTCCCGGCTCCTCGCTCACCGGCCCCATTGTTCCCATCGCGCCGCCTCTTGACCCCCTTTCCGGGGACCC
CAGCTCCTCCAGATCCCGGCCCTCCCAAGAGGGGACAACGGAGACCCCGTGTCGTCCGCCACCGGGCCTCGGGCGGTCTTTCCGGGCCGGGATT
CCTCCCGGGAAACTCGCCTTGTCGACGGTCGGGACTTACTCTCTGCGCCATTTTCTTTTTCTCTCTCCTCTCCTTTCTGTGCCTGTGTCTCTTT
CTCTCCCTCCCTCGGCTCTTTCCTTGAGCTGCCCAGAATGAGCTTTCTGCAGAGCAAAGCCGTATAAATCACATACTTCACCAGAGAGGGAAGG
CTGGGGGACTGAATTATTATTTTTTAAACTTTATTTTGGGGGTTATTCCCTTTATGCTTCATGTTTGTTTCCTTTTCTGCTTCCAGAATGAAAG
ATTTCCTTAAGCAACTGTTAATTTTTTTTTTGATAGGCTGTTTATGATACGAATTATGGCTCTAAAACTAAAGCCACGCTTTGTGGAGTTCTTT
ATATTTCCAGGTTGTTTTTCCCAAGTTACGTTCTTTGCAAAGGTAGCAGTACCTCCCTAAAGAAAGTTTGCAAGTTCTCTGTGGGTCACCCAAT
GTAAATGTTGGATTTTTAAAAAATTATGTTAGTCACTGGAACTTTTCATTGTGGTCGAGGTTCCCAATGCAGTGTTTTTCTGGAAACGCAGTTT
AGTGTACTTGTTGGAACCAAACATTGTTGAGCATCTCTTGTGGACCTGGTGTGTTGGCCTTTTCGTTTGGGTTGTAAGGAGGAAAAAAAGATTT
TATTTATTGAAGCAAAGAGTGTCCAGTACCCACCCCTGCTTCCTGTTCATTCTTTTTCACGAGCCACTGTTTTTCAGGAATCAAGAACTGGCTT
TTTTTTTTTTTCCCAATTCTTTATGTTTTTGAACCCTTTTCAGCCAAATCAAGGCATTTATTCTTACTGTATTTCCACTTCAGTTACCCAGGGA
AGAGTCCTCCAATAAAAAGCTCATCCTTGCAGGCTTTCGAACAACCCTGTTGAAGGAGAAGTTACCTTCTGTAGTGTGCTGGGAATTCCCACTG
ATTTTGATGGTACATAATCCTGCTCAATTGAGTTTGGGTTCCGGGAACCTCTCCAATGGGAGAAGTTGATGAGTAGGTTTTCTAATGTTGTAAT
CAGCAGTCCATCATGTTAGCCTGCTCTACTCAGAGCAACCTTATGTTCAGAGTTTGAAGTGGGGCATCCAGCAGGAGATGGTACTCAGCCAGGA
GAGAATCTGGTTTAAAGTATGGCATTTCTTGAGCACCAGATATGTGCCAACCACTGTGCTTGGTGCTAGAGCTGATCCTGTAACCATAACACTC
CCTTGCTCTCAATTCAGTCTATTGGGGGAGACATAATTAGTTAATTATAAGGTAACTACTGGGGCATATGTGTACCCAAAATGCTTTGAAGTAT
AGGGGAGTTAATTTTGTCTGAGGGTGGGGAAATTTCTCAGAGGAGGTGACTTCTGAGCTGGGGGTTGTGGAAGACTGGGCGCAGAGAATTGTCA
GGGGTTGGAGTGTTTCTTAAGTACGTTTAACCAACCTATCACGATTTTAAAAGAGGGAGGAGGTGAGGCCTGCAGTTTAGAAAGCCACAGTATA
GACATGTTTCTTTGGGATACAGGAGCAAAGAAAGGATGTGCAGGTGAGGATGTAAGAAGTCCTTTTGACCTTGCTAGAGGAAGGTGGGATCTTT
AATATGGAATGTGTTCTTTTGGCTGTCAGGCTGGGCTGAGTAGGTAATGTAAGTAATGAAACAAAGTTTAGCCCTTTCTTGTGAGAAAGTTAAC
TTACATGGTTGTCACCTAAGTCACGTGAATGATTGTGAGCTGGCTAGGTTATTGATCTTTACTGACATTTTTATAGAGGCTGAAGTAATCTGCG
TATGTTGACTTTTAGAATGTGTTGGCTCACATTTAATAGCAATAATAGCTAATATTTATTGAATACTTACTGCCAGGCATGAATCTCAGCTCTT
TCCATGGATCATCTAATTAAATGTAATCCTTGGAAGGACCCTTGTGAGTTAGGTCCTGTTATTTCTGTTTTGTAGATGAGGAAACTGAGGCTTC
AGTGTATTTACTAGCTTGCCCAAGGGCTGTGAGTTGGCCACTCTAAATCCCATGAGCTGAGCCACTATGCTAGAGTGATACTATATGATACTAG
CATGAAAAAATAAAAAGCCACAAATCTCTATTTTCTTACAGAGCTGAAAAAGGAGAGAAGGAAGGATTTGATAATTTGTCATTTGCTTTTTATC
TAAACATGCTTTTTGAAGAGAATCTGCCACCATAAAGTTCTGACATTGGTGTAATTATTCTTTGTGAATATTGTCTGGAAGATGTGGTGTTGGT
AACTATGCTTGCTATCTCAAGTAATACATTGTTAACCAGTGATTGATTTATGTAACTATGAAAAAAACTTTAAAAAAAGTAGAAATCAATGTTT
AATTATGCCCAGACATGTCATTATTGAACTTTGTATTAAGAGATTGTTTAAGCGTGATTTTAAGAGGGCCTAACCCATCTTACAGATTAACTGT
ACAAGTTCATATATTAAAATCAAACGTCTCTCATTTTGCCTGCCCTCATCCCCTAAGATATAAAAGATTCCCCCCCGTCCCCCCACTTTGGAGC
TCATTCTTCGCAATATTTAAAATTGTAGCTCTTTGCATGTAATTTAGAACATTCTGACCCATACTCAACTGCTGGGAGACTCTGTTATTTATAT
TTAAAATGTTGACAGTGAGTTAGGAATTTGGAGCAGAAACCATATCTAAGTCTAAGTGAAAAGACTTCCTAAGTATTGGTAGAACTAACTGTAG
TGGGGCTGAGTCATTATTACAGTACTGTACAGGCTGCGTAGCTATCTGTAGAATTGATAATGGTAATACCAGGTTAAAGTGTTAGCGATTCTTC
TGCTGTTTCAGAGGTCTTGAAGTTTTTGCCTGTCTGCTATGGAGATAGGGAGTTCTCCCCCATTTGACCCCCTTAGCAAAGCACAATACTTGGC
TCCATCAGTCTTTAGTCTAAGAAGTGATATATAGGATCATGGTTTGACATCATCTTGTGCTGATTCTGGTTGGCTTAATGGAATCAAATTGGAT
GAAGGTAATTAAATATGAATTGTTTCTGATGCTAATAGATAGTTGTACTTCTGTCTGTTGGGTATGGGTTGGCATGGGCGGTAGCATACCTGAT
TGCGGTGGCGGAATTTCAGATAGCTGATGATGTGGCTATCTGAAAATTGCCACTACATTTTTAAAACTGAAAAGTGATGGTACCGCCAAATGAA
ATCTGCAGCATCCTCAGACTCAATCAGCAAATACTTAAGCATTATGCTCCAGGGTGGTTTTCTTCCCTTACATTGCAACTGGACTCCTTGAGGC
ACCTTTTTAGAATTAGTGAGCCGCTAGGATTTTTATACTATGCTTTGACATAAAAGAAAGTTGCTTGTCAATATGTGTTTTTTTAGTTTACCAG
CATATCAGATCTCACAAACAAATTTTAGGCTCGGATTGGATGTTTCTAGTAAAAACAAGAAAATCCAGGCATCACTAAAAGAATCAGAAATACG
TTGTGGCTTGAAAGGTGCAAACTAAATAATATAGCTAGCAGTAACGGTCACCAACTCCTGCTTTTCTTTGGTTCAGTAGATAGAGTAAAATGGA
AAATAGGAAACCAAGGTCAGTCCCCAAATCTCATTTTAACCAATAGCAGCAAAAAAAAAAAAAAAAAAAGGAATTGAGTCTGACTTTTTCCCCT
TGCTGTCAGCATAAAGATGGGGAATTGAGAGAGTTGGAAAGACATTCATTAGTTTGTTCAGATTATTAAATAACATGTCTTAAAGTTTATATTC
CAAAATTGGGCTGTGAGGTTTTTTTGTTTTGCTTGTTTTCAGTGCATGTGTGGGGTGGGGAGGTGCAAAAAAATGTTTGCCTTCTAATATACAG
CTTTGTTGTATATTAATTATATAGTAACAGTTGTCCCTGCTGCTAATGGTATGGAAAATGATTCTGTTGTGCTTTCTGAATACATATCATTTTA
GAAGTTTCAGATTATACTAAAACCATCTTATTTCATATTAGTTGGACATGAATGCATATTTATATGACACATCATTATCAACTTTTGCCTTTTG
CCATCTTTTTAGTGCAAAGTAAAACTGATATTCTTCAAATCCAAAGTCGTTTCCTCAGAAGTGTGTTTTGTGAGGGATTGCATCTTTCCCATGT
GAAACTGTGTCGAACTCCAGTAAACTGTGTTTGCTTGGGAAAATGAATTCAAATGTAATTAGTTTGAATGAAGCTGTGGAAATGTTTGAAATGA
GTATTTTGACATTGGACCTGGAGGTTTAAAAAAAAAAACCCTATTGAAAGAATAGTAAAATATATTGGATGTGGAGGTGAGAGTCAGTTGAGTG
AATTTTCTGTGTTGTATGGTTTAGATTATCTGACTATCCCTTAATTATTTTGAAACCATTAACTTTGGATAATAAGGGCATTTAGGCAAACAGT
TGACACATGGATTTCTTAAGGTAAAAAGTTTAGAGACTTCCAAACTAGTCCTTAAGAGGCGAATGGGTATTGTGTTTAAAGGAAGCTTTCAGAT
TGTGTTTAAACTTCGAGTAGTAATATTTGGAACTGTCTTTTCTCCCTATTTCCATGCCTCATACATCTCAAGTTTGAGCAGCAGCTTTCCATCC
CCATGGCTCCAGGCCAATAGCTGCAGTAGAAAATCTAAAATAGAGGCCAGGGTTGGAATAATTAGCATTTTGCCAACCCCCACCCTCCCTGCCA
CCTGCCTATCTAGATGTGGACAGTATGTGCTGTGTTGATAGCATAGGGCCTGGAAGGGTGGAGAGGGATGTAAATGATGGGCAGGGTGGACAAA
GTTTGATTGGGGGTTGCGGGGAAGCTTGTAGAGGAATGTCTGTTAGATATTGATGGTATTTTGGTGGCGTTATCAGAAATGGCTGATAGTTTGC
TGAAATGATTTAATAGTAAATAGATATTGTTGAACATTTTCTGTGTGTATAGGAAAGATCCTACATATTTTTCACACTGGGAGAGAAGTGATGT
TACTGGTATCTCATGCATATCTCTGGAGTATATAGATCGTAATATCAACTTTGCCTATCTGTATCGAAGTTTGTATTAACTGTCTTTATGTGTG
TCATTTATGTCTCTTAACGTTTAGTAAGAAAGAAATTCCAAGGAAGGTAGGCAACTTTTAATTTTAACTTCTTTCCTTTACTTTTTTTTTGGGC
GGCGTGGGGGGCAGACAGGGTTTCTGTTTGTTGCCCGCGCTGGAGCGCACTACTGTGATTGCAGCTCACTGCAACCTCTGCCTCCTGGGCTCAA
GCGATCCTCCTACCTCACCCTCCCAAGTAGCTGGAACTACAGGTGCATGTCACCACGCCGGGCTAATTTTTGCATTTTTTGTAGAGACGAGGTT
TCTCGCCATGTTGCCCAGGCTGGTCTTGAACCCCTGGGCTCAAGCAGCCTGCCCACCTCAGCCTCTCAAAGTGCTGGGCATGAGCCACTGTGCC
TGACCCTTAATTTCTTTTTGGTAGGTATTCATTTTTCATTTGTTGTCTTAACCTTCTAGTTTCACTCACTTACCTGTCTGCTAAATTTTTCTGA
AATGTGTAATAAATGTTTTAATTTACCATCTCCCTTCTACCCTTCCCATCAGATTTGGGGTGGGGAGGCATCTCTACCAGGCAATTAATTCCCC
TCTGAGCCTTTGAAATTAACATTTTTCTTTCTGTGGATTCAAGGAGCCTAAAGAACACAGTTCATTAGCATTCCTAAGAAACACCTAGGTAAGC
TCCAACAAAAGATGTTAAAGCAATCAGTATTTTTAGGGACTTCAGATCTCCTGTATTTGTTGTTGTAAATGATGATGTTGGGAAAAGAATTTAA
CAGATCCCTCGGTATTCTGACGTTTTCCTATATTTTAAGAACGAAACCGACCCAGCCAGCTTGTGGTCCCATTATTCTTTATATTGTTTTTCTT
AGCACACGCTAGCAAAGATACATGCCTAGCACTTTTCTTGGCTATTGGAGTTTATACAAAAAAAGTTCTTTGTTGAAGGTTAGTCCTCCACCAG
AATAATACACCCTTTTTCCCCTTAGTAGAAGTCCAAATCTTAATCTTGCTATCATATATCTATGAATGCCCAGATTTATAAAGCTTTGTAGGTA
TATTACTGATTGTGCAGGAGACTAATCTAGGAGGCTTCAGGATCATTGTCATTTGTGGATCTCATTGGCTAAGACCTTTTACTTAACCTGACTC
CAGTAAGGTAGCCCCTTTGTTTCCTTGTAGTTCAGTATGTGAGCTCTTGCCAAGCAGCAGAAGTGGGATGAAGGGAACTAATTTTGAAAACTTA
TTAGGCACCACATTTTTATGTGCATTAAATCTGAATTGAATAAAGATAATATAGATTGCATAGGCTTATGGGGAGAACCAGAGACCAGGAAAGG
AAACGTTTTTTTCTTTTTACCCTTTATGCCTTTTCATGTCCCCTTTTTGATAACATGCTGCCTTGGTCCAGATTCTGGAAACCCCACTCACGCT
GTAATTGGTAAGCTTCTAGTACAGATGTCAGAACCTGCCCTTGATTATCTGCTGTTAGAGATAGCTTGGACCCTTTGTATGTGGAATGTTAGGT
CTAGGGGAACAGTGGGGGTGTGAGGAGACAGCTGTGGTAAAATAGAAAATTGGTGTAGGATTCCGAAAAATCGAGATAAGTCCCTGTTCTTCCT
ATGAAACATGATCTGACCACTGAACCTTGTTTTCTTATCCATAAGCAAGGATAATATTTATGTTTCACAAACTGTTGAGAATTAGATAAGTATA
TGAAGGTGCCTCTCTGTCCTCATTGTAAAATGTAAACTTTGATGAGACAGCCTCTATTCTCAACTGGATCTTTATTTTGAATGTTAGGTTTGAA
ATAGTGATTGATGTTGGGGAGTCTGTCTTTCATTGGTATTCCCTGTTAAAGTTTTAAATCTTCTTGACATTTACACAGTGAATTGTAACATGTA
ACTAGTGTTGTTGAGTCTTTACCTAATTCAATCAGCAGAGCCTACACTGATGTCTTCCAGTTACAAAGCGGTCACTGTAAAGTAAAAGGTGTCT
TCATATCTAGGTTTGCGCTGAGAAGGATCGAATTGTATATCTAGTTCCTACTTTTCTTTTTTTTTTTTTTTTTTGAGATGGAGTCTCACTCTGT
TACCCAGGCTGGAGTGCACTGGCGCAATCTCGGCTCACTGCAAGCTCCGCCTCCCAGGTTCACGCCATTCTCCTGCCTTAGCCTCCTAAGTTGC
TGGGACTACAGGCGCCCGCCACCACGCCTGGCTAATTTTTTGTATTTTTAGTAGATACAGGGTTTGCACCGTGTTAGCAGGATGGTCTCGATCT
CCTGACCTCGTGATCCACCAGCCTCGGCCTCCCAAAGTGCTGGGATTACATGCATGAGCCACCGCGCCTAGCCTAATTCCTACTTTTCTAAGAA
TGTTTACACCAAAGTGGTCATTGCCAAAGGAACTTGTAGCAGTACAGAAGATGGGCTCAGAAATGAAAGAAGTCTATTGATGTGACTAATTTCT
CAACCATTTAATAGAATTATGGATTTTCTATTAAAAATAACTTGACCCTTTTCGATGCATTTAATAAAATGCCAAGTTCATTATTTGTTAATTT
TTTAAAACCACAAAATTCAATATGTCTTGTGTCAGCATATTTTTTCAAAGGCCACTATTTTACTTCTCCCCCAAAACGTTTTTAAATTAAACAG
AGAACTCTCAAAGCACCTGAGAATTACTTCAGTTTTTCATTTATTCAAATAGTTGCTTAAAGTGACCAACTTGGTTTTCTTTGAAATAGTAATT
CTTGGGAATAAGAATACCTTAAATAATATAATAAAGCTTATGTGTGAGAATTTAGTACCAAATGCCGTGTTAACAGTTATGCGTGAGTATAGGC
ATTTGGGAGATTCCATGAAAAAATTTGATAAAGTCAGTAGAAATTTCAGTAATGGCTCATAAGTCTAGCTAATGCTGAATATTGAATTGCCTTG
AATTTGTTTTTTTGGAAGTGTTACTTAAACGAAATAAACAAAAGTCATTTAAGGATGTGTTCACTAGTGTTCATTAGGTTTAAGCCAAATGGAT
CTTAGTAGAGATCTTACGCCATTCAGCAAAAGGATTATCACAGAAGCATCACAACAGGCGCAGACTTAAATTCAATTAAAAGTAGGCAGGAGGA
CATAATTTTGTTGTATAGAAATTATGGAATAGGGCCTAATTTTAAAGAGTCTTCAAAGATAAACATATCAGGAAAAATATAGCTCATAAAATAT
GGGGAAAAAAATCTGGGAAGATGAGTATTTGTTAATGCTCTGTAGCTCCATTGCCCTCACTATACAAGGAATGTGCCCACAATAGGGTTGGATT
TAAAAGTCTTCAAAGCTTTGGTCTCTTTTTCTTTCGTTTTCCTCTGATACAGAATGCGAATAGTCTCCCGGCCTCCAACCCCCTCTACATCCCC
ACCACCCCATAATAGAGACTTAAAGGGAATTTAAATTCGAGTTCTTGAGCTTCTGCTCAATGGCTAGGTCTTTGAACAAGTTAATATCAGAGCC
TTAGTTCTTCACCTATAAAGTAGGTTTAATACTTACCTTACAACATTGAGGATTAAAGAGCATGAGAGGATTACTTTATGAAAGGTGAAGCTTA
GAACAGAATTTTTAGTTCCTTGCCAATGCTAAAAAACAACAACAACAACACCTTTTTCAGAAATTGCTTTATTAGGCTTTTGTACAAAGGGAAC
ATCTTTACTTTCTTTAAATTTGCACATATATCTATTGTGAAATTTTAACCAAGCTGGAGGGGTCACTAGGGAGCATTGAGTATGATACTATTGC
TGTAAATCATAGAAAGGCTGGCTCAGGAGGGTACTGACTTGCTTTGACTTTGCGGCAACTTCAGTTGTCCAGTGACAAGGCTTGCTGCATACAC
ACCACTTTGTTTGTTTCTCATACCTTAATTGTGGATTAAAAATCTTTGGGGCAGGCCTGGAGGCTCATGCCTATAAATCCCAGCACTTTGGGAG
GCCGAGATGGGCAGATCACTTGAGCCCAGGAGTTCAAGATCAGCCTGGGCAACATGGGAAAAACCTGTCTCAACAAAAAAAATACAAAAATTAG
CCAGGTGTGTTGGTGCATGCCTGTAGTCCCAGCTACTTAGAAGCCTGAGGTGGAAGGATTGCTTAAGCCCCGGGAGGTGCAGGTTGCAGTGAGC
CGTGAGCATGCCACTGTACCTACCCCGTTTTGGGCAACAGAGTGAGACCCTGTCTCAAAAAAAAAAAAAAATCATCATCATCTTTGGCAGTGAT
TAACTTTCTCCTTTCACACTTGGGATGGTGCAATATTTGGCATCTACTTAGGAAGCTAAAATTTTCACGTTTAATTGTAAATGGAAAAGTTTAA
GTTGCCATATTCATTCATACAAACATTCAGAAAGTGAATATTGTGACTAGACACAGATGAACAAGACAAACCCACATGCCTATCAGGATGAACT
TTGAAATTAGTACGTTGTAGGTATATACAGTCACTTCCTCTGTTGAGATTTTTCATTAGGCCTCAGTACAAAGGCTGCTGTCATACAACATGAA
TCCGGACTGGACGTACTTTCTGGCAGTTAATATTTCACTATCAGTCCAAGAGAGTGACGTCTCCATTTAGTCCTAATCGTGAGTTTTTCCCCCC
TTAAAGAAATTGGAGACCTAGGACCTTGGATTTCCAAAGATTTCCAAACTCTTATTTCTTAAAATGTTACAAAAAATGGTTTTTTTTTGTATAC
CTATATACCCATTAAACTTTTTTGCCTGAAATAGGCAAAAAGATTTAAGTTCTGTGTATTTATTTCCTGTTATCTTTTTGTATCAGACATCCAT
GTTGCATGAATTTTAGAAAAATAGTTTTCAGCTGGGCTTGGTAATGGCTCATGCCTGTAATTCCACCATTTTAGGAGGCCGAGGCGGGCGGATC
ACGAGGTCAGGAGATCGAGACCATCCTGGCTAACACGGCGAAACCCCGTCTCTACTAAAAATACAAAAAACTAGCCGGGCGTGGTGGCGGGCGC
CTGTAGTCCAGCTACTTGGGAGGCTGAGGCAGGAGAATGGCATGAACCCAGCAGGCGGAGCTTGCAGTGAGCCGAGATTGCGCCACTGCACTCC
AGCCTGGGCGTCAGAGCGAGACTCCATCTCAAAAAAAAAAGAAAAATAGTTTTCACATTTCCTGAGCAGGTAGGTTGTCGGAATGGCTAGAGAT
GGTCACATTCTGTGTGAGAAATCATGTGACAATAGCTAATTCAAGTATTTGAAATAATTTAAATCCTTGAACTGAATTGATTGAAATAAAGTAT
TTAAAATCACCATCTTCACATATTTGAAGAACTAAAATCTTAGACAATAACTCTACTTAAAGTCCTCGGAAACTAATTTTATGAAAACTATTCA
AATATTATTGCCCCTTCCTAATCCATGAAGTATCTTGATATCGGTAATACATATAGCTGTTAAAAGCTCTTCAGAGAAACATCCAGAGTACATA
GTGGTATTACTTACAGTGGTTTGAATACTAGAAAAGTGATCGGGACAAAATGTTAGACTTACTGTGCCTTAATCATACAGTCAGTGCATTTTTG
CAGGAATGGATGCAATGTAAGTACTTCTTACTATTTAATACCAGAAATGAAGAAACAGTAGCTTCTTAGGAATTGATTGTGGCTCAGGATCTAT
TTCTTAATTTTTAATGCTTCCACTTAACCAGGAGAGGAAAGGGAGGAGAACGAACACAAATTTGTTAGTCTTTATAACTACTGGCTTGTTACAC
TTGATTTCCAAACCACAAGTGCTCCAGGGCCAGGCACCCCACACTGAGAAGTCCCTAAGAAGTGCATTTATTGGAAATTTGATTTTTAAAAAAA
ACCTCATCTCTACTAAAAATACAAAAGATTACCTCGGCCTGGTGGCGCATGCCTGTAGTCCTAGATACTCAGGAGGCTGAAGCAGGAGAATCAC
TTGAACCTCGGAGGCAGAGGTTGCAATGAGCCGAGATGCCACCACTGCACTTCAGCCTGGGAGACAGCGAGGCATCGTCTCAAAAAAAAAAAAA
AAAAAAAAGACCATGTTAGGTTCTGTTTAAGTAGTATTTCTTATACCCTCGAATGAATGAATGCCTCTTAGTCTTTAGAATTTCATAAGGTTTA
GCTAGGTATACTCAATACTTCTCCATTTTACTACATATTTTTAGGAAGGCACTAGGTATTGTGAACTCCTTGAGAGTTCTAAACATCTCAGAGC
CTGTTTGAGTATTGATGGCATAGTCACAGATACTCCATTTCCTTTCTAGGGAAGTCTGCCTGCATTACCACGTAACCCCTAGCCAGAAGTGTAA
CCACTTTTCTCTGACTTGCATTGAGCTTTTGTTATCCTCTTTTAATATTTCATTCTGTAGTAGTCTGTATTTATGTGTTTTCCTTATTAAGAAG
TGGCCAGCACTTTGGGAGGCCAAAGTGGGTGAATTGCTTTAGCCCAGGAGTTCTAAAGCAGCCTGGGCAACATGTCGGGACCCCGTCTCTACAA
AAAAATAACAAAAATTAGCCAAGCATGGTGGTGTGCACCTACAGTCCCAGCTACTTGGGAGGCTGAGGAAGGAGGATCAGTTGAGCCTAGGAGG
TTGAGGCTGCAGGGAGGATGTTTGCCCTACTGTGCCCCAGAACGAGACCCTGTCTCAAAAAAAAAAAAAAAAAAAAAAATTAAGAGCACTGTTT
CATCCTGTATGGTCAATACAGATGCTTTTACCAAATGTTTCAGTTGTGAAGTGCAAACTCCTTTCTCCCCCCAGCTGGTTGAAGATCAAGTGGG
AGACTTTTGAGAGCTTAACAGTAAGTTTTCCTTGTTTTTCTCAAGCTGATATGCCTAAAAGTCACCTGGGGATGATTGCTGAAAATACATATTC
CTACTCGTACACCTTGAAGTTGATTCTATAGTGCAACGTACTGAAAATCTGCATTTTTAATGTATCTTCAACAATCCCAAATGATTCTGACTAA
TGCAGGTGACCCATAACCTCCTTTGGAGAAGTTGATCTATCTGAACTTTACTATCTTATTTGGCTAAAGATCTATATTTTGCTTCATTCAATTA
CGATACTCCACAGGTTAAGGTATAAAGCTTACAGGGTGATGATGATGATGATGATGATGATTATTATTATTATTTGGAGACAGACTCTCCCTTT
GTCGCCCAGGCTGGGGTGCAGTGACACGATCTGGGCTTGCTGCAACCCCCACCTCCTGGGTTCAAGCGATTCTCCTGCCTCATCCTCCTGAGTA
CCTCGGATTACAGGCACACCACCACCACACCTCCCTAATTTTTGTATTTTTAGTGGAGACGGAGTTTTGCCATCTTGGCCACGATGGTCCCAAA
CTTCTGGCCTCAAGTGATCCGGCTGCCTCAGCCTCCCAAAGTGCTTAGATTACAGTAGTGAGCCACCGTGCCCAGCCAACATTACAGGATATTT
TTAAAGGACCAGAACAGTATTTTTTAATATATGTTTATAAAAGCTTGATACTTCACTCTAAGTTATAGTTTCTACCTTTCAGTGAGCATTTACC
AAATAGCAGATATAGTTAACTGCCTTTGCAGCTGTTTTACTGTGTGTCAGAATCCTAATCCTTTCTCCTACTTCAGTCTTTAACAAGCCATTTA
ATTCTGATGTTACTTTTTCGGATTGGGTGACAAGCAGAGCACAATGAGCACGGTTTGTTTTCATACTAATACTAGGATGGTTAAATCAGGACTT
TAGAAAGTAAGTGGAATAATTTAGTGGAATACTGAAAATCCAGTCTCTGGAGCTCACTGCCTTTACATTAAATTAGTTGGGGACTTCAGCTCCT
GATGGTACTGATTGAAATGGAAGCATTTGAATAAAGCAGTATAGTTGACGCTTGAACAACACGAGGGTTAGGGATGCTGACTCCTATGCAGTCA
AAAATTCGAGTTATAACTTTTGACTCCTCGAAAACTTAACTAATAGCCTACTGTTGACCAGAAGCCTTACTGATAACAGAAACAGTCAATTAAC
ACACATTTTGTATGTTATATGTATTATATACTATGATCTCACAATAAAGTAAGCTAGAGAAAAGGAAATATTAAGAAAATTGTAAGGAAGAGAA
AATATATTTACCATTTATTAAGTGAAAATGGATCATCATAAAAGCCTTCATCCTCATTGTCTTGTTGAGTAGGCTGAGGGGGAAGAGGAGAGTT
TGGTCTTGCTGTCTCAGGAGTAGCAGAGGAGAAAGAAAACCCTCATGTAAGTGGACTCAAGCATTTCAAACACATATTGTTCAGGTGTCATCTG
TGGTTCTCAATCTGTCGTTTCCTGATCACCAGAACTGCATTGTTTGAAAACTTGTTGGACATGCAGATTCTCGGGCCTCACCCATACCTACTGA
CTCTTAAACTCTGGGAGTAGGGTCTTAGCCATTTGGGTTTTAATGAGTGTCTACCAGGTGATCAGATGTGCACTGAAGTTTCAGAACCAATAGA
ATAGAGCAAGATACCAGTTTTGTAGTAATTCAACCTCTTAAGCAGTATTCCTTGTTCTTTCACAAGGAACCATGTATGGAGTTCATTACTTGTG
CTTTCTTACAGTTGTGAAGTTGGAGTAATTCATAATCGGGGGAGGATCTTCTGGAGTATAAAAAAATTTAAGGAGCAGTTATATGATTAACACC
AGAAAGGTTTCTTCTATTTCTACTGAATATATGCCACTTCAGTAGGAGAGGTGTGTTCAGTCTTATTCTTTCTACAGCTAGTGGCCCAGAGAAT
GGCCTGCGCATTTCAAGCCCTGTCAATGAGAATTGTCTAGACAAAGAAGGTCCCTTGGTTGAATTAGTAATAGGATACATGAAACAATGTGTCA
GCACACTTAAAGTCTTTATGGCCAGACAAAGTATGGTCTTAGTGTGTTTGGAGGCCCCTGACCATTGGAAACAAAGGCAGTTTAGGCTGAGCTG
TGGATCCGCACGTAGGCCAGAGGTTTGTAGTCACTCTCACTCTTCCCAGGCATTAAGCGTTCCTTAATGGAAGCAAAGGAGGACAAGCCTACAG
GAATGGGCCTGCCCTAATTGAGCTGGCCTGAGAAGATACATTTTCAGGTTAGACAAGTCCTTTTTCCCTTTTAAGTTCTGCCTCTTGGGAAAGA
AGATGCATTTGTAGTGCAGGGATGTCCTTGTGAAAATGTGACTTGTTATAGAGCAGTATTTGAAATGCAAGTGCCCAGCCGGGCGTGGTGGCTC
ACGCCTGTAATCCCAGCACTTTGGGAGGCCGAGGCAGGCGGATCACCTGAGGTCCGGAGTTTGAGACCAGCCTGACCAACATGGAGAAACCCCA
TCTCTACTAAAAATACAAAATTAGCCAGGCGTGGTGGCAGACACCTGTAATCCCAGCTACTCGGGAGGCTGAGGCAGGAGAATCGCTTGAACCC
TGGAGGCGGAGGTTGCAGTGAGCCAAGATCATGCCATTGCACTCCAGCAGGGCAACAAGAGCAAAACTCCTTCTCAAAAAAAAGAAAAAAAGAA
ATGCAATTGCCCATCTTAAGGGTCTTGTACTAGTTAATTACTTTCAGAGATAAGTAAAAAAATTCCAGTGTTGTCTTCTATTAAGAGAGCAAAG
GTAGTTAGTAAAAATGGGATTTGTTTGCCCTGCTCCCGAAGCTTAAAATAATTGCTCTATCTCAGTTTTGTCTTATGCTTCGGCAGACTAATAA
CTTCAGTTGAAATGTTTTCTGGGCAGGTGTTCATTGAGGGCCTGATTCTCCAGAGGTTCTGTGCAGAAGCAGGCTGCTTTGAGATAGCCAGCTT
AGCCAGGCCTGGGAACCACACAGAATAGTGCAGTACCATGTAGGGAAAAGTCCTTGACTGGGCTGCAATAGGCAGAGTGGAGAGTGCTAGGAAG
CAGAGTATTTTCCTGGATAATTTCATCCAGTAGAACTTTTTGTCATCATGGAAATGTCCTATATTTGTCCTGTCCAATATGGTAGCTATTAGCC
ATATGAGGTGTCTCTGTGTGTCTGTGAGTGAGAGAGAGAGAGAGAGACAAGAGTCTTGCTCTGTCATTCAGGCTGGAGTGCAGTCGCGCGATCT
CAGCTTACTGCAGCCTCTGCCTCCCAGGCTCAGGTGATTCGACCCTCAGCCTCCCGATAGCTAGGATTACAGGCGTGGGCCACCACGCTCAGCC
AGTTTTTTTGTATTTAGTAGAGACGGGGTTTTGCCATGTTGACCAGGTTTGTGTCAAACTCCTGGCCTCTAGTGATTCACCTGCCTCAGCCTCC
CAAAGTGCTCGGATTACAAGCATGAGCCACTCCACCTGGCCTATATGAGGTTTTCAGCCCCCTTGAAATATGTGGTAAGTGCGACCAAAGAACT
TAATTATTTTATTTTATTTTATTTTAATTTAAATATAAACTAGCCAATAGTGGCTACCATATTGGACAGCTCTAGATAAAATTTAGGTAAGACC
CAAGAGATTGTGGTTTAGATTCTGCTTGGAATATGAGTGATTGGGGCTCTTGGAATTTAAAAATCCAAAGACACGTGTGAATTTGATGTTATGA
GTTTGAATAACAGCCTTCCTTCAGTATGTCTACATTGTTTTATCCTGACTGACATTGTAAGTCCTAAGAGGACTTACAACTGGTAAGTAAAGTT
GTGTTTACCAAAGCAGTTGGAAGTTCAGGCAGTTGTACGTTTTATTTGACCCCTTAGAGCTAAACAGGTGAAAATTTCAGGTCCTTTGGATGAA
GTAAGTTCTCATTTTATCTCAGCAACCCTATGAGGTAGGTTATGTCTGTTGCGTAGTTGACAAAACAGATGAACTTATATTTATGTACACCTTT
ATGGATTAGTAGCCTTTAAAATGGTTAGTTTTATCCCACAACTTCATTTGAAATTGTAAGTTTCTAGCATGTTGCCTATAACAAGAAGGTAATT
TATTTCTATTTGTTAAATTGTTATCAGTAATAAGTCAATATCCTACTATAAGTGGTAGAGAATCAAAGATTGTAGACTACCAAATAGCACCCAA
GAGGCTAATTCATGCAAGGTGTTGCTTATAGTAAAAGCAGATCAGAACTCAGCTGCTGTATGCCATCTGGGGTTATCTTCTCACTTGCACGCTC
ATGACCAGTGTAGGCTGCATCTTATAAGTAATCTGGCTCACAGTTAGCTAGACATATATTAGTCTGATGGAACAAAATCCGATTGTAGCTTTGA
CCACTATGAGGACCACTGTCATATAAGGTCTTAGATACCAACTTGAGTAAATTGCTTAAGGACTGGGAATAGATCCAGATTCCTCCAGGTTTAG
CTTCAAGTTGTGATCAGTTTTCGTGGGATGCAAGGAGAAAATGAATAGGAATGAAATAAATAGCTGATATTTGAACATTTTTAATGCCCTAGGC
AGCGTCTTAAGAATTCTAAGCTTTCATTTATCAATCCTGAGGTAGTTAACATTACTATTTCCAGTAATGTTCACTGGGCCAGTTTACTTTTGAA
GAAATTGAATCTCACGGTTTAACTAAAGTAACTAGCTCAAGGCTATATAGTTATAACTAAGCCACAGAGCAGGCAGGCTAATCTAGGCCTACCT
CATGCCACAGCCTGACTTCTTAGTTGTGATACAAAACAAGGTAAAGGGGGACCTGGGGTGACTTAGTTGCCTCCTGAGAATTCTGGCCTGTGGT
GGAATTACCCATCAGACTGGGCGCGCCCATCTCTTCACTTATGATGTGTCCTTAACAGACTAAATGCAGGCTCTGCTGCACTTTAATGTAATTC
TTTCCCTATTAAGGGAAGCTTGCTTGCCTTTGCAGCAAAGCCCCCTGGATAGTTTATTTTTTAGCAGTTCAGCTTGTGCTTGGACCCAGTTGTT
CCAGAAATCAGTAAAACCTATTTGAGTATTCAAGAAAAAGGATCTTTTTGTTAACTAAGGATTAACTAGAAACCTTATTTTATAAGGGTTCCTG
AATTTAACCAGCTTGCTGCTTAAGAAGCAGAATTAGCAGTCGCCCAGTCATTCGCCTCTCTTCAGAGTTCTCATGTGACTCACTTAGTTTTGCA
GAGTGAGGTAGATTTTAACCACTTTCAAGTCAAGTTGATTGGCCATTCATGAGCTGTGTGCAGGGAGAGAAGAGAGACGAGAACAAGTTAGCAG
AAAGCTGAGGTGTGTTAGACGGGAGTTCTAGGTAAGTCACGGAGGATATTCTTCATTTAGACCCTGACCTTGAGTAAGACACCTTTCTACAGGA
GACATTGCGGATACTTTCTAGTTAGTACTAGCGCAGTGTTCTGCAAACTACACCTGCTTTTGTGTGGTCCACGAACTAAGAATGGTTTTGTATT
TTTAAATTTAGGCATGTGCCACATAACAAGATTTCTGTCAACAATAGACCACTTATATAATGATGGTCCCATAAGATAGAAGGTGGTATTTTTA
CTGCCTCTTTTCTGTGTTGCAGATACGTTCAGATACACAAATACTTAACACTGTGTTACAGTTTCCTACAGTACTGTAACATGCTGTACAGGTT
TGTAGCCTAGGAGCAACAGGCTATACCATATAGCCTAGGCGGTAGTAGGCTATACCATCTAGGTTTGTGTAAGCACACTATGATGTTTGCATGA
CAAAATCGCCTAATGACACATTTCTCAGAATGTAGTTGGAGGAAAAAAATTGAAAGGAGAGTATTACTTCATGAGACAGGAAAATCATTTGAAA
TACAAATTCCAGTGTCCATAAATAAAGTTCACTAGAATGTGCCCATGCTCATTCATTTACATGTAATCTGTGGTAGTTTTTGTCCTACTGTGGC
AGAATTGAATACTTGCAGTGGAACTTGAATGGGCTACAAGGTGTATTTAGTACCTGGCCCTTCACAGAAAAAGTTTGCTGACCTGATTGAATGT
GCTTGTGTGTATCACAGGAAGCTCACCAGGACTCTTGGTATGTACCCTCTAGCTCCCAAAGGCATCTGAGCCCCACTGGCAGGACTCAGTTACC
TGTCTCTGTCTAAGCATGACTCCACCCATTAGCGTCCAGACAACGAAGAAAACTTCTATTTTAAAGAGCTTGACTAACCCCCTCCTTATTATCT
AAGTTAGAGTAGCTGTGCCACCCCTTAAGTAGCTTTTCCTTCTTCCTTTCAAATAGGGGTTGGAAGAGTAGCAGGTGAGAACAACCTCTTTCTT
CCTCAATTGTAGAGACTCAATAGTCTAGGCTATAAATTAAAAAAAAAAAAAAAAAATTCCCCAGAGGCTGACTCAGCACATGCCTGCCTTTTAA
AGGAACAGAGAGACCCAATTGGAATAGAAACTGAAAATAAAATCAGCAGCACATGAATTTTTGTAGGTGGCTCGTATTTGCTATTAATATTGCT
CAGAAGACTCAGGAATAAGAAATAATAATGCAGGGTTTCTTCAAAATATGGTTCTGGACAGTGGATTATAGTTACCTGGAGAGCTTGTGTTAAA
ATATCTGAGGATGATTCCAAGTACCAGGGCTTATACACAGGAATACTTGAGAACCACTGCACTCAAGCATTTAAAATTTTCCTTTTACCTAAAT
CCACATGGGCCAAGACAATTTTTAAAATTCATAGAATTCATGTGACCAGACGTAAGGGGTCAATAAAGGTCATTTTATAGATCAGAAAACTGAG
ACCCAAAGCTGAGAAATAAGTTATCTAAAACCCCACCAGGACATTGCATTAAAGGAGTTGCTCTAAGCGTGTCTTCTTACTATTAGAAAGTGAA
ATTCACTTTTAAATCTGTCACTTAGTTTTTGGCATAATAATAAAACAATGAACAGTCTGTTCTGGCTCTAATTGCGCCTAGAATCTCCAGATCA
GAACACCTTCTTGTAGATCAAGTAACATACTTCTCTGAAAGACAGTTTGTCGGTCCTATCACTGAAGTCTGAATTATTTTTTTGATTTTTAAAT
ATAATTAATTGGTCCCTGGAAATGAGAACCAGAGGAAGATAAGAAGATGAACTTGAATTTAAGGACCATAATGGAAGGAGTGGGATGGGAAAGA
AGGCTGTAAAATAAGACAGTGGTTGTGGAGAGACAGATTAAGGTAAGGAGAGAAGGTTGTAAAATAAGACAGGAAGGGGTTGTGGAGAGACAGA
TTAAGGTAATTGTGGTGTTGTAAAGCCATAAAAGAAATTTAAATGCGGAAGTGGCCTGGAAGAGAAAACATTCTCTGATCATTTAACCCTTTTG
TGTGTGTGTCAGTTTGAGGCGTAAAGTAGACGAATAGCCTCCTTCTTGTGTGTCTTTTCCATGGCAAAGCCTTTAAGGATAATAGCTGACCACT
AATCTCACACAGCTGCTGATGTTTAAGAACCTAATTCTTGAAGTGTTTTTAAGTCAGTTTGTGGCATTTCTTCTGAACACTTGGGCACTTTGGA
AATTGTAGTGACAGGTTTTAGAAATTTGAAGTTGTGTTGCAGAGGTGATAACAAAATTGGGTCTTTGAGCAACTCTGAGTCTTTTAATGCAGTG
CACTTCTAAGTTTCCGATGGTATTTCCCCAAGTTTTGAATATTGAAAAGAAAGACCACACTTTGCAAAATAATTGGCAACTTTCATTTAATTCA
GTTTGACCCTGTCTTGAACTTGGTCTTTGTAACTTCTTATGAGGGTCTTTTCCAACGGTAACATTAGAGGCTGATTCTGGAACTTCATGGAGGC
AAGTCCAGTGAAACTTGGGCAGTTAGGGGGACCCTTTCCCTCTCCCTTTTCAAAGTTACTCAGTCAGCAGCTGCTACTGTTGGGATGGCGTGGT
CAGGTGGGTATTATGCTTATTATGAAACTTGATGAGGGCAGGGACTCAGTTTTGGGGCTGAGTTGTATTTCAACACTTAAGTGGCACTCAGTAA
ATACTTGAACAAATGAATATTCTGAATCCCAACTTCCTTAAGCACAGAAGAACTATTTATACTTGTCTCCCATCTTCTTAGCTAGAGATTTTTT
TTTTGTTTGTTTTGTTAGCTTTCAAGTTGAGGTCCCTAACAGGGGAATCCCATAGTTTCAATGATGAACAGGTCCATGACAAAAATTCTTGTTT
ATATGCAATACACATTTAGGGAGAATAAATGGTCATGTGGACTTTAAAAATTGGAAATGTTACTAGTCTCTTCTCTCATTCTTTTGTTTTGTTT
TATGTTGAGGCAGAGTTTCACTCTTGTTGCTTAGGCTGGAGTGCAATGGCACGATCTTGGCTCACTGCAACCTCCGCCTCCGGGTTCAAGTGAT
TCTCCTGCCTCAGCCTCCCAAGTAGCTGGGATTACAGGTGTGCATCACCATGCCCGGCTAATTTTTGTATTTTTTAGTAGAGATGGGCTTTCAC
CGTGTTGGTCAGGCTGGTCTTGAACTCCTGAACTCAGGTGATCCACCTGCCTTGGCCTCCCAAAGTGCTGGGATTACAGGCATGAGCCACTCCT
CCCAGCCCTCATTCATCAGTTTTTTAAGGGTTTCTTTAGAGCTGAATCCTCCCAGCAGTTTTCTTTCCTTTTGAATTCCAGAGCTCTTTGGGCC
TTTAGCCAGAAACAGTCTCTGTCCTGCTTACTTTGAAAGGCTGTTAACTATGCCCTGGAATTTTGGAAATGTTCTCCTTGAGAATTGCTGTAAA
GTAGTGATAAGGACTCTTCTGTAGGCTACAAATTGAAACCAGCCACCATTAAGATGGCTCACAGACAGGGTGTCCTGGATTGAAACTGGACCAA
CGTTGGTATAGTCTGAATTTGAGGAGTAAAAAGAAATATGCCCTTCCCTCTCCCCTAACAGTTGGGGAATACTTGTTTTTACTCCTCAACCATT
CCCCTTTTAATGATGACAAGTTTTCAGGCTTTTTCACTGCCTTTAGTTTTGCATTAAGTTCCTGGGAGATTCACACACCCCTGATATTTACTGC
ACTCCTGGATGCCAGTTTTTTATCACTCAAGACCAGCTTGTTATCTGTCCTAGACAGAAGCCATCTTCTTTTAAAAGTATTAGAACATACTGCC
TATAGAGTGTTAAAGAGAATGTTGATTTTTTTAAAACTTCTGCTTTTGGGGATGTGATATGGGTTTGAAAGTCAGGGAGGAAGTAGAAGATGTA
AGGGTTTGCCCCAGTACAAGAGTTTTAATAATGAGGTGATAAATATTTTCTTTAAATAATTTATTCACCCATTGTGTTCACTCAAGTGGTTCTA
GTGTTCACTTTCCTTATGCGCTAGTTGTATATTTGTATGTCAGAGAAGAGCAGAGATTATCTTTGACAGAAGTTATATTGTGAGTGTCTTTTTG
GAGAAGGTAGGTTTTGATTGTGTAACTATGCCACACCTCCATTCCCCATACACTTGACTTGATGATTATCTTTGAAGGAGGAGCCCATCATATT
ATACAGCTGCCCTAAGTCTCAAATCTATCATCAAAAGGCAGTGTAAAGGGGACTGGCTCAAAACATGGCAAAGAGTCTCCTTTATATCAGAAAG
CTCTCTGCCTTTGCTTATAAGGCAGCAAAGGACTCTTCTTCCTGCCCTGATCTGATTACCCTAAAAGCTTTAAGATCATGGAATAGTTGATAAA
ACAGTCAGTATTCTGTGCTGATGACTTATCCTTTTCTCCCTTAAGAAAGAGTAAATGTTTTTGCTTGGATTGAGTTTAGAGACACCAGATAGAA
TAAGATTGGCAACACTGTTAGCCACCTGCTGACCACAGCTAAACAGGCATATGTGCTTCTGCATGGGGAATGCTATGGCGTTAACAGTGCCTTC
CTTAAAACCTGTAAGTTCGTTAGCCTTCCGGGTACCAGGGTTGTTAGAGTAGGCCACAGTTTACTTCCTTTTTCATAAGTGCTTTTCTTTCCTG
GATCTCAGTATAGGAAGGAAAATCAGACAGCATTTCTCAGTTGTTGGCTCGGTGGGCATTGTGAATGGGTATGGTTGCTGCCTCAAATGCACAT
ATACAACCTGAGCTAAGTTGTATGAAATGATTGAGTAGGCTGACTTCAGTTCTATGTAAATTAATCAAGGAGAAGGTTTAGGAATGGTTGTACC
GCATTGACAGTTGTTAACATGTTTATAATTTCTTGGAGATTAGCCAGGAATTCTGTTACAACTACACACAAATATTGATTGACTTTCAAAATAA
AATTCTTTAAAATCACTGAAATTTTCTGAGCCCAAGTTTCTTCATCTGTAAGATAAGCAAATTTACTAAGGTCATGGGTATCTAGTACATGATG
GACAGAGATTTGAAGCTCTTTACCACTGATTTATGCTACCTTCTCATAGATCTAGTAGTTTAGTGACTTTTACCCAAGGTCATACACTGAGTGA
TAGAACAAGGATTTTGAATAAGATATTTTTCACTGTTGCACTGGTCTGCTTTCTCCAGCTTCCTTCAGAGGTCCCTAAAGGGGACCTCTGTGCT
GCTCTGCAGTGCCTCTATCACATTACGGTTTGGTCATGGTCTTTTGTGCTCATCATGTTTGAACATGTTTATCAAAGTATTTTACAGACTTGGT
TATTTCTTCCCCTCATCTAATTTGTGTATTTGTCTGTTTTCCCTATGGAGAATCAACTTTTTATCTTATATATGCCTGATGTGACATTGATTTG
GCCACTTCGGCTTGACCTTGTACTTGCTTTCCATATCTGCAGCTTCATTGTCATTTTGGGTTTAGGCCAGCTTTCAGGAACTTTTTAACAGTTG
GATCAAATTTTGTTGGATTCATTTGATACTGAGTTTCTTATTCCTGTATATTTTGTTTCCTTTCTATCTAAGCAGAGAACTAGGACTCTAGAGT
TACAAGAAGTTAGAGTATATCTATAACTTTTTTAAAAGAAAAAAAAAGGACCAGGCATGGTGGCTCACTCCTGTAATCCCAGCACTTTGGGAGG
CCAAGGCAGGTATATCACTTGAGGTCAGGAGTTCGAGACCAGCCTGGTAAACATGCTGAAACCCTATCTCTACAAAAATACAAAAATTAGCTGG
CCATGATGGTATCCACCTGTAATCCCAGCTACTCGGGAGCCTCAGGCAGGAGAATCTCTTGAACCTGGGAGGCGCAGGTTGCAGGGAGCTGAGA
TTGCACCACTGCACTCCAGCCTGGACAGTAGAGTGAGACTCTGTCTAAACAAACAACAAAAAAAAACTCTGTTTTGGACACATGACTTTAGGGA
GATAAACATAACTCTGGGATTTTATTTTTTAATATGCTCCTGAAAACAGTCAACTCTCCCATTTCCTACCTGGGAGAAGTATGTCTCACTTAAT
TTTGCTCATTCAGGAGAGGATGAATTTTTCACCAATGATAGTAATAGCTGGCTGTTGCAACTCATTTCTTGCTGCAGCGTACCACATCCACCAA
GAATGCCCTTTCACCTTCCTTTGTCTTCCCAACTCCCTCTTAGCTTTCAGTAAGACTTGGCTCAAACTGCATCCTCCAGGAAGCCTATGTTAAC
TCCTAACTGCCACTCTTGGATCCAGGGTTTTTATTTCATCTTGTTCGCTGGTGGAACCGGGCTGTTTTATCTCATTATATTACTCTTCACTTTG
AAACAAGGAGGCAGTTAACCTAGATTCAGTATTTTTACTCTTAGACTTTTTTTCCCCCAAAATGCCCATAAATTAAGCAATCTTACTGCCTTAC
TGCGCTTACTGAAAAATAGCAGCACAGCAGAAAAATAGAAAATCTTGCTATCATGTAAGAGATGTGGAAGTAATGGTGCCCACATGCTTCATTT
GGAAAATGTCTATTACCTTTATAAAGAGTTTGTATAGTTTCTAAATACAGGAGCATTATCATGCGATAGAAACTGTTACTTTAATGTTAATTGA
CGTTCGAAAATTTGAGTTTCAAATGTTTCCTAAAACATTTTTTCTTAACCCTTTTGCTATTCCATTGATCTGCCATTCTACATTCTGCCTCCTT
TGTTTCCCTGTCACTTATTAAAAATACTGCCTCTTAACTTTGTTGTCATCCACTTATTTCTCTAGATACACCTTGGAGTGTTTTTTCAGGCTGA
ATTGTTAGGCATCCGATTGCTGGGTTTAAAGACGGAGTGTGTGAGTTTGTTTGATTTTGCCAAATTCTTCCTTCATGGGGGTTATACCAACTAG
TATATGTAATACTGCCTTGCACAAAATATACATTTAGTAAAGGATACTGATATGGTTTGGCTGTGTCCCCACCCAAATCTCATGTTGAATTGTA
GCTCTCATAATCTTCCTGTGTTGTGGCACGGACCCGGTGGGAGCTCATTGAATCACCCGGGCAGTTACCTCCATGCTGTTCTTGTGATAGTGAG
TTCTCATGAGGTCCGATGGTTTTATAAGGGGCTTCCCCACCCCGCCCCCGCACCTGCCCCACTTTGCTTCACACTTCTCCTTGCTGCCATCATT
TGAAGAAGCACGTGTTTGCTTCCCCTTCCACCATGATTGTAAGTTTCCTGAGGCCTTCCCAGCTCTGCAGAACTGTGAGTCAATTAAACCTCTT
TATAAATTACCCAGTCTTGGGTATGTCTTTATTAGCAGCGTGAGAATGGACTAATACAGATACCTACATACCCATTATTATCTTTTGTGAACTG
GGACTATTTCTCTATCGTAAGAGTGGTAAGAAACTTGAGTTGAGATAGTGTTTGAAAGCACGCTAGCATGGTCCTGGCACCCGTATTAGTGCCC
TTTTCTCTTGTGTGCCTTGGGCAGCCAGCTACTTGAGATTATATCTTAATTACCTTAATGGATTGTAAACTCCTTGAGCGCAGAGTCCTTGTCT
GGTGAGTCTTTAGCAGGAAGCTTTGGACTTGAATATATTTGGTTTTAAATTGAATTAGTCTTCAGAATATATTTCTGAAACAGTAGGAAAAGGA
TTTCTTTTTTTTCTTTCTTTTTTTTACACATTAGCCCTCAACTCCTGTGTAATGCTACCTAACATCTATTCCTACAGTAGGAAAAGACAGAGAC
ACTTTCCTTTTGTCTGTCGGAAGCTTCTTTACTTAAAAGCTTTTTAAACCCCAGGGAATACGTTAGGTAACAATAGCAAAAGATGTTGATTCCT
GTTCTATCTGTTTAACTTATCTGTCCTTAGGGAGTAACTCCAGTTAAATTACAGTGAAAGGAGTTAGTTGCCATAAGTCTTCTGTTTTATCAAG
ATTGCTTTATTGCAGGCGGCTTCCTCCCATGTCTTCATCTAGAATTTTCACTAGGAATTAAATAATTTGTTACTAGAAAGCATTAGTTGCCCTG
AATTCACAGTGAATTAGGTTTTCTGATGATTTAATGTGCACTGGTTTGCATCTTTCATATCTGTCAGTTAAATTCAACACATTTCTTTTTGCAC
TTAACAGGTGCTTGAAGTGGCAGGGTCCTTCCTCTAAAACATTTTAAATAACACTAGTAGATGAATTCCAGTTAAGCGGAAAAGGTATGTGCTG
AAACTAATCTTCAAGGCCACAGTATGTTCTCTCCAAACACATGTTTTCACCACCAGGGATGTAGATCTGTGTGCCCTTATTGGCTTTACTTTTT
CACTTACTGGCATCTCTTCTGACCAACATCTTTAGTCAGATGTCCCACTGTTACCTTAGATACAATATGGCTCAGGCTGGTCCATCATTTCTCC
AGTATTTTTCACCATCTTTATTCTGTACAAGTTTCTTGTTTTTGCCAAGGCCCCTTCTTCCCCCAGTCACCTGGACGTAAAGACTTTCTCTGAC
TCTTTATTACACTGCATTTATTACACATAGTAGTGAGTTCCTGGAACTGGGTTCTACTTCCATTTTCCCAAATGTGCTTTTACATTTTTTCCTT
CCTTCTTAGTTCCTTTGCTGTCACTTTTTTTGTAGATTGCTTCAGAAACCTCTAACTATTTATTTTGCTTTTACTTTTATCTCTTACTATGCCT
TAACACAAACCCTCTCTTGGAACTAGGCCAGTCTTCTTGCCATGCCCTCACATAATAACACAAAAATGAAGGGTTGGAAAGGAAGAAGCTTAAA
GATAATGTTTAACTTATGAAAAGTTTCAAGCATACACATAGAGAAATATAATGAACTCCCATGTGTCTGTCACTCAGCTTCACTAATTACCAAC
CTTTTGCCAGTTGAATTTTGTCTATCCCCGTATCCCTTGGTGCTCCCCCAACCACCACCACCAGAGAGTATTATAAGCAAATTCCAGGCATCGC
TTACATGGAAGTACTTCAGTATTCATCTTTACAGATTCTTTAATCTGTCAGTTTACCTACTGCAGAATATCTCTACAGTTTCCCTTTCAGTTGC
TTATTTAGTTTGTTTAAATGCTTTTGGCGTTCAGAAGGCATCCCATTCTTTTAGTGGTTAGTTCTTTTGTACTGACCTCAATTTGCCTCCCTAT
CATTTCTCAGCAGTAATATAAATTTATATTTACTCAGAAATTACAAATTTACTGAGTAAATTTATATAATACAATATAATAGTCATTAAGATAT
TTGAAGAAGTTGCCATGTAATACACTTTTTGACACACCTTTCACAGCACACATAGCACATGTAATAACTTTTATTTGTGTTTTAGAGAGAGGGT
CTTGCTCTGTAGCCCAAGTGGAGTGTGGTGATGTAATCATAGCTCCATCCTTGAACTCCTGTGCCCAAGCAGTCTTCCCACCTCACCCTCAGAG
CACCCAGTATTACACGTGCACCAAGATGCCCAATTAATTTTTTAAACACTTTTCGTAGAGACAAGGTCTTGCTATGTTGCCCAGGCTCGTCTCA
AACTCCTGGCCTCAAGTAAGCCTCCCACCTTCGCCTCCCAAAGTGTTGCCATTGTAAACATGAGCCACCGTGCTCAGCCATTCCTTTAAAATAG
GAATACTTCGGGTTCAGATCTTTGACCTAGGTCTTATTTGTATCAATGAGATTAATGAGCCACAGCCCCGAGTTTCTCACCAGACATTTTTGAT
TTGCATTTTTAGACAGCAGTTGCTTTAAAAAACTTGGGGACCTGGCTTAAAATCAATTTTGAAATTTTGTGCATTAAAAAAAAAATGTGGCCGG
GCGCAGTGGCTCACGCCTGTGATCCCACCACCAGACTTTGGGAGGCTGAGGCAGATGGATTGCCTGAGCTCAGGAGTTCGAGACCAGCCTCGGC
AACACGGTGAAACCCCATCTCTACTAAAATACAAAAAATTAGCCGGGCATGGCGGCATGCACCTGTAGTCTCAGCTACTCGGGAGGCTGAGGCA
GGAGAATTGCTTGAACCCGGGAGGCTGAGGTTGCAGTGAGCCGAGATCACACCACTGCACTCCAGCCTGGGTGACAGAGTGCACCTGTAGTCTC
AGCTACTCAGGAGGCTGAGGCAGGAGAATTGCTTGAACCCGGGAGGCTGAGGTTGCAGTGAGCCGAGATCACACCACTGCACTCCAGCCTGGGT
GACAGAGTGAGACTCTGTCTCCAAAAAAAATAAAAAAAAAAAAGTTATTGGCAGACTGTTATCTGAAACCTGCCTGGAATTACTTTCAATTTAT
CCTTTACTTAATTTCCTTTTTAAGTTTAGAGCTTTTTAGTGATTTAACCAAATTTTCCTATGTACACTAGTATTTGTCAAGATAAATTTTTAAA
GCTTGGTCCATTTTTTACTATAAAAGTAATTGTGGGGAAAACTAGAAAACAAGATGAAGTATATGCACAAAAACTCAAGTTACTCATAAATTGA
CTACCCTAAGATAACTGCTTTTAATATTTTGATGTCTGTATTCCAGTCTTCTTCATATGTATTTATGCGTTTGTTGAATTATACACAGAGTAGT
TTTTTTTAATGTGATGTCCTTTCCATACTCTAGGGCTGTATTAGCAGATCTTGATGTTCTGAAGCTTGTTTATTGCATCTGGCCTGCAAACAAA
ATTAATTGACACACATGCTTTATTCCAGATTGTGGTGCTATTACATGTATTGTCATTATTATGATTTTAGCCATAAGTGTTTGGTTTCAGGCAG
AAGTAGTGGGATATTGCTGTCAACTAAACTGGGGCCACTAACCTTGTGGGAATCAACTTAGCATTTTAAAATTATAGACTCGAGGTTTTTAGAA
GAAGCTGAAGGGTTCTGTATGCTGCATGGAAGATTGAGTTCAAATCCTACTTCTGACACCATATGATATTATTTTTCCCATCTCTGTAGGATGG
GAATTTCTTACAGTTAGTACTACGGTCATGCAGATTTCTATTTTCCCAGGGCCTGAGACAGAATAGATGCTCAGCACATTATGACACATGTGGC
TTCTTTTGCTGTGAGCCAGTCATGGGATGAAGACACATTGCCTATGCATTATTAATTGATTGCTATAAAACATGTTGCCTCAAAATATAATAGC
TTAAAACAACACACACTTATTTTCTCATGTACTTCCTGTGAGTCAGGAATCCAGACATAGTTTATCTGCGTGGCTTTGGCTTACCATCTGTAGA
TTGCAGTCAGTATGTCAGCCACCGCTGCAGTCATTTGAAAACTTAATTTAGGCTAGAAGGTCCACTTCCAGGATGGCTCATTCACATGGCTAAT
TGGCAGGAAGCTTAAGTTTCTTACTACATGGGCCTTTCCAGAGGGCTTCTGAGTGAGTACATGACAGTGTGTCACTGGCCTCCCCCAGAGCAAG
GAGAGAGCAGGAAGGAAGATCTAATACCTTTTATGGCCTAGTGTCGGAAGTTGCCCCCTCACAATTCCACTTCATCTTGTTTGTTACGACTGAG
TCACAGTGTCCAGCCCACACTCAAGGGGAGGGGAATTAGGCTATACCTCTTGAAAAGCGGAGTAACAAACAATCTTATAGTCAAGATTGTGTTT
GTGTAAGGTTAGAATAGAGGGTCCGGAAATAGACCTATAATTATATGACCGCTCGAAAACGCCAAGACAATTTAATGGGGAAAGGGCCATCTTT
TAAAAAATAATGCTAGGCTATTCACAGTAGCAGAAACATGGAATCAACCTCAATTTTCATTAATGGTAGACTGGATTAAAAAAAAGAATGTGGC
GCATGTACACCACCCAATACTGTGCAGCCATAAGAAGAACGAGATTGTGTCCTTTGCAGGAACATGGATGGAACTAGAGGCCATTACCCTTAGC
AAACGTAACAGAGGAACAGAAAACCAAGTATTGCATGTTCTCACTTATAAGTGGGAGCTAAATGATGAGAACACATGGACACATGTAGGGGAAC
AGCAGATACAGGGCCCTTTTGGAGGGTGGAGGGTGAGACGAGGGAGAAAATCACGAAACATAATTAGTGGGTACTAGGCTTAATTCCTGGGTGA
TGAAATAATCTGTACAACAAACCTCCATGACACGAGTTTACCTATATAACAAACCTGCACATATACCCCTGAACTTAAAAGTTAAAAAAAAATG
GTGTTAGAACAACTTGACGTCTTTATTGATTAGAAAAAAATGAACACTGGCCCTTAACTCTGCAAAACTGCTAGAAAATAAATAAATAAATAAA
TAAATAAATAAATAAATAAATAAATAAATAAGGTGGTGGTGGTGATATGCCCTTGTAATCCCAGCCATTCCAAGGGCTGTGGCAGGAGGATTGC
TTGAGCCCACGAGTTCGAGAGGAGCCTGCGTAACATCGTGATATAAGAAAATGAGACTCTTTCCCTGCCTTTCCCTGCAAAAGAGAGAGAGAGA
AAATCTGTGTAGCCCTTGAGTAGGCAACGATATCTTGGGGCACAAAACATACAGACCCTAAAAGAGAAAATTGATGAAGTGGACTTGATCAAAA
TTTAAAACTTTTGCTCTTTGAAAGACACCATTAAGAAATAAAAACAAGAAAATGATGGGGAGAAAATATTCACAGTTCGTATAGCTAACAAAAA
ATTGGTAATCCAGAATGTATAAGAGCTCTTACAACTAGGTAGTAAGAAGACCAAGAAAAGATTTGAGCAGATACTTCACCAAAGAAGGTATATG
AGAGGCCAACAAGCACACCAAAAGATGCTTGTCATTAAACATCATTTAATCATCAGAAATATGTGAATTGAAACCACAGTGAGGTACCACTCCA
CACGTGCTAGAATGGCTAAAATTAAAGACTGATAGCAGATATTGGTGAAAATTTCTACCAATTGGAATGCTAATGAATTTTTGATGGAGATATA
CAATGGTACAATTTGGCAATTTCCTCTAAAGTTAAACATACATTTTTTATATTACCCACTAACTTTTCTCCTAAGTATCTACCCAAGAGAAATG
AAAACATGTCTATAGAAATATTTGTATATGAATGTTTGTAGCAGATAAATAATAACCAATGCCTGGAAACAACTAAATTGTCCAGCAGGTGAAT
GGGTAAGTTACAGTATATCCACACAATGTAACACCACTCAGCAATAAAATGGAACCAACAACTGATATATCCAACAATGTGGATGAATGTCACA
AATGTTATGCTGAGAGAAAGACATCAGACACAAAAAGAATAAATCCTATATGATGTTATTTACATGAAATCTAGAAATCTAGACAAATCTAATA
TACAGCACGATCAGATCAGTGCTTCCTTTGGGCAAGGGGTGGAAGATGGGGAATGACTGGGAAGGAGCACGAGGGAAACTTTCTGAGATGATGG
ACTTGTTCTAAATCTTTATTCTAGTGGGGATTGCACCTGTGGGTGTCTTTGAAATGTTTATTATTACAGTTATTTCTTAATATTTGTAGGGGAT
TGGTTCCAGGACCACCCCACCCCCTGTCCCTACTATACCAAAATTTGCAGATGTTCAAGTTTTTTTGTATATAAAATGGCACAGTATTTGCATA
TAACCTACACAATCCTTATATATACTTTAACTCACCACCACATTACTTAGATTACCTAATACAGTGTAACTATATAAATAGTTGTTATATTGTG
GGGGGATTTGTATTTTTTTGGTTGTATTGTTATTACTATTTTTATTTTTCCTTGAATATTTTCAGTCTGCAAATGGTTGAATCTATCGTGCTGA
ACCTGTAGATATGGAGGGCTGATTGTATTTTATTGTTTAGACATTACACCTTATTAACATTCATTTAAAAACATCTGTTGAGGTTTGGATTTTT
CAGAAGTTATAACATCTGATCTTTAGAGTCAGTGTTCAATACTATCCCTTTGTTATCATTTATAGGTCAGGCTTAATAGTATTATGTCTAGGGA
GAAAACGCCAAACTCTGGCTTCTTTCCACAGAATAATTGCCTCTCATTTCCTTTATCCTCCCCATATTAGTAACTTGTCTTGATTGTAGAAGCA
GGCTAATGGGAGCTTTGTCTGGGCTTCTTTGTGAAAGCTTTTTTTTTCAGTGGCATGTGCTATTATGCCTACCATGCCATTTGAATCCTGTCAT
TGTACTTCTTGACCAGCTTGTCAACGTAGGCATACAGAAGATAGCTCATGACTCCTGTTAACTGACTCATCTCTTATGGTTGCAGATTCTCATA
AACACAAAGATAAACACAAAGATCGAGAACACCGGCACAAAGAACACAAGAAGGAGAAGGACCGGGAAAAGTCCAAGCATAGCAACAGGTAAGG
GTGGAATCAAGCAAGTCCCTCATCATTCAGCATTGGGTTGGCCATTGCTTGGCTTACCTGGAATAGGTCTTAACTTGAGCTACATGTAAAGATA
GCAAAGTAACTAGAAACTGTATTTGATCCTAGAGTTCCTATGAGGATGGCCATGATTTAGGCCTTAAATGGGATGCCATTGTTCAGATCAAGAT
GTATAAAGCAAGTATGTTTAATTTTCTTTTAATATATACCTCATTAAAAATACAGTTGTTCACTAAGATAGGTAAGGATTCATTGTGACACATG
ATGGCATTTAATCAAGTCTGTAGCAAGCTTGCCTTGATAAAAGGTAACTGGATTGGAGACCTGATTTTTTTTCTTCTTTCTATATTTTAAAGAG
TTTACATTAAAAATTCTTAACTTGGGCTTCCATGGTCTGTTAGCCCCTGAAATTATATGCAAATGGTTGAGTATATGAGATTTCCTGGAGAGAC
TATTTGTAGCTTTCATCATGTTATCAGAGGAGTTCGGCTCCCACAAAAGCCTACAATCACCAATATGAATGAAACTCAATAGTGCTGCCTTTTG
GGATGCAAGCCTCAAGAAGATGTTTCTTTTGTTCATTTTGCTCCCATTTTTTTGGTGTACGAGGCAAGTGGTTAAATCTAGTTATTGAAAATGA
GGACTTGTACTTCCATTCTGATTTAAAGACAGTTGTTGGTGAGAAAGCCATATGGTATTCCCATTCCCATAGTGGCCTGAGCTAGGTTAGGGAA
TGTAAACATCTGTCACACATTACAACAAGTGTCTCCATTGTAGAGTTCTTAGAACTTCTTTATTAACTTGTCTCATTGTCTGTAGACAAGTTAA
AGTGAGAATTGCTTTCTAAGTCTGTTCTTTTTCGCGAATCATTAAAATAACCAGATTTAATTTTCTCTATTGGGGACATTTCTTTGGGAATCAT
GTATCATGCCTGTGGCCTTTTTTCCCTATCCCTCACTTATCTCTTATCACTTGATCATCTAGTTTCCATTTTCATTATTCTGGTAAATTTAATC
TCAGTAGTTGAATCTACTCTACATCTTTTCTAGTTTATAGTTGTCTAGCTTATGTTAATATCTACCGTACAGCAAAGAATATTGCCAAGGATAA
AGAAGTTCATTGCATAATGATAAAAGGGACCCATTAGGAGAACATAGCAGTTATAAATGTTTATCCACTAACGTCACAGCCTCAAAATACATGA
AGTAAATCTGATAGAGCTGCAAAGAGAAATAAACATTCATAATTATGGTCAGAGATTTTACTATCTTTCTCAATAATTTTTAGTCCAAATAGAA
AATAATTAAGGATATGGAAGACTTGAACAGTATCAACCAACTTGATCTAATCGACATTTATAGGTTTTTCCCATCCAACAATATTAGAATTTTC
TCTTTTCTTTCTGTCTACTTTTCCGCTTTTAATTTTTTTCAGGTTTTATTTTAGATTCAGTGGGTACATATAGGCAACTTTGTTACCTGGGTAT
ATAGCTGTGATGCTGAGGTTTGGGTACAAATGATCCTGTCACCCAGGTACTGAGCATAGAACCCAACAATTAGTTTTTCAACCCTTACCGCCCT
CTCTGCTCTAGTAGTCTCCAGTGTCTATTATTGCCATCTTTATGTCCATGAGCACCCGATGTTTAGCTCCTGCTTAAAAATGAGACCATGTGGT
ATTTGGTATTCTGTTCTTGCCTTAATTTGCTCAGGATAATACCCTCCAGTTGCATCCATGTTGCTACAAAGGACATGATTCAGTTCTTTTTTTA
TCACCGTATAGTATTCCGTGGTAGATATGTACAACATTTTCTTTATCCAATCCATCATTGCTGGGTACCTAGGTTGATTCCATGTCTTCCCTAT
TGAGAACAGAGCTGCAGTGAACATGTCTGTACATGTGTCTTTTTAGTAAAATGATTTGTTTTCTTTTGGATACATACCAAGTAATGGGATTGCT
CCATCAGAAGGTACTTCTTTTTTTAAGTTCTTTGAGAAATCTCCAAACTGCTTTCCCTAGTGGCTGGACTAATTTACATTCTCATCAACAGTGT
ATAAGTGTTCCCTTTTTTCTGCAGCCTTGTGAGCCATCTGCTGGTTTTTGATTTTTAATAGCCATTGTGGCTGGTGTGAGATGATATCTCATTG
TGGTTTTGATTTGCATTTCTCTGATGATTAGGGACGTGGAGCATTTTTTCATACATTTGTTGGCCATTTGTATGTCATCTTTTGAGAAATGTCT
GTTCATCTCTTTTGCTTGTTTTTTAATGGGGTTACTTGTTTTTTGCTTGTTGAATCATTTAGGTTCCTTATAGATTCTGGATATTATACCTGTT
AGACGCATAGTTAGTGAATATTTTCTCCCATTCTGTAAGTTGTCTGTTAACTCTGTTGATAGTTTAATTAGATCCCATTTGTCAATTTTTCCTT
TTGCTGCAATTGCTTTTGGCATCTTTGCTATGAAATCTTTGCTCGTTCCTATGTCCAGAATGGTATTGCCTAGGTTGTCGTCTAGGGTTTTTAA
CAGTTTTAAGTTTTACATTTAAGTATTTGATTCATCTTGAATTGATTTTTGTATGTGGTGTAAGGAAGGGGTCCAGTTTCAGTTTTCTGCGTAT
GGCTAGCCACTTATCCTAGCATCATTTATTGAATAGGGAGTCTTTTCCCCATTGCTTATTTTGGTTGACTTTCTTGAAGATTAGATTGCTGTCG
GTGTGTGGTTTTATTTCTGGGTTCTCTGTTCTGTTCCATTTGGTCTATGTGTCTGTTTTTGTACCATTACCATGCTGTTAGTGTTTCTGTACCA
TTACCATGATGTTAGAATACATTCTTTTTAAGTGCACACGAAATGTGCCAAAATAGCTCATACTTTGGACCCCACTCTCCTTAAACCATCTTCT
TTGGCTTTAATGCTTCCATGCCTCTCCATCTTTCTGGCCACCTTTTTCACCTCTTTCTAATGCACAGTCATTCCTTAACAGTTTTTGGCTGTCT
TTTCTCTGCTACCTGTTTTGCTGTTTATCCTTATTTCACATTCCATATTTGGTCTTGTGAACTTCTTTTCAGTTCCTTAAACATAGCATGTTTT
CTGATGCCGCTAAGCCTTTAAACATGCTGTTGGTTCTGTAATACTCTCTTGCCCCTTTGCTGTCATTCTTTTAGTTGCAGCTCAGACTTGACTT
GTTCCAGGTATCCTTTCTACCCTCCTTCTCATATTAAATGCCACTTTTGTGTGCTCTCTGGTGCCTTGAATATATTCCTAGTGTAATAATTATT
ATATTTAATTGTGTCTTTACTTTTCCCTATGGCCTCCTGGACTCTAAAGTCCCTGAAAGCAGAATTGGGATCTTTTTTGTTTTTTCTGGGGTGG
GGCGGGGGGCTGGTTTTTTGTTTGTTTGTTTGTTTGTTTTTTGAGACGGAGTCTTACTCTGTTGCCCAGGCTGGAGTGGACTCGTGCCATCTCA
GCTCACTGCTATCTCCACCTCCCAGGTTCAAGTGATTCTCCTGCCTCTGCCTCCCAAGTAGCTGGGATTAAGGTGCGTGCCCCGACACCCAGCT
AATTTTTTGTATTTTTAGTAGAGACAGGGTTTCACCATGTTGACTAGGCTGGTCTCAAACTCCTGACCTCAAGTGATCTGCCCACCTTGGCCTC
CCAAAGTGCTAGGATTACAGGTGTGAGCCACCACGCCCAGCCTTTTGTATTCATTTTGCATCCTTCAGGCTTAGTATGGTACCTCGCAGATAGC
TGGCACTTACTAGTCTATATTTATTGAATTAATGACTGGATGATCTATGGGTACATTAATTCCCATCTCTCTTTCTTCTCACGTACTCTTAATC
TTCTATAGGATAGTTATTAAGTCACTTTGGCTTATCTCATTTTTCACACAATTGTGTGTGGTAAAATAAACATAACAAAATTTACTGTTTTAAA
GTAGCATTTAGTACATTGACAATAGTATGCAACTGTCACCACTATCTCCAGAACTTTTCATCATCCCAGTCTTTGAATTCACTAAATAATAACT
TTTCATTCTGTTCCCCTGTCCCAATATCTTTCTACTTTGTCTTTTTTTCTCTTTCCCTTCTACCTTTTATCTTTATCAATTTGCCTATTCTAAG
TACTTCATATAAGTGGAATAATACAATATTTATCTTTTTTAAATCTGTTCTATATTCCCTTAATATGTTTTCAAGGTTTATCCGTATTGTAGCG
TATCAGAAATTCATTCTTTTTTATGACTGAATTATATTCCATTGTATGCCTGTAATCACATTTAAAAAAATCCATCTGTTGATGGACACTTGGG
TTGTTTCCACCCTTTCCCTACAAATACATGTTTGAGTTCCACTTTCATTCTCCGGGGTCTATACCTAGGAGTAGAATTGCTAGATCATGTCCAA
CAATGGGTGGCTGCCTGCTATCTTTTTACTGTGCTAATTGATGTGGTGTGAAAAAAAAAATTAGATAACCTTTGACCGTGAACAGTATCATCTG
AGGAGGTGAGAGACCTGCTTACAGATCAGATGAAGAATGTTGATTTTTATATTACTAGGCTGTAAGAAGAAATTCCAAAAGACTTTAAGAAGAA
AGAGGTTAATATTTAAAACATAAGCTTTTGAAAACTTATCTTCTCTAACACATTCTACTTTGTTTTGGGAGGAAAGATACAGTAAAAGTGACAT
AAAGGGCTTTGAGACATATAACTTTGGCCCTGTCCTGTTTTACAAAAATCTTCTCTTAAAAAAAAAAAAGGGATGTGATTTTTTTAGAAGAAAT
CCTCATCCTTGTACATCCATTTAAGTCTCGTGATCTTGGCTACGTTACTTAACCTTCTTCAACTCAGTTTCTTCATCTTCATCTTGATACATGC
TTCACAGCGGAACCATGGGACTCAATAAATATACAAGCTCTTCAGTTGTGAACTGCTCTACAGATGTGCAGAGATGACACTTTTACATCTATTT
AAAAGCATACTTTTCCAAGATCATATTGTAGGTAAATTCAATAATTTGTTGTATGTACTTTTGTGCCTCTTTTCTTTTCTTTTTTTTTTTTTTT
TTGAGACAGTCTTGCTCTGTCGCCCAGGCTGGAGTGCAGTGACACAATCTCGGCTCACTGCATCCTCCGCCTCCCGGGTTCATGCCATTCTCCT
GCCTCAGCCTCCCGAGTAGCTGGGACTACAGGTGCCCGCCACCATGCCCCGCTAATTTTTTATATTTTTAGTAGAGACGGGGTTTTACTGTGTT
AACCAGGATGGTCTCAATCTCCTGACCTCGTGATCCACCTGCCTCGGCCTCCCAAAGTCTTGGGATTACAGGCGTGAGCCACCGCGCCTGGCCA
CTTCTGTGCCTTTTAATATTTTCTTCATTCCTATAAAAATAGAAGCCTTTTTGCCAAGAGCTATTGGAAAAACCTGGCCCGAGTTTCTGTTTAC
ATATGACATGACTAAATCTAGCCCTTGGTTTCTTATTCACATGAGTAAATTTTAACAGTTTAATCAGATGATCTGTTGTAAGCAAACTTTTAAG
TACTTCTTGTTTTGATGTCTACTGACACAGTACCTCTTTGCAACAAAGCAAGGATATTCGTTATATTCCAGTAAAATTATTTTATTATTTTTTT
TGAGATGGAGTCTCACTTTGTCACCCAGGCTGGAGTGCAGTGGTGTGATCTCGGCTCACTGCAACCTCTGCCTCCTGGGTTCAAGCGATTCTCC
TGCCTCAGCCTCCCGAGTAGCTGGGACTTACAGGCGCCTGCCACCACGCCGAGCTAATTTTTGTATTTTTGGTAGAGACCAGGTTTCACCATAT
TGGCCAGGCTGGTCTCGAACTCCTGGCCTTGTGATCCTCCTGCCTCAGCCTCCCAAGGTGCTGGGATTACAGCCTTGAGCCACCACACCCGGCC
TCCAGTAAAATTTTATATACACTGTGATCCTTTTAAAGTACCTCTGATCTTTTTAAATAGTTTAGGGTTTCTTCGATTTCTTCTGTAGCAGATT
AAAGAAATCTGGGGGATTATTTAATCACATCTGAACCCCACAATAATTAGTATTTAGCATGTTCTCTTCCAAAATGCTTTCATTTATTCCAATC
CTTGCTAATCAATTGTAGCTAATTTTGTGGCCATTTGTTAGGAGAAAACAAGTGTTTCAGATGTGTTTCTGTGTCCCTTCCTTCTCTGCTAGAT
ATTAGCACCAATCATTTGTCATCAGGCTATACTTAGGACCCAAGCCCAGGAGGCATTTACTGTCCTGTCCAGTAGCAATACTGCAGACTTGGAG
TGGGAGAGTAGCCATTATGTCCAGAAACAAAATGGGGCTATGGATCCACATCCCAGAAGATGCCATTTGGTTTCCTCTTTATTGTCCTCATGCA
AGGTGCAAAACAAGCGAGTAGGTATTAAGAATCATTTCATCTTGTCTTCTCTTTGTGTGGACAGGAGTCTGAGGTCACATGCTCTAAGTCCCAC
AGTGATGTGGTAGCAGAAAGAAGAGGATGTGACACCAAGGATCCTGACTCCCCACTACATTATTCCTTCCAGTGAAAAATACCTCCCTGTGTAA
AAAGAGTTAGTTTTGTAGCTAAACTGTCTGTTTAAATACAAGCACCCCTTACTTGTATGCATATGGTAGGCAGCTCAGGTTTAAAAATGTCAGA
TCACCTCAGGCACTGCCTTTATCTCTCTTTGTCCCCAAATCCCTGAAATCTTTGGCACTGAAAGTATTAATGTCATCAAATTCTGAACCTATGA
AAACTTCATCTCTGTCTTTCTCTTGTCTGGCCTGTAACATGACAAGAACAGCTCACACCAAAGTTAGAAGATAATTTCATCAGTCATCACTTAT
CTCTTGACACTGCTTCTTTCTGTTAGCGTTAATATTTTGCTCCTCAGATCCTTTTTCTTTTTTTTTGGAGTCAGGGTCTCATTGACTGCTAAGC
TTGGGCGCGGTGGTGTGATTATAGCTCACTGCAGCCTCCCTGGGCCCAACGCGTCCTCCCACCTCAGCCTCTTGAATAGCTGGGACAATAGGCA
TGCACCACCATGCTTGGTTAATTAACTTTTTTGTTTTTAATAGAGATGGCGGTCTTGCTATGTTGCCCAGGGTGGTCTGGAACTTCTGGGCTCC
CACATTGGCATCCCATAGTGTTGGGGTTACAGGCATGAGCCACCATGGCCGGCCCTCTTTTAAAAAATACATAAATAATCTCAAAAGGAATACT
CTTCTAGATGCCAAGGAATTACGTAGCTTGTAGGATCTCACGAGCTACCTTTCTTAAAGGGTTACATTCTTATCCATTGTTTATCTTTAATAGT
AGATCTCTTGTATAAACAGAATATTATTAAAAGCAATTTGGGAGGGGGGCTTGATTTTAGAAAATAAGAGAATCGTGTGAAATGAAATTCCTCC
TAGTTTTCGACTCTGTGCATCTCTTGCCAATTTTAAACCTGGCATTCACACTGGAGTGACAAATTTGTGGAAAGCAAGGGAAGACAGAAAACTG
CTGTAAAATAGCAAGGGAAGTACTTTTCCAGCCATATTGGCAGTGCTATTCTGTACTGTCAGTGTGAGAAACATCTGAGAATAAGGATGCTTTT
GGCTTCTGCTTTCCTTTTACTTCCAAATCCTACCTGAATTGTAATTGAGAGAATGTAGGATTTTAGGAATATGCACTTGAATTACGCATCTAGT
TCTCAGATTAGGGGAGATTTTTCTGAAATTAATAAAATTTAAAAGATATGTTTGCTGCTTTCCTTGTGAGTGGTTTGCCAAAGCCCTCCCTTTG
TCTACACATCACTATATCATCCTGTCTGTGGGAAATGGACAACTAACATGGGTAGGCAGAGAAGATTGAACAGTTTGGAAATGAGGAAACTCAG
TACCACCACCATTCACATGCGAGTCAGTATGATATATTGAATAGCACACTAAGATAAAACTTAAGAGGCTGGGTTCTGTCATTTATAAGCTACG
TGTCGTGATCCAAGGTGCTTAACTTCTCTGGGTCTCATTTTCTGTTTTGGTCAAGGGTTGATAACAGTACCTGCTTTATCAATCTTTCAAGTTT
GTTTATGCACATGACAGCTCTTTGGGAACTGTAACATACTAAATAATTGAGATAATGATGGTGATGATGATAATTACCGGAAAGCCTAGTATAA
TATCATGCAGATAAATTGGAGCTCTTGAGTTTGGTAGTTGAATCTAATTCACTAGTTATTGATAGCATTGAATTTGGACCCCTGATATTTTCAA
TATTATATTTATCCCTATCATAGTACGCCATAATCATTGTTTTTAAGATTTCATGGTGGACACAGCATTTGAGCTAGCCATTCAAAGATGGTTA
AAATTTTGCTAACGGAAAGTAATGGTTAGAAAGAAAAACATAAGCAAAACATAGAGGCATTGTAGTATATGCTTTGTTCTGGGAGGAATCTAGT
TAGGTGGGTTACACAGGGTGGAATAGTAGAAAATGAGACCCAAAAAAGTGCCTTGAGGCAAAACTATTAAATGCCATTTCAAAAAGTTGGAACT
TGTTACTTACACTAACTAAAAATCGGGGGGAAATGTTGGGACTCGATTCTGAGCTGAGCAAGAAGCCACTGGAAATACTTCAGCAAAGTGGATA
TAAGACTTAGCTACAAATGACATGAAAAAGGGTCTAAGAAGGGTTCCTGTCTTGGATAACTGGGTGGCTGTTCACGCTATTAATAGAGACAAAG
AACTTAAGGGAGGAATGGGAGTTAGAATGCGTATCGGTTTTCCCATCTTTGGGCACATCCTTTTATCCTCTCTGGCCTGAAAACAAAGGATTAA
ATAATTTCTAGGAAATTACATTTACCTTGAAGTTTTGATACTTCTATAATATAAAACGCCGGAGTCCTTGTGATTTTGTTTAGAGATATATAAT
CGGCATTGTAGTGTGTAATGATGATGGACATTAAGGAACCCTTGTTTCTTAGTGCCTTTTGGAAACTGGCTCATTTCAGAAGCTGCGCTCTTTT
CCCAGAGGCAACTTTTGAAGTTACTTAAATATTTAATTTAACAAATATCATTTAAGATTTAACTGTCTACTATCCTTGAAAGGGTCATGAGTTT
CCCTCCTAAACCAAGACTTTGAAGCTCTCTGTGCTGTCTCACAGGAATCCCCATGATCCAACTTCATGTGACCTGCAGAGGTCTGCTGCCTTGA
GGAGTAGACAGGTAGCTGGGCTGTTACTGGCTAAGTCCTTTTCTCAGAATATGTGGAGGCTCCTTCTACCTTTAACAGTGCTTTTTTGCTTTGT
TTGGGAAGTAACAGAGTAGTCAAGTGCATGACCCTGGAGCCAGACTCCCTGAGTTTAAATCCTGTTTCTCTCTTTAGAGGTAGTTCCTTGGGTG
AGTTACTTAACTTGTCTGTCCTTCAGTTTCCACATCTGTGAAATGAAGATACCAGTAGTTACCTGAGTTTTGTTACCGATATCCGATGTGCTTA
GATGAGTGCTTGGCACTGGGTGCTACTCAAGTATCTGTTAAATACTTTTATGGGGGATAGAGGACAGATTTAAATGGTTTCCCATAGCCAACAT
TCTAGCTTTCCAGAATATCAGTATTTTGTTGTGGTAGCGGTGGTCTTTTTTCCTAAAGAAACAGTGCTTCGCCAGAAGGGAGACATTGTTCCCT
ACTGGCTCCCTACTTCCACCGTTTCTCCCACTCTTCTATATAAGTGCCTTAGAGAAACTCTGGTCACCCTTTTCTGTGGTCTGCTTAGCTCCAA
CAAGAATCATAGACCAAAGGTTTTGCTGTCATCACTTTAAAAATAGTGTAAGTTATTTTTTTCTTTCCTTTTTTTAAATTTTTTTTTTTTTGAG
ATGGAGCCTCAGTCTATCGCCAGGCTGGAGTGCAGTGGCGTGATCTCGGCTCACTGCAGCCTCTGTCTCCCTGGTTCAAGTGATTCTCCTGCCT
CAGCCTCCCCACTAGCTGCGATTACAGGCATGTGCCACCACGCCCAGCTAATTTTTGTATTTTTAGTAGAAATGGGGTTTCACTGTGTTGCCCA
GGCTGGTCTCGAACTCCTGACCTCAGGTGATCTGCCCGCCTCCGCCTCCTGAAGTGCTAGGATTACAGGCATGAGCCACCACGCCCAGCCAGAT
TATTTTTTCTTTAGTGGAATTCAGCCAATTGAAGCATAACACATGGCATGAACACTCTGGAAAGGTGGCTTTGGATCTTTCCATTTGTTCTCTT
TAGCGCTGACTTTTGCTTTCTAGTCCCTGCTAGTGTGTTGGAATCTTACCCCATACAGATGCAAACTATGAACCAAGAAGTCAGCATCTATGCC
TAGCCAATAATTGGTTGTTTTCTCGTTCAGAGTTCCTCATGCCCATGGGGTAAATTCATATTTCATCCATAAGTGTGACCATTGCAGAAGTTCT
AGGACTGCTACTGTCTGTATTTTTGTCCTTCAGCATATCCCAGACTAAACTTACTCTTAAAATATGTTTGTCCAACCTTTGGTTTCCTTCCTAT
GGTTGATATTAAGCCTTTCTTCTACTCTTAGAAGACAAAATGGGGAGACAAAAAAGGCAACCCTGAAGGTTTTTATCCTTTCAGGGTATCTAGC
ATTTTTCTAATTTAGCCCTACTGAAGTTTCTTCAGTAATTAATCATCTGTTTTTCAGCCTCTAACCTGGCTAATATTATAGCCTACAATTGTAC
TTTTAAAGCCCTTTTGTGACTTTCACATATTGTGTCTATTGTGTATGGAAAAGTAGCAGGATCAGTATGAAGATAATACAGTATCTCTTAAAAC
AGGCAGCCAGCAAATGAACTTTCTGCATTGGTCAGAATTTCCATCATTTCACTGTTAATGAGGAAAGTACAGTTCTTTAGCTACCATGAAAGTC
AAACATATCCTAAGCCTTTTGGAAAAAGACATACATGTTAGAAAATCTCAAATGGATGAGTCAGCCTGACTGACCCCACATTGACTCCATTTTA
TATGCTGGCCAAATCCTGTTTCTGACTTTCCTGGCACAGCCCTGGACATGCTTCTGTATCATAGGACTTGTTCCCCAGCGCCTTTGCTACTTCC
TTCAGGCACATTCCTAGGAAAGATTGGCAGTCGGGTTTGCTCTTTGCCAGCACTCCTGCCGGTTTGGGGGTTATGGATGCCAGGTTGGGCTCCA
GGCACTCTGCTCTCCATTTGTGGAGGCAGGCACCGTAACAGCACCTGACAAGTAGGGATGATCACATTGTATTCAGAAGCCTGGTGGAGCTCTA
TAAACCCAAATTTCTAACAGTCTCCAATGTAATGCCCTGTAATAGAAGCTGTCCTTAACCCTCAATCATCTGTATTCAGCTAGTATAAAAATGC
AAATCTGCTCTTATGCCTAAACAGTTAGGAGTAGAGGAGACTTGGCTTCCTTTGGAAAGTCAGGATGATAGCTTCATCCCATTCTGGTTTTTGT
GATTAATTGTGACCTACAAAGGGGTTTACTACTCTAGCAGGAACTTTGAATTTCCTATATACATCTCTTTCTGGTTAGCAGGCAGAGGAAATAT
CGTTGACTTTTGGCTTCCTGGCAAATGTCTCATTTGCCTTGTCATTTGTTCATTCCTrTTCCCTGATCTCTGTTTGGTGTGATAATGTACAGCA
AAGCTGAAAACCGCAGGGCTACATGTACACTTGTAGGTACCTATGTTGTGATTGCCAAAAGGCTCAGAAAGCCAGTTTTCTAGTGAAAATGGCT
AACATTCTAAGAAATGCTTTCACTGAGAAAGAGAACGGCTCAGCGGAAGGTGGAACTTAAAGGAAGATGGAGTGTTCCTGAATTCAGATTCGTG
AATTAGCCATTTATAGTTTCATGGGAAGACAATGAAAAAAAAAAAAAAGAAAGAAAGAAAAGAAAAGAAAAGAAACAAGCAACCCCAAAGGTTT
TTATCCTTTCAGGTATCCAAACATCTTTATTCTAGAAAGTTTCTCCTCGATGGTAAAATAAAGCTAGGACCTTATAGCAAGTCTCAGACTCACC
ATGGCTGTTTCTTAACACCAGTATACCTTAAGCAGTAGGTATCAATTTAGTGCAAATATAAGGGTATTGATATGTAGTGGAGGCTGCTCTGAAC
TTGGAGGTGGAAATACTAAGTTTAAATCCCAGCTTTTCTTTTAACATTGCAACTTTGAGAAGTCTTTTAACCATTGTCTCCTGTTTGTATCAGC
ATGAGGGGATAGATAATAAAACCTGCCTCACAGGAGTGTTCTGAGAATTGAGTGAAATAATGTATGTGAAAATACCAAGTACAATCCTTGCTTA
GAAAGTAGAATTTTGTTTTGCCATCCCCTCCCCCACTATAGTTGGCAGGGCAGGGGGAGGCAGTATATTCATCCATCAATATTATAGATGCAAT
TGTTCCCAGATGTTTTGCTTTTAGGCAAAACCTTGTATAGATGACTGTATACCCTCTTACAGTTGATGCTTAATAAAACAAAACTACCATGGTT
TTATAATGGAATGGTAAGCTCAAACATTTTGCTGGTAGTATAAAAACCAAGTGCCTGTGATTACCTATACATTAACTCCTGAAGAATCAATTAT
AATCTCAGCAACCTTGCTCTTTGACCATTCATTCTAAAGCTTGGCGAAGTTAATGAGAACAGATAATACGAGTGCTAATGCAATTCGAAGACTT
TTTTTTTTTTAAACAAAGTAAGGAAGGGATACATTTTTAAATAAAACATTGCATTTTGGTAAAAAACACAGATTATGAGAACACATTGAGTTAG
AGGAACATCATATTGATTCCAAGAACAAAAAGCATGGTGGAGAAATTTTGTAACCATGCAAATCCAGTGTGCTCTGTTCTCATGAGTTAAAAAG
AATTTTCCTCCTATAGAAACTTGTTATTTAAATGTGTGTCACATGTAAATAACAGTCTAATGAGAGCAATATAGAGGGAGAAATATGTAAGCAA
GGGAAAGTGGGCATTGTTTTGTTTTTTTTTTTCTCCATCTATTTCAATACTTGGGTCTTTCCTAACCTATAGTGTGTCCTGTTTCTCCCTGGCT
AGATTTCTTAAAGTTTCTGCCTATTCATCACTCAAGTACCTATCTCAAGTTGTAGCTACTTTTGTGTCCAGGGTGTAATAGCAGATGTTCTCCT
GATCTAGATTTTGTTGCTCTGCCTAACTGCATGCCATCATTTGTTTCTCCCTTTGTGATCTTCTACTGTACTCAAGTGTCCCTTTAGAACAAAC
TTCATGGGATGGACATAGCCTAATGAGCTCATTGCTGATGAAGTCTTTTTTTCCTGTGCATTGGTTAGTGCAGTAAGCAAGGCTCCTTAACTGC
CTGTCCCAGTGTACTGAAAAATAATAGTGTTCTCTCACCTTAAACTACAACTTCTGGTTTTTGCTTATTGCTTCTTTAGTCTTTGACCACATGC
ATGTTTTTACATAGTTGCAGTTATTTTATTATATTCCTTTTTCTGTCATAAACACTTTCCAAATGTGTTTGTGGTACTCAAATTATAGCTTAGC
AGTTAAATAATTTGATATATTACAGTTTCCCCTCTTGTTAGGTGTATCCAATTTTGGGGTTTGTTTGTTCGTTTTTCTTTTTTTCTGTTGTTGT
TGTTGTTGTTTAAGGGAAGCACCAAAATAAACCTCTTTTTAAAATTAATTAATTAATTTTTTTCAGGCAGAGTCTCGCTCTTTCGCCCAGGCTG
GAGTGCAGTGGCACTATCTCGGCTCACTGCAAGCTCCGCCTCCTGGGTTCATGCCATTCTCCTCCCTCAGCCTCCCGAGTAGCTGGGACTACAG
GCCCCTGCCACCACGCCCCGCTAATTTTTTGTATTTTTAGTAGAAACGGCGTTTCACTGTGTTAGCCGGCATGGTCTCAGTCTCCTGACCTCGT
GATCCGCCTCCCTCGGCCTTCCAAAGTGCTGGGATTACAGCCGTCAGCCACCGCGCCCAGCCCAAAATAAACATCTTTATATGTAATGTTATTT
CCCTAAGATAAATTTCCAGGAGCTTGATCCCAGGGTAAGAAGCTATGAACATTTTCATGGCTCTTGCCTTATAATGTCATATTTTGCTTTTTAA
CCTTTAACAAAGAACATTCCTATGCCCTTGCTTTCAGATGGGTCTTTTCTTATTGTGAGGAAAGGGCTAACGTAAGTCCCATCTAGAAGTGACT
AACTTGCCTAGTTAAAACTAGAAGGAAATATCCACTGTATTGGCCTCTTTACTCCATAAACCCTGGCTTGGCTACATGTGTGGTATGTTTCAAG
TCTGGCACAAAGCCACCAAACACATTTTTGGTGAGTTGGTTTTAACCTGCTCACATCAGATATGAATGCTGAAGTTGGAGCTTTCATTATTGTT
TTTGTGCTGGTAGAATGTTGCAGAAATACACAGGGCTGGCTGTGTATTCTTAGTCACTTTAAAAAAAATGTCCTCGTGTGTCTAGAATGATGGT
TTCTCTTCTTTGCAAAAATAAAAACATCAAACAAGATAAAGTCCGATGTAGCCAAGACCCTCTACTTGAACCTTCTGTCGGTACTGTTTGTTTA
AGTACTGTAAGTTTCCACCGTTCATGTTATCTTAGGATATCTTGTGAAACGAATCCTTGTGGTCCCTACTCTGGGCTAACGCTTTGTGACTTAA
CTTTTTACAGTGAACATAAAGATTCTGAAAAGAAACACAAAGAGAAGGAGAAGACCAAACACAAAGATGGAAGCTCAGAAAAGCATAAAGACAA
ACATAAAGACAGAGACAAGGAAAAACGAAAAGAGGAAAAGGTACAGAGTTTTCTAGTAGGGGAGGAAGGAACGTGGATGCACTTTTGTTTACCT
TTGAAAGCAGATATCTTAATTGCATAGTAAGATCCCTTGGTCTTGAAGTGAAAGGTTTCTTGTCAGGAGAATTTAGAGCAAACTGTAGTCTTAA
ACTATAAAAACTAAGCCTTTTACCACCATATGTTTCACAGTGGCAGATCTGTCCATATCATTACCTTTTTTACTTTATATTGCCAATGAATACA
TTGAGAATGCATTAGGGAAAATTAATTCTTTTTGGGAGAAGGCCTAATGCCTTGATGGTCTTCTGTTGATTAAAGGTTCTTCCCGAGTGAAAAT
TTAGTGATGCTGGTGTCTTTTGTGGCATTTGGTTCCAGCATAACCAGTCCAAGCCTTCTAAAAATGACTAGGCTCACCCACCTGAGAATGAATA
GTACTCTGTATAGTTTTAAAAAGAGATTGTTTTTATTTTAGCTTTGAAAAAGTAATTTTTGTACTTGGTAAATTCAGATACTATGAAATAAGGA
ATATGGTGAAGAAGACATCTCTTCACCCCTGACTCACTGTCTCCCATCCTTCTCAGAGGCAACCGCTATACTGATTATGTTTTGTATTCTTCCA
TAGATACTCTGTATATCTGTATGTGTGTGTGTATCCCTTTGTGTGTATATATGAAGATTTTTTTGAAAGATAAATTTTCTGACGAATCTAGAAA
GCAGGAAGTCAAAGGGGAGGGGGTCATGAGTATACTTTGCCTAAGTAATAGAAGACAGGGCATAGACTACTTTTTTGTTTGTTTGTTTTTTAAA
TAAAGATGGGGGTCTCACTGTGTTGGCGGGGCTAGTCTCGAACTCCTGGCCTCAAGCAGTCCTCCAACCTCATCTTCCCAAAGTGTTGGGATTA
CAGGCATGAGCCATCACATCTGGCCCAGTTTATATGTTTTGTTTGTTTGGTTTTTGCTTTTGTTTCCTCTCTGCACTCCCAATGGCAAATTCTT
GAGTAGTGCAATGTATTTATTGGGGAAAAGAGACCTGCCACCACTTAAAAGTAAAAAGCTGCCATTTTTAAGGGAAACCTTTCTCAGTGAGTTG
GACAGTTTCACCCAGAAGAATTGTTAAAAACGAGTTTTGGACACATTTCAGGACCTTTAGTTCATCTGTTCAGTTTTGGTAACATAAGAGCCAG
CTTGTCATCATGATGTCCCAGGAACTGATGCTACATATTCTCAAAAAGAGGTTTCTTCAAATTTAGTCCTTTCAAGGTACTAGTTACTGTTGTT
TTACTTTTCAGGTTCGAGCCTCTGGGGATGCAAAAATAAAGAAGGAGAAGGAAAATGGCTTCTCTAGGTAAGACTTTGCTGCTGCGTGGGCTTC
CCTTTCTCTGGGTGGACAGCAGGCCAGCTGCCTGTGTTGTAGTGTTGTCTGAGTTAACCCAAAACCCACTGACCTGGCCATCTTGATGGTTCCC
AGAAGCTCAGCAGTGAGAAGACTCGGTCTAAGCCAACCTGAGCCTTTCTACAGTGCCATATAGTGAGACTGACCAGCACATTTTCCAGAAGGTT
ATTTCGAATAGAGAAGGTTGACAGGAGAGATTTTTAAAAATTGAGATTTGACTTGCATATCACAAAATTTGTATTTTAATGGTATACAGTGTAC
CATTTTTTTTTTTTTTTTTTTTTAGTATATTCACAAGGTATTGCAGCCTCTTCACTAATTCCAGAACATTTTCATTTCTCTAAAAAGAAACTTC
ATATTCAGTAGCGATTATGGAGTTTTCTGAAAAATCACTTAGTCTGATTTCATCATTAGTAATATTGGGAGGCTTATATATAAAAGATCATTTG
ACCTACATGTTAGGGATGAGTGTAGATTTGGGTAGAATTATGTTATCTCTTTTCTAGAAGGAGAGGAAAATGCGCAAAATCTAGAGGTTACTTC
CTATACTGTTTTTACCTTTATAATTTTGTTTTCCTCAGCCTCAATTTCCTAAAATAAGCCCAGAGGTCCCCTCTAGTTTCGAAACAACTAGATG
TTTATTGTTACATATTCTCACTTCACTCAATGACAGAAAGGATTTATTAGAAATGGTTGTAAGTGTTTGCATTATTGACTGGGAGAAAACACTT
TGAGAGTTTTGCTTCCTTGAATCTTTGAACTTTCAGTTTCATTTGTTAAAATTTTTGACAATTGTGCCTGGTACTCTGGGCTCCTTTAGACAAG
GAGAAAAGCAGGTGCCCTCTTCAGGCATGTTTCATAATTGTTCTAGGAATGCAGAATAATACAATTCAGGAAGCATTAGAGCTGCAAGCTGCCC
TAGGAATTTTGATTTCTGAGATAAAGTGACTGAGGAGGCACTGCTGGGCTAATCTCTGCCAAGAGACTGCCTTGCATTTTTATTAAACTGATAT
GAATAAATTTTTTGGACTTGGTGCATAGTCATGAATTCATTTTCAGACTTTTTGGGTTAGAAGATTAGGAACACAGCCTTCTTTGAGGCAGTGG
TCTCTATGTTCACTTTGCTGGACTCCTTGCTGGCTTGTCTATATGTCTTTGTACAGAATCCAGATGCTTCACTGGAATACAGTTTTCAGGTAAA
TTGTTTTAGGACTTCTTCCTTCAGACCTAAGTAACCCTTCCCACAGTTTTTGTCTTCAGTGTGACAAACTTAGGATCTAGGATTTACTTAACTA
GTTGGGTAAATGATAGGCTTTCTTTCCTTCTGGACCCTAGGGTCTGTGTCAGTATTCAGGCAGGAGGGGGAACAGCTGTAGAAGCTGGCATTTG
GTTAGGGTGCTAAAATAAGTTCTTTAAACATTCAAATTCTATCACAACCAAGGGGACCCACTATGCTTTTTTTCCTCCGAGGTACTCTTGAAAC
CCTGTGAATATACTTTGCAGTGGGGTCGGGATTCTTAATCCTTGGATCCCTCCACAGGGGGCAGCTGCATGTAAGGAGGCCATTTCTTGTACTA
AGTTAAGGCAGTGAGGTTCTGAAGAGATGTGCCAGGCCAGGGAGCATCCCATGGCTGCAGTGATTGCTGGGCTCTATGGTGTTTTTTACTTGTT
CCTTCTCTGTTTTGGTTCAAGATGTTTGTCTCAAAGGATTGTCTTTTTATATTTATATTTTGAAGGTAAGATCTTAACAAATAGTAGTGAGACA
CTCTTCTGTATATAAAGTAAACCTAAGTTAGGACGTTGAACAATGAATAGATTTGGCATAGGATACCTTCTGTTTATTCTGGTTTAACACGTGC
CCTACTTTTGTTGTAATGTTGTCAGCTTGGTTATTTTTCCATGTAGCTAGATATACATGTACGTTATTGCCACATTTTTAGAACTTTAAGGTAC
TAAGTTGGGGAAATCAATGTTTATTCCTTTCCTTGTAAAAGCTGTACTTTAGCTTTTAGAGTACTGGAACAATCAGTTCAGATTGTGGGGTCAA
ATATATGGTAGGTTTCCATGTAAGGCAAGAAAACACGTTAGGTTTATTTCTGGAGTGGTTCGTGCCATGCTGGCAAAGATAGCTAAGAAATAGT
GAGAAAGAATTCTCACTTAGAATAAAGAGTCTTGATCCCAAATCCTGATATTGCCCATTCACCTGTACAATGACGACAAATACTATCTACTTCA
CAGGATTGAAGTGAGAAAAAGTGCTCACAGAACATCTTCATGATATGTACGTGGTTATCCTTATTTCTGTTAGCTTCTTTTCAACGAAATGACA
TATTCCTTCTTTGTATTAATAGAATACAGATGTTCTAGCACTCTGACCAGCAATTTTTTTTCTCTTTAGTCCACCACAAATTAAAGATGAACCT
GAACATGATGGCTATTTTCTTCCTCCTAAAGAGGATATAAAGCCATTAAAGAGACCTCCAGATGAGGATGAGTGACTATTTTCTTAAAACTTTG
ACTTTTGAAAACAAAAAGGAGGAGTTTAAAGAATAAATGTGATGTGTTTCTTTATAATACATATAGAAACTGCATTAATTGGCTTTTACTCATT
TGGAATTTGTGATTAATGGACTGATTTCTCTGAACTATGAGAAGTAGAGTTTGCTAAACAACTAGTATACCCAAGGCTTACATGAAGATTATAT
AAATTTTTATTACTGAAAAGGCAATAGATATTTATTGTAGAAATTTCAAATAATACAGAATTCATGAAGAATAAATTATTTAAGTTACTTAAAA
TTTCTTATTGCCTACCACAGATAACTTAAAGCAGTTTCTCTTAGACCTATTCCTGTCAGACATTCTAAGTGAAGTTTCACTGTGTAAAAATAAT
AAAACTGCTCATAAAACGGTCGAGGCTTACATGTATCTCTTTCCCCAGATTCAATGAGATTAAATTATATTCATTATTTTCACTCTTATATAGC
TTACTATGCTATTGTTATAGTAGAAATTGGATGGAAAGGGAGAAGGGAAATACTTAGTGAACTCATTTGTATTCATTCAATATAGAATTTCTTT
CCTCCACATTCCAGTGAGTTACTGCTATGTGGTAGCTAGTGTGCTGTGTGTTTGCTTCCCAAACTTTCATCTTTTATTTTTATTTATTTTATTT
TATTTTTTTTCCCAGACTTTCATCTGATAATGATATTTATTTCTGCATATATCCCCCCACCCTATTTTGCTTCCACGCCGGTGTAAGTGGTTTG
TTTTGTTCTATATAGGGCTATAACTATTACTCTTTGGTCTGACCTTCATTATTTTCTCTATTTCTGTTAGTCTTGACCGTAGAATGCCCAGCCA
AGAATAACAGTGATTACTCTTGCCATGGAGGCATCCAAGAGTTTGTAGGTCTCCTATGAGTGAGAACTCCTGAATCATAATTATGTTAACTGTG
TATTCATGTTCCCCTTTCTAGTGCTGATTATAAACCTAAGAAAATTAAAACAGAAGATACCAAGAAGGAGAAGAAAAGAAAACTAGAAGAAGAA
GAGGTTACTAAAGAGACTTAGGTCCTTTGGGGCTTGAGTTTCGAAGTGGGAGTTTTCCAGTAAGCAACTTCTTAAGACAAATGAGTTTTAGATA
TTTATTGGCTTGTTATAACATTAGGGAAAACAAATTTAATAAGTGGTGGCTGTGGCACTGGTAGTTTTAAGATCTCTGTGAATCCCCACAGTGT
CTTAAGTTAACCACAACCACCAGTGATTCTGCTCTCAGCCTTCCTGGGTGTCTGTCTACCCACAGCTAGGCTGCCAACACATGTTCTTCCAAAA
ACTATGTCATCTTCATATATACAGAGGCAGTGTTAACAAGAAACCACATTTTGGCTTATAACCCTGAAGAAATTTCCCTAAGAATTTTTTGCTG
ATCATTCACTTTAGGTAACCATTCCTATCTAAAGTTCTTTAATGGGTACCCCTTTGACATATAATTGACACCCAAACTCTTTACTGCAGCTCCT
CCCAATCTGGCCCCTGCATCTTGTGTCTCTCTTCATCTTGTGCCTCTTCTCTAGCTTACTTGTACCAGTCACACTAGCCTCCTTTGTTTCTTTT
CCACACCAGATTCTTTCAAACTTCCGAGCTTTACGTAGCACCTGCTGTTCCTCTATCTGGAACACACATGCTCCCTTCTTTATCCTTTTGGCCT
ATAACCTTCCTCAAAAAACTCAGTTCCGTTTAAATGCTTTCCTAAATGTTCTTGTTCATGCTTGTGGTAGATTGAAAATAGAATCATATGCTTC
CTCCTTTTGACACTTTTGAGTTCTTGTACCAAAAAATTGTTAGCAGGTAATTCAAGAAAAGATGTCAGAAATTCACAGGGGTCTTAATGATGCC
CTCCCCTAAGACAAGAAGGGGTTGGGTGAGTTCTTAGCTCTTATGCTACATTTGAGGTTAGCCACTGTCATGGGCAAAATGGGATCACAAATGT
AAAGTGGACAGTTTGAAGTACCAGCAGTAAAGAGAATGATAGTGAAGGGGCAGGGAGTCTTAAGAGGATAATCTATCATAACAGAATGATGTTA
ATAATCACAATTAAATGTAATAGGTGCTTACCATGTGCCAGGCACTCTTCTATATATGTATCATTTCATTTAATCCTTACAACCTGAATAGGTT
GTTACATCCCTATTATCATCTCCATTTTGCAGATCCACAAATACAGTATAGAAATATTTAATCATTTGCCTGAGGTCACATACCTACTAACGTG
GAAAACCCAGCATTTGATCCCATGCAGTCTGACTTCAGTCCCAGCACACCAGCTACTATATTATCCTACCTCCCCTGGGACTTTGCTGATGCTC
TAATTCTCCAAGGAGGGAGAAGAAAGGTCTTTAATGAAATCATATCAAGACCATTAGTGAGTGAGTTGAGCCATAGAGAGATGATCAGGTCCTG
AATTTAGAAGCTTGCCGTTTTTTTCACAACTAGTCTATTCTTGGCCGAAGTTCAAATTAATAAGCACTAATTCAAGGAATTGAGAGTGAAATGT
TAAGTAGTGATTATCGTAGCCAATCACTCCACTTGCATATACCAAATCAGTACAGACTAGTCAGTAAAGGAATATAAAACTTGAGTTCTCCAAG
TGTTTTTTTTTTTATGTTTATATTGCATTTATGCAAAAATAATACTCTGAGTTTGTTAAACCATTGGGAAAAAAGAACAGTTGACTTCATTTGT
TATTATTCTATTTAGCAGCCCTACCACATAGGGGGAAAAATGCTGGCTGAAAGACTGAATTAATACAATCTTACTGTCGCACGGACCCCAGATG
GCAGAATCTGTCATTAAACCTCACTCGCCAACTATAGTTTTTTTGTTTTTTCTTTTTTTCTCTTGTTTTTGAGAATTGTTCTGAGGTCTCTTAG
TGACTGACACCCCAATTTGAGGCTTGAAAACATACAATGTAGCCAGTAGTTTCCTGATGGGACCAGCTGGATGCCTGCTCAGAAGCTGTTTAGA
GTATCTTCACTGAAAAACATTTCCCTTTCCTGTGGTGTGTTTCACCCTAAATAGTAAACATTATCTGAATTAATGTCATCCTGTAGTACCTTCT
CCCAAACATACCCACATATTTATATTCTCCGTGCCTGTTTTAAAATATGGATGGTACTGTAAGCTTTCCTCTTTTTTCTATTCCTATCTTGATT
GCCATCCTATTATGAGGATCTAAAATGTTTATTCCAGTTATTCCCATAAGTCACATTCTGTTATTTTTCTCATAAAGTTAGGCTCTTATCATAG
TTAATAACAGCTATATGACCTTGATCAGTGACAAAATATGTTTCAAAGTCCTTGATTGTAAACTGGAAGTGGTTAAATGAACCCATCCATACAC
TTTCCAGCTCTGCCACTCTTTAATTCATTTTAAGATGGTTCAAAACCACCTTTCATTGCTATATAAAACTTGTTGAATAAAGACTGAATAAGTA
GTTAAATTATGTTGAATAGGCAGGACAAAGGAAAATATTCTTCAAAAGAGTTCAGATTCTGAGTCCGATCTTCACTTGTTGAATATTACATTTT
TGTTTGGGTTTTGTGTGTATGTTTTGAGATTCATCTCCTGTATTGGTGAATTGTGCCTGTTTAGGTTTGATGCCCGTTTATTGTGTCACTGTGA
TCAGCTCATTTACATTCAGAGTTCAAAGAAGAGCCATAAAGAAATACCACCATAGGAATTGCTGTCATTTTAGAACCTATCAAATACTTGCTTA
CTCCATCATGACTTTGTGTATACAAGCAGCAGCGATACTACTATACTCCACTAAATCAACTGGGAATTTTCTTTCATCCTGAATACTAAATATC
TAATGCAAAGCCCCGTCTAGCCCTTATTTGATTGTACTGGAAGAGGTTTAAAGATGAGTAGGATTAAACATAAGTGAGGAAAATACACTCGGAT
TACTCTCTAGAGCAGTACTTTTCCAAACTCCTTTCAGGTTAAAAAAAAAAAAGTTTCCCAGTCTCTTCCCCTGCAGAGTGTTTTTTAACTACTT
TCTCAAGTAGTTGTTTGTCAGGAAATTTTAGCAAATACTGCTGTAGAACAGAGCACCAGTACATTGTTATTCATCTGTCAAATGAGACGAGTAC
TAAGATCTTCTTTAGTTCTAATACTCTATGATTACAATTTTTCTTCCTCATGGCTCCCAAAAACTGCCTCCAGAAGTGTGATCAGTCTTTATTT
AAGTGCTTTCTCACCATGTTTCTTTGTAGGATGGTAAATTGAAAAAACCCAAGAATAAAGATAAAGATAAAAAAGTTCCTGAGCCAGATAACAA
GAAAAAGAAGCCGAACAAAGAAGAGGAACAGAAGTGGAAATGGTAACATCTCAGCACTGGGTTAAAATGCCACCTTTTTTATTGCATATCCTTA
CGAAGCAAGAGTATTGAGTTATTAAAATTAATATCCTGATATTTGGGGGGAAATACTTTAAACAATTTCTCTAGAGTAACTTTCTGAAGTAAGT
TTTCCAACTTCTAGTGAAATCATTAACTGGTTCTAAATCTATTGGATCTCAAACTGGTTTCCACCACTGTGAACAGAATGGACTGTAGAAGCAG
ACCTATGTATAGGTGGGAATTTAGCATACGAAGAGAGTACAGATGCATTTAAAACCATACGGAAAGGACAGATTATTATGTAAGTCGTGTTGGG
AAAACTGCCTGTTCAACAACAGAAGAAACCTCAACAAGAAAACGTCGGTGAATATTTTTATAATTGTGCAGTAGTGAAGATCCTTTGAAGCAAG
ACATAACCAGAGCCATAAGGAAAGGTGTTTTACATTTGATACATCAAAGTTCAATTTATGGCAGGTGGACACCTTCATGCCATTTAAAAAAAAA
AAAAAAACTCAAGGCAAAATATTTGCAATACAAAGGGCTGATATTCCTAATATGAAAAAAAGCTCTTTTAAAACAAATATGAAAGGAATGATCT
AATCAGAATGTGAGGAACAGTCAGTTTAGTAAAATAGTTAATAAGCATCTAAAAATGTGATCAACTTCATAAGTAATCAAAGATGCAAAAAAAA
TGATAAATCTTTTTGTTTAATGCCTCTCAGATTGGGAAAGATTAATAAGTGAAAATATCTAGAGTTGCAAATGTAAGAAAACAGGCATTCGCCT
TCCCTATAGCAGTGAAAATTCAGTCTTTATGAAGGACAGTTTAGTCATAGCTGGTTGCTCTTGAGAAGTGTATTTAGGTGGAGAACTTTTCTAC
TTTTGCTGTTTAGAATCTTGAAATAAACATGTTTTTAAAAAATACTTATTTCTGTTAACATGTTCTATTTAACTACTATACCAGCAGTACATGA
TTTTGTGTTTATGATGAAAAAACTCAAATGATTGACAGATTTAATAGTTAGAATAAAAATCAAAGTCACCTTTACCTGTCTTCTCCCATTCTCA
TTTTCCTTTCCAGCTTTCCAGCTTTGAGGTAATCACTGTTCATAATTTGATGTATAGCCTTCCAAACCTGTTTATGTCCCTTTATGGCTTTTGT
AATTTAGAACTTTGATGTCCACAGCACCTCTGAGGAAAGGGAGAAAGAGCACTGACCAGGAACGTGGCAGAGGGAAGGAGAGCCACAGTGGCAG
AAATGTGGCCACACGGTGACAGCTATGTGATTCGCATGTTGCTATGGCATCATGGGATTAAATGGGAAGTATAGAAAAGGAATATCACAGAGCA
GAGCAACCCTGCCTCTTTCTAGAGGTCAGAGTCAGAAAGTAAAAGGCCAGGCACAGTGGCTCGTATCTGTAATCCCAGCACTTTGGGAGGCCGA
GGCTGGTGGATCACCTGAGGTCAGGAGTTCGAGACCAACCTGGCCAACATGGCGAAACCTCATCTCTGCTAAAATTACAAAAATTAGCCGGGCG
TGGTGGTGCGCACCTGTAGTCCCAGCTACTTGGGAAGTTGAGGCAGGAGAATTGCTTGAACCTGGGAGGCGGAGGTTGCAGTGAGCTGAGATCA
CGCCACCGCACTCCAGCCTGGGCGACAGAGCGAGACTCTGTCTCAAAAAAAAAAAAAAGAAAAAAAACCCCACATGGGTTTATTTTCCTCATTT
TTATTTCACTTTTCTTAAGAACTAATACATTTTCAGTCATCTTGACCTTTAAGAAAATGATTTTTAGAAATAAAGTGATTGTCTAAATTAGAGG
TTATTATTGGGAGTTAAGAGAATGGTAGGTTAGTAATTCATCAGTCAGGGTTCTGTGGTAGTTACTCAATAAATGCTTGTTAAATGAACAAATA
CATTTCCTTATCAGGACCTCCCTGCTGTCTCCCCTTTACTTCGGAGCTTTGGCTCTTTTTGGCATCCAGGGAAGTGCGCTGGGTCCAGCCTTGT
ATGTGTAGAATTAGGTGCCCTTCAGGGGTTTAGGAGCCTAATTTTGCTTTTGTCGTTGAAATCCTTATCAGTGTTGCCACACATTCACTCTGAC
AGACCATGACTTTTGGTTTTTATTCTTATTTTGGGTTAAAGGGGAACTGGCTAGTCTTTAACTAAAAGTTGTTTTTTGAGGAATGAGCAGACTT
TCCTACAGCTTCTAACGCATGCATTTCTCAGGTGTGATGGTTAAACCTTGCACATTCTTTTCAAGCACAGTGCTTGAATGGCACACCGAGTTTT
TGGTGTTGAAAATATGAATGAAGAGCCTCTTAACTGATAGCTAGAGGCTGTGTATCATACTCTGAAGTCAGTTATCCAGTCCTCAGTGACTGCC
ACTGATGACCTAGTCGGGGAGTTAAATGGCAGATACCCTTATTTTTACTATTCCTTATGCTATCCTACTAAAAGAAGTACACACTTTACAAGCT
TGACAAATTTGCAGATCTTTTTCTTCCCTCGTAAGTCCGCAGACCTGTTTGTCTTTACCAGAAAAAACCACTTACTCTGATCTTTATCTCCCTC
CTTTGGTAATTGTTCAGTTGGAAAAGGTCCAGGTCCCTCAGGGTTTCTTTGCTATATCACGTTATCTCCATAGAAACATTGTTATAAGTGGTGG
CAGTGTGCTTGGGTTCATACATGAAATCCTCTTTATCCCAGATGTCCTGATTTTTAACTGTTGGCCATTGTAGCTGAACAGGGTTTCAGCACTG
TTGGGTTAATTAAGTACACTTTTGTGTCAGGGCTGACCTGGCAATATAAGTTGCCAGTTAATTCTCAACACATGATTCTTCATAAAGAATTACC
TGGCGAGTTTATTGCAGGTGTTAGGTGTGACTTTAAATGGAGTTTTCAATCTCTTAGCAAAGGTAAAATGCTGTGATGAGTCAGGACTATAATG
TTTTAAGGAATTAGTGTTGCAAGACCAAGACTCATAAATATATGGTCAATGATAGTGGTAAGAAATTTATGGAATATGGATTATTGACATTTTG
CTCAAACCAGAAAAACTTCCCTTAATTTCAAGGATTAGCATTCAGAAGCTACAGCATCTGACCTTTATTTCTAAATTTAAAAAAATTAAATATG
AGTTTTATAGCATACTGTGAAGTGCTTGTTAACTGCAAGGGAACTTGATATCAAACAGCACATGGAGTTTACTTTCCTGTCTTTATATTTCTAG
CACTTTTCCACCTTTCCCCCTTCAAGCAAATTTTATTATTAAATTGGTACTTGATTATTCAAGTCAAGCTGCCAAAGGGAAGCCATTTCGATGT
CTAAGTACATGTTTTTGTTTGTTTATTTGTTTTTAAATTGCGGGGGGCGGATATATGCACTCATGGGGAGGCTAAAAGGAGAGAACTGTTTGCT
TTTATTTGTATAATAATAGCTGTCAGCCCAGTCACATGAGCTTACTGAAACAGATATTCTGTCTTTCTGTTTAAACTGAAGTTTAGTGTTGTGA
TTTGCTGAATCTCTTAATTTGCTTAAATGGTAAAGAAGTTGCTGTGGGTCTTCAGGATACACATGTTGAAATAGGAGTCGTAAAAACAGTTTGG
AGTCTTGATTTAAAAACACTGTAGGGCCGGGCGTGGTGGCTCACGCCTGTAATCCCAGCACTTTGGAAGGCCGAAGCGGGCAGATCACGAGGTC
AGTAGATCGAGACCATCCTGGCTAACATGGTGAAACCCTGTCTCTGCTAAAAATACAAAAACAAAATTAGCTGGGCGTGGTGGCGGGCACCTGT
CGTCCCCAGGTACTCAGGAGGCTGAGGCGCGAGAATGGTGTGAACCCTGGAGGTGGAGCTTGCAGTGAGCGGAGATCACGCGACTGCACTCCAG
CCTGGGCGACAGAGCGAGACTCTGTCTCAAAAAATAAATAAATAAATAAAAACACTGTAGTCGATGAGAAGAATGGTGCCAAAGTCCCAGGATA
AGGGAAAGGGTGGCGTTCGGAATCTCCTCACGGTTACTCTGTGACTGCTGCAGACAGGCTCCTTCCACATGCTCTCATACACCTACATATATAT
ATATTTTCTCTATTTGGAGAGTAATACACTGTAGGATTGGGTGGTTTCCTGCATTGAGATCCTTCTATTAATATATCAATGACTCTGCCAATTT
CATACCTGAAAAAGTGGTAGGTTAGTTATAGAAGATCTTTAATATTCCTTTGAGGTCTAAGATTCTGTTAAATATTTTTGTTTAAATTGTGTAA
AATACATATGACATAACATTTATCATCTTAACCATTTTTAAGTGTACAATTCGGTGGCATTAAGTACATTCATATTGTTGTGCACCATCACCAT
CTCCAGAACTCTACATCTTGCAAAACTGAAACTCTGTAGTTATTAACAATTCCCCACTTCTCTGTTGCCCCAGTTCTTTTTTTTTTTTTTTTTT
TTTTGAGACAGAGTCTCGCTCTGTCGCCCAGGTTGGAGTGCAGTGGTGTGATCTCAGTTCACTGCAACCTTCGCCTCCTGGGTTCAAGCAATTC
TCCTGCCTCAGCCTCCCAAGTAGCTGGGATTACAGGCTCCCACCACCATTCCCGGCTAATTTTTTATATTTTTGGTAGAGACGGGGTTTCGCCA
TGTTGGCCAGGCTGGTCTCAAACTCCAGACCTCAGATGATCTGCCCCCCTTGGCCTCCCAAAGTGCTGGGATTACAGGCGTGAGCCACCGTGCC
CAGCCTATTCCCCCAGTTCTTGGTAAGCACCATTCTACTTTCTGTCTCTATGAATTTGACTACTTTAGGTACCTTGTATTAATAGTCATACAGT
ATTTGTCCTTTGTGACTGACTCATTTCACTTAACAGAATGTCAACGCTCGTCCATATTGTAGCATGTTTCAGAATTTTCTGACTTTTAAAGGCT
AAATAATATTCCATTCTTTGTCCTGCATTTTGTTTATTCATTCATCTTTTGATGGACATGGGTTATTTCTGCCTTTGGCTGTTGCAGATAGTGC
TGCTGTGAAACATTCGTGTACAAGTATTTGTTTGAATATTGAGTATATTCCTGGGAATGGAATTCCTGGGTCATGTGGCATTTCTGTGCTTAAC
TTTTTGAGGAACTGCCATACTATCTTTTCCACATTGGCTGCACCTTTTTACGTTCCTACCAGGACCACACGAGGGTGCTAGCTTCCCTACACCT
TCACCAACACTTGTTATTTTTTGTTTTATTGCCATCCTTATGAGTATGAATGGTATCTCATTGTCGTTTTGATTGGTATTTTCCTAATGATTAT
TGATGTTGCATATTTTTGCACGTGCTTATTGGCCACTTGTATATCTTCTTTAGAAAAATGACCATTCAAGTTCTTTGCCCCACCCCCACGTGTT
TTTTTTTGTTTTTCAGATGGAGTCTTGCTCTGTCGCCCAGGCTGGAGTGCAGTGCCCCAATCTTGGCTCACTGCAACATCTGCCTCCCAGGTTC
AAGTGATTCTCATGCCTCAGCCTCCTGAGTAGCTGAGATTACAGGCGTGCACCACCACGCCTGGCTAATTTTTTGAATTTTTAATAGATACAGA
GTTTTGCCATGTTGGCCAGGCTGGTCTCGAACTCCTGACCTCAAGTGATCCCTCCGCCCGCTTTGGCCTCCCAAAGTATTGGGATTACAGGCGT
CAGCCACTGCGCCCAGCCCCTATTTTTAATTTTATCTTTTTTTTCCCCTCCACCTTAAGACTCAGACTTTGCCCATTTTTTTAATTGGGTTGTT
TATTGACATGTAGGAGCTGTTTATATATTTTGTATGTTAACCCTTTATCAGATACATGATTTACAAATATTTTCTCCTATTCTCTGAGTTGTCT
TTCACTCTCTTGAAGTGTCCTTTGATGCACAGAAGTTTTTAAGTTCAGTGAAGTTCAGTTTATTTATTTATTGAGACAGAGTGTCTCTCTGTTG
CCCAGGCTGGAGTGCAGTCACGTGATCTCGGCTCACTGCAACCTTCACCTCCCAGGTTCAAACGATTCTTGTGTCTCAGTCTCCTGAGTAGCTG
GGATTACAGGCGTATGCCCCCATGCCTGGATAATTTTTGTATTTTTAGTAGAGACGGGGGGGTCTCGCCATGTTGGCCAGGCTGGTCTCGAACT
CTTGTCCTCAAGTGATCCGCCCACCCCAGCCTCCCAAAGTGCGGAGATTACAGGTGTGAGGTACTCTGCCCAGCTGCAATTCATTTATTCTTTT
TGTTACCTGTGTTTTACGTGTCATATCCAATAAATCACTGTCAAATCCAATATTGTGAAGCTTTTCCCCTATGTTGTCTTCTAAGAGTTTTATA
TTTTTGCTCTTATATTTAGGTCTTTGATCCATTTTGAATTAATTTTTGTGTATAATGTAAAGACCCAGTTTGATTATTTTGCCAACACTATTGT
TGAAAAAACTGTTCTTTCTCCATTGAATGGTCTTAAGCATCTTGTTGTAAATCATTTGACCATATATGTTGACTTTGGTTTTATAGTAATACCA
TTGTTACAATATGGTTTGATACATGTAATTTTTATTTGATGTTTCTGAACTTTGTTTAAAATATTGGACTTGTTCCATGGCTGAATGATTGATA
ATAAAATAATAAATAAAATATTGTACTTGGAAAGTAAATATGAGGGTAGTAAGTTAGTTATCTATTCGAGTAAAAGAAACTTGAGGCATAGCCA
GTTGCAATTTGTGAGCCTGAGTTGGATCCTGGTCTATAAAATAAATTTAGATAAAATAGGGAAGTTTTTAATATGGACTGGGAATTAGAATTAT
ACTAGGAGATTATTTTGTTACATGTGATAATAGTTTTGTGGTTATGTGGAAGAATATTATTTTTATAGAGATACTTCCTGAAATATTTAGTGGT
GAAGTATCAAATCTGCAACCAACTTTGAAAATGGTTCGGCCAAAATAGGAAATGTAGCAAATTATTAACCTTTTTTTTTTTTTTTTTTTTTTGA
GATGGAGTCTCACTCTGTTGCCCAGGCTGGAGTGCAGTGGCACAATCTTGGCTCACTGCAACCTCTCCCTCCTGGGTTCAAGCAATTCTCGTGC
CTCAGCCTCCTGAGCAGCTGGGACTACAGGTGCGCGCCACCATGCCCAGCTAATTTTTGTATTTTTAGTACAGACGGAGTTTCACCACATTGCC
CAGGCTCCTGACCTGGATCACGACCTCCTGACCTCGTGATCTGCCCGCCTCGGCCTCCCAAAGTGCTGGGATTACAGGCGTATATGGTGTTTAT
TGTATTACTCATTTTTTTCTTATGTTCGACCATTTTAAAAATACATTTTCAAAAAGTTGTTCCCACTGAGCTTTAGATTCACTTATCAGTGTTT
GCTAGATAGTTCCAGGTAATGCGTAAGTACCTTAAACTCAACATGCCCCAGTTAAGCTATCATTTCCTAGTCGTCTTCCTTTATGTCCTTTCTC
ATAGGGTTGTTTTCTCCTCTACCTTCCATCTGACGTCACCACTCTGAGGAGGCCTTTTCCTTACAAACAATGTAAACAATCCCTCTGTCATGTA
TGCCATTGTGGTAAAACAACTGTTTACATTTTCAAGTCCCTCACTTGTTACTGAGCTCCTTCATTGTTGATCTCTTCTGTCCAGTATTCTTAAA
CTGAGCTGTTGAAATGTATTTTCCTTTATTCACCACAGTATTTCATCTTACTTGTGAGCGTTGGCTTTTTCAAAATGAGAGACACTGGTTCTTT
TGATCCAGGCCTTGAATGTGAGGCCCAGAAGTCATTCCAGAGCACTAATCAGTTGACCGCATAATTATTTCGCATTTAATCACTGATGATCCCC
ATGTTAGACAAGGCGATCACTAAATGAGGCTGTGCTTTGTCTTTTAAAGGTGGGAAGAAGAGCGCTATCCTGAAGGCATCAAGTGGAAATTCCT
AGAACATAAAGGTCCAGTATTTGCCCCACCATATGAGCCTCTTCCAGAGAATGTCAAGTTTTATTATGATGGTGAGTTCTTTCAAGGTTCTTGA
TTCTTGGCCAGGAAAAGAAATCTGCTTCTATTTAGGGATAGAAAACAAGGAAGGATCCTATGTAATAGATAATCCTTTTTATTTCATTTTGTTT
TATTGCCATGCAATTTTGAGGAAGGGGCATCAGGTGTTAACTCTTAAAGGCTCATTTGCTGCTGAAAAAGTGCCATGGAAAAGGGGCTATTCAT
GTCTTCCCTACATAGTCCAAAAAAGGTTTGTCAACATGGGTAACAGTGTGTGGTCCACAAGCTGAAGGTTTTGATCTGAACTTCATTTCTAGGG
AGCAACTCTTCGCAAGAGTTATTAGAAAAGCCTCACTTGAATGGTAGTATTTTATGTTAGCAATATAACAATGCAATCGGACAAGCTGCTCATC
ACTAGAAACAGTATTAGTATATGCTCGAGGATTAATAGTCTGCCATCCATCTCTAGATAGGGCTGGTAGGCATCTGTCACCTATTCTGTGTAGC
ATAACACTATGCCTTTGATATATGTGCAATCAAGTCTCATGAGCTGCTTTAAAGAAATGCCCTGCCTGGGTCTCTTAGAACCCTCAGAATTGTC
CCTTATCTGTCGTTGGTATTTGTATCCTTCGGTTTGAAGCATTTGAGGGTAGCCTTTGACATGCCTCCTGTTGGCAGTGTAGCAGTATGTAGAT
GGTAATAACTGATTTTCTTCATTCCATGAGTTTTATCCAGAAATGGTTAGACCATTGTTCCTCATACCCTTATGTGCTTATGACTCACCAAAGT
GGATCTGAGCCCATTTAACAGTTGTGGGGTGGGCTTCTTTTCCCTTTCCCCACCGTCCCTCTTCTTCTTTCCCCTTTCCCAACCATCCTTCCCT
CTTCTGTCCCCTTTCCTGACAGTCCCCCTTCTCCTTTCCCCAGCATTCCTCTTCCACCTCCACTTGTCTTACCACCGTCTTTTGGCCACTGTTA
TTTCACCACCCCATTTCTCCACCATTTTTCCCACCCTCAGCCCCCCACTGTTTTCTTCTCACCCATCCCACCGCCCGCACTGAAAAGAAAAAGT
TCTGGGGTGGGATTGAGTACTTCTCAACCAAGTGGTCTGCTGACCAAACTTTGAGAAACACTGGGCAGGATAACTGCTGAAAAGCATCAGTGCT
GAACACTCAGGCATTCTGGTGCATCTCTCTTCCCACCAGTAGTGGCCTTAGGTCCACCAATGCTTGTAGGCCTAGGTACTACTTTACACTAAAG
GGCTGGGTCTGCAACTGAAGAAAGTGCCAAACTTGGCAAGCTGAAATTTGTTTTTTAAAATGCCATATTTATTAGCCAAGTGTGGTGGTGCACG
CCTGTAGTCCCAGCTACTCGGGAGGCTAAGGTGGGAGGATTGCTTGAGTCCAGGAGGCAGAGATTGCAGTGAGCCTACATCGTGCCACTCCCCT
CCAGCCTGTGTGACAGAGTGAGACCCTGTCTCAAAAAATAAAATAATAAATAAATAAATAAAACATATTTATTGAATCTATTTGTGGTCAGACA
CCAAGACCCAGCAGTGGATAGTACTACTGACTTAGACCCTGATCTTGGGGAGTTTGCAGCCTAACAGGACTCCATAATCTCAGAGGCAAATGCT
TATGTTATGTAAACATTTTGACCTGTTGACCAGAGAGCCTAAGACAGTTCTTTCAGCCCTCACGCTGGTCATTCCTGGAGACTCTTAACTATAA
CTCAAAGCCAAAACTCCTAATTAAGAGAAAGGGCCTAGAACCTTCAAGAGCACCATCTCAAAGCGTAGGTATTCCGTACGCCTGCTCTGGACTT
ACCAAGAGCTTTAGGATGCTCAGCTGGTAAAGCCTCACTTTGAGGTTCAAAGTGATGGGAGGGAAAGCTAGATTCCCTAGTCCTGTGGTTTCTC
TTCCTTTTCAAGATAGGAAGCAGAGGCCTGGTCTAGTTCACAGGTTGCCATAGTCCTTTCCTCCCATTCTTGCCCAGTCCTCCTTTACAGGATC
CTGCTTTAGGGCTCCAGCATTTTCTCAGCTGGTCCTCTGCTGGGATTTCTTCTCTTTGATTGTGTGAACTCTTACTCTGCAGTAAGTCAAGAAG
TCATATTTGACTTTACTTCAAACTGATACAGTAAGTGCTGCCTACTCTCTCGGGAGGAGAATTCTTAGACTCCTTTAGAACTTGCCAGGGAGGT
GGGGCATGGGCTAGCTGAAGCAGTGAATTACTGCCTTCTCTGAGGACCTTCAGTTTACAGCTTTGATTCAGCAGTTTCCTTTTCCTGGAGCTCA
GCCTTTTCCACAAAGTGTTAACATTGCCAGGAACCTTCCAGTCATCCTCCCACTACTCTGATGCAGGGAGCCATCATTTCATCTTTTGACAGCT
CATCTAAAATAGGAGGAGTCACAGTTGCTTCTCCCTCTATTAGGACAGAATTCAGTAAAACAGCCCAAAATCTCATTTTTTTTAAATTTATTTT
TATATTTATTTATTTGAGACAGAGTCACACTCTGTCACCCAGGCTGGAGTGCAGTCGCACAATCTTGGCTCACTGCAGCCTCCACCTCCAAGGT
TCAAACGATTCTCATGCCTCAGCCTCCCAAGTAGCTGAAATTAACACGCACGTGCCACCACACCTAAGTTTTGTATTTTTAATAGAGACAGCGT
TTTACCATGTTGGTCAAGCTGGTCTGGAACTCCTCACCTGAAGTGATCCTTGCACCGCCTCCTAAAGTGCTGGGATTACAGATGTGAACCACCA
TGCTCAGCCACATTTTTTTTTAAATGGTGTTAACAGTTTACATTTTTTTCTTGCCATTTTATTTCATTTATTTTATTCCTAATGACTTAATGTT
TTCCTTTATATTGGAAACATGTTACAGTTTTCTAAAGAAGTTCAGGGAATCTTTTAATACACAGCCTATCTTCCCCGAAGTGTCTTTCTTCCAA
AGCAGAAGCTTCCGGGTTGATGGGGGCAGCTGCGCCACCTGTTGGCCTTTTAAGTTAATGGCGTCCAAAGTGCCTTCTTTCTATTATAACTGTT
TCAATATTGTGCTACAGTTCTCTACACCCCTGCAAAGTCAGATTGCATATCATTATGAGATAAGATGTCTTCTGAGTTTTGAAATAAATGGATT
TCTGGTTAAATTTTAGTTTTCTATAAAGAATGTGGGCAGCCTTGGTGAATTATTAATACCTGTGTAATAGTAAGGTGGTGGAATTATAGTTAAC
CTCATTTTAAGTATAGCCAAATGCTCTTAGTATAGCATGGATTGGTTCGAGGTGATGTTGTAAAGTTGGATTTTTAAGAAACAATCGAAATTGG
CACTAAGAGTACTGTCAAAAGCATTTGTTTGAAAAGTGGATTAAATTCCCAAGTACTTTTCTTTCATTGCTTTATTAACTAAATCAGGTATATA
AAACCCATAGGCCCTATTCAGATTTTCTTTACCAGTTAGCAGCTTTCATTGTGAAAACATCTGAGTCCCTTTAGACAGCTTTTTGTTTATTTGA
GACAGTCTCAGTCTGTTGCCCAGGCTGAAGTGCAGTGGCGTGATCTTGGCTCACTGCAACCCCTGCCTCCTGGGTTCAAGCGATTCTCATGCCT
CAGCCTCCTGAGTAGCTGGAGTTACAGGCTCCCACCACCACGCCCGGCTAATTTTTTATATTTTTAGTAGAGATGGGTTTTCGCCATGTTGGCC
AGGCTGATCTGGAACTCCTGACCTCAAGTGATCTGCCTGCCTCAGCCTCCCAAAGTGCTGGGATTACAGGCATGAGCCACTCCTCCCAGCCCCT
TTAGACAGCTTTTACATAAACAATTGGATACACCAGGAACCCCAGTCATCCCTTGTGCTGTGGATGCATCCTGGTTCCCTGAAAGAGGCAGCAT
CATGGTACCCATGTTCCAGAGCAGTGTGTCGCAAACTCTAGTGTGCATCCAAGTCTTGTTAAAAATGCAATTTCTGTATAGGATTCAGTAGGTC
TAGGAGGGGGCCTGGGATTCTGCATTTCTAAACTCCCACATGATGCCAATGCTGCTGGTCTGTGAACCACTTGTTGAATAGCAAAGTTCTAGAA
GAAGCTCTTATTAGGCTTTTCATATGGCAAATCTGGGCTTGCCTAGTATGGATATATATTTTTTTATTCATATTCCACCCACCTAACTTTGAAG
AAGAAAGATGCCTATTTCTTTTCCCCACAATTCCTTTCTTCCACTCCCTGCCCTATCCCTTCCTCCCCTTCTTGAACAGAGGCTGCTTACCTTA
GCAGTGGCAGGAGTCCCTCTGAGGATTTGATTTTTAAAAACCATTGAAGAGGTGTAAAGGACCCTGCTTGCTGAAAGGAAAAGGAAGAGTGACT
GGGCCTCCCCCAGCTCATCCCTGTCCTGAGCAGGCACCTGGGAACAATTAACTGGCATAGTCTCCAGAGAATGACCCAGGTAAATATATCCTAA
AGAGAAGGAGAATTTGTACAAGTAGATATAAATCAGTATGTTGTCTTTGTTGTTGTTGCTACTATGTGTCACCAGACCTTTATATACCATGAGA
AGGCAAACCATTATTAAAGAGAATTCGCTAGCCCTGGGTATTTATGCTTAGAACATGAATACTATACCTCACTTTTTGGAACCACTTTTTTCTC
TAGGTAAAGTCATGAAGCTCAGCCCCAAAGCAGAGGAAGTAGCTACGTTCTTTGCAAAAATGCTCGACCATGAATATACTACCAAGGAAATATT
TAGGAAAAATTTCTTTAAAGACTGGAGAAAGGTACTGTAGCCCATGTCTTAATATCCTAGTACCTTGCAAAACAATCAAGTACTAAGTAATAAA
TTATCATTTTGCAAAACATTTCCTGATGTAAAATTTGAGTTGTATGGATTTTGTTGTATTTAAACTTGCGTATTTTTTGTCTTCATTTACTATA
TTATGTAGGGTTTCTGTCCAACAAGAGTACTTGTATATCTTTGCTATTGGCTCTCATGTGATCCCACCTAGGTGGGGGTTATCAGATTAGGCCA
AACAGAAAACCTCAACTCCAGTTGCGCACAGGAAAGTTTGTCGCTGCAGGACTGCCCCGTGTCTGCTGTTGCAAAGAGAAATGTTAATCTGATG
TCCCTCTCGCTGTTAATTCTTGCTCATTTATTTTAGGTACTTTCTACTCTTGAAACCACATATACTATATTTGCCTAGGTGATTTTTTAAAATC
TCATTATTCTCAATTTGGATAATGTGGACAGAGGCAGCAGTAAAGTTTACTTCCTGAACTAGCTCAGAAAAAGCAGACTTAATAAATGAATAGA
ATAGGGGTAATGTTTCCAAGAGAGAATCAGTATGGGATTTCAAACTTGTATTCATAATGCCTGGGGGCTGTGTGCCACGGAGTCTAAGAAACCA
CATAAGAATTCATTTTTTTCCATGATAAGTCATTTTAAAACATTTTAATATTAGTAAGTACATATTTTATAATAAAGTAATACAACTGTATTTT
TTTGTTTTTTCAAAATTCATTAATTGAGATTGGCTACTTCCAGAAACCTTTGACTGAAAAAATGGTGCTTGGGTGTATTTGCAAAGAAACCCAA
GGACTTATTAGTGTATTTTCGTTGTTTTTCTTTCATCTCCCCATTTTCTTTTGACTAGGAAATGACTAATGAAGAGAAGAATATTATCACCAAC
CTAAGCAAATGTGATTTTACCCAGATGAGCCAGTATTTCAAAGCCCAGACGGAAGCTCGGAAACAGATGAGCAAGGAAGAGAAACTGGTACTAC
AGAATTTATTAAACCTCTGGAGAATTCTGGAATTGTCATTCGTTCATTTAACTTTCTTCTTGGTTCTTATGACACAACATTAACATCAGTAATT
TCACATCATTCTATGCTAAAGACTTAGAGTTCTCAAAGTCTAAATTTTCTTAAAGGTTTTAGTTAGACTGAAAATTCTGAACAAGTACTTTGCT
CAGTAGCTCTGTACAGGAATCTTGGTGCTTCAGTGACCTAAAAACCAGTCAGTAACTCCAGCCAATAATATAGTAATTAAGGATGGGCAGACCT
GTCCCACACTGGCTACTGGATATTAAGGATTTAAGACAGATGAAATCATATTGGCCATGTACCTCCCTGCTCTTTGATCTATTTTACTCTGGAA
TCTTGTGATGCTCATCCATCTCCATCTTCCAGCCTTGGCCATCCTCATTACTGAAGGATCTTTCTGGTATCCAGCTGGGATGTCATTTTTCTTC
TACAGGCTGCCTGTTTTTGTAAAAAAAAAAAAAAAAAATTTATTGGAACCAGCTGCCTCTACTTGTCTACATATTATCTACGGCTGTGTTTATG
CAACAATGACAGAGATGACTAGTTGCAAAAGAGAGTAGTTGCAAAAGAGACTGTGTGGCACTCAACCCTAAAATATTTTCTATCTAGAAAAAGT
TGTCAGCCCCTGAACTAAAGGAATCCAGGCTAGAATTTCATTTTTACCAATCGGAAGTCCAGAAGTTAAGGATTTTAAGGAATTCTTTGCACTT
CAAATTCCTGTAGTTTCAGTATTTTAAAGGACTTGCGTGTTTACGTAATTCAGACCATTGTATTGATATAACTCATTGTTTCATGGTACTTATT
TGGTCACTAGTTTAAAAATTAATGCATTACTATAAGAATGTTAATTGCATCAGACTTTGTGTCTCAGGTAAATCTTATCCTCAATATTCCAAGT
TAGTGAAATTTAGTATATTATTTACTTCAGGGGCATTTTGAAACTTAAAAGATCACTTTGGAGCTTTGTTCTTAGAATATTGATCCAAAGATAG
ATTTTATAAACATCCCCTTGTCAGAGCCTCTGCCAAGGACACCTGCTGCCAGCAAGGTCTGAATCTGTTCCCACCCACAAGGCAGCACAACTTA
GTTAAACTGAATCAATAAGTATATAAAACGCAGAGTCAATAGAGGGTAAGGAGGCTCAAAATCTCCCCCACCATCCCTCACCTTTTTGGAGCAA
GGATCATAGTATAGAGTGTATATACCTGTATACCTACAAAAAAATTAGTGACAGATCTGTCTGAGCTTAAAAACCCACGTTTTTAAGCTGTTTA
ACTGCTGTTTAATTAAATGGCTTGAGCTATTCTTTTATGAGGCTCTATCAGAGACTCTTCTCCATTTCCTGTTTTGATAGTACTCAGTAAAACA
GTATGAATTTTTAAAGTACATTTAAAAACACCCAAATAACATTTACAAACATATATCCTTTAAGACACAAGAATCAGTTTTGAATCTAGTTGAA
ATCAATCCTTATAGGCAGATCTTTTTGGGGAATTTTATGATATTTAAGTTTGAGAAAACCACTAGAGGTTTTCCTTTATTTGAATTTATTTTTT
AGTCATTTTTCAGACTTTCCTCTACCTTGACTTAGTCTCCCACAAGACATAAAATGCATTAGTAGAGAACAGCAATCTGAATCTATTTTGAGTA
CTTTCTTGCTGTCTTCCAGAAAATCAAAGAGGAGAATGAAAAATTACTGAAAGAATATGGATTCTGTATTATGGATAACCACAAAGAGAGGATT
GCTAACTTCAAGATAGAGCCTCCTGGACTTTTCCGTGGCCGCGGCAACCACCCCAACATCGGCATGCTGAAGAGACGAATCATGCCCGAGGATA
TAATCATCAACTGTAGCA2GTGAGCTCGCACTTCATCCTATCGGCCAAAAAGGGGGTGGACGGCGTCCTTTATTGTACTTCGGAATATTTCCCA
GGTTACACAGGACTGTTTGGGAAGGGAGATACTTAAGAGCAGGACAGTATTTCATGCGTAGGTCTCCAGATGTTTTTGAGGTACAGTTGTCTCC
CCTCATCCACAGGGGATATGTTCCAAGACCCCGAGTGGATGCCTGCAACTTCGACCCAATTGCTGTCACTTGGAACACATTTCTGTTGATGTCT
TCCACCCCCAAATTTAATGTCTTTTCCATGTTTATTAAGTACTTATCACATAGAGTGGCTATAACTTTTGCAGTCTGAGGCACAACAGCAAAAC
TAGCACGACTTTCTTTTTCCTTCTTCACAATTTCACAGATGGAAGGTTAATTCTTACCTTAGATCTTAGGAACTTCACCATACAGTTTTTTTTA
TTAAGTCGATAATTTCCACCTTTTCATTTAAAGCACTCTGTGCAGCTTCTGTATGGCATATCCAAATTGCCAACATCACCACTTTCACACTTTG
GGGCCTTTATTAAGTAAAAGAAGGATTACTTGAACACAAGCAATGTAAAACCATTAAAGTCAACCTGATAAATAAGGCAGCTACTAGGTTACCC
ATGGGCAAGTCACATATACAGCATGGTATGTTGTATATATGGTTCACGCATCCCAGGTGGCACTACAAGAGATTTCATCATGCTCCTCAGAATC
ATGTGCAATTTAAAACTTACAAAATGTTTATTTCTGGAATTTTGTATTGAATATTTTCGGATGACAGTTGGCTGAGGGTAAGTAAAACCATGCA
TAAGGTGGGACTACTGTATTGACTGTTAAGAAGGAAACTTGGAAAATTATGCTCAGCAGATAGGTCCACTTGGGGTCATGAAAGGTGAAATTAT
TCCTCACATCTTATTTCACTATCCTCCTGCTCTGTTATTTCCAGAGATGCCAAGGTTCCTTCTCCTCCTCCAGGACATAAGTGGAAAGAAGTCC
GGCATGATAACAAGGTTACTTGGCTGGTTTCCTGGACAGAGAACATCCAAGGTTCCATTAAATACATCATGCTTAACCCTAGTTCACGAATCAA
GGTAAGGGGATAGTTGAGAGCTGCACTCGTTCATGCTGCTGATAACCTTTTTTTGTTGAAATGTAACGTTCTCGTCCTCTAGAATCACTTTGAC
AAATTAAAAATCCTCCCCATTGAAAGAAGGCAAGTACTTTCATAGTTAGCATTATGGTGATCTTCCTACAGTGCCTCCATTTTTTTGGTCACAT
TGTAATCTTATTTATTAATTCACAAATATTTACTGAAATCCCAAATGTGCCCCACACAGTATACATTTGATGCTAGGAATTATGTTGGTAAACA
AGATAGACGTAGGCCCTGCCTTCATATTCCTTAACGTCCAGTGGTCAGGTGTGTTGAAAGTATGGTGATTGTATATTGGCCTCTGCAGATGTCT
TCTACTTCCTCACCTCTCTTGGTTATGAGAAGGGAATGTAGTTTCTGTATATCCTGAAACAAGTTGTAAAATCTAATGTCTTACATACTTCTGG
CTTCCTGCAGTCTCATCTGGGTAGGTTCACCAGGGCCAAATGAAATGTGTGTGAAAGCACATCATAAAACTGTGTTACATACCTATGCACTGTT
ATTTATTGATAGTGTTATTGCAAGGAGATAACTGCCTTGGGGGAAATCAGTTTTTGTTTGCCAGATAGCTATGTATATCTAGCTTTGGAGAGTC
CCACGAACTTCTTCCCTCCAACATACTATGAAATATAAACCTAACAGAGACAAAAACACAGTCAAGGAATTAGTTCTATGTAGACTGTTAACTG
TTTTATGTGCAGGACACCTGGGACTAAGACCTTCTTGATCCTCGTTCATAGGTTATAACATCTGTTAAAATGTGAAAGCCACAGCTGAAAAAGG
CTATGTGAATAGGCAAGACTAAACTGTACATTTTCTGGCTTGTAGCCCTGTGTTCTTCTGTATATCACTACTTTTCTAATGAAAAATACCTGTT
TATATATTTTCTCCAATTATAAAATATACTTTTCTGGCTGGGTGTGGTGGCTCAAGCCTGTAATCCCAGCACTTTGGGAGGCCGAGATGGGCGG
ATCACCTGAGGTCAGGAGTTCGAGACCAGCCTGGACAACATGGCGAAACCCTGTCTCTACTAAAAATACAAAAATTAGCCAGGCGTGGTAGTGG
GTGCCTGTAATCCCATCTACTTGGGAGGCGGAGGCAGGAGAATCGCTTGAACCTGGGAGGCAGAGGTCGCAGTGAGCTGAGATCACGCCACTGC
ACTCCAGCCTGGGCAAGAGACTTAGACTCTGTCTCAAATAAATAACTAAATACATAAATAAAAATAAAATGTAGTTTTTGTAGTTTAGATAAGT
ACAAAATCAGAAAGCGAACACTTATGTTGAGCAGACTAGTCATTTAAAGAAACATGTATTCCTCTTCTGAAGTATCGCAAAGCTGTATATATGG
CTACAAAAGCAGAAAAATAATAGTTTTAGCCCTTAAGGAACTTATAGGCTGGTGGGCAAATCAGGTAAGAATTCAGTTGTATTAGAAGAAAGAT
AAAAGTAAAATGCATTAGATAAACAGAGGAGTTATTTGCAGCACCTTAGAGATCAACAATAACTTTATGAAGAAAAGTAGGTTATGGTTGGGTC
TTAAAAGTAGTATTTCAAACAACAGAGAACTCTGTCGTGGACAAAGGGGAGGGTGGTAAGCAGAGTATGTTGAGGATAGGGGTTGAGAAAAGGT
GTGATAAAAAGAATTATCAAGTGGTGACAGTTGCACAACATTGTGGATATACTACTAAATGTCACTAGTGGTAAATCGTATCAATGCATATTTT
ACCACAACTTAAAAATGATCAAAATAACAGAGTTACTATTAAAAACATTTGCACATAAGTTAACATTTGGATCTTCTAAGCATACCGCACATAC
ATATACTAATGCCACCATTTATAGATGAGTAAATTTAGTCTCTGGGAGGCCCAAAAATTTGCCCAAGATTCAGTGGCTAGTAACTCTAACTTAG
ATCTTCTTAGAATCTAACTTAGATCTTCAGTCTCTGCATGCTTTCCTGTGACATCCACTGCTAAATGTGGCCAGCTTTAAATGCCATGTTAAAG
AGACTGACCCCTTAAAGGACTTTGAACAGTGGAGTGTCTTGAACACAGCTTCACTTCAGCAAGATTTACAGGCATTATATGTAAATCACATCAG
TAAATATGAACTGTTATAAATGCTGCAAAGGAAAAAGTACAGGGTGCCATCTGAGAGTATACCAGGGTACCTGATCCAGCCTCTGGGGTTCAGG
GATCGCCTTTCTGAAGAGGTAACATTTAAAGGATAATGTAAAGAAAAAATTTTTTTAAATTAGTACCTGAAGATCTGGCTGGCCTCACTATATA
GCTTCCTCTCCTGCCTCTTTCTTCCCTCAGAACGACCAAGCTCTTGCTCACCTCTGGGATTTCAAAAGGCTACTTTATTTTCTCTATTAGAAAC
ACCCATTCTCCTATTCTTTCCAGGGATACAATCCTATTCATCCTGTAAATCTCATCTTAAATGTTAACTCTTCAGAAAGGCCATCCCTGAATCC
TAGAGGCTGGATCAGGTACCCCGGTATACTCTCAGATGGCACCCTGTACTTTTCCTTTGCAGCATTTACAGCAGTGTAAATCTACTGGTGTGAT
TTACATATAATGCCTGTAAATCTTGCTGAAATGAAGCTATGTTCAAGACAACTCCACTGTTCAAAGTCCTTTAAGGGCTCAGTCTCTTTAACAT
GGCATTTAAAGCTGGCCACATTTAGCAGTGGATGTCACAGGAGAGCATCAGGAGCATACGCTCTAAGAAGATTGAAGAGTTACTAGCTGTTGGA
TCTTGGGCAAGTTTTAGGGCCTTTAAGTTTAAAAGGAAGCCACCAACCTGGGATTTAAAGAGGGAAATGACACCAGATTTGTATTTTGGAAACT
CGTTACATAATTGATCATTCTGACTGCTGCTCTGCGGAGACTGGATTGGACACAAACAAGAAGTAGAGAGATCAATGGGAAGCTGTTGCATACT
CCAGGCAAGAAACAGCGATGACTTAAGACAAATGATGGCAATGGGGATGGAGAGAGGTGACAGATACATAATGTATGCTGAGTACTTGTAGAGG
TAAGGATTAGAGTTAATTAATTGTTGGAGCCTCTCTGAGGGCTCAGATCCTTGTTAGATAGACCAGGTGAAATCCCTCAAGAGCAGACAGCCAG
TCAATTTTATTCCAGACAATATCCAGCTAACTGCTATACACAATAGACATTTGTGCAAGTTTCTGGATGATGATCATGGTAGTGAACCTAAAAG
TCACCCAGAGTTAGACTCTGAACCTTATGCTCAGGAGAAAGTGCCTGACTTGAACTGCAATGGGATCCCAATAGGAGTCATTAAAGGCCTGGAA
AAGTGGTGCCATTAGGAGAAAAAGAAATGATTTCTTGAGCTTGCTCTCAGTTCTCTTTTAGGCTGTCTTGTACTCAGCAGAATAGTGAGATCTT
CAAAGGTTGGGGTTTGATAGTGCCTTGAATAATTTTTAACTTTATATTGCCAGCGGAAGAAGCATTCTCTTTTTAGATTTAAAAAATGTAGATA
CAAATATTAGGGGTTTTATTTTTAGTGAAACATTTCAAACATACAGGAATAGATAATTATGTAATGAACACTCGTATGTCCACCATCTGGCTTT
GTAAAATCTTAAAATTATGTCTTATGTGCTCAATTGTTTTATTTCATAAAAGATACTGATAAACATAGCTGAACTCACTTGTATACCATTCACC
TTCTTCCCTGTAGATTACTATGAACTCGGTCTTTTTATTCTCATACATATTTTTTGTATTTTTGCAGTATATTTATCTGTTCATAAACAATATG
TAATTTTACAATATGTAACACACTAGTAACATACTAATTTAAAACTTGTTTTTAGTTTACAATATGTTGTAAACTATTGTAAGCTAAAGACATA
TTGTACAACCTATTGTAAAATAAAAACAGGTTTTACTTTTAAATTAGGTATGTTACTGGGATCATTCTGCAACTTGTTTATTCCTCTCCAGCTT
TGATTTTGTGGTTTTATTATCTTAACCTACACTTTTAATTAATCCATTTTATTTGTTACATGGTATTCTATTATATCATAAAAACTTATCTATT
CTGTTGGTTTTTGTTGTTCGTCATTTGAGACCATGTCTTCGCTCTGTCACCCAGGCTGGAGTACAGTGGCGTGATCTTGGCTCACTGTGACCTC
TGCCTCCCGGATTCAAGTCGTTTTGGTGCCTCAGCCTCCTGAGTAGCTGGGATTATAGGCGTCTGCCACCATGCCCAGCTAATTTTTGTATTTT
TAATAGAGACGGGATTTCACCATGTTGGCCAGGCTGGTCTTGAACTGACCTCAAGTGATCTGCTCACCTCAGCTGCACAAAGTGCTGGGATTAC
AGGTGTTACCCACCATACCCTGCCTCTATTCTCTTGTTAAGAGGCATTTAGCATGGTTATACAGTCTCTTGCCCTCATAAACAGTGCTGGAAGA
AACACATGTTTCTTGTGTATATGAATGAAAATTTGTTTTATACATTAGATATTTCCAAATTGTTCTCTTAAGTACTTCAGTTTACATCATTACT
CTCCTCCTCCCTCCCCTCCCACCCCCACCCACAACAGTATTCCTCTTTTTCCATATCCTTGCTAATGTTTCTAAAGTTTTGCTTTTTACATTTG
GGTCTTAGATCCACTAGAATGTATTTTTTGCATTGGATGAAGTTGAAACCTAATATATTTTCCAAATGAGTAAACTGTTGTCACAGAACTATTT
AGTTGTATTACCTCCTCTCTTGTATATCAGATATATCTACATATATGTCAGACTGTTTCTGGGCTGTCTGTCCTCTTTAATTAGTTCGTGTATC
TGTTTCTGCATCAGTAGCATACTGTCTTAACTACTGTAGCTTTATAAAGTCTATTGAGTAGGACAAGTTTGTTTCATTCTTCAAAATTGCTTTG
GCTATTCTTGGCCCTCTGCTGTTTCATATTAACTTTCAGATAAACTTGTCAAATTCTAATGAAAACTGTTGATAAACTTGTTGATTAACAAATT
CTAATAAAAACTGTTGAGATTTTTATTGGAATTGCAATACATTTATAGATTAACGGAGAAAGATATTGACAATACAATTGAGTTTCCAATTCAC
GAACATGTTATACCTCTCCATTAATTCATGTCTTTTGAATGTATCCACCAATATGGTTTTGTAATTTTCTTCATAAAGGTTTTACATTTAAAAA
ATTCTTATTTTTAAGTGATCTTATAGTTTTTATTGCTAATGTGAATGAGATTTTTTTCCATTATGTTTCTGTTGGTTATTCCTGAAGTGGTAAT
GCTTATAATTTTGGGGTGTTGGTCTTGTATCTGGCAGCAGATACAAGAGGTGCTCAGAGTTGTTCAGGGTTGCTGAACTCTTAGTTCTAAAAGT
GTCTGTCATTTGGGGTTTCTATCTAGATAATTTAATTATCTATAAAAACAGTTCTTCATTTTCAGTTCATATATTTCATATTTCTTTAAGTTTT
AATTTTTATTTTTAAACACAATTATCCATAAAACCCTAACCCTTTCCCTAGTCAACAGCAGTCACAGCCAAATGTTTTATTAATTGCTATACTC
AGTGTTTCTTGTATCTCATACCTTCTGGGGTTTCTTGTCTTGTTGAAATACACCCTTTAATGTTTCTTTAGTGAAGACCCAACAGTCGCACTCA
CTCACCTTTGTTTACCTGAAAATTTCTTTATTTTCATCTTAATTCATAGTCTGTCTTTTCTCCAGTCAAGGAAGTGTCTTATAGGGAAGATTCT
GGTTTCACTATGCTGTATCCAGGGATATATATGTATTTATAGATAGACTTTTAATCTGAGGACTAATGTATTTTATCCTACAGTATTACCAATC
ATTATTTCTTCCATAACTTCTACACCATTCCTTTTGTACTTCTTTTTTACAGTCCTATTAGATGAGTGTTGACACTTTTCAATCTAGACATCTT
TTTTAACTATATTTTCATACTCTTTGTCTCTTTAGGTCTCATTTTTTAAGTTCAGGGGAATATTTCATTTTGGCTGAGTTGTAGCACCTCACTT
CCAATTCACTAATTCTAATTATATTTAATCTACAAGTTATTCCATCTATAATTTATTTCAATTACCACTTTTTGTTTTCAAAATTTCTAATTTT
ATATCTGATTTTGTTTCATTTTTGTTTTATAATTTCATGTTCTTTCTACATTTTACATCTTTTTATGCATACTAAACATACTCACTTGAAAGTC
TTTGTAAGATTGTTCTATAAAATGTTACCTGAAGTGAATTCATGTGCTAATTACTGTTGGCAGTTTTTCTGAGCCATTTTCCTTGTGTCTTTTG
AAATTTCTGTTTGTAAGCCCTTTTAACTGGGAGGTGTTTTTTGCTTATCTACTGTTCTCTTTTCTTCCCCTTCTTCTCCTTCTCTGTTCATTAC
TTTTTGTCTTGGAGGGAGTCTCTTAGCCCAGCTCAAGCCCAAGCTAATAAGGCCCCTGACTTCAAGTCCCCCCTTCTTGCATGGACAAGAAGTG
ATCCTCCTGTCTCAGCCTCCCAAAGTGCTGGGTAGGCGTGAGCCACCACATCCAGCCTAGAGCACTTACATTGCTACATATTTGGAGCAAACAT
AATTAAAGTATGACTTACTGTGACCCAGCAGTCAATAACAGATACGTTTTTGTAATAGAATGTTGAAGGGTCGTAACTGGTGGTTTTACTTCAT
GGAGGGCTTTAGGTCGGCTATATGGGAAGCTGCCATCATGATGCTTTTGTTCTACAGATTTCTGCTCAGCCTCCAGAGATGTCTCCTATTCTAA
GAGTCGTCTTTGTTTACTCTTGTGTCTATATTTTACTTACTTAATTCCCTCACATAATAGTGTATCATTGTATCCCATCTGTGCTCTATCAAGA
AATGTAGCACAAGCATGATGTGAACTATGAATTTTCGACAATTTAAAAAATTAAAGGAATCATTCAGGGGTAAAAAGCACAAAGTTGTAGAACA
GCTGAAGTCTGTTCTTTTTATGTATCCTGTCTTTGCCCCCTTTCTGGAAACTTGGATTGGCCTACTTGCAGTCACTGTCACAGTTACACTACTT
CTAGCCTCAAAGGTCATTGAAAGGATTGGGATTTTTGAGAACCACAATAACACTTGCTCTAGGTACTGAAAAGGTTGTCCTGAACTCATTCATA
TCTTTTTATGTTCATCCCAGTTTGTTTTTGCTTTTCCCCCCAGGATTTTGATTACACAGACATCTTGCAAGCATATTTCGATTCTTTCTCTCCC
ACTCTGTGCCTGGTGCCCGTAGGATCTGAAATAGCATTGGAATGACAGCTAGCCTTCTGGAACCTGCAGTTTCAACCAAAGAAACTCTGATTCC
AGATAACCCAGGAGTTTCTTATCCTGCATAATCTAGCAGTTTACAAAAAGGCTGCTTATGGGTACTCACTGCTAAGTACAATCCACTGCCAAGT
TTGGAAGCATTACCTGCTCTCACAACCCAGGGAAAGTAGCCCTTAGTAAAATTCAGGTTTTTTCAAACCAGCCTTAACCTTACAAACAGAATTT
ATCATCATGATTTTTCTTTCAAATGCAGTACAGCAAACTTTAGGATCAATGTTGACATCGTATTGCGTTTAGTCCTGTTAAAATACTCTCAGTG
CCAAATACACACTTCTGCCTTTTTTCTCTTTAGAGTCTAGAATTCTGTGGGGTTCCAAAAATGTATGTGCTTACAACCTTTTATATGTAACCAC
CTAGGGATTAAAGGGCTAAATGTGAAGGAAAGTATCTTTACAATATTCATCTTGGGAAGCTCTCATTTTGGTGAGTTCTATTAGAGAAAATAAG
ACACAAGCTCATTAAAAATATATATATATTCTGAGCCTGGCATCTTGGTATAAAATTCAAAACGTTTTAAATCTATTTATTAGTAAGACTAACA
TAGACCTAAGTGTGAAGACTAAAATATTAAAGCTTGTAGGTCATATCATGGTTGAATATGACCTTAGAGTAGATTCCTTAGGACAGAAAAACAC
CAACAAGAGAAACAATTGACTAAATGGACTTCATTAAAATTAAAAATTTATGTTCAACAAAAGACACTGCTAAAATAAATACAGAATTTACAGA
CTAAAAGAAAATATTTGCAACATGTTTATCTGAAAGGGCTTATATCCAGACTATACAAAGAATTCCTGTAGCTCCATAATAAAAAAACAGACAT
CCCATCCGCATAATAAAAAGAGCAAAAGACTTGAACATATACTATACAAAAGAAGATACAGGAATGGTCAATAAATAAGCAAATGAAAGAGTGC
TCGACATCACTAATTATCAGTGGAGTGAAGATTTAACCACAGGGAGATACGAATTCCAGTTCTAGGTATTTTTACCTCAAGTGAAATAAAAACA
TTTATCCATCAAAAAACTTGTACAAGAATGTTCATAGCAGTGCTCTATTCATAAGAGTGCAAAACTGGAAACATCCCAGAATAGATAACACATT
ATGGTATAGTCATAGAATATACTATATTTATCAGCAGTTAAGAAGGGAACTACTTATGTATTCAACAACATGGATGAATCTTAAAAACATGGTT
AAGGGCCAGGTCCGGTTGGTGCATGCCTGTAATCCAAGCACTCTGGGAGGCCAAGGCGGGTGGATCACTTCAGGTCAGGAGTTCGAGACCAGCC
TGGCCAACATGGCGAAACACCGTCTCTACAAAAAAATACAAAAATTAGCCGAGGGTGGCGCACACCTGTAATCTCAGCTATTCAGGAGGCTGAG
ACATGGGAATCGCTTGAACCTGAGGGGTAGAGGTTGCACTGAGCCGAGATTGCATCACTGTACTCCAGCCTGGTGACAGAGCGAGACGCTGTCT
CAGAGGGAAAAAAAAAAGTTAAAAAGGCAGACAGAGGAGTCTATATTGTATGATTCTATTTATATAATCTACACTAGGCAAAATTTATCCATGA
TGATAGTAATCAGATTGAAGGATCAGTGGTTGCTTGGTGGAAATTGACTGAGAAGGGAAATAGTCATGTAAGAATACTGGCAAATGTCCTCTTC
CCCATTACAAACGTCTGAGAAAGTTACTAGAAAACAGAATCCAATTTGCCTTCTCACCCCCAACTTTGTAATCTTGAATCCAGATCCTGATTCC
ACCCAACCACTCTGCTGAATGGATAGCAGCTATATTAGAGAGACAATATAGTGGGCCTACTAGTTTTAAAAAGTCATCCAAAGAATGTCATCTA
CAATCAGTTAAATTAGATTTTTACCCATTACTGAAGTGTGATTGAATTAGGGAAAGAGGACAGGTGGTCAAAGGCAGCCTTCTCCAGTGGATTC
CTTGTCTTCTTGAGATGGTTTTGTGAGACCTTGCCTGGAAGACCTAGGTGGATAGTTTATTTTCTAAAAGTAGTCAAGAAAGCTTGTTCAGGGC
ATTGAACACTGCAGGGACAAGCATACTTCTTGGAGGCCAGCCATCTCCTGCTGGATCTAAGCCCGGTGGCTTCTGCCTCCACCTCCATCTCAGC
TTATTTGAGAGAATCCTAGATCCTTGGTGCAGAAGCCCAGCCAGCCTGTGAAGAAAAGTTGGTCTGGTAGTATCCTGTGAATGACGTGCGGGTT
GGGTTTTTCTAAATCTCGTTTACCTGACTCCTACCTTACATTCCAGTGGTGTGACTAAGGAACTGAGCAAACGTAACCCTAGGGGACTTTGAGA
CAGGCTTTGGTAGTCCATGTGCACTAGAGTGAGGGGAAAGAGGCCACTCCAGAGTTGGGTACTCTACTGTTGAAGGTGAGCCTTTTGTCTCCAA
TTTTTCCGTGCATGTGTAAGAACAGTTGTCATGGAGATTTACTACTCACTTGTGGATGAGGACAGCTTATATCTCACCTTTTCTTATTCACCCT
GTTAAATGTCAAAATGTACTAAGACTTAGGTATTTTTTCTGTGTCACCAACTACTAAATCACCCACCCATGATAGCAGGTAGTTACTGAAACTC
TTGTAGCCAAACAAGTGCATAACACTGGTACACATGATGTGAGAGTGCAGATGACTCCTTAGCTTAACTGTGTAAGCTTTTAATTTCTGAGTAC
TTTTAGGATTGAGAAGTGGAAGACATTCTTGCTCTACGTATCTCATGCTTCTGCACACCCAGAAGGCTGGTTGCGCCCCCACCCCACCCCCCGC
CCCCTTTTTTTTTTTTTTGATAGGGTCATGCTCTGTTGCCCAGGCTGAGGCTGAAAGTTATCTTCACCACAGGTCTTATGTCTAAGGACCACGG
GTCCACGTCATAGTCAGGAACCAGGCATGTGTGGGCAGAAATCACTACCACTTTCCTTTGTTGCGGGTGGGGAAATTAAGAGCAGAGATTCTTG
GATTCTTAAATTCCTTCTCTATGTTTATGTCATCTAGTCTGTTTTATGCTGTTTTATGTAATTCCCTGCTTCTGGATTTCTTGAATTTTTTTCC
CCTTCTCACTTGTCATAATTGGCTCTTGCTTGTGAGTCTATTTTCATTCAGCTTGGTAGCAGAAGTCTTCTTCACTATTGTTTAGATTCAGTTT
TCACATGGTTTTAGTAACCCTTCATTGGGTTTAGAATCAACTTTTAACCCTTCCACCAAAAGCTCTTATTTTTTTAAAGGCTTCCCAGAAACAT
AGTTTCTCTCAATCTCATCAAGAAATGCTTTTAAATGCAGAAGTTAGAAAATGGTGAATAATTATGGCTGTTCCTGGAAGTCATTGTGTCCTTA
GTAATTACATGTTGTAGTCTTTGGTTCTGCTTCTTTGACAGCTCCACCACACTGTAATTTAATGGAATTCACTTAGATTTAATGGAATTCAGTC
CTGGTAGAAAACTGCTATTGGGTCACAGAGTTGGCAGCAAGGCTGTGAAATTGATGTGGGAATGGGGGTGATTATGTGCTTTGTGTTGACAGAA
GTTAGTTTTTGGGACATCCCATGTGGGTTTTTCCCAGGAACATAAACATTTTAGAGAATTAGAGCTAGAAACTTTCTTCTGGGAAAGCCTTAGA
AGTCAGTTGTGCTTGGCAGTGAGATGGGACAATGTGCATTCTTAACAGGTTAAATGTGCCAAACTCTCTCTTCAGTACTATTCTTTTTTACGTT
TGCTTAAGGTCAAGTTCCTCCTCTTTTGTTCAAAGTCTTGCTTTGTCACCCATGGTGGAGTGCAGTGGCGTGATCTTGGCTCACTGCAACCTCT
GCCTCCTGCGTTCAAGCAATTCTTGTGTCTTAGCCTCCCTATTAGCTAGCTGGGATTATAGGCTTGCGCCACCTTGCCTGGCTATATTCAAAGT
CTGTCTTTACTACACTGTCCCAAAGTAATCTACATTTGGGTTTGGGTCTTTACACGGTGAGAAGCACTGGCAGAAATACGAGACTGCTCGGCGG
CTGAAAAAATGTGTGGACAAGATCCGGAACCAGTATCGAGAAGACTGGAAGTCCAAAGAGATGAAAGTCCGGCAGAGAGCTGTAGCCCTGTACT
TCATCGACAAGGTGAGAGCATCTTCCCATCGGCATTGTCTAGTGTTGAGCTTAACAAAGGGAGTTTCTGCTCTGCCCCAGGCCCTGTGCCACAT
ACTGTATATCACAACTCAACATACATATATTTGTATGTAAAACTGAATCAAAAGTTGCACAAAACAATGCTTAGCCTTACTGTGAGCAGTAGAT
TCTGATCTTTTTTTAACTCTATTTCATTCCTTTAGAAAGTTGGTTATAACTTATAAAATTGTTTAAATAAACCATGCAGGTATCACCATTATAT
AGTTTTAAAGACCACGCTCTAGAGGAGATCAATTTCTTGGTACTCACGAGAAGAAAAAAAAGTTCATGTTTTTCCCCCAGTCTTGTATTTTAAC
ATAAGTTCTGAATTGTCTCAAAATTCACACTAGCTTTTTGAGTTTGATTGCCCAGAGTAGCAGCACTCCCTCATTTGCTGCCTTATTTAATTTT
TTTTTTCCTTTTCTCCATCCCTATTTCAGAGGACAGAATAGAAAGAAAAGGAGCATGAATATTTAACATCCCTATAGATTTCATAGTGAGTGGG
GGAGGAAGTAACACTGCAGAATCCAGAGTTCCCAGGCCATGCTGACTGATGCTGTGGCTTCAAACAGAATTGGGAGGCTTCTGTTTTGGATGCC
TAGAAATTGCATAAGGGTCAAAAGGCTGGGCGCAGTGGCTCACGCCTGTAATCCCAGCACTTTGGGAGGCCAAGGCAGGTGGAACACGAGGTCA
AGAGACCATCCTGGCCAATGTGGTGAAACCCCATCTCTACTAAAAATACAAAAAAAAAAAAAAAAATAAAAATTGGCGTGGTGGCGGGCGCCTG
TAGTCCCAGCTACTTCGGAGGCTGAGGCAGGAGAATGCCATGAACCCGGGAGACGCAGCTTGCAGTGAGCCAAAATTGCGCCATTGCACTCTAG
CCTGGCGACAGAGCGAGACTGTCTCAAAAAAAAAAAAAAAAAAAACACAGAACGAAATTGTGTAAGGATCATGTCTCTTCCATTCATGCTCATC
TTTTCTTTCTTTCCTGGGCAGCTTGCTCTGAGAGCAGGCAATGAAAAGGAGGAAGGAGAAACAGCGGACACTGTGGGCTGCTGCTCACTTCGTG
TGGAGCACATCAATCTACACCCAGAGTTGGATGGTCAGGAATATGTGGTAGAGTTTGACTTCCTCGGGAAGGACTCCATCAGATACTATAACAA
GGTCCCTGTTGAGAAACGAGTAAGTTAATGTACCTGTACTGTCTGACTTGTTTTCCATTATTCAACAAGCATGGGTTGACTGCTTTTTTGTGTG
CTTTGCACTTTCCTGGGCACCAGCAAAAGTGACTTGAGACACGCAACATGGCACATCCCTGTAGACCCAGCTATTCAGAAGGCTGAGACAGGAG
GATCACTCGACACCAAAAGTTTGACCCTGTAGTGTGCTGTGATCACACCTGTGAATAGCCACTCTACTCCAGCCTGGGCAAAATAGTGAGACCT
TCCCTCTCATATTAAAATAAATAAAAATAAATCACTTGAAAGAGGGGACAGGTATTATTTGATATCTTGTGTACCTCCTTTTAGTCACTCTTCC
GCCCTGTGCTACCTTCCTGGTAAGGAGTGGCCTTCTCCTATACCAGTATTCAATGGACCATGCTGTAGAATAGGCCCTTAGAGCAAACTCAGCA
TATGATTTAACTATATCTTAGTATCCCCTGGTCATGTGGTACATTTGTCACTTTTCATCTTTCCTCAGCCTTTCTCCAACTCCTGACTGAGTGA
AAGGTTAATGTTAGTCCCCACATCTCTGAGCCCATCACTGAAGAGGGTACTATAGCTCTGTAGTCCCAACCTAATCTTTTCCATAGTATTGGGC
TTGAACCAGACACTTACAGTGTGCAGGATCCTAATAATCCAGCCCACCAGCAGTCCTCTTCTTATAAAGACACCTCTTCTCATAAGGACACCAT
AATCAGTAATCAGGTTTTGCTGGCTGTGGAAGTACTCTGGACAGATTAGATAACAGTATGTATCTATGTAAATTTTTGAAGCTGATACTGTGTA
AATGTAAGGGAATATCTATTTTTAGAACATACACACTGAAATGTTTACGACCATATTATAAGTAACTACTTATAAATGTACTTTAGCACCATAT
TATAAGTAAGTACTTATAAATGTACTTTAGGACCATATTATAAGTAAGTCCTTATAAATGGCTCAGAACAAACAATTATGTATATATATCTGTA
AATATACACATGGAGAGAGTGAGCATACATGCACACTGTGCAAATGATGAATGGGGTAAAATGTTAACAGTGAATCTCGGTGACGGATGTATGC
GTGTTCCTTGTGCCTTTTTCTTTGCAAGTTTCTTTAAGTTTGGGGTTATTTCTAAAGTTAGCATTTTTTTCAAGAGTAATAATTAGGATTCACT
TATATCTTTTAGGTTTTTAAGAACCTACAACTATTTATGGAGAACAAGCAGCCC
HUMAN SEQUENCE—mRNA
CAAATGCGAACTTAGGCTGTTACACAACTGCTGGGGTCTGTTCTCGCCGCCCGCCCGGCAGTCAGGCAGCGTCGCCGCCGTGGTAGCAGCCTCA
GCCGTTTCTGGAGTCTCCCGCCCACAGTCACCGCCGCTTACCTCCGCCTCCTCGAGCCTCCCCAGTCCCCGTCCCGCCCGCACAAGGCCGCTCG
CCGTCTGCGTCTCCCCCACGCCGCCTCGCCTGCCGCCGCGCTCGTCCCTCCGGGCCGACATGAGTGGGGACCACCTCCACAACGATTCCCAGAT
CGAAGCGGATTTCCGATTGAATGATTCTCATAAACACAAAGATAAACACAAAGATCGAGAACACCGGCACAAAGAACACAAGAAGGAGAAGGAC
CCGGAAAAGTCCAAGCATAGCAACAGTGAACATAAACATTCTGAAAAGAAACACAAAGAGAAGGAGAACACCAAACACAAAGATGGAAGCTCAC
AAAAGCATAAAGACAAACATAAAGACAGAGACAAGGAAAAACGAAAAGAGGAAAAGGTTCGAGCCTCTGGGGATGCAAAAATAAAGAAGGAGAA
GGAAAATCGCTTCTCTAGTCCACCACAAATTAAAGATGAACCTGAAGATGATGGCTATTTTGTTCCTCCTAAAGAGGATATAAAGCCATTAAAG
AGACCTCGAGATGAGGATGATGCTGATTATAAACCTAAGAAAATTAAAACAGAAGATACCAAGAAGGAGAAGAAAAGAAAACTAGAAGAAGAAG
AGGATGGTAAATTGAAAAAACCCAAGAATAAAGATAAAGATAAAAAAGTTCCTGAGCCAGATAACAAGAAAAAGAAGCCGAAGAAAGAAGAGGA
ACAGAAGTGGAAATGGTGGGAAGAAGAGCGCTATCCTGAAGGCATCAAGTGGAAATTCCTAGAACATAAAGGTCCAGTATTTGCCCCACCATAT
GAGCCTCTTCCAGAGAATGTCAAGTTTTATTATGATGGTAAAGTCATGAAGCTGAGCCCCAAAGCAGAGGAAGTAGCTACGTTCTTTGCAAAAA
TGCTCGACCATGAATATACTACCAACGAAATATTTACGAAAAATTTCTTTAAAGACTGGACAAAGCAAATGACTAATGAAGAGAAGAATATTAT
CACCAACCTAAGCAAATGTGATTTTACCCAGATGAGCCAGTATTTCAAAGCCCAGACGGAAGCTCGGAAACAGATGAGCAAGGAAGAGAAACTG
AAAATCAAAGAGCAGAATGAAAAATTACTGAAAGAATATGGATTCTGTATTATGGATAACCACAAAGAGAGGATTGCTAACTTCAAGATAGAGC
CTCCTCCACTTTTCCGTGGCCGCCGCAACCACCCCAAGATGGGCATCCTGAAGAGACGAATCATCCCCCAGGATATAATCATCAACTGTAGCAA
AGATGCCAAGGTTCCTTCTCCTCCTCCAGGACATAAGTGGAAAGAAGTCCGGCATGATAACAAGGTTACTTGGCTGGTTTCCTGGACACAGAAC
ATCCAAGGTTCCATTAAATACATCATGCTTAACCCTAGTTCACGAATCAACGGTGAGAAGGACTGGCACAAATACGAGACTGCTCGGCGGCTGA
AAAAATGTGTGGACAACATCCGGAACCAGTATCGACAAGACTGGAAGTCCAAACAGATGAAAGTCCGGCAGACAGCTGTAGCCCTGTACTTCAT
CGACAAGCTTGCTCTGAGAGCACGCAATGAAAAGGAGGAAGGAGAAACAGCGGACACTGTGGGCTGCTGCTCACTTCGTGTGGAGCACATCAAT
CTACACCCAGAGTTGGATGCTCAGGAATATGTGGTAGAGTTTGACTTCCTCCCCAAGGACTCCATCAGATACTATAACAAGGTCCCTGTTGAGA
AACGAGTTTTTAAGAACCTACAACTATTTATGCAGAACAAGCAGCCCGAGCATGATCTTTTTGATAGACTCAATACTGGTATTCTGAATAAGCA
TCTTCACGATCTCATGGAGGGCTTGACAGCCAAGGTATTCCGTACATACAATGCCTCCATCACGCTACAGCAGCAGCTAAAACAACTGACAGCC
CCGGATGAGAACATCCCAGCGAAGATCCTTTCTTATAACCGTGCCAATCGACCTGTTGCAATTCTTTGTAACCATCAGAGGGCACCACCAAAAA
CTTTTGAGAAGTCTATGATGAACTTGCAAACTAAGATTGATGCCAAGAAGGAACAGCTAGCAGATCCCCCGAGAGACCTGAAAAGTGCTAAGGC
TCATGCCAAGGTCATGAACGATGCAAAGACGAAGAAGCTAGTAGAGTCAAAGAAGAAGCCTGTTCAGAGACTGGAGGAACAGTTGATGAACCTG
GAAGTTCAAGCCACAGACCGACAGGAAAATAAACAGATTGCCCTGGGAACCTCCAAACTCAATTATCTGGACCCTAGGATCACAGTGGCTTGGT
GCAAGAAGTGGGGTGTCCCAATTGAGAAGATTTACAACAAAACCCAGCGGGAGAAGTTTGCCTGGGCCATTGACATGGCTGATGAAGACTATGA
GTTTTAGCCAGTCTCAAGAGGCAGAGTTCTGTGAAGAGGAACAGTGTGGTTTGGGAAAGATGGATAAACTGAGCCTCACTTGCCCTCGTGCCTG
GGGGAGAGAGGCAGCAAGTCTTAACAAACCAACATCTTTGCGAAAAGATAAACCTGGAGATATTATAAGGGAGAGCTGAGCCAGTTGTCCTATG
GACAACTTATTTAAAAATATTTCAGATATCAAAATTCTAGCTGTATGATTTGTTTTGAATTTTGTTTTTATTTTCAAGAGGGCAAGTGGATGGG
AATTTGTCAGCGTTCTACCAGGCAAATTCACTGTTTCACTGAAATGTTTGGATTCTCTTAGCTACTGTATGCAAAGTCCGATTATATTGGTGCG
TTTTTACAGTTAGGGTTTTGCAATAACTTCTATATTTTAATAGAAATAAATTCCTAAACTCCCTTCCCTCTCTCCCATTTCAGGAATTTAAAAT
TAACTAGAACAAAAAACCCAGCGCACCTGTTACAGTCGTCACTCTCTATTCTCATGGGGATCAATTTTCATTAAACTTGAAGCAGTCGTGGCTT
TGGCAGTGTTTTGGTTCAGACACCTGTTCACAGAAAAAGCATGATGGGAAAATATTTCCTGACTTGAGTCTTCCTTTTTAAATGTGAATTTTAT
TTCTTTTTAATTATTTTAAAATATTTAAACCTTTTTCTTGATCTTAAAGATCGTGTAGATTGGGGTTGGGGAGGGATGAAGGGCGAGTGAATCT
AAGGATAATGAAATAATCAGTGACTGAAACCATTTTCCCATCATCCTTTGTTCTGAGCATTCGCTGTACCCTTTAAGATATCCATCTTTTTCTT
TTTAACCCTAATCTTTCACTTGAAAGATTTTATTGTATAAAAAGTTTCACAGGTCAATAAACTTAGAGGAAAATGAGTATTTGGTCCAAAAAAA
GGAAAAATAATCAAGATTTTAGGGCTTTTATTTTTTCTTTTGTAATTGTGTAAAAAATGGAAAAAAACATAAAAAGCAGAATTTTAATGTGAAG
ACATTTTTTGCTATAATCATTAGTTTTAGAGGCATTGTTACTTTAGTGTGTGTGCAGACTCCATTTCCCACATCTTTCCTCAAGTATCTTCTAT
TTTTATCATGAATTCCCTTTTAATCAACTGTAGGTTATTTAAAAATAAATTCCATCAACTTAATGGAAACTTAA
HUMAN SEQUENCE—CODING
ATGAGTGGGGACCACCTCCACAACGATTCCCAGATCGAAGCGGATTTCCGATTGAATGATTCTCATAAACACAAAGATAAACACAAAGATCGAG
AACACCGGCACAAAGAACACAAGAAGGAGAAGGACCGGGAAAAGTCCAAGCATAGCAACAGTGAACATAAAGATTCTGAAAAGAAACACAAAGA
GAAGGAGAAGACCAAACACAAAGATGGAAGCTCAGAAAAGCATAAAGACAAACATAAAGACAGAGACAAGGAAAAACGAAAAGAGGAAAAGGTT
CGAGCCTCTGGGGATGCAAAAATAAAGAAGGAGAAGGAAAATGGCTTCTCTAGTCCACCACAAATTAAAGATGAACCTGAAGATGATGGCTATT
TTGTTCCTCCTAAAGAGGATATAAAGCCATTAAAGAGACCTCGAGATGAGGATGATGCTGATTATAAACCTAAGAAAATTAAAACAGAAGATAC
CAAGAAGGAGAAGAAAAGAAAACTAGAAGAAGAAGAGGATGGTAAATTGAAAAAACCCAAGAATAAAGATAAAGATAAAAAAGTTCCTGAGCCA
GATAACAAGAAAAAGAAGCCGAAGAAAGAAGAGGAACAGAAGTGGAAATGGTGGGAAGAAGAGCGCTATCCTGAAGGCATCAAGTGGAAATTCC
TAGAACATAAAGGTCCAGTATTTGCCCCACCATATGAGCCTCTTCCAGAGAATGTCAAGTTTTATTATGATGGTAAAGTCATGAAGCTGAGCCC
CAAAGCAGAGGAAGTAGCTACGTTCTTTGCAAAAATGCTCGACCATGAATATACTACCAAGGAAATATTTAGGAAAAATTTCTTTAAAGACTGG
AGAAAGGAAATGACTAATGAAGAGAAGAATATTATCACCAACCTAAGCAAATGTGATTTTACCCAGATGAGCCAGTATTTCAAAGCCCAGACGG
AAGCTCGGAAACAGATGAGCAAGGAAGAGAAACTGAAAATCAAAGAGGAGAATGAAAAATTACTGAAAGAATATGGATTCTGTATTATGGATAA
CCACAAAGAGAGGATTGCTAACTTCAAGATAGAGCCTCCTGGACTTTTCCGTGGCCGCGGCAACCACCCCAAGATGGGCATGCTGAAGAGACGA
ATCATGCCCGAGGATATAATCATCAACTGTAGCAAACATGCCAAGGTTCCTTCTCCTCCTCCAGGACATAAGTGGAAAGAAGTCCGGCATGATA
ACAAGGTTACTTGGCTGGTTTCCTGGACAGAGAACATCCAAGGTTCCATTAAATACATCATGCTTAACCCTAGTTCACGAATCAAGGGTGAGAA
GGACTGGCAGAAATACGAGACTGCTCGGCGGCTGAAAAAATGTGTGGACAAGATCCGGAACCAGTATCGAGAAGACTGGAAGTCCAAAGAGATG
AAAGTCCGGCAGAGAGCTGTAGCCCTGTACTTCATCGACAAGCTTGCTCTGAGAGCAGGCAATGAAAAGGAGGAAGGAGAAACAGCGGACACTG
TGGGCTGCTGCTCACTTCGTGTGGAGCACATCAATCTACACCCAGAGTTGGATGGTCAGGAATATGTGGTAGAGTTTGACTTCCTCCGGAAGCA
CTCCATCACATACTATAACAAGGTCCCTGTTGAGAAACGAGTTTTTAAGAACCTACAACTATTTATGGAGAACAAGCAGCCCGAGGATGATCTT
TTTGATAGACTCAATACTGGTATTCTGAATAAGCATCTTCAGCATCTCATGAAGGGCTTGACAGCCAAGGTATTCCGTACATACAATGCCTCCA
TCACGCTACAGCAGCAGCTAAAAGAACTGACACCCCCGGATGAGAACATCCCAGCGAAGATCCTTTCTTATAACCGTGCCAATCGAGCTGTTGC
AATTCTTTGTAACCATCAGAGGGCACCACCAAAAACTTTTGAGAACTCTATCATCAACTTGCAAACTAAGATTGATGCCAAGAAGGAACAGCTA
GCAGATGCCCGGAGAGACCTGAAAAGTGCTAAGGCTGATGCCAAGGTCATGAAGGATGCAAAGACGAAGAAGGTAGTAGAGTCAAAGAAGAAGG
CTGTTCAGAGACTGGAGGAACAGTTGATGAAGCTGGAAGTTCAAGCCACAGACCGAGAGGAAAATAAACAGATTGCCCTGGGAACCTCCAAACT
CAATTATCTGGACCCTAGGATCACAGTGGCTTGGTGCAAGAAGTGGGGTGTCCCAATTGAGAAGATTTACAACAAAACCCAGCGGGAGAAGTTT
GCCTGGGCCATTGACATGGCTGATGAAGACTATGAGTTTTAG

[0296] TABLE 32
MOUSE NOMENCLATURE
ICSCNM Dusp10
Celera mCC15978
HUMAN NOMENCLATURE
HGNC DUSP10
Celera hCG25031
MOUSE SEQUENCE-GENOMIC
GAGAGAGATCAGTTCTTTGTCTCAAGCAGACCTTTGGCTTACTGGATTAGGCTTGTCCACACACTTGAGAGTGGTGGTCTCTTCATTCAAAGTC
TGTCAATTCAAATGTTAATCTCATCCCCAAACATCCACACACAGAAGCAAGCTGAGTCACATCTGCTCACACATCTGCCCCTGGCGGGCCTGTT
AACACCGTCTGGGGGGAAGATGGCACTGGCTTCAACTGAAGGAAGAGAAATCTGCATCCTTGTAAGCAGGCTGCAGTGTTTGATTTTGGACTTC
TAGGTTGGGGATAGAGTGTCTCTGATGAGCATGTCTCTAAACATCTGTCAGCATTGATACCCTCAATTTCCCTAGAGGTTTCTGGGCGTTTTTG
TCTCAGAAGCCCCTAAGGTCTGGGTGGATAAGTGATGACTGTCATTTGAATCAGGACACTTGCCCTAAAACCCACCTTCCTGAGTGTCTGTTGA
GTACCATCGCACTGAGTGTCAGATACAAGAATGCGTAACCACCAAGGACTCAATAGACCGGTCCATCCTTCTCCAGGCCCCGTGATAGTCAGTT
TGACTCAAGACAGATCTGAGTTGGATAACATATCTTCCACTTGTATCGACTCCTTGCCTTCTGCATTCTCACATATATCCTTTCTAAGCCAGGT
ATTAAGAAATTAAAAACTCAAAAAACAAGTCCAGTGCTAGTCAGCTTTCCTTTGTTCCTGTGACTTGATGCCTGAGAGAAACAGGCTAAAAGAG
AAAGGCTTGTTTGGCAGGTGGTTTGACTCTACCTTGTTCCTGGGCCTGCGGTTACCTCAGAAGGCGCTCACCTCTTTGTGGCCAGGAAACAAAA
AAGAGAAGACAAAAGGAACTGTCACAAAACACTTCTTTTAATGGCCCACTCCTAGTAACCTACACACTCCAACTAGACTCCACACCAACAAGTT
TCTCCCACCTTCAGGCAATACCTTAAACTTCTAAGGAATAAGAGAGTTAATCTGGATAAGAGGTCAGGACCCCTACAATCCAATCACCTCCTCA
AAGCTCTTGGCCCTCCAAGATCAGAAAACAAAAGAAAAGTAGACAATTTTTATAGAGTCAATTTAAGGAACCCTGTAGGCTGAGAGCTAAGGAC
AACATCCACAAAATCACACAGAGGATGAACTACACAGCACAGGATGCTCGCGGGCAGTTGGTCTTATCTCGGGGTCACTTGCTGGTTCTGCTGT
TTTCTGGCTGAATGCGCTTGGGTAGACACTTTGTCTTTGCCGATACCCACATCAGTCTTCAGAAGAGAGCTACTTGATCTCTGATGCTAAGGTG
GAGATTTAAATGTCTTTGTTTGTAAAACAATCACATGCTGCTCTCAGCCCAGAGAAAGGAGGAAGTCCCATCAAACTTCTTCTCCACACCCTAG
ATCTTTAGAATCAGGTAGTGTCTTAGTCAGGGTTTCTATTCCTGCACAAACATCATGACCAAGAAGCAAGTTGGGGAGGAAAGGGTTTATTCGG
CTTACACTTCCATACTGCTGTTCATCACCAAGGAAGTCAGGACTGGAACTCAAGCAGGTCAGAAAGCAGGAGCCGATGCAGAGGCCATGGAGGG
ATGTTCTTTACTGGCTTGCCTCCTCTGGCTTGCTCAGCCTGCTCTCTTATAGAACCCAAGACTACCAGCCCAGAGATGGTCCCACCCATGAGGG
GCCTTTCCCCCTTGATCACTAATTGAGAAAATGCCTTAGAGTTGGATCTCATGGAGGCATTTCCTCAACTGAAGCTCCTTTCTCTGTGATAACC
CCAGCTGTGTCAAGTTGACACAGAACTAGCCAGTACAGGTAGGTTGATAACTTGCTTGTAAAGACAACAGAGCACATTGAGGCATACTGGGACA
TCCTAAGAGTCTGCTATATCTGCATCCCAAGCAAGAGTTGCTAAGATTACATTTGCAAATTTGGAGAANNNNNNNNNNNNNNNNNNNNCCACCC
CCACCCCTAGTACACATCAAGTCCCTTCAGACAAGATGCATCCTCCCCCACTGAGGTCAGACAAAGCAGTCCATTTAGGAGCACAGGATCCATA
GGCAGGCTGGCTGGTAGGCAGGCAACAGACTAAGAGACAACCTCTACTGTTTTTGGGGAACCAGCATGAAGACCAAGACCATCTGCTACATATG
TGCAGAGGGCCTAGGTCAAGTCAGTGGTCACACTCTCATTGGTGATCAGTCTCTGGGAGCTCGTAAGGGTCCATGTTAGTTGACTCTGTTGGTC
TTCCTGTAGAGTCCCTGTCCTTTTCAGGTCTCTCGGTTCTTCCCCAAGCTTCCCCCAAGCTCCATCTATTGTTTGGCTCTGGGTCTCTACATCT
CTTTCATCTCTTTTTGGCTGCTAGGTAGATCCTCTCAGAGGACAGTTATGCCAGGTTCCTATCTGCAAGCATATCTGAGTATCATTAGTACTGT
CAGGGACTGGTTCTTACCCATGGCCTGGATCTCAATTTGAGACAGTCATTGGTTGGGTATTCCTTCAGTCTCTGCTCTATCTTTGTCACTGCAT
ATCTTGTAGACAGGACACATTTTGGGTCAAAGGTTTTTGTGGGTGGGTTGCTGTCCTTCTCCCTCCACTGAGATCTTGTCTAGCTACAGGAAGT
GGCCACTTTAGGATCCATGTTCCCCACTGCTACGASTTTCAGTTAGASTCAGCCCCATASACCTTCTGGACCCTCTCCCCATCCCAGGTCTCTG
GTATGTCCTAGAGATTGTGTCCCCCTCCCCCCACCCTTCCTTCTCCCTCTCCTTTGCTCCACTTCCTGTTCGCTCATTTGTGTATTTATGGTTA
ACTATCTGAGCTCTCCACTTTCTGTTCCTGCTAAGCCTGTCGCTTGCTTCCATGCCTCTCTGTTCACCACGGTGGACTTTTATCCCTTTGGAAC
TATAAACCCAAATGAACTCCACTCTTCTGTAAGTTCCCTCCGTCATGCTGTTGGATCATAGCAGAACCAAGAGGGCTACATTTCTTTCTTTACT
GTGTGTGTACACATGTTCACATATGGGTATACTCATTCCTGAGGGATGTGTGGAGGTCAGGAGTGAACACTTGGGTTATTATTATTTTTAAAAT
ATGTGTATGGGTGGTGTGTGTGTGTGTCTGTGTGTGTGTGTGTATGTATGTATGTATGTATGGCATGCCTGGAAACAATGAAGCCCAGAGGAGG
GCAGTGGATTCCCCTGGGACTGAAGTTAGGATGGTTGTAAGCCACACTGTGGGTCCTGGGAATCAAATCCAGGTTCTCTGGAAGAGCAGCCAGA
GTTCTTCCTCTTTGSTCTCTGGGATGCCATCTTAAATCCTTTCTCTACCTTACTTTTTGGGGTAGGGTCTCTCACTATCTCTCCAGCTCACTGC
TTCAGTTAGACACACTAGGAAGTAAGCCTCTGGATTGGCCAGTGTTCCTCCTTCAGCTTACACAGTAAGTGCTTTCACCCACTGAGCCATTTCC
TCAGCTCTCAATTACGATTCTTAATTTTTTTTTTTAAAAAGAATATGTGTGTCTTTGTGGGAGTATGCGCATGTGAGTAAAGGTGGTCTTGGAG
GTCAGAAGAAGGTACCTCAGCATCTGGAACTGCCACTAAATTTGGTCATGAGCTAATGAAAGTAAATAAAACTTGAGACATGTGATTCATGTAA
TTTATGTCAAATAGCCCAAAGAGTTGTTTGTGAGCTTTAAAACCTGGGGCTGAAAACATAGCAGAACAGGCCAGGACATGCCCGGGCAGGCCCG
TTGTTACATGTCCTGACTGGCCTAGTGCCTCCCTATCTCCTGCCCTTCTGACAGTCTGTTGATGTTTAAATGGACCAATCATGTGAAACCGAGC
CAATTCCTCCCCCAGCCCCACCCCTTTTCTATAAAATCCCCTAGCTTCCAAGGCTCGTGGTCGAAACCACTGTCTCCTGCGTGAGATACGTTTC
GAGCCAGAGCTCCGCCATTATGGCTCCACCATGTGGTCGACACCTCTGTCTCCTGCGGGAGATATGTGTCAGCCCGGAGCTCCGTCATTAAACT
ACCTCATGCTTTTACATCAAGATGGTCGTCTGTTCGTGATTCTTGGGTGCATGCCGAACGGAAATTGAGTGGGGGTTTCCCCACTAGGTTCTTT
CACTACCACGTGTAGGTGCTAGGGACAGAACTCAGGCCCTCTGCAAGAACAGCAAGCATACTGTAGCAACTGAGCCATTGCTTCAGTTCCCTCA
TCTATGTTTTATGTAAACCTTATACATATAACCTTAAAGATTTATTTATATATGAGTACATTCTTCCTGTCTTCAGACACACCAGAGGAGGGAA
TCAGATTCCATTACAGATGGTTGTGAGCCAACATGTAGTTGCTGGGAATTGAACTCAGGACCTCTGGAAGAGCAGTCAGTGAGTGCTTTTAACC
GCCAAGCCATCTCTATTTTTTTAATACTTTTTATTAGATATTTTCCTCATTTACATTTCCAATGCTATCTCAAAAGTCCCCCATACCCTCCTTC
CCACTCCTCTACCCACCCACTCCCACTTTTTGGCCCTGGCGTTCCCCTGTACTGGGGCATATAAAGTTTGCAAGTCCAATGGGCCTCTCTTTCC
AGTGATGGCCGACTGGGCCATCTTTTGATACATGTGCAGCTAGAGTCAAGGGCTCCGGGGTACTGGTTAGTTCATGATGTTGTTCTACCTATAG
GGTTGCAGATTCCTTTAGCTCCTTGGGTACTTTCTCTAGCTCCTCCATTGGGGGCCCTGTGATCCATCCAATAGCTGACTGTGAGAATCCACTT
CTGTGTTTGCTAGGCCCTGGCCTAGTCTCACAAGAGAGAGCTCTATCTGGGTCCTTTCAGCAAAATCTTGCTAGTATATGACATGGTGTCAGCG
TTTGGAAGCTGATTATGGGATGGAACCCTGGATATGGCAGGCTCTAGATGGTCCATCCTTTCGTCACAGCTCCAAACTTTGCCTCTGTAACTCC
TTCTATGGGTGTTTTGTTCCCAATTCTAAGGAGGGGCAAAGTGGTCTTTGTTCTTCTTGAGTTTCATGCGTTTAGCAAATTGTATCTTATATCT
TGGCTATCCTAAGTTTCTGGGCTAATATCCACTTATCAGTGAGTACATATCACGTGAGTTCTTTTGTSATTGGGTTACCTCACTCAGGATGATA
CCCTCCAGGTCCATCCATTTGCCTAGGAATTTCATAAACTCATTGTTTTTAATAGCTGAGTAGTACTCCATTGTGTAAATGTACCACATTTTCT
GTATCCATTCCTCTGTTGAGGGGCATCTGGGTTCTTTCCAGCTTCTGGCTATTATAAATAAGGCTACTATGAACATAGTGGAGCATGTGTCCTT
CTTACCGGTTAGAACATCTTCTGGATATATGCCCAGCAGCCATCTCTATTTTAACATACCTGCATTTAGAGATTTCCATTGGTAACATGAATAT
TGGTGCTCAAAATGCGTTGAATTTGGAAGCATTTTGCATTTCCAGATTGAGAATGTTCAACGCCTGTTTAGACCTGAAGTCCTGGGATGGTTAG
CAATGTCACACAGTGCTTGTTTCCCTTCCAGTACCCTACCTCAGTAAGATCACCTGCAGCTCCGAGCCAGACCTTGGCAGTGACTTCTAAGGTT
GAAACTCAGTGGTTCGGCTTGTTGGGGGGGCAGGAGGAATGTGGACAGCGTTTAGTGTGGCAACACATCGTACTCATTAGAAGCCATCAGTTCA
CTATGAACTGGCTCATACGTTAGGCATTATCAACACCGTTGGGCCTACCAGAATGCTCTTCTGACATAGAGCAGCAGATATTTGTGACATCACA
AGGCAGTGGCAGTCCACGGGGCAGGAGCAAAGACAGCTTCAGAGAAAGGGTCTTGCTGCCTAAGTGAAGACAAGGGGACTGGGCCTCACCTGTC
CAGCCAGTCACCTCTGTGCGGCCAATGGAGGTCAGCTTGAGTTTTGAAGAGATGTCTGGGCCAAGTCCTGTATCAAACATTGGTTTGGGCTTAT
GCTATCTTTATCTCTGGGCCTCTAMTGATCTCAAGATACACAGACAATACAGATGGAGCTGTCAGGCTCTCTCTCTTAAATGACAAAAGATGGC
TTTGTGGTCTCTTGAGTAAAACATGCCCCTGGCCCCCATCTGTACATCTATATACCTGTGAGGGAGTAACCCTGTCATCATATACAGCTGGTCT
CCACTCCCAGTCACAAGGCCCCACTTCCTTCTAGTTCATCTTGTCAGATAGCCTAGAGGGCCTCTGATATCCTAGTAGAGTGGTTATCTTGGCA
ATCCAAGTGGCTTCAGATGAAAAGCAGCCGTGGCAGGCTCCAGAATGGTGTCATCCAGCAAAAATGGAGTAAATAATCATCTTAGGCGCTCTCC
TAGTCACATGTGAACTAAAAGATGAGTGAAATTGATTTTAATGACATGCTATGAAACCTAGTATATCAAAAAACATAAGCAACACAGACATAAT
ATCCTTTATGTCTTTCACAGGTTTTCATATCCAATGTGTGTTCTACACTTGATGTGTCTTGGTTCCAACCAATCACATTTCAGGTCTTCTTCAG
TCACATGTAAATGGCCACCATTCTACACTACATGTTTGCTCCTTACAGGTAGTAGTGAAGATCACTCCTGCCTCTAGGGCTACAACTTAGGTTA
CTCCTAATGACAGAGTGCAAGATCTGACGACTAATTCAGTCTCAGCAGTTAAAAACAGAACTTCACTTCCCAGAGTTCTTGAGTCTGAGGAGAC
AGATTAAGGCCTCTGGTGAGGGCCTAGCCTCTGCTTCCAAGATGCACTGTCACCGTGTTCTGGGGAGATGATGCACGACATATACACACCATGC
AGAGAGGACACAATAATTCCCTTCCCAGTTCCATCTGCAAGGCCCTGCCCTCATGGCATTACCACCTCAGACAAGTGTCTATCCCTTGGATACT
ATCACACTGAGGACTGAAGTTCAACATGCGAGTGGACCTTCGTGGCCTCTTTCTCCAGGGGCTGCTCCTAGCCCAGGTCTACCCTCGCGAGGGT
TGTGAAGTATTTCCCAGCCGTACTCCTGGGACTTCATCTCCTACTTCCTCCTTTCTATTCCCCAGTGCCTTCCCTATTTCCTGATTGAATGCCA
CCTTACCTGGGGATTTAACTTTGCCAACTCCCTTTCCCTAACCGAATCCGGGAATCTATCTTGGCCTTCAGGGCTATTGAAAGACCTCACCATT
CTGCCACCAAGCACCTGACTTAACCTCTTGAACATGCCCTGTATCAGTCTGTTTTCTGTCTCTGATCTTGGCCACAATTAGCTTTGTCCTTCAC
CTCTAACACACAGCACAAGGATCTGGTAGAAACTCTATCCCTCCTTTCAGTAGCAACAAGTCACAGACCAGCATAAGTGCACTACGTGGCCCAA
GGGCAGTAAAGAGGCTTTACTCTTTCTCTGGGACAAAAACTAAACAGCAAGGTGTTCCTGGGTATCCGATTGTGTTCATGGCCCTTTGCTGACT
GACTGATCCCATACATTTAAACTTAAGGGCTAAGTTTTAGAAAGTATTTTTACATTATGACTCCAAATTAGTAATTGAAATCACCTCCCTTGGC
ACAAAAGCATCCTGGAGTAGTGAGTGGAAAAACCTACCTGGAATCTGACTTCTTTGAGTATAGCTACTCAAACTGCTGCCTAATTTAAAAAGCC
TCCGGATCTTTAGCATATGTTAATGGCTGGTAATTACCATGCATATGTTAATGACATGGAAATTACTCAATGCTTCGGGTTTGATTGATGAATA
ATTTTGTCAGTTTTCCCAATTTTTCAGCCTGGATGACAGACTTTTAGTTAACAGAATTACTATAACTTATTAGTCTGAAACTATAATAATCATC
TCATTAAATGAGTTACATTTCTTTCTCACATTGCCGGCATCAGGCTTTGTGGATCACAATTTACAGGTTGTCAGTACCTTTAGACAGAGGCTCC
TCCAGCCTAAAGCAAACACAACCTTCCCAGCCTTCGGTCAATAGAGAGCCTCGCTCTACTATACCCCGTAACCACTTCCACAAGCATCTTTTCA
TCTTTTTCGGAGCAAGGACGGGAGTTTGCTGTTTACAAATGTACACAGTGATGAACACAGCAATGTGGCTGGACAGACAAGCATCAGACCTTAA
TACCTAGAACTCAAACCGTAAATGGGAACCCCAGCATACATACATCCAGTAAATATTCAGGGATATAGATAACCTACAAAAGTGCTCTGGGAAA
TTCTTTTCTGGGTTCCACGGAAAATGCGCACAGCCTACCTCCTCCACTAGCCTGATCCTGCTAATCCTCAAAGATCTAAGGACCAAAGGGTGCG
ACCTGGACACTCGTGTGCAGACATTCGGGTGTGGGTCCTGTGTATTTGGGTGTGTAGACAGAATGGGGCTAAAGAAAATCCTTTTCCAACCCCA
GTGTGCCTTCTGTAGTGGTGCTCAACTCAAGGGAGATCATGCTGAATCGACAGAGCTAGTCAGCGTAGGGTGATCATGGTTGGACACCTTATGA
TCCTAGATCAACAGCAATGGTGAATGTCTGGGGCCTAAAGCAAACGCCTCCATCATTAAGGACATCTGAACCTGCCACGGAGCTGATAAGTGTT
TTATTCCACTTCAATTACTTCACATTTTGGTCTTCCTCTCTGAGGGGGTAGGGAGGTATAAAAAGCTCTATTGCTTTAGGATTCTTTAACGCAA
NNNNNNNNNNNNNNNNNNNNTTTCTGGCAAGGTCGCTAGCAGGCTTGCTCAGCTTCCCACTTCTCTTCACCGGTGACATACCCCGACCAGTAGT
GACCCCTCTGATGGACAAGTTCGGGGAATCGGGAGAGCTGGCGTGGGCCCTTCCATGCTCCTCAGGCGCCGCTCATTCTGGCTGTTCGTTCCCG
AGCTCTCGCTCCTTCCCGCCGGCGCTTGCTGTTCCAGGCTGGCGCTCCTTGGCTCGCCGAGGGCCCTGCGCCACTGAGGACCGGGGGCGGCCCA
GCACCGGGGGGCGGATGGACTGCGGGCTCCAAAACATCGCACAGGGGGAGGTGGCCGCGGGAGAAGCGGGGACCGCGTTGGGAGGAGGTCGGTG
CCTGGGCTCCGGGGCTTGTGGGGCGTTCGGAGGGCCCCGCCACGCCCAGCTCTGCCCGACGGCGCCCACGCTGCCCTTCAACACCGGCCCCCAG
TGGCTGCTCTCACAGAGCCAGGCGTCCTCCTCCGAGTAGCTCTCCGGAGTGCCGCCTTCGGGATCGGAGTCGCGCTCCTGAGTCCAGGTTGGGG
ACGGCGGAGGACTGACAGGGTCACGGAAGTAGGGGAACAAGAGCACGGCGCGCAGCCGCCGCGCGGGAGAGCAGTAGTTCAGCCGGAGGGGCAG
CGACATCTCCGGGCCGGGCCAAGCGGGGCTGCGGGGAGGCCGGCCCTGTCCACGCTCACGTCCCGCGCGCCGCAGCCACAGCAGTGGAGGCACC
CGGCTTCGAGTCGTCTCCGGCCTGGGGAGTTGGATGGACACTCCACCTGGAGTCAAAAGGCGGATAGTGGAGACCCCGCGAGGCTQATGTCCTC
AACAGGGGGCGGGGGAGGGTCAGAAGAACCAGTTTCAGCCGGAGCGACCAGAGCAAGCCATTGACACTTCAGTCCCAGGAAGGGTTAACCGCGT
CCTGCTGCCTAGGTTTACATGTAAATAGAGAGCCGCTGCTCCAAGCGGGCCCGGGCTAGCACTTTTAAGTTTTTGATTGGTTGCCAATGACATC
ACCACCCGCGCGTTCTAACACACCAAACCCACTAGCGGGTCCGAGCCGGCCTCCCTCCCAAGGCGAGGCCTCGCCCCTTTCTCCGCCCTCCTCG
GCTTCTTATTGGTCAGAGACCACTCTGATGTAGCGGGCGGCAGCCTCTGGGTCTTCATTCGCGTATCGCGCCGTCGCTCGGAGGCAACCCCGCC
CCCTCCAAAGCTTACATTTACGCTGTAGCAAAAGAGAAAGTAACTCTGTGTTGCTGCTGGGGATCAATGAAGCTGAGTGAATGGGGGCGCACTG
CGCGAGCGCATAGCTGGAGCGGGCGCCAGATGGTAGACGGCTACGCTTATTGATGAAGTAAGTGGAAGACATCACGGGTCACTCAGAGCCGGAG
GGTGGAGGGTTCCGTGTGTGTGTGTGTGTGTATGTGTGTGTGTGTGTGTGTGTGTGTGTGTGTGTGTGTGTCAGTGAGAGAGAGAGAGACAGAG
AGACAGAGAGAGAGAGAGACAGAGACAGTGTCAGAGAGACAGAGACGGACCTACGTCAGGTAAGGAAGATCCTAAGGTTTAGTCTTTTGGCTCT
GCTTGCCCTGGGATGAAGAGGGGAAATGAGTTTTGGTTTGGTTAAGATGCTTTATGGCAGTTTTCAAAGCCCAGGCTTTGCGTCATGATGCTCA
GTGGTGGCACGGAATAGGGATGCTACGTGCCCCAGGAGTGGGGAAGGAGCATTCTTTAAGAACTTGGTTTTTCTTCAGTCCCTGTTAGTGGTGG
AAGGAAGATTAGCCAGAAAGGGAGGTAGGGGGTTCGTGCTATTTTTGTGGGAGGTTTCCCGGGCCAGACTGGCTTTGGAGCTATCTGCTGCAGG
ATGCAAATCTCAGTGCGCTCTGTGCCCGTGTGTGAGCAGCAGCACAGTGAAGAGGTACCCGTCCCAGCCTGTGTCTCTGGAATGTCGTTCCCGG
GTTCTCCTCCTAGGGAATAGGCTACTAATCCTGGATGTCCCCTTACCAGGTAGCAAAATAGCAAAGACTTTGACTGCATTCATGTTCCAGCTGG
GACACAGTTAACAGTTTTTGGAATAGTACTCGCTCTGAAAAAAAAAATACTACGCAAGGGAGAGGGAAGGAGGGAGGGAGGGGAGGGGAGGGGA
GGGAGGGAGGGAGGCAGGCAGAAGGTTTGATCCTTTGCTCCCAACCAAAGGTGGGTGAGAGAAACCCGAGTCAGTGGGGATATGCCTACACGGG
TGGGGACGTGCTCCTGGGTGCGCGTGTGTGGATTTTGCTGGTGACACTTTGGCTCGGTCTCAGAGAACAGTTACGGTCATGAATAGACCGATGA
TCCTTGATGTTTTTCCAGTCAGCTCTTAAAGTTCGTTTAGATGAGTGGCTCTTGCTTGGGGTTTGATTTCTCTAGTAGAGGAGTCAGAATTGCT
ATGTTATAGGGTGGCCTTGTGCCTACCGGGAGGAGGAAAGTGATCCATTGCAGGCACCCTTGGAGGAGGCAAAGGCAGCCCCCGTGGGCTCTAG
GTCTGAGCTTCCCAATTAGCCTAACTGTGGTAAAGGGACGAGTGAGGTTGCCCTCTTGGAATCCACACTGTTTCCAAGAAGAATATCAGTATAG
GGTTGAAACATTTTTTACAAAGTTGCCACTCCAGTGGAGATGCAAAGTCTGTCTGTATGACCAGATGAAACACATGCTCTTTTTTGCTTAGGGG
CACAGCATAGAGAAGTGTAAGGATGAGTGGGGTCACACAGGAACGGGCCATGGGTCAGCCTGGGGTGGGGTTCCTAGATCTGACTCCTTGGAAA
CTTGGTTTCTGGATAGTTATTCGTAGTGTAAGTGTGTGTGTGTGTGTGTGTGTGTGTGTGTGTGTGTGTGGTAATGGCTTGATTTGATTTGGAA
GAGTCTAATGTGAGCTCTGAATAGGATGACGTTGAGCTTTTCAAAGGACCCACCAGAATGGAAAGGAAGATTAGCTCCTAGCCATGGAGGCTGA
CTTAGGGAGACACATTCCTTCTGATATGCAGAAGGTTAACATCCAGCCCCCATGTAAATATAGCTAGCTGCCAAGCATCTCCGTGCATCTCTGT
GAGCTCCAACAGTGCTCTTGCTTGTCTCTTTGCCTTGGCTCTGGGGAAAGAAATGAAATACAGTACATGCCAGGGTGGACAGATGCATCCATCA
CAGGTGAAATAGACTTCTCTGCACAGGAGAGGAGGCTCAGAATAAATCTAAGAGCCTCCCTGTCTGCCTTCACTGTTTTTCAGGCCTCTGTGCC
TTTACCTCCACTAAGGCTGAACTTGGATGCATGTCTCTAACATTATGTGACAGGAGGTCTCTTACCGTTTCTAATGTCAAGTCTAATTTTAACC
TTTGACTTAGCATCAGAATGGATGGGGCCCCTCACGTATGCATCCTCTCTGAACAGATCAAAGTGAATTTTAGCCTTTGATAGTATCACAACCT
AGGGCACCTAGAAGGACTTTGACTTTCCTCAGAGATATGCAGAGGTCTTCCCCCGGGGATTGGATGAGACTGGCTTTGTTTTCATGTGACTTTA
TTTTTTTCTTTCTTCCCCTTCTTTCCACACTCTTGACTTCTTCAATTACCAGTTTTCAGCCTCCTCATCCCTCCATCTCCTTTACACGACAGGG
TAGTAGTGGCACTATCTAGGCCTGTCCGACCTCAGGATCTCAACCTTTGTTTAGACTCAAGCTACCTTGGCTCTGCCAGCCCAGGTAGTGGTAG
CCACGCTCCTGTCCTTGCCACCGCCGTTGTGACCCTCAGGCTGCGAATCTCACGTATATGCCCTCATCCAGCGGTCTCTCCCCCCTCCCTGAAT
TGCGGATGCAGCAGCACTAGCTGCTGCACTGTGGCAACCTACGACAAGGATCATCAGGCCCAGACTCAAGCCATTGCTGCAGGCACTGCCACCA
CCGCCATACGAACCTCGACCACCTCCCCTGCTAACCAGATGGTCAACAACAATGAAAACACAGGCTCTGTGTTAACTCCATCGGGTGGGGTGGG
CAGCCCTGTGTCAGGGACTCCCAAGCAGCTAGCCAGCATCAAGATCATCTACCCCAATGACCTGGCAAAGAAGATGACCAAATGCAGCAAGAGT
CACCTGCCCAGCCAGGGTCCCGTCATCATCGATTGCAGGCCTTTCATGGAGTACAACAAGAGTCACATCCAAGGAGCTGTCCACATTAACTGTG
CCGATAAGATCAGCCGGCGAAGGCTGCAGCAGGGCAAGATCACTGTCTTAGACTTGATTTCCTGTAGGGAAQGCAAGACTCTTTCAAAGAGGAT
CTTTTCCAAAGAAATTATAGTTTATGATGACAATACCAATGAGCCGAGCCGTGTGACACCATCCCAGCCACTTCACATAGTCCTCGAGTCCCTG
AAGAGAGAAGGCAAAGAACCCCTGGTATTGAAAGGTAATGACTCTCCCTTCCCTCCCCACCCCCACCCCCCACATTCCTTCCTCAAATAATGTC
CTGATCAGCTAGGTTTCCCTATGAGATTCTCTTACAAGTGGCAGCCTTCTTCTAACCCCAAGGCACCATGAACCAGAATAAAATAGCCTGTCTT
CTTGTCTCTACTTCGAACTTTTTCTTACTCTCTTGGTACATTAAGAAAGTCCAAGTAGCAATGAATTGATATAAGATCTGACTCCCAGCTTTGA
TCTGGCTGCCACTTTGGGTTGCCTATGACATTTTACTTGAGATCCTTTGCAAAAGGCACTTTGTACAACCAAGATGGTATCTCAAGCCATGCCT
TCTCTGCTAGCTCTGTTTCAGTCCTCGAGTGGGTTGGAACTTTTTTGATCTCTCAAGGCCTGACAAATGTCGATGGATCAGAGGAAGCTGCGTC
TACAGGTGCCAGTACTTTGTGGGAGAAACTCTTGCTGTTTCTCACCTGATGGTCTTGATGTTCTTATTGCTTCTAGTCATCTTCAACAAAGGCA
TGCATCTTTATCTTAAAGCCTCATTGAAAGTGTGAATTCTCCAAATGCATCCATTCCTCTCAGGAAGCTGCAGGGGATAGAGATGTGAACCGCC
TACAACCATCCTTCCTGGTATCACCTGACAAGAGTTAGCTTCTGTCTCTTCCCTAGAAGGAGTCATACATCATTTTCCCCTAGTGTAGAATAAC
TGATGACTGGACACCCCCCCCCCCCAAAAAAGGAATAGATGACCCAGTCTTCTCTGAGCTTCTGAGCATACAGTGTTGTCCTGACCAWGCGCAC
AGTCCACTTCCTCATCTTTGTCCTTTTGGGCTTTGAGCATTACTCTTCTGATAATATCTACCTAGTCATGATGGAGAGTCATAACTATCTTCGT
TTCGAATTTTGAGCCATTGTGTGCATGGTGGGTGGGGTGGCGTGGGGTGGAGTCCAGAAAAATAAAGGACCTGGGTAAGTCATCTGTCCACCTC
ACTGAAATACTGACTCTTTTCTAAACATTGAAACAAGAAGATCCTGGAAGCAGCGAAGATTTTCCTATTGCTTTAGTACTGATGTCAGATCACT
GTATGGAACAATGCTACTTAACAATCCTCATTAAAAAAAAAAAAAAGAAGAAGAAGTAGATGGCTTATTACTATAAATTATTTTGTATTATAAT
TATGTTGAGWTTTTAATCAATATCACTCTTTACAGGCCAGACATCATTTATAGTACTTAAATAACCACTATTTAATTTAATCTTCCCTTGGCCC
CATCCCTTGCCCCCACCCCACGTGAACATCGTCATTATCTCCATNNNNNNNNNNNNNNNNNNNNNNNNNNNNNNNNNNNNNNNNNNNNNNNNNN
NNNNNNNNNNNNNNNNNNNNNNNNNNNNNNNNNNNNNNNNNNNNNNNNTTAGCCTGTTGCACTTCCCTTGGTCCCATCTTGTCTTTCTTTTCAC
AGCTGAGAAAACACCATCTACAAATCCCCACACCTGTAACCAATAGCTTTGTAGGCATCTTTTCTGCCTCCTGAAGATAGGATAGGTTTGCTAA
AAATCAACCCCTTTTGTCTGTGTCATCTAAGAAGAGTAAGCACACAACGTAGTTTATGATGGCTCTAAACTCGAACACAGGGCTGATTACGATG
CATAGATCCTATCCTAGCTCTTGCTGTGGAGCTTGGTGGGTAGAGGGATGGCCCATCAGTTGCTGAGAAATGTCTCTCTTGGGCAGTGCTGAGG
AAGAAGAAGGGATTCCTGTACTCTTCTCCCATAGGTACATCTGAGGATCCCTGCAGCCTGGGTTTGCTCATGGGAGTCAGTGTAAAGACTGCCT
CAGTGGGGCGGGGCTGCTGACCTCACCACCAGGCGCCCTCGGCAGCTGCGCTGAGGGCTCATCATTTCGGATTGGTTCGACCCTGGCGGCCGGC
TGGGAAGACGCTCTGGTGGTAGAGGTTGGGTTATTTGTAGTTTTCGGGGGGCTTGTTCCTTCAACTATCTTGGAATTTGGTTGAAAATACATAG
TTCAGGAGTAAAAGGTCTGGTCGTCTACTTTGTTGTCATTATTAAGTGGTACCTTTGTGAGGAATGGCCTAAAATCAGGATCAAGTTAGGGAAG
AGCTAAAGGAGATGGGACATGGAGTCCCCTGTTAGCCTCTTCTCTGCTCAGACCAGAGGTTAATGTCAGAGCGCCCTTGACZTAGAGATGAGAC
GTGCTTTTCTCTCAACAAGTATCGTGTGCAGCTTCTCCTAGGTTCTTGAGTGGATCAAGCACACCATCCTGGGCTGGCTTCTCTTCTGACGTTT
ATTTTAGGATTCACCTTGTTGGTGAGCTGAGATTGTATTTCAGCTAGTGGGGGAGTGGTACCATTTTGGAGTGAGTGAATTTTGTAGGGAGCCT
GTGTCTGCTGGGGTGGGGTGGGGGTAGATGGTTTGACTATATGGTTGTAAGTCCCCAGGCCTTCTTGGTTTATTTTCACAGATTTTTTTTTTTT
TCCCAAAAGATGCCTGATCCGTCTGACQTTCTGGTTCATGTTTGTAAACACCGGTTGCTACCCTCCCGTTCCAACTTTTATGTCCCTCAGTTTC
AATGCCACGGTCTCCATTTTTGGAGCTGCCTGTCGGGCCCGGTGGCGGCTGGGTTGCCATTTTAGTTAAGCAGTGTCAGGTTGGGACGAAACTG
ATCGGAGGCACAGAAGCCCCTGGGATTAAGTTACTGTTCTAATTTATAGTCCCCGCCCCGCTGTGACCTAGGTCTGAGACGGTGTAGTCTCTGG
CTTGTTCTTACCCACTGAAGGATATAGAGCACCAGGCCCTTGTTTCTGGTCAACCTCCTCTGAGTGAGCCACATGAATAGCTCTTTAGAGACTC
AGTCTTTGAAACCATTGTAACCTTTCCCAACCAGTGTTGATTGTTGTGATCATCTGTAACTTGCTCTCCAACCTCAAGGCTCGACAGTCCTTGA
CCTTCTAAGACGAGAGGTGCTGTTCTGTTGTCACATCTGTCCTTTTTCACATCACTGGGGTCAGGGAACTTATTTGTCCTTTATATATGTGGGA
AGGGCATGTTTTCTACAACTCTTTCTTGGTAGCCGTGGCCTTTAAACCGTTATGATCACAATTTTCAAAGTGAACCCCTTTATTCCCAACCAGA
TTAAGTATATGCTTCACCTATTGGCCTTCCCTTCCTTGTTTTTGAAATATTTTATGTCTTATGCTATAGTCTACTGTTTAGAGTTAGTGTTATA
TATTTAATTGAGCTGGGAGTATTTTACAGAGTGGTGTAGACATTTTTTTGTTTTTTTGCCCCCAAGTTAGACATGTAGTGTCATATACCTGCCC
AGGACTGTTCTCCAAATGTGGAATCCCACTGTTAGTGACTCCCTCTTGAGTCTCAGGACACGCCTCCCTCCCCTTCCTGGACACCCTCTTTCAG
GGCCTGTCTCTGCCTGTCCAATTGTTATGTCAGAGTCCAGGCCTGTACTTGCTGCATGCTCTCACATGCGATGGTAGACTGTCTGCTCTGGGTT
TCCAGAGTTCTGCTCTATACCAGAGGCTTTTTGAACGGGTTGTGGGGGTAGGGGTAAGGATGAAAAAGACGGTCAGGGAAGTAGCTTTGAAAGG
TTGATGCAGAGGGGAQAAGTCAGGCAAAGGAGTGAGATTTACACTAAAAACTTCCCCCTGATCTCCACTGTGCATTTTCGTATTAGAAGTACTT
TCTATTAAAATATCCAAACATAGTTGAACTATTTTCACTGTAAGACGGCATGATGAGTATAAATATGTAAGTTCATGTTATATACCCACCCGGA
GCTCCCAAACCTTCCTCTTAATTCCCGAATAAACAGCAAATGTGGTCTAACAGTTTCTCTTAATTAAAATAGATTCTGAAATATTCATTACATG
GCAATACCGACTCTCACGACAGCGAATGGCTACGCCAGGAAACTAGAGACCCTGGGAAAGTCTCCTTTGTCTGCTTTCTTCTGGGGGAGTAATA
TATCCGTCTTTGCTTTGTCTGCTCTTGTAAGACACACCTACACTGCAAACTTATTTTATTCTTGTAACTGTAATTCCAAATAGATCTGTAAGAA
AAAGCAGAGAAATGTAGGGAGAACTGCAGATCAGCAGGCCTCAGCACACTGGGTCCCTCCATTCAGTGTCCTTGGGCAGGCTGCCTAAGTTTGC
CTAAGCCTTTAGTTCTCTGGCTTCCTCACTGGTCACAAGAAGGCGCAGCACTGGTGTTGCACTTGGGATGTTCACTCAGGAATTCAATAAGCGG
AGGCTTGCAGAGTGTTCGGCAGAGCACCCTCTCCACCGAGCTCAGCAATATTTCTGTGCATTGAAATGTGTCAGTCAAAAGGTAGTTTGTCCTC
TTGCTCCCAGGGGTACAACAACGCTCGGTCTAGCTGTGTGCCTGCCTCTGTGTGTGTGTGTGTGTTGCTAGGGCCTAAAAATAACTTGATGACT
CTTACCTAATTTAAGTAGCATACAGTTGTGCCAAGTAATTGCAAAAACATGTTAGGTCAAGGGGCTGAGTAATTTGGGCATACCCTAGTATTAT
TCATTTGTAGGGCAGCTTAGGAAAATGGGATGATAAATCTGTCCAGCTAATGTCCTGGATAGGATAACAAAGTGACTAAACTTTTCAACTTTGT
CTTCTCTGGCCTCGCTTCGGATTTATTTTTGGAAGGAGGATTGTAGTCTGACTATAAAAGGGTAGGTGGAAGGAGGAGGGGTGTGGGCTGCTGC
AACCCTGAGTGCCAGAGAGGAGCTGGAGTGTGAGGGAAGAAGAGGAGCTGATGCTTGCTCATTTGAGTGGGTCCTGAATGCTCCCCCCGAAGGA
CTACAGGCTTGCCTGCCCTCCTTCCTTCATTGCAATCCAAGTGAAAGACAAAGGGACTTCAGCCCGCCCCTTTCCCATCCCTATTCTTACCCCT
CTGCTCCTCATAGGTAGCTTTTCCATGACACTACACTGCATATAGCCCCTATGGCTTTGAGATGCTTCGCTGCTTAAACAGAGGGGAAGGGCAA
ATTGGTCTGAACCCAGGACTCTGCATCATTACCAGGTCAGATCTATGAGCCAAACTGGGTTGAAATGAACTGGGATCAGCCAGCTGGGTTGTCA
AAGATGAGTTCAGGAAACTCTTGACAGTGTGGTGGGTAGTAGTCACGGATTGCAAACCGAGAAACTGACAGGAAAGCAGTCCTCCTCGTTACAT
TTCTAAAGCACATTTCTCCAGGAGGCATGAGTCGGGAGAAGGGTGACTGGGTGTTTCCCCGCTTAGTCTGTTTGTGCCAGCCCATCAGGTGGTC
TGATGAGATCACGAGGGCAGAAGAGGTTCCTGGGCGGAGGCCTCTGTAGCAGGCCGTGTTTCTCTATATCTTGTTGGCTGTGATCAGCAGTTAT
CTCCATTCTCCAAGATTCCTGGAGAGCAGTTTGAGTGTAAATTAGGGCCACACGACAGTGCTTAGGCAACTTTATCCACTTTGGTACCAAATAA
CTAACTACACACTTAACGATATTCTGTTTGTTTTGAGATGGCGGTGACTGTGGAGTTCAGGCCAGCCTGGAACTTGTAACGGTCATCTTTCCTC
TGCTGCCAAATTATGGCCAAGTGCTACTACGTCCAGCTTAAGGATAGAAATTCTGATCCTCAGAGCGGTCTTCTAATCAATTCTGGAAGGCTGT
TGATTCTATGCTGTCACTAGTGGATGATTGACACTCTCTGGNNNNNNNNNNNNNNNNNNNNCCAAAAGATTTTGATTCATTTGGTCTAAGGTAC
AACCTGCACACATGCCAAGATTTTGAAAAGCTCCCCAAATGATTCTCCTGCACAGTGAAATTGGAAAACCATTGATCTAGTTCGAGCTCGTTAT
GCAGTTATGGAAATGAGGCCTGGAGAGGTTTATGACTAATCCAAGGTCACACGCGTGATTAATTTCAGAGCCTTGGTCCTTTGTGCTAAAATAC
GTCTTGTTAGGGCTATAGACTGATGTATGTGTGGTACATTATTACCTCAGAGCCTCCCATGTATAGTGTAAGACATGAAATAAAATAATACACG
TAGTCATTTGAATACTAGTACCTTTTTGGTTTTCAGGTTTCTATTCAGAACAACAACAATAAAATAGACTTAAGTCAAAGGATTTTGGAAAAGC
CGTCCCTGATGGTCGAGATTTTACCTAGGTCCTGGAATATGGGCCAACTATTAGCATCGATTTAATCCCATTTTCTTAGGAACCTAATATTTTA
AGGGAGAGCTAAAAAGTAATGCCAAGGTACATCCAAATAAAGGGTTGGGGAAGGGCTATCTACATGGAAAGTACTTGCTCTGCAGGTGCAAGAC
CCTGGGCTTGATCCCCAGAGCCACGAGCTAAAAAAAAAAGACAGTTCAGCATCTCAGATGCTAACAGCTCGTTGGCAGGTAGCATCATGGAGTA
CAAACTGGTGGGTAGAGAGGTTAGACCATAGGTCGCATCACTGCTAATAGTCCCGTCTGTGTGTGGTGTGTGAAGCACTGTGTGAGTCTGGAGA
CTGTGTTCTGTCAGTGTTTGGTGAGCTTGTGCTTCTTTTCATCCCCCCACCCCCACCCCCACCCCCACCCCCAGCTTGTTTAGAGAATGGCTTA
TCTTCAGGACATGTTATTCTGCTAAGTATCTTTGTGCCATTTTTCTCTGCTTTCTTTTTCAAGAATGTTTCTAGTTTTCTCGACGTTCACTAAG
GGCCTACAGAATTTCTTTCCAGGGCTGCAGTAGGCAAAGGAACGATGTATCATTTTGAATGGAAAGGGAAATATCACATGTTCTTTCTGCTTCT
GCAGTTGTGGCAGACAGGGCCCCCCTGTGTAGCAGAGTGGAACTTTGTCATTTGAGCCTCAACTGTTTGGACATCTTTCTGATAGGAACAAGAC
CTGTGTTTAATTTCACCTCGTGTCCCTTCTGAGGAAATGGGCAAAATGGGCACACGAAGTAAACAGACCACTCAAACGGTGCTTCAGAGACTAG
GTTTGGGCCTGTTTTGTTTTATCTTTTAATTTTTTAAAAAAAATTTATATTTTAAGGACCATTCTCAGGTATCAGGCTAGGATGAAAACAGTTC
TCATTGGTTCCAAAGCCTTTGCTCTTTCCCCTATAGGATGAAATTTCTCTGTATGAGTTTCTTTGTGCTGTTGCTGTGAGAAGATGCTCCAGCC
AGAAGCCAGGAAGGGTTTCTTGGTACTCACAGTTTAAACCGAACATCTCGTCGCCAGTGCGTGAGGCAGCGGGTTCCATGGTGTCTGCAGCCAC
GAAGCAGAGAGAGATGCTTGCTTTCTCGCTTTTCTCCTGGGGCCCAGCCCCACACGAACGGCGATACCCACATTGCATCTTTTCAACTTAACCC
AGTCAAGTAATCCTTCACTCGCATGCCTGGACACTTTTATTTCCTTTTGATTTTAGGTCCCTTCATAACCCCTCTTTGGTAAATTTCCATTGGC
TACATTTACCATATACCATATCTGCTATGTGATCTTACTAATTGAGAAAAATTAAAGAGGTGAACAAACAATGAATGGCCATTTATTTTCAAAG
CCTCTTGTTGATGGCTGAGCCCCTGCCTTAAAACAAACTTTTATTGTAAAGTAAATGAAGGCACATTTTGCATTCAGCTTGCTAGTGCTTTCTA
ATCATGAAGGGTTTTTGTTTTTGTTTTCTGTAGATGTTTTCATCCAGAACTCAAGAACAAAATCTCCATGTTATGTTTGTTTTCGGAATATATC
TATGTCAGATATCATTACTTAACAGTTAGCAAATCTGTATTCCCCTTTCACCGGCAAGACCCGTATTTTATGTAGCTTAAAGAAAACGAAGGCT
GATTTGTCCTTGCATAGGAAATCCGCTGTGCCTGCTTGAAACTTACACAGGAGAGAAAGGCAGTGCCCTCTCAAGTCTTTCCTACCCTTCCCAC
TGCTGGGCTGAAATTCCCAGTGGAAAGCAGGCTAAGGGAAGAATGTTTTATTCTGGCTTAGGGTTTGATGGGQAAAGCCCATCATGTTGAGCAA
GGCCATGAGGACGCTTACTCTTGTCTGGGCTCACCAGACTTTCTCCCTCTTTAACTTCGAGTGGACCTCCAGCCTATGAGGCACGACCCTTACA
ACTTTTTGCAGCATTCTTATAGACACATCAGAGGTATGACTCCTACTGAGTTTCAATCCAGTCAAGTTGACAAGATGAGACACCCTACCATAGG
TCTCTCTCTTGTCAGCTGGGCATCCTAACACATCCCTAGCAAACCATCAGTCCATGTTCTGCCCTGGTAAAGTAAAAGTGCCTTTACAAAGAGA
AAGTTGGTGTAGATTCAATACATTATCTGACTTCTTTAATGTTTTATTTTTGACAAAAGCCGCCTCACAGCCCCACCCCAGTCTTGAATTTCAT
GCAAAAACAAACCGAGTCCAGCTGTTCTTTGTGTTTCCAGAAAGGCTTTGCTTCTTCTCTTACCCACGGAGTAGAATCCCACTGGGTATCTGCT
GCCCACTCCTAATATCAAGTATGTAGAAGAAACACACCTGATCCAGGGATGGTGTCAGGCCCATGTCACTTTACCTTGTGTCTCAAGTAAGCAC
TGTGAGGGGTAGGACACTGCTGCCCAGATCAATACCTTCTATTTTATTCATTCCATCGAAGGAATCATTTCACACCCTTTGAATCATGGCCCTG
AGCTCCACTACCAACCACTGCACTAAATAGTACCAGATGTTGCTACTGGAAAGACACAACAAGAAAAAAAAAATCAGATGCGACCACGGCCCAG
GAGGTGTGGGGGCGAGGGGGGTGGCAGGAGGGAGGCAGCAGGAGGAGCGCAGTCGTAACCTGCGGATCAGGTGACAGCTGCAGACTCCACCCTC
AGGCAACGGTTCAGTTCCAGACTGCTTTCACTGGTTCCCTCTTGAAACCGAGAGCAGACTTCATGGAGGACAGTGACTGAAGAAAAACGGACCA
TTTTCTTGGGTTTTGTACTTCCATGCTTATAAAGAAATCACTTTTTTTTTAATGCTAAGATTTTGAAAAGAGTGAGTCATACGATTCTCTCAAT
GTGATATTTTAATGCACCATTCCAGTCGTTGACTTCAGGAAAAAAAAAAAAAAAAAAAAGAGCAGGAAAGCCCAGGGGTGGGATGTGTGCTTGT
TGAAGGAGCACCTGGCCCAGTAGCGGAGGACCCAGAAGATGGGCAGACATAAAAACTGATCTTTTGATTTCAAGTCTAAGCACCTTTCAGGCTG
ATCACATTGCTATTTAAAGATGGGCCTTGGGTCTCCTTGATGAGTGCATTGTCCTGGAGGTGCATCCCATTAAATACAACTTCCCTTCCCCCAA
GTCCTTGGCTGTCTTCAAGTGAAAATTCCATTGGTTTTTAACAAGACTGTCCTCCTCTGTCCTTAAAGCTGACPTTCCAAGTCATCTTAACCCC
GGGTTGTGTCTCAGACTCTGGAAACTTTAACGTATGTATAATGTGTCAGAAGTTTTGGGTTTTCTGACTGTTTTGTTTTTAGTTTAATTCAATT
AGAGAAACCTTTGAAAATGGTGATGTTATTTCTGGTATTTAGGAAGCATTTCCGTACTGTCAGTGTCTTGTGTCATCAGAATACCGGTGGCTTA
GAATCAGAGATTCAGGCCTTTGGCCTGGTACACGCTGAACCCCCGCATCTTATGATGGAGCTTGTTGTTAGTATATATTTAAATGTCTCGAACC
TTAATAGTAGAGAGGTAGAGGTGTTATGTATTAATCTATCCCACTCTCCGTAGTGGGAGCTAGATGCAGGAGAAGAAAGGCAGGTGTAAATCTA
GGAAGAGTGAGTCAGCAGAAGATGTGCTTGGTCCCGGTGACTCCATCCATGAGTGCTCACATCTCTCGCTTTTGCAGTCTAGTTAGTGGGGATT
GGGATGTTAATTACACATTTCCCATCCTTCCTGGCTGTCTCGTAGGCCTTCGTTTTGCTTTGAGAAATGGAATCCTCTGAGACAAGCCCACAGA
CCCACCATCGGTCTGTTGCCTGGTTGCTGGGTTTTGACCTCTCCTTTCCTGTTCTGTCTGGCCTGAGATACTGCGAGGGGTTGGAGGGGGTAGG
TAGTTAAGTGACCTCAGGAGCCTGTTATAGGGAGTAGCATGCTCTTAGGCAGGATCAGGTACCCACTTTCACCTATTGGAAATTCGGAAACTCA
AAAGCCTAAGGTATCCCCTCACCCCAAACATCTCACGTCCCTCTCCTCCCTTCTCTCCCCTTCACTCTCCCTCCCCCACTCCAAGTCTTCTTTT
TTCCATTCTCTGTCTTTTTGACAGGGTTTCATGTGGCCCAGGCTGGCCTTGAATTCAGTTACTGAGGATGTCCTTGTGTTTCGACGACGTCCTG
TCTACCGAGGCCCCAGTCATGCACCACCACACCACACCCTCCTCCGCTGTTTGGTCAATCTCTGATTCTCCCTTGCCTTATAACATACTCGTCC
TTCCTATTATAAATAGACTTTTTCTCTTAGAGGAAGTGGACGTTGGTCACTCGGAGACAAGATTCCAGGGCGGATTGATGACTTGGAATTTTGA
TCTTGTCATTTCAACACTTGGACAAGGGAACTTTGCTGTGCCTCAGTTCCCCCAGCTGTGAGAATGGAGATAATGACGATGTTCACGTGGCGTC
CGGGCAAGGCATGGGGCCAAGGGAAGATAAATTAAATAGTTGCTTATTTAAGTACTATAAATCATCTCTCGCCTGTAAACACTGATATTGATTA
AAACTCAACATAATTATAATACAAAATAATTATAGTAATAAGCCATCTACTTCTTCTTCTTTTTTTTTTTTTTAATGAGGATTGATTAAGTAGC
ATTGTTCCATACAGTGATCTGACATCAGTACTAAAGCAATAGGAAAATCTTCGCTGCTTCCAGGATCTTCTTGTTTCAATGTTTAGAAAAGAGT
CAGTATTTCAGTGAGGTGGACAGATGACTACCCACGTCCTTTATTTTTTCPGGATTGGTGCTATGTTGGAAAAAAAAATACATGCAATTCCTCT
CAAAGAAAACTGCAGAAAATTGAGTGCTAGTAAAAGCTGTTAATATACACTTACTGTTAGAACATGAAGAACATTTCACAATGGAAAAAAAAAA
AAGATGTACGAGCCCTGCCCTGCCCACCCTGGTTTCACTTTTACATAACCTCTCCATCCCTTACCCATATATGTGCATGCTTTGCAGAGTCTCA
TATAGAAACTTGAGCTGATTTTCACTTTGTGCTGCAGGGTCGGTCCCTTGCTTCCTGCATGGTTATTACAGATTTTCTTCTTCAATGCTGTCAT
TTGTCTAGTGGCCACATTCTGCTCAACCGACGACCTCCTAATGGACATTACACTTGCACCCAGGATCTTAAACCCGAGCAAGGTGTGGGGGGGT
CCCTGCTTCAGAAACCACTCAGTCTTCCTCTCACCCCCTTTAGAAGAATGAATGCTGGCTGTCAGCCCGTTGGGAGTTATCTTTTCTGTTGTCC
TAATTCACTTTCACTTTTTAGATCCTGCTGCCAATCAAAGTCCTCAGAGTTAAGGGAAGTCCCTGTCCTTGACCCACTGCGCCTTGGCTCTGAC
CTGTGTGTGTGCGTGCTATATATGTCATTCGATACATGGGCTGTQATCCTGGGTTTGTTCTTTGGTTGGGGCACCATCAGGCAGTTTGGAAACT
CCAAGCAGCCAGATATTCTATGGAACTAGAAGATTAGCCAGGGCTACAAACAATCCACTCTCTGAATCACTCACAGTATTACATTGTTGATAAA
AATATATTATTACCTTTGGGGCGTGTGTGTGTGTGATGTGTATGTGATATATATATAATATATAACAGCACCAGTGTGCAGGTCAGAATTCAAC
CTGTCAGACCCTGTTCTCACTTTCCACCATGTGGCTCTCACGATCTCACGTTGCTGAGCTTGGCAGCAAATAACCTTTGCCTTCTGTGATATCT
CACTGGCCTTGATAAAACACACTAAAACATCAGTACCAACAGAAAAAAGCTAGACCCTGTAAGATGCTAAGTATATACATTTATTTCCCCCATG
TCCCATTTTTACGTCCACTAAGGTCCCCAAAATCTTTAAGCAAACTCAGAAACACAGGGCCATGATATAATCAGAATGGGAAGAACTCCCACCA
GTCCTTTCCTGCAAAGGTAAAACACCCTTTAAATAGGAGTTAATTCTCTAGCAGATAACTAGCTTGTCTTCCTTGATAAAGTACATATTGGGTT
GAAATTATTATAATTAATTTTGCATGTCATATAAAAGTCCACTATGCCTGCGCTTATTCCATGGATCTCTTTATTCTTAGCCAAGGGAGAGCTA
GACGCCCAGTCCACTGTGGTGAGCTTTCGTGGAACTAGGCAGATGCCCAGATGATGATGCCTGGCAGGCTCCCCACAAGTAGGCGATGTGACTG
TGAAGTACCACCATCAACGGGCATTGAGCTTTCAGATTGATGAGGGTGTGTGTGTGTGTGTGTGTGTCTGTCTGTCTGTGTGTGTGTGATAAAG
ACCAAAAGCCAACATTGCATGTCTATCTGTACTCTCCTATAGTTTTATACATGTAAGTATGTNNNNNNNNNNNNNNNNNNNNNNNNNNNNNNNN
NNNNNNNNNNNNNNNNNNNNNNNNNNNNNNNNNNNNNNNNNNNNNNNNNNNNNNNNNNNNNNNNNNNNNNNNNNNNNNNNNNNNNNNNNNNNNN
NNNNNNNNNNNNNNNNNNNNNNNNNNNNNNNNNNNNNNNNNNNNNNNNNNNNNNNNNNNNNNNNNNNNNNNNNNNNNNNNNNNNNNNNNNNNNN
NNNNNNNNNNNNNNNNNNNNNNNNNNNNNNNNNNNNNNNNNNNNNNNNNNNNNNNNNNNNNNNNNNNNNNNNNNNNNNNNNNNNNNNNNNNNNN
TTTGACTACTGGGCGGTCTCCCCAGCCCACCTTCCACATCTTCTATAAAACGTTTGGAAAACGTTCTGAGGCCTGAGAACCAGAWGCTCCAAAG
TTGTCCAAATCATGACCTTGACATTCATCTCCGAGGGACCTCTGCTTTCCTGGTTCTCAGTGAACAGCTTTTCCACACTGTGGAGTGGGATTCC
TGGCTGGCTGGGACTGACTCGGCGTGGCTGGTGGCTCTGACATTAACCCTTGAGGTCCATGGACATCATTTTGTGACTCAGCAGGTCCCAGCTC
CTTCCTTCCTTCAGCTTTTCTTCCTTACCTTCCCAGAGCTCTTCAGAGCTCTCAAATCTTTCAGATCTGGCCACATGGTGTCTTCCAGGGGTCT
TTGCCCATCAAAAGCCATTATCCGTGGTGGCTTTGTTTTGTTAAGGATTGCAGTGTGTGCTGATGTGATGTACAAACTTGGGAACAGAACTCTT
GTCAGATAATGGGGTGGAGTGTTCTTTTCTGGAGAAAAGTCGCTATTTCATCTATGGCGACACAGCTCACTTTCTGGTGCATGAAAGCTTGTAG
AACCATCATTTTCTGTTACTGGTTGCTAACTCTQTCCATGTGAACACATGCTTGCACATACAAACACATGCTCCTTTCTGTTAACATGGCCAGA
TAGTAATGACTTTGCCACTCAGCAGGGACTCCTTGAATGGGGACATCACCTTTACCTGAGCTGTTGTCTCCTGGTAGCTATGCCCTGCCTGATT
CTCGTCGCTAGAGCTAGTTGAAGCAGCTCTGAATCATACTTATCAGATTTCAGAAACCCTTCTTGGGTTGCAGTGTGAAAGACTCAGCTGCATG
TTGAAACCATAATTTGGTCAAATATGTTATTAGTGTTAATTTTGGCCTGTTTCCCTTTACATTTCAGGGTAGTGACTAGAAAAAATAGTCTTGC
CATGTAGTATCCTGCTGACATTTCTATCCAGTGAGGCCAATCTTTGTATAATGATAAGTTATCATTTCTTTCTAAGATGAGAGCATACAGGCTG
AGAGTGGTTCACACAATCACTTGGAGTCACACCGAACTCCCCTGAAGTCTAGGCTGACTCCCACCTCCACAACATTTATGGCTATGGACTTGTA
AATTGATTTTTTTTTTCTGCCCTCTGTCCCTGAGTTGTCGGAGATGATCTCTCACCCTCTGGAATCTACAGAGAGATAAGAGTGCCTGAGCTGC
TCCTGCAGAGCCCCTTGGCTCACACCTGAGTTTATGTTAATGAGATGACTCAGGGGACAAGCTGGTCATCTATCAGAAGGGCCAGCCCTGTGAC
TGGCCCGGAAGCTTGGAATGTAGCCAGCCTCCGCAGAAGAGGCAAGCTGGACTGAGGATTAAGTTCAGACACGGGGCTGATGATGAATCAAGTC
CAGTTCCACCTAGTGAAACATGATCCTGAAGAACACAGAAGCCTCGCCCTCGAAGCTCAGGCAGGCATCCTCCTTGCACACAGGGACATGCCAG
CAGGGTAAATAGAGTGTCTTCATTTCACACGACTGAACAGAGAAGTGCACGGTGTGGAATACTAGGGCCTACGTTGTGCAGCTTTCATTTTGCT
GGCCCTGGCTTGCATCCTTTATAGTGAAGCCATTAATTAGCACAAACAAAAGTGCTTTCCTGAGTTCAGCGAATCATCCTAGTGGATTCTTGAA
CCCCGGGTATTATGGGGAAGCAAAGAACTAGTGACAATTTAGTCAGAGGTGTCAGAGGCCTGACAGACACCACACTTACAACTGGCAGTGACGC
CAACGCTGTTGGGGATTGTGCTCGCTTTCTGTAAGAGTCAATCTTGGAGTCGCTGTCAGAGCTCTGTCAGAGCTGCATTGCAGTATTCTGAGAT
GAAAGCACCCAGTGTCTGCTTGAAGCCCCTGGTGGTGAGAGAACACCGTAGCACTTGGTAAGATAGCAAGACTTGTTTCCCTAACCCCATTTCC
TTGGAGACAAGAGGCAGCCTTCACTCTAGTCTTACAAAATGATGTGGTCTTGGGAAGACTGCTTTAGACTGCAAGGCTCCAGGTCAGCAGGGAA
GACCTGTGATATTTCTAGGCCCAAGACCTTCCCACCTTTGCAGGCCCCCTCTATTTCAACTCCTAGGTGTCACCTGAGGGGGTGTGGTGGCCCA
ACATGCTGGCCTCTTTCTTACAAGAAATTCTTGAATATTGATGTTGAGATTTTGTTCCAGTAAGGAAAGCACTGTGTGGGATAACCCTAAGTAA
GGGATTTGCATTACTTGGTCATTTGCATTGTTAGGATTCATACTTGTGGCGTGTCTCACTTTGTTTCAAAAATATGGTGTCATATCCAACAGCG
CCTTTTCTGTGGACACCCCTGTTTGGATATTTTAGCCATGGTCTTGTATCGTTATTTTTGGTCTATTTTGTTTTGCTTTCTCCTTCCTGGCTTA
AAATAGACAAGGTCCCCCCACCCCCACCCCCACCTCCAAGGCCATTAGTTTTTAGCTTTGCTCAGACTAGTCCAGTCCAGCAAAGCCTTCTTAG
GTCACCAACCTCCTAGAAAGTTTGACTCCTCAAGGCACGTGATAGGGCCACCCTCCAAAATGGGTTTCTAAGAAAAGAAAACTGTCATTACTTC
GTGGGAGGGGTTCTACAAGAAACGGGAATGAAGCAAACAGTATGAAGAGTTGTGAAATCTCCTGAAATCTGTTTAACCTGGTCTGGCCCTGGGC
TCTCTGCACTCTGTCACCAACGCAGGCTTGCTTATTAGAAGTTTAATGGTGGCGATAGTCCAGCCAAATAACTGACAGTAGCTTTCACTGAGGC
TGTCAAGCAGCTCCCTGCCCCCTCAGTAAGGGTCAGCATCCAATGTCAGCCTCAGTTTCTAAAACAGATAGAACAGATGCTTAGAACTGACTGC
CCTAGAGTTGGGTGCTCCCTTCCCCTGAGGTACTTCCAAATGTTTGCCTGTCGACTACAGGGTTCAGAGTACACCTTTCAAGACATAAGTATGT
GCTACAGCCCTCTGAGAGAGCGAAGGATGTAAGAATCCCCTTCAGGAGAGAGGAAACTCTCCCCATTTAAGTCAAAACTATTAGGGGATAATCC
CGGTGTCTTATTTACTTTTATTTTTGTGTGTATGTGTGTCTCTATATATGTCCACTTGTACATGCCTCCTCTTGGCTGTGTGTGTGTGTGTGTG
TGTGTGTGTGTGTGTGTGTTCCTGTGCTTACCTGGTATATATCCAGCGAGCCCCTTGGATTCTCCTGTTTCTGCCTCCCAAGGATGGCTGGATT
CTTCTGTGGGCATTCGATCTCAACTCACACTCTCATACTTACCCACTGAGTAAGCATTTTACCCATTCAGCTGTCTCTCCACTTCTTTGATAAT
GTGAGTTTAAGTGACCTGAAATGTAAATAACTAGCCTGCCAGTTCAGAGTTAATAAGACAAATAAGAGGGACTCGAGAATGCCTGATTGTAGAG
CTGGTATTGTGGGAGAAACAGAGCCACTGGGTCAGTCAACACCCTGTCCAAAGTATCTGTGATTGTTCATCCTATTTAGATGGAAGGGCTGCTG
CCAGGTCTAAGGGCCAAACCAGACCTTTCTTAGGCATATGCCTGGGACAGAGCTCTCTATCCCACTGTGAGCACTTCTTGAATGCATGCTGACC
TGAATTCAGGCAGGGCCTGTTTCCAGACCTCTCTCCGCCTGGGTGTCCCTCTTGACCATTTTTCCTCACAACTCTTTTTCATTCACTTCTGTCA
ACATTGCTCATAAGGGAAGTACAGAGATGGGAGCATGTGAGAGGAGGGACAGGCTAGAGGCCGCCAAATGTGACAGATCTTATTCTCAACCTCA
CCTATGGCCCTATTTGTCACATGTAAGGTCCAGCAACTGTTCTTTGCCTCTTCCTCAGCCTIGTACCAGCAGAGTTCATCTTCCCTGCACCAGC
TTCCATGAGCTGTGACCCGTGGTGTCATCCAGGCGAGTCTCCCAGTGTTCTCAGAACATTCTGGCATTGATACTTCGCTACAGTTTTTTCTAAT
GTTTCCTCGTCCTCATCCCTTCTTTTTCTCTCCAATTAGATTTATCTTTGGGCACTATTTTTAATCTCCCAGATCCCTACCATAATGCGGAACA
ACACATAATTAATGGCTCTTTCTGGCTCATTCTGATGTTCATCTCATCTAAAAATATTTAACGAGCACTTGCTATTCAGAGCAGACGGTACAGC
CTGAATGAATACAATTTCTCTGAATAACTCATTTAGTAGTGGTTCATTTAATTATTGTATCAACTCTGCTGCCCATTGATGCTCTACTTTACCC
AGAAGTAAACTAGGATCTAAAGATGCCAAACAACCTTCCGGAGCCTGTACCGCAGAGGCGCAGGGCAGCCTGCCACCATTTCCCTCAGCAGACA
TGCCTTGCCACCTAATAGCACCTTTGCTTTCCTGGGCTCCACTTTTTTTTTTTTTTAATATTTTTTATTAGGTGTTTTCCTCATTTACATTTCA
ATGGCTATCCCCAAAAATCCCCCATACCCTCCCCCCCCTCCCTTAACCACCCACTCCCACTTTTTGACCCTGGCGTTCCCCTGTCCTGGGGCAT
ATAAAGTTTGCAAGTCCAATGGGCCTCTCTTTCCAGTGATGGCCGACTAGGCCATCTTTTGATACATATGCAGCTAGAGTCAAGAGCTCTGGGG
TACTGGGTAGTTCATAATGTTGTTCCACCTATAGGGTTGCAGATCCCTTTAGCTCCTTGGGTACTTTCTCTAGCTCCATTGGGGGCCCTGTGAT
CCATCCAATAQCTGACTGTGAGCATCCACTTCTGTGTTTGCTAGGCCCCGGCATAGTCTCACAAGAGTCAGCTATATCTAGGTCCTTTCAGCAA
AATCTTGCTAGTGTATGCAATGGTGTCAGCGTTTGGAAGCTGATTATGGAATGGATCCCTGGATATGGTCCATCCTTTTGTCACAGCTCCATAC
TTTGTCTCTGTAACTCCTTCCATGGGTGTTTTGTTCCCATTTCTAAGGAGGGGCAAAGTGGTCTTCGTTCTTCTTGAGTTTCATGCGTTTAGCA
AATTGTATCTTATATCTTGGGTATCCTAAGTTTCTGGGCTAATATCCACTTATCAGTGAGTACATATTGTGTGAGTTCCTTTGTGATTGGGTTA
CCTCACTCAGGATGATGCCCTCCAGGTCCATCCATTTGGCTAGGAATTTCATAAATTCATTCTTTTTAATAGCTGAGTAGTACTCCATTGTGTA
AATGTACCACATCTTCTGTATCCATTCCTCTGTTCAGGGGCATCTGGGTTCTTTCCAGCTTCTGGCTATTATAAATAAGGCTGCTATGAACATA
GTGGAGCATGTGTCCTTCTTACTGGTTGGAACATCTTCTGGATATATGCCCAGAAGAGGTATTGCGGGATCCTCTGGTAGTACTATGTCCAATT
TTCTGAGGAACCGTCAGACTGATTTCCAGAGTGGTTGTACAAGCTTGCAATCCCACCAACAATGGAGGAGTGTTCCTCTTTTTCCACATCCTCT
GGACTCCATTTTTTAGCAATAATAAAAAACTAAGGATGACATTGATGATTTCGGATAGTGGCAGATGTTCTCATATGTGGTCAAGGAGTTAGCT
GAGAGAATACTCATAATATCAGGAAGAGCCCTTCTGGGAGACCACAGTCACTGAGCCCTGCGTGCTGTCTGCTCTGCAATGGTTAGGATAGGAT
GGAATGTCGCCCTCAAGTGTCTATGTTTTGCAAACGATGTTTTCCCGACATGGTGATACTGCAAAGTTTGATACCTCATAGGAGGTCAACTTGT
CACTGTCCCTGGTAGAGCATGAGACTGGTTTTGTGGAAACCTGACAGCAGAGTTGTTATTTAAAAAAAAAATGATGAGAAAAGAAGTGGGTAGT
CCAGCCCAGCTGTTACCCTGGTTTTCTGTCCCCCCTATTTCCCATCCCAGCTGTGATGCCACCTGTCATGATGTGACACAGCCAAGGTGACCTT
CACCAAAGTTAGCACCATACTGTAAGAGCTTTAGTCTCTGAAACTAGGAAGTAAACAAATCTGTCTTTGTATCCCGCCTCAATTACTTTGTAAT
GGGAACGGAAACAGATTCCTGCACCCTCCCCATATAGAATAATCCTGTGGAGGTTTCTTCTACTCCTTGAATAGTTCCTCAGCTGACAGCAGCA
GCATGTCCTAACATTTCACTTGGAAATCATGTAAGATTCTCCCAGGCCAAAGGCTCAAATGCAGCAGAACTCCCAACTCCTGGTACTGGTTGCA
AGTCCCAGGGTGTCACTGCACTTCTGACCAACTAGCTGGCAATAAAACTTCTAGAACTCATTCTCTAGATTTGATTAATTTGCCATGACAGCTC
ACAGAAATTGGAGAAACATTTAGTGAATTTGCTTAATATAAAGGATATTATAAAGCGTGCACATGAACAGGCAGACAGCAGAGCCATGTAAGAC
GATGTGCAGGTCTTGTGTCATATGTAGGCATGCTATCCCTCCAGTCACTTCCACATGGCCCAGCCATCTGGAAACTCACCAAACCTTGTTCTTT
TGAGTTTCTATGGTGTTTTCATTAAGTCTGAATGATTGATGACATTTTTGGCCATAGGTGAGCAATTCACTTTCATCTTCTCTAGATCAAGATT
GACCGCTAGAGCCGAAATTCCCTAGCCTCTAACCCTGCTTTCTACTTTCTGGTATCACTTCCATCTGGAAGGTGTTAAGGGCTCCGAGACTGCC
ACTCACCTTGTTGGCATACAAACAGTCACTCTTATCTCTTTGGAGATTGCCACGGTCATCTGGGTGTGCGTTGCTTAGTATCACAGTATCACAC
TGAGGGAATGACTTGAAAGAGTGGTTAAACACAGAGAGCCTTGCAATAGATCATTGATGTCTCACACCTTACCAACGGACTGTTCTTGCTGTGA
CTCACCTCTGTCTGCTTTGTGTTGTAGTAGGGCTTTGTTGAGCTTAAGGAGTGCTCGAGGGGTGGGGTCAGGAGGGAAGAATGAAAGAATTAAC
CAATGAGCTTGCATCCAAGAGGTTGGCAATAAATGTCATAAGCAAGAAGCCGAGTCCCTTTAGTGTGGAAAGAAGAGCTACTCTGTGATTCCCT
GCCCTCAGGAGGTCTTCCCCCCGCTGTACCATGTTGGATATGGCCTTCAGGGAATGTGCCTAGCAAGTCCGACGGTGCCAGAGGTGGAGTGCAA
ACAGGGTCAGGTTTCTGTTCTTCCCTCCTGGGCTGCAGGGATGGTTACTGGGATGGTTCTCCAGTAACCTTGAGCTTATGTTTATAATCTATGA
TCCCACTCCAGACCAGCAGGCTGIATTGGTTGGACCATAATCTGGTCTACCAGATGGGGACACCTCAGCTTTTGACCCGTTACTATATCCTGGC
ACTACAACAACCACCTCCAGAGGTTTCCAGACCCTTTCTCCTATCTCTTCCTGCGAATGCAGACCATGCCTGGTTTCAQTTTGACCTTGCAQAG
CTCAGCCATTGCGGGTGATTTGACTTTGGCATGTGGCTGCAGAGGCAGCTCCTGCCTTCCCTTCCAGGCAGTTGATGGTTAATATACTTATCGT
TGCTAACTATTCTTGCCAAATATAGACTTATAGCTCTGACTTACAGAAGTCAGAAGTAGAAGCTGTTGCGATATATTTTTTGCGGACTGAAAAC
ATTGGCTAAAGAAAGCATTCCAAATTGTGATAGGAGCAGTGGCGCTTCTCCCATCTCGCTTCCTCAATTCCCCACGCCAAAGCCCTTTGACCTG
CAGATCATTACAAAATCCATGGCTGTAAACGCTGTTGTTTGAGTGTGGGGTTTCCTTCAAAACAAGTTGAGTGGCTTACGGATTTGACTGGCCA
GTTCTGTTCATCACCATTAGGCATGGCTCCCAACCCCAGTCTCCATTGTAACCCTCGTCTTTTCCTCCCCTCTCCTGACCATAGATGACTTTTT
TGTTTGTTTGTTTGTTTTTTTGTTTTTTTTTTTTTGTTTTTGAGACAGGGTTTTTCTGTATAGCCCTGGCTGTCCTGGAACTCACTTTGTAGAC
CAGAGTGGCCTCGAACTCAGAAATCCGACTGCCTCTGCCTTCCAACTGCTCCGATTAAAGGTGTCACCACCGCCCGGCCCATAGATGACTTCTC
ATGACTTTCTCTGAATATAATTTCCAGTGGGAATGCTTCATGGTAGAAGAATGTAGTCTTTTGAAGCTTGCCCTTGATGTTTCTAGAGATTTAT
TGGATTTTACTTAAATCCCATTQGGAAACATATTTTCGCTGTGAAGTTGTGATGTGTTTAATTTGGGGTATAAGATAAATATGGTCCTGGGGTG
GAGGGATACATGGATAGTGAAGTAAGTTTTTCTTTTGTGCCATGCGCTGGTTTAATGAGTAGCTTTATCTGTTTGCTTAGCTATGTTTGATTAT
TTAGGCTTCTTCTGCCTCAAAAGTAAAGAATATTTGCCCTGCCTTCAGAGAATTAAATGAGCAGCATAGAGTATGTGGCTCACTCTTGGGAAAA
ATATGACTTTGTTTAATAGCACTACACTATTAACATTCTTCCTCTTCAGCTTTCCACTGCCATCTCAGTGTGTCCCCCCATCCCTTCCCCTCTT
GATTAACCACAGAATGTAGGGTTTCCCAAACACACAAAAGGTCTCCAAGGAAAACAGTTCTTGGCTCAGAAAGATACCTCAGGGTGAGCTTGAG
CCAGGTCTTGTCCATAATGAGGTTGAGGGATTCTTCTGAGAAAGGATAACTTTTGTGAGTGCTGCCGGCGAAGAGAAGGTTCTACATGCTTGCT
TCTTATGGCTTGCCTGGTGGGTTAGGCAGCCTCCCACCCCCACTACCATCTCAACCTTGGACCATATCTGGCTTGACTATAAGGTAATGATATC
CTTAGGTTGGCTCTCAGGAGCCTTGTCTTAGGTAGCCCACAAGTTCTGCCATGACTCTTGAATAGCAGATATTCTAATATACAGACACTTATAT
GGAGAGAGTTAAACTGAGAAATAAAATGTAAAGTGGCTCTATATTAGCTTGCTTGGGTTACGTATTAGTCAGTTTTCTGTTGTGATAACAAAAG
TCAGTGCTGGATACTTTATAAAGAAAATATTGGTTGCTTTCGTGGTTTTACAAGTCAGGAGTGTGAGATCCAGTGCCTCTCTCTGTTGGGCCTC
TGGTGAGGGCTTTGCCATGGATTACGTGGATAATATTTCAGCTGTGGAAGTATGTGCCAAAGACATCAGATGTCAAGAGTGGAATCCAGAGACA
CTCAGGGCCTAGACCTGCTCTCATTGCTACTCACATGGGTCATATAAGAAATGTGTTCACCCCTTCCAAGCCCAGCACCTGTTGACCTTACGAT
CTCCCACTATGCCCCACCTGTTAAAGGTTCTAACATCTGTCAACATCACCACCCTACAAGCCTCTTAGTATTTGAACTTTTGATTCCTTGCTCA
AAGAACATCCAAACCACAGCACGTTGCTATAACAAAACACCCCAGGCTGGGTAACTTAAGCAACAGGAACTAGCTCTCCCACAGCTAAAGGGCC
CAAACTGTAAGACTTGTAAGATTGGAGTAGCCAGAACGTAACTGTCCTTTTACCTTCTCTCACCCGCTCCTTCACCCAACCTATTTCTTGTTGT
TTGTGCGGATGGCAGGCACGCACATGTCACIATATAATGTCCATGTCAGAATACCGGAAAGGGGTGAAGCAGGAGGCAGAAGCCAGCTGCAGGT
GCATGGGAAGGAGCCCGGGGCTGCTCCCCCTTGGAATCACACTGATTTGTGCAAAGCCTAAGCCGGTTCCTGGCACGGGACTCAAAGATCTTAC
AGTTTGAATCCGGTTCACATAAAAGTCATAAGCACGAGAAAGCAGGCCCACAGCCCTTTAATTGTCATCGTTGTGGAAAGTTACATGACTGTCA
TCACCTGTTGCTTCTGGCAGTGCTTTCTGGACTAATGTAAATAAATGAGCTAACAGGTTTAAAGAAGCAGCCTGTATTTACATACTTGTGAAGT
AGCCTCAAACAATCAGTCTGTGCTATTCAAACACACACACAAACACACACACACACACACACACACGCACGCACACACACGCACACACACACAC
ACACACACACACACACACACACACACACACACACACACACACACGAAATGTGTGGCTTCCTCAATGCAGGCTCCTCATGAAGGCCTGAAGTCTG
AAGGTTATGATGAGTAGTGTGAGTAGTGGAAGCCCTGCTTTTCCCCTTCATGGGGTTTTGACCTGAGTCTGCCTTTTTGATGAGAACAGGCTCT
CCTCAGCAGGCTGAAGTTTAATCTTCAGCCATTTCTATAGCACTTCTTTAAGGCATGGACTTGGGAGAGCCCCGGACTGCTTCAGAGGAGGGGA
GAGTGAAGTGGCAGGGGCAGAAAGGAATCCCACACCCTCTGATAAAACACTCCAGAGTCACCATCTCTTGCAAGTCTTCCAAAGGAAGCTAGAT
TTTCATTTTTTTTAAAAAAATCATAAGGTCCTTTTGACTCAGTTTGACATTTTGTAGATAAATATTTAGGCAAGCATATTTTGGGTGTGTGTGT
ATATCTAGCTCTGTATCTGTGTGTCTCTGAAGGTCAAAGGTTGACATTTTGAACATTTTGTGTCTGATTCAATTACTCCACATTACTGAGACAG
GGTCTCTTGCTGAACCTGACGCTCACCAACTTAGCTCTCTGTTTGCTAGCCAGGGAACTCTGGGGACCCTCCTGTCTCTGTCTGCCCAGTGCTG
GGACTTGGGGCATCCAGCCATGTTTCTTACATGGGTCCTAGGGAATCCAAACTCAGGCCCTCATGCTTGCAGAGTAAGGACTGTGTAGTGACCA
AGCCATCACTCAACACCCCAGGCATGATTGTTTAAAAGCACATTCCTCTGGAGGGTACTAATGATGCTATCAAAGCAAACACCTCAAGAATCAT
GAACAAAACATAAGCAACTGGCCCTCTAACTGCTCGTGGATGAGTCCATTGCACCACAGATTTAGAAAGAAGCCTCTTACTAAGGGCACAAGGA
AATCAGGAGGGAGCAGTTACTGGTTTGGAGTCTCTCAGTCCCTTCATAGTCTGGGATAGCTTCTTTCCAGAAGGCTAGGTTTTGTTTGTTTTTC
AACACACAGCATGATTCAGGCAGAGGAGTGGTACGCACCAGGAGCGAAGCAGAAATACCCATGCTTAGAAGATTGTGCAGAGGTGTCTACTTCC
TGTAAGCATCTATGGCCTGTCATATTCTTTTGTCCAACACAAGAATCCAAAAAAAAGATTCAATGAGTTCCAAATTCAAGCAAATTCTGGTATA
GCTTTACCAGATTTTTCTCCCTTTACCTCTCTAAATGTTATGAAATCCAACTGAGTCAGATTCATGAACACAAACAAGAGAAATGACCTTTACA
CCGAGGTCCAAAGATAGTTTGTGATGGGTTTTGTTTTTCTTTCTGAAATAGGATTTCATGTAGCTTAGGCTGGCCTAGACCTTTCTATATAACT
GAGGCTGGCTTTGAAGTCTTGATCCTCCTACCTCCAGGCTCCCCATTGTGAGGGCAAATATTAGGTAAACATGCCTGGCCATACATGGCATTTT
TGAAGTGGCCTCTACCTAGGATTTGTCACTAAAGTAGACAGGGAGAGAGAGGTTTACTTTATGTTTTAGTGTTCACAAATGGTTTTCATAAACT
CAAACCATAGTTCCCTACTTCTTCTGTGGCTCCTGTGGTACCATCTCACCAGGTTCCATGCCCCCTGTGGGAGACCCATGTGCAAGGGGACTTA
AGAGTCCCTCTCCCCAAGAACAGATCTTCCACCAAAGCTATTAACCTGGAAATATAAACATGAACTGATAAATTCAAAACTAGAATATTCTAGC
ATTGTTTTAGTTCAAAGTTACACACAGGCATGCATCTGGTTGCTAAAACTTTTACAGAGTAGTTCTGAGAAAAATTGGTAGTCATCATCAACTA
TTGAGGCATATACTACATAATAAATACTTTQTATATGTAAATAGTCTATTTTTGTTTACCCTTTCTATAGATTACCATTTCCTTAATGAACTCA
ATTTATCACAGAAGTTTTTAATTGTTGGTGTGTGTGTGTCTGTGTCTGTGAAGTTCCGTTTCCTAATTTCCTGTGTTTGTTTGTGACAGAGTCT
TATGTGGCTCAGGCAGAACTTGAACTCACTCTGTAGCAAAGAAPAGCTTCGAACTTCTGATCTTCCTGCTTCCACCTTTCAAGTATTGGGATTG
TAAGTATATGCCACTATACCCAGTTTATGTGCTGTCGGGTATTGAACCCAGGGCAGTCTGACTTCTAGGTAAGCCCTCTAGCACCTCAGCCATC
TCCCTACCCCATCATAATCTTATTTCTGGAATTTCTAAGACTATATATCATATCCTTACATATCATTTCTACAAATACACACATACTTCTTTCA
TATAGTCTGAGCAAGTTTGTCAGGATTGCACTTTTTTTGTTGCTTGCCAATCTGAGCTGTCTTCCCCTTTCCTTGGTTTCTCGGAAACAAACAG
TCAGACAGAAAGGGCTAGCTGGTGAGAGAGGGAGGGAGGGAGGGAGGGANNNNNNNNNNNNNNNNNNNNNNNNNNNNNNNNNNNNNNNNNNNNN
NNNNNNNNNNNNNNNNNNNNNNNNNNNNNNNNNNNNNNNNNNNNNNNNNNNNNNNNNNNNNNNNNNNNNNNNNNNNNNNNNNNNNNNNNNNNNN
NNNNNNNNNNNNNNNNNNNNNNNNNNNNNNNNNNNNNNNNNNNNNNNNNNNNNNNNNNNNNNNNNNNNNNNNNNNNNNNNNNNNNNNNNNNNNN
NNNNNNNNNNNNNNNNNNNNNNNNNNNNNNNNNNNNNNNNNNNNNNNNNNNNNNNNNNNNNNNNNNNNNNNNNNNNNNNNNNNNNNNNNNNNNN
NNNNNNTTCTTTACCTAGTACTCACAAAACCACTGGGACTCAGCCCCTTGCCCCTCCTTTCCTTTGCCTTGGCCTTTCCTCCATCCCTTATGTG
CTAGAAGACAGCACCTTCGTCCCTCTTCTCTCTTGCCAATATAGCTTCCCACAGGGCTGGATCCTAAGATAATTTAATCCATGCCTCCTTGTAC
TAAACTTGAAGTCACTTCTACTGTCAAATGCCCACTCTCATCTATGGGGTATGTGGATAAGTTCATAGGAAATGAAATGTAGAAGCCCCCTTTG
ATGGCTGTAGCGGCTGTTCCATGTACTTCTCATATTAAGGTGCTCTGTCCCCATCTCCGGACATTTTGGCCTTAGACACTTGACATCAGCTAGG
TCTTATTCTTTCGCCTTATCTTTGTGCCTACAGAACCTCAGGATACTGCTTGATATAGTATCATTTCCACTGGGGGAGCTATAAAATAATATTT
ATTATATGCCAATAATTCTGTCGTTTGTGAGCTATATTATATAGAACTGTGTCTGTGTGGAAGTCTGTGGATGAATATGTCCAAGTTACTGATA
TGGCAACTGACATGCGCGTATACTAAATAACCCACTGGAGGTGATGCAGATGGTCACCGCTAGCACCAGACCGCCTTTTACTACAGACTTGCTC
CATCCAGTCCCTATATTCACTGCTGCCAATGCCCTGCCTGCCTAGTAACCCAGGAGGAAAGCAAGGCTGTCACTAGTCGTCATCAGCATTCTTG
CAGCAAGCAGTAAGAGTGCCCTTTTAGAGTAGGCAACACCCCCACCCTCCTGTAGATACTAATTCTATCTGCTGACAGTGTTCTCCTTACACTT
CTAAGGCCACTTCTGAGCTTAGCATGAAGCCTGTGTCTGCAAGGTTCCTCTGTAAAACACCGGCGTTTCCTGCTTATGGGTTAGGCATGTGAAT
GTTCGTTCTTTAGCCCCACGGCCAGAGAATCAGATCCCAGAAGGCACTGCGGCAGCTAGCAAGGACTGGGGCGGAAGTGTGGCTACAGACAGGG
GTTTCTCCTGAGAAAGTCTGGCACTTCCAGAGGTTGCCATTGAACTCATTTGGTCTCTGCAGATGGCTATTAAACTGTGAAAATTCTAGAATGT
TCACTTGCCAAAGTTTTTGTATGTCTAAGGCTTTTCTTTTCTGGTTACTAATAAAGCGTTCATCATGTACCCCATATGGTTTCAGCAAACTTTA
TGTTTGTTAACTTATTTTGTTCTTAGAATAGTATTGCATAGGCACTATTTTCTACTCATCGGTAAGGGGAAACCAAGGAAGAGACGCATGAGAA
GCCTGCTTAGGATCTCATGCCAAGGGTTTATCAGGACCGGCTCAGCCTCCAGCAGCTTCTCCATTACTGTAAGGAGTGTAGGTGGCGTCATGGT
GCTCATGAGGAGTATAATGGGGTGGGATGTATCGCATGCCATGTGATGTATCTGTAAACCTTCATGTAGGTGTCCTCTACCCCAGCCCTGTGCA
TAGGGTGTATTATGAATGATTATGTATTATGTAAGACAGTAAACGGAGCTTTCCTAAGGGAGAGGGATTCAACAAGTTCCTCGGAGGCTGAGAT
CTCACTGGAGGCTGGGCCCATGTGTCTCCACCCATCATTCCTCTTCCTCTACTCCAACCACGCCAACAATGTGTTAATGATGCTTTTATTGGGG
TGTGTGTGTGTGTGTGTGTGTGTGTGTGTGTTTTGTTTATTTGGCTACTCTGGCTGGCCAGTGCGGTACCAGCAATCTCCCCATCTCTTCCTCC
CCAGTGCACATATCACACACATATACTATTCTCCCTTGCTTTCTCAGGGACACTGGGTATTCAAACCCTCATCCTCATGCTTGTGAAGTGGGCC
CTTTACTGACTAAGCCATCTTCCCAGTTCCCACCCCCGTGTAGTATTCTTCTGTTATCAGGCCAAACAAAATTACCCCCTCCCCTCATTAGGTA
ATCATTTGATATGGTCTGCAGGGCCAAAAATGACCTCATGAGCTCTACTCTTACCTTCTGCTGCTCCCAATCCCATACTCACCCCTAAGAGGTA
CAAACAACCCCTACGCAGATCCCTCTGAATATCCCTGTCAGATACTGCTAATATCACCCAGTCCTCCGACTCCACCCATAGAGTCTCCCTTTCA
TCGTGACACTGTACAGCACTCTTGTGTCAGGACGGACGCCTGACATGAGCAGACAGAGCTGGATGCTGTCTCTTCTGACCCTCACTGAGTGCTT
CCTTGTCCAGCTGAGATTTCAGTCACATGCGGCCTTTCTCTTTCCCTCCCTACAGATAGTAGTCCACAAGGGTCTTTCCCATGTGGCTCAGACA
TATAATAACACACATCATTTCACATAGATAGGCACACAGCACCCCATGGTAGAAGCGTTCGGTCTGTCAGTCTCGGACTCTCTCTGATCCACCC
TTCCCCCATGTTTTTTCCCCCCACTAGGCAAATGGAAGGCCCCTTGCCACCTGTTAGCATTACGTCATTGGCTCCCCAGTGCACAGTTGTACCC
AAGGCCTTAAACAAAGTAGTTCTTCTTGTATTGTTTGCATTCAAAGAGCTGATATCATGCCAGCTGATGTCATTGTGTGTCTTTGTGTGAGTGC
TATGGCAACTGGGCAGGTGGGGAGCCTCCGGCTGATGTCATTGGGGAAGGAGGGGCAGAGACTGAATTTTAAAAAGCTCTCTGCTGAGTTGTTT
TGTGTCTGGGGGTGGGAGGGTGTTTTGGTATGCCTTTATTTTTTATTTTTTCAAACTAGCTGCTTTAAGACAAATTACAGCTCGAACACACTAA
ATAAGAACAGAGACGCCTCTTCCCCCTTCCAGCCTCTTTTGAGTTTAGCTTCCCAGTCCTTCCTCCCATCTTACATGGAAAAAAAAAGGTTGCA
AGTGCCTTTTTCCTTCAGAAACAAGGGAATTCGGTTCCCCTGGCAGGATCAGCATGCGGCTGTTTACTGGGGGCTTTGTGGAGCCCAGGAGATT
GCCACACAGCTCCTCCCTGTGTCCTCTGTGGAGTTTGCCACAGTGGCAGTGGGTAGTTTTGCACTCTAGTTGTTAAGTGTTCACTGGTGACGTG
GTTTTCCTCGTGTCTTGCATTTTTCTTTGTAGTTGGAAGGCTTCCTTTGGGCTAGCCACCCGGCTATAATGATTTCACCACAGAAGACAACAGC
AAGGGCAGAGTGTAATTACAGAAATGAATTCAAATGAAGTCAAAGCTCTGACATGCTCTCCTAAAGACATGTTTGTCCCTTCCCGTATCTCCTT
TTTGACTGGTAGACTAGACACAGGATGGCCCTCCCTACCAAGTGGACTGTGAATTGTTGCTATTCCCTTCTGAAAATATGATCTGTGCTCTGTT
ATACAGCTGGCTGTGTGCATCGGTTCGGGGACACACTGTGTTCAGGTCACCTGCTCTAGTGGTCAAAAATGAGACTCGTGGTTTGAAAGGATGT
GGTTTCAGTTCAGAAGCTGGTGGACAAGTGAACTTCCTGTCCTGGTAGCAGAGCCTCACTCACTCTGTTCAGCCTTTGTGCTTTTAGCCTTAGC
CTTTGGGACACTCAAGACCTCTGTTACTGGGAAGACATCGCTTCTAGGAACTTCCCAGGGTCTCACCCTTTTCTAGAAGACCCCACGTGTCCCA
CACTCCTTTGGTGACCCCTTCCCAGGTTTCCTAATGTCTCTCTCATATACGTAGTAGAATTTGAGCTCCACAATCCTTCAGGTTTGTTTGTGTA
TAAATATGTGTAGCATAAGTAACAAACTCTGACCCGTGCATTCCCTTAACCGTTCTTTTTTGTATGGCTAGGCATTTTTTTTCCAGAAAGTTTT
AATTAGCTCTTTTTCCTTTAGCATTAAATAGAATCATTTTCTTTGATTTTATAGTTATTCCTTTAGTGGGTACATAGACATCCCATGGATGTAT
TTAATAGTTTTATTTTTGGTATTTACTCAGCCTTTTCTTTCTTTTTAAAAAACTTACTGTTGTTGAGTGTTTGTTTGAGGTGATTGTGTTTGTG
TATGTGTGTGAGTGTGGAAGCCAGAGGCTAGCTTTGTCCAGCCAGCTCTCAGCTTCCACCATTAGACAGATGGAGTTGCGCGAACACCCCACGT
AGCTGACTGCACAGCTGTGCTTGTGCGAGTTCCTTGAGTGACTCTGTACTTATACAAGGCCATGTCTGCATGCTLAATGTCGGAAAACTGGTGC
GGCTTTAACCTCAAACCTTTAAGAGTTCCAAACTCAAGCCTTGAAGTTAGACCGGAGCCTTGAGCTCGGAGTGTGCCTTGTTAGATCCATCAAA
GGTCACTGTTAATGGGTTAGTGTACCCACAATCCTCTAAAAGCTAAGTACAGGAAAATGGGCCACTCTCAGATGCCACTCTCTTGGAAGTCAAG
ATCTACAAATGTCAAGCACATGTATGGAAGAAGTGAAAATGTAGATCCTGAGTCACTCTTCCAACCCTACGCTACATTAGCCAAGCCGCCCTCT
GCGTTTTCTACCTTTGGGCAGTCGCAGAAATAAGATGAATACAAATAGCTTGTTCTTGCATAGTACCCATGCAAGGCTGGGGGTTGGGAATATA
CTAAACACTTTATCTGTGTTTATCTCCATCTCGGACTCACACTCAGAGAGACATGCTTGTGCAACTCAGGTCAGTAGTGCAAGCCGAACACTAG
CCTGTGTAACCTGGCTTTTCCACAAGCCCTGCTAGTAACCGCTCTGCTACTGAGTCGACTTGTCCTTCTGTAAAGTCAGTCATAGAGGGGACAT
GACATGTGTGCACAGTGCCAGGAGACAAACGGAAGTCCTCTGCAGGGCGATATCATCCCTGATTTTCTCAGCTCCCAAAGTACGAGTTCTATAT
AGGCCAGGCACCATATGTCTGTTAGAGGCAAATCAGATTTTCAGTTGATGAAATTACCCGGTGCTGTGTGGAACTTGTTCCCAGGCACCTTGGC
CCAGTTTTGCAATAGGGGTCACAGTGTCCTCTGAAGCTGGCTCTGGGTATCCAAACAGGCTTCTGGCTCTTGTGTTTTATTTTAGAAATGTTAA
AGTACGCACATAGCCATAGTGACACCCATTTCCATGGGAAAGCCGACATTTTTTAGCCCTTCCCCTCTCCTCCCCGACTGTGGGCTTCACTCAT
ATGTGATTTCTGTGTTTTCCTTCTAGGGGGACTCAGTAGTTTTAAACAGAACCATGGAAACCTCTGTGACAACTCCCTCCAGCTCCAAGAGTGC
CGGGAGGTGGGGGGTGGTGCATCTGCGGCCTCGAGCATGCTACCTCAGTCTGTCCCCACCACCCCTGACATCGAGAACGCAGAGCTAACGCCCA
TCCTGCCCTTCCTGTTCCTCGGC2ATGAGCAGGATGCTCAGGACCTAGACACCATGCAGAGGCTCAACATCGGCTATGTCATCAACGTCACCAC
GCACCTTCCTCTGTACCATTATGAGAAAGGCCTCTTCAACTACAAGAGGCTGCCAGCCACAGACAGCAACAAACAGAACCTGCGGCAGTACTTT
GAAGAGGCCTTCGAGTTCATCGGTAACTATCTCTCACAGCAGGGCGGGCGGAGAGCTTCCTCTTGGCTCTCTCTTCCCTCTACTTCTGGTTTTG
ATATAAGGTCTGAAGTGTATTCCTATGTTAGGGAAAACAACAACAACAATAACAACAACAACAACAAAACCTACCTAATGCATAGTCCTTCCTG
TTAGTCTCAGAACTACCTGGATGGGCATAATTGAGATAATAAGCTTTCTGTTGCCATCATTGAAACACCTGAAAGGTTGTCTTAAACGGAGGAA
TTATCTTGACTTATGATCTTGGACGTTTCATGTCTTGGTGCTTTGATTCTTGGCCTGAGGTGAGACAGAACATGGAAGGGAAGGAGTCAAGGTC
AGCTGGAAAGTTTCCTATACTCAGCTTCTCATCAGAGATGCCACTGTCATCAGTGAGGCCTGTAGAGTACTGGTCTACCTCATCGCCCTCGGCA
GCAGTGTTTCACTCCTCACTTCCACATACCCTGACCCTCCATGGCCATCATCTGGAAGGCACGGTTCCCAAGTAGCTCAGAATAGAGAGCACCA
GAAAGTGTTGAGTTTCATATTAAAAGCTTTGGATGCCTGTGAGCACTGGACAACAGTTTTTGTGACATTTCTAGATTAAAACACATCCCCCAGG
AAGTGTCCCCAGAGGAATGCACGTCAATGATAAGGTAGAGGAGAAGGGAGTAAAGAGACTTGTCCCTTAGCTTTAATCACCCACACTGGCTGCT
TCCCAGTAGACAAAGAAACAAACAGGATGTAACTATCTCTCTCACCAGTCTGTAGACAAGCTTGCTTTGAGAGACCCAAGAGTAATGCTTCAGG
AAAGTCTCCCTTTGTGAACACTAAATGACCTCCCACACCAAGGCCGTAGGACATGGTGGATAAGAATGAGTGAGGTGCCCACTGCCATGTTCTG
TGTCACCCCATGAAGGCTACTGACTTTTTGGCAAATAGGAAGGGAGGGACCGGGACAGCATTTAGCCTTGAGTGGCACAGTGTCTGACCTACTT
CCTCAGGCAAGCCTCTACCTTCTAACATTTTAGAAACCTTTGGAAACAGTACCACCAGCTGGGGATGAAGCATTTGACACATGAGTCCGTGGGA
CCATTTCACATTCATATTAAAGCAATAATCATCCTCTTTGTCCAACATCTGTCAACTGGAAGTCCCTATCCTCCATCCTCCCGTTAACAAAGAC
GCCATGGCGGAGGTGGCACTTAGACACTGTATGACCAGAAAGATTAAAAGGGAGAGTGCAGAACTGCTCAGAGCTATTCCTGCTGCCTAGTCTA
TGTCCTCCAAGCCCTGAAGGAAGCACCAAGTAGAGACGTGATGTCACCTTAATTATTCCTAAACCTTCACATAGCAAATTGGTCAGCTTTATTC
ACCCAGCATAGGGGAAGACAT1TCCATTGGGCACAGTGAGTTATAGTGAGTCACAGTGTATGGCTTATTCACTTGAGGTTGAGGCAAAGGCAGC
ATCGAGAAAGGGCTGGCTCTGAAGAAACTTCTTCAGAAGCAGGCCATGCTGTGGTAAGTTTCTCCGTTCACTTTATCCTTGCAGAGGAAGAATG
GAAGGATGGTGTGAATTGTCTGTCATCTTCCACCCAAGTGATCTCAGTTCTTAAACACTGAGTGACAAGGACTGATGTTAGTGCCCATGAGAAG
AAGGTATATGTTTCCTTTGCCAGTTTGTCTCCTGCTGAGACAAGCAGGAAAGATCAACCCCCCCCCCATAGGGCCCATGAAGGAAAATTCTTGC
CAAGTAGGCTCTAACCTCAGAAGGAAGCAATCACCAGCTCAATGCTGAAGTTAGCCTTTGTAGCCTTTGTGGCACTGTGGCTAGACTCAGGATA
ACTAAGACAAGAAGAGCAGGTGGCAGATGTTCAACATCATTTCCAACAAACTCCAGCCTTTATCAGCACAAAGAGGTAGCCCAATGCTCTACAC
ATTAGCACCTCAAGTTGTCACAGGTCTCTGTCTCAGGAAGAAAGCATCCATGGTTGTTGCTCGTTTTGCCAGAAAAAAAATGTCACAAGTTTAG
CAGCCACCAGGGTGATGGGACTTTTTTTTGGCAAGTTGGCAGCTCTGAACTGCCTGTGTTCCTTTCCAGCTTGTCCTTCATAGCTCGGCCATCC
CATGGACTCTCTGGCAGGACAGCCAGAGCGGTCTCTGAACTCAGAAGTAAAGTAACCTTTCCATGTCAGAAATTCTAGTGTCAGGAAGGAACTG
GGGACTGGGAGGAGACACAATGGGGAAACTGTTTGCTGCTTAAGACTGAAGACCTGAGTTTGAATCCCATAGAATCCATGGAAAGTCAGATGCA
AGAGTACACATCTGTAATGCCTTCTCTTCCGTAACAAGACAGGAGGCACAGCACCCCTAGACACTCACAGGACAGCTAGCTTGGCAATCTACAG
CAGCACAGGAAATCCCATCTCAAACGAGGTAGTAGGCAAGGCCCCACATTGACCTCCACGTGTGTGTCACGGCATGCCTATACCTGTGAAAACA
GAGGACCTAGTGTTCTTGACTTCTGGCCATGACTCTTTCCCGTGTTTACCATGCGTGCCCCACTGATTAGTTCCTAACACTGGGTACAAAGATG
CCCTGCGTTCTTTATTCATAAAATCTGAGCCAAGCCTTGTGTCCTGAGCAAGAAATGCCCGTCACCAGGGCGATAAAGTTCCTAGTTACTTGAG
GCTGTTATAAAGAAGAGTCCCACCTGCTTAATTTCAGGTGGAGGAAGTTGGGAATTTGTTTTCCATTTAGCAAGTGGCATGGGATAGGCTTGTT
CTAAGAGATTACACCCACAGTGCTTACATTCCTTCTGGATTATTCAGGCTTACCTCCTCTTTTAGAACAAAAACAAAACTAATGACAAGCAACA
TTTATTTAGCCTGCAGAACAACTCAGGATCACGTGGGTGGGCATGGTTTTGTTCTCTGATTGGATAAACTGAAATTTTATAGTGTGGCTTTCAG
GGGGCACACAACAAGGTTCACAGCATAATAACATTCACCTGAGTTTAATATAAACTAAGCAATGTTCAGGTTTAGAGTTTAACAATGCCAGTTT
AACCCCAGAATCAAATCACTTCATCTCCAAAGATCCAGAGGCTGGCTAGCTAGTGTCCTTTGCATTATCCGAGCAGGAAGACTGAAGTTCTGGG
GGGGTCAAAGGACTCACAAGGTCACTCAGCTAGTGTGTTAGTGGCACAGATGGTCACACTCAGGGTGCACCTCACTCATTCTCACCCACCATGT
CCTACGGCCTTGGTGTGGGAGGTCATTTAGTGTTCACAAAGGGAGACTTTCCTGAAGCATTACTCTTGGGTCTCTCAAAGCAAGCTTGTCTACA
GACTGGTGAGAGAGATAGTTACATCCTGTTTGNNNNNNNNNNNNNNNNNNNNCAGCCAGTGTGGGTGATTAAAGCTAAGGAACAAGTCTCTTTA
CTCCCTTCTCCTCTACCTTATCATTGACCTGCATTCCTCTGGGGACACTTCCCTGGGGGATGTGTTTTAATCTAGAAATGTCACAAAAACTGTT
GTCCAGTGCTCACAGGCATCCAAAGCTTTTAATATGAAACTCAACACTTTCTGGTGCTCTCTATTCTGAGCTACTTGGGAACCGTGCCTTCCAG
ATGATGGCCATGGAGGGTCAGGGTATGTGGAAGTGAGGAGTCAAACACTGCTGCCGAGGGCCATGAGGTAGACCAGTACTCTACAGGCCTCACT
GATGACAGTTGGCATCTCTGATGAGAAGCTGAGTATAGCAACTTTCCAGCTGACCTTTAACCCTTCCCTTCTATGAACTTTTAGTAAAACGCCA
TGCATTAAATGCTAACTCTTATAGAGAACAATCTGTAGGATAAAGGTGTGTGTGTGTGTCTGTGTGTGTGTCTGTGTGTGTCTACCATGTGGAA
GATATTGCTAATAGCACTGCATGTATCATGTAGTCATATAGCCTGGAAAGTGGTATGAACATTGTTAATCAGAAGACCTTTTTCACATGCCCAT
TTCTGTGCATGGCATAATCTCCATTCCTTCTCTCCTCCTTTCCCTACTTTTTCTTCCCTTTATGCCAGTGTTAAGAAAATAGAAAAGGAACAAG
GTTGTCCAGAAAGAGGTCCGATAACTATGGGGTGCACAGTAGCTTGCTTCTCCTGAGTGTGTCCTGTTGTAGGTATAGCTTCTGCCTTCCCCAT
CTCCTGTGACATGTGCTTTTCCCACCCATCACTTCCTTGCTCTATCTTTCTAAATGTAGAGCTGTAGGGGACTGGGCAGATGGTTCAACAGTGA
AGCACTCATGACACAAGCGTGAGAATCGGGGCTAGCATCCCCACAACTCACGTAAAAGCCACATAGCTATAGCAGCTTGCCTGGAATCCCATGG
CACAAGAGACTGAGATGGGGTGCCCCAGAGCAAGCTGGCTATCCTGACCAGCAGAAATAATGAGCTCCAGATCCAGCAAGAGATGCTCTGTCGT
CTAACATQGAGGGTGATCAAGTAGACACATGATACGGAACATGGTCTTCCACAGACACACGTGAACATGCATCAGCACTTATGCAAACATGCAT
CCATACCCACATCTACATTATACACACACATATACATACACACACATACCCTTCCCCCCTCAAAACAGTAAAGCCCCAATGAGATGGCTCAGTG
AATAAAATAACGTACTTGCTGCCAAGACTGACACCCTGCATCCAGTTTCTACTAATTCATATTGTGGAAAAACAGAACTCACCCTTACCAGTTG
TCTGCTGACCTCTCTATGCACACAGTGGCATGTGGACCAACCCTGATTTTTCTTTTTTTAATAATTTAAGAAAATGTAGACCAACAGCTCCAAT
TTCTGATTGTGGCCCAACTCTATAGCTCGAGATTTGAACATGTAGAATCCATCATGCTTTGGAACCATTGAAATCCATTCTCTCTATGCAAAAG
GAACCACTGTTGACTCAGGCAGAAGTTAAGCTTCCTCTGTCCCCCTTTCTTACCACCTGTCTCTCTGTCCCACAGAGGAAGCTCACCAGTGTGG
GAAGGGCCTTCTCATCCACTGCCAGGCCGGCGTGTCCCGATCCGCCACCATCGTCATCGCCTACTTGATGAAGCACACACGGATGACCATGACT
GACGCTTACAAATTCCTCAAAGCCAAACGACCAATTATTTCCCCGAACCTCAACTTCATGGGGCAGTTGCTGGAATTTGAGGAAGACCTAAACA
ACGGCGTGACGCCAAGAATCCTTACACCAAAGCTCATGGGCATGGACACACTTCTGTGACAACCGCCAGCACGGAAAGGCCTGTGCTCTCTCAG
GAGACGAAAAGGAGGGAAGGTGGATTCTAGCTTGTCGCTCTTCTTTCCTTTCCTTTTCTTTTCTCTTCTCTTCTTTTCTTTTCTTTTCTTTTTC
TTCTTTTCTTTCTCTTTCTTTCTCTCTTTTTTTTTAAGGTTCGGAGTGTTTGTGAAAGTAAACAAACTTGTCTAAAGACTCTATTTTTAATAAG
TGTAAGAAGACTGTAACTTTTGATGCGAATGAGACCCACTTCTCTTAAACTGGTATTGCAGTTAGGTTAAAGAGGTCTTTTTTGTTTTGTTTTG
TTTTTTTAAGCCAACAAATAAAAATATTATAAAACTTGTTTCTTCCCAGTTTCCCTTGTAAGCTTATTGTAGAGTTTTGAGTAAATAGTCTGTG
CGGGCTCATAGACCGAAGATACCACCCTTCAATTACAAAGAACCAAAAGGAAATGGAAAAGACTCCAGACCTGGAACTGACTGCACAACCATGT
CAAAAGCAAACCCTGCCAAACCGTGCCCAGTTGTGCTCACTGGTGTGAAGAAAGGGCCGGCAAGCTCAGTGGACTCGGCTCGCCTCACACCTTC
TCTGGGGAGACAGGCTAGTGTCGGTTTTGTGTGTTCTATGCTCCGGATATCTTTTCCCCTTCTGTGGGTCTGAGAGAACTTTTTGTTTGTTTGT
TTGTTTGTTTGTTTGGCACAAGGAAACTGACCATTCTACCATGTGCCTTTGCTGGCACTCGTGCAATAAAAATGGTGTTTGGAGTGTGCAGCTG
AGGGAGAGCTGGCAGCTGAGTGAGGAGTCGCCTTCCAGACAGGCATTCAACAGTACCAGTGGCTTCCCCTCCCTCCTTTCTCCTTCTCCCCCCC
CCCTTTCTTCCTCATCCCCTTTTATTTGTCTTTCTTTTGATTTGATTCTGGTTACAGTGCCATACACCTTGTTACATATGTATATCAGAATGTA
AAAAAACAAAACAAAAAAAAAACAAAAATTTATTTAAAAAATATTTTTCGCAAAAAAAAAATATCCTTGGTGTGTTTTTGTTGATGGTGTAAGA
ATTTATTTTCATTATATAAATGAACCTCGTTTGGGGATGTGTCATTCTTTGTACGTGCCTGTCTTCTCTGGTTAGGCTCATACCTCTCAGCACG
GGTTTGTATAAAGAGATGGGGATGAGAGTGTAAAGCGGGAGGGACCGCTCACGGAGGGAGGCTAAGGATCCCACCACTGATGCGGTCCTCTGCT
TCCTCCCCATCCTCTTTCTATGAGACAGCAGACTCATCATTGACCAGCTTCCGCCAGACCTCATAACCAAATCACAGCCAAGCCGAGGATTTAG
AATATACAGTTGTCTCCCTGGTAACTACATGTAAATATCAGTGACAATCTGCCTTGTATGGTTTTCACAGTCCCGTCTCAATTGACACTAGCTC
ACATGACACTTTTTAGGGACATTCACCCTATAGTAACAATAGTACAAGCTGCAAAAGATGTACTCTTCCAGTCTTTTTCCCAGTCAGTAGAAAT
CAGCTCTGTGTGCACACGGACTTTGACAGTGCTGGCTATTCAGCCCACAGACAGTTGGAAGTGGTGTGGGAAGGATATATAATCCTACGGTTTT
GTACGTTTTATTAGACAATATGTATCTAGAGCGACTTAGCCACTGGGAAGATTTGTAGTGCCCCAAAGTTTGCCTGGTGCGAGTAAGCGCTGAA
GAATTCTGGCATGTCTGGCTCCCAGTGACTACATTTGACATAAATATTTTTGTGAACATTTGCTTACAAATGTTACACCAGAAATATTTTGACA
TTGATTTCTTTATTCAAATAGCTTGCCTGCCAAGAGTCATTTAAATTTTTCTTTCATTAGAAAAGTGGAAATTGAACATAATAGGAACTGAGAG
CTAGCTGGAATTACGTTAGTCTGATATAGAATATCAACTAGTCAAAAAGTAAATCTCTTTTTTTGGCATTTCCGTACTGTCAACAGTCTTTTTG
TTTTGTTTTGTTTCTGTCAACTAGAGCAAACTGAAAGAGTCTGATACACAGTGACTTGGGATGCCTGGCAGGCTTGTCATTTTCTAAGTCTAAA
AGTTGGAGTCCTGGTGGCCTATAAAATTCTCTCTCTCTCTCTCCCCTCCCTCCTCTTCTTTCTCTTTGCTTTTPTATCATGTCTTCTGCAAACG
AAGGGAAGCACTCAATAGCTACATGGACATGATTTGTGTGTTTCGAAGTTTATGAGCTTAGAGGAGAAGGTCTGCCTTGGGGCAACAGGAATCC
TGCCAACCAGCATACCAAGAATTCTGAGAGGGACTCCAGTCTTTTCTCCTAATCTGCTCTGAGTCACTTCACCTTCGTTTCTTCTTGAGGAATG
TTAATCACTTCATGAACCCACTGGATCAGCAGAGCCAAGGCTCTGGAAAGCAGAGTCCCCACCATTCTGAGCCTCTCACTAGCTGCCTGCAACC
TTCAGGATGGGGTTGGGAAGTGACTGTGTCTTCTGAGAATGCACAGTCTATCCACCTCAAGAGTCATCCCCACGGCCTGTCCTGAAGGAATGCA
GTGAGCTGGTGGAATGAATCCAGAGTCTATCTAATGCCCAGTAGAGTAGGCGTCACTGCCTTGGTCTGAACAGAACAACAACTCCAGATTGTCC
ACATTTATTTCAATAGCTGATAGTTGCTTTTCCAGTGTCAATGAGTCTAGACAGCTTAGTTCACAGATGAGCTCCTGCTGGTGACATTTGGACC
AAGGTAGATGGAGTGGAGAGCGAGGACGGAAGCTGACAAGAACGTGTATGCAAAATAATAGAGGAAACATTCTTAGGCTGCAGCCATCACTGAT
TTCTACTCACTGGGAAAAACACTGGAAGAGTACATCTTTTGCAGCTTGGACTATTGTTACTATAGTGTGAATGTCCCTAAAAAGTGTCATGTGA
GCTAGTGTCAATTGAGACGGGACTGTGTGGGCAACAAATGACAGATGACCCAGAAAAGCTAAAGAGAATAAACAGGGGGAAATGGGAAAGTAGA
GTAACGAGAGAATGAGTACTCGTGTTGAATTGGGATCCAAATCATCTGAAAACTGAGACATAGAGAAGCAGTGTTGATCTCTTTGGGTCTTCTG
AGGGGTAAGCATGGTGAGCCAAACAAAGATCAGACTGTCTTAACTTTCACCTTATTTGAAACCTGTCTCTTGGACATGAACTATAGAGATACAT
GTGGAATTATTTCTAACCTCAAATCTCAGCTGTTCTGGGGCAGGGCACAGTAGAAGATATCGAAGCTCTGGTACTCCAAAGTATGAGGAATAGC
ATATTCTAGAACTATACTCGTGCCAGTTTTACCCACCTGCCCTTTGGAGGCAGCAGGGACTGACAGCCATATTGTCACTTGTTCCTGATTTCTG
TCTCTGGTTACCTTCATCAATGGTGTGAAATAACCAGGCTTTGGAAACATTCGAAGACTCACTGGCAGAGTATTGCTTCTGTGTGACATCGCCT
GAAAACTCTGTGTCAATAACCCCATGGGAGAGAAAAGCTGCACATGAAATAGAGGGGTGTAAAGATGAAATTACAAACGTGCTGATCATGTCAC
TGGACGGTTGAGCAGCAGAACAGGGGAGAGCGTAAGAGCTGAGCTCATGGCTCCTGCTAAGTCAACGTAACTCACAGCGTCAAGGCAAAAGCAT
GCTCACTATAATTCTCCCCATTGCCCTTCTAAAATGGGATGGCTGCTATTTGTCTTTGTTTGTTTGTTTCCCCCACAACTTGATGCAAATTTCC
TCTCAGACTTAGTAACCCAATGTGAACAGGCAAGGGAAATGTGGGAAAAGCCAGTTCATGTCTAGGATGATTTTGTCATCGACCTCATCGCGTT
TGGAACCTCCCTTTCTCACTGTTCATGCTGTTCCTTTGTCCTCAGTAAGCACATCCTTCATCATGGTTCTTTGCCTTCTGAATGGCCCAGACCT
TGACAACTGGGCTTGTATTAGATTGTTTTCCACTCATTTTATTATAGTAACAAGGCAACTACAAGCACAGCATCCTCTAAGCGACACTAGCATT
CCAAATGGACTTTTCCTTAACCCAGTACCAGCCCACCTTACTCGTGACAATCACAACCATGTCAGTCAGTATAGTAAAATATATTTTTGCTTGT
TTTTGAAAAGGTTTATTTCCGTTTWAATGTGTGTGTGTGTGTGTGTGTGTGTGTGTGTGTGTAGTATGTGTATCTGAGTTCAGGTACCTTGAGA
AGCTAGAAGAATGTGTTCCATGCCATGAAGCTGGAGTAACAGGCAGTTATGAGCTGGCTAATATGGGTGCTGGGAACCAAACTCCAAGAGCGGG
ATATGCTTGAACAGAGGAGCAATGTCACTAGCCTATGTCTGATTCTTAGTGTAAGGCACCCAAGGAAGTTTTAAGTGTCAACTTCTAGCACAAT
GGATCCATATAGCATCCCCCAGTAGAGGTGTCTTTACCTTAGGAACTAAAACTTCTACATTCCAGGGTAGAAAGAACAAGCTGTGTAAGTGGAT
CATTAATGACATTTGTAAGAGACGTTTGTCCTGTTTCTGTCCCTTGATTCCTGCATTTAAGTATTCTTAGATAAGTGTTGGGGGTTGGTCTGGT
GCTGCTATGTATTCAAATGATAAATACTGGCCCCAAGATCTGGTTTATACCCCCCAGCTGATCCTAACATCAAATGATGCTATGAAAACCTTGC
TCCCCAATTTAAAATATTGGTTCAGTAAAAATGGCTACAGTCAGTTACTGAGGAGAATAGAAAGAGGCAGCCTTTCCATTTACTGGGGCTGCGG
GGTAGCAGGTAGGAGGGAAAATGAGTAAGAAAATGAACATGGAGAAGACAGAAGCTCTCCATTAGATGTGATCGACCAGGAGCAGGTGCCTGAG
TGAATAGTCCCCCTCCCCCGCAAAGGACAGATTGCTGGAGCACAAGTAACTCAGGAGAGACTCAACAGGATAGTATTTGGGGAGAGGTGATGGG
GAAGTAGCCAGTCTAGCATTTCAAAAATAGATTAGGCCTAATCCCCCACTAATTCCGCAAGAGCTGATTAAATAAATCCATAGGACTCTGCCTC
AGTTACTGGCAGGCTGAGTGGGTCATATTAATAACTAATAGAGTTTATTAAACTCCATTGACAAGGAGAAACAACAACATATACTGACTGATGA
CTCTGACTTTATTGCTTCTTAGGGGACATTACTCTAGCCCTGTAACATATTTCCATTCGTCCAGCATAGCAGTAGACTTGTTAGPACTCTCTGC
CTTTCTACTGCTTGAAGTGATAGATAACATGGTAGGACTAATGAACATGAATCTGTTTCCATACACAATTCACCACAGAAGGAGGTTCCTTAAA
GGCATAGTGTGGTATGTCGTGGTGGTGTATAAGAAGTACTCTCTGAGTGGCCAATTGCTGGGTTTGGCAAGGTGTTTAGTAGGAAAGACAAACC
CATATGAAAAGTCAGTTTCGTATGAAATGAGAAGAACTTGCCCTCCAAGATAGAAGTGGTTTTGTCATCAGATACCTGAGTAATTCCCCCAGAC
GGTGGTTTGCTAGTCCAGGAAATGAGTGCTGCCTCATTTGGAGTTGGTTGCACATGTATTAGTTGCTATAACCCAACTAGACTTTGATGAGTAC
ACAATCATGTGCCTAATTGCAACCCCATGTTGACCAGCATGGGGACTTTGATCAGAACATCATTGATCAATAGAGAGGGGAGGCTGACAGAATG
GCTAAGCTTATCTAGTCTTAAGATACTTCTATCCTAAATCCGTGTCTTGGTGGGCAGGCAACAATCCATCCCACTAGGAGAAACTGATTCCTTG
CATTCGTTTCAAAACTTTCCAATCTGATTTACTCTGCCATCCTTCTTTAAAGTCTTTAATAAGCAATGAAAACTGTCACTGCTGCCCATAAAGC
AATGTAGGTTCATATTGTTGCTCCTCTCTGTGTTTAGAAAAAAAAAATCAACAATGAGATGCAAAGTTCTGCCTACTGGAATGCTTTCCTTTTA
CCTCTTTTTCTGGATCATCACAGAGTAGAGATACAATGATGTAGCCTTWCACTCTGGATGACAAGCTAGTATGCAGAGCTTTCTTTAGACAGGG
TTAATTTGTTTTTCaTGACTAGTCCCCAAGAAGTTCCCATGACTCTAGAGGTATAGGTTCTAAGACATATTGGAGCAGAGATATGGGTCTGTGG
GTCAGTGCTTATTGATTGGCTTGGCCTTGAGAGAGTGTATTCCATGCCCATTGATAATGAAATGATACTGTTCATGCTCTATGTACATACATGC
TGGGCTCAATAATGCTTAGCTCATAATGGGAAATTTGGGTTATATTGTAACTTTATGGTTCCAGATCAAGCTTCCAGPATCAAATCATATCTAA
AGAAAGGATAGATTTTCTGAAAAAACAAAACAAACCAACCAAACAAAACTACTGCCATAGTATTGCTCCTGAATTCTAAATATCTATTCTGGCA
TCTATTTTGTGATTTGCTTACAGGGAAATGGCTCCATGCAGTATTGCTGTCACACAGAGAGACCTTTAGTGCCACCAGATTTACTGGATCCGGG
TGTTAAAACATCTAACATGGTAACCTTGAGCCGCAATAGAGACTCCATAGTTCTGGATTTTACTCAAAAAAATGATAACCTTTTATCACAGTAA
ATGAATTAATTTTCCTAAATCTAAAAGGGCCCTTATGTTTTCTTCTCTGTGGTAGCAAGTACCACAGATGGTACTAATTTGTTACTTTGTCCTT
AAAGAAGATGTATTAGCATACTTATTTTAAAAAGATGTATTTATTATATTTATTTATTTTTTTAAAATTTATTTATTTATTATATGTAAGTACA
CTGTAGCTGTCTTCAGACACTCCAGAAGAGGGCGTCAGATCTTGTTACAGATGGTTGTGAGCCACCATGTGGTTGCTGGGATTTGAACTCCGGA
CCTTCGGAAGAGCAGTCGGGTGCTCTTACCCACTGAGCCATCTCACCAGCCCCTTGTTATATTTATATCAGTACACTGTAACTGTTTTCAGACA
CACCAGAAGAGGGCATCAGATCCTATTATAGATGGTTGTGAGCCACCATGTGATTGCTGGGAATTGAACTCAGGACCCCTGGGACAGCACTCAG
TGCTTTTAGCCATCTCTCTAGCTCCCTACTAGCATTCTTAAAACCACTAGACGTCTATACATTCACTGGTGATAAGCCCCTGAGTGTTTCAGAA
TGTGTTTCTCAACCTTTTCATTACTAAGTAGAAGATAGATAGGTTAAGAGCCAAGCTAAGCTCATTGAGAAAGAGATGACTCAGGTACCCATGG
TCTCTGACAAATCCCTGTCTTATCTCAGCAGCATATCTACATCAGTTATTTCATTGTGCTCATCAGGCACAGTGAGTGCTATCATCCATCCATC
GTGTCTGAGGGGATGGATACACACCTACGATCCCTGTGTACTCAATTATGATACAGGGATATCAAGTTGAAATGGACCTAAGGTAGGATAGTGA
TGGTTACAATATTATWCATTCTGAAGGCAAACTCCTTCTAATGGCCTTAACTTGTGCTTCAGAAACATTTTATGTAACGGAATAATAAGTAATG
TAGGATTAGAAGGTGATATAGGCTGGCTAGCGAGGCTACTCTAGAGTTGGAGTACAATTACAGTCATAGACAATATGTAGAGGAATGGGAGTAA
CTATATACTGTAAATACAGCCATCTGGATTTCGTCCATGCTCTATAAATAGCTAGTTCCTGGTCTTTTTAAACAGGTATACAACAGCCATAGAG
AGCTAAACATTTGCTTTACCAATACGTACTTATGGGTTACCAGAGCCATGTTGAGTGGCTCCATTAATCAAACCATGTCTGGTATAACATCTCT
AACAGAAACCAACAACTGAAAGACATCTTTAAAACCTACTGTTCCTTAAATTCATCTCTTTTTTGTGTAGGACAAATTATTGACAATAAAGGAG
GAACATGTAACGAATGCCATCTTTCCCTTTTGTCTCAGTTCCTGTCGCTGTCACTAATCTGTTCCATTCTTTAAGAGATCAGCATTGCTCTTGT
GTTTGCTACCTTAGTAACTTGTAGCTTCATAACAAACTATATCAAAACCTAGTGGCATAAAAGAATTCAAATTGTTGGGTTTGTTAATGAATTT
GTTTCAAGTGTGTTCAACAGACAGGTCACTTGAACTATAAACTCAGAACCAGAAGTGAGGCAGCTTGTTGGGGCTGGAGAATGTGTTTCCAAGG
CCTTGCAAGTGCTTTTCTAACTGACTGGGAATTCAGCCAGGGTTGTCCACTAAATACCTTGGATCCTCTCCTCGAGGATGCTTCGQCTTTCTCA
TGGTAGCTGCTTTCCAAGTGACTGAGATGAAAGTTGCAAAGCTTCTAAAATCGTATAAACACGGATGTCTCAGATCACTTCTGCAAAATCCTGT
TACTAAATAATTTACAAGCTCAAGTTCAAATTCAAGGAGAAAGCAATTGGATTCTACCTCTTAATAGCAAGAATAGCCAAGGATCTGCAACATT
TCTTATCACACTGTAGCCCCCTTTGCACAACCA2TCAGTATGTGAAAATAGTTTACACGAGGCAGGGCTGTTGGATAATGACAGTAAGTCAGGC
AATGACATCAGCTTCCTCCAAATATTGCTTCAAATAGTGTTGTAATTCAAAGCTAAAGTTGAACTGTTTTTTTTTTTTTCTCCTCCCAAACCAA
GCCCTGASGATAAGGATAAAGATCACAAGGGGAAGGTCGCATCAGCTGATGACTGCCGCCCTCCTGCTTCTGATGGTATGCCAGCTCTCAAGGC
CACACGACTCACAQTCTTGTCTCATCCAAATTGTATTTGGACAGTATACTACATTTTTAAAGTTACTQATCTAAGAGGCATQCGATACTCCATA
ATTCCTCCCCAAATCCCTGSGCATCGTTGTGACCTTTAGCTTGCTATATTTCAACGACAAACATGAATGCACCCIAAAGACAGAAGACAGACAG
ACAAACAAATAAGGAACATTATGTGGATCTGTCCTGTCTCTACATATCATGTGATGCCTAAGGATTTGGGAACCAAAATATAGGTCTGCCATTG
GCTTTTGGATTGATCCCTTGCCGTCACTGGGAGATAACTGTCAGATGTGTCTTCTGGCCGGGGGGAGGGTGTCTCAATTTTTTTTTATTAACCC
ATTGTGTGACACTTGAATTAAGCTTTAATTTCTCTTTGTCTPCTTTTGTTTTTTGTTTTTGTTTTTCTGAAGCAGATCTCAAGGTAGGGGTTTT
AAAAGAAGCAGCTGATGAAATGATCCAATAAAACTGGCAAGGGAGAGTAGAACTGAGGCCAAGATGGAGGGAAAGGGATGGATAAACAAATTGG
AAAGTAAGATCTTGTTTCCAATGTAGAAAGTGAAAGAATTATCCTAGTGAGGGTGGGAGCTGTTGCATTTGTTCATCAAGGTTCCTTAAGTAGA
CAGATGATGGATGCCAGTCCCAGTACTTCCAGTCTTCTTAGAGGGAAGCCACAGAGGCCAGAGGAAGTCCTCAGGGAATCAGAACCACCCACAC
TTCGTCCTAGGAATCATAAGTGATACAAAAATGAACTGAACATGAGTGTCTGGGCTATAGGCCTTACAGCAGGTAGAGTTCCTCTGAGCCCTTC
ACTTCTGACCACTTTCCCAGTCCCATTGAAAAGGATAAGGAGAGGACTTGTGGGAGGATAAGGATGGGTTGTGTAGGAAACAGATCTTGTCTGC
TTCTTTCCTTTCTTCTTGAACTCAAAGACATGATTTCTTACCAGCTGGACTCTGAACCCTTTATTCTTTCATGTCCTGTCTTTTTCACCCTCTC
ACTTTTCTTTTTTATTGAAAGAGTTAAACTTGCTGAAAACCCAGTGGGCTTCTGAAGAGTCTCTAGTCTCTAGTGTTGCCTTCCTACGTTCCGC
CCCTAGGCCTCAGATTCTTCAGTTTCTCACTCATCCCACACCCATTCCCTTCGTCTGGCCGGTGTGCTTTCGGTAACTTAGATGTCTGTTTGGC
AATATTGAAAAGAGGGTAAATGGGGAAATGGGCTGAAAAAGAATTCATCAGAAAAAAACACTCTAGGTTGGTACTAAACTCAGACCGAAGTCTT
GCTCATCAGGCTGCTGAGCACTCCACAGGCATGCATATCAGATTGATGATTACTTTAAGAAATGATTAAATTATAATTATTTCCTCATGACTCA
AGTGTGGATGAATGTGAAGTTTAAAGAGAAGCATGAAAACCCCAGTCAATGATCTTTTCTTCATTATCACGTT
MOUSE SEQUENCE-mRNA
AAAGTAACTCTGTGTTGCTGCTGSQGATCAATGAAGCTGAGTGAATSGGGGCGCACTGCGCQAGCGCATAGCTGGAGCGGGCGCCAGATGGTAG
AGGGCTACGCTTATTGATGAAACTCTTGACTTCTTGAATTGCCAGTTTTCAGCCTCCTCATGCCTCCATCTCCTTTAGACGACAGGGTAGTAGT
GGCACTATCTAGGCCTGTCCGACCTCAGGATCTCAACCTTTGTTTAGACTCAAGCTACCTTGGCTCTGCCAGCCCAGGTAGTGGTAGCCACGCT
CCTGTCCTTGCCGCCGCCGTTGTGACCCTCAAGGCTGCGAATCTGACGTATATGCCCTCATCCAGCGGCTCTGCCCGCTCCCTGAATTGCGGAT
GCAGCAGCACTAGCTGCTGCACTGTGGCAACCTACGACAAQGATCATCAGGCCCAGACTCAAGCCATTGCTGCAGGCACTGCCACCACCGCCAT
AGGAACCTCGACCACCTGCCCTGCTAACCAGATGGTGAACAACAATGAAAACACAGQCTCTGTCTTAAGTCCATCCGGTGGCCTCCGCAGCCCT
GTGTCAGGGACTCCCAAGCAGCTAGCCAGCATCAAGATCATCTACCCCAATGACCTGGCAAAGAAGATGACCAAATGCAGCAAGAGTCACCTGC
CCAGCCAGGGTCCCGTCATCATCGATTGCAGGCCTTTCATGGAGTACAACAAGAGTCACATCCAAGGAGCTGTCCACATTAACTGTGCCGATAA
GATCAGCCGGCGAAGGCTGCAGCAGGGCAAGATCACTGTCTTAGACTTGATTTCCTGTAGGGAAGGCAAAGACTCTTTCAAGAGGATCTTTTCC
AAAGAAATTATAGTTTATGATGAGAATACCAATGAGCCGAGCCGTGTGACACCATCCCAGCCACTTCACATAGTCCTCGAGTCCCTGAAGAGAG
AAGGCAAAGAACCCCTGGTATTGAAAGGGGGACTCAGTAGTTTTAAACAGAACCATGGAAACCTCTGTGACAACTCCCTCCAGCTCCAAGAGTG
CCGGGAGGTGGGGGGTGGTGCATCTGCGGCCTCGAGCATGCTACCTCAGTCTGTCCCCACCACCCCTGACATCGAGAACGCAGAGCTAACGCCC
ATCCTGCCCTTCCTGTTCCTCGGCAATGAGCACGATGCTCACGACCTAGACACCATGCAGAGGCTCAACATCGGCTATGTCATCAACGTCACCA
CGCACCTTCCTCTGTACCATTATGAGAAAGGCCTCTTCAACTACAAGAGGCTGCCAGCCACAGACAGCAACAAACAGAACCTGCGGCGGTACTT
TGAAGAGGCCTTCGAGTTCATCGAGGAAGCTCACCAGTGTGGGAAGGGCCTTCTCATCCACTGCCAGGCCGGCGTGTCCCGATCCGCCACCATC
GTCATCGCCTACTTGATGAAGCACACACGGATGACCATGACTGACGCTTACAAATTCGTCAAAGGCAAACGACCAATTATTTCCCCGAACCTCA
ACTTCATGGGGCAGTTGCTGGAATTTGAGGAAGACCTAAACAACGGCGTGACGCCAAGAATCCTTACACCAAAGCTCATGGGCATGGAGACAGT
TGTGTGACAACGGCCAGGACGGAAAGGGCTGTGCTCTCTCAGGAGACGAAAAGGAGGGAAGGTGGATTCTAGCTTGTCGCTCTTCTTTCCTTTC
CTTTTCTTTTCTCTTCTCTTCTTTTCTTTTCTTTTCTTTTTCTTCTTTTCTTTCTCTTTCTTTCTCTCTTTTTTTTTAAGGTTGGGAGTGTTTG
TGAAAGTAAACAAACTTGTCTAAAGACTCTATTTTTAATAAGTGTAAGAAGACTGTAACTTTTGATGCGAATGAGACCCACTTCTCTTAAACTG
GTATTGCAGTTAGGTTAAAGAGGTCTTTTTTGTTTTGTTTTGTTTTTTTAAGCCAACAAATAAAAATATTATAAAACTTAAAAAAAAAAAAAAA
AAA
MOUSE SEQUENCE-CODING
ATGCCTCCATCTCCTTTAGACGACAGGGTAGTAGTGGCACTATCTAGGCCTGTCCGACCTCAGGATCTCAACCTTTGTTTAGACTCAAGCTACC
TTGGCTCTGCCAGCCCAGGTAGTGGTAGCCACGCTCCTGTCCTTGCCGCCGCCGTTGTGACCCTCAAGGCTGCGAATCTGACGTATATGCCCTC
ATCCAGCGGCTCTGCCCGCTCCCTGAATTGCGGATGCAGCAGCACTAGCTGCTGCACTCTGGCAACCTACGACAAGCATCATCAGGCCCAGACT
CAAGCCATTGCTGCAGGCACTGCCACCACCGCCATAGGAACCTCGACCACCTGCCCTGCTAACCAGATGGTGAACAACAATGAAAACACAGGCT
CTGTGTTAAGTCCATCGGGTGGGGTGGGCAGCCCTGTGTCAGGGACTCCCAAGCAGCTAGCCAGCATCAAGATCATCTACCCCAATGACCTGGC
AAAGAAGATGACCAAATGCAGCAAGAGTCACCTGCCCAGCCAGGGTCCCGTCATCATCGATTGCAGGCCTTTCATGGAGTACAACAAGAGTCAC
ATCCAAGGAGCTGTCCACATTAACTGTGCCGATAAGATCAGCCGGCGAAGGCTGCAGCAGGGCAAGATCACTGTCTTAGACTTGATTTCCTGTA
GGGAACGCAAACACTCTTTCAAGAGGATCTTTTCCAAAGAAATTATAGTTTATGATGAGAATACCAATCAGCCGAGCCGTGTGACACCATCCCA
GCCACTTCACATAGTCCTCGAGTCCCTGAAGAGAGAAGGCAAAGAACCCCTGGTATTGAAAGGGGGACTCAGTAGTTTTAAACAGAACCATGGA
AACCTCTGTGACAACTCCCTCCAGCTCCAAGAGTGCCGGGAGGTGGGGGGTGGTGCATCTGCGGCCTCGAGCATGCTACCTCAGTCTGTCCCCA
CCACCCCTGACATCCAGAACGCAGAGCTAACGCCCATCCTGCCCTTCCTGTTCCTCGGCAATGAGCAGGATGCTCAGGACCTAGACACCATGCA
GAGGCTCAACATCGGCTATGTCATCAACGTCACCACGCACCTTCCTCTGTACCATTATGAGAAAGGCCTCTTCAACTACAAGAGGCTGCCAGCC
ACAGACAGCAACAAACAGAACCTGCGGCGGTACTTTGAAGAGGCCTTCGAGTTCATCGAGGAAGCTCACCAGTGTGGGAAGGGCCTTCTCATCC
ACTGCCAGGCCGGCGTGTCCCGATCCGCCACCATCGTCATCGCCTACTTGATGAAGCACACACGGATGACCATGACTGACGCTTACAAATTCGT
CAAAGGCAAACGACCAATTATTTCCCCGAACCTCAACTTCATGGGGCAGTTGCTGGAATTTGAGGAAGACCTAAACAACGGCGTGACGCCAAGA
ATCCTTACACCAAAGCTCATGGGCATGGAGACAGTTGTGTGA
HUMAN SEQUENCE-GENOMIC
TACATTTTTAGTAATACAGGACAGGATTGCAGGACACTTGGTACAATTCTCATCTTTTAGGCTATGCTTTGCTCTGTCCACCAAAGGGGAAAAA
GGGTGTATTAGGATTCTCTAGAGAAACAGAACCAACAGGATGTGTATGTGTATAAATCGAGATTTATTCTAAGGAATTGGCTCATGCAATATGG
AGGCTGGCAAGTTCAAAATCTGCAGGGTGGGCAAATCGGCTGGAGAGCCAGCAAAGATCCAATGTTGCAGTTAAAGTCTGAAGGCTGACTGGCA
GAATTCCCATTGCTCAGGGGAAGTCAGTCTTTTGTTCCATTCAGGCCTTCCACTGACTGGATGAGGCCCACCCAAATTATGGGGGGTAATCTGC
TTTACTTAAAGTCCACCCCTTTACATGTTAATCTCATTCATAAACACCCTCGTACAAACAAACACCTTCACAGAAACAAGCAGAATAACACTTG
ACCACATATCCCATGATCCAGTCACGTTGGCCACAGAATTAACCATCAGAAAGGAAGATTGCACTAGCTTAAACATACAAAGGCGAAGTTCTGC
ATCCACACAGAGAGAGACACAAACTACTCCTTATACCATGGGACTAGCGGAACTTGTCTTTGAGGTTCTCCTGGGTTTAGAAAGAGGGGCCCCA
GGTGTGTGCTTGACATCCCTCAACTGTACAAAAGCAGTTGGCGCCTGTCTAAGCCAGTGCAGCCTTCCTTAACATGCACCAACACAGACAGCCC
TATTCTTTCTTTTCTATCCCAGGAGGTGGTGGGGCCCAGTGTCTGCTGAAGTCAATCAGAATGAGTTTTAGTAATATCACATTTTTTTTTTTTG
CCAGCAAACATTCAACAACCCCTCTGTAACCAGATCCTATTCTATTTAATAGCTTGTGAAATTGTAAATTTCTGGAAATAGCAAAATACCCTCT
ACTTGTCTGCTCTTTGCCTTCTTTCTGCCCAAAGTTACCCTTCCCAACTCTGGAGTCAAAATACAAACTAAATTTTAAAACAAAAGCAAACAAA
ACAAAACAAAAAACCCAGTCAGCCCACTGTTCTTTTTGCCWGCCTGCCTTACWTCTTTCAGTCCTTCTTTAACATGCTGGGCAAGTTTGATGAG
TTAAAATGTCTGCCTTTAACTCCTCTAATCCATATTCGGGGGGACTCATGTATTACATGAAGATTAGGACTGTGTTGAAAAGGGAGTCCAAATC
TATTGGCATTTCTATTCTGCAGAATATAGAAAAGACACTTCATTGGACTGTTTGCTATTATTAATCCAATTTAAGGTTTAGAATGGCGGTTCAT
AGAGTTGCTTCAGTTTTCCTAATTACTGGGAATAGGAATTGCAAACTGAAGCATGAAGGAGCTAAGAGTCCTTGTGAATTATACATCTTAGTTT
ACTACTGTAGAAAAATGATACAGTTTTTCTGTCACCATACCTGCGATGGTGAGCACTGGCAGATGAATGAAGCACAGCGCCAGCTCTCTGGCTA
CTTTCTGATCCAATCTATTTATCTTTCTTGCATTCTAAATTTTTGTGACCTGCAAGTTAATGGCAAAAATAACATPTGCTTCTTTTCTAACATT
TCTACTTGAACTAAAATTTTAGCCAGTTCCAATAAGGATTTTTCTCTTACCTGTTGAATAACTCGAATTGACTAGACCTGACCTGATTTGGATT
AATTTGAATACCCCTACTATATGCCTGAGTGGTACTGTGGGCTCAGTATTTAGCATAGCATAGACACTTAAATTCACCCAGAAAGGGTTTCATC
CACCATGTTTGTACATTCTTGGCCCTTGCTGGTCATGAGTATAATTACAAAGTGTTTGCTTTATTTACCAGCTAGACCAGGGAAAACACTGAAC
CCTCCCCCTGGGTGTGAAATCCAGGTGGACTTGGGCCCATTCACAGAGCATTAGAAACAGGACTTCTCGCGGTGCTGCTCCCCACCTAACCCAG
AATCAGTAGCGGCATTTCCTTTCAGAGCACAACCACCAGGAAGACGAAGAACTCACTGATGTCCACGCTCAGGTCCTTGATTAAATGCCTTTCT
GAAGAAAGCTATTTATTGGCATCAGTCACATGCTAGAGAAAATAAACACTGGACAATCCGTCTGTCAGGGAGATAAACACCAGGAAATGCATGC
CTTTGAGAATTACAAGAAGGAAGATGTTGAACGAGAAAAGGAAGATACCTTCATCCTCCTGAAACTCAGTGAACAAGAAGAGGAATTTTTTCTA
AACATTGAAGACAATCATAAWTGCAAAGAGCATPGACCAAAACAAAAATCAAGTACGGTATGGAGTATAATGAGATGGATTATAATGAGAAAGA
TGCTGATGTTTTCTAAATTCTATGGGAAAGAAATGGAGTTAAACTGTAAAGAGGGAAATATGATCACAACAAAACAAAACAAGTGGTGTGTAAA
CAACGTAGCTCCCCAGAGATAGACACTTGGTTAATATCTGCATAAATAATTCAAAAGAGTAGTCAATTTAGGGACTTTGGAGGTTTCTAAGTTT
CCAGCTATTACAGAAGGCCAAACCAGTAGCTAGAAAGCTATCATCAGATGGACCAGGGTATGCCTCTAGAAAAATGAATAATTCAAAGGTACGT
TCTTGCTACAACCTGAATATTTGTGTCCCCCCAAAATTCATATGTTGAAATCCTAAGGCCCAAGGTCATCATGCGGGCACAACCCTCATGAATG
CGATTAGTGCTCTTATAAAAGAGGCCCTAGAGAGAACCCTCACACTTTCCACCATGTGAGGACACAGCCAGAAGTTAGTAGTCTGTAACCCACA
AGAGAGTCCTTATCAGAACCTGATCATGCTGGCACCTTGATCTTGGACTTTCAGCCTCCAGAACTGTGAGAAATAAATTTCTGTTGTTCGTAAG
GCATTCAGTTTATGATATTTTGTTATAGCAGTCTGAATGGACAAAGACAGTATGTTTAAAAAACATTCTCAGTTCATTCATTCATTCAGTCACT
CACTCACTGAACCGAAGCTTAATGAGTTCAAACTACGTGCTAGCTCCCGGGCCACCGGCTAGGGATGGGACGGCAAACAAGACATGGTTTTTCT
AATAGAAGTGTCATAGGCTCTTCCTTGAATTTACCAGTCCAATCCGCAGTAGCAACCAAGCCATTCACACAATTTACGGCAATATTTGAGACTG
TTCTGGAAATAAAGTGGAGGTCTGGATCCATTCCCCAATGTGGAGGCTGCGGTTGTAAGAGTGAGACCACATGGAGATTCACGTCATGATGGAC
TTAGAAAAGTTCAGAAGAAAACAAAAGAAAAAAACAGCAAATTCTTATGAACAGGCAATTAAAAATATACTGCAGTCTGGAGACTGAGGGGGAC
ATGATAGAAGTTTATAAAATCACAACAAGAGTGAATGAAATAACACAAAATGGTTAAAAGCAGATGCTCTGGTGCCAGATTGTCTGGGTTTAAG
TGTTGACTCTGCTGCTTTCTAGTTTTGTTGACCTTCGGCAATTATTTACCCCATCTGTATTTCTCTTTTCTCATCTTTAAATTAAGCTAATAAA
AAAGTACTTACTTATAGATCGATCTGGCTGTGAGGATTTAAGTGAGTTAATGCATGTAAATCACTTACAGCACTGCTTAGCACAGAACAAAACA
CTTAGTAATATCTTACCTATGATTATTTTTTCCCAAATTCTAGATCTTTAAAATCAGTTCAGTTAATATTCAATTGTAAAGATAAAGTACGTTA
TGATGCACTTTGTTGTCTAAAGGAACTTCTTATATGTAGAAGTGGTACAGTCTGAACCTACTAGGAGATGCTGACAACGTTAGATTAATTCTTT
AGTGTTAGACCTGAAACAAGTCTTGAGGGGGTTTATGAATGCTTTGCGTGCATGTTTACCTTATAACTTTGCATCCTTCAGTAACACAGTTGGA
CCCAGCCTCCTGGGGTTGAGAAACTGGCGCTGACAGCATATCGTAATGATAAAACATAATTGCTCAGTTTAGTGAAGGGGAAAATGTTAACAGT
CTTTGATGTAGCAACACATAATAATAACAGGCCATCCGCCACAGAGGAGGGCATTGTTGGAGACCCAAGGCCAGTGAATGTTTTGTGTGTGTTA
TTTTCATAAAGAAAATAAGTTTACATCCATGGTCCACACACTTGGGCCTGAGGCAAAATCCTCTTCTGAGAAAGACCACCACATGTTTCTGGGG
TTACAAATAGGGGAGCAGTGAAGCGGAAGAAAAACTGAAAGGGATCTGCTTGCCTAAATGAATGACAGGGAGCATATTAATTCCCCTAACCAGC
CAGTCACCTCTGTGTGATCAGTAGAGGCCAGAGTGAACCTTGAAAAGAGGTCTCAGATCAATCATGCTTTGGCCATGCCATCCAGTGAAATTGC
TTTACAGGAAAAAAAAAAAAAAAAAGAGAGAGAAACAGGATTAAAAAACAAAACAGAGGATGGGCGTGGTGGCTCACGCCTGTAATCCCAGCAC
TTTGGGAGGCCGAGGTGGGTGGATCATGGGGTCAGGAGTTCAAGACTAGCCTGACCAACATGGTGAAACCCCGTCTCTACTAAAAATACAAAAG
TTAGCTAGGCGTGATGGTGCATGCCTTCTAGTCCCAGCTACTCAGGAGGCTAAGGCAGAATTGCTTGATCTCAGCACGCGTGGCTTCCAGTGAG
CCAAGATCATGCCACTGCACTCCAGCCTGGGCGGCAGAGTAAGACTCCATCTCAAAAACAAAAAAAACAAAAAACAAACAAACAAAAAAACCAG
AACCACCACAACAAAAAAATCCCAACCAGGATCCTTTCTTTAACTGAAATTTTACTTTGGAAGCCCATGAATAAGACATATATCTATCCATAGC
TATATCTGCATCTGTCAAGTGTGAAGGTGTGCAGGACAAGATTGTGGTCACAGAGGCTCCACCAGTTCACCCCTGCTCCCATTTCTATTGCCTC
CCACTTGCACTGATGTCTTTTACCCTTTGTATATAAACTTTTCAAGATCCAATGTGTATTTTAATCTTATGGCACATCTTAATTCAGACTAGCC
ACACTTCGAGTGGCCGACACATGTGTCAAATGACCACCACACTGGAAAATACAGATATAGAGCCTTAAATGGCTCAGAGCCTTTTCCTGAGTCA
CAAGCACACCTGCCCATGAATTTTGTAGGAAAGAACTCCAGGCCTCTTGTGTCCAAACTCATAGATAGTGGGACAAGCACATGGCCCTGCCTCT
GTTTCCATCATTACAGTAGCCACTGTCTTAGTCCAGTTGTGCCGCTATAACAAAATACCTGAGACTGGGGAAGTTGTAAGGAACAGAAATTTAT
TGCTCACATGAGTTCTGCAGGCTGGCAAGTCCAAGATCAAGGTGCCATCTGCAGGTTCACTGCCTGGTGAGGGTCCAATCTCTGATTTCAAGAT
AGCACCTTGTTGCTGTGTCCCCACAGGGGAATGGAAAAAAACTAACTCACTCCCTGAAGCCCTTTTGTAATGGCCCTAATCCCTTCCATGAGGC
CTCTGCCCTCATGACTTAACCACCTCCAAAAGGCCTCATCTCTTAATAGTGTCACACTGGTGATTAAGTTTCAACATGTATTTTGGGGGAACAT
TCAAACCATAGCAGCTCCTTCCTTCAGGGAACACTTCTTATCAGCCCTTCCCTAGGCCTGGAGACTCTTGCTCGATGTTTTGCCAGGCTGGTCT
CAATGACCTCAAACACTTACCATGCCACTTTCCTATTCCTCAGCTTATTCCCCACTCCTTCTGGTATAATATCATCTTTATCCTGGATGATTTT
TAAGTTTTCTCCAAGCCATTCTCTGCCWTAATTCTAGTACCTCCAGAAATCTATCTTGACCTTGAGGATTATTTTGAAGGCCCCACCTTCTCCC
ATTACCCCACACACTTAACCATTTAAGTGCACAAAAAAGAAGTAATTTAATTAATACATTTGCTAAATACTATCCATATTATATCTTATATGTT
GGCCTAAGTTATTGTCATCTTTTGACTTTAATACATAGTACTTCAGCTGAAACAGTCAATATTTTTCTTATGATGTTTGTGGGAACAAAGATAT
GCTCAATACAATCATGTTACAACATCCAGACTGAATGAAGATGCTTCACTCTTTCTTTGGGACTCAAACTAACATTAACGCTCTGCTGCTGGTT
ATTCATATACAGATCAGATTTGTAGCCATTGGCTGACTAGCATTACGAATTTAAGTCTCAGGGCATTATATTTCAGTGTACTATTTTCACATTT
ATCGCTCAAAAACAGGAATAAAATCACTTCTTCTTGTCCAAAAGATGTTCTGAAGAGTAGTGAATGGAAAAAAATTCCATCTATAATCTGATTT
TTTICACCAGTCTTATGACTTGAATATAAACTTAGAGATGCCTAACTTAAAAAATAACTACAACTTTCCTTATATTCATAATCTGGTAATTATT
CCACATTTCAGGCTTGATATATGATAAGGAATITTGCCATCTTTCCCAATGTTTCAGCCTGGATGGCTTAGATTCTTAGTCAACTAAATTATAA
TAATCTACTACTTTGAAACTATAATAAAACAATCATCTCATTACAAGAGTTACATTTCTTCTTGAAATTACTTTTCCATTTTGGGCCTTGTGGG
AAAAGCTGTTAAGAACTCTTCTGCAATTGTATAAATCTATACTTTGGGCTTAGATGTTGAGGCATTAGAAATGAATTCATCATTTATAGATCAT
ATATACCTTTAAAGATAGGCACCTTATTTCCTAAAGCAAGTAAATTAATTTTTTTTTCCACTCAATGCCTTTTATCAACAGGGGATCTTTTTTC
CCCCCTGAGCGCTTGAATGAGTTCCCTTTTTCTTCTGAGTTGGGGTATTACCATTCTATGGATAAATGAAGACAGAGACTGGATGAACAGATAT
AACAGATAGAGTCAGAATCAGAACTTAGAACTCTCAAACTCTGAGTTAATGAAAAATTTTCCCATAATTGTCTATGTTTAGGGAAAGGTAAGCT
TTCAGCCTTCCAGCTCCAGATAGATCAGGGTAGAACCTCTGGGAAGTTCTTTTCTGATTTGTATAAGAAATTACCCAGAACCCAAGTTTCCTGA
CCATAACCTGTTGATCTTCAAACATTTAAGAACCAAATGGTGTCCCCTAAGCACTCTGCTATTATCAGGAGGCTGAATTGACGTGTGTGTTGGT
GTGTGGATGGAGAGAGGTGTAAACCAAAAATAAAATTCTAAGCACCCCCCACGCCCCACCCCCTGCCCACCCCGCCTTCCCAGGCAACCCTCTG
AACGGACTAATTTGTCAACCAGGGCTCTTGTAAAAATTTATCCTGAAAGACTGGTTCAGCCCATGAGGGATGTGAGGGTGGGACGTGCCCCATT
CATTATATATCAACCAACGGACTAATTTCTCAACCCAGGCTCCTGTAAAATTTATCCTGAAAGACTGGTTCAGGCCATGAGGAGAAGTGAAGGT
GGGATGAGCCCTGTTATATATCAACATGGAGTTCAAGTCTGATAAGAAACATTTTACAACCTATTCTCTCTGAACCTGCTGCCTGGAGACTTCA
TCTGCATAATAAAACTTTGGTCCCCACAAGCTCTTATCTTAACCCATACGTTCCTTTCTTTGATCTCAGGTCTTTAGACAAACTCAACCAATTG
TCAACCAGAAAATGTTTAAATTTACCTATAGCCTGAAAGCCCACCCGCTCCTTAGAGTTGTCCAGCCTTTTTGGACCAAACCAATGTATTTCTT
AAATGTATTTGATTGATGTCTCATGCCTCCCTAAAATGTATAAAACCAAGCTGGACCCCAACCACCTTGGGCACGTGCTCAGGACCTCCTGAGG
GCTGTGTCACAGGCCATGGTCACTCATATTTGGCTCAGAATAAATCTCTTCAAATATTTTACAGAGTTTGACTATTTTCGTCAACAGACGTTAC
ACAAAATCCTCTCCTATGTAAGACTATCGGATGTGTACGTGATGCCCGTCGTAACACTGGTGTGAAAAGCTGGACTGGGGCGTATGTGCCTGCA
TGTAAGTGAAGGTGCCCAAGGGGATTTCTCTTCACAGCTCATTGAGCATAGCTGACTTGCTACCTATGGTCTGACACCTCCTGATTTCAGATCT
GCCCTGAAAACAATTACATGAATATGCCCCTGCTACTCAGTATACTACTAGCCTTGGAGTCTGAAGTAGACCTCCAAACCCCATCCAATCAGGT
AAGGGAGAAAAACGATAGCCCAACATTCCCTAGTGCTCATAATGTATTATTCCATTATTTCACTTTTTATCCCTTCTCTCACAGATAAGAAAAG
AAAAAGCTCTACTTCTTTAGGGTTCTTGGACGTAGACTCTCCACAGTTCATCTGCGGTTGTTCATCTCCACTTCTTTTTGTATCCCAGGGCAAC
TTTCCTGCAGTTTCCCTAATGAGAATATTTTCCGGACTAGGCAAGGGGCGGCTTGCCCCGCCCCCTACTCTTCTCCCTGAACAGGNNNNNNNNN
NNNNNNNNNNNNNNNNNNNNNNNNNNNNNNNNNNNNNNNNNNNNNNNNNNNNNNNNNNNNNNNNNNNNNNNNNNNNNNNNNNNNNNNNNNNNNN
NNNNNNNNNNNNGGAGAGGCGGCGTCACCTCCTCCACGCTCCTCCGGCCCCATTCAATCTAGCTATTTCCACTCGGCTCTGGCTCTTTTCCGCC
AGCTGCGGCTGTTCCAGAAGCGCCGGGCTGCCGGTCCTGGCCTCGGCAGGGGCCGTGCGGGACCGAGGGGTGGCGGCCGAGGCATGTGGGGCGG
GTGGGTTGCGCGCTGCTGGCACGGCGCGGGCACCCAGCGCGCCAGGCGGGAAAGCGGGGCGGCGGCGGGCGGGGACCCAGACCCGGAGGGGCAG
CGGGCGCGTAGCGGGCCCCAGGACGCCCGGCCAGGGGATTGGCCTCTGCACCGCTGCTCAGGGCGCGTCCCTTGCCGCCTCTGGCGTCGACTCA
AGCCTCCTCCTCCGAGCAGCCCTCAGTGGCGCCGCCTTAGTGCTCTGGGTCGAGCCCCGGGAGGGTTAGCCTGGGGACGGCAGGGGCGTGACCG
GGGCGCGGAAGTAGGTGAGCAGCAGGGCGCCGCGCGGCGGTCAGGCCGGGACAGCCAGAGGGGCAGCGACATCTGCGGGCGGGCGCTTCCCGGG
CGGAGCAGGGCCCTCCGGAGGACGCAGGCCGCGTCGAGGCTGAAGGGCCTCCCTGTCCGGGACGGTCAGCTGCCAAGTTCGGGCCCTTAGCGCG
TGGCCCCGGGCCGCGGCTCGGAGCGGAAGCGTCGCCCCTGGCTGCGCGCTCATGCTCCTCCTAGCGCAGAAGACCCGGCGAGGTCCCCGAATTT
TGGCTTAGCGTTTGTCAAGTCACCTCGAGCGACTCGGAGAGAACCCGGCTTTCCCACTAGGGACGGTGATCGCAGTCTCTTTCCTTTAGAAAGT
TACTCCGATACTTTTGATCATCTGTCCATAGTAAGGAGGAAAAATAGCGTGGTTTGTCCCCGGGTGAGGGAGTGTTGGAGGATCCCGTCCAGTG
GGAAGAGCCAGTTTTAGCGGAGCAGCCCGTCCAGCCCGCTGACACTTCAGCCTGGTAAAGGGTTAACTGCATCCTGCCGGTTCGGTTTACATGT
AAATAGAGAGCAGCTGCTCCGCGCGGCCCCGGCTGGCTCTTTTAAGTTTTTGATTGGTTGCCAATGACATCACCGCCCGTGTTTTAACACCGAG
GACCCAGAGCAGCTTCGGATAAACCCTCCTTAAAGAGATGAGGCCACGCCTTCTTACCCGCCCCCTAGGCTGCCCATTGGTCGCGGGGCTCTGT
GAGGTAGCGGTCGGCTTTCTCCGGATTCTTATTGGCCCAACCCGCCGTCGGTCGGCGGCGAGTCCGCCCCCTCAGAACCTTACATTTACAGTGT
GTGCTTGTGTGAGTGTGAGTGTGTGTGTTTGTGTGTCTGTATCTGTGTGTGTGAGAGAGAGAGAAGAGACAGGATAGATAGAGATGCGATGCTG
ACGGAGGAGCTACAGCAGGTAGGGTTATAAGGTTCCGGCCGTTGGCTCCTGCTACCCTGTGCGTTATACTCCCTGAGTCTACTTCGATTTGGGG
CGAAGAAAAAATGAGGTTTGTTGGGATGCTTTGCGGCAGTTTTAAATGCTCGGGGCTCATTAGTGCGCTGTGTGCCGAGGAGTGAAGCGGGGGG
CGGGGGGATGTTAAGTGCTCCAGGAATGGGGAAGAAGCATTCTCTAACCACTTAATTTTCTCTCCAGCTCTTGCCTAGTGGTGGAAGGGAGAGG
GGATAGCTCAGTATTTCTCTGGGAcATTTTCTGGGCCAGACTGGATGGTTTCACGGGCAGTATCTACGCCCGACCCTCTGCTGCAGCGATGCAG
GTCTCTCTATACACTCCGTGTGTGTGTGTGTGAGCCTTGACTCTGTGTGGAGGTGGGGGTCCCAGCGCGTGTCTCTGTACAACACGCTTATGCG
TCCCTCTCAGAAGAAATGGTATGTTGATCCTGGACGTGTCCTACCAGGTAACACAATAGCAAAGACTTTCACCGCTTGGTCCAACCGGGAAACA
GTTATAGCTTCTGGAATAGAACTCGCTCTTCAGAAAAAATACTACGCAAGGGAAGGGGGGTTGACTCCTTCGCTCCCATCCAAAGGTGGGTGAG
AGACCCGAGTCGTTGGAGATCTGCCGACGTGATGGGTGCGTGCCCCGTGTGCGCGCGTGAGTGTGGATTCCGCCTGTGAGACACTTTGGTTCTG
TGTCAGAGAATGCTGACGGTCGTGTGTAGACGGATGAGAATGGTGACGGTCGTGTGTAGACGGATGATAGATGGCATTTTTCCTGATAGCTCTT
AAAGTTCGTTTAGGTGAGCGTCTCTTGGCGTGGGGTTTGGCGTCTTTGCTATGTGCATGTCTAATAGAAGAAGAAGAGTTAGCAAGCCTGAGTT
GTAGAGTGCCCCTGTGCCTACAGGAGGAAGGAGCTGTCTTTTGCAGACACTCTGAAATCAGAGATAGATCCGGTGGGCAACAATTTCACTGTCC
CTTTTCAACGAGTACAGGCTAATTGGGAGGTCCTCTTTACGGAATGAGTACTCTTGAAGGGGGATATCTGTATGGGATTGAAACCTTATACAAC
GTGGCTGCCTCCCATTGAGAGAAGCTCTAGGATGCACAGTCTGTGCCAGCCAGGGAGATGAAGAGGGGAGGAGAGCCCAAGTTGTCCTTTCCAG
GCAGGAATGAGGGCGCCGGCAGGTGACAGAGCAAAGGGTGAGGGATTTGCCGGGGCTGGGGTTTCCAGGTTTCCAGATCTGGCTCCATGGCTTG
AGATTTCGTTTTAGGACACCAGTTAGTAGTGAAAAGGGGAAATGCAGATTAATTTATAAGAGGCCAAAAGACAACATGTGAGGTTTTAGTATGA
CTATGTTGTGCTTTTCAAAGGACCCCAATAGAGAATGGAAGGCAAGAATAGCTCCAAGTTAAAGAGATTCACTTAAGGGGATTTGCAGAAAGTT
GACATCCACCCTGATGTATATTTAGCTGCTGTACCTTTCTGTGAACCATGCCAGTGCTCTTGGTTACCCCTTTGCCTTTGCAGCGAGTGAGGGA
ATTAAATGGCAAGCATGCAAGGGTGGACAAATGGGTCTTTCTCAGATGTTTGCAGTGTACTTCTGCCCGAGAGCTGAGGTTCAGTAGATGGTCC
TCTTAAGAGCCTCCCTTCTGTCTTCAGCTTTTCTAATTATTTGTGCTTATACCTTCTCTACAGCTGAACTTTTATGTAGGTCCAGGAAAGGTTG
TTCATTAACATTTACAACATTACATCCAAATTTAACCTTAGACTTAGCAACCAAATTGATTGGAGCCCTCAGGTTTGCATCCTCTTTGAATACA
TAAAAATGAATTTCAAGTTTTGATAATGGTATGATAAAGGGCAATTAGGACGACTTGCTCAGAGGGATGCAAAGGTCTTTCCCAGGGATTTGGA
TGAGACTGCCTTTTGTGTCACGTGACTTTATTCTTTCTTTCCCCCTTCCCCTTCTTTACAGACTGTCTTGAGTTCTTCTTGGATTCCCAGTTTT
CAGCCTCCTCATGCCTCCGTCTCCTTTTAGACGACAGGGTAGAAGTGGCACTATCTAGGCCCGTCCGACCTCACCATCTCACCTTTGTTTACAC
TCTAGTTACCTTGGCTCTCCCAACCCAGGCAGTAACAGCCACCCTCCTGTCATCGCCACCACCGTTGTGTCCCTCATGGCTGCGAATCTGACGT
ATATGCCCTCATCCAGCGGCTCTGCCCGCTCGCTGAATTGTGGATGCAGCAGTGCCAGCTGCTGCACTGTGGCAACCTACGACAAGGACAATCA
GGCCCAGACCCAAGCCATTGCCGCTGGCACCACCACCACTGCCATCGGAACCTCTACCACCTGCCCTGCTAACCAGATGGTCAACAATAATGAG
AATACAGGCTCTCTAAGTCCATCAAGTGGGGTGGGCAGCCCTGTGTCAGGGACCCCCAAGCAGCTAGCCAGCATCAAAATAATCTACCCCAATG
ACTTGGCACAAGATGACCAAATGCAGCAAGAGTCACCTGCCGAGTCAGGGCCCTGTCATCATTGACTGCAGGCCCTTCATGGAGTACAACAACA
GAGTCACATCCAAGGAGCTGTCCACATTAACTGTGCCGATAAGATCAGCCGGCGGAGACTGCAGCAGGGCAAGATCACTGTCCTAGACTTGATT
TCCTGTAGGGAAGGCAAGGACTCTTTCAAGAGGATCTTTTCCAAAGAAATTATAGTTTATGATGAGAATACCAATGAGCCAAGCCGAGTGATGC
CCTCCCAGCCACTTCACATAGTCCTCGAGTCCCTGAAGAGAGAAGGCAAAGAACCTCTGGTGTTGAAAGGTAATGCCCCTGCTCCCTTCCCAAG
CACGGTCCTGATTAGCCGGGTTCACTTTGGGTTTTCTCGTAGAGTGACAGCATTCTCCTTACCCTGGCTACCAAAGACCAAAATAGACTTTATT
CTTCTCTTCCCTTCTATGCTCTTTATTGTTTTGGTTTAGTAAGAAAAACCCAGCAGCACTGAACTGGAAGCCAGAAGATCTGGGTTCTACCCTT
CATTTGGGTTCTAATTTGCATTGTGCAAGTCATTTCACCTCTCTGGGACTGTTTTCTCATCTTTCTAAAAAGGGGCTTTATACACACCAGATGG
TATCTCAAGTCATGCCTCGTCTGCTAGCTCTATTCCAATCAATCACTAGTTGGAAAGTTATTGTCTCTCAGACTTAACCAATGTTGATGGAACA
GAGGAAGGAGCAACTATGGTGAACTACAAGTAAACCTACAGGTACCAGTTCTTACTGTGGGAAATTCTTTCTCTTTCTCACCTTTCTGACCAGC
TTGACTTTTATGTGGTTTATAAAGTGACCTTGAAGAAGGGCAGAGCTTCTTATTCTAAGGCCCCATATAAAGTATAAGTTCACCAATTACATCC
ATTCCTCTGCCAAGGCTCCAAGGGAACAGAGACGTTTTTATGAAACACTCCCCAACCCATTGTTTTTTCTGGCCTCACCTGACAACGGTTGGCA
TCATGGCTCCTCCCAAGATGGAGTAATGGGTCACTTGCCCCAGTATACTGAATGCAGAATAACTGAGATTAGCAGAACTGAGCTCTGGCAGAAG
GAATTATTCACCACTCTTCTCGGAGCACCTTCCATACCGTGTTGCCTAACCTTTCCAAGTAGCCTGCATCCTGTGCCCAGCCTAGTTGCACCTC
TTTGCCCTCAGATACTGACTTTTGGGGCACTGTACATCACTCTCATTCGGCATCTTTTACCTGGTGGTGGTAGTGAGAGATAGTCGTCTTCTCT
CTTCTCTCCTCTTGTGTTCTGAGCCAAGGTACGCAGTTTCTGGGTCACATCTCCAACCAGTCTCCTAAAGTGTGTTAGACCAAGGTGTTGCTGA
GTTTGAACACATTGCAWATTTAAATTGCAATAGGACATGTGGGTGAGCAAGTTAGTTATTTTGTCTCTATGGGACAGCTTTGCCATTCTCCTTC
TTGTCTTCCCAGTGGGGCATTCTGCCTTTTGTTAAGCAGTGTTCTGGGAATTATAGTTCTGAATTCCACTGACACAATCTCCTCTTCCCACCCT
CCGCTCTCCTCAAACTTGCCCTCATGGGGCTACACTACCACAAAGGCACATCTCTCCTTAGGGCTGGTGGGCTTTGCTGGGAAGGAGAACATGA
AAGAATTGTATGTAGAGAGTTCCAGAAGCTTCTAGACATTTCCTGGTCGTGGTGGTTGTGGTGGGTTTTCTTGAGGTCACAAATATGTTCAGAT
TTCCTCCATATAGCTCTGTATTTTATTGTTTCTGTATTCTTGTATGGTTGACTTTGAGTGATTCCCAGGATATTTACCCTGCTATTGTCTTACC
ATAATCTTGATGTGTCTAGCCTCTTACAAATGAGAAAATCCTACCGAGGAATTTCCCATTTGTAATAGTTTGTCTTGGGGAGCAAAGAGGAGGA
TAGCCAATGATCATGATGATCTCCTCTTTTCTCACGCAGAGCAGGTGTTCATGATAAAAAGCAAGTCTTTTGTGTCTTCATGATCTGAAGAGAG
GAAACAACACGGATCAAGATGATCCTAGACCTCCTAATCATGGGGATGATTACAAGGAGTTGCAGACCCTACTCTCTATTTTGCAGTGGGTGGA
GTTGTGGATAGGGGTGACCCATCAGTCATTGAGAAATGAATCTCCTGGGTGCTACTTGTGAAAGTGAGGATCCTCTCTCCTTTCCTTGTGGATG
CAGCTGAGATTCTGGACAGCCTAGACTTCTTCCTCAGTGTCAGAGTAAGATTGCCTCAATGGGGCGGGGCAGGACACACTGCTGACCTCACCAC
TGGGCGCCCTGGGCAGCCACTGCGAGGCCTCGTCATTTTCCAGTTGGTGAGACACCGCGGCAGTCGACTTGGAAGATGCTCTGGTGGTAGAGGT
TAGATTATTTGTAGTTTTGGGGGCCTTTTCTTCAAATATCTGGGAATTTCATTGAAAATATGTAGTTCAGGAGTGAAGGGGTCTATATTCTACT
TTATAATTATCATTATCATTTTGGTATCTTTTGGGAGAATGGCCTAAAATTGGGACCAAGATGGAAAAGAAGGGAAAGGAATGGGTCAATATTA
GAATGCCCTTCGTTATCCTTTCAACTTGGTAAACCAGAGATTAATACCATAGCACCACTGTGGTGAAAGACGGGGTGGGCATTCCCCAAAGGCA
TGACCAGCAGACTTCTCTCAGATTCTTCAGTGGGTCAAGCAGACCATTCTGGTCTGGCTTCTCCTCTCAGATTTATTTGAGTGTTCCCCTCCCT
TGGTGATAAGATTGTGTTTCAGCAAGAGTGGTAGTGGTACCATTTCGGAAGGAGTAATTTTTGCAGGGAAGTTGGTGGGAGGGGGGCATAGTTA
GAACATAAGGAGGAAACTTCTAAAGGCTTGTTAGTTTATTTTCAGAGATTTCAGTACAATCTTGGGTAATTTATGGCTGGCCCATCTGATGCTC
TGGTTTATGTTTGTAAACACTGGTTGCTACCCTCCCTGTCCAAGATCCTTGTCCCCCTGTCTCCATGCCATACTCTCCATTTTTGATGCTGTCT
GTCAAGTAGAGCGGCTGCTAACTTGCCATTTTAGTAATGCTGTGTCAGGTTGGGAAGAAACCGATCAGAGGCATGGCAGCCCCTGGGATTAAGT
TACTGTTCTAATTTACAGTGCCCTCCCTGTTGTGACCTATGCTAGAATCTATGTTTTAGTCTCATCTTCTAAAGAATAAATGGCATCAGACCTG
TGCTTCTCTTCAACCTGGTGAAAATGATCCAAATGAATAAATATTTAGGGATTTGTGAGGTCTTTGAAAGAATTATATTGTTTACTCTAAAGCT
GATTTTTAATCAACTAAAACTTGCTTTCTAGTCAAACTGAGTAAGAAAGCTGAACAATTCTAGACCATCCATAACGAGAGCTACCGTTTTTGCT
ATAAAGTTTTTCAGGCTCCCTTTCTTTTCAGTAAAGCTGGGTCCAGGGAAATAATTTGTCATTTACTTAGGTAGGAAGAAATAGTCTACTGCCC
CTTTTTCTTAAAGACAGTATATGCCTTCAAAAATGTTATTATAAACATTTTCAAGCATATAGAAAAGCAGAAAAGTGTGTAATGAACATCCATA
CACCTATCAACCAGATTAAACAATTATATTTTTCCTATTTGCTTTCTCTTTTCTGTTGAAATATTTAAAAATATAGATAATGTTTTAATGTATT
TAAGTATGTTTAATGTGTAAATTAATGTTTCAAATTCAATAAAGCTGGAAATATTTTATAGTATACTATGAACATTTTCACTCGTAAACACTTG
AGTGTCATGTACCCATTTTTAAGTGCTTTTCAACTTCGAATCCCTCTGTGACTGACTGGCAGTCAGGTCTACAGAGGAGCTTCCCTCCCTGGGA
GTAGGAGGGCTCCAGGTGCCTCCTTGCCGTCTGTGTGTCCCCCTTCCTCCCTGGTATGTCAGAGCCCATGCCTCTACTTGCTCTATGCTGTTGT
AAAACAAGGAATGACCAACTGCTACAATCTTTATAGGACTGCTCTGTACCAAAGGCCTTTACTGGGGGAATGTGAGAAGAAGAGGGAAATGGTT
TAAAGGATGATCCATGGGGAGGATTTGATCATGCAGGCAGTTAGGCCTTTATACTATAAAACTTCATCACTCCTTAGAATTTGAGCACCATACA
TTGCACACTTTTCCCTAGTTCAAAAGAATTCTGAAATATACTCTTATTGGCAATAGAGTTCTATGACAAAGTGCATGGCTAGGCTCAGAGTTCA
GAGACCTGTGAAAAATATTCTGTTTCTGCCCTTTTTTCGGGGGTCGGGTGGGGAACGGAATAAAAGTCTCCCCTTTTCTCTCAGAGATGTTATG
AGGATTTTAAAAAATACCTGAAATAAAGACATATCTACATTCATAAACGTGCTGTTGTTATTCTGAGCCTCTGGTTAACATCCAAGGCTAAAAT
GTCAAACATTAGCCTTGTAGCAAATGATCCAGAAATCAAGGCAGAACTTCCGATCTAGTCAGCCTGAATGCTAGCCTTGGCTCCCCTCTGTCTA
GGTATGTGCCCTTGGGGAAGGAACTGAATCCTTCAGTTCCTTAGTTACCTCATTAACAAAAAGAGGATATAACAATAGCTATCTCAAAGTGTTA
GTTTCTGAAATAAATGAATTAATGTGTGTAAAGTGTTCAGAACTTTATACACATACATGGTAAGCACTCCATAAATATGGTAGAATGTTTTTAT
TGATATTGATTGAAAGGAAATGATAGTGCCAGTACAAAGGCAAATTTTGTTCCTAAGGAGTACAAATAACAACCTAGGTATAGTAGAGTGTGTG
TGTTGCTATGGCCTAAAAATAACTTGGTGACTGTTAACTAATTTAAGTTGCATAGAGTTGGAGTGCCAAGTAATTGCAAAACATATTTGGGCCA
GGAGGCTGGAGTAATTTGGGTATATCCAGAATTATTTGTTTTAGGGAAATTTGTAAAAACATGATAATAATTCTGTCCAAATAATGTCCCATAA
CAAAAGCATAAAACTTTTAGCTTTGCTTTTTTGTTGCCTCTCATCATCTCATCAGGAGGATTTATTTTTGGAATAAGGATTGTGGACTGACTAT
AAAAGGGTAGATGGAAGGAGGGGTGCGCTGGTTCCTGAGCCTAGGGTTGTGTTGAGTTAGAATGTGAAGGAAAAAGGAGGGAAGGAGTTNNNNN
NNNNNNNNNNNNNNNNNNNNNNNNNNNNNNNNNNNNNNNNNNTTCTTGCTTTTCTGTTCCTCATTCACGATGTGCTCAGCAGAGTGAAATTTTG
CTCACTTACACCTGGGTTCAAATCTAGGCATTTCCATTGACCAACTGTATGCCTTTAGGCAAATCAGGCGGCCTCTCAGAGGCCACGTTTTCTT
CATTGTAAACAGGGACAGCTCCAGCATCCTAGGTTGAACAAGGTGATACAAAGTACCTGGCATTTGATGGCTGTCATTATAAATCAAGCCTCTG
GACCCTGCTCTCCTACTCTCATGCACTAATGTAAGAACCTCTTACATTGCAGGGGCAGGGGTATTGGGGAGGATGGGCAAGTCGTTCTAAGCAC
AGTACTGTGGGAGCCTGTTAGTATGAATACTCTTGCCCTTACCAATTCAGAACAGTTAATTAACTTAATCATCCAGCTTGTCATGGACATGGTT
CAAGAAACTCCTCTCCTGGCAATAGGAGACATGATTTCACATTAGAAAAGCAAAGCAGGGGAAGGAAACTGAATACGTAAAGCACTTTGCCTAT
TTCTGTTTTCAAAGCACGTGTGTATAGGAGAAAGGAGAAGGGAGAATGGTGAATATGTACACTTTTCTACTTGGTCCTTTGGGCAAACCCATCT
GAAGGTCTGACAAAATTACAGGAGCAGAAAAACTTTCCGTCACATACTCCTGGTGCATACACCCTCAGGGACTAAGTGGGAGCTTTTGACCAGT
AGCAAAAATCTAGTTCCTTAAACCCTCCATTATCAGAAGCCAGAACCTCCAAGCCCCAGCATTCCTCAAGAGCAGTTTGGGCATGAATGTGTGA
TATATCGGAGTGCTTAGGCAGTTTAATCCAAGTTGGTTGAAAAAGATAGACTACATATTAAGGAGAGAAATTCTAGTTCCAGGAGAGGTCATCT
CACCTTTTTGGAACTAAAGAATCCCAGCTTTGAGAAGAGCAAGGAACTTTAGAGGGCCCCTAATCCAGTAGTTTTCACTGCAGGCTGTTCATTG
GTATCACCTGAAGGTGATTTATAACCTATGATGCCCAGTTCGTGTGTCCAGAAAGCCTGATTAAATTGGTCTGGGGTGCAGCCTGCACATCAAG
ATTTTTTTAAAGCTCCCAAAGTCATTCTAACAGGCAGCAAAGTTTGAGAACCATTGATCTAGTCCGGTATTCTCATTATGCCACTACAGGAATG
GGGCTTGTCCAAGGTCACATGCATGATTAATTTTAGAGATTTAGTCCTTAATGTTAAAGTAGGTCTTGCCAGGTTCAACAGATTCAATAGATAT
CAACAGACTGAGGTATTCGTATGTATCATTATTTAATAACAACAGAATCTAATATATAGCATAAAATATAAGATTTTTTGAGTACTGATGCCTT
TTTTCTTGAATTTTGAGATTTCAGTTCAGAACTATTAACACCAAAGTCTGAGGACTTTCAAAACCAGCAGTTCATGGTCTATATATTTACCTGG
ATATTAGAATATGGACCAAATATTAATGTTCATTTAATCTCTTCATCTGGGGAACCTAGTGGTTTAAGCTGTTAACCTACTGGTTTCAGCTGTT
AACAGCTATCAAAACAGGTATCAAAGAAGCCCAACCATCTTAGGCTTCTAGGGACTTTTTGGTAGGTGGTCTCCACAGCTGTACAAACTTGTGG
GCAGAGGAGATTCATTTGTTTGTTCAATAAATATTGTTGAATGCCTTPGGTGTGCTAGGCACTAATCTGCAGGCTGGGCAATCTGCATCACAAT
GCTTATCATTCAAATGCAAGAAAGACAACATATATGGATGGGACCAGTCTTCCAGATCCTTTCCATCTTGGAAATTGTGTTCATGTTTCTATTC
TTCATCTTCTTCTGCCACACAATCTTATTTAGGGAGTGTTTCATCTTCACGAAATTTTGTTCTCCTGTGAAGCACATGTTTGTACTTTTTTTTT
CTTTTTCTTTTTTAAGAAATAGCCAGCCGGGTGTGGTGGCTCATGCCTGTAATCCCAGCACTTTGGGAGGCCGAGGCAGATGGATCATGAGGTC
AAGAGATTGAGACCATCCTGGCCAACATGGTGAAACCCCGTCTCTACTAAAAATAcAAAAATTAGCTGGGCATGGTGGTGCACACCTGTACTCC
CAGCTACTCGGGAGGCTGAGGCAGGAGAATTGCTTGAACCCGGGAGGTGGAGGTTGGAGTGAGCCGAGATCCCGCCACTGCACTCCAGCCTGGC
GACAGTGAGACTCTGTCGCAAAAAAGAAAAAAAAAAAAAAAAAAAAGGAAATAGCCTAGCCTTTTCTAAATATGTCATGGGCCAATAGGATTTC
TTTCCAATGTCTTGATCTGAAAAGAAATGATTCATTGGTTTTTAATGAAAAAATAAATATATATGCCCTCTCTGCCTCAAAAGCTCAGGGCTGA
CAAGTCTCCTCTGTGTCGGAGAGTGAAACTTTGTAATTTGGACCCCCTAATTTTGTACATGTTCATGATAGGAATAAGGGCTTCGTTTATTTTC
ACTGCATGCTCTCTATGGAAAGAGGATGTGCTAAGCAAACAAGCATTGTAAACAATATTTCAGAGGCAAGGTTTTGGCCTGCTTTAAAAAAAAA
AAATGTTTGCAAGTACAATTAAAAACCAGTATAAGGGACAGGGGTGGGATGAAAACCTGTCTCTAAGATTACGAAGCCTGCGTTATTTCCCCTA
AATCCCCTTCGAGCAACATTTGAATCCCTCATCAACAAATTTTCATTGATTATGTTTCTATTATATATACTGTAGACTCTATATTCACGAATCT
AATCATACTCATTCAGAAAAATATAGGAAGAGAAATGAGTATGACCTGTAGCCTGAATTTCATTATAAAAAAGATTAAAAATATACATTTTATA
TTAAAATTGATGTAATCTTTTAATTATGAAGTCTTTGATTCTTTAGATGTTTTCATCCATAACCCAAGAGCAAGATCTTGGCATCAGTTTTTTC
CAGGTTATGTCTATATCATCTATTATTACTTAAAAGTTGGAGTTACATATAGATATATAGATATATAGACAGTTATAGATATATGTAATTTTTT
TTCATTCCAGTCCCCCACCCGAGCAAGACCCATATTTTATGTAACTTAAAAGTAAAGAAAAGAAACTTTGAGCGTATGTTTTTGGATAAGGAAA
TGAGCTGTGCAGCCCTAGTACTTTCATATAAGATAAAGGCTCTTACCTATTCTCTGAATCTGGCAAAGTAGAGAATCACTTACAGAAAGAAAAG
GATTTGTGGATGCATCAAATTATCTGCATTGCCCTTAATGTTTTATGTGTGGTAAAGGCCTACTCAGGCCACCGCCCCCAACCCTGGCCCCCGA
CTTGAATTTCATAGAACACAAAACAAAGCGCAACTCTTCCTGAGTGCTTCCACAACGGGATTTTGCTTTCTTGCCTTACCACTTCAGGATGGAC
CACCATCAGGCATCTGTTGTCCATTGCACACATCAAGTAAACAGATTAAACTGCCCGAGCCAGGGGGTCGCATCAGCCCTGTCCTCCCTTTGAG
GAGCTTAAACCTCTCGTGTTATAATGCGAACTCGACTGATCTTATTTTGTGTCCTGAGGTAAGGAGGCACTCACCGTTTTGCATCAGAACATCA
CTATCCGGTTCCTTAATATCTTATATTTATTTTATGGAAGAAATAATCTCACATTCTTTGTATCACAGCCCTGAGCTTCACTACCATTGAGCTA
AATATTACCAGCTGTTGCTACTGGCAAGAGAGAAGCAAAAAACAAATTGAAAGGAGAAAGAGGAGGGGTGGGGGAGTGGACAGAAAAGAATAAC
ATGAGGGTTGAGGGTCTTAGGGTGACAGCAACATATCTTCTAGCTCCCAGACCTGAGTTCTGGGCTCCAGTATTQAAGACTGTGAGTCATTTTC
TTCAATCATTACAGTGTTTCTTCCTGTCTTAAAAGAATAACACTAGACACAAACTTCTAAGAGGGCCTTCCCTGAAGAGATAGACGACATTTTC
TATTGTTTCTTTTAATTTCTATTTTTATTAAAATCCTATGTTTTTATGATAAGACTTTAAAGGAACGGGTCTTATGGTTCTCATGAGGTGATAT
TTTAATCTGCCAGCAGAACATCAGTTAATCACATAGAACTACTCTGGCTCTGTGACCAACCTATCATCCCTCAAATTAGAAAATTATTTTCCAG
ATAGTTTGGAACAAAAACAAGTTAAAAGCTATTGAATGCTTTCTAGATGCTGGGCATTGGGCTGTCATATATGTGTCTTATTTAGTTCTCAGAG
AAGCTCTGTGAACGTCATTTTATATCCTGACTTTTATAGCTCAGGAATCTGAGGAACAGATTAAATATTTTCTCCCTTGTTATTAACTAGTAAA
TGAGAGAATAAGGATTGAAATCCAGTTCTTATGATTTCAAAGCCCAAATTCTTTTCAGGCTGGCCATATCTATTTGCAAGTCTCATTCCTTATG
GTGGCTTTAGTTGTGCTTTACCTCTGTGGTGCCTTAGTTATAATGCCATCTTCCTTTCCCCATTTTTCTTGTATATCCTGATAAAGATATTCCA
TTGCTAAGGTGAGTAGCCTATTCTGTGTCCTTAGAGTAGACTGGCTTCCCAGTAACCTTGCCTCAAATTATATCCCAGCTTTTGGATACTTTGA
ATTTTGGTCATGACAGTTTTTTAAGGAATAAAAATTTGAGCAAAACAAACTTTTGAAAACTGTGATAATTCTAACATATATGAAGTATTTCTTA
CATCCCAGACTCTATGCCACAAGTGTTATGTCTCATGATCCCTTTCCAATTTACATACGAGGGACTGAAACTCGGAGAGGTTCAGACACTTCTC
CAGTGTTACTCAGCTGGTGCCTAGTGGATCCTGGGTGTAGCTCTGGTATACTTCTGCTCAGTTTGCTTTTGATATCTGGAACCTTAGAATTCAT
TCTCCTAGTAGCCTGTGGATAGAAGGATGATATTTCCTGCTTTTGCACACATTAATAAACCCACTTTCTGGAGTAGGAAGTAGATGAACAAAGG
TAAAGAAAAGTACAAGTACAAAGTTAGGTAGAAAAGAACAAGAGAATCTGTGACGAGTATGATCACTACATCCTAAAGACTCTAATGCCAAATG
GTATTTGATTGTTTATGCTTTATATTCATTATCTGTCCTATTAGTGTGGATGATAATGAAAACTATAGATTGTTTTCCCTCAAGTAGGTGAAGA
AAGAATCTCTAGTAGGTTATGATTGCCCTTTGGGAAGGTTAGTTATCAGGGATAAGTGAACAGATCCTATCAAACCATTTACTGTTTAGTTTCT
CTCCTCTCCTTTCCTAATCTTTCTTATCTCTGTTCTTCCCTTCTACAGTCTAAGCCTACAAATATAGCTCAGGTAATCTGGAGGTGTGGCAAGG
ACAGACCCTGGGAAAATAATAATGAACACATTTGAAGGACAGCAGGATGGACTCCTTGGAATCCTGTGTTAGCAGGCAGCATTCATACAGCCAC
AATCTGTCTTCTGACAGAGCACCCAGCTTCACACAGTGAAAGTATGTGACTGTCCTCTCAGATATCAACTATAAGGTTTCGTCACTAAGTTCAT
TTTATGCTGCTAAAACAGAATACCTGAGATTGAGTAATTTACAAAGAACCATAGGTTATTTGGCTTATGGTTCTGGAAGCTGTGAAGTGCAAGA
GCAGGGTGCCAACATCTGGCAAGGTCAGCCATGGTGGAGGGTATCACATGATGAGCAAGTGTGTAAGACAGTGAGAAAATGGAGGCTAAGTAGT
TCATCCTTTTTATTACGACCCACCCCTGTGATGATCCACTCCATGGAGATCGCCATGCTATTATGGTCTTATCCACTCTTGAGAGTGGAGCCCT
CATGACCTAATCTCCTCTTAAAGGCCCCATCTTTTAATACTGCTACAGTGACAATTAAGTTTCCAATACATGAACTTTGGGGACATATTCAAAA
CCATAGCAGTAAGGTCACCCCAAACACTCAGGTCCTCCAGTGAGAGGGGAAGGGAGGGGGACATGGGTGATCAAGGCAGTAGAATTAGTGAATG
GAGAACAAAATTTAAAAATCTGAGCATTTTTTATTCTGAAATATAAAAGTAATCAATTTTAAGAAAGCTTAAAATAAATTCAAGGAGATTAACT
TCACTGATCATAAGTTCTCACATTTACATGGCAAGGTGAGTTTTCTGAACCACAACAACCCCAGGATGACTTTAGAAATGTTGAAAAACCACAG
AATTATAGTCCATTGCACAGCAAGCATTCACTTACTCTATGTTGAATTAGAAAGGAAAGACATTTTTCAAAGAACATGGTGTTACAGAATTGTG
AGAGATGTTATCAAGCATTTGATCTAACCATCCCATTTTACAGACATAGAAACTGATTACTTATCCAGGAGGATATAAATAGCTATTAGCAGTA
CTGGCATAGGATTCATGTTTCCTAACTCTCAGTTTAGGGTGTTTAGAAGCCCAACCAGTATATAATCCTTTGGATTAGTATCTGAGTTGTTGTT
AAATAAGCAAATCTTGTGGCTTCAAGTATTCAGCCAGGTCATTCCATAATTTTTCTCATTACCTTTCTTAGGAGCGTATATAGTGACTGATTCA
ATGAGCCGGCTGATGCTCCCTTATATTTGTATTCAGTTTATATATTTTCTTGCGATAGGGAGTATAGTTTGGAGGTTAGGGCACAGATTCTGCA
ACCAGGCTGCTGAGTTTGAATTCTGATTTTGCCAATTATTATAATTTTGGACATTCACTTTTCTGTGCCTCTGTTTGCTTGTCTATAACTACTG
GGGAGGGTAATGGCTCTTTTCTCATGGGCTCAATTGAGAATTAGATAACATATGTAGAAGTGCTTTGAACAATAACGAATGCATACTAGCTAAC
ATTTATTGAAATCAACCATAATTATAATATTGAATCTCTACAATAATAATTCATAAATCTGCTTATATTCAGCTGATATATGAGTGGTATAGTT
CAGTAAAAATGCTTTGATGTCACCACTAATGCAGTACAAGTAGGAGATACTTTTCTGATGCTTGGTAGATCTTTTTGTTTAAAAGTTTGGAAAA
CCCAGTGTTTCTTTTGGGGTGGATAGATAACTACATAGGGTTTTTTTTTTTTTTTTTCCTGATAGTGCTGTGCTCATGATAATTATATGCTATT
TCTATGTAAGGAAATCTTATAAAAGTCTTAGCAGAAACACTTTATGTATACTTATTGTTAAGATATTAAGAACATTTTAGAAAGAAAAACATAA
TATTACTAATCCCGCCCTGACTGGCCTAGTTTCATTTTTACATTTCTTTTTGTTCTCTACCAGTATATGTGCATGTTTTTCAGGCTTTCTAGCA
TAGTAACTGAAATTCATTTTCACTTTATATTGCATGTACTTTTGCTTCCTGTGTTGTGATCATAGATTTTCTTCTTTAATGCTGTAACCTGTCT
TATTACCACATTTTACTTACTTGCCTATTAATATAAATTAAGATTGTTTCCAAGGTTTTGGTATGACAAGAGAAACCTCTTGAAGGAAACCCTT
GTTTGGAATTTTCTCCACCTTCCCACCCAACTGCACTCCCCATTTAGAGAAATGCGTACTAGCTGCCATTTTGGGTGCTACTTGCCAGTTTGAG
TTTATTTTTCCCCCCAATTCTCTTTCACTTTTTAACTTCTGCTTTTCTTTCCTGAGTGTAAGATCCAAATACCTATCAAAGTTGTGAGTTTTTA
GGGACATCTTTATCCTTGACCACAGGTCTTGATACTGATCCTGAATGTGTGTGTTTACCACATGTCCTGTAAGGCACATATTGCAGATCTTGGA
CCTCTTTGGTGGATAGAGTGAGGACATGAGGAAGCACCACTCAGCGCTATTAAAAATCAGAAGCTATTGTGGAAGTGAATGATCTGGCAAGGCT
AACAACGGCTCCTTATTTCATAAATATGAGTCACTCCCAGTTTTACACTGTAGATAAAACACTCTGAAAGGGACAATAAAAGCAGCAAGAGGTA
GATTTAGTGAGATGCTGAGTAGATGTGTTTGTGTCTCCCTTCCTCTCAACTTTTCTAAATCCTGAGGTTTTAGTGCAGTGCTGAAGTCTTCTAG
GGGCTTAAGCAAACACAGGCAGCAAAAACACATCAGAATGGAAAGATAATTCCCATTAGTTCATTTTGCCAAATTGAGGTAAAGTGCCCTTTAA
ATAGGAGATAATTCTTTGACAGATAATTAGCTTGTCTTCCTTGATAAAATATGTGAATTGGTTGAGTATATTATAATTAATTTTGCATATTATG
TAAAAATCTATTCATGTACACTTACTAGGTGAATCTCTTAATTCCTACCTTGAGGATGGCTAGAAAGCCCCATTTCTGCTCCAGTGAATAGAAA
GAACTGGAGGAATGCTGTGGTTATGGAGTCCAGGAAGCCCTCTCTTACAAAGATTGGGAGGAGCTGAATGTGGTATATCATTATTAAAAGACAC
AGAGACTTCATATTAATATATGCATTTATTAAAACAAACTTTGAGAACACTTTTAGGCCTGAGAATGAGATGCTACAAAGTTGCCTAAATAATT
ACCTTGAAATCAATCTCTTGCTAGTGACATTCTTCTGGCTTCCCAATGTGGAGCTTTTTCCAGGGAGTGGAGTGAGTGATTGGCTGGGTGCAGC
TAGCTGTTGGCTGGGCGGTGGCTGTGGGAAGTAGCCTGAGAGGGCACAGAACAGTTGCTCAATGACTCAGTGAGTCAAAGCTCCTCTCTGCAGT
TTTTCTTCCCCCTACTCCTTAAZCCATTCTGAGCTCCTTCAGGCATCCCCATGTATCTGCGCACTGCTTTTCGGGTGTCTTTTCTCATTCAAAG
CTATTGTCGTGGCTACTTGATTTGGCTCATATTAAAACGTGCACTGGGAGATGTTGGAGTGCTGAAATAAAAGAGCATGCTGTAGTTAATCGAT
CAGAGAGCCTCTCTTCTCCAAGTTGAAGTGTTTCTTTTCCTGAAAATAGAGTGGCTATTTGATGTTCCATGGGAGCCGAATGACTTCCTGGTGT
AGTGTGGCTTATAGCACCGTAGATTTTAGTCATTGGTCACTACCCCTCCATGTGCATGCACACACATTCACATGCAAACAAACACATATTTTAG
TTAACATTTGTAGAATGGGAACAATTATGACACTGAGCATTAACTCATTTAATGGGGATAGCAATAGTATTAAATCTATCTGCAGCGTCCAATA
TAGTAGCCTTGCTGCAAGCCAAACGTGGCCATTGAGCACTTGAAATGGGGCCAGTCCAAACAGAGATGTGCTGTAGGTGTAAAATATATACCAG
ATTTCAAGACTTTATATAGAAAATAATGTAAAATATTTCATTAGTAATTGTTTTAATATTGACTCTTGAAATGATATTTGCACATGTTAAGAAA
AATATATTAGCAATATTTTACCTGTTTGTTTTTACTTTCTTGAATGCAGCTACTAGAAAAAAAAAATGCTTGTTATTATAGTAGCCTGAATTCC
ATGTCTATCAAATGTTGCCGATCTCAATGTGGTAATAACAGTATTATTATCCCCACTTTTTAGATGAGGCAATTGAGGCTGAGAGAGGTTAGGT
AAGTTGCCCAAGGTCTCACAGCACAATGCCAAATTCAGACCTGCCTGACTCCAGAGCCCACACCCTTCATCACTAAGAAACTGTTGTATAATAG
AGAATTTGTCTGGCCGTTGTCCTCAGTTCCTGGGAAATAATTTCTAAACCCTTGGAACTCCCCGAGTGTTAGGAGTGTCTTTGTTATGCATGAT
GAGCCCCTTGGATCACACCTGTGTTTATGGTAATGCGATGACTCAGGATAAGAGTTTATCATCAGAAAGACATCCACATGATTAGAAGGTCAGG
GCTTTTGTATTAGTTCATCTTCTTCAGCAGAAGAGAGTGGGACTGAAGATTGAGTTCAATCACAAGGCCAATAATTAATTATGCCTAAGTAATG
GAACCCAATAAAAACTCTGGACACCAAAGCTCAGTTAAACTTCCTAGTGAACACATTGCTGTGTCAGCAGGGCAATGTGTCCTGATTGCACAAG
GAGAGGGCCTAGAAGCTCCATATGCAGGACCCTCCCAGATATTGCCCTGTATGTCTCTTTATCTGGCTCTTCCTGATTTGTAGCTTTTATAATA
AAAACTATCATCATAAAGATAGCGCTTGTGTTCTGTGAGTCATTCTAGTGAATTATCAAGCCTGAAGCATTGTAGAAGCCACAGAATTTATAAC
CAGTTGGCTAGAAGTGTGGGTGGCCTGGGAACCCCTGAACCTGTGGCTAGCATCTGGAAGTGAAGGCATTCTTATTTGAGACTGTGGCCTTAAC
TTGGGGAGTCTGCACTGACTCTGTTAGTCAGTTTCAGAATTATATTGCAGTATTGCAAGAATAGACTGCCTTTTATTTGGATGTATGATATTAG
GAGAACAGCAGCTGAGAGAGCTAAGTGCTGCAGCTTAACTTGCTTATCTCTGTAACACCATTTCCTTGGTGACAATGGCCATTTGCATTCTAGA
CTTGGAAATGACTCAATCTTTGAGCAACTGCTTTTGACCACTACGATCAGTTGGGAGGCAGGCACGCCTCTGAGACCTTCATACTCAAAACCCC
TTCACGCTGTAATCTCTGGGGCCTATTTCATCTCCCAGTTGGCATCATGTTAGCGGTGGTGACAACATATGTGTTGGCCCCTCTTTGAAAGCCA
GGGATTCTTAAGTATTGGTTTTGGGATTGAGATGTTCATGGGAAGCTGACACAGGGTGATACTATGGGTAAGGAGTATTTCGATTTTTTGTTGT
GTTTTTTAATCATTTGCCTTGTCTGGAATTACGCTTTTGTGGTATGTCCTATTACATTTCATAAACAAGGTATTTAGCTCAATTGTTGCTTTTT
CTTTTGGGGCTTTTGTTTGGATTTTTAAGCCAAGATCCATGTGTTTTATTTATTTTGGTTTAGTTTCTTCATCCCTGCTTAAAATAGACACTGC
CTCTTGTCTGTGGTCCTGGTATCCACTACTCTTCTGTTTCCTGCTCAGGCCTGGCCCATGTTCTGCAAGGCCCTCTTAGGTCACCAGCTCCTAG
AAAGTTGACTCCTATGAGTATCTCTTGGGGCCACCTTAGAATGCAGATTTCTAAGAAAAGTCCAACATAAACTCTGCAGTTATTGGGAGAAAGT
TTCCGTCACCAGTGAAAACTAGGAATAAAACAAGATTTTGGAATGTATAAAAGAAGCCTCTTTCAAAAAGAAATCAATATGACTTGTTTTTTCC
TAACATGGGCCAGCCCTGGGCACTTTTCATCTGCCACCACACCAGGCCTGCTCTTCAGAGGTGTTCAGCTTTAAGACTAGGGACAGTTCACACC
AGATAACTATGAGGCAGTGTTCTCTGCCACTCATTGACTGTGGAAGTCTCAGTCCCAGTTTCTGAGAGGGGGAGAGCAAATTCATCAGAACCAA
CTGAAGAGGTACAGAACATGAGGCATTCACTTCTCACACAGTCCCTGAGCATCTCACCTTCCAGAATACCAGAGGCTTCAAGGCCCTTTTTCTA
CCTTTCAAGACCGTTATAGCGTGCTATTGCTCTTTGAGAGATCTAGGGCTGTAACAGCCCTTATTTTTAGAAAAGAGAGAACTCCTGTGTTTGA
AGAAATAGCTCTTATGATATGATCGTGTGGTTTCACATGGTCTTAAGTTCAAGTAACTTGCCCAAAGGTGCACAGTTATTAAGAGGGATAAGAG
GAACTCCAAATTACTGATTTCAGATCCAGTGTTGTATCCCTTCAAAAGGAGATAGAAGAAACAGGGCCACCCGGGGTTGGTGAAGATACTGTCA
GAATCATCTGTTACTGCTTACCACATCTAAGTGAGAGGGTCAGCAAGCTCTTGAGAGZGCCCACCTAGATCTTAGCTTGTGTATACCCTATACT
GAGCACTGTGCCCCCATTTCATATTTAGTGCTTAATAAATGTATATTAAACTGAATTGAGGGCCCCTCCTGCTGCTCAGTGACATCCCTCAGGG
TGAGTTTCCCTCCTGAGCCTTCTTTTCCCTTTCATGACTACCTTCCATGCATCTCTACCATTCATCACTCATATAGAATGTCCAAGAAGTAGGG
GCGAGGAGAGAGGAGAAAGGGGTAAGAGGCCACCAAGTGTGATTTGCCTTGGATTTCAGCCCTCCCTGGAAGGTGCCCATTTGTCACATTTAAG
GGAGGCCCAGCACCCCTGTAAATTGCCTCTTCCTCATAAGTGTACTCAGCCCTCCTTCCCAGCCTTGGAATGCCAGGATTTCTAAATCCTTGTG
CTGAATTCACCTGGCGAGTCCTGCACCTGACTGTGTGAGTTACAGCTGGATGGCATTGTTCAGCTCAATCTTCAGTGTGTTCTGAAAATGTTTC
TTCTTCCAGTCCTGTCACTGAATTTCCCTAAAGTTCCTTCCTCCTTTCCCTCATTAGATTTCTCTTTGGGGACTATTTTTTTCAATCAAATCTC
GCAAATCCATAGCATAATGCTGAACAGCATATAATAGATGCTTTACAATAAACTGGTCCTATCTCATCTCATTCCAGTGTTCAATGAATCTAAA
AATATTTAATGAGCACTTACTATATACAATTCAGATGCTAAACAGTGAATACTTAGAATTTCTATTAATAACTACAATGTAGTAGCTGATTTAA
TTCTTGCAATAACTATTGTTGCCTGTTAGGACTATTATTAGCTCCATTTCAGGGTACAAAGAGGTGAAACAGCTTTGTCAATATCATACTGGAA
AGTTGTGGAGACAGTCTGGCCCTAGTGCACCAAACCATTACACTCTATTTCCTCTAAGAGAAAGAACATCTTGACTTTCTTGGGGTCCACACTT
TAATAAGAACAATAAACAGGGAAGAAATAAATAGGTAACTTCAGATAGCGATAAGTGTTCTGAAGACAATGAAACTCTTAAAAACTTCATGATA
TGATAAAAGAGATTTGGAAGGGTAGCTGTAAATTGAATGTCAGGGAAGACTTTTCTGAGAACACATCTGGTCTGAGGTCTGAATCATCTATGTG
AGTCTAAACAAAAATAAATTTTTATCCTACCATACTTTCGGAACACCTCTGTGGATTTATGCCCCCTACACAGAGAGCAGTCTTCCAGCAGACA
CTAGCAGAATGTCTTGCACTTAATTTTGACTCTACCTGGTGTTAGCTTCAGACCCCAAGTTGTAGCTCAGTCCTACAGAAAGATTACCCCACCT
TCCCCACACTGTTTATAAATCAGTATTTCTGCAACCCCCTCCCTGAGTCCCATTAATTTTCTAGGACAGTTCGCAGAACTCAGGGAAATGTGTT
TACACATTTATTATAAAAGATATTACAAAGAATATAGATGGACAGTCAGATGAAGGAGATGGATGGGGTTTATGGGGGCTTCATTACATAGGCA
TGATTAATTACATCATTGGTCATTGGTGATCAACTCAACCTTCAGTCCCTGTCTCCTCCCTGGAGGTTGGGGGATGCGGCTGAGTGTCCCAATC
CTCTAATTAAGCTGTTTTAATTCTGGTGACCAGCTCCCTTCCTGGAGCTATTTAGGGGCCCCCAGCCACTAGTCATCTCATTGGCATTCAGAAA
ACACTCATAACTTCAGAGATTCCAGGGGTTTTAGAAGCTATGCTACAGGAACCAGGGGCAGAGATCAAATATATATTTTTTCATATCACAGTAT
CACAGTGAGGATCTACAGGAAGGGAGTTTGCGGAAGAGGGAACAGCAAATGCAAAGGCCTGGAAGTGGGAAGCAGAGCACCCAGGCTTTACACA
ACCTCTGACAGCTGATTTTGTTCTTGCCATTGTTCATTCATGTCATATCGTACCATATCATATCATATATATGGTTTATCAAGGCTATATTGAA
GTTATAGAACACCAGAGTTGGGAGAAACTTAAAGATTACCCTAAGTCCTGATTGTATAGGGGTGGCAAAAGAGGTCACAGAGCTAGAACCCAGT
ATCTTTTAGTGTGGAAGGAAGGGCTGCCCTCTGAGTCCTTGCTGTCAGGGCTTTTGTTACCCTGTGCAAAGTTAGACATGGCTTCAGGGGAAAA
TGGTCGAAAGTCTGATGGTGCCAGATACGGGATGCATCCCAGGTCAGCGCTTCATTCTGCGTGCCCAAGGTTGAGCTGACCATTACTTGCCTGG
TCCTTCACTTAGCCTCAAGTCCATGTTGACAATATGTAATTCCAGCCCACCTCCTCAGAGACAAGCAGTGTTTTTAATTGTTTTGTTTTCCCCC
TAATCTCAGAAGGTGGTCACCCAGGCAGGGACATGCTAGCTTTTTTTTTTAACCCAGTGTAATTTTGTATGTCTCTTAGTGCATGGAGACCTCA
CCTTGCTTCAGGTGGACCTGTCAAAGCTCAGCCCTCATGGTACGGTGTGATCATTGGACATGGCTGAGTCCATGTTTAAGGAAAGCCCATGCCT
TTTCTTTCTGCAAGTTGATCCTTTAGTACTCAGCCTTGCTCATTATATTCACCAAACATAGAATCCAGCTCAGTGACTTGAGGAAGTTGTTGCT
ATGCCTTTTGTGAAGTGAAAACATCGGTTCAGGAAAACAATTCAAATTTTGATGCTGACATTTGATCCTTTCCCCTACCACTTCCTGAATTCCC
TAAGCCAGAGCTCTTTGACCTCCAGATCCTACTGAAATACACAGTTATACATACTGTTTGTTGGACATGGGGGTTTTATTCAAAGCAAACTCAG
ATGCAGCATTTTTGGCTGGGCACTTCCATACATGATTTTAGCATGGAACCCTATCCAGGCTTCACCTGTGTGAGCTTTGTCTTGCTTACTGCTT
TCCCCCACCCCCCTGTCATGGATGTTTCTAGAGGACCTTTTGTGAATGTAACTTCCAATGGGAATGTTTCACAGTAGAAATATGGCTCTCCTGT
GAGGCTCGCATGTGACATTTCTGAAGATTTATTTAATTGGACTTTACTTAAATCCCATTGGGAAACATACTTTTGCTGTGAAGCTGTGATGTGT
TTAATTTGGGGTCTAAGATAATGTTGGTCCTCGGGGTGGATGGTTGAGCAATAGTTTTCCTTTTCTACAGTGGGTTTGTGTATGTGMGTAGCTT
TACTGGGCTTTCCTCTGTTTGTTTGTTTAGCAATGCTTCATTATTTAAACTTCTGCACTGAAAGGCAAGAATGTTTTTAGACATTCTTTAGAGA
CTTAATGCACAATATCTCCTTGAGCTCTCGGGAGAAATATGGCTTTGTGTTTTATAGCACTCTCCTCCTGTTPACATTCCTCTCTCTGCAGCTT
CCCAGGATGATCTCATGGATTTTTCCCCCTCCTTTAATCCGTCTTGATGGATTAACCAGTATTAAGTTTGAGACCAGTGAGCAAAAAAGGTGGA
GCCCTAACATGGTATAGAGTAGCCTCCCCAGTACGCAGAATGTCTCCAGCTAAAATATTCTTCCGCCCAGAAGGATGCCACATGGAGGTCATGT
GCCAGTGCTGATCTGAAAGGGCATATATCTAATGAGGAGGGAAGTGTCTTTGGGAGAGGAGTGGGCTTCTGTGCGTGCATGTAGCTGGTTCATG
GAACTAAGGTTCTACAAGGCTTACTGCGCTTGCCTTTTATAGGCATGCTGGTCCTTTCAGCACACCCCCACCCCCTGCTGCCCCCGCCCCCACC
CCCACCACCCTGCCACCCCCATTCTGACCTTGGACCATTTTTGGCTTGGCTTTAAGGTATGACACCAAGTTGGGTTGGCTCTCAGGGGCTTTGT
TCTCAGGAAGCCCACAAGTTTTAGTGTGGCTCTTCAAAAGTAAGTATTATACGTTGTATTTCTAAAAGTAAGCTACACTGGGAATTACAAGTGG
CACTATATTCATTTGGGCTGCTTTAACCAAATGCCGTAGACTGGATAGCTTAAACAACAGAAAGTTATTTTCTTATAGTTCTGGAGGCTGTAAG
TTCAAGATTGGGGTGCCAGCATGGTTGGGTTCTGGTGAAGCCTTTCTTCTTGGCTTGCAGACAGCTGTCTTCTTGCTGTGCCCTCACAAGGCAG
AGAAAAACAGACAGCAACCTCTGTGTTCTCTCTTCTTATAAAGGTACTACTCCCATCACAGGAGCCCTACCCTCATGACCTCACGCTGGGGATT
AGGGCTTCAGCATACGAATTTGTGTGTGTGTTTGAATATGGGGAGGAGAGATACAATCAGTCCACAGCAGCCACAAAAAATGCATTCAGAAAAG
GAAAGGGTATGAATTTTGCCCAGCATTTGGAGTGTATGTAAATTACACCATTTGGTAGATCAGTGCGTTCTCTCTCTCTCTCTCTCTCTGTTTC
TTTTCCCCTCCCCCCTCTTTTCTTTTCAAACACATATTGATCACCTGTTGTGGACTTTGGAACACTCAGGAGCTTCCCACTGAACTCAGAATAA
AACCTGCCTAAGAGGCCCTGTGAGGAGQGTCCCTGCCTCCCTTCCTTCCCCTCTAGCCCTTCTCCTAACCCGCCTCTTGCCCAGTCATTGTGCC
TCCCCACATTTGGCTCCCTTGAGTCACTCAGAGGTTCCCTGAGTTCCCTCCCTTTCCCACTGTGGTGTTCCCTCCCTATGTTCTCCTGGATTCC
GTCCCCTCTCATACCTCAGAGAGGCTGTCCATGAACCCCAATCTAATTAGTCCCCTCTCATAGCACCCAGGGACTGGACAGCGTCTTCCGTTAT
GACTTATCTTAATTTGTGACTCCCTTCTGGAATCTGTGTTTATCGTTGTCATATGTTTCCTCCTGATGGAGTGGGGACGGGCAGGGAGGGGGCC
TCTGCAGCGTGTCACTCACCTCCTCAACTCCCAGAATGTTTGCGGAGGGTTTGATCTTAAATACAAGAGATTATAACAGTGAAAAATGTGTTAA
TGTAACTGGCATGTCTGTTAACAAATCCCAGACTTGATCTGAGTGTTTATGGTGTGCATTTCTCCCTGGGAACCAGTTGGTCTGTGCTAACATA
GGTAAAGTTTAGACACGTACCAGAAAGAAAACTGAACTTGCAAGTTTTCAGGACATCCGGGCTGGCTACTTGGCTGTCTTTCTGTCGGCCCCTG
ACCCCTCACCCCCACACTGGATCTTGGTAGGCACCCTTCTTAGCCATTCACTTGATTGAAGCCCAAAATCCTTTCTTGGAAAGCAAAAATACTT
ACTCTTATTTCTTTAGTTGGCATTTTTGTTAGTGAGAATGGAGTTCAATAGAAGTAGACAAAATTCTGGTGGAAAAAAAAAATGAGACTACACA
GGCTGGGAGGAAGGTCTGTGCATGGAGGGGACAACTGGAACCACCAGAACATCTGTTCTGACCCTTCTATTCCACACTAGGATTAAACCGAGAG
CAGAAGGCACTTCCCTGCCCCTCTGGCAGAGGGACTGACTTGAAGTCAACTATGCCCACAACCTGTCTTCAGGTGGTTCTTACTGAAACCTTTG
TGAGACAGAATGGGGAGGGTGAGTTAAAGATGGTATTCTCTGCACTAGAAGAGCCTTACTGTGTGTTTGGCTGGCAGGGATGAGTGCTCAATCA
CTCTTCCCAGCCCACCTTTGACTTTTTAAAAATAGGTCTAACAAATATTCTGTGGATTCGTTTGAAATTCAAGCATCAAAATGTATTCCAGGTA
GAAGTCTCTCTTTCATGTTTTCTTCCCATCTACTGCTGATGGATTTATGAGAGACAGAGPAGGTGTAGGGAGAGGGAGAGAAGGCTAGAAGAGG
GGAGATGGCAGGGACAGGGAGAGAAGAGGGAGAGGGGAGGGGAGGGGAGGGAGGAGGGATCAGGGTACAGGAGCAAGAGTTGGGGAGGAGACGT
GAGGGAGAGAAGAGTGGAGAAGGGGGCAAAGGGGATAGAGATAGAGACCAAACCCAAGGCCCTGGTGGGGAAGAAACCAGAGAGAGTCATAGAG
TCTCACTGACTTCTGCAAAACCTGAGGGGCTTCCTGGCTCTGGGAACTCTTGAGATCTTAACAGTTCAAATCCTGCTCACATAAAAGTCATCTG
CTCATTAAAATAACACAAAGCTCTTTTTAATTGTTGTCTTTGTGGATTACATGACTGTCATCAGCTGTTGCTTCTGGCAGTGCTTTCATGTTCT
AATGTAAATAAATGAGCTAACACATTTAAAGAAACAGGCTGTATTTACATACTTCTGAGGTATCCTCTCAAAACAATCTGCCTGTGTTATTCAA
ATACACACAAATTAAACTTGTGGTAGCTCAAACATTAGTTATTCATTAAAGCCTTAAAGTTGAAATGGTAGGAGGGGGGCAAGAGAACTGCACC
TCCCTTCAGGGGGTAGGAACCAGAGGCTGACTTTTCTGTGTGGACTGAGCTACTCCAGCCGGCGGAAATCCAATCCCCAGCTCTTTTCTATACC
AATTCTGCCCTGAGGCAACTTCTGAGCCAGGAGGGGAGGGTGGTGAGAGCAGAGGGGAATCTTTAAAGCTCTGACAAAAACTTTCCAGGGTCAG
CATTTCTTGGAAGGCCTCCAATTAAACTTTATTTTCAATTTTCATAAATCACAATTCCTAAATCATTGGATGTTTCTGACTCAGTTTACTTTTT
TGAGGTAAATATGTGGGCAATAATTTTTTTAAAATTCTTCCTATTGAGGGCATGGCAAAGGTTTTATCAAACAAGGAGGAAACAGTATATTCGA
AAATATAAGAAAAATGACAAGAGACCCCTCCAATAAACAAGTTAATGACTGGAAAATGTAGAAGTATATGGAACAAAAAATGGAGAAGAAAGCA
CACTGCTAATTATACAAAGATTAGGAAGTAGCCAAAGTGACTGTTTTAGTTCTTGGTAAGTGTCATTGTCAAGTATTAGCTTCTTTCTGGAATG
CTGGGTTTTTTTTAACGTTGGGGTGGGAGGGAATGGCACATCATCTGAGAGAAACAATAGTAACTATTGAAGTGGCTACCTTGTCTGGGTTAAA
TAACCGGGGTTCGTTGTCTCACACCAAGAAAATTTAGGACATAGACACACAAGAGGAGTTTAGAAGCAGAGGTTTAATAGGCAAAAGAAAGGGA
AAGGAAAACAGCTCGCTCTTTAGTGAGAGAGAGGTGACTTCCCAGAGGAAAAAGGCCGACTGGTGGTGGATGTGCCAGATTTTATAGTCTGGCT
TGAGGAGGCAGTATCTGATTTACATAGGGCTCACAGATTGGTTTGATCAGGTGTGAGGTTTACACAGCACTCAGGGGAGGCTGGTCACCCCACC
CTAATCTTATTATGCAAATGAACTCCCCTTGCCTGGCGCCATCTTGTCTGCTCCTTACTGTACACGTGGCCGGCAGAGAAAGGGGAAGATGGAG
ACTTTACAGGCTGCTCTCTGTTGAAAATGATTTGGGGCTGCTTTTCATTAAGGGGAGACGTTACGGAGCACTTCTGTACCCTGAACTATCTGCC
TAAGTAATTTCTTCTTAACTCCTGTATCACTATGATACCAAAGTTACTATACGATGACAACTCAAGCAATGTCTATTTCATGTAAGCCTCAGTA
TTCTATATTATGTTGTTTTGTCCAGACAATCCAAAGAAAAGACTATTGTTAACTCAAAATTCAGGCAAATTCTGGTATCAACTTTTCAGAATTT
TTTTTTCTCTTAAAACATTACTAAATACTACTTGGTTAGATGAACTAAATAAAAATGAACAACTTTTATTATTGGAAGATAGTTTTGGGAGGGC
TATTCTGGAAATGATTTCAGCCTATCATTTATCACTAGGAAAACACCAGGAAGATCTTTTTATTTTATTAAGTTTTTGTAAATTATTTCCAAAA
AGAATTGACCACCTATCTCAATACCTCTTTCCCTGTAGCTCCTATTGGTATCTAGCCATATCAGCACTCACCTGTCTTCATGTGACTTGGGGCT
AATTCCTGTGTACAAAGGGATTTAAATAAGACTAGTCCTGCTCTCCAAGGACCTAAATTCTATTAAAGCTCTTAATCTGGATATACACAGAAAG
GAAATACATTTTAAAAGAATATGTATTAATAATGCAGTTATAGTTGTAGAATGAGGCTGCATGTATACATATAATAAGTTAGTTGAAACTAAGT
TTTTATAGAATGACTCTGAGAAAAACTGTAAACACCTCAACTTATTGAGGAAATTGAGGTATGAAAAAGTTGTGTGTGTGATAACTTTTCTGTA
CGTCCATTTCAAAAATTTCTAGAAGTATGCATATATTTTTAGAGAATATACCAGAAATGTATTTTTGGCTATTCGATATGCCTAAAAAATGTCT
TTTTTTTTCAAGGCTTCTGAAAATCGTAGACATAAAGAACTAAATATAATGAGGTTTTCAAGGAGACCACACTAACCACCAGCCCCAACCCCCA
CTCTGCATGCCACTTCCTCCGGCAGTGATCCAGTGTAGACTAGGCTAACACCACTGAGTACACTTTTAGCAGACCAGAGCTACAGTGGGCTGTC
CTCATGGCTCCTGCTTTGTCCTCCCTCTCTGGTGATGCCCTTGCATGGGGTTGCCTCTGCAGGATGGTCTCCTTTTCCTACTGCTCTGGTGCAA
CTGTACCAGCATCAAAAGTTCATCTCTAGCAACACTGACATTGACCCCTGTAGTCTCTGGTCATCTTCCTGCATCTCACTACCTCCAGTGCTAC
TTAGCTTTGCTGCTCCATTTGACAGTCATTCAAATAGCTGCAGGGTTTGAATGCCTTCTTAAAATACCAGGATGGCTATTGTACACACAAAATC
ATTGAATCATTACGACAGACCTAAGTAGTAGTATCCTATTTTATAGTTATGGAAAGATAGCCCAGAATACTTCAATAACTTTCAAAAAGTCACA
CACTTGGCATGTGGCAGACCCACTATTCTAAATCCAAGGCAAAGCTCTTTTTTTTTTTTTTTTTTTTTTTGCTGCTTTATATATCATCCACTGT
CTTTTCTAGAGTTGGCTTTTAAGATATATCTGTAGATAACTGTGTCTCCTTCACACAGGAAAAACCCATGAATGGAGGGACTAACTTATTTTTA
GATATATCTTCCTAAAAGACTTAATAATATAGCAAGCCAAATAATGTGGATGGGTACTCAATGGGATTCAAGATCCCATTATGTTATATGAGTA
TATCTGAAGTTTTATGTATATGTGTGTATTTTAAGCTTGTGATACTTCCTTGTTTATGTCTTTTCAAACATAAGGCATCTCACATGTAAGCCAG
ACCACACTGGTTTGAGGGAAGCAGTCAAATGACGTGATCATAAGAGACTTCTCTCTGACTCATAGTCAGCCTCCTAGCTTCTCTTTCTTCCCCT
GAGTAAGATAAATACTTCTTTATCTCTTGTTTCATACCTTATACCTAGTGAGACAGCACTCCCATTCAACTCTCTCTGCCTCTGTTTGATAGGG
CCTCCCTTTACTCTTCTTGGGAAAGAATACAAGTTCCC1GGGGGCAAGATCCTGCGGACAATTTAGTACTTACTTCCTTGGGTATTTTACAGTA
GGAATGATTTTCATCTTGAACTTGAAAATACCCTACTGTAAAATACCCAATTCCTACTGTAAAATACCCAATCACATCTATGGAGTATAAAGAA
CATTTCATAGAAAACAACAAGTAGAAATAATCTTTGTGGATCCAGCTGGTACCCACCACCACCCAACATGTTTCTCCTGTTAAGATAGGTGATA
TTCTGCCCTGAACTTATGAAGTGACTCTGACCCTGTCTTTCAGAGAAGATTTCAGCCTTGGCAGCCTGACATCAGCTCGGGTTCATCGAGGCTT
TGTTCTTCCACAGATTCTTGTGCTTATAGAATCTTCAGTGGCTCTGATGTTCTGTTTCCATCGAGTATATCATAGCATCCATCTGTTCCTGGTA
TAAACAAAATAGTATCCAACTTACAGCAATGTCTCTCCCACTTATAATAAAACACCTAACTCTCATGTAGCATTTTATCCATATTGAGAGCTCT
GTGAGATAGAAATTATTATATTACAAGTCACAGATATGTAAACTGAGATGCAGAGACATCAATAACTTGCTCAAGGTTACAAGGTAAGTGATAG
GAGTCAGGAGTTTTAACTCAAGCAATCTGGCTCCAGTCTATCATCTTAACCACTATCATCAACCTACTGTTTTACTTTGACGGACTGGTTACTC
AGTAAGAAAAACTAGGCAACAGAGAGGGGTGATCAATATGCTTATAGCAAACTGTAGAAGAGTCCAATTTTAGCCTACACCCCTCCCCCTGGTC
TTTGGACATTACTTCTGTTTTGCTGACCTTCAGTGAGAGTGTTCCTTAAATTTCTGGAAACAGCTCACTTTCTAGCTTAGCATAAGACCAAAAG
GGCTGTCCACCTTTACAGTATAATCTCTTGCTTATAGATTCTGCATTTGGATGTGGTTTCTTTAACTCACAACCCAGTCGCGCATTGCTTCTGA
ATCACATTACAGAGGACTCTTCTGTTTCTAGGACTGCAGTCGCCAAAACAGCAACAGGAGCTGAAATGCATCTATAAAGAGAAGTTTCCCACTA
AAACTAGAATCCATTGCTTCAGTAGGACTGTCACTGAACTGACCGTGTGTTAGAAGAAACTGGCAGGCAGTATTTCCACATATAGTTCTTTAGG
GGTGCTAGGTATTCTTTGTTGCTGCCATTTAGAATCAATGTACTGACCATACTCATTTTGGCAGAGAACCTACTTTTGACATAAGCTTTGAAAA
TGTTTGCTGCCCCCCCACCCCGCCTTGCCTCACCCTACCCCAGCATTGTTGCTCATGGCTACAATATGTTCGCACTAATAACTGCAGGCTCTTG
TGCACATAAGGAAGTTAGCCACCTTGGTAGAAATTAGAGGAAAGGAAGAAGGAGGGAAGAACAGTTTTATTTTCAAAATCCAATTCTGTGGAAA
AACCAGAAATGCAAAGACAGTGTTTGTTAGGAAAGCTAGGACCAACAAAGTGAATCAGATATATTTGTTTAGGGGCAAATAGGGAGCTGTTGCT
TTCTTTATGTTAAAAGTATGTTTTGCAAACTTTAAAACTGCTCGGATACCTTGGTTCCTAATTCTTTTTTGTTAAATAAAATTTTAAAAGTAAA
AACTCAGGAACATTAGTTTACTTATATAGAGTCTTTATATTAAGCAGATTTTTTTTTTTTTAGATCTTTAAAATGGTAGTTTCCCAAAGTGATG
AAAAGAAAAAGCACTTACAATGTGCTGGACATTGTTTTAAGGTACTTTATTAACCACTTTAATCATTACAACAGTACAGTGAGGTAGGTACTAT
TGTTATCCCTGTTTTGTATACAGCGAAACTGAGGAACAGACAGGTGAGAAACCTGCCCAGGGTCTCATAGCTAGTGTTTGCCTCTGCTGGGGAT
TCAAACCCAAGAAGTCCAGCCTCAATACTCCTTCTCTGAATCACTGCACTGCACTTAGGGCTCTCATGGACTATGCGTGTGCATAGATCTGTTG
GAATTTAGAACAAAGGTGATGATATTCGGGGTAATAAGACATTATTTATCCAATACCTGGTCGTGTATCAAACCTTTACATAGGCTTCTCTGAA
CTATGACCCTGATGGGTACATGATATTACATCCACTTAATAGATTGGTAAACTGACGCTTAATGAGGGaCCTGACTTGAAACAGGCTCTCACAG
CTGCTAGGAGGCAGAATCATAACTGCAGCTAGGTGTGGTTTGTCTCTGACCTTTGCTCTTAACCTCCATGCTACACTGCTCCTGCTTTGTTTGT
TAATTATCATGTTCTAATATTCTTAAATAGTAATAAACATAACATCATCAGGGTTCCTCATTAAGTGATCAGTCACTTTGGCCTCTGGTGATAC
TTGATGGGGTAGGGTCGGAGGAAAGTAACTGGAAAAGAAAAACCAGATTAGCTTTACTCTTCCCCCTCCCCTCCAGATTTCAATTTCAACCCTT
CCCCAAGAGAAGAAAACAATCCTTCCTGCAGACTTCTCTGGAAAAAGCCACCACTGTGAGCTTCCACTCGTTGTTTTTTACTTTAAGCACCGTC
CACAGAGAGAGTTTTTAACTGCAGTACAGAGCTGTGCATAAGCCTTATGGAAAACTGATGCCCAAGTTGATTAGCAGAGTGGCAGTTGAACAGG
ATTCTGTGTGTCTGTCTCAAATTCCCTCCTCCCCCCACTCCGCCACGGGTTTTTTTCCCCCCATTAGGCAAATGGAAGGCCCATGCCACCTGTT
CACCTCCAAATATTATAAGAACAGAGTTCCTACATGGCTTAAACATACAATGCACCCATACTTTTGCACATAAGCATGCTCTGTGATTTGGAGC
ATTCTGTGTGTCTGTCTCAAATTCCCTCCTCCCCCCACTCCGCCACGGGTTTTTTTCCCCCCATTAGGCAAATGGAAGGCCCATGCCACCTGTT
AGCATTACATCATTGGGTCCCCAGAACACAGTTGCACCAAAGGCCTTAAACAAAGTAGTTCTTCTTGTATTGTTTGCACTCAAAGAGCTGATAT
CATCCCAACTGATCTCATTGTATGTCTTTGTGTAACTGCTATGGCAACTGGGCAGGTGGGGAGCCTCCAGCTGATGTCATTGAGAGAGGAGGTG
TAGAGGCAGAATTTPAAAAAGCTGGACGCTGCTTTTTTCTGTGTGTGCGGTTTTCTAGCATGTGTTGGTTTTTTTTTTTTTTTTTAAACTAGCT
GCTTTTAAGACAAATTACAGCTTGAGTACCCTAAATAAGAACAGAGAGGTTTTTCCCCTGCTTTTAGAGCCTTCTTTTGAATTTGTTTTATTGT
TCTTCCCTCTCATCTTATATGGAAAAATGTAACAACTGCCTTTTTTGAAGAAAAAAGTGAATTAGGTTCCCATCACAGAATCTGTGTGGAATTT
GGGTTTTTGTGGAGGCGAAGCTGAGCAGATTTTAACTCTTCAGAATCCCTTTTGTGGAGGCTGTGATGATGACAATGGGTAGTTTTTATCTTAT
TTATTTTTTAAGTCTTCACTGGTGAACTTATTTTCCATATTTTCTTTCTTCTACTTCAGAATTATCTCTTCAGGTTCAAACTTTATTGTCATAA
TTGCCTAGCAGAATAAACTATCATATGTAAGGGCAGAGGTTAATTCTAGAAATCAACTGAAATTCGTATATAGCTCTTGTTTTTCTTTTCAAAA
AGCTAGGGTAGGTTTTGACTTCTTACTTTCAATGAGTAAAGTGAACATAATATTGCCCTTTGAGTTTTCTTTGGATCATAACCATACCTTAAGG
AAAATATGATTTCTCTCTTTTACACAGCCAGCTCCGGGTCCATTGGTTGTGAAAAGTCATGAGACTCGGTCTAGGTTATGGTCTGGAGTTTCCC
GCTGTGGTTTGTCAAAGATGAGACTTGAAATGGAGAAGAACATATGCCAGGCTCAGAGGCTAGTGGACAGATAGCTTCCTGTCCGTTATTGCAA
CATAACCGTCTCTTGTTCATGCTTTSGGTTTTCTGCCTTATCTCCTGGAACTATCAGACAGCCACAGGGCCATCTGTCTTTGAGGGTAGATGTT
GTGTTCTGGTGGCTTTCAGCTAATAGACTTTTCCACTTCCCCCTCCTTTTCAAAGGGAAAGCCAGAGTGTATCTAGTTCTGTTTGAGTAGGGTT
AGAGCTCAGTTGGCACTAATAATGTCAATCCAGATTTTATAGCACTTACATGTATATTATTATAATTTGAGCTTTGTAATAATCCTTTGGGTTT
ATCTGTGCATGCCATTGTGTCTAAAAATATTAGCAGAAAATTTAAACAATAAACTATGATCCGTAAATTCCCTAATTTAAACAATTGTTCGTTT
TTTGTACAGGTTCTTCAGCTTTTCGTCAATGTTTTTTACTTAGCTTTTAAAAATTTAATATTAAACCAAAATGTTTTATTTATTTTCACATCCT
TTTGCAACTACTCTTTTAAAGGCTACTATAATACTCCGTGGAATGAATGTAATAACTTTTTTCTTTTTATTTTTGTGTTTTACTTGGCCTTTTT
AAAATATATATAAAACAGATAACATTGTAGTGAACATCTCCATATATCTAGCTAACTATCTTTGGTTAGATGATTTCCCTAAGATCCATTCCCA
AAAGTGAGATTGCACTTGTTCAGGGGAAGGTTTGCATTTTAAAAATGGAGAAATAAGCACAGTTTATAAGCTTTTTATACTAGACCCATAACTC
GTGGGAGGCAGAGCAGAGCCGTAAGCTCAAAAGCATGCATTCACACATCCAAAAGAGGTTTCTTGATGGGTTTATGTGCCCACAAGCCTTGGAA
AGTCGAGGAGTAAGCAACCGCGCTGCTCTCACATTCTGTTCTACTGAAAGTCAGGGTTGATAAATGTCAGGGCCCTACGTGGAGAATATCAAAA
AAGATTATAAGAGCAGTCCTTCACACCCCACCCTGGCTTGTCTTTTCCAAGTACTTCTCTGCTGATTTCACCTGTGGGCAATCATATAAATAAT
ATAAATTAAAATAGTGAATGCCTGCTGAGTTCTACTGTGTGCCAGGAGATGTGCTAAGTATTTTACACGTATTCATTTATCTCAGGCTCACAAT
TGCACTCAAAGGGAGACACCATCACCCTCAGTTTACAGATGGTGGAACTGAAGCACAGAGATAAATGAACTTAAGTAATAGTGTCAGGAAATGA
TGGTACCCAGATTATAATCAAGATAACCTGTCTCTTCCAATGTTCCTGCTTGTAACCACTCTGCTGTATTGGGAGCAAACTTGTCCCTCTGGGT
GAGGTGAGCTATGAAGGGTGCAAGACATGCTCCTGTGGTGCTGAGATTCCACCCGAGGAGGTCATCTGTGCCTTTCTTGGCTCCCAAAGCACAG
GGTTCTATGTAGGCCACTGACCATATGGCTCTTTGAGGCAGGTCACATTTGCAGCTGACCAAGATTGCCTGATGCCGCGTGGTACTCTTGCTAC
GGGAACATGCCCTCATTTGTAGAAAGAGCACATTTCCAAAGTGTTCCATGCAGTGATACTCCCGAAGCTTGTCTTGGGTCTCCAAATGTGACTT
TTAGTTTTTGTTTTGTTTTGTTTTATTTTTATTTTTATTTTTTTTGCTTAAATACATATTTATATATGTATTTAAAATATGCATGAGCTACAAT
GCAAACTCATTCTAATGGGCAGGTGGCATTCTCTGCCAGCTCTGATCTCAGTCACACTAGCCCTTCTGTGTTTGTGTTCTAGGTAAGACTTACT
AGTTTTAAGCAGAACCATGAAAACCTCTGTGACAACTCCCTCCAGCTCCAAGAGTGCCGGGAGGTGGGGGGCGGCGCATCCGCGGCCTCGAGCT
TGCTACCTCAGCCCATCCCCACCACCCCTGACATCGAGAGACGCTGAGCTCACCCCCATCTTGCCCTTCCTGTTCCTTCGCGTGAGCAGCATGC
TCAGGACCTGGACACCATGCAGCGGCTGAACATCGGCTACGTCATCAACGTCACCACTCATCTTCCCCTCTACCACTATGAGAAAGGCCTGTTC
AACTACAAGCGGCTGCCAGCCACTGACAGCAACAAGCAGAACCTGCGGCAGTACTTTGAAGAGGCTTTTGAGTTCATTGGTAACTATCTCCCAT
AGGGAATTTTCATCCGCTGCCTTCCTTTTCCCTCCAGCTCTTGCTTTGATATCAAGTTCAAGGTTTATTCCTGTGTTGGAAAAGAAAAGCTGCC
CTGGAGTTTTGGAGGGCTCTGCCACCTGAAACAGCCTAAGCATTCTCCTAAGTCATAGCCTGTCGAGTGTATCCAAGCCATCAGGATGGATATA
AAAGGACAGTAATTGAATTTGTTTGGGATCTGTTCAACTAGAAATCCTCATCCCTCAAGTTCTCAGTGAAATAGTGGTAGGGTTAGCATTTATG
TGCTCTGTAACCAGAAAAGTGGATGGAAAGTAAGGAATCGGAGGTCAGAGCTGGTGCTACTGCTACTTGATCTACTAGCGCCGTTGAGCACCTT
GGAAGCAATATCTAGTGAATATGACACCCCTTCCAAACATACCTATGCCTTCCGGTCACCCTACTAAGCCTTATTCATCCAGCATAAGGGGAGA
TGGTACTAGGTTTCCTTTGACAGTCTGCCCCAAACTCATTGAACTAGGAAAGATCAGGTTGTGTAGACGGAGTAGTTCCCAAGGAGGAAGTTTT
AGCAACAGCACGCTTTGATCCCCAGAAGGAAGCAACTATTAGCCTAATCCTAATCTTAATTTCTGCAACTTCTATAGCCCCAAACTGCTATAAG
ACTCAAAATATCGCCGGGCGCGGTGGCTCATGCCTCTAATCCCACCACATTGGGAGGCCGAGGCGGGTGGATCACCTGAGGTCAGGAGTTTGAG
ACCAGCCTGACCAACATGGAGAAACTCCATCTCTACTAAAAAAATACAAAATTAGCCAGGCGTGGTGGTGCATGCCTGTAATCCCAGCTACTCA
GGAGGCTGAGGCAGGAGAATCGCTTGAGCCTGGGAGCGGAGGTTGCAGTGAGCTGAGATCACGCCACTGGTACTCCAGCCTGCGCAACAACAGT
GAAACTCTGTCTCAAAAAAAAAAAAAAACACTCAAAATATCATTTTGGGAGCACCTGCAATATAGCAAAACTCAACATTTATTTTTTTTTACGT
AACTTCAACTTTTATTACCATAAAGGGGTGGCCTAGTACTTTTCCTAATATTACAGCAGGTTGTTATTCCACGGACTACAGTTTGAAAGTGGAG
TGGGGTGTTCCTTTGTCAGAGAAGAAAGAACAGCCTCAGGTTTACAGCCAGTGGGGTCTGGTGGATTTGCTGTAGTGTTGACATCTCTAAAGGT
CATTTTGCCAAGCTGTTTTCCTTGCTAATTATGCCGTCAGCACAGGACCATGGAATATTGAGTCTGAAAGGAAATTCAGGGTGATCACTGAACT
TAGAGAAGTAAAGTGACTTCTTCAAGGTCATAGGAATTCTAGTGTCCAAGAAGGGGCCAGAATCCAGGGTTTTTGACTCCCAAGCCTGAGGCCT
TTTCACAACACACTAAGGCAATGTTTATGATGCCCTATTAAGTAATTCCCAACTGGCAACACTGAGGATGCAGAGATACTGCAGATTCTTTATT
AATAAAATCTGAGCCAAACCTGGAGCGCTGAGGAAGAAAAATTTCTCAACAAGCATATGAGGAACTTCTGGTTGATACATGATGTGATGTTATG
AGTCTTGCTTTAGTAAAAACACAGCAGGTTTTATAAACATAATAGCTTTCACTGAGAGTGTAATATAAGCTGAGCAGCATCTAAGTTTAGTGTT
TATACCAGTTTATTTATTCCTGAATCAAGTGTGTGTAGTGGAACCGGTGGTCCAGCCAGGCACTCAGAAGCTCATTCTCTCACCACCATGCTTT
ATAGCATTCAGCCCGAAGAACAACTCCATATCACAACCTGCATAGGCACAATTTTATTTTCATTGTTATATTATTGGATAAACTGAAATCTTAC
AGTCTTGCTTTAGTAAAAACACAGCAGGTTTTATAAACATAATAGCTTTCACTGAGAGTGTAATATAAGCTGAGCAGCATCTAAGTTTAGTGTT
TATACCAGTTTATTTATTCCTGAATCAAGTGTGTGTAGTGGAACCGGTGGTCCAGCCAGGCACTCAGAAGCTCATTCTCTCACCACCATGCTTT
CTGGTCTTGACTTGGAGCTAAATACCGTGTGCTGAAGGGAAAAAGTTGAAAAAGAGAGATGCTTACTTTTCTTGAAATACTGTTGACTATGAGA
AGTAAACTTCATCTGTAAATTTTTAAGATGAAAATTTACATCAGGTTTTTTTTCCTTGGTCCACTGGTGGGTAGCCAGTAGATGTAGTTTAGGT
GAAATCACTACTCTCTCTACCCCTTCTCCTTCCCTACCTGTTTATCTAATTGGTGTTCCTTCAAGGAAGCTTTCTTAGGGATGTGTTAGAGTCT
AGAAATGTCATTAAGAATCTGTTCAGGTAGTGCCCACATGCTATTGTCCTGAGCTTTTAATATATTTGAAAACTTAGCAAGTCTTCCTCTTTCA
ATTGCTCTGGATTTTGAGCCATTGCTGGGATTCCTCCATCTTCTGCATTATTGCCACACTGGAATGTCATACATGGAAGCAAACGTGATTGAAT
GCTTGAGAGGTGACACCTCGGCCTGTATACTACTAGCCTTTAGTTAACTTTGCAACAACTGGATTTTCTGGGGAGAAGTCTGAACATAGTATCT
TCCTAGTTAAGCTTTATTCCTTTAACCTTAATCAGGGTTTAGTAAGACTAAAACTCTTATCCATTTAATGCCCGTTCCTGTACAGAGCAATTCT
ATAGAATAAAGAAAGTGTTTTTTCTCTATTACAAGTGAGAGAGTTGTTACTAGCACTAGGTTTGTTAAGTCACACAACCGAAAATTGGAATTAA
CATCCTTAATCCAAAGAGGAACTGCATATATATATATATACACACACACACACACACATACACACACATAGATATACATATATATGTGTGAGTG
TATATTTTCATGTGTGTGTATAATTTTTCCCCTTCCTCTCTCCTTTTCCTTCATTCTTTTTTTTTCTTTCAGTAGTGTAATTCCAGAAAAAAAG
AGAACAAGACATTTGAGAGAAGCTTCAGTGACTGTTAGAGTCGACTTGATCAGTAGCTTGTTCAACGTGAAAGTTAACTGTGTTATAGGTCTGG
CTTCCGGCCACTGCTGTCACCTGTGCAGCAAACTGTTCCTATCAGCAATTCTTTCATTTAATCTTCTCTTTAAATGTAGATGTATAGCTTCTTG
TTCGTGCTGATATCAACTTTAGCCAGTTCTGGAAGTTGTGACATAAGTATACGTAATGAACTAGTGGATTATACTTGGCTTAAAAACTGTTTTA
ATTCATTATTTCTATACAAAATAAGGCATTGCAAAGTTGAGATGAAAGTTTCTCTCTCCGTGCCTCTCTCTTCCATCTTCCCTTCATCTCTTGT
CTTTCTCCCTTTTTTCAGAGGAAGCTCACCAGTGTGGGAAGGGGCTTCTCATCCACTGCCAGGCTGGGGTGTCCCGCTCCGCCACAATCGTCAT
CGCTTACTTGATGAAGCACACTCGGATGACCATGACTGATGCTTATAAATTTGTCAAAGGCAAACGACCAATTATCTCCCCAAACCTTAACTTC
ATGGGGCAGTTGCTAGAGTTCGAGGAAGACCTAAACAACGGTGTGACACCGAGAATCCTTACACCAAAGCTGATGGGCGTGGAGACGGTTGTGT
GACAATGGTCTGGATGGAAAGGATTGCTGCTCTCCATTAGGAGACAATCAGGAAGGAGGATGGATTCTGGTTTTTTTTCTTTCTTTTTTTTTTT
GTAGTTGGGAGTAAGTTTGTGAATGGAAACAAACTTGTTTAAACACTTTATTTTTAACAAGTGTAAGAAGACTATAACTTTTGATGCCATTGAG
ATTCACCTCCCACAAACTGACAAATTAAGGAGGTTAAAGAAGTAATTTTTTTAAGCCAACAATAAAAATATAATACAACTTGTTTCTCCCCCTT
TTCCTTTTAAGCTATTTGTAGAGTTTATGACTAAATAGTCTGTGCAGGTTCATAGACCGAAGATACTACACACTTTAAACCAATTAAAAAGAAC
CAAAAGTAAATAGAAAAGACATTGAATCACCAAGGCCTGGGATCAACCTGGGCTGTCCACACAGAAAACAAAAAACCCAACCAAACCAAGCCTG
TTGTGCTCACTGGTGCAAAGAGAAGATCAGGGCAGCTTAAGTGGTCTAAGAATCCTTCAGGCATTCTTTAAGGAGAAAAAGGATACCTTTGATT
TTGTGTGTTTCATGCTCTGGATTTTTTTTTTTTTTCCTTCTCTGGCTTTAAGACATTTTTTTTGAAATACTGAGGAACTGACCATTATATGCCT
TCACTGGCTTCTTGTGCAATAATATGATGTTTTAAGTGTGCAAACAAGTTAGAGCTGGCAGCTGAATGATAGACAAATAGTGCAAATTTGCCAG
CTTGGAGATAGAAACGAATTCAACAATATATCAAATACTTTCCTTCCCACCTTTTTCCTTTTTTTTTTTTTTTTCTGATTTCATTCTGGTTACA
GTGCCATAAACCTTGTTACATATGTATATCAGAATGTAAGAAAAAAAAATTTATTTAAAAATATTTTTCGCAAAAAAAAAAAAAATCTTGGTGT
GTTCAAGCCTTTCTTAAGCTCTGGTAACTTGCATATACAACAAAGTTGAAATAAAACAGATTTTTATATAGGGAAAGAGAGATGAGGAAGGGAA
GTTCAAGCCTTTCTTAAGCTCTGGTAACTTGCATATACAACAAAGTTGAAATAAAACAGATTTTTATATAGGGAAAGAGAGATGAGGAAGGGAA
CATATCCAGTTTTCTCACTGTGAACAGAGTTAGCAGGAAGTGGAAGAGCTCCAGTATTGATCTGCCAAGTCACTGTCCCTTATATATTCTCACA
ATGCTGTCATCCTCTCCTGCAATATCATTCCTTTTGCATCGGGCAGGCTTGCATTAGAAGGGGATCCCATCTGCCTTTGCGCCTTGGTGACCAA
ATCCCTGCCAGATTGATTGGTGAGAATTCAGTGATCTCCCTAGTGGCTATTTGATAAATACTTAGGACAATCTTCCATTTAGGGATCTTGATGT
TCCTCCCCCCACCCCCCCACCCCATTGTCACTTGCTCACTTGGCATCTTTGGTGACATTAACCATGTAATGCGTTGCAGCGAATTGCTATTGCC
TACTCTTTTCCCCAGCAAACTGAAACTCAGCTCCATACATGTGTACAGCTTCCTTATAACACTGGGTTAATGCATAGCTGGGTTCCCAATTCAC
TGTTGATGGAGGGTTGGGGGTATGGGAACACAATGCAATATTTTCTGTGTTTCATTAAATTAAAAGTCTAGTGAATCGGACTTGGCCATAAGGA
AGATTTATGGCAAACTGAAATTTGCCTGGGGTGAATAAAAGAGTTGAAGAATCTGGCATGTTGGATTCTATGTGACAACATTTGACATAAATAA
TTTTGTGTATGTTGGCTTGAAAATGTTAGGAAATATTTTTGACATTTAAAAAAATAGCTTTTCTACCAAAAATAATTTAAATTTTTCTTTTATA
GAAAAGTGGGAGACTGAATTTAACAGGAATTAACAGCTGTTTTAGATTATTTTAATAGAAAGTGTTAATCAGGTGAAAAGCAAACTCTGCTTTG
TGCTTTCTACTCCTCAGGCTAACAATTTCCTTGGTGTTAGAGTATTTAAGGAGTGAGGTTGATATATAATTAGTGATTTAAAATACATGGTAAT
TTAGCAGACATTTCTTTTTGTTATTTTAAGTCTAAGTGTTAAATTTCTGATAGCATGTAAGGTATATTGCCTCCCTCTGTCCCTTCCTTCTTTC
CTTCTGCTTTTTCTTTGTTCCCCTCCCTTCCTTTTCCTTCCCTCCCTCTTTCCTTCCCTCCCTCTTCCCTTCCCTCTCCCTTCCCTTCCCTCTC
CCTTCCCTTCCCTCTCCCTTCCCTTCCCTCTCCCTTCCATTCCCTCTCCCTTCCCTTCCCTTTCCCATTTTCCCACTTTGCCTCATTCCCTCTT
TGCCTCTTTCCCTCTTTCCCTCTTTGCCTCTTTCCCTCTTTCCCTCTTTCTCTCTTTGCCTCTTTCCCTCTTTCCCTCTCTCTTTTTTCTTTCT
TTCTAACAAAACACAGAAAAGTCAATACAGTTTCTCATCTTTATCCACATGGAAATGATTTATGTTTTTGGAAGTTTATGATTTTGAGAGAAGA
GCCTATCCTGGGGGCAAACAGTAATCCTGCCAACCAGAATACCAAAGATTCTGAGAGGACTCAGGTCTTTTCTACTAATCTGCTGTGAGTCACT
TAGCCTCCATTTCTTCATAAGGAATGTTAACCACTTCATGAAAATAATACAGATTAACCAAGCCATAGCTCTAGAAACCAGACTCCACATGTTG
CTGGGCCTCACTAGCTGTCTGGGAGCTATAAGGCTGCCCTAGGAAATAATTGTGTCTCCCCAAGAAAGCCAAGTCCCTGACCAACGCATGAACC
ATTCTCAGAATCCAGCAACGGTTGTTTTATATTAAATGAATCTAATTACTTAGTAGAGTGAACCTGTAACTAATTTAAAGAAATACAGCAAGCA
TTGTTATCTTAGGTTGAACAAAACAGTAGCTTTAGGTTTCTATATATATTACATTTATTTCAATAGTTAATACTTTTCCAATCAATGCATGTGA
ACCATGATAGGGAGTTTCTATTTCTTGAAAGAGTTTGTGCCAGTGTCTTCTGGATAAGGAAAGGCATCATGGGAGGTAGGGCAAGGAAGCTGAC
AAAAAACATGTACAAGGGGAAATATTCAAGAAAAAATGTACACAACCACACAATCACATGCTGGCAGTAAAGGGGAAACATGGCCTTTCGTAAT
ACGGGAAACAGGAGAAAATGGGAGGCTAAAATGAAAAGAAAAAAACCTATGTCAGAGTAAGGAACTAGGACCTGAATTACACTCCAGAAGCTGA
CTAAGATAGAATGCTATATAAATTGCTCAAGAAAAAATGTACACAACCACACAATCACATGCTGGCAGTAAAGGGAAACATGGCCTTTCGTAAT
TCACATTATTTGGGGACAGGCTCTTGTAAATAGGTCACAACACATTTTATTTTATGCTTTTTTCCCCAAACATGAAATATCAGGAAATATAGTT
GCTGTTTGGTTTCAAGCTCTGATTGGAGACAGTTGTTGCATATGAATGGAGGTCAGATGAAGGGTGGTAGAAAATGACTATTTTAGCACTGGCA
CCCAGAAGGATGGGTCATAATTCAGAAGTGCCCCAAATCACACCTATCTGTAGAAGACTTCCTGCCTTTTTGAGGTGGTGGAATATGAACACCA
GTGCTTTCTGTGGTTCCTGATTTCTTCCTTCGTGACAACCTTTGTCAGTGTTTGATACAAGGTGCATGTATCGGTGTTTAATAAGAAGCAGAAA
CAGTGACATAGATGAGGGGTTTATTCCAGGGATTAGACCTCAGGCAAGTGTGGGATCTGGTGAAGAAGTCAATGGGAGTGTGTTGCATGCTGTC
TGATAATGGGCTGAACTCTCCGGGTCAGCACAGCCACCAGTAACAAAAGCTGGGCATGAAGTAGAGAAGAACAAAGAATTGGAATTAGGAGGAA
AACTGGAACCCACATCAGCCTTTTACCAACCTCAATGGGGGTGACTTCCAGAAGGATCTAGTGCCCTCTGCCATGGAGCTGATGCATGTACCTA
GCATAGGACTTGGCAAAGCTGAAGACAGAGCTTTGGGAGCTTCAACTACAGCTGCTGCGCTAAGTCCAGGTGAGTCACCACATCAGGGTAGTTG
TGTGCTTGCCATCATAGAGTTTGGTGCCCCCTTCAAATGGTTGCTGCTTCAATTCTGCTTTTCCAACCTCATGCAAATTTCCCCTAAGGCTAAC
CTTAACTCAGTGTGAATCAGGAGAGGAAAATTCTGGAAAATATAGCTCCTGATTTAGCCAATTTGATACTGTAGAAGCTACCAAAGTCCATCCC
TTGCCAACTTGGCATCCATGTCCACTTCTCTTAACTAAATATAACTTCCAAATGAAGACATTAGCAAAACGATGCTTCTATGTAGTATGATGCA
ACTATCAGTTCTACACATGAAAACACATTTAAAAGACGACTGGGTGCAGTGACTCACACCAGTTATCCCAGCACTTTAGGAGGCTGAGGTGGGT
GGATCACTTGAGGTCAGGAGTTCGAGACCAGCCTGGCCAACATGGTGAAACCTGTCTCTACGAAAAATACAAAAATTAGACAGGCATAGTGGTG
CATGCCTGTAATCCCAGCTACTCTAATCACTTGAACCCAAGAGGCAGAGGTTCCAGCGAGCCGAGATTGCACCACTGCACCACCCTGGCTGATA
GAGTGAGATGATGCCACACAAAAAAAAAAAAAAAAGATACATAGCCTCATAGGTTACTTTGTCCATTTTGGGATGATATTCAGTCTTTTTTTAG
CTAAGATCCACTTTCCCTTCGATGTCATGTCATTTGAATATACTGAGATATAATGATATTATGGGTTGAATTGTGTCTGTCAAAAAGCCATGTT
GAAGTGCTAAACCCTGAACCTTGTAAATATGATCTTATTTGGAAATACGGTCTTTGCAGATATAATCAAGAAGAGGTCATATTGGATTAAGATG
GGCTCTAATTCAGTGACTGGTGTACTTATAAGAGGAGGGGAATTTGAACACAGACACAAAGAATGTCACGTAACAATGGAGGCAGAGATTGGAC
AAAGGAACATCAAAGATTACCAGCAACCATCAGAGGCTACAAGAGACTCATTGAACAGATTCTCCCTCAGAGCTTCTAAAAAGGAAGTGACCCC
ACTATCACATTGATTTACGACTTTTCGCATACAGACTGCAGTAATAAATTTCTGTTGTTTTAGGCCACCCAGATTTTGTGGTACTTTGTTATAG
CAGCCCTAGGGAACTAATACAAAGACTATTATTACCCCATTTTATATTAGATGGTGGATGGGGTAGAAAAAAGAATTGGTTAATATACAACCAA
ATATATTTATATCAAAAAATAAATATTCATAATTCTTACCATCCTAATTTCTATAACTGATCTTGTGGTCATAGCTGGTATTTATAACTTCCTT
CTTTCACTACCCATTCCATATACTTGTGTCCTCAGCAAGCACATCACCTAGTCATGGTTTCTTGCCTGTTGGGGTGATGTCAGTTTTCATTTTT
GAGGGATCCAAGCTTTTGCAATTGAGCCTGCATTGGGTTATTTTCCACTTACTTTGTTCGTTACAGCAACAAAAGTAATTACAAGACTTGAGAG
TATAAGATATGATCTTGAATTCCAGGCACACTTTTTCTTACTCCTATAATCTGGTAGTAATCCAATTTCCCCAGTCATCCCAGCCAATACACCA
ATATCTGACTTTGCTTGTTGATTCTTTAGCATAAGGAGCCCAAAGTCGGCAGCAGGGAGTATCAACTTCCATCTTAATGGAATCATTGCTGTAT
CTCCTAGTAGAAGCATCTCTCCCTTGGGGACCAGAACTTCTACACCAGCAGAGTCTAAAGTTGAGAATAGAAAGAATAAATTTTGCTGTGGATC
ACTATGGGTAACAGTAAGAGGAGCCCTTTCCATTTTTCCCCCTTGATTCCTGGATCTATGAAATCTGGATAAGAGAGAAACAGCAACATGCATT
GATTGATCATTTAGAGAATTTACTGCATCTTTCAGGACATTATCCTAGCCCTGCAAAGTGTTTCCATCCATCTAGCACAGTAAATAGTTAAAAG
AAGAATTCCACCTTTCTACTGCTTTAGAGTGATGAATAACAAGTTAAGACTAATGAATTCCATGAGCATGAGTCTGTTATTCTTCATTTGCTGC
AAAGTAAGTTCCTTGGTCAAAAGCAAAGCACTGTGGAATAACATGAAGGGAAATAAGATATAAGAATTCTTTAAGTCCACAGATACTGATTTTG
GCAAAGGTATTACACGTAGGGAAGACAAATCCCTATAAAGAGTAAGTTTCTATGGAGCAAGAACAAAATACTGCCCTTTCAGGCCTTGTGAGTA
GAAGTTCATGTTGCTGAATTCATGCATACCTCCATGTCTACCATCATGGCTATTTTGTTCACGAGCTCATTGGTCAAGGAACAGAAGAAACTGG
AAAGAAAAACCTGATAGAGGTCTGCAGAATGTGTTCTCTTGTCCATTATTAAGATTCTTACATGCTGAGGTTGAGCTTTGATCAACATTCACAT
GGGCCCATTTAGGAAAGTCTATCCATTTACTTCTTCCCTAGATTTTCCTGTCACTAATTTTCCAGTCATGTTTCTTCTPAGTCCCTTATTATCC
GGGCCCATTTAGGAAAGGTCTATCCATTTACTTCTTCCCTAGATTTTCCTGCACTAATTTTCCAGTCATGTTTCTTCTAAGTCCCTTATTATCC
GAAGTTCTTATTACTGGGAAAATTTTTCTTCCCCACACCACCAGTATACGGCCACAATGATTTAGTCATTCGGTTTTGGATGATACCAGAGTAT
CACACAAAAATTTCTGTAAACAATGCCAAATATTTTTCAGTCCACTGGTCACTGAGTGCTTCCCATGAGGCCATGGGTGTAAGATTCTGAAGCT
ATTGTTGCACAAATAGACACCATGGGTAACTGGGTCACTTGCTTATTTAATATACTTGTGCTTGATCTCATATATTCTACTTCCATTTGATCAT
TGAATGAACAACTTAGAGGCTTCCATTTGATCATTCATGCACAACTTAGAGGCTTGATGGATCAACAACACTTAGTTCATCATGGGCAGTTCAG
GTTGCATTATAACTTGATGGCCCATGATCAAGCTTCCAGTTTCAAACTGGTATTCTAAAGAAGAATTTTGAAGAGAAAAGAAGAATATCTGAAT
TAAAAGAAGAATTTTTCTGAAGAAGTTGTTATAGTTTTGCTCCAGAATTCTAAATGTCTGCTCTATGATTCATCTATCAGGTTAATGGCTTCAT
GCAAGATTCCTGCCTAACAGAGACATTTTTAGCACCATGGAATCTACTGGATCTAGATGTAGGAGCAGTTTGTATGGCAGCCTTGTATTGTAGA
GGCTTTTCTTGTTTTGGACCTCACACAAAACTAATGACCTTACATCTTACTTGGTAAATGGATTGTAGTAGCATGCCCAATGAAATATATATTC
TCTTCAAAATCCACAAAGGCCCATTAGACATTATCCCTCTTTCTTAATAGTAGGAGAGGTCAGATATAGCAACCTGTCATCATGTTCATGAAAG
GAATATCTTGGAATGCTCAAAACAAGTAGATCACTACAAATTTCAGTAACATTCAGTGGATATAAAGTGAATTTTGTGGAATTTATCACTCTCT
GGTATGCAAGTATCTTAACATCATATCTAGAACTAGTTACTTTATCCTATTTACCAGGTACAGTAATCATGATATAATATCATTAATATAATGT
GCCTGCATGGTATCTGATGGAATGGATAGACAATTATGGTCCCTGTGGACTAGTTACAACACAGGGCTGTAAAGTTGAAATATAGCCTGAAGTA
GGACAGTGGAGGTACATTAGTAACCCTGTTGGCTGGAAGCAAATTGCTTCTGATAGTATATACCAGAGGTTAGCAAACATTTTCTGTAAAAAGC
TAGAAAATAAATATTTTAGAATTTGGAGGACATATGGTCTCTGCCATAATTACTGAAATCTGCTGTTGCAGCATAAGAGCAGCCATACCTAATA
TGTAAATAGAGAAATGTAACTGTGTTCTAATAAAACTTTATTTATAAAAATCCAGTAGTCTGAATTTGGCCCATGAGCTGTAATTTGCTAATTT
CTGGAATTTATTAACAGGTATAGAGAAATAAGCATTTGCCAGCTCAGTGGCTCCTGACCAGGTGCCAGGAGCCCTATTGATTTGTTCCATCAAT
GAAACTACAGTTGGAACAACAGCTGCAATTGGAGCCAACATCTGATTGAGATATTAAAAATTCACTGTCATTCTTCAAAATTCATCTGTGTTCT
GCATAGGATAAATCAGCAAAATAAATGGGGAATTTGCTAGGAATCACCATCCTTGCATTTTGTTTCAGTTCCTGTTGGTGGCTCTAATCTTCAT
CAATAACAATTGTTTTGTTCACTAATCTGTTTTAGGCAGGTTCAATAGGGACAGTTCATCTCTGATAAACTCATGCAGATAAGAAATGTCTTCT
GGGAAGGCTTGACTGGGGCTGGAGAACGTACTTCCAAGATAGCTTGCTCAAATGACTGGCAAGTGCTTCTTATAGTTGACTTGGAACTCATCCA
GGGTTATCCACTGGATACCTTGGATCCTCTCCACATGGACCTCTTCATAGGGATGCTTGGGCTTCCTGAAAACATGGCAGCTAGTTTCCAAGAA
CAAGGATTCCAAAAGGCATGGATGAAAGTTGTAAGTCTTCTAAATCACTTAAATTCCAAAGTTCTGGATCACTTCCGCCAAATTCTATTTATTA
AATGAATCAGTAATGCAAGCCAGATCCAAGGGTTGGGTAATTAGACTTCACTTCTCAATGCATAGAGTAGCAAAGAACTTGTGGCCATCTTTTA
ATCCACGATAGTTCACTTGCACAACAAAGCCAAACTAGGAGACCGACAAAGGTTACTACCCCAGAGGAGAGAAATTTTTGTAAGAAAATAATAT
CGAATTTCACAGATCTACTAAACCACTGGGGGCTCCACTGAGCAGTATTTCAAATGGATTACACTCTACCAAGTCAGGAAGATAAGTAAGAGAG
GTAGAGAAAAAGGCCCAAAGAAAAGAACAGAACACAAGTATTTATTCATTAGTCCTTATTCCTTATATATGTCAATTTCAAGGAAGTCATCAGA
AAGACATTTCCTTTCTCCTAATCTGGACATGAGTCTCTGGGATTCTCTTGAAAGTCATCTTCCCAATGCTAGGCAGCACTGCACCTTAGCATTT
ATCCACGATAGTTCACTTTGCACAACAAAGCCAAAACTAGGAGACTGACAAAGGTTACTACCCCCAGAGGAGAAGTTTTGTAAGAAAATAATAT
TGAGGGGCCCATAGCCTCCCATGTATCTATTTAGACTATAGGTTAAAGACATACTTGGTCTTCCCTATAACACTTACGTCAGTGTCTTGGTTGT
GGTATTGCTCAGTATTTTATTATTGACTCATCAGAGCATTTTTACTCCATTGGCTTTTGACATCTAAAACAGTTGTCAACTTATAAAACTCCAA
AATATTTAACAATCAGCTCTCATAAGCTGGTGTGTGGGATGGTATCAAAAAGCTCTCCTCTACCTCGTAAGGTTGTCACTGCAGACAGTACTTC
AAGGATTTTTTTTTTTTTTATCTTTAGCTAATTTAAGCTGTCACTCCTTATTTTGGATGGGAGGGAGAAAAATAGCTAATTGGAAGCAGAGGAA
AAAATAGTTTCAGGATCAATGGTGGAAATAGCAGCAAAATAATTATTATTACAGTCGTAATGCTCTGCATTTATATGGGGTTTTTTTCCAAAGG
TCTCAGAACACTTTCCTGAATATCACCTACAAATTCAAAAACAATTATGAAGAAGTCAGAGTAAAGCATAATTATACCAGAAATTTACTCTGAA
ATGTAATTCAATACTCTAATACAATTTTACTCTCAAATATAATTCAGTGAAAAGTAGACTTATTGTAAACTGAATTATAGACATACATTTGGAT
TTTTTTTTTTTTTTTTTTTTTTTTTTAAGACGGAGTCTCGCTCTGTTACCAAGGCTGGAGTGCAGTGGCGCGATCTCGGCTCACTGCAAGCTCC
ACCTCCCGGGTTCACGCCATTCTCCTGCGTCAG
HUMAN SEQUENCE-mRNA
CCACGCGTCCGCAATGAAGCCGAGTGAATGGGGGCTGAATGTGCGAGTCCATAGCTGAAGAGGAGCGCCAGATGGTGGAGGAATACACTTATTT
ATGAAACTGTCTTGAGTTCTTCTTGAATTGCCAGTTTTCAGCCTCCTCATGCCTCCGTCTCCTTTAGACGAGAGGGTAGTAGTGGCACTATCTA
GGCCCGTCCGACCTCAGGATCTCAACCTTTGTTTAGACTCTAGTTACCTTGGCTCTGCCAACCCAGGCAGTAACAGCCACCCTCCTGTCATCGC
CACCACCGTTGTGTCCCTCAAGGCTGCGAATCTGACGTATATGCCCTCATCCAGCGGCTCTGCCCGCTCGCTGAATTGTGGATGCAGCAGTGCC
AGCTGCTGCACTCTGGCAACCTACGACAAGGACAATCAGGCCCAAACCCAAGCCATTGCCGCTGGCACCACCACCACTGCCATCGGAACCTCTA
CCACCTGCCCTGCTAACCAGATGGTCAACAATAATGAGAATACAGGCTCTCTAAGTCCATCAAGTGGGTGGGCAGCCTGTGTCAGGGACCCCCC
CCACCTGCCCTGCTAACCAGATGGTCAACAATAATGAGAATACAGGCTCTCTAAGTCCATCAAGTGGGGTGGGCAGCCCTGTGTGCAGGGACCC
AGCTGCTGCACTGTGGCAACCTACGACAAGGACAATCAGGCCCAAACCCAAGCCATTGCCGCTGGCACCACCACCACTGCCATCGGAACCTCTA
GACTGCAGCAGGGCAAGATCACTCTCCTAGACTTGATTTCCTGTAGGGAAGGCAAGGACTCTTTCAAGAGGATCTTTTCCAAAGAAATTATAGT
TTATGATGAGAATACCAATGAACCAAGCCGAGTGATGCCCTCCCAGCCACTTCACATAGTCCTCGAGTCCCTGAAGAGAGAAGGCAAAGAACCT
CTGGTGTTGAAAGGTGGACTTAGTAGTTTTAAGCAGAACCATGAAAACCTCTGTGACAACTCCCTCCAGCTCCAAGAGTGCCGGGAGGTGGGGG
GCGGCGCATCCGCGGCCTCGAGCTTGCTACCTCAGCCCATCCCCACCACCCCTGACATCGAGTACGCTGAGCTCACCCCCATCTTGCCCTTCCT
GTTCCTTGGCAATGAGCAGGATGCTCAGGACCTGGACACCATGCAGCGGCTGAACATCGGCTACGTCATCAACGTCACCACTCATCTTCCCCTC
TACCACTATGAGAAAGGCCTGTTCAACTACAAGCGGCTGCCAGCCACTGACAGCAACAAGCAGAACCTGCGGCAGTACTTTGAAGAGGCTTTTG
AGTTCATTGAGGAAGCTCACCAGTGTGGGAAGGGGCTTCTCATCCACTGCCAGGCTGGGGTGTCCCGCTCCGCCACCATCGTCATCGCTTACTT
GATGAAGCACACTCGGATGACCATGACTGATGCTTATAAATTTGTCAAAGGCAAACGACCAATTATCTCCCCAAACCTTAACTTCATGGGGCAG
TTGCTAGAGTTCGAGGAAGACCTAAACAACGGTGTGACACCGAGAATCCTTACACCAAAGCTGATGGGCGTGGAGACGGTTGTGTGACAATGGT
CTGGATGGAAAGGATTGCTGCTCTCCATTAGGAGACAATGAGGAAGGAGGATGGATTCTGGTTTTTTTTCTTTCTTTTTTTTTTGTAGTTGGGA
GTAAAGTTTGTGAATGGAAACAAACTTGGTTAAACACTTTATTTTTAACAAGTGTAAGAAGACTATACTTTTGATGCCATTGAGATTCACCTTC
CACAAACTGGCCAAATTAAGGAGGTTAAAGAAGTAATTTTTTTTAAGCCCAACCATTAAAAATTTAATACAACTTGGTTTCTCCCCCTTTTTCC
TTTAAAGCTANTTTGTAAAAGTTTATGAG
HUMAN SEQUENCE-CODING
ATGCCTCCGTCTCCTTTAGACGACAGGGTAGTAGTGGCACTATCTAGGCCCGTCCGACCTCAGGATCTCAACCTTTGTTTAGACTCTAGTTACC
TTGGCTCTGCCAACCCAGCCAGTAACAGCCACCCTCCTGTCATCGCCACCACCGTTGTGTCCCTCAAGGCTGCGAATCTGACGTATATGCCCTC
ATCCAGCGGCTCTGCCCGCTCGCTGAATTGTGGATGCAGCAGTGCCAGCTGCTGCACTGTGGCAACCTACGACAAGGACAATCAGGCCCAAACC
CAAGCCATTGCCGCTGGCACCACCACCACTGCCATCGGAACCTCTACCACCTGCCCTGCTAACCAGATGGTCAACAATAATGAGAATACAGGCT
CTCTAAGTCCATCAAGTGGGGTGGGCAGCCCTGTGTCAGGGACCCCCAAGCAGCTAGCCAGCATCAAAATAATCTACCCCAATGACTTGGCAAA
GAAGATGACCAAATGCAGCAAGAGTCACCTGCCGAGTCAGGGCCCTGTCATCATTGACTGCAGGCCCTTCATGGAGTACAACAAGAGTCACATC
CAAGGAGCTGTCCACATTAACTCTGCCGATAAGATCAGCCCGCGGAGACTGCAGCAGGGCAAGATCACTGTCCTAGACTTGATTTCCTGTAGGG
AAGGCAAGGACTCTTTCAAGAGGATCTTTTCCAAAGAAATTATAGTTTATGATGAGAATACCAATGAACCAAGCCGAGTGATGCCCTCCCAGCC
ACTTCACATAGTCCTCGACTCCCTGAAGAGAGAAGGCAAAGAACCTCTGGTGTTGAAAGGTGGACTTAGTAGTTTTAAGCAGAACCATGAAAAC
CTCTGTGACAACTCCCTCCAGCTCCAAGAGTGCCGGGAGGTGGGGGGCGGCCCATCCGCGGCCTCGAGCTTGCTACCTCAGCCCATCCCCACCA
CCCCTGACATCGAGAACGCTGAGCTCACCCCCATCTTGCCCTTCCTGTTCCTTGGCAATGAGCAGGATGCTCAGGACCTGGACACCATGCAGCG
GCTGAACATCGGCTACGTCATCAACGTCACCACTCATCTTCCCCTCTACCACTATGAGAAAGGCCTGTTCAACTACAAGCGGCTGCCAGCCACT
GACAGCAACAAGCAGAACCTGCGGCAGTACTTTGAAGAGGCTTTTGAGTTCATTGAGGAAGCTCACCAGTGTGGGAAGGGGCTTCTCATCCACT
GCCAGGCTGGGGTGTCCCCCTCCGCCACCATCGTCATCGCTTACTTGATGAAGCACACTCGATGACCATGACTGATGCTTATAAATTTAGTCAA
AGGCAAACGACCAATGTATCTCCCCAAACCTTAACTTCATGGGGCAGTTGCTAGAGTTCGAGAAGACCTAAACAACGGTGTGACACCGAGAATC
CTTACACCAAAGCTGATGGGCGTGGAGACGGTTGTGTGA

[0297] TABLE 33
MOUSE NOMENCLATURE
ICSGNM Fli1
Celera mCG14021
HUMAN NOMENCLATURE
HGNC FLI1
Calera hCG39646
MOUSE SEQUENCE-GENOMIC
CTGTGTGTGTGCAGCCTGACATTAGAGGGGACAAACTGAAAATGGCTGCAGAGCGTATGATCCCTGCAGTCAGTCAACTGGAGTTGTCATTCTG
CAGCTGAGGAACCCCAGGCAAGTCCTCGGTCTCTTTAAGGTTTGGTTTCCGTCTTGGTACCATGAGGACCCAACTTACATTTTAAAGGGTTATG
CTTACAAAATTGTCTTGGGAACATCAAACAATAGTTATTCTAGCTTTACTTTTTGACACAGATCTTGCTAAGTAACCTAGACTGGGTCCTCAAA
CTCTGGATCTGTCTAGCCTTAAGCATCCCCAACCGTTAGGCTACAGGTGTGAGCCACCAGGCCTGGCTATTTAACCTGTCTAGTTTAAAAGTGT
GAGTTGGGGGAGTCGGGGGTGGGGGAGTACACACCTTTAATCCCAACACTTGGGAATCAGAAGTCGAAGGATCTCTGTCAGTTTAACGCCAGAC
TGCTCTACAAGTTCCAGGACAGCCAGGGCTACAGAGACAGTCTCTGTCTTGAAAACCAAACCAACCAACCCACCAACCAACCGAACCAACCAAC
CAACCAACCAGCCAACCAACCAACCAACCAACCAAACAAACAAACAAACAAACAAACAAAAAATGGTCCTTGTCTGTTTGGTGCTTGGCTTTAT
GGCACCGGAGATGAACATAGGCTTTTACTAACCTAGGTGAGGACTGTGTTTCTGAGCTACAACAGCTGTTGTCACCTGATGTCCATTGTGTTGT
CCTTTCCAGAGAGTAATTCTACAATATAGTGGTTAGAGGAGTTTATCCCAACATTCATTCCCTTTCACTGTGTGAACCTGGAATAGTTATTCTC
TGTGCCTCAGTTTCTCCATCTGGTCCATCCTGGTAAAAACCACAGTCAACGGATTTTCAATCACCCTTTGAGTATGGATTTTCTAGCACACACA
CACACACACACACACACACACACACACACACACACACACACACACAAATCACTCCCAAACTCACAGAGGTCCTTCAGCTTCTGGTTTCCAAGTG
TTGGGGTTAAAGGTGTGCATCACCACTACCTGGCTCACACTTTTAAGTTAGAAAGGTTAAATAGCCATGTGTGGTGGCTCACACCTATAGCCTA
GGCTTGAACGAACTACAGTGGCCCCCATCCACTCTATTTAATGGTTTGCTGTTATAATCTGGAGGTCAGTTCTGGCTGGTGGCTGGTGGCTGAT
GACCGTAGGTCCTCTCTGTGTGTGCATGTGGTCCTTTCCATGCAGATTTAGTAACTTCTTTGGACTTCCTCATAACATGATGCTGATTTGTAAC
GACTAATATGAAGTGGGTGGAGGCATTAGTACTTTTTATCATCTAGCCTCTGAGGTCAAGCAAGAGAACTTCTATGACCCTGAATTTGTTGACG
CAACCATGAAATTCCATCGGGCTTCAGGGGTATAATGGTTAACTTCCATTGTAATTTGGATGATTTATAGTCACCATGGGCGTGTGTCTCGGGG
TGAGTCTGTGGAGATATTPCGGAAAAGGTCTGACTGATGAAAAATGCTTTAACTTGAATATGAATAGCACCATCTCACGGGCCGGGATCCGACT
GGAGAAAGCGACCTCCATGCTAGCATTTGTCTTTCTTGGCAACGTGACCATCAATGCAGTGTGACCAGCCACCTCATTTCTACTGCCACCATAC
CCTGCCCAGGATGATGGATGGGATCACCTTAAACTACAAATCAACACAAACACTTCCCTCTTTAATTTGCCTCCTGCCAGGTATTTTCGTAACA
GAAATGAGAAAAGTTGCTGACAAAAGGGAAGAGAAATAGAATCTGGCTCTTAATGGACGAGATAAGACTGTACATATGGAGATAGCCGPTAAGG
GGAACTGGAATTAACTTTAGTAACTGGTGACTGACAGGTGTTTCACATCATCCTCCTTATCCTACTTTCCATTAAATTATCTTCTCATTCCTTC
TTCGCGAATCAGAAGGCTCGCCCGAGAGCACAGCGGGGTCCCTCTCCGAAGTTCATCGCGCCCTCGAGACTCCCACTCTAGGCTGATGTTTCTC
CCTGTGCAGAATGGTTCCCAAAGCAATGAAGGCAGCAAGCTCTGCTCCCAAGAAAGCTGTCAGCATTTTGTATGCCCTCAGGTTGACAAGAGAA
GCAACTTCATGTCGTTATGAAAAGAATGCAGCAAAATGCCAAAGCTCCGGTGTTGCCCACGGTGACCCTGAGGAGCGGATATGCCAGAGATTAG
CTTTGCAGAGCACTAGTCTGGGAGCCGCTCTGTGGTCCCCCTGAACATGAGAAGTGACGGGAAACTTGACATTCCTTTTCCCCATCACCTCCAG
CAACATTCATCAGCTACTGAAATTGTCCTTTCAAGGTCCAGGGCAGGACAAAAGCAAAACAGGCATGCGTCTTTCGGAAATTACTGCCTCTTTC
CCCCACATCTTGTGCCCTTCTCTCAGAAAAGAAAACACAGCTTAATAGGGCTGAGAATGAGCAGGAAATCCAGGACTTCTCTTCTGTCTTGTTT
CAATCTCCCAGCTCATAGAAGGATGTGTGAGGAAAATTTCTTTGGAATATTCCTGAATAGAGTGTAGAGATAGATCGCCAGGCACTCTGGATGT
CTGTCTTTGCCTCTCTGGATGTTTTTCCGTGTCTGTTTTAGCTAAGCTGTTTAAGAGATGGACTTGGTGGCTCTTCCTTCATCCTATGACAGTG
TTTATTATTCTTCATCTGACATGGAAAGCACCTACTAACCTAACTAAGGACAACAAGGTAGAAGATATATTTGTGAATTTATAAAACGAATAAA
TGGCTATATGTATATATGTATGAACACACACACACTCATATGTGACAAATTCAAAATAAGTGAATTTTAGCTAATGAATCAGATCCCTGCATCC
CTTTTTCTGTCACTTGCCAAATCCGTATTATGTAAACACAGTATATGCAAGCAGGCACTACCACTACTGTATCCATTACTTTGCCCATGCATCC
CTCCTACGTTGGTTGTGGAGCCACTGAAAGAGCCTTGTCTCTGCCACCTACAACCCCAAAATCAAGCTAGAAAGGGGAAGAAGTCAGGGCCTAC
GGGGAACAGCATCCATCACTTGAAATGAAGATTGGAAATGCGGAATAGTAAAGCACTCTGCTTAGAAGACCAGCATATTCTTGTTTCAGAATCT
AACAGTTATCACCAACTGCTAGAGTCTCTAACCTTTGAAATGATCTCTTATTTTATGTCAGTTTTTTTAAAACAATACCAGTCGTTATTTCCAA
TGGCTCCTGGCCATGTAAGACTCACTGAGCATCCGCCAAGTAGGATTTATTGGGTGGAGCGTACTTCTTCCCTGCTTCAGACAAAGCCAAGGCA
AAGAGTTTGCCAAGGGCTTCTGGTCAGCATTGGGAGAGCTAAGGCATGAAAATGGAAGGCCCAAGCCAGTCAGAAGGAGGGGTGGAAAGGAGGG
AGATAGGAAGATAGGGAGGGAGGAGGGAGAGGAGGAGGGAGGGNNNNNNNNNNNNNNNNNNNNAGAGACAGAGAGAAAGAGAGAGAGAGAACTA
TTCATAAGGGAACGTGCTGTCAGAGAAACAGCATCGACCATGGGAAAAGAGGGCAAAAGATAAAATAGTAGACTTTAAGATGATGCAGTAGACT
TACAGATGACCATGTCCTTTGCTCAGGAGAGTAGCCATTGGCTGAGAGGAGGACAAGTCATCCCAGGAGCTACTTGATTCCCTCTTGCAATGTT
TCTCTACAAGGACTATAAATGATATCATAAGTATTGTGGGGAGTCCTGAAAAATGGCCACCCATGGTCAGAGAGCTACATCAGATTCGGATTTA
GCTGCTTGCTTCCCAAGCAGGTCTACTGAGCTTTCTTCGAACACCTGCTACCTAATCCATGCATACAGCAGACACTCATCGAGCAAACGAGTGT
CTAACACGCTGGGCCCTCGACACCACTCAGACCCCACCCTGGTAATGAGGCAAAGGATGCCTCCTCCCACGTACTTCCATCCTAATCCTACATA
ATAGTCAAAGGAGTTCTCATTCACATGTCTCTTTGTCTCCGTCTCCCCCCAGCCCCCGACTCATTCATTCGGAGACATGTGTTCATTACCTACT
AGCTGCCAGATGCTATTCTAGGCAAAGGACTTGCATGGAATGATGCCATGTCCCCTAAGGGTTTAAATGTCATACTCAGGAGATTAACAAGCTC
ATGACTCCATGGGCAGTGATGGTTCATGATTGGGAGTCTGGTTTGACGTCACTATGGGAATGCAAGATGACTGCAGCTGTGTGTGTGTGTGGGG
GGGGGGGGGCTGTTGTGATGCAGGAATCCTAGAAAGGAATCGGCTTGTTCTAACTGAACATTTCAGAGCGTGCTTCTCCATGCAGGGACACCGT
GCCCAGTACTGAGGCATTGTGGTTAAAGTAAAATAGAAGGGACACTGAGGATACATAGGGATTCTCCTAGAATTGCCAACAGAGTCTCTAAGGC
CTGACGTATTCCTCATTCTCAGGGGAGGAATCTAGCCAGGTTCTCTGGAGCTAGCTGCCCATCTGAATTAGGGATTCCAGAACAGCAGGACTGT
TAGGAGCCAGAGGTTGATGACTAGATTATAGATAGGCTCTTTAGGAGAATTATCTAACATGCTTATGGCGGCTTGGAACTTTCCAAATGCCCAT
TTGCAGACTGTAGGACCAAGGAAGTTAGTACTGTGGCTGAGAAAGATGGTCGAGTGCTGCTATTGTAAGCCTGCGGCTACTCCCAGCCCAGCAG
TCCCAAGGCCACATCCTGGGCCCTGATGTCTAAGGGCAGCAAGGGAAGGCTGTCCCAGATATGACAATGATGGTGATGGTGGTGGTGGTGGTGG
TGGTGGTGATGGGGAAGAGGAGGAGGAACAGCAGAAGCAGCAGCAGCCAATCAAAGTGGCCTCTTTTCTTGAACATTTAGGGAAAAGGCACAGG
GAAGAAACAAGCATTGCTCAGGTTCCATCCGGTCCGTCCCTGTCTCATCATCTCCACCCCAAACATTTTCAGGCTATCTCTTGGTACTGCCTTT
AAAACTAAAGATGTAATTATTTACTCTGTCCCAAGAACACTGAATAGACAATTAGGCAGTTTACCCAGATGATGTCATTTTATCTTCATTTACG
CCCCACCAGGTTAGGGCTTGTTGGCATCCCCAAGCTACAGATGAGAAAACGGAGCTCCTACAGTATAAAGTCATTGCACTGGGAACTGTAGGAA
CAGACGATGAAGTTTGGGTTGGCACTTAGAGCCTCCCTGGCTCCAGATTGTGCTTGAAGTTCTAAAACCCACAAAAATCACAGTTTCAAAGGGC
CAATTGTCTAACTGGCAAAACAAACCTTCTCAGTGACTGCTACTGGGTCTGTGCCCAAGCACAGCGCATGGATGGAAACCCCACATCATCTTCA
TTTTCTGTGTGCATGAACAAGTTACTTCGCTTCTCCGAATATCTGTTTTCTTGCCTAAAAAAAAAAGAGGTGAAAACACCTCTCATATCACTTG
GATGGATGAATTAGATGTTTCGTGTAAACATAATTTCACTACTAGTAAGTGCTTTGCTAAATTGTCTACTGTTTCTATTTATTTCTATAATTTA
AGACCCAGTTTATTTGAAGTGATATGGGAACGTTACCTTATCTGTACTAGGAAAGCAAGCTAGTTTTCATCGGAGCCTATGTATCAGTCATTGA
TAGTATACATCTCCTAGCTCCAGCAGAGGATGGGGGGAAGTGTTGCCCTAGGCCTTAGCAGTCCACTGCTTTGTCTCAGAGCTCAGCCCGCTAA
CTCAAGCAGTCCCTCTGAAAGGACTCTAAGGAAAGGGGTCGCCACAGAGTACCACTGTGCTAGAATATTTGACAACTTGGGGTAGGGAACATTG
TACCACCTTCTAGGTCTGCAGCTCAGGGGTGAGGCACCAAGGCATCCTGACTAGGGGATGCAAAGGTGCTTCTAGTGAACCAACTGTTGAGCTT
GTTCTGGGCTCCCTTGTAGTGATCCCTACTGGGGTGCTAAGAAATCTTATAGGTGGGCATTGTACAGAGGTAAAGAACCTAGTTTTAAGCAGCA
TGGAACCAACAGGTCTTTCCAAGAATAGCCTGTGTTTTCTGAATGAAATCATCATTGCCCCACGTTCATGGGAAATGCAAACTCATTAGAGACC
AAGAACAGTGGTGAAGGTGAATCCCCCATTGGTGTTCCTTTTATATTTGGTCTGCCGTGCCAAAGACGGGTACTTCTCAATATCTCGCCACTAG
AGCTGCTTTGACAGCAGCATAATGCTCATTCCTATAAAGAGTTTGAAGTACCCGTTAATAGCTTTGAGTTTAAGCATTAGGAATTTTAAGGTTC
AAGTATAGAGCTTTGAGAGCACACATTAAGATAGCAACATCAGCTCATAAAGCTACAAGAGAGAGGCAGTGCTCCCTGGCACACTCACTCTCAC
CTGTCTGCCGCAGCTGCACCTTGGTACTGGCTTCTGCATCTCATTGTCCATGGTCTTCTCAGTCCACAGAAGTGACACAAAGGCCTGCCACCAC
TGCCCAGCACCCATCCCCTCCTCTGCACTCTCCCACTCTCCTGTTTCCATCCTGGATGTCTGTTATCTCCAAAGCAGTTTTGAAAGGGTCCTCA
CTCTCGCCCGGAAGCAGCAGGGCACCCAGGGCATGGTCTCAGGCTTGAATGACAAAAGGGGTCCTATTTCCTGGCAGGTGTGGCAAGAATGTCC
TCCTAACTAGGTTGATTTTCAGATTCAGTCCAAAAGCCAAACAGGGGTCAAACCTTTTTCTTCGGTTCTTTCTTTCCAGCCTCACTCATCTACA
TCCTAACTAGGTTGATTTTCAGATTCAGTCCAAAAGCCAAACAGGAAACAAACCTTTTTCTTCGGTTCTTTCTTTCCAGCCTCACTCATCTACA
GAGTCTGCTTTCCACACTACTATGTGGGCAGAAAGCCCTTTGCTATCAATGATTGTAAATACAATAAATCCCCCAACTGTGTGTGTGCACATAA
AGGATGCATGCATGCTGTATGGAGTGTGTGTGTGTGTGTGTGTGTGTGTGTGTGTGTGTGTGTGTGTGTGTGTGTGTATGTGTGTGTGTTTTAA
AAGATCCAGAAATTCAGGACATTTTTCAGGGAAGGTTTTCATTGAGTTAAAAAGCACCCCAGTGAACCGTTAGAACTGTACAGAGGTTGTAGTG
GCAACTCGCAAATGGTTTGACAGATAGGGCAAGGCTGGGTAATTGAAAACCAAGTGACTGAGTGTAGGTTTTTCCATGGTAGAAATACAGCAAG
TTCTTGGGGGAAGATTGACGGGTACAAGCTGTATTCACAGCCTTTGGAGGAATGGGATCTGTCTGAGATTAGGCACAGGAGATTGGGGAAGGGG
TAAGAGCAGTGTGAGCACAGATCTATCAGTGTACGTGCCCTGGCCGCGTCAGQGGTCAGAGGTGTGGGGCATTTGGGGATGAGCTCGCCATACT
CTCTTCCTGTGATGCTGCCACTTGACTAAATGACCTTTGATTGGCTCTTTGTTTTAAATAAAGTGTTTATCCTAAAATGGGTTCTAAGGGGATC
CATCCCTTCTGCTCTTGTGCCAGCCCCATGCTGTGCTGCTGTTTCTTCTGCCTGCAAATCTCACTTCCTTAACAAGCCTCCAAGTCTTAGCTCT
CCCATTTGTTCCCTGGTCCAACCTCTTTGCTCTGCGTGCTGTGCATGCTGCACCATCTGTATGTCCTCCTTGGGCTCAGCATTCCTGCCTTTTG
CTGCTTTTGACCTCCTGGPTGGATGGCAGTGATGACAAGCGCCTTCCCTTCCCCCACAGCATCCCCATGTCCATCTCTGCCTCCCAGATCCCCT
CAACTCTGCCATTGTATGATTTTGCTGGAACTCTCAAGACTGACTCATGACTAACTAGAGGCATAGTCTGTTCTCTGCCGCAGAAATCTGCTTA
GATGACATCTCTTTCAACAACAGATCTGGGGCTTGTTCTGCATTTTTTTTTTTTTTGTCAAAGAGACTCTGTGAATCTTTGGTGACACCCCATA
TAATGTCAAAGATTTATGCTCAGCCTTCTGAACAGCCATAACTTCACAGTTTTCAACTTGGAGTTAAACACTAAGTGTCTATGTAAAAGTTTAA
GTTTGTTTGAGACACAAAGCCAGAGCAGAACCTTAACCGAAATGAAGAGTGGATCTAAGAACCAAAATACAAGTAGACCAGAGCCACAGCCTTC
CCCTGACCCTGCCCAGGGCAGCAGGTGGAAGCCAGAAGGGCTCCAGCAGCCTTTAGGTCTGAATGAAGGACGTCCAGACATAGCGAGGGTATTT
GCTTTAGAGAAGGCATTCCAGGCAGAGATATGAATTATGTAGGGAGAGTAGGCAAACCTCAAGATTTAAAAGGGTCTCATCATCTATCATTCTG
TTCTTAAGTAAAGGCAGGGTTGCCATAGCAACACACCACAGGCTGAGTGGCTTAAACAACATAAATTTATTTGCTCACAGTTCTGAAAACTGGA
AACCCAAGGTCAGAGTGCCAGCAGGGCTGGCTTCCTCTGAGGCTTTCTGCTCTGGCTTACAGATAATCTGTCTCCCTACATGCCTTACATGGTC
AGTCCTTGGCACACAGCCACCCTTAGGGTCTTTGTGTGTCCTTATCTCTTATTATAATGAGTCAGTTGAGTTTAGAGCCCATCTTCACATTCTA
ATTTCAAATTAATCATATCCTTAAAGGTCTTATTGCCAAGTGGAATCACATTCTAAGTTACAGGTGGTTAGGGATTTGATATATAGATTTCAGA
GGAAGCGGAATTCAGCATAGAACAAGAACCCAACAGAACCCTTGTTTGAACACAAATGCTCATCACTGCTAGTCTTTCTGGAGTTTTGTGCTGT
GCCTAGTGTTGCTATAGCTATTTCCCATTGATTAGTCCATCTTTCCTTCACAGTCGGGTTACATGGAATAGATTATCTACATGATGAGACGATT
ATAGATGGCTGCCATTTCTTCTGAACATGGTCAGCTTGCTTTTGTGTACTGCGTGGCCCTGGGCAATACTGTCCTCCAGCCTTGAAATCCCTGC
TGCTAATGTGATTTGGAATAGTGGGGGGGCGGGGGGATCTTATCTCCATGCTTTGATCGAACAGACAGTCTCTGGAAAGGAGTAGACTATGTTT
CTCAACCCATTACCAAAGCCTCCCCTGAGTCAGAAGATGGTACAGTATGAATTGGTAAACCATGGTCTCTTACAGAGACCTTACACTAAACTGC
CTTTTCTATATATCAGAGCTTCCTCCTGAATTATTTGGCTGATCATCACACTAAGATCTGCAAACATACTCATTCCCGCTAAAGGCCAGTCCTC
AGCACACCACTGTTCACTCTTACCAAACACTTGAACTACAGTTGCTAATTTAATTCACCTAGTAAGCCAGAAGGGAAAAAAAAAACAAACAAAA
CTATTCATCCTCACTGACTGGGTATACTGAAATCGACCTAGCTGAAGTTCTGGATTCCCTGATTCCCTTACATAGCTTAGGTCTAGACAAGCTC
TCCGGTGGCTCTCCATGACCTCACCTGTGGGATAATTCTCATTTTCATCTCTCCTACCIATGTGGCTATGGCACACAGTTAGTAGACCTGTGCT
GCTGTCTGTGTCTGGAGCTAGAACCAACACTGGTATCACCTCTTGCAACTCTGTGTTTAGCCACCCTGTCTCCATTCTCCTTTGTGGGCACTTC
TAGCTCGAACACTCAACAAGTACACCTGTTCTAGTGTTCTTCCATTCCAATGTTCAGACTCCTTTCTCCCCACGCAGGGGTAAGCCTGTGCTGA
CACTGTGAATCTATTACCTTGAACAGTTACAGCTTCATGAGAGGACTGCCCTGTGCCACTGTGATATCTGAGAGTTGGGGTGTCGCTGGCTCGG
GTGACAATTCATACTGAATGTCCTATCTCTTCTCCCCTCTTGCACGACAGCTCTGTCTGTGGTGATGACGATCAGTCCCTTTTTGATTCAGCAT
ACGGAGCGGCAGCCCATCTCCCCAAGGCAGATATGACTGCTTCGGGGAGTCCTGACTACGGGCAGCCCCACAAAATCAACCCCCTGCCACCGCA
GCAGGAGTGGATCAACCAGCCAGTGAGAGTCAATGTCAAGCGGGAGTATGACCACATGAATGGATCCAGGTGAGCCTGCCAGAGTTCGCCACTC
CTCATGAAGCAGGGAAGCCTGGGCGCAATTCCTCCTAGGACACACCCTGTCAAGCCGATCTGCACAAGCAGCAGATGGGTCAGGCCCCAAGGCC
CTACTGCAGTACTCAGTGCGTTTGCTGTCAAGCTTAGGCCAGGTCCAGTCCTGCAAGGAAAACGCATAGCAGTAAGATGCTCTTCCTGTGCTCT
TGAGGATGTTTTAAGGTCCTCTGGGTGGCACTAACCAGAGCAAAGGTGACCCAAAAATTCTTCAAGTAAAAGTGGAAAAGTGGTGAGAAAGACA
GACTGTGTGCCAGGAAGCCAGCCTCACACATGGGAAGTGTGGGGGTGGACTAAGGCGGGGTCATTAGGAAGAACCAGGTACAGCCTTGTTTATG
GAACTGGGAAGGGGAACTCAGGGATAAAGAGCACACGAACCAACCCATTGTCAGGCAGCCCAGCGACAGGCACTACTCTCAACATTTTGGCTAA
ATTATCTAAACCCATCTGAATACCAGCTTTCTCTTGTCTAAGCCAGAGTCAGAACACCAAACATGTTTATCAAGTGTGTTGTAGGGAAAGGACC
CAGGACATTGTCTAGTTCCAAAGTGCTCAATGAGTTAGTGACCACAGACACACAAGAGGGAAAACTTTAGCCTAGTTTATTACCTGATAATTCC
CAGTGGATTCCCAGGTAATCCACTTAGCCTGAAGCAAACAGACATGAAAGTAAAAGCAAGTGAGTAAATACAAGACAAGACCTTGGTTGATAAG
CTAGGAATCCAGTTTATTCCACCAACAGAGGCTGACCCTCAGGACTGCCAGGACACTAAGCATCATCGGACCCATGAGACAAAGCTGATGAGGT
GACAATCATTGTCCTGCAGGGATTTGTGGACAGGAGTGCAAAAAGATAAGAAGTTACTGAAATAGCCCAGATAAGGAATCGAAGTTCTGGCTAG
GGTGACAGTAATGATGACAGAAGCCCAGGGGAGGTGCATAAAGAGCATATCAAAGGGATGGCTACAAGAGCTCGGACTTAATAAACATTGAGAG
GTGGGGACTGGATGCTGCTGAGTCTGGACCTTTGAAAGGGGATGCAGTTAGTGGCGACAGGCAGGTGGGAAGGGGTGATGCCTTGAGGAGGGGA
CGTCCTTTAGCACCCTTTGTGAGCAAGTGGTACAGTCTCTAGATTAAAATGTCTACTGGATTTAGGAAGCCAAAGCCCGTAGGATTGGGACTGG
AATTGAGGCTTAGGCATCCTCTCTGGGAGGCTTAACTGAAAGTGAGTCATGAGGGAAACTAGTCCAGAGAGGCAAGAGGAAGCAGGGAGGGGGC
TACTGTGGCTGCTGTAGGGAGTTCCTCCTTGCAGCTGTCTCAGAGCTGCCCTCTAGACCCTCAGCCCTGCCACGCTTCCATCCCATGAAGACTA
AACCAGGAAGTGGGACCTTGGCCATCCCTGCAGGGTTCTAGGGTTAGGGGAGCTCAGAGAACCTGAGCCTTGAGCCCTCGAATGCAAAATGATG
CTTATACCATGATTCCGGTCAGTCCATTCTCAGCAGAGTGTAGTTTATCAAACACTTGTATCTAGTCTTGTATCACTGCTCCCTACTAATCTAG
AAGGCCAATATTCTCATCCTGTTACCGTATAGAGGAAAGTCGAGAGAGGCTAAGCTGGCGCCAGCCAAAGCCTTTCCCATTGCTTGGGCATCTT
GCTGCCTCTCCCTCTCTACCTGTGCCTCATGGTGCTGTACCACGATCCCATTCTGCAAGCACCCTCTGGTGATGACGCCAGTTCAGAAAGGACT
CCCAAGCTGCCTGCACCATCACAAGGTGTTCCTGATCCCTACTGAAAAATCTAGATGCTAATATTGGAGAGTCTATAGTCTTGATGTACCCTGT
ATCTAGTTATCATTGCCTGCCAAGCCCACAGTGTCTCTCCCAGCTGCCACAGAGACATCTGTGCTCCACTCTTCCCCTTCCCTGCCTGAGACCT
ATTCTCTCAACAGGCAACAGTGAAAGTCATCCATCCTTTCACAACAGTAACCTTCTTGCTCAAAAACCTTTAGCATCTCATGTCAGAATCTAAA
GTCTTAGCTAAGTCCCAGATTCTCCCTGGCTCCTGCCTTCCTCTATGCCATCACACAAGACTCTAGCTGCTCCTGGAAACCATAGCACACCACT
ACCTTGGTTTATCTTCCCCAAGTCCCTTCTTTCTAAAACATTTCTTCTCCATTTATTCATACAACTCTCTCGGGTTTTTGCCCATATACCACCT
CTTCAGAATCCCTGACACTCCCCGAATCTGAAAGAGCACCCTATCGCTCGCTCTCCCTGGTGGGTTATTCAAGTTGTCTTCTCCCTCACTAGAA
TATGGGCAGGGCTTTTGCTCACTGGGCAGGGTTCATGTGTTTCTTCAGGAAAAAGCTAAATGGGGGCACAGCAGAGCAGGCCAAAGTCAAGTTG
CTTCTTCAAGGACATGCCATGTAGGTATGAGTTGACTCTCCCTTACCTGAAACATTTGACATGTGTTTCAGGCTCTTTCAGATTTTAGCATGTT
TGTTTGCACACAGTGTAACAGATATCTCAGTATGATAATGGCTGTTTTGTATGCACGTGTGCTCAGTGCCCAACAGTAAGACTATAGCCTGGTG
CATTTGCATTGGGACTGTGGGCTCTCTTGTGCATCAGGTATGGAATTTTCCTTCTGTGGCCTCATGCTAGTACCCAAACCATATTTCAGATGGA
GAATCCGAGGAACAGATGTCCATATGGGTGATCCCCAAGGTCACAATGCCCAGGCACGACAGCCCAAGCTCTGCTGAGTTCACCCTGTACTTTT
GAATCATGGGTTCCCTTCTAACATATCTGTATCACTGAGCTACCTGTTCCCATCCCTGCCACCTGGGTACTGCTGGGCCCTCCAGGATGCTGTT
TAAGAGCTAAGAGAATCCTTCAAGGAAAAAGACTCTCGATCCATTTCCAGGTCATGCCTAGCATTAGTCACCCAGACACTAGCTGGAAGAAGCC
CGTGTAAGTATTCCCATAAGCTGGCTGAATATTTACCTGGCTTTGGGTGTACAGTCTCACCTACTGTGCTGAAGTAAAGATCTACTGGAGTCTA
GAGCCACCCACGTAGGCATAGCCATGGTTTTCACCTAATCAATACCCTCAAAGCACGCACAATAAGAGCCAAGGATCAAAGACTTTCAGAAAGA
TGCTTTTATTTGGGATGAAACCATACCTAGCATTAACTTAGCATTATTTAACTATGTGAGAGAAATAACATGTAAAAACACCAGGCATGGTGGC
ATGCTCTGGTGATCCCAGCTCCTGAAGAGGCACACAGCTGGATCTCCTAGGCTCACTGGACAGACAGCCTGCTAGGCAAGCTGCAGATCTTATG
CCACAAAAAGGTAAATGGTTTCTGAGAAACAAAACTCAAAGTTGTCCTTTGGTCTCCAGAGGTATGTACACCAGCATAGAACTGCATCCATATA
TTATACACAAAATACAGAGACAGGCATAGAGACAGACAGGCAGACAGACAGACAGACAGACAGATTTAGAGAGACAGAGAAAAPJAACAGGGGC
AGAGACAGAGAAGCGGGTAAAGAGACAAACAGCCAGAAGCAGAGGGCTAGASAGCCAGAGAGAGAGAGAGAGAAGACAAATCAAATGAATACAT
AGATGTCAGTCTGTTTAAATTACTCATCCTGAACAGTGCAGCTTTCTTATTTTCTGAGTAACACGGGACTTTGTTAGTTTTGTTAGTTGCATGA
TTTTAAGATACATATATACAATGTATTGGGATTCATAGATATATGCAGTGTATTGTGATTCTATTCGCCCATTACTCTCCCTTGCTTTCACTCC
AAGACCCTTCTTTTACCAGCTCATCCCCCAGGCAGGAAACAACACTCCCCTCTGCAGCAACTAACAGTTAATATCTCCTTCAGATGGGGCAGTG
TCTCATGAGCACTTCCTCTATCAGTGAACCAAGTTGACGGGTTCAGTCTTCCACCAGTATCCATTGCTTCTGTGTCTCTGTGGTTGGAATGGCC
ATGTTTTATCTGTGGGTCAGCATTTTATGACACCCCTCCCCACTCCCAGCTCTTACATCACTTCATCTCTTCTTCTGCAGGGTTCTATAGGCTT
AGGGTGTATATAATATAGATTTCCCAGTTAGGGCTGAGAGCTTATCGGTCACTTACCCTCAGCATCTGATGACCTATGACTCTCGACACTATCT
GTCACTCTCTGAAAGAAGCTTTCATGTTCTAGACTGAAAGGGATACTAGCCTATGGATATAAATATAAATATTCTGGAGACTTAGCAGCATGTC
CATTTAGGGAAACAACAGCATTATGTTCTCATTGGGTCCAAGACTCCACCAGCCACAGGCTTTTTACCACGTTTATGGTACCAGATGTGTATCT
CCTCTCATGCAGTAGGCTTCCAATCACAGAGTGGCTGGCTACCCACCATATGGTCAAGCCACCGTTGTACCAGTGGATTTATAATGCCTGTCAA
GTTGTATTGTGCAGCAAGCATGAGCACTGGTACACTTCCTCCTCTAGGAGCCTGCATAGAGCCTCTGGCACCACAAATGCCAGCCAGCAGGGAC
ACGATTCCCAACTCAATCCCAACTATTTCTTTGTGTCTTGTGACCAAAATGTGTGTCATCTTCATCAATAGCCTCATACCTTCTATATCTGGTG
GGTATCAAGAGTTGCATAGCATTTGATAATTTTCAGAAGTCCAGTTATCATAACACAAAATGTAGAGGAGGGCCAATGGAGACGGTTCAAGCAG
AAGGTGCCTGACAGACACCATGCCTGACACCATGCCTGACGACCTCAGTTCTACCCCCACAGAGCCTACATGAAAGAATGAAAGAACCAACTTC
TTCTAGTTGTCACCTGATTTCAATGCCCATGCCATGGCATGTACCCACGCATGTAGTTTGCTCAAGCACAGATGCACACAATACTATTTAAAAT
GTAGAGGAGGGTGTGTCAATGCTCCAAAGAAGAAAACAGAGCAGGGCAGACAACTTGGAAGTTCTTGGCTTATGCACCAGGTCTGTGGCACCCA
GCACTCTGATGCAGTGGCCACTAACTAGCCCCATGTTGCTGAGCACTGGGACTGGAGCTACTCTATGAGTTAGATGTGCTATAATGTAATATGC
ACATTGGACCTAAAAGTCTTAGTATGATAAAATGTAAGATATCTTGGTGACTGTTGATTCTGCTGAAATAATAATCTTGTGGCTGTATTAAAAT
ATTAATGCATTTATCATATTATCATATATAATATTTAATATATTTAATATGTATTTCTTATCAAAATATATTTAATATAATAATCAATAACATA
ATATATTGATATGTTATGTTAATGAATTTATTCAAATTCATTTCATCTTCTTAGATTTATTTATTTACTTATTTATTTATTGTGCGCCGGACCA
GTTCGGTGTGCAAATGTGTATGCGCTTCACGTGCATGCCTGATGCCTATAGAGGCCAGAAAAAGGCATCAGATAGATCCCCTGGAATGGAAGTT
ATGCATGGTTGAGAGTCACCATATGCCCCTCTGCAAGAACAAGAAGTCCATTTAACTGCTGGGTAATAATATCTCTGQCTTCTCACTTTTTCAA
TTTPAAAAATACACCTACTAGTAAGGTGAAAGTGACCCTTGTGTCTCAAATATGTAACTCACAATCTACTTGGAGTGGACCGTGATGTAGCAGA
ACATTTCCGATTGCTCAGTGATTCACACCACATCCCTACAAAGTTCTTTCAGAAGCATGGGTCTCTGGGTTCCTTCTTCACGCTTATTTACACT
CCATAGATGTCCGTGTCTCTCGCACGAAGGAAGTACTCCTTGTCTCTGAAGCTGCAATACGCTCTTCCCTTTTACCCTAGCAGCAAGCCCTCTA
GACCAGGGTCAAAGGGTCATTCAGAGGGGCTGAGATCTGAGGCAAGAGAGATTGTCTCCGTTGCCTGGGTCGTAGGAGGTTTACTCTGTCTCCC
TTCCACTCCTGTTGTGGTTGAATCTGGTGCTCTGGGTTGCCCTCCAACAGCACAGCCCATACGTTCTCTGTTGGATATAAGACTTCAGAAACTT
GATCCAAGCTGTGGTTTGCAAATAACTCTCAGCTGCATCCGGTCTCGACCATGGGAATTGCAGAAAACAGTGCATGACGGAAACACTAACAGTT
TGTGAGGGAGAAAACAGAACTAGTTTTAATACCTGGCATTCAGGAGCTAAACTCAGCATCACTGCCCTGACACAGGCTGGACTGGCCAGCGTTA
TCAGGAGGCATCGAACATGCAGAGAACCCTGTTCCACTCTCAGGAAGATGACCCTCCCAGGTACCTTCCTAAATTTCTAATTCTAAACCTTGCA
TGGGGAGTAAGACACATATCATCTGTGTTGAAAGCCCAGGTAGTCCGGTTTTTGTATGGCTTTTGTTTTGTTTTATTTCTTGAAATTATACTTC
TATATCAAAACCAACATGCCACTTCTACACATGGAAGTTTCTCACAGAAACCCTGAAGGCCGCCTAGATTCCTCAGGTGTGCAGTGTGCATGCT
ACATGAATGACACACAGACAGATTCTGTGACCGTGAPGCTCAGTGGTCCCTTGCTGGCTGCGTGGGCATCGGGTGGTCCTTGGCTCTCAACAGA
CCTGTGATCTCTCCAGGCACTGTGATCAAAACGGGAAGGTAACTTTGGGAGAAGTTTGAGATCCCAGTTAACCCCTCTCAGGGTTTCACATCTC
CCTTTATATTGCCTTGGAGTCTGAAGACACTTCTATGGACCCCTAGCAGTCTTAAAGCAGTGCTCAATAAACACACAGAATAGATGCTTATGTC
TAAGACGGTTACGCTGTACTGCTGAGGCCTGCTGCCTGTAGCCTCCCGGGGGCCTGAGGTGGAGATGCTCTGAGTTATACCCATCACTTCCTCC
TGCTCTATTGTGGCAGCCTTAGGCCCTCCTGTCACCTGCCCCAGTACAGTCAGCTGTCTGTGGGCCCTGACCTCTTGCTCTCTGTAAGTGCGGG
TCTCAATACAAATTAGCTGCAGCCGTATGGGCAAAATGAATGGCCAAACCTCTTACCCCGCCAGGGCTCCCGCCTCCCCTCCCTCTTGTTCTCC
TTAAGCCCTCTTCACAGGCACCAGCTGCCTCATTAAAGAGCAGCTTTTATGCTGGGCTTCACCTGGGTAGGCAGTGGTCACCAAGCCCATGGCT
GGGCTGGCTCGCTGAGGCAAAGGATAGAGACAAACCTGGCAGGCAAGTGTGCAAGCCAGTGAGACATGGCTTTCTCCTTTATCACCCTGAGCTA
GACTAGCAGGGTGAGCTCTGTAAGGGTAAAGGATAAGGGTATCAGGTCCTTGTCCTAAGGAGGTCCCTTTGAAGACCTTGATGGAAACTGTTTG
GGACCAAGAAGGGGCCTCATTCCAAAGAAGGCCAGGAGGGACGCTCAGGCAGGTAATCAACCACCAGGGGTCATACAGCTGAGGGGATAGATGG
AGGAGCCTAGGACTTCTGTGGGCTAGTGATGCTACTTACTGGTCAGCCAGGCACTCCCAGCGATGGAGCCCAGGGGGCCCCAGCTCCTCTGGAC
CTGCTTCTTGGCCATGCCTAGGGCACCCTTGTTGCCATTCATCCCCACCAAGCACGCTTGGTTTTATGTCTCATCTTTTCTTTGTTATCAGTTT
TTTTTTTTTACTCCACCGAGTGGAAGCAACCTTTCCACCCATGGCCACCGTACACAGCTCCAAGTCAGGGAGATCCACTAGTTTGGGTGCTTCT
GAGGTTCTAATCTCTGCCTGGAAACAGGCCAATTTTAAATGCAGAAATTCCAAGGCCAGACACCTATGAAAAAGAACATTTAAAAAACCCTTCT
CTCCAGTATCCGTAAATGGGAGACTTTGAAGTAGGCACCTCCTCTTTTGCTACCATTGATCCTGGCTGGCTGGCTCTGGGCACCCTGCATGGAA
AGTGTGTGTGCTGTCCACTCTCCCCACCCCCACCAGCCAATGAAAATTCCAGTATCTTGGTTTCAGGCCAACTTAATTCTCCAAGCTTCTCTGG
TATTTGGATGGTTTCTCATCTGACAAGAATCTGGGGAAGACAACCAGTGTGTGTGTGTGAGTGTGTGTGTGTGTGAGTGTGTGTGTGTGTGAGT
GTGTGTGTGAGTGTGTGTGTGTGAGTGTGTGGGGGTTTTACACACACTAGCATATAGGTGCACATCTGTGCTGGAGGGTGTGTATTTCTCTAAC
TATATCTGTGTGATAGCCTATGGATGTGTGCATGCATCCCTGCATACA1TATATGCATACATTATATACATGTAACTGCTAGAGTATATATGCA
TGTGTGTTTTATGGGATGATTGTATGTATGTACATATTGTATGTAGAACTATGTGAATGTGTGTGTGGAACATGTGAACATATTTGTATTGTGT
GTGTAGACCTATGTATATAAGTGTGTGTGTGTGTGTGTGCGCATGTACTGTGTGAAGTAGTGTGTGTGTGTGTTTGTGTGTGCATGCACACATG
TGCATATCTGTGAATATGTCTTTTGATGGCCGAGTACATACATATATGTGTACATGTTATCACTGTGTATATGATGCCTGTGGTAGAGTGTGTA
GAGCATAGTGAATTCTGTGTGTGTGTATGTGCATATGTACTAAAGTTAGAAGCTGAATGTTTTCATTATGTATGTGTGCTGTGTGTAGTGAAAT
GTGTGCGTGTGAATGTGTATGCGTGCGCACACAGTTTCCTGGGGCACAGCAGTATGCTCTCGCCAGCTCAGCTTAGACACAGGCACCAGGGTCT
GACTGGGGCTGCTTCATCTCCAGCCAAGTCCTTCAACAGCAGAAGCCAAGGGCTGAGCGCTGGTGAAAAAGCCCCGATGTGCTACTCCCTCTCC
TCCGACTGCCATGCGGACATTAAACCTTCAACAATCTGGGACTCTGACGGCTGGGTCTTGGTTCTTTGCCTGGAAAACAGTACGCAAAATAGTA
AAACCTTAAATTCTAACATGTGTAAGTTATACATCTTATTTTCATTTTCAGCCCATGTTCTCCTCGGTAAGACATCAGGAAAAAATTACCGTCT
GACTTCTAATATCTCAGTGGAGCATTTATCTCCCAGCCATGATAAGTGATCTGCAATATTTTTTTCCTTTCAGATTAAGAAACAAATTCATTTA
ATTTTCTTTATTGAATGTGTTCAGGCCCTCCCTGCTCTGCCTGACTCTCAGGAGCCCTCTACTCTTCTCCTTCTTCCTGGGCTGGTGACTGTCT
CCTTGCTGTGGGATGGGTGACTCCCTAGTAGGCAAGGCCTGTTCCTTAAGGGCTCTCAATCTGTCCCTGCCCACTGCAGAATGACGGACAGCAG
ACTGACCGAGGGCAGCAGCCAGGCGAGGCACGTAGGGAGATGTTAGCGTGCAGAGCTGGCAGACTGTAATCAAAACCTCGTCTCATCCCCTTGG
CCTGAAGGCCGGTTTCQCACTATCAGGAGAACTCCCCACTTCCCAGGCTGTTACCATGATGCTTGCTGTCTGGCACTACCATAGTCCACTATCC
ANNNNNNNNNNNNNNNNNNNNNNNNNNNNNNNNNNNNNNNNNNNNNNNNNNNNNNNNNNNNNNNNNNNNNNNNNNNNTGCTCAGTGCCAGATGC
TGTGAATATCCACTGCTAACTGTGCTTAGTCTTAGTCCACCATGGGTAATGTGCCTTCTTCCTCTTGCACGTCCATATTGCTTCCTATGTGCAC
TTCCATATGTGCACTTCCTCTTGCACTTCCATAGTGCTTCCTATGTGTGTTTACTACTCAGAGCTGTAAAAATGCTACAAGAGTCATACATAAC
AGGTCACAATGCATTCCAGGGGTTACTCTTCTTTGCAGCACCCAGCTCCTCTGTATGTGGCCTTTAGTTGAGAAGTTTAACACTGGGACCTTGG
GTCCTGCATCCATCTTTACTAGCCATGTQAAACCAGTAAGCACACCTTTCCTTTGGTAACCACAAAACGGACGTAGTAACCTTTGCTCCACACA
TCTGAAAGGGTTATCAGGAAACTCAGATAAAGCAAACAGCTTATGAGATGTATTAAAATCCTACACATGCAGTAGAAATAGCTGAGGCTAGCAA
GTACTGATACCATCTCAAGAAACAGAAGAGACAGGGTAATAGGCTGCACAGAGCATCTCATGCTGGACTCACTCAGTCCTGTAACCAAGGTAGA
CATCAGCGTCTATAGGTTTCTGGAGAAGGCCTATCTATTACAAGCACTAGTGAAGGTGGGTAAGTGTTGACCACTGGCMJCAGGTTGAGAACTG
GACACACCAGACAGTGGAGCAGGGCTGCAGGCCCCTGAAACAGGAACACCTAGGACACACAGGGTATTTATGACAGGATCAGGATAGGTTCCAC
GAGGAAGGTGGCACTAACAGTTCATTGTCATTGTTGTCATCATCCCAGGGATGTCTAAGTGACTGGCCAATTCTGTTCAGGCTGGAGTGACATG
TCCCCATAATGATGGCTTCTTTTGACCTGTTTCCTCTCACTCCAGGGAGTCTCCGGTGGACTGCAGTGTCAGCAAATGTAACAAGCTGGTGGGC
GGAGGCGAAGCCAACCCCATGAACTATAATAGCTACATGGATGAGAAGAACGGCCCCCCTCCTCCCAACATGACCACCAACGAACGGAGAGTCA
TTGTGCCTGCAGGTACCTTCGGAGTCAGCTGCCTGGCCAACGCCCACACTTCCATTATTCAGGGGCTGTAATGGAAGGTTGGCCCATCTCTTAG
AACATGAAAACCCAGCACCCTAGTCTTTAGTGGCAGACTCAAACCAGGGAAAGTTGCACATCATACGTAGCTACCCTCCAAGGCAGCATTTCAA
ATGTCACCCGAGCCCTCGCATGCTGATTCCAGAAGCCCCACTGTCAAACATAACACAAGGCAGATTTTCAGTGAGCAGCCTGGTACCCCCAGGA
TGAATCTTGGGCAGAGGCAAGGCTGCTCACCCCGCCATTCCTTCTTGTGAGAAGTGCAGCTCCCGATGTCCACCCTTCCCTCAGGCATGTACTT
CCTGCCTTCTGCTAGATTCCACCTTCCCAATTACAGCCAACTCTTTCAGTTTTAGTTAATAGAGATAACTATATTTAACAAACAGAACGCCTCC
ACGTGTGTGCCACAAGTTATGTCATTATGTAGAAATAGCCTTTTTTCCTAGGTATTGGTGCTGTTGCTTACGCAGTGGGGGGCCGGGGGGATCT
ATTGTTAAATCCTCTAGCCTATTGGCTGCATGCTGCCTGGGCCAGGCCCAGTATGCTCAGCTGCCTAGGTATCGAGGGAATTCAAAAACTGCCA
CTTTAGAGTGGGTGCCAGGTGGAAGGGGCAGAATGTCAGGAGTTTGAATAAAGTGAATTACAGGGCGGGAGCTAAAACTAACCTTAACCAAAAT
AACTTCACCAGAGAGCCTCCATCCTTCCATTTGTAAATGTCTAAATGCAGTTGTGTCTTAGAACGATAGTTTGTCTTGTTGATCTCAAGGATGA
TTTTTGTGATGAGCAAGTCTGTCCTGTCCCTAGTGTTTGTTTCCATGGGAAGTTGTATCTGCTATCCTAGTGTGACAGTCACATTTCTGACCTC
TGGGCTAAATTCCACATGGGAAAGAGTGCAGAAGGTATCAGAAATGAAGGCAGAAGAGGAAGGGCTCTTGCACCTCACAGGACTAAAATCTGCC
TGGGCTCAATCTTCTTCAAGCATAAGGCGCTGATCGCAAGGAAGGCGTCACCTGGTTTATTTGTTTGTTTGCTTGTTTGGGCTGTTTGAGAAGG
GGCTTCACTGTGTAGCACATGCCGTCCTAGAATTCACTGTGTAAGCCAGGCAGCACCTTGCGGCAATCCTCCTGCTTCTGCCCCCTGAGTTTGG
GAACTAACTATAGGTGTGCACCACCCACTCCTGGCCAGAAGGTCTTTATTCAGCCAGATTTCACAGGAGCCAAGTGCTTTCTCTTCTGTCACAT
CATCTAATTGGTTTGTCACCACCCTCAGGAGAGCAGCTGGTGGPGGTTAGCTCACGTGCGTCTTCTCTATTTTGAGGCCGTGATTCTTTTTAAG
CAGACGTGGTGAGAGACTCTCTCCACCCCACTAGGCCAGGAGAGGCCTTTGCTATCCAAATCGCCTGCTCTAGCCTAAGAAGGAACTCTTAGGG
GATCAACCATTAGAGGAATGGAGATTACCTCAGGACCAGGTGATTGTCACCACCTTGCTTTGGTCGTCATAAGGCAGACTGTTCGGTTGTCTCT
CTACCCTTCACGTAGTTAAAATGTTCTTACGGGGATTGGCAAAAGGTGGCTCTTCCATGAACCGACTTAATCATAGCAGTAAAAACAAAAACTG
GCATGTTPATATCATGCTGTTTCAAAGCATTTGGCATAACGAAGTCATGAGCTTTAGATCCGCTTGGTTATTCTCCTACTGGTTAGATCTGTAT
GCATTACTCCTAGACGCTCTGGCTTCCTCCAGCTCAGCCTCCTGGACGCACGGCAAAGTCTCACTTGGGCAAGTCCACAAATCAAGCCAATAAA
ACATTAGTGGAACAACCGATTGAATTTATGACGGGATTTTAAGACAAGTATAAATGAGGGTTCTAGTTAATCACCATTTCCACATCGAGATGGG
AAGGAACAAGGGCTAAATCGTCCAGCAAATACATTTGGAAGAGTTTACCATGATCCAGAGTGGAAGATTTATAATTCCTTTTACTGGAGAGGGA
GAGAATTAACATTGTGACAGAGCCCAAAGCGAAGAGCGGAAATAATAAAATAAATAAAATATAGGGCATAAAATTGAATGTACAGTCTAAGACT
CTAGTAAGTTCCTACAAGTAAGGAACTAGGGGAAGCTATGGATGAAATGATACACCACATAATCCAAGCCCCTGTGGGACATCTCCTTTTGAAT
TCTCAGATTTCCATTCATCTATAACCCTTGCTTGATGGTTTCTGAAAAGTAGAGGGTTGGAAACAGAACCAGGAGTTTATCTCATAGACACAAA
CCCCAACATGACCAAGAGGGCTAGCTCGGGGAGATCTTCCGGGTCCTGGAACAAGGCCTTGCAGTTCCAAATGAGTTAAGGCGGGATCCTGACA
AGACAAAGCTGGGGCGGGGGGGTGTTCAAGGGGCCTGCTTCTCCAACTATGTGACATCTTTGAAGGCTTCTGTAAAAACCCTAGCAGTAGTCAC
GAAGGCAGAACTTCCACGGTTCCTTAGCCATCTACAAAATGGGTATAACAAGACCCATTTCATAGATTCTCATGAGAGAAAAAAATGGGTCAGA
TAGAGAGCTGGCTTGTGGTAGGATCTCACAGATGGACTATTACTCAGTAGGTACATCTTGGAGTCTTAGTATGACATACAGAAGCTGTGACATA
TGACAGATTTTTTTCTGTGCTCCCTCTCAACCTCTCAAGGGTTTCTTTTATAACCCCTAGACATCACAGCACCTCACTCCCTCCCCACCACCAT
TGCTGGCCATTTAGAACTGAGTTCTCTTAGCCTAGATCTTTTGCAGCCTCTAGAATGAGAGGAATATGAGTTGGTTTAAGAGGAGTACACGTTT
TTCCTGCTAAATAAGCATGCTAAATGAAACAATCAAGCAGAAAAGCAGAAGCAGGAGCAACCAGACACCCTGTAATATAAAATACCATCCCTTC
TCCAGGAGCCTTCCAGGACTCTCCAAATTCACCCTAGACCCTTCAACCCAAGGTTCATTGAACTAGCCAGCACAACCCATTGCTTAGCTATTGC
TCTGATGGCTGCATATTTATGCAGATGGGTGTGTGTCTGTGTGTGTGTGTGTGTCTGTGTGTGTGTGTGTGAGGGAGAGAGAGACAGAGAGAGA
GAGACAGAGAGAGAGAGACACAGAGAGAGAGAGAGACAGTCTCAAATACTCAACCCTCCTGCCTCCGCTTCCCGAGTCCTGGGATTGCTTGAAT
GTATCAGCATGCCTATGGAAGTCTGTCATTTATAGCATCTCCCACCTTAGACTGAGCAGGTTQAGAAGATGCTTCAGGGAATSATGAAACAGAG
GGGGCTGGGAGAAGGCACGTTTGGAGCAGAGGCCTCACTCCTGTCCTGTTTCCGCTCATTCACAGTTAAAGAGGTTTCTGTCTCTAGAGCCATT
TCTCATCTTTAAGTATTTAAATATCCTAAAAATGTTTAGGGGTGGTCTGGTAGAAATCTTAACACAGCTGTCCCCCCCCCCAAAAGGAGGAAAC
CCAGATTGGATTTATGTCAAACAGTAACGCCATTGGGTTTTCCAGCTGCCAGGACAGAATCACAGGAAAAGCAGGCTTGTGTATATTTCCCTTC
CGGAGAGTCCGGACGGATAAGTGTGCCCTCCTGAATTCACTGCTAGTCTTAAGATGCAAATGGGTCCCCTTCCCAGAAACGTTAGTTACTGGGG
ATTATTTTCATTTTGATGTCACCATTTCTTGGGCCAAGCTATCACTTGACCTCCAGAAACTTTAAACACCATCCTGTCAGGGTATGTGTTGAGG
CAGCTAAGACCTTTCTCAGCCCTAAGTGGTTCAGGCAGTGTCAGAJAZCCATGGAACCAGACGGAGACTTCTGAGGGGACGATCTGGAAGGGAA
GAGAGAGGAGGTAGAAAGAAAAGAGAAGAGGGAAGAGAGGGGCATAGGAAGGAAAGATGGGTGGGGGTGGGGGGGTTAAAGATACCATGAATCA
GGAGTGAGAGAAAAAGAAGAGGAAAAAGGAGAAGACCGAAGAAAGAGGAGAGAGCAAAAAAAGAGGAGAAGAAAAGAGGGGGCTGTGGGGAAAG
AGGACAGAGGTGGAAGAAGCAAAGAGGAGAAGATAGAGAACAGAGGGTGGAGGGGAGCCTAGGCTGCTGGGCAGGCATGCATGCTGACCGTTGT
TATCTCTCCACTCCAGACCCCACACTGTGGACACAGGAGCACGTTCGACAGTGGCTGGAGTGGGCTATAAAGGAATACGGATTGATCGACATTG
ACACTTCCTTCTTCCAGAACATGGATGGCAAGGAATTGTGTAAAATGAACAAGGAGGACTTCCTCCGAGCCACCTCCGCCTACAACACAGAAGT
GCTGTTGTCGCACCTCAGTTACCTCAGGGAAAGTAAGTACCATGTACACCCCAGGGCTTGGGAGCAGGTCCTGCCAGGTCCCCAAGAGCCAGCC
CAAGGGAAGGATACCCTAATACCAGTCATGGAAGACCTATGCCAAGGAACAGTTTCCTTAGGACAGGAACCCCATCAAGGTCACATGTGTTCCT
ACAAAGCCTCCAAGGGAAAGATTTCATCCAGGAGTGGAGTGTCCAAAGGAAACAGATAGAGTATGGAAAACTCACAGAGACCTCGGACATAGGG
AGGATGACACCAGCTACTAGGTAGGCTCTGGGAAGATCTCTCTCTTCAGAAGCTTCTGCTAACCAAAATTGTACAGAGATAGAATCTCTGGTTG
GAGGCTTTCTAAGGAAATGTTAAGAGPTCTTACCGQAAGTTCTCAACATAGATATGAGATCTAAGATTGTGGGAGCTGACAGACTACTCCTCCT
ATTCTGGATTCACATTGATGCCCAACCCTAACCTATGGGGCTGCTTCTGCCCACTGCCACGAAACAACGACAGCATCTAGTGGCCCAGCTCTGT
TAGGAGGCACTGAAAACTTTCCCAGACAGAAACCCAGGGAAAGCTTAGTAAAGAAAGATCTACCCAATAGGAGGCTCCCTAGTACCACGCCCCG
CCCACCAGTTCCATGTGAATTTTGATAGATATGAAAGGGAATACCTATGGACCTGCTAGTGACTCAGCCTTAACTCTCCATCAGAAATCCAGAC
TATCCCCAAGCCTGGAAGTGAGCTCAQTGGTCTGCAAAGATGAACTGAAGCCACAGGAAGGCAGGCATGGGCTCATTCTGCATGAGAGCATCCC
TACAGCCAGCCACGTCAATGATTAGCGGGGCAGAACAAGATGCACTGTCCTCTATGAACGGCCTAGTTTGCCAGAGGTATCGTAAGAGTTTGAG
AAGATTTGATTGTTTTAAGGCACCTTTGAATTCTCAGACCTCGGCCAACACTGTGGGGCTGCCTTTTGTGGGTTCACGGGCTCTGGAATGGTTC
ACTTTGTATAGGATCTCCATTGTGCTTTCAGTTGTTATCAGTAAAATACATCGTCTCAGTGCAAGGGAGTTCTGTAGAGAGCAGGGCAACACTC
TACTCACATGGGCTAGAAAATGAAAAGTTAAAATATTTAAAAATGCATTTGGAAGTTTCCATGGGTGCCTCTGGGCTGGCTATCTTGCCACCTC
TCTAAGGCATCTGTTCGTGCTGGCAGAGGACACATTAGCTCCACTGCAATGACCTCATGTCTGAGTTGCTGCACCATGAGGTCAGTCCAAGAAA
TAACACTCTAAGAAGGGGCCATTTTCTACTTAGTCTCTCCTGACTTTCAGATGCTTAGCATTTAATAATGATTTGTATTTCTCAGCCTTTAATT
GCTTGGTCGAAGGAAAGAACAAAAGGATCTTTTAACGGAGGTCTGCCATGATCTGCACAAGCAGGAGAGGCAGTAGGCACAGAGCATCAGTGTA
GAAAGCAGAGGCCAGGACCATAGCGCCATCAAGCCTGACTTCTAGGCTCCTCCCGCATCATCTATGCAAGAGGTTGAGTGATCCCTAAGGAAGG
AGAAATGTCAGAAGCTCCAGTGAGCTCTACACAAAGGGTCCAATAATCTTGGCTTTCACAGTAAATGCTTTGTGAGGACCATGTCCAAGAACGT
TTGGACTTCATAAGAGAAGCCCATTAAGACCATGTGACTTTCAGGCCTGGATTTCTGACCAACCCGTAAAGACAGCGGGAGTTTCTATTTCTTC
CTTCTGTCACCAAAGAATCTGAGCCACAGATACTGACATGAGGCATATATCTGCTGCTCAGAAGGTCTAGGAATACTGTTAATCAGTCACTGCT
TCCTATCAAGCCTTGGCAAGCCTGCTAGTAGACAAGGGCAGATAACAAGGCATGATGAAGGTATGAGCACCTATAGAGGGAGCAGGGAATAGAG
TTTGGTGTTTGGAGGCTAGTGATAAAAACCATGTAGTCTCTCCTTTTAAGAACACATGTAATCACTATGAAAAATGTCATACAACACACGAAGT
TTCCAGAAGGGGGATTTGCTATGAAGGAATTTCCAGAGTTGAGAAGAGGTAGTACATGTGTATGTTTGGAAAGCCTTTGAAAGGGCAGTAAGCA
TGTGGTGATAACAGTTGGGAGTTCTACACAGGGAGAGTTTTCCTGCCACCAAAATGGAGGTAAAACATAAGTGTTGCATGTACTTTTATGCTCT
ACCAGCCTTTGCTCCAGGAAGTGACCATCCTACCAGCCCCCTCCCAGCTTCCCATGAATCTGCAGATAAGAGACACAGACACTGGGCTGGAGAG
ATGGCTCAATGATTAAGAGCAACTACTGCTCTTCCAGAGGTCCTGAGTTCATTCCCAGGAACCACATGGTGCCTCACAACCATCTGTAAGTGGG
ATCTGAGTCCCTCTTCTGATGTGTCTGAAGACAGCAACAGTGTACTCATATGCATGGACGGAAGGAAGGAAGGAAGGAAGGAAGGAAGGAAAGG
AAAGGAAAGGAAAGGAAAGGAAAGGAAAGGAAAGGAAAGGAAAGGAAAGGAAAGGAAAGGAAAGGAAAGGAAAGGAAAGGAAAGGAAAGGAAAG
GAAAGGAAAGGAAAGGAAAGGAAAGGAAAGGAAAGGAAAGGAAAGGAAAGGAAAGGAAAGGAAAGGAAAGGAAGAAAGAAAGAAAGAAAGAAAG
AAAGAAAGAAAGAAAGAAAGAAAGAAAGAAGTAAGTGTTAAAAAACAAAAGACACAGACACACAGTTGTTCAATTTCAACTTGCCTTCTTGACA
TAATTCACTGGGGATTACTATCTCCTGCCPGCAAAATGCACACTTCTCTATACTCTTAGCTCTGTACCTCCCACCTGCCCTGACTTCAGTGGCT
AGTTCCATCTAGCCCCTCCCAAACATCCCTGACCAACCACCTGTAGTTGTGGCCACAGGCCCCAGCTTCTCCCAAGACCTCATATGGCTGCTCC
ATTCTTCTCCCTCC2AGGCTTGGCAAAAACTCCCCCTCTCCTTCCTTTCCTCTCCCTTTTAATCCAGCGACCCGGAAGTCCTACCTGTACCTTC
TGTCTAGCGATTGCCCCATGGCTTTCTTTACTGACAGATTAAGAACCAATTGGGGAATAGGACCTCAGTATCAGACCTACCCTTACACATAAGA
TGTGCTTATGACACAAAGTTGAGTCTGTGGGCCAAAACAAATATCATAATGGTTGCATTAAATTTAAATTTTCTTGAAATGTAATACAGATTGT
AATAACCTTCTGAGGCACCTGGATTTAAAATGATCTTCATGAAATTTTTTCTGACTTTTTTTTTCAAATTATGGTTTCTTTTTTAGGATTCTAA
CCTCTAAGACCCTGGTTATTGGGTACTACTTGGCTCTATCAACCCTAGAGGAGGCCATTTGTCAGACATTGTCTGCTCTGTGATGGCTGAAAAC
TTTTGCCTGCTAACACACATGCCTTCAAGCCTTCTCTGTTTTTGTTTTTCCAGACTGAATTACATGAGCTATTTCATCATAGAGAGAGAGACCA
GGGTTTGGCTGCAAGGTTGGGGCCAGAGGAACAAGTGTAGATTCTTAGCATCATTGTGTTGGGCTTTGTTGGGGAGCAGCTGTGGGCTAAATGA
TTCCCCTTTTGGCAAGACATAGAGGGAAAAGAGCTGAGACTCACAACATAGATGTAGGGCACAGCGTAGAGTAAAGGGAGATCAATACAGAAAA
ACTGGGGACTAGCCAAAGCATGGATTGATGGAAGTCAAAATTGGCTCAGCAAGATGGGTCAGTGGGAGAAGATACTTCCTGCTAAGACTGGCAA
TCATAGTTCAATCCTTGGGACCCATATGATGGAAAGACAGAACCAACTCCCATTAGATGGCCTCTGACATCCACATATACACTAAAGCATACAA
GTACACACACACACACACACACACACAATGTAAATTTGATTGCACTTTTCTAATCTCTCTTATTTCTGAGTTTTGTTTTTTGTTTTGTTTGTTT
TGTTTTTGTTTTTTGTTTTTTGTTTTTTTGTTTTAGATTCCTTGTAGGGCGCTGCATTCTTGCATCAAATTTACTTTCACAAGAGACAGTTGGC
TATTCTTGTTGTCTCCGAAGAAAGGTCTACTTTAAGTTCTCAAAGATTAATCATAAGTTAAAGAGGAATGGCCAATGATAAGGAAGAAATAACA
ATGTCCTCATGGATGAGCCCTGCCTAGAGGGTCTGGCTCTTCACATCTGGGCCTTTCTTTTGGCTGTTCCAGATGCGGTACCTGTGTAGCATTA
GGAAAGAGATGAAGGGACTAGAACTGACTAGGGTACCTGCAGTTATTGGAGTTCAGCTGAAATATCTGAGACACAAGCAGACACCAGCCCAGGT
GTCATTCACTTCCTGTGGACAGAACACCCCCTTGTGGACACCATGAACAAAACTTTGATTCCCATTTCTTGACCGAAGCAACTGAGGCTGGCTA
GTTTCAGGCGAGCCCATCCAACGGTATCTCGCATGTACAGCACCTGTCCTTACCTTTAGTCCTCGGACCACTGAAGCTTTCAGTCTGAGCTAAG
GTCACTCCTGCAGAGGACTTGATGACTCTCATCCAGGATGCTTGAATATGCCTGACTTGAAGATCCTGACACAACAGACCACACCTCATTTGTC
TCCCTTCTCATCTCCAGGGCCAATCTCTTCTCCAGCCTCCAACTTGAGGGCATAACCAATGTCCCCATATGGCTTTCCATTTGTGTTGCACCAA
TAGATGCAGCCTTTGCAAAACTCCTCTGCAGCCTCCAGCAGTGAAGCCAATCAAACCAAATCCCTCCTCTCACGCACCCTGACCTCCTCGATTC
CCCCAGACTCTGGGTGTGATTGGCAGCTCTGCCAGGATCTCCCAGATATGCCCACTGGACAGAGACACTGTTGGCAGCTGAGAATGGGCAAGTG
AGATCAGTCCCTTCTCAGGCCAAGGCCATGACGCAACGCTATCTGTCTCCAACTAACAGTTCAGTCACAGAGCCACTGGGAATGAGTTTGGGGA
TGTCTGGGAGCCCAAAAGCTCCTGGGATGAGTGGCCCAAAGCAGAAGAAAAGGGGTTTTGTTGTTGCTCCTGTTCGTTTTCAAAGGAAGTGAGT
GGAATGTCCATCTGGGCCTGAGCTGGGAAACCTTCTAAGAAGGCACACTTTCAGACAGTGGCAACCCCAGAGGATGAAATACATCAAGTATCAG
GGACACCACAGAAAAGGACTCCAGCTTGATTCCCATTTTTAATTTAAACGTAATGGAAAACACATTTTACACTCTGTGCTATCCCCATCTGCAA
CCTCAGATGGCCATGCAAAGGTGATGGCCCAGTCATTAAGGCAAGGAAGTGTTAAACTTTCCATCTGGATCAGGCCAAGAAAAGAAGGCAGGCT
TCCAATAAGATAAAGTGCCCAGTTGCCTGAAACTCAGTAGTCAGCTGGCCTGTTGTTTAGCGTGTAGAGCCTTAATTCCCTCCCCAGTGTGCAT
TTAGGGCTGGGGCTCGCTGTAGCACAAAGAAAGTGAGCGACGAATTGACTGGCTGCCTGGGGTTGGGTTGGGGTAGATGCTGCTGGGTTCTATG
GTAACATGAATGGAGCCAGAGACAAGGCTCTGGCACCAGGTCCCCTGTCCACACTGCTCCAGGTGTCCAGTTTGAAAAGCAATGTTAGAGAGTC
CGCAGAGCTAAAGGAAGCTAAGGACTTCCCATCTGCAAGTCCCATCCTATGTTCACTTTACTAACTCCTTTCAGATCCCAAAACGGAAAACGAC
CTTGCTGGGCTAGGGATGTCACTCAGTTGGTAGAGCACTTGGCTAGCATGCAGGACACTCTGGTTTTGATCGTGTGCACCCTAGAAACTGGTGT
GGTGGTGCCTGCCTGTCATCTGCAGCACTTGGGTGGTGGGAACAGGAGTATCAGACATTTACGATGGTCCTGGGGCTGTGTAATGGCTGCTAAG
CCAACCTGGTATACATGAGAATCTGACTTAACAAAGAAAAAAGAAGAGGAGAGGGGGGAAAGGAAGAGGGGGAGGAAAGAAGAAGAAGAAAAAA
GAGAGCAGAGGAAAGAAAAAGAGAAAACAAAGTAATCTTGTCCTCGAGCTCTTAATCTTGAAGGACCGGGTCACTACCAACATTTTAGAGCAAA
ATGTGTCTCAAATCAACAGACACATATATGTGCACATGAATGTATCCTGTCTCACACACACACACACACACACACATAACAGAGTGAACAACAC
TTTAAATTAGGTATAACATGCAGGGAGTTATGAAAATCACAAGGTACAACTAGCCCCCAAGACACCTGCCCTCACCTTCCAGCACCTTTTCTTT
CCCTTCTTCCTTCCCTCCCCTCCCTCCCTTCTTCCCTTCTGCCTTTACTACCCCCCTTACTATTTGTTTGTTTGTTTATAATTTCTGGGACAGC
CTCATTGTGAACCTCAGCCTATTGGAACTCTCGGTGGTGCTCTTGCCTTAGTCTCTGGAGTGCTGGAATAAACGTGCATCCGTTCTTGCCCATC
TTGCCTGCATTGATTTAACCTAAAGGATGCTCCTGCTTCTGAACTGAGGACAGGTCTTATAGAGCAGCCCATCAGTTGATCTTGTCTCTTGGCT
CTGGTTCCTCTGGCTGTGTGATCGTAAGCCTTGACTTCCCTAAAGGTTGATCTCAGCTGTGGGAGGACACTAGCATACGCATCCTTTGGGTGGC
CCCTTCAAGGACTAAGTAAGAGAGATAGTGTCTGGGAAGAAGGGGGGATGGTTTAGTCAAGAAAGAGCCAGGCATGCTAGTGTGAAGACTTGAC
TTTGATCCCCAGAACCCACGTGGAAAAAGCCAGTTGTGACAGCATACACTTGTCTCAGTTGTCCCTGCACTGCGGAAGTGAAGACAGGTGGATT
CCTGAAGCTTACTGCACAGCCAGCCTTACCTATCAGCTGGCTCAGGTCATAGCAATAGACTCTGTACCCCAAAAAACCAAGGTGGATAGATAGA
TCTTGAACAAGGGCACATACTCCTTTCGTGTATAGGAGTATACAAGGTGTGTGTGTGTGTGTGTGTGTGTGTGTCTGTGTGTGTGTCTAGTGTC
CTATATAGCCATTGATTGTGGCCCTTGCTTTCAGGAAATTCCTCAGGACTCAGCAGCGAATAGACTGCTTAGGTCAGATCCTCAGAGCAGGAGG
AAGAAACTCAAAACCTCCAATGGGAGACCAGACTCCAGGAAGGACTTCCCTGTAACAGGGCAAGTTAACGTAATTTAAAAAAAAAAAAAAAGAC
ACAAGGGGCACCCTTGGCATCCTGAGAACCTGGTGAAAGAAAACCCAGTGAAAAGAAAATGTGTCTCCCTGGGGAGAAACCAGCCCCACCCCCA
TGTAGGTTGCCCCTCCCCTGTGAAACTTGAACTAAGACAGTCTTGGGGCAAAATCTCTCCCCTAGGTTACCATGAAATATGTATTTCATGCAGG
CTTTCAGGACGTCAAGCCACCCTTTCTCTTGGCATTCTGGGAGTTTCCTGTGGCTTCACGTGTGCCCAGAGAGGAACTCTGACCATGGGGGGAA
ATTTAATAAATGTGGTTTATCTGAGCTCCGTCTCTGTCTAACTTTGTACTAATGACTGGAGTGGTTTGCTGCTTGGAGACCATTATTTTTCTTT
ATTTGCTCTAGCAGCGAGGTTCTGCCTGAGGGAGAAAATGCCTGGGACTGAGGCACAGACATTCTTGCTCTTACCCCTGAGAAATTTGGGGTAT
TCTCTTGGAACGTTTGATTCCATTTCTGAAGCTCTGTCCAGTCACGGAGAATTATCCCTCACTGCGGCAGAATCCATCCCTAGCTGGAATTCCA
GCCGGCCAGCAAGGCCAGTGCCCGCAAGCTCTGTGTAAAGGGTTTCCATTCTGTGTAACTGAAAGCAGTCATGATAAGTGCTAGCCTCTGCTGA
ATGTTTAAAACAAGCTAGGATCTCTGCAGCACACCTTCTGAGCTTAGTTTTATTGAAGCCACATTCTGTAGATGTCATTTTTCGCCCAGTATAG
ACGAGGGACATGTGACCAGGGGAGCTATACCCAAATAAACTTGTTACTTTGAAGTAGGAGAGCTTAGACTAAGATGAATTTGTCACTAATATTC
TTGGAAGATGGAATGTTGCCTTCGGGTGGCTGTGTCCCTTATGTAATCTACATATCTGCACTTTCCCATATAGCAGTCCCTAAATGGTACCCAC
CACCTCCTGGTTTTCACCTAGGAACTGCTGAGACCTAGAAGTGATAGGTACCTAAGCCAAAGGTCTTATGTCCCATAAGAGGTGACTTTGGCTG
CCCTGCTTAGACCCATATTTTCTGAGTATTCAACCAGAGCATCCCTAGCTAAAGGGGACACCCCTCTACTTCCCAGCCCCTCCTTGACTGGAAG
CTAAGCAGAGGCATGGCTGACAAGCCATTCCCAGCCTGACCGTCAGTCAGTTCCCTTGGCCACATGTCGCAAGGAGAAGAGTTGTGCTTAGAAA
GGCTTTTGGTAGCCTCAAACACATGTGTTGAGCTCATGGCGTCCTTTGTAAAAGCAGATCCCAGCCCTCATTTTGAAGGCTTAAAAAAAAAAAT
CCCCAGGAGAATCATGAGAGGAATCCTAAAAATGCCGCCAATTTATAAAATAGACTCTTCGGATCACTTTAAACAAAAGGACAGATCTACTCTG
AGGAAAGAGAGGAACATATGTTTTACATCCAATCACAACAGAAAAACAATCGTCTATCCCAAGTAGCTCCACTGGACCTGGTGCAGAGACGTTT
CCATCAAAGCTTCCGTTTACAACACCACACACCAGCGGGTTGACATCTGCTGTTCTAGACACTGACAAAATTGTCTGTTATAGTATCGACATCC
CAGAGGTGGGGTCCCACAATCCACGCCCCACGCAAGGGTCAGCAGCCTCCTACTCTGGCCCCATTTCTAAAGTTTCCTCTACATCTTAATTCTA
ACATGCTGGGAACCTTGGCTTTAACACACAGGCCTTTTGGAGAACGTTCTAGATTCAGACCGAGGAAGCTTGATGTTTCTGTTTTTACTTTCAT
TTCAGGTTCACTGCTGGCCTATAACACAACCTCCCATACACACCAGTCCTCACGACTGAATCTCAAGGAAGGTGAGTCTGTCCTCTCATGCGCC
CAGGTTCCCTCCACTCTCACCACCGCACAGGTCCATACTTCTCAGACAGGTGGGGGATGCTATGTCTGGACACCAATTCCTTCCTCGGGAAACT
ATTTTTCTAGGACACAAGATAAAACAAAAAACAAAACAAAACAAAACAACAACAACAAAACAGTAACAAAAAAAGCAAACTTTTTTTTTCTTTC
TAAAGACCATGTTTTTTCTTCCTCTGCCACCATTTGCAGAACTACAAGGGAGGCTTTGAAAGATCTCATAAAACATCACAAGAATATAATTAAA
GTCACCCCCACCCAAAGAAAGGGGGACTGTCCTTAGAGAACAATGAATCGGCTCACTTTCCAAGCTGACACTTTGGGGGCTCTCCTGGTGTAGA
TAATGGAATGTATGTCTACCTTATAAAGTTTTGTTTGTTTGTTTGTTTCCTAAAACAAAATTTAGCATTTTCAGTTCGTGTTTAAAGTGGTGAT
CTGAGGATTTGGTCTAGGATAAGTTGACCTGTTCTGGTTTGGCTTCGTTTAGTCAAACAGTTCATTTGATATAATTTGGTTTTGATCAGCGAGA
AAAAAAACTGTCTTGAAAAAATGGTTTTAGTCAGGCGCCACAAGGATGCTTCTCAAAGTCTTCATTGGTAGGGACTGACGCTCCAGCTCTCTGG
TGGAGTGCATGCACAACATGTGTGAGGCCCGGGGTTTGATCCAGCAACACACACACACACACATACACACATAAAAATGCACATACATATAAGT
ACACACACATACACACATATACTCACAAACACGCATATACACATACACACAAACACTCGCATATATACACATACACTCACATATACACACATAC
ACTCACATATACACACATATGATCACACACACATACACACACATATATTACACCCAAACACACAAATAAACACACATACACACACAAATTCACA
TACACACACATGCATACTCACATATACACATACACTTACACACTCACACACACACACAAACTATCACCCAACCTAGTCTTGTTTTGGCCACCGA
GTCCCCAAATCAGATGAATGATATTTTTGTGTGTGAGAATTGAAGCTCTGCCCACTCATTCTACAGTCTGATGATCTCCTGCCCCATCATGTTA
CACATGCCTATAGCAGAGAATACCTATTTGCATGATCAATACACTCAGGTCTGGTTCCCTGGTTTTGTCACATCTCTGTCCTCAGACTCACGTC
AGGTTCAGGGTTCTTCCAGGGAGGGTCAAGTCTTGACTGTAAAGCAATCAGCTTCTGAGGATGGCTGACAATGGGGCCATCGCTTGCAGGTTTA
CAAAGAAACAAATAAGCCACTAAACAGAGCGAGAAAGGAGAGGAAGGATGGGAAGGAAAACAAAGAAGAAAGATGGACGTGAAGGGAAGAGCAG
GAAGGGAAGGCGAGTTTTGAACTATTGAATTAGGATTTACTGTACAGCGTGCTGGTACCATCAGAATTAACCAATGAGACTTTTGGGTAGACAG
AACTAATGGTCTATCTGCTCTGTTCGTACAGGTTTAAATACTGGTTTAGGTTGAGAAACTGGTCTGCAGACAATGCAGTCACTAACCAAGTCCT
CCTTGCTGCTGAGGAGTTCAGTGCAGCCCTGGCCCTGGGCTCTACCTGCCAGGCTGAGCCCCTCCTCCGCTGGCCCTTTTGTGTTGAGAGTGCA
TTTGTCTCCCTGCCGCCTCATTCAGGCTGCTCCGAGCCGCCAGCTCCTACTGGGTAGCAACCCTCTTCTCAAATGAATTGACTGTAGCATCCAG
CCAAACGCAGCACCGGCTGCCCCCATTCAGGTGGTGATGGGCATTTATCTCCCAGCCTCGGCCCTGGCCTCTAGAGACGATTAAGCCAGTGCTT
TGCAGGTGCATCTTTTGTTCCCAGTAAAGCTCTCCACTTAGGCGACTGCCTTCCCCCTTTTGACCTAGTCTCCCTCAAGGAGCCAGCCTGCCAC
AAAATAAAGTACATTAGCAATACAAAGCTAACAAACTCCTCCCCCCTTTCACCCTCTTCCCACCTCTCTGCCTCTCTTCTTCCCTAATAGCTAT
CTTTATTTTTTTAATATTAAATGGAAAAAGAAATAGAAGACATCAATGCCACCTTGACTATGTCTCTCTTTGAATAAGAGGCACACACGGCACT
CAATCAGACCTGGQTGTGTGCCCACCGGTGCCTTTGCTCCCTGCTTTGCAAGCCGCAGGTGCTAGCTGGCATCAGGCGCAAATGGGAGAAGCTG
AGGAGATGAAGTCTATTAATGTATCTTCATGGTACTTATCAACTAGAGTGCTGCTTTAGTTCAGAATGGCATGATCGTCCTTTCTAGCCTGCCT
ACCTCCTAAAACACTCACTGAAGCTATCTCAGGGTTATTTCTATGTAGAACGTAAGACAACATTTCAAAACTCAATTTCCACAGACCTGTAAAT
GTGTTGTGAGTCTCAGTTATACCCAATTGGAACCATTGAACATTTTCTACCTTATTTGTCAAGTTTAATGTACTTAAAGCAGGAAGACAGCGGT
TATTGTCAACCATTTCCATAGCAGCCTCGGCTGTCACTTAAACAGGATTTTGGAGTGTGCCTGGTGCGGGTACATACTTTGTTTTGGAGCTTTG
CACCATTCTGTGAGTCAGTCCGCTGTTTTTGTTTCCTTTCTGTGCAGAGAGGTGGGACAACATGAAAGTGACCCCTGAATCGTTTCTAGCCCCT
CAGAGTATGGTAAGGAAAGTTCCCCTTTCACTTAAGCCACTGTCATAAGAGAGAAATGGTTGTTACCAGAGTCTGGGAAGGCCATGAATGGAAA
GGTTATAGAGCGTGAGGGGCCAGTGGGGACCTCATGCAGCTGAAGGAACAGCTTCTAAGGCAGAGTAGGAAAAGAATGATTGACAGCAGTCAAT
TCAATATTTTCAAAACAGCTAATAGGATTGTGTCTGTGTGTGTGTGTGTGTGTATACATGTTTGAGGGCGTGTGCATGTTTGCATGCGCACACA
TATCTGTGTACATGCATGTGGAGACTATAAGCTGGCGTCAGGTGTTTCCCTGGGTTGCTCTCCACTGAACCTGGAAGCCATCCATTCAGCTATG
CTGGCTGTCCAGTCAGCTCCAGAATCCTTCCTACCTCTCCCTCCTTAGCTTTGGGATTTGACAGCCACACTGTGGCAGGCATATGGCTTCTAGA
GGCTGCCAGGGATCCCAGTCTGGACTCTCATGCCTGGTCCACAGGCACTTCACCAGCTGAGCTGTCTCCCCGGCCCCAGTGATTACTTTTGTCA
CGTGATGGATGTGTCTGTGTCTTTCACCTGATTGTTACACATTGCAGATAACCTTAGTAACATCACTCTGAGTTCTCAAAGTACTTACAGTCAC
TATATATTTGAAATATTTTAAAATATGTATGATTTAATGGCCCTTATTCCCAAGGTTCCTCCTCAAAAACACAGTCTTTTCCCTCTAGCTATCT
TTTCCTAAGTGTAATTTGGTGCAGAAATTTGAATTTCTGCAACATTTTTCTCTGCCTCTGTAGTTTTTCACTGCTGCCTCCAGCTACATCTCTG
TTCCCTTTTCAGAAACAAATGTATACCCAGCCTCTACTACACCTTAGCCTTCCGTCTTAAGGGCACAGAGAGCCCCTTGTAGACTTTGTATTAC
AATGACATCCAAGGACAAGTCCTCTGTAACTTCCTTCTCTGGAGCAACCTGGAGCCCTGGAGCTCACTGGATGGAGATGGGGGCTGGCTGCCAG
AGGCTGCAGGTAGAGACAAGTGCTTTGCGTTGACTCCTGACAGAGAGAGAGTACTGAAGCTGGAAGCTGGTGACGATTTCACTGTCTTTGAATG
TGCAGAGTGTGGCTAAGTTATACACTTGAAAGTGGTTAAAACGGTAAATTTTATTTTTAAAAAATTAAATGCATAAATAACAACAAATACTGAG
CCTAAGGCCCAGACATAATGTGTTAATTCTAAATCTCTACTGGGTACCTACGGGGGCCTTGGGGATTTTTTTCTTAAGTTCTAGCTGGACAAGC
CCTGCTTCGTTGTACTGAAGGAACGTAACCGGCACATCCAGGGCCACTCCAGGTCTTTCTGGATCCTTCTGACCTTCTCTGTCCCCAGGTCATC
CTAGACAAAGACCTGTGGATATACTGATTCTAAGCACGGGTGGGTGAAATATCTCACAGTTGATGATGTCATTATTACTGTTATTGACAACTAG
GTATGAGTTTAGCATCTTACATCTTAGAAACTCCCTGCTCCCATGCCTTCATTTGGCTCTCTAAAAACAGATCATGTGTTGCTAACTTGGGTAT
ATGGGGGAGCACTGAGGCTCAAGAGACTAAGTGGCCTTTCCACATAAGCCTTCTAGAGCCAAGCTTGACCCTACTCCCTTCTTCCCTGTCCTGC
ACACTGAAATCCAGTGTGACTGCTGATCCTGGGTGGTAGATCCAAGGTCCCAGCTTTCTCTTTGGTTTTCTGGGCAGCTCCTGCCCCAGGGCCC
TCTGCAAGTGCTCCTTGCCCCCACAATAGGCAAGAGTAGGCACCTAACTTCAGAGCTCCCCTACATGCCTAAGGCCCTCATTTCCTTAGCCCTC
ATCCTGATCTATCTCAATACCTCCAGCTCTCCAACAGGCAGCGGATATAGAGCTCCTTGTTCACTAACTTCTGGACCTCATAGCTGACGAAGGC
CTCCCGGAGCTCTGAGCTTCTAGGCCCCCACCTAGAGCCTTTGAGACTTGATGCCGAAGGTGAAAGACTGAGAACCACTGCCCTAGCTGCCAAG
GGTAGATGGCCTGCAGAACCTCCATTACTGGCACTTACCTTGACTGATGGATAAAAAGTCTGTCTTCATACTTGCCAAGGATTGAGAAGAGAGG
GGCTAAATCGCCCCATGACACATATGCTGGATGCCCAGCTGCCCATTTATGGATCATGCTTAAGAGAGCCTCTCCTCTCAAGAATTCCAAGGAC
AAGGGCCAAGCATGGAATAGCAACCCTTCWGTAGTATCTACTTACCAAATATTTTCACATCCATTATCCATTATCCACACACCATCACCATGAG
ATCGCAGCTGCTACCTTCTTGTCCCCGGTCCTGCAGTTAGGATAATAGGGCCAAGAGCTCCCAATGTTCCTTAGATGTCACCCATATTTGGGGC
AAAGCAAGACTACCCGTGCTCGCTTCGGCAGCACATATACTAAAATTGGAATGATACAGAGAAGATTAGCATGGCCCCTGTGCAAGCATCACAC
ATCGCAGCTGCTACCTTCTTGTCCCGTCCTGCAGTTAAGGATAATAAACCAAGAGCTCCCAAAAATGTTCCTTAGATGTCACCATATTTGGGGC
CCCACATTTTAATCTCAACATCTTAAGTATTTGTTAATGAATGTTTTCCACTCACCTAGGTAAGCACCCAGCTCCTCTTTAATGTGTTATACTA
ATGAAGTTGCAGTGTGATTTTGGGCAGCGGTTTGCCTTTTCTGTCTCAGTATATTATTTGTATGGCTGTCACAATACCTGACAGAAACAACTTG
ACAGGGGAGATAGAAACTTTGCGGTTTTGGAGAGACTTCAGTCCATTGTGGTGGAGAAAGCATGATAGAGGGAGTGTTTCGCAGAGATGAGAAG
AATAGAACATTTGGTAGTGGGCGATCCCATGGTGGTGGACCAAGATTCAATGGTTAAGCTATAGCCTTTATCATTAGCCTACCCCTAGTGATCC
ACTTCCTCCAAACACTCTCTATCTCCTAAAGGTTCAATGAAATTGTACCATCCAGTGGGCAGCGAGCATCCAAAAGCTCGGAGCCTGTGGGAGA
TGTTTCCGATTAAGTCAGAACACTCCATTTCATCATGTATAAAGTGAGGCTAATTTCCATGCCCTTGTAAATCAGCATGATGTCTGACATGCCA
AAAATGCTTGATAAATTATATTCATAACAGTTCATTATTATGATTTATGACCCGAATTTAATAGTAATTAACATTATTGTTGGGGAAATATATT
TGAGGGTTACCAGAGGCTAACAATGTGAAGATATTGTACTCTAATGGATGGTATAGCGCTGTGCAGGATGCTCCACCATAGCTGAGAAGCCAAG
CTGCTCAAAACCTTCCTAGGGAGAGACCCCTATAGGCGATGTCAGGAAGTGCTGTCAAATCACATTCATAAATGCAAAGTCACTTGTCACATTC
AAGATCTCCAAGGGGAAGGAAGGAAGAGCCACAGTTGAAAATACCTACTGAATATCTTTTATACAAAACAAAAAAACAAAACAACAAAAACAAA
ACAACACCCCCCAAAAGAATCAAACGCCATAAAATGGTTGAGACCAGCCAAAGCCACCCTAACCTGAAAGATACTACAGAAGACTGAAAATACG
TCAGACCACAAGCATTTAGTAWATGAGAGATCCAAGCTGTATAGGACTTTTTAGTATTATATTAGTTTACCTTTTGTGTGGTATGGGTGGTATG
CCATAGCTCAAGGGCAGAGGTCAGAGACAACACATGCAGAGTTGGTTTCTTCTACCATGTAGGTTCTGTGATTTGAACTCAGATCTTCAACGTT
TAGTAACAAGTGACTTTTCTCACTGAGCCATCTCCCTGGCCCAGTGTGTTCATCCAAAGGATGTAGGTGGTCAGTGCCTTAGTAAAGAATGGAC
CTGAATTCTGTGAGTCGTTCTGCCTTCTCCCAGTTGCTCATTGATTCTCTGACTTATGGAGGATTTGCTCCATACAATAAACCTTCCAGAATCT
TGGAAATATGATAGCCAAGGGGCGCCAATCACACCTGCAGATGAGCAGTAGAGTCTCAGAAAGTCGTCCTGCTGCCTCCTGCACACACCCTCTC
CATCGGAGTTCAGAATGACATCATCCGAGAGGTTATGGTGTAATGTGTGTGGGGGTGGGGGGAGGGGTGTATTCTGGAAAAGCTGGATGTGGCT
ATAGAAATGTAGGAGGGGCAACTCTGATTCTGGGGTGTGTGTAGGCACTGCCATATGCCTCCACGTGTGTTCTGGGTGGTATTTTGAAAAAGGT
GAGTCCCTATACACGTGAACAAAGTGTCACCGCGTGCCATGTGTGACCCTTCGGTAGGTCTCCAGCACTGGAGACAATGTGCTTAGGCACTTCA
TGGTGAGACTGGAATCTCAGGTATGGAGCCCAAAGCAGGAGCCAGGAATTTGCCTCAAAATACTAAGGCCCAGTGGTAGTGGGGTGGAGCTAAA
GTGACATTGGCCATGGCTTTTAATTGTTCAGCAGAGCAATGGGCCCCAGTAAGGCTTCACTGGACTTTTTCCCTTTTATGTATCTTGGAATTTT
TCTCTGACTCTAAAGACAATGATAAGTTTTATCTGAGTGGGAGGACAGTTAAACGAGCAGAATGTCTGCATTCCACACCTGTGTACAGTGAACG
AGGGTGGCGTGCTCTTGGGAGGCCCACATTCAGACTGTGAGTCTATGGGGAGGGGAGAGTAGGTGAACATAGAAACAAGAATAGAAATGATGTG
GTGTGTGTGTGTGTGTGTGTGTGTGTGTGTGTGTGTGTGTGTGTCCCTGTCTGTCTCTATCTGTGTATGTCPGTGTCTGTATCTGTGTGTGTGT
CTGCCTGTCTGTGTCTGTGTATGTCTGTGTCTCTATCTATGTGTGTGTGCTTGTGTGTGGGTGAGGGTGTGTAATTGTGTGTTTCTCAGCTATT
TCTGTGGTCCAGAGGCAAGATTTGTGATTATAGATAAACAGTAGCTTTCTCTCTCTGGTTTGTATTTGGTTTTGTTTTTAACTTAAAAAAAAAA
TCCAGAGTTAATGTCTTGTCTGTTTCCTATCTGACCCTCTTTAAGAGATGTGTTTGATTTTTAAAAATTTTTATTTTTACTTACTTATTTTCGA
GAAAAAGPGCCACAGAAAGAGAGACAGAGAGGCAGAGAGGCAGAGAGAGACACACACAGAGAGAGAGAGAGATTGAGAAACTGGAAACAAAGAA
TCGTTGTCTCTGACCCCTCCCACCCAGGAAACCCCAATCTCAGGGGAGTCCAGCCAGCCAGCCCGGCCCTGGAGTCAGACTCCAAGTTTCTGAA
TTCAATTTGACAGCTTGTCTGGGACACTTTCTAAGTAACCATTATCCTTCCTTTCTCTAAGTAAAAGAACTGTTATTCCTGTCCCAGGGTGTGC
TGTGTGCTCTGTTATTGCACACGTGTGGCCATACGATCACGAGCACACGGTCTCTAAAATTACTGGAAACAGTTTTCATGTTCCCTAAGACAAG
TGTAAATTTGTTCCAGGCTAATGAGCAAAAGATTTCAAGTCTCATTCCCCAACCTGGTGAGAAGTAGGTAGATGGGCGACGGCGGATGAGGGGA
GGGGAGCATTTGCCCTGGTGTTGTGCATGTACACACTATTCTTACTAGGATTTCTTTGAAGTACACACACACACACACACACACACACACACAT
CCTTCACTCACCACTATCCTCAGCGTAAGCATAAGTTCTCTCCCTCTCTCGTCCACACTCACATCAGCCTAGAGCTGCAGGTTGCAAGGAGATG
ACTCCTCTGTGTTCAATCTGCAGGCCCTGGAAGCAGGACCACACTGGGTTCTTTGGATCTTTCACATGCTGTTGTGAGGGATTAGGCAGCAGCC
ACCCCCTCTGTTCATACTTGAAATCCAGGGGCAACGTGTAAGTTTATGTCACAGCACCTTCTGGACAACTGTGGATGCTTGCTCTCTTGGGTCT
GCCCTCGAGTCTGAATGGAACTGTACCTACTATGCCTTCAGTCAAGCTTGGGACTGTCTCTCCACTTACCCCACCCCTACCCAGGGACCTGCCG
CCCCTTCAGAGGCCTTGGCCCTATAGCTTTGCCTGGTTCTAGTCTCCTCTGCCCCTTTTATGAGGTGTTTTGTTTGTACCCACTCTTTCTCCAA
TTTAGTACTGTTTAGTATTGGACAGATTCCAGAGGACAGTTTTTTCCTCTCAAATGACTAAAGCACCCTGGAGCTAGAAACCATTGGATGGGCA
GATGAAAGTCACCCTTAACNNNNNNNNNNNNNNNNNNNNNNNNNNNNNNNNNNNNNNNNNNNNNNNNNNNNNNNNNNNNNNNNNNNNNNNNNNN
NNNNNNNNNNNNNNNNNNNNNNNNNNNNNNNNNNNNNNNNNNNNNNNNNNNNNNNNNNNNNCTTCCCCTTCCCCTTCCCCTTCTCCTCCTCCTT
CTCTTPCTTTCTTTCTTTCTTTCTTTCTTTCTTTCTTTCTTTCTTTCTTTCTTTCTTTCTTTCTTTCCTTCCTTCCTTCCTTCCTTCCTTCCTT
CCTTCCTTCTTTCCTGTTTCTATCTTTTTTCCTTTATAACATATTTATTAAATACPTAGTCATGGAAGATTTTTCTATGCCATAAAACCTTATT
AGTTTAATGCTATCATTATTCCCATTTTATAGATGAGAAGCCCAAATCACCATGTTGGTTTGAAGCAGGGCAGAATCTGTTCTCACAGTCTCCT
CCCCAGCCGAGGTAGAACACAGGCTCTGAAATTTCCTCTTGTATTTCGACCCAACTATGTCTTAATTACTACTGATGCTGAGGGGGAAAAAATG
CCTTGACAAAAGCAACTTGGGGAAGTAAACGTTTCTTTAAGCTCACAGTTTAAGATTCATCATGGTGAGAAGTCCTGGAGGTAGGAGTTTGAGG
CAATTGTTCACATTGCATCTCCAGTTAGGAGTTAGCAGAGAAGAGCGACTGCTCTGCTCCACTGCCTTTCTCCTTTTAATCCAGTCCAGGATCC
AAGCCTAGGGAATCGTGCTGCCCACTTCTACCTCAAGTAACCTAATCAATTGTTCCTCACAGGCATGGCCAGAAGTTTGTCTCCTTCATCTTGC
CAAGTTGACATTAATAACATCACACCATGCCAAAAGACCCATTTCTTTCAGGAAGCTGGGTTTGTCTAATTGTTAAAACCATGGGACTGCATCG
ATTCCTGCAATGGTTCAAAATTTCTCAATGTTACCGGCATTTCTGGAGGCATATTAGTTTGTTTCACAAATTTTTCTGTAGATATATTTTTATA
ATTTGCATGATGATACATGATTAACCTTTTGAGCTTAATTGAACACTTAAGAGAAATGAAAAAAATGAGCTTCAGTAAAAGGCATATTACACTG
AGTAAAACCATTTCCATGTGTTGCAATGAACTTAATCTGAAAAAACGAGAGTGAGACACAGACATGTCATTAGAAATCACGTTGTCATGTTCCC
CTTGGTTGATATGAGCATCAATCATGAAGACCTTCCAGGATCCTACCTCACCTAAGCTCCCTCCATGAAGTTAACTTTTCCTGCACTGGGGCAC
TGAGGAAGGAAGCTGTAGCTGACTGTTGGGTCCTTAGAATCGACAGCTTCCATTGCTTCTGCAGTGTTTTCCCACCTCAACCTTTACAGCCCAC
ACTTTGTTCTCACACTTAATGACAACTTTAGCTTCTTGGTTTACATCAGCATCCTTTCTGTCACCATAGGCTGGCCTCTCATGTCCCTGGGCCA
GAAGACACCACTCCCCTCAGATAGTCAGAAGTTCTCATTTAGATCAACATGACTTTCTTGTCCCTGTCTTTGCTTTTATGCATTTCAGAGCTGT
TCTTAGAGGCTTCCAGAAGAAATAAATGAGGCTGTAGGTACCCATGTATGTGTTCTGCGCTGCTAATGACCGTAACGGGGAATGCACGTCCCCT
CCTGCATCTCTATAAAGGAATGTGATTCCTGTAAACACTTGAAGCTAGAGGGCCAAATGTACAAGGCTGTGGGAAGATATTTGTGGGTAATGAC
ATCCTGGGGAACTTTCCAACCTGACTCCATTCCTCCTCCTTCCATACCAGCAGAGAGAGGCCTTGACTGTAGTGCTCTGTGGCTGAAGCTCTGA
CCATATCACACATTTCTTGGTAGCAATTCACACTTGCTAAGTAAGCTTGGCCTTCCTTATTCCTCTCCAGTCTTGCTGTTACTATATCAGTCCT
GCCGCCTCTACCAAGCTGCTTCTTGCGTTAAAGATCTGTCTCACTCCACACAGTGAAGCTAAAACTCAGAATGAAATTCATTTTAGTTCTTAAA
CATCTTCACCATGTGCTCTGATTTGTGATGGAAACTAGTGGTCCTGTTAGCTGATGTTGAGAAGGGTTTCAAGTTAACTGGCAAGAAGAAAAGG
GGATTGTCTACAAGTGCTGTTGATGCTCACTGGTGGCTACCTCAGCACAGGGTCGTCCAGATACGTGGGCTTTGCCCAATGTACTGATTTAGCT
ATTCCAGGAGGTTTGTTTACCTATACTGGAAAGTATAGCTGGCCTCTCCCATCCAGGCCTTCCACATCGGCAGTTTTGACCAACCATTGCTAGA
CAAAAGAGCATCCTCTTGGACAAGCAAGCTCCCTGTCATTTCCTAAATGACACAGTATAGCAACCAATTACATTGTGTTAGGTATTTTAAGTGA
TCTTAGATGTTCCTCCAGCAGTGCAGTGAGTTAGTGTGCCTGACTTACACAGCAGTGTGTATGCATGGAAGTGATACCCCAGTCGTGAGATAGC
GTAAGTGGTCCATCAATGACTGGAAGTCTTTGGGAGGATGATCATGCGWTCTATTTAGCACTGTACCATGAGAATTTGAGCATTATGGGTCATG
GTGCATGATAGAGACTCTGAAACCATTTACCCTCACATGCAAAGCAAAGACTATGCTTACAAAAAAAGCTTATTTTCCCAAGCCTTTATCTATC
TTATGTCTGTCTGTCTGTCTGTCTGTCTGTCTGTCTCTATCTACCTACCTACCTACCTACCTACCTACCATCCCCGTAAACAAAGCTATAGATC
TGTCTTTTTTTTCCTCTCTATTTGAAGAAGGAAGAAGAGAGAGAAGCACAGACATGGAAGCCCCTCTTGACGCACAGGGAAGAAGTGTATCTTC
TACTTAAAAGGATGGGCTGTAAGCACCACCATTTATTATTTTAATATGAAAATCTTTTATAGATGTAACAAATTCCTCTCTTTGGAGAAGCCTC
AACTTAATATCACAAAGAAATCATTTCTCCTGTAGAATCCCCACGGAAGAGAAGGTAAAGTCTTTCAGGAAGAAAGTCTGAGGCTGGCATGGGG
GTGTGAGGGCTTTCCCCTCTTTTGGGAATCCGCAGGTCTCACAAGTAAATTCTGAGACGCTTCTTCCGCCTCTTTGGTACAGCTTGAATTCATG
TCAGGCAGAAGCCACAGAGAGAATAATAACATTATGTAAGATAATTACTTATATGTCAAATCCCAAATCAATCCTACCTGCTCAGTGTGTTTAC
CTTACTCCGACGAACTGTGTCTCTTCCCTAAGCCCTGAACCCAGGAGCTATTTCTGAACCTAATTGCAGAPTATCTTGTCATCTTTAATTGTGA
CTTTTGTCCATTATTCTTTTCTCCCACCCCAAGATTTTCAGTALATAACCTTGACAGTTGATGGATTTGCTGGGAAAGAAAAATCTAATCTTTT
TCAATTGAGTTAAATATTTACTCAGTCTTGCTCTACTAGGAAGAATCAGAAGLAATTATCTTAGCACGAAAGAAAAAATTTATTTCTAGCCAGG
CAGTGGTGGTGCACACTTTTAATCCCAGCATTTGGGAGGCAGAGGCAGGTGGATTTTTGAGTTCGAGGCCAGCCTGGTCTACAGAGTGAGTGCC
AGGACAGCCAGGGCTACACAGAGGAAACCTGTCTCAAAACAAAAAACAAAAAACAAAAAAACAAAAAACAAAAANNNNNNNNNNNNNNNNNNNN
ACCTGTCTCAAAACAAAAAACAAAAAAACAACAGGAAAAAATTAAGTTCTTATCTCCTATGAATAAAAAAACCTGGAAAAGAATAGTTTGGGGA
AATGTCTAATGGGTAAAATACTGCACAAAGGTGAGGTTAAATTCAGGTCTGCGTTACCCACATAATTAAAAAAAAAAAACTGGCAAGGTGGCAT
GCATCTGTAATTCCACCCTGAGAATAGAGACAACTTGAACCTAGGGGCTCACTGGTCAGCCAATCACTGGCCAAAAACAGTAGCTTCAGGTCCA
GTGAATGACCTTGTCTCAAAATAACAACACTAATCCTACTAAATACCAATAATGATATAGAATGCAGTAAATAGGAGGAAGATACTCAAATACC
ACCTCTGGCATCCACATGTGCATACCAAGATGAGTGTACAAGCACACACACACACACACACACATACACACACACACACACACACACACGCACA
CACGCATCCACGCACATGCATACACACACACACGCACATGCACACATACACCAATGCTGACTGGAAGAAGATTGGACTACAGTTCCATAGGAGA
CTTTCGCGTGTGTGAAGGGTTTGTGTATACATGAPCTWATCTATTCTCCAAAGACCCTTGTGAGGATTAAATATACTGTTTGCTCTTGCATGGT
CTGAATTTACAAATAGTCAATTCTTTCTCACAAGAGTATACTTTTCAGAGAGGGGAAGTCACTCACCAAAGGTGCACACAGCACATAAGCTGAT
GATCTGGGAAGCAGGGTGCAGAGTTGGAGTGACGGACATCCCGAATTCTTTCCTTTGCAGTGAATGGCTTTACTCTTTGGAAACCATGAGATTG
CTTCCCCCAAATAGCTTTAAAGCTTTAAATGACACCCCAAAACAGTCCAGTTCTTGATAAGATTCAGTTATTCCAAAGAAACACAAGCTTCTCG
GGATATAATTTTTGAAAACTCTTTGAGCCTGAAGCGTTGGCTGGCCCAGTTACTCACCAGTCCTGCCCAATAGCCTAAGATCAGTTTAAAGAAA
GTCAGTTTTGATAGTCTGAGTCATATTTTCAATTTCTAATAAAATTCTTACATGGCCACATACCCTGTCTCCCAGCTTTGAACCTAGGGTCTCA
TGCTCATTTGCATGTCTGGTTTAGATCATGTCTGGGATCCCTTGAAGTCTGAAGCAGAGCTTGCCATTCTGTGATGTAGTGGGAATAGATTCTT
ACCAAAACTAAGGCCATTTTCTCAGATACTCGGATGTAAGATTCCACGTTTGACATTGCCTGCTCACCTGCCAGACCAGAACAAAGTGATGCAG
TCTCCCTTAGTCTGACCTCACCTGCCCACTTCTCCTATGATGACTCCAAAGACATGTCCCCTGGAACCCACTTTAGCATTTTAGCTGTCTGTCA
AAAGGCCAGTCTCGGGAACTGCTGGTGTTCGAAGTTTCCTCATTAGAATAGTCATCTTAAGTCATGGATGGGGGAAATCAGACTGACTCTGAAT
AACACGAAACCAGCAAACAATCAAAAGATGTTGTAGAGCTTTTAAATGTCACTGTCCTCCAATATCAACCCACTCATACTACATGTGAAATGAC
AAAATCGAACTAGCTGTCCTGAAAGTTGTCACTGTCAATATGGGACAMCCCAGTACTTTTCAGAGCTGAAACCATGGAGTTCCCTAGAGCTCCA
ATTTAATCATGTTACACAGTCCAAATCTTTGCTCAAATTCTGTTTTCTGAGGCCCTCCTACCCAGCCCTGCCTACTCCCTCTTCTGGCTTGCTT
TGCTCCCTCACACCCAGCAGCTTCTTCTAATCTACTGCATTGTTTACTATTTGTTCTGAGTAACTTCCACAGAAGATACCGACTTTGCGTTGCC
AGAGTTGTATTCTAGGCACATACGTGGGTCTCGCAACAGAGCAGGCATTCAACACAACTTCATTGAATGAGTGAGTATGTGGTAGGGTCTGTCC
ACTAAGTCCAATAAGCTAGTACTCCGGTGGGGCAAGAGCAAATTTGTTGAGGGGGCAGAACTGACTAAGGTCCGGTCCCTCTGCTGCAGAGATG
CTCACCTAGCCAGAGAGGTAACACACTTGACACTGGATGGTTGAGCAGACAGGGACAGTAAGCACGGAGCAATGGCCCGAAGGACTGGAATGAA
AGGTGTGCAAAGGTCAAATCGTGAGGCAGATGCAGGATCCAATCGCCCATGGCAAACGACGACGTCGTATAGGCAGCGTGCCCTCTCTGTGTGC
AGAGCCAGAGGGCAATCATAAACAACTCTTTATTGCCTAAATGAGCTGTTGTTTTGCCTTTTTTTTTCCTAGCTGGTTTTAAACCTGACATCCA
TCTGACCAAAGAAGTATGCGATTGAGTCGTGTCTACTGTAACCCAGTGTGGAGAATTGACAATACCCAATTCAGCTAGTCAATCTGGCTTGCTT
TTCCTCTTCCACGTATGGCTCAAAGCCCCACTTTGAGGCCTTATCAAAATAAATAGTTTATTTAGACATCTGTGCCATTTGGACAGCGAGCCAA
CGGGGCAGACAAAATGAAAGAAGAGCCCAGGCTGGGCAGGATGCCTTGCAGGAACGTAACGAGGCTGTGCCCAGAGAATGTGCCTCTTACTTTG
TCAAACTTTTTGTATTTCAAGCCGCCCCGTGCCTTTCCAGCATTTTCCTCATGAATCTTCTTTTCCCTCTGCACACAGGATTATCTTAGGCACT
ACGTCCATTGTCCTCCGCGCAGTGGTACTGGTCCTGAGCTCACGGCCTGCTTGAATTCCAGGACGAGATCCTTGAGGTAGAGCAAACTTGAGCC
AGGATGTTTTCTCTTGCTTCTTTGAGTTCCAAGCTAAAGCAAAGGATTCCCTTTTTAACTTCCTCTCCCTGCAGTCTTGAAGGATGCCAGGATC
CTCTGTAGCTCTGTGGAACAAAAATCCCACTGGAGGGAAGGCTGGGTGAGCTTTAGGGAATGGATCAAATGAGGTAGAGGATTCATCCTGAGCC
TCTGGACCAGCTAAAGAGGAACCTCAGCACTCCTCAGTCATGGAAGAAGCAAAAGCTGACCGCTCCCACCTGCCCATCGCTGTCTTCTGAGATC
ATGTTTAAAACCAGGGTTCAGGATGACCCACCACTTTCCTTGGAATGTATTCCTGGATGAACTGTTTGAGGGCGCCAGGTTAGAGTTGGTCTTT
GGGGATTCTTGGGCCTCTCTTCCTTCTCAAGGCCTTCCTGTACGACCTTTATGACCTCCTCTTATTGTAGAGGTAAAGGCAAGATGGAACAGGC
ATCTATATATCATGTCCAAAGTTCCCATCTATGGAAACACAATTGATTCCCACAGCAGGTCTGTTAAGATCTGTTATCATGCTGTGTAGGGGAT
GCAGAGTTGAAGTTCAAAAGACAAATAACCTAACCAGGGGATTCAGATGAATAGGGACAGACCTGGGATTAGATTCAAGGGGCCATGGATGGCC
ACTGAGACCACCATTAAGCCCTAGAAAAAAGGAGCACTCCCCAGGGACAGAGCCCTAGAACTCTGTTTAGACTGCCCATTTTCTTCGTAGTTTC
TGTTGCCCTGGATTTAAAGTAGGATCCAGGCCAGTAAGTAGGTAAGATTCTTAGCAATTCAGAGATGATTTCAGATGAGAGACTGTTCCAGAGT
TGTGAACTGGGGGTTCAGGAAGCATAGTTAGCTTTTGTAGGAGGTGTTCAGCCCAAAGGAGAGTCCAAAGCAGAGAATTCCAGTCAGGTTGGTG
GTCAGAAACATCCATGCCTCTACTGAGATAGAACCTACTAGGAGAACATGACCTCGAATAGAGACTCCACTGAGAGGATCATGTAGGCAGAGGC
CCTAGGACATCTGACCGTCCCCAAACACAGATGACACCTTACTTATTGGCATCACTGAGGTTGGCGCGCAGACCCAGGTTTTCCTGGCATGAAC
AGCACAGACACTGCCAGCCTGGCCAGCAGACAGATAATTCAGCGAGAAGTGAATCTTTTTTCCACTGTAAGCATAGAGAGCACGGGGCCCAGTG
TGGTGAGGGACTCAAAGAGAGGCTGCTGTCTGCTGCTGATCGCTCTGTGTGGGTGATGTGTTGACAGGGTGTCAGCTGCGTACAGCCTGATGCA
CCTGCGTCTTGGACAGTTAACTGGAGGCATCAGGAGAAAACAAGGTATTCTCAGAGATGAAGGCCATATTTCCAGGACCAGTTTAAACACTGGT
GCGTCTATGCCATGGTCACAGCCAGCAAAAGCCTTCCCTTTCCAACGGGGCTCAGAGCTCATATTACTCTACCCTAGGAGGCTGTCTTGGGATC
TAAGAGACCATTTAGTGTCGCATTCAGCCACACTGAGTATTGCATAATGGAGAAACTGTTCAGGGCGCCGTAGATGGGaGCAGGATTTATCCAC
AATGGCTGGCAAAGCCCCAGAATCCCGGCATGAGGCCCAGGTCTGTTTGCTTTGGCGAGAACTGACCTCAGGGCTGCCTGAAACAAGAAACCTT
AGGCAAAGCCCACTGGTGGCTGCTCAGCAAAGGAATCACAATAGCATTTGTCATCTTAGGACTCCTTAAAGCCAGGGGGTGTCAGCCTTCCCTG
AGGCAGAAAGAGAGTTTGTCAGAATCAGGGCATAATTTTCTGCTGATAAAGCCATCTGCCACCACAGAGAAGGTCTAAGAGCATCACCTCGGGT
GCTGGCCGGGATTGCCACATTTTTGACACTGAGTCTTTGGCCACCTCAGACTTTTCTTCTCTAAAGCCAGATGTACCTGTCAGGATGCGGGCTC
CATGTGCCACATGTGGGGCGTCTGTATGTGTGCACTTGGCTGCTTGGAGCCGCCAAAGCCCGCGGGAGAACGCTGCACTATCTGGCGCTGACCA
TAGCCAGGCAGCATCTGGCTCTGGAGCCAGGAGTGTCTGTAGGAATTTGTACAGCAGGCTTGCCCCCTTCTCTAGCTTTPCCGAGTTGCTTACC
GATATGTCTGTCAGTGTCCCTGGTACTGTAGCTGACCTCACTGCCAGGCTTTTATTTGCGCGACATTTAATAGGAGAAATCACAATCCCTCATT
TTAACGATAACACTGCCCTGTGAATGATGGAACCAGTTCTGATAAATGCCGCCTCCCTTATTTTTTATCCCCACGTGAATATCAGAATATGCTT
TCACAAACTAAGATGCCGATGACCACCCAGATGACACAACATTACGGGACCACCATCCCTTGTGCTGTCCCCTGTTGATCCAGGCAACATAAAT
GAGTGGTGCCCAGCTCCTGACCTCCCTGAAGGAACATACTCTCAGCTTCCACTTCAAAATGGGTGGCTTGCTGCTCAGCCGGTGTTGACATAGT
CTGTAGTCCTTATCACCACAGGCCTGAACTAGCTAGAGACCTAGTTCAAGAAGGTAAGCGTCTTGGATTCTTTTCTGCTAGCTGACAACAAAAG
GGATTGTCTGCATTTAACAAGGAGAGACACTGCTGATTCCATTCGTTGGTTCGTGTGTATGTATTGCATGTTTACCATGTATGGCTGTGAGGAC
CTGTAGTCCTTATCACCACAGGCCTGAACTAGCTAGAGACCTAGTTCAAGAAGGTAAGCGTCTTGGATTCTTTTCTGCTAGCTGACAACAAAAG
TTAACAAATGGGCCAATGTGTTTCTGCTCCAGGTGTTTTTCAGATGAGTGAGAACAGCACAGATCATCTCAACGCTAACGATATCTTTCTCCTA
AAACATGQGGCACACTGGTCCTTCTGCTCAGTGGTAACTTGACCCTTTCACTTCAGCTCCAPAGGTCTCCTGTGCTTTGAGCATCCGAGGCAGC
TAGATGCCCTTGGCCTTGGGCTTTCTCATCTTGCCACCTCCCTCTCAGAAACTGGTTTTTCATTTCAGTCTTGCACGAAAQGAGACATACCCTG
CACCACAACTCCTCTGTGGTCCATTCACCAGCTTGTGCAGTAAATGGGCAGGCCCTCACACTGCTTTGCAGATTCACAGGCCAGAGAAAGCACC
TCTGCATATGTAGAGGGGCTGATGGGAGAGAAGACTGTATTTTCCATGTTTGATTCCACTCACTGGGTCACACAGTGACTGAAGATGCCTGCTG
ATGGCATCGCCATTCATTGCTCAGTGAACTTCATAGTGACAGTGTTGCAAGGCTGGTTTATGGAGTGGCTTCTCCATCTGTATCACTTCTGCCT
TCACTTATGGTAGGACCGAGTAGTACTGAGTTGGAATCCCCAGGAGATAGGCTTATGGGAGCATCTCCCTGCGTACTCAGCATCCCCCACCTTC
GAGGTCTGCTGAATCTTAGACTGAAAATAGAATCTTAGAAAAGATGGGCTGCTGTGGCCTACCTCAAGCTTCAACTTCAAAACATTATTCCTCA
CCTAGAATTACCAAAGAATATGGTGACGTCCTAGGAAACTAATTCCTACATTCTGGGACAGCTTTCATCCAGGAGGAGGGCTTTCCGAAGCAAG
TGTAGGTTGAAATTTTTAAGGCAGATTTTACAAGTGCTCGAGACATCAGATGGCACACATCATCTCCTGGAACATAGTGGGTCCTTCTCCTTTT
TAGTTACTCACCTGGCTAGTTTCACGCCAACTTGACATAAGCTACAGGCATCTGAAAGGAGGGAACCTCAGTTGAGAAGGATGTAAGTCTTTAT
CTTAATTAGTGATCGATGGAGGATGCTGTAACCCCAATTGTGGCTGGTGTCATCCCTACATTGATGGTCCTGGGTTCTATAAGGAAGCAGGCTG
AGCAAGCCATGGAAAGCAAACCAGTAAGCAGCACTCTTCCATGGCGTCTGCATCACCTCCTGCCTCCACATTTCCTGTTCTAGTTCCTGTCCTA
ACTTCCTTCATTGATGGTCTTGTTACCTGGGAGTATAAGTGAAGCAAACCCTTTCCTCCCCAAGTTGTTTCACTGTAGCAATGGTAAGCCTAAC
TAAGACACTTATATTTATCACTTTCCAGGTCATCCACTTTCTCTTCTGTCCTTACAAAATGACCTCCACTTCTTAGGGCCTCTGTGCTTTCCAC
ACAGCATCTGGAATGTGTGGAAATGTCTTTGCTCTATGTCTCTCAGAGTCACTACATACTGGGAACCCCCTTCCCCGTATCGTTTGAATGATGA
AGGCCCTAAAGGTGATAGCTTAGTTCCTACAAGGTCCCAAAGGGCCACCCAACCCTTCCTTCCTTGTCCTTTTCTTCTCTCCCTCTACATTCCT
GTATGCCAGCCATGCCCACAGTACCACTAGCCTTTTCATGGCTCTCCCCCACCCCCACCCCCGAAGCTAGGTCTTGCTCAAGTCCCTAAGGCCT
CTAGTGCTTCTTGCCTPCCCCTCCTTTGTCTCCAATAGTTATTGACATCTCAACCATTCTTTTGCACATGGTCGTAATACCTCATAGTCTTTCA
GACTGTGTCATGTCTAAATGCAAGGACTTTGTTTTATATGACTGACTTCTCTAGTGCATGCACACAGCACCGTTCAGAATGTTGATTCTAAATG
ATTGACAGGAGACCGAACTAATCATATTCCAAAACTTAGCTGGCTCCCCCTTGCCTGAGGCTTATCCTAAAGCTGAATGCACCCTGTGGGACTC
CACAGATCCCCTCACAAACTGTCCATAAAGCTATCAACCTCACTCCAAGCTTATAACAAGGCTAGTTGACTTAAGCTGTTTTCAGGAAACAAAG
AAAAAAAATAGATCAAAAATGAAAAACATTCAACTTAAAGGAGCTGTGTCTCCTTGTCCTGTTCCCTGCCTCCCTCTCCAACCCCACCCCCATG
CTCTGTTTTGCTTTTCGTGCCAATGGCTGAAGACTATAATTTTAAAAACTGAGCTCACTTTTCCACACCCATGAAGAATGTGCGTGTGCACATG
CATGTTTCCACAACGACACTTCCTGTCTTTTCGCTTGTCTTACCCAGTAATACTCAACCCACCCAATCACATCCATCTGTCCATTCCTCCATCC
ATCCATCCATCCATTCATCTCCCCAGCCCTTCCTTATTCTAATGAGTTTGCGAGGCTCAGGACAGGCCAAAGCGGATGCTTTGTGTTTCACCCT
GTCAGACAGTTGTTTGATCAGGTTTGTGTTCCATTTATTCAGATGGTTTTTATGGTTCCTTTGTTGTTAAGGCAAACACTTTCAAACTCATAAT
TCTGTATCCTTATCCCTTCTGGTAGGCCTGTGCCATGTCTCAATGGCTTTCTCACAATGAGAAACCAAATCACTCTTTCCACCCCGTTACTTGA
GCAGTTTCTCAACATGCTTCTCCAAGACAAAAGCTGAGTCAAAGTTCAGGGTCCATATAGTGCTGGCCTCTCCCATCTGAAAGATCTCTGTCGG
TTCATTCTCTGATCACCCCAACTCCTCACCACAATTCTGGCCTGACCTCTCTGTGGGTGGTTATAAGACCCTGCCCCTTTCTCCTACAGACATG
TCTGAGAGCCTTCGTCAGCCTACAATGTGGACACATGTCTGCATGTCATTCCATAGCACCAGGACTATGAGGTGCGAGGCTGGAGTTGCCCTTA
CAGGAATGTCATGGGCCTGGACCTTGAGACGTTCTTCCTAGAGACCTTCATCTAGACATCACCTCTTAGATTTTCATCCTTCCCCAACATCCTT
CCATCAGTCAAAAGAGTTTGTATTTTTCCCTTGATTTATAGTAGTTTATCTTTTTAGAAAATCTTGTAAAGTGGCTCACAAATATTCTCACTTG
ATCCTTAGCATAACCCCAGAAGGTAGATAATTCATATACAATTTTGCGTCTACAAAGACACGGGTCAGGGGAGACCTGTGGGCTTCCCACGTCT
CACAACAAATAACACCAGCGATACCGATTGACCCAATCCTCCAACTTCAACTTCACGATTCTTCCTACTCCTTCAGCTCCCAGATTACACAAAT
AACATATTACACTAAATATTACTCACCCAACACCATACTTCACCAATCTAGTGCTCCTTAACAACTTATTGCTGAAGTAAATTTAACTTCTTCT
GCCCCCCAACACAGCATCTTCATAGAACGAACCTTCCTCCAAAACATACAGACCTCATCTGTCCTCTTTTGTTCTTTCTCATAGACCCTTCTTA
TCACTCTGTCACGACAGCACCATGCAACAATAATATCAACTCTCCCCTCAACAAAAGTAACTAAATACCAAACCATTTGGGCGTGAGTCAAATG
TTTCTCCACACCCACAAGTTGGGGTGTGGGCGTAGCCTCATAAGACACACACTAAAAACAACTCTTCCTCTTCATCCTCCCGGATTAGATGTCA
GTGTGAATTTGCAGTGCCTGCTCAGATTTTTGAGGTTTATTTTGTTTTTTTTTTTTTTTTTTTTTGCTATATTTATGTCTACTTCGTTTTAGAA
CTTATAAGGTTTGAGGTTTTCTCGGGACAACTTGATTTATAAAAGAAAAGTAACTCGTCTGGATTTTGATATTTCACTCACCACCTTGAATCTC
TGGGACATATATTCTCCACATGACAACCCTCAGTCACGTCAATACCCCTAGCCCTAGTTAGAGAGATTAACATGAAGGATAACCTAAGGCATGT
TGTGCATCACAGACATTAATTTGACCAACAGTGATCAGCCGATGATTTGTTGAAATCCACCCAGTATCTTCCATTAACCCGCAGTGAAAGAGAG
CCATTCACTCTTCAACCAACGTGTCCATNNNNNNNNNNNNNNNNNNNNNNNNNNNNNNNNNNTATCAGTGTGCAGTGTTTGTTCACTCTCCATC
CAGGACATGACGCTATCGGACTCACAAAGTATAAGCCAGGCAAGGACCAGTTATTTAGGCAGGAGAGAGAAATCATGGACACACATATGTCTTC
ATCTGCCTTGTATTAAACACTTCTTCCCCACCTCCTACCCTTAGACCTACTCAGACACGCCATGTCTAGGGAATGTCTAGGGAACAGGAGACAC
GTAAACCTGGAGAGCTAGATGTCAGGGACGACCATGGTGGTATGTCTGACAGTGAGGAACCTAGGTTTATGGAGTTTAGGATGCAGACTACACC
AAAACATAACAAACGCATACTGAATGATAATATGGAACTACATTCCACATCTTCAGTCCTAAGCAGTCCTGAACACTATGTCACTCAGTTTGAA
GTATCACAGGTCCAGTTACACCGAGCCACCCATCACACAAAAAGCAGCATACATTCAAAACTGGGGAAGCCAGAGGTCAAACATGAACAGCCTT
GGAGAGGCTCTCACGAAACACAGTGTGACAGGCACCAGGTGGTCTGTGCTCAAATGACACTTTCTCACGAGACACCTCTGTATTGCCATGTCTA
TTTGTGGGGGACACGTGTGTACATTTGGGCCCACAACTATAGCCCTCTACCCATCCACATACATCGACGCCAAACACACACACTCGCTGTTCTG
TTTTATCACTCTGTCCCTGCTCCCTTTCACACACTCTCTTACTAAACCCTCGAGTTCACCATTTCTCGGCTACCCTGACTGTCCATCAACCCTC
GGTAATCTTCTGATCTGTGCCAATCCCTCTCCGTTCCCACGCACGTGTTAGAAGTGCACACAGACATGTCAAGTTTTTATACGCCCATCCTTGG
GATCTGGGCCCATGTCCTCGTGCAGCAAACAGTCTTACCATGGACCCATCTCGAACCTCAACCTCCTACATTTCAAAAGAATGGTCTAACCCCA
TGTCAGCAGACATTGTTCAGTGTTTTCTCTTCTGTTAAAATATAACTTCATTGCTAACTCTTCTGCCCCGAGACCAGTGCCAGCGTAGCGGGTT
TGATAGGTATTCAGGAATAAAATGAGTCTCTGACTCCATCGCACAGTCTGCTCCCCCCACCTCATGTCCCCTCCTTCTGGGAGATATGTAAAGG
GAGCATTTTCTGCCACTTTTCTTGATTTCTCCACAGGTCCTCTCCTTGGAGGATCACAGACCATGGGCAAGAACACTCACCACCGGCCCCAGCC
AGGTATGTGATTCAAATATGTAGCCTCTCACTTGTGTGTTATACAGTTGTGGAGTCAGTCAATGGTGGAGCAAGACAGTGTACAGTTGGCTGTC
CATATCTCTCCCTTTTAGGCCTCCGCATTTAACCAAACACAGGCCAAIAATATTCAGGAAAGAATCTACATCTGCACTGACTGTGGACACACTC
GCTTTCTTGTCATTATTCCATCAACAATACAGTACGGCTCTTTGCATAGCATATGTGTCATGATGGTAATCTATGATTTAAGGAATGTGCATCC
ATATGACTAGATTGTATGCAAATAACCCATTTTATGTAAAGGACTTGAGCACCCACACATTTCACTATCCTTCACAGACCTTAGAACAAATCCC
CTGTGTATCCCAAGAGGCAACTCTAGTTCACACATTGTCTCTTCTTTCCAACACACTATCTGGCAATTAACCACCAACTCCTCCAACCACGGAG
CGATCTGTTAAAAGGAACTTAAAACTCAAATGGTCCAATGCCTTATTTCGTGGAAGAAAACAGGGGTTCCGAAGGGTGAAAGGATTTGCTGAAA
CACAAGCAGAGCTGAACTTCTTTAAGTTCCACACCCCCCACTCCTTCTCCAACCATTTTACATTTTACGAAACCATACACAACTCCCTTCACCT
AGTACATACGCACTCAACACATAACACCTTTTCAACCTATCCACCTCCACACCCTTAATAAACAAATCACTTAGACACTCCACTCTATAATCCC
TCCGTAGCATGGCCTCTTATGATGGGATGCCCTTCTTTCTCACCCTGACCCCGCCCCTGCTCCTCCTTGCTTGCTTCAACAAACAGGAAGTTGA
CAACCTACCTTGACTTAATCCTTTTCTGAGCCAGAGCCCTCTGTTCACCTACCCCTCTCCCCACTTGTCTTCTCGCCAGACCTCCCACACGAAC
ACCCTACACAGATCTGAGGAGAGCCATTGCACTCAGCTCTGCTGTCTTAATTAACAATCTGAATTAAGATCTGAACAAGCTATTTGCTTTGGGG
TGTGCAAACATCCTTCTTCATTTCCAGCCAAAATATAGAAAGAGAAATTGTACGAAAAACTGAAATTCAAGTCAAAACCAACTCAGGTACACCA
AATTTTTAAACAAGTTCCAACAACAACAACAAAATTGAATATCTACTCAACAATTTCAGTTTCATCAAAATTTAATAAAAAAGTGTGGACTGAA
AGCCTTCAAGAACTGTTAAATCAATTCTTTTTAATTCATTAATAATTACTATTATAATTGAAAAAAGCAGTGTGTTTTTAAAAAGGAGTGACTT
CATAGCTAAAATACAAATTCTGCTTACTGTTCACATTTTCAAGCTTAAAATCACAGAGTTTTGGTAGAAGGGAAGAGAGCCCACCAGCCCAACC
CACTCTTCATAGCTGAGAAAACAAATACCCAGAGGTTGTCCAAACCATGATTTAGTTCATGACATAGCTGGGACTAGAACCCAGGCTACCTAAT
GGTTTTTATAGTCCATCGGAAAACTCAGACATGCGTAATGTCTTCAGCATTAGAAAGATCTATTAATCGCTAGTAATTGCTGAGGAACCTGCTT
TAAGCATGTTWAATAAGCAATCCTTCAGTTCATTCACTGCCTCCTTGAATTTAGCCAGATGCTTTCCAAACGTGTCGGCGATTTTGTTTGGGCG
CTACTCACAGCATAATCTAAAACTTTACAAACCAGGTATGAAGCAACAGTCCTATTACTCCTCTACCTTCACTGGGCCATAACTTTGATCAAGG
CCTCTAATCAAGCTTTCCTATGGCCCTGAGATAAAAGTAGGAACCGTTGAACTCTCCTTCATCTTGATGCTGCTCTCAGATTATTTGCTGAGGA
ATGAACTAAGCTTTTTTTTTCTTTCTAGATCCTTATCAGATCCTGGGGCCAACCAGCAGCCGCCTAGCAAACCCTGGTGAGTTAACTTGAACCT
GCAAGCCTTTCCCTCCAGAGCATTCCTTATATCTGTAAGGTTACACAGAAACCTTACTCCTCGGTACGGTACAGGCACCTGTCTCCAGACTGCA
TGGGCTTCCTTACTCAAATATTCAACTGTCCACAAACAAGAGGCAGGGCCTGTTCATCACTAGCAGGGTCTGCTGCCACAAGACGTTTCTGCAC
AACAAGCACCTCTGGACAGAGGTTTATGTCCATGGCAAATGACTCACATCGAAGCTCCCCGTTAGGGAACCTATTCTCACTTATTCCTCATCCA
GGGCTCATGGATAAATGTCCCCAACTGTTGTGGTTTTGACTTGAGTGCTATAGTTATCCAGCCTTTGAAAAAGGAAGTGCAAGCATCCCAAGAG
AGTTGCACACACAATGAACGTGACAAGATGTGAAGGATTCACTATTAAAAATAACTCTCGGATGTGTTCTTCTAAACCCAAACCATGGAGATGG
GGAGCTCAAGGCAACAAAAGCCAGGCCCACGTGCCTGCTGCACCTGCAGTGCTACAAGCTCGCTGGGCCTCCTCCCTAACCTTTAGCTAAACCA
TTCCTGCCCAGAAGATAAAAAGCCATCCAGCATCCAGCCCCTCCCGTTGCCTCTGCCCATGCGGAACTGAACACTAAGAGCCGTGCACTTTTCT
GGAAAACAGCCCAGCTTAGTGAACCCCAATTCTATGAGGTGCCTTCTCTCTGCTCTACCCCACAGCCACCCCCCAAGAGGTTCTTGGATACTTG
ACACTCTTTAAGGCCAATGTTCAATACTTTCAGCGATTTCAGTACTAAATCCAGATTAGATAGTCACTCAGGTCTAGGTAGAAACCTCTAAGGC
GAGGGTCAAAAATCTTAACAAAAGGATGTGGAAAGTTGGCTTCCCTGAGATCCTAAGAGCTTGGGACAAAGCCAGCATTCACCACAACCATCCT
TTGGGACAATCTGTCCTTAAGATCTAACCTTGCTTACTACGCTCATTTTGGCTGCGCAGTAGAGTAACAGTATATACTGTACCCTTTTTTTAAG
ATTTATTTATTTTATTTACGTGAGTACACTGTATCTGTCTTCAGACACACCAGAAGAGGGCATCAGATCCTATTATACATGGTTGTGAGCCACC
ATGTGGTTGCTGGGAATTAAACTGAGCACTTCTGGAAGAGCAGTCAGTGCTCTTAACCGCTGAGCCTTCTCTCCAGCTCCGTAATGTACCTTTG
GAAACTAGCTGGATAAGCCGGTCTTTGATGATGAGCAAGCTTTTGAAGTGATGGGTGTGTGAATTGCCCCTCTGTGATTGTCAACCACTATGTA
TGTCTGTCAAAATATCACCACATGCCCTGTAAACGTGTACAATTATCATGTGCCTATTTCTGTTTTCTAAAGGAAAACATAAAGCGTIGTCTCC
ACTTTCCTTTTTTGTTTTGTTATTTGTTTGTTTGTTGTTGTTGTTTGTTTGTTTGTTTGTTTGTTTGTTTTTCCAGATAGGGTTTCTGTGTAGC
AGAGCCCTGGCTGTCTTGAACTCCTAGACCAGGCTAACCCCCAACTCACACAGATCCACTTGCCTCTGCCTCCCAAGTGCTAGGATCAAAGGTA
TGTGCCACCATGCCTAACCAATAAAGGTTGTGGTGGTGGTGGTTGTTCTTGTTGTGGGGAAAGGACATGAGTTGTCATGTTTAGCAATCAGAAC
TGAGACTACTGTTCTTCTGTTTCCTCCTGCATGCAGGGAGTGGGCAGATCCAGCTGTGGCAGTTTCTCCTGGAACTACTGTCCGACAGCGCCAA
CGCCAGCTGTATCACCTGGGAGGGGACCAACGGGGAGTTCAAAATGACGGACCCTGATGAGGTGGCCAGGCGCTGGGGAGAGCGGAAGAGCAAG
CCCAACATGAATTATGACAACCTGAGCCGCGCCCTCCGATACTACTATGACAAAAACATTATGACCAAAGTGCATGGCAAAAGGTATGCCTACA
AGTTTCACTTCCATGGCATTGCCCAGGCCCTGCAGCCACATCCAACACAGACATCCATGTACAAGTATCCCTCTGATATCTCCTACATGCCTTC
CTACCATCCCCATCAACAGAAGGTGAACTTTGTCCCGTCTCACCCATCCTCCATCCCTGTCACCTCCTCCACCTTCTTTGGAGCAGCATCACAA
TACTGGACCTCCCCCACTGCTGGGATCTATCCAAACCCCAGTGTCCCCCGCCATCCTAACACCCACGTGCCTTCACACTTAGGCAGCTACTACT
AGAACTAACACCAGTTCCCCTTCTGGCTGAAGTTCCAGCTCTCACTTTACTGGATACTCTCGACTTAAAAAGGCACAGTACCCTTGAAGAGATA
AGAAAACTGGATGTTCTTTCTTTTGGATAGAACCTTTGTATTTGTTCTTCTAAAAAAATTATTATTTTTATGTTAAAAACTTTTGTTTCCTCTA
CCTGAAAAAAAAAGATCATTCCATGAGCCAGTCCACCAGTTTGGATTCTCAACCTCCTATCATCGAATGAGTTAAATATTTAGGTTACTGGAAC
CGTTTATACCATGATTCTGAGAAAGGAGTACGCATTTTCTTTACTCTTTTTTTTTTATGACCAAAGCAGTTTCTTATCACCACACGGGTCTCAT
CATTGTAGGATTCCCTACGATCATGAATCATGGACTTGACCAGGGTTGGTCTGGPTTGAGACTTAGTAAAAGTCAAGCCACGATGTTTATAATC
TTATCTTAGGAGGACTCAATTCACTGCATCGCAACTCGAACACTCGCTCTCAGGCCAGTGAAGTTTTTTGCCCAACTGGAATTTAAAAGATGTG
TGTCTATGTGTGTATTTAAGAAGCCATTATTATTACAAAATTCCTCACAATGGCCACTATGTGTTTGGGTCACTCTTCTCCTCAGAAATAGTCA
GAATATGAACAAAGAAAGTTTAACACAAACTCAGACACTCCTGACGGGCAGAGGATTAAATAACATTTTTTTGGAGGGTTTAATAACATTTTTG
GAGGGGTTTTTTTGTTTGTTTTTGTTTTTGGGGGTTTTTTTTGTTTGTTTTTTGTTTTTTGGTTTTTGGTTTTTTTTTGTTTTTTTTTTTTTTT
TGGTTTTGATTTTTAATGACAGTGAGTCCCAGAACTTTGAAAAGTCATGGGGATTTCTAAACTCAGATTCGCAAACGCTGTGCGTTTGTCAGAC
CACCAGACCAAGGTCAAACAATCAGAAGGCAACTAACTGTATAAATTATGCAGAGTTATTTTCCTATATCTCACAGTATTAAAAAAATAAATAA
TTAAAAATTAAACAATAAGTAAACGAGTTGACCTCCGTCACAAATGCAGTTTTACTATCAAATCAATCACTGTTATTTTTTTAAAATATAATTT
GTACATCTTTGTCAATCTGTACATTTGGGCTATTTGTACGTTTTTGTAACTGTTTTTTTTTAATAAGCATAATGTGACTATTGAAAACGAGGAG
TTAAAAGTCACTGAGTTTTTAGGAAGAAAAACCTAAAAATACAGTTATTTAACACGCATGCCCAAACAAGATCTGTTTAGACCTACAACGCTTT
AGAAATGTTTGTAAATAACAGAGTTGCAATAACCTGAAAAGGACAAACAAACTTTTCTCTGTGCACACGAGGCACTCTCCTGCTCTATATATGC
AATATATTTTTAGATGTGCAAATATATATATAATTTTTCAGGTAATCGTGACTTTTTAAACGATATTGTTAAGGTGACAACTCTTAGTCCACTG
AAGACTAAGTTGTAAAATAATTTGACCTTAATAAATTGTGCCTTCTTCTTTTTCTTCTTCTCTCAGAACTGGTGACATTCTTTTCTTATTTACT
TCCAGATCAAAGCCTTTCCCGGAGGGAAGTTGTTTTTATTGCTGGTGTGTGTGTGTGTGTGTGTGTCTGTGTGTGTGTGTGTGTGTGTGTGTGT
ATGTAACAACACACAGCACACATTTAAAGGTCAGAAGGCAGTTTTTATCAAATAAATCAGTTCTCTCCTTCCATCTTAGTTTTTGAGGCAGAAT
CTCTTGGTATGTCTCCCACCCTGTGGACTCCAGACACACAAGCTTCCAAAAAGCTCTCCCGCTTCCACCTCCCCTCTTACCACAGAGCACTGCG
ATTGTCGGTGAATACCTCCACGTATGGCTTCTTTCATGAGTTCCAGGGATCAGAGTCAGTCATCAGGCTTACAACGTCTCACGTTTATCCACTG
AGCCCATCTCATTGGCCCCGAGCAAAAAAATAACTTGCCTACTTATTCTTGTACCATCGATAATCTCCTAACTGCATGTGCTGCAGTACAGTGG
AAGACACAGTATTCTGTGAGTTTCAGATGCTTGTTAACAATGACGATTTTAAAGCTTCTCTAAGCCATTAAGATACTGTATGACCTTTGTAAGT
GAGAGACAGACCTAGGTAAANNNNNNNNNNNNNNNNNNNNTGAGAGACAGACCTAGGTAAACTATATCCAGGGAACTACAGCAGCAACCGTCTC
CAGGACCTGGCCAGGTAGACTTGACTCTGTTCCCCACAAGAAGGCGACCTGATGCTTCAGCAGAGAACAGGAGTCTAGCCTGACTTCAACCCCA
CACTAGGGTCTTACGTAGACTCTCTGGCTCTATWTTTCAGCCCAATAGAGAAGCTTGCTTCCAACGGCTTCAGCGTTAAGCATCATGCTCCTCT
CCTTTACAACAAAGATGACTAAAACTAGAAATAGCTGGTGTTGTTGCAGGGACTCTCATAGAACTAGTAGCTCTAGAAACCCCTTAAAGAAGTT
TGCAGCCTCTGGTCCTCACACACAGTAATTTCTAGACCAGGTAAGCCTACGTGAAGAAGATGAGAGGAGTTCTGAACACTGGTCTCCAACTTCT
AAAACATGCACCCTACATTATAAAATACATTAAGAACATATCCTTTATGTTTATGTATATGCTGGTTTGTATCTTGCATTGACAAAATATATAC
CATTATACATTTGTAGATCCCTCCAATCATGACTGAAAATATTCAGAAAGTGTTTTAAATTATTGGGTAAAGAGAGCTATTGAGGTTAAGAGCA
ATTGCTGCCCTTACAGAGAACCCAGGTTGGGTTCCCAGAATTTACATGGGGTGACTCACAACTGCCTATAATTTTAGCTTCCAAGGATCTGTTG
CCCTCTTCTGGCCTCCTCAGATATCTCTACACTCACAGCATATGGTTACACAAACACACACCCCTATACACATAAATGAATAGTTGCATCTTTC
CTGAATATATACTGACTCTTTATTGGCATTTTAATCAAATCATGAGTGATAACAACTAATTACAGTGTTTACCTTGCACTTGATATGATACATT
ATGTAGATGTGATTTAAAAGATACGAGAAGAATATCTAAACAGTGTGCCATTTTAAATAAGTGATTTTGGCATCTATGGATTTTGGTGTCTTTA
GGGTAGTCCTGGAACCCATGCTTATCCAGAGGAAAATAAGATTAAATATTTGTTATAAACAAAAAGATGAGATTTTAGAAGGTGATATGAAAAT
GTTTAAGCTGACATTCTGTTTTCTTCCCTTATTTATATTGCTTCATCCCTGGTTCCAACATTCAAAACGGAAACAGTGAACATTACTGAGACGA
ACACATATATTTACATTCATACATTTGCTTTCTAGCAAAGAATAACTACTTGGCATTAATGGCTCATGCATAGAAAGACATGAGGCAAGTCAGT
TATGTTCATAAGTAGTCAACTTTCAAGTCTCATAGTCAACTTGAAAGGTCTCATGTCAGTTTGCAAATCTACAAAGTCCTATTAAGGGGGAAAT
TGAGAGGCACATATCCCTGATGCACTGCTAAAAGAACAGGATGCTCACACCATTAGTTCACCTTTAAAAACGTGTGTGTGTGTGTGTGTGTGTG
TGTGTGTGTGTGTATTTGTGCATGTCTGCCTCTGTCCCACCTCCCTCCTCGTAACTCGACTTGCCACATCAGGATGCCTACATCCTAACCCTGA
AACTGGAGTTACAGGCAGTTATGAGCTGACTGCCATGTGAGCTGCCCAACATGGATGCTGAAACACATGCCTATGTCTTCTGTGAGGGCAAACA
GTTTCAACTCCTGAGTCATTTCTCAGCCACTGGTTAGCCCTCTAGACAGTTTTGTTTCCTACACAAAGCTGCAATGCTTTCTCACAATCCTGTA
CCCAGACTCTCATGGTGGTTCATTCCATGATCCAAAAGCTGGTCTACCCTGACAGGAGCAGAGCAATTTCCTCCATCAAGCCTTCGCTCAGGGA
GGAATGACATTTAGTGCCCAGATTGAATGGTCTCAGCTGACAAACAGGCATTTATGTCATCCTGACTGTCAGTCCCCTCTACCACTCTGCACTT
GTGCCATGAAGGCCATTACATCTGATAAACTCTGCCAGCAAAGCAGAGAGGGCACAGCAACCCTGTGAGGGACTCTAATGGAAACCGATCCTCT
CCATGTCCCCACCTCAGCTCCGGACCTGTCCACAGCACTTCAGAGCAGGTGGCTGTCTTAGTCCATTTGAGAAGTCATGGCAGACTGCTGTAGG
CTCGCTGGCTTATAAACAACAGAAACTCAGTCTTCACAGTTCTGGAGGCCAGAATTCCAGTGCCAAAGCACCAGCAGATTTGTCATTGATGGGG
GACTCACTGTTTATTCCTGATTCACAGGAGGTCCCTTCGCACTGTCCTCTCACAGAGTCCCACGCACCAAGCACCTTTCTGACATAGTGTCTGT
GTGTGTGTGTGTGTGTGTGTGTGTGTGTGTGTATCTACGTTTATTCATGAGAGCTCCTCTTTATAGGTCCACCTCCAAATAGCCACACATTGGG
GATTAAGCTTTAATATATGAATTTTACAGGGGAATGGAGGAATATTCAATCTACAGCAGAAATTTTAACTTCCTGGTGTCAAAATATTGTTGCT
ACCCAAAGAAAGTTGTATTTTCAATATCTGTTGCTTTGAAAATTWTTTAGAAGTCAAAAAACACTAGTCATTTAAGAACAATTAAAGTGACCAA
TAATACCTGCATGCAGTTGGGGAATGAGAATAACACATGAGTTCTGTCCATGGCAAATGAATGAGATGTGGTTTCATAAACAGAATATTTGCAC
TCGAAACCAAGTGGGAGAAAAATATCCAGAATACCAAGGAAGAAAACAATATCCATTAATCCCAACCAAGACACAGCCAGAGCAAGATATTATT
TGTGGATATTTTAAAAACCACTGCAAATCAAAGATTATTTTTAAAAATTGCATCTATATTCAATGTATATTAATATTTGATTACCCCTAAATAT
TATTTCACTATTATATATAATAATATTTATAAATATATAAGGCATTATATATACAATATTCTCTTATTCCATAAATAATACAGTGCAACAATTA
TTTCCACTGTTCTACTGCATTAAGCAATAGAAGTAATTTAGAGTGATTTAAATATATAATGCATAAAATATATAGATGCACTATGCCATTCTAT
ATAAGCCACTTGAACAACCAGGGGTTTGGGTATCTCTGTGACTTTCTGAAACCAATACCCTTCAAATTTCAAGGTACAAMAATTAGAAGTTTTT
TTTAAGATTTACTTCTCTTACTTTATCTTATCTACATGGGTGTTTTACCTGCGTATACACATGTGTGCCACGTTCAGTTCCCTGTACTTAAGGA
GGTCAGAAGAGAAGGGTTAGATCCCTGTTCCTGGAGCTACTGGTTGTGAGTCACCGTCTGTCTGTATTGAGAACTGAACCCTGACCCTGTGCAA
GAAGTGCCCTCAACAGGTGAGCCACCATCTCTCCAGCCTGCTTTCTATGAGAAAGTTTGGACTCTGAGGACTTGCTGTCACACCGCACTTTCCC
TTGTCTTTCTTTATTAATAACCATAATGCAAACATGTTGCTTTGAAAGACAGCTGGGAAAGCACACTTTGGAAGAATGTGCCTGGGGACATGGT
CTGTGAGCATCCCCTCTCCTGCCAGCCAGCATCCTGTACCTTGCTGTGGTCTGACTCTTCACACGGGTTCCTTTATGTCATCGGGAGTGGGGGC
TTGCTTCTAGAACTCAGGAGGPAGCAAAGAGGTGGAGTGTCTGCGCACACCACCAGCGAGCCTGTAGACTAGACAGGGGCAGGGGTGGAGTTCT
GGTGAGCACAAAGGCTTCACTTTTATCCAAGAAGACTTTGTGATTTCTGAAAACATGCACCGAGCATTTATTTCATCACTAGAAGGCTACTGAA
ACGGATACTGCACGCCTTTAGCCATAGACCCTCTAGAGCATTAGAAGAGGTCAGCTGATTAGAATACTACAAATCCCAGGTTCCCTGGGAGGAT
CGCCACTTCTGAGAGGAAGTGGTTCAGCCAGGCAAACCCCCAGGGCTGCAGCCAATTGAGAAAGAAAATGAAGGGAAGTTTTTGAAAGAAATGC
CGGGCTCATGTCTGGGGTCTGTCTCCCTCTCTCACTCCTACTTGGCCTCCTGTCTAATTGTTACAGCCTGTCTGAGCTGGCAAATTCCAAAGCA
CATAGTCAATTTACACGTAGCTTAAAAGCTCTAGAGGAAAACACATTTGCAGTCAGAACATTCACTTGCCTACAATTGCTAGGTTAACCTTCTG
GGCTTTCACCCAGTTAACTCGTGTGTTTTCTTAGTTGGGAGAGAGAGAGAACTTGGGGAGATTAAATGAGTGTGAATATAATCCCAGGGACCCT
GCGTTCAAATTTTGACCCTTTCACGTAGTAGGCAAATTATCAATACCTACTGACTAGGGTATCATCTCCTCCCACTGATCCTGTCTAPACACAC
ACATCAAAGAAACGACCTGGAAGTCCATTGCAAAATGCTGCACAGGATGTGTGTGTATAGACAGTGTCACCTGCTACATTTCTCAGCGGACAAT
ATTAAAACTGTAATAGCTAGGAGCCGCTCTGTCCAGGCACTTAATGAAGATTTTTTTTTTATTTGTGGTCAAGAAGGTGTTTTTTTTTTTGTTT
TGTTTTGTGTTTTGTTTTTTTGTTTTTTGTTGTTTTTGTTTTTCAAATGAGTGAAAAGTAGGAGTAGATTGAGTTTTCCAGACGGTATTTATAT
GTCTGCCATCGCCAGCCTCACTTTGCCGTGTGGGTGCTTGTCCTTCACTGGCTCTGTATGGTCACCTCAAGTCAGTAGAGCATGCAAGAAGCTT
TACGGCTGCAAATAAAAGAGAATGGCCTAACGTGAGGCTGAAACGGAACTTTCTCAGAAGTATTGGCTAGATTGTTAAATTGCCTAAGAAATAG
AAGTTGGCAGCTGCAATTCCCTGCCTTGATAAGCTTGTGCCCAACATTCTCACAGACCTACATTTCCTCCGAGGCTTCACGGGAGGTGGGCATA
CCGCTCTCTTGTTTGCCACTGTGGTGACACTGGTTCGCAGCAACTGGTCACTTGTAAATGTGGAGTGAAGCAGAAGAAAGCGTCCACAGTCAGC
AAGACTGAGTTGTGAATCCAGCTGTCCCTCCCTGAGTTATGAATTCTTGTCTCTGAGGTTCACTTCCTCATGCCTAAAGCTAGGACTGTTGTAG
TATCATCCAGGGATATCAAAGAAGTAACGTAAGATCAGGTAATGAAGTGCTTGCTATCTGTTTTAAAAAAAAATACGGAACTTCAAAATATTAT
ATGGATGTCTTAGTCGATTGATACTTCCTTTTTACATGGCTCTGGTCCCCCTGATATAATACAGAGTTAAATTAGGAGCTGAGAAGATGGCTCA
ATGGATAAAGTGCTTGTTGCTCAAACATTAGAACCCGCATCCTAACCCCAAGCTCACACTTAGGAAGCCTAGCTTGATATCTGCATGAGTAACT
GAGCTGAGTCAGGCAGGTCCCTGAAGTTCTCTGGCCAATCAGGGTGCTCCAAGCTCAGTGTAGAGATCTGGCCTCAAAAAAAAAAAAAAAAAAA
AAAACTATACTGTAAGAGAGGAAGACACGAAAACATGACATCAACAGGGAGAGAGAGAGAGAAAGAGACAGAGAGAGAGAGAGAGAGAGAGAGA
GAGAGAGAGAGAGAGAAATGCCCTACTTTATTGTACATAACTATTTTTAGATTTCAATCACTTGGGACAGGAGAGAGATGCTTGGTAGGTAAGA
GACTTGTCAGGGTAAGAGGACCTGAGTTGAAATCTTAGTTCCATACACATCTTTAATCAACATTGTGTGGTAGGAAGTAGAGGGAGACAAGAGT
TTGTATCCCTGTGCCTTGCCAGTTGTGAGTCTAGTTCCAAGTTCAATAAAAGACCTTGTCTCAATGGAGTACGATGAAGGGCAATAGAACAGAA
CACCTGAAACCATTCTCTAGCCCTGAGGATGTGTGCACTAGCCTGCTTCTGCACATACAAGGTTGCATACACCACATTCACTCCGATGCATACA
CAGTCACACACACAAAGACAAAAATTATAAAGCCTTGAGATCATCACAAACTTACAAAACAGCTGGAAAAATATAAGTGAGCGTCTTTTCTTGG
GCTGTTTGAGAGGAGACTCCTGACAAATGCTCCATTAACTCTGGATACCTGAGTGTATATTTCTGTCAAACATCCGTCTTCTCCTAACGAGTCC
ACCACAAGTCAGAGAACCAGAAAATTAACCTGCATAGGTTACTTCCCTGACACTCTCTGGCACCAATCACTTTTCTTTCTGCATGGATATTTTT
TTCCAACTCTGGGAACTTAACCAACCCTGTCATATACTGCTCTACTCTTTATTTTAAGGCAAGACTTCACTAAATTGCCCAGCCTCTCCTTAAA
CTCCCTTTGTAGCCAAAGTAATCCTTATGATCCTCCTGCCTCAGTTTCCATAGTAATGCAAATTAGCAGCTTTGTGCCACCAAGCCAGCCCATT
ATCATGTGTTGTAGGAGAAGAAAGCACCACCCAGAATCATTTGGAATGCCCAGACTTCCCCTGACTTTCAGAATCTTGGGAATTTTAGAACCCC
TTGGGCTGGCCACATTCTAGAATAACTCCCAGGGTTAGGTGCTCGCGTGTCTCTTCATGGTTAGGGCTGCCTTCCCTGTGAGCAGCAATCATAG
AAGTCCTCCCAGGTTCCTCCCCTGGCAGCCTATGTGGAGGTACATGCCCTCAATGTATCTCGATATGAGGGGGTTCACTTAGATGGATGGTTGT
GGAACGCATGATGTTTTTCAGGTTCTTCTAAAAATTTACATTTTTCCTTTTGTAATTAGCATTTTCTGCAGTGTTCCTCATGGAATTATGGAAA
TATCCCCCACTATTAAATTCTAGTCCATGTGTGTGTGTGTGTAAGTATAATAAGTGTTCCTAAAGGTACATCTCTAATTAGTCCTGCTTTCCAA
TTTTATTGAGAGACTTGAATTTGTTCTTCTCATTAGTTTGATGATGATTTTGGCCCAATAGGAAACCATTTAAGTGGGTTTCAACTTTAGCTTA
CGCATGCTAACTTCCTTACTTGTTCCTTCAAAAACACATTTAGGGCTCCAGTCCCTAATTCACGGATTCCTGCATCATTTTAGTGASAAATGAT
TTTTCAAAGCCAATATCTGTGTGCTAGGTGTGCCCATTGTTAGTGGTCTTATCTCTAAGATTTCCCAGAGGATAGCACTAGGCATTATATGCAT
ACATAATAATATGCATATACTATGTGTTTATATACATTTCCATATGTTCATGTATACACATTCATAAGCTAATATGTACTCACTCCATATTCAT
CTCAATCTATATTGAAAATCCTGAGTTCATTCAGATGTGTCCATTTCCAACCAGGGAGCGCACGATTCCTCTACTTCTTCCTTTCCATATTGTA
ATGAAAACCATGTTTTTTGTTTAGACATACAGAGTATCCTTCCTTACCAGGCCCTGCCAAAAACCAGTTTTTCCTCTCTGGACTGGCCGCACCC
ACACGTGACAGGCTCCTTCCCTTGCTTAGGCCAACCCCATGGCCCTTCCCTTCACACAGTGTATGCCCTCTTCAGTTGTTCAAACATAACACCA
CATGCCATCTTCCCTCTCCACAAGGACACAGTCTCCAGCCTGTGGCTGTACTCTGACTCCCATACACAACACACTACCACAGCTTGCCTTGCCC
TGCTGAGCACTACTGCTCACATCGGGCCAACCCAGTGCCACTGCACCTACAGCTTCAGGAGGTGAAGAGATTGTCGAGGCGGGATAGATGTATT
AACCTGTGGCTTTTATCTGACTCTGTCTACACGTACACATATGCACCCATGCATGTGGGTACTTTCTGAGCTAGAAAATATTAGAAATGGGGAG
AACAATAATTATAAATTGGCACCCTTCTAATGATCTTATGTTCCATTATGATATTTTTTTTCTAAATGAC
MOUSE SEQUENCE-mRNA
AAAGTGAAGTCACTTCCCAAAATTAGCTGAAAAAAAGTTTCATCCGGTTAACTGTCTCTTTTTCGATCCGCTACAACAACAAACGTGCACAGGG
GAGCGAGGGCAGGGCGCTCGCAGGGGGCACTCAGAGACSGCCCAGGGCGCCAAAGAGGCCGCGCCGGGCTAATCTGAAGGGGCTACGAGGTCAG
GCTGTAACCGGGTCAATGTGTGGAATATTGGGGGGCTCGGCTGCAGACTTCGCCAAATGGACGGGACTATTAAGCAGGCTCTGTCTGTGGTGAG
TGACGATCAGTCCCTTTTTGATTCAGCATACGGAGCGGCAGCCCATCTCCCCAAGGCAGATATGACTGCTTCGGGGAGTCCTGACTACGGGCAG
CCCCACAAAATCAACCCCCTGCCACCGCAGCAGGAGTGGATCAACCAGCCAGTGAGACTCAATGTCAAGCGGGAGTATGACCACATGAATGGAT
CCAGGGAGTCTCCGGTGGACTGCACTGTCAGCAAATGTAACAAGCTGGTGGGCGGAGGCGAAGCCAACCCCATGAACTATAATAGCTACATGGA
TGAGAAGAACGGCCCCCCTCCTCCCAACATGACCACCAACGAACGGAGAGTCATTGTGCCTGCAGACCCCACACTGTGGACACAGGAGCACGTT
CGACAGTCGCTGGAGTGGGCTATAAAGGAATACGGATTGATGCAGATTGACACTTCCTTCTTCCAGAACATGGATGGCAAGGATTGTGTAAGAA
TGAACAAGGAGGACTTCCTCCGAGCCACCTCCGCCTACAACACAGAAGTGCTGTTGTCGCACCTCAGTTACCTCAGGGAAAGTTCACTGCTGGC
CTATAACACAACCTCCCATACAGACCAGTCCTCACGACTGATGTCAAGGAAGACCCTTCTTATGACTCTGTCAGGAGAGGAGCATGGAACAAAT
AATATGAACTCTGGCCTCAACAAAAGTCCTCTCCTTGGAGGATCACAGACCATGGGCAACAACACTGAGCAGCGGCCCCAGCCAGATCCTTATC
AGATCCTGGGCCCAACCAGCAGCCGCCTAGCAAACCCTGGCAGTGGGCAGATCCAGCTGTCGCAGTTTCTCCTGGAACTACTGTCCGACAGCGC
CAACGCCAGCTGTATCACCTGGGAGGGGACCAACGGGGAGTTCAAAGGCACCGACCCTGATGAGGTGCCCAGGCGCTGGGGAGAGCGGAAGAGC
AAGCCCAACATGAATTATGACAAGCTGAGCCGGGCCCTCCGATACTACTATGACAAAAACATTATGACCAAAGTGCATGGCAAAAGGTATGCCT
ACAAGTTTGACTTCCATGGCATTGCCCAGCCCCTGCAGCCACATCCAACAGACACATCCATGTACGACTATCCCTCTGATATCTCCTACATGCC
TTCCTACCATGCCCATCAACAGAAGGTGAACTTTGTCCCGTCTCACCCATCCTCCATGCCTGTCACCTCCTCCAGCTTCTTTGCAGCAGCATCA
CAATACTGGACCTCCCCCACTGCTGGGATCTATCCAAACCCCAGTGTCCCCCGCCATCCTAACACCCACGTGCCTTCACACTTAGGCAGCTACT
ACTAGAACTAACACCAGTTGGCCTTCTGGCTGAAGTTCCAGCTCTCACTTTACTGGATACTCTGGACTCTAAAAGGCACAGTAGCCTTGAAGAG
ATAAGAAAACTGGATGTTCTTTCTTTTGGATAGAACC
MOUSE SEQUENCE-CODING
ATGGACGGGACTATTAAGGAGGCTCTGTCTGTGGTGAGTGACGATCAGTCCCTTTTTGATTCAGCATACGGAGCGGCAGCCCATCTCCCCAAGG
CAGATATGACTGCTTCGGGGAGTCCTGACTACGGGCAGCCCCACAAAATCAACCCCCTGCCACCGCAGCAGGAGTGGATCAACCAGCCAGTGAG
AGTCAATGTCAAGCGGGAGTATGACCACATGAATGGATCCAGGGAGTCTCCGGTGGACTGCAGTGTCAGCAAATGTAACAAGCTGGTGGGCGGA
GGCGAAGCCAACCCCATGAACTATAATAGCTACATGGATGAGAAGAACGGCCCCCCTCCTCCCAACATGACCACCAACGAACGGAGAGTCATTG
TGCCTGCAGACCCCACACTGTGGACACAGGAGCACGTTCGACAGTGGCTGGAGTGGGCTATAAAGGAATACGGATTGATGGAGATTGACACTTC
CTTCTTCCAGAACATGGATGGCAAGGAATTGTGTAAAATGAACAAGGAGGACTTCCTCCGAGCCACCTCCGCCTACAACACAGAAGTGCTGTTG
TCGCACCTCAGTTACCTCAGGGAAAGTTCACTGCTGGCCTATAACACAACCTCCCATACAGACCAGTCCTCACGACTGAATGTCAAGGAAGACC
CTTCTTATGACTCTGTCAGGAGAGGAGCATGGAACAATAATATGAACTCTGGCCTCAACAAAAGTCCTCTCCTTGGAGGATCACAGACCATGGG
CAAGAACACTGAGCAGCGGCCCCAGCCAGATCCTTATCAGATCCTGGGGCCAACCAGCAGCCGCCTAGCAAACCCTGGGAGTGGGCAGATCCAG
CTGTGGCAGTTTCTCCTGGAACTACTGTCCGACAGCGCCAACGCCAGCTGGATCACCTGGGAGGGGACCAACGGGGAGTTCAAAATGACGGACC
CTGATGAGGTGGCCAGGCGCTGGGGAGAGCGGAAGAGCAAGCCCAACATGAATTATGACAAGCTGAGCCGGGCCCTCCGATACTACTATGACAA
AAACATTATGACCAAAGTGCATGGCAAAAGGTATGCCTACAAGTTTGACTTCCATGGCATTGCCCAGGCCCTGCAGCCACATCCAACAGAGACA
TCCATGTACAAGTATCCCTCTGATATCTCCTACATCCCTTCCTACCATGCCCATCAACAGAAGGTGAACTTTGTCCCGTCTCACCCATCCTCCA
TGCCTGTCACCTCCTCCAGCTTCTTTGGAGCAGCATCACAATACTGGACCTCCCCCACTGCTGGGATCTATCCAAACCCCAGTGTCCCCCGCCA
TCCTAACACCCACGTGCCTTCACACTTAGGCACCTACTACTAG
HUMAN SEQUENCE-GENOMIC
TACAGGGTACAGTCCTGGGAGCACGCAGAGATCCTCTTCTCTGTGCTCACTTAGGCTATACCCTTCATTTGTAAGACACCATTMAATAAAGTAC
TTTCGTCTGCAAATAATTGCAATTGCATCTTCTAGGAATTCTTTCTCTGGGTCATCCACTGCTGAGCCCCCTCCCCAGGAAGTGGAATTGTAAG
TGAAAGGGGAAAGGCACTTGGGAGGGGGAATGATGTTCAACAAGACTCCTTGAAAAGTCAGCCGGGCTCCAGGCACGGTGGCTCACACCTGTAA
TCCCAGCACTTTGGGAGGCCGAGGCAGGTGGGTCACCTGAGGTCAGGAGTTTGAGACCAGCCTGACCAACATGGTCAAACCCTGTCTCTACTAA
TTAGATGGGCGTGGTGGTGGGCGCCTGTAATCCCAGCTACTCAGGAGGCTGAGGCAGGAGAATTACTTGACCCTGGGAGGCAGAGGTTGCGGTA
ACCTCAGATCGCGCCTCTGCACTCCAGCCTGGGCGACAAGAGTGAAACGCTGTCTCAAAAAAAAAAAGAAAGAAAGAAAAGAAAAGTCAGCCGG
ACACTCTGAAGCTCTGTGGCAGATTTGGCTGTGTGCTACGGCCTAAAATTGGAGACGGCAAAGTGGAAACGGTTTAGGGGAGGAGTAGAAGCTT
TGCAGTCAGGCCAGCAGCATGGAGACTCATGAGGTGAGGGGCCAGAGGCAAGTAGCAAACCTCTTTAAGCCTCAATTTTCTTTTCAATAATATG
AGGATCCTAACTCATATTTTAAAAGGTTAAATGAGGTGATGATAGTAAAAGTTCCTTGGAAACTTCAAGTCATCAAATAATACATGTTCTATTT
GATCGTTCTCATTTAAAAATGTGGTCCTTGTTTGGTTTTTGTCTGTTGTTTATTTTGTTTTTGTCGTTTGGAGATAATTCCACTATGTGTCTAT
CAGAGGACTTAGACTTTAATTCTGAGATCGATTCCCCCCTCACTGTGTCAACCTAGAAGGGTTATGCTTTGTGCCTCAGTTTCCCCACCTGGAC
AGTCATGGTGCTGATTCCTGCCAGCCAGTGTCAATAACCACAGTGAAAGGATACTCAGACAGTCACCTCTACAGCCTTTGAATATGGGTTTTCG
GTTGCTGAGTAAAATGCTCGGAGACGTTCCGGTTACTATGGCTACATAAGAAATTACCCCGAAACCTAGTGGCATAAACCAATTATTAGGCTCA
TGAGTTTTGTTATCCTTCACTGAAGGCTCCTTCACGCTCAAGTCTGGAGGTTGACGCTGTGGTTGGCTGTGGCCTCGGTTCCTCTCCTGCGGGC
CTCTCCATACGGTTGCTCAGCTTGGGCTAATCTGAGCTTCCTCACAGCATGGTGGCGATTTCCACGGACTAGAGGCCCAAGAGAGAACAAGAAG
CAGGTGGAAGTCATAATACCTTTATCACTTTGTCCCGGAAGTCACGCAAGGCCATTTCTTGAGGCAATCATAAAGTTCCATCTGAGTTCAAGGG
GGAAGAAAATAAGCTCTGCCTTTPGATGGGAAGAGAGAGGCAAAGATAAGAAATATTCTGATGGTCATTTTGAGAAAATGCGACTGTGCCTCAT
GCAAAGGAGTTTTCAGTTAATGCTTGATGACTGACTAATGTTTCCCACCTTCTTCCTTATCCAACTTTCCATAAAATTTACCTCCTCTTCCCTT
TTCCCTCCCTGCCCTTTACGCAGTGGAAATGAGGAGCAAGAAATGCGCACATGTAGAGAGGAGAGAGAAGCAAAAGGCTTAGCCTTGCTAACAG
CGGCCACCTGCTCTTGGCACTTCAGATGAGACTTGGAGTGACCCCAACCCAGGCTGATCACCCCCACTGCTGCAGAGCCTGCTGGTTTCCCAAA
GCAGAGAACACAGAGGGCTTTGCACCTAAGTATCTTGTTCGCATTTCATATTCTCTCCGACTGGCAAGAGAAGGGACTTCGTGTCATTATGCAA
ATAATGTAATAAAAAGCCAAAACTAGCGTGCTCCCTGTGGTGACCCTGGGTAATGGATATGCCAGAGATTAGCCTTCCAGAGCCCTGTACTGGG
AGCGGCGGAGTGGGCCCACTGAGCAGGGCAGCCACAGGGAACTTGGTCTGGTTGCTTTTGACATTCCTTTCACCAGACACCTCCAGCCAAGCTG
GTCAGCCCCAGACAACTGTCCTTAGGAGATTCAGGGCAGAACAGAGGGAAAGGAATGGGAAGGACACAATGGGACATTGGTGCTTCTCAGGCCC
CATGTCTTGGGTCATTCTGTGTTAGAAATAAAGCTCAGCCTACGTATAAGGAAGAACAGAGGGAAAGGGTCTCCCACTCATGTCCACTTCTGGC
ATTTTTCCTCCTCTAACTCCACTGGACTCATAACTGTGAAATATTTGTTCCTTCCCACACACAGGATAATGGCAGAAATTTCTGTTATGTCTTC
CCGAGTGAAATGGGGAGATACTCAAACCACCCTCTTCTTCTTTCCTTGCCCCTCTGGAGGCTTTTCCATCTCGGCCTTAGCTAGACTGTTTGAA
GATGCAATGGTTTGCTCATCGTTCATATCGGCCAGGCCACTGTGCGGCCATGCTCTGATCACATCCCATCACTCAACTCATGTGCACATGAAAA
GTAACATTTGACTTAATCTAAGGAAAACAAATGTTGGAAGACACATTTGTAAGTATAACAAGAAAAGATGCATATAGGCACACATATGTGACAA
ATTCCAAAATAAGTGAATTTTTAAATTCGTGAATGCACAGATGTACCCACGCCATTCTTCTGATATTCACTGAGTATGTGGTGTACGAAGAAAC
AGTATAAATAGGTGCTAGCCACCTACCATTTTCATTATCTCACGAACAGATGCCTCCTCTCCTCATTCACAGGGCTATTCAGGCTATGTTGAGA
GCCTTATCTATGGACACCAGAGGCCTGGACTCAGAAACCAGAGACAGGCAGAGGACTGAGCCWGCAATGGAATGACACCCATGGTTTTAAAGGA
AGAGTGGACACGCAGATTAGTGAAATCGGCTCTGTACTCTAGGAGCCCATGGGATTTGCATTTCAGGCTCTATCATCACCAAATCTACTTATTA
GTAGTTTAGGCAACGTAATCTTTTAAACAATCAACATTCGGAGAGTAGGTATCGCTCTGGCTTTATCTGAACTCCCTCTTGACCCATCTCCAAC
CCAATGGTTCTCACGCCATTTCTCAGCATTGGCCTTCATTAAAATTTTTTTTAACTTTTTTTTTTTTTTGAGACACTGTCTTACTCTGTTGCCC
AGGATGGATGGTATGATCATGGCTCACTGCAGCCTCCACCTCCTGGGCTCAGGTGATCCTCTCACCTCAGTTTTCCAAGTAGCTAGGACCACAG
ACACACCACCACACCTTTTTTTTATTTTTTATTTTTATTTATTTATTTTTTTGAGACGGAGTCTCGCTCTGTCGCCCAGGCTGAAGTGCAGTGG
TGTGATCTCGCCTCACTGCAAGCTCTGCCTCCCGGGTTCACGCCATTCTCCCACCTCAGCCTCCCAAGTAGCTGGGACTACAGGCACCCCCCAC
CACGCCTGGTTAATTTTTTGTATTTTTTTAGTAGAGACAGGGTTTCACCATGTTAGCCAGGATGGTCTTGATCTCTTGACCTCGTGATCCACCC
ACCTCAGCCTCCCAAAGTGCTGGGATTACAGGCGTGGTTTTTTTATTTTGGTTTTGTTTTTTTTTTTTTGTAGAGAAAGAGTTATGCCACGTTA
CCTAGGCTGGTCTTGAATGCCTGGGCTCAAGCATTCCACCCGGTTCAGCCTCCAAAAGTGCTGGGATTATGGGCATGAGCCATTGTGCCCAGCT
TTTTAAACAATTTTTTTCTTTTTTTTCTTTGGAGACAGAGGCTCACTCTATTGCCCAAGCCAGAGTGCTGTGCCGCTACATCGGCTCACAGCAA
GCTCCGCCTCCTGGGTTCAATCGATTCTCCTGCCTCAGCCTCCTGAGTAGCTGGGATTATAGGCACCCACCACCACACCTGGCTGAGTTTTGTA
TTTTTAGTAGAAACAGGGTTTCATTATGTTGGCCAGGCTGTTCTCAACCTCCTGGCCTCAGATGATCTTCCCGCCTCAGCCTTCCAAAATGCTG
GGATTACAGGCATGAGCCACCATGCCTGGCCACATTTTTAAGTATTTACTTTGTCCCAAGAACTTCAGGTGCTTGATTTAGGTACTTTACTCAT
ATTATCTCATTTTATCTTTATCCAGAATTACCAGATCAGGTACTGATATTATCCCCAACCTACAGATGAGGAAATGAAGTTCTTGGGAATTGTA
CTAGATGCGTAATGAGCAGCAGATGAAGCTTGGATAGAAACTCAAATCTCTCTGACTCAAGATTTATGCTCTAAGTTACAATAAACACCGGAGT
TACACTTAAAGAGCTTATGGTCTAATTGAGAGGACAGAAAATTCACAAGAAAGAACCTGTGAAGAGTAGTGGTTATGTGCTTAGGCTGTAGACC
TGAATTTGGATCCCACATCACACTAACTTTCTGTGTGCCTGAGCAAGTTATTTCACTTTTCTGAATTTCCATTTTCTCATCTGAAAAAATAGAA
TACATCCCTCATAGAATTGCCAGGAGGATTAAATTAGGTTACTCATGTAAACAGTGTTTTGTATTTAATAAGTGCTGTGATTATTACCACTTTT
AGTGCATTACTGGTAGCAGGCCCCAGCTGGATCCAGGACCAGGAGGGGGTCGTGGAGAGCAAGCATTTCTATCGGCAAATGTGAGTGATCTGCT
GTAGCTCACATGCCACCCCAAGCAGCTTGCCTTGCCAGAGGTCTCTGGTAAGGCGCATCATTGGGTACAGAATGTGCTGGAACACTTCCCTGCC
TGCAACAAGGGACCCTATGCCACCCTCTGGATCTAGGACTCAGTGGCTCTGGACCCACAGACCCAGCCTTTCCAGCATTCTGGAAGGAAGAGTG
CTTCTCAGAAGCCAATGACTAAGCCAGCCCAGGGGTTCCTTTTACAGAGACAATTGTTGGGTCAAGAAGGAACCCCACAGCTGAGCCCCACATA
GGGCTAGGAGCCCACGCCTCCTGTCTTTCTCACTTGGAAGTCAATTTTACATAGCATGGTCTAAAGCCTCATGGACCCCACAAGTCTTTTAAAT
AATAACTAACTTCTCTTCCCTTGAATAAAATAATCAGCAACAATAGGAGAAGCAAAGTCATGAGAAACGGAAGGAATGTAGTCCCTCTGAGGAT
GGCTGGTGAATTTGCATGCTGGTGTTCTTCCTACACCCAGCCTATCACCTCAGTTAAGTACTTATGGATGATTTATCCGTGGmGTTCTTAGAAA
CGCTAGCAACAGGCTCATTTCTGTAAAGAGCTTGAAGTACAAGGAAGAGTTTTAAGTTGAAACTTTAAATAGTTTTAAGAGTTTAAGTAAAGAG
CTTTATAAGACACACATGAAGTACCAACAGCTCCTCATGTGTAACAAGCTGCAAATAAGTGAAATTTCTGCCAGCTCAGCAGCTCCTCCCCTGC
AGACAGCAGCAGCCACATCAAGTTGCCCAGACTCATTCCTCTTGTTTGCCTCCTCCCTCCCTACTCTGGTCTTCCCACAGCAATTTGGAGAGGG
CTCCCTACTACCAGTGGCATCATAAAAATGACAGTGTACTTGCCAAGGGCATGGTCTTGGGGTGCTCCTAAAGCTGTTGAACTGCAAAAAGGGG
TGCCGTTTATTTGCAGAAGCCACAAGAATGCTCTCCTCCCCAACTCTGCTCTTTCACTTCGGTCTCAAATCAGCTTGTCTCCGGCCTTATCTCC
CCAAATCTTTTATTCCACTTAGGGGCCCTCACCTCCCTTCCCTTGCCCATATTGGCTTTTCGAATTCAGCCCAGTGAGCCAGACAGCCAACTCT
TCTCCTTCGTCTTCTCTCTCTTCACAGCCCCCATGATCTATCTCTTCTTTTCTCTACATTCTAATGGAAAAAAAGCTTTTTGTCTAGCCATGAT
TGCAAATAGAAGCGGGATGTGTGTGTCTGTGTGTGTGTGTGTGTGTGTGTGTGTGTGCACATATGCATACCCAAAGCAGTATTCTCACGAGCTG
TTAACAGCTCAAAGGAGTCATAGGTCATCATCAGAAAGGTTTCATGGAAACAGGAAGCTCTCAGGAAGATCTCACTTACCTTACACGAATGGCA
AGATAATTGTGCATCAGGGTGAAAGAGTAAAGAAAGGTTACTTGCAGCAAAAGGAACCACAAAATTAAGGCACAGAAGCATACCTGAGTAGGGC
TTGTCTAGTGGAGCAGTGAGAATAGTTAGAATTGGACACAAGTTGCAGCAAGAGGAAGTTGTGCAATGTAAGTGTGGCAGGTGGGACAAAGATG
ACCTTTGGAAGACAAGTGGCTCAGAAGAGATTTGCTGTGGTCCACCTCTAGGGAGCTCTCTCAGGTTTTTGAGCAGATTGTGGCACGATGACAG
CAGTATTCACAACTTGCAAGGGAGCTGGATCCAGCCAGGGAGCGCACAAGGTGTACTGAATGAGGGAAGAGCATGTCAGTGGGTCGTCAGGGAG
GGAAGAGTCTCAGAGAGAAATCCCCAGACTGGACAGAAGTGTGAGGCATTCCCGGTGAACCGGGACGCTCTCCTCCTACAATGTTGCCACTTGA
TTGGAGTTTCCTTGATTGTGAACTACATTCTTAAGGAAACTTCTATTCCAAAATGAGTTCAAACTGGTTTTGTGCCCTTTCTACACCTACACTC
TATCTCATCACTTGTTTTTTTCTAGCTGTGTACCACTCACTTCCTTAAGAAGTCTCTCCTGGGTCTGCCTCCAGAACCGCTGGCTTTGTGTTCT
CTGTCTATTCTCTTTGCTGTCAGTCTTGATTTTGCCCTCTGCATGTCCCCTTGGTCACGACAATCCTGTGTTCCCTGTTGCCTGCTCCACCCTC
CTTAGGATAATGATGGGAGGAACTTTTTGCCCATCTATGGAGCATCACTGTGCCCAGCCCTCCCTCCCGGGCTTCTTTGCCTCTCATATTCTGT
CATCTTCTCCCCCAACCTAGAAGAGGGAAGCGAAGAGATTATTTTACTGGAAAACTCCAACGTTCATGAATGATAAACTAAGAACGTAACCCAT
TCTCTACAGCAGAAGATGCTACCTGATTCCTGAAATGTCATCTGTTTTTGTAGCAGGACTGTGGTACATGTTCTTCACTCTTATCAGCAAGAGA
CACTTAGGGGTCATAGGTGGTAATGTGTCCTCTGCTTCCAGTGCGGAGCTCAAGGAATTTCATGGAGTCAGGGACAGCTGTCTGAAAGGTTGCA
ATGTCACCCCTTTTCAGCTCAGAACCATAATTCCTTGAGCCCAGATAACAGTTCAAAATTTAGGATATGAAGCCAAAGCTGAACTCTAGCTGAA
TCAAGAGTGGATATAATAACCAAGAAACAAATGGTTCTGACAAGCACAGCTTTACTCTGAGCATGACTCAAAGGGCATCTGGTAGAAAATGAGA
AGGATCCCACCAGATGTTAGGGCTAGGGAGATCCCCTCCGTTGGGGGATGTAAGTGTTTTAATATTGTGTGGGCAACTCTGCTTTGAATGTATG
TCTGGAGGCACCTACACCATCCAAAGCCTTCTGGTGCAAAAGCAGGACTCCTAGAGTATATTCCAGTATTTTTTCCCTGATCCCAGCTGAGAAC
AGCCATAGAAGAGCCTCCCTTTTTGAATTATGGCTGTCTGTCCGCTGGGGTGGAGAATGGCCCTGGGAGACAAGAGACAGCCCATGGAGAAGGT
TGTAATTCTACAGGCATATGAAGAGCATTCATTCTGAAGAACACATTCAATTCAGGAATGTGAATTACACAAGGAAGGTAGACAAATCCCAGGT
TTAACAAGTGCTGTTCACCTATCACTACATTTTCAAGTAAAGGTGGTGTATCCATTTGCTAGGGTTTCCATAACAACATACCAGGGCTGAGTGG
CTTAAGCAAAAGAAATTTATTTGCTCAGAGTTCTGGAGACTGGAAGTCCAAGATCAGGGTGCCAGCAGGGTTGGTTTTCCTCAGAGGCCTCTCT
CCTTGGCTTGCCAATGACTGCTGTGTCCTCACATGGCAGCCCCTCTGTCCACACACTCCCCTGGGGGCTCTCTGTCTGTCCAAATTCCCTCTTC
TTATAAGAACACCAGTCATATTGGATTAGAACCCACCCTATCAGCCTCATTTCACCTTACCTCCTTAAAGGTCCTATCTCCAAATACAATCACA
TTCTGAGTACTGCCGGTAAGGGCTTCAGCATATCAGATTTTGTGAGGACACAAGGCAGCCCCTACACGTGGCCTGAAAAGAATCTTTGTTTGAT
GCTAATAATCATGATACCTAACATGTTCTGAGTGTGACTCACTATGTGCCAGAGACTTCTAGTACTTTGCATGTATTATCAC2AACTATTATCA
CAATTATAGATTATATAATTATTGATTATATAGATTATAGATCAATTATAGATGACTACCATCTTCTCTAAGACTTACTTTGGTGTAATTTATG
TGACTGTAGTGAACACTATGCCCTGGTCCCTGACCTTGGATGCCTGTGATTCGATGAGACATGGAATAATGGGAGACTCTTACCCTCATGTTTT
GATTGGTAGCAGATCTCCGGAATGTGCAAAGTTTTTTAGTTGTCGTTGTTGTTGTTGTTTCGAGACTGTCGCCCAGGCTGAATGAATTGGCACG
ATCACGGCTCACTGCAGCCTCTACTTCCGGGGCTCAAGTGATCCTCCCACCTCAGCCTCCCAAGTAGCTGGGCACATGCCACCATATCTAGCTA
ATTTTTTCTTTCTTTCTTTCTTTCTTTCTTTCTTTCTTTCTTTCTTTCTTTCTTTCTTTCTTTCTTTCTCTCTTTCTGTTTTTGTAGAAACACA
GTTTTGCCACATTGCCCAGGCTAGTTTAGAACTCCTGGACTCAATAGATTCTCCCACCTCAGGCTCCCAAAATGCTGGGATTACAGGCATGAGC
CACCATGCCTGGCCAACGCTTCTTTTCTTAATCCATGATCTCCCAAGTCACACCCAAGTCAATCATCCCATAATATGAATCCCAGGACCCGAAC
ACCTCTTTTGGAGGGTCTTGCCCTGACTGGCACTTCACGTGTCTGACGTTCCTCTTTCGTCCTTTGGCTGGCTGAGTCATCAGAACTTGAGATC
TACAGGATGCACCAGCACCTCCTAGAGGGCCCTCAGCAAACCACTGAGCATTTCTTACAAGCTACACCCCCACACCAGATCTTCTCATTTAATC
CACCTATCGACTCTGTGCTAAAACTATTTTTATCCCTGTTACAAATAAGGAAACTGAAATTGGCCTGGCCACACCCATGGGCACCACCCTTCCC
TTGTGTGACCTTGAGCAGCACACCTAGCCTCTCTGGGTCGATCTCACTGGCCTTGCCTGGAAAATAGACCCTGGATCTCATCTCCCCTTCATTG
CTGATGACTCCACTCAGCTCGTAAGAGGCATTTCTGCTTATGCCTGGAAAAATCTAGCATTCACACACCACCACAATACTATATTCCATGCCAA
GTCACCACTATTCTTGGCCTCCCTATCCCCACCCTCCTTTTTGGGGGTCCCAGACTACAGAACCAATAAACAAACCCACTTTCATGATTCCTCC
ATCCCCACTCCACTGCCCAAAGTCCCTCCTCACCCAGGTAACCTGCACACCCATCTGGTTTGCATAAGGGCAAAGACCTGCCCCCTGGAGTGTG
AGTCAAACAGGAACTTCCACACAAGCTGTCCTGGCGCAGCCCTGGGCCACCTTGCCAGCTCAAGCAAGAGTGTCACTTGCTTGGCTGAGAGAGT
GACACTGGGCTTTCTGTCTCTTCTCTGGCCCTGCAGGAGGCTCTGTCGGTGGTGAGCGACGACCAGTCCCTCTTTGACTCAGCGTACGGAGCGG
CAGCCCATCTCCCCAAGGCCGACATGACTGCCTCGGGGAGTCCTGACTACGGGCAGCCCCACAAGATCAACCCCCTCCCACCACAGCAGGAGTG
GATCAATCAGCCAGTGAGGGTCAACGTCAAGCGGGAGTATGACCACATGAATGGATCCAGGTAAGCTCACCAGGCCTGTGCAGGATTGGGGGAA
GGCACAAGTCGCCAGATCTGCAGCAAGTGGCTTCTGGCACTTAAGGTTTTTGCACCAGATGGGGCTCTAGACCTGGGCAAGGAGAGCCTGTGTC
AGTCCCTAGAGAGCTAAGGCAGAGAGGGCCACAGACTGATGATGGGGTGCAGTAGGGCTAGGAGGCCCCCCTGGCTCTCTGCGGCCCACGAGAC
CCTCAGAGGCCAGGTAGGAGTCAGGCCCCAAGCGCCTATGCAGACACTCGTGGAACACTTATTTCTTGTTAATCCCAGGCCCAGGTCCAGTCCT
GTTGGGGACAGCTTAGCAATAAGCTACTCTTCCCTGTCCTGTTGAAGATACTTAACCCCTCTGGGCAGGTCTCAGCAGAGCAAAGGTGACCAAA
CCATTCTTTAGTAAGAGTGGAGAAGGGATGAGGAAGGTGTCTACCTTCCTGTGGGGGCTCACTGTGTCTGGGAGGCGGCAGGCACCTGGAAGGC
GTGCATGAAGTGGGTACAATACTGGGTCAGTTCGGGCTTTGCTTGTAGATGGAGACAGGAGGGTCCAGGGAGAGGAATGAACTCAGGGTCATGG
AAGAGGACAGTGGACAGGCGGCCTCAGTTTTGCGTCCTGCCTCTGCCCCTTGGGCAAGTCATCGAAACCCCTCAGAGCACCAGCTTTCTCCCTT
CTCAAACAGGACTGGGATATTCACTTCCTTATGGTCCTTACTCTAGCGTTACTCTGATGCCTCAGGGGAAGGACCTGGGATGGTGCCTGAGACG
CGTTAGGAAAGTGCTCTATAGTGACAGTGATTGTTATGAGCAAAGACTTGAAAGACAGAGAACATCAGTCTTATTCACAAAATATCAGATAATC
TACTGGGCCAAAGGCACAAAGAGATGAAAATAAAAAGCAACAGAGGGCCCTGAATGGCAGGCTGAAAACATGTGCCATTTATTCCACAGCCAGA
GGCTGACTTTGAGCACCGATGTGACATTTAACCCAGAGGCTGACTTTGAGCACAGACGTGACATTTAACCTCATCAGAGCAGTGACTTAAGACT
AGCGAGCTGACAGTCCTTGCGCACAGACGGTAGGATGGGAGAGTCAGAAAGACAAGTGAAGAAGTTAGTAAAATATCCCAGATAGGAAATAATG
AAGTTCTGAACTAAGTGATGATAGTGATTTTGGAAAGTGAAAAGGACAGATACATAAGGGCGATAGCAAAGAGATGATTAACAGGGCTTAGGTG
AGTAAAGTGTGAATGAAGGGGGTGCATGACAGGAAAGAATCAAAGGCGACTAAAGCCTGCACATTTTAAAGGCTGGTGCTGTGAGCAGCCGCAG
AAAGGTGGCACAGGAAATGCTTTAGGATGGGATGTCAGTGTTCTCTTTGAGATTCCTTGTGAGCAATGGGTAGAACATCCAGATAAAAATGTCT
ACTAGGCTTTGGGAACTGAAGCTCAGATAATCTTTCAGGCCTGGAATTTACGTTTGGGCATCATCTCTAAGGAGTCTGAACTGTGAAAGTGGAT
GAGGTCACCGAGGAAACTAGTCTAGATTGAAGAGAGAGAAGGGAATGAGCATGGTTGGGAGGGAGAACTCCTCCAGAGCAGCTCATGGCCTCAG
ACCTGCCTGTCGGAACTCCCAGGCCTACCACATTTCAACCCTACTAACCAAAACCAGTGACTGGGATCTCAGCCACCTTTCCAGATCCCAGGAT
TTCAGGAAGGCTCAGAGGTTCTGAGCCTGCAGCCCCTCAGATGAATCTCTCTCCAGATGTAATTCTGATGGTGCCGGAGCTCCTAACAGTCGAA
GGACATGGTGTGTTGAACGTTTTCCCATATTATCTTACCACTTGTTCCTCACCACTATACTAAGAAGTAGTTACTGTAACTTCACTGTTACACA
CGAAGGCAAGCAGGGCTTTCAGGGGACAGTGCTTTGTCTAAGGATTTACGAAAAGCAAAGTTGGAGCCCGAACCCAGGCGTTTGGTTCCAGCCC
CACGTGCCATCTGTTAGGCACCTTTCTGCTCCCTCTCCTTGTGTGTCATGCTTTTGCACCACCACCTCATTCCTGCCAATGCCCACCTGGTGAG
GAGGCCTATTCTACGATGCCTCCTAATGGGGCCCTTCTCCAAGGAGCTCCCAATGCTTGTTCAAAGATCCAGATCCCACTGGTCGACATTCCTT
TTTTTTTTTTTTTTTTTTTTGAGATGGAGTCTCACTCTGTTGCCCAGGCTGGAGTGCAGTGGTACAGTCTTAACTCACTACAACCTCTGCCTCC
CAGGTTCAAGCAATTCTCTTGCCTCAGCCTCCTGAGTATCTGGGATTACAAGCACATGGCACCACACCTGGCAAGTTTTTGTATTTTTAGTAGA
GACGGGCTTTTACTATGTTGGCCCGGCTGGTCTTCAACTCCTGACCTCATGATCCGCCTGCCTCGGCCTCCCAAAGTGCTGGGATTACAGGCGT
GAGCCACCGCACCCAGCTTTGTTGGAGATTCTCTGGCCTGTTGTAACCTGAATCTGCCTACTCCTTACCTCCACTGCCCCTGCCTGGTGGCTGC
CAGCAGCACCTCTCCTAGGCTTCTGCGGGGGCATCCTGCTCTCCCCACTTCCTCCTGCCTTCCTGAAGTCTATTCTCCGGACAGCAAGCAGCCA
GAGCCATGCTTTCCTCGTTTGTAATCCTCTTGCTCAAAACTCTTCAATGGCTTATGACAAAATGCAAAGCCCTTAGTGTGGCCCCACCATCCCT
CTGACATCCTCTCTACTGCCCCCTCCCTCCCACTTCTTCCCTCCGCGCCAGCCTCATAAGACTCTAGCTGCTGCTCCTAGACCCCAAGGCACCC
TCGTGCCTCAGAATCTCTTCCCCTGAGCTCCTTCATTCTGGAACATTCCTACTCCATCTAGTCATATGACTCTCTCCCTCACGAGTTTTAAGTT
TCTCTACCTGAACCTCACCTTTTCAGAGGCCTCCCCTGGCCACCTGATCGAAACCAGCGCCTCCTCACTCTTTACCCTGCTTAGAGTGTCTGTC
CTAGTTCTTATCACCTCCCTCACTGACACGTGGGCAGGGCCTGAAACGGTAGGTGCTCAATAAATTGTCGTCAAATAAATAACTGAGAACACAT
GGCTGAGCAGACTCAAAAGAGAAGGTGCTTGTTTAAAGTTAGGACGCAGATCCAGGTCTGCTGACTCAGCCCCTTCAATGCTGAGCCTGAGTTG
ATGCATGGGCTTCTGAGTTCCATCTTCATGCTCAATGGAGACCCATGCGTATTTGTGTCTCTGCTGGGAAGGAAGTATGCTGCTCACCACTCCC
TCCCCTGCTCTCAGAGAATCCTCAAGCACTTCAGGATACTGATCCTGTGCAAAGAGGGTCCCCCAAGGAAATTGATTTTTCAGAACCCACTTGC
CAGCTCATACCTGGCTCCAGTCACACCAAAGCCAGCTGGACAGGGCCTGTGTGAATAATTCCAGTGAACACACAGGATATTTACCTGGCTTTCG
CTACACAGAGCAGCAACCTCTGCTTTTGAGTTGCTTGTCTTGACCCATACCATCAGCGGGTAACAAAGTAGGTTCAGAAAGACTGATATCTTCT
CACCCACCCTGGGCAAGCAGAGACAATCCTGTGGACTCTCAGAGCCAAGCAGCTTAGGCACACCTATCGCCAGCACCCCACTAATATTCCCTAA
GGGCTCACATGTAAGCTGGACTAGTGGCTAGCAGGAAGCAAGGAGTTTTAGAAAAATGTCATTGCTTACAGTGGAACCATGTCAGACCCTATCA
TTTAATTATGCCAAAAGCAATGACAGAATGAAATAAATGCCAGGCTCTTTAAATCTCTCATCCTGAACACTGTGCTTCTCCTATCCTCTGAGTA
TTATTGATAATGACAGTTCGTTACTTGCACATGATTTGATTGTTTGCAGTGGTCTAATTCGCCATAACACAAAAAGATAGGAGAGGATGTTATA
ATGATTCTGAACTTCAGATGAGAAAACCAAGGCAGGGTATAAAATTTGAGACTGCTTGGCTCATGGGCTAGACCTGTGCTGTTGATTGCAGCAG
CCACTAGCCACAGGTTGCTACTGAGCACTTGAAATACGGTTAGTTGAAAATTGAAATGTGCTCTAAATATAAACCACATACTGGATTTAGAAGA
CTTACTATGGAAAAAGTGTAAAATATCTCATTGATTATTTATTATGCTGAAATGATCTTCTTTTGGCTATATTGAGTTAACATATTAATATACT
TTAATATATTATTAAAATTCATTTCATCGTTTGTTTTTCTTTTAAAAATCTGGCTACTAGTAAATTTAAAATTATGTAGCTCGGCCAGGTGTGG
TGGCTCATGCCTGTAATCCCAGCACTTTGGGAGGCCAAGGCGGCGGATCACCTGAGGTCGGGAGTTCGAGACCAGCCTGCCCAGACATGGTGAA
CCCTGTCTCTGCTGAAAATACAAAATTAGCCTGGCATGGTGGCGCATGCCTGTAATCCCACCTACTCAGGAGGCTGAGGCAGGAGAATTGCTTG
AATCTGGGAGACGGAGGTTGCTGTGAGCCGAGATCATGCCACTGGACTCCGGTCTGGGCAACAAAAGTGAAACACCATCTCAAAAAAAAAAAAA
ATTATGTAGTTCGCACATGTGGTTCCCATTCTACTTCTATTGCACAGTGCTGGGCCATGGTGGTCTGGACTGTTCTGTGATTCACAGTGCATTT
TTTCTGCATTCCTTGACAGCATGGGCTTCTGAGTTATGTCTTCATGCTCACTGGAGACCCATTGGCATTTGTGTCTCTGGTGGGAAGCAGGTGT
GCGGTGCACCTGAAGCTACCATGCCCACTTGCTTTTCACCCCAGTAGCAAACCCTCTGGCCCAGGGGCAAAGGGTCAAGTGCAGAGACTGAGGT
CTGAGGATCTCAGAGACAGAGTGGCTTGCCCATGTTGAGGGAGTTTTGTGCTCTCTTTCTTCATATCTTCCTGTTGTGGTTGACTCTGTTAGGC
TGGGTTGCCTTGAAACAGCATGGCCCATAGGTTCTGTGTCGCATGTAGACTTCAGCAACTTGATCCAAACTGTGGTCTGCAAATAACTCTCAGC
TGCATCCTGTCTCAACCACAGGGATAGGGGAAAACATCCCATGAAGAAAAGAATATCAGGTTATAGAGGGAAATGCAAGACTTGCCTTGTGAGC
CTGGTATTCAGGACCAGAGTTCAGAGCTAACCTTCCTTGAAATTCCCTGGCCTGGCCCCCAGGGTCTGGATGCCCTGGACACCTAGGGACTCAC
ATTCCACACAGAGAAGGATCAGCTCCTGTTCCCTGGAACTTGTGCCTCTCTGGCTGCGAGGCCCCTTTCTAAACTCTTGTGTTCTCAACCTTGC
AGTATGAGACATGTCACACATAACCTGGGTGGGGAGGATACACAGGATCCTGGAAAAGTTAGCAGCATCTACTGTGTATGGGGATGAAAACAGC
TAGTGGATTAGGGCGGTGGCTTTATCATAAGTGATGCTTTTTCTTTTCTTGGAATTTGCTTTTAAGTTATTGCATCTCCTTTTCAAAAACAAAA
AAGTCACATCTATGTCCTACAGACTTCCTAAACGCAATACAGATTGTTTAATTTTTGCACAGGGTGCATACTACGCAGGAGTTACACGCCGCGG
GTCCTAATGCAGCCATGTGACTTAGGCAGCCCGCGAGGCCTCACTTTGGCCACGTGAGCATCAGGTATCCTTTGACAGTGAGCCTGGGCTCAGA
TGTGCGGGTCTGATGATATACCCAAGTTCAGTTGCTCTGAGTTGACTAGGAAGGTAGAGAAGATCTTTGTACAGCCTAAAGAGGTAATCTTCAG
GAGAAGTCTTTGAAATCTCCCTTCATCCAAACACCCAAGATCTTACACCTTGTTTTAAATGGCCTAACACATTGCAAAGCTTTTTTTGGAAACC
AGTAGCAATGTTCACAGAACACACACAAACAGAACTCGAGGAGTCAAGAGCTATGTCCAGTGGTGGAAATGAAGGACAAGGGCTACCCTACCCT
CGGCAGCTCTGCTGTGGCCTCTGTCGCCCTGAGATGGAGATGTGCTCAGTTATTACACCCTTAGGGCCACCGCCACCTCCCTACTCTATTGTGC
CAGCCCCAGGCTCTCTTGTCACCTGTCCCAGTGCTATCAGCTGCCAGTGGGCCCCAGCCCCATGCTAGCTGTAAGTGCAGGTCTTAATACAAAT
TAGCAGCAGTGCAGGCAAGCTGAATGGCAAAACCTCGTCCCGCACTCCCCCTCCCTCTTGTTTTCATCAAGCCTTCTTCACAGGCGCCAGCTGC
CTCATTAAAGAGCAGCCTTTTATGCTGGGCTTCACCTGTACCCACCCTGAGCCGCAGCCGTGGAGCCCCATGGCCGCACGCAGGGCTTGCCCTG
GCTGGAGGAGGCACGGTGCTTGGGAGCTGCAAGATTGGAGGGAGGACTGGCAGGCGAGCGGGCGAGGTATGGCTTTCCTTCTTTCTCTCCCTGA
GCAGTGGGAGGAGGGCCAGCTGGGCAAGTGTGGGGAACCAGGATGGTGCCAGCCCTTCTCCCTAAGGACACCCGCCTGCAGGTCCTAGTGCAGA
AGCCTGGGACCGAGGACAGGGCCATTTTCCAGAGGAGAAACACCCTGGCGGGCGAGCGGCCAAACCGATCACCTGTCCAGCTGGAGAGCAGGTG
TGTGCACAGGGCCGGGGGAGGGAGAGAGGAGGAGGGAAGCGGAACTGGGAGACTTCTATGGGTCAGTGAATGAGGAGGTTCTGCTCAGGGAATT
GAGTGGCAGCCCCCACCCCACAAGAGAGCCCCCTCCTCCTCTGCGTCCACTTTCCCTTCGTCTAGGTGCCCATGGCTCCTCTCCTTACAAGGT
CACGTGTTAGGCAGGTTTGGGGAAATGTTTCTTTCAGCTTTTCACATTTATTTTCCTCCTACCCTGGCACCTGGGACCAGCCCTGCCACCTGTG
CCTACCGTACATGGCCATAACCATAAGGCTCACTCCATTTCAGTCAGTCCTGAGGTCCTCACTTCTCTGCACAGCGATCAGGTCAGTTTTTAAC
TCAGAAATCCCCAGGGGCCCGGCTGATGTGGAAAAGAATTTTTCCAAATATCGTATCCCCACCGTCCACAAACGGGAGGAGCCCGGGGAGTGTG
CCCTCCTGTCCCACCATCCTGCCCCCTGCTGTAGTTCTCCTTTCCGACAGACCCCTGCCCATACCCTATGCCCTCTTGCTCTGGGAATCCTCAA
AGGGAAGAGCGTGCAGTGTGGAGCCCACCTCTCCCACAGAGGCCGCCTGCCAATGAAAACCTTGCTCACTTGGTTGCAGGCCAACTTAATCCTT
CAAACTTCTGCAGCACTPGGACTGTTTCACAACTGACAAGGATGCAGGGTAAGGCTGCCAGACAATGTGCGTGAGTGTGTGTGTATGCGCGCGT
GTGTGTAATGTGTATGCGTGTGTGTGACTGTGTTTGCATGTGTGTGCATGTGTTGAATGTGTGTGCAGATGAATGTGTACGTCCATGTGTGTGC
ATGTTCTCTGTGTTGAAATGTGTGCTTCCATGTGGGTGAAGTATGTGTGTTCCATGTTGGAATGTGTACAGTGCGTGTCTGTGCATGTGTGTTG
AAGTGTGTCCATGCATGGGAGTAAGCATATGTGTGCACGTGTTCTCTGTTGAAGTATGTGCATGCATGTGGGTAAAGTATTGTGCACATGTGTT
CTGTGTTGGACTGTGTGTGCACATGTGCATGCATGTGTGTCAGTGTGTGCCTGAAGTTAGCCCCAGGGCGGGTGAGCAAACCGTGTGCACTCGG
GCCAGAGCTCAGCTCAGATGCAGGCACCAGGGTCTGACTGGGACTGCTTCATCTCAGGCCAGGTCCTTCCGCAGCAGAAGCCAAAGGGCCAAAC
GCTGGTGAAAAGTCCTGATGTGCTACTGCCTCCCCTCCCCTCCCCTGCCATGGGGACGTTAAACCTTCAGCAATCTGGAACTCTGACGGCTGGT
TTTTGGTTCTCTGCCTGGAAAAACAGTAGGCGAATAGTAAAACCTTAAATTCTAACATGTGTGAGTTTACATCTTATTTTCATTTTTCAGCCCA
TGTTTCCCTCTGTAAGACATCAGGAAAAATTACCGTCTGACTTCTAATATCTCAGTGGAGCATTTATCTCCCAGCTATGATAAGTTGATCTTCA
ATATTTTTTTCCTTTCAGATTAAGAAAACAAATTCATTTAATTTTCTTTATTGAATGTGCTCAGGCCTCCCCGCCCTGCCTGGGTCTCAGAAGC
CCTGGGCTGATCTCCCTTCTCCTGGGTTAGTGACTGCCGTCCCTGCTTGTGGGATAAGTGGGTCCCTATCTGGTACGGCCCTGCTCCTCTAGGC
CTCGCTGTGGTCCGTTCCTGCGCCTGGCAGGGGATGGAGGACAGTGGCCAGGCCTTTGGAACGTCCGGAGAGGTTATGCGGCCTAGAGTTGGAA
GGCTGTAATCTGAACCTTATCTGAACTCCTTGGTCTGAAGGCCTGGTTTGGAGCTCTTGAGAGAACTGGCTGTCTCCCAGGCTGCCAGAACCGA
TGCTTCCTGCTCAGTATAATGGCGGCTACAGCTTCTCCTTGGCCTTCCCATCGTCTCCTTTGGTCCTGCTGCTGCTGGAGTGGCTGAGCAGCGG
GCACTGGGTGTGACAGGGTGGCACCTCCCCCAAGTATGCTGGAGGTGCGTGATGCTGGGCTGGAGGGCATGCAGAGTGTGTTTGCCAGCCAGCT
TCAGGGCGCCAGGTGCCCATGGGTGCGACTTCACCCCTCCAGACAGCTGCCCATCACCAGTGCTGCAAAATACCAGGTGCTGATCAAGTTCTGT
AGTTCTAGGCTAAGTTGGATGATCTGCTTTCTCTCTTGTGAATGTCCATACTGCTTCCACAGTGAGCTTGGGGCCAGGGATGCAAAATGCCACA
GGGCCACCACCTCTCCATCAGGTGGAAGTTCCTGGACTCCATTCCTTCTCCAAGTAGCAACCAGCTCTTTTGCATGTGTGCTTGATAGTGAAGC
TTAACACAGAAGACCTGAGTCCTGTTTCCACCTTGACTAGCTGTGTGACTGAGCCAGGCAGCCCCTGTCTCGATTTCATTAACCATGAAAAGGA
GATAGTAACCCTTGCTGTGCCTATCCTGGGGGCTTATTGGGAAATTCAAATACAACAGTGCATAAGAAATGCATTAAACTTATATATGTGCAAT
AGAAATAACTCACTGAGAAAGCATTTGCTGCTCACCTCCTGTAAGAATACTAGGGTTAAACAAAGAAAGTGATGACTATCCTCTCAAGAACTCA
GCAGTCAGGGGGCGCAGGCCAAGCTGAGAATCAGACAGTGTGACAAGTCCTTATAACCAAGGCGGGCACCAAGTGCTGGGGGACTGTGGGGAAG
GCGTGTCTGGGAGCATGGACTAGGTTGCCTGGCAGTGAGGCTAAAAATGTAAGCTGCAGTCAGACAGGGAGGGCTGCGATGCCACACAAAGAAG
CTCAGACCTTGGTCTGAGGGCACTGAGGCGCTGCCAGCAGTTTTTACGTACTGTATTATAGGATTGGGCTGGAATTTGTAAGAAAACTCTGGTG
GCAGCATGGAGGATAGAAGAGCGCATCATCATCATCATGACACCAGTGTGGCCGGGCAGTATGGCTCCATGCTCATCATCGGAGCCCTGGGCTC
ATGATTCAGAGGCTGAGGCAAGCTGCCCTGTCAGTGCTGACCGCCTCTAAGCTTTGTCTCTTCTCACTTTAGGGAGTCTCCGGTGGACTGCAGC
GTTAGCAAATGCAGCAAGCTGGTGGGCGGAGGCGAGTCCAACCCCATGAACTACAACAGCTATATGGACGAGAAGAATGGCCCCCCTCCTCCCA
ACATGACCACCAACGAGAGGAGAGTCATCGTCCCCGCAGGTAATTCGAGAACCAGGCTGCCTGGGCGCCATTCACTTCCCCACTCTCTGGGGGG
CAGGAAGCATCTAAACCTTTATCTCATACTCTATTCCCTGTGGAATTGCAATGGAGAGAAGCTGCACGCCAGCCGGGAGTGGTGCCTCGCAACC
TGTAATCCCAGCACTTTGAGAGGCCAAGACGGGTGAATCACTTGTCAGGAGTTCAAGACCAGCCTAGCCAGACGTGGTGAACCTCATCTCTACT
AAAAAAAAAAAAAATACAAAAATTAGCCAGGTGTGGTAGTGGACGCTTATATTCCCAGCTACTCAGGGGGCTGAAGCAGGAGACTCGCTTTAAC
CGGGAAGGCGGAGGTTGCAGGGAGCCAAGATCACACCACTGCACTCCAGCCTGGGTGATGGAATGAGACTCTGTCTCAAAAAAAAAAAAAAAAA
AAAAGCTGCACATTTTACCTGACTTCCTAGCTGCCCTTTAAGGCAGTATCCCAGATGTCACCTGATGTGTCGGTGCTAGAAAGCCCCACCCTTA
ACAGACCACATCACAGACTCTACATCAATGGCCTGGTCCTCAAGGACGGGCTGCTCAGAGAGCAGAGGCAAGGCCGCCTCCACCCAAAAGGAAT
CCCGTGAGCTCTGGATGTGGGCATCCCTGCCTGTGAGGAGGAGGTCAGCTGCAGAGGCCAGTCCTTCCCTCCAGGCTCGTACTTCCCGGAATCT
ACCAGGTTCCACCTTTCCAAAATTACAGCCAGCTCTTTCAGTTTTAAAATAGAAAGAACTATATTTAACTAATGGAGTGCCTTAACATGTGTGC
CACAAGTTATGTCATTAGGTAAAAATAGCCTCTTTTTCCTAGGTGTTGGTGCTGTTGGTCCCAGAAAATAAAATCATCGTTCAGTCCTTCAGTC
CATTGGCTGGACACTCCACCCCAGCTAGCACCAGCAAGCTCAGCTGCCTGCACAAGAAGGGTGTTTACAAACTGCCACGTGTAGAACTGGTGCC
AGGTAGAAGGGGCAAGGATGTCCAAATCTTAAGCAAAGTGATTACAGGGCAGGGATTAAACCTGATCTTACCAAAATAACTTTACCAGAGAGGC
AAAACTCCTTCCATTTGTAAAAGCATAAATGTAGTTGCCTCTGAAGTCAAAAGGTTAGACATCTCTTTGAGGCAGTCCGAAGGCATCTGCTTGT
AGGTCTAAAGGCAGAAATGTTAAGGGCTGCCTCCTGCCTTGGCCCGTGGTGTTTGTTTTCCCTGGGAAGCTGCATCTCACCATATCCCTGGATT
ACAGCTGCCTCCCTGTGCTCTGGGCCAAATTCAAGAAGGTGTGAGCAAGAGTGAGCAGCAGACGGGTGGGGCTTGTAGAAAATTTCTCTGTACC
CTTTAGGACTTAGAAATGACTCCTAAAGCAATTCTAAGTTTGCTCTTCCACAAGCATCTGACCTAACAAAGGAAGAGGAAGAATCACTTCCATT
TATTGAGTGCTTTCTAGGTGCCAGGCACCACGTAAATTGCTTTATCTCCATGGCATTACTTAAAACACCTGTCACAGGAGACCAGCTAGTAATG
TTTAGCCCAGGTGTATCGTCTCCCTCCTCACTGAAAGCAGACAATGAAACTGTATTAGAACTGACAGGTGGGAATCTCTTTGTACAGCCCAAAG
CAAAGCTGAGCCTCACTGGGTCTTCACTCAAATGGTTTCAAACTCCCCTGCTTCAGTCAAACAGCTCCCAGCCTGGGAGGGAAAGCTTGCGGGA
CTGAAGGGTTTGGGGATCTGAGATTGTCTTTGAACCAACCTTTGGCACCATCTCATTTTGGTCGTCATTTTGGGGAAGGAATCTTGGAAATGGG
CAGAAGTGGCCAGACTGCTATGTCGACCCTCCAAACTTTCTTTGATCAGTGTTGAAATGCTTTCAAAAGGAATAGCAAAACATCAGGCTTGGCT
GAGCCAAGTTACCTATAGCGCTGGTGGTGAAAATAAAACAAATTCATGTCAAATGATTTTCAAAGCACTTTCAGGCTATGGATTTACTTCATTA
TTTTAGCTCCGGCTAGATCTTTTAGGTCCTCACACATTTTGGCTTCCTCCAGGCCAGGCTGTGGATATGAGGGGAAGTCTCATTTGGGCAAGTC
CACAAATCAAGGCAATAAAATATTAGTGGAATAACCGATTGAATTTATGATGGGATTTAAAGACAAGTATAAATGTGGGCCCTAGTTAATCACT
AGCTCCATGTTCGATGGGAAGAAACTAGGACTAAATCATCCAGGAAATGCATTTGGAAGAGTTTAGCATGATCCAGAGTTGAAGATTTATAAAT
TCATTGTGCTGTAGAGGGAGAGTAATAATATTGTTGCAGAGCCCAAAGCAAGGGAGGAAATAATAAAATAAATAAAATATATGGTGTAAAATTG
AATTTGAGGCCTTGGATACTAAAAGTGAGGAACTGGGAGAAGTGAAGAATGAAATAATATGCTACATAATCCAACTCTCCCGAGGATATGTTTC
TCTAGAATTCTGAAAAGGTGCAAAATTATTTCCATTTGCCAATGATCCATGCCTAATTGCTTCTGGAGAGTAAAAGAGCAAGAAATGTATCTGA
GAGAGAGAGAGGAAGACATACTTGTACAATGACACTTTAGAGGAGCTCCGCTTTCTGGCTTCAGAGCAGTGTAACTCACAGGTGAGGTAAAGCA
GGATGGTGAGAAGAGGAAAGGGGCTTTGGGGGAACCCACCTCTTCAGCTTAGTGAAGTCCTATAATGGTTTCTATTGGAACCCCAGCCCAGATA
CTTACCAGCGATGGGGCTTTGGGCAAAGGACTTAACCTTTTAAGACTCCATTTTGCATCTGTAAAATGGGGATATTAAAAGATTTCCTTGGTAA
GTAAAAATAGGGCTCGCGGAGCAGGTGGCACATAGCACCCACCATCTGAGCCGTCACTGCTCACAGGGCATTAGGTTGTTGGAATGACATTCAG
AATTTGAGGCCTTGGATACTAAAAGTGAGGAACTGGGAGAAGTGAAGAATGAAATAATATGCTACATAATCCAACTCTCCCGAGGATATGTTTC
TCTAGAATTCTGAAAAGGTGCAAAATTATTTCCATTTGCCAATGATCCATGCCTAATTGCTTCTGGAGAGTAAAAGAGCAAGAAATGTATCTGA
GAGAGAGAGAGGAAGACATACTTGTACAATGACACTTTAGAGGAGCTCCGCTTTCTGGCTTCAGAGCAGTGTAACTCACAGGTGAGGTAAAGCA
GGATGGTGAGAAGAGGAAAGGGGCTTTGGGGGAACCCACCTCTTCAGCTTAGTGAAGTCCTATAATGGTTTCTATTGGAACCCCAGCCCAGATA
CTTACCAGCGATGGGGCTTTGGGCAAAGGACTTAACCTTTTAAGACTCCATTTTGCATCTGTAAAATGGGGATATTAAAAGATTTCCTTGGTAA
GTAAAAATAGGGCTCGCGGAGCAGGTGGCACATAGCACCCACCATCTGAGCCGTCACTGCTCACAGGGCATTAGGTTGTTGGAATGACATTCAG
CAGCAGGCTGTGACCTGTGAACCCAAACTCTCCTAACTCCTCCCCTTTGCCAGCTCCTCCACCTTCAGCACAACACAGCAGCCACTCTCGTGCA
TGGGCAGGGCCTGGGCACTTTACAAAAGCAGACTACTCGGGCCCTGCCACCCAGATTCTCACACATAAAACCAAGGTGGAATGGAGAGTCCAAG
GACAGTTGGTGGATGCTTGTGTAAAAGTGCTGGGAAACTTGCCTCTGGCTGCCCAGCTGTGAAGCGTGAGCCTTGCTTCTTGCCCCACATCCAC
TCCTAGTCATTCAATCCTGGTTCCCTGCTTTGCCAGGAGCCTTCATAGACGCTGTAGAATGAGAGGGTGAGTTGCTTGAGGGGTAGCACAGATA
TTCCTGCCTAATAAATATGTTAAATCAAACAGGCTCATTAGAAGCCGGAGGCTAATGGCCGACTTACAATAAAATGCCGAGTCTCTCCTCCCCC
AGGAAGTCTTCCTTGACTCTCCAAATTTTCACTATTCCCTTCCACTTATGAGTCCTCGAACCACCGCCACACAGTCCATTGCTTAGTAGTGGTG
TGCTTGCCTACCTGTTTCATGGGAATGAGTATTTCTTGAAGGCAAGCGTCATGTAATTTTCTTCTATGATAAGGATATTTAAGGTGTTTATTGG
ACCCACTAACCATTGGTTGCCAAGTGAAGAGATGGGCTTCAGACTGTGATGAGTGATAAAGAGTTCTGCCTACTGTAGGAACCTGCTGGAACTC
ACCAGGTTCCACCTTTCCAAAATTACAGCCAGCTCTTTCAGTTTTAAAATAGAAAGAACTATATTTAACTAATGGAGTGCCTTAACATGTGTGC
GAGGAGGTATGAGTGTCCTACCATAGAGATGGCCTCAGTGGTTACCTTACCTGTGTTCACTCAAGAGCTAAAATGTTCTCCCCAACGTCATCTC
TCATCTTTGGGTATTTAAATATGTAAAATATGTTTTGGGGATGCCCTGGTAGAAATTTCTACACAGCTGTGCTTAAAAGGAGAAAAATCTAGTT
TGGGTTTCTGTTCAAGACTAACACCGCTGGGTTTTTCAACTGCACAGATGGAATTGCAGTAAAAGTCTCTCTGTTTCTTTTCTACAGCCATCTG
AGGGATCCGT6GTTCTTTCATGAAATCATTAATATTCTTAAATACAGATGGTTCCCGTTTCCAGAGACATTGGTCCCGGGGTCTGTGAAATTGT
GTTTATTTTCATTTTGATGCCACCATTTCTCAGGCAAAGGTTCCAACTGCTCTCCAAAACTTTAAAGAGTGCTCTGTCAGGATACGTAGTGAGG
CAGCTAAGCACCTCCCTGGAGTGCTAAGTGGTTCAGGCAGCGCCAGATGCCATGGAGCCTGATGAGTGTTCTAGGGGAACCATGTGGAAGGGAG
CTCTCCCAGAGAGAAAGAGAAGGGAAAGAAAGAGGGACAAGGGGTGAGGGAGGCTGCCTAGGCTCTCAGGGAGCCTCTACCTTCCTGCAGTCCT
TGCTAACAACGTCTTCTCCTCTGCAGACCCCACACTGTGGACACAGGAGCATGTGAGGCAATGGCTGGAGTGGGCCATAAAGGAGTACAGCTTG
ATGGAGATCGACACATCCTTTTTCCAGACAAATGGATGGCAAGAACTGTGTAAAATGAACAAGGAGGACTTCCTCCGCGCCACCACCCTCTACA
ACACGGAAGTGCTGTTGTCACACCTCAGTTACCTCAGGGAAAGTAAGTGCCGCCCAAGTACCCAGGGCTGGGAGGAAGCTTGGCATGGAGCCAA
CCCAGGGAGAGGAAGTCAGTGCTGCCCCTTCGTGTTGGGCAGATGCCGCCGGAGCAGCATCCTGGGGCCTGTAGTGTTGCCAAGGTCACGTGGG
CTCCTACAGACCCTGTGAGGGGCAGACCCAATCCTGAAGTGTCAAAGGAAGTAAGACGAGAAATGGAGAAAAGTAGAGAGCTGTGACCTGGAGG
GGTCTGGCAGAGGCTGGTTACACTCTTCCCATGAGACCGCCTTTCCAGAAACTATTCCAATTTGAAAATAGATAGAGATGGGTGGTGCCCTGGC
TGGTGTTTTCCTAAGTGATTATTTAAAATTCCTCCAGGAAACTCTAGATTCAAGGCTTTTGGATTTAAGGTGTTGAAAATAATTTACATATTAG
CTTCCTCTTAATCTTGGGATACTCTGGCACACCCTAACCCCATTTGACAGGGCTGCTATCTCCACACTTCCTTGATAGACGTAACCAGCCAAAG
GTGCAGGTGTGTTACGATCCATTGGAGGCTTTCTTCTGGTACAGCCAAGAAAGGAAAAGAGCTTTGGAGGGCGAGCTTAAGAAGAAGATGAGCA
GGCAGTTGTCCAAGAGATTTATCTAGTATGAGGTACTCTAGCACCAAGCGCCCATCCGTCTGATATGAATTTCATTTGATATGAAATATACACA
GAGCAGAACAATGGAATTATTTTAGTCCTGCTGGTAACCTCAGCCTGACTGCCCTGCTGGGAATCCACGCCACGTGGTATATCAATATCACTCC
TACCCCTAAGTATGGAACGATTGTCCTGGGGCCTGAAAAGATGGTGCTAGGATCACAGGAACACAGGTTTGGGCTCACACTACQTAAGAGCATT
CTAGCAGCCCTGTGCAAAGACAGGGCAGCCTTGAGATGCTATTTGTTGTGAATGGCCAAGCCAGCTGCGAGTCTTGCAGGAGTTTAGCTTTCGG
CAGGGCCTTGATGATTTTAAGCCCCCTTCGCAAGTTCACATCCTTAGACAGCAACTCTGGGACCTGCTTTTCCTGGACTGGCTGGCTCTGGGTT
GGTGAGCTCTGTTTGCTCGCCATCGTTCTGTGGACCTTTAACTCCCCATCTTTGGAATCCACTCTCCCTTCAGCGACAGTGTTCCTCATGGGGC
AGGCGCAACACGTGCTGGCTGGAGAAATGAAAAATCAAAAAACTGGCTTTGGCAGTTTCCACTGGTGCCTCTGTGCTCTCTGGTCACCTTTCCG
AGGCGTCTGGTAACTAGTGCGAGAAAGTAGATGATGCAGTATTTGTTAGCTCCGGAGCAATTACCTCATGTCTGAGTCTTGCTGAAGTCTCAGG
TCAGCCCAAGAAACAATTTCAAAAAAGGGGACAATTTTCCACCCAGTTTTTCAGAGCTTTGGATAATTAGCACTTTCTAATTCATATTTTCAGC
TTTTAACFGTTTGTGGAATTTTAAAMATAAGGATCTTTGAACAGAGTCCTGCAGTGATCTACGCAGGCCAGGGTGGGTGTGTGGACGTTTAGCA
TGACAAGGAGAGACCAGCAAAGCAACCTGATTCCAGCAGGACTTTGCAGGAACCCTAAGCCCTTTCCTTCATTTGCCAGGAGTAGAGAGGACAA
CAGTAGCATAGACAGCATGCTCTGAACTGTTAGTTAAAGGGCCCAGTGCTTCGAGACTCTTCGGCGGATGCCCTTGTTGCGAGAATGTTCAAGG
CATTCTCTCCATGTGGGGAAAGCCCATTCATGCCATATGACCCCGGGGCCCTAACCAGTCCATGAACAGCCCAAGGTCCCCTAGTACTTCCTGC
CACCGAACAATGGGAACACAGATGCTGAAGTGAGACAAATGCCTGACAAGGTGGTCACTGGTCGCCAGTAGACAGACCTTCTATTGGAGAAGAG
CACATAACAAGGTTCAAGTGGAGGTGCAGAGGATCGCATTTTGGGGGGTATAGCATGGCAAGAAGCAAATTGCTTCTTTCTTTTTAGTAAGAAT
ATTTATAGACAGAAAGTGCCCCCAAATCAATAAAAATATTAGGTTTCCCAAAAGGCACTTATTAGTGGAGCATATTTCCAGAGTGGAGAGGAGG
TGGAATCCAGCTTGTATACTGAAGACATTTGAAAATGCAGCGCAGATATCCAGAGTTGAGGATGCTGGCCAACAGTAGTACATCCACAAGATGG
GAAGTAGTTGTTCTGCCATTGAAATGATTATTGGGAAACACCATGAGAAGTGCTTAGGATACAATGTTGGGTGGAAGCTCATTATAAAGTAAAA
TCTGTGCACTGATAGAAAAAACCATGTCTGCCTGCGAAAGCAAAAAATTAAAATAATCGTGTTAAATTAAAAAAAAAAAACCTTGCCCCAACAT
GGTATTGAAATATCCTTTTGAGGAACCTAGACTTAAAATGATCCACTGTCACGGAAAAGGCTTTTAGATTCATGCTGCTTTTTAATTGGTGTCT
ACCTTGGGGTTCCAGCCTTGGGGACCCTCTAGTCTGAQGTGGTGGCTGGCTGCTAAGCGCCTGCAGGAGGCCATCCGCTGGCGATCGTGTCTGC
TCTGTTTCTGCTCTGGATTGCTGGGAACTCCCCCGTCACAACCAGCACTPTAAACGCTTTTAAAGCCTTCAAACACTTTATTGTTTTTCCAGAC
TGACTTCCAGTGGATGTTTTGTGCTTAGGTGGAAGGCCAGTGCTTGCGGAGAGTTTGAGGCGATGAGTCAAGGGAAGGGGAGAGGGTGCTGATT
CTTTGTGCTTTATCATCTTGTCCTTTCATTGGAGAGGAAGGTGGGCCTCAGATATTTCCACTTTAGCAAGAGATCGATGGAAAATAGCTGAGAT
CCTCACTCCCGTGGAGGAAGTACTGCAGCCTGAAGGAAAGTTGATAGAGCAGAATCGGGGACCTGAGACTGTGGCTGGTTGGAAAGTCAGTAGA
GTCCAAGTTGGTGGCACTTCTCTGATCTAATCTTTCTGGGCTTTATAGAAAGTCTAGAAAAAGGAAAACTTCATAGGATAAGAAGCTTTGGCAT
CAAATTTACATTTCACAAAAGGTGCTTGACTATTTATTCTGGTGGTTTGGGAGGGGAGCTAGACTTTTACATTTTAAATGCAAGTGTATTTTCC
AGGGTAGAGAAGAAATAGCAGTTCCCTGTCCCCCTACAGACCCTGTCTGATGGCCAGGCATGCTAGGGAGGTGCTTGTTCTTCACACCTGGGCG
TGTCAGCTGTGCCAGAGGAGCTGTGTCACACGCCACACAGGCGCCCACCCCTCCCCCCCACCACCACAGGAAATGCAAGGAGGACTGTGATGGC
TGGGGTGGCCACGGTTCTTGGGCCTAATTCCCATGAGTCCTCGGAAACTCCAGGGTTTACACCTGTCAATCCCAGCACTTTGGGAGGCCAAGGC
GGGTGGATCACCTGAGGCCAGAAGTTCGAGACCAGCCTGGCCAACGTGGTCAAACCCCGTCTCTACTAAACATACAAAAATGAGCCAGGTGTGG
TGGTGGGCGCCTGTAATCCTAGCTACTTGGGAGGCTGAGGCAGGAGAGTCGCTTGAATGCGGCAGGGGGAGGCTGCAGTGAGCTGAGATCGCAC
CACCGCACTCTGGCCTGGGCGATAGACCGAGGCTCTGTCTTCAGAGGAAAAAAGGTTGCCCCCTTGTGGACAACTATCTACAGTACCCATTTTG
AAGCTGAACCCACTGAGGCCCAGACAGCTTCAGAAATTGGTTCAAAGGCATCCAGCCGATTGAGAGCACCTGGCATCTCAGACTAGGGCCTCTG
GAGTCCCAGTCCCTCGCCTCGCGTTGCCGACCTTCCCCCGGCCCTGGAGACAGCAACCCAGCCTGCGCCACACAGGCAAGGCAGCCTCACTCCC
GGCCTTCCACGTGGGCAGCCCGGCCACTTCCCCCACAGCATTTTCTGTTGTCATTTGTACCAAGAGATAAATGCTTTCCAAAAACTTTCCTGTG
GCCTCCTGGAAGGAGGCCGATTAAGCCAAACCTATCACCACGCTAACTTTGTCCTTCTCTGGGCCTCACTGTCGGCCCCACCAGTATCTCTCCC
GGACACACCCCGTGTGGCAGAGGAGCCTTCGCAGCAGCWGCTGCGGGAACGAGATTTGTCCCTTCTCAGGCCAAGGCGGGGAAGGACCTCGAAG
AAACGGAGGGCGCCGGGCTGGCAGTTCAGGCTCAGGGCCGCTGGGGGGAGTTTGCGCAAGGCTGGGAGCCCCGAGGCCCCGGGGGAGGTGGGGA
GGCAGAAAGAAAAAGAGCCTTTTTTAAGTTTTACAAACAAGTTCGTTTTGTATGTCAATCTGGGTCTGACCTGGAAAAAAAAACACTAAGAAAC
TGCGTCTTCAAACAGTGGCTGCTCAGAAGAATGAAACTGCGCGACCGGCAGACCACGGAAAGGGTGTCTATCTTCATTCCCATTTTTAATTTAA
ACTTTAATGGAAAACACATTTTGCATTTTCTGGTCTTTCCACCTGCAGCCTCAGATGGTCGGGCAGAGGTTTTGGGTCTGGGCAATTAAGCTGG
TGCAATCTTATCACTTCCAGCCCTGGGTTTGACGGGTGAAGGAGAACAGAATGCCAGCTGAACAAAGCGCCAGGTTTCCCTGGACCCAGTAGTC
AGCCAGGATTGTTGTTTAAACATCCCAGAGCCTTGCACCCTCCCGCTCCTGCACACTCAGCCAGAGCTGTTGATATAGCAGTGCAGCCCAGAGA
AAAGAGAGACCTGGATTCAATAGGCTGGCTGTGACGCGGCACTGGTGAATTCTATGGTCACAGCGAGGCAGGAGACAAAGGCTTTGGCACTGGG
ACGCTTGCGCCCCCTGGCCCAGGTGTCCCCGATCAAAAGCAGGTTAGGTTGAGGCAATGTGAAGCAGCAGAAACCCTGATTGTTGGGGTTCTAC
CCCACACCTGCAAAGCCTCACACTGCTCACTCCCCTCTCCTTTCAGATCCAGGTACTGTCTCTAGCAGCACATGGATTCAAACATGGAATGGAA
AATGATCTTTTCCCCATGCTTGCACTTTGGCAAGGCCATTCTATTCTCAGCAGGAGCTACTTTATGCTTTTTAGAGCAAAAATGCCCTCAATAA
ATAGATATATGTATATGCATACACACCCATATACAAATATATACATACAAACACATATACAGAAACTTACAAATAACCAAGTAGGCAAATCTTA
TACTTCAGTTTGAACTGAAGTACAACACAGAGAGAAGTGCAAAAATCATGAAGTGCGCTACGTGAGACATTATCGTGACGTGTGACCACCCACT
CCCATAAGCACCTCCCGGGCCAAGGAGTAGAATTTCAGCCCCCTGTACCCTCTCTCCACCCCACACCGCTTCCTCCACAAAACTAAACCACCAC
CCTGCTTCCCAGCCCCATAGGTGAGTTTTGCCTATTTCTACGATTTAGCCTGGAGGCAGTGGGATCTGCCAGATTGAGGACAGGTTTTGTGAAT
AGACCACGATGGGGCTCCTGCCTTCTGCACTCTCTGGCTGTCTGATCCTGGGAAAATGATATGACTTCGCTGAGTGTTGCTCCTTTCTTCTGTA
AAAAGGAATAAGGGAATGCTGGCTCTGTATCGCTTATGCAAGGATTAAGTGAGAAAATAGATGGAAAGCGTCTGGCACACCGTGCATGTTCACA
GAGCACTGCGTCCCCACCACCACCTTCATCATGGCCTGTTTACCGTGATGTGCTGGCATCGGGAAGGTGGGGGAGCTCAGCAGCACAGGCCTGT
GGCAGGGTCAGGCCAGAAAGACCCTCAAGGCAGGAGAAAGCAGTCCAAAGCCACAGAGACGGAGGCCAGACTCCAGGAGGACCTGCCTGCATCA
GAACAAGTTCCTTAAGAAAACAGAGCCTGCGGAACTAATGAAGTAGAAATCGGAGAAGAGGAGGQAATCTAGGTCCCTTGGGAGAGAGGCCAGA
TGCCCCCAACCAGCCCCTCCTTGGGGAAGGCAGCCTCTCCTTCTAGGAGTGAAACTTGAACCAAGAACAGTCTTTAGGGCAAAATCCTTTTCCT
AGGTTGCCATGAAATATGCATTTCATGCAAGCTTTGGAGAGGTCAAATGACCCTTTCTCTCAGCTTTCTGGGAGTTTCCTGTCGAATTCATGTC
TGCCCAAAGAAGAACTTTCACCAATGGGGAAATTTAATAATGTGGTTTATCTAAGGTTCGTGCTTTCGCCTACATCTGCACTAAATGACTCAGG
CAGTTTGCTCCTCGGAGACCATCATTTTTCTTTATTTGCTCCAGCAGTGAGGTTTCAGCCTGAGGGAGAGAACGTCAGGCACGGAGAGGCAAGC
ATTCTTGGTCCTACTTCTGGGATTTTTTTGTATTCCCTCCGAACATTTGGTTCCATTTCTTCACTTCCTTCCAGTCGTGCCGGATTATTTCTTA
TTGCAGCAGAACCCATTCATAACTTTAATCAGAGGACAGGACGAATGTTCAGTAACGCATGTATAGAAGAGACTATTGTATGTATATTGTCACA
TCTGTGGGAGAAAGGATGTAAAAATAGTAACGATCATAGCTAGCATTTATGGAACACTTATGAGCCAAGGTCCATTCTGAGCACATTGCATGCA
TTATTTGATTTAATCTTCATAATGCCATTGAGTGGTGTTAGCCCATTTTACAGATGAGAAAACTGCTGGCTCAAAGAGATGAGGGAATCAGTGG
AGGGCACAAAGCTAGTCAGTGATAAGAGGCAGGTCTAATTTTAAAGTCTCCTTTGCTTAATAAACATACAGTCGTGCTTTGCTTCATGATGGGG
ATAGTTCATCTTCATGTGAATACCACAAAATGTACTTACACAAACCCACATGGCATAGCCTACTACACACTGAGGCTGTATGCTACAGCCTGTG
GCTCCTAGCTTACTAAGCTGTATAGCATGTTATTGTACTGAATATAGTAGACAACCGTAGCACAATGGCAAGTATTTGTGCATCTAACTTTTAA
AAGATACAGTAAAAATACACTATTACCGTTGTCGTATATGTGGTCCATCTTTGCCCAAAACATCATTTTTTGGTGTGTGACTATTAACAGGAAC
TTGTCCCAGCCTTACTTTGTCATTCGTATTCTTGAACATCGAATAACCAAATGTAGCTGGCTCTTGGATGTTATATTCATGTGACTGTCTCATT
TCTAAAATGGCATCCACATAGCCACACTTTGGCATACAGCGGGCTCAATACCACCCCCGTCATCCCCCTCCTTGTTTTCATCTGGAGCTGCTGC
AGAGCTAGAACTAACAGTCATATTCTAGGCAATTGGACAATTCTTATAAAATTCTCTTCCTCTGCCGGGTGCGGTGGTAATCCCAGCACTTTGG
GAGCCCGAGGCAGGCACATCACCTGAGACCAGCCTGACCAACATGGAGACCCCGTCTCTACTAAAAAGATACAAAATTAGCCCAGCATGGTGGC
GCATGCCTGTAATCCCAGCTACTGGCGAAGCTGAGGCAGGAGGATCACTTGAATCTGCGAGGCGGAGGTTGCAGTGAACTGAGATCGCGCCATT
GCACTCCAGCCTGGGCAACAAGAGCGAAACTCCGTTTCAAAAAAATAAATAAATAAATTCTCTTCCTCATCGTCTGGCTTTGGATAGTGCACAC
ATTTTCTCTGAGGCACACAACCAAACGCCCACAGCTGCGTGAGGCGGCAACTCCATTTCGGCATCCCTTCCATGACTGGAGACTAAAAATAGGG
GTGTGTCTCACAGCCCATTCCCACCCCTGGCACCCAAGCCAGTCCACTCGGCCACAGGGAGCGGGGAAAGGGTTGTTTAGAGAGAATTTTCTTA
GCCTCGAATACATGTGTTGAGCTTATGGTATGTTTTATAAAAGCAGATCCCAGCCCTCGTTTCAAGGGCTCTTTACATTTCCTTAGGAGTAGTC
TCAAAGAGAATGGCAAAAATGCCTAAGTTTCACAAAATACAACCTTGAATTCACTTTAAACAAAGGAAAAAGTCTAGTTTTAGGAAAGAAGGGA
GAATCTGTTTTACATGTAACAACAAATTGCTTTTTCAAAGTGCTGGGTACAGACACGTATGAATTGAAGTTTAATTTCGATAAGATTGGATATC
AGCATTCTGAGATTACAGAAAATTCAACGCGTGACTCCTCAGCTTCAGTGCGTGCTCTTACACATAGGTGAAGGGAGCAGTAAGTTCCTATTGG
AATACTACCACTCACCTCCTTCCCAACTCCCATTGCCCCCTCCACCAGTAACATACCTGTGTACCTTACCCTCACCTGTGAAAGGACCCATATG
TACATAAACCCAGAAGATACCACAGCAGGAAGGAGTGATACTGGCTTCTCCTCCAGGCCATGGCAAAGTACAAGCTGCAGGCCAAATCTGGCCA
AAAGTGGCCCATGGACAAAGCAAAACAAAAACTAAGAAGACTGTGCAACAGAGATTGTAGTTAGCCTATGAAGCCGAAATATTTACTATCTCCT
TTTGATAGAAGAAATCTGCCAACCTCTGCTCTAGTTCAAGAAAAAAAATCAAAATCTAGACATGTCAAGTCACTCACCAACTGTCACATGGTGA
GTTAATAACAACTGGAATAGACCCGGGTTTACTGATTCTCAATGCTGTGTTCCTATCATGATTATGGCACAGACCACACCGCTTCAGAACTATG
AATATGGCAGCTTAGGGGGCGTGGTGTTTGTTTCCCCAGAGAGCATTTCATTCCAAAGTATTCTGTCTCTTCACTCCATAAAGCTATTACAGGC
CTGTATGATTGTCTCCAACCAAATGGATTCCATTCGCTTTTCCTTTCTTCCTAGGAGTCCTCTGTCCCTCTTCCCCTCTCCCCATCTCTTTCCC
TTTCTACTCCCTCCTCATGTCATCTCCTACTCTTGATCTCAGAAGAACATTTTGGTTATAACCTGTTTATGTTTTGCCTCTCAGGTTCACTGCT
GGCCTATAATACAACCTCCCACACCGACCAATCCTCACGATTGAGTGTCAAAGAAGGTAAGTTTGTTCTTTTGTGCACTTAAAATTTTCTTCTG
TACCAGACATCACACAGGCCCATGCTGTTAAGGTTGTTGCAGAAAACCAGCTTGCTTGTTCCACTCAACTTTTCCTAGCATACAAAGACAAGCC
AAAGATTTTCGCCACTTGTGCTACCAGTTGCAAAAATACAGTAAAGAAAGTTTTACAGTATCTTGTAATAATATCACAAAGATACAACTTGAAG
TTGTCACTCCATGCAGGAAAACATGTTACTTTTAGAAAAAAATGAATGCTGCTTACTTTCAGTTGAAAGTTGGGAGTTTTCTCTGATGAAAAAA
TAATGAAATGAAGAGTTCAACCATTCCAGCATGTCTACCTTTAAAGCTTTTTTTCCTAAGAAATTTTAGCAGCCQCTCATGCTGGCTCACACCT
GTAATCCCAGCGCTTTGGGGGGCCGAAGTGGCTGGATCACTTGGGGTCACGAGTTCGAGCCCAGCCTCGCCAGCATGGCGAAAACCACCATCTC
AGCTAAAAAATACAAAAATTAGCCAGGTGWGGTGCCAGGTACCTGTAATTCCAGCTACTCAGGAGGCTCAGACATGAGAATCGCTTGGACCCAC
GAGGCAGAGGCTGCAATGAGCCGAGTTCGCGCCACTGCACTCCAGCCTGGQCGACAGAGCAAGACTCTGTCTCAAAAAAAATTTTAGCGATGTC
AATTCATTTTTAAAGTGGTGGCTTAAGCCTTTGGTCTGGTTTGGTTTGCTTTTGCTGAGAAAGAGAAACTTCCTCGGCAATCATTTTTGCCAGT
GAAGATTTTAGTACACGTCACAATAGAATTCCTCAGCCTCTTTATGAAACATCGTGAGGAGTGGTTCAGATACTGTTAGATTTCAGGCATTGAA
ACAAGTGAATAATTCATAGTACCTGGTTTAAAGGAGGAAAAGATGTGAACAGAATAATTATTAGGAACCAGAGAGAGACTGGAAAAATATTTGC
GCGGCATAGCAAAAATTCCACAGAGGAGGGGACTTTTGAATACGAGCTTGAAGAATAATAAGAGTGTGGCAGGCACTCTGTCCTCCTTGGCTCG
CTGTCTGTCCCCAGTTTTTCTTTAACTCACCCTCCCCAAAATATATAAGAAAGGCAGAAGTTCTCAGGATCAGTTACATATAGCACACCACTGC
AAAACCTTTCAGAGAAACAAAGGCTCTTCTAAGGGAAGGACCATTTGGCTTAAAATCCGCATGGGGTGTGAAGGAAACAGAGAGCCAAAGGCAC
TAGCTGGCTGTCTTGCCCAAGGTTACAACTTTGATCACACAGCACTTTGTGTTTCCTGTTAACAATTTATAATTTAATAATGACCAGAACATTT
AGTGGAAGAATTATACAACATAATGAATCCGCTTTTAAACATTTGTGTTTTTCATTTGTTTCCTTCTCTCCTATCCCACCCTGAGCCAGTCCTG
TTTCTGCCACTGTTTTTCCTTTCUAAATCAGATTTCTTGAGTTTTGTCATGAACGCTGAATTTCTATGGATTCATTCTACATTGTGAGTCAGAT
TTCACTTTTTGACCTATTTTAATATGCTGTTGCAAATGTCTGTAAGAGAGAAAATACATTTTAGTGGCAAACGCATTAGATTGAAGGTCAGGGC
ACCTTTGGCTTCCTGTGAGAAAACCACTTCAGGCCCTGAACCTCAGTTTCCTGCAGAACGAAAGAGAAGAACTCTGTCAGCAAGAGGCCAGCCC
TGACTCTGGAGATCTTCGCCTCTAAGGAGATGACAGGAGCACTCACATTGCGAGGGCTCAAGAGCCACTGTCCTTTCATATGTTCTACATACTG
AGTTTTATTTCATTTCTGGATAGGGATCCACTTTTTGGAAAGGAAGGAAAAAGAACGGGAMAATGACTAGAGCGACAGAGAGAQAGGGAAAGGA
AGGGAAGGGAAGGAAGATAGGGAGGGAGAAAAGCAAGGCTATAAGGAAGGAAGGGAGGGAAGGAGGAAGGGAGGGATGGGAGGACCCTAGACCT
CTGAACTGCTGAGTTCGGATTTTTGTAGTTTCTCCAACACTTCAGGCTACAACCTGCTACCAGACATCAGAATTAGCCACTGAGGCTCTGAAGC
AGAGCTAATGAAATATTTTCTGATATTGGGCTTCAGATATAGGGTTTAGTTTAGAAACTGGTTTAGCCAAGTTGAAATGTGTTGCTAACCATCT
CCTCCTCCTCCTCCTCCTCCTCCTGCTGTCTTATTGTTCAGCCGTGTCCTCTACCTGCCATACACATTTCCTTCCCTTGGCCCTTTTGTGTTTA
GGGAGGACGTTTGTAACACTGCTGGCTCATTCAGGCTTATTGCAGGAGCAGCTCCCTCTTGCTGGCTACCAACCCCTCTTCTGAAATCAATTAA
CTGTAGTATCCAGGCAAACACACGCTGCCAGGACCTCATTCAGGTGGTGCCGGCATTTATCTCCCAACATCGGGCCTGGCCTCTAGAGACGATT
AAGCCTGTGCTTTGCAGGTGCATCTTTTGTCCCCAGTAAAGCTCTCCACTTGAGCTGTCTTGCTCCTCTATGCCTTCCCCTTGTGAGGTGGTCT
GAATCTGTCTGAACGACCCATCAAGCCACAAAACAAAGTACATTAGCAAGACAAAGCTAAGCAAGCCCTCCCTCTATCCTCCCTGCCTCCTCCC
CACCTCTCACTGGCTCTCCTGCTCTGCTCTAATCACTATCTATTAGCTATTAGAAGACATCAGGCAACCTTGGCTCCATCTTCTTTGAATAAGA
CACACACACCCCCAAACAAACCCAGAGTTCATCAAGAGCACCACACCTCTGTGTGTGTGTGTGTGTGTCTGTGTGTGAGTGCACACTGGTGCAG
TCCACAAAGGGCAGGTGCTGGCATCAAGCACAAAGCAAGGAAGTTGAGGAGATGCTGTCTATTAATGTCTTCAAAGCACTTATCAAATTAGAAT
GGCTTTTTGCTTTAAAATTGTATAATCACCCTTCCAGCTTGTCTCTTGAAAATGGCTGCAATCTCTAGGGGTTATTTGTGCCCAGGAAGTAAGA
GTAGATTTTAAAAATTAATTTAGAACAATCTTTAAGCCCCTTTAAATTAAATATTCTATGCACATGGATTGGATCCAGCTAGAGCAGTTATGCT
CTACCTTTTAGTTTATCAAGGCTAAGGCACTTAAAAAATAAACTAGGATAAAAGCTATTGTTATCCATTTACAATAGCAGCCACAACTGTCATC
TGTAAAGGGTTTTGGAATATATCAGACACCTCCACATGCTTTGCTTTGGAGCCTAGCACTGGGTCTTTGAAGTAGATATTATTATCTCTATTTT
GCACACAAAGAAAGTGCGGTTCAGCACTATTAAGTGACTCACTGAAGCGTACACAGCTACTAGATGGCAGAGCAAGGACTCAAACCAGGTTAGA
GGATTAGACTAGAACCCCCTCACTTTCTGACAAATACAGCCTTTCTCTTCCAGCTGCCATTCTGCAAAAGCAATACCTAGCCTAAATGTAACTT
GGGCAAACATGTGAATGTTTTGCATTACTTGATTTCTGTCCATGCAGTTTTCCCACTGTCAGCTCCATCTCCATCCCTAAACTTTTCTCTCTTT
CCAAAGATGAACCAATAAACAACTTATGCTTGGCACCAGCCCTTAGTTCTGACAGCACAGAGAATCACCAGGAGATCTTTCATAATACTGACTC
TAGGACAAACATTGCATGATTGCACTCATAGGAGGTAACTGTCAACTTTGTAGAGCCAGAAGGTACATGGTAGTTACCAGGAGCAGCTAGGAGT
GGAAATAGGGTGTTAGTGTTTAATGGGTAAGAGTTTCCATTTGGGAAGATGATAAAGGTTCTGGAGCTGGATGGTGGTATCGTTGCATAGCATT
GTGAATGTACTTAATGCCACTAAATTGTACACTTAAAATGGTTAAAATGGTAAGTTTTATGTTACATATTTTACTAAAATTTTGTAAATGCAAA
AATTAAAATAAAAAAATACTGATGCCCAAGTGCCAAAAAATGATGCATTAATTCAGAACCTCCAAGGGTGACTCCTGGGCATTGGAAATGTTTT
AGAGCTCTCCGGGTTATTCATATAAGCCAAGCTGCAGCCAAGCTAGAGAACCCTGCTTTATAGTAATCAGAGACAACTAGAGAGAGATGAGCCC
ATGTTAGAGCTACTCCAGATTTTCTTGGAGACACACTGGGCGGTTGTCTGGACCCAGATTGTCCTAGAAAAGGAATAGCAGGCCCTACTGGTAT
ATTGATAAAGGTATAGGTAAGTGAAGAGACTGTACGATCTTGATTAGTTTTTTGTCATTGTCATTGATGACTCATTTTATTGATGAATGATGTT
ACTGATTTAGACAACTGTACGTTCGTACATCTCAGAAATTTCTTTCTGACGTGTCCTCATTCAGTCCTCTAAAAAGTAGATATGGTGTTGGTAA
CGTGATTTTATAGGAAGGATACTGGGGTTGCAGAAGTTAAGTGGCCTTTTCAAGTGTGTAAGAGTCCTGGAGCCAGGGCTACTGACTTTCCACA
CCTTGTTCTCTCCCGTCCTCCAGGCTGCAGATGTGCGTGTGTCTGCCCTGGTCCCAGGTCAGAGCTTCCCTTTGTTGTTCTGGGAAAACCCTGC
CGGAGGCCTTCCCAGCACACTCAGCTGGCCCAGCAGTGTGCAACAATCAGCACATCTCTTCCTCAGAGCTTCTTTGCATGCCTAAGCCCTCATT
TCCTTAGTTCCTCATGCTGAATCTGTGTTAATACCTCTGACTTTCCAGACAGAGGATATTGAGTTCCTTGTTTATTATTAACTCCTGGAACTCA
TCAACCGGCCAAGGGCCTGTGGAGCACTGAGCTTCTAGCCCCAGCCTGGAGCCTTTCAGGACTGCCATTGAACACGGAAACTGAAAACCACAGC
CCCACTGCAAGCGGAATGGCCATCTCCAGCCATTGCCTTGGCTGATGGATAAAAAGTCTGTCGGCTTGCATGCTAAGTATGGAAAAGAGAGGGG
AGAAACTACCTTTCTGTGTCCCTTAGAGTGAAATGCCTGGCTGGTGCTGAAGCCCATGTTAACGAGAGGCTGGCTTCTCTCCAGGAGAGTCCTA
GGTGGCAGGAGCCATGCACATGGTAACAACAGCATTTTGGCAGCCTGCTAGGGTTTGCCAAGCACGTTCCTATCCATTATCCCGTTTGTGCCCT
CTCGTGCCATCACCATCAGATGAGAAGGCTGGTAGTATTATTATCCCCCTTCTATAGATAATGAAAACAAGGCACAGAGAGATTTCAGGGTTCC
TTAGAAGGCACCCAGGTCATGAAGCAGAACAAGACTCAAGTCCGGGCCTTTGGTGTGTTCTGTCCTTCCTCTAGGCTGCTTCTGGAATCATTAT
CTCACCATACTTGATTCAAGCATCTGACAACATCTTAAGGATTCTTTAATACTCTCAATTTACCCAAGGTGGGCACTGGTCTCCTATTTCAGCA
TTAGAAGGCACCCAGGTCATGAAGCAGAACAAGACTCAAGTCCGGGCCTTTGGTGTGTTCTGTCCTTCCTCTAGGCTGCTTCTGGAATCATTAT
CTCAGCATACTTGATTCAAGCATCTGACAACATCTTAAGGATTCTTTAATACTCTCAATTTACCGAAGGTGGGCACTGGTCTCCTATTTCAGCA
TTATAGCATACTGATTAAAAACTTGGGCTCTGGACTCAGACTGTGACCTGGACAAGGTGCTTACATTTTTCTGCCTCAGTTTTCTCATGTATAA
ATGAGGATAATTGTAGTCCCCCTTCAGGGATAATGTAAAACTCATAAATCAGCACAGTTTCTGACACACCAATAAGTGCTCAATAAAAGTTATA
TTTTTTTGAGATGGAGTCTCGCTCTGTCGCTCAGGCTGGAGTGCGGTGGCGTCATCTCGGCTCACTGCGTCCTCCACCTCCCAAGGTTCACGCA
TTCTCCTGCCTCAGCCTCCTGAGTAGCTGGGACTACAGGTCCCCGCCACCACGCCCAGCTAATTTTTTTTTGTATTTTTTAGTAGAGACGGGGT
TTCACCATGTTAGCCAGGATGGTCTCGACCTCCTCACCTCAAGAGCTGCCCGCCTTGGCCTCCTAATTACAGTATCCCGCTAATTACACTATTT
TTGAGGGTTTACCAGATGTTAACACCGTACCAAGGGTCGTGAAGGATACTATACATAGATAGCCAAGCTGCTTTAAAACTTATTCGGGGGCCGG
GCATGGTGGTTCATGCCTGTAATCCCTGCACTTTGGGAGGCCAAGGTGGGCAGACCACCTGAGGTCAGAAGTTCGAGACCAGCTTGGCCAACAT
GGTGAACCCCGTCTCTACTAAAAATAAAAAATTAGTCAGGTCTGGTGGCATGTGCCTGTAGTCCCAGCTACCCCGGAGGCTGAGCAGGAGAGAA
TTGCTTGAACCCGGGAGCCGCAGGTTGCAGTGAGCGAAGATCACACCACTGCACTCCAGCCTGGGTGACAGAGTCAGACTCTGTCTCAAAAAAC
AAAGCAAAAAAACAACTATTTAGGGAGACACACCTAGGAAATATGAAGGAAATATAAAACTGCATGTAATCGAAAAACAACAATGCATGCTACA
CACAAGAAATTTTCTGAGTGTAATGAAGAGATGGAATCATTAATGCTCAAGCTGAACATCTCCTCCAAATCCCTTATAGAGAACAGGAGAGATC
TGAGGCCAGAGAAGCTGTGGACCCAGCCATGGTCACACAGGGAGTGAAGACAAATATATACAATTATTCCTATGTAGGCAGATCTTATAGATAC
ATGATACCTTAGTCAGGAATTGACCTAAATTCTGTGATTCATGCTCTCCTCCATTCATTCATTTCTTTCTTATGGAGAATCTTCTCTGCATAGA
ATACCAGGCTGAGCCCTAAAACCATGGTGAACACAGCACACTACCTACCCTCAAGCAGGTTCTAGTCAAACAGAGAGACAGACAGCTAAGTAAG
TAAGGAACTACTGTGCTTTAGAGTGAGGGCAATGCACGTATATTACCACGTCTTTCAATTTTCCCCTGCATTTAGCTCCTGTGTGGAPGTCCTT
TATGATTTTAGAGGTCATAGTAAAAGATGGAGGCCTCTAGCAAGCTGCAGCATGGCAGGGCTGGAAATAGATGTTGAAGCAAAGGGAAGGAGGA
AGGCACCAAGGAACCAGCGTGTTTGTTGGGGTGGGTCTGTCAGCTTTCAAGTTCGCTTTTGGAGACAGGAGCCCACGTGAGCCCTTGCAGGAAA
TAACTCAGGCCTGGGTGTTTGATGTGGGTTTCAGCAAGACACCCTGGGGTAGAACCTGTGCACCATGGCTTCCTGGTACCTGGAAAACCCGGTG
CAGTTGGATGTTTCATTGTGAGACAGGAAGCTCAGCGAAGGAGCGGAGAGCCAGGGACTTGTGTCAAAATCATTTGGCCGGGGAGGGCGGACTA
GGTGGGCATGGAGCTGAAATAAGACTGACCATGAATTCATGATTGTTAAAGCAGGGTGATGCGGCCTCAGGGTTCATTAGACTTTCCTCTCTAC
TTGTATATATCTTAGAAATTCTCCGTAACTCAAAAATGCCTCAAGATATCTTTGCCTTATTTCTCCGGGCGAAGAGTTTCCTGAGGAGGGGAAT
CTTTGTCCCTCGCGATATGCACTGCCTGTGTCAGGCTGATGCGCTCCCGGGTGCAGTACTTGGGAAGGCGGGCATTTGGCAGCCTTGTGTGTGT
GTCTGTGCAGGAGGGCGTGAGCTGGTGCTCAGTGTGGAGGTGGGCTGTGTGTGTTGCCTTGTAGAGTGCAGCGTATGGGGGCTAGGTCTGGAAC
ATGTGTACCCAAAGGAAAAGGCCTGTAATACTGTGAGGTAATCTCCTGTTATTTTTAGGGAGTAAATAACATCTCTCATGCAGCAGGTTGTGTG
ACCCCACAGGCCCCATCTACGTCAGCTCACACACACTTCAAATTGGAGGGTATCGCGGCCTCACAGGAGAGCCTCTGAAGAACATTGTCATTAT
ATGTTCTTCCTTTATGATGAAATGTGCCTAAGCCATTCTTAGCAAAAGCAGGGATGATTGCTGGATGTGTGTGTGTGTGCATGCATTCGTGTGT
CTGTGTGTGTGTCTGTGTGTGTGTGTGCACGCGCGCTGTTTCTGTGGTCCAAAGGCAAGATTTATGATTATGGGATAGACAGTAGCTTGCTCTC
TCTATTTTATTTTTTAAAAACTCTTTTCCTTTGAAATTCCTGAGTTAATGTTCTGTCTGCTTTCTATCTGACCCTCTTCGGAGAGTTCCATTTT
TTTTTTTTTTTTCACGAGAGAGAGATTAAGAGAGAGAGAGACAGAGACAGAGAGAGAGAGAACCAGGGTGACAGAGAGAGACAGAGATCGGGGG
AGGAGGGAGAGCGAGAGAACTGGAAACAAAGACTCGTTGTCTCTAAGCTGGAGCAGGCAGGAAACCCCAATCCCTCGGGAACTTAGCCAGCCCG
CCCTGTCCTCGAGTCAGACTCCAGCTCTCTGAATTCAATTTGACAGCTTCTCTGGGACACTTTCTAAGTAACCATTATCCTTCCTTTCTCTAAG
TAAAAGGACTGTTATTTCTTTTCGTGGGTGTGCTGTGCGAACTGCTATTGCACACGTGTGGCTCACACAGTCACTAGGACACACTTTCCTCAAA
TTATTGGAAACAGCCCGTTTCCTAAGACAAGTGTAATTTGTTCCAGGATAATAAGGCAAAAAGACTGAGTATCAGTCCACTGCCTTATTACAGG
TGATCATTCTCCCCAGTTTCTGTGTTAATTGGTGGATTAATTTAATGAAACGCATCACCATACATCCCACTGTGGAGGGAACTCAGATGTCCTC
TGATCATTCTCCCCAGTTTCTGTGTTAATTGGTCGATTAATTTAATGAAACCCATCACCATACATCCCACTGTGGAGGGAACTCAGATGTCCTC
AAAGCTACCAGAGGTTGTGCAGGCCACGGGCACAACTAGGGGTGACCACCTAGAGTTCAGAAGGAGGCTGTCTTCTGCCTGGGAACAGGGCGTC
CTGGGGTTTCTTTTATTACTCAGACCCAGTTGAGTCACCACCATAACCTGAGGGACTGTGAGGTGATCACCTGCCCTTCAAATGTGTTCCTATT
GGAAGACCATCCCGATTCAGCTCTGTGGGACCGCTAGAGACAAGTTCCAGAACTGTCTGGATCCCCCTGGAGCGTAGAGGTGTGATAGTTTTGC
TCAGTAATACAGCTTTGCCCATTTAGGTTCTGACCCAAAGACCTGTCCTTCAAAACATGACTTGGTTCCTGTCTACTCTATCTTCACCACACTT
TGGAATAATGTTTCCCCATTCTTCCTTTGCCGGGTATACCTTTCATCCGTCTCAGTCCCCACCCCCAGTCCATATTCTAGGAAACCACACTCAC
CCTTTAGGGCCGTGGTCAGATCACACAGCATCACCTCATTACGGTCTTGTGCACCCTTCCCCAGGATGCTTTGCTTATACCCACTGTTTTACCA
ATACAGCATTCAATAGATTCTAGCCCAGCAGTCTTCTGTCTTGTGAGACGGGAAGCGTCTTGGAATAGGGACTATTCGATGGATGGATGTTTAA
TAATAGGCAAAGTACCTTAAACTGTTCCCCAGCAGTCTGGTGTAGAACTAACCTTTGAGATGTTTCTACAAGGTGGATGTTTTTGGCTCTATCC
ACTGCAGCTGCTGGTGTGGCATTGCCTTTCCTCCCTACCCTGCCCTAAATTTCCATTGCATGGGACCCCAGGGTGGTTCCTTGGAAGCTGTGAT
CAGTCCCATCCCTGAGCAGGGAAGCAAAACTGATAAAGAGCAGATTTCGAATCACAAGATGATACCACCAGAGCCCCTTCTTGGCCCGACACCA
CAGGATCCTGCTGCCAACTGGACTCCACAGGCCCTTCAGGTCTCTGCCCATCAGGAGGAGGCTGAGGACACGCCAAGCCGAGGAAAGGTGACGC
TGCAGGGAGAATGTACCTTCTGCTCAATTCCACCTTCCTTTCTTCACTTATGCCCCAGACAGCCACAATAAGAGCTAACATTTGTTAAGCACCT
ACTATGTGCCAAGAAATTTCCTATTCATTTCACATTTATCCTTCATAAAACCTTGTTAAGTTGGCACTATGATTATTCCCATTTTACCTGAATC
ACAGGTATGATGTTAAGCCTGAATCACAAAGCTAGTATGAAACACAAACAGAAGAGAGCCTGTTCCTGTAGTCCCCTCCCCACCTAGGCAATGG
CAAGGGCTCCAAAATGACCCTTTCCTACTTCATCTACCACCCCCATCATGCATTTCCCCCAAGTAGCTGATGTTGTCTAGTTGCTAAGATATAT
TCATCTATTGACTCCTGCTACCATCTAAAAAATCAGGAGCCTGACCCAGTGCAATCAATCTTATTTGCATTTCAAGAAGCAATCTAGCAATTTA
GAATTTTAGAAATTCCACTATAAAGAGGTTGTTTGCCAGGTGGGATGGGGCGGTGGTAATGGAGCTGCAAAGTATATAAAGAAAACATGCTTTG
TCCACGCTTATCAGTCAATTCTTTCTTTCTATCCATCCCTGGAGAGAGAGAGGGAGAGGTGAAGCTTCTTCCATGCCACATGGAGACAACGGGC
TTCAGACATCTTCTAGTGAAAGACCAACGTATAGGAAGCATCATTTGTGGTGGTTTCACAGATTTTTTTTATTGTTACGCTTTATTATTTATAT
AATTATACACATATCCTTTTGTGTTTAATACTACATTTAAGAGGATAAAGGAAAACAAGAGATTTAGAAAACAAAGTATTATATTGAGTAACAC
TCTATTGATGAGAATTTCAATAAACTGAATTTAAGAAACCATCCAGGCACAGTGGCTCACACCTGTAATCCCAGCACTTTGGAAACCCAAGGTG
AGAGGATCACTTGAGCCCAGGAGTTCAAGATCAGCCCTGGCAACACAACTAGACCCCATATGTACAAAAAATAAACAAAAGTAGCCAGGTGTAG
TGGTCTGTTCCTATAGTCCCAGCTACTCCAGAGGCTCAGGTGGGAGTATTGCTCGAGCCCGGGAGATCGACGCTGCCATGAGCCGGGATTGCAC
CACTGCACTCCAGCCTGGGCAACAGAACAAGACCTTGTTCTCAAAAACAAAGCAAAATAAGAGTGGGGGTGGATAAATTCAATAAATTTAATAA
ATTTATTATTTGAGGGAAATAAAGTTTCCCTCAAATAATTTCATGGGTCTATCAGTTTCATGGGTAATCCTCTGCCTCTGTAAGCTTCATAAAC
CCATGGTTCCCAAGGAGAAGAAGGAAGAGATGTCAAAATCAACTTAAAGCATCTTAAAGACACGTCCAGGATGCTCCAGCTGCCCCACCCTGCC
CCGTGTCCCTCCATAAATTCACCTGTGCCCTTGGTAGATGAAGGAATGAGGAGAAGGTTGGAGATGAACACTTGTGTTCTTAGAATAATCTCCT
TCCATTGCTCTGGAATGCCCCACCCCTGCCCTGCCCAGTATTGAGAGCCAGGGCTTCATCCCAATGCTTAACTGGAGAAGAAAGGGCACCTTCC
TGCCACTACACAGTTCGCCTCTTCTCACCCCTCTGCCAGAAGGCTCCAGGCCAGGCACTGCTCCTGACCACTCAGGAGTTCCCACTTTGCCCTT
TCTGCCTTCCCTGGGCTGTCTTTGGTCTTTCTGCTTATCAGAGCTGCCCTTAAATGCACCCTGAATAAATCAAGACCCTCATAGGTGCCCATGT
GCTCTGCTACATTAATGATGGTGACAATGAATGCATGAGCCCTGCTACATTTTAGTAAAGGACGGTGACATTAGGTAAACCTCCAAGTGGGGCA
GGGACTGGTGCCAGGCTTGTGGGACTGTTGCTGGGGGTCTCCAGAGCACCCTCCCCATTCGTTCCCATTGGACTCAGCCCAACAATGACTCCTC
CCGCACTGCCAAGAAGGGCCTTTCATGACCCTGAGTGCTTGGCAGGGTAGAGCTCCACTACAGTTCTCAGTAGAAGTTCACATCCACTGGTTGG
GCCGTTTGGGTTTTGCATGTCTTCTAATTTATCTGCAGACTCTGGGATGTTACTATTTTAGGCCTGCCATCTCTACCGAGTTTCCCCTTCACAC
TACACGCTCATCCCACTCCAGACGACAGAGCGAGGACTCCAGATGAGTTCGCCTTGCTTGATGAAGCTTCATTGCTATTGCTTGGTTCACAAAT
AGAAGTTAAAAGTGATCCCCGTTGGCCATTTAGAGGAGAAGGGTCCCAAAATACTTTGGGAAAAAAAAGGACAGGCCTATAATGCTCTGCCAGG
GGCCACCTCAGCACAGAGTGTTCCAAATGTGTTGGTTCTGCCTAATATACTGATTTAGAAATTCCACCACATGGAGGTTATTTGAGGCGATTGG
TAGCTGGAAGGTATTTAAAAGAAACTTGTTTCACCAAATTCTCATCAACCAAATTCTTTCTTTCATCTATCTGGAGAGAGAGAGAGACGGAGAA
GCTTCTTTTGTGCCAGACAGAGATCTATGAGCTTAGGGCATCTTCTAGTGAAAGGCCAATGTATAGGAAACATCATTTGTTATTTTAATATAAA
AACCTTTCTAATCCCTTTTTATAGATTGAATAACTCTCTCTCTTCAGAAGCCCTTATCTAAGATAATTAAAGAGCATATTTCTCATGAATATCC
TTGTTGGAGAAAAGAAAGTCCTTGAGGAGGAAATATGGAGGCTACAAACACTACCCAGGTTGTGAGTGGGCTTTTTCTTTCTTGTCTCAGGGAT
CTGTAAGATCGAGAAGTTTAACATGGGTCAGGTGTGGTGGCTCACGCCTGTAATCTCAACATTTGGGAGGTCGAGGTGGAAAGAATCACTTAAA
CTCAGGAGTTCAAGATCAGCCTAGGCAACATGGGGAGAGTCAATCTCTACATCAAATAAAAAATTAGCCAGGCATGGTGGCACGGCCTGTGGAA
TCCCAACTATTTGGGAGCCTTAGGCACAGGAATTGCTTGAGCCTGGGAGGTCAAAGCTGCACTGAGCCAACATTGCGCCACTTCACTCCAGCCT
GAGCGACAGAGTGAGGCCCTGTTTCAAAATAAAAATATTAACAGAGGCTTAACATGCCTCTTTGATAAAGTTTAAAATTCTTGTATTTGGCATA
TTCTAAAGAAAAGATGGTAAAATTAAGTGGGACAATTACTTTATCTGTCAAAATCCAACACACTCTTCAAAACCCGATTCAAGTCCTATCTGCC
TCAAGATATGTTTTTCTTCCTCCTTAACACTATAGTCTCCTCTCGCAGCCTCACCTCATTCACACGCTATTTATGCACCTAATTACAGATTACC
TTGTGGTCTTTAATTGTGAGTTTTCTCCTGGCTCTTTTCTTCCAGCCCTGTATATATTCACTAAATACCATTGAATATTTACTCAATCCTGCTC
CAATAAAGGAAGAACCAGAAGAAATTAGCTTTGGTTGACACAAGAAAAATTAACTTCTTATGTCCCATGAACTAAACTCTGAAAAAGAGTATCA
GCTAGAGTTCTGTAGGATGCGTTAGAATATAGAAAGCAATTTTTTTTTTTTTTTTTTTTGAGACAGAGTCTTGCCCTCTCGCCCAGGCTGGAGT
TCAGTGACGCTCACTGCAAGCTCCGCCTCCCGGCTTCACACCATTCTCCTGCCTCAGCCTCCCGAGTACCTCGGACTACAGGCACCCACCACCA
CGCCCAACTAATTTTTTGTATTTTTAGTAGAGACATGGTTTCACCATGTTAGTCAGGATGGTCTTQATCTCCTCACCTCGTGATCTGCCTGCCT
CTGCCTCCCAAAGTGCTGGGATTACAGGCGTGAGCCACTGCGCCCAGCCCTAGAAACCATTTTCATATGCATGGTGTCATTTATTCTCAAAAGA
TCCCTGTGAGGATCCACTGTGCTATTTGCTTTTCCAAACTCTTAAATTTAGCAATAATCACACCACTCTCTCCCGCCCCTGCCAAGTATCTACC
TTTTACAGAGAGCTTCAATAAGAGGTTCAGAGAGGTTAAGTCATTTGCCTCAGACCACACAGCTCATACTGACAGAGATGAGAGGCAAAAGCAA
GGAGTTCTGACCCCCCAGCCCAGAGTTCTTTCCTTTGCAATGAGCCATTTCCCTGTTTGGIATGGATTCACGAGAATTATGGAAGTTTCTTCCC
ATGAAGATCTTTAAGAGCCCTTAGTAACACCACCAACAGTCCTATGCTTGATAAATTTTAGGTATCACTCTTCCAAAGAGATGAAAATCATTCT
TGGTATCATTTTGAAAAATCTTTGAGCTTAGAAGTCTTCGGCCTTTTGGGCCTGTCTGCAAATAATTATCAGCCCTGCCCAATAGAAACTACAG
GAGGTTAGAGAGAGGCAGTTTTTTGCTATGAGTCATAATTTCAATTTCTATTAAAATTCTTACATGGCCACATATGCTACCTCTCAGGCTTTGG
GCCTCTGGGCCTGTGCTAATTTGCATGTCTGGTTTAGATAATGTCTGAGGTCCTTCCAGTCTAAAAAGGAGCCTCTGATGCTGTGATATAATAA
GTGAGATCACATTCCACCTACCAAGACTTGATGGTTCTTTTTCTTTTAACTACTGTGCTCTGTCTGATGTGTGGATGCACAGCTCAGGGACGGA
AGTGTTTCCTGCTCACCTGCCACGCCACAAAAGAAGGAGTGCTCTTGGCCGGGCGTGGTGGCTCACGCCTGTAGTCCCAGCACTTTGGGAGGCT
GAGGTGAGTGGATCACCTGAGGTCAGGAGTTCAAGACAAGCCTGGCCAACATCGTGAAACCCCGTCTCTACTAAAAATATAAAAATCAGCCAGG
CATGGTGGCAGGCGCCTATAATACCAGCTACTCAGGAGGCTGAGGCAGAAGAATTGCTTGAATCCGGGAGACGGAAGTTGCAGTGAGCCGAGAT
TGCGCCATTGCACTCCAGCCTGGGGGACAAGAGCAAGACTTCGTCTCAAAACAAAACAAACAAACAAACAAAAAGAAGTAGTGCTCCTTCAGCA
TGAACTCACCTGTCCACTTCTGCTACACTGAACCCAGAGACTTGTCCTTTCCTGCAAAGCATTTCACACATAGGTCAAAAGGCAAATCATGGGA
ATTGTTGGGATTTTACGTTTCTTGATTTGAATGGCCGTTCTAATTCAACGTGAATCCAAGACCACAGACTTGACAATCACCTGATTCAAAATAT
GTGAAAAGTACTTGAGTCTTTAAAATATGGGGTTCATCTCACCTTTTACTATTCCTCTCCCAAACATCAAAGAGATCCTGTCAAGTTTCTTAGC
TAACTTTGCTATCCTACAACATAAAGCAACTCTCATGCATAAAAAACTAATTAAAGGAATTGGCTTTCCAGAGGGAGCTTTGAGACCAATGTCA
CCCAATCTCTCACTTTTCAAAATAAATTATGGAACTATGTAGAGCTCTATTTTCATAATGTTAGATCAAGTCTTTCCTCAGAATTCTATATTTT
CAGAGAAGACCTCCCATCCCTGCACTGCCTACTTCCCTCCTCTGGTTTTCTCTTCTTCATAGCATTCATCGCCTTCTAATATACAGTGTAATTT
ACTACTTGTCTTGATGTCAGCTCCACAGAGGAAGGACGTTTGTCTAGCGATTGTTGTGTTCTCAGCATGTAAAGTGTCTCGCAAAGGTAGTAGA
CATTCACTAAACATTGTTGAATGAATAATGTGTGGTCCGACATAAGGCATCAATTAGAATCCAATAAGTTGGTCATGCCGAGGGGCAAGAAATG
AATTTTTGAGAGAAACAAAGGTGCTTAAGATACAACCCCACTTCCTAAGATGATCACCTAGCGAGCGACACAAGCGTACAAGGAAATTACACTC
AAAGGCTAAGCAGGACACGGGCAGTAGACACAAGACAATTCACCAGTGAGCCTTGACCTGCAGAACTTTGAAAGCAAAGGACACAGAAGCTGAA
TGTTACGCACACCCAAGAGTGTATCCCCTATGGCCAAGCACAAGAAGGGCAACCTCCCTGTGAACATTGCAACCTATGAGGGTCGGAGCACGGC
AGAGGGCGTTGCGTATAAACTGCCTCTCATTTATCCTCAAGCCTGATTACCTAAGTGAACTGTTATGTTTTCTTCTTTCTACCTGGAATCCTCT
TAAACCAGAGGCAGATTTGACCTAACCTATGCAATTTACTTCCGTCTACATGACCCAATATGGAGGAGTTTTGGCAAAAAAAACCCAGTTAAT
CTAGTCAGTATGAATTCCTATTCCACATGAGGCTGGCTCAAAATCCCACTTTGAGGCCTTATCAAAATAAATAGGTACATTTAGACATCTGTGT
CACTTAGACACAdAGCCTCTGGGAGAAATGAAATAGAAGAAGGTCCCAGGTTCAGCAGGGAGCCTCACGTGGCCATGGCAAGGCTGTGCCCAGA
GAATGTGCCACTTCACTCTCCACGCTTTTCATATTTAAAAGTCAGCTATTTCTTCCAAGCCTTTTCCTCGTAGCTCTTTTTTTCCCTTTGCCCA
TCTAATATCTTCAACAGTACCTCCATTATGCTCCACACAGCAGGGTCAGCTCCGAGGCAGAGGGGCTGTTGGATTCCAGGACAAGATCCTTGAG
CAAACGAAACCTGATCCAGGATGTTTTTTCCCTGTGAGTTCCAAGTTTGGGGAAAGCGTTCCCTGGATATTTTCCTCCTTCCAAGGTCTCAGTG
GATGCCAAGCTCCTCTGTTGCTCTTTGGGATGTAAGACGCCGCTGAAGTGAAGGTTTAATAGCCCCTCTAGAATGGTGGGATGTAGTGAGGACT
TGGTCCTGAGCTTCAAGGCCAGGTGGCCAGTGACTCTGGCACCTGACAGTGGGGGAGGAAGGAGGATGCTGGGTAATGCCTGGGCCTAACAGCC
AGGCAGACCACCTGTAGCCATCAGCCCTCTCTGTCTTCTCGGATGGGGTTTCTCAACCAGGGTCCAGGATAATAATCCACCTCTTCTTTTAAAA
AGAAAGCCACGATTTATTTTATTATATTATTATTATTATTATTATTTTTTTTTTTTTTTTGCTTTGGAGACAGGATCTCACTTTGTCACCCAGG
CTGGAGTACAATAGTGTATCATAGCTCACTGCAGCCTTAACTCCTGGCCTCAAGTGTTCCTCCCACCTTGGCCTCCCATAGAATGCTGGGATTA
CAGCCCTCAGCCACCACACCCAGCCTGAGACCCAAGCTTTATTTAAATTTGGGAATCACTCTTCCAGGAGCAAACCGTATAAACTGTCCTTCAT
CCTTTATAGCCCTCAGGCTTCTCTTTCTTTTCAAGGCCTTCCTCAATGGGCTTGGTAATCTCATCTCACCAAGATAAGCATGGTAGAGGGGCAA
GCAGGATGGAATACACTCCATGTATATGGTGTGTATTTTTAAAATCACCATTTATCACATGCTTATTTAATCCTCATAGCAACCGTAGAGAGCA
CCTGTTATTAATGCTTTTCAGAGAAGCAGAACTGGAGGTTCAAAGCAGCTCAGCAACATGACCAAGGTCACTCCACAAGGCCAATGGCGGAGCT
GGGATTTGAATCCCGGGTTAACTGATTCGAAGTCCTATCTCCTAACTGCCAAAATAATCCCCAGGCCCACCAGAGAGAAAGGATACCTTCGTGA
TCACATCCTAAGCCCTGCATCTACTTTCCCTCAGGGTGGGGCTCAGAGCGCGGACTCCACCAAAGACTGCAGCACATGAGAAGCTGGTCCTGAG
CTGTGGGTTGGGAAGGTTCGGGCAGTGCAGCAGTTCTCACACGTGGAGAGCAGGATCAAGGAACGCTTAGACGAGAGCAGCTTCTGCAGGTTGG
TGGCTGGGAGAGCCTGCTCCTCCCCAAAGACTGGACCTATTAGAAGCACAGGACCTCTGATGGAGATGGCCTTTTAGAGGATTTCCTAGTCAAG
CCCTCTACCAGTACACGTCATAACCTGTCGGACAGCCCAACAACAAACACCGCCGCTCACCTGCAGTTTCTTCCCTGTCGGAGTCTGGGAGTGA
ATCTTCCTCCTCGTGGGCTTGGCTCTCTTGGGAAGTTGAGGGCTTTGGGTCTCAGGTCTGCCATTGATTTGAGCATTTCTCCTGTGCATCCTCA
CTCTTTCAAGAAAGGACGTCTCGATCTGGCTACCAATCCCCCTGCTCTGCTGGGAGCATGAGCAGCCTTGCCCATTCCTCGGCTGAATAAATCT
GCATTCAGAAGCCAGGCTTTCCAAGGATAAACAGGGTTAGGTGCTGCCAGCCTTCTTAGCAGCAACCAGAAATTCAATGAGAAGTTTCAGGGAA
AATTCATCTTTTTCCACCCAGTCATTGAGAGCAAGGTTTTATGACACAGAGGATGAAGAGAGAGGCTTTTGTGGGCTGATGTCGCTGTGTTGCT
GGCCTCCGGTCAGGTCACAAGGTGCAGCGCTGCATGCCCGCAGGGACGTTTGCGCTTTCAGACAGCAGAGGCATCAGAGCAGAAGCAAATATCT
TCCCAAAGATGTTTGGCCATATTTCTAGGACCAGGTTAAAAGCTTCACACAGAAGCTAAGTTAACATTGGTATGTCTATGAGAGGGTCATGTCC
AGAAACAGCTTTCCCCTTCCAACACAGACTTTGCGGAATCTCCATGCTCATATTTCTCTACCTCAGGAGGCTCTCCTGGAATCTAATCTAAGAG
GCCATTTAGTCTCAAATTCACCCCCACTAAGCATCACATAATGGTCATACTGTTAAGGACATCATATATCTGAGCCTCAATTATCCACAGTGGC
TGGCAATGTCTTCATTCTCCAGACTGAGGCTCCGGCCTCTTTGCTTTGGCAAGAGTTGATCTCAGGACTGCCTGAAACCAGAAACTCCAGGCAA
GAAAAGTTAGTTTGTCAGAACCAGGGTGTGATTGTCTGCTGATTAAGCCATCTGCCACCACAGACAGACCAAGATCATCTAAACTGGTACACTG
GTGCCGACGGCCACATTTTTACACACTGGGCCTTTGGCTGCCACCTCAAGTTTGTCAGTTCTCAGGAGGCAGACTCCAGGCACCACATTCGAGA
GGGCCTCCATGCACCCTCAGGCTTCTTCTCATAGCAGGCACACCCTGCCTGAGCCCCACTCCATGCGCTGACGGAGAGTCGGGGCAGGAGCTCT
CATGCAGCCAGGTGTTGGGCTCTGCATGCGGGTTTGTGTGGGCATGTGAGCCACTGGGTCACCTCCCTGGTTCAGGCTTCTCCATTCAGGTTAT
AGACATATCTCTGTGTGTATGTTGGGGACTAGAGATGACCACACTGCTAAATTCTTCTTGAGTGACTTTTAGTAGGAAAAAAATATGAACCCTC
ACTTCAACAATGACATTGTTAAAAACACATAAATGCACACCACTTCACCGAGCAGCATTAAAGCCCTTGACTTCCCTGTGGGAAAAAGCTTTTA
GCCTATGCCTCATACATAAATAGGTGGATTGTGGTCCACTCAGACGGGACACAGGAGTGATGTAGTCTGTACCCCTCACACCCAAAGATGGAAA
TCTTTTGCCTGGAGGCTTAATTTCGTGAAGAAGTCAGGGTAGGAGCACTGGGTTCTCTTCAGCTAGTGATATCATGAACAATAAGAAGAATTGT
GTGTATGTAGCAAGTAGGAGAAATATTGGCdAAGTTTATTCATTCACAAATACTTAGAGTCTACTAACTCTGTGTGGGGCCCWGTTCTAAAAGT
GCTTGGATGTATCAGAGAACACAACAGAGATCCCTACTCTTATGGACCTGATGTTCAGGAGGGAGGGGGATATGAACCATAAACGACAAATACA
AATTAATTACTGATTAAATTATGTGATAAGTCAAAATGGAAGAGCACAGGAAGGAGGATGAGGGAGTTGCGGCGAGGAGGGATTAGATGTGGAT
TTGGAAGGCTGCCCAACATGTTTCTGGGTCTGAATATTTTTGGTCTGTGACACATCGTATTCTTGATTGCTLTACATCCACTGAGGCCACCAAC
TGTGCTGGGCACTATGCTGGGTGTTTACTTGGGTATCTCATTTACTCTCCAAGGCTGGCCTGCTTCTTCATACCCCTAAGGCAGTATGCAACAC
TTTAGTTCTTGGCCTTCTGCATCTTCATGCTTTTTCTTTGGAGCAGATTGCTCTGATGCTGGGTTTPACTTAAAAATCTTACATTGACAAAAAG
ACGTCTCCTCGAGCCCCAGAGCCTACGGAGTGCTTTTGTTAACCCCAGAGCGATGTGCTCAGGCTGTCCTTTGTGCAGCCAGGTACCAAAGTGG
GAAGATTTTCCATGCAAATACTTGGGAATAAAAGAAATGAGAGCGAGGCCTGTGGTCTTTGCTACTCTGACTCGACAGGCTGCTGGGATGAAGA
CGTTGGATGAAGACACCAGCTTAGGGCATGGCCTGTTGCTATTTATGACTCTATTACTTCACAGTGAGAGCACAGTTCAGGCTGACTGCTGGCT
GGCCTCTCTGTTTCTGTCACTTCCTTTTTCACCTATGTGAGCACTGTAGCATTCATTGGGACTTCCAAAGTCCTGTTAGCCTAGCTTCTGCCAT
CAGATGGGCCTGTGGGCACATTGCCCCATAAAACTCTGGCTCCTTCCTAAGGCCCTGGGGCACCACAGAAAGATGGGCCTGCCAAGCCACTGCT
CTGATAAGGCATGCCTTTAACCAGGCTCCATCACTCAGAGCTACAGGAAAATCCCATGGTCATCCGCCCTCTGTTGGTGACAGGGAATTCCATC
ATGCATTCAGATTTTTGCATGCGTGCTCTGTCCCTGGAACTAGAATAAGAGAATAGGGAGAAAAGCCGATAAGAAGTCAACGATAACTATAGCC
ATGGCCATAATTTGGGCTCCAAAAGAATAATTCTGAGTGGTTACCAGATAGCTTTCAGAGAGGGTTGAAGCCTTCAGTAGACTAAATGATTGAG
CAGAAAAAAATGTTTAGAAAACTTGAGACAGATTTTATCCATGCAGTAAGTCAGAAGTCAAGTCAGAAGTTCAGATGACATGTACGATTCCTGG
AATTTAGTCATTTTTTGTTTGAATGTGTTACTTCTCTTCTACTTTCTGTTCTGCTCCCACTAGAATTATCTCCTTCCCCCAGGCCCTCAGATCC
ACCCCACATACCACAAGCTCATTCTTCACCACACCCTGTTTTCTAGCATGGCTGCAAGCGCAAAACCTCCCTTAGTTCCCACCTGCAACGCCAA
GGTCCCAGAGTTTGCTGACCTACCATCAGCAAGACCTTGAACATGCCTCGGCCCTCTCTCCTCTCCCTCCACATTGCTCTACTTCAGTGGTACA
GCTCCTCCCATGGCTGTCTCTAGACCTCACCTTGACATCTCACCACCCACCTCTGCCTTGTTCCTACCTGATGCACTCTCCCCTCTCCTAAGAG
TCACCTGGCCCTAGTTCCACTCACCTCTCTGTCAACCTCCAGGAACCCTTTATGTGTCCTCCATGCCTTAGGACATGACCCGTGTTTCCTGAAC
AATCACACTTACCCTCTCATACTCACATGCAAGGACGAGGAACTTGTTTCCTATTACTTCACACCCACTCCCTGGCCATGCACAGAATACAGTG
CAGAAGTTGGTCCCAAATCTATTACCAGAGGCCTAAGCAGCAGCCTCCTCCTGCTCAAAGAAAAATGTTCTGCCGCTGCCAACATTGCACTTCC
TCTGCAACACATCTCACAAAATGCCCATCACAGCCTTCCACCTCATTCCAAGCTTGCAAGAAAGCTCGTCTTTCATTTGTCTTGTTTGTTTTTA
AGCAAGAAGAATCCCTTTAGAGGAGGAATTAGGAAAGAAAAAAAAGTCAAACAGAAACAGAAGGAGTGGAGGTTTGTCTCTCTCTTTTGTCCCC
TGCCTTGCCCTTCCTCCCTATCCCATCCCCCTCACTTTCTGTGTTGCTTTTCATGCCAGTTGCTAAAGACTGTAATTTTAAAACTGAACGGGCT
TTTCCAGAGCCTTGAGGAATGTGCATCTGCACGTGGATTTTTCCACAAAAAAAGTGTCCCTGTCTTTTGGATCTTCTTAGCCAGAAACAATGAG
GCCAGGCAATCAGAGTCCATCCGTCTTCCCAACTCTTATTCTAATTTGTTTGAGAGGCTCAGAAGGGGCTGAAGGGCATGGTTGTGTTTCACCC
CGTCAGACTCTGTTGTTTGATGAGGTTTGTGCTCCATTTGTTCGGATGGTTTTTATGGTTTCTTTGTTGTTCATGGAATAACTTTGAAGGTCAT
AATTCTGTATCCTCAAGCTCCTCTGTTATTCCTGCTCAATGTCTCAATGGGACTCATACCAAGAGAAAGGGAAGGAAGAAGTTTCCAGCTAGTT
AGTTAAGCAATTTCTCAACACATTTATGGAAGCATGTGGAATCTTTCAAGAAAGGGGTTACGATCACAAAAGTTCGATTTGAGGAGTATTCTCC
AAGACAACTGAGAAGCAAGCCCTTAGTCATGCCCAGGTGGGGAGCAGGTCTCCAACCTCTCATTTCCTGATCCAGCCCCTTTCCCAGCCACATT
TCTGGCCTCTTCCCTTTCTCTGTGGTCATCAGCCCAGCCCTCTCCACTATCAATAGATAGCCCGAGAGCCCTCAGAGAGCCTGGAAATGTGCTC
CCACCGCTGTGATGTCATCCCACATCATCCATGTGCTGAAATCAAGGACTAGAATCCGCCCCCAAGTATCTCATCGCCATCCGCTTTGAGACAC
TCTTCTTATGGGCCTTTCACCCAATCCAGACCTTGCCTGCTCTTCAGAGCTGCTTGAAGGATTTTGCTACAGAACTATGGACATTTAAGAAATG
TCTAACCTTGTGTCAGTTTATATTTGTAGAACGCTTCATAAGGTGCTTTTCCATATGTTATCTAATCTGATCATTTCAACAACCCCATAAGGTA
GATAAAACATAAATTTTTATTTCCGTATTAATTGAAGCCCAGAGGAGACTTTTGATTAATCCCAGGTTTCACAACAAGAGTGTCAGGAAAAAGA
GAACTTGAACCAATCCTCTGACTTCACATTCAGGGTTCTTCCCATTACTTTGGCTCCCAGATAAGACTACAATCTTCTGAAAGTCAGAGTGTTA
ATATTCCAACCCCAGGGGGTGAGTACACTTCCAGAATTTAGGGATGCTTTAAAGCCATTGCTGAAATTGPATTTTATTTCTCCTGATCACTACA
GATAATGCTCATGCAACTTTTCTGAGAAGCAGGCGATCCTAATGTACCCCTATTTGTTATTGTTCATTAGACCCTTCTTATGACTCAGTCAGAA
GAGGAGCTTGGGGCAATAACATGAATTCTGGCCTCAACAAAAGTAAGTAAATGTTTTATAGTTCTTTGGAGGAAAGCATGTTTCTGAGGACAGG
ATTGGAGAACAGGATCATGAGACACAGGAGAGCAGCAAGCATTTGTTTCCCTGCTTTTTGAGTAGACATCAAAATTATTTGCCAATTTAGGGCC
TTTCCATGATACCAGTCCTTGAAAGATGATATGGGATTTTCGTTTAGATTTTTGAGTTTTGTTTTATTCCGCTCGGTTTTAGAACATGGGAAAT
TTCAAGGTTTTCTTGAGACAACGTTCTGTACCAATGAATGGTCACTGTCACTGGGTTTTGCTTTTGTTATTTAATCAAGATAAATGACTCGCTA
TAATTTTGCTCCCGTAACTGTTGAGGCTAAGTCGTACCAATTTCCCCATTCCCCTTGATACTGGGTAGATTTCCTCATATCATCATCTCACCAC
TTGGTGGAGAAATTCATGTCTCAGAACCCTGCCATCTCCTGATAACGTTATCTTCTGTCCCTGATCAGGAGATGCCGGGGGGTCTGGGACATCA
GGTTCTCCACCAAGTGGTGAGATGATGACATGTCGAAGTCTACCCAATATCCCCCAGTAAGAGAATAAGGGGCAAGAATGACTCATGAACTCCT
GTACCAGAAATCAAACTTGCCATGCCTAGGAAGCAAAATATGAAGCACATGAACAGGTGGTAAAGGGAATTCTTTCAAGAAAGAGGTTGGGGTT
ACAAATTAATGCCCAAACAATAACCAAGACCCCTTCCAATTATGTGTATTAATTATTTACTTACTCTGCACATGACATTTGGCAATATAAGATT
CACAAAGATGAATCAGACATGCACTGGTCTCATAAGCGGGAGAGAGAAATCAAGCACACACAGAACTCCTTTCTTCTGGTTGGTATCAAGGAAG
GCTTTGTGGACCTCCTAGCACTTGAGTTAGCTCTCGAAGGAGAGGCAGGATTTGGACCTGTGGCGATATGGCCTGGGGATCACATGAGCTTGGC
ATGTCTGACAGTCAGTGAGGACCTCAGGTTCCTGGAGCTTAGGATGTGTGATGCAGAAGAAGTCTGGAAAGGTAAGAAACAGAATTGTAAATGA
TGCTATGAAGATATGCCTTAGTTCTTTAGGCAATGAAGAGTCACTAAGGTTTTGAACACTGGCGTGTATGGTGGGTTGTGGGGAGACAGAAGAG
TAATGAGGACACCAGTCAGACTAAGCCAGAAACCATGCAAGAAGCAATACAGATCTGTGATGCAGAAGTGATCATGGGAATGGAAGGGGTGTGT
GAGAGATACCAAGGAGCAAACTCACAGACAGGGACACCAGGAAGCAGCTGATCTTTGCTGTGATGTATAGTTTCTCAGTAAGGACTTCTCTAAC
TTTCCGATTTGAAAATGAAATCCACAGCCTCAGTACCATCAGTGATGCTATACTGTTAGTTTACTTTTAAAAATTTGAAAATTGAAAAGGTGAC
ATTTAAGCAAAGACAAAATTTTAAGAATTTAAAAATGTGTTTATTATTGTCTCTCCCATTGGAATGCGAGTTCTACCAGGAACTGCTTGTTCAT
TCCTGAATCTCCAGCCTGGAGAACAGGGCCAGCACATAGTAGATTCTAGGTAAATGTTTCTAAAATAAGATGAATAAATGAGTCAGTGGAGAGT
GGGCGAACGAATGAGTGAGAAAGCACATCTGTCAAGACGTCTTGCTCCCCTCGGGGAGCTGGGTCCTACTCACTGCATTTCTTTCCCTCTTGCC
ACAGGTCCTCCCCTTGGAGGGGCACAAACGATCAGTAAGAATACAGAGCAACGGCCCCAGCCAGGTACCTGCCCAGGATATGTAATCTCTCCTT
TGCTTCCTGCACAGTTGTTGATTTCACATGGTCAACTGATGGAGGGTTTAAACAATATACCACATATGTTTTCTCTTATTTCTCTCAAAGAGGG
TCTATCTTTGACCCTAATAGTCCTGTGAATGAAGTAACAGGTACTGACATCAAGTAGAGACTTGTTAAATATCAAAGGTGAAAGAACTTGAAGA
TGAACTATTCCAATGCTTTATTTTGTTCAATAAAGAAACTGAGGCCCGGGGAGGTGAAGTGACTTGCTAAAAACCATACAGCTGGTTAATGAAA
GAAATAGGGCTACAATCCCAGATCCCCCAAATTCCTGTCCAAGCCTTTTATGCTTCACCAAACCTTACTTTCAGAAATATCCCCATCCTGTGAT
GAGTTGGCTTAACAATTAAGGCACAGGAACTTTCAAAGCCATGGACCTGGAGACTCCGTATTGGAGAGGAACTTGGAGATTTCTGGGTCTATCC
TACCCTCACCTCTACCTTACTTGTGCTTGTAGTAAAACAGGGCGTTGACTTTCTAGCTGGGCTCAGTTCCACTATCTGACCCAGAGTCTGCCTC
CTGGAATTTCCACTCAAGCTTTTCCTTCTGGAGAACCCTTCCTCCTGCTTCCTCCGAAATCCTTTGCATATCTGTAGACAGCTGCTGTGCCCAA
GCCCCAGCTCCTCTCTCTATCTTCTTATGTGATGCAGCTGAGATCAAGTTCTGAACAAGTCATTTGCTTTCGGCTAGGCAAACATTGTTCCCCA
TCTCCACAGAAGGCAGAGCAAGAGAAAATCAACTGACATTTCACCTGGAAGGTTAAGAAAAAATTTGCTGACTGTGGATCATAAGTCAGATGTA
GAGAGTTTTAAAGACTGTCCAATAACAACAAAATTATGCATTAGTCATCACCTGCCAAAAATAATTATCATATTAATGATGTGCATGACAAAAG
ATGGTCTCAATGGGCTTAAGGACTTTTGAAGGTAATTTATGGTTCTAAGTAGAAACCCAAAAATCATAGTGATATTTTTAAAACTGCAATTATA
GTTGAAAAATAGCAAAATTTTACAAAATACATCACAATTTTGCCAACTCCAGACCCAGCTCTGTACCATGATTTCCTCAACTAACAATAAAGGA
GATAAACCTCTCACCTAIACCAGTATTGCAAAGACTTTTTCATGGCTAAATAAACACATACGTTTTGAGGAAAGTGAGATTTTAAGAATAGTCA
TTTTATAGCTAAAATGTACACTCTCGTTTGTGCTGACATTTCTGGCTTGTGTGACATTTCAAATCACAGAGTCTTATACTAGAAGAAAACTGAG
GAATCCAGTAGCCCAACCCACTCATTTGTCACATGAGAAAACTGATTCCCAGAAATTGTCCAACAAGTTATTTGTTTATCACATAGCTGCTGCT
AAAACCCAGGCTGCTTGGTTTCTAGGCATGTGTTTTTCATGCTACATTCAAAAAAMAACAGATTAATAATGTTGTTATGTATTAGGTAGAGTTA
TTAAAGACCAGTAACCATGAGACCTGCTTTAAGCCCATGGAGTCAGCTGTCCGTTGTATCATTGAATATTATCCAGTTCCTTTCCAAATGTTTT
CTTTGTTGCTTTGGGTAATGACAACATAATCTGCACATTTTAGATGCCAAAATAAGATATAAGTAATCCTGTTCCTATTCTTTGTTTCTTTCTG
TAATTATTGAGATGAAGACCACAAATGTCATCAAGATCTTTGAGATCTGCAAATAAAAGCAGTAAAGTTTTCTGAAATCAGTCTTTCCTGTGAT
CTTGATAAAAGTATAAACCCTTATGGTTTTCTTATCGTTGGTACGGTTGTCATATTTTTTIAAAACACTGAAGCAGTATTTTCCTTTTTTATTT
CCTTAGATCCGTATCAGATCCTGGCCCCGACCAGCAGTCGCCTAGCCAACCCTGGTGAGTTTACCTTGGCCTGCAAGCCTTTTTTGCCAGGATG
TTTCGTAGCTTTGTGAAATCACAGAGACTTCTGTCCTAACTCCAGACACCTGAGTGGGGAGTAACATGCACCTCTTTCCTTGAAATGTTCAAAG
TCTGTTTCTGGAGCATGTGAACAACAGGTCAGGGCTTGTTATCAGGTGTCAAGGTTGGTTAGCTGAGCATACTTCTAGGATAAACACATCAAAC
ACTGCACATGTGCACTTAGGTGTAGATGAGTAATAAGTGGCACAGGAAGGTAGGCGTTTCAATCAGAGAAAATGGGCAAGAAAGAGAAGAAGAC
AACTCCACTCAGCTCTCAGTTCTCTCCCACATGCCAGGCACAAGTTCATAAATATTCCAAAGGCTTTTATTTGTGATTTTAGAAAGTGTTGCCA
AGTTATCTGGCCTTATAAAAGAGATGTGTCCTGGAAAAGTTGCAGATATAGTCAATTTGACCTTGTACTTTAAAGATTTAGTATCAAAAATAAC
TCTCAAGAGGGTCCTTCTAAACCAAGTCCATCGAGATTGGGAGCTAGCAGGCCCTTGTCGCAGTGTGGCCCACTCACCTTCCCATCCCAGGGAC
TCTCCCTACCCATTCCTTACTGCCTGGTCATTACTGCCACACGACAAAGCAGCCACCCAGCATATTCTGGGTATTTTTCTCTCTGCACAAGTTC
TCTGTACAACTTAGAGCTGCAAGCCAAGCTCTGGGCCTGCCAAGGGCCAATCCAGGTCCTGTCCATCCAAAAGCTAAAGCTCATGGCGCAGCTT
CTCCCAATGACTCCCACAGTCATGCCTTGCCCCTGACTTTTTATTGCTGACAGGGAATTCCCTGGGGGACATGACCACTAATTAGAGATCAGTC
AGTGATTCAGGCCTTTCTAGATGAAGAGATWCAAAAGCCTTGCCAAAGGGATTGAGGGGGGATATGGCTCACCCAAGATCACACAGCTAGTTCT
GGGCAGAGTTTGCACCTCACTTCCCACATTCCATTTACCAGGCCTTGGGGCAAAGCATCTTAGGATCTAACCTCGCTTATTATACCCATCTCCA
AGGCAAGCAGAAAGGCAAATCAACAATGACATAAGAAGGGCTTGTCAAGTCGATCCCAATGTCGAAGGAAACAAAAGGTTTCTTTAAAAGGATG
AGAAGCTCCCTGCATTTAGGGAACTGGGTTCTGCCTTCTCTGGGCTGAGCTGTTCTGTTCTCTCCCGTTTGCCTCACCGCCTGCAGGAAGCGGG
CAGATCCAGCTGTGGCAATTCCTCCTGGAGCTGCTCTCCGACACCGCCAACGCCAGCTGTATCACCTGGGAGGGGACCAACGGGGAGTTAAAAA
TGACGGACCCCGATGAGGTGGCCAGGCGCTGGGGCGAGCGGAAAAGCAACCCCAACATGAATTACGACAAGCTGAGCCGGGCCCTCCGTTATTA
CTATGATAAAAACATTATGACCAAAGTGCACGGCAAAAGATATGCTTACAAATTTGACTTCCACGGCATTGCCCAGGCTCTGCAGCCACATCCG
ACCGAGTCGTCCATGTACAAGTACCCTTCTGACATCTCCTACATGCCTTCCTACCATGCCCACCAGCAGAAGGTGAACTTTGTCCCTCCCCATC
CATCCTCCATGCCTGTCACTTCCTCCAGCTTCTTTGGAGCCGCATCACAATACTGGACCTCCCCCACGGGGGGAATCTACCCCAACCCCAACGT
CCCCCGCCATCCTAACACCCACGTGCCTTCACACTTAGGCAGCTACTACTAGAACCTTACTCATCAGTGGCCTTCTAGCTGAAGCCCATCCTGC
ACACTTACTGGATGCTTTGGACTCAACAGGACATATGTGCCCTTGAAGCGAAGACAAAACTGGATGTTCTTTCTTGTTGGATAGAACCTTTGTA
TTTGTTCTTTAAAAACATTTTTTTTAATGTTGGTAACTTTTGCTTCCTCTACCTGAACAAAGAGATGAATAATTCCATGGGCCACTATGCCAGT
TTGAATTCTCAGTCTCCTAGCATCTTGTGAGTTGCATATTAAGATTACTGGAATGGTTAAGTCATGGTTCTGAGAAAGAAGCTGTACGTTTTCT
TTATGTTTTTATGACCAAAGCAGTTTCTTGTCAATACACCGGGTTCAGTATGACACAGAATCATGGACTTAACCCGTCATGTTCTGGTTTGAGA
TTTAGWGACAAATAGAGGTGGGAAGCTTATAATCTAATTTTAGGAGGACCAAATTCAGTGGATGGCAACTGGAACATTGATTGTAAGGCCAGTG
AAGTTTTCACCCAACTGGAATTTGATCGAAAGAAGGTTTGTGTGTTTAAGACGCCAAGGGCATTGCAGAATCCCTCTCAGTGGACAGTATGCAC
TCAGCTGACCACTCTCTCTAGAAATAGTCAAGATATGAACTAAGAAATTTTAATGCAAATACATACATTTCCTGAAAGACGGGAATTAAATTAC
TAATTTTTTTTTTTTTTTAAATGATGACAGTGGTCCCAGAACTTGGAAAAGTTGTAGGGATTTCTAAACTCAAGCAGATTCGCAAGTGCTGTGC
GCTTGTCAGACCATCAGACCAGGCCCAACCAATCAGAAGGCAACTTACTGTATAAATTATGCACAGTTATTTTCCTATATCTCACAGTATAAAA
AATAAATAATTAAAAATTAAGAATAAATAAACGAGTTGACCTCGGTCACATAAGCAGTTTTACTATCGAATCAATCGCTGTTATTTTTTTTAAT
GTAATTTGTACATCTTTTTTCAATCTGTACATTTGGCCTGTCTGTATGTTTTATATACCTGGTTTTTAAAAGCATAATATCCCTATAGCTGAAA
AGGAAACAGGGCTGTTTAAGTCACTGACTTATGAGAAAGCAAAGCACTGGTACAGTTATTTAACAGGCATACACAAGCAGGGAAAAGATAATCC
ATTTAGATCTTTAATGCTTTGGAAATGCGTGTAACAGTACTGCAATAATCACAGCTCTGGGAAAAACAACGAAACTTTCCCTTGTGGAGAGGAG
GGATTTTCCTCCTCTATATAAGCAACATATTTTTAGACATTAAAATATATATAATTTTGCAGGTAATTGTTGACTTTTTTAACTATATTAACTG
TTAAGCTGACAACTGTCAAAGAAGACCATGTTGTAAATAATTTGACTAAATAATATGGTTCCTTCTCTCAGTGCTGAGGACAGTTTTCTTATTT
ACCGCCCCCGTTAGGTCAAAGGGTTTTCCCTGGGGAACTTTCCTATTTACTTCTTGCACTATCAAGAATTTTTCGAATGTACCTACTGCAGTAC
AGCAGAAGGTAAAAAATCAGTGTGGTTTTTCATTGTTGTTGATGATGTTTGTAGTGTTTTTGTCTCTGTTATTTAAATCTTCCTCCAGCCTAAA
AGGCTTTTATAAAACAGCAGCTAAGGCCATGGATAAACCTGTATGTAAGGACTCGAGCAAGGCGAGCTGGTCTATCCAGACTTGTCTGTGAGAT
TTAACTCTGCAGCCTCCCCTGGGCACTTCAGACCCAGACGGCCACCTTCTGCCACTCCAGCAAAGAATAAGCGCCCTGCTTCCTTCAGGTCTCA
GACCAGCACTTTATGGCTCATGCAGATTTTTAAGGTCATTTTTCTTCCCAAGCAAGAAACTTGCCTCCAGTTCCTTCACTGTTAGGTAGCTTAT
TTTCATTTTCTCTATTTTACAATGAAAAGAGTGAGACCTGGGAAGTCCTTGATTTGCAAGGAATTAGACTCACAGCATTGGTAACCCTAGAACC
TTCTTAGGGTAACACTAAGTACCTTCTAGACAACATGTCTACCTAAATGAAATGGGATGTGTTTCGGAACATTTGTCTCCAGTTTTTTTTTAAT
CTTGCACCCTGCCATTTAAAAAGATGTGTAAAGCACATATTCTCAACATATGCACATTGATTTATAAATCATATATACATACTGTTACATTATT
CTTCATATTAGAAAACAAATACAAAATACAACATTTTAATGGTGATATAATATAAAAATTGAAACTGAAATTCTACTCTTTTCCTCCTATTTTC
TCTATATTGAATATCCTCTCCTATTAACTCTCAACAAGATGTTGGTCTTTAGTGTAAAAAAAAGTGTATGCATGTACTGGATTTCTAGTGACTT
CCAAGAAAGGAGAAAATTAAAACTTGGTATTAGTGGCCCAAGCATAGAAAGAGGAATGATGAAGGCCAGGTATGTTTAAGAACTAACTAGCTGA
ATTCTTTGGCAGATCTCCATCTTAGCCACGCAATTTCCCCATCAATTTTGAAATCTGCAAAGTATTCATTACCGAAAATGGAGGCATATATTTC
TGAGTGCTGTAAGAAGATGCTCAGCCCATTAGTTCATTCTTTTAAAGGTTTICTTTATGTGTCCTACTCAAACACTGGCTCAGGCTCATCTTCT
CTACACAGTCATAGAGCTTTAGCCAAATCTCGCCCCCTGAATATGTTCCACAGTGATTTGTCCTATGCCTCAGAAGCTGGCCCACTCGCTGACA
GGACTGGGGCACCATTTTCTCCTCATAAGCATTTGTACAGAGCGGGCACTGGCATTTATTCCCCTGCAATGCCCACATTGAACGTTTGCTAGCT
GGCTCCAGGGCATGAAGCGGACTAGTCCCAGAGGACAAACAGAATCTTTGCCCTCCTGTCTGCTAGTCQAGTCTTTTCCCTGCTGGATCATTGT
GTGCCTGTGCCATGAGGTTTCTGCCATCTAACAAACAGTGCCAGCCAAGCAGCGGGCATGCAGGCCTGCAAAGTGGTTCTCATGGAAAGCTGTT
CCTCCCCACAGTTTGGGACACTGACCAACAGTCCTTTAGCAGGAGGTCGTCTTAGTCCATTTGGTCTGCTATTCATAACTACCATAGACTAAGT
GGCTCATAAAAACAGGACTTTATTTCTCACAGTTCTGGAGGCTGGGAAGTCCAAGATCAAGGTGCCAGCAGATTCAGTGTCTGGTGAGGGCCCT
TGCCTTGGTTTATAGAGGGAACCTTCTCACTGTGTGCTGATATGGTGTAAGGAGCAAGGGAATGCTCTGGGGTCTCTTTCATAAGGGAATTAAT
CCCACTCTTGAGTGCTCCACCCTCATGCCCTAATCACCTCCAAATACCTTCACATTGGGGATTAGGTTTCAGCATATGAATTTGGGAGAAGGGA
CAGACACAGTCAGTCTATAGCAGAGGTCATCTTTTTTCAGTGTCGAAAAATGTTGTTGAGTCCCACACAAAGGAAGTTCTATTTTATTTTATTT
TATTTTATTTTATTTTATTTTATTTTATTTTATTTTATTTCTGGAGATAGGGTATCTCTATATTGCCCAACCACCTCTCAACATCCTGCCTTCA
AGCAATCCTTCCACCTCAACCTCCCAAAGTGTTGGGATTACTGGCGTGAGCCACCACACTGGGCCTATTTTCAATATCTGTTATTTTAAAACAT
TTTTAATAGTCAACAGCCACTAGAAAACGTAATGACACTTAAAAAGATTGTTATTTTACTTAACCAATAACATCTGCATGCAAGTGAGCGATGA
ACATACACAATGGGAAATGGATTAAGAGGTTCTCAGATAAGGTTTGCTAGTTTAGACCAAATGAGATCAGGAGGTTCTAGAACACAAGGGAGGA
AAGCAGCATCTGTCCACCCCAAGCCAAGTTACTGCCAACCCAAGGCAATGCTTAGTGGATAAATAAAAAACTGAACAAAATGCAGTACTTCATG
TGAGAGGTGGTTTCTGTGGACTTGGATTCTTACCGTATTTCCTCTAATATCTGTTCATTACAAGCACCATGTAACCTGTTGCCTTTAAAAACTC
TTGAAAGGTGTCCTTTGGGGGAATGTGCTTGGGGGAAGCAACCCTTTAAGCATGGCTGTCTCCTGCCCAGCCCAACTCCCACACCTTGCTCAGA
AGTTCCTCCACCATCAACAGCACCACTGAGCTTGTGTCCAGAAGGCCCTCAGGAGGTCGAGGTAAGAGGATGCTTTGTATCAGTGGGGGCAGGG
ATGGGAGAGGTAATAAGAGCCGGGATGGGGGCCAGGGGAGTGACTGGGTTCTGGTGAGCATACAGAAGCTTTGCTGTTATTCAGGAAGGAATGC
AGGTTTTGCAGAAAGCACATTGGGCATTTCATCACGTAGAAAGCTACTGAAACTGACACTACACGCCTTCAGCCAGGGAGTCCCGCTAAGGGAT
TATGAAAGGCCGGCTGATTCCAAAACTACAAATCCCAGGCTCCCCCGGGGGATGGACACTTGTGAGAGGAGTGCCTTAGCCAGTTAGAAACTCC
AGGGTTTCAGCCAGTTGAGAAAGGATAGGGAGGGAAGTTTTAAAAGGAATGTGGGCCCACAAGCCTGGGATCTGTCTCTCTCTCTCAGTCTGAT
TATGAAAGGCCGGCTGATTCCAAAACTACAAATCCCAGGCTCCCCCGGGGATGGACACTTGTGAGAGGAAGTGGGTTAGCCAGTCAAAACCTCC
AGGGTTTCAGCCAGTTGAGAGAAGGATAGGGAGGGAAGTTTTAAAAGGAATGTGGGCCCACAAGCCTGGATCTGTCTCTCTCTCTCAGTCTGAT
GCGGCCTCCTGTCTAATTGTTTCAGTCTGTCCGAGCTGGTAAATCCCTAAGCACATAGTCAATTTACACTCAGCTTAAAAGCTCTAGAGGGAGA
CAGGAAAAATTTCCAGTGAGACCACTCACTCACCTACAACTGCTAGATTAACCTTCTGCATTTTAACTGAGTTAACTCATATGTTTTCTTAGTG
TGTACACGAGGTTTATGGATAATCATCGTTGTCTGCTAGTATTGCCTAGTATTTTTCAAGAACATTCATTAAGTCCTTGCTACCTGGTGGGCAC
CCTGTTTGGGGAGTTCAGTGCAGGGTCATTTTTGTTTTGTGGTCAGAAAGACATTTTCCAAATGGGTGCAAAGTAGAAATAAGTTGGGTTTTCC
AGAGAGCCTTTGATTTTCCCCATCCACGGCCCTCCCATTGCCCCACTTCGGCTTTTGCCCTTCCTTGGCTCTATGTGTGCACCTAAGAGCCAGG
GGAGCGTGTGGCCAAGCTGCAGGATGTTGCAATAAATGAGATTTTATAAAGGAATGCTTAGAAATGTGCTTTGACAGCAAATGTTGGATGCGAT
TTTTCAATCGGCTAAGAAATAGAGGTTGGGAGCTGGGATTTTATGCCCGGCAAGCTCGGAGCTTGATTTTTCCATCTATAAAATGAGGATGATT
TAATAACTATACAAGAGTATCACTGGAGTTAAGTAAGATAGTGTACATAAAAATGCTCTGTATGTTGAAAAGAACTAGAAACTGCAAAGATTTC
CTAGGTATTATTGCCAAGGTCTTACTGTCTTCATCGAGAGGCAACTCCTCTTTACCTTCAAAACTCTGTACAGGTCTCTGTTCCTCTCTGATCT
AAGATAGAGTGAAGCCACACTATTCTATTCTATTCTATTCTGTATTGTGAATATACATTGTGATTTTTTAAAAAACTGTAAAATCTTGAAATAG
TCACAAACTTCCAGAAAAGTTAGAACAGTACGACGAACAATTTTTAGTGAATCATTTAAGAGAAATTTGCCAACCATGCTTCATCAACCCCAAA
TGCTTAAGGGTATATTTCATTTAAACAACAACCTTTTCCTACATAGTCCAGTATAATCAAGAGAATCGAATAACTAATGCAAGCGGATTACTCC
TATCTAATCCCGACGCACCATGCACTCTTGGCTGATTGTCACCACTGCAGTCTTTTGGAGCAAAGGTTCCCATTCTAATAACACTGATTGTGTA
TAGTTGTCATCTACCATTAGTCTCCCTCGGTCTTTCAGGTCTGTGACAATTTGAATATGACAGGTCAGGTATTCTGTAGAATGTTCCCCAAATT
TGGGATTGCTGGTATCTCTTCGCGATTGGATTGAGCCAAGGCTTTTCTGAGAGGACCATCGCAGAAGTCATGCTGCCTTCCTCTCCTGTATTCC
ATTGCGTGGTACATCATTTCAACGTATCCCGTTATTGATGAAGTTCACTCTTTTGTTTAAGTGGTGCCTCCCAGCCTTCTCCTTTGAAAAGTTA
TTCCTTTACCCTTTTGTAATTAATAAGTATTTTGCGGAGGTTTACTTTCAAAATATGTAAATATCCCATTCAACATCAAATTCAAAGTATTCAT
TCATTTATTTATATCTCTAAGACTCATGGCTCTCTATTTTATTGAGTGGATATGATCTGTTCTTTAAAGATTACATTGTCCCAATGGAAGGATA
TTCACGCTGGCTTCTGTCTCCTTTGACATGTTCCCATCAGTCTTTAAGTGCTTCCTTACTTTCTCGCACAACAACTTATTTTGGAGTTTCTGCC
CTAGCCCTGGAATTAGTCATCTCCTCATGGATTCCTAGTTCTTTTTAGTGGAAAATGCTATTTAGAACCCAATACCTGGGGAATAGATGTGCCA
ATTGCTAATGGGGTGTCCCTGCTCCCAGGCTCCCTCAGTGTACAGAGCCAAGCAATAGACGTAGATACATACATACACATATATTATGTATGTA
TGTATGTGACTATATGCACTCACGTACATACATACATATACAGTCATGCCTTGCTTAATAACGGGGATACATTCTGGAAAATGTGTCCTTAGGT
GATTTTACGGTTGTGAATATCATAGAGTGTACTTCACACACCTAGATGGAACAGCCTATGACACACCTAGGCTACATGGTACAGCCTATTGCTC
CGAGGCTACAAACATGCACGGCATGTTACTCTACTGAATACTGTAGGTGACTGTAATACAATGGGAAGTATTTGTGTATCTAAACATGGAAAAG
GTACAGTAAAAATAGGATAAAAGTTAAAAAATGGTACACCTGTATAGGGCACTTACCATGAATGGAGCTTGCAGGACTGCAAATTAATCTAGGT
GAGTCAGTGAGTGAGTGGTGACTGAATGTGAAGGCCTAGGACATAACTGCACACCACTGCAGACTCTGTGAACATTGTACACTCAGGCTACGCT
AAATCTACAAAACCTTTTCCTTTCTTCAATAATAAATTAACCTTAGCTTACCGTAATTCTTTATAAAGTTCTAAATTTTTTAACTCTTTTACTC
TTTGGTAATAACATTTAACTTAAAACACAAACACATTGTACAGTATAAAAATATCTTCATATCCTTATTCTATACACTGTTTTTATTTAAAAAA
ATATTTCGTTTTACTCCTTGAAATTTTTGTTAGAAATGAAGACATGAATTCATATTTAGCCTATAACCTGCCTGAGGCTGTTTTACAGTTAACT
TTCTAAACATGTAAGTAGGCATTATCTACGTATATCTAAAATCTATCATTCTAAAATAATGATAAAAATCTATCATTTTAAAGTAATGATACAT
AACAGTAACATAGTTGTTTACTATCATTATCAAGAATTACGTACTCTACACCTGCTAGACTTTCATAGACCGTAAGGGAGTAGGTTTGTTAAAA
CATCAGCGTCACCACAGACATGAAGATTGCTTGCACTTCCACAGGGCATGAGGAACCGATGTCACTGGGTGATGGGAATTCTTCACCTCCTTTA
TAGCCTTGTGGCACCACCATTGCATATGGGGTCTTTCACGGACCTACATCTTTATGCAGTGAAAATGACTGTATATCCTTATACATTTATATCT
ACCCTGTTCAAGCTCTGATGCCCCAACCCAGGCAACGCCTCCACAGGCAAACCCTCCTCAACCAGCTGTAGCCCTGACAGCCAGGACAGGCTGC
ACGCCCTGCGTCCCATGCTCTCTTTACTCCACTTGGGCACTAACACTTCCCATCAGGACGCGCCACACGGAAGCCCTTCTCACCCGTTCAGGCG
CATCCTATAGCCCTTCCTTGTCAATCCTTCTGCATGCACCCGGTCTTCCATCTCTCCTGCACCCCTCACCTCCATTCAAACGTGTTCATCTCCC
TGCATTGGCCCTAAACTCCCATCCAGGCCACCCCACTGCATGGCCACCCTCCTCACCCCACCCCAGGCAGTGCCTCTGTGTGGATGTTGTTCTC
ACCCTGTTCAAGCTCTGATGCCCCAACCCAGGCAACGCCTCCACAGGCAACCCTCCTCAACAACCTGTAGCCCTCACAGCCAGGAAAAGGCTGC
ACGCCCTGCGTCCCATGCTCTCTTTACTCCACTTGGGCACTACACTTCCCATCAGGACGCGCCAACGGTAGAGCCCTTCTCACCCCGTTCAGGC
TCTGATATCACTACCCCCTGACACCTGCCTTGCTCTGCTGCACCCATGGCTCCTGGAGTCAAGACTTCAGTGGGAGGGGGAGGAAGAGCGAAGG
AAGGGGAAGGAAGAAGGGAAGATGCGTGCTTACACATTTACAACAGCACATATCTCATTGGGTGTGTGTATGTGTTGCCCATGCATGGCAAAAA
GGGACCACAAGATCCATTAAACTGTAGTTTTGCCTGCTTCCATATTCTCTCTCTCACAGACACACACACACAGACACACACACACACACACGCA
CACACCCTTGTGCCTTTTGAGATGCAGAATCTGGCAAGCAGTTAGAGAAAGGAGAGAAAGAGATGAAGGAGTAGTTAACCAGAGAGGCTAACAA
GATAATAATAAGGAACGAGGCACAGACAAGTGGAGAAAATGAAATGTTAAAATCTTGTTTTAGGTGTGCAGGGGAGAAATTGGAAGTGTGGCTG
GTAAGGATGAAAAAGCAATGTTCTGGGTTATAACGTTAATGTTTTTGATAGAGGCTGGGGTGAAGAATGCATGGCTTTTTAATTATTTTTGGTT
GTTGTGTTCTGTCAAGAGAGAGTAATACAAGACCCCAGGATCTATTTGTATCTGAAGTCTGTGTCCTCCATTAGACAATAAGGGAATGAAGGGC
AGAAACTTTTGTCTAACTCTTTCTTTATAAGCCAGTGCCTGGCTTCTAGAAAGATCCAGAACATGTCTATTTGTCAACTACACCTACTGGACAA
AACGTGTCCAAACCCAATACAGCTGCCCAGAAATTCTGAGGGAAGCATGAGCTGTCCGTTCTGCTCAGTTACTGTTAATTCCGGAAATACACAG
AGAAAATAAAATCACGGAAGATGCAGTTAAAGTATGGAGCTAGACCACTGTTAAAACTTGCCAGCAATTTTTACCAATCCAATCTTTGGTGTTT
AATTGGTTTCCCCAGAAGATGCAATATCTCTTTCCCCACTGATGATTATATTGCCCAGAGCCGCTGGCTTTCAGAAATGTTTAATCAAGCATTG
CATATATTCAAGCAATACTTTCCAGACACCTCAGCTTTTCTTGACAGCGTTACCTTCCTTCGCTCTTTCTTTGTCTCTTTTAGGAACATCAAAT
CATCCAGTGATTTTCTGCATAACTCAAAGTTTTGTCATTTAGAAAAAAAATCATAACAGAACAGATAACCATTAGGAAACCAATTTGCATCAGA
CATCCATTTGAGAAGTTTAAAATGTGGGGAATGCAAACTCTACCCATAGGGACTTAGTCTGTAGGGAAGAAATATGAACTTGCCACTAATTTCT
GAAAAGCAAAATTAATTCAGTTATAGCTAGATCTGCCTTCATAAGGATATTTCTGATGCTTCTCAGCCTGTTCCTTTTATACTGAATATTTACA
AACTTCAGTGATCACCTGATCAGAATCCAAGACACAAAACTCAAATGAATCCAATTTTTCAAGTGGCTTCAACCCAGCAACCAAATCATAGGGC
TGCCATTTGTGCTCAAAGCCAACACTCCAAGGTTTTGTGTAGATGAGAATGAAGAGGGAGAAGGCGAGAAAAGAAGCCATTTCCTGCCGGGGGC
GGTGGCTCATGCCTGGAATTGCAGCACTTTGGTAGGCTGAGGCGGGTGGATCACCTAAGGTCAGGAGTTCAAGACCAGCCTGGCCAACATGGTG
AAACCCTGTCTCTACTAAAAATACAAAAATTAGCTAAGCGTGGTGGTGCATGCCTGTAATCCCAGCTATTCAGGAGATTCAGGAGGCAAAGGCA
GGAGGATCGCTTGAATCCGGGAGGTGGAGGTTGCAGTGAGCCCAGATGGCACCATTGTATGCCAGCCTGGGCGACAGAGTGGACTTGGTCTCAA
AAAAAAATAAAATAAAATAAAAAATAAAGGTGTTTCCATCCCCACAAAGAGCTATGTCACCAAAGACACAGGCACCCCCTATGACGTCCTGCTC
ATTTACCAACCCATATTCCTAGAAGATCAAAGCCCATTACCTCTGGCGAAGTTTGTTTAATTCCGGGAGGGATATTATGCGCATTTGTGTGAGT
TTCCAGAAAACTCAAAAGAGCCATAAAAATCGTATTTACATACAACATTCATCTAGGTTAAATTTCTTTGCAAGAAGTGTCTAATTCTCAAGAG
ATCAGCTATTCAGCTTGCTGGGAGCTAATTACAAATGGTCCCTTAGCTTTGCTCAGTCAACTGGCCAAAAGGCAACGGAGAGGAAATTGGAGTT
AAGACAACTGCAGTTGGTCCCTGGAGGGAGCCTATTCTACTGCCAGCATCTGGCTAATCAGAATGGATACAGATGCACAAGTATCCTTTATGC
ATGAGGGCCTGCTGGTTTTCCTGGGCGAG
HUMAN SEQUENCE-mRNA
GAATTCCCAAACGTGCACAGGGGAGTGAGGGCAGGGCGCTCGCAGGGGGCACGCAGGGAGGGCCCAGGGCGCCAGGGAGGCCGCGCCGCGCTAA
TCCGAAGGGCCTGCGAGGTCAGGCTGTAACCGGGTCAATGTGTGGAATATTGGGGGGCTCGGCTGCAGACTTGGCCAAATGGACGGGACTATTA
AGGAGGCTCTGTCGGTGGTGAGCGACGACCAGTCCCTCTTTGACTCAGCGTACGGAGCGGCAGCCCATCTCCCCAAGGCCGACATGACTGCCTC
GGGGAGTCCTGACTACGGGCAGCCCCACAAGATCAACCCCCTCCCACCACAGCAGGAGTGGATCAATCAGCCACTGAGGGTCAACGTCAAGCGG
GAGTATGACCACATGAATGGATCCAGGGAGTCTCCGGTGGACTGCAGCGTTAGCAAATCCAGCAAGCTGGTGGGCGGAGGCGAGTCCAACCCCA
TGAACTACAACAGCTATATGGACGAGAAGAATGGCCCCCCTCCTCCCAACATGACCACCAACGAGAGGAGAGTCATCGTCCCCGCAGACCCCAC
ACTGTCGACACAGGAGCATGTGAGGCAATCGCTCGAGTGGGCCATAAAGGAGTACAGCTTGATGGAGATCGACACATCCTTTTTCCAGAACATG
GATGGCAAGGAACTGTGTAAAATGAACAAGGAGGACTTCCTCCGCGCCACCACCCTCTACAACACCGAAGTGCTGTTGTCACACCTCAGTTACC
TCAGGGAAAGTTCACTGCTGGCCTATAATACAACCTCCCACACCGACCAATCCTCACGATTGAGTGTCAAAGAAGACCCTTCTTATGACTCAGT
CAGAAGAGGAGCTTGGGGCAATAACATGAATTCTGGCCTCAACAAAAGTCCTCCCCTTGGAGGGGCACAAACGATCAGTAAGAATACACAGCAA
CGGCCCCAGCCAGATCCGTATCAGATCCTGGGCCCGACCAGCAGTCGCCTAGCCAACCCTGGAAGCGGGCACAATCCAGCTGTGCAATTCCTCC
TCGAGCTCCTCTCCGACAGCGCCAACGCCAGCTGTATCACCTGGGAGGGGACCAACGGGGACTTCAAAATGACGGACCCCGATGAGGTGGCCAG
GCGCTGGGGCGAGCGGAAAAGCAAGCCCAACATGAATTACGACAACCTCAGCCGGGCCCTCCGTTATTACTATGATAAAAACATTATGACCAAA
GTGCACGGCAAAAGATATGCTTACAAATTTGACTTCCACGGCATTGCCCAGGCTCTGCAGCCACATCCGACCGAGTCGTCCATGTACAAGTACC
CTTCTGACATCTCCTACATGCCTTCCTACCATGCCCACCAGCAGAAGGTGAACTTTGTCCCTCCCCATCCATCCTCCATGCCTGTCACTTCCTC
CAGCTTCTTTGGAGCCGCATCACAATACTGGACCTCCCCCACAGAGGGAATCTACCCCAACCCCAACGTCCCCCGCCATCCTAACACCCACGTG
CCTTCACACTTAGGCAGCTACTACTAGAAGCTTCTTCTAGCTGAAGCCCATCCTGCACACTTACTGGATGCTTTGGACTCAACAGGACATATGT
GGCCTTGAAGGGAAGACAAAACTGGATGTTCTTTCTTGTTGGATAGAACCTTTGTATTTGTTCTTTAAAAACATTTTTTTTAATGTTGGTAACT
TTTGCTTCCTCTACCTGAACAAAGAGATGAATAATTCCATGGGCCAGTATGCCAGTTTGAATTCTCAGTCTCCTAGCATCTTGTGAGTTGCATA
TTAAGATTACTGGAATGGTTAAGTCATGGTTCTGAGAAAGAACCTGTACGTTTTCTTTATGTTTTTATGACCAAAGCAGTTTCTTGTCAATACA
CGGGGTTCAGTATGACACAGAATCATGGACTTAACCCGTCATGTTCTGGTTTGAGATTTAGTGACAAATAGAGGTGGGAAGCTTATAATCTAAT
TTTAGGAGGACCAAATTCAGCGGATGGCAACTGGAACATTGATTGTAAGGCCAGTGAAGTTTTCACCCAACTGGAATTTGATGGAAAGAAGGTT
TGTGTGTTTAAGACGCCAAGGGCATTGCAGAATCCCTCTCAGTGGACAGTATGCACTCAGCTGACCACTCTCTCTAGAAATAGTCAAGATATGA
ACTAAGAAATTTTAATGCAAATACATACATTCCTGAAAGACGGGGAATTAAATTACTAATTTTTTTTTTTTAAATGATGACAGTGGTCCCAGAA
CTTGGAAAAGTTGTAGCGATTTCTAAACTCAAGCAGATTCGCAAGTGCTGTGCGCTTGTCAGACCATCAGACCAGGGCCAACCAATCAGAAGGC
AACTTACTGTATAAATTATGCAGAGTTATTTTCCTATATCTCACAGTATTAAAAAATAAATAATTAAAAATTAAGAATAAATAAACGAGTTGAC
CTCGGTCACAAAAGCAGTTTTACTATCGAATCAATCGCTGTTATTTTTTTTTAATGTAATTTGTACATCTTTTTTCAATCTGTACATTTGGGCT
GTCTTGTATGTTTTTATGCTCCTTTTTAAAAAGCATAATATGCCTATAGCTGAAAACGAAACAGGGCTGTTTAAGTCACTSACTTATGAGAAAG
CAAAGCACTGGTACAGTTATTTAACAGGCATACACAAGCAGGGAAAAGATAATCCATTTAGATCTTTAATGCTTTGGAAATGCGTGTAACAGTA
CTGCAATAATCACAGCTCTGGGAAAAACAACGAAACTTTCCCTTGTGGAGAGGAGGGATTTTCCTGCTCTATATAAGCAACATATTTTTAGACA
TTAAAATATATATAATTTTGCAGGTAATTGTTGACTTTTTTAACTATATTAAGTGTTAAGCTGACAACIGTCAAAGAAGACCATGTTGTAAAAT
AATTTGACTAAATAAATGGTTCCTTCTCTCAAAAAAAAAAAAA
HUMAN SEQUENCE-CODING
ATGGACGGGACTATTAAGGAGGCTCTGTCGGTGGTGAGCGACGACCAGTCCCTCTTTGACTCAGCGTACGGAGCGGCAGCCCATCTCCCCAAGG
CCGACATGACTGCCTCGGGGAGTCCTGACTACGGGCAGCCCCACAAGATCAACCCCCTCCCACCACAGCAGGAGTGGATCAATCAGCCAGTGAG
GGTCAACGTCAAGCGGGAGTATGACCACATGAATGGATCCAGGGAGTCTCCGGTGGACTGCAGCGTTAGCAAATGCAGCAAGCTGGTGGGCGGA
GGCGAGTCCAACCCCATGAACTACAACAGCTATATGGACGAGAAGAATGGCCCCCCTCCTCCCAACATGACCACCAACGAGAGGAGAGTCATCG
TCCCCGCAGACCCCACACTGTGGACACAGGAGCATGTGAGGCAATGGCTGGAGTGGGCCATAAAGGAGTACAGCTTGATGGAGATCGACACATC
CTTTTTCCAGAACATGGATGGCAAGGAACTGTGTAAAATGAACAAGGAGGACTTCCTCCGCGCCACCACCCTCTACAACACGGAAGTGCTGTTG
TCACACCTCAGTTACCTCAGGGAAAGTTCACTGCTGGCCTATAATACAACCTCCCACACCGACCAATCCTCACGATTGAGTGTCAAAGAAGACC
CTTCTTATGACTCAGTCAGAASAGGAGCTTGGGGCAATAACATGAATTCTGGCCTCAACAAAAGTCCTCCCCTTGGAGGGGCACAAACGATCAG
TAAGAATACAGAGCAACGGCCCCAGCCAGATCCGTATCAGATCCTGGGCCCGACCAGCAGTCGCCTAGCCAACCCTGGAAGCGGGCAGATCCAG
CTGTGGCAATTCCTCCTGGAGCTGCTCTCCGACAGCGCCAACGCCASCTGTATCACCTGGGAGGGGACCAACGGGGAGTTCAAAATGACGGACC
CCGATGAGGTGGCCAGGCGCTGGGGCGAGCGGAAAAGCAAGCCCAACATGAATTACGACAAGCTGAGCCGGGCCCTCCGTTATTACTATGATAA
AAACATTATGACCAAAGTGCACGGCAAAAGATATGCTTACAAATTTGACTTCCACGGCATTGCCCAGGCTCTGCAGCCACATCCGACCGAGTCG
TCCATGTACAAGTACCCTTCTGACATCTCCTACATGCCTTCCTACCATGCCCACCAGCAGAAGGTGAACTTTGTCCCTCCCCATCCATCCTCCA
TGCCTGTCACTTCCTCCAGCTTCTTTGGAGCCGCATCACAATACTGGACCTCCCCCACGGGGGGAATCTACCCCAACCCCAACGTCCCCCGCCA
TCCTAACACCCACGTGCCTTCACACTTAGGCAGCTACTACTAG
CTCTCTCCCTGGTGGTGGGCATATAAAATGCAGTAGCCACTTCAGAAAACGGTCTGACAGACATCACTCAAGAGCCTCAGACAAAAGGTTGTCA
TGTGAGCAAGGGAGTCCACTATTGCCTATATATTTCTCTACGTTGGTAACAGATATAGTATGTAAAAGTGTTTGTAGCAGTACTATAACACTAT
GCATAGGTAAAAAACAGCTCAATGTCTATCAACAAATAAGGAAAAAAAATGTGCTAAGTAATATGATGGAATAGTACTCAACTGCAGAAAAGAA
TGAAGTAGATGACATAGTGATGCAGTGTAGAACACAGATAAGGATCAACAGTATTATGCTAGGCTAAAAGTCACTTATTTGTTGTCTATAGGAT
AGAACCTGAATAGGTAAATCCAAAGAGAGAAATGCTAGAGTAGTGTTTCCAGGGGCTGAGAGAAGACTAAACTGAGTGTAGATGGATTATATGT
CTTCTGCTGCTGCTCCTTCCATGTCTGGCTGACGACAGATGTTTTGACAATGGATGAGAAGCTGATGAATAATTTTTTTAAAAAAATACTGAAC
TTTACGTTTTAAAAGGGTAACTGTTATATGAGTACTCTCAATTTTAAAGGAAAAAAAGCAATGTTTAAAAGTGGGCCAATGTTGGAAGTCAACT
GTGAGAAGTTAAGAGCAGATTCACAAATAAGCACTGGAATTGGGCCTTGATTTGGGGGAATATTAAGAATATAACTAGAAGACGTTGTAAGAAA
AGTTTGGATGAGTCAGAAAATAGGGAGACCGGCTAGAGAGATGTCTCAGTGTTTAAGAGCACTGATTGTTCTTCCAAAGGTCCTGAGTTCAAGG
TCCCAGCAACCACATGGTGCCTCACGACCATCTGTAATGAGAACCAATGCCCTCTTCTGGTGTTTCTGAAAAGAGTGACAGTGTACTTGCATAA
AATAAATAAATAAATAAATCTACTTAAGAAAATAGGGGGACAATTGTGTGTTAGCAAAATACAGTAGAGACTAGACTAAGGTTCATTAAAACAC
AGGCCAATAAAGATGAGGCCACATGTATGTGTTCAGGACACATATACTGTAATACGTAAAATACATTAAAAAGTTCAGACTTCTTCAGGCTCGT
GAAAAACACACTGTGAATGCTTTAACCCTCATTGTCTGATCGTAACCCATTCCTAGTCATCTCCCTTTCCTTTCCAGCTAGTTTCCATCTTACG
TCCGCGTGTGTACATGTGCAGCTTCTATATAGGCCGCCACAGCTGATTCCTGTTTGTCCTTTTCCCGATTTTTTATTTGGTATTTTCTTCATTT
ACATTTCAAATACTATCCCGAAAGTCCCCTGTACCCTTCCCTCCCCCTCCTCTACCCATCTACTCCCACTTCTTGGCCCTGGTGTTCACCTGTA
CTGGGGCATATAAAGTTTGCAAGACCAAGGGGCCTCTCTTCCCAATGATGGCCAACTAGGCCATCTTCTGCTGCATATGCAGCTAGTACTTGGA
TGGAAGGCCACAACTGACTCTTAAAGACTGTATGTAACACCAAATATTAGAGCAATTGTCTTCACTTAGTAGCATTTCTGAGGGTTTAAGTCCC
TTTCATTTGGATTCTCACTTTCCATGTGCAATGAATTTTTTACAGGTGAGCAAGAAAGTATGGAAGGAAGCCTAAGAAAGGCCGTTCAATGAGA
CTTTAAAAAATGATCGCCAATTTTAGAACGCATCTTCTCTTTCAGACTTGGAAAATTAACTTTTATTACTGCCCTATGCAAACTAAATTTAAAT
AAGCTTTGGATTATACCCCGTGCGTATGAGCGGACGTTATGACATTGATTGACAACGTCAGATCTACCCTCAACCCTCTGACAGTATGATTCAC
ACATACCTGGGATCAGAAAGAAGTGTTTTCCAGACTAGGCAAAGTCACTAGAGCTCTGGTGGTACTCAGCGTAGATTTCTTCCCCATAATTCCT
AGCTAAAGATGAAAGATACAGACAAATGACCCATCCTAGGAGAATTTACAAGGGTAGTGGTAAGCAGGTAGGTTTCAGAACAGCTCATGAAACA
ATTCTGCAGCAGGAGTCAACGAGTCCCAAAGAAGTGGCCTATATGGGACAGCAAGGAGAGACTCAAAAAAAAAAAAAAAGGAGGAAAAAAAAAC
CCTATGTGGGGCTCAGCAGTGGAGCACTGAGTGCTCTTTCAGAGATCCTGAGTTCAAATTCCCAGCAACCACATGGTGGCTCACAACCATCTG
TAATGAGATCTGATGCCCTCTTCTGGTGTGTCTGAAGACAGCTACAGTATACTCATATACATAAATCTTTTAAAAAAAAAGTCCTATGTAAAAG
GCATAATGGTAGATGTTGCAAGAAAGCAGTGTGTGTATTGGTATCTGGCAGGAGGCTCAGGAATGTTCACATCACAGTCGTTAGGAAAGGAAAG
CAAGGGACCCCTTATTGTAGGATATATGGACAATTTAATCATGGGGTTTTTTTCCCCCAATAATAAAATTTTCAGCAGGAAAAAAAAATAACAG
TAAACAGTAAGCTACGTGTAACATAAGGATGAAAGATTTCAAAACCCGTCTTTTACAAAATGCACAGCAACAGCTTCTTTTGTGACAGCATCAT
CAGTCCCCGTGGTTTGCAGCCGGATGTAACAAGCCCTTTTGAAGAGCTAAGAGGGCAGAAAGTTTCTGTTGCCAAATATATAAGAGAAGCAGGA
AGCACTTAGCCTCGGACCAGGAAGGGCATCCTTGCAGGAGACCCTGCAGGTCTGTGCAGTTCATTGCCCAATGCTTCCCTTAAATAAAGAGCCA
CAGACTTCAGGAGPGTGTTCCCCCCTGAGTGATTCTGCAAGAGTTGTTTGCCCTCCACCAACTGGGCTGTGCTGAAGAGTTTAGTTTCCCAGGG
AACAAGATCTGGGTCTAAGGCAAGGCAAGCAGCATCCTATGCCCAAACCAGTAACTCCGTTTTCTCAGCCTGCCAATCACATTGGAGCTTCCAG
ACCATCANNNNNNNNNNNNNNNNNNNNGCCTCAAGTCTCCAGTCCCCATCATGATAGTGAGACCCAGAGGAAAGGGAACACCTGTTGCCACCAT
TTTGAAGGGACAGTGGTGACCCATAAAGAGGGTGCTCTAAAGGAGACAGGACAATTCAAGGACTTGGATAAAATATCAAACTGACAGTGGTGAG
CAACTGTCAGGTTCTAGGACCAGTTTAATCCTGACTGGGCAGAGGATAGGGGCCATCCACACAACCCCTGGAGGGAGCGTTCTATAGAACCGGC
TGCCTTGGTCAGCTTAGGGCAACCAGCATTACGCAGCAGCAGGAGGGATATATAACCCAGGCTCACCTCTCCCAACCCCTACAGGGGTTCCTTC
CTGCCAAGGCTCTCTACACCTTTAGTTTACAGTGGAAATCAGAAGGCAGTAGGACTCAGGTGCAGACCATATAATTCAGAACAGGAAACAGGAA
ATGTGGAAGAAGGAGGGGCTAAGGGAGAGCACAAACATTGGCCAGCTGCAGCCCGGCCCCAATTGGGACTGCAGACTTGGGTAGATGGATGGTT
GCCACATCCTGCTCTCACCCTTTTGAGTGACTCTGAGATAGAGCGCCTCTGTGCAGTTCCACAGAGCAGGCACACAGGCTGAAATCATGAATAA
TGTATTTTACCTCCTTGCCGGTTTGCAAGTCTTGAAAGCTCACTCCTCTAAGCTGATGGCAGCCCTCATGCAAAGCAATCTGATTGCTGTGTCT
GGGGTTCAATACACACACACACACACACACACACACACACACACACACACAGGTGCACGTGCATACACACAAAGACAGAACAGTTTGCTTGCAA
CATTGTCATAGCTTAGTGAACAGTATAGCATTGTTCTGGCTCAAGAAGCCCTGGTTCTTCAAAGCTCCTACTTAGATGAAATTATTTGCATCAC
AAACAAAAATTGTTTTGCATTTTTTAGATAATGAAGGATCGTTTAAATATATAAATTAAGGGCTATTTAGAAAAAATAGGTGTCTTTGTGAGAC
TGGCTTAATTCACTTACCATGATCATATTCAGTTATGGTCATTTTAAATACAAATCATGTGTGTTCCAATGACGTGAGATTACAGTGAACTATC
TAGGGAAACTAACAGGAGTGGAGTAGGGACAGGAGAGGAAGAGAAACGATGGGTGATGGGCACATATGCTCAAAACCATAATGTACTGGGGCTG
GAGAGATAGCTCAGCGGTTAAGAGCACTGACTGCTCTTCCAGAGGTTCTGAGTTCAATTCCCAGCAAACACATGGTGGCCCACAACCATCTGTA
ATGGGATCGGATGCCCGCTTCTGGTGTGTCTGAAGACAGTGACAGTGTACTCACATACATAAAATAAATGCATCTTTTTTTAAAAAATCATTAT
ATACTTGCATGGAAATGACCCTATGTAACCGAGTTTCATTTAGTTGTTTTTCAATTGTTAGAGAAAGACTAAATTTTCTCTAAGATAGCCATAT
GAAGACAGTTGATCACTCTATGTCCCAGAAGCCCATCTGGAACTTAGCATTTTGAGCAAACCATAAATTTGATGAAATACCTCCTATTCAAGGC
GGCAAGCATTCATTTGCCTCACATTTCTAAGTCTGCCCCTGTGACTGCCTTAGCTCCTTCTTCCCAAATTCTCCAGTTACCTGGCCCTTAGGGG
TGGTAGCGAAATCTCCTTCCTGACAGCTTCCTTGGCCACGTGCTTCTGTGTGGAGTAGTGCCCAGGCCGCCAGCTGTTCATAGTGTTTGGGCAT
ATGCACACACAGGAACGACTTGGGCAAACACCCTTTGCCTTGTTTCGGATGTTCTTCTTGCAGACCCTTGCCCAGACATAGGGAGTGCCTGTGA
AGTGCTCCAGAATAAATCGGAATGTCCCACTGAAGCCAGACACCGTGGTCTTCATGTTAATGTGTAAGTAGAGTAGTGATCATTTATTTATTCT
TTGATTCCCTTTTGCAGAGTTTTTATTGCCCTGTCTGAGATATTGGAGTTTTCTGCTACAGTAAATTTAGCAGGATTTCTCCAAGGTGACTTTA
GCGCCAGTGAAGGACTTATTGTGCCTCTTCAAGTGGTTCTATCACTCTGCTTGTGCTAGGGTAAAATGAGGTGCCAGTGTGGATTCAGGACAAG
CAGACACAAGCAAGCTAGGAAACCTGGCACTCGATCCCCTCTGCGGTGCTTAGGCAAGCCTTCTCGGCTACTGAATTTTGAACTTTCACAAGAA
CAGATCGGCTGTTTGTTCAATGGTTTATTACTCCTGCCACAACAACGCATGGCATGAGGTTGGCGCGGCCTGTTTATTTCTTTGTGTATATGGA
TATGTGTTTGTGGGTGTACATGAATGGGTGGTATGTGTACACACGTGTGCATGGGGAGACATGCCCAGGGCTATTTAAATCTTCTGCCCTTTTC
CTTCACTTCCCTCCTGTTCCTTCTTAAGAACAAGCATTGCTTCACCTTTTCACTTAAATTTCTCCTCTAGAAAAAACTGTTATCATTCAACTCA
ACATGTTTTCCACTGAAACTTCTTCCATATTAATTTTTAGGTTTTCATGTTCTCGTTTTATTCGTACTTATTGGCCGCTATTTTCAAATTAATA
GAGTCCAATCTCATATTTCTGTATATTGCATCCCTGTTGCCCATCTATGCTTCTCCTCCAGACTATTTCTTCCTGTGCTTATTCGCTTAGTGAA
AGTACATTGCCAGGCTAGAAAGGTGGTTTGTTGGCTAACAGTGTTCTCTGCACAAGCCTGGGAACCCGAGCTTGGTTCCTCATATCCAAGAAAG
GAGAAAAGCAACTCTGAAAGTTGTCCTCTAACTTTTTCATGTGCACCGTAGCCCATGTGCACCCACACCCACAAATACACACCACACACACATA
CACAAAATAATAATAATAATAATTTTAAATATATCAACTGACTTACAAACATTTGTTTTTTTTTCCCGATGACATTTGTGATGTTAACGCATAA
TTTGATTCTAATTTAGTTGTAAGCATATTCTATTTTGACTCTTTGAAGTTTTTTGAAATTCAGTATCTAGCTGTGGTGGTGAGCTTTCCACATC
AACTTATCATAACCAAGAATCACTGGGAAAGAATATTTCAGTTGGAAAAATTATTTGGATCAGAGTGATCTGTGGTCAGGTCCACGAGAAAATG
TCTTGGTTGCTAATTGGTGTTGGGGGACTCACTGTGAGTAGCACCATTCACTCATCAGGGGACAGTGAGCTGTCCAAGGCAAGAGAAACAGAGA
AGACCTCAAGCAAGCAGGCCGCATGGCTATTTGTTCATGCCTGCTTGTGACTCTAGACATTATGTGATGAGCTGCCTTGAGAGTCTGCTTCAGT
TTCTCCTCAGTGACAGACGGTAACCTGGAATTGTAAGACAATAAACTCTTTCCTCCCATAAGCTGCTGCTTCTTGGATGCTTTCTTGCTACAAC
AGAAATTAAACCAAGGCATCAGCTTATATTCTGCCTGAGTGCGTATCCCAGGTGCCCAGAAGTGTTGGCTGTTGTACTCTGCACATTTCAATGG
AGTATCAGTCAGGTTATGATGTCCTTCCTAATTTTTTAGCAAATGTGGTTTATTTTATTTTTTTCAATTTTTATTATTAACTTTTATTAATTAT
TCCATTCATTTACCTCTCAAATGATATCCCCCTTCTTGGTTACCCCTCCCCAGCCCCATCCACCTTCTGTTTATTTAATTAATTAATTTAATTA
ATTAATTAACCAGTACAGAAAAAGTCCACTGAAAAATCCATGTCCTGGGCCCCAAAATACAAATAAAATCAAAGGAGTAGAGTCCTGACTGCTC
ACAGATGAAATGCTTGTGAGTTTTCAAGACCAGCCAAAGACATGCTATGCGAACCTGTTAAAACCCAAATGGGCTGGAGAGATTCAGCTCAGCG
GTTAAGAGCACTGACTGCTCTTCCAGAGGTCCCGAGTTCAATTTTTAGCACCAGTAAGGTGTGGCTCACAACCATCTCTAATGGGATCTGCTGC
CAGCTTGTGGTGTGTCTGAAGACAGCTACAGTGTACTCACATAAAATAAATAAATCTTTAAAAAAACAACAAACAACCCAAAACCAAAAAAAAA
CAAAACAGAACAAAAAACAAGTTATATTAAACTTAAACTCCTCCCCCCTCCCCAACTATCTACTGTTTCAATGTTCTGGAGCTTAATGTAAAAC
TCCAGGTGGCCAGTCACCTTCTTGATTAAATAAGGCAAAGGTAACCTCTCCCTCTGCTCCAGAGTCTTTTTCTGAATGTCTCATATGAATCATA
ATTTGGAGCTACCTCTCCGAATCACGGATTTCTGACACGGGGAAGGTTTCCTATGCAATTAATTTTCCTCATTCAACTTGAAGTTGAATCTCCT
TTACAACATCCTCTTTAGTGCCCACCCGTGCCTTCTGTAGTCACGGATACTGTCTTCTCTGGCGGTCATTTAAGTTTGTCGCCCCTTCAAAATA
TAATAAACTCTTCGTGTTATGTGGAAACGTTACCCTTGGAACTTTTAACCATCTCATTTCAGCTCTCCAAATTTTTTGAACGGCTTAACTTTTC
TTTGAGTTTTCTTACATTCCTTTTAATATGGTAGTTCAGTGAAAACCAGGGCTTTTAGGTATGGTTGAGGAGAAAGTTGTATTGTAGGTATGAC
GGAGGATACAGTCAGAGGTATCTGGAAGTGGTCAGATTGAATTGAGCCATGAGAGGAGAGGGCAGGGGAGAGAGGAAGAGGAAGAGAGGGGGAC
GGGGAGAGGGAGAGATCACAGGACCACGAGAGGAGAGTGTGTGTTGGGGGATAGGGGGTGGGGTACCAATGAGAGTCTGCAGAGATGGCCAGTT
TATATGGAAATGAGAAGCTGGGAGAAGGGAAATGAATCCCAGCCTCTGGGCTGGAGAGGTTTAAGGTAGGGGCGGGGTGAGAAGTTCTGGGAGG
AGCTACAGGTACAGAGTGAACCCAGTCCCTGGCCGTTTGTACTTCTCTAACGAGCTGAGAACATTACCCTTTAATAATGATCTCCTTTCTCCAA
AGTGCTGTCCAGAACAGACTACAATGCCCCTGTTAGGGCTTCGAGCCCTAATACGGGCAGTTTCCTCTTTGCTCTCGCTCTGGGTTGTATCCGC
TCTAAGTTCGGTAACATCCAATGTCCGACTTACAGTAAAAGACCACCAACTTAAAAAAAAAATCTTAAAAAAATATTTATGACTTTTGAGTGGT
GAGACTATACAGCGCCTGGTCTGGTAGAGGTTATCACCAAGTTCGTAAAACAAGTGAAGGGTTTTCGGATAGACCCATGGGCGTGTCCCTACAT
CATCTGAAGGAGGAAGCCACTCTACCCTATAGTTCTTCTCCGGTCGAACTGAGCCACAGAGCAATCAATGCCTTGCGTCTGGAAAGGCGTGGCT
GGAAACCAGGTGGCCGAGCAAACGCTGCTCCAGGCTTCCGAACCCAGTCTTCTCTACCCCGGAGCACTCCTGACTACCGACCGCCCTGCATTCC
CGCCCTGGTCCTCACCGACCGCAGGAACTTCACAAAGCATTTCAGAGTACAGCAGATGCGCCGACGGCTTACGACCGGCCGTGGAGTCTCCATC
TTGCCCACAGACCCAACAGTCACGCCTCTCTTTCAAGCCTTCTCGATTAATGGCTCTTTCCAGGACTCGCGCCACCAGCTCAACTGCCGGGGCT
GGGCCTGCGGCACCGCGCTCAGGCCAAGTCCGGGCGCCCCTGCGCACTAGCGCGGGCCGCCCACTGGCTCCGCCTCCTCGTCTCTTAACTTCCT
AACTCTTGCTGACACCTGTCTAGCCTAACCCAGAGCCAGGTCCCCACCACTGCTCCTCTGCCCTGGAGCTTTCCTCTGGAGAGCACTGTTGGAG
TAGGCGAGAAAAACCCAAGAATGCCAGCCCAGCCTCTTCGCCATTTGAGCATCTCAAATGCCACCTCCTTAGGATTTCCCTTGGTTACCTTGTC
TAGTCATTCCTCAGCATTTTTTTTTTTTTTTTTTTTTTTTTTAGATCCCATCCAGATTACAGTATAAATATCCCCCAGGATGACGTTGATTCAC
TGGTAGTAAGTTAGACTTAGGCAAGAGAAGTTCCGATGTTCTGTTAGTCTGGTTGACCACGGATAATGAAAATGTATAGTTTTATTTAAAAACT
AAAAGGCTACAAGAAAGGAATTTGGCCGTTTTCAGCACAGAAATTATTCCGAAGAGACAGACTTATCCTGATATGAATATCACACAATGTGCAC
ATGTAATAAAACATCCAATGGTATCTTGTAAATAAATACAATTATGTATCAGTTAAAATAAAAAATATAAATTCTATAAAGCAAGGATCTGTCT
GCTTCTCTGCTCGAAGGGTCCCATGGTCTGGGCCACTCATCAATAGCTATAGAATATATAGCCTGAACTTATGGCCTGGCCCTGTTAGTTCTGT
CCTTGCTCTCAGACGTGCAAGCCTGTCTCTAGAGTACTTTTCGCCTCCCACTGCTGTTAGTTGTCCCACAGTTTATAAAAGTGCTCCGGTGTAG
CCAGGACAAACCATCTTGGAGCATTTCATGATGATAGACACAGGAAGAATATGTCACTTCCATTATGTGAATTAAGTCTCATGATTTCTTTTGG
AGAACTGAATAACCACCCGTCCTAGTTTGCTTCTCTGTGATAAAACAAACACTGACCAAAAGCAATTTGGGGGAAGAAAGGGTTATTTGGCTTA
CAGGAGGGAAGACAAAGTAGGAACTCAAGGCTGGAACCGGAGGCAGAAGAAGCAGAAGCAGAAGAACTAAGAGTGTTTATCAGCTTCAGTAGTT
CTCTGGTTTGCTCATTCATAAAGACCCGCAGCTCACCTGCCCAGGGACAGCATTGCCATAGCAAGGAGGCAAAAAACAAAAAACAAAACAAAAC
AACAACAACAACAAAACCCCTCCTTCATCAATTAGCAACAGGAATATGCTCCACAGACATGCGCACAGGCCAATCTGCCGCAGCCAGTTTCTCA
ATTGAGGCTCCCTTTCCCGAGGTGTTTCTAGTTTGTGTTGCCTTGGTAAGAATTAACTAGCCCACAACCCCAGTCCATTTAGATCTCTTTGGAT
CCTGCCCATCTAAGATCTGTTCATTTGGCTGAATCTGATCAACAGTTACCAACAATCTCACCCCAAGACGCTCACACACACACACACACACACA
CACACACACACACACACAACTGTCGACTTTGAATTTGAAGATTTTATTTGCCTTTACTAGGTGCCTAGCAATAACAGGAAAAGCCCTGTTAGGG
TGATGGCTTTTTTGTTACAGATCTAAAAGAGTAAAACAAAACCCAGAAAATGTCTTTCTTCATTTTGCCCAAGACGACTGCCAGCATCTTGCCA
CCTGGAAGAAGTGGAATCTTCTTTACACGCATTGTAACTGCCCATATACAGTCGATAGGCGGCGACATCTGGGCTTATTGGTCTTGATGGGTGA
ATTATAGTACCCAAGCTTATTTTTGCTTACAAGTTAGCCTTACATGCTTTTTTTCTTATCCCTTTTTTGTTCATTCAGGGGACATATTCGTTAT
GCTTTCCCGAGGAACATTAAAATCCAAACGTTGAAAATGTCAAAGACTGTAACATTTGGGAACAATGGCTTTCACGGCCCTCTCACCTGTGTCC
CTCACACTGTTTTTTGTGATGGTGGGGATTAAACCTAGGAGGGCCCTTTGAAGCCCAAGGACAAGCTTGGAAAATGTTCCCAAGTTTGACAAGG
TCTACTTGCAGAGTATTTTCGAAGGAAAATACAGGACATCCTGAGTAGGCGGTGCGAGGTGTGGATGGAGCCGGCAACCAAGGAAGTAATCGGA
TATACTAGCAGTCCCCGGCATTATTATGCCATCCATTCTCTAAATCTACTTGGGTCAGGCCCATTCTGCGGTCTGTAAAGTGGGGAAATCCTCA
CTTTGAATCTCTTCGGTGTACCCTAGACGGAGAATACTAGCGGATCCCTTAAGGGCCGGGGCCGGACAAAGGGGTGCCGCGGGGCTCCAGGACG
CACCGGAAGGAAGTAGGACTTGCACATCAGCCAGGGACTATGCTGCTACGGTCCCTGCGTAGTTGAGCTGCCCGCTCCCTGCGTAGCGTGGGCC
CGGGGAGCTCCGGGAGCCCCGGGAGCCTCGATTCGGGCGCCGGGCCGCTGTGGGCACCTCGCCGCGCCPGGCCTCCGGGTAACTAGTGCTTTTG
TGCCACCTCGTAGGGGCCACACTGAACCCCGCCCCCTCACCTGCTAGTCCCCACGAGGGTCTGGGGACTGTAGACCCTAATGAAAACTGTCAGG
ATCGGCACTTAGTGGGGCTCAAACGCGGCTTCTCGGCCCATTTTTTTATTTTTATTTTTTTATTGTCAGATTCTTTAGGCTTGGGAGGTGGCTA
GTTGGGGCACGAGCTGTATTTAATCAGCTCTTAGTGGATGCAGGTGTCTGCGGACCTAGGGGGCGGGTTCAGGCTTGCGACTTTCTCCTCTTGC
TGGCAGTGCGGATCTTTCTCTTCGGAAATGGAAGCCAGGTGACATAGCTTTCATTGGCCTCGGGCTGCTGCTGCCAGGTGGGTTGGCAGTGTTG
CCAGTCTTGGCCTAGACAGCCTGGGTCCCAACCCTTGGAATCTCTCAGAGTGTAGGTTATCCCTGGGTGCGCTGTGAAGATCCTAAGCACACAA
TCCAGGTGAAACGGAAAGTAGAATGTACCGAGCAAAGGAAACTAAGCAAGCACACATGGGCCTGGGCCCAGTACAGCGACACATACGGACCCAA
CTGTAGAGAGTCCCAAGAATGCCAAAACATTTTTTGTAACCAGGGAACACGCATACGCAATGACTGTGTGGTCATTTATCACGTCAGCACAGAC
CAGAGTGAATAATTGAAACATCGATTTCCTTTCCTTTTTTAGATAAAGATAGAGAAAATGATAAGGAGAAAAAAGCAGTGGTAAGTTTCTCTTT
GCATGCTTTCTCCAGCGTAATTTCGGTTTGGTTTTGTTTTTTTTTTTTTTTTTTTTTTGAGGCGGAGAAAACAAAATGGTGCGCAAAAAGTGAA
AAACCAACCCAAGACGATATCCAGGGTCACATCTCTCTTCCTTCTTGTGGCCCAATTCCTCTCCTTAGATTCAATAAAACCGTTAGCCAAGTTC
TTGTGTGTACGGGCGGGAGTGGGGCCTCGAGCTGCATTCAGGTAGTAAGCACTCATGTTCAGGTGTTTGTGACTGCCAAAAGATGCTGACCGAG
CCATCTAACGGCTTATTATCTATTTGCTTAAAAAACTGCCGATTGCCCCGCCCAGATGTGGGGGGGAAAGTCTTCTTCTCACTTCCTTCTGCTG
TCTAGTGGAGACCAGAGAATCCACGACGGACCTCAGGGTGGCCTCAGTAAGGAGGTGCTTGACAGGCAGGCTCTGGGGGTTGGGGCTGTGAGGT
CAAGGAAGTCCAAGTTAGACAGGTTTAATGTTGCAGCAGTATTTTGGTTACCACCAGCCCAAAGGGGTTCAGTTTCTTCCTTTGACATAAATCT
CACCCCAGGCTGGCCTCAACTTGTGATCCTTCGGCTTCGACCCCTCCTGAACACTGGCATTTCAGTTGTGTGTCACTCCGAAAGTCGTCAGGGC
CCGTTTCTGTAAGGGAGCTGAAAGCCTTGAGCTCAGATCGCTGGGGACATAGGCAGCTGGAGCACCTTAGTGCCTCTGGAGGGTGGAGGTGTGC
CCTCCTGTACCCCTTGGTGGGGCAGTGGAGGTAGTCAGGAGGAGGCGTGTCCCTGGGAGCAGGAGTGACATCACAGGAAAAAAGGAGGCTTGGT
TTTCAGGCTGGAGATGGCTCAGCAGTTAGAGCTCTTGTTGATGTTAAGAAAAGATTAAAAAGGTTTTTGTTCCTAGCACTCACGTGACAGCCCA
CAAACTGTTTACTTCCAATTCCAAAGGATCTGACCCCGCCTCTGCTGCTCTTCATGGACACCAGGCATACACTGGAGCACAGACGTACTAGCAG
GCAAACCATTTATCCATATAAAATACATCTAAAAAGTTAGAGGAGGAAGGTGGTGGTGGCGGCACAGGCCTTTGATCCCAACACTCGGGAGGCA
GTTCTCTCAGTTGAAGGCCAGCCTGGTCTACAGAGGGATTTCCAGGACAGCCAGAGTTACACAAAGAAACCCTGTCTTAAACAACCAAAATAAA
TAAATAAAATGAATGAAGGAGAGAAAGAAAATATGGATAGCTAGTGACATAGAATTTGTATTTGTAATTGTTGAGCTAACCTTGCCAAGTGTTG
GACCTGTTCTGGATATGGTCTGATGCACCCCTGGGTGTACAGTAGCAGTTTGTAGAAAGTGGTAGTGTGGAGCCTGGTCTCAAACTCAGGGTAG
CCATTTAAGTACATTTTTGTGTGGGAGGCGCTGGGCTGGAACCATGAGACTTGAAAACAAAGCCATTGGCATTGCGCACGGTAACCTGACAGAC
GGGACAGTAAAAAGGACATCAGTGAATCTAGAAAGCAGTGAGTGAGCTTGGGGCTTTGAGGAGGGGACTCAGGACTCTGTGCAGCCTTGGGAAG
CCTTGATGCCCCCTGAGAGGTAGAGGAGAGGGGACTGTAGTTGTAAGAATCTAGAGAGAGCCGTAAACTGGCTTTATAGTCTGTCCTTAGATAG
TGGAGGCTTGGAAGTGTTCAGAGAAATTGGGCTAGATGCCAACGTCAGAGTCACCAAAGGACTTCACCATAAACTGTGTAATTTTTACTAATTT
ATTTATTTATTTTTTAAGTTTTCGAGACAGCGTCTCACTGTCTTACCACGTAGCCCTGTCTGAATTGGAAATCACAGATCCTCCTGCCTCCGCC
TCCCTAGTGCTGGCATTAAAGGGTGTATCATGTAACCTTTGAGGAGTAGAATTTATTTGTTTCGTGTTTCTGCGGGCTGGAAAGTTCAAAGGTT
TCCCTAGTGCTGGCATTAAAGGGTGTATCATGTAACCTTTGAGGAGTAGAAATTTATTTGTTCGTGTTTCTGGGGGCTGGAAAAGTTCAAGGTT
TTTTATCAGGACCCATCCACTGATAACTGCCCTACCTCACAATACTACTCCCGAAATTCGCCTCCACTAAGTCACTCTTTGTGCATGACTGCTC
TATTTGCAGGTACACCTGCATGCCAGAAGAGAGCATCAGATCCTATTACAGATGGTTGTGAGCCACCATGTGGTTGCTTGGAATTGAACTCAGG
ACCTCTAGAAGAGCAGCCAGTGCTCTTAACCACTGAGCTATCTCTCTAACCCCCACCAGTCACTCTTGATGGCGGAGTTCACACAATCTCTCTG
CAAGGTCTAATCTCTCAACACTGTTCTACCGGGGACTAAGTTTCCAGCTTGTGACTTTAGGGGATGGATTCACATCGTAGCACTGCGAACGCAC
TGTCGTCCGACTTGCCTTTCAGGGTGAGATGGTAGGGATCACACCAGGAGAGCTGTGGGGTAAGCTGAGAGGTACAGAGGAGTAGCGAGGTCTC
CCTCTAGGAGTAGGAGAAATGCTACTTGTTTGTCCTTGGTTTTCATTAAACATCCAAATTGATTGGCAGTTCTGTAGGGTTACGGTGATCATTA
CTATTGTATTGCTCCTCCCCTGACAGGGTCTGACTGTGTCCTGGCTGGCCTTGACTCACAGAGACCACCTATACAATGAGAAATGTTTAAACTT
CCTTTTTTTGATATATTAAATGTTACTTAAAAGAAAGGTGTACAGTTGGGTATGGTGGTACAGTCCTGTAGAAACCAGCATTGAGGAGACTCAG
GTGAGAGGTTGGAGAATTTGAAGTTATCCTGGGCAACAGCAAGACACTCACATACATCCCCCCCCCCAATAAAAGACTTATTTACTTTATTTTA
TATGAGTATACTGTAACTATCTTCAGACAGAGAGGACATCGGATACAATTACAGATGGCAGATGCTTGTGAGCCATCATGTGGTTGCTGAGAAA
TTGAACTCATGACCTCTGGAAGAGCAGCCAGTGCTCTTAACCACTGAGCTATCTCTCCAGCCCCCCTCTGTCTCTAAATAACTAAAAAGTAAAA
ATGAGAGTGGGPGGATTTCCGTCCTAACGCGTGCTTAGCATAGCATCAGGTGAGTTCCATTCCCAGCACCAGAGAAGATGCTCACCCCTGCCAG
TTACAGTGGCTGGAGAGTGGACTCTGCTTCTGGGGGAGAGTGGGCTGAGCCGCGGCAGAGACACAGAACTTTGAGCCAAGCTGCCTGAATCCTA
CAGCAGCACAGCCTCCTATCTCTGTAATCTGTTACTTTCTTTGCTACCCTCACATTTACTGTGTACACTGTTGAGGCTGGGACCAGATTTTCCA
TATGATGTGCTGGGCTCATAGTAGGCCTTCAAGCAGTTGAAAGACTCAAACCTGCCTGGTTTACTGCCTTGTCAAATCACCACGTATTGGTGGT
AACTTCTAGCGAGGGTGTGGAGCAACAGGCTACTTGCTATATGGTAGGGTAGGCACTTCTCTGTGTGACCCAGAGGATGTGCAAGAAGGTTCTG
AAGGAGCAATCTGTCTTAGATTGAACTGTGCACCTGTCGTGATCTGCTGGAGCCAAAACCAAAATATCGATTGAGGGCTTCTCTGTACAAGTCA
GCAAGTTGGATCCTAGACGGCATGCACGCGATTTTTAGTCTCAAAGCCATTGATAAAAGTCAGGTTAAGGAAATGGGACACTTTTATACTAACA
CAGACAGTGTGAGGGTGGATCTAGGGATAGGGCTCAGAACTTGACTCAAGCAGACATGTTGTGTGCAGTTTAGGTGACGTAGGTGGCAGGGAGA
AGGGTGTGTTGTTTGGGCTGAGGATGTAGTCCAGGGGCACATAGCTTGATTGCTATGTATCAGGCTCTCCGTTTGACCCCTAGCTTATTTAAAA
CAAGAACAAGCGGGACCGGGTCAGGTGTGGATGGATCACATGGGTTTGTCAGAGGGTGCGGCATGAGGCATGCTGATACTGTGTGGTGGGACCT
TGGGGGATTCCCAAGGTAGGGTTTTAGCTTACCTCTCAAAGTCCTGGCCCGAACCAAGAACCTGGCTATTCACCTGAGCCTAGTTCTGTCGTGC
TTTATCTCTATGCCTAATGTACATTTGTCTTCTGCCAGCTTTGTATTCAGGGCAATATTGATAGTGGGTAGACGACATGCCTGCAGTTCTTCTC
CAATACAACAGACGTCGAGGTAACGCTCTTACAGTGGGTTTGTAGGAACCCGAAAACACCTCAGTGGAGTAGTTATACCGGGCACAGAGAGCCC
TGTCCAGCAGAAGGCTGATGCGAGCTGCCAGTGAGCTGCACGTCTGATCCGGTGCCTTTAAAGCCTCGTGGAGTGAAGCAGGGGGAGCTGTAAG
ACAGCCCTGATGTCAATTAACATGTCAACATGAAGTCAGTGTTAAAGCAATGAATGGACTGTTCACATTCTGTGTTTGATACTCAATCCCTGGG
CCTGGAGTTCAGTTAGTGTTTACAGCTTTCTCAGTTTGGACTCCCAGATAATGCCCAAGGCATGATTTCTCAACTCCGGATTTTGTTTGACTAT
ACCGTGCTGCCAAGGAGTATACATTCAGTCCAGTAGATTAGTAATGCACTTCAGCTCGGCCTGTTTTCAAGTGAGGACACAGCCCCCTTAAAAG
AAGAGGCGCATCTGTGGTCAAGCTTCAAGGTCATCGTGGTTGCATGTGGCTTGTGGCCCCTGTATGCAGTGGTACATGAGGTCCCACCATTCCT
GTCTGAGAAGGCAACTTTCTGTGTGGGGGCTGCTGATGCACAGTATGGATAAATCCTGGACAAACTGCTTGCTTCTTGGGGAGCTGAACTTTTG
GAATGTGCCAGGCAGTGATAGTCTGTGTAGTTATGTGACCCCTGAGCTTCCAGGCCTAGGTQACCTTTCCTGGTAGACAGTACTTGACATGTGT
TGTCACAACTTGTTCCTGGGAAAATTGAGTGTGTCTTGTGTGACTCCATTGGGCAGGATACTTGGGAGTTCTGGCCCATCTCCCTCACAGGTAC
ATCCCCTGTGCAGATTTGGTGCTGTGACCTCTCATGGCAGTTAATATTCGCTGTACTGTTGGATGATGTCTCATCGATCATCACCGACCAAAGC
GACCGGCCTTGAGTGGTGACCCTCTGAACAGAACTTGAAAAGTGCTTATATCCTCACTGTAGACCTTGGGGCCAGTTAGCAACAGTAGCCGCAG
CAGTAGCTAAAATGATCCAAGGCACCGTGTTAAGTGTTTATGGCATATCTAATTGATTCCATGCTTATCTGCTTAACAACCCTCTGAGGTAAGC
ACTGTTATCTCTGCTGAGGCGAGGAAGCAAAGGATAACTGGCTTATAGAATTTATATGGTGTGATAGTTAATTTTAGGTGGCAGCTTGCCAGAA
TTAACGACTGCAGCAGCCTCCCCCACTCAGCGTGGTTTCAGTTACCCGAGGTCAACCAGGATCTAAAGTATTAAGTAGAAACTTTGGGATGTAT
TTAAGTTCTGCATTGTTGTACGATGTACCCAAAGAGATCTCATCCCGCCCATGTAAGCCATCCTGCTGTCTAGCATAGGAAAGAAAAGCATGGC
AAGTGTTAGGCTTGTTGTACCTGAAGCTTCAGGCAGCCGCTGGGGATCTTGCAACCCCAGGAACAAGGAGGCAGCACTGTGCCTGGGGGCTGAT
GAAGTGTTACCTCTATACACGTTTAGAGGGTGCTTCTGGAGAAGACCGATATGTAAATTGGCAGCCTTACTAATATATAATATAACAGGTCATA
TAATTGGCCACAGTCCTGGATAGAACAAAGGAGAAAAGGATTTTCCCCCCCTCTTCCTGCTGTGGGACACCAAAAAAACTGCTGGCTTTCCAGC
CTTAGGACTTAGGGACTTAGCCAGAGGCCCCAGGCTCCAGGGTTTCAGCCCCATACTTAACATACGCCAGTGATCTCTCTGTTATCAGACTATT
AGACCTAGACTGAGCTCTGCCGCTTGCATCCCTGGGACCCAGAGCTGGAGACGACCTGTCATGACACAGAGGTCTTGGCCTCGATATGGTAGAC
CCAATCTTGCTCACGAATTTCATCTTGTATGTCAGTTTCTATGTTCATGCAATTGGATCTACCTCTGAGGAGAGTCCTCACCTATCAAGTAGTG
TGTGTCGGGGCCAGTCCCAGCAAAGGCTGTGGAGCTTCAGGGATGCTGTCCATGTTTGTCTCCPAGCTGTGAAGAGCTTGGTTGACTTCACCGA
GCCTATTCCCCTCTAGACTGAGCCAGTTTGCAGTCAGTCACAGGAAGGACTTCCCCACCTAGAAGGAGCTGTGGCCGTTCAAGGGTTCATCCCA
CCCTTGGTCTGTAGTGCTTGCCTGCCTGTATTCTAGATTTGGCATGCTGTCACACGTTTGCTCTCCTTCCAGGTGTTATTGGAGCCTGTGCTCA
AGTGGAGAAATGTCCATGGCCATAACCCTGTGGTGAGTAGTTTGTCTCTTGCAAAATGCCAGCTTCCCTGTGAGTGCCTAAAAAGTGCTGGTTC
TGAGGCCTGTGCCCAGCACAGCCAGTCTGTCCCCATTGTTCTAGCTCATTCAGAGGAGGGGAATGGCGAGCCAGGGATTTCTCACGCCTGAGAA
TGGGTTTGCACGAAGCCCAGGAACCTCCCGTGAGGTGTCTCCAAGGTTCCAAGTGGCTTAGCTTTCCTTGGCACTTGTTCCAGGTCACCAGGTT
TCTCGATGAGCCTCTGACTTGGGTTTGGGCTTTACATTACCCAGGAATGGATCCCTGTGGTTTACCCTGGAGCTACCCATGTTCCTTGCCAAGG
TGGGGCTAGAGAGCCAGGGACTGTAATGTGCATGAGCCTTCTCCCTCCTACACTCTGAAAGCTTTGTGCTGCCTGCTTGAACAAAGACTGATAG
AAGCAGATGCTACCAGAGGGGATGAAGAAGGACTGTGGTCCTGGGCTCCCGTGCTATGGTATAAGGTGCTTAGTATTTCTCAGCTAAGAAAATC
TGGTCATGTAGGTTTAGCAGTGCCTCGCAGTACCTCGGCAATACCACGTCTAGAGTCCATTAGACTCAGGCCGACAGCAGAGACAACTGTGTCT
GCTGGAACCCGGCTTTAGGACCCACTTGCTCACTCACTCAGGATTTATTACATACCTTTTATGTGGCCAACACTCCTTCGCACTCTAGGACACT
GAGGAATTTAATAAAGCCTCTGGTCTCCTGGCCCTAACATCCACTGTGGAGATGAAGGAGACAGGTATTAGTATGTGGTGGCGAGTGACAGGAG
CTGTGAGGAGAGCTACAGCAGGTGAAAGGATGCTAGTTAGATAAGACAGAAGCTCACAGTTTTAAAATAGGAATCGCACAGAGCTGTGACAGGA
ATCTCACTTGTGTGCATGTGGGAAGAAGATGGGATTGTCAGCCATCTTTTAGTATAACAGAGATAATCCATTGCCCTTCATANNNNNNNNNNNN
NNNNNNNNNNNNNNNNNNNNNNNNNNNNNNNNNNNNNNNNNNNNNNNNNNNNNNNNNNNNNNNNNNNNNNNNTAAGACAAGGGTAGTTTTAGAT
GTCTGAGACTAAAGGAGACACTTCACAGACCAGAAGTACAGTCTCAGAAGGTCGCATAACAAGTGTTATCCTTACCATCTCTTCATCATCATCG
TCATCACCACCATCATCAGATATATTTCCACTCCTTTCTGCTGGTTGGAAACACAAGACTGCTGCTTGTGTGACAGTTACTGGCTCACCACGCT
GGCTCCGTGATGCAGAAAGTCGCCTGTTTCCGCAGTCATC0AGCTTCTGACTTTGCTGAGATTTTCTTTGACCATAACTAGGAAAAGCCTTTAG
TTCTCAGTGCTGAGCACCGAGTGCGGAAGTGCAGAAGGAAGCTGGCGTCCTGTCACATGCCTGTGATCTCTCAACCCGTGAAAAGCTGAGGCAG
GAAAACCCCAAGTTCCTGACCATCCTGGTTGTTTATAGACTCGGTCTTCCCTCTTCTCTCAGACAGACCCCATCCTTATCCGTCCTAAAAACAC
ACACCAGCACACACACACACACACACTCGTGCATATGCACACGTAGACCCTAGAGAGAGATGCTATAAGATTACTAGATTACTAGAGAGTAGAC
TGCAGCAGGAAGTGCTTTTATCTGTAGGTGACAGAAGATTGAGGGCTGGCCTCTATTTTATCAGGGTAGGTAGGACATGCATCTCTATGATAGG
CGACATTTGTCAGAGACCTACATGTGAGGGAGGGGGCACTGCAGGCACCTGGAGGAAGAGTAAAAGAGGCAGGTGCCAGAGCCCTGAGGTGGGG
GCCTGCTTGGCATGCTTGCAGAGCACTAAGGAAGTTTGTGTGCCTGGAAGCTGATTGGCCAGAGAAAGAAGGGTAAGAGACAAGTGGATGAAGG
TGGGTTTCTAGGGCCTGTGGTTCAGATGGGGTTTAGATTTGATTTGCACCCAATGCAAAGTCCCTAGACGGGAGATGTTAGCAAGCTCATTTTT
GGCTGCTGGATAGAGAACAGACCACAGGGAAACTCAAAGGCCAACTATGAGTGTCTAAGTGCCTTTTCCTCAGGCAGCACATCCTGGTCTGGCT
GTTAGGGGGCTCTCTTATAGTTGTGTTCACATTTGTCTCTGTCCACCTACTCTGAGATTCCTACAGCTGTCCTGAGTAAATCTCTGGCCTCAGC
CCTGCCCCTGTGGGTTTCCTGAATGGCTTTCACGGACTTCAAGACCTGGGCCCTGCCTGTACTTGCAAACTTGGACACAAAGTGCTTTGCTTTC
CTCCCTGCAGAGCCTCATGTACCATGATGCCAGCCGATCGGGCCTCACACTGCACACGTACGTGCAGCTCACCATGCTGGACCAGCATACGCGC
CCTCAGGTATGTCACAGGTCTCACTTTCAACCTTATAAACATCCTTCAGATTCAGGTGTTGTCAGATAGGGACATCATAGTATGTCCCTTTGAA
CACCTTTATGCTGTCCAGTCTTCTGACTTCAGTAAGGTCTCCTGTCCTCACAGCTGGCTGTGCTGGTGCCATCCTGAGCTCACATCTGTAATCT
GATCAAAGTTGCTAAGGATAACACACACAATGCACCTTCTGAGACTGTACTTATGGTCTGTGAGTGTCTCCTTGAGTCTCAGGCATCTAAAAAA
CTACTACCCTTGTCTTACTTGATATCAACCCTTGAGTTCTCTCTGACTTCTAGGTATGAGATGCCGGTGGTTTTTCTCTATTATACCAAAACGC
ATGCACACAAGTGAGATTCCTGTCATAGAGCTGAGTGATTCCAGCTTTTGACCATCCTTTAACACAGAATCCCTGGCTTGGGGCATCATTGTCA
CCTGGGGGCTTGTTAGAATTGTACATTTCTCAGCTCCTCCCCAGATCTACTGAGTAGGAAAATCTGGGGCTAAGGTCTAGGAGCCTCCTTTATC
CAGCTGTGCAGGACTCCTGGATATGTGTTCTGCGTGTCTACCTCTTTGAGACCAGACCTTTGTGAGGTCTACTTTCAGATTCTCGAGAAAAATC
TGATTCACCTTGGGTCACAACCAGGTGTTGGGGCAGCACAGGACACACAGCGATACTTAGGTCCTTCCATTAGCAGGAGCAGGTTCTCTTAGGA
GGTCAGGTGGCAAGGGTGACCATGGTTGCTACCTATGGGAAAAGCTTTATAGACAGGTAGACCCTTTCCCTGTAGGAGACAGGATACCCCTATA
GCCACTTACGTTAGCACCATCATTAGGCTGAGCAGTTGGCTCCAAGTGTGCCTCCCTCCAGCTGTACGTGTGATTCTTCTGTCGACATCAGTCT
GTATCTTTACAAATTGACAGATGGGAATAGATCTTTAGAGATATGAGATTTTGTCCTTTCCAAATGGTTTCCTAAGTGACAGAGAGCAGAACAC
CTGCACTTAGCACCTTCCCCTTGGTTTGCTCTGCTTTGCCTAGTGGGCATTTTAAAATTATATCCGATGATCTGTGAATATTATGGGATGTGGG
CTGAAATCTGCTAAGGAGGCAAACGCAGAGCTGGCTGGACTCAGCAGGAGAGAGATGGCTGAAGAGGGAGCCGGAAACAGATGGGAAAGAAAGA
TAGGAGCAGCACGTGCAGAAGGGACAGAAGGAAAACAGATGGGTGCGCAGAGCCAGGAGGCCGGGAGGTAGCAGTCGAGTGGGCTGTAGGCTTG
AACGTGCTCTGGGTCACACTGTCTACTAGGTGTCGGATGGGCAGGTCCCTCCTGCTCTCCAAAAGGACGTAGTAGACGAAGGGAAAGATGATCC
ATGGAGGGTGTGAGCAACTTGCAGAAAGGTGATGTGCAGCCTCTTCTCTCTTGGTAAGAGTACTTTTCAGTTCCAGCAGGCAGTGCCTCCCTAA
CCCTAGTCTTTTGGGGCTCTGCTTCAGACACCCAGGTCCCTGGCTCAGGGCTCCACTCACCAGACTGTGTCAGCGGGGCAGCTTTGCCAACGTG
TTCCATATCCTAGTGAGTCTCCCTTCTCCTGTGAGAGCAACTGTGCGGCTGCTGGCAGCCCTGGGCCCCCACATGCCTGCCTTTACTGTCCTCT
GTCCTCTAAACTTCAGGATGGCTCAGGTCAGGGTGGAGGGAGACACACAGTGACTCTCATCGCAGATTTCGCTTCTCTTGACTGTTGTCCTCCC
TCACAGTCTCTGTCCAGCACAGATGGAAGGGACCCCTAAGAGGACTGGGGCAGTTCTTCAGGGCTTCCTGTACCTTCACTCCTCGCCTGAGAGT
AAATCCCTTTTTCCATTCCTTTAGATGTCACCTGTACGGTTGATGGAAAGGTCAATTTACAGCGCAAGATACATTTTTGTAGAAAACCTGTATA
GAAGGTACTGTAGCTTGTATAGCCCATCATTTATTTACTGATTTTGTGTATGTGTGTTTGTGTATATATATTAATATGTATATGTGTGTTTACG
TGTAGGTGCGTGTGAGCATGTAGGTGTGAGTGCATAGGTGTGGGTATGTAGGTGTGGGTGTGTAGGTGTAGGTATGTAGGTGTGGGTGTGTGGG
TGTGTAGGTGTGAGTGCATAGGTGTGGGTGCGTAGATGTGCGTGTGTAGGTGTGAGTGCATAGGTGTGGATATGTAGGCATGTGGAGGCCATGG
GACAGCCTTGGGTGCTGGTTCTCAGGAAGTATCTATATTACTTTAATTATTTTTTCTTTAGGTTTGTTTAGTTTTATGGGTATGAGTGTGCTTA
CATATATGTATGTGTTCCAGGTGTGATCATGGAGGACAGAAGAAGCTATTAGATTACCTGGAACTGGAGTTACAGATGGTTGTGAGCCATGTGG
GTGCTAGGACCTGAATCCAGGTCCTTTGAGATAGTAGCAAATCCCTGAGCCATCTCTCCAGCCCTCCACTGTGCTTTTTGAGACAGGGTTGCTC
ACTTCTTAGTTATCGCTTCTAGGCTAGGCTGACTGGCCAGCATACCTCAGGGATCTGCCTGTTTCTAATTTCCAGTGCTAAAATTGCAAGCAGA
TAGCCTCATGCCCGTGCTTTTACATGGGATCTCGCAGCTGACTCGGCTCCCCATGGTAGAACAAATACTTTACCATGAAGAGCTGTCTCCCTGG
CCCTAAACTATTGCTGGTGGAGTTAGTTGCCTAGTTACCTGACAGATTCGGAGTACCTTCAGTATTGATGAGCTTCGGTTGCTTTATAATGTTG
TGTAACACCACCAACCCACTAGTGACACCCACCTTCCTTTATTGCCAGGTCAGTTTAAGGAGGTCAGCCGAGTGGCTCCTTTTACCTTGGCTGG
GCTTAGCAAAATGCCTGGCAGTGGGCTGGACTAGAATGGACTTGACCCAGGTGGTCCAGGCAACTCATTTCTCTTCCTCTCACCTGTCATCCCC
TCTGGGACCAGAAGCAAGCATAGCCCCTGTCATCTCATGTGTGTGGCATAGGGCAAAAGTCCCAGTGGACACACAGCGGCATGCTTACATTTGT
TGTTCCGCCCTTGCCCACATCCCATTGGTCCCATGCCTAGGGATGGCAGGCGAGAGGGCCAAGGGGGTCCATGGCACAATGCAAGCTTCTGGGA
AGATGGAGATTTGGGATGCTTAGAGCAGTTAGTCTGCCCCGTGCTTATGCTGTGTATAGCTTCTGTCCTCACTTATCTAGACAGTTGCAAGGCT
TCAGGTGCCCACCCGGGCTTAGGGCTCCAGTGTGGCAGGGCCTAATGTCTGCTCAGGTTATTGATAATTTGGGAGGTGTCTTAGAGGAAACAGG
TTGCAGACTGAGGTCTGAAGTTTCAGCCTTTTCTGAGCTGTTTCCATCTTCATACCCATGTATCTTGTCCTCATGTCCTTGTCAGTGCCCGATT
CTTACCACCTCTTCCTGCTCTGAGCCTGCAGTGCCACTGCCACTTCTTAGGCAGTCCTGACACTTGTACAGAATGTTCCTAGCTTCCCAGACCC
CTCCCTCCCATCACAGCTGTCCTTATGGTTCTGTCTCAGCCCTTCATGTCTCTGTGTGTCTGTGTGTCTGTGTGTCTGTGTGTCTGTGCCTGGT
GCCCATGGAGGTCAGAATAAGGCATTGGATCCTCTCAGACTAATCTATGTACACAGCTAAACTCCATTTCCTAGGTGGAAGCAGCAAACAGTTC
AGACAAAGGATAATTATCTACATCTTCCTAGTGGGGCAAGCAAGGTGTGCGGAATAGTGAGAGGCTCCGATTTCTCTTATTAAAGGTCATCCCT
CAGGCACCACTGAGCCCCTCCTCTCTCCACACTGGCTTTACTCATGCCCTCTATTACATACTGAGCTAAAGTCCCCTTGTACTGAGGCCGCCCA
GGGCTCTCTGTGTTTATCAGGCACCTTCTGGTTGAGGACTGTGATGTAAACGACGTCCACCAGAGGGCAGCCACTGCGTAACTACAGGGGTTCC
TGCATCCCTATCCTTTAGCCCTTTTCCTGCCGGGGAGGCCTGGCCTTCTGTCCTGGGATACAGACTGAGCTCTGAGAGTTGTCCTTGGGATTGA
GGGTTTATGGTGCACGGTTTCCTCTGTGTTGTACTCAGCCTGTGGGTTCCATTTCACACGTGGGACCTGAGCTTTTGCTGGTTGGGTTTTTACA
CTTCTATGGTAAAGAGTCCCAGGTTTTTGTCCAGGTCTAGAGTGGAGCAGCTGTCAGCCAAAGGCTTTCTGTTTTGACAGTGAAAAGGGTTTTG
ATCAGAGCTTCAGAGGACCAATAGGACGAGAAGGGAGTTTGGGGTTCTTATACGGTCACTCTCCTCGTAACTCCAGCATGCCCAGTGCACCGGT
GTCTCACAGGGGGTGCTATAGAGAAAGGAATTGTCTACAGCTTTCTACCTCCTGTTCCCATCTAATCGAGAAATTAGTCACCTTAGGTAGAAGG
TGCTGAAAAACAAAGAGGCTGATAGATCCAGGACTGTGCCTGCAGTTTATTAGGGACTGGCGGAAGAAGCGGCNNNNNNNNNNNNNNNNNNNNN
NNNNNNNNNNNNNNNNNNNNNNNNNNNNNNNNNNNNNNNNNNNNNNNNNNNNNNNNNNNNNNNNNNNNNNNNNNNNNNNNNNNNNNNNNNNNNN
NNNNNNNNNNNNNNNNNNNNNNNNNNNNNNNNNNNNNNNNNNNNNNNNNNNNNNNNNNNNNNNNNNNNNNNNNNNNNNNNNNNNNNNNNNNNNN
NNNNNNNNNNNNNNNNNNNNNNNNNNNNNNNNNNNNNNNNNNNNNNNNNNNNNNNNNNNNNNNNNNNNNNNNNNNNNNNNNNNNNNNNNNNNNN
NNNNNNNNNNNNNNNNNNNNNNNNNNNNNNNNNNNNNNNNNNNNNNNNNNNNNNNNNNNNNNNNNNNNNNNNNNNNNNNNNNNNNNNNNNNNNN
NTAGCTATCTGAATATCTATTTGCTCCTTAGGGCTTGAAATACACGCCAGGTTCTCATGGTGGATAAAATAGAGTTACGACAAACATGTATACA
AGCCGTCAACTTGTTTCCAGCCTGAAAGCTGGTTCTGTAATGCAGAATTACCTTTAGTGGTATCCTTAGCCTGTATTTGGACTAAAATGTCTTG
GTTCTTACCTGTGGAAGCTCAGCTGGGCACTGGTATGCTTCCCCACTTCCTGTGCTGCCCATGGCTTGCTAAATGTGGAAGTGGTGGAGCCCTT
TCATAGACGGGTCTAGTCATGGCTGACCTGGCAGTGCCAGGTTCATCTTTTCCCCAGGGATCCCTAGACCCTTTGCTGAGGATCTGGACCTGGG
GGCCTGGCTCTGCAATCTGTAATTGAAAGGTTGGGTTTCTGGAGAAGCCCACAGATATGAATTGGTGTTCTACATTTCCTCAAAGCAAAATTTC
TCCGTGTTCTTGCCTTTGGGATCTTGAACAAGTAACTGCGAAGGAGAGACATACCTCTTCTGGTGAGGTAGGAAGGCAGAGTGAGCTCAGTTAC
ATCACTAGCAGTCCGAGAGCTTTGTGTGGATTACTGAAGAGGAAGGTCAGCTTTCATGCTGTCCTCAGAAACAGGAACTGAGCTGTGTGCACTG
GGCTGCAATCCAGAGCTAAAGGTGGCACAGAAGCGTTATGGCCAAAGAAGCCACGCAGGCAGTTGTGTAGTAAGCTCTGTGGCTGAGGGATTGA
GCAAATGTTTTACAAGACTGCTTGGTCTTCCTTTTCCTAAGGTCACGGTAGAGGAATGGAGTGGGTGCAGCTGGAACATGGCGTTGACTCACCT
GGCACATGGGAACAATGGGCAGGTCCTCCCTACCTCCCTGCCCAGCCCCAGAACCAGGAGGCCAGGCCACAGAAAACACGGGGATCCAGGTTAG
CCCCTCAGGGAGGACAACAATGCAGTGGAGAGCAGGTGGGACTGAGGGAAGGCTCTGCTGCAAAACACAGGGCTAGAAGAGGAAACAGTGTATT
TAAGTATCAGGTTTCTGTCTTAATTTGTTTGAAATAGTGTGTTATTGTGTAGCCTAGGCTAATCTGGAACTAAGAATTTTTATGTAGCCCAGGT
TGGTGTCAATCATGAGATCATCCTGCCTCAGCCTCCTAGTGCTAGGATTACAGCAGGTGCCACTTGAAAACCAGCCTTTGATTTGGTTTTTTGA
GCATCAGGTACTTTCAACTGAACTAAATAGAAACATGGTACAAAGTATGGTGAACAGTGGGACTGTCCATGGCTCAGCTAAGGAGTTGAATTGG
ACTCTCTGTGTTTTGGTCAGGGTTACTATTGCTTAATGAACACCATGACCCATAGCAGCTTGGGGAAAGAAAGTATTTCACTACAGTTCCATGG
ATCAGCTCAGCATCAAAAGCAGTTAGAACAGGCAGACTTAGCAGGACAGGACCTAAAAGGAGGCAGGAGCTGATCCAGAGGCCGTGGAGGGGTG
CTGCTTACTGGCTTGCTCCCAGTGGCTTGCTCAGCCTGCTCGCTTATAGAACCCAGCGTGTATGTGTGCTCATTATACACAAGTGTGGAGCCCA
GATAAGGACACAGTCCCTGCTCTATCACATTTATACCTTCTTCTCTGAGACAGAGTCCTTGACTGAACCAAAGCTTGCTTTCGGTTAGACTTGC
TGGTCTAGGAGCTCTATCTGTCCCAGCACCACAGGGCTGGGTTTAGAGGCTCAGGGCCATGCCTGGCTTTTTTTTTTCCCTATGGGGACTTGAA
CTCAGGCACTAATGCTTGCAGAGTAGGCACTCTTATTTACTGAGCCTTCTTCCCAGCATTGCTTTTTTAGTCTTAATATTTAAACTGTGTAATA
GTGCCGCCTCACTCTTGTTCTGAGCACTGATACTTTGCTCAAGTTTAAAAAGTAAAGAGCCAAGGAGGAAGAGTCTACAGTCTGCAGCTCAGAG
AGAAGCCCTGCAAGCATTTCTGTGTATCTTTTCAAATGAGGACATATGTTTTTTTGTGTGGTTGAGGCATATGCATACAATTAGCCTCCTGTAT
CCATTGAGCAGCATCAAGTTCAGAGTCTTCCCCCTGTCTGCGTATGACTTTCCTACATCATCCTTCAGCTACTGTGTGCTTTTGCTGCAGAGAT
AGATCAAGACTTCATTTCTCACAATGCTGAACAGTGGTGCATGGCGAGCATCCATGAGCATTTTCACAGAGAATGAGTTCTAGAAGTGAAAATG
ATTGGCTGATCCACTTCCCAACTTGAATGATGTCTCCACGTGTAGAGGGCAGATAAGATGCTTTGTCTCCTTGGAGTTCATTCCAGAGTAGGCT
CCATCAGTCACTGCTGGGGCCAGCTCCCATCTCCCAGTGGTGGAAGGTCAGACAGACAGATGCTCAGGGTCCTGGCAGTACCATGTGGGCATCA
TCTGTGGACCACACTATGCAACATGCTCTTGGTGCTGCCCTTCCAAACAAAAGCCACCCCTTAGTCCTTTGGGGGAATGACACAGCACATGGGT
GAATAAAAATCTTTGACCTCTGATTGCAGTGGGAAGATGCCCGAGGTTGACTACGCGATTCTGTCTGAGTGGTTTGACTGGATCGTCAGGAACA
TTGATGTCTCTGTTGATCTGATAGGTAAGACAGTCTCTCTCTGTCCCCTACCTGGAGGCTTCCCTGGGCACAGCTGGGGTATACTTGGGAGGTT
CTACCTTGGATCGACAGAAGGCAGGGACACCTATCACCTGTGATGCCTCCTCTATCACAGCTCACCAAGGCAGGCAGCATTTAGGGGGTTCTTC
TGTCCATGAAGGAACTCTGGCCTTGGTTCCTTAAACTTCCTTCTTCTGGGTCAACTACTTCTGGTGGCCCCCATTTGTTCTGTTTTGATGGCTT
TTCAGTATTGTGTGGGAGGGACAGAAATTGAGTAGTGGCTAAAGCCAATGGCTTGCCAGACCCTGTCTAAGAATGGAATTCCTTTAAGCTTCAT
GATGATACTGTAGGGCTGAGGACAAGAAAGGGGACTGGGGCCTGAGGGTGGGGAATCCTGTTGGTCCCACAGACTGAGCAGGCTTGGTGAGGCT
CCTGCACGCTCCACCCCAGGCCTGTGTTGCCCTTGTCTGCTCCCACACCAGGAGCACAGCACTCAGTCGCTTGTGGTTTTACTTCTCAGTTTAT
CTGCGAACCACTCCCGAAATCTGCTACCAGAGATTAAAGATGAGGTGCCGGGAAGAGGAGAAAGTCATTCCGATGGTAAGAGACCAGAGCCACC
TCCACCTCATCCTGCCAGCCCTCTCCTTTCCTCCACCATGACACTATCACGCTTATCTGGAGCAAAACCCAGGAAGTACGACTGAGGCAGCTCA
GGCTTCCTCTATGGCTTTGGAGCCCTTGTGGGTCCCAGGGCCACTTTACTTCCTATGTTTCCTGACTCAGGCCTCTGCACCTCCATGTACACAC
ACACACACACACACACACACACACACACACACACACACACACACACACAGTACAGGCACCCCCCCCCCCCCACACACCCACTGTGTATATACTC
ATTTGTTCTGTACAGTAGCTTGTCTTCACACACGCACATGCATGCACTCACACCCCATGGACTTAGACAAATGTGCCTTTGCATAGTAGCTTCT
CTTCAGCTGTGATGTCACTTTCCTGGCCGTTCCTTACATTGCCCCTAGGCCTCCTATGGTGATAGCCCTCAGAACAGCTATTGGCAGAGTTTGT
TCCCATTTATCTTTACACCATAAACACTTTTAGATTTTGGTTTTATTTCTTCTGTCTTCAACATGTGTCCTGGGGCCTAGCACCTAGCAGTTGC
TTAGTTAATACTGGACTGAGTGTGAGTACTTTATGTGCACAGTTGTCCTTGAAGGATAGATAGGGGCAGGCTCTTTTGGGACATCATGGTGCTC
TGAACCTAGGATGAGACCTAAAAGCCAGGTGTGGTGGCACACACCTTTAATCCCAGTACTCTGGAGGCAGAGGCAGGCAGATTTCTGAGTTCGA
GGCCAGCCTGGTCTACAAAGTGAGTTCCAGGGCTATACAGAGAACCCTATCTCGAAAAACCAAAAAAAAAAAAAAAAAAAAAAAAAAGATGAGA
CCTGAAAGACCAGTCTGATCCCTTAAGCTCAGCCAGGTTTTGTTTTGGACTAACAAGAGACATCCCAGCCATGAAGGCCTAGGCCTTGCTCTGG
GCACTTCGTTTGAAATCTCAAAGACAGGAGTGATAGAGGATGGAGCATTGTGGGCTGTGCTGTAATGAGGCTTGGCATTTAGAAATGCCATGTC
TGGAGTTCTTCCAATCCATTATCCAAGGGGTTGCCAAGGTCTTTAGGACAAGCTTGGCTCTAGTACCAGGGGGAGTCCAGGCTGTTCATGTCAC
TTCCTAATAGTCCTTGAGAATTCTGCCCCGCCCTGTCCCTGTGAGACCCTTGGTGGGTGGGATTCCCCCCTCCCCTCTCCCTACAGCCCTTGTG
TTTCCATGGCAGGAATACCTCCATGCTATTCACCGCCTCTACGAGGAGTGGCTGGTCAACGGGAGCCTCTTCCCAGCTGCAGCCCCTGTTCTGG
TAAGTCACTGTCCCTCCCAGAGAATGTCACCTGGACAGAGACTCAGAGGGACTCGGACTTGAGGAGGCTAGTTATTTTAGTAACATGTCGTACT
CATCATCACCACAAAGAAGTCCTCAGTTACTCTGGACCTGGGTTTGCATTTGGACCTTTGGGGATGATGGTGTCCATTCTTCAGTGGGTGACAC
GGAGCCCATCGTCACCCATCGTCATAGTTAGGTGACTGGGCATCTTCTGAAGGCATCTCAGTGGTTGTCCTCAGTTGTCACACAGTGGCACCTC
AGGAGCTGCTGAGGTGTAAAAGTGCCACGCTCCTGCTGCCTCCAAGCTGCAGGCCAATGTAGCAGTGCTGGTGTGTCCTACCTATCCATATGTC
CTACTGTGTGTCCTGTGCCCCAGTCTGCTCCTCCTGAATTTCCTCAGGCAGGCAGGTGTACTTGAGGCCGTCTCACATCCAGCCGGTGATCATG
GGCTTTTGTTTATGCCCTTGGGCTGTAGGCCACAGAGACATCCTGGTGCTAAGAGACAGGTGATAAGGGACATGTCACTGTGGGAACTTTCAGA
GTTTATTGTTTCCTTCACTGTGAAAAGCAAACCTGAGAGGGCTGGGAAAGTGGCAGAGTGGCAGAGAACTTGTCTAGACATTGGAGTCCCCGGG
TTTAGCCCCCAGCAGAGCCCCAACTCCTGTCTCAGTGAAAAGAAAAGGCATTGTTGGTGGGATGTGGAAATCTGGTTGAGAGTGTCAGTTGCCC
TGGAGCCAGACTGTGTGGTTCTGACCCTCTTGGCCTCTCAGCCTCTTGCCTCCCCAGTGGGGATGGAGATGGCCAGTGCAGCCTGTGACCTGTT
TGTTTTATTTCCAGGTGATTGAGGCTGACCACAACTTGGAGAAAATGTTAGAACTCTTTGAACAAAACCGGGCCCGGATATTAACTCCAGAGAA
CTGGAAGCATGGACCCTAGGACTGAGTGATCTACAAGACAGCGCCAGGAACAGCCCAGCCAGGGCCAGGTTAGCTGCTAGGAGCATTTGGAAGA
ATCTACTCTTAGGAGGGTCTGTTATCTAATCAGATCTATTTTCTCAATGGTCTTTTCACTGCAGTACAAATGGCTTTTGTCTGTCAGATGCTTG
CAGCATACATCCCTCCTGGTGCCCCTCCTGGTGGCTTCCTAACGATGAAGCCCTGTGTTAAAATCACTGACTGTATCCCTGGGGTTGTTCTGGA
TCCTCTGCATCAGGTCACCTCATGGGTGAGGGAGCAGTCTTCCACCCCAGGCAAGGATTTGAAGCCCAGAGAGGTGATGGGACTCGTCAAGCCA
GAGCATTGTGGAGGGAGCTGGGACCATTCAGATACCTGGTTGGGCTGCCTCCTCCTAAGCTGTTCCCCACCGCCCTGCTGCTCTGAAGCACCAG
CCCCCGCCTCTGTGAGAAGAGTGGACAGTTTGTGAATTCCATCATCTTTCAGTACCGGGCCAGTTCAAGGAGACCAGACATCACTAGGTGTTGG
CACACCTCTCTTATTTGGCATGAGCCCAGGGTGTCCTGGTATGAGGGTACTGTGACCTCTATCCATTCCTTTGTCACCTGGACCTCGGTGTCCA
TGGGGACTCCTGGATCGGCCTCTGCTTGGTGCCAGAGTCCTTGAGGATGAGTCCTCCCCAGACTCTACCATGTTCCCTGTCGTTTTGTGTCAGA
AAAAAGGGGGTTATGGGACCTGGACACTTTACCCTTTGCTGAGCGAGGCCAAGGGCAGCCAGCTGAGCTTCCAAGACCCCATCACTCTCTCCTG
TCCTTGTGTGAGGAGCAGTGTCCCCTTGCTCCAGGGAGAGTGACAGTGGCCTTAACTCCTTTGAAGTGTTTTTCCATCTGAGCAGATGTCATGG
ACCACGAGCATGAAGAACTCATCTCTATTGGATCAGAAAATACCTTAGCTTTGCTGAGCCGTAACTGTGCACTGAAGGTGCAGCTGTTACTTGA
ATCAGTCATGACCAAGAGAGGCCGGCCATTCCTCAGGACCGTGAGACTGGAAAGTCATGGTTTGCCAACAAAGACAATTTAAGCCTTGCTGCTC
TTGACATTCTAGAATGGATGGAGTGCATCTGGAAAAGACTGGACACAGATGATACAGGGGAATGATGACCGTATACCCTGGAGAAGCACAGCAC
AGGCTGGGGAGGGGGCTGCAGGGGAGCCCTGCTCCCCTGTTTAGCTGCCTGGGAGCTAGAAAGAGGGCCAAGAGTCCAGCTCTTGGTCCTTTCT
GTTTGGACCAATTCTTGGCCCTTTTGGTAGTATGAAGAGTAGCATCCAGGGAGATTGTCCATCAGCACCTGCAGTCCAGCAATGGATAAACCTG
AGAAAGGCAGGAACTTTGAACCAGCAGTACTCATGGGGGCATCTTTAGAATTTGCAAACGAACAGTCTAGTACTTGCCCTTTGCTCTACCAGAA
CACTTGTTTTGGGGAGAAATGTGCTGTTTCTCTTTCTCTCTAGTAGCCAATAAAATTCTACAGCTAAACCATGATGTAAATTCATTTTCATTCA
TTCATTCATTCATTCATTCATTCATTCATCCATATTCTCTCTCTCTCCCTCCCTCCTTCTCTCCCCCTCTCTCTTTCTCTCCCTCTTCCCTCCC
TCTCCTTTTCACTCTCCCTCTCTTCTTTGAGTCAGGTTATATTTTATAGACTGGCCTGGCCTTGAACTCTCAGAAGTATTTTTGCCTCAAACTT
TTGAGTTACAGGCATGTGACACTATGTCTGGCTTGTGTGTTCACTTTTGAGTTGACTTTATTTTATTTTTTATTGTTATGTGTTTGTGTGTTTT
GCCTGTATATAAAAGTATGCCTGGTGACCATAGAGGCCAGAAGAGGGCATTGGATCTTTTGGGACTGGAGTTGCAGTTGTGGCTTGCCATGGGC
ATGCTAGGACTTGAACCTAGGGTCCCTAGAAGAACACCCAGCGTGCTTAACTCCTGAGCCATCTCTAGCCCCATGTGTTCATTTTTCAAACACC
ACATTTTATAGTATAGTGCGCATGGCTCAAAAAAGAGCCTGCTGTCCTTGCACTTCAACACTGCAGACAGGAGATCATCTCCAGTAATGGCTAA
GGTTTGCAGAACCTTCCAGCTCAAAAGATCACACTCAAAACAGCCAGAAGCATCTTTCCCAAGGACTGCTATCAGGCAGACCTGGTAGGGGCAG
GGGTCATGGAGCAAGTACCAGCACTAACATCTCATGGCCAGAAAAGGGCAGGTAACACATGGTGGGCCACAAGGCCTAGTTCTTAGACACAGGG
CATCACTGCCTTCAGCTGTCTCCGAGTGGCTGGTGGAGCGTGGCAGGGACTGGCATCCCTGAAGAGCTAGAGTGTTGTCACTTGATCCTAACCA
AGACCACTTATTCCTTTCATCTGGGTCAGATTTCACAAACTGCATTTTGGAGGGTCCCTTCTCAGTGTTTGGAAAACGACCTGTGGCTAAATAA
ATGTGGTAAACACTCTGCCAAGCAAGGTGCCCTTGCTTCTGGCCTCCACGATTCCTCAGGCTAAGTAGTAGGCTACTGAGGTGTGGTATTCCTG
GAGGGAGAGAGAGGTACTTCCCGACCTCGTGGACTCGCTTCCTAAACGAAAACATTCTTTTTATTTTGAATCATGTATATGCCCATGTATCTGT
GGCGCCCCATATATGTACATATATACACACATATGTACCTGTGCACAGTGTGCACGGAGTCCAGGAGAGGGCCCTGAATGCCCTGGAGCTGTAG
TTTCATGTTGTGAGATGCTGGACGACGGTTCCGGCGATCAGATATGGGCTCACTGTGTATTTTCCATAGCTCCTTTGCCAGGTAATGTGAGGCC
GGCAATCTAGGGATAGTTCAGTAACTTGGGGCTCTTCTGGTAGGCTAGGTACATCTCCCTCTTCTAATAATAACGGGCAACCTAGCTCCTTTAT
ATGTACATACTGTGCACACACCCCTCCGTAACCAGGTTACCTAGCAATATGGGCTCACTACCTCTGTCAGGTTGCGCACACACACCTTGAAACA
ATGGGGTGAGTTTCTCTTCCTCTAACAACAATCAGATGGTTTCTATTCAAATATATTCCTAGTGTGTCTGTGTATAAAGAATAGAAAGGCTGGT
GTGGCCTCAGCTGGTTTTGGGTGTACATGCAGGATAGGCAAAAACACTTGTAGGCAGAATCTTCTATTTTTACCATCTTATATGCCTATGCCTA
GCAGGGTGTGTGTATGATGAATGTCAGATGCATTATGAGAATCGGTATGCCCAGCAGAAAGATGGTTAGATGTCCAAAGCTATCAATCAAAACA
GAACCACCTCTTAGTAACAAATGATTCTCTTGGGAACCGTAATCGGAGCCTTGGGCATCCTCACCCACTCGTCTTGACAGTGTGTCCCTCTCCA
GTCTGTTCCATCACTTTGCTCTGATTAGAGGTACTTGCTATGGCAAGGGAGCACATTCAGAGACCTTTTAGATCTGTAGGGTCAGGCTGGAATG
CTGACAAGGCGCACACTTTCAACCCCTCTGCCTGTAATACACACATAAAATGCCTTTAGTACACACCTTCAATCCCAAACAATGCAGCTAAGGT
TAGGTTGTAGAAGGAAGCAGCCATATTTGAAAGTGATGTCTAATTGAGTGGTAGAGTGACAAATGAGAGAAAGATTTGACAGAATAGGATATGC
CCAACTCTCATGAGGAGAGGGAAGGAGAAGGGGGAGGCGGGGGACAGGTCTACCAGGACAATATTACTGAGACAGATTGCGGGTGAAGACAGAA
CGAGCCGGAGAACGAGAAGGAACCAGAAGATTAGAAACAGACTGCCAAAGTTCCGAGGTCAAGCCGAGCAATTCAGTCAGAAGCTGAGAGAAGC
CAGTTTGAATCAGTCAGCTTGGAGAGAAGTTTTGAGCAACTGAGTTGAACCAGCCAGCCGGAGCTCAGAAAGAACTAGAAAGAGTGAGCTTATT
CAGCAGTAAGCCTCGAAGATGCCAATTATATCTGGTAAGTTACATTTACACAAATTGGTGTGAGCTCGTCTTCTTTTTTCTTTTTTTTTTTTTT
AGCCATTAAGTTAATTTATTGAACAGTTGACTTAGGCATCTACAGTGGTGACTTCAGCCTCCACTCCTGGCTCCATATTAATGGTAAGCAGTCC
GCTCGACAATCTCAGAAGGACAGTGTAGATCACTGAGTAGCTTGTGGATCCTCCTTTGGAAATGATCACGTTTGGAACCTTCACCACAAGGGGT
TTNNNNNNNNNNNNNNNNNNNNNNNNNNNNNNNNNCATGGCTGAGGCATGGCTTCCTGACCGACTTGTTCTTCAGCAGGAGGGAACAGCGGTGA
GTGGGGACGGAGCAGACTGTACAGCGCTCCACAGCCCGCACCACCACGTCTCAGTAAGCTGAGCCCTTATTTTCAATTCTTTGGGTAAAAGGCC
AAGAACCTAGAAATACTTGCTGCAACCCTGACAGTTCTGACCACCAGTAAGAAAGGCAGCAGGTTCACAGGTTCTGAGATTACGATACAAGCAT
CTTTGCATGGGAGGGCAGTCCTGTGGTCCACCATCCCAAGTCTAGCTCATACTCAAAGTAATACCTGTCCAATATTGTGAAACTTGGTCGTTGA
GAACAGGGCTGGGGGGCTTCTAGATGGGGAGATGCAGGACTTTAGGTCCTTGGCGATTCGGGCTGGTTTTGTGTGTATACTTGACAGAAGCTAG
AGTCATCAGAGAGGAAGGAGCCTCAGATAAGGAAATGCCTCCATGAGATCCAACTGTAAGGCAGTTTCTCAATTAGTGATCAATGAAGGAGGGC
CCATTGTGGGTGGTGCCATCCTTGGCCTGGTAATCCTGGGCTCTATGAGAAAGCAAGCTGAGCAAGCCAGGGGAAACAAGCCAGTAAGCAGCAC
ACCTCCCATGGCCTCTGCATCAGCTCCTGCCTCCAGCATCCTGCCCTGTGTCCTCACTTCCTTGAGCTGTGAAGAGCGAGGTGGAAGAGCAAGC
GAAATAAACCCTCTCCTGTCTACGTTGCTTTCTGGCCATGGTGCTTCAGCACAGCAATGGAAACCCTGACTAAGACACTTGACCACGAAGTGTG
TCCGTGGGAGCCAGAGTCTCCACTCTCCCTGATTTTGGAGGCAGAGGCTCATGCCACTCAGGCTGGCTCAAACCCAGTAATGGAGCTGAGCCTG
GTTTTGCTCTGATTCTCTGGCCTCCATCTCCTGAGTGCTAACACGCACTTGGGCATCTTAAAGACACTAATCACCGTGTTTGTCTTCCTATCTC
TTTCTTTAATCCCTTGGCTGTGGGCAGATTAGTTCCTTGAAGAGAAGGCGGGAGTGGCCTCCTTTTCACTCTCCCAGACCTCGAAGATCTGGCA
GACTCAGTTTCCCCCTTCTCATGGGATTCTTCTGTTTGCTTTGGATTTCTTAGTAAGTGAACCATTTCCCCAGATCTAGACACCTTAGTCCCCA
GCACCCATTGGGCCTAAGAGCCACCCACTTCTAGTTCTCAAAGGGAAGCCATGATTGGGAAGGAGAGTGAAAACGCTGCGTATGGTTGCTGAAG
TCCCCTCTCCGGCCTCACATGTTTGAACCTGTCCTGCTTCTCCACGGCAGCTTCCTGGCCTGATGCCTGCCTCTACATTTGGCCGGCTGAAGCC
TGGTTATACTCTCTGGGCCCTCAAGAGAGTGATGCGCTCAGAGAGAACCTGCTCTCACTGATGCCCAAGCACTTAGCTGCAGGGAAGCAACGGG
GATTAGTGCGGAGGTTGGACAACGGCTATTCAAGAACTTCTTTTGTCTCAGCAGGCCGGAGGACCTTCACTTTCAATAGCCCTAAGGTCCCTTG
TATAACCTATGAACTTGGGCTCATAAAGGAGAGAGATCCAGTTAAGGATGCGGCCTGGGCACAGGGTCCCAGGCCTGAGACTCAGCACTTAACT
GTCATCAAGCTCATGTGTAACACCAGGGAAAGGGCTGTTTTCTGTCAGAATAGAACCGTATGTTGTTACATGTTCTCTCCCTTGCTCTGCCGCC
AACCACAGCCACTTAGAGGCTCCAGCAGAGTCCTGTCCAGTCCAGTCAGAGTCCTGTGAGATCTGATACTTGCTTTCTGGAAQAGAGAGCATCT
CTTCATTCTGGGTCAGGAACCAACCAAGTCAGACATCGGACATTTATCGTCATTTTACCAATGGGAGAATGGAGACAGTGTGGTGCTCAGAGTC
CAGAGGGACAGTATATCAATCCATGCCCTTGGACTTCCTGGATCTAGCCACAAATGAAGCCTGACTTATCACTTGGACAATTTAGTCACATGAC
CCAGTAAGTATTCTTTCTTGCCTCTTGCAATTGAATAAAGAAGGGGGTGATGGTTGGGGCTCAGAGCCTGTCAGAGGGTCAAACTCTCCATTTT
AATAGAAAACAGCCCTGCAGCCCCTCCCCGGGCCCCAAGGACTCAGCCTGATGAGGGTGACAGTTTGGTGGCTGAGACTATAACAGGGCTGCCG
CCTTGGAATTTCTTGGAAATGTGCTGAGCAGACACAGCTCTGCTACAGCCCAGTGGTCAACGTATACCTAGCTCCCTAAGCTCAGACCCATTAG
GCTTTGGCTAGATAAGGGCTCTTGGGCTCCAGAGAGTTAGCATGGGCTTGGGAAAGTACCGCGAAGCTAAACAGAACAGACCCAGCACAATAGA
TCGCTCTCTCATGATAAGCGGTGGCCTTTATATCCAGTCCTTGGACAACCATGTTAGTGTCAGAGGATCAAAGACGGGAGCTGGGAGCAGGTGT
GAGCTGCACCTGGCTGTGCAACGAGAGCCTTGCATGGAGAGGGTACTTGTGTGGGCACCATAGGTTGTCTGAGTATACGTGTAGGAAGGAGGAG
GGAGTTATGTAATGGTGCCGTGTGCATGCACACGGTTTGTATATATGAACACAGGCTTAACCCAGTGATGGTGGAGGGTGCGCATGGTAGCCAT
GGACTGCTGTTAGCCTCGCTAGTGACTTGTTCTTTCCGTCTGTGCTTCAGTGAGCCCTGGTGCTTAGCAGTGGCAGAGGCCTCTGGTTGCTACC
CAAAGCCTGGGACTTTCTGTGCCCATCCATAATGATTCAGCTACGGTATGGCTTTGTCTGCCACCCGCTGTGGCTTCCCTGTGTGAAGGCCTCT
TCTGATCTAAAGAGCCTGCATGGCAGGAATCAACACTCTGTAAAAGGCTGCCTCAAAACAGCGCTGCTGAGAGCCAGGTATGAGCGACACGGAG
CTGTCACCTCCGAATGCCTGACATCGAGGCCTTCAAGGCATGGTGTACCCTCTCTCTTGGCTTGCCACTGGGACAGTTTGATGGCCTGCATCCT
TTCAAGCTTTCATCTCCCGCCACCTCCACCTTCTACTTCCCCGATGCCATTTCCCTGACCGGCGCTTTTGATAGTATGGCCATGTACATGGAGT
TGGTCCTGCTTCTTCCTGGCTTACCATCCGAATGATGGACCATCACATGCCATCTCCCAGGQATTCCAGGCACCCAGCTGTTCTCCTTAGGCCT
TGTCCCTGGCAAACAGAGGGCTCAGGCTCTTTGTAGGAATGGGCAGACCCCTGAGCAGGATGCCTACAGCCGAAGGAGTACGTGGATAGAAGAG
ACAGGCAGAACCAAGAGGCTGAGAGTCCCAGGAGTTTAAATCGTTAGAATGAGCGTCAGTGTAGGTGGTCCGGGTGGGAGTCAGCATGTGGCTG
GACACCAGCACCATAAAGGAGGTAGAGCCCCACAGTGCAACATAGTAGCAAACAGAACAGAGGGCCAAGTGTTTTGCATAGAGAGGAGAATGCA
GCCAACAGGAATTATCAGAAAATGAGACCCAGAGACAAAATCTCCTCTTGAAAATCAGCGGTATAATACAAACCCGGGATCCAAACATCAGGCT
CATATAGCTGTGAGTGTCCCACAGCAGCAGTGGGCTTAAAAATAAAAGGGATTTCCTCCTCCTCCTAGGGTAGAGTCTGTGACAAATGAACAGT
GGCAGCAGAGAGCCAGCAGGGGGCAGTGTGTGCTTGAGTTAGGCCAGTTGCAGGACAGCAAACCTAGGGATTTTTCAGAAGGAACCTGTGGGTC
CCTGTCTCATAATACCCCCGACACCCCCATCTGCCTCACTTTGTTCAGGGTCACACCCCAATTTTAGGGTGTGATTTTTGGGATTCTCTGTGCT
AGCGGAAGGAAAACATGTCCGAGAAAGACAGTCTCTGTGCGTAAAAAGAGGTCACCAGGCAAAGCCTCTGTCTGAAGGGCAATGAGAAAGATGA
GTGTTTCTGCAGAGGGAAGCATCGAGCATATTTCTATTTTCCTCAGAAGGATAAGCCTATGGAGTACTGAAGGCCAAAAGATGGTACCTTGTGT
ATGTGGAGTCAAGTTCTGAAATTGGTGGCTCATCATATCCTCACATCAGACAGGTCTCAGAGGAGTGGCAGCAGGCTCCATATGAAGGGGGCTG
GGAGATGGCTCAGTAAGTGAAGTGCCTGTCGTGCAAGCACGTCCAAGTAGGAGGATCTGAGTTCAGATTCCCAGTACCACATAAAGTCCAGGTG
CACAGCACACCGGGGCACAGGACGTCTGGGGGACTTGGGTGGCCAGCCAGCCGGTCTAACTTATAAGGGATAGCAGAGACAGGAGGATCGCCCC
CTGGGCTACATAGCAACATTTGTTTCTAAAACCCAAACACAAGCAGAGAAACAAAAGAGGAAATCCCATGAGACTGTGCAGACACCCCCTCCCT
ACAAGAGCGCCACCTGCCGCAAACTTGAGAAACAGCCAGCTGGGCGTCTCAGCGTTCAGAGGGGCATACTTAAGACTGCCTGTTTAGAGGGTTC
CCTTCACCCTCTGAATTTGCAGCCACCAGGAACCCGCCGGGGCCCCTATAACCCCTCGAAAAGTATCACTTCCTTCTACGTATTTGTTGATAAT
GAGCATTTATTTTGAGTACAGAAAGATACATTGCTGCTTATTCAGCCTAACCTAGGAAGGAGAATGCGCTGTTCCGCAGATCCCTCCGACGTGG
TGAATAGGCGGGGATGTTTTTCTGCCCCCACCACTTTCCAGAGCTCTAGAAACAGACTGCCTTTCTTAAAAAGAGTCTCATCCCCGGGGTGTGT
TTTAAAGGCTGGACAGTACCACAGACAGACATCTTTGCCTAGAAAGCAGAACGCCACAAAGGTGGGCAAAAGGGCTTGTAAACAAGGCTCCCTC
CCCCAGGCCTGGGACTCTAGGGTGCTGCCCGCAGCCTGCAGCCCCTGCCGCCTAGATGCTACAGAACTGGTGGTTCGGCCCTTTCGGCTCTGCA
TCAGAATAAATGCTTTCTCTATAGAAAATAAAAATCCTTGCTACCCCTCTGCTTAGGAAGGGATTGATGATATTTTCTTAGCCCTTCATTGGAG
GAGTTGAATGTGGGAAGGGGTTCAGTGGGGATGGGTCTGCTCTTCTGGGATGACCGTCAGAAGGTAGGAGTCCGGGAGGCAGGAGGTCTCACTC
CCTGCCAGCGGCAGTGCTGACAGGATCCTCCTCAAAGGTCCTTAGCTTTGGCAACCCGGGTCTTCAAAGATGGCCTCGTCACCTTATATAGTCT
TCGATGGAGATCACATCGCTGGAGCTCAAAGGCTAATATCTGAGCCTATCTCCAACTGGCTGCCTCCACACACCTGCTTCCGTGATGGGATGTT
GGCAGCAGACACTGGTCTCATAGTGACATGAAGTTTTTTTTGTTTTTTTTTTGCTTTTTTTTTTTTTTTTTTTTTTTTGTGGGGTACATGTGTG
TGTGTTGTCTCTGTGTATATCCCAGAGAGGCAAGGCCAGACTTCATCAGCCAAGTCCCCAGCTGGGAGTTACCACCCTGGATGACAGCGCTGGC
TCTTTGGTTGCTCTGAGACCTCTTACACCCAGGTCACCACAGCTGGCTGGGAACTTACTGAGCAGTGGACTCTTCTGTGCCTCCTCTGAGTGAT
GTCTAGGAAGCATTATGTGTGTATGGGGCTGCCCACACCTTGTTTCTCTTGAGCTCTCAATCCTGGCACAGACATTAGAAGAACTGTGTTGTTC
CTCCACGATACAGGCCCAAGGGCCTGTCTCCCCCTGAAACTTAGGGTGGGTGTCTGAGCTAACCCCACTAGCACCGCCACACTAAGGACATCGA
GACAGGCTAAATGGGCTGTGACGACCTCCAGGTCATGCCTAAGCCACCAGACCTGTTTCTCTCCCACCTCGGAAGTGGCAGGACGGTGACATTG
TGGCTCTTCAGCCCTGGAGTTGAGACATAGGCACAGTGCACAGTGGGACCTTATTGGGACCTGTCTCAGCTCCGAATAGGATAAGCCCTGGGGT
AGGAGTTATGGCAGGAAGCTGACCAAGCAGTCTCTGCAGGAGAATCAGATTGTGGCCATAGCCTAGAGGAGGCTGGGGAGAGGATAGAAAATTG
GGTTTCCTATCTCACCTCTGCCCAGCACTGTTCAGAGAGGCACCGCCACCAGGCACCAGGCTGGGGAGGAAGAGATACCATGTAGGGAACACCT
CATCCAAAGAAAACCTTCCCAGGTGAGTTTGTGTAGTAGTGCGACAPGTGCATATGCAGGTGTCTACATATGTGTGGGTTCTGTCAGTGTAAGC
ACTTGGGGATATGTCAGTATATATTGATAGTCATATATATGCATGTGCATGGGTTGTGTGTGCACCTGTATGCCTGGAGCAGAGAGGGTAGCCT
GGAAAGACCAGCGGAATTTATGAGCTTGGCCACTCACACAATCCTTTCAGGGCTGGGGATCGGAGCCTGGGTTGGGATGGGTGAGCCCTGGGAG
TTACTTGGCCATGGTTCTCGTCCTGGCAATGGCAGCAGGTCAGATGGAGAGCCTGTCCCACACACAGCTTCATAAGGTGGCAGTGTGTCCATGG
AGACAGTGTGGAGTCTGCTCTGACCCTGGGTCCTCTGCTCTTGCTGACGGTGGCTCCAACTCTCGCCGCTGTCTGAGTCAAGGGCGCCATTCAG
CCTGGGACAGGAGTCAGTCATGGAGTAGGGCGGTGGTGCATCCGTGGGGACAIACAGCTGAGTGGCCCCTGGTCCCATGCATTCCTCATAGCTG
TGASACAAGAGTTTTCACTCAGGGGTTGTAGATTCTGAGACCTTCGGCCAGATGGAGGAGTCTGTATTCTSTATGGCAAGGAGCTGCCCTCATT
GTAGAATACAGCCAACTTCATATATGCTGGCTCCCATGAGACCCTCTAGTCCTCAGAAGGACAGTCTGACACCCTTAGCTGGGTAAAGACTTGA
CCCTCACATCCCATGTGAACCAAGCAAGTCCTTACACCCCTGCCCCTCTCTGTGGGGTTTTAGATTCCCTGGAGAAAGTAACAGCCCTGTCTAG
GCAGGAGTCCCAGCCTGGGCACTGTGAATGGGCTCGGTAGCACCCACTGAGACATCTCCACTGCTGTTTTCTAGATTTAAAGATGAGTCTCTAG
CCCTGAAACCAT
MOUSE SEQUENCE-mRNA
ACTATGCTGCTGCGGTCGCTGCGTAGTTGGGCTGCCCGSTCCCCGCGTAGCGTGGGCCCGGGGAGCTCCGGGAGCCCCGGGACCCTCGATTCGG
GCGCCGGGCCCCTGTGGGCACGTCGCCGCGCCTGGCCTCCGGATAAAGATAGAGAAAATGATAAGGAGAAAAAAGCAGTGGTTTGTATTGAGGG
CAATATTGCAAGTGGGAAGACGACATGCCTGGAGTTCTTCTCCAATACAACAGACGTCGAGGTGTTAATGGAGCCTGTGCTCAAGTGGAGAAAT
GTCCATGGCCATAACCCTCTGAGCCTCATGTACCATGATGCCAGCCGATGGGGCCTCACACTGCAGACGTACGTGCAGCTCACCATGCTGGACC
AGCACACGCGCCCCTCAGATGTCACCTGTACGGTTGATGGAAAGGTCAATTTACAGCGCAAGATACATTTTTGTAGAAAACCTGTATAGAGGTG
GAAGATGCCCGAGGTTGACTACGCGATTCTGTCTGAGTGGTTTGACTGGATCGTGAGGTAAATTGATGTCTCTGTTGATCTGATAGTTTATCTG
CGAACCACTCCCGAAATCTGCTACCAGAGATTAAAGATGAGGTGCCGGGAAGAGGAGAAAGTCATTCCGATGGAATACCTCCATGCTATTCACC
GCCTCTACSAGGAGTGGCTGGTCAACGGGAGCCTCTTCCCAGCTGCAGCCCCTGTTCTGGTGATTGAGGCTGACCACAACTTGGAGAAAATGTT
AGAACTCTTTGAACAAAACCGGGCCCGGATATTAACTCCAGAGAACTGGAAGCATGGACCCTAGGACTGAGTGATCTACAAGACAGCGCCAGGA
ACAGCCCAGCCAGGGCCAGGTTAGCTGCTAGGAGCATTTGGAAGAATCTACTCTTAGGAGGGTCTGTTATCTAATCAGATCTATTTTCTCAATG
GTCTTTTTCACTGCAGTACAAATGGCTTTTGTCTGTCAGATGCTTGCAGCATACATCCCTCCTGGTGCCCCTCCTGGTGGCTTCCTAACGATGA
AGCCCTGTGTTAATCACTCACTGTATCCCTGGCCTTGTTCTGGATCCTCTGCATCAGGTAACCTCATAGAGTGAGGGGAGAAAGTCTTCACCCC
AGGCAAGGATTTGAAGCCCAGAGAGGTGTGGGCACTCGTCAAGCCAGACATTGTGGAGGGACCTGGGACCATTCAGCTACCTGGTTTGGGCTGC
CTCCTCCTAAGCTGTTCCCCACCGCCCTGCTGCTCTGAGCACCAGCCCCCGCCTCTGTGAGTAGGAGTGGACAGTTTGTGATTCCATCATCTTT
CAGTACCGGGCCAGTTCAAGGACACCAGACATCACTAGGTGTTGGCACACCTCTCTTATTTGGCATGAGCCCAGGGTGTCCTGGTATGAGGGTA
CTGTGACCTCTATCCATTCCTTTGTCACCTGGACCTCGGTGTCCACTGGGGACTCCTGGATCGGCCTCTGCTTGGTGCCAGAGTCCTTGAGGAT
GAGTCCTCCCCAGACTCTACCCGTTCCCTGTCGTTTTGTGTCAGAATAAAGGGGGTTATGGGACCTGGACACTTTACCCTTTGCTGAGCGAGGC
CAAGGGCAGCCAGCTGAGCTTCCAAGACCCCATCACTCTCTCCTGTCCTTGTGTGAGAGAGAAGTGTCCCCTTGCTCCAGGGAGAGTGACAGTG
GCCTTACTCCTTTGAAGTGTTTTTCCATCTGAGCAGATGTCATGACCCACGAGCATGAGAAGTCATCTCTATTGGATCAGATAATGTACCTTAG
CTTTGCTGAGCCGTAACTGTGCACTGAAGGTGCAGCTTGTTACTTGAATCAGTCATGACCAAGAGAGGCCGGCCATTCCTCAGGACCGTGAGAC
TGGAAAGTCATGGTTTGCCAACAAAGACAATTTAAGCCTTGCTGCTCTTGACATTCTAGAATGGATGGAGTGCATCTGGAAAAGACTGGACACA
GATGATACAGGGGATATGATCACCGTATACCCTGGAGTAGCACAGCACAGGCTGGGGAGGGGGCTGCAGAGAGCCCTGCTCCCCTGTTTAGCTG
CCTGGGAGCTAGAAAGACGGCCAAGAGTCCAGCTCTTGGTCCTTTCTGTTTGGACCAATTCTTGGCCCTTTTGGTAGTATGAAGAGTAGCATCC
AGGGAGATTGTCCATCAGCACCTGCAGTCCAGCAATGGATAAACCTGAGAAAGGCAGGAACTTTGAACCAGCAGTACTCATGGGGGCATCTTTA
GAATTTGCAAACGAACAGTCTAGTACTTGCCCTTTGCTCTACCAGAACACTTGTTTTGGGGAGAAATGTGCTGTTTCTCTTTCTCTCTAGTAGC
CAATAAAATTCTACAGCTAAAAAAAAAAAAAAAAA
MOUSE SEQUENCE-CODING
ATGCTGCTGCGGTCGCTGCGTAGTTGGGCTGCCCGGTCCCCGCGTAGCGTGGGCCCGGGGAGCTCCGGGAGCCCCGGGAGCCTCCATTCGGGCG
CCGGGCCGCTGTGGGCACCTCGCCGCGCCTGGCCTCCGGATAAAGATAGAGAAAATGATAAGGAGAAAAAAGCAGTGGTTTGTATTGAGGGCAA
TATTGCAAGTGGGAAGACGACATGCCTGGAGTTCTTCTCCAATACAACAGACGTCGAGGTGTTAATGGAGCCTGTGCTCAAGTGGAGAAATGTC
CATGGCCATAACCCTCTGAGCCTCATGTACCATGATGCCAGCCGATGGGGCCTCACACTGCAGACGTACGTGAAGCTCACCATGCTGGACCAGC
ACACGCGCCCTCAGATGTCACCTGTACGGTTGATGGAAAGGTCAATTTACAGCGCAAGATACATTTTTGTAGAAAACCTGTATAGAGGTGGGAA
GATGCCCGAGGTTGACTACGCGATTCTGTCTGAGTGGTTTGACTGGATCGTCAGGAACATTGATGTCTCTGTTGATCTGATAGTTTATCTGCGA
ACCACTCCCGAAATCTGCTACCAGAGATTAAAGATGAGGTGCCGGGAAGAGGAGAAAGTCATTCCGATGGAATACCTCCATGCTATTCACCGCC
TCTACGAGGAGTGGCTGGTCAACGGGAGCCTCTTCCCAGCTGCAGCCCCTGTTCTGGTGATTGAGGCTGACCACAACTTGGAGAAAATGTTAGA
ACTCTTTGAACAAAACCGGGCCCGGATATTAACTCCAGAGAACTGGAAGCATGGACCCTAG
HUMAN SEQUENCE-GENOMIC
CAAACCTCACTCTTGCCCCAGCTCTTGTTCACAACTCAATACCCAACCATTCAGATACACCTGCAGGTCCTGGAGGGTCATGCTCTTTCTCCAC
CTAGACCCTCACATATGCTGCTGCTTTTCTAGCAGAAAAGCACTTTCCCTTCCCTGTATCAGTCATCTGCTAACTACGTTTCATCCTTCAGCCC
TCAGTTTGGGCACTTTTTCTTCACAGCCTACTGTGACTTGGTCCCTTTCCCTTGCTGGGTTGCATCCACGCCATCCTAGGTGTATATCTCTCAT
AGCACCTATATTCTCTGTGTTGCTTCCTGGGTGCATTTAAAGTTTCTGAGGTACAAGGTTTTTGTTTTGTCTTAACCAAAGAACCAATTACAGA
ATCTAGGATTAGCAAATACTTAACATTTGCTGAATAAATAATTTCATTAGATCAAGATCAGAAAGGATTCTGGGTTTCGTAATGGAGCAAAAAC
TTAGTTACCCATATAACACCCCATTTCTAAGAGATACAATATCAGTAAAGTTTGATCCTTAGAGATTTGGGGACTATTCCTTTCAGTGTGCTAC
ATATAAGCTACTCTCTCTCAGTGTGTTAGTTTTATTAAACTCTAGAGACAGAGTGTGAAAAGCACTATACAAGACCTAGAGGATGTGGACCAGT
AAAAAAGAAAGGCTAAAATGTGTTAGTTTTATTAAACTCTAGAGAAGCAGAGTGTGAAAAGCAACTATACAAGACCTAGAGGATGTGGACCAGT
GTTCATTATCCTCTTGAAGAAATCTTTAGAAAAATTTAGTTTAACCCTTTCTGCCACTAAATGAGGGCCAACTGAGGAAGACTTTGTAATCTCT
TCTCCTAGACCTCCCTCCAACGAAGTCCAGCTCTGAAGTGTACATCAAGTAGTTTTGAGAGGAGAGGTTCTATGAAGATCCTATTTCCCAGCTT
TTCCCTTTTAGGACTTTTAAAAAGCTTATGATTTGCCTGAAATGCTTGCCACTGGCCTTGAAGGTGGTTCCAGAAGGTACCATTTAAAGGCATG
CTTATGGTTTAAGAATAGCTCTAAAGTCTTTTCTTGTTAATAGGAATTATCAGCTTGGATATTAGCACTGTGGCATCCAAGAGGATGAGACCAC
TGCAGCCAAGGAAGACATGGGCAGCAATCAGTCCAGCCAAAGAGGAGAAGGGCAGCAGGGGATTCAGGAGGGAGACCTACAGAGACAGGATGCT
GGGAATGAGACTTGCAAGAGGACAGAGGAGAAGTCACTCAGTTTTTCTTAGAATCAGCTTCTAGTCCAGGCTGACGGGCTGCATAGATCTTATC
GAATAACTTCAATCTGCCCAATTTGACAGTTTATCAGAACCATCTGGGCATTCCACTGCGCAGTTATTCCTAATTATATAGTATGGCAGGTTAC
AGTCTATATACTATGAAATATAAGAGGTGCCACATTATTTAGTAATAACTACAGATATTTTCAAGTGACATAAACATTGTACTTPAGCCTCCCC
AATTAGTTTGATTTTCCATTTAGTGACCAAAGATGTGCAAGGATAGATACTTGTGTATCTGTCTCCATCTCTATCCCAAATTTTGAGGCATATT
AACATGCATCCAAATAGGTAATAAAGATTAAGAATGCACTACAATTTTGTTAACATGGTCCTAAATTTAAATTTCTTTAGAAGATCTATCCAAG
TGAATTCTAACAGAAGCGTCAGCCACATCTACTGATAGATGGTGCAGAGGACTTATGCTCTGTGGCTGCCCTGCATCCTTGAGACCCTCTCCCA
AAGCAATACACGGCACATTAGCAATGGGTAGAGCTCCTCCTTCCTAAGCCTAACAGAGATTACCTTAAAGGTTTAAGAGAAGCAAAAAACAGAG
AATGACAATTTCTAAAATAATAGGCTGGGCACAGTGGGTCATGCCTATAATCCCAGCATTTGGGAGGCTGAGGTAGGAGGATACGCTTGAAGCT
AGGAGTTCAAGACCAGCCTGGGCAACATAAGGAGACCTCATCTCCAAATAAACAAAAATAACCAGATACTGGGGTTTCTGCCATATACACACAC
ATATAAAACAGCCATGCCTAAAGTGTATGATATTGACTTCTCTTTGTCTTTTAGAGGACTGGGTATTCCTCTCTGTTTTAAGTCCAATTAATTA
TTCCTCTTGTGCTTCTGACACTATCACTTCCCACATCAGTTCTCTTGATGTTTTTCCACCAAGTACCTCCGTTCCCCCTTGTACTTTCAATCTG
TCCTCTGCTAGCTCCTTTTCTCATCATCCTAGAAACATCTCAGTTGTGTTCTTTTAAAATACACACACACATACTCCTTCCTTTTATCCTGCTC
ATATAAAACAGCCATGCCTAAAGTGTATGATATTGACTTCTCTTTGTCTTTTAGAGGACTGGGTATTCCTCTCTGTTTTTAAGTCCAATTATTA
TTCCTCTTGTGCTTCTGACACTATCACTTCCCACATCAGTTCTCTTGATGTTTTTCCACCATAGTACCTCCGTTCCCCCTTGTACTTTCATCTG
TCCTCTGCTAGCTCCTTTTCTCATCATCCTAGACATCTCACTTCTGTTCTTTTATAAAATACACACACACATACTCCTPCCTTTTATCCTGCTC
CCCACAGAAACCCTTGTTCTGTTTTCTACTGTTGTTATGCTTCTTCAAAAAGTCTGTATACTGGCTGTCTATAATTTCTTACCATCCATTTATC
ACTCCTTAATTCTTAACAATCTGGAGTCTACTGTCAGATTTAAACTTAGAATGCTGCCATGAAAAATACTGAGGAGCAAAGTTCAAAACAAATT
GTCAGGGTGGGCGCGGTGGCTCATGCCTGTAATCCCAGCACTTTGGGAGGCCAAGGCAGGCAGATCGCCTGAGGTCAAGAGTTTGAGACCAGCC
TGGCCAACATGGTGAAACCTTGTCTCTACTAAAAATACAAAAATTATCCAGGTGTGGTAGCAGGTGCCTGTAATCCCAGCTACTCGGGTGGCTG
AGGCAGCAGAATCGCTTGAACCCAGGATGCGCGGGTTGCAGGGAGCTGAGATGCCACTCCACTCCAGCCTGGGTGATAGAGCTAGACCCTGTCT
ATATAAAACAGCCATGCCTAAAGTGTATGATATTGACTTCTCTTTGTCTTTTAGAGGACTGGGTATTCCTCTCTGTTTTAAGTCCAATTAATTA
TTCCTCTTGTGCTTTCTGACACTATCACTTCCCACATCAGTTCTCTTGATGTTTTCCACCAAGTACCTCCGTTCCCCCTTGTACTTTCAATCTG
TCCTCTGCTAGCTCCTTTTCTCATCATCCTAGAAACATCTCAGTTGTGTTCTTTTAAAATACACACACACATACTCCTTCCTTTTATCCTGCTC
CCCACAGAAACCCTTGTTCTGTTTTCTACTGTTGTTATGCTTCTTCAAAAAGTCTGTATACTGGCTGTCTATAATTTCTTACCATCCATTTATC
CTTAAACCTTTCTATGGTTTCTGTGAAACTGTGTTCTCCTGTGATTTATATTTACAGTTCTTACATCTTTCCTAAGCTCCTGGCCTTTGTTTCC
AGTTATCTTTTACATATCTCACTAATAATATTTCAGACATTACCACTCTATGGATATTGCTTTTGCTAACATCAGTGATTTCAGAAATACTAAA
TTTAATGAATGCTTTTTTTCTTTTTTCCAGTACTTTGAGCTGCTGTTTTACAATGAACATTTTTCATTCCTTATCCTAGTGGACCCCTATGACG
TTATTGCCATTGGCTGTCCTTCCCCTACTAGTGTTTTCTTTTGGCTCCCGTGTCAGTTCTCCGAGATTTTAAACCTCCGCGACTGTTCTCTCTT
GGTGGGTTCTTCTCCTTTTATTCTCCCCTGTAAAATGCTGTCATTCTCATTCCACTCAATGAGTCTGGGTCTCTAACCCAGGTCCATTCTCCAC
ATTTCACACCAAGTAGCCATTTAGAATCCCTATCTGGATAACCTACAGGAATCTCAATTCACCATGTCTAAAACTGAAATCCCGCCCCTTCCTC
CTGGATTCACAACCTCAACTGGTGGTACCACAATCTACCTTATCACCCATGCCAGGAACCTAAGATCACTGTTCCTACCCATTCCCCAACTGAT
CAATAATCGGGTCCTGCTAACTTAATGCCTAAACATTTTGGGCACTCCCTCCTCTTCATCCTTACAACTACTGCCTTTCATCGTCTTTTCCATG
AACTATCATGATGAAATTTCTAACATGCAAATTTGTTTACGCATTTCTTCATCTATTTAAAATTCTTCAGTGGCTCTCCAGGGTCTTTAGAGCC
TGCTTCTCACCATGTTTTCAAGATCTTCCACAATTTGGCTCCTGTCTACTTCTTGAGAAAAGACTTGCTTCACAATTTATCCACATGAATCAAA
CTCCTGATCCTTTTTTCACATTTGCTTTATCAATAGGCTGTCTCATCTCAGTGGATGGTGACTCCATCCTTCCAGTTGCTTAGACCAAAAACTT
CAGAAGCTGTCTTGGACTCCTCTTTTTCCCCACATCTGGCTCATCAGCAAATCTTGTTGGTGCTACTTTCAAAATATTACATCCCAAATGTGGC
CACTTCTTATTACCTGCTTTGCTACCACCAGCCACCATCATCATTTCTTGCCCAGATTACTGCAATTGGTCTCCTTGGTTTTACCTTTGCCCCT
GCAGCAATCCCCTTCTGTCCTTCCCTACCAATCTACTGTTATAATAGCAGCTAGTATAPTTTTGTTTGTTTTTGAGACGGAGGCTCACTTTGTC
ACCCAGCTGGAGTGCAGTGGGGTGATTTTGGCTTACCTCAACCTCTGTCTCTCCGGTTCAAAGTGATTCTCCTGCCTCAGCCTCCCGAGTAGCT
GAGATTACAGGCATACGCCACCATGCCTGGCTAATTTTTTTTGTATTTTTAGTAGAGATGGGGTTTCACCATGTTGGTAAGGCTGCTGGAACTC
CTGACTTCAAATGATCTGCCTGCCTTGGCCTCCTAAAGTGCTGGGATTACAGGGTGAGCCACCGGGCCTGGCCTAGTATACTTTTAAAATGTAA
GTTAGATCATATACTTTACTTAAAACCTTCCTCATCTTCACTCACTCACCCCAGTCCAGTTACGCTGGTTTCCTTGCTCTTTCTTGATGCCTTC
CCACACATTCCTGCCATAAGGCCACTGCACTGGATTTTCTCTGCTTCAAACACTCTTCTTCCAGGTATTCTCATAGCTAACTCCCTCATTTCAC
TCAAATCTTTGATCAGATGTCATCTCAACAAAGCCTAGAATTCTATTCATTACGCAACTTTTCTCTGCAACTCCTTCCCCGCCTTACACTCCCT
TACCTGGCTTTTACTTTTCTCGTTCCACTGCACGTACCACCTTCTAGAATACTAAAATTTATTGTGTTTGCTTCCCCTGCCCTCCCATCCCAAT
ATGTGTACTCCACGAGGGCAGGGATCTTTGTTTTTTTTCACTAGTATTTTTCTAAGAGCCTGGAATAGTGCCTGGCACATGACAGGCATTACAC
AGATTATTTGTTGAATAAATGAGQTAACACTCAACTTCTTATATTTCTCTGCATCAATTGTCCTATTTTTTGCCTCCATGCCTTTACTCAGGTG
GCTCTTAGATCCAACCCTAGATTGCTCTAGGAAGAGCTTTTTTCTGACACCTCTCCTTGGTTAGACGCCTCGCTTCTGTGTTCTATCTCCATCT
TATCACATATCTTAACTATCTGCTCATGTGTCTGTCTCATAATTAAACTGAAGAACTCCATGAGTCAGGGATTTTTGTCCTGGTTCGTCTTTGC
TGTTCCAGCTCCTAGCCCAGAGTTTGGACCATATTAAGTATTCAAATGGTTTGTTGAGAGAATTAATATATCAAAAACTAACCATTCTCACAGG
ACCATTCTCACATGGTTCCCCCTTCAGTGTTCAAGATCTTTCCTTTTTCAGTGTTCAAGATCCCAGACCTTCTGGTCACTTTTGCCCTGAGTAT
TTACTCCCAATCAAAAGTTATTTCTCCTTCCCTCAACTCCAGAGTGGTTTCTAAACCTCTTATGTATCTCAACTTACATGATATGAAAGCTACT
TCTCACAATCACACACTTTTGGTGTGAGAAGGATCTTATATGCACTTTGTTCAACCCACTCACCTTAAGTTTGAGTCTCCTTTATAACATCCTC
ACCAAGTGCTCACATATGCCTGGTACTTTTGTCTGCGAATGTACTGCCTTCCCGAGTGGCCATTTAGTTTTGGGAGCTCTCCCAATATAAGATT
CCTCCTCACATTAATTGGAAATGTTTTCCTTGTAACTTTGAACTATCTCCATTTGCCTCTCCCATGTCAACTCTTTAAAACTTAAAATGATTTT
ATTTTTTCCTTCCCTGTAAGGTTTCTCTGTGAATTCCTCCTAATGATGAGTTTCTAGATTAGATTCCTTCACTAGGATAGTTTCCACTTCTCTA
ACTAGCTAGGTCACTTCTCTCCAAATGATCAACTTCCTCCAAACCTGTTCAGAAGTGACTGCAGTGCTCCCGGTAGGAAGTCTGCTCCCGGAAA
CGAGCAGTTGTCTCCTTGTCCTGGTTCTGGGCTGTATCAGCCTTGAACTCAGTCACATCAAACGTCTGTCTCACGGAAGTCCACACAACATTCA
CCGAAACCCCTGAGGCTTTTTTTTTTTTCTTTCAAATGTTGTGGGCTTCTGAGAGGTATAACTGCAGTTGTCTCGCCTGGTAACCTGGGTACCC
GGTTTGTGGGTCCAAATGTAGACCATTTGGGTAGATCTGATTTTTAATTTAAAAAAAGGGTTTTTTTTTGTTTTTGTTTTTAAAGAGGCAGGAC
CTCTCTGTCGCCTAGGCTTGTGTGCAGTGGTGCGATCAACGTTCACTGCAGCCTCGGAACTCCTGGGATCAGCGATCCTCCCGTCCCGGCCTCC
CAAAGTGCTGGGACCACAGGTCTGCGCCACGGCGCCCCGCCCTCTCTGGTTTTCATGATGAGTGTGTCCCTAAACCCTCCTAAACGGGAGGACA
GTGCCGTATCTCTCTCCTTCTTCCCCAAGGAGGCCATGCCTTGCCTTTCAATCTTGATCAAAGCGAGGTTGAAAAGCAAACAGGCGTTCAGCTT
TGCACTTCACACCCACATCTCCCGCCCCCCAGCAGCTTCATCAGCCTCCCGCCCTCCGCGCCCCGGCCTCACAGCCGATAGAATCTTCACGTGG
CCTTTCACACTGAAGCAGAAGGGGCGATGTTTTATTTTCGGCTGCACGTTATCCATCGCGTCTGCAGACCCAGCAGCAGCACTTTCCCTCAACT
CTTCTCAGCTGGCTGCCTGAGTAGGTTCTGCGAAGCGATAGCAACCGCCACCGCGGCGGAGCACCGCCCTCCCCTACTTCTCGCCCAGCTCGGC
TTCCCGCTCTCTTGCGCGCATGCGCACGGCGCCGCGTTCGCTCTCGCGCATGCGCCCGAACGGGATCCCGCGGCCGTCCGCTCTGGCTTGTCCT
GTCTTTCAGTTATCGCGTAGCACATTAGCGGACCTAGAGCTGGGCACATATTAGCGGACCTAGAGGTGGGCACGAAGGCCAGCGCCCTGTTAGC
CCGCCGTGTTCTGGCCTGGCGTTAATGACGGCAGCACTCCAGCTCTCCTGAGGAGTCTTCCTGTCGGGAAATCCTCCCAGGGTTGGGAGCAGAG
GAGAGGGAGGGGGCTGTAGAAATGGCGGCCCCATCTCCCAACAACTTGGGCATTGTGAATATCACCTCCTTAAAGGGGATCTCCTTTGGTCATC
CCGTCTAGAGCAGCCACCATAACTTCTGAGCGTTTATTGCTAGCTGATATATATCAGAAAAATACAAATTCCACAAAAGCAGGGACTGGTCTGC
TTCTCTCCCTGCAGGGCCCAGGTTCTGGCACATAGTTGGTGCAGAAAGTGTGCAGCCTCAGGTCCTATCCAAGCCCCCAGGGCATCACACTCGG
GACTTGTTCTGCATATTTTTACTTTTGCCTCCCACTGGTACTAGTTCTTCCGTGGAACAGCCTGAGTCCCTTCAGATACTTAATGTTTTTTCTC
AAGTGCTGCCATGAAGCCAGATCTCCACCGTCTTGGGGCATTCCTTTTTAGGGATGGGPAGTATATGTCGCTCCTTTTATGTGATTTACATTCT
ATCTTGGATAATTTGGCCATCACCGTAGTTCATTCAGATCTGTTTGGATCCTGCCCATCTCAGCTTCAGTCCATTTCATTCTTTTAAATCTGAT
CGACAGTTACCTCCAACAGCTTCATCACAAATCACTCACAAAAATGGCCTTAATCCTGAAGTTTATTTACGGAGAGCACACTTGCTAGGTGTGT
GGCAGATATACAGGAAGCACAAGATGAGGCAGCAGATCTAGAGGCAAATGACTTCCTTCTCCCTGCCTAGTGGTGACTGCCAGCATCACGCCCT
CCCGGGAGAGGTGAGAAACCCCTCCACGCAAGCACTGGAACCTTCACAGTCAAGAGTGGCAACAGCTCCGGTTACTGAACTTGGGCCTGTTGAA
TTCTAATACTCTGTGACTCCACATCTGGGCTGAATTTTTGCTGAGTATGATCGAATTTACATGCTTCCPCCCTAGCCCCTACTTGTCTGTATAG
TTGGAATATTTGGTTGCCTCCTCTGGAGGGATCTAGTACGTTTAGAGTCTAGACGCTGGAACTGTCAAAGTTCAGAGGAAAGAGCTCCAGCTGC
AAAGCAAGAGAAATGGGCTGGAATTCTAGCTTCACCCCTTAATGAATGCTTCTGATTTTTTTTTTTTTTTTTTTTTTTGAGACGTAGTCTCACT
CTATCGCCCAGGCTGGATTGCAGTGGCCACGATCTCAGCTCACTGCAACCTCCGCCTCCCAGACTCAAGCGATTCTCGTGCCTGAGCCTCCTGA
GTAGCTGGGATTACAGGCGTGCGCTACCACGCCCGCCTAATTTTTGTATTTTTAGTAGAGACACTTTTTGGCCATGTTCGTCAGGCTGGTCTTG
AACTCATGACCTCAAGTGATCTACCTTCCTCCGCCTCCGAAAGTGCTGGCATTACAGGCCCGAGCCACCGCGCCCAGCCGCTTCTGATCATTAA
AAAAAAATTTTTTTTTTGGCGGGGGGAACGTAGTGTCCCTCTGTTGCTCAGGCTGGAGTGCAGTGCAGTGATCTCGGCTCACTGCAATCTCTGC
CTCCCAGGTTCAAGCCATTTTCCTCCCTCAGCCTCCTGAGTAGCTCGGTATACGGGTGCCCCCCACCACACCCAGCTTATTTTTGCATTTTTAG
TAGCCATGGGGTTTCGCCATGTTGGCCAAGCCTGGTCTCCAACTTCTGCCCTCAGGTGATCTGCCTTCCTTCGCCTCCCAAAGTGCTGGGATTA
CAGGCGTGAGCCACCGTGCCTGGCCAAAAAATTTATGTTTTAAAAAGACTAGTCAAGTGCAGTAGTGAGAAGGGGGGAAAGAGTAGAGCAAGGA
GTTATATCTGTTGCTTCTGACCATTTTGAACAAGTTACCTAATTCTCTCAGCACAAGCTCGGAGAATGGGACAGACACTTATCTATTTGCAGGG
TTGTTGGGAGGAATAAGTGACATCATGAGTGTGTGCCAGGTGTCTGATTACAGAAGGTGTTCAATTAATCTGCAATCATTAATTAACCCTTCAG
TCGCTGGTATTATTTGCCATCCATCCTCCGAGTGTTGCCAAGTTATGGGTGCGTTCTGCCAGCGTCCTAGCAGTGGTAAGGCTTCTGGCTGCCA
GCGGCGAACCTCTCCCTTCGAGTATTTCTCCTCTTGCTGAGATGAAATGCGACCGGGTCTCTTTAAGGGCCAGGCGCCGGGATCCAGGCGGCGC
CCAACGGCTGGACTAGCAGTCGTCCGCGCCGACTCGCACAAGAAGGAACCCCGGGCCTCTGGATCCGCTCGCCCGGCTATGCTGCTGTGGCCGC
TGCGGGGCTGGGCCGCCCGGGCCCTGCGCTGCTTTGGGCCGGGATAGTCGCGGGAGCCCGGCCTGGGCCCCGGGCCGCGGAACTGCTAGCGCCG
GGCCTGGCCTCCCGGTAACGCGCGTCTTGGTCCCGCCTCCCAGCAGCCCCTATGCGCCCACCTACTCCCCGCCCCTCGGCTTCCGGAACCCGCC
CGAGCCCGAAGCGCCTCTTCCGAGGCGCGGGATTTCCTCCCCGCCTGCGGCTGGGACGGGAACGGCGATCGGCCGTTACCCGCCCGCGAGACCG
CAGCGAGCGCTGGGGGCGCTCGGCTTTGGTTCTGGGATGGAGAGAGGGCCTTTAAAGAGCAGGACGGACACGCTCTGAACATTCCGGCCCAAAC
TCGGTCCCCCGACCCATTTCCTGTCCCGATTCTTTCGACCTTGGGGGCGATGGGGACTGGGAGCTGCCTTAAGCCGATTCTGCTCACACTCTGG
TGCCAGCGTGGGGGAGGGGGGTTACGCCCCCGGCGCTCTCCTGCCCTCCCTGGGAGTGGGGACCCACACTAGAACGGGTCACTGTTACACCCGG
GTTCTGGTGTCCGCCATATGGCTGTTGAGAGACGCCTCAGAACCACCTGTGGGACGGATGGGCAGCGATGCCCGCCCTGGGCCTAGAGGAAAAC
CTGGGTCCCAGGCCCAACCACGTCCGCCCCCCACTCTTCCCCGTGCACCGCGAGTGGAGGCTGTTCTGCCTTTCCACTTGCTTAACATCGATAG
TCTGTGAAGATCTAAATAAATAACCTGGAAAATGCAAAGTATAATGTACTAAGTGAAAGAACTCGAGCACACTGGGGGTCCACGAAGCTGCAGC
TGCAGCCCAGGGTGGCACATCGGCGAGACGGTGGTGCGCGCCTCCAATCTCGGAGGGCGCCCAAAATGGAAAATGTTTTTAGGCCAGGGAGTGA
GCATAAACATTAGTGTTTTTGTGGTCATGTAGCAAATTAGGGCAGAGGAGAGTTATTTAAAAGTGAGTTTAAAAACTGATTTCCTTTCTTTTGT
AGATAAAGAACAGGAAAAAGAGAAAATATCAGTGGTAAGTCCCTCTTTTATGTGTACTCTCTAGGATTAATTTGGTTTTTTGAGAGGAGAGACA
AAAAAGCAGAGTAAAAAGCAAAAATACATTCCATAGTAAAAAGCAAAAATACAAGAGGATCTCCAGGGAGAAGGAAGTCTGTCACCCTCCTAGA
AGGCCACCTCTGTTACCAATTTCTTGTATCTTTCCCCAGAGTCTCCACAGATACAACCACACGACTATTTGTATCCTTCAGGTAGATTTCGACT
GTTAAAGCTTAAGGGATGATTGTGAAAGGATTTGAAAAACGCTCATTGTGTTGTGCGGAAGGTCAGTTTCATCTTGGGTTGGGCAGCTCAGATG
TGAGGGAAGCTCTGTCCACCACCACCCTCTCCCCCCAGTGTTGAGACTGGTGGGTGGGCAGGGGATCAGAGAGAAACCATTAGGGTCCACAGAT
GTGGGTTCAGTTATCAGGGTGGGTTTGAGATGCTGGCTCTGGGCTGGGGCTGTGACTAGTGTGAGGCTGAAGGTCAAAGAAGGGTCAGGTTGGT
GTCCATGGGGATATTGGGTGCTTTAGCTGGCTGGGGTAGGGAGTGATATTTTGGTCACAAACCAAGGCTCAATTCCTTAAAAGAACTGAAAGTC
CCTAGCTCCAGTGGCTGGGAAGGGGGTGGCTTGGCAAGTGGTGGCAGGAGTACCGTGGCTGGGATCTGCAGAGGGTAGACAGTGCGGGCAGGCC
CCCAGCGTACTCAGGGTGGTGGAGAGCTCTTGGGAAGTAGTGAAACCACATAGAGAGGATTGAAATGCTTGAGATTTGTGGAAGTTTGTTGAAA
TTAGGAGAAGGATATGCCAGCGGGTGCCATAGAAGGGGAGGGAAATGCAAAGTTGAGCTGGATGGTAATTAATGTATTTTGTTTGTTTTATACA
TTTAAGAGACCGCGTCTTGCTGTGTTCCCCAGGCTGGCCTCCAACTCCTAGCTCGAAGTGATCCTCTCGCATCAGCCTCCTGAGTACCTGTGAT
GACAAGTGTGAGCCACTGTGCCTGGCTATTTATTAGTTATTCAGCTAGCATTGATGTGAGCTGGGCCTGTTCTTTGTGCTTTTTGGGTGTAATT
TGATGTGCCCCCAGACACACAATAGCTAGTTCATAGAAAGTGGTATGGAGCCTGCATTCAGGCTCAGGACTGTTTGTAAACATTCAAGTCCTGT
GAGCTCCTGTCTGGGATGCACTGGGCTAGGACCTGGGCACCTGGCAAACAGCCCTGACATTTGGGAGTCTGCGGTCTGTCTGATGGGGGAGGTT
TGTCTGATGGGGGAGGTCTGTCTGATGGGGGAGACAGCAGTAACTAGGAGAATGGTGGAACTAGAACAGCAGTGAGTATGGTGGCTGTGAGTAG
GGGGGCTGATGACTGAGAGCAGGTTTGGGAAGCCTTATTGCCTGCTGGGAGATGGAGCAGAGTTTGAGGCAGGAGTGTTGGAACAGGTACAAGT
CACAGAAGAATGAGAACCTGCAGGCCTGGGCTTGTGGCCAGTCCCTAGAGAGGTGGCTGGGAGGGCTGGGGGATAGGTGCTAGAGGGACTGAGA
ATAGGTCCTAAAACCCAGAGTCACTGAAGGGCCTCACCCCCACCCAGCACGATCCGGGTTGCCTCTCAGGGAGCGATGTGGGGAACCATGAGTG
GAGGGCCTAACTGGGTGAGACTGGAAGGGGAGAGACCTTAACTAAACTAGAGATGGCACAGAGCCCGCAGCTGAGTGGGAAAGCAGGGCCCAGG
GGAGTTGCTGGTTGGTTGACTGTTGTTGGTGGGTGAGGAGAGATGTCCAGAGTGTTAAAGGTGTCTGGGTGGATGGTGCAGCCATTACATGGCA
CAGTTTACAATATTAGATAATTGAGTATCACAACAAAGTTTTTTAATAAAATAACTGGACAGAACTTAACATCCAACAGGGCCATACCTAATGG
CTCATGCCTATAATCCCAGCACTTCGGGAGGCAAAGGTGGGAGGATTGCTTGAGCTCAGGAGTCTGAGACCAGCCTGGGCAACATGGCAAAATG
CTGTTTCTACAAAAAATACAAAAAATTAGCTGGGCATGGTGGCATGCACCAGTAGTCCTAGCTACTCGGGAGGCTGAGGTGGGAGGGTTGCTTG
AGCCTGGGAGGTCAAGGCTGCAGTGAGCTGTTATTGCATTGCTGCACTCCATCGTGGGCAACAGAACGAGACCCTGTCTCAAAAAAAAAAAAAA
AATCAAATAGTAGGGAGTTCAATAAATTGTGACAGGTCTTATATAATGGATTATGTAAAGCCATTAAAAACCATGTTTTTTGAAAATATTTAGT
GACCTGGGAAGGCACTCACTATGTAAAAGATGAAAAAAAAAAAATAACAAACCAACAAAAGTATATGAAGTATGATCCCAAATGAAAAAAAAAA
CTGTCCTTAGGAAACAAACAGGAAAAGAAAATATTATAAACATTAATGCCGAAATTCTCAGTCTAGTTAAGAGATAGATGTGGGTAACAAGGAG
CATGTAAGAGAGAGTTTGTGGTGTGATGGGGTAAAAGTGTCTTCCCTTAGTTATTTGAATGTTAAATGAAATTCAGCTGGGTTCCTTTTTAAAA
CAGCTTTATTGTAATTTGCATACCACAAAATTCACCCATTTAAATGTGCAATTCAATGATTTTTAGTAAATTTACAGAGTAAACAGCACTACAG
AGTAAACACCACTACAATCTAATTTTATTTTATTTTATTTTTATTTTTTATTTTTTGAGACAAGGTCTGGCTCTGTTGTCCAGGCTGGAGGACA
GTGGCACAATCACAACTTACTGCAGCCTTGACTTCCTCGTCTCAGGTGATCCTCCCACATCACCCTCCCTAGTAGCTGGGACTACAGGGACATA
CCACCATTCCTGGCTAATTTTTGTATTTGTTGTAGAGATGGGATTTCTACATGTTGCCCAGGCTGTGCAATCTAATTTTATAACATTTCCATTA
CTCCAAAAAGAAACCTTGTGCCCATTTGCAATCTCTTCTGGCCCCAGGTGACCACTATTCTACTTCCTGTCTCTTTAGGGATTTGTGTTTTCTG
GACGTTCCATATAAAATGGAACATATAGCGTCGGATCTTTTGTATCTGGCTTCTTTCACTTAGCAAATTTTTTTTTTTTCTTTTTTGAGATGGA
GTTTCTCTCTGTTGCCCAGGCTGGAGTGCAATGGCATGATCTTGGCTCACTGCATCCTCCGCCGCCAGGGTTCAAGCCATTTTCCTGCCTCAGC
CTCCCAAGTAGCTGGGATTACAGTCATGTGCCACCACGTGCAGCTAATTTTTGTATTTTTAGTAGAGTCGGGTTTCACCACGTTAGCCAGTGCT
GGTCTCCAACTCCTAACCTCAGGTGATCCGCCTGTCTAGGCCTCCGAAAGTCCTGGGATTAAAGGCGTGAGCCACCGCTCCTGGTTCCTTAGCA
TAATATTTTGACATGCATCTGCCTTGTAGCACGTATTAGTATGTCATTTTTTCCTATAGCTGATTAGTATTCATQJCGTGGCTGTAGTGCACTT
TGTTTATCCACTTGCQGTTGTTAGACGTTTCCGCAAAGTTTCTTTTGACTGCAGATTTCTCACAATCTTTGATAAGACAGGATATTTGGATTCT
CCCTGTGGAGGCTTTGGCACCCAAGCCAGTTTGCCTCTGGAACCCTGGGTTCTAATTAAACATCCAAATGACAATGATTGCTGAGATTTACGAG
TGATTTTTATTTTCTTCTTTTAGGGATTGTGTAATAAGGTTTGATCAGAGAAATCCAACTGATAAATACATATATGCATATTCATAAACATATA
CATATATTCATGCATACATACATTCTTGTGTGTGAQAATGTATTTCTTTTTTTTTTTTTTTTTCAAGACAGGGTCTCACTCTGTCACCCAGACT
GGAGTGCAGTGGTGTGATCTCGGCTCACCACAACCTCCACCTCTCAGCTCCCAAGCTCAAGCGATTCTCTTGCATCAGCCTCCCCAGTAGCTGG
GATTACAGGCATCCGCCACCACGCCTGGCTAATTTTTGTATTTTTAGTAGAGACGGGGTTTCACAATCTTGGCCAGGCTGGTCTTGATCTCCTG
ACCTCAAATGATCCCCTGCCTCGGCCTCCCAAAATGCTCGGATTACACGCGTGAGCCACTGCGCCTGGCCACTGAGTATGTATTTCTTAGCACA
AGAATGCTTAATTTCCATTTTTAGGAAAGATTAAATATTGTTACTTATAATAGGGATAGATGGCTCATCACAGTTTCAGTTATAATCATGGAAA
ATTGGACTCAAGGGCTCATAGGAGAGGAAAATGGAGATAAATTGTAGCGTAATCACAGAGTGTTGGGCCAGGCCGGCCATGTGCTCCCACAGCA
TGGGGACCATCTCCTTTTCACAGTTTCCTGTTGCTTTCCTCCACACACTCATGAGCTCTTTGGCCGTTGCAACGAGCCCCTGAGTACACAGTGC
CTGGCACAGCATAGGCCTTCAATAAACAGTTGAAACGTGCTCAAAGATGAGGACTGTATAGAAAATAATATTTGGCATGAAATATGCTCATATG
TCATGGGGTTTATCTCTTAGTATTGGGATTATGGGTGATAGTTTCTCCTTTTTGATTTTCTGTATTTTCTTCAATCGGCATGCACTTCTCTTAT
AATATTTTTAGACATCACTTTAAAAAGAAATGTAAAAGACTCCCTTTGCTTGCTTCCTGTTCCCCCTTCCATTCAGGGGAACTTTGTGAGATTC
TTCCTGCGTTGCCTGCTGTAAACCGGAGGGCAGATTGGCTGAGCTCATTCAGGGCCTGACATTCACCAGCTCTTCACGATTTQATGCTGGGGAT
AGGAACAAGTTTCTGGGAGAAGGGCTTATCTGAACAACCTGTTAAAATGCTTCAATGAACAGGAAAGAAAAAAGACTGTAGAGTGATGTCTAGG
TTGAGCTCTTTTTATATATCTAGGAAGAGGAAAAGTTTTCTTTAAAGAGCAATAAAAAAATTAAATCCATTAGTGCCCTAATGGGGTCTTTTCA
TGCCCTTTTGTTCATTCCCTTGGGTTCATTTTGTAGTTTGGGGCTCTAGAAGGAGTGGGCTGGGAGGGACCCAGGATAGAGAGTGGCCTTGTGT
CTCCTGGATACCCGTTAGGATCAAGGCAGGAGGAACCTTCTCCGCCAGCTGACAGAGTTCTAGTTGCTGGAGAGACTTTAGTGGGGTCGGGTGA
GACGGCCCACTGTGACCTGGTGTTTATGTGAGGTGTGACTGAGGCTCCATCAGGAGTCGTGAGAAGGGGCCTGGATGTGAATTCTAATTCTGAT
TCTTCCCTAGCCAAGTCTGGCACTTGGGTAAGTTACCTGTGTTGCCCAGGTTTCTCTGGGTGCTTCCAGCCTGAGTGCAAAGGAACAGGCCTCT
GTGCAGCAGGTCGCGCCCCTCTCTGTGTGTGCCCCTGGAGGATGTCTAATCTGTTCTAAGGGGACAGTTTGTCTTATGTATTGCAGCTGCCCGT
TCCCTGTGGCCATCTGCTGCAGCCAGAGCCACTGGGCCTATGTCATCAGCAGTGCCTGGCTGAGCAGAGCTTGGTCAGATCACTAGTGCTACAG
GTTCAAGGGCTCCAGCCTAGAGTCTGATTTAGGGTCTGGATGCTACCTGGTGCAACCTCATGTTTAACCAGCTCCTCTAATGCATCTGAAGCAG
GCATCTGTGGACTAGACAGCGAGAAGCTCTGCTCCAGCCTCGTGGTTCCCATCCTTGCCTGCACATTGTAATCCCCTGGAGAGCTTTAAAGATT
ACTGAGGCTTGGCCGGGTGCAGTGGCTCACGCCTGTAATCCCAGCACTTTGGGAGGCTGAGGCGGGTGGATCACCTGAGGTCGGGAGTTTGAGA
CCAGCCTGGCCTACATGGTGAAACCATGTCTCTACTAAAAATACAAAAAATTAGCCGGGTGTGGTGGTGGGCACCTGTAATCCCAGCTACTCGG
GAGGCTGAGGCAGGAGATGGCTTGACCCAGGAGGTGGAGGTTGCAGTGAGCTGAGATCACGCCACTGTGCTCCAGCCTAAGCTACAAGTGAGTG
AAACTCTCTCTCAAAGAAAAAAAAACTTACTGAGTCTTGAGTCTCACTCCCAGAGATTGTGGTGTAATTGGTCTGCGCTGTGGCATCCCTGTAG
AGATTTTTAAAAGGTCCCAGCTGGTCCTAGCGTATAGCCAGAGCTGAGAACCGCTGCCTGGAATACCTTCTCTCCCTAAGATGAGTTACTTCTA
GGATGCTCCTTGGTCTTTGGTATAGGTAGACCCAGAAGGCTGTTTGTGGCCCCTCCCACTAGTGCGATGACCCCCTTTCCCTCCCACGTGCAGT
CATTGTGAGCAGAGTCTAGGTTCAAGCTGTCCTTGCTTTATTGTCTTCTACAGCCTCATTTTTGTTTTCTGTGATAGAATGTTAGGACTTACCC
TTCTCAGGTTTCAGTGAGGTTACATGTGATAATGGTGTGTTACCTGTCTCAGGGCTTGGCCTGTGACAAAGGTGCTTAACAAGTCCTTGCTCTT
TTTTTCTTCTCCCCTTTCCTAATGGTTTCCAGTCAGTGACCAAGTGCTTTTTTTTTCTGTAAAGCAGTGAATTCGATTCTAGATAACATATATG
TGTTTCCTAGCCTCAAAGCCATTGATTAAGCTCTCGTTAAGGAGGCAGGACACTTAGGCCTAAAATCTAATAGTCTGTGGGGTTGAACTAAGGA
AGGGCAGAGCTGGGCTGGGCAGACAAGCTGTGTATGGTTTAGGAGTTGACGTATAGGAGGATCTGGTCTGGGGGGACCACATGAGCCTGCCACT
CAGGGAGGATCGCCTTATCTGTTATTACTAACAATGGGACCTTGCCAGTTTCCCGAGGAGGGATTTTGGTTTACATGTGATAGTCTTGCACTGA
ACCAATTATGCTGGTTACATGAGCCCTTTCCGTAGCCATTATTCCCTGACATTCCCCTGGGTGCTTGACTTCTGGCTCTAATATGCATTCGTCT
ACCAATTATGCTGGTTACATGAGCCCTTTCCGTAGCCATTATTCCCTGACATTCCCCTGGGTGCTTGAGTTCTGGCTCTAATATGCATTCGTCT
TTTGCCAGATCTGTGTCGAGGCCAATATTGCAAGTGGGAAGACGACATGCCTGGAATTCTTCTCCAACGCGACAGACGTCGAGGTACAGCCTCT
ATGCTAGGTTTGAAGGAAGCGGAGAAAGCTTGATGGGATAATTTATAGAGGGTGTGGACTAACCTTGTCCAATAGGACTATAATTTGAGCCACA
TTTGCCAGGCGGAACCAGGTGGATTCCTTGAGCCCACGAGTTCCAGACCAGCCTGGGCCACATGGCGAGACCCCATCTCTACAAAGATATGCCA
GGCATGGTGGTACGTGCCTGTAGCTCCAGCTACTTGGGAGGCTGAGGTGGGAGGATTGCTTAAGCCCAGGAGGTGGAGGTTGCAGTGAGCTGAG
ATCACGCCATTGCATTGCATCCTGAGCAGCAGGAGTGAAACCCTGTCTCAAAAAAAGAAAAAAACCCACAAAAAATAAAAAGGACATTTTATTT
CACATAACATATGCCAAATGTGATCATGTCAACATTTAATCAATATAAAAATCATCAATGAGCTATTTTGCATTCTATCTTGTTATACTAAGTC
TTTGGAATATGATACTGGTTGAGCATCCCTTATCTGAAATGCTTGAGACCAGAAGTGTTTTAGATTTCAGAATTTTTCAGATTTTGGAATATTT
GCATAAATGTAATGAGATATCTTGAGGATGGGACCCAAGCCAAAACACGAAATTCATTTATGTTTCATATATACATAGCCTGAAGGTAATTTTA
TACAATATTTTAAATAATTTTGTGAATGAAACAACTTTGTGTTAAGTATTTATGTGTGGAATTTTTCATTTGAAGTGTCATATCGGTTTCCAGA
AAGTTTTGGAGTTTGGAGCATTTACGATTTTGGATTTTTCAATTAGGGATGCTCAAACTGTTTGTATTTGTAAAATAAGTGTAACTTATAGCAT
ATCTTAATTTGGACTACTCATATTTCAAGGTCTTAATAGTTGCCTGTGGCTCATGGCCACTGTATTGGACAGTGCAAGTGTTGACTGCCTCAAA
GTCTGGTTAGGAAAAGAGTCTACATGGGTAAGAAGAAAGGACAGGCTATTGAGCAGGGCTAGAAGTGTGACATCTGAGATAGCAATGTCTGAGC
AGTGGGTATTACTATGCATAGGCAATTAATTTAATTTCTAGTTCATTTAAAGCCTAGTCACTAAAACTAACCTCAGAGATGTTTAAGAATCATC
TCTACACTAAGACATTGACCTGTCTTCCTTGTTCTAGATTTAGTGGTATAATCTTCTCTATTGATGGCTCTCTTTGTTACTACATAGAAGCTAC
AATTTCTATACTTTTATAGTCATTTTCTTTCCTTCTTCCCTTCCTTTCCTGTTTTTACTTCTGCTAGAAATATATGCATGGCCAGGTGTGGTGG
CTGATGCCTGTAATCCCAGCACTTTAGGAGGCTGAAGGGGGAGGATCACCTGAGCCCAGTAGTTTAAGAGTAGCCTGGCCAACATGACAAAACC
ACATGTCTACAAAAAATACAAAACTTAGCTGGATGTGGTGGCACATGCCTGTAGTCCCAGCTGCTCAAGAGGCTGAGGTGGGAGGATTATTTAA
GCCCAGGAGGTTGAGGCTGTGGTGAGCCAGGACTGTGCCGTTGAACTCCAACCTGGGTGACAGAGTGAGGCCCTGTCTCAAAAAAAAAAAAAAA
AAGAAAAAAGAAAGAAAGAAAAGAAATATATATAGTTTGATAAATAATAATAAACATTATATAGCCCTTGTCCTGAACTGTGTTCATGTGCTGC
TGTGCAGGAAAGAGTTAACATAGCAGACCTAAGACTGCTGCCCTTTAGAAATGCCTGCTTGCAAGGGTGGTCTTTGGCTGGCATCTGGGAACTT
AGATCTTGGGAGGGCCCCCACCATTCCTACTGATAACAGTGGCTCTCTGCTTATAAATTGTTTCTGCAACAGTATGGTTTATGCTGACACCTGC
TTTCTTCCTGGGAGTCCGGAATTTTGGTACATGTCAGGAAGTGGTTGTCTGCATGGCTGAGCGCTGATGAAAACCCTGAACTCCCAGGTTCAGG
CCAGCTTGCCTGCTAGACAACATTTCACATGTATTGTCACATCTTGTTGCCTGGGGPATTCAGTGTGTACTGTGAAGCTCCTCTATGAGAGGAC
CCTTGGAAGCTTGTCCCTGGTTTCCTCCAGACTTTGCACCTGCCCTTTTTCCCTTTGCTGATCCTTTTTTGTTTTTCTTCCTTTTTTTTTTTTT
TTTTTTTTTCTGAGATGGAGTCTTGCTCTGTCACCCAGGCTGGAGTGCAGTGGCATGATCTCGGCTCACTGCAACCTCCGCCTCCTGGGTTCAA
GCAATTCTCCTGCTTCAGCCTCCCAAGTAGCTGGGATTACAAGCACCCACCACCATGCCCAGCTAATTTTTTTGTATTTTTAGTAGAGATGGGG
TTTCACCATGTTGGCCAGGCTGGTTTCAAACTCCTGACCTCAAGTGATCCACCCACCTCAGCCTCCCAAAGTGCTGGGATTACAGGCGTGAGCC
ACCGTGCCCGGTCCCCTTTGCTGATCTTGTTTTGTGTCCTTTCGGTGTAATCCATCTTAGCTGTGAGTATGACTGCGTGTTGTGTCCTGTGAGT
TCTCATGAATCATCAAACCTGGGGAGGAGGGGGGGCTTGGGGACTCTTGACCCCTGTCCTGAGTGATATGACTCTTAATGGCACTTTAGAAGTG
CTTATAGTCTCACTGAAGACCTTGGACCCGATTAACAACGATAGTTAACATCCAGTGAGTATACTGCTATTTGCCCAACACTGTGTTGAGGGTT
CATCATAAATACTAAATGATCTCACCCTCACAAGAATAGTCCCTCTGAAGTAGGTACCATTTTTACCACAGTTTTAGATGAGGAAACCATGGCC
TAATGAGGTTAAGTGGCTTGTCCACGGTCGCTAGGCCAGTGTATGATACAGCGAGATCCCAGCCCCGATACAGCCAGATCCGAGCCCAGGCTGT
CTGGTTCCAGGGGCCACACCCTTGTTTGATTCTGTGCTACGAGAGCTTTGTTGCCTTTAGGATAGACCACTCTCCCTTAACATCTGAGCTCCGT
GTCCCCTGACCTTCCCAGCGAGGTTATGCTTCCTGACAGAGGATCCCCTGGCCGCTCTGTACCTCTCTTTTATACCACTTCTTGGGGTTTGAAA
ACATGTTGGCTTCTGTGATTACCTGAGTAATGTCTGCTTCCCCTGGTAGGCTTAAGGTTCTGTGAAGGCAGAGCCTGGGCTGGTTTTGCTATTG
TTGTGTCCTCAGTGCCTAGCATGGATATCTGGCACACAGTGGGCACTCAATAAATGTTTGTTGGGTGACAGTGCTATGGATGGAGCACCCCTGA
GCTGGGTCGGGGAGCAAGGCTGCCTGTGACCCAGACTCTGGTGGGCCTGTGTGGTCCTGTGTATGCTACTTAGGGGCTAGGAAGAACACCTAGA
AGAAGGAGAGGGGGTTTGAGAGGGGCAGGGGAAGGGCATATTTGAACTGGATTTTGAAGGGTATACAGGAGTTTTCCATGTGATGAAAGTTGAT
GTGAAGTGGAATGGGGTGGGAATGCTGGTCAGAAGAAACAACGTAAGCAAAGACACAGAGTATCTTGCTTGAGGGTGGATCACTTGAGGTCAGG
AGTGAAGGGTGGGGGGTGATTACTTTTCTTTTCTTTTTAGAGACAAAGTCTTGCTCTGTCACCCAGGCTGGAGTGCAGTAGCGCGATCTTGGCT
CACTGCAACCTTTGCCTCCTGGGTTCAAGTGATTCTCCTCCCTCAGCCTCCCGAGTATCTGGGATTACAGGCATGCACCACTACATCCGGCTAA
TTTTTGTATTTTTAGTAGAGATGGGGTTTCACCATGTTGGCCAGGCTGGACTTGAACTCCTGACCTCTAGTGATCTGCCTGCCTTGGCCTCCCA
AAGTGCTGGGATTACACCTGTGAGCCACTGCACCCAGCCAGGGTGGCTACTTTTCAAGAGTTCCATGCATTGCCTGCCATTGGTCTTTTGTCAC
CTATGGCCCCTTCTCACATGTACTCTGAAAGTTCCCAGATGGATCCTGGCACTCTGAAGATCTTGGCCCCAAGAACACCATTTAAATCTTTTCT
AGCACACACCTGCATACCCAGATAAGGCTCTAGCAGAGTCTGGGGTTGTCCCAGATTTGTCTGTCTACACCACAGATGGAGGCTCTAGAATGCC
CAGCAGAGATCCTGATATGTGTCTGAAAACACACAGGATGTTGGAGAGATTGGCAGTCATCCTAAAAGGTACAAACAGGACCAGAGGGAAAGAA
TGCCTCCAAACCAGTGAGACAGGGAGCGTACTAAAGAAACAGGGACTATCAGCAGCCAGTGCACCCAGTGCAGTGATCAGAGGCAGGAAACGGA
GGCAGCTGCCTGCCAAGGCCTAGCCCTGTCCAGTGTCCCTCCTGGCTTCTCCCACCCACCTGCCAGCTTGATGTCGTAGGCAGGCAATAGGTGG
GATAGAATACACAGAAGACGGATGGACAGAGCCACCTCTGACCTTGGGGAGGCTACCACGGCAGTAGAGAGGTAGGATGTACCTATGCTTGCCA
CATTGGGTAACATGGATAGAGTTATTCTCAGGACATTTCTGGAAGTAATGTGAGGAAGCCGTGTCTAGATAGAGTTGTGACCTCACGGGGGTTG
TCAGCTATTTTGGCCTACCTTGGGCACCCAAATTTGGATAGTCTTTTTCTCTCTTTTTCCCTTCTCTCCTCACTTTCCCCTCAACACTTACACA
CTTTTACAGGGTTCAGCACAGAGAAACAGTAGCTCTGATGTTTTCTTTCCTTCCAGGTGTTAACGGAGCCTGTGTCCAAGTGGAGAAATGTCCG
TGGCCACAATCCTCTGGTGAGTGGGTTGTTGGTTGCATGAACCCCCGGCTTCCCCTTAAGCACCTGAGAATGATGGTGCCTCTGCCTGAGCCCT
GCCTGCCCAGGGATTCTCTGCGCTCTTAACTGAGTTGGAGAAGACCAGGGAGGGACAAGCAGAAAATGGTGGCATGTTGGTGTTCTGAGGTCAA
GGATCTCTGAGGCCTGAGTGGCTGTGCACAGAGCCTAGCGACTTCCCGTCAGCTATCCCATACTATTCCCAGTGGCCGACCTTAGCAACTAGGG
GTGTCCATTTCTTGTTGCTCATTCCAGCCTTCCCCTCCCCTAGAAGAAACCTATCAGAACCCGGGACTTCTCAGGCCTAACCCCCCCAGGACCT
ATCTCTAAGTAACCAGGATCCTTGGTGGACCCCTGACTTGGGTTTGCAAACTTGGCCCTGTCTGGTAACAGGGGCCACCTCTGGCTTACCTGGA
AGCCACCACCCTGCTTTCCCAAGGGTGAACCTAGCAACAGGGGCTGTAGTGTGCTGTGTCCCTTCCTTCACCTTCCCCAATTCGAGGTTCTGCT
CTGGTTGCTTGAAAGAGATGGATAGAATCTGGGTCCTGCAAGAGAGAGCTTTAGAAGAGGATGTTGGTTCTGAGCTCCCATCCCATGAGGTAGG
GATGATTAGTCTCATTTTTCAGCTTAGGAAATTGCACTTATATAAGTTGCCTGAGGTCACACAGCTAGTAAATGGACTTGGAAGCCTGTGCTGC
CCTGTGATTTTTTTTTTTTTTTTTTGAGATGGAGTCTCAGTCTGTCCCTAGGCTGGAGTGCAGTGGCGCGATCTCGGCTCACTGCTACCTCTGT
CTCCCAGCTTCGCGATTCTCCTGCCTCACTCTCCTGACTAGCTCGGACTACAGGTGCGAAACGACCATGCCCAGCTAATTTTTGTGTTTTTAG
TAGAGACAGGGTTTTACCATGTTGGCCAGGATGGTCTCCATCTCCTGACCCTCATGAGCCACCAACCTCAGCCTCCCAATGTGCTGCCATTACG
GGCGTGAGCCACTGTGCCCGGCCATGCCCTCTGATTTTTAGCAACACAATTGGCATCTCCTGTGTGGTTCATTAGACTCTGAGTTCTACTAGGA
GCAGGGACTGTATCTACTTTGTTCATTGTTATTTGCTAAGAACCAAGGCACACTGCCTAGACTTAGTAGGAGCTTGTGCATTCATCGATTCATT
CAACCAATATTCAGTGCATGTCAGCCATGTGGCAGACACTGTTCTGGATGATATGGCAGTGATAAATTCAAAGCCCTTGCTCTCCTGCCCCTAA
TATTCCAGTGTGGGGAGGCAGAAGTCAAACATATAATCTGGCGGGTGGTGATAGGGCCTAGGAAGAAAACTAAAGCAGGTGAAAGGATGTTTCT
TAAATAAGGCAAAACCTCTCAGTCTTTCAATAAAGAATCCTAAAGAGACATGAGAAGAATTTCTTCTCTGTGCATTCGGGAGAAGATGGAATAC
CAGTCATCTTCTTTGGATATAACAAAGAAACCTCTGTAACATTCATATTCTCTAGAAGCCAAGGAGGAACCCAGGCTTAGTTATTAAGTAAGAC
AGCTAGAGTTGCAGGTGTTACGGATCATAAGTGACGTTTCACGGCACAGAATCACAGCCTCAGGAGTCTTAGTGTCCTTGGTACAGATAGCCTT
TTCAATGAGAGTTTCCTAATAAAAAATACAATAGAAGTAGCCATTTTTATATAAGTTTCCACTCTAGACCAAAAGAAAGATCGATACTTTTGTG
AAAAATCTCAATTCATCACTTTATCTGAATTGGTTTTCTGATGCAGAAGGTGACTGTTTCTGCGGCCATCAGGCAAAGAGGGAGTGTTTCTCCT
AGCCTTTATGAGATTTTCTCTCAACTGCAGTCAGAGGAGTCTGCAGTTCTCAATGAAGAACACTGGAGTTTCATTAGTTTGCACCAAGAGAAAA
ATGAAAAGCAAAAATGAGGAAAAGGCCGGGTGTGGTGGCTCATGCCTGTAATCCCAGCACTTTGGGAGGCCAAGATCAGAGGATCACTTAAAGC
CAGGAGTTTGAGACAACCCTGGTCAACATAATGAGACCTCCATCTCTAAAAGAAATAAAAGTAAATAAAATTAATTTAAAAATGAGGAAAGGAG
CAGAACAGGTTTCTTAGCAAGTATGCTGGAGCATGAAGTGTTTTGCTTCTAGA1&GGGATGGAGACTGATTGAGTAGGTCGGTTACTTCTGTTT
TACATGAGATAACCAGGGAATGTGTCTATGATAAGGTGCTTAAACATGAGGGTGTGAGCACTGCAGATATCTGGATGAAGAGTGTTTAGGCAGA
AGGCGCTGCAGAGGCAAAGGCCCTGAGATGGGACCATGCTTGGCATGTTTGAGGAATGCTAAGTAAGCTCATGTGGTTGGAAGCCAACCAGGCC
AGAGGGAGATGGGTAGGAGATGAGAGAAAGCCTTGTCGGCCATGATAAGGGTTTGGATTTCATTCTGCATGCAATGGGAAGCCACTGGAAGGTT
CTGAGCAGGGGAGTGGCAAGAACTGATTTAGGTTTCACAGACTCACTCTTGTGGCTGGATAGAGAACAGACTACAGAGGGCTCAAAGACCATTC
ACTGAACGACTTGAACGCATGTTCCTTGGTGATTTTATTTTATTTTTTGAATTTCCAAAGAAAAGTAATTTATTTTTTGCAGTTAGGGCAGCTG
AGAAGTCCAGGGTTGAAGGGGTGCATCTGCTGAGGGCTTTCTTGCTAGTGGGGACTCTTCAGAGTCCCCAGGTGGTACAGGGTGTCACATGGTG
AGGGAGTTGAGCATGCTAGGTCAGGTCTCTCTCCCTTTTCTCATAAAGCCACCAGTGTAAGATAACCCATTAATCTATTAATCCGTGAATAGAT
TAATCCATTCAAGAGGGCTCTGTACTCATGATCCAATCTTTTTTTTTTTTTTTTTTTTTGAGACAGAGTCTCACTCTGTCGCCCAGGCTGGAGT
GCACTGGCGCGATCTCGGCTCACTGCAAGCTCCGCCTCCTGGGTTCGCGCAATTCTCCTGCCTCAGCCTCCCGAGTAGCTGGGACTACAGGCGC
CCACCACCACACCTGCCTAATTTTTTGTATTTTTTAGTAGAGACAGGATTTCACCGTGTTAGCCAGGATGGTCTCCATCTCCTGACCTCGTGAT
CCGCGCACCTCGGCCTCCCAGAGTGCTGGGATTACAGACGTGAGCCACCATGCCCGGCCGATCCAGTCATTTCTTAAAGGCACCACCTGCTACA
TACTGCCACATGGGGATTAAGTTTTCCAACACATGAAATTTAGGGGATTCATTCAAACCAAAGTATTATTTGTTAAAGATGATCTTAAAGAGCT
TAACTTCTTTAAAAATPTTAAACTTATTTATTTATTTATTTATTTTGGAGATAGGGTCTTGCTATATCACCCAAQCTGGAGTGCACTGGCACAA
TTATAGCTCACTGTAACCTTTAACTCCTGGGCTCAAGTGATCCTCCTGCCTTGGGCTCCCAAAGTGCTGGGATTATAGGCATGAGCCACTGCAC
CTGGCTCTCTTTTCTTTATGCTACAAACATTCAAATTATTCTCTTATAGCTTTTTTTTTTTTTTTTTTTTTTTGACATGGAGTCTCGCTCTGTC
ACCCAGGCTGGAGTACAGTGGCATTATCTGCCTGGCCAGCATGGTGAAACCCCGTCTCTACTAAAAATACAAAAAAATTTAGCTGGGTGTGGTG
GTGCATGCCTGTGATCCTACCTACTTGGGAGGCTGAGGCAGGAGAATCGCTTGAACCCAGAAGGTAGAGGTTGCGGTGAGCTGAGATCATGCCA
CTGCACTTCAGTCTGGGTGACAGAGCAAGACTCTGTTTAAAAAAAAAAAAAAGATTTTTATCAAAAAGACAGGTGATAGGTGTGGAGAAAGGGG
ACCCAGGCTGGAGTACAGTGGCATTATCTGCCTGGCCAGCATGGTGAAACCCCGTCTCTACTAAAAATACAAAAAAATTTAGCTGGGTGTGGTG
TTTTTGCTCAGGATTGCTTTGGCTATTTGGGGTCTTTTGTGGTTTCATATCAATTTTAGGATTTTTTTTTTCCCTATTTTTGCAAAGACTGTCA
TAGGTATTTTGATAGAGATTACATTGAATCTGTAAATTGCTTTGGGTAGTATTGTCATTTTAATAGTATTAGTTCTTCTGATCCATGAGTGTTG
AATATCTCTTTTTTTGTGTGTGTTCTGTTCAATTTCTTTCATCAGTGTTTTATAGTTTTCCTTGTATAGATCTTTCACTTCTTTGGGTAAATAG
ATTCCTAGGTATTTTACTTTTATTAATTATTAATTAATTTATTTTTTTTTTCGAGACAGGGTCTAACTCTGTAAATCCAGGCTGGAGTACAGTG
GTACGATCTCGGCCCACTGCAGCCTCTGCCTCCTGGGTTCATACCGATTCTCATGTCTCAGCCTCTAGAGTAGCTACGACACAGGTGCGTCCCA
CCACACCCAGCTAATTTTTTGTATTTTTAATAGAGACAGGATTTCGTCATGTTGGCCAGGCTGGTCTTGAACTCCTGGCCTTGAGTGATCTGCC
TGCCTCAACCTCCCAAAGTGCTGGGATTACAGGCATGAGCCACTGTGCCTGGCTGGTATTTTATATTCTTTGTAGCATCGCAAATGGGATTCCT
TTCTTGATTTCTTTCTCAGGTTGTTCACTGTTGGTGTATATAAATGCTACTGATTTTTATATGTTGATTTGTATCCTGTAATATTACTGAGTTC
CTTCATCAGTTCTAACAGTTGTTTGGTGGAGTCTTTAACGTTTTTTTTTTTTTTTTTTGGTCATTTCAACTTTTATTTTACTTTTAGCGGGGTA
CATGTGCAGGTTTGTTACCTGGCTATATTTCATGATGCTGAGGTTTAGGGTATGATGGATCCCATCACCTAGGTACTGAGCATAGTACCCAATA
GGTACTTTTTCAACCTTTCCCCCCTCCCTTCCTCCCCACTCTAGGAGTCCCCAGTGTCTATTGTTGCCATCTTTATCTCCATCAGTACCCATTG
TACCCACTTATAAATATCCACTTAAGTGAGAACATGCAGTATTTGCTTTTCTCTTCCTCCATTAAATTAGCTTAGGATAATGGCCTGACTCTTT
AAGCTTTTCTAAGTGTAAGATCATGTTGTCCGTGAACAAGGTTAAGATGACTTCTTCCTTTCCAATTTGGATGCCCTTCATTTCTTTGTCTGGC
CTAATTCCTCCGGTCCCTCGGACACTTTCCATAGGCTCCTATTATAGCTGTTACCATACTGTCCTATAATTGTTTCAGTGTCTGCCTTTGTCCA
CCCTGCTGTCAGAGCCCTGTGATCATGCTCGGTTTATCTCCAGCCCCATCCCTGCCTGTGTAGGTTTCTTGAGCTGTCCTTCAGTGCCTTGTGA
GACCAGGGTCCTCCTGCAGATGCCACTTTGATCGAAAGTGCTGTGTTTTCCCTTCTGCAGGGCCTGATGTACCACGATGCCTCTCGCTGGGGTC
TTACGCTACAGACTTATGTGCAGCTCACCATGCTCGACAQGCATACTCGTCCTCAGCTAGGTTTCAGATGCTCAGTTTCAGCCTTCTTAGAAGT
TTTCTTCAGACTTGGGCTATGTGATTGCCAGGAAGGGAAACTTTACAAGGAAGCCAGGCTAGGCCTTCAGTGCTGTGCAGGCCTCTCTGTGTGG
GGCCAAGGTCTCTGGCTTCTGTGGTTCTCTTCTGACCTGCCTCTAGTGCCCCCACCTGCAAACCTCAGCCAGCCAGGTGGTGCCCCTGCCACCA
TTCTGAGCTCACATCTTTATGACCTGACCACTGCTGCGCTTAATGCCGTTTATACTCAGTTCTTCTCAAGTGTGCTCCCTGGACCAGCAGCGGA
AGCATCACCTGGAAACTTGTTAGAATGCACATTTTCAGCTGGGTGTGGTGGATCCCACCTGTAATCCCAGAAACTTTGGGAGGCTGAGGCATGC
GGATCACCTGAGGTCAGGAGTTCAAGACCAGCCTGGCCAACATGGTGAAACCCCATCTCTACTAAAAAATACAAAAATTAGTCTGGCGTGGTGG
TATGTGTGTGCCTATAATCCCAGCCACTTGGGAGGCTGAGGCAGGAGAATGGCTTGAACCCAGGAGGCGGAGGTTGCAGTGAGCTGAGATCATA
CCACTGCACTCCAGCCTGGGTGACAGAGTGAGACTCTGTCTCAAAAAAAAAAAAAAAGAAAGAAATGCAAATTTTCTAGTCACATCCCAGACCT
GCTGAATTAGAAATTCTAGGGATGAGGCCCAGCAATCTGTGTTTTATCAAGCCCTCCAGGTGACTCGAATGCATGCTTTGTTTGTTTTCATATT
TGAGAACCACTTATTTAACCTTCATGGGGTCTGGCTCTCTAGTTCAAATTCTTGAGACAAAGAATCTGATTGGTTCAGCTTTGGTCAGTGTCCA
GCCCTGCTTCAATCAGGTGTTGGGGACAGGACCCCAAGGCACAAACATGGCTGCTTAGGCCTATTCGATCAGTGAGGATGCATCTAGAGACAGA
GTCTCTTAGAAGAAAGGGGGCTGTGGAGGTCCTGATCAGCACCTATGTTTCAAAGCTGTAAGCACAACCTATGATGCCAGCTTTAAGGCTCTGC
ATGAAGGAGACAGACTGTCCCTACAGCCAGTTAACACTGGCACAGCTGCTGGGCTGGACAGTTCGGTCCCAGTCTGGGTACCTGCAGCAATAGC
TACCATTCTTCTGTAAGTCTCTCTTTTAAAATTGAAAGATGTGAGTGGGCCGTTTTTGGTGAATAAGAATTTCCATCTCCCCAAATATCTGTCT
AAATTGCACAAATCCACAAATCGAAAGATCTGAGGTTAGTGCATTTTGCCTTTGCTAATTTGCTTTTCCTGAGCAGGCACTCAATTGCAAACCT
AAGTTGTATCTAATGATATTTGAATAGGAAGGGATATAAATGCACTCCTCTATTTAAGGAAATCTACCTCAGGAGGCAGAGAGAGATGGACAGA
CCAGGAAAGATGAGCAGAAGGAGACCAGAGGGATGAATGGGGAGCTAGGAAGTAAGGAAAGAGAGGATGGAAGAATGGAAAGGAAGATGGATGG
GCAGAGGATGGATGGACAGAGGGACAGCAGGGAGAGGCAGGAAGTGCCTGGGTTATGGCTTTGAATCTGCCTTGGATTTGTTGGCCCAGGTCCC
ATGGGTGCTGTGGGCCATGGCCAAGTGAGAGTAGTGTTAGTGTGCCTGGCATCAAGGGTCAGGGCGCCTCTTGCTTCCCAGAGGAACGCTGGAC
AAAGGGCAAGGTCGTCTCCAGAGGGTTTGAGCATCCTGGCAGAAAGGGGCACTGTCAGGCTGTCTTCCTCCCTCTTGGGCATCGTTCTTACCAG
TTTCCTTGGGCAGAGCCCCCAGAACGTCACCCCCAACCCGACCCTCTTGGGGCTGTACCTAATGCATGTGGTCCCTCTGCTTAAGCAAAGTCAC
CCTATTTAGGTCCCTGGTAGTCACCACATGTTGCCTGAAGTCGACGCTTTGGATGGTTTCTCCAGGGCTTGACCGTGTTCTAGTTGAGACTGAA
CCTGCCATCAAAGAGGCAGCTGCTGATGAGCCCTCAGCCTCGGCATTGCTGGGCCATGCATGAAGCTTTGGCGTGTGGGGCACGTCAGGGTGGA
AGGGGGACACAGCCTGAGCCTGGTGGCACATGTGGCTTCTCCTCCCGGCAGGGGAGTGAGGAGGTCCTCCTGCTTCACTCTCTCTGCCGCCTTG
ATTCTCATATTCAGCAAAGTCCCCAGGCAGGGGGAGTAACAGACATTTCTCAAGGCCTCCTGCCTGTCTCCTTTTCCCCTGAGTTAGTGATTCT
CTTTTTGTTTTCCTTTAGGTGTCATCTGTACGGTTGATGGAGAGGTCGATTCACAGCGCAAGATACATTTTTGTAGAAAACCTGTATAGAAGGT
ACTGTAGTTTGAATAGTTGATAATTTATTAAACCACTAATTTTTCAAAATGAAATAGAAACTTGTTTATTCGATTGACAGATATGGAGTACCCG
CTGTTGTATGAGTTATCCATTGCCATAGGAATGCGGTGTAACAAACAGCCACGAATCCTCATGGCAGACAGCTATCTGCATTCATTGCCCAGTC
AGCCAGGGTGGTCACCAGGCAGCTCTGCTTACCTTGGCTAGGCTCAATGAGATGTCTGGGGATCAGCCGATGTAGGATAGCCTTAGCAAGGGTG
ACTGGAGGTGGCTCATCTCTTTTCCTCTTGCCTGTCACTCTCCTTCTCGGACCAGCACGAGCCCACGTGTCCACTTCTCACGGTGACAAAAAGG
GTAGAAGCAACAGCAGAGATGCAAGGACATATTTTTCACGCCTCTGCTCCAAGTTTGCTAGCATTCCATTGGCCAAAGCAGATCACATGGTCAC
ATGAGCCCAGGGTGGAAGGTGGGAGGGTCCAGTGAGTTACACAGCATGGTACATAGGCTAGGGAAAGAGGTGGAGAGTTGGGCGAGTCAGACGC
ACAGTGTGCCTCGCATTTGTTGTGTTTTTCACTAAAAGCTTCCCTCATGAGAGGAGACTCTGTGATGTATACCTAGTTAGGGGCTTCTGCTGCC
CTGTCAGTGCCAAGGGCTCAGGCATGGGGCCCTCCATCCCTGTGCTCAGAGACTGCCGATTTCAAGGGGTCTTGGAAATGGGTTGCAGACCCCA
CCTGTCCCTGCCGCGAGCTTGGCATACTGCTGTCCTTCCCTCGCAGAGCTGTTCGGATCTCTACGCTAGAGGCCCTTCCTCCCACTCTCATCTG
CAGCTGTCTTCCTAATGCCACCCTGTCTCCCAGCCCTCCCCGACCACGCTGTCTAGATAGGGCAAAGCTCCTTGTTAGTCTTTGTTTCGTTTTT
GGTTTTGGTTTTTGTTTTTTGAGGCAGGGTCTGGCTCTATCACCCAGCTGGAGTACGGGGGGAACGATCTCAGCTCACTGCAACCTCCGTCTCT
CAGGCTCAAGCCATCGTCCTGCCTCAGCCTCCCGAGTAGCTGGGACTACAAGAGAACACCACCACACCTCGCTATTTTTTTTGTATTTTTAGTA
GAGGCAGGATTTCGTCATATTGCCCAGGTTGGTCTTGAACTCCTGGGCTCAAGTGATCCTCCTGCCTTCGCCTCCCATAGTGCTGGGATTATAG
GTGTGAGCCACTGTGCCTCGTCCCCTTGTTATTCTTAAGGACTACTTTCTGTTAGTTTTCTTTGTAGTATTTAAGGCAATCATATGAAATTGTT
TAACCAATTATGAGCTACAAAAATGGCAGTTTTGTGTGGTTCAACTTAGTATGTGTCTAATTGTTTATTGCCACCCACCCCCCCGGACCATAAG
CTCCTAAGGGCAGGCACCAAGTTTGTTGTCCTTGCCTAGGGTGGACCCAGCACAGAGCACGCTCCTCGTTGATACCTGTTAGCTATTGTTGGAT
GAGGGGACCTGTGGCTGTGCTTTGGTCTCCAGCCCAACTTGTTCCCCAGGCTCTGGTCCCCCACTGTTTTGAACCTTTCATTTGAGGGGCCACT
AAAAAGGCTTCTCCTAGGAGCCCTGAGCTGCCATGGATCATGCCTTTGAGCCTGTGTCACCCCCCAAAATGAGAGCCTCTGCCCCAAATCCACC
CAGAGCATCAGAGCAATGCTGTGGGCTCAGGGGCTGGCAGCCTAGGTGAGTCCTGGCCGTGGCTTTGCCCCCTGGCCTCAGACTTTTCTTGTGG
GCTGCAGCTTCCCCTCTGACCAGGTGGCATTCCTGACCTTACGGCCCCATTTTCACCTGACAACCTGGGTTTCCAAATGTCCACTGCTAGGTTT
ATCCAGCCCTCTGCGGTCCTCAGCTCCTGCTCCTTAGCACCTCAGCCAGAGAAAGGACAGGCAGGAGAGAGGAGAGCGAGAGCAGAAGGGAGCC
TCTGTTATGTTTGTGTACTGCTCTGATTAGAACTGTAACCCGAGGCGGAGGTTGCAATGAGCCGAGATTGCGCCACTGCACTCCAGCCTGGGCA
ACAGAGCGAGACTCCGTCTCAAAAAAAGAACTGTAGCCTGAGGAACAGATCTTGGCAGTGGGGTGGGATTACCTATGAACCTCGCAGAGTGGGG
CTGTGTCTGTCTTTTAATCACATTCAGCTTGGCCTGTTCTGTGTGGGGTCAGTGGCTCTTGTTGCTTTTTTTATTTTTGAGATGGGCTTGTGCT
CTGTCACCCAGACTGTAGTGCAGTGCCATGATCATGGCTCACTGCGGCCTCGATGTCCTGGGCTCAGAGATCCTCCTACCTCAGCCTCCTGTAA
TAGCTGGACCTACAGCACATGTCACCACTTCTGGCTAATTTATTTCTTATTTTTTGTACAGACAGGGTCTCCCTGTGTTCCCCAGGCTGGTCTC
AAACTCCTGGGCTCAAGCGATCCTCCTGCCTCAGCTTCCCAAAGTACTGGGATTAAAGGCATGAGCCTGATTACAGCTCTGCTCGGCCTCGTGG
CTCTTTTTCAAGCAAGTAATCTGGATCGAATGACCAGAGGTTTAGGGGGAGAGGATAGAGTGTGGCATTTGCTGGGCCTGGGTTCTATCCTGGC
TCTGAAGTTTGCTCTGTTTGTGACCAAGACCAAGTTTCTAATTTCTCTGAGCCCATCTCTGATCTCTCATTCCTCTTGTCCATCTCTGAAAGAG
CCTTTGGACCTGCCACCTCCTTCGTGTCTTAGGACCCTTTTGTGGGTCCTTGCCACCTTGGTCTTTATTTAAATTTGTGAGTTCCCCAATCCTA
CCCCCAAACCTGTAGGCCACCCAGCGCTAGGTAGATTTCCCCAGGAGCCATTTGTCTTTGTTTCGCCGGTCACACTTCCTGCTGATGGCCATGG
GCTTTGGTAACTCACGCCCATGGTCCTGCATCACCACATTTCTGATGCGTCAGTTCTGTATCTCCCAATCTCTGTGGTTACGGCATTGGTCTAG
ATGACATGGGCCTTGCCTGGAGCTGTTCTGTGGGTAGTTTAGGAGAGTATATGTAGCTTTTATTTTTTTAGCTCTTTTCCTGTCCTGATGACTT
TATATTTATGTCTCTCCCCTGGCCCTCCCAGAATGCATGGCCTCTGTGGTTAGGATTTCTGTGGGACAATGAACCACAGAAGAAACTTACATGT
CCTTTCTGTTCTTGGGATCTAATTGTTTTAGTTCATATGGCTTTCGGGGGCTCAGATTCCCCTGAAAAGACCTTGTTGGAACCTTGAGATCCAT
CACTGGGATCTCTTGAAGCCAAAGGCTCTCAGTGGGCATGTGGCCTCGGGCACTCCAGAGGCTACTGGGAGCACTGTGGCTGCCTGGAGGGCCA
GGCTATCTACCATGGTCTCCAGAGAGATGAGAAAAGGCGGTGTTCCTCAGACCCTTTCATCGGATTCCTCTGAAGGCAGAGGAAAGCTCCCCAC
AGCACTGCTTCCTCATCCTCCCAGACCCTGTGGTCCAAAGCAGCCACCTGCCAACAACCCAGAAGTTTCTTGGAGTCTCCTATTTTAACCTAGA
ATTCATTGGGATTTTGCATTTTCCTCCATAATATGTTCTTAAGTTTGTATCTAAAAATAATAATTTACATAACTTATCATTGAGGACAATGGAT
GTTCCTGTATTAAACACCATGCTTTGCATGTGGCTTGGAGTTCCCACTCCCTCAGCCACATACCCCAGAGTCCCTAAGTCCAGGAGGCAGAGAA
CCAAGGGGTAGCGGCATTCAAAACACCTTCCCAGGGCAAGTGATTCACTTGTGAACTGCACCTGCTTATGTGTTCCCTGGAAACGGGGGCATCT
GCTCTCATGGTTAAGGAACAGGGCAGGGACCCATGGACAGGAGCTGCATTTACTGTCTGGTTGTTGACCCTATTGGGCAGATAAGGAACTGAGA
AAGGATTACAAAGCCAGTGCTCCTTCCTGATCGGGCAGGAACTAACCACAGGAGGGGAAGGTGTTCCGAACCCTGCTGTGTGGGGGCAAGCAGC
AAATGAGGAAGTGGCAGGAGGCATCTAGATTTCTCTCATCAAGGCCAAAGGCTTCAGGGCCCACTGGGTTCCCCAAAGCTGAGAATCCTGAGGT
ACTAGCCCAAGGGGGAGACTCTGCCTCTTTCCAGACAGGCTTTACCCTAAGCTTCTCCCACAACCACCTGTGCATCTTGTTTACAGGCAGATTC
CACTTCAGTAGCACTGAGGTGGGGCCTGAGAGGCCACATTTCTAGCAGGTGCCCAGGTAAGACCATACTCCTACTGGTCGGGGATCAAACTTTG
AGGAATACGGGCCTCAGAAGAAGGTGGCAGGGCCCGGGTGTAGTGGCTTATACTTGTAATCCCAGCACTTTGGGAGAAGTTTGGGAAGGATCAC
TTGAAGCCAGGAGTTCGAGACCAGCCTGGGCAACAAAGTAAGACTCCCATCTCTACAAAAAATTTAAAAAATTAGCTGGGCCTGGTGGTGCACA
TCTGTAGTCCCAGCTACTTAGGAGGCTGAGGCAGGAGGATTACTTGAGCCCAGGAGGTCAGGGCTGCAGTGAGCTATGAGCATACCACTGCACT
CCAGCCCAAGTGACACAGTGGGACTTGTCTCAAAAAATAAAAATAAAAAAAGCTGGTAGCCAGGTGGTCCACAGGGCGCCCTCCATCCCAATTG
CCACGACCCTTTTCCCCTGGACTTCTGACGGTAGGTGGGCTTCCTTGGGGCTTCACTGGACCTTTGGGGGTCATAAGTACTAAGAGCCTCGGCC
TGAGGGTTGTCTTTGGGACCATGGTGAAAAGTTCTGCGCAGTGCAGCATTTCCTGTTTCCTGCACCTGGCCTGTGGTTTCTTAATTTCACATTT
GTTGCTTCATATTTGGGTTGCTGGGGCTGTGTTGTGTTATCTTTGTTTTTAAGGTTTCTGGACTTATTCCTAGGCCAAGAATCAGGCTAGCCAT
AGGGCAAAGTAAAAAGTATTTTTAGCCAGAGCCACAGAAGGGATAAAGGGAAGGAAGACTAGAGCTTGGCCACTCTCCGGACAACTCCAGCTGC
CCTCGATGGAGCGGTCATCCACAACAAAGTATTACTGAGAAAGAACATGTGGGGTTTTTTTGTTTTTTGTTTTTTGTTTTTTTGATTTTGAGAC
AGAATCTTGCTCTGTTGCTCAGGCTGCATCACTCAGGCGATCTCAGCTACTGCATACCTCTGCTTCCCAGATTCAAGCAATTCTCCTGCCTCAG
CCTCCCGAGTAGCTGGGATTACACGCGCCCACCACCACGCCTGGCTCATTTTTGTATTTTTAGTAGAGACAGGGTTTTACCATGTTGGCCAGGC
CGGTCTCGAACTCCTGACCTCAAGTGATCTGCCTGCCTCAGCCTCCCAAAGTGTTGGGATTATGAGCGTGAGCCACCATGCCTGGCCAAAGTAG
ATGTTTTTAGAGGTTTCGGCTCCTTCAAAATGCAGATTACTGTCATTGTCACTACCTATGCAAAATGTAGCATAGAACTGACTTTGGCTGGGTC
CTTTGCCCATACCTAGAATAAGGTGTCTTGGTTCCCACCTGCAGGGAGTTCAGCCAGGTACTGGGAACCACACGGTGGCATGTGGGGCGTCAGC
TCCTGCCTGGGAGCTCGTGTTTCCTCATTTCCTGGGATGCTCTAGGAAAAGGCTTCCCAAAATGCCATGATGGGGAGCCCTTCACAAGGTGGGA
GGGCACATTACCATTGCCCCTTCAGTGCTTGGGTTGATCTTTTTCTCCCTCTCAGAAGCTCTTGCAACCTTGGTTCAGGATCTGTGGGGGCCTA
GACAGAAGGCTATATGGCAGGCTCAGGTCCCCAGAAAAGCCCACATATTGGAATCCTGCATCTCCTCGAAGTAAAATTTCTTGAAGGGTGTTCT
TGCTCTTTGGGCTGTGAACAAATGAAGAGCTCGCCACGGAAAAGACCCACCTCTTCTGGCACTGTCTACCCTGGCGAGGTTGGGGTGTGCAGAA
TGTAACTGCACTTATGCCACCAGGGATTCGAGAGGGCTGTGTTAATTGCTGGAGAGGAAGATTCCAGTTACACAGTATACCTTAAGACGGGAAC
TTCTTTTTCTTTTTTTTGAGACGGAGTTTTGCTGTTATTGCCCAGGCTGGAGTGCAGTGGTGCAATCTCGGCTCACTGCAGCCTCCACCTCCCG
GGTTCAAGCGATTCTCCTGCCTCAGCCTCCCGAGTAGCTGGGATTAGTCATGTGCCACAACGCCCGGCTAATTTTGTATTTTTAGTATAGATGG
GGTTTCTCCATGGTGGTCAGGCTAGTCTCGAACTCCCGACCTCAGGTGATCTGCCTGCCTCAGCCTGCCAAAGTGCTGGGATTACAGGCGTTAG
CCATTGCGTCTGGCCAAAGACAGCAACGTGTAAGGGGCAGCAGCTGGCTGGCATGAAAAGCTGAAGGTGGTGAGCAAGATTCATGTAGCTAAAA
GAGGCCACACAGGTGACTGTGTGCGCCGAGTAATGGGAAGCAAAGGTTTTACAAGATTGCCTGGTCGTCCTTTTCTAAGAACAGAAGTGAGGGC
GTGGAGTGGGACCCAGCTCGGGAAGTGGCATGCTGACTCACCTGTGGCTTGTGGTTGGGGACACTGAGTAAGACCTGGTGTTTGGAACCACAGG
CTGGGCCTCCTCCCCTGCTGATTGGCCCAGGGGCTTAAGTTCTTCCCAGCTCCTGTCTAGACTGAAACCTCCTGGTGTGGGTCATGCGCCTAAG
AGCTGTGGCCTTCCTGGAGCTCAGGCTAGAGAGACACTGGACTTAATCCGAGTCAGCTGACAGACTGGCGTGGGCGGGTGGTGCAATGGAGAGC
ATTTGGGTTTGGGGGTAGGGAGAGCCAGGCTTGGACCCCTGCTCAGACAGAGTTGGCCTTCACTTCTCTGATCCTAAAGGTTTCTTCTATAACT
GGGACTGAAGCCAGCCTCACAAGGTCTTGTGAAAACAAAAGGAAATAACGTATACAAGGGAGCTCTTCCATTCCATTCCGCACAGACTGGGGGG
CTCTCTTGGCCTCAGGGAAGGATGCAAGAAATTGTACTGATGTAACAGCAGGATTCATGTGGATCAAGACCTTGGTTTTGCCCCCTTGGGGGTA
GGGCAAGGGTGAGACCCCCATGCCCACTGTTGAGTTGTGTGCTTGGATTTGCCTAGCTTGGATTTGCTTGGTATTGCTCTCCGTGCATTCTGTA
GAAATAAAAGGCAGTGGCTTGTCTTGTCGGTGGTGTGGGGAGCCCCATGCTTGAGACAGACACAGGAGGAGCTGGGCAGAGTTCCTAGGAGAAA
TACAGTTAGAGCAGCGCCCACTCTGCCCCATGTCCCTCGGAGTCATCGAGATCACGCTTCTGTTTCCTCACTCAGCTCAGACACTGGTCATTGA
GTCCTCCTGGATCCCCCAGCCTCTTCTGGCACATGGTTCTACTCATGGAAGGGTTTTCAATAGGTCTGGCCTACTCACCCTGCCCATGGGAGGC
CACCCGACCAAGGACCCCTTCCAAGAGCATTGGGAAGGGAGAGGCTGCCCCTCAGTCTGCACCAACCCTGTGGGGGAAGCCTTTTGTTTGGCTG
TGATGGGGGTGGGAGTGGGAGGCCCCTGTGACTACCTGGAGCCGATTCCCAGGGGAGCTGTGGCAGGGGCAGAGCCACCGGAGTCTGTCAGTCC
CAGAGTCCCCCACAGGTCTGACCCCCTCCCCATCTCTCCATGTACAGACCCCCGTGTACTGTGACTGTTTTGCAGTGGTGGTTGGTTTGGTTTT
AGTTAACACTGCTTCATTTGTTCTGAGCTGTGGTTCAGTTCCATGATCATATCTGTGGGCACCCTCCAAGCTCTGGGATTGGACAGAGTCTCCC
TCGAGCTGTGCAGACGCATGAGGTACTCCGGTGGCTAGTCCAGCCTTGGACACTTGGGAGACTGTCCCATGGGCAGCTCAGCTTCTCCCCAGTT
GCTGCTAACTGGCCCCACCCCTTTGGTGCCACCTCTTCTGTGCCCTCAAGCCATGAGTTTGCTGGAGTAGGCGAGAAGCTAATCAGCAGCTTCC
TCATTGCACATCCTCATTTTCTTAGAGTCAATTTTGTTCTCAGTCTTCTTTTTCCAGAAAAGGAAAATAAGAGATAGTGGTTTGGTTTCTTGAA
CATCAAATATTCGGAGCTGAACTAACTGAAACCCAACTCAGGGTAGCCTGAACAATGAGGTGTCATCAACTCCCAACAGATGGCTTATTTGGTG
CCTCTGGCCTGGTTTCTCTACATTTTGCTACTGTGCATCCTGTTCGTGTCCTCATGCAGTTCTCTCAGGGTGACAATGTAGTCGTGGCAGCATT
GGGCTTCTCACTCGCTGGTTGGAGTAAGGGCAGGTGTCTTGCTAGTGGCTCTTCCCTAAGCGTGCGGAAGTATCTTTTCTGTAAGTCCCTGCAA
ACCTCCCTCACGCCTGCCTAMCCAAATTGGGCCCCTCGCTGGGGGAGGCCCTGCACTGATTCACTTAGCTTGGCTTCCTGAACGCATTGACTGG
AACTAGGGGAGACGACTTCCTTTAGACCGATTGTGCCTACCCTAAAGCTTGGAAGCTTGGGGTGGGGTGAGGTTTCCCTGAAGCCCTTGGGTCT
GTGGATGGACCCTGAATAAAGAATGGGCTACTTTTAAGGAGGTAAGCGGAGAGGAGGCAGGGAGGCAGCCTGTGGACACAAAGTTGTCACCTGA
ACTTGTAGTGCCTGAGTTTTGTTGCCTGGGAGTCCCCTCTGCAATGCTGTAGGATTTCCTTCCCACTCCTCCAGCCTCCCACCCAGCTTCTCCA
GGTTTTCTGGGAGTCCTGGCCGTCCCACAGGTTGGTCTGCCCTGGCCTCTGTGCTGCAGTCTGCTCAGGCCCCGCTGCTGTTCTCCGTCCACTC
TCCCGCTCCTCTGTCAATACTCTTCTCTTCTGAGGACATGGGGGTGGTCTCAGAGACTAGGGGAGAAATGTCCCTCTCCAGTTGGTGCCATGCC
TTGCTGTTAGGGCCCCAAGACAGGGCTACTTGTGCCCTTGGCCTCCCAGAGTGCCTGCCTCACTCTTCCAGCCTCTTACTTCCTTCCATGCTCA
TCCCCTCGTGGGACTGCAGTCAGCCCCTCCCTGCCCCCTCCCACTGAGAGCCTCCCATTGCACATGGCTCAAAATACGGCAACTCCCCCATGGC
CAGTCTTGCCGAACCCAGCTCTGAGCGGGACCCACATGGAGCCACTAGTGGAATGGAGGATGTTAAAGGGAGAATTCCTCTGCTAGGCCTGTGA
GGGTTGTCTGCCTGCTGATGGGCTTGTGCCCTCCAGCTGTGTCCATTCCTGCTCTCTCTTTCCTGTTCATTTCCTCCAAGGGCACAGGAAACCC
ACAGGAATACCAGGAATAGATGCCAGATTTCTCCTTCACCCTGGCTCGTTCTTCCTTCCAAACTTTCTTGCCTTTTTTTCTTTCTTTTAAGTTA
ACATTTAAAATGTGTAGTAGGCCGGGCGCAGTGGCTCATGCCTGTAATCCCAGCACTTTGGGAGGCCGAGGCGGGTGGATCATTTGAGGTCAGG
AGTTCGAGACCAGCCTGGCCAACATAGTGAAACCCCGTGTCTACTAAAAATACAAAAATTAGCCAGGCATGGTGGCGCACACCTGTAGTCCCAG
CTACTCAGGAGGCTGAGGCAGGAGAATCGCTTGAACCTAGGAGGCGGAGATTGCTGTGAGCTGAGATCACGCCACTGCACTCCAGCCTGGGCGA
CAGAGTGAAACTCTGTCTTAAAAAAATAAAAAATAGACCATCCTGGCTAACACGGTGAAACCCTGTCTCTACTAAAAATACAAAAAATTAGCCC
GGCGTGGTGGCGGGTGCCTGTAGTCCCAGCTACTCGGGAGGCTGAGGCAGGAGAATGGCGTGAACCTGGGGGGCGGAGCTTGCAGTGAGCCAAG
ATCACACTACTGCACTCCAGCCTGGGCGACAGAGCGACACTACGTCTCAAAAAATAAAAAAAAAAAATAAATAAAAACTAAAATATGTAGTAAT
GCTCCCCAACTCCCACTGCTGATTTGAGAAGTAATGTGTTGTTAAAATTTGGAAAATACAAAAAGGTATAAAGAAAAAAAGAAAAGTCTCATGT
AGTCCTGCAGCTTGAGAAAAGCACTTTTTACATTTTGATATTTTTCTTTCCCACCTTTCCAAGATGCATTGGTGAATACTTTTGGAAATGTGGT
TGGGATATACACAGTTTTAGATCCTGTTGCTTTCACTGAACATTAGATTTGAAATTTTTCCATGCCATTAAATATTATTTTACAATATCATCCT
TCAGTTACTGCGTGAATTTTCTGTTATATAGATTTACCAAGATTTAGTTTTTTATTGGTTTAAACAGTGCCGCGGTGAGCATCATGATTATTTT
CACAAAATAAATTTTTTTGTTTTGTTTGAGTCAGGGGTCTCACTCTGTTGCCCAGGCTGGAGTGCAGTGGCATGATCATGACCCACTACAGCCT
TAAACCCCTCGGCTCAAGTGATCCACCTGCCTCAGTTTCCCGAGTAGCTAGGACCATAGGCATGCGCCACCACCCCTAGTTAATTTTTTTGTAG
TTTTTGTAGAGATGGGGGTCTTTCCATGTTGCCCAGGCAGATCTTGAACTTCTGGCCTCAAGTGATCCTCCCACCTCACCCTCCCAAAGTGCTG
GGATTACAGGCATAAGCCACCACCCTGGTCCACAAAATAAATTTCTAGAAGTGAAATTGGTTTGCTGATTCATTGCCTAACCTGAGCACTGTCT
CTGTTCTCAGGGTACAAGCTTTAAAGTCCCTTTCTCTGCTTAGAGTTCCAATCCCAAGTGAATTCTCCCATCACTCCGTGCCATGGCCCTTGCA
GCATTCTGCCATAAGCCGCTCCCGGCAGCACGAGGTCGGGAATGCTTAGGGTCCTTGTAAACTGCATGTCCAGTATTGCACGGATCACACTGTG
CCCTGGTACCCTTGGTGACTCCTTTCATTGAGAGCCGTCTCAAGATCCTTTTGGGGGAATTGCATAGCCCAGAAGTTTTCTCTTAGGTGAATAA
GCCCTTACAACTCTCATTGCAGTGGGAAGATGCCAGAAGTGGACTATGTAGTTCTGTCGGAATGGTTTGACTGGATCTTGAGGAACATGGACGT
GTCTGTTGATTTGATAGGTGAGATGCACCCCTCCCACCTCCCTCTCTTGTCTCTCTCCTGGGTCCCTTGAGGATGTGCTTGGCTGAGCCCCAAC
CCTTGGGGGCAGTGGGTGAGGCACTTGCCCTTGGCAGTTCCTTCCCCATGGGAGTTCAGCTTTCTCCCTGAGGGAAAGAAAAATTCGGGACTTC
TGGTCTCTCATGGAGAAGAGAACCTGGCCTTTGTTCTTTAAACTTCCCTCCCTGGCTCAGCTACTTTCAGACCCAATCCACTGTGATCTGATGG
GTTTTTCTAGTTTGCAAAGGAACAGGAAGGACAGAGCCTGAACATTCACTGAGACCTGCTGGGTGTGAGGCCTGTTTTGAGCTCTGTCTATGAA
CAGAATCCCATTCAGCCTCAAAACGACCCCACGGGGCCGCTGACACTGAAAGAGAATGAAAGTCGAGGCGGAGGGTCAGTGGTCAAGCCAAGAG
CTGGCCCTCCCTGCTTCCTGCTCCAGCTGTGCAGACCTTCCTCCCGCCTTTGCCTGTGTGCCTGCTTTGCTTCCAAGCCATGAGAAGAGTCCTG
AGAGCCACGTATTCTTTTAACCTCAGTTTACCTTCGGACCAATCCTGAGACTTGTTACCAGAGGTTAAAGAAGAGATGCAGGGAAGAGGAGAAG
GTCATTCCGCTGGTAAGAGGCCTCTTTGACTTGGTTAAAGACAAACTGGGAAACCACCTCTGTCCAACCCGGCTTCCTCTCCCGGCCCCACCCC
CATGAGATCATTGTGCCCTTGTTTGCAGAGAGAGAACAGGAACCAAGTGTATCAGAGGGTGAACTCTGACTTCCTGTTTGGCCAGAGACCCACG
TGGATGTCCAGATCTGCTTGGCTTCCTGTGGTCGCTGACTCACAGTTTGGCAACCCTCCTGCTTGGAGGCGTTCCCCTCCCCTCCCCACCTCCC
CCTCCCCATCTTGGCAGCACCAGGGCTTGTCTGTTCTGCCTCCTGAAGATTGCCTGGCCTTGTGCTCTCTGTGTCCTCCCTAGAATGCGAGTTC
CAGGAGCGCAGGACCCAGCCCTCTTGTTCACTGCTGCATCCCTAGTGCTTACAACAGTGCCCGGCACGGAAACGGTGCTCATCCTTAGTGGTGT
TTGCCCACTGGAGAGATGCCATGCCCTTCTGAGTTCTGCTCAGGCCACACTGACTCTCATGGGGACTCTGCCAGTATAGGCCCAAGCTGTGCAT
CTCGCCCTGGCCCTTCCCTCCTTGCATCTCCCTTCTAAATCTGGCCTCCAGGCTGCCGCCCGGCTGATATTTCCAATACTCATCACCACTCGTG
CTCGCCCTGGCCCTTCCCTCCTTGCATCTCCCTTCAAAATCTGGCCTCCAGGCTGCCGCCCGGCTGATATTTCCAATACTCATCACCACTCGTG
CAATTTCCCAGCCCAGAACCTTTCAGTGCCTTGCTGCTGGCTAGAATGCAGTCCCACTTTGTAATACGGCTTATGACCCGGCCCCAATCTGCCT
CTCTGGCGTTATCATCCTCCATTCCCTACTTTCTATGCTCTGGCTATAAGGAACTAGTTGTGGCCACACACAAACAACCACATACACAGTGGAG
CATTGTAACCCCCCCCAAACCCACCCCCTGCCTTTCTGTGATCATGGCCCTTAGGACAGCATACTGAAACTATTTGTTTATACCTTTGTTCCCC
ATCCCTCACTAATCTGAGCTTTTTAAGATTGGCTCTTATTCCCTCCGTGTCCTCTGCATGTGCCTTGGGCCCTCGTGCCTAGTAGTTGCTCAGT
TAGTATTGAACTGAATGTCCCATGTGAGAAGCTGCCACTGGAGGGAGACAGAGGCTGGGCAAGCATTCAGTGGGGTGTCAGGGGCTCTGAGCTC
AGGATAGGCTGGACTGGGGGCCCTGGGAAGCCTATCCAACTCCTGAAATCCTGCTCAGCCTTGTTTTTCCTTGGTGCCAGCACGATGCATTCCT
GCCACGAGGGCCCAGGCGTCACTCTGGGCAGCTCCTTTGAAATCTTGGAGACAAGAATGCTAGGAAGATGGAATGTGGTGGAATGGGGCCAGGC
TGGACCATGCTGTGATGCGCACAGCAGCTCTGTGCAGTGACCCAGATGCTCCCCAAGCCTGGGGCCGTCCAAGCCGTGATTCCAAGCCATTGTC
TTAAGGGTTTGACCAGGTCCATGGGACACATCTGGCTCCTATTGCCAAGGGAGAGCTGGGCAGGAGATGTAAAGGCTGCTGCAGAGTTGACACG
CGAGCCTCTGATGGCGAGTGGAATCTGTGTGAGGAGCCATCCCACTCTGTGCCTGCCAGAGCACGAGTATCTGCTCTGCCTGGAATGCAAAAGC
CCCATGGCACAGGAGGGCCTGTGCCCCTTTTCCCTTGGGCTCCGCTGCATCAGGCTTTCTGAAGTTGGTGGTCTTTATAGTCTGGAGGGTCTAT
AGGTTACGAGTTGTTGAGGCGTAGAAGGCAAAATGGGTGAGGGTCACAGTCCTCTTGGTGGCAAGACAGAGCGGAGGGTTTAGAGGCTGCCCAG
GGCTGGGCCCCTGCCTGAAGGAACTGAGGCCCTGCTGCAAAAGTGGCAGTAAATGGGAGAAGCCAGGTGTGGGTCCTGCCTTTTTTTTTTTTTT
TTTTAGTATTTATTGATCATTCTTGGGTGTTTCTCGGAGAGGGGGATTTGGCAGGGTCATAGGACAATAGTGGAGGGAAGGTCAGCAGATAAAC
ATGTGAACAAAGGTCTCTGGTTTTCCTAGGCAGAGGGCCCTGCCGCCTTCCGCAGTGTTTGTGTCCCTGGGTACTTGAGATTAGGGTATGGTGA
TGACTCTTAATGAGTTATGCTACCTTCAAGCATCTGTTTAACAAAGCACATGTTGCATCGCCCTTAATCCATTTAACCCTTAGTGACACAGCAC
ACGTTTCAGAGAGCACGGCGTTGGGGGTAAGGTTATAGACTAACAGCATCCCAAGGCAGAAGAATTTTTCTTAGTACAGAACAAATGGAGTTCT
CCTATGTCTACTTCTTTCTACACAGACACAGTAACAATCTCATCTTTCTTTTCCCCACATTTCCCCCTTTTCTAATAGACATAACCGCCATCGT
CATCATGGCCCGTTCTCATGAGCTATTGGGTACACCTCCCAGACGGGGTGGTGGCCGGGCAGAGGGGCTCCTAACTTCCAAAGACTGAGCGGCC
GGGCAGAGGGGTCCTCACATCCTAGACGATGGGCGGCAGGCAGAGACACTCCTCACTTCCTAGACGGGGTGCAAAGCCGGGCAGAGGCTGCAAT
CTCGGCACTTTGGGAGGCCAAGGCAGGCGGCTGGGAGGTGGAGGTTGTAGCGAGCCGAGATCACGCCACTGCACTCCAGCCTGGGCAACATTGA
GCACTGACTGAACCAGACTCCGTCTGCAATCCCGCCACCTCGGGAGGCCGAGGCTCGCGGATCACTCGCGGTTAGGAGCTAAAGACCAGCCCGG
CCAACACAGCGAAACCCCGTCTGCACCAAAAAATACGAAAACCAGTCAGGCATGGCGGTGCGCGCCTGCAATCCCAGGCACTTGGCAGGCTGAG
GCAGGAGAATCAGGCAGGGAGGTTGCAGTGAGTCGAGTTGGCGGCAGTACAGTCCAGCCTCGGCTGGGCATCAGAGGGAAACCGTGCAAAGGGG
AGAGGGAGAGGGGGAGGGGGAGGGGGTCCTGCCTTTTGCCTTGGCTTTGATTCAGGCGCCAGGGGAAGGGCCAGTGTTTGTGCCGACGAACCCC
CAGTGGAGCAGAGAGGGTGGCTGGTGACACTTGTGCTGTTTTGCTCAACCTGGCCACCCAGTAATGTGGCTGCGTCTGCCGCTCTCAACTTGAG
CCAGGTTTGCTCTTGCAGGGTTCCTTTGTCTGAGTCACTGCCCATGGTCATTGACTACTTTGACCCCCTCTGCTTGACACCCTTGGTAGGTGGG
GTCTGCTCTGTCCACTCCCGACAGACTGCTTGTGTTTCCCTGGCAGGAATACCTGGAAGCAATTCACCATCTCCATGGGAGTGGCTCATCTAAA
GGCAGCCTTTTCCCCATGGCAGGCCCTGTTCTGGTAAGTAAGACTCCCTTACAGGGTACGAGACTGTTCTAGAAAGAGGAGTGACCCGGGGAAT
GTCAGCCACCTTGCAGACAGGGGAGGGCACAGTCCTTTAGAGTTTGACAACTTAGAAGAAGGAAGGTGGAAGGCTGGTGCTCTCTCCTCCCAGT
GCCTGTTTCTGCGCTGAGTCTCAGAGTGAGTTGGCCACACCCGAGGCTAAGGCAGTCTGTGCCAGTGCCATCAACCTGGCAGTTGTCACTGATC
CAGCATCTTCAGCGAAGACTCTAGACCCGGGTCTCAGTTTTCACCATTTGGGATAGTAGTTCCTCTGATGTGACCTTCCTCCTTCCGTGGAAGA
CACAGAGCCTCATTTCACCTTTGTTTGGTGACTCAGGTCATCAGAAGGAATGTCATTGTCTGGTCTGGGCTGTCACACAGTGATGCCCTTAGGA
ATGCTAAAGTGTGTGACTGTCTGCCCTGCCCACTAAATGTCTCTGCGTTCCTGTGTTTACTTTTTACAGTAAATCCTCCTTTCTCTTGCTCCCA
TGTGTCATTTCTGACTGATATTGATGTGTCTGTCCCGTCAGCATTTCCTTACTTCCCCATCTCCTTGTTTTCCAGTTTGCTGTTTCCAGATTTC
TTTACTCAGACAAATAAGCAGTGGCCCAGATGCTCCCAAGAAATGCGGAGTCTGGGGTCCCTCCGAGTCTTGATTGGAGGGAACCTAAGATGGT
TACATATACAACATGGGATTGGCTGTGAGGCAGGGTTGTGCGCAAGCTTTGGAGCATGGCTATACGAGAATTGTTTGATGGGATGTGAGGAAGG
GCTGTGCATGAGCTTTTGTGCGTGGCCATAGGAATATCTGTTTGGGCTCAAACACTTCTGCTTATGGCTCTTGCAGGCAGTGAGGTTGCCGGAA
AGTGAGATATTACTGTAGTAATTTTTTGTTTGTTTGTTTTTTGAGACAGAGCCTCACTCTGTTGCCCAGACTGGAATGCAGTGACGCAATCTCG
CTCGCTGCAACCTCTGCCTCCTGGGTTCAATGATTCTCTTGCCTCAGCCTCCTGAATAGCTGGGACTACAGGCGCATGCAACAATAACCTGGAT
AATTTTTTATATTTTTTCGTAGAGATGGGATTTTGCCACGTTGGCCAAGCTGGTCTCAAACTCCTGGCCTCAAGTGATCTCCTGCCTCGGCCTC
CCAAATTCTGGGATCACAGGCGTGAGCCACTGCACCCGGCCTACTGTAGTAGATTTTTAAATATAGTACAGCTTATTTTTCTCCCTCATTATGC
AAAAAAAGGAGGGTAGAAAGTGATGAGGGAAAAAAACAAATCATTCATGAGCTTACAGGGTCTCACTGTGTTGCCCAGGCTGGTCTCAAACTCC
TGGGCTCGTGTAATCTTCAGGTCTCAGCCTCCCAAAGTGCTTGGATAATAGACATGAGCCACCATACCTAGCTCTTGTAGTACATTCTTAAGTG
AAAACCTCATTGGAAATGTAGATTGCCCTAGAGCTGAAAGCGATTTGGCTCTAACCTTCCTTTTTATCTGCCTGCAACCTTCTGTGCCCTTCCC
TGCCCCCTGCTGCCTGCTTCCATCTGTCTGTCTCCAGCTGTGAAACGAGGATGCTGCTGAGGTCAGTGCAGCCTTGTGACCCATGTGTCTAATT
TCCAGGTGATTGAGGCTGACCACCACATGGAGAGGATGTTAGAACTCTTTGAACAAAATCGGGATCGAATATTAACTCCAGAGAATCGGAAGCA
TTGCCCATAGGAGGCAAAAGGTCTATGGCTCATGTCTGAAAAATGCCTGCTGCTGCCAAGTTAGCTATTGGGAGCAATCTGGAAAAACTTGCTC
CCAGGAGGGCTTTGTGTCTGGCCAGCTTGATTTTCCTAATGGTCTCATCTCCTTTGCTAGTGTCTTTGTCATGCCTCTCTGCCCCTCGTGGGTA
ATGACAACGGGACCAATGGGTTTGCCAAGCCCTTTGCTGTTCGCAGCCTAAAACATTCCCCCGGTGCCTCTCCCATGQCTTTGTGCTGCTGAGT
CGCTCTCATGAGCCCTTAGGGACAGCACCTGTTGTGTCCCTGACACCACGCTGGACCTGTGTACCAAATCGTCTAAGCCTTCATTAGGAGGCCG
AGGTAGGAGTCTTATATCCCAGGTGAGGAATTTGAAGCTCAGAAAGGTTGAGGGGCTCCCCAGAGGTCACACAGCCTGTGTGCAGTGGAGCTGG
CACCATTCAGACTTTCAGCCGACTCAGCAACTTTCCCTTGCCCTGGGCTGCCTCCTCCTGAGAGCTGTTCCCCACCGCCCTCCCTCTTCCGCTT
GGAGGCTCTCATGTCTCTTTGGCGAGAGCTGAGTGTGCGGAGCTGATACATTTTCCCTATAATATTGAGCAGTTCCCAAGGACAGTCAGCATTT
CTAGACTTCCACAAAATATGCTGCATTTGGCTGGAGCCCGGTGTTCAGTGGTTTCCCTGCCCGAGCTCGCTGCAGCCCCATCTACCAAAATCTT
CATGTGGACATTGAGATTCACATGCTGGCTCCTGAAGGGTCCTCAGTCTCCTTGGTGATTAGGTCCTGCTTGTAAGTGCTGCCAGCTCCATGTC
AGGGAAGTCGCTTTTGGTGCCTGGCTGGTTTGCCCAGAGCCAAGCTGGGGCAAGGGGCAGCCAGCCCTGGCTTCCAAGGCTCCCGTACTGTCTG
TGTCCTTGTATAAGGAGCTTTGCTCTTGGAATTACTGAAAGTCTGTGGCCCAAGAGAGAGACACAAGTGGCCTTAAGTCTTTTTGAAGTGTTAT
TTCATCCAGGGAAATCCCTCGAGCCATAGAGCCTGAATCATCTTTGTTGGCTCAGATAAATACCTTAGCTTCACTCAGCTGGACTGCATTGAAG
GCGAGGCTGCCCCTTGGATCAAGCAGAAAACAAGAGAAAGAAAGAACGTTCCCTTTGGGGATAGTCTGGAAAGTTGGGATTTGCAAATAAAGGC
TCTGGAAGCATTGCTGGTCCTGAAGCTTTGGAGGTGGGCAGAGAGAGCTTCAAGAAGACTAGATGCAAACCCTGGAAAGGATTAAGGCTCAACT
CTGGAGAAACAGGCCACAGCCTCTCAGAGCAGCTGTTGGCTGTTAAATAGAGGTAGCAAGGCCGCTCCCAGGCCCCTGTGAGTGTGGGCACTGT
GCATGCAATGCTCCGACTCTGCAGAGGTGCCAAGTGCCCCTGCTGGGCCAGTCCCAGAGAGTTAGGAAGTCAAGGCCTGCAACTCCTGGTTCTT
CCTGTTTGGACCAGTTCTTGTGCCATTGGCAGGATGAGAGGCAGCAGCCAGCCGGGAGCTGTGTCTAGCAGCACCTGTAGCCCACGTGCTGCTA
ATTAGCTGGAAAACTGGCGAAGGCAGAACCTTTGCTACCAGGAATCTTGACATGTGGGGTCTGTCTTTGAGAATTTGTAAATGAACAGTCCAAT
ATTTCCTCTCGGCTCATTTTGCACATCCATTTTGGGGAAATGTGATTTCTCTCTCTTTTTTTTTTTTTTTTTTTTGCCTAAGGCACAATCTCAA
GAGGTCCTGACACCACCTACCCATCATTTTTTTCTTGCTCTGTGATACCCAATACTCCTTCACCTTACCCCTGTTGTTGATTTTCTAAGTGCTT
CCTAGGCCAGTGATTTTAGCTTCTGCCAGCTGCTTTTGCCAGTAGATTAACGTGTTTTTATTTTTCATAACTCCGTGTTTCCTACGTCGAGTGT
ATGGGTCTAAGAGAGCCTGCTGTCCTCCCTGCCTTCCACCTTGGAGAGGAGGCTGGACGCATCAGCAGTGGCCAGGGCAGGTCGCAAAATCTCC
CAGCCTAGAGACCACACCTCAACGGCTGAAGCCAGCTTGCACAAGGGCTGCTCTCCCTCTGCGGCAGGCACAGCTGGTGGGGGAAAGGGGTCAC
AGAGCAGTCATAGACACCATGGACCAGGGCAGGAGAAGGGCAGATGGCACATGGGCACAACAGGGCCTTGTCCTTAGAGCACTGGGGGGTCATG
GCTGGCACGGGCATGGCAGGGGCTGGCATCCCTGTAGAGCCAGAGGCGCCACCGAGGGCAGTGACATTCCAGATATGTTGGGCTCACCTGATCC
TTGCTGTGAGACTGGAGTTCCATGGGGACATGATGTCAGTACACCGCAGAGCTGCTCAGCTGCTCTACCTCTCGCTCACTTTTTTGTTGCACAT
ATACATTTTCTTTCAATTAGCATTTATTTCAGCTTTTATTTAAGCTTTTTGACAGTACATGTAAAATATATGATTATAACCATTTAAAAATACC
TTATGTACCTGGTTTTTTTTGGAAACTAGATAGAAATATATTTATCTTTTACATAAAAGAAGTGTGTAGTGGGGTGGTCCAGGGCTTTGTGGTG
GCTTAGTGGCCATCGGGGTCCCAGGCTCTTCCCACCTTTCTCTTTTGGGTCCACCTCTTGGCTCCTGGCTTCCTTCCTCTGGGGCCTGACTGTC
CAGGATGGCAGCTGGAGCTCCTGCTCTGGGCACGGTTGGATCAGAGCCCACTGCTCCCCATCCACTCTTTTGATCCAGATGCTGGTAATGTCCC
TTTCCAAGGCATAACTAAGATAAGCTGGAAGGTTCTCACGAGGCTTTGCTAGAGGCCCTGGGAGGTGGGGGGAAAGGCAAGAGGGCAGTGCCCA
CCCATAGACCGGGTCACATGACCTGGCATCAGCGCCGTGGGGTCCTTTGGGCTTCACCTCCCTCTCCCCTCTGCCCCGACCTCATCCCACCCTC
ATCCTCACCCTCACCATTCCCATCCCGTACCGTAATGTCCCTTGCAAGGCCTAACTCTGTGAGGAATGAAACCACCTCATCCTTGTTCCAATAA
CATGAGTGACCGAATTTACAACGAGTGAATCTGGACCTCTGGAAACATTACCAAACCTTGTTTTTACTTTTCACTTTCTCTTTCTGCCCCTTTC
ATTTCCGTAGGAGCCCTTTACCTAGATGAGAAGTGTCCCCCCGCCTGGGGAATATATCAGTCAGAACAATCTTCCTGCAGACATGCACCATTAG
ACCCGAGTGACGGTGGTGCCATTTAAACCTCAGAGCAGGTAAAAGGTGGTCCTGAAACCTGTCTACCCACAGGGTGCTATGGAATCTGAATCAC
TTCTTTTTTCCTAGAGCCCTGGGGTGGGGAGCTCCCTCAAGTGTTCACATGTGTGTGGAATGAGGAACACCCATCTCCTTGGCCCTCTCCACCC
TGAAGAGTTAGTTATTAAAATAATTGGCAAGCTCTTGCAAATGTCAGTCATCCATTGTTCAGAATGGAATAGCAATAATACATCCCTGGCTGCC
CTGGGCTTGGCCAGGATTACTCACTGAAGGCCTCAGGGTTACTGGCACACACTTTCTTTTCCTAATAATCCCATCCCCTCAGCTTTCCTAAGGC
TAGAGTGAATTTCGTGTTCCTTTAGTTTACATAAGATGGTGAACTTGGCAAAAGCTATCATTAAACAGAAGCTAAGAGAAAGCCTATGTCGTGG
AATCCAGATCGGTATTGCCATTCACTGCTGTCCACAGAAGCTGTCTTGATAATTTCTTTCTGTGTCTTTTCTTTTTTTTCTTTAAGACTGTTGT
GTGGTCAAATAAACCATTTTCCATTCACATGGTGGAGTACTGTGCAGCTATACAGAAGAATGAGGAAGATCTCTCTGAATGGTTATGAAGTAAT
GTCTAGGACATAAAGTTATGTGAAAAATGCAATGCCCAAACGAGTGTCTATAGTATGCTACCCTTTATATTAGAAAGAAGAGAGGCCAGGCGTG
GTAGCTCACGCCTGTAATCCCAGCACTTTGGGAGGTGGGTGGATCACCTGAGGTCAGGAGTTCAAGACCAGCCTGCAACATGGGGGAACCCCAT
CTCTACCAAAAATACAAAAAAGTTAGCCAGGCGTGGTGGTGGGCACCTGTAATCCCAACTATTTGAGAGGCTGAGGCAAGAGAATCACTTGAAC
CCAGGAGTTGGAGGCTGCAGTGAGCCGAGACTGCGCCATTGCACTCCAGTCTGGGCAGCAAGAATGAAACTCCATCTCGAAAAATAAAAAGAAA
ACCGATAGAAGAAAATACACAGATGCAAAGGAAATATAGGAAGGACGCCCAGAGACAAAATAGGTTGGTGGGTAAAGGCTAGAAAGAAGGGAAG
GATGAGACTGGGCTACAGGGATGAGAAGGGAATGACACTTCTTTCAAATATCTTTTTATTTTATTTATTTATTTTTTTGAGACAGGGTCTCGCC
CTGTCACCCAGGCTGGAGTGCAGTGGTGTGATCTTGGCTCACTGCAAGCTCCACCTCCCAGGCTCAAGTGATTCTCGTGCCTCAGCCTCCTGAG
TAGCTGGGATTACAGCTGTGTGCCACTACGCCTGGCTAATAGTAGAGACAGGGTTTCCCAAGTTTGGCCTGGCTGCTCTCAACTGATATGCCCA
CCTTGGTCTCCCAAAGTACTGGGATTAGTGAACCGCTCCACCCAGCCTGGTAATCTCTTTTTCTATACTCACTGTTACATACTGTCATGTAGCA
ATGTTTCACATACCCTTCACATACTGCCAAAATAAATAAGAGCAACCAGGATGTAGGGAAAACAGAAAACAAAATTACAGATGAACTCCACCAT
ACCGCAGGTGAGTAACATAACCATACTGAAGGGGGCAGGAAAGAACAGAACTAACAAATAACTGTGGAAAACAGTATCTTTACTGGATATGGTA
AGAGTAAAGGCAAAAATTTCTGTACATAAAAGTTGTAGTATAGTTATTAAAAATGTTTCTCGACCATGCGTGGTGGCTCACACCTGTGATCCCA
GCACTTTGGGAGGCCAGGATGGGCGGATCACCTGAGGTCAGGAGTTAGAGACCAGCCTGGCCAACATGGTGAAACCCTGTCTCTACTAAAAATA
CAAAAATTAGCCGGGCGTGGTGGTGCACGCCTGTAATCCCAGCTATGTCGGAAGGCTGAGAATTGCTTGAACCCAGGAGGCAGAGGTTGCAATG
GGCAAAAAAAAATGTTTCTCACAGGAGTATAGGTTAGTGATTCTGAAACTATGTATACTAAAGTTGAACAAACAAGTAAATAGATTGTAGACTA
TGAGGGCTGGATTTCTTACTGTTAGTGAAAGAGGTTACAAATGATAGGGGTCTAGAATAAACCCCGTGGTGCTGGGTTAGAATAGGAGGTGTCA
GTCTAAACTCATGATTTTAAAATTTTAGGCTCTGGTGGCTCACTCTTGTAATCCCAGCACTTTGGGAGGCCAAGGCAGGTGAATAGCTTGAGCC
CAGGAGTTAGAGATCAGCCTGGGCAATGTGGCAAAACCCCATCTCTACAAAAAATACAAAAATTAGCCAGGTGTGATGGTGTGCGCCTGTAGTC
CCACCTACTTCGGACGCTGAGATGTGAGaTAGATCGAGTCCAGGGGTTCTAGGCTGAAGAGAGCTCTGATTGTACCATATGCACTCCAGCCTGG
GTAACAAAGGAAGACCCTGTCTCTAAATAAATAATATAATTATATATAQATGGATAAAGATAAATATATAGATGTGTGTGTCTGTCTGTGTGTG
TGTTTATGTGTGCTTAGTATACATACTTATGTTTCCTAGCTCTGTCCTGAGTGTGTCTAGAGCAAATGGCACCCAGTAACAGTGAGCACACCCG
GTACCCAGTTCTTGGTCTCCAAACATCATTCTCCTGCAAAAGGAACCAGGTCTCCTAGGAGATGTGGTTGATTCCAGGGATGCCACAGGGGAAT
GACAGGATGACCCTGGAATATCTTGTGGTGCTAGAAAAGAGTGCAGGGATGTGGGGAAATGATGGAGCCATGTCTTAGGGAATTGAGGAGCTTC
CCTGAAGTTCCTAACGGCCAAAGCTGGAACAGTTTGAGGAACAAAATAAATTATGTTAGTATTGGATTCTAACACATAGACTAAAATAAATATC
CACGAATCCATGCTGATATAAACAGTTGAAGATAAGTACAGGGAGAGATTAAAGGGAGTGCTTCCTTATGGTAGATTTCCAGTTAATACACACA
AAAGGCAAGAGGGAAACAGAGACTTGCCATTACATAAACACCACAGTTAAAAAATCACAGGCCAGGTGCGGTGGCTCACGCCTGTAATCCCAGC
ACTTTGGGAGGCCGAGGCAGGCGGATCACAAGGTCAGGAGATCGAAACCATCCTGGCTAACACGGTGAAACCCTGTCTCTACTAAAAATACAAA
AAATTAGCTGGGCATGGTGGCGGGCGCCTGTAGTCCCAGCTACTCTGGAGGCTGAGGCAGGATAATGGCGTGAACACAGGAGGCGGAGCTTGCA
GTCAGCCGAGATCGTGCCACTGCACTCCAGCCTAGGTGACAGAGGGAGACTCCGTCTAGGGAAAAAAAAAAAAAAAAAAAAAATAAATATATAT
ATATATATATATATATAAAATCACAGACAAGATTTACCTGTTGATACTAAAATTAGTGGACAGAAGTTTGAGGAAAAACAAGATTTGCATAGTT
TCTATTTCCCCTAATATACTTATCAAGTAAAAAGGGAAAGAAATTAACTAATTTGACAGTGGAGATGGAAACCCCATAGAAACCAGCTTAATAA
GTGATTAAGCTAATAAGACGTACTGACATCATGAAGCCTTTACTAAGATGGACTGAGGACAGCATCTTTTTTTTTTTTTTTTTTTTTTTTGAGA
CAGGGTCTCACTCTGTCACCCAGGCTGGAATGCAGTGGCGCAATCACAGCTCACTGCAGCCTCGACCTCCTGGCCTCAGGTGATCCTCCTCAGC
TTCCCCGGGAGCTGGGACTACACGTCTGTGCCACCAGCCTGGCTAATTTTTTTTTTTTTTTTTTTTTTTTTTTGAGACGGAGTCTCGCTCTGTC
ACCCAGGCTGGAGTGCGTGGCCGGATCTCGCCTCACTGCATAAGCTCCGCCTCCCGGGTTCACGCCATTCTCCTGCCTCACCCTCCCAGTAGCT
GGGACTACAGGCGCCCGCCACTACGCCCGGCTAATGTTTTTGTATTTTTAGTAGAGACGGGGTTTCACCGTTTTAGCCGGGATGGTCTCGATCT
CCTGACCTCGTGATCCGCCCGCCTCCGCCTCCCAAAGTGCTQGGATTACAGGCGTGAGCCACCGCGCCCCCCAATTTTTTGTATTTTTTGTACA
ATAGGGCTTTTGTCATGTTGCCCAGGCTGGACTTGACTCCTGAGCTCAAAGTGATCTGCCTGCCTTGGCCTCTGAAAGTGCTGGGATTACAGTG
TGAGCCATCATGCCTGGCAGCATCATTTGTTTTTTTGGTGTGGTATCCTTGCCAGAAAATGCATACTTGACTCCAGTATTAAGAAGCACCAGAC
AAACCCAAATGGAGGGACATTCAACAAAATAACTGATTGGAAAAAACTCTTTAAAAGCATCAAGATCGTGTTAGACAAGGAAAAAACAAGAACT
ATTACAGACTGGAGGAGACAAAGGAAAATATACAAATGCAATGTGGGATCCTGGATGGGCTCCTGGAATAGAGAAAGGATTTTAATAGAACACT
AGGAAACTTAAATAATATGTGTAGTATCGTTAATAACATTGTATCAATATTAATTTCCTGTTCTTGATGATTATATTATGGTTACATAAGATGT
CAACTTCAGTGCAATGTGGGATGCTGTATATGCTCCTGGAATAGAGAAAGGATATTAATGGAACACTGGGGAAACTTAAATAAGGTTTGTAGTA
TAGTTAAGAACATTGTATCAATATTAATTTCCTGTTCTTGATCATTATACTATGGTTACGTAAGATGTCAACTTTAGGAGAAGCAGGGCCAGGA
GTGGAAAGGAGTTCTTTGTACTATTTTGCAACTTTTCTCTCCATCTAAAATTAGTTAGAATAACGCCCTTCATGGGAAATAAAGGCAGAGCACA
ACACTGTAAATATTACAATCCCAAATGTTTAATATATGCGTATATAGAAAAAAGACTGGGAGGAATTGCAGGAATGTGGTGACATTGGGTATCG
CTGAATGGTGGAAATTATGGTAAGGTTTGCPTTCGTTTTCATATTCATCTGTACTTTCTAAGTTTTCTACTCATTTCATGGTTTAATATGGTGG
ATCCTTGGAAATAACGGTGAATGAGACAAGATGAAGTTTATCTCTCATGGAGCTTATCTTCTAATGGGGGGAAATGGAAAATGAATACATGAAT
TAAAATCTTTGTGCAGAAAATTAAGCTGATGTGATAGATGGTCAGAGGGGGCCTCTCTGAGAAGGTGACATTTAAGGGGAGATGTGAATAACAA
GGAAGAGAACATGGCAGGGTAGGGTAGGGAGACAGAGCAGAGGGAACAGTCTGTGCAGAGGCTGGGAATAGGGCCAGGCTCAGCATGTTCCAGA
ACCTTGCAGAAGCCAGGGTGGCTCTGGCTACAGCGGACAATGGGGAAGGGACCTGAGATGAGTTCAGAGGGAAAGTGAGGGGCTGAGCCTGGGA
CTTGATATGGCCTCGGGCACCCCTGGAGGGAACTGAACACATGAGAATCATGATCAAATGTAGGTGGTTTTTTTTTGTTTTGTTTTGTTTTTTT
TAACATTTTCTATTTTATTTTATTTTTTAAATATATAGAGACGGGGTCTTTCTGTGTTGCCCAGGCTGGTCCCAAACTCCTGGACTCAAGCAGT
CCTCCCACCTCAGCTTTCCAAAGTGCTGGAATTACAGGCATGAGCCACCACGCACAGCCCTAATGTAGGTTTAACGGAATCCTCCAGCATTCGG
GTGGAGCACAGGCTGCAGAAGGCTGGCAGCCTCCAGGGACGTGAGTGAGAGAGGATGGTGAATTTGGTTACTGTGGAAGGAGGGGGGAAGGGGT
TGGATTCAGACTCTGTTGTGAAAGAGAGGAGCTAGGAATTGGATGAAGGATGTGATAGAGAGAGAGAGCGGGGGGAGGAGGAAAGAGAGAGGAG
AGAGACATATATGTTGGTCAGGGTGATGTCTGCATTGCATTGGAGTGAGTGAGTGCATGGTGCACTCTATTTACCCAGATGGGCGATGCGGGAG
CGGCAGGCTTAGTGGAGAGAGGAAAAGTTCTGTTTTGGTTTGGAATAAGCATGCTTATTATGTTAATGGTCAGAAAAGAATGAATAAAAAAAAA
ATAATTAGCTCGCCTTTCCTGCCCCTGGATCCTTGGCCTAAGTTGCTCTCCCAGGTTCCTTTGCTCCAGGTCAGGTGCCCTGGAAAGATATGCC
TTGGAGTGGCTGTCATGGTTCCAAGCTGACCCAACCTCTTGCCTAATCC1CCTCACATTGCTCACCTGCTCTGCCTCCAGATCAGCCTGTTCTT
TTTTTTTTCATTTATTTATTTTAACAGACACCGTCTCACTCTGTCACCCAGGCTGGAGTGCAGTCGTGTAGATAACGGCTCACTCCAGCCTTGA
GCTCCTGGCCTCAATCAGTCCTCCCATCTCAGCCTCCTGAGTAGCTGGGACTACATGGCTGGCTATTTTTATTTTTTTTTTAATATTATACTTT
AGTTTTAGGGTACATGTGCACAACGTCCAGGTTAGTTACATATGTATACATATGCCATCTTGGTGTCCTGCACCCATTAACTCGTCATTTAAAC
ATTAGGTATATCTCCCAATGCTATCCTTCCCCCCTCCCCCCACCCCACAACAGGCCCCAGTGTGTGATGTTCCCGTTCCTGTGTCAATGTGTTC
TCATTGTTCAGTTCCCACCTATGAGTGAGAACATGTGGTGTTTGGTTTTTTCTCCTTGCGATAGTTTGCTGAGAATGATGGTTTCCGGCTTCAT
CCATGTCCCTACAAAGGACATGAACTCGTCATTTTTTATGGCTGCATAGTGTTCCATGGTGTGTATGTGCCACATTTTCTTAATCCAGTCTATC
ATTGTTGGACATTTGGCTTGGTTCCAAGTCTTTGCTATTGTGAATAATGCTGCAATAAACATACATGTGCATGTGTCTTTATAGCAGCATGATT
TATAATCCTTTGGGTATATATCCAGTAATGGGATTGCTGGGTCAAATGGTATTTCTAGTTCTAGATCCCTGAGGAATCGCCACACTGACTACCA
CAGCGGTTGAACTTGTTTACAGTCCCACCAACAGTGTAAGAAGTGTTCCTATTTCTCCACATCCTCTCCAGACCTGTTGTTTCCGGACTTTTTA
ATGATCACCATTCTAACTGCTGTGAGATGGTATCTCATTGTGGTTTTGATTTGGATCTCTCTGATGGCCAGTGATGATGAGCATTTTTTTCATG
TGTCTTTTGGCTGCATAAATGTCTTCTTTCGAGAAGTGTCTATTATATCCTTTGCCCACTTTTTGATGGGGTTGTTTGTTTTTTTTCTTGTAAA
TTTGTTTGAGTTCATTGTAGATTCTGGATATTAGCCCTTTGTCAGATAAGTAGATTGCAAAAATTTTCTCCCATTCTGTAGGTTGTCTGTTCAC
TCTGATGGTAGTTTCTTTTGCTGTGCAGAAGCTCTTTAGTTTAATGAGATCCCGTTTGTCAATTTTGGCTTTGGTTGCCATTGCTTTTGGTGTT
TTAGACATGaGTCCTTGCCCATGCCTATGTCCTGAATGGTATTGCCTAGGTTTTCTTCTAGTGTTTTTATGGTTTTAGGTCTAAGATTTTAAGT
CTTTAATCCATCTTGAATTAATTTTTGTATAAGGTGTAAGGAAGGGATCCAGTTTCAGCTTTCTACATATGGCTAGCCAGTTTTCCCAGCACCA
TTTATTAAATAGGGAATCCTTTCCCCATTTCCTGTTTTTATCAGGTTTGTCAAGATCAGATGGTTATAGATATGCGGCAATATTTCTGAGGGGC
TCTGCTCTGTTCCGTTGGTCTATATCTCTGTTTTGGTACCAGTACCATGCTG
HUMAN SEQUENCE-mRNA
GCCAAGTTATGGGTGCGTTCTGCCAGCGTCCTAGCAGTGATAAAGAACAGGAAAAAGAGAAAAAATCAGTGATCTGTGTCGAGGGCAATATTGC
AGGTGGGAAGACGACATGCCTGGAATTCTTCTCCAACGCGACAGACGTCGAGGTGTTAACGGAGCCTGTGTCCAAGTGGAGAAATGTCCGTGGC
CACAATCCTCTGGGCCTGATGTACCACGATGCCTCTCGCTGGGGTCTTACGCTACAGACTTATGTGCAGCTAACCATGCTGGACACGCATACTC
GTCCTCAGGTGTCATCTGTACGGTTGATGGAGAGGTCGATTCACAGCGCAAGATACATTTTTGTAGAAAACCTGTATAGAAGTGGGAAGATGCC
AGAAGTGCACTATGTAGTTCTGTCGGAATCCTTTGACTCCATCTTGAGCGGACATCGACGTGTCTCTTGATTTGATAGTTTACCTTCGGACAAT
CCTGAGACTTGTTACCAGAGGTTAAAGAAGAGATGCAGGGAAGAGGAGAAGGTCATTCCGCTGGAATACCTGGAAGCAATTCACCATCTCCATG
AGGAGTGGCTCATCAAGGCAGCCTTTTCCCCATGGCAGCCCCTGTTCTGGTGATTGAGGCTGACCACAAACATCCAGAGGATGTTAGAACTCTT
TGAACAAAATCGGGATCGAATATTAACTCCAGAGAATCGGAAGCATTGCCCATAGGAGGCAAAAGGTCTATGGCTCATGTCTGAAAAATGCCTG
CTGCTGCCAAGTTAGCTATTGGAGCAATCTGGAAAAAACTTGCTCCCAGGAGGGCTTTGTGTCTGGCCAGCTTGATTTTCCTAATGGTCTCATC
TCCTTTGCTAGTGTCTTTGTCATGCGTCTCTGGCCCTCGTGGGTAAATGACAAACGGGACCAATGGGTTTGCCAAGCCCTTTGCTGTTCGCAGC
CCTCACATTCCCCCGGTGCCTCTCCCATGGCTTTGTGCTGCTGAGTCGCTCTCATGAAGCCCTTAGGGGAGAGCACCTGTTGTGTGCCTGACAC
CACGCTGGAGCTGTGTACCAATCGTCTCAGCCTTCATTAGGAGGCCGAGGTAGGAGTCTTATATCCCAGGTGAGGAATTTGAAGCTCAGAAAGG
TTGAGGGGCTCCCCAGAGGTCACACAGCCTGTGTGCAGTQGAGCTGGAACGATTCAGACTTTCAGCCGACTCAGAAACTTTCCCTTGCCCTGGG
CTGCCTCCTCCTGAGAGCTGTTCCCCACCGCCCTGCCTCTTCCGGTTGGAGGCTCTQATGTCTCTTTGGGGAGAGCTGGCAGTGTGCGGAGCTG
ATAACATTTTCCCAATATTGAGCAGTTCCCAAGGACAGTCAGCATTTCTAGACTTCCACAAAATTATGCTGCATTTGGCTGGAGCCCGGTGTTC
AGTGGTTTCCCTGCCCGAGGTCGCTGCAGCCCCATCTACCACATCTTCATGTGGAAATTGAGATTCACATGCTGGCTCCTGAAAAGTGCTCAGT
CTCCTTGGTGATTAAGGTCCTGCTTGACTGCTGCCAACTCCATGTCAGGGAAAGTCGCTTTTGGTGCCTGGCTGGTTTGCCCAGAGCCAAGCTG
GGGCAAGGGGCAGCCAGCCCTGGCTTCCAAGGCTCCCGTACTGTCTGTGTCCTTGTATAAGGAGCTTTGCTCTTGGAATTACTGAAAGTCTGTG
GCCCTAAGAGAGAGACACAAGTGGCCTTAAGTCTTTTTGAAGTGTTATTTCATCCAGGGAAATGCCTCGAGCCATAGAGCCTGAAATCATCTTT
GTTGGCTCAGAAAATACCTTAGCTTCACTCAGCTGGACTGCATTGAAGGCGAGGCTGCCCCTTGGATCAAGCAGAAAACAAGAGAAAGAAAGAA
CGTTCCCTTTGGGGATAGTCTGGAAAGTTGGGATTTGCAAATAAAGGCTCTGGAAGCATTAAAAAAAAAAAAAAAAAAAA
HUMAN SEQUENCE-CODING
ATGGGTGCGTTCTGCCAGCGTCGTAGCAGTGATAAAGAACAGGAAAAAGAGAAAAAATCAGTGATCTGTGTCGAGGGCAATATTGCAGGTGGGA
AGACGACATGCCTGGAATTCTTCTCCAACGCGACAGACGTCGAGGTGTTAACGGAGCCTGTGTCCAAGTGGAGAAATGTCCGTGGCCACAATCC
TCTGGGCCTGATGTACCACGATGCCTCTCGCTGGCGTCTTACGCTACAGACTTATCTGCAGCTCACCATGCTGGACACGCATACTCGTCCTGAG
GTGTCATCTGTACGGTTGATGGAGAGGTCGATTCACAGCGCAAGATACATTTTTGTAGAAAACCTGTATAGAAGTGGGAAGATGCCAGAAGTGG
ACTATGTAGTTCTGTCGGAATGGTTTGACTGGATCTTGAGGAACATGGACGTGTCTGTTGATTTGATAGTTTACCTTCGGACCAATCCTGAGAC
TTGTTACCAGAGGTTAAAGAAGAGATGCAGGGAAGAGGAGAAGGTCATTCCGCTGGAATACCTGGAAGCAATTCACCATCTCCATGAGGAGTGG
CTCATCAAAGGCAGCCTTTTCCCCATGGCAGCCCCTGTTCTGGTGATTGAGGCTGACCACCACATGGAGAGGATGTTAGAACTCTTTGAACAAA
ATCGGGATCGAATATTAACTCCAGAGAATCGGAAGCATTGCCCATAG

[0298] TABLE 35
MOUSE NOMENCLATURE
ICSGNM Nupr1
Celera mCG22384
HUMAN NOMENCLATURE
HGNC N/A
Celera hCG1745228
MOUSE SEQUENCE—GENOMIC
TTGCAGATCTAGACATTGACATCTGGTCTTCTCAAAGCTAAGGGCAGGCATGCTCTGGCCTTGAACTCCATGCTCAGCCCTAGTCCTTCCTTTC
TTCTTCTTCTTCTGTTAAATGGGGTTTGATTTCTTTGTCTGATAAATGAGGCTGGGAGGGAGGGAGAGATGATGACTCAGCAGTTCAGAGCTCT
TACTCTTTCAGAGGACCCAGGTTTGATTCCAGCACCCACCTGGTGGTTCACAATTGCCCACAATTCCAGGGTGCACATGATACAGACAAAATTC
AAGCAAAATAGTCACACACACACATAAAATACACTAAATAAATCTTTTCTGAAAAGACTAAAAGGGAATTGTGATTGCTGGTCTCTTGGGCTAC
AGCCAGGAGCTGCATGTTTATTCTGTATTCTTCTAGTTTGTTGCTCTATTTGCCCACTATTTTTTTAGTTACCAGGAAAAATGTATGATAGCTA
TATTTTGCTGAAATATGTATAACGCATAGGCACTTGTTCTTAAATTTCATGCAAATAGTATTACCTGGTTGGTTGGTTGATTTGAGAAAGCCTT
GATAATCATGTAGCCCACTCTGGCCTGGAACTTGCTATGTAGCTGTTGTGTCTGTCATTGTCCCAGCCAAGCAACTGCAGTCTTGAGGAGTTCA
ACTGTACCCCCTTGCAAGAAAAAAAAAAGTATCCTAAGCTGGGCTTTCTTGACTCTGTACACCTCCTCATGAAGGAGTGAGGAGGCTTGTGAGA
CCCTCACCTGTTCCTCCAGGTAATAAAACCCCAGTCCCTGTTGTTTGCAAGTCTGCCTTAATTGCACATGACCTGGGAGGAGGCTAGAGTATAT
AGGCCAGGGGAGCACAGAGGAAGGGGAGCCCATCCTTGTGGGATGGGTAGGAGAAGGAGCATCTATGCCCAGGTAGGTAACACCCCTTACCTCT
CTGCTCTGGAAGGAAGCCCAAGAAATGCATTGTTTCCCTAGGGTGAGCTTTGGCAGAACCACGCCTTCCTTTGATGGGGGACCTTAAAAGAAGA
AGTAGACTTTGTGTTTATGTCTCCAGGGAAGGAATTTTAACCAAAGTAGCTGGGATAAGCTTGAACTCAGGTGTGAACTACCACACCCAGTTTA
TGAAGTTCTGGAGATAGAACCAAGAGCTTCAGGTATGCGGGGCAGGAGCTCAGCCAAGTAAACTGCATCCACAGCCCTCGCCTCTTTACTTGCT
GTGAGAAACTCTGCACGTAGAACAGAGTATCAGGGAGGTTTGTACAATTCGGGATCTCACCAGGATCCCCTAAGCACGTGTTAACAGCAGCATC
CAGTCTCAGAACCAAGAGAAATTAATTCCCAGTGCAGCCCTGGGTTTAAGGGTTTTATGGACCAGGCACAAGCTGTAATTACTGGGCTGTGCTA
GGTATTCCTGGCAACCACCTGGAAAGTTATAAAGGTGTAATGAGTGATAAATAGCAATCTCCCTCCCCCCAAACAAAACAAAATCCCAGAATGG
ACTACCTGGAGGCCACAGGATGTGGAAACTTAACTCTTCATTTCCCAATGAGTCACTTTTGAATTCCTACTGATCTGAGTGGAGTTTAAAATTT
TTCCACAAATCCTTTTCTCAGGTTTCTATTCTTTCACCCAGCACCTACTCCTCTCTCCCTTCCCCTAGTGTTTACATTTCCTTTCTTTTATTCC
TGCAAGTTCCCAGCCAGAAACCCTTACCCTTACTCCATCATCACAGAGTCTCCTAGGATCTTGGAGGTCCTCTGTGAGGTCTGCCTCTTCAGAG
CAGAACATCTAAAAGTTGGACACACAATCCTGAGGCACCTTCTCAGAGTTTGTGTGTTTTGGGTTGTCATTTGCTGAGCTGGGTGTTCAAGACA
TGGAGATTAAGCAAATTGCCTGCCCTAGTGAATAACAATACTATCTTCAAGGCGCTGTGCTAATAAGCTCCCCTCACCCCCCAGTTTTTTCTTC
TTAAGACGGAGTCTTAGCTGGGTGTAACGGCCTGTAATCCTAGCACAGAGGCGGTAGCAGAATCAGGAGTCCTAGATCGGCCTACGATACATAG
TAACCCGAGTCTTAAAAGAAAAGAAAGCATGCTGAGTATGGTGGTGTATACCTTTAGTCCCAGCACCCCAGCACTATGGAAGTAGAAACAGTCA
GATCTCTGTGAGTTTGAGGCCAGCCTGATCTATATAGTGGGTTTCAAGATAGTAAGGGATATGTAGAGAGAACTTGTTTCATATACATACCCAC
AAGCAAAGCCAGGCTAGGTGGTGACTGCCTTAAATGCCCCAGCACTCAGTGTTAGCTCAGGCTTAATGAGATGATGTGAAAATAAAAAGGGAGA
GAAGGATGAGGAATGGGAGCTTCCCTTGCCAAGGAGACGCAGATCTGTTCCCTGCAGTCTCATGGTAAATAAAACTGAGGTTTGGTTTGGCTTT
TCGAGACAGGGTTTCTCTGTGTAGCCCTGGCTGTCCTGGAACTCACTTTGTAGACCAGGCTGTCCTCAAACTCAGAAATCTGCCTGCCTCTGCC
TCCCGAGTGCTGGGATTAAAGGCGTGCGCCACCACGCCCGGCACAACTAAGCTTAAGAGAGGTGGACTTCCTTGTCAGGCAGCTGTACTCATCA
GAAGCTCAGGCCAGAGTTGCTCAGATCACCTGAGGCTCTTTGTTTCATGGACTCCTCACTCCAGGAAGCAGAGGATCTCTGTGACTTTAAAGCA
GGTGTGAGACAAACCAGGAGCTATATTGTTATACATTGTTATTAAGTCTCCATTCCTTACAAGAATAAGTTTCTCTTTCCTAAACCTAAAGTAT
CCTGCAAACTGTTTTCAATCTACCCTGAACCGGGCCCACTCTTTTGTCTTGATAAACCCCTGAGCCTGTGATAAGTGATCACCCTTTTGCTTTA
TGAAAGTGTGTCTTCCCAGGTACCTGATGGCTCCCCTTTGACATAATGTGTTCTTGCTCTTATTTTTATTGCCTCCTTTCTAGCAGCCAGTAAC
CACAGCTGTTTCCTATTACACTTATCTACCCCAAGGCAGCCTTGAGCCCTGAGTGCCCCCATTCTCTGACCAGTGCTAACAGCCATTATCTTTA
CCGCTGTCTTTTCTTTTCCTTTTCTTTTGTTGCCCCCCCCCCATTTTGTTTTGCTGGCCTTAAATTCAGAGACCTGCCTGTCTCTGCCTCTCAT
TATAGGCATGAGCCACCACTGCCCAGCATGGACAGCTGTGTCTATCAACCCTAACCCATTCCTCATAAAAGGGTTCCCAAAAGCCAGTGAGGGG
CTGTTCTCTGAAACCCCAACTTAGGGTAAGGCAGCCATCTGGCCAGTCCCTTGTGCACTTCTCAATAAAGCTCTCTTAATCAGACAGTTGTGGA
AATGGTTTTTTTCTCAGATCTAACACCAGTTGGTTCTACACAGTGAATTCCGTGCCAGCCAGGGCTACAAAGTGAGACTTTGTCTCAAAGCAAA
AGAAAGAGAAAGAAAAAATAATGTGGAGAGGAGGAGACAAGATCTTGCTGTGTGTTCTAGGCCAGCCTCAAACTTGTGATCCCCTTCTTCAGCC
TTCCAAACAGCTGAGATCACAGGCATGCACCACAGCACCAAACTAAGAGTTCTGCCCCTTGGAAGTTAGAGGGACGGAGTATATATGCATGTGC
ATATGCATGTGTATGTTCAAGAGCGCCTTGGGGGCAGAGGGTTGGGGAAGAGGCACACAAGTATTTCACAGAGCTCGTATATAGGTTAGAAGAC
AATCTATGGGAATTGGTTTTCTCCTTCTGCCACGTGGGTCTTGGTAACTGACCTCAGATCCTCAGGGCTGACAGCAAGTGTTTTGATGTGATGA
GCCATCTCATGAGCCCCAAGAATTATCCTTTTAAAGCTCCCAGAGACCCCACTGAAATCTACGAATGGGGAAACAAAGACACAGAGAGGTTAAA
TAACTTGTTTGATGACACACAGCCAACAAAGGATGGAACTAAAACCTTGGCTCCAGGCAGCCAGATTCCAGAACCTTCTCCTTTAACCACTGTC
TAATCAATAATAGTTTGATTCTAATAAAGACAAATTTCTAAAAAGTGAAAAAGATACTTTATTTTGTTTGTTTTCCTCTGTGTAGCCCTGGCTG
TCCTGGAACTGGTTTTGTAGAGCAGGCTGGGCTTGAACTTTGAGATCTACCTGCCTCTGCCTCCAGAATGCTGGGGTTACTGGCGTATATCATG
CCTGGTAAGATACCTTGTTAATGCTAAGTGGATGCTGTGCAGATAGTAAACTAGAGCAAGGTGGCGCAGGACTACAGCTGCTGGTGTGTGTGGA
GGTTTTGTGTTTGGCCTGGGTTTGTCTGTTATTTGTTTTTGATAAGGGTTCATTATGTGGCCCAGGCTGGTCTTAAACTTGAGATCCTCCCGCT
TCAACCTCCTGAGTGCTTGGGCTACAGGCATGTGTTACCATGGTTGGCATATATGTGGTACTTTGAACAGGGGTGTGTACTGCTACATTGAGCA
TCTATCTCCCTACGTCATAGAGCTTTCAAAAGGTATATGATGTTCTCTGCAGGCTCTGTACAAGGCCTGGTCCAGGGAAGACTCAAATGCCTGG
GAAGGAAGGGAGTGCAGAGGGAGAGGCCTGGCAGGTGACTCAGTGCAAACCCTTGTCAGTGTTTGCCCAGCTGGGGTCTGTGTGTAGATCATGG
GTCCTGTGACTTTGAAACAGATACCCCTGGAGCCTCTTTGAGGAATAAGGAAATAACATGATGTCACATGTTGGCTCTGGGCTAAGCCCTGTCA
CACACATAGAGGTGTTCTCATTGTCCTGGAATTACACAGGAACAAACTGAAACTTGGAAGTTGACAGCATGGTGTGCCATGATGAAGCAGGGAG
TTCTGTGTGCCTTTAGGAAGGAAAATAAAGGTAGGACAGTTGTGTGTCCATGTGTCCCACATCCTGACTGTCCTGCTGTCTTCCTGGACATTCA
GGACACTAGTAAGCTTTTTTACAGTCTGTTTTCCTATAACCTGATGTCAATCTATTTCAAATGAGAGGAAATATTTTCTGTCATGATGATAAAG
GACAGGTAACAAGGACATCATTTTCGGTACCTTTGTCTTGATACGTTAGCCCTGGGTTTTGTTTCTTTGCTTATTTTAACTTTTTTTTTTTAAA
TATTGATTTGAGGTCAGGGTCTCCCTGGGTAACCCAGGCTGGCCTTGTTAATCTTAGTATCACATTAAAGAACTTCACAAATCAGACATAATCC
AGCAAAGCAATTTCTTTTTATAGAGTCGTGACCCAAACCAGGCTAGCAAGCACACCGGAGCAGGAAGTTCACTTAATTGTTATTCTAACGCAAG
TATTGACTGAGTCACCTCTCATTGGTGCAGCTTGGCCTCATAATCTGAAAAGACTGGCTAATTTATAATCACACACAAAGGAATTGAAAGAACA
GAGGGCTGTGTGTCATCACATTCTGGGACTTAGTGAGGTTTTGTATAATAAGAGTTTCAGTTGGGCATTTTACATTGTGGGGAGATTTATGGCA
CACTGGCTCTTGGTGGGCTAACCACATTAGGTGGAAAAAAAAAGATTCTCGGAGCCTTGGCTTTGAGATCTTGTGGTGGTGGGATTTCAAGCCG
GCACCACCACACCCAGAGCTTTGTTTCAAGGTTTCTTCCCTTGTGTTTATTTCCACCTTGGGATTAGACCCAGAGCCTCAAACCTGCTACTCTC
TACTCTCTGTCCCTAGCCTTCTTCTAACTTTCTGCCTTGGGACAGAGTCTCACCAGGTTTCCCAGGCTAGACTTCAACTCATTTTGTAGCCCAG
TCAGGCTTTAAGTTTGCCTTGTTTCCTCAGTAACTGAGATCTCTCATTCTCAACACCAGAGTCAGGCTCCATAATGTTATCCTCTCTGGAGTCT
CCTCATAAGGTTTCCAATTAGCCCAGTACTGCTCTGATTCAAGCAACTTGCTGGTTTTACTCTCATATCCTAGGTTTACATTTTGATTTACCCT
ATCTGTCTGTCTGTCTGTCTGCCTACTTACCATATGTTTGTGTGGGACTGTGATGTAAGCACTGCCTCTGTGGGCATCTGTGTGTTTGTACACA
TGTGTGTGTGTGTGTGTGTNNNNNNNNNNNNNNNNNNNNACACGTGTGCACCTGTGTGTATGCTCGTGTGTATACCTGTATGTGTGTGTGCCTG
AGTGTGTACACCTGTGTGTGTGCATGCCTCTGTGTGTGTGCCTCTGTATGTGTGTGTATGTCATTAGTATTCTGTCTAAGCTCCACCCCACAGT
TACCTGGCAACAGCCAGGTAGGCCTGACTCACTATAAAAGGGGCTGCTTGCCCCCTCCTCCTTCTCTTGCTCTTCCCTTCTTGCTCCTGCTGTC
TTTCCTCCCTACCCCTCCAGTCCCTTCTCCCCTCTCTTTCCATGTGCTCATGGCCAGCCTCTACTCCTGTTCTCCTCTACTTCTCTCTCTCTAC
CTTTCTCTGCCTCTACTACCCTCTTAACCCCACCCCCACCCCATGCCCTGAATAAACTCTATTCTATACTATACCATCCTGTGGCTGGTTCCTC
ACGGGGAAGTCCCTTAGCATGAGCCCACGGAGGCACCACTTCCCCCATACCTCACCACACCTCCATAGAACATATCTCCCTTTTCTTTATTTTT
TGTTTTTGTTTTTATAAACATATCACACGTGGTAGCAGGAGGATGCTTTATTCCCTGAAACAGGCTCTGTCACTGAACTTGGAGCTAGGCAGCA
GCTAATAAGCAGTCCTTCTGTCTGCTTCACTAGTGTCACAGTGCTGGGGGCAGAGGTGTGCACATGGCCGTGCCTAACTTTTAACCTGAGTGCT
GGGATCTTAGCGCGGGCCTTCTTGTGCAGCAGTGCTCTCACCCACAGGCCATCTCTCCAGGCCCTGGGCCGGAGCTTTAAAGCAGCGCTGACAC
AAGAATCTGGAAAACAGATGCTTGGTTTTGTTTATGTTCAGGGGAGAAAGCCGCAAACAGAAACACAGCCTCTTCTTAACCAGGGCAACCAGGG
CCTGCAGCAGGCCTGGGGTCACATCCGAGCCTTGTGCTGACACGGAGGGAGGTTCACAGCCTGTGGACGTGGGCAGAGGACTTGATGTCTGGCC
AGGGTTGAGAGGGTTTGGTTTTTCTGGAATCCAGTTTTGTTTTGTTTTTAGATGTGGAATGTTTTGTCTAACTCCCTGCCTGGAGACAGCAATG
CAGATAGAATTGGTGTGGGCACCCTTTCTGGGCTAACATGACTCACAGGGTTCATATCCTTCCATCAAGAGTAGGAAATTCCCCTTTCCTCCGA
GCTCAGCAGCTCTGTGGAAGAGGAGGTGGAAAGATTGTAAGAGCCGGGGAGTGTGGATACCACGAAGGAAACAGTGTCTTCCAGACACAACAGG
ACTGATTGATACACATATGAACTCAACACGCTGGCAGCCTGCCTGCGCCTGCCCAGGTTCAAGCCACATGGGGTCACAGCACTGAGAGGGGAAA
GTGGACATGGACTCCCACCCCTAACCAAATTGACACCTGCTTACAAAGGAAAACTTAGTTTCCTCCAATAGAGTCTCACTGGCTGCATTAACCC
CAGGTAAGGGTCAGCCCCATGGCCAGCAGGAGATGCCAACACAACAGTACTTTTATCGGCTTTCTTTTCTCACGGTGTTTTCATCAGACATGTT
TTGGTCTTATTGGTCCTTTGTTTACATATTATAGTTTCTGATTTTGTGTTTTTATGGATTTGTGTGTGTGTGTGTTTTGTTAGGACTCAACCCC
TGGACAAATGGCTAACTGAAGTGCCTATTAACATATCAGGGCAGATGCTGTCAGCCTGCCTCTCTCAGCATTGCCAGCACCTATTACGGAGCTG
TCCTGGCTGGTATACCCCACATGCTACCCTAACTCTCCCTTCCCACAGTTTCTCTGATTCCTAAAATAAGATGACTATGCTAGTATCTTTGCCT
TTTTATTACCTCTTGGTCTCTGGGTTCTCAGGTTTTTTTGTTTTTTTGTTTGTTTGTTTTTTGCCTCTTGGCCACTTGGTCCAAGGTTCCTCTG
TCGACCCTCCTCTCTTCTCTTCCCCCTGTCTCTTTCTCTCTCTGTCTCCCACAGGCCCTGTTAAGTCTGCTGGCCATGTTCACTCTGGACTCTT
GCAGATAGCTCTGCTTGTGCTCTCCCTCATGTCTACACTAAACCTTCTCCACCATACCCAGGAGCCGCATGGCCTCTGCTTTTTAATTTTTTCA
TTCATATTTCTGACGACGACGACGGTGACAATGATGATTCACCTGTTCGTTTCCTATAGAGTAAAATTTGGGGGCATGGGGAGGGTCTGGGAGG
AGTTGGAGAAAAGAAACCTTGATCAGAATACATTGTATGAAAACTTTTTTTAAAATAAAAAAAAAGTAGAAAATTTCATTTCACATGCTTTTTA
TTTGAACTTAAAATTCATACTAATTCTTATCAAACAACCCAAGGGAAGCTAGTATGGACTGAAAAAGCTTACTATTAGTTCACACTTGATTCAT
ACTGGCTGGGTGTGGTGATGCACACCTTTAAACCTGGCACTCAGGAGTCAAAGGCAGGTTGATCTCTGAGTTCAACACTAGACTCAAATCTGGC
CTACAGAGCAAGTTCTTAGCCAGCCACAGCTAAAACAGTGAGACTGCCTAAAAAACAAGGCAGGGGGTATCAAAGCACAAATACCTGTTTATTT
CATTCTGCCCTCAATATATTATTTAAATTTTAGAAGTCACACGTATTTATTGTGTGTGTACATGGATAGGAATGTGAGGGTCAGAGGACAATTT
ATGGGACATTTTTCTCTCCCATACTGTATGGGTCCTGGAAACCGATAAACTCAGGTTGTCAGGCTTGGTGGCAAGTACTTTACCCATTGAGTCA
TCTTGCCAACCCACAATATTTTATTTTAAATTCCTTTTCTCCACTCTTTTTTTTTTTTGAGGGGGGAGGGTCAAGGCAAGGGCACTGTATGGGA
ACCCATGGGAAGTTGTGACTAATCCTTACACTGTTCCCGCTTGTGAAGGTTTTCCAGGCCTCATGAGTCTGCAACCTCTCACCAACAGAGCCAG
ATAGAGTTATCCTCTGTTAAAGGGGGAACCTGAAGCAATCAGAGAGGGAAAGTGACGTGTCCAAGGTCACACAGCAGGAAACACTGGATCTGAG
CTGACTTGTGATCCCAGCATTTAGGATGAGGAGGCCAGAGAATTGCAAGTTCAAGGGCTAACCTGGGCTCCATAGAAGGATTCTGTCAGAAAGA
AGGGTAGAGGGAGGTGGATCAGGAATCAGAGTGTGGAATCCAGGGTATTTGCTGTCTCTATCAGCTAGCTATCCTCCATCTTGCATGAGGAAGA
AGTCCCTGGGGACTCTGTTGAAGGGGACTTTTCACAAAAATAGAAGCCTTGGGTGTGACAGGAACTGCTGACCAAGCAAGAAGTGGGTCAGTGT
CCCTCCTCCCTCCCTTTTCAGTATGTATGCTGCCACTACCTCCTGAATCTGAACCAGACTACAGTGTGTGTGTGTGTGTGTGTGTGTGTGTGTG
TGTGTGTGTCTGTCTGTCTGTCTGTCTGTCTGTCTAACTATGACCCAGGCCCAGGAGGGGCTTGTGGCAGAGGCTGAAATGATAGGAAGGACTG
GCCTATCTGAGGCCCTCTGCTCTCCCTGGCCAATATCCCAAAGACTGTGCCCAGATCCTGTCTGCTTCCTCCGCCCCTGAGGCGAGAGCTTTCC
ACGTGGAAAAACACAGCTGTGCTTGGGTGAGTCCTGTGAGGGAGGAGGGAGGGGAGGGTGCTCCTCTCTGCTCAGGACTGCTGTCTATGGGCCC
AGTTCTCGGAAAGGGCCAGATTGCATCAGACAGGGCTTGGAGGGCGGGGCCCAACCCCGTGGTTTAGGGAGGAGACAGCGTTATAAGTACGGTG
AGAAACTGGGAGAGGGCAGACATTCAGACAAGGAGACACAGGCAAGACTTTGGAGAGAGCAGACTAGGCATAATGGCCACCTTGCCACCAACAG
CCAACCCTTCCCAGCAACCTCTAAACCTAGAGGATGAAGATGGAATCCTGGATGAATATGATCAGTACAGCCTGGCCCATCCCTGTGTCGGTAA
GGTTTTCGTGGTAGCTCCTTGGTCAGCCCATCTGCTTCTCACTGGGTACCCCGGTTTACCTTTCCTAGCTAATCTATTCCCAACTCCCAAGTAA
CCCCTTCTAGTCTCATCTACTGAGTTCTGTCTCCCTTAGCCCCAAGAACTCACAAGTGAGCATCTCTCATTCTATACTTGAGTAAACAGCAAGG
ATAGAGTGCTTCAGACGTGAAGACGTGACCGCCCCACTCTGGCCATTTATATGCCTGTCCTAACCTCACACACCTCCTCTACCTCCTGCTCCAC
CAGTCGGGGGAGGTCGGAAAGGTCGGACCAAGAGAGAAGCTGCTGCCAATACCAACCGCCCTAGCCCTGGCGGGCATGAGAGGAAGCTGCTGAC
CAAGTTCCAGAACTCTGAAAGGAAAAAAGCCTGGCGCTGAGACGGAGCTGGAGGTGAGTCGGGAGAGCCGGGCCTAAGTGTGCAGAGCGGGAAG
CGGGGAACCAAGAGCTGGTCCTGGTGAGATGGCGCTGCAGGTAGAGGCACTTGCAGGCAAGCAGGACAACCTGTGCTTGATCTCTGGGACACGT
GGGATGAAACCACGTGATGAAAGGGGAGAGAACCAATTGCAAGCTGTGTTCCCGAGGGAGCCCTGCAGATAGATGTCCAGGCAGGGAAGTGATA
AGAATGAAAACCCCATTCAGACTGACTTCCATCAGCTTGGATCAGATTTCAGGGCATCTAACGCCAGGCGGTTCACTGTCAGCATATTTAAAAC
ACAGTACAATTTGGGAAGAGGTTTCTAGGCAACAGTCAGTCCATCAGTTCAGTTCCAGGAGCACAATAAAGCTTGAGGTCATCAGGCAGATGTG
ACATCTTTCCTAAGAGTGGGTAATGGTCTAGGGAGGGGAGAGTCTGGGATTATCATTCTGGAGAACTTGAGTGAGGTCGGCTTCTATAGCAAAA
GCTGGGGGAGGTCTGACTCCACACAGAGCCAAAAGCTCACCGGGTTGTTAACAAAATCCACTCTCAGATTTCTGAGTGGAATGCAGGTATTTGA
CTTTATCTCCTGCATTGTGGAGACACACGGCATGATTACTTCTGGTTCTTAGTGCTTCTCTTGAGTACAAGGACCACTTCTGTACCTCCAATGT
CCACCGACTTCCATATGCTCAAAGTAGCACATGAGAATACGCATGTGCACACATGCATGCAAACACATTGGCATATCAATAAATGAAAAAAATA
ATGTTGGCCGGACAGTGGTGGCGCACGCCTTTAATCCCAGCACTTGGTAGGCAGAGGCAGGTGGATTTCTGAGTTCAAGGACAGCCTGGTCTAA
GGAGTGAGTTCCAGGACAGCCAGGGCTATACAGAGAAACCTGTCTCGAAAAAACAAAATACAAAAAACAAAAACCAAAACCAAAACAAAACAAA
ACAATAGTGTTGTGACACTATTTTTATTCTACATCTAAAATAATATGAGACCCGTATTTGACTGAGCTCCCTGGTAACCAGAGGTGGGGGGAGT
TCCCATGGAGCCTTTCCAATGGAGAGGAAGTTTGGTTTATGGAAAGGGAAACTGAGGCAGATAGAGTCAAGTACTTCTCTAAGGTAATAGCAAA
TATGAGTAGGAAAGGTGGAAGTCAAACTCTGATCTCTGTCCCTTTCGTTGCCTGCTTTCCCTCTGCACAGATAAGGCCAGACCACAGACACCAC
ACCCAGCAATGGATACAGGACATCACACCCAGCAATGGATACAGGACATCACACCCAGCAATGGATACAGGACCTTGGAGAAATTAGGAGTTGT
AAGCAGGACCTAGGCCTGCTTGATTCTTTCCCACCTAAGTGAGGTTCTGGAGAGGGAGCCCCTTCCACCCTTCCAGACCCAGCAAAGGGCAAGA
TGGGAGCAAGAAGCAGAGGGTAGACGGGCAGAGCTAGGAAGGCAGCCCCCAAAAGAACTGTGGGGGAAATAAATCGGATGCCCTTGGGTGGCAG
CAACAATAAATCGTACAGCAGTGACAGCTTTGGCATGTGTTGTGTGTCTTTGTTGTGTTTGGGTGTGTTGTGTCTGGCTGTGTCCATTGTGTGT
CTCTCTAGGAGGCTGATCTGGAATGGGAGCGTCCTTATTGCGTAGCATATGGGCTTGAACGGTTCTCCGTGATTGTTGCCTTCTTCTAATGTAT
GCAGATGCTTTGAGGAGCCTGTTTCTATGGTTTCTTCCAGGGAAGTTGCTTTGTTTCTTTGCAGTGCTGTCCCAGAGACAACCTGTGGCCAGTC
CCCTACATATTCTTGAGCACCACAAGGTCCTATTATATAGAGCTGCTTTTGGAAGAGAATGTTTCTATTAATACCATTTGCAAAATGGAAAAAA
AAAACAGCATCCATGATTTAAAACATGCAGAGGATTTGTTTTAAGCAACCGAGGGCTCAAATTCAGTCATGAAATACCAGGCTGGCTTCCAGGA
TGGGGTGCTTGGTGAGCTGGTGAGAAAGCTCTCCCTAAGCATGGTGGGCCGATGGGTCTCAGGACCAGAATTCCAGGCAAATGTGAAGCAAATG
AGAAGATGGTTGAACCAAGTGTAGAGTGGCCTGAGGTCTGAGTTTGGAATGTTGCAATTTTACTCAGACGAAACAATGTTCTTTCTCACACACA
AGTTCTATGAGTAAATACTCCTAAGTAACACAGGTGGCAAGTCCATTTTCTTGAGGCTGGTCTCAAACTCCTGAACTCAAGTGGCCCTCTAAGC
CTCAAATTCTAGGCACCCGTATCACCACTCCCACTTAGCCTATTCGTTCTTAAAAAGAATTATTTATTCATTTTCTGTATATGAGTACCTGGTA
GCTGTCTTCAGACACACCAGAAGAGGGCATCAGATCCCATTACAGATGATTGTGAGCCACCATGTAGTTGCTGGGAGTTGAACTCAGGACCTCT
GAAAAGCAGTCAATGCTCTTAACTGCTGAGCCATCTCTCCAGCTCAACCCTATTTATTTTTAAGGATACCATTTGATAGTAGAACGCATAGCAC
CTGCTCACAGTTTAGTCACATGCTTGAAGAGAGAGGCCGGGGAATGCCATTCTTAGCTGCCAGCCATTTGCTAACCCAAGCTGAGGTGAGGGCA
GAGTTTTATTAGAGGAAGAAGATGGAGCATACTGGAAGAAATAAGCAGAAACATTACTCAACACTCAGACTCAGCCAAAGTGGGAGGAAAGAGC
CCTTGCTCTTGCTCTGGGCTGAGCCTTTGTCCCTTCTCACTAACCCAGCTTGTAGAGCCTGGAGCCCATTGCACTTAGATGGAACCGGAAGCTA
GGGTACTTACGGAATCAGTGGCCTCACAGCAGGCTGTGGGTCAGCTGCAACTCTCAGGGACATATCCAGCCACCTCCTGTGCAGCTGGGAACAT
TAGGACAATTTCTGGTCTGGCTGGGCATGGTAGCTCACATCCGTAGTCCCAGCATTCGGAAGACAGAGGCAGGCAGAGTTTATGAGTTTGAAGC
CAGCCTAGTTTATGTAGTTCCAGGCCAGCCAGGACTCATAGCGACACCCTATACTAGAGAAGGGGGTTGGGGGCGGAGGGAGGGAGTGAAAGCT
GCTTCTGGTCCTATCTCAGTACTCCAGGCCAACCAGGACTCAAAGTGACACCCAATAAATCAAGCAACCAAGCAAGCTTTTGGTCCTATCTCAG
TGCTCTCAGGAATGTCCGGTTTCCTTAGTGCCAAGAAGAACAAGAAGAATAGGACTGGCTTCCTTGAAGGCTGTCCAATTCTACCTCAGGGCAA
CTGCTTTCTGTGGACTACCAGCCAGCCACCTGCTCTGGAAGGTTCTGCTTCTCTGTTCAGGATGCCCGTGACGCCACCCAACCTGCAAGGCTGA
GTCAAAGGCCTTGTCTTCAGCATTCCTCTGCTGGGCCCTCTCCCCTCCTTCTGTTGATCTCTCCTCTGGAATGCCACACCAGCTAACAGGCTCA
CGGATATTTCTTTTGGCAGGTGGTTTTGTGGAAATTGTCCTGGTGGCAATGGAGTGGGCCTTTTATTTTTAAATAGGATCTCACTCTGTAGCCT
TGTCTGTGCAGGAATTCTGTAGACAAGTCAGGCCTTGAACTCATAGAGATCTGCCTGCCTCTGCCTCTCTTGAATGCTGATATTAAAAGTGTGA
GCCACCCTACCTAGCCCAAATCATTCATTGCTTTGACATCTGTTAGTTGCTTGTTATTTTACCAGGGCAGGGCCGAAGCACAGACTTTGTAGAG
AGGGACACATGGTACAGCTTTTAGCTTTAGAACCTAAAATAGCACCACCTCTGGGCAGCATGCTTGCAGCAGTATGCATCTGGGTGTCCAGCTT
CAGAAATGACAGCGCCCATATTTTGGGTGCCTGCCCTAGGACAGACAGGTTTGTTCATTTGTTTGTAGCGTTTGTTTTCTGCGGGGCATCAAAC
ACAGGGTTACATGCTAAGATGACAGTCTGACCGTGGCATCTGTACCTGCCCTGCAATAGGATTTTACAGTTATGTCTCCATTTAATCTTTATAG
TAACCCAATAGGACACACTACTAGTGTTCCTGTTTTTCCAAACAGAAATCTAAGGCCCAGAGATTTGCAAGTTCATACTAGACCACATATAGTA
AGTTACATTGTATTTCATGGCTCATTTAGAGACACGCAGACTCAATCAATACCACATGAGACTCTGAGCTCAGGTTTTCCAACCTCTGACCTTT
TCCCCTTTGATGGTGTGCCCAAGAAACACGGGGTTCTGGGCAATGAGCAACCCTAGATTGTAGATCTTCTAAGGGTGGGTTCGAAAACAACCTT
CCTTCCGTCAGAGAGAAAATTAAGGTCAAGAACACCCGTCCTCAGTGTCAATGGCCAGTCCTAGCTGCTGGACCCTTGAGCACCTGCTTCTTAG
GAGATGAACACGCCACCACTTACTCTTGACCTCTGATTGACAGCCCTCTGCCTCACCTGTCTCTGGCACAGCCTCTGTGCCAGGAACTGTTACA
GCAATTCTTAGAACCTTGGAGATCTCAGATCAGGAAGGACCCTGAGCAGAATGTCCCTCTTTTCCACCCCGTTTTCATCTCGTGCATATAATGT
CTGATTCTCTCAGTTTCGGGGATTCCTTAGTAGAACTAGAGAAATCACTGACAGAATCTTTCCCCTTCAGGGCCTTCCAGAACTTCTCAGATTT
CCGTAGCTGAAAGGATTCCCAGCCTCTTGCAGAGAATTGAGAAACTCACTATTTTTTTTTAACTCTTGTGGTTCCTTTCTCAAAAATTCAAGGC
TTGACTGGCCATATATATGTGTGCCTGTGTGTATGTGTGTACATATATATGTATATGCATGCATTCATATAAATTTCAGGATGACTCAAAGTTA
ATTTTCAACTAATACCCCTTAAAGATAATGCTAGTGACAGTCATAGCCGTAGCAACTGCTATGCTGGGTGCCATGGGGATTCCCCAACGTCATC
TCTCACACAGCGTTCCTTCCAGGTCTGTCCCCTGAGGCTCACGTGCTATATTGTATCTACTTGTCATTGAAAAACCACCCCTTTACCTGTTTTA
CTCAAGCGCATTTAAAAAGGAAACTATGTAACCACCCTAACTAGGAAGCCATGTGCTGCTCATAAGCACAAGTTCACTCTGGCCAAGTCCAGTG
CTTGCCACTGTAAGCCTGACTTTAGGGGGATGGAGGCAGGGGGATTGCAATCTCAAAACACAAGACAAACAAAACTTATATACAAATTTAACTT
CTTTTAAAAGTTCATCGAAGCCAGCCAGGATGGCTCATGACTTTAATCCCAAGCACTCAGGAGGCAGAGGCAGGCTGATTTTTGTGAGTTCAAG
GGCACCCTGGTCTACATAGAGAGTTCCAGGCCAGTCAGGACTATATAGTGAGATCCTGTCTAAAAACAAACAAACAAACAAATACAAAAACCAA
GAACAAAAAGTTTATGTGCCTTTCTACAATGACCAAGAGTCACAATTGTGCACACTAGGAAGACACAGTGCAATGTGGTACCAGAACAAGAAAA
AGTATACTTGGTGTGACCATGGATGGATGTCCTCCAACTTACAATAGTTCAACTTGTTCATTTTGAGGCAAGGTCTCACTCACTACATAGCCCT
AGCTGGCATCCTCCTGCCCCTGGCTCCAGAATGCTGGAATTAATGACACGTCAGGCCTCTGTTACGTTACAGTGGTGTAAAAGTCATTCACACT
CAACAGAAAGTATACTCTTGTTTCTGTTTTTGTTCTTGTTTCTGTTTTTGAGACAGGGTTTCTTTGTGTATCCCTGGCTGTCCTGGAACTCACT
TTGTAGACCAGGCTGGCCTCGAACTTGGAAATCCACTTGCCTCTGCCTCCCAAGTGCTGGATTAAAGGCATGCAACACCACTGCCCGGCGTGAA
GACAGTCTCTTGGTACCCAGGCTGTGAACTTGATATTTTGTTGAGCATGACCTTGAACTTCTTTAAGTATCATTGTTGAGGGGAGGCCTAGATG
TGTGTGTGTGACATCAGAGGACAACTTTGTGGGATCAGTTCTTTCATTATACTTTTACAAGTGTTCTAGAATTAACTAGGGTTAAAACTGCCTG
GCACGTGCCTTTTATCCACTGAGTTGTCTTGCTGCTCCAAACTTTGGGCTTCTGAACTTTTTGCCTCCATCATCTGAGTGCTGGCATTATAAGT
GAACAGGACTGGCCCAGAATGAGAACACACTCTTAATCCTAGCACGTGGGAGGCAGAGGCAGGTGGGTCTCCGTGAGTTCAAGGCCAGCCTGAA
CTACAGAGTGAGTTTGAGGACAACTGGGGCTATATAGAAAGATTCTGTCTCTCCCACCCACCCCAAAAAGGCACACACCACTGCTCCTCATTTT
ATTAGGCGATGAGATCAAACCCAGGGCTTCATGCACACGAAGCAAGCACTCTATCAACTGAGCCATAGCCTCCAAGTCAGCATTTAAACTTTTT
TTTTTTTTTTTTGGTTTTTCGAGACAGGGTTTCTCTGTGTAGCCCTGGCTGTCCTGGAACTCACTCTGTAGACCAGGCTGGCCTTGAACTCAGA
AATCTGCCTGCCTCTGCCTCCCGAGTGCTGGGATTAAAGGCGTGTGCCACCACGCCTGGCAGCATTTTAACTTTTTAAAAATTACACTTATAAT
ATATTGTGTGTATGGTACATGTGTGACAATCAGGACAACATTCAGAAGTCACTTCTTGCCTTCCACAATGTAGGTCCTGGGGGATTGAACTTGG
GCTTGGCGGCAAGCACCTTTACTTGCTGAGCCATTTTGCTACCTCTCCCTAGTTTTTTTTTTTTTTTAGATTTATTTATTTATTATTATAAATA
GGTATACTGTAGCTGTCTTCAGATGCACCAGAAGAGGGCATCAGATCTTATTACGGGTGGTTGTCATTGCTGGGATTTGAACTCAGGACCTCCG
GAAGAGCAGTCAGTGCTCTTACCCAGCCAGATTTCTTTCTTTCTTCTCGGTTTAAACTTTGCCTGTGTGGCAGTGCACACGAGTGCAGGTGCCG
AGTTGCTCCCCACTGGAGCTGGAGTTTAAAAGTGGCCACGAACTGCCTGATGTGGGTGCTGGAGTCTTCTGCAACCCAAGCTGGAGTCTTCTGC
AACCCAAGCTGGAGTCTTCTGCAACAGTAATATGTGCTCTCAACCACTGAGCACAGTTCCCTCAGTCCCTCAGCCAGCTTGTGCAGCCTGGACT
CACCTACTGAGGGATGCACTCACAGAGAGCTGCCCCCCCCCACATCAATCAGCAATCAAGAAAACAATCCACAGACACATCCACAGGCCAGTCT
GATCCAGACACTTCCTCGGCTGATGTTCGCTCTTCCCAGGTTTGTGTCAAGTTGAAAATAGAACTAACCAGAGCACAGGTTTTACAGTGTAGCC
CAGGTTGGCCAGGAATTCATGGTTCCCCTGCTTCAAGCTTCCCATGCTAAGGTTGCAGGTGTGTGATGACACCCCCAACTTTTGCATTTCCTAT
TTATATTTTCATCTTACAATGGACTCATTGAGGCATGAACCCATCATAAATTGGGGAGCACCTGAACCCAGTAAATGAAGTGTTGGGTGCTCCC
ATTGCCTCCCACTGTTCTCTATATTGACAGACAGCTTCTACCCCAAATCCATGCCAACAGTGTACACTTCTCTGTGGACACCTACAGCAGGTCG
TGTGATTTAACCTGATACTGTTAGGATATGAATTTAGTGCAGACTCTACAGTATAGGTCAAATTCTACAAGAACATAGAAGCCAAGTCAAAGCC
TAGGCCTTCCTTACTTCTGACCCACTGAGATAGGTCAGGGACTGCCACAAGAGGGCACAAAGGCAAACTGGCTCTGAGCCCTGTGCAAGGAAAG
CATGATGTGTGGTTGCCTTCACCCTGGCACTCTCCAAAAGCTTTGCCATAAGACATTTGATTATGCCGGGTGGTGTTGGTGCATGCCTTTAATC
CCAGCACTTGGGAGGCAGAGGCAGGCAGATTTCTGAGTTCGAGGCCAGTCTGGTCCACAGAGTGAGTTCCAGGATGGCCAGGGCTACACAGAAA
AACCCTGTTTTCATCAGGACAGAATGCTTACAGTAGAGAAGCCGCTTGTGATGTACCCAAGCTAAAATTAGACGTAGCGATACAAATGACAAAG
GCGGAAGAGAATTGTTATTGAGGAAAAACTTTGTCCCATAAAATATTCTTGGTAAACCCCCCAAATCAACTCAGATTTCCAGCAATCTGTCAGA
GCAAAACCCACAAAGCCTCTGTGTGTGTGTGTGTGTGTGTGTGTGTGTGTGCGCATGCATGTGTGTGCTTCTGTGCATGTGTGCATGCATGTGT
GTATTGGTGCTGGGGATTGAACCGAGGGTCTTGACACATGCTATAGTTATTCCACTGAGCTAAGCTCTCAATTCTTGTTTCCTCTTTTTTAATT
CTTTTTTTTTTTAATTTATTTATTATATGTAAGTACACTGTAGCTGTCTTCAGATGCACCAGAAGAGGGCATCAGATCTCATTATGGGTGGTTG
TGAGCCACCATGTGGTTGCTGGGATTTGAACTTCGGACCTTCGGAAGAGCAGTCGGGTGCTCTTACCCACTGAGCCATCTCACCAGCCCCTCTT
GTTTCCTCTTAATTGACCTAAAAATCACTGTTTGGAGGTAACACAGCAAGGCAATGAATTGCTGACTCTGAATCCCGTTAGCCTTGACATCGCT
AACTTGTGGCCTTGAGGACAGTTGCTTAGGTTCCTTTGCAAAAACTTAAAGGCTGCTTTTGCATTGGGATCGCGTGAGCCTGTAGATGGACCAT
AGACATGAGATAAGAAGCTCGGCTGGTCTCCTCTCCTGTTGTTCCTGCCCCTTTTGCTCTCTTACACTTGGAACTAAATTCTACTCTGCTTTGC
AGATAGACAAGCTGCTTATGGGAGAAATGTTTAGTCCAAGACTATAAGAGAACTTGGGACCGGGCAGTGGTGGTGCATACCTTTAATCCCAGCA
CTTGGCCTATTTCCCATTGAATCATTTCTTTTTTTTCACCCTTGGGCTTTCTCTGCAGTGCAGCAGCTAAAGACTGTACAGTCTTTCGGCCTTA
TCCTTAGGCTGAAACCAATCCTGAGGACAAAGCATTTATGGAAGAGGATGACATCAAGCCAGGTATGGTGGCCTGTGAGCTCTGCCTTGGTAAG
GTACAGATGGGAAGACCCAGAACTCAAAGCCAGTCTTGGATATATAGTAAAGTCCAAGGCCAGGCTGAGTTGTCTGAGATGGGAGTGGGTAGAG
GAGTGAATGGTGGCCATGGTGGTACATGCCTGCAATCTCAACTTTTAGGAGGCAGTGGCAGAAAGGTTGCAATATGTATAAGGCAAGCCAGGAG
GAGACAAGGCAACTATATCAAGAAATCAAAGACAGAAACTGAGCTGTAGCTCTAGTGGCAGAGTGTTTACCTGGTATGCTCAAGGCCTTGTACT
CTCTTCCCTGTATCCCAAAAAACAGAGATGTAGACGAGAGAGTTGGGAGTGCAGGGTCCTCTAGCTGTATAGTGAGTTCAAGGTCACCCTAGAA
ACCATGAAACCCTGTCTCAATAATAATAATAATGACATCAACAACAGAAGCAGCTCAGCTTCTGGGGTTAAGCTACGGATTCCAGGTTAGGATG
GTTGAGGTTGTGCAGAGCAAGGAAAAACTCCTTGACTTTCAAAATTCTGCCCTGACCACTGCTTTAGTTCAGTCTAGAAAACCAAATCTGTTGT
CTTCACTAAGCGAGCAGCTTTTTCACGTATTTGGCTTATACCAGCTCCCTTCTACTCCAGAGCTGAAGTCCCTTCAGGAAGCCTTGTCACACAG
CATGTCCTCATTTTGAAGGCCCCATGTCAGCAGAGCCTGCCTCCTGGTAGCGACAAGTCTGGCTGTATTCCCAGACTTCCCAGAAGCCTCTTCT
TGAGCTCCATCCTTTGCTGAAAGGGTCCACAAAACTCAGGGACACATCTGCTTCTGAGGAGTGGTTTAGGCAAAGGTGAGCACTCAGAATCAGC
CAGAGCACAGGGAAGATGAGGAGGTGAAGGCCCTCCTGTGTGACCCCTTCCCAGGCTCTCCATAGGGTCTCTACATCTCTTTTTCTGCTTCTAT
GATCAGTTCTACCTCAGAGATTAGCTCATTTGCCTTTGAAGATTAACTCACCTTCTGGTCCCTTCCACTCTCTGGACGTTGGTGGGGAGGTGAG
AACTAAGAGTTCAACCTTCTAGTGTAAGGGTCCATGATTTGCCGAAGAATGACACCCCAGACTCAAATAGTATGTAAACACAAAGAGTGTTTTA
TTCTGCAGAAGTCCAGCATGCTGGGACCTCCCATTACCAAGATAGAGAAACAACCAAGCGAGCTCGAAGGCCCAATTTAAAACACCTTAGGGGA
ATCGGGAGGCCGATGGGCTTTGTCTTACTCCGTCTCTAAGGTCATTCTGTCCCTGGGGCATGAGGGCTGGCTGGAAGCTGCTGACCTATTGTCC
TCGTTTCAGGCCAGGTGATGGGGCAGTTTCTGACTAGCTGCCTGAAGTTTGGGTTTTTAGGTCTAGTCTCTTTAACTGCCAATTTGAGGCCTGT
CTTGGAATCAGCCTAGCATTCTCACCAAGTCAGGATGGGTTCCACTGGTGGCCAGTCCCATTTTCCAGAAGCCACCCCAGTAGGATAAATGCAG
CTATGACTGAAAAGGCTAAGAAAAGAACACTAGCCTCTGTTCTTATTGCTGGGGAGAAAACTCAAGGGTTTCAGGGGCTCTGTGCCCGGACCTT
GGGAAAGAAGGCATGATTGCTTAGATTGAAAAGATCTGGCCGGGCGTGGTAGCACACGCCTTTAATCCCAGCATTGGGAGGCAGAGGCAGGCGA
ATTTCTGAGTTTGAGGTCAGCCTGGTCTACAAAGTGAGTTCTAAGAAAGCCAGGGCTACACAGAGAAACCCTGTCTTGAAAAACCAAAAAAAAA
AAAAAAATCTGAAGGAGCTTCAGGCAAATAAGACAGACTTTATTCAGTCTGGCTGAAGGTTGCTGGGAAGGCAGTCACTAGTTGGCATTCTTTC
AGCAAGCACCCAGGCACATGTACGAACTGCACACAGGCAGATACAACTACAGACAGATACTCACAGGCAGACAGTTGATGTTGGAGGAGAGGGA
CTATAGGTGTACTTGTGGGCTACTTCATTGGATTATTTTACTACCACCTTTCTCCTCCCCTGTTCCACCCTAATCCCTTCCAATCCCCCCAACA
CTAGGTAGATCTCTCTAGACTATTTCCTGCTGATTAAAGGCATCAAGTCCCTTGGGGCAAATCCAATCTTCATCCTCAGGATATCTCCAACCAG
CAATCGCAAAAGCAGCAAATGCAACTGCAGGAATCGGCAGAGGCAGAGCTGAAGCAGTGGGAGTAGCAGCAGCCACCTCCACAAGCCCTCTCAG
GGCTCTCACATTTATACCCTCTCAAGGGTTACCAGAATTCCAAATGTAAACTATCTGCTGCTG
MOUSE SEQUENCE—mRNA
CACAGGCAAGACTTTGGAGAGAGCAGACTAGGCATAATGGCCACCTTGCCACCAACAGCCAACCCTTCCCAGCAACCTCTAAACCTAGAGGATG
AAGATGGAATCCTGGATGAATATGATCAGTACAGCCTGGCCCATCCCTGTGTCGTCGGGGGAGGTCGGAAAGGTCGGACCAAGAGAGAAGCTGC
TGCCAATACCAACCGCCCTAGCCCTGGCGGGCATGAGAGGAAGCTGCTGACCAAGTTCCAGAACTCTGAAAGGAAAAAAGCCTGGCGCTGAGAC
GGAGCTGGAGATAAGGCCAGACCACAGACACCACACCCAGCAATGGATACAGGACATCACACCCAGCAATGGATACAGGACATCACACCCAGCA
ATGGATACAGGACCTTGGAGAAATTAGGAGTTGTAAGCAGGACCTAGGCCTGCTTGATTCTTTCCCACCTAAGTGAGGTTCTGGAGAGGGAGCC
CTTCCACCCTTCCAGACCCAGCAAAAGGGCAAGATGGGAGCAAGAAGCAGAGGGTAGACGGGCAGAGCTAGGAAGACAGCCCCCAAAAGAACTG
TGGGGGAAATAAATCGGATGCCCTTGGGTGGCAGCAACAATAAATCGTACAGCAGTGACAGCAAAAAAAAAAAAA
MOUSE SEQUENCE—CODING
ATGGCCACCTTGCCACCAACAGCCAACCCTTCCCAGCAACCTCTAAACCTAGAGGATGAAGATGGAATCCTGGATGAATATGATCAGTACAGCC
TGGCCCATCCCTGTGTCGTCGGGGGAGGTCGGAAAGGTCGGACCAAGAGAGAAGCTGCTGCCAATACCAACCGCCCTAGCCCTGGCGGGCATGA
GAGGAAGCTGCTGACCAAGTTCCAGAACTCTGAAAGGAAAAAAGCCTGGCGCTGA
HUMAN SEQUENCE—GENOMIC
ATGCCGCTGCACTCCAGCCTGGGGGACAGAGTGAGACTCCGTCTCAAAAAAAAAAGAAAAAGAAAAAGAAAATAATTTTTCTTGCAAAAATGGG
AGCACAGATGCACCGTTGCGGAGGGCGACAATGATGTCTGGGCTCGCTTCATTCTACATGGGTTGGGGCATGGGGTAGGGGGGCACGGCCCCTT
GGCCCGAGGTGGGAGGGTAGGGGACGGTGTCTGTGGCCCAGGGGTGGGTGGGGTGGGACAACGCATTGTTTTCAGGGCACTCCGTCTACACCCG
TTACACTCCGCAGCAAAGCCGTCCCAGGTCTCCACCCACCACCCCACCCATCAGGACACCAGGAAGACGCACTTGACCTGCAAGAGACTGTTTG
AATACATCTTCCCTAAGAGGATGGACTGATGCTGCAGGCTGGACAAACCGCCAAGCTGAGCTCCAAGGTCCCCCTGACTGAGCCCTGGGATCCT
CTTGACCTTCAGCAGAACTCCACCTTTGAAGTCCGGTACCCACCAGGCGGCTGGATGAGCGTGCCTCCATGCAGGGGCGCTCAGGCAGAAAGTC
AGCCAGAGCAGATGAAACCTGAATTGTTATCCCAACCAAAAATTACAGCACGATGTTGCCCTCCCTTGTTTTTTTGACATACACCTGGGTGTTA
AAGACCCCTCCATGTTGACCCCGTGGGGCATGGGCCAGACAGCCCAGTGGAGGAGACGACCAGGACCAGCCCTGGTGAACGTGAAAACCCAGAA
GTGACGGCATTGGACATCAGATATCAGTGACCCCAGCTGGAAACAGATTTGATATTTGAGAATTTTCACTGGAGCTTAAATATGATAAGTTTAG
GACGGTAGACATTTTTATGGGTTTTTTTGTAAGTATGATCTTGACTAATCAAACTGTCTATAAAAGAAATTGAATGGGCTGAATCAATGGCTAA
TATGGATACCTCAGGGGTTTTTGTGTGGTTTTTTTGTTTTGTTTTGTTTTGTTTTGACAGGGTCTTGCTTTGTCACCCAGGCTGGAGTGCAGTA
GCACAATCTTGGCTCGCTGCAACCTCTGCCTCCCCGGCTCAAGCAGATCCTCCCTCCTCAGCCTCCAAGTAACTGGGACTATGGGTACACACCA
CCACACACAGCTAATTTTTGCTTTTTGTGTGTGGTGGGTTTTTTTTTTCTTCTTTTTTTTTTTTTCAGACAGCTCCTTGCTCTGTCGCCCAGGC
TGCAGTGCAATGGCACGATCTCGGCTCACTGCAACCTCCACCTCCTGGGGTTCAAGTGATTCTCCTTCCTCAGCCTCTTGAGTAGCTGGGATTA
CAGGTGCCACCATGCTGGGCTAGTTTTTGTATTTTTAGTAGAGACAGGGGTTTCACCATGTTGCCCAGGCTGGTCTGGAACTCCTGACCTCAAG
TGATCTGCCTGCCTAAGCCTCCCAAAGTGTGGGGATTACAGGCATGAGCCACCGCTCCCGGTCTTAATTTTTGTATTTTTTTGTATAGACGAGG
TCTCGCCATGTGGCCCAGGCTGGTCTCAAACTCCTGGGCTCAACCAATGTGCCCTCCTCAGCCTCCCAAATTGCTGGGATTACAGCGTGAGCCA
CCACGCCTGGCCTCGTTTTTTTTTAACAGTGCTAAGAGGTAAGGAGGACTCCCTAGGAGCAGTTCGCAGTGGCAGGGAGGCATATTTTATTACT
GACATTGTTGAGAATTGATAGTGATAATAAAAGGCAGAATGATTTGGATCAGTTTAATTATTAAGTTCTTTATAGACAGCCTGGATCAGGGTAG
GGGACTGCTCCCACTGCCCTGTCCCAAAATGCTCCCTTAAAATTATTTCCAGATATTTAAGAGCTTTATGGCATGACCCAATTGCTATAAAAAT
TTTAACTTGAAGGAAAATCTATACTATAAAGTAATCGTTTCTTTAAAGATACATTTTAAGCAAGAGGGTTTGGAAAAATCTTTATGTCTACACC
TGGTAAGCACAAGCCATGTATATTCCGTTTTTCTTTCTTTCTTTCTTTCTTTGTTTTTGTAAAAAAAATTTGTTTTGAGCCAGGGTCTCACTCT
GTTGCTCAGGCTGGAGTGCAGGGGCGCAATCACCGCTCACTGCAGCCATGACCTCCCCAGGCTCAGGTGATCCTCTGGCGTCAGCCACCTGAGT
AGCTGGGACCACAGGCACGAGCCACCACACCTGGCTAACTTTTGTATTTTCTGTAGAGATGGGAATTTCGCCATGTTGCTCAGGCTGGTCTCAA
ACTCCTGGGGTCAAGCCATCCGCCTGCCTTGGCCTCCCAAAGTGCTGGGATTACAGCACCAGGTCCAGCCATTTCCTTTTTTTCTATGCAAGAG
TATTGATATATGTACTGAATCATCCCATACTTGCCAATGTATGTGATCACATACTTATCTTGCTGGGATCACAGGCAAGAGCCACTGCGCCTGG
CCCAAGTTTACTTTTTTTTTTTGGAAATGGAGTTTTGCTTTTGTTGCCCAGGCTGGAGTGTGATGGCGCCATCTCGGCTCACCGCAACCTCCGC
CTCCCGGGTTCAAGCGATTCTTCTGCCTCAGCCTCCAGAGTAACTGGGACTACAGGTGCCCACTACCACGCTGGCTAATTTTTTGTATTTTTAG
TAGAGACTGGGTTTCACCATGTTGGCCAGACTGGTCTCGAACTCCTGACTTCAGGTGATCCACCCGCCTCGGCCTCTCAAAGTGCTGGGATTAC
AGGCATGAGCCACCACGCCCGGCCCCATGTTTACTTTTATAGTCCCAGCACCAAGCAAGTGCCTGGCACATGGTTAGTACCCTAAACATTTGCA
GACTGGAGAATGCATGCCTCTCTGGTCTTTACTTTCCTCTTCTGTTAAATGGGGTCGGGTTTGCTGATCTCCCAGAAGACATCAGTAATAAAAT
TTATTATTTTAGATTTTTTGCTTCTTTCTTTTCTTCTTTCTTTCTTTCCTTCCTTTTTTTTTTTTTTTTTTTTTTTTTTTTGTGTGTGTGTGTG
TGTGACACAGAGTTTCGCTCTTGTTGCCCAGGCTGGAGTGCAATGGCGCAATTTCAGCTCACTGCAACCTCCACCTCCTGGGCTCAAGCAATTT
TCCTGCCTCAGCCTCCCAAGTAGCTGGGATTACAGCCATGTGCCACCAAGCCCGGCTAATTTTGTATTTTTAGTAGAGACGGGGTTTCACCATG
TTGGTCAAGCTGATCTCAAACCCCTGACCTCAGGTGATCCACATGCCTTGGCCTCCCAAAGTGCTGGCATTACAGGCATAAGCCACCGCGTCCA
GCCTTATTCTAGGTTTTTCTACTACTGTGTTTTATGTGGCTGTCTATTTTAGTTGTCAGGAGAAAATGTCACACCTCTATTATGGTGAAAACTG
TGTATTACTCATAGTTATCTATACATTTAATGCAAAAATATAATTTGTAGTGTACATGATGTTCTGCAACCTGTGTTTTTCATTAGGAATGTAT
TATGGACATCTTTCTCATCAGAGATAGAGATACATTCTCTCTCTAAAGAGTATTGAATGGCTACAGTGTTTCACAGAAGGAAACTGATCAGTCA
CCTACTGATGCACATTTAGGTTGTTTCCGATTTTTGGTTTTTGCTTTTTTTAGAGACAGGGTGTTGCTCTGTCGCCCAGGCTGGAGTGCAGAGG
CACCATCATGGCTCAAGCCATCCTCCTGCCTCATCCTCCTGAGTAGCTGGGACTACAAGTACACACCACCATGCCAGTCTTTTTTTTTTTTTTT
TTTTAAGATATGGGGTCTCGCTATGTTGCCCAGGCTGGGTTTCCTGTTTTTCACTACTACAAACAAATGAACTTCCTTGTACCTGCCTCTTTAC
TCACCTCTGGGAAGATTTCTGTAGGAGAGACTCCTGAAAGTGGGACTGCAATATCAGGGGGATATAAGCATTTCAAAATCTTATCAATGTTGCC
AAACCACCCATTAAAGACAGCATCTGGCTGGGCGCAGTGGCTCATGCCTGTAATCCCAACACTTTGGAAGGCTGAGGCAGGCGGATCACCTGAG
GTTAGGAGTTCGAAACCAGCCTGACCAACATGGTGAAACCCCGTCTCTACTAAAAATACAAAAATTAGCTGGGCATCATGGCATCTGCCTGTAA
TCCCAGCTACTAGGGAGACTGAGGCAGGAGAATCGCTTGAACCCGGGAAGCGGAGGTTGCAGCTAGCCGAGATTGCGCCACTGCACTCCAGCCT
GGGCAACAAGAGCAAAACTCCATCTCAAAGAAAAAAAAAAAAAGACAGCATCCACTGATATTTAAAACGATGATATCACACAGCCAAGAAAACT
TGCAAATGCAGCTGCCAGATTTGACATTTTTATCTGGGATGGGGTTGTGAGATCATATGGATATATTTTGTTTAACCTCATTTAGATTTCTTGT
GTCCTCTTGGAACACAGCGATGTCCAATCCACCTTAATTACGTATTCTGCCTTCAGCCTGCGAAGCTTCTGTTCCTTTGAGCTAGTGACTTCGT
ACATCCCTCAGGCTATCCAACAGAGAGGAAGTCTTGCTGTGTTGCCTAGGCTGGAGTGCAGTGGTGCGATCATGGCTCACTGTAGCCTCAACCT
CCTGGGCTCAAGTCATCCACCTGCCTCAGCCTCCTGAGTACTTGGAGCTACAGCCATGCACCACCACGCCTGGCTAACTTTTGGATTTTTTTTG
TAAAGATGAGATCTCGCTATGTTGCCCAGGCTGGTCTTGAGTTCCTGGGCTCAAGCAGTCCTCCTGCCTCGGCCTCCCAAAGTGCTGGGATTAC
AGGTGTCAGCCTTTGCATCTGGCCCACAAACAGCCATTCTTGTTCAAACTTTGCCTCCAGGCCTGGCGTGGTGACTCACGCCTGTAATTCCAGC
TATTTGGGAGGCCGAGGTAAGAGGACCACTTTAGCCAAGGAGTTCAAGACCAGTCTCGGCAACATAGGGAGACCTCATCTCTACAAAAAATAAA
ATTAGCTGGGCATGATGGTGCGTGCCTAAAGTCCCAACTACTTGGGAGGCTGAGGTCGGAGGATCCCCTGAGCCCTAGAGGTCGAGGCTACAGT
GAGCAAGGTTGCTCCACTGTATTCAGCCTGGACGACAGAGTGAGAACCTGTCTCAAAAATAAATAAATAGGCCGGGTGCGATGGCTCATGCCTG
TAATCCTAGCACTTTGGAAGCCGAGGCGGGTGGATGACTTGAGGTCAGGAGTTTGAAATCAGTCTGGCCAACATGATGAAACCCTGTCTCTACT
AAAAATACAAAAATTAGCTGGGTGTAGTGGTGCATGCCTGTGATTCCAGCTACTCAGGAGACTGAGACAGGAGAATCGCTTGAACCCGGGACAC
GGAGGTTGCAGTGAGCCGAGATCGTGCCACTGCACTCCAGCCTGGGTGACAGAGCAAGACTCTGTCTCAAAAAAAAGAGAAAAAAAGAAAAAAG
AAAAGAAAATTAAAATTAAATTAATTAATTAATTAAAAATAAAAGAATTAGAAAACAAGCTTCACCTCCTCCAGGAAGTGTGCCTTCATCTCCC
TATCTCCAGAGAGGTTAGGTGCCCTCCTGGGAGCTCCCAGCCCTCTGCGTTTACTCCAAGCTGATGGCGCTGGGTTGTCATAGGTGTGCCTAGC
AACGTCACGAAGGTGTAACTCTAAGCAGGAAGAAAATAAACTTCCTCGTGGCAGATTTTACATGCACCTGGAGGCTTGAGGATGGGAAAATGAA
ACCATCCCTGTAAACCTCATGCAATTAATCAGAGAACAGAGAGGAGAAATGGAAACAAGCCAGGCTTGCAGCACACCCAGCGCTGATCATGAGG
TCAGCTGCCCCCTGATCTGCTTCCTCTTAGTTGTCTGGTGCCTGCTGTTCTAGAATCACGTAGACCTGGTTACAAGATCATAGTTCCCCTTAAC
TGCACTAGAGATAGCAACTTGAACGTTATGAAACATTAAATGTTACTTTTGAGAAATTCCTTCAGGTCCTGCGTGCCGGTGAAGCGACTGACTC
CGCCAGCCTGAAGGACCCCACCAGGAGCTAACTCCCCAAAAATGTCTTTTTCACATCATGATGATTTCATTTCCCTTGCTCTGACCAATGACCC
CAATTTTCTAGCCTCTCACCCTCCATAATCCCCTTAAAAGCCCCATCCCAGAATTCCCTGGGGAGATGCATTCGCAGGTCTCCTCCTATCCCCT
TGCACAGTGCCCTGTGATCATGAAACTCTCTCTACTGCATCCCTGCTGTCCAGTGTAATAGGGCTGTGACAGGGCAGCAGGCATACAAATCTGC
TGTTCCTGTAACAAAAAGCACACCTCTACGTCTAGATGGAGCCACGTCTAGAGCCCTGCAGATCCATGCTAGAGGGGTTCCAGCAGGCTGGAGT
ACAATGGCGTGATCTCGGCTCACTGCAACCTCTGCCTCCTGGGTTCAAGAGATTCTTCCGCCTCAGCCTCCCGAGTATCTTGAATTACAGGTGC
ATGCCTCCACGCCCAGCTAATTTTTGTATTTTTAGTAAAGACGGAGTTTCACCATGTTGGCCAAGCTGGTCTTGAACTCCTGACCTGGTGATCC
ACCCGCCTCGGCCTCCCAAAGTGCTGGGATTACAGGCGTGAACTACCGCGCCTGGCCCTTTTTTTTGTTTTGTTTTGTTTTTTGAGATGGAGTC
TCGCTCTGTCGCCCAGGCTGGAGTGCAGTGGCGCGATCTGGGCTCACTGCAAGCTCCGCCTTCCGGGTTCATGCCATTCTCCAGCCTCAGCCTC
CCCAGCAGCTGGGACTACAGGTGCCCGCCACCACACCCGGCTAATTTTTGTATTTTTAGTAGAGACGGGGTTTCACCATGTTGGCCAGGCTGGT
CTCCAACTCCTGACCTCAGGTGACCCACCCAACCTCGTCGGCCTCCCAAAGTGCTGGGATTACAGGCGTGAGCCACAATGCCCTTCCTCCTTCT
CTCATAGGCTTCTTTCTTCCAGCACCTGTAAGATCAAGGCCAGGGAGACCTCCTTCCCTGGCTCCATCTGGGACAATCACAGTGTTTCTGTGGT
CCCCTGTGAGGCTACAATTCGCCTCTCAGTTCCTGCATTGCAGAGCAGGTGGAAGCTGAGCAAGCAACACTGATCTTAGCAGAGCCTCATGTAT
TCAACTAGACATTTACTGAGCTCAGACTGAGTGCCAGGCATTGAGGATACAATATGGCAGGCAAGATTCCTGCCCCGAGAATAATGATAATTAA
AATAGCAAGCATTTATTGCACACTGATTATCTTCTAGGCACTGCGCTAAGCATTTTTTTTTTTTTTTGAGACCGGGTCTCACTCTGTCGTCCAG
GCTGGAGTGCAGTGGCGCGATCTTAGCTCACCGCAACCTCTGCCTCCTGGGTTCAAGCGATTCTACTGCCTCAGCCTGCTGAGTAGCTGGGATT
ACAGGCACACACCACCACGCCTAGGTAATTTTTGTATTTTTAGTAGAGACGGGGTTTCACCATTTTAGCTAGGCTGGTCTCGAACTCCTGATCT
CGTGATCCACCCACCTCGGCCTCCCAAAGTGCTGGGATTACAGGTGTGAGCTACCGTGCCCGGCCCCAACCTTCTTTTCTTTTTCTTTTTCGAG
TGCAGTGGCACGATCATAGCTCACCGCAGCCTCAAACTCCTGACCTCAAGTGATCCTTCCACCTCAGCCTTTCAAAACAGTGGGATTGCAGGTG
TGCCTCACCTTATCCAGCCTAGGTGCCATTAATCCCACTGTATAGACGAGTAAACAAACATGCAGACTAAGCTTGTCTAAGAGCACACAGCTAA
CTAGGGGGCAGAACCAAGCTTTAGACCTGAGAAGCCCTGTTCCAGAGCCTACTCCTTTAACCATTAACTAAACTAAACCAACGGTTGCATGCCA
GTGGGGACAAATAATGGTAAAGCAAACAAATAAAAAAGATACTGGCCAGGTGGCTCACGCCTGTAATCCCAGCACTTTGGGAGGCCGAGGCGGG
CAGATCACCTGAGGTCAGGAGTTCGAGACCAGCCTGGCCAACGTGGTGAAACCCCGTCTCTACTAAAAATATAAAAATTAGCCGGGCCTGGTGG
CACAAGCCTGTAATCCCAGCTACTCAGGAGGCTGAGGCAGGAGAATCACTTGAACCCAGGAGGCGGAGGTTGCAGTGAGCCGAGATCATACCAC
TGCACTCCAGCCTGGTGACAGAGTGAGACTCTGTCTCAAAACAAAAACAAACAAACCAACAAAAAAAGGATGGAGTCTTGCTCTATTGCCCAAG
CTGGCCTTGAACTCCCAGCTTCAAGCAATCCTCCCAGCTTACCCTCCCAGAGCCCTGGAATTACAGGCATGAGCTACCGCACTAGGCCAATCTT
TGCTTAATTTAAGATTATTTTCCTCTTTCTCTGATCACCTGGTCTGTTATTATTGGCCCAATCCTGTTTTCATTCAAGTATCCTGTCTTCACTT
TCATTTCCTGGGTGTTAAGGAACTCATACATCATCCAAATCTGGGAAAACAAAGGCTAAATTCAATTCCGGCTCAGGCAAGGGAGAAACACAAG
CAGAAGTTCAGCTTTTTGTGTTTTTGTTTTTGTTTTCAGACACAGTCTCATTCTGTTGCTGAGGCTGGAGTGCAGTGGCTCGATCTCAGCTCAC
CACAACCTCTCCCTCCCAGGTTCAAGCGATTCTCCTGCCTCAGCCTCCTGAGTAGCTGGGATTACAGGCACTTGCCACCACACCAGGCTAATTT
TTGTATTTTTAGTAGAGATGGGATTTCGCCATGTTGGCCAGGCTGGTCTTGAACTCCTGACCTCAGGTGATCCACCCACTTTGTGGATCTCCCA
AAGTGCTGGGACTACAGGCATAAGCCACCACGCTCGGCCTCATTGTGTCTTCTGCCTCAGTACATCCATATTTTGAAATACATATTATTTTATT
ATAATTTGTTTTTGAGACAGGGTCTCCCTCTGTCACCGGGCACTGTAGCATGTGTCTTTCAAACATTATCTCATTTGATCCTCTCCCCAACTCT
AGGAAGAAGATACAATTATTATCATCCTTATTTTACAGAATTGGAAACCAAGGCACAGAGAGGTGAAGGGACTCGCCCAAGGTCACACGGAAAG
TGGTGGGTCAGGGGATTGAACTGAGGGCAACTGGCTCCAGACCCTGAACTCTCCAACCCTCTGCCACCCTCCTCCTAGGTGAGGGAGATTACAT
TACTGGGGACCCTGTTTCAGGATATTAAGGGGTTTTCCAAGATGTTTCTCATAGAAAAAAGAAAAAAAAGGGTGTGGCTCATGCCTGTAATCCC
AGCACTTTGGGAGGCCGAGGCAGGCAGATGACTTGAGGTCAGGAGTTCAAGATCAGCCTGTCCAACATGGTGAAACCCCATCTCTACTAAAAAT
ACAAAAATTAGCCAGGCATGGTGGCAGATGTCTATAATCCCACCTATTCGGGAGGCTGAGCCAGGAGAATTGCTTCAACCTGGGAGGAGGAGGT
TGCAGGTTGCAGTGAGCCAAGATCACACCACTGCACTCCAGCCGGGCGACAGAGACTCCATTTCAAAAAAAAAAAAGAAGACAAGCAAGATGTT
GAGTGTGACTGGGTGGAAGCCACTGACTTGTCCCTGGCACAAGTGTGCTGATATCCCTTCCCCCTCCTTCCTCACGTCCTGCATCTCAGCCAGA
ATTGGGGTGCCGGGGTTAGCTGTGTGGCCGTCATCCCAGGCCCAGGTGAAGCCCTCGATCAGGTGAGGCCATGATCCCAACGAGTGTTTTAGCC
CAGATCCTGCCTCTTCCCTGCTTTCTGCCGAGAAGCGGGACCTCCTCTATGGAAAATATCCAGCTGGGTGAGCCTGGGAGGGAGGAGGTGAGTT
GGGCTGGACTCAGGGACCGACTCTTCCCGTCTCATGACTGTGTTTACTGGGCTGGATTTTGGGAAGGGGCCAGATTGCATCAGACAGGGCCTGA
TGGGCTGGAGCCAGACTGTGGTCTGAGGAGGAGACACAGCCTTATAAGCTGAGGGAGTGGAGAGGCCCGGGGCCAGGAAAGCAGAGACAGACAA
AGCGTTAGGAGAAGAAGAGAGGCAGGGAAGACAAGCCAGGCACGATGGCCACCTTCCCACCAGCAAACCAGCGCCCCCCAGCAGCCCCCAGCCC
GGAGGACGAGGACTCCAGCCTGGATGAATCTGACCTCTATAGCCTGGCCATTCCTACCTCGCTAAGGCCCACTCAGCCATCTCCACGAATCCTT
CCTCCTCTCCCGAAATCAGGACCCACCCCTCTTGTTTCCTCTCATTTCCTTTCCTTTCCTCTTCGTTTCTTTCTTTCTTTTTTTTTGAGAGAGT
CACTCTGTCACCCAGGCTGGAGTGCAGTAGTGTGATCACAACAACTCAAACAACTCACCGCAGCCTCGAACTCCTGGGCTCAAGTGATCCTCCT
GCTTCAGCCTCCTGAGTGGCTGGAACTTCAGGTGTACACCACCTGCAGTGGTGAGATGGGGTCTCACTATGTTTCCCAGGCTGATCCCAAATTC
CTGGGCTCAAGCAATTCTCCTGCCTTGGCCTCCCAAAGTGCTGAGATTACAGGAGTGAGCCACCCTGCCCAGCCCACTCACCCTTTTCTAGCCA
ACCTGTTCCTTGGACCCTCACGTCACCCCTGTCTAATCCCTTATCCCAGGAGTGCTATGTTACTCAGCCTGGGACCTCACACACATCTGGGGTC
CCACATTCCACAGAGGGGAAGCAGCAGGCTTCTCCCTGCTCTTCCCATCCCCACAACCCTGAACCCCTGCCTCTCCTCTGACAGGGCCTCTCAT
CATGCCTATGCCCACTTCACCTCTGACTCCTGCCTTGGTTACAGGAGGTGGAGGCCGGAAAGGTCGCACCAAGAGAGAAGCTGCTGCCAACACC
AACCGCCCCAGCCCTGGCGGGCACGAGAGGAAACTGGTGACCAAGCTGCAGAATTCAGAGAGGAAGAAGCGAGGGGCACGGCGCTGAGAGACAG
CTGGAGGTAAGGAGTCGGGGGGCCCAGAGAGCTCAAGGTGGTGCTTCTGCCATGAAGGACAGGCCGGAAGGTGTGTGATTGGGTGGGGAGGAGG
GATCAGGCAACTGTTGTCTTGATGCAGAATAAAACGAGACATATGTTTGATTGTGAGTTTCCTAGTGGCCAGAGCAAAGTGGGAACACAGAACC
TTTCCAATTGAAGGGAAATTTGACTTACAGAGACAGAAATTGAGGATAGAGAGGGTGGGTCCTTCCCTGGAGTCACAAATCAAGTGAGTGGGAG
AGGCAGAATTAGAACCCAGATCTCTGTCCCTTTTACCACCTGCTTTTCCTCACCCCCCAGATGAGGCCAGACCATGGACACTACACCCAGCAAT
AGAGACGGGACTGCGGAGGAAGGAGGACCCAGGACAGGATCCAGGCCGGCTTGCCACACCCCCCACCCCTAGGACTTATTCCCGCTGACTGAGT
CTCTGAGGGGCTACCAGGAAAGCGCCTCCAACCCTAGCAAAAGTGCAAGATGGGGAGTGAGAGGCTGGGAATGGAGGGGCAGAGCCAGGAAGAT
CCCCCAGAAAAGAAAGCTACAGAAGAAACTGGGGCTCCTCCAGGGTGGCAGCAACAATAAATAGACACGCACGGCAGCCACAGCTTGGGTGTGT
GTTCATCCTTGTTCTTTGTGTGTTTTTGTTCGGGCATGTGTGTGCTTGCCTGTGCCTGCACATTCATGAGCCTGAGAGAGCATCTTTGATGTGT
ATTTGTGTTTGGTGTATGTATCTGGGGCAGGGAGTGTTCCTGCTCTTGCAGGGTCTACGCTGTGAATGCAGCTTTTGGTTTGTTTGCTTTTGCT
TGCATATATTTTAGTGCATACATTTCTGTGGGCTCCTACGTAGTGGAAAGGAATTTCTTCTGCTTTTTTGCGATACTGCCCATGAAACACGGCC
CTCCCCAGCACCTGTTTTTGTTGATTGTGTCCTGTTCATAGACGGGAACGCTACTTATGAGTGCCATCTAAAAGTCAGAGAAAACTGAGATTTA
AAATATTAAAAGCCAGGGCCGGGGGCAGTGGCTCACGCCTGTAATCCCAGCACTTTGGGAGGCCGAGGTGGGTGGATCACAAAGTCAGGAGTTC
AAGACCAGCCTGACCAACATGGTGAAACCCCATCTCCACTAAAAATACCAAAAATTAGCCAAGCATGGTGGCAGGTGCCTGTAATCCCAGCTGC
TCAGGAGGCTGAGGCAGTAGAATCGCTTGAACCCAGGAGGTAGAGGTTGCAGTGAGCCGACATCGTGCCATTGCACTCCAGCCTGGGTGACAGA
GGGAGACTCTGTCTCAAAACAAACAAACAAACAAAAACTAAAGTCTGGGAGCAGTGGCTCATGCCTGTAATCACAGCAGTTTAGGAGGCCGAAG
TGGGAGGATTACTTGAGCCTAGGAGTTTGAGACCAGCCTGAGCATCATAGTAAGACCCCATCTCTACAATTTTTTTTTTGAGACAGAGTCTCAC
TCTGTTGCTCAGGTTAGAGTGCAGTGGCACCATCTTGGCTCACTGCAACCTCTGCCTCCCGGGTTCAAGCAATTCTCGTGCCTACGCCCCCTGA
GTAGCTGGGATTACAGGTGAGCACCACCACGCCTGGCTAATTTTTGTTTTTTTGTTTTTTTGATACAGAGTCTCACTCTGTTGCTCAGGCTGGA
GTGCAGTGGCATGATCGCAGCTCACTGCAACCTCCGCCTCCTGGGTTCAAGCTATTCTCCTGCTTCAGCCTCCTGAGTAGCTGGGACTAAAGGC
ACCTGCCACCATGCCTGGCTAATTTTTGTATTTTTAGTAGAAACAGAGTTTCACCATGTTGGCCAGGATGGTCTCAATCTCTTGACCTCATGAT
CCACCCACCTTGGCCTCCCAAAGTGCTGGGATTACAGGCGTCAGCCACCACGCCTGGCCAATTTTTGTATTTTTAGTAGAGATGGGGTTTCATC
ATGTTGGCCAGGCTGGTCTCAAACTCCTGGCCTCAAATGATCTGCCCACCTCAGCCTTCCAGCCTTTGGGAGGCCAAGGAGGGAGGATCGCTTG
AGGCCAGGAGTTCGAGACCAGCCTAGGCAACATACCAAGGCCCTGTCTCTACAAAAATTTAAAAATTAGCAAAGCATGGTGGCTCATGCCTGTA
GTCCTAGTTGCTCAGAGGCTGAAGTTGGAGGATCCCTTGAACCCAGTTGGAGGCTACAGTAAGCCATGATGGTGCCACTGCACTGCAGCCTGAG
CAATAGAGTGAAACCATGTATTGAAAAAGAAAGAAAGAAAGAAAGAGAAAAAGAAGGAAGGAAGGAAAAGAAAGGAAGGAAGAAAGAAAAGAAA
GAGAGAAAGGAGAGAAAAAGAAGAAAGAGAGAGAAAGAAAGAAGAAAGAAAGAAAGAAAGAAAGAAAGAAAGAAAGAAAGAAAGAAAGGAAGGA
AAGAAAGAAAGAAAGAAAGAAAGAAAGAAAGAAAGAAAGAAAGAAAGAAAAGAGCGAGCCCCGGCACAGTGGCTCACACCTGTAATCCCAGCAC
TTTGGGAGGCCAAGGCAGGCGGATCACCTGAGGTCAGTAGTTCGAGTTCGAGGCAGAAGTTGTGGTGAGCCAAGATCACGCCATTGCACTCCAG
CCTGGGCAACAAGAGCAAAACTCCATCTCAAAAAAAGAAAAAGAGAGAGAAAGAAAGAGAGAAGGAGGGAAAGAAAGAGGAAGGAAAGGAGGGA
GGGAAGGAGGGAAGGAGGAAAGGAGGGAAGGAAATATTAAGGGATTTGCCCTAGCTCACTCAGGGCTCATATTCAGGGATCTTATTGTCTTCAG
ATATGAGGTGGGTCCCCAGGCCAAGGGGGCTGTGGGACAGGGTTCTGGGAAGTGAGATGGGGGAGGGAGATTCTTATTCAGTGCTATGTCTCAG
GACCAGAGTTGAAGAAAAATATGGGGCAAACAGGAAGTGTGGTTGGAGCTGAGATTATTTGTTGATTGAGATAAAGGTTTGGGTTGCTATTATG
AAGAATCAAAACAGGATACAAAGTTACTCCTCTCTTACTTAGCCCCAAGTCCTCCTGGGTTCAAATGGCAGCTCCATTGTGTTGAGGATTCCAG
CTATTTTTACTCACTGTTCTGCCACACCCAAAACATGGCTTCCACTTTGAGGCCCAAAATAGCTACTCCAATACCTGCCATCACGTTTGCATCT
CAGCCTGTGGAAAGAGTGTGGAAGAGACAGAGGAGGCCACACCTCTTCAATTTTAGGGCATAATCTAAAAGTAGAACACATCACATCTGCTCCG
AATGTGGCTACATGGCCACACCCAACTACGAGAGAGGTTGGGAAATGTAGCATTGAGCTGCTTAGCCACGTGGTAGCCAAAACTTGGGCAACAG
CAGGGTTTTATGATGAAAGGGAACCAGAGAGAGTGAATACACGAAGAAGCTAGCAAGAAACATTGCCCACATGCAGACTCAACAGATGTCGGGG
GAGAAAACTCTGAGATTGGGCCCCGGGCAGAGCCTGTTTCCTTTTCCCCTGTCCCTTTCACATAAGCCCCACACTGCAGAACTTGGAGTCAGTG
GTTCATGGGGACCCAAGGACATCCACAGAAGACCGAAGTACCTGATAGAGCAGGAACAGATGCACGTCAGACTACGACCAGCTTGAACCCTTGG
GGACCTGTATCCATCCCCTTCCCTTGAGTCCAGCCTAATCACAGCCACAGAATGAATCCATGACCCGGAAGGACATTTAAGGACCTCTGGCCCA
ACTCTCCCCACGCAACAGTGGGATTGCCTCTGCTTGTTTGAATACCACTATGGAGGGGGAACTTGCTACATTTAAAGGTTGCTGAATTTTTTTG
TTTTGTTTTGGGAGATGGAGTCTCTCTCTGTCGCCCAGGCTGGAGTGCAGTGGTGTGATCTCGACCCACTGCAACCTCCGCTTCCTGGGTTCAA
GCGATTTTCATGCCTCAGCCTCCCTAGTAGCTGGGACTACAGGTGTGGGCCACCACACCTGGCTAATTTTTGTATTTTTAGTAGAGACGGGGTT
TCACCATGTTGCCCAGGCTGGTCTCAAACTCCCGACCTCAGGTGATCTGCCTGCCTTGGCCTCCCAAAGTGTTGGGATTACAGGCTTGAGCCAC
ACCACCCGGCAAAGGTTGCCTAATTCTATCTCAGGGCAAGTCTGTTCATGTGGGCTGAAATCTGTCTCTCATACCTGCCCTTAAATAAGCTTCT
GTTTTTCTGGTCCTTTCTGTCTGAGATGACTTTAATTCCTCCCCCGACCCCATCTCATGAGGCTAAGCTTAGATGTTTCCTTCTCTTCCTCCCT
GATGGCTGCGTGCAGAAGCTCATACCTGCAATCCCAGCACTTTGGGAGGCCGAGGTGGGAGGATTGCTTGGGCCCAGGAGTTCTAGGCCAGCCT
AGCAACACAGCAAGACCCTCTCTCTACAAAAAATTAAAAATTAGCCAGGTGTGGTGGCTTGTGCCTGTGGGCCCACCTACTCAGGAGGCTGAGG
TGAGAGGATCTCTTGAGCCTGGGAGGTGGAGGCTGCAGTGAGCCATGATCTCACTCCAGCCTGGGCGTCAGAGTGAGACCTGTCTCAAAAAAAC
AAAAACCAAAGTTTTCCTTAACTTGCAATCCTCCACCCATCTCCTGACCTCCACCCCAGGCCGACCCTCCTCTGGGATCACACGGAAGCCTGGG
CCCAGAATCTTACAGTCTACCTTGGAAATCCTTCAGATTTTGCCTCCAACTCCTCTTTCCATACAAGTTACATATTAACTCAATCAATGCTTAT
TGGATGCCTTCTGAGTTACCAGGATGCTGCTGGAGGCCTGTGCTGCTGAGAGGGACAAATAGAATCCTGATATGACTGGAACCAGGAATAGGGC
CACCATCAGCTCTAGAACCCAGGGAGCAAATGGCAGGAGCAACACCAGGAAGTCGGCCCTCAGCCAAGCACAGACCTGGTGTGTTGGCTTCAGA
AAATCCTGGAAACATCTCTGCTGTGTTTGGAGCTCCTATTCTGTGAGAAGTGTTTTATAGGCTTTGCTCCATTTAATCCTTACGATAACCCAAT
AGGACATACTATTAATGATCCCCTTTTTTTCAGACCGGAAAACTGAGGTTCGGAGACATTAAGTAATTTGCCTAAAGTCACACAGCCACATCCT
GTAGGACTTGGAATTATGAACTCAGGTCTATCTGAATTTTAAAGCCTGGATTTTTCCCCCTTTGCTACATGCCTGGGAAGAACCATGTATTGAC
AATGAAGAATCCTAAACTCTCGTTAATTTCTGGTCAATTACTCCTCTGGGCCTGGGTTTCCTCACCTGTCAAATGGTGAGACTGGCCTCTCTTC
TGTCAAAAGAGAAAATGAAGGCTGGGAAGCACTGTGTCCCTAGCTGGAATGGCCACTCCCTGTCCTGGGTCCTTTGACACCAGCCAGGAGTCCT
CACACACTGCCCCTCCCTCCTGGCCTCTGATTGCCCTTTCCTGGCCTCGCCCTCGCCTGGCACAGCCTCTGCCTGAGAGGCCTTTAAGTGGCTG
TTCTGGGAATTAAGGCAATTCTTGGAATTGCAGAATTTTTGGATCCGAAAGGATCCTACCAAGACTCTTCCTCTTCTGTCTCCATCCCCTTTCC
TAAACCCTTTCTTTTTCTTCTGGTTGCATGTCTGTTTCCCCATTTTGGGGGGATCCCCCTGAGAACTAGAGAAATCACTGACCTCTGTCCTACC
CCAGGGGCTTACAGAATTGGCCCTGTCAGGCTTCTGTAACTCAAAGGACTCCCGACTCCTTGCAGAGAACTGAGAAACTCACCATGGGGTTGTC
TGTCTGTTCTGCAAGCAACCTGATTCTCTTCCACCTTCCCCTTTCTCAAAGGCCAGCTCACAGATACAGGAGTACATTTTTAAATTTCAGAATC
ACCCTCAGTTTTCTCCTTTTTGAGACAGGGTTTCAGTCTATCACCCAGGCTGGGGTGGAGTGGTGCAATCACTGCAGCCTTGACCTCCTGGGCT
AATTTTTAAATTTTTCGTAGAGATGAAGTCTCGCTGCTATGATGCCAAGGCTGGTTTCAAACTCCTGTCCTCAAGTGATCCTCCTGCCTCGGCC
TTCCAAAAGTGGTGGGATTACAGGCATGAGCCACCGTGCCCAGCCCCAAAATTGATTTTTTAACTAAAATCCCCTAAAGTTAATGCTAATGACA
GTAATAGTTCCAGCTACCACTATTGATAATCTACCTTAGGGTTTTCCCAACTTCATCTTTCCAATAGCACTTTTGTGATTGATTTCTGCTGTCT
ATACATTCAAACTATACTATATATATTATGCTATATTTACTTAGCATTTAAAAACTACCTCCTGCCAGTCACAGTGGCTCACGCCTGTAATCCC
AGCACTTTGGGAGGCCAAGGCGGGCAGATCACCTGAGATCAGGAGTTCGAAACCAGCCTGGCCAACGTGGGGAAACCCCATCTCTACTAAAAAT
ACAAAAATCAGCCAGGCGCAGTGGTGGGTACCTGTAATCCCAGCTACTCAGGAGGCTGAGGCAGGAGAATTGCTTAAACTCGGGAGGCAGAGGT
TGCAGTGAGCCAAGATCGTTCCGTTGCACTCCAGCCTGGGCAACAGAGCAAGACTCTGTCTCAAAAAAAGAAAAAAAAACTACCTCCTTATCCT
TTTCACTCAAATATACTTAAAAAGGAAGCTACAGCATATAACCACCAACAATGGAAAACCATGGTCATATGTCATAATTAGAAATTAATTGTAG
GCCAGACACAGCAGTTCACGCCTGTAATCCCAGCACTTTGGGAGGCTGAGGAGGGTGGATTATCTGAGGTCAGGAGTTTCACACCAGCCTGACC
AATATGGTGAAACACCATCACTATCAAAAACACAAAAAAATTTAGCTGGACATGGTGGCAGGCAGCTGTAATCCCAGGTACTAGGGAGGCTGAG
ACAGAAGAATCGCTTGAACCTGGGAGGCAGAGGTTGCAGTGAGCGGAGATCGTGCTACTGCACTCCAGCCTGGGCAACAGAGCAAGACTCTATC
TCAAAAATAAATAAATAAATAAAATAAATTAACTGTAAAGGCTGAGCATGGTGGCTCATGCCTGTAATCCCAGCACATTTGGAAGCTGAGGTGG
GTAGATTACTTGAGGTCAGGAGTTTGAGACCAGCATGGTGAAACCCCATCTCTACTAAAAATACAAAAATTAGCTGGGTGTGATGGCACACCCC
TGTAATCCCAGCTACTCAGGAGGCTGAGGCAGGAGAATTTCCTGAACCTGGGAGGCAGAGGTTGCAGTGAGCCAAGATCGAACCATTGCACTCC
AGCCTGGGTGACAAGAGCGGAACTCCATCTCAAAAAAAAAAAAAAAAAAAAAAGGAAAGGAAAAGAAATTAACTGTAAAAAGAAATACCGAAGT
TAGCCAGTGTGGTGGTGTGTGCCTGTAGTCCTAGCTACTCAGGAGGCTTAGGTGGGAGGATCGTTTGAGCCCAGGAGTTTGAGGCTGCAGTGAG
CTGTGATTGCACCACTGCACTGTAGCCTGAACAACAGAGCAAGACCCTGTCTCAAAAAAAAAAAAAAAAAGGAACACTTAACTAAAACTTTTTT
TAAAGTTCATCCAGCCAGGCGCGGTGGCTCATGCCTGTAATCTCAGCACTTTGGGAGGCTGAGGCAGGCGGATCACCTGAGTTCGGGAGTTTGA
GACCAGCCTGACCAACATGGAGAACCCTTGTCCCTACTAAAAATACAAAATTAGCTGGGCGTGGTGGTGCATGCCTGTAATCCCAGCTACTTGG
GAGGCTGAGGCAGGAGAATCTCTTGAACCCAGGAGGCAGAGGTTGCAGTGAGCTGACTCCAGCCTGGGCGACTAGAGGGAAACTGCATCTCAAA
AAAAAAAAAAAAAAAGGCCAGGCACGGCAGCTCACACCTGTAATCCCAGCACTTTGGGAGGTCGAGGTGGGTGGATCACCTGAGGTCACGCGTT
CAAGACCAGCCTGGATAACATGGTGAATTCCCTTCTCTACTAAAAATACAAGAATTAGGTGGGCATTGTGGCACTTGCCTGCAGCCTGTAGTCT
CAGCTACTTGGAAGGCTGAGGCAGGAGAATCGCTTGAACCTGGGAGGCGGAGGTTGCAGTGAGCTGAGATAGCCCCACTGCACTCTAGCCTGGT
GACAGAGCAAGACTCCGTCTCAAAAAAAAAGAAGAAGAAGGGTAGGGCGTGGTGGCTCACACCTGTAATCCCAGCACTTTGGGAGGCCGAGGTG
GGTAGATCACCTGAGGTCAGGAGTTCGAGACCAGCCTGGCCAACATGGTTAAACCCCGTCTCTACTAAAAATACAAAACAAAACAAAAATTAGT
TGAGTGTGGTGGCACGAGCCTGTAATCCCAGCTACTTGGAAGGCTGAGGCAGAAGAATGGCTTGAACCCAGGAGACAGAGGTTGCAGTGAGCCG
AGATCGCACCACTGCACTCCAGTTGGGTGACAGAGCTGAGACTCTGTCTCAAAAAAAAAAAAAAAGAAGAAGAAGAAGAAAAAAAATTATGGGA
GATCATTGTTTTGGGTTGAGCTGCTGCACTTTAGGCCCCAACAGATAAGACCAAACCAAAATGTAGTTACTCATGCTAAATGTCACATAATCAA
ACTGAAACTTTAAGGAAGGAGATAGATCCCAAACAGACCAGTTTTTCCTGAAAACAGGAGATTCCAGTCAACCTGAGTCAGTGTAATATTGGTC
CCCTTTGCTTTAACTCTCACAAAAAAGTCACCTGAAGGAACCTCATGTTAACCAATCAGCTTTTTTCCTATTGTTCTGTTTCCTTGGCCAGTGA
GAGATCTTGATTCTGTTTTGTAGAATGAAAGCTGTACCAATTCATGAATTGCAAATAAAAGCCAATTAGATCTATATCCAAAATTGTTGTCATT
TTGTCTTTTGACACGGTGAAAGGTGAATAGGAGAAACTCCACCTTGGTTTGTATATAAAAATATTATCCAGGATGGTGGCTCACGCCTGTAATC
CCAGCACTTCGGGAGGCCAAGGCGGGCAGATCACCTGAGGTCAGGAGTTCAAGACCAGCTTCGTCAACATAGCGAAACCCCGTCTCTACTAAAA
ATACAAAAATTAGCCAGGCTTGGTGGCTCGTGCCTATAATCACAGCTACTAGGGAGGCTGATGCACAAGAATTGCTTGAACCCAGGAGGCAAAG
GTTGCACTGAGCCGAGAACACTCCACTGCACTCCACTGAGCCACTGCACTCCAGCCTGGGAGTGAGACTGCCTAAAAAAAAAAAAAATCTAGCC
ACAGCCATTATTATCACACTGGATATTTACCAAAGCCTGCACTAGGGAAAAACACCTGGGTCACGGGTTCACTGCTGGTTGGAGGCTGAGCCAA
GAGCAAACTAAGTGTGCTGATACCCATGCCCCTGATTTCTAGGGAGTTCTGTGGCCTTCAGGGAGTCCCAGGGGAGCAAGATTAGAGCACCCAG
TCCCTGAGTGCCCTGCTATCAGCGGCCTTGACAGAGGCGATCTCTCCTTGGTGGCTGGAATCAGCATCCAGGGCTCTGTCAACTATTAGAGAAA
CATTTTATTCTTTTTGTAAAACAAAAGTTCTCTTTTCTTTTCTGATTACAAAAGAAGTTATTGCTGTGGAATCGCAAGATAATCCCCATCCTCT
GGTCTGTCTGTCCTTTGTTCCCATGACTGAACTCCAACTTTTGCAAAACACTTACTTTTATTTTATGTTTTATTCTAGAGACAGGCTCTTGCTC
TGCTGCCCAGGCTGGAGTGCAGTGGTGTAATCTCGGCTCACTGAAGCTTTGACCTCCAGGGTCTCAAGTGATCCTCCCACCTCAGCCTCCTGAG
TAGCTGGGACTACAGGCACACGTCACCACACCCTAATTTTTGTATATACACACACACACACACATATATACGTATATATATGTGTGCGTATATG
TGTGTGTGTGTATATATATATATAGTGTGTGTGTGTGTGTGTGTGTCTGTGTGTGTAGAGATGGGTAGGGGGTGGGTCTCACTATGTTGCCAAG
GCTGGTCTTGAACTCCTGGGCTCAAGTGATCCTCCTGCCCTGGCCTTCCAAAGTGCTGGGATTACAGGTGTGAGCCACCATGACTGCCCTGCAA
AAACATTTAAATTATAAAATTAATGTTTCTTTGTCAGCACTTCATGGAATCAGTACTTCATGGAATTCTAATATCAGCTTTGTATCCTGTTCTC
TTTTCTGGAAACTAGTTCGGAAAGTTTCATTTCTTTTTTTTTTTTAGATGGAGTCTTGCTCTGTTGCCCAGGATGGAGTGCAGTGGCGTGATCT
CAGCTCACTGCAACCCCTGTCTCCCAGGTTCAAGCAATTCTCCTGCCTCAGCCTCCTGAGTATCTGAAATTAAAGGTGTGTGCCACCATACCCA
GCTAAATTTTGTATTTTTAGTAGAGACGGGGTTTTACCATGTTGGCCAGGCTGGTCTCGAACCCCTGACCTCAGGTGATCTGCCTGCCTCAGCC
TCCCAAAGTGGGATTACAGGCATGAGCCACCGCGCCTGGCCAGAAAGGTTCATTTCTTTAACTGTTTGGGGAAATATCATTTATTCCCTCGACA
AATACTTTCTGAGTACCTACCATATGCCAGGGAATAGTCTAAAACT
HUMAN SEQUENCE—mRNA
CAGCCTTATAAGCTGAGGAGGTGGAGAGGCCCGGGGCCAGGAAAGCAGAGACAGACAAAGCGTTAGGAGAAGAAGAGAGGCAGGGAAGACAAGC
CAGGCACGATGGCCACCTTCCCACCAGCAACCAGCGCCCCCCAGCAGCCCCCAGGCCCGGAGGACGAGGACTCCAGCCTGGATGAATCTGACCT
CTATAGCCTGGCCCATTCCTACCTCGGAGGTGGAGGCCGGAAAGGTCGCACCAAGAGAGAAGCTGCTGCCAACACCAACCGCCCCAGCCCTGGC
GGGCACGAGAGGAAACTGGTGACCAAGCTGCAGAATTCAGAGAGGAAGAAGCGAGGGGCACGGCGCTGAGACAGAGCTGGAGATGAGGCCAGAC
CATGGACACTACACCCAGCAATAGAGACGGGACTGCGGAGGAAGGAGGACCCAGGACAGGATCCAGGCCGGCTTGCCACACCCCCCACCCCTAG
GACTTATTCCCGCTGACTGAGTCTCTGAGGGGCTACCAGGAAAGCGCCTCCAACCCTAGCAAAAGTGCAAGATGGGGAGTGAGAGGCTGGGAAT
GGAGGGGCAGAGCCAGGAAGATCCCCCAGAAAAGAAAGCTACAGAAGAAACTGGGGCTCCTCCAGGGTGGCAGCAACAATAAATAGACACGCAC
GGCAGCCACAGCTTGGGTGTGTGTTCATCCTTGTTAAAAAAAAAAAAAAAAAAAAAAAAAA
HUMAN SEQUENCE—CODING
ATGGCCACCTTCCCACCAGCAACCAGCGCCCCCCAGCAGCCCCCAGGCCCGGAGGACGAGGACTCCAGCCTGGATGAATCTGACCTCTATAGCC
TGGCCCATTCCTACCTCGGAGGTGGAGGCCGGAAAGGTCGCACCAAGAGAGAAGCTGCTGCCAACACCAACCGCCCCAGCCCTGGCGGGCACGA
GAGGAAACTGGTGACCAAGCTGCAGAATTCAGAGAGGAAGAAGCGAGGGGCACGGCGCTGA

[0299] TABLE 36
MOUSE NOMENCLATURE
ICSGNM Zfhx1b
Celera mCG8151
HUMAN NOMENCLATURE
HGNC ZFHX1B
Calera hCG19701
MOUSE SEQUENCE—GENOMIC
CATAGCTTTGGCCAAACAGCATAGCTTTGGTCCTGAGGGTAGACTAAAGCAGTCCTAAACCTTTGTGTCTTTCCCAGCTTGCTGAACAACCCAA
AGTAGAAACAGAGCGCCTACTCAGAGTACTAGCAGTTTTAAAAGTTTAAACTCCACACAAGTTCTTTTACAAAAGAGTCCACCCTTTTATGTAC
CTTTAAAAACATTTAGCCACTTTATTCCTTTGTGTCTTTGAAGAGGAAAAAAAATTAATAAAGTTGTAGGGTCCTTTTGAATTTAGAAAACGTT
GGCAATGTGGGAAAGAAAGGCATTCAGCATTTCAAAGTTCTGGTGAGGAAGGAAAAAAAGATTCTGAATAAAACAATTTTATGTGATTTTGCAG
GTGGTTTGAGCTATCATTTTTATATGTACGTTTGTACCACTGCTCATTGGAATGTTCATATAATACTGACCTAATTATGCATAGAAAAGATAAG
CCATTTACTTGATTCATTTCTTCTTTTTAAATCAAGAAAGGAACAAAAAGGCTCCTATTTTTCTGAAAGAAATTGTTCGTTTTATTGCAGAAAA
GTAGCAGCTTGTGCAGAGCTAGAACTGTAACAATTTTATATTCCAAAGGTTTTGTGTGTATTCGGTTAGTTACAGTAATTATACCCAATAACTG
ACAGCCAAAATCACGTAGGAGAAAGCAAAGGCTGTTTTCTCACACGGGCCCTGCTGCAGAACATCTGCTGAGAGATTTGCATATTAATTAACCC
ATATTAACTCTAATTATTCTGGGAAATTATCAAATAAATTGAATTTTCTAATTTTAACCTTTCTTTTACTTGACGCGTGTCGAGGCTGAGAGGA
CGCACCAGGCCGTCTCACCTGGGCAATGAGCAAAGGCTCTTTTCTCCCCCTTTGCTCCTTTAGGCCTGGGGCAGCCTGGGGAGCCTTTCTGTGC
CTTGTGCTTTTTTGGCTTCTGTGCTTGGTAGGGTCTCCGTGCATTTGTTGAGAGAGAGAACATGTGTGCCTGTGAGCACAGATGGTGGATTTAT
ACAGGGGTGAGGAAAGGTGCTACCTCAGAACACTTGAGCAAACCTTAAGTTGTTTTTGTGCGTTGTTTTGTTTTGGGTTTTTTTTTCTTCTTTC
TTTCTTTCTTTCTTTCTTTCTTTCTTTCTTTCTTTCTTCCTTTCTTTCTTTCTTTCTTTTCCTCCCAGCCTGTTGTTTAGGCCTGAGCAAATAA
ATGGGAGTTTAATTCAATTAGAGCCTGGCTTTAGTCAGTGCCTCATGACAGAAATTATTCAATATTTTTCCCCTCACATTGTTTGGTTTACACA
TCAGTGACTCCCTTCCTTTTGTACTCTGTTTAGAGTGGCCATAATGTGTTGAGCTTTTGTGTCTGAGATGTCACTGTCCCTTTCACCGTTGTCT
GGTTCTGTCAATTGTGAGGTGCAATGACGCTATTTTGCAAACAGGCCTCTGAGAAGGGTACTGCTATGTTAGCCGAGGTGGCTTCACAGTAAAT
TATTTTATTAGTCTCACAGACCTGAACCTAATCCTCTGGGTAGGGAGATGAAGTTTGGAAGTCATCCTTGGGTATTAGACGTAACATAAAACAG
AGATTTCTAGGACAAATCCTGTAGGGGCGGCATGAGGAGCTCAACTCACTGGCATGATCTTGTTTTAGGTGTTTCTTTGGGGTAAGAGACAAGA
TTTACCAAGATTAAGATTCTCTGCATGTGATTAAGTTTGTAATGACCCATGGTTTTAAGCCATGGTGATCAGGCGAAAACTACTGATTTAATCT
GTATGAGGAACAAAGTCTTCCACAACTGCTTTCTGTTGAGCCACACCTCTCCAAAGACAGATGACTCTGTATTCCCCCAATGATTTCACTGCCC
CTACCCACCAAGATTTATTAAGGTGATCCACACCCCTGGCTGCCTTACAGGGGATTATTTTCTTCTGGAAAAGCTGTCCTTCCTATTATTCCAC
AGCTGGGTTAGACACACCGCTGCAGCCTCACAGAACATTACTTAGACCCAAGAATTATTATTGACACCAGTACACTGCAGCAACCAAGAAACTC
ACCAAATAGGTCTGTCCGACTGACACATACTTGAGAACAGTTTGTTTTTTTTTTTTTTTTAATAGATTGACTAGAACTGGCACAGAAAATCTTT
TGCTGGGAAAACATTTCTTTAATATGTTTTTACTTCACGTGAGGATATAGATTCAAGTTACTCTGTGTGTGTGTGTGTGTGTGTGTGTGTGTGT
GTGATTAATTTGGTGGGATGAAATGGCTAAGTGTATATCAGTATCTGTATCTTAGAAAACTTCGCTATCACAGATGAGGTTCACGGGTGGGGCA
AATCTGTAACAATTGGAGAAAAATATTAATAGTTTTTCTAGTCTGTAATTTTTTTTTTTACAAAACATTCCAAAGTATCCTGAAAGTTACTGAC
CTTACACCTTTTATGGACTTTGAAAGTTGTGTAACCTTTTCAGGGGAAGGTGACAGACACAATATCTAATTACACAAGGACATACTTCCCATCT
TGTGATACTTGCTTTATTCAAGGTTTTATTCCCAAGGCCTTATGACTATAAAACTTAAAGCTAGACAAGGTCTGCCCTCATTTCTGATAAAAGA
AAAACCCCAAAACAATTCTGATGGCCCAGAGCATATTATTTTCTACTTACAGGTCCTAAATAAATTACAGTTCTTTTCACATGCCTCAGGAATG
GCAATGAACATTCTTTTCATGTTGCCTCTTATGACTTTGCTCGGGCCGGTTTACATATAGCAACTCATTGCATGATCATGAAGCCCAATAGTTA
GAGAATCTTCTAAACTCCTTTTGCTCTTTGGACATGCTGTTGGTAGACATAAATTCATTTGGTATTAATAAGAGTAATAAGGCTCTGAAGAACT
GATGACGAATAGATACACAATGTATATAAAATGGATTTGTAGAGCAATTGTTTTGAGGTTTTCCAGAAACATGCTATCAGGACAGGCTCGCTGA
TACAGGTACTTTGGGACACATTGTTTAGCCAGTGATGGGATTAGCTATGTGGTCTATCTTTGGACTGCAGATATAGACAGGGAGTGAAGCTGAA
AAACATTCTGAAGGATGGAAATAAAAACTACAAAGACTTGCTGGATAAAAACAGAATGGAGCATGCTTGAACCAACAGTACAATGACTACTTTC
CTTTGGCAGGGGTTGAGCAAGGTGATCACAATCATTGAGTCATAGATATACAGGAAAACCAAACATATTTACTTTAAAAAAGAAAAGAAAAGAA
AAGAAACAGATGTCAAAGCTTTGGGAAATCATGGTTTTTCACTTAGAACACGGTGACCTGGGAATAAAGTGTCTTGTATTAAAAGATAACTGAC
TTCACTATTACACATTCTTTGACTAATATCTGTTTTATGGAGATGGCAAAGGGAGTCTTGCTTTTGTTCACATCTGCCATCACCTTTTAATGTT
TCCTATGTTAAGCAAGAAGTTTAGAGGGGAAATCAGATACCTAAGATGCCACTACCATGTGCAAGTTTAATCAGAACCTCTATAACTTTATGGA
AATTTTCTTTTTAACAATCAGTATCATACTAAAATTTGGAAACAGTAGTGATTCCAGTTGGATGAGAAGCTGCCAGTCTCCCTAAGATGCTCCT
GTAACAGGGTGGGGGGACCCTCAGAATGTTCCCGCCCACAGAATTGTGGCAAGGCAGAAATTCCTCTCTTGTTTCATTTAATATGCATATTTTT
ACATAGCTAATCTGAAATGGAAACATTTTATCTCTACATTCAAAACTGCTTTTGTTTTATCAGCTGACATTTTACAACTCATTAATTTATAATG
CAGGTTTAATGCCTTTGAATGTTCCTGGGATAAAAATTAAAGTGACCAAGCTAGTTTATAAAGGCTCACTATAGTACGTTGGTAATAATTCTTT
TATAACAGTGTGTTGTACTTAATAGTGCATTCCATTTGGATGTTTTCAGTTGGCATAGTCTCTCTCTAGTATTAATTCATATTTTCACATCTGG
GTGATAGATAAATCTCCTCCTGTATTAAAATTTAGAAGTTTAAGTTCATGCACTTTGATGACATATGCTCAAATTTGGAAGAAAATCTCTGTTT
GAATCTGTCTTTGCCTTGTAATGCTCACTAGACCAGATTATAAAATGAGATTGGGCCTTGAATTTGATCATGTGATCTTGGCCCACCCCAAAGC
AGAGAGAGTTAACAAATTAACAATGATGAAGGAAAGATGTTCGTGATGAACTTTCCCCAGAAAAAAAACAAGAGTCACTGGGAAGGAAAAATCC
CTGAAAATAAAGGAGCCACATCCTGTCCTGAGTAGCACATAGTCAGAAAGCAAGATGCTTAGGGGTGGGATAGGATAACACCTCACCAGAGTTC
AGATGGAAAGTCTAAGGAAGTCCTACCACCTCTCTACCCAGAAAGACCAACTAAGGAAGCAAGCCAGGGACCTCTGCTTACAGCTCCACCCAAA
TTAAATGACCTCCAAGCTCTAAAACAATAAGGAAAGCAAATGACTCAAAATTCCAAAGTCCTTCTTTAAACTCAAGGCTGTATCATCAGTGGGG
ACATTTTAAAATTGAGGCTGCATGTCTGGGTCACATGTCAGTAGCAAACAAGAGAGCACTCTTGTCTGACTCTGCCTTGAAGCTACCTTTTCAA
TGACAACCAAGGCGTGGCACTACCCCTAAGTAGTGGTTGGTAGATGGCTGCACCTCCTTATAGCTTCTCCACATTGCAAGCAAAGGAAAACACC
AGGGAGGTAGTCTATCTTTGTTACAGCAGTGGTTCTAACAGTTGCATCACCCTGCATTTCCATATTAGTGTGTCATGCTTCACGAAATGCCATC
ACGTGCACAATTTTCTAGACTCCCGTGACAATCTCGGAAGCAGGGAACCCATTATCATTATTTTTACCCATTTGAACGAAGTTTCCTTGGGTGA
TAGACCAAGGCCACACAGCTGGTTACATGTTGGTGCTGGGACAAGAAGGCAAGTCGCAAGCTCGTAATTCTGTGAACTGCCTCTTTATTTCCAT
TGTTTCCAAACTACTGCAGGAAACAAGGGTGTATTGTTAGATTCTGGTAATTGATCAAATTGGTAGGCTTCTATAACTCAAATTAAGGGGATCC
ATGAAAGTAACAATCATCAAAACAATTTAAAATTAAGCATCTCCATCTTACTGCACAAAAATCCCCCCAAAATCCCAGGGATTTCCATTCTTTT
ACTTGTGTAGTTTAAATTTAGATTGCATTCTTTGCTGGAAAGTTGTATTATTATGCATTTTTTGAGTAGCTATTATTTTTGTGAAGATTTGCTT
TCTTGCTGGGGCATTGCCACCAAATGATCATGTGGCCTTTGCCTGGTCATTTGGCCTCAGTCTGCCTGTGTTACCTTCTTTGTTACAAGTCACT
AGCTGACCTTGGTGTCCCTCTAGCACAGTTTTGGGCTTCTGTTTCTCTAGGTAACTTGACTGTAGACTTCGTAAAGTGATCAGTGCACCTCCTT
GTATTTTCCTAGGTTTATTGTATTGTAGGTATTTAATAAATGTTTGATGATGGCATTGAAGATCCTATTGGTACACTTAACTTGAGCGATTTAT
AGGAAATCACTGTTGACCGCCTTATTAACAATTAGCTGTCTATAATGTGCATATGTAATTTTCCTTTACATCAATAAAACTTCTGCTCCTGCTG
TAGATGAAGTACTGTCCCTTCTCATCAGTTCTTTCGAATGTTAATACATTAGCTACTGATACCTTATTTGTACCGTAACTGACAGAATAATGGA
GAGAAAGAATCTAAGTAGGAGAAGGGGTTAGTTAGGTAACATTGTATAGGGCATCTTCAAAACAATAGTCCTGCTGTTTCAAATGTCAAGCTAA
TTATCAGCAATGTTTAAATGCTATAATAGGCCATTTTTGCAAATGTTGAAATTTTCCAGCAGGTATAGACATTATAAAAATGTCACATTTTGCT
ACTGTTCTTTTACATGTCACAGGAATACAAAACTCTGAAAATAAAAGTTATAGCTGTGAAAAATAAAGAGAAGCCATTACTTATTTTGCTTATG
ACTATAAAATTAATTGTCACGTTGATACAATTTAGAGTACTGTGTACTTGGGAGAAAGGAGAGAGAGGATTTAATAGAATCTGGCAAGGTGAAA
ATAATGCTTATTATAGATCAACTATGCAACCTTTTAAATACAGGTTTTTAGTAATGCGTATTCAGATACATCTTTCCGAGACTGTTTGCTATAA
AGCAAATTTAAGCATCATTTTATACCCTTTGGTAACCCCACATCACACATACAGTTCTAGAGCAAATGAAACTTTAATATGATTCTACATAAAA
TAGTAAGCCATGCCAATAATTCACATGCACTTCATATGCAAATAGTTTTGTCTTATCCATCAATTATCATGTAAACATGGTATCACATGGCAAA
CCTCCCTATAATACTGTACAGTACCTGTATATAATTATGAGCGAATTTTGCCAATGCGACAGTTTCACAGAATTGTAATTAATTCCTCTGAAGA
TTACTGTGAGAGTTTTGGATACTGATGCTGTTTTTGGACATTTATTACTGCTCTTTAGTTGGCTTTTTGCTGTGCCTCAGAGACAGATGTAAAA
TTAGTGTCTATTTTGAGCCAGCAAACAGTACATCTTCCTTCTTGTTCATTGAATTGCAGAGAGGAATTCTTTGGACTCCCACTTCTTTGTGTCT
TTTGAAGTAATTGTTTTGTGCTAGCATGTAGCATCAAAACATGTAGAAAATTGTTTTGTTTATGCTCAGGGTGATATATATGACCCCATACAAT
AACCAACCAGACTTTTCTAAAGTCTATGGAAGGATCTACATGCTTAAGTTTTTAAAATAGTTTGCAGTGTAAGTTCAACAAACAGGTACTCTTT
AATATATTCTGCCCAGTGTCCTTCATTCAAAACCTGGACTAGTTATTTCAGTAAATGCCTTTAATCTAAGAAGACATAGGCAGGCAGATCTCTG
TGAGTTCAAGATCAACCTTGTCTACATAGTAAACTCCAGGCCAGCCAAGGCTACATAGTGAAACTTTGTCTTTAAAAAGATGTATATGGTTAGA
AAATATATTGTTAGTTATTATATAAAATTAAAGCTCTTATTTATAGATAAGGTTTAATAGAAGTGGGGCTAAGTCCACCATATACTAGCCTTTC
TATAGGAAAAAAAGTTTCGTTTTATTTTGTTTTGTTTTGTTTTGTTTTGTTTTGTTTTGTTTTGTTTTGTATTTGATGAAAATTGTTCCCAAAC
TTTCTCTGAGAAAAAAAAATCTAACTTGAGGGAAAAATCTAAGAACTCAAAAGAGGGGATAAGATGGAGAGCCTGGGTGCAATCAGTGACTTTA
ATTGTAATCATCGGTGCATCAATCCAAAAGAACAGAAAGAAAGAATCTCATTTAAATTCTAAAGTAAGAACTAAGTTTGCTATGAATTACTTTA
CCTGGATTAACCAAAAAAGAGGAGGGGGGTAACACAATGGCTTATGGGCATGACTATCCTACTTTGCCCAGCCCTGGAAAAGATGGCGTACTGC
TTCTGTAAGTGGACTTGACAGCAGTTATTTATTTAGTTTAAAAGTATTTACTAGTATTTGTGAGTGGAAACCCTAAAGGTTGTGCAGCTTTGTT
GGCCTGTGAAGGTGATGGATGCTGCGCTCCTGACCCTATATGGTGAGACATGACTTCATTGCTTGTTTAGATTGTTCTGATATTTGGGACTCCT
TAAGGGCTGTTCATAAATCATCTCTCTCTCTCTCTCTCTCTCTCTCTCTCTCTCTCTCTCTCTCTCTGTGCAGAAAATATTTCAATTGTAGTGC
TGCAGGAACACTCACACGTCACATGGGATATTGTAGCCCATGCAGAAAAGGACCTTAAAAGGCCTGGGGGGTTTTGCAGGATAAAGGCCTTTTA
ATGCCTGTCCAGCCTTAGATAATTTTATTCTCTCCTTACTGGACCTTTCTTTATTCCTNNNNNNNNNNNNNNNNNNNNNNNNNNNNNNNNNNNN
NNNNNNNNNNNNNNNNNNNNNNNNNNNNNNNNNNNNNCACACTCTACCCCCACTCAGTGTTCAGAAAATTTGTAAAGAATCTTCTGCTCGTTGC
TAAGAAATGGTTAAATCTCAGTCACCAGGGGGAAAAAAGAGCGGCACATTATTGATTGTCCTAAGGTATATGTGGGCCACACAGCTAGAGCAGA
GACGTTGGAATATCTCTCTTTTTGTAGATCTGAGAGCATTGCCCAGCCTGAACTTGCCTAAGCCCTTGTGGTCACACCTCTTGAAAAGGTTTTG
TTTCCCCCGTCAATTGGTATTCAAACCAGGTCAGCAGATTCTGTTTGCCCGGCTCTACTGCCGTTTTCATTTTAATTTGCACCTGTTGTGCAGT
TGTTCGGAAGGCAAGTGCAGACCCGCGGATTATACAAAGATCATATTATGAGCAGATATGCACGGTGTAATCTTTTTGTCCCCAGCCTCACATG
ACAAAAAAAAATCTCTCTCTTTTTGTTCCTTTTTTACTCCCTGGGAACCTGTCAAAGCAAACAGATATGACTGACTAAAATTTGTAACTAGACA
TGTTTCCAGAATTCGCCAAAAGCATTATGAACCTGACACACAATCCTTTTCATTTTTTTTCCCTCCTTTTCCGCCACTTTTGTATAATCCGATA
GCTGGCGAGAGCCACTTGAGATAGCTCAGTTGATAACTTAGCGCAGGATTGCTTTATTAGGCTCAGAGAAATCAAAATGAACCTGAAAATTGTT
TGCGCTTTTTTTCCACTGCCTCCCCCCCTCCCCGTCTCTCTCTCCCTCTCTCTTTCTCTCTCCCTCTTGTTCCCATGATGTCATCGTTCTGACT
TGTTTTTGTGTGTGTGTGTGTGTGTGTGTGTTTCTGGAGAGTTGGGTTAACAGTTCTTGGCAATCCTGTGTGTGCGTAACGGCTGGTGTGTTTC
TCTAGCTGAGCTAATGCCCCGTGTTTATTACTCTAATCTTTCTTGTCTGGTGGTAAAGTGGACAATTTATGTACTAGCATGTAGGCCGAGAGCC
TGTGAGGGCTGACTAATTCAGAAACAGCCACCTTCAATTGAGTTCACAGACCTTATTTACAGGCTGTCTATTTTAAGAAAAGCTACTGAGCGTT
GTAGGGACTGCAGGCTGCAGAAGCAGCCCGCCCGCTCTTGTGAATTATTTTAGCATTTGTGTTGGTCTTGCCCGTGTCACTTTGAAATCTTCTG
TAATTATGACACTATGAAGACATCTCAATAGTAGTATTAATGGCCCAGAAGATATGGCTTTTCCTCATTTTCTGCTTAAAAGATGAGGACATAA
ATGACCTTAGCTCATGACGGTTGAAATAGAAGAAAGACTGAGCATTTCAGACTGTACTGGTTTGTGTATGTGTCTGTGTATTGGGCAAATAGAT
GGAGAGAAAGAGAGAGAGAGAGAGACAGAGAGAGAGACAGAGAGAGAGAGAGAGAGAGAACTGTTTCTAGGAACAAAACTACAGTTAAATTACT
GAAGTCATCTTGTATTTATAGTACAACCTTATATAGTAAACACGTCATGTCACTGAGCTAATAAAACTGTCAACTGTAGATCTATTTTATAAGT
TTTTGTGAAGTGTGGAAAGTCCAAACTGCACTATGTCTTATTATGTGTGCAATATAAGCAGAATTTAAGCATGTGTACCTCTGTTGCCTTTAAA
ATTTTCCATCGTTTTCAGCAAAATATTGAAAATAAAAAGAGTACACAGCTATAATAGAAATAAGAATACAAATGCTATGCATTGGGGATATTGA
TCATGTTTTCCTGACATGGTTGAGTAATTCAGTTACGAAAATATTAATTATTTTCTATTCACCTGAATATGTGGGGGCACTGGTATTTTCAAAG
CAGCATTTTGAATGTGCCTGTGCATCTCTTCCCACAGTGGTGAACTATGACAACGTAGTGGACGCAGGCTCGGAGACAGATGAAGAGGACAAGC
TTCACATTGCTGAAGATGATAGCCTTGCAAACCCTCTGGACCAGGACACCAGCCCAGCTAGCATGCCCAACCATGAGTCCTCCCCACACATGAG
CCAAGGGCTGCTACCAAGAGAGGAAGAAGAGGAGGAGCTAAGGGAGAGTGTTGTGGAGCACAGCTGGCACAGTGGCGAGATTCTGCAAGCCTCT
GTAGCCGGTCCAGGTAAGTGTCTGTCTGTCTGCCACTGTGTGGCCCCTTCCTGGGCCACCTGCATGTCACCTGTGCTTCCCAGCAGAACACCTG
CAGCCACATCATTCAAATAGTTCTTTCCATCGCCCTTCTGGAGTAGAGAGCAGAGCTGTTGGCAGATGATGAAGTGATAGCAATGTGGTCACAT
CACGCACAGTACTCGGATTTTAGGAAATGATTGTGTATTGGTTTCAACCCAAGTTGGATATCAACTCTAGTGTAACAAACACAAAACATGAAGT
ACTTGTACATTTTCAATGTGAAACATTACAGAACGCAATCAAGATCTCTACTCTCATGACAGAAAGTATAAAGAAATACAAAGGCTTCTCTCTC
TCTCTCTCTCTCTCTCTCCCCCCCCTGTGTGTGTGTGTGTGCGCGCGTGCGGGCATGCACGTGTGTTTTGTGTGGGAATTGTGTTATTTCAAAC
CACATAAAACTGTCAGTTCGGTGTACTTCATGTCTGACACCTTCTATTGGAATTCCTTTTAATTCTATTGTAATTCCATCTAATCATTCTTTTT
TTGTTAAGTGTGAATGTGATTTCACAGTTTTACCTGGTCAGGTAGCTTTCTTACTATTTAACAGTTAAGTACTCGATAATGATTCTTACTGTTT
GATGGTCATCTTAAGGGAAGTTAAAAAACAAAACAAAACAAAACAAAACAAAACAAAACAAAACAAAACAAAACAAAACAAAACAAAAAAAACC
CAACCAAACAAACAAACAAAAAGACCGGTCCAGTGCCAACTGTGATAGAAGTAAAACAGATCAGTTTCAATCTGAAACTTCCGATGTCACTGCA
CAAATGGAAATGCCTGAGCCTGAAATTCCCCTGGAGTGGAAGACAGGGCATGCTAACGAAAATCCAAGGGCCTGCCTCGGAAGCTTAAGTGGCC
TGTGAGAAGTTTTTTAAAAGTCCCCTCTAATTCAGACTTTGTGTCTCCTTCACCTCTATTCTATGACCTAATAAGAATTACCGTTATGTAGCCC
ACCTTGGTTTTGCGTTGACAATATAAATAACTACTGTTTTTGTTTGTGTGTGTGTTTGTTTGTTTGTTTGTTTGATTGATTAATGTGTGTAGCG
GGCCAGACAGAGTTTAACTTTACCTCTCTGTTATTGTGGTGTTGCAGGCGAGCAAACACTGTACAGAAGCAGAGCAATTGTTTGCTGTGTGGGA
AGGATAATAAAATCAGGTCTACTGGTAAAGAAAATTAAGTGTGTGTGTGTGTGTGTGTGTGTGTGCTCGCGAGTGTGTATGTATGTGCGTGCGT
GTGCGTGTGCGTGTGCGTGTGTGTGTGTAGGGGAAGACTAATGGCAGTTTGACTGTGGTGTATTTGTTTCTCATTTCCCTAATACACCGTGCCA
AGTTTGGTATTCTTTCTGTTTCCAATTTTGCTTTCGGTGAAGGTTTCTCGAATCTCAGCAATCCCACACATAAACATTTATCGTTACATCCATT
AAGACTTAAGGTTTTAGATTTTCAACTATGAGGGAGAACTCAGCCAAAGATGCTTGAAAGATAAATACGTTTAATTAGGGGCAGAGGATGATCA
TTAAAGGAAGTCTGACTGCTGCAGAAGTCATTAACAATCTTAAATGAAATTTTTATTTTTATGATAGCCATTTACATGTATAATAAGAGCCAAT
GATTCTTGGGAGCAGTGTGACAGAAACAGAGTGTGGCGAGAACTCATGTAAGACATACTATTTAAATGAGCTGGTGTTAGCTATTCATATTTGT
TAATGAACTAGATATGCAGGGCTATAAGAACAAATGTTCGGATGCTTTAAATTTTAATATCCAGAAATCAAGGGTAAGGACCAATTACCAGAAT
TTTCACCCTTAAAGGAATAATTAATAACAATATAATAAATGTACAGCCTCAAACTTCTTTTTAAAAAGTTTAATTAAAAAAAGAAAGAAAGAGA
GAGAGAAAGAAAGAGAGAGAGAAAGAAAGAGAGAGAGAAAGAGAGAGGGGGAAAGAAAGGAAGAAAGAAAGAAAGATAGAAAGAAAGAAAGAAA
GAAAGAAAGGAAGGAAGGAAGGAAGGAAGGAAGGAAGGAAGAAAGAAAGAAAGAAAGAAAGAAAGAAAGAAAGAAAGAAAGAAAGAAAGAAAGA
AGTCGATAGTCGAGAAACAGCCAAAACAGCACTGTCAGGCTATAGTAGTTTGTGACTGTAGCAGTTTTTTTGTGTGTTGGTCATGGATCATAAT
CTCAAGCATCTCAATGTACAATGATCCATACGAATCCCTTACACAGCCTGCTGTCACCTGGAGTTAATGGAGACAGTGATGTAAATGCTCTTAC
CTTTATAGTAAATAAACAAGCATTCTGGAGTCCAAATAATGAAATAAAATGTAAATCCTAATCTCTTTAGGACAAGAAAGTGACCCAGCTATTA
CCTGTCTCGTTCTGATGATTAGTGATGATTTACTGTTCTCTTTTTTATTATTGTTCTAAAAGCGCTCTGATGTGGTGCCTAGATGTCTAATGAA
AAGAAATTAGTCTTAAAAAGCTCCTCATTGTTTATCCTGACTTGTAGATAACACATTTTTCTTCTGATAAAATATTTTTCTTATTTATTGTTCA
AAACACACACTATAGACAATAACTCTAATTCTGGTGTGTTTTATTTAGGAGTGTTTTCTCCCCGGTGCCTGGCTGTCTGCAGTCCTACCTCGGC
ACATAGCTTTCCCCTGAGATAAGCTCCTCTCCTTTGCTCTTTCTCCCCTCGCTCTGTAGTTTGTCTGCAGGATGCAGGTTTTTGCACTGAAGAG
TGAGGCAGAGTTCTTACTGTGCCTTTCCGGTCCTAGCACAATCAAAGTTTTGTGTTTGGAGCTGTCCTTGACATTCTTTCGTCCCACAATGGGG
TGGACACAGTGTGCTGGAAACCATGACATCATTATCATGGACACAGACTTAAATAAGTCACCTGCATCTCAGCCTCTTTCTGCTTATTCAAGGA
TTCTTCATCCTACAGAAGGAAGTGTTCTTTATTTTTACAAATGCACCCTTTAGCCCCAAGGGTGACTGGAAAGTGCAAACTTTTACAAGTGTTT
GAAAAATAAATATACTATGTGGTTTTAGACACCGTAATGCTGAGTCAGAGGTGTCTTGAAAAAGGTTAAGCATGAGGAAGGCGGCCAGTGAGGC
TTGCCAGGAATTGAGGGGAGGCATTCCTAAAGTGCTATCATTATGTCCTCTTGGATATGGATTCACATGGACCCTAACACCTGAGAAGGCTCAG
TGACTCATCTAACTAGAATGAGCTTAATATTCCAAAACAAAAATGGCCGGGCTCAGCAAGTCAGCTGGGGTAAAGACATTGCAGGTAAAAGTGG
CACCAACATCTCTAAACAGTGTGCAATCTTTGGGAAAAGCGGGTTATAGCTAGACAATGCACAAAGGGCCTACTATTCGGCTGTGCAAATGACA
TTTATGAATTTGGGAAACAGCCAACTATTGTAACTTCTCTTACCTTTTTATAAGAAAATGACTATGAGGAAGGATGTCCAGCAGAAATAGCCAA
TACTACCACCATTATTTAAAGAAGTAAAATATAAATAAATAAAAATAGCTGTTAACCGTTTTCCCTTCGGTGACTCAGTGTTCTCTCAGATGGA
AATCTTATGATTCTTGTGACTCTTGGTTACCGGAAGTCATGTGAGAGAGAGGTGTGAGGGCGAGAGGCCCACAGGCTATATTTATATCTAGTAC
TGAATGCAGACATACCTATTTTGTTTCTTTTGGGGACCAATAAAAATACCAAAAGAGCTTCCCAAAACATTGACTATTACATTTGACAAACACA
CCGTTCCTGTGTATTGAACTTCCAAATGTTTCATGCAAAATATCCCTGTGAAAATATTCCTGGAATAAAGGAGGTGCCTAAGGTCAGGAGTTAA
TTTGAAGTGGGTGCACAGTCTAAATAAATATTATTAAAATTATGTGACTGTTTTGAAAATGGCATTACATTACTCTCTCTCTCTCTCTCTGTCT
CTCTCTCTCTCTCTCTCTCTCTCTCTCTGTGTGTGTGTGTGTGTGTGTGTGTGTGTGTGTGTGTATCTGATAGGAATGTGCTCTTTCAGCTTTG
ATTCTATATACAGATAGATTCAATTTTGCTATAACGTTTTCTAGCCACTGTTTTTCCACCAACCACAGCAGTGTATTATGTGATAAACAAAAAA
ATGATCAGGATACATCTGAGAAAGAGTTCGACTCACAGTTCCTGGTGTTCTAAGTAAAAGGATTACAGTACAGAAATCCTCGCCTCGGATCATG
GTCTGCTCTCATTAGTATTGTACTGTACAGCTACAGTTTCTGAGAGTCCATGTTATGTTTGTTTATTTGAAATATTTTTAACTGGCAGGCTGCC
TTGCTCTGCCTTCCCACATACTCTATAATATAGTACACAGAGAAAATTCCCATTTTTCTCCCTTATTTGAGAGTATTACCATTTTCAAAAATGG
CCCTTAATCATTCATGAATTTCCACCTTCAACATTACATATTTTCATCTTAATTAAAACATTGAGCTACTGTTTTCTCTCTATTTTTTCATCAG
GAAATGAATATGATTGCCTGTGGAGGCATAAATGCTCAAAACAAAAAGCTATTTATAGAAATGGGGAGGTATGAGAAATAGACTTTAGAAATTT
ATGTAAAACAGTCAATGGTTATTTTTAATACATCTGAGATGTTAGTTTGTAAAATCTAAGTATTCCAAGTTATGATATGCAGAATTGGGATTTT
CTTTTCTTTTTTTCTTTTTCGAGACAGGGTTTCTCTGTGTAGCCCTGGCTGTCCTAGAACTTACTCTATAGACCAGGCTGGCCTCGAACTCAGA
AATCTGCCTGCCTCTGCCTCCCAAGTGCTGGGATTAAAGGCGTACACTACCACTGCCCAGCAGAATTGGGGGTTTTCTTAAAAGGATACCAGCC
TATACTAACTCCATCATAGCTATACCAAGCAGAAAGAACATGAAAGCAAAATGAGATATTCTGGCTTGCCATGAAGCACCCAGAGACAGCAGCT
ACTGTGTCTCTTCATAAGTTCAAATACTTCGTCACTTTTGACTCAATCTTATTGAAAAAAATAACATCTCCCCCCTGTTTGTCACTAGAACTGC
CACCAGAAGAAAAGCCCTTCGTTTGCTTCAAATAAGCACCTCTGTTTTTCACAGCTTGCAGTAACGCTTAAAGTAAATAAGTTCTTGTGCAGCC
TGCACTGTTGAATTCATTCAGATGCCTGAACAAAGCTTTTGTTTAGAGTTTTACAACAAGCCTCACTGTTTCCCTTCAAAGACTCCTCCTTGTT
CCTATGTTTGGCATGCTTAGAATAGTAAGCCTTTCTGTAATTTTCAAATGCTAAAGATAATTTTCCCCCACAGAAGAAATGAAGGAAGATTATG
ATGCAATGGGGCCAGAGCCACGATCCAGACCACAATTAACAATGGTACAGGTAAGTTACGTTCACATAGCAJACATCATGTTTGTTCTGTGTCA
TGTGGTTTTCCTGAATCTGATAAAACACAGACACATCCATTTGCACCTCCATGATTAACAAGAAAGTTAGACTTCAGGGTCTAGTTTTGTTTCA
ATTTTGAATTTGCCATATCTCTTATTTTATTAAGCAACTTTGTCTTCCATTCTTATACCCTAACTCGCCTCTATAGCTCGGGAATTTTGAGTTT
TATGAATGGACATTCTTACAGCATGATTTGTATGGCTTTCTAGTTTTAGCTTTTACTTTAAACATAATTTTTATATCATAATATAATATGCTGG
CCTTAGCTACTACTTGATATCTGTCATTGAGAATTCAAGTGATATGATGAAGTACAAATTGAAAAGTACCTTTCCCAAATCCACATTTCCATAA
ATTCCTTAAAAAATTTTATCACTTAACTTCTCTCAGATTCTCTCTTCACTTTTAAATCTCTGCGTCTACTAGAGGTATCAAGTAATATTTCTCA
GACAGACTTTTAAACAAGAATTAAATAAAACTGATGAATAACCACTCAGGACACAGTAGGCAGTGTTTTCCTTGGCTCTGCTGTGGCTGGTTAA
GGGTGGCATTCCATGTTCGCCCCCAAACAGCATCTCTTCTCACAGCACAAGGTGACATAGATTCACTCTGTGTGTATCCTTTTCTGTATGGCAC
TACCTTCATGTTTCAAACAATCCTCCACACCATTGTAACACCATTACAAATGTTAGCACAGTCCCCAATACAAAGTCATTCCCTAAAATAAGAC
AAGAACAAAAATCACATAACTGTCTCCATTCAGCGTGCCAATGAAAAAAGTGTGCACTTTAAAATGGCTTCAGAAGTATATTTAATTAAGATGA
CATTCACATTTCCCTTAAGTCGATATGCATCATAATATACTGTTCATGCTGTCTATAAATATGTTTATTAACTACTTAAGAGATATGGGTTCAC
TGTCTTGGGTATAAAGTAAGTGAAACAATTTTCTAAAAACTCCTGACTTACTCATTTGAGTAATGTCAAATTGAGTACAAAACTAAAAGTATAC
AACCATATGGGCTTAGAGAAACTGTGGACTAGAGCACTGATAATTCTAATTTCTAGATGCAGCTTCAACAATACCTAGATTACAACCTTAGCCA
AATCAATTAGTCTCTTGGGAACTCAGTTTCTATATCTGTAAAATGCATATGTTGAGCTAGCTGACTGCTCAGAATGCTTCTAGTTTTAATATTC
TATGTTGCTGGGATACTGTTTCTATAAAAATAGAAACAAAAGCGAAATGATTTTGTTTAAAATATAACAATGTACCCTAAATTAAGGACTCTCC
AAAACCTCCCAGTTTGTGAGCTTCAAGATGGCCTCAGGTTCCCTTGAAGAAAAATGTCTCAGCTTCAAGCAAGCATTCATAAAAGCTGATTCAT
TTCCTTCCTGATCACTGACAGTGTGATAAAGTGACAATTTAGCATCCATTGTATATACCTGAGTCTAACATGAGGTTAACAAAAAGTACTCAGG
TCCAGGAGGTTTGCAAATCAATTTTGAACACCCTTTCACCAGGCTTTAAGATCCCCTGTCTCCTAATACTCAGTGATTCTTAGACTTCATATGC
ATGCAGTCAATAAAGAAATCAATACATAGTCATTGAGTGTTTTCAATATAGTCCCTGTTGTGTGCATGTGACGGAGATGATAAGCCAGGAGACT
AAGTCATAATTATTATTTAATTTGGGAGAGATGCCCAATTTACATGAAAAGATGATAAACAGTAAGTGAAAATATGTGATAAATCAAATGGGAG
GAGTCATAATTATTTGAATTACAGAGATTGACAAGATCCTGCAGAGTGGGAATCTGTCTAGGTTTTATGAAGGAAGTTGAATTTGAACTAAGTA
CATTTTCAGTAGTCTGGAAGGAAGAAGTGGAATATATAAGGTAAAGAGAAAACATAGTATCTAAGTAGAAGATAATGGGCAAAAGATATAAATT
AAAGGGAATTTATGCGAAATAAAGTTATAAACCGAAGACAACTGTTAGAGAATATAAAGAAAGCATAAGAAGAAAGAAGTTGGGTCATGTTGTA
CCACCATGATGTCTTGGGAAAATCAAACTATAGCCGTGTAGTCATAAAGCCATGAAGTGATTTTTAAAAAAAGTTTGTCATAGGCGGAAGTGGG
GAATTTTCAACAAGACTTAGTAGGCTGGTCTTTAACTCATAGAGATGCACTTGCCTTATCTTCACCAGGACTGGGATCAAAGGTGTGCGGTCAG
GCCTGGCCAACCCAGCATTTTTACACAGGTTCTGGGGATCAAACTCAGGTCCCTGCTTGCATGATAAGCACTTTACTGACTCAGCCAGATCTGC
AGCCATTGACGAGACAATTTTGAAAACCTTTGATGTCCTAGAACATCCCACATCAATTTGAACATCTCTGCCCATTGTTCTGCTGTAGCATTTG
AGGCTCAAGTAATGAAAGCAAGTTTGGAAGGCTCCTAGAAACTACCCGCATCTACCCAGTGAGTCTCCTCACCTCATCTTTAACTAGCATCCTT
AAATTAATTATAGAAGAGGAAGGTTTAATATTATTCATATATAATAATGATAAAGCTGTCAAATATTTCTTTGTTATTTCATAACTGATTACCA
TCAGGATTCATTTTTTTTTCTTCAGCTTGGATAGCCATCAATAAACAAACACTCTTTTCTTTCAGTATTCATCTTAAGCAGACAGAATTTAAAC
CGATGCTTGAGGGAGGGCAAACTTTAAAGAAATGGAATATTTAATATGTGCCCTTAAGAAACATAAAATTTTATAGGGCAATGGGGAGGTCAAG
TCATAATAACAGAAAGACAACATTTGCAAATAAATAATTGTTTCTTCATTAGCTCTGCAGGCCAGTCATCATTTATTGAGACCCTACTAAGTGT
AGAAGTATTTTGTTCAGCTATGAGCACAGAGCAATCAGACAAGTAAAAGAAAAGGCACAGGGATGAGAAATATGTGCCAAATATTTAACACAAC
ATTGACTGATATTTATTCATTGCTAACCAGTGTTATAATTTTTACTGCTAGTAATGTACGTATGTGTTACATTGTTTCATTTCAAGTACAGCAA
GCTACGTAGGTCCAAAGGCAAAGTGTATACTGCAGAGTTTCTTGACAGAGAACCGGGATCATATGTTAGAGCTAGAGCCATAGACGGATGCCTG
AAGATTTCCAGGCAAGTTCTTCAGGAGAACAGCTTCATGAGCATGCCTGTGTGCAAAGAGAATAATGGAAAGTGGCTGGACACAAACGAGAGGA
GGCTGAGGAGGCTCTTAAAAGAGCACGATGGCAACAGTGGTAGCAGTTGTTTTTGTCTCAGTAGTGTGATCTGAGAGAAAAAATGATACTTGAA
ACGAATTAACCAAATTTAAGGTGTACCGGGGAACTCTCTCATATAGCTTATACTCTTGAAGTGGACAGGAAAAAAAAAAGAGCTTCAGTTACTA
GCAAATAAGTAGGAGTATGGATGAAATCTCAAGTAGAAATGGAGAGTAATTGCTCTGGACAGCGTATACAGTCAGTCATCAAGAAAGAATATTC
TGTTTTGAAAACATAGCCTGAGATTAAGCATATAAATATTTAAGTCTCTTTCCATATGTTTGGTACTGTATTAGACACATAGATAGGAACAGGA
TACCTCTTAGTGTGCTAAGGTAAGAGTGGAGTAAGAATGAAAAGACACATTTCAAGGTGAACTAAGGCAAGTGCCCAGAGCAGACGGGGGATCT
GTCTGCGCCTGGTTATCAGTGAAGTGCCTGCTTAAGGAATGAGGAACTCAATGATGAGGATGGGGGATGAGAGCACGCATGTTCCTGGTTCTGG
TTCCGACAGATTGAACTGCCTGGAGCTTAGGGAAGTACCAAGACTGAGGGGACAATTAGGCACCAACTACTTACTACCTGTTTGTTGGCTTGTT
TGTTAGTTTGATTTTTTTGAGCAGGGTCTCAATATGTGGCTCTGGCTCTCCTGGAACTCACTGTGTACAACGGACTGACCTTGAACTCACAGAG
ATCTGAGTACTTCTGCCTCCTGAGTGCTGGGATTAAAGGTGTACACTAACTTGCCTGGAAGGACTACTACCTTTTAGCCAAGGGCAGCCTGGAC
AAAATTTAGTCCTAGGACATAAGTCATTTTACTTGATCTATATAGATAGTGCACTAAAACATGCTGCATAGAAAGATAACTTTAGACTTCGGAA
CATTATAGTTATAGCCAGGCATGGCAGAACACTTCTCTAACTCTAGCATTTGCGAGCCAAAGGATGGTGAGTCTGAGGCCAGCCTGTGCTACAC
AATGAGCACAAGGTTCTGTCTGAAAGAAACAAACAAAATGCTTCAGAAACTTTATAGAGTGGAGACTCTGAGGGTAGATACTAAGTTTGTTTTT
CTCCATAGTCCCCTCAACATGCGCAGTACTTTATGTAGTGCTGGTGGTTGATAAGCAGGTCATATCTTGAGTTAGAGAATGAATTAATGATGAA
TGAGCTTGTAAAACAGGGAACAGTGATTTGGATCAGCAGTGTGAATTAAGAAGTAGTTTGACCCAGCCTTTTTGCTCTGTGTTTCAAGAAAGAT
GCAAGCAGGCAGGGCTCTGAGGGAGAAGCCTATGAGGGATGGGGGATTACCGAGGGCTGACACAATTTCATTTAATCCGAAGAAGTGGAGCTCG
TGTAGGAGGATGTCATTAAGCATGTGGGGGGGAAAACAAGTAGTTTGTGAAATAAGAAAGCAAAACGAAGCGTGAATGAAGTTCCTTTTTGGTC
TCTTACTCTATATTCAGTTTAAGACATATTTTCTTTACTATGCACTCAGACTATTAAAATAATCGTTCATAATAATGTATCTTTGCAAGATGCT
TCCAAGAGCTATAATTTATTGAGTACATTTAAAACTTGATTAAAAATAAGAAATACTGAAATAGGGAAAATACAGTCCTTATATATTAAATAGA
AAGGTTAAGCATCTCTAGGACAGAATCTGAAAAAATTCTTCTTTTACCCCATTATCCTGGTTTGGTTTCTGTTGCTATGATACGCAACACAACT
AAAAGCAAGTTGGAGGAGAGATATTTGTTTGGCTTACAGGTCATAGTCCATCACTGAGAGAAGCCAAGGCAACCAAGGCAGGAGCTTGAAGCAT
AAACCAACAGAGGAATGTTGTTTGCCAGCTTGGTTTCAGGCTCATATTCAACTTGCTTTCTTAATACAGCCCAAGCTCTCTTGTCTGGGGATGG
TGCTGCCCATGGTGGGCTGGGCCATCCTAACAGGAGTTAGTGATTTAGTAAATGCCCCACAAACATGCCCGCAGATCAACCTGATGAAGGCAAT
CAATCCTTCAACTGAGATTTCTTCTTCCCATGTGTGTCATGTTGACAACCAACCAAAGTTAGCCATGATGACATGCAGTTACTCAATCTGGATA
ACCATAGAAACAGAAGAAAAAGGAAAGAGGGGCAGGGCAAGGAAAGAATGAAAAGATATAAGATTTATGCAAGTAGGGACACTTTCAGCAAATA
AGTAAATTTTAATTTACAAAATAAATCTACAGACATAAAGAGGAGTCATTTAATATCATATGCCACTAAAGCTGGCATTTTAATTGGCTTTTTT
AATACTAACTTTATAGTGTAATAATGTGGCATTTAGAATTATTCATGTCCTTGTGATCTTTTTCAGCATCTAGGTCCTTTTCAAATGTTATTAA
ATCAAGCATGATAAACAGCAACTACAGAGATGGAGTCTCTCTCTTATGTTGAATCACTGTGATGTAGTTGAAAGAGCAATGGGCCAGGAGTCCA
GAAACGTGATGTCTGGCTCCAGGTCTTCTAGAAACTTCTTTTGTAACTGTGTGAATCGTTAGCCTCACTACATCTTGGGGGCATCAGCTTCTTA
AATGAGAAAATTAGGCTAGAAATTTTGGGCTTCCCAATTCTCATCCTTTCTCCTCATGAAATTGCCTTGGGAAACACAATTTAAGAAAATAAAA
ACTGTCATGATACATGGGAATGGAAGTCCTGTAAGGGCCCTGCTCTCTTCTGCTCTCCCTACGCAGTGAACCTCGCCTTGTAATTGGTCCCTAA
GCTGCCCTGTCTTTGGCTTTTCATTCTTGATCATTTTAAGAACTACAAACAAGGTACTCTACAAGTTTCATATCCCACCCCTCCCCGCTCCCAG
CCCTACAATTCATCTCTTGATGTCATTTCACAGAACGCAAACAGCAGAGTGTAACTGTAGGATGAATACTACAGAATCATATAAGGGATTTATA
CTCCCCCTAAAATAACAGTTCAGTCCATAAAATAACAAGACCAGTGTTCTCATAGCAAATGAACCCTCAATAATAATCCAGACCAACAGTGGAA
ATCTCATCTGAGCCAACAACACAGTAGTTTGACTCCTCTGACTGGGTTAAGATAAGGCTTATTTTCTTTGTGGTTTAGCAGCCCCAACATCCTC
TTAGTTCTCCTACAATGGATCTTAATTAAAGGTTTGAAGTTTTCTTTTTAGCATTTTTTTTAAGGTTGGAGGCCATGCAAGTTTGAACATCAGG
TATCTCCCAGCATAAGATGAGAGACTGTGACGTATTAGCAAACATACAGGAGTGGAGAATTCAGTTAGTACCCAAGTTCCCAAAAGGAGGACAC
ACACTACTCTACTATCTTGCTACTTACTGTGAAGCAAGTCTCTAGTTTGACTCTGTCCTGTTTTTCAAGGCTGGGGAGATTTTGTCATTCAGCC
ATACAATTCATACAATTCAGCCATACATCTGTCATACAAATCATGAGTTTGGGGTGTGTGTGTGTGTGTGTGTGTGTGTGTGTGTGTGTGTGTG
TGTGTGTGTGTGTGTGTGTTTAAAGTAAATCTCCTATTTTAAAAAAAATCAATGACAAAAAAAAAAAAAGTTGAGAGGAGAAGGAGCGCTGGAC
AGGACGGACAGGAATTGTCAGGGATAACCCATCACAGGTGTGCACCTGGAAGAGTGCCTTCACTTCCTGGCTCATTAGTGCTGGGGTTTTATTA
GCTTCATCTGCAATTAGGAGCAGCCATCTCTACTGCACAGCAAGAGTTCCCACAAGAAATAACGACCACTCCTAGCCTCTTCTTGCATGCCTCC
TTCACTCATTTCAACAAATATTTAATAAGCACTGTTCTCCTTGCGATGCCGCCTGTGGTTTCCAGGCATCTCCAAAATATTTTTTCTTAATCGC
TGTGTGTGGTTCTCCCACCAGAAATCTGTGTTATTTTGACTTTTTAATTGAAAAGAATACAGATGAAACTCTCTAGACTTACCTAGGGAATAGA
CAACAAATTGATTATGGCAATTAATTCAAAGTATGGATTGTGGTTACTTTAAGGATACCCAAGGAGGTACATGTTAGTTCATTTCACAGGTGAG
AAAATTACGAACCAAACCCAAAATAAGTGGTCCAAATGGGGAGTCCCAGGCTCTGAGTTTGATATTATCTTTCAATTATCCAGAACTAGATGTG
TTCTAGACTTCCCAGTAAGTACTGGAGACACATGGCCCACACCTCTGACAGTTCATATATGTGGAAGAGAAAGATGAAATGTGCTATGAACCAT
TCAAGGGTTCACATGTGCAGATGGTAGCCAGCAAGCAAAGCAGAAGAGTGCAAACTCAGACTTAAGTGCTCAGGAGGCAGCCCGATGTGAAGTG
ATCCCGTGAAATTACTCAGAACCAAGCTGTGTGCAGTATGAGACAGAAAAGAGAGTCCTACCAGTAGAGATTCTTAAGTCAGACAAGATTTTCT
CTATGGCCTGTTAAAACACAGACTGCTGATTCTGTAGTGGGCCCTGAGAACTTGCATTTCAAATAAGTTCCCAAGTATATTGACACCACCGATA
TGCAAACCAAACCTTGAAAACCAATGACTATCCAAGGCAAACACTGGCTGTTTTATGGCTTTCTATGAAAAGAAAGTATGAACTGCTGAGCAAA
GTCACTGTCCTAAAGACAGCAATGCTAATTCCAGATAGTTAGATTACATGGTTAAGGGAAAGATGAACACATCTTGTTTAGCTAGGGAATTAAA
AGTCAATACGCTGCATCATTTTGTACTGCCGCACAGCAAAGTCATTCAAAGGTTACTGTAAGCCTCTGGGTCTTGATGTTCACAATCCTCTCAT
ACAAAATCAAACTTTAAAATTAGATGGCATCCTGGACTGGGCTACTTCCTGCTGTGGAGAGAAATATTTGATCTTGCAGACTGCTACAAATTCC
CACCTCCCATTCATTTAGCATGAATCTCTCACTGGTATTTGAACATGCCCCCTCAGAAAAGGCCATATAAGAGCAGGGGTGGAGAGACCACCAA
GATGTCTAATTCTCTGCAAGAGAAGAAACTTCTCTGTTGCTCTTGACGACCCTTCTCTGGCCTGATACATGCCTCTGTACCAGTCGGAGGCTCT
GAGAAGCTGCTGTGTGTCTGTGCCTTGAGAAAAAGATCATCCCCTTCCCCATTTTTGCCAATATATGTATGGTGATACTTAATTATTAGCCAAC
TTTATACAGAGTAGTGAAAATTCATATACCTTTGCATAAGCTTCTTTAAACTAAAAAAAATCAATGTAAAATTAAATATTGCTCTGTCTTCTTT
TCATCAACTAGTATTAAAGGTGTTGTTTTTTCCCAAGGGTGAAGACGGTTATGCTTGACACGTGACTACTGCTTCTCTTCCCTTTGCCTTGACA
TAGCAATGTGAATAAAAGCTAGATTTTTTTCCAAAAGACTTACTTATTTATGTTAATGTTTGCCAAAGTGGCTTAGTAATAATATTAAAATATA
TCTCTTCAGTTTTTAATGAAAATTGAAAACATGCCAGATTTTAAATTAGTGGTAACAGAGAAGCTGCTTTCTTGTTCTAAATACAGAAAATAAA
TGGCAAAAGGAAACAAGAAAAAAAGAAAAAAGAATCAGCTTCGGGGTCACATTATAAACTCGACGGCCTGTAAAGTATAAGTAAAAATCACTTT
TAGTGGTGTTATTGAGAACATGTTCTAAGCAACTCAATTATGGGAACTGACTGATTCCTGAGCCAGTCAGTGGTCCTTTTCTGCTGACCCTGCT
TGTTTTTAGGACAATTACTTTAAAAGTCAGTTTAGACTAACATTCGTTATCTACCTTAAAAAAAAAAAAGTCAATATTTTCCCAAGACAGTCTT
AAAGGTATTTATGAAAGTATCATTAATAAGCACGACTAGTAAGACTGACTAACATATTTAAAAGAAAAGAGAGCCTTTGATGACTTGAAGGGAT
CTAGAAATTTATCTACCAATATTAAAACACATATAGCCATGAGGAAACATTTTTAATTAACATTCTCTTTTTGGATGGAGAAAAGTTTAACTAA
CCTCAGGGAAGGTTGAGATATTTGCACGACGTTAGGGTAAATTTTAGGAGTAAATGCAAAATCCCCGGAGAAGATATGGGAAGAAATTACTTGA
GGTTTCTTGTGAATTTTTTGTTATGGTTTGATGATAAATACCATGCAAATATCCTCTGTCAGTGTGTTTTGGCAGTCCTTCCAAGGCAGCCAGG
GAGTGAAGAGGATTATAGAAGGAACAAAAATGAGGTTGATTTTATACTAGAAAAACACAGCGGGGAATTCTGTAACTTCTTAGCAAGCTCTCCA
CCTCAGTCCTGTGTCCACTACACTGTACTATAAAATCTTTGGGAAAACAAATATACAAACTTCCAAATACAATCAAAATTTCATCCTTGCCAAC
AGAGGTAACCAAAATGCACCCTTATCCCTTGCTCCAGTACTACAAGCAAGAAGGGTTTTGGTTTTCAGAGACTGGAACATGGCGCAGTTGAGAG
TAGAAAAGGAAGTTTCTGGGGCGTCATATATAAGGAGAGGTGAGAGTACAGTCACTAGAAGATGTAGCCCAGCCTCAGAACACACAGCTGGATG
TGTGGCTGGGGACCATCTTGTCTACCTTCCCCAGCTTCCCCCCAAACCCTCCACTCCTAAATGGAAAATATCAGTCCCTTCACTCTGCATCTTA
CTGCTGTAGTCACCTGGCAGTGGGGGAACCCTGAGCCCGGATGCTCATTTTGGAACTAAGTCCTAAAATCATAGGGAAGGGATCCATGGGCTTG
CATTGTCTCTTGGCCTGTCCTGGACAAATTAATGATTAGGCTTGTTTCAAGTGCAGGTATGCAACTGGGAAAATGGGAGGGGGATCACACTGGA
CATAGCACTTACTTGGGTACTGTAATGCTTGGTAGTGTGGACATGAAGAGCTAGATCTAGGCAAAGGAAAATTCTAAAAAAAAAAAAAAAAAAA
AACAAAGAGAAACTTACATTGCTTTTCATGGTGGATATGATGGCTCATTTAAGTTTGTATGTTAGCTCACTCTAAGTGGCTGTGCATAGATGAT
CGATAGCAGATCCGCGCCCACATGAATGATGGAAAGCCCTAATGAAGCCAATAGACTTAAATGATTAAATGACATTTCCTCATGAAGCCCCTTT
TGGATACTCACTGAAGCCATGTCTAACTTGTGTAAGCATTTATGAATACCATGAACCACTCTGTCGCGTTGTCTTATTACCTGAACTGACAATT
GAACAAAACTCTAAATCCCTCGCTTAACCATCAGATAACCTTGTTTTGTTTTGATGGAAACATAGTGTTAAAGGCACATTATTTTCCACATCCA
CCTCCTCAATGTTTCTTCCAAAACTACTCATTCCACGGCAATATACTCAGTGTTCAGGATCCACAGGTGACCACAGATGATCCTTAAACAGAAC
ATGTGACTTGAAGCCCTTTCGCCCTCCCCTCACTTCAGTTCACACAGAAATCTAGCATGGCGAAGTCTGATCTAGTAATCAAATTCCCTTGCCA
AACACCAGAAGTGTATCTAGATGTAGTTTAGTTTGCCTATCCAGAAAAATCAGAATTTTTCTCCCTTTTAAGCCCAAAGACTATTAATGCAAAT
CCAATTGAATTTGCATTTGATTACATTTCTGATGGAAACATTCATATGCAAATGAAAATTCATGCAAAGATAGCCAGATAATTCAAATAGTTGC
TGAAATATCAAGATAAAATTAGGATATTAAATGTACATCCATCCACTTTTACTGGGTTACACTAAGGTCATCAAGTGGGACAATATTCTGAAAA
GCCTCGAATAAATTTTTTAGAATATTCTAATAGGTATGTGTTCAGAAGGGAGCTGTAACATTACTTTCAGTTGTCATAGCACAAAAAAAGATGT
CAGCCACTGTTAAAGTTAGTCATATTGTTTTAAAACATTCACTTTAGCTGGGTGGTATTGGTACACACCTTTAATCCCAGCACTCTGGAGCCAG
AGTTAGGCGGACCTCTGAGTTCAAGGCCAGCCCAGTCTATAGAGTGAGTTCCAGGCCAGCCAGGACTACACAGAGAAACCCTCTTACAAAAATG
AAAAACCAAAACTAAATAAAACCATTTATTTTACATTTTGTTCCTTGCCTTCTCCTATCATTAAAAGCATAATAATAATAATAATATTTGGTAA
GACTATTTTAATGAGCCCCAAAACGGGCAAATAGTTTCTGTAAGCTGGTAGTTCCCACACACTCCCTAAGGAGTCAATGGAGCAATGGAGCAAG
TTCAGTGATGTTATCATTATCCTTTGAAAGCTCCTATGGCCTTGTGAACCGAGCAGCTGAGTCATGATCCTAACTGATGGCTAGTAAATCCAAC
TAAGAACAGATATAAGCGAAAGTTCAAGGTAAAAATGTATTCATCTAGTACCTTACATTCCAAACTCTTTCTAAAAGGAAACCTTGGAATTAGA
CAGCTATCCTTGTTAAACTTAGCAGAAGGTGGAGAGAGCAAAGGAAAAGACTTGAGGTTACAACATGCAGAATTGTTACCACCTAGTTTGGTGG
TCCATGAAATATAAAGAAAATTCTCCTGATTGTTCTTCTGTTTGATCTAATGTTTGTACATGATTTCAACTCTTTAGAATTCTAGTTTTCTCTG
CGTTGGCAAATATCACTAGCCATTTATCAGACTGAAAGCTACAGATACAGAAGACACTTCAGCATGCCACTCGGGCAAGCTGGATCTTTCCCCA
AGTCTTAAGAGATTTTACTTTGTAAATCTCTCTCAATTCCAGCAACTTTTTTCCGTCTCTACCACCCCTTCCTTAATCTTTGTCTCTTCAGGGA
TTTTGGAGATGAACATGTCCCCAGTCCCAATCCCACTGTACCCTCAGCCAACTCTGAGCAGAACCTACCCTTCCTTTTCTTCTGTCCCTGTCAT
ACTATAGTCAGAGTCATCATTAAAAAGTACAAGTGTTTTCATTCTGTAAAAGTGTCATTTTTGCTTAATATCCTTTGCTAGCTGCTCCTTCTTC
TTCTTCTTCTTCTTCTTCTTCTTCTTCTTCTTCTTCTTCTTCTTCTTCTTCTTCTCCTTCTCCTTCTCCTTCTCCTTCTCCTTCTCCTTCTCCT
TCTCCTTCTCCTTCTCCTTCTCCTTCTCCTTCTCCTTCTCNNNNNNNNNNNNNNNNNNNNTCCTCCTCCTCCTCCTCCTCCTCCTCCTCCTTCT
CCTCCTTCTCCTCCTTCTTTTTCTTCCTCCTCTTCCTCCTCTCTCTCCTCTTCCCCCTTCTTCTTGGTCCTAAAATAAAAATGAAAGACCTTAG
GAGGGAAATTTCCCCTCCATGTTCCCACTTCTGCGATCTGTTCCCCAACATCCTATATATTTTTTTCTTTCACTCTGCACTCCAAGTTAGATAC
CAAGATGTCCCTGTTCCTAGTCACCTGTGTACACACTGCTGCTCCTGCTTTGAGAGTACGTTAATTCCAAGTTTTCCTCATTAAAGTTTTCCTA
ATCTTTAGAGCTCATTTGATTCCTGTGTTACCTTTGTTTATGCCACAGTAGAGCACCACCACCATAATACCCAGTCAAATCGGAAGCAATCAGT
TTATTTTTGAGATTCTGTCATTTGAATTACTCTTTTCTTTCTTTCTTTCTTTCTTTCTTTCTTTCTTCCTTTCTTTCTTTCTTTCTTTCTCTCT
CTCTCTTTCTCTCTTTCTTTCTTTCTCTCTCTCTTTCTTTCTTTCTTTCTTTCTTTCTTTCTTCCCCTATCTTCCCCTCTCTCTCTTTCTCTCT
TTCTTTCTTTCTTCCTTCCTTTCTTTCTTTCTTTCTTTCTTTCTTTCTTTCTTTCTTTCTTTCTTTCTTTCTTCCCCTATCTTCCCCTCTCTCT
CTCTCCCTCTCTCTCTCTCTCTCTCTCTCTCTCTCTCTCTCTCTCTCTCTCTGGTGGTTTCCTGAAGGATAAGCTTAGCGTTGGTCTTCACTTA
GGAAAATAAGACTTGCTGTTTAGGCTTTCAATCATCACATGTTAAACAAGTGGGAGCTTCGATTTTTTTTCTAATCTTCTTATCTAAAATCCAC
AAGTTTATAATAGTGTGAACCAAAGGAAAAATGGGGAAGAAAAAGAAAATTCACTAACTTGCTTGAACATTATCACATCATAAACTTGCCAAGG
ATATTTCTTATAGGAAACCCTGCATGCTTCTTGTAGCAAAGAAAATATGGTAAAGATCTAGTGGCATCAGAGGGCACTGCTTTCAAGCCACAGT
AGCGTGAGTCGGCCAGGCACTGTGCAAGGCCCTTTCCCCAGCACCCATAAAGAGGAACTAACAGTTACTCTTTCAGTCCTACATTATGTATAAT
CTTTTATTTGGGATATGTAAGCCATAACAAATTTCAGAGATGTATCTAGAGATTTTAAGTACATCATGTCTTGTGACACAGATTGTTGGAATTG
GTCCACGACAATTATTTCATAAAAATAATCGCAACTTAAGAAGCTAACATCATATAGAAATCATGCTGCTGTTTTATCAGTGGGGCTCCATTAC
TTTATATTTTATTTTTTATCAGTTATGAGCTTAGTTTTATTTTAACTATACAATTCTGAGCAAGGATCAACATTGCAGTGAGAGAAAGAGAGAG
AATGTGAGTTGTTAGCCAAGTCACACTTGTGCTTGTAGAGATAGGTGTCTCTCCCTCCATTCACATCTGTCTCAGACTCTGCAGACTTTACTCT
CTTAGAAAAACATAGCAAAAGCTTTTATTTAGCAGCAGATGCATCGGTAGAGAGGGAGGTGAAGTTTAGTCTGGCTTCTCAAGAAAATTAAATT
TCCTTTTTTTGTGTGTTTCAGAACATTGTATTCAAGGGCTTGTGGAAGGGCTGGAGAGGCCTACACTATCTACTCCTCAGAGGAGATGGTCAAG
GTTTCCCTGTCACTAAAAGCTAAATGCACTTTTCTTAAGACAAAAAAGAAGTTTAATATAGACCATTAAAGTATCTGCAATGTTATGTTAGGCC
ATGTTTAGGAAATTTTTTTTAATTCGATTTTAACATTTTTTAACAAATACAATTTAAATTTTCTTTCATTTGTACATGAATTATACAGACGGAC
ATTTTAAAAACCAAATTTGCCTACTTAAAAAAAGTAAGCTCTTTTACCTGTATTGTAAAAACAAGCATTTAATCAGTGTTTGGTCATCTTCTCT
TCTGACTAATGAGCTACTTTAAGTCTTACTAGTAACAAGCCAACCTTTGCTACCAACAATGATCTAGCAGACTTGGTCACCTAGGAAGAAGACC
CTGAAAAGACCTTTCTCTCTTGCTTATGATTTCAGTTAAGAATGCAAATTGCACATCAGACTTTGAGGAATACTTTGCCAAAAGAAAACTGGAG
GAAAGAGATGGCCACGCAGTGAGCATCGAAGAGTACCTTCAGCGAAGCGACACGGCCATTATTTACCCAGAAGCCCCTGAGGAGCTGTCTCGCC
TTGGCACGCCAGAGGCCAACGGGCAAGAAGAAAATGGTAAGGCTGTAATTCATTTTTAGCCGCGATACTGACCTCTGCAGCTGTTAGAATTACA
AATGCACTACATGCCTGGGTGTTTACCTTAAAATTTGAAGAACAGCTGCAGAGGCATGGAATTTCATGAGCAAAGATTAGAACTGTAATTTTAG
GGTATTGTGAAATTTTTTTTTGTCAGCAAATTTGTGTCATTTGTACATCCAATACAGAATAAGAACAATTACAGCCCATTTCTAAGAGATAAAA
ATATCTAAATGTATTCCAATCTTTCAGAGATATTTTACTTTTGAGGAAAAAAAAAAGTTTAAGATCACCGACCCTCACCTTTTGTTCTCTGACA
CCTGAAAAAAAAAATCTCCTTCCCTCCTGTGAATTCCTGAGTTACATGTGAGTCTAGGGTTCAGGGGGACTGTCAGTCACCCAAAGGGAATTTC
TTCATTTATCAGCTGTTTAAATTCCCCCTCCCCACAAATAAGCTCAAGTAATTAATTAATTTTCGAGCGCAGTGTGAGCTGATTCGGACAAGCC
TGCCCTGGGTGTTCAAGGGGTCTGGTTGTGAGGAGGCCGGGGCGCAATGATGGCGCTGTGCAGGAGCAGATTGCAGCGATTCCTGTCATAGCAG
CCCGGGCAGCCAGCCCATTAGCTGCCATTGATTTACTGACCTTTTGGCCCGCTCCTCTCCCCTCGCCTCTCGGCTACAGACCTGCCACCTGGAA
CTCCAGATGCTTTTGCCCAACTGCTGACCTGCCCCTACTGCGACCGCGGCTACAAGCGCTTGACATCGCTGAAGGAGCACATCAAGTACCGCCA
CGAGAAGAATGAAGAGAACTTTTCCTGCCCTCTTTGTAGCTACACGTTCGCCTACCGCACCCAGCTCGAGAGGCATATGGTGACGCACAAGCCA
GGGACAGATCAGGTGGGGGTTGGTTCTAAGTGATTTCTTTCTATAATAACCCCTTAGAGAAACGATATTGCTTTGATTGGCAATCATTATTAAT
TTTTCATGGCATTTTGAAGATGCAGATCTTTTAATGGTAATAGCTTTAATTGAGGTCTAAATGATTTTTTGATGGTCTCTTCTAATATGATTTA
ATAGTCTTATGTTCACGATCGAATGAGTGTGTTAATTTCTAATTTAGAAATTTTATTTGCACTTTAACTTGACTTTAGTTTCATTTTTATGTTC
CACAAAAAGTGAATGAAATTGTAGCATTTTAATTATACATTATTAAACATCTCAGCAATTTTAATTCCATTTTTCACCTAGTTTTGCTTAGGCA
TTTTTTTTTATATAGGACCTAATACATAGCAAAAGAAGTGCATATTTCTCTCATTTGTCACGAAACACTTTTAAATTACTTAGAATACTTTACA
AGCTTACTAATTTATGAAATATGTTTTTAAGGAGATAGAAAGGCCATATAAGTTATATGCATATACACATAATAAATTGGAAAAGTGATAAATG
ATAAAAAACATTGGTTATAATTAAAATGACTCCATCTCAATATACATGCTTGTAGTTAAATGCCAAAATTGTTCTGCCTCTTTTAGCCTACTTG
TTTTAAAAATAAGAACTCTGGCTTGGAAAGGTAGGAATAGGGTCTTAAATCCTTGAAATGACTGAGTAGGGCTAATTCACAGCATCTCTTAAAT
GTTTCAGCAAAACTGCTCTTTCTATCCTCCTGGGAGAATTGACTGTGCAAATTGATATTATGATGTGTTGGGTGGTCACAGTAATGGTGTTTCA
TAAGTCACAATAACTGGTCCTACAGATACAGAATTGCCCCTAAATGAACTTTGATATTATATATTTTTGAGATGGTTAAATATGACATTCTCTA
TAAAACTCCGATTTGTCCTCATAGGCCTTATTGTCTTTGAATAAGGAAAAGAAGACACAAACTCAATTAAGCAAGAATGGCAATACTGTGTTAC
AAATTTTTACTATTTAAGGCACTATATCACATTATCACACCATTTGTTTCTGATTGGACTTGTGAGTTGAATGTTTTCCAAAGATCAGCTATAA
GTAATACGCTTGTGCAGTTACACTTTTGTAACAGTTTATCTTCTCATGCTTCTATGCACAAAAAAACTCTAGGAAAAAAAAAAAGCCTAGATAT
TTATCTAGTATAACTGCTTTAAATTTCACATGCAGAAGTGTGATTGTGTTGGCGCATTATGAATGGTAGCTTTGGTGTTGAAAAGTCCCCTCAT
TTGCTCATGGCATTTACAATTAGTAAATTAAAATGATTGTATCATATTAACAGTGGCACAACTAAAGTTTATAGTAGTCCTCTGAGGGCTGTGG
GGGAGACAAAGCAGCTGTTGCTGTTTGTTTATGCAACTCGGCAACATATGAGCACTGGTCCCTCAATGGCGCTCGGCGGGTTGGGCTCCGCTTG
ATCTTTGAAGGTTGCTGCTGTTTGAACAAACCTCCCTGTGTCCCATGTAACACCATCTGTCTCACTAGGAATGTGGGAAGATTCAGCACACCCT
AGCAGTTGTCACACCGTTTCTGGGCTGTCTTTTTGCAAAAGGCTTTTGTGTCATTGCTGCAGAAAAAGGCTGGCCTCCTACCTTGAGCATCCAG
AGTGGATGACTGTTGGGTTGTTGTTTTTTTTTTTCCCCCTTAGAATTTCAAGTCACACTGCGTTTCCCCCTTGTTCAAAAAGGTCAGCGGTGTT
GGATGGTATCTGTGCTGCCTCTAACTTGTCTTTTCAGCAAACTTTTTTTTTTCTGTTGGTTCTTGCACACTACTAAAACGGAAAATGAAATGTC
ATTGAAGTCTTTCCTACTGACTTGTGATAAAGCTGTTCAAGCAGACATAACCCAAGATGTTGTCTCTTATTTGATAATGAATCAAATCTGATAG
GCAGCACCTAAGAAAAACACAGTTAACATGGGCCAGTAGCACAGTGAATGGGATATTTAAACAGGCATACCAAATATTTATAGTCAAAGGGTTT
TTTTTTTTTTTTTGATTTTGTCTTTTATTTGGGGGTGGGGAGAGGTCTCCATTTCTTTAAATTTCAGTTTGATTTAGTTTACACTTTTACCTGG
AAACAGAAAACTTCACAAAAATTTGTTTTAAGTGTGGGTTAAAAGAAAAGAACAATTTTATAATTTTCAGGAAAGTATTTTTTTCCTCCTCAAG
CCAGCCGTGTTTTGAAAGGAAGCCTTTAGGGTTCAGATTCTGCACTAAACCAAAAGGAGCCATGAGCATCTCTACAATCATACTTTCTCATCTC
AAGGGTCAAAGAAATGCTGTAGAAAAAAGATGTCAGGCGTAATTGTGAAGCAAGGGTCCGACGTGCACGGGAAGCACTTTCTTAAAAGAGAAAA
ATTCCCATTTTATTACCAGCATTACCACTTTTATTGCAACTCTGAAAGTCTGACCAGATAAATAAGCATGAACTCAGACCTCTCAGCCTGTCTA
AAAAAGAGGTCTTGGGAAAGATTCCTAAGCAAGCTCCTTTGTGCCTCCTGAACAAAGATGACGGCCATTTTTCTCCTTTTACAGCACCAAATGC
TAACCCAAGGAGCAGGTAACCGCAAGTTCAAGTGCACGGAGTGTGGCAAGGCCTTCAAGTACAAGCACCACCTGAAAGAACACCTGAGAATTCA
CAGTGGTGAGTCACAGGGGGGTCGCTGCATTGCATTCTTTCCTACTAGAGAAGATTGTGGAGACCTTTTCAGTGTACACAGTCCCGGGTGGAGT
GTTGTGGGCTTACCCCTTTATTTCATAAGCTCTAGGAGTCTTGGAGAGTCTTATGGTATCCTATTAAATGCTTATCCTTCTTACAATCACAAGG
GCTTTGATTTGTGTTTTCTGCTAAATCTAGAGACTTTTACAAAACCGTATAACTTTGACCTGGAGATATTTGGGCTGCAATTTCAGAAAGATAT
TCATTTTTTTTTTGATACCTAAACTTACAAGAAAAAGTGGGAGAAAATTGGACAGGAACTTGCATATGCTAACCATTTCTTGACTCCTGATAGC
TATACATCATAAACCCACATCCTACCGCTGAGATTTCTGCTTTATACATAGTTTGATAGCTCTGCCAAGCATTTTATTACCAAATTGGATGCTA
TTCAAAGAACTAGTTGAATTGGTAGAATCAATGGGGTCTCCACAGAGTTGATTAAAGCCATGGCTACACTTCCCTTTAAATACTGTGACATCTT
TATTGTGCTATTGACCACACATTAATCTGACACTCTGTTTAAATAGGAGGCTGCTGATGGCCTGACAAGATTTGGGATTCTAACTGAAAAAGGC
GTAGAGAGCCTTTACCTTCCACAGCTTACATCTTGAATTATGTCCACTGGGGGTAGATAAAATCCAGAGATAGTTATGGTCATATAACTCTGAC
GTAAGCATCTAGAATGTAGAGTCCACCTACATTCGACACCTAGATTAATTTCATTTGGTTTCACAGATTCTTATCTTGGCAGACAACTTTGCAT
GTTACCTAAATGAAGAAATCTAATGCTAATTTTAATTATCCTTTCAGGTGAAAAACCTTACGAATGCCCAAACTGCAAGAAACGCTTCTCTCAT
TCTGGGTCCTACAGTTCACATATCAGCAGCAAGAAATGTATTGGTTTAATATCAGTAAATGGCCGAATGAGAAACAATATCAAGACGGGTTCTT
CCCCTAATTCTGTTTCTTCTTCTCCTACTAACTCAGCCATTACTCAGTTAAGGAACAAGTTGGAAAATGGAAAACCACTTAGCATGTCTGAGCA
GACAGGCTTACTTAAGATTAAAACAGAACCACTAGACTTCAATGACTATAAAGTTCTTATGCCAACACATGGGTTTAGTGGCAGCAGTCCCTTT
ATGAACGGTGGGCTTGGAGCCACCAGCCCTTTAGGTGTACACCCATCTGCTCAGAGTCCAATGCAGCACTTAGGTGTAGGGATGGAAGCCCCTT
TACTTGGATTTCCCACTATGAATAGTAACTTGAGTGAGGTACAAAAGGTTCTACAGATTGTGGACAATACGGTTTCTAGGCAAAAGATGGACTG
CAAGACGGAAGACATTTCAAAGTTGAAAGGTTATCACATGAAGGATCCATGTTCTCAGCCAGAAGAACAAGGGGTAACTTCTCCCAATATTCCC
CCTGTCGGTCTTCCAGTAGTGAGTCATAACGGTGCCACTAAAAGTATTATTGACTATACCTTAGAGAAAGTCAATGAAGCCAAAGCTTGCCTCC
AGAGCTTGACCACCGACTCAAGGAGACAGATCAGTAACATAAAGAAAGAGAAGTTGCGTACTTTGATAGATTTGGTCACTGATGATAAAATGAT
TGAGAACCACAGCATATCCACTCCATTTTCATGCCAGTTCTGTAAAGAAAGCTTCCCGGGCCCTATTCCCCTGCATCAGCATGAACGATACCTG
TGTAAGAGAATGAAGAGATCAAGGCAGNNNNNNNNNNNNNNNNNNNNATGAAAACATAGTCCCCAACAAAGCTGGAGTTTTTGTTGATAATAAA
GCCCTCCTCTTGTCATCTGTACTTTCCGAGAAAGGACTGACAAGCCCCATCAACCCATACAAGGACCACATGTCTGTACTGAAAGCATACTATG
CTATGAACATGGAGCCCAACTCTGATGAACTGCTGAAAATCTCCATTGCTGTGGGCCTTCCTCAGGAATTTGTGAAGGAATGGTTTGAGCAAAG
AAAAGTCTACCAGTATTCGAATTCCAGGTCACCATCACTGGAAAGGACCTCCAAGCCGTTAGCTCCCAACAGTAACCCCACCACAAAAGACTCT
TTGTTACCCAGGTCTCCTGTAAACCTATGGACTCCATCACATCGCCATCTATAGCAGAACTCCACAAACAGTGTTACGAGTTGTGATCCTCCTC
TCAGGCTAACAAAATCTTCCCATTTCACCAATATTAAAGCAGTTGATAAACTGGACCACTCGAGGAGTAATACTCCTTCTCCTTTAAATCTTTC
CTCCACATCTTCTAAAAACTCCCACAGTAGCTCGTACACTCCAAATAGCTTCTCTTCCGAGGAGCTGCAGGCTGAGCCGTTGGACCTGTCATTA
CCAAAACAAATGAGAGAACCCAAAGGTATTATAGCCACAAAGAACAAAACAAAAGCTACTAGCATAAACTTAGACCACAACAGTGTTTCTTAAT
CGTCTGAGAATTCAGATGAGCCTCTGAATTTGACTTTTATCAAGAAAGAGTTTTCAAATTCTAATAACCTGGACAATAAAAGCAACAACCCTGT
GTTCGGCATGAACCCATTTAGTGCCAAGCCTTTATACACCCCTCTTCCACCACAGAGCGCATTTCCCCCTGCCACTTTCATGCCACCAGTCCAG
ACCAGCATCCCCGGGCTACGACCATACCCAGGACTGGATCAGATGAGCTTCCTACCGCATATGGCCTATACCTACCCAACGGGAGCAGCTACCT
TTGCTGATATGCAGCAAAGGAGGAAATACCAGAGGAAACAAGGATTTCAGGTAATGAGATGAGTCACTTTGCTCTGAGGAAAGGAACATAGGAT
AACCTAGTTGTGATTCCCAGGCTGCCCAGTCCTAAATAAATTGATAAATGACCTAGAAGATACAAAAGGTGGGGGAAAAACACTCAGTTGGGGT
GGGGAAACCAGGAATATGAGAGCTTTGAAGCAAGCTAGCTAAGCCAGTGGCTGAAAGGATAAGCTTATTAAAAACTAAGGCAAGAAGATTGCTA
GTTTAAGGTTAGGCAGCATAGCAGGATCCGGTCTCCAAAACAAACAAAACAGAATAAAGAATTCTGAGAATTACGCATCGATGCTAGTAGTTGG
TCAGCTTACCGACATGCTTGAAACTGAAGTGTGTAACAGCCACACTCTCAGAAAGGAGTGTACGACTTGAAGGAATTACATATTTAAATTTTGA
TATCTATTTTGTTTTATAAAGAAGAGTTCATTTTGAAGAGAATTTAAAGAAATATTTTACATGTTACATAGGACTTCTTGCCTAATTTTCAAAT
GGTCAAAGAATTTGTAGGTGGTAGAATCTGAAAGCAGGCATTGTTTTGGCATTATTTTGTATAATCCCTGTTTGCAAAATAGGAGCCAAAGTGG
CAGTGCACGGCTGTAACAGCTGTCCAGTATTCCAATTTACAACACATCTGCCCTCTTTGTAAATGCATTTAAGCCTATTTAATCTTCTCTAGTA
TTAATTAGTGCAAATATAGTGTAAGAAAACTAAACTGTGGGCTAGCAAATGGAAATGTATGTTACCATGCAAGTTTGCACTCCTTTGGACCAAG
ACAAAAATAAATATCAAGAAATTTAATAATTTACTGATCCACATTCATTATTGCTCAATGCTGAAGGCTGTTTTAACATAGATAGAACATTGAT
AAAAAGTGTTATTAATATTCTCTATTTCAAATTAGAAAATTAAATATAAAAATATAGCTTAAGGCTTTTAGTTGGTAGACATACATTTAAATAG
ATTGTATAATAATAATATTTTGTACCTAAATATAAAATTCAATTAAAATGAAGCTTCTACAGCTACCAATCATTTTTGAAGTAAAGTACACTGG
AAAATATGGTAATCCTGATATTTAATGTTCACTCTTGGGTTTTCTCTGGTATTAAAAAAAAGTGAAAGATTTAAGAAAACTGTTTTCCCATCTA
TGGCAGAGAAGGTTTATGTTTTGTTGAAAAGTGAAACTTCCATGTTGTTTAGGAAAAAAAAATGAGAAGATTTTAGTTATAAGATAGATTGGCA
TCTAGCATTTTTGAGGATCTCTAGTTGTCAGCCTATGCTTAATTGTTTGATGTAAACACAAAGAGGAGAGACCATGTTCAACTATGTGATTATA
TCACAGGGAGACTTGCTGGATGGAGCACAAGACTACATGTCAGGCCTAGATGACATGAAAGACTCCGATTCCTGTCTGTCTCGAAAGAAGATAA
AGAAGACAGAAAGTGGCATGTATGCATGTGACTTATGTGACAAGACATTCCAGAAAAGCAGTTCCCTTCTGCGACATAAATACGAACACACAGG
TATGAGCGACTTTGACTAGCTAGCTAGAGCTCTCCGGCCTGCTGTATATTTCATAATATTTAATGAGTGCACTTGTGCGACATAAGATGTAGCA
TATGCTGACACCTTCAACAAGAAAGAAGTAATACTTTTGCATAACTCAGTAGGACTTTTGTGTTGCCTGTTTATTGGATCATTCATGTGTTTAT
GAGTGTGCTTGTCTTCTTAACTTTCAAGTTATCTGTAAAACAAATTTGCCTATCATGTCAAAGGAAAATTTAAAAGCCCAGGGTAATGAAATGG
CATGACAAGAGCTCATTTTTGAAAGTATCTTCAAATTCTTAAGCTGTGGTGAATATATATATGTGTAAAAATTATTATGATAAATCTGGTCCGT
GATATACTAGTGGACTCATCCAAACACTAAGTAAGCCATGCTTTGGGGTGACTTTCTTTGGTTTTCATAAATTGGCCACTTTTGAACCAGTTAT
AAATGTTATTTCCATAAAAGAAAGGCAAGAGACCAAATAAGCCAGTGAATCCTATAACTGAAAGACTAAAGTAATATATCCAGTTCATGTGTTA
TCTATTAATCACCAACCCTGACAAGACAACAGCCCCAGGGCTCCCTGGGACTACAGGTGGTATGTTACGTTTCCTAAAAGTGTACCGTGTAAAG
ATACTTTCCACAACTCCGGATCAGATCTGCAGCTCTGTAGTAGGGTTTCCATCAACGTTTCCTTTCTCCTTCCCATCTTCTGCTCTAACACAAG
AAACCTAGTCTTACCCTGTCCCTAATCCCTGTCCAAGTCTTCTCCATTAGAAATATGAATTTGTCTGTGGTGGGGAAAAGAAAGTATAGAGTCA
TATTCAAAATATTGTAAATGGGAGCAGGATGGACAAAGTGTAGGGAAACCTTTTATTTTAAACAAGGGCAAAAGTTAGCATTGATGCATGTGGT
GTGGAAGAGAAGAGGAGGTGTTAGATCTTAACTCTCTGCAGATAGGGTACATCTTAAAGATACCTTGGGAAACTCGGGTACTCCAAATCTTCCC
AGATCCTTCACTAGCCATGGGTTGGAGGTAGCACATGTGACCAGAATCAAGCTGAGCGCTGGGCGAAAGTGGCCCATGCTGGACCGCTAGTGCT
GAGAGCACTTTGTGAAGAGAACCCAGGTTGTAACAGCCTTGCTCCTGGTCCAACCAGTTCAGCTCCTTTCCCTCCAACCATAATATCTGTGGTT
ATTATTTTAAAAGGCCAATTAATGTTAAAACACCCCAAATTGGTTTGCAAATCTACACAATTTTTATACTTAAGCTATATATTTGAAACATCAT
TTTTTTCCTACCCTGTTCATTTATTATACTTCCTTTAATACTGAGTCTTATTTAAGTATTTACAGAGTAACAAATATTTTCATGCCTAAATTTA
CTTTAATTTTAATCAACCTCAAATATATTTTGTATTTCATTATTCAGCTACAATAGGCACATCACTGAAGGCATCTTTCCCTCTCTGATTGGTC
TTATTATATGACCATATGCAAACTCTATCATTTACTACATGGTGAGTGTAAAACTTTTATTTTAGTGAGGGCTCTCATACATAGTGACATCCAG
TCAGCATATTTATCTCCTATAAATAAGCTAGTCCATAAACTTCATAGATGTCCAGCTAGTTGAGAGACCCAAAAGTTGACAAATGCAAATGTAT
ATATATATTTATTTTTTTTAATAAAAGCACGTTATTTTAAAAGTAAAATATCTTGGTCCTTTAAGATGAGAGATCTGCTACCTAGACACATTGC
CTAGCAACAGGATGCGAGTCATTCAATGGCTTCTCTAAACTGGTGATTAGTTATCCTCCTGTTGGTGACCCAGCTTGTAGAGTTTCCAGTCTGT
TAACTTTTTGGTCTCTTGACCAAACATCTCATGACATTAATATTGTCATTGTATTAGGTTCCATCCAAGCAAAAGTCTTCATGAAATGTGTCAG
TATGATGTATATGTAAACTTAGCTTGCTTTCTTCTAACTGCGCTCCACAAGCCTTTTGCTTATATTAATATCTAATAATATTTTAAATGAGTTA
ATATGAATATTCTAAGAGAGAACTGTCTTGACTCTAAAGCTGGGCAATGAAGTTGATCTGTCATTTGGTTATTATATGTTGATTATAAATGTGT
CATTGATAAAGTATGTTTGTTATCTGTCTATAGAACTGTTTAAATTAAGAAGAAAATTAGTGTCTATTTATTCCTGGGAGTTTGTGCTCTTTTG
CCGTAATCTACTTTAAATTTATTTTCTAGGCAGATACCAAAGTCATACTGCTTAATTCTCTTACCAATGGCTTATTGCTTGCTTGTTTGCTCGG
TTTTGGTGGGGGGGAGGGAGATACCCTGGATAGTACAGAGAAAGAAATACTTTGTAAATGTTAACTTCAATTGGAATAATTGTCATAAATAATG
ACTGAAATAAAAGATCTGAACCTCTTGGTAGGCACTGTCAAGGACTCATTTTTACTCCACTAAAATTTCAACCTGATATCGATTGGTTACTTTC
TCTGTTGAGACACTGTGGTAGGTGCTTTCAAACCACCTTATTTTGAAAAGAAATAAAGATATTTCTACTTTGAAGTAGACAAAATCTAAATTTT
AAATAAATTTCTGGTCAATGTTGTTCCTAAGTTATATGGCAAAATTAAAATTAGCCCTTATTTTAAATTGAATTTATTAAGTACTTGTTAGTGA
AAGTCCTCAAGATTACTAGACTATTTAGTATAAGAGTTGTGTGGAACTCTCAGTGACTCACTGAGTTGTCCTTTGCAGGGTATCACAGTACTTT
ATCCTCCAAAGTTGTCTGTGATATATAATGTAGCCCTATTACAAGTACAGTGTCTATTACCCAATACATCCTTTGAAAGCTGGCTGCCTGTCCT
TATAGGACCCACCTCCCATGCATTCTAAAAGATCTGGAAGTTTGTCTTGGAGAATAGATGTTTTCAGTCCAGATGCTGCTCTCATTCTACAATT
TTGGAAAAATAAAACCTGTATTCATATATTCTCTCCACAAAGTGACCTAACTGGTTGACCACCTTTGATCCTGAGCTGATAAGACAGCAGCATA
AAAAAGATATCACGGGATAGTGTTGTTCATGCATCTTTTAACAACTAAAGAAACAAGAAAATTTTCATGTCTAATTTTTCTCCATTCAGATTTA
CTTCTTGCATGTATGCCTACTCCCTGATGTATGCATTTTGCTTAGAATATAGTAGATGGTTGAACCTGTATTAATGGACAAGAGTTGAGAGATT
TAACCCTAATAGGCTGCTCACTACAAAGTCCTTGTACTAAACACTTTATAAATCCTGTCTCCATTATTCTATCTATGGCCTGTCCTCAGGCTAA
GTCCCCAAATTACTTTCCTTTATCTGCAAAGACCCTGAACCTAGAAGCAGTTGACATACCCAAGACTGTACGTACTCCAGCCTGTCCTAAAAAT
GGATTTCAATGTGAGTCCAGAGCTCATCACCCTTATTGAGCACCATTCTGCCCCCATGGAACAATTGCTATCAATGCTGTACCCTTCTCCCTGA
AACATCATCATTTTAAATGTGCACTTCCAAACAAGGAAGACCAACACTATACTGTAGCAGCTTGAACATTTCCTGAAAGGTTAAAGAAAGAATA
ATACACTCCTAAGTTCTTTTCATATACTCTTGTGACTCCTATTGTTACCTACCCAAATGAAAAAAAGTACTGTGTATTTCCAGATTCCTACCAC
TCTACCAGAATATTCTGTTGTCCAGTTTCCCTCATAGAAAGCATCTTTTCCCAAACTTAAAGACTGGTTCTTCCATGCCTTAAATTAAACTTGT
TATCTTCAGCCTATTAGCTAACTTGAAGTAGGTTAATATAATTCTGTCTGCATTTCCCATTTGGTGAGTACCCACAATTTATGTTTGAATTCTT
ATCTTACAGATAAAAAGCAAAACAAAGCAAAAACTTCCTACTAAAATATTGTGCCTTCCCCTATCACTCACCACTAATTTATATCGGATGTTCC
AGTAAAATGACAACCATCAATGAAATAGCAGCTCAAACTGTCTGCAGCGTTTTCTAAGTAGTGGCAATGCCCTGGAGGCATTCAATAACATTAT
TAAAGATATTTGATTACTAATTGGGATTGTATATCACCCTATAACTGAAAACCTGAAGTGTCCAGAATGGGTTCCTAATCTTATAACATGACAC
TTAGCAAATGAAAACGGGGTTGGCCTCTACTAATGCCGGTGTTTTAATTTAATTTGCTGAAACAGGAGTTTGTAGGGGAAGTAGAATCACCTAG
CTTCATGTACGATATGATGATACCTCATGCTCCGCGCCACACATTGATTTTTAACTCTGGCGCATCAGGCTGATCTATCTCTCTATTTGTCAGT
TCTATTTTGGAAATAAAGTTTTAAGTATGACAGCTCCAAAAGGTGTTGAAGGCATTCCAGTGCTATTTGTGGCCTGGAATCAACAAGATGTGTT
TAGGCTTGGCAGTGGTTTCAAGTTCCAAACACTGGTTAGAAACTGCCTGGAATGGGAAAGGAAGCGCTAGGTTCTCTAGCTCAGGAGTATTTTA
ACACGCAACAAGTGGCTGGCATCCCATGGAAAAACTCTAGCGCGGAGGGGGGGGGGGCGAAACACCATTTGCAGCTAGTTCAGATCCTATGAAC
ACATCTTTCTAGTTTGCATTTCAGATGGTTTCTTCCCTAAGTTTTACTCTTAGAATCCAATGACTGATCAGACACTCTTAGCATCTTCTTGCCT
CCAGTCTGTTCTTTCATAACGTAGCAGTTTGCTCCTGTTTGAGACTAGGCCCACTTTCAAAGCAGCTAGCTCATGATGGACCATACAAAACCAG
TGATGATACCATTTCTATTGCTCTCACTCAAGTTCTTGCCTTAAAACAAAACAAAACAAAACAAAACAAGACAAAACAAAACAAAACAAAACAC
CGTAAGGATGAGAAGAATTGTCTGGCGGTAAAATGTTGTAGGCCACTAAAAATGTCTTGTTTCCCAGGACGTTTTTCCGTTTGAGACAGTGACA
AAGCCTCCATTTTGAGTTCCCCTTCAGCAGCCATCTGGTTAACCAATCACATTCGTTAGTAATCGGTAGAAAACCAGATTATGAGATGAAAATG
GACCTTCCTAACCGACTTGGGTTAGACCGAAGTGTGTCGATCTTTCAGACATAAGCAGACATGCTCATGCCTGAGTCGGGACACGATGACAGAA
TTCTTGGAAGAGACTTCATGCCAAGCCACTAATCACCCTGTCGTCTTGTTCTTTCTCCCAGGAAGAGACCACACCAAGTGTCAAGATTTGTAAG
AAAGCGTTCAAACACAAACACCACCTTATCGAGCACTCGAGGCTGCACTCGGGCGAGAAGCCCTATCAGTGTGACAAATGTGGCAAGCGCTTCT
CACACTCGGGCTCCTACTCGCAGCACATGAATCACAGGTACTCCTACTGCAAGCGGGAGGCGGAGGAGCGGGAAGCAGCCGAGCGCGAGGCGCG
ACAGAAAGGGCACTTGGAACCCACCGAGCTGCTGATGAACCGCGCTTACCTGCACAGCATCACCCCTCAGGGGTACTCTGACTCGGAGGAGAGG
GAGAGCATGCCGAGGGATGGCGAGAGCGAGAAGGAGCACGAGAAGGAGGGCGAGGAGGGTTATGGGAAGCTGCGGAGAAGGGACGGCGACGAGG
AGGAAGAGGAGCAAGAGGAAGAAAGTGAAAATAAAAGTATGGATACGGATCCCGAAACGATACGGGATGAGGAAGAGACTGGGGATCACTCGAT
GGACGACAGTTCAGAGGATGGGAAAATGGAAACCAAATCAGACCACGAGGAAGACAATATGGAAGATGGCATGGAATAAACTACTGCATTTTAA
GCTTCCTATTTTTTTTTTCCAGTAGTATTGTTACCTGCTTGAAAACACTGCTGTGTTAAGCTGTTCATGCACGTGCCTGACGCTTCCAGGAAGC
TGTAGAGAGGGACAGAAGGGGCAGTTCAGCCAAGACAGAGTTAGATGGAGTTGGATATTGTTTAAAAAAAAAAAACTGCATTATGCAAAAATTT
TGTACAGTGTTAAGGCCTAAAAACTGTGTGGTTCAGAGACTAATTCCTGTGTTTAATAGCATTTATGCTTTAAGCACAACTAGAAAATTCTAAG
AATTGCACTCTACGTATGTATCACTACAAACTTAAAAAAAATTATGTCTAATTTATATTAATACATTTTAAAAGGTGCCCGCACTACCATACAT
CAGTATTTTATTATTATTATTATTGTTATTCCTGTTTAATTTAATGTGCCCGCACTACAGTGCATCAGTATTACGATTCCTCAACACTTTCCTT
TCGCTATTCATGAATTTCCCATTGTTTTACAGCCTAAGTAACCACACATTTTAGGCCTCAATTTTTTATTTTTTATTTTTTTTCTGTGAAGGAA
CTTGAAGTGATGCATGTGTGAATTTAAGATACCGAAGTCTTAAAGTGACCTGGATGTGAAGGAAAAAGTAAGATGAGAAGTAAAGAAAGCCTTT
GTAAGGTGGTTTTAAAAGCCTTATGCAAACCTTTTAATCTCTGTCTCTGCAAGTGCCATCCTTGTAAAGTGTTAAGAGGGTAACGAGGGTTACC
TTTGCACCAGCTTCAGTGTTAAGCTCACCGTGTTCTTTGAAGCACCCGTGTCAGTATTAGACGACTAAACAGCAGTTCCTTAGTTTACATATGT
TTGTGCAATTATTTTCTGTACTTTTTTGTTCATTAATTTTGTCAGTATTACACCAAACTTTTTTTGCAACAAAAAAAAATTTTTTTTTGCATTC
ATTTAATTTTAGGTCAAATAACATTTTATTTATGTGGCTCATTTTATATTTCCTAATTTTATTTATTTCATACTGTAGTGTACAGTATTATAGT
TCTTCAATATATAGATATATTTTAGTAAAAAAGGAACATGACGTTGATCATTTGGGCAAATTTTACGTAAAGAGAAGAGCATTTATTGTGTTTT
GGAACATTAATTGTGAGATGGGATTTTTCAATTTTATTATTTTATTTTTGTTTTTGTTTTTCCAATTACTGGAGATTCCAATTTGGAAAACTTT
TGATACAATCTTGTGAAAACACTGTATTTTCGACTGAAAATTCCACTTTCTTCATCTTGTTTTTTAGCTAACCTCAAGAGGGACTGTTAAATAC
AATGTATGATACCATGACAAAAATCTTTCCTGAATTGTCTTTGTAAAAGTATTATTGAATTTTCAATTTGTAATTTCTTTTGAAAATGACCATG
CTCGAATAAAAATGTAGCCAAACTAAGAATGTAGTTAATGACTTCTGTACTTTTAGACAGCTTTCCTTCAATGACCATTAACATGTAACATGCT
TATGCTTATAATAATGCTAATTATGTTTTTCAATATAATTTTAGTTTAGCAATAATTTTGACTGGTACCAATAACTGTTTTTTAAAATTCCATA
CTTATGTACAGCAATTTTACAGCTTTTCTCAACTGATCCTGATTCCAGATTGTCTATTTTTTATGTGAGGTTATATTATTCAAATTTAGTCTAT
TTACTTTACAGACATTTCTACTTTTGCATTACAAGTATTTAGAGATTATGTGTTAAAAACTCACTTTTCTGTCCAAGGGGTCTTTGTGATTTAT
TCAGAAAAGTCTAATTTCAAAAAGACAGCTATTATTCAATGTTATTTATAATATGTAACTTTTTTTCTAAGAGTTGGGATAATTTATCTCACTT
TTTGAAATGCAGACTGTAGCTTATCCTTTATCTAAGATTATAAAATGGGGGGTGGGTGGGAAAACAAAGCTAAAGGCACATGCTAACAAAAATA
ACCTTCATTTTCCAAGACAGTCTTTCAGTTTTTACAAGACGACCCTAATAGTCAGTATATGAATGTATTCATAGGTTTTTACACAATGATTTTT
TTTATCAGAAACCAGATTCTAATTCCTAAATCTAATAACAAAGTCAGAATAATAATACAAAAGCAGATTACCTTATGAAATTTACAGCTCTTGA
ATATACGTAACTATAATATAGTAGCTGTCCACATATTTTTTCTACTTTAGAATCAAAAAACAAAAGCATGATTTTGCTATTGAATTTGCTAAAA
CTTTAAGTGTGACACCTCAAGTTGGCAAGAAAAACATATTTTTATTATTTAGCCATTTTCCTAAATTTCATAAACATTGTTCCTTGAAATGACA
CACACACACACACACACACACACACACACACACACACATACATGCCCCAAGAGAGAGAAAAGATGTAATGACTATACAGAGGCAATTGAGCAGA
TACTTGTAGAAAGCATATTTTCAGCTCTATCTTCAAGCCTGGTGAGGACTGGCATTAGGAGAGATGGCATAAAGCATTCTGCTCCTGTCATCGC
TATACCAGAGTTTGCATGTTTGGAAAGTTTACAGCATTCTTTCCCTATTTCTCCTTCTTTCAATGGCACAAATAAATACACTACATAGAAATTT
TCCCGATTTTAAAGGCTCTAGGCGATATCTTTATTAATTCAACCTGAAAATATCAAGCCATTAAATTTTGTCTGGGTAGAATAAATCCCTGTGG
CCTCCTTTAAAGCAATGTAGGTCTCTGCTGCCCATGGGGCATATCTGTGTCCCTACCCACAAGAGACAGGACCAACAAAGAACACATGAGCAAC
ATACTCTTTCTCCCCAGAAAGAAGAAAGCATGCATGAGAAGGAGCAAAGGGGAGCACAGAGTCTCCCTCCCCTCCTGAAATCCCTCTTTCCACC
ATTGTTTTTACAAATTACTTTTCACAGGAAGGCTCAGAATACCTGAGTCTGCAAGGATCAGGTTAACACTTGTAAATTGTGACAATCACTACAA
TGTCCTATATCTTAAGGTTTCTTTCCTTTTTAAAAATGCAATTTAGCCACTAATAGTATTGCACATTAGAGCTGCATAATCTTCCAACTCCAGG
GAAGACTAAAACATTGGACTTATCCTAGGATTCCTTTCCAAGGTCATAAACAAGAAAGCCCTCCAAATCATGACACATAATCTCCTTTTCTTAT
CGAATACTCTTCCCTTGTTCTAGTCTTAAGTATTACCCTTTACCCCTGAGGATAGGGGCTGGGAAAAGGTGATGAAATCCTGGAACTGAACACC
CCGCCCATTTTCTCAAGAGCCTTTTGTATTCTAGCAGATCTGGGAGGTTCTTTCTTTTTTGCACATGACACTGTAGGCTTAGTTCTGAGAAACT
GGGCAAGAGAGATGAGATTTCTCAGCCAGAACTAACAGCGTTCATCTCCCTTAGCATGAACTTGAGCTTGCAGTGGAGTGCCAGGGCCTGAAGG
AGGAAGGAGAGAAGGGACTATATTTGAATAGGTATTAATAAATTTATTAGATACTTTTCACAATCAGATAACTTTAAAATGTTATTTTTTATCT
TCTAAGGACATAAGCCTTAACAACATCAAAATTAGTCATAAATTTGAAGATATTCCCCAATAATAAGTTTATATATATACATATATATATAATT
TGAAATAAAAAATTGTTAGCCATGTTTTTTTGCTCCAGGATGTGTGGCCATGCCAGGCTGTGAGCCCTGGATATGCACACAAACAAGTGTGTGT
GCTCTGAAGCCCCCGCACATTGTAATAAACACAGCTGCATTTATTTGAGTATGTGTTCCCGTGTACATGTAAAAACATCCAAACAAACACACTC
AGCAGATTTATTTCATGTGCAATGGGGCAATTATTCAAATAAATATGCTCAATACAATTATTTGAGTCTCGCATTTGCATGCTCATCACTCACA
GAACTAATACTAAAAGAGGGGGAAACACCAAAGAATTTACGTGGGGGAAAATATATGTGAAAGCAATGTTATTGTAGATGTTATAAGGTAGCCA
AAGCTATGGCTCCCTTCTTAACTGAAACACAATGATTTTGTATTCAGTGGCATTTGTTTCTAACGATGAATAGTTATTTCACTCACTTGATCAT
TACATCAGAAGGACTGCAGTGTTTAGATTCATATAATAGCAAACTTTAAGGACCTGAAGCAGATAAGGATGAGACATCTCTATATTTCAAAAGC
AGAATAGTTCTTTCTACATACTTTACATCAAAGGAACACTGATAAATTATTATGGCTCACATACGTAACTATAAATTTAAAATGTTATACATAT
AGAAAAACATTCCTACATTTTAAAACATTAAAAAGTCACAGATGACTCGTGTGATCATTTTATATATTAATAAATACTACAATATATATGTGAA
CACATTACAAATCATATTGGTGAACAAAGAGGCTGTAAAGCCTCTCTTCAGTATACTGACATAACCTAATATACTAAAAGGGGAAGGGGCTTTT
AGTCACTGAATATGCATCGTGAAACAAAGATGAAGAAACTACATGGCTTGTGCCCATCACGAAAAAGATTCATACTGAAGGCTTAGCTTTGGTT
TTTATTCAATTAAATTGTCAAACTGTGCACAGTGAACTTTTTTTTTTTTTTAGAACTTGAGACATTTGTGATGTTGGCTGTTTAAATCTTTGTT
ACCTTCGCTGTGAATTGAAATTGTACATATTTAGTAAATCATGCAAACAAAACAAACTTTTTAGACAATATTTTTATTGGAGAGTTTTCTTTTC
CTGTATCCATGTTTAAAAAAAAAAGACCTCCTTTCCCAAAATAAAAAATGTCAATACTAAATTTAAAGAAGTATAAAGGAATAATTGCTTCCTT
TAGAGCAAATATTTAAATAAACATGGAGAGAATTGGCAACATGTTCTTTTGGGGCTAATAGGCTGTGTTCAATTTTTTGGGTTAAAGTTCCAGA
GGGCCTCTGTTTCACATTCAAAGATAATATATTAATCTCTGAATTAAAGAAATGCTCTTAGGTAACAGGATAAATCCCTCAGTCTTCATTTGTG
TGTGAAGTGTAGCATTCATCAGAGACATGACATTGAGACGACATGATGCTGAATATGCCACAAGCTAAAACACCTCTATTAAAACAGTCACCTA
CCACCTATAATCCAGTGTGACATATTAAAATACTCCAAAATACAGAGCATGGAGAATGAACACCATAATTCCCATTTGGCCTTGAGAAGAATAT
GACAAAGATTCTAATAATTTTTGTCAAAGAAAATGATGATTTAAAAATACATGAAGATTAAAGTGGTGACAAATGATCTTTTAAGTATTTCTAA
TTGGTCATCCTCATTCATAGCTTTGATTCCACAGAAATCACAAATCCTAAGGCCCCTGACTTGTGAGTGCGCCCCGTCAGCTTTCTTCATGCTA
CAGAATGTGGCTGTTAGGTAGGAAATGAAGGATAAGACCCCAATGTGTTAAAAATAGACTTCTTCTCCGGCAAGAGGTTTAAAATTGGCAAGGA
CAGGACTCAGAAAGAACGGCCTTCACATGAGGAAGCATTCAGAGAAAGATTGTTACCTTGTGATCTGACCATTTCCAGAACAGTCAAAAGGCTC
TCTCCCTCCNNNNNNNNNNNNNNNNNNNNCTCTCTCAAGTGTGTGTGTATACGTTTGTATGAGTGTGTTTGAGTGTATAGGAGTATGTGTGTGT
GAGTGTCTATATAATGTATATATGTATAAATGTGCATGAGTGTTTGACTATCTATGGGTGAGTATGTATATGTCTGAGAGTGAGTTTGTATGTG
TTTGTGGGCATCTATGTATCTGTGTGTCACTGAGCATGTGTGTATGTGTGTGAGTTAGTTTGAGAGTATGAGTGTGTAAGTATATGTATATTTG
TATGAGAGAGTGAGTATGTGGGTATGAGAGTGTGTGTAGCTTTACTAAGTTTACGTGTATAAAATTGGATAGATTGTATCTTTTAAAAACCAAT
ATTCAAGAGATGGAGTCTAAACAGAGGGCTTCTGAGATACTTTCTATTTGTTATCTTACATAAACTGAAAACATTTAAAATGTTGATACTGGAA
AAATACAAAGTTCTTAAGAGAGCTTCATAAAAACTGAAGAAAAAACTGAAACAATTTCTAAGGTATGTCAACAATTAAATAGAGAAAATATTAA
ATTAGCTTTTTTCCCCATCACTTAGAAAACTCAGACTTCTAAAATAGGGCCTTTCTTTAAACAATAATCATTTTTTGCCCATTCTTAAAATAGT
TGTATTATAGGGCAAATAATTACAGTATACTCCTGTCCAATTTTGTTTAGAGAAAGAGAAATATAGGCTTTAAATTACTTGAAAATGCTGATGA
ATAAAAGAATATAAATTTAGAAAGGAGACTCAAGAACACCACTAAACTCAAAGGAAGCAGGGCACTGCATTTAGTGACCACAGCAACCTGGATC
TTGGTTTTCACATGTCTTCTGAACAATATTACTTCCAACAGAAACATTTCCCAAAACTACAGGGCAGCCCAAGATCCTTGTGGGCACACGGGGA
AAGCACCAACTACTGAGTAACCCTCAACCACTTCCTGCCGTCTGAAACACTCTGTGGAGGTCTACCATCTCATTACTGAACATGCTTAGAAAGT
GTGAGGACATAGGATTCTGGTTAAAGGCAGGTCGAAAGCAAGAGGGAAAAGCAGAAGTGCAAGCCACCCTGCCCAACTTGTTTAAAAGGATATT
CCTCAAGTAAGCATGCCCAAGAGTAATCAACCTCAGTTCTAAGCACTCACCTTCCTTTTCCTCAACATCAAGAACGTTGACAATAGCCAAGACA
ATCCCCTAAAGGGGAGCTTTTGAATCACTTTAGAATAAACGGTGGTGGAATAGTCAACATAAGCTTCCAACAAGCAGAGTTCCAGCCACAAGAA
CTACTGCTACAGGTGTACCACCTTAATTTTGAAAATGATAATTAAACTAATGACTTTTTATATATTAAAAAAAAAACACATTTCCACTGGCGTT
TTCATTATAAAATCTCATGTTGTAAATTCCTTCATGACTGGGACAAAGTTATGGCATACTATCTACATTAAAATTGATTTAAAAAAGTGTTCCT
ATGAATAAAAGCTTTATGTTTGTAACATTGAGAACGATTAAAAAAAAAAAGCAATTAATCTATCACCCACACGTTATAGATGAAGAAACCGAGG
TCTGAAAATGCTTGAAAACACACAAGTGTTTGTTTTTAGCCCACAATAATCTGGAAAGCAGCTAACTGCATAAAAAGTCTAGTCCTCTGAAAGA
GAGTAACATAGCCTCTTCAAAGCATCACTTCAAACACCACAGTAAAATGTTCTTTTCAAAGGGCCCGAAGAAGCAGCAAAAGAGATGGGTTAGT
TCCTGCAAGAAGGTTTTCTTCTGGTCTATAAGAACTTTTCCATGCAAGAGCGAAATGAAAACAATCTATGTTGGAAGCCTGTGTTACTCTAAGC
TGTGACAACATCTGTACCTAGTCACTTCTTATCACGTAGAGTCTCCACTGACAGGCAGAGATGTTCTCAATTTTGAGAATACTCTTCAAAAAAT
CTGTAACTGTTGCTGCTTATAGCTGAAGAGACTGAGGTCTGCAAGTGCTTGAAAACACACAAGTGTTTGTTTCTATCTCACAATAATCTGGAAA
GCAGCTAGCTGCAGATTGCCAAAACTCTAGCCTTCTGAAACAGTGTTCTGTACTTTCTAAATACACCACAGAAAAAGGAGGAGAAAATAGGGCT
TGAGCTTTGCTCCAAGGAGCAGAAGCAGTTGGAGATTAACAAACCAGTAGCAGCAGAACTGATGGAAGAATACAAAAGAAAGTCAGAGTAGAAC
TCCTGGACACTTCCTAACCCAAGCCCTAACCTTCAGATGCTAAGGTTTAGTGAAACTAAAACCCCAGCTCATCCTGTAGCTACAGGGGACCCAG
AACCAGAGGTTGGGTCTCTCATTTTTACATAGATGATGTGATTGCTTTTCATTGTTTTAAGGGCAATTGAGTGAAAATAAAAAGCCATCCACTT
AATGGTCTAGGGATACAGTGGTATAGAAAGCAACCACACACCCCTTTAAGAATGTACATTCCAGGTGGGAAGGGAGAACAATTACAAGGTCCCA
GCGGATAGGACAGCTTAGTTAAAAATAAAAGCAAGTGAGAAAATAATGAGCAAGATGGATGTGGGGGCTAGGATTTGGGGTGTCAGGAAGAACC
TCATGGGGAGTTGAGATGAAGGATAAGAAGAAGTAAGGCATGGGAAGAGCTGGAACAAAGGTGTAGGAACAACAAGTATAGACACGAGGCACAA
GCGAGGCTGGCTTTGTGGACTAGAAAGTCCCCCTATGAGTGTAGTGTAAGAGGGGCAGAGATAAAGCCAGAAGACCACAGGCTTTTGATGAACT
TCTTAGGTTATTTGGTCCAGTGTCTTATTTGCGTAGGTGAGAAAATTGAATTTAGTAATCTCTTGAGTTTTGTACAGCGGTAGTCTGAGGATGG
GATCATTAACCCCAGTGAATTGCCTGTAACGAATTTTGCAGCCCTGTGTTTTGGAATGGGGGGAACCTCTTTTTCTCAGACGTTTGCACCTGCC
TTGTATCTCGTCACAGGCAGATCCGTCACACTGGAAAAGCAGAAATTGTTTGGCCCAAAGAAAGTTTGTATTCTGAAACTGAAGCACTAGCTAT
GGCAAATGGGATGCTGGTGGAAGCCCTTTCCCCAGTAGGCGTTTTCCAGCCAACTCCCCGTGGTTGCTAGTCTGCTCAAAACAGCTGGGCTCGA
ATCAGGCATAAGCAAGGGCCTCAGCCATTTCCCCTTCCTCTGAACTTCTTTTAAAAAAAAAAATACAAAACCTCACAGAGCTGCGAGAGAAGCC
AATAAGAAGTAAGGAACGTGCAGCAGGTGGTACCATCTGTGCCCGACTAATTCCAGCCAAAACAATCTGCTCCCTCGAGTTCCCAGTTGTGGGG
AAGGGAAGAGAATCTGACAGCGGCAGAGTCAGGGGAGGGGGTGGAGGAGGGCAGCGCTGAGTCTATTATTCCGGCGATCCGAAGGTGGGAGGAG
GCAGGTTATTGATGCCAGTGAACTATTATCTCTGTCTTTTGCTCTTTACAACCACGGAGGGAGATCTCTACAGCGCGTTCTTGCTAAGCTGGCA
ACTACATCCCACACCTGAGAGACAGACGTGCAGCTTGACTGTGAGCCTGTCACCACTGAGATGGGAGGGACAGCTTGGCAAGCGCAAGCCCACC
CCAAAGTGAAAAAGTAAACAAGAGGGCAGGGAGATGATGTTTATTTTATTCTATTTTCCTAGCAACCGAATGCCCTCTGTCTCCATGTTCATTC
TTTGAAAATTACCCACAGCTTAAACTGGGCTTAGTGTCCACATGCTTTCACCCCGGGATGGCATTTTCCGAAGCAAACTCCTTGCCATCGATGG
ATTCCTTACGAAGAACGCATCTCCCTTGGCATACTTAAAACCTGGGGTGAATAAAATGCACTAGTTCAAGGATAAATGAAGTCGCTGCTTTTCT
TTAGAGAGGAACAGAAAGGGACTGAGACAGAGCATACACACCGTTGTAGTGTCCCAGGAAAATACATCTTCTGAAAAGATTCTCTTAACCCACG
GCAAAAATTCCACCAGTGCGTTTAGGTTAAGGCACCATCCAAGGATCGTACTAGTATTTGTTAAAGGCATCTAAGGAGGGACATTTGCGTTACT
GCATTTCTTTCCGCTAGCTTACCTTTGCTACAGCTGGGGGTTGAGCTCTAAAAGATGGGTGCATTCGTCCAAGAGGGCGTTCAGAGGCTTGAAG
GGAGAGCAGCAAGAAGCATTCATACATGAAAAGCAGTCAAAGTGGGAGAAATGACTGGAAAGGAAAAAGTGCTTGATCCTAATCTCAGTTAGAT
AGAAGTTCACCTTCCCTCAGAGTGTCTGCTGAAATACTGTGGATACGTGTGAGTACAACCTTACTAGGAAACAGGTCTTTGCAGATGTAGTCAA
GATAAGCCGAGGCTACTGTAGTGCACTAATGCAATATGACACACTTACACAAGGAGGCTTTGACAAGACAGTGGCAGA
MOUSE SEQUENCE—mRNA
CGCCGAGTCCATGCGAACTGCCATCTGATCCGCTCTTATCAATGAAGCAGCCGATCATGGCGGATGGCCCCCGGTGCAAGAGGCGCAAACAAGC
CAATCCCAGGAGGAAAAACGTGGTGAACTATGACAACGTAGTGGACGCAGGCTCGGAGACAGATGAAGAGGACAAGCTTCACATTGCTGAAGAT
GATAGCCTTGCAAACCCTCTGGACCAGGACACCAGCCCAGCTAGCATGCCCAACCATGAGTCCTCCCCACACATGAGCCAAGGGCTGCTACCAA
GAGAGGAAGAAGAGGAGGAGCTAAGGGAGAGTGTTGTGGAGCACAGCTGGCACAGTGGCGAGATTCTGCAAGCCTCTGTAGCCGGTCCAGAAGA
AATGAAGGAAGATTATGATGCAATGGGGCCAGAAGCCACGATCCAGACCACAATTAACAATGGTACAGTTAAGAATGCAAATTGCACATCAGAC
TTTGAGGAATACTTTGCCAAAAGAAAACTGGAGGAAAGAGATGGCCACGCAGTGAGCATCGAAGAGTACCTTCAGCGAAGCGACACGGCCATTA
TTTACCCAGAAGCCCCTGAGGAGCTGTCTCGCCTTGGCACGCCAGAGGCCAACGGGCAAGAAGAAAATGACCTGCCACCTGGAACTCCAGATGC
TTTTGCCCAACTGCTGACCTGCCCCTACTGCGACCGCGGCTACAAGCGCTTGACATCGCTGAAGGAGCACATCAAGTACCGCCACGAGAAGAAT
GAAGAGAACTTTTCCTGCCCTCTTTGTAGCTACACGTTCGCCTACCGCACCCAGCTCGAGAGGCATATGGTGACGCACAAGCCAGGGACAGATC
AGCACCAAATGCTAACCCAAGGAGCAGGTAACCGCAAGTTCAAGTGCACGGAGTGTGGCAAGGCCTTCAAGTACAAGCACCACCTGAAAGAACA
CCTGAGAATTCACAGTGGTGAAAAACCTTACGAATGCCCAAACTGCAAGAAACGCTTCTCTCATTCTGGGTCCTACAGTTCACATATCAGCAGC
AAGAAATGTATTGGTTTAATATCAGTAAATGGCCGAATGAGAAACAATATCAAGACGGGTTCTTCCCCTAATTCTGTTTCTTCTTCTCCTACTA
ACTCAGCCATTACTCAGTTAAGGAACAAGTTGGAAAATGGAAAACCACTTAGCATGTCTGAGCAGACAGGCTTACTTAAGATTAAAACAGAACC
ACTAGACTTGATGACTATAAAGTTCTTATGGCAACACATCGGTTTAGTCGCAGCAGTCCCTTTATGAACGGTAAGGCTTGGAGCCACCAGCCCT
TTAGGTGTACACCCATCTGCTCAGAGTCCAATGCAGCACTTAGGTGTAGGGATGGAAGCCCCTTTACTTGGATTTCCCACTATGAATAGTAACT
TGAGTGAGGTACAAAAGGTTCTACAGATTGTGGACAATACGGTTTCTAGGCAAAAGATGGACTGCAAGACGGAAGACATTTCAAAGTTGAAAGG
TTATCACATGAAGGATCCATGTTCTCAGCCAGAAGAACAAGGGGTAACTTCTCCCAATATTCCCCCTGTCGGTCTTCCAGTAGTGAGTCATAAC
GGTGCCACTAAAAGTATTATTGACTATACCTTAGAGAAAGTCAATGAAGCCAAAGCTTGCCTCCAGAGCTTGACCACCGACTCAAGGAGACAGA
TCAGTAACATAAAGAAAGAGAAGTTGCGTACTTTGATAGATTTGGTCACTGATGATAAAATGATTGAGAACCACAGCATATCCACTCCATTTTC
ATGCCAGTTCTGTAAAGAAAGCTTCCCGGGCCCTATTCCCCTGCATCAGCATGAACGATACCTGTTGAAGATGAATGAAGAGATCAAGGCAGTC
CTGCAACCTCATGAAAACATAGTCCCCAACAAAGCTGGAGTTTTTGTTGATAATAAAGCCCTCCTCTTGTCATCTGTACTTTCCGAGAAAGGAC
TGACAAGCCCATCAACCCATACAAGGACCACATGTCTGTACTGAAAGCATAACTATGCTATGAACATGGAGCCCAACTCTGATGAACTGCTGAA
AATCTCCATTGCTGTGGGCCTTCCTCAGGAATTTGTGAAGGAATGGTTTGAGCAAAGAAAAGTCTACCAGTATTCGAATTCCAGGTCACCATCA
CTGGAAAGGACCTCCAAGCCGTTAGCTCCCAACAGTAACCCCACCACAAAAGACTCTTTGTTACCCAGGTCTCCTGTAAAACCTATGGACTCCA
TCACATCGCCATCTATAGCAGAACTCCACAACAGTGTTACGAGTTGTGATCCTCCTCTCAGGCTAACAAAATCTTCCCATTTCACCAATATTAA
AGCAGTTGATAAACTGGACCACTCGAGGAGTAATACTCCTTCTCCTTTAAATCTTTCCTCCACATCTTCTAAAAACTCCCACAGTAGCTCGTAC
ACTCCAAATAGCTTCTCTTCCGAGGAGCTGCAGGCTGAGCCGTTGGACCTGTCATTACCAAAACAAATGAGAGAACCCAAAGGTATTATAGCCA
CAAAGAACAAAACAAAAGCTACTAGCATAAACTTAGACCACAACAGTGTTTCTTCATCGTCTGAGAATTCAGATGAGCCTCTGAATTTGACTTT
TATCAAGAAAGAGTTTTCAAATTCTAATAACCTGGACAATAAAAGCAACAACCCTGTGTTCGGCATGAACCCATTTAGTGCCAAGCCTTTATAC
ACCCCTCTTCCACCACAGAGCGCATTTCCCCCTGCCACTTTCATGCCACCAGTCCAGACAAGCATCCCCGGGCTACGACCATACCCAGGACTGG
ATCAGATGAGCTTCCTACCGCATATGGCCTATACCTACCCAACGGGAGCAGCTACCTTTGCTGATATGCAGCAAAGGAGGAAATACCAGAGGAA
ACAAGGATTTCAGGGAGACTTGCTGGATGGAGCACAAGACTACATGTCAGGCCTAGATGACATGACAGACTCCGATTCCTGTCTGTCTCGAAAG
AAGATAAAGAAGACAGAAAGTGGCATGTATGCATGTGACTTATGTGACAAGACATTCCAGAAAAGCAGTTCCCTTCTGCGACATAAATACGAAC
ACACAGGAAAGAGACCACACCAGTGTCAGATTTGTAAGAAAGCGTTCAAACACAAACACCACCTTATCGAGCACTCGAGGCTGCACTCGGGCGA
GAAGCCCTATCAGTGTGACAAATGTGGCAAGCGCTTCTCACACTCGGGCTCCTACTCGCAGCACATGAATCACAGGTACTCCTACTGCAAGCGG
GAGGCGGAGGAGCGGGAAGCAGCCGAGCGCGAGGCGCGAGAGAAAGGGCACTTGGGACCCACCGAGCTGCTGATGAACCGGGCTTACCTGCAGA
GCATCACCCCTCAGGGGTACTCTGACTCGGAGGAGAGGGAGAGCATGCCGAGGGATGGCGAGAGCGAGAAGGAGCACGAGAAGGAGGGCGAGGA
GGGTTATGGGAAGCTGCGGAGAAGGGACGGCGACGAGGAGGAAGAGGAGGAAGAGGAAGAAAGTGAAAATAAAAGTATGGATACGGATCCCGAA
ACGATACGGGATGAGGAAGAGACTGGGGATCACTCGATGGACGACAGTTCAGAGGATGGGAAAATGGAAACCAAATCAGACCACGAGGAAGACA
ATATGGAAGATGGCATGGGATAACTACTGCATTTTAAAGCTTCCTATTTTTTTTTTCAAGTAGTATTGTTACCTGCTTGAAAACACTGCTGTGT
TAAGCTGTTCATGCACGTGCCTGACGCTTCCAGGAAGCTGTAGAGAGGGACAAAAAGGGGCACTTCAGCCAAGTCTGAGTT
MOUSE SEQUENCE—CODING
ATGAAGCAGCCGATCATGGCGGATGGCCCCCGGTGCAAGAGGCGCAAACAAGCCAATCCCAGGAGGAAAAACGTGGTGAACTATGACAACGTAG
TGGACGCAGGCTCGGAGACAGATGAAGAGGACAAGCTTCACATTGCTGAAGATGATAGCCTTGCAAACCCTCTGGACCAGGACACCAGCCCAGC
TAGCATGCCCAACCATGAGTCCTCCCCACACATGAGCCAAGGGCTGCTACCAAGAGAGGAAGAAGAGGAGGAGCTAAGGGAGAGTGTTGTGGAG
CACAGCTGGCACAGTGGCGAGATTCTGCAAGCCTCTGTAGCCGGTCCAGAAGAAATGAAGGAAGATTATGATGCAATGGGGCCAGAAGCCACGA
TCCAGACCACAATTAACAATGGTACAGTTAAGAATGCAAATTGCACATCAGACTTTGAGGAATACTTTGCCAAAAGAAAACTGGAGGAAAGAGA
TGGCCACGCAGTGAGCATCGAAGAGTACCTTCAGCGAAGCGACACGGCCATTATTTACCCAGAAGCCCCTGAGGAGCTGTCTCGCCTTGGCACG
CCAGAGGCCAACGGGCAAGAAGAAAATGACCTGCCACCTGGAACTCCAGATGCTTTTGCCCAACTGCTGACCTGCCCCTACTGCGACCGCGGCT
ACAAGCGCTTGACATCGCTGAAGGAGCACATCAAGTACCGCCACGAGAAGAATGAAGAGAACTTTTCCTGCCCTCTTTGTAGCTACACGTTCGC
CTACCGCACCCAGCTCGAGAGGCATATGGTGACGCACAAGCCAGGGACAGATCAGCACCAAATGCTAACCCAAGGAGCAGGTAACCGCAAGTTC
AAGTGCACGGAGTGTGGCAAGGCCTTCAAGTACAAGCACCACCTGAAAGAACACCTGAGAATTCACAGTGGTGAAAAACCTTACGAATGCCCAA
ACTGCAAGAAACGCTTCTCTCATTCTGGGTCCTACAGTTCACATATCAGCAGCAAGAAATGTATTGGTTTAATATCAGTAAATGGCCGAATGAG
AAACAATATCAAGACGGGTTCTTCCCCTAATTCTGTTTCTTCTTCTCCTACTAACTCAGCCATTACTCAGTTAAGGAACAAGTTGGAAAATGGA
AAACCACTTAGCATGTCTGAGCAGACAGGCTTACTTAAGATTAAAACAGAACCACTAGACTTCAATGACTATAAAGTTCTTATGGCAACACATG
GGTTTAGTGGCAGCAGTCCCTTTATGAACGGTGGGCTTGGAGCCACCAGCCCTTTAGGTGTACACCCATCTGCTCAGAGTCCAATGCAGCACTT
AGGTGTAGGGATGGAAGCCCCTTTACTTGGATTTCCCACTATGAATAGTAACTTGAGTGAGGTACAAAAGGTTCTACAGATTGTGGACAATACG
GTTTCTAGGCAAAAGATGGACTGCAAGACGGAAGACATTTCAAAGTTGAAAGGTTATCACATGAAGGATCCATGTTCTCAGCCAGAAGAACAAG
GGGTAACTTCTCCCAATATTCCCCCTGTCGGTCTTCCAGTAGTGAGTCATAACGGTGCCACTAAAAGTATTATTGACTATACCTTAGAGAAAGT
CAATGAAGCCAAAGCTTGCCTCCAGAGCTTGACCACCGACTCAAGGAGACAGATCAGTAACATAAAGAAAGAGAAGTTGCGTACTTTGATAGAT
TTGGTCACTGATGATAAAATGATTCAGAACCACAGCATATCCACTCCATTTTCATGCCAGTTCTGTAAAGAAAGCTTCCCGGGCCCTATTCCCC
TGCATCAGCATGAACGATACCTGTGTAAGATGAATGAAGAGATCAAGGCAGTCCTGCAACCTCATGAAAACATAGTCCCCAACAAAGCTGGAGT
TTTTGTTGATAATAAAGCCCTCCTCTTGTCATCTGTACTTTCCGAGAAAGGACTGACAAGCCCCATCAACCCATACAAGGACCACATGTCTGTA
CTGAAAGCATACTATGCTATGAACATGGAGCCCAACTCTGATGAACTGCTGAAAATCTCCATTGCTGTGGGCCTTCCTCAGGAATTTGTGAAGG
AATGGTTTGAGCAAAGAAAAGTCTACCAGTATTCGAATTCCAGGTCACCATCACTGGAAAGGACCTCCAAGCCGTTAGCTCCCAACAGTAACCC
CACCACAAAAGACTCTTTGTTACCCAGGTCTCCTGTAAAACCTATGGACTCCATCACATCGCCATCTATAGCAGAACTCCACAACAGTGTTACG
AGTTGTGATCCTCCTCTCAGGCTAACAAAATCTTCCCATTTCACCAATATTAAAGCAGTTGATAAACTGGACCACTCGAGGAGTAATACTCCTT
CTCCTTTAAATCTTTCCTCCACATCTTCTAAAAACTCCCACAGTAGCTCGTACACTCCAAATAGCTTCTCTTCCGAGGAGCTGCAGGCTGAGCC
GTTGGACCTGTCATTACCAAAACAAATGAGAGAACCCAAAGGTATTATAGCCACAAAGAACAAAACAAAAGCTACTAGCATAAACTTAGACCAC
AACAGTGTTTCTTCATCGTCTGAGAATTCAGATGAGCCTCTGAATTTGACTTTTATCAAGAAAGAGTTTTCAAATTCTAATAACCTGGACAATA
AAAGCAACAACCCTGTGTTCGGCATGAACCCATTTAGTGCCAAGCCTTTATACACCCCTCTTCCACCACAGAGCGCATTTCCCCCTGCAACTTT
CATGCCACCAGTCCAGACCAGCATCCCCCGGCTACGACCATACCCACGACTGGATAAGATGAGCTTCCTACCGCATATGGCCTATACCTACCCA
ACGGGAGCAGCTACCTTTGCTGATATGCAGCAAAGGAGGAAATACCAGAGGAAACAAGGATTTCAGGGAGACTTGCTGGATGGAGCACAAGACT
ACATGTCAGGCCTAGATGACATGACAGACTCCGATTCCTGTCTGTCTCGAAAGAAGATAAAGAAGACAGAAAGTGGCATGTATGCATGTGACTT
ATGTGACAAGACATTCCAGAAAAGCAGTTCCCTTCTGCGACATAAATACGAACACACAGGAAAGAGACCACACCAGTGTCAGATTTGTAAGAAA
GCGTTCAAACACAACACCACCTTATCGAGCACTCGAGGCTGCACTCGGGCGAGAAGCCCTATCAGTGTGAGAATGTGGCAAAACCGCTTCTCAC
ACTCGGGCTCCTACTCGCAGCACATGAATCACAGGTACTCCTACTGCAAGCGGGAGCCAAAGGAGCGGGAAGCAGCCGAGCGCCAGGCGCGAGA
GAAAGGGCACTTGGGACCCACCGAGCTGCTGATGAACCGGGCTTACCTGCAGAGCATCACCCCTCAGGGGTACTCTGACTCGCAGGAGAGGGAG
AGCATGCCGAGGGATGGCGAGAGCGAGAAGGAGCACGAGAAGGAGGGCGAGGAGGGTTATGGGAAGCTGCGGAGAAGGGACGCCGACGAGGAGG
AAGAGGAGGAAGAGGAAGAAAGTGAAAATAAAAGTATGGATACGGATCCCGAAACGATACGGGATGAGGAAGAGACTGGGGATCACTCGATGGA
CGACAGTTCAGAGGATGGGAAAATGGAAACCAAATCAGACCACGAGGAAGACAATATGGAAGATGGCATGGGATAA
HUMAN SEQUENCE—GENOMIC
CTGCTGACACAACCCTACTCCCAAATTTGCAGGCAGGAGAGTGAAGCAATGTCTGTACTCTATACATAGTCTTACTTTTTTCTTTTCTTTTTTA
AAGTAGCTGTTTCAGCATTCAACTGGGGGCAAGAGGGGTTGGGGGGTGGAAAAAGATAGTGCAGGCAAACTTTCTCAGTGCTATTCCATCCCTC
TATGTCTCCCCACTCCTTCACACCTCTGAAGTTATGGCAAGACTAGGTAAAGAGTTTTGAACAATATTGAGACCCTCTTATATTTACCTTGAAC
AAATAGGATCTTTGACACTTCTTGACCACACTCAGCTGCCTGCAAGAGTGCTTCCTCCTATAGCAAGTCATATCGGGAGAATTCGCTGAAGAAA
GGTTTTTTCCTTACAATTGCAAATGAAAGTATAAAATAGATCACCAAATTTTAAAGTGTGCATATGTCCTCATCTCAGCTGTTGACATCATATT
TATAATCATGAGCACGCCAGGTTTCCTACAACTTAAGAAATTCTATGACCATATTACTTTTCCAACTTTATCAGTAAACATTGATTTCTGTATA
ATGCAGAAACCAGTTAAATAATTTCTGGCCGGGTGCAGTGGCTCATGCCTGTAATCCCAGCACTTTGGGAGGCCGAGGTGGGTGGATCACCTGA
GGTCAGGAATTCGAGACCGGCCTGGCCAACATGGTGAAACTCCGTCTCTACTAAAAATACAAAAAATTAGCTGGGTGTGGTGGCAGGTGCCTGT
AATCCCAGCTACTCGGGAGGCTGAGGCAGGAGAATCACTTGAACCTGGGAGGCGGAGCTGGCAGTGAGCCAAGACTGTGCCACTCCACTCCAGC
CTGGGTGACAGAGCGAGACTCCGTCTCAAAAAAAATAAATAAAAAATAAAAATAAAATAAAATAAACAACACCTAAAAGACATGTTACATCCAC
TCTGGTTTTCCATAATTTAACTTCATGTATTTTTCAGGTAATTCATGATAGTAGGAATTACTATTTATTGATACACCTGCTCTGTGCCAGACAT
TTTGTATACAGTCATATTTTCTTTACCACAACCAGCTTGAATCTAAGTACTCCTTTACCAATTTTTTTTTTTTTTTTTTTTTTTTTTGAGACAG
GGTCTCGCTCTGTTGCCCGGGCTGGAGTGCATGGAGTGCAGTGGCACCATCTCGGCTCACTGCAACCTCTGCCTCCTGGGTTCAAGCAATTCTC
TTCCTCAGCCTCCCGAGTAGCTAGGATTATAGGCATGCACCACCACGCCGGGCTGGCTGATTTTTGTATTTTTAGTAGAGATGGGGTTTCACCA
TGCTGGCCAGGATGGTCTTGAACTCTCGACCTGGTGATCCACCCTCCTCGGTCTTCCAAAGTGCTGGGATTACAGGCGTGAGCCACTGCACCCA
GCTCCTTTGCCTACTTTAAAAATAAGGTTCACATGGGTAAAATAACTTGTCCTCAATACACAATTAGTATTTACCAAGCAGGGAGCCACATCCA
GTTTATCTAATTCCAAAACCTGTATCTTTGTCACTATAATATGCTAACATTGAGGATCTAGTGTCAAATATACTAATGTCCAGTTTCCAGTCAA
CAAGTGCTAACAGAAGTTGTATAAGAAATAAAAACTATTCCACGACATCTCTGGACCATGATGTCTCCTTCATCACTAACTTGTCCTGTGCCTG
GGCCCAATGTTGGAGCCAGTTGAGCTAGCAAGAACCTCCCATGGGAGCTTTTCCTAAGTCGGGTGCCTGGGAGAAGAGACTGGACCAGAAAATA
CACTTTATCTGGGAAGCCAGAGGCACCAAAGCCAGAGAAACTTTGGCTCAAGGACTTGAGCCAATATTGTAACTGGAAAAATGAGCCTAAGTGT
TAGGTCCAAAAGGCAAAATAAGCCATACGTGGAAAAACAAGGGCCAATCACAGCATCCAGGAGGCCTGGAAATGGGTCACAATGTGCAGAGCGG
GTGGGCACAAGTGGGTCAGAAACACATCTGGGAAAGGTAAAAAGATGTTGGATGTCACATGAATATGGTGTTGGCCCTGGGGGTGGACGTGGCA
GATTCAAAAGCACACCAAGAACCAGATCGTTGAATTGTGGGGAGTCACTGACTCTCCCTAAGCCACAATTTTCTCAGCTAATAAAATGGACCCA
GTTGTAACCCCTTCAGATCTGCTATCAGAATTAAATGATACGTGAAAGGATTTAGCATAGTGCCAAGCCTAGAAAAGCAGGGGTTTTTTTTCCT
TAGCTATTATTACTTTATATTTGTGATTGCCATGGAGATGATAATAAATTTTGAGAGTAAAGTTTTTACATTTAAGTACCTGAAAGAACCCTGA
AAAAAAAAATTCACCCTTAGAATGGTACAAAATTAAAACTGAGTACAGAACAAAGTTTATAGTTTGAGCCTTTTAACAGAATAAAGAGTATTAA
AGAAGACCTTGAAGCAAGCATGAAGTAATTTCCAGGTCACTAGACAATTTGCAGGTGCAAACCATTTCTAGTCCCATTGTCAGAGGGAGAAAAA
AGGTACAGGTCACACCCAGTCCCCTACGCTGATGTCCAAATGTCTGGTTTGGTAGTTTTGACCTAAAAGGAGCATGGAATGGATGCTTTCAAAA
TAGAAACAATTAACAGACCCTTTAAGAACTACAGATATAAGTGTTTTGAGAAGTCTTAAAGAAAACAAGAACAACCAAAAACTATCAGTGTTAG
TATTACATCACGATAGTTTTTCCCCCTGGCATTTGCATTGATTTTTCAGTTTTACATCAAAAAGAAAATCTGGCCTTGTGGACATTTAAGAGAC
TAGGGAATTTCATTTTCCACTTAATACACTGATTTTCTTCACCACTCTAGGTACTTGAAATTAGCGCAAACCCCAGGACAGCTACAATTCCAAA
AGGGAATGCTCAGTTCATTATGAATGGTCTTAAAGCAAACAGTGCTCTGACAGCCAAATTCCTGGTCTTCAAATTTGTAAGTTTGCCCTTTTTT
TCACAAGTCTTACTCAAGACCGCTTCTGAGCTTTTGCACATTTAACCCTTACACTAAAAGACAATATGTTACTAAAGAGCATGGGAAACTTCAA
GTTCATACATTTGGACTAAATTCCTTTTCAAAAGAAGTCTAATATTTATAACCAAATTATGACCATATTGAATACACTAAATTAACTGCTGAAC
TAACAGAAAGGAAATACTGTATTTATTTTCACTTCTGTGGCTACGCATCCTTTGAACAGTTCGAAAAAATCATAAACCAGCCATAAATCCTAAA
ATGCTTTTCATTTTCTTTCTTCACGTAATAACACAGCACTGATTTTTCAATAAAAAATATACTGTAAATAGTTGTTATTTTTAATAATCAAAAT
TAATTTGTACCATCTTTAGTTGATCTGTATATTTGTTTAACCTTTCATTATAATAATAAAGCTACAATATAGTGAAGTTTTATGCATTACTTCA
TTTAATTCTCAATAAAATCCCAAGGGATAGCATTATTAGTGTACCCACATTGGAGATTAAAAATAAAACAAGCTTATAGGAGACTGCTTATAAT
CACACAGGTAGTCATTTGCAGGGCTAGTATTCAAAATAGATATTAATACTTTGGACTTTAACTGGCACAGGAGAATAAAAATATCAGGGATACA
CTTACTTAATCATTTTTAATAATTTAAATCAGCCCATATGTTAGTAAGTAAAAGATAAAAAATGATCCTAAATACCAGGCCTGAGTTATTTGTC
AATTGCTGCAATTTTCCACTTTTAGACTTGAATTAATAGACATAACTAAAAATTTAAATGACAAAATTCCAATAAGAAAACATAGTGCATAATT
AGTGCACATCTCTGGATTTGGGGAGGAGAGTGACTTGATTTTACATAGACTATTGTTTTTCCTAATTAATTGTAGTGTGCAACATATTTGTATG
TGAATGCCTCATAAATGGTTTACAAATTGTTAAGAAGTTTATGGATATCTAGAAAGAATATTACAGCTCAATAAATAAACTTTTACAAGTGTAG
AAGAGAAATTTTGCATTAAAATGTGACTTTGTTTCTTCATCCTGAGAGAATGAATTTTTAAAAAACACATTTAAAATCAAGCATTAGATATGCA
AATATGTGTTCAGATCAGAGATACTAAAATTATTCAAATGATTAATTATTCATCATAAAATGTCAATTAATAATTATGAAGCAGAAAAGGCATC
TTTCTAATACATCTTTATTTTTCTTGGCCTAAAAAGGGCTAAATATACATGTTCAATTGACTTCTATCAAGTTTTTAAAATTCAACAAAGTAAA
CAAATTGTAAACAAGTGAAAACTCTGAATTTTAATGAGAACAACAAATATGCCCAAAGTGAAGGGAAGAGCAAAAAATAATAATAAAGAAAACA
AAACAAAAACAGTTATGTTCATGACATATGCCGCCTCATGCTCACTCACCTGCTAGGTAACGGACAGTAACCTAGCCTAGTCAAGAAAATAACC
CAACAACCCAAGTTGTGAATTTGCTTAGTAATGTGCAAACTACGTGACATGATGATGTTTCTCTCTGAATTGATCAATCTTTGTTGGGGTTCAG
GAGGAGTGCTTTGGGAATTTTTTACCCTTTGCAAATAGTCATCAGAAGAAAAGCGCAGTTTAAGTTTCATAAATTACCTATTGTAAATGTCTAA
AGTCTGTTAACAAATTAAGTACTACTAAAAATATGGCTGTAAACAAACTTTTTCACATTGCCTTAATTCTAAAGAATGCCCTATGCCAAGCATT
ATGCATTTTTTCCAGGAAGACTATATCTATTATATCTTGTCTTTTAAAATTATCAGTCTGAGCTGATGTGATAATATAGAAGAAATAACCATTA
TGGTCACTGAAATATTGATTTATTTTATTTTTATTATTATTATTTTACTTTTCACTGACACCTGGTGAACTTGTCGTCTCTGAGACCCGGGGAG
TTATTTTAGTCAGGGTGTCCCTGCCCTCCTGCTGGTAGATTAATTACACATTAAACGTTCTGTTTTCAAAACGAAATGATAAATCTGGACACAT
AAAAGAGGCACAAAAAGAATCACAGCGAGGGAGAAGAGTGGATGTTAAGAAAGAAAACAAGAAATTGCAAAAGGGAGATATCAGATAGAAAGGA
GAACGTAGGAAATGCAACTGGGAAACAATTTCAAGAAAATAAGGATAAAGGGCAGGGAGGGCTGAAAGGAGGGCCAGAGGGAGGAAAAGCAGGA
GGGAGATTTTTGGTTTTCAATTCCCTGGTGAGGCTGCTGGCGTCCGCGCCCTCAACGCCCCAGCCTTCCAAGTTGAGGCGAAACCCACCTCCTC
GGGCCTGCGTCGCATCCAACTTACTCCAAGTTTTCTGGTGACTCCTACAGGGCCCCTTTCCGTCCCCCCCCCCGCTCCCCGCCCCCCAAGCCTT
AGTGAGATTGACAGTCGCGTGGAGGAGGCTTTTCCAGGCACAGCCTTTCTCATGGTAATCAGCCCCCGGCATCACCTCCCGGCCGCCGCTGCGC
CCGCTCGGAGCGCGGCTCGCGGACCCCGGGGACCGGAAACAGGGCGGCGGGCGGGGAGCAGGCGAGCGAGCCAGGTCAGCTGACCGGGCGGCGG
GCGGGGGTCGCAGGATCCCGGGCGGGGACAGGTCTGGGGGAGGGCGGTCTGGTGGGAGGGGGCCGAACACCGCCCCCCCCCGCGACGCGCTCCT
CCGCCTGTGCAGCGGGGCCCTTCCTGGAGATCAAATGCAGGGACCGAAGCTGGCGGCGGGGGTTGGGGCGGGGTGTGTGGGGGGGGGAGTGGCA
GAGCGCGCGGAAAATTGGGGACAACAACCAGACCTGTTTAGCATCAATAAATTAAGATGCTCATTTGGGTCCTGAAGTTTGCTCGTTCCTGTCA
GTAGAGACGTTGGCAAAAGCCCTGAAGCCGAGATTCAGCCTTTACTTCAAAAAAATAAAATAAAATCAACCCCTCAGCTGGCCGCCCTGCTGGG
GCCAGGTGACGTGCGAGATTCCACAGCCTGCGGGTCTCGCAGCAGGGATGTTAGGGACGGTCTGAGCTTCTCTGGTCCTGTTTTGGTTTTGTTT
GAAAGGGCTTCTCAGAGAGATGCTCCTGATTTTTTTTTTTTTAATAGACTTTCCCCTCCTATCCTAGGCTCAACTCCGAATGGATTGGATTGCG
AGTCTGCACGTGAGAAAACCGTTTGGCTTGGCTTGGACCCCTGCCGCCCCCCACCTCCTCCACACACACCCAGTCCAGGGGTCCCCTTTATCAC
CCTTTGCTTGCAACTCCAAAAGAAGTTGCCCACCTCCTGAGTCACAACACAAGGTCGAATAATTCCTCTAGATGAAAGATCAGTTTCATTTCAA
AACGAGAATAGGTTCCTTTTTTTATTTTCTCCACATGGTACAAAATAAACAGAATTTGCTTTAAAAAAAATCATTAGCTCTGGCCAAATTCGAA
TTCCTTCTACAGCCTGTGTGTTCAAGGGCACAAACATTGTATCTCTTCGGGCATCTGGGCCGCCAAGCTGAGCGGGGGGAGGGGGGAGCGGCTG
TGAAAGTTGAGGAAATTGACAGACTGACAGGTGAATGGGGGGACAGGCACCACGTCCTGGCTGGAGGGAATTGGAAAACAAAAGTGCATCCTTC
TCACCCTGCCTGGGTGGAGGGAATCCTGAGGGAGGTAGTTTGTTTTGCCCATGGAAACCCCAAAGAATTATTTTTCCCCCTTCAATGTTGATTG
CAATATTATTTCACATTTCCGTGTATCTGTTGTTTTAATCTCTTTCGTCTGCGCTAATCTCGAAGTGGATTATTAATGGGGAAGACAGAGAAGG
AGAGATTCATTTGCAGGACTTATTTTGCTGTGTGAGGAGCCGAAACCCAGCAGCCCCCAGTCCTCTCTCGACTTTTCTCTGCGTCCTGTGCTCC
TGCATCCTCCTGATCCCACGATCCCCATTGTCCCCGAACTGGCCCTCGCACTGAGGGAGTGTTCGGAACAAATTTATATTCCGGCTTCCTCCCG
ACCCCATCACCTCTCCCACGTTGGGAACTCTCTCGGCCAAATGCCTGGGGAGGGGCGTGCCAGTCAGCAACCAGGGGCAAGGCAACCTAGCCGC
AGCGCTCACCCCTCGCGGAGACCCTTCCCGTGCCACCATCCAAATATCTACCTTCATGGGAACCTGGAAGACTGCTTTTTCACCCCAAATCAAA
TACTGGCTAGTCGGAACTCCCAGTGATAAATGTTGGGGACTGCCTCCTGCCACTTGAGCAATTCCTGAGTCCAGGGTAATCAGATGATTAGGTC
TTTTTAATGGAAATACTTAGGGTTTTTTTTTTTTTTTTTAAGTCAGATCCTAAGTAACCTGACATTTAATATACATAATAAAGACAAGCGTTTT
GTTAGCTATTCGATTGGATCCTTTGACCTGAGGTTATGCTTGTGTGTGTGTCTGGTCTGTAAGCCTCCAATGGCTACCTGGGTGCCTGAAGAGG
AGTCTTGCCTGTAATAACTCTATGCAAAGGGCTCCTTCTTCCTTAGGAGTGGTGGAAGCCTGGCTGTAAAGCAAACGTCTAGAGAAAGCTGGAT
TCCAATCTTTTAAATTAAAAAAGAGGAAAAAAAGGAAGAGGAAGAAAAATGGACATGAACAGTGGTGCTAAATCTCAGAAGAGGAACTTGATAA
GTCACACATATATTTAGTATAGATATATAATAATGAAAGAAATGTAAAAATATAAATTAAGAATGTGCCTGACCCATGTTGAAAATCTTTGATT
TTATTTATTAATAATTTTTAAGCTGAAGATCCTGAATGCCTTTCTTCTATAGACACTTTATCTGTGATGGGGTGGGGGGAGAGAGTTAATTTAT
CCAGCAGCTATTTTCATTATAATAAATACTTAAATTAGGAAAGAGGTGAGTAACCAACTGTGAAAATCTACTTTCTTGCATCCTAGAACAAGAT
CTAGCTGTGGTCGTGCTAGGTAGCTATTAACCACCCCCACCCCACTCCCCCCCCCCGCAAAAAAAAATACAAAATACAAAGACGTATACCTCTG
GGAGTGTGGATGTGGCAACCCATCTGGTGGCTTGTCCCTCCTTTGAGTGCAATTGCCAGTGACTCTTGCATTCAAAGTCTTGCTTTAGGCACAC
ATTCAAAGCACAGTTCAAAGCAGTTTATCTTAATATAGTGTTGGATCAGGGTATTATTTGTTTCAGATTTCATCAGACTGGAAACAGGAGGGTG
TAACATATTTAACAATATTAAAGCTTAAAAATTGGTGTGAGGCAGCTCTCTGGTCCTCTTAACACCTCCACCTTTACCTTTCCGAAGAATCCTA
AATGCTGTGAGGCTAGAAGTTTATTTGTGCTCTGAGGTTCTCAAGCACTTTCACTCTTTAGGAAAAAAAAAAAAGTCTCACAGTTATTTAAGAA
ATTGAGCCTGAACCATCCGAGGATAGGAGATTTCTTCCTTTTCCGATAAATGCCTGTGCTCAGCATCCTCAAATTTGGCTGTCTTTATTTACTT
CTATATTAGTTCCAATTATGTGCAGTGTAAACCAGCTTTTTGATTAACAAAACAGCAGAGCATTGGTTAAGAACACTTAAACTTCAAAAAAATT
CCCCTGGGAAGTGGGCTCTAAATTGGTTAATAATGTGCAGTACTTGCTAAATTGCTGACTTCCAGATGTGGAAAATATCTTTCTTGTTTAGGAC
CTATGTAACCTGATTGGATTACGACAGAAGCGTCACGTTGCAAGCTTTTGAGTGATTATTTAATTAACCATACAGTAGAAACCTGTATTCTCCA
GGAAATCCCTTCCATATTTGCATAACCAATCCCTTCAGAGCAAAGGTGGAGTCTTTTCTTTTTAATCTTACTTTAATTGTAATATCAAAAAATA
TATACTCCAAAACTTAGACCCCATGCCGTTTAATATCATGCTCTCCCTTCCCTGCTAAGTTTCTCTATGGCCTTTCTCGTTTCTCCTCCTGCCT
CCCTACACACTCTCCCTTACTTTGTAGTGAGGTCTCCCCGAGGTGTAGAGAGATTCAGACATCGGCCAACCGAGTGTTCTATTTTAATTTACTT
AGAGACCCTTTATTAAAATGCCAAACTACTTTTTAATATTGGGATCCAGTCCAGAAATTCATCATGCACACACCCTAATACACATGCCCTAAGA
TGCAGCTCCCATGCAGCATTTTTTTTTCTGGCTCTGGTACCTAAAAAGAAAAAAATAACAATAAGAGAAAGGGCAGAGAACTTTGTTCCAGAAG
CTGTACTGAGATACCTACACAATTTGATGTGCATCTCAAATCTGGTCATTAGAGATATCTGTATAAGAAGAGACTATCTGGATTGAGGACCCGG
GATCTTTCCCTTTAACTTTCGCCCCTTGGAGTTCTCCAGTTCTGTGAATGGTGTGCACCGTTTTCCGCCCTGTACTCTGTAGGATTTAGTGATG
AGGATAATGATGCCAAAGGCTTGACGGGCTGCCCATTCATTAGGGCATCTGATTAACATAGTAAGGAATGTTTATTTTCAGTACATAAAATTGT
AGAACTTTGGGAGCATCGTCTGAATTGTCAGAGCTGAACAGCGAGGAGCTTAGTGAGACATGAGAATATAGAGAGGTACCTAATGTGTGGGAAG
CTGAGCTAGTTGATATTCTATGAGAAGTTCGTCGTGTCCATCTCATGCTGTAGGTGTAGGGAAAGTTGTTCAGGTGCTGCTCACTAGTCCTTTG
AGATGCAGGTGCCAGTGGTCTGATCTCTAGTTGATGATGAGAGAGCATCTACTTTCACATACTGAGTGTCTTGAAGTGATNNNNNNNNNNNNNN
NNNNNNGAGGCGAAGGCGAAAGGGAGGGAGAGGAGGAAGGGAGGGAGGTGGAATTTCATTTCTTCCACTAAAGCGTTTGCGGAGACTTCAAGGT
ATAATCTATCCCAGATCCTTTCCCAGAGAGAAACTTGGCGATCACGTTTTCACATGATGCTCACCCTCAGGCCGCTTCAATTATCCCTCCCCAC
AAAGATAGGTGGCGCGTGTTTCAGGGTCTCTCGTCTCTCTCCTACAGAAAAGAAAAAGAAAAAAATGTCATTAGAAGAGGCGTAACACGTCAGT
CCGTCCCCAGGTTTGTGTTTCCTGGAGTGGCCGAAAGAGATCAGTTCTAACCTGCTCTGCAGGAATAACGGTCCTGCCTCCCGACACTCTTGGC
GAGGTTTTTGTACAGTTTGCTCCGGGAGCTGTTTCTTCGCTTCCACCTTTTTCTCCCCCACACTTCGCCGCTTCTTCATGCTTTTTCTTCTCAC
CATTTCTGGCCAAAACTACAAACAAGACTTCGCAGGTAGGTTTTTTTTCCTCCCCTTTTCTCTCTTTTTATCCCTTTTTGGTGTGCTCGTCCTC
CATCCTCCTTTTCTAATTTTCTCATTTTGAGTGGGGATGTGAGTCTGAAGTGAGAAGGGGTGTCCGTGGGTAGGAATTTCAGGTGGGTTTAGCT
CCTTTATGGCAAGCTTTTCTCAAGAGTGGCTTCTTCGCTTTCTCTTACACTCACACTCTCTCTCCTTGCTTTTCTCTCCTTTTTCCCTCCCCCA
AATAATTTCCCCTGTACCTGTTCATTCAGGTAACCAAACGTCTCCTTTGCTATCCAGCCCAGGAAAAGTTTTATTGAGAATTATATGGCTGGAA
TAAAAACTCATCAAGGGGAGAGGTCCTGCTCTATTTTCCCATCTAGTTCCAATTCATTATATTCAGCAATTAGGACTTGGCAAATACCTGTTAA
TAATTACAAAACTTGGTCAGTTACAGACCTACAAATTCGGGGGCAAGTCTTTCTCTTAGACATGGCAGTTCATCCTCTCCCACCGAGAAGGCTG
TTTTCTAAGCAGAAAGTTGTCTGTTTTTGTCTGCTTAGCGAGTTTCATTTCTTTATTTCATTCTTTGTGTGTGTATGTGTGTGAAGTAACACCT
CACTTCTGTGATTATAAATAAAGAAGTGAAAGTCCTCATGGAACTTGAGTCGTTTACCAAAGTGGAGGGGGGGGCACTACAGCTGGGAAGAAAA
CTGCTGTCAGGATATCAGGGTTTTAAATTAGGATAACTTTTAAAATTGTATTTTTAGTGGCAAAGTAATATAGACATGGATTTAATAGAAGACA
CATACACACATATATCCCATTCCATACTTTGGCACTGAAAAGTCGAGAGAGAGATAGCAGGAGTTCCCAGGAACAGTCATGAGCCCGGCTAACA
TGAATGTGTTTATCTCCCACCTACTGATATATTTTACATGCTCCCCCTGTAATGATGAAGGCAAGATTACTAACTCCAGACTTAGGAGTAACAG
GCAAAGATAAAGTTTACAGCACAAATGCCCTGTCTCTCTCTCTCACACACACACATGCCCATAAAACTAGCAACTTACTTTATTAAACATGTAT
TTATATGCAGTCCTGTGTCTCAGGATGAATATAGACAGGCCAGCTGTTTCATCCCAGACACTTGTGTGACCATTTCTTTATTTCAGGATTTCCC
CTAACAATTTCAAATCAATAGGACAAGGAAAGAAATGATAAAATATGTCAAACTTAAAAGTCTCCTACTATGTATGCCTAGGTAAATTTAAGGT
GCTTTCTAAAATATCCACTTCCCCTTCTCTCTGCCCCCCTCCCTTCACCCCTCTCAGCAAATGTGTGGAAACTGATACTCACTTTCCAGGTTTT
CTGCAAAGCTTCTAGCACAGGAGACAATAGGTGTGGGGCGTGGGGACTGAGTGTGCCCGGCAGAGAAAGGGTTAATGGCCCTTGTGTTACAGTT
TGCATCTGTTACATCTTTTATAGCCCCCTGTTTAAACTAATCCTCCAGGCACAGCATCTTCCCAACCTCCACCGAGTTTTCAGGATTCTCCTCC
TCTCCTGCCTGCCTCCGAGGTCCCCCTTCTCCAAGTTTTGACAGTTTCAACTGAAAAAATGCAGCGCCTCTCTCGATTTTTAGGTACAAAAGTT
TCGAAGCCAGAAAGGATACGATCATTTAGTAGAGCTTAAAAGTATTGCCGTAGTGGTTGGACTTTCTCTTTCCTTTCTTAAGGGAAAAAAAAAA
TTCTACTGGAACTATTTAAGGGAACCAGTGTGGGGGAGCATGTGTGTGAGTGACGTGGGGGGAAATACTTAAGTAAATATTGTCAAAGTGGCGA
GGGGGGGTGGGGTAAAGGACAGTGTCCAAAGAGGCTTATAATTATATTTATCATTGCGGCGTAAAACGGGAAATCTTAATTTGGGGGCGAGGGT
GGGGGGAGGAAGAGACAGTGCCTCGATAAACTCCAAAGGGGAGGGGAGGGGAACGCTGGGCGAGTGGGCTTCCTATAATTACTATTATCAATTT
GCCCGAGTGTGCTTCATCCAGGGGCTGTTTCGCGTTGTTTGTTTGTTTGTTTCCTCTGGGAATTGGCGGGTGGGGGGATGAGAAAAGATGAGAA
CGAAAAGAAAACCTCGCCTCACCCCAAGTTCCCGAGCCGGGGGCTGAGGACTTTTCGAAGGAAAGGGTCCGCCTAGCCCTGAGTCAAGCGGTCT
TACTGTACCGCCGTGTGCATTCCCTCATACGGTCAGGAGTTATGACTCATTTTGAAGATGTAATTCTTGTCTCTCTGATCCCCTCGCGGGTGCA
ACACACCAAACAGTAACAAACACAAAGCGCCTCGGGGCCAAGGCTGGGGGTGGGGGGCGGGAAGAGCGGCGGCCGAAGTTTCGCTTTGGGGTTG
GGGGGCGCGGAGAGGTGCTCGCCGGGGCGGTGGCGTGGGCCCTGGGCGGCCCGCGCGCGTTTCAATGGGCGCGCGATGCCCACATTGTCGCTGT
GTTTGGTTGCTAGATCGAGCCTGCGTGCTGCCGAAGCAGGGCGCCGAGTCCATGCGAACTGCCATCTGATCCGCTCTTATCAATCAAGCAGCCG
ATCATGGCGGATGGCCCCCGGTGCAAGAGGCGCAAACAAGCCAATCCCAGGAGGAAAAACGGTAAGAAGCAGCCCGAACCAAACTTTTCCGGGC
CACTACGCGGCTCGAGACCCAGGGAGAAGGAGGGGGAAAGGGAAAAGGAACCGAGGCGGCGGCGGCGGCGGCGCCCAGGGCTCTAGGGCCAGCC
TCCCTCCGCGGCCGGCGCCGGAGCCCGGCGCGCGCGGCGGCTGGACCGGGGGGTGTTGGGGAAGTGCCGCGCAAAGTGAGCGTCAGGCACCCGG
GGGTCCGAGCGCGGGGGTCCGGCCGGGGCCCCGCGCCCCCAGCCCCGCTGCCCCCCTCGAGCCCCTCCCTCCGCCCTCCCTCCGCCTCCGCCTC
CCGCTCCGCTCGCGCCCGGCCCGCCGGGTCTCCGGCCGGGCTTCGGGAGCGTCCGCCTGGGGCAGGGCGGGGGCCCAGGCGCTGGATCGCGCAG
GATCCCGGGGCGGGGGCGGGGGTGGCAGACAGACTGCGAAGGCAGGAGAGGGGAACCGGGTCTGCGCCTCAGCCAGGCTTAAAGTTTCTTGCCG
GAGTCGCCCGGCCGCTTCTCGGTGCGCCAAGTAACGGTCCGCGGGCAGCGGGGCCCGGCCCATCGCGCCCAGACCCCGGGGTGGGAGGGAGTCG
GCCGGCCCCGCGCGGGGTCCGGTGGGGTCGATGATGGCTCGGGGACGGATGACTCCTCTCCAGCAGGCTCTGGCCCCCAGGCCGGGGACTGAAG
GAGTCGCAGGGCGCAGCGAGACTTTTCCCGGCAGTTTCTACATGGTCTGGAGGAGCCCGTTATCCAGGCTGAGTCAGGAAGGAGGAAGGAGAAA
GGAGATGGGGGTTCGAGGGGCACACGCAGATCAGAGGTGGGATATTAAAGGGCGGGGGTGAGAGTTTGGTAGGTCCGTTTTGGAGACAGCCAGA
GAAGGGACGCGGGGGGACACAGAGAAACAGAGAGAGAGGAAGAGAGTGAGAGAGACACCCCCTAGGTATTACCCCAAACAAAATCGTGGGAATA
AAAGAGAAAAGTGATTGGCAAGAGCGCGGAAGGCGCCTGGGGGAGGGGAGAGGGCTGGGGACTAGCGAGGGTGCCGGGGGGGGGTGGGCGAGCT
GACGGAGGATAACTGAGTTTAAAAAGAAAGAAACCAACCCCCGAAAACAAACAAGCGAACGAGCGCCAGCCCAGACTCGGAAAGGAAACTTCTC
GCTCCCCTCGCTCTCAGCCCGATCACCCGGCGCGCGGCCGCGTAGACGCTCCCGAGGCAGGCGCTGGGACGCAGCGCCCACCCGGCCTCCCGGC
CTCCGCAGCCCCAGCCCGCGCCTCGCGGGGACCGCCCGGGCCCACTTGGAGCAACTTTCCTCTAGAGAAGACAATTGTGCGCGCCCCCGGCCTG
CCCCAGAGCTGCGCGGCGCGGGGAGGGCGCGGCTGGGGGCGCAGTGTGAGGTGCTGGAAGGAGCAAAACACAAAGACGAGAGAATTTTGATTAG
AGACAAATGATGCTTTTCTCTCTCTCTCTCTCTCTCTCTCTAGGTTTTGTGTGTGTGTACGCGTGTGTGTGCGTGTGTGTGTCTTTTGCTTGTT
GTGGTGGAGGTCTCGAGCCATATGGGGGAGTGATAGAGGAATTTTAGTCAGAAACTGTTCGTTACGTTATCCTGCCTTTCCCCTTTGTGCTGTC
TTTGATCTATTTGCTTGGCTTAGTATTACAGAAAAACAAGTACAATAATATATTCCGAGCTCCTTCCCCAAGATTCAGTTCAGGCTGCTTCTTT
TTAAGTCTCTCCCTCTCTCTTTCTCCCTCTCTCTCTCTCTTAATTTAATTTTTTTTTCACTCTGGTGTCTGGCATTATTTAAGGTGGTCCTTAC
ACAGGAGACCTCCCCTTCCCCATCTCTGAGTAATTTAGTAGACACTAAAATTACACCTAATGTCCCCCTCTCCTCTCTTGTGTTTCCTCTGTTC
CTTTTATTAAATGTTGGTTATTGATTTTCTAAAATCAATGTCTGTTGTGGGGCTTTTTTCCCCCTCTTACAAGTATCTAAAGCACGTTGCTGAT
CAACTGGATAACAAAAGCTTTGTGTCAAGGAGGCTTTTTTCCCTCTTCTGTTAAACACTCATTTTTTTTTTTTGAGAGAAAAAGAGAATGAGAT
TTAAAACAAGGCTCCCACAAGTGTTCTTTTGCAGGGAAGACTATTTAAAGTGTGCATTTCTTCTTCCCTTCCTCCTTCCACCTCCTTCGGGATT
TTGCCACCGTTGACCAGCCTGGCCCTAGCAGTGAGGTCAGGCCAGAGCCCAGGTCTAAGGAAATAGAGGGATCCTGGCTTCCTGGGAACCCCTA
GGAGACCTGGCAGAGAGGGAGGCCCGTTGGGCGCTTCGCAGGTGGAATGGAGTGCCAGAGATGTCCGCAGTCATGGACACTGCAAGTATTTCCC
CTCCACCCAGCCACTAACTTGGGAGAAGCCTCCACATTCAGAAGTGGAAAGTTGAATTGCACATTTTAAGGCATTTAGCCCAGATCCTGCACAC
TTAATATCAAGCCTGTCCATTGCTTACAGCTTCTCTAACTTTGACTGTTACCTGTCTTTTTTTCCAAATAAGCTGTGGGAAAACATGCTGTATA
CTGGTTATTGTAAGTGTTTTTCACTGGGTTTAATCTGACCGAGCAATGTTCTGGTTTTGAGAAGCAGGTAGAAGAGTACTACCACCCCACCCCT
TTTTCATTTTCTTTCTCATCAAACACATATCCAATGCCTTTCCCTTTGGGAATTGCTAGGATTTATCTGAACTGAGTGGATTTTTCTTCTTTCC
TGGATTCATGGAAAAGATGTCACTTTTGAGCTTGTGTCTTTGCTGATAACACTAAATATGATGATGCTTATCAAAATCATATAGAAATTCCTGG
AAAGAAATAATGGCAATAATAATCGTATAAGTAGAAGCTCGAAGGCAAAAAAAGATGGTCATCCAGGAACCTAGAATGGCACTTTATATAATTT
TAATGAAGTCAACAGTGTATATATAGACTAAGGCGACAAGGAGATAAAACGTGTAAAGCAGTGTGTGTGTTTTAAAGGCTGGTCAAGAACGTGA
GTTAGAAGACAATGCTATGTACATTTAATAAAAAGCAAAGGAGAAGGAGGCAGTTGAAGAAAAATAAATGTACAAAGAGAGAAACAAGTATCTG
AAATACAACCTTCCAGATTCTCAGGCTAGCAAGATGCCTGGCAGAGGCAGTGCCAGGGCCAAGTTAACCCATAGCGGGCAGTCAGTCTCCTTTC
CCCCACATGGAAAGGATGAAATCTCTTCCCAGAAAATAAGATGTGCAGGAGGAAAGAGGGAGTGGGGTGAGGGGGAAGGACGCAAAAAGCGAGT
TGCCCGCAGACAAGAATCTGTGTCGGTTTCAAGAAAGTTCAGTCAGATCATCCTCAGTCGCCTGACTCACTTTGTAACACTTTCACTCACGCTG
GAGAGGAGGGGGAAAACCCAGCCCCCCTTTTTCTTTCCCCTCATTATACCCCACTATCTCCACACAGCCTTGGAGTCAGAAATGAGCACTCGGA
GCGGGAGATGCCCTGCTGCTGCTTGCCACCGGTGCGGCCCGTTTGTAACTTGCAAAGTTTGTTGCTTTTGCCCCTGATTCGGGCAGCCGGTCCT
GGGATGCTCCTGCTTCCCTCCTGCCTCCCACGGAGCCCGGGAAGAGGGTCTGCCTCCCCATCCCGCCACCTTCCAGCATCAGCCTCTGAAAAAT
CTCACAGAGACATGCACGTTGTAGCAAAAATCAAATCCGGAAACTGCTTGTTTCAGAGAAAGAAATGAAGTTGTCTTTTAAAGAAAAACTGAAT
TAGGAGGAGAGAAAAGGGAAATAGGAGAAGAAAGGAAAAGTTAAATTTGATTTTTCTCCAGAGTTTCCACTAAAGGGTTGGGGACAGTGTGAAG
GAGAAGGGGAGCTTTTTACAAATGCCTTTGGTCTCTGAACTTCAGTGGCAAAGAACAGGGATCAAGTTGAATGTTCTCAGGGCTTTGGATCCTA
GAGGAGAAACAATCAGAAGAGCAGAAATGGTTATCCCTGTTTAAAATAAGCCCTCACTCTTTACCACTTCCTTAAAGGAGTGGAGGTGCTGGTA
GTGATGGTTAGAGGCAATGAGGGACGGAGAAGTTGCTCCCGTTTCAGAGATGCTTAAATGAAAAGGAAAGAAAATGCAGTCAACCCCTTCTCCA
GGAGGTGCCTCCTAGCTCTCCTCCCTGAGAGGTGAAGTTGGGATGGGGCAACGAGAGTCATACACACTTAGACAAGGAAGTTTCCTTCGGATCA
CTGTCAGTCCAGACTTGGTTATCTTTGCAAAGTGTGGAAATCTTTGGCAAGTAGCTTTCTTCGTAAAGTTGATGAGCTTCTAGGGAGCCTGTTT
TGCTGACTTTCAAAGCACTGGGGCACGTTGTGTGGCAGGTACCACTTCTGAGGGCGCTCCAAAGATATCCATCTCCATCCTTTTTTCTCTGTGG
AGATCTTCTGCAAGTTTTGTCACGCTGCACACACACAAGGCTGGGGGCTATGTATCTAGGCTGATCTATTTGTTTTATTTTGGTCTGGAAAAAC
TAAGCCAATTGGGGTAGAAACATGCTTTCCTTCGTAGCAGAGCCAGTAGGCTGCTGGTGTCCATAGAGTGACAGTCCACCACGACTAAGGGTGG
GCTGAGGATTTTAAACTTTACATTGTTTCTCTGTTACCAGATACAAATAAATTCACGTCTTCCACCATTTGTTTTCAAATAGGGTAAAACCAAG
ATTAAAGTTCCCTGCTCAACTGCTATGTCATAGGTTTCAGTGTTTCCCTTCCTTCTTAATTTGCTTAAAGAAAATTCCAAGAGGTTATTAAAGA
CCTTGATGCCATATTAAGAATATTTCCTGGGAAAAATGTATGTCTACCCTGAAGGTAGGAAAGGAGGGCGTTGCTAGCCTCTAGCAGTGCCGCG
TTTATTCTAAGATGTGGGAGATTCTTTTCCTTGCAACAGTTTTTGTCATCTGCATTCTTCCAAGGCTTTTAAGGTGCATTTTCTTCTGTGTGAA
AGGAAATTCTTTGTCCTTTTCCTCTCAGCACCGTGGCTTCCCAAGGTAGACACTATTTTGTGCCTGTCACAGAGAGAGGGAGTGCAGGTTTGCA
ATGCTCACAGACATTGATTGTCTGCCCTAATAATGTTTCATTTACATGTTTATAACGTCAATGGTGCTGGAATGTCCACTGTACCATTCATTCC
CGCATTCCCACAAGGGGGCAATTGTCTGAATGGCCAAGTCAGACACCTTTTTGATTGCTCTTTGGTTGTCTTTTCAGAGCAAAGAGATAAAGGA
GGAAAATCTGTGATGCAGAAACACTAGTTGAAAATATACAGAATTAAATGTCACCACAAAAGCAGATGTTAACATAAGCCCAAATATGCTTTTT
AGCCAAGATGTGAAGGTTGAAAAAAATAATTCAGAGCAGAGGGAAGGATGATTTAAACCAATAAATATAGCCCTATTCCCCCTCTTTACTTCTT
TTCTGTCTTTAGCAATCAGAAGATGAAATGTAATTTTCCTTTTCATTTTTAAGCCTTGAAACATCCAGGCACCTCCTCATTATTTGTATGTTTG
CTGTGATTTGTGAATTTTGTATATATTTACATAGCTCTGTTTATGCCAACAGCATCAGCTTACCACTTGGAAAATCTATTGAATGACTATTTGG
GCTGTGGGGAGGGTAAACTTTTAAAAAGTAAGATCCAAGTATTTCTTCATCAAGCAGTTTTTAAAAGGAAAACGATAATAATCAGTAGGCTCCA
TGGAAGCCTTTGCCTTAATAGCTATGTGCCAAATACTTTTATCTTGTGTGACAGTCATGTCAGAGTGAAATCTAATCAGGAAAGTGTAACTAGT
AGTTACAAAGTAAATAAAGGATTTCATTTTAAGGTGTTCTGTAGTGTTTTTATGCTGTGTATGTGCATGTGTGTGTTTTGTCTTGTGTTTCCTC
TGAGGAGGTAAGAAGAAAAGCCATCCATGCGTGTATCTTTTGGCTTTTCTCTTCTTTCCGTTCTCTCCTACATATTATGCATATATGTAGCCCA
CATGAATACACCTGTTTAAAAGAAAATCACAGTTCAGATGGTGCCTTGCTGGTTCATTTAGGAAACAACAGTTATTAGAAGTTGGTCTGATTTC
GCGTGTGGTCCATGAAGACAGAAAATACCAACTCTTGTGTCATCTGGTGGGAGGCAAATGGGGGAAAAACTTTTATAATTTTGTAGTAAATTAG
AGAGGCGAAAAAAACTGCCAGTCTGTGAAAAGATTTTTGCCTCTCCGGGAAGACACACACACACCCAGTAGCTGCACCGTTAGCTGAACCCCTG
ACACGGCGGTCTTTTGAATGCCTTAGGTATGATTTCACTTTCGCTCACATCAATGCTGACCTGAATGCCTTTCATATCTGATCCGCTGTGTCTC
TCCCAGTAAACATCCCCTGAGGGGAGAACAAAGAAAGGAGCTCTTCTTCTTCTTAATCACAATTCAGCCCTTTCACCGCCGGCAGCCTCCATTT
GCATTCTGCCACAGAAAGCCAAGATGAAAAGAAAGAGAGAGAGAAAGAGAGAGAGAGAGAGAGAGAGAGAGAGGCACAGGGTAGTAGCTGAGTA
AAATAACTTAGGTGTTTGTGGCTGTTTGTTGGGCTTCCCCTAGTTACCAGCCTTATATAGCTGATGCTCCACCAGGCCCTGTCCCTCCTGACAG
GCATATAGTGTTACAAGATGGCATGTCTGTACTATTCATGGCCACCCGCTCAACACTTGAGGTAAAAAGTGTCAGGAGGGGATCGAATTCTCCC
CCAGAAGCCTGTTAGATTTGGGGTCAGGTGTGTGGACTTCCCCCCCTTAAGTGCTGCCTACGATTTGGCTTTAATAAGTCTGATTGTTTACCAG
CGGACCAGAGAGGTGAGGGCCCTGGGGGTGGGAGGGACGGGCGAGCTGGAGACTGGGCCCCTGGTCTGGTTTCAGTGACGGGTCCTCACACCCA
GCCTGAACACACTGATAAATCCTCAGGAAAACTGGAAAAGACTTTCCCATTTTTCCCCCTGACTTTTTATGATAATTCATATTTTCAAATGAAA
GGGGAAAAAAGCCAAGAAGAAACTCTCAAATGAGCCAAAAAGGAAAAAAAAAATTCTCTGAAAAGAATTTTAGGGGGAAAAGTTGTGCTATTTT
AAAAAGCTTTGAGGGCTCTAAAGTGCCACGTTTTTCACACCTTCTCCATACTTTTTTTTCAGATTTTTTTAGTATGTTTAACATTTGTGAGATG
ACAGCCTTTTTGTATCTCAAACTGGATGCTTCAGGATTTGTAGGGGAGGGGTTGGTGGTATTCACGTTCTCTTGTGAGAGAAAGTTTGTGCCTA
AAGGCCTCCTTCCTGGGAACTGTTTAAACCCTCGCAGGCAGACCTGTCAGGTTTTACTGTGTTATTTGCCACCATTTTCAACATGCAAAAGTAA
CATGCAGTTAATGGTATTGGAATGAGACCACAGCAAGAGCACAAACCTCTCGTGACAACTTTTCAGCGACATTATCTTGCTCCTAGACTCTCTT
CTCTTTTTCTTCCCCTTTCTGAAACCACTTTTGAGATACCAATAATTTTCTCCCAACAATTAGATTAAGGATACAATCCGCTCACACACATGCA
CCACACACACACACATTCACACACACAAACACACACACAAACTTTGGAAGTGCAATCTCTTCCAACAGCAGAGTGAATGATTTGAAACGGGGGC
TTTTCCAATAACCCTTGTGGAAGATTTCACTTATAAGACCAAAACTAACGGATATATTAGAAGTTGTGCGAACATGTGACACAGATTCCTGATT
TTTTTTTCTTTTTCCCAGAAGATTTACAGAATTTACAAAAAGAGATTATCCCTACACCTTCCACCCCTCCTATCCACCCCCATGACCCAAGCAA
TGAAGGATTTAGGCAGATTTACTTCAGTAAACACCTTTGGACACTTGCGGGGAAAGTGGGAGTCTGTTTGCAAAAGGAGGCTTTTGTTAAGTGA
GGTACGGGGATAATGCTTTACCAGGCAGCTGTGATATTAACCTACCCAGCAATGCGGGAACACTCTTTAACTCTTTGAGTGCCTGGCCCCTTGC
GCTCAGCAGATAAAATCCTGGCTCTCCAAAGACACTCAGAATTCTGGCTCTAGCAGTTTATTATTCAGACAAGTCTTATAGGCATGAAAACTGT
TCAAGCTTTTAAAACAATGTGGTTTAATTAGATGAGGTGGACTTACATTGCTCATAAGCCCTCCAAATGGTGGTTTATAATTGGCAAGGGAAAA
AAAAAAGATAGAAAAAAGGAATCAAGGCAGCACATTAAAAATTCCAGGAAATATCTTTAGAAAAGCTATTTTCATTTCTAGCTTTTAAAATATT
AGACTACGGTAGCTAGAGGGAATGAAGCAGCTGGGGCCTCTCTCCTTCCTATAAAAGACACCAGAAGTTTGTGATGAAGAAAGGGGCTTCAACT
TGAAAAGCTATGAGAGGCCAGTTCGGACAGTGATATGATCTCAGCCTTCGCATCTTTTCAAGGGGGAAGTACTGCCTATCTGTCCAAACCTGGG
AGGTCATGTGAACCTCAGAGTCAGGGCCTCAGGCTGGCCGTTACCAACTTGAGACTTTCCAAAGCAAGCAGAGAGGCATTTATGAGGAAGGAGT
TAATGGTTATTTTTTGCTGGGCACAAGAATAACTTTACAGGTGTTGCATTTGGGCTTAAATAAGATTGCCTTATTTAGTTTCGAAAAAGAGTGT
AGGTGTCAACATTCGAGCAGCCACAAATGTGTGAGAAAGTAAAGGGTATGAGACATGACGGAATTAAAGGTGTTTGCTATGTTGTTACACCGTG
TGTCAGGCTGCAAGCTCCCTTTGTCACAGCCTCCTGGTGATTTGACAGCGCAGATCTACTTCCCTTCTAGGTGAGACAGCATTTTTAAACTTGA
GTTATAAATATGGTACACCCTTCGAGTTGCACCCTGCCTCCCAGATCCGTGAATCCTATTTGAAAGCATCTTGCCCTGAGACACAATGAACAAA
CGCCCGTATACAAGGAGGCTGTGGGCTCGGCGGCCCGGGCAGCGCCAGCATCACAGTAGCTGGCATTGACTCTTGTTTGGCAAGAAGGTCCTCT
GCCAAATCATCCAATAATTAAGTTTTATGTTATTTGTATGAACGACCAAGCATGCAGTATTCCTTTTCAAATCAAAGGGAGGCTTAAAATTACT
TTTTGAACACTTTCAGACCATGGTCAGGTCACAGTTTGGGGGCTGAATTAAAATGATCTCATTCATGATCTAATTGAGGTTGGCAAAACCTTAG
CAGTACCAGGAGTACATAAATATAAATCAAAGACCAAAATTTACCAAATCATATCATTTGCTAGAAATCTGCTCATGAATTATTCTCCGATTGC
CAACCCAGAAGTTAAACTTTGTCTCCCCTCAGCAACAGTAACTGCGCATATTTTTTCAGGCTTCTGACAGGAAAGTTAGAGGATCTGAAAAGAG
AAAGGAGAAGGAAGATGATCACTGTGTCATCAGATATGGTACATTTGTGACCCAAGAAACTATGAGAGCTGATAAAGCCATGTACGTTTACAGT
GGCTGCTGCAGCCTTGGTTAGAAATTAATATGGGTTTCTAAAAACCAGACTTTGGAAGAGCAGGCAGCACAGACACATTAAGAGTGTAAGGGGA
GCAAACGTTTCAAGAAGGGTCTGATTGTACTTTGCTTTCATTTTTTCAATTGAGGAATGTAATCATCATAATGATTCATGATTATTTACAAATT
TAGTTCTATCACTGAGCTGGGTCCAGGGATTGAGATTTGAAGTAGTGGTTAGAACTAGAACACGATACGGAGCTGTTAGTGTGCATATTCAGGT
TACCTTTCATTCTTTCTTTCTTTTTAACGCTGCTATAAAATTAAGACTCCAAATAACTTTTCCTATAATCTGTGGGATTAAATGTCATACTCTA
TTGTATCTAATCCATTTTTAAGTTGTAAATTTTTCTTGTTTGCTGTGTATGATTTCATCTTAAACCCACACAACACTTTACTATAAACTAGAAG
AGGTCTAATTCTACAGTTGAATCTTTTGAAGTTAAAATTTTAAATCCTGTGTAAAAGAAGATGTTCTTTTAATCAAACAGTAAACACAGAACTG
GTCAGTTGGCCACCTTTATATATCACAAATATATGAAGGTATACTTTTAAATCTTCAGGATAAACTAAGGTGGGAACATTTAAAAATAATCTCA
GGTGAGAGAGGTAGATGACCACATTCCTGGGAATAGGTAACTGTCATTAATGATTTCCTAAAATGTATTCTACATTAAAAAAACTGTAATGGAT
TTCTCTTTAATAGTTACGTTGCCCATAGACAACATAGTGATTTTTGTTCTTTATATACTGTTTCTTATTTTTTTATAATAACTCAAGGAAAGGT
ACTCCTGACAAGATGATAGCCACCCCCTCCTCCCAAATATGAAATAATCAGTAATAGATGACAGATTAAAAATATTGTGCTATATAAAATCTGA
GGTTTTTTTCTTTCTCTCAAATGGATGAGTAAATTTCAAGGAATTCAGTGCCCAAGTGATCTATAAATGTAATATATTGCTTTCAATGTTTCTT
AGTTTAAGAAAGTATTTATTGTCTTGTATATCCAAGTAACTCTAATCAAGGAATTGCAATTGCCTATTCTTGGAAGTACCTAAAGTTTCTATTT
TAGACACCATGCACATCAATGGAAGTGTTTCACATCATGAGAATTCTCAGTTTTAAGAGGTGAGGTTTATATATAAGGAACTCAGTAAGCTGTG
TTTTCATAATAAATAGACCCATTAAGAGGGAAATATCTCTGAGCAAAATGGTTGTCCTCTAAAGATTTCCCATCACCTTTGCTCTGCTGATGGG
AATTTGAAAACTAAATACAGCCCATGTGCACACATTCCCACATGCACACAAACACAAATGCACCCTAGGATCCAAACTCTGAGAATTTTCCTCT
TTAACTTTCACTACAGTCATCTAGCTTGTGAATGAAATACACTTAAACAAAAATAGTAGAGGCGAAGAATTAATGTAGATTCTTGTTTAGTAGG
ATTTATTGTACGGGGGAAATGTGTTCCCTATGCCACATGATTCTTACGAAACTTACACCTATTAATCTAAGCTTTAAGTGTATTATTTAGCATA
AATTACTAGCTTTCTGCTTTTGTACTGTTTTCTCCCATTTTCCTTCAGTATTACCAATCTTAACACAGATTATCCTAAACTGATTGCAAATTAT
TATGGTTTTTAAAACAGCATTCTGGAGTCCTGAATAAAGATGGTATTTTAAACTAGTGTTTACAATATACAGAATAAAAAAGGGTGGGGGAGAT
TTAAAACCATACCGAACACTTAGAAATGTGTGGAGTTTTATACTTGTGCAGATAAGTGTGAGGTAGCCTTGCCCTGTGAAACCAAGACCACAAA
TGATACGTGTCAGTAGGTTCTTTGATAGGGCTTCTGGCCACAGTGTTTTTGTGCTGTCAAACTGCTATGTTGAACAAAAACCTCCTCTGCGACA
GAGTGATAATGCAGAGACAGGCTGGCTTCAACCAGTCTCAGCAACCTCCTCAACCACACCCCCCACTCCCAGCCCAACCTCCTACCTCCTACAA
TCCAGCCACCTCCCACTCCACTTTGCCCCTTTACCTGAAATTGACATTTATATAGAGGTGCCCAGGATTTTTTAAGGTGTCAGTGGTGAGTAAT
TGTTGATACTCCCCAAATCTTATCAATCAGTACTCTGAAACTGCAGGCAAAGTCCTTTTTCTCCCACCCTTTATCTAGTCTTTTTAAATGGAAC
TGGACTGAGCTTCTAAACTTTTGCCAACTTGAACTTTTTCCACCTTTGCTTAATCACTTGAAAACCACTTGCTTTCCTTGTCTTTCCCCAAGTC
GCTTTTTATTTTCTAATGTTCAAGCTATTACATTGTGCAACACAGACAAAATTTTGCCTTAAAAAATCCAAACACTATTACCTCTTACTTTTCA
CTTTCTAGCATTCTTTTAGGGCTAACATTTCAAATGTATAGTCAACTCGTCTTTTTTTTTTTTTCTTCTCTCTCTTGGAGCCATTATTCTCTGA
CTAAAACCTCTTTACTGGTGCCTTTGTGTGTGCGTTTTTTCCCCCTGACATTAAATGAATTTCCATCTTCTACTTCTGCAATCTCTAAGAAATA
GATAAACCATTATATTTTTTCCCTGCTCGTATTTTAAAGTGGTGATCCTGACAGCAGGACGATTATTGCACTTTATGTTTTAGTGGATGTTTGC
TGTTGCTACTTACACCAACACTTATCATAAGACAGCAAGAAAAGACTACTCCCTGGTAATTAAAGTAATGAAATATTCATTTACTCTACCTTTT
CTGTAGTCTCACAAATTAGGCTGCTACATTTAATGCCTGCACTGCCTCTGTTTTTATTATAATGGCAGCTTTCGCATCTGCAATTAGGACTAAT
TCTGACAGTTACAATTTCTGAGGGATGGTAAACAGTGAACGACATCTGCAGCAGAGGTATTACACGTGAAAAGCCCTTGTCTCTTTAACCTTGT
TGTTTTTTTTCTCGCAGACGTTACCTTTTCCCGATGGTGCAAAATCGACTTCACATAACTCTTCATCAGTTTCAGGGTTTTCCCTGGAGGTATT
TGCATCAAATCAGCCCAGTCAAGCTTCAAGTTGAAATTGGCAGGCCAGAAACTCACAGGGTAGAGACTGGAAAAGAGACAGCCAAAGTACAGGC
AGCAAACTGACAGCAGCAGAGTGAAAGACAGAGGGGTGGGGGGAGGTTGAGAGCGAGAGCTTTTCAAGTTTAGTGTGCGGGAAATCTCAGCTCC
TCCTGTACTGATCTCAGCAGCACCATATCCTGAAGGAGCTTGAAAGGTTGAGATTCACAACACCTTCAGCTAATTCTTACCACTAGGGCTCACC
AGCCTTGCTCCGGCGGTTTGCTCTCACTTAATCTGATTGGATGCCTAAAGAGGAGTGGGCACACTTAATTAAACGGAAGGAAAGTTCTGAGGCA
CCTCCCCAGCACTTATTAAAGCTTGAAAGCCAAATCTCATGATCAGTGTTATAGGAGGAAATTAAGGTGGTTTGTTTTTTTTTTTTTTTCTAAT
TGTTAACTTGTAGGAAAGTGAACAATCCCTCTCTTTACCAGGTTTGTTTTCTTGGGGGTTCTCTTCTGAGTAGATTAAATGTTCACAGAGACTA
GAGCTCACGGGACTGTCCATTCAAAAGCTAATGCATTTTGGCTAACAAAAAGCCAGTACAAGTAGCAAAAATTATATTTGAAGAGATACTCCTT
TGAATGACATGGGTTTGCAAGTTCTCTGTCAAATAATGCCCTACTATCCTGGTAATATGAGAACACGTATTAAGTTGTTTAAAAGGTCAAAAAA
CATGGCAAAACCTTAAGATGTCTAAGATACTCAACTTTTACTCTCAACAAGGTCACTTTAAGAAAAATTCTATGATTGCAAAACTTGTATAATT
GCTTTTACAAAGAAAACAAATATGAAAAGTGTTTCCTTTGCCTGAGAACATTTTTTCTCCTTGATGTCTTAAAAAAAAAAATTGTCATCCTTCC
CCGTCTCTTCTAACTTTGGAGTGGGAGGGGGCTGGTGTTTTTACTAGATGATTTAAAATCCTCCTTACTTTCCAACTAGACTTGGGGGTCGAAT
AAGCCCTTGCTTTCAAACCGTTTTCTAGCTCTGTGTATGACAGGCATTGGCTGATCTGCTCATGCCCATTCGACAGGCACTGTTGAACTAAAGT
GGTGTGACGGCACAGTTTTGTTAAGCTGTGAACAAAGGGCTGAACATCCCTTGCTGGCATCATCCATGTGCATATTGGCCTTGTCACAGTTTTG
CTTGATTTAATGCTCTGTTTATTCCTAGATATTAAAACTTAAATTCTGAACAATATGTTTTCAAATACTACATACCAACTTTATTTTAAAAGCT
TTAACTTTGAGGACCCTAGGGTCCATTTGCTCATCCAGTTTCTGTGTAGCCAACATTAAAACACAGCTTTGGAAATAAATAGATTGCCAGTAGC
CTCTTACCTGTTATCCATTTAAAAATGGGATTCCAGTCTTTAAAAGTCTTATTAGGATAAAACATTTATTTTTCTTTGATCATTGGTTGAAAGT
CATTATTTATTTCCAACACTGGATTGTCACATAAATTCCTAAGGAAGAGTTACCTTGTGTGTACTCAGTGCAGTCAGAGTAGACTTTTTAAAAT
GACAAATTATTAAAGAGATATTCAGTAATAAAAGAAAGCCTATAAGAATACCTATAAGGGTACGCACATCACCACTGACACAAAAAAAAAAATC
AAGGGAGTTTATGTTAAAGTGAGCCCTATTTAAGAGATAGCAGAAGAATTAAGATTGAGACTTAAAAACAAAATAATTGTTATGAAAATCCCTG
TTCCAGAGGCAACAGCTCGCCTATCTAAAGAAATCTTAAGTTTGGTACTAAATTTAGATTCCAGCGTCCCGTTGAATGTGTCTTGAGCTTTATC
TACGCTGGGTTTTTGTTCCCCCTCTCCCTCTCTTTCCACTCTTCAGGTTTTCTTCAAGTGTTTGCTAAGAGATTAGTTAGCAAGTTTATATTGA
GGAGGTAGCCATGGGAGGCAGCTCTCTGCTTGAAGGAACGCGCAGTGGGTCAGAGTGAGAAGATACAGGGAGCTAAGACTGACTAAGGCCTGGG
ATCAGGTACTTTATTTTCTCTCAAAGACAAACCGCCCATAGAAAGGTTGGTGGGATGGCATCTGCCAGCAGGAGCACAGATGTTACCACTTTTA
GAAACTTCCAAACAAGCATTATTGCTGGAATAACTTTATGAAAAAAAAAATCTGCTGCCAGAATACTCCTTTTTCATTATGTAAAGAGGCTATA
ATTTGAGATATTCAAGGTTATTTTTACCTCCATTCATAAAACAGCATCTTTCTTGAGAGCTGTTACGAGTTAGGTGAGGAAGGTGGCAAAGGAG
AGAAAAATACTCAGCAGCCTAAAAGTATTGCTGCTGCTAATAACCGGTGAGACTGCACTAAGAATCTGAAATGGAATCTCCGGGGTAAAACACA
TCCACATTTCTACCTGCCCTAAGCGTGCTTTCTTAGCAGTGACTGAGATGAATTGTCCATTTCTTTTCAGTGGTAGTTTTTCTCCATGTTCACT
TATGCCAAATAATTCCCACAGCCAGAAAGAGTGATACAGGTCGGGGTGGCTAGGAAAGAATAAGCCTTTATTGCTAGTTTTTGTATAACATCAG
CCATGAGAAAGACACTTGCTAACAGCATAGATTGCAACACACTCTGTCGCCTCTTCTCTTAGTTTCATGAGAAAATTTTGTCCAATCCCATAGG
TGTGAACAAGATTTAGACATGTAATCTCCAACCTGGAAAAGAAGAGAGCTTTTAATATATTAATACGGCACATTCTTACTTAATATATAAAGTG
AATTTTGGCATCAGTTTGCCGTTTCCTATTAATACTTTGTTAGCAACTGTTTATGGAAGAGACAAACAGCAGTTCATCCAAATAGTCCTCCTTC
CCCAACCCCCAACCCCTATCTTGGTATTAACTGCTTTCTCCTGTCAGCTTATAACATTCTATCTTTAAATTACTCTAAATGAAGTCATAATTCT
AGTTATGTTTTGTAACAAGTCCATCGCTAGGACCAACATGACTTCTCACCTTTTAATGAACTGTTCTACTTTAGGATCTTCTAAGGAATAGAGT
GTAAAAAGAAGCAAAGCAGGAGATGAAGAGGTCTCGTAAATAGTTTCCTTTGAACATCCACAATTGCTTACATGGCCTTTTCCCCTTTTTTCCA
GGCTGCCAGAAATGGCCTAGCCCAGGACTCATTCAAGTGAGCACATTTCAGAATGACTCATTGGATGATTGGAGGGAGACACAAGCCCTACGAT
ACCAATGCAGTGTATTAATGGAGAAAGTTCCTGAGATTGGGAGTGGGTGTGACATTAGGCTAGGGTATTCCTGAAGGGCTCTAATTCATGTGAG
AATATTAAGTGTAGATCTTCTAGCTATCAGTTAGCGTAAGGTTTCATAAACAGGTAATGATGGCTCTTTCCCCCCGCTACCCCCCCATCCAATT
TCTAGCTGAGTGAGGAACAGGCTCTGCTTCATATAAATACGATCTTTGAATTTATCTGCAATGAGGTACAGCTTTAATGATCTGTATCTGCAAG
CCAGGAGCATGAATGTGATCTTATTGTATCATAGTGTAGAGATGAGATAGGCTAGCGCTACAGCACACCAGTGCATTGTGCCTGGGTGTCGGGA
GCAATCCTTCCATTTCCAAAGCAGCAACTCTTTATTTTTCATCATTGTTTCTTTACCTCACTTGTATGCTCCTTGTGATACAGATCTGAGTGAG
TTGTGCAAGCTTCAGACTTGCCAGCCCCCAGCTCCCAGGCCTAGTACAGAGTAATTCATAAACTTACCATATTAGACTATCAGATTGAAACCAA
GGGTTTCTACTGTGGTGGAATTGGAAAGCCCATTGTTTTGATTATCATTTCATCAGCCCCAACTGATACTAGTATGCTCAAGGAAAACATACTT
CAGTTACAGTTGATTTTCAGATTCCAAAATGGTGCTGCAAAGCCTGTGCATCTCTAATTATATTTTATGCTAGGCTGTGCAATACCAAAATATA
CGCCGCAGCAATCAGTGAGTGAACAGTATCAATCAATTTGTAAACAGATGAAGTCACTCATTCCCAAACTGGTTTTCCAAAAACAATTACTAAA
TTACAATAGAAAAAAATTGTACAGTTACTGTATTTGTGTGCTGTGTTACAATCAACATACCAGGGAAACAAAACAATTTAATGCAGAAAAATCA
TCATTCATCTACATTATAATTGCTTCTTTTTCACATCTACAGGGCGGTTAATTAAAATTGTGATTAAATGCGGTCGCGCTGCCTAAGATGTCTT
GCCCAAAACAGGTGGTACAGAATTTAAAAGTAAAAAAAATGTAATTAGCATTCGAAATTGAGAAATTGCCTGTAAGAATCAGTGTTAATTTCAG
TCAGTGATGAGGTAATTTATAAATGAATGCAGTGGAGGCTGTGCAAATGCACAATTGCCTTCCTTGCCATTCTTAGCATTCTCAGCATGCAGGT
GAAAATGTTTTCAAAATATTGAGGTAATTTGAAAATCAATCCATGCATTCTGTATCTTTTTTCTCCCATTTGTACCAAATGCTGAACAAATGCT
GCCATAGATGCCACAATCCATCAGTTTTTTACTTTCTAAAAGTAATGCTGCACATATTTTAGACCTAGATTAAGAAATATAACAACACAAATTG
CAAGCCTAAAATTGTTACACGGGTCAAAATTGTACACCTGAACTTCTGACTAATGGAGATTTGGTTGGCTGTGAAATGCTCCCATCAATAAAAT
AGAGACATGGGGGGAAATCTGTCCATGGTATAGGTGGTACAAACAGAATGACTATTAACCAATCCAATAAATACTTGAGATTAAATTTTTAAAG
TTTAAGAAAGAAACAGAAAATTTATAATAACGCTGATATTTTTCTTAGAATCTTGAACCGTAACTTTGTTATTCCATCTAGAAACATCTAAAAC
CAGTTAATAAAGTTATCACTAGAAAAAGCGTTTACAGAAATTAACTGTTTTTCAATGTCATCTTTCCTTTCAACAAAGATGCAACTTTCTACAA
AACATTATGCTATCAACTTACTATATTTCAAGCGTTCTATTGGCAAATGAGTGGATTCTATAGATTAGATACTGGTTAAAAATTATTTCTATTT
ACGCTGTATTTTTACTATTAAACCGCTAGACTTTTAAAATCTTTTAATGGAAGAAATTTAACTTTCATGTGCTTATTCTGACCCTCTGAACAAT
ATGAATTTAAAATATTTTAATAATGAATTGAGAATATGGGGTTTGAGTATCTGGCTTGATACCACTGGAGTTAAGAGACTTTGTGGGGCTTTTT
AAGCATCCTCTTCTGTCTTTGGCATTCTGCAAAATGATCTCTCCATATAAAGCTCATCCTAAGAATATCCTTATTTAATTGTGGCAGATCAATC
TGATGATCAAATTCTCTCATGTAAAATATTCTACGTGTTTTTTGCTGTTTCAGGCAGAAATCAATAATTTCACTTCACTCTGAAGTTATGTTTT
GTGGTAATACCGACATTTTCAGGAGAAAGGTGAAAAATAAGAAATACTGTATCTCTCCGAGTGTCATCTTTATTCATTCATTCATTCATTTTTA
GAGACAGGGTCTCACTCTGTGGTTCAGACTAGAGTGCAGTGGCACCATCCTAGCTCACAGCAGCTGAGATTCCTGGGCTCAAGGGATCTCTGGG
AGTATCTTTCTATCCTCTGATTTCAGGCCTAGTTTCGGGCCTTCCCTCATCACCCTTCCTGATCATTTTTAGGACACAAATGAAAAGTGCAATT
TAGAGGTGACAGCTCAGCTGGTTGTTCCAAGTGGCATGCCATCGTTTCTCTCATATTTAAATCTGTTTCCCATTTAATATTACAAGTAGAAATA
AAATGAGACCTCTAAATGGAGGAAACTGAAAGGTCACCAGTTAACTCCATGATCCCTCTCCTTTCACCAGCTCTTGCCTCCCACTAACTGTGAT
GATGACGATTTCATATTCCAGCAGTCAGTTCACTTTCACCGAGGGTGGGTGCAGACTTCATCAAAGAATGGCTTCCTGGATTTCCTTCAGGACC
TGTGAACATAAGATCCGCAACCACATGGGGCTTGGCTCAAATTTCAGCAGAGTGGTGGGATGGAGGAGGTATTATGACGTGCTCCAGGCTGCAC
TGGTTCTGAGTTTACAAGGGGTCACAAGGGTTAGAGAATCACAGATGTCAATAGAGCGCGAGGACCTTCCTACCCCTTGAAATATTTGCAGTAG
AAATCTTACCTCTTTACGTTTGGTTCGTAGTGCCCCATGAGCTTAGCACGGCAATGTGGAGTTACTTGTGAGATGCCACCAATGTTTCATATAT
ATATATAGTATATTATATAATATATAATATTAATATATATTATATAATATATAATATTAATATATATTATATAATATATAATATTAATATATAT
TATATAATATATAATATTAATATATATTATATAATAAATATTATTAATATATATTATATAATATATAATATTAATATATATTATATAATATATA
ATATTAATATATATTATATAATATATAATATTAATATATATTATATAATATATAATATAATATGTATGATAATGACATATATATATATATGTTG
AGAATGACAGTGTCTTTTTATACAAGCTCCCTCCACCAAGTATCATCTCTGTACTCTTACACGGTCATCAAGATTGTCAGAAAAGGCCTGGACT
ACATGCCTGTCCCAGCACTAGATTGGTATTTTTTAAGTCCTTTTTTGTTTCAAAGTTTGCCATGTGAGCTTAACTCAGTTCATTCTGCTGTTAT
TACAAGCATCACCTCTTTGAAGCTGTTATCAGATTCATGAAAGAAAAATGCGCATTTTCTTTTTCTACTGAGGGCTTCTTTCACCTTTATTCCT
GAGAGTGATCAGAGCTTTGAATTGTAAAAAAAGAAAAATTTTCTCATTGTACAATAATTGAAAAGTATGTCATCAGGTCCTTTCTAGGTCTTCC
TGTGGTATGTCAGCAGAAAACTACAGTGTTTGTTCATTTTGCATTAATTACACACCTACTATGTGCAGGCTCTCGCTGAGGTCTGTGGATCAAA
AAATGGATGCTAGAGCCTGGGCCCCTGAGGAGCTTGCTGTCTAGTGGGAAATGGGGGTGCATTTAAGATATGATGAAAATGTGGCAAGTGCCAC
AAAGAACTTTCTACCCAATACAGAGAGAGTACAGAGGATGGCACAACTAGATCTGGGAGAAGGTGGTGAGGGGTCACTTCATGGCAGAGGTGAC
TTTTGAGGAGACTGTTGTCATATAACATGGATTTCACCAGCAAGTGAGGGCACAGCACGCTGGGCTGAGAGGATGGCATGTACAAGCCAGGACA
AAGGGTGAACAGCGCAGGCATTGTCAGCCAACTGAGATGTCTGAAACACAGGGCATGAGCAAAGAGGATGGGCTTGATTTGAGTCTGCAAAGGT
GGTCAGGGAGCACAAGAATGTCCTATCCCATATTTTTGGCTTGTATCCAGTAAATAGGTGATGGTGAGCTTGCCAACCATGTTTTATAGAAGAG
TGACATAATTATATTTGCGTTTCAGTGACACGTCTCTGGCAACTGTACGAAAGATATTATCATCTAACATTTGTTGAGTACTTAACAATGTGCT
GGGACCCGTGCTAAGAATTTTGCCTATGTCATCTGATCTCGCCCCAACAATAATGCTGTGAAATGGGTACTATTATTTTCATACTATTTTTACT
GATGACCAAATTAAGCTTTAGAAAGCCCATGAGCCTGGAGTCAGGAAGAAAGTCTACGGTTACATCTTACTGTAATCATGGAATTTCTACAATT
ACAAGCAACACACGCAATAATGATCATTGACTAGAAGGACATTTGGAAAAGAAAACCCAGCGTTTCAAAAAGAGTGAGGCAGTTTGATTCTGTT
TCTCTGAGTGAATAGGGAGACTAAGTCGCGTGTAACGATGTTTCATCCTCAAAATTTATTTTTTCTTTCATTACTATGTCAGTTTGAAAAAGAA
AATAAAAAATGGTTGTTGATCCTGAAGAAACTAATCCTAGAATGTGCTACATCTTTGACAGTTTGGAAAGAGACAGTTAACATACAACCCTTCA
AAACAGTGGAATTTGGTAAACCCTGGAACACTGTTCTTGCTGATCTAATTCATGACATTAAGGCCTTCCTCGGCCTTATGACGAAGCAGATGAA
AATAATCCTTTTGCGATGACTATTTTCCCCCTTTTCTGATTTAACTCTTCCATTGCCTAAGACTCACCAATTCTCAAACTTCTAAATTCTCCAC
ACTGCCTTATCTCTGCCATCCCATGGCAAGTCCTAAAGCTGCTAACATTTTGTAACAACTATGTGACAAATTGTTGTGCTTTTATTCAGGTCGG
ACATCTTTGCCAGGCTTGCTTGTTGTGTTTTCTGTTTGGCTGTGTCATGCGACCAAAGGTGCCTGCCTTTGTACAGCATGTCAAATCTGGTTAA
CATGCAGCCATTTATCTTTAAAACCACTCCTGCACAATGGCAGAGGTGGGCCAAGCCACAGGGCTCTAAGCACAACCCAATTTTTCAGACCATC
TTTTCTGCATATAGGGAGCACGTTGCACAGCAGACAAGACATTTTGTGATTTGGGGAATCTCTTACAGACAAATTGTAGAGTGCAAGTGCAGTG
TAACTGGACTGCTGGCTGCCCACTGAAGTGAGGAAAATCAGATACAGCACAGGCTGAAAGAATGAACCAAGAATTCATATCTCTGTGCAGAACA
TGCACAGTACTTTGCTCACACAGAGAGTTCACACATAGACAAAAGCATGTTTGCTTGTGGGTTATTTTCAGGGGATTCTATAGCCACAGTCTAG
GCGTATATATTTGCACGTAAGCTTTCTTTCTGCATTTTGTACTGGTAGGTGTGTCTACATGTGAACATGTAAACATGCTTATATGAGAAGACAA
TTTGCTGTTGCTGATTTAAGACACGGGAAAGGCCTCCTAGTTCACTCAGGCGTTTCCCTCCTAATGTAGTAGAACCACAATCTTTTTGTTTTCT
ACAATTGTTTTAATAAAGGACTCTGTGTGTGTTTAAGGAAGACTCAGAGCCAGAGTGTCAAGTGCTGCAGTGAAAAATACTGAAGATTTTTCTT
TCCATAAGACAGCTGCAAACTTTATAACCCAGTTCACTCTGCGTTTTCATTTCTCAATTGTTTCAAGGTCTCTTCGGAATGATTTGCCCTTAAA
TAACTAGTTATCAACAAAGGAGAAAAAATAGCAATAAAAAATGTGATAAACCTGCATAGACTAGTTTAACTAAAATGAAGAATTTCCTTCCTTG
GAGCAGTTCAAGGACCGAACATAGCAAAACTGTGTGATTTAAATGAAATATTCAGAGTGGTCAACATAAATACACATCTAGACAAGAGATAGTA
TATGTGTGTGTGTATACACTGAGGTTACTTCTTGAAGAAATAGGCATTTTTTCCTTTCTTTTTGCTTTTTCTTTCTTTTCTTTTTCTGAGTAAA
GGACCCCAGAGATTGTCTTTCACTTTGAAAACAATCTCTAATATCAGGAAAATGCGCTGTTTGTTTATGCGTACATAATGCAAGTTTGTCCGCC
TGGGAACTGCAGCAAATGGGAGAAGTATGCATGGATTTCACAGGTAACAGGATTACGTGGGCACATAATTGATCCATTTGGAGAAAAAAAATGA
CAGTGCTCTAAAGATGCCTAGGCTTTGGAGATGGAGTTTATGAAACAGGCATTTGTAAATTCAAAGGAATCAATATGTCAATTTTATTACATCT
CAGAACCAGCTGGGCATTAAAGGAACAGTAGCCTTAAAAAAAATTACAGCTGCATATTCCTACGTTGTCTACCTTTCTTAAAGGCCCTAGAATT
TAAGGAAATGAACTTAGAGATGTGTACCTTTTCAGAAATGAATTTACATTGTCCAAAGAGAACAACAATTTAACATTATGTCAGTTATCAACCT
AAAAATTTGATTGAAATGTCTGCCTTATCATTACAATTGAAGTCTATTAATAGATACAGATAATAAGCAGAATAGTGATTTTCACATAGGTTGC
ACTGTCAAGGATTCATTGGAATTCATATTTGCATTGTGCTTTTCAACAGTCTAGATTTTACCTCTTCACTGATGATAGGACATAGTTTAAGAGC
TAGCCTTTGGGTGTCCCACAGAATTGGGTCTGTGCATGTGTGAAATATTCCTGTTTTATTAGAGTTTTTGACAATCTATTTTTTTTTTTTTTTT
TTTTTTTTTTTGACACGGAGTCTCGCTCTGTCGCCCAGGCTGGAGGGGAGTGGCGCGATCTCGGCTCACTGCAAGCTCCGCCTCCCGGGTTCAG
GCCATTCTCCTGCCTCAGCCTCCCGAGTAGCTGGGACTACAGGTGCCTGCAACCACGCCCGGCTAATTTTTTGTATTTTTAGTAGAGACAGGGT
TTCACTGTGTTAGCCAGGACGGTCTCGATCTCCTGACCTCGTGATCCGCCCGCCCCGGCCTCCCAAAGTGCTGGGATTACAGGCGTCAGCCACT
GCGCCTGGCCGTTTTTGACAATCTAAAAAGACCAAGCTATTTTAAATTATTAAGTTCCTAAATAATAGGATTTGGACAGCAGCCATAAGAGAGG
TGAATGGGATCGCAATTTAACATACTATTTTAATATCACAAAGAGGTTACACAACTAAGCATCAAAGTTAGAAGCTATGAATTGGTCCACATAC
TCTGCATGTGCTGTCTCCTAGAGGCTGCAAGGCGAGCTGCTTCACTGTTTCATGTTCCAATCTCCACCACCCAGACTCCTGCTCCAATAACATC
TCTAGATCTATTCACTTGTAACAAATGGAGCCCAGTTCTCCTCCCTCCCCAAGGAGGCCAGACACTCGATACAATGAAAAGAACACAGGATTCA
GACCCAAACAAATTTGTGTCCACATTCTGATTCTGCCATTTACTCTCCATGCCATGTGCCCCTCGGTGCGTTTCTTAACCACTCTGAACTTCGG
TTCTTAATGCTTAAAAATGGGGAGCAGTATTTGTTTTATAGAATCTTTGGGAGTATTACACAAAATTCTAAAGACAGTGTCTGGAGCCTAGAAA
ACGCTCACTAAATTCTCATTATGACTGTTTCAAGGTGTGACTAATCAGGATGCCAGGAACCCTACGATGCAGGCACTTCAGTTTCTGGGCCTTG
CTGAAACATTCTTGAAAAGAGGAAACAATAACCGTAGCCTGAGATATTCGTTCCTTTTTTTTTTACTCTTTGGAGAGTACTTAAAAAAAGAAGA
AAAAAGAAATAGTCATAGTGATTGGCATGCTATTCTACCTCTACATTTCCAGGAAATATACATGGTACTTTTTCTTATAGAAACAGCATCTCCT
CCAAAAAGAATACATTCTGACATCACTTTTGTCACAGCACTTAAAATATCTGATTCCTATTTGTCTCCCCACAAATGTGTAAATGGCTTGAGGG
CAGTCTTGCCCATCTCAGCTCAGGCCATGACATACAAAAATTGTTTCGTTAAAGCAAAGGTATAATCAATACAGCGGGTATATTAAAGATTCAG
TATACATTATCATATGTAGAAAAAAGCTTTGGCTAACTTTATGTCAGATTCCCTACCACCATATTAATAACTTTTTGAAATTCACTTTGTGACA
GCTATGTTATTTTGAATACTTGAGTGGGTTTGCTTTTTCTTTTTGTTTTTGTTTTTAGTTTGTATTTAAATCAACTGGCTCTCTGCCTTTCTCA
ATGACACCTTTGAGACTTGGGAGTCAGGGAGGCAGAGAGGCAGTGTGGGTGCTCGGAAGAGTGTAGGCTTTGGACATCTGGGCTCAAATTTGGT
TTCTACTTTCATACAAGCCATAAGACCTGTAGCAACTTGTTCAGTCTAACTGCATCTCTGCTTCTCATAATAATACTCATGTTATAGGGCACTT
GGGAAGAAATACTGGTAACAGGTAAAGTGCCAAGCACATAGTAGGTGATTAATGTTCTGTCCCCTTCCTCCACTCTTCTTTGTCACTTGACCAT
TCACTTTGGGTTGGCATTTAGTGAGCTCCTTCTGCCCGTCAACAAGTCAATCAACATTTAATACATACCATGGGTAGATATCTTACCCCTGTTC
CAAATTTCATTATGAAAATTGGGCTATATTCTACTCAAGGAAATGAGCATGCAGAAGTACCTTCTGTACTTAGAATCACAATCATTTTAGCTAT
TTTCCGCTTAATCTGACGGTTTCTTTGTTCCCATCATCTTTTTTAGTGAAGCACTTTGGTGTTTCTGCAATCCTTTGCTATCATTCTGTGCTTG
GGTATCTCAGATCTCTCTTCTCCCCCGATCCTTTGAAGACATCAGAAAAGAAGAAGCACAAGGTCTCTTGACTATACGTTTGCCACACAACTGT
GTGGATTGGTTACTTAATAGAGTTGATTAAAACACTTTGTTTGATTCTGCTTAAGCATACCAGAAATACATTCAAAATCTACAGCTACAAAATG
TAAAGAAGGTAGTCCAAATATAGTACTACATAATGAGGCTCCCTGTTGGTAGTATATAAAGCAGTTTAGAGTATAGCTTCAAATTCTAATGAAG
ATCATTTTAAATCTTGCACTGAATTGTGAATTTAAAATTCCCATGTTCTCCATAAGTATCTGAAGAGGGCCATGTAAATACCATAAGTGAATTA
ATTACTGCCTTAAGTTGGTAAAGCATGTGTGAATCCAAACTTTATTCTTGAACTTGCACTTCTCTTCCCAAGGTTTTTTGAACCATTTCCTATA
TGCTGAGTTCTGAGTACCTATTTAACTACTGAGGACATATGAAGAAGGTAGTTTTCTTTGCATGGATTAAATGTTTCAATCTCTGAAAATCACC
ACCACCACAACAAAAAGTCTGCCCGGCACCATCTACATCTACATCATCAAATTCCTAAAGCACAAAAGATATATTTATAATCTGAAACTTATAA
AAACATGACAAACTGTTACCTTCACTTTTGTGCCCCCTTTTTTCATTAACAGTATTAGGTCGTTTTTTTTTTTTTTTTTCTCTTGAGAAGAAAC
GAAAGACGAAGTGGCAAGAATATCTTTCACTTTTGCTCACGTTTTGGTCGTCTAATATTGGGACCACTGAAGTAATTGGACAACTTTTCCGAGC
TGACTCTTCTGAAGTAAACCCAAGCCAAAGGGAAAATGGAGCTGCTGCTAGGCTCAACTGATGGCGCCCACATGGCGCCCACCCCAGCTCCTTC
AGAGACTCGATCATTTCCACAGAAGGGCCAGAGGCCCTGCCAATATCCGCACATCACTGGCATGATAGACCATAACAGCTTCTTCTGAGCTGTT
CCGGTCTATCGTGTCAATGCGTACTCGGGGAGTCCTCAACGCACGGATCACTGACACGGCACTACATAACGGCTCCTTAGCAGCCATTATTGGG
TATCAAGTCAATGCCTACTCAGGGAGGCTTTATCCCAGAGGCCTGCACGAGCAGACACATTCCGAATACTAAAATTCCTTAGCAAAATTAGTCA
TTGCCCATGTGTGATAGCTGTTTTCCATTTTGAATTTTAACCATTTTGGGAAAAGGAAGAGAATGGGAAATACCAGTATAGTCCGAAAAGCCCT
TAAAAAATCAGTGCGAAAAGTGGAAGGGTGGAGTGGACATAGGAAGATGATGAACTTGTCATTTTTTCCTTTCCATAGCTTCATTTTATTGTGT
CAAAGTTGCAGAAAGCACTTCACTTTCATCGAGGCTCTTTTTAGGCAGGGTACAGCCAAGAAAACTTTTTTATGGCTCAGATGTAAATCCTAGA
AAACGTAGTAGAAATGATGGCAGGATCTCTAACTGTAAAATAACAGTACTGTTAGTAGTAAGTGTCATTATAATAACGTTATAGAACTCTGCAC
ATCAAAAATACCACATTTTATCATGATCTCTGCAAGAGATTTCTGTTGGTAGTCATTCTAGACTTCTAATAAATAATACGTTGAGTAGGAAAGG
TTCTGTGAGGATCCAAATAATAATGAAAATGACAGTGGTGATATTAATAATAATAGTACAGCTCCCATTTATTGTATCATTATTATGTGGCAGG
CATTTGTATACATTATCTCATTTAATTTTCTCAGCAGATGTGACAAATCAGGAAACTGTGGCTTAGCAAAGTTAAATAACTTCACTGATGTCAT
GCAACCACTAAGTGACAGTGGTGGGATTTGAACTATATCTCGGGAGAGTCATGCTCTTACCATTGCATTGCCTCTAATGATCATCACTTTCAGG
GAACTAGGTGTTTAATTAGAATATCCCAACCCATTGTCTGCTTACTGATCAGGAAACTGAGGCAGCGTAATTTTAGTAATTCCCCCAAATAATA
AAGAGAGTCAGAATGAATACCAGAAAGCAACAAGAGGCAAAAACAGCCTTTCTCTCTGACAACATGTTAACCACAAACAAGACATGGGAATTTC
AGAGCCTCCGTTTGTGTTTCAGAAGGAATGTCCACTGTTGCCATCAGTCCTGAAAAGATTTCCTTGCACCAAATCAAAATGGTTCGAGTTTGCT
GTTGTTCATATTTTTTTTCCTTTTGTGTTCTGCTTACTGACTGACATCTGCTATCATGCTAAGCAGGTGTTCCTATGTAAACGAACGTGCCCTG
TTTGTGTTTCGCCATCCTCGCTGCTGCGCACCCAAATCAGCAGCGTGATTAAGAATCCTGTAAATTTTTGAAAGGAAACGGATGGCTACCCTAC
TAGAACATAATTACACCGTTCCAACATCCGCAGCTCACTGCTGCAGCAGAGTTGGAGAACAGCAGAAATTAATAATATATAATAGCATCATTCT
AGTAATTTATAAATGAAATAAAGTAGAGAGGACATTCTGCTGATATGCATTTTCTCCTTAATTCTAAAAGACAAAGTATAGATTAGAATTTTAG
TGGGGTGAAACCTGGCCAGCAGTCTCCCACTAGTTGCCTGATTCATGATAGGAGTGTTTTTGCTTAGGGAAAAGAGCTAATATGTTTTATTAGG
CCAGAGGAAAAAAAGAAAAAGAAACATGAATAAACAAGGCCCTCTAAAGGCAACACTAAATAAAGGGGGTCTCAAAAAATCTCTGTGGATTGTG
TGCCCACTGTATTTAAAAAGATATTATTACTTTAAGACTTCAACATGTGCTGCATTTTTTCTTTCATTGTAATAACATACCACCATAGGTCACC
CCTTCTGAGAAAAGAGGGACTGATCAGTTAAAGATGTGGCCCAACATAAACTTTATGTTAAATAGCACTCGTGTAAATTCTAGAGATCTGCTGA
ACAACAATACACCCATAGTTAGCAATAATAGAGTAGATTTCATCTTGTATGTTTTATCACAATAAAAAAGAACATTCATGCCTTTTTAAAAACA
TTATTTTGAGTACCCAGTATGTGCAAAGCAGCCTCTTATTACAAATCATCGTTAGATTAAGGGAGTTGATGCTTTTAGTCAACCATGCTGGAGA
AACAACAACACTTTCTAAAGAGGCAAATAAACTATATGTTAAAAGTAACCAGTCCATTTCTCTGTCTCATAGGGTTGTGGCAGGCACTTTAGAA
ACTTTAATCTTTTTCTAACTTCATTTACCGTAGGTAACATGCCTAACAAATGGATCAGCTCACTTCTTTCAAGAGTTTGTCTCCCATGAGCCAA
TGCCCATCACACACACACACACACACACACACACACACACACACTCACACACCAGCAATTATCCTTAAGAAAAATAATATTTATAGCACTTAAA
GTGTTATTTAAGCAACTTTTCCTGCTTAATTCCAAAGAATGACAATACATCCAAAAAAAAAAGTCATGGATTTTCTTCCTTTAATTAAACTTAG
AGAACATGAAAATACTGTTTGCCTTTCAAGAGAAGCATGTCCATTTAAGATGCTTATTCATTTAAGCAGTATTCATTTAAAGCTCCCCTTGAGT
ATTACTCTATGTGTTTTGATTTCGTTCAGAGAAAATAAATTCATTTAATAGATTTATTTCATTAACAGGTATTTATTTAAGTGGGTTCCACTGT
ATTTAAATCTCCAAACAGTTTCCATTACTTCCTTAGCTCACTTGCTCCATGTTCACTAATTTTAATAAGCCTAAGGTGCCTAGGGTCTTATTGA
GTGTTCAGTTTGATCAATATGGTTAAATTAAAATTGTGCAAAATATAAGCAAATGTACTCTAACAACACAGTGAAAAATGTGCTGTGCACTAAG
CATTGATTGGTATGCTGTGGACACAGATATATGAAGCTGGGTGGGCCTCTGAACTACCTCGAAACTGCCACTCTCCTCCAAAGCTCCCCTGGCT
TTAGATACATCCATGTGATCTCCCACCCGTTCATGGACACAGCAGCTCAGATACCCCCATTGAATTAGAAGGGGAAGGACATTCATGTCAGGTG
TTTTGCTTTTTGATTTAATGGAAAACAGCATGTAAGGCTCACAGTGAAATCCTATATAAAGAAAAAAAGCTAAGATTTTATAAAAGTTCAACTT
TGAGTATTCCTCAAATGCTTTAGGTAATAAAGAATGCACGCCCTAGTTCTTTTTCACAGAATAACTTTTTACCGTAATTATCCTTAAATTTTAA
TCATTTGGTAGCTTGAATTCTTTTTCAGAGATCTTACTTGTCAAGTTTGTTTTAGCAAATTACAAAAAAACAAAAACAAAAGCCAACCTGATTT
TTAAAGTATACCAAAATCAGCTTTGCCATTGGTACTGCATTTGAAAACCTAGTAAGCTTTCTAACAAATTCATTGCTTTCTATATAATTGTAAA
GTTAAATAGATAACTCAATATTTTTAGTGGATTCCTTTTAGTATGAATAAGTTTGTATCTTCTATTCCTAAATCAATTTCTTTACCTTTCCCTT
TTTCTCTTCTTTTTTTCTCCTTTTTTGCCTGTTTTATGGCAAGCATACTTAATATTCAGTGTCAATCTTTTTAAGCTTTTCAAAAATCTACCAC
AATCACTTACCAATCATAAGTATATATCATTCAAAATTGTTCCTGATATGTGCTGGCTGTTGGGGCAGTTTCTTTTTCCTACCTGTTGTGTGCC
TTTGTACCTATCTTTAATCTCTTCTTGCTAAGTGATAGCTACCATCACAACACTGGCTTTCCTTGATAGCATATCTTCCTGCATGTCCAAAACT
TAAGTTCACATGAGCAGAAGTTGTTCTTATCAAAGGTAAATCAGAAGTTAAAAAAAAAAGCAGAGAGATAAAAACATCAAAAATGTACATCTTG
CAAGCAATGATGTTGAATTTCGCAGAAGTGTGTTCTATTGAAATGAAAATCATTTTCTAGTTTAAACTGATCACGCAAGTTTATATGCATAATA
AGGATTTGAAGTTTCCTATCAAATTAAGTACAGTGTTTGAGCTTCCTAACATTTAATAATACCATCACCAATACACCTGCAAAATAAAATAATG
TTTGAGCCCCAAAATCATCAGAAATATGTAGACCAATACCAGTTCAGAAGAATTGACTTTATTTTTGTAATGGGGCCAAGAAAAATTCTTAGGT
TTTTGTTTAGTTTTGTGCTTGTTAATCTTGATTTTTCCCAGTGTTTTGCATGTTTTGAGTTTTTAATATCAAAGGTACTGCTCTTTGTAAACAA
GTGTAAGTTTACCCAGGCAGCTTCACTTACACCCTTCCCTTGTAATCAGATGTGAAAATTACACCCTCCCTTTTGGATACATGATAATTACACA
TTTCAACATGCAAAGAATTGTCTCTGTTTCAGTTGTTGGAATGAAAAAGCTGAGACATTTCAGTAAAATATATTATTATATTAAAGATCATTTC
CATAATTGTTTTCGGGATTTGTAATCAAAACCATGATCAAGGTTGTCTTAGTTTTAAAAAGAATACACATGGAAATAAGGAGAGGATAAAATTA
ATTGCCGAGTTCCACTTGAATGACCATTCTTTTATTTTATGAAAATACAGTTAAGTACATTATATTCTTTCTTTAAAAAAAAAAAAACCTTCTA
GTACCTTATTTGACATTTTCTTTCTCCATGTTCGTTGAATTACCTATTTTTTCAGGTCGACCAAAAAAATGTAGAAATACACATTTTTGTGATC
AAGGTGAAAAATTTACTCAGAAGAGAGATATAAATACAATGAAGGAATCTTTTCAAGAAAAGATGTGTTTGTTTTTGTTTGCAAGAGTGCTTTT
CAGCCAAATATAAAATTTTGTAAACTCAGGTAAGGCACCTCACACTTCACAATCAGACTTCTGGATTCATCTAGAGTATCACTCATATCATAGG
TAAAAATATATGTCACTATTGGTATAAAATACACTCAAGCCTTAAAAATGCAGAGGTTTTGGCAAATAACACTAACTCAAAAATATCTTGTATA
TCCAAGGAGAGGGTTTAAAATCACCGATTCCTTTTTACTTTCTTAAGCTAAGAAGAAAAGGAAGAGAGAGGCCAGGCGCAGTGGCTCACACCTG
TAATCCCAGCACTTTGGGAGGCCGAGACAGGTGGATTGCCTGAGCTCAGGAGTTGGAGACTAGTCTGGCCAACATGCTGAAACCCCGTATCTAC
TAAAAATACAAAAATTAGCCGGGCGTGGTGGCGAGTGCCTGTAATCCTAGCTACTTGGGAGGCTGAGGCAGGAGAACAGCTTGAACCCAGAGGC
GAAGGTTGCAGTCAGCCGAGATCATGCCGTTGCACCCCAGCTCAGGTGACAGCGTGAGACTCTGATCCAAAAATAAATAAAGAAATAAAAGAAA
AGGAAGAGAGAAGGCAGCATTAGATGGCTGATGTTATGGCTTCGTGAAACAGTTTATGGCATAAAGAAATAACTCCCCAACTCCTTAGTTTTCC
AAGTATGTAAATGTTTCTGCTCATCCAAACACTAGCATAGGTAAGTGAGGACACATATTTCATCTAGCCCAAATATATTTTTTAAAAGAATCCC
TGCAGATTTTTTCCTTCTATAAAAAATATCCCAACCCAAATTTCTAAAAATTTTGATTTTTGGAATTAAATGATAATACTAATTAGCATTTACC
TATACATCCTTTTCTATTTTAAAATCATTGCATAATCTGGCATTTATATTTAATTTTCTAAATCATTTTCCCTAGAGAGCATTCATGTAATTTT
AGAACTTGGAAGGAACCAGGATTTCAACTATACTCATCCACAGACTTTTCCCATTGGGTAGAAATTGAAACAGAACTGACAGAACCAGGATTTG
AATACCAGCCTTTTGACTCCAAATCAGGGACAAGATGCAGTTTTGTATGTTAATTATTTTTATTGGTTTTGATATTGTGGCCCCAAGATCCATA
GTCTTATTTTCATGCTAAGTGACTCTTTACTCTGAAGGGCCAGGTTATAATTGCCATGTATGCCAAGAGTCAACGGACCCAGGACCAGAAAATT
CAGTATGCCCGGGTGGTGAGTTTTTAGACTTATGGAGCTGCATGTTCTGAACTCCACGTTCTTTGGTTTTACTGCTCCTGTGTTTTTTGACAGT
TCCTTTTTTTTTTCTTCATAATTTCTGTACAGGCTGGGCAGAGAGTTCAGGAAATGTTCCACCGTGTACTGACATTCCCCTGGCAATAAGTGGG
TTCCCACTTCAGTCGCATTCCACTAAGCCTATTTTGGCACCATAGAGAGGGTGATGAGAGGGAAGAGTCAGTGGAGGAGAAGACAGGAAGGTTG
CCACCAAGGAATTGAAAGGCATATGCTCCTGGCCCCATTGCCTGTGTCTGCCTTCACCACCTTTAGCTTCACAAGCAGTGGCCATGGCAAATAG
GAAAAGGTTTGGGTGGGAGAAACACAGAAGAAGCCATTCCTCATTAGGCCATGTGTCTTCCACTAGTTTCCATCAGAGTGGGCTGACCGATCTG
TGAAGATCTGGGATCATGACTCAGTATAACAAGAAGAGTCCTACACATTTGATTCAGGAAATTTGGGCTCCTGGCCCACCCAGCCCTGCCTTCC
AATCTCAGCATGGCCTTGGACACATCCTTAACCTCTCTGGGCCTCACATTCCTAATGATAAAATGCAGGGACTGGACAGAGATTGCAAACTGGT
GGCTGACAGATGTTTGATTTGTCCCACACAGTATTTTAAACACATTTGAATTGGTTGCCAATATTTAAAAATTGGGCTATTTCACACACACACA
CACACACACACACACACACACACACACACACACACACAAATCCAGATTTCCAGCTCCCCTGGAGAACTCAGATGATCTGGTGTTTCGGGCCCAC
ATAGCTGCATGGAAAGACCATGTGGGAACAACTTTGAGTTCCGTAAGAAAAATCAATCAACTTCCCTCACCTGCTTGGCCTGTGTAGACATTTG
AGTGTGGGACCCCAATTCTCTCCAAGACTCCTTTGAAGCTCTAGTTTTAGAATTCCAAATATGATTTGCTTGACCATAAGAAATATACTTAATC
CATAGTGGTTTCTATATTCACGGCAGAATGCTAAGGTATTTGTTTATACAATCAGCATCAGGTAAAAGTTGGAACTATCTTAGGCCAAATAAAT
CAGCCCCATTTAGAACAAATGCTGACTTTGAAATTTGATAATGGGAGGCAGGAATAGTTCAGCAAAGATAGCCTTTGAGGTAGTTACAAGAAAG
ATGGTTTGGCTCCTGACTCACTATTACCTACACAGCGAACTGTGTATTTTGCAAATTATCCAAAAGTAGATTCTTTAAAACCCAAATCAAATAA
TACAAGGCCCTTCAGTTAACATTTTTTCACATCTCCCACTCTAAACTAACATCTTCATAAATATTGACATCATGAACTTTTTCTGTTCATGTAA
TTGCAAACAAATTATATTGGCCTGGGAACTGTTTGATCTTCTTCAAAAGTAAAGGAACTACATTGATTTTAAAAGTTATATTTTTGTAAATCAT
GTTTCCAAATGTATCCACTTTAAACACAAAAGGTAACATTTGCGACTCATGGTTATAGAGTGTTTAATATTGTACAAGGTGCATTCACAAAAAT
ATCTCATTTGATCTTTACAACAATTGTAGGAGCTAGACAGAGAAGACATTTAATACAAATGAGGAGTCTGAGACCCAGAAAAGTTGGATGACTA
TTGGAAAATTGGCCTATTACTTGCTTAATGTGAAAAAGAGCCGGGATTCAAATCTACAGCTTTTGGCTCCATATTTAATGTTTTCCATGCCATC
AGTATGCTTCCAGTCTCTTAGGGTATCTGTGTGTGTGTGTGTGTGTGTGTGTGTGTGTGTGTGTGTGTGTGTCTTACCTAAACACTGACTTTTT
CTCTCTCTCTGTCATGAACAAGAATTGAGAGGTTAAATGGGAATTGTCTCATGAATTGTCTCAATGTTTTCTAAGTTGAATGAAGAATCTTTTT
TGGTAGCTATTCTTAAGTGAATGCTGGATTTTTATTAAGGGAAGCTAACAGATATTTAAAAGCACCCTCCATATATAAAAGCACAATCCATGGA
AGCATAGTGCAAGGAATAATGATATAGACAAATGGAGGAGGGGCAATAAAAAGTCATAAAACAGGCAGGTAGAGGTTTCTGGAAAAATAAGGTG
GTGAGGGAAGAGTCTAACTGTAAAAGTAAAAAGGTAGAAGATAGAACCGTTGAAAAAAAAAAAGAAATATCAGAAATATAAAGAGAAATAAACA
GCAAGAAGACTCCGTAGTAATTTAAGAAGTGAAAACTTTTAGGACAGAGGTAGGAGAGAAATGGGAAACACTGGAGAGGAAGTAACAACTAGGA
AGTGTGGAAGAAAAACCTGCAGGCCAGAAATCTGAGCAAAGACTTGAGAGAGGATGATGGTAAATGTGAAACATTGAAAGGGATGTTTTAAGGG
ATTCAGACATTGAGAGGAAAGTAAATTTTCATCACAACACCCCATGACGACAGGCTCAACACATTTGGATTATGAGAAAGGAAATTAACATGGT
TAGAACGAAAGAATAAAAATTAGTAAGAGAAATCTTTGGATGTCAATGGACAGGAGGAGAAATGATATTAAAAGGAAAGAAGGCATGGGTGGAA
AGTAGAATGAGATGAGAACCTATGGTAGGTGGAGGTGAAAAATGAAATGCGTCAGGGAAGATCATGACTGGGACCGCCGCACACTGCAGTGATG
AAGACGGAGAAGCTATTCTTCAGGGAACCTGCAAATAAAAAGAAACCTTAAGATGTATTTGGAGGGAACCCACCCCAGCAACGTGAGAAAGCAA
GAGGTTACATTCTGCAAAAAGAGAAAATGAACCGGGAGAAGGGGGAAAACTAGGGGAAAGAGAAAACAGCAAATCAAAGTTATGCAGCGTACAG
CATTGAAAGGAATGAGGCATTCTGTTGGAATTATTCATTTAAGCATATGGGTATTGGCGTCCCTTTTCTAAAACCGGATCCTCTCCCTTATTTC
TCATTTTTCTATAACACTATTATAATAAATTCACATGGAAAAGTACAAGGATGAGCAATTTTTTACTTTAGAAATGTTTCAAAAGGGGAGGTAA
ACTTGATGGTTATCTGTCTGAAGGGTGACGCACTATAGTGGCATGTGAGAATGAGGCCAGAGGTAATCATCAGTTTTGAAATTGTTCTTTCAAC
AAATTCATAATGCATATAAAGTAACTCGTCCACACATTTATGGCAAAACATACTCTAGATATTAATTTATATTGCTTATACTGAAGATCTCTTG
AGTTTTCAAAAAGTTTGATTTACAGATTTTTCACATCAAAAATTTTTTGTAGATTCTATTTTGTAATTAAGATGTGTAGACTCCTCAATAATTC
TTTACCTTGATGCTGTGTATACTCATTTATCTAGATTAAAATACTTCCTTGCCCTGAATGTTCTAAAAGTGTACCCCTTGGGGCTCTAGAATTT
AGAAGTCTCCCTTCCCCAACTATTTCTAGTCTACCTTTTCAATTGAGTTAATATAATGGCTTTAGAAATACAATTTCCATGTTGCTATAAAAAT
GGGGTTAAAAGTCATAACAGGCAGAAGAAACAGGAGGAAATGAGAATTGTGTACTTTCAGTCACACCCGGGCCATGTGCTCGGGCCACATACAG
CATGCAGCCCTCCGGAGTGGGCTGTGTAACCCGGGGCACACTTGAGGTCAGGGCACATAGAGGATTAATTTACTGAAGGTGGTAGACAATCCCT
CTGCCACAAATGCAAACATTTTTTCATAAGCGCCTGAAGCAATTAGTTCTCTTCAATAATAAATTTAATCTTTTCCTCCTTCCTTTCTTTCCTC
TTCGTTTCTCCTCTTTCTTCTCTTTTCCTCTATAAATGCTGGCCTTTGTCTAAGATCTTCAACTCAAAGGTGTAGATGCCAGGAAAGAAAAACA
AAATCAATGTATTGTGGTACTAACAAATAATGCTATAATTATTAGAAAAAAACAGATTGAAGCAAGATACAAAAATTCTCAAAAGCAGCTATCT
GTATGAAAATCTTTTCTACTTCTAGAGAGTATGTGAATGACTGTATCTTTCATATCGTGAAAGCAGATGCTTACATGCAATCACCTTTAAAAAA
AGAAACAAACTATCACAGTAGTGACATTGCCTATTTTATATGAGTAGGGAAACTAGCCAAATAGCTTTGCGAACATTTATTAGCCTTGTCCTTT
TTTTTTTTTTTTAACTTTTAGTATAGAGAGAAAATAGAGATGACAGGTAGGTGGCTAAGTAAGGTGACAGGATGGCAGACAGCATTCCTATCAG
GGCAGAAAGAATTTATAAGGGAGCTGCCACTTATAGCGTAATAGAGCTAACTTAAGAATTGCAAACAGAGTAGGGCCAAGCAACATTTTAAGAA
CAATTGTCCTTAAACATTCTTGTAATGCTAAGTCACTCATCTTTGTTTCCCACTTGCTTCCTAGAGTTAAGAAAAGTTCTTTCCTAACTTGGGT
TGCTATGCAGAGATGTGAAATTTCATTGGCTCCAAATGCTTTTCTCTCTAGTAGGGACTACTGGGAACCCTGCTAATGTGCATATTGATGTACC
CTGTAGCTTCACAGATGATGAAAGAGCATATTACTTATTTCCACAACAACAAAGCTAAGAGAAATTTGAAAGGAGCCAGTTATTTTACCTGGGG
AATTTCTCCCAGGTGATGGGGCTATGGAACCATGGAATTTAAATATGGGGGCCGTCCTATTTTCTAAAAAGTTTTTATGGGGAGCCATAATATC
ACTCCCAAGCAGAAATCAAATCAAATAAAAGACTATTGCTTTCATTTCCATTTATTTAGTCAACTATGCCTAAAATACGGAAAAGATATTATCA
TGCTCATTCAGAGTGTATTTTATTCGTTGTTTACTAGACTGGACTGACATGATATGATTTCTGCTTTGCGGGGTCACAACAAGCTACTAGCAGG
ACAATTTGCTGAATCAAGAGGATGATTGTGTCTGGTGCCAGTCAGTCGCAATTAGGACCAGGATCAGGGAGGCCCGGGGCTTGTGCATCGTCTT
GGGCAAGCTGCATAGAAATCAGCTCACCTGAAACTAATTGTCACAACAGAGACCTTATGCAAATGAGCCCTGGGGTTAGCGTGGGAAAAGAAAA
ACTGTCGCAAAGATAGGTGACCTGCTGAGCAGGGGGTCTGTTGCTGGGGAAATCTTTGTTCAATGAGTTTAAAAATGTTTTCATTGTTCAAAGT
CCACCCCCCGCCCCCCCCCCCCCCAAAAAAAGTAGCATACACACTCACTAAGAGTATGGCAAACACACTCATCTAAAATTCCAATAAAGCAGAA
GCCTGCTTTGGAGCATGCCATAAATTGGGAGTCTTTATAAGGGCTACAGCAGGAGAATAATTTCCCTTTGCAAGGGCCTTTAAAGTTTAGGTGC
TGCGGATTGCAGTGTGGCCTACCTTGAAAATTCACTTGCAAGGTCAAGCCTATTGCTAGCCTGGCAGGACCCGCACAGCCTTTTCTCCCTGCAT
TCCAGCAGGCCACCTCCACACAGCCGTCAGGGGTGCCTGTGAACTAGACAAGAAAGGCCTAGTTTCTAATTGAGCTTTACTGGTATCTCAGGTA
GAAGAGAAGGGCCAGGAGCACTCTCTTAACACATGGCAAAAGAATCCGGGGAAACAATGGCAGTTTCTTGAATTGTGGTTTCTCAAATACTCAC
AAGTTCAAATGAAATGCAAGCATTGTGAAATTCCAGGAATGGTAATGCAGCCCAAGTGGTAATAGATCATAAAAATTTAGCAAAAGAAAAGTAA
AAATTATTTTTAAACTATGATTTACTTTGTTTTTCAATCCCTGACAAAAACACGTATAAGTTGGAAATGACGTTTGATTTTATTGTAGCACTCA
TTTGGAATAATCTTTAATATGTTTTACTTTAGAAAACCAGATGAAGAAAAGTTATTCAAAGGTAATGATAAACATTTTTATACGTTACTGTAGC
AAAGTTGCCTTTGGGTTCTTCAATTGATTTTTAGCTTTTCAATCTTGTTTTCATAAAAACATGGGCTAACATATTGATACTTCTTAGCTTTACA
CTAAAGATTTCCCAGTGACATAGTAGATAATGTATATTCACACAGGAGTATAAATATAATATCAAGGAAATGAAATAGAGTGTTGTAAGCTTTA
GCAGTAACAGAGAGCATAGATATTTTGCATCTAATGATTTCAAAGAAAGAATAATTTGAATTTAAAAATGTAGGTGAGAGAAAAAGAAAGTTTC
ATTGCATTGGCGTTGAATACAAATGCTATTTTGTTTGGCAAATTACTGGACCTAAGAAAGTGTTTTCATTGTGTTTCCTAAAGGGCTGGATTGA
AATTTGGACTTGTACCTGATAAGCAAGCTCAGGAATTAACTTGGTAGCCACCACAAAACCTAAAGAAAGTTAGGCTTAGAAGTGCAACTTAATC
ACAATTTAGATTAAAACACACACGCATACACACACATATACAACTCTTTTGTCCCTTCACCACTGTCTGAAATAATTTCCACATAAGAGACATT
TCACAGTGGGTACGAAGTGCTCAGCTTTCACTCATCAAACTTTAATCGGAACTGCATTTTAGTTTTTGAATAAAGAACACTTAAAAAATTTAGA
TGCAAATTATTTTGCATTATTCATGCTCTAAGTGTCCTTGTAGATTTAAACACTTCTGAGGCCACCTTGATTCAAGTAATTACCTAGGCCCTCA
CTGCTCCGTCATCAATAAGGTATTTTGTACAAGTAAAGTATGCACCCGATGACCTTTTAAAGTGGCTTTACACTGAACTTGTGTATTGCTTCTT
GTGCATGAGTGAGCCGAACATGTGTCGCAATCTGTCTCAGGTGGGAAACCCTGGCTGGGCATCCATGGGTGACGGGATGAAACCCGAGCGTCTC
CTTCACACACATGCTCTTCCTTTGTCTCTACCTAAGAATGTTCCTGCCTGATTCTAGTAGTTGTTTTAAGCATTAAAAAAAAGCAATAGATTCT
AGGAAAAGAGACAGGGAAACTGACAGTGATTCCGCTTAACCCCTTCATCACCAGAGATTATTGGAAATGCCCACTTTTCAGGCCTCCTCATCTC
CATCAGCAAAGGCTTCCTTGTAAGGTAATAAGTCTCTCTCATTTTACATGGTTCTGTACATCTGTCTCCCCATCTGTCAGCCCAGCATCCTGAG
CTATTAGAGCTAGGTGCTACCTCCACCACGGTATTCACACGAAATGGAGCAGGCTTCAAACTCAAAAGTACCTCAACAATACTTACAATGGAAA
TGAAAGTGACCATAGACCATCAATCTGTAAGTTTATCCACACACACAAAAAGAGGGTTTGTAAGAGTTAAATGTAACTGGCTGAAGCTTATAGC
TGGCGTTTGTTACAAAGTACCCAAGCTTTTCCTTTCCAACTTCGTGGCTTTGAAGAATTATAGGAATTTTATGATGTGCTGTTGGAGTTATACT
GGCAGAGATTACAGTAAAGGGGTTAAAGTTGGTTTATGGTAGAAAAAAAATTATGCAGAAACCAATAAAAATAAACACACTCAAGTAGACTAAA
CTTGCTGGGCTTTTAGTTTTACTTTTAACAAAGGAAGTTTAGATGAAAGTAAATGTTGCAGCTTTTAGAAAATTAGTTGACACTCATACTTGAT
CATCTTTACTATACAGTGGTATAATTAATATTTAAACATTCTAATAATGCAGCTTGCTTTGCATGCACTTTTCAGCCTCACAACATTATATTTT
ATCTGGAATTGTGCTAGCATTTTCTTGGGTAGTGCCCATTTTCATAGAGTTAAATTTAAAATAGGGTAGGGCCTCAGCTCTTATTGCCAGTAAA
ACATCAATAGGAGAGTGAACAGGTTTCATACATCTACCAGACAGTTTATTATTAAGAACAATATTTATTTGAGATAATAGATAATATATAAATT
TTGTTTCATTGCCCCATGAATGTTTTTAAATGATCAGAATAGATTAAGTTTGAAAGTTGCATTTGGCTGTTGTCCACTCACTGTTCAAAACAGG
AGGATTTTGATGATGTCAAGGCAGTGCGAAATCAGCAAGTGATACATGAAACATGGAACCCCCATGCCTGCCCATTCATTAGGGCATCTGATTA
ACATAGTAAGGAATGTTTATTTTCAGTACATAAAATTGTAGAACTTTGGGAGCATCTTCTGAATTGCAAAAGCTGAACACCCAGGAACTTAGTG
AAACAATAAAAATATAGAGAAGTAAGCTAATTTGTGAGAAGCCTGAGCTAGTTTATTTTCCTATGAGAAGTTTCTTCCTGTTCCAATCTCATGG
CTGTAGGTGGTAGGGAAAAGTTGTTTCAGGTGCTGCCCTCAGCTAGTCCCTTTGAAGAGTGCAAGGTGCCCAGTGTTCCTGATCTTCTAGTTTG
AATGATGAGAAAGAGCATTCTACCTTTCCACCATCACTTAAGTGTCCTTTGAAATTGAATTTGCATCCACATATTTACTCCTCATTCTTTTTAA
GTGAGTAGGTGTGCTCAGCTTCAAGTCTATTTTGAGACTCAGCCCATGTTAACCCCTTGAGGCCCACTTCATGATAGGTACTGCCCTGTGGGAA
TCCTGTCATTTAGTGAAGCATGAAGCCATAATAGATCCACAGCCATACCACCATTGGGGCATCTCATTTCGATTAATTCCCTGAAGCCTTTGGT
GCTGTGGTTTGCAGAAATCAAATGGCGCAAATGAGAACTACAAAATTAGGCAGGTTAAATTTCGCAAGAAAAAAAAAAGATAAGTAGTAGAAAA
AATAGCCAGTGTAAAATATTAGTACACAGGAGCAGTAAGTAAACTAAGTTCCACACTGAAAGAACCACCAGATCTCGAGAAGTAGATATCAAGA
AACAGTTTGCACTGGCTGTTTTATTTCCTTATGTCAGAAGGAAGTAGGTTTTTACAGATCCTTGGACATGATCATCTTTGTTTCTGATATTCAG
AAACGGAACCAACAGTTTGGTGTCTATTTATTTTATTTGGTTTGTTTTTGAGAAAGCGAGTTAAATAAACTCAGCTTACAAATAATTAACAGCC
CCTGGACTATTTAAAACCTGCTACTGAGGTGGTAGAGATAAGTTGAATCCAACAGCTGTCACATGTATGGGTTTGACAGATAGGTAAGTCCAAG
AGTGGACAAATTAAAAGCATTTTTCATATGCTAATCTCCACCTGCACAGGAATAATTTTTTTTAAGGAGGCAGTCTACTGGCAGAGCAAATTCA
AGAGCTATCAGTAGTACATTACTTCTAGGAATTATGACATGCAATAATGAATAAATACTTCTATGAGAAAAGTCTGCTGTGGAATCTTAATTCC
AGATGGGTGTCCTGACAGCAATGTGCCAGCAATATTGTGGAAAGAAAAATGACATATATACATACATATATATATACACGCACATATGTATATG
TATATATATGGCTTTTAAACTTGAATAATAATTTCTTCCATGTGTAATACGTTCACAATTATATCTAAGGAATTACTTTTTTAGTTGCGAATAG
AGATCAAAGTGAAAACAATAGTCAACCTTGCCCTTCAGGTGGCAGTTACATGTGAGCTGCATAGTGAGTGTGACAGACAGTCAAGGATGTCAAT
CAGAACCTACAGATTAACCCACAGCAGTGAAATCTGAGATGGTTTATAACAAGTAGATAACAGTTTCAGCCCTATGTGAGAACGCATAAACTAA
AACTTCATGCTGGGACAAAACAGGGCAGGACATTTGAGGTAGAGAGTGAGAAAACCATACTTTTATTATGACAAAGCCTCTCCCATACTTGTTG
AAATGTCACTGGGTTGTTATTAAATCCTCACCATTTCTCTAGGTTTTATATTATCTTACAAAAAGCTTTTGGAGTTTCCTTTAATTTTGATAAA
CATTCAAATTTGTGCATAATTTCTGCACTTCAGCTTTGAATGACAGAAAATTTCCCATGCTTGTTGAGTTTCCTTTCAACTAAGAAAGTAATTC
TTGTAATAAATAAAAATGTTATATTTCTTTCTTCCAATGTTATCAAGTTAATAAACCCTTACCTTAGTTTATAAAGTCAAAATTTACTAATGTA
TTGAAATGAGAACCGAAATACTCAAAAAGAAATCTTAAACATCAAATAATAACGAGGGTAATGAATGAATGGTCATGGTTATGGATGGTGATGA
TCTAATGTAAGGTCCTATCTCTTTTTAATAGAGAGTCCTCAGGCTCAGACAATTTAGGGTTAAAGTGCCTATAACCAGATCAGAATCCTCAGTT
ATTACGTAGTACTCTTTTAAGACCCGTGAATTAAGTTATAATCAATGATTACAACACTGGTATCATTTATTAATGTACCCTTCTCTTCTAGGGT
AGCAGAGATCAGTTTCTGACACCTTAGAACTCTTCATGTGCAAGAGGAAATTGAAACAATAACAACATATTTAGGCAGTAGGCAAAATGATTTG
CTTTGGCTTTACCTACAGGGAAACTTGGGCAATGGTCATTAGACTTTTTTAATGGAACTTCAAGTCTGATGCCTTGTGACCAGGTGCTAACATG
GAAAAGAGTTAGCATCATTGACATTCTTTGATTCGGAAGCACATAAGAGGTAGATAAGGAGACAACACAGGCGACCCACCTCCAGGCCAGGAGA
AGAGGACAGTTCCTGGAATGTCTGCAATGTGTTACTATTTTTGTCACACCTATGTGAGGCCATCCATCTGGTCTGAATCAATCAGTCTCATCCC
AGGGCTCTGCTCCTCTCCCAGCTGAAATAATACCCTTCTTTCCTCAGTGCTGTCTTCAGGAGGGGCGCTGCTCAGGACTGCCCGGACAAGGCCA
ATTAATGAGCCTGTGTATTTGCAAACGATGACCCAGGATTAGACACTGGAGAAAACTTTCTTTAAATTCTCTATAAGCTCTGCTCTCCTAGAAA
CAGTACTTGAGAAAACCGGGTGAATCATTAGACAAATAATTGACCCCAGAAAGCGAAAGACTGATGCTACATTACTTTGCATACGTACATCTTA
TTTTTTAAAGAAAATGTCCTTGCCTTGAATTTAAACCATGAATTGGTCTGCTGTTATACCCAAAGTAGATAAAGCCTGGGTGTGAGGCATTCAC
CACGACTTAGCCTGAAGTATTTTCTTCGGCCACTTCACTCTCCTCCACGCTACATGTTCAATTTCCCTGCACCTCTCTAACAACCCTACACCTC
TGCTTCTAGATCATCTTCTTGGCATTCCTCATGTGCACATCCTGTTCTCTAGCAGTCCCTTATCCATGCCGCCTCATCAGATTCCTGCACACCT
GACAGCCTCTTGCTTGCTATTTCAGCTACTAGACTACTGACCTCTATTGTACATGCCTGCAATCCCAGCACTTTGGGAGGCCAGGGTGGTAGGA
TGGCTTGAGCCCAAGAATTTAAGACCAGCCTGAGCAACATAGTGGGACCCTGTCTCTACCAAAAAAAGAATCAAGGTATGCACCAGTTAAGCCA
GCCACGTTTTAGGACCACATAGCACTCTTCCCACAAGAGACCTCAAAACTTAATGACATTGGCTTTGGCAAATTCAATACCATGACATAAAACT
ACTCATTTTCCCTATCTGCCTAGTTTTCCATTGCAGTGGGAAATACCACCCTATCGTGGACCTCCCAACCAGGAACCCCATGGTTATTTTTGTC
TCACTGCTGTCTTTCTCACTCCCCACAACCAGTCTGTTACCAACCGTTGCTACTTTTTCTTTGCCAATGTTTCCTGAATCCACCCCTTTCCTTT
CCATTCTCATAGTTGTGGTCTTAGTCTAGGCTTTGGCCTTGGCCCATGGGGACTTTGCAGCCTTCTTTCCCCTCTCCCACCACATTCACATATC
AAATTCCAGCTTACTTTATTTAATAACACTGACAAATTTTTTTTTCTCTTGTCTATGTTTTTGGTCCATTCATTCTCTCTGAGCTCCATTGAGA
CTGCCAGCTGCTCTCTGGACTGGCTTCTAATGTTCACTTCATACATGTCACCTCTTCATCCAGCTACCTCCTAATTGTTCCAATCTTTTTTCTT
TCTTTTTGGAGGTAAGCTCTTCTGGTACTTCTTTTTTTATCGTTCTCACACTTCTTCAGAAACTCTTCTCATGGTATACATGTTCCTGGTACAC
ACCACTCAAGGGCAGATTCTGACACTTTCTTTCGGTAGTCCATCCGTGCTTCCTTTCTGATGTAGCAAAGTGTCCTCTTTGTGAGCACGCCCAG
GTTCAAAACTTCCATTTCCACCACTTGCTACCTATGACATTGGGCAGTTACCTGACAGCACTTCACCTCAGCTTCCTCATCTGTAAAATGGATT
GTTGTGACGAGTAATAAGATCATTTATTTAGAGCACTGCTGGCACACAGTAAGCACTGTTAACATGTTTGCTATTACTATTATTATCATATCTC
ATAGGACTCCCCAATCACACCCCGCTTCAATCACCATCATGCTGTATGCCATATTATCCTTGCATGTAAATTTTGAGGACCACATAACTGGGTT
TTAAAAATCTGGTTCTAACAGTAGTTTATGTCTTAGAAATCAGGGCAAAGTTAATCGAAGATACCTAATATCAAACCAGGTAATGATGAAGACT
TTAAATGCTTTTTGAGGATGATTATAAAGAACATTATGATAAGAATGATGATGATATGATGATGATGATGATGATGATGATGATGAAGAAAACA
TGACCAAATGCTTCTTTGGGTTAATACTCTGCTTATAAAACGAAGTGTCCAGGAAACATACAGTATTCCTCCTGAAATTAGTTTTTTTTTCCCA
TTAAATGGAAACATGTTATGCATAAGAACATATATTGTGCAGTATGCATGAGATTTATTTTTCAGAAAGCAGAGAAATGGCAAGAATTTTAAGT
GTTCTACATACTTATTTAGATCTCACATCAGGAGATAAAACAAATGAAAACTCTGACTTGTTAATAATTTACGTTTTGGTGGAAAATTCATACA
AGCTGTTAAGATACCTCTAAGACCCAACACAGAAAATGCAAATAACATATATCCACTGTGCACTGAAGAAAATTTGTCTGAAAAGAAAATAACA
TCAATTAAAAAAAAAAAACACAAGTGATTTCAAGGGAATGTTGACCACATTTACAGGGCTGTAATTGTGCTTATTAATTTTAGATGTCTCTTTT
GAAATATTCGTGTAAATGATCTCTCCACTTACCAGGTGTTTCTTACAGAAAGTCCACTGGGCTACCTCACTACCTAGGAGGTGGCTTACAAATA
GGGGATTTCTTTTTAGAAAGCCACACCATTACTTTTCTCTAACAGCTTATGCAAAAGTTTTGTGGGGGAGGGAAAAACCCAAGCCAAAAAAAAA
AAAGAAAGAGAGAGAGAGAGAAGAGTGTGCATGACAATAACTACCTCTGTCCCTTAGGTTTTTGTTCTTTTCATGTCATGGAACTTTTTAGCTG
TGCTGCCTGGGTAACTGCTCTGGAAGGTTGGAATATCTGTTGTTGAAGGAGGTTTGTGATTGAGGGCCCTCTGACACAACCTTTTGTTGCATTG
AGGTGTTTGATCCTCTTTCCCTTTCTTCTAAAACCAATCCCATCCCTTTAAAAAATGGATAACCAGCACTTCTTTTACTTATTGTCAGCTTTTG
GAAAGTTACTCTGGGGGTTTGTAGAAGTTTAACTAGTTAACTCTTTGCATGCTGATCTCCTGTCGCTAAATATTCTTCTTCTTTCTAAACAGGA
AGGATTTTAATCACTTACATCAGGTAACTACCGCTGTTATGCAGGCATAGCAAGTGAAACATATTAAGGTCCAGAAATAAAGCATTTGTGTTCA
AGGTCTTCAAATGTGAGAGTGATTCAGGCTTTGCAATGAGACACATCCTTATTTTCTTTTTGTCCTAGAACCGAAACATGTGAGAGTTATGACT
CTGCCACTTGAAAAAACATGATGATATACTAATTTTTCATTGAAGAACAACAGGCTTTGGTAATAAGTAAATGCAAAGGGTTACTTCAGAACTG
GGGTACATAACTGAATGGCAACAAAGAAAGAGAGCCTTAGAATGAAAAGTGTAGGGGTCTTGTTCCAGTCTGCTGACTAAATGCTGGAATATTT
TTTTCCCAAAAGAAGGGACACAACCCAGGCTCTAGGAAAGAAAAGAAGCTTAAGTGGATTATTTAACAAAAAAGCAACTTATGGCTTCTAGATA
GTGACCTACATTCTGCACACAATAATGATGTTTTACGGTGGTGATAGGGTTAATAACCTAACATCATTCATGTAGTGTTTTTTGAAAATTGAAT
TTTACTGCTACAAAGTAAATGTAACAGCCCTCTGGAGACAATATTACAGGCACTTTATTGTTTGCTAAGCTGATGTCATCTTTCTACAGACTGA
CTTTAAAACAAAGGCACAACATTTATTACAAATATCACTGTGTGAAAGGAAATCTACTGAAATATTGTTTAGAAGGTGAGCTGATAAAAAAGTA
TTAATACTTGGCTTTGATCATCTTGTACTATAAAGTTATGACTTCAAATTTTTTCTCATGTGATCTCTATTCAAGGCAAACTTCATCCTGGCAA
TTCCTACCTGTGTCTCTAACATTATTTGCCCTCAAGTTGAAACATTTGTTTAAGATTCATGCGTGTTTTAAATACATTTTTACTCTCTAAGGCA
ATTTCTTAACAGAGTTGATGAGTTTTTGAGAGAGAGAGATTAAATAGCATCTTTCAGAGATAATATATGTATGATTTTAAAAACAAAGTATGGA
GATTAAGCTGTTTAGTTTATATAATGAACTTTCAAAATCACCTGTAAGTGGTGACTGCAAAGTTTGCAATTTAAATAAGCTGTTTCAGGCACTG
CCAAGCAAGCATTCTGCATCACAGGTTGCTTGCAACTCAGAGGGTTTGGTCTCTGTATCTGATGCACGTGTAATACAGCGTGAAGTTGTTTGTG
GATCACACAGGAGCTTCTTAGAGCTTCATTTCCACACTATAACCCTTGAAAATGTATCAAATGAGCAGATGCACTTGGCTCTTCCTTAAAAGGC
ACAAGTAATTTGTTTGTAAATCAGTTACCTTTCAAGAAAAGTTAAATTAGGGGGAACTCTTGTTTCTTTGATGTTTTCCCTCTTAGAAAGCCAA
AGAGCAAATTAATGATCATTTTGAAGTAATAATGATAATGAGGAAAATATAATTTAGTGAGCTACACTATCCCAAAATAACTTTTTCAGGTACA
GCATATAAATAACAGCCCAAAGGACTAAAGCAGCCTGATGGTGTTTTTCTAAGAAAATGATTTACTGCTCTGCCTTTGTCTCTGAACTCTGGTT
AGAAGGAAAACACAGGTCAAGGAAATTGGGTTAAGGGAAAAAAAGCCTGTTATGGGCTACGTGTAGAATTATATGAATAGTGACTAATTGGGAG
TCTGTAGCACTCAGATCAGTGTGTGCAATGCTCAGTACTGGCTGATGGTATTTATATCAGTCAAAAATGAAGCTGGATACATCTTTGCGTGCTC
TATGAAGGCAGTGTGTTAGTTGGTGAATTGGCCGTGACCAGGAGAAAGCTACCAGTAGTACTATGATTGTGACTAAACCAAGAACTGAACTGCA
ATGTTTTAAAAATTTATTTTACTAATAAGTGTACTTCTCTATACAAAAATCATTTTTAAAAAACCTTACAACTATTTTGAAACATTTTACTATA
AGCCTGCCTTTGATTTGTTTGGGAAGCTATTTTATAGTCACTCAATTCATTTATTGTATTTGACAAATACTAGCTACTTACCATGTGCCAGCAC
CAAAGGTTCAAAAGTGAGCCCTCACAGAGCCTTACAGATTAGTGTCAGAAAGAACTGCTTGGCAAGGGTAAGAGTGTGACACATTGTGAGTATT
CAAGAAATGTTTGTTGAGTGACTGATAGAATGAATTGAGGCATCATCAAGGTAAGTCCTCGATTTGGTATATCTACAAGGACGAACTAAGAGTT
TCCCTCCCTGAACAGGTCAGAAAGGACATGCTTGAGCTGGCCTTAAAAAATCACCTGACTGCCATGTAGCATGTGAATAATGAACACCAATGGG
CCACTGGTGGTAGAAACAGCATCCCAGAATATGCTCTGAGTTTTAGCAGCACAGCCCATTTCTGACCCCTGCATGCCTCAAAGCCACTTTAAGA
ATTTGGTCTTTGCCCTTCTGTCCTCACCCCCGTTGTACTGTAATACACGCAAACATGTGTGTGCATGTACACACACATGCACACACACATGTGC
TAACTCCATCGTTGGAATTCGACTGTCCACCCCTTCAAGAATCAAACCATCTCCTAAAAAAAGGAAATGGCATGCCTGTTCCTTACTTGTATCC
ATAAAACTCACATTTGAGTTGTCTATCATGAGACCTCAGTTTTTTGACCAAACATTGTCCTTAAGCATCAGACACATAAGAAAAACTGGAAAGA
GGAACAGGTAATATTTAAATCACCCACTATTCTTGTAATGAAAGGATTTTTCAAACATCAAGATGAAATGGTTTTATCAAATTATTAAAGTTTG
CTTTTTGTGTCCGACTTAGCAACAAGTCATGGATGGGACACTCAAAACAGGCCAATTTGGGACAGTTCCAACTGTAGGAGGCCTTGTGTCATTA
CCTCTATAAATGGAATCGAGCTTCCCTTCTTCTGCAGCTATACATTTTCTTGCCTTTGATTTCCCACTCTGCTTTCTCTCCCCGCAGGCTCTTC
CTGTCTCCTCTATCAGTTACTCTATAGGCAGATGTGCCTCTTTTTCCATTTGCCAGATCCCCCCAACCCAGATCTTCCAAACTACTCCCCTTTG
AAGTCTCTATTACCGATACAATCACTTTTGTTTCCCTTCCATCCCCTCTCTCACTGCTCCAGTTTCTTCTCTCCCTAACCCCATTAGTTACATC
TGCTGCCCCTACCATTCAGCCTGTGTTAAATCGTAATGCGCTTGACATAACTTCAGTTTGTCTGCTAAGTACTCAATCAGCACGCATTGCTATC
TTCTGATTTGTAGGAAAGGGGGCAAGACTGAGTAAGCTGGCTCAGAATTCTCTGAGTGATTCAGCTCTGCCCAATTAGCACAACCAAAGTGGGA
AATTGACAACTAATAATAATGAAAGAAATGGGTTTTAGTTGTGAATATAAATCCCACAAACTTGGTTCCTGATGCCTGTGGTAGATACTGTATG
CTTCATATGGTGGTCAGATGGCTCAGACAATCCAGAACTGGATGAATGAAGGAGACTGTGTCAATAATTGCAATATTTATTACTTGACTGGGAT
TCTTTCCCTGGAATTCATTAATGGATTTTTTAAAGACTCTGCAAACCACCAGAAATTGTATCTAACATTTACTATATTGATGCATTTTTTTCCT
GGGCAGTGGGTCCATACGTTTAAGCAGATTCTTAAAAGGCTCTATGTCTCCCCACTATCCGCCTCCAAAAAGGTGAAGAATCATTGCTATAAGT
GAAGACACCTATTTGGTCTATGTTTTCATGTGGTCTGCTTTTTTTCCCAGCCCATTTTAACATTCCACATGATTTGAGCAGTTCAGAGAGTAGA
AACGTAGGGTTTTAAAGGCAAAATTTACCTTCTTTAAGAGGAAAAATGTTTAAACCACCTACCAGGTTATACAATTCACATTTTAAAAATTATT
TTAGTTTTACCACAATTCAAAGACAGGCCTTTTTTTTTTTATTTAACAATGGGTATAATCACACATCTGAACATAAGAATTAGTTTTATGCAGT
TCCATAGAAAACCAAAATCTTGAGGAACACTTTCAAAACAACCAGAGAAAAATAAACCATTCCTTATGTCAGTCTTGTTAGGGACGGATTAAGA
AACTGGCAATTATTTTGGCGACCTTAATTGTTGCGCGGCAGGAAAATATGTAATTAGAGCACGTTCCCAGGCCTGCACACCTGCAGCACATCCT
ACAGCATAATGTCAGCTTTCAGTGCCTGTCGGTGCCAGGTTCTAGCACAACCAGTCACAGTGACGCTCTGAGAACATTTCGGACTCATGTAATG
TGGCTTCTGTGTATGAAAGAAGCAGGCATTTACACTACCACACAATGGAGTGCATTGCTGCAACACTGGTTTCATTATTTTCTGACGCCTACCT
TCAGCACTGCCCTGGTTTACTCCGTTTGAGGTTTTATTGTTACGGTATAATAGTCCTGTACATTTTTGAAATTCCCTTATTATTCAGCTTATTA
ATACAGTACTGACTTGATTATCAGGCTGCAGTTGCACAGCGGAAGATTCAGTGCATTAGCTAAGTCAGAAGCTGAGTAAATTCTTGGTATAATG
AGAACAATTGTTTGACATTTTTTTATGTAGAAAGATGGGCCATGGTAGTTCTCTATATAGTTGCATTTTGGAATTCACTCTATATTCCCTATAT
GTTGTTGAGTATTCGTTTTTCATATAAAGAAAGCTTAAAATGTGTTCTCACTAATTTGAAAAGTGTTTCAGGGTATGGCAGGACTCCATCATGA
TTCTCATTAGCTTTTTTCTTCTTTTTCTTTTATTGGCTTTTCTCAACAAAAAGAAACTCTGACGTTAGAAAAAGTAGTGAAAATGAAGAAACAG
TATGCACGATGCCTATTTTTCAGATAATTCCATAATCTGGCATAGTGATAGTTAACAGACTTTTCCCCCCTAAGGGAGATACACTGTATTTTGC
TATCTGACATGTTGTCATATATAAAGAAATCAATTGGTAATTAAATGATGCACCTTGTGAAGATCACAAAAGGCATTTGGTTGCGAAAAGAGAA
CTGGGTTTTGAGGGGTTTGTAGTGAAGGCCTAATGACTATTCATAAGAGATTTTCAGTCCGTTGATCCACTTGACTGGAAAGTTCTGCCCTGGA
GAGTTAGTGCTGTCAGTTTCTCTCACCTCAGAAAGCCGCCGCAATCGACGGTGTAGAGGATGAGCGACAAATTATCTAGTAGTTGCTCTAGGCC
TGTCTTAGGTCAGGTGCAGAAGGCACATCTGGCTTCCTGTAGGTACAACCTCAGGACATAAACTTTGACTAATTTTTAAACTATAAATATGTAC
GAGTGACACTGAATAAGTTACCTTTTATTCATATTTCCTTTATTTTAGAATGCATGCAAGTTGTGTAGTAAGCTGCCATTTTGGCCTTATTTTT
CTTCCAATTTTAACTGTTACACACTTGCTTGTTAAGCTAAGACTGACTGTTTATGAAAGTTGTCAAGGACCAAATGATAACAGTCTCCTTATGT
GAAATCCAACAACTCTGTGTTTGCTGAGAATATGCCAAAGTTGCCCTGCAGGAAGCTCACCTGAAACAAATACAGAGTATATGATTGGATAGCG
CTCTTGGGGGGTGTTTATTGCCCTATTTGGCAAAAGGCAGTAAGATATCAAAATGTACATACATAGGACTGGATACAAGGCTGCCACCACATCA
AGATCTCTAGAATTGCAGAACATTGTTGCTCCAGTGTCTTCATAAACACAATCACAAAAACTACGATGAAAATTCATGCATTCAAAACAGACCA
GTTACTGTCCACCATGGACCAGGCACCATCCTAGCTTTGGAGGAGACAAACATGAGGGAAGTAAAATCTCAGTGCTCATAGTTTACTGAGGAAC
AGACAAATAAGAAAACAGTTACACTACAACATGTAAAGAGTTATGATTGAGTTGTATAATAGCACAGAGTTTAGAATCCAGGAAAGGGTTTTCT
GAGAACTGTTGGGGTCTACAAACGGGGTAAAGATTTCTTATACGAGCTACTCTTTCCATTGCCAAAGCCAAATTAGCTGGCGGAAAGGTGAGTT
GGACAAGTGAGGTGTTTCTGTTGCATGTGCAATCTCAACAGAACAGTAGTGGCCAGCAATTTCTGTACATATTTACTCTTGGAAAGTGCTTCTC
CATGTTATCTTATCAAGAAGCTCACCTAATCAAAGGTAAACACATTTATCGCCTCATTAAGGCTTGTTTTATGGCCACTTCGATGTCATGTTTG
AGGTAGAAGTACCTGTCACAGTCTTTGTCTGGAATCTATGTAAAAGGGATTTCATGGACACTGCAGAGGTTTTAATCTTTCAATATCAAAATAA
TTTAATGCATAATATGTATTTGAGAAGATGTCACTGGTGATTCCTACTTGTGTACTGTGTGTACTGAGTTTTGCTGACACATTTGCTAGAGCTG
TCAAGGTGGACCAAATGAATGGACAGATGCCAAAAAAACAATTATGCTTATTAATGTACATTGATTGCTTGTTTAGGTTATAAAACAAATTAAA
AAAAACCATTAGTATTTAAACCCTTTTATAGCTGAGCTAATGATTGCTTGTAATATAGTGTCTGGTAAAGAATATTCTATAATACCTGTAAAGC
CCAGCTATGTTATCTAATTAGTAGACTTTGATTTAAGTGGCTGTAATTATGGAATTGAATAGTTGCCTTTCTAAATAACCAAATGGTAGATTTA
AATATATAAAGATGTTGACTTGATTATTTAATATTTGTAGCAAAGACAAACCACCTAAATAGAGAGATTAATTCCACATCAGTGCAACATTAAA
AGGGAGAGAGGATGCCAAGAATCCCATTAATTTGGGATATAAGTGTCTGAAATTTCCTCAAAACATTTACGCCAAGCAATACCAACAAGACAAT
ATCAAGCAGCTCTCCCTAAGGATAGAGAGGTAAGGCAAACATGATTTTAAACTGCACAATATCACACAGTAAAATTAAGGACAATGTGTTCCAC
CAGATGCTAAACACAGCCATTTATCGAGCTACAAGGTTCTAGACTAAGTAAGTGTTTTGTATACATATTAGCTCCATATTACCTCCATGACCTC
TTTCCCCATGAAGCCTTCCCTGAGCCTCAGTATCCACTCTTTCCTGTACCATGAATCCATTTTTCTTTTACTTTTTCTTTTCTTTCTTTCTTTT
CTCTCTCTCTCGCTTGCTCTTTCTTTCTTTCTCTCTCTGTCTTTCTTTTTTTCTTTTTTGTTTTTTGTTTTTTGTTTTTTGACACAGGGTCTCA
CTCTGGCACCCAGGCTGGAGTGGAGTGGCACAATCATGGTTCACTGCAGCCTTGACCTCACAGGCTCAAACCATCCTCCTGCATTAGCCTCCCA
AGTAGCTTGGACCACAGGCATGCACCACCATGCCCAGATAATTTTTTTTTTTAATTTTTGTAGAGACGGCGTCTCACTATGTCACCCAAACTGG
TCTTGAATTCCTGGGCTCAAGTGATTCTCCCACCTCAGCCTCCCAAAGTGCTGGGATTACAAGTGTGAGCCACTGCACCCAGCCCATGTTTTCA
ATAAAGATGGTGCTATTTGAAACTATGGCATGTCACGTGTATATTATTTTATTTCACCATGTGTTTAAATGAGATAACCACCTGCCAAGAAACC
TTCAATATTTGCTTAAATAGCCAATGTGACGGAGAATAGGTAACCTCTTTTCTTTTTTTTTCTTATGATTTGCTTTGGCTATTAGTTTTGAAAC
ATACATGTTATATTCCCAATTAGATCTCGTTACATCCTTCACAGGCTGTCCAAAAATTTCCATACTTCTAACAAGAACTTCGGTTGACTGAGTT
TATATTATATAGTTTTTCTGTCCTTTGCCCTATTTCTTTCAAGGCCTTTGAGTCAGAAGCATTCAGCACCACGGCGTACGATAGCCACCATTTG
CTTTGCCCTTTTAACTTTGGGGGTTACTTCTGACCATAGTCCAACTGCTCAGAAGGGCTTTTTCACAAATTGTTTACCGTGGCAGTTGCTACCC
TATTGGGGTTTGCATTCAGAACCCATAAGCAGAGAGCAATCGTGTCAGTATAACAAATAATGTGTACAATTTTTTAAAATGCTGAATTTACCAA
ATCCCCATATTATGTTTTCACACTGCTCTTTCAGAAACTGTGCTAATACAATACTCCTATAAACTGATCTTGGTCCTGGCAGGCCCTGTTGGAA
CTAATGGGGCCTGACAGTTCTTCAGTTAAAAATTATACATGAGGGCCACTTTCCCTTAAATTATCTATTGTATGCCAGCTGTTCACAACTGCAC
TGCTTCACTTTCTTTGCAGTGCTAGAAATGTCTAATTTTCTCATAATATCCATAGCAACTATTCTCATGGAGGGCATTGAAGTTAGTAAGACTT
CAAACACACCTTCACAGAAATCATGCTAGAGTTGCAGTTTCCATTTTCTTTAATTTTTTGGTTCTGAAAAATGTTTAGATGGCTCATTTTGCCG
GTTTCATGCCATAGCACTTGAGTTATATCATAATTTCTCATTTGCTGCACAACTTTATTCTATTTTTATGCTCCTAAATGACGCAGCTCTAAGT
ACCCGTGAGTGGCACTTCCGTGCTGTGAGTGCTATCAAAGGCAACCTCAGATGGATAAAACTCCTGGTTTTTTGTTTTCTTTTGTTTTTTGTTT
TGTTTTTGTTTTGTTTTTGCTGGGGAGGGGAGAAGCGGAGTCATCACCAAGGGCCTTCTTTTGTTTTTCACGCATGTTAAAACTGTATAACCAA
CAGAACCATTTAAAAGGAAGAAAAACATCACCCAAGTTCCGTGTCTGAATGAAGGCTGTCTTCTCAAATGCTCCTCATTACTCCAGAGCAGTTA
TATTTGGATTATAATTAAAACGAGGCTTCTTTTTTTTCTTTTATTCTTCTTTTTTCCCAGAATGCCTCAAGTGAAGTATTCCTCCCAAAGTTAT
TGCACCTCTTTACTAACAAGTGCTGGGATTTTAATAAGCCTGTCCCCCCTCCTTACCCTGTACAGAGGAAAGGATGGCAAAGAGTGGCTGTGGT
ACAAAGGTTACATATTCAGTGATATTTTCTGCTTTTATTGGTAAAAATGGGGAGGTGGGTGGAGGATTTCCTTTAATTATGAAATAAGTGTGAT
GTTAGTAGTTATTTCTGTAACCTGGTGAAAATGCTGCATATTTCAGGCCTAATTTTTAGCATATGTTACCACGTGTGTAATAAAACGGTGATCT
GCGCTCTCCGAATCTTTTGGCTGTTAAGGAGCACTCTGATTATAACTAGTTGCTGTAGAAACCTGGTCATCCAGATGCTTATCAAGAATGCATT
ATTATTTTTTAAACCTTGGTGGACAAGCCACAGACTGCAGCAGTTGGACAAGGTCACATATCGATGGAACTGACATGTCTTTCCTCTTTCCATT
GTGTGATCGTCCAGGGCCTGGGGGCATTAATATGCAACGGTTCTGTTTTTCTTTCAGAAGGACTTGTAAACTCTTTAAACAGAGGCACACAGTT
GCAATTGTTGCGGTACTGAGTGGGTGTATAGAAGCTAGGGCTGCAGCCTTCTCCAGTTGCAGATAGAATAAAACTGACAATGATGCAATGGGCC
TGGCATGTAGACAACTCTGTGGGATGGATGAATGGTGCGGCTCTCGCTGTCCCTCCGGTGGTGGTAGGCCCTGTAATAGCTAGCGTAGGAAGGG
TGGTGAAAATTGATATGCACTATTACTACACGTATAAAACTTAACACTGGGGCCATTGCACAGGTGGGGGGTTCCTGTTTATTGATTTTTATGA
GTTTGTTAGAACATGCGCTTAATGCTTTTATACTCCGGGAGCTCTGGGAGGGCTCACCTTAGGTAATAAACCTTTCCGTACTTTGCAATCGCTC
ACAATTTACATGGGGACTCACATTATCCAGTACAAAGCCCAGCATTCCCCTTCTACTTGGTTTTAGGAGTGTGATAAAAAAAAAAAAAGAAAAA
GAAAAGAAAATAACTATAGCACTTACTTTGAATTTTTTGAAAACCTGTCCACTCCCGCTATGAAAATGGCCCCTAATTCTAATTACTCATATTT
CCAAGAAAAATTAGTCACACAAACTTATGTTATGTGTTGTCTCAGAGGTTGAAAGCAAATCAGGTTTCCAATAAGACAGTACATCAAACAAAGT
AGCATGTTCTTGATGCCGATGACTTTTTTTTAGAATTATGGTTGGACATTTTTGGCAGACAGATTGTCTTTTGCTCTATCAAAATGACAGTTTC
TTTTGTAACTGCAACATTCATAATTAGAAGGAGAGAAGCAATCTGCCCAATTTAATATACTAAAAGAAGTTTAGAGTCTCTGCTAGTAATTTCA
TTATTTTTAAATTTGAATTAATTGACTTAAAATAATACAGTTAAGAAGTATAACCAGCAGGATTATGGAGAAAGGTTTCTTTTTCCTTAAAAAA
AAACAGTGCTCTCAGTGTTACACTTAAGATGAGATTGAAATTTTCTTTTTTACGCCAGGTGCCCCGTTCTAAGATTCAGAGCAGCAATGTGAAT
ATTCATCCTTGCAGTGGAGCTGAGAGAAGTTGTAGGGCAAATCCTGGGAACAAGGTCACTTTAAACAAAAAAGTTCTCCAAGTTTCCCATGCTT
ATAAGGCTGGCTGGGCTTAATTAAAGTCAATGGATGACCAAAAAATAAATAAATAAATAGAGAGAGAGAGAAAGAAAAGAAAATGAAAGAACAA
CCACCCACCCCATATCAGTCTCTTTCTAGGCCTCACTTCACATTGTATACCTTAGCCGTTGATGTTCAAGCTCTTTACATAGATCAAGAATAAT
ATTTCTTAAATCCCTTAACAACACTGACGTGTCCATGGTTTAATCACTCTTCCCCAGTCCACATCTCTAACCTACGTCACTTGGGTGGCCCTCA
CCCACAGCACCACAACAAAAACAAAGCCAGAATTGCATTCAGAATGAAATCATCATAACATAGCAACCTTGTTCAGGATGTGACCTTTGGGTTT
CAGCAACCCTGTCTTATGCAGCCCTGCCCAACCTTAACCTTTCCTGTTGGCTCGGAGGGTAACCTTTCTTCATATTTTCTTCAGGATCTCTCCT
TACGGGACCCAGTATGTTGCATGCCTATGATGCACAGGGCCAAAAGTTTCGGAGTGTTAAAATCTACGAGCCTGTTTTCCTCTATGAGACAATG
AAGCCTGCACTCATTTTAAAGAATACATACGTAGCAAGATCTCTTTTTACCCTTCCTGTATAATTTTGGTTATGCTTAACTCTAAAGGAAACCA
ATTCTCTTTAGCTCTGTTACCTTATTTCGTACCTTAGCTGATTGTCATCTTTACATGAGCATCAGATATGGATGTGACAAAGATTTTTTAGAAA
TAATAACGACCAGTGCTTTATGAGTTGTGAAGTGTTTTTCTCTCCCACAAGAAATTACAACACAAAGTGCCCTATGCATTTTTTTAGTATGTTG
ATAAGACAGCAGGAAATTTTTTAACCCTCAAAACTTTCTGATTATAAGCTGTGCTCTAAATTTACACGGGCAGTGTTCCAAGTCCCACACTCCT
TTACAAGTATATCATTACAGACCTGCAAGTGAGAAGGTAAATTTCCCCATGGCAGTTCTGAAATCTGACTTCAGGCTAAGAGGCCATCGACTGA
GAGGGCTGATTGTGCTGGGTACCTACATATCAAAATCTCCTCTAGTATTTTAGTAGTTCCTTCTGTCCTTTTTGCAGCCCCGTGTCCTACAGAA
GTGACATTTTGTTCCATTTTCATTTATCTTACTCTCCTTAGTTGTATATCAAAAGATATACACATTTATATAACCCAAGAAGCCAGGGATTAAA
GCACAATATTTCTTAACACAGCTTCCTCTAAGATCTCCAGTAGCTACCTAATGCTTAAAGCTTGGGCTGACGTGGGTTATGGGGTTATAGTAGC
TTTATAGATATTTCTATTTGTGTATGCTATGTTTATATATGTAATACATATATGTGTGGCTTAGGGCTATACTGACATGTTATTTTCTATGTGT
TCATTTATTATAAACAGCAGGCAAGCAGACGTTTCACCTCACACCTCACTCTGGTCTCTATCATTCAAAAAATATTGCAAGATTCCCATTCTAA
ATTAAATACATCCGAGCTTACGTCTTTTATCAATTCTTTATTCTTGGTATCTCAAAATTCTGGTCTTCGTCCTTTGTCTCAAAAAGGGAAACTG
CTGAAAGCATTTCCACCTGGATGTTTAAATTATTTAAGTTCCAGGAACCAGACCTTTTCCCTCCTGAGTAGTTGTGGGTTTTAAAGGCTAAAAT
TGCTTCATCATGCCAAAGTGAAAGTATGCATAAATTATTTAGTTAAACCTGAGAAAATACAGACTTTTCCCAGTGATCTTTCAAGGGCTGCCTA
CTTAAATTTCAGAAGAATGGGCAACATTTTTTTTTCATTCTCTTAGAAAATTGAAGTATCTCTTGTGTCTTCTGTCAGTTGGAATGTGAACAAA
ATTACAAAATGGTAATTTTTTTAAAATTCCAAGCTTCATAATATCCAGTATATCTATATCATTCCAACGTGAATACTGTGATAATCAATCAATA
CCAGGAAGACTCCTCCAGCTGGCGAGAACTGCAAACCCTCTCTCAATGTATTCTTAGGAAAATCAGGCAACTTGTTATAGGTCTTTCCCTAGTG
CCAACCTAAAGACTGGGGGGCATTTCCCATTCAATTTCTAGTCATCCAGAGTTGGTATTTCAGTTTTAAAAGTAGAAAGTTAGGTAATTTTAAG
ATGTTATGAAAACTTTGTTGACATTTTTAATTTGCTTTTTAAATTTACCTTTACTTCAGTAAATAAAAATACCAGAAAAGTGTGAAGTTGTGTG
GTGGTGGTGGTGGTTGGGGTGTGTGTGTGTTTGTGTGTGTATGTGTGTGTATAAGATAGATAATATTAAAGTAGCAATGAAAACAGCCCAGAAA
TATAGGCAATTGAGGCCCAATTTCAAGTTTCTGTAGCATAAGGCATGTATATTACAGAATGTACCACATTATGTATCTGATCTCTAAATTCGCC
TTAGTATAAATGCTCCAAGTACATTCTTATGACCAAGAAAAGAATGGTATTTTTAATTGAATACCTAACCTCAAATCCTGAAAGAAACATTAAT
TGGGACAGGACAAAATGTCAACAAAAAAGTACTTATGTGAGTTATTTAGTATACAGCTGTCTGTTCATTTGTAGAATCCATTTGAATTTTATGT
TCAGAGAAATTGGGAGATGAGAGTAAATATGGGGGGAGATTGGCATGTAAATTTGTTGAGTTTTCATGAAAAAATAAAAATTTAAAAAACCTTC
CAAGCAAAATAAAACCTGTTCCATTCACAAATGATGGATGTCACTGATCCCATTAATACCTGTTACATACCAGGTCCTCTTCCTTATATCTAAC
TTGCTTTTTCTCCCAATTTCAGTGTAGTTGCTCTTGACCTTGCCTTTGTTCTTCTCTCCTCCTTCTCTCTTCTGCCCAGGCACAGTTATGTCCA
CTAAACCAGATGAACAAGATTTCATACTGACACCACCATACTCTGTTAAATAGTTAAAAATCCTATTTTGGCTTTTGTTTGCTCACTTAGATTT
GTACACCCAAGGTGATGAAGAGAGCACAGATAGAATCTAGAGACAAATAGTTTCTGGAGTCAGGAATCAGATCCAGATTCTAACACGAGGTGAT
GTGGGAAAAAGTCAGTTAAAATTTCTGAGATTCAATTTACTCATCTATAAAATCATCCTCATAATAATTGCTCCCCCCTTCAAAGGTTTGTTAT
GAGGAGCAAGTGGAAAAATGTCTATTAACGGGCTCTGCTGTCAGTAGATTAATGCATAAATCCAGGTATTATTATATAATCAAACTGTCCTTTT
AAATGTAGAAGAAAAGGGTTTTTAAGGCACACATGAGATTCTGGAAACGTACACGTTATAGAAAGTCTATAGGGACTAAAAATGCATTGTCTTC
TATATGCATTTATCTTGCCAGAGGTACATGCAGACCTTTGGGGGGTGCTGCTCTGGCCAGGACAGTGGTGGAGAGCTCTGACTCTTGAGTGTGA
GAGCTGGAACGATTGAGAAAAGACAGGAGGGAAACTTCGAGGTCAGGTGACTTCTTTCTAACTACAGCAGGTTCTCAGATCCCTAGGCTGGCCC
AAGATGAGAGAACAGTCACCAAAGAGAGTCTGGCACAGTAAGCCTAAGTCTCAGTGTCATCTGATTGTGAAATCTGCTTGTTTGCATACTCATA
CAGTACCAGAGCTTAAGCCCTGGCCACTGTACGGATGACTGTACAAGAGCAGAATCTAAGACCAAGGGGTTGTTTTTACTAAGGAAGAAAAATT
TATTAGAGTTACTTCAAGGAAATCTATTAGATTATCTCACCAAATACATTAATAGCATCAATTATTGTATTTTACATAATTTTTTTTACACCAG
ATACACAGTATATTAAAGAATTTGTGGAAGTCCCCCATGTGAACCAGTATTAACCATGATAAGAGTAATCAGGACTGGCCCAAGAAAGGTAGAA
ATGAGAATTTATAAACTTGTCTAATTCTCATTGCTTGAAGAAAATTGAAATGAAAGAATCCAAAAAGGGATTTATGAATATTTTTTAAAGCTTA
AAAAGCCCACATACTTATCATCGAATTGTCTGCTTACGATAGGAGCTGGAAGAGTCCCTTATATCCACTCAACTGTACTTACATTTTAAATGGT
TGTTTTCCTTTCTCTTACACTACTACAAGAGAAAGGAAATGCCTAGGCAAATAAACTCAGTTAAAATAACTTTATGGTTGTGACACAGTTTGAC
AAAAGCAAAGGAAATTCAGAGTCACTGCTCACACTGTATCCTCAGCTGATTCCAACTGTGGAAAATAAAATGCTTTAAAAAAAAAAAACAATGG
AACAAACTTGGGATGGATTTAGTCTTAGTCTTAGAGGCAGCCTTCTTAAATGCTGAATCTCTGAGTTCGCCATCTTTAAGTTCTTATAAGAGTT
GCAATATCTGTATTCATCATAAATCTAGTCAGAGTTAAAGAAGAGTATTTGGTTAAGTACTGCTTGGAAAATATGTTGTCCTTTTTTAAGATTA
TGTGATTCTAACTCAAAGCTGTAACTTCTTGGGGGTTAATAACCTACCTTGAGATATACTTTAAGTAATAATAATGGCTTCTTGGGATTAGGAA
AGATATTAAACTTACCCATTTCCAACGATCCTGTACTATTGCAGGAGAGATGTGGGGAGGGAGAGAAAGAGAAAGAGAGAGAGACGAGAGAAAC
ATTTTGACCAAAATTCCATATTCACTATTGCTATGCAAATTATAAACCTAACAGAGAGGTGATGTATCATTTTTATTAAACTTATGCTGCACAA
ATAGTGTTTACATAGAAGAGTATAAAGTTAATTCCCTCCCGGGAAGCATTTCTAAAAAATATAAATTGTATTTTGAGAGTTAATCAATTTGTTT
TTTCTCTTTTGGCATTTTAATTGAAGCTTCCAAACCGTATGCTTCCTCAAAGTATCAGAAGGCAAATATCAGTCGTGTGGTTATAAAATCAACT
CTTAATTTTCTTTCAATGAAGTAGCAGATAGTCAGCCTGTAAATTTTACCTACATTACTATGGAGCTGCAGTGCTATAAATTCAAAACAGTGTG
CAGGTTGGTGGAAATTGAGGTCCAGGCAGCAAGGCATGTCCATAAACTTTTCTCAGGTTATTGGAACAGAACGAATCAAAAGCGGTTCCTGGTT
GTATGATATTCTCTTTTGATAGAGCAGGCTGCTTGTTGTTAGCAATCCAAGTGCAGAGGTTAGTCAGAGCAGAATGTAATTTCTAGCAATCTGA
CAGACCTGCGGATTGAAGCGGCAGGTTTTCCCTTCCGATTTCAGGGAATTGCTTCTTACTGTGACAAATGATTAGCTGTTATCTCTGACTGAAT
TTGATTTCTACAAGCAGCTGAGTCAGGTAACTTTGCAGCGTTTGAGGGGGTTTTTTACAGGAAATGAAATCGGCTCCCTAGTCATATGTGGACC
AAATGAAATCTTCTCTGTCAGGGCAAAATTGTGCTTTTGGTTAATTGAAGGCAGATTTAGCATAGAGGGTGTGTGTGGTGATGTGTGTGCAGGG
TGTGTGTGTGTGATGCTCTGATGGTGTAGGCAGCCACACCCATGTGTGTACATTTACAGGAACGAGGGATCATTTCATGGATTCTCTCCCAACT
TTGAAAATCCTGGGTTCAAACAAAATCCCTACATTCTGAGCAGGGTTGAAGCTTTTAGAATAAACTATAAGTGGAGACAGTCATGTGGGTGTCA
GAATAATGAGCCTTCATATAAGGACATCCTGTTTCAAAAGAGTTTGAACTGCAATATTAATCAAAACACAATAGATACTCACTGAGCATGGTTT
TCACAAAAGTATTCATCAAAGGGCAGCTGCATTCAAAGCAAGAGATTTAGGTAAAATAAGTTAATCCTTGATCTCATCCAGGTTTGTGTGTAAA
TTTTGAATAGGGAGGGGTTCTAGTGATAGCAAGCGTCCTCTGGATGATAAAACAAAAAACGTGGCATGGGAAATTCCAGGTTTATCTTGTGCTT
CTTGTTCGCTTTTGATGGAATCTTAATAGTGACTACACAATTAGGATCAGGTTTATCCTTCTGTTTATAGTTTGTAATTGCTCTGGAAATCCTG
AGTTTCAGTAGTTCAACTTTTAGTTTTTAAGCAGTCGGTGAGTTTTTTAAAAAGTTACTATCGGATAATGTTTCATAGTTTCTAATCCTATTAC
AGCAATGTAAAATAAACTGTATTTCCCAAATACGAAGCAACATCTTTTATTCCCAGACCTCTTACTTTGCAAAGAGGAAACACCATCTTTAAGG
TCATACTAGTAATACTCCTTATTTTGTGATGAACATAATATACTTTGTTTATAAATCCTAGTTTAAAACAACAGAGATTTGTGGTAATTGACGA
AGAGTAAAAAAGTCACAAATACTGAATCTTCATTTTTCAGATGTGAGCACAACATTCCTAGGTATGTACTAATATATTCTAACACGGCATTGCG
CTGTCATCAAGACTTTTGTCTAAATGTCACCACTATTATGAGCAATACTTTTGCTAAATTCTTTAGTTGTATTCCCTAAATGGCAGATACCTTT
GGACCTCTCTCTCATTAGCTATTAAAAAGAATAGTTCTTTGAAAATAACAGTTCTGTGCTCCCTAAACTTCTTTTGTTTTTTGTTGAGTGATGT
CAACTTAGAGTTCCACACTGATTGCCCTTCCTCCTTGCTTTGTCGCCACAAAAGGGGTGAGGGGGTGCCCGAGTTTGACCCACACCTCTGGTTA
GTATTAATCACACAGACATCAGGTAATCACCTAAGTGCACTCAGACATACTAATAGAATGATTTACAGACCAGGCCCTTTGTCTTTTTCTAAAT
CTCATTTTAATTTATTTAAAGTGACAGTGAAGCTAGACTCCAAGCTAATGAGTCTGCATAAAAATGATTTCTTTTTCCACCTTTGTGTTTGCTA
AAACTTTCTGACTCTGAAATCCTGTCAGTGAAAAATTATTTGAGATGAAACACTGCAAAAGAAGGTAAGGGGAAAGGAGACAAAGAATATGATT
TGATCATCAGAGACCTGCCCTGGGTCCAAGTGGGCCTCATGGTAGCCACAAGTGTCCAGATCAGACAAATGGGGACTTTTGCATATATGTTTTA
GTGCTTCATCCAGACTTGAGTGCTTCACAGAGTCTGTGAGGCAACTCACATCCTTTGGTAGCTAACAAATTGGTCCTTTCTGACCAGCAAGCAG
TTTAAGAAAGCTAAGCTGTGTTGTATGCGTATTAAATATAGCACGAACTGCTTGGCTTTGCTTAACCTTAGTTGTATTAACAGATTGTTTGTTT
TGATGACTGCGCCGTTAGCATGCCAGATGATAAGGAAATGGTTTTGGATTAGTTAGGACCTATAATATAGAAACTAAATAAGATGATAGACTTA
CAAGGATATACATTTCCTGTAAAAAAAAATGAATTCCCTTATCAGGATTTACTTGAAAGGAATATGTCTTATTACAGAAGGAGAATGCCTTGAG
GAATGTGGGAAAGATTAAAGGCTTTTGTCAGTAGTTTAGGTTGGGACCAGGTTTCCTGTGTAGCCAGCCCCCCTGTCCCCACGTAAATGTTTTG
CTTTTCCTCCTCTCTCTCTTTCTCTTTAAGGGGAAGAGTAAGCCCTTCTCGCTGCCTGGCGGTGTCAGATTAAATACCGAGATGGCGACAGGAA
AAAGGCTGGAAGGAAAAACAAAAGACAGGGGGGTGAGAGTTATCAGGTTGGCGACGGAACTGCAGGCTTGTCGGACTCCAATTTACAGAAATCC
AAACAGATTTTAGTTGACACGATCTGCAATCATTACCGCCGGAGCAGAGCTAATTAAGAAATTAGCTTTCCTGATTGCCTGTTCTCACAGTGAT
GAGTAGTTGAATAATGTTGTATGGCTGAAATGTTCTAAAACCAGACAGTTTAACAAGTGTTTAGCCTTTTGTGGTGATGCTGTATTTACTTTAT
CTATAATATCTGTGCTGCATCACTATTTGTTTCCTCTCCTTAGAAGCACCCCTTGACTTTTTTTTTCCTTTTCCTTGGTTCACCCTCTTCTTCT
TGGCATTAAGTCAGAGCTTCCCCCCTTACTTCAGCCGCGTATAGGAGAGAATTATCATACAGATTTGTGGCATGTGGTACAGAAAAGTTATCGG
AAACTTGTGGCACATTCAAAAGCATATTTCCTACCCGTCTAGGCATTTTTCACAAGAAAATATCAGGTCCAAAGTGGCATTTGAAGTTTCTGAA
TCTGACTAAATGCAGAGGTGATTGTGAATAAATAACATTAAAAGGCTTTAGTCAGCAAAGATACAGTACGAGTGAGTGGAGCTCATTAGAAACT
AGCCGTGGACCCCAGATATGTCAAAGGGGGGTTTGCTGAGAGGTGACCACGCAGTCTTCATAACTTCCTCATCTCTCCCACAACTATCAAACAC
ATAGGAAGATGTTATTTGGAGAAAAAAAATAGTTATGTTTAAAAAGCTTGACAAAGAAATTAATCAAAATGAGCTTCATGGACCTTGTAAAATA
TGGTCCAGGCACATGTAATGCATATGTAATAGGCATGCGTACCGATGTGTCCATATGGACAAATAGAAAACCCAAGAGTTAAAAGTTTCTGCAA
AAAGACAACAACTTCTTTCCAAATTAAATAGAAGGCTTATTTGAATATAAACTTTCTCGCAATACAGCAAAATAACAAAGATTGGACAAAGGTT
TCCAGGTGTCACTGTTGAAACTGCAATGGGAGGTAAGAGTATTGCTAGCTTCCCAAATGAACCACAGAAGGGGAAGTTGCATCATTCAAGATGC
TTATCCTTTAGGATTTCCAAGTTTTAAAATGTAAATATTCATCTATGGAAAAACCAAAATTTCCAAGTTTTCCTAGTACACCTTCAAATCATTT
CTACACCTAAGAAAAATAAATACTAATTTTTCTTAATGAGGCCTAATAACACCTTTAACTTACCATTTTAAGAGACGCTAAGTCAATACAATGT
GCAGGTCCCTTCTGGATATTTATTTTCCTAAGCACAAATTCATTTATACCGAAAAAACAGTGGATGAAATACTAGAAAAATCTTTTCTGCACTG
GACCTCTCTTTTCCAGATTTACCTAAGAGAATCTTACCAGGAATGGAGATAGACTTTTACTTCCTAAGTAGATTTAAATTTAACACCAATTTAT
TCACTCTAGTATTTCTATATGGGAACTAACAGCTTCTATAGGACCTCTACAAAGTGCCAGAAATATGATCTCATGTGTAGTAATAAATTTAAAT
GTGTTTTCTTTTACATATTCTATCCCTCCGTATTTTCCCAATCTCTTCCTTTTTTATGACTCCCCCACTCTCAGTTTCTAAAATCACTTGTCCA
CTCCGGAGACCCAGGGGCACTGCCTAGAGAAGGAGCTAACTTTAAAAAAAATAAACCAGGCTGGTCACAGTGGCTGATGCCTGTAATCCCAGCG
CTTTGGGAGGCCAAGGCAGGCGCATCACCTGAGGTCAGGAGTTTGAGACCAGCCTGGCCAACACATGGTGAAACCCCATCTCTACTAAGAATAC
AAAAATTAACCAGGCGTGGTGGTGGGCGCCTGTAATCCCAGCTACTCGGGAAGCTGAGCCAGGAGAATTGCTTGAACCCGGGAGGCGGAGGTTG
CAGTGAACCAAGGTCATGCCACTGCACTCCAGCCTGGGTGACTGAGTGAGACTCCAGCTCAAAAACAAAACAAAACAAAAAAAGCACCATACTC
AGAGCTGCTATAAGTAACATGCAGTTGTAAGCCACACACTTCTTTGCATGATTCTTATTTTAAAGATTGGAAAGTAGAATTCGTATTTGTTTGT
TGTACTAATTCCAGTGGTATACCTGGAATTAATAAATGGTACTAAGACACTAAGGCGTTACTTTCTTGCATTATTCTAAATCAGAGTGTTGATT
AGAGAGAATAATCCAAAGGTAAAATAGTCAGATAATTTATTTTTATGTAAGTTTAAAAAGAGAAAGAGATTGATTTTTTTGAAGAGTTATAATT
ACATTCAGTATGTACCTTTTGTGCATTGAAATAATTTTAGATTTTCTGAAAAGGAAATATTGATGTAATTCAGCTCTCAAAACACTTGATGCCA
TGCCTTTCTTCCTAGTGTTTATGTAAAAGCAAGTGGTCAATTGTCGCTGCATCAGAGCTATGACAAGTTCTTCTATATTAGGTGGGCATCACTC
AAACACTTTTCCATAGTAGATCCAGTGGTATACCTGGAATTAATACAATTTATTAAGTACTAAGCTATGTTGTATTTATTGTATTAATTCCAGT
GGTAATACAATTCCAGTGGTAATACAATGTATTAATTCCAGGTATACCTACCACTGGAATTAATACAATAAATACAACATAGCTTACTACTCAA
GTCTATTACACGCCATCTAAAATAGCTAATCAGAAAGGCTGTATGTCTGAAACACCCAAAACTCACTCATCCTCTTTCTTAAAGCATTAAAAGT
TTTGGCAACTTTTCTGAATCCGAGTTGTGTGAGTCCTATACTGTACTAAGCTGGACATCTTAAGGGCTGCAGGTTTTAATATTTACACTGCCCC
GACTCAGTTGGTAACCGCTAGCAAATCATCTCACCCCAGTTTTTGTCCTTTTCCTGAAGAAAGCTGAATTTGGTTTCATGATCACTGTTTGCTC
AAGAAGACAGTCCCAACAATGGTCCAAAGCAAGGCCAGCTTTTAAAACAGCCACCAACTCTGAGTCAAGGCATCTACCTTCATTCTAATCAAGA
AGGGAAGATACAAAGTTTCAAGACCAGTCTTCACCTTGCACTGAATCTGACGGGGTCTTACTCAGCCACTTTCCACTACCTTTCAACCTAAAAG
CCAAGAAAAGCAAGGATTTGGATTTTAAAGCTGTACTTGTTATAGGTGTTCATGGGTTTTGTTAGCATTGTTGTTTTTTAGGGATGAGGGGTGT
TACTGGAGTGGAAGGGGGAGCTGTGTTGCTTTTAGTTTGTCATTTAGGATGTTAAAGTTAGTATGGGTTTCAGTTTGCATTTTAAAAATTAGAA
TGGTAATGAGCAAGGTGCCAGAAGGAAATAACAAAGCACATTTTCCTGAATAGCTCCCCCTGTCTTCTGTGTTCAGATTCTACTCTGACTTCCC
AACCCGGCTTCCTCTCCCGCCTGCTCCCTTCTGAGGTGCAGTGTAGAAGTTCATTCTCAGGTTTCTCTCAGTTTGCAGGACGAGATGCTGCCGG
CCAGGCCAAGGGCAGTTATGCCAGCTCAGTGTAGTGCAGCTTCCTTGCCCCAGCGTGCGCAGGCTGAAAGCTCAGCCAGTTTCTCTTTCTGAGG
CTGCTTCACGTCTTCTCAGGGATTTCCAAGGCACGGACGTTCATTTGCCTAAAACTCTCTTAAACTGCCTGACAAAAAAAATAAGTACCTAAGT
ACGACATAAGTGGTACACCCACGCAGGATAATTAGGATTGATGTGCTCTTTTAGAGGCACCAGATCCTCAACCTCCCCTTACTAGTGGCATTTC
TCACCTGCTCATGTGGTGCCCACCTGTGGCTTGCTGGCATTGCCACTGCCTGCGAGTGGGGAGATTTCCAAGTTCAAAATGAAGGCCTGATTTT
ACATGGTGGAACGCTGTAGGACTGTGTGGAGCTCTGTGAAGGAATTAAGGATGGCATGAAGTCCTAGTTTATGTCACTGCTCCCTTGTTTATGT
TCTTTCCTTGACTATTCCCACGCCCCCTCTCCAGATTTTGCATGGCTTTTATAGCCTCTAGTAATTATATCAGCAGCATGGAGTCTATTTTTAT
CTCTTCTGAATGTGTGCAACGTAAATGTCAAAAACCATAAAGGCCCTTTTTAGCATGTACCTTGCATGCACAGTTTGAAAAGTGTGATGCAGCG
TTCAGAGAGATGTTGCATTTTGAGGTGAGACAGATGAAAAGTGGAAAACTCAATTTCACCACTTAGCTGCGTGAACTTTCAGTAAGTCCTTTAT
CATCTTGAACGTTTAGCATTTTCTTCTGTAAAATGGAGTCCGGCTGCCTACCTCATAGGGTGGCAGCATGGAACCTAGTTTAGTGTCTGGGATG
CCCCCTTTCCACAGCAGGTGCCCCCAAACTCCTAAATTATATATTTCATGCTTAAATGTCATGACCTTTCAATGCCCTGCATTGCCCTTTATCC
AACTTAGAAACGGAGTAAAAATAAAATCTTACCACTGTAAGTCACAATAGGATTGTCACAAAATTAGCATGTCAAAGAATGATACGGAACTCAC
TGTCACCAAAAAACTGTCCCTAGACTTGGCTAATAATTATAATAATACCTAGCATTTATTACTAAGCACTTTCTGCCAGCTGGTCTCTAGGTGC
TTTACATGTAACCTTCACAACCATCCACTGACCCAGTGGATAGATATTCTTGTCCTCCACTTAATAAACGAGGACATGGAGGCAGGTTAGATAA
CTTAACAAAAGTCACAAGTTACGAAGTTAGTCAGCTGGATTCAAATTGAAGCATCCTGATCCCAGAACCTACAGAAATATAAAATGTCTATCAG
GCAGGAGCATTCACATGGCTGACCTGCCCCAGCTTCTAGGCAAGGTTGTTTCCTCTCTTTGCACTTCCTATTTGAAGTTGGGCCCTGAAAGCGG
CTAGATGGGCCCGTCAGAAGGGCATGCGAAGCTGCAGTCCCTTACTCAGCTACGAGTTAGGGACCATCATGCTTCAAAGGGGAAATGGCCTCAG
CATGTTTAGGTAGTCCAGTACCATGGTACAGTTTTTATGGCTCATTAATTTATCTTTAATTGAAGATAAGTTGGGAGAATTTAGAGTTGTGAGA
AAATGTGTTGTTTTCTAGTCAAAAATTCTCCTGTAGTTGTGATGAATGGACAAGATGGCAGTAACTGGCGGATGTGGTAAGGGATAATAATAAA
TAATAAAGAGCATATTTGTAGGCCCTCAACAAAATCTAGTGATGGAAGGAAGAACATATATAGGCATGTTAGACATATGAGAAATATCATAATA
CATTTTATGGGTAAGCTAAGAAGAACCAGTTATGCAAATTTTCTCTACTTTTTTATGAACTACTTATTGATTACCCCAGTCATTTTTCCATTGC
TACCACTGCATAAAGCAGAGGAAGCCAGTGCAGTCAGAACCCTCTTATTTATACAGTAAAGGCTATTACCGACCAACTACTTAGCAGCCAGAGA
AATCTTGCCTGTAAAACAGAACTGGGATCTGAAGAACTTAGAATATGTCATTTAAAGAAATATGATCACTGGTATGTACTAAAGTGCTCCAACT
TTTTAAAAACTTTAAAATCAGTTGACTGAAATTTACAGTTATTAAACTTAATTCTTTTTTTTTTTTTTTTTTGAAACAGTGTCTCACTCTGTCA
CCCAGGCTGGACTGCCGTGGCCCGATCTCAGCTCACTGCAACCTCCATCTCTTGGCTTCAAGCAATTCTCCCACCTCAGCCTCCCCAGTAGTTG
GGACTACAGGTGCAGGCCACCATGCCCGGCTAATTTTTGTAATTTTTGGTAGAGATGGGGTTTCACCATGTTGGCCAGGCTGGTCTCGAACTCC
TGACCTCAGGTAATCCGCCTGCCTCAGCCTCCCAAAGTGCTGGCATTACAGGTGTGAGCCACCGCGTCCAGCCAATTGTTAGTCTTTGGTACGG
TGCCCATGAGTCATCAAACTCATATGTGGAAGTTTTTGAAAGAAGAAAAAAAAATGAGAGTAGATTGATTAATGACTATTAAAAATAGCCTGGG
ATCTACGAATACCCATAGTAAAGAGCACCAGGCACTGGATAGATAATTGGTCTAAAGAGCCTGGACCTTGCTGAAGATAATATATACATGTAAC
ATGTTTTGTGAAAATGGAGTCCTGAAGATGAAAGGTGTATCTTTTCCATATTGACTACGTGACTTAATTGCTCACTTACTAGGCTGAGAAAGGG
GAGCAGAGGGGATGTGGAGAGGGAAGAAGGAGGGAAGGAAGGAAAGAAGGAAGGAAGGATAGAGGGAGGAAGCAAGGAAGGGAGGGAGAAAAGA
AGGGAGGAAGGAAGGATGTGGAAGGACGGAAAGAGGGGAAAGGATGATTCAATATCCTTTGACTACTAACATATGGCCTATTTGGGGAAGTAGA
CGATGGTGCATGGAGTCTCCTGAAAGCATCATATGAATGTTTGAAAATGTTATTGCCCACACAGTGCAAGTGCATTTAGGTATGTTTTAAGATA
GGTGGGCTAACTCTGAACTAGGGATTCCCAAGTTTAACTGCCTTATGAAGGTTAGAATTTGAGCACTTAAGTTCAGGGAAGGAAGGAAGGAAGG
GGGAGAGAGAAGAAGGGAGACGGCACTGCAGGTAGAGTATCCCCACATGTCTTACCTCTTCTGAAAGGCTGATGCAACAAATGCGACTGAAAAG
CCAAAGTATGGATACGTTTTCAATTTATTTCTAAAGAGTTCAATTTAATAACTGTCTGAGACTGAAACCATTCACACAGCAGAGCTTCTAGTAA
TTATAATTCTGAGATTCCCCAAAGTGGAAAGTCCTAGGAATACTGCCTGAAATGACAGTGCATTTGCTGTTCAGGTAAAATTCTTTAGGAATTT
TCTCTGATTCTGATTTCTATTTCTAAAATTTTCGATCATCTTCACCATTTTCCCCCAAAAAATGAGGGGTGCATTTCTGTCATTTTGTGTGTGG
TTGGGTGGTATTGTTGCGTCTCAGTTAGGGGTTGTGAAATGGAAGCTCTGGAGGGAGGAAAGGCATTCTTGGTTTGCAACTGAGAGCAAAAGGT
ACCACCTAAGCATCTTCTGTGAGACTAGGGTGCTTCCTTTAGATAAATGTGTATCTGTAATCAGCTTAACTAAGCAGGTAAGGTGTTCATTAGC
TAGGCAGGGTTTTCAAAGAGAGAGAGAGGGAGAGTGAGAGGAAGAGAGAGAGAATGAATGTGGAAGAGTGAGAAGAACAAACAAGTCAAAGCAT
TTGTTCATGCTGCAATCTACACATCAATTATCCCGCTGTGCTAATTACCACCTTTCCATACCCCAGGTACCTAAGCATTCACACTTACTCACTT
TCATGCCTCTGATCAAAAAAAAAAAAAAAAAAAAAGAGGAGGAAAGAAATGATAGAAGCAGGGGATGATGAACCCAGAGGAGAAATACATTCTT
AGATCAAAATTTCCTTTACATATGAAAGTATAAATAAGGGGTCTTCTCCATCTTGCCATTGTTGTTTTACACAATTAAATATTTGCAAATGTTT
TAATTGCAAAATATTACTTACTGTCAGGCTTCCAGGAGTGCTTCCATCTCATCAGCCCTTGTTTCCATACTTAAAAGAAGACAGAGAGGTGAGA
ATTGCTGGTCTTGCCTGAGATTTTGGGGTTGTGCCATTAGAATGAGATCAGATCATTAAAAGTCAGTGACTACTAATTATCAGGCTACTTTTCT
GAGGCTATTCAAGAATTGGGCAGTGAGGAGCCAGAGAGCTACCTTTGTATCAAAACCTTGGTGTTCCCCCTCACCGACTGAACCTTCATCTAAC
AATTAAACATTCTTTATTATGATGAAATCTGGGCTTGGAATCCCTGTTGGTTTGTGGGCTTCCTTGTCAGGGTGCTCATTTTCTCATTTCAGAG
TGAAGTTGGATAAAAAGAAAACCTATTTCCTGTAGCTCATTTGATACCTGGTGGGGATGCTATTCAGGTGACAAGGATACAGGCACAGAGGGGG
AACAGATGTGATTTACACACTCATTATCATTTGAATGAAAGTGCAGATAGGCCTGTTCAGGGGCCTGGGCATCACCTGGACAGCTTTCCTTCTG
ATCTTTATCCCATCTGAGAGGCCAGGTCCCCCTGACATCTTTAAATCCCCGACCCCCAGCTGCTGACACACAGAGTTTTATGACAGTCAGCAGT
CCTCTGAAGCTCCAAGCACAGATGCCATTCAGAATTGTGCTTCACACTGTTTTTTTCATTGTGTTCAGGCTTAATCAGGAATATATCCAAAAAA
AGCTTAACTTGAATAATTTCTTTTGGTACTTCTCCAGAAACCTGTTTGCCACTCGAAGTTTGTGTATAGTATTCTAAAGGGCCTCAGATTTTGT
GTTCTTAAAGTTATGTGCATACGTAGCTGCTTCAGCTTTCGAAAAAGGACAACAAAATGGAAAGGACCATAAGTTATAGATGTCATCAAAGTCT
TATGTTTCTACGACTATCAGATCAGATGAGCTTAGTATTGTGGTAGATGCAGTCAGAATGTTAGAGTGCAAAGACAATAGAAAGTTTGGATGAA
GCTACCAAAAAGAAAAGTTTCTGTTTGGCCTCTTTTGCTCTTCATAAAGGATTTTCAGCGTCTTTGTTTTGCTACCTGGAATGGCTGCTGTCAC
CATGATCTCTCAAGCATTTTGTTACTTATTTGTGGGATGTGTGAATAACATGGAAAAATTGCTATGTCATCTGAAGACCTCAAATGATGAGTCC
TGAACAGTACAAACTGTTTTTTTTTTTTTAAATACATTTTCAAGAAAGCTTGCTTTCGTTCAGGACAAGAATGCACAACAACCTTGAATAACTT
TGTTTTTAACCTTCCCTTATCTCAGGCAGCCTGACAGTTTTGGTGGGGAGCGAAAAGTGAAAGGAATCTCTGAGAACAAATACTGTGGTGTTTC
ATGATTTTAATTAGGTATTGTATTAAAGAGAAAAATATAATGAACACAAGCACATACACATTTTATTTCCCATCTAACATTAACAGTTAAAGAA
AACAATCACTATCAAATTACTTTGTTACAGTCCATAATTACAACTCAGGTTACGCTTAACTGTTATTAACAGAATGTACAGTAATATGTTCTGG
CATCGTAATATGTTATTGTAGCATTATAATTAATCTTACAGGAAGTATAATAAATTTACAGTATCAGATTGAAGCAATACTGCATATAGATTTA
TTAATGCTTTTAATCAGTTCTGGCAAAATTAATTTTGCACTGATTGCTTACATTGGAATTTGCATATACTTAGTGAAAGTAATTTATTTTTTAT
GGATTCCTTTTTATTAAAATAGGGCATATGGCCCTTTAGCTAAAAAACTTTGTGGATTCTTTAGCTAAAAACATTTCTAAACATTTTGAAATGC
CATATATCTTCCCTTTAAGATAATTCTTTCTCTTAAGATTTATTTTTAAATTATATTCTTTAAAATACTTTTTTAACTCTTATTTCAATGATCT
ATTTTTTGAAACTGTAATATTTATTTCCCTATTGTCATTAGCCTACTTTTCCCCAAGGATCTAAGTTTGAATAAAAACACAGGCCTTGAAAAAT
ATCTACATTGATAAGGGACTGCATTAACATTTCAGAAAGTGTCATGTGAAAATTAAATATCATTGAAAAATAATGAAATTTTACTCTTTGAAAA
GTCCAGTAAAAATGGGACAGCACATGAGAATTTTGCCATTATTTCTAAGTGCAACTATGTTACAATACTCCAAAATGCTTTCTGTGCCACGCAA
TGTATGTGCAGAAAAAAGGCGAGTGCAGATTTTTTAAAAAAACTTAAACTGATATCAGTGTTGTAAGTTCAAAAATAGTATTGAGAAAAATATA
CCTAAAGTGTCTTTCTATTAAAATATACATGCTTTGTAAGGAAAGGTAAATTATTCACCAAAAAAAATCAAGATGTCTTCATAAAATATATGTT
TACTATATCTTAACTTGTCAGGCAATTTGAAATTTTGAATAAACTCATCACTTAAATCTTTATTTTACCTCTTTCAAAAATAGTAAATTAGGTG
TTCCTGTAGGTATTGATTAATTTATTTTGCAAAAAATATTTGAAGAATAAGGGAAGAGTGATTTCTTATTCTTATAAGTCTTAACAATAAATAT
GTTCCTTGGCTTGAAAATTGAGTGAGCCTAACAGTACATAGCTTTCTTTTCCTATGTTAGTGAGTTACATTATGTAAAGCATATTCATGAACTT
ATATAGATTCTGGGTAGTTCTGATGATATGAAACTAAATTTTTTAAATAATTTAACTGAATATTTTGATATTGCTTGTATCAGGAATTTCTTCA
CTAAAAGAGCATATATGCAACAGTGTGACCTCTTTGGGCTCAATACAAAAGTGATTTGTACAGTGATTCTGTGATTTTCCACCATAATAAATTG
AGAAAGGCAGGTCTTGGTAAAACTTTATAGTCATGTATGAATACCCATATTCAGGTCTTCACCTCCAAGAGACATTCATTTTAATTTATGTCGT
TGTTTATCATCAAGGAAGATTTTGAACTTTTGAGAATTGGCCTTTATCTGTCCTAAACCTCTAACATTCCACTGTATCTTAATGAAACGGAGGT
TCTGTTCTTTCTGCCCAGGGCTTCTGATAAGTGTTTGCAGACTATGTAAACTTCTGAATAATAACTTTCAGTAAGGCAGGAGTCTTAAACCTCT
TAGTATCATTTTGTGCAGTATTATTCTGCTCTGTAAGATAATGTGTTATCAATACTTCATAAGATAACTTTGGCCAGAGAATGAATAAAATTTA
TAGTCACTTTCAAACTGCTCCCTTTTTTTAGGGTGTGGGTCATAGATCATGCAGCTGTCTGCCAACAGATAATCTTGATGAGTAAAAAGAAGCT
AACAGACAAAAAGGTGGCTTAGTCTAAAACACTTAGGAAGGACTTAAAAAATTATTTCCCAAAGAATTAGGGAGTAAAAAAATTGTAAGTACAT
TTGTTTACAGTAAAACAGTGGTCTCTTTGTTTGAGGAATTTTCCTTGCCACCTCAGAAAGTGAAAATTTACTCCTTTTTTTTTTTTTTTTTTAG
AAAATTAATGCTGGTGTGATTGTTTAACTTGTGTAACCTGTTCCTTGAGGTAAAATGAGGAAGAAGCATATGATTTGGCCTCTCTTTTCAGTGA
AGGAAGGAAGTCCATGGAAATTACTGAACCAAACTAGAGATCTAAAGCAAAAGCCCTTTTGTGACACAGATGAACTCAATAGTGCACTGTGACT
ATCTGACTTTTGCCACGTCCAGGCTTAGGCCGCCAAGCGGCCAGGGTCAGCAAATTCCACTACCTGAAAATGACAGAAGGCGGCAGGGAAGGGG
AATTGAGGCATGGGGAGAAGCAGTTGAAGCATACTAGGGAGGCATGAGGTTCTCTCTCTCTCTCTCTCTCTCTCTCTCTCTCTCTCTCTCTCTC
GTGCAGCTAAAGGAAGAGAAGGAAGGAAAAGAGGCTGATCATTGAACGACTTTAGGGGCAAGTCTGGAGTTAGGCGCTGTGGTGTCCAAGCAGA
GCCGTGTCTGGTGGCGGCAAACTAGATTGCTCCAAGCATGGAGCGCCCTGCTTGAGGACACTTGTTGTTGGACTGTTTGTTTACATGCAGTTTG
GGTGGCAAAAAAAGGGGAAAGTCTGGGTGACATCAGCTGCAAGAAGACTTAACCATATGCCGATGTCATCCAACCCCCAATTATTTGAACATTG
TGAAGGTTAAGACATCAATCCATCCATTTTTCTTTCTCTTACTCTGAATCGTGACATTATTTTCTCTAGTTCATTGACCTTGTTGGCAATTTAC
ACCACCAATATAAGCCTCAGGATCCTTTTGTAAAATGAGACTTGACACTAAATTAGTCAACTAAAAATTTAAAGGGTAAAGGGTCCCCCCAGCC
ACCCACTCCTGCCCCTCCCTGTACTAAAGTAGAAAATTTGGACAAGGCACACCATGCGTGTGACTCAATTGTTCTGGCCAAAAAATGGGATGAA
TAATTTTATTTCATAGATGCTTGGTGATTACTGGACTTTACAAAAGTTAACCACTAGTTAAAAAAAAAAAAAAAAAAAAAAAAAAATATATATA
TATATATATATATATATATATACTGCTTTTGGGTACTGAGGTTGAACAATTGGTCGGGGATAATTCCATAAAATGGATTTAAGTATTTAACAAA
TAATGTAAATGTATAGAGCAGGCCTAAAATTTCTCCACTGCCTTTGAGTATACCTTTACAAGTTTACAAATACATCAGCATAAAGCAGTTTCAA
TAAAATGATCAATTGTACAAAGTATAGAAATATACCAAGCGTCTCTTAAGTAAATGATTACAACATTTAGAAGTATTCATGAGTTTGACATATG
CAAAGCAGCCTATCTCTCATGAGTCTGAGTTCCAGCCTCCCTGAACCTTTGTGCATTTCATAGGCTGGTGAACAGCCCAAACATGTAAATAAAT
AGCCATTCAAAGTGCAAGCATTTTTAAAAGTTTAAAACTCCACACAAGTTCTTTTACAAAAGAGTCCACCCTTTTATGTACCTTTAAAAACATT
TAGCCACTTTATTCTTTTGTGTCTTTGAAGAGAAAAAAAATTAATAAAGTTGTAGGATCCTTTTGAATTTAGAAAATGTTGGCAATGTTGGAAA
GAAAGACATTCAGCATTTCAAAGTTCTGGTGGGGAAGGAAAAAAAAGATTCTGAATAAAACAATTTTATGTGATTTTGCAGGTGGTTTGAGCTA
TCATTTTATATGTACGTTTGTACCACTGCTCATTGGAATGTTCATATAATACTGACCTAATTATGCATAGAAAAAGATAAGCCATTTACTTGAT
TCATTTCTTCTTTTTAAATCAAGAAAGGAACAAAAAGGCTCCTATTTTCTGAAAGAAATTGTTCGCTTTTATTGCAGAAAAGTAGCAGCTTGTG
CAGAGCTAGAACTGTAACAATTTTATATTCCAAAGGTTTTGTGTGTATTCGGTTAGTTACAGTAATTATACCCAATAACTGACACCCAAAATCA
CGTAGGAGAAAGCAAAGGCTGTTTTCTCACACAGGCCCTGCTGCAGAACATCTGCTGAGAGATTTGCATATTAATTAACCCATATTAACTCTAA
TTATTCTGGGAAATTATCAAATAAATTGAATTTTCTAATTTTAACCTTTCTTTTACTTGACGCGTGTCGAGGCTGAGAGGACGCACCAGGCCGT
CTCACCTGGGCAATGAGCAAAAGATCTTTTCTACCCCTTTTGCTCCTTTAGACCTGGGGCAGCCTGGGGAGCTTTTGTGTGCCTTGTGCTTTTT
TGGCTTCTGTGCCTGGTAGGGTCTCCATCCATTTGTTGAGAGAGGGAACATGTGTGCTTGTGAGCACAGATGGTGGATTTATACAGGGGTGAGG
AAAGGTGGTACCTCAGAACAGTTGAGCAAACCTTAAGTTTTTTTTTTTTTTTTTTTTTCTTCCTCCCAGCCTGTTGTTTAGGCCTGAGCAAATA
AATGGGAGTTTAATTCAATTAGAGCCTGGCTGTAGTCAGTGCCTCATGACAGAAATTATTCAATATTTTTCCCCTCACATTGTTTGGTTTACAC
ATCACTGACTCCCTTCCTTTTGTACTCTGTTTAGAGTGGCCATAATGTGTTGAGCTTTTGTGTCTGCCATGTCACTGTCCCTTTCACCGTTGTC
TGGTTTTGTCAATTGTGAGGTGCAATGATGCTGTTTTGAAAACAGGGTCCTAGTCAGGGTGTTGCTATGTGAGTAGGGTGGCTGCAGTTTTAAA
CATACTACACAGTAAATAATGTCATTAGCCCAATAGACCTGAATCTACTGCTAAGCCTTAAGAGAAATCCTTTGGGTAGGGAAGTGAACTTTAC
ATGCCTTTCTCAGGTATTAGATGTAGCTTAAAACTGAGATTTCAAAGATAAATCTGGTCAGGGCAGTATGAAGAATTGGACTCCATTGCATGAT
CCCCTTTCAGGCATTTCTTTGGGGTAAGAGGCAAGATTGACTGAGATTAGAATTTTTTGCATGTGATCAAGTTTGTAACGACCCATACTTTAAG
CCACAGCGATCAGGAGAAAGCTACTGATGAAACCTCTACCACAAGCAGATCTCCAGCCCCCCTACTTCGAGCCACATCTCTTCTAAAGACCTAT
GACTCTATTTCCCCCTCAATGATTTCACTTCTCCCCATCCACTAAGATCTATTAAGATGAGCCACACCTCTTGCTACCTTGAAGGTAATTGTTT
TCCTCTGGAAGAGCTGTTCTTTCCCATTATTTCAGCTGATGGAGTAGAAGCATTACGGTACCTCCATGTAACATTCCTTAGACTCAAGAATTAT
TATTGACTTCAGTAAACTCCAGAAAACCAAGAAAGTCACCAAATAGGTCTGTTGGATGGACAAATATTTGAAAGCAATTATTTTTATGGATAGG
CTAGAACTCCAGTCTCCTTTTTCATGGAAGCATGGAATGCCTTTTGCAAGAAAAATATTTCTTTAAGAGACAAGCTGTTGCTACTTCAGATGAA
GGTATGGGTTCATGCTAAGGTTTTTGAGGGGAGGTGGTTTAATTTCGTGGGACTACAATAGCTAAAAGTGTATTTCAGTTATATCTGTATCTTA
GAAAAATGTACAGTTACAGACAAGGTTTAGGGTGGGCCAACTAAAACAATCAGAGAAAATTTTTATAGTTTTTCTATTTCGTGTTTATTTTTTA
CAGCACATTCCAACGTACTCTGGCAGTTACTGACTTTACACCTTTTATGGGCTTTGAAAGTTGTGTAACCTTTTCAGAGGAAGGTGATAGACAC
AATATCTATTTACACAAGGACACATTTCCCCTTTCTTTATATTCCGTTTATTCAAGGTTTTATTTCCAAGGTCTTATTACTATAAAACTTAAAG
CTAGACAAGGTCTGCCCTCATGTCAGATAAAAAAAAATACCAAAACAATTTTGATGGCTCAGAAGCTTATTTTTTCATACTTCCAGGTCCTAAA
TAAATTACAGTTATTTTCACATTCCTCTTGAATATCCTTCAGCCATGATAGTGAGCATATTTTTTCTGTAAAGCCCCTTAATACTTTCCTTCTG
ATGGTTTGTATAGAGCAAGTTGTTGAATGATCGTGGATTCCAATAATTAGAGAGAGTCTTCTAAAATCTTTTTTTCCTTTTGACATATTGTTGG
AAGACATATAGTCACTTGATGTATTTATGAAAGTCTGTGGAATTATTGGCAGTAGATGTACAATATATATGAAATTATTTGTGTATAGCAGTTG
TTTTGGGGGTCTTCCCTCAGCATGCCATCATGCTAGGCTTGCTGATGAAGGTGCTGTTAGACTTTTTAGCCATCAAAGGGCATTATTGACTTGT
GTTCTGGAATATAGCTAACTATTATGTCCTTGGATTGTAAGCATATTATAGATGTTGACAGAAAGTGAAGCTGAAAAAATTTCTAAAGGATAGA
AATAACTACAAAAACTCACTAAATGAAAGGAGCGGTCAGGGGCCTGTATGTTTGAAACATCAATACAATGACTAGTTTCCTTTGGTAGGAGTTA
AGTAAGGTAATCAAAACCATTATGAGTCCTAGATATACAGGAAAACCCGAATATGTTTACTTTTGTAAAAAAATAAACAGATGTCAAGTCTTTG
GGAAATCATAAATTTCACTGAGAACACTGTGACCTAGAAATACCGTGTCTTCTTCAAAGAAAGTGAATTTACTGTTACAAATTCTTCGACCAAT
ATCTGTTTTTAGGATAGCTTGACAAAGGGAGGGTCCTTGCTTTTATTCTTATTTGCCATTATGTTTATATTTTTGATATTAAGGAAGAGGTTTG
GAGGGGAAAATTACATATCTAAGATGTTATTACCTGCATGTTCGACCCTATCCAGAACCTCAACAAATGTATGGAAATTTGAACCTTTTTGAAA
ATCACCAGCATACTGAAATTTGAAAACCTCTCCCAGGTACCAGGGAACCTCCTAATATTTCCAGAGGGAATGAGTGGCTGCCATCTTCCCAAGA
TGCTCCTGTAACCAGGAAGTTGGAGGAGCCTCAGAACTGGCCTCTCTCCACTGCAACCATGGCATTGCAGAAATTCTGCTCTCATTTTATTTAA
TATGCGTATTTTTTTACATAGCTAATCTGAAATGGAAACATTTTTATCCCTATACTGAGAACTGCTTTTGTTTTATCAGCTGACATTTTACAAC
TCATTAATTTATAATGCAGGTTTAATGCCTTCGAATGTTCCTGGGATAAAAAATTAAAGTGGCCAAGCTAGTTTGTATAAAGGCTGACTATAGT
ATGTTAACAATAATTATTTATAACAATATTTTGTATTGGATAGCACATTCCATCTGAATATTTCAAATTGGCATGGTCCCTTCTAACTGGCATT
AATTCATTCATCTTGCATCCCCAAGTAATAAAGTTATTCCCATTTTTAAATGGAGAAATCAAGATTCATGCATTTCAGTGACAGATGTTCAAAT
TCAGAAGAAAATCTCTGTTTGAGTTTGTCTTTGCCTTGTAATACGTATTTGTCACTAGGCCTCCATTATTAAATAAGAAATTGAACCTTGCATT
TAGTCCTATGATCTTTACCCACCCAAGCACGGAGGTAACAAGGTAACTGTGATTTAAAAAAAAAAAAAAAGTCAATGATAAATCCCCCCGGATC
GGCAAGAGTCACTGGACAAAAATTATTGAAAAATAGCTGCATCCTCTCCTCAGTAGCACATACTTGGAAATTGAAATTTTGTGGGGAAGACAAG
GAGGAATAAAGGCTAAGGTTCAGGAGAAAAGTCTTAGAAGGTCTTCCCGACACTTGCCACATGTAAAGACGTTGTAAGAAAGCAGGCCCACAAG
GCCTTTAATCCACTGGCTCAAACATAAATGATCTCTAAGCATGTAAGCATAAGAGATTTAGGAAACCAAATGATTCATAAAATTCCAAAACACT
TCTTTTTTTTTTTTTTTTTTAAAGACAGGGTCTCATTCTGTTGCCCAGGCTGGAGTGCAGTGGTGTGATCATAGCTCACTACAGCCTCGACCTC
CCAAACTCAAACAATCCTCCTACCTCAACCTCCTGAGTGACTGGGACTATTGGCATGCAACACCATACCTGACTGATTTTTTATTTCTTGTAGA
GATGGGGTCTTGCCCAGGCTGATCACAAACTCCTGACCTCAAGAAATTCTCCCTGCTTGGCCTCCCAAAGTGTTCGGATTACAGGTGTGAGCCA
CCATACCTGGCCAAAAGGACTTATTTTAAATTTGAAGTCATATTACCAGCAGAGACATTTTTAAAATGAGGTTACATGTCTGTGTCACGTCTAA
GCTGAAGGATTAGGCATGGTCTCTCTCATCATGGCCTTCCTACTTGACGAAGCATTTCCAAATAAATTTCTAAGTGAAGGGCCAACACAAAAAT
TGTGACTGGCACAAGTTCAAATCTTCCTTTTTCCTCGTAGCCACCACACATTGCAGCACCAGAGAAAAGACAACAGACACTGAAACAATGGTAT
TTCAGTGATTATACCAGTTACATCACCTTGCATTTCCATCTTACTCTTTTATACATCACACAGTGCCATTGCACATACAACTTTGTAGGCTCCT
ATGACAACCTCATAAACAGGGAACCATTATCATGATTTTTACTCATTTCTACCAAGCTTCCTTGGATGATAGGCCAAGGCCACACAGCTGGTTA
CACGTTGGTTCTGGGACAAGGCAAGTCTTCAAGCTCATAATTCTGTGAACTGCCTCTTTATCTCTATTGTTTCCAAACTATTGCAGGAAACATG
GGTGTATTGTTAGATTCTGGTAATTGATCAAATTGGTAGGCTTCTATAACTCAAATTAAGCGGATCCATGAAACTAACAATCATCAAAACAATT
TAAAATTAAGCAACAATCTCCATTTTTGTGGCATGAAAATCCCAAAAAGTCCCAGGGATTTCCATCCCTTACTCTGGTCATGTGGGGTTTAAAC
TTAGATTGCATTCTGCACTGGGAATTTGTATTATCATGTATGTTTTTGTTTGGCTGTTGTACACCTAAAGACATGCTTTCTGGTACCGGCTTTG
CTACCAACTAGCTGTACGGCCTTTGACAAGCCATTTGACCTCACTGTGCCTCTATTACCTCCTTTGTCAAAGAGTTGACTTCAAGTGTCCTTCT
GGAACTACAATTTTGTGATTATATTTCTCCAAATAAATTGTAAGCTTCCTGAGGTGAGAATGGCACTTCCTTCTATCTTCTGGATTTGCCACAT
TGTGGGTATTTAATAAATGTTTGATGATGGCATTGAACGATTTATTGGCACGCTTGAGTAGAGTTATAGGAAATCATTATTGGCTGCCTTATTA
ACAATTAGCTGTCTATAAGCTGCATATGTAATTTTCCTTTACATCAATAGAGTTTCTGCTTCTGGTGAAGACGAAGTATTGCCCCTTCACATCA
GTTCTTCTGTATGTTAATACATTAGCAACTGATATCTTATTTGTACTGTAACTGACAGAATAATGTAGAGAAAGCATATAAGTAGGAAAAGGGG
TTAGTAAGGTAACATTGTATAGGGCATCTTCAAAACAACAGTTCTGCTATTTCAAATGTCAAGCTAATTATCAGCAATGTTTAAATGCTATGAT
AGGCCATTTTTGCAAATGCTGAAATTTTCCAGCAGGTATGGACGTTATAAAAATGTCAAATTTTGCTACTATTCTATTACATGTCACCAGAACA
CAAAAATCTGAAAATAAAAGTTATATGTATAGGCAAGGAAGAGAAACCATTATTTGTTTTGCATATGACTGTAAAATTAATTGGCATAGTGATA
TAATTTAGAGTATTGTTTACTTGGAAGGAAGAGTAGAGAGGATTTAATATA
HUMAN SEQUENCE—mRNA
GGCGATCACGTTTTCACATGATGCTCACGCTCAGGGCGCTTCAATTATCCCTCCCCACAAAGATAGGTGGCGCGTGTTTCAGGGTCTCTCGTCT
CTCTCCTACAGAAAAGAAAAAGAAAAAAATGTCATTAGAAGAGGCGTAACACGTCAGTCCGTCCCCAGGTTTGTGTTTCCTGGAGTGGCCGAAA
GAGATCAGTTCTAACCTGCTCTGCAGGAATAACGGTCCTGCCTCCCGACACTCTTGGCGAGGTTTTTGTACAGTTTGCTCCGGGAGCTGTTTCT
TCGCTTCCACCTTTTTCTCCCCCACACTTCGCGGCTTCTTCATGCTTTTTCTTCTCACCATTTCTGGCCAAAACTACAAACAAGACTTCGCAGA
TCGACCCTGCGTGCTGCCGAAGCAGGGCGCCGAGTCCATGCGAACTGCCATCTGATCCGCTCTTATCAATGAAGCAGCCGATCATGGCGGATGG
CCCCCGGTGCAACAGCCGCAAACAAGCCAATCCCAGGAGGAAAAACGTGGTGAACTATGACAATGTAGTGGACACAGGTTCTGAAACAGATGAG
GAAGACAAGCTTCATATTGCTGAGGATGACGGTATTGCCAACCCTCTGGACCAGGAGACGACTCCAGCTAGTGTGCCCAACCATGAGTCCTCCC
CACACGTGAGCCAAGCTCTGTTGCCAAGAGAGGAAGAGGAAGATGAAATAAGGGAGGGTGGAGTGGAACACCCCTGGCACAACAACGAGATTCT
ACAAGCCTCTGTAGATGGTCCAGAAGAAATGAAGGAAGACTATGACACTATGGGGCCAGAAGCCACGATCCAGACCGCAATTAACAATGGTACA
GTGAAGAATGCAAATTGCACATCAGATTTTGAGGAATACTTTGCCAAAAGAAAACTGGAGGAACGCGATGGTCATGCAGTCAGCATCGAGGAGT
ACCTTCAGCGCAGTGACACAGCCATTATTTACCCAGAAGCCCCTGAGGAGCTGTCTCGCCTTGGCACGCCAGAGGCCAATGGGCAAGAAGAAAA
TGACCTGCCACCTGGAACTCCAGATGCTTTTGCCCAACTGCTGACCTGCCCCTACTGCGACCGGGGCTACAAGCGCTTGACATCACTGAAGGAG
CACATCAAGTACCGCCACGAGAAGAATGAAGAGAACTTTTCCTGCCCTCTCTGTAGCTACACGTTTGCCTACCGCACCCAGCTCGAGCGGCATA
TGGTGACACACAAGCCAGGGACAGATCAGCACCAAATGCTAACCCAAGGAGCAGGTAATCGCAAGTTCAAATGCACAGAGTGTGGCAAGGCCTT
CAAATATAAACACCATCTGAAAGAACACCTGCCAATTCACAGTGGTGAAAAACCTTACGAGTGCCCAAACTGCAAGAAACGTTTCTCCCATTCT
GGTTCCTACAGTTCGCACATCAGCACCAAGAAATGTATTGGTTTAATCTCTGTAAATGGCCGAATGAGAAACAATATCAAGACGGGTTCTTCCC
CTAATTCTGTTTCTTCTTCTCCTACTAATTCAGCCATTACCCAGTTAAGAAACAAGTTGGAGAATGGAAAACCACTTAGTATGTCTGAACAGAC
AGGCTTACTTAAAATTAAAACAGAACCACTAGACTTCAATGACTATAAAGTTCTTATGGCTACACACGGGTTTAGTGGCACTAGTCCCTTTATG
AATGGTGGGCTTGGAGCCACCAGCCCTTTAGGAGTTCATCCATCTGCTCAGAGTCCAATGCAGCACTTAGGTGTAGGGATGGAAGCCCCTTTAC
TTGGGTTTCCCACCATGAATAGTAATTTAAGTGAGGTACAAAAGGTTCTACAGATTGTGGACAATACTGTTTCCAGGCAAAAAATGGACTGCAA
GGCTGAAGAAATTTCAAAGTTGAAAGGTTATCACATGAAGGATCCATGCTCTCAACCTGAGGAACAAGGAGTTACTTCTCCTAATATTCCGCCT
GTCGGTCTTCCGGTAGTGAGTCATAATGGTGCCACTAAAAGTATTATTGACTATACGTTGGAAAAAGTCAATGAAGCCAAAGCTTGCCTCCAGA
GCTTGACTACTGACTCAAGCACACACATCAGTAATATAAAGAAAGAGAAGCTACGTACTTTAATAGATTTGGTCACTGATGACAAAATGATTGA
GAACCACAACATATCCACTCCATTTTCATGCCAGTTCTGTAAAGAAAGTTTTCCTGGCCCCATCCCTTTGCATCAGCATGAACGTTACCTTTGT
AAGATGAATGAAGAGATCAAGGCGGTCCTGCAGCCTCATGAAAACATAGTCCCCAACAAAGCCGGAGTTTTTGTTGATAATAAAGCCCTCCTCT
TGTCATCTGTACTTTCTGAGAAAGGAATGACAAGCCCCATCAACCCATACAAGGACCACATGTCTGTACTCAAAGCATACTATGCTATGAACAT
GGAGCCCAACTCCGATGAACTGCTGAAAATTTCCATTGCTGTGGGCCTTCCTCAGGAATTTGTGAAGGAATGGTTTGAACAACGAAAAGTCTAC
CAGTACTCAAATTCCAGGTCCCCATCCCTGGAAAGAAGCTCCAAGCCGTTAGCTCCCAACAGTAACCCTCCCACAAAAGACTCTTTATTACCCA
GGTCTCCTCTAAAACCTATGGACTCCATAACATCACCATCTATAGCAGAACTCCACAACAGTGTTACGAATTGTGATCCTCCTCTCAGGCTAAC
AAAACCTTCCCATTTTACCAATATTAAACCAGTTGAAAAATTGGACCACTCCAGGAGTAATACTCCTTCTCCCTTAAATCTTTCCTCCACATCT
TCTAAAAACTCCCACAGTACTTCATACACTCCAAACACCTTCTCTTCTGAGGAGCTCCAGGCTGAGCCTTTAGACTTGTCATTACCAAAACAAA
TGAAAGAACCCAAAAGTATTATAGCCACAAAGAACAAAACAAAAGCTAGTACCATCAGTTTAGATCATAACAGTGTTTCTTCCTCATCTGAAAA
CTCAGATGAGCCTCTGAACTTGACTTTTATCAAGAAGGAATTTTCAAATTCAAATAATCTGGACAACAAAAGCACTAACCCAGTGTTCAGCATG
AACCCATTTAGTGCCAAACCTTTATACACAGCTCTTCCACCTCAAAGCGCATTTCCCCCTGCTACTTTCATGCCACCAGTCCAGACCAGTATTC
CTGGGCTACGACCATACCCAGGACTGGATCAGATGAGCTTCCTACCACATATGGCCTACACCTACCCAACTGGAGCAGCTACTTTTGCTGATAT
GCAGCAAAGGACAAAGTACCAGCGGAAACAAGGATTTCAGGGAGAATTGCTTGATGGAGCACAAGACTACATGTCAGGCCTAGATGATATGACA
GACTCCGACTCCTGTCTCTCTCGCAAAAAGATCAAGAAGACAGAGAGTGGCATGTATGCATGTGACTTATGTGACAAGACATTCCAGAAAAGCA
GTTCCCTTCTGCGACATAAATACGAACACACAGGAAAAAGACCACATCAGTGTCAGATTTGTAAGAAAGCGTTTAAACACAAGCACCACCTTAT
CGAGCACTCAAGGCTTCACTCGGGCGAGAAGCCCTATCAGTGTGATAAATGTGGCAAGCGCTTCTCACACTCGGGCTCGTACTCGCAGCACATG
AATCACAGGTATTCCTACTGCAAGCGGGAGGCGGAGGAGCGGGAAGCGGCGGAGCGCGAGGCGCGCGAGAAAGGGCACTTGGAACCCACCGAGC
TGCTGATGAACCGGGCTTACTTGCAGAGCATTACCCCTCAGGGGTACTCTGACTCGGAGGAGAGGGAGAGTATGCCGAGGGATGGCGAGAGCGA
GAAGGAGCACGAGAAAGAAGGCGAGGATGGCTACGGGAAGCTGGGCAGACAGGATGGCGACGAGGAGTTCGAGGAGGAAGAGGAAGAAAGTGAA
AATAAAAGTATGGATACGGATCCCGAAACGATACGAGATGAAGAAGAGACTGGAGATCACTCCATGGACGATAGTTCAAAGGATGGGAAAATGG
AAACCAAATCAGACCACGAGGAAGACAATATGGAAGATGGCATGTAATAAACTACTGCATTTTAAGCTTCCTATTTTTTTTTCCAGTAGTATTG
TTACCTGCTTGAAAACACTGCTGTGTTAAGCTGTTCATGCACGTGCCTGACGCTTCCAGGAAGCTGTAGAGAGGGACAGAAAAGGCGGTTCAGC
CAAGACAGATGTAGACGGAGTTGGAGCTGGGTATTGTTAAAAACTGCATTATGCAAAAATTTTGTACAGTGTTAAGGCCTAAAAACTGTGTGGT
TCAGAGACTAATTCCTGTGTTTAATAGCATTTATACTTTAAGCACAACTAGAAAATTGTAAGAATTGCACTCTACTTATGTATCACTACAAACT
TTAAAAAACTATGTCTAATTTATATTAATACATTTTAAAAAGGTGCCCGCACTACCATACATCAGTATTTTTATTATTATTATTGTTATTCCTT
TTTAATTTAATGTGCTCGCACTACAATGCATCAGTATTATGATTCCTCTGTACTTTCCTTTCGCTATTCATCAATTTCCCATTTTTTTTTTTCA
GCTTAAGTAACCACACAATTTTAGGCCTCAATTTTTTTTTTTTTCTGTGAAGGAACTTGAAGTGATGCATGTGTGAATTTAAGATACCGAAGTC
TTAAAGTGACCTGGACGTGAAGGAAAAAGTAAGATGAGAAATAAAGAAAGCCTTTGTAAGGTGGTTTTAAAAGCCTTATATGCAAACCTTTTAA
TCTGTGTTTCTGCAAGTCCCATCCTTGTACAGTGTTAAGAGGGTAACATGGGTTACCTTTCCACCAGCTTCAGTGTTAAGCTCACCCTGTTCTT
TGAAGCACCCATGTCAGTATTAGAAGAATAGGCAGCAGTTCCTTAGTTTACATATGTTTGTGCAATTATTTTCTGTACTTTTTTGTTCATTAAT
TTTGTCAGTATTACACCAAACTGTTTTTGCAACAAAAAAATTTTTTTTGCATTCATTTAATTTTAGGTCAAATAACATTTTATTTATGTGGCTC
ATTTTATATTTCCTAATTTTATTTATTTCATACTGTAGTGTACAGTATTATAGTTCTTCAATATATACATATATTTTAGTAAAAAAGGAACATG
ACGTTGATCATTTGGGCAAATTTTACGTAAAGAGAAGAGCATTTATTGTGTTTTGGAACATTAATTGTGAGATGGGATTTTTCAATTTTATTAT
TTTATTTTTGTTTTTTTCCAATTACTGGAAATTCCAAATTTGGGAACTTTTGATACGATCTTGTGAAAACACTGTATTTTCGACTGAAAATTCC
ACTTTCTTCATCTTGTTTTTTAGCTAAAAAGAGGGACTGTTAAATACAATGTATGATACCATGACAAAAATCTTTCCTGAATTGTCTTTGTAAA
AGTATTATTGAATTTTCAATTTGTAATTTCTTTTGAAAATGACCATGCTCGAATAAAAATGTAGCCAAACT
HUMAN SEQUENCE—CODING
ATGAAGCAGCCGATCATGGCGGATGGCCCCCGGTGCAAGAGGCGCAAACAAGCCAATCCCCAGGAGGAAAAACGTGGTGAACTATGAAATGTAG
TGGACACAGGTTCTGAAACAGATGAGGAAGACAAGCTTCATATTGCTGAGGATGACGGTATTGCCAACCCTCTGGACAAGGAGACGAGTCCAGC
TAGTGTGCCCAACCATGAGTCCTCCCCACACGTGAGCCAAGCTCTGTTGCCAAGAGAGGAAGAGGAAGATGAAATAAGGGAGGGTGGAGTGGAA
CACCCCTGGCACAACAACGAGATTCTACAAGCCTCTGTAGATGGTCCAGAAGAAATGAAGGAAGACTATGACACTATGGGGCCAGAAGCCACGA
TCCAGACCGCAATTAACAATGGTACAGTGAAGAATGCAAATTGCACATCAGATTTTGAGGAATACTTTGCCAAAAGAAAACTGGAGGAACGCGA
TGGTCATGCAGTCAGCATCGAGGAGTACCTTCAGCGCAGTGACACAGCCATTATTTACCCAGAAGCCCCTGAGGAGCTGTCTCGCCTTGGCACG
CCAGAGGCCAATGGGCAAGAAGAAAATGACCTGCCACCTGGAACTCCAGATGCTTTTGCCCAACTGCTGACCTGCCCCTACTGCGACCGGGGCT
ACAAGCGCTTGACATCACTGAAGGAGCACATCAAGTACCGCCACGAGAAGAATGAAGAGAACTTTTCCTGCCCTCTCTGTAGCTACACGTTTGC
CTACCGCACCCAGCTCGAGCGGCATATGGTGACACACAAGCCAGGGACAGATCAGCACCAAATGCTAACCCAAGGAGCAGGTAATCGCAAGTTC
AAATGCACAGAGTGTGGCAAGGCCTTCAAATATAAACACCATCTGAAAGAACACCTGCGAATTCACAGTGGTGAAAAACCTTACGAGTGCCCAA
ACTGCAAGAAACGTTTCTCCCATTCTGGTTCCTACAGTTCGCACATCAGCAGCAAGAAATGTATTGGTTTAATCTCTGTAAATGGCCGAATGAG
AAACAATATCAAGACGGGTTCTTCCCCTAATTCTGTTTCTTCTTCTCCTACTAATTCAGCCATTACCCAGTTAAGAAACAAGTTGGAGAATGGA
AAACCACTTAGTATGTCTGAACAGACAGGCTTACTTAAAATTAAAACAGAACCACTAGACTTCAATGACTATAAAGTTCTTATGGCTACACACG
GGTTTAGTGGCACTAGTCCCTTTATGAATGGTGGGCTTGGAGCCACCAGCCCTTTAGGAGTTCATCCATCTGCTCAGAGTCCAATGAAGAACTT
AGGTGTAGGGATGGAAGCCCCTTTACTTGGGTTTCCCACCATGAATAGTAATTTAAGTGAGGTACAAAAGGTTCTACAGATTGTGGACAATACT
GTTTCCAGGCAAAAAATGGACTGCAAGGCTGAAGAAATTTCAAAGTTGAAAGGTTATCACATGAAGGATCCATGCTCTCAACCTGAGGAACAAG
GAGTTACTTCTCCTAATATTCCGCCTGTCGGTCTTCCGGTAGTGAGTCATAATGGTGCCACTAAAAGTATTATTGACTATACGTTGGAAAAAGT
CAATGAAGCCAAAGCTTGCCTCCAGAGCTTGACTACTGACTCAAGGAGACAGATCAGTAATATAAAGAAAGAGAAGCTACGTACTTTAATAGAT
TTGGTCACTGATGACAAAATGATTGAGAACCACAACATATCCACTCCATTTTCATGCCAGTTCTGTAAAGAAAGTTTTCCTGGCCCCATCCCTT
TGCATCAGCATGAACGTTACCTTTGTAAGATGAATGAAGAGATCAAGGCGGTCCTGCAGCCTCATGAAACATAGTCCCCAACAAAGCCGGAAGT
TTTTGTTGATAATAAAGCCCTCCTCTTGTCATCTGTACTTTCTGAGAAAGGAATGACAAGCCCCATCAACCCATACAAGGACCACATGTCTGTA
CTCAAAGCATACTATGCTATGAACATGGAGCCCAACTCCGATGAACTGCTGAAAATTTCCATTGCTGTGGGCCTTCCTAAGGAATTTGTGAAGG
AATGGTTTGAACAACGAAAAGTCTACCAGTACTCAAATTCCAGGTCCCCATCCCTGGAAAGAAGCTCCAAGCCGTTAGCTCCCAACAGTAACCC
TCCCACAAAAGACTCTTTATTACCCAGGTCTCCTGTAAAACCTATGGACTCCATAACATCACCATCTATAGCAGAACTCCACAACAGTGTTACG
AATTGTGATCCTCCTCTCAGGCTAACAAAACCTTCCCATTTTACCAATATTAAACCAGTTGAAAAATTGGACCACTCCAGGAGTAATACTCCTT
CTCCCTTAAATCTTTCCTCCACATCTTCTAAAAACTCCCACAGTAGTTCATACACTCCAAACAGCTTCTCTTCTGAGGAGCTCCAGGCTGAGCC
TTTAGACTTGTCATTACCAAAACAAATGAAAGAACCCAAAAGTATTATAGCCACAAAGAACAAAACAAAAGCTAGTAGCATCAGTTTAGATCAT
AACAGTGTTTCTTCCTCATCTGAAAACTCAGATGAGCCTCTGAACTTGACTTTTATCAAGAAGGAATTTTCAAATTCAAATAATCTGGACAACA
AAAGCACTAACCCAGTGTTCAGCATGAACCCATTTAGTGCCAAACCTTTATACACAGCTCTTCCACCTCAAAGCGCATTTCCCCCTGCTACTTT
CATGCCACCAGTCCAGACCAGTATTCCTGGGCTACGACCATACCCAGGACTGGATCAGATGAGCTTCCTACCACATATGGCCTACACCTACCCA
ACTGGAGCAGCTACTTTTGCTGATATGCAGCAAAGGAGAAAGTACCAGCGGAAACAAGGATTTCAGGGAGAATTGCTTGATGGAGCACAAGACT
ACATGTCAGGCCTAGATGATATGACAGACTCCGACTCCTGTCTGTCTCGCAAAAAGATCAAGAAGACAGAGAGTGGCATGTATGCATGTGACTT
ATGTGACAAGACATTCCAGAAAAGCAGTTCCCTTCTGCGACATAAATACGAACACACAGGAAAAAGACCACATCAGTGTCAGATTTGTAAGAAA
GCGTTTAAACACAAGCACCACCTTATCGAGCACTCAAGGCTTCACTCGGGCGAGAAGCCCTATCAGTGTGATAAATGTGGCAAGCGCTTCTCAC
ACTCGGGCTCGTACTCGCAGCACATGAATCACAGGTATTCCTACTGCAAGCGGGAGGCGGAGGAGCGGGAAGCGGCGGAGCGCGAGGCGCGCGA
GAAAGGGCACTTGGAACCCACCGAGCTGCTGATGAACCGGGCTTACTTGCAGACCATTACCCCTCAGGGGTACTCTGACTCGGAGGAGAGGGAG
AGTATGCCGAGGGATGGCGAGAGCGAGAAGGAGCACGAGAAAGAAGGCGAGGATGGCTACGGGAAGCTGGGCAGACAGGATGCCGACGAGGAGT
TCGAGGAGGAAGAGGAAGAAAGTGAAAATAAAAGTATGGATACGGATCCCGAAACGATACGAGATGAAGAAGAGACTGGAGATCACTCCATGGA
CGATAGTTCGGAGGATGGGAAAATGGAAACCAAATCAGACCACGAGGAAGACAATATGGAAGATGGCATGTAA

[0300] TABLE 37
MOUSE NOMENCLATURE
ICSCNN Vdac1
Celera mCG3636
HUMAN NOMENCLATURE
HGNC VDAC1
Celera hCG16588
MOUSE SEQUENCE—GENOMIC
TTTGATCCTGGAAAGGCATCAGAGGCTGGTGTCTTTGGTAAGAAGGGCTGTGTACCCTGAACCTGGGATATGGAGGGGTCTGATGGGTTTGGGG
GAAGAAGCTGAAGAAGTTATGGCATGTCAGAGCAAGCCCTTAAGGTCAGTTTCCTGCCTCCCTCCTCCAGGGTACTCAGAATCCAACCAGCTTG
TTGATTTATTATCTTTCTAACTGTCACTGTCAAGAAAGTCCTCTCCCCGAGAGGGACAAAGGGCATTGTAGGAAGGGCAAAAAGGATCCCATAG
TTGGAGATGCCTGAGCGGATCCAGACTTTGCAGGTAACATTGTGTGTATGTGTGTGTGTGTGTGTGTGTAATTTCCACGGAGGTGTAGCAGTAG
CAAGCCGTATCAGAGGCAGTACAGACACTACTGTCAAGATAGGCAACAGGTCACATCCATACCCTCTCTCCTGACACCAATTACAAACCTAGGG
ATCCCTGAGGCCACCCTCACATTTAAGAACTCACTGGGATCTCTGTCACTCCCAGTCACAGGTAAAAGCAACTCAGGAAAGGGTCAAGTGGGCA
AGACCAGGAGGCGTCCCAGGGAACTGTCTGCCGTCTCCTGCAGATGGAGTCCCAGCTGGTGCTCACTGCTCTCCAAATGTGCCAACTCACACGG
AGCACCATCCGCTGCCTCAGGTGCTACCTAAAGCGCATATTGGGGTTCCATACTTGCTGCCTGTGAGGTCAACACCAGTCCTTCAGATAGTCTA
AGGCCCAGCTTCGTAAGCTTGGCTCAAAGCTGGTAACCATGGCAATCTCGTTGATTTACACTGTAAGGCCAACTCTCTAAATGAAGATCCGCTC
CTAGAACAGCACTTTGTGGAAGCTAAGGGCAAAGGCCAGACCTCCTTGTAGACAAGGTTAAGAACTTTACTTGAATGTAGATAAATTCAACTTC
TGGCCTGCATTAGGCTGCAGAGGCCATTCTTCAGGACTGAAACCCCCCAGGACATGGTCCTCAGCTGCACAGACTGTAGAAGGAAGCCCAGGGG
ACTGGCTGCCTGCTTGCATGCTGTAGTCACCTGTCATACCCTGATGGCATGTTGAACACCAGCTGGGGGACAGCGTCCTGGAAAGGGACAGGGT
GGACAAGCCAAGGCCAGGCCTGACCCCAGGGCAGCATTGATTCCAGAAAGGAAGTTAGCAAAGTTGCCATTAGGTATTGAGCTCTATGATGGAA
GCAAAAAGCCAAGTTCAAAACAATGTGGAAGGAAGAACCTACCTTTGAATAGGAGTAGAGGAAGTGACCACCTGGTGGAGGATGTGGTTCCGTT
GGCAGAGTGCTTAGTGTCTAGCATGCAGGAAGCCCACAGCCCTGGGAGATAGAGGTAGGAAGATCAGAAGTTCAAACTCATCCTTGGCTACCTA
ATAGTGAGTTTGAGGGAAGCCCGGGCTACGTGAGATGCAGAGATGCAGTGTCAAAACAAAAAACAAAACAAAACAAAACAACAACAACAACAAC
AACAACAACAAAAACCCAAAAACAACCTTTAGTCCTAGCACCCAGGAAGCAGATATAGATGGGTCTCTTTGGGTTCAAGGCCAGCCTGGTCTAC
ACTGTGAATTCTATAACAGCTAGGGCTACATAGTGAGACTATGTCTAAAAACAACAAAATTCCCCCAAAAAACAAGAATCAAGTAATGCTTGTT
CAAGTCTTCTTTGTTTTTGTTTGTTTGCTTGTTTGTTTTTTGTTTTGTTTTGTTTTTGTTTTTCAAGACAGGGTTTCTCTGTGTAGCCCTGGCT
GTCCTGGAACTCACTTTGTAGACCAGGCTGGCCTCGAACTCAGAAATCTGCCTGCCTCTGCCTCCCAAGTGTTGGGAGTGCACCACCATGCCCA
GCACTTGTTCAAGTCTTAAGGAGTTGGGTTGTTAAGTCAAAGGACAGAGGCAGGTACAGCTTTGCCCCTAGGGCAAACCCCATGCATCTGTTCA
CTTGTGTAGCCTGAGGAGACAATGCTATCTCTTGCAGTAGTATGGTATCTTAGCCAATGATCGATTGATCGATCTCTCTCTCTCTCAAATACAC
ACACACACACACACACACACACACACACACACACACACACACACATATGCGTGCTGAGCAGAGAAACTCTGGCTTCTTTCCCACTTAAGGTCTC
CGGTAGGAAGGCAGCCTCTGACAATTTCACTTTCCACACTCCAGCCCAAATTGGAGAGCCTCACAGCTGCCAGGGCAGGCAGATAAGTTTGCCA
CCCAATAGCAGAAACGACCGCACTTACTCCAAACCCTAATCATTCCAGTGCAGCAAATGGAGAAAGAGCCTCTCTCTTTATTAAGATTTTTTTT
AACTTATTTTTATTTTTTGAATGTAGCCCTGGCTGTCCTGGAACTCACTATGTAGTCCAGGCTGGCCTCAAACTCACAGAGATCCTCCTGCCTC
TGCCTCCTGAGTGCTGGGAATATAGGCGTGCACCACCACGCCCAGCTAAGAAGAGATTCTAAAATACAAGTGTGTGTCTGTGTGTCTATGCCCA
TGAGTGTAGTGCCTGCTGAATCTGAAGACTGAAGCTCGAGATACAGGGACATGGGTCACGGGTGGTGGAATGCTGACGAGGGTCTTCTAGAAGA
GCAGAAAAGGGGGCTGGTGAGATGGCTCAGTGGGTTAGAGCACCCGACTGCTCTTCCGAAGGTCCAGAGTTCAAATCCCAGCAACCACATGGTG
GCTCACAACCATCCGTAACAAGATCTGACCCCCTCTTCTGGAGTGTCTGAAGACAGCTACAATGTACTTACATATAATAAATAAATAAATAAAT
AAATAAATAAATAAATAAATAAATAAATAAAAAAGAAAAAAAAAAAAAAAAGAAGAGCAGAAAAGGTACTTAACTGGTACCTTCAGCCTCCTGT
CCCGGATTTGAGACAGGGTCTCACTCTGTAGCACAGGCTGGCCCACATCCATAGAGGCAGGGAGAGCAATGGGGTTCCAGGGGCAGAGGAAAAG
GCACAGGGAGGCATCTGATGATACAAAGTTTCAGCTACACATGTTACATAATTTCCAGAGCTGTACCTGCTGAAGCGTCCATGGCTAACAGTCC
CGGGACAGGGATGGCTGCTGTCCTGTCTATTTGATGGAGTTTACAATTTGTAAACCTGGGCATGCCGGTGAGGGAGTTTCTAGAGTGGGTTGAT
TAAGGAGGGAAGCCCCGTCCTAATGCTGGGTGGCATCTGCTCAGGGGCTTAGCCTACATAAAAAGGAGAAAGTGGGCTGAGCCACCAACATTCA
TCTCTCCCTTCTTGCTGACTGCGAATGCCCTGTGACCCACTGCATCATGTGGCTCTTGTCATGTCTTTCCTGTTATGATGGCCTGCCTTCTCAA
CTCCCAAGCCAAAATAACCCTGTCCTTCCTTGAGTTGCTTTCGTCAGACACTGTGTTTCAGTAAGAACAGTCACTCATACAATGGTGGATTGTA
AGTTTAAGTTAGATGTGAAGACAGATTTTTTTTTCCCTTTGGTTTTGTTTTGTTTTGTTGGTTTTGAAAGACAAAGTTTCTGTGTGTAGCCCTG
GAACTTACTCTGTAGACCCGGCTGGCCTGGAACTCAGAGTTCTGCCTGCTTCTGCCTCCTGAGTGCTGGGATTAAAGGAGTATGCCACCACTGC
CCTGCTTGCTTTGGTTTTCTGAGACAGGGCCTTGCTCTGCAGCTCTAGGCTGGTTTTAAACATAAAATCTTGTAGCTTCCCTCATGCACACACA
CACTGCCACTAATATAACTAATTATAATTATATAATAATTTTTTAAAGTTTCTGAAAGCAGATGGTAGACAAGATGGCTCAGAAGTTAAAAGCA
TTTGCTGCTCTTATAGAGGACTATGGTTCAGTTCCCAGCACTCACGGGGAGGCACACAATGATCCTTAACTCGTTTCAGGGGATCTCGCGCCCT
CTTCTGGCCTCCATGGACAATGCATGCACATGGTACACAATCATCTATGCAGGCAAAACACTTATCACATAAAATAAAAATAACATATAAATCT
CCTTTTAAAAAGTCAGGAGAGGGGCTGGAGAGATGGCTCAGAGGTTAAGAGCACCGACTGCTCTTTCAGAGGTCCTGAGTTCAATTCCCAGCAG
CCACATGGTGACTTAAAACCATCTGTAATGGGATCCGATGCCCTCTTCTGGTGTGTCTTTAGACAGCTACAGTGTGCTCATATACATTAAACAA
ACAAACAAATAAACAAACAAATAAATCTTTAAAAAAAAGAAAGCCAGGAGAGATTGGTTAGTGGGTAGAGATGCTTACTATGGGGGCCTAACTA
GTCTTTGGAACCTACAGAGGGAAACTGACTCCATACGATCTTCTCCAACTGTAGCCCCCTCCCCTAATATTAATTAAAGCAATTGTTTTTCAAA
AGATTTCTTTAGTTTTATGTTATGTGTATGAGTGCTTGCCTGCATGTATGTAGATGTACCACATACTTGCCTGGTACCCTCAGAGGCCAGAAGA
GTGTTAGATTACCTGGAGCTGAAATTACAGGTGTTTATGAGCCAATATATGGGTGCTGGGTCCTCTGCAAGAGCGGCCAGGGTTCTTAATGGCT
GAGCAATCTTTCTTTCTTGTCCCTAAGATCAGTCATTACAAGGGAATGTAGGGATGTGGTTGGCATCTGTACAGCTTGTTGATGGAGATAGATG
GTTTCCTGGGTATTTGTATCTAATGTCATGGAAATCTATGTATTAAACATGTATAGTTTTTTTTATATGCCAACCACACTTCAGGAAAACAATT
TATTCTTATTTTGTATTATTTATGTATATACATGTGTGTGTGTAGGGGTTGTGAATGTGTGCCACATGGGTACAGATACCTACAGAGACCAGAA
GAGGGCGATAGATCCTCTCCAGCTGGATAACAGGTGGGTGTGAGCTGCCTGAAGTGTGTGTGTGTGTGTGTGTGTGTGTGTGTGTATAACTGAA
CTCAGGTCCTCTGGTAGAGCAGGAAGTGCTCTTAACTACTGAGCCATCTTCAGCCCCAAGAAAATAGATTAAAAAAAAAAACTCTTTAATCCCA
GCATTTGGGAGGCAGAGGCAGGAGAATTTCTGAGTTCGAGGACAGCCTGGTCTACAGAGTGAGTTCCAGGACAGCCAGGGCTACACAGAGAAGC
CCTGTCTCAGAAAACCAAAAACTAATCAAACCAAACCAAAACCAAAACAAAAAAAACCCTGCTAGCCTCGAATCCTAGGACTCAGGAGGTAGAG
GCAGGAGGATTTCTATGAGTTGAGGCCAGCTTGGTCTGTCAATATAGTGAGTTCCAGGCAACCAGGAGTATATAGAGAAACCCTGTCTCAAGAA
ACCAAAGTGGGTGGAGATATACCTTTGTGGTTAAGAGCACTGATTGCTCTTGCCAAGGACCTGGGTTCAATCCCTAACATCCATATGTTGGTTC
ATAATTTTTAACACATGCATGATAGTTCACAACCATCCAGAGCTCTAAGGGATCCAACGCCTTCTTCTGACCTGCAGGGGCATCAGGCATGCAT
GTTGCACACAGACATATAAAGGCAACATCCTTAGTGTAAAAGAAGTAAGTCTTTTTAAAAAAATAATCTTTGCTGGGGATGATGGTACATACCC
ATAATCTTAACAGTTAGGAGGTTGAGGCAGGAGGATCACGAGGAGTTAGTCAACTTCAGCAACATACCAAGACTATGCCTTAGAGATTGAATAT
ACTCACAGGGCCCCAAGTATAGGATGGGCATCGCTCGCCCTTGTTGGGCCTGCTATAACTTGCCAGCAGTCAGTACTGTGGTTACAATAATGTG
GATAGCGTTATAATTGCTCCCATTAATATTATGAATGAAGATTTCCTCAGAGGAAGCCTCTGAGACACTTTAGCAGGCTGAAGATGATGGGGGT
GGGTCAGGACCTAGGGCCATTTTATTCCCTCAATCCCCAGGACTCACATGGAAAAGGGAAAGAACGGATCCCTGCAAGCTGTTTTTTAACCTGT
GCATGAAAGTATAACGTAAAAACAAAATTCTAGGCCTTTAGGCCCAGGCTTGGGAATGTGACCTCTGTGACTTAATGCTCCAAGGTATGCTAAT
CATAAAACAGATAGCGACATTCCTCCACCCGCCAGCTTCCTGGGTTCAAAGAGTGTTCATTCACAGAAAGTCACCCTGACCATTGCTGGAACCC
GCTATGCAAATGTGCTATTGTTAGGGGCTCTTAGAAACTGTCTTGAGAGATAACAGGAATAATTACCAGGTATTCCTTGTGACTCTTGTGACTT
TGTACTTCCTTGGGACTCTTAACTGGTATCTTTGGTATTTTCCAACAAAGCCCTCCCCACTTCCTTGAGTTGTGGTTTCTTCCTTTAAATACCC
CCTTACCCAGCTACTTGGGGTGCCACGGTCCTCTACCCCTGCGTGGTGTATGACCGTGGGCCCGAGAGAGCGCTCTTGAATGAGTCCTCTTGCA
GTTTGCAGCAAGACCGTTTCTTGTGTGATTTGGGGTGTCGCCTCTCCTGAGTCAGAACGTGGGGGAGTCCTCACGTTGTGGGTCTTTCATGCAC
ACATAAACAAAAACTTAAAATATAATTTTTTAAAAGAAGACCTAGTATAAGAAAGAACTTCCCTAAGGTGAAGAAAAAAAATACTTTTTTTTTT
TTTTTTTTGAGACAGGGTTTCATGTAACCTAGGCTGGGTTTGAGGTCATTATGTAGCCAAGGATACAGTAAACTTCTGATCCAGCCTCTGAAAT
AAAATAGTCTCACACGCATAGACCATTTCATTATTAAGAGAAAACTGCATCCCCTCTGGATGGTTTACTTTGTTCTGTGCAAAGGAAGACTGCA
ACTGATTTTGCACCTAAAAGAAAATACAATGTAAATAAATTAGGCAAAAAGAAAGAAAGAAAGAAAGAAAGAAAGAAAGAAAGAAAGAAAGAAG
GAAAGAAAGAAAGGAAGAAAGAAAGAAAGAAAGAAAGAAAGAAAGAAAGAAGGAAAGCAAGCAAGCAAGCAACCCATTACTCAGGTAGCTGGCA
AACAGCAGGAGGGCCAGATGCAGGTGCACACTAGCTGCACAGCTAATCTTAACCCTAGCGTCAGTTTTAGTCCTATTTTCACAGCTAGAGAACT
CCAGGGTCTCAGTGATTCCTCCCCAGAGTCAGGGGAAAGAGAGCAGGAGGACTCTGTCACTTGTCAGCTCCAACTCCAACGAAGCCTGTGCATG
AGACAAAAGTGAAATAGGGTCACTTATCCCAACAGACCTATGGTCAGGACAAAAGTGACATAGGGTCACTTACCCCCAACAGGACTATGGTCAG
GACTGGCCCATCCCCACAAGTCAACAAGACATCTCTGGACTCACATGGAACTGAAGTAGCTCTGGGGACCCCAAACTCAGGAGGGGGATCCATG
AGGAAATGAGCTCAAAGCGTCTTGCAACTGCACAGTGTTCTGCTTGCTTTTCTGGGCCAACAGAGATGCAAGCCTGCCGGAGGAGTTGGCAGAC
TCAGGACATCCTGCTGTTTCCCTAAAGCTTCTGGATTTCTTAATTTGAATCTGCAAGTAAGAACCCGACTGGCCAGGCTTGGATCAGGTTTTCT
GTCTCAGGCCAATCAGCTTTGGCAGACTCCGTAGAGGGGAGGCTGGGCAGAGTCCAGTTTAAAAAAAAAAAAAAAAAGGTGACTTGCTTTTCCC
CTCCCTGCAGGCTGTGACTGGGAAGAAAGATCAATGAATAACATTTCTGGTGCACTTGGATTTCAATCCCAGGGGCTCCCAGGTCTCCTCCCTA
TTCTGGCTGATTTTCTTTGCCTTTCTTGTGTGGCTAATTCTTTGGATTTAAAACCTTCCCTTCTGGAAGGAAAGAGATTCATAAAAGTCAGGTT
CAGTCCTCAGCACTAGAAAGTTAAAAACAAACAAACAAACAAACAAACAAAACCCAAAACATACATGGCTTGGGAAGTCCAGCTATCGGACTCA
CGAGGTCCCTCTAGTCAACAGTTGCTGGAGAGGGAACTCTTGAGCTGCTGATAAGTCATGCATTGGTCCAGGGATGCATGCAGGTTTGTTAGTT
GGGGGCCTTTGGGGTGATCTTTTTAGTTACCTTGAGTTACCTTGTAAATAAATTAAACACTTTCCCTGGTTTGCCGACGTAGACTTTGGGTGGA
ATTCTTTAATCTGTCATCTGTGCCTTCTCTACCGCAAATAGCTGTCTGTCTCCCCAGCAAAAGTGACACAAGCCACTCGCTGAGTTTTAGGTAA
GTGCCTTACCAGTCCTCTGCATCTCCATTCATTTTAAATTAAAACCAAGACTCCCAGGGCGCTGAACGGAGGTGGCGCACACCGCCTTTAATCC
CAGCACTTGGGAGGCAGAGGCAGGCGGATTTCTGAGTTCGAGGCCGGCCTGGTCTACAGTGTTAGTTCCAGGACAGCCAAGGCTATACAGAGAA
ACCCTGTCTCGGGAAAAAACAAACAAACAAACAAACAAAAAACAAAAACAAAAAAAAAACCCAAAAAATAAAACAAAACAAAAAAAAAAACCAA
GAAAGACTCTCAGGGCGAAGTTCCGAGAAGCCAGACTTTCTGCCCACCCACGACACACAGCCCTGGGCATCAGGGCTCTGGGTCAAGTGTTAAG
ATTCTTGGAGACAAATCTTGTTGTCCCAGGTCTTGTCCTTCCGACTCTGCCTCCCTGTACGCCCCTGTGACTCAGCAGCTTTCCCTGCCTGGCT
TTAACTCCGGGAATGGGCTGGGTGTTTGTTGCCGGGTAGATAGAGCTGCAGACTTGGGAACAGGTTCTTTCTAATGCAAAGCAAGCCCTGTACC
ACGGAGCTATCTGTTTGCCCACATTCTATTTCGAAGGGCTTTCCCTCATAGTCTTAACTAGATATGGGCTTAGGCCCCCTTACATTCCCTCTCC
TCGGCCTCTCTCTCTCTTGGTTCCCTTCCTTTAGCCCACGGAACAGCATTTTCAATCTAGAGTGGCTGCGGATGCCCAGCTGTCTTGTTCAGCT
ACAGCAGGTTGTGAGCAACCACCTGGCGTCTCCTCTACTGGACCCCAAATGCCTGAATTCTCCTCGGACGTCTGTTAGTAGAAGGCAAAGGGTG
TGAAGTCTTCACTCACATGTGATTTCACAAACTCTCCAAACCTGATTTGGTTAGTCTTGGTGTGGCACGCTCAACAGGGCAGGAGGCCACGTGC
TGAGACCAGGCTGGGAAAAAGTGTCCGCCCTCTCTACACTGCAGGAAAGCAGACATCCAGAACCCGCGTGACCTCACGTAGCGAGACTCCGCAG
TCTCACAAACCCACTTTGTCTTTTTTAATTTCTTAAATGCTTGGGAAATGGCGGAAAGAGGCTTTGACACTAGGGAAGATTGCACGCAACTTTA
CAGTGCGGAGCCGGCTCTCGGGAGAGTTTAATTTGCAACTGACTCGCTGACGCACGCGGGCGTGTCGCAGGCTCCGGAAATCAAGGTTGGAGCA
GAGGGGACAGTAGCCGCTCTGACCTATACAGCGCCACTTCCAGAGCCCAGTGTCCCCACTGGGCCTCCGAGTGACTTGCAGCCTCGGCGACTCC
GGCGACACTATCCGCTGAGGTCCCTAGGCCACCGCTCTGTGTGCCGGAAGCTCCCCTCCCCCTCTTCCCAAATGCTTCCAGCAGCCTGGAGGCT
GCAACAGTGACCCGCGTGTCCCCGCGCACGCACACACCTCACGCACGTCAGACCCACGCCTCCCTATCGCCCCGTGCCAGAGTGCACGCAGGCC
TTTACGCGCGGCCACACATGATCACAGAGCCGCAGAGGGCGAGAGCGCGGCTCGCGAGTGGGAAGAAGACCCCGAGACTGGTCTGGGCGCTGTC
CGGGGTGGAGCCGAGGGCGGAGCTTCGGGGTCCGGCGCGCAGAGCTGGGGCGTGTCCGCGCCGCCGCGATCTGCGCCGCTCCGCCCTCGGCCCG
TTCGCTGCGCTCCCAGCCTCCTCGCCGCAACCCCCGCCGTAGCTGCCGCTGCTCCCGCCGTCACCGCCTCCGAGGTAGGCGCAGCGGAGAGGGC
CTGGGCTATGCCTGAGTCCCCAGGGCCTCGGGTCGCGCTCCTGGGAAGTCTCCAGGGAGGCGATCGAGGGAGGTTCGGGCGAGGGCGCTGGGCC
TAAGCGCTTGGCCCCGGGAAGGGTGAACCAGGGACGATCATTGCGGGCCTGGAGGGGCAGCGGGCTTGTAGAGGAGGCCTGGAGGGCGGGCGCA
GAGCGGATCTCCCAGATTCTAGCTCGAGCGTTCAGAGCACCTGCATTTGGAAGCCAGGGGCGGTTCGAACATGCGAGGAGCGGAAGGGCAAGGG
CGGCCGCGTGGAGGCCCGGCGGGCCGCGGGTCTAGGTGACCTTCCCGGCGGCGCCCTCTGGCTCTAGATCCCGTCGGTGTGGATCTGGTAGAGA
CCCTCCCACGGCCCAAGCCCTTCCCCACCAGCTCCAAGGGCCTGTGCAGACCCAGCTTCCTCCGCCGAGAGGACGAACTCCAGGCACGGCCATG
CCCTGGATCCCCCAGCCCCTACACGCCCTAGCCGGCCCACGCCCGGAGTAGGTGGCGCCGGGTCCCTCCCGCGCATGCCAGTGTCTTCCCGGGC
GGAACGGGCTGCCCTGAGTGGACTTAGGCCGCAGGAACAGGGACCTGGGCCTGGACTGAGAGCGAGACCCCATAGGGAGCCATACGCTTGGCCT
CCTTGGCCTCGGGGACGGAGTCCGTGTTCTGTGTCGCCAAATGCAACTGTGCATTCTGGAAACTGTTTTCAGGGCCTGACATCAGATTGGAGGC
CCGCAACTCTACACGGTTTGTCCAAGGTCACACTGGTAGGAAGATTTAAAACTTCAATCTTCTCATCTGCGAAATAGGAGCAATTATATACACT
TCACTGAGTTTGGGGGAAAGAATAAAATGATCCGATTAACACGAAGCCTTGGGGCATGCACAAGGACACCTTAGAAACCTTGACATTTGCCTAG
GAGACCTAGGAGCTTTTGGGGAGGGTTGAACTCATCCTCCACAGACTTTTATTTTATTTTATTTTTTATTCCACATGGTGTACAGGAAGGGACT
CCATGAATATACAGGCGTATTATTTTAATGCCATTATTACTAATGTCAGAAGCAAGCATTTGTGCAGCACCAGGTATTGAGTCATTGGAGAATA
ATTCACGAGACACTGTCAGTTTGCAGATTGACAGCTGTCAGGCTGGAGCACTAAATCTGACTGCAGACCCAGAATGCAGGAAGAGTGTGGGCTT
AGCTCAGGTGTGTGCTGTCCAAAACTTCTCTTTCCTTGACCAGAGATATGGGTGAGGGGCTTAACTCCGGCTTGTTTACTAGCAAGCCAGGCAT
AACTGCGGAGGGCCTGCCTGCTTTTCTCGGGACTGACAAAACTGAAGGGCCAAACTCAGGCTTGTCTTCAGGGACTTGGGTGGGACCACTTGGC
ACACATTAGGTGGTTAAGAAAGGTCTGTGGGGTAAATTCATTTTTAAAAAATGTCTATTTAATGTGTGCATGCTTGTGCCTATGTGAGTTTATG
TACATACATGCAGGTGTGAGATGCCTCATGTGGGTCTGGGAATCGAACCTGGGTCTTCTGCAAAAGCAGTAAGCACTTTTTTGTTTGTTTTGTT
TTTGTTTTGTTTTGTTTTTTTGAGACAGGGCTTCTCTGTATAGCCCTGGCTGTCAGCAGTAAGCACTCTTTTTTTTTTTTTTTTTTTTTTTAAG
ATTTATTTATTATTTTATGTAAGTACACTGTAGCTGTCTTCAGACACTCCAGAAGAGGGCGTCAGATCTCATTATGGATGGCTATGAGCCACCA
TGTGGTTGCTGGGATTTGAATTCAGGACCTTCAGAAGAGCAGTCAGTGCTCTTAACCATTGAGCCATCTCTCCAGCCACAGCAGTAAGCACTTG
TAACCCCTGAGCTCTCTCTCCATTTTTTTTTCTTTCATACCACTCTTAACTACCCAGGCATGGTAGGTGCACATTCAATCGTGGAATCTTAAAA
CAGCCATTAGATGACCTAGACAGCTCACTCACTTCTAGAAGCTATCCTGTCCTAGCCGAGTCATAGATGTCATAAGAGCTGTAATCGTACATAC
TCACCTACAGCAGTAGTCATGAGAGATGAGAAACAGCTCCTTTAGCATTCTACAACTTCCCAAGTCCTGGGGGAACTTGTCCAACTGGTGTTTC
TGGGCTTAAAGCTAGAGAGTGATATGGGTAGATGGGATTCTGGCCAAAGCTGTGGGGCCTGTAGCTTCTTCCCTTTCTGACAGGTGTGGGGGTA
TGACAGCTCGAGTAAGGTGCCAGTCCCCACTTGTAGTAGCTCACAGCTGATTCGCTTTATTTCTGGTTTCTAGAATGAGGCTTTGGACAGGGGC
TGTCTGGGGCCATGCGGTCCTCATGCTGGACCTGAGCCCCTAGGATTCCGGAAAGGTTGTACTGTCGTTGTAGCTTTGCGCTTTCCCCAGGTTC
CTTCGGTACCTGAAAGGATGGCAGAGGCATGCTTAGCTAGACCTGGFGTGTGGGTCTCAATCCCGCAGTTAAGTCACAGCATGTGAGCATTTAC
CTAGGGCTGAGCTAGAAAAAGCTCCAGAGGGCAGCCTGGGCTCTCAGTTCTGATCTGACAAGAGCCACAGAGTCTAGCTCAGGTGAAATAGCTT
TCTCGTGTCTTAGTTCCTCTGTTATAATGTGGTGGATTGATTGATTGATTGATTGATTGATTTTGGCTTCTGTTTTTAAAAAAATTAATTGTTT
GGAGGTGGCTAGCACATGTGGAGGTCAGAGGTCAACTTCTGGTCTTCCTGTCTCCACTCAGGCCTTGGGATCACCTGGGTCTGCAGTAGAACTG
TGACTGTCAGTGCTGGCCATTCTGGTGTTCTGCGGCCCTGCTGTGTATACTTGGTGCTTGGGCACCAGTCCTCCGCTAGTATCCCCACACTGCA
CTGCTGCTGTGTTCTGAGGAACCCATAGGTGTGAGTGCCTCTGCACAGCAGAAGTTACCAACTGGTTGGGAAAGGAGAGAGGTAGCTGCTGTGG
GCCATCTGTAGTGGACGGTGCTCATAGAAATCATTTGCCCTGGGGTGAGATAGGAGGTGTCCTTCCGGGACCTGGCCAGACAGTATCCGGCTAA
ACAATACCTCTCTATGGGTGGGAAGGACTCTGGACCCCGTGGTTCAGGGTGAGCTTCTGACAAGATGCTCAGAAACCATTATTATAATAGTAGA
TATACAAGACCAGAGCTTGGTTAGATTCCCTAGCCATAAATATAGCAATGGAAACTGTCTATTGGACTGGCTTGTGTGGGACTTAGTAGAATGC
TAGCCCAGCATGCAGAAAGCCCTGGATTCTTCCTTCAACACTGCAGAAACTCAGTATGGTGGGGCACACACTCAGAGGTGGAGGCAGGAGGATC
AAGTTCAAGGTCATCCTCCGTGACATAGTGAGTTTGAGACTCACTGTGGGCTACATTAGATCCTGTTTCAAAGCCAAACCAAACTGGCTGGTGG
TGCACACCTTTAATCCTGGTACTTGGCGGGGTGGGGCAAGGGGGAGGGCACAGAAGGCAGACAGATCTCTGTGAGTTTGAGACCAGCCTGGTCT
ACAGAGTTTCAGGACAGCCAGGGCTACACAGAGAAACCCTGTCTTGAAAAACGAAGAACCAACCAACCAAAGAAACCAAACTTATTATTTATTT
GTCTGCTCATCTCAGATGATAAGTTGACCTGTCATCTGTCATCTTAATAGAATTCTACTTGTGTTTGTTTCATGGCTTCTGCATGTACCAGCCG
CAGGGATGTATACCAAGGGGAATTGGGTCAGAGAGACTGACTTTGGGGTCTTTTACTTAGAAAGGGAGTAGGATATAGACCCATATGTCCTTGA
TTCCCAAGGCTGAGCACTTAAAAAAAGCGCTGACTGTGTCAACCCCCTATGCCTTGTGGTGCCTGGGCTATCCTGGAGCCCTGGTGTACCTGGC
TGGACCCTAGACCCTGGAGTGCTGCTGGCTGCCTGCATGGCCTTCTCTCCACAGGTGGGTGAGGGAGAGAAGGCACGTTGCCTTGAGTCAACCA
CAGCCTCCCCAGCCTTATAGAAGGCTGTGCTGCTGCTGGTGGCCCAGCTTCCAGAGGGTTTTAAAATAGAAGCAGAGCCTGGAAAGCCAGACTG
TCCCCCTGTGACACTCTGTGGAGGGGGAGGGGAAGGCAGCTGCTTTGGGAACTCAGCCTGCTTCCAGAGCAGAGGCCACTGCCTTGCCAGATGT
GTGTGTGTCTGTGTGTGCCTGTGTTTATGTCTGTCTGTGGTGCAGGGAAGCTCCTGAACTGAGCCTGCTTTCTGCTGAGAGGTTGATTTTTGCC
CCTGGTCCCTAGCGTTGGAGAAGTGGTTGATTTTGCTGTAATCTATCATGACCTCTTTTTTATTTGTTATTTTAATTTTTAGATATATTTATTC
ATTTTATGTATATGAGTACAGTGTAGCTGCCTTTAGACGTACCAGAAGAGGGAATTGTATACATTACAAATGGTTGTGAGCCACCATGTGGTTG
CTGGGAGTTGAACTCAGGACCTCTGGAAGAGCAGTCACTGCTCTTAACCTCTGAGCCATCCCTCCAGCCCCCAACCTCTTGATTTCTTTATATG
TATAAGGGTTTTCCCTGTACATATGTATGCATATCATGCTCATGTAGTACCCACAGAGTCCAGAAGAAAGCGTCCATCAGATCCCCTTTAACTG
GAGTTAGAGAATATTTTGAGCCCCTGTGTGGATACAGGGAAGCAAACCTGGGTCCTCTGCAAAAGCAGCCAGTGCTCTTAATGGCTCAACCGTC
TCTCCATTCCCTTGATACCTCTTTTGTTTGTGGGTCAATTTTTTGCCCTGGCAAACCATCCAAAACTGTTGGAGAAAGAGCAGAGCCAAAAGTT
TTCCCATGATTCCCTAACCTGGGATGGTGATGGTAACATTTGGTGGCTTTGGCTCCTGACAGTAGCTATGTACTGTTAACCGGTTATTCATGCA
GCGTAATAAGGAAGTCACTTGCGGGTGTACTTGAGAAAGGGTGGGCTCTGGGTCACACCCAGGGGCTCTTCTGCCAAGTTGATGACTCCTCCAT
CATCATCTGTAGTTCCCTGGATGGTCTGAGAGATGCCACCGTAGGTGGCTCCTGATTTTTGGGAAGCTGATCTTGTTTCCCCTTTGCTTTTGGA
GATGGGGGTCTGAGCTCACTGCGTGTTTCCAGTGTTGAGGAGACTCTACTTCCTGGTTAGGCGTGAGACCTGTGTTAGCCTGTGTTAGCTTGGG
CTTCTGGTGGGTGCACAGTGCCGAGTGAGGCTAGTCTTTTTTTGTAGTCCATTGCCACCCTCCCTCAGGCTGCTTGATAGCTGCCCTGGCAGTT
TTTATACACATTGAAGATAAGGAGCTTTGCCCTGTTCTTTGCCTTCTGGGCGGAGTGGCCCAGATGTTGGTGGCTGCTCGGGAGAGGAATATGC
CCCCATAGGCCTTGCCCAGTGATAGGGCTACTGTCTCAGTTTGAATCAGTCCTTAGAACCAGTATGAACACTGTCCAGACAACTTTTCCTTCCT
GTATCTTAAAATATTACTCTTATGTCAATGGGTGTTTTGTCTGCTTGTGTGTATATATACTATACCATGTGCATGTCTGGTGTCCTCAAAGGGG
ATTGAACCTCCAGGAACAGGAGTTACAGATGGTTGTCAGCCACCACATAGGTACTGGGAATTGAACCCTGGCCCTCTGGAAAAGCAGCTATTGC
TTTAAACCAACTACCATTTCTCCAGTTCTTTCTCTTAAAAAATACTTTATGTGTACGTATGTGTACTACATGTGTGCAGTGCCCGAGAAGCCAG
AGGAGTGCGTTGCAGCTCCTGGAGCTGGAAACCCAACCCTGATCCTGAGAAGAGTGGGCAGTGCCCTTAGCCTCGGAGCCATCTCTCCAGCCCT
TTGGTGTCTTGACTGTGATGACATGTTGGAAGGTTGCTGACTTCCAATGTTTTCTGCTCTTCACAACACTATTTCAATAATGAAGTAGAATAAA
AAATGGAAACCACATCTGAATTCCGCATCTACTTTTCCCAAACCACATTTCTCCCTGAGGCAGCCATCCTGCCCAGATGGGGCCCCTCTTTCCT
GATTTCTCCCACTCACTCACAAGTTCCTGAATTGATAAAGGACCCACTAATTATGCAGAATTAGAAATTTCCCTGGCATGTTCTTTTCTTTTCT
CTCCTTTTCTTTTCTTTCTTTTTAAAAATATTTATTTTTACTTTTTTAAAAAAAATTAGGTACTTTCTTCATTCACATCTCCAGTGCTATCCCA
AAAGTCCCCACCCCCACCCTCACCCCCACTTCCCGGCCCTGGCGTTCCCCTGCACTGAGGCATATAAAGTCTGCACGACCAATGGGCCTCTCTT
TCCACTGATGGCCTTATGTTCACTTTTTGAGGCAGTGTCTCATTATGCAGCTCTGGCTGGCCTTGAACTCAGAGATCTGCCCGCCTCTGCCTCA
TGGGAGTTGGGGTTTTAAAGGCCCGCACCACAACACCCAGCTTGGCTTTCTCTTTTCATTAGGTGGTACATAATGTTCTATGTTCTCACATATA
AATTCACCACTGTTAATTAATTGTGTTGAGATAGACTCAAAACCCAGGCTATTCGTCCCCTGTATGACCAACAATAACCTTGAACTTTTGGTCC
TCCAGCCTCATCCTAAGCGCTGGAATTACAAGTTTTCTGCCCCCGTATCCATCTCCCCTCATTGCTTTTTGATGACTCTTTGGTGATCCTTAAT
TTGTTACTATCGTACTTTTTTTGGTTATGTCATTTTTCTAATGATGGGCATATTGGTCACATCTAGGTTTGTGTGACACAGGCAATGGGGTAGA
GAATATGTTCTGTAGGTATTTTGGTGCCTAGAACACTTAGTGCGTGGGGTTCCTGGAGTAAGATTAATGCTGAGTTAATTGTTTATCAATTATT
CTCTAAAAAAAGTGGACTGTATTCACATTCCGTTTCCTGACATTTTTCCATTCTTGGGGTCGTCAGTGTACAGCAGCTCCTGGAATAAAACCCA
TAGCTGGTTTTAAGGCCTGAAGCACCCAGGATACCCCCTGAGAGGTCCCTCACCCTGGCCTCAGCTCTTTCCTAGGGGGCTTGCTGCTCTGGGG
ACTCCTGGTCTGGTCTGCTCTGCTCCGCGCTGGCTTGCCAGCTGCCTCTGGGGGGGTGGGGGTGGGGGTAGGGGAAGCGCCCACTTCCTGGTTA
CATTGTAATTTACTTGTTCCTATTGTCAGACACCAAGTTTCTACTTTCCTCTTTTTGTTACAATGATACTTTTTCTTTCTTTCTTTCTTTTTTT
TAACTGAGTCGGGCTCTGGCCTGAGTCCTGGTTCATCTAGAACTCACCTTCTGGACTATCCCTGTTTGTTTTTCATCCTTTTTTTTTCTCTCTC
TTAAATTTTATGTATATGAACGTTTTGTATGTGTGTACACCTGTGAGCCACCATGTTGGCTGATTCTAATGAAAGAACAGCAAGTGCTCCTCCC
TCACCTCTGAGTCATCTCTCTAGCTCCTCCTCTCCACTGTTTGTTTTTTTTTTTTTTTTTTTTTTTTGAGACAAGAGTCTTATGTCGCATAGGC
TGGCTTCGAACTCACTATGTAGCCAGTGATGACTTAGAACTTCTGGTCTTCTTGCCTCTCTCTCCTGCAGGCTGGGATTATTGTCATATGCTAC
CAACCCTGGTTTATGCAATGCAGTGATAGTACTCAGGGCTCTGTGCATGCTAAGCAAGCATTATACCAACGGAGACTCATCCCACCCCTTAAGC
TCGTCTCTGGCCTCAGCCTCTGAAACTGCGGCAGCAAAAAGCACGAAGCACACCCGGCTTGCGGTGATGCTTTGGGAGGGCTGATGAGGTAGCT
CAGCAGTTAAAGGCACTTGCTGCCAGGTCTGAAGACACAGTTTCAGTTCTCAGAAGCTATATGGTGGAAGGAGAGAACTAACTCCTAAGGTGTC
CTCTGACCCTCACAGGTGCACCACGGTACACACAGGCTCACTAAATACACGTAATTAAAGATATAAGATGTGTTACTCACTGCATAGTAACTCA
CGAATGCCCATCATGTGCTGGGCCTTGACTTCTTTATAGACATTTGGGTAAACATATGCTTGACGGGCTCCGAGGAGCTTTGAGTTCAGGGGGT
GTATGGTGGGAGGAGGGGTAGAGGGTGGGAGCACGGTGAGTGAGCAGCTGTCACTGCCATGTAGTTGATGAGTCAGGAAGATGTTGTCCTCCCT
AGGCCCCAAGATGGAAGTTACGTAAGTGGGTTGTGTGAACTGCTAGGTGATACACAATCCTTCCCTCTGCTTCCAGTATGGCTGGGTATCCATT
CCTTAGGCTGGAGTGGCGTTTGCATAATTTGTTCAAGGTCAGCCAGGGAAGGCTTGGGTTGGTAGGCTGGCAGACAGGGGGGCAGGGGAGTCGG
GGAGGAGCAGGTGTCCCCCGAGCCCCCCCCCCCCCCATTGAAGGCAGTATGGTGGAATAGAAAGAAAGGGAGCCTCACTGAGCCTGGCCCCTAC
CCTGAGCTCAGAAGTTCCGACTCACTCCCTGGTTGATAATCTCCTTAGAGCTGATGCAGTAGCTGGTGTTTGCTGTGGGTAGTGGTTTTTTTTT
TTTTTTGTTTTTTTTTTTTCCTCTTTTGACAGGTGGCTTTCCATGCTGGGTTTGAGGATTAGTGTCAACAGACTGCATTTGGGGAACACTAAAT
AATGAATGTTCTGTCTTTTCCTCAAGGTGGGATCTGGTCTAGATGCCTGCAGGGTAGGGGCTCTGGGGGGCTGTCTTTTCTGTGAGGTCAGAGA
AGAGTAGCAGGAAAGACCTGGCTTCTGATAGGCTCAGGTAGACACAGGAAGATCAGAAGTTCAAGGCCATTCCTGTCTGCATAGTGAGTTGGAG
GCTCGATTGGGCTACATAGGACCCTGCCTCAAAAGGAAAAAAAAGAGGCAGGTGTGTAGGCACACTTTCAAGGTTAGCTCAGGGGTTAAGTAAG
AGCACTGTATTTTTGTTGTTGTTGTTGTTGTTTGTTTGTTTGTTTTTTTAAACTTGGACCTGCAGTTTTGTTCCCATGACTACCTTTTAACTCC
AGCTCCAGGGGATCTGGTGCCTCCTTCTGGTCTTTACAGGCACCTGCACACAAGTGGCACACACAGATATATATTTATATACACAAAAATAAAA
TGAAATCTTAAATATTGGTTAGAGTGTGTGCATGGGCGCTTTAGTGTTCTTGGATGCTGCAGATGGGCCCGCTCCCCCTCTGATCCTTCCTCTA
GGGGAGAGACAGCTCTGTCTGTAGATGTTTCTTTTTGTTTGCTTTGTTCTGTTAGGGGTTTTCAGGTTTATTTGATTTTATGTGTAGAAGTGTT
TTTGTGTGTGTGCGCGCGCTGGGTCCCCTAGAACTGGAAGTCATGGACAGTTGTGAGCCACTGTGTGGGTGCTGGGAATTGACCCCTGGTCTTC
TACAAGAGCAACAAGAAGTCTTAGCCAGGGAGCCATCTCTCTTGTTTTTGTACTTTCACGGATGGCTCTTAATCCAGCAGAGATGGAGAATGTT
CTGGGCTCTCTGCCAAGATTTTCTTCTGCAGGTCTGCTGGGCTGGGCTGCCTTTCAGCCCAGGATTGCTTGGGGGTGACTTTTCTTAGGGGAAG
GGCTAGGCCCATCTGGCCTGAGGGGGAAGGGGAAGAGGGGAGTCCCCAGCTCTGGAAGAGCGGGTGGGGCAGTATTGGGTATATCTCTGCCCTC
TCTTTTGACCTGACCTTAATGTGGGCTGGTCTGCCTACATTAGGTTCCAGCCTGTTGGTGGGCGAGAGGTAAGAGCCGCAGCAACACAAAGAAG
GCTCGAGCAGTCTCTGAAGATGTGAACCATGGCCTGGGCCGCAGATTCCATTCACAGTGGAGGCTATGGCTGTTTCTTCTGTAGTGTTTATTGG
GTTTGGCCGTAGGCTGTCTTTAGTTATTTACTGAAGGATTGGTTTATTATGTGGAGGTAACTTTTGGGAGTCCCGTTGCATCCTGCAGGTTCCA
GCTGTGCCAGCAGGCACCTTCACCTGCTGGATTACCTTGCAGGTCCTGCTGTGAGCTCTTTGTGGTGTCCTTGATTCAGGTGTTGGTCAGTTGA
TATTGTTTCCCTGGAATCATTTGAAATCTTCAGTGGGCGCCCACTCGCCAGGAATATACCATAGTATATTCGTGTTTGTGAATGGGTACATGTG
TCATGTCAGATGTCGCCTATGCAGATCCAGTTTGATAAATTAGGTGTACAGTTTTTGTTGTTGTTGTTTGTTTCTTCATTTGTCTCCTCACCTC
TGACACAAGGTTTCTTTGCATAACAGACCTGGCTGTCCTGGAATTCACTTTGTAGACCAGGCTGGCCTCAAACTCACAGAGATCCACCTATCTC
TGCCTCTTGAGGAGCTAGGATCAAAGGTGTGTGTCACCCTCACCTGGTAGGTGTGCAGTATTTTAAATGAAGGGAACCAGCTGAGGATGTAGCT
CCACTGGCAGAGTGCCTGCCTGGGGACTTCAAGTCCTAAATTTGATCCCAGCAGTGCAGAAACTACATGTGGTGATGATGCCTGCAATTTCAGC
AGTTGAGGGATGGAGGATTAGAAATTCAAAGTCATCCTTGGCTACATAGAAAGTTCCAGGCCATCCTGGACTACATGAGATCTTGTGTGTGTGT
GTGTGGGGGGGGGTTGTGTGGTGGGAATGGAACCACTCTTCTGGTTAGTCACATTATGGTTCTGGGATGGGACTCTTGTCACTCATGGGTCCTT
CTCTTCAGGACAGAAGTCACAGTGTGTGCTGTCCCAGAGCAAGGTTTAATTTTTTCTACACAGCTTGTCAACATAAAACCTTCCAGGAATATAA
TGTCACAGAGACCATTAGAGTTATTCTCTTTCCCTGACCACTGTGATATTTAACTAATATTTGCTCACTAACTTAATTATGTGTCACAACTAAG
TCCTGCTTCTGACCTCCTAGGGTCCCAGCACCCATGTGTGTGTGTATTCACTCATAGATACGTAAATAAAAGAGATGATAGCACTTTTGATGGA
ACCTGGAGCCTTTCATATGCTAAGCAGATGTGCTACCCTGCACTCTAGTCTCAGCTCCCTGGAGAGTATTTTTTTTTAAGATTTATTTTATTTA
TATGAGTACATTATAGCTGTCTTCAGACACACCAGAAGAGGGCATCAGATCCCATTACAGATGGTTGTGAGCTGCCATGTTGGTTTGCTGGGAA
TTGAACTCAGGACCTCTGGAAGAGCAGTCAGTGCTCTTAACCGCTGAGCCATCTCTGCAGCCCCCAAGTAGTATTTTATGTGCATTTGGGTGTT
TTGCCTGCATGTGTGAGGCTGTTGGATTCCCTGAAACTGCTGTTGCAGACAATTGAGACCTGTCCTATTTGAGTGCTGGGAATTGAACCCAGCT
CCTGGANNNNNNNNNNNNNNNNNNNNTGGCTCACATACATACATGTGTGAACGTGGTTCACATATATACATGCGGAAACACATAAGGTGAAAAA
GAAGGGGCTGGAGAGATGGCTTGGTGGTTGAGAGTACTGCTGCTCTTCTGGAGGTCCTGGGTTTGATTCCCAGCACCCATGTGGCAGCTGAGGT
TGTCTGTTACCCCAGTTCCAGGACATCCAACACCCTCACACAGATGTGTGCAAAACATCAATGCACATAAAATCAAAAGAAATCATTAAAGAAA
AAGCCAGGCAGTGGTGGCACGTGCCTTTGATCCCAGCACTTGGGTGGGCTTGTGGGAGTGACAGGTGGATATTTGTGAGTTCGAGGCCAGCCTG
GTCTACAGAGCAAGTTCCAGGACAGCTAGGTCTACACAAAGAAACCCTGTCTAAAAACAAAAATCAAATCAAAACAAAACAACAGCCCCCCCAA
CCCAATATTTAAAATTGTTTTGTGTGTGTGTGTGTGTGTGTGTGTGTGTGTGTGTGTGTGTCTGTGCTCGTGCACATATGCACACGTACATGGG
CACATGCATATAGAGGCCAGAGGACAACTTGCTGGGGGAACTATATCATTTTCTCAGGGATTGAACTCAGGGAGCCTGGCTTGGTAACAAGTGG
CAAAAGAGCCACTGAGCCCTCTTGCTGGTCCCTTCTTTTGTATCCTTGTAGTTTGTTTCTTTCTCTCTCTCTCTCTCTCTCTCTCTCCCTCCCT
CCCTCCCTCCCTTCCCTCCCTTCCTTCCTTCCTTCCTTCCTTTCTTTTTTTCTTTTTTTGAGACAGGGTTTCTCTGTGTAGCCCTCGCTTTCCT
GGAAGTCACTCTGTAGACCAGGCTGGCCTCGAACTCAGAAATTCGCCTGCCTCTGCCTCCCAAGTGCTGGGATTAAAGGCGTGTGCCACCAGGC
CCGGCTATGATACCCTTCTTTTGTAGCATGTTGTTGGACTTCATTTCCTGTGAGGAGATACTTAGCTAGCTTGTCATGCTGTAAAGAAAGTTTT
GTGGAGCTGGGCTTGCAGCTCTGATACTTGTTGAAGGAATGAAATCAGAACCATGTGAAAGATACATCGATTGCCATGGGAAGCTTCAATTTAT
CCGTGTGCAGTTACCAGCTGGGCGGCCGGCATTTTGTAATTACTGGCAAGAGTTCTGCGGTTCAGTATAGTGGCTGACTCCTGGGAATATGTCT
TGGATGGTTCATTCATTCATCAAATATTGACTGACTCCTTGTGCTCTGGGTCGGTGCTTGGGCCTGGCGTTGCTACAGTCAAAAGCAATCACTA
AGTGTCCCCAGCTCTAGCCTCAGGGGAAGGGTGAGACAACTCAGGGCACACCCACATCTGGCACACCCACATCTGGATGCCTGAGACTTAGAGC
TGAGTGATTTTTATTGGTTGTTTAATTATATCAAATAAGTTTTATTGGTGGTAAACTAATTTCCATAATTACCTATGTGTTCATTCTTTCTCGT
GCTTTTGTTGTGGCAGAACATGGCCGTGCCTCCCACATACGCCGATCTTGGCAAGTCCGCCAGGGATGTCTTCACCAAGGGCTACGGTGAGTGT
CGGAGCAGTCGGGAGCAATGGGAAGCCTTTCACCTACTAAGGGAGTTGGCATCTTTGTGACACTTGAGGTGGTCAGTTCCCAGCTGACAACTTA
TATGTCCAGACAAAAGGATGAGCTTCCTGTGGCTGTGCGCCACCCAGTGGTGAGGCTCAGGCATCACAGGGGCAAATGGCAGATCTAGTCCCTT
GCAAGCTCCAGCGTCTGCCCCAGTAGAACACTGTTCTAAATTTACCCTGATGGTCCCACCTCTGATGACTGCCTCTGCCAGCTGCTGGAACCTG
CCCCACAGNNNNNNNNNNNNNNNNNNNNCTGCAAGGGCACAGGTCAGGCCTGTGTTTGTGTCTGCCACTGTTGCCCTGGCTTCCTTTAAGTATT
TTCAGATAGCTAGGAGGAAAACAGTGGTGTCCTAGCTTCAAGCTATTATTTTGATTATTTTTTTTTTTCCTCAGTGCTGGGGTCAAACCTTTAG
CTTGCTAGCAAACATTCTGTGGCTGAGATACACCTCCAACTCCTGGCTTAATTAGTTAACCTGATTTTGGCTGTTTTTCCTTCTTTAGGCTTTG
GCTTAATAAAACTTGATTTGAAAACGAAGTCAGAGAATGGATTGGTAAGTCTCTCCACTTGCACGGGACGTTATATTGTCCCTTACCAGGAGTG
GGTACTGTGGCCCGGGTGGCAGAGCCAAAAACAGTTGCCTGCTTGGATTGTGGCTGTTAGTGCTTGTCATCGAAGCGCTGTTCCATAGGTGGTC
TGGGACTATAGTAGCTTTTAATGCTTTTTTTACCAGTTATTTTATGTTGTTTGAAATCAAAACTTCTGGCCTAATGTACTGTAGGTGTGTGCTG
TACCCACTGATCTACCCTGATCCATCCTTGATGCTTCTTATTTTAAATTTGACCTCTCCTTCCCCCGCCCCCCTCTTATTTTGAGGTAGAGTCT
TACTGTGTAGTAGCTCAGGCTGGCTTCAAGTCACAGAAACTCTCCTGCCTTAGTCTCTCATGTGCTTGGAGTATAAGATGTGAGCCATTACACC
TAGCTTTGACCTAGGTTGTTTTGTTTCTTTATTTAAAGACTTAATTTATTTCTGTGCATGTGTGCGTGCCTGCAGGAGTTTGTGCACCATATGC
ATGCAGGAACCTGGGGAGGCCAAAGGAGGGCATTAGATTCCCTGGACTGGAATTACTTTTATAGGCCATTGTGAGCTGCACAGTGGGTGCTAGG
ACTCGAACCCAGGTCCTCTATAAGAGCAGTAAGTGAGTGCTCTTAATTGCTGAACCATCTCTTCAGCCCCGCTGACCTGTTTTTTTTGTTTTTT
GTTTTTTGTTTTTTTTTGTTTTTGTTTTTTCGAAACAGGGTTTCTCTGTGTAGCCCTGGCTGTCCTGGAACTCTCTCTGTAGACCAGGCTACCC
TCGAACTCAGAAATCCGCCTGCCTCTGCCTCCCAAGTGCTGGCATTAAAGGCGCGCGCCACTACCGCCTGGCTTTTTTTTTGTTTTTTTTTTAC
TTATTCATTTATCTTTATTTTTTTGAGACATTGTCTATCCACATGGCCCTGGTTGCTCTAGAACTCACTCTGTAGACTAGGCTGGCCTTGAACA
CACAGAGCTCCACCTGTCTCTGCCTGAGTGCTGGGATTAAAGGTGTATGGCACCACCTATGTTTGTAATGTTTCATTATTATTTAGGAAACATT
TCTGGTGTTGATTGATACAGATACAGGTATCTGTAGCAATTGTTGGAGGGAAGGGGTGTGTTGCTCTGTCAGTAGTAGCTCCCTCTGAGGCTGG
AGGCAACATGGAAGCTGGGTGGTTTCCTGTTCAGACTTTAGGGCCCCCAAGGGAAGAAGGAAGCTGTCTTCCAACAAAGACCTTTCCAGTAGGT
TTCCTTGGGTAGCAGACCTCTCACTCCTCTGTATTTCCAGTATGTAATTGAACTGTAGAAGTAGTTCTGCCTGGACACGTTGGGGACTCTCTGT
TGCTTAAGGGCCTGGACCAAGGGCAGACTGGACTGTAGGCTAAGGTCTCTATCTCTCTCTCCTTTAAGGAATTTACCAGCTCAGGCTCTGCCAA
CACGGAAACCACCAAAGTGAACGGCAGCCTGGAAACCAAGTACAGATGGACTGAGTATGGGCTGACGTTTACAGAGAAGTGGAACACAGACAAC
ACCCTGGGCACTGAGATCACTGTGGAAGACCAGGTAAGAGCTCCCTGCCTGCTGGAAGTCCTGGCTCCTCTAGTTCCCATTGAGACATCCTGGG
TCCTGTCTTTGGTTAACCTGTGCCACCTTTCTCTTATTTGCAGCTTGCTCGTGGACTGAAGCTCACCTTTGATTCGTCATTCTCGCCGAACACT
GGGTAAGGTTCTCCTTACCCACGAGGATATTCTGAGATGTTATGGGCCCTGGAAGTCCATTACAGCAAAGGATTTTTGGGCTGACATCATGCCA
AAGGTAGCCTCTTAGCTGGGAGGCTGGAGGGTGGAAGGAATCGTGTGGTCAGGACCAGCCAGGGGTATGTAGTGAGATTCTACATCAAAGAACA
AAAAACCAACTAGGTAGCAACAACAGTAAGGCTGCCTTGGTCCAAGTGCTACATATTCTGGTCTGTCGTGGTGTTCTATCCAGGACATGAAGAT
ACAACTGTTAAGGGACAATGCTGTAGCAAGCATTTAAAAAAAAAAAAGATTTATTTATTTTATGTATGTGAGTACACTGTAGCTGTGTAGAGAG
TTGTGAGCCATCATGTGGTTGCTGGGAGTTGAACTCAGGACCCCTGCTCGATCTAGCTCTGCTTGCTCCAAGCCCCGCTCGCTCTGACCCAAAG
ATTTATTTATTATTATATGTAATTACACTGTAGCAGTTTTTAGACACACCAGAAGAGGGTGTCAGATCCCCTTACAGATGGCTGTGAGCCACCA
TGTGGTTGCTGGGATCTGAATCCAGGACCTACAGAAGAGCAGTCAGTGCTTTTAACCGCTGAGCCATCTCTCCAGCCCATTGCAAGCATTCTTA
ATTTAGGAAATGTATTTCTCTAGCAAATGGTTTTGTGTGTTCCTGTGCTCATTTGGAGACTGAAGGTGTCTGAGCTGGGATACTATTTGCCCCA
AGGAACTTCCCTTTTCTTTTTGTCACAGGGTCTCCTATAGCTCAGACTGGCCTTGAACTTATTTTCTAGCCAAGGGTGACATTGAACTTCTGGT
CCTCCTGCTTCTGTCTCTTAAGTCCTGGGATCATGGGCATGTGGTCCCATACCCACTTATGGGGTGGTAAGGATGGAAGCCAGGGCTTATGCAG
TCCATTTGTGACGTATGCTACGTCTACACCGAGCTGTGTCTCCAGGGTTAAGGATTGTCCTTGGTAGTGGAGGACTCAGGCCAGTGTTTACTGC
TAAGATCCCACAAAGCCACTGTGTGCCTGGCTGCAGGCCACGGGCTCTCTGTCCCAGCTGATCTGTTTCACATAAGGATGCCAGTCAATGAAAG
TGGCCAAGGCTGAAGGGCAGAGGTGACATTTGGAATCAGGGGCTGACTGGTCACTGTTGCCAGCCTATTTTGTACATGTGGAGGGCTCTTCTCC
CAGTTTTCTGAGACCCTGAGATCCTGAGAGCTTAACCACAAGGTGGCTCCTGGGGCTGCCAGGTCCTCCGGCCAGAAATAGTTTAGGCTTGTTG
GTTATTGACACATCAGAGGACAAAGAGAGCAAGCTGGTCTGCCTCTCCTGAGTGCTCCACAGGGCAAAGAAGGAACTCTTCTTTGAGTTCAGGC
TTTTACTAAGTTTCAAGCTTTGAGTTTTTGATTTGGCAGGTGTTTTGCTTGTTTGATTTCTTTTTTGTTTGTTCCCTTTTTTTTTTTTTTTTTT
TTTTTNNNNNNNNNNNNNNNNNNNNATAAATATTGGTAGTTGACATAAATCCTTGCTGAGGGACAGTGGGTCTTGAGAAACAGCTGACAGACAC
TGAACTAACTGGGCTTCGATTTAAATGTGGGCTGGACCTGAGACCTGAAGGACTCAGGGTCCTCATCAGTATCCAGAACTCTTGAGTTGTGAAC
TCAGTGGGGTCTCACGACTATGGTGGCAAAAGGTCTCCTAGCATAGTCACTAGGCAAGGGAAAGACCCATTGTTTATTTTATGTGTATATTCCT
GAGTGTATGACTATGTATCACATGTGAGGGGGAGGGGGAGGGGGGACCTGAAGGTGTCGGATGCCCAGGAACTGGAGTTACAGGTAGCTGGGAG
CTGCCAGTGTGAATGCTTGAAACTGAATCTCAGTCTTCTGCACTCTTAACTCTGAGCCTGATCTCCAGCCCCGGGGTCCGCTCTTTCCAGCCTG
ATCTCCAGCCCCGGGGTCCGCTCTTTCCTTTTTCGCTGGCTACTGGGTGAACCACAAAGATGACCATCTCCCTCAAACTGCTGTGTGGGTAGCT
TTGAGGTACATGCTTCTTTTCTTTTTTTTTAAAGATTTATTTATTATTATATGTAAGTACACTGTAGCTGTCTTCAGACACTCCAGAAGAGGGA
GTCAGATCTCGTTACGGATGGTTGTTAGCCACCATGTGGTTGCTGGGATTTGAACTCTGGACCTTCGGAAGAGCAGTCGAGTGCTCTTACCCAC
TGAGCCATCTCACCAGCCCCACATGCTTCTTTTCTGTAGGTTTGGAAAACAGCTGAGAGGCCTAATAGATGCCTGTGTCAGGTTTTGGGTTAGC
CGTGGGGAGAGGCTGGAAAAAGAACATGGTTGGCACTCACTTTTTGATCTCTTCCCATGGTGTACACAGTGCTGATGCGGCCTTTTTCAGACCG
AATTTGAGCTCAGGAGAAGTTGTGTCCTGTTGGTGGCTTAGCAGGTGTTTAGGGACAACTGGCCACTGACCTCACTTCTATTTCCTGGCTTCTA
CACAAACTGGGAACAGGCAAAATGTTTACCGTTCTTGCATGATTGTATCGAGATGAGTTAGCTCGGCTTTAATACACTCTTCCTTTTCCCTTTA
GGAAAAAAAATGCTAAAATCAAGACAGGGTACAAGAGGGAGCACATCAACCTCGGCTGTGACGTGGACTTTGACATCGCTGGGCCCTCGATCCG
GGGCGCTCTGGTGCTTGGCTATGAGGGTTGGCTGGCTGGCTACCAGATGAATTTTGAGACCTCGAAGTCCCGAGTGACCCAGAGCAACTTCGCA
GTTGGCTATAAGACGGATGAATTCCAGCTTCATACTAATGTGTAAGTGTATGTGGGGGGTTGTTTTAGTTGCTTTCCTGTTGCTGTGACAGAAT
ACCACGACCAAGGCAACCCGTGAAAGAAAGTGTTTGGTTAGACCCACCGTTTTAGTGTGTTACAGTCTATGAGGGCAGCAGGAACNNNNNNNNN
NNNNNNNNNNNCCCACCTTTTGGCATCCATGGTTCAGCGGCATGTGCGTTTTTATCTTTTGTGATTCTGGGCTTTTTTTTTTTTTTTCTTTTCT
TTTTTTATTGCCCACCTAAGCCTCTTCAGTGCTGGGATTAAAGGTATGAGCTGCCATGTGGGTGCTTGGAACTGAACCTTGGTTCTCTGCAAGA
GCAGCAAGTGCTATCAACTGTTGAGTCATCTCTCCAGCCCCCTGAATTTAACCTTTTCTTTTGAAATAGTTTTAAAGTTTTTTTATAGGGAACT
GTCATACAAGCAGTATGTAGAGCTCTCCTCTACTTCTCCCCTACCTCCCTCTGATGTTGAAGTTTTCTATCTGCCATCACATTATAACATACTA
TATAATATACAGCTATTCATTACATAATAATATTTCAGTCAAGCACCTATAGGACTGTGGCCTCTGAGATTATTACAGAGCTGAAAAATTCCTG
TTGCTTATTGCCATCAAAACACAGTGCATTTATTGAGTCTGTCAAAATTGACATGAACACCACCCACTCTGTTATCTCCCCATAAATGTGGAGC
AGGTATAATTTTGCTCATGTAACAGTATTTGGACCCAGTGTGTGCCTCTCTTGTGGACTCACTCCCTGTGTTCTTACCATTAGAGCATGTTTTT
TTTTTTTGTTTTTTTTTTTATATAAAATATTTACTGTGAACCCACGTGCTATGTTACGTGGGGGTGCCTTGGACATCTGTCTCTTGGGTACATG
AGGAGGTCATGGTTGAGTGGTTAATCATGGTCATCTAGGTTTCTGTAAGTGCACCCTGTGATGTTTGCTTAATGACCAAATGGCCCAACGATGC
AATTTTCAGAATGTGTCCCTGTCATTAAGCAATTGTGACTAACAAAGATCCATGCCATCAAGTGACCATTGGTACCACACTATTAACTGATGTC
CTGCTGATATCATCTCTCTGGCCTGGAACCTAGTTCTGGATCCTCTATTGCATCAAGCTCTCAGGTCTCCTTTGTGGCCTCTCCCTGGGACACA
CTCTCCATCTTTCTCTGTCTCTCTCGACCCTGACATTTTTTGAAGAATTGCTGAGAGCTCTTTGCAGAGTGTCCTTCTGTTTGGATTGGTCTGA
TATTTCCTCCTGAGTGTATTCAGTTGCATCTTTTTGGCAGCTGAGGAAGCGGCACCTCAGTGTGCTGTCTGGAAGGCCACTATTGTGTGTCTTG
GCCTGTCATACCAACCCTGATTATGCGGCTAAGGTGGCATCTGCTGGATCTCCGCTGTAAAGCTGTCAGTTTCCAGCTTTGTGCTTAGTAGCTG
TGTTACGGGGAGATACTGAGACTGCAAATATTCTCTCTCATCACACTTTGGGTTACATGGAAGCATCCTTTGATGCTTGCCTGTGCAATTATTG
GTAGGTGTTCCCTTCCTTCTTTTCTTGTTTCTTGAGACAGGGTTTCGTTCTGTGTAGCCCTGGCTCGATCTGTAGACCAGGCTGGCCTCGAACT
CAGTGATCCTCTTGCCTCTGCCTCCCAAGTGCTGGGATTAAAGGTGTGAGTCACCAGGGGAGCCATCATTCCTTTCTTACTTATGGGCTTTTAC
TGTAGGGAAGGGCAGTCCTACTCCTCCCTTAACCAGTTTTAGTTTTTATTTTGATGTATTATCTTTATATTTTGTCTATATATGTGCTTTGTCT
ACATATGTGTGTATGTATGTATGTATGTATACCGCTTATGTGCCTGATGCCTGTGAAGGTCAGAGGATGAGNNNNNNNNNNNNNNNNNNNNTTA
GCTCGGCTTTAATACACTCTTCCTTTTCCCTTTAGGTAAAAAAAATGCTAAAATCAAGACAGGGTACAAGAGGGAGCACATCAACCTCGGCTGT
GACGTGGACTTTGACATCGCTGGGCCCTCGATCCGGGGCGCTCTGGTGCTTGGCTATGAGGGTTGGCTGGCTGGCTACCAGATGAATTTTGAGA
CCTCGAAGTCCCGAGTGACCCAGAGCAACTTCGCAGTTGGCTATAAGACGGATGAATTCCAGCTTCATACTAATGTGTAAGTGTATGTGGGGGG
TTGTTTTAGTTGCTTTCCTGTTGCTGTGACAGAATACCACGACCAAGGCAACCCGTGAAAGAAAGTGTTTGGTTAGACCCACCGTTTTAGTGTG
TTACAGTCTATGAGGGCAGCAGGAACCACTGAGAGCTCCCATTTTGATCCACAACCACAGGGCAGGCAGAAAGAGGGAACAGTGGGGGTGGTGG
GAGACTTGTGAAACCTTCTCCAGCAAGGCCACACTTCCTAATCCTTCCCAAACAGTTTGACCAACTGAAGACCAAGTATTCAAGTGCAGGCCAT
GAGTGTTTATGTGTGTGGCTAGGGTGGTGGCTTTTCTTTTCCTAAGTTTGGTTTTCAGTCATTTGGGTCAATGGGCCCCACGGCCTGTGAGCAT
TTTTGTTTCCCGTCACACTGAGGATAATCAGGCACTCATTCTCTCCATTAACTCGGTTAACAGCTTGCTGGACAGTGGGGTGCTGGGTGAAGGG
CTGGCCTATAGGTTGGGGAGAGTCTGTGCGTGGTCTTGGAGGTTGAAGGACATTGATGACATGAGGTAACAATTTTAGTCATAAAGACAATCTG
ATTTGGGGCCGGAGGAAAGCTCAGCACATGAGAACACTTGCTGAGAGGATAAACAGTTTGGATCCCAGCATTCCTGTCATGCATGGCTCACAAC
TCCCAGAAACTCTAGCTCCAGGGGGTCCATTGCTCTCCTCTGGGATTGGAAGGGGACATCCCCCCAGGCCCCATACATATAAAACTTTTTTTTT
TTTTTCAAAAGTAACTTTACTTGGGTTAATTCGATGAAGTACTAACCTGTTCTTTCCACTAGAGGGCGCTAAGTAAATAGCTTCTTAAATTCAG
ACCAATAATGGTATTAGTCTAAACAAATACTTTTTCCATTAATAACAATTAAAAACATGTATATGTATGTATGTGTGTGTGTGGGGTCTGTCTG
TCTGCTTGTCTGTCTTTCTGTCTGAACTCCTATGCCTCAGTGTAGGTGTGGAGGTTACATAACAACTTTCAGGGAGTCTGTTGTCTTCTTCCTC
ATCCAAACCACAGTGCTTGCCTTCCAAGGAAAGTGGCACAGAACTTTCTTGACCATTCTGGCTGTATCAGCTTCCCTCCTACCATCTTTGACAC
AACCATTAACCAAAGTGAATACACAAACACAGTAGACAGCAGAAAACTCTGTAGGAGTCTAATTTTCTAGTTTCTGCTTTCATTTGGAAAAAAC
AAAACAAAACAAAATGGTTTATTTTTGCTCACTGGTGTGTATGTGTGTGTGTGTATGTGTGTGTGTGTGTGTGTGTATCTGTGTGTGTGTGTGT
CACATGTGTGCAGGTGCCCATGATGGCCAGAGGGGGTTCTGGATGCTCTAGAGCTGAGTTATGGGCAGTTGTGAGCTGCCTGATGTGGGTGCTG
GGAGCTGAATTCAGAGCCTTTGGCAAAGCAGCGAGTACTCTTAACAGCTGGACATCTGTTGCTATGCTTACTCACAGGAATGACGGGACAGAGT
TTGGTGGCTCCATTTACCAGAAGGTGAACAAGAAGTTGGAGACTGCTGTCAATCTCGCCTGGACTGCAGGAAACAGTAACACTCGCTTCGGAAT
AGCAGCCAAGTATCAGGTCGACCCTGATGCCTGCTTTTCGGTGGGTACCCGAGAATCACCCATCTCACACCAATTCTATGCTTCTGCTTAGACA
TTCTCTCACAGGGCAAAGACAAGTCTTGTGTTTGAGATACTTGAGACAGATACTTTTTACAAAGTCTCACTATATGGCCTTGGGTGGTCTGGAA
CTTACTCTGTAGACCTCACAGAGATCCACCTAGTCTGCCTCAGCAGCGCTGGGATTAAAGGTGTGCGCCACGATATTGACCTCCATGGCTTTTT
GTTTTTGTTTTTTGTTTTTTGTTTGGTTTTTTTTTTTTTTTTTGAGACAGGGTTTCTCTGTGTAGCCCTGGCTCTCCTAGAACTCACTCTATAG
ACTAGAATGGCCTCAAACTCAGAGATCTGCCTGCTTCTGCTTCCTAAATGTTGGGACTAAAGGCATGTCAATTTTGCTTGACACCTGCAGTTTT
TTTTTTAATTTACTTATTATTTATTTATTATATGTAAGTACACTGTAGCTGTCTTCAGACACTCCAGAAGAGGGCATCAGATCTCATTACGGAC
GGGTGGTTGTGAGCCACCATGTGGTTGCTGGGATTTGAACTTTGGACCTTTGGAAGAGCAGTTGGGTGCTCTTACCCCACTGAGCCATCTCACC
AGCCCACCTGCATAGTTTTTATATCTTCAGAATTTTCACACTGGAGACGCTGAACGCTTATGGAGGTCGATTGGGTAGCTTCCTTAAAGGCACA
TAGCAAGTATGTGCTGGGACCTGGCTGTAAGTAGACCGCTCTGCTATTGAGCCTCTCTTACTTAAGTGTTTCACTCTTCCTCTCCTTTCCATTT
GGTTTTCAGTCTCTACATCCACATTAAGACATCAATGGTCAGGATGATGTATTCCAGTGGTAGAGCCCTTGCCCAGCATGTCTGGGCTTCAGCC
ACATTTCTGGGAAGAACCCAAACAAACAGAAACAAGGCTGGGATGTAGCTCAGTTGGTAGAGTGCTTGCTTAGCATACAGAAAGCCTGTGCTCG
GTCCCCAGAACTGCGGAAACAGCAGGCAGAAGGATCAGAAGCAGGCCATTCTTGCCTATGATGTAGCAAGAGTTCAAAGGCAACTTTGGGCTAT
ATAGTGAGATCACATCTCTAAAAGAGACAAAACCAGGTGGCCTCTTGTCTTGCTTACCCCGTGGTACCCATCAGGGTTCCGGAATGGCTCAGGT
TTTGTTGTGAGCCTATTTGAGCTGGCTTGTGTTATCACTCTGTAGGTGGCCACCTTTTTGAGGTGGGCTGAGGAAGTGTCATGCTGCAGAATGC
TTCTGCTGGTTGGTGTGCCTCACAGAGAGTCTATTTTAAGTCTCCTGACCTGGGAACTGAGTGCTCTCAACATGAGGCATGCATATAAAACTGA
AAGACAAAGGCTCTCCTTGTTGGGATGTTGGGAGCATAAAGGAACAGTTAGAAGGGACACGGCCTGCTGAGAGCCCTTCTTCTCCTCGCTCTGT
CCTTCAAAGTTCACAGGAGCAGGAAAGCACACACACTTGCACATGACACATCTCATTGAGTTTTACCAGATGGCCATGAGCAGACAGGAACACA
GTTCTGATACCTGTGACTTGCCTAAGATACTGTCACCAAGTTTGGAGGTACACCTGTGGGACAGTTTTCATGGGTGAGGAACACTGTCTTCCCT
TGGACTTAATCTTTTTTTTTTTTTTTCCAGGCCAAAGTGAACAACTCTAGCCTGATTGGCTTAGGGTACACTCAGACCCTAAAACCAGGTATGT
GTTGTTGCCCATGTGCAAAGCTCGTTCTCGGTTGCATTTTGCTGATGTCTGCTATTGCTGAGGGACATTATAAACGAGTATATATAAGCTTTTA
TAATTAAATGTTTATAAAGGAAGTTGTGAAGTCATTGTAAAAAGAAAAAGAGAGTCTGAGAAATAGAAAGCAGAAGGAACCTGTCTGGGCTAAC
TCACATCACAGCTCTAGTTATTTTCTCCTTTCCTTTCCCCAGTATGTGATATGTGATAGCTGCTTCCAGACTGTAGTCAAAACTAGCCTGTCAG
TCATCCTCACGATGGAAAGACTAGGGTATAGGGATGTAGTGGGTCTTCTATGCATAGTTATTCCATCCTCTCACTGGTGTGTGAGGGCTGCAGA
AATCCCACTCAAGGCTGACTATGTAATATGAAAATCAAGTTCTTCCAGGGAAAACCATCCCGTTTGATCTAAAATTACAAGTAAGCCCCAGGAA
AAGAAGTTTATTGTTTTTTTTTTTGTGTGTGTGTGTGTGTGTGTGTGTGTATGCTCACGTGTTATGAAAGTGAATGTAAGACTCAGGCTGTTAC
AAGATAGGGTTTCCCTCCAAGGCAATACTGCTCAAGCAACTTACTGAGTTGGGGCAGCAGCGGATGGCACACTCATTGTAATGGGACTGCAGGA
GGCTGGAAGGGAGGGGGATTCGGAAGTACGTTCCAGCAGGGTCTCTGCTCTGTGTGCCAGTGATGGCCGTTGCATGTGTTGATTCGAGGATAGC
AGCAGGTCAGGTTGTATTACAGAGCACACCTTGAAGGGTCGCCTCGCTTGGCCACTGCTGACTGCACCTGGAACAGATTCTGACCTTGATTCTG
ACCTTGATGCTAACCTCTCTTCTCTTTCCTTTGTCTCTTGCCCCTTTCTCCCTCCTCCGTCCTCTGTCACCCCTCCCTCCCACACCTCTGTCTC
AACTCCCCACAGGTATCAAACTGACGTTGTCAGCCCTGCTCGATGGCAAGAACGTCAATGCGGGTGGCCACAAGCTTGGCCTAGGACTGGAATT
TCAAGCATAAATGAATATTGTANNNNNNNNNNNNNNNNNNNNCTGGCCTCGAACTCAGTGATCATCCTGCCTCTGCCTCCCAAGTGCTGGGATT
AAAGGTGTGAGCCACCAGGGAAGCCATCATTCCTTTCTTACTTATGGGCTTTTACTGTAGGGAAGGGCAGTCCTACTCCTCCCTTAACCAGTTT
TAGTTTTTATTTTGATGTATTATCTTTATATTTTGTCTATATATGTGCTTTGTCTACATGTGTGCATGTATGTATGTATACCGCTTATGTGCCT
GGTGCCTGTGAAGGTCAGAGGATGAGCCTATAGTCCCTGGAACTGGAGTTACAGATCTGTGAGCCACCATGTGGGTCCTGGGAATGGAACTCAT
GTTTTCTGCAAGAGCAGCTAGTGGTGCTCTTAACCGCTGAACCATCCATCTCTCCATCCCTTTATTATCTGAAAAAAAAACACATACACATAGA
TATGTATATATGCACACACATAAATACACACACACACACATGCAGTTTCTTCTGTGTGTGTGTGTGACAGTGTATGTATGGACATCAGAGAACA
ACTTGGCAGGTTTGGTTTTTTTCCTTTTTCCATGCTAGTCCCAGGGATTCGCTCAGGTCATTAGGTTTGCCTGCAAGCACCTCTACCTCCTGAG
CTATCTTGCCTGCCCCTAATCATTTTTGACTCATGTATAGACTAATGGACATTTATTCAGTTGCATCATTTAGACGGTGGCTCAGGCTGTGACA
GTGTGGCACTCCTTCAGGTTGACATGTGTGGGCTCCTCTCACTGTCTTTGAGGCACCCTGTGTTTCTTGTTTTGGAGTTGTGTGAAGTTCATCT
TAGGGTCTTTCTTCCCTGGTCCTTCTGTCAGCCATTTGTCCTAGGCGCCTTGGCGCCTTATGTTGGGAATGCTGTTTAAAGGCGGTGCTGAGGC
CCTAGGTGTGTTGCAGATGAACTTTGATGACTTTGGCTCGCTGGGAATTAACACTGGCTTTCTGAAACTCTGGTGATACCGGGAAATCACTGAC
CACCCTGAGCCAAATGTAGGCACTACTGGATGGGACCGCAGGGCCTTCCTTACGGATTAGCACCCACCCAGGAGTTGCCTTCTACAGATAGAGC
CTGCTTGCTAACCATCAATCCGTGCTGTGTGTCTCTTGAGTGCTCGTCAAATTAGCACCACTCCTTAAGTAGCTAAAAAAAAATCCCAGCAATT
TGAGACATTTGAGAAAGGAAAATCTCCATAGCTGTGCTCTGGGCAGATCGCAGGGGGAATCTGAGTCACTGCCCCTCCTCTGTCCATTTTCTTG
GGATTCTTGGACCCTTAGCTAGAATCCTATGAGAATTGATGTGGGTGGTACCCACCATTGGTCAGAGGCTCTGCCACAGGCACCACACTTTGTG
GTCAAGGGCAGCTTTTTGCTGGTTTTGTCTTTTGAGAGAAGGTCTCCTGTAGTCCAGTCTGGCCTTGAGTTTTTATGTGTCTGAGGCTGGCCTT
GAACTCCTGATCCTCCTGCCTTCATGGCCAGGTGTGTGCCACTCATGTTTTATTGAGACAGGTCTGATTATGTAGCCCAGGCTGACCTCCAAGT
TATGATCCTCTTACCTCTTTGGGAGTTGGCTCCCTCCTCCCTCCATCATGTGGGTCTGGGCGATTGAACTCAAGTTGTTAGGCTTGGTGGCAAG
TGCCAGTACCTTAAGCCATATTACTGGCCCTAAACTAATTTTTTTTGATGTATTTTAGTCTATTGCCAATTCTTGTCTTACCGATGCTAACATT
TCCCCATCTTTGAAGGCCTTGGGTGGAAACCTTATTTTAGCAATTAGATCTGTTGGCCCAATAATTCCTGCTAATCTCTGATAGCTTAAAGAGC
CGCTTCAGGTTTACTTTGTATGTTTGCTGCCTTGGATCTGTAACTGGCCATTTCCCAAGAAACAGCAAGGCCTCTGGGTTTAGAGCCATGGTCT
GAAAGCCGCAGATGAACCCTTAATGTCACTGGATAAGGCCAGGAATGGGCAACTATGTGTTGTCTTTTGGAGCTCTGAGTCCTGGTTTCTGTGG
TTTAGGCTGAGAAGCAGTTGGCTAGGAAGTCATCTCTTTTGTAAGCCTGTGATGTAGTTCTAATTGTACTTGACAGATTTGATCTTAAAAAAAT
TTTTTTTATCTGGGCAGTGGTAGGTGGCCTTTAATCCCAGTACTTGGGAGGCAAACAGATCTCTGAGTTCAAGGCTAGCATGGCCTATAGAAAG
AGTTCCAGGACAGTCAGGGCTGTTATACAGAGAAATCCTGTCTTGAAAAGCCAAAAAACAAAGATTTTTTTTTTTTAAATTCACTTGTGTGTAT
GTGGCCTATGTACACAGTGCCTCGGTGTGCTTGTGGGGGTCAAAGGAAAATCTCCGTGCTTCATTTTCTTAAAACAGGCTGGCTTCCTTCCTTC
CTTCCTTTAAAAATACTGCATTTATTTTTATTTTATGTGCATTGGNNNNNNNNNNNNNNNNNNNNAAGCATGTACACACCTGCGTGAAAGGGAT
GTTTTTAGACTGATCCTCACACCCTGTTCCCATCGTGCCCTGTTCCCATCCTAGCCCATCACTTAACCTGTTTTACACCAAAAGTAGTCTTTAG
GGTGTGGTTAGCTATTTCTTTTGTGCCATTTTAGGGTGGAGAGGGTGGGCGTGATGGAGCCAGTCATTCAGGACTTAATTCTTCCTTGTGTTGT
GGTGTGGTTTTCTTTCTTCTTCTTCTTTTTTTTTTTTAATTCCTTCTTTCGCCATTGCACCAGAGTATGAAATAGCTTCCGGGTTCTCCGGCTC
TGAGCTGGGCGGTGATTGTGGTCACACCCTGACAACACTAGGGATCTCAACTGACTCCTCTTGTAGCCTCACCACTATTTTTTAGCAGTTTAAT
GGGTACATTATAGAGTCTTCCATTTTGTGTGGAATTAGCTCCTCCCCTTCAAATGCTGTAATTAACATCACTTAAAATAAAACTTGAATAAAAT
ACTGAAACCTCATCCTCTTGTTGTTTTTGTTAAAATACGAAATGGCCAGGGCATTGGTTTGGATTTGTGCTGTGCTCCTTTGTGGTGTCTATCA
ATAAATCTAACCTGATGGTAGAAAAGAACACTTGGGAGGCTGGAGAGGTGACTCGGGGGTTTATAGTGTTTCCTGCGCCTGTAGACCTGAAGCG
CTCACAACTTCCTATAACTATGGGTTTGGGGTATCTGATTCCCTCTTCTGGTCTCCTTAGGTACCCACACACATGTGACGCACAAATAAAAATA
AATCTTAAAAGCACTTAGGGTTGATGTAGTGGCACATCTCAGTACCTTGGAGATTAGCACAATGAGATCAGTGAGGAGGAAGGTTGCGGGGTTC
AGGAGAGCCCACCCTTAGTTGAGGCACTGCTGGCATTGATGACTGTTGGGTGAGAGTCAGTTTTCTTTGGGGGTGTATGCAGCTGCCCCAGGAA
GCTAGGGCCGCTGGCTGGATCTAAGGAGAACTGCAGTCAGTCACAGGCAGTTTGATGAGGGTAGTGGGAACGAACGGAACCAGGGTCATCGGCA
AGAGCATCCAGCACTGTTGAACCACCACCGCCTCTTCCAATAATACATAATAATCTCACTGTTGTAGAAGGTGTGTCTGGTTGCTTTGCTCAGG
TTTGAATGAGAATGTCCCCTTAGGCTCTGGCTTTTGAGTACTTGGTCTCTTGTAGGTGCAGTGTGGTAAGGCTTAGGGGGTGTGGCCTTGCCAG
AGGAAGTACGTCACTGGTGGGTGGGCTCTGAAGTTTCGCAGCTTATGCTGCTCCTAGTTTGTACTCTCCAATTCTTGTTTGTGGTTTGATGCCT
AGGCTTTCAGTTTGTCATTCCTGGTGCCAAGCCTGTCCGCTGCCACGCTTCCCGGCCTTGATGGTGATGGGCTGCTATCCCTCTGGAATTGGAA
GCCAAGATGATTGCCTTGGTCACGGTGTTTTGTCACAGCAATAGGAAAGTAAACACAACTAGGCTGCACCTTCATTCAGCAAGAGACTTTGGGT
CCTTTTCCAAGCCCACGAGGTTATGGTAGAATCCATTTGTTGTGAAACTGAGTCCCTTCTTGCCGGCTTGTTTCCCGACGACCACGCAGTACCT
GGAGAGCCCCAGCATTTCTTACATTGTCTCCCGTCTGCGGTGTATGGAACAGAAAGACTCGCTGTCTAATCCTTACTAGGCTCCTGTTCTCTAG
GACCAACTCTGTCTCTATTACCGGCTCACGATTAGGCGAGGCTCCCCTTTATAAGGATAACTGCCATGAAAAGTAAGCTCACCACACTTATAAC
TCTCATTCGCAGGCTTTCCCTTGTGGGCCATGGGAGGGGGTCGTTTTGAAGTTTACTCTTGGTTTTTCAAGACAGGATTTTCCTGGGCAGTCCT
GGAACTTGCCCTGAAGACCAGGTTGGACTCAGAGATTCACCTGCCTCTGCCTCTTAAGTGCTGAGGTTAAAGGTGTGCGCCACCACTGCCTGTC
TTTTTTCTTTTCTTTTTTTTTTTTTTTTTTTTTTTGGTTTTTCGAGACAGGGTTTCTCTGTATAGCCCTGGCTGTCCTGCAACTCACTCTGTAG
ACCAGGGTGGCCTCGAACTCAGAAATCCACCTGCCTCTGCCTCCCGAGTGCTGGGATTAAAGGTGTGCGCCACCACGCCCGGCAAAAATTTGTA
ACGTCTTTTTTCTTTCCTTTTTTTTTTTTAGATTTATTTATTTATTATATGTAAGTACACTGTAGCTGTCTTCAGACACTCCAGAAGAGGGAGT
CAGATCTCATTACAGATGGTTGTGAGCCATCATGTGGTTGCTGGGATTTGAACTCCGGACCTTCGGAGGAGCAGTCGGGTGCTCTTCCCACTGA
GCCATCTCACCAGCCCCCCACCCTTTTTAAAAAAAAATATTTATTTATTTGATTTATTTTTATTCATAGCTGTCTTCAGACAGACAGATCCGTA
GAGGGCATCAGATCCCATTACAGATGGTGGTGAGCCATCATGTGGTTGCTGGGAATTGAACTCAGGACCTCTGGAAGAGTAGTCAGTGCTCTTA
ACCACTGAGCCATCTCTCCAGCCTGCTTTTTTTTCTTTTTTTGAAGAAAGGTTTAATTGCTTCTATTTCACAGGTATGGATGTTTTGCCTGCAT
GTGTTTGTGAACCACATGCAGTCTGGGGCCTCCAGAGACCAGAAGAGGGAGTCAGATCCCCTGTGACTGGAGTTACAGATGCTTGTGAGCTGCC
ATGTAGAGCTGGGAACTGAACCTGGGACCTCTGGAAGAGCAGCCAGTGTCCTTAACCACTGAACCATCTCTGCAGCCCCCCTCTACTATTAACA
TTTTTTATGTTGTTTCTCCTTGTGTGTGCATGTGTGTTACAGAGAACAAGCGAGGGAGTCTCTTTCTTCCTAGTTTGTGGGTCCTGGGGATTGA
ACTCAGGTTGTTAGGCTCGGTGGCAAATGTGTTTACCTGTTGGGCTACCTCGAGATTTTTACTAAATCGTGAGTTCCTCCACGGAATAGGAATT
CTACCCGCACACTCTTCAGCTTCTATAGGAAGTGAAGTGGAGACTTCTGGTTTCTTTGGAAAGTCAGTTATGTCAGCGTTTTGCTGGGGCACCC
AGGTGAAAGGATGGTTTGCTGAAGCAGATACAGGTGGAAGGATGTTCTGCTATAGCAGACATGTGAAAGGACACATGAAGTTTAGAAGGAACAT
AAATCTGACCCCACGGACAGTGGGAGCTGGAGCATTGGTTTGCCTTGCTCTCCCTTGCTAGTTTTTGCTGACATCATGGATGCATTGGTTTGCC
TTACACTGCATTGCTGTGCTTTGCATGCAGTGACTTCATAGAGAGAGGCTTGCAAAAGAAAGGTCCCTGCGGCTTCTTGAGGCTTCCGTGGCAT
GGGGCCAGTTGGTGAGCCTCACAGTTCCTTCTGGATTCAACTGCAGTTGCTGATTCCTGTGTGGTATCTGCTGAGTGGACTGGACTGAGAACAA
CAGAGACTGGAATCTCCCCAAAGAGCTATGACTAAACATAGCTTATCCTAATAGCCTTCCTTTTCCACTATCTCTGCTGGTTGGTGGGCTAAGA
GGGGAGGTTGAACTCTTATTAAAGGAGGTTGAGAAAAATATATGCCTACAAGGAACATTCTTTTTTCTTGGCAGGATTCCTTTAAAAGAAAGAA
TTTTATTACTTTCTTTACTCTGTCTGGACATGTGTGGGCATACATTTGGAGTTCAGAGGACAGTTATTGGAACCATTTTCCCCCTATCTTTTTG
TGAGTTCTATGGATGAAACTTAAGTTCAAGGTTGTGGCAAGTATCATCTGCTCTTGTGTGAGAGTTGAGGCTTGTTGGTCACATCGACAGCACT
AGGTATGTATAGACGTGCAGCTAATTCTTGAGTGAGTGCTTAGGCTCTGACCAGAGACTTTAAAGAAAGTGGTTTCCCGGGGCTGGAGAGATGG
CTCAGTGGTTAAGAGCAGTGACTGCTCTTCCAAAGGTCCCGAGTTCAAATCCCAGCAACCACATGGTGGTTCACAACCATCCTTAATGAAATCT
GATGCCCTCTTCTGGAGTATCTGAGGACAGCTACAGTGTACTTACATATAATAAATAAATAAATCTTAAAAAAAAAAAAAAGAAAGAAAGTGGT
TTCCCTGTCCATGTAGTTGAAGGCCAGGCATAGTGTAAAGTGTTGTGAAATGTATAAAAGACCCCCCTAAGTATGATGGGATGTCATTCACCAG
GCACTTATTACATCATGCCTGCACACAGTCTGCAGTGTGTTAGATGGAATTTCACTGCAAAATGCCTTGAGTTCATAGTATCTCATTACTGAAA
AGAACTCAGATGGGGCTGGATGCTTCAGCAGGTAGAGCACAAGATGTTCTTGCAGAGGACCTGGGATTGGTTCCCAACATCCACGAGGCTGCTC
ACAACTGTCTGCAACTCCCGTTCCAGGGCATCTGATGCCCGTTTCTAGTCTCTGATAACACTACTCCCATGCCTAAGCCTCGAAAGATGAGACA
TATACACAGACATGAAAAATAATCTGAAAAATGGACTCAGCTGATCCATCACTGAGGACAGAAGAACAAAGTAGATTAGGGAGGATGATAGAGG
GTGTTGCAGAAGCCGATCAATTGAAAACCATCTCCAAAGAGGCAGAAGCTGGAATTGAGATTAGTCTTTGTAATGGTTTGTATAGGCTCAGCCC
AGGGAGTGGCACTATTGGAAGGTGTGGCCCTGTTGGAGTAGGTGTGGCCTTGTTGGAGTAGGTGTGTCACTGTGGGTGTGGGCTTTAAGACCCT
CATCCTAGGTGCCTGGAAGCCAGTATTCTGCTAACAGCTTTCAGATGAAGATGTAGAACTCTCAGCAACTCCTGCACCATGCCTGCCTGGATGC
TGCTTTGATGATAATGGACTAAACATCTGAACCTATAAGCCAGCACCAATTAAATGTTGTCCTTATAAAAGTTGCCTTGGTTCGAAACACACAC
ACACACACACACACACACACACACACACACACACACACACACACAAAGAGTGGCCTTGGTCATGGTGTCTGTTCAAAGCAGTAAAACCCTAACT
AAAATAGTCTCTAAACACTGGTATTTTCTAGACTGGCAGAAAGCAAAGCTTTGGGGTGCTTGGAGGGACTGTACCTCTGCTAATCTGGAAGGTT
TGGGCACCATTCCATGTACATGGGCTTTATGGCAGACTGTGAAATGAGGTAGATGAATGGCTTCTTGGTTTGTTTAACAGAATCTGTGTGCTTT
TAAGATGTCTTGGGGTCAGAGAAATTGGCTTTGGGAAAACACAAGCTGTTTCTGGGGAGGGAATTGCAGAGACAGCAGTGAAGCTGTTGGGGGC
ACAATAAATGCCAACTGCTCATTTTACTGAAAATTAGTGAAATGAACATATATGAATTGAAATCTATAAGAAACATTCACACAACATACTCACA
GATGGAAACTGTACCAAGGCTCTAGGCAAACTTTCTAAATTCACACTTCTCTTCTTTCTTTTTCTTTCTTTCTTTCTTTCTTTCTTTCTTTCTT
TCTTTCTTTCTTTCTTTCTTTCTTTCTTTCTTTTTTCCTGTGTGTGTGGGCAGGGAAAGGGGGAGAAAGCATTTCTCTGTGTACCCCTGGCTGT
CCTGGCACTCACTTTGTAGACCAGGCTGCCCTTGAACTCAGATATCCACCTGCCTCTGCCTCCCAAGGTTTATATTTTAGTGTTTCATCAAATA
TTTAACACTTCTCCGTAGTTAAGGGTGCATCAATAAACAAAGTAAGGTCAAGTTGGCCTTGGCAGGCTTGCTTTTGTGTGTGGGGCGCTGTAAG
AGAGGATAATATTTAACCGGATGATAGTGTTATAAAAGAAAAGCAAGGAAATTGGCTAGAAAGTCAGAAGGAGACACTGGCATTGAGAATAGGT
TCAAATGTTCCAAAGACATACGTCTATCACTTTTTACATTTTGTAAAACAAACCTCTCAGTATACAAAAATATAACCCAGCAAGTGGGAGGTGA
AGGTGAAGGAGTTCAAGGTTATCCACTGGGTAGAAAGGGATTTTGAATGCCGGTGCCTGGCAAACACAGAAGTGGATGCTCACAGTCAGCTATT
GGATGGAACACAGGGCCCCCAAAGGAAGAGCTAGAGAAAGTACCCAAGGAGCTAAAGGGGTCTGCAACCCTATAGGTAGAACAACAATATGAAC
TAACCAGTACCCCCGGAGCTTGTGTCTCTAGCTGCATATGTAGCATAAGATGGCCTAGTCGGCTCGGCCATCATTGGGAAGAGAGGCCCCTTGG
TCTTGCAAACTTTATATCCCCCAGTACAGGGGGAACGCCAGGGCCAAGAAGTGGGAGTGGGTGGGTAGGGGAGTGGGGGGGGGGGGATATGGGG
ACTTTTGGGATAGCATTTGAAATGTAAATGAAGAAAATACCTAATTAAAAAATAAAATTAAAAAAAAAAGGAATTTTGAGGCCAGCCTGGGCCA
CTTGAGATCTTGTTTCAAAACCAAAACCAAAAGGGTGCTGGAGAGAAATTATTCAACAGTTTAGAGCAATTGTGCTTGTAGAGGACCAGGGTGG
TTCCCAGGAGCCACATGGGGTGGCTCATAATCACAGCAACCTCCAGCTCCAGGGGAGTAGACGCCCTCTTCTGGCACTGGAGGGCATTTGAACT
TACACACAATTTTACTCTTTCTTTATTGTTTCTTTAATGCTTATTTTATCATTATTATTTTTTGAGACAGGGTTTCTCTGTGTAGCCCTGGCTG
TTCTATAATCGCTTTGTAGACCAGGCTGGACTCGAATTCACTTAGATTTACCTGCTTCTGCGTCCTGAGTGCTGAAACTAAAGATATGCACTAT
CACACCTGGCTAGTTTTAATTCAGAAATGATTGCTTGCATATATGTTTGTGTACCCCATATGCCTAATGCCTGTGGAGATCAAAAGAGGTCTTA
TAGTCAGATCCCCTGGAACTGGAGTTAGAGGTGGCTGTGAGCTGTTTAATCTGAGTGCTGGGAACCAAACCCAGTCCTTTGCAAGAGTAGCAAA
TGCTCTCAACAGCTGAACATTCTCTCCAGCTCCATATATATATATATAATCTTTCTTAAGTGTATTAAACTTGTGTGTAGTTGTTTTACTTATG
AGTTTCTGCATCAGTTATACGTCTAGTGTTTGAGGATGCCTAAAGAGGGCACCGTATACCCTGGGACAGATGGGTGTGAGTCCTCACATACAGG
GGTGCTTGGAATCGAACCCAGGAGCTCTGGGGGAATCAGCCAGTGCTCTTAAGCGATGACCCCTGAAATACATCTCAAAGATGACAACGATAAA
CCACAGAGCAAAACAAAAAACCACCAGTTGAAAATAAATCCGTCCCATTCGCCTTTTTTTTTTTTTTTTTTTTTAAGCACCCTTTTCTACACTC
CCACGCTAACCTTTCGGGTTCAGAGATGCAACGTCATCACGCCGGGACGTAGCTGCTT
MOUSE SEQUENCE—mRNA
CCGTAGCTGCCGCTGCTCCCGCCGTCACCGCCTCCGAGAACATGGCCGTGCCTCCCACATACGCCGATCTTGGCAAGTCCGCCAGGGATGTCTT
CACCAAGGGCTACGGCTTTGGCTTAATAAAACTTGATTTGAAAACGAAGTCAGAGAATGGATTGGAATTTACCAGCTCAGGCTCTGCCAACACG
GAAACCACCAAAGTGAACGGCAGCCTGGAAACCAAGTACAGATGGACTGAGTATGGGCTGACGTTTACAGAGAAGTGGAACACAGACAACACCC
TGGGCACTGAGATCACTGTGGAAGACCAGCTTGCTCGTGGACTGAAGCTCACCTTTGATTCGTCATTCTCGCCGAACACTGGGAAAAAAAATGC
TAAAATCAAGACAGGGTACAAGAGGGAGCACATCAACCTCGGCTGTGACGTGGACTTTGACATCGCTGGGCCCTCGATCCGGGGCGCTCTGGTG
CTTGGCTATGAGGGTTGGCTGGCTGGCTACCAGATGAATTTTGAGACCTCGAAGTCCCGAGTGACCCAGAGCAACTTCGCAGTTGGCTATAAGA
CGGATGAATTCCAGCTTCATACTAATGTGAATGACGGGACAGAGTTTGGTGGCTCCATTTACCAGAAGGTGAACAAGAAGTTGGAGACTGCTGT
CAATCTCGCCTGGACTGCAGGAAACAGTAACACTCGCTTCGGAATAGCAGCCAAGTATCAGGTCGACCCTGATGCCTGCTTTTCGGCCAAGTGG
AACAACTCTAGCCTGATTGGCTTAGGGTACACTCAGACCCTAAAACCAGGTATCAAACTGACGTTGTCAGCCCTGCTCGATGGCAAGAACGTCA
ATGCGGGTGGCCACAAGCTTGGCCTAGGACTGGAATTTCAAGCATAAATGAATATTGTACAATCGTTTAATTTTAAACTATTTTGCAGCATAGC
TACCTTCAGAATTTAGTGTACCTTTTAATGTTGTATGTTGGGGATGCGAGAGTTGATAAATACCACGTTAGACCTCCAGGCTAAGGATGACTCG
GCTTTAAGGTGTTTACCATTTCAGAGGTACAGCAGAAACCCCATTCCAGAAAGGGTCCTTTTTAGCTGTAGGCGTGGGTTGGGGAGGAGCCCCT
GTAGAGATGCCAGGCTACAAGTGGAAAGCTGGGAACATGTGGGTCCTTTGTAAATCTGTATCCAGTCCCCAGATGAAATTGTGACTTCCCGAGC
ATCGAACCCTGGTGTCCAGATCCTATCTGCTCGGAAGCATGTACACACCTGCGTGAAAGGGATGTTTTTAGACTGATCCTCACACCCTGTTCCC
ATCGTGCCCTGTTCCCATCCTAGCCCATCACTTAACCTGTTTTACACCAAAAGTAATCTTTAGGGTGTGGTTAGCTATTTCTTTTGTGCCATTT
TAGGGTGGAGAGGGTGGGCGTGATGGAGCCAGTCATTCAGGAATTAATTCTTCCTTGTGTTGTGGGGTGGTTTTCTTTCTCCTCCTCCTCCTTT
TTTTTTTAATTCCTTCTTTCGCCATTGCACCAGAGTATGAAATAGCTTCCCGTTCTCCGGCTCTOAGCTGGGCGGTGATTGTGGTCACACCCTG
ACAACACTAGGGATCTCAACTGACTCCTTTTGTAGCCTCACCACTATTTTTTAGCAGTTTAATGGGTACATTATAGAGTTTTCCATTTTGTGTG
GAATTAGCTCCTCCCCTTCAAATGCTGTAATTAACATCACTTAAAATAAAACTTGAATAAAATACTGAAACCTCC
MOUSE SEQUENCE—CODING
ATGGCCGTGCCTCCCACATACGCCGATCTTGGCAAGTCCGCCAGGGATGTCTTCACCAAGGGCTACGGCTTTGGCTTAATAAAACTTGATTTGA
AAACGAAGTCAGAGAATGGATTGGAATTTACCAGCTCAGGCTCTGCCAACACGGAAACCACCAAAGTGAACGGCAGCCTGGAAACCAAGTACAG
ATGGACTGAGTATGGGCTGACGTTTACAGAGAAGTGGAACACAGACAACACCCTGGGCACTGAGATCACTGTGGAAGACCAGCTTGCTCGTGGA
CTGAAGCTCACCTTTGATTCGTCATTCTCGCCGAACACTGGGAAAAAAAATGCTAAAATCAAGACAGGGTACAAGAGGGAGCACATCAACCTCG
GCTGTGACGTGGACTTTGACATCGCTGGGCCCTCGATCCGGGGCGCTCTGGTGCTTGGCTATGAGGGTTGGCTGGCTGGCTACCAGATGAATTT
TGAGACCTCGAAGTCCCGAGTGACCCAGAGCAACTTCGCAGTTGGCTATAAGACGGATGAATTCCAGCTTCATACTAATGTGAATGACGGGACA
GAGTTTGGTGGCTCCATTTACCAGAAGGTGAACAAGAAGTTGGAGACTGCTGTCAATCTCGCCTGGACTGCAGGAAACAGTAACACTCGCTTCG
GAATAGCAGCCAAGTATCAGGTCGACCCTGATGCCTGCTTTTCGGCCAAAGTGAACAACTCTAGCCTGATTGGCTTAGGGTACACTCAGACCCT
AAAACCAGGTATCAAACTGACGTTGTCAGCCCTGCTCGATGGCAAGAACGTCAATGCGGGTGGCCACAAGCTTGGCCTAGGACTGGAATTTCAA
GCATAA
HUMAN SEQUENCE—GENOMIC
TATATTGCATGGTGCTGAGGTTTGGGGTATGATTGAACCTGTCATCCAGGTATTGAGCATAGTACCCAACAGGTAGTTTTTCAACCCTTGCCCC
CCTCTCTCCCTCCCTCCCCTCTCTTGTAGTCCACAGTGTCTATTGTTCCCATATTTATGTCCATGTGTATCCAATGTTTAGCTCCCACTTATAA
GTGAGAACATGCAGTATTTGGTTTTCTATTCCTGCATTCATTCACTCAGAATAATGGCCTCCAGCTGCATCCATGTTGCTGCAAAGGACATGAT
TTCATTATTTTTTATGACTGTGTAGTATTCCGCCATATATATGTACCATATTTTCTTTATTCCATCCACCACTGATGGGCACCTAGGTTGACTC
CATGTCTCTGCTATTGTGAATCACGCTGTGACAAACCTACATGTGCATTTGTCTTTTTGGTAGAATGATTTATTTTCTTTTTTTGAGATGAAGT
CTCACTCTGTTGCCCAAGTTGGAGTGCAGTGGCACGATCTTGGCTCGCTGAAACCTCCACCTCCCAGGTTCAAGCGATTCTCCTGCCTCAGCCT
CCTGAGCAGCTGAGACTGCAGGCGTGTACCACCATGCCCGGCTAATTTTTGTATTTTTAGTAGAGACGGGGTTTCACTATGTTGGCTAGGCTGG
TCTTGAACTCCTGACCTTGTGATCCGCCTGCCTCAGCCTCCCAAAGTGTTGGGATTACAGGTGTGAGCCACCGCACTCAGCCATGACTTATTTT
CCTTTGGGTGGAATGGTAGTTCTATTTTTAGTTCTTTGAGAAATATCCAAACTGCTCTCTACACTGGCTGAACTAATTTACATTCCCACCAGCA
GTGTATAAGCATCCTCTTTTCTCTGCAGCCTTTCCAACAACTATTTTTTAACTTTTTAATAATACCCATTCTGACCGGCGTGAGGTGGCACTCA
TTGTGGTTTTGATTTGCATTTATCTGATGATTAGTGATGATGAGCATTTTTTCATGTTTGTTGACCACTTGTATGTCTTTTTATTTTTATTTTT
TTGAGACGGAGTCTCACTCTGTCATCCAGGCTGGAGTGTGGTGGCACGATCTCGACTCACTGCAACCTCCACCGCCCCGGATTCAAGTGATTCT
CCTGCCTCAGCTTCCTGAGTAGCTGGGATTACAAGCGCGTGCCACCACACCTGGGTAATTTTTGTATTTTTAGTAGACTCGGGGTTTCACCATG
TTGGCCAGGTTGTCTCAAACTCCTGACCTCAGGTGATCCGCCCACCTTGGCCCCCCAAAGTGCTGGGATTACAGGCGTGAGCCACCATGCCTGG
CTGTATGTCTTCTTTTGAGAAGTGCCTGTTCATGTCCTCTGCCCACTTTTTTTCGGGGGGTGGGATGGGAGACGGAGTCTCACTCTGTCACCCA
GGCTGGAGTGCAGTGGCACGATCTCAGCTCACTGCAACCTCCGCCTCCCGGATTCAAGTGATTCTCCTGCCTCAGCCTCCCGAGTAGCTGGGAT
TACAGGTGCCCGCAACCATGCCTGGCTAATTTTTGTATTTTAGTAGAGATGGGGTTTCACCATGTTGGCCAGGATGGTCTTGAACTCCTGACCT
CAGGTGATCTGCCTGCCTTGGCCTCCTAAAGTGCTGGGATTACAGGTGTGAGCCACCGTGCCCAGCCCTCTGCCCACTTTTTAATGGGGGTCTT
TGTTTTTTGCTTGTTGAATTGTTTACATTCCTTATAGATTCTGGATATTAGAGCTTTGTTAGATGCGTAGTTTGTAAATATTTTCTCCCATTCT
GCAGGCTGTCTGTTTACTCTGTTGATAGTTTCTTTTGCTGTGCAGAAGCTCTTAAGTTTAATTAGGTCCCACTTGTCAATTTTGTTTGTTTGTT
TGTTTGTTTTTGAGACACAGTCTTACTCTGTCACCAAGGCTGGAGTGCAGAGGTGCGATCATAGCTCACTGCAGCCTCGACCTCCTGGACTCAA
GTGATCCTCCCACCTCAGTTTCCTGAGTAGCTGAGACTACAGGTGTGCACCACCATGCCAGGCTAATTTTTGTATTCTTTGTACAGACGGGTTT
TTGCCATGTTGTTCAGGCTGATTTTTGTTTTGCTGTAACTGCTTTGGAGGACTTAGTTATTTATAAATTCTTTGCCGCGGTTGATGCCCAGGAG
GGTATTTCCTAGGTTTTCTTCTAGGATTTTAATTGTTTGAAGTCTTACATTTAAGTCTTTAATCCGTCTTGAGTTAATTTTTGTATATGGTGAT
AGGCAGGGGTCCAGTTTCATTCTTCTGCATATGGATAGCCAGTTATTCCAGCACCATTTATTAAATAGGGAGTCCTTTCCCCATTGCTTATTTT
TGTCCAACTTGTTGAAGATTAGTTGGTTGTAGGAGGGTGGCTTTATTTCTGTGTTCTCTATTCTGTTCCATTGGTCTATGTGTCTGTTTTTGTA
CCAGTACTATGCTGTTTGGGTTATTGTAGCCTTTTAGTATAGTTGGAAGTCAGGTAATGTGATGCCTCCAATTCTGTTATTTTTGCTTAGGATC
CTTTCGTTATTCTGGCTCTTTTTTTTGTTTAATATAAATTTTATAATAGTTTTTTTTCTAATTCTGTGAAAAATGATGTTGTTAGTTTGATAGG
AACAGGATTAAATCTGCAGATTGCTTTTGGCAGTATGGACATTTTAATGATATTGATTCTTCCAATCCATGAGCATGGAGTGTTTTTCCATTTG
CTTGTGTCACATAGATGATGCTTTCTAACTGTGTCTTTACATGGTGGAAAGGGTGAACAAGCTCTCAGGCCTCTGCCCTAATGATAATTACATT
TCAAAAGCTCTGCCTTCTAATACCGTCATCTTGGGACTCAGGATTTCAACATATCAATTTTGGGAGTAAACATTCATACTATAGCCCCATTCTA
ATAAATCATTTCTAGAATTGTCTTTTAGAGGTTGTATATTAGTTTCCTATTGCTGTTGTAACACTTCCTATTGTGTTGTAACTGTGAACCACAG
ACTCAGTGGTTTAAACAACTCAGATTTATCATTTTACAGTTCTAGAGGTCAGGAGTCTGAAATCAGTCTCTCTGGGCTAAAATTAAGTGGGCAT
CAGGGCTCCCTCCTTCTGGAGGCCTTGGGAGGAGAATCTGTTTCCTTGTCTTTTTCAGCTTCTATAGGTTGCCTGCATTCCTTGGCTCATGGCT
CCTTCTTACATCTTCAGAGCTAGCGGTGTAGCATCTCCAATCTCTCTCTTTCTTTCTTCTTTTTTTCTTTCTTTCTCTTTTTCTTTCTTTCTCT
CTCTGTCTCTCTCCCCACCCCTGCCCTGCTCTGCTTCTGTCATTAAATCACCTTCTCTCACTCTGACCCTCTTGTCTTCCTCTTATAAGAACTG
TAGGCCGGGCATGGTGGCTCATGCCTGTAATCCCAGCACTTTGGGAGGCTGAAGTGGGTGGATCATCTGAGGTCAGGAGTTTGAGACCAGCCTG
GCCAACATGGTGAAACCTCGTCTCTACTAAAAATACAGAAATTAGCCGGGCCTGGTGGTGGGCACCTGTAATCCCAGCTACTTGGGAGGCTGAT
GCATAAGAATTGCTGGAACCCAGGAGGCGGAGGTTGCAGTGAGCTGAGATCACGCCACTGCACTCCAGCCAGGGTGACAGAGTAAAACTCTGTC
TAAAAAAAAAAAAAAAAAAAGAACTTGTGATGACATTCTTGGGATTACATTGGGCACACTTGGATGATCTAGGACAATCCCCCCATGTCAAGAT
CCGTAACATCTGTATGATCTCACTTAAATGTACAATCTAGAATAATCACACTCATAGAAGCAGAGAGTACAATGGTAATCTTCAGGGCTGGAGG
GAAGGGAAAATGGAGAGGTGATGATCAAAGGGTATAAGGTTTAGTTACGCCAGATAAATAAATTCTGGAGATCTATGCATCTGACAAAAGGTAT
AATATCTAGAATCTATAAGGAACTTAAAGAGTTCAACAAGCAAAAAAACAAATAACCCCATTAAAAAGAGGGCAGAGGGGGCTGGGCGCAGTGG
CTCACACCTGTAATCCTAGCACTTTGGGAGGCTGAGGCAGGCAGACTGCCTGAGCTCAGAAGTTTGAGACCAGCCTGGGCAACATGGCAAAATC
CCATCTCTACTAAAAACAAAGAAAAAAATGTGGGCAGAGGACATGAACAGGTGCTTCTCAAAAGAAGACATACAAGTGGCCAAGAAACATATTA
AAAAATGTTCATCATCACTAATCATCATCTACTATACATCACAGTGCCTACAGCTAACAATACTGCACTGTATACTTAGATTTGCCAAGAGGAT
AGATCTTAAGTGCCCCTACAAAAAAAAAAAAAGGGAATGGGGGTAGGGGAGGAAACTTTGGGAGGTGTTGGGTATGTTTATATGCTTTACGGTG
GTGATGGTTTCATGGAAATATACTTATCTCCAAACTCATCAACATATATATATTAAATATGTACAGCTTTTTGTATGCAATCCTATCTCAATGA
AGTAGTTTTTGTTTTGTTTTGTTTGTTTTTTACATTCACAGGTTCCAGTGAGTAGGATGTGGATATCCTTGGGGGGCCATTGTTGTACTTACCA
TAGTTTGCCTCCACAGTTTTTAATGTTGGGGTTGCAGTAATACTGAACATAGATTGCCTTCCATTAACATTCTAACAGAAATATTTCCCCACAG
GAAATTTGTTGTTGTTGTTGTTGTTTTGAGACAAAGTCTCGCTCTTGTCCCCCAGGCTGGAGTGCAATGGTGTGATCTCGGCTCACTGCAACCT
CTGCATCTCGGGTTCAAGCCATTCTCCTGCTTCAGCCTCCCGAGTAGCTGGGATTACAGGCGCCTACCACTATGCCTGGCTAATTTTTGTATTT
TTAGTAGAGGCAGGGTTTCATCATGTTGACCAGGCTGGTCTCAAACTCCTGATCTCAGGTGATCTGCCCGCCTCAGCCTCCCAAAGTGCTGGGA
TTACAGGTGTGAGCCACCACGCCCGGACCCCCACAGGAAGTTTTTGTAACCATATTTCCTCAAGGTTGTGAGTGATTCAATATGCCCAAGCTGG
AAACCAGGTTGTGTTCCGTCCTGGGCTGCTGTCCATTTTCCTGCAGCAGGCATTCCCCATACTTACAATGATGGTCTTAGCGTGGGTTCCCAGC
ATCAAGGGGGGTGGAATAGGATTATGATTCTGATCGCATATAGCCTAATTGCTTTTCAGAAGGATTGTATCACTTTACACATCTCCTGATGAAC
CTCATATGACTTTCTTAAAGCTGAAAAAAGTTCGCTCTTTTTATAATCAAGGTATTATGTCCTCATTAAAGCATATTTGGAGGCTGGGCCTGGT
GGCTCATGCCTGTAATCCCAGCACTTTGGGAGGCCAAGACAGGTTGATTACTTCAGGTTAGGAGTTTGAGACCAGCCTGGCCAACGTGGCAAAA
CCACATCTCTACTAAAAATACAAAAATTAGCCAGACGTGGTGGCACGCACCTGTAGTCACAGCTACTTGGGAGGCTGAGGCATCAGAATAGCTT
AACTCGGGAGGTGGAGGTTGCAGTGACCCGAGATGGTCCCACTGAACTCCAGCCTGGGTGACAGAGGGAGACTCTGTCTCAAAAAACAAAACAA
AACAAAACAAACAAACAAAAGAATATTTGGGAAATGTAAAAAGAGCCAAAGGAAAAAATCACTCATAGTCTCATAAATAGAAACACAACTTAAT
AATTATGTTTCAATTTATAAGAATTGATCAATTCTGGCTGGGTGCAGTGGCTCACACCTGTAATCCCAGCACTTTGGGAGGCGGAGGCCGGCAG
ATCACAAGGTCAGGATTTTGAGACCAGCCTGGCCAACATGGTGAAACCCCATCTCTACTAAAATACAAAAATTAGCTGGGCCATGGTGTCGTGT
ACCTGTAATCCCAGCTACTTGGGAGGCTGAGGCAGAATTGCTTGAACCAGGACCTGGGAGGCGGAGGTTGCAGTGAGCCAAGATCATGCCACCG
TACTCCAGCCTGGGCTACAGAGAGAGACTCCATCTAAAAAAAAAAAAAAAAAAAAAAAAAAAGAATTGATAAATTCCCATAAATACTTCATTAA
TACTTAATACATTTCTTTCCAATATTTGTCTCTCTGTGTATATATATACAAAATTCTTAAAAATCATAGCTATGATGTTGGAGCTTCTTGGAAT
TGTTTTAGATTAGATCTAGGACACCTCATGTTTTGGGATATGCAGGAGAATATTATCAATTGTGTTTACCTTGGGATGCTTTCTGTCCTGTTTC
CCCAAGAGATTACTGCTGTCACTCAGAACCTGGAGGCCCAGCTGGGTCCTTCCCTGGATGCTGAGTGTCAGGGCACAGTGTGGGGAGTGTGGCC
TGAGATCCTTGACCACAAACACGCCATCTTGATTCTTCCTACCCAGACTCTAGTCTGAGGAGTTCACTGGAAAATGATTGGAAAGTTAGGTTTT
ATGACAATGCAACTTTATAATCCAATTAATTGATGCTGGTTACAAGCAGAATATCTTTCTCTTTAAAAATTAATTTACATAAATGACTACCATT
TCTGCCTTCATGAACTTCATCTTCAAGCTCTGGTACTTAGCACAGACAATGCTAAGAAACCACATAGAAATCCAGGGACATCTGGCTCTGAAAA
GAGAAGAGTTGGGAGTGTTTCATCCTATGTTCTTGAAAGGGGGGTGGAATAGGTTTATGATTCTGATCATAAATTGGCTGCTTTCCACTTTGAT
AAATATCTACAGTAGAAGCCCTAAGGCTGTAAGTTAGAGATAAGACAAAAACCAAAAACTCCCTAAAATGAAATAGTCTTACATTGGTAACCCA
TTCCAATATTAACAATGAAAGAAAAATCTCATTTTCCCTGGATGTTTTACATTGTTCTTCTTGAATGGAGGAGAGGAACTGAGTTAGCATCTGG
AAGAAAACAATCCAAACTCGACTAGGCAAAACAGGAGGCCGTTCGCTCAGGCAGCTGGTAAGTACAGGGTGTAGTCTCCGGCATGGCTAGATTC
AGGACCTCATCTCTGCCTTTCTCTTATGGGCTTACTTCATTTTCAGGGAGTCTTTATTCCTGTAGCCCCAGGAATTCTCATCTGGTCTCATTGG
TCCATCCCTGCGGGGCGGGGATCGGGGGCGGTGGGAGGCCAGGATGTGGGGGCGGAGAGGCGGGGGCAGGAGAGGTATACAGGGCTCTAATTGG
TCAGACTGGGCCATGTGGCCACTCCCAGGAAGGCTTTGGAGTCAGGGATGGAGTCAGCTCCATGAAAGCTTGCTGACCAAAAGGAGAGGGAAAC
AGGGTCATTCGCCCAGAGAAAAACTGAGGTTAGGATTGTCCTGTCCCCACAAACCTCCTTCTCCACCCACCAAGATTTGACTGTCTTCGCCAGG
GACTTGCTCTAGCTGGGTCAAGCTCAAGTGGGGTTATTGAAGTGGAACAGGGAAACCCACGCATGGCAAGAACACGGGGGCACTCAAGGAACAG
GGGCCCAGAGCCACCCTCTGCAGCGGCTGCTCCATTCTCTGTTCTGTGAAAAGCCCTCGTTAACTTCGCAACACCGACAGGGATGCCAGACCCA
GGTCTCCCCAAGGGCCTTGAAAGCTCCCGCATTTTCCCCTCTGCCATACTCATCCCTGGGTTTCTCAGTTCAGGTTTGCAAGAGAGGATCTGAT
TGACCTGGCTTGGGTCAGGGGCCCAACCCTGACCCAATCAGCTGTGGCAGATGGAATGGAGGTGCGGCTCAGGGGGTTTCCCCTCTCCCTCAGG
GTTGTGGTGGGTCAATGGATTCTAGTGATTATGGCACCTGCAGATCTCAGCTGATTTTGTTTTTTAAAAAATTACTAATACTATTTCTTGAGAC
GGGAACTTGCTCTGTGGTCCAGGCTGGAGTGCAGTAGTGGGATGCTAGCTCACTGCACCCTCGAACTCCTGGCCTCAAGCCATCCTACCTCCTT
GGCCTCCCAAACAGTTGGGATTACCCACATGTGCCTCTGAGCCTGGCCCAGTTACTGATGAGTGCCTACTCTTTTTTCTTTTTTTTTTTTTTTG
GCAGAGTTTCGCTCTTGTTGCCCAGACTGGAGTGTGATGGTGAGATCTTAGCTCACCGCAACCTCCGCCTCCTGGGTTCAAGCAATTCTCCTGC
CTTAGCTTCACGAGTAGCTGGGATTATAGGCATGTGCCACCATGCCCGGCTAATTTTTGTATTTTTAGTAGAGACGGGGTTTCTCCATGTTGGT
AAGGCTGGTCTCGAACTCCCGACCTCAGGTGATCCAGCCGCCTCAGCCTCCCAAAGTGCTGGGATTACAGGAGTGAGCCACTGCACGGGGCCGA
GTGCCTACTCTTTATGTGTCCCATTTTAAACTTACACCAACACTCTGAAGCTGAGGCTCTTAGAGGCCAGCCTTCTTGCCTGGGTCACGCAGCC
ACTAAGTGAGTGGTTAATCTGAAACTAGCACCTAGGGGAGCTGGCGAAGGGGCCCAGGGTAGCAGAGGCCATGAAGAACTCTTTCCAAGTTGTT
GTTTTTTTTTGTTTTTTTTTTTTGGGGGGGGGGGACAATGTCACTCTGTCAGTCAGGCTGGAGTACAGCGGCTCAATCTCAGCTGACTCCAGCC
TCCTCCTTCCAAGTTCAAGCGATTCTCGTGCCTCAGCCTCCTGAGTAGCTCGGACTACAGGCGCGCGCCACCACGCCCGTCTACTTTTTGTATT
TTTAGTAGACACAGGGTTTTGCCATGTTGCCCAGGCTGGTCTCGAAGTCCTGGCCTCAAGTGATCTGCCTGTCTCGGCCTCCCAAAGTACTAGG
ATTACAGGCTTGAGCCACTGCACCCGGCCCAGATTGGTTCTTTAAAGCGGAGTTGAGAGGTGGCGCTGGAGGGGAGGAAGCCCTTCGACATTTG
CTCCCAGCCTCAAAACTGGGTTGCACCGGCATCTGTTCCTAGCCCTGTGGGGTTCCTGGAGCCCCGCCTTGTCCCGCCCGGCCTCCCTGAGTTC
TTGTCCTCCCCCTGCCCACCAGTCTCAGTGTGCGGGGTGGGGACCACCAGGCTGGGAAGCCCAGAGTTCCCAGGCAACTCGTGCGCCTGGGAGG
GTCATAGAATCCGTCCTACACTCCTCAGGATCTTGAAGGGGGCTCTTCCTTACATTCCCAGTCACCCCTCCCCCAGCCCCTACACAGGGCCTAG
GTAACCTGTCTGCACCCCACTCCCACTCTGTATCAGCTGCCCTCTTCCTCAGCACCCTATCCCACTGGAGCACCTTTTCCAACTCCAGTCGCCA
CTTTTAATCTGCCGCCTTTTCCCAGCAGCCAGTCCTGATTGCCTCCTCCGTAGCCCCAGTTGCCCACTGCTTTAGATAGTGTCGCAGCTGGCTG
TGAGGAGTGTCCTGATTCTGTAACCCGGCACCTCCTCCACAGGGCCCTAGACGCCTCAAGCCTTCCAGGACGTTTGTTGATCAAAGGCGAAGGA
TGTGCAGAATCTTCGTCCATCTACGAATTAATTCTCGAAACCTGCTTCGAGTGGGCCTCGCGCGTAACACAGGGGACACTCAGTGGTGAACGAG
ACCACTCGCTTAGGCCTAGCAGCGAGGTGACCGTTCACTCAACACACACTAACTGGGTCCCGCAGGACACGCCCCGGCTGGTCGCGGGGGTTAC
CCGGGGTGCCCTCAGTCGGCCGCCCGGCCATAACCGGCGTGATCTCCTCGCGCCGAGAGACCCAGCAGGGACCTCGCAAAACCCAATCCACGTT
TTGTTTTATTTTGTCTTTTTGCCTCTCAAATGCATGGAAATTGGCTGCTAGTAGCTTTGCTACAGGAGAAAATCGCTAATCTGTAGTGCAAAAT
ACCACTCGCTTAGGCCTAGCAGCGAGGTGACCGTTCACTCAACACACACTAACTGGGTCCCGCAGGACACGCCCCGGCTGGTCGCGGGGGTTAC
CCGGGGTGCCCTCAGTCGGCCGGCCGGCCATAACCGGCGTGATCTCCTCGCGCCGAGAGACCCAGCAGGGACCTCGCAAAACCCAATCCACGTT
TTGTTTTATTTTGTCTTTTTGCCTCTCAAATGCATGGAAATTGGCTGCTAGTAGCTTTGCTACAGGAGAAAATCGCTAATCTGTAGTGCAAAAT
CGGCGCACAGGGGTTTTCTCTGAGATTGTCTAGACGCCGCGCGGGCGGGTCGGAGGCGCCAGACACATTGTATCCGGAGCGCGGAGCTCGGCAG
CAACAGTCGCCGCCTCTACTCTGTATCTGCGCCGCCCCAGGCGCCCACTGTCCCCGCTGGGCCTGGGACTGCCCTCGGGGGATGGGGCCCACGC
GGGCTTTGATGGGGGGCCGGGGGCCACTTTGTCCACCCAGGCGAGGCTTGGGTCCAGCGCCGGCCACATCAACTCCCGGGGGATCTAGCAGCGC
GGAGGCCAAGCAGGAGGCCCAGGAGCCCCGCGCGTCTTCCATTAGCGCAGGGACCTCCGGGCCACAGCTCAGAGAATCGGAAGGCCTCCTCCCC
CTTCCCGAGCGCTGCCACTGGGGCCGAGGTTTCCAGCAAGAACCCGCGTGTCCCTGCGCACGCACACACGGTGCACACGTCAGTCCGGCGCCTC
CCCGTGCCCCGACTCACGCAGGTCCTCCCGCGCGCCCGCAACACGCCCGCAGGCTCCTGTGTCTGCTGCCGGGGCAGCGGGGCCCGGAAGGGTA
AGAACGCGGCTCGCTAGCGGGATGGGGACCCTGGCCCGGCCTGGACGCTGTCCCGGGCGGGGCCTGGGGGCGGAGCGCGCCGGGCCGGGCGCGC
AGGAGGGGAGGCGGGTCCGCGCCGCCGCCGTCCGCGCCGCCCCGCCCTTGGCCCAGCCGCTCGCTCGGCTCCCCTCCCTCGCTCGGCTCCCTGC
CTCCGCGTCGCAGCCCCCGCCGTAGCCGCCTCCGAGCCCGCCGCCACATCCTCTGAGGTAGGCGCACCGGAAAAGGACCCCGGCTTCCTTGCGC
CCTGGACGGCGGGGGCCAGGCCCCTGGGGAGCTGAGAGGGAGGCGCTGAGGGAGGAGCGGGCGAGGGGCCCCGGCAGCCCGGCCGCGGGGAGGG
ATCGCGAGCGGCCGGCGCGGGCCTGGCTGGTGAGCGGGCGGGCAGAGAAGGCCGCACAGGCGGGTGCCGAACAGGTCTGGGCTGGGGAGCCCGA
GGCCGAGGGTCCAGAGACGCCTGCGGCTGGCGGCGAGAGGCGGCCCGGGCTTGCGGGCGGAAGTGCAAGGGCGGCCGCGTGGAGGCCCCGCGGG
CCGCGCGTCTAGGTGACCTTCCCCGGCGGCGCCCTCTGGCCCTGGATCCCACCAGCGTGCATCCGGCGGGGACCCGTTCGCCGCCCACGCTCGC
CGGACCAGGCCAGCGGGCGGGTGCCGGCCACGCTGCCGCCTCGGGGATGAGCTCACGTGACGACCGTGGCCCCGAGTCCCCAGGCCCACGCGCC
CTGGCCGGCCCACGCCCGCAGAAGCTGGCGCCCGGCACCGCCCGCCTGTGCCAGAGCCTTCTAGAGCGGAACGCGCCGGCCGAGAGTCGACTTA
GGCGGTAGAGGCCGGAGCTCGGGCCTGGGCTGAAGGTTTGGCCTCGGAAAAGGAGGCCCCACGGGGAAGGATGTGGCCTTCTTGGTCTTAGGAG
TGATTACTGGTTCGGTCGTTCATTCATTCGCCAAATGCGGCGGTGCATTCTGGAAACTGTTTCGGAGCCTGACTTTGGATTAGAGGCCCGCAGT
CTTAGTGGTTTGTACAAGGTCACACAGCTGGGAAGTCCCCATACCTTCGTTTTCTCATCTATAGGACGGGAGCAATTGTACCTCTCCTTCGATG
AGTTTTGGGGAATAATAAAATGAATTAATTAGCATGAAACCTTTAGAACAGTGCCGGTGTGGAGAAGGGCTAAGTAGAAACCCTGACACCCTTG
GGGCTTTTTGGGTGAATCCAGCCCATCCCCCGCAGACCATTTTGCTACACGTGGCGTTGTGGAAGGGGTTCAATAAATGTAGCTCCTGTTTTTA
AACATTCTTTCACTATTATTGACAAGCATTTGTATACCAGGTATTGAGTAACTTTCAGCTTAATTTATGAAAAATCTTGTAAGTTTACAAATGG
ACATTGTCAAGCTGGAGCAGTAAGTTTGCATGTGGAGATCTTGAATGCAGGAGCAGACCCTGGTTTAGAGCCCGTTCCGCCCGGGGTCCCTGTC
CCCTTGACTAGCCTCCCCTCTCCTGGGGAGATAGGGGAAAGGGCTCCTCTGTTGCCTAAACTTCTCCACTGAGGCAGGAGAAGGCCAGAGCAGA
CTACCGAGGGCCAGCCTTCATTCTGCCCACCCCAGCTCTGGACCAACTCAGCTCCTAAGGGTCAGACTGAGGCACTGAGGCCCTGTGCTACTTT
GTCTTCAGTGCCTCGGGTGCTGCTGCCTGGCACACAGTAGGTGCTTGAGAAGGGTCTGTGGGGGTAAATGCACTCTTGTGTCAGAATCCACCCA
TCTTTACTGACAGAGTTTTACTATTCCAGTACATGGCCCATAGTAGGTGCTTATTGAGTATTTGTGGAATTATTGAATGGGCATATGAAGGGCT
GCAGGCCCAGACCATAGTCCTTTGATCCTGGACTTTTTTTTTTTTTGAGACAGGGTCTTGCTCTGTTGCCAGGTCTGGAGCGCGGTGGCACCAT
AACGGCTCATGGCAGCTTCTGTTTCCTGGGTTCAGGCAATCCTCCCACCTCAGCCTCACAGAGTATCTGGGATCCCAGGCACACACCACCACGC
CTGGCTAATTTTTGTATTTTTAGTAGAGTCGGGGTTTCACCATGTTTGCCAGGCTGATCTCAAACTCCTGGCCTCAAGCAATCCACCCGCCTCC
GCCTCCCAAAGTGCTGGGATTACACGCGTGAGCCACCATGCCCGGTCCTGGACATCCTTTTGAGGGACACAGACATCTCACTTGTGGAAAACAG
CCTCACCTAGCAGAGAGTCACAAATATTTAAAGAACTGTAACAGTATGTATAGTCTCTTGAAATAAGTGCTTTAAACACATCGTCTTCATTCTC
TGGTTTTCCAAGTCCCGAGGGAAACTTGTTGAACTGGTGTTTCTGGGCTTGCAGGGAGGGTGACATGGGTGACTGGGATTCTACAGAAGGTGTT
GGGCCTGTTACCCCTTCCCTCATGGTGGGTGGATGGACAGCTTGTGCTGGGGTTGTCCTGAGTAGGGTGCCTGCCTGTGGGTAGTGGGGACTAC
TCCTTGTTGATTATTTAGTTTTATTTTTGCTATTCTAGAGTGGGGCTATAGGCAGGGGTTATTCGTAGCTCAGAAAGTGGGGGACCATACAGGG
ATGAGGTGCCTGTGGGCCCCTGGCCTTGCTGAACACTAGGCAGGTGTGGACAGTGAACTCCATGCTGGGGAGGTGAAGGGCATCCAACCTCTAC
CCTTACCAGGAAGATGCTCCTGAAGCACTGAAGTCCACTTCGCCTTTGATGGAATTTCCCGTGGTGTAGTGTCTTCGGTGGTAGTGACTGGAAG
AGGCGCATGTGTGGTTGAGGACCAGCCGAAGCTTGGAGGCAGCCCCTCCTGGTGCTCAGAGATTCTGTAGTCTGCGGCTTTGGGTTTTCCATGG
AGTCCTGTGGTAGCCACTGAGAAAAGTTGACCAGTGGGCTCCTCAGCTGGGTCTGGGCGCATTTCTCCATTTTACCACGTACTCAGGGCGTTTG
GGATGAGTGGGACTTTAAGTTCTTTACTCAGAACTGTGCTGGAAAGAGCACTGGAGAGTAGCTTAGGCCCATAACACAGGTCTGGTGAGCCATA
GGGTCGGTCTCATACAGGTCAAGTCACTGTCTTGTGCCTCAGTTTCTCTCTCTCTTTTTTTTTTTTTTTTTTTTAGATGGAGTCTCACTCTGTT
GCCCAGGCTGGAGTGCAGTGGTGCAATCTCGGCTCCCTGCAATCTCTACCTCTCGGGTTCAAGCAAGTCTCTGCCTCACCCTCTCGAGTAGCCG
GGATTACAGGCGCCTGCCACCATGCCTGGCTAATTTTTTTGTATTTTTTAGTAGAGATGGGGTTTCACCATCTTGGCCAGGTTGGTCTTGAACT
CCTGACCTCCTGATCCACCCGCCTCGGCCTCCTAAAGTGCGGGGATTGCAGGTGTGAGCCACTGAGCCCGGCCGAGTTTGTCTGCTATAAAAGT
ATGATTGTCGTCATTACAGTGATTGCTGATTGAGGGCTTGCTCAGCACCTTTCTGGGGGCTCAACGAATGTTCTGTGATGTTGAGTTCACCACC
CTATACCCTGGGAGAGAGATAGTGTGTTTCCATTTCACAGGTCAGCAGACTCGAGCACAGAGAGGTGAGGTAACACAGCCTGGCAGGAGTGGAG
TTGGGATTCAAGGCCTGGTCTGAATGGTGGTGCTCTCACATTGCAGTTGCACTCCAAGGGACCCTTGCAAGGTGCTAACAGATGTGAATGCCTT
TTGGAAAGTCAAAATTGGTGTTCAGATGGGAGACATTATTTTTCCACACCAGTCAGAGTGAACTTGTGCATGGCTGTGTGCGGGCCAACTGGCA
GTGGACAATGGAGTCACCTCTATTTCTTGCAAGGACAGTGGTGCTGAGTGTCTATTATAAGGGTCCGTTTTCCCTGGGATCTGGTGGGAGGCAT
TCTTTCAGGACCTGTTCAGCTAAACAATGCCTCATTGTGGACATGAAGGACTCTGGACCCTGTGGTTCAGGGTGACCTTTTGAACATGCTTAGC
AGCCATTATTATAATAAATATACAAAATGAAAACTTGTGATAAAATACTGTGTGTATTCCCTGCTTACCAAGCGCCAGCCACTGTACCAAGTGT
TGTATATTAACGAGCTAATTCAGTCCTCACAGTGACGCCAATCCAGGCTCTCTTTCTCCATATTAGAGCTGAAGAAAAAGGAGTAGAGAGGTTG
CGACTTGCCCAAAGTCACATACCTAGAAAGTGGTGGGGTGGGTTAGAACTCAGGTCTATTTGATTCCCGAGGCTTCCTGCCCAAGCACTGTCTG
TCTCAACCCTACCTGGTCAAGCCAAGCAGTGAGGCTCCAGGGAACTTGAGGTGCCTTAGGTCAGGTAGGAGCCCCAGGTATGCCTGGGATCCAG
ACCATAGTGTACTGGCTGCCAGCGCAGGCCATCTCCCCTTGATAGGTGGGTGGGCAGGCTGCCCTGAGTCAGCAACCTCCTGAGCCCAGGAGCT
CAGCATGGAACTCAGCTGTGCTGGTGGTGGCCCAGCTGCCAGGGTGTTTCAAAATAGAAGCTACCCCTGGAAAGCTCTACTGCCCACTGCGAGA
CTGTTGTGGAAGAATGGAGGGAGAGAACAGCTGCATTGGGTACGCAGACCTGCTACCAGAACACAGGGCCATCAGCCTTTGCCAGCATCCTGGA
GCTTGAACCAGGAACTGTTCCCCTGGGTTGTTTCTTCCTGGCAAGAAAGAGAAAGTGCTGGAGTGTGTGTGTGTGCATGCGTGCATGTGTGTGA
GCGAGCTGCTGATTGTGTTCGCCCCCATGTTGGCTTTTAGAGCTAGGGTTGCCTTCTGCTGGGGAAGTTGCTTTTCCTGGTCCTCAGGGCTAGG
AAGAGGTGCTGTTTCTGTGATCACTGGCTGGTCTGATACCCCTCCTATAGGCTGGCCTAGTTCTGCCCTGACAAACCACCTAGAATGGTGTTGG
TGAAACAGCGGGGCCAGAGACTTTTCCATAGTACTCTCTTCCTTGGCAGAATCATAAGATGATGGCAATGATGATGATGATGGTTGTGATTGCT
CTGTTGGTTAGCGTCTTTGCAGGGATCTGGTGCACACTTACACTTGGTAATCCAGGAGAGTTTAATGAAGACATCATTTGCAAAGCTGTGGATG
GGGTGTCAGGTCTGGTCTGTTAACACCCTGAGGCCTACAAGAGAGGGAGCTTCTTGGCAGGAGCTGTGGCCTTGGGTAGAGGAAGGTAGTCATT
GCCCATCTGAAGCCTAGCAGGGAGGGAGACTCGGGGTGAGTACCCCGACTTCATTCTTCCCTAAACTCCCGTCTTCTGCAAGTACCTCACGTTG
AAAGGCTAAGCCCAATCATAAGCCCATGGACAGCAGTCCATAATGATCAGTTCTGGGGGCACAGAGCAGGGTGGAAGGGAGGAGAATGGATCTG
GAGGGGCAGACAGAGTATCCAGTGTAGTGGATTATGGTTATTACTGCCATTTGTTGAACACTTACTCCATGCCAGATACTTCTGCTGTTCTGCC
TGTTTCACTCATTCCTTGTAACAACTTCCTTAGGCCTAAGGCCTTTCCTCCCAGCTGTTTTTAGCTGAGTCTTGGAGACCCATGGCCACCCTGC
TCCCTGTATCAACCATTGCAGTAGTTGTTGGCTCTCTAGGGGTGCAAAGCTCATCTGCCTGAATCCTTCTATTATTACTATTTATTTCTTTTTA
TTTTTTATTTAAAAGAGACAGGGTCTCACTGTATTGCCCAGGCTGGTCTCGAACTCCTGCATTCAGGCGATCCTCCTGCCTCAGCCTCCCAAAG
TGCTGGGATTAGAGGCGTGAGCCACCATGCCTGGCACATGCCTGAATCCTTTTGAGGGAGCCTCTGCAGAGAAGAGAGCATATTTCTACCAGGC
GGGGGCCTGGTAGGTGCTTAGTGCAGGAACCGCCCTGAGCTGCTGCTTCTCAGTGGCACCTGGGGGCAGCCCTGCCTGTTAGGCACAGGCTGAG
AGGTAGGGCAGGAGGAGTTCCATCTCTTCTGGCAGGCTCTTCTTGAACAAGCGCCTCCGGTGATTCTTGTGCACCCTGAAGTTAGGGAGCTCTT
TCCTGCTCATGATTTCTGGCAGGGTGGCCAAGCCACTAGTGGTCACCTGGGAGTGAAATGTGCCCCGACGGACCTTGCCTGATAACTCTTCCAT
CTCAGTGTAGTTTAAATCTGTTCTTGCAATCTGTATGGACACTCTAGGTAGCCTTCTGGCATTGCTACTGCAGCAGCCTTGGAACGTGATTTGG
GACACAACACAGCTCAATTTCAGGCACAGTGGTTGGCTTTTAAAGTGCTGTTTTTTTGGAGAGGGAGTCTCTCGCTCTGTCACCCAGGCTGGAG
TGCAGTGGCACGATCTTGGCTCACTGCAGCCTTTGCCTTTGGGTTCAAGTGATTCTCATGCCTCAGCCTCCCAAGTAGCTGGGATTACAGGCAC
TTACCACCACGCCCGGCTAATTTTTGTATTGAAATTCTTTATCCTTAAACAAATTATTAGTATACACAAACAGCTTAAATAATGAAGCAGAACA
AAAAATGAAAATTCGATTTGAAGTGCATTCCTTCCCTAAACCTCCTTCTCCAGAAGCGTATCTAAGCCAGCCCCAATTTGCAGATTGGCTTGTA
TCCTTCCACATGCTTTCCCATCCATTCATGAACATAGAAAGATGTGTAAAAAGGTTTTCCTCCAATTACATGGAATTACAAATTTTCTGACTTT
TTTCATTTAACTGTATCATAGCTAGCTAGCTTTCTTTCTTTTTTTTTTTTTTGTTTCGAGACGGAGTTTTACTCTTGTTGCCCAGGCTGGATTA
CAATGGCGCGATCTCAGCTCACCACAACCTCCACCTCCCAGGTTGAGGCAATTCTTCTGCCCCAGCCTCCCGAGTAGCTGGGATTACAGGCATG
CGCCACCACGCCTGGCTAATTTATTTTGTATTTTTAATAGAGACAGGGTTTCTCCATGTTGGTCAGGGTGGTCTCGAACTCCTGACCTCAGGTG
ACCCGCCCACCTCGGCCTCCCAAAGTGCTGGGATTACAGGCATGAGCCACTGCGCACGGCTATCGTAGCTTCATAGCTAGCTTTCTATGCCACC
ACATACATCCACCTTATTCTTTTTTTTTTTTTTTTTTTTTTGTGAGACAGTCTCGCTCTGTCATCCAGGCTGGAGTGCAGTGGCATGATCTTGG
CTCACTGCAACCTCTGCCTCCTGGTTTAAGCTTGTGCCTCAGCCTCTCAAGTAGCTGGCATTACAGGCGTGCACCATCACACCTGGGTGATTTT
TTTTTTTTATTTTTTTTTTATTTTTAGTAGAGACGGGGTTTTGCCATGTTGGCCAGGTTGATCTGGAAGTCCTGGCCTGAAGTGATCCGCCCAC
CTCAGCCTCCCAAAGTGCTGGGATTACAGGCATGAGCCACCCACCTTATTCTTTTTGATTACCATATGGTACTCCTTAGTTTGCAAGTATAGTA
CCTTAATTTTTATTCATTCATTTTCCTTTTGATGGACTTTTAGGTTGCTTCTGGGTTTTGTGTTACAAATACTGCTGCAGTGAGCATCCTCATA
TACACATCTTTGAGTAGTGCCTTGGTTGCTACAGTGGGGCAGGTTCCTAGAAGTGGAATTGCCACTAGGGTTAATGCTGGGTTAATTGCTCTCC
AAAAAGAGTGTACCTGTAGTACTCCCCCTTGGCGTGAACAAGAGTGACTGTTTTCCACACCCTCACTGACACTGGATATTATTTACGTTTTTGC
CAGACTGCTGGTTAAGTGAGCTTCTGAAACACAGATGTGGTAGTCACTCAACAGTGGCTCTTGGTGGCCCTTAGAATAAAATCCATGCATGGTA
TTGAGGTCAGAAGCAACCAGTGCTTCTGATGGCACTTGGTCTCCTCAGCCTGAGATCAGCTCTCCTTAGGCCGAGGTGGGAGCAGGCAGGGAGT
GGAGGTCATTGCTAGTTGAGGGTCTCCCCAACTCCCCCACTCTTGGTGATGCTGCAACAGTGAGCCTGCAGAGGGAGCTCTTACTTCCTGGTTG
CATTGTAATGAGTTCCTATTGTCAGATTCCAAGTTTCTACTTTTTTCCCCATTGCTAAATAATACTTTGATGCTCATTGCTCATTCACTCATCA
AACACATTTATATTGAATGCCTATTATGTGCCAGGGCTTAGCATCTTTATATACGTAACTTTTTCCATATTTTGGATAAATTTATGCATGACAG
GCTCTGGGGTGCTTTGAATTCAAAGAGGTGATTTTGGGGGTAGGTGTATGGGGTAGGGTGGGGTGGGGGCACGGTGAGCACAGCAGCTGTCATT
GCCATTCAGCTGATGAGCCAAGAAGGATGTGTACCCCCAAGACAGAGGTTACGTAAGTATTATGCAGACTGTGCTGGGTGATAGATACACTATC
CTTCCCCTCTGTGCTTCCAGTATGGGCCGGATTTTCATTCCTCAGCTGGAATGGGGCTTGCATAATTTGTTCAAGGTCAGCCAAGGAAAGGTTG
GGTAGGTAGACTGGCAGGCTGTGGAGGGGAACCAGGGACTCCTGTATCCTGGTGTGACTTGCTGGTCCTTCTCAAAGTCTTCAGTGACTGCAGG
CAGGTCTGCTCAGCCTGGCCCTGCCCATCCCTCTGTTTCCTACCAACCAGTGGGAACAAAGCCCCCAGGCTCTGCCCTGAAGCCATCACTCAGG
CAGAGAGGCCTGTGGTTCTGACTCCCCCAGGACGCCCTCTGACTTCTGTCTGTCCAGGGCTAGCTGCTTTGCCGATGCCAGACTGCCCTGCTTC
ATGCGCAGCCTCTAGAGGCTCAGCTTGTGAAGGCCCCTGGGGGGTGGATGCTGCAGAGACAGCTGTGTATCAGTAGCTAACTGTACAGGCTCCG
ATTTGGAGCAGATCTGGGTGGAAGGAGTGACTGGGAGGGGTGGGGGCCAGGGTTCAGCCTTCAAGTCAGCACCCTGGCAGGGTGTTAAGTGAAA
GCAGGCTTTGTTGCCGACTTTTCTTTCCTCCAGTCCTCGCCTTAGAAAATTAATGCAGATTATTATTTCTATCATAAAATTGTCTCTGAAATGG
GTTCGAGAGCTGTGTAAAAATGGGCATTTTGGGGGTGCTGTCTGTAGCTGTAAGAAAGCTGAACTTCTCGGAGCGGCAGAGCTGTCTCGGGCCT
TCCTTAGTTCCGTCAGATCAGTGCAGCAGGGGATGGGCCGAAGTGCACAAAAAGGAGGGGAAGCTACCACTACCTGGCAGTTGGGGGCCTTTAG
TGAAAGGGTGAGTCATCCTTTTGCTGTCCTCGGTGGTGTCACTTCAGGCCCAGGAGTGGACTTGACTCCATTCAGCCAGTGGTTTCTGTGAGTC
TTCCTTGCCAGGTGCTATGCTGGGGAGAATGCTTACTTGGGGGCCCAGAACGGGGGAGATTATGCTTCATTGTCGGTGTTCAAGGAGATGGGGA
AGAGAGCAAGACACAGATGAGAAAGCCAGCATCCAGTATGTTTACAGTGAGGCATTGGATAGGGATATGTTTTAGTGAACCAGCAAGTTCACTT
GCGTGCTGCTGGTACCAACTACATGGTTGTGTTGTGGAACCCCACAGCCCCAAAAGAGCTTGGCCGTGTCGGAGCTCCTAGACGCCCCAGGAGG
GGTCCGGTCTGCTCTTCTGAGCTCTGCTCTCTGAGTGCCTTGTCCTTGGGTGGTAATCTCTTTAGTGGCCTTGTACTTCAGGCTGATGTTTGCT
GTGGGTGGGGTGTTTTTTGACAGGTGGCTGTGCTTGTTGGATTTTGGGGATTAGCGATGAGAGAGGGCATTTGGGGAACATTTAATGGATGAGT
GCTCTGCCTTTATCCTGAGCGGGGACCAGTCCAGATGTGAAGGCTGCTGTGTCTGGGAGGCGTCTCTTCTGTGGGGTCAGGGGAGAGTCGTGGG
GAAGGCTCTGGCTCCTAAGGTCCAGGGAGGTCTTAGGTGACCCACAGATATTACCACTGGACTGCTTCTCCTTCTGCTTCCCCAGCCCCCACCC
CGGCTGAGTTTGTGGCCCCCCTGGGAGGCATAGCACTGAAGAGGGGTACTTGGTTCACTGATGGTTTGTTAACCCTGTCGGGTGGAGAATGTTC
TGGGCCCGTTACTGTTATGTTCTGTGTCTGCCTGGGGTTACATTGCCTCAGCTTTCAATCCAGAGTTGTTCTCCTAGGAAGGTGTCAGGTAAAG
GGTATTTCTTGAGGTTCTGGTGGGTGGTTTCCTGGTCTATCCCGGGGGGATGCACCTACAGGGTTAGTTTGGGAGGGAGGAACAAGTGGGGAGA
GGGGAGCCCCCAGACTGGAAAGAGCCAGTGGCGGGCAGTGTAAAATGGATCTTCCCCCCTCATCTCTCTACCCTGATACTAATGTGGGCTGACC
TGTCCATGGTTTCAGCCTGATCATGTGCAAGAAATAACACAGCAGCGACAAAAATAGGACAGAGTAAACAGCTCGCTGCTCTTCTGTCTGTGCT
CTGACACAAAAGTGAGCTGGGATAAAATTAACAAAGCATCTGGAAAAAGTAAAGTAGGACCTGGATCACAACTTCACAATTTAAAATTGTAGAA
GTTTATACTGTTTCTTTTACAACATACTCAATGAGTCTGTGGCCTCCTGCAATGCCTTTGAAGTTAAAGCTTTGGCCAAGAATGCAACTTCCAT
TGATGATATGGAAGCATATCATGTCATATGACATGCCAGGAGCATGTCATATATGTGTTTATTTGTGTGAATATATATACATGTAACTTCAGAT
GGTATATATGCAGATGAATTTTGATAATTTAGGTATACTGTATTTTAAAACGAATGGAATGGTCCTTCTGGTTGAGACTAATGATTCTGGGGAT
GGAGAAGGTGCAGGAGATGAGGCTTTCTCATGCATGACCCCCTCTCCTCCTGGGCAGAGCACACCATGTACAGTCCCAGATTAGGATATTAATC
CTGTGTACACAGCATATACAGCATGCCAAAGCAAAGCCTTCCAGGAATGCAGTGTGGTCCTTAGGGCAAAGACTATTTGAGTTACTCTCCTTCC
TTGAACACCGAGGTGCTTAATAAATGTTTGTTGATTGACTTAGTGATATGCAGCAATCCCAAGTAGTCCTTTGATGGTTGGTTTTAAAAATAAA
GTTACACTGGAGCTCAATAAATATTTGTTTAATGTATTTGGAGGATGTATTTGGGTTTTTTCCATGTGAAGAGCTGCCAAACTGGTTTGGTTTT
ACTGTATTCTCTATGAGAAATATGAAGTGGGTTCCCATAAAGTCCAAAAGTTTTGTGAAAAGTTGGGCCCATCCTGGCATATAGTAGGTACTCC
ATAAATATTTGTTGAATGAATGAAATCAGAGCCACATGGAAAATGATGTTCCCATGAAAAGCTCTGATTTCTATTCGGTACATTTAATGTCCTA
GTAGCTGACATTTTGTAAGATGATATGTTTTATTGGCAACAGTCCTACAATTCAGTAAAGTCACTGGCTCATGGGAATGTGTCTTTGACAGTTT
ATTCATTAAGCAAATATTTCCTGACTCCTACTCTGTTCTGGGCCTGGGCTCAGTCCTGGGGATGCTGAGGAGGAGAGGTCTAAATTGTTGATCA
TCTGTCAACAAAGACTCATTGAGTGTCTCAAGCTCTGGCCACAAAATGAAGGACAAGACAGCAAGGGCTTCTTGGCCCATCTGGGAGGATAAGC
TACCTGGTAGTCTTAGTGCTAGGTGATTTTTATTGGTTGCTAATTACATCTAATAATTGTTATTGATGGAAAGCTAATTTCCCTAATTATCAAT
GCATTTATTCTGGTGATTCTTTTATCATAGCAGAAGATGGCTGTGCCACCCACGTATGCCGATCTTGGCAAATCTGCCAGGGATGTCTTCACCA
AGGGCTATGGTGAGTGTTGCAGAGAGGGGGTGCCTTTCAGCTCACAGACTGAGTTGGCATGTTTGAGACTTTACCGATAACTGTTTAGGAGACC
TGGGTAGGTCAGCTGTTCTGAACTTTCACGTGAGGGAAAAAAGAAGCTTTCATTTGTGTGGCAATTGTAGCAACTTTGGTTGTGCACCCAGTTG
GACAGGCTCCTGCATTGGTGCTGTCAAGTGGGTATTCTTGTTTTCTTTTCCAAGTGTGGAGCAGCCCTGTGGAAGCTGCTGCAGTGGAGCGCGG
CTTCTATATTTAGCCTGTGCTTAGCCACATGCCCACGAGGCCCAGTAACTGTGTCTTTGCCAGCTCTCAGGTGTCTTCTTATCAGACCCTGCTG
GGAGTCCAGGTGGGACCCAGGTGGGGGTGCCCATTCTGTCTGCTGCTGTTCCATGGCAGCTGAGAGCTCCCCCCACGAGCAGCAGCAGAGACTG
GGTGCCCTCAGCCCCTGTGGCAGGAGTGTGCTTCTTTTTAAAAAAGCATCCTGAAGCAACCATGAGGGAGGCAGAGGTGCTGTTCTCTAGTTAT
TTAACCTATTGACAGTTGTCTTCTTCTTTCTTTAGGATTTGGCTTAATAAAGCTTGATTTGAAAACAAAATCTGAGAATGGATTGGTAAGTTGT
CCAACCCACATGGAACATGAGTATTTATTTATTTTTATTTTATTTTATTTATTTATTTTTGAGATGGAGTTTTGCTCTTGTCGCCCAGGCTGGA
GTACAATGGCGTGATCTCAGCTCACCACAACCTCCACTTCTTGGGTTCAAGCGATTCTCCTACCTCAGCCTACCGAGTAGCTGGGATTACAGCC
ACCCGCCACCATGCTCGGCTAATTTTGTATTTTTAATAGAGACGGGGTTTTTCCATGTTGGTCAGGCTGGTCTTGAACTCCCGACTTCAGGTGA
TCCGCCCACCTTGGCCTCCCAAAGTGCTGGAATTATAGGCATGAGCCACTGCGCCTGGCTTATTTTTATTTTTAAAAAAGATTTTAGATTCAGG
GTGTACATGTGCAGGTTTGTTACATGGATGTATTGTGTAATGGTGAGGTTTGGGCTTCTAGTGTACCCATTACCCAAATAGTGACCATTGTATG
GAACGTGGGAATTTGTTGTAGATCAACAAATAACTGTCGTGACCTGGCCCGCAAAGCCAAAAGAAGGTACTTTTTTTTTTTTATTCTGGCAGTT
TTTGTGGTTTTCACATTCATTCCATTTTCTGCATGATGGGTGGTCCAGGGGAACCATGCCAGTAGGCCCCCAGTTCAGCAGCGGGTAATAGAGG
AGAATGGGTCAGGTCTCAGTTTTAGTTTTCCTTGTGCTTCTTATTTTCAAATTCACCTGCATTCAACCACATAAGTGTTTTTAAAGTAATCTTA
GTAGTCCCTTTGAAATTATGTGTGCAGTAATTGTTGGAAGAAAGAAGTTTTGGGTTTGAATTACCGCTGTGTCAGCTTTAGCTCAGTGCTTTTT
CTCTGTACTGCCCTGGAGCCAGGATGGAAGGGAGATGCTTTCCTGTCCAGACTGAAGAGTTACAGGGAGGAAGGAAGCTGTCTGCTGACAACAA
ATTCCCCATAAGATTTCTTTACATAGCAGGCTCCTTTACTCCCATCTGTACTTTAAATATCTATTTGAATTGTAGAGTTAGCCTTGGCCCCCCC
ACATTCAGGGTCTTGCCTCTTGCAGAAAGGCAAGTATAGTGTTTAGGAGTGAAGTGAAGCCAAGTGAGTGCTATGGTGCAGGCTGTGACTCTTC
TCTCTCCTTTGAAGGAATTTACAAGCTCAGGCTCAGCCAACACTGAGACCACCAAAGTGACGGGCAGTCTGGAAACCAAGTACAGATGGACTGA
GTACGGCCTGACGTTTACAGAGAAATGGAATACCGACAATACACTACCCACCGAGATTACTGTGGAAGATCAGGTAATGGCTGCTGTGAAAAGA
TGTGGATTTATTAATTCGCATCTGCCAGCCTGCCTTGTGACTAAATCTAGTGGCAAATTTCTTTTCTGTTCAGCTTGCACGTGGACTGAAGCTG
ACCTTCGATTCATCCTTCTCACCTAACACTGGGTAAGAGTTTCATCTGTTTTCTCCACAAGGATGTTCTCTGATGTTGCAGGTGGTGGAAGCCC
TTTGTGACAAAATGTTTTGGGGGCTGACAGCACCTAAAATATGGTCTCCGAGACCTGGCGATTTAAGTCCTCTGGTTTTGATTTGGTCCCAGGG
GTCGTATCCACATCTATGCACTAACAGACTATGCTATAATGAGCACTTCCTAATTCAGGACTGGTGTTTACCCAACAAACGATTTCTAAGTGCC
ACCTGTGCTTGGCCCTGTGCCCATCTGGAGATCTAAGGGTGCCCAGGCCATGATTGTTACCCGCCAAGGAGCTCACTTTCTAATAGAGGATTCA
GACCAGTGTTTAGCCGTGTTTTGTAATAAGATTCTGCATTTTGTTAGTGTTCTCCTAGTTTCTGCCATGGAGGTTGCAGGATTTCTGTTCAGTA
ATAGCCATTTCATGTGAGTTAGGCTGCTGGTGATGTAAGTGGCTATGACCAAACGGGAGTGGGTGACATTTGGAAGCAGGGCCTAACTGGTCAC
TGTTGCCAGCCTCATTTCTTCAGGCATGGAAGTCCTTCTCCCAGCTTCCTGCTGCTTAGGGACACTGAGACCCTGTGGGTGTAACTGCAAGGTG
GCTCCTGAGGCTGCACTTTCCCCAGGCCTTCTGGCCACAGATGTAATAGGCTTGTTAGTTCTTGACCATCACTTGGCATGATAGCATGGTAGTC
TGCCTCAATTCCTGGGTGCTTTTCAAAGTGCCTAGAAGGAATTATTCCCTTTTAGAATACACCCTTGTTTTTTTCCACTCATATTGGTGGGTCT
TCCAAACCTGGGGAAGATGTTTTATATAGTGATGTTAGGGTCAAGGGCATGTACTGAATTTCAGTTTTTAAAAATTGTGGGCCGGGCGTGGTGG
CTCACGCCTGTAATCCCAACACTTTGGGAGGCTGAGGCAGGCAAATCACCTGAGGTCGGAAGTTTGAGACCAGCCTGACCAACGTGGAGAAACC
CTGTCTCTACTAAACATAAAAATTAGCTGCGCCTGGTGGGCGCATGCCTGTAATCCCAGCTACTTGGGAGGCTGAGGCAGGAGAATCGCTTGAA
CCTGGGAGGCAGAGGTTGTGGTGAGCCAAGGTGGTGCCATTGCACTGCACCCTGGGCAAGAAGAGCGAAACTCCATCTCAAAAGAAAAAAAAAA
AAAAGAGTCGGATGCAGTGACTCATGCCTGTGATCCCAGCACTTTGGGAGGCTGAGGTGGGTGGATTGCTTGAGGTCAGGAGTTTGAGACCAGC
CTGGGCAACATGGCAAAACCCCATCTCTAATAAAAATACAAAAATTAGCCAGGCATGATGGTGCGTGCCTGTACTCCCAGATACTTGGGATGCT
GAGGCATGAGAATCGCTTGAACCCAGGAGACAGAGGTTGCAGTGAGCTGAGATCGCACCACTGCACTCCAGCCTGGGCTACAGAGAGAGACTCT
GTCTCCAAAAAAAAAAAAAAATTGTGGTAAGATATACATATAAAACTTAACATCTTTAAGTGTGTAGTTAAATGGCACTATGAATTTTTCAGTT
TTGCCATTCATTTTTTTTCTTTCTTCCTTTTTTCCTTTCCAACAGATATTTATTAGAGGGAGGATCTACCAAGTGCAGACCTGTGCTGGGTGTG
CAGTGCACACAAGTGACTGGGCACACAGGGTTCCTATCCTCTGGAGATGTCGTCTTATAGCTTGGCTATAGATGATCTGAAGAGACCATTGTTA
CGGGGCTGATTTACTCTCATTCCTCTTCGCTGCTGTAGTTTCTCCTGCAAGAGCACTGCCTTTTTGCAGTGCTGTGCACTCTCCCCCCAGGAAC
TCTGCCATGGTATCAGGGAGCGGTTATCTGGAAAGATCCTGGGATAGGATGAGAGGCTGGAGGATGTGCCCACATGCTTGAATTTGCTGCCTGG
GACTTTGCCTGCTGCCCTGGGATAGCACACTTTGGAATTTGTAGGCGATTTCCTTCCCATGACCTTAGGGAGCTTTGCAGAGGTCTCCAGGCCA
TGCAGTATAAAACACAAAGGAAAGTTTTTTGGTTTTTTTTTTTTTTGGGTTGAGGGGGACGGAGTCTTGCTCTGTCGCCCAGGCTGGAGTGCAG
TGGTGTGATCTCAGCTCACTGCAACCTCCTCCTCCCGGGTTCAAGTGATCCTTTTGCCTCAGCCTCCCAAGTAGCTGGGACTACAGACACGGGC
CACCATGCCTGGCTAATTTTTGTATTTTTAGTGGAGACGGGGGTTTCACCGTATTGGCCAGGCTGGTCTTGAACTTCTGACCTCGTGATCCACC
TGCCTCGGCCTCCCAAAGTGCTGGGCAGATTCATGTGTTTCTCCTGCCTCAGCCTCCCGAGTAGCCGCCATTACAGGAATGCACCACCACACCC
AGCTAATTTTGTATTTTTAATAGAGACAGGGTCTCTCCATGTTGGTCAGGCTGGTCTTGAACTCCTGACCTTGGGTGATCTGCCCACCTCAGCC
TCCCAAAGTGCCGGGTTTACAGGCGTGAGCCACTGCACCTGCCCCCCTTTTTTTTTTAATTTACTTTTTATTTCAAAATAATTTTATACTTAGA
AAAAAATGTGGCAAAAATAGTATGCAGAGTTCTCCTGTGTTCTTCACCCAGCTCCTAATGTTAATGGTTTACGTAACTATAATGATCAGAATCA
GCAAGTTAATGTTGATATCATATAGTTAATTAATCTGTTGTCACAATGACGTCTTTTTTCTGATCTGTGATCCAGTTCAGGTTCCTAAATTGCA
TCTAATTGTTAAGTCTTCTCTAATCTGGAATATTTTCTGACTCTGACACTTTTGAAAAAGAGTGGCCAATTATTTTGTTAAGATGTCCCTCAGT
TTGGATTTGTCTGATGCTTCCTTATGATTAAATTTAGGTTATGCATTTTTGGCAACTGTAGTTGTTGTGTTATATTCTTCTCTGCACCTGATGT
TAGGAAGAATATATCAGTAGGCCTCATTTTTGGTGATCAGTTTTGAAGTGGTGTCTGCCAACTCTCTTCATTGTAAAGCTACTATTTTTCTCTT
TGTAATTAGTAAGTATCTTGTGGGTAGACACTTTGAGATTATGCAGATATTCTATTTCTCATCATACTTTTGCTCAAAAATAGTAACATCCATT
GGTGATTCTTGCCTGCAACAGTTACGCTTGGCAAATGGTGACTGGAGTGCAGTGGTGTGATCCTGGCTCACTGCAACCTCTGCCTCCTGGGATC
CAGCAATCCTCCTTCCTCAGCCTCCCAAGTAGCTGGGACCACAGGCGTGTGCCACCAAGCCCAGCTAATTTTTGTATTTTTAGTAGAGATGAGG
TTTCACCAGGTTGGCCAGGCTGGTCTAGAACTTCTCAGCTCAAGCGATCCACCCGTCTCAGCCTCCCAAATTGTTGGGATTACAGGTGTGAGCC
ACCACGCCTGGCTACAAATGGTGATTTTCTTTTCTTTTTTGTTTTTATGAGATGGGGTCTCACTCTGTCACCTAGGCTGGAGTGCAGTGGTATG
ATCTCGGCTCATTGCAACCTCTGCCTCCCTGGCTCAAGGGATCCTCCCTCCTCGGCCTCCCCAGTAGCTGGGACTACAGGTGCCTGCTGCCACC
CCTGGTTGATTTTTATATTTTTGGTAGAGACAGTGTTTCACCATGTTGCTCAGTCTGGTCTCAAACTCCTGACTCAAGTGATCTGCCTCCCACC
TTGGCCTCCCAAAATTCTGGGATTACAGGTGTGAGCCACCACACCTGGCCTCAAATGGTAATTTTCTATTGCCATCCTTCCTTCACTTGTTAAT
TGGTATTCTACCGTAAGGAAGAGCTATTCCTTCTTCCCCATGTATTTATTTAATCAATTATTTATTTATATTAGTATAGATGCATGGACATTTA
CTCTATGGGCTATAATGCACAGTCTCATTTATTTTGTCGCTCAAGTTGTCCCAGATATGGGCTTTGGGAGAATACACTCTGTGTGCTTTTTGAC
AAACCTCTGTCGTTTTTCAGAGCATGTCTTTATTTCTGGTTTTAGAAAGTGTACCACGCTCATCTAGTACTTGTTTTTCCCCAGTCCTGCTATC
TGCCATTTCTCCAAGGAGCCTTGGTTCTTTATGTTGGAGAATGATATTTAGAAACTAAGATTGTAGGCCTGGCGCGGGGGCTCATGCCTGCAAT
CCCAGCACTTTGGAATGCTGAGGCAGGTGGATCACGAGGTCAGGTGTTTGAGACCAGCCTGGCAAAACCCTGTCTTTACTAAAAATACAAAAAT
TAGCTGGGTGTGGTGGCGCACACCTGTAATCCCAGCTACTCAGGAGGCTGAGGCAGGAGAATTGCTTGAACCCAGGAGGTGGAGGTTGCAGCGA
GCCGAGATGGTACCACTGCACTCCAATGTGGGCGACAGAGCAAGACTCCATCTCAAAAAAAAAACAAAACTAAAATTCTGGGTGCTAGATGTAC
ATAATGCTACTGGGTATTTGAGGAAAGTTCTGGTGGTGCATCATGGAGATTAGAAACGAAAGCTGGCTTTCCAAAGTGACTGAGGGTACAGCCT
GGGAAAACACCTGGCTCCCAGGAGGAGCGGAGTGTAGACCACATCTGGATGAGGCCACAGACCTCAATAAGGACCAGCACCCACGCTGAGTATC
CATCACAAATAAAGCTTGCTTGTTAACCACAAATCAGTCAGGCCTCTCTCGGGTGCTTGTCAAATTAGCACTACTGTTGAAATAGCTTAAAAAT
AAATCCCAATAATATCTGAAAGAGGAAGACTCCACAGACATGGTGTGCAGTGTTAGAAAGAGACCTGGAGAGAAGCCTGAGCCACTCCCCAGCA
CTGCCCTTTCTCTTGGGGATTGTGGGCCCTGGCCAGAATCCAGTGAGACAGTGGGTGGGGGTGCCATGTCAACTGGTGCAGGTGGTGCACACCA
CTGGTCAGAGGCCCTGCCATAGGCATCATAGTTTGTGATCATCAGCAGCTTTTTATTAAAAATTGAAAAAGGAGATGCTTAGAAGATGCCTGAT
TTTATATTTCCTTTTCCCTTTGTAAATGTCAGCCTCTCAACAGCTGTCTAATCATCAGTCATCTCAACCAGCCTGGTGCCAATCACATACTTGG
CTGAAACCCAGACTTCTTTCCCCAAAGAGCAGGCAGATGAAGATAGGTTTCTTTTTCTTTTTTCTTGAGACATCTTGCTCTGTCGCTCAGGCTG
GAGTGCAGTGATGTGATTTCAGCTCACTGCAACCTCCACCTCCCAGGTTCAAGCAATTCTCGTGCCTCAGCCTCCTGAATAGCTGGGATTACAG
GCACATGCCACCACGTCCTGCTAATTTTTGTATTTTTAGTAGAGACAGGGTTTTTCCGTGTTGGCCAGGCTGGTCTCCAACTCCTGACCTCAAG
TGATCTGCCCTCCTTGGAGTGCTGGGATTACAGGTGTGAGCCACTACGCCTGACCAGTTTTGGATTTTTCTTATTGAGAGATAATTTGGTTGTT
ACTCCTTTCCTTCAAACCTTGCCAAAATGTACAGAAGTAACTTGAACAAAATTGAGGTTCCAAGGCATAAGTTTCATTGTCACTTGTTCTGTTG
GTGAGCAGGTCTGTGCACACCTACTCCCAACTGCTGAGGGAGCTGAGCAGCCAAAGAAAGAGACTGACAAATCCAGTTTCTCAGAAAGAAACAT
TTAATAGAGACTTACAAATAGAAGCGATGTCTCAAGCAGCCAAGAGACAGTGGATCCCTGCATTCATCCTCCAGAAAGTATTCTTTATATAGCA
AGCTTTTAGAGTAAAGACATGTGCATGTCTTAGACCATCTTGCAGAAAACTCTTGCAAAACTTGTGACCAAAGGGAGGTTAGATAAGCATCTTT
ACTTTTTAAATTTTTATTTATTTATTTTTTTGAGACAGTCTCACTCTGTCACCCGGGCTGGACTGCAGAGGCGTGATCTTGGCTCATTGCAACC
TCTGCCTCCCGGGTTCCAGCGATTCTTCTGCCTCAGCCTCCTGAGTGTCTGGGACTACAGGTGTGCACCACCACACCCAGCTAATTTTTGTATT
TTTAGTAGAGATGGAATTTTGCCATGTTGGCCAGGCTGGTCTTGAACTCCTAAGCTCAAGTGATCTACCTGCCTTGGCCTCTAAAAGTGTTGGA
ATTACAGGTGTGAGGCACTGTGCCCGGCTGGCATTGTTTCTTTTATGGGATTGTCTATGATGCATTCCTTGGTCGTCATGGCTGTATTAGGCTA
TTCTTGCCAGGCAAGGTGGCTCACGCCTGTAATCCTAGCATTTTTGGAGGCTGAGGCAGGCAGATTGCTTGAGCCCAGGAGTTGGAGACCAGCC
TAGGTAACATGGTGAAACCCCATCTACACACACACACACACACACACACACACACACACACACACACACACACACGCTGGTCATTGTGGTGAGC
GCCTATAGTCTTGTCCTTGCATTGCTCTAAAGAAATACCTGGCCAGGCGAGGTGGCTCACACCTGTAATCCCAGCATTTTGGGAGGCTAAGGCA
GGCAGATTGCTTGAGCCCAGGAGTTGGAGACCAGCCTAGGCAACATGGTTAAACCCCGTCTACCCACATGCACACACACACTAGCTGGGCCTGG
TGGTGCGCACCTATAGTCAGTTCTACCTACCTGGGAGGCTGAGGTGGGAGGATCACCTGAGCTCAGGAGGTAGGGGCTGTAGTGAGCCATGATC
GCACCACTGCACTCCTGCCTGGACAACAGAGTGAGACCTTGTCTGAAAAAAAGAAAAAAATACCTGAGGATAGCTAATTTATGAAGAAAAGAGG
TTCAATTGGCTCATGGTTCTGCAGTCTGTACAAGCAGAGCACAGGCATCTGCTCGGCTTCTGGGAAGGCGTCAGGAAGCTTTTAGTCATGGTGA
TTGATGAAGCAGGAGCAGGCACATCACATGGCAAGAGCAGGAGCAAGAGAGAGAGAGTGGTGGGCAGGTGCCACACGCAAACAACCAGATCTCA
TAACTCATTATTGGGAGGACAGCACCAATCCATGAGGGATCCACCCCCATGGTCTAACCACCACCCAGCAGGTCCAACACTGGGGACTGCATTT
CAACATGAGATTCAGAAGATACAGCATCGAAACTGTATCAGTGGTGATTTTGTTTCAAGACGGTGTCACTCTTGCCATGGAACAGGCTATTTTC
CTACATCACTTGGGAGGGGTGCTGGCTTTATTTTCAGCTGTGACCTCTAAAATTCTTGTCTCATTGAGAATTTGGAATTTTTAACCTTTATTTT
TTTTTAATGAGAAATCTGAAACATACAAAAATATACAGAAAAATATGTTTAACCCTCATTCTATTCCTATCACACAGCTTTGATAGTTACCAAC
CTGTGGCCAATCATGTTTTATTTATACAGCCATAAATATAACACTCCTCCACGCACATACTATTTTAAGTAAATAACAACACTTAATTTCAGCT
GTAAATATTTTATTATGTATCTTTAAATGGCAATAATCCATTTTAAAGGAGCATAACCATGATATTATTATTATATTGAAAAAAGTTGATCATT
TCTTTTTCTTTTTTTTTTTTTTTAAAGATGGAGTTTCACTCTTGTTGCCCAGGCTGGAGTGCAATGGTGCGATCTCAGCTCACGCAGCCTCCGC
CTCCCGGGTTCAAGTGATTGTCCTGCCTCAGCCTCCTGAGTAGCTGGGATTACAGGCATGGGCCACCACACCCGGCTAATTTTGTGTTTTTAGT
AGAGACGGGATTTCTCCGTCTTGGTCAGGCTGGGCTCGAACTCCCGACCTCAGGTGATCCGCCTGCCCCAGCCTCCCAAAGTGCTGAGATTACA
GGCATGAGCCACTGCGCCCAGTGGATCATTTCTTAATATTGTCAAATCTCTAGTCTGTTCAAATTTACATGATTGTTTCATGATTTTTTTTTTT
TTTTTTGAGACTGAGTTTTATTCTTGCTACCCAGGCTGGAGTGCAGTGGCGCGGTCTTGGCTCACTGCAACCTCCACCTCCTGGGTTCAAGTGA
TTCTCCTGCCTCAGCCTCCCAAGTAGATGAGATTACAGGCATGTGCCACCACACCCAGCTAATTTTTGCATTTTTAGTAGAGATGGGGTTTTGC
CATGTTGGCCAGGCTGGCCTTGAACTCCTGACCTCAGGTGATCCACCCACCTCGGCCTCCCGAAGTGTTGGGATTATAGGCGTAAGCCACCGCA
CCTGGCCTTTTGCTGTTTTTAAAATAACAGGTTGGTTCTTTAGTCTCTAAAGATGACAGCTATGTGATTTGAGCGTTATTATAATTCTTTTTTT
TTTTTTTTTGAGACGGAGTCTTACTCTGTCGCCCAGGCTGGAGTGCAGTGGCGCGATCTCGGCTCACTGCAACCTCTGCCTCCCGGGTTCAAGC
GTTTCTCCTGCCTCAGCCTCCTGAGTAGCTGGGATTACACACGCCCACCACCGCGCCCAGCTAATTTTTGTGTTTTTAGTAGAGACGGTGTTTC
ACCATGTTGGCCAGGCTGGTCTCGAACTTCTGACCTTGTGATCCACCTGCCTCAGCCTCCCAAAGTGCTGGAATTACTGGCATGAGCCACTGCG
CCTGGCCCCGAGTGTCATTATAATGCCTAGAATAAACATACTGTTTAATATGTTTCAGCCTATTGCTAATATTTTTCTTATTGAGGCTCACATT
GCTCCATTGTCGAAGCCCTTGGGAGCCTCTTCAGGTTACCTTGTAAGTCCTTTTGCCTCCACCCCAGTAGTCTTCAATAGCTTTGATAGATGTT
TTAGGTTACTGTGTACATTTCCTGCCTAAGATCTGTAGTTGGCCATTTCTCCAAGGAGCACTGGTTCCATTTAGGAGGAAATGGTCTAGGTGCT
GAGGATGAAGCATTAATCTCAATGTGAATAAAGCTAGAAGTGAACAGTGCTGTGTAGTCCTTGAGGCTCTGAGTGGATCTGGTTCCTCCTGTGG
TCTCTGCTGAGAATGCAGCTTCCTGTGGGAGATGTCGATCTTGTAACTGAATGATAGAGACAATCAGATAAAAATGATCCATGTTGTATTTGTT
GGATGTGATCTTGTTCTCCAGTGTGTACTTTTGGTAAAAGACATGGTAATAATAGGTCTGCAGGTGACACTATTCACCTGCTCTTCCTAAGGGA
TGCTGGGTCTTGAGGAACCGGCAGTAGAGACACTGAACTGCTTATAGACTCACATCTGGTATCATCAGGTTGGACCTGGGATACTGTCTGGCTA
ACTAACACTTCCTGGCCCCCATGACTGCAGAGTTCCAGGTTCTACATCAGTACCCGGTTCTCTGAAATATGTACTCATTGGGGTCTCATGAATA
TGGAATTGAAATCCATTTTACTGTTGTACTCACTTAGAGGGAACATAGCCTTTGTTTCCTTACTTAACCATGTGAGCCACAGAGTAAGAAGAAA
ACCGTCTCTTTAAAAGCTGCTATTTAGGTAGCTGCCTTCATGGCAGATAAATCTTTTCCACAGGTTTGGAAAATATCAAAGATGCATCTGTTTC
ATAATTACATGGTGGCTTTCTACCTAATGAATGCCTGTGTAGGCTGCTACGTTAAGCATACAAAGAGGATAGGAGAAGAAAGTTACTTCGTATT
TATTTTTCAGGCTTTTCCTGTCTGTGTTCTCACTTCGTTATTGTGGGGTTTCTGCAGACTGAGTCCCTGTGGAAGAGAGGTTGTGTCCTGCTCA
TTGTGGTACAGCAGTGGCTTAAGGGAGACTGGAGCCCTGACTTCACCCCCACCCCACTCCCTTTATTTGACCTGGGATTAAAAAAAAAAAAAAA
GACAACTTGCATTTCAAGGTGAGTTAGCTTCTGATCTTAATATAACTTATTTTCCTTCAGGAAAAAAAATGCTAAAATCAAGACAGGGTACAAG
CGGGAGCACATTAACCTGGGCTGCGACATGGATTTCGACATTGCTGGGCCTTCCATCCGGGGTGCTCTGGTGCTAGGTTACGAGGGCTGGCTGG
CCGGCTACCAGATGAATTTTGAGACTGCAAAATCCCGAGTGACCCAGAGCAACTTTGCAGTTGGCTACAAGACTGATGAATTCCAGCTTCACAC
TAATGTGTAAGTGTACATGGGGGCAGCAGGGTGGGAGGGGTGGGGTTGGAGCATGTGTGGTAAGGGGATTGCTTTTCACTGTTTTTTTTTTTTT
TTTTTTAAGAAAGCCCAGTTTTTAACCACTGTAAAGTGAGTTTGTTGGCATTAGATGAGCCACATGGCCTGCTGCTATCTTTTGTTTCCCACCT
ACCCATTTCCTGGAGTGTCTTAGATCCTTTCCACTCTGTGAACAGTATATATTGCCACACAGGTACAAAGTGGCTGATTAATTACAGCAGGGAC
ATGGTGTCAGTCCAGAGCGTGTCCATTCCCTGCAGTTTTTGTTTTAGTTAACAAAACAGCTCTCTTTCTCTGTCTAATGCCTGAGGATTAGCCT
GCTGGGCTTGATGACATGTAGACATGGTAGACAAATTTAGGAGCTGATTATCTCAGTTACAAACTATCTTCTCTGTACAGTGAAGCATGTAAAA
GTAACTATTGGACAGTATGGTGAAGGGAAACAGTGATTATAGGTTAGGAGAGAGCCCCTTGAGAATTGAAGTAGATTGATGATTTAAGTTAAGG
GAAACACATTTCATTCATGAATCTTGTTTTATCCATAAACCTTGTTTTATTTAGTTTCATGAGGAATTAACCTGTGACAGGCACAAGCTGGGTG
CAGAGTTACCATGTTTATTTCTTTCCACTAGAGGTCACTAAAGAAGTAACTTCTTAAACTTAAGGCAAATCAGTGATATTAATGTGTAAACTAA
TATTTCCATTAATAAATTTTTTGAGGAATTTTTATCATTAATTTGGAATCTGTTACAGCTAAAAAGTCACAGGAAAACTATAGAGATGGACAAT
CTAGTGGTTGGCAGGGGGCGGGGAGGGTATGACTACAAAGCAGTGACTGAGGGAGTTTCGGGGAGGGAACTGTTCTATATTCTGACTGTCGTCA
TGGTTACATTAATCTGTGTACGTGTGTTAAAATTCGTAAAAATGTATACCAAGAAAATATCCATTTTGGCCGGGCGTCGTGGCTCACGCCTGTA
ATCCCAGCACTTTGGGAGGCCGAGGCGGGTGGATCACGAGGTCAGAAGTTCAAGACCAGCCTGGTCAAGAAGGTGAAACCCCATCTCTACTAAA
AATACAAAAATTAGCTGGGCGTGGTGGCGGGTGCCTGTAATCCCAGCTACTTGGGAGGCTGAAGCAGGAGAATCGCTTGAACCTGGGAGGTGGA
GTTTGCAATGAGCCGAGATCACGCCACTGCGCTCTAGCCTGAGCAACAGAGCAAGACTCCGTCTCAAAAAAAAAAAAAAAAAAAAAAAAAAGCA
AGAAAATATCAATTTTATTATATGTTAATTAAGAAGAGGCTGAAACATACTAAAAAGCTATAGGAAACATACCACATGCATAGAAATGTTTTTG
AACGTAGAATTCTGATTGGCATGGGAAGTGTTTTCCTTGGTTTGAAATTGGGCATTGGCACCAATTCTTCAGTACCAATTCTAGGAGGAACAAT
GGCTGTTAGCCATTTCCCCCACATATCTGAGCTTCAGCATTTTAAATAAGCAACAAGTGGGTATGGTTTATTTTTGGAACCAGCGTGAAGGCAG
CTGACACAACTCATCTGGGTTGCCCTGGTGCTTGCAGGGGCCCAAATGCATAACAGAAATTCTTTGTGCTTCATATAGATGAATTTGAACAGTT
CCACCTGTGTATTTATTTATTTATTATTATTATTTTTTGGTGACAGGGTCTCACTCTCTCACCCAGGCTGGAGTTCAGTGGCACGATCTCTGCA
GCCTCCACCTCCCGGGATTAAGTGATACTCCCACCTCAGCCTTGCAAGTAGCTGGGACTACAGGTGCATGCCACCACACCTGGCTAATTTTTGT
ATTTTTTGTGGAGGCAGGATTTCGCCATGTTGCCCAGGTTGTTCTTGAACTTGTGAGCTCAAGCGATCTGCCCGCCTTGGCCTCCCAAAGTGCT
GCCATTACAGGTGTGAGCCACTGCATCTGCCTTCTGTTTATGGTTTTGAAAGCTCTGTACAGGAAGGCAGTATTGTGTTCCTGGTTTTAGGATA
TTCTGAAAAGTCTGGCCTTTTTTAAAAACATGTAAGCCCAAGAAACTTCCCCATTTGAATATATTACTAAAGTCATTCAAAAATCTTATTTTTG
ACAGGCTGCTGTTTTATTGTAGCATACTTGGGCTGTCTACAGAAGACAGGATTCTCTGTGAATCAGGCAGTGCCTGGGTCTCCCTGTACTTTCT
AGAAGCATAATGTCTGTCTCGCTGAATTTCATGGGGAAACGAAAATTTACAATGTGTGGCTCATACGTGTAATCCTAGCTACTTGGGAGGCTGA
GGCGGGAGGATCACTTGAGGCCAGGAGTTTGGGACCAGCCTGGGGAACATAGAAATACTCTGTCTCTAAGAAATTTTTTAAAAATTAGCTGGGC
ATGGTGGCAACATGCCTGTGATCACTTGAGCCCAGGAGTTTGAGGTTACAGTGAGCTATGATTTTGCCACTGCTCTCCAGCCTGGGAAACAGAG
CAAGATCCCATCTTGGGGAAAAAAAAAAAAGAAAATTTAGAATGTATTCTCTGATTTAGGGAGAGTGTCTTGTGAAGACTAGAGTTTTTGTTCT
TAGGTCCTGAAGCCCTTTGCTGGATTCCAAAGTACGTGGGCTCTGACTCACAGTTAACCAATGCCATTTCCACTGGAAATGCCCACAATGATGA
GGCAGAACTCAGACACTGATTTTATGTTAAAGATGTTTGAGAGGGTCTAGGCAGGCTTGAAGACCATCTGATGCAAGGAGGATGGTCATTCCTT
TTTAAAAAATTGCAGCATTAAAATTTTTCTTAATTTTTTTAATCAAAGGAGTCTGAACCCATGGTTGTAAAATCAAACAGTACAGATGGGCCTA
TGAAAAGCAGTGATTCCAGCCTGCCTCAGCCTGCTCATCCCAGCTCCGCAGTGGCAGCCACTTTAACTGTTTTTGTTTTCTGTGGTTCCCTCCA
TGGAGAAGGTTGCTTCTGACCAGGCACCAGTATGCACTGTGTGTATAAACAACAATCTGAAAGCAGTAATGAGAGACAGTCTATGATCTGTGCC
GACCCCAGCCCGACAGAGGACAAAGTGTAGACTCTGAGCTCTTCGTATGCCTTTTTAGGGGTGGCAGTGACTGCAGAGTTTGTATAGGCTGTTC
AGCTGGGTGGGGCAGACTTTCAAATTCTGAGAGCTTAAGCAGGGCCCCAAAAGAGGAAGAGGAGAATTTGAATGACTGAAGAAGGGAAAGGGAT
ATTCCCAGCAACTGGAGTCATTCAGTGTGTTTGTAAGAGAGGAGGGAGCTTGGCCAGCTGGGGTTTCATTCTGAATGTTTTTGAAAGAGGGAGA
CATTTTATGATGTAGCAAAAAGCTCCCTTTCAAATCCTGCCAGGCTTAGATGTTGCAGCATGGGTGAGGAGTATGCACAGGTGGACGAGATGAA
TTGTGGATTAAGCTCTTTTGAAGTGCTGCTCCTCCAAGAGGCTGGGTCAGTGCCAACTGTATCTCCCCAGCAGTGGCTGCAGCAGGTTGTGCCA
AGGGCTCTAACTTGCCTTCTGAGGCATATGTGCAGCCCCACCTTTCTTGCCATTTCTGGCTGTGTTCTCTTCTCATTTTCTTCTCTTTCCATAA
CATTTTTTATTTTTACTTTTATTTTTTGAGCCAGAGTCTCACTCTGTCACCCAGACTGGAGTGCAGTGGTGAGATCTCAGCTCACTGCAACCTC
TGCCTCCTGGGTTCAGACGATTCTCCTGCCTCACCCCCCCAGGTTGCTGGGATTACAGGCACCTGCCACCATGCCCAGCTAATTTTTATGTTTT
TAGTAGAGACAGGGTTTCATCATGTTAGCCAGGCTGGTCTCAAACTCCTGACCTCAAATGATCTGCCCGCCTTGGCCTCCCAAAGTGCTGGGAT
TATAGGCATGAGCCACTGCACCCGGACTTCCATGCCATTTTTCTGGTAGAATCGTTTATAAAAGTAATAACATCAGTAGCAGTAAAAATAAATC
ACTCAGAATCTCAGTGCTCTACTTGCTGCTTCTTTTTTTTTTTTTTCCTTATAGAGACAGGATCTCGCTCTGTTGCCCAAGCTATATCCTGGGC
TCAAGCACTCCTGCTGCCTCGGCCTCCCAAAATGCTAGGATTACAGGCGTGAGTCACCACGTACCCCCTCTCCCCTGGCTTTTTCTTTTTTTGT
TTGAGACAATGTCTTGCTCTGTTGCCCAGGCTGGAGTGCAGTGGCGCGATCTCGGCTTACTGCAACCTCTGCCTCCCAGGTTCAAGCGATTCTC
CTGCCTCAGCCTCTTGAGTAGCTCGGATTACAGGCGTATGGCACCAGCCCGGTCAATTTTTGTATTTTTAGTAGAAACAGGGTTTCACCATGTT
CGCCAGGCTGGTCTCAAACCCCTGACCTCAAGTGATCTGCCCATCTCGGCCTCCCAAAGTGCTGGGATTACAGGTGTGAGCCACTGTGCCTGGC
TAGGTGCCTGTTCCATACTTATCAGACTTCCTGTAATTTAGTACCTGTTTTGTGAAATTTGGTGAACTTCTGACTTCCCTTAATACCAGTATTG
GTTCAGTCCATTTCTGTCATCCCTGTCTTCTGGGAGACTTGGGTGGATCTGTCTGGGCTGCAGCTCACCTCCCTGGGAAGCTCAGCATCTGTCC
TGTGCTTGTTTGCAGGAATGACGGGACAGAGTTTGGCGGCTCCATTTACCAGAAAGTGAACAAGAAGTTGGAGACCGCTGTCAATCTTGCCTGG
ACAGCAGGAAACAGTAACACGCGCTTCGGAATAGCAGCCAAGTATCAGATTGACCCTGACGCCTGCTTCTCGGTGGGTATCTGTGGAATCACGC
ATCTCACAGGCAGGCCCATCTGCTCTTTATGTTGGAATCCTTCAGGTTTGCTGGAGTGCTGTGCTTCAGCTTACTCAAAGTGAGAGATGCTGCT
GGGCGCCGTGACTCACGCCTGTAATCCCTGCACTTTGGGAGGCCAAGGCAGGCAGATCACTTGAGGTCAGGAGTCTGACACCAGCCTCGCCAAC
ACGGTGAAACCCTGTCTACTAAAAGTACAAAAATTAGCCGGGCATGGTGGCGTGTGCCTGTAATCCCAGCTACTCGAGAGGCTGAGGCAGGAGA
ATTGCTTGAACCGGGGAGGCGGAGGTTGCAGTGAGCTGAGATCGTGTCACTGCACTCCAGCCTGGGTGACAGAGTGAGATTCTATCTCAAAAAA
AAAAAAAAGACTCCGTCTCAAAAAAACAAAAACAAAGTGAGAGATGTTCTCACTTTGAAAAGAGTGCCAAATGAGTACAGTGATCATACTACTA
GTACTTCTTATGGGTACCAGGCACTGTGCAGAGCCTTTTGTGTAGATTACTGTGTTTAATCCCATTTGAAATAGGTGCTTTGGTTTTTTAATCA
TCTCTGGGTTTTTTTTATTTTTTGTTTTTTTGAGACAAGGCCCAGGTTGGATGCAGTGGTGTAATTGCAGCTCACTGCAGCCTCATCCTCCTGT
GCTCAAGTAATCCTGCCACCTCAGCCTCCCAAGTAGCTGGGACTATAGGCACACCAGCATGCCTGGCTAATTAAAAAAAAATTTTTAGTAGAGA
CAATGTCTCACTCTGTTGCCTGGGCTGGTCTCAAACTCCTGGGCTCAAGCTGTCCTCCCACCTCAACCTCCCAAATGTTGGGATTACAAGGCAT
GAGCCACCATGCCTGGCCAATCATCTCTGTTTGTTTGTTTTTTTTTTTGAGACGGAGTCTCCCTTTGTTGCCCAGGCTGGAGTGCAATGGCACG
ATCTCAGCTCACTGCGCAACCTCCGTCCCCCAGGTTCAAGTGATTCTACTGCCTCACCCTCCCATGTAGCTGGGAACACAGGCACCCACCACCA
CACCTGGATAATTTTTGTGTTTTTAGTATAGACGGGGTTTCACCATGTTGGTCAGGCTGGTCTCGAACTCCTGACCTCAGGTGATCTGCCTGCC
TCGGCCTCCCAAAATGCTGGAATTACAGGCATGAGCCATGGCCCCTGGCCAATCATCTCTGTTTTTACAAATGAGGAACTAGAAACTTAGGTGA
GTAACTTGCTCAAAGGTACACAGCAGGAAAGTGCTGGGAGCTGGATTTGAACCAGACTGGCTTACTGTTAAGCCTCTTCCATTAATACCAGTTC
CTGTTCTATCATGCGGACTGTTAAAAGGGGCACTCTGAAATCTAGGGTTCTAATTGATAATTCCCCCCGCCCCGCCTCACTTTTCATTCTCCTT
TTCAGCTCCTGCATTGCATATTAAGAAATCAATAGTCAGTTGGCATCTTGCAGAGTCTCTGGCATTGCTCACAGGCCCTCGAACTACTACACAG
TTTTTGCAGTAAATCCTATTGGGCTCATTTCTGTTGTCACAGGGCACTGGCGGCTGTATCTCTTTGGGGTGAAATGAGGGAATCTCATGTTGCA
GAATGGTGTCTGTACTGGTTTGTGTAATTTATGGACAGCCCTTTTTAAGTCTCCTAAACTAGAACCGAATTTGGCTCCCTTAACAGCAAGCACT
TAAAAACAAGAGAAAAGGAGCCTCATTATTTATATGAGCAAAAGGACACTGGCCCCTAAGAGGCCTTCCTTCTCTCTGCTTTGTTCTTATGAGG
GGTGTCAGATCTCAGCACACCCTTTGAACAGAAAGGTATGCACCTAAAATTGATGTATTTTGTATTGAATTTAATGAATCTCATGAACAAGGTG
GTCATGAAAAATTTTGATTCTAAAGTCCAAGGTTGGTTGACTAAAAAGCTCTAATTTTGGAGATGGAAGTGCAAAGTATTATACTTAATGTTTT
CTCTGTTTTGTCATTTCCTTGATTAGGCTAAAGTGAACAACTCCAGCCTGATAGGTTTAGGATACACTCAGACTCTAAAGCCAGGTATGTGTTG
CTTGTGTGTGAAATCGGTTCTTTATCTTAAAAAAATTGTGCTGGTGGTTTGCTGATTTATGTCATTGCTTATAAAATGTTTATATAATACAGTG
GGTATATATAAATGGATATATGTAAAGTATAATTAAATGTTTATAAAGGAGTATGGGGTCATTATAAAACATTTGGAGAATATGAGATGTAGCA
AGCAGGAGGAAAAAGGCTGAGGCTAACACATATTCTTTGCTATTTTCTTCCATCCTTTTTTCCAGTGTGGACATAATGCTTGATACTTATTTCT
GGCAGATTCTCAAAACTAACTTATAAATCAGCCCCACTGTAAAAAGACAAAGAAATAGGAAAAGTGGTTTGCAGGTTTCCTCTGCACAGTTGGC
TAGGCCAGTCCACGGCGTATTATAGTTCTAGTGTATAACCACTTTTGAACCCTGGAAATCTAAGACTACCAGCTACTCCCTGAATCAGGTTATT
CCAGGGAATGTCAGTTTGTTGTGTGCATCTGTGGATGTACATGCACACTACACATGTGTGTACACTATGAACATGAACATGTAAGACCTTAGGT
TGGATTCAGGATTGAGGTTTCATTTAAAGGGATGATTGCCAAAGAAGCTTACTGCATGCTACCAGTGCTATAGACTAATTGTACCAGGGGAACA
GTGAGAGGAAAAAGGAAAGTGGGGTTCCAGAAGTAGATTTGGGTAGGCTCTCTGGGCGGTGGGATAATTATAGTTGTTTTATAAGCCCACTGTA
GTATGCCTGTTGGTCAGATAGTGCTAAGTAACAAGGATTGAAGGGCCATGTAGTTTGGACCCTGCTGATAATACCTGGAACAGGTTCTGAATTT
GGTCTTAATCTTTCTTGTCATTTCTTTCCTCCATTCCTCCTCCTTTCCTCTCCCTCATTTTTCTCCCTGCAGGTATTAAACTGACACTCTCAGC
TCTTCTGGATGGCAAGAACGTCAATGCTGGTGGCCACAAGCTTGGTCTAGGACTGGAATTTCAAGCATAAATGAATACTGTACAATTGTTTAAT
TTTAAACTATTTTGCAGCATAGCTACCTTCAGAATTTAGTGTATCTTTTAATGTTGTATGTCTGGGATGCAAGTATTGCTAAATATGTTAGCCC
TCCAGGTTAAAGTTGATTCAGCTTTAAGATGTTACCCTTCCAGAGGTACAGAAGAAACCTATTTCCAAAAAAGGTCCTTTCAGTGGTAGACTCG
GGGAGAACTTGGTGGCCCCTTTGAGATGCCAGGTTTCTTTTTTATCTAGAAATGGCTGCAAGTGGAAGCGGATAATATGTAGGCACTTTGTAAA
TTCATATTGAGTAAATGAATGAAATTGTGATTTCCTGAGAATCGAACCTTGGTTCCCTAACCCTAATTGATGAGAGGCTCGCTGCTTGATGGTG
TGTACAAACTCACCTGAATGGGACTTTTTTAGACAGATCTTCATGACCTGTTCCCACCCCAGTTCATCATCATCTCTTTTACACCAAAAGGTCT
GCAGGGTGTGGTAACTGTTTCTTTTGTGCCATTTTGGGGTGGAGAAGGTGGATGTGATGAAGCCAATAATTCAGGACTTATTCCTTCTTGTGTT
GTGTTTTTTTTTTGCCCTTGCACCAGAGTATCAAATAGCTTCCAGGAGCTCCAGCTATAAGCTTGGAAGTGTCTGTGTGATTGTAATCACATGG
TGACAACACTCAGAATCTAAATTGGACTTCTGTTGTATTCTCACCACTCAATTTGTTTTTTAGCAGTTTAATGGGTACATTTTAGAGTCTTCCA
TTTTGTTGGAATTAGATCCTCCCCTTCAAATGCTGTAATTAACAACACTTAAAAAACTTGAATAAAATATTGAAACCTCATCCTTCTTCTGTTG
TCTTTATTAATAAAATATAAATAAACAGGGCATTTGTTTAGATTTATTTTGTCTTCATGCTGTGTGTATTATATATTATTCGTTTTCACTCACT
GTACAACAGATTACCATATGTTTAGCAGCTTAAAACAACACTCATTTATTTCACAGTTCTGCAGGTCAAAGCGAGGCAGGTGTGCATGCCTACC
TGGACTGTGCTTAGCTTCTCACAATGCTGGAATTAGGGTGTCGACCAGGCTGTCTTCTCATTTTATCTGGGGGCTTGGCGTCCTCTTCCAGGCT
TTCAGGGTTGTGGTGGAATTCAGTTATTTTCAGTTGTAGGACAGAGGTCCCTATTTCTTTGTTGGCTGAGCCACTCTCAGTGCTCAGAGGATGC
CAGCATTCCTTGCCATGGGGTCCCCTCCATCGCCAAAGCCAGAAACAGAAAAACTCCCTCATGTGAAATCCCTCTCACACTTCCAGTCTCCTCC
AGGTAGAGCCCCAACCCTTTTAAGGACTCACCTGATTAGGTTAGGCCCAATGAGGGTAATCTCCCTTCAAGTTAACTGCCAGGTAAACTAACCT
AATCACTGGTAATATCCTTTCATGTTTGTAGGTCCCTCCATATGGGTCATGGGAAGGGGTGATTTTGGAATTCTCCCATATATTTATATGTTTT
TAATAACTTGATGGTGGATTTTTTTTTTTTTGAGGCGGAGTTTCATTCTTGTTGCCCAGGCTGGAATGCAATGGCGCACAATGTCTGCTCACTG
CAAGCTCCGCCTCCTGGGTTCAAGCAATTCTCCTGCCTCAGCCTCCCCGCCTCCTGGGTTCAAGCAATTCTCCTGCCTCAGCCTCCCGAGTAGC
TAGGATTACAAACATTTGCCACCACACCCGGCTAATTTTGTATTTTTAGTAGAGATGGGGTTTCTCCATGTTGGTCAGGCTGGTCTCAAACTCC
TGACCTCAGGTGATCTGCTCACCTTGGCCTCCAAAAGTCCTGGGATTACAGGCGTGAGCCACCACATCCAGCCTATTGTGGAAACACAAATAGT
AATAAACTCTATGCATGATCCAGCTTCAACAAATATGAACATTTTTTTCCATTCATGATTTTTCAGCAGAATTCCTTTTTTTTCTATGTTTGAA
AGTGACATTCAAAACAGGAACCATCTATTTTAGCATTTTATGCAACTGATCACCCAAAAACTGTGGGCCTCAGTATTTGTCATACTGTCTTCAG
GGACTTGCAGCTATTTCTAAGTGAATGTTCATAGAATTTATCCAGAGATTATGGCACATAGTGGTTGCTGGGTACATCTAGTCAGATGTCAGGT
ACAGTATTAAGATATTTTACTTTTAGAGACAGTCTTACTCTGTCACCCAGACTGAAGTGCACTGTCATCATCATAGCTCACTGCAGCCTTGAAC
TCCTGGGCTCCTCTGATCCTCCCATCTCAGCCTCCCGAGTACTTGGGATTACAGGCATAACCCTGCCCCTAAAATATTTAAAAATGTATAAAGG
GTTCTCTTGAGTATGAGGGAATATTTCCCTCACTAGTTACTTATTGTCTGCTTGTTGCATGCAGCATGTTGGAATATCATTGTGCAAAATGCTT
TGAGTTCATAATATCTCACCAGTTAAGAGAATTGAGACAATCTGGTATGAGGACACAAATGGACAAAGTGGACAATGAGTCAGGGAAGAGGACT
GCAGTGTGTTTATTATAGATTAACTTTAAAGTCAACAAGCAGAAACTAAGATTGAGAAGCTCATTTGTTGAACTGAGTGGTTTTACAGAAAACT
TAAGTACCGCTCAGAGAAGGGAAGCTCCTGGGGGACTGGGAGGACTTTGCACCTTGGCTAAAGTGGAGAGTTTGCAATAAGGACACCATTCAGT
CTAATACGGGCTTCTGGGGGATTTCGGGAAATGTGCAGATGAATGACTTCTTAGTTTTCTTAACACAGAGTTTGTGTGTTTCTGAGCTGTCACC
AGGGTGAGATAAAAGCTTAGGGGAAACCAGATTCAGGAGTAGAACACAGGCCCTTTAGAGAGACAGCTCAGCTGTGTCTCTGGGGGATAACAGC
AATCTTCGCAGGGAATCATAGAGACCAGAATGGTGAAGCTGTGGGCACAATAAATGTCTTGCTTAACGTCACATTGATTTTCCTGAAATTGATC
AAATGGAACTTTTATGAATTGAAGCCTGTATCTGTTTATTAAGGAGACATTTACAGAACGTACACACAGAGCAAAGTATGGCGCCAGGGCCCTA
GGTGAACTTCTTGGAAGTTTGTAAGTTTGCATTTTTATACACTGGGGATTTCAAGTAACAAAATTTAAAAAGAGAAGCTTATTTTAGGAAATCT
GAAAGTTATTTTCAATGGCAGCCCCTCACCTCTACTTCCTAGCTACCTTCCTTTCTTTTCCTCCATAATTTTTTTTTTTTTTTTGAGACGGAGT
CTGTGGCCCAGGCTAGAGTGCAGTGGCATCTCGGCTCCCTGCAGCCTCCACCTCCCGGGTTACAGCGATTCTCCTACCTCAGCCTCCCGAGTAG
CTGCGATTACAGGCACGCGCCACCACGCCTGGCTAATTTTTGTATTTTTAGTAGAGTCGCCGTTTCTCCATGTTGGCCAGGCTGGTCTCCAACT
CCGGACCTCAGGTGATCTGCCCTCCTCGGCCTCCCAAAGTGCTGGGAGCCACTGCACTAGGGCCGGTCCATAATATCTTTATCATCTTGTATAG
TGTGTATTTTACACCATATTCGCCCTCACAAGAAAATAAACTGCCAAGGCGGGCGGGGGGGGGGGGGTTCTTTTTGTTCACTGCTGTATCTTAA
ATAGGGAGAGGTGCTAAATCTTTGCTGAAAAAAAATAAATGACTGTCGGGAAAGATTTTTAAAAATTACTTATAATCCCATCACCGAAATAGGA
CTACTTAACATTTGTGTTTCTTTCGCCTTTGAGAGAGGAAGAGCAGTTACTTCGCTTTCGTGATCAGTCTGTTCTACAGCTGGATCTTCCTTTT
TAAAATGGCTAAAAACGCTATTTTTGGCTGTATAGTACCCAATCATGCAGGCGGCAGGGAGGGGCTCGCTTTGGCCCTCTTCAGCACGTCACAC
CCTACCTTTAATCCGCAGCCAACTGTGTGGCGGTCCCCACTTTCGCCTAGCGGCAACTCCCTCCTCCCTGCAATCCTTCCTTCTTATTCCGGTT
TCCAGAGCACGTCTCCAGGCTTCGACGTCACCACGCTGGGACGTATGTGCCGAGGGCCGCGGCGTCTGACCTCATGGCGTAGAGCCTAGCAACA
GCGCAGGCTCCCAGCCGAGTCCGTTATGGCCGCTGCCGTCCCGAAGAGGATGAGGGGGCCAGCACAAGCGAAACTGCTGCCCGGGTCGGCCATC
CAAGCCCTTGTGGGGTTGGCGCGGCCGCTGGTCTTGGCGCTCCTGCTTGTGTCCGCCGCTCTATCCAGTGGTAAAGGGGGGCGGCAGTGTGGGC
TTAGGAAGGCTAGGAGGGCTCGGGCGCAGGGCAGGAGACAGGCCGGGCCAGGGAAAGGGCGCTTCCAAGTGTCAGGAGCAGACGGCGGTGTCTG
GTTGGGTCAGGGTCTCCGCGGGCCTGAGGACGGAGGGTATGGTGTCTGAAGGGGTCCAAGGTGGTAGGGTCTCCAAGGGGCCTGAGAAGCGGGG
TCCCTGAGAGATGCAGGAACCCAGGGAGCAGGCAGCAGGGTGTGTAGATGGGCGGGGAGGGAGGAGTGGTGTTAGCGCCTAGAGATCGTTGAAG
AATGGGCTGCCGCAAGGAATGGCGGTGGTGGGGTCTCCAAAATTTCTTGGATCGGAAAGTTAGGAGACTCTGGAAGAGAGGGTGGCGACAGGGG
CTGAGGAGGTGGCCGGGGCTGGGGGTGTGGTGTCTGGAAAGGGTCCTGAGTTTGGGGGACTCAGGAATCTTGCAGGACCAAGGAAAGGTGGGGG
TTTTCCAGAATGGGAGAGGTCAGTGGTAAAGACCGAGGCGGGCAGGGGCAGTAATCCAGTGACTGGACTGAACCAATGGAATATTTCCGAGAGG
GAAAGTGAAAGGGAAAGAGCTGTCTTAGGGTACTGGTGCATATTTGAAGACTGGGAGGTTCTGGTGTTTGATAAAGATTCAGAGTACTGGGGCG
TTGGGCCCCTGAAGGCTTGGGAGGCAGAGAGGAGTTTGGAGACAAGGGAGATCATGATTCCTCTTCCCTGTGTTCCGAGTTAACCAGGATAACC
CTGCCTCGTTTTAATGCATCTGTAGGATTTGATTGATAAAATATTTCATTTCTTGCAAATGTTGCATGGTGAAATCAAGAGATTGAAGGCTTTT
ATTGAGAAATTAGGAAATCTGTAAACCAGTGCCTGATACTTGGTGGGAAAAATCCACTATTAAGAACTTGTAAGGATTAAACGGTATTTTGTTT
AGTAGTCCCATTTTTCTTTCAGGCCAAGACACAGTCCTGCGTTTCTCCCTAAATTTGAATTTTCAGCTGCAAAACAGTGTGACCTGGTATAGTG
TTTTCTTTCTTGCCAACAGGGCCTGTCCAGCCCTACATTCCTCTGCGACAGTACTGTGGGTACATACTTATGTTTCCTCAGCAACATTTCAGTG
TTGCTAACTGGACGCCCTCCCAGAAGTCTTTGCAGTCCCTGAGGAAGGACTGCTGTCCATTTCCTAAGGCCCTTTTATCATTAGTGAAATGTAA
TGAGGATTTCCCTGGTTGATGCAGATATTCCCGTTCCTAAAGTACTTAAGTAGCTTAATTGTTTTGGCCATTTAATCATCTAAGAAAAATAAAA
CACAAACATTTATATTTCCTGCTGGAATGCTTAAGGGATATATATCTGGCAACTGTAGTTTCAGAAACAGCTTTTTTCCCCTAAGAGATGGTTG
AAAATTGGGCAAGAAGTGAGGCAGAATGTGGACTGTTAAGTGTCCTTTAGTCTCTGCTTTTATTTGTTAGAGCCCTATAAATATTTTTCTAACT
ATACTGAGACATTTTAGAGAATCTTTATCTTTTAAATTAAGTCTTTACATACACCAGTTTAAAATGTCATAAATTCAGATTATTCTGTCCTGAA
AAGAAGCTAAATGAAAACGAACATACATGTCTTTAATAGGCGAGCAGCTCCACTGCACTACAGTGTAGCTTGGGATATAAGTATTTTTTGTAAG
CATACCTTATAATTTCAAAGTAGTCACTCCTGTAATAAGAAAATTAGTCTAGAATGTGTTGAGTTCCAAATTTCAAGTGAGTTTACAAAGGTAG
AAGGTTACCACATTAGATTTATTTAAATTTGTTCCATATTAGGTTTTAAAAACTGTCAATGCTTGGTTATATGCTCGTCAGTCTGTAAGAATTT
TTGTTTTATGTTTTTGTTTTGATCAAGTCTAAAAAATTAACATAAGCAGTTTGGATCACTGGGTGACTAATTCTTGGTCATGCCATTTCAAAAA
TGCCTGGTTCTCTACATTTGCCATTATATTGTCCCCAAATGATCACCTAAACTTAATGTATAATGCATTTCATTTTTAAGGCATTGTTTCTCAA
ACCAGTGTGTGAATGAGTTCTCGGGGTCCTCTGCATTCTTAAGTTTAAGAAATGCTGATATAGTTTTATTTTAGGGCAGTTTTTAAAAAGGGAC
CAGTAGAAGGGGAGAATTAAATTTATAAAGTTTTGTTTTTTGTTTTTTTTTTGAGTCTGTCGCGAGGCTGGAGTGCAGTGGCGTGATCTCGGCT
CATTGCAACCTCCGCCTCCCGGTTTCAAGTGATTCTTCTGCCTCAGCCTCCCGAGTATGCTGGGACTACAGGCGCGCACCACACCTGGCTAGTT
TTTGTATTTTTAGTAGAGACGGGGTTTCACCGTGTTATCCAGGATGGTCTCAATCTCCTGACCTCGTGATCCGCCCGCCTTGGCCTCCCAAAGT
GCTGGGATTACAGGCCTGAGCCACTGTGCCCAGCCTTTTTTGTTTGTTTGTTTGAGACAGGGTTTTGCTCTGTCGCCCAGCCTGGAGTGCAGTA
GCACAAACTTGGCCCATTGCAACTTCCGCCTCCTGGGCTCAAGCAGTCCTCCCACTTCAGCCCCCTGAATAGCTGGGACCACAGGTGCCTGCCA
CCGTGCTCAGCTGATTTTTGTATTTTTGTAGAGATGGGGTTTTGCCATGTTGGCCAGGCTGGTCTTGAATTCCTGTGCTTAAGCGATCCACTTG
CCCTGGCCTCCCAAAGTGCTAGGGTTACAGGCGTGAGCCACCGTGTCCGGCCTAAGCTTTATTTTTAAAATGTTAAGCTTCAAGTAGAGAGGTA
ATATCAATTAGGAAAGGGAAGATTTAGAAGTCTTATTTATATGCTCATAGAAGGTCAACAGTTAAATCCGTAAAGTCAGAGTTGTACCTTTGTT
CTGAATACTCTTCATATCTGACTTAATCAACTTCTCTGATTTGAAGGAGTTTGAGTAAGTTGATAGCCTTTGTATTACATGTTTCAGGTCAATT
ATTTGTTTTTTCTTGTGCTGTATTTGTGTATTACTTCCAAGATTTTACTGCTTGACTAAGACATTCTGCTCCTACTTGGTGCTAGGTATTGGAG
TTAAACAATGAATAGGGTGATACTGGGGGTATCCTTAGAAGAATGAGTGGCGTTTTGCTGAGAACCATGGCATGGGCTCTTGAGGGAGTGCAGT
AGGTGCATAGATGCTATGTGGGATGTGGTGTGGGATTTGTGGTGAGAGTTGAATCGAGAGCATATTCAATAAATATTTATTGAGTGCCTGCTAT
CTATTAAGTAGGTAATGGGGATAGAGCTGTTAGGGAGATTAGTAAGATAATGAGAGTGAGGTAATGGGGGCCAGATCATGTAGGATCTTGAAGG
CTATTATAAAAATTTTCACTTTTGTGAGAAATGGATGGCCCTAGAGGGTCTTAAGTAGAGGAGTAACATTTGATTTAAGTTTTGACAGAATGAC
TCTGGCTGCTGTGTTGAGTATAGACAGTAGAAGTTAGGGTGGAAGCAGGCAGATTAATTAGGAGGCTATTGTAATAATCCATGTGAGATAATGG
TTACTTGGATGAGGCAGGAGCAGTGGAGGGTGAAAAGCCCTCAAATGCTGCATATGTCAGAATAACAGATTGGATGTGGGATGTTAAAAAAAAT
GACAACTCCAAGGTTTTTAGTTTTAGTAACTACAAAGATGTAGTTGCCATTAATTGAGATGGAGACTAAGTAGAACAAGTTTTTTTGTTTTTTG
AGTGGGGCATAGGAATTTATTTAAACTTATTTTGAGATAATTATAGATTCACTTGGCAGTTGTAAGAAATAATATAGAGATCCTGCATATCCCC
TACCCAGTTTTCCTAATAGTAACGTCTTTCAAAACAATAGTGCAATATCACGACCAGGATATTAACATTGGTACAGTCAAAATACCGGGCATTA
CCATCACCACAAGGATATCTCATATTGCCCTTATAAAGCCACCCCACTTCCCTCCTACCTCACCCCTCCTGAACTCCTGGTAACCACAAATTAT
CCATTTGTATAAGTTGGTAATTTTGAGAATCTTACATAAATGGAATAATACAGTATGTAACTTTTGGGATTGACTTTTTTTCACTTAGCATAAT
TCTCTGAAGATTCACCTAGGTTGTTACATGTGTCAATAGTTTGTTCCTTTTTAAATTTTAACTTTTATTTTTTCGAGAGTAAGTCTTGCACTCC
AGGCTGGAGTGCAATGGCACGATCTCGGCTCACTGCAACCTCCGCCTCCCAGGTTCAAGCAGTTCTCCTGTCTCAGCCTCCAGAGTAGCTGGGA
TTGTAGGTGCACACCACCACACCCAGCTAATTTTTGTATTTTTGGTAGAGATGGGGTTTCACCATTTTGGCCAGGCTGGTCTCGAACTCCTGAC
CTTGTGATCCACCTGCCTTGGCCTCCCAAAGTGCCCAGATTACAGGTGTGAGCCACCAGTCCTGGTTGTTTGTTCCTTTAAATTGCTGAGTAAT
ATTCTATGGTATAGGTAGACTACACTTTATTTATCTGTTGAAGGATGCCTGATTGTTTCCAGTTTTTGGCTATTATGAATAAAGCTGCTATGAA
TGTGTTTGTGCAGCACTCCAGCCTAAGTGACAAAGCGAGACCCTGTCTCAAAAAGAAAAAAATAAAATGAGCTTTCTATGGACATCATGTAGTT
GAGTCTGCCAGTCTCTCTTTTTTAATTGATGTATTTAGGTCATTTACATTTACTGCACTATGGATATGTTAGAGCTGAAGTCTGCCATTTTTAT
TTTTTGTCTTTAGCCTGGGATATATGAGGTAAAAAGAAAAACCTAAGGAAGTCACCACCATGTTGTTTCACATATCCTGAGGTCTCTAACTGTT
CTACCCAGTTCTTTCCACCTTTCAGAGTGTTCTTGTGTTATTTTATACATAATGTTCAGAGCTTTTAGTTGTTTTTAGTGGGAGAAACAGGGAA
GAGTGTGTTTGTCTTCCTGAAAGCCAGCCAGAATTCATTTTGAACATATTAATGTGAATGTCAGACATCTAAGAGGAGATGTCAAGTAGGTGGT
TGGATTTATGAGTCTAGAATTCTGGTCGTTCTTGGAAGTTCTTTTAATTTTTCTCAGAAAAGTTAGGAAGTGATGTCATCAGTTGAAAATGAGG
ATAACAGAGAAGACATTTGAAGTTTGTGGTTAGAGGAAAATGTGATTGGTGTCCTAAGAGAGTAGAAGGGTAAATGGACTAGGAAAATATGATT
GCCAACAATTTTAATTGCCAACAGCTTTAAACATACACCTGAATCTTTGGCATTGAATTTAAAATGAAATGAAAACAGTGGCATGGTTGTATAT
TTTTTCTAGCCATGTTCAGCTGCTGGGTGCAGATGTGAGTAGTCAGAGAGCTTGATTTATTAATAACTAGGGATGAGTGTAGTCTCACCAAGTG
AATGGGTCAAAGTGGACAAGGGGGAAGGGAATTGAAGATGGATGTAAGAGAGTGATTATAAGCAATTATAATAGCTGACACAGAATTGAATCTG
AATAAAGAGAGAAGAGAGTGTATTGGGCAAGTTTTGATGGTGACCGTAAGGGAATGAAAAGGATTAGAGGGTTGTAGGTGTTTATGGATTGAGA
ATACCAGGGAATGAACTGGAAGGATAGGAGGTCTTGCCAGCAAGTAGAATGCATGAAATTGAGATTATGGAAGAATTGTGATAATAAATAATGA
CTCTGGGAGTGAGTGGCTGAGGTAAAGAGGAGGGCTAGCTCATGAGAAGAGAGGAGGTCAAAGATTTTGAAATCAAGGCAGGAGTACTTGTCTT
AGATGGAGTGAACTCTAGAGCCAGGAGCTAAAGATCATTAAGAATTAGGGGGCATGACTTTGGAGTTGGATGAAAGTAAGTTAGTGCATTATAG
CTTAAGATAAGAGAATCAAAGCTAGAGGCATTTAGGGAGAAGAACGGGAGAATGGTCTGAAAAGGGCAATGAGGAGGAGAACTGTGCCTCCTTG
AGATTCAGTGGTTCAAGGATGTGGGAGAAAAAACAGCTATTACTTAAACAGGCTGAAAGGAAAATGTGTCCTTAAGGGAGAGTCAGGTTTCAGT
AATAACAAGAAAGCAAAGGGTGAAAGAAGGGATTTGCTGATGACTGTGAATTCTATACTGCGTGGTGGAAATTTCTTTATAATTATTCCCACCC
TATCAGCTTGTGTCCTTTAAAGGTACTTACCCATGGAAAAATTGTTCTTTTAAAAGTTAAGTTTAGTTAGTTGGCTCCCACTTATTTCAATTTT
AAATTTTATTTTAAAACATGTTTTTTGTACTTTGGCAGGAAAATTAAATGTATCAGAAAATAATAATTTTTAAATTCTTGAATTATAACTAAGT
TGAAGTGATAAATGCAAAAATTATTTTCAGAAATTCCTGTTAGTAGTTTTCTGAGTAATGTACTGAGTTGTAGGTCCTCTTTATTTCTCTTTTC
TTCCAGTAAAAAATTTCAAGG
HUMAN SEQUENCE—mRNA
GCCGCTCGCTCGGCTCCGCTCCCTGGCTCGGCTCCCTGCCTCCGCGTCGCAGCCCCCGCCGTAGCCGCCTCCGAGCCCGCCGCCACATCCTCTG
AGAAGATGGCTGTGCCACCCACGTATGCCGATCTTGGCAAATCTGCCAGGGATGTCTTCACCAAGGGCTATGGATTTGGCTTAATAAAGCTTGA
TTTGAAAACAAAATCTGAGAATGGATTGGAATTTACAAGCTCAGGCTCAGCCAACACTGAGACCACCAAAGTGACGGGCAGTCTGGAAACCAAG
TACAGATGGACTGAGTACGGCCTGACGTTTACAGAGAAATGGAATACCGACAATACACTAGGCACCGAGATTACTGTGGAAGATCAGCTTGCAC
GTGGACTGAAGCTGACCTTCGATTCATCCTTCTCACCTAACACTGGGAAAAAAAATGCTAAAATCAAGACAGGGTACAAGCGGGAGCACATTAA
CCTGGGCTGCGACATGGATTTCGACATTGCTGGGCCTTCCATCCGGGGTGCTCTGGTGCTAGGTTACGAGGGCTGGCTGGCCGGCTACCAGATG
AATTTTGAGACTGCAAAATCCCGAGTGACCCAGAGCAACTTTGCAGTTGGCTACAAGACTGATGAATTCCAGCTTCACACTAATGTGAATGACG
GGACAGAGTTTGGCGGCTCCATTTACCAGAAAGTGAACAAGAAGTTGGAGACCGCTGTCAATCTTGCCTGGACAGCAGGAAACAGTAACACGCG
CTTCGGAATAGCAGCCAAGTATCAGATTGACCCTGACGCCTGCTTCTCGGCTAAAGTGAACAACTCCAGCCTGATAGGTTTAGGATACACTCAG
ACTCTAAAGCCAGGTATTAAACTGACACTGTCAGCTCTTCTGGATGGCAAGAACGTCAATGCTGGTGGCCACAAGCTTGGTCTAGGACTGGAAT
TTCAAGCATAAATGAATACTGTACAATTGTTTAATTTTAAACTATTTTGCAGCATAGCTACCTTCAGAATTTAGTGTATCTTTTAATGTTGTAT
GTCTGGGATGCAAGTATTGCTAAATATGTTAGCCCTCCAGGTTAAAGTTGATTCAGCTTTAAGATGTTACCCTTCCAGAGGTACAGAAGAAACC
TATTTCCAAAAAAGGTCCTTTCAGTGGTAGACTCGGGGAGAACTTGGTGGCCCCTTTGAGATGCCAGGTTTCTTTTTTATCTAGAAATGGCTGC
AAGTGGAAGCGGATAATATGTAGGCACTTTGTAAATTCATATTGAGTAAATGAATGAAATTGTGATTTCCTGAGAATCGAACCTTGGTTCCCTA
ACCCTAATTGATGAGAGGCTCGCTGCTTGATGGTGTGTACAAACTCACCTGAATGGGACTTTTTTAGACAGATCTTCATGACCTGTTCCCACCC
CAGTTCATCATCATCTCTTTTACACCAAAAGGTCTGCAGGGTGTGGTAACTGTTTCTTTTGTGCCATTTTGGGGTGGAGAAGGTGGATGTGATG
AAGCCAATAATTCAGGACTTATTCCTTCTTGTGTTGTGTTTTTTTTTGGCCCTTGCACCAGAGTATGAAATAGCTTCCAGGAGCTCCAGCTATA
AGCTTGGAAGTGTCTGTGTGATTGTAATCACATGGTGACAACACTCAGAATCTAAATTGGACTTCTGTTGTATTCTCACCACTCAATTTGTTTT
TTAGCAGTTTAATGGGTACATTTTAGAGTCTTCCATTTTGTTGGAATTAGATCCTCCCCTTCAAATGCTGTAATTAACAACACTTAAAAAACTT
GAATAAAATATTGAAACCTC
HUMAN SEQUENCE—CODING
ATGGCTGTGCCACCCACGTATGCCGATCTTGGCAAATCTGCCAGGGATGTCTTCACCAAGGGCTATGGATTTGGCTTAATAAAGCTTGATTTGA
AAACAAAATCTGAGAATGGATTGGAATTTACAAGCTCAGGCTCAGCCAACACTGAGACCACCAAAGTGACGGGCAGTCTGGAAACCAAGTACAG
ATGGACTGAGTACGGCCTGACGTTTACAGAGAAATGGAATACCGACAATACACTAGGCACCGAGATTACTGTGGAAGATCAGCTTGCACGTGGA
CTGAAGCTGACCTTCGATTCATCCTTCTCACCTAACACTGGGAAAAAAAATGCTAAAATCAAGACAGGGTACAAGCGGGAGCACATTAACCTGG
GCTGCGACATGGATTTCGACATTGCTGGGCCTTCCATCCGGGGTGCTCTGGTGCTAGGTTACGAGGGCTGGCTGGCCGGCTACCAGATGAATTT
TGAGACTGCAAAATCCCGAGTGACCCAGAGCAACTTTGCAGTTGGCTACAAGACTGATGAATTCCAGCTTCACACTAATGTGAATGACGGGACA
GAGTTTGGCGGCTCCATTTACCAGAAAGTGAACAAGAAGTTGGAGACCGCTGTCAATCTTGCCTGGACAGCAGGAAACAGTAACACGCGCTTCG
GAATAGCAGCCAAGTATCAGATTGACCCTGACGCCTGCTTCTCGGCTAAAGTGAACAACTCCAGCCTGATAGGTTTAGGATACACTCAGACTCT
AAAGCCAGGTATTAAACTGACACTGTCAGCTCTTCTGGATGGCAAGAACGTCAATGCTGGTGGCCACAAGCTTGGTCTAGGACTGGAATTTCAA
GCATAA

[0301] TABLE 38
MOUSE NOMENCLATURE
ICSGNM Nfatcl
Celera mCG18180
HUMAN NOMENCLATURE
HGNC NFATC1
Celera hCG15098
MOUSE SEQUENCE—CENOMIC
CAAACTCCAAGGAAGGTAAATTCTAAATCGAGTCTGCCAACGGAGAGAAGAAAGTGTGCAGAAGAGCCAAGTGGGACTTCCAGAGCTGAAAGGC
ACACTAATCCAGTAAGTGCTGGAAATGACGTCCCAGTGGGGGCTTAGCCATGGCGCTGAGCTGGCACAGGCAAGAGCCGGGGATGTGCTATTCC
AACTGAGACTGCAGGCTGTGGACTGAAAGAATGAGAAGAGATGTCGGGAGAGGAAGTAAGGGAGCGGAGAGCAAGAGCATATGCACAGAGGGAG
GGAGGGAGGGAGGGAGGCAGAGGGGTGCTGAAACCATTACAGATGTGTAACCCAATCTGCACCACCAGGAAAATCCCAGCAAACTCCAAGGAAG
GTAAACTTCAAGAGACCAGCAACAAACTGACCTCACAAGGAGATATATCAAAAGCAGAAGGTGGGGGTATTAACCCTTGCAAGGGAACCCCAGT
AACGTTAACATCTGACCCTAGAAGCAGCAACTGAGGCTTGAAGACAGTATGTCCAAAGGGCACTAAGAAAAAACTTGCAACAGACCCCTGTGCT
CAACAAAGCTTCTTTCTAACTCTTAGACGAATTAAAAGCTTTGGCACAGAAACAAAAGCCAAGAATACGCTGCTAGCACAAAGAACCTTCTTGC
GAGGAATACAAGGCAAAGGCGGGAATGCTGGGACAGTAACCTGCACCTACAGGAAGCAGCACGTCAGGAGGCAGGCACGTGATTTTACAAGGCA
ACATGCATGCATGTTTTCTTCTCATGACTCACTTAAAAAACAATCATATAAAACAATGTGTGTATACTGTAGTGCTTTGCCGATAGCTTACAGA
AACGCAACCCAGGTGTAAGATGTTTGCCAATAACAACAAATAGTGTCTTAAGGGACTGCAGAAGGCAAAGGAACAATTCCCACAATGCACCATG
AGGTTTGTCTGTATCGCTTTCTGTAATGCTGTAGAACATCACACCACTGGGCAATGGGAGAACCATATAGAAATAATGCTTCTGTGAGTCACTG
AAATGGTCGCAGGGTAAACTAAAACCCAGCATGAAGTCACGTGTAGCTGGCAAACACAGAGCAGACTCTAAGGGATGCTGCAAACCAGGGAAGT
ACCTTCTCACCAAACACATCCTGTAATGCAAAGAAAGCAATAAAGAGACTGAGTGAAAGGAACACGGAGAATGTAGAGAGAACACGCCAAGTTC
AACTTCATTACCTGAAACTGAAATGTGAACAGATTAACATTCCAGTCACGGGGCAGCAGTAGTCAAGCCGAACAGTCAAACATTGTACAACTTC
ATGCTGTCTTCTGGAGATAAGCTGTAGGTGGAGAGGTACACACTCACTACCAGGACGGGAATCATCCATCATGCACAAAGAAACTCCAGGAAAG
CCAGAGTGGCTGTGCTGCTGTTGGATGAAAGAAACCAAAAGTAAAAAATAAAAGTCAAAGACTGCTGAATTGGATGCTCAGCTCCCTCCAAGCC
TCGTGTATTGAAGACATGGTCCCTAGAGAGGGGTTGGAGCCATGGAGAGAGGGGGAAAACCTTTGGGCAGTGAGACTACCTGGTAGGAACCCCC
ATTTCTGGAGACAAGCCCTTCATGAGGTTGATCCCCACCCCAAACCTCCCTTCCTTTTGCTTCTCTGCTGAGATGAGGTTGTTGTGGGCTGTCC
CATGGTCCCACTGTGATAGGCTGTACTGCCATAGGTCCTAAAGCAATGGGGGCCACTCAATAATGGACTGAACAGGCCAAAAAAATGTAAATTA
AAAAAACCTTATTTCTTCATATGTTAATCATCTTTGTGTTTTGTTACAGTAGCCGAAAGCTAACTGATACAGATTAAGAGGGCTGCTTCAAGGT
AACTAAAGAACCAGTGTCTGAGAGACAGAGAGAGAGTTCTAAGTGTAGGTGTGCCTAACAACACAGTTCCCAAAGAGACATAGCAGAGCCAGCA
GGTACTTGGTGAAAGCCTTCAGAGTCAGGGCAGGTTGACTCTGTCAGGGGGTGAGCGTGACTCAGAGTGGCTTCAGTGACGAAGTCCCTTGTGG
CCACTTCAGGCAAAAGATGAGGAAATTGAAGAACACTAGGTATCAAGGGAAGCAATTTGGTCTTTATTCTGATTTCCAGGACATATGCCCTGGG
AGAAAGTTATTAATAACTGACTGATTAATTGATTGATTGTGGTATTCGTTTTATTTTGTTGTTTTAGGGCTGTGTCAATTTCTCATCATGAGAC
AAAATACCAGAGACAGCCACCTTAAAAGGATGAAAGCTTATGTTAAGTTATTGCTTCCACAGGCTCTTAGCTCCACTGCCTTTGGACCTATGGC
AGAGCAGAACGTTCTGGCAGCAGAGCACACTGTGGGCAAAGCTGGTGACCTTAGGCAACAGAGATGGAGTGTCTGGTCTCAGTATGCACTCCGA
GAGCAGTGCCCATCCCATGAGGTCCTGACTCTTCACACCCCAGCACAGGACAATGCTCCATCAGCCAGAAAACAGGTCGTTTGCCATGGCCTTC
AAGACTTGGGTTTTTTTTGGGGGGTCAGGGGTGGGGGCACCCAAACCTTTAGGAAATGGATGTTGCTCTGGTTAAATCAAATCATAGAAGGCAT
CTTCACTTGTCCAGGGACGAGGGAGAGATTAAACAGGAACCCCAATTCTGTGGTCCTCCAAGATACCCCAAGGTCTGAGAGGGAGTGGCTGATG
TTGCTOTAACTAACTCAACGGCAACTGTCAGGCTTCACTTGACTGTTTTTTTGTTTGTTTGTTGTTGTTGTTGTTTGTCTGTTTTGTTTTGTTT
TTGCTTTTGTTTGTTTGTTTTTAAGCACTTTAAAAGTAACCTGACTGGGCACCAATCAATCAGTAGGCAGCACATCAAGCCAGGGCTTTAGCAC
CAATGGCTAACCAATCAACTCAAACCAGCCAGGTGTGGTGCATGCCTGTCACCCTAGAACTGGGAATATTATAAGAGGACCTGGAGTTCAAGGC
CAGCCTGGGCTACCTGAGACCCTTTTTAAAAAATGATGCTCCTGAATTCTGGCCTGTTAATTCCACTCTCCCAAACCGGCTCTGGAGGAAGGCC
CAGTTTCCCAGCCTTCCCAGTGCCTCACAGTCCTGGGCCTCCTCCCTGTGTTGTGGAGTGAAGTAGATAGATCCAGTCAGAAGCCCCAGGTGAG
GTAACAGGAGGGAGTTGCAAAGTAACCATTGCTGTGGCCCACACTGCAGATGCAGTGAGGAGATGTGTATTTAGCTACTGATGTTTTACATGGT
TTACGTAAGCAAGCAAGATGTACATGGGTCTGGGGCTTGACTGTACAAAGAAGCCCTCCCTAGCCTGGTGCACCGTACCTGCCCACAGTGCAGT
GTGTACACAGCCAAAGGAGGCTCCAGGTTGCAGGACTGAGAGTCGTGCCCCTAGCAACACAGAACCCTGCTTTTGCACTAAAAGCCCATCAGAT
CTTGTTGGGGTTTTCTGTGCCCTTGTGTTTTCACACCAGGTTAGAATCAACAATTGCCTGGCTCTTGGAAACTTTGAGCGCTGGGTGGATAACC
AAATGTGCCCCAGAAGGAAGGATTTAGCACCCAAAGACACCTATTGGATTAAGCTTCTGGGGTGCATTTGCCCCAATAATCCACAGAAGCAACA
GTAATCTAAAAATAGTCTTGTTTTCTGTCCTAAGCTCCTTTTAACTTTGTTAGTCATCGCCAAACCTTAAAATAAAACCCGTGTAACGTCTCTC
CTGGTAGCAGCTATAAACAAACCTCCTCTAGAGGAGGCCGAAGGAAGAGGAAAGAGGCGGTAGGGACACGCAGGGAGCGCGGCCGCGGGACCAG
GCTTGAGCCCGAGGTGGCCGCAGGGCCTGGCGGACAGCTCAGAGCTGGCCGAGCTCCTGCGCCGCTGCCTCCGGAACTCCCTGCGCCTGGCGTG
CGGCCACCGTGGTCCCGGCAACGGCATTAAACAGAGGGAAACAGGCCCGGGATTCCGTCACCCSCGGGGCATAAGGAGGGCATTGAGACAGACA
GGAAAGGGCTTTTCTGGATGGGGTGAAAGTTATTTATTGGAGAGGGAGGGGGGAGNNNNNNNNNNNNNNNNNNNNNNNNNNNNNNNNNNNNNNN
NNNNNNNNNNNNNNNNNNNNNNNNNNNNNNNNNNNNNNNNNNNNNNNNNNNNNNNNNNNNNNNNNNNNNNNNNNNNNNNNNNNNNNNNNNNNNN
NNNNNNNNNNNNNNNNNNNNNNNNNNNNNNNNNNNNNNNNNNNNNNNNNNNNNNNNNNNNNNNNNNNNNNNNNNNNNNNNNNNNNNNNNNNNNN
NNNNNNNNNNNNNNNNNNNNNNNNNNNNNNNNNNNNNNNNNNNNNCCTCGCCGCTGATTCCTCCGCCCAGCCCCGCCCCGCCCCGCCTGGTCCC
TGACAGGGGAAGGGCGGGGACGGAAACTCTTCAGGCAAAATCTTGGCGTGCTGGTCTGGCGACACTAGGACTCACTGAAGAATGAATTTGGGGG
AGGGGGGTTGGAGGATGGTTCTTGGGTAATGGGGTCTTGGCACCCCCTAGCGGCAACCTCTTTCAAGGAGAGCAGGGAGGCTTCCGCGCATCCC
TGCAGGTTTTGAAGGTACCACTTTGGCAGCCTTGCCCGACATCCCAGCATCTTCACTGAGCATTCAGCTACTTAATAGATCATGCTCCACACAC
CGGTGTAGGCACCTCCAGCCTAGCTATACTCTAGACCACCTGCGTGAGTGGCTCCATCCTCTCAAAGCCAGAGGTAGAGAGGTGCGCGCCATGC
CTAGCTCTCCATGTGAGTAGCAGGCCAGTAGGTAGTGCGCCTGAGACATGTTGGGCACTGCCTGTGGCTATGCAGCATCCACCACTGCGCTTCT
CTGCCGTGGTAGAAAACAGGATGGCTTTTAGTTCTGTGGCGTTGAGGCAACTAGAAAGAGCCGCTAGATGCTGCTGGAAGAGTGGATGGGTTTT
AGCCAAGTTTTCATATTGTTTAACATCGAGCCCAGTTGGCCAGCTCCATTGCTGGTTGGATCAGATTCTCTAAGTCTTGGGGTGTGAAGTACTT
TGGAGCACCTACTGGCTCACTACACGCCCCGCGCGCCCCACAGTCTCGCCGCCCCACAGCAGACACGCTTTTTTTTTTTGCTTTTGAGTTTATT
TTAAAGCATATGAGGTGTAGGCCAATAGATTTATGATTTCTATACACCAGACGTTCTAACTGCCCAACCCTCCAATCCGTTCCGTCCAAAGCCA
ACAAGAAAATATGGTCGGGTTTTGGCAGCAGAGTTGCACCCCTAGGAGATGCGGGGAGATTTGAAAGAGAAAAAGTGTGAAGCGAGGCGGGACA
GAATCCTCAGAAGTTCCCCCAGCACCAGCCTCCTCCTATGCTAGAAACCTCACGTACGCGCCTACAAAGCACCCTATGGTCCCTGCACTGGTCG
TCCGCACCCGGGGCAAAGACCCAGAGGAGGAGCTGCGCAGGTGGGCGCGNNNNNNNNNNNNNNNNNNNNCTGGCCCTTCGTGCCCGCTCCCCGC
GCCCCGCACCCATCTCGAGTCCTCCTCCCTGGCTAAGCTGCCAGGGCCGGTCTGCGCGTCCAGGGAGGGGCGCGGGCGTCCGGCCGGACAGCGT
GGCACACACTGTGAAGGGTGTCCCCCTGGTGTTTCCCCGGCGCAGCCCAGATTTCTAGCGCGCTTTCTTGCCAATAGGTGTCTCCTCTTCTCTA
GCGCTGAGTACTCAAACTTGGTGGCGTCTTGGAGATACCACATGGGGAAACTTGATTCACGGGGGCGTTGAGATGTGAGGATGGGGCGCAGTGG
GGGCGGGAGCGCTAGAAGCGAAAACAAACAACCAAACAAAAACACCCTGGGATGAAGTGAGGCATCTTTGGAGAGCCGAGTTGGTCCTGCCTTT
ACCTCAGGAAGGCAAGCAAGTCCATGACCAGAAGTATAAGAGTCCTGCATCCTCCCAAGTGAGTCTAGCCTTAGCTGCTTCTCACTAAAAGTAA
GAGCTTGGCAAAGTGGCCCCAAGTGGTCCAGACTTCTAAATGCCTCTCAAACTCGTGGCCAAATGTTGTATCCAGACAAGAGTTCTGCCTTAGA
AAATGCCTTGAGAAAGATCGAAGACGGACTGCCAGGTTTGAGGTTGCTTCTTCCAAAAGAATATGCGCTGCAATCTGCCCTAACCTGTCAGGGT
CACAACAATGACATGACCCAGACCTTCTGTCAGAGCCCTGCAGGTCCCCTCAAAAGAGTTAGCAAAATAACTTCTAAAACGTTTAGGCTCCTGC
AGGTGTCTTTGAAACACCCTTTAAAGAGTGACTAGCTTTTCAGCAGGGATAACTTGACCTATGTCGAATGGACCCCAGGAGCCATAGGGCTCGT
AATTCCTTTTTGGCACCAAAGAAGTTACTTAAAATTACTGAAGGCCAGCTGGACCCCTGCTGGGCTGGGGCACTCCTATTTACAAGGGCGGCCA
TCCTCTAGACAAGCACTTGGAAGGAAACCTTAGCTTCCTGTGAGAGTCTGATGAGTGGGTCAGCAGGCAGAGGCAGCCGTTCCCAGAGTCAGCC
CTGGACACCTGGCTCATCTTTAGACTTGAGCCATCGGCTCAGCACAAATGGATCCAGCTTTTCAGAGCCCAGGTGTCCTGGGTAGAGAGTCTTG
TGTGAACTTTGAAGCGGAGCAGCAGAGATTGTTCCTTTCATGTCGCTGACCTCAATTCTAAAAGGTCTAAATGTTGCTAAGTGGACTCCCGAAT
GAGCTCTTGCAGCAAGGAAAGCTACAGTGTTTTTGTTGTGGTCTGGGTCGTGAATTTCTTGACATTTATTTCCACACACATCTGTCAGTCACTT
TTCTTCTCCATCTTCTTCTACTTGGAGGCCTTAAAGCTTACGTTCTTTACTTGTAGCGTTACTGTTCCATTACTCAAGAAACCTTCTAAGCTGA
GGTTGATGGCTCACCCTCGTAATCCTAGGCGTAATCTCAGCACCTGAGAAACTAAGGCAGGAGGATTGCCATGAGTTTGAATCCAGCCTGGGCA
ACAAAGCAAGAACCAGGCCTGCCTTGGGCTACAATGTAAGACCCCAAGTCCCAAAACAAAACTTTTTTGTCTTTCCTTTTTTTCTTTCTTCCTT
CCTTCCTTTCTTTTCTTTCTTCCTTCCTTCCTTTCTTTTCTTTCTTTCTTTTCTTTTCTTTCTTCCTTCCCTCCTTCCTTCCTTTCTTTCTTCT
TTTCTTTTCCTTTTCTTCTCTTTTCTTTCTTTCTTTTCTTTTCTTTTCTTTTCTTGTTTTTTTGTTTTTTTGTTTGTTTGTTTTTTTGTACAAA
AGGGAAAACTATTGGGCAGAGGGTGTAATCATTTCTGGTGTAACTTACCTAGAAAAGGAAGTTTGACAGTGTCCCCAATGAAGCAGTGAGCTGG
AGGCAATAATGACCGAATGATACTGGTCATATTTTACAGAGTGTGTGTGGATGTAACTGAGCTAACTAGAAACTGTGACCCAGTCTTGAGACAG
CCAGACCCAGGCAGGGGAAAAGAACTGTATGCCGCAGGTCAGTATCTGCCATTGCTGTGGGCCGTGGGAAAGCACCTTGAGGAGGCCTTGATCG
GGACACCAGCCTTCTCTGAGGCCTTCTTCCAGCTTGATGGGCATTTGGATGGAAGCTCATGCGGCCTGGCCATTTTTGAAGGCCTTGTGCTGCT
CAGCTCTGAAGAACTCAGAGAAACACAGGCCTGTAGGTAGTCACAGCGTCAGAGTTGCCTCACACAATGCGCCACAGGCTCTCCGGAGCTGAAC
AAAGCTTTCCCTGTTCTCCAGCTGTATAGCTTCATGGCACTGTTTCTTAATCCAGATTAGAAAATGCTGCAGCCATGCACCCTGCTTCATCACA
CCCAGCACCCACCCGGGCTGGCCCATTAACATCTTGCACAGTTAGGAGGAAATGGTCCAAGCTAAACACTTCTATCAAAACTGGAGTGTCTGCT
GAACTGGCAGACCAAGCTTCATACTATATAGAGGACTGGCAAGGGGGCTGGCAGAGGCACAGGGTAGCATTTCATAAGTAGTTGTGTTGACTGA
CTCCTGTGTTAGAGAGTAGACAAGGAGGGAGGCAGGCCAGCCTCTGAGAGAAAGGCCTTGTGACTTCTTTCCTATTGTCCCAACATCTGGGGGC
ATGTGGCCAGGGGAAGCCAGGTGCTTTGTAACTTTAGCATAAAGCTTTCTTCAAAAAGTAGACAAGAAGGGCTGTTGTGTGTGGAACTGTGGGA
AAGGTGGATAAAGAGAGATCGAGGTCTCACGGCAGAAAACAGAACTTCCATTTCCCCGAAGGTCAGCAAAAAAGAAAAGTAAAACAAAACAACG
CTCCAACTCGCATCTCAAAGTGAGAACTATTATTAGAAACGAAATCAGGCCAGACTGAACTATAGTTTATCACTGGAGAAAAGCAGCCATTGAA
ACAGGGTCCTGGGAGAAGTGGTAGCCCACGTGATGCTCAAGTTAGCCTCCGGAAAAAGCCATCCCCCAGAGTCCAGAGCTGCAGGGCAGGAGGA
CACTGGGGACACTTGCATCTGGTGGCAGATACTGACACTAATCTCCCTCCTCCTTTCCTTCCTGCCTCCTTCCAGGGTTGGGTTCTGATACTGG
TCTCCCCTGCCCTGGCCACCATTTTCCTGATATTCCAGATGTTGGTTTATGTGGTGCCAAGACACCAGGAAAGTTAGAACAAAAAGCTGGGAGA
AACAGGAAAAGATGGTTGGGGCTCTGCAGGCCCAGCCTTTTCCTTCTGATTGCTGTGTGCATGGTACCCTGTCTGAATGGGTCACACCCAGCAC
CTACTCAGCCTTTGGGAGCTTTGAAATGACCCCCTACTGAAGCAGGAGTGTGTGGTGGTTTTTTTTCGGAGCTGAAAGATTAATGAGGTCGTTA
GTGCACGAAAACAAGATTTGCTTTGAGGTAGGTGCCCACAGAGAGAGGTTGGCCACCATGGGCAGACTTGAATGCTTCGGAAGCAACTGTGCTC
TGGGGTTTGACCTGCATAGAGGAGAAGGCGACCCTCAGGAAACTCCACCCTCATTCTCCTGACCCTTTCAGGTAATTTTAGTAAAAGCAGGGCT
AGAAAATGACCCCACCCCCCAGCGTTGATTGCTTCAAGTTGCAGCGCTCTGAGGTGGGCTCTGAGATGCTTCCCTGAAAGTGGGTTTCCTCGGG
CAGCAACCTGGAGGAAGCCTAAGAGAAGCCATGTTGGGAATATACATATATAGATATATCAGGGTTAGTATATATTTCCCTCTTTTCTTTTCTT
TTCTTTTCTTTTCTTTTCTTTTCTTTTCTTTTCTTTTCTTTTCGAACTTTTGAACTAATTCAGTAGTTTTGGTCTTTTTCCTGGTGCAGGGAAA
CAGCAAGACCCAGGGCACCTCCTTCGGCTGTGGACTGCACACCACGCTGAACAGGAACCAGGGGACCGGCTGCGGGGCCGGGCGGCGGGTCCAG
GACGCAGCTCCAGCCCCGGTCAGCCCTGTACTGGGTCCGGGAGCGACGGCTCGGCCCGGCATAGGCTGCTGCGCTCCCCTGGAGGCGGTCAGCT
GCGCAGAGGTTGGGGCGCGGACGCCAGGGCTGCTGGCAGGGGGGCTAGGTTCCTGCGGAGCGGGGGGTATCCTAAGGGAGCGAGCCCCACACAG
GAGGCGGAGGCCCGAGGGAGCTGTGCGGGGTCGTGCGGGGGAGCGGGCATGCGACAGAGGGCCGGGGGTGGACCTCGGACCGCGCGGTCCTGCG
GGCACGAGTGGAGCCTGGGCTACGCTTGGGCTCGCGCGCGGAGTTTATTTAAAACTAGGAAGCCGGCGGCCGCGAGCCGCTTGTTTATGTAAAC
CCGGAAACACCCGGGGGGACAGGGGCGGGACCGGGGCGGGAGGCCGGGGAGGGGACAGGGGAGGGGACAGAAGGCGGGGGCCGCGTCACGCCGG
GGACGCGCGCGAGCGCCGGGCGCACCAGTGCCGCGCGACCCCGACATGACGGGGCTCGAGCAGGACCCGGAGTTCGACTTCGATTTCCTCTTCG
AGTTCGATCAGAGCGGCGGGGGCGCCGCGGNNNNNNNNNNNNNNNNNNNNNNNNNNNNNNNNNNNNNNNNNNNNNNNNNNNNNNNNNNNNNNNN
NNNNNNNNNNNNNNNNNNNNNNNNNNNNNNNNNNNNNNNNNNNNNNNNNNNNNNNNNNNNNNNNNNNNNNNNNNNNNNNNNNNNNNNNNNNNNN
NNNNNNNNNNNNNNNNNNNNNNNNNNNNNNNNNNNNNNNNNNNNNNNNNNNNNNNNNNNNNNNNNNNNNNNNNNNNNNNNNNNNNNNNNNNNNN
NNNNNNNNNNNNNNNNNNNNNNNNNNNNNNNNNNNNNNNNNNNNNNNNNNNNNNNNNNNNNNNNNNNNNNNNNNNNNNNNNNNNNNNNNNNNNN
NNNNNNNNNNNNNNNNNNNNNNNNNNNNNNNNNNNNNNNNNNNNNNNNNNNNNNNNNNNNNNNNNNNNNNNNNNNNNNNNNNNNNNNNNNNNNN
NNNNNNNNNNNNNNNNNNNNNNNNNNNNNNNNNNNNNNNNNNNNNNNNNNNNNNNNNNNNNNNNNNNNNNNNNNNNNNNNNNNNNNNNNNNNCA
GCTCCCTCAGCAGGAAGGCTCCACCACTTGGGTTTCCAGTCCACACCTCAGCTACCAGAACCTGAGAGCTTTCGCTATCTTGCTGTCTTTCATT
TTCTCTTCTCTGTCAAAAGTAAAGCTTCCAGTTAGGTTAACAATCAATGTGCTGTTTCCCCAAACTTGAATCTCCTAAACGGTTGGCAGCCCAT
TCCTTGCACCAGTTTCCCTCCTGGGCAGTCTGGCTCTTGTCTCCACCTGACTTTCTGTTCCAAGTTGCACACAGTCCCGGACAGTGTTCTGTGC
TTTCCTTGGGGTCTGTCTCCCAGCCGCACTGGGACAGAACAGACATGACACTTGTAGAGCATCTCCGATGATCTGATCGTGTCATGTATTCCAC
TGACGCTCACTACTATTTTTTTTTTAAGTTAAACATCCTGTTCGCTTTTGAAGGTGAATGCTCCAACTTGGCAGTCACCACTCAGCAACTGTCA
TATGTCCGCCCATAAGACCCCTTTCGGATAGGTTTTCCTTCTTCAGGGCACAGGTGTCAGGGCTCCGGGGTCAGTGACATGAGGGCAGGCAAGA
CTGCAAGAGAGACAACCATTGGGAAGAGATCTGGGGCTAGAAGTGGAGGGAGACCCTTGACATCTCTTGGTCCTGCCGCTTTGGGGGATTTGGA
TTTACCCGCTCTTAGTGCATGGGGGCGTTTTTGAGTTCTCTCCAGAACCCTCACACTCCAGGCAGAAGAGCTGACTCTTGACTTCCCCTTAGGG
TGTCCATGTTGGATTTGGATGAGTGTGTACCACTGTGCTTGTGGTTCCCTTAGGATCCGTTAGCTCTTGTCTCTTTAAGGGGGAGGGGCTACAG
CCATGGAGCCTTCCTGGGCTGTCCAAGCTACCTGCTGTTGGGATAGGGCCCCACGGGCTTCCTGTGACTCCTTACTTACACTGAATGGACAACT
GACTACAGTCCCAACACTAGGAACAGACACAGAGATCCAAAACGGGTACTTTGGTACCTCATGGTGGCCTGAGGACTGCTTGGGGAGAGGAGAG
GGTATCAGGGATGCTGCAGACTAGGTAGTCATCTCCACAGACTCAGAACCTTCGAGGGAAGGGTGCTGCACTTGTTCAGGTATACACCATTCAT
GGATCTCAGAATCCAGAGTTCCACTGGAGTCTTCGACTCATAGCTGGACACAGCCGCTCTCACCGTGTCTTTCTGAACTGTATTGGGACACATA
ATGCCCAAGTTTGAGGTTCATCTGGGTCCATTCATGGAGGGCACAAAAGGAAGTCAGTTTGGGTGCCAAAGGAGACACTGGTAGGGGCTCTGGT
GAAGCCTGGGAAGCAGGTGGCTCCTTGAGCTTTGGATGACGTCCTCCCCTTACGCATGTGAGGGGCCGTGCTCCTCAGACATGCTTGTGTTGGT
TATGCTCTGAAGTAGATGAGGTAGAAAGGTGTCTTGTGTCTCACTGCAGCCCAGGCCATTTGTGATGATACCAGAGTGCGTCGCTGAACTCCCT
ATTGCTGCACATAGGTGAGTGCTCCCTGGAGCTCCGAGTGCTCCCTGAACTCCCTATGGCTGCACATAGGTGAATGTTCTCTAGAACTGCACAG
AGCTGTAGGGACATGCCTCTTGGATGGATGTCCCTGTGAACTGTGGGTCACTGCCTCAGCAAAGCCAAGATGCTACATCTAAGTCCAACACCTT
TAGCTTGCAGGGTGTAGGCCACTGGAGAGAGCCCTTGGCAAGGGGACCAGCCTTGGGAAGAACTTTTTCTCCCTTCTCTTGTGTTGACAGAAGG
TGCTAGAGAACATTGGACATGTACAATACATGTTACACTTCTCAGTTTAGAGACAGACAGACAGACTGACTGACTGACTGACTCTGACTTTTTT
CTCTCTTATTACCAATCCCGTTATTACATTTTTATCCCTTGTCCAATTGCATTCCTTATATTACACAGTCATCTGAAGTTACTAAGCTCTCTGC
TCCCCACTGAGCAGTAGAAGGAGCTTCACATTATCTGGAACGAGTCTAAACATAAATTCATGTAGGCCTGACCGATTCTGAGATCAGTTGCAAA
GGAATATTTGGCTTTTGCAGCTTGTCCTGAGCACACAAAACCCACATCATGAAAGCGGACATGGCTACCTCAGAGCACAGCTTACCTCCTCAAT
GCTGCATGAGGGACCCCAGTATCCCCCTCCCCACCACACCACACCACTGTCTCCCAGCTGGGTTTCATCCATAGGCAGAGACAGACACTCCACA
GGCAACCCCAACTACCAACGACTCTTCACAACTTTCTTCAGATGAAAGCATGTGAGCAGAAATATGACTGCTTCATCTGTGGTCACTGGGGCAT
GTGGCCCTGGACACTTCCTCCCAGCCAGGGCTCTTAGCAAGATGGCAAGTCTTAAACTTCAGACTGGTGAAGGCTGCAGAGGCAGAACACTTCC
AGAACTGACTGAGAACTACGAGAGCAGACACTGTCTACTCGCCCTCCTGGGGACACAAAGTCACATTTTGGTTATTCTGAGACTGGCAACAATT
AAAGTCTAGATGGTTACACTTAAAAATCCTGAGCTCAAAGCCTCAAAGACTGATGTCATCTTGCTCTCCCGAGAAGGGGGAAGTGCACTAGTTC
CGCTTTCTTTACAGAGTANNNNNNNNNNNNNNNNNNNNNNNNNNNNNNNNNNNNNNNNNNNNNNNNNNNNNNNNNNNNNNNNNNNNNNNNNNNN
NNNNNNNNNNNNNNNNNNNNNNGAGCAGCTTCACTGGGCTCAGGTTCTATAGATGTTTTAATCAAGGACAAACCTGTCTGTGTGAGCAGGATAT
GCTAGCCCCGTATCAGGTTTTCAAAAGAAACCCTTGGCTAAGAGGGAGCGCCTTGGAAATACAACAAGGGAAAGGAATGCTTTAATATTCACCT
GGGGGAGTGTCGGAGGTCTTCGAGGAAAGATGTGGGCCCAGGCTGGACACGGGACCCTTAAGCACGCTGTAGTGAGCTTATTTGCGGACCATTG
GGTGACATTTGCTATTGCTCCAGCAAGTCCAGCTCTCTGCCCTGTAAATCTCCCTTTAGCACATCGTTGCATGACAGTATTGAGAACCTGTTGC
TGTCTGTCACTTCTCGGGACTGACCCAGTCTCCATACAGTCCTCATTAGGGAGCACTATCCAATGTGCTAAGTAAACACAAGAACGGTGCTGCC
TGCCCCAGAACTGTTTTGTATTCTTTTGTTTCATCCCTAAGTGTGGAGACTTGCAGCCTCCCTCACACCCTGCAGGCTCTATTGCATGTAGAAA
GAGCAGGGTGGGCAGGCATTGGAGGCCAGGACCTGGCTGGCAGGATCTTTCTGGTTCTATTTCTAGCGCAGCCCCAGGAAAGGCTAAAGGGGTT
TGTTCCTTAAAATGAAAGGTGAAAGTTGGCTGTGATCGGTTGTGCTCTGTGCTTGTGAACAGTGAGTTTGGGTGGTGACTCCGAAGGCCATACC
GATGGCAGAGGGTCACATATATGTGAGCATCACATACACGTGGTGTGGCAGAGACACAACATTGTCTTCACTCCAGATAAAATACCAAGTGCCT
TAAGCTGAAGCACCTACAGGGGTATTTCCCAGCGGGTGCCACAGATTGCCCAGTGGGCAGCAGGCTTTCTCCACAAGTCTTAAGAAGACATAGA
CCAGGGGCTGTCATGGTGTGCAATGCCCTGGTACAGCTGCAGTAGTACCAGCTTGTTGAATTTGCTGAGGCTGGTGGGAGCTGGCCAGCGCAGA
GAGTTCTGGATTTGCTCAGCATCGCCTGCCTGCATCTCATCCATGTGAAATACTGAATGCCGCAGGGTGATTGAGAGAAATGAGCTCAGAGGAA
TAGGAGGACAGACGGATGGACGGCGACACCTGCACAGGGTGACCGCGCCTTCCTTTTGTATTACATGGCATAAGAGAATGTGTGCGTGAGAGGT
CTTTGCTTCCAATTGTGCTTTTCTTCCCTGGTCTCCCACACCTCAGTTTACTGGCCCAGTCAGCAAAAGCCAGGCTGCGGGGCACGGATGTTGC
CCCGAAACAGCAGCATATGATGTTCTCTAATCAGCCTCAATGTCTCAGGATTAGTAAGGAATTACTGGGAAGCCTGGCATTCCTGATAGACCCC
CATAGAGTGATCCCTTTGAGGAAGTGGAAGTTGGTACAGGTGGAGGGCTACCCCACAGGTCCAGGCTTTGCAGCACCAGGGAACTCAACCGGAC
TCAGCAGCCTGCCATGGGATCAGTGGGCACTCATGCTCTGAGGACTCTGAGGAGAAGGCAGCCAGCTCTGATGGCTGTCACAAAGCGAGCGGCT
CTAGGCATGTAAGCTTTTGTTTTGGAGTTTGACCAAGGAAATCCATGTGTAAGCTAATTGCTTTTGTTCTTAATAGGTTATTTTTTGAGAAAGG
GTCGCACCTAGCCCCAGGCTGGTCTCTGACTTCACCATGTAGCAGGATAGCATCTAATACCTGATCCTCTTGCCTGCACTTCCCGAGCGCTGGG
CTGATGGGTGTAGGCGTGCTTATGTGGACATAGTCAGTGTCGGCATTGAACCCAAGCTCCCTGAAGGCCGGACGAGAGCTTACTAACTGAGCTC
TACCCCAAGCTCCAGTTCTGTTTTCTTAATAAACCGTTTATGGATTTTCCTTTGCCCCGTTGAATCATATTGTATTCAAACATTTTTGGTTAAA
GTAAAGGCCACTCTTGTAATGTCCTGGGGCCCACGTGGTCTTTTCCACAACTTCCTCTTCCTCTGCATCTGGCCGAGCCCTGAGTGAGAAACCT
CCTTCTTCCTCTTTCTCTGGGCTTCAGACACCCTGTTGCTAAGGCAGCCCCAAGGAGACAAGCAGAGATTTGCCATGTCGTCTGCCTGCCACTC
AGCCATTTTTCCCCAGTACCCCAGGCAGCTGACCCCTTGGCCTAAACACTGCAGGGGTGTCAAGGCAGGACTCAGCTTGGCTTGCTGCTAGGAC
TTTCTAGAAAACTCGAAAACTCTTCCAATTTTCTCTTCCTTCCAAAAGAAGGTGGTCTGCTGTGGGGCCAGGACTGGTCTGGATTAAGGCGGAT
TCTTGCACTTAGGGGACAGAGAATAGCCAGGCCCTGCCTAACTGCACGTGTGCCTCCTTTGGGATTTGGCAGCTCAAGGCCATGCAGGACTGGT
TTGGGTCTTCAGCATCTGGAGACATGGGCAGGTGCTGGGCTCAACTTTCCCAGTGTGTGCACAGCTGCTGGGATACCCATGTTTCCCATTAGCC
TTAGCCTCAAACTTCCTTTTCTTCTGGGGTTGGGTTCCCTTAAGATGAAAACATAAAAAAAAAAAAAGATGTATTTATTTTATGTGTGAGCATT
TTGCCTACTTGTGTAGATATACACCACATGTGTGCTTTGGTGCCTACCAAAGTCAGAGAAGGACATCTGATCACTCTGAAACTATAGAGTTACA
AATGGCTGTAAACCATCATCATGTGAGTGCTGAGAACTGAACCCGGGTCTTCTTGCAAGAGCGAGGAGTGATCCTAACCGCTAAGCCATCTCTC
CAAACTTGAAAGCCCGTTCTTTTCCAGTGTTGTGTTGTTGGCAGTCTTCAGACAGTGCACGGAGCTCTAGAGACATAGGGCAGCATATAACATT
GGCAAAACCTGACTTCCCAGATGGCTTAGCTGCCTGCTCAGGGGTAGGGCCTCTGAGGCCTGGGTGCTGTCTCACATGGCCTGGTTACCACCAC
TCTCCAGATGGGTTCCTGAAGCACCTTTGTTTAGAAGTGGTGCCTCTGGTAGAAGTTCGAATTGCTGTGTGATGTCCCATATCTGCTGGGGACT
GTGCCCTGGGCTCTAGTATGGAACCCTTCTAGGACCACAGTGGTTCTGAGGCCCAGAAGGCTGGAGAGAGCATAGATGATATCATCCTGAGGGG
GCCTTTTAGGTGATGAACAGGTGGGGGTCATGAAGGACACGCCCATCTGGGGGTGGCAGTGAGTGTGTGAATTTCTGAAGACCTTGGGAGATGC
TCAGAAGGGGCCTGGTTGGATGTGAGTGCAGCGAGAACTACTTCCTGACCGAGGCATGCTGCGGAGGGTGTAGTATCTCAGGCAGCACCAAGCC
AGAAATCCAAGTGCAGAGGTGAGGCTGAGCCATGGCACAGGCATTCTTCCCGGACTGTGAGATTCCAGCATCAATGAAATCAATTCCTAAAACT
CCTACTCTATTAGCCTGTAATTTCTTCCTCCTTTTTATCATTAGCAATAATGCAGTGACATTTTGGGGTGCCCACTTTCCACTCCTCACTGCCT
TTGATTGACTAGTTAAGACCTGACTTCTTACCCGAAGATGAGCAGATCCCGGCCATATCTTCTGGGCCATGGAACATTGAATGTGCCTTTCCAT
AGAAAGTTTTAGATTGGGAAGTGCTAGGCCAGCTAAGGGAGATCTCTCCATCAGTATCTTTCTCTGTGTTTGTCACCTGTATGGGATTAAAAAA
ACATAGGATGCATAGAAAACCCTCTTCTCTCCTTTTCTTTTCTCCTCTGTCTCTTCTTCTTCCTCCACCTCCTCCTCTCCCTCTTCCTCCTCTT
CCTTCCTTCCTTCCTTCCTTCCTTCCTTCCTTCCTTCCTGCCCCACCTCCTTTTGCCAAAATGAATGTGTAGACGGCCTTTAGTGAGAACAGCA
GGGCAGCACAGCTCTGGACATAGCCATCTGTTGTGCTACTCCTGAATAGGGTCCCTGGTAACCTGTTCCAGACTTTTCTGTTGGTAACTTCACA
GAGGAGCCAGACCGTCTGTTGGTCTCACCAACCAGCCTTTGGTCATCAGGCTTTTCCACCTGAACCTGTTTCGTATCTTCACCAACTCGGTTCT
TTAGGATTGGTGTTCTTTTCTCACCATGGACAGTCTGCATCTCCCATCAGTCCTCCCTGGGGCTGCATTTTGGGATACCAGGGGTGGCCTGTGT
CTGCTGGACCTGAAGAGGGGGGGTCACTGGCAGTGGACGGCTCTGCCCCTTGTCCAGTGCTTCTAGAAACAAACACTCTGAGCCTAGGGACTCG
GCAGAAGTGTCTGATAAGTCCCAGATGCCGCCAGCCACAAGTCCTGTCTCTCCAGAAGTATTGCTTTCTCTAGAAAGTGGCTTTAGAGTTATTT
AGGACAGGTGGAGGTCATTTCAGTCTTCGGCTCCGGCCTCTTGAGATCTGGATTGTGGACTGGGGGGTGGTGCTTCCCTATGACAAGGCTAACC
ACAGCCACGGCTGTAGGCTCCACTTGGCAGATGCAGGTTCTTGCTACGGGTTGCTTCCGATGCCTCGAGCTGTACCCCATTCTCCTCTTTGTCT
CAGCTCTGGCCTTTCCAGCGCGTCTCTGTGACCCAGGGATTGAGGACTACCGATGGCCTCTTACTGGACACTGGAGTGGGACTCTGGTCCATCT
CATAAAGAGGCGGCTGTGTAGCCAGAGAGGGTTTGTGAGCCCATTAATGGTAGAAGCCTGGGAGAGAGCAATAGTGGGAACTTCCTAACCTACC
TAAGGACTGGCATGCTCCTTACAAACCATCTTAGGGTTTGACCGCTGCTTCGAGACCCTTTTTCTGGAGTTTCCCCCTGTTGGTTTCTGAGCCA
GCGCTGTCCTTGACCACAGTATCACGCAGCTGGGCGCTGAACCCTAGTGTGGATCTAGGACTTCCTTGGGCTTATTTCCATTATTCAGAGACCT
GGAAATGCTTGTCTCCAGACTCGTGTAAATGGGCTCTGCGATGTGGAGAGCCTTTCTGATCAGAAATCCGGAAGCATGGCTTTGCTGTCGAGTA
CTAATTATAACAATGATTTTTTAAAAAGTGCTTACCAGAGTATAATCAGCACACAATGATCTCGAGGTCTAGGGGTGTCTTAGGAGCCTGTGTT
TTGTTTTAGACGCTCTAGAAGATAGATTCCCAGGCACCAGCTAGCCTCAGGTAGCCATAAGAGCCACACTGGAATCCACATTGTCACCCTTCCT
CTGGGTGTGTTCTTTGAAGCCAAACATTTGGCCTGCTTGATAGAGTCATTTGCTTGTTAACACCTATTTAAACACCTGGCTCCCTGCGTCTGAA
GCACCTCCCTCCACCGATAACACCGCCACTCTTCCTCCCTCCCTTCACAGTCTGTCTGTCCATCTTTCCTTCTGCCACTGCCCATCCATCACCT
GCCATTCAGGTGATGGTCTGCCTAGTCATGAAACAAGATAAACGTGTGATGTAGAATCTGAAATACCCCTGCCTCTCTCAGCCTTTGATATACT
AGAATTGCAGAGGTACTGAGCTGTGTTGTGCCTGGCACCGTCTGAGGCTCTGCAGACAGCCGTGAACCACAGGGCAGGCTGTGAAAGCTGGCTT
CTGTTGGTCAGAGAGATGGATAGATAAAAATTCCTGTTAAATTGTGATATATACCAGGGTGGTGGTGGGGGAGGAGGTAACTCAGCTATTGGGT
AAGGATTTGAAATCACAACTGGCTAGGGAATGTGCATTTTGAATATAGAGAAGACAGTAAGAGCCAGCCATGTGATGTGAGGTGGAGGACATCT
TGCCTGAGGAATGCTGTTGTGCTGGTATAGAGTAAGGTCTATAGTCTAGCAGGAGGCCTTGCAGCAGTCTGACCTCAGGCCATTCCCAGAGGCT
ACACTCTGGGCCTGGAGTCCTCAGGGCTGGCCCCAGGTCTTGGACTCACTGCCTTTGTGATTTATGTGTGTCCTGCTCACTGGCCTCACTCTGT
CTTTCCTCTTTTCTTCCAGAACACTACAGTTATGTGTCCCCTAGTGTCACCTCGACCCTGCCCCTTCCCACAGCACACTCTGCCTTGCCAGCAG
CATGCCACGACCTCCAGACGTCCACCCCGGGTATCTCAGCTGTTCCTTCAGCCAATCATCCCCCCAGTTACGGAGGGGCTGTGGACAGCGGGCC
TTCGGGATACTTCCTGTCCTCTGGCAACACCAGACCCAACGGGGCCCCGACTCTGGAGAGTCCGAGAATCGAGATCACCTCCTACCTGGGCCTA
CACCATGGCAGCGGCCAGTTTTTCCACGACGTGGAGGTGGAAGACGTACTTCCTAGCTGCAAGCGCTCACCGTCTACAGCAACCCTGCACCTGC
CCAGCCTGGAAGCCTACAGAGACCCCTCCTGCCTGAGCCCAGCCAGCAGTCTCTCCTCCAGAAGCTGTAACTCTGAGGCCTCCTCCTACGAGTC
CAACTACTCCTACCCATTACGCGTCCCCCCAGACCTCTCCGTGGCAGTCACCCTGCGTCTCTCCCAAGACCACGGACCCGGAGGAGGGTTTTCC
CCGAAGCCTGGGTGCCTGCCACCTGCTAGGATCGCCCAGGCACTCCCCATCCACCTCTCCTCGGGCAAGCATCACGGAGGAGAGCTGGCTCGGT
GCCCGCGGCTCCCGGCCCACGTCCCCCTGCAACAAGCGCAAGTACAGTCTCAATGGCCGGCAGCCCTCCTGCTCACCCCACCACTCACCCACAC
CATCCCCCCATGGCTCCCCTCGGGTCAGTGTGACCGAAGATACCTGGCTCGGTAACACCACCCAGTATACCAGCTCTGCCATTGTGCCAGCCAT
CAATGCCCTGACCACCGATAGCACTCTGGACCTGGGTGATGGGGTCCCTATCAAGTCTCGAAAGACAGCACTGGAGCATGCGCCCTCTGTGGCC
CTCAAAGTAGAGCCAGCTGGGGAAGACCTGGGCACCACTCCACCCACTTCTGACTTCCCACCCGAGCAGTACACCTTCCAGCACCTTCGGAAGG
GTGCCTTTTGCGAGCAGTATCTGTCGGTGCCACAGGCCTCGTATCAGTGGGCGAAGCCCAAGTCTCTTTCCCCGACATCATATATGAGGTAAGC
AGCCTCCGACTGGAGTTGGGCATACGGTAGGGGTGTGGCTGGGGTTGAGAAGAGCCTACCCTGGCTTCTCTCTGGAGATAATGGTATGCTACCA
TTCATAGCATTATGACAGTCCCCTCTGTCCCTTCTTCTGGTGATAGCTGTCTCCGCCTGCTTGTTCCTCTTCTAAGGACACCTTGGACTAGACT
AGGGGACCCTTACTTTTTGGAGGCGTGTTCACAGGTGTCAAGGGTTGCAGCACATGAGTTCCGTGCTGCTCTACAGCTCTGNNNNNNNNNNNNN
NNNNNNNTTACAGGGAGGTCCCCGCACACATGCACAGCTGTGTTGGTAATAAGCCGAGGGAGGCAGCTATCCTCCTGTGGATGTTCTGCCTGCT
GCTCGCCCACTTCCTCTCTCTATGCCTTAATCGCTATCTATCACCATGCTGGGGCAGATGGGCCCCTCAGCTCACAGTCCCTCAGAGCAGCCAG
CTCACCAGCGTGCTACCAGCAGCACGACCACCACCTCCCGTCTTGCTGGCCGTCTGCTATCAGGGAGTGTGTTACAAACCTCTGGTCTTAAGCC
GTTGGTTTTTCTTTTTAACGGGATGCAGGGGCTGCTTGCGATTTACCAGGTCCATCGAACCAGCTCAGTGCTTTTATTTTTAACTAAACAGCTT
TCCTGTCAGCTGTACCGCTTGCGACGCCTGGAAGGCTGCTTTCTGCTCCAGGGTTTTCACTTGAGGCATGACAACATCCACTCAGGCCCGTTGA
ATGTCCGTGTGAAATCAGTAGGGATGTTTCCATGAGCTGAGGCACCTGTGATACCCAGGGACTATCATTTGGCAGGGACAGTCTAAGGCCTGCT
GCTTCGCTTTTGCCTCATTCCTCCCCCCCCCTTCTCCTCAGGGCAGACTCACCCCCCCCACACACACTCTTGGGGCATCACCACCTGGTATTTG
GCCCCCTGACCTCTAGATGTAGACAGTGACTATGAAGCTGTTAGCTCCATGCAGTGCAGCCACGTGGCCGTGTCTTGACGGGTCACTCTGGGAT
GTGGGGTGGCCAGCTGGGAGCGGCACTGCTGAACCTGTCTGTGAGTGGCAGCAAGGGGAAGGCCCAAGCAAGTTGCTAGGTGCTAGGAGCCTGT
CTTGGGCAGAGAGACTGAGGGCAGGGGTGTGGAACAGAGCTGTTTCCTGTCTTGCCGCATAGGCCTCTGTCGTTCTATCTTGTGTCCCTCCATC
TGTCCTAGGAGGCCCAAAGGGCTAGCCAAGTCATTAGAGCATGTCAGGATCAAAGTTTATCTCAAAGACGGGAACCCCAAATCCATAAAGAACT
GTTGTGCCTGCCATACTGTCGGTAAGACTTCTAGTTAACGAAAACCGACTTCTACTTATTTCAGCTCGGTCATCAGCATCACGCTTTTGATTTG
CGGTGCATGGACAGTGAAGGTCACTGTTGCTCACAAAGACTTGGTGGAACGCCTGAGGCCTAGGGAAGAGTCATGTACTAAAATATATCTGGAA
CCATAGAAGCAAAGGCTTCTTATAAGTTAAGTGCAGATACGCACATGCGTGGTGAGATACGCACATGCGTGGTGAGATACGCACATGCGTGGTG
TGGGGCTGGAGTGAGGGAACCACTGACTGGTGGCCTTTATGCCAGGCACACGTGGTCTTCCAGGTCAGGGGCTAGAAGCCCAAGCTGAAGGTTG
TGTGGCAGCTGGTTCCTCCTCCACGCTACCTTGGCTTGCGCTAGCCATCACCCCACCATGGGCCACAGCCATTCCTTCCTTTAAGTACTTCAGA
TCTGGATCTGGGCTCCTGCTAGTGACACCAACTTGGTCACCTTTCAAGGTCCTTTCTCCAGATCAGTTACTCTCTGAGGTTCTGGGGCTAAGAG
TCCAAATTAGAACTTTGGGGACACAGATTAATATCTGACTGCCTATATTATTTTTTTTTTCGGGGAAATGACAAAATGTCTTCAAACATAAAAT
TTACCCTTTTTCCTTTTTTTCTTTCTTACTTTGGTTTTTTGTTTGTTTGTTTTTGTTTTTCGTTTTGTTTCTTGGTCTTGGGTTTTTATTTTTT
ATTATTATTATTTTTTGTTTTGATCTTCACAGAGACAGAGGCATCCTCACTACGTTGGGCATTCCTGGTGGCCTACAGTTGGCTATCTGCCCAG
CCCAACCTGCCAGTGGCACAGGTCCTGGAAAGCAGTTGCTGTTTTTTCCTCTACTTAGGAGCAGTGACCATGGCCCAGTGGCCTGTGATCCCAT
GGTCTTTATCTCATGGGCTCAGAGCCCCTGGGGTTTCTGTGATGCTATGACATTCCTATGAGCTTACACAAACAAACACCACCCCATCCTGGGG
GTTGAAGTTCACCTTTTCCCACTGTTTTGGTTCACCTCGAAATCTGTTTCCTGGTCCCTTTGAATGGGTTTCTGTAAACTCCCTAATGGCTGCT
CTAGGCAGCTGAGAGCTTTCGTGGGGAGGTGACGTGTATGGCTGTGACCATCACTGTGAAGAAGCCAGACTCCTTCCTCACAGATGCTCTTAGT
GGACAAGTACCAGGTAGCAGGAACTTGAAGGTATCCCTGAAAGGCTGTGTTCCCACATGTCCTCCAGATCTGGGCTGGAGAATTCCCACAGTGT
GAATCTACCTCCACTGCCCAGCCTGGGCACGGTGCCTCCTCCAGGCTTGTCGATCCATCCCGGCTCAAAAGAACACACTGCAGTCGCCTTCCCA
AGGGACTCCTATTGTTCTGTAGCCATTTCACTTTAGGGATCTTGTTTGTTGTTTTCTGGGGTACCCACTCCCTCTCCTGTTCAGAGCACTCCAG
TCGGCTCTATGGGACAGGACAAAGAATGGCACCGAACTCCTGCTACAACCGAAGAAATTGTATTTGTGAAGCTAATAAGGACAGTGGAAGGGCT
TTTACTGTTTTCGGCGCGGGCTTTAACTGCATGCTGCTGCTGGAAACTGGCACCGAAGTTGAGAGAACTTGCTTGAACATCACCGACAGTGATG
ACAATGGCAGACACCTTCTGTGCAGGTCGAGCCATCTTATATGTCCCTGCTGAGCACGGCTAAGGAAATGGCCAGGAGTGACAGTGTGCAACAG
CACGCTGGCACCTGTCAGTGTGTGTGGAGGGTGCACACCAGAACACATGCCTCTGGAGATGACAGTCTCCAGTAGATTGTTCCTGGATGTAGTT
TTCAGATGGTAGCTTTTAGGGAGTTGTGTGTGTATACACATTCATGTGTGCACTTACACACACACACACACACACACACACACACACACACGGA
GGTTATAAGTCAACTTTGGGTGTCTTCTCTATCCCTCTTCTACCTTCTTTTTTGAGACAGCATCCCTTATTAAATATGAAGCACACCAGCCCAG
CGAAGCAGGTGGGCAGATGAGCTTCAAGGATTCGCTTGTTTTCCCACCCACATTACCGTGGCTACAGATGTGTTCCACAGCACCCAGCTTTTAT
GTGACATCTGGGGATCCAAGCTCAGGTCCTCACGGGAACATACACAGCAGGCATTTCACCATCATGCTACATCCACGGCCTCTTTAGAGGGCTT
TAGTATTAACCCAAAGGAACTGAAGTTTAAGTGACTGTCCCTTTAGCCATTCCGTTCTGAGCCAAAACTTCACAGAGCACCAGTGTTGTGCGTC
AGAGCTTGGGTCAGCTCTGCACAGTAGCATTTTCTTTCCTTCTAAAACAGGGTCATGGGAAGTGTGTTAATGCCCTCAGCCAGCCTGACCTCTG
GACTTGCCTATAGAAAGGCAACGTTACGTGAGGAATTCGGATAAAGACGAACTGGTCTGGGGCTAGCAGAAGCGTTTTAATGAAGAGTGTTCAT
GACACGGAGACACATTTGCTGAGTTAGGTTGTGATGGCTTGGCCATTGCTTTCTAAAGAATAGAATTCCCAAGGGGTGGGGCCGACTCAGCAAA
CAGCTTTTGCTCAGAGAGACGGCTTGGTTCAGAAGATAAGAAATGGGCACTGCGTTGAAATCAGTTTAGGTCAGAACTTGTTTCTTTCAGGGTT
TGGCTGTGATGTTGGATGCCTTGATGATACCAGTGGCTTTGATGATATATACGCACAAGTGTTAGCTTCAAAAGGTCTAAGAAGTCCTCTTGCA
TTTGAGGTTATCGGAATAGCTCAGAGTTTATCGTGAGTGGGAATAAGATACAATATGCCTGTAGATGGGTCACAATAAATCCAGCTCTCATCTT
CTCCACACTTACTTACCACGCTCATCAGGGGATTTTTGCGTTGGACAGCTGTTCAGTGAATCCAGTGACCTTGTAGCCTGGGGAAGGCACGGTG
TCAGTGAAAGATAGTTTTGGTTCCTGGTTCCTCAGGAGTGATGGCCCACCTCAGGACTCTGTTGGCCAAATTGGCCTGCCCATACTTCAGACAT
CTGCCAAAAACATCCATGTCTCTGGTTTTTGGTGGGCTCATTGGGTCCGTGATGGTCGTAGATTGGTTGCAAACTCGAGTCTAGGAAGGCCCTG
ACCTTCTCTACAGCACAGGAGGGCAAGTGAATCGGTGGCCACAGTGTGTCTTGTTCAGAGATAGGTATCAAGTGAAGCTTACTGACCGGCAAAA
GTTAGTATCGTGTGCCGAGAACCCACATAGACTGCTAGCCCCAGCTAGCAGGTGACAGGCATAGACAAGGTGTCCAGGCAGAGGCCCTGGTAGG
AAAGAGGGAGGTTGCCACAGATGAGTCCATGGTTATGCAGTCTGTGTTCTCAAGAGCTATCTGCTGTTTTCTCTTGGCTTTGTAATTGGCCTCT
CATGTCCCTGCCACAGTTTGGGGAACGCACCATTAGCCTCACCAGGTGGGGTGCCATACCCGTCTTTGTGCTGTGCTATAGGCCCCAGATATCC
CTGGAGATTTGGAGGAGGGGAGGGAGGGGTAATTTGGGACTGGAAAGAAGTGGCTGTCACCCAACCAGATCTTAAGGAGGCTTTGCAGATAGAG
AAGCACTGGGCCGGGTCAGGGCTCCACACGGCCAACTCATCACTGACAAAGACAAGGAGGTCCCTTGTGAACCTGCCCAGATGCTAACTGATAA
AGCCAGGACAGACACTCAAGATGAGTTGACTCTAAGGCCTGAACCTCTGTGATGCTCCTGATTCTTAGTTGTTCTGTGGAGTCAGCCCTGGAAT
GTGCTCTGTGCAATATGGGGGCAGCAGGGGCTTCAGATTAAACCCAACTCTCCGTGGAAAGAAGGACACCGTGGGGAGCTTCGGAGCCAGAGCC
TGAGAGCTAACTGGCCCCAGAGGACAGGACTGTCTTCTAAGGCCTTTGGGGTTGTGGGTGCTGCATATAAGACCTGGGAGGTTTGTGTATGGAA
TTCTCAATCCACTCTCCTCGTGCCTTTGCGGTGGTACAGGGTGACTGAGATGCTGGTTCATGTCTGTTCACAGTTTGATACTTGGAGGATGGGC
CTTACCTCATTTGCATCTGCCTGGAAAGTTAGCCTGGTGTATCAGTTAGGACTTTCAAGGAGGCTGTGAGAGCCGAGCTCTGTCAGTATGGGGG
ATGCTGGCCTTTGGATTTCCTCTGAGTACTGTGTAAAGAAAGCGGAACTAGTGCACTTCCCCCTTCTCGGGAGAGCAAGATGACATCAGTCTTT
GAGGCTTTGAGCTCAGGATTTTTAAGTGTAACCATCTAGACTTTAATTGTTGCCAGTCTCAGAATAACCAAAATGTGACTTTGTGTCCCCAGGA
GGGCGAGTAGACAGTGTCTGCTCTCGTAGTTCTCAGTCAGTTCTGGAAGTGTTCTGCCTCTGCAGCCTTCACCAGTCTGAAGTTTAAGACTTGC
CATCTTGCTAAGAGCCCTGGCTGGGAGGAAGTGTCCAGGGCCACATGCCCCAGTGACCACAGATGAAGCAGTCATATTTCTGCTCACATGCTTT
CATCTGAAGAAAGTTGTGAAGAGTCGTTGGTAGTTGGGGTTGCCTGTGGAGTGCTGTCTCTGCCTATGGATGAAACCCAGCTGGGAGACAGTGG
TGTGGTGTGGTGGTGCTGGTGGTGTGGATGGGTGTGTGTGCACACATGCACATGTGTTTGTATGTGCATGTACATGGATGCATAGACTTGAGGA
CATCATCAACTATTACTACCCAGGCTTCGTCCACTTTTTTCTGTGTGTGTGTGTGTGTGTGTGTGTGTGAGAGAGAGAGAGAGAGAGAGAGAGA
GAGAGAGGTGGGGGTTCTCTTACTGGTCTTGCTTGCCAGGGATCCCCAGGGATCGACCTGTTTTCTGCCTTCATGGGTCTGCCTTTATATTTTG
CCCCCTAGAATGTGGGTTCTGGGGACTAAACTCAGCTCCTAGGCTTCCAAAGTACTTTGCTAATGGTGCCATCTCCATGGTCCCCTCTCTTTTT
TTCATCTACTCTGAAATCCCTTCTGGTGACAGGAGTCTGAGAGGCAGGCATTGCTGTACTTGGAAGAATAGCCAGGGAAGCTGCAGCTAGTGTG
GGATTATGGGAACACTTACCACATCTCCTGAAGGCCATGTACACGGGACTATTACAGACCTCTGCCAGGTGAATCACCTGTAAGGCAGAGAGGA
CTTGCCTGCCGTGATAGCTTAGGCAAGACATGTGTCACCACTGACCGCACCTGGCCATTGGAAGGTTTCCTTTGGGACATGGTGATCATATGCA
CATATTCTTCAGATGCAAACATTGCCAGGAGGTTTGATATAGGAGTGGCCATGCACCGCAGCCCCGGCCCATGGCATTCCTGGATAGATTGGCC
ACCCAGCTCTGCCTCTGATTTATAAGCTGCTGTTTCCAGAACAGGATCCACTCAGGTCACCAAGATGCGCATGGTGCAGACAGAGACCTGTGCA
AATGCCTAGCTTAACCCATCCTAGGTGACTGTGGCTATGTGTCCAAAGCTCCAGGCCATCTCCAGGTAGTAGTTTTCTATGATGACCTTGTTTT
TGCTGGAACCAGACCTCTAGAGCCAAGAAGCCCTGGGCAGCCAGTGACACTGATGGCCTGAAATCCCTAAGCTAGGAACAGAGCTGTGGTGCCT
TATGTAAGTGTCAGACTGCAGTTGTCAATTCTACAGGAGGCAGGGTCTTGGCTGCATGTCTAGGATCTCCAACCCTGGGCCAAGGTGTCCAGAC
TGTTCCGTGTCTCATGATCATTAAGGAATATCTGCCTTGTGACAGCACAGGGAATCATGGCTGACGGGAAGGAGCTTGCTTCAGACAGTCATAA
ATGGCAGTGGCTTCCCTATATGTTGCTACCATGTTCAACAGACTGAACCAACTTTCAGAACTTGACCAGCAACTGTTTGGACATCAGGCTGTAG
GTCACGGCAGAAGTGTGTCATGGCAGAAGTGTCCCGTGGCTTGCGTGTGCTCTGTCCTGCGTTCACTTGTGCGACGTTTGGGTTACCGTGTCAG
TTTGTTTCGGTTTTCATTTTTCATAAGTAACGCATGGCAGGTGTGGCCTACAGCATCCTCATCATTAAAACATCAGTGATACGAATCCTGATCA
GCTGCAGCTGCTGGGCGTCACTCGGTGGCTAGAGAAAGGCACAGTGTGGAAGAGGAAGCTGGGTGCACAGGGGAAATGCAGGGTGTGCAGATGT
CAGGCCTGCCCCGGGGACAGAGAGAGCTGGAGAGGCTAGACAGCTCCTTTCCCACAACAAATCCTCCTCAGAAATATTCTCCATCTGTCCTTCC
TTCTTTCTTTCTTCTTTGTTTTCCAGTCTGAAACAGGTAAACAGGGCAGATACCCTTCTAGAGTCTGGCTAGAGACCCAGGAGCCCAGATCTCC
TGGAACCTGGAGATTCAGCCTATCTCCCGAGCTCTGTCCTCCACCCACCCAGGATGCAGGTGGTAAGAGTAACCCTCACAACGATGAGATACCC
AGGCTTGGAACGCAGTTCTGTGGCTTCAGATGCACAAGAGGCTCATGGGATATCCATGGGCCAGGGAGGTCTTAGGGTGAAGGGCAGAGTGCCC
CAAACCTGGAAGAAGCATTTCCTTGGAGATGTCCTGCACTCTCACTGGTAAGATCTTGGGAAACAGCCAATGTATGAGGTCTGTGAATCTGCTG
TTTTAACACACACATGTAGCATGCACAAACTCACATGCCTGCTGTCTGGATCCTGCAAGTTCCAGATTTGTGACTTTGACTTGGTCTCCCAAGC
CAGTCATGCACTCTGCTTTCTGTTACAGGGACTACATGCCTTTGAGGCTTTGCTATCTTCCTTGGCAAGAGTCCCCAGTGTCCCCTGTCCTGTG
CCCCAGCCATAGGACCAGTACAGGGACTAGGGTGGGTAGAGCTCAGGATAAATGGAACACTCATTATGATTGTTGCTCTTAGGCTGTGTCAGGA
CCAGGATAGCAGGCAACGTCTTGTACTGCACAGCTGTTGTGGTAGAGGCTGGACCACAAAAGGAAGAGGCCAGCAGAGGACAGCTCCTTTGTCC
CGAGCCTAGCTTTAGGTGGGAAAGTTGGGGACTGGGCCATTTTCCTTCCCTATTCCTGCTTATGCCTGTGGGTGGGGCCCACACTGAGCACCCG
TCTTCCTCGTAGATATAGAAAAGTGCCACTTTTAGTAACATGCCCAAGATACTAGTCCAACAGACAAGGATGGCTGGTCACAGTCTCTCGGGCA
GGATGGTGGTGTGCCAGAGCCCTTAAAATATTCCAAGGTGTCCTGGTTGCTGAGGCCTTGCTCCTATCCCCACCCTTTCCATCTGAAGAGGAAA
CATTTTGTTAAGGGTCAGCTTATTGGCGCCTGTGGTCCCTAAGGTCTTCCCAGGTTGCTTTGGGAAAGGTGGGAACTAAGAGACCTGGACTAGG
CAACCAGGAATCCTGTGCAGAGATGGCACTCATGTGCTGACCAAGGAAACTAGCCTGCATGCCCTGCCCCACCAGGCCAGCCCCTGGGCTGTCT
GTCCATCTTGGCTGAGGTGGCTACCAGTCCTCTTCTGTCCAGGCACTGTCTGGACCTCTAGAAAGGCCAGCCCCTCTTGGGCGAGGCAAGCATT
CCCAGGCTAAGAGTCCTGTGGTCAGGGGGCCACAGCCCAGATGTGCACTCTTGACAGTGTTGCTGGGTGGTCCTGGGCTTGGCCCTGGATGGAT
GGACAGATGAAGCCCTTGAGGCCCAAAGTTTGCAGAACCAGCCAAGAAGTGCATTGATGGCCTTCCGCAACCCTTTCTCCTTCCTCATCTCCCT
GCCTCCCTCCGTCCCTCCCTCCTCCTCCTCTTCCTTCTTCTTCTTCTTCTTCTTCTTCTTCTTCTTCTTCTTCTTCTTCTTCTTCTTCTTTTTC
TTCTTCCTCTCTCTCTCTCTCTCTCTCTCTCTCTCTCTCTCTCTCTCTCTCTCTCTCTCCTTCCCCTGTTCCTTCCTATTTGACTCTTGAAACC
CTTGGTCTTTCTTAGTTAGAGGAAGACCTTTGGCTGCTGCCCCCGTGTTGATGTAGTCGAAGGTCTTGTTTCCCTTTAACTGGCTTCCATTTTT
TTCCACATAAGCAGACTTTAGGCTTGGGTTAGGTTTGTAGTTCCATGGACCTCAGGGTGACTAAAGCATAGATGGTCTTCACGGTTTTCCTTGT
AAGATCTGCGCAGAGGGCTTTTTTAACTATGGATGGTTCAGAATCGAAAGGATTCTACCCAAACTATGTAAGCAAATCTGTCCCCTCTGAGTTC
CAGTGCACAGGAATTAATCTTGTACCTGTAGCTGGGATGACTTTCCATGAAAGTTGGTGCAGCCTGAGGACCGGTGCTTAGCTCCCCAGAACAC
ACATAAAGCTAGTTGCCATGTGTACCCATAACCCCTGAAGGAAGAAGAAAAGGAGAGATAGGCTTCTCTTTAGAAATTCATGGGCTAGCTCAAT
CCCAAATGGGCAGCAGGAACCACCAGAGAGACCCTGTCTTAAGTAGGGTGGGAATGGATGGCCAACACCTGAGATTGTCTTCACACATGAACAC
ATACACACATGCACATGCTGAGTTACAAAGGATAAACACACTCAGGATTCTTTGTTAATACAAACAGGGTTCATTACTGTGAAACCTTTTTCTT
CCTGACCCCCAAATCTCCATCCCGAGACAGGGTTTCTCTGTGTAGCCCTGGCTGTCTTGGAACTCACTCTGTAGACCAGGCTGGCCTCAAATTC
AGAGATCCACCTGCCTCTGCTTCCTGAGTGCTGGGGATTAAAGGAATACATCACCACTGCCAGACTGCCATCTGCCATTACTATTATATATATA
TATATATATATANNNNNNNNNNNNNNNNNNNNNNNNNNNNNNNNNNNNNNNNNNNNNNNNNNNNNNNNNNNNNNNNNNNNNNNNNNNNNNNNNN
NNNNNNNNNNNNNNNNNNNNNNNNNNNNNNNNNNNNNNNNNNNNNNNNNNNNNNNNNNNNNNNNNNNNNNNNNNNNNNNNNNNNCTGGCTTGCC
CTCTGCCCCTGTGTGCTCATTCTGAGTGCCTGTTGGCTTTCTGAAGCTCATCTGCACATGTTCTGATGTGTACAAGACGGGAATTCAGCCTTCT
AAATGTATTCTGACACTGTTGCCTCACCTAGGAGCTCACACAAAGCGAGCCCTGATCTCAGGCCGGTGTTTGCGGCTCCCTAATTTGGAATTTT
CTTAGCAGTCGTTGGGCAAGGCCTTTGGGTGGATCCTTTGTCAGTCAGCATTCCCTCCCTCCTGTCTCTGCCTCTTTGCTTCCCTCTCCTCTCT
CATCCTGGCAGAAGCTGTGGGGCACTCACACCCCGGTATGGATCTTGGTGAAGGTTGTTTGACACTTCTGTGTGTCAGATTGGTGTGAGCCCTA
AGGCACGCTGGGTTCAGACTGTGGTAGCCCAGTGGTCTTTGTGTGTCTGTGGCTGCAGATGCCTATGCCTCTCTGTGGGATTCAGCGACGGCTT
TAACCCTAGAGGTCAGTACACAGAGCGAGCTTGCCCTTTCCAACACCTCCCAAGGCAGCAATGAGGCTCCTGGGCTATAAATTGCCATTCCCTG
GCCCCACCCCCACCCCCCAGAGGTAGATTAGAGTCTGGAAGGCAGGGGAAACTATGTGGCTTTGATACTCTCAGTCCTTAGCTGTCATCTGCCC
AGCCTGGCTCCGAGCTCTGGGGCAGGTAACACCTATGCTTCCTGTGGTGAGCACACTTCTGAGATGCCTGGGACCCTGTGGTCGTGAAAAGGTG
AGAGGCAGAACTCAGAACAAACAGGAAGCAAAGCTTTGTCTCGAAAGACTCTGTTACCCATGGGTGTTCTTTGAGTATCACACAGCTGAGATCG
GTGCTTGGTTCCAGTACCAAGATCCAGGTGCTTGGTACCTGTATGAAGGGATTAGGAGCTGGGCCTGGAGACACTTGTGGCCCCTGAGCCGGCT
GGCTGAGCTGGCTGAGGTGCTAATGAGGCTGTGCAGAATCTCTGCTTGGAGGAGAGAGGAAACTGGCAACTGCCAGCGACAGGAACCAGGGAAC
GTGAGCCCACTGTGGCCTCAGGTTTGGGATCTGGTTTGGAGTTGGTCACTGTGCTGTGACCTGTTCGCCACAGCATTTTCATGTTTCCTGTCAG
TCGGAGGCAGAGCCCTTTCTCATGGGAACAGTGATTCAAAACAGGAGAGCTGGTGGGTTCTCCCTGCGCTGCGCCCACATACCAAGCACTGTGG
AAGGTCTGACTCGCCCATTATCAGGAGAAGCTGCCCGTCATTCCCACGCAGCCTGTCCTCCCATCCCTCCTCCCCCAGCATGGAGGGTACATCA
GCCTGGTCCCTTCAGACCCTACAGCAGGAGGCCACCCTGCTTTGTGACCCAAGGACCCTCAGGACCCCAGAATCAAGGAAAAGACACACACACA
CCCACATGGGCACACACACATAGGTAGACAGACCCATGCACATGTGAGTGCATACACACCACACCCACGTACACACACACTTGCTCTCACACAC
ACACATGTACATGTGCGCACACACAGACATACACACACACATGTGCACACACAGACCCACACACATGGACATGCACACACACACAGACATACAC
ATGCACACACACTCACACACATAGAGACACACTCATGCTCATGCACACTCATGCTCTCTCTCATGCACACACCATTTTCTTGAGTGAATTCAGG
AAAAAAAATCTAAATGTGTTTAGAACCGCTGAATGCATGCTTCGAACAGGCTGAGAAGGGCCGTGGGTACTTGATATGAAGCTTAATGAGAGAA
AAAGAGGGCTGGCTCCCAGATCTCAACATTTAACAGGCTTTAGTCAGCACACACGGCCCAACCACAGGAGGCTCACCTCCAGTCTGCACATATG
TTTTATTCTGCGATGTGTTTCTTTTAATTATTTATTTAGTGGTTGTGTCATCATAGTGCACACGTGGAAGTCAGAGGACAACTTGCAAGAATGA
AATCTCTTCTAGCGTGTGGGGGGTCCTGGGGATCAGGTCTTCAGACGGGGCAGCAAGTGTCCATACCTCTGGCTCCATCTCTCTGGTGCTTAGC
GAGGGTTTTTTTAAAAAAAGATTTATTTTATTATTTTAAGTGTGTGTGTGTGTATGGCCATGTGCCTATGAGTGCTAGCGAATAGCTATAAAGC
CTGGTCATGCTGGCTCCTCCTAGATCTCGAGTCACTGATAGTTAGCATTCTGACAGGATGCTGGGACTCAAATCCAGCTTCTCTGGAAGAGCAG
CCAGTGCTCTGACTCACCGAACCATCTTTCAAGCCCCTGTAACGTGTCTTAGGATGTTGGTTGTATGTAGTTAACAAGTCCTCACACTCAGCTC
TGACGTGAGATTGCTCTTCATAGATGGCAGTTTCAAAACAGGTTGGGAGAAGGTGCTAGACACATGATATCTGACAGCGCTGGTGGCAATGACT
GTGCTTTGGTGTGGCCAGCCTCTGCTGGGGTGGAGGCTAAGCCAGGAAAAGTGTCCCGAGGCCTTGCAAGGTCTTCAGTAAGACACGGGACCGA
AATCAATCAGATGATTAGGGGCCGGATGCTTTCAGAGGCTTGCTTCTGGGTCAGCAGGAAGTTCACACTCAGATCGGTTCTTTACAGAGCGTCA
CTCCTCTCTGTTGGAGTCAGGTGTCCGGTGGAGGGGCAAACAGCAAGGATGAGAATGTTCTCAGGGGCGGCCTGGGGAGTGAATACAGTATACA
AGGCTGACGTTATGACACGTTGGTGCCGGGGTGGGAGACTTCCTGATACTTTTGGGAAGCACGAGGCTAACACCTCAGGAACCCCAAACTGCTG
ACCCTGTTGTCAGGACAGGGTAAAGATACAGTCCCTGATTTAATTATGTGAACATTAAATCAATGGCGTCTATAATAGCAATGGACTGGCTAAT
AATCAAAGGCCAGCCATAAAGTAATATTCGCCTAATATTTGTAGTGCTGTTATTAAACAAAGTTCTTACCAATGAAAGATGCTCAAATTTTAAC
CTTTCTTTTAAATAATCAGGATACCAAATTATATGTTTTGCCAAGACACTCCCTTTCTGTATAAAATGTGTGCACATCCACAAGTTCTCTAAAT
TGGGTCACACGTGATATAAGATTTTAAAGTGTGTAGGTAACTTCAGATTACTTCATTTATACAAATCAAAGGGTCTCCGAGGCCTGCCAGGCCA
GCCGTTTTCCAGGTTGCATTGAGTGTAACTCTTGACAAGATGGAACTGAATTGAAGATGTGTTTGAAGTCAAAACCCTGGGTCACTCCTGAGTG
CACAACTCTAGCAGGCAACCACAGCCCCTGGGTCTGATGTCAGAGACCCTGTGGCAGCAGAATCATGCTGACACCCTGCAGTCCAGACCCCAGG
GTGTTCAGCCAGGTTTCCCCCTCTAATCTAGTCCCCATCTCTGATCTAAAGTGAAGTCCTATGGGTTTGGAGAGCTGTCCGAGTTACCGTGAAA
TTTTTCAATCCGGGTTGACAATCTTAAATGTGTAAACCACCCTTCTTTTTGCCCCTTTTCATTATTCTGTGCCTGTCTGTCTCCTATCTGCCTG
TCTGTCTGTGCCACTCACTTTTTAAAGATTTTTTCCTCTAGGGGTTGAAACTAGTCCTTCTCATTGTGAAGTTTGCTCCCCCCAGCTCTGTCCA
CAGCCAGTCTTTCTGTGCAGATATAAGAAACTTGTGTGCATATATAAGAAACACTGTGAAGGTGTGGGATGTTTTACAGTGCCTCCTCCCACAA
CACCTGGGTACCCATTCTGCCCCTGGCTTTGAGGAGTCTGGCCCCACAGCCCTGGAAACACACCCTCTCCTTGAAGTAGGAGTCTGCTCAGCTC
CCATGGCGTGCCTTCCCTGGGGATGCCAGCCTCCCTTCTGGCCAACTCCTCCTCTCTGATGCCCGCCTTCCGCTCAGCAAGCTGCTGGAATCAG
GGTATATGACACACACAGGAAACGGCCCTGACAGGCCTAGCGTGAGTTTCTAAGTGCACGGCAGCCCTTCCAGAAAGCCTTACCCCTTCTGTAA
TGTTACTCTGGAGTCTCTGTGAGCACTGCGGATGGGCCAAGCCTGTGCCGTCAGCCTGCCTCTGTGCTGGGCAGATGCAGGCACTTACTATTGT
GTGTTTGTGAGTCAGATTCCTAGAGGGATGACCCAGCTTGTACCCGAATGGTAACAAACACAGGTGCATCTTGTTAGGACTGGGCTGGAAACAA
GGGACGTGGCAGTCTGGAGGGAGGAGTTCTCTTGAGTCTGCTGTAGCTCGGCACTGCAGAGGGAAGTTATTCCCAGAGCCCCATTTGGCCAAAG
GTGCCTCTCAGGGCTTTCTTTAGAGAAGGGTGATCCTTCCTGTTCCTGGTGAAGAGTATCCAGAGTCCCATTGCTGATTCTCCTGTCTGCAAGC
AGGCTATGTCTGCACCACTTCCATGGCTCTGGGAAGTAGATTAGATTAGCTTTTAAAGACTGGCTGACTTCTTTAATTCATGAAGCACTGGCAA
GCTATGACCACACACGATTGCACAGTAACCATGGCCTTATGAAGACTTTACTCCCCTACCAAGATGCTCCTGGATGGTATCGTCTGACAACTGT
GAGGGCTGATCCCCGGATGGTGCCCCAGGCACAGCATGGGCAACTCTGTCTTGGTGTACCCACACTTAAAGCTCCTCTGTTCCTTTGCAGCCCA
TCCTTGCCTGCCCTTGACTGGCAGCTCCCGTCACATTCTGGTCCATACGAGCTTCGGATCGAGGTGCAGCCCAAGTCTCACCACAGGGCTCACT
ATGAGACGGAAGGCAGCCGGGGGGCTGTGAAGGCTTCAGCTGGAGGACACCCCATTGTGCAGGTATGGCATCTGCTCTGACCAGCCAATAGCTC
ATACCTAAAACAGTTTTGGATTCACAGCTAAGGACTTTACTCAGACGTAAAACACAGTGACCTCAGAGCCTGCTATGTTCCTTGTCTTCAATAA
TGTCCCAGTGAGTCCTTCATGAACTGGAATGTCCAAAGTCAAAGTGTGTTCACCGTACCTCACTGAGGATGCATCGTCTCCGCAGGCACTGCAG
AGGCAGGGCATCAGCCACTCTTCTCCTCACAGAGGGAATGGCTGAGCAAATGCCCAAGTCAAAGGATATTTTGTGTGAATGGGTATCACTTTCA
TACTACCATCAAGTTAAAAGAGAGACAGTATGCAGGACCACTGTGAATCAAGGGCTGTCTGTGGCTACCATATAATGCTTTTCATTCCATCTAT
AATGGTTTTAAAGGTTTGCCCAGAGCAGACTTACTTCTGGAGCAGGCACCATTACACCAACTGTTCTGCAACTCTCTTTCAAAACATCTCTGCC
CCTGGAGCGGATGTGTGCTCTCCACCCACCCCACACCACACACGTGGGATTGGTGGAAGCACCAGGTCTCAGGTCTCCAGGGCAGCAGCCTCTG
CTTCTCAGTGTGCCTGCAGGTGTTAGGAGGTAGGGTCTGAGGGAGCGGGTTATGAGATGGAGTTCTGAGGGAAAGGTGGCTGTGATGGGCACAG
TCACACTTGTGGCATTTTGGGGAAGGAAAATAGAAATCCAACTAACCCAAGTCCAAGAATCTAGGAGTTGCTCGGTTCCACGAGACTGGTTGTT
TCAGCTGGTCTGCAGTAGAAGTAGGTTCTAACAGATGTGCTGGTATGTAAGTCCAAGCAGGCAAAGATATGTGAATCCTCCTTCTTCCAATGTC
CTTATGTAGGCCTCCAACAGAGGGTTGGCCTACCACGTCTGGATCTGGGACTTGCTTTGTCCCAGGCTGACCTTGAACTCAGAGATCTCCTTGT
CTCAGTCTCCTGGGATTAAAGGCAAGTTTTGCCTTGCCCGGGGCCTAAGCTTTTCATGGCCACTATGCCTCAAGATCTCCGTGTTAAGATCCAG
GTTAGAATCCTGCGTGCCCTCCATTTCTTGATTGTACTTCATTCCAGATGTAGTCAAGTTGACAGCCAGGAATAGCCATGACACTAAGTTTCCC
TGAGCGTTTAAATTCTGGGCTGTGATATAGTTTGTATCTGGTACGCTGCTCACCAATGGTGGCCAGGAGGCACACTGGAAAGTCGGAGGCCCAG
CAACGTCACAGGTCCAGCTTGGTCTTTCTCCACCTGGACATCAGTGTGACATCCCAATGGGCGGGGTGAGTTTGTCTTGGCTTCCCTTTGTCAC
ACCCGTCCCCTTGTGAGCTTTAGATCCCAGACATTACTGTTTTAAGCGCCGCCGTGAAGTGCTCACTCTCCGGCTGACTCTGGTCACATGGTGT
TATGGAGAGCTCTTTACCCCAGTATCCCAACATCATAAACCCGGGTGCCCAACCCTGTTATTTCAGGACTGATGCAAACTGGAAGGGGTACTCA
GCAGGGTACCCTGTACTTTTATTTTATTCCATTTAGGTAAATAAAGAGCTGGCAAGGGCAGGAGGCCATGGAGACAAATGGCTGTTTGCCAACG
CAGCAATCAGCCACATGGAATGAGCCGGGCGAGGTGCAGAAACGAAGCACTTTAGCAGCGCTTGTGGGTGATATTAAGGTGATATTTGTGGCCT
GTGTGCTCGATGCCAATTAATACCTACTCTGTTAGCCGCTTGAGGTGATAAAATGCTGGGGGACATCAGTACGCAGCAGCTGGCTTGACATTTT
AAGTTTCTCCCCTTCGCAGGTGGACGAGGTCAGGTAGCCTGCCTTCAGCTGTGTTGGGTAACTACCGGTATTTACCTCTCCTTTGCCCGCTGTG
GTTTTCACTGAATGAAAGTGCATTATTGCTGAATGGAACAGATTTTAATAGGAGAGGAAATAAGTCTGTTAAAGAAAGGCAGGGGAGTAAATGG
AGAGATAATGCCTGGGCGCCTCCACTTACTTGGATCTTACAGCCAAGTGGCGCTGGGTGAGAGCGGGGGGTGGGGTGGGGGTGTGTGTGTGCAA
ATACCGTGCCCTCATCAGAAAGATGGAGCTTCAGGTGCAGGTCTGTGCCATCTTGGGCTTGGTGGTTGGTGGCTGTAAGAATCCCAGCTGCTTT
GGGGCGATAAAGCCAGAAGGAGTGTGGGGAGCCCTGTGTTTGGGGGAATCTGTGTCTGTCAGCCACAGATCCCCACTGTCTTGTGTGTCAGATG
CTGAGCCGAAGTGCTGCCCCTAGAGAACCAGGTCCAGGTGTCTTGAGCTCAGGGCAACAGTGTATATCTCAGTGCAGCTGATATCCAGGAAATT
GAAGCACTTCTGAGGGATGGCAAAATCTAAAACAGTGTTTAAGAAGCACCCTCTAAATTATTTAAGGTGGCGTTAGGGGAAGGTGGCAAAACCA
GGCCAGGCCGCCGCCACTGCCACAGAACAGCCACCGCTTCTACAACACTGTTGAAGGGCAAAGGAAAACACCCCCTAGCTAAAAAAACACCCAG
TTCGGTGGCGTTTCTCATTGTGGGACATTAGCAACTCAAGGGGTTTCCTGGGATATTCTCCCAAAGTAAACTCACACCTGTGCCCGCGTGAGGA
AAACAGCTAAAACGAGGGAATTTTAGGGGATTTGTTTTCTCTTTTGGCCGGTGGACCACAAATTAGATAAAAATAGGATTTGCACGTAATTATG
AAACACACAAAAAATAGAAAACTCTCTTGGTTGCCATGAAAGTGCTGTAACCACAAAGTTCTACCTCAGGCTTCTGGGTTATTTTGATAGACCC
GCTAGTGCCTTCAGCTCTGATGTCCAACTGTCTTGCTCTTGGAGGGGCGAGGCCATGGGCCAGTTCGCATGCCCGGTGTGCGGACACTCCACAA
GCCAGTTTGTGCCCAGTAGTCTTTGTAGCATTCCTCACTGTTGAGGGCTTCTATCTCACCCGAGAGGTCTGGACTCACCGTTCAAAATGGCCAC
AGGCTCTCACTAGCCATTCTATGGTCACCAAGCTACCCAGGCTTCAAAAAGTCTGGCCTTACAGTCTGCTAGCATTTGAAAAGCCCTATCAGAA
GGCATAGCCATGGGTTATCCTGGAACCAAGGAAGGGTTGGGCAGGGCTTATCTATAGTTTTCCTCGAAGTTCCCAGGAACGAGCTACCTTGCAG
CCCCTAGGTGGACATGGTCTGCACAAAGTCCTTATGGAGATATCCTTGGGGACACGGTGGCTCCATTCAGTTAACCACTGTCTTCTGTCAGTTA
CTGAGACAGGGGCTCCTACATCTGTCTAGAGCATGCTGTGGTCTTGCTTCTGATGTCACATTGTAATGTGAGAAATGGCCTAGATCTTCCTTGA
CTATGACACTTGCCTTGGTAGAGCAGATGTCACAAATACTCTGACTACAACAGGGGCATTTGGTCAGGGCTTCTCCAGCTCTCTCCAGCAAAGT
CTTCATTGAGTTTCATCCTTGTCCAGCAAGGTCCCTCGTGACCTTGATCTGGCCTCTGGCTATCAGGTCTCTGTGTCTGTTGGGTCTTAGCCAC
CACTGACTGAGGATCCAAATTCTCCAGACGCTTGGCAGGGGATGTGATATCTACCTTGTCCTGGGCTATGGTGGCCTTACGGGCTCCTGCCTAT
AGAGGCCCCTACTGTAGCGCATGCAATGCTTTGTGGTTTGAGGATTATCTCCCATCCGGGGGGGTCATGGACTCCAGCTCTGTTTACCAATCAC
CAAAATGACCTGCCTGATAGCATCTGCGCATCACACACAGGCCCGCTCTGCTTGAATAATTAATAGGCCACTGAAATATGAACACTCAGAAGCT
GGTCAGAGCCTAACATTTAGGTTTGCAGCATAGGGCTTGCCATTTAGGACAGTGACCAGCATAGCTACCGCCCGGCCGTGAAGGACTCAGATCA
AAGAGACACAGATAGTGTCCCAGACAGGTGACCCTGGACTCTGGGTAGAAATAAGCGACATGCTCTCAGGGCACAGACAGCAGGTACCTGAGGA
TCTGTTGGAACCAGGGCAGAGTCATAGAGGAACCCATGACACGCCCTGGCTTGTGCTCCTGCACCGGGGCCAGGCAGTGGCCAGTAGGGACTCA
TGACATTAGGGACCCTTCTGAGGTTACATAGCTTGCCCCCACCCCATATAGATTCATGGCAGGGACTTTTTCTATCGTACAGTCCTTTGACAGC
TGAGGACATCCACTGGAAGATGACTTGAATTTCTCAGGTTGTTCAAATTGTCTTTGAGCTAAGCCCTTGTTATAATTACTTTTCTTTCTTGGTA
GTGTCTTTTCCCCCAGGTCCTATGAGGAGATTTAGCATGTCAAAAATACTGTGAGAAGTCAGTTCCGAGGGGTTTCTGACCTGTGGCCAGAAGG
TCCCTCGTCATTTGGTTTAGTGGCCTGGAATGCTCTGTCCCGTGCGAGCCTGCATCACCCCGGATTCCAGGTCTCATCTCTGGAGGCTAACACA
GAGCCAGGGTCCCTCAAGGTGTTCTGGTCAGAGCACCAGAGCCCAAGGGCGAGCTTGGAAAGGCAGCATTTCACTCCGGCTGGGTCTGCAAGCT
GGTAAGGCATGCATACAGCAGGGGCTAACCTGCAGGCCTGACCCCAAAGCAGGAGCATGCTGCCCAGAGTCAGCCAACCTGCATGAGGTCTGGA
TTAATTTTTTATGGATCAGCCTGGACACTGCATGGAGTCCTCTCTCCTTTCAGGACTCTTCGAGGCAAACCTCCTTTCCCTGCCTGTCATGTAC
AGGGTAACTCTCCTGTCCACTTGGATGCTGCCCCTGCCTTCTTCACCCACACTCAGCACCAAGGTCCAGTGTTCAGAAAACGTAAGGGTCTCAG
GGAATTCCATGAGGGAAGCTGCAGTCTCCCAAACACACCACAGCTTTGCTTACTGTCCATGGCAGAGCTAAGGCTCGACAGACAATCGGTAGTA
AGAGACGAGCCGTCGTTCCAGGAAGACATCTGGGGTCAGCTCTCTTAGCGGTGGGAGAGTGAAGCAGACAGAGATGGCCGTTCGCTTACACAGT
CTGCAGCAGCATCCCTGACGGCCTCTGCTAAGCCGTACTGACGTCCTCAAGGCTGGGGTTTCATGTGGCTGGGCTCTCTGTGAGCTCATTTCAG
AGCCTTCCCACTCAGCAGAGTGGGAAGCAGGGAGGGTATTATGTGGACTGTGGGAACAAAGACAAGGCAGGGCTACAAGCAGAAGCCTCCCCAA
ATGAAGATCCTGCAAGTCTGTCACCAACCCCCCCCCCCCCCAGACCTGACTCAGAAGCTATGGCTTCTTTGTTCCAGGCTAGGAAGAGTTTAAG
TGATGCTAGTCTGAGATACAGAACCTACTGGTGGTTTTCTAGTCATAGGCCCACAGAGCTCTGACTTAGTTAGGGTTCAGATGAGCTAGGTCAG
TCCGGCCCCTCCTCTACCCTACCCTCCTTGGGCACAGGTGAGATGAGGGCTGAGTATTGGAGACAAAACAAGAACCGGCATTCGTGCCAATAGC
CACGGCAAGAAGTGAGCCACATGTCTCCAGCTGGCCTGTGACCATGCATGGACCTTCTTCCTGGTAACTCTGTGGCTTTCCTTGGCCCAGAGGA
CCCATACGTATCACAAGTGTCCCTGGCTACCCATGGGCAGCTGTTCAAATGTAGAAAAGATACAAACTGTAGAGTGTTCTCTTGGGAGGCTCGG
AGGGACTGTTGTTTGCTCTCTGGGTCTGTTTGTGCAACTGGCCCTGCCTCATCATGGGAGGTGGGGTGCAGACAGACTACTGTTGTATACCTTG
CCTGGCCTAAGGGGCTTCCTTTCATCTCCTGGGGTAGCACTGGGCTCCTTGCCTATGTGGATGGCTGCAGTTTGCCCTGTAGCTGCAGGATGGC
TGCAGGCCTTGCCTAGCCAGGCCCAGAACCATGACCTCACTGGTCATGTTGGTAGATGCCCTCAGCAAGGACCTCAGGGCTGAGAGAAGAAGCA
GATGAAGGGCCGATGCCCCTCTGGTATAACACACAGGGTCTGGGGTGCCATCGTGGCATCAGTACAACAGGTAGCCTTTGTGAGCTTCAAGTGT
TTTTAGTCCTTCATCTTAGATTCCCAGCCCTGTATCCTCAGCGTTTTGGGCTCTAGTCAGACAGTAAGGGTCAGGTTCTCTTTCATACACTCCA
TGGATGCTTGATGCATGGCCACTGAGCCCTGTGGTCCACGATGTTAACAGTAAAAACCCACCAGAACGCTGACAGCCGCAGGCCGGACCCTGCA
AGGTAGAAGGAAGGGCTGGAGTTCAGGACAGCAGCACTATTCCCTGGGCGTTCCCCTACATTTCTGGGCTTGGCATCACCATGGTAGCACGTTG
TGACGTACTACATGGCACGGCTGCTCCTGAGTGGCCTCTGCCCTGTAACACTAGCCTAGAGTGTCACCACGGTCACCGCCGCGTCGGGATGATT
CCCAGGACACTGTACAGGTGGCGGCTTCCTGAGTGGCCTAGTCTATGAGGTACTGAGGGAGGCGTCTGTGTTTCGAGTGTCTGTACCTTCGTGG
CAGTTTTACAGAAGGAGTCTGCTGGCGTTGGTGCCTTTTTCCTTGGATTTGGGTGGGCAGAGAGTGGATGAACGCTGCCATCTGCAGGGCCAGC
CTCAGGGATGCTAAATGTCAGAGATGATCCGGGTTGACATGCGTGGGGGTAACTAGGCTGATTCCTGGCCATGCCAACAGTTCCTGAGAGCACT
GAGACCCCTGGGGCCTTAAAAGCTCTCTTTGCCATTGCCAGTAGGTGGGTGCTAAGATCTGTCCTACCTGCGTGTTGCTCGCATTTGTGCCTCT
CTTTCTCCCCTGGCCCCTTTCAACCTCTCAGGCTTGGTGGGAATCGGTCCCTTGCAACTGGACCATTGATCTTGTGCAGAACAGATGGACCCTG
GTTCAGCCACGTGCCCCTGGTTTAAAATTCCCACAATACCATGCCCAGGTATTGAAGGAAGGGTCCCATTCATTTTTTCAAGTAAGGGGTCGAG
GAGGTTCCAGCCCTCTCGAGTCAGCATGCAAGGCAGGAAAGTGGCCCTCTGGGAGAAGAGCAGAGGTGATGCTGGGCTGGAGACATATAGAGCC
TCCCTGAGGAGCACAGAGCAGGCCTGTGTTCCACACCCAGGTGCCGTGGCTGTGAGCAGCGATCCTTAGATGTCCACTCTGACCTTGTGGCACC
ACAGGTCATAGAACTCACATCTGATGGAGGTCAGAGGCTCAGGGATAAACTGCCAGGAAACTGGTTTCTCCTTAGCCTGGCATCTCCCCCTTCC
CCACTGCCTATCTGCCTCAGCCTTCCTCAGTCTAGGAGGAGAAGCACAGACTTTGTGAGTGAGCTGTTTTCTGGGATGGGACGGAAGCTCCCTT
TCCGGGACCCTATGAGAAAGTGAGTCTGGACTCTGACCTCCGGAATGGCACAAGATGGCCCTCGGTGCATCTGCACATGCGCAGAGCCTCAAGA
GTACGCGCGCTTCCCAGATAAAGACAGATCTAGGGTTCTCAACTCTAATAGGTCCGTTCAATTGGCAGGAGAGCCACGGAGCTCGCAGTCCTTT
TCAGAAAGCCACAGAGCGTGGCTTCCTCCTGGAAAACCTGCACCAGGACCTTTTATATGAGAAACTGTGCCAGCTGCTGGGGAGGGACAGGCTC
CAGGAGGTGGGGGTGGCTTGCAAGGCCTTTGTAAGGAAGGAAGCGCATGTTTGAGCCCAGTGCCAAGCCTTTTCCTCCGTGCTTCAGGAACATC
AGACTTTCTCCACAGGAGACTGTTCGCTGTGTTGGGGATGAAGCTTGGGTCTTTGGGGATACAGGCAGACATGCTACCACTTAAGCCCCCAAGA
GATAATTTTGAGGTAAATTAAACAGCTGATTACTAGAGGCCTGGAACAGCTTCAGGCCCCCAGCAAGGTGGAGTGACTTTGCCAGTGGAAATCA
AGTCCCCATGAAGGTGCTCTCAGTGAATGTCTGGCAGGCATCGCCAATGTATGTGGTCTCTGGCATTTATGCCCTGGTAATATTTACATGGATA
CAACCTATTTTGTTTTTATTCTATTTTTTATTTGTCTGCCTTCTTACAAAGGTAGAGGAGGTTTGTACATGAAAGACCCAAAGTTCCTACGTGC
AGTCTCTCACAGCTCCCCTGTGCTGCCCTCGGCTTCAGACTTCTGGAAGGCCTCGTGTGTACTCGTGTATCTTAGCTCTTGGGGTCTGAGGGAC
GTCACTAGACCTAGTTTTGCCTGTGCCTATAAACCTGAGTTTGATCATGGGTACAATAGTTGTCTTCATAGGAAGAGTCTTCAGAATTACATGA
TATAAATTAAGTACTGTTGTGGGCTCATGACACATATGTGCACACACAAAGTGCTCACATGCTCATAAACACGTGCTTGCCCATCCAGGCACAC
ATTCATGAAGCAAATGCACAGACTCTAAAATACATGAGTGCTCATACAGTACAAGCACAAATGCAGCACACACACACACACCATACACACACAC
ATACACACACACACCATACACACATACACACACTCACACACACTCACACACACCATACACACATACAGACACTCACACACACCATACACACACA
CCATACACACACACACTCACACACACCATACACACACACACACACACACACACACACACACACACATACACGCGAACACACACACACACACACA
CACACACGCCCATGGATGTTCATGAGATAAACCTGTACACTGTTCCCACATAGGTCATATTTATACCAATTCATAAGTGCATACATGTATAAAC
ACATGTATAGTTATACATAAATGGTTGTACACATGTCACATATAGCAGGACATGCACACACACATGCATACCTGTGGCACCCTGAAAGCCAAGG
ATTTTTTTTATTTTCAGACAGAGCTAATCACTAGCATAAATTCTGTGGGTAGCAGATTCCACTGAAGGGCAGTGATAGTAACTCCTTCCTTCTG
TCCTAGGGAGCTATGCCCAGAAGCTCAGCCTCTGCCTGTCTCGTGGGGAAGCCCTGGGGCCTTATGTCCTGCAGCCTGTACTCATTTGCTGCAA
CACAGCCGCTCACACAGTGAGAGCCTAGTAGTCAGCGTGCCCCTCCTGGTTATGCAGAACTGGACAAGCCCTGTCTGTTTGCCATCCTTCCAAG
TGCTCCTGAGTATGGAAAATTGGTTTTGTTATTGGTTTGGTTTGGTTTTGCAGTATATGTTAGGCAAGTTCCCTACCACTGACCCACGCTCCTA
CGGTCAATCTTACCTCTTCATTTTGAAATGTCAGTCTTTTCTTTGAGTTGTCCAAGCTGACCTTGAGCTCACTCTGGAACCCACTGAGCCTTTG
AATGTGTGGCCCTTCTGCCTCAGCCTACCGCGGGCTGCGATTATAGGCCTGCACCACACAGCCTAGTTCTCAGTTTGTGCTTAAACTCTCCTAC
TGAGCATCCATGAGGGGTCCTGCCCTCGATGGTCATTTCTTTCCTACCAGACAGGCACACAGTGCCATTTGGAGTGACAGACAGTTCCACAGCT
GGTAAGGTCTTCATGCTGGTTGTTCTGAGGAGGTCACCCTTACTAACAGCAGCCGCTCCCCAGGGTCTGTGCCTCTGGCTAAGGCTGGTGTGAG
AGCCCCAGTTCACCAGAATGACAGTTGGCTCCTACCCTCTCAGATTGTGGGGCAGGAAGATGGATCAGAATTAGCTCCTGTGGGTACAGTGAGG
CCTCCAGGGCACAGTGGTGAGTTCCCAAGATGCCCCTGTACCCTGCCAGGAGACCAGCACTCTGCAGTCTCTAGGAGAGGGAAATAGAACGTCC
AATAACAGAAGACTTCCCGTGTCTGGGAAGAGATGTCTCCAGGCAGCGGCGTTTGTAATGAAGAATTGGGGCTGAAAACAATCTGAGGTAATGA
GAGTCCAACACAAACTCTTAATTAACCAAGTAGAGGGAATTTAGGTTTAAAAAATAGTGAAACCCACCCTGGGTGCCATCCCCAGCCAGGAGGA
GGGAAAGTGAGACCAATGTGTGAGCCGATTTCTCTTGTCTTCTGGGATATATCACGGGATGCTAATGTTACTCGGGGTCTTAAAAGCAAATTTC
CCTTTAAGTTGATTGTTTCAAGTGTGCATTATGTCTTGGTGGAAGGATGTCACGTGACAATGTCCTTTGCTTAGTAACCAAGTCAGAATGACTC
GCTGAAAGGCAGATGGTTTTCATCAGTTAATTGGCTCTGTTAATTCAGACCTTCCTTCCACTGCGTATGAAGGTGTGCGTGTTGGCCCAACTCC
AGCACTGAATAAATTTGTCCTCCATCAGTCTGCTGGCCTGTCATCTCCCTGTGTAAGTGCTGAGGTGGCACAGGAGCTAAAAACAAACATTTTT
AATGTGCAGGAAACTGGGGGACGCTTACACCTTGCAAGTGGAATAATGTGTTTTGTCTCGTTTAGAGGAAGCAGAGAAGACTTGGGTCTGACAG
GTAACTTTATAAATGTTGTTCTGACAGACACTGTGAGAAGCCAGAGGCAGAAGGTCTGTGCAGGGGGATGTGTGAAGTAGCTTAGATTTCTTTT
CTTAAAGTGAACTTCGTGCCTTAAATAATAGATATTTACCTCCCAGGGTAAGCTTTAAATATTCCTATTTTCACTGAAATGGCATGTTTCTAAT
GCATAAAATTATACCGTATACACCGCCTTCCATGCCTAAGAAGCCTGCNNNNNNNNNNNNNNNNNNNNNNNNNNNNNNNNNNNNNNNNNNNNNN
NNNNNNNNNNNNNNNNNNNNNNNNNNNNNNNNNNNNNNNNNNNNNNNNNNNNNNNNNNNNNNNNNNNNNNNNNNNNNNNNNNNNNNNNCATAAT
TTGTCTCTGAATTTCTATCTTTATTTTTTTTGTTACATTTCATATTGTAAAACTATTCCAATCTTATATAGACTAGTGGTTTCTGAGTAGATTC
ATCACACTGCAAGAGGCTCCCAGGTGTTGAGGGGTCTGGACCAACCAACCTTAGTTGTTAAACCCTGTTTGCAGTAACTTGTGTGTTCACACAG
CTTTGTAGTCCCTGCAGATTAAGACAGTGTTAGATGTGATCACTGGCCAGAGAGTAGCAGAGGTGGCTTTCTGCGCTGATGGCCTCAGATGGGG
GATTGCAATATTCTTTCAGTCAGCCAGGCCCACAGCAAATGGGGGAGTTTGAGGGGAAATGCCCTGTGCTTTCTGGCTCCACCCACCAGCCTTA
ATCAAGGCTGCTGTTGTCTCAGGATGCCCGGGGACCTGTGGTCAGCAGGCACCCTTTACACTCACACGTGTGCCCTTGGCACAGAGCACACATA
AAAGCTGCACGGGTGAATCTGAAGCGATCTAGCTCATAGATGCTGTGACTATGGTACAAACAGGGAGCAGGTGCCTGGCCCAAGCCCAGAGAGA
AGTCGTTCCATGCTCACTTAGTATACAAAACACACGGGGTGCGTGTCTGTGAGTGCGTGTGTGTAGTCACGTACAACAACACTGCCACCTGCAC
CTGCCCCGCAGACTGTCTCTCTCTCTCACACAGGGATCCTCCTTGATACCCGTACGTGCTCCCAACCCATGATGCTCAGAGTCTCTGCTGGCTG
TGCCCTACTCATCCACGGCTCCTCACAGGACACAAACATTAATTTTAAACATTAATCAGCAGTACCTGTAATGCTGCCCAGAGGCCTGGGGAGG
CAAAGACCTCCTGGAACCACCTACTGATGTCAGGGAGTGGGTTGGCTGCATATTCAGGACACTGTAAGGGCCACCACCCCATCTTTGCAACACA
GATTCTCGTGCGTACAGTTGTGACACCTGCGTGGCGTCAGCCGCGGGGACCACTGGGCTGTTTTGATCAGCCCCTTCATCATACAGTCTGCTGT
GAGCTCTTTATTCCGCACTGCCCTGTCTGGTGTTCTCAGATGTTCTCTGGTGTCTGTCAGCTTTCCTTCTATGTCCAGAAGTGAACGGGGGTAA
GGCTCATCTCCAACCCTTAACTTCCTACCCATCAGGAATGGGCCATCCAACAGGATTATTTCCTGGGAATGCAAATTCAGAGATACAGTCCCTT
TAAGGGAATCAGATGAGACTCTGCTTCTTTCAATAACAGGGTGTGGAGAGAGAGAGATGTTTCCTGTGGATTGAGCTGTGCTGTGGGTTCTGGA
TAGGCGGGCCCAGGAGTCGCCAGGGCATTCTTACTCTCAAGTCTAAACTTCGTGTCTGTACTGAGGACTCTCTTGGTCTGGGAGGGAGTTTGAG
GGCTCACACAAAGTTGTCCCAGCTTGCCTCCTGGGCTTTGAATTGGGAAAGGAGAAGGTTTTCGCTGAAGAAAAATGATGGGATCCAGGGTCTG
CCTCAGACAGGCTCTCACTTTTGCCTTCTCAAAGCTGTCAGTGTCTGTCACCTTGTGCCAAGTCGGCAGGAAGAGGACAGAGTTCCTCCCAAGC
CTGTGTGGAGGTCTGCCAACCTCCCCGTGGAAGCGGTCTGCTTTCATCCCAGCCATCAGAGGTGAGCACTGCTCCACCTGGCCCCTTAGCTTAT
TAAGGCAACACAGCCCGGGGCCTCTGCCCCATTAACCTCTGACTAGTGGGGAACACATTTTTCTTGCTGCCGCTCAATGAACTTGAGCATTCGG
GCTGTACCTGTTTGAAGTACAGTCCTGGTCCCCAGCCCTTTCATCTTGAGGTAGGACTGGCACTGACTGTGTGTGTCTGTGTGTGCCACATGCT
GGTGGATCACAGGACATAATGAAAGCCGTGAAGTGCCCATGCCTCTCCTAATGAGCAACTGGCATGGATCAGGCCAGAGGCGGTGGCTGAGACC
TTTGCACGAGGGACATGTGAGAGGCCCCGCTGCCTTGTAAAACCCCGATACCCACGGCCCACATCAAAATCCAGCAGTAGCTAATTGCACTGTC
TGATTTTCTGGTCCCCACTTCTAGGTTTCATTGCCTTTTTCCAATGCTTTAAAATGAAAGGCACAATCCCCTACCATCCCGAAAGGCTGGAATT
CCATCGGAGAGACTAGTAGTAATGGCTGGAACCTGGTGTCCTCTGCACTCCTCCCTTTCCGGGTACCTCCCTTCCCCCCCTAAGGATCTGTGGG
GCTATTTCTTGCGGCTGAGGCTCCCTCCCCATTCCCACCACAGACCACCTTCTTTGCTGCAGGACTCTTGAAGACTGCTTGGTGCTTTCTTATG
GTGCCGTTCACCATCCTCCTTGCTAAAACCAATTACCTAGCAATCCCGCAACTCATCACAGGGCTCTGAGTTCCATGTTCCAGCTCTCCTCCTT
TCTGCCCACCTTCTGGCCAGGCCATTCCTTTGTGGTCGGCATGAGGGGCTGGGGGCTTATCCATTGGCAAAGTGGATGACAGCAATCGGAGAAG
GCTATAATTGTCATCGACTGAGTCCTGGCAGCCACCTGTGTATCCTGGCATCCTACAGTGTATCTCATCCAACCCCGGCTTCCCCCAAGGCATC
AGGGAGCTATGGGGCATTGCAAGCATGGTGCATGAGGTGGGCGGATCTCAGGATTCTAAATAGAATGATGGGGTGGGGGTAGGGCTTCTAGGAG
TGAGGCAGAGGAGGTGGGAAGGGCGGTAGCTACCAGCATGGGGCAGTTTCACTGCGTCTTATCCTGTGGGCTATATACTCTGTCCACAAGATAC
TCTGTGGTAGGGTAAGCGGTGCAACTGGCATTGATAGGACGTCTGTTCACACCTCTTTCTCTTCCTGAAGGAGAGGTACACAGGGCAGTCATGA
AAGGATGGCCTAGACACAGTTGTGTGTGTGTGTGTGTGTTGCTGTGTTTATGGTAAATGCATCTATGTTACCAATCATGAGTGAGCAACTCTCA
CTCTGCTAACTTGTGCCATAACTGAATGTAAGAAAAATAAGCCTGTCTTTGGGGGACGTGCAGGACTGATGTGGGGAAGCCAGAAAAGCCTTAC
CTCTCCAAATCTGGAGGTGAGGGCGCCATGAGCAGTCCAGCCACCTCCATCTCTCCTTTGCTCACCTGGCTTGGAAGGACATTCCTTTCTCAGA
GGCCAGTCAGAAAGCCCCACAGGTTGGGTGTGGGCTGAGATGCCATGGACCATCAGGCTTGCTAGAGTTTTGTGGTCCTTTCTCAGCAGCTTCT
CCTGGAGAGAAGTGAGCGTATGAGTTCTGCTTTGTCACTGGCACTTGTAGCATGCAAATGGTGTGAAAGCTGCCTTTGTGTGTGTGCACATGTG
TAATATTGTGTGTGTGCACATGTGTAACATTGTATGTGTGTGACTGTATACTTTTTGTATGTGATGTGTGTACAATATTTTAGGGGAGTGTGTG
CGATGGGGTGCAAGTGTACACATTTGCACATTGCCTCTAGGTGTGCCTGTGAACCCATGTGCACACTACCTGTCTTGTTACACGTGTGCACAGG
CATGTGTGAGGTGTCTATTTGTACATTGGTGCATATATGCAAACATGTGTCTGTTTGAAAATAGAACTAAGAGTGTTCAGATCCTAATCTATAT
TTTGGGGGCCTTTAGGATAATGAGGCTTTATTTATTTATTTATTCATTCCGATAGTGTCTCATTGAGTAGTCCTGGCTGTCCTGACACTCTGTA
GACCAGCCTGGCCTTGAGCTAAGAGATCTGCCTGCTTCTCCCTCCCAAGAGCTGGTACTAAAGGTGTGCGCTACTATGCCTAGCTGCATTTTAT
ACTTATAATTTCAAGAAGTACTAATATTATATCACATGAAGGTGAAGGTCTGGGCACTGGACACTGGGCACTGGGCACAGTTCTCCTTTTGAGC
CAGTCTGTTGACAAACAGTTGGTTCCCAGGATTTTATGTTCATGGTGCCTACTTACTGCGAGTCTTCTGTTTTCTTGCCAGCTACACGGTTACT
TGGAGAATGAACCTCTCACGCTACAGCTGTTCATTGGGACGGCTGACGACCGCCTGCTGAGGCCCCACGCCTTCTACCAGGTCCACCGGATCAC
GGGGAAGACTGTCTCCACCACCAGCCACGAGATCATCCTGTCCAACACCAAAGTCCTGGAGATCCCGTTGCTTCCAGAAAATAACATGCGAGCC
ATGTAAGCCAAGTGGGGGCTGTGCCCGAGGGGTGGGCTCCTGCTGCTCTGCCCAGCACCCAGTGCTTAGCCCCAGCTCCTAGGCCCCAGGCCCT
GTGGCTCTCTAGAGCCTGAAGAAACTTTACAGATATTTACGATGACAGATTTGCCTCTTTCTGGGTTCTCAGGTGCTGTGTGTTATGGCACCAA
AGGTGTCTCAGTCACACAGCTGTAAACACTGCCCCCAGGGCCCAAATTAAGTTCCTAAACACAATGCCTGTTTACTTCTGAATGCAGCCCCGTT
CATTCAACGAATAGTTGGAATAAAGTGAAAAGATAGGGCGGGCAACACCTCTGGATTGTTTTCACTCAGAGCTGACTATGCACGCGGCTGACAT
GGCCAGCATGGTGCGCAAAGCCCCTGTGGCACACGATTAACTTAGAAAGGGATTTATTAGATGCTGCCTGCACATCACAGAATATCGAGGTCAT
CCCGTGATTTGAGTGCCCTGTGTTTTGAGTGGAGAAGCTGAGAAAACACGGATTTCCATACTTCCCATGGGAGACACATTGTACTGGACCCATG
GCGAGCACAGACAGTAGCACACATAAGCAGGTCTCCAGGCAGAGGATGAGGCAGCCATGATGAAAGCACACAGACAAACGAGACCCAGATTAGA
CTGGAAGGCCTGATGTCACTCTGCGGTACTCTGTCTCTGAGGTGACTCGAAGCTGAGAGCTGTTTGCAGGAGGGGCTGTAAGGGAGCCTGGGCT
ATGCACGTAAAGACTGCAGTACATGATTGAGTTTGGGGGACAGGTGAAGTGCAGGAGATGAAGTTGGTGCAGGAGATGAGGTTGGTGCAGGGGG
CTGTGCCAAGCTGCACCTTGTGTGTCCTTTGGTAATTTCTTCGTAACTTTAAGCCTTTTAAGTCAATGACCAAAGGGAAAGCATTCTGCGTGTC
TCAGCTTCTCACCAGTCTGAGGGACTCGCCCTCCAGGGCTCCATTGCCTGCCCTTGGGTTTTCTTCCTCAGCTATATAACCCAACTTTCCTAAG
GACAGGATAGAATTAGAGAAAAGCTCTTTTATTATATCAAGATTTTTTTTTTGTAATGTATTGAACCTTTTACCAGACTATAGATTTGAATGAA
ATTATGAAGTAAAATGATTGTGAAACCCTGGAAGAAAAGTTTTACAAATCATAAAAGGTATTAAAGTAAATAAGTGAATAATTTCGGAGCCCTG
AACCACATTGGCTGGAGAGCCGCAGGACACACAGGAGGCACAGCCTTGAAGGCTCTTCCTCTCTGAGCTGCTCTGACACATCTCTGCAGGGTCC
GAGATGTCTGGTCCCAGGAGGAGACTACAGCCTGCAGGGCTACTCAGATGTGTGGGTGCTGTAATCTTTCCCATAGGCATCTCTGCGGGGAGGT
GGGGCTGGGATGCCCAGCAGGAAGGCTGAGTCTTTAGTTCTGGTCCAGCAGACCAGCTGGGCAGAGAGTCAAGCCATGGTCTTTGTTTCCTGCA
GCATCGACTGTGCTGGGATCCTGAAGCTCAGAAACTCTGATATTGAGCTGAGGAAAGGGGAGACAGACATCGGGAGGAAGAACACCAGGGTGAG
GCTGGTCTTCCGAGTTCACATCCCACAGCCCAATGGCCGGACGCTGTCTCTCCAGGTGGCCTCGAACCCTATCGAGTGTTGTAAGTAGCAGACC
ATGCTGTAACTGTTGCACGAACTGTCCCCTCGAAGGTCTGTTTCAGTAGGCTTCCTGGAAGATAGGATCCCTCTCAGGAGACCTGACTTCCACG
TCTGGCTGCGTTACGCATTCCCACACACAGCTGGGTGCTGGTTAGAATCTGACCAACGTACACAGCACTCGTGGCCTTGGCAACTATATTAGTA
AAACGCAAAGCCTGTCATGAAGCAGAGTTATTCTGACTGTATCTTTATTTATTCCCTGCTTATTTTGAGGGAAATTGAGAAGAGGAAGTTTGGA
TTTGCACCCACCAGACTGGACAAACCCAAACAATTCCTCCTCTTTATCCTTCTCTTCCGATTCTCTTTTCCCCTCCTCTTCTCTCGTTCCTACC
CAGTTCCTCTTCTCCTTTCCCCTCTGCTCTTCTCCGCAGCTTTATCTCCCATATTCTCCTTCTCTTTTATTATCTATCCCTCCTCCCCAGTTTG
TGTGAATGTGTGTGCATATATGTGCACATGTGGTGTGCATGTATGTGTGTGCATGCGTTCAGGTGTGTATGTGTGCACACATGTGTGCATGCAT
GTGTGTGTGTATGTGTGTTGTATGTCTGTACACGGCTACAGATGGAACTCATCCCTATGCATGTTAAACAAATGCTCTGCCAGAGATCCATATG
GCCTGTATCTGAATTTTGTAACTCACCACGACTGTTCATCTTCCCTGATGGTGCCAAGTTATGCCTTTAATGTGTGAGATGGCAACAGGACATG
GCTAAGGGTTCCTGGTCCTAGAAAGAAGCTGGTATGGATGAAGCTACCACCTTCCTCTGTCCTGCTTAGCTGGTTCCTTGTCACTAGAAACATG
TCAGGGGCCATCCTCTCAGCCCCCTGCACCCTGACGCCCTCCCCAATCTGGGGACTGCATTCATGTGGGGTCATCCAGACCACTGAGGGGACAG
ACAGTCTTGGCTAGCCCTTCCTCCTCATATCCCAGCACTGTCAAACTATGTCCCTTCTCCAGCTATTGTGGCTTCATCTCCTAAGAGACTCTCA
CCATGGGGAGATACACTCACTGGGGCTTTCAGTTCCATGCTGAACTCCTGAGTTCTGCAGGCCACTGTCAATGTCCCCTGGGATGTGCAGCAGG
TCCCCTTGCATCCACTAACTGATCCTTGCTTCCTCTGGAACAAGCTGAGTCTTAGTCACACACACACACACACACACACACACACACCACACAC
ACACAAGCTTGTGGCTCTGCCCTCTGTCCCTACCTGTCTCAGTCCCCTGGAGACCTGACTTTCTCAGGCTGAATCCTCTCCCCTGCCCTGGTTT
GTCTGGCTGGAAGGAGTCTGAGGAAACTCATCTGACACAGGTGCCCAGAATGTCACCCCTGCTCCTAGCCTCTGTAGTCCCCCTTGCAGGACCA
CGCTCATGAAGTTGCTGATACCCTACTGGGTCTCTCCCAGCTGCCTGTCAAGCTTTCTGCTTTGCCTCTGCACCCAGGCTCAATCTGTCACTGG
GACTCTTCCTACCCAGCTCTTCCAAGGCCCTTCCTGCCCTTCCAGGCCAGGAGCCAGCATTAGAAGTCAGAGTTGCCTATTGCTGGCAGCTTCT
GAAAAGAGTGTTCCGTTCTTAACGTGGAATCATGTCCTGATGGGTTTGCCTCAATCCTGACACCTACGGTCACTATGGTTTGAGACCCTCTACA
AAGTTCAGGGTTGGCCAGTCCCCAGAGAATCCGAAGAGTTATGTCAAATGGCAGCACCCGGGGCCCAGCACCTGAGCTCCAAGGCATCCTCCAG
GCCGCAAAGACAAGGTTTCACTCACTCTTGCCTCCTCTGACACAGCCCAGCGGTCAGCCCAGGAGCTGCCCCTCGTGGAGAAGCAGAGCACAGA
CAGCTACCCAGTCATCGGCGGGAAGAAGATGGTGCTGTCTGGCCATAACTTTCTGCAAGACTCCAAAGTCATTTTCGTGGAGAAGGCTCCAGGT
ATGTTCTTCAGGCTGGCCCGGATGAGGTCCTGTGCTCAGTGCTGGTGGGAGCTGGCTCCTGGTTGGCAAGATATGGACCCTCCCCCTGCATGAG
TGCGTTTGGTCATAGCATGGGCAATTGTCTGATAGAGGTAGCCGTCAGTCCACAGGGGCTCTGAAGAGCTCATGATCTCATCCCCTTTGAGTTT
TTGTATTGCTGAAAGTCAGGTCAAAGTTCAGCTTTCGGGTGCACAGGGCCAGACTTTTGAAAGTGTGTGTTAGGAAAGCCTATAGGCTGGTGTT
GGAAAACTCCTACTTGCTAGAGTCATCTGCTCACCTGGAGTGGTCATCAGGCCTGGCACCTGTTTTGAGCTCTGCCCAGCCCTTCATTCTGGCT
TTTCCTCTTCCCCCTCCATGAGGGAGAGCACTCCCTTGGCTTCTCCAAGAAGCCAGTCCCTTAAACAAGTGCCAGCTAGTACCACAGTGGATAT
AAGTCTGGACCTGTTGACCTTCTGTATTCACCTCATGCGAGTCACTGGGACCTTCAGTGTCACAGCCGTGTGTGTGTGTGTGTGTGTGTGTGTG
TGTGTGTATGTGTGTGTGTGAAAGAGTGTGTGTATCTGAGTGTGTGACTGTGTGTTTGTATTAATGTGTATGAGTGTGTGTGAGTATGTGAGAA
TGTGTGTGTGTATGTATGTATGTATGTATGTGAGTGTGTATGTGTGTGAATGTGCATGAATGTATGAATGTGTGTGTGTGTGTGTATGAATGAC
TGTGTATGAGTGTGTGTGAATGTATGTGTATGAGTGTGTGTATATGTGTGTGTCTGAGATCTCCATCTCCACAGACACCCCCCCATACCCCACA
AAGATCTCCATGAGAAGACAGAGCATGGCACTGCCATGCTCAACTGTAGCTTCCTGCTCACAGTAGCCCACAATGAAACTGTCTCATGGTTTGC
AGATGCCAGGGGTGAGCTTAGAAGGGCCGGTGTCCTGAAGAGCTGTACATTTTCTTTACACCTACGGCCATTGTGTCTGCATGCCATTGGGGGC
CAGGAGTGTGGCCCCAGGTCACTTCAGTTAGACATTGGTCCTGGCTGCTCTTCCTTTCTGGCTCCAACTTGGTAGAGCTGTACTGACCAGAGAG
GCTTTTGGGCTCCAGAACACAGGGAAGGCTGAGCAACAGCCGCTTCGGTGGCTGTGGGCAGGCGTGCACTGACCCGGAAGATGCCTGCCCTCAG
CTGCAGTAACTCCTCTACAAAGGGTGTATGGAGTTTGGAATTTTGGACTCAGGCCTTCTTCCAGATGGGGATTTTTTTGGGGGGTGCCATACCC
TATCCACAAGGGTATTGGGGTAGCATCTACTCCAAGCTAGTGAGCTGGAGGCTTTGCCTGCTTTTCGTTCTTACCAGCTGGCCTTTTCTCGGAG
GTGGTCAGTCCACACTTAGCCTAATCATTGCGGAGTGCCGAGGCATTCAGTGGCCTCCATAGTGGGGTCTTGATTTTGTACCATTCACAGGAAA
CATAAGCACTTCAATCAACACAGGCTTTGACATTTAACTCGGCCTGCCTCCGTAATCATGCATGTAATTGGAAAATATGTTGTAAATTATAAAG
AAAGCCCAACTAAGTGCAGTGATAAAGAGAGCAGTGCCCACACCCTTCTCCGGGGAGGTAAATTCTGAAGTCATTTGACCTTCTGAGCCTCAGG
CCTGCCTCCCTGTCAGCCAAGGAGCACTAGACATAACTAAGGCTCCGCACTCTGCACTGTAAGATCCCTGTACTCCAATGAGGGAGCCCCAGGC
AGGATCCAGATAGCTTCCCTATCTGTTTATGGTTTGTTCAAGATGGGAAGACCTACAGAAGTGCCTGCCCCACAAGGGAATTGGCCACAGCTGT
AAACTTGGTAGCTCGCACCTGCCGCAGCTGGGTCTGAGCCTGGGAACAGTGGCAAAATGCATCTTCCGGACTACGGAGTGAGCAGCCCACTGCT
GACCACAAGCCCCTGCCTTACTCTGCTGGAAGCCCCATCTTGCCTTCATTGGATTATTCCTACCATAAAGCTAAGCTCCTGAGGCTGCAGAATG
GGTCCCTGACCTACGTTCACAGGTTACAAGTGATGTCTATACGTAAGGCCTGTAATAAATGAATAACAGATAGACAGCACTGAGCGCTTTGAAA
TGTGAGAACTCCACGGTTCTGTGTCTAGACAACAATGTTTCGGGGTGTTTTTTTTATATATACATATAATTAGATTATTTGCATATGTGCTCAG
GTGTGTGCATGCAAATGATATTTTTCTGAAGGAAGGAAACCAATATCTGCATGAGTCTTCCTTTGCCTTTGGTTTTCTAAGCAAATATCGTCCC
TGACCTACCACACTGTGTGAGTCGCGACGAGCTTTTTCTAGTTGTTTCTTTCTGGCAAGCCAGAAAGCTCAATCTGAATTGCAACCACAACCGG
ACCCTCAGTTTCTGATAGCGTGCCTGGTCCAAGTTCCATTTTTAAGCTGTTGGTTACAGAAGCCAAACATTTGGATGAGAGGAGAAACAGATGT
GTGGAAGCTGTGGTCTGGGCATGTGGGGCTGGCCTTTCTGGAAGGGGCCATCCCTATGGCTCTGACTGTTGTGGACATTGTTGACTCAGGCACT
CAGGACTAGAGCCAGGGGTTTGGCTCCAATGTATCTTCCCTGTGTAATGCAGAATATCTGAGTCACAGGTACACTGTGGACCATCATCCAGTGC
TCCGGGTCACAATGTGCAATGACTCAAAGGGTCCTCTGCATCTGTTGTCAAAGAGTTTCCCTGCCAGGAGGGCTGTGGGAGTGGTTGCCGCTCT
GCTAGAGTGGCTTGGGTAGGCACGGGTAGCAGAGCCAGAAGTTAGCTCCTACACTCTACACACTGCACCCTGCCATTTCACCGAGCAGCTGAGG
AAAGTCACTGCAATGGCTTGCAGAGCTAGCTCCTCCCTGGGTCATCAACTAATGATCTCCAGGTGGGGGTGAGGGTGGTGCCACAGGGCATCAA
GCAGCATGGCCCTGGCTTATGCATAATGGTGAGGTTAGGACTTTTCTCTGGCCTCTTCCTCCTCCTGTCAGGAGTATCCATTGAGGACTGGCTG
GAATGAGACTGTCTTTCAGGGGATGAAGGTCAAAAAGAAGTGCAGCCCTGAGCATCAGGGAACACTGACTGATAACAGACATCCTTGGAGAATA
TTTTTTCCAGGAAGCAGAGGTAGTCAGTGAGGTCTGAGGGTACTCGCCACACAGGGCCACACGTCCCGTCAGATGCTCTGGCGGCGTTTTGGCC
TATCCACTCCAAGTGCCGCAGGCGTCTGGCATGGAAGATGACAGGTCAGCTCTCCCCAACACCCCCACTCCCCACCTCAAGTATGGCTTCATCT
TCAGCTCTGCAGGCTCGATGGCGTGTTTGTATGTGAGTGAGAGCACGTCGGTGTCTGAGCAGTGGGATCAGTTATCCTCCTGAGCTCAGCTCCG
TCTTCTTTGGAGACTGACCCAAGGTGAATGAAGAATAGAGGACACTGGTTTCTAAGGGAACGCCCAGCTCTACATGTTGGCATTGCAGCTAGCT
CTGTTTGAAAGAGTATTGAGGCCTATTTGGGTGTCTGTTACTGCAGTGAAGCCAAAACCGAGGTGCCCCAAACCCCAGTACGGACAGGTGACAC
CCGACCCTCCTTCCTTCATCTTCTACACTTGCTCTGCAGTCACAATGCTCTCTGGTGTCCTGCGTCAAGTCTGCCCTCAAAACACAGACCTGCT
GTGCTTTGCTACCCACAGATCTGCTTTCCTAGCTGGCCCTTCCTCCCTCCCTTCCTCCCTTCCCTCTCCTTGGGAAGGGACACAGGAGTGGATG
GGTGGGTATTGGGGCATACAAGCAGAAGGTGGCAGAGTTTGTGAAGCAAAGGCGTCACTGGGCATAGGAACGCAAGAGTGGCCGGTGGATCCCT
CTGACCTCAGGCAGGTGCATAGATGGAGCTCTCACGCCTTTACTCTCTGACTTTCCTTGTACTTGAAGAGTGGGGCAGATTGAACACTCTCGGA
AATGGGCTGCCATGGCAGCGAGAGAGAAGGTCTCAGGGTCAAAGGGCAGCCTCAGTCAGGTCTCAGGGCAGAAGAGCAGCTGAGGAGCCTCCTG
ACTATGACCGTGTGTAGCAGGAAGTGCTCTCTCAACCTAGCTAAGGGGTCAGGGAGACACCTGTCTGATATGGAGGGTGGGGCACAGACACTTC
ATTGTCGGTGTGTCTCTGGGGACACAGCTGGTCCCAGAGCTTGCCAGAGGAGAAGGTGCTAAGCTGTGGAGGAGGGACCTCTGGACAGCAGAAG
ACAGCAGGGCTGAGAGGGTTGGGGACCTAGACTCTACGTGCGGCATGTACTCGGGGTCTCCCTAGGCTTTCAGCCTGTTTGTTAATTGTTAGGA
GTTTCAAGGGACCCCTGCATGGTAGCACTTGCCCCTGACAAGAGCATAGCATAGGATAGCATAGCATAGGATAGCATAGCATAGGATAGCATAG
CATAGCATAGCATAGCATAGCATAGCATAGCATAGGATAGCATAGCATAGGATAGCATAGCATAGCATAGCATAGAATAGCATAGCATAGCATA
GCATAGCATAGCATAGCATAGCATAGCATAGCATATCCGGGAACCCTGGGTCTCCAGCCAAGTGCAGTATAGCTGACAGGTCTTTGCTCATTTC
TGCTTTTGTTGTTTGTTTGTTTTATTTTGTTTTTGAAGTGTGAGCCTATTCATGAGCACAGGCTTCAGGGCATACTGTCCCAGGACTAGGAAGC
AGTCTACAGAGAGATCAATAGCTTCAAGCAGCTTGGGTGGGGGCGCAGGTGGAGGTATTGTACAGAGTTGTATCCCTGCATGGGGCATGTGTAT
TGTGTGTGTGTGTGTGTGTGTGTGTGTGTGTCTCAGTGTGTTTATGTATAACTGAGCATAGGTGAATGTGTATGTATGTCAATGTGTCATGAGG
TATGCATCTATCAATGTATGGGCGCATGTGCCTGTTTGCATATTAATATGTGCTTATGTGATGTGACCAAGTAATCCACTGGCCCTTTGTAGAA
TGTCCCTGCCCCTTGCAGTGCTGAGCAGGGGCACCTCAAGTTTCCCGAAATTCCACCATGTGGCCGCTACAGTTAGAGACAACCAACTTTACCT
CCCGTGGGGACAGGAGTGAGATCCCCACAGTGTCCTATTGGTGGTCAGTCTCCTGCCTTGGATAATCTATGTGCCTTGGGCCATGTATACACAG
AAGCATCTTCTCAGCTACGTCCTCAAGAACTTGTGAAGTCCCCAGATGCAGCTGCCTCAGGCTCTATAACCCAACGTGTCTCGGGGTCAGCTGT
AGGAGCACACATGCCCTGAAGTCACAACCAGCTGTAGGAAAATGCTTTCTTTCAATTCCCTGGCCATGGTCTGGGGTGGGCCAGAAACGGACAG
TGTCTGCTCCCAGGCTCTGTACGCCATCAGCCCTGCGCACACATGCTAGTTTTCATCACGGGCATAAAAATACCACCGTGCTGACCTGGTCAGG
CGAGGTTCCATGTGGCTACCATGCACCCTCACTCAGCAAGATTTGGGGAGAGCACACCCTTGAAGTTCCACTTACAGACGTGCCCAGCTCTGCA
TGGTTCAGAAATCACTGACCCAGTGAGAGACATAAGCTGGGGACCGGACCCATAATCCCTTTTGCAGAAGGCATTTCTTCAAGTCTTAGAAGGA
AATAAATTTGGAAAGGCAGTGACAGACCCACCCTGGGCATTCAGAAAGTAGACTTGGCCTGAAGGCCTGCAAGGTAGGAGAGGCCTGCCTCGGA
TCCGGGTGCTGGCAGGCTGAGTCTTGCTGTGAGCTTCACGAGCAGCTAAACTCACCATCTCAAGATGGAAGCCACACAGGGTCCCTACAAAGGA
GCAGCTGGTCCTTGCCAGTCTGGTTCCTCTTCTTCCTAGAGTGTCTCAGGATGACATTCGACAGTCGCAGTCACAATCCCTTGGATGGCACCTT
TCTGCCTATTTCCTGAAGTGTATTCACAGATTTCTCACAGGGTGCAGTTCTAGCGGCTTTGCGACTGTTTGGTCTGTGCCCAGGATACTTTGAT
CTCCATGAAAGAAGTCCCTTTTCCACAAGCACTGGCACAGTGAAGGTGTGGCTGGGTGTGGCCCTGAGGTTCCAGTACTGGAAGTACTCATCAG
AGTGGCCATGTGGGAGATGCTGGGGCTTTCTGGGTGGAGTCTAGGGAGAAGGGTGAGGTAGGTGTGTGTATGTGTGTGTGTGTGTGTCTGTGTG
TGTGTGTGTGTGTGTGTGTGTGTGAGAGAGAGAGAGAGAGAGAGGGGGGGGGTGAGGAGGGAAGGAAAGGGGGGCAGGTCACTCTGCAAGAGAC
CAGAGTGCTCCTTAGCTGAGCGACCTGTTGTGAAGGGCAAGCCTGGCCCTCCGCCCTCTGGCATCCTGCCTAACGGTGGAGGCTTTTCCACATA
CTCCTACCACACGGTGCCATTGCTACCAAGCCCCCCTCCTCCCCAGGGACAGAGTGGTTGCTGAATCATGCCCTGCTTCGGGCATTCTATTTTA
GCCACAAAGAGCAAGAGAAGCCGTCAGCTCTTCCCTTCCTCACCCAGATGCCCACTGTCGCCTCTCCGAACCTTGTGGATTTCCCTCCTTGGGA
TACTATTTGTCGGTAGAGGCAGACAGTGTCTGTGCTTTGCTCTCTGGTGCCTTTCACAAAATGGCATTTTAATCCCTGTTAGTCGATGCCAGTG
CTGTTCATTTCTGTGACTGACCAGTACCCCCATGTGGCCAGGGCAGATGGGCATGGGTTGTTCTGTTCTCTGTGACTATCATGAATGAAGGTGT
TGTGGATGTTCATAGACAAGGTTCTATGCATGCCCGTGTCTTCCTCCTGGCACGTCCCTGGCTGTGAATCTGTCCTCAGCTATGCAGTGCCACC
AGGCTGTTTCCCAAAATGCTGGGGGTATGGATGGCGGGGGGGGGGTCTTGTTTTACCTTGGGGTTCTTCTGAGGGGTGCAAAGCTGCCCTCCTA
ACCTGGGAGAAGCAGGCCTCCAGGGCACCACATGCACACCAGGCTGGCGACCCTCAGAGCCCCTCTGCAGTCCAGCCCTGCAGAGCCTGTGTTC
ATCTAGCCCCGTAACACAGCCATCCCAGTGCCTCACACTGATGGGGTGTCTGGACCTGCCCCTCCCTTGAGGCTGATGGGATGCAGACTCAGGG
CTAGAAGGAGGAAGCCTCCTGCTCCACCCCTAGGAGGGGGCGAAGCACATCTCAGAGGCTTCTCCACTCCTGAATAAACTCCAGCTGCTTCCAC
GTGTGGAAACAGTGGCTCAGCCCCTACCCTGGCGTGTGACTGGCCTGTGGGCCTGTGGTGGCAGCGGCGTCCTGCAGCCAGTGGAGCGGCTTCA
GACCTCCAGGCTGGCTGTGTGGAAACCTTGGGCGGGTGTGGTGGGGAAGCCTTTCTGATGACTCACACTGCAGGGAATTCCCTAATGATTTGGA
ATATTTTTACTTCTGAACTGGAGCACAGTTTCCTACTGGGAGCGTAGGGAGCTCCTGATAAGATGGGACACAAAGGCCCTTTTAGGATGGCCGG
CTGGCTCCCTGCCTGGGAGAGGCTGAGTTCTGAACAGCACTTGGTTAACTGGCCTCTGAGCAGGGAGGAGGGGGGTCTGAACTGAGGAGTCTGT
GGACGCATCCAATGGTCTAGGGCCCCCCTCATGGCCGATACCTGATGATTCCCTCAGGAGTATGAAGGACTATCTCCACGTAATTTGCCCCCCA
CCACCCCATCCCCCGTCTCCTGCCAGAAGCAACCTGCTAGGTGTACAGTCAGAAGTCCATTCAGCCACCGTCAGAGCGAGAAGAGTGCAGCAGA
GTCACTGTTTCGTCTATTTGACAACTGCAGCTGGAGGACCTGGGTCTGGATGGGACCAGTGCTTTGAATGCCTGGCCTGGGATAAGCACAGACC
TTGGAGACCCCAAGGGACCATATTTTCAATGGGAAACAGAAGCCGATGGGTGATCTGTCTTGGTGCAATTTAGAAGACAGGAATGGAGTTCTGT
CTTGTCTGGTAGTGGTTGGCATGGGAATGCTGGATTGGAGCTGGCCAGTCTTGGCTTGGTAAGGCACAGTGGCCCCTTCTCAGCCACTCTGCTG
GGACAGGGGAACAATCCGTCACAGGCAGCACCTTCTCCCCATGGTTCTGAGCCTTGGCAGGAACTTTTGGGATGACGGGGGCCACACTACAGTT
GGCACACCTATGTACAGGCAAAGAAACTGTAGATTCTCAGGGACGAGAGGCAGAGAGCTGCCTCTCCCTTGTGGAGGGCAAATCTAACACAGCA
TGCAGCCTGACTACAGACCCAGAGCACGGTTAAAGAACCGCATGTGGGTACTTCCAGTTTGACCCTTGTGGCTATAGGTGGCCCATGTGGCTGA
GGTTGAGGGTGCTTCTCGGCTGTCATCCCTGAGCTACCAGAGCCTAGGGGTTCACTGTTTCTGACATTCCGGTGCTCTAGGGGTATCTTGTTGT
TTTCCCTGAGGGGTAAGGATAGGAATGCAGTTAGACCCCCTTCATGGGCTCACCTGATGGCATTTGCTCAAGGCCTGGGGTATCTGGGGAGCTG
GTGTGGCCTGGTGAGGCTAGGTGGCTCTTGGAGCCTCTGGTGACTCACATTTCCACCCCGTGCCTCCACCCTCCGCCCACCACCCTGTCCAGTG
CTGAGGGAAGGAGCTGGTGTTTGATTTATCAGTAATGTAGGGTTAGTGACAGACAAATGGGGTGTAAGCAGAAACTGAGCGTGTGCCTAAACCG
GCTCATCTCAGGAACTGACTTCATTTTGGAGGAGATAAAGGCCAGGATGGATAGCCGTCAACTCAGTGGCCACCCAGTTGTCCCCAGGTCATGA
GCCTGTCACCAGGACTGGGGACTCAGAGCCTGTGAGTGGCAGACACCCTTCCTCTAATCACTAGGTCCACACCTCATCGCCAGCTGAGAACAAT
ACGTTCTTTCACTGTGCCTATGAGAGCCTTTTAATATTTTTTTTTAACATGCAAACAGCCACTGGGCTAAGGTTAAAAATACCACGTGTTTTGC
ATTTCTAGGTCCTGATGTGGCATGAAATAGCCAAAGAAAGGCTTCTCTTATCTCCTCGGTGCTTCCTCTGGGCAGAGGCTGGGACTTTGCCCTG
GCTTCCCCCAAAACACATAGGAGGCTGGTGCGACTTACCAAGTGGCAGAGCCAGGCTGCGCTCAAAGCACAGTACATGTTGTGCATTGCTGGGT
TATATTTTGGGGGTGCATGTTGTGGATTGTTGTTTTTAGGGGGTGGGGTCGCCCTGCCTCTCTCTGCTTTTCTGTCCCTTGGGAGAGACTAAGG
TGTAGGAAACCTTCCCTGATGTGTGTTGTGGCAGACAAGATGAATATAAACCTGGACACAGGGTGGACCATTAGAAACACTCTTGATTATGTGG
GCCCCTCCTAAGAATATACACTGGGCATCGTCTTTGAACTCACCAAGTACACAGGGCCAGTACTCTAGAGCAGGTCAGCACATGCCATCCAGTG
TAGGCGGAATATCTAGGGGACACAGAGCACTGCCCTATGACCTCACCGTTTCTTCCCACTCTCCCCTCCATGACCCTTGATTTCTGGGTCACCT
GGAACATTTTAAAGATATACTATCCCCCAAACAGAGTGACAGATTTCTTCCTGCCCTTTGTTCCAGATGGCCACCACGTCTGGGAGATGGAAGC
AAAGACTGACCGGGACCTGTGCAAGCCAGTAAGTACTTAGAATCCTGCAGCAGGGACGAGGGAACCAGACCGGGGCTCCTGTTTGTTAAAATAA
AACAGTGCTTAAAAAAAAAAAAAAGACAGAGGCATTGCCCAAATCCCTTGGCCAAATGAGAGCCACTAGAATAGAATGGAGGCAGTAAGGAGGG
GCAGGAGGAGAGAGGCTGGAGAGAGCTTGAGGCCTCTTTATTCTGGGTGTGCTTTGCTTTTTAAAGGTTCCAGGTTCTGTCTCCTCTCACTAAT
GGTGTAGCCCCAATTGAGTGGCTACCCCCCGGGAGATCTTGGTGTTCTAAGCCTCATTCATGGGCACCCAGCACCTGCCTGGACATGCCACCCA
GCCTGTGTGACTTGCCACCACCCTCTCCAGAGAACGCCTCAGCTACCTCGCGCTCTTGTTTTGAACTTGGCGTGGACGAAAGGGCTGACCGAAC
TGGATAGCTTAGCTCAGCTGGTTGGGTTTGCTGAGGAGCGGTGGTGAATGTGTGACATCGTCTGTGGGTGACATAATTAGTCTGTCTCCCTCCC
GCGTACATACGCACCTGCTCGTGTTCCCTCTTCACCATCATGTGAGGTCATTATTGGTTGTGATTGGCTGATCTTGTCTCATATACTTGTGCTG
GCTATGTCTGCGGCTGTGACATGTTTCTGACTGTTGGTGTGGTCTTGTCATCTAAAGTGGCTGCTATTGGAGACCTCGTGGAGTCAGGGTCCTC
TTTGCTGACTGCAGTCTGTCTTCGCCATCCCTACGGTTTCCTCCCTTGCTTGCTCGGCTTTTGCAGTACTGGAAGTTGAACTAAGGACCACGCA
TACCAGGCAAATGCTCTACCATTGAGCTATAATCCCTACCTCAACAGTGTCTTTTAATTGGACATTAAGCTGTGGATGGCTAAACAAATTAGAG
TACTGTCGCTGAGTCCTGTGCGAATTCAGTCTAGTCTCAGAAGAGCATAACAAAATGCAGTGAGTAGGTTTTTGAAGACACCCAAACCCTCCCT
AACTCTGTAGCTCATTGCACAGACTTCGTCACAATAGTCTGGGCAGCGTGCTTGTGACCACAGGGCATGAGGAGCCTTTGGTGCGCTCCCAGTG
TATGGAAGTGGGATTTAAATGAATGAGAGAGCTTTTTTTGGTTTTGTTTTGTTGTGTTGTGTTGTTTTGCTTGTTTGTTTGTTTTGGTTTTTCG
AGACAGGGTTTCTCTGTATAGCCATGGCTGTCCTGGAACTCACTCTGTAGACCAGGCTGGCCTCGAACTCAGAAATCTGCCTGCCTCTGCCTTG
GGCATATGAGAAAAGGACTTTTTCTATGAACACTGGGCAGGCAGCAAGAATCACATAAATGGGGCATGCTGGTAATGGGGTCCACAGAGTGGAC
AGGCAGTCATGGCTCCCGTCAGCAGAGCAGTCACCAGGGTGTCTGCTTCAGTTGCAGCAGGCACAGGCTGCCTCCTTGTCTTCTAGCTGAGTCA
ATGAGGATGGGGGAAAAGAAATCCTTTCCTGCTTAGGTTCCTCTCAGGCACTGAGCCACTCTCAAGAAACCTTTCCAAGTACTTCTCAGAGGAA
AGGTCCTCTCTGGCCAGTGATACTGTTCATGTAGATGAAATCTTAAACATTCACTCACAGTACCCGGCTCCCTCCCTCCCACTGAAGAGATCCT
TCTCTGCCTCAGTCTTGTCTCTTGACTTCATCCAAGTTGTCCTTAAGGAAATATTGAAGGCAGTGGCACATACACATGTACATGCGCACGCGCA
CGCACACACACACACACACACACACACACACACACGGAAACATACCTGCACACACATTGCATTTATAGATATTTTAAAGATGGGTTTCTGCTCT
GTATGTGGTTATGCATCGCCCCCACTCAAGACGGTGGGTTTCCTCAGGCCTGTGCTGGCTGCAGCCTTTACAGTCTCTGACAACACTGAGAAAC
TCCCAACACTTGATCTCAGGGCCCACTTCCTCCAGCTTCCTTCCTGGTTTTGAGAGCAGAGCTCCTGGGGAAGGAAGAGGCAAGCTTGTAATAG
GATCTGTCTGTGCATAGTGTTGAAGTGCGTTGACTTGTGTCCGTATCAAGATGTGACCCTCTTTGGTCATTTGGGATAAGCAAACAAGCCAGGG
ATAGCCTATCCCTTTGGTCCTTTCTGCGTTCCTTCCACGGACCTCAGATATAGAGACCACCATGGGGTAGCCTCTTTCCCTTCACCTGACTGAA
CTCCAACGTCACAGCCAGGCCACTTAAAGCTGGGCACAACCCAGGCCTGAGTGGCCACAGTTTGGGGCTGCTTCCTGCAAAGGTGGGCATGTAG
CATAGGCACCCTTTACCCGCCCCTCCCCCACCCATCTCTTCCAAAGGAAGTGAAGGTAGATGACACAGCTTCCTCAGGTTGATGGAGCCCAAGG
GGATGGAGCCCAGAGGGGACCCTAGCCAGTCCTGCCCTGGGGCTGGCATCCAAGGGCTGTCAGTGCCAGGTTCTCTCTCTGATAAAAAGAGGCT
GGGGCTGAAGTTCTTCTGGTTTCTGTTTCTAACGCTGAGGTTTTATTATTAACATAACTCAATAAAGTTTGCTGCCATCGATTTACTACCATTA
TAACAAGCTACGTATGGTTAATTACTTTAACAAAAGAAATGGTACCATGGATTTTTCTGACACATTTCCCCTGGCCTGTTAGACTAAAACCACA
CGAGGAAAGAAACGGAATGAAGAAACTTATGGATCTGAAATCCCCAGCAGAAATCAGGTGTAGCACTCAGAAGTACTGACCTCCCTCCCTCCCT
CCAGGCAGCTGCACCATGGGGCCCGGCACCCCCAGGACTATCTCCCCCCCCAACTTGGGTGTTCCCACTCAGTTCCAAGTATTCATGGCTTGCA
TTCTTGTTTGCCCTTGAAAGAACGTGTAACAAACAAAACAAAAAAAGAAAAAAAAACTTGCATATTTCTGTTTAAAAACAGGAAAGAAAACAGC
AGCCACCTCGGTGTTCTCAACTGTTCCAAGGCCCTGGGCTGAGCTCTGCTCTGCCTTCATTATGAGGAAATTAAGGATTCTGATGGAACTCCGT
GACCATTGTCACAGTGCCACTCTGGACAATGTCCATAAGGAATTCCACCATGTGTAACCACAAAGTGCCTGCTATAAGTAGGCAGAATGCAGCC
TTTTGTCTAAAGGTCACTGGGCCTTAGATACTGGGGCAGGAGTAGGCCTTGAAGTCAGCTGTACCAGTAGCATCGAGGCAGCTCTGCTCTCTGA
GAGATGCCCATAAGGGTGTCTCTTCTTGCATTAGTTCAACCACAAGGGTCTCCCAGCCTCTAGCTATGTGAGAAATGAGGGTGCCGCTTCCCTG
AGGAGCCGGTGCACGCTACCTCCGGCCAATTCACAATCAAAACACGTGAGTAGGTCACACACAAGAGTCACCATCAGAGGCCCTCTCAGTGGCC
ATAGACAGCCGTTTGAGTGGACAGTGATGTCTGGACAAAGCGTTCCTGGTCTGTAAGGTCCTGACTGTTCCCTCTTTGCTGTTTTACCACCAGA
ATTCCCTGGTGGTTGAGATACCACCTTTCCGCAACCAGAGGATAACCAGCCCCGTCCAAGTCAGTTTCTATGTCTGCAACGGGAAACGGAAGAG
AAGCCAGTACCAGCGTTTCACGTACCTTCCTGCCAATGGTAACTCTGTCTTTCTAACCTTAAGCTCTGAGAGTGAGCTGACAGGAGGTTTTTAC
TGAGCAGCCCCCCGAGGCTATAAGAGGATGTTGTTGTAAACAAAACAAAACAAAACAAAACATACCTGTAGCCTCTTCACACCACGTGATAGCC
CTATTCACAAGACCAAGTCGCCCACCCCCTCAAAGAAAAGCGAAGCCTGGGTGTGTTTTCCTGTGACTGGTGCATGCTGGGGTCATCACTTGCT
CGCCTTTTGCAAATACAGCAGCGCGGCCAACCAAGCAGCTCTGCTGCGCTCAGGGGCTGATGCGGTCTGGGGGTGTATATCTAACCTCTGTGAG
TCTTTGGGTTAGAAGAAAGTATTTGTCAACGCAGTTTTGTAAGTAGCTTCGAAAATAAGCCTGCCGTGGTCACTGGGGAACATACATGATGTTG
TCCTCATGGTGACGCTTCTACACAGCGTGCGGTGTGTCTCCACTGAATAATGCTGTCCCCTGGTGACGTGAGACTTTCAGATGCAAGCTCTTCT
GCTCGAGTTTACTCATTTAGGGAATGGCTTCTTTCATTCAGAAGTGATCGGCTCGCCTTTTCAACTTTCTAGGGTGTTTTATTTACGAAAATAC
CGTTTTTAACTGCTCCCCACCCCGAAAGCTTCTAGAAAGGTGTGTCCCAGGCGTCCAGGGTTTCCTGTGTGGTGCAGGCCATTCTCCTGCAGCA
GGATGTATAAACAGACAGCAGAGTCGGTTGTTATCCTGAGTTCTATTGTATTTTGAGTAAGCTAGGCTATGTCAACAACCTTTTTAAATTGCTA
CTTTTTTTTTCCTCTAAAAACTTAAGATAGTCATGTAATTTAAGAGGGAAGTTATACAATAAATACTAGCCATGAAAGCAGCCATATTGCTATC
TTAGTAAAATCAAGGTGGTTTTGTTGTTGTTGTTTTGTTTTGTTTTTTGTTTTTTAAGGTTTCAAGGTTTTTTGTTTTTGAAGTGTAAAGGCAT
TTGGAACAGTTTAGACAGTACGAAAAGTTGGTATTAAAATTCTGAAACCAATTGTCTTATCAGGAAACCCCTAGAAATGCCCTTTAAAAATGAG
GACAATAGCTTTGTTGCATTCTCAAACAAGGACATCAGTGAAAGGGCAGCAACTGTCTGTGCTGTGGGTGACCCCAGAACAGCGGCCCATCCCC
CATCCCGTCTCTGCTCTTCAGATTATTTCACAGGCCTCTTCCTTTCGGGAAATAATGCACACTCTCTCTTACAAAAAAACCAAACATTTGGTCT
TTTATTTTATTTTATTTTATTTTTTGAAAGTGCAATGATTGTGTCCTACCTATACTTCAAGCATGGTTGATCTAAGATTTTTGAAAGGTCTAAA
CGTTATAAAGAAAAAAAAACATTTTCTAAAACAATGTGGAAGCATCGTAAAGATTAACTTCCCCTTGTTCAATGCACATTTGAGTCCGTGATGA
AGGTTTCATAGGGTGCTCAGTATTCGTAAAGAGCACCGTGTCAGAGGGGTCTGCGGAGCAGGCGTCCCGTGAGGCCCCAGGCTCTGGTGGCTGA
GTGTACCTCTGCCTCCCATGCTGCCCTCCCTTGGTGATGCAGTATCCAAGCATGCCAGCGGCTCCACAGTCATTTGCTCTGCACCAGTCTGCCT
CCCACAGTCCACATAGCCTCCTGCTGGAAACTCCCAGCTGCAAACCATCCTTATGTGGCTCAGGTCTTCCTTCCTCGGCCCTTCTGGCTTCACC
CATTTGCTCCAGACCCCTCTTCAGCCCTTTCATCCTGCTTCCCTGACTCTCGTCCCCCCAACTCCAAGATGGCTGCCCACCACCATTGTGGTCT
CGGGGACCAACCGTATTTCCACACCATTAGACTGTGAGCTCCTTCACAGAGACCTTGGCCACAGTAGGGTTGAATGCTAGCATTACTCATTGCC
TGATTCCTGGCTGGCTACCGACATGTGTTGTTGTTGTTGTTGTTTAAATAAATAAACACACAGATGGAGAACCCCAGCTCCTGTGTTCCGTGTT
CTGTCTGGTGCTCCCCTTCCGTGCTCCGTGGCATCTGTTGCTCTGGGGTGTATCTCTGAGAACACCGATGCTAATGAATGGATGCCTGTGTTCA
TAGCTCCCCTGGTCTCAGATTGCTGCATTTGAATCCTAGAAACTCTCCAGGGCACATGAGTGGCTCTTAATTAACCTGACTCCATGATCCTTCA
GTTTTTCTCCTTGGACACTGGCTGTGAAGTTCCGAGCCTCCCCTTGAGCCTTTCTGTATTATTAAGTGAGTTTCATGTATACTAGTATTTCACG
TATCTGTGACCAATACGGACACAGGTTCTTATGGTCATCAAATATGCTGTGTTTGAGAAAGTAGGAATAAATCCTTTTAAACCCTCCCTGTGAA
ATTCATTTTTATCTGTAGATATACAAAATCGAGACTCATTTAGTTTTCCTTCAGACTTAGGTGTGAGGATGTCTCAAGGGCGCTGCATCAGATT
CCTCCTCTCCCTTACCCTTGTGAAAGGGCCCCCACTCTTGCACAAAACCGCCCCTTGTCCCAGGCCCTTTGAGATTCAGGGGGTTGGAAGTCAA
AGTGTCCAAGGTATTTTGCTGAGTATAAGGCAGGGGGATGCCAGCTTTGTGCGTTCCTTTGTCACCTTCGCTGTCTCCTGATACCTCTACAGCA
GATTAGCTCACCTGGTTGACACCCACCCGGGGCCATCCTCCTTTCTTATTCTCAGTTAACTGTGACAGCAATCAGGTGGCAAGAAAATAGAGCA
AGTGACTGGCACCCTTGGGTTCTGGGTGGGGTGGGGGGGGTACTGAAGTCTTTCGTGTGTGGTCTGTGATGACCCTGGAAGGGTAGCTTGGCCT
CCTTCCCTCCTACTCGTGTGTGCCTAACAGGGAAAGTCTCCACTTAAAGGAAACTCCTGGGCTTCCCGAGACTCTTGTCTGCCACTAACTTAGC
TTTACTCCCTGAAAGGAGACTGTACTATCTTCTTCACTGAGCTGTGGGGGCTGGGCAGCACACCTTAAAGCCAGTGCTTCTGTACAGTGAGGGG
ACAAGTCACCGTAACCTATACGATTCTGAGAGCCTGTCACTTTGTCTGAAACTGTTTAGCTAGCTAGTTAGGAGTCCCCCGGCCTTCCCAGCCA
GGACAGGACTGTCAAGGTGGGAGTGACTCTTGTCCAGAGACCAGGAACACGTACTCCCGAGCAGATCTTGCACAACTCATTGGAAACCCTACAG
CGGGCTCTGCAGGTCTCTGGGATAGTCATCAGACACAGATGCTAAAAGCACCTGCCGACTGAGAAGAGACTTCAGAGTGCCCAGTCCCAGCCAG
GGAGGGCCTCCCGGGCTTCCTGAGACTCTCACTTGACACTAACTTTGCTTTACTCCCTAATAAGAGACTGTAATATCTTCTTCACTGAGCTGTG
GGGGCTGGGGTGGACATGGTCATAAGAAGAGGGCTATGCCAGGAATGTCTGGGTCTGAGCCCTTATTCCAACATGTCAATTATAATTCCAGAAC
GATGAATGGATATAGAATGTCTCCGGTTTGGGTTCCAAGATGAGCATCTCTGCCAGTCTGAGACCTCAGACTAGCTCTTTCTTCCAGTCACTCG
TGGCAGGAACTGGTACCTGCTCACAGGTGCAGGGGTGCTTATAAAAAGAAGAGTCAGCTTATTATAACAGCACACCCTAAAGTCAGTGTTTCTG
TACAATGAGGAAACAAGTCTCCACAAACTATAGGATTCTGAGAGCCTGTCACTTCGTCTGAAACTGTTTTAGCTGGTTAGGAGTCCCCTGGACT
TCCCATCCAGGACAGGACTGTGAGTCCAGGAACACCTACTCCCATCCCTGACCCAACCCCTAGCACTGGGCACTCGTGTGAGAACAGAGACTGA
CCTGGTGACAGAGACCAGTACATGACTATAGGACAGGAAAAGCATTGCAGTGGAACCAATGTCAGTCAAGCAACCCCCTGAGCACACAAGACCT
ATAAGGATAGGTTGCCCCAAGGGCCAGAAGTCTATGAACCTCTAACACCCCTCCCCCTCCCACACACAGCCACACTTCTTTGCATGGACTCTGG
GGTGGAGCCATGAGTGATCTGGAGAATAAAATACCATAAGGAACTTTCTTGAGCCCTTCCTGATTATTATTAGTAAGTACGTCTAAGATATATT
TCCATCTCAGAGGAATAAGAGGAACGCACCACTTCTGCCGGATTCTTGGTTGTATCACCAGAGTCCGGAATCTTAGAGACTCGTGTAGACTTCA
GCAGACGACCTGGGTCCTGCCTAGAAGCAGAGCCCCCACCTTATAATGGATCCCTGTGCCTCATGGGCTCTGTAGCTTAGTCACTGCCCTGACT
ACAACTCTACTGAAGATATCAGGCCTCAACTTGTAACTGCCTGGGTACAGAGACCGTGATGGCATGGCAGTACTGTGCACAGCCCATGGCTGTC
TGCCTGGGCACCCACTTCCTGTCCTATGAGAAGCCTGGCCCTGGAGAGAGAGGCTAAGGTCTGCCCTACTCCAAGGGTTTCTTATGGAGAAACC
ATACAACATAGTGGCTTGTTGGGATTAAAGCCAGGACAGTTTCTTCCACTTACCATCATTCAGCTTGAGCCTTTCCTTCCTTAAAGAGCCCATG
AAGGCTTCAAATGGCAGAGAACACAATGTGGTGTGTAACGGGGCAAAGTGATGTTAATTCTAGGGACCCTGCTTCTTGATTTTCTTCTTAAAAG
CTAGTGAAGACCTTGCGGAGTGAGGAGAGGTCAGGGTGGGCCAAGGAGCGCTGTCTCTGGCGCCTAAAGCTACAGGTGGTACCTACCTTCAACT
GCCAATGACCTCAGCAACCAACTGGCCATTGTAGCTGTGTGCCTTCATGTTCAAATGACACCGGTCAGTAGACATTTGGGAGAATGGCCAAGGG
CTGTCTAGACCTCTGGATCAAGGAGTCCTGGCTACTTAAACTCTCAAATCTATCTCCAGGGAGGAGGGAGTCTGTTTCTCATACCGACACTGAT
GTGCCGAAGAGAAGGAGCTAACACTTGCACCCAGGCCAGCCCTGCTGCACCACGAGGAAGGTTAGGCATCAGAAGAGGCCATTTCTGCACTATG
TGATCTCTCAGGTCTTCCCATGTGTTAGAAGGCCTCAAACTGAAGTGAACACTTGTCTGGGTGCTAATGTGACAGCTCCAAGAGATGCAGGCCT
CTCAAGCCTAAGCTGTGTCCATGTGCGTGCACACACCTTGTGCTTCTGTGGACTCTCCATTTTCACACAGGGAAGGAGATGAAGGGTAGAAGGT
TGCCTGGAGATAATTGAGACAGAGAGAGCAAACCATGTGGCACCTGGAGTGCCCGCAGAGGATGGCTGTGACTGGGACATTTGAGGAACCATGG
AATAGAAAACCTGCAATTTACAAGGGCCCGAGAGGGAGGCCAATGTCTTGTGGAGCGATCACAGAACACAATAGGCCATTAGGATGAAGGGCAG
GAAGGTAGTTTTGTTTAGAAATCTAAGGGCCATGTGCCACCAAAAACAAACAAAAGCGTGAGTCAGAGTGAGCTGAACACCCAAGGAGGCTGAG
CACGGAGGAGACATGCATGGGCGGGAGGGAGAGCAGATAGCTCCGCCTGTGATCTGCCCATAGAATTCATGCCATATGTTTGCCACCTGTGAGC
TACTCTCAGGTCCCTGGCTGCCCCACCCAGCTCTGTCCTAGGCAGTATGGCAGCCCCAGAGCCCCAGCTGCTGGAGGGGGAGTTACTGTCAAAC
CATAGAGATTGGCTTCAGCAGCTAGTGGATAGAACGCCACTGATGTGTGTTTTCTGTGTGTATGGCCTTCTGTGCCATCCACCGCCATCAAAAG
TAAATGGTGTTTATCATTCTGCACCTGGATGGGTCTCAGCCGGTTGGTTTGGGCTGTGGACTAGCGTGCACAGCCAGCAAAGCCATTCTCTTCC
TTCTCTGGGTCGGGGCCTGCTCTGTAGCTGGGAGTTAGGACCTTGTGGCACGACTGACCTCTGTGCTCACTTTGATACCTCTGGAAAGGGCATA
TTCCCAGCTCTCACCTGCTCACCACAGATGAAAAGGCCTAGCGAGGTCCTGTAAGAAAGGCCGGAGCCAACAAGTCCTTGGTGTGTGCTGTTTC
CAGTCCCCGGCGGGCTGAGCTTCCGCCTCACCCTTCAGGATTTCGTATTCTGCCTGAATGTACCTCCACGGATCCTCCCGCTGCACTGAACACA
TCCCTCTGTAGATGCTCCAGGTCTAAGCTGTCCAGGAGACAACCCTTACGCTCTCTCATCCCCAGGGAGCTGGGAACCACACATCTGCACCGCC
ATTGTGAATGCTGAATGGCAGATGTGCCCTTCCATTCACAGGCTCACAGGTCCTGTAGGATCTGAGGTCGCTTGGCAGGAAGATGTGTGAAGCC
TTTCTGGCCTGGGCTTGAGTGGCTCTCTGTGCTCTTCACCCCTGGAATCCTCTCTTGCCCCTGACTTACTGCTGGCTGTCTATGTTGATCAGGA
GACTTAGGCTTCAATGTCACTGCCATGAAGACAATCTGACTTTTGTTTCATAGGAGTTTTAGACTTTGAACAAAACCTCTTCTGTCCGGCACTG
GAAACAGCTGGTAAAATAATTCAAGCCACGACACTTGAGTTTACTTGAAAATGCAAGTGTGAAGTAACAGGGCATGGACAGAAGACATCCTCAC
TTGTACTGAGCATACGTCCTGTGAAGGCTGTGGGAAGGGGACAAGTGCCCGCCTCTGCCTGACAGCTCTCACTGTGCACAAGAAAGGGGACTGA
TAAAGGTGCTTCCCACCTGCTCCACTAGAAGGACAAGATAGATGCCATCAGCTGGCTACACATCAGTCACCAGCAACCCTAATGGTGACCTTAA
AGACCCATCTCCAGTTGTCTTGTTGGGGATTGGTACTTCAACATGAGTTCTGCGGCATCCAGGTTCTCCCACATTCTCCATATGCACAGCGTAG
AGGGTATGGTACAGGCTGTCATTGATGGACTCGCAGAGGTCTGATAAAGCAGGCTGTATCCTCACAGCTCTGCCTCAGAATCTTCACACAGGTC
CCACTGACTCATAGCTGGCAAAGCCTAGGCTGTAGGAATGAATTAACCCAGTGGTCACACGTTAGTCATACAGGCTCTGCCATGTGTCATGTGT
GATGATGCCGTGTCTGTTGGTAATGCATCTGAGTGAGGGCTGCCCACTCAGCATACAGGAGCACTCTTCACACTTAGGACTGAGCTGGGCAAGA
ACACTTAGACAGAAACCCAACATAAGTACCATCTACACAACCGTGTGGTCTCTCTTCATGCAGCCACACTGCCTTCGTGTGTCAGATGCTGGGC
AGTCCTCGGAGCAAGGGGATTGGAGGCACAGGTGTCAGATGTCGGTGAAACTTGCCTGGCAAGGTTGCTCAACTGTTTATATATTTTTAGCAAG
TTGTCATAACTCCCCCCAAATAAGATGGTTGGATGTCCGAGGTGCTGATAGCTGCTGGGACCTTGAGCTGATGCCCCAGAATGCTGCATTTACA
ATGGGAACCATGCGGTCCGTCTGCACAAAGGTCCATGGGATGTTTGACTGATCCCAGGCAAAGAAGGACAGGGCCTGTCTGCATGGCTCTGGTC
CACAGTAGACACATTCAGGCTCCCTCAAGCACAGGCACATGGCCCGTGTATCATCAGGCTCATTTTGTGGGCCTCACAAGATAGCCACATTACT
CCAGGAGAGAGTCACCTTCTTCCACTTGCCCCACTTAAAGGAAGGTCATTCTCCACCCATTCCCTGTCCTGGCAGTCAAACCTAGGCTGTCCTG
CACCCTAGGCAAGCACTCTTAAGCACTAAGCCATATTCCAGCCTAGCTAGAAGTTATAGAAGCCAGAGTGAGTCTCTGTGGCTGAGCCTTACTA
GACTTCGCCAGAAGATGTGCACTGTTAGTCTGAATGGGATCTGTCCTTGCCTATCTTTCTTATCTAGGAGATCAGACTTAAGATTCAAAGCCAA
ACTATGAATCAAGAGCTTCCATCTTTTCCTGGGTCCTAGTGAGGACCCTCTGGCTGCTCCTCTCTAATCCACCCAATGAGAGTTGGTGAAACAT
ACACCCAAATTCCTGGATAGGATGGAGGTGGCGCGAGTCAGCTGTCTACCAGCAAGCTTGGATGCAGGGCAGCAGAGGCAGCTGGGGTAGCTAT
ACAGAACAAACTACTTCTAGACTCATACTGTTGATGGCTTCAGAAGGGCCTGTGACAGACAGAGAACAGTGGAATTCCCCCAGGATCCTTCTGT
GTGCATAAACTTATAGCCCAGCCCCAGTACAGCCTCAGCACAGACTTAATCCTTAGCCACACACTGGAGAGGGCCTCAAATCAGAACCACAGAG
ACCCTGGCTCTCACCTGGACCTTGTGCACAGCAGGCAGCCTTTGGAGAGTGCCTATAAGCCATTTTAGAAGTATAGTTTCCCAGAAAGAGCTTC
CCACCTAACCTGGAAGGACAAGCCCCAGAGATGGAACTCTGTGAGGCCCAGGAGAGGAGCGTCAGCCAAGCACAACCTGCCCAGTGGCTCACAG
ATGAATGGCCTCATTGGGAGGCATCCTCACCTGGTGTTGGCATGTAGGAACAGAAGACTATTTGCTAGGCTTAAGTCTCAAGTCTAGAGTCAAG
GAATGCTCTTTAAGGCTCCTTGGCCCATAGACTATCATTGCAGGACCTGCAGGAGATGGGACGGAGAAGGAGCCTTCCCCCATCACACAACCGA
GCATGTGCCATTGACGGTGTCAGCCACACTTGGCTGGAGAAATCCTGGAGGACAGTGAGCCCCAACCTGGGACACAAACTTTGAGGCGACTCCA
GGTCAAATCCCTCAGCCGTCCTTAGACTCTTCGAGGAGTGGGCTCACCACACCAGCACTTGTATGTGATCCCTGCAAGGCGCTGCCGTGTACAA
GGTTGCTGGACTACGGTGACTGCTGTGGCTGTCAGGTGCACACAGTGCCGGGCATGCACGATGACACACATCTCCCATGGCCGCACAGACCCAG
CATTGTGCTGTGCTGGGTGTGAGGATCAGTCACAGCAGGAGCCAGCAGCCCACCTTCTTCATGAGGGCTTGCTTTGTCTCTGACAGCTGGCCCA
AAAGATTGCCGTTAATCCTTCATGTGCTCGCTTTCCATAATAAACTCTGTATAATAAACTCACGACTGGGCTCATGTGCTGTTTTCAATGTGCT
AGCATTGCGGTGAGCTCTGNNNNNNNNNNNNNNNNNNNNCCCAGTCTAGCACGGAGACATTGCGTCACACCCCCTGCCTCCCTCTGGCGCAGGA
GACAGACCAGCGCCTGGGGCTTCTGTGGAGCCCAGGTCCCATTTCCTGACTAATAGGAAACAAGAGGCCCCATCCTACAAGGCTCTCAGCTCCA
CATGAGAAATGCAGACACAGGCAGTCTTGAGTTGTATAGCCCTAGGGTTTCTGTAGACAGACACTGTGAGGGGTGGCATATAGCTTCAGCTGAG
GAGACACTTACAGGGAACCTCAGAGAAGGGCCATCAGAATCCGATTCTTGGATCACTCCTCCTCTGCCAGATGGACAAGCTGCTCTGTCTCCAA
GCGTTCCTCAGCTGTGCTGAGTGACCATCCAGTGATCAGGGGCCTCTGTCTTTGAGTGGAACTGCCTCCGTCAGGGGTGGAATCCACATCAAGT
GTGAGACTGTGACAGGGTCCCCTGCACAGGAAGCAGAGGCTTGCCACCTTGGAGTCATCAGGTGGCAGGAGACATACCCTGTGTCTTCTTTCCC
TTTGCGCTGACCTGTGTGACACTGCCCCCTCCCAAGCACTGAGCTCTGAAGGTGAGGGACCTGAGCATAAGATAGTGACATTGGGCTGGCAATG
TTTAAGTCTCCGTCCCCATCTATCCAATCAAACAGGCTTCCTCCCCAAGAGTGGCAGCGTGGTATCCTTGAGTGGAGCTGCTGCCTCAGTCTCA
GATAACCAGACAGAAGGAGCCAGAGGATGGAGTGGAAAGGGCTAGCCAGGACACAACAGAGGCTGCGCAGGGTCTGCCCCAAACCCCAATCCTG
GTTCATTTTGTACCTCCTGAGAAAGAAACTTGGAAGTCCAACTTAGACCATCAGGACTCATGCCCTCGTGAATGTGCAGAACTTCAATGCACTC
AGCTGGCCCAGGTGACCATTCAAATGCCAGGAAGAGTCTGAGGTGGTTAGCAAGATGGGCCGGGGTACTTTAAACAGGTCCTAACAACAGAATC
TACAGGGTTCCCCAGAGCAGCCACCACACCCACTCCCTGTCTGGCCTCTGGATTGCTGGCCCAGGTCCAACCAACGCTCCAAGTCCCTGTCCCT
GTGTGGCAGGTAAATTACATTCTCTGTCATTTACTGGGCAGCTGTGTTTGGGACTGTGCCTTTCATGTCATGCTGGGTAGTTAGGGCTGGGTTT
TACAGATCTTATAGGCTGCATCGTGGGAGGGTTGCGTTGGCCTTGGGACCTGGCTGGGGACCCAGAGCAGCTCAGCCTGGAAATAATTCACCTT
CCAGTCATGGACCTTTTTTTTTTTTTTTTTTTAATCACAAGCTCTGAAAATGACCACTCTCATTTAGAACTGAACCTTCACACACAGATCCTGG
CTTTGAGCAGAGCGACTCATACCCAGGATTCTTCTCGGTGTAGTTTTGTTCTTAGCAACATTGCTGCCTATGTCTTTCTGGTCAGGCCTGTGAT
CCCAGAAACTGGCTGGACACGGTTCTGCCCCAGGTGCCTCTCAGGGTCTGACTTCTACCGGGTTCTTGCCAATTCTGGATTTACAGTGTGGTTG
AGCCAGCTGGACTGATACTGGATGGGGGTCGTTTCTGAAGCATGGCTTACCCCCACAGAGCCGTCTAGACGGGCTCGTGCCTGGAGCTGAGTTA
GTACCTGTATAACACATTTCATTGTAAGCTGTAGAACCCAGATGGCCAGGGGCTTCCTGTTCCTCGCAGCTCCTGGGAGATACAGCCCTCAGGA
AGGGCGGGACCCAGAGCTGATCTCATATATTCAACTTTCTAATGTCAGAGGGATGGGTTTCCCTTCCTTCCGTTTTTGTTAAATGCCAGGATGT
CCACAGTCCTTCTCATTATTAGCAGAGCATCCCGTCCCACAAAGCGATCTGGGGACCTGCCCAGAGAGGAGCCTGCTACCTGCCTGCACCTATG
ATTCCCACGGCTTAGGCAACAGGACAGATAGGGTGGTTGGTGAACTGAACTAGGTCTTCACTGGGAGGCTTTTCTCAGAGGCGCCGTGTGCATG
GCGTACTTGCCTTGGGGCTCCTATTCCTCCTTGTTTC
MOUSE SEQUENCE—mRNA
GGCCCGACATGACGGGGCTGGAGCAGGACCCGGAGTTCGACTTCGATTTCCTCTTCGAGTTCGATCAGAGCGGCGGGGGCGCCGCGGCCGCAGA
ACACTACAGTTATGTGTCCCCTAGTGTCACCTCGACCCTGCCCCTTCCCACAGCACACTCTGCCTTGCCAGCAGCATGCCACGACCTCCAGACG
TCCACCCCGGGTATCTCAGCTGTTCCTTCAGCCAATCATCCCCCCAGTTACGGAGGGGCTGTGGACAGCGGGCCTTCGGGATACTTCCTGTCCT
CTGGCAACACCAGACCCAACGGGGCCCCGACTCTGGAGAGTCCGAGAATCGAGATCACCTCCTACCTGGGCCTACACCATGGCAGCGGCCAGTT
TTTCCACGACGTGGAGGTGGAAGACGTACTTCCTAGCTGCAAGCGCTCACCGTCTACAGCAACCCTGCACCTGCCCAGCCTGGAAGCCTACAGA
GACCCCTCCTGCCTGAGCCCAGCCAGCAGTCTCTCCTCCAGAAGCTGTAACTCTGAGGCCTCCTCCTACGAGTCCAACTACTCCTACCCATACG
CGTCCCCCCAGACCTCTCCGTGGCAGTCACCCTGCGTGTCTCCCAAGACCACGGACCCGGAGGAGGGTTTTCCCCGAAGCCTGGGTGCCTGCCA
CCTGCTAGGATCGCCCAGGCACTCCCCATCCACCTCTCCTCGGGCAAGCATCACGGAGGAGAGCTGGCTCGGTGCCCGCGGCTCCCGGCCCACG
TCCCCCTGCAACAAGCGCAAGTACAGTCTCAATGGCCGGCAGCCCTCCTGCTCACCCCACCACTCACCCACACCATCCCCCCATGGCTCCCCTC
GGGTCAGTGTGACCGAAGATACCTGGCTCGGTAACACCACCCAGTATACCAGCTCTGCCATTGTGGCAGCCATCAACGCCCTGACCACCGATAG
CACTCTGGACCTGGGTGATGGGGTCCCTATCAAGTCTCGAAAGACAGCACTGGAGCATGCGCCCTCTGTGGCCCTCAAAGTAGAGCCAGCTGGG
GAAGACCTGGGCACCACTCCACCCACTTCTGACTTCCCACCCGAGGAGTACACCTTCCAGCACCTTCGGAAGGGTGCCTTTTGCGAGCAGTATC
TGTCGGTGCCACAGGCCTCGTATCAGTGGGCGAAGCCCAAGTCTCTTTCCCCGACATCATATATGAGCCCATCCTTGCCTGCCCTTGACTGGCA
GCTCCCGTCACATTCTGGTCCATACGAGCTTCGGATCGAGGTGCAGCCCAAGTCTCACCACAGGGCTCACTATGAGACGGAAGGCAGCCGGGGG
GCTGTGAAGGCTTCAGCTGGAGGACACCCCATTGTGCAGCTACACGGTTACTTGGAGAATGAACCTCTCACGCTACAGCTGTTCATTGGGACGG
CTGACGACCGCCTGCTGAGGCCCCACGCCTTCTACCAGGTCCACCGGATCACGGGGAAGACTGTCTCCACCACCAGCCACGAGATCATCCTGTC
CAACACCAAAGTCCTGGAGATCCCGTTGCTTCCAGAAAATAACATGCGAGCCATCATCGACTGTGCTGGGATCCTGAAGCTCAGAAACTCTGAT
ATTGAGCTGAGGAAAGGGGAGACAGACATCGGGAGGAAGAACACCAGGGTGAGGCTGGTCTTCCGAGTTCACATCCCACAGCCCAATGGCCGGA
CGCTGTCTCTCCAGGTGGCCTCGAACCCTATCGAGTGTTCCCAGCGGTCAGCCCAGGAGCTGCCCCTCGTGGAGAAGCAGAGCACAGACAGCTA
CCCAGTCATCGGCGGGAAGAAGATGGTGCTGTCTGGCCATAACTTTCTGCAAGACTCCAAAGTCATTTTCGTGGAGAAGGCTCCAGATGGCCAC
CACGTCTGGGAGATGGAAGCAAAGACTGACCGGGACCTGTGCAAGCCAAATTCCCTGGTGGTTGAGATACCACCTTTCCGCAACCAGAGGATAA
CCAGCCCCGCCCAAGTCAGTTTCTATGTCTGCAACGGGAAACGGAAGAGAAGCCAGTACCAGCGTTTCACGTACCTTCCTGCCAATGGTAACTC
TGTCTTTCTAACCTTAAGCTCTGAGAGTGAGCTGAGAGGAGGTTTTTACTGAGCAGCCCCCCGAGGCTATAAGAGGATGTTGTTGTAAACAAAA
CAAAACAAAACAAAACATACCTGTAGCCTCTTCACACCACGTGATAGCCCTATTCACAAGACCAAGTCGCCCACCCCCTCAAAGAAAAGCGAAG
CCTGGGTGTGTTTTCCTGTGACTGGTGCATGCTGGGGTCATCACTTGCTCGCCTTTTGCAAATACAGCAGCGCGGCCAACCAAGCAGCTCTGCT
GCGCTCAGGGGCTGATGCGGTCTGGGGGTGTATATCTAACCTCTGTGAGTCTTTGGGTTAGAAGAAAGTATTTGTCAACGCAGTTTTGTAAGTA
GCTTCGAAAATAAGCCTGCCGTGGTCACTGGGGAACATACATGATGTTGTCCTCATGGTGACGCTTCTACACAGCGTGCGGTGTGTCTCCACTG
AATAATGCTGTCCCCTGGTGACGTGAGACTTTCAGATGGAAGCTCTTCTGCTCGAGTTTACTCATTTAGGGAATGGCTTCTTTCATTCAGAAGT
GATCGGCTCGCCTTTTCAACTTTCTAGGGTGTTTTATTTACGAAAATACCGTTTTTAACTGCTCCCCGCCCCGCAAGCTTCTAGAAAGGTGTGT
CCCAGGCGTCCAGGGTTTCCTGTGTGGTGCAGGCCATTCTCCTGCAGCAGGATGTATAAACAGAGAGCAGAGTCGGTTGTTATCCTGAGTTCTA
TTGTATTTTGAGTAAGCTAGGCTATGTCAACAACCTTTTTAAATTGCTACTTTTTTTTTTCCTCTAAAAACTTAAGATAGTCATGTAATTTAAG
AGGGAAGTTATACAATAAATACTAGCCATGAAAGCAGCCATATTGCTATCTTAGTAAAATCAAGGTGGTTTTGTTGTTGTTATTTTGTTTTGTT
TTTTGTTTTTTAAGGTTTCAAGGTTTTTTGTTTTTGAAGTGTAAAGGCATTTGGAACAGTTTAGACAGTACGAAAAGTTGGTATTAAAATTCTG
AAACCAATTGTCTTATCAGGAAACCCCTAGAAATGCCCTTTAAAAATGAGGACAATAGCTTTGTTGCATTCTCAAACAAGGACATCAGTGAAAG
GGCAGCAACTGTCTGTGCTGTGGGTGACCCCAGAACAGCGGCCCATCCCCCATCCCGTCTCTGCTCTTCAGATTATTTCACAGGCCTCTTCCTT
TCGGGAAATAATGCACACTCTCTCTTACAAAAAAACCAAACATTTGGTCTTTTATTTTATTTTATTTTATTTTTTGAAAGTGCAATGATTGTGT
CCTACCTATACTTCAAGCATGGTTGATCTAAGATTTTTGAAAGGTCTAAAC
MOUSE SEQUENCE—CODING
ATGACGGGGCTGGAGCAGGACCCGGAGTTCGACTTCGATTTCCTCTTCGAGTTCGATCAGAGCGGCGGGGGCGCCGCGGCCGCAGAACACTACA
GTTATGTGTCCCCTAGTGTCACCTCGACCCTGCCCCTTCCCACAGCACACTCTGCCTTGCCAGCAGCATGCCACGACCTCCAGACGTCCACCCC
GGGTATCTCAGCTGTTCCTTCAGCCAATCATCCCCCCAGTTACGGAGGGGCTGTGGACAGCGGGCCTTCGGGATACTTCCTGTCCTCTGGCAAC
ACCAGACCCAACGGGGCCCCGACTCTGGAGAGTCCGAGAATCGAGATCACCTCCTACCTGGGCCTACACCATGGCAGCGGCCAGTTTTTCCACG
ACGTGGAGGTGGAAGACGTACTTCCTAGCTGCAAGCGCTCACCGTCTACAGCAACCCTGCACCTGCCCAGCCTGGAAGCCTACAGAGACCCCTC
CTGCCTGAGCCCAGCCAGCAGTCTCTCCTCCAGAAGCTGTAACTCTGAGGCCTCCTCCTACGAGTCCAACTACTCCTACCCATACGCGTCCCCC
CAGACCTCTCCGTGGCAGTCACCCTGCGTGTCTCCCAAGACCACGGACCCGGAGGAGGGTTTTCCCCGAAGCCTGGGTGCCTGCCACCTGCTAG
GATCGCCCAGGCACTCCCCATCCACCTCTCCTCGGGCAAGCATCACGGAGGAGAGCTGGCTCGGTGCCCGCGGCTCCCGGCCCACGTCCCCCTG
CAACAAGCGCAAGTACAGTCTCAATGGCCGGCAGCCCTCCTGCTCACCCCACCACTCACCCACACCATCCCCCCATGGCTCCCCTCGGGTCAGT
GTGACCGAAGATACCTGGCTCGGTAACACCACCCAGTATACCAGCTCTGCCATTGTGGCAGCCATCAACGCCCTGACCACCGATAGCACTCTGG
ACCTGGGTGATGGGGTCCCTATCAAGTCTCGAAAGACAGCACTGGAGCATGCGCCCTCTGTGGCCCTCAAAGTAGAGCCAGCTGGGGAAGACCT
GGGCACCACTCCACCCACTTCTGACTTCCCACCCGAGGAGTACACCTTCCAGCACCTTCGGAAGGGTGCCTTTTGCGAGCAGTATCTGTCGGTG
CCACAGGCCTCGTATCAGTGGGCGAAGCCCAAGTCTCTTTCCCCGACATCATATATGAGCCCATCCTTGCCTGCCCTTGACTGGCAGCTCCCGT
CACATTCTGGTCCATACGAGCTTCGGATCGAGGTGCAGCCCAAGTCTCACCACAGGGCTCACTATGAGACGGAAGGCAGCCGGGGGGCTGTGAA
GGCTTCAGCTGGAGGACACCCCATTGTGCAGCTACACGGTTACTTGGAGAATGAACCTCTCACGCTACAGCTGTTCATTGGGACGGCTGACGAC
CGCCTGCTGAGGCCCCACGCCTTCTACCAGGTCCACCGGATCACGGGGAAGACTGTCTCCACCACCAGCCACGAGATCATCCTGTCCAACACCA
AAGTCCTGGAGATCCCGTTGCTTCCAGAAAATAACATGCGAGCCATCATCGACTGTGCTGGGATCCTGAAGCTCAGAAACTCTGATATTGAGCT
GAGGAAAGGGGAGACAGACATCGGGAGGAAGAACACCAGGGTGAGGCTGGTCTTCCGAGTTCACATCCCACAGCCCAATGGCCGGACGCTGTCT
CTCCAGGTGGCCTCGAACCCTATCGAGTGTTCCCAGCGGTCAGCCCAGGAGCTGCCCCTCGTGGAGAAGCAGAGCACAGACAGCTACCCAGTCA
TCGGCGGGAAGAAGATGGTGCTGTCTGGCCATAACTTTCTGCAAGACTCCAAAGTCATTTTCGTGGAGAAGGCTCCAGATGGCCACCACGTCTG
GGAGATGGAAGCAAAGACTGACCGGGACCTGTGCAAGCCAAATTCCCTGGTGGTTGAGATACCACCTTTCCGCAACCAGAGGATAACCAGCCCC
GCCCAAGTCAGTTTCTATGTCTGCAACGGGAAACGGAAGAGAAGCCAGTACCAGCGTTTCACGTACCTTCCTGCCAATGGTAACTCTGTCTTTC
TAACCTTAAGCTCTGAGAGTGAGCTGAGAGGAGGTTTTTACTGA
HUMAN SEQUENCE—GENOMIC
AAGGCCCTGACCGGTTTATAAAGAGCACCCATCTTCTCCGGCACCAGACGGCCCCAGCCTGGCATCTCGATGAGTGAAGCGTAATGAGCCAGAA
TTGCAGGATTAAGCTTCACTTGAAACTCACTCCGGTTCAAAACTTAATGGAAAAAATGCCTGGCAAAACTTGTTTGGAGCTTTATTGAACCAAA
ACACTTTAGAAACCGTTGGGGAAGCTCAGTGAACCCAGGCTGTGGTCCAGCCCCACGCTTTGTCTAGGGCAGGTTCCGTTCCCTCAAGCAGGTG
ATGGGAATCCCGGACTGGAGCCTGAGGCTGAGCAGCCAGAGGCCACACCGCCAGGGCCAGGCCACACCACCAGGGCCGGCCACACCGCCAGGGC
AGGCCACACCGCCGGGGCCAGGCCACACCGCCGCGGCAGGCCACACCGCCGGGGCCTGCCTCATCGCCCCACAGTCTGGAATGCTCTGCACACG
CATCAGAAGGAGAGTCGCTGAGCATCACAAAGGAAAATAGAAAGCGCAGCCTCACTGCCCAAGGCCGGGGCAGAGATGACTTGCCTTGTGTTAC
TGCCTAATTAAACAGATTTGGGTAAACAGATTTGGGTAAACCAAGTAGTTTAAAGAAAAATGTTGGAATATTGCCATTTGAAAAGTATTATTAT
TTTGCAAGAGGAAAACAATTGTGAGTTCACAGGGACAAACCCAAACTCTTGCCAGAAACTAAAAATGTGATTTATTTACCTCTCGACCAGCGTT
AGCAAAAAGAGCAGGCCTGCAGGATCAGGACGCGGCTCTGGGCCCTCCTGCCTCAGCCCTCCGGCACTGTGAGAGGGGCACACACCCGGGGTGG
GTGTGCTTGTCCTGCGAAGTGCAGAACAGAGAAGAGGCTCCGAAGCACAGAGCGCCTCTGCCCTGGGCTTTGCACACATTCCTGACTTCTTAAG
ACACAGCTGTGCAGGACCATTGCATCTCCGTGAAGCTGTCCTCATTGGCCTCAGGCTGACCCGGGCCCCTGGCACTCGAGGGCCAGGGAAGGGG
TCATGTCTCCCTGAGACACACATGTGGCATCCTTTCCCCGCCCCCGTGCACACCAGTGGAGTGTCAGCTCAGCCCTGTTTGTGCTTTCTAAGAG
AAATCGAGGTTTAAAGGGGACTTTTTTTTGCCTAGCGTGGTGTGTGAGGCCCAGATGGCTGCAGCAGCTGTGCCGGGCTTGCCCGGCCTCCTCA
CCGGGAGCTTCCCTCTGGCTAGAGTTGCTGTTTCATCTGCCTGTGTCCCTGCGGCCCCACCCCCATGGAGGAAGCGAGGACCCTGTTCAGCCAT
GGCCTTCCTGTGAATTAGGCCTCCTTCAGGTGCAAGTGACAGAATCCACATTAAACTCGATTGAGCAGAAAAGGGAAGTTGCTTCCTCACCAAG
GTGAAGACCCCAGGGGAGGCTCTCAGGTCCCACTAGACTCAGGGGCTCAAGCAGGGCATGGAATCGGCCTCTGGAGTCCCTGTCTCCATGGCAG
CCCCGGGGTCCACATCTTCCCCAGGAGGGCACTCTTCAGGCCCCGGCTTCAGAGGAAGAGAACGCCATTCCCTGCGGCTGTGGGGCAGCAGCAG
GCACACCTCCCTGGCCTCGGGTGGGCTCTGCCCCTGCGTGGGCTATGGCGGGAGTGGGAACATTCCCGTGACCCCCCTGGAGTTTAGGCCAGGC
AGTGGAGGTCCTCGAGCAAAGGTCATCCCACAGGGAGTGCTCTGTCCAGTAGGAGCATGGCGCCCATGTCAGGGCACTGGCCTGGAAGGGAGCG
TCTTAGTGGAGGCTGTGGGTGCTGCCAGGCCACCTGAGAGGGGACATGCATTGTAGGAAAGGCCACAGCGCACTGTGACAGGTGTGGTATCCTG
GAAGGAATGAAAAACACTGCCCGGCCAGGCGCGGTGGCTCATGCCTATAATCCCAGCACTTTGGGAGGCCGAGGCAGGTGGATCACGAGGTCAG
GAGATCGAGACCAGTCTGACCAACATGGTGAAACCCCGTCTCTACTGAAAATACAACAATTAGCCAGGTGCGATGGTGGGCACCTGTAATCTCA
GCTACTCGGGAGGCTGAGGCAGGAGAACTGCTTGAACCAGGAAGGCAGAGGTTGCAGTAGCCGAGACTGTGCCATTGCACTCCAACCTGGGCAA
CAGAGCGAGACTCCGTCTCAAAAAAAAAAAAAAAAGAAAAAAGAAAACCACTGCCCTTTGGGTTGGTTTCCTGGGGCTGCCATCACAAATGACC
ACAAAGTGGGTGGCTTGAATGGCAGAAACATGTCCTCAGTTCTGGAGGCCAGAAGGCACAGTCGAGGGTCAGCAAGGCCAAGTGCCCTCTGGAA
CCGGCCACGGAGGTCCCTTCCCTTCCTCTTCCAGCTCGTGCTAGCCCCAGGTGCTCCTTGGCTCGTGGAGCCATCATTCCAGTCTCTGCCTCTG
TCGGCTCACCACATTCCCTTTGTCTGTCTTCTCCTCCTGTGAGGGCACCAGTCATCATTGGGGTCCCCTTAACTGACACCATCTTAACTAGTTA
CAACTGTAGAGATGTCACTTACCAAATTAGGTCTCATTCCCAGAGACCAGGGGACTTCAATGAATCGTTTTGGAGGACGCAGTTCAATTCACAA
CAGCATTGTTCTGAAATAATGATTAAGCTGTCTTGAGCCATTAGCAGGTGCCTCTCATTGATCTACCCTGAGAGGTGAAGGCCGTTACTATTGG
CTCCCGTAGGTGTACCGGGGACTGGAATCCAAACTCGGGCTGTGGGCAAGCGCCTTCTCACACGAGAGCTCACGTGCTCTGTGAACCCGTCCCC
GGGAAACTGGTCAAGTTAAAAACCCCCAGCCATTGACAGTCTCTGGAAATGGTCCTAAGGACACGCAGCAAGTGAAGACACATCTATTGAAAAA
GACCTGATTTTTTAAAAAACCATCTTTACTAGGAAAGGTGAATGTATTTGGTATTTGAACCAAAGCCACCCCCTCCTCCCCTCCCCCTGCCACT
CCACCAGCAGGTCTGCTGCAGCTGAGGACACAGGTGGGTGGGGGAGAGTGACTCTGGGAGGGCGGGATGTCGGTGTTTCTCATCCTGCCCCATC
TGCCTGTTGCTGGGGCTGCTAGGTCCTGGGGAGTCTGGTGGAGGGGTGGGGGCTCCCTTCTTCCCGGTCCCCACACTCATGGGTGGGAGGCTGG
GCCTTGGGTGTGGCTCACTGAGAAGACAGGGTGCAACTACCCTTGCCCCCGCTGACAGGGCAGTGATTCCAGGCCAGGGGAGGCCAGTGGGGTC
TCAGGATGCTGCCCCCGTCAGCACTCAACTCCTGGAGGTGGAGGCGTCACTCACACTGAGGCTCGGCACTGTCCCCATCCCCAGCTCCAAAGCA
TTGGCTCAGAGATTTTGCCTGGAGTGAGAAGCAGTAAGTAAAAGAGATAGCTTCTAATCTCCTCCCAAAAGAAACGACTTCATTTTCAGCAGAA
CATGGGAGAAGGTGAAAGCTTAGGGTCCCCTCGAAAACATGGAGGTTGTCATCAATGGCATTTGGGACATTCATGGATTTAATGAAGATTTAGC
CTAGATTTAGGAATGTGATAGCTGTGAGGGGCCTCCAGGGGTCAAAACAAATATCACACATGGACATCAGAAACTCTTGCTTCAAAGAAGGCAC
TATTTAGTTGGAGTAGTTTGTAGAGTAATTTATGCCTCCAGATATTGTTAAAAACAATAGAGCAATCCAATGGCAGCCGTGGAATTTAACAGCT
GGGTATGGTCAGGGAAAGAGAGGAAGAGATCTCTATCAATGTGGTCGGGGAAAGAGAGGAAGAGATCGCTCTCAAAATCCTGCATTCCAGGGTG
ACTCTGGGCACAGGTAAGACTCCTCTCCCTAAGGAGCAAGCCAGAGGCATAACTCTGCTGGTGGAGGGGGCAGTGTGTGGAATAGCTTCACTGC
AGTCATCTCAGAAGTCACAAGACAAGTAAATAAGCAAATAACAAGCCCCACACAGGGGGACCAGTATCCAGAGCTGCTATAATACATTGTCTAA
AATGCCCAGTTTCCAACAAAATAGGAGGCATGCAAAGAAACACAAGAGTATGACCCCCACATTTAAATTTTTTAAAAAGCAGACAACAGAAACT
GCCTGGGGAATGACCAGATATTGGATTTAATGGGAAAAGGCCAAAATATCCCTTATATGCTCAGAGAACTAAAGTAAATCTTGATTAAAGAAAG
CAGGACGACAATGTCACATCACGTAGAGACTGTTGATAGAATGTATAAAAAATAACCAGTGGAAATTCAGGAGTTGGAAGGCGCAGTCACTGAA
GTGAACCATTCACTATTGGGGCTCAACAATCGATTTGAACTGGCAGAAGAAAGAAAGTGAATTTGAAGATACATCAGTAGAGAGTATGCAAGCC
CCGAACACAGAGCAGATAGAATGAAGGAGACCAAGGGGAGCCTCGGAGAGCTGAGGGGCACCAGGGACGCCCTCCAGGGCACCAGCCCACACAG
GGGGTTCACTAGAAGGAAAGGAAAGAGGAAAAAAGGGATGCAAAAATATTAAAAGAAATAATGGTTGAAAATATCGCAGATTAGTTTAAAAAAA
TAACCTACAAAACCAGGAATCTCAATGAACTCCAACTGGGGCAAGCCTAGAGAGGCCCACAGACCAACACATTATGAGTAAAAATGCTGAAAGT
CAATAATAAGGAGAAAATCTCAAAAGCCAAAATAATAAAATAAGGTATCACTTACAAGGGAACCCCAATAAGGCTAACAAGTGACTTCTAAGCG
GCAACGATGTGAGCCTGAGGCAGTGGGATAACAGCCAAAGGAAAGGAGAGAGGAGGAGAGGGGAGGGGAAAGGAGGGGGAGGCAGAGGGAGGCA
GGGAGGGAGGAAGGAAACCTATCAATCCCAAATCCTATGCGCAGCAGAGCTTTCTTTCAAGAATGAAGGTGAAATAAAGACTTTTTCCGACAAA
CTGAGAGTTTGTTGCCAGCTGACCCACCTTACAAAAAATACTAAAGGAAGTTCTTCAGGCAGTGAGCAAGAAACTTCAGAGTAATTTTTGAAAT
CACATGAAAAAAACAGAGTGCCTCTTAAGGTAATTACGTAATTTCATAAGACAGTACGAATACATATTTTTCTCTTTTTATAACTGGTGTGAAA
AGTGATTGTATAAAATAATGTATATAAAATATAATGTTGGGCCTATAACTTATAGCAATGTAATATATGTGTAGTGTATTGCTAATAACAATAC
AAAGAAAGGGAATGAGAACAAAGCTATATTGGACTAAAGAAATAACTACAGATGGTAAAATAATGGTTATCACAATGTATTCTTAGGTTTGTAA
CATTACTGTTTACAATGTAGAATGTATAAAAGCGGGAAGGGAATGGAGCTAGCTACATAGGGATAGTGTTTTTGTGTGTCACTGGAGTCGAAAT
GTATATGGTACATACTAGAGCAATCACTAAAACAGTAACAAAAAAAGTTTAAAAACTCAGTAGAAAATAATTCACTTAATGCAAAGAAGTCAAT
AAAGAAATAAATGAGGGGAAGACATAAGAAAAATAGAAAATGAAAAGTAAAGTGGAATAGAAATGAAAAGTAAAGTTCAATAATAACATTAAAT
GTGAGTGGATTTAACAACCAATCAGAAAGCAAAGGCTGTCAGACTGAATTAAGAAAACATGACCCAACTTTATGCCGTCTAGAGGAGACATACT
TTCTACTCAAAGCTACACACATAGACTACAACGATGGGAAAAGACGACACACCAACAGCGACTTCAGGAAAGCTGGAGTGGCTGCTAATGTTAG
ACAAAATAGGCTTTTTAAAAAAGGTTTTATTAAAGAGGAATGTTTCGTAATGATAAAAGCACTAATCTGTGAGAAAGATACAACAATGATAAAC
ATACGTGCAGCTAATAAGAGAGCTCCAAAATCTATGAAGCAAAAACTCACAGAATGAGGGGAGAAGCAGTTCTACAACAGAGAATGGGGACTTC
GATACTCCACTTTCAATAATGGATACAACAACCAGGCAGATAACAAGGCAACAGAAGGCCTGAACAACAGTATAAACCAATTAGACCTACCAGA
TATCTATAGCTAGCACACTCCACCCAACGACAGCAGAATACACATTCTTCTCAAGCGCACAAGTAACATCCTCCAGGATGGGCCATGTTCTAGG
CCATCAACAAACTCAGGTGGTTTGAGGCCAGAGGCCTCTCTTTTAACCACCACACTAGGGCCTTCGGAGGAGGCAAGCAGAGAGTTGTCCAAAG
AGGCCCTCAGGACTGGGTGCAGTGGCTCATGACTGTAATCCCAGCACTTTAGAAGGCTGAGGCACAAGGATCTTTTGAGCTCAGGAGTTCAAGA
AATGAGCACTTATCCACTGGGCGCGGTGGCTCACGCCAGTAATCCAGCACTTTGGGAGGCTTAGGCGGGCGGATCAAGAGGTCAGAAGCTCAAG
ACCAGCCTGACCAACATGGTGAAACCCCGTCTCTACTAAAAGTACAAAAATTAGCCGGGCGTGGTGGCGCACACCTGTAATCCCAGCTACTTGG
GAGGCTGAGGCAGGAGAATCACTTGAACCCGGGAGGTGGAGGTTGCAGTGAGTGGAGATCACACCATTGCACCCCAGCCTGGGCAACAGAGCGA
GACTCCGTCTCAAAAAAAAAAAAAAAAAAAAGAAAGAAAGAAAAAGAAAAAAAAAGTGAGCATGTATTTTGCCAGAGTCTGGAGATTAGAATTA
AATTAGCAAACCAGAATTATAGAAAAAGCTATTTACTTTTAAGTAAACAGCTGAGATTTTTTTTTTTAAGTCAGTGTGAATGAAGCTCACAGCC
ATGGTTGGAGCTGAGAAAGAAGGATTTCCCTTTAGTTATGCACCTGTGTCAGCACCTTCTGACTTTCCTTCTAAAGTCTGGGGTGTTCCTGAGG
ATCCGTAAGTTTGGGGTTCAGGGTTTCTACAGCATGCTGTTACTTGTGAAACATCTCTTTAACCATGTCCCAGAGTTGCCCAGGAGTTTAAGAC
CAGCCTGAGCAACATAGCAAGACCTCATCTCAACAACAACAAAAATTAGAAATAAATTAGCCAGGTGTGGTGACATGTGCCTGTAGTCCCAGCT
ACTCAGAAGGCTGAGGCATGAGGATCACTTGGGCCCAGGAAGTTGGGGCTGCAGGGAGCCCTGTTCATGCCGCTGCACTCCAGCCTGCAAGACA
GAGCAGAAAAAAAGAATCAGGATCCTGGGCAGAGGGAGGAGAGGGGACCGGGGTCCAGCAAGCACTTGGGGATTGACTGAATGGCGTTGGGGAG
AGATGACTCCAAAGTCCTGGAGTGGCTGAGAATGACTGCGAGTGGCTTTTAGGTGGGGAGGTTCCTGCCTGGCCACTCCGGGAGGGGACGTGGG
GCTGAAGGGTATCAGGTGCCGTGCTGAGCAGTTTGGCCTTGATCCTAATGCCCTGGACACACGTCTAGGGTAGGAAAGTTGACTGATCCATTGG
TGATCTGAGTTTTTAGACATGGTGGTAGTCCATGAGGTGGGTGTTCATGCTAAGAGTTTAGACAGGGAAACCTATGAAGCCCTTAGCAACCCTC
CAGGGAAGGGGCGTGGTTAAAGAGATGTTTCATAAGTAACAGCATGGTATAGAAACTCTGAACCCCAAATGTATGGGTCCTCAGGAACACCCCA
GACTTTAGAAGGAAAGTCAGAAGGTGCTGACACGGGTGTATAACTAAAGGGAAATCCTTCTTTCTCAGCTCCAACCATGGCTGTGAGGTTCATT
CACACTCACTTAAAAAAAAAAATCTCAGTTTACTTAAAAGTAAATAGCTTTTTCTATAATTCTCGTTTGCTAATTTAATCCTAGTCTCCAGACC
CTGGCTAAATAAATGCCCATTTCTCCAGATGGTCTCAAGAGTCTCTGGACATCGTGGGGGCCCTTCCCTGTTGGTTGGAAGGTGCCTCAGGAAG
AAGGGGGTGGATTCTGAGTTGAGTCAAAACCTCAAAGACCCCTGATGGGAAAAGCTCTCAAGTGACCACCGCTGTGGGCCAGAATGCAAAACTG
CAGGAACAGAACATTCGCAGGAACAGAACACAGTCGTATTAAGTGATTTTCCCGAGCAGGAAGTGGCATCTGGCCTGCGGTTCAGTAGGGGGAG
GAAAAGGGTGGGCGCACCTGCCCCTGGCTGGCGCACCTGCCAGGTAGCCCCACGCGGCACCGCGTGTGCCGAGCGCCCCTGAGGATGGAAAGCC
CCACGCGGGGCAGGTGGCACCCACCCCTCCGAAGACGGGACGGGATGGAGCGTTGAGCTTCGGGGCAGCTCCGGCCCGGCCCGCGCTGGAGACG
CCCGCATCTGCCAGGATGGCGTCTCATAGCCCTGGTGCTCACACATGACGCCAGGAAGCCCCAGCAACAGTGACCGCCCAGGCTCTAGAAAATA
TTGGACGGGGTGGATGAACACCCAAGTGCGCTCCAGGAGAAGGGATTTGGCACCCCAAGGGGCTTTTAAAACGGTAAGCTTCTAGGGGTGTCTT
TGCCCCCAATAATCCATAGAAACAACAGTCATCTAAAAATAGTCTTGTTTTCTGTCCTAAGCTCCTTTTAACTTTGTTAGTCATCACCAATCCT
AAAATAAAACCCGTGTAACGTCTCCCCTAGTAGCGGCTATAAACAAACCTACGAGGAGGCAGGAGGAAGAGGAAAGGGGCGCAGGGCGCTCGGG
GAGCAGAGCCGGGGGCCCGCGGTGGCCGCAGAGGCCGGGCCGGGGCGCAGAGGCCGGGCGAGCTGGCCGCGCTCTGGGCCGCCGCCTCCGGAAC
TCCCTGCGCCTGGCGCGCGGCCACCGTGGTCCCGGCAACGGCATTAAACAGAGGGAAACAGACCCGGGATTCCGTCACCCGGGCGGGGGGATAA
GGACGGCTTTGAGAGCAGACAGGAAAAGGGAGCTTTTCTGCATGGGGTGAAAAAATTATTTATTGAAGGAGGAGGAGGCGGCAGCGGAGGAAGG
GGAGGGGCGGGAGGAGGAGGAAGAGCCGGCCGCCCCCGCCCCGGCCCCCGCTCCTCAGGAGCCAAGGGCAGCCTCGCCAGGTCGGTCCCGGGCT
CGAGGACCGCGGCTGGGGTCGAGGGGCTCAGTCTCCCACGTGACCGGCTGGGCGCGCCCCGCCAGACCCGGCCTCGGGATTCCCTCCTCCCGGC
GAGTCTCCGCCCGCCCCGTCCTGGAGGTGGGGAGAAGGAGGGCGGGGCGGGGGGGACGGAAACTCTCCCCGCCAAATCCTGGCCCCAGGCCTGG
GGACACTCGCGGCGGGAAGATTTGGAGGGGAGGGGAGGGGGAGGGGCGTGGGGGCGCGGCCTCGCTGGAGTCCCCCTCCCCCCCCGACCCCCGC
CCACCGGCCTGCGCGTCCTCCCGCGGCNNNNNNNNNNNNNNNNNNNNNNNNNNNNNNNNNNNNNNNNNNNNNNNNNNNNNNNNNNNNNNNNNNN
NNNNNNNNNNNNNNNNNNNNNNNNNNNNNNNNNNNNNNNNNNNNNNNNNNNNNNNNNNNNNNNNNNNNNNNNNNNNNNNNNNNNNNNNNNNNNN
NNNNNNNNNNNNNNNNNNNNNNNNNNNNNNNNNNNNNNNNNNNNNNNNNNNNNNNNNNNNNNNNNNNNNNNNNNNNNNNNNNNNNNNNNNNNNN
NNNNNNNNNNNNNNNNNNNNNNNNNNNNNNNNNNNNNNNNNNNTTATTGAAGGAGAGGGGCGGGCGCTCGGCGACTCGTCCCCGGGGCCCCGCG
CGGGCCCGGGCAGCAGGGGCGTGATGTCACGGCAGGGAGGGGGCGCGGGAGCCGCCGGGCCGGCGGGGAGGCGGGGGAGGTGTTCTCCAGCTTT
AAAAAGGCAGGAGGCAGAGCGCGGCCCTGCGTCAGAGCGAGACTCAGAGGCTCCGAACTCGCCGGCGGAGTCGCCGCGCCAGATCCCAGCAGCA
GGGCGCGGGCACCGGGGCGCGGGCAGGGCTCGGAGCCACCGCGCAGGTCCTAGGGCCGCGGCCGGGCCCCGCCACGCGCGCACACGCCCCTCGA
TGACTTTCCTCCGGGGCGCGCGGCGCTGAGCCCGGGGCGAGGGCTGTCTTCCCGGAGACCCGACCCCGGCAGCGCGGGGCGGCCGCTTCTCCTG
TGCCTCCGCCCGCCGCTCCACTCCCCGCCGCCGCCGCGCGGATGCCAAGCACCAGCTTTCCAGTCCCTTCCAAGTTTCCACTTGGCCCTGCGGC
TGCGGTCTTCGGGAGAGGAGAAACTTTGGGGCCCGCGCCGCGCGCCGGCGGCACCATGAAGTCAGCGGAGGAAGGTAAGCCCCGCGCGGCCTCC
GCCCCCGGACCCCTGCGCCCCCCACGGCCCGGGCCGCGCCCCCCGACCCCGCCCCCGTCGCCCGCACGGAGGGGTCCGGGCCAGAGAACGAGGT
CGGCCGGGTCTGTGCGCCCAGGGAGGGGCGCGGCGCGGACCGGGAACGGCGTCCCCCAGCTCCCAGCAGCCCGGTTCCGAGCGCGCCTTCTGCC
AATAGGTGTCTCCTCTGCCCCAGCGCTGAGGGCGCGAGGCGAGGCCGCCGCGGGTCCCGCCGAGGAAGCGGCTCGCAGGCCGGCGATTTGGGGA
CGGGCGAGGCTGGGCCGTCAGGACCACAGAGGGCACGTGGGAGGGAGGAAGGGAGGCTTCCTTGGGAGTGAAGGATGCCCCGTGTCTTCCTGAG
CGAGGCAGAGCCACCCTCTGGCGCCAAGATCGCGGTTTGGGGGTTCTGCGCCCCCCACCCCCACCCCGAGCTCGTGGCGGCGTCTCCCTCGCGC
CGCGCCCCTGAATTCCCCAGGGCCGAGCCCGTCACGCCGGCTCCTGGACCTGCAGGACCAAAAGATCCAAAGCGCGGCCGCAGCACAGCCCCGA
ATTTAAGCCATTTTGAAATCCTATAGGCAGGAGTTCCAGCCAGAGAAGATGTTTCAGGCAAGTTTGAAAAGGAACCGCCAAGTTTCGAGCTGCT
TCTTTATAGTGAAAAAAAGATGGCACAGTGTGGGTCCCTGAAACCCGGTGTGGGGGGCGCTGAGACCCCCCTGCGGCGCATCTCACATTCCAGT
CCCCCACCTTAGCCCGTCCCCGGCACACACCCCTGGCGATGCCGGGTGGGCTCCTGCAAGTGGCTTTGAAAATACCCTTGCAGAGGTGTGAGCA
TACGAGTTAGGGATTAGGGATTGCAATGCTAATGGAAATTGGAAGACGCTTTTCCAAATTCCTTACCAGCTCTGAAATATTTTATATAATTTAT
TTAAAGAGCGCCAGCACACCTGCCAACATATGTACTTCATAAGGGCAGACGTCCTTCCGAGCGCTGCCGCTTCCTGCGCGACCCTGATAACTGC
GGGGCTTGCTTGAGAACCGGGCTCCCCCAGCTCTGGAAAACTCGCTGGTCTTAGCAGAGCTGAGCACAGGGCCGTGAGCTCCACGGAGGGGGGT
CCGTGTGGTCGGTGCCCTGACGCTTCACGGGACGGGAGGTAGACACCACTTCATCCCAATGTTAGAAAATGTTGACATGTTTAAACCATGTCCC
GTGTCAGTGTTTTACACAATGTGCTCTTGCTAGTAGCAGAGTTTAAAAAATTTTTTTTTGTTGGAGTTTCGGTTTTAAATCCTGGGACACTTAC
GCCGCAGTGTTCATTATCACTCCCTTTAGAAAGGCAGGTCTTTCCAAGTTCAGATCTCTGTACCTGAAGAGCCGGTGGCCGACCTGTAGTAAGG
AGCCCCTTTCTTTTACGCAAGGAAAAAACACGACGGGGCAGTGGCTAGTTTTCGTGTTTCCTACTGAAGAAAATAAGCTCGAAAAGGTCCCTGC
TGCAAGGCAGTGCGCCGGGCAGCGACGCCCGACCGACATGGGTGTATTTTATGAGGGCTGCAGAACTGGGCCAGCCGGAAAGTGTGATCTAGTC
CTTGATACACACAGGCCGGCAGCATGGGGACACGCGTGGTTTCCACACCAGCCATCGCTGAGACCACCGGGAAGAACTCTGAGTCCTTCTGAGT
AGGCCCCACGAGGCCATTCCTGGCCCATCTGAGGACCTGGGCGCCTCCCCTGCGTCCCTCGGGTTTCGGGACCATCTGGGTGGAAGCTCATTAG
GCGTCGTGGTTCCTGAAGGCCCCGGGCTTGCTTCCTCATGGAGAACGCAGAGAAGTACAGGCCTGTAAGTAGCCACCCAGTCAGAAGTCGCTCC
AGACACAATGCCCCACGGGCTGGGGCCAAACAAAGCTCACCCTGTTCTCTGCCACTTAACTTCACAGCGTTGTTTCCCAGCTCAGATTAGAAAA
TGGCAGGGCGCTGGCACCCCGCTTCATCACACCCAGCGGGGCTTCTCTCTCCGCAGACATCCCCAGCCTCTGGGAGGATGCGTCCAAGCTAAAC
ATTTCCATGGAGACACCCAGTGTCTGTGGAACGGGCAGCTTTGAATCTGGACCAATAGCTCTGAACCATTTGCAGGAAGGAAGCCCAGCACTGG
GGCGGGGGAAGGGGGGGCTCCTAGGAGCAGCAGGGGAGCCGCCCCACCGACCCCTTCTCTGGGATGGAGACCAGTGCAGTCCTAGGACAGCAGC
AGTGACCCTCCATCCCTGCAGGGCCCGCGGCCTGGGGCCACCAGCAGGCGGGACAGTTTAGCAAAAAGTTTTAGTCTAAACAGATGATAAGGGC
TGTCATTTGTGTATAATTTTATGGTGGGGGTAAAAAGGTGGCTGGAGTTTTAAAAACAATGTACAGGCCGGGCGCCGCGGCTCACGCCTGTAAT
CCCAGCACTTTGGGAGGCCGAGGCAAGCGGATCACGAGGTCAAGAGATCGAGACCATCCTGGTCAACATGGTGAAACCCCGTCTCTACTAAAAC
TACAAAAATTAGCTGAGAGTGGTGGCGGGTGCCTGTAGTCCCAGCTACTCTGGAGGCTGAGGCAGGAGAATCGCTTGAACTCGGAAGGCGGAGG
TTGCAGTGAGCAGAGATTGCACCACTGCACTCCAGCCTGGGTGACAGAGCGAGACTCCGTCTCAAACAAACAAAAACCTGTACAATGGAAAGAG
AATCAAACGTTGTGGCTTCTCAACAGAAAACAGAACTTCCACTTGCCCAAGGTCGGCAAAAGCAGCAAAACTACAACAAAACAACGCTCCAACA
TCCATCCCAAAGTCAGAAGTATTATTAGAAACTAAATCAGGCCACACGGAACGATGGCTTATCACTCGAGAAAACCAGCCAGTGAAAGGGTCGC
GGGAGAAGCCCGGGGACGACCCTGGGACTGGAGGGTTTCTCGCCTCTGNNNNNNNNNNNNNNNNNNNNNNNNNNNNNNNNNNNNNNNNNNNNNN
NNNNNNNNNNNNNNNNNNNNNNNNNNNNNNNNNNNNNNNNNNNNNNNNNNNNNNNNNNNNNNNNNNNNNNNNNNNNNNNNNNNNNNNNNNNNNN
NNNNNNNNNNNNNNNNNNNNNNNNNNNNNNNNNNNNNNNNNNNNNNNNNNNNNNNNNNNNNNNNNNNNNNNNNNNNNNNNNNNNNNNNNNNNNN
NNNNNNNNNNNNNNNNNNNNNNNNNNNNNNNNNNNNNNNNNNNNNNNNNNNNNNNNNNNNNNNNNNNNNNNNNNNNNNNNNNNNNNNNNNNNNN
NNNNNNNNNNNNNNNNNNNNNNNNNNNNNNNNNNNNNNNNNNNNNNNNNNNNNNNNNNNNNNNNNNNNNNNNNNNNNNNNNNNNNNNNNNNNNN
NNNNNNNNNNNNNNNNNNNNNNNNNNNNNNNNNNNNNNNNNNNNNNNNNNNNNNNNNNNNNNNNNNNNNNNNNNNNNNNNNNNNNNNNNNNNNN
NNNNNNNNNNNNNNNNNNNNNNNNNNNNNNNNNNNNNNNNNNNNNNNNNNNNNNNNNNNNNNNNNNNNNNNNNNNNNNNNNNNNNNNNNNNNNN
NNNNNNNNNNNNNNNNNNNNNNNNNNNNNNNNNNNNNNNNNNNNNNNNNNNNNNNNNNNNNNNNNNNNNNNNNNNNNNNNNNNNNNNNNNNNNN
NNNNNNNNNNNNNNNNNNNNNNNNNNNNNNNNNNNNNNNNNNNNNNNNNNNNNNNNNNNNNNNNNNNNNNNNNNNNNNNNNNNNNNNNNNNNNN
NNNNNNNNNNNNNNNNNNNNNNNNNNNNNNNNNNNNNNNNNNNNNNNNNNNNNNNNNNNNNNNNNNNNNNNNNNNNNNNNNNNNNNNNNNNNNN
NNNNNNNNNNNNNNNNNNNNNNNNNNNNNNNNNNNNNNNNNNNNNNNNNNNNNNNNNNNNNNNNNNNNNNNNNNNNNNNNNNNNNNNNNNNNNN
NNNNNNNNNNNNNNNNNNNNNNNNNNNNNNNNNNNNNNNNNNNNNNNNNNNNNNNNNNNNNNNNNNNNNNNNNNNNNNNNNNNNNNNNNNNNNN
NNNNNNNNNNNNNNNNNNNNNNNNNNNNNNNNNNNNNNNNNNNNNNNNNNNNNNNNNNNNNNNNNNNNNNNNNNNNNNNNNNNNNNNNNNNNNN
NNNNNNNNNNNNNNNNNNNNNNNNNNNNNNNNNNNNNNNNNNNNNNNNNNNNNNNNNNNNNNNNNNNNNNNNNNNNNNNNNNNNNNNNNNNNNN
NNNNNNNNNNNNNNNNNNNNNNNNNNNNNNNNNNNNNNNNNNNNNNNNNNNNNNNNNNNNNNNNNNNNNNNNNNNNNNNNNNNNNNNNNNNNNN
NNNNNNNNNNNNNNNNNNNNNNNNNNNNNNNNNNNNNNNNNNNNNNNNNNNNNNNNNNNNNNNNNNNNNNNNNNNNNNNNNNNNNNNNNNNNNN
NNNNNNNNNNNNNNNNNNNNNNNNNNNNNNNNNNNNNNNNNNNNNNNNNNNNNNNNNNNNNNNNNNNNNNNNNNNNNNNNNNNNNNNNNNNNNN
NNNNNNNNNNNNNNNNNNNNNNNNNNNNNNNNNNNNNNNNNNNNNNNNNNNNNNNNNNNNNNNNNNNNNNNNNNNNNNNNNNNNNNNNNNNNNN
NNNNNNNNNNNNNNNNNNNNNNNNNNNNNNNNNNNNNNNNNNNNNNNNNNNNNNNNNNNNNNNNNNNNNNNNNNNNNNNNNNNNNNNNNNNNNN
NNNNNNNNNNNNNNNNNNNNNNNNNNNNNNNNNNNNNNNNNNNNNNNNNNNNNNNNNNNNNNNNNNNNNNNNNNNNNNNNNNNNNNNNNNNNNN
NNNNNNNNNNNNNNNNNNNNNNNNNNNNNNNNNNNNNNNNNNNNNNNNNNNNNNNNNNNNNNNNNNNNNNNNNNNNNNNNNNNNNNNNNNNNNN
NNNNNNNNNNNNNNNNNNNNNNNNNNNNNNNNNNNNNNNNNNNNNNNNNNNNNNNNNNNNNNNNNNNNNNNNNNNNNNNNNNNNNNNNNNNNNN
NNNNNNNNNNNNNNNNNNNNNNNNNNNNNNNNNNNNNNNNNNNNNNNNNNNNNNNNNNNNNNNNNNNNNNNNNNNNNNNNNNNNNNNNNNNNNN
NNNNNNNNNNNNNNNNNNNNNNNNNNNNNNNNNNNNNNNNNNNNNNNNNNNNNNNNNNNNNNNNNNNNNNNNNNNNNNNNNNNNNNNNNNNNNN
NNNNNNNNNNNNNNNNNNNNNNNNNNNNNNNNNNNNNNNNNNNNNNNNNNNNNNNNNNNNNNNNNNNNNNNNNNNNNNNNNNNNNNNNNNNNNN
NNNNNNNNNNNNNNNNNNNNNNNNNNNNNNNNNNNNNNNNNNNNNNNNNNNNNNNNNNNNNNNNNNNNNNNNNNNNNNNNNNNNNNNNNNNNNN
NNNNNNNNNNNNNNNNNNNNNNNNNNNNNNNNNNNNNNNNNNNNNNNNNNNNNNNNNNNNNNNNNNNNNNNNNNNNNNNNNNNNNNNNNNNNNN
NNNNNNNNNNNNNNNNNNNNNNNNNNNNNNNNNNNNNNNNNNNNNNNNNNNNNNNNNNNNNNNNNNNNNNNNNNNNNNNNNNNNNNNNNNNNNN
NNNNNNNNNNNNNNNNNNNNNNNNNNNNNNNNNNNNNNNNNNNNNNNNNNNNNNNNNNNNNNNNNNNNNNNNNNNNNNNNNNNNNNNNNNNNNN
NNNNNNNNNNNNNNNNNNNNNNNNNNNNNNNNNNNNNNNNNNNNNNNNNNNNNNNNNNNNNNNNNNNNNNNNNNNNNNNNNNNNNNNNNNNNNN
NNNNNNNNNNNNNNNNNNNNNNNNNNNNNNNNNNNNNNNNNNNNNNNNNNNNNNNNNNNNNNNNNNNNNNNNNNNNNNNNNNNNNNNNNNNNNN
NNNNNNNNNNNNNNNNNNNNNNNNNNNNNNNNNNNNNNNNNNNNNNNNNNNNNNNNNNNNNNNNNNNNNNNNNNNNNNNNNNNNNNNNNNNNNN
NNNNNNNNNNNNNNNNNNNNNNNNNNNNNNNNNNNNNNNNNNNNNNNNNNNNNNNNNNNNNNNNNNNNNNNNNNNNNNNNNNNNNNNNNNNNNN
NNNNNNNNNNNNNNNNNNNNNNNNNNNNNNNNNNNNNNNNNNNNNNNNNNNNNNNNNNNNNNNNNNNNNNNNNNNNNNNNNNNNNNNNNNNNNN
NNNNNNNNNNNNNNNNNNNNNNNNNNNNNNNNNNNNNNNNNNNNNNNNNNNNNNNNNNNNNNNNNNNNNNNNNNNNNNNNNNNNNNNNNNNNNN
NNNNNNNNNNNNNNNNNNNNNNNNNNNNNNNNNNNNNNNNNNNNNNNNNNNNNNNNNNNNNNNNNNNNNNNNNNNNNNNNNNNNNNNNNNNNNN
NNNNNNNNNNNNNNNNNNNNNNNNNNNNNNNNNNNNNNNNNNNNNNNNNNNNNNNNNNNNNNNNNNNNNNNNNNNNNNNNNNNNNNNNNNNNNN
NNNNNNNNNNNNNNNNNNNNNNNNNNNNNNNNNNNNNNNNNNNNNNNNNNNNNNNNNNNNNNNNNNNNNNNNNNNNNNNNNNNNNNNNNNNNNN
NNNNNNNNNNNNNNNNNNNNNNNNNNNNNNNNNNNNNNNNNNNNNNNNNNNNNNNNNNNNNNNNNNNNNNNNNNNNNNNNNNNNNNNNNNNNNN
NNNNNNNNNNNNNNNNNNNNNNNNNNNNNNNNNNNNNNNNNNNNNNNNNNNNNNNNNNNNNNNNNNNNNNNNNNNNNNNNNNNNNNNNNNNNNN
NNNNNNNNNNNNNNNNNNNNNNNNNNNNNNNNNNNNNNNNNNNNNNNNNNNNNNNNNNNNNNNNNNNNNNNNNNNNNNNNNNNNNNNNNNNNNN
NNNNNNNNNNNNNNNNNNNNNNNNNNNNNNNNNNNNNNNNNNNNNNNNNNNNNNNNNNNNNNNNNNNNNNNNNNNNNNNNNNNNNNNNNNNNNN
NNNNNNNNNNNNNNNNNNNNNNNNNNNNNNNNNNNNNNNNNNNNNNNNNNNNNNNNNNNNNNNNNNNNNNNNNNNNNNNNNNNNNNNNNNNNNN
NNNNNNNNNNNNNNNNNNNNNNNNNNNNNNNNNNNNNNNNNNNNNNNNNNNNNNNNNNNNNNNNNNNNNNNNNNNNNNNNNNNNNNNNNNNNNN
NNNNNNNNNNNNNNNNNNNNNNNNNNNNNNNNNNNNNNNNNNNNNNNNNNNNNNNNNNNNNNNNNNNNNNNNNNNNNNNNNNNNNNNNNNNNNN
NNNNNNNNNNNNNNNNNNNNNNNNNNNNNNNNNNNNNNNNNNNNNNNNNNNNNNNNNNNNNNNNNNNNNNNNNNNNNNNNNNNNNNNNNNNNNN
NNNNNNNNNNNNNNNNNNNNNNNNNNNNNNNNNNNNNNNNNNNNNNNNNNNNNNNNNNNNNNNNNNNNNNNNNNNNNNNNNNNNNNNNNNNNNN
NNNNNNNNNNNNNNNNNNNNNNNNNNNNNNNNNNNNNNNNNNNNNNNNNNNNNNNNNNNNNNNNNNNNNNNNNNNNNNNNNNNNNNNNNNNNNN
NNNNNNNNNNNNNNNNNNNNNNNNNNNNNNNNNNNNNNNNNNNNNNNNNNNNNNNNNNNNNNNNNNNNNNNNNNNNNNNNNNNNNNNNNNNNNN
NNNNNNNNNNNNNNNNNNNNNNNNNNNNNNNNNNNNNNNNNNNNNNNNNNNNNNNNNNNNNNNNNNNNNNNNNNNNNNNNNNNNNNNNNNNNNN
NNNNNNNNNNNNNNNNNNNNNNNNNNNNNNNNNNNNNNNNNNNNNNNNNNNNNNNNNNNNNNNNNNNNNNNNNNNNNNNNNNNNNNNNNNNNNN
NNNNNNNNNNNNNNNNNNNNNNNNNNNNNNNNNNNNNNNNNNNNNNNNNNNNNNNNNNNNNNNNNNNNNNNNNNNNNNNNNNNNNNNNNNNNNN
NNNNNNNNNNNNNNNNNNNNNNNNNNNNNNNNNNNNNNNNNNNNNNNNNNNNNNNNNNNNNNNNNNNNNNNNNNNNNNNNNNNNNNNNNNNNNN
NNNNNNNNNNNNNNNNNNNNNNNNNNNNNNNNNNNNNNNNNNNNNNNNNNNNNNNNNNNNNNNNNNNNNNNNNNNNNNNNNNNNNNNNNNNNNN
NNNNNNNNNNNNNNNNNNNNNNNNNNNNNNNNNNNNNNNNNNNNNNNNNNNNNNNNNNNNNNNNNNNNNNNNNNNNNNNNNNNNNNNNNNNNNN
NNNNNNNNNNNNNNNNNNNNNNNNNNNNNNNNNNNNNNNNNNNNNNNNNNNNNNNNNNNNNNNNNNNNNNNNNNNNNNNNNNNNNNNNNNNNNN
NNNNNNNNNNNNNNNNNNNNNNNNNNNNNNNNNNNNNNNNNNNNNNNNNNNNNNNNNNNNNNNNNNNNNNNNNNNNNNNNNNNNNNNNNNNNNN
NNNNNNNNNNNNNNNNNNNNNNNNNNNNNNNNNNNNNNNNNNNNNNNNNNNNNNNNNNNNNNNNNNNNNNNNNNNNNNNNNNNNNNNNNNNNNN
NNNNNNNNNNNNNNNNNNNNNNNNNNNNNNNNNNNNNNNNNNNNNNNNNNNNNNNNNNNNNNNNNNNNNNNNNNNNNNNNNNNNNNNNNNNNNN
NNNNNNNNNNNNNNNNNNNNNNNNNNNNNNNNNNNNNNNNNNNNNNNNNNNNNNNNNNNNNNNNNNNNNNNNNNNNNNNNNNNNNNNNNNNNNN
NNNNNNNNNNNNNNNNNNNNNNNNNNNNNNNNNNNNNNNNNNNNNNNNNNNNNNNNNNNNNNNNNNNNNNNNNNNNNNNNNNNNNNNNNNNNNN
NNNNNNNNNNNNNNNNNNNNNNNNNNNNNNNNNNNNNNNNNNNNNNNNNNNNNNNNNNNNNNNNNNNNNNNNNNNNNNNNNNNNNNNNNNNNNN
NNNNNNNNNNNNNNNNNNNNNNNNNNNNNNNNNNNNNNNNNNNNNNNNNNNNNNNNNNNNNNNNNNNNNNNNNNNNNNNNNNNNNNNNNNNNNN
NNNNNNNNNNNNNNNNNNNNNNNNNNNNNNNNNNNNNNNNNNNNNNNNNNNNNNNNNNNNNNNNNNNNNNNNNNNNNNNNNNNNNNNNNNNNNN
NNNNNNNNNNNNNNNNNNNNNNNNNNNNNNNNNNNNNNNNNNNNNNNNNNNNNNNNNNNNNNNNNNNNNNNNNNNNNNNNNNNNNNNNNNNNNN
NNNNNNNNNNNNNNNNNNNNNNNNNNNNNNNNNNNNNNNNNNNNNNNNNNNNNNNNNNNNNNNNNNNNNNNNNNNNNNNNNNNNNNNNNNNNNN
NNNNNNNNNNNNNNNNNNNNNNNNNNNNNNNNNNNNNNNNNNNNNNNNNNNNNNNNNNNNNNNNNNNNNNNNNNNNNNNNNNNNNNNNNNNNNN
NNNNNNNNNNNNNNNNNNNNNNNNNNNNNNNNNNNNNNNNNNNNNNNNNNNNNNNNNNNNNNNNNNNNNNNNNNNNNNNNNNNNNNNNNNNNNN
NNNNNNNNNNNNNNNNNNNNNNNNNNNNNNNNNNNNNNNNNNNNNNNNNNNNNNNNNNNNNNNNNNNNNNNNNNNNNNNNNNNNNNNNNNNNNN
NNNNNNNNNNNNNNNNNNNNNNNNNNNNNNNNNNNNNNNNNNNNNNNNNNNNNNNNNNNNNNNNNNNNNNNNNNNNNNNNNNNNNNNNNNNNNN
NNNNNNNNNNNNNNNNNNNNNNNNNNNNNNNNNNNNNNNNNNNNNNNNNNNNNNNNNNNNNNNNNNNNNNNNNNNNNNNNNNNNNNNNNNNNNN
NNNNNNNNNNNNNNNNNNNNNNNNNNNNNNNNNNNNNNNNNNNNNNNNNNNNNNNNNNNNNNNNNNNNNNNNNNNNNNNNNNNNNNNNNNNNNN
NNNNNNNNNNNNNNNNNNNNNNNNNNNNNNNNNNNNNNNNNNNNNNNNNNNNNNNNNNNNNNNNNNNNNNNNNNNNNNNNNNNNNNNNNNNNNN
NNNNNNNNNNNNNNNNNNNNNNNNNNNNNNNNNNNNNNNNNNNNNNNNNNNNNNNNNNNNNNNNNNNNNNNNNNNNNNNNNNNNNNNNNNNNNN
NNNNNNNNNNNNNNNNNNNNNNNNNNNNNNNNNNNNNNNNNNNNNNNNNNNNNNNNNNNNNNNNNNNNNNNNNNNNNNNNNNNNNNNNNNNNNN
NNNNNNNNNNNNNNNNNNNNNNNNNNNNNNNNNNNNNNNNNNNNNNNNNNNNNNNNNNNNNNNNNNNNNNNNNNNNNNNNNNNNNNNNNNNNNN
NNNNNNNNNNNNNNNNNNNNNNNNNNNNNNNNNNNNNNNNNNNNNNNNNNNNNNNNNNNNNNNNNNNNNNNNNNNNNNNNNNNNNNNNNNNNNN
NNNNNNNNNNNNNNNNNNNNNNNNNNNNNNNNNNNNNNNNNNNNNNNNNNNNNNNNNNNNNNNNNNNNNNNNNNNNNNNNNNNNNNNNNNNNNN
NNNNNNNNNNNNNNNNNNNNNNNNNNNNNNNNNNNNNNNNNNNNNNNNNNNNNNNNNNNNNNNNNNNNNNNNNNNNNNNNNNNNNNNNNNNNNN
NNNNNNNNNNNNNNNNNNNNNNNNNNNNNNNNNNNNNNNNNNNNNNNNNNNNNNNNNNNNNNNNNNNNNNNNNNNNNNNNNNNNNNNNNNNNNN
NNNNNNNNNNNNNNNNNNNNNNNNNNNNNNNNNNNNNNNNNNNNNNNNNNNNNNNNNNNNNNNNNNNNNNNNNNNNNNNNNNNNNNNNNNNNNN
NNNNNNNNNNNNNNNNNNNNNNNNNNNNNNNNNNNNNNNNNNNNNNNNNNNNNNNNNNNNNNNNNNNNNNNNNNNNNNNNNNNNNNNNNNNNNN
NNNNNNNNNNNNNNNNNNNNNNNNNNNNNNNNNNNNNNNNNNNNNNNNNNNNNNNNNNNNNNNNNNNNNNNNNNNNNNNNNNNNNNNNNNNNNN
NNNNNNNNNNNNNNNNNNNNNNNNNNNNNNAGCCTGGGGGCGGGGGGCACAGTGGATGCCAGTGAACATGGGTGGTCAGTCCCAGAGCTGGCGT
CTTGCAGCTGGGGCAGATCCTGGGGATGGTGTGTGTGTCCTGACCAGAGGCCAGGCTGGAGGCTGGAATTGGCGTCAGGATGCCCAGCTCCACC
TCCACCCCAGTCCCTGCCTGTGGCTCTGGGGAAAGAAAGACCTCCTTATTGATTTATTGATTTATTGATTTGACAGGGTCTTGCTGTGTCGCCC
AGGCTGGAGTGCAGGCTGGAGTGATCTCAGCTCACTGCAACCTCTGCCTCCTGGGCTCAAGCAATCCTGCTGCCTCAGCCTCCCAAGTAGCTGG
GACTACAGGCGTGCGCCACCATGCCTGGCTACTTGTATTTTTTGTAGAGATAGGGTTTCATCATGTTGCCCAGATTGGTCTTGAACTTCTGACC
TCAGATGATCCGCCCACCTCGGCCTCCCAAAGTGCTGGGATTATAGGCGTGAGCCACCGCGCCTGGCCACCTCCTTGATTTATTGACATTACTG
TTCTCTCTCCGGTGCAGGAGACTGCGTGGCTCCCGTCCTCTTGAGGGCATTTCTTTACGATGGGGAAGGCGGGACTGGGGCCTGGCTAGCACCA
TCCCCAAGGCGCTCAGCCTCAGCGGAGGGGCCCTTCCCATACGAAGACATCCTGAGCAGGTCTCACCTCCCACCCCTGAGAGCTTCTGGTCGCA
CCTGTGAGGTGTGGCTCCATCGCAGCTCTGTTTCTTTTCTCTTTGTTATGGCTCTGCCCCCTGAGTGTCTGGAATTTCCAGAAAGCAGCTGTGA
CTCCTGGGATTGAGGCCACGGTGTCTCCTCTTACCAGGCTGCCGTGCCGTGTTTCCCACCTACCTGGGGCGCTAGAACCATTTCTGTTACTAAA
TACAGTGGGTTTGTATTGGTATTTTGAGACCCTAGATTTTTTTGGCATTTATCCGTGTTGGTTTCTGAACCACGACTTAGCGGAAAGACAGCAC
TGTCCTTGAATAAAGTATCTTCCAGCCAGTGCAGTTGCACCAGGAGATGAATATAGAATTTCCATGTGCTTGTTTGTATTATTTAGAGGCCTGG
GAATACCCACCTCTAGGCATGTAATCATGAGGTTCCAAGATGTCATAAAAAGTCTTTTCAAATCAGAAATCCAGAGGCACGTCTTTCCTGTTAA
AATTACTGATTTCCCTAATAATGATTTTAAAAAATATTTTATTGAGTGTAATTAACACATAATGATTCTTAGGACTAGCTGTGTACCAGAATCT
TCTGTTTTGTTCTAAAAGATGGATTCGTAGGATATGAGCCAGTATCAGAATCTCCATGAGGGGGATTTCACAGTCTGTCTTTTCATCCAATCCT
TGAGGAGTTTTCTTTGTAGCTGGTGATTAGGGCACCTTGACAGTGATAAGCCTGTTAAAATCTGTTTACATATGTAGGTCCTTAGATCTAAAAC
ACATCCACCATCCATCATCATCCATCCATCATCAAACCATTATTCCTCCATTCCCTATGCATCCATGCATCATCATCTGTCCATTATTCCTCCA
TTCCCTATCCATTCATTCATCATCCATCCATCCATCATCCATCCATCCATCATCAAACCATTATTCCTCCATTCCCTATCCATCCATCCATCAT
CCATCCATCATCATCCATCCATTATTCCTCCATTCCCTATCCATTCATTCATCATCCATCCATCCATCATCATCCATCCATCATCAAACCATTA
TTCCTCCATTCCCTATCCATCCATTCATCCATCATCCATCATCCATCCATTATTCCTCCATTCCCTATCCATCCATCTATCATCCATCCATCAT
TATCCATCATCCATCCATTCCTCCATTCCCTATCCATTCATTCATCCATCCATCCATCCATCATCATTCATCCATCCATCCATCATCCATCCAT
TATTCCTCCATTCCTCGTCCATCCATCCATCCATCACCATCCATTTATCTATCCATCCATTCATCCACCATTTACCTATCATGCCTCCATCCCC
AATGCATCATTCATCCATCCATCCGTTTAGCTGTCCATCCATCCATCATCCATCCATTCATCCACCCACCCATAATCCATCTCTTTATCCCTCA
TTCCTCCCTTGTTTGTCCATCACCATCCATCTACCTACTCTCCATCTACCCATCATCCCTTCACCCCCCGTCCATCATGATCCATCCATCAGTT
TCTTTACCTGTCTATCCATCATCCATTGTCCACCCACCCACCAACCATCCATCCATTAAACAAATTGAACACATTTTATGTGCCAGGCACAGTC
TTTGGCTCTGAAAACAGCGGTGAGCAGAATAGACTAAGGCGTCCAGATGTTCTGTCTTCATGGAACTTAGGTTTCTGTTTGTCAAAGAGATGAC
AGTGTGGGATGAATGAGTAAAAACAGGCTGTTAGATTGTGATACGTATTTAGGAGAAAAAATAAACTAGAGAAGGATGGCCCACGTGTTGAGTT
TGGGGTTTAAATGAAGATGGGGTGGTTGAGGAAGGTGGTTTTTGAATGAAGAGTGGAACCCGTGAGGACCCAGTCGCCTCTCTCTGGGAAGGAC
GTTCGGATGAAGATGGGGTGGTTGGGGAAGGTGGTTTTTGAATGAAGAGCGGAACCCGTGAGGACCCGGCCGCCTCTCCCTGGGAAGGACGTTC
GGGGGCTTGTGCTGCTGTTAGGGGAGGAGGGGAGGTGGGCAGTGAGGGGCTCACGGGAGCCTTGTTGGCCAGGTGGGACTGGGGCTGTCACTCC
AAGTCGCCCGGAGCTGTCCGGCAGCGTGGTCTCAGGGACGTTTGCTGAGGCCCGCTCCTTGGGGTCCGTTGGTCGAGGCCGGGGGTTGCTGGCC
GGCCCTGAGTTCATGGGTTTCTGCTTTGTGATGCCCAGCCCCTCATGCTCCCATCTGCTTCTTTTTCTCTCTAGAACACTATGGCTATGCATCC
TCCAACGTCAGCCCCGCCCTGCCGCTCCCCACGGCGCACTCCACCCTGCCGGCCCCGTGCCACAACCTTCAGACCTCCACACCGGGCATCATCC
CGCCGGCGGATCACCCCTCGGGGTACGGAGCAGCTTTGGACGGTGGGCCCGCGGGCTACTTCCTCTCCTCCGGCCACACCAGGCCTGATGGGGC
CCCTGCCCTGGAGAGTCCTCGCATCGAGATAACCTCGTGCTTGGGCCTGTACCACAACAATAACCAGTTTTTCCACGATGTGGAGGTGGAAGAC
GTCCTCCCTAGCTCCAAACGGTCCCCCTCCACGGCCACGCTGAGTCTGCCCAGCCTGGAGGCCTACAGAGACCCCTCGTGCCTGAGCCCGGCCA
GCAGCCTGTCCTCCCGGAGCTGCAACTCAGAGGCCTCCTCCTACGAGTCCAACTACTCGTACCCGTACGCGTCCCCCCAGACGTCGCCATGGCA
GTCTCCCTGCGTGTCTCCCAAGACCACGGACCCCGAGGAGGGCTTTCCCCGCGGGCTGGGGGCCTGCACACTGCTGGGTTCCCCGCGGCACTCC
CCCTCCACCTCGCCCCGCGCCAGCGTCACTGAGGAGAGCTGGCTGGGTGCCCGCTCCTCCAGACCCGCGTCCCCGTGCAACAAGAGGAAGTACA
GCCTCAACGGCCGGCAGCCGCCCTACTCACCCCACCACTCGCCCACGCCGTCCCCGCACGGCTCCCCGCGGGTCAGCGTGACCGACGACTCGTG
GTTGGGCAACACCACCCAGTACACCAGCTCGGCCATCGTGGCCGCCATCAACGCGCTGACCACCGACAGCAGCCTGGACCTGGGAGATGGCGTC
CCTGTCAAGTCCCGCAAGACCACCCTGGAGCAGCCGCCCTCAGTGGCGCTCAAGGTGGAGCCCGTCGGGGAGGACCTGGGCAGCCCCCCGCCCC
CGGCCGACTTCGCGCCCGAAGACTACTCCTCTTTCCAGCACATCAGGAAGGGCGGCTTCTGCGACCAGTACCTGGCGGTGCCGCAGCACCCCTA
CCAGTGGGCGAAGCCCAAGCCCCTGTCCCCTACGTCCTACATGAGGTGAGCCGGCAGCGCGGGGCGGGACGGGGAGGCGAGGGGAGGCGCGGGG
CGGGGCGGAACGCGGGGAGCGGGACGGGGGGCGGCGCGGGGCGGCCGTGTCTGGGGACGAGAGTCAGGACCTGGGTGGGCAGGTGGGCTCCTCG
TGGAGCTGGGAGGCAGAGTCTGTCCCCATGTCTGCCTCCTCATGCAGACTTTTCCTTGTGCGCCTCGCCTCTGCCTCCGTCTGCGCGTTTCCCA
TCTGAAGTCTCCAGATCCTCTCGGGCCCTGCTGATGGCCTCGTGTTCGCTCAGTCTCTGCAAACACCCATTTCAAAGAGGGTGGCCCTGCTGGC
GGTCAGGGCTTCCACGTGGGAATTCCGGGAGACGCCATCCGCCCCTAAGGAGGGCTCACACACGCGCAGTTTCTTCCTCGGGGAATTGCACGTG
CCTGGCCCCCCTCGGTGGTTGCCTGCTGCTCCCGCTTCCTCCCCTGCAGTAATTGCCTTCCCTGCCTCGGGTGCAGATGGGACCGCAGCTCAAC
AGTGCCCCAGAGCACCCAGTCCGCCACGCTTTGGAACAGCACGGCCTCCTGCTCCCCAGAGACGCCGGCTGTGGCATCAGGCTGGGGGAGCTCA
CGCGCCTTCCTTCTTTGGGTCCCAGGTTGTTGGTTTTTCTTTTTAACCGTGTGAGGGGCTGCTGGAATTCCGCTGGGTCCACTTAACCAGCTTG
GTGTTTTTATCTCTAACGAAACAGCTTTCCCAGCTGGTGGGCTGTGAGTGGCCCCTGAGAGTGCTTTCTGCTCTGGGATTTTTATCTGAGGCAT
GAAAACGTCCGTGCAGGAGGTCGAGGGCAGTGCCCCATGGCCCGTGACGTCAGGGCTGCCGCTGTGTCCTCAGGAAGAGGCGTTTGCCACGCGC
AGCCCGGGGTATTCCAGGCTGGGTGTTTTCCTGTTTTTGTTTTTTTTTTTTTTTCGTCCCTCCCCACCCCCCACTCCTTTTTTATTAGCGAGCA
CTCAGGGGGCGAGACCCCGCAGAGCGGAGGGCAGGTGCAGCCCCCATGCCTGCAGGGTGAGGAAGGCAGGCAGTGAGGGTGCTCTGGGAGGACC
CGTCTCTGCTCTGCAGTCTCAGGCCATGCTTCAGCCATGGCTGGAGCACGCATGGACAGAATTAGAGCTACAAGCAGTAACAAGCCTCCAGGCT
GGGAACGAACCCACCCAAACCTCTCTGAAGGCTTGTGGCAAAGAAACAGTGTTAGAGCTGACAGTTCTTTGAGCAGCCCCATGGCTGATTCTGC
CTTTCTACTGGCGTGATACTTAGAATCGTCGTCAGCTGAGGTTTCGAGAGAAAGCAAGGATTACCCCTGATTTTTCTTGACTTGCAGTGGGCGC
ATTTACCTTTCTATCCCAACTTCTGTTTTTAATACATTAAGGTTTAAAAGGCTGGCGTATTCTAGGTGATCACAACGAGCCTGTGTCAGGACCC
GGATTGTATTTACAATAAAAATCCCATTCAGTTGGAGGCATTGGGAAAATTTAAGAACTGTTTTTGCCTGCTGTACTATCACTGTTATTGTTTA
AGTAAAAGTACAAGCGTAGTGGCACTGACTCTCCAGCCCACAGTCATGTACAACGCGCTTCATGGTCTCCAGGCTTACGGACGGTGACAAAGTC
GTCCATCACCGCGGAACTTCACTGAACTGGCGAGATAAGGGAAGAGTGATGTCATCAAGGTCCCAAGACTGGGACTTGGCATGAGGAGTGTCGT
AATGCAGTTGTGAACCTTTGGGTGAACCCCACGTATTTGTTTCCTGGGGCTGCCCTGACAAGGTCCCGCAGACGGGTGGCCTTCATAGCAGGAA
GGTTTTCTCGCGGGGTCCTGAGACTGGAAGCCGAGATCAGGGGCTGTTCTTTTGGAGGCTGTGAGGGAGCATCTGCCTGACCTGTCTCCCTGGC
TTGGAGGCGCCGTCTTCTCCCCATGACTCCTCATCTCTCCATCCACCGTGCATGTCTGTGTCCAGATGTCCCCTTTTGTGAGGACACTGGTCCT
GCTGGGTTGGGGCCACCCTGGTGGCCTCATTTGAACTTGATCGCTCTGTAAAGACCCTCTCTCCAGACACAGCCCCACGCTGGGCAGGACTCCA
TTATGTGAGTTTGCGGGGAGCACCGTTCGGCTGCCTCAGCCCCGGTCTTACTGTCGCAGTAAAAATGGCAGGCAGCCTTTGAAAGCGCAAGCTC
GTCCTGGTTCCTTCTTCGTCTCCTGGGCGGCAAGGTGTCCGCAGGGATGTCGTGTTCTGGCAGGCACAGCCCCTCCTGTCCACCTTGGACCTGT
GTTTGGTGTGGAGGTTGGAAAGCATGGGTGGCTGTTTATTTTTTCCTCTGCTTGGGGGTTTCAGGAAGAATTCCGTGCCCACGTGACCCTGTTA
GCTTTATCTCCTGGCTGCAGAGCGCCCAGTTAGGTGTGATGCCTGTAACATTTCTGAGTGTTCACACAAACAAAGCTCAGTAAATATGTCCCAA
ACTCGCTCCTGGGGTTTGCAGTTAACCTTTTCCCACTGTTCTGGTTCCACATCAAAATATGTTTCCTGGTTCCTTGTGCCCTGTTTCCAAGTGA
CCTCGTCAGCGGGTGCCCTGGGGCAGCTGGAAGCCACGGCAGAGATGAAATGTTAGTTTTTTACCAGCGAGGTGGAGAGGCCAGACTTCCTTCC
CCAGGAATGCCTCTCCGTCGGTCACATGCAGCAGCTCTGGCAGGCGTGGAAAATGTCACCAGGATCTCAGGCTGCACAACTAGAAAGCTGTATT
TTTAATGATCTCCAAAGTTTGGGATGGAGAATGCACGACATGCCCATCTTCTCCCCACCGTGGTACAGAACTGCTGCTCCATTAATCCTGTCCC
TATGCCAGAAGGAGCTTTCTGGTGGAAAGTGTGCTGTGTGCATCCTTCCCAGGGACCGTCTAGGATTGTTGTCCTTTGAGGCCTTTTGTTGCTT
GTTCAGCACCTGTGGCCCCCAGTGCTATGCAGAGCCTCTGAGAGGCCCACAATGGTCAAAGAACGATACTGAATTCTTGCTGCAATTGAAGCCA
TGATAATGTTTGTGAAGTTAGTAAGAGTAGGTGATAGAACCTTGATAGTTTTAGAGTTTGGAGCCATTTTAGAGCTCAGCGGAATGATGTGTCT
ATTGTCAAAGCTTGGGGGGACTGGCACAGGAATCACAGGCCACCTGCTATACCCCCTAAAAATTAGAATCTTAAGCTGTGAATTCTGGCATCAG
AAAGGAGTGGTTTTCTTCCCGCCTTGCTTCTTTCCAGGGGTAATGACGGTGATCATAGCAAGTGGCCTCCCAGGGCACCTTTCCGTGTGCTGTT
GAGGGTGCAACAGGAGGCGTTGCCGGGCTGCGTCTGGAGGAGGCCAGGGCGAGAGTGCACGTTGAAGGCTGTGCGGGTTATTTATAAATAGTGG
TTCTCAAATGGTAGCTTTTAAAGATTTCATATTGACCGACAGGAACTAAAGTCTACGTGATTGCTTCCTCATTCCTTCATCGTTCGGCCTCCTC
CACCTGGGCACCTGCCACAGGCCATGTGCGTCCATGTCCAGGTCTGTCTGTGCCGACATCTGCTCTTTGGGCATCAGCCTCTGGAAAGTGTCCC
TGTCAGAGTCTCCACGTGTCTCACTCTCCGCACCCAGACAGTCTCTGGAGTTGCCTTTGTAGAGGCAAGGTTGTAGGGGAATTGGAAAGGCGGA
GGTATTTTGACTGAATTTATTGGTAACTTTAACAGCACAATTCTTGAATTCAATTTCTTTTTATTTTATTTATTTATTTTTTTTGAGATGGAGT
CTCGCTCTGTCACCCAGACTGGAGTGCAGTGGCACAATCTCGGCTCACTGCAAGCTTTGCCTCCTGGGTTCACGCCATTCTCCTGACTCAGCCT
CCCAAGTAGCTGGGCCTACAGGCGCCCACCACCGCGCCCGGCTATTTTTTTGTATTTTTAGTAGAGATGGGGTTTCACCATGTTAGCCAGGATG
GTCTCGATCTCCTGACCTCGTGATCCACCCGCCTCGGCCTCCCAAAGTGCTGGGATTACAGGCATGAGCCACCGCGCCCAGCCCTTGAATTCAA
TTTCTACACATGAAACATTGCCTCTTAGAACTGAATGTTTAAAAAGAATTTCTAAGGAGTGAGGTAAAGAAAAAGAATTCCTAAGGGGCGAGAT
AGGCTAATAAACAATGTTTACTTAGAGTCCGCTTGGTTTCAATGATCAGAAATAGCCGCTAGGTTGGTGCAATAACGTATATTCAAATCTCTTG
GCCAGGCGCAGTGGCTCACGCCTGTAATCCCAGCACTTTGGGAGGCCGAGGCAGGTGGATCAGCTGAGGTCAGGAGTTCAAGACCAGCCTGGCC
AAATTGGCGAAACCCCATCTCTATTAAAAGTACACAAATTAGCTGGGCATGGTGGCGGGCGCCTGTAATCCCAGCTACTCAGAAGGCTGAGGCA
GGCGAATCATTTGAACCCAGGAGGCGGAGGTTGCAGTGAGCTGAGGTCGTGCCACTGCACTCCAGCCTGGGCGAGAGGAGCGAGACTCCGTCTC
CAAACAAACAAAAAAACCCTGTTTATTTCAGACATTAAGTTTTGGGCTGCAATATTGAAGATTTTAGCATATCGGTCACTTTTCTGCTATGCAT
AGTATTAGTTTCAAAAGGTCTGAGAAAACGTTCACTCTCTTGTGTTTCATAAGTTATCTGAAAGTTTCACAGTTTATCACAATTTGGAATAAGA
TCAGCTAACCCCCAGCACAGTAACAGGTGGACTCTGTCTTCTCTTTCGCAGACACGAGTCCTCTGCCAGGCTCAGTAGCGATTCCTCCTGCGTT
TGAATGCCCTTTGCTCTTGTGGCTCTGGTACCTGAGGGGTTCGGGCCCCGGCAGTGTTGGGGGAACAGTGCAGGCTTTTGACAGCTCCCAGGTC
CTGTAGTGGGGCCATCTCTGGGCTCTGGAGCCAGACTGTCCGCGGGCGCTGGTGGGCCCTTTGGGGTGATGGTGAACATAGTCTCTAAGGCGTT
GTACCGAACCCCAGCATAGCGAGACGTGTAAGGTGGTAGCCGTGGGGTCTTCCCCGAGCTTCCCGCTGCCATCACCTCCTGGGAAGACGGATAG
CAAAGAAGCCGAGGGTGTCGAGTTGCCCCATGGTTTGTAAAACACTGGCATGGGCTGGAACGGCTCAGGACTGACTGCCACTGCGTCTCCCTGT
AAGCCCCTCCCTTTCTGGGGAGGGAAGCCCCCCAACAACCCACAGCCAGCCTCGAAGCCACGTCGCCCTGGCTCTGGTTCCCGCTAACCCTTGC
TGGGGAGTCCCCCGCACAACCTGTCCTGCTGTTTCCTGCTGTTTCTGGAGCTAGACAAGCCTCAGCTGGCCTCCTGGCTCCCGGCATGGGTGTC
AGGCCCTGGGGAGTCTCCAGTCCCTCCTGTGGGTACTGGGCTGGGCTGGCTCTGAAGGGTCTTGAAGAACGTGGCTGTGTGCCTCCCTGGCATT
CGCGGTGGTGGCTCTGGAGCTTGCGTTTGGCTGAGCAGGCCAGCAGGTGACTCGCGCAAGCCAGACGGTCCCCAGGAAGCCCTCAGCTGTGGTG
GGAGATGGGAGATGGGCTATGGTGGGAGATGGGCTGTGGCGGGAGATGGGCTGTGGCGGGAGATGGGCTGTGGCGGGAGATGGGCTGTGGTGGG
AGATGGGAGATGGGCTGTGGTGGGAGATGGGAGATGGGCTGTGGTGGGAGATGGGCTGTGGTGGGAGATGGGAGATGGGCTGTGGTGGGAGATG
GGNNNNNNNNNNNNNNNNNNNNNNNNNNNNNNNNNNNNNNNNNNNNNNNNNNNNNNNNNNNNNNNNNNNNNNNNNNNNNNNNNNNNNNNNNNNN
NNNNNNNNNNNNNNNNNNNNNNNNNNNNNNNNNNNNNNNNNNNNNNNNNNNNNNNNNNNNNNNNNNNNNNNNNNNNNNNNNNNNNNNNNNNNNN
NNNNNNNNNNNNNNNNNNNNNNNNNNNNNNNNNNNNNNNNNNNNNNNNNNNNNNNNNNNNNNNNNNNNNNNNNNNNNNNNNNNNNNNNNNNNNN
NNNNNNNNNNNNNNNNNNNNNNNNNNNNNNNNNNNNNNNNNNNNNNNNNNNNNNNNNNNNNNNNNNNNNNNNNNNNNNNNNNNNNNNNNNNNNN
NNNNNNNNNNNNNNNNNNNNNNNNNNNNNNNNNNNNNNNNNNNNNNNNNNNNNNNNNNNNNNNNNNNNNNNNNNNNNNNNNNNNNNNNNNNNNN
NNNNNNNNNNNNNNNNNNNNNNNNNNNNNNNNNNNNNNNNNNNNNNNNNNNNNNNNNNNNNNNNNNNNNNNNNNNNNNNNNNNNNNNNNNNNNN
NNNNNNNNNNNNNNNNNNNNNNNNNNNNNNNNNNNNNNNNNNNNNNNNNNNNNNNNNNNNNNNNNNNNNNNNNNNNNNNNNNNNNNNNNNNNNN
NNNNNNNNNNNNNNNNNNNNNNNNNNNNNNNNNNNNNNNNNNNNNNNNNNNNNNNNNNNNNNNNNNNNNNNNNNNNNNNNNNNNNNNNNNNNNN
NNNNNNNNNNNNNNNNNNNNNNNNNNNNNNNNNNNNNNNNNNNNNNNNNNNNNNNNNNNNNNNNNNNNNNNNNNNNNNNNNNNNNNNNNNNNNN
NNNNNNNNNNNNNNNNNNNNNNNNNNNNNNNNNNNNNNNNNNNNNNNNNNNNNNNNNNNNNNNNNNNNNNNNNNNNNNNNNNNNNNNNNNNNNN
NNNNNNNNNNNNNNNNNNNNNNNNNNNNNNNNNNNNNNNNNNNNNNNNNNNNNNNNNNNNNNNNNNNNNNNNNNNNNNNNNNNNNNNNNNNNNN
NNNATGGGCTGTGGTGGGAGATGGGAGATGGGCTATACCAGGAGATGGGCTGTGGCGGGAGATGGGCTATGGCTGGGCCTGTCCTCTGTGGTGC
TGTGGATGCGTCCTATTCAGGAGCTGCCTACCAAGTTTCATTGCGATGTTGGAATCTGTCCTTGGTCCCTGCCACCATGGGGTGGGTGGAGCCC
CCAGCACCCTGCCTTCTTCCTCCCCTTCCTGTGGGTCTGCAGGGCTCGGGGTGTTGATGGAGACTGTGGGGGTCGGGGGAGCCAGCAGTTTCGT
TGTGTGATGGCAGGAAGAATCCGCGTGCTGCCCCACCATGCCTTGCGACGCTCTGTGGTAGGGAGCTGTCGGGTCACAGTCAGGCGCTTAACGG
CCACCCCACTGTGGACGCAGCTGAGGCCATTTGTCCAGGGTGGCCTAGTCACAACCAACAGAACTGGACTCTGCCATGATGAGCAGACCCCGCA
ACCTACACTCCAGACTCCACCGGTGCTGGGACCCCGACTCCCAGGAGACCTGGCGAGCTCAGCCCTCTTGTCACAAGGCCTGTACGGGGTGGGG
GCACGTGTCACGGGGACCCTCGGCCCAGACTGGCCTTCTGCTCTCGTCACCAAGATGTGGAGCCTTCTGGGGTCAGAGCCCAGTCGAGGGGCTT
TACGCAGCCTGTGGTGTCCTTGGAGCCACAGCTCCCTGGAGAAGGCACTGCGTCTGCCAGCCTCCGCTGGTGAGGGGCTCAGAGTTGAGAAGAT
CATGCCTCCTGATTGCACGAGCACCCTGGTCTTGGCTCATTTGCTCCTTCTTGAGCCGCTTCGGTAGCATTTGGCAGCCCACGGTTTTCTGCCT
GCGTTGTTTAGTTTGTTTCTGCTGTTATGGAGTTCACAGCTGACACTTGGAGGGCGGGGTTTGCAACACCAGTTTCTGATGGGAAGGACTGGTG
TGAGGGTGTGAGGAGGCTGCGGAGGCCGAGGGCCTGTGCGTTCTCCCAGGCGTGTGTGGAAGGGCTGGGGCATCTTCTCCCTGGTCCTTCTCAA
TGTTACTCTGTCCATGTCTGTTGTTAGCCATGAGGAGGAGAAGGCACTCTGTTCCTGGAAAGGAGAAAACAACGTGGCTTTTTGCTCAGATATT
TTTTTTTGAGCCAGGGTCTTGCTCTGTTGTCCAGGCTGGAGTGCAGGGTGTCATCACAGCTTACTGCAGCCTCGACCTCCTGGGCTCAGGTGAC
CCTCCCACCTCAGCCTGCCGAGTAGCTGGGACCACAGACGTGCGGCACCACACCTGGCTAATTGTTTAAGTTTTGTGGAGACAGAGTCTTGCCG
TGTTGTCCAGGGCTGATCTGGAACTCCTGGCCTGAAGCAGTCCTCCCGACCTGTCCTCTCAAAGTGCTGGCATTGCAGGTGTGAGCCAGAGTTT
TACAGTCAGATCATGGAGATCTGAAATGTTGCCCCATCTCACCGAAGACCGAGTGCCCGGGAGCCCCCCTAGGAGGGTCAGAACCTGCCCGGGA
GCCCCCTAGGAGGGTCAGAACCTGCCCGGGAGCCCCCCTAGGAGGGCCGGCACCTGCCTGCCCGGGAGCCCCCCTAGGAGGGCCGGCACCTGCC
TGCCCGGGAGCCCCCCTAGGAGGGCCGGCACCTGCCTGCCCGGGAGCCCCCCTAGGAGGGTCAGAACCTGCCTGGTTAGCTCAGATGCCCCCGT
GGAGACAGCGTGAGGGCGGCAGGGAGCTGGAAACCTTCCCAGGTTCCCAATTTTGAGATTTCCTAAGCTGCCTGTGGTCCAGCTGGGAGGAAGT
GTCTGGTCCTGATGTGCGTCGGTGACCACAGACAAAACAGGATTTGCTCCTGCGCCAACGTTGGCTTTTGAGCAGCGGGATAGGTGGGCCTGGT
GGTAGGTGCTTCGGCAGCCGGGCAGCCGCAGGGACTTCCTCCCTCGGGATTAAACCTGAGTCGGGAGTTGGAGGGCAACAGTTATTCACATTCA
AAACCAGATCTTAAGTGCAAATTAACGTTTTTTGGATTCTTGAGCAAAATGTTTTCTACATTATGATGGGATTTTCTTTTTTATAAGTGCTTCT
AGAACATCTCTGGAAGCTGGGTTAGACGCACAGGGCTTAGTCGGCTTTGGGGAGAGACAGTAGTTGTAAAGGCCACACCGGACGCCGTGTGCAC
CTCCCAAGGTTTCCCATGTGAGACCATGTGGCCTGCATGCTGCGTTCCATCAGCACTGGGCTGTGCGACAGATGTGTTTCCAGGCGAGGTTGCT
GCAGAGGGGAAGAGGGGGACGTGTTTCCAGGCGACGTCGCTGCAGAGAGGAAGAGGGGGACGCGTTTCCAGGTGACGTCGCTGCAGAGAGGAAG
AGGGGGACACGTTTCCAGGCGACGTCGCTGCAGAGAGGAAGAGGGGGACGCGTTTCCAGGCGACGTCGCTGCAGAGAGGAAGAGGGGGACACGT
TTCCAGGTGACGTCGCTGCAGAGAGGAAGGAGGGTCGCGTTTCCAGGCGAGGTCGCTGCAGAGGGGAAGAGGGGGACGCCTTTCCAGGTGACTT
CGCTGCAGAGAGGAAGAGGGGGACGCCTTTCCAGGTGACTTCGCTGCAGAGAGGAAGAGGCAGACGCATTTCCAGGCGAGGTCACTGCAAAGAG
GAAGAGGGGGATGCGTTTCCAGGTGACATCGCTACAGACAGGAAGAGGGGGATGCGTTTCCGGGAGACGTCGCTGCAGAGGGGAAGAGGTGGAT
GCGTTTCCAGGCAAGGTCGCTGCAGAGAGGAAGAGGGGGTCGCATTTCCAGGCAGCATGGCTGCAGAGAGGAAGAGGAGGACGTGTTTCCAGGC
GACGTTGCTGCAGAGAGGAAGAGGAGGACGCGTTTCCAGGCGATGTCGTTGCAGAGGGCAAGAGGGGAACGCGTTTCCAGGTGACGTCGCTGCA
GAGGGGAAGAGGCGGATGCGTTTCCAGGTGACATTGCTGCAGAGAGGAAGAGGAAGATGCTTTTCCAGGCGACGTTGCTGCAGAGAGGAAGAGG
GTGGGACGCATTTCCAGGAGACGTCGCTGAAGAGGGGAAGAGGGAGGCCCCTCCAGCAGGGCCACCTAGATGTTTGCTTTGCCCCGCGTGGAGT
CATATTCCAGGAACCCCCGAACCCACCTGCAGCTTGATTCTGCTCCTCAGGGCCAGAGGTTCTAGTTTATGGGAGGAGTGTTTTCTCACTGGAA
ACATGGAGCCCACACACACTTCTACGCTGGAAGCCGTGATGTGTGTCAGGAACGTGTTCTGATGTTGGTGTGCAAAATCAGTATTGTGCCTTTG
TCCCCTCTGACCCCCATCACGGCAGTTCTGAGGCTTGTGGGGCACCCCAGCTCCTCTCCCTCTGCACAGGCCACTGTTCCCAGAACTCGAGGGT
TCCCTGACACCAAGATGACATGTGGCACAGACCTGGAATCACGAGGAAATGCCCGTCCTCCTCCCACGGGCAGACAGGTCGAGTGTGTTTCCAG
AGACCGGGCCGTCCGTGGGGCAGTAGCGCCTGGATGACGTCTGCTTTCGCCTGGAGCCCTGGCTGCAAGGGGCGGTGCCGGGCAAGGGCCACCC
CAGGGGTCTGGGAGTGCAGTGTCGGGCCTGTGGAGGTGGAGAGCAGGGATCAGCCTCTTTTTGTGGATGAGGAAATGGAGACACGTGGAAACTT
CTGGTAAGAAGCTGTCAAGCCTCCAGGTTTCGGTTCTGGACAGGTGCGGGGCAGGTATTGGAGCACTTTGGGCTCTGAGGTCCACGTGGCCCAG
CGGCCTCCAGGAGTCAGCTGCAAGGCGGAGTCCCTGTCCACAAGCTGCGTTGCAGGCACAGAGACCAGGAGAGGGCTGTGAAGCAACTCTGTGT
TTACTGGGCTGAAGCAGCAGCTCTTGGCAGTGCCGCCACCATGGGCTGTGTCCTGTCCCCGTGGCGACATCACAGCTGAGCGCGAAGCTGGAAG
CTTGGGCACGTCTTGGTGCTGGGTCTTCTCCGACCCCGAGGGCCAAGGGTGCTCTGTAGCTCCAGGCGTCAGAGTCTGAGCATCCTTTGTTTTG
GCAACATCCAGGACAGGAGTCTTTGGAGAGTAACACATCCTTATTTTGAAAGAGCCCTTTAGGTGATTTGAGAAACCGCTGTATTTGTTGTAGC
TCCAAGTATTACCCGTGAATCACCTAGGCTGCTCTTCAGTGAACATCCAGAATGCCGTCAGTTCTTGTGAAACCCCCAAGTTTCCCGTAGGTCC
AAGCTGAGAAGATTGAGTGAACTCTGAGAGCTGAGCCGGGCCGTCTTGGCACCACTAGAAACGGAATCAGTTCCATGACTGATCTGTGCCCCAC
CCCACATTAACTTGTGCAATATGACATTTCTGGTTTTGGTTTTTGTTTTATAAGCCATCCATGGCAAGTGCAGTCGGAGGCCCCCCACTGCCAA
AACTTCCTGTGAGTAATAATGACAGATGGGCCCTGACCCTGGAGACGTCTGAGAAGGTGTTTGGGGTCCGAGAAGAGTCCGCGTGTGCAGTGAC
TGGAACCTGTCCCTGGTGTGAACTTGGGGATGAGTGGGTGACGGGGGTGGTGGGGGCCTGGGGCACTTCCCCGCCCTCCGGACCACACTGTTGC
GGCCTGCTGCCTGGGGCGCTGGGATCCCACAGCGAGGCCCTGTTCCCACTGCCCACAGGGACTGAGATCCCACAGGCAGGCCCCGTTCCCACTG
AGCTTGGGTTCCCAACGGGCTCCTTTTGCTTCCCAAGCACCCTCTCCCACCCTTGAGCTGCAAGGAATGTTTCAGAGCCATGGAAGGTGCTTTC
TCCCATCTGTAGTTTTTCTGGGAGGGAGAAAGGCTGACATCGGGGGCTTTGTAGAAAGCGTGCTCTGGCCCACACGTTAACATTTGGGAGGAGG
CCTACAGGGAGCTGTCGGCTCTGGGCGAGGGCTGGGGGCTGCCTCGGGGGCGGGGGTTCAGGGTCTTGAGCTCAGCTTCTCACCCATCCGGGGC
AGGGCAGGGCAGATAGAGGGGTGGGGACAGTGTTGGGGGCTGCTGGGCCTGGGATGGCAGGGCCTGTGTCCAAAGCTGTTGTGAGGCTCACGAG
ATACAGGGGTGGACCTGGGAGGGTTGGGGCGCGTACAGAGGGGATGACTTCGATTTTTCCAAAGAACAGGGAAGGGTCTGTGTCCTGGTCGTAC
TCCAATCCCGTGTGGTGGAGCCACGGGACGCCATCAGTTTTTATGAAATCCCCAAATGTGTCCTTTAAAACAAAACCTCTGCACTCCGGCCTCA
CAGCCCAGATCCCGCGCGCTCCCGGTCTGTGGCTTTGACTTTGGTTTGAGTTCCTGGGCTGGGCTTACCTGGCTGGCAGGGCCGCAGCTGTGGC
ACTCCCTGTCTGGGGACGGAGGCTGCCCATGCACCCGGCTGTCCACCTTCTTCCCAAAGGCGGCGTCCTGGGCTCCCTCCCATGCGGACCCGGG
ATCCACTTGCCCAGCCTTGGGGAGGACAGATGGGGACAGCAGATCCTGCCCCAGGGTCATTGCCCGTGGCCACATCGGTCCTGGGAACTGTGGG
TAGGCCATGGGCCGCTGGTGCCTGCACCACTGTCCTGGTGGAAGGGGCTGGACCTGGGACTGCCTGGGACAAGAGGCCAAGGCACAGATGGCTG
CAGGGGCTGCCCCTGCATCCTGAGCCTCACCCGGCGGGCAGGAGGGCCGGGCTGGGTGTCCCCATCTTTCTGTTCCCACCCTGGCCCCAGTCAC
CTGCTTCTCATCCACCGATTCCATCTTTCCTGCTGGCTTGTGAGGCCCGTGCCCTCCTCTCGGCCGCCTTCCCTCCCATGGGCACAGAGCTTGG
GTCCCACGTGGAGAGGAGGCCCTGCCCGCAGCCTCAGAGTCAGGCGGCCTTGGCTTCAGGGAGGGTTGGACGGGAGCCAGCCCATTGGACAGTA
GCCCGGGGCCTCTGGGTGACCCTCCAGGGTGGGACAGCAGTGGTCCCAGGCCCCCCTCTGACTCCTGAAATCCTAAGGTTGCCCGGGCCGCCGA
GCCCTCCCTCCACTCCCCGGCCTGCTGGGCAGGATTTTGTGAAAGGCCTTGTCTTGGGTCGTGGAAGAAAACCACGTGGTCTGTGGGGTCATCC
CTGGGGCAGGCTGTGGGAGGGTGAAGGCTGCGTCCAGCGGCCAGGCCCAGCCAGAGGTCGGGAATCATGTCGGGGGTGACGCACAGATGCCGCC
GCACTATCACCGAGAAACGCGGCGTGTGCGGGCCCACCTGGCCTCTTTAGGCCGGGCTCCGGGCTGCCCTCCAGGAAGGCCGACCTCTCCTGGG
CGGGCAAAACTTTCTCAGGGCCGAGTTCTGCCGGCACAGGTCAGGGGGCAAAGCTGGCCTCCGAGGAGCCTCTGACCGCTGGCCACTGTGTGGT
CTTGGGGCAGCTCCAGACACACAAGCCCAGAAGACCCAGAGGCTGCCTCACGTCGGAGAAATGCGCTGATCGTCTCTCTCTCTCTTTGTCTCTC
CATCTCTGTCTCTCTCCGTCTCTGTCTGTCTCTCCATCTCTGTCTCCCTGTCTCTCTCTCTGTCTCTGTCTCTCTCTGTCTCTGTCTCTCCATC
TCTTTCTCTGTCTCTCTCTGTCTCTCCGTCTGTCTCTCTGTCTCTCCGTCTGTCTCTCTCTCTCTCTTTCCGTCTCTGTCTCTCCATCTCTGTC
TCTGTCCCTGTCTCTGTCTCTCTGTGTTTCTCTGTGTCTGTCTCTGTCTCTCTCCGTCTCTGTCTGTGTCTGTCCCTGTCTCTGTTTCTCTGTC
TCTCTCTGTCTCTCTGTCTCTGACTCTCTGTGTCTGTCTGTCTCTGTCTCTCTGTCTCTCTCCATCTCTGTCTCTGTTTCTCTGTCTCTCTCTG
TCTCTCCATCTCTGTCTCTTTCTCCATCTCTGTTTCTCCATTTCTCTGTCGCTCTGTCTCTCTGTGTCTCTCTCTGTCTCTGCCTCTCTGTGTC
TGTCTCTCCGTCTCTCTCTCTCTGTCTCTCTGTGTCTATCTCTGTGTCTGTCTCTCTCTCTGTCTCCATCTCTCTCCATCTCTCTCTCCGTCTC
TGTTTCTCTCTCTGTTTCTCTCTCTGTCTCTCCATCTCTGTCTCTCCATCTCTCTGTCTCTGTCGCTCTGTCTCTCTCTGTCTCTGCCTCTCTG
TGTCTCTCTCCGTCTCTGTCTCTCCATCTGTCTCTCTGTCTCTCTCICTCTGTTTCTCTCCCTGTCTCTGTCTCTCTGTTTCTCTCCCTGTCTC
TGTCTCTCTGTTTCTCTCCCTGTCTCTGTCTCTCTCTCTGTCTGTCTTTCTTTCTCACTCTCTTTCTCTTTTAACTAAGGGAAAAGCCGTCACA
CAACCAAATGGCCATGAGGCCCGCGGCTGCCGGCTGAGGAGGGCTGCGGGAGGACCCTGAAACCCTCGCCCTCCTGAAGCTGCTCCTGTGGAGT
CCTGTGGGCGGGTGTGGCCCTGCCGAGTTCAGAGTCTGTCGCTTCGTCTGTCTGGAAACTGCAGGAGTCATGAGCAGCCTTCACGGTTTTCACC
TAAGCAATGAGCACGTGCGGGCTTTAACCCTCGGAAAATCAGAATTAAAGGATTTTACCCAAACCACTTAAACAAAGGAACTGCCTCTGCTCTG
GGCTTCTGCTGCCGAGGGCGCGATTCCGGGATTCTCATCGTTCACCGGCGGAGTCGGGGCGACTCATGAGGAGAGTGTTTTCAGATGCTGGGGA
CGTGGCCTTTCTAAGGGAGAGGGACATGGCAGGGCCTCAGGCTCAGCTCTTTGGAAACTGAAGCCCATTCACCAGGTGGGCGGGGGAGGAGCTG
GGCAGAGGTTGAGACACAAGACCTGAGAGCAGAGCAAAGTTTCTCATTTTTTTGGTTGTACAAATAACAAACACCGTTCACTGTAGAAGACTTT
TAAACACAGATAAACCACGATAAATGAGTCCTGCACCAGCGTGGCAGCTCACACCTGGAATCCCAGCGCTTTGGGAGGCCGAGGCACCAGGATC
GCTGGAGCCCAGGAGTTTGAGACCGCCCTGGGCAACATGGAGAGACCCCATCTCTACACAAAATATAACAATTAGCCAGGTGTGGTGGTGCGCC
TGTGGTCCCAGCTGCTCGGGAGGCTGAGGTGGGAGGATCCCGTGAGGCCACTGCACTCTAGCCTGGGTGACAGAGCGAGACCCTGTCTCAGAAA
AAAGAATTCGATAATCCTGCGATTGAGAATCAGACAGTGATCATTTCAGGATATGTCTTTTTTTTTTTTTCCTCCCCCTCTGTCCCAGCGCAGA
CGGCATCTCTGTCGCGAGCTTTCGGCTGAAAAAAAATCCCTCACGCCCTTCCCAGGCGAGGGAGACACAGGTTCAGGGGCATGAACGGCTCCTC
CCGTGGAAAGGACTGTGTGGCCGGCTCCCCAGGCCACGGGGGCCACTGTCCTCCATGCCACGTCCCATGCCGCTTCCACCGCAGCGTGAGGACA
GCAGGACCTGAGCCACGAGCCACACTGCTGTGGGACCCGTGTCGGGACTCGCAGGGCCTGGCAGGTGTTTCCATTTGACCTGTGGGCTCACACT
CGGCAGTTCTGGGCCCCCTGGTGTCCACCTCCATGGGAGCACCGTCCCCGGACCCCCAGAGGGGCGGCAAACACAGGAGTCCTGGGGAGTGTTG
CCGGGGCGGGAAGCCCGGACCCCCCTGTGACTCAGCTGCAGCCTCTCTGGGTGTTGCTGCGGGTGTGGAGGTTGCATCTGGCTCAGTGAGAAGC
ATTTTTAAACTTGATTCTGCAGCCACTGCAGATTCGCGGGAAGCTGGGGGGAGGCAATGCCCCACCCGGCCCCCGGGGCTGCCCCATAGCAGCC
ACCATGCCCTGGCCCCAGGCCCCAGGAGGAGGATCCTGCCGGGAGCGCCTTGCATTTTGCCTAGGACCTTCTTAACTCTCCAGACTCATCAGGG
AAGCTCTGCAGGAGCTCAGGATAAACAGGTCCTTGGCTTGAAGCCTGCCGGCATGGGTTGGGAATGGTGGGGGCTCCATGTCTGCAGCAGCCAC
GGCAGAAGCTGTGGCCACATGAGCTGGGCTCTGGGTGCGGCTGTGGCCATTGAGGAGGGAGCATGTCCCGGGTTCTTAGGTTAAGTGCGTCTTG
GCAGGGGGGCCCGGGGCTGCAGCCCTTCGTGTACCCACGTGTCCGATGTCTCTGTGCCATGCCGTGACGTTGTCCTTCACGTAAAGTTTTCAAG
ACCCACGTCCCATTGTCTGTGAAATCACAAGGTTTTACTTTATGGACTGTGTGGAATGGACCCAGGGAAGGGGGACCAGTATATGCCCAATTTG
CCAGCATGTGCAACAGTGAACTTCCCTGGACAGCTGGCCTTGGTGTGGCAGTGGGTGCTGTACGGCTGGCCTCTGTGCAGTGGGTTGGGGGGAG
CTGGATGGCTGGCCTCTGTGCGGTGGGTGGGGGGGAGCTGGACGGCTGGCCTCTGTGCGGTGGGTGGGGGCTGTACCACTGGCCTCTGTGCGGT
GGGTCGGGGGAAGCTGGACGGCTGGCCTCTGTGCAGTGGGTGGGGGGAGCTGGACGGCTGGCCTCTGTGCAGTGGGTCGGGGGGAGCTGGATGG
CTGGCCTCTGTGCAGCGGGTGGGGGAGAGCTGGACAGCTGGCCTCTGTGCGGTGGAGGCTGGACGGCTGGCCTCTGTGTGGTGTGGGGGCTGGA
TGGCTGGCCTCTGTGCAGTGGGTGGGGTTGGGGGGGTGCTGGACGGCTGGCCTCTGTGCAGTGGGTGGGGGGGTGCTGGACGGCTGGTCTTTGT
GCAGTGAGGGGGCTGGACAACTGCCCTCTGTGCAGGGGTCGGGGGGAGCTGGATGGCTGGCCTCTGTGGGGTGGGTGTAGGGGGAGCTGGACGG
CTGGCCTCTGTGCAGTGAGTCGGGGAGGGGGGTGGCTAGACAGCTGGCCTCTGTGTGGTGGCAGGGCTGGACAGCTGGCCTCTGTGCAGTGGGT
GGCGGGGGGGTGCTGGACGGCTGGCCTCTATGTAGTCGGGGAGGCTGGATGACTGGCCTCTGTGCAGTGGGGCCAGGCGCTGGATGACTGGCCT
CTATGCAGTGGGTCGGGGGGCCTGGACAGCTGGCCTCTGTGCGGTGGGTTGGGGGGGCCTGGACGTCTGGCTTCTGTGCGGTGCGGGGGCCGGC
CTCGGGCCGGTGGGCAGGCTGGAAGGTCAGCCAGGCCCTGTGGTGTCTTTAGTGAGAAACAGGAAATAAATCAAGGGGATGTTGTAGAAGTTTT
ACCGCTGCTGGTTTAGAAGTGTTTGTTTTTATTATTTGTATATAATGTGTTGTTTTCAGTCTTGCACTGGTGTTTTTAACTATCGTGTAAAGAT
GCAAACAGCAGGCCAGAAAACTGCCTTGATATATCACATTGGCAAAGACCAAGCGCACCCCGGACCCTAGTGGGTGAGCCGGACCCATTGGCAG
TGGCCTTTGTGGTGCCTCCAGGGAGCCTCACGATGCTCACGCCTCTGACCAGTGGTTCTGCGCTCAGGGCATGACCGGAGATGTGGTCTGGGAG
TTGGTTGTGTGGATGTTTGCGTTGCCAGCGTTTACAACAACAGAGGGGAACAGCCCACAGCCCAGCAGTACAATGAGGATGGTCCTTGTGATAA
ATGGGATGCTGTGATTACATTGTTTCTGAATAAGCTAAAATGCTCAAAATGTGATCTTTCTTTTATAAAAAGGCCAGGTATGGTGATACGTGCC
TGTAACCCCAGCACTTTGGGAGGCTGAGGTGGGAGGATCCCTTGAGCCCAGGAGTTGGAGAATGCAGTGAGCTGTGATCACACCCTCTAGCCTA
GGCAGCAGAGCGAGACCTTGTTCTAAGAAATAAAAAGAGAAAAAGAAAAGACAAAGTACCAAATTATGTGTCTCATTTTCTTAAGATGTATCAT
TTTGTAAAAATGTTTATAGAAATACACCCAGTGGGCTGGGCACAGTGGCTCACGCCTGTAATCCCAGCACTTTGGGAGGCTGAAGCGGGCGGAT
CACCTGAGGTCAGGAGTTCGAGACCAGCCTGGCCAACATGGTGAAACTGTGTCTCTACTAAAAATACAAAAAATTAGCCGGTGTGGTGGTGGGC
ACCTCTACTCCCAGCTACTCTGGAGGCTGAGGCAGGAGCATTGCTTGAACCTGGGAGGCGGAGGCTGCAGTGAGCCGAGATGGCTCCACTGCAC
TCCAGCCTGGGCCACAGAGCGGGACTCCGTCTCAAAAAAAAAAAAAAAAAAAATGGAGAGAGAGAGAAACAGAGAAAAACACCCTTTGGCTCTG
TGGGCGTCGGTCACCGTCCAGACCGGGTGGACGTTCGTCGGTCACCATCCAGACCAGGTGGATGTTGGATGCAAATTTCACCCGAGCTTTTTTT
TTTATTTTTTCAGTTGTGTTGAGTGTCACTTTTTTAAAAAATTGACTTATGTTGAAGATGAGTTTGAAGTTGTTGGAATTATCTCAGTCCTGAG
CTTAGGGCTTCAGCAAGCGAGTTGCCGTTCCGGGGGATGGGCTGGTCAGAGACCCCCGACTGAAGCACGCCTGCCCGAGGCTGCCCCAGGCGTC
GTCCCCCAGAAGGAAGCACGCGGAGTGGAGTGGGGTGGAGAGCAGGCAGCAGCGGTCCCGTCTCCGCAGCAGTGCAGGCTCCTTTCCCGCTCAT
TTGGGCTCTTTTGTCTGAACCAGAGACACAGATTTGTAGAGCTGCCAAATTCATGCTGAAAATTTCTAACCAAAACCAATCATCTTAATTGTCT
GGATTATGATATTTATTTTGTAAACCATTCTTGCTGTAAGCCATGCACACACTGTGTCACTAAATCTGCAAATGATTCCAGAGCCAAATGCAGT
CCTGCACCGCGGCGTCGGGTCAACGGCGGACTTCACCTATGAGGGTTCTCGTGAGATCGTGAGAGCGTAGTTTTACTGCATCTTTTCCATGTTT
AAATGTGTTTAGATTCACAAACTGTGACCGCTGTGGGGCAGTCACCCACGGTGTTCAGTGCAGCCACATGCCGTGCAGACGTGTACTGGGGAGC
CGTGGGCCACGCCACGTGGCTAGGGTGTGCACTGGACACACCGAGTCGGTTCACACGAGTTCCCACGACGACAAAATGGCCTAAGGACGCGTTT
TTCAGAATGTGTCCTTGTCATAAAGTGACACGTGGCTGCGTTTACACAAACTTATTCTTATGTAATAGTCAGCTGCAGAGTGGTTTAGACTGCC
TTATCTTTAGGAAATGTGTCTGCCTTTAACCAGACCAGCGGTGGGGGGAGGCGGCTTTTCTTTTCTTCTTTCCTCCTCTCTCCTCTCTCTCGCT
GTCTCTTCTCTGTCTCTTAACTTTCCTGGGAATCCAGTGAGCCCAGTTTTTTCACTGTGAATTTTGTTTTTGGTTTGTTTGTTTTGAGATGGAG
TCTCACTCTGTTGCCCAGGCTGGATTGCAGTGGTGCAATTTCGGCTCACTGCAGCCTCCGCCTCCCAGGTTCAAGCAATTCTCCTGCTTCACCC
TCCCAAGTGGCTAGGATTACAGGCACTCGCCACCATGCCCAGCTAATTTTTGTATTTTTAGTGGAGACGGGGTTTCACCCTGTTGGCCAGGATG
GTCTTGGTCTCCTGACCTCAGGTGATCTGTCTGCCTCGGCCTCCCAAAGTGCTGGGATTACAGGCATGAGCCACCACGCCCGGCCATGAATTTT
GTTTTTCATTTGTTTCTTTTTCAATTCATAGCAAAAGATAGGTGCAAGGTGCCTGAGACGGGCACCGCCTCGCATCATCTGCGACTTTGTTTGG
TGCCTGCCTGTCCAGGAGCAGGTGTGGCCACTGCAGAGGGGCCCTTCATTGCCCAGCCCTGCAGCTGCCCCCTCTCCCTTCCCCAGAAACTCAC
AGCTGGCCGCGAGCTCTGTGCAGAGAAGTCTTTCTCTGGAGGCTCTTGTCCTTCCTGTGTGGAGGCCTGGGTCCAGCCGCCTTTCCTTCTGCCT
GGCAGCGTTAGCTGATACTGGGTGTCCATGCTGATCACCTCACGTGGGAAACAGCTCTGACAGTACAGCCCATGAAGCTGCGTCTTGGAGATTC
CTCTGTCAGGGAAGCTGTCGTGGCTGAGTTGGGGTCCAGCAGGCACCCGCAGGGCCCAAAACCCCACAGAGCGGAGGTGGGTGGTGAGCCTGCC
AGGTGCATCTTTGGATAAATCCATTTCTGAGTTTTCAAATTACTATGAAGCTTCCAATGTCACAAAATATGTAGTCTTGTTCTTGCTAAGGAAC
ATTTTAGGTGTTTGTATTTTTAAAAATTACGTAGTTGATTCCATTCAAGCTGCCTCCTGGGCTTTTTCCTCTTTAAACGAGTCTTCTATTCTGC
CCATCGTTTTTAGTTTGTTTGTTTTGAGACAGAGTCTTGCCCTGTCGCCCAGGCTGAAGCACATGCGATCTTGGCTCACTGCCATCTCAACCTC
CCCTGGCTCAGGCGATCCTCCCCGCTCAGCCTCCTGTGTGGCTGGGATCCTCCCCACTCAGCCTCCTGTGTGGCTGGGATCACAGATGTGCACC
ACCACGTCCTGCTCATGTTTTTATTTTTTGTTTCGTAGAGATGGGGTCTCTCCATGTTGCCCAGGCTCGTCTCGAACTCCTGAGCTCAAGTGAT
CTGTTCCCCTTGGCCTCCCAAAGTTTTGGGATTACAGGCATGAGCCACTGCGACTGGCCTTGTTTTTGTTGTTGTTTGTTGTTTTTTTTTAGAT
GGAGTCTCGCTCTGTCGCCAAGGCTGGAGTGCAGTGGCGCGATCTCGGCTCACTGCAACCTCCTCCTCTTCGGTATAAGCAATTCTCCTCCCTC
AGCCTCTCGAGTAGCTGGGACTACAGGCCTCCGCCACCACGCCCGGCTAATTTTTGTATTTTTAGTAGAGACAGGGTTTCACCATGTTGGCCAG
GATGGTCTCAATCTCCTGACCTTGTGATCCACCCGCCTCGGCCTCCCCGAGTGCTGGGGTTACAGGCGTGAGCCACCATGCCCGGCCCTTGTTT
TGTTTTTAAGTCACTTTGGGTTCACAGTGTGTCCTGAGGTGTGGGGGCCTTCGGGGGGCTCGGGAGGCAGTTTCCTTTAACTTGCAGATGCCCC
TGCTCTGCGACTGCATCGCATGGAACCTGCCCTTCTCGAGAAGCTGCCCCGCATGTCCCATGTCTCTGGGGCTTGTACTTAAAACTGACGTAGA
ATGATGGTCAGCAGCTCTAGGCAATAATTGAGTCCTGGCCAGAGGGGCTGGTTCTGAAGATGGGGGAGTCACAGGCCCTGTGTGGAGGGTGACC
TCAGGAGCCCCGGCCCACGGTGCTCGGGGTGAGCCTGTGTGGTGAGGACAGTCGGCGGGCCCTGGGTCTCTGCCCACACGGAGGTGAGGACGGT
CGGCGGGCCCTGGGTCTCTGGCCACATAGCGGTGAGGACAGCCGTTGGGCCCTGGACTGCCTCTGCCCACGCAGGGTCTTGCACCTGATCTGAT
GAGCAGTGCTGGTCCAGGGAGGGTCCCACCGCATCCTCCGCCTGCCTTGGCCCCTGCAGTAGGCAGTGCTGGGGAGACAGACTGAGCGGGAGAG
GAGGCTGGGCCGGGGCTGCAGCGGCCACAGAGCCTTGGCCCTCCCAGAAACGGACTCTGATGGCAGAGGCGCCGGCCTCTTGCACAGGGTGGAA
GGTGGTGCCTGCGTGGATGGTGGTGCACCGGGGCAGGCCACCCCCTAGATGCAAGAACCCCTTGGGTGCACCGTGTGGCCCCCAGGAGTGTTGA
GACAGTCTGCCTGGGCCTCCTACAGAACACAGTTGGGAAGACACGCCGAGGGCACGGGCAGGACCTCACCTTAGCCTTTCACACCAAACATTCA
TCTCCTGAAAAGACAGGGGCCGTGGGGCCCCCAGCTGGGCTGTAGGCTCTGAGGACAGCCCCAGCACCTGTCACCCGCCAGGTCATGCAGCTCG
TGTCCCTCTGTGCAAAGTAACCGAACAGCCTCCCACAGCCCTCACCGTCGTACCCCGCCCTGCTGCGTTTGCTCCCACCGCCCTCCATGGACGC
CGTGTCCCTCCTCCTGGCCCTCAGTCAGGGCCTTCTGTTTGTCTTGCAGCAATCATGGAATTTGGGGGCTGGCGGCGCTGCGCACATCACAACT
TCCAAACCCACTATTTTATAAAGGGCCCAGTCAGTCACCTGTCTCATGGCAGCCACACAGCTGGTTCATAGCGAGGAGAGGTTTGAGCTTCCTG
GTTCTTAGGCCACAGCCCATCCCTCTTAGATTTTAAAACAGATTTTCAATGAGTTCTAAAACCTGTCTTACTGGAGGGTTAAGTAACTGATAGA
AGCCTGTCATGAAGGAAGAGAAGCGTGTTAAGGTTGTGCTTGGAAAATGTTTCCATCTTAGAGAACTGGCCGGGCCGTGGCCACAGGTCACGAT
GAGTAAGCACTGCATTGACACAGGCTTCTCCATCTCCATGTCAGGACGTGCACTCGCCGATGAAGTGTCCACCCAAGATGGCGACGGGTGAGCA
CGGGCACGTGTGGCCCGGGCGAGGTCTGTGTGGTGCTGAACGCCTCCTCTGCTCTGTTCCCTTCCAGCCCGACCCTGCCCGCCCTGGACTGGCA
GCTGCCGTCCCACTCAGGCCCGTATGAGCTTCGGATTGAGGTGCAGCCCAAGTCCCACCACCGAGCCCACTACGAGACGGAGGGCAGCCGGGGG
GCCGTGAAGGCGTCGGCCGGAGGACACCCCATCGTGCAGGTAGGCACTGCGGCCAGACTCGCACGTCACTTGGTGCTTTTGTGGTCAAAAAGTA
ACTTTGGAGCCACAGCTAACTGTGCTTAGACTCTCCCAGCCAGGCCAGCTGAATGCTCTGTCGTGGTTAGTCCCGGGCGGCTGCTCACCGCCTC
TGAGCTGGAATGGGAGCATGCCACAGCTCCTCCTGCTTCCACACGTGCAGGCCCTCTCTCGTTGTTTTCAGATTTGCCCGAAGCAGCTCTCGTA
TCCGTGGATGCTGCCTGTGGTGTGGATGTTTTGGGGGTTGATTCTCCCCTCTCTAAAGCCTCTGAACTTGGAGGCAGGAGTTCTCACCAGCAGC
ACCAGCCTCGCCTGGTGGGGGACCCTCAGAAATGCAGGTTCTGTGGCCCACCCAGGCTTGCAGGATCCCATACTCTGGGCTTGGGTGCTGGGGG
GCACCAGGGCTCAAGGTGCTCCCCGAGGAGAGGAGGAGTGGCTTCCAGAGCGGGCCTGGGCCTGGCAGCCACATCCCTGCCGGGGTAGGCCTGG
GCCTGGCAACCCTGCAGCCGCGTCCCTGCTGGGGTGGGCCTGACTCCCCCGGGCTGTGGTGTGGCTTCCTCACCTTCCTCACACCTTGCGGGAA
AGCCACGTGGAGTTAGGCTGTCGAGGGAGGGGTGTAATGACCGCGCCAGGGACGGGCAGCGTCTGCACAGAGCCATGCTCCCTCTGCACCCCAG
GTGTTGATGTGGATCCCGGGTAGCCGTGGGTGTTGGCATTTTCTTCGTTCCACCTGTTACCTCGTCAGCTATAGGCCCCAGGCCCTAGATCTGC
TGCTTTGGCAGCCACAGAGCAGCAAGTGTGTCCAGCCCCAGGGCTCCAGGCTACGCGGCAGCACAGAGGATGTTTTCCGAGCACACCCCAACAG
CAAAAAACCGGGTGCCCCAGCCCCGTTATTTAGGGAATGATGCAAGCCGGAAGGGGTGTTCAGCAGAGTGCCTCGTATTTTTATTTTCTTCCAT
TTAGATAAATAGTGGAGAGAAGGTGGCCGCAGGGACAAATGGCTGTTTGCCAACGCAGCAGCCGGCGGCAGGGTAATTAGCGGGCAGGGCGTGG
GGTGAGGCGTTTTCGCCAGCACTTGCAGATGATGTTAATGTGATGTTTGTGGCCTGTGTGCTTGATGCCAATTAGTACCTCCCTCGTTGGTGCT
TGAAGCAAGGAAATGCGGGAGACACCTGAGCGCACAGTGGCCCGTTTGACATTTAAAGTCTCCACCCTCCCAGGTGGGAAAGGTCAGACAGCGC
TGCACCACGCTCCGTCACTGCAGGCCTGCACCTCCCCATCCCTGCCTCGGTTTTTACTGACCGAAAGCTTGTTATTGCTCAGTGGGAAGGATAT
TAGATAGGACAAGAAACGAGGCTGTGAAAGGAGGAGTGGAAATAAAGCAATAGAGAAATAATGGCCCAGTCCACCCTATTTGCTGTAAATTATG
TCGGTGAGGGGCACTGACGTCGCCCTTTTCACTGTATCTGGATGAGGGGCGGGTGTAGGAATCGAGGCTGTTACTTGGAGGGTAAAGCAGGACC
ATGAGTGTGGAGAGAGCTCTGAGGTTTCTGTTTGTTTTGTTTTTTGGTTTGTTTGTTTTTTTTTTTTTTTTGAGACGGAGTCTCGCTCTCACCC
GGGCTGGAGTGCAGTGGTGTGATCTCAGCTCACTGCAACCTCTGTCTCCTGGGTTCAAGTGATTCTCCTGCCTCAGCCTCCCGAGTAGCTGGGA
CTACAGGCAGCCCTGGGTTTTAATGGATGTATTTTCACCTGCCTGTGAGTAGCGCCGGTGCCTGGTGCCGCCCGTCTCTGCGGACACAGCTCAG
TGCTTGGGTACTCTCCCTGCGTCTTCTGGAATCTTCTGGAATCCCGTCTCTGGTTCTGCCATCTGGGTGTCTTGGGCTGAGGGTGCAGAAATCT
ATCAATACAGATGCCACTGAGAGGATCCAGGTGTTCTGGAGGACTCAGGAAACTTGAAACAGTAATTAAAAATATCTTTAAAATGTACCCTCAA
CAATTATTCCAAATCAAGTGGCCCGTGTGTGCGCAGCAGCGACACGGGGAGAGGTGGCTCTGCGTTTCCACAGAAGGAGCCCTTTCCATTGAAA
CGCGGGAGAAAACGGTCCCCTGCACGGAGAACGTCAGGAGCTGTCAGCATATCTCATTTGTAGAAATTAGTAATTTAAAGAGTTTTGTGATGTA
TCTGTGGCAGAGTGGATTTCTGTCTCTGCAAGTGTGAGGTAAAAGCAGCTAAAAAGAGGGGGTTTTGGGGGTTAGTTTTCTCTTTCAGTTGGTG
GACCACAAATTGGATAAAAATAGAATTTGTGCATAATTTAAAAACAAACGAGAATAGAAAGCTCTCAGTTGCCGTGGAAGCTCCTCGTAACCGC
AGACGTGCCCTCGGTGCCGTCGGGTTATTTTAGTACATCCTTTGACGCGGCCCCTTTCCCGCTTTTCAGAAACGAGGCTCATCGCACTGGCCTG
GGGGCGCGAGGACGAGGCCGTGGGTAGTGGGCGCTGCGGGCGGCTGGTCAGAGCCACTGGGAGCCGTTGGGAACAACTGGCGCGGGAGTTTCCT
GCATTTGAGAAATGCTGTTCTCTTCGTTGTGSAATCGTCTGTCCGCTGCATCTAAAAAGCTTGTCCAGAAAATTAAAGCCCGCTGTCTCCTGCA
GTGCAGCTGAGCCCTGGAGGGTGGCGGGGGGCCGGGGGATGTGGGTGTCAGCTCTCGCGGCCAGGGGCACGCTGTGCCCCCGCGCCCGGTATCC
CCGTCCTCCCGCACCCGGCGTCCGCGTCCTCCCACGCCCGCTGTCTCCGTCCTCCCCATCCCCATGTGTTTCGCAGTTGGGAAGTGAAGCACGT
GAGCAGAACGCAGCACCTTCTCTCCAGGAAGCATTCGGAGCATGGACTCTGGGTTAGGAAAGGGTGTTTGCTCCTCTGGATAGGTGCTCGCTCT
TACTTGTGGGTGCTGAGGGGCGTGAGGGGGTCCGGCATCCGGGTACCTGTGGGCGCTGAGGGGCGTGAGGGGGTCCGGCATCCGGGGCTTCTCC
CATTTAGGGCCTTTCCTTCAGAGGGAAGGAGGCCAGCCCCCTCCAGTGAGCACTGAGCGTGCCCCCTGCCGTCTCTGTGGGGATGTCATTGTTC
CCACGCCGGGGAGAGACCACCCCAGGCCAGCCCCTATTCTTCTGGCCACATTGCCATGATCACACCGTCCGCACCCTGAGGCCACCCCCATTAC
GGCTGCCACGGCGCTAAAAACACCAGCATCAAAGCAACAGGGCCGTGGTTTAGCCTGGAAGAGCGGGGCCCTGGAGCCGTCTGCGAGGGGGTCT
GGGTGGTTCAGGATGGCCGGCAGCCCCTGGTGGACGTGGTCCCTGCGGGGTCTGGCGGGACCTCGGCCATGGTGATGGGTGCGCCCCCTCTGCA
GGGTGGGGCCTGCGGGTAAGGACAGTCCCGCCCCCTGTGCGTGTGAGGGGATAGTGGAGAGAGGGGTCTGGCGTGGGCCTCACTGCTCCTGGGA
AACCAAAGATGAAGACGCCTGCTTAGGACTCACCTTGCCCTGGTAGAACAAGTGACTCAGACAGAGCCTCCCAGAGGCTTCTGGCCAGGCAGGG
AGTGACCAGCAGCGCAGCCAGCCTCAGCTCCTGCCCACACAGCCCCCTTGTCACCGGCTCCTCCTGCCCCTGCTCCAGCACCTTGGCCACCAGT
TCTCGGTGGGCCGGTCTGGATCTGCCGATGCCGGGACCTCGCCAGGCCGCTGGTTGCAGGGGAGGCTGAGGGGGCGTCCGCCTGCTGTCTGCTT
CTCACCAGCATTTCCAGTGAGGCATGAAAGTGATGCGTGGCGGATGTTTCCCTCTGGCCTCAGCTTTCCCCCAAATCCCAGCTCACACTGAGTG
TCCTGATGGTGGCACCTCGGGCAGCCGCCACCCTCTGCCCTCCACCCTCTGCCCTGACGGCAGGCTCTGCCTGAGGGGGAGGGTCTCTCTGTAC
ACACAGTCTCCTCACCCTGGAGGGCCTGCTCTGCTCTCAACGGAGCTGGAACCAGGAGTTCGCGAGTGCTCTGGGTGGCTGCTGGCTTTTCTCC
TTGTCTCACCTCCTCATCCGCACACAGCCTCTGCCCTCAGCGCTGCTCACCTCGGTATGTAGGCAGCCGGCATCAGGATGGTCTGGGGTGAGAC
AGGCAGTGTTCTTCCCCTTCTCTGGCCAGGGAGGGTGGAGAAGCACCCGGGCACAGCCATTGAGGCCTTTTCGTGCAACTCATTGCCTTTCTGG
GCGTGAAGGTGGAGGCTGGTCCTCCACCTGCGTGTTCTCCATCTGGGGGACTGTGGTCCCGGAGGAGACCTGGAGTCCGGCTCCCCGCTCCGTC
CGAGGAGGAGCTGAGCGGCGTGAGCAGTGCCCGCCCTGGTCACTCTGCCTTGCTTTCCTCCTCTCTGTTTCTGGTTGTGCCTCCTTCCTTCCCT
CCTGCTCTCTTTGCCGTGGACTGCAGCCCCCTCGCCAGATGTGTTCCTCACATGAGTCAACCCGTCCTTGGCCTGCGTCCTCCACTGCTCGTGG
CAGCTACACTCTCCCGGAGGTGGCCGGGAAGGGCCCAGGGCCTTGAGAAGATGTCTTTGCAGCACGTCCCCGGCCCTCGGCCTCCACCTCCATG
GCACCCACCATCCCACGGGGGCACGTGGACCTCTGTGGGATATAGCCTGACCTCTGACCCAGGGGTCAAATAACTCAGGTCTGTTTACCAAGTC
ACCAAAATAACCTGCCCGATAGCATCTCACCCATCACACGGGAGGCCGGGCTCGTGTGAATAATTAATAGGTCACTGGAATGTGAAACGAGAAG
CCTCGGCCCGTTCTGAAACAGCATTTTAGGTTTGCAGCTTATAATATTGTCAGTTAGGAGAAGGGCCAACTGAGTCTGCAAAGAGGTGAGGGCG
GGTGGTCTGGGATCCTGCCTCAGCCGCGCGGGTGAGAGGGGCGGGCGGGTCAGGCGAAGACTCAGAGTCAGGAGGCCAGACTGGCCCCAGGGAG
GGCTCCTGGCCATACCCCAAGCTCAGGACGCAGGGTGGGGCGGGCCCGCTGGTGCCCACAGTGGCCTTGGTGGGCCTCTCCTTCCATTGCCCAG
CTTGTAGGTCAACTTTGCCTCCACAGATCCGTAACAGACGTTTTTTCTGTCATGTAAGAAACTTGACAGCTGAAGACCAAGGAGTGGAGCCTCC
CGTGAGGCAGCTCTTCTTTTCCGGTTGTTAAAATGCGCGTCGGGCCAGTGGTTCTGACTAATTCTCACTTTGTGTGGTACCTTCAGCTGGCAGG
GGCTCGGGGAGTGTTCAGTACCGTGAGGAGCAGGTTCCTGAGAGCCCGTGAATACCGTGGACAGATTACCACAGCACGCACTGTTCCACGCAGG
GCCTCATCCACGCTTTCTTAAGTGGTTTGCCACACACAGGAGCTCCTGGTTCTCCATGTCCCCTGCCAGGCAGGGCTGTTAAACTGGAAAGCCG
GGGAGGGACGTCGCTGGGACACATTGTTATCTGATCAGAGCTCCGACGCCCCACCAGGAGCTGTGCTATTGCAGAACCTCAAACAGCAGCCGCT
CCGGCCCCGCCCCAGGAGCCACGCAGAGGCCCACGCACGGGGAGGACGCCGTGGGGTGGAAACTAAAGTGCAGGTCTGACCACAAAACCACACG
CCACGGCACCGCTGCTGCCAAATGCCGGAGGCCTGCAGGAGGCACGGATTAATTTTTTATGAGTCTGCCTTGGAACCTAGACAACAGCCCTCTC
CTCTTTCAGCACAATTTCAGGGCGAATGACCGTCACTTCCCTGGACTGCTAAGCGCATAAACGCACAGGGAATTTCCTAGTTCCACATACGCCG
TTGTTCCCGCAGCCCATGCAGCTGGGAGAGCACACATGGTTGCCGTCGGGCTGTGTCTGTTTTCCCAGGAGCAAGAACTCTCAGAAGTGCAGTG
TTGAAGCCCGAGCCTTCCCCGTGTCAGCTTTTATGATGAACGAGGATTCACCATTTATTTCTCCCCTAAAGCAAAGCCCACGGGCTCTGTTTTG
AGCGATGGGGACAGATGCTCGGTGCTGCTGGGAAGGTGTTCACGGGGCAGATTCGCTGTGTCAGGAGACCAACGTGGAATGAGGTCGGCCCAGC
CAGTCACTGCTTAAAAACAGTAATGACAATATTTGAGAAAATGGGTGGAATTTTGTGGAGATTTACTGGCACGGGGAAGGCGTGTGGCCTCTGG
CAGGTCTGCGACACTGATTTCTAACTACCTGTTCCACAGCTCCACTGCCTGGAAAAACTGGCAAAAATGTGGCCTGGGTCTCCTGACAGGCCTG
GCCATTGGACTGGGGGTGTGCAGCTGAGACAGGAAATACGAGGCGCATGAGTGTCCCCAAGCCCAGATCCTCAGCCTCCAAAATCTTCTATTAG
TAATTTCAGAGCTTTGGCTTCTTGGTGCTTTGGGAAAATTTAAGATGACGCGTGGGCTCTGGCACGGCCGTTGCTAGTGACCTCTCCTAATAGC
GCAGAAGGGCCTCCCAGGAGGCTTTCCTAGGTAGAGAGGGGTCTGCACGCCCACTGGAACATGCTCTATCCCAGCCTCAGAAAACCCACATTTG
GTCCAGGTGGGACAGGAGGAGTGGACACGTCACCTGGAGACCACATGAGAAGCGGCCATCTGCAGCAGCAATCACCCCGTGGGGAGGCGGCGCC
CTGGCAGCTCTCATGTGGGGCCTGGTCCTTCCTCGCTGCCTGAGCAATGGGCCCTGCTTCCCCGCAGACACCGTGGTGCCCCTGGGCCACACCC
AGCAGGTGTCCAGTGACCGAGGGTGGTGTTGGCCATGGCAGGTCCCTGCCCGTTTCTCCGAGGACCTGGGGCTGTGACCCAGCTGGGTTCTCCC
GGGAAGGAGCGGCCACTGTCTGCACTGTCCAGTGCTGAGGGTGGCAGCCATTTCTGAAGCCTCCCAGGTTTGTGCCCTGCTGTGTCTGAACAGC
TCCGGAGTGCAGGGTCTCTGTGTCAGTGCCGGTTCTAAGAGGAACGAGATGTGGTTTCAGAGACACTCCTCTTCTCTGAGGAGCTGCTGGGCGG
GACGGCTGCTTGCTTTCTTTGTCTGTGACGTTGGTGGCTGTTCCTTGCCCAGGCCCTGCCCAGGCCAGACGTGGGAGTGGCGGCTGGGAGCACC
CATGGGCGTGTGCCCGTCTGGGCTGGGCTCGTGTCCGTGGACCTGCCTCAAGCCACACCTCCCTCCTCCAGGCAGGACACCGGGCCTTGTCTGT
GGACACAGGCGCTTTGCTGGGAACAGCACAGATGGCCCCTGGGCCCTGCGGAGCCGAGACGCACCATCATACACACTTGGAGCACATAGACTGA
CCAGGTCTCACCCTGCGAGGCTCCCTGAGGCCATGTCCTAGGGAAATAGAAGGTTTCACCCGGAGATTGGGGAGTGCAGGGCTGTGGCGCTGCA
GGGTGCGGGCCCTGAAGGAGGGGCAGGGGTGCTGCTGGATGGTGGCTCTTCCACCCCAGGATTCCTCGGGCCCTTCACCCCTGTGTGTCTGGAC
TGGGTATCGCTGTAGCTGTCGGGCTCTGGAGGTGCACATGGCTGCTGGGCGGGCAGCGCTCCTGGGCCTCTCTCCCCCGTCATTTCGGTTTTGA
TGTGTTTGAGCCACTGACCAGCAGGCTTAGGGGCCATTCTGGAGCTGGGAGGGCTTGTGGGGGAGGCAGGATGAACAGGGGCTGCTTGCCGGTC
CTCAGGCCACCCTGCCAGCTCCTTGATGTGTCTCCCTGAGATCAGCCAGGGCATCCCGGCTGTGGGTGGGCTGTGACCTGAGCCCGTCAGGCCC
TGCTGGGGTAGACTGGGGAGAAGTGCTGAGCGGAAACCACCTCACTTCTGACAAATGACAAGCGCTCCTGCCGCTTGGTGTCAGGCGACGCGAC
TCTCAGTGGCACGGATGTCTCTAGAAGGTTGCCGTTTCTCCCTTCGTGGCCGTGGGCTGTGGATTCTGTGTGCTTCTGGCCCTGGGGTCACGGG
GTTGCGGCGTTTCCCACTTGCCTGTTTCAGGAGTTGCATTCTAGATGATTCTCTCTCCATAGAAGGTCGAGGTTTCTCAGCATGGATTAATTGA
TTAGATTTAATTAAATCTAAACGTGGTGTTTCCGGGCAGAATCTTCTTCAGCCAAAGTGAGCGTGGCCGTCTCTTCTCTGGGCGCTTCCAGGTG
CGTTGGGGCCCCTGCACCCTCCACGTCAGTGCCCTGGCTCCGTGGCCCTGTCGGTGCTCTGGTGAGTCTGGGGTTCGTGCCGAGCGCCATTGCC
TCCAGGTCGAGGTGGGAAGCGCGCTGGTGGGGCAAGGTGGTCCCTGCATGGCACAGGTTGGGAGAGCAGCCGGGAGGGCAGCGGGCCGAGGCGG
TGGGGGAGGGCACCAGTTCTCCACGGCAAGCACGGCCTCTGGGGCTGCTCTTCCGGAGAGACGTGGAGACCCGCGTGCACGTGTGGAGACTGGC
ACGTGTGAGGGGCCCACAGGTGTGGCCGGGCGGCCTTTCTCCTCCCCACCTCTGTCCACCCTCGCCGAGGCGTCGGTCCTGCTGAGCAGCCTCT
GCTGCCTTCGTGCAGGTGACAGCGCACGTGCCATTCACGGGCGCCATGTCTCCAAGAAGAGGGGCTCCTGCCGCGTGCCTGTTCTGGGGTTGCC
ACTCAACATCCTTCCAGCACCTTCTCTGGGCTTCCGGTTTGAATGATCTTTCTCCAAAGTCGGCGGAAGGGGCTAGAAAAGTAGGGACCTGGGA
AGAAAGCCCAGACACCTTGGAGCCGGGGTCCGGGAAACAGGCCCTGGCAGCTCAGCGCTGCTTCTCTGGAGTGGGGATACAATGTTGGTTCACA
GACGTGCCGTGGCGGCGGCGGGTGGTGGCAGCAGTGTGCGGTTGTTGGCGCCACGTGCTCACGCTGGGTCCCTCCTGGGGAGCTTCTGCTCCGG
CGGGCCACGCCTTGCTGTAGCCTGCAGGTCATCTGGTTGGTGTCTGGGGGACGTCTGGGGCCCCAGCCCGGAGCTCAGCTCTGAGCATCAAGAA
ACCCGAGTTTCTCCCCACTCCCACCCAGACAGCTCCCCACTCCCACCCGGACAGCTCCCCACTCCCACCCGGACAGCAGCAGCTCTGTTTGGAA
GGGGACACACCAGAGCTTCCCTTGTAGCAAGTGAGGCACGCTCAGCTGGAGCCTGGCAGTCCTGCAGCTCCGCCTGCCCCCTTTTGAAAACCAA
AAATCCCAAGAGACTTATGTTGAAACAGCCCTTCCCGGTCAGGACTGAGCCTGTGGCTGAGTGCAGTTTTTCAGTCGCGGCTGGAAGGTCCCTG
TGCGGGGCGGCGAGTCCCTCTAGATTTGCTTTACAGCCACAAATTCAGTTTTATCTGTGGATCTGAACACGATCTATGAATCACTAGGAAAGCA
ACTGTGTTCACGGGAAGGATTCTCAGAATTGAGCTGACACTCCGTGGTGTGAACTCAGTATTGTCAGCTTGTGCACCGCGCGTATGGACACACA
CCTGCACGCACTGTCACACACACTTGCCTCGGGCCCCCACACACACCGCCCTGAGAGCTAGGAAGACGAATCGGTCAGTCACACGGATTCTGCA
GACAGCTTCCTTCACCAGGCATGGTAGTGAGGGCAGCGCCCACTACTCACCCAGGGCCTCTCGTGCAGGAAACTGCATGGACACGTCGTCCTGT
TCCTGTCATGGGAAGGGGCCTGGAGCCGTCCCTCGGGGGGTGGGGAGGAGCTAGTTTCCCAGTCGGCGCCCGTGCATTCACCGGTCTGAGAATC
CACTCAGCAGGCTTGCTATGTAACCTCCGCCGTTCAGGCCTCAGCATGCAGCAAGCCCGTGGGGTCCCGTCTGCCCAGCCTCTGCCTCGGTTCC
TGCCGGGCACATGGACGCTTCCCTTGAATCCTTCTGCCGACGGCATCTGTGGGAGGGCAGGTACGATCGATCCTGGTCCTGTCCCCCTAGCCCT
GGGCGGGTGTCCCGGCACCTCCAGGCACAAGGCCCCTTCCCCAGGCTGCCCAGAGACCCCAGCCCCGAGGTGCTGGTCCGCCCACCCTCTCTGG
GAAGGGCTGTGCCACATGGCGAAAGCTGCTGTGGGTCCTGGTACCTGGTGTCCCTGCCTGCCAGGGCTCATGATGCCAACAGTGCCAGGTTTGT
GGGATTTGGGGGTCAGGAGGGCCTGGCCCTGCTCCTGCAAGGCCGAGATCTGTTCCCTTGGAGGGTTGAGGGAGTGTTGGCTGTAGGGTTCCTG
GAGGCCTCTCTCATGCACTCTGGGTCTGTCAGGAGGCTGGCAACTGTGGCCAAACAGGTAGAAATAAAACCTGAAATGAGAAAAAAACTTTTTT
CTAGAACTTCCCAGAGAGCAGTGAGCTGGTGCCAGTGGGTCAGAGGCTTGTCACATGTGGTGTGTGTGTGTGCGTGTGTGTGTGCACGCTCTGG
GGGGGTGTGCACATTTCCCAGTGTGGCTGTGCGTGTGTGTGTGCCCACGTGTGTTCACAGAACACCAGGCTTTGCCCCGACTCCTGGCTCAGGC
CTGAGTCTCCAGCCATGGCGTCCCCGTTCCTCCCGTTCCTTCTCTGCACTGCACACTGGGAACCAGGACAAGAGGTGTGCGGCGTCAGGCTGTG
TCCTTCCCCCACCCACCCCGAGCCCACGCTGCTCTGGAGGGAGACCCCAGCTTCCCCCGCCTACCCCGAGCCCTCGCTGCTCTGGAGGGAGACC
CCAGGCCCCTCAGGCCCTTTCCCGCATCTGAAGGGGCCAGGGCAGGGCGTCCGGCAGATGAAGCTGCCCCTTAAAGCCAGGTCTGGGCCGGTTT
ACAGGGAAGCACTGCTCACGTACAACCTGGCAGACCACACCAGCGCCGCACACACAGGCACCCCTGTGGGCACCCACGTGCCCGACCCCGCAGA
CCACACCGGCACTGCACACACAGGCACCCCCGTGGGCACACACGTGCCCGACCCCACAGACCACACCGGCGCTGCACACACAGGCACCCCCGTG
GCCACACACATGCCTGCACACGCACACTTCTGGTGCACACGCCCACACTGACGGAGGCTTCTGCACACCACACAGCCAGCAGGTGAGGAAGTGG
ACGCTGCGTGGCTGTCTCTTGGTGGCTTCACCTGGAATGTCACCGTGGACCCCAGAGCCCGAAGCCCCGGCAAGCACAGAAATCACACCGGCAG
CCTGTCCCACTTCGGGCAGGTGAGGCCTGGCTGAGAAAAGGGGGAAGGAGAGGGAGGATGCGGGGGTCTGTCCTGGTCCTCCACCCGTTTCGGG
TTTGGGGTGCTCCCTTCGACTACTGGCTCCATTTTTGATGTCTTTTACTTTTGTTTCGATTTTTCCTGGTATCTTGAGTAAAGTCTCCCTGGAG
CATCAAATTGGATTTTTCTTACAAGTACCGTGTGCTGTTGACTCATCTGCTTTGGTGTGCCGTGGGTCACGTGGGCCTGGGCTGTGGGTAAGGT
GGGCCTCGTTCCTGCAGGAACACCTGGCTCTGCAGCAGTGGCTGCCGTATCATCCTGGCCAGGCCCCTGTACCGAGGGTGGAGCCACGGGGTCT
CTGATGCCTTCCTTCTCGTGCTTTGGTGGAGAATGTGGCTGGACGTCCTCCCATGACAGATGCACTCTCCTGCCTGGTTCCCTGGCCCCGGGCC
CAGCCCTGAGAGACGCACCACGGCCTTCACCTGGAAGTGTCACCTCTGGCTGCTGTTGTGGGTGATGAGGATTCCAGGGCTGAGAAGAGGACCC
TAGACGCTGTTCACACAGCGTGGCAATCTCTCAAATTAATCCAGCATGGGGGGAATCGGGGTTGAAACCGGTTTGTGAGCCGGATTTTCTGTCC
CTGTGTACTTCCTTGGGGCAATTTGAAAAATGCAGATTTTACTCGTAGGCCCTAAATGGATAATTTCCCTTTAGGCTGACGGCTGCTCCTGTGC
CCTGCCTGGAGAGAAGCCTGACTCCAGGTCGCCTTGGCTCCGTTTCTGTGCAGCAGCTCAGACTATGGGGTGGAGGGTGAGACATTCCCACCCG
TGAGCTGCCTCTGTCCACCCCACACCTCCCTCCCCTGGGTGCACGCAGCTGAGTTCCACGTTGAATAAATTTGGCCTCAATCATCCACTACCCA
CCATGTCACCGTGTAAGTGCTGAGGTCAGCACAGGAGCTAAAAACAAACATTGTAACGTGTAGGAGACTCAGTAGCTCTTATACCTCGGCAGTG
GAATAAGAATAATACATTTTGTTTAGTTAAGGTTGAGGCAGAGGGAGGTCATTGTTGTGACAGGGAATTTTATAAATAGGATTCTGACAGGTTC
TGTACTGTGCCAGAGGCAGAAAGCCCATGCAGTGGGGCCCGTGACGTATTTAAATGACTTTTCTTAAAATGAACTTCATGTTTTAAATAATAGA
TGTTTACCTCCCAGGTGAAACCTTAAATATTCCCATTTTCACTGAAATGGCATGTTTTTTAAAGGATACAGTCATACCCCAAATTCACAGCATT
CCACACACCATCAGAGAACTGCCACAGGGATCCTGGGGGAATTTTAAATTGTAGTTTTAAGACCACGTGACCCTGGAGCTGCCCCGGTGCCCCT
CCCCCACCCCCCGAGGTGGTTTTGGTCAGCGACTCATTTACATTTTTTTCTATGTAAATTAAATTTTTAGGTATTAAATCTCGGAAAATGGAAT
ACTGCGTGGCAGAATCCGCCTCTTAATCTGCTTTTCTTTTTACATTTCCCATCATAAAGATGTTTGAGTCCCACAGAGAGTTAAGGTATCTCGG
ACTGCGTGGCAGAATCCGCCTCTTAATCTGCTTTTCTTTTTACATTTCCCATCATAAAGATGTTTGAGTCCCACAGAGAGTTAAGGTATCTCGG
GAAGTTCATTAACTTGGCAAACGGCTGGAGTCTCTCTTCCGAGGAGCTGAGGGCTGGACAGGCAGGTCCCAGCGTCCCCCGTCCTGACTGTTTG
TGTGGAGACACTCATGTATTCATATGGGAAGGGGGGCTCTATTGGAAAGGGAAGGGCTTTTTGTTCTGCAGAGTTACGTGGTCTTAGCAGTAAT
CACTTTGGAGTGGGCTGCTGGTGGCCTTGGGTGCAGAGACTCCTGTGGGCATCTGCGCACATGGGGGCTGTGTCCTCATCCCTGTCTGTGGCTT
CCCCACCGTGTTCCCACGTGATGCCTTCGTTCAGCCTCTGGCTTTGTGTTTCAGACCCCAAACGCCCCTTCGATGTCTCAGCTGGGACCTGGGT
CCCGGCTCAGCCTCACGCGGCGTCCCAGTCCCTGCCCATCAGTCTGGGCCTCACGGTCAGGCCCTCAGTGACAGCAGCCGTCGCTTCACTGTGG
CCTCGTCCCTCGAGGGCTCTGAGTTCAGCCGTCGCTTCACTGTGGCCTCCTCCCTGGCGGGGCTCTGAGTTCAGCCACCGGTGAGATTGGTTTG
TTCTTTACTGTGGTGACCACACGGCGGCTGAGGCTAAGCTGGAGCCACGGAGCAAGGGCCGCCTCTTCGCCTGCCCGGGCCCCTCTAGCCCCAT
CTTCCCTCTGCCCACTGACATCTGAGAATCCGCCGTCCCCTGGCCCGGGCTCCCCCGCCTTCTCCCTCGCCTCGCTGGCCCTGAGTGGGCAGCA
GGCATCTGCGTGGTCAGGGGCAGGCGTCGCATTTTCCTGTGGCTGGAACGTGCCTGCAGGAGCCCAGGCCTGGACTCTGCACGTGGTCATCGTG
CTGCAGTTGCCGTCTGTGGTCAAAGATTTTAAAGTTAGTTTAGTGAGAAAATCGACTCCAAACGTGATCAGAGGGGTCGACGCGTCCCAGGATG
AGTGGTTCCCGGGGCTGGGCGTTGCCACGGGCCTTGCATGGATTTTGCTGATGAATCTCAGGGCTCTGAGGCTGGCGCTCATCGGGCCCCACTT
GGGGGATGCAGAAGGGAAGGCACTCTGAACGAGGGGCCCTGTGGGAGGCCCCACTGCGCAAAGGGTTTGACTCCTGCGGCCTCCCTCAAGGCCT
TTGTGCTTCCTTTGAGAATCAAACGTTCCTGTTCCAAACCAAACTTGCCTCTTGCATATGGAATCAGACTATAGTGATTGTAAATGGTAGCGTT
AAAGATAAAAACAAACAGTTCTAAAAATGACTCACTGCTGAAGGCGGAACCACGCGTGGTGCAGAGAAGGAGGGTGAGAGGGAACGGCACCACA
CTCTGTGTTTACCTCTCAAGACGCTGATGAGCAACTCATCCCACAGAACAGCTGGTCCTGAACATGTGTGTGCCCTGCCGTGAGGCGCACACCT
TCCCAGAGGCGTGAGTGGGGCCCGGCCACTAGTGTCCTGGCGGAAGCACCGGGGCTGCTCCATTTGTCTGGAGTCCTGTCCCAGTGGTGTGGGT
TTTGAGTCTCACCCACACGGCGCCGGCCGAGAAGCCATGAGCGGCTCTGCAGGGTGGTGCGGACTATAGACACCTCCATGCATGGTTGCCCTAG
GCAGTGTCTGCCGCCAGCGTCTGCCTCTGGACACTAGCTGCTCAGCCACCAGGACGGCGTTGAGCGCTCCCCTGCCTGTGCAGGAGGAGAGGGG
CAGGGAGCCATCAGCAAGGGTGCTGGGGCCTGGGGCCCGTCGTGCTGTGTGTGTGCAAACGCAGTGTGGCGTCCCCTGATCAGGAGTGGGAGCT
GCGCGCTCCCCGGTTCCAGGTTAATGGAACACAGGAAGGTGGGTCATGTCCTGCGGGGCCTCATCTGGATTTATTGGTGAAGCGAGCCTTGCAC
ATGGCTCAGCGAGGGCTCCGCTTTCCTGCACACGCCCCCTGCCAGCTTCACTGTGGCCTCAGAATGGGCACACACAGCAAGTGTGGATGCATAC
GTGCAAGGCCCGTTTCAAAGCCTAAAACTCAGTGCCCAGGTCCATTGGGATAACAAGGCATTTTCTAATCTGATTTACAAAGACACCAGTATGA
CATGGCAGAGAAATAAAAAGGGGGCACGGCAGGGGGACACAGGCCTCGAACCCGCCGCAGGTTTTCTCTGCGTTCCGGTGACTCCCGGCGGTCT
GTGCTCTGGGTGCTGAGCAGGTGTTTTCTGTTCTCTCGCCAGCTGCATGGCTACTTGGAGAATGAGCCGCTGATGCTGCAGCTTTTCATTGGGA
CGGCGGACGACCGCCTGCTGCGCCCGCACGCCTTCTACCAGGTGCACCGCATCACAGGGAAGACCGTGTCCACCACCAGCCACGAGGCCATCCT
CTCCAACACCAAAGTCCTGGAGATCCCACTCCTGCCGGAGAACAGCATGCGAGCCGTGTAAGCCGCGGGGGACCTCCGGCCTCTGGCAGGGGGC
GGTAGGAGGGGGCGTGCCTCCCTCCCAGTCCCGGGGGGTCTGGCCAGCCCCCCGCACTTCCAGGCTGCGTGGCCAGGACACTTTTGGTTTAACA
GCCAATAAGTAAACTTCACTCTTGCTTTTGACAATGGATTTGCTTCTCTCTAGGGTTTCAGCCCTGTGTATATTGCCACTTAAAATGTCAGATA
TGCAGCTATAAATACCTCCCTCTGCATTTAGCTTCTAAACAGGACCCCTATTTCTTTCCGAATACAGCAGTGTAATGAGAGGATGGTTAAAACG
TGAGCATCAAAAAATTAAAGCAGTCAGCACATCTCGATCACGTTGACCTTTAGGAGGTTCCGACAACACGGATAGGCCTGTGCTGATGTTCTGA
GTCTAATTTGACACTGTAATTTGTTTAAAAGTGAATTTTTTAGTAAGGTGAGGACGAAACATGTAACTTCCAAATAAGGCCTTACTCACTTAAT
CCTAGCTTGTGCTGGGCACGCTGGCCCTAACCTGTGAAGGCAGCCGAGGAGGAGGACTGCTGGTTCCCGAGAGATTGATGTGGTACTGTGGGGG
GAACCGAAAACAGACACATCTGTGGGTGAATGAGTGCAGGTTGAGCTGGGACGGCTGGAACGTGCAGACCAGCAGGATGGAGCCAGGCCGGAGG
GCAGGGACGGCGTCCTGCGAGGGTGACCCGCAGGCTGGGAGCCCGTGTGATGGGGGAAGCTGTGTGTGGGGTGCCCCATCCAGGTGGAGCCCGG
GGGTGGGTGCAGAGGTCCTGGGGCTGCAGGAGTGGGGAGGAGTCCCGCACGGTGAGGGAGAGCGTGTAGGAGATGGCGGCGGGGGGCCACGTTG
GGGATTTTAATAAGTGATTCAAAGCCTGTAAGTCAAAAAGGGAAAGCTTTCTCTCCACGTTGACTTTTCAAGCACTGGGAGGAATGTACGCACC
TGGGAATTCATTCCAAATCCCTGAGTTTGCCTCGAGAGCTGTAATCCAAGTTTCCCGCAGACAGGGCACAGTCAGGTGCGTTCCACAGCCGTAG
TAAACGTCCTGGCTTCGCTGGCGGCTGCGTTCACCCCACCATGATGTGGGGCAGAAAGGGTGGCCGGGAGACGCCCGCAGCCAGGACCGCGCTC
CAGCCCTGTGCTGGCTGCCGCCTCGTGGGTGGTCGGGGAGTCTGTGTTTATTCTCATTCTCTTAACTTACTGAAAAATACTGCTTTTTAGTGCA
TTGAGAATGTATACATGGAATGTTTTACTGGAGTCTAGTTTTGAATGAAATTGTTAAGAGGTTATATGAAACCATAGAAAAAATGGGTTTTACA
CACAAAAAATGAGGGCTTTTAAATATAGTGGAAATAATAGAATAATTTATTCTAATTATGATTTATTATATATTTTATATAATTATAAATATAT
AATATTTAACCTAATAATATATAATATATAATTATTGTAAATGATAATAATAAATTGAGCTTTTTGGGAACTACTCCAAGATAAGTGAGAACAG
CAGGTGCCTCTGGCCCCTCCCCTGGGCCGCTCTCTGCCGCTCTGGTGACATCCCCGTATACGTGGCCAGCGTGGGCCCTGGAGGCAGCCAGGAC
TTGGGACAGCTCCGACTGGACCCGCTTGGTCAGGGGTGGAGGGTGGAGGCTGGAGGCTGGAGGAAGGTGGGAAGGGGAAGGTGGAAGTGGCTTT
TCTCGGGGCTGCCTCTGCTTGCCCCCTCGCCTGCGCCAATGTCAGATTCTCTCCTGCACTAGGCAAGGGCCTCACGTCGCTGGCTTCAAGGTCT
TGTTTTCCTTGGGGAAGGGGAGAGTGGCCAGCTGCCTGGCACGAGCTCGTGGGGCTGGGATGAGGGCCAGAGGGTCTGGGGGGCCAGGCCTTTA
TGCTCCCGCGTCAGCCATTGAAAGAAAAGCTGTGGGCTTTTGTTTTGGGCAGCATTGACTGTGCCGGAATCCTGAAACTCAGAAACTCCGACAT
TGAACTTCGGAAAGGAGAGACGGACATCGGGAGGAAGAACACACGGGTACGGCTGGTGTTCCGCGTTCACGTCCCGCAACCCAGCGGCCGCACG
CTGTCCCTGCAGGTGGCCTCCAACCCCATCGAATGCTGTAAGTGGACGTCCACGCGCCCACAGGGGAGGAAACCGTCCCGTCACATGCGCTTCA
CTGTCTCACCCTCTCTCAGCTTTTCGTTCGTGTAGACTTGGGACTGAACGGTTCCCACCAAACCCACCACAGTGTGTGGCCACGAGGGGTCTGA
GTTGATCATGGCTGAGTTATTGCCTGTGGCCTCCCGGGGGCCCCTGGCGCTGGCTCCTCTGATGGCTGAGCATGGCCAGGGAAAGCGGTGTGGG
CCGGGGCTTCCCCTCACGCTGCGCTGACCTTTGCGTATTTGTGCGATGACTGTGATTTGAGTGAAATTGGCTGAGTCTTAGGAAGATATTTTGA
TGACTTCTTCAGAACGAGGTGGAGACCATCAGGATGAAGTGTGCACGGCTTCTCCCCTAGAAGTAGTGGCATCCGCAGGGGTCGGCCCGCAGGT
CGTGGCGGTGCTTGCTCTGGGTGGGTCGGCTCACGTGTGACCTGCTGGGTGCCACACGTGTGCCCCAGGCCGCCCACTCAGGACAGGCCCTCAC
TGCCCCTCTCCTTCTGATGCAGCCCAGCGCTCAGCTCAGGAGCTGCCTCTGGTGGAGAAGCAGAGCACGGACAGCTATCCGGTCGTGGGCGGGA
AGAAGATGGTCCTGTCTGGCCACAACTTCCTGCAGGACTCCAAGGTCATTTTCGTGGAGAAAGCCCCAGGTATGCTCTTCACCAGGGGCCATCT
GCGGCCTGGGCTTCGGCGCTGGTGGGAACCGGTTCCCAGTCGGTGGAGCAGGACCCACCTGTGCACGGTCACCGGGACGGGGCTTATGGGGTGT
GGCACGGAGCAGAGGCTCTGCGTGGCCCGTGTCTGCATCCGGCTGTGGCTTTTTGTGTGAGCCGACAGCTGTGCTGCTGAAGGGAAGAGGTGGA
TGTTTATTTCTCGGGCCGCCGGGGCCACTGCACTCACATCGCTGCTGATACTCAGGGAGCCCACGGGCTGGGGACGCAGAGGAGGGCAAGACGC
ATTTGCTGGCTTTGCTGGGGTCCTCCATCTGCAGAGAGTGGACGCTTCGGGGGTCAGTTAGCAGCAGGGCAGGAGGGAGCTCCCCTCCGGGGCC
TTCCCCTCCCGCCAGCATTCCTGGGGTCGGAGGCAGGGATGGGGTGGGTGCCGCAGACGGCGGGAGCTGGGGTGGTCTTTAATGCCACAGCCGT
GGTGTGTGTGAGGCTCTCGTGCCCCAAGGGCACAGGTCACCCCTGCCTCCAGGTGTTGCGCTGGCCCAGCCTGGAGGCTCCGGGGCTGAACTTG
GAAGGGCAGCAGGGGTGTCCTCGGAGTGATGTTCCTCCTGGGGCCGTCACGCCTGTGGTTCTGTGCTGCCCACGGGAGACTGTCCTGCGGGGAT
TGGGCTCACAGAGTGGCTCCCAGCCCAGGTCAGTTCCATGCAGACGCCGGGCCCCAGCACTCTCATCCCAGAGGGGTGGCCTCGCCGGCTCCGA
GCAGAGTGTGTGAAGACAGTGGGCTGCACTGATGGGAAACTGGCATTGCAGGGAGAGTGGGCACCAGTGTAGCTGGGCACAGGGACCCTAGCCC
AGCCCTCAAGGGGGTTCAGGCAGAGTGGGCCTGGCTCTCCGCAAAGCCTGCCGTGAGCTCCCTGGTTTTGGGGGTTCCTGGTGCCTTGCTGGGC
CTCTGCCCAGGGTGCGCCAGGTGAGGGGCATGCCCCCACAAGGCCTGTTTTGTGATATTTTTTTCCTTTTGTACACTTACCAATTGGAATTCTT
TTGCACTTACTCCAATCCCTGGAAACCGCGGAGGCATTCAGCCTTGATAATGGGGTCTTGATTTGTACAGTTTGCCGGAAACTTAAGTGCTTCA
ATCAAAATCGGCTTTAGAGGTCTTTGACTCTAACTTGGCTTCCTATAGAATCAGGGCTTAATTGGAAAACATGTTTTAAATTACAGAGAAAACC
AACTAAGGGCAGTGACCGGGAAGGCATTTGCATTGCCCGTGCCTTCTCGGGAGGAGGCTAATTTTGAAATAATTTTCCCTTCAGAGCTTTCGGT
GTGTGTCCACGCGTTGGCGGAGAAACACTTCGCCCACAGTGTAGGGCCTCGCTTGGGCCAAGACTGGCCAGAACCGTGGCTCCCAGCTTCTGCT
TTTCAAAGCCCAGACCTGAGCAGCCTCCTTGCTTTTTCTTCTGCCCAGAGAGGCCTGGGCACCTTGGCAGAGCCTCCCCCCGAATGCAGTCCGC
AGAGGTGCCCCAGCTCCTGCCCTAGCCAAGTTACTGTGCTGAGTTGGTGCCACGGCGCCATGGGTAAGGGCAGCCACCAGCCTGCGAGGGCCAG
GAGCCAAGGGGATGCAGGACCAGCCCTGGCCTCATGCGGCCGCCCCTACAGGCAGCCCCTCCTGCCTTCATCATCACTGTGAGCTGTGGGGTCA
GCAGGCCGGAGGGGTACCTGTTCTGCCCTTAAGCTCGGCTGCCACAGCCACACTTCTGGGCAATGCCAGTTTGTCTGCCCATGTCCTCCTCTTG
TCCCATGAGGTCAGGGTGGGTCTCTGACCCTCTGCCAGCACCAGCCGGCGTCTGGTATACAGCAGGTGAGCCATAAATGAATAGGTGCTGTGCT
CGAGAGCACGTGAAGCTGTGAATACTGCAGGGATGAAGCCAGACCACGTTGATAATTTTATTCTTTATAGTTGAATAAGATAATTTGCATATTC
ATACACACACAAGCACATTCCATGTTTTCAAAAGTGGAGAACAAATGTCCACATAATTTTCTTCCTCCACTTCCGGCTTCTCAGGCGGGAGCCG
TTGCTTACAACACGTGCTGATGTGCAGTGACAGGTTGGTGCAGCAGAAAGCCCCACATCCTCATCCTGGCAACGAGAGAAACCACTAAACTGAA
TTTAAATTAAAAACACAGTTGCCCTCTCGTTTTCTGATGGGATCGTCTGGTCTGTTTAAAGTTCTGTTTTAGACTGCTCTTGCAGATGGAACCA
GGGCCGGGTGTGAGCTCAGGAGGGGAGGTTCCTGCTGAGGAAATCCGTCAGTAGGGCAGTTGAAGTGGCTTCTCCAGGAAGGGCCCCTGCGTCT
CTCGACTGTCCTGCTCATTCCGAGGGTGCAGATGGTTGTAGCTGTTGGGAATGTTGGCTCTGGACACAGGCCAGGGTCGGCTCCACCCTGTCCT
TCTCTGGAGTACGTAGGAAGCTCATTGTCCAGGCCAGCTCAGCCTCTGCGTATCAGCCAGGCCACCTTCAGCTGCTATGGGTTCACAGCATCTC
TGAGCTTTGGGAAGTTTTAGATGGAGCGGCTCCACTGCCCTGGAAGGCTGGGAGAAGCTGGTGTTGGCCTCATGAGGAAGGGAGTCCCCGCAGC
AGGGCTGCATTGCGGGGAGCCGGCCGGGCAAGGGCATGGCTCGCCGTAGCCTGGGTGCCGGGTCCCTCTGGGATGCTCCAGCAGGGCAGGAGGA
GGGTGGGTGTTTGAGTCTCAGCCTGCGCTCCACGGAGCTTCCTCCCAGGTGTCTCAGGGCGGCGCAAAAGGCCGGGAGCGGAGTCAGCCTTTCT
CTGAGGACTTAGTTTACAGCTTCCTCGGAAAACGACATTTTCCGATGATGAAAATCTGTGAGGAATGTTCTTCCAGGAGGCAGGTTGGCTGTGG
GGAGCCGAGGGCCGGGTGTTGGTTTAGAAGCCCCTGGTAGCATCACAAGAACCCCCAGTTTCCAAGGCTGCAGGGGTTCAGCTGCAGGAAGTGG
GAACCACACCCCTCTCCCACCCACACCCCTCCCCACCTTCACACCTGCACCCCTCCCGCCTGTTAAAGATCACTGTGTCTGTGTTCCGATGTGA
GGCACCTCTCTGTACACGCGTGAACGTTGAAGCTGCTGAGGGACACACTAACGTTCAACATAAACGAAACGCCCGAAGAACGCCCGCGTGAAAC
GTGAGCTCGGGCTGTGTCTAGAGCCTGGCTGAGATGAGACAGAAGGCGCAAGGTTCTGAGATGTGGATGCATCAAACATGAGCCAGTTCTCGAT
GCTGGAGCTGAACAACCTCCTTTTCTTAAGTCACGCGTCTGTTCTGGTGCCGTTTTTTAAAAACATCAGCGAAGCCTGTTTTGGTGTCGCTGCG
CGGAAGCCACACTACGACGCCGGGGGTGAAGACTCCCACTCCGTTTGCCAGCGATCGCGCAGCGGGCAGGGCTCAGCGGGTGGGGCTGCACGGG
TCTCGTCAGTGGTCGTTTCTGTGGCCGCCGTGACTGGCAGGCCAGCTGGGGCCTGGACGGCCGGCGTCTCCTTCTCCAGGTAATCAGGGCCCCT
CTACGTGGCCTCCCGGGGCCCCTCTGGGGAGGCAGCCTGGCATCTCACAGGCGGCCGGGGCTCCCGGGAAGCAGAGACGGGCTGTGCCAGGGCT
CCTAGGCCCAGGCCTGGACCCAGTGCCGTGCCAGCCACCACCCCAGGGGCCCTGCCCTGGTTCGCAGGGAGACACACAGAAATGTGGGAGGCCG
GGTGGCCTGCACGGTGGGAGCGAGTAGACAGAGCCCCTCCCGGAGGCCCCCAGCCCAGCACATCCAGAGCCCTCCCCTGAGAAACCCCAGACAG
CCAGGTTCGCCCCAAACCCAACATGGTGGGACCCCAGCTCGCCCCCCATCTCATGGCCGCCCCATCCCACGGCCGCCCCATCCTCTGGCCCTGG
ATGTTACCACGTGGAGAAGACAGGCCTGTGGGCAGGCACTAGCCACACTGCAGGAGACGCAGGCTAGGTTTCCAGATTTCTCCACACAGCAGCA
GGCGGAGGGCCTGCCTCCCACCTCACTGGGAGGGCCAGGACTCCAAATCTGGGCCAAATGTATGTTGTTATTTTTCAAATAAAGGGACCAAAGG
CCCGGGCCTTTCCAAGGCTGCCCTGCCATGGGACCGTGACCGGTGTGGTTCCCAGGACTTCCACAAGCTCTGACAGGCACCTGGCCGTTGTTTT
GGGAGGCTCCACCCAGCAGCCACAGAGCTTAGCTGGCAGCTGGCAGGACACTTGCAAGGACACGGAACTGTCACGGAACCACCGTGGCTTTGGG
CTGTCACGGAACCACCGTGGCCTTGGCAGCTGCTGGTCCTATGCCGGGACACACACATTCACCGCGGCGAGTGTGGGGTGCATGTCCCCAGGCA
GAGGCCATGTCATCCAGGTGCAGGAAGCGCCAGGCAAGGACCCTCCTGTCCGCCCAGAGAGCCGGGTCAGAGGAGTCCCCAGGCCTGAAGCCAC
TCCCTCCGGGCTCACCTTCAGGTTCCTTCAAGGCCAGGGGGAGGTTCACCCACCCCAGGGTGTCGCGGAAGCCCCGAGGCCCCTGCAGGCCCCG
ATTTCCCCAGTCAGGCATCAGTGCCCGCTGGCCACCCTGCCCCTCTCCTCCTCCAGCTGCCCCTGCTCCTTGTTTTCCTAGGGTCTGGTTCTTT
CTCGCGGGCGGGGAGGAGGTGAGGGTCAGGGCCCCTGTAAGGCAGACTAGTGGCACTGCCCCTTTCGGCCCTTGCTGTCCCTCCTCTGTCCCTT
GTGGAAGGTCTCGGCCTGGGGCAGAGGAGCGGGCCGAGGAGGAAGGTGGAGTCCAGGTGGGTGGTGGGGTCTGTGTTCTGTTTTAGTCGTGCGG
GATGTAGGCCGAGGGAGATGGACCCGGGGGATGGCTGCCTCTGTGGCATCTCCGTGGTGTGCCCTCTGACGGGGCTGGGTGAGCAAGGAGGACA
CAGCTGGGAATTCCCAGCTCCAGCGTCCGCGGCACGGGCAGCCTCCCTGTGTGGAGCAGCTCAGCTGTCACCTCCTGAAGATGTTGGATGCTGG
CCCCGAAGGCAGCATCGCAATGACAACACCTTCAGAGGTGTCCATCCCAACAGTTTAAAGGCCAAATGCAGATCTTTCAGATTTGTGTTTTCAG
GGAGAAGGTGACATTGCTGGGCGCCTGTGAGTGTGGACAGACATCACTGTCGCCGTGTGCTCCGAGAGAGGAGAGTTGGGGCTGCTTTGTCACC
ACATGGCGTCTTTGGGAGCAGGACAGGTGGCCGGGCTGAACCCCCAGGCTTCTCTGTTTGCTCCCAGAGACCACACAGGGAAGGCAAGGAGGGC
AGCGCCCGGGGAAGAGACACCTGCCCGTGTCTTCCTCATGCCCTGAGGATGGCTCAGTGGCCCAGATGGTCCAGGACCCCTAGAATTGAGTGAT
GACCCCACAGTTCTCATCAAGCCGCATTCTGGATAGCGCTAGGGGCGACTCTCAGACTCCCCCTGCCTGGGCCCCGCTGGTGTGGGGAGGCCAC
GCGTCACGTCAGTCCCCACTGCAGGAGGAGGGGCCGGGCTTCTGGCTCCCCTCCCTCCTCTCCCTTCTCAGGCCTTTTGGGATCATACACGACA
AAGTCACCCATGGTCATGTTGGCTAGTTTCTTTTTTATATCAGCTTTATCGAAATATGATCTATACACCATTTAATTCACTCAAAGTGTATAAT
TCGGTGGGTTTTGGTGGCTTCACATAATTATGCGGCCACCACCAATTTCAGAACATTTTCTTGTCCCCAGAAAGAAACCCTTGCCCATGAGTGG
CCACCCCTGCTCTCCCTTCCCCCACCCCGGCTCCGACAACCCCAATGCCCCCTCGCCGTGGCCTCGCCTGGTCTGGCTGCTCCCTGCTGGCCTG
CTGGGGAACCCCATCCTGCCGGCTGTGGTGCCTGGCAGCTTCTGTCGAGCGTGGCATCCTCCATGTTCCCTCGTTCGTGTGGGTCAGGGCGTAG
GGTCCTCAGGTCCCCTCGTTGGCACAGGTCGGGACGTGGGGTCTTTCTGTGGCTGAGGGAAGCCCACCGTGTGGCTGCCCACACCTGTCTGTCG
ATGGCACTAGGCCACGTCCACCCTGTGGAGATGATCGTGGAAAAGCCGCCATGAACCTCAGTGCGTGAGTCCTGTGTGGACGCCTGCCTGTCTC
CTGAGCACATGCCTCGGTGTGAAAGGGCTGTGGGTCACAGGGTGGCTCCGTGTGAGGCCCTGCAGGCAGATGTGCAGCAGGGCTGGGTGGCTGT
TTCCCCTCCAGAATCTCCTCTGGGAGCCAGGCTGGGACAGACTCCTGGGGGAGAGCCGGGGATGGATGAGACGCCCCAGGGACGCTCGCTTCTG
GGCATGAGGATGCTGTGGGGTGCACGGCACGAGGACGCCGCGGGGAGCAGGGCACGAGGATGCTTTGGGGAGCAGGGCAGGAGACGCCGTGGGG
AGCAGGGCTCGAGGGCACCGTGGGACCCAGGGACGCTGCTGCTTCCACCAGCGGCCCTCGTGGCTTTCTTTGTGGAAACAGTGGCTCAGCATCA
GCACCGGCGTGGGGGTGGCCCGGCTCCGGGCGGCGGGTCCTGGCCGGTCTGGGAGGCTCCTGGGCCCGCAGGCCTGCCTGTGTGGAAACCTCGC
GGGTGTGGCAGGGAAGCCTCCCGATGACTCAGACTGCAGGGAATTCCCTAATGATCTGGAATATTTTTACTCCTGCACTCGGGCAGTTTCCTAC
TAAGGACTCGGAGCTCTGATAAGGCTGAACACAAAGGCCCTTTCAGGACCGGCTGCCTTCCTTCCTGCCAGGGGCTGAGTTTTGAACAGCACGG
GGGCCGGCGCTGCCCGTCCGGGCCTCCACGGAGCTGGGAGCCGCCATGGCGATGCTCTTGCCGGCGGGACGCGGCCCTGCGTCTCCTTTCCTGA
GATGCGAGGTTATTTCCATCTTTCAGCAGTCTCGGCGCTTTGTCTTGTTCTGGAAGCAATTGCTAGATAGACATTTCTGGCCGTGAATACTATT
GCTTTTGAAAGACAATTACTTTATGATCCTTAAGCAGAAACAGAAAGCCTGCCCTCACCCTCACCCTGGTCGACCTGAAACGGCCACAGACGTC
GGACACCACGGGGAGAGGCCCCACCTCCAAGAGGGAAGGCCACAGGCGCTGGCTCAGCCGGGGTCTTTGAGGAAGGCAGGGATGTTTGTCGGTT
CCCCGCACTTTTAGGGGAAGTCTAAGCGTATCTGCTCCCACCTGCGCAGGAATTGCAGGGTGCGGGTGCTCCCAGGTGTGCGGTGGAGGCTGCT
CCATGGCAGCTGCTGAGCTGGGCCTGGCTGGCCACGCAGACGTGGCTCCCCTTGGGGCCGCTCCGGCAAGGATGGTTCCCCACAGGCCCACGAG
GCACGGGTGGGAAAAGACGCCTCCATGCCGTCGTTCCATTTGCTTTTCATGGACTCACCGCTGCGGGGCAGCCACCTGGAGGAGGCCGCGGGGG
AGACGGCTGGAGTCCCTCTTGCTTCTCGGGACATAAAGAGAGGAGCAGGCTGTGTTGGCCTCGGCTGCAAAAATGGCGTCCCCTCGGGGTGTCA
TTAAACGCGACATCCTGGCCCCGTFTGCGCCTCAGTGTCCCTCCTGCTCAGCACAGTCACTGAACCTCCCTCCCCTTGCCAGTGCCAAAGGCCT
CCACAGCGTCAGGGAAGTTCCTAGGGAAGCTGAAGTTGTGACTCTGAGCTTCCTGGGCTGGGCGGGAAGCAAACTATAGCCTGTTGCGCCCGGG
AGCTTCAGAGGACCACAGCCTTTTGTGGGGTGTGGACGGGGCCTCACCCCAAAGATGGACTTTGTCATAAGAAAAGTTCAAAAGTCATTTTCAA
AAGGTGCCAAACAACCAGAAGACTTAGTTACACACAGAGTGATTTGGATTTTTATGAAGTGGGGGTGGAGGGGCTTCTGAGTGGTGCATCTGGG
CTGGGGGCTTCTGGGAATCCTGTGGCATCAGCACCTGTGCTGGAGTGAAAACGCCTCTTTCTTCCCAGCTCCTGAGCTTTCCAGGGCCTGGAGG
ACTTGCTGCTTCATGAAACTCAGATGGCTTCAAGCGCAACTGAGTGTACTTTTTAGTTTCCTGTAATTTTTTTCCTAGAGGAGAGAGGGATGCC
AGGCTCTATCGAGTGGGTTCATCTGGTGGGTAATTTGCGTGGGGACCTCGGGCCTCCCGGGCTGGCATGGCCAGGGCTTGGCTGGGCGGCTCTG
GGGTCCTGTGTGACTCACATTTCCTCTCCACCCTCCACCCAGGCAGCAGCCCGGCACTGTAACAGAGAAAAAGGAGATTTTGTCTGATTTATCA
GTAATTGAGGGTTTGTAACAGACACACATTTTCTTCTTTGGAGACAGAGCATAAGGATAAACTTAAGTGTGTATACCTGTAACTGTTCATTTTG
GGAACAGACTTTATTTTGGAGAAGATAAAAGGCAGGAAGAGACTCTGTAGGAGATTGACATCTGTTAATTTGAGATAATTGCCCCAAACTCAGC
CCATCTGAGGGGCCAGGCCGTGCACACACCCAGGCTGTGGTGGGGCCGCCTTGTCCGTGTGCGCCTGGAGCCCCCACTCTGCCAGGCCTGGAGC
AGAGAGCACAACGCGTCCTTTCACTACACCTCTGGGAGCCTTTTTATTTTTTAAAAACATGCAAATGGCCACTGGGGAAATGCCAAAAATACCT
CGTGTTTTGCATTTCTGTCTCCTGATGGGCAAGAAGTTGTCAGAGGAAGGCTCTTCTCATTTACCCAGTGGTTCCTTTGCACACAGGCAGGGCC
AGCGGCCAGGCCCTCATCCACCAGAGTAGACCCCAGCACGAGCAGGCGTCGCACCCTGGCGTGGAGCCCCCGGCCCCCCGTCACTACTCTCACA
CCTCCTGCATCCCTGGGAGGCTGGGCTGGGAACTGCAGAGCCGGGTCCCAGGTCCACGCACAGACGCCCTGCACACGCTCTGCTGATGGGGTAC
CTGCTCCCCCTCACACCTGCTCTCCCTGGAGAGGACGAGGGCATAGAGACCCTCCCGTGACCTGTCCTGAGGCTGTGAGAGGCCAGCAGATGCA
GGGCCAGGACGGATTCCTGAGGATGCCCCTGCCCTGTAGTCCCTCCTACGCCGGGCTGGGGTCAGAACAAGCCCTGAGCCGCGTGTCCTCAGCT
TCTCCAGGCTCCCAGGGCAACTTTGGTGTCGAGCTCGGGGCCCTGCCAGGGCACGTGGCTCCTGAGGTGCTGCCCTCGACAAAGCCCTGGGATG
GGCCTACGTGGGTCTCCTGGGACAAGGCGCCCTCCTGGCTCAGGGCCCTGGGTCTGGATCACGTGGGGGTGTCTGGGGAGGGGGCTCCCCACCA
CACAGAGTCACAGACGTTTCCTGCTCCTTTCTTCCAGATGGCCACCATGTCTGGGAGATGGAAGCGAAAACTGACCGGGACCTGTGCAAGCCGG
TGAGTGCCTTTGGCGCAGCTGGAGCTACTGTGGGTCCCCAGGGCTTGGGAGGCTGGGGTCTGCTGGAGCCACTGCGGGTCCCCAGGCCTTGGGA
GGCTGGGGTTCCTGTTTCTTAGAATGAAACAAATAAAAATAGTGCATAGAGTAACAGAACCAGTAACAAACAGGATCACCAAGTACTCGCCAAA
GCACCATGTGCTGTCACCCAACGTGTCAGGTCACGTCAGAGCCCTGGCGGCCGGGGACGGTGCTGGACAGGCTGAGGGCCACCTCACACACCCT
GGCGCTGAGACAGCCCAGGGAAGGTCGTCTCACACGGACCCTCCCGCCCTTTGCTGTCCCCTTGCTGTCACCATCACCTGGCACAGAGCAGGCT
CCTGGGAGTCAGTGCTGTGCTGAGTTCCCGGGGGGTGGTCAGCACCTGCCCAGACCCGCTCACAGCACCGAGGGCAGGGCTCTGCGGCATCCCC
AGTGGGGACTCCTCACCCCGTCCTCCGAGGCCACTGATTGCGCCGACCTCCCCTGTGATGGTGTCCCAAGCACAAGAGCCTGGGCGTGGCTCCT
GGACTCGCGATTGGCCACAGCCTGTTAGCGGGCGGTGCATGTGTGCGGGGTCGTGGCAGACGCGTGGCTGGGTCACACTTCTGCTGTCACCGGG
CCGTTTCCAACTCCCCCAGTCACCTGCCACAGCTTCCCTGGCACCGCGTGCATACAGCCGGTGCCTGAGGATAATGACCGTCCTCGGATTGGAG
ATGACCTTTTGTGTGGATGGCTGTAGCTGCTCCCACATCTCCTGCACGGCACCGGTTGCTGCGTGCATCTCTCCCATCCCTGCGCTTCTGATCC
ATGTGCTCATGTTTAAAGTGGTTTCTTGGAGGCAACGTCTTCTTGGGTGGTGTCTTGGATCCTCTCTGACGCTGTCTTGTAATTGGCACATGGA
GACCATTGATGTTTAGGTCTTTAGTTTTGTTTGTTTTTGTTTTTTTGAAACAGAGTTTCGTTCTTGTTGCCCAGGCTGGAGTGCAGTGGCGTGA
TCTCGGCTCACTGCAACCTCCACCTCCCGAGTAGCTGGGATTACAGGCATGCACCACCACGCCCGCCTAATTTTGTAATTTTAGTAGAGATGGG
GTTTTGCCATGTTGGCCAAGCAGGTCTGGAACTCCCAACCTCAGGTGATCCGCCCGCCTCGGCCTCCCAAAGTGCTGGGATTACAGGCATGAGC
CACCGTGCCCGGCCTGATGTTCACTTATTATTGATACAGTTGGATTGATCCCTACGTTGGATTTTTTGAGTGTTCTGTTTAGTCCTATAAAAGC
AGTAGAAATCTCTAGGCCAACATAAGATGCCACATGGCTCACAAGGGAGTTTTGAAGACATGAACATGCTTCTGAGCTCAGCAGTGTGTGTCCC
TGCGGGTCAGGGAAGTCTTGTGCACCCACTCAGTGTGTGTCCCTGCGGGTCGGGGAGTCTTGTGCACCCACTCAGTGTGTGCAGTTGGAAGCTG
GTCCCTTCAGAAACCTCAGGGAAGAGCCCATCTCGGGCGGCTGGAGGCAGGTGGACAGGACACCGGGGAGGAGTCTTGAGGTCGTCTCCTGTTG
GTGGGACGATCGGTGGCCTCCATGGAGAGCGGTGCTGGCACCTTCACTCCCTGTCCCAAGAGGTGGCTCTGTCAGAAAGCAGCGTCTTCCACCC
TGCGACTTCAGCGCCCTTCCCCCAAGGACCCATCCCCTTCCCAGAACCTTTTCCAAGTGGTTATCAGATGGAAAAGGTTCCTCCCTGGCCCTGG
GTGAAGTGAGCTCACCTGCACCTTCAGTGGTGCTCAGGCCTCCCCTGAAGCTCCTGGCACTCACAGGGTTCCAGTTCAATGCTGTCGCTTTTCT
TGCCTTCACCTGAGAAGCCCCTTGAGGAAAGCTGGAGGCCCCAGGGCAGGCCACTGTTCAGAGGAAGGAGTCCCGGCCTACACGGCCCGTTGTC
CGCAGAGCCAGTGAGTCAGGGTGCTCAGAAGGGTCCTGGGAACGGCCAGCCACAGGCAAAGGCAGCTGGAGCTGCTGTACCGGCCTCTCCTCCC
CGCAGCCTGTTCCCGTGTCCATACCGGCCTCTCCTCCCCACAGCCCGTTCCCGTGTCCATACCGGCCTCTCTTCCCCACGGCCATTTCCTGTGC
CCATAAGGTCTGTGGCTCCCCGCTGGCCGGGCGTTTGCAACTGCCCAGGGGGCTGGCAGCCTTCGTCCATGGGGTCATTGCCAGGCCTCCCCAC
CTACTGGGTGTCTGATTCGTTCCTCCCCACTGGGCTGCCCTTGCTCTGCTGTGCGTCTGTGCTGGGTACACTGACATCTGGCTCTCCGTCCCTC
TGCCTGCAGGCAGTGTACCCTGGTGCCTGGCCTCGTGCTGCCTACCCTCCCTAGCCCTGGCTCCGTCGGGGTCTCCACAGGCTTCGCCAGCCCC
GCACATGCACGCGGGTTGCGGGATGCAGGATGCCGGAGCTGGGCTGCCCAGCCGCTGGCCTGCCCTGTCCCCCTAGGCAGGGAGAGCAGCCAGG
AGGAGCCGTGAGCCTTTCTGCACTGAAAACAATCCCAGCCAAGCTGACATCCACATTCTCTGTGATTTTCTGTTTTACTTTTGACACTGGCATA
TTTCGAGGGAAGCTTAACAGCTGTATGTTTTAAAAGAAACTTAAGAGCACATGTGAAAAATTGTGTACTTCAAGTTTACTGGTTGTTTTTTGTT
TGTTTTTTGTTTTTTTGAGACAGTCTCGCTCTGTCACCCAGATTGGAGTGCAGTGGCTCGATCTCAGCTCATTGGAGCCTCCGCCTCCCAGGTT
CAAGCGATTCTCATGCCTCAGTCTCCCGAGTATCTAGGACTACAGGCGCCGGCCACTATGCCTGGCTAATGTTTTTGTATTTTTTTTAGTAGAG
ACGGGATTTCACCATGTTGTCCAGGCTGGTCTTGAACTCCTGACCTCAGGTGATCCGCCCACCGTGGCCTCCCAAAGTGCTGGGATTACAGGCG
TGAGCCACCGCGCCCGGCCTGCTGTTTCATTTTTAATCTCTTAAATGGAGTTTGCTTTAATATATATATTTTCTCATCATAAAGGAACTTCATA
CTCATCGTGGACATTTGGACAATATAAAAAAGGAAATAAAACCTAGTGTAGTCTCACCAACTGAGACATAACCACTGCTGGCATTGGGCATGCG
TCCTGCTCCATTTGCTGCTGTGTGTGGATGTTCACGCAGACACACACACACACACAGAGTACATTATATTGTGGATATATGTGTTTGTGTGTGT
GTGTGTGTGTGTGTATATGTATGTGTATATATATATATTTATTTATTTATTTATTTTTTTTTTTTTGAGACAGGGTCTTGCTGTGTCATCCAGG
CTGGAGTCCAGTGGCTTGATCATGGCTCACTGCAGCCTTGACCTCCCAGGCTGAAGCAGTTCTCATGCCTCAGCCTCGCCAGTAGCTGGGGACA
CAAGTGTGCCCTATTCTGCCCAGCTAATTTTTAAATTTTTGTAGAGATGGGGCCTCGCGGTGTTGCCCAGGCTGGTCCTGAACTCCTGGGCTCA
AGCAATCCTCCCACCTGGGCCTCCCAAAGTGCTGGGATGACAGGTGTGAGCCACCGTGCCCGCCTGTGCATATTTTGTGAACAAAATGGGATGT
GCTGTGTCTACGGTTTTTGTACTTTCTATAAGTAAGTGTATGAGCTTCATCTCAACAGTGGAGTTTAAAGCAGGTTGCGTAGGTGCTGGTGCCA
TTTGGAACCCGTATTTTTTCCGGTACAGACGAGTTTCCCTCTCCCTTCCTGTTCTTCCGTGTTTCTTCTTTATCGCTTCCTTCTGTCTGTATTT
AAGTGGCAGTCTCCCACGGGAGATAGTATTTTTGTCATATAATTTGTCTATTTAGAGAGTTGAAGTGGGTTGGCCTGTGCCCACATCAACATAG
GCCCTTCCAGTCAGGTAGGACTTAGGAAAACTGGCATGCACCGTCCAGCATGCCCCACAGGGTCCCACCTCCACCCATCCAGCCTGCCTCACGG
GGTCCCCGCCTCCACCCAGTCTGGCCCACAAGGTCCCGCCTCCGCCCAGCCAGCCTGGCCCACGGAATCTCCGCCTCTGCCCAGCCAGCCTGGC
CCATGTGGTCCCCGCCTCCACCCATCCAGCCTGTCCCACAGGGTCCCCGCCTCCACCCCAGCCTGTCCCGTGGGGTCCCCGCCTCCCCACTCCT
CGCTGCTGCCTGTGAGTGCCTCCCGGCCCGTTACTATTTCAGTCTCGGCTTCCATGAGACGTTTCCTTCTTGTCTCTTCCCTCAGCTGCTTCTG
CTCTAAAGACCCACCTGGTGTAGCTGCTGACTCCATCGCAGCTGCCCTGAGCACTGCTGAATTCAGAAAACAGCCTTGGAGGAAGCGTCTCTTT
ATCCCCCGTACAAATGCCGAGACAGGCTCCGGGTGGCCAGAGCTTCCCGGGTCAGCCCAGGAGATGGCCCAGACCCACAGTGCTCTGGGGGCAG
CCCAGGCCCCGCCCACTGACAGCACTCATGGCCCCTCCGGCGGCAGCTTCAGCTCCCCTGGGGCAGCTCTGATGCGGGGCAAAGGCAGGAAGAC
GCCCATGTGCCATGGCTTCTGCTTCTTCCCAATGAACTGCAGTTAATTAAACAACACAGACCTGCTGCCAGGAGAAAGTGTGGCCCCTGGGCAC
AGGGCCCAGTGGGGTGGGGAGCAGGGGTGCGGGGAGGGCATGGCCCCTCTGCATGGGTGTCTGGGCCTCAGCTGTTTCATTATTTGTAAATGAA
AGAGCCTGGACCTCAAGTTGTCTTCAGTTTTCTGTCTTTAACACTCTTAAGATTTCATTGTTAATGTGATTCAATCAATTTGGCTAAGTTAGGT
GCTGAGCTATAATTAATTATTTTAACAAAAGAAGTAATACAATGGATTTTTCTCCTGCTTGTTAAACTAAGTCATATGATTATAAAAATGAAAC
TTTATAGATGCGACTCCCGCCAACCCTCTCCCCAGATACCAAGTGCCGCCCTCGGCAGGGATGCCTGCATCACCCCAGTCATTTAGGGTCATCA
GGGGCCCGAGTAACGCTGGGGCCTGAGCACGCGGTTGGGGTCTCCGTGTCCCAGCCCCCCACCCAGCCCCGACCTCTGCGAACAGCGCCACACG
TCCCATGGCTTGTGTTTCATGTGTATACTTGAAGGAGCATGAGTTTCGTAAACATGCTGCTGGCTGTTACATTAAAAACATGAGAAGGTAACGG
CAGCCTCCACACGCCGCCCTCTGCTGTCTGTGCCTCCGTGCCCTTGGCTGTTCCCACCCCGGGGTCTGCGGGGGTCAGGGCCTGCCTCCTCTTC
CTCAGTTGGAGTGAATTTGGGGTCTGACTGAGGGCCTCGGCCATCGTCAAATGTGACAAACACAGGCCCTCCCCAGAGACCGCGTCTCCAGGAA
GCACCTGCTCCTCTGGGTTTCGCTGCAGTCACCTGAGCAGGTGCTGGGCCACCGAGCACTTCCATCACACAGTGGCTGGCGGCGGAGCCTTGGG
TCGTTTTCTGAAGGTCACCAACCCTTTGGCATCAGAGCAGGCAGAGCCTTTTGCATCCCCGCCAGTCCCCTTGCCCAGGTGGCCCCGGGCAACC
TCCACCCTCAGGCACCCGGTCCCAGTTCTGTTTACAGCTTCTCTTTTCCTGGCTTCTTTCCCCATATTGACAAGATTTCAGTCTTAGGTTGGTC
TTGTCTGCTGTGCTGCTCTGAGGAAGCCTCTCGGCTCCTGGGTGTGCAAGAAGCCAAGGGCAGCCCCTTCCCTGTGAGCGTGCGTGTCCACACG
CGTGTGCAGGTGGCACAGAGCATCCAGGGCTGTCATCAGCTGCTTCTGGACCGCCCAGGTGGCTGCTTGGGAGTTTACCGTCACGGCAGTCCTG
TGCTGCCGTGGAAACGCGGGGTTGCCGTGTGGCCGCCGTGGAAACGCGGGGTTGCCGTGTGGCCGCCGTGGAAACGCGGGGTTGCCGTGTGGCC
GCCGTGGCGCGGCAGCCATCGCCTGCCCGGTGCTGATTGTGCCTCCTGTGTGCCCTTCTCCTGTAGAATTCTCTGGTGGTTGAGATCCCGCCAT
TTCGGAATCAGAGGATAACCAGCCCCGTTCACGTCAGTTTCTACGTCTGCAACGGGAAGAGAAAGCGAAGCCAGTACCAGCGTTTCACCTACCT
TCCCGCCAACGGTAACGCCATCTTTCTAACCGTAAGCCGTGAACATGAGCGCGTGGGGTGCTTTTTCTAAAGACGCAGAAACGACGTCGCCGTA
AAGCAGCGTGGCGTGTTGCACATTTAACTGTGTGATGTCCCGTTAGTGAGACCGAGCCATCGATGCCCTGAAAAGGAAAGGAAAAGGGAAGCTT
CGGATGCATTTTCCTTGATCCCTGTTGGGGGTGGGGGGCGGGGGTTGCATACTCAGATAGTCACGGTTATTTTGCTTCTTGCGAATGTATAACA
GCCAAGGGGAAAACATGGCTCTTCTGCTCCAAAAAACTGAGGGGGTCCTGGTGTGCATTTGCACCCTAAAGCTGCTTACGGTGAAAAGGCAAAT
AGGTATAGCTATTTTGCAGGCACCTTTAGGAATAAACTTTGCTTTTAAGCCTGTAGTCCTGATGTGGTCTTTAAGGATGGTGAATGAGCTTTGT
GCTGGGCGGACGTCCCCGACACACTTCTCCAGGGGTAACTTCATCTCCTGGGACCACGGGCATCCAGGCTGGGGCACCTTCTCCTCAACCTGCC
TGCCCCTCACCCGCCGTGGGAATGGCTCCTTTTCACTCATACAAAAAAAAAAAAAAATCATCTTACCTTTTTAACCTTTAGGGTGTTTTCTTAA
AGAAAATACCATCCAGTTTGTTTCTTCAGTCCCTGAACCAGTAGAAGAGAAAGGCGTCCCCCACGCCATCCCCGGCTTCCTTTGTGGGTACAGG
CCACTCCCCCCAGCTCGGAGAGGACAGAATTAGCAGTCATCCTGAATTTTACTGTATTTTGTGGGTACAGGCCACTCCCCACAGCTCGGAGGGG
ACAGTTAGCGGTCATCCTGAATTTTACTGTATTTTGGGTAAGCTTAGCTAACATCAATAATCTTTTTATATTGCTTTTTTTCTAAAAACTGCAG
AGATTCCTGTCATCTGAGAGGGAAATTACACACTGGGCGCTAATTGCAAAAGCAGCTGCGTTCTCTTAGTAAAATCAGGGTGTTTTGGAAGGTT
TCCATTTTCTCTGAATGTAAACAGCATTTGTAATAGACCAGATCCTAAGGAAGCCCTTGAATCCCCACGTTCACACCAAACTGTTGGGACTCCT
TGTTTTTATCAGGCAAGCTCTGGAAAGGCCTCTCAAGATGTGGAAAATGGGGTTTTGCTGTAAAGTCGCTGTACCCTAAGAGTGTCTGTGAGAC
AGAGCTGCAGGGGTGATGTGCAGCCCCCAGCCCAGCCCTCGCGGGGAAGAGCCTCACGCTCTGTGACCCCCAGGATTGTGGGGAGGGCCTCATG
CTCTGGGACCCCCGGGATTGTGGGGAAGAGCCTCATGCTCTGGGACCCCCGGGATTGTGGGGAAGGGCCTCACGCTCTGGGACCCCCAGGATTG
TGGGGAAGAGCCTCACGCTCTGGGACCCCCGGGATTGTGGGGAAGAGCCTCACGCTCTGGGACCCCCGGGATTGTGGGGAAGGGCCTCACGCTC
TGGACCCCCCTGGGGTTTACGTGGTCTGTGCCGCCCACACTTAGTGAGTCCAGCCCATTCTTGGAACAAAGTACAATATATCTTACAGAAGAAA
ATATTTTATCTTTTTCTGAAAATATAATGATTGAGTCCTAATTAAACTTCAAGCATGGTTGACCAGAAATTGAATGTTTTAAAGAAAACCTAGG
CCTTATAGAGAAGGATTGCTTTCCAGAGCAGTGCATTAATTTTTTTCTTATTTGCTCAGCATGCGGCAGTCCCCACCGTGGGTTTGAGCAGCAC
TGACTTTAGCACAGATCACGTATCTCAGAGGCAGAAGGGGCGTGCGGGGAGCGTGCCTGCCCTTCACAGGTGGGAGGTGGCGGCCCCCAGGACC
GTGGCCACAGCATGAAGCCGGTGGGGCTGAGCCGCTCCTGCTACCTCCAGTCCACACCCCACCTGGCAGCCGGCCGTCCTGTCCTACCAGCCAC
ACTCCTGCCTCGATTGGCCCCGGCTCCCCTCTCAGCATTGTGCCCAGCGTGGACATCTCTCCTGCACCCCCTGCCCAGTGTCTCGGCTGCACCC
TCCACCCCCCATCTGCTCCAGCATGGCTCAACGCAGGCCAGGTTCCCCAGGCTCACCCTGGGCACCAGCCTTCGCCCGTTCTCCCTCTCTTTGC
CTCCGTCGTCTCTTCTCTCCTGGACGTAGCACCATAGTCCCTGGGTGACCATCCCAGGTCCCCACAAGCACACTGACCAGCCCCACCAGCCCCC
AGGGGCTCCCCGGCTCCCTGTCACCCCACCTGGTCCTGGGGGCTGCGACCGCAACCTGCACCAGACTGTGAGCCCCTCACGCAGAGCCCCCAGG
CTGCCGCAGGGCGAGATCCCCAGTGTTGACGCTGGGCCTACCTCGAGGCCACTGTCAGTGTGGTTGTTAAATAAATAATGAATAGAAACCAGCA
CCCAGGTATCCCTGTTCCGTCCCGCGTGCCCGCTGCACTTCCTGCCTCTGCAACCCCGGCTGGGTCTGAGGACGCCGAGGCCGCTCCAGGACCT
GCGTCCTCCGTGCTGTGCATCTGTGTCTTGGGGTCCAGCTCAGATGGCTTCTGCCACGTGGTCCGAGAGATAGTTGCCAGCTCTGCTTCTGCCG
ACCCTGGAGGTGGAGGCAGGACGGGTGGGTGTGGGTGGAAGACAGCTGCTTAGCAAGCACCGCCCTGACTCAAAGCTGCTCTTGGCTTTTTCCC
TTTTCTACACCGTCATCATGGGGTCGTTAGCAGTCTAGGTTTCCGCTGTGCCGATGAGCTTCGGGTCTGCATGCCCGGGGGTCACGGCAGTGAG
GGGCGGACTCCTAGGGTTGTGAAATGTGCCGTTGAAATGCACAAGGTGACAACAGTGAACCCACTTACACTCCAGCTGTGGAATTCATTTCACG
TACATGTTTGTAAAGTCAAGTCTCATTGTAGGTTTTCCTTCAAAATTGCCATCCCCACAGGCAGCACAGGGAGGTCCCCTCGAGAGCTCCAAGC
ATTTGGAATCCAGGTGCCCGAGGTGTCCGGTGCTTGTGGGGGGCGGGCTGGGGACACGCCTTGGCCACCAGCCGCCCGCACTCCTCGTCTCAGT
GCCAAAGGCATCCTCCGATGACTCGGCCGAAGATGAGCTCAGTCCGCAGCCCCTGTCCCGGCCCCGCCTCCCGTCTTCAGGGGGCCTCACGTCT
CCTTTTGAGTCAGAAGGTCGCAGTGGTCGGCCTCCGGGAATCAGGCATCTGAGTGCAGGGGGCCCCCGGGCTCAGGTGGGGCTGACACCTCTGG
CTCATGGTCTGTGATGGGGCCCAGAGGGAGAGTTCCCTTCACCCTCCCTGGGGCGGGGGGCAGGCATTAAATGGGGAGAAGTTCCCAGCAGAAT
GTATGAGCCCCATGAACGGAGTGGGCATAGCCCTCGGGGAGTCCTGCCGGCCGCCCCTCCTGACATCCCGGGGTGCTGCCCGGTGAGGAAAGTG
AAAATGTTGTCTGCAGTTAGAGGCTGGAACACACATGCCCACAGAGAGGCTTCCTGAGCGGCTTGTCTGTCACTGTTTTTGTGTAACTGCGCCT
GAATTTAATCTCCCGGAAGGCGCGTTAGGAGGGCTGAGGGATGATCTGGTGCCAGGAAGGTTGGCAGTTCCGAGAGGTTATTCCAGCACGTCAG
CATTAAAGGAGAGAGGCGAACCTGGAACGTGGGAACCCTGCCCAGGTCTGGTTAGAAAGGCGGCGTCCGCGTGGCCTGGGGCTTGTGTGAGGGG
TGCACTTGTGCCCCCAGATACAAGCAGGCAGGGCCGGGAATCTGTCTCGTGGGGGGCTGCGGGCACTTTGGAGAAAGAAAACCAAGTTACAAAC
TCAAAATTACCTACCAAAGTCAGTATTTTTTTAAACGAGAAAATAAAACATGACAAATGCCAGGTCTTTTTGTCTGAAGTCGTTTTAGTCGGTT
ACCTGGAAACGCTCCCAGGGCCCCTGAGCTGGGGACACGGAGCTCTTCCCCCATCAGTGCCCAGGAGAAGCTGCTCCCGGCCCTAGGTCCCTGT
GGGAACACACAGCCAGCCCTGCCTCTGTGGGGGTCCCTTTCGTGGCCAGAGCCCCCTTCCTCAGGGGACACGCGGTCCAGCTGAGGGTCATCCC
GTGACAAGGAGTGGCTGCTGTGATGACCCAGGCACAGAAACAGCTTTGACCACAGAACGTGACATCCAGGGTGTGAAGGTGTCGGAACAGATCT
GCCTCGGGATCTGGGGGTCCTTCACCAGGGGTGGGCGTGGGCCCCGAGCCCAGACAGGAGCCAGCTGGAGACTCAAACGTCACGAAGAAGGGAA
GACGCGCTTCCCTCCCCCGGTACTAACCAGCCCTTCTGCTGGCCCTGCAACGATGACCTAGGCTTGAGAATCTGTTTCTGCCTCAAGGGGTAGA
AAGGGGAATAGATTCCATTACTTCCCTGTTTGCAATGGATTATTAAATCCAGCAATAACTGTGGCATCGGAGAGGTGTTGGTACAGAGGGAGCC
GGGGTCCTGTGGCCTTGGGTCCACCCCAGCGATCATCACGGGAGAGAGCTGCTTAGGGTGTGAGCCGTGGGGGGGCGGGGGGCGGCTGTGAAAC
TGAGGTCCCCGTGCACAGATCCCACCACCCAGGGTCGACAGCTGGGGGCTTTCTCTGCTGGCACTTCCCAGGCAGCAGAACCGGCCCCTCTAGG
AAGCCCCCTCCAGGTGGCGTGGCCCAGGCCCTCAGTAAGCTCAGCTGGGGCTGTGTGAGCTGAGGGGCTCAGAGCACCCCACAAGGGATCCGCC
TGATTGCAGACAAGCAGTTCTGGGCCGCCGCCCGACCTCCATGCCCTTCTGCTCAGCCCGGCAGCCTCTCCTTCCCAGGGGTTTCCCATTCTGC
CTTTTCCCTGGACTTTCCAACTCACTTTGTCCAAGTCCACTGCATGTAAAGCTTGATCCTGAAACAGTGAAGTTCTTGAGGTCTCTGCAGATGC
TCAGCGGCCCCAAATCACCCTTTCGCTGCCATTGGCCAAAAGCACAGCCTGGGTGGGCCTTGAACACCTGTGGCCTCTTCCCCTCCCCCTCCCC
TCACCCCACACACTTGGAGACACCCTGGGGCTGGGCCTGAGCTCGGCTCTCACTGCAGAGTAAACCTGCCCACCTCAGACACCCAGGCATGGCT
CCCGCCTTCCCTCATCTGATCCTGCCACCGTGGCGGCTGCCTCCAAGCTCCTGACAACGTCAGGTCAGCCCTGGCCTCGCGGCGCTCTGGGTTT
CAGCCTTAAGAGACTTTCCATGTGTCGGCTGTGGGCGCCTTGACGCACCAGGGCCTGGTCACAGGTTCTCAAAGCAGAGATTCTCCTGGCACCC
CTCGTGCGCCCTCCAAGGGCCTAAAACGCAGACGACCCACACTCCATGCCATGTCCTGCACAGGAACCAGGGTGGCCTCCCCTTTCTGCAGCTT
GTGGGGGTCAAGCCGGGACCCCTACACTGATGTTTCAGCCCAGCTCTGCCGCAGCTTAGAAGTCCTACCTGATTTCAGACAGAGCGGATGATGC
TGACATTTCCAGCCCACAGCGTGGCCTGCGCCACGCTCCAGGTCGCCACAGGGGTGAGAATTCTGGGAGCCCAGCTGCCGAGTGCTTCTGGGGT
TGGAGCTGGGCTGGCCCCACCTGTGAACAGCGGCCTGTGGGCCCCTCATCCCTGTTCTACTGAAGGCCCCACAACCACCTGAGGGAGACAGCTT
TTATTAAATTTCAGTTTTTGTCGGTTGCCTCGCTCTTCAGACGGCAAGTGAGAGAAGCGTGTTCTCACGCTTACTGTCAACGTTGCGAGGGAAG
CGTGTTCTCATGCTCACTGTCAACATTGTAAACCTGAGGGAAGCGTGTTCTCAGCTCATTGTCGACGTAAACCCCAGGGAAGCGTGTTCTCACG
CTCACTATCGACGTAAACCTGAGGGAAGCGTGTTCTCGCGCTCACTGTCGACGTAAACCTGAGGGAAGCGTGTTCTCGCGCTCACTGTCGACGT
TGTAAACCTGAGGGAAGCGTGTTCTCACACTCACTGTTGACGTTGCAAGGGAAGCGTGTTCTCGCGCTCACTGTCGACGTTGTAAACCTGAGGG
AAGCGTGTTCTCACACTCACTGTCGACGTTGCAAGGGAAGCGTGTTCTCACACTCACTGTCGACGTTGTGAGGGAAGTGTATTCTCACGCTGTC
GACATAAACCTGAGGGAAGCGTGTTCTCACGCTCACTGTTGACGTAAACCTGAGGGAAGTGTGTTCTCACACTCACTGTCAACGTTGTAAACCT
GAGGGAAGCGTGTTCTCACACTCACTGTCGACGTTGTGAGGGAAGCGTGTTCTCACGCTCACTGTCGACATTGTAAACCTGAGGGAAGCGTGTT
CTCGCGCTCACTGTCGACGTTGCGAGGGAAGCGTTTTCACACTCACTGTCGACGTAAACCTGAGGGAAGCGTGTTCTCACGCTCGCTGTCAACG
TAAACCTGAGGGAAGCGTGTTCTCACGCTCACTGTCGACGTTGTAAACCTGAGGGAAGCGTGTTCTCACGCTCGCTGTCGACGTTGTAAACCTG
AGGGAAGCGTGTTCTCACGCTCGCTGTCGACGTAAACCTGAGGGAAGCGTGTTCTCATGCTCACTGTCGACGTTGTAAACCTGAGGGAAGCGTG
TTCTCGCGCTCACTGTCGACGTAAACCTGAGGGAAGCGTGTTCTCACGCTCACTGTCGACATTGTAAACCTGAGGGAAGCGTGTTCTCGCGCTC
ACTGTCGACGTTGTAAACCTGAGGGAAGCGTGTTCTCACGCTCACCGTCGACGTAAACCTGAGGGAAGCGTGTTCTCTCACTGTCAACTTTGCA
AGGGAAGCGTGTTCTCGCGCTCACTGTCGACGTTGTAAACCTGAGGGAAGCGTGTTCTCACACTCACTGTCGACGTTGCAAGGGAAGCGTGTTC
TCACACTCACTGTCGACATTGTGAGGGAAGTGTATTCTCACGCTGTCGACATAAACCTGAGGGAAGCGTGTTCTCACGCTCACTGTTGACGTAA
ACCTGAGGGAAGTGTGTTCTCACACTCACTGTCAACGTTGTAAACCTGAGGGAAGCGTGTTCTCACACTCACTGTCGACGTTGTGAGGGAAGCG
TGTTCTCACGCTCACTGTCGACATTGTAAACCTGAGGGAAGCGTGTTCTCACGCTCACTGTCGACGTTGCGAGGGAAGCGTTTTCACACTGTCG
TGTTCTCACGCTCACTGTCGACATTGTAAACCTGAGGGAAGCGTGTTCTCACGCTCACTGTCGACGTTGCGAGGGAAGCGTTTTCACACTGTCG
ACGTAAACCTGAGGGAAGCGTGTTCTCACGCTCGCTGTCAACGTAAACCTGAGGGAAGCGTGTTCTCACGCTCACTGTCGACGTTGTAAACCTG
AGGGAAGCGTGTTCTCACGCTCGCTGTCAACGTAAACCTGAGGGAAGCGTGTTCTCACGCTCACTGTCGACGTAAACCTGAGGGAAGCGTGTTC
TCACGCTCGCTGTCGACGTAAACCTGAGGGAAGCGTGTTCTCACGCTCACTGTCGACGTTGTAAACCTGAGGGAAGTGTGTTCTCACACTCACT
CGACGTGAGGGAAGCGTGTTCTCACGCTCACTGTCGACATTGTAAACCTGAGGGAAGCATGTTCTCACACTCACTGTCGACGTTGTAAACCTGA
GGGAAGCGTGTTCTCACGCTCACCGTCGACGTTGTAAACCTGAGGGAAGTGTGTTCTCACGCTCACCGTCGACGTTGTAAACCTGAGGGAAGCG
TGTTCTCACGCTCACTGTCAACGTTGTAAACCTGAGGGAAGCGTGTTCTCACGTTCACTGTCAACGTTGTGAGGGAAGGGTGTTTTCACGCTCA
CTGTCGACGTTGCGAGGGAAGCGTGTTCTCACGCTCACCGTCGACGTTGTAAACCCGAGGGAAGCGTGTTCTCACGCTCACTGTCAACGTTGTG
AGGGAAGGGTGTTTTCACGCTCACTGTCGACGTTGCGATGGAAGCGTGTTCTCATGCTCACCGTCGACACTGTAAACCTGAGTGAAGTGTGTTC
TCACGCTCACTGTCGACGTTGCGAGGGAAGCGTGTTCTCATGCTCACTGTCGACGTTGTGAGGGAAGCGTGTTCTCACGCTCACTGTCAACGTT
GTAAACCTGAGGGAAAGGAATTCTCTCTCACATGCTGTGGGGTGCTGGCCCCACCAGGCCTCCCAGGAGACCTCCCCAAAAGTCAGAAGAAGGG
CTCCAATTGAAAGGGAGGTCCGAGATGTGCTCGCCAAAACCACCCCCAGCAAGACGCCAGGCATCCTAGCCACCCGACGCTCAGGCCGTGCGTG
TCCTCAGAGCGTGTTTTAAAGCAGGAGGGATTTGGGGTGGAAGATTGCTCCTGCAGAAATCAGAGATGAGGGGAGTAAATTAGGGAACCAGCGT
CAGGATCCAGACTTCTGTGAAAGAGCCACAGGGCTCAGCATCCGACGGGCGCACCTGGGGCTGGGCGAGTCTGGCTCCAGAAGGGGGGTGGGGC
CGGGAGCCTGAGATGGGATGAGAGGGCGGGAAGGGGCTTGTTGAGAAATCTAAGGGCCACGGGCCACCAAAAACAAACCAGGAGGTGTGAGTCA
GTGGGGAGGCTGGGTGCCAGGAAGCCTGCGCTCTGGGACATGCGTGGGGCAAGAGGGGCGCCCTGAGCTTGGCGACGCCAGCCGCGCGCCTGGG
AGGGATCCGCCTGTCCACGTGCAGCCGCCTCCGGGCGGCGTCGGCCATGCTGCTGCCCCACCGTGGCTCTGTGGCTCCAGCCGGAATGGCAAAG
CCTGCCTCCACAGCTGCCTGGGAGCGTGAGTCACGCGCCCCACAGAACACGGCGGGCAGCGCGGGCGAGGATTGGCGAAAGCCGACCGATGTGT
TTTGGCTTGTGTGGTCTGTGGGAGCGTCCTTTGTCATCAGCCTAATTGGGCAACAGATCCCACCTCACTGTGCCCTGGAGCAGCACGGGGCCAC
CACACAGCCTGAAGCCCCACTTGCGCTTCCCCTCGCTGCCGTGCTGTCCTGGCCCCGTCGCTGCCACCTGAGGCCCCCATCAAGTACCTGAGCT
CTGCGTCTGTTTTCACGCTTCTGTATGTGTAGGAAGCCCCCCACCGATGTTGCTCGGGGTCGACGTGATAAACCTGAGGGAAAGGGAATTCTCT
CACCCCGACCGACACACAGGATGGGTGTGGGGGCAAAGTGAGATCATGAACAAAAGCATCTGGGCCCGTCCTGGACACATGGCCAGGGTTAGCC
ACGGTTGTCAGCCTCCACGGAGCTGCAGTTTCAGCCTGGAGGTCTGTGGCGTGCATGGTTGGAATACTCACCAGACTCACGTGGTCGTGACTCC
GGAAGATCATGCCTTCCTGGAAACCTTGGAACGCGCTTCAGCAGAAACTCCAGTGAAGAGTCGGTGAGAGAGCACAAATTCCCAAAGGCGGATG
GAGTTCGGAAGGACCCTTCTCTGTCTCCCACATCAGGCGGTGCCTGGTTGGTGCAGATTTACCCCATGGTGGGCCGTGGATCCCTCACCTGCTC
TGGAAACTGATCTTGGCTCTGAACAAGGAGAAATGATGCCTCTCAGCCTCGAGGGATGGGTGATAAGGCAGCTTCATCCGCTGTTTTCTTTCAT
TGTTTGAGAAAAGTCATGCCCCGGAGGTGTCATTCCTGGTTGTTTATGTTGATGGCAAAACTTGGACTTTCTTGTCATACAGCAAACAGAAGAC
AATCTGATCTTTGTTTTCCAGGGGTTTAGACTTTGAACAAAACCTCTTTTGTCCAGTACTGTAGTGCATCCCTGGTAGAGTAATTCAAGCTGAA
CACAAGGTTGCATAAAAATGTGGGCATGGGGGAGCAGGGAACTGTCTTGGGATCATTCTTTGCTGTGCACAGCAGCTGCAGCCTGCAGGCAGCT
CAGCGTTAGATCTCCCCACCCCCAATGCCACCTGGGGACCAGATGTTACTGTTGGCGGAAGAAGGGGGTCCGGGGCACTGTCTCAGTCTTTGGG
GCTTCCATGGTGGAGCACTACCGGCCGTACTGTTGGTGGAAGAAGGGAGTCCGGGGCACTGTCTCAGTCTTCGGGGCTTCCATAGTGGAGCACC
ACCGGCCGTACTGTTGGCAGAAGAAGGGGGTCCGGGGCACTGTCTCAGTCTTTGGGGCTTCCATAGTGGAGCACCACCGGCTGGGCACCTTGTA
AACAACAGACATTGATTTCTCACAGCTCTGGGGGCTGGAAGTCCGAGGTTGGGACTGGTACGGTCGGGTTCTGGTGAGGACCATTCCAAGTTGC
AGACAGCCAAAATCCTGCCATATCCTCACATGGCAGGACAGGCGATTTGTCTCTCCCTCCCTGTGGGACGGCAGTCCCGTTGGATCAGGGCCCC
ACCCTGATGACATTGTTTAACCCCCAGTTACCTCCTGCAAACACCACTCTCAAGTAGAGTCACGCGGACGGGGGTTAGGGCTTCAACATGAGGT
TGAGGGGACACGAGTCCGTCCATAGCAGTGACCCCACTTGTCTAAAGCCACAGGGCTGAGCCTGCCCCCTGCCCCCCTGCCTGCCCATCCCCAG
GCCCCCGTTCTTGCCCCCAGGCCCCCCCCCGCCCACCCCCAGGTGCTCCCTGTGCTGCAGACAGAGCCCCCGAGGAGCCAGGAGCTGCCGGGCA
CCAACCACACAGGAAGCCAACAGGTGGGGCAGGCTTGTGCCTGCCACCGTGTTGCTCATGCCGATTTTTATTCTCAGATCTTGTCACCTCTGTC
TTGTAGCAGAAGGGGGCCCTGATCTGGGAGCCGTGAAGACCCCAGCTGTCCCCCGGGAGCCAGGCCACACCAAGGCAGCCAAGGGGACTACGTT
GGGAGGAGGATGTGGTCCGGGCCATTAAGAGCTGTGATGAGCCCCCAGGTCTGCCCTGGGTGAGGGGCTCTGCCTGCCCTGGGGCTGCATAGAC
CCGGCTGGGGCTTTAGAACAGGAACCGTTCGAGGGGCTGCGGTGGGTGAAGCCCACTCATGTCCTGGCTCCTGTTACCGGGTAGGGATGGCAGC
CCATTTTCCAGGCTTGGGGGTTCTTTAAGAGGCCAGGATTGTGCCGAATGCTCTTTGGCTGACGATGGCCGTGGCGGGGGCTTTGGGAGGGGAG
GTCCTGGAGGAGAGGCTTGCCCAGCTCACTGCCTGCGTCTGTGGCCAGAATTGGCACCTGCATGGGGCCTGGAAACGTCGTGCTCACCTGGGGC
GGAAGCCCCCCTCCAGGACTCAGCTCCCAACGTCACTGCTACCGAGGCAGAGACTCTGCAGCGGCATCAGAGAGAAGCTGGGCCCCAGAACAGC
ACCAGGCATGGGACGGGCCCTCCGTGCCTTCCACGGAGGATGCAAGCGTGAGGCCTGGGTCTGCGGGGACGGTTTACCTGTCAGCTCTGCACGC
CGCTGACCACTGCGCGCCGCCTCCACAGACAGTCCCCATGGACGCTGGGGCTGCCGTGGACGATGGGGCAGCCATCATGGACAACGGGACTGCC
ATGGACACCGCAGCCAGCCTGCTCTGTGGGAATATGCTTTGTAAAGCCAGCCGGCCCTGAGGCCAGCACTCGCCTTCCACACTCTGCTCTTTGT
AACGAGTTTCATAAACTCACCCTCAGGTGATTGGTGTTTCTGTTGCACCGTTGCTTAGCCTGAAAATGAGCTGCCCTTTTTCTGAGCCCATCCT
TTCGCCACCTCTACCCCAGCCCCTCATGGCTGATATCAGGAGGTAGCCAGAGGCCGCCTGGTGCAGGGTGAGCCCGGAACACGGGCAACAGCTT
GAACTGGGCCTGTGCGGCCCCCTCCACGGGCGACAGCGTGAACTGGGCCTGTGCGGCCCCCCTCCACGGGTGAGACTCCCAGGCGCTCTTGCAG
ACGCTCACTCACTTTCTCACTGATAGGATGCGTCTTACGAGGCTCTGATTTACAGAGCAGGCATCCATCTTCTCTGAAACCCACACAAAAAGCA
CAGTTTAGGCCAAGCCCAGGTGCAGTATGTTCGTGTGTTTAAGCTTCTTAGATGCTGGGGTGTGGAAGCAGCCGTGTGGCTTTCCTTTGCTTGT
GAAGCTGAGTTTCCACTTTCCAGCTTCTCTCTCTATTGGGAAGGCTGCAGCTCTCCAGGACATGACTTAGCAGAGAACATCCCGCTGCATCCTC
ATAGGCCAGCGGGTCAGGCGGGGCCATTCTGAAACGTCCCCTGTGGGTGCCGGGTGCCTCGCGCATCCCTGCCGTCCACCGCCCTTTGTCCCTG
GCTGTGCTTCGCGGCAGTGCCCCTTAGGGCAAGGACAGGGAGATGGGGCAGTCGCCTGGGGAAGGCCCGGTCCCAGTGGGAGGCAGCCTCAGAG
CAGCTGGGATGGCACAAGACGCCGCTGCCAGGGCTGAGAAACCATCCGGCCAACCCCAGACTTGAGCCAGACTTCATGGGCAAGGCTGGGAGAA
GCCGCGTGGAGACCCCAGCCCAGGGAGGGGCACTGTGGCAGGAACAGGGCCCGCACCTGCAGGGTCAGCCCAGGCCACCTTCCAAGCACGGTGA
CCACGTCGCAGCTCATGCTGCCAGCTCCGGGCCAAGGGACCTGGACTGGCTCTCCAGACTCACAAGATGCCGTCGTGGGTGGGGCACGTGCGGT
GATCCCAGGTTTCAAGTAGCTGCCCCCAGCTCCCTGCAAATAGCTCTGGGCCGAAGAGAAGCAGTGGGCAGGCACACGAGTTTATTCCTGAGAG
GAGCGTGTTGCCACAGCCTCTGTGGACTGGAGCCCCAGGCTTCAGAAAGAGAGGGAGCGCCTGCCTGTGGGTGGGGGGACAGGAGCTGCCAACC
TGGCGGGGTCCCAGCGAAGCGTCCACTGGGCCTTCTGCTTGCCCCTGGGGGTGGTGGATGCATCAGTGCTGGGCCTGCTCCGAACCCGCAGGGC
AAGCAGCCCGTGCGTCCCGATGCCACTGCCGGCCGCCAGCATCCTGGGGAGGTGGGTCGCGTGTCCCAGAGCCCTGTGCCCCTCGCCACCACCA
TCCTAGGTCAGGACTTCCCCAGGAAGAATCCAAGTGGCTGGAGAGATGCGGGGGTTAATGCCGGTACCACCGCGGTTTTAAACGGGGCCGTGTC
TGAGCCGTGTTCTTGACGTTCTCCAGCCAGCAGCAGCAGACGCCACCCGGTTGCCCCAGCCCCAGCGGCTCTCGGGCATAGCCGGCCTTGGCCC
GTGGGGCGGCTGATTTACAGGACAGCTGTGCACGGGGCCTCTAGTGTCCGCCAGAGCTGGTGGGTGAGAGTTTTTAAAGCGCTCGGGACACTTC
ACAGAAGAGGCGCACTGGCCCCCATGCCTGGCCATGTTTCTGGGCCCTGGCTGAAAATCCCGAGCAGCGGAGAGAGGATCCCAACAGGGTATTA
ATTTAACCTTCCAGCCATGTGCTTTTGCTTAAGATCTAAACTCTGAAAATTACCAGCCTAATTTAGAATGGAGGCTTGGCCATTCGGGACACCA
GCATCTTCTGAGCGGGAGAGATGTGGGTGCCCACCGGCGTCTCACTCCCACATCTGGGCCTGTTTCCAGTGACCCCTGCACCTCTCAAAGGCGC
AGGCCTGAGTTCACAGAGAGCACTTGGCCAAGCCCTGCCTCTGGGGCTCCCCATCGTCTGGCTTTGTCGTGGACTCATCATTTCTGGATTTACC
ACATGCTTCAAGCTGGAACAGCAGGAAGGGGCAGTTCCTGAGGCCCAGCTGCGTCCGCAGAGCTGGGGGCGCCATGGCCTAAGGCAAGACGCGT
GCCCTGGATGAAAATGACTCCAGCTCTGTAGTCTCCAGACAGCGGTTAGAGCCCCACCCTCCACGGACACCGCCTCCTGCCACCCCTTCAAAAA
AGTGTTGCAGCCCAGGGCCCAGATATTCAATTTTCTAATGTAAAACGAGGCGGGTAGGGTTTCCCAATCAACATGAGGGCGCCGTGTCCTCTGC
AGCCCCCTGACTTGCACAGGCAGTCCTGGGGCTCTGCCCCATCTGTGAACCCTCAGCTGAAGAGGGCAGCCCCAGAGGCAGCCACATTCAGGTG
GCTGAAGGCAGAGTCCTCCTCCCAGGAACCGCCTCGGCGCTGCCAAGGCCTGTGCACCTTCTTCAGCCCGAACTAAGGAGAATGTGCGGGACTG
AGAGCCATAGACCCTCGTGAGCCAGGCTTGAGCGTTGTCTTCAGATGGGGCCCAGTGGGCCTCACTGTTGTGACGACTGAATGTGACGTCTGGG
GTGTAATTCCAGCGTGACCTGGTCCTGGGGTGTCACTCCAGCGTGACCTGGTTCCTGAGGTGTAATTCCAGCGTGACCTGGTTCCTGGGGTATA
ATTCCAGCGCGACCTTGTTCCTGGGGTGTCATTCCAGCGTGACCTGGTCCTGGGGTGTCATTCCAGTGTGACGTGGTCCTGGGGTGTCACTCCA
GCATGACCTGGTTCCTGGGGTGTCATTCCAGCGTGACCTGGTCCTGGGGTGTCATTCCAGTGTGACCTGGTTCCTGGGGTGTCATTCCAGCGTG
AGCTGTTTCCTGGGGTGTCATTCCAGCATGACCTGGTTCCTCAGGTGTAATTCCAGCGTGACCTGGTCCTGGGGTGTCACTCCAGCATGACCTC
GTTCCTGGGGTGTAATTCCAGCGTGACCTGGTCCTGGGGTGTAATTCCAGCATGACCTGGTTCCTGGGGTGTAATTCCAGCGTGACCTGCTCCT
GAGGTGTCACTCCAGCGTGACCTCGTTCCTGGGGTGTAATTCCAGTGTGACCTGGTTCCTGGGGTGTAATTCCAGCGTGACCTGGTTCCTGGGG
TGTCATTCCAGCGTGACCTGGTCCTGGGGTGTCATTCCAGTGTGACGTGGTCCTGGGGTGTCACTCCAGCATGACCTGGTTCCTGGGGTGTCAT
TCCAGCGTGACCTGGTCCTGGGGTGTCATTCCAGCGTGACCTGGTTCCTGGGGTGTCATTCCAGCATGAGCTGTTTCCTGGGGTGTCATTCCAG
CGTGACCTGGTCCTGGGGTGTCACTCCAGCGTGACCTGGTTCCTGAGGTGTAATTCCAG
HUMAN SEQUENCS—mRNA
GAATTCCGGGCCGGGAGAACCGAACCCCTGGCGGCCGCGACCCCGGCTCCCGCCCCGGCCCCGGCCCGACCCGCCATGACGGGGCTGGAGGACC
AGGAGTTCGACTTCGAGTTCCTCTTCGAGTTTAACCAGCGCGACGAGGGCGCCGCCGCGGCCGCCCCAGAACACTATGGCTATGCATCCTCCAA
CGTCAGCCCCGCCCTGCCGCTCCCCACGGCGCACTCCACCCTGCCGGCCCCGTGCCACAACCTTCAGACCTCCACACCGGGCATCATCCCGCCG
GCGGATCACCCCTCGGGGTACGGAGCAGCTTTGGACGGTGGGCCTGCGGGCTACTTCCTCTCCTCCGGCCACACCAGGCCTGATGGGGCCCCTG
CCCTGGAGAGTCCTCGCATCGAGATAACCTCGTGCTTGGGCCTGTACCACAACAATAACCAGTTTTTCCACGATGTGGAGGTGGAAGACGTCCT
CCCTAGCTCCAAACGGTCCCCCTCCACGGCCACGCTGAGTCTGCCCAGCCTGGAGGCCTACAGAGACCCCTCGTGCCTGAGCCCGGCCAGCAGC
CTGTCCTCCCGGAGCTGCAACTCAGAGGCCTCCTCCTACGAGTCCAACTACTCGTACCCGTACGCGTCCCCCCAGACGTCGCCATGGCAGTCTC
CCTGCGTGTCTCCCAAGACCACGGACCCCGAGGAGGGCTTTCCCCGCGGGCTGGGGGCCTGCACACTGCTGAGTTCCCCGCGGCACTCCCCCTC
CACCTCGCCCCGCGCCAGCGTCACTGAGGAGAGCTGGCTGGGTGCCCGCTCCTCCAGACCCGCGTCCCCTTGCAACAAGAGGAAGTACAGCCTC
AACGGCCGGCAGCCGCCCTACTCACCCCACCACTCGCCCACGCCATCCCCGCACGGCTCCCCGCGGGTCAGCGTGACCGACGACTCGTGGTTGG
GCAACACCACCCAGTACACCAGCTCGGCCATCGTGGCCGCCATCAACGCGCTGACCACCGACAGCAGCCTGGACCTGGGAGATGGCCTCCCTGT
CAAGTCCCGCAAGACCACCCTGGAGCAGCCGCCCTCAGTGGCGCTCAAGGTGGAGCCCGTCGGGGAGGACCTGGGCAGCCCCCCGCCCCCGGCC
GACTTCGCGCCCGAAGACTACTCCTCTTTCCAGCACATCAGGAAGGGCGGCTTCTGCGACCAGTACCTGGCCGTGCCGCAGCACCCCTACCAGT
GGGCGAAGCCCAAGCCCCTGTCCCCTACGTCCTACATGAGCCCGACCCTGCCCGCCCTGGACTGGCAGCTGCCGTCCCACTCAGGCCCGTATGA
GCTTCGGATTGAGGTGCAGCCCAAGTCCCACCACCGAGCCCACTACGAGACGGAGGGCAGCCGGGGGGCCGTGAAGGCGTCGGCCGGAGGACAC
CCCATCGTGCAGCTGCATGGCTACTTGGAGAATGAGCCGCTGATGCTGCAGCTTTTCATTGGGACGGCGGACGACCGCCTGCTGCGCCCGCACG
CCTTCTACCAGGTGCACCGCATCACAGGGAAGACCGTGTCCACCACCAGCCACGAGGCCATCCTCTCCAACACCAAAGTCCTGGAGATCCCACT
CCTGCCGGAGAACAGCATGCGAGCCGTCATTGACTGTGCCGGAATCCTGAAACTCAGAAACTCCGACATTGAACTTCGGAAAGGAGAGACGGAC
ATCGGGAGGAAGAACACACGGGTACGGCTGGTGTTCCGCGTTCACGTCCCGCAACCCAGCGGCCGCACGCTGTCCCTGCAGGTGGCCTCCAACC
CCATCGAATGCTCCCAGCGCTCAGCTCAGGAGCTGCCTCTGGTGGAGAAGCAGAGCACGGACAGCTATCCGGTCGTGGGCGGGAAGAAGATGGT
CCTGTCTGGCCACAACTTCCTGCAGGACTCCAAGGTCATTTTCGTGGAGAAAGCCCCAGATGGCCACCATGTCTGGGAGATGGAAGCGAAAACT
GACCGGGACCTGTGCAAGCCGAATTCTCTGGTGGTTGAGATCCCGCCGTTTCGGAATCAGAGGATAACCAGCCCCGTTCACGTCAGTTTCTACG
TCTGCAACGGGAAGAGAAAGCGAAGCCAGTACCAGCGTTTCACCTACCTTCCCGCCAACGTTCCAATTATAAAAACAGAACCCACTGATGATTA
TGAGCCTGCTCCAACCTGTGGACCGGTGAGCCAGGGGTTAAGTCCTCTCCCAAGACCATACTACAGCCAGCAGCTCGCGATGCCACCCGACCCC
AGCTCCTGCCTCGTGGCCGGCTTCCCGCCCTGTCCGCAGAGAAGCACCCTGATGCCAGCGGCCCCTGGCGTGAGCCCCAAGCTCCACGACCTTT
CTCCCGCTGCCTACACCAAGGGCGTTGCCAGCCCGGGCCACTGTCACCTCGGACTCCCGCAGCCGGCCGGAGAGGCCCCCGCCGTCCAGGACGT
GCCCAGGCCAGTGGCCACGCACCCCGGCTCGCCCGGGCAGCCACCCCCGGCCCTGCTGCCACAGCAGTAAATGAAATAATACGAAATGACCTCT
CCAGCACGAGCACCCACTCCTAGTTGCCACATTGGAGCACTCAGTTCAGCAGGGGTATGCTGACTTCAGCAGACAAAGACTTTTGAATAAATAA
ACTGAACTCACACCTGGTACCACTCAGAACCTCCAACTGACTGAATGCCAGGAGCTGAACATTAATATGTGCAAAGATTGGCTCTCCAACAAGA
AGGAAAGCAGGGAGGAAGGGAGACCACTGTGTCGCCTGGAGGAGAAGTCATCTCATGACAACAGAAGGGAGGTGGCCGGGCTGAGCACGGAGAC
CCACCGTGCAGGGGCCTTTCATGGGAACGGCCCACACGCAGTTTGACCCCACGCCCAGCCCTTCTGGCACCCCTGGGGTTCAATACTGGAAGTG
CCTTATTTAACCAGACCATCA
HUMAN SEQUENCE—CODING
ATGACGGGGCTGGAGGACCAGGAGTTCGACTTCGAGTTCCTCTTCGAGTTTAACCAGCGCGACGAGGGCGCCGCCGCGGCCGCCCCAGAACACT
ATGGCTATGCATCCTCCAACGTCAGCCCCGCCCTGCCGCTCCCCACGGCGCACTCCACCCTGCCGGCCCCGTGCCACAACCTTCAGACCTCCAC
ACCGGGCATCATCCCGCCGGCGGATCACCCCTCGGGGTACGGAGCAGCTTTGGACGGTGGGCCTGCGGGCTACTTCCTCTCCTCCGGCCACACC
AGGCCTGATGGGGCCCCTGCCCTGGAGAGTCCTCGCATCGAGATAACCTCGTGCTTGGGCCTGTACCACAACAATAACCAGTTTTTCCACGATG
TGGAGGTGGAAGACGTCCTCCCTAGCTCCAAACGGTCCCCCTCCACGGCCACGCTGAGTCTGCCCAGCCTGGAGGCCTACAGAGACCCCTCGTG
CCTGAGCCCGGCCAGCAGCCTGTCCTCCCGGAGCTGCAACTCAGAGGCCTCCTCCTACGAGTCCAACTACTCGTACCCGTACGCGTCCCCCCAG
ACGTCGCCATGGCAGTCTCCCTGCGTGTCTCCCAAGACCACGGACCCCGAGGAGGGCTTTCCCCGCGGGCTGGGGGCCTGCACACTGCTGAGTT
CCCCGCGGCACTCCCCCTCCACCTCGCCCCGCGCCAGCGTCACTGAGGAGAGCTGGCTGGGTGCCCGCTCCTCCAGACCCGCGTCCCCTTGCAA
CAAGAGGAAGTACAGCCTCAACGGCCGGCAGCCGCCCTACTCACCCCACCACTCGCCCACGCCATCCCCGCACGGCTCCCCGCGGGTCAGCGTG
ACCGACGACTCGTGGTTGGGCAACACCACCCAGTACACCAGCTCGGCCATCGTGGCCGCCATCAACGCGCTGACCACCGACAGCAGCCTGGACC
TGGGAGATGGCGTCCCTGTCAAGTCCCGCAAGACCACCCTGGAGCAGCCGCCCTCAGTGGCGCTCAAGGTGGAGCCCGTCGGGGAGGACCTGGG
CAGCCCCCCGCCCCCGGCCGACTTCGCGCCCGAAGACTACTCCTCTTTCCAGCACATCAGGAAGGGCGGCTTCTGCGACCAGTACCTGGCGGTG
CCGCAGCACCCCTACCAGTGGGCGAAGCCCAAGCCCCTGTCCCCTACGTCCTACATGAGCCCGACCCTGCCCGCCCTGGACTGGCAGCTGCCGT
CCCACTCAGGCCCGTATGAGCTTCGGATTGAGGTGCAGCCCAAGTCCCACCACCGAGCCCACTACGAGACGGAGGGCAGCCGGGGGGCCGTGAA
GGCGTCGGCCGGAGGACACCCCATCGTGCAGCTGCATGGCTACTTGGAGAATGAGCCGCTGATGCTGCAGCTTTTCATTGGGACGGCGGACGAC
CGCCTGCTGCGCCCGCACGCCTTCTACCAGGTGCACCGCATCACAGGGAAGACCGTGTCCACCACCAGCCACGAGGCCATCCTCTCCAACACCA
AAGTCCTGGAGATCCCACTCCTGCCGGAGAACAGCATGCGAGCCGTCATTGACTGTGCCGGAATCCTGAAACTCAGAAACTCCGACATTGAACT
TCGGAAAGGAGAGACGGACATCGGGAGGAAGAACACACGGGTACGGCTGGTGTTCCGCGTTCACGTCCCGCAACCCAGCGGCCGCACGCTGTCC
CTGCAGGTGGCCTCCAACCCCATCGAATGCTCCCAGCGCTCAGCTCAGGAGCTGCCTCTGGTGGAGAAGCAGAGCACGGACAGCTATCCGGTCG
TGGGCGGGAAGAAGATGGTCCTGTCTGGCCACAACTTCCTGCAGGACTCCAAGGTCATTTTCGTGGAGAAAGCCCCAGATGGCCACCATGTCTG
GGAGATGGAAGCGAAAACTGACCGGGACCTGTGCAAGCCGAATTCTCTGGTGGTTGAGATCCCGCCGTTTCGGAATCAGAGGATAACCAGCCCC
GTTCACGTCAGTTTCTACGTCTGCAACGGGAAGAGAAAGCGAAGCCAGTACCAGCGTTTCACCTACCTTCCCGCCAACGTTCCAATTATAAAAA
CAGAACCCACTGATGATTATGAGCCTGCTCCAACCTGTGGACCGGTGAGCCAGGGGTTAAGTCCTCTCCCAAGACCATACTACAGCCAGCAGCT
CGCGATGCCACCCGACCCCAGCTCCTGCCTCGTGGCCGGCTTCCCGCCCTGTCCGCAGAGAAGCACCCTGATGCCAGCGGCCCCTGGCGTGAGC
CCCAAGCTCCACGACCTTTCTCCCGCTGCCTACACCAAGGGCGTTGCCAGCCCGGGCCACTGTCACCTCGGACTCCCGCAGCCGGCCGGAGAGG
CCCCCGCCGTCCAGGACGTGCCCAGGCCAGTGGCCACGCACCCCGGCTCGCCCGGGCAGCCACCCCCGGCCCTGCTGCCACAGCAGTAA

[0302] TABLE 39
MOUSE NOMENCLATURE
ICSGNM Syk
Celera mCG3409
HUMAN NOMENCLATURE
HGNC SYK
Celera hCG37721
MOUSE SEQUENCE—GENOMIC
AACTTTTAATAAAATATAGTTGCATACAGGTGAATATAGTCTTAGCATACAAATAACTGGTTTTCTCTAAACTGTAGCATTCCTGGATGCTTTG
TGAAAGAGATTGGGTCTTTTCATGGAAGTGTGGGGAGAGGGAAGAAATTACTTAGAGCCACTGAACTCTTGATCATGGATTCCTTATTTAAGGA
TTCACTGTTTCTTGATCTTGGGGTGAATAACCCAGTCAATGTGTTGCCTTGCAAGCATGAGGACCTGGGGTCAACCCCATGCAGGCCTACAGAA
CAACACCAGTAGCAGCAGGCATGGTGGTTCATACTTCTCAGTCCTGGAGAGGTTTGAACACAGGGATTCCTGGGGCTTCCTGGCCAGCCTAGCC
TGTTCGGAAAGCGCCATGCCAGTAAGATAGCCTGTCTCAGGAAGCAAGACAGATGGAGGGGGTCTGAAAAACAAAAGCTAAGGTTGATCTCTGT
TGGATGTGCATGCACACACACATACACACACACACACAAACATATAATCCACACTCGCATGCACACACACACACACACACACACACACACACTT
CACTAAAATGTATTTGCAAGTCTAGTCAGTTATAGCACTCTGTCATTTTTTGTGGACATGCACGGAATGATTTCATTCTGTTTCTGTGAGAAAA
CCTGACCAAAAAGCAACTTCTGGCAAGAAAAAGGTTTATTTGGACCCTTTCAGGTCCCAGTCTGTCATTGAGAGGAGTCAGGGTGGGAACTTAA
GCAGGAGCTTGAAATGAAACCATGTAAGGATCCTGCTTGCTGCTCACGTTCTGACCTGTGCTTCTGTAGTTCTCTTATACAGCCTAAGATTGCT
TGCCTAGGGATTGTGCCGCCCATGGTGGGCAGGACCTTCCCACATAAACCATCAATCAAGACAATCTCTCACAGACATGGATGCAGGCCAGTCT
GACCCAGACAATCACTCAATCGAGGTTTTGGATGACTCCTTGCTTGTCAACTTAACAGATGAGGTTAGCTAACCAGGACAGTGGCCCTCTTCTT
GTCTCACAACATAAACAGTGCCCATTTTCTTGATCTATTTAGGGCCACGTTTTAATAACAGATTTTTTTCCGTGCTTTTTGTTGGTGCCATCCC
TACTGAAAATAGTCCTAAGCGTGGGGCTAAAGTGCTGCCTACTGTCCCTAAACACAAAAAGGCTGCTATGTGCTTCATTAAGTAAATTCCCATG
TTGGGTGAGATTCTTACAAGTATTGGAGTCCTGCCCAGAACTCAATGTCAGTGTATTGACAATGGATGGGAGTTGTTTCTTTAAACAGATGCAT
ATCTGCTACAAGGTTGTTCCTTGTCTGGCTGGCAGAAGTATAATCAGGGGATCTCCAGGATTAACTTTAAAAGTTCCCTGAGAAAGAGTGGTTG
AAATTTTGTAAATTCTAGCACTTCTGTGGGAAGTATCTACGGCTCATCATAGGAAGTAACTATATTTAGTGTCATGCATTGGAAAGTAGGACCA
AGGTCAGGGGAATGGATGAAATGGAGAGAGGATGTGTGAGCCCTGATGCTTGTGGTGGTAAAATAACCTGAACACTGGGGTTCATCCCTGACCC
TAACCACAGTAGATGGTAAGTCCTAGGTTCAGATGGTGCTGCTCTGAGGGGATCTAGGCAGAGTACTCTGGCCCCTGGACTTTCTGTAAACATG
GAGAAGTGAGGGGAGATAGGGGTAGGCTGGCAGCATCCTGGAACACACCCTCAGCCATGTGCAACTTCTTTCCTCACCTCAGTTCTCCTTCTCT
CTTGGAATCTGGGTACCAGAAAGTCTTCTCCAGGCTACCAGAGCCCAGACCACTGGTTTGTTGACAGTATGTCGAGATAGTTGTTAGTCGCTGG
TTGTGCCTCTGGTTTGCCTTTGGGTATCTGCTTTGGGTACCAGGATCTAAGGAGCTGCCTGTGTCTGCCCTGAGAAATTCAATTCTTTAATTAG
CTCAATAGCCGGGCAGACACGGCTGTTGCTCAGTGTCTCTGGAGGTCATTGACTGACAAGATAGTACTACATTGGTGCCTGTGATAAGACAAAG
GTCACACAGTCCTCCTTAGTCCTGGGACTGGGGAACAGGCATGTGATTGTCTAATGGGAAAGGAAGGTCAGAAGTCAGTTGGTGAGTAATGTGC
TTGCTCTGCAGCATGGAGACATGGGCTGACAATCACCCATGACAAGGGCAGGGCTGGAAAACGTAATCCCTGGTCTAGGGAAGTAAAGCTAGGC
AGAGCCCTGGAGCTCCGTAGCCAGTCTACCCAAGCCAGGGAGCTCTAGGTTTAATGATAGATTCTGTTACAGAAAACAATGTTAAAAAACGAGA
GGAAGATACCAGATGTTATGTGTGCATAGATTATGTGTTCTCACTCTCTCTCTCTCTGTCTTCTGGCTGCCTCTCTCTCCTCTCTCTGTGTCTC
TCTGTCTCTGTCTGTGTCTCTCTCACACACATACATGCACACACACATGCAGACATGCTCACATACATACACATGCACACTCGCACGCATACAC
ACGCAATCACATGCACACATTAGTGCGAAATGATTCCCCGTAACTGGTTATGACTGCTGACCAATGCTCAGGGCTAGCAGAGGGAGAGGAAAAC
CACCCAGCATGTAGGCAGCTTCCTGAAAGCGTTCGGCTTCCTCCATTAGCTAAACTACAGCTTTGGAGGAACGGCACCTTTAGGTAGGAAGAGT
GCCTTAGCCCTTTGATGTCTGCAGTCTCTAAGCGCAAGCCCCTCTCATGCTCCACTCTGCACACCCATGGAGTTTGCTTGACAAATTCAGGCAG
CCATTGACCTCTCCCTATAGCAGAGGGAGGTGAGAATCAACTCTGAGGGCTTCAGTCTGAGCTAGAGGCACACTGACAGCTGCCATGCCTCTGG
ATTCAGCATTTCTTTCCTGGAGTCCTAGGGCTCCCAGGAAGCCAGTCATAGACTCGTGGGCATCTCTGAGGTGGGTGTCTGTTAGTGTCTGTAA
GACTGCAGGAAGTGTGCTCTGGTTAGCCCCTGGCATAAACCTAGCAAGGATCTAGCCTGTGAAGAAGCATGGCCACGCTCTGGACTTGACCGGT
ACAGTGTTCTGAGGGTGGGATGACACCATTTGGTACCCAACTGTGTTCTGAGGGTGGGATGATATCATTTCTGAGCATCCTGATGTGTCTGTCC
CTGTTTGGTGAGCACCTCCCTTCCTGAAAATCATGTGTTTCTATTCCTCCTCTTTATATCTGTGAAACCCACTCTTCCTATCTGCGCAGAGCTT
GCCATCCCAAGGTGCCAGTTGCCATGGTTCCCATCTTCCATGCATAATCAAAGCACTACAGTCGCTCTCACACTGCCCTCCATAGTCATAGGAG
AGCTGGGGAGGTGCACAGGTGTCAAGGTACTGCAGAGCCAGACAGGACACCTGCAGAGCTTGCGTTTAGCTTCTGCTCTGCATCCCTGCTGCCT
TCTAGGCTTAGAGAGCATCATAGCCAAGAGTCCCTCTAGGCCTCCTGACCTCTGCTGTTGTACAGCACCATGCTTAGAGAAACAGAGCTGGCAT
CCTCCTCAGATTGGCTGCTCCTGCTTGCAGGAGTCCATCAGGAGCCAGTCAGTGGACTGCAACCTCAGAGAAGGAAGGTGTGGTTGGGGTCACT
GGACCCTCAAGCAATACTATAGACACCCAGCCTAGTCATCTGTAATTGTGCCCCTACCTATGTGTACATATGGCTTGGCATCTCAGGGAAGGGG
TGGAGTGTGTAGGATGGGAAAGACTAGCTAGAGAATGGGAGTTCTAGCTATGTAGCCATGGGGAAGCCATCATCCATGCTGGGTACTGATCTTC
TAGTGTAGTTGTTTTAGGGTCCCCTACCCATAAACCCCTTGGCCATGTTCTATAACTAAGCCTAAAAAACCCGTTGGTCGCTTAGAGTGAATTT
TTGTGGACTCAAAATTCTTTGGACCCTTATGAGGAAGGGGGAGATGTTTATGTCATCTCTGGGGAGGAGTTTCCACAACGTCTGCTCATTGTTG
AAAATGGTCTTCAAATAAATGAGGGTACATTGAGTTATTTTAATAGATTAGTGAAACCAAAGGTTCTAAGACAGGCTGCATCAAATTTGTGCTC
ACGTCACTGCAACTAATCTAGTGGTAGTAGAAGAGAAGTCCCCCCCCACCCTAAACACACATACCAAGGACTGGTCCAGTCTCTCTGTCAAGAC
TACCCAGGCTGAGCAGCTCCGAGATGCTACTGTGAACAGTTCTAGAGAACCTAATGGGTGGGATGGGGTGGCAATGCAGATGTCCTCGTATGTA
AATAGAGGGTGAGGAGGGTGTCAAGACCACATGTGGAAGAGAAACTTCTCATCATTCTCCGGGAGCTTAGGGCAGATGCTGGACAGCTGGGACC
ATCCCCAGCTGTGTTTGTTGATCCCTGGCCTACACCAAGGAGATCAGAGCAGCAGCTTCAGGGTTGGTGATATATATATATATATTTATTTATT
TAAAGAAGCTTATACAACATGAAATTATGTGGGGAAATTAAGAAAAATATGCACATGCTGGAGATACTGACGAATAGGAAGAATGTATTGACTG
CCTGTAGGCAGGCCTTTGAGGTACTTAAGAACAATATATGCCAATGATGTCCTAGGGCTTCAGAGAAAAGGCAGGGAATCCAATGAGACAGCCT
TTCATTACTGAAGCATGGAGCAGGTGACAGAGGTCCCTTCCTTGAAAAAACCATGAGTTTGTGTAAGACATGACTGAGCTCCATCAACACAGAC
ACTGGGCTAGACATCTGGACAGCTGGTGCGCTGCTCTCCAGGATCCTCTGGACTTATACAAATTGGGCTTTTAGCATTTTCATTAGGAAAATAG
CCTATAGCCACAGTAAACTCTCTAAAGAAGAGCATGTGTCCGTTAGGCACATAGTTTGTGGACATCTGGTAGGCCCTGAAACATGAGCCACCGA
GTTAAAGTGTCCAGACCTTTGAAACTTACATTTTCATATAAGGCAAAGATGGAAGCAATCTATAAGGGAAATGGATACTTAAGTGAATTTAAAT
GAGGATGTGTTGGGGATCAATTTGAGGGCTAAAGGCACACACTGAAAAATCAGATCATGAGGCTATCAAGGGGGATGGGAGGATCTTAGACCAC
AGGCCTGGGAAGGAGGAAAGTCATTAGCGAAAATGCTGTAACCAAGAGAGGATAAGCCTGACATCCGAGGCCTGGAAGGACAATGTGGGACACA
GCTGGAGTGGCTGGAGTCAGGCCAAGGAGGGCCTTGTAGGCCGGGGCTGTACTTGCTAAAGAGAAAATGGACAAAGAATGAGGCCCAGAAGAGA
GGACCAGGTAAAACTGGGAGGTGGGCATTACACAGGCCGTGTTGGGAATGGGTGAAGAGCACCAGTGGCTTGGGGAGCCATTTACAGACTCTGT
GTTGCTAGGAAACTCCCTCAAGACCCTTCAGCCATTGGCCACATTGGTGAAGATTGGGACTAGTCTACTCCATGTGTGTCCATGCTTAGAGAGA
GAACAATCTTTTATGACTCTAGGGATGATCTATGGAAGACAGGAGAGAGGGAAGGCTCAAAACACTCTTCAGTATCATCTTCACTGGCTATTGC
AGTTGCTATCACCTCTTTTAGGGAAGAAAGCAATGTAGTGGTCCCCCCAGATGAGGGTTCAGGGTAAGGAGTGGAGTTGGGAAGGTCGAGCTAC
CTCTTGGGCATCCAAGAGTAATTTAGATGAACCAACACATAGGGTTGACCTCACTAGAAAGACTGGATGTCCATTTAATCAGCAAATTACGGTC
AGAAAAAAAAATGAATGACCCTCCACCAAACATCAAGAGCTGCTCCAGGCATGGAGGAATTATGGTTCCATTCATATCTTCCACAGCCAGCTCT
ACTGATATGTTAAAGGGAGGTCACCTTGTTACACTGGACCATGGAGAAGACTGAAGCAGGGAGGGGAGACAAACACCAAGGGGATTTCAAAATA
TGAAAGAAAAAAAATCCCCTCAGTCTGGGTGGTAGCTTAGTGGGTAGGGTGCTTGCTTTGCGGGGACAAGGGCTTGAGTTCACTAACCAGAACC
CATGCAAAAGAGCTAAGCTTGGTGGCTCACAAGTGTTTGTAATCCTGCAGGGAGTCTTCAGCACTAGTTCTCACTGGGAAGGCAGCAAGGAGGC
CAGAGTTTATTTATCTTTGGTAATTCCTCTGCGCATAACTCTTTGCTTTTCCAAGGCCAAAAGCCATTGGCTTCCAGCTACAAACTCTTGCTAG
CAGCAGCAGAGAACTGAGAAGAAAAATGGCTTAATAGCAAGTCCTTCTCTCTCACCAGCTCAGGAGCTCCTGGCTGGTCAGGGGAGAGGCTGGG
AGCTTATCAACTCTTTGTGAACCAGAAAGAAAAGAAAAGGAAGAAAGGGAGACATCAGTCACACACACATGCAGACTTTGGATGAAAAAAGAAA
AGAGGCTTGATTCACTTCACACACACACACACACACACACACACACACACACACACACACACACCTTCTGATTGGGCCCGACTAACTGTCTCAA
CTCCACAACTGTTCATCCATACTTACATACAGACATCTATACTTATATATTCATGCACACACACACATACACACATTTAGTAGAGCAAAAGCTC
CCATGAGCAAGTTCCATTGAGAAAGTGCCAACACAGAAAAAAAATCACGCATTCTGGATGAAAAATAAACTCCAATCTTTATTGCTCAGAAAAA
GAAGAGGCTTCTGCCTTTTTATTGCTGAAAGTAAGGAAAGGCTCATAAGTAAGAAAATCTCATCCTCTTTATTGCTGAGAAAAATGCCTCACCC
ACCCCCCTCTCTTGCTGAATGAAAGAAGGCTTGTGTCCTACTGACATCGTTCTTAGTTCTTACACTTTCTCAGGAGAATAGATGGCATGGTTTT
CCAAGCACCTTTACATTCTGAAAAGGGTTCATAGCGAGTTCAAGACACTAATTCACGTCAATAAATCGAACAAGAAGTTACAGCAAACGTGTTT
CCATGTGTTTCCATTAAGACTAGTATCTAAATAAACATTCACTATCTAGCTTCTAGATCCATAAGCTCATTAAAAGTTTAAAGCAATAATTCTT
ATGGTGTAAGTTAGCATGGTTTTGTCAAGAGGCAAATTATTTGCCTTGTGTCTCATTAGTTTTGAAGTTTGTATAGGTAAATCCAGTCAATATT
TTATCCTCTCTCCTTTTACCTGCAGTAAATTTCCCTTCCCAGTTTATGACCTTCAGTTATCAGATAATGGTTTCTCAGCTTGCCTAGAGGGAAT
ATTTTTTTCCTCATCATAAATTTGTTGTAACCCTGCTTCCTTATCTTAGTGCAATTAGCCTGTGACACATGAACAGTTACAGAACTCTAATTGC
AGCTTCCATACAATAGAGGATTCAAAATTACTTGTATAAATTTAGGAATTCTATATAACCATTATAATCATTATTAGGAATTACAAAATCATCG
GTTTGTCTACATAGCATTACTACAAGAGAGTACATCCTGACGGATCTGCAGAAAATCTGCCCAACAGACTCCAGGGTGCCCAGGAGTCATTAGA
ATACGCAATAATGACAGGAAATCTCTTGTAGTCTTGCCTTTCTGAGCTCACCCATCACAGGCCATGCAAAAAATGGTGGCCCACTCCAGGAAAG
AGACAGGAGGATCTTGGGATTTGCCAACCCGCCAGACTAGAGTATCTGGCAAGCTCCAGGTCCAATAAGAGGACTGTTTCATAAAAAAGGAGAG
TGATTGAAAACAGCCTCTGAAGTTGACCTCTGGCCTCTAAATGTAAACATGCAGAAGCATCCACATGAACTAGCATGTGTGCACACATACATTT
CCAIACTCCTAAGGTCTTGCATGCATAATTTACATCCTACAAGGCCTCAAAAGAGTGAGAGATTTACTGTGTTCTGATGGCTCCCCATATACCT
CACGGCAGCAGAGCTACCTGTAAGGTGTGTGCAGAGGTAAGTACTGGCCAACTCTGGGCACAGGTACAGTGAGGTGGAGTAGGGGGTTGCTTTG
TCAGGACTGGGGTCTTACTACTTTCCTCAAGTTAATGCTTTTACAAAGTGGCTTCACACACTTGTCAATGTCAAACTGCGCAAAGATAGTGTTG
CACTGAGAAGGAAGAGCAAGTGTCTCAGGACTGTTGAGGGTGATAACAGCATTGTGAGCTATGAACTCTCTCTGCCGTCAGAAGAGGGGAGCTC
AGATGTGACATGCAAGCCACAGTCGTTGGTACAATGAGTTCAGTGGTGCCTGGAGCAGCACACGTCTCAGGACACCATGTTACCTGTGCCCACA
TGACATCTTTGAGTTGTGCAGCCACATGGGGGAGGATGACTTTCAGAGAGAAGGCTGTTCATCTAACTCCATGTGGCATGAGTTACACAGCATA
TACACATACCTCACATACACACACCACCGTGTGCCTATGTGTTCACACGGTGGTGTGTGTATGTGAGGTATGTGTGTATGCTGTGTTAAGTGTG
TTCAGTGTGAGGTGTGCTTGTCTGTTCTGGGTACATGCACTGGCTCTATATACTCTATGTGGTATATGTGGGCTATATGTTATGATGTCTGTGT
GCTGTGTGTACCTCTGATGCGTGATGTCTTGATCGTCTGTGTACCATGTGGTATGTGTGCATGTGATATACGATATGTGTGATATGTGGAATAT
ATTACGATGTGGTGTGTGTGTGTGGTACATGCATGTGGTATGTGTGGGATATGTGTTTACAGTATGCTGTGTGCATGAGAGGTAGTTTGAAAAC
ACCGAGAGGTAAATGCTCTCTCCCCAGGTGAAAGGATTTCCTTGTCCAGCATATTCCAGACGACCAGCATTTTTTACTTAAACATGCTTTGAAC
ACTTTCTGGGTGGCGCTGTGTGTCTTTTCCATTCACAATTGTGTCCATGCATTCATTTCTCTTCTGCAGAGTGCGTTCCTCAGAGGTAGCATCT
CCCCATGGCAAGCTCCTCACACACCTCCACCTACTGACTGATCATCTGCTATGCAGGGGAGGTGGGCCGAACTGTCCAGGGCTCTGGATGTTTC
TCCTAGTGGCACCCAAGGCTGGAGAGGGCACTCTGGGTAGATGGCACTGGTTATAACTCAGGGAGCCACTTGCTGCTCTTTCCACCCCAGGCAG
GAGATGAGAAAGCCTGTGGTAACGAGGCCACACCTATGGCTCTCTGAGATGTGACTGCAATGCTTGTTTATGTGAAGTAGGCTCCACAGCCTTG
GGATGAAGCTCATCTGTAGGATACATTTCTAGCATTCCTGAAGTTCTTGCTTATACCCCAGTACCATATAAACCACATGTGGTAGTTCGTGCCT
CTGATCTCAAACTGGGGAGAGGGAGGCGGGGGAATTAGAAGTTGAAGGTCATCCTTGACTACATACTGACTGAGTTCAAGGTCATCTTGGGTAA
CTTAAAACCCAAGAGACTCAGGAGGGATGCATAGCTTTTCTTAGCCCGTTCTGTGCCTACTCCGGCCCACCGCCGGCTTTGAGTTCTCACTGGT
TCTGTTCCGTGGACCACTGTCTACCCTCAGGGTACTACGCCCTTGAGGACTGTGTCCAAAGACTACTGTGCACTTCTCTTTTTCTCAGTTTCTT
CTTAGAATTCCTTGTATTAACTAGAAAAAAAAAAAAGAATGATAGTGAATTGGGTCACCTTCGTCAAAAGCCGTGGGTTTGGTTAGCTAACCAC
AGGATGTGTGTTGGGAGACCGTGGGAATTAGGTAATAATAGAAAGTACCACACACCAAACACACACACCAGTGTAAGCACTCTAAGCTTGTATC
CCTGTGGAAACGGTTCTGGTAGTCATAGCCAGTGTCTCTTGTGGTTTGGGTTCTGCATTGTGACTCTCCCGTCTTTGTGGGCCCCAGGTACTTC
TCCATACACTTCCCAGAACTCTGAAGGGGTGCAGACATGGCGGGAAGTGCTGTGGACAGCGCCAACCACCTGACCTACTTTTTTGGCAACATCA
CCCGGGAAGAGGCTGAAGACTACCTGGTCCAGCGAGGCATGACCGATGGGCTCTACCTGCTACGCCAGAGCCGCAATTACCTGGGTGGTTTTGC
TTTGTCGGTGGCTCACAACAGGAAGGCACACCACTACACCATCGAGAGGGAACTTAATGGCACCTACGCCATCTCCGGGGGCAGGGCCCATGCC
AGCCCAGCAGACCTCTGCCATTACCACTCCCAGGAACCTGATGGCCTTATGTGCCTCCTTAAGAAGCCCTTCAACCGGCCCCCGGGAGTACAGC
CCAAGACCGGACCCTTTGAGGACCTGAAGGAGAACCTCATCAGGGAATATGTGAAACAGACCTGGAACCTTCAGGTGAGTCTGCTGGGCTTGAG
CCCACAGAGTTCTCTAAACATATTCAGAGCCTGTGCCTCCTTTACCCAAAGACTAGGATAGCAGATGCCTGTGTGCTGCTGCCCCTCGCTGCCT
CTCTTCCCACCCCATCTGCTCATGGGACCAAAGCGGAGTCCTCACATCCTCTCTGCCCTCCTCCTTTCACCACGAAGGAGAAGGTTGTGTTTTA
ACTTTATTCCTTTGAGTTTTTCTTCTTTGAAAGTCCAACTCTGGCTATTCATTACCAAGATCTGTTGTTCTCTCACTAGGAAGGAAAAGGGAAC
CAGCCTTCTCCACACTTAATCCATCTCCATGTTGTTATTTCCACCTTGTTTCTTCCTGGTCCAGGCTGCTGGCCAGGGCCTCCTCTGATGGACT
TCCTGCAGGAGTGTTGGGGTAGGAAAGATGGGACCGACGACATGGCTGAACCCTGATAGACATGAAGCCCCAGGTGCCCTCCTTACACATGTCA
TCCTTTTAAACTTTCTTTAGTTGCATGTACTGATTTCGTGTGTTGGAGGCGGGTGCCTACAGGTCTACAGCATGCATGCGGAGGTCAGACGACT
TGCAGGGGTCAGTCTCTCTTCCACCTCATGGAGTTCCGGGAGTCAAGCTGAGACGGCCAGGCTCAGCAGCCAGCATCTTTACTGCGGAGCTGTC
TCAGGACCCCCAACCTCACACACATCTTATAGCTCCTTGGCTGTTATGAAATTACCAGGTTTCACACTGAAACTAGTTTGAGTATAGAGCTTTG
GAGTATCTATTCTCTTAGCCCATTGGTTTATGATCTATATATTCAAATATTTGTATGGCTTTTCAAGGGCCCATCTCTTCATTCCGAAGCATAT
TCCTTTATTTATACACTTGATGACATGCAAGTAATATACAAAAGTCTTATTGGTTTTCTTATGAATGAGAGAAAGATGATCTAGAGGGAAGCAG
AGTTTGGTGTTGATAGCACCTGGGACAGATGGGTCTAATGTCTTTCTACCTGGCCAGCTCAGTCTCTCTCCATTCACTGCAGGGCCAGGCTCTG
GAGCAAGCCATCATCAGCCAGAAGCCCCAGCTGGAGAAGCTGATCGCCACCACGGCCCATGAGAAGATGCCCTGGTTCCATGGCAACATCTCCA
GAGATGAATCAGAGCAGACGGTCCTCATAGGGTCAAAGACCAATGGAAAATTCCTGTGAGTGACAAGCCATCTCCCTACCTCCTCACCCAGAGC
TAACAGCTTCCCCAGTTAGAACCCAGGTGGCCTGGGAAGGTGTCACACACCATCATCTACCAACACGGGAGTTGCTGTCACTTGTGACCCAGCA
TGTGTTTTATCTAGCGTGCCCGTAAAGATTGATACCGTGCCTAAAGAAAATGGTGTTCAGTCCCACGAGGGTTGGGTATGTTATCCGTGGTGAG
AGCAGAAGTTCTTTGGATTGGAGGTATTTTCTGATGGAGGAATATTTGCACACATGTAACGAGAAATCTTAGTATCTTATCTAAGCCTGCCCTA
GAAATTCATTTATGTTTTAGAAGCACTTGATGCTTATAATCTCTAGGCAATCAATTTCCTGTGTGTGTAGGTTTTCCTGCTAATGCATGTAAAT
GTATGTGCACCTCTGAATGGAGGTCAGAGGTGTACGTTAGGTATCTCTACAGTTGCTTTCTACCTTATATATCTTAGTATCTCCTTCTTATTTC
TTATTGTGCGTCTGCATGCTGGTGGGTGGGGAGTACTTGTGCCACAGTTGAGGTCAGAGGACAACGTTCATGGAGTCAGTTCTCCCCTTCCACC
TTTACATGGGTTCCAAGCATTGAATCCAGGTCACCAGGCTTGTGCGGCPACCACCTTTGTTCGCTGGCCCTCCCTTCCACCATGTATTTTGAGA
AACAGTCTCTCAAAGAAGCTGGGGTTTGCTGATTTGTCTATACTGACTGGTCAGCAGCCCTCCCCCCCCCCCCCAGGAATCTTCTGTCTGAACA
GAAATAGTTCTGTGGTCTTCAGTCTGGACAGCTCAATAATGTGAAGGCTTGGATCTTGGATTCTTGACCTGGGTATCTGCAGTGGGTCAGTGTG
AGCCTAAATTCAGAAGGTTCTGGAGCAAATTGGGCAGTGTAACTGAGCAGAGTAGTAGTCTGGGGTGCAGAGAGGCTGGGAGCTGTCCTTGTGT
GGTTAAGCCTTCTCATGTAACGATGCACCTGCCGAGGGAGTGCTGTAGGAATGCCTGCATTTGTCACCCCATGTCCCTACACAGAGGCCTTCTG
GGAACCACCACCCCATTCCTTCCAGTGAAACGTTCTTAGATTCAGGGGTGTGGCCTTACAGTCAGGCAACATGATCAGTATCAGGTTGTCTTCC
TAGAAATATAGGTGTTTCCTCTGCATTTGCATCTAGCTAAAGAATTTTCTCTTACTTCTGATATTAAAAAAAAAAATTTAAGGTGCTGAAAAGA
TGGCCCAGTAGCTAAGAGCACTGGCTGTTTTTCCAAAAGAGCCGAGTTCAATTCTCAGCACCCACGTGGCGGCTCACAACTGTCTCTAACTCCA
ATCCCAGGGGATCCAGTGCCCTCTTCTGGACTCTGCATGAGCTAGGAATTCATATGGTGCACAGACACATGTGCAGGCAAAGCACACAGAGACG
TAAAAAAAGAAAAGAGTAAAATGAAGATTATTTTTAGATTATCTTAATCATTTCTCTTTTTAAAAACCTTTTGTTGGTTCTTTGTGACTTTTAA
ATCATGCTCCCCAATCTCTCTTATCTCCCCCTTCCCTTGTACCCTCCCCCACCCTTTCAAACTCCCTGCCAACAGAGGAAAAAAAGATCTCATG
GAAGCTGTACTATCTCACAGTGTGTCCCAGACCATACCCTTTTCTTCACACTTCTGTGCTTGCAAATATTCATTGCAATGACTTGTTGGTCTTG
TACAAAGCCTCTGCCTTCTGCTACTCTCTTAACACTGCAACCTCACTGGGATTCCTCTCAGATATCCTGGTGTTGCCCTATGTCATGGAGATCC
TGTAGCTTTGCATCTATAGGACCAGCCCGGCAGTTCATAGATGGGGTACATGTTGGGATGGGCCATTCAAAGTCCCGAATCTGGGCAGGTATCT
TGTGTGTGGCTGTTCTGTGAGTATAATACAACATGCACAGGTCACTCTGTGTGCCATCTTCCATGCCACCCATGCTAAGACAGACCCGTGTCCT
CTCAGTCCTGTCATGAGGTACTCGGCAAGGTCTCTGTGTCACTTCTGTACACACCCCTGCTGGGTGTGAACTCGTGCACAGAGCACACCTCATC
CATCTCCACTATCCGTCTTGTTCTTAGTGCTCACTACAGCAAGGAGAAAGCTGAGATGGCCACACAGGAGATCTTGGTAGAAACAGAAGACTGG
ATCTGTTTATGGTCCAGTGTACAGCAAGTCCTCCATTTTGGGATGGGATGCACTCTTGAATCCCGTGTTAGTAGTAATGCCCTGCTGCCTTCTC
TCAGGTGTGAGCCCAGAAGGTTCTGGAAGCCTTCCCCTCTTCTCTTTCCTTCCTCACCCTCTGTTCATTTCCCACCGTAATTTCCCAGCTGCCT
GTGGAGGAATGACAGGGAAGACCAAGTCAACGGGAGTAGGCACCAAAGCTCCCTCCTCACTGAAAAGCAAGCACAGCCTACCTGCACTCACACG
GTTTGAAGTGCCACTTTGACAGGCCAGACTCTTTACCACATCCTTCATCCTCCGAGGCCCCTTCACACTGAGGAATTCAAGAGTGAATAAAACT
TTAGGCCTTCAGCCTGAGCCTACAGGGGCTGCTGACAGAAATGCACAAAGTATAGGAGTCTCTAGGGCAGCTGTGGAGGCAGCAGGCTACCATT
GTATTCCTCAGAGCTGTAAATTTCCTATTTGTGCTGTCATCAAGCCAGGAAGTCACTCAACTGCTGTGTGAGCCACAGTTCCTATTTTCTGACT
TGTGACATACATTGTGCAAAGAAGAAGAACAAAAAGGAACACAGAAGCAGTTATTCATTCAACAAGAGAGCCGTGTGTCTGAGTAGATAAGCAT
ACATCATCATGCTTTCTACGTCAGGCAAGATGCCACCCATCCAGGTTCACATGCTACAGAGCCTGTGACACGATAACATGCCACTTCCTGCCAT
GGTGTCTCATAAAATATGTGTTTATGTATATACATATTCATGAGCATCTATGTTCATGTATGCACGCATGTGTGTGWGTGTGTGTGTGTGTTAG
GGAGGGGTCAGAAGTCAACACTCAATGTCTCTCTATAACTTTCCATCCATTCTGGGTGTCTTGGGAGCAAGGACTGGCCTCTTGTCTTCAACAG
CTGTAATCTTAACTTGTATAGTGTTGCAACGGGAGGACCTCTCTGAGGACGTCCAAGGGGCTCTGAGAGAGAAAGAGGAGGTTAGCTGAGGAAG
GGCATGCCCTAGCCGAAGAAGTATCTGTGAGAGCCTTAGTGACCCAGTATTGCCAGAACATGTTGCATGTGACCAGCTATGGGAAGGGAGGTCC
CTATGATGTCGTGGCAACTGTGTTAAAACCCTTACTTTACTTAGTAATGGCTCCAGACGAAGACTAATGATGCCCAAGAGAAGCTGCGCTTATG
TGGTACTTAGTTCAGTACCCTCTAGTTTCAAGAATCTGCTGGGAGTCAAGTTAAGTGCTCCCTGTAGATCAATGTCTGCTTTCCTGTTCCACCA
TCCACAATGTTCCATTGTGAAGATTAACTGGGTCAAGTTCGGAGACAAGCTGGGGACTGTGGTAGACCTGTGCTCCCTACATCCACCGATGTTT
CCAATCAACTCTAAAGAACGCCTACCTTCCCCTTGTCCTTCAGAGGAAGTGTGGGCTCCTTACTGCAGCCTCTCCAGCCTGCTTAATGTCTGTT
GCCTCTCCTCCCCCATGTCACGTGGGCCTGTCACCATGTTTCTTCTCATATTAACTTTTGTTTGATCTCTGTCTAATCTGTCCTTTTTTTGCTC
ATTAACTTTTAAAAAATAGTTACATCTTTCAATGTCCAGAAATTAAATTTGGAGTAGGGTTTGTTTACTTTTCACAATTGTTCCTCGGCATTTT
TAGGAGCATCTCGTTGGTTGGTTGCTGATTCCTGTTTTGTTTCTTTAAGCGTTCCATGCATCATCGCTAGTTTGTATCCCATCTCATAGTTTTA
ATACTGAGCATATCCAGGTATACATATAATTTTCCTCCATGTCTCTCTCTTATCCGATGCCTCTTTTATCATAACTCATGTTTACTTACATCTG
GGGTGACCTTTTTGAGTTCATATTTGGTTGATACTCATCTGTGGGGATGCAGAATGCCCTGTGCTCAAGTGCTTTCCTTCAGGATTCAAGTGGC
GGCTGCTACCCTAAAGGCTGGCTCCTGCCCACTGTAGTGCTGGTAACTGTGTTTGTCCTCAACTCCACTAACACTGGTGTGTGTGTGTGTGTGT
GTGTGTCTGTGTGTGTGTACATGCACATGCAAATGTATGCAGGTGTACATGATAGTGCATACATACAGAGGGTAGAGGTCAACCTTATATGTTA
CTTCTCAAGAGCCAACCACATTCCTCCTTCAAAAAGTCTCTCTCACTAGGACCTGGGGCTCATCAATTGGGCTAGGTTTCCTGGCCAGTGAGTC
TCAGGGATCTGTCTCTCTCCACCTCCCTAGTGCTGGGATTTAAAGGATATGCCCCCTGCCCCACCCTCGCTTCCATCTCCTCCCACTTGCTCAG
CAAGCATTTTACTGACTGGACTATCTCCTCCTCAGCCCCAAGCTCGTGCTGTTGCTTTCATTTGCCAAACAAGTTTGCCTCCTCAAGTTCCAGC
TTACGGGGTGATCTATGCCTACTTTTCAAAATTATATTGTGGGCATCAAAGAAACCCTTCTCTTTGTTCGTTAAGGAATGAGACAGTAACTGTT
GTGAGCCTCCTGGGCCACGGCGAAAGCCGAGTTCAGTCAGTCAGTCAGTCTGTCTTCCCACACTGGTATGGGTGATCAAAGCAGGTCATTCATT
TGATCTGTGTGGGTTTGCCACCAGGGCGATCAAGAAGCATCCTAGCCCGTCTCTGAAGGGAAAGTTCAAAGACAGCCGTGGACTGATGTCAGTG
TCAGTTTACTGATGCTGCTCAGAGGCCCTGGGAAGCTGGAAGAGAAGCCACAAAAAAGAATCTCTACCTAGGGACTGGAGCAGAAAGACAAAGA
GAAACCAGCGAGGGGCTGGGTGTATGCCTGCCTATCTTGTACAGACCAGCTGTCAGCCTCAGGAGATAGTCCCCCTGGGAGCTGTCCACCCATG
AGATAGTCCCCGGGAGCTGTCCACCGAGTTCACCCTGGAACCTGCGGCTTGTTGATTATGCTAGGACATCTACTACCTGCAAGTCCCAGAGATC
CACCTGCCTCTGCCTCTGCCTCTGCCTTCCCAGCACAGGGACTGTAAGCAAAATCATGACACTTGGCTGTGTTTGTTTGCTGTTTGTTGTTTGG
GGAGCTTGCTAACTGGCTTGCTTGTTTGTTTTTGTTTTTCTTTGGTGGTGGTGGTGGGGGAGGGTTTCAAGACAGGGTTTCTCTGTGAAGCCCT
GGCTGTCCTGGAACTCACTCTGTAGACCAGGCTGGCCTTGAACTCAGAGATCCGCCTGCCTCTGCCTCCCGAGTGCTGGGATCAAAGGCGTGCG
CCACCACTGCTTGGCTTGTTTGTTTGCTTTAATAGGGATTCTAAAGGTTGAACTCAGATCATCCTGGTTGCAAGACAAGCACTTTTCCTACTGC
ACCCTCTCCACAGTGCAGGGAGAGATGATTGTGGAAGATGTTTCAGAAGACGCATGGGTAGAGAACACAAGTTTGGCATGCCTCAGATCTGGTT
TGCTTTAGGGACCGATCTTGCTTTCAGGATCTGCACAGACAACACCCAGTGTTGCTACTTCAAGGTGTTGGCAGGCACAGCGTTTCTGTACCAA
ATGTCACTTATTCCAGGATCCCTGTCTCCTGTTTTCCTAGCCTTCTTGGAAAGGCTACTGTGCATTCTTAGCTCTGAGCAATGATCATTTTCCC
ACCTATTATTCCCCTCTCTCTTCACCTCTCTTTCCTTCCCCTCCTCTTCCCCCGCCCATCTTCCATCCTCTCTCCTCCTGCCCATTCAGACATT
TTCCCTCCCCTTTCAACTCTGACCCCATCACAGATGCCCCTGGACGATAGCCACAGAGACTGAGTGGTACTCAGGCTGGAGTGAACCTGCTGTC
CTGCTCTCTCTGTATCAGATGCAGACCCCATCCCTAGAGTTTTACACACCGAAGCCTTCAGTATCTCATTATCTCCCAGGCCCTCCACTCACTG
CCTGGTCTCACCACCACCCACACATTCTTTTACCCTGGAGGGCACACAAAGGTAGAGAAGAGGGTTAAGCCCTTCCAGCAAAAGTCACACCCTC
CTCTCTCACATCTATGAGGGGCAAGTTCAAGGTCTGTCTGCCGAGCATGCACGTACATACACATACACATTTCCTCCTACTACTTACCGAACTT
CCCTCTCCTTACCGCTCCTCTTACCCTCCCCCTTACCCTCCCTCTCCTCCTCCTCTCTCTCTCCCCTTACCTTCCCACTTCCCCTTCTTCCCCC
TCCTTTCTTTCTCTCTCTCTCTCTCTCTCTCTCTCTCTCTCTCTCTCTCTCTCTCTCTCTCTCTCTGTATTCTATGCCTACTTATGTGTGTTGA
TGTGCATGCCCATGCATGCAAATGCAGATGCCCAAGGAAGATTTCCAGAATCTTCCTCTATCACTTCCCACTTATTCTTCTGAAACAGGGTCTC
TCTCTGAGCAGAGCCTCACTGCCTCAGCTGGGCTGGTCAGCCTGGGAGCTCATAGCATTTGTCTCTCTCCAACCTCCGTCGCTGGGCTTACAGG
CACATGTGAAGATGTCCAGCCTGATTTACCGCAAGTGTTCTCACCCACTGAACCATATCCCAGCCCCTTACACGTGTGTGTGTGTGTGTGTGTG
TGTGTGTTTTCACACATTGTCCTTTCTGCAAGCCAGCACACATTGTGAATGGTTTCCCTAGAAAACAGGCTCAACCCTTTATTCATATATGGTG
TTTTATTGTGTGACTGGGCGTTACCCAATGACCAACCAGGCTTTTATCAGCCACATAGTCATCCCAAAGGAGTTGGCACCTCAGGGTGCTCGTG
ACTGACTGTAGGAGGGAGGAGGTGTTTCCACAGTGGTGAAATTTCAAAACACAAATCTACGATGGCGGAGAAGGGTCTTTCACCCTTCACCAGC
TTCTCTGAGCTTCAAGCAGGGGCCTGGAGGGAGCCCTCGCCACTCTGCCAGGCAAGCGCCATTTCAAAAGAAATCATTCGTAAAGTTGCAACCT
CCTCCTACTTTGAGGAGATGGGTATGGCAGGAGAAAGGGAAGTGAGGTCACTTCCGGTCCCAAGGCCCAGCTCAGCCTGGACTGTGGCTGTGGC
CTTGATGTTGTGTGCTTGGAGAAAGCTGTACAAACCACCCCAGTTTACAGACACCCTTCTCCAGGCTGCTGGGACTTGATTGAGCTCTTCCCAA
GTCCAGTGCATTTATGCTGGATGCTCTGAAAATTCATCTTCCTTCCTTTAGCAAATGCAGAGGCCACAGAGGCCTCAGGGACTCCCAGACCGCA
GATGTCCCACGGACTCGCCCTTCCCCACATCTCATGATTAGAACGCATGAGTTGCTGGAAAGGCGGCGAATAGCATGGCCTCAGAGGAATGAGG
CTCTGAACTGGGAGAGTCACACCTCCTATTGCCATGCCAGCCAGATCTCACCTTCTCCGGGGCCTTCCTAAGTACTGATTCCTCCTATGATGTC
AGGACTGCCTTGTGCCTGTGTCTCGAGGTTCAAGGGTGCACCTGTATGTTGTCACTCGCCATGGGGGCCTGAAGTCCTACATGTAGCTCCTGGT
ACCAGTGGAACAATGAAGTCTCATTCACCTACAGACGCCTCAGGCCTTGGGCTGTCTCTGTTGGCPCATGCCACGTGGCTATCATTCCCGTCTC
AGGTGGGGGATGCTACCTGCTAATGTCAAACAATGTCTTAAACCCGGCCTTGGCACTGAAGAGAAAGGGAAGAAGACCATAGGAGTAGAAGAGT
TCATAACCTCCTTTGTGTGCTCCAGAAAGTTCTGTTAACAAGCTCATTAGACTCCTCACCTGTCCTTCACCTGAGTCTAGGGGCTTCACAGACA
CCCCAAAGCCTGTGCCTGTGCCCCTGAGCCACACCCCCCCAAGCTCTTTCACTGATCTCCAAAGCGCCATGGCCCTGCTGGATCTTTGCCATAG
TCCATCTCCAACCCTTGGCGTTTCCCTCTGGCTAACTCGCTGGCTCTGGTACAGAGCCCTCCTGTCATCTCGAGGTCTGGGTGCTGCGTGCCCA
CCACCTGCCCATTTGCTGGTGCTGGAGAGCACCTGCTGCCCACCAGGGCCACCAACTGTAGTGACGGTACTGCTTCCTAGGTCAAAAGGTCGCA
GTAGGGGTAATATGGTGTGTGCTCTCTCTCGCAGGATCAGGGCCAGAGACAACAGCGGCTCCTATGCTCTGTGCCTGCTGCACGAAGGGAAAGT
ATTGCACTACCGCATTGACAGGGACAAGACCGGGAAGCTCTCCATTCCTGAGGGGAAGAAGTTTGACACCCTCTGGCAGGTATGTCTCTGTCTC
TCTGTCTCTCTCTCTCTCCACTCACTTCTGTGTGTCTCTGTATCTCTCTCTCTTTGTCTGTCTGCCTCTCTCTCTGTCTCTCTAGACTCTTTCT
TTCTCTGGACTCTCTTCTCTGTCTCTCCCTCTCTGTCTCTGTCTCTCTCTGTCTCTCCCTCCCTCCTGGAGGGCACAATGCAGACCCACTGGGA
TGCTAGTTCCAAAACTCTTAGGAACAAGAGGAGGAACGAGGCTATCTGTCCCATACCCTCCATCAACCCACTTTCTGATTTCTAGAAGACTTGT
GTGAGAAATGTTCACACAGACCGTCATCAAGTCAATGAAGCCACAAACAGGCTCCGTCACCTGGTTAGAGCCATAAGTTCCTGGTGCCTCAAGA
TCATGTATTTTAGGGCAGCATTAAGAATTTGACAGAAGGCCATGCCATCAGGGACTGGAATAACATGTGCATGCATGCACACACACACACACAC
ACACACACACACACACACACACACACACACACATACTGTAACTGATCAAACAAAAACCCTAGGGACTGTGACCTAGCTGGTCCTGGAGCTCTGA
AATGCCAGGGTAGACACTGAATTTCAGGTGACATCCCAGTGGATAACCAATATGGGAAGCACCCTCCTAGGCAAGCATCCTCATAGCCGAGCCA
CCACAGGAACTTAAAACAGCTTAGAAAGCAAGTCTACTCTTCCTGGGCTGCAGACAGCTGCCTGTCCAAAGAGCACCCCATACCTGCTCTGCAA
TGTGTTCTCAACCTAGCTGTCAGTAAGCCTCAAGGCAACTCAAGCACCCCAACATTATTCACCCAGCTCCCCACATTTGCTACTGAGCACATTC
CGCTTCCTTAATTTGATATCATAACTACATTAACTGTGGATGCAGAAGGATCAAAAGTAGTAAATTCAAGGCTAGCCTGGGCTACATAGAAAAA
ATCCTATCTCAGCAAATAAACAAAAAATTAAGTCAATAAAGGACTAAGTGATGGAGATGCTATGGAGACCCCGAACCCCTAATGTATCCCTATC
TGGCTACGTGATGGTTATTTTTTTTAAACTATTTTAAAATTTTATTATTATTATTATTATTATTATTATTATTATTATTATTATTATACATAAG
TACACTCTAGCTAACTTCAGACACACCGGAAGAAGGCGTCAGATCTCATTATGGGTGGTTGTGAGCCACCATGTGGTTGCTGGGATTTGAACTC
AGTACCTTCAGAAGAGCAGTCAGTGCTCTTACCCACTGAGCCATCTCACCTGCCCGTGATGGTTAGTTTTAGTTGTTAATTTGATACCATCTAA
ATCACCTGAGAAGAGAGCCTCAGTGAAGGATTGTGTAGATTAGAGAGTGAGCATATCCATGGGGATTCTTTTGATTACATTAATTGATGTGGGA
AGACCCAGGTCATTGTTGGGTGGCACCATTCCCTAAGCTTGAGTTCTGGTCTGTGTAAGAGCAGAGAGTGCTCACTAAGCAGTAAGCATGCATG
CATTCATTCACTCTCCACTCTTGACTATGCATGTGACCAGCTGCTTCAAGGCTAAAAAGTTTGTTGACTCTATCCAAGGACATCTTTGGCCCAT
CCCCCGACTACCCTGTGGAAAAGAGACTATCTGGGGTTTAGATGGTTTTAAAACCTGTGAGCGCTGTGACTTATCCGCTGTCTCCCCCTCTCTC
TCTCTTAACCATTTTCTTCCCTGTTTCTTTTCCAGCTAGTGGAACATTACTCTTACAAGCCAGATGGGCTACTAAGAGTCCTCACGGTACCATG
CCAAAAGATTGGTGCACAGATGGGTGAGTGATCCGCACAGAAGAGGCTCTGTTTTGGGGGAGCTAGCCATTGTCAACCTCGTGTCAGATTTGCC
AAACTCACACAGGGTGAGGCTTCGGCTTTACCGTGTGATTAAACTAGATGTCACTCAAATTCTTGGAATCATTAGCTGAAAGATAACCATAACA
AAAACAAACAAACAAACAAACAAAAACTAGAAGATTTTGATTGCATGTGTGGCCAGGATGTTGGCACATATCTTCAGTCCCAGCATTAAAAAAG
CAGGGTAGGGAATCTGTGAGTTCAAGGCCACTGTCAGACCCTGTCTCAAAGAGAAAAGCTTACTTGGTGGAATGTGTGAAAAATCCAGTAAAAG
AGAAAAGTACAGATGCAGAAAGTTGAGTCTCCCCAGTATGTTCCCATCATACTGATAGATCTGAGAAGTAGATGGTTTGAACAAACACAGAAGT
ACACAGAACTGTAACCATGACATATTCTCCTTCCAGGCCACCCAGGAAGCCCAAATGCCCATCCCGTGGTAAGTATTCTCTGAGGCGTCTCTGC
TGGGGAAGCAGCTGTGTCTGGACACATGGGAAGGTCAGCCTTTAGTCAGCACGGGATGGATACTCTGAGCACATCCCGGAAGATCTGGGAATCC
AGTGAGTCTGACAAAGCCTCACCCTGTGACCACCGCCCAGCTAGACGTGTTTTCATGGTTTCTCGGCCGTTTTATTTTCTCTTCATTCTTTGGA
AGTATACAGAGTGAGACAGAAACCCCCTAGGAGATCAGAAAATCCACCGGTCAGATGTAGAAAAGGGGAATATATCGTCCACGTTCAGTCTTGT
ACTGTCTGTGTGAACTCGTGTGTGCCATGCACAGGTCTGCCAACATGCATATCAGTATAACATGGCCAGCGGATAGGTATCTCCTTGAGGTTGG
CTACCCAACTTCTTTGGCCCAACCAATTGACACCTTATTACTAGGGACTTGACTTAAATTGATTTGACTAATGATTAGGGGAGGCAGGGAGGGG
CCACTTGGCAAGATTTCAAGAGAAAGGTCCAGAGAAGGAAGGAGTCTTGGCCAGAATGCACATTCCACTCCATGCCACTCACTAGATAAGAACG
GAGCCCAGATGGCCCTGTGTTGGGTTAACCCTTTCATTGCCATGCCTTCAAAGAGAGAAGAACCTCAAGTCCCCTCTCCATCTGGGATGTCGGA
GCTGGTACTTAGGTTACTTCACAAGAGCATCTCTTCTCATATCTAGGGTCTTCAGCGAGCACATCCCAGCTCATTAGCACCACCAGGGAATAAT
TCTTGACTTCTATCTTGCTAGATGCTAAAAAACCCAATATCTACCAGGCACATGTTCTGTCTCCAACAGGGGCGGTTGGCCACTTGCTACTGAA
CCTGTTCATTCCAGGGTTAGTACTTCTTACCAGACTGAGAGCCCTTGAGTTGGCTAACACACCCTGGAGCTTTAGGGTCCTCTCAACCACAGTG
CCCCCTGGTGGCCTCACCTGGTGTTTATCATTCTGTGCCCTTGAGACAGATCTGTCTAACTTGTGACCCGAGGGTTGCGTATGTCCCAGGATTG
TGTAAATGAAAATGTTATATTGCAACCACTGACACCACTGAACAGCCAGTCACTAGAGTCTCTTGTGGAGTCTGAGACACAAGATTTCCACAGA
CAACGTGGCTGCTTCTTGTCTCAGCTTTAATTTTGTAGCCTTCAGTGGGAAATTATTTATTGAAAATTCTTGACCTCTCTGCCAGAATGATAGG
CTCTTCTGGAAGCTTCTCAAATGATCCGGACTTGCATGCAGGAAATCTCCCTGGGGCAGGTGAAGGGAGCGGGCAGGGCATTTGCAGAATCGGG
GCCAGGTAGCATGTCATGACGAAGAATATCCTTGCATGTGTTTTTCTGAAACTAAACGCTCTATTCCTCTCTGCCGTTGTGGTTTCTAGACTTG
GTCACCGGGTGGAATAATCTCAAGGATCAAATCCTACTCCTTCCCAAAGCCTGGCCACAAAAAGGTGCTAAAGCGTCCCGTGCTTGCTGTCCCT
GACTGAGTGGTAGGATAGACCCTCCTGCAGCCCGTGCTTGGCTGGCTATCCTGTACCCAATGCGGCTTTGCCTCTGTGCCTCCCGCCTGCCCAG
CTCCGAGCATACCCCCTGAGCCTCGCAGCCCCATGCTTTGTCTCCTTACCTCTCTTTACACCCTGCCTCCTGTGCTCCTACTGAGCCTTGCAGT
CCCTGCACAGTGCACACATGCCCTCCCTGCCTGTGGCTTCTCCGTCACCGCCGCTGCGCAGCCTGTCCACGTTGCCTTGCCCTTTACAACACGT
ACCTCCAGTCACTTCAGTGAGCCCCACCTGCTGGCTCTCATTCCAGAGAGTCTTTGCACGCTCAACTCACCTTCAGTGTCCAGAGTCACAAGGG
GCAGCATCAGGGCTTCTGCCACATAGAGTTCTTCCCAGTGGAGGCAACCAAGGTCCCCAGGGGAGCTCTACCCCCTGAGACAGCAGGTTGATTT
CTGCATTTTGTTACATGGCTGAATTTTGAGGGACAGTAAAAAAAGGCCTTCATGGGAAGATGGCCCAGAGGCCAAAGGCAGTTGTCACCAAGCC
TGACAGCCTGAGTGTGATTTCCTGCAACTCACACAGGGTGGAAGGGGAAAGCCAGAACTGACTCCTGCGAGTTGCCTCTGATCCCCATGTATGG
GCCTTGACTCCTACACAGATTTATTTTCAGGGTTTAGGAATCAAACTCAAGCGCTTCACCACTGAGCTGTGCCCAAGCTCCTGGTTTCTGTTTG
TTTATTTGTTTGTTTGGTTGGTTAGTCTGTGAGACGGGATTTTACTCTGTAGCCAAGGTTGTCTTTGAACTTAACTCCACCTCCCAAGCTCCAG
ACTTATAAGAAGTCCTACCCTGACCTTTGTGTTGACTTGTTTATAGTGAATTACATACACAAGCATGCACACACAGACACACACACAGACACAC
ACACACACACACACACACACTCACACGCACGCATGCACCCCCATATGTGTATATGTATGTATATGCACAGATATATGTGCATATATATACACAT
ATGTAATGTGTATTATATACATCTGTGTATATAATATGTATAGGTTGTTCTATCATATTTATTTTTATCTTCTTTAGGTAAAGATTAACTTTAT
TAATAGTTGTTTCAATTTTATATCAATGTTTTTTCCAAGCGTGTGGGCATATGATTAAGCCAGTGTACACAGAGTTGTATATTAAGGTATTTAT
TAGCAACAGACAGCATAAATGCCCACGAGTTCTACTCAGCAACTATTTGCTCTGTTGGCCACTTCCTAGAGGGTCCTAACCCTGATGGCCAGAG
CACAGCGGACAAAGGAGCATGATGCTTGAACAGGAAGGCAGCCATGTTGTGCTAAGCTCAGTCAGTGACGAGAATGTTAGAGGATAGTCTGCGG
CTGCCTGGACCTTTCTCAGAGCCCGACACACCCCCATGTGATTGGGGTAGCTCATGGCCAGCAAGCCCAGTGAGAGCCAGGCAACACGGTACCT
CACAGGCTAAGGGACTTAAACGTGCCTGATGAAGGAAGCTCTTCAGAGGTGTCCACTCAGGCCAGCAGCCACTCACAGACTCTGTAATCCTGAA
TGTGACACCACACTTAACAAGCCTCACAGACACTGCAAGCCTTGTGTCTCCCCCTCCTCAACCGACTCTTCAAGAGCTTCTGATGACACCCTGT
CATTCCACTTGCCGTAGCCCAAGGCTTGTTGCTAACTCACAGCCCCCAGCTCTGCACAGTCCTGGCAAGGAGTGCTTTCATCCCAGCATCTCAA
GTTTATCTTTTGGGTTCCCCCGGAGACATATCAACCAGAGATCCTGTATGTACATGAGCACACATACACATGTATGACACACTCATATATACAC
TCATACATGGAAATATCTGTGCCCGTGTGTACATAGTCGTATACCATATTTGAAATGCATATGCCCTGAATATGCACCATATACACACATATGC
ATCTGCATAGTATGTGTATTTGTGTATGCATCTATTGCTGCTTACACATGGCAAATGGATTGCCTGCGGATAGCTACACAAAGATGTATTTCAA
GGACTTACAGAGTTAAACAGACCAGTTAAGTGATTGCAATGTCCATGGGAGAGATTGTCAAGCAGAGGGGATCCAGAGCCAGGTGGAACCTCAG
TGGTCTTGCTAAAGAAAGCTGCTGCATCGTAGGGGTCAGCTTCCCTTCCCCGCCCCCTTTTCCCTTTCCTTAGAAAGTCTAAACTTACATCTAA
GAATGCTCACCTGAGTCAGGCCCATGTGAGATCATCCTCATGATGGAAGTCACCTACTAAGGACTGTAAGCCCATCAGTGAGCCCCTTCTCAGC
AGCAGGACTGCCTCAGGCTGGGTCTTCTGCGTGACTCAGTACTCACCACTCACGAGAGCCACTTGTCATAGCGAAAGCCAACGCTGCAGCTGGA
AGAGATAGCGCAGTAGGCAAAGTGCTCGTCACCCAAGCACGAGCCCCTCAGTTCAGATGCCCAGCACCCAAGTAAGAAGCCAGGCACAGTGGCA
CACGGTGCCATCACAGTGCTGAGGACCTGAGGCAGGAGGGCCCCTCAGCCAGCCAGTCTCGTCAAAGAGGCAAGCTCCAGGTTCAGTGAGAGAC
CTTGCCTCAAACAATAAGGTGGTGAAGGCATTGAAAAAGATATCGGATGTCAGCCTCTGGCCCCCGAATGTCCACATAAGCAATCGCACGTACA
TGCACATACATGTGCAGGCACATAGAAATCCACCTACGCCATGTGCACATTTTTAGAGAAGCCGACACCAACAAAGCCCAGTCAACAAGCACTT
GAAATAACTCTAGTGTCTAGAGAGTTAATGAAAACTGTGCTTTGATCTTAGGATTATCAATTTAAAATGAAACCAGGGCGGGGACTTAGCTTAG
TGACAGAGTATTTGTCTAACAACCATGAGGCTCTAGATTTGGTCCTTAGCACCAGGAGGAGAAAAATACTTGGAAAGTCAAATACAGATTTTTG
AAATAATGTATTTCTTTTTATCTTATCTGCATTGGTGTTTTGCATGCATGTGTGCCTGTATGACGGTATCCGATCTTGCAGTTACAGACAGTTG
TAAGCTGCTATGTGGTGAGATGGCTCAACAGTTAAGAGCCCCGATTGCTCTTCCAGAGGTCCTGAGTTCAATTCCCAGCAACCACATGGTGGCT
CACAGCCATCTGTAATGGGATCTGATGCCTTCTTCTGGTGTGTCTGAAGAGAGAATGACAGTGTAAATAAATAAATTAACTTTTTTAAAAAAAT
AAAAAGAGGAGGAAGAGAAAGAGGAGGAAGAGGCCAGGTTTTAGGTCTTTGTTGTGAGATCAAAGAATAATTATACAGGGCATGTGCTCATCTT
TAGGTGAACCTAACCGCATCCCACCTTCTGACAGAGTCTGCCCACATCACACTGCCTGTGCTCCTTCTGAGACTGGAGACTGTAGCCAGCTGAT
TGCAGCCAGTGTCCTGGAGCCCTATGGCTTCTGGCCTCTGGGGAGGGPTACCACCCACACTGCCACCACCGTTGCCTAGTTTGAAAATACTGGC
AGGAAGCTGGGAGTGAAAGTCAAGGTCCAGGAAGCAAAAGGCAAGATTGTGGAAGCAGGACACAGGGCAGAGGCTACCTGCTCCACAGGACAGA
GGGTGTGCTGCAGAGCTCTGGTGATCACGGGCCTAGAGAGAGAGACAGGCAAGTCCCTGGTGCCTACTGACCAGCCATTCAGCCAGTGGAGACC
CCGTGTCAAACGCTAGGGTGGATAGTTCCTGAAAGTTGACCTCTGTCCTTCACAGGCACATGCACACACACAACTGCTCACACACACACGCACA
CACAATATCATCCACGCACGCACACAAGCCTGTCTAATGCATCCCCACTTTTAACACACTGTGACAGAGTAGTTCGAACTTGAAAATTATCTAC
CCAAGGCTGGATTCCTGGCGCCATCTAGGGGCCACTAGAAGTTGTGCATAAGTGGAAAGGGTAAGGGTGAAGCTGTCAGCGCTTCCTTTACAGC
TCTGTTCTCAGTGCAGAACAGAGATGCCAGGGAGGGCCAGACCACCAAGTACAAAGTGGAGAGATGGATAACGCATGCTAGCGCTGTCTACCAG
CAATGCTTCTCACGACAGCTCACATTTCCCTCCCTTCATCTTTCAACTGAAGCTTTGCTTCCAGAGCTTTCAGTGGTGACAGTGGAGCTGGTAG
TGGAGGGGAGGAGGGTTGTATCTTCATCTGCACCACAAAGCAGCCAATGACTGCTCTGGCCCTGCCCATTCCTTCTGCAGGACACTCAAGCCAG
GTGCCATGATTGTCCCAGTTCCCTAGGCTGCCACCTAGGTGCAGGAGGCAGGAGGTGGTGGGTCCTAAGGGTGAGGCATCCAGATGAGAAGGGT
TATGAATCTCTTGGGTCTCAGGGGCTCTGTCTGGATCTTGAATGCTTGGACTCATAGGGTGCTTTCTGTTGGGCAGCATGGAAATGAAGCACTG
AGCTACATCCACTTAAAGAAGAATCCCAGTTTCCAAGGGAGGTGCCTGTTTTGTCCTTTTGTCTGTCATCGAGACATAGGGGTAGCTCCTGTCT
ATCTGGGTGTGAACTCCTTCCACGAGCTGGGATGCTCAGGGGTCCCTCCCCCCACTGATCCCTACCTCCTTTTGATATACTGCCATTTTTTAAA
ACTGATTTCCTAAGACCCTCAGCTCTGCTTTAAAAATATTCCAAGAGATTTTGTTAGGAAATTGTGAGTGCTGGTTTATTATAACAAGTCTTTT
GAAGCCCCCTTGCTCCGGAGATAATTCCAGAGAGACTGCATGAAGCCCCCAGTTGAGACACTGAGCGGCAGAGGGTAGACGCTCTTCTATCCAC
GGGAAGGATTACGCCTGTCCTCCCTACCCTGGGGTGTCCTTTAACTTCATGATGGTCAGATTGTCTTGGGGATCTCAGACATTTCTTGTGTACA
GAGGAAAAAAATCAAAAGACTTAACATGGTAGTCACGCTAACCGGAAAAGACATCTGGAGACTGCAGCTGGATGATGGTAGCTATTATCAAGTA
TAAACTAGGGTAGTTCTTCCTAGGCAGGGCTTCTAAGCAACAGCCAACTCTGCTGAAGTGATGTGTAAATGTTTAAGAGGGTCGCTCGCAAGAG
ATTGCCTATGCTTAGTTCCCTTCCTGAGAGCAAAGACTGAAGAGAGAATTCATCTCAAACCATGTGAGTTTACATTCCACATCTCCATCTTCTG
AAAGGTCTCTCTGTTCAACCATCCACCATCTATCCACCCACGCATCCTTCTGTCCATCTACCAACTCACTGATTCAACCGTCCATCCATTTACC
TATCTATCCACTCAGCCATCCATTTATCCATCCATCCACATATCTGTCCACATACCCATACATCCATCTATGGATCTGTCCGTACATACACACA
CCCATTCACCCACCTATGTGTCCATCATCCATCCTTTCACACGTCTGTGTTGTGTGTTTCTCCTTAGCATCCGTTACCAGCGTGGCCCAGCTAC
TGAGCTTTGATTTAATGCCTAAGTCTGCATAACTTCTGCTCTGTTGCCATGGTTAGTTCTATCACACAGTCCTTCGGGAGTGTTGAGAGAGGCC
AGGAGAATATGGATCCTGTGACATCTGAGACTGGATGTCCTTTGGCTTTGCTGAAAGAGGTCTTTCCCACAGGTGCTGGCAGACTCTAACTCAT
GGTTAACACCACGAAGCCAGCAAGTCGTAGTGACCGACTGTGACCCAGCTGCTAAACATTGATGGTGCGGTTGGTCACGTCAGTGAGGCGGGTG
GGATTTTTGATATGTCCTTCAAGATGGTGGCTGTGTAATGTTAGCTGAATGTCTCTGTTTCTCTACACTTCCCCTCAAATCTGGCATTATCTCA
CTACTTCATGGCAATGTGTGGATGCTGATAAGGTAAGTAGATATTCAAGACAAGACAGAAATGGGAGGAGAGAGCCGTCAGAGCTGGACGGCGG
TTTGCCTGTGAGATGGGTTTAATAGCCACCACTTTGCTTTAATTTGTGAGTAAAGATGGGCCAGAGAAAAGTTTTTAAAAATGTATCAAATAGA
ACTATAAGGAGATTCACCCCCTCTGCCTACTTCATGAAACAAATTGATATTGATGGATCGAATGAGAAATCTCCGTGTATAAGGGCCAGTGTGC
CTTAGTGAACAGCCACAGGAAAACCAGAAGAGTTCTCTTCCTTCAGGAAGACAGAGAGACTGTCTCTTTGACAGGGCATGTGCCCGATGACATT
ATCATGGTCCTTATCACGATAATCACCGAAGTGCATGGGGTGGGGGTGAGGCAGGATACAGCCTTCCTCTCTGAGACTTGCAGCTGGTTGGCCT
GGGCTACCCTGTGGTAGCAATGCCTTGGTGTCTCAATCTGTATGGAAGGCAAAACAGGTGGACACGGTTTGACTTTTTAAATAACTTCTGCCTG
ACGTTAGATGAAAGCAGAAATGAACCCATGGGGAGGGAGCCTGCGAGGTCCTGCTATTTTCTGGGAGGTGTGAAAGGAAGTTCTCTTGGGATAG
TCAGAACAGATGCTCTTCCCTCCNNNNNNNNNNNNNNNNNNNNCCCTCCCTCCCTCCTTAAGGCCACTTCAGGGGTGGGAGCTATAAGCCATGA
GCCTGTCTAGCCTTCTCAGGTCCAAACAGTTGCCTGAAGAATGAGATGAGCCTTTCTGACCTCTTCCTAATCCTCTGCCTCCCCTGCTTATGTT
ATCTGTGAACACTTGGAAATGGTGGCATCGGGGCAGAAAAATAACATCTTCTCATCTGTGTGCTTCAGCCTGCCCCACCCCAAGGGAGCCGTCC
AGAGAGCACTGTGTCCTTCAACCCCTATGAGCCAACGGGAGGGCCCTGGGGCCCAGACAGAGGTGAGAGATGAAAGATGCACTTTTACTCAATT
AAACATTCGAGCAGGGTACACACAGGCTTGCCAGCATGTAGAGGCAGCTTACAAATTCCTGGCACCATTCCAACTTTGCCTTACAGTGATGGTC
CACACTAAACAGTGGTGATATCCACCAGCCACAGGTAGAAAATATCACCTATCCATAAAACAAGCAGTCCTGTCTAGTGAAAATGGTCTTTTAT
AATTAAAAGAAGCAAGCAAGCAAACAAACAAAAACCCTGAGTTGTTAGCATCGGCAGCATCATGCTGTGTGTCTGGCACATTCCGGGGACCCTG
GTTGCCATTCTTGGAAGAAAATGTTGCCAAAGCATAACTGTAACCTCTGGGTGGCTTTGACGGTAGGCACAACTCACAGATTCTTCTAGATTTG
TTCAGGGAGCTGTGATGACTGGGAGGCCACAGGG0ACACAGTGCAGGAGGGCGCAGGAGACTTGTTCCCAGAAATGGGTTTTTTCGGTACCTTT
CGTAGGTTCATGAGTGTCTGCATCTGATTTTCTACTAACAAGATTGGGGTTTGTTTGTTGCTATAGTTCGCCTCCGAATAGAGGCTTAAAGCAA
CAAGAGTCAGTTATCTCTCATTTCATTTATGCCTTGTGGCTGGAGGTGTGACTCATATAGGGTGCTTGTCTAGCATGCACGGAGCCCCGGGTTT
CATCCCCAGACCCGCAGAAGCCATGCATCGTGTTGTATACACCGTCGGCATCATTGCTGGCTTTGTGTTGAGTTCACGGCCTGTCTCACATGAG
CCTCAGAGCAGTAGAACTCCTTAGCATCTTAGAAATGAAGCATGTTGGCTTTTTCAAGCCTTGAGAAGCACACATATCATTTCTCTTGAGCTCT
GTTGGTTCAGTTATGAAAAGCCAACAAGGACTGTGTCGTTGGTGCTACTTCTCAATAGGAGACTGTCACAGCTGGCTTAAAGTCTAAGGAAGGT
TTTATCTGCCATTAGTACTGGTGTAGAAGAACCATCTTGTCTCTTCCCTTGCTTCGCTTCTCCGCTGCATGCAACTGTCCCTTAGACGGAAGGA
GTTTAGGGCAGGGTGGCAAGGGTTGTAATGTCACAGGAGTCCAGACTGGAGTCATCTGTTCCCTGACTACGTTGCAGGCCTTCAGAGAGAAGCC
CTGCCCATGGACACAGAGGTGTACGAGAGCCCTTATGCTGACCCTGAAGAGATCCGGCCCAAAGAGGTCTACCTGGACAGGAGCCTGCTGACCC
TGGAGGACAATGAACTGGGCTCCGGTAACTTCGGGACTGTGAAAAAGGGATACTACCAAATGAAAAAGTAAGCACCGTTGACTCATTGCACTGC
TGTCATCTTCAGTGTGAGAGTGCATTCTGAAAACTTCTCAGAACGTACCTACACTGCTCAATTAATCCCAGACATTGGCGTCCAAGTACGTGTG
TTTATTGCACGCACACACATACACATTGCAGCGCTTATGTGGTCAGAGGACTCATCAATTGGTTTTCTCCTCCTCACACAGGTTCTGGGGATTA
AGCTAATGTCATCAGGTTTGGCAACAAGTTTTTTTTTTTTTTTTTTTGTTTTTTTACCAACTGAGCCATCTTGTAGTCTTCATTTCTGACTCAT
TTAGAGTAAAAGCATCCTTTGTGTATGCTAACTGTGGTGACAGTAGTGACATGTTTGTATTAGAATGTAGTATAGTATAGAAAACAGCTAAATA
GAAATAAGCAAATTCATAAGAAAATAAAAATATATTCTATCTCCAGAACACAAATATCTGTGACTAACCTTGGTGTAGGCATTTATTGGATCTT
TATATGTTTTGTATGTAAATGGTAAGTGCTTTTGGTACTCTTAATAGTTTGCTGGTAATGTGTGTATCGTGTAGCATTTTCCATGTCTAGACCT
TATATATGAACTAATATTGATTTTACACAGAGATGTGACAACCGGCAACACAACTGAGTTCACTTGTGACCTGTAGCAGTTTATCTAGCTATCC
TTTAATACAGAAATGTGTCACTTAGGAATGCCAGATCTCTGTCTTTCTCTCTCTCTGTCTTTGACTCTGTCTCTGTCTCTCTCTCTCTGTATGC
ATACATGTGGTGGGTATGACTATATATGTTCAGATATGTTCACAAGTATGTGTGGGTTGTGAGTACACATTTGTGCAGGTACAAATGCCCTTAG
AAGTAATAATAATAAAATAATAATAATAGTAATAATAGTAATAATAATAATAGTTCCTCAGGCCCCGTCCACCTTGCTTTTTGAGGCAGGGTCT
ATCACTGGAATCTGGAGCTTACCAATTAGGCTATGGAAACTGGCCAGAGAAGCGCAGGAATTCACCTGTCTCTGCCTCCCCAGTGCTGCGATTA
TAGCTGTGTACCACAAACATCTTTTTATATGCTGGGGTCTTGGGGGTCGAAGCCCAGTCCTCATGATTTCACGGCGAGCCCTTTACAGACTGAG
CTGCCTCCCCAGCCCAATAGTGATACTTTTTAAAAGAAAACCATGTCTACTCCTCATCCGTTGCGTGTTTGTCCTCACCTTGGTGCATTAACTA
AGAATTGTAGAGTAGTGTTTTAGAACTGGCAGGAGTCTTGTGCCTGGTTACAGAGAGATCCCAGCATTCCTTTGGGTGTGGCTTATGTCTGTAT
GATGACTGCTGTCTGACAGACTGAAGACATGCTATTTTGTTCCGATAATTCTGCAAGTTCTTTAGTCCTGCATCTATGCTGNNNNNNNNNNNNN
NNNNNNNNNNNNNNNNNNNNNNNNNNNNNNNNNNNNNNNNNNNNNNNNNNNNNNNNNNNNNNNNNNNNNNNNNNNNNNNNNNNNNNNNNNNNNN
NNNNNNNNNNNNNNNNNNNNNNNNNNNNNNNNNNNNNNNNNNNNNNNNNNNNNNNNNNNNNNNNNNNNNNNNNNNNNNNNNNNNNNNNNNNNNN
NNNNNNNNNNNNNNNNNNNNNNTTGTGCTTCTCTTTCTTTCCTGTGATGAGTTACAGCCATAGATTTCAGACCTTAAACATGTCCCTCCATCTT
GGGGTAAACTCCCTCACCTTTGTTCATTACATCTCCTTCCATAAGCAACTGAATATAACCCATGAGTATTTCTCCTAGAATTTTTCCTATCTGT
GCTCATGAAGTGTCCTAATTACTGTTCTATTGCTGTGATGAGACACCGTGACCAAGGTAACTTATAAAAGGAAGCAATTAATTGGGGGCTTGTT
TAGTTTTAGAGGGTGAGTCTCTGAACATCGTCACAGCAGGAAGATATGGCACTGGAGCAGTAGCTGAGTGTATATCTTATTTGCAAGTTGGAGG
CAGAGAGCAAGAAACCTCAAAGCTCACCCCCAGTTACAGATCTCTTCCAACAAGGACACACCTGCTAAACATTCTCAAAACAGTTCTACCAAAC
TAGGGGCCCAGCCTTCGGATATATGAGCCTACCGAGGTTTTTCTCATTAAACCACCACGTGAAGTTATCAGTCAATTGCTTTCTTACAATTCTC
ATAATGGAGTCTTACTCTCTTACCTGTAAAAGAGCTCAGTGCTTGGAAGACCAGGAGTTTCATAGTCTCTTCCTGGGCCACCGTAAACAGTCAG
GAATTGGAACAATAGTAGCCTCTTAGAATTAGTGGGATATTATCTTTCCCCTCTGCTTTTCTAGAAGACGTGGTATTTTCTTTTTTAAATGTCT
AGAGGAATCAAGAAACCTTTTCTAACTTCTTAATTTAGATCCCTGCCTCACACCACAGATGTAATGATAGACCCAACTATGAAAGCCAAAATAG
GTGGCTAGAGATGACAGAATGGAGCCTCCCATGTTCCCGGGAGGGCCCAGAGAGGCTTCTAGGGTGATGATAATATCTAAATCCTCCTGTCAGG
CCACAGGCTGTGTTCTAGATCACCACACTAGCTGTGTGTACTTTCCTGTGTGTGTGTGTCCCACTAATTCTGTTATTTGACCTAGTGTATTTGT
TACGTGTGTCTGTGTGTGTCTGTGTGTGTGTGTGTCTGTACGTACATGCATGTGGTTTGGGGATCAAGCTCCAGCCACCAAGCTTGGCAGAGAG
TATCTTTACCACCTGAGCCCCCACACGGCCCATTTCCTGAATAGTTCTGTTTTGATTCATCGGTTTGAAGGTTCAACAAAAGAAACAACTTCTC
ATGCTTGTGGAAATTTTACCACAGGTAATTTTTCAAAGCATACCTAGTTAATGTTTGTTCTTTCTTTTAAGCCACATTTTGCTAGAATACTTTC
AAGAGTTCAGCATGATCCATGTGATGTTTTTGTGAGGGAATAAAAAAAAATCCATATTTTCGAAACACATTGAGGCTTGCTTAAAAGTAACCAA
GCCCAGTGGGAGAGAAGTGTTTCTTTCTCTTTAACTCTGAGCTTGAACAGAATGTGTGCTTCTGATTGGGCATGTTGTGTACACACCTGTGGCC
CCCCAGAGCCCCAGAGGTAGAGACAGGGGGATCAGAAGTTTAAGGTCATCTCCTACTATACAGCTAGTTTCAAGCCACAGTGGATTATGTAAGA
CCCGGACTCAAAGAAAAAAAAAAAGCAAAGCAATGTATTTTTATTTTTTAAATTCTGGGCCCAGAGGCTCATTTGCAATATCATAAAGAAACTT
TGTATTCCTTTATGCATGTAGGCAGAACCTAGCTGGGAAACCACATGACACTGCAGCAGGCTGTATGTGTGTCACAACAGGGGAACTTTGTTGA
AGCTGGTTGAATATTTCACAATTCGGGGCTTTCCTCAGCCTCGACCATTCTCCATTGCTGTCCACTACACCGGGGTTCACAGGCAGTGGGGCAT
GGTTCCTCTGTCTGTAAAAGAACAGCTGTAGAAAGAATCTCTTGTGTACTGTATGGAATCATTACCATCATACAGAGCACCAACCACAAACCAG
AGAACAATCCCCGAAGTCCAATTTGGGGAACCAGTGACTGGGCACGCATGTGGGGGTTACTCACAGGAGCTGCGTGTGCCGCTGAGAAGTCTGG
GCCTCAGTGTGGATGGTGGCCTCTACAGGATGTAGGGTCCCCTAGATGCCCCCTCTCGGGCTCCTGTTAGCTTTCACAGTCGTATGCTCTAGCA
CCTCCCAAGACCGTGCGTCTATGTTCAGTTAGGACAGGATCTCACACAGATGACTGGGAAGCGCCGGGGGGAGTTCCAGGAATCAGGGTAACAG
TCCAGTGAGCATCTCCACCCCTTCCTTATATGGACGAGCACCAGCATTTGAAGCTGGTCTTTCTTCTCTCTTGCAAAAGGCATAGCTGATCAGA
TGGAAAGAGCAGGTGTTATATTCAGAGGACGTTAAAGATGATCTTAAACCAACGATCCTCCTGTATCCACCTCTGGGGCTCTGGGGCTCACAGG
TGAGCACCCCCATGGCCGGTCTGAAGCACACGAGTTGTTCAAGCTCAGAGTTAAAGGGAAAGAAACACTTCTCTCCCACTGGGCTTTGTTACTT
TTAAGCAAGCCTCAACATGTTTCGAAAATACAGATCTTTTTCAATTTCTCACAAAAATATCACATAGATCGTGTTGAACTCTTGAAAGTATTCT
AACAAACTGTGGTTTAAATGAAAGAATAAACATCAGCTATGTGTGATTTGAAAATTTACACCTGCCGGGCAGTTGTGGCACACGCCTTTAATCT
CAGCACTTGGGAGGCAGAGGCAGCCGGATTTCTGAGTTGGAAGCCAGCCTGGTCTGCAGAGTGAGTTCCAGGACAGCCAGGGCTACACAGAGAA
ACCCTGTCTCGAAAAAACAAAAACAAACAAACAAACAAACAAACAAATAAACCCCAAAAGAAAGAAAGAAAGAAAGAAAGAAAGAAAGAAAGAA
AGAAGGAAAATTTGCACCTGTGATAAAATTTTCACAAGAAGGAGAAAAATGGTACTAGCTATTTATCTTGATGTGTGTGTGTGTGTGTGTGTGT
GTGTGTGTGTGTGTGTGTGCAGGTACTCCTGACACAGCACATATATAGAGGCCAAGGGACAACCCTTGGATGTCACCTCTTACCTTTCACCTTG
TTTCAAACCGCCTCTGGGGATTCACTGCTGGCCCCACGAATCTCCATAGATTCTCCCCTAGAAGCCCTGGGGTTGCAGACATCTGCTATCCAAC
TTTCTGTGGGTTCTGGGGATCTGAACTCTTAACCTCACTCTTGCATGCGCTTTTTACACTGGGTTATCTCCCCAGCCCATGGCCGTTTCTTGTT
TGTTTTTTTTTTTTCGTTTGTTTGTTTGTTTGTTTTTGGGTTGCTTTGTTTTGTTTTTCTGAATGGCTTTAAGAGATTCTCATTGGGCAGCGGG
TGTCAGCACCATTCCCCTCCACCCCCCTCCCCCCAACACACACACAATGTGACTAGAGAGAAGAGGACCTCTAGGCAGTTTGGAAAGTTTCTCA
CAAGTTACAATCTGTGTCACAGAGTTGTGAAAACCGTGGCTGTGAAAATCCTGAAGAACGAGGCCAACGACCCGGCTTTGAAGGACGAGCTGCT
GGCAGAGGCGAACGTCATGCAGCAGCTGGACAACCCCTACATTGTGCGCATGATCGGAATCTGCGAGGCGGAGTCCTGGATGCTGGTGATGGAG
ATGGCGGAGCTGGCGCCGCTCAACAAGTACCTGCAGCAGAACAGGTGACCTGGGGCATGCGAGTTGTGTGCGGTGCCACCCCGCACATGCCCTG
TCCCCCGAGTTTGGCCTGTGCCGGGGCCCCGCCCCCACACACGCCCTGTCCCCCGAGTTTGGGCTGTGCCGGGCCTGATTTCTAGGGGAAGCTC
TCTCTCCCTCTCCTCTCTGTGTCTCTGAGTCTCTGTCTCTCTGTCTCTCTTCGTGTCTCTCTCTCTCTCTCTCTCTCTCTCTCTGTGTGTGTGT
GTGTGTGTGTGTGTGTACATCTTTGAGGGTGTGCACCTGTGTGGATGTGTTTATGTGGAAGCCAGAGGTCAATATTGGAGATCACCCTCTCTCC
TCTCTCAGTCTCCAACTTAATTTTTTTTTTTTATTTATGTGAATGTTGGTGTGAGTGTGTGCCACACAACGCAGATACTTATGGAGGCTAGAGG
AGCTGGTCAGATCCCTCGGAGCTGGGCTTACAGCACTTGTGAGCCTCCCAACATAAGTGCTGGGAACCAAACTCCGGTCCTCTGCAAGAACAGT
ACGTGTAGCCAGGCAGTGGTGACACAGGCCTTTAATCCTAGCACTTAGGAGGCAGAGGCAGGTGGATTTCTGACTTTGAGGCCAGCCTGGTCTA
CAAAGTGAGTTCCAGGACAGCCAGGACTACACAGAGAAACCCTGTCTCGAAAAAAAACCAAAAAGGAGAAAAAAAAAAGAAAGAAAAAAGAAGA
AAAGAAAAGAAAAAAGAACAGAAGGCGTTCTTAACCACTGAACTATCTCGTTAGCTCTCCGCCTTATTTCATGAGACAAGGAACTATCTCATTA
GCTCTCCGCCTTATTTCGTGAGACAAGGAACTATCTTGTTAGCTCTCTGCCTTATTTCGTGAGACAAGGTCTCTCACTAACACCGGAGCTCACC
AATTCAGCCAAACAGAGCCCCAGGGATTACAGGTTCTCACTGGCATACCTGGCTTTTATATGAGCACTGTGGGTCCCAACTCAGGCTTCATCCC
TATAAGTCAAACAGTTTACCAACTAAGGCACCTTCCTAGCCCTGTCCAGTGATAAAATCCTCAATGTGTGTGGACAGGGCATTGCCCACCAGCA
GGCAGAACATTCTTCTTTGGTAAACACCTGGAACAAACATGTTCCTGGGGCACCATCTGTGTCTCGTCTGGCCGACCTCTTGAGTGCCTGCATC
TGAAGAGGCAGCAGCAGTTCGTTGATTCTGGTCCAGACATAGGTGCTCTAATGCTGCGGTCAACATAGAGTAACTCCCCGATTCCTCTGAGCCG
GGGTTCCTTCTGTACAGCTTTTCCTCATCATTTCCAACATGGATGTGTGAGTTTGAGCATGTGCAGCAGGTGGAGGCCAAAGGTCAAGCCAAAC
CCATGCCCATCCCTTAGAATACCATCTGCTTCCTCTGAGACAGAGGTCCCTCATGGGCCAGAGCTCATCAGTTTAGCTAGACTTTCTGGGCAGG
GAACACCAAGAATCCACCCGTTTCACTTACCCGGCTTTGGGATTACAAGTGCAGGCCGCCCGCCATGTTTGGCTTTTATTTCACGAGGGCGCCA
GGCATCAAACTCAAGTCCTCTTGCTTGCAGGATGAGCGCTTTCCTAAAAAGCTTTCTCCATAGCGCTATGAATTTTTGTCCATCTCAAAGCATG
CCTGAAAATGAAGCACACTCATCATATAGTGTGTGTATGTGTATATGTGTATGCACATGTGTGTATGTGTATATGTGTATGCACATGTACATGG
GTATGCATGCCCATGCATACGTGCAGAGCCCAGGACAGGCCACTGTGTGTGTCCTTCTCAATCACTCTCTGCTTTATTCCCTCGAAACACAGCC
AGGTGTGGTAGCACACACCCTTAATCTCAACACCAAAGAGGCCGAGGTTGGTGGCTCTCTGTGAGTTTGAGGCCAGTCTGATCGACACAGTTTA
TTCCAGGCTAGTTGGGGCTACAGAGGGAGACCTTGTCAAAAACAAACAAACAAACAAACAAAAAAGGTTCTCCCACAAACAGAAAGTCCTGCCT
GTTTGGTTTGGCGTGGTTTGATTTCGTGTGCTTTTGGTTATTCTCATAGCCAGCAAGCCTCCGCCTCTTCCTGTCCCCATCCCCTCCCAGTGCT
GAGATTACAGCACAGGTGACCACACTCAACTTTCTCCCATCACTTCTGGGGATCGAAACTTAGGTCCTCAGGTTGTGCACGCAGCAACTGTCCT
CGCCCTGAGTCATCTTCCCAGCCTGTCCTGTTGTCGACAAAGAAGGAACGAGTGGACCGACCCTTCTTCCATGTACTCGGGGGACACGGCTGTG
TGTTTGGAATGGCCGCCGTCCACTCTTGGTAATGATGTCGTGTGATTCTAGGCACATTAAGGATAAGAACATCATAGAGCTGGTTCACCAGGTT
TCCATGGGGATGAAGTATTTGGAAGAGAGCAACTTTGTGCACAGAGATCTGGCTGCGCGGAACGTGCTTCTGGTCACACAGCACTATGCCAAGA
TCAGCGATTTCGGTCTTTCCAAAGCCCTGCGTGCTGATGAAAACTACTACAAGGTAGGAGCGCTCGGTGCAAGCTCACAGAACAGGGAGAGGAA
ACAGCTCTGTGCAGCCTCACGGAGCAGGCTGAGAGCTCAGTACAGGCTCACAGAGCAGCTGAGGGGACAGCTTCCATGCATAGTTAAGGTTGCA
GGTTATAAAGATATAGAAAGATAAATGTGTGCTCTCTGTATTTTACTATGGTAGAAATCTCACTAGTAACCTTGGAGAAAAGTATTCTTAAGAT
CGATTCTGTCCATCAAGAAACACAAACCAAAAATACTGTAATGTTTCTCAACTGGAATCTTTTTCAGACTAGGATCTTATGTTGAGTTTTTTGG
TGGTGGTGGTGGTTTTTTTTTTTTTTTTTTTTCGTTTTACATTTACTTATCTTGCTCTGTGTATGGAGTCATGTGTGCCGTAGTGTTCTAATAG
AGAGCAGAGGACAACTTACAGAAGTTGATTCTCTCCATCTACCATGCATATCGGAGGAATCGAACTCTGATCTTCGGATTCGGCAGCAGGCACC
TTACCCATTGAGCCATCTTGCTGGCCTCTAAATGCTTGCGTCAACTTGCTTTGAAACATACAAATCAAACAAATTGATTTTTCTTTTCTTAGGC
AGGGTTTCATGGAGCCCAGGTTGGCATCTGTCTCCTGAGTGCTGGGGTTATAAGTATTCACCACCACGATTGGGTTACTCAGTCTACCTAATAC
TATGACCCTTTAACACAGTTCCTCGTGTTGTGGTGACCCCCAACCTAAAATCTTTCATCGCTACTTCATAACTGTAATTTCGCGACTGATATGC
AGGGTGTCTGATATGTGACCCCCAAAAGGGTCACTACATAGGCTGAGAACTACTGGGGGCTTTATGCGTGTTAAAGGAAACCACTGCTAACTGA
GCCACTTCCTTGGCCCCAAAACTGGTGGATCCTTGAGAGATTTTTCCGAGTCCTTTTCACTGAATTGACACTGTGACTTTCAGCAGAGGCTTTT
TCCTACCCCACTCCTTAAACCCAGCTCCTTTGTGCATCGGGGTGTGCACACCTGACTTAACGCATCACAGAGTGTCCACTCTGCTTCCAGGCCC
AGACCCACGGGAAGTGGCCCGTGAAGTGGTACGCCCCCGAATGCATCAACTACTACAAGTTCTCCAGTAAGAGTGACGTCTGGAGCTTCGGAGT
CCTGATGTGGGAAGCGTTCTCCTATGGGCAGAAGCCCTACAGAGTGAGCCATGCWTAGCTGTGTGTTTTGTGTCTCAGCCTCTTGGACTTAAGA
AACCATCCCTCAGTATGGGGTTATTGCCACAAGAACCTGAACCCCTGGAATCTGAGGACACCCTGGGGTCTCCCATCACCTTCTAACAGTGGGC
GGCTAGTGCAACCTAACTTACGCTTGTACTCACTTGAGAATGACATGTGATACTGAGTGAATGCATTCTCACTGTGCTACACACATACGTGCAC
CAGGCACAGGCCATCCTTCCTGAGAGTTAAGTGGAAATGGTGATACCGATGGATGACATCAAGTATTTTAGTTGTAAGCGTGTGTGTTCTCATG
TGTGTGCACACCTGTGTATGTGCAAACACATTGTGTGTGTGTGTGTCTGTGTGTGTGTGTGTGTGTGTGTGTCTAGCCCAGAGACCATCCTCAG
GTGTCATTCCTCAGGGACTCTCCACTTTGCTTTTTGAGACAGTGTTTTCATTAGCCTAAGCTCACCCAATAGGCCAGGCTGGCTAGCCTGTGAG
CCCCAGGGATCTGCCTGTCTCTCTACCCAGCACTGGGCACACAAACATTCAATACCACGNNNNNNNNNNNNNNNNNNNNNNNNNNNNNNNNNNN
NNNNNNNNNNNNNNNNNNNNNNNNNNNNNNNNNNNNNNNNNNNNNNNNNNNNNNNNNNNNNNNNNNNNNNNNNNNNNNNNNNNNNNNNNNNNNN
NNNNNNNNNNNNNNNNNNNNNNNNNNNNNNNNNNNNNNNNNNNNNNNNNNNNNNNNNNNNNNNNNNNNNNNNNNNNNNNNNNNNNNNNNNNNNN
NNNNNNNNNNNNNNNNNNNNNNNNNNNNNNNNNNNNNNNNNNNNNNNNNNNNNNNNNNNNNNNNNNNNNNNNNNNNNNNNNNNNNNNNNNNNNN
NNNNNNNNNNNNNNNNNNNNNNNNNNNNNNNNNNNNNNNNNNNNNNNNNNNNNNNNNNNNNNNNNNNNNNNNNNNNNNNNNNNNNNNNNNNNNN
NNNNNNNNNNNNNNNNNNNNNNNNNNNNNNNNNNNNNNNNNNNNNNNNNNNNNNNNNNNNNNNNNNNNNNNNNNNNNNNNNNNNNNNNNNNNNN
NNNNNNNNNNNNNNNNNNNNNNNNNNNNNNNNNNNNNNNNNNNNNNNNNNNNNNNNNNNNNNNNNNNNNNNNNNNNNNNNNNNNNNNNNNNNNN
NNNNNNNNNNNNNNNNNNNNNNNNNNNNNNNNNNNNNNNNNNNNNNNNNNNNNNNNNNNNNNNNNNNNNNNNNNNNNNNNNNNNNNNNNNNNNN
NNNNNNNNNNNNNNNNNNNNNNNNNNNNNNNNNNNNNNNNNNNNNNNNNNNNNNNNNNNNNNNNNNNNNNNNNNNNNNNNNNNNNNNNNNNNNN
NNNNNNNNNNNNNNNNNNNNNNNNNNNNNNNNNNNNNNNNNNNNNNNNNNNNNNNNNNNNNNNNNNNNNNNNNNNNNNNNNNNNNNNNNNNNNN
NNNNNNNNNNNNNNNNNNNNNNNNNNNNNNNNNNNNNNNNNNNNNNNNNNNNNNNNNNNNNNNNNNNNNNNNNNNNNNNNNNNNNNNNNNNNNN
NNNNNNNNNNNNNNNNNNNNNNNNNNNNNNNNNNNNNNNNNNNNNNNNNNNNNNNNNNNNNNNNNNNNNNNNNNNNNNNNNNNNNNNNNNNNNN
NNNNNNNNNNNNNNNNNNNNNNNNNNNNNNNNNNNNNNNNNNNNNNNNNNNNNNNNNNNNNNNNNNNNNNNNNNNNNNNNNNNNNNNNNNNNNN
NNNNNNNNNNNNNNNNNNNNNNNNNNNNNNNNNNNNNNNNNNNNNNNNNNNNNNNNNNNNNNNNNNNNNNNNNNNNNNNNNNNNNNNNNNNNNN
NNNNNNNNNNNNNNNNNNNNNNNNNNNNNNNNNNNNNNNNNNNNNNNNNNNNNNNNNNNNNNNNNNNNNNNNNNNNNNNNNNNNNNNNNNNNNN
NNNNNNNNNNNNNNNNNNNNNNNNNNNNNNNNNNNNNNNNNNNNNNNNNNNNNNNNNNNNNNNNNNNNNNNNNNNNNNNNNNNNNNNNNNNNNN
NNNNNNNNNNNNNNNNNNNNNNNNNNNNNNNNNNNNNNNNNNNNNNNNNNNNNNNNNNNNNNNNNNNNNNNNNNNNNNNNNNNNNNNNNNNNNN
NNNNNNNNNNNNNNNCCAATCATGGTGTTTCATGGCAGGCATACTACTATATGCATTTTGTAACTGTGGGGATGTCATAAAGCATACGTAAGCA
AACTAGGGCAGCTGCAAAGTCGCCAGCTGTTACAATCTTATGAGACTGTGATGTGGATTGGGAGAAGTCACAGAATCCCAGATGTCAACTCAAG
CATCTAGAACACTCTTGCCTTCCACAAACTCAGACATGTCTGCGAGCATCACTGCTTCCAAGAATCCTAACATCGAGGCTAGATGCTCCTGCTG
ACCACAGACAGCTCAGTACCAGAAGTCTCCCGATAGTGGTGCAGAGTTGCCACTTGCCACGTTCACCACTGCTCAGCCCATAGGGTCGGAAGCC
CCATCCCTATTCTTGGGTACAGTGTATTTTGCCTTCCCCTCCATCCCCTGAGCAGGACAGACACCGTGCACGTGGTGAGAGCGTGAATCCACTG
TGAGCCACTGGGCATGCTCTGCCCTACCTATGGGAAGGATCCCAGCCACCGTGATAAAGCTGTTCGGTGCTAGTGAGGCACTCGATGTTAGAAA
GCTGACATTGAATGTAGCCATACATTTTTTTTGCAACGTATTTTTAATAAAGGTTCAACCTCCCCTCTAGCCCGCCACTCAGCAGAGGTAGCAG
AAGATAAAAGTTATTCGGCTATGGGGGAAGTGGACCTGTTCAGCAATAGTTCTTTGGGGGGCGAGCTTGATCCTCTTGGGCAGCAGCTCAGCCC
TGTAGCAAACACCAAATGTGATTCAGCAGCTGCAGACCAGTCCGCTAGGCAGGCAGACACCAGGCATGAACCAGCAGCTACAGTTAAGTCTTTT
CATCGCTTGCTTTCATCGCTTGCTTGCCTCAGCATCTAACCTGTAGGCGACAGCACAGACTTGCTGGGCAAAGACTTAGGATGCACAGGGTTGG
GCTCTGAACCAGACCACAGCCACAGAAATCTGTGAGTTCTAGCAAGAGCACAAACCAATACCCCCTCTCCTTGAAAGTCCAGCTTGAACGTGGG
TATGGTATATTACAGCTGTGTCCATATTCTCCTCTTAAGATTTTTAGCCAAGGGACTAAGGAGATGGCTCTGTTGGTAAAGAGTTACTGTTGTG
TAACTCTAGGGACCTCACTTCAGTCCCTAGTACCCATATAAAATACACCAGGCCTGGTGGCAAGTGCTTGTGGTCCCAGCACCAGCAAGGAAGA
TGGAGACAGGAAAATCTCAGATGCTTTCTGGTCAGCCAGCCTTGCCAACTTGACAAGTTCTAGGCAATTGAAAGACCCTGTCTCCAAAAAAAAA
AAAAAAAAAAAAAACCAAGGTAGATGGTGTCTGAGGAAGGACACCAAGGTTGTCCTCTGGCCTTCAGACACAGAAGATATTCTGTACCATAGTG
CAAAACTCTTCTGGCTCACAAGGACATGGATCCCCAGGATGCTATAAAATGCAGGCTTGAGTTCTGTAAGTTTAGAGCAGGAAGAGACATTTCT
GACCATGCTGGAGGCAGGCGCAGTGAGCAGCATTCACCACTGCCAGGAGGCACGGCGACTTAATCATGTTTCCATGAGCCTATGGATAAACACT
AATACAGCTCTCTCTTCCTTCTTCAGTGTGGAGAACAGGCCAGGATTCACAGCTGTGGAACTGAGGCTTCGCAATTACTACTACGACGTGGTTA
ACTAACAGCTCCGGCGCCTGTCCGTGCACACCACGGATTCCCAAGCGATCACAGGAAATTCATTCAGATGAACTGGCTCTCAGAGTTTCATCTC
CCTCTGCCCGGAGTGAGAGCTAAGCTAACATAGGACTCACCCTCACAACAGGTCTGGTGCCCAGAGACAGACAAGCAGCAAGACCTTGGGGCCT
GTGGAGTCGTCTCTCTGGTCTTTGTTTCCATCTGTGTGGTCTTCGCTATCGGTCACGTTTGGGAGCCATTTCCAAATTCTCTTGACATCATTCC
GTTCCTCTGGGTCCAGGATTTCAGTGTCCCCTGAAGATCAGAAAAGAAAAGTGCTTTGCCACTCCAGCAAAGGACATAAAGAGAAACCTCGCTG
GTGCAGTCAGCAAGCTGGAAGGTGGTTAAGGACAATGACAAGCCTGGACACTGGTTTTACTCTCAGCCCTGACACACAGATACTGTGTGGATGA
CATGCTGAGATGTGCTGGCTTGGCTCACACGCCCCTGGAGTCCACCTCCCTGCAGTCGTGTGTGTTTGCTGGAGGAGGTGTGAATAACGTTCTG
TGTGGAGGCTGCCGGGGGAGGTGAGCTCCCATGATCCTCTGCGACTGAGCAGAAGTGTGTCAGGCAAGGGTCAGACTCCCCTCTCTGCAGAGGG
AATGCATCCAGGACTCCTTGTTGCTGCCACTAAAAAATTGCCAACCAGCAACTTAAGGGAGGAATGGCTCATTTGAGCTCACAGTTGGAGGGGA
TAGGCCATCATGGTGGAAAAGACAACAGGCAGGAAAGGCTTGGTGGCATGAAAAGGAAGCTGGAAGGTCACATGGCATCCACATTCAGGAAACA
AAGAATGAACAGGAAGTGGGGCCAGGCTATAAGGCCCTAAAGGCCACCTCCGGTGACCCAGTTCCTTCAGATCCATCTATCAAAGATTCCACAG
GCCTCTCAGACACTGAATGCCAACAGCTGGGGACCAAATGTTCAAGCACACAAGGTGCAGTGCCAGGCAGGGGCCTTCCTGAATGATTACACAG
TGTGGTATCCTGACAGAGCGGGTGAGCCATCTCAGGTCTGTCCCCTTATGAGCCCCGTTTACCATCCCAGATTCCCCCTTGGGACCCCCCTCAT
CTGGATCATTCCCCTCCCCCCAGGCCCTATCTCCAAACACCTAGGTACTAAGTGAACCTAGGTACTAAGTCTTCAACACATGAATTCTGAGGGG
ACACATTCATACTGGAGCCGATGGCAGCCTGGTGACCAAGACCATCTCAGGATGAGTTTCTGAATGGAATCTTCATTCGCCATAAAACCAGAGA
TGTGACCTTCCCCACAAGGAAGCCTTGCTAAGTGCGACATTGAGCTGAGGACACACAAGCTGAGAATTCCCCCTCTGTCCTCCTAGCCTTGGCT
AACTACTGACCATACACCGAATGTCACCCATTCACGGCACTTTTGCTGAGGACCTAAAAGCTACAAAGGCTGCATAGCCTTCCATCTAGGTCTA
GGGACATGTACAGATGGGAGCATCTCACCTTCACCTCTGAGACACTCGGACATTCACAGCCAGGGATGGTACAGGAGTCCCTGCTGGTGCTGGG
CTCAATGAACAGAGACGATGGTGAAATGGGTGCCTCTCTTTAGACCAGTGGTTCTCAACCTTCCTAATGCTGAGATCTTTCAATACAGGTCCTT
GCGTTGTGGCGACTCCCAACCATGAAGTTATTTTGTTGCTACATTGTCACTGTAATTTTGCTACTATGATGAATCGTAGTGTAGATATCTGATA
TGCAGGATATCGGATATGTAAATATCTGGTATGCAGGATATGTGAAATGAGGGCACATCCCACAGGTTGGGAACCACTGCCTTTGATAGGGAGG
CACTATGCTTAGAGCATGGTTAGGAAGTATTTAGAAGCTATTGGTGTGTCTTGGAATTGTGTTAGTAGGTCAACCGTCCTGTGGAGGGAAGGAA
GGGGGTGGAGGAAATCCCTGTATGTTGAATTCATTGACCAGACCTCCAGAACACAGCCTTGGTGAGGAAGTCCCATGGGTCAGACCACCTGTAG
ATTTAGTCAGGAGACGAAGGGCCACTGTATAGTTATGGAGACAGGACTGTCTGCTCTGAGCAAGAAGTTCTCTGCTGAGCTCCTAGCCTACCTT
CCCTTGTCCCCAGGGCTATAGAAAGGCCACCTCGAAGACCAGGGAGCATGTGTGAGAAGTCTGTGGAGGCCTCTGCCTTCTTCCTGGCCTCTCT
AGCAGTGCCTCTCCTTCCCAGGGATTTGGGACTGACCGTTATCTGGCTATGACTGAGCAGAGTGGAGGGATGGGCTTTGCCCCCCTTCAGAAAG
CCGAAACCGGTTCCCATGTGCAGAGTCACATGTGGCCATCGACCAGGGCTCTCATCTGGTGAAAACTGTGTCTTACTGTCAAGATTAATTCTCT
CCCCTGGGCCACTGAGGAGGGCAGATGGCAAGAGGATCCTCCCTAGAGGATTTAGACTATGAATGCCCACTAAATTTGCAAGGTCAGAAACTAG
CCAAGGTCCTTCTCAGGCATCTATCCTTAACTTGGTCTCTCCACAAGCTGCCTCTGATGCTCCGAGCCCCTTCTGCCTGGCAGCTGGGCTCCCT
GTGTGCTTTTACCTATGACCCTTGGTCAGCAGAGTACAAGGAGCACCTAAGCTGCCTCGCCACCTCCCACTGACTGCAAACACCACATACCTCA
TGCGGAACCGAATCTCTCTCCAGTAAACACCCCAGCCAGCCATTCATAAAAACCTGTCTCTGTGTGCGCTGGGACATGTCCTCCCTGTACCCCG
GGCCTGCTTTGTGTGCCAGACAGTGACTCCACAGGGATGCCAGGTCTGTGATTGCATTGCTCCTTGCAGAGGGAAGCCCTCGGTTGTCCTTCTC
TGGGAATGCTGCCACCCAGAGCAGCACACAGTGATTCCCTGTTATTTCAGAAATTATTTTAAATAAAGATCTACTATTAGTCTTGTGATGACCT
TTACGGATGCAGACAGGAGATGATGGGATATACACCCTTGACTAGACCTGGCCACCATCTTCGTAAGTGCAACCTGCTTGTGAAATACTGAGCC
CTCAGTCATACCACTCGCTACATTTGGGTGGGAACGCAGACTCCAGAGCTCACCTATTCTGCCGCTTCAGAAGCCTGCAAGGAGAGCCCGGTCC
TGTGAGGGGAAACAACTGTGTCTGAGATTCGTAGGCTGAGAACTGACAGCCGAACTCAAACCCAGTAGAAAGTGGTACAAGGAGACCCCAAGGT
GGCCAGAGAGGGCGGGGTGAGCTTTGCCACTGTCAATGAAGACAACACGAAAGCATCAGAGCAGAGAAGGTCAGGATGTAAAGGTCCCGAGCCC
TGGGCTCCTCTCATTCTATAGGCAGTTATGAGCAGGCACACATACATACACTACATATAATTGCATGTGTGCATAGACAAGCATCTTATGTATG
TATACACAGGAACACATACACATGCATGCACAAACGTGCATTAAAAACATGCCTGCAAATGCACACTGCACACACAGACATGAACCTGTGTACA
CAAATCCACAATCACATGTACATGTTGACACATCCCCACTCGCAATGCCACTTTGCCCACAGGCTAATCTGATCTTGGAAATCCCTCCATGGAG
AGTCCCTTCCCAAGTGACTCTAGGCTGTGTCAAGTTCATAGTTTAATCTAAGCATGGTACAGAGAGTGTATGGTAAAGAGAACCTGAGTTTAGC
CCCCAGTGCCTATGTAGAGAGGCAGTGCATTGGCACATGCCCGCAGCGCCAGCTCTGGGGAGGGAGAAGCAGATCGCTACAGCTCACTGGCCAT
CCAGCCTCACCCAGCACGGTTGTCACATTCCAGGTCTTATGATCCTGTCTTAGAAAAATAAAGGAGAAAGCAGCTGAAGAGAACACTCAGTGTC
AACCTTCTGCATGCACACATACAAACATGCACCCCTGAACACATGCACCCCTGAACACATGCATGCACACACATGCATACATACACATGCACTG
GCACACATACAAACATGCACCCCTGAACACATGCACACATGAACACATGCATGCACACACATGCATGCACACACATGCATACATACACATGCAC
TGGCACACATACAAACATGTACCCCTGAACACATGCACACATGAACACATGCATGCACACACATGCATACATACACATGCATTGGCACACATAC
AAACATGTAGCCCCGAACACATGCACACACACAAACATGCACACATACAAACATGCACACATGAACACATGCATGCACACATGTGCACACAAAC
ATGCACATGTGAACACATGCACATGCATGCACACACTCATGCACACACACACATACACATGAGCACACACATGCACGCACGCATGGCAAAGAAC
GCAATGCCTCTGAACAACCTCAATTTAAGAGCATTGCCTGCACACGCATCAACACTTGTCTATCCATACATGTGGACTTGTGTAAGAGCCACAG
ACTTTTAAAGCTGGCAGGCTCCCACACTGTACCAATTGGTTTCCCGGTGCTGTGACAAATACCTGAGTAAAGCAACTTAAAAGGAGGAAAGGCC
TGTCTTGGCAGCAGTCTCTGAGCCCTTGTTCCTGGAGTGAGGGTTCPAGCCCAGGCTCTTGGGCAGCCTACCAAGCCACATCCAGCCAATGCAG
GATACAGAGGTGCAAAGCAGAGACTGGAGGTTTAGCCAATGTAACCACATCAGAGATAGGGACAAAGATGGTTGCTGACCCTCCTAAGCCCATC
TTCTGGGGTCCTGGCACGAAGCTTAGGTTTAAAGAGAGGACCAGCAACATGTCCCCATGGAGGCATGCTCCCATCTGGCAACACGTTTCAGCTC
CAGTCTCCCATGAGCAGCACCCTGACACAACCTCTCCCCAGGAGACCAGCTCCCCTCCTGGCTGGCACCGGGCTTCAGCCTTATCCTTCTCCAC
CAGCTCCTTGGTTTGCAGCTTTGCTGCTCTGATGGTCAAAGGCAGATGCGTGGGGCTCTCGCTACAGCAACGTTATTCCTGCCAGGATGGTAAA
GCTGTGGGTACCTGACGCTGCTGATTTGTGTCTGTGGTGGCATAGCTTCTCACCAGAGGAGCACACCGTGGAGGAAGCTCCTCTCTTACTGTGG
TCAGGAAGCAGAGAGAGAGGGAGAGCGGTTCCCAACATCTACAACAGCATTCCTGACGAACGGCTTCCCTTTCACAAGGCCCCAGATCTTTGAG
TTTATTATTTTATTTGTTTGTGTGTATGTGCATGTTCACACACATGTGCACCCGCGCATGTGTGTGTGTGCTTGTGTATGTGTGTGCTATGTGT
GCAAGGGTTCCTTCTGAGGACAGAAGAGANNNNNNNNNNNNNNNNNNNNNNNNNNNNNNNNNNNNNNNNNNNNNNNNNNNNNNNNNNNNNNNNN
NNNNNNNNNNNNNNNNNNNNNNNNNNNNNNNNNNNNNNNNNNNNNNNNNNNNNNNNNNNNNNNNNNNNNNNNNNNNNNNNNNNNNNNNNNNNNN
NNNNNNNNNNNNNNNNNNNNNNNNNNNNNNNNNNNNNNNNNNNNNNNNNNNNNNNNNNNNNNNNNNNNNNNNNNNNNNNNNNNNNNNNNNNNNN
NNNNNNNNNNNNNNNNNNNNNNNNNNNNNNNNNNNNNNNNNNNNNNNNNNNNNNNNNNNNNNNNNNNNNNNNNNNNNNNNNNNNNNNNNNNNNN
NNNNNNNNNNNNNNNNNNNNNNNNNNNNNNNNNNNNNNNNNNNNNNNNNNNNNNNNNNNNNNNNNNNNNNNNNNNNNNNNNNNNNNNNNNNNNN
NNNNNNNNNNNNNNNNNNNNNNNNNNNNNNNNNNNNNNNNNNNNNNNNNNNNNNNNNNNNNNNNNNNNNNNNNNNNNNNNNNNNNNNNNNNNNN
NNNNNNNNNNNNNNNNNNNNNNNNNNNNNNNNNNNNNNNNNNNNNNNNNNNNNNNNNNNNNNNNNNNNNNNNNNNNNNNNNNNNNNNNNNNNNN
NNNNNNNNNNNNNNNNNNNNNNNNNNNNNNNNNNNNNNNNNNNNNNNNNNNNNNNNNNNNNNNNNNNNNNNNNNNNNNNNNNNNNNNNNNNNNN
NNNNNNNNNNNNNNNNNNNNNNNNNNNNNNNNNNNNNNNNNNNNNNNNNNNNNNNNNNNNNNNNNNNNNNNNNNNNNNNNNNNNNNNNNNNNNN
NNNNNNNNNNNNNNNNNNNNNNNNNNNNNNNNNNNNNNNNNNNNNNNNNNNNNNNNNNNNNNNNNNNNNNNNNNNNNNNNNNNNNNNNNNNNNN
NNNNNNNNNNNNNNNNNNNNNNNNNNNNNNNNNNNNNNNNNNNNNNNNNNNNNNNNNNNNNNNNNNNNNNNNNNNNNNNNNNNNNNNNNNNNNN
NNNNNNNNNNNNNNNNNNNNNNNNNNNNNNNNNNNNNNNNNNNNNNNNNNNNNNNNNNNNNNNNNNNNNNNNNNNNNNNNNNNNNNNNNNNNNN
NNNNNNNNNNNNNNNNNNNNNNNNNNNNNNNNNNNNNNNNNNNNNNNNNNNNNNNNNNNNNNNNNNNNNNNNNNNNNNNNNNNNNNNNNNNNNN
NNNNN
MOUSE SEQUENCE—mRNA
GGCACGAGGGAGGAGAAGGCGGCGGCGGAGAAACAGGAGGAGGGAGGAGGAGAGGGGGTTGGAGGACGCGGCCACCTGCCCAGGTAGGAGCCAC
TCCGCCTCGCCGCACCCTAGCAAAGGGCCTCGGCACCCCCAGGCGACAGACCTTGGCTAAACTAGGCTGGACCGCAGTTTTGCTCCAGTGACTG
CGGCTGAGCGCGGACCCGCCGGGCTCCGGCGCGGGACCAGAACTCCCGCCTGCAAACGCGCGCGCCCGGGCGCGGAGTGGGGCCCAGCCGGAGC
TCCGCCTCTCGGCAGCTGGAGGATCGGAGAACCGGGAGACTTCCACGGTGCGCGCCCCCGAAGCAAAACAACGTCCCCAAGCATTTGAGATCCG
GGACTGTCGTCGTGCGCGCCTGTGAGTTGCTGCAGAGTCCCAGCGCCTCTGAAATGCGGTACTTCTCCATACACTTCCCAGAACTCTGAAGGGG
TGCAGACATGGCGGGAAGTGCTGTGGACAGCGCCAACCACCTGACCTACTTTTTTGGCAACATCACCCGGGAAGAGGCTGAAGACTACCTGGTC
CAGGGAGGCATGACCGATGGGCTCTACCTGCTACGCCAGAGCCGCAATTACCTGGGTGGTTTTGCTTTGTCGGTGGCTCACAACAGGAAGGCAC
ACCACTACACCATCGAGAGGGAACTTAATGGCACCTACGCCATCTCCGGGGGCAGGGCCCATGCCAGCCCAGCAGACCTCTGCCATTACCACTC
CCAGGAACCTGATGGCCTTATCTGCCTCCTTAAGAAGCCCTTCAACCGGCCCCCGGGAGTACAGCCCAAGACCGGACCCTTTGAGGACCTGAAG
GAGAACCTCATCAGGGAATATGTGAAACAGACCTGGAACCTTCAGGGCCAGGCTCTGGAGCAAGCCATCATCAGCCAGAAGCCCCAGCTGGAGA
AGCTGATCGCCACCACGGCCCATGAGAAGATGCCCTGGTTCCATGGCAACATCTCCAGAGATGAATCAGAGCAGACGGTCCTCATAGGGTCAAA
GACCAATGGAAAATTCCTGATCAGGGCCAGAGACAACAGCGGCTCCTATGCTCTGTGCCTGCTGCACGAAGGGAAAGTATTGCACTACCGCATT
GACAGGGACAAGACCGGGAAGCTCTCCATTCCTGAGGGGAAGAAGTTTGACACCCTCTGGCAGCTAGTGGAACATTACTCTTACAAGCCAGATG
GGCTACTAAGAGTCCTCACGGTACCATGCCAAAAGATTGGTGCACAGATGGGCCACCCAGGAAGCCCAAATGCCCATCCCGTGACTTGGTCACC
GGGTGGAATAATCTCAAGGATCAAATCCTACTCCTTCCCAAAGCCTGGCCACAAAAAGCCTGCCCCACCCCAAGGGAGCCGTCCAGAGAGCACT
GTGTCCTTCAACCCCTATGAGCCAACGGGAGGGCCCTGGGGAGACAGAGGCCTTCAGAGAGAAGCCCTGCCCATGGACACAGAGGTGTACGAGA
GCCCTTATGCTGACCCTGAAGAGATCCGGCCCAAAGAGGTCTACCTGAACAGGAGCCTGCTGACCCTGGAGGACAATGAACTGGGCTCCGGTAA
CTTCGGGACTGTGAAAAAGGGATACTACCAAATGAAAAAAGTTGTGAAAACCGTGGCTGTGAAAATCCTGAAGAACGAGGCCAACGACCCGGCT
TTGAAGGACGAGCTGCTGGCAGAGGCGAACGTCATGCAGCAGCTGGACAACCCCTACATTGTGCGCATGATCGGAATCTGCGAGGCGGAGTCCT
GGATGCTGGTGATGGAGATGGCGGACGTGGGGCCGCTCAACAAGTACCTGCAGCAGAACAGGCACATTAAGGATAAGAACATCATAGAGCTGGT
TCACCAGGTTTCCATGGGGATGAAGTATTTGGAAGAGAGCAACTTTGTGCACAGAGATCTGGCTGCGCGGAACGTGCTTCTGGTCACACAGCAC
TATGCCAAGATCAGCGATTTCGGTCTTTCCAAAGCCCTGCGTGCTGATGAAAACTACTACAAGGCCCAGACCCACGGGAAGTGGCCCGTGAAGT
GGTACGCCCCCGAATGCATCAACTACTACAAGTTCTCCAGTAAGAGTGACGTCTGGAGCTTCGGAGTCCTGATGTGGGAAGCGTTCTCCTATGG
GCAGAAGCCCTACAGAGGGATGAAAGGGAGCGAAGTGACCGCCATGCTGGAGAAAGGAGAGCGGATGGGGTGCCCTGCAGGATGCCCGAGAGAG
ATGTACGACCTGATGAACCTGTGCTGGACTTACGATGTGGAGAACAGGCCAGGATTCACAGCTGTGGAACTGAGGCTTCGCAATTACTACTACG
ACGTGGTTAACTAACAGCTCCGGCGCCTGTCCGTGCACACCACGGATTCCCAAGCGATCACAGGAAATTCATTCAGATGAACTGGCTCTCAGAG
TTTCATCTCCCTCTGCCCGGAGTGAGAGCTAAGCTAACATAGGACTCACCCTCACAACAGGTCTGGTGCCCAGAGACAGACAAGCAGCAAGACC
TTGGGGCCTGTGGAGTCGTCTCTCTGGTCTTTGTTTCCATCTGTGTGGTCTTCGCTATCGGTCACGTTTGGGAGCCATTTCCAAATTCTCTTGA
CATCATTCCGTTCCTCTGGGTCCAGGATTTCAGTGTCCCCTGAAGATCAGAAAAGAAAAGTGCTTTGCCACTCCAGAAAGACATAAAGAGAAAC
CTCGCTGGTGCAGTCAGCAAGCTGGAAGGTGGTTAAGGACAATGACAAGCCTGGACACTGGTTTTACTCTCAGCGCTGAGACAGAGATACTGTG
TGGATGACATGCTCAGATGTGCTCGCTTGGCTGACACGCCCCTGGAGTCCACCTCCCTGCAGTCGTGTGTGTTTGCTGGAGGAGGTGTGAATAA
CGTTCTGTGTGGAGGCTGCCGGGGGAGGTGAGCTCCCATGATCCTCTGCGACTGAGCAGAAGTGTGTCAGGCAAGGGTCAGACTCCCCTCTCTG
CAGAGGGAATCCATCCAGGACTCCTTGTTGCTGCCACTAAAAAATTGCCAACCAGCAACTTAAGGGAGGAATGGCTCATTTGAGCTCACAGTTG
GAGGGGATAGGCCATCATGGTGGAAAAGACAACAGGCAGGAAAGGCTTGGTGGCATGAAAAGGAAGCTGGAAGGTCACATGGCATCCACATTCA
GGAAACAAAGAATGAACAGCAAGTGGGGCCAGGCTATAAGGCCCTAAAGGCCACCTCCGGTGACCCAGTTCCTTCAGATCCATCTATCAAAGAT
TCCACAGGCCTCTCAGACACTGAATGCCAACAGCTGGGGACCAAATGTTCAAGCACACAAGGTGCAGTGCCAGGCAGGGGCCTTCCTGAATGAT
TACACAGTGTGGTATCCTGACAGAGCGGGTGAGCCATCTCAGGTCTGTCCCCTTATGAGCCCCGTTTACCATCCCAGATTCCCCCTTGGGACCC
CCCTCATCTGGATCATTCCCCTCCCCCCAGGCCCTATCTCCAAACACCTAGGTACTAAGTGAACCTAGGTACTAAGTCTTCAACACATGAATTC
TGAGGGGACACATTCATACTGGAGCCGATGGCAGCCTGGTGACCAAGACCATCTCAGGATGAGTTTCTGAATGGAATCTTCATTCGCCATAAAA
CCAGAGATGTGACCTTCCCCACAAGGAAGCCTTGCTAAGTGCGACATTGAGCTGAGGACACACAAGCTGAGAATTCCCCCTCTGTCCTCCTAGC
CTTGGCTAACTACTGACCATACACCGAATGTCACCCATTCACCCCACTTTTGCTGAGGACCTAAAAGCTACAAAGGCTGCATAGCCTTCCATCT
AGGTCTAGGGACATGTACAGATGGGAGCATCTCACCTTCACCTCTGAGACACTGGGACATTCACAGCCAGGGATGGTACAGGAGTCCCTGCTGG
TGGTGGGCTCAATGAACAGAGACGATGGTGAAATGGGTGCCTCTCTTTAGACCAGTGGTTCTCAACCTTCCTAATGCTGAGATCTTTCAATACA
GGTCCTTGCGTTGTGGCGACTCCCAACCATGAAGTTATTTTGTTGCAGATTGTCACTGAATTTTGCTACTATGATGAATCGTAGTGTAGATATA
TGATATGCAGGATATCGGATATGTAAATATCTGGTATGCAGGATATGTGAAATGAGGGCACATCCCACAGGTTGGGAACCACTGCCTTTGATAG
GGAGGCACTATGCTTAGAGCATGGTTAGGAAGTATTTAGAAGCTATTGGTGTGTCTTGGAATTGTGTTAGTAGGTCAACCGTCCTGTGGAGGGA
AGGAAGGGGGTGGAGGAAATCCCTGTATGTTGAATTCATTGAGCAGACCTGCAGAACACAGCCTTGGTGAGGAAGTCCCATGGGTCAGACCACC
TGTAGATTTAGTCAGGAGAGGAAGGGCCACTGTATAGTTATGGAGACAGGACTGTCTGCTCTGAGCAAGAAGTTCTCTGCTGAGCTCCTAGCCT
ACCTTCCCTTGTCCCCAGGGCTATAGAAAGGCCACCTCGAAGACCAGGGAGCATGTGTGAGAAGTCTGTGGAGGCCTCTGCCTTCTTCCTGGCC
TCTCTAGCAGTGCCTCTCCTTCCCAGGGATTTGGGACTGACCGTTATCTGGCTATGACTGAGCAGAGTGGAGCGATGGGCTTTGCCCCTTCAGA
AAGCCGAAACCGGTTCCCATGTGCAGAGTCACATGTGGCCATCGACCAGGGCTCTCATCTGGTGAAAACTGTGTCTTACTGTCAAGATTAATTC
TCTCCCCTGGGCCACTGAGGAGGGCACATGGCAAGAGGATCCTCCCTAGAGGATTTAGACTATGAATGCCCACTAAATTTGCAAGGTCAGAAAC
TAGCCAAGGTCCTTCTCAGGCATCTATCCTTAACTTGGTCTCTCCACAAGCTGCCTCTGATGCTCCGAGCCCCTTCTGCCTGGCGACTGGGCTC
CCTGTGTGCTTTTACCTATGACCCTTGGTCAGCAGAGTACAAGGAGCACCTAAGCTGCCTCGCCACCTCCCACTGACTGCAAACACCACATACC
TCATGCGGAACCGAATGTCTCTCCAGTAAACACCCCAGCCAGCCATTCATAAAAACCTGTCTCTGTGTGCGCTGGGACATGTCCTCCCTGTACC
CCGGGCCTGCTTTGTGTGCCAGACAGTGACTCCACAGGGATGCCAGGTCTGTGATTGCATTGCTCCTTGCAGAGGGAAGCCCTCGGTTGTCCTT
CTCTGGGAATGCTGCCACCCAGAGCAGCACACAGTGATTGCCCTGTTATTTCAGAAATTATTTTAAATAAAGATCTACCTCGTGCC
MOUSE SEQUENCE—CODING
ATGGCGGGAAGTGCTGTGGACAGCGCCAACCACCTGACCTACTTTTTTGGCAACATCACCCGGGAAGAGGCTGAAGACTACCTGGTCCAGGGAG
GCATGACCGATGGGCTCTACCTGCTACGCCAGAGCCGCAATTACCTGGGTGGTTTTGCTTTGTCGGTGGCTCACAACAGGAAGGCACACCACTA
CACCATCGAGAGGGAACTTAATGGCACCTACGCCATCTCCGGGGGCAGGGCCCATGCCAGCCCAGCAGACCTCTGCCATTACCACTCCCAGGAA
CCTGATGGCCTTATCTGCCTCCTTAAGAAGCCCTTCAACCGGAAAAAGGGAGTACAGCCCAAGACCGGACCCTTTGAGGACCTGAAGGAGAACC
TCATCAGGGAATATGTGAAACAGACCTGGAACCTTCAGGGCCAGGCTCTGGAGCAAGCCATCATCAGCCAGAAGCCCCAGCTGGAGAAGCTGAT
CGCCACCACGGCCCATGAGAAGATGCCCTGGTTCCATGGCAACATCTCCAGAGATGAATCAGAGCAGACGGTCCTCATAGGGTCAAAGACCAAT
GGAAAATTCCTGATCAGGGCCAGAGACAACAGCGGCTCCTATGCTCTGTGCCTGCTGCACGAAGGGAAAGTATTGCACTACCGCATTGACAGGG
ACAAGACCGGGAAGCTCTCCATTCCTGAGGGGAAGAAGTTTGACACCCTCTGGCAGCTAGTGGAACATTACTCTTACAAGCCAGATGGGCTACT
AAGAGTCCTCACGGTACCATGCCAAAAGATTGGTGCACAGATGGGCCACCCAGGAAGCCCAAATGCCCATCCCGTGACTTGGTCACCGGGTGGA
ATAATCTCAAGGATCAAATCCTACTCCTTCCCAAAGCCTGGCCACAAAAAGCCTGCCCCACCCCAAGGGAGCCGTCCAGAGAGCACTGTGTCCT
TCAACCCCTATGAGCCAACGGGAGGGCCCTGGGGAGACAGAGGCCTTCAGAGAGAAGCCCTGCCCATGGACACAGAGGTGTACGAGAGCCCTTA
TGCTGACCCTGAAGAGATCCGGCCCAAAGAGGTCTACCTGGACAGGAGCCTGCTGACCCTGGAGGACAATGAACTGGGCTCCGGTAACTTCGGG
ACTGTGAAAAAGGGATACTACCAAATGAAAAAAGTTGTGAAAACCGTGGCTGTGAAAATCCTGAAGAACGAGGCCAACGACCCGGCTTTGAAGG
ACGAGCTGCTGGCAGAGGCGAACGTCATGCAGCAGCTGGACAACCCCTACATTGTGCGCATGATCGGAATCTGCGAGGCGGAGTCCTGGATGCT
GGTGATGGAGATGGCGGACGTGGGGCCGCTCAACAAGTACCTGCAGCAGAACAGGCACATTAAGGATAAGAACATCATAGAGCTGGTTCACCAG
GTTTCCATGGGGATGAAGTATTTGGAAGAGAGCAACTTTGTGCACAGAGATCTGGCTGCGCGGAACGTGCTTCTGGTCACACAGCACTATGCCA
AGATCAGCGATTTCGGTCTTTCCAAAGCCCTGCGTGCTGATGAAAACTACTACAAGGCCCAGACCCACGGGAAGTGGCCCGTGAAGTGGTACGC
CCCCGAATGCATCAACTACTACAAGTTCTCCAGTAAGAGTGACGTCTCGAGCTTCGGAGTCCTGATGTGGGAAGCGTTCTCCTATGGGCAGAAG
CCCTACAGAGGGATGAAAGGGAGCGAAGTGACCGCCATGCTGGAGAAAGGAGAGCGGATGGGGTGCCCTGCAGGATGCCCGAGAGAGATGTACG
ACCTGATGAACCTGTGCTCGACTTACGATGTGGAGAACAGGCCAGGATTCACAGCTGTGGAACTGAGGCTTCGCAATTACTACTACGACGTGGT
TAACTAA
HUMAN SEQUENCE—GENOMIC
CTCTTTAGTACTTGTAAATGCCTGATGGGTTCTTCCTGCTTACTGCACAGGCAAAACCAATTTATTGAGACCACACCATCACAATAAAAGAGTT
TAATTGACACAAGGCCGGCCACACCACATGAGAGATGAAGTTACTACTCAAATCAATCTCGGAAAATTTGGAGGCTAGGATTTTTCAAAGATAG
TATGGCAGGCTAAGGAGTCTGTTTCTGGGTGGGAGCACATGACTGGTCCGTAGGGTTGGTGGGGTCAGGGAGGTCAGTGGGGTCAGCAGGGCCA
GCAGGGTCAGCAGGGTTGGTGGATCCAGGTGAAGCCATTGGTTGTCAGAAATTCAAAAACCTAAAAGGTATCTCAAAAAGCGAATCTTAGTTTC
TGCAATGGTGATGTTATCTGCAGGAGTAATTGGGAAACTTGCAAAACTTGTGACCTCTAAATAATAGCTGGTAATCATTTATGTCTACACCTTA
GCAGAATTCAGGCTCCTCACACCCTCCTAACCTGGTGGCCTTTCACAAGCTTTACAAAGGTGGTTTAATTTGGGGAAAGGACTATTGTCATTTA
AACTATAAACTAAATGTCTCCCCAGGATAACTTAGCTCAGACCCAAGAATGGTTAAGGGCAGTTTGGAGGCTAATGGCAAGATGAAATTTGGTT
AGATCAGATACTTTCCACTGTCATAATTTTCCCACTGTTATAATTTTTGAAAAGGTGGTTTTAAGTTAGAATGGCAATCATTAAAAAGTCAGGA
AACAACAGGTGTGGAGAGGATGTGGAGAAATAGGAACACTTTTACACTGTTGGTGGAACTGTAAACTAGTTCAACCATTGTGGAAGTCAGTGTG
GCGATTCCTCAGGGATCTAGAACTAGAAATACCATTTGACCCAGCCATCCCATTACTGGGTATATACCCAAAGGACTATAAATCATGCTGCTAT
AAAGACACATGTACACGTATGTTTATTGCGGCACTATTCACAATAGCAAATACTTGGAACCAACCCAAATGTCCAACAATGATAGACTGGATTA
AGAAAATGTGGCACATATACACCATGGAATACTATGCAACCATAAAAAATGATGAGTTCATGTCCTTTGTAGGGACATGGATGAAATTGGAAAT
CATCATTCTCAGTAAACTATCGCAAGAACAAAAAACCAAACACCGCATATTCTCACTCATAGGTGGGAATTGAGCAATGAGAACACATGGACAC
AGGAAGGGGAACATCACACTCTGGGGACTGTTGTGGGGTGCGGGGAGCGGGGAGGGATAGCTTTAGGAGATATACCTAATGCTAAATGACGAGT
TAATGGGTGCAGCACACCAGCATGGCACATGTATACATATGTAACTAACCTGCACATTGTGCACATGTACCCTAAAACTTAAAGTATAATAAAA
TAAAATAAAATAAAATAAAATAAAATAAAATAAAATAAAATAAAATAAAGAAAAGGTAGTTTTATAAAGATAAATATACAGATCAATGAAATAG
AATTGGAAGTCTGGAAATAAACCTTTACATTGATTTTCAAAAAGTGTGTCAACTCAATTAGGACAGAATAATTGTTTTAACAACTACTGTTGAA
CTGGTACAACTGGAAATCTGCATGCAAAAAAAATGAAATTGGATCTTTGCCTCATATTGTACATGAAAATTAACTCAAAATGGATGTTGGGCAT
AAATGTAAGAGTTAAAACTATAAAATTCCTAGAGGAAATCATAGGAGTAAATCTTCATGACCTTAGATAGTAGTTTCTTAGCTACATCACCAAA
AGCATAAACAACAAAAGAAAAAAGTCGATAAATTGAACTTCATCAAAATTAAAAACTTTTATTCTGCAAATGATACCATCACAAAAGTGAAAAG
ACAACTCTCAGAACAGGAGAAAATATTGGGAAATTCTATATCTAATAAGAGACTTGTATTCAAAATATGTAAAGAACTCTTACAACTTAATGAT
ACAAAGATAAGTGACTCAATTGAAAACTGGGCAAATGATCTGAATAGACACTTCTCCAAAAATATGCAAATGACAAAGAAGCACATGAAAAGAT
TCTCAGCATTGTTAGTCATAAATGAAATGAAAATGAAGTCATCAGATACCACTTCACGCCCACTAGGATGGCTATAATCAAAACGACAGACAAT
AACAAGAGTTGACAAAGATGTGGAAAAATTGGAACCCTCCTGTTTTGCTGGTGGAAACCTGAAAATGGTGAAGCCACTTTTGAAAACAGTTATC
AGTTCCTCAAAATGACAAACATAGATTTACTATATCACTCAGCAATTCCACTCCTAGTTATATATTCAAGAAAAAAGGAAAATATACACCCACA
CAAAAACTTGTATAGGAATGGTTGATGCAAAATTATTTATAGTAGCCAAAGAGCAGAAACCGATGAGTGGATAAATAAAATGTGGCCTATCCAT
ACAATGGAATATTATTTGGTACTAAAAATGTAAAACACTGATGTATGCTATAACATGAATGAAAACATTATGCTAAGTAAATAAGCCAGTCACA
AAGAGCACATATTACATCATGCAATTTATATGAAATGTCCAGAATAGGCATGTCTACAGAGACAAAAAGTAGATGGGAGGTTTTCCTAGGGCCT
TGGATGGGGAGGAGCCAAAGGATTGTGTGGGATGGGAAGCATGAGAAGTGATATGGGTATGGGGTTTTGTTTTGTGGTTTAAAAAAGTTCTTCC
AGGTGCAGTGGCTCACATCTGTAATCCTAGCACTTAAGGATGCAGTGGCAGGAGTATAGTGTGAGCCCAGGAGTTTGAGACCTGCCTGGGCAAT
ATAAAGAGACCCCATTCTTCACAAAAAAGAAAAAAAGTGCTTAAAAAAGTTCTAATATTGATAGTGATGATGGTTGTACAACTTTGTGAATACA
CTTAAAACAATTTAATTGTATACTTTCAACAAGTAAACTGGATGTTATGTGAATTATATCTTTTGAAAACTTAAAAATGGAACCGCACTTTGAA
AAATATAAAAAAGAAAAAGAATGAAAAGATCTTGGTATGAGAAAAACCATCTAATTTTCACTACAGTGAAAAATAACAGCTGAACTACCTTCTA
ATTATATAATTATATTTTAAAAGAGTACTCTGTTAAGCAAATGATTAGCTACCCATTGAAATAGATGAAAGGGAGGAGTTATTTTTGAGCATAA
GTTTTTTCCATCCTTTTGAATCTCCAGTGGCTTGGGTCATGTCTGGCAAGTAAAGGACCCTAATTCAATTATTGAATTGTTTGCTCCCTGGAAT
TTCACAAAAAAATAAGGAATCAGGTACACAGAGGAAACTTGACTTGCTCAGAGCTGCACACCTACAAAAAGTAGCAGAGCTGAGACTACTATGG
CCCGTGCTTCCTGACCCGTCGCCAGTGCACCTACCGCTGGGTTTAAACACATGTGATCACACTTCAGACACTATCTTTGGTCTTTAAGTAACTT
TTCTGTTTTGTTTGTTCAAAAGATTACTAACAAAAGAAAAATGAGGAAGTTTACCATTTGTAGGTGAAAAGTCACTTTTATATCTGGTTGAATT
GGTTAGGGAATACCAGCAGAAGGAAGTTGTTCCTCTGGCTACATCCTGTGTCATTTCAGCAACTGGATGAATGTGATCAGAAGGTGAAAATCAC
TGAGAGAAGCCACTCACCTCCATCATGCTGGTCTATCAAAATTAACTTCCCTTCATAGGACACAATAGGGTTGTTACTTTTTTTTTAAAGGTAT
ACCTACATATGAAAATAATTAATTTTATCTAAATTTAATGTAATATGCATAAAAATACACCTGATGCTGTCCTAACTATGCAATATTCTCCTTT
GTGTGTCAATAAAAGTGTATTATTTCAATACATGGAGTTGGTTATTATTTTACTTGCAACCTAAAGCACCTTAACAGATATATCATGTGTAACT
TGTGTATTTTTTTAATTTAGAAGAGACAAAAATGAGGACCTTACATTCTAAATATTAAAATGTGCAATCACATGAGTCCAGGAGTTTGAGACCA
GCCTGGCAACGTAGTAAAACCCCATCTCTACTAAAAATACAAAAAGTCCCAGCTACTCAGGAGGCTGAGGTGGGGGAATCACTTGAGCTGGGGA
AGCCAAGGCTGCAGTGAGCTGTGATTGCGCCACTGCACTCCAGTCTGAGTGACAGAGTAAGACCCTGTCACAAAAAAAAAAAAGTACAGCGTAT
ATTCTATAGTAAAAAACATGTGGGCCATTACATTCTGAAAGAACATAGTGAAACATTTACAGAATATCAAGGCCTCACCATCTAGAAGAAAAGA
ATCCTTACTTTCCTCATCTTTCTACCTCAAGAAAAAAGGGAAGCGGGAAGAAACAAAAGTGCTAAAGTTACAAGTGGTAACCAAACAAGAAAAG
GAGAACCGCTTAACAAAATGCACTTTGAAAAGCGCTGGCTCATATAAAAACCAGAAGTTTGAGAGTATCACAATGAGGCCACACTCCAACCTCC
CAGAAACCATATATTGTGCGTCTACAAAATCCTGAACAATTCTCACTCAGATCTTGAGAGAAGAAGGGGCCATTGTTTATCCTTAGTTTTTCTC
ATTTTTGACTGTGGAGTAGTGAAAATGGCTGCAGTGGAGATTAGTGCAAAAGGAAATAGCAGCCATGTGGCATGATTTTGTCAGAGTGTGAGGA
CTCCAACGACCCACATTAATTGGGGGAATGAGCTGAAACTCACAGATGCCCCCAACCTCGCTGGACAGAGTAAGCTCAGCCTTCTCCCTCCCTC
AATGAAGTGCGAAGCCTGCATGTTCCTCACAGTCTCACATTGGAAGGAGGGGCCCAGTTTGTGCAACACAACTCCAGCTAAGCCCACCCCCACC
ATTCCCACGCTCAAAGGTTATAGAAAATCAAGCTCAAAAGGAATATTAAGCCGTCATATGTAATCCAGAAAAGGGGTAAGAAAAGGCTCTGACA
TGAGGATTTAGGAGCTGCCACACACAAAGGGGCAGAGCAAAGTGAAAGTCTGAAGAAAGCTGCCAAGTATGGACAAGATGAAATCAATGAACTA
GCAGCTATGCAAACCTTAAAAGAAAATAACATGCACAAATTAAAAATAAAATCCAGTCTGAAAGAATTTTTAAGTGCACAGGCTACAAAATTTG
ATAAGAGCCTGCATTCAATTTTTTAAAAAACTCAAGAACCGATTGAATAACCAAGAGAAAATAACTAAAAAGAGTGAGATAGAGAGAACCAGAG
ACAAAGAAATAATTTGAGGACCAATAAACCTACCTACAGGTAAATTAGAAATAACAAGAAATAAAGCAGACCCAGCTAAACATTTAGTTCCCGA
AAAAAAAGAAAGGGAGAGAGAGAAAATCACTGTGAACCAGGAAGAAAAAACAAAGTAGATTACTACAATCAGAGAAAAGATAATAGACTTAGAT
GATAAAAAGTTAATTAATATCCTTGAAGAAAAGCACTTAACAAATAAAAAGGTATTTAAAATCACACAAGAAAAAATTCTTTGAATGAAGATCT
AAATCTGCGCATTACAATGGTGGATACACAGCATTATATATTTGTTAAACACCATACAATATACAACACCAAGAGGGAACCTCAATGCAAACTT
TGGGCTTTGGGTGATTATGATGTGCATTAAAGAGTGCATTGTGTTTAAGAAATAAAAGATGGCCGGGTGTGGTGACTCCTGCCATCACTTTGGG
AGGCCAAGGCAGGATGATCACCTGAGGTCAGGAGTTCGAGACCAGCCTGGCCAACATGGTGAAACTCTGTCTCTACTAAAAATACAAAAAATTA
GCTGGGCTTGGTGGCGGGCGCCTGTAATCCCAGCTGCTCAGGACGCTGAGGCAGGAGAATTGCTTGAACCTGGGAGGCAGAGGTTGCAGTGAGC
CAAGATCACGCCATTGCACACCAGCCTGGGCAACAAGAGTGAAACTCCATCTCAAAAAAAGAAAAAGAAATAAAAGATGCTGGTTGATCTGTAT
CAGTATATATCCTTGTCAAGTTTCTTAATATCTCAGTTAAAGAAAGTTTCCTCCAGCAGCCTGGAAAGAAGAGCAAGTCACCTAAAAGAGGACA
AAGGACTGGCTGTTCTCACATTTCTCCAAAACAACATTCAATGCCAAAGGGGCAAGGGAGGAAAATCAACCGAGTCTAGGCCAAAGGGAAGTAG
GATGGAGACACAATGTGCCCACCTTGATGTCACTGCAATACAACAGCAACAGAATAACATCCTGAAAGTGGAGAGCATTGATAGATGCAGTATG
TGGGATCACATCTTCACAGAGTCCATCCAGCTCATCAACAAAGAAAGTAGGAATGAGATATGGTGGTAGAAAGGTCTGGAGGTGCATAAGGTAT
CCTTTTAAATGGAGAACTAAGAAGAGACCACTGAGGGTTTATGGTTACAGAAATCAAAAATTTTAAACTTAACTATGTAAAACTCATATAACTA
GGGAAACGTGAGAGGTGAGCTGAAGTGAAGTGGAGTGAGAGAGGTAATTGGTTCATGTATCATAGCACAGTTACTGATACTGTCTGAAATTAAA
GCTCATGGTTTAGAAGAAATGACGAAAACTGCTTATTATTGTCACTTTTCTTTTCCTTTAATCAAAGTGGGGTCATTTCAGAAATGATACATTT
GTGGCAAAGAATCATTTCTATAAAATCAGCAATTCTTTAGATCCCATTTCAGAATTTTTTATTCTGTTAAATTTAAGTAGAATTAAATATCATA
TTTAACATGGATAAAATGTATAATAAATGTATTATATTTAAAATGATGCCCATTTTTATATCTATTGCCATGTGTACATATAGAAAGAGATAAT
TTTGTAAGGGTCACCTAACGGTAATGATGATTATGTCTGAAATTTGGGATGTTTCTATTTCCTTTGTGCTTTTATTCTTTTAAGGGATTGCCTA
TTAGGAATACTTGCCACTGTTACCAAAAAAACTATTTTTTTAAATTAAACACTATTTTTTAGAGCAGTTTTAGCTTCACAGTAAAAATGAGAGG
CAGGTACCGAGGTTTCCCATATACCCACTGACCTCACACATGCACAGCCTTTCCCATTATCAACAGCCCCATCAGACTGGTACATTTGTTACAA
TTGATGAACCTACTTTGACACATCATAATCACCCAAAGCCTGAACTTTACACTGATGTTCCCTCTTGGTGTTGTATATTGTATGGTGTTTAACA
AATGTATAGTGCTGTGTATCCACCATTGTAATATCATACAGCATACTTTCACAGCCCTAAAAAATCTCTGTTCTCCTTCTATTCATCCTGCCCT
CCCCACCAGCCCATGGCAGCCACTGATCTTTTTACTATCCAGATAGTTTGGCTCTTTCCAGAATATCACCTGTTGAAATTATACAGTATGTAGC
CTTTTCAGAGGGCTTCTTTCACTTGGTAATATGCATTTAGATTTCATCCATTTCTTTTCATAACTTGCTAGTGCATTTCATTTTAGTGTGGAAC
AATATTCCATTACACTGATGTACAAGAGTTTATATATCCATTCACTTACTGAATGACATCTTGTTTGTGTCCAAGTTTTGGCAATAAACTTAGT
AAATAAAGCCAGCGTAAACATTTGTGTGCAGATTTTTGTGTGAACATAAGGTTTGAACTCCTTTGGGTAAATACCAAGAAGCACAATTACTGGG
TACTACTTTAGGTAAATACCAACTACTTTGGGTAAATACCAAGAAGGACAATCCTCTTATAATTACTCATGTTGTAAGAGGATGTTTAGTTTCA
TAAGAAACTGCCAAACTGTCTTCCACAGTGGCTGTACCATCTTGCATTCACAACAGCAATGAATGAGTATTTCTATTGCTTCACATCCTCACTA
GTGTTCACTGCGGTCAGTGTTCCGAATTTGGGCCATACTGATATCTTACTGTCTTCATTTGCATTTCCCTGATGATACATAATGTGAACCATCT
TTTAGGCTAGGCATGGTGGCTCACGCCTGTAATCCCAGCATTTTGGGAGGCCAAGGCAGGCAGATCACGAGGTCAGGAGATCGAGACCATCCTG
GCGAACACGGTGAAACCCCGTCTCTACTAAAAATACAAAAAATTAGCCGGGCATGGTGGCGGGCGCCTATAGTCCCAGCTACTCGGGAGGCTGA
GGCAGGAGAATGGCGTGAGCCCAGGAGGCAGAGCTTGCGGTGAGCTGAGATGATCGGGCCACTGTACTCCAGCCTGGGCAACAGAGTGAGGCTC
CGTCTCAAAAAAAAAAAAAATTACTACATGATACTAAGTAATGCGGAAGGTGACTCAAAGGGGGAAAGGAACACAGCAGTGTAAAGGAAGGAGG
TTGTAGATGGATCTAGAATTTCCCCCTCATTTCCATCAGGTGAAAGCCTGAGAAAACTGCAATCTTTGTGCAGGCTGGGTTTGCTTTGTACACA
CTGGTCCCCTAGTGTTCATCTCCAATAATGCTGACAACTCTGAAAACCATCTGTAGACATTCTGCAGGCTCCATCTCAGGAACAATGGCTATTT
TTTCGGGTAGTTGAAGCAAAATTAAGTCCAATGATAAGCAAATATAACCATTATCAAAATCTTCCATTTATGTTTGTTAAAGCAACCTAAGTAT
GATCTGAGAAGGACTCTGTATTCTATATTTGAGTCCTTGTGGATGAACTGTAACCTAGCTTAATAGGCAGACAAGATTGAAAACCTAATTTAGG
AGTATGTGCCTTTAACAATAGCTGAGTCTTGGCCAATCCCAGTGGCCATACTTCAACCATTCATACACTGCTGAGTGTTCAAACTGTGTTCAAA
GAAGGCAAAAGCAACCTGTAACCAATCCAGTTGTTTCTCTGCCTTACCTCCAATTTCTGTATGTCACTTCCCTTTTTTTTGTCTATAAATATGT
TCTGACCATGAGGCATCCCTGGAGTCTCTGAATCCGCTGTGATTCTGGAAGCTGCCCCATTCGCAAATCATTCATTACTCAATTAAACTGCTTT
AAATTTAATTCTGCTGAAGTTTTCTTTTAACAGGTTTAGAAAAAATAATGGCAAAAATGAATGAAAATCCAATAACCCTGGAAGCAGAAAAGGC
TGGGGGCTCCAATAAGTGTAAATAGTCCCATCCCTATATTTTCTCCATGGCAATTACAATCCAGCACATTATATATATATTTTTTTGCTTCTCG
CATTTTGGCTTAGGGTAAAGCTTTTTAAAACAGGCACTGCCAACCAGTGTTATCAAGAAGGTCTGGATGCCGTTTTGTGGGAACATTTTAAAGA
GGAATGTCCAAAAGGAAAAGGGGGATGGGTTGGGAGAAGGGTATCAGGCGGGTATCTCAAAACCATTCTTAGGGCTATAGGTTTAATTTATTTG
GTTGTGGACGTCAGAGCCGTCATGGTAAGAAGGAAGCAAAGCCTTTTGTAATAATTAAAGCCTTCAGAAGCAGCGTGCCCCATTGCCCACTAGT
GCGCCGTGAAGTCTGGTGTTCACCTACAGGGTCCCTCTCAGCACTGCCCACGCCTCCCGACTGCTCCAGCACAGTAGCTTGGAGCTTGTTGGTT
TGGTGACCAAGATACACTCCAGGGAATATGCCATGCAGTGGAGTCTCTTCCCCGGCACTGCATAGCAAAAGGAAAGGGCCGCTGGGTGTCTGTG
GGTCCTGGGCAGTCACAGAAGCCACCGCGCTCGCGGGCAGGAGCGGGACCGATGCGCTCCATGTCCCGGGCAGCCCCACCTTCTCTGCCTGCGA
AGGGCCCTTGTCCGGCGGGAGGAGAGAGGCGCGCCCCACCCGGGCTCCTCTACACCTGCCGCCGCCTGGGCCGATTCCGCGGGCCTCGCCCGGC
GCTTCAGCCGATTCCCGCCCAGCTCCGGGCTCATGGGCGCGGTCAGCAGGGCGGGCCAGGGCGGCGGGGCGCGACACTGGGAGGAAGTGCGGGC
CGCCTGCCCGGGCGCGTTAAGGAAGTTGCCCAAAATGAGGAAGAGCCGCGGGCCCGGCGGCTGAGGCCACCCCGGCGGCGGCTGGAGAGCGAGG
AGGAGCGGGTGGCCCCGCGCTGCGCCCGCCCTCGCCTCACCTGGCGCAGGTAGGTGTGGCCGCGTCCCCTACCCCGCCGGGACTTTCTGGTAAG
GAGAGGAGGTTACGGGGAACGACCCGCTGCTTTCATCCCCTTTCTTGTTCTACCTTCATCGGCCGAGGTAAAAGTGCTGAAACCATGTGAATAA
AATACAGGTGGGTTCCGCCAGCTTCGCTCCTGAACCTACCCGCGCTCGGGATCCAGAAGCTGCGCCGGGAGAGAGGGGCTCAGGCCTGGGCGGA
GGGGACGGAGGTCAGACCGTGCGGAAAGTGACCCGGGCACCCCAGGGCGCCCAGGCCCCCAGGGAGCGCGGAAAGTGCGGTCGCGGCCCGGCCC
TCGGGAGACGCGGGATTGGGATCAGGCACAGCGCGAGGAAGTCGATCTTGGAGCTAGAACATTTTCCTTTGGCCATTTACACGAATCCACTGGA
AAATGCCGCAGTGTTTATCAAAGTTACTCAAAGTAGAAATGTCCAGACGTCTTATGAGCTTAGACAAATCTTTTACTACAAAAAGAAACAGCAG
TTGCATTCAAACAACAACCCTTCTGAACCACTACTAAAATTTAGCATAATTACTCTTGTGGATACATTTTCATTGTCAAGTAATTTACTTAGCC
AATGAACTTGGAGASCAAGAAAGTTTTATGTAGTAAAATGTAAATTTGAGTTAAGAGTTAAGGGTGTTTCTTTTTGTCTGTTTGTCTGTTTTTG
GCAATGTGGCTCCAAAACCTTAAGCCCACCTAAAAACTATATAAATGCAATCCATTCTTTTGTTGGAATGTTCAAGGACTAGAAAGACAATTGG
AGAAGTGAGAGTTTGAATCTTTTTTTACGTTGGAAACAGTGTTGCAAAATATTTTTTGAGTTTTGCCTGACTTAGCAAAGATTCAGTCGAACTC
AAGTAGAGTTCAAAGCATTGCAGCGTGTAGTAAAAAAAAAAAAAAAAAAAAAAAAAAGAGTTGAAGATGTTGTGCCATATCTGATTCTTGGTAT
TAAAAATAAAAAAAGGAACCATTTAATCCCTAAGAGTTCCTGGAAGAAATGGAATTGATTCTACCATCTGACTTCTTTGTCTTAGTAGGGACAA
ATTCATTGCCTTCACACAGGCAGCATTTTAATTAAATGCAACTAAATACATTGATGTCCTCCTTCTCCCCAGTGAAAGTCCGAGCAGTGCATAG
ATAGAATTATATTTTCTCAAAAAGGCTTAAATACATGTAAATTATTAAGTGTTTTAAGTGAGAAATCTTTGTCAGTTGAAATTATTTTATCAAA
TCATTTTTGTTCTGAACGGCACTTTTGTTTTAACGTATTTAGAAAACTCTTGCATTAAAACAGAAATTGATTTGTATTATCCCCTGTATTTGAA
GTGCACTTTAAAGTGTATTTGAATGAGAGATTATAATCAAATTACTTGATTTGTGTCTTATCCTCTTACTCTTCTACCTTGGATTTGAAAAGGT
TGGATTTGAACACTAGGAAAAAAGAGATTTTTCTACTGAGGGATTGTGGGAAGATTTTTTTTTAAGCCTCTGTATTTGAAGTGAAATATAAAAT
AGGATTTTATAATAGTCTTAATAACTAGAAAGTTTTAAGCTAGGATAAAAATGGGGTGTATACTTTAGGTCTTTATCTTTCCTGAGAGATGAAA
TTGGTAGAAACGTTATTTTATTGCTAGATTTCACTTTAGAAATGAATCACCCTGATCTTTGTTAGGCCCCTATTTAATATTCTAAATGCAGGTC
TAATCTCTCTGCTTTTTTTTAATGGAAGACTTCTTAGTAGAACTTCACTTATTTAGCACATTGTTTGCCCATGGTTATAATCCAATATGCTTGT
GCCAAGACGTATTTTGGAATTCAAGCTTTTTCAGAATTTGGAATTAAAATTTAGAATCTAAATTTCAGAACTGAGAAAGACATTGCTCAGAATT
TAGAAAGGTAAACATACATGTTGACCCTGCTGGTTACATGCCATTCCAATATAGTCTGGAGAGAATCCTGTAATTCCATGCATTAATATTTCTG
TACTTTTACATTTAAGAACATGAATATTCTCACTAAGTGGAATAAATAAAGACTATAAAGAGCTGTGTGTCTGTTTAGAGCAGGTGTTATCACT
ACGAGAGCTTCTCTAAGACTTACCAAAAAAAAAAAAAGTGTTGTTTTTCAGAGCTTTTTAGAGCTGCAGCTGAGGGACTGAGTCTGTATTAGAC
TCCACTGAACTACGGTTTGCTTTTAAAAGGAAAGTGCATTTATGTTGTTCAATACTTCACACTTTCCAGTAATTAGAAGGGCAGTTCCTCTCTC
TTTAGGGAGTCTTAAATAGCAAGATTTTACTGAATTTTCAATCATACCGATCAAAATAGAGGTACTTCAAGTAAGAGTGGATGTCTCATCTTTG
TAATATAATTTCAAACAGCATAGTTTCTGACAGTCTACCATTTTAGAGAAACAGAGCAGAAGTTACTTACAGGAGGGGTTACTGTCACCCTTTA
CAGCTGCAGTCTGTCCATGGAAGAAATATTATTTCCTGTTAACTTTGCAACCAGCTGGGTTTGTGTCAGTTATCTAAGCCTAAGTGATGGCTAA
TTTTTACTTTCTCAACTTTCCCTGTATAGATTTTTTTCCAGCTACCCCCTGACTTTTCTACTCTTGCTTTGCTGGTTTTAACATTTTCCACTAC
TTCTGGATTGGTTTAGCTATAACTGGGTGGAGAAAACAACAACAACAACAGGAATTTAGGCCTTTGGGGAAGAATTTGTTTTGTTTTAGAAGTC
TACACATTGAGCATTACTTTTTCTTCTAAAGCAACTAAAATCAGAAGGCAGAGTCCTAATGAGAGATTATGATCAAATTGCCTCATTTGTGTCT
TATCACCTTCCTCTTCTACTTAGATTTGAACAGGTTGGATTTGAATACTAGGAAAAAAGGGTTTTCTACTGAGGGATTGTGGGAAGATGTTTTA
AGAACTAGTCTGATTGGATTTTAGGAAAGTTCATTCATTTTGATATGATGTTATCAGGGACATTTTCTATTTGCTTATAATTTTATCTGACCAA
TATTAGCTTGTATCAATTTGAGGTTTTTTTTTCCTTTATGAATCAATTGTGCAAGGTTTGCCCTACATCTCTTAAAAGGTGGTTAAACTGGAAT
CTTAAAGACAGTTGAATTTAGCCAAGACCAAAGATATGCAAAGAAAGAATATTTTGTTTATGTTACAGTACATTTAATAAATCCAAATGGCTCC
CTTGATTCTTTTCTTTCTGGGACACCACGTATTGATTTCTGGCAGCTGGCCAAAGGCAGATGGTGGTGGAGCAAGCGAGGACAGTTAAGAATGT
TGATGATTACTGGATTACTGAGGAGTACTGTGAGCTTTCTGGTCCTCTGCTCAGAGGTGTCTAGCTCTGAAACTGGGATCCTGGCTCTGAGCTG
GAGAGGCGCTTCCAGTTACTGCTGTCCTGGAGCGCTGGAAGGGAGCATAAGTGTGAGGAGACAGTGGGCTTTTAGCCTGGGATGCAGATGAGAG
ATGTCTTGACCTGAGTGAAAACCTTGCAGGCAAGCTGCAGGTCTACCGAGCAGGGTGAGGGAGGCTCTCGACCTGGATACTGTGAACTAGGGAG
AGAAAGTAAATTCAACAGAAGGAGGGCCCAGGGCAGAGATTTAGGAATATCCACAGTTTAAATATTGCTTTACTTAAGTATACTCTCCCTGACT
ATAAGTAGCATTTGAATGTTCAACATATGACCTTTCATTTCTCCCCTCCATTGGTTTGTCTTAACTGATAAATCTTTATTTTCCCATGGTCAAC
CTGGTAGTTTATTAATATTACATCTATCAGTTCCTGTTGAGTTGACATGAAAATGTTTTGGTGTGACCTAAGTTAATTTCTCTTTTTGTTTAAT
TTTAATTTGTAATGAGTTCCTCTTTTCATTCTGCCCATCCTTTGGTACTGCTTTGAGTTATGTCCTCTAGAATTCTCACTATTTCCTTATGATT
GGCATATTTTCAAAGTTTTTTGGTGTACTAATTTTAAACAGTGTTTGTTGACACTGAGAATTCAGGACTTTGGAGTTTTAGACCACCATCACCT
TCTACTCCTTCTCACACCATCCCAGGATAATTATTCTCTCATTTGAGATTAAGAAGTTATTTGGTTTATTTTATTATGGTTATATAAATATAGT
TTACTGCTAAAGCAAGGTATATCATTCCATTTTCTATCTCGTACCCCTTTTTGCTCTTCCTGGGGTAAACCCTTGCTTTGTTTTTGTGTTTTCT
TAGTTTGCACTGTGCCTATTATCATTTCCTTCCCAACTTTCTGACATAAAGATGAAAGCCCTATTGACACAATTTTCTACAGTGTCAGATATAC
CAAGTAATCTCACGGTTCCATTTTTCTTTCTTTTTTTCTAGAACCCTCCATCTTCTTCTTGTCTAACAGTTGCTCTTCAGTCTTGCTATACATA
CAGTAATACCTGAAGAATGTTTGGACGATATTTGGTGTGGGATTTTTCTTTTTTTTTTTTCTTTTTCTTTTTTGTAGAGATGGGCTCTCGCTAT
ATTGCCCAGGCTAGTCTCAAACTCCTGGGCCCAAGCAATCCTCTTGCCTCAGCCTCCCAAAGTGCTGGGATTATAGGCATGATCCACTGTGCCC
AGCCCTATGGGGAATATTTGTTGACTAAATATGTTTTATGTAAATTGCTTATCATACTCTTTGTTGTAACATCTGTGGCATTAATATGCCTCTT
GTTAACACTCACCTACATTTTACCTGTTGTAAATCCACTGTCATAATTATTGAAAATATTTCTCCAGAGCTTTTTAATTCTATGGTTATTTATT
TATTGTAGTATAGAACTTTTATGATTTCTTCCATCAGGGTGCATTCTGAATCATGCTTAGTGAGAGATGGTTTTTAACTCCACTTTAACAGTTA
GCATCTATGTTTTACATCAGTGTCAATGTCACTTTTGTATTATATACGACACCAACATTTTATTATCTGAGTGATGAGAATGTTTATTTTTGTG
GAAATGGAGATCTCATGAGACTTTAAGCAGATTGCTGGCCTTCTCCTCGATTTCCTTGATTGATTCCTGAAGTGGAACTGCAGTGCTAAGTGGA
ATTCCCTGGGAAGCTTGCTCAAGTAAGTAAGCATGAGAAATGCTGAATGAAATAAAGTGCAGCAAGCAGGGATAAATATCATGGGCATCTTCAG
AGCCTTTGTGCAGGTAACATGCACAGAGATTCTCTGAGAGAGTCAGTCTCAGCCAGTGGTCCTACACTTCCATGACCCTGCAGTGCGTTTGTTC
TTAGAGTGGCTTTCAGGGCTGGCTCTGCCACAGCCTCTTTGGGAAACCATGCATGACCTCTTGCTGCTCCTTACCAAGCTCCTTAGGCTTTGCT
TGGTAGAGGCAGAATGTTGTGGTTGTTTTCATCTTAAATGCTAACAATATATGAATTATGTGGTGGATACACTGCCTCAAAGTGACATTTATCG
AATATTTTTGTAGCTACGGGTTGAGAGTAAGGGTCTGAGGCCCCACTGGGTTCAAGTCCCCCTTCTTTATTTGTAAGCTCTTCTTTTGTAAATG
GAGCAGTCACAGGGGGCTTCACTCTGATACCTAATGGAGACCGTGCCTGCAGTGCTCGGTACCTGGTATGTGGTTAAAACTGACATAACTGTCA
GAGCCTCTCCCAGGCGGGCTGACTCTGGGAATCTGCCCTGCAGTCTTGGAGGGAAGGCACGTCCAGATAGGTTTGATGAGCAACTACAATTGCC
AAAGTTAGTTTCTCTGACCTCCAAGATGGGAGAACTTTCTAATATTTTCTTTTAGGAAAGTTGTCCATTGCATAACTGATACACGAGTACATAT
CCTTTAGTACAGGATTCAGATACAGCGAGCAACAGAAAAGCCCTTCTTAACCTCCACCCTCAGTCCCAGCCCTGCCCCCAGTCCCACTGTTGGG
GAGCAGTTGGAGCTCTAACCTCTCTTCTTTCGTCCTGTGCATTCATGTGTGCATGTGTGCACGTCTTCAGAAGATATAATGGTGGGCTGTGTAT
GTCTTCTTAATACCTTTATCACTCTGGAACTTTCTTTTTATTAATATGTTGGGGTGCGGGGAGGTCTCCATATTCAGTGATTATTGTAATTTTT
ATGACAGTCCAGAATAGGCATGTCGATTTTTTTTAATTTTTGATATTATAAACAGTGCTGCAATGAATGCACTTTTTCTTTTCATTCTTTCCCT
CTCCTTTGCCATTTGCACTGTGTTTTCATGAAACCATCAGGTTAATCTTPATCTCAAGGAAGCCCTTCATCCCTGTCCATCCTGTTCTTCAGTC
CATCCACTTAGTTTTCCTATGATTATTTTAGCAAGCAGGTGGTTAATTTCCAAGGAATGTAGTTACTTCTTTGGGATTTTTTTAAGTGATGTAT
TAGTTTTCTGTGTATTTTATTACTTGTTTGAGTGCACCATTACCCCCGTCTCCCGCCGTATCAGTTCATCTGCTTGCATGCTTGGTGCCTCTCT
CTCCTGCTGTCAGCTTTCCTGATGTGCTGGGTATTTCCACGTGTCTGTTGGTTTTTTTTTTTTTTTAGGTACCCTAGGCATTAGTCTTTTAAGG
CTGCATTCTTGCAGCCTGTCCCACATGAGATAGGAGGAGGGCAAGACCTGGATGTGCACAGGGCAGGATGGGCCCATAACTGGTCTGTGTGGTG
TGTGGGTGGCAGGAACTCCCTGTTCTTTGTGGGTATGGCCATGCCTTCCCTATTCAAACGAAGCCACACACCTGTCTTTTCCTGCGAGGCGTCT
TCTGCTGCTTTCTTGGAGCTGGGGAGCATCTACTCTTCCCTTGTCCTCCCGCTCCTCCCTGTTCCTCCCTCAGGTCTCTGTCGCTTCTAAGGCA
CTCCACCCTTGGTCTTCTCCCACCTTGCACCCCCCACACTGCTGCCTGCCTGCACAGGGGGACTGTGATTGCCCCCTTCAGTGTGAGCCTGACC
TGCTTCATGCCTTTCAAGGAGAGCATTCATTGCCAAGCTACTCATGGAACATCTCCTCAGATCCTCAGCGTGCTATGACTTCATTTTCTGTAAT
ACTGTTTTTCATGTTTCTTCCCCTTCTCTGCATTTATAGCTGTGCATATGCTTGAGGTGGAAGGCCACCACTTCCTTTTGGTTAACAACACCAA
TCAGCTGATGGTCATGGCTACGTGAAGGAACTCACAGTGAGGGCTCAGGAAGAGCCTGGCTAGAGCAGGCTGCATCGCAGGCCTTGGCGTTAGG
TTCCCCAAATCACTGCTGGTGATCTTGTAGCTCTGTCATGAAGTCTGTCCTGCTTATTAGGATACCGAGGGTCCAAATTCATAGATTCTTAGAA
GCCTGTTTAAATATGCAGAGTATCTAATTCAACCCGATTAGAAACGGGCTCAGAAAGGTGAAGGGATTTGTCCAACCACTGAGTGATGCTGCTG
GGATTAGAACTCTCAAAACTAGGTGTTTCTAATCCAGAACCAGAATCCCTATCCACTACTCTAATAAGGCGTAAAAGAGGATCTGCTGTCCTGC
CTAATTGGTGGGCAGGTTTGGAGTCCTGTCAGCAGCTCAGGAAACCCTGGAGAGGCAGAGGGAGGACACAGGCTCAGTGTCAGACATGCCAATT
TTACTCATCACCAATGGTTACACAAAACTTGTTTTGATCTTTGTGGCTTTTGCATTGAGAAGTTAAGCATATACAATAGGAATTAGACACAATC
CCAAACCAATGAGAGACTCAAGTGAGAAGAGCTGAAGCTTTTATGCATGCCTTCCTTCCATAGAGATAAATTTACTATCCAGAGTGAACTAGAG
CCTCGTGGAAAGTGAGTGCCGAGCCCCTAGCTGTGAGTGTCTCTGTCCTTCCCACATCAGACCTCCATGTCTGTGGCTGTCCCCCTACGGGGCA
GAACTGCTGCTCTCTGCTTGTGTTGCTGTCGTGAGGGTTGGCAGTGGACAGGTGTGGACAGATCTCAGACCCGTTTCCCTCCTCTTATGGAAAT
GTTTGTGAGGCAGGTGGGACTTCAATGATTTGGTCAAGGAAAGGCAGCTTGGCAGCTGGGGAGAAGGGCTCAGGCTAGAAAGGCAAGCGTTTGT
GAGGGATGATTTCCCCAAAGAAGCCAGCAGTGTGTAAGGTATTCCCCGGAGCTTGTTTCTTCTCAGAAGACTCTGGAAGCTGTGTCAGTGTCTG
TTATGGAGGAATGGAGTATCAGTCCGATCAGGCTTTCATAACAAAGCACCACATACTGAACGGCTTGAACAGCCCAATGTGTCGCCTCCCAACT
CTGAGCCAAAGAGACTGAGGTCAGGATGTCCCAGGGTGGCTCCTTCCAAGGGTTGGGTGGGACAATGTGCCCCCAGCATCTCCTTGGCTTGTGG
GTGACCATCTCCAGCTCCACATGGCATGCTCCCTGTGTGCCTGTCTCTGGGTCCAGATCTCCTTTTCATGTAAGGACACCAGTCATGTTGGAGT
AGGGCTCACCCTAAGGACTTCAATGGGGCGTAATCACTGCTGTAAAGACCCTGTCTTTAAATAAGGTCACACTCAGAGGGGTTAGGGAGTTAGG
ACATCAACATTTGAACTTGGGGGACACAATTCAACCTGTAACAAATGTGTGAGTGAAGACTGGCACCTCCCCACGATGGCCTTTCTGTGATGCC
ATCAAGAGCACCAGGGAGCTCTCCAGATATGGAGATGGACAGATGTCTAAGGCCCCTGAAATGAGCCTGCTGTACAGATGATTCCAGAACTCTG
TCAGTGTGAAGACCAAACACAATTAAGCACATTAAAATACTTACGGTAAAGTGTTTCTTTCACTTTAGATGTGCAAAAACTTAAAGAGAGAGAG
ACTTATGAGAAGACTCAGGGAAGAAATGTAAGATAAAGGTGTTAAGGGAGACAAACTCCACAAAATTGTAAAGTGAAGCTGCTGTGGGGAGTAG
AGCCCAGACCCAGATAATATGCAGGCATGGGTCCAAGGGAGGCTTTGCACACCAGGCGGGGGAGGTGCAGGGCCATGGATGAATGGTCTTGGGA
AAACGGCAAATCGTTTGGAAAAAAAAACAAAACTTTGCTCTTTATATCAAAATAAATTCCAAGCTGAACAAAGAATAAAAATATAGCATTGAAA
TAATGAAGCTATTAAAAGAAAACTTAGGTGAGTTTTAAAATAATTGTGAAGAGGCCTGTCTAAATGTGATAAAACATATGAATTTATATTCACA
CTCATCACAAGATTGATAAGCATGATTTCCTAAAATTTTAAGCAAATCCCCATAAAATGAAAAAATATACAAATAAGTGAAAAAAATGGTAAGA
TATATTTAATTTCAATACTTGTGGTAAAACATCAATAGCTTTAATATGCAGCGAGTTTTTTCAAATCAATAAGAAAAAAGACACAGATGGGTGC
TGACAGGGCCGTTTGGTAATATCTTCTAAAATTTAAAACACAAGTGCTTTCACTCAACAACTTCACTTTTAGGAACCTATCACACATATAAATT
GACAAAAGTGGAGAAATATTCATTGCAACATTTTATTTTATAATAGCAAAAAAAAATCACTAAGGGAAGTACAGTTGATTCATATGTTGGAATC
CTATGCAGTCTTCTAAAAAATGTGGAATTTATTTCATACACCAAATATAACAATGTCCAAGTTCTACTAGTGAAAAAGCAAGATGTAACATATC
ATTGTATTTGTTTAAAAAACTCATGCTGGGTTGGGTGCAATGACTCATGCCTGTAATTCCAGCACTTTGGGAAGCCAAGGTGGGTGGATTGCTT
GAGCTCAGGAGTTTGAAGCCAGCCTGGGCAATATGGCAAAACCCCACCTCTATGACAAATACCAAAAAAAAAAAAAACTAGCCTGGACTGGTGG
TGTGCACCTGTAGTCCCAGCTACATGGGGGCGCTGAGGTGGGGGGATCACTTGAGTCCAAGAGGTCAAGGCTGCAGTGAGCTGAGATCATGCCA
CTGCACACCAGCCTGGGTGACAGAGCAAGACCCTGTCTCAAAAATAAGTGAAAAAAAAAAAAAAGCCTAAAAATCTCCCACATGCACATAATAA
TTTAAGTGATATTGGATTGTCGTTTACTACTTATATGTGCATTTCTGCCTATACATATTCTATCCAGTGTGTACACATGTGTATGTAAATATGT
AGCATGATCTGGAAGTGTAAGCACCAAATTAAGAACAGCAGTTTTTAGGGGGAGGGGAATAGAATTGGTTTAGAGAAAAAGGTGAAATTAACAT
TTTTATTCTGCCTACTTCAGTGTGCCTGCAGTATTTACAATGATCAGGAGTGTGTACTTTTTTCAATTTAGAAAAATGATAATAATAAGGTTTG
CTTGGGGGGAAAGGGTAAGTAGGATGAGACCAGGAAGAGAAGTAACTTAGAAACACATCATGCATCATGACTGCTGGCACCATTCTGTCCTCCA
ATGAAGAGCGAGGCTTTGAGAGGTTCAGCAGCTCACCCAAAGGTGTACAGCCATGGTCTCAAACATGCTTGCACCCTGCTGTCACTCAGGTCCT
GAAGCCCAGGCCACCTCCAAGGACACTGGGGTGCTCTGGGGTGCAGCCTGCCTTCAGATGTTTCTTAAAGCCACTCCTACTCCACCCCACCCAG
TGCAGGAGCCAAGATTGAGGACCACCATTTGACAGCTAGTTCATAGGATTTCATAGCACACAAACACATCTTTAAAGGCTGATGAGGTTTCCAC
CAAATTGGGATTTATTGGTATGCTGGGTATAATGGCAGCTGTGTGTGCCTTTGACTGCAAAGACACTGGGCAGGCCAGAGTGGCTCCTCCCCAT
TTGATATGTGTGTGTGTGTGTGTGTGTCTGTGTGTGTGTGTGTCTGAGATTCAGAGAGACAGGGCTCGTGTTTTTCTGTTGCGAACAGTCCTTT
CCACGGGAACTTATATTCTCCTAAGGTTTGCCACTCTGCAGAACTTTTGGAGGAAGGCTTTAGAGTGAGAATGTCAGTGCATTCTCAGCGTGCA
ACTGTAAGACTTGCAGGAGGTGAATGCACATGAAATAATTCTCAGAGGAAGAATATGTGCACTGGTCAGATAGGAAAACTGACCTGTAACATTT
TCTACACAAGAGGATTTGAATGGTTTTCGTCTTTAAGATTTTTTTTTAACATTATGCTTAGTCCACCATGCTTTATTCTGTCAGACCATTTGTC
ATCTGCATGCTTCATGAGAAATGTTTTTTTCTCGTGAGAAGGACGTAAGCAATTTCGCTCCTGGTTGAGAGTTTGGTCCATAGTTTCTTGGTGT
CTGTGGGTTGGCTTCTGGGCCTCGCTGGCTGCAGCTGATGGTGACCAGAAGGGCTGTTCTTGTGAGTCATTAGGGGATGGGCCGCTGCTGCTAC
CTCCCCACCCCAGCCACCTCCATCACCACTGTGCCATACTCGCCCAGAAGAGCCCCTGGACTCATCGCCTGCCCCCATGTTTACACTTGTTAAT
AAAATCTCTAGAATTGTGGCTTAGACCTGTAAACATCCAGTTCCAAGAAGTGGCTCTAAAGCCCTCTCTGGGGGCAGAGTGGTTGTCAGAAGCA
GACCAGGCCTCGGGGTCTAGATTCCATCCTTCACTGGAACTGCTGGGGGCTGGTAGTACCCCATCTGCAAAATGAGGTTAAAAATACCTAACCC
TTGGGTTGCTATCAAGCTCAGAGATGCTGTATGCAAAGCACCAATCAGACTGGCTCACAAAGAATAGGCCCTCTGTCAAATGTTCATGGTTGAG
TGCGGGATGTCAAGGATAAATAGCTACTGGTTACCAGGGAATTGAAGACAGGGTTCTTTTACAAGCAAAAAGATTTTATAAGAGGGTCACAGAA
ACAGAGTGACTCTTGCCCAACAGTATCATAAGCAAATAAGCTGTGTCTAGATCCTAATCATGTGTTTAGGGCTCTGCTGGGTTTAATAAGCAAC
ACATAGGGGGTGCGTTGTCCTCCACTCTCACATCCCCAGTCACTAGACAAGGTCACTCCCCCGGGGGGCATCTTACTCAGAAGCTCTAAAAGAC
TTTGTTGCATGACTTTGGCCCTTGCTCTTTTAAAATGTCCAGTTAGAGACCATGGCATGGAGAGTTTTGTATACTCTGCTCCCAGCATGGCACC
CTCTTTGCATATTGTGGGCACTCTTAAAGTTATTTCTCATATTGTAATATATCAGATATGACTTGGATATAGTCAACTAGATATTTAGTGAAAA
ATGTATCACCCCCATTATCAAAAGAAAACCCAAAGCCTTCAAGTTTGGCCCAACTAGAAGGAATTTCTGGAAGGGGGAAGTACCAGGACCACAC
AGACTCTGGTCCTGCCGGTGTGTTTATAAGATGCAGCTCATCATGTTGGTCTCTGTCATCCCTGCTAAGGCTGTTCATTATGGAACCACTGGCC
ACATGTGGCCACTGACCGCTCAATTACTTAAAACCATTTAAAATAAATGTTGAATTTCATTTAAAATTTAAAATTCAGTTCTCAGTCACACAGG
CCAGGTGTCAGGGACCACTTGCCACACGTGGGTGGAAGGTGTGTGTCAGGCAGAGTAGAACAGGTATTTCCATTGCTGTAGCAAGGTCTGCCAG
ACACCAAGCTGCTCTCAGCCCATCCCCTGAGGAGCCCAGAAGCGATATGAACTTCCACCCACCTCTCCCCTTTCCCAGTTCTCAGTGCCACTCC
TTGCCTAAGTGCACGGTACACTCGCCACTATTTCATGTGTTGATACCTGCAGCTCCCAATTTTCTT2XAGAGGATCTGACCCTGGGAACTGATG
AGGGCACCAGGAGTGCCCTCTCCTTTGACATGAGACCTTGAGTCTTGTCCATGGGGCCCTGGCCTGGCCCTTTTCATCCCCAAGGCTGTAACAT
TCTCCTGCACAACACAACACACGTGCACACACACACACACACACACACACACACAAAATAATGTTACTTCTCAGTCACCCGGGAACTGACATCG
TTCCCAGTTATTTCCTTGCAGCAGCCCTCCAAGCGGTAACACAGCCTTGGAGAAAGCTACTAAGTCATGTATCCTTGGGGTAAGCACACTTGGT
TCAGAATAGTTTCTGAAAGAACAAACCAGGTTTTTGCTCAAGAGGGTTTTGAGGGACTGGAGAAAACCTTAGTGCTTGTTCCTTTCTCTTCGGT
TAAAAAAAAAAAATCCAACATAGTTTCCTTGAAACATTTGGAACCTGAGGTTTTGTCCATTTTGAAAAGAAGATGTAGAGAGGTAACGTGTTTC
TCACGAAGGCAAAACAAAAAAATAAGATGCCAAGCAAGTGGCCCTTGTACCTTCAAGACCAAGAAATAAGGCGTTTGTTTCTGGGAATGCCTTC
CATTTGCTCATTTTGTAAGTAATCAAGGCAGGCTGAGAGGGGAGCCTTCTGAGGCACCCCAGTGAGCAGAGGTGGGGTCCTGCCACTGGCCCCT
CGGCTCCAACCTTGCCTCACTCCAGGCGCTGGGGCAGAGATGTGTGGTTGGCCTGTCTCTGGAGTTCCTGTGCTGCTTAATTTGAGTAGAGATA
AAAGGCCACAAGAGAAGTCGTTTTGAAGGGTTPGTGAATTATAGGACTTCCTTTCATGATTCAGCCTGACTCCAGGAAGTGCAGTCACGTGCTG
CCCTCCTAGGGGAGCTTCGCCCCACCACCAGCACTCAGGCTCCACTTACTGCAAAAGGCGCGATCAAGATTCTTCTTCCTGAATTATTGTCTTA
ACAAAATTGATACGTCTAAACATTGAGTTAACACTTTCATTCACTAAAAATGTTTTCCTGAATGATGCTTTTCATGTGACTTCTTTATAGTCCC
ACGTGAAAAGCGGAATGTGCTCGGCTCTGTGCTTGTTCCCCTCTGTTTGGGAGCCTGCGCTGCTGCTCACTTCTGCAGTCAGCTCTGTTTGGAT
CAGTTTTGAACCCCAGAACCTTCCACATAGAGGTGATAATTCTAGATAATTCTAGAGCAACTGCTTCTCTATCTGGCTGTATGCTAAGCTCTCT
AGAGAGCTTTACAAGGGAGAGATTCTGAGTGTTAGGGCTGGGAAAAGAGCACTCTGTGTGATCCTAACCTGCAGCTGAAATGCAGAACCACTGT
TCTCAGCTGGAGCTTTTCATTGTTTTTTGTTTGTTTGTTTTGTTTTGTTTTGTTTTGCTTGTGAATTGAGCTTACTAATGGAAGCAGGAGCTTG
TTCTGTTTAGCGATCGTGAGAACCACCTAGGCAGCGGAGCCTGCCCTTAGAATCTGCTTCACTGGGCTGTACTGGGCTGGGCATTGGCAATTTT
AGGACACATCTAGATGTGTCCCAAGCAATCTGATATTTTGATGTTTATCTTACAGAGAAGCATGTGTTTAGAAGGCAGATAGCTGTGCTTCTGT
TCTTCTGATTTTCGACAGAGACATCAGAACCTTCCACAGTCATTTTAGTCTAAGTCCTGAAATCGTTCACTGCCAGCCCTGAGTCTAGCTGGAC
TATATGCCTCTGGTTGGACACGTCTGCCACCTCTGAGAACTGTGTGGATGTAACTCTTCTGTCTTCTGGCTCGTTGTGTTTCCAAGGAGAAGCT
TGAGGCCCAGTAATACTTAAAAATTTTTTGGACAAATTTAATCTTACATAATTATGGGGTACACAGTGATATTATATCTGTACAAGGTGGAAGG
GTTGAATCAAGCCAATTAACATACCCATCATCATAAATGCTTATCATTAATCCTCCTCTCTATCTGCAACTTTGTAGTCTTTGACTGTCATCTC
CTTATTCCATCACTCCCCAGCCCCTGGTAACCACTATTTTGTTCTCTGTTTCTATGAGTTCAATCATTTTAGATTCCACATATGAGTGAGATCA
TGAGGTATTTGTTTTTCTGTGCTTGACTTATTTCACTTTACATAACTTTCTCCAGCTTCTTCTATGTTATCACAAACAATAGGATTTCCTTCTT
TTTCATGGCTGAATAGTATTCCATTGTGTGTGTGCCACATTTTCCTTAGCCGTTTATTCCTTGGTGGACTTTTAAGTTGATTTTGTATCTTGGC
TATTGCGAATAGTGCTGCACTGAAGCATGCCAGTACAGATATCTTTTCAACATAAATTTGTAAACTTTCTTAAAACATTATGAGTTTTTTGTTT
TGTTTTGTTTTGTTTTTTGCAATTTTTTGTTTTTGGCTCATCAGCTATCATTAGTGTTAGTATATTTTATGTGTGGCTCAAGACAATTCTTCTT
CTTCCAGTGTGGCCCAGGAAAGCCAAAAGATTGCACATCCCTGCTCTAGAGGTTCCTGGATAAGATGCTCTTTTAACCCCTGTAGACAAGACTT
TTTTTATTTCTGGAAATTTTATAACTTTAAACATGTGTTTTACTCCTTTATTTTAATTCTCTATTTCAGGGACATTAATTTTATATATTTTAGA
TCACCCCTGTCTTTCTCAATTTTTCTGTTGAATTCCTGAAGTCTTTGTTAATTCCTATTTCATTTTTCTCAAGCTCCACAGATCCTGTCCCCCA
TGCTGCCTGCAGTGTTAATATCCATTCATTTTTCCCTGCTTGATATAATAGCCAACATTTCTTTTCTGGCCTTTTCTCCTGATCTCTGCTGGCT
TATCATTGTTTTTTGTTTTTTGTTTTTTCGCCCCTTCCTCCCTTTTGAGCTGTTATTTTAACCAAGTGATTATTCTGTTAAGTTCTTTGATTCC
ATATCTGTGTGTGTGGACATGCCTTCATCTGCCTTTTGGGACATTTTTCTCATGAAAGTCCTTTGCCATTTGTTTCTCCTGTTGCTTCTCTTCT
TTAATTATTTCAGCATCATTGTACAAATCCAAGGTAGGATCCTCATCTTTGAAATAGATCATGGAAGGGCCTTGGATGTGTTCCAGTTTACCAG
AATATTTCCTCCCTTCTCAATAATTTCTTGTGTCTGTGTGTGTCTGTGTGGAGAGAGAGAGAGAGAGACAGAGAGCGTCAAAGAGAGAGAATGA
ATTGGTTTAATACATATTTCTCCCCAGTGAGGCTGCCAGCCATTCAGTCTCCTCTCTTCAACACTCTAAGAAATGGTTGGCTTTCCATTGCTGT
GTATATCCTTCCACTCTGCAGGCCTTGTCTGAAGTCTACAGCAGCCAGTCCCCACTAAGGGTCTTCATGATCCCAGGGCAAACATAGCTGCATT
GGGCTCCGCTTGTGGCATGTTATTGCTCAGGATCGGGGTGCCCACTGGTTCCATTTTATTTCTTTATCTGGTTCTTGTTGCAGCGTCATTTCAG
AGAGGAGGGGGCAGTATCTCTGCCAACACCCAAGCAATCTGATATTTTGATGTTTATCTTACAGAGTGACTTAGAGTATGTGGCATTGAAACCA
ATGGTTAAAAATCAACAAATAAGCAGGAAACAACTTCAGAATGACCAAAAAAGTTCCTGGGGCACTCTTAGCTTCCACCAGCCTCTCTGATGGT
CAACCAGGCCATTTTGTTGGCTTTGATCCGTTCAGCACATTGAGTTATGGCGCGCCTCCCACGTGTCAGGAGCAGGGTGAGGTATGGGGGCTGT
CGCAGCAGCTGAGATCCTTCCCTGCACTTGACTTGTTTACGGTCAGATCGTAAGGAAGCATGGGAGCCCAGCATCAGGCTCTGCTCATGCATAA
TCTCATTTATTAGTGACAGCAACCATAGGGTTTTTCTTTGTGAAAAAAATTATAAAATACAGAACAGTGCAGTACCACCCAAATTAATAAATGT
TGTTATTTTACCATTTATGCCTTTATTTTTCCTAAAAGAACAGTCCCAATAAAGTGGAAGCTATAACCTTTTATGGATGAGGAAGTGGAGAGTA
ATCTGCTCAAGCCTGGCTAGCTGGTGAGCAGCAGGCCTGGCTCAGGCCCCTCTGGTGCCCCTGATTTAGGCTTCATGGCCTTCTCTACCCTGCA
GGAATTATGCTGGCTCAGCTGTGCAGGTTGGCGACTGCAAATATCAACCCCTCTAATAGGAAACCAGGCAGATTTTTCTCATGCTATCAGCTGA
TTTTTGGTATATGTAAATAAAACCTATGTTTTTGAGAGTAGCAGGAAACATTTTGTTAGAAAACCAAATGAATACAGGGAGATATGGCTATCAG
GAGCTGACACTGATATTATAATTTTCCAAGTACTAGTATCTGTGTATTGATTTTTACAGTAATTTGTACTTTCCCATCCAGCTTGTTTGTGACC
ACTGAGGCCCTTGGTGAATATCTTAGAAGTCACTCAAAATGGATAAAGAATGAATGTGAGTCACCCATAGCAGTCTTATGTGAGATAATATATG
GTTGATCCTCAGTATTCATGGCTTCTGAATTTGTGAATTTGCCTACTCACAATCACAGTCATTTATCTGTAATCCCCAAATCAATAACCATGAT
GCTTTCAAGACCATTTGAGGTCATACACACAGTGTATTAGTTCATTTTCCCACTGCTGATAAAGACATGCCCAAGACTGGGAAGAAAAAGAGGT
TTAATTGGAATTACAGTTCCACATGGCTGGGGAGGCCTCAGAATCATGGCAGGAGGTGAAAGGCACTTCTTACATGGTGGCAGCAAGAGAAAAT
GAGGAAGAAGCAAAAGAGGAAACCCCTGATAAATCCATGAGATCTTGTAAGACTTAATCACTATTACAAGAATAGCATGGAAAAGACTGGCCCC
CATGATTCAATTACCCCCCTTCCTTCGGTCCCTCCCATAACATGTGGGAATTCTGGGAGGTACAATTCAAGTTGAGATTTGGGTGGGGACACAG
CCAAATCATATCACCCACCCCTGGCCCCTTCAAATCTCATGTCCTCAAATTTCAAAACCAATCATGCCTTCCCAATAGTCCCCCAAAGTCTTAA
CTCATTTCAGCATTAACCCAAAAGTCCACAGTCCAAGTTTCATCTGAGACAAGGCAAGTCCCTTCCATCTCTGAGCCTGTAAAATCAAAAGCAA
GCTAGTTACTTCCTAGATACAATGGGGGTACAGGTATTGGGTAAATACACCCATTCCAACTGGGAGAAATTGTCCAAAACAAAGAGGTTACAGG
GCCAATGCAAGCTGAAATCCAGCAGTGCAGTCAATTTTTAAGCTCCAAGATCATCTCCTTTGACTCCAGGTCACACAGCCAGGTCCCATTGATG
CAAGAGATCGGTTCCCATGGTCTTGGACAGCTTCATCCCTGTGGCTTTGCAGTGTACAGCCTCCCTCATGGCTGCTTTCACAGGTTGGCATTGA
GTGTCTGTGGCTTTTCCAGGCACATGGTGCAAGCTGTCAGTGGATCTACCATTCTGAGGTCTGTAGGATGGTGACCCTCTACTCACGGCTCCAC
TAGGCAGTGCCCCAGTAGGGACTCTGTGTGGGAGCTGTGACCCCACATTTCCCTTCTGTGCTGTCCTAGCAGAGGTTATCCATGAGGGCCCTGC
CCCTGCAGCGAACTTTTGCCTCGTCATCCAGGCATTTTCATACATCTTCTGAAGTCTAGGCAGAGGTTCCCAAACCTCAATTCTTGACTTCTGT
GCACTCGCAGGCTCAACACCACGTGGAAGCTGCCAAAGCTTGGGGCTTTCACCCTCTGAAGCCACAGCCTGAGCTCTACGGTGGCCCCTTTCAG
CCACAGCTGGAGCAGCTGGGACACAGGGCACCAAGTCCCTAGGCTGCACACTGCATGAGGACCCTGGGCCCAGGCCACGAAACCACTTTTTCCT
CCTGGGCCTCCAGGTCTGTGATAGGAGCGACTGCTGTGGAGGTCTCTGACATGGCCTCGAGACATCTTCCCCATGGTCTTGGGGATTAACATTA
GGCTCATTGCTACTTATGCAAATTTCTGCAGCTGAGTTGAATTTCTCCCCAGAAAATGGATATTTCTTTTCTATTACATAGTCAGGCTGCAAAT
TTTCCAAACTTTTATGCTCTTTTTTTTTTTTTAATAAAACTGAATGACTTTAACAGTCCCCAAGTCACCTCTTGAATGCTTTGCCTGCTTAGAA
ATTTCTTCTGCCAGATACCCTAAATCATCGCTCTCAAGTTCAAAGTTTCACAGATCTCTAGGGCAGGGGCAAAATGCTACCAATCTCTTTGCTA
AAACATAACAAGAGTCACCTTTACTCCAGTTCCTAACAAGTTTCTCATCTCCATCTGAGACTGCCTCAGCCTGGACCTTATTGTTAATATCGTT
ATTAGCATTTTTGTCAAAACCATTCAACAAGTCTCTAGGAGGTTCCAAACTTTCCCACATTTTCCTGTCTTCTTCTGAACCCTCCAAACTGTTC
CAGCCTCTGCCTGTTACCCAGTTCCAAAGTCACTTCCACATTTTGGAGTATCTTTTCAGCAACACCCCACTCTTCTGGTACCAATTTACTGTAT
TTGTTTATTTTCACATTGCTGATAAAGACATATCTAAGACTGGGAAGAAAAAGAGACAGTTCCACATGGCTGGGAGGCCCCAGAATCATGGAGG
GAGGTGAAAGGCACTTCTTATATGGCAGCAGCAAGAGAAAATGAGGAAGAAGCAAAAGTGGAAACCCCTGATAAACCCATTAGATCTCATGAGA
CTTATTCACTACCATGAGAATAGCATGGGAAAGACTGGCCCCAGTAATTCAATTACCTCCCCGTGGGTCCCTCTCACAACATGTGGGAATTCTG
GGAGATACAATTCAAGTTGAGATTTGGGTGAGGACACAGCCAAACCATATCACAGAGTGGCACAAAATTTTAGCCACATGCATATTCCAGACGC
TCCAACTCCTCCTTTCACCTCATATTATAAGTAAGTGTCTTTTTCCCCAGTCTACTTAGTGCCGTATTTTTTGCATTTTTGTTCCTTTTTTCAA
ATTGTGGTGACTTTGCTGTTTAGAGTACCCCCAGCTGAAGTCCTATCTGGTGTCCCTAGGTGTAAGAAGGCTGTGCTGTGCCTTACAGGGAAAA
TATGTGGGTTAGAGAAGCCTCTGTCAGGCATGAGTCATAGTTAGTGCTGTCGGCCGTGAGTCCAATGGTAGTGCATCAACAATAGATATGAAAT
AAGGTGCCTTTACACAGAAACACATAAAACAAGTGATGCATTGATCAGTTGATGAAAATATGGTGACGGCAGGCTCTCAGGCACATAACCCCTG
AGAAGCGATGGGCTACTACTTGCTAATTCAGTTTTGGGGGTGACTTTGTGGAATGTATAACCTGAAATAATGAGAATAAACTATATTCTACTTC
TTTTACAAAGCAAGCAAATAATTTTTAAAAGCAAGTTAAATTTTACTGTTTTTGTAAGAGATATGTTTTCGAAACAGTTGAACTGTTTTATAAC
ACAGAGAAAGTCTCTTTGCCTTACATTTTATATTAGTTAATTAAGTCAGCAGATTTTTCTTGGGCTCCTGTGATGTGACTGGCACTGTTTTGGT
ACCAAAAGGGCATTGCAAAAAAAGTCCAGAAGTAGACAGATCACAGCCTTCAGGATTAAAAGCAGTCTCATCAATGTGATATTTCGTTTAAACT
TAGTAGCAAGCCCATTGAATTCTCAAAATGAGAATCTGCTAATTATCACACACTTTTCTTATGAAAGAATGATTTTTCATAGTCAATATTTCTA
AAATATAATGTCTCTTTCTCATTACCAGAGACCGATTGTATGGCAGATTTACTTGCACCTGCGCATGCTGGAGATAGGTGATGATTTAGTATAG
TGCACATCCACCAGGCGGTCCTCCTGGGTCCCAATATTTAGGCCCACAGGATGAGTCCAGGTGATATTGGGCACAGGCTCACTCAGAGGCTATC
AGACAGAAAGCTCTGCCTCACTGCACAGCAGCTTCAAGCATTGCCTTCAGTGGGAGTCTTACTTGCAGTCCACACAGCTCAGGTACAAGGCCCC
TGAGGTCCACACCTGGAGCTAATCATCTCTTTGAATAACACTGTAGACATAGCTACCAGAAAATAAAAGAAATAGAAAGGCATGATTAATACAA
GCCTCACTAGGTTCTTATTGTGAAGATCTGAGAAAGAGCTCCTCATGGCCCTGGCATGGGAGGGAAGAGTGATAACTGTAAAATACCCCTAGGC
TTTCTCCATGACAATGGTTACTCTCCAAGGGAAAACACTTTGCAAGAGCCTTGTCTCAGCTGGGAATTCCCAAGGGAATTCCTCAAGTTCCAGC
ACCCTCATCACTTTATCACTTAAAGGACAAAAAACTCATAGTCAACAGGGGTCAGCGCTTCAAGGAAATTGTTACAGAATGGTAAAGGGGTCGA
ATATCCAAGAAGACATAACAATCCTAAATGTGTATGTGCATAACAACAGAGCATCAAAATATGCAAGACAAACACTGGTAAGACTGAAAGGAGA
AGTAGACAAATCCTGTCTTATAGTTAGAGATTTTAATCTCTTTCTCACAAAAGTTGATAGACCAAATAGATAGGATAAAAATGACCTAAGCAGT
ACTGTCACTCAACTTGATCTAATTGACATTTATAAAATATTCCATTCAACAACAGAAAAATACACATTCTTCTCAAGCTCACTTGGAATATTCA
CCAAGATAGAGCACATTCTTGGAAAACATGTTAACACATTTGAAAGACTAAACGTCATACCAATTATGTTCTCAGAACACAGTATAATTAAACT
AGATATCAACAACAAAAAGATGGAGGTTTTGGGAAATTTCCCAAATATCTGGAAATCAAACAACAGACTTCTATATAACCTATGTTTCCAAGAA
GAAGTCTCCAAAATTTAAAAAAATATTTTGAAGTGCATAAAAATAAAAATATAATTTATCAAAAATTTTGGAATGTAGCAAAAGCAGTGCTTAT
AGAGAAATTTATAGAACTAAGTGCACACATTAGGTAAAAAATATATAAAGAAAATTACTTGTGATTCTACTTTTAAGAAACTACAGAAAGAAGA
GCAAATTAGGCCTAAACCAAGCAAAAGAAAAGAAATAATTAAAATGAAAGCAGAAATCATTGAAATTAAAAACAGGAAAACAGTAGAGAAAAGT
CAATAAAACCAATGTTGGTTCTTTGAAATCATCAACCAAATTGATAAACCTTTAACCAAGAAAAAAAAAAGAAAAAAATGTAGAAGATGCAATT
TACCAATATCAGAAATGAAGGAAAGGTCATAACTGTTGATCTAATGGATATAAAAAGATGATAAAGGAAGATCATGAACAACTCTGTACTCACA
AATGTGGTAACTTAGGTGAAATAAACTAATGCTTGACTGACACAAACTACTAAAACTTACAGAAGAAATAGGTAGCCTGAATAGCCCTATATCT
TTAAAATTTAAATTAATATAACCTTTAAAACAGAAATCATCAGGCCCAGATGGGTCCACTAGTGAATTCTGTCAAACACTTAAGAAAGAAAGAA
TACCAGTTTTCCATAATCTCTTCCAGAAAATAGAAATGGAGGAAACAGTTTCTAATTCATTTTATGAGTTCAGATTTCACGTAATACCAAAACC
AGTTAAGGCATTACAAGAAAACAAAGCAATATTACTTATATATACAAAAACCCTCAACAAAATGTTAGAAAATCAAACCCAACAACGTATGAAA
AGAGCTATGTACCACAGCCAAGTGGAATTTATTCCAGGTATGCAAAACAGGTTCAACATTTGAAAATAAATTAATGTGATACATCACATCAATG
GGCTAGAGAAGAAAAATCATATGACCATGTTAATGGAGGCAGAAAGGGCATTTGACAAACTCAAAACACTCTTTCATGTCAAAAAAAAAATCTT
AAACTAGGAATAGAGGAAAACTTTTGTAACTTGATAAAGAGCATTAAAAAAAAAAACCTACAGGTAACATCATACTTAATGGTGAGAGACTGAA
CACTGTCCCTCTGATATTGAAAACAAGGTAAGACTGTCCTCTCTTACCACTCTGTTCAACATCCTACTGGGAGCCCTAGCTAGTGCAAGAAAAC
AAAACAAAACTTATACAGATCAGAAAAGAAGAAATAAGACATCTTTTTTCACAGATAATATGCATGTCCATATGGAGAACTTCAAAGAATCCAT
AAAACAACTCTAATAACCAATAAGTGAGTCTACAGGATGCTAGATCAATATACAAAAGTCGGTTGCTTTCCTATATACCAGTAGTAAACTATTG
AAATTTGAAATAAGAATAATTACCATGTATAATAGCACCAAAAAGACAAAAAAAAAAAAACACAAGAAAATACTTAGGTATAAATCTAACAAAA
TATGTACAGGATCTGTATGCAGAAAACTACAAAATAATGATGGAAGAATCAAAGAAGATGTAAGTAAATGGAAAAGTAGTCCATGTTCGTACAT
TGGAAGACTCAATGTTGTTAAAATGTTCATTCTGCCAAGCTTGATCTGTAGATTCAACCCAATCCCAATCAAAATCCCAGCAAGCTGTTTTGTA
GCTAATGATGAAATGATTCTGAACTTTACTTGGGAAGGTAAAAGATCTAGAATACCCAACACAATACCCACTAAAAAGGACAAAGTTGGAGGAC
TCACACTACTCAATTTCAAGTCTTACTAGAAACAGATACAATTTCTGCCCTTATGGGACAAACAGACATTCATCAAAAATTCACATGCTAGAAA
GTAAAGGTAAATTAAGTCAAAACAGTGGTCAGTGGTACAAAAGGAAAGCATGTTAGTTTTGACTGTGGGGACAGGGACATGTTTATCCTGAGCT
CAAAGGGTAGCCTGGACAGTGGAGCATTTTTAGCAGAGAAAAGGGCCACAGCTTAGAACATGTAGGAAGGGAGCAAGGTGGGGGCATTGACAGC
CAGAGCTACTCAAAAGAGATGTGGAGGAAAAGGATGTTATGTGGTTTTGGAGACAAGTAGGCATGTGTGGGAGGCTGAGACGTGAGATGGGAGG
GATTGGCAAGGGGTTGACTTTCAGCAGTGTAGAGAAGGGAATGATCTAAGAGAGCTTGGATTTTCATCTTCATAAATGGATGGAGCTCTTGGGC
CAAGGTTCTCAAACTTGAGCCTTTAAAATACAAAACCTAGACCTTCACCCCAGAGTTTCTGATTTGGCAGGTCAGGGTGGAACCCTAAGAATTT
TCATATCCTCCATGTTTCCTGGTGATGCTGACATTGCTGGTCCAGAGACGCACATTGAGAACCCAGCTCCAGGGAACAAGAAGGAGCTCCAAGT
TAGGCAGGAAAGCCCCAAGCTTACATTTGGATGGGTTGACTATGAGCGCCTTTGCACTGCCACCTGAAGATGGTAGCTAAGAGAAGAGGCAGGC
TTCAAATATTGGCTCCACCACATACTGTGTGTTCTTCAGCAAGCCACTTGACCCTCCTGAGCCTCGATGACCAGGTCTGTGAATTGAGGATAAC
AATAGTATCTACCATTAGGGATGTTGTGCACATCAGTTGATAACCTTTGAGTCAAGTACTCATGGAATAGCTGTTTTGCATTATCCTCATCACC
TTCATCATCATGGCCATTCTGGCCAGCACTAAAGATGTACAGCCAACCTCTTCTGTGGCTGAAGTTTATCTTCTATAAAATGAGAACTTGTTTT
TCATGAAGCTGTCATTTTCACAAGTTTGGGGTGCAGGTGCAGATTGCCTACTGTTGTGTTTCTGAACACTTCCCTCGCGAGGCTCCTAACCCCA
CCCCAGTAAACTCATCAACATGACTCCTTCCAGCTTCTACAGCTCTGGAGAGGGTTCCTTTTTATCTTGCGTTTCCAGGGATGTTTCACGGCCT
TTTGTGGAGTGGGCCCTGGCTGACCTTCTGGCCCTTCTTGAGTGTGGAGGATGTCACAGACTGCAGTGGGAAATTAAAAAGCTGCTTGCTTCAC
AGAGTAAGGGAATGTTAGTAGATGCTTGAAAAGTACCCTGAGGGAGCTGGTCAGAGGTGCTCTGTAAAGTTGCATCTGTTGCTAGCACCATGAG
CAGCTGTCTGACCAGGAGGCCTGGGAACAGGGACACAGAGAGCTGGCACCCTTCTTTCCTCTGCCCTACACATTGGCCTTTCCGCCATTAAGAC
CATCTCTGCTTGACTTTTTCAGTCTCCTGGCTGGCAATTAGCATCTTGAGGTCTCCATTAAGATCTTTTCAAGGATGCTCTTCCTATTTGGTTC
AATCTTCTGGTTGAATTTGATACATGTTATGATGTAGGACTTTTTAAAAAAACATAAAACAATCAGGAAAACCTCGCTATACCCATTCCAGCAA
TTCAAGACCAAGTTCATTTTTGGTAAAAACACTTGGGAAAGGGCATTTCCAGGCTGGCTAAGCACTAAATGGCACAGCCCTGTCCACTGACTCC
CTCCTCAACTGGTCTGTGTTCTGGAGCGATCCATGTCTCAGAGCATTACTTCATTTTGAATGTGCAATTAAAAGAGGCCCCGTGCTGCTGGGGA
TCTCACACTTCTGCTTTCTGGTTTGTTTTGCATGCTGACACTTTGAGGAAAAGCCCATTTCCCTAATTACAGACATCGTCCAGCAGCAGGAAGC
ACTCTGGCTTGTTGATGCCTGTCTTGTGCTTTCTCTCTGTTTCAGCTGTTTTCCTTTTAAGATACTCCTCTCAGATTTGTGTGCTTCTTCCCTT
CCCACATTCTATACTGCCCACCGCCTGGGATTCCACATCTCCGTTTGAATCCAGGAAAGGGACGTAGGTCAAATTTGTGGGAATCAAGCATATT
TAGAAACCCTAACCTCAGGCTCTGCGCATCTGTGGGTCTCTGTAGGAGGGATACTTAGGTTTCATGCCTGCATCTGCGTTTCCTCTCCTCTGCC
GCTAACATTCTTCCACTGAGCACATGTCCATCTTGAGCTGGAAGGTTTAGCGGTTTGCCATCTTGTCTTGCCTGCAGTTATGATGCAGCTAAAG
CATCCTTCTCTCCTTCCTATAACCTATGCCACTTTGCTTTAAGCATTGAGTATATTTATGTCTCAGGTTTATGAAAGACAATTATAAAATCTCA
GGAGACCATCATAAGCTCCTGTAATATCTTGCAGTCCTGAGTCACCCACAATTATTTTTTAACTGGCTAGGAAAAAGAATGCTAGCGATTTTTT
TTTAAATAGACATTCAGTAAAACTCTAGATATTTCTTAATCCACATTTACTGTGTCCTTTTTGCTTAAGTCAGGTGTTTTGGTTTCTCTAGCAG
CTGCAGGATCCCCATAAAGATTATGCTCATAAGGTAGTGATGGAAAAGTAAAATAGAGCCTGAAAGCGGGAAACTTCAGCAAGGCACTAAGGCA
CAGACAAGAGATGTTAGGTCTGCCGGCTGTTGTCATTGCAGTCTGCTGTGGCCTCACCCCCGCCCCCCCCCCCGCCCCGCCCAGGCCTTCACAG
CTGAGTAGGAAAGGATCTTGGGATGGGTACCAGGGCAGGATCAAGGAAAGCCTGCAACTGCGCTGCCCTTCTCATCATCCATATGTGGTTTGCC
CAGATAAAAGCAATATAGTAAGATCTATCAGGCATATTCAACGTGAGTTCTTTTTTCTACCATCTTGTTGGTTGTTTGTGTTTTTCCCCAGAGA
AGAGTGAGTGATGAGGTGGCCCTGGGACATGCTAGATGGTGCAGTTCACTGGGGAGACATCCTTGGCCCCACTCAGGGTCAATATGCGCCCCAC
ACCGCTGGCTGCAACCCCACCCTGTCCTCTTCTGCTCAAAAGAGCATGCAAGGGACATTGCTAAGTGGCAATTTTGGTTGCAACCCAGTGTTCT
GTTAATTATTCACAAAAGCTAGCTCTCTTTTTAATTACCAATTGTGTGTGCGTTGCGTGTGCGTCCCTTCCCCCTTCTCTGAGCACACCTGTAT
GATGAGGCATGTACTTCTTCCTGGTGGAGAAGAACTGCAGAGATGTCTCCCAGGTTGAGCCTGCAGCCTGGCCCGGTCACCAGCACAGCACGGT
GACTTGACTGTCCTCCCTGGCTCCCTTCCCCACCCGTGGCAAGTGGCAACTTGCTTTCGCTCACACTGAACGTGGTCAACTTGCCTCCCTGTCA
CACTGTAGCACTTGAATAGGGCAATATTACATTATAGCAGAGGTTCTCAGACATTACAGTGCTTAAAAATCACCTGGGAAGCAGGCCAGGCGCA
GAGGCTCACGCCTGTAATCCCAACACTTTGGGAWGCCGAGGTGGGCGGATCATGAGGTCAGGAGTTTGACACCAGCCTGGCCAACATAGTGAAA
CCCTGTCTCTACTAAAAATACAAAAAATTAGCTCGGTGTGGTGGTGTCCGCTGTAGTCCCAGCTACTCAGGAGGCTGAGGCAGGAGAATTGCTT
GAACCCAGGAGGCAGACGTTGCAGTGAGTGGAGATCGTGCCATTGCACTCCAGCTGGGGTGACAGAATAAGACTCCGTCTCAAAAAAAAAAAAA
AATCACCTAGGAAGCTGTTTAAAATTTACCCTTCTTGTCCGTATGCCCTATTTGCTGGGTCTGAGGTGGGCCCAGAACCCTGCTTTCCAGAAGG
GAGCCTGAGGGTGGGGTGCCCTGAAGACCACACTCAGGAAGAACCGGACATGTGAGCTTTCATGAGCCAGAGTCCTGCCAAGAACTAGAATCTG
CAGGTGGCTTTGGCCAGTCCCACTTAGAGGCAAGAAGACGTGAGGATAGTAGAGAACCTGGAAATCACGCAGTCCCCAGGATGAAAGTGGAACT
CTCGGACCAGATCCTTATTCTCTTACTTTCGTGAGCCATTTCTGCCTACCTGTTGTCAGGGAGGCAGGAGGTTCATTTTTCTCTCACATGGTGC
CTGACATAATGACTTGCACGTGATAGATGCTCAACAAGCATATTGAATGAATCAATCAGTTAGATTGTAAATTAAATGCACCAGATGGGCTGGT
TGTTTATTTATAACTACACAGTTAACATTTATATTAACATAATGTTAACACCAAAGCGTAATATCTGTTTTCTGTGTTAATTATGGCAAGGTGG
GCATAGAGAAGAGATTTCTGAGTGTCTTTTGCAGAGCTTGAAAATGTCTATGTGTTGGTTGAGATAGATCAGCCTTTACTTGATGCACTTTCAA
TCTTTTAAGTTCTGAAGGCACAGCAAGAGAATTTGGTGTTGAAGGTTTGGATAATGTTTTCAAGTATTTCAATATCCCTCTATTTCTAAACATT
AGTAAAAATCATGCCTCATGCTACCATCCTTAGCTTCACTTTGTGTTTCTGAATTGTGTATCTCTATATACTAAGAAGTCCCCCATGTATGCCT
GCAAATATGGGAGAGTCAACCGCTCAGCAGAATGTGCACAATGTAAGGCTGTGCCTTGGAGACCAGGCACCCTGTGCAGTGTGATGCACAGGCA
GGCCTCAGGATGGCGCCGTGGAGGGCAAGTCATACCTACTGACGAAGCCAGTGGAGTGGATGCAAGGCCAACTCAGGCCCTGCAGCTGGGGTTC
TGTTCCTCAGTGTTGAGGCCACAGGTCTGTGTCCACATGTTTTCTTTTGTACAGTGGGATTCTGCCGCACAAGGCAGTGCCCCCAGCCCTTTGC
AGATGAGTCAAACATGCTTGTTTGCAGAGCCTGGTGCTGGGTGGGGTGGTCCCATCACATCACCTCTTCCTTGGTCATTTCTCTGTAATTAATC
AGCCAGTCCCTGACCAAACCAGCAAGATCAATTCTCCCTCTGGTTGGACTCATTCCTCTTTTTTTTTTTTTTTTTTTTTTGAGATGCAGTCTCG
CTCTGTCGCCCAGGCTCGAGTGCAGTGGCATGATTTCTGCTCACTGCAAACTCCGCCTCCCAGGTTCATGCCATTCTCCTGCCTCAGCCTCCCA
AGTAGCTGGGACTACAGGCGCCCACCACCACCCCTGGCTAATTTTTTGTATTTTTAGTAGAGACCGGGTTTCACCCTCTTAGCCAGGATGGTCT
CAATCTCCTGACCTTGTGATCCACCCGCCTCAGCCTCCCAAAGTGCTGGGATTACAAGCGTGAGCCACCACACCCGGCCTCCTCTTTCTTATGA
AAATTAACCCACAGATGAAGTTTCCTTTCACCCAAGTCTTGACAATTTTCTCAGCTTCAAGCTGCAGAGGAAATTCCTAGGCACATCTTAACAG
GGCTGCTTTGCATTGAGGGGGCTGTGTGGTTTGAGCGTGATAAGCCTGGATATCTTTCTGCACTATGCTGATTTTTGTTCCCTTAAATGGTATG
GATTTGGCAACAATTGTTTGCAGGTGATCTTTTCCCAGAGAACCACTTATTTCCCCCACTGTCTCTGTATGATAGGAGGGCTCTAATGGCCCAG
GGATGTGAAAGTGAGACACCTTCAATCGCTAAGGACTGCTGGAAATGTGAACTACAGGAAGTTGAGGGGGCTGGAGGGGAGGAGGCAGCACCTG
CCGGAGCCATGCTTCAGTGGGTCTCAAGAAAAGCAGAAGCCTGGAATCTCAGGGCTGAGGCCCCTTGATAACTAGGACAGATGGGTTAATAAAA
AGGGATACAGAGACATAGGCTACCTCTTCTGGTTCAATGCCAAGCTAGAAAATCCTGAAATGAACACAGATTTATGAGATAGGAGTAATATATT
TAAGAACACAGTCTTACATAGACATAACTATTTTCCCAAAACATCCAAGGTAAATTTATATATCTTTATGGATGAGGTTGGGTCTTTTCAGGGA
AGGTTGGGGAGACGGAAGGGAAATTACTTATTATCAGTCCTCATGATTCATGGATTCCATATCTCCGCATTCATCTATTCATTTAAATCTGTTT
GCAACCCCAAAATCAATACTCACAGCACTTTTGCAGTCATTTGTGACGTGCACAAAGCAGTGAAAAATTTAAGTCACCCAACACATACGTTGAG
GTCGCACAAGGTGACACTCTGCTTTCTTGTTTTAGCTCTTATAAACACATTTTCTTTTCTCTTGGCCCATTTAGTCCATGGTTTTTGCATTTTT
GTGCTTTTCTGGGGTGATTTTGCTATTTAAAAATGGCCCCAAACACAATGCTAAAGTACTTACTGTCTGGTGTCTCTAAGTGCAAGAAGGTTGT
GATGTGCTTTACAGAGAAAATACGTGTGTTAGGGAAGCTACTTTCAGGCATGAGTTATTGTGCTGTTGACCATGAGTTCAAGGTTAATGAATCA
ACAATATATATGAAATAAATATCTTTAAATAGAAATACACATAAAACAAGGTTCTGTATTGATTGATTGACAAAAAAGTTGTAACCAGAGGATC
ACAAAAACCTAACACCATATTTCCCCAGGAGCAACTGTTCAGGATTTGCAAATTCAGCTTTCATGGTGATTTTATAGAGCATAACTATTGTGAA
TAACAAGAAGCAACTGTATTTTGTTTCATGCATAAGATGGAAAGAGAACAGAACCAGAAGTATGATATCGATGAAATGGAGAGAGGAGAAAGAA
AAGAAAGAAATGACACTATGAAGATTTATTAGTTTATTAGTTACTAGTGATAATAAATTAATCAGAACTTTGGCCTCTGCCTTTGATCCTGGTT
CCCATAATCTCTAAGTGCCAGGCTCAGATAATGTGGCCCTTGCAGGGTTTGGGCAGCTAGTCCTCTAACCATTTTCTACAGGTAAACGTGGACA
TGAAAGAAGCCAGGGTGAGGCAGGCAGCTTCCAGAAGCACACACTGGGCTCAGCTCCTTCCTTCCTAACCTCTATTTTAGCTCCACGTACCTCT
TCAATACCAGAAAGTCTTCTTCTGATTCTGCCAGAGCCCAGCTCCTAGAACCTAGCTCATACACTCACCAGCCTTTTTTGTCAACAATTCATTC
AAATATTTATTTACTTAAATATCCATTAAGCACTGTTGCTTCTCTCGCCCAACTCCATTGCACATGCTATATCAGTTATCTGTTGCTACATAAC
AGATCACTCTAAACTTAGTGGTTTAAAACAACAATAATTACTTATTATTGCTCATAATTTCTGTGGGCCAAGCATTTGAGATAGCTGGGTAGGC
TCAGGCCCTCTGTAGGGTTGTAGTCAGGTGTGGGCCAGGGCTACAGTCTCATCTGAAGGCTTGATAGAGGCTGGAAGATACTATTCCAAGGTGG
CTGCTCATACGGCTGGTCACTTACTGCTGGCTATTGGCTAGAGGCCTCAGTTCCTTACCACATGAGCCTCCCCAAAGAGCTACTTGAGCATCTT
TCCAATGAGGCATCTGGTTTCCCCAGAGTGAGCAATCCAAAAGCTGAGGAAAAGTGTTAAGGGCTTTCATGAGCTAGCTTCAGAGACCCAACAT
TGTCACTCTGCAGTCAGCCACTCTGTGTGCAAGGGATGGGAGTACCAGGAAGTGAGGATCACTGGGCACCATCTTGGAGGCTGCCTGCCATGTA
TACATTTTAACTCTCAAACAAAATTTGAAGACTGAAGACCCATACTTAAAGTAGCCTCTGTTCCAGGCAGTAGAGAACAAAATGTAAACGTACT
TACACTAATGGAGTGTCTATTCTAGTGGCTTTGGGGAATATAGACAAAAAAACAGAACTAAAACTCTAAGGTGGGACAGGGAGCTGGGAGTGTT
AGTGTCAGGTGGGCCTATAGAGCTCAGCCCCCCTTCATCATGTTGGCATTCATGCTGGCTGTTCCTCTGTAGGGGATGAAATTTTCCCCTGCCA
GAAGAATGGGCTCTGGACAGCTTGTTCAGCTGCTTGCTCAGGTGTGAGCATCTGTGCCTAATCTTCCAGTCAGACTGCCCTAGAAACATCATTT
CTTAATTAGCTGAAAGGGTATCTGAAACATTGTACTTATGGTGGCAAGCATGGATCTATTGCTCTTCATCTATAAAGTTGCTGCCTGATAAGGT
AGAACTACACAAATGATAGTTTCCCAACTAAATGCATTTTAAAGGGCAAAGGTTGTATAGTCAGCTTTAGTCCTGGCATAGGGGAAATGGACTA
TGGAAGTCTAGTTGGAAGAGAAGATTGAAACATGCCAGTAAGTGCAAAAGGATACAGTATAATTTAAATAAAACACATGGAAGACATGAGGATC
CTAGTGGGATATGATGGGCTCATCCATTTCTGCAGGCTCCAGGAGGCTGGCTGGCAGGGCTTCTTTGGTGTGGGGCAGAAAGAATCAAAGCCTG
TAGAATAAATCTGACTCCGTTCTAGATTTAACTCCTCATGGTGTATCACGTGCAAGGTGAAGCCTGACTGGCACTAGGGAGGATTTTGAGGTAA
GGAAGCATTGTCTTTGGTTCAGTCCAAGCCCTCACTGACTTTCCACCATCTTCAGGTGGGGGTGGGCATGTCCGTCTGTCTCCCAGCCTCATGC
ACACACATGTGTGCACACACATGCACACACATGCATCCCTTCTTATGAAGTGTGGGTCTGGCTGCCCGTGCTTTTTCCTTCATCTCACCATGAC
TTATCCTTCCCTCTTCTATTCAAAGTTCCCACTTGAGAGGGTCCAGTTGCCCTGGGCACCCCTCCACACTCCCCACTCATGACTGAAATTAGTT
ACAGTGGCTTTGGTATACTGTCATCCCCTTTCACCAGTGAAGAACTCTATTGCTATAGTGCCCAGGTCACACAAAGCTGGGCCGGGTCGCCAGC
GTTCCCGATTCTCACCTCTGTGTCCCTGGGTTTCCTGCTCTCTGGCCCAGTGGAACCACCTCCACGGGGTACCATTCCTTTCCAGCCTTGTCTT
TTGTTCATTGGCAATGATGTTAACAAATTAAATAGGGGAATATTTGTTCATCTAATTTATTGGTAAAAAGGCTAGAACAAGCTTATCCAACCCA
TGACCCATAGGCCACATGTGGTCCAGGATAGCTATGAATGTGGCCCAACTAAAATTTGTAAGCTTTCTTAGAACATTATGAGATTTCTTTCCCT
TCTTTTCTGTAGTTCATCAGCTATCATTAGTATTAGTATATTTTATATGTGGCCCAAGACAATCCTTCTTTTATCAGTGTGGCCCAGGGAAGCC
AAAAGATTGGACACCCCTGGGCTAGAGCAATAAAATGGGCACATCACATTTGTGTCCACAACAGCTGACACAGTGGTTTCCAGTCAGGGGTAAG
TTACCCTTAGGGAACACTTGGCAATATCTGGAGACGATGTTTGGCTGTCATGATTGGGGAATGGGGTGCTACTGGCATCTAGTGGGGAGAGGCC
AGGGATGCTGCTCAATAGTCTGTACTAGATGAGACAGCCCCCGACCCTACACACATAACAGAGAAGGATCCAGCCCAAATGTCAAGAGTGCCAA
GGTTGAGTAACCCCGAGCTAATGTGATGAATGGTGCCAGATGGAAATGGGTGGGACCATCATAAGGAGGGGGAACAGGGTAAAGGCAACCATCT
TAATTTGTAAATTGAGTGTGGGGGATGTGTTTTGACCACATGCTTTTGAAAAGGGAAGCTGTTCATTCTCCAGAAGCCCAGCGGAGATGTTGGA
TGGATGGGGCCACCCATAGCTGCATTCATGGACAGCTGGACACGGGCCCAGGAAATCTTGGCAGCGTCACTGGGGCCGGTGCACTTTTAAGAGG
AGCTTGGGTGATATGAAATTGTTTGGACAAAATGAGTGAGAGGTCTTGAAATAATGTCAAGGCAGGAAGAATGCATTGACTTGGAGTGGCTGCC
AAGAGCAAGCATTTGCAGGTTGTTTTGGGGAAGCAGAACTGGCTGTGTTCTCTTTGTCCTGTGCACAGTTGGAAGACGGGAAATGGAGGAGGAG
AGATGGGGAAGGAGAGATGGGGAATCAGATAAGAAAGTGTTTTCCAACAGAAGCATCGGCACACATTGGAGTGAGTTCCCTTCCCTTAAGAGGC
CAGGAGCTTATGTAGGAACCAAGCTCCATCTGAAGCAGCCACAGGGCTGGAGCATCTCGCAGATTAGTTGCCAGGGTTCTCTGATTCTGGCCCT
GTTAGCCTCCATCTGGACACACAGCAATTGCATGTTTAGCATTTTTATTACAAAAGCAACATACAATTTTGACCCTTGAACGTTACAGGTTTGA
ACCATGTGGGTTCACTTATATGCGGATTTTTTTTCAACAAAAATATTGGAAAAAAGTTTTGAAGGTTTTTGACAATTTTAAAAACTTGCAGATG
AACTCCATAGCCCAGAAATATAAAAAATGTTGGCCGGGCGCTGTGGCTCACGCCTCTAATCCCAGCACTTTGGGAGGCTGAGGAGGGCAGATCA
CGAGGTCAGGAGATCGAGATCATCCTGGCTAACAAGGTGAAACCCCGTCTCTACTAAACATACAAAAGTTAGCCAGGCGTGGTGGTGGGCACCT
GTAATCCCAGCTACTTGGGAGGCTGAGGCAGGAGAACAGCGTGAACTGGGGAGGCGGAGCTTGCAGTGAGCCGAGATTGTGCCACTGCACTCCA
GCCTGGGCAACAGAGCGAGACTTCATCTCAAAAAAAAAAAAAAAAAGTTAAGAAAAAGTTAAGTGTATATTGAATGCACAAAATATATGTAGTC
TATTTTTTCATTTACTACCATAAAATGTGTACAACTCTATTATTAAAATTAAAATTTATCAAAACTTACACATAAATACTTATATGCCATTCAC
AGTCGAGGAAAATGTAAATAAATATAAAGATGCAGTATTAAATCATAATTGCATAAAATTAACTGCAGTACACACTGTACTGCTGTAATAATTT
CATAGCCACTTCCTGTTGCTATTGTGATGAGCTCGAGAGTTCCAAGTACCTGCCTAAATCACTGTGTGATGCTCATCATCTCTGTGTGAGCAGT
TCATCTCTCCAGTAAATTGCATATTGCAGTAAAAAGTGATCTTTAATAAGTGATCTCTTGCAGTTCTCAAGTATTTTTCATAATGTTTAGTGCA
ATACCGTACAACCTGAATAACACCATGGGTCCCATGTGAAGGGTCACAGTGAGGCTGGAAGTGCTCCCAAGAAGTCATGACATTATAAGAAAAA
GCTGAATTGCTTGATGAGGATTGTAGATGGAGGACTGTAGCCATGGTTGCCTGCCATTTCACATGGATGAGTCATCTTGTAAACAGATGACAGT
AAATTTATGGTATTGATAAATACAGTACAGTATTGTAAACATATATTCTATTCCTTATGATTTTCTTAATGACATTTTCTTCTCTAGCTTACCT
CACTATAAGAATATAGTATATGATACATATAACATGCAAAATATGTGTTAATCAGTTATTTATGTTATAGGTAAGCCTTCTGGTCAACAGTAGA
CTATTAGTTAAGTTTTGGGGGAGTCAAAAGTTACACATGAATTTTTACTACAGGGTGGGTGGTCAGCATCCCCACATTGTTCAAGGGTCAGTTG
TATATTCACTGTGGAAATCCTAAAAAGCAAAGAGCAACATGTTTCCATCAAGCAGGATTTTGCCAGCCTCTGGTTAAACCCTGAAGCCTGAGCA
AGGCAGTGAAATCTCCAGACCTTTGGGGCTCACATTTTAGGGAAAGGGCAGGTTTGTGTTGATGCTACAAAGGTAATAGATGCTTTTGAGAAGT
TAACTATGTGCGGGGGTGGCCAAGGTAGGCCGAAGCAGCACCTGAGACTGGATCATCATGATGCAACTCTCTGAGTAAAGGCCTGAGAAGGAGG
AAGCCAAGCAGGAGGCAGGAGAGCCCTCAACCTGGAGCCAGAAGCACAGTGTGGTGGAGATAGTGAGCAAGGTGAGGTTGCAGGTCTCGGGCCT
GGTCAAGGAGAGCCTTGTGGAGGAGCAATGAAGATTTGCGATGTGATGTGGATGGAGAGGTTCCTTGTGAGCCTCACTCCACCTTCAGGGTAGG
GAATTGTCAGTAAGGAAAGGAAGGACCAGGTGAGACTTCCAATACCTGAGAGATGGCGGTGGCTTCCACGAGGGCAGCCTCAGGAGCTATGGGG
AGACATGATGGCTTGGCAATATATTTTAAAGAAAAGCTACTCAGAGGACCTGGAGACCAGCTCATCTAACCTGCTTCAAGATTCTCCATCCCTG
TGACTGCATCAGATGGAGCTCAGCTCCTGCACAAGCTCATGGCTTCCCTGCATCACTGTGAGTGGCCAATGCTTCTGGTAGAAAGCACATTCCT
TTCTGACTTGGTGAGAGGGAAGACTCCTGAAAGCAGCCAGGGTCTCATCCTCAGCAACTGTGGTGCTCAATGTCATTTCCTCAATTAGGAGAGA
CTGAGGGAGGAAGAGATTTGCTGAGGGAGTGGCAGGAGGAGTCAAAAGCCTCATCTGGAGTATGTGGAGGTCAACTTGTCTGTTACACATCCAA
GGGGGGACGTCAGATAAGCAGACATGCAGATCAGGAGCTCAGTGGAGAGAAATAAATACCCATTAACCAACAAATATTTTTGATGACTTATTCT
GCACTAGGAGCTGTTCCAGGCATGGTGATATGGCAGTGAACAAGGTCATCCTATTCTCACCTCCCAGAGCTGGCCCTCTGGTGGGAAGAACAAG
ACAATACTCAAATTCAACAGTGAATCATGATTTAAAGGGCTGCTGCCTTATGGAGATGTGCTGCAGAGAAAAATTAGGCAGGGAAGGGAGGTAT
GCGGCCCAGGACATTACAGAAGATTATTTCATGTCAAAAAACATTTTTCTACCACTAAGTGCACATTTAACTTGTGTCACAAAAAAGGTCTCAA
AAGAGCAAGGGATTTGCAGTGTTTTCAGGAGCTCACCAGACACCTGAAAACCCTCCTTGCTGAACCACTACCTGCCCAGGTGTTCACTGAGGTG
CCAGACCCAGCAGGCTGAGGGGTACAGGTGGAGTTAAGGAGGAGCTAAGTGGCCTGGTTTGTTTCTCAGTTTCGTGCTTTGGAATGAAGTAGTG
TCACACATGGAAAAAAATAACTGGGAATGTTGAATTAAGAAAAAATAGGGAGCAAGTTCTAAACACTATTTGGAAGAAAATGATCCCTGGGAAT
GCTAAAGAGAATTTGAGCCATGAGCTGTTCCTGTAGTCAGAGTTAAGCATTGTGAGTTGGCAAAAGCATCAGGCGGGAAGGACTGAGTCTGTGT
GTGCAGGAGGAATGCCTGCAGGGGAAAGTCACGGGCTCCGTCCCTGTCTCAGTTGGTGGGGGTGGCAGAGATGCCACAGCCGTGGCCAAGACTA
CGCTGGGTGAAAAGTGAGACTCTCTGGATTTGCCATACTGACTGAAAGCTGATATCTGAAAAGTGGAGCTGAGAACAGCAGCCTGGGCCACTGT
GGGCAGTGACTGGAATGGAGATGGCCATTTCCTGCCAAGGTGGCCTGAGAAAGAGGAGGTTGGAGACCAGGACAAGGCCCCGGGTGGGTGCCGG
TGGGTGCCAGTCCTGAGAAGGTATGCACAGGAACACCATGGACATTGTTTATTCCCCCAATTAAGTAGCCCAAAAATGTGCCATAAGCTGTCCT
TGCAGTGAACCAGTGATTCTGCCCAAACCATCACCACCAACATACCCAGGTCAACTCCGGCACAGGAAGTCACATGGCCAGAAAAGGGCCATCA
GCCACATCGGTGCTGACACTGAGTGCAGCACATTCTTCTGCCACCTGCTTGCGAACATATCTGCAATGCACCATCAAAGCCACACAGAGTGTCC
CTGGCGTGTGCCTGGAGGTTGCTCCGCCTCTGCAGATGCTCCCCAAGACCCGACCACAGCCTGTCTCACTTCCTTTCCATTCACTTCAATATGG
GATTCATGCCCAAGTGCCAGCACCGATGTAATGATTAGTGACAAGCCAATGAATTTTTAAAATAGTAGCTATGTTAAGATTTATATGAATTAAA
AAGTATTTGCTCTCATTTTATTTAAAATTTTGTTCCTACAAAGTTACTGTCTCAGTTTGAGCTCATGGTGCAGTCTGCTGTTCTGCAACTACAT
AAAAAGTAACCTGGGCCCTCCAGAGGCGACACAAGCATCGGGGCCAGGTACACAGTGACAGGGGTATTTGAGCTGGGTCTGTAAGGATGACTGA
GATGGCTGGGAGGAAGAGCTGCACGCCTCAGCAGAAAGCACACGTGGTGAGAACAAGAAGGGAAAGCCACAGCATCCCGGTGCAGTCCAGTGTG
GTCTGTGGACTGGGCATGTTGGAATAGGCAGGAAGGGCTGATGTGCGCTTTGAGGGAGGACCGGGCAGCTGGAGAGGGAGGCGTCAGGAAGCAG
GAGGGCAGAAGGTGAGGAGTGAAGGGCAGCAGTGGAAAGGACAGGGTTACGCCAAGCAGTGGTCATGGATATGGGCAGTAAGGAACATGCACCA
AGGGCGCCTGGAAAACGAACCTTAGAGAACGCAAGTCCTGCGGAGGACTCCTGGGTTCCTGGCTGGGACACCGCCTGGGCAGGGAAGGCAGAGA
AGATGGAGAACCTGGTCTCAGGTGGCATCAGAACCCAGCATCCGCATCACCAGGATTGCAGGAGCAGCAGCGTCTCAGCCCCTGGGTGTGTCAG
AGCCCCCAGGCCACGTGGAAGTATGAGACGTGCTGGGCTGCAGGGGAAACAATGGAAATGAGGTTGGAGGCCCGAGAAGACCCACTGCAGGAAA
AGGGTGGAGTGGGGGAAAAGCAGGCTGGGGGCAGTGGCTGGCCTGCAACAAAAGCATTGTAGAATGCAGGCGTGAGCCACCGCGCCCGGCCAAG
GCGGGCAGATCATGAGGTCAGGAGATCGCGACCATCCTGGCTAATGCGGTGAAACCCCGTCTCTTCTAAAAAAAAAAAAAAAAAAAAAACTGTA
GAAAGGGGAAAGCAGTCCAAAGAGAAGTATTTCTTCCAAGAGACTCATCACCACACTGTGTTTCCAGAGATGTCTTTCTGTTAACAGCATTCTT
AGACTCAAAAGTAAATGTAGATATACTTTAAAAAACAAAAACACCTTGCTAAGAGATGAATTTTTAGAAACTTGTTGGACAAAGAAAAGTCATT
GATAGTCAACTGCTGTGAGAGGCAAGCCAGGAAATGATGATTAATACCCTCAAATTATAATAAAACCCATGCCTCATTAGGGGCTCGCCCAGGA
GTACTGACTTGTGGATAGACACCGTCTGGGGAAAACTCTGTCGCCTGTGTCAGGCTGACGCTCTTACATTTTATAGCCCCTTGTAGGATAGTGC
ATGTTGAGAAGAAGCCGCTTNNNNNNNNNNNNNNNNNNNNNNNNNNNNNNNNNNNNNNNNNNNNNNNNNNNNNNNNNNNNNNNNNNNNNNNNNN
NNNNNNNNNNNNNNNNNNNNNNNNNNNNNNNNNNNNNNNNNNNNNNNNNNNNNNNNNNNNNNNNNNNNNNNNNNNNNNNNNNNNNNNNNNNNNN
NNNNNNNNNNNNNNNNNNNNNNNNNNNNNNNNNNNNNNNNNNNNNNNNNNNNNNNNNNNNNNNNNNNNNNNNNNNNNNNNNNNNNNNNNNNNNN
NNNNNNNNNNNNNNNNNNNNNNNNNNNNNNNNNNNNNNNNNNNNNNNNNNNNNNNNNNNNNNNNNNNNNNNNNNNNNNNNNNNNNNNNNNNNNN
NNNNNNNNNNNNNNNNNNNNNNNNNNNNNNNNNNNNNNNNNNNNNNNNNNNNNNNNNNNNNNNNNNNNNNNNNNNNNNNNNNNTTTTGCTTCTG
AAATGTATTTATTTACTGCAAGCAGTGTCTCTCCTGTGTCAGATGTCCTCGTGGGCTGGGAACCGGCACTATCTCTTTAGCACGGGCCCTGCAG
ATGGGAAGTGGCGTTGCCCAGGAAGTGGTCTGGAGAAGCGGGGAGAAGACAGCCTATGGGCCCCAGGCCTCCGGAGCCAGGGAGGGTGTCACTC
TTCATGTCTCAGGCAGTGGCTTGTTGCTATCATAGCCCCGGGCTGGAGGTGGGAAGGCCTTATGGTGACCACAAGTCACAGTTCCGTGTGGGCC
CTCAACGTGGCCTCACTTCACCTCTGGGGCTCAGCACCAGGGTGTGACTGACTGCTCGAGGCAGCGTCTCGCAGCTCAGGTGGGTGAGGTGGTG
GTAGCGTCCTCCTTGGTAATATCACTGTGATGAGGAGCAAGGCTTCTCTAACATTGTCTGGACTCAGGAGGAGCAGTTGGTTTGTTCTCATGTA
GATTCTGCCTCCTGTATGCTGCTGGGACCCTGAGGGTCAGCCCAAGAGTCCTGTTTTGCAATAGCCCTTCTGTTTGCTTCTCTTTGCGGTATGT
TTATTTTTAGAATTCTTTGTCTTTCCCCACTCCCCCCAAAAAAGAATTATTTAATTTGGTCACTTCCATCAAATGCTCTGATTTTAGCTTAGTT
AGAAGGCATGCTGAAAACTGTAATGATGATGTGAACAGAAAGACAACTGTGTGTTCGGAGGGCCAAAGAGGGAAGTGCCTTTGTTCAGAGATGG
GAGGGTTTGTCTCCACTTTGAAAGGGTTTGAGTGGTTTTAGCAAACGTTCCCTGCCACGTGGGGTCCTCACCAAAGTTCTCTGTCTCTGTCTTG
CCCAGGTGGACACCTGCGCAGGTGTGTGCCCTCCGGCCCCTGAAGCATGGCCAGCAGCCGCATGGCTGACAGCGCCAACCACCTGCCCTTCTTT
TTCGGCAACATCACCCGGGAGGAGGCAGAAGATTACCTGGTCCAGGGGGGCATGAGTGATGGGCTTTATTTGCTGCGCCAGAGCCGCAACTACC
TGGGTGGCTTCGCCCTGTCCGTGGCCCACGGGAGGAAGGCACACCACTACACCATCGAGCGGGAGCTGAATGGCACCTACGCCATCGCCGGTGG
CAGGACCCATGCCAGCCCCGCCGACCTCTGCCACTACCACTCCCAGGAGTCTGATGGCCTGGTCTGCCTCCTCAAGAAGCCCTTCAACCGGCCC
CAAGGGGTGCAGCCCAAGACTGGGCCCTTTGAGGATTTGAAGGAAAACCTCATCAGGGAATATGTGAAGCAGACATGGAACCTGCAGGTGGGCC
ACAGCTGGTCCTGCTCCCTGGGCCCAGGGGGCCCTGTGACCCCACACAGACTTCCTGGCTACATGCAACACATGTGCCTATGTGCCCTGTGTGC
CCAAATAACACAACCATCTCCTTAAGCATCAATTTTGGCCAAAAAATGCCTCTCTCTGATAAGAGCCTTTCCTCTTTCACAGCCACAGCTGAGA
GGGTGGGTCCCTTTGTGCCAGCAGTGTGGGTTTCTCCACAGCAGGGAACCACTGTTACCCAGTGCAAGGACGGCCTTTTCACAGAGGCATTGAT
AGGTGTTGATTGGTTTCTGTTTATCTGACAAGGTCCTACCATACACACTGATAGGCACTTGATTTTATGGCTTCCTAATATCTCTTGCAGAACT
TTCTGTGTCAACACTCATATAGTTGCATCACCCGTTCTTTGGCTATCTGGTATCACCTGCTATGCACCACAATTTATTTAACTAGTACCTATTG
ATGGACACATTTGCTGTTTATGAATAAACGCTGCTAACAACATTGCTCTAGACCTATCGTATACTACACTTGTATGCAACGTCTGCAGGATAAA
CTTTGAAAGGGTTGGGATTGCCACAGCAAAGGATATGTGTGTTTATTTTTTTATTTTTTATTTTTTTGAGACAGAGTCTTGCTCTGTCACCCAG
GCTGGAGTGCAGTGGCATGATCTCAGCTCAATGCAACCTCTGGCTCCAAGGTTCAAGCGATTCTACTGCCTCAGCCTCCCAAGTAGCTGGGATT
ACAGGCATGTGCCACCACACCTGGCTAATTTTTGTATTTTTAGTAGAGATGGGGTTTCACCATGCTGGCCAGGCTGGTCTCGAACTCCTGACCT
CAAGTGAACCATCCTCCTTGGCCTCCCAAAATACTGGGATTATAACCGTGAGCCACCGTGCCCGGCCATGTTATTTTTATTTATACACTTGAAA
GTACTTAAGTAATGTGTAAAGGTCTTTCTGGTTTTATTTACTGAATGAATGAGTGAATAAGTTTTGATCCTGTTTTACCATGCCAGGACTCGAG
ATAGATTGGAAATGCCTTCTGCATCATTTTCATTTTTCCTCGGTATGGTTTACTCTGCTTTGCTCTCCATGTGGCAGGGTCAGGCTCTGGAGCA
GGCCATCATCAGTCAGAAGCCTCAGCTGGAGAAGCTGATCGCTACCACAGCCCATGAAAAAATGCCTTGGTTCCATGGAAAAATCTCTCGGGAA
GAATCTGAGCAAATTGTCCTGATAGGATCAAAGACAAATGGAAAGTTCCTGTGAGTATCGTGCCTTCCCCCTCACCTCCTGCCACCAGGCCTGT
GTGGACAATTGGGAATAATTCAGCTTCCTTGTGACTGGCCCCACATGACCCTGGGAAGAGGCCATGCATTGCCATTTGACAACATGCATGCTGG
CCTGTTCTAAAGACATTTCTAACCAAAGCTATCACTTGTGACCCAGTGTTTATTTTGCCCAGTCTAACTCTAAAATGAACACTCTTTTTGGGCA
CCGAGGGATGTAATATTTAAAGAAAATGTGATTCAGCCCCATATTCTCCTTTTAATGGCAAATTATAGGTTGCATAGCACATTCTGTGGTTATC
CAACTAAAATTAAAATACTGCAGTTTTTTTACTCAAACTACCCCCTTGATCTCAGACTTTACTTCTATTTTACATGAAACAAGATGCCAACAGG
AAAGATGTTAAGGAAAAGTTCCTGGGAGTAGCATCCATGAGTGCTGAGTGCAGGTTTGAACACTTCAGCCTTAGGCCCACAGTCATTAGAGGGT
CTGTCTGAATCCTGGGTTCTGTTTGCTATCCTCAGTGGTTCAGTGTAAATCTAAATTGTAGAAGGTTCTGAGATACAGGCCAACGTGGTCAGTC
AGTTGTCCAGAGAAGGTAAAGAACTGTCTTTGGGAGGTGTCAACCTTGTTCCCTCGAGGGGGTCTGGTCAAGGTGGCTCAGTGGGGCAGTTGTC
CCTGGGGGAAATGATCCCCTGGTCACCTCTCAGTGTCCCTACAGAGATGCTTACCTTGGAAACATAACCAGAAACAGCGATGCAGCCTCATGGT
TTGGCAATTGGTGAATCCCCAGCCGACTTCGTAAACTTTTCCTAGATTTAGAAGCGTTTTCTCTGCCTGGTCATCTATTCAAAGGAATTTCCTC
AGACTTCACTGTCATACCTTGTATTTTAAAAATGATCTTAGCTGAGTGCAGTGGCACGCACCTGTAGTCCCAGCTACTCCTGGCAGGAGGATCG
CTTCATCCTCACTATGATCTCACTATCGTTTGAGGCTAGTTTGAGACCAGCCTGGGCAACATAGTGAGGCCCTGTCTCAAAAAAAGAAAAAAAG
AAAAGAAAAATTGACCACAATACTCTTAAAAAAAAAAAAAAAAAAGGAAGAAGGAAGAGTGGCCCAGGTTGCCACGCGGCAGTGCCTAGAGTGA
TGGTCTTTAGTGGGATGCAGCCCCAGCCAGCAGCAGAATGCTGTGGGGAGGGAAGACATTGCCCCTCAGTGGAGGCACCTATGGCTATTTTTGC
TGAGGTTTGGCTTCTTACCATCTCAGCAATAATTTCCAACATGAATGTCATGGGACCATGCACATAGCATCTTGGCATGTGAAGTCAACCCAAA
ATAGCATAATCCACACGATGAGGCTGGCCAACTTCTGCTGGTTAAGAAGCCTGCTCATAGCCTCTTTGGCCACGAAGCTGTTTCTTTTTTCGGA
GTTGTCTATTCCCGAAAACAGCAGTTGCATCCTTCATGGCCATGACTTTTGCTCTCTCCTTCCTTTCTGGGAGATGTATATAAACCCCATGCAG
AAGGCTGGGAGGTGCAGCTCTTGTTTGATGAACATGCCTTGTTCCCTATCTGCCCTGTACAGACTGACATCTCATGTGTCCTCACAGCACATGT
CCCTGACACTGAGGCTTATGGTTTATGCAAGAGAGTCTCAAACTTGCCGTGCTTCCTATTCAGCTGGTGTCAGAGCTAACCAGGCATGGGCCTG
TGAGAGAGGGGCCTGGGCTTCTGTGTTTTCATCCAGCACCCTCTCCTTAGTTGTCTTCTTCTCCTGGGTTCTTATTCCTGGGTTCTTATTCTCC
TGGGTTCTTATTCCACTTTATATTGCAGTTGTCCAGTTATCACCCCATAATTGCCAACCTCCCAGATAATAGCTTCCAAGGCTTTCTCCCTTGT
GTTCTCCACAGCTCAGTCCCACACCTTCCCGTGCTCCCTCCACACCTGCAGGGCTCACCTGTGGACTGATGGTGCATAGCACCCCATGCCCAGG
CCTGGCATCAGGCAGGGTATTAGTGACAGGGAAGAGCAGAGCTAAGCCTGGGCAGCAAGACCCAGCTTCAGAACCCATGTTCCCATGATGGTTG
TAGAACCTTAGACTAAGGGAAACTTTCCCCAGGCTCTGCTCCTCTGGGTCTGTGACTGTCTTGAGGATTCAATGAAAATACACACCACGTACAC
CGCACAGCACATGTGGTCATCACTGATGTAGCTTTTCTTCTCTCTTCAGTGCTCTTTCTCCATCATGAGCACCAGGAAAGTCTCCTTGTCAGGG
TATCTTATCGTGTTTTTAACAGAGAAAGTGTGAGGAAACACCTTGGAGGGGTTTGCCACCTGGCAATTTCACCTCTTGACAACCTTTCATCTCC
TACAGAACCTGGCTGGGGTTCTTGGCTGTTGCTGGGTGTGTAAACCTTCCTTGTTGCACTGTAGTGGGCGTGTTATACTGTGAGTGTTTGAATA
TGGTTGTGTATGCTTGTGGAGAGCAGGGAGAGTTTGCCAGCATACTGGATACAGTCCAAGTCTACCATGCTTCCAGCACGGGGCAGGGTCTGCA
TCCCTGAATACAACGTCTCCCAAGTCCAGGTTGCCTAGACCTTGGTCCAGATTCTTTCATCTTTAGAAGTGTTTGTTTGTGTGTTTCTTTCATG
GGAAATAGAGCTAAAAGGCTCCAGGGAACTCTTGTAAACCATCACCAGATCCTGTGGCTGCCCTCTCAGTGTGAGTGCGTCAGCTCCTGATTCA
CTGTGGGAGTCTGTCCTATATTCCCCTGTTGGGTCAGGCCAACGTTGCAGGAAGTCCCAGACCTGGTTTTGAATCATCCAAATCTGCCCTACTT
GCAGATACTTTTATAAAATGCACATTATTTGCAACGAATAGCCACAGCACAAGGTCTTTGGAGTCAGAACTAGATTCCAGTCACTGCTGGATGT
CCTCACTGAGCCAGCTGCTGTTTTTTTCCCACTGTTCTTCTCGGGCCTTCATTCAGATTCTCCTAACGAATGTGCTCATGTCTACTTTCCAATC
ATCATGTCAGCTAATCCATCCATGGACCAACATTACTGGAGTCTGTAGTTGCATGAAGCACTAAGTGCCAGGCACCATTCTGGACTTTGGGAAG
GGAGAAGTGAATCAGCAAGCACCTGCCCTCATGGACCCTGCATTTCAGTGGGAGAAAAGACGCTGAACAATAGGAAAGAACTGCATTTAAGTAA
GGGCGTAGAGCACACTGGGGTATGGATGCTGGGTCTTCTTTCTGCTGCGTGGGGAGGATGGACCTTGCTGTGAGGGAGGCCATTGAGAAGAGGC
CTGAAGGCAGCGAGGAACCATCCCCACCCAGGGAATGGCAAATTCGAATGCCCTGTGGCAGGAGCGTGCCTGGGGAGCAGGGCACCCACAGAGG
CCAGTGTCACTGGCAGAGAGTCAGTGGAGAAGGGTGGAGTTGAGGGCCAGGTTGCAGAGCACTCACGGCACTGGGAGGACCCTGCTTTGGGCAA
GTTCGGGGGGCTGTCTTTAGGAAGCAAAGGGCCACGGCCAGCTGACATTCGGTGGGCTCTGCCTGGCTGCCACATCATCGGTTTGCTGTGGGCA
GTTGTGCCTGTACATATACTTGCAAACCAAATGTGTTCATTTTTTTATCGTGATTTCAGGGCCTTCACTTTCTCATCCCTGAGCATCAGTCAGT
TTGTCTCCGCTCTGATCTCCTGTCCACCCCACCCACCGTGCTTTTACCTGGGTCCTGTACAGGCCTGTGGGCTGGCCCTTAAGAGGTTTTCAAT
GAATGCTTGTCACCTAAATCAATGAATTGTTTGCATCCATTCTCCATCTCCCAGCTCGTTTTTGCTTTCCACTTCCTGACATCTAGTAATACCA
CTGTAGTTCTGTATGGGGGCAGCTCCACACCTGTCTATGTTGGGGAGGGAATGGGGATTCTTGCACCTCTTTCTACCTCCTCTTAAATCATTAC
TGATGGACAGATGCAGGGACACAGCAATAGATATAGAAATATAAAAACATGACACTGCGCACTCTATGGTTTGTAAGATTCACTTTCTCTGGGT
AGGAGGCAGTGTGCCCTGTTAACAACATACCATTCGGGTTGTCTGGCCTCAAATGCTGGCTCCACCTTATCACCAGCTATGGGACCTTGAGCAA
GTTACTCAGTGGTCTGTTTCCTTCATTTCTTTGTCTGTAAAATGGCTTTAATGTCATCTCTGACTCTTAGAGTCATTGAGGGTTATAGAGTATC
ATAAACCCAAGGCCTCCTGCACGCTGCTTGGCACCGAACGAAGCAGCTTCACCCCACTCCTGCAGTGGCCTGGACCACACTTGGATACATCAGT
AACATACACTGAAGGTCAGGTCCTCCATCCAAACTCTTTCCAWCCCTGCATCACAGGTGTACCATGACCTCTGCAGGTGAGTCATTCTTCTGCA
GGTGAGAAAACCAGGCAGGTCCCCCTTATCCTTCCCTTCTCTTCTTCAGTCTGCAGTAGGTGTGTTTATTTCCACTCTGTCGCTATGAATAGAT
AGAGTGAGAGTCACTGGCCATAAAAGGATTCACACTAGGCTTTTGCTTTTATGAAGTGACAGACTTAAATAAAGAATAATTATTTCGGCCGGGC
ATGGTGGCTCATGCCTGTAATCCCAGCACTTTGGGAGGCTGAGGCGGGCAATCACAAGGTCTAGAGATCAAGACCATCCTGGCCAACATGGTGA
AACCCCATCTCTACTAACAGTATAAAAATTAGCTGAGTATAGTGGTGTGTGCCTGTAGTCCCAGCTACTTGGGAGGCTGAGGCAGGAGAATCTC
TTGAACCCAGGAGGCGGAGGTTGCAGTGAGCCAAGATTGTGCCACTGCACTCCAGCCTGGGCAACAGAGCAAGACTCCATCTCAAAAAATATAT
ATATTATTATTATTATTATTTCACAGAGGGGGTTGGAAGTTTATTTTTGCATTGCAAGCCATAAACTAATCAAGAGGATTTTACTAGTTTGGTG
GATAATATGGGTAAACAAAATCCCAGCGATTACTCTTCACACTTTCATCGTGAGTACCAATATGCTGTCTCCACCATTCAGATGCCAGCATTTC
AGTCTGAGAATCGCTTTACGTGGAAAGTGGCATTGGTAAGAATTGGACTAAAAGGTAAAAAAAAAAAAAAAAGAATTCCTGAAATGCATGCACC
TCCATAGCCATCACAAAATGCCTTTGCTCAAACAGACCTTGAAAACACTGAGGGTAAGGCAGCATATTTTGGAGATCAAAATCTGATTATAAAT
CCTAGGTAATGCACTTCAAAATGCAGATGATGGAAGCAGATTACGTCTGGCAGATGCTGTCCAACTCGGATCCCAGTTTTCTCTCCTCAGAACT
ATATGTGAAATCCACTTACAGTGAGAGTACACCTGAGCTAGAGGGCATTTACCACTTAAGGGGGCTAAACTTATTGTTTTTCAAACAAGAACTC
GGGTGTGGAGGAGCTTGTCCAAGGCAGGAAGGCAAAACCAGGTCCCTGATGTTGTCTGGGGCTAAGCAGAAACAGCAGCCAGCAACCAAATCCA
TCTCCAGATGGATCCATCTCCACAACCACAGGCCCCTCCCTATTCCCCATGCAAGATGCAGCACCAGGGCATGTCCATGTGAAATCTCAGAACA
CACAGAGGCGTCCATCAGCTTTCCCCTCTCTTGTGTCCTGTCCACACAGCTTACCCACACCATTCAGGAGTGACTTTGAGAAGGTAGTTACAGG
GCCTTTGCACATGTGCTTGAAGAATAACGAATATAAACAGAGGCTCTTTGTGGAGGGGCTGGGCAGTGTGGGTCAGTGGTTGTCCCTCACAGCC
GCCTGTGGCATTTCTGGAGGTGATGTTCATCACCTGGCCTTTGCTATATAAGCACTGCCCTTGTCTGGGGTCTAGCTGGCCAGAAGCGAGCACT
GGAGGGGGAGTCCTCCAGCCCACGTTTGGTGGGTGAGGGTCAGAGTGCTGCCTTGTTGCTGACGTCAGGGACCAAGGCAAGGGAGAGGAGCTGA
GTGGGGAAGGAGATCCCCTGCCCCCAGAGGCCTTGTATAGCAGCACAGTTTGCTATTTTGAGAAGCTACTCACAGCTGTCTGTGAAAAATGAAT
TTGTTAGGAAAAGGAAACAAAGCTTACTTTATAAAAATTATATATCCCTTCCCCAAAAGGGAGGATCCAGGATTGAGGGGTCCGAAGCATATAC
AATTTGAAGACTCTCTTATTTTTTTAAAAATATAAAATTAGGCATACAATAGAATGTATTTTTTGGACTAAGGAAAAAAATTCAATAAATTAGA
ATTTTTTTAAAGGCTGGTCAATACTACAAGCATACAAACTTTAGAAAAGATAATGTAATATTTTAATTAACTGCCTGACACGTCTCTATAACAC
CTTTTGTTTCCTCCATGTCCTTGACTTCACTGTGTTTGACTACATCTTAGTTCAACAATATTTAATAATATATTTGTCTATATATAGAAAAAGA
GACTATTCATTCCTTCCTCTAGGTTCACACTTCATTATTAATAATATCATGTACATTTTTAGAATCCTTGTCAAATTTGGGAGGGGAAGATAAA
GTAGAACAGAGTGAGCTTCCCTGGCTGTGACTAAAATATCTTTTGCAATCTGTACAAAACCTAAGGCCGTGCAGTCACATTGCTGGGCTCCTCT
TGGTCTGGAGGAGGCTGTGATCAACTCCTCTCTGACCCTCATCCACTTGGTTCACACAATGTGGTTTATTGCCATTGTGCACAGCCAATTCTCC
CACACACATCGCTCTGCTAAAATGTAATGGGATGTGGCCTTCATTTCATCTTATAAATGATCTTAGAATGGAAATGCTCTAAAAAGTCCATGCC
AGGCAAAATTTTAAAGATGGAAGTATTGTTTCTTTGTATTAAGTGTATTGTTTTTGGCTAAGAGTCCTTGTAAATCTTACAAAGCCAAGAACAA
TTTCAAGGTGACCTTTAAGACACATAAGTGGCTGCTCTCCAAATAGCTCGATTAATGTTAAAAATAAAAGGTAGTATTTCAGATTTGTGGATGG
AGTCGTCCAACCAGTAAGTCACCAATGCTATTTTAACTACAGTTTCTACCTTCTGACTTTAGAAAAAAAAGTTACAAAAACAGTCATTCATTCA
ACAAAATAGGCATGTTTTCAACCAGACATGCAGCAGGCATTGTGATAGGACTTGGCTACTGTGAGGAATAAGTCAGACCTTAGTCCCTGCCCTC
ACCGCACTTTGACTGCAGGGGGAAGATGACAAACGCAAGCTGATGTGCTGCAAAGTCTGCAATGCATGGCAGTAGGTCCCCTCCACCACGACAC
TGGGCCTACGCAGCATGATCTTGATTTTGTTTTCATTTACTTGTTTATAGTCCCCACCCCCACTTGTGCTGGATGCACAAGGGCAGAGATGGGG
CTGTTGCCTTCACGAGTGCAACCCAGCACCTAGAACATGGTCTTGGTGGGAAAAATCTCTCTGGGTAAAGGAACATTCTGGCTGCTAACTTGAA
TGGTGGCCACTACTTCGATAGGAGGAGGGACAACATGGTTCATCGGGCCTGTCTCAGGTGCCCAGCCTGGACTATCATCTAGTGTGTCGCTAAC
TATAGGAACTGGGAAGTGGCCTTCAGAGCAAGTGGGCTGACTGGATTTGGCAGAGCTTGACACCTCACCAGGCAGATGCAACAAAAGAGCAGGG
CAGACCCAGCCATCCCATTACTGGGTATATACCCAAAGGACTATAAATCATGCTGCTATAAAGACACATGCACACGTATGTTTATTGCGGCACT
ATTCACAATAGCAAAGACTTGGAACCAACCCAGATGTCCAACAATGATAGACTGGATTAAGAAAATGTGGCACATATACACCATGGAATACTAT
GCAGCCATAAAAAGTGATGAGTTCATGTCCTTTGTAGGGACACGGATGAAATTGGAAATCATCATTCTCAGTAAACTATCGCAAGGACAAAAAA
ACAAACACCGCATGTTCTCACTCATAGGTGGGAACTGAACATTGAGAACACATGGACACAGGAAGGGGAACATCACACTCTGGGGACTGTTGTG
GGGTGGGAGGAGCGGGGAGGGATAGCTTTAGGAGATATACCTAATGCTAAATGACAAGTTAATGGGTGCAGCACACCAGCATGGCACATGTATA
CATATGTAACTAACCTGCACATTGTGCACATGTACCCTAAAACTTAAAGTATAATAATAATAAAATAAAATAAAATAAAAAAGAAAAAAAAGAG
AGCAGGGCAGCAAGAGATTCACGGGGTAGCATGGGTATGGTGGCCAGGGCAGGCCTGGATGCCTGCAGGAGAGGGAGGGAAGTGAAGCGGTGGA
TGCCGAGTGGGTGTGCAGGAGCCCGGGCATCTACAGAACCCCAGTCCGAGCCCCAGGAGGCAGCACCATGTCATGGTCACGTGGTGCCCTGAGA
CCATTTTGGTGCCCTGAGATTCTATGGATCCTGGCAGACTTTTCCTTGATGGTGGCAGACTGCCCGGGTGGTCGAGGGATTGGCACGTGGCTGC
CCCAGGCCACACCATGAGGTGTTGAGAGAGATCCTGGCTGCTCAGCTGCCCCGAGTGTGCAGCATGGAGCAGGGGCGGCTGCTCTGACGGCTCA
CAGCAGGAGAGGCACCTGGAGAGCTGGGCTGTGATCAGGCCCAGTAGTTTGCAGATGTCTGGAGAGAAACTGAGTCAGAGAGGAAGCCCAGGAG
GTTGTGAGCCTCAGCGATCTGAGAGGCATGCATGTTGAACAGTGAGTGAGGAGGATGGGAAGCCTGCAGGCTTGGTGGGTCCTAAAGTTGCAAG
AACATCACTGTCCCCTGCAGCTAAGTGGGCCTGATGTACTCCACTCAGGCCACAGTTGCTGTACATGATCTCTTGGGACCCTAGAAGTGCTCCT
TTCCATGATAGCTCTTTAATACATTAGTTAAAACGATTCCCAGGAAGCCCTTGTTCCAAGTATGCAGGATCAGATAAAAAGCGCAGAAACCCTC
AGAGCAGGGACCGACGGTGAGTGCAGTTTGCCCTCAGAGGCCTTGGTAGTCACCCCTTCCCAACCCCCATGCCACCACTGAATCCCCATGTGGC
TTGTTCTTATATGCCCTGCAGCTGAAATTCAGGTGCCCTCCTGACCTTCCTTCCCCTGTCCATTTTGAAAAGAAATAAGCAGTGTAATCTTTGA
GTCATCCCTTTTGTACTAGCCAAGTTCCAGGTGCAGCATCACACACTCGTTATCTCCACCTCTCTTCTCCCCTTCCTTTCCCTCATGTCTGCAC
ACACTCCCATCCCCTCACTTCTTCCCCCTACAGCCCGCCTCTCTCTCTCTCACACACACACACACACACACACACACACACACACACACACACA
CTTGAGAACCGCGGCTGCATATCATCTCCTGTGGACCTGTGCACAACCTGTGGGGCCCAACTTAAAGTACTGCATCCATTCTCCGTGGTTTATC
CTAATTTAGGTTTGTTTCCTGGTCATATACAATACTCAAGTATATCTCTTTAGGAACTGTCTCAATTTCTTAGAGAAATGGGATATACGTGAAT
AAAATTTTTATGATTCCCTTATACTGAGTCCCACTTGCACTGCAAAGGATTAATAACATCTGTTTCCAAAGCAAGGCGTCACCTGCCATGCAAG
CCACCTGCTGGGGAGGGGAGGTGAAGGGTGTGAGCATTGGTGAGAGGTGTTGTTCTCATGTTCAAGGTGACAGGTATGTTATCTGGTGTCCCCA
GGCTGGGTCCCACCCAGGGCCTGCTCCTGGACGAGGGCTGTATGGCTCTGATTTGCACACCCCTGATTCTGGTGGACACAACCCTTTTTCTTAG
AAAGCCAGAATCACTGTATCTTCTAGTCCTTAGCTGCATAAAAAAATGGGGTGCAAAACTTCTCTGGACTGTCTATTCTTATTGTTCATTGGTT
TATCCTGCAGGGCCACCCATGGAGCCCGTAACTTAAGATGCACAAATGAGCTATTGAGTGAATATGTGTGTGTGTGTGTGTGTGTGGGTGTGTG
TGAGAGAGAGAGAGAGAGAGAGACAGACAGAGAAAAAGAAAGAACCATCTGGAGGGCTGGCAAAAGCACAGATGTCTGCGTTCCATCCCCTGAG
TTTTTAATTCACAGGTCTGTGTAAGGACTCTTCCATTTGCATTCCTGCCAAGTTCTCAAATGATGCTGATGCTGCTGGTCTGGGGATATGGTGT
GAGCCTGTTTGAGATACCTGTTACCTACCTGGGCTGGATTAACAACTATGATCATTTGAGATTTTCATAGTTCATTGGAGGGTCTGTAACTGCA
TTTGCAGTTGCAATTCCTGCAAAATGCCCAAATACTGTATTATTGGACTGGTTCCGATAAAGTTATCTTTGAAAATGCCTCTATTTCTAGAAAC
TTAAGTTAGATAGTAAAGAAATTCAGGCCATGAGTCAGACAGGCCCTGCCACTTAATAGCTCTGTGATTTGGACAACTTAATTTTGCTCTCTGA
GCCTCTGTTTCCTCAGTAATAAAATGGGGAGACTGATGTTTTATCTGAGTCATTATGGAGATGACTTAAGTAATGTGTATAAAGCTAAGCCAAT
GGTTCTCATGTCTCTGTGGTTCCTACATCCATGAATTCTTTTCTTTCATCAGTTCTGAAAAACATCTTGCTACTTTTTTCTTCAAATATTGCTC
TCTGTTCTTCTTGCCCATTTCTTCCTTCAGAGACTCCTATTAAATACAGTTTGACCTTCTCAATTCATCCTTTATATTTTTTATTTTCCCTTGC
CTTTTCTGTGTCCTGTGCTATGAGTAACGTCGTTGAATTATTCTTCCAGCGCACTAATTTTTCCTTCATTTGTGTCCAATCTGCTCTTACGCTC
ATTCACTGATTTTTTTTAATTACATTTTTTAGAAAATTTCTAGCAGTTCTGTTTGTTTGTTTGTTTGTTTGTTTTTTCAAATATTTCTGGGGCA
TTTTTAGAGTATCTTATTGGTTGCTAATTTCCATGGTTCCGTTTTTTATTTTGTTAAACATTTCATAGTTTATATTCTATATCTGATTATTCTA
CTACCGAAACTTTTGGAGGATGTAAATCTCTCTCTCTTTCCCTCCCTACCCCTTTTCTCATAACTCATGCTTCCTTATGTTTTCAGTCATCTTT
CTGAGCTTATGCCTGATTGATATTAATCTGTGGGAATCCTGAGTATTCGATGCTGGGAACACTTTCCTCCAGAGTTGAAGGGGATTTCCTCTTC
ACAGGTCCTTGCTTTAAGGTGGGAATCCCACATCCAGCTGCTCACTGGGCTGCTGGCCTGAGATTCTGTCCCTGTCCACAGCTGTGCTGATATT
GGCATTGGCCCTTTGGCCAAACCCACTTTAATTGCTCTCATTTGCCACTCACTTTTTGCTGTTCAAGTTTCAACTCACTTTTTGTCCTATACTT
CAATTTCAAAAGTGAATTTGCGGCTTAGGAAAAACCTTTTCCTTGTTCATTGAGGAATGAGACTGTGTTAGGCTGTCACGAGCCTCCTTTGCCA
CAACAAAAACTCTGTTCCATCAGTGCTTTCATATCCTGCCGTAATTGATCAAAGTATGCCATTTTATTTGACACATGTGGTTTTGCAGACCTAG
GTCATCATAAAGAGTCATGACCTGTCTGAAGTTAAAACTTCAAAGAGAGTTGTGGGCTGATGTCAATATCACTTCATTGATGCTGATCAAAGTC
TCCTTGAAGCTGAAAGACAAGATGCGTTAAATAATTCCACCTTCATGAACTAAAGCAGAGGGAGAGAATGAGAGGGCGTTTGTAATAAAATGTT
TTAAACCACAGGTGTGTTAAAACAGCTTGGTGTCGCCTCAGATAGGGATTGTGTACTGATCTTGCTCTTCTTTCTGTGGAATGCACATGTGCCT
CAGTAGTGCTATGGCGCAAGGCAGAAGCACTCAGAAGTTGCATTATCTATATCTTTCATGGATCAGTAAAGCTGGCATTTCTCCTGCCTCTTGC
TGACATACACACTGTTCAGGACCTCATTCCCTCCCACATCCTCCTCTTCCCCTCTCCCAGCTCTCTTTGAGAAACCACTGTTGGGAGATGGCTC
TGAGTCAGAACTGCCCACCCAACCCAGCACAGGCCCCCTCTGTCCATCTGCCCAGCCCACCTTAGCCACAGTGAGCATTCATCCTTTGCACATC
TAATGCACACAGCCAATCCCAGGCATCTTCCTTCCCCTTGTATGAGTCTGACAACTGACCCGGTGATACTCTACTCTGCCATGGAAAAAAAATG
GCAGGGGAGAATGAGAACACCTAGTGGGCTGGAATGTGCCCGGCTTTTCTGTTCCGTCTACAGCAGATACAGGCAGTGTCCCCGTAGCCCTGGG
GAGGCCACCTTGAGTGCCTCACTACTTCTTACATCCTCACTTTCCCCTTGGTGCCCGGGCATCACCTCTGTATATTCTCTCTCCCCTAGGAGGG
TGCAGGAGAGTAGAGGAGTCCAGCCCTTCCAGGCCATGCCCCAGCAGAGTCAACATCCCTCACCTTTGGATAGTGTTCTAGTGTCTGTGAGGCA
CAAGGCCTGCTCACCCCAGAGGCCAAGGCTGCCTACCCTGGGAAAGTAGACATGCCGCAGGTCAAGGACTGTCTCAAGACCAGTTAGGACAGCT
TCTCAGCATCATCTCAAGCTCAAGCCCTGGAAATCTCAGGCTTTGCAATAGCAAAACACAAATCTGTTAACTTACTCCTCCCAAGACAATTACT
GGGAAAAAATATTTTGTAAATATTCAAAGGCTTCTGTGAACAGCCTGAGGCCAGATGACCCTGAAGGCGGAAGGCAGCAAGCCAGACAGGAGCC
AGGAGCCTTGCCTGTGTGCACGCCCTCTCTGGGTGTCTGTAGAGCCATAAGCCTGGGTGGGTGTCCTGATGCCACCACCAGGGCAAAGCTCTCA
GTAAGAGGACACAGCCAAGAGGAGGAGCAAGCCTTCCAAATCAGTTTGTCTCCTATGTTTAATTAAAAATAGCCTGGTCCAGGATCTGCCTGCA
GCCAACAGATACCTCACAGTTCCTGGTGGTTAATGTCGCGAGCCTTCTGGTCTTTGCCACCTACAGATGCTGGGCCTGTGGGTTTCCTTTCTCT
GCTCTTGTTTCCTGCCACCTGCCACAGGGGGCTGCCCAGGCCACATGTCCATGGTCACTACCTATACCTTCCAGTTACCTGTTGCCAGGACTGG
CCAGGGCTGCTTGGTGGAGCACAGGAAGAGAGGGGATCGCCTGCAGAACCTGTCCTCTTGAAGAGCCTCAAGGAAGTGAGGCCTTTGCAGAAAC
TGCTTGTTCCAAAGCAAAGGGCACTCTCTGTTTCCTCTGGGTTGCTCTCTATTTCCTCCTGGTACCAGCTCTCTTTTTATACTGCTTTTATTGT
GAAATATAAAACAAACACATAAGAGTGCATAACTAAATAGGTACAACTTAATGAATGATTATCAAGCAAACACAACCCAGTCAAGAAATGAAAT
GCACCCAGCATTGCAGGAGACCACTCCGCCCTCACACACTCATACCCATCTGTACAGCTGGCCTCCTGGGAGGCACCACCTCCTGAACTCTTGT
GTTCATCACGCCCTTGCTTTTTTTGTTATTTTTCATTTGTTTGTTTTTTTAGTTTTACCACCTAGGTGTACATCACTAGATAAAACAGGTGGCT
TTTGTCTGTTTGGGGACTTTGTGTATATGGTAGCATGGAGTGAGTTTTATGTTTGTGAGACTCATCTGTGCTTTGTATAGCTACCATTTGCTCA
TTTTATTGCTTTAGAATACACTATTGTGTGAATTCCTACAATTTACTTGCTCTGTCGTCACTTACGTTGTGTGCAGTTTTTGATAAGCACAGAT
GAAGCTGCTATAAGTAGCCTTGGGGTGCATAGTGCACACATTTCATACACCTAGGGGTGGAATTGCTCATTCACGAGGTCTGTGAATGAATAAG
TTCAGTTTCAGGAGACTGTTCCAAATTGTTTTCCAAAGTGGGTGAGCCCATTTATGCTCCCACAAGCAACGTAGGAGGGGCCTTGCTGCTCCCC
ACTCTCAGTAGCACTTAGAATGATCTTTCTAACTTCCACCAGTCTGAAGAGCGTGGAATGGTACTTCCCTGGGGTCTTCATTCATGTTTGCCAG
ATGCCTAATGAGGTTGATGGCATCATCTCTCAGGGAAACCTGTGCTTGTCTGTCTCAGTTTTTAACAAGAAAATGTCAATCAAGACATAGGGTA
AGATGGAGTACAGCAGATTGGACATGGATTCAGAAACCAGAGTTCAGATCCCATTTATTACTACTATCTTTTTTTCTGGAGAGATGGCGTCTCA
CTCTGTTGCCCAGGCTGGAGTGCCATGGTGCAGTCTTGGCTCACTGCAGCTTTCACCTCCTGGGCTCAAGTAATCCTCCTGCCTTGGCCTCCCA
AAGTGCTAGGATTACAGATGTGTGCCACTGCACCTGGTTCAGATCCCATGTATTATCTCCATGACCTTGAGGTCACAGACGTAAAAGATTAAAT
TATAGGAAATACTTTCGAGTGACATATTGTCACCATTCTTTCAAGGCCAACTTTTATAGGCATATGCATCCACTCTTACTGCTGTAGTATTTGG
ATAGCTCTCTATACCCTCAAACTATAAGCCACTGATATGTATAGAATAAACATAAATAGTCTCACTTTATAAGATACTTTCCCTATAAAACAGA
CTCAGTTCTCTCTTTATATGAAAAGATTACCATGTGGTTTTTTGTTGTGTTGTGTTGTGTTGTATTTAACAGTCACCAACTGCTGGCTGTAGTC
GGCCATGTGGCTGTGAAAAGGGAGCTCACACCTTGGGCGCTGGCAACTCGGTTGGTTTGGGAGGAAGAGGTTGTTCTCACAGTGGGGAGGTTTC
AGCACAGCCACCTGCTGAGGCCACAGAGAACCTAGATATGTGTCCTGTACCCTGGCCAGCTGCCCTGAGCTGTGGGGTGCTGTGCATGGCCAAG
CACCGCTAGAAAAGACACTTATTCTGAATTTCACTCCTCCCATGCCATCGTTCAGCTTTCAAGTCTTGGGTTAGCTTTTTGAGATAAGTCTCCA
TGGCAAGGGACAGGAAAGCATGGCCATGTCCAGTTCTGAAGGCCATCTCAACTCTCCCTGTGGTCGTGTATCTGACTTCTTGCAACCAGGAGGA
GGCATCAGAAATTTCCCCAGTACCCAGACGTCCCAAGGCAGTTGGGCACACTTGAACTCTGCCCCAAGTACAGTGCATTTGGGCACGTGGCTTA
ACAATTTTGGACCTCAGCTTCCTCATTTTAGAAAATGCAGGGGCCAAAGAGGCTTCCTGGGACTTCATGACTCACCCTCAGAACCTAAGATCTC
ATGAACCAAAGGGCTGCAGCTGTGGAGAGGGGAGAATGGGGCAGTGTGTGTGACTACGAAGCTAAACTGGGGGATTCGCACCCATTTCGTGCCT
TTTCAGCCTCCACTGGGACCTCGAACTCCCCAAGTCCCACAGGTCTTCCAGGGGATCTCTCACCTCCCCATGAGTCATAAGCCTTACGTGGCAT
GCACTGCAGTGGGGGTGTTGTTCCCTGCCTGGCATCAGACTCCTGTGTTTCTGTTCACCAGGACCCAGGGCAGGGGGTTGTTCTGAGGGTCGCC
CAGCATTACCATGAAGACAGAGCCTTGGCTGCTCAGCACGGCCAGCACAGCTCTGGTTTCACCTCTGTCTCTTCACCCCACAGTGGATGTCATT
TTCTTCTCCTGGGGGTGTTACCCGACAATATCATCATTTGAAACTGTTTGAAGTCCAGCCCTGCCTCCCTTTCCTGCATTGGGAGCTTGGAAGT
CCAGCCCTGCCTCCCTTTCCTGCAGTGGGAGAGTGGAAGTCCAGCCCTGCCTCCCTTTCCTGCAGTGGGAGCATGGGAGGGACTGAGGAAGGCC
CGGGGGATGGAGGCTTCCATAACCCTCCATCTCTGGTCCAGAAGATGGCTGGTTAAAATGCCCACCAAACACCCCCACCCACACTCCAAGCTAG
GTGGTAGAGCTGTCCATCTTGGATCTAACCCAAATGCAGGCCCTGGTGAAGAAAGGTGAGTCCACAGTGCTCCACAGATAATCAGGGCCCGTGG
TGCCCCTGTGCTCATCACCCTGAGAAGCGTCACTGCTACTGAGCACCAGGCTCTCCTGACCACTGCCCAGAGCTCCTGGGCCCTGCTAGAGCTT
AGCCATGGTCCATTCATCACCAACCTGCTACCATTTCCTTGTTGCAAGCTTGCCCACTGGCATCATCCCTGAGTGGTAAACTGGGCCTTCCTGG
GTTGGGTAAAGCCCTTGACCCTGAGGCTCCAAACTCTGCCCTCCAGCTGCCTTGCCAGGTGACAGGCCCCAGAGAGCGGCTGCTGACCATTCAG
GCCACGGTGCTTCCTCCCAGGGTCCCACCTGGAGACTGGCGGGCCTGGGGATGATGCAGTTCCATCCTCTCTTCTAGGATCCGAGCCAGAGACA
ACAACGGCTCCTACGCCCTGTGCCTGCTGCACGAAGGGAAGGTGCTGCACTATCGCATCGACAAAGACAAGACAGGGAAGCTCTCCATCCCCGA
GGGAAAGAAGTTCGACACGCTCTGGCAGGTACCCAGCCTCCTCTCCCCACCTTGTGGGTAGAGTACAGGGCACGTGGGGCTCCTTGTCCCATGG
ACTCTTAGACATGAGAGGAACTGGACCACCCACTGCCCACAGTGTGGTCCCCAGGCCAGCAGCAGCTCTGGAGCTCATGAGAAACACACACCTG
GACCACACCTGGGCTCCTGCCCCACCTGCCCATCAGACCCCACTTTCAGCCTCCAGGTGGCTTCTGTGTTTGAGAAGCACTGGTCCAGAGGCCG
TCATGTGAGGTGAACGAAGGTTCCATGGCTTGTTCAGGGCCACTCAGCCCTCAGTGCCACAAGGTGATGTAAGTGCAGGGCTGTGTTCAGAGTT
TAACAAGACACTCTCTTTGGAGATCTAGAAAATATTTCTTCCTAGGATATTCTAACTAGAGCCCAGAACAGCCTTTCAGACAAAGACACACAAA
ATAAAGGAATGGATGCCTGGGGAAGGAGGCCTAGGAACAGCCAAGCAGGACTTTGTTGGTGGTGTGAGAGGCTGAATTAGACAGCAAATGTCAG
GTGCCCTCCTCATTGTAAATCGAGTCTCTCTCTGTGGAAACTAAGGCAATTTAGGAAGCATACTCCCTGGGCTCCAGGCTGCTGCTTATGCTGA
TTGCCACAGCCCTGGTCTAAAAAGTGCTTATTCCTGACCCAGCTACTAGAAAACCCTGAAACAACTCCCAATTTGGAAGTTCCTTAGGCACTAA
TGAGCACTAAAATAATGCTCATCACTGCTTTCCCTGAATCGCAGTGAGCACAGATTGCTTGTCTTAATTTTGCATCACAGCTACACTGGCTGAT
GATGAAGGAAATAACCGTAACAGTACTTCGTGCATCATCTTCGCAGAGCATCCTATAAACTGTAGTAGGTTCAGAAACAGGGAGAAAGCCAACC
GACTCTGCCACCACCCCACCGCCCCAGAGCACCAGCTACCTTGAACATGTGTGGGTGAGGGGCATAATCAGGGCGTGTTCCAATGTCCTCACCC
AAGCCCAGCTGGGGCCACACATGCAGTCAATGTTGACGAAAGGACTCAACTCAAAATCCTGTCTTTTCAAAAACTGAGACTACAGAGCCTTAGC
CCCTTTAAAGCACTTAAACTTACTACTTCCAAATGTGATTTGCTTTCTAGTGCTGTAATTGGAAAAAAAAAATACTCCTTTTTTGAATGCTGGA
TATGATCATATTAAAAAATGTTAGTCACAACATTTACATTGTCTTTTGATTTTGTGGCTCATTGCCATTTGTCATCATTAACCACAGGCTTCTT
TCTTTTAACGATATTGATTCCAAAGAGTATTTAACCTTTCTACACTCAAAGCCCCAAAGCACATCAGGGAGGTGAGTAGGGAATGTGGCCTTCT
GGAATGCAAAGGCACCTGGAGTCCTCTATGCCAGCTTAATGCTCCAAGGTCCCAGGCCCCATCACTTATAAACAGCCATTCATTCACCTTCTCC
TGAAAGGGCATTTTATGTGTGTGGCGTTCTGTCACCATTTCAAAGGCTGAGCACTCACCATAGTGTTAAGCATCTCTAATTATTGAGAATGTCC
TTCCCAAGAATCTTTACTATTTGTATTGATTCCCCTGGTAGATCATAGCATTCATCCCTAATTAAATATTCCTCATTGTATATTTTCTAGGCAC
TGTGTTTAGGAAACTACGTCAAAAATGCCAGCAATACGTTCCAATTTCCCATGCATGATTTCATTGATTTTTCTTGACAGCGTTCTAAGGTACT
TCTGTACCCTACCCAACTCCAGGGCCCCAGTGCTATTTCACGGAGAGTTGGTGATTGCCATAATACCCTATTTCAATATTCTTTACTGTAGACC
AGGGATCTCCAAACCCACAGACCAACTCTGGCTCTCAGCCTGTTTCTGTGTAGTCCCTGAAGAGAATGGTTTGTATGCTGTTAAAGGTGTTGTT
TTGGATAAATAAATAAATAAACAAAGGACACAGATACGGTATGAGGCCCACAAAAGCCTAAAATACCACTTTCTGGCCCTTTACAGAAAAAATT
TGCTGCCCCTAGCCCAAGAGGGGGGATCCCTAGCTGTGGCCCCACTTCCCCAGCCACCCTTGTGGAGTGGACTTAAGCACATAAAAGCATTTAT
GTGTCTTGGGCCCACTTCGAAAGCCCAACAGTCAGTCAGTAGCTCTCAGTCACTATTTGTCTATTTCCTGACCTTGGTATTTACCACTTTCTTA
CTTTTTTCTCTTTCAGCTAGTCGAGCATTATTCTTATAAAGCAGATGGTTTGTTAAGAGTTCTTACTGTCCCATGTCAAAAAATCGGCACACAG
GGTGAGTTCCCAAGACACTGGAGTCTCAGTGTTTGAGGTATCAGTGACAATCAGCCTCATTTTAGACTTAGCTGATTGCAGATTTGCGTTGGAT
GAGGACTTCTTTTTACGGGTTGATTAATAATGATATCAGAGCACTCCGATTTTGTATATCGTGAATCAAAAAATAGCCAGTTGCTTTAACTTTA
AAAAAATTGTAATTTATTTGTCTTCATTGCATGCGGGAAAAAGTAAAAGAGGGTCGAAAGAAGTACCTGCAGAAAGCGTGCTCACTTCTCAAGC
AGCAGCACATCCTGATCTCATTGATTGATCTGCAGTGGGGAGGGGAAGGAAGTGGTTTCCTCAGATAGAGCAGTAATTGTCCATGCTCTCTCTA
ACCAGGAAATGTTAATTTTGGAGGCCGTCCACAACTTCCAGGTTCCCATCCTGCGGTAAGTGTCACTAGGAATACCACTGAATGAGAAGCTGTT
GCATATTTCACAAATGAAAAGCATGTTTTAGCTAACAGGAGTAGTACGCATTGATATTTTGATTGCGCTTCAAAACATACTCCGTGATGAGCTG
GGATTGCTAGTGAGTGTTAGGCAGAATCAGCCTCCTATTAGTGATAAACTAACCACATTTTCTTTTCTTTTTTTCTTTTGCTTTTTTTTTTTGG
AGATGGAGTGTCTCACTCTGTCACCCTGACTGGAGTGCACTGGTGCAATCACGGCTCACTGCAACCTCTGCCTCCCAGCTTCAAGCCATTCTCA
TGCCTCAGCCTCCCSAGTAGCTGGGATTACAGGTGCCTGCCATCACACCCGGCTAATTTTTGTATTTTTTAGTACAGACGAGGTTTTGCCATTT
TGGTCAGGCTGGTCTCAAATTCCTGGCCTCAAGTTATCCTCCTGCTTCGACCTCCCAAAGTGCTTGGATTACAGGCATGAGCCACCACACTCTG
CCTAGCCACATTTTCTTAACTTCTTGTCTAGATGAAATTCTCTTCATTTTTGGAGAATATACACAATGCGAATGAAACCCAATATTAAATCAGA
AGTAGGCCTCTTGCAATATTTGAGAAATGGGAACATATTTTTTAGCTTCATCCTTGAGCCGTCTATGTTAACACACGTAATTCACAGGACCTCA
GCTGTCTCCTCCCTCCAGCCTGTTAGGAGGTCAGGTACAGATTTATGCTCTAAGCAGGAATTATTTTCCTGCTCTTTTCTTGGGGCTACATATG
GCCTTTTTTTTTTTTTTTTTTTTTTTTTTTTGAGACGGAGTCTCGCTCTGTTGCCCAGGCTGGAGTGCAGTGGCGCGATCTCAGCTCACTGCAA
GCTCCGCCTCCCGGGTTCACGCCATTCTCCTGCCTCAGCCTCGCGAGTAGCTGGGACTACAGGCGCCCGCCACAACGCCCGGCTAATTTTTTTA
TATTTTTAGTAGAGATGGGGTTTCACCCCGTTACCCAGGATGGTCTCGATCTCCTAACCTCGTGATCTGCCCGCCTCGGCCTCCCAAAGTGCTG
GGATTACAGGCGTCAGCCACCGTGCCCGGCCCATATGGACTTTTTATGCCCTTTAATGCCATCTGTGAAGTGCGCCCTCTGCACCTCACTTTTT
GCCTGGTAACCCTTGAAAAACAAAATCTGCAGAAAGCCAAATATACATCCTGCCTCCAGTAGGGACAATTGGCTGCCCAGTAGCTGAGCCCAGG
TTGAAACAGGGGAGGCTGTCCAGGGGCAGCACTTGTTATCAAATGCAGGGAACGTGAATTTGCTAAAATACCAGTGACCTTTGGGATCAAAATG
TAATGCCTTTATGGAAGTGTGACTTTATTTTGCCCTTTACAGGGCTCACAGGCCTGGCAACTCTATCTTAATATTATAGGCTCGGTGAGACAGA
TCCATACACCCTTCAGATGGATGAGGGCTTAGGGCTGAGAACTCTTAAAAGAATGTCAAGCCCTGTGCTTAGCCATCATCACCCAATGACTACA
AGAAGTTAGATATTTTGGAATAACTTTTTAATTGACTGGTAAGATACATACGGGAAAAAAAAGGCATACGCCCTATGTGTACAACTCAATTAAT
TTCCACAAAATTTTCCACCGTGGAACCAGCACCCACCATGAAGAAGCAACACAACTGAGCACTCAGATCTACTTGTAGTTTCTTTCGGTGGTTT
GTCTTGAGCTTACAACTTAATAATTCCACGTGAAGCATGAGCTAGTGAATGTAACAGCTCTAATTTTGTAGCCTTCAGTGGAACATATTTCCCA
AATATATTTCTAGATCCTTCTTCCCAAGTGGCAGGCCCTTCCAGAAGCCTTCCCAATGATCAGGTGTTGCCCGTGGTCGATCTCATTGGCAGGG
ACAGGAGGGGGTTAGTGGTGCGATTATAGAAGCAAATTTAAGTAGCATGTCATGGAAGGGATCCTGTATTTGTTTTCTGAAACATTTACTGTTC
CTCTTTGCCGTTGTGGTTTCTAGACTTGGTCAGCGGGTGGAATAATCTCAAGAATCAAATCATACTCCTTCCCAAAGCCTGGCCACAGAAAGGT
GCTAAAGCAACCCCTGCTTGCTGTCCAACTAAGTGGTAGGACCAACGCGCACTCAGCTCCCGCCCGCCCAGTCTGCCCTGTGTGTGCGCTGCCC
CCCATCTCTTGCCACTCTGCTTCCAGGCCTCTTTGCCCTTGCTCACACCTGCTGTTCCTGGGCAGCCGCGCCCCAGGTACATCATGTGCTTTTC
ATGTGGGTCCTCAGTCCGTCAGCTGGAAGTCCAACAGTGTGAGCATGCTTTCTGTGCTCAAGCGTCATTTTAAAGTCGTTTCAGTTGGCGTCAT
CCGTCATAGCTAATTATCATGTCGGAAAATCTTTTCAAAGATGGCCCACTTACTTTTTGGTGCCCAGACTCACGTGTTGCAGTGTTCTGGTAAT
TGATTATGTAAGTTACGTTGTGATGGAGGCAACACCAAGGTTTTGTGAGGCGCGCTGCACAGTGAGGTCAGGCAGTGCATGGTAACTTCATTAT
GGCTTAGACGTCTAACATACAACTGCAAATGTGACATGTAAAGAAGAGGTGTAATCTGAGGTCTAGAAAAACCAGTTTTCTTTTTGAGGCAGTA
ATGTTGACATCTCATTGATTTCCATCTTTTGTTCTATTATTGGATTTTGAGGGAAAATAAAAATAAGTTCTTTTTCATGACTTTTATTTATAAT
GACTTATTTATTCCTTCCCCCAAAATATGTATATATAATGTGTTTGAATTGCTTTTTTTCCATTCTACTTTTATTATCAGTGGGGTAAAATTGG
TTCTTTTATCAGTAATTCTTTTTATTTTCATATTACTTGGTGTTTTTACCGACATTTTAGCATATAATTGAGCATCCACTCATGAAATAGATTG
CCTAAAGTATTTACTAGAAACAACAGAAATAAAAGACATAAAACCCTTGAGATTTTATTTAGTAATAATTTTCCAAGTTTACTCATACTCAAGA
AGTTCTCAATCGTGTTGACCATAGAACAGAAAGATTTAATGCAGTGTTCGAGAGGAAGAAAAGGTTTATTTTACACTTGAATAAAGTAACTATG
TCTGTTTTTCATGTTTACCCAAGGCAAAACACCCCCACAGATTACTCACAGTGGCTAAAGAAATACCTAGAAAATAAGTTTTGGTGCATCTTTA
GACTACAGGAGAACATGTCAGAAAAAAGTTGAAGAAAATATCAGTGACCACCTAAAAATAAAGAAGTATATGTGTAGATAACAACCATAACATC
ATCAAAAGAGAAATGAGAAACTGGGAGTAAGTAGCACTAATGCTGACACATAGATTAATAGCTTTAGTATACAAAGAGATTCTAAAAATAATTA
ACAAAAATATTAACTGTCTACTAGGATAATTGGCAGGGAATATCAGTAGTAGTTTATAGTAAAGCAAATATAAATAGTTCTTAAACATATGAAA
TGTTGTTTAACTTCATGAGAAGAGAAATGCAAGTTAAAACTATGGTGCTTAACTGTGTCCACCTATGATCCAAATTTTAAAAGCTTGATAACAC
TGTAGTAAAGGCATGGTAGATAAGCACTTTCACTCTTCCTTGGGGAAGTCTGAAATGATGCAATCTGTAAGAAAGGCTCTGCAATTTTATTTCT
AAGTATGTACAGATATTCTTGCATTTGTGTGAAATCATGTACATGTGAAGGTGTTTTTTCCAAAATTGTATAATTGACAAAGTCTGATAATAAT
TTAAATGCCTATCAATGGAAAACAAATGAAATTGGTTACAGTAAAATTGCTACTATGGGAGGCAGCTGAGATCTAGAATTGTTTTCAAAATATA
ATTTTAAGTGTAAAAGTCAATGTCCTGCAACACACACATACACATACATATATGCAGAATGTGTTGATATCGTATACAGTATCCTAGAAAAATA
CAGAAAATGCTGGCAATGCTGGTTGCCTCTGGAGTAAGAGATGGGAATGTTAAGAAATCCCACTTTTCATTGTAAACTCTGTTGTATCTTTTTA
AATTTGAACCTGTTAAGAAATTTTAATCAATTTTTTTAAAACAGAAAATTAAATAGTAGAGAGTAATTAATCTGATTAATATTGTGAAAATACC
TTTCTGGCAAAAAAAAAAGTTTGCTTTCTATTTAAGTTTAGAAGAACTTTAAAGTATACATTGAATTTTTTATAGAAATAAGAAACTGGAAATA
AATATTACTAATGATGACACATATATAAGGCCAAAAATATCAACAGATAATTTTTAAAAGATCAAGGTTGTAAGGTTTAAGCTATAGATTAAAA
ATATTTTAATTGCTTATCAGAAATATTTTAGAGCTAATATGTATATTTTCACAAACAAATGGGGAACTTTCCATTATGTAATCAGTCATGAGAA
AAGAATTGTGAGAATTATGTCAAATGTCCCATCATGTTACCTAAGAGATAAATAACTTTCTTGAACTTGTTAATTTGCTCAGTGTACATAGTTG
TTTTAATAATTCAGGCACAAAAAATACATGTTAGAACTTGAACTACCTATAGCATCTAGATAGTTAATGAAAAGTATGTTTAGATTTGAAGATG
ATTATGAATCAGATAATTTAAATTTTTCATAAAATTACTAACAGGCTGATGCATTTTAAACTTGTCTTTAGAAATTAGTAGCTTACTGCCAAGC
ACAGTGGCTCATGCCTATAATCCCAGCACTTTGGGAGGCCGAGGCAGGTGGATCACTTGAGGTCAGGAGTTCAAGACTAGCCTGGCCAATATGG
TGAAAACTCATCTCTATTAAAAATACAAAAATTAGCCAGCCGTGGTGGCACACGCCTATAATCCCAGCTACTCAGGAGGCTGAAGCAGGAAAAT
CACTTAAGCCTGGGAGGTGGAGATTGCAGAGATCGTGCCATTGCCCTCCAGCCTGGCAGACAGAGCAAGACTCTGTCTCAAAAACAAAAAAAGA
AAAGAAAAGAAAAGAAATTAGTAACATACTTATAAAGTATAAACAAAATTAACTTAAGAATACAACTAGTAGTCTTTAAATGAATTAAACCCCT
CCCAATATTAGTCCTGGAATTTCTTTCTCTGCTGCTTTAAGCACAGAACCTTATCCTTCTTTTATGGAAAATAGGTGGAAATTAAACAGCAACA
TCTCTAAAAAGACTTCCAGGGAACTTTTCAGCTTTGCATTTCAAAGGCACATCCCCTAAGAGGATTAAACTGAAATGTGTCCCAGAATTTCCAA
TTAAAACCCATTTTTCATGTTTTATTCCAACACATACATTGGTGATTATAATATTTTAAAACTTACATTTAAGTACAGGGCTCAGTGGGAAGAG
AAAAAAGAAAGAAACATCCTCAAGTTGTACCCTGTTGCTTGGTAATGCCTTAGTAGACCAGACCCTTGAGAAAATGTGTTTTCATATAATTATA
AAGGAACAGATTTTAGATCTTCACTGTAAGAGAACAGTAATTGCAGAGGTCAAGTGTTATTTTCATGGATCTCAGAGCAAAGCTAATAGTAGCC
TATTCCCCAGCCAACAGTCTGCCCTCGCCTGTGGGGGTCTACTGAACCAGGGTAATTCCACCAAAAAAAGGAAACCAAACCTAGTTTATTGCAG
CCAATATTTCTAAAGCCAGCTGGCTCTTTTGTCACTATTATTGTGATGACTAATGACTGTATTGTCATCTGCATTACTGCTGTTGCCTAATTTG
AAAATGGCCCAAGAATCTGGGAGTAAAAATTAAGATCTAGTAAATGGATGTTAGGACACTTGGCAATACTCTGGAATCAGGAAACTCTGAATGG
ACCTATCAGTTCCACAGACCAATAATTTTTTCCTCTTTTGTTCACTTTTGGATCACCAGCTTTTAAACATAGGCACTCAAAGAATGCTTGTCAA
ATACATTTTCTATTCGCAGTTAAACCTTACCAATAGGAAATCAGGGATAATAATTTATAACTGGACTTATTATTGCAGAGTGATATCCTTACCT
GAATTTATAAAATTTAAAGAAAAGTCACCAGTTGTTCTTTTGGAAGGTAGAAAGCGAAGGTGGCTAATGCCATCTAGCGGTGGACTGAAGGTTT
GAGCCTGTTCTGAGTATTAGCAAAAATGAAGAAAGTGGAATGGTCAACATTTCATTTACACCTTGTTGCTCACTGTGCAGAACAGATGACACTT
ATTGATTGGGACAGAATGGCTCTCTCAAATGCAAACATAAAGAATAAAAGGTTAATAGTAATGTAGACCGGAAATATATTTTTTATTAAAATTA
AATGTCATTACATTTTTTAAGAATAGTATTTTTACAATTTATCATTATGCCACTCTGCTCATTCTTTACAAACTCCTCAAATTTTTCTTTTTAA
CTGAGCATTTTCTTTTAGAGATTGTTTTGGTTATTGTTCTACTAAGTGGCATATTCACCAAGTGCTTTGGGAAAGATGAAGCATGGATTTTGCA
TCTTCATCTTTATCATAAAGTAACTACTGTTCTTTTAACTGACTCAATAGGAAACCTCCCATTTCTTCCACATTCTTCCAGTTGTGGCATCATT
CTTTGCTCCAGTCCTGTTAGTCACCAGAAAGAGATAGGGGCAGGGAGCCCAGGGATCTGGGTAGGAGAGAGTTGATCTGGGGTTGTTGAGAGAC
ATGAGGGTTCTTTGTGGCTTGGCTTAAAAGGCTTATAATCACATAGTGGTCTGTGTTGGGCAGCATGGAAATGAAGCCCCAAGCTTTATTGGCT
ATAAACGTGGAGTTCTAATTTCCGAGGAAGATCTCCCATCTGTTTCCCTATCCATAAGCCAAGATAGACTAGGGGTGAACAACACACTGCTAGT
GAGAGTATAAATTATTTGTGCCCAGGGGTTTAGATTCTCTCTGTCCATCCCTACTAATTCTTACTCATTCCTGACACCCTAGTATCCCTTTCAG
CATATTTTGACAACCCCATCTCTGTTTTAAAATTCTTCCCTGCAGGATTCATATGTCAGGGAATTGCGTTCTGGTTTAATTGGAACAAGCCATT
TGGAAGTCCTCCTGGTCTGGAGAACATTCTGTGAGGTAGAGAGGCTGCAACCCCAGGATAATGTCCTCAGTGGGAGGGACAGGAGGTCTTATGT
CAAGAAGAGGTGATGGTCCCTCTCCTCACCAGTGATGGCTAGTCCGAGGACATCCTTTAATTCCACATCTGTTCAAGTTTTGTCTTTGGATCTC
AGAATGTGCCTGCCTGCAGGGAAAATCAAAGGAGTTGAAATGACAGTAAATATTAACCTTGAAAGAGACTTTAAAAAAAATAAAACTATTTTCA
GCCTAGAATTGGTTGCGGGAGAAAACTGGGCAAAAGAGGAGGACAGAAAGCCTAGGGGATCACCCAGTTTCTGTCAGGACAGTTTTCCAGAGGC
AGGATAATTATATTATAAATCAGAAGTGAAACCACAGCACAGTCCTGTAATCATATGTAAATGTTTAAAAGAAATAGATTGTCATTTGGAATTA
TTCATTCTTATTTCTCTTCATCAGCATAAAGGCTTGAGAGAGAGCTAATTTTTAAAGCACATTAGATTATACTTCACATCTCCTAGTTTTTAGA
AGTGATTTTCATTCATTCACCCATCCATTCATTCATGTGTTTGTTCAACACATTTTTATTGAGCGTCCTTGTGGACGTGGCACAGTTCCGAGTG
CAGTGAATAAATGTCTCCCCCTCCTTGAGCTTATATTCTATTTTTATTTTTGATGTGTCATAGTTACTTCTGTTAATCAGTTCAGTAGAAGTGC
TGAGATACTCTGTGACAAAACAGATCCCATCGACATCATTTTTACAAATAAGACCAGATGTCCTTTAGCCTTGTCAACAGGCTTGGGCCATGGT
GAACAATGTCTGCCTCTGAAGTGCTCAGCAGACCGTGTGAAAGAAGAAGGTCCGGGTGTTTGGAAACAATGGCTGAGTGGCGGTAGTGGTGCAT
TGTGACCTCATTATTCTGCTTTTGGTTTCTCGCCTTGTAATATGAATAAGGCACATGAGGATTTAGTGTGTGTCATAAGATAAGTGACTGTCAC
GTTAAGCTTAATGTCTCTGTTTCTGTAACTTTCTCCATAATCTGGCAGTATCTCATTTCTTCGTGGCCAGTGTTTGGGCACTGAAAAGGTCAAT
CAATACATAGAATTGTGACTCAACTCACGCTGAAAAAAAAAAAAAAGCATCTGAATCATGGTTCTCCTGTGAATTAAATTTAGTAGCAAGAATC
TTGTTTTAATTTGGAAGAAAGGGTGGGTCAGGAAAACTCAAGATAGAGACTTTCAAAAGGGAAAGTCCTTAGGATAATGAGTAGATTTCCCCCC
CCAGTTGTTTCATGATATAAACTGATGTGGACCAAATAAATACCTGTCTCACAGGGGTACTGATTTCCAGCATTAGCTGTGGCAGCTGGAGCAT
TGCTGGCCTAGGTGGCAGCAACTCGCCTTCCCTTGGGACCTGTAGTTACTGACCAGTGCCACCCTCTGCCATCCACCCCAATGCTGCTGCATCT
CCACCGAAGATAAAGACTTGGGTGGAGACTTGGAAAACATATGTGCGTTGGAGTTGGGAAGTAGGTAGGAGCAGCTGATGAGTACTAATTTTCC
TCTTTAAATAATGTCCATGTAATATGAAATTGAAGAGCACAAGTTAAAGAAGGAAAATGCTTCCAAGGCGAACATGCAAATCATCAGCGATCTT
TGGTAGGTGGGAATAGGATGTGCAAGGGGGTGAGTGGGGAAGCAGCTCTATCCAGGCCAGTAGAGTTGACTCTCACCACACCCTCTGAACACCT
CACAGAGTCCCTTGAGTTGTAGCAGCACAAGCTTGCTTTAGCCCTTGCAAGATCCAAATAATTGCCCGAAGAATGAGATCAGCCTTATTTTCTT
CCCTGTTTTTCGTAATTCTTTCCTTTGTCTTTCCTGCAAAAGTTAAACTGTGATTATTGGAAAATAAAAATAATTATGCAGATCAACTTAACAG
TTTTGTGGATGAAGAAAAACAACCTGTTGTCCTTTATGTACTTTAGTCCTCCCCTGCCCAAGGGAACCGGCAAGAGAGTACTGTGTCATTCAAT
CCGTATGAGCCAGAACTTGCACCCTGGGCTGCAGACAAAGGTGAGACTTCCTTTCATTCAAGGGACATTCACAGAGCAAAGTGCGTGGTCACTT
GTAAGTTTGTAGAGTTGGTTCACGAATCCACACCACGTCCGTGATTGCAATACAGCCACAGTTAGCCATGGAAACACTCACATCTAGTGGCAGG
CAGCAGGCACCACATGCCCATGAGCAGTGATGGTGCTATTGAATGAAATGGTCTTTCCCACCTCCCTCACCCAACGACGTTGGAAATGTCCCTG
CCACTCTTCAGAATTTCTCATCCCTTGCAACATTGATGCTACTCTGAGTTCATATTCCCATGAAGATCATGTTCTTGGAAGGATGAATCCTGGT
GTGGGGTCCAGCCCCAGGTCGTATGTTTCTTGACTGCATTGCAGGCCCCCAGAGAGAAGCCCTACCCATGGACACAGAGGTGTACGAGAGCCCC
TACGCGGACCCCGAGGAGATCAGGCCCAAGGAGGTTTACCTGGACCGAAAGCTGCTGACGCTGGAAGACAAAGAACTGGGCTCTGGTAATTTTG
GAACTGTGAAAAAGGGCTACTACCAAATGAAAAAGTAAGTTGCTATGTTCCACCAGCCTCACCCTCACATGAGCTCAGGTTCTAGACATGACTG
AGAATAACAAAATGTAACCTGGCATGACTAAACCCTTTTTTTATTAATGCTACCATTCTTGTTAATTTCTGGTACTATTATAATGAAAGCGTCC
ATTACCTTTAATGGCAAAAACTGCAATTACTTTTGCACCAACCTAATAGTACATGCACCTTATGGAAAATTAGGAAATAGAAACAAGCAGAAAC
ATAAGAAAATAAAAACATCAAATTGCCATGGTGGCTCATGCCTGTAATCTTAGCAATTTGGGAGGCTGGGATAGGAGGATTGTTTGAGGCCTGG
AGCTTGAGACCAGCCTGGGCAACATAGCAAGACCCTGTCTCTACAAAAAAAATAAATAAATAAATAAATAAATAAAACATAAAAAATTAGCCAG
ACATAGTAGTGCACACATATACTTCCAGCTGCTCAAGAGGCCAAGAAGCCAAGGCTGCAGTGAGCCATGATTGCACCACTGCACTCTAGCCTGG
GTAACAAAGCAAGGCCCTGTTTCAAAAAACAAAACAAAAAAAAGAAAAGAAGAACATCATATTTGTATAATACCATCCCAACACTACTACTGTT
AACTAAACATTACTACTGTTAACTTAATCTTATTGTATATATTTTTAGATCTTTATTTGTACACACAGATATTATTTAATTAAAACAAAATCAT
TCCATTATAACAATAGTTTTTACATTTATTTTCTTTAATTTTATAGTTACATCTCATTTTTCTTACATGAAAATTATTGATTCCAAATATGATT
AGTATAATTATTTATTGGCTTTATCCTATGATTTCAGATAACAATACATATTATACAACAGTTAAAATTGCTAAATTTCGAAAATATCTTTGTA
TTTCTTTTGGTCTTTAGAAGGTACCCAACATAGAATGTACAAGTAAAACTACTGGTTTCTAAAGTCCTTTGAAATACACCCTCTGTTTGAATTG
GTATGATACTAATATGAATGTGGTTAGATTTAGTAGCTTCATGGTATTTCAAATGTAAGGGATTTTTGTAAAAAAAAAATTCGTGAGTAGGTAA
TTTTTATGATTCAAGGGTTAAAAATATAGACAAAAATATACACAGACATGCGTGCTTTCCGGCCGGGTGCCGTGGCTCATGCCTATAATCCCAG
CACTTTGGGAGGCCAAGGTAGGTGGATCACCTGAGGTCTGGAGTTCAAGACCATCCTGGCCAACATGGTAAAACCTCGTCTCCACTAAAAATAC
AAAAAATTAGCTGGGTGTGGTGGCATACACCTGTAGTCCCAACTACTTAGGAGGCTGAGGCAGGAGAATCACTTGAACCTGGGAGGAAGAGGTT
GCAGCCAGCCAAGATCACACCATTGCACTCCAGCCTGGGCAACAAGAGTGAAACTCTGCCTCAAAAAAAAAAAAAAAAAAAGAAAGAAAGAAAA
AAGAAATGCTTGCTTTCCAATCTGTCCCTTCGATTTGTTTTTGTGCATGTGTGTGTGTGTAAATTAGATACACATACATGTATGTATACACACA
CAAACATACACACATATGTATACATTCACAAGTATATACATGCGCACATATATACACACACAATCAAAATTGGCTGTGATACTTATTTTAAAAT
ATATGTTTGTATATCACAGTCATTTTGTACAATGAGTAAAAATGTTTCTGTATTAATCCTAAGCTTTTTCAGATTATGAAAGGTTGTGATCTTT
ATTCTGTGCTTAAATTTGTGAATTAACATAGACATGACTGTGGACATAATTTCAACTAGAGAATTTGGGGAGAGGAGAGGCTCTCTCGGTCAAT
TTGGGGCAAAATGATGTCTTTACAATACTGAGTCTTTCAATCTATAAACACAGCCCATCTCTCCATTTACCAGGTCTTCTTCAGCCTCTCTCAG
GAGAGTTGTTTACCTTTTCAATGTATTACATTGAAATATATGCTTTTAAATTCTGCACCTAGAAATTCACTTTCAACAATTATGAAAGGCATTT
TATATTCACATTCATTACATGTAATCTGAGATGGTGAATCCCAAGATGTTACAGGAATTCGTACATGTCATCGTTGGTGAAGTTTATTTACAAG
TTATTTAAATATTTTACAGTTTAGGGTTTTTGCTTGGTTGGCACATTCTTCAGTACTGTTCTTCACCATTCTTTTTATTTTATATTATTTTTTA
GAAACAGTGTTTCACTGTGTCACCCAGGCTGGAGTGAACTGGCAAGAAGCTCACTGCAGCCTTGAACTCCTGAGTCCAAGTGATTCTCCCACCT
CAGCCTCCCGAGCAGCTGGGACTACAGGCTTGCACTGTCACGCCTGGGTGATTTTTTTTAGAGATGGGGGTCTCACTATGTTGCCCAGGCTGAC
CTTGAACTTCTGACCTCAAGCAATCCTCCCCTTTCAACCTCCCAAAGTATGGGGATTGTCAGCATGAGCCACCATGCCCAGCCCCCACCATTCT
TTTTTAGTAATGGAGTATTACTCTCATTGTCTATAAAATAAGGGAATATAGGTTGGAAGGCCAGCCATCCATTACAGGCTTCTGAAGACACATT
GCCACTCTGTGGCAGCTATTTCCGTGGGACTGTTTCCACAGGGCGATTATGCTTCACAGGATAAGATTATCTAGAAGTGAGGCATTTTGGAAAG
TTTCTTGTGTGTTATGATTTCTCTTGCAGAGTTGTGAAAACCGTGGCTGTGAAAATACTGAAAAACGAGGCCAATGACCCCGCTCTTAAAGATG
AGTTATTAGCAGAAGCAAATGTCATGCAGCAGCTGGACAACCCGTACATCGTGCGGATGATCGGGATATGCGAGGCCGAGTCCTGGATGCTGGT
TATGGAGATGGCAGAACTTGGTCCCCTCAATAAGTATTTGCAGCAGAACAGGTATTGTCAGGTGCCCCCACACATCTGGAAGCTATCCCCTAAG
GGACAGGGCCCACCCCTGGATGGGCCGAGCAGCCTGATTTCCTTGGGAAGCCTTCCCACCCTCCTGTGCCTTCCTTTATTGGTCCATACTCAGG
GACCTTGACAGAGGGACAGGGAGACATAGTCTTTGGATTCAGCTCTGTTAGCTCTAGTTGTTCAGAGAAGAACTCATTTGACAGTTTTGTCTTT
TTTTTCTTCCTGTAGTCATTCAGTCTTGGCCTAGTGATAGACTCAGCCTCAGAATATCTTGACATGGAATCTCCTTTCTCACTGGGAAGAACAC
TTTCTTTTTAAAGAAACATTTTAAATAAATGCTTTTCTAAGAGGTGACAGTTAAGTCTTATCTGTTTGGCTGACCTTATGTTCTCATGAGTGAT
GACTTCTGAAAATACCAATCACTGCTAATTGATTACATCCATCAAGGGAGTAATTGTGTTCTTCTCATCTAAAGCTGTTGTTGAGATGAAGAAA
CTCACTTGGAGTAAGACAGAATGATGGCCACCGAGGAGCTTGCCTCATTTGCTGTGCTACGTTTGTACTTAGATTGTCTCTTTAGTCTCCATGG
AAGGGAGGTGTTCTTACCCTGACTTTGTAGGTGAGAAACTGATTCTCAGGGTTAGTTCTGTGACCTGTGTGATACTGGAACAAGGATTTGAGGT
GGTGCCTGGCTATCTGTGAGCCAGGCCTGACTACTCTGTTATACTGCTTTTCTTGCAATTCCAAGCATGCCAGGAAACTCAATCCCATTGAACA
CCAGGAGAATATGGCATTGAGTCCTGAAGAGCTATATGCTAACAAAGTTATTTGTCACCACTCGTGAGTTTTGTTGTTTAAGAAGAGGGAAGGA
GTAGATTCACCCACTGCCTGCGTGAGGAGCATGGTTGTTTGTTGTGAAATGGGTCACTGTCTGTTATAGCTGATGAGATCATTATGACTTTCAG
ACATGTCAAGGATAAGAACATCATAGAACTGGTTCATCAGGTTTCCATGGGCATGAAGTACTTGGAGGAGAGCAATTTTGTGCACAGAGATCTG
GCTGCAAGAAATGTGTTGCTAGTTACCCAACATTACGCCAAGATCAGTGATTTCGGACTTTCCAAAGCACTGCGTGCTGATGAAAACTACTACA
AGGTAAGTACAACTTAGCTAATATTCAGAGCAGCAGGTGGTAAAAAATGCAAGATAAATGTACGTTTTCTTTATTTTATTATTGGTATGGTTTC
AAAAAGCAGTTTTGCTACTGAAAAATAACTATGTAAGATATGTTCTTATAATCTTTGATTTTACTGTTTAAAAAATAAAAATAATATCACACCT
TGAGATTTACTCAAAGTAGTATATTCTAAATTATGTTTCATGGAATGATCAGGAATCGAGGTATTAAGTGAAGATTTGTTTTGAAAAAAGAAGA
ATGGGATTCCTTCATTAAGTTAATTTGAAAAGTTTGCATTGGACAGCTTGATTCTTGCAGGATTTCCCCGAAGCCCTTTTCATGCTACTTAACA
TTACGAATCTCAGTAGAGGGTTTACTGCACTGCATTTCTCAAACCAGATTCATCCATGGCATCCTTTTCTGATAGGACATTTCATAACATGTGG
TGGAACACTGTCCCACAGCATGGAGCTATTGGAGCTTGGAGCTCCAGTACTGCAGTTCAGAGCTCCAATATTGCAGCTTGGAGCTATTCCAAAA
TAACTTTCTAATGAACACCTACCTATACATGCAAAAGTTAGAAAGTGAAGATTTACCAAATAAACTCGTCATCTGTGTATGTCCACTACATATG
TAGAAATTGTTCTATTGGCTTAACTGGTATCCAGAAGAGTTGAAGTGTCAAAAAATAGATGCAGTGCTGGAAAGAAGAGATCTAGATAGTTATG
TGACTGAAGCTAAAAGAAATATGCCCCTTGGTTTGGTCAGGCAGAGATTATCAAGAATTAAGGGTGGACTTCCAGCAAAACATAAAGTAGAAAC
TAGTTCTGGGTGCAGGTTTGGACTTCCTAAAAAATAATTTCACAGTGACCAATCCCCTTGCTAATATAACTTGACCCCTCTCTGAACCCTCAAA
TGAACCAATAACAACTAAAAGAAGAAAAGATAAGAAAGCTCTATCTTCATATTAACTCATCTGTGGTGTATACCTAGGGTCTATGTTAACCAAC
TGGAAAACGTGATGGCACCAATCCCACTGAGTCAAAGAGGGTGCCGAAGGCAGGTTAACAACCCTGCTAGTCTCTGGTGAAGTCCACATGCTCA
GAAATAGATGGCAGACCTTCAAAATCTACCTAGTGCGTGGCAGATAGGATCCTGTGTTTCATGCCCTGCAGTGGTCAGAGACCCCACCCTGAGT
GACAATACCCACCCACTCACCTTTCCCTAAGAGGCAGTCCATGGACTGGTAGGTGATGGGGAATGGTGGACCTCGGCCAGCAAAGGGACTGCAT
GAAGGGTAAGCCACAAGAGCCAAGCTCCCAGGCAGGCAGGCAGACTCCACCATCTTGAGCACAAAGGCCAGGCGAGAGTACAGCAGGGGTCAGG
CTGGCCCTCCTCACCCCATTCTTCATACAGTAGCTTCCCAGAAGGAAGCCCCTTCAGAGGTGAACCACTGTGAGAAAGGCATCAGCATGGGCCT
GGATAGAAATAGCAGGGAAACAGAGCAAGGAAGACAGCAGCCTAGGATGACCAGCATGGGACATGCTGGAGAAAGAAGCCTGTTGTAATGCTGG
ATGTACCTCATCATGATCATTACAGAAAAGAAGACAGGCTGTCTGAAACAAGGACACAGAGGAGATAGAGAAAATGAAACATGAATGCTGGGCA
CCTTATCCACTGCTGTATAACAAATCACCCCAAACTTACTGCCAAAAACACCACCAGGTGTTGGTTTCCCTGCCGTCCTGCTGTGTGGGCAGGG
CCAGGTAGGCAGGGTTCAGTGCGTCTGCTCACACAGGGGATTGCACAGTGGCCCGAGGGACAGGAGGACCGTTTCCACTCTGCTCACTCACACT
ACTCAGCCACTGAGCAGCTGGTTAGACACAGCCCATGCTGGAGACCTCTGCGGGGCTGTCAGCCAGCTCACCTGCACATGGCCTCTCCTTGGGG
CCCTTGGGCTTCCCTTGGGCCCATGCTTCCCTTGGGCAGCATGGCAGCTGCGGGCTGAGAGCAGTTACCCAAGAGGCAGGAAGTGGGGGCTGCC
AGGCCTATAAAACCAGGCCCAGAAACTACCTCAGGGTCATTTCCACCTGATCCTATTGGTCAGAGCAGCCAAGGCCACCAGCTTCAAAGGATGG
GATAGATAGAACCACCCTTTTGAGGAGAAGTGTCAAAGAGTCAAAGAACATGGGGCCAATTCTAAAACTGCTGTAGATATTAAACAGCATACCA
TTAAAAAGTAAACTAAACTAAAAAGTAAACCAAAGATTGTCTTTGGACAATCAATGAAGAAAAAAAGCCACTAGGGAAATAAAAGCCATCTTGG
AAGCAGCAAAAAGAGACAAAACTACCGAAAAGATAGGGTAGTGGAAGATTTCTGTATGAAAACAAAGCAAAGTGAAATGGAAAAGAATAAAAAG
TGGGCCGGGCGTGGTGGCTCACGCCTGTAATCCCAGCACTTTGGGAGGCTGAGGTGGCTGGATTACCTGAGGTCACGAGTTCGAGACCAGCCTG
GCCAACATGGTGAAATCCCGTCTCTACTAAAAACACAAAAATTAGCCAGGCATGGTGGCAGGCACCTGTAATCCCAGCTACTCTGGTGGCTGAG
GCAGGAGAATTGCTTGAGCCCGGGAGGTGGAGGTTGCAGTGAGCTGAGATCGTGCCACTGCACTCTAGCCTGGCCAACAGAGCAAGACTCTGTC
TCAAAAAAAAAAAAGGAATAAAAAGTGAAACAAGATCAAAGAAAAGTGCTAGCTGTGGAAGCAAACGAACGCTGGCACTCGGGAAACCATGCGT
GACAGGGTAGATTTGTGCAGCATCACAACTGAAAAACACAGGTGTTCTTTGATCCAGCAGCTCCTTCCGAGAGCAAACACACACATCTGGTAAT
GTGCACTCTAGCACGGGCTGCCACGGCAAAAATCTGGAAACTGCCTGACGACTGCTCCGCAGGGTTTGGTCCAATCAGTCATAGCAGATTCACA
GGAAGCTCACAATGCAACCCTTTTAAAAGTGACTTATTTGCATGTGCTGACCTAGAAATATGTCTACTATACATGGTTAGGTAGAAAAATTAAA
AAGTACAGTGCTCAAAGAATATGCCCCTAGTTTTATGACCAGAAAAAAGTATACACTACCTATTTATGCATGTATCTAGGTTATTCTGAAGACA
GCCTAAATTTCATTGCATTTAAGATTTGTCAAAGGTTTACTTTTTTCATCAGTTCAAAATTCAGAAGAAACCTGAAATAACACACATGGTTGTA
TTGTTCATGACTTGTAAGATCAAAAGTTTAAAATAGCACACAAGGTGATGGAAACAGAAGTATAATCAGTTGTATCATTTGGAAGAGAAGTGCC
AGGGCACCTTATGGTCTCCAGATTGATGTCCTGAATGTCTCCTTGTGATCCACTGTAGTGTCATGAAATCAGTTTTCACTGAAATCATGTCCCC
CTCTCCACCCCAATGAGACCTCACACAGGTGACATCAGCAGAAGATAACCAGACTCCGCTGTGTGCCCCCTGAATCCCAAACCCAGAGAGAGGG
TTTTGCTATGCAGTTTTGACCTCTGTACTATCACTTGGTTTTTAAAATTAGGAAATTAGAATGCTTAGATCATTTTTTAATGATGCTAGCAAGT
AGTGCATGCTAAAATAATTGACCTGGGTGGAGAACTGATCAAGATGGACGACTAAATGCAACTAGTATATGCTCCTCCGTAGAGACGGACCAAA
ATAACAAGTACATATTCACACTTCCAATAGATGGTCTAAGAGAGAACACAGATGCAACCAAGGAGCGACAGGAAGCACCAAAAGCAAAGCACAG
GGAAACAAGGCAGCCTGCTTGGCCAGGAATGACTGGGACCTGGGAGAAGCTTCCAGATATGGGGAAAGCATAAATGAGAGATCCCCAGGGCTCC
ACATTCCAGCCAAGGACTTCTACAATCCTAGCGACAGAAGAACCCCTCGACCCACGTGGGCCTTAAGACTAACATAGGGAGCTGCCTAGGGATC
ACACAGAGGCATTGCTCCATAGAGGGAACTCACGCTGAGTCCCACAGGCTTCCAAGCTCTGAGTAGCTGCAGCTTGGTGCCATACTGAGAACCA
AGTCCCCAAAGGACTGCATCTTGCCCTGGGACTATTGCTGATGCTGCCATCACCAGGCCAAGGACAGAGGGGAGAATGGACACCTTCACACACC
CCAGGGACAGATCCCCCTGCTGCTACAGGCTGCTGTGGGGCTGAGACACAAGCAAATCACACCCCCTATAGCTGCCTGCCTACACTGCTCCCCC
TGAGAATGTCCGCAGCCTCCCCAGGAGCAGGCCCATAGCCAGCGCCATTCTGAGAGCCAAGCCTCCAAAGGTCTGTGTCCTTCCTTGGGCCAGG
GCTGATGCTGCCACTGCCCCGCCACATAGGGAGAAGGGAGGCCAGGCACTTTCACATGCCACAAAAACAAATACCACCACCACTGCTGAGGGCT
GCTGTGGGACCAAGGCTCAAGAAGACTGCATATCCCACAGCTACCTGCCTACTCTGCACCTATTGAGAGTGGCCCTACCCTTTCTGGTGGTAGG
CCTTCAGGGCAGCCACTGCTGGCAACCTAGAGACCACCCCTCCCTGCGTATCACAGCCAGCAGCTGAATGCACCACCAGGGAGCCTGAGCACAA
GTCCATTGGCCTAGTCACATGCCCCAATACTTGAGCATGACATCCTGTTGCAGCCACCGCCAACACCAACATGGACCACTTGGGTTCCAGTGAG
TTGCCCTACCACCATTACTGCCATCACCCACATCACACCCACTCCCCAGGAACCCAAGAACCTGCCCACATGCCCAGCCACTGCAGCATCCACA
CAATCTACCTGAAAGCCCAAGGGTCAGCCTTCTTAGACCTACTAACACCAGTGCTAGTGTATACCGCCCTAGGGCCCAAGGACAGGCATACTCA
GCTCACTGCTGTCACCACTGGGGTCTGAAGACTGGCCCACCTAGCATCCTATTCACAGTACACCTTCACAACAGCCTCCACTAATAACCATACC
CTAAGGCACTGAGAAAATCACAGGTGTCACTGAGGCTGTTTATGGCCATAGAAATTATACATAGATTAAATACTCCATTCACCCCAAATCAAAC
CCAAAGTGCCCTACATATATATATGTGTGTGTGTATATATACACACATACACATACGTGTATATATACACACATACACATACGTGTATATATAC
ACGCATATACACATACACATACGTGTATATATACACATACACATACACATACGTGTATATATACACACATATACACATACGTGTATATATACAC
ACATATACACATACACATACGTGTATATATACACACATACACATACGTGTATACATACATACACACATACGTGTATATATGCATACATACACAT
ATGTGTATATATACATACATATACACATATGTGTGTACATATACATACACATACACATATGTGTGTACATATACATACACACACATACACATAT
GTCTACATGTACATACATACACATACACATATGTGTACATGTACATACATACACATACACATATGTGTACATGTACATACATACACATACACAT
ATGTGTACATCTACATATATACACATATACACATATGTGTACATGTACATATATACACATATACACATATGTGTACATGTACATATATACACAT
ATACACATATGTGTACATGTACATATACACATATACACATATGTCTACATGTACATATACACATATACACATATGTGTACATGCACATATACAC
ATGTGTACATGCACATATACACATATGTGTACATACACATATACACATATGTGTGTATATACATATACACACATATGTGTGTATATACATATAT
ACATATATACATATATATACATATGCACATATGTGTATATATACATATATATACATATGCACATATGTGTATATATATACACACATATATGTGT
ATATATATATATACCCAACATATATATACCCAACAACATATATATATTTTCAGGAAAAAGACCTCCTCTACAAAAGCAATTTCAAAAAACTGGA
AGAAATGACTGTTGTACCACATGGGCAGATATCAATGTAAGAACACAGGAAACATGAAAAAGCAAGGAAATATGATACCTCCAAAGGAACACAC
AATTCTCCAGCAAAAAAATCCCAATCAAAAAGAAATTCACAAAACCCCAGATGAACAATTCAAAATATTGATTTTAAAGAAGCTAAATAAGATA
TAAGAGAATTCTGAAAAACAATAGAGAGAATTCAGAAAAACAGTTCAGGATATGAATGAGAAATTTATCAAAGAAATAGATATTTTTAAAAGAA
CCAAACAGAAATTCTGGAACTAAAGATTCATTGAATGCAATAAAAAATACATCCCAAACTCCACCAATAGACTAGATCAGGCAAAAGAAAGAAT
CTCAGAACTTGAAGACAGGTCTTTTGAAACAACCTATTCAGACAAAAATAAAGAGAAAAGAATAAAAAAGAATGAGCAAACCCTTCATGATATA
TGGGGCAGTGTAAAGCAACTGAATATTCAAATCATCAGTGTCCCCAAGGGTGAAGAGAGAATGAAAGATTAGAAATCCTATTTAATGAAATATT
AGATCAAAACTTCCCAAATATAACAACAAACCTAGACATCCAGATGCAGGAGGCCCAAAGGTCCCCAAACAGATACAATGCAAAATCATCTTCT
CCACAGCACGTTATAATCAAACCACTTAAAGTCAAAGCAAAAGCAAATATACTAAAAAGAGCAAAAGAAAATCTTCTAATTACCCATAAAGGAA
CCACCATTAGACTAACAGTGGATTTCTCAGCAGACACCTTACAGGCCAGGAGAGAAGGGGATGACATTTTCAAAGTGCTGAAAGAAAAATACTG
CCACCCAAGGAGACCATGTCCAGCAAAACTATTCTTCATAAATAAAAGAAAAATAAAGCCTTTCCCAGGTAAGCAAACACTGAGGGAATTCATC
ACCACTAGACTGATCCTAGAAGAAATACTCAAAGGAATCTTAAACGTGGAAGTAAAAGGACAATATTTACCATCATAAAAACACACAAAAGTAT
AAAACTCACTGGTAAACCAAACATACAAATAATCCTGTTAAATAGTGGGCTAAGAACATAGATAGACATTTCTCAAAAGAAGATATACAAATGG
CCAACAGGTATATGAAAAAATGCTCAATATCACCAAACAGCAGGGAAATGCAAATTACAAACACAATGAGATACCATCTTACCCCGGCTAGAAT
GGCTGTTATTAAAAAGACTTTTTTTAAAAAAATGCTTTGCAGATGCAGGAAAAAAAGGAACTCTTATACACTGTTTGTGGGAATGTAAATTAGT
ATAGTCACTACGGAAAATATTAGAGAGACTTCTCAAAACAAAAACAGGCTGGGCACGGTGGCTCACACCTGTAATCCCAGCAGTTTTGGAAGCC
CGAGGCGGGCAGATCACAAGGTCAGGAGATCAAGACCATCCTGGCTAACACGGTGAAACCCTGTCTCTACTAAAAATACAAAAAATTGGCCAGG
CCTGGTGACAGGTGCCTGTCATCCCAGCTACCTGGGAGGCTGAGGCAGAAGAATGGCATGAACCCAGGAGGCGGAGCTTGCAGTGAGCTGAAAT
CACACTACTGCACACTCCAGCCTGGGCGATAGAGTGAGACTCCATCTCAAAAACAAAAAGAAGAAAAAAAAACTAACTACACATAGAATTACCA
TATGATCCAGCAAGTCTACTATTGGGTATTTATCCAGAGGCAAATAAACTTGTATCAAAGGGACACATACACTCAACGTGCTTATCATAGAACT
ATTCACAATAGCAAAGATGTGGAATCAACCTAACTGTCCATGGATGGATGAATGGATAAAGAAAATGTGGTGTGTATATATATATATACACCTC
TAGAGGTGTTCACTGGTTACTTAGGGTACACCCTATGTAAATGAAGAGGCTAAAGTGAAGTTACAAAGTTATTTACTTGGTGTACACCCTATGT
AAATGAGGAGGATGAAGTAATGTTACAAAGTCATTTACTGAGTGTACACCCTGTGTAAATGAAGAGGATATTTCCTGTCATAGCTGAAGTGTTT
CCATTTGATTTAGTTCTAGGAAGTCCTTAGGTTCCCTGCCTCCAGGCCCTATTCTCCTGTCTCAATTTCACTCAGCATAATGTCCTCTAGGCTC
ATGCATATTGTAGTGAATTCCCTTCCTTTTGAAGGCTGAATGCTATTCCATTGTCTATATAGAGGGTGTTTTGTTTATCCACTCATCTGCTGAA
GGACACTTGGGTTGCTTTCATGTTTTAGCTATTGGGAATAATGCTGCTATGAACATGAATGTACACAATTTTATGCTTTTCTTTCTTTCTTTTT
TTTTTTTTTTTTGAGATGGAGTCTCTCGTTGTGTCACCCAGGCTGCAGTGCAGTGGTGTGATCTGAGATCACTGCAACCTCTGCCTTCTGGGTT
CAAGCAATTCTCCTGCCTCAGCCTCCCAAGTAGCTGGAATTACAGGCACCCGCCACCACACCTGGCTAATTTTTGTATTTTTAATAGAGATGGG
GTTTCCTCTTGGCCAGGCTGGTCTCAAGCTCCCGATCTCAAGTGATCTGCTCTCCTCAGCCTCCCAAAGTGCTGGGATTACAGGCATGAACCAA
TGTGCCCGGCCCACAATTTTATTCTTAATGGAATTTCTCCCTCTGCTTTGCTTTTAGGCCCAGACCCATGGAAAGTGGCCTGTCAAGTGGTACG
CTCCGGAATGCATCAACTACTACAAGTTCTCCAGCAAAAGCGATGTCTGGAGCTTTGGAGTCTTGATGTGGGAAGCATTCTCCTATGGGCAGAA
GCCATATCGAGTGAGCCAGTCCTGCTTCATTTTCTCACTGTGGGGCCATTAGAACAGATAAGCACCAGATTGTCTTTACAACAACCTGAAAATC
CTAATCTGAGTCTCTCATTATCTTTTACCAGTAAGCAGTTAATGTGCCCTCAGTCTATTCCAAACTGAGAATGAAATATCTGATGCTCACTGAA
GAGTGTGTTTTTCCCATTGTGTGTCAACACATGTAAATATACACAAAATATAACCCAGATCATTACTCATTAGAGTTGAAATAGAAATAATGAC
TATTTACAGTATCTTAATTACATTTTTTAGATCTTTTAATTAAAACATATATACCAAAAAGGGCACAACTCTTAGCATGCAGTACAGTGGTTTT
CCACAAATGAAACATACCCATGAAATCAGCCCCCAGATCAAGAACAGAACCCCAGAAGCCTGTTTCCTCTGCACACACAGCCTTCCCCAGGGGT
GACCCAACTGACTCCAACATCACAGATTAAGTGCTCCTGTTTTTATACTTCGTATAATTGAAATCATACAATGTGTACTCCTTCATGTCTTGGA
GTGGCTGTTTTGTTTTGTTTGACTAACACCTTTAAAAAAAAAAAAGCTTATGCATATCTTGCATGTTGTAGGGGATGAAAGGAAGTGAAGTCAC
CGCTATGTTAGAGAAAGGAGACCGGATGGGGTGCCCTGCAGGGTGTCCAAGAGAGATGTACGATCTCATGAATCTGTGCTGGACATACGAGTGA
GTACCTGACACTGACTGTGATGTATTCAGATGCTCTGGAAACAGGTGAAATGGTTGGGCGTCTAAAAAAAAGGATAAAGTTCACCTTTTCATGA
ATCAGGAATGTGCCCGCTTTCTAAACAAACAACGGTGCCGGCTCGTCTTGCTTTAGAGACCTTGCTTTCTGGCCCATGCACTTACATGTAGTAG
AGCCTAAAGAGCAAGTTTAGATGGGGACTCTAACCCGAGTGTCCAAATTTAAATGTCGATAATGGTGGAGAGATGGGGCAAGGGCAGTCAAAGT
AAAAAAGTGTTTGTAAGAGTTTGGGGCTGGATGCCATTTTTGGCATAGAGGATGGCAGAAGCACTCGGTAGGGGATGGTATACTTTCCTGACTC
CCTGATTACCATGAGCAGTGAGGGCTGACCTCGGACTCTGGCCAGCTCACAGATACATTGGCTAAGGTTGCACTTCCCTAGAATCTACCTCATC
CTTGAAGTCGTGGCCTCAGTCCACCCTGACTGCCGTCATACGTCTCGCTTAGTGGATCCCAGGTGCTGTTATGCTTTTAAAGTACACCTGGCAT
TATTCTTAGGTGATGTTCAGGGCAGCTCAGCAAGGAAGGAAAATGCATTGCCACTGAAAATTAGGAGTACAGTTTTGCCAGGCTCAGCAGCCTG
CTTGTGCGTGCATAGCACGGTGACCCCAAGCCGCCATCTCCAGTTCCCTGGTACTGAACTGTGCACACAGAGCCCACACAGCTGAGAATCGATG
TGGTTTGTGATCAGGAGGACATCACAAATCCTGGCCATGGATTTGATGCTTTGCGGAATCAGGTTTGCCTTCAGATACAGCTGACATTGCCAGA
GCCTCTGAAAGATGAGGGCTATTCCAAATGCTGCAGATGCCACCTGGGATTCCGAGACCTCCCCTCCCCACCCTGGGAGTATCACTCTACCACA
ATTGTGAGTGACAGGGAAATAATCTCATTCTGTATCTAGAAACCACCCAGGGGGCAGCCACAAAGGCAGCAGGCAAACTGTGGGTATATGCTTC
CCTGCCCCTGCTGCTCCCGTCGCTCAGGAGAGGAGCCTGGCCTGGGCCCCGGAGCATCTTCTCCAACCCCAAGTGTTAGTGCAACAGGGAGAGC
TAAGTGTCAGCAAGAGGGAAGTGCTACTCATGGATCTAAGAGGATGTTTATTCCTAAGTCTTGGCTTAATTCTCCCAGTGCCTAAACTAGAATC
GTAAGAACCATTGGCAGGTACGCACTGGCAGCACTGGACCCTGGGGAGGGCAGCCCTTGGGCACGTGGCAGCCTATGACCCTTTACTGAAAGTG
TTCTTTGGTCCAGCCTGCAGCTCCCTTTCCAAGGCTTCCCTTCTTGTAGAAGGGTGA
HUMAN SEQUENCE—mRNA
GAGGAAGAGCCGCGGGCCCGGCGGCTGAGGCCACCCCGGCGGCGGCTGGAGAGCGAGGAGGAGCGGGTGGCCCCGCGCTGCGCCCGCCCTCGCC
TCACCTGGCGCAGGTGGACACCTGCGCAGGTGTGTGCCCTCCGGCCCCTGAAGCATGGCCAGCAGCGGCATGGCTGACAGCGCCAACCACCTGC
CCTTCTTTTTCGGCAACATCACCCCGGAGGAGGCAGAAGATTACCTGGTCCAGGGGGGCATGAGTGATGGGCTTTATTTGCTGCGCCAGAGCCG
CAACTACCTGGGTGGCTTCGCCCTGTCCGTGGCCCACGGGAGGAAGGCACACCACTACACCATCGAGCGGGAGCTGAATGGCACCTACGCCATC
GCCGGTGGCAGGACCCATGCCAGCCCCGCCGACCTCTGCCACTACCACTCCCAGGAGTCTCATGGCCTGGTCTGCCTCCTCAAGAAGCCCTTCA
ACCGGCCCCAAGGGGTGCAGCCCAAGACTGGGCCCTTTGAGCATTTGAAGGAAAACCTCATCAGGGAATATGTGAAGCACACATGGAACCTGCA
GGGTCAGGCTCTGGAGCAGGCCATCATCAGTCAGAAGCCTCAGCTGGAGAAGCTGATCGCTACCACAGCCCATGAAAAAATGCCTTGGTTCCAT
GGAAAAATCTCTCGGGAAGAATCTGAGCAAATTGTCCTGATAGGATCAAAGACAAATGGAAAGTTCCTGATCCGAGCCAGAGACAACAACGGCT
CCTACGCCCTGTGCCTGCTGCACGAAGGGAAGGTGCTGCACTATCGCATCGACAAAGACAAGACAGGGAAGCTCTCCATCCCCGAGGGAAAGAA
GTTCGACACGCTCTGGCAGCTAGTCGAGCATTATTCTTATAAAGCAGATGGTTTGTTAAGAGTTCTTACTGTCCCATGTCAAAAAATCGGCACA
CATTCAATCCGTATGAGCCAGAACTTGCACCCTGGGCTGCAGACAAAGGCCCCCAGAGAGAAGCCCTACCCATGGACACAGAGGTGTACGAGAG
CCCCTACGCGGACCCCGAGGAGATCAGGCCCAAGGAGGTTTACCTGGACCGAAAGCTGCTGACGCTGGAAGACAAAGAACTGGGCTCTGGTAAT
TTTGGAACTGTGAAAAAGGGCTACTACCAAATGAAAAAAGTTGTGAAAACCGTGGCTGTGAAAATACTGAAAAACGAGGCCAATGACCCCGCTC
TTAAAGATGAGTTATTAGCAGAAGCAAATGTCATGCAGCAGCTGGACAACCCGTACATCGTGCGGATGATCGGGATATGCGAGGCCGAGTCCTG
GATGCTGGTTATGGAGATGGCAGAACTTGGTCCCCTCAATAAGTATTTGCAGCAGAACAGACATGTCAAGGATAAGAACATCATAGAACTGGTT
CATCAGGTTTCCATGGGCATGAAGTACTTGGAGGAGACCAATTTTGTGCACAGAGATCTGGCTGCAAGAAATGTGTTGCTAGTTACCCAACATT
ACGCCAAGATCAGTGATTTCGGACTTTCCAAAGCACTGCGTGCTGATGAAAACTACTACAAGGCCCAGACCCATGGAAAGTGGCCTGTCAAGTG
GTACGCTCCGGAATGCATCAACTACTACAAGTTCTCCAGCAAAAGCGATGTCTGGAGCTTTGGAGTGTTGATGTGGGAAGCATTCTCCTATGGG
CAGAAGCCATATCGAGGGATGAAAGGAAGTGAAGTCACCGCTATGTTAGAGAAAGGAGAGCGGATGGGGTGCCCTGCAGGGTGTCCAAGAGAGA
TGTACGATCTCATGAATCTGTGCTGGACATACGATGTGGAAAACAGGCCCGGATTCGCAGCAGTGGAACTGCGGCTGCGCAATTACTACTATGA
CGTGGTGAACTAACCGCTCCCGCACCTGTCGGTGGCTGCCTTTGATCACAGGAGCAATCACAGGAAAATGTATCCAGAGGAATTGATTGTCAGC
CACCTCCCTCTGCCAGTCGGGAGAGCCAGGCTTGGATGGAACATGCCCACAACTTGTCACCCAAAGCCTGTCCCAGGACTCACCCTCCACAAAG
CAAAGGCAGTCCCGGGAGAAAAGACGGATGGCAGGATCCAAGGGGCTAGCTGGATTTGTTTGTTTTCTTGTCTGTGTGATTTTCATACAGGTTA
TTTTTACGATCTGTTTCCAAATCCCTTTCATGTCTTTCCACTTCTCTGGGTCCCGGGGTGCATTTGTTACTCATCGGGCCCAGGGACATTGCAG
AGTGGCCTAGAGCACTCTCACCCCAAGCGGCCTTTTCCAAATGCCCAAGGATGCCTTAGCATGTGACTCCTGAAGGGAAGGCAAAGGCAGAGGA
ATTTGGCTGCTTCTACGGCCATGAGACTGATCCCTGGCCACTGAAAAGCTTTCCTGACAATAAAAATGTTTTGAGGCTTTAAAAAGAAAAAAAA
AAA
HUMAN SEQUENCE—CODING
ATGGCCAGCAGCGGCATGGCTGACAGCGCCAACCACCTGCCCTTCTTTTTCGGCAACATCACCCGGGAGGAGGCAGAAGATTACCTGGTCCAGG
GGGGCATGAGTGATGGGCTTTATTTGCTGCGCCAGAGCCGCAACTACCTGGGTGGCTTCGCCCTGTCCGTGGCCCACGGGAGGAAGGCACACCA
CTACACCATCGAGCGGGAGCTGAATGGCACCTACGCCATCGCCGGTGGCAGGACCCATGCCAGCCCCGCCGACCTCTGCCACTACCACTCCCAG
GAGTCTGATGGCCTGGTCTGCCTCCTCAAGAAGCCCTTCAACCGGCCCCAAGGGGTGCAGCCCAAGACTGGGCCCTTTGAGGATTTGAAGGAAA
ACCTCATCAGGGAATATGTGAAGCAGACATGGAACCTGCAGGGTCAGGCTCTGGAGCAGGCCATCATCAGTCAGAAGCCTCAGCTGGAGAAGCT
GATCGCTACCACAGCCCATGAAAAAATGCCTTGGTTCCATGGAAAAATCTCTCGGGAAGAATCTGAGCAAATTGTCCTGATAGGATCAAAGACA
AATGGAAAGTTCCTGATCCGAGCCAGAGACAACAACGGCTCCTACGCCCTGTGCCTGCTGCACGAAGGGAAGGTGCTGCACTATCGCATCGACA
AAGACAAGACAGGGAAGCTCTCCATCCCCGAGGGAAAGAAGTTCGACACGCTCTGGCAGCTAGTCGAGCATTATTCTTATAAAGCAGATGGTTT
GTTAAGAGTTCTTACTGTCCCATGTCAAAAAATCGGCAGACAGGGAAATGTTAATTTTGGAGGCCGTCCACAACTTCCAGGTTCCCATCCTGCG
TCCTCCCCTGCCCAAGGGAACCGGCAAGAGAGTACTGTGTCATTCAATCCGTATGAGCCAGAACTTGCACCCTGGGCTGCAGACAAAGGCCCCC
AGAGAGAAGCCCTACCCATGGACACAGAGGTGTACGAGAGCCCCTACGCGGACCCCGAGGAGATCAGGCCCAAGGAGGTTTACCTGGACCGAAA
GCTGCTGACGCTGGAAGACAAAGAACTGGGCTCTGGTAATTTTGGAACTGTGAAAAAGGGCTACTACCAAATGAAAAAAGTTGTGAAAACCGTG
GCTGTGAAAATACTGAAAAACGAGGCCAATGACCCCGCTCTTAAAGATGAGTTATTAGCAGAAGCAAATGTCATGCAGCAGCTGGACAACCCGT
ACATCGTGCGGATGATCGGGATATGCGAGGCCGAGTCCTGGATGCTGGTTATGGAGATGGCAGAACTTGGTCCCCTCAATAAGTATTTGCAGCA
GAACAGACATGTCAAGGATAAGAACATCATAGAACTGGTTCATCAGGTTTCCATGGGCATGAAGTACTTGGAGGAGAGCAATTTTGTGCACAGA
GATCTGGCTGCAAGAAATGTGTTGCTAGTTACCCAACATTACGCCAAGATCAGTGATTTCGGACTTTCCAAAGCACTGCGTGCTGATGAAAACT
ACTACAAGGCCCAGACCCATGGAAAGTGGCCTGTCAAGTGGTACGCTCCGGAATGCATCAACTACTACAAGTTCTCCAGCAAAAGCGATGTCTG
GAGCTTTGGAGTGTTGATGTGGGAAGCATTCTCCTATGGGCAGAAGCCATATCGAGGGATGAAAGGAAGTGAAGTCACCGCTATGTTAGAGAAA
GGAGAGCGGATGGGGTGCCCTGCAGGGTGTCCAAGAGAGATGTACGATCTCATGAATCTGTGCTGGACATACGATGTGGAAAACAGGCCCGGAT
TCGCAGCAGTGGAACTGCGGCTGCGCAATTACTACTATGACGTGGTGAACTAA

[0303] TABLE 40
MOUSE NOMENCLATURE
ICSGNM Gnb1
Celera mCG23363
HUMAN NOMENCLATURE
HGNC GNB1
Celera hCG23470
MOUSE SEQUENCE—GENOMIC
AAGAGGGCACTAGATCTCATTATAGATGGTTGTAAGCCACCATGTGGTTGCTGGGAATTGAACTCAGGACCTCCGGAAGAACGGACAGTGCTCT
TAACCTCTGAGCCATCTCTCCAAGCCCTTTGTTTTTTGTTTTTGTTTTTGTTTTTTTAATTTCTGATATTAGAAATTTCTTTTATTTTTTAATT
AGATATTTTCTTCATTTACATTTCAAATGCTATCCTGAAAGTCCTCTATACCCTCCCCGCCCCCACCCTGCTCCCCAACCCACCCACTCCTGCT
TCCTCGCTCTGGCATTCCCCTCCTTTGTTTGTTTTTTGAGTCAGGCTTTCTCTGAGTCTCTGTAGACCAGGCTGGCCTGGAAGAGACAAAGAGA
TCTCACTGAGATTTTTATACACACTCAGAGAAAGAGACAGAGACACAGGGGTGAGGGTGGCTGGTATTAAAGGTGCTGGCCACCACTGTCCAAC
TAGGATGTGTTCTTAAAACATTCTAGGTACTGGTTGTTTATAAGGCTTGAGGCAGAATTGCTTGAAGATGGGAGATAGACCAGCAAGAAGGCCA
TGAGGCCTAAAGGGTGTTTTGGGGGTGGGGTGGGGCAGGGGAGAGGGTTGGTTGTTTTATATCAAGGCCCTTCCATTCCTAATTAGCAAGGCTT
CATTTAGGTCCCAGATAGCTTCTAGACTTGGAAAAAAAGTTTTTTTTGTTTTTGTTTGTTCGTTCGTTTTTTTTTTTTTTAAAGCAACAAGGGC
TCTTTTTTTTTTTTTAAAGATTTATTAATTATATGTAAGTACACTGTAGCTGTCCTCAGAGACTCCAGAAGAGGGCGCCAGATCTCATTACGGA
TGGTTGTGACCCACCATGTGTTTGCCGGGATTTGAACTCAGGACCTTTGGAAGAGCAGTCAGTGCTCTTACCCACTGAGTCATCTCACCAGCCG
TTCGTTTTGTTTTTTTTACCACTTGGACTACTGACCTAGGTGGGATTTGCCGCTGGGGTTAAGGGAGTAGGATGAGGTCTATAAAGAACTGAGA
GTAATAAGTGCTCCTGAGGCAGCAGAGCCACTTTGTTTCTAACGCTTGGGGTCTGAACATTGAAATCACCGTTTATGTGTGGTTTCACAGATTC
AGCTCTTTAAATGGACATGATACTTAGCTTTGAATCCTCTCCATTCTTGGGCTGGTGAGCAGGAAGCCGGCCTTTTCACTATAGCTCACTCTGC
CCCATAGCAGGTACTTCAGTCAGTCTGGGGGAGGGAAGGAAATTGTTTGTAGAGGAGAATTTTAAAAATAAGGCATTGCTGAATTTTTAAAAAG
AAGCATTACCTTTCTCAGGACTCAGCCCTGACAATTAGCTCCATTAACACACAAATACCTGTCTCCACTGCAAAAGGGTAGAAAAACTTCCCAT
GCTATTTGGTGAAAATTGAGTTGTGCCCAGAAACGATATCTTTGTTTCTAAGCACAAGTTGTACTTACAGTTCCTTCCCTTTGGAGAGGGCATG
CTGCCACTTTCATCTGACTTCAGGTGAGTTTCCAGAGGATCATACCTAGAACAGTGTTTAAGAGTTTCGAAGAAGCCAGGTGTGGTGGCGCACG
CCTTTAATCCCAGCACTCGGGAGGCAGAGGCAGGTGCATTTCAGAGTTTGCGGCCAGCCTGATCTACAAAGTGAGTTCCAGGACAGCCAGGGCT
ATCAGAGAAACCCTGTCTCGGAAAAAAAAAGAGTTACGTTGTTGCTGATAGGTACATATGCCATGTACATAAAACTTTCTTTCACCCACTTTTC
GAGTCATCCTGATACCTGGCCATGGCCTTCATGTAGTGTGAGAAAGTGGAGAGAAAGAGTGGGCAGCAAGCCAGGATGTTAAACTGTTTTGGGG
TGTGGGGTGGTGTAGTAAAATAAACGGGAAGTTTGACAAGAGAATTAAAAGACAATTCCTGAATATTAGTTTTTTTCACTTCTGAAACATGGAT
ATATAAGCCCCAAGATCCGCCATTTAGATGTTTAAACAAATTTGGATAAGTACCGAGGTTGCATCATTATGAAACTAACCAGAAGTGGCTGTGC
GCTCCAGTTGTACCGGAACAAAATGATGCTGGCACAGCAAGCTTCATGTCCTTTAGAACTTTATTATAAAGTTGGAGATGTTTTTTAGATACAT
TGGTATATTTGCATTATAGACTTAATGAATGTATGTAATGCCAAACAATGCTAAAATACTGACTTTTTAAAAAAAATATTAGTAAGTTAGGAGT
GTTGGTGGGTAGTTCAAGGTAATCCTAAACTACCTAGTGAGTTTGAAATCAATTGGGCTACATAAGACCTTGTCTTTAAAATATCAAAATAATA
ATTAAAGAAATGATTTAAACATACAGACTATATTACACTATATTACAAAGATCTCTCAGTTTATATTTACAGAATTCCGAGTTATATCTAATTG
CCTTTCTTCTCTTTCCTAATCCTTCTTTACTCTCTTGAAGTGGTTTTAAGGCAAACCCCCAAATCTTGCCCCCCCCCCCCCCGCCCCAATGAAT
AACAAGTTAGGAGTTCAAATCTGGTAGGATATCTAGCAGGAAAACAATAGTTTTCTTCTGTTTTCTGTCTGATTTTTCCCTTCTAAAAATGTAT
ATACAGCTGAATTTTTTTTTTTTTTTTNNNNNNNNNNNNNNNNNNNNNNNNNNNNNNNNNNNNNNNNNNNNNNNNNNNNNNNNNNNNNNNNNNN
NNNNNTTAATATGTACCCCACGTTGACCCAGTTCTCACAGTCCTCCTGCTTAGGTTTGTTTGTTTGTTTGTTTGTTTTTTTAAGATTTATTTAT
TTATTTATTATATGTAAGTGCACTGTAGCTGTCCTCAGACACTCCAGAAGAGGGAGTCAGATCTTGTTACGGATGGTTGTGAGCCACCATGTGG
TTGCTGGGATTTGAACTTCTGACCTTTGGAAGAGCAGTCGGGTGCTCTTACCCACTGAGCCATCTCACCAGCCCCTGCTTAGGTTTTTGAGTGC
TTAGATTAGAAGTGTGTCCCACCTCACCGAATTTGAAAATGTTAATTATTTAGGGAACTATTTACAAATAAATTCAACACTAGCTCATAGCTGA
ACTTCTTATATACGTCCCTATCCATTTCTCTACCTTTTGCTCGTTTTGAGGAGGCTTTTTAAAAATTAATTAATTTATTTTATATATGTGGGTA
CACTGTAGCTGTAGATGGTTATGAGCCTTCATGTGGTTGTTGGGAATTGAATTTTAGGACCCCTGCTCCCTCTGGCCCAAAGGTTTATTTATTA
TTATACATAAGTACACTGTAGTTGACTTCAGTCAGGCGCACCAGAAGAGGGCATCAGATCTCATTACAGGTAGTTGTGAGCCACTATGTGGTTG
CTGGGATTTGAACTCAGGACTTTTGGAAGAGCAGTCAGTGCTCTTACCCAGAGTCATCTCACCAGCCCCCAAGGAGACTTTTCTTAAATACTTT
TTTGTTCCTTTAAATATAATCGTAAACGGTACTATTATCACACTTTAAAATGTTAGCAGTTGCTTCTTATATAGCCCCTCAGCACACTTGTTTG
CTTGGGTTTGGCTTTATGGAGTTGGTCTAATCTTACACCTTCCTTCTTCCTCCCTCCCTCCCTTTCACATTGAGACAGTTTTTCATTTTGCAGT
CCTGTCTAGCCTGAAACTCACTATATAGACCAGGCTGGCCTTAGACTCACAGAGATCCAACTATTTTTGCCTCCCGAGTTCTAGGATATAAAGC
ATTGACCTACTATTCCCAGCCACGATCATAACTTTAAATCTTTTAGAAATTCTTGTCTTTGGAAATAGCATCTGAAAGCTTGGTGGTAGTGACT
GGTGGATACATTTAGTCCCAGAACTTAGGAGGCAGAGGTAGGCAGATATCTGTGAATCCTCTAGGCTAGCATGGTCTACAGAAGGAGAGTTCTG
GGATATCTAGAGCTATACAGTGAGACCCTGACTCAAAAAACCAAAGGAAAAAAGAAAGAAAAAAGAAAATAGCATCTCAAACTAGGACAATAGT
GTTCTTTGTCAATGTGACTTCTCAGATGTCAGGCATTAACCTTGGAGTTGTACTGTTGAAGGGGACACTTCAGTAGTATATCACTTCAGTAGTA
TATCACTTCAGTAGTATATCACTTCAGTACTATATCACTGAGAGGCTTATGGGATGAGGGCGTATCAGACTGATTATCTCACTATGTGATATAG
ATGATGTTTGTTTCTTTGTTTTTCAAGGCAGAGTTTCAGGTTAAAGACATGTACATCTCTACCCAGCTTCATAAATAAATAATATTTTTTTCAG
ACCAGAGTGAAAAGTGATTTAGTGAGGCCCTATTTGTATGTTGGAGAAATTGAAATTATTTTTCAAGACATGCACCATTAAATTTTAAATTCTA
GTTTATTTTTTGTATGTGTGCACACAGAGAAATCAGAGGACAACGTGAAGGAGTTCATTCTCCTGGGCAATCAAGTCAGGCTCTGGGTTTGACA
GCAGATACCTTCTCCCGAAGCCATCTTGATGGCTCGTATTTCTCCTTTTCATCAGTGGCAGGCTTGCAGCCCAAGTATCGTCAGTAACTGTGTG
AGATAATGGCGTCCTGAGGTCACTGCTGTGCCTGTCCTGGCTCCTTCACAGGGTCTTGACCAGAGGAGCGCTGTGCTGCTGATGCCTTTGTCAC
AAAGTTGGGGGCTTTATATCTCATACCATCACGTGAACTGTTCTAATCGTGCTGACATTTTATTTAAAGATATAGCATGTTACTTCCAGGAGAT
CACACCAACTTGTTTGTCACATCTTTAGTCCCATGTTCTTACATCATTTAAATTTCCTGAACAGCAGCTCTAATTTAAAGCTGACGGCAGATGT
GGGTCATGGGCAGTCGTGAGCCTCAGCAGGTGCTGTCTTAGTGGATTAGGCTGGAAAGTGCTACCTCAGCACAGCCAGAGCTTACCTGGGAGGC
TCTGGAGGAGGAGAGCTGCCCAGGCACGCAGACCGGATGCTGGGGTTTCCAGAAGGGTCAAAGGACTAACGACACTAAAGAGAAAGGCAGAGGA
GACGAAACGTAAGTAAGACGTGTTTCTAATTGCTAAAGTTGTGTAAACAGTATTATGGCAGACTCTTCAGTTGTGTGCTGCACTTCACTCAGAC
TGTGAGAAGGTAATATTGGGACAGCAGGTAAAGGCACTCGCTGTGATGTTGCATGGCAGGAGAGAACCAGCTATTTCAGGTTATCCTCTGTCCT
TGGAATATGTGTTGTGGTACATACCCATACACAATTAAATAGGTAAAATGATAGAAGAAAATTACTTTAAAGATCGTTTTCTGCCCAGCAGTGG
TAGTAGTACACGAGGCCAGCCTGGTCTATAAAGCAAGTTTCAGGATAACCAGGGCTATACAAAGAAACCCTGTCTTGGAAAAAACCAAAAACAA
ACAAACAAAAAGTTGTTAAAAAAAAAAAATCCTGCTGTGTGGGAGGCAGAGGGTGACTCAGGCGCAGTTTTCTCCTCCCTCCTTTACATGGGTG
GGTTCTAGGGGGTGAACTAGGGTCCCCAGGCTTGCATAGCAAGGGACTTAACCCACAGAACCTGGAAATCATTCTTTTGATTGAATGCTTTCTT
CATATACAAGAAAAATATGTGACAGTCATCCAGGTAATAGTGCTTAAAAGTAGAAAAATGTATTTACCAGAAACCTAGTGAGGAATAGAACTGA
TGGGCTATTGAGATAACTTTGGGTAAGGTTGGTGGCTGCCATGCCTGAGGAGTTTTTGAAGCAGCTCAGAAAGATCCCCTGTTTATACAACACT
GGTTCAGCATAGTTGTATTCGGTCTCATGATGTAAGAGCTTTAGTGTTTATGTCCTGCTCAACTGCTGCTTGTTGATTAGACTAAATCAGGTAC
CTCAGGACTTTGGTTGCTACTTTTTCTTACGTTAATGCTGGATTGGATGGAAGGTCTTTATAGCCAGAGTTCCTTTCAGTCAAGTAAGGAGTGC
TGAAAGGTGGTGATCTTGACTCTGTTAAACTAGTAAGAGGGTTTCTTCTTTGACCCTTTGTAAGGTAAAAACAAGTCAAACTCATGCGAGACAA
AAATGGCAGAGTATCTTTCTGTGTTTTTATTCATTTGGGATTTTATTCTGCCATATAGGAATGAATATTCCTAAATCTAGTAAGAGGGTTTCTT
CTTGGACCCTTTGTAAGGTAAAAACAAGTCAAACTCATGCGAGACAAAAATGGCAGAGTATCTTTCTGTGTTTTTATTCATTTGGGATTTTATT
CTGCCATATAGGAATGAATATTCCTAAATTTTAGATCTTAGCTTTTGTGTTCTAAAGAGAATGGCTCAGTCTTCTCCTGCAAAAGTCATGCCAG
GTACCAGGGAGGCCCAAGGTGTCTCCCTTGGTGAATCAGGATCCACTCAAGAACCAGAGATGGTGGATATAACCTGTAATACTAGCCCTGGGGA
AGGGGAGGGAGTAAGGTCAGAGTAGGTGCCAAGGGAAGTTTTAGTATATACTGTACTGCTTAGCAAGACACTGTCTTAAGAAAGGCAGGAACGT
GACTGGAGAGATGGCTCAGCACTTTTCCAGAGGCTCTGAGTTCAATTCCCAGCAACCACACAGTGGCTCACAACCATCTATACTGGTGGGATCT
GATGCTCTCTTCTGGCATGCAGCTATACATACAGACAGACACTCAACATACATACCATAAATAAATAAATAAATAAATAAATAAATAAATAAAT
AAATATTTAAAAAAAAAGACAAGCAGGATAAGGAGCATCAACAGAAAATGAGAGTATCATTGTGGTCAGCAATCTTTTAGAAGCCGTCTTGATG
TATACCCTGCTTTTCAAGTGAGCAGCAGCAGCAGCTGGTCTAGGAACATGGAAGCCCTCTTTCAGTGCACAGCTTTACCTTGTAGGCCTTGGTT
GCCCGTGCCCCCCCCCCCCATGTTAAGTACTTAGTAAGTCGACCCTTCTTTTTGTTCTGCCAGCAGCAAAGACACTTAGTTGGAAGGGATTCTG
TCACCATGAGCATATAGTGTGGAACTGTAGAATAGAGAAGTAAGGAACGTGAACAGTTCTGGGGTCATCCAGCTGATTTATTGTAGATGTGTCT
TACTCTAACAGTGATCTCAGGACACAGCAGGCAGAGCTCGGTGTGAAGCCAGCCCAGTCTACAAAGCAAGTTCCAGAACAGCTAGGGCCACACA
GTATAACCCTCTCTTGGGTGGTGGTGGGGGGCAAGGAAAAGAAATTAATATTGGTTAGTTAAGCATTTGGTATTTTTTAACTTTGACTTTTGAC
AAAAAGTTGATCTTGATACACAATCCTAAGAGATCTGGAGCCCACTATATTGCCCGAGAGGTCTTAGACTCAAAAGGAATCTTTCTGCCTCTGC
ATATCCCAAATTCTGAGATTATGGGTATCCTATCATACCTAACTTTATTATTATTATTATAAAATTTGTGTGTGCGTGTGTGTTTTATGTTTCT
GTAGGTATGCTCATGTATCTATGTATATGTTTATGTATGTATTTACATGTTTATGCAGGTATATTCATCTATGTATGTATGGACCCTGATCATT
ATTTTATTAGTTGACCTCACTTCTCAACACAGGGTCTTACTGAACCAGAGCAGTGGTTCTCAACCCGTGGGTCATGACCCTTTTTGGGAGTTGA
ATGACTTTCACAGGGGTGGCCTAAGACCACTGGAAAACAGACATTTATATTATGGATCGCACAGAGGCAAAGTTACAATCATGAGTAGCAACAT
AAATAATTTTATAGTTGGGAGTCACCACCACATGAGGAACTATATTAAAGGGTAGCAGCATTAGGAAGGTTAAAAACCACTAGAGGTTTTCATT
TCAACTAGATTAATTTGTCATTGAACCCAAGAATCCATGTGTATCTGCCCACACCATTTTGAACCTCTTTAATTATTACACAAAATTTTTGAAG
ATTGTGTGGGGAGTGCTGGAAGATGATTCAGTAGTTAAATGCACTTGGTGCCCTTCCAGAGGACCCTAGTTTCATTCTCAATGCCTACATGACA
GCTAACAAACCATATGACTCAGATTCCAGGGAATCTGTATGTGTGTGTGTCAAAAACACTCATATTCTGTGTAATTTGCATGGGGAACTAAGAT
TCTTGCATAAATTATATTGGTATTAAGTTGTTTCACCTTCAATATTATGGTGTTATAATCACATTTATAATTGATTTAATAACCAACATCAGGT
CAGAATTGTAGCCTGTGTGCCCCAGGTACAGTGGTAGATGAGGCCTGCTGTTCTAACACTTAAAGAGTCTGAGGCAGGAGATTTGCTATTAGTT
CGAGGCCAGCATAGGCCACAGAAATAAGTTCAGGCAGGCACGCAGGCATTTCTATGTACAGCTTCCTCTGGGAAGTGAAGTCTTTTTGTGCTGT
TGTTTATTTTGGATTGGGCTTTTGAGACAGGATCTCTGCGGTCTTGGCTGGACTGGACTGGTGCATAGGTCTGGCTGGCCTTGAGTTCGGATCC
TCCCTTTCCTGCTTCCCAGCTGCTGGCTCGGGTTAAAGGCAGGCTCTACACTCTGAGGTATTTTATTTAAGGCATGCTCTACACTCTGAGGTAT
TTTATTTTCTGAGGCAGTGTCTCATGGAGCACAGACTGGCCTTAGACTACTGTGTAGCTGAAGATGACATTGAACTTTTTGCTTCCACATCCTG
AGTGGAATTATAGGTTAGCAACACCTCATGTGGGAATTCATACATTGTAGGTAATCAGTCTACTAGCTGAACTATATCTCCAACCCAGGAGGTC
AGGTTTGTTTGTTTGTTTAACAATCTAGTTTTGAAACAGTCATATCCTAGGCTGGCCTCAAGTTATGTAGTCAAAGATGGCCTTAAAAGATGAC
TCTTGGTTATTTTCCAAGTGCTGGGATTATAGATATGCACACCACCACACCTCATTTGTCTCGGGGCTGGACTCAAATCCAGAGCTTCATGCAT
GTGAGGCAAGCACTGTACCAACTCGACTTTTGCATACTCCATTGAAAGTCATTTTTATAACAGGATCATCTCAGTTGTCTCTGACAATGGGGAT
GTTTTATATGACTGTGTATGGCTTTGCAGCTTTGACAGCCTTATTCAAGCCCATATCTAGAAGGTATTTCTGAGCTTCCTGGGACTCCTCAGCA
TAGAGTCTGGGGAGAAATAGAAGACTTTTGAATGTCCCTTTGTCTTTCGGCTCATGATAACTGCCATAGCTTCAAAGTACTGGTTTTCCAGATT
ACCTCAGTCCTGTTTCTTAAAGAAATTACTCCTGGTTTCTCTGTGTGGTAGCTATTCTGGATGTCTGTGTTTGTTGTTGTTCTTCTTCTTCTTG
ATTTCTTTCTTTTATTATTTTTTAAAGATTTATTTATTTATTATTACATGTAAGTACTGTAGCTACCTTCAGACACCCCAGAAGAGGGCATCGG
ATCTCATTACGGATGGCTGTGAGCCACCATGTGGTTGCTGGGATTTGAACTCAGGACCTCTGGAAGAGCAGTCGGCGTTCTTAACCACTGAGCA
ATCTCTCCAGACCCTGTTCTTGATTTCTGAGAGACTCAGAATCTTTCCATGAGAAGGACCTGTGCTGTTTTAATATTGATTGATTGATTGATTG
ATTGATTGATTGGAGATTGGGTCTCTGTGGTACAGATTGGCATTGAAATTAAGATCTTCCTTCTTGGCCACCTAAGTAGTGGAATGCACCACCT
CTATTGGCATTAATTTTCTTTTTCAGTCCACCACAATATTTTCAGCAGTATATTAGTACAGTTAATAAAAGTGAAGATTGTGTTTTTAATCCAG
TTCTAGATAGAGTTTCAAAAGTTCTGATGAGTGCTGCAGAAAAGGTCTCTGCATTGTGTGATTGTAGCTGTGACGTTTTCAGTTAATCATACCG
TATCTTATGCATTTCTTGCCATGTTTCTGTTGCAGAGCTTGGATTCTGAAGTGTGGAAAGCACTGAGACGTGAAGATGAGTGAACTTGACCAGC
TGCGGCAGGAGGCCGAGCAACTGAAGAACCAAATTAGAGTATGTAGTCATGCGGGTTTGATATGTTTCATATCAGAAACATATCTATTGTGTGT
GGATAACAGAGTGAGATGAAATTGATCTATTATATGCTAGTTATATATCTGAATAACTTATGTTGTTTCAGAAATTTTGTTTTCTTATTAGCTA
CAAGTTGTTGCTTGAATGTACATGGCCCATGTCTGTAATACTTACCAAAGCTTTTGAACGTCTTCCTCCCGGGGAACTAGGTTTTGGACCCTCT
GTGTGGCCACTGTGGCCGCTGTGTCAGTTCTGAAGCAGCTCTGAAGAGCACGGCTACTAAACTGAGAGCAGAAATAGATACTTTAAATGAAGGG
ATCCGTAAAGTGGCATTTTAGATGTCTCTGTCTTATTTTTCATAGTTTCGCAATGGTTTGTGCTCCAGGAAGACCATTGGAATGTATGTAACAG
CTCTTAGGCCACCATAGAGAGCAGACTTGTCTACCTGGGTACAAAACTAAATGGAAGATAATTCCATGTATTCTGAGTTGTTCTTTCTGTGCTG
GGGACTAGTGTTAGAAATGGAGCTAAGAGCCCACACATCCCAGGCAAATGTGAGTTTTTTGGTTTTGGGGTTTGTATTTTAGTTTTGTTACTTG
AGACAGGTTCTTACTATGTAACTTTGTCCTGAAACTCAGTGTAGACCAGACTGGCCTTGAATGCAACATTATACAGAGATAAGTATGTGGGGTT
TTTTGTTTGTTTGTTTGTTTTTTGTTTTTCTTAGACTTCATCTAAGAGCATGGAAAAAATGACTTAAGACTTAACAAGAAAATCCCAGTTTTTC
GTTTGTGTAAGGATTTGTATATTTGAAATAGCTTCCTCTGATTTTCATGTTCTTGTCTGTAAGGATATGGCTGTCTGTCCTTGAGCGTCTCACT
AAGCCTTTAGAATGGTTCACATGTCTTTAACTTGTCAGTTGTGTTCTCAGGCTGCCAGGAGGACTAGGTGGAGAATTGCCAGCATCATTTTAGC
CAACTTTTACTTGAATTTAAGAAAACATACCAGAACTGCATAAGTTTTAGAGCAGAGATAAAACAAAATATCCTCTGCTGTAAGCACCTCACTG
GACATTGGTGTCTACGCTGTTCCTCCGTGTGTCAGTTTCTGTAAAGTTAATAATTTCATGTGTCAGGCAAGTTTATAGCACTGAACTATACCTA
GCCCTTGCCTAAAATCTTTTTAGGGTTAGGATTTTTGGAAGTGGGGCATCAAGTTGGGTTTTACTATGGTACTAAGATGATGTCAAAATTTGAG
TTCAAATGATCCCATGTGTCAGTCTCCCTTGTAGCTGGGATTGTGTAGCATGCCTGACTTTCCCTAAACTTTTGCATGACTTAAAAACTTAAAG
CCAACTTAAAGCCAGGGGCTGAGCATTTTAATCACTGCATTTAGGAGGAAGAAGCAGAGCGATAAGAGTTCAAAGTCATGATCAGCTACATAGT
GAGCTCAAGGCTCACCACGAGACCATCTCTCAAAAGGTAACAACAGACTGGAGAGGTGTCTCAACAATTAACAGCCCTTACTACACTTTCGAAG
GACTCCATTAGGTTCCCAGTGCCCAGATCAAGAGGCTCACAATCTTATGTAACTCTTAACTCCAAGGAATTTGACACCTTCTTCTGGCCTCTGC
AGATACTTTCATATCCCACACATAAACACACACAAAATAAAAGTTTAAAGTCAGGTACAATAGGGCATGTCTGTAATGCTATCAAGTCTGAATA
CTGAAGGAGTATTGAAGGTTTGAGGCCTGCGCATGGGCCATATGCTTTTGAGATTTTTATTTCTTTGTCCCAAAGTTCTGAAAATTAAGAGTAT
AGAAATGACAGAGGAGTTTTCAGACAAGGTCTCACTATGTAGCTGTGGCAGTCCGAGAACTCACTATATAGACCAGTGCTGGAGACTAAAGGTG
ACTAAAGCCACCACGCCTGGCTTTTGTGGTTTGAACTTCCTGGTTTTTCAAGACAGTTTCCCTGTGTGACCCTGTGACTGTCCTGGAACTCACT
TTGTAGACCAGGCTGCCTTCAAACCCATAGAAATACCCTTCCTCTGTCTCCCAATGATGAAATCACACTGCTTGGTGTGATTTCAGTTTTTAAA
ACGGGAGCAGGGTGGAGATGGCTATGCTGTTTTAAATTAAGCCAACATGGAGATCAACTGCACAGCATGGAGGGAAGATTTAGGGAAAGGATAA
GAAAGCCCAAGTGTTGAAGAAAGCATACTTAGAACAGATAGAAAGGAGAAAAAGAAATACTCAGAAAAACTAGCGGATTTACTAAGCCATATGG
TTGTAGCTGTGTAGCTGCTGAGACTCAAATCATTTAGCAGTAGATAAAGAGATTTTTAAAAAAGATTTGTTTGTTTGTTTGTTTATTATATGTG
TGAACACTGTAGCTGTCTTAAGACTCTCAAGAAGAGGGCATCAGATTTTTGTTACAGATGGTTGTGAGTCACCATGTGGTTGCTGGGATTTGAA
CTCAGGACCTTTGGAAGAGCAGTTGGTGCTCTTAACTGCTGAGCCATCTCTCCAGCCCAGATAAAGAGAGATAGTAAATCAAAGATAAATGTCA
TGCAATATTTTCATAAGCAGCTTTACATACTCTCTAGTCCCTAGTACCCACCCGCCTTTCTGCATCCAAATAGTGCCCCTGTAATTATAGCATT
CAAGAGGTAAAAACAGGAGGGTCAGAGTTCAAGGCCAGCTTCAGTGACATATCAAGTTTGAGGCCAACTGGGCAACATAAAGTGTTATGTTTAA
CATATGATGTTATGTTAATATATATTAGTAATATGAAATCTTAAGTTTCATCTAGTCCCATGTAAAGTATTATTTCAGTCAATAGATTCTTACT
GAGATAGTTTACAGTACTTACATTTCAGTTTTGTTTTGGTTTTAAAGTTCAGCTCATGCCTCCCTATAAGGGCATTCTACAGTTCTCTCTCACT
GTGTCTGACATGCACAGATAGTTGGTGACCCCCCCAAGACCTCTGTTGTGGACAGCACCAATTTGACTGTTCCTTATAGGGCCACTTTGTTTCA
ACCTTCATGATGAGCATCATCTTCACAAATGGCTCCATGCGTTTGGCCTTGCCTCTCAGCACTGCACTAATTTTAGAGTCGATTGGTGAGGAGA
TGTGAAGGCCATTGAGTCTCTAAATGGGAAGGGAAGACTTTTGTTTGTTTTTGAGACATGCTCTCACTATGTAGCCTTGGCTGCCCTGCAACTT
GATATGTAGACTACTGGCCTCAAACTGCTTGCCTCTGCCTCCCCAGTTTACTTTGGAGACTAAAGCTGTGTGCTACCTTACCTGGCAAGGAATA
CTCTTTAAAAAAGTAAAATTCTGGAGTTAGATACTTAAGTGGTTAAGTTTAATCCCAGCACTGCTTATAACTGTAGCTCCAGAGAATCCAAGAC
TGCCTGTCTTTTGGTTTCAATAGGTACCTGCATACACATAAATTTAAAAACAAAAACAAAAAACTTTTTTTTCTGATATAAGGGAGGAAAAATG
TAAAATGTTCTTTACTAATTGCCTACTAAATACATGCTTGCTAAAGAACTTAGTACAAGGGCTGGAAGGATGGCATAACTCAGTAGTAGTCTAG
TGCTTTCCTAGCAGTGTGGTCCCCAAAGTTACAGGGAAAATACGAGGATTATCTTCACTTTGAAGGCCAGCCTAAACTACCAATCAAGAACCTG
TCTTAAAATCAGAAGCAGGAATCCCGGCCTGGTGGTGTACGCCTTTAATCCAAGCACTCGGGAGGCAGAGGCAGGAGGATTTTTGAGTTCGAGG
CCAGCCTGGTCTACAAAGTGAGTTCCAGGATTGGGTGAGACGGCGAGCACTTTTAATCTTAGCAGTCAGGAGGCAGAGTTAAGTGGATCTCTGT
GAATTCTAGGCCGGCCTGGTCTACTTAACAAGTTCCAAGATAGAATTATATAAAGACCCTATCTCAAAACAAACACAAAATCAGAAATAGCAGA
TGAGTTAATCAATGAAGTAAAGGTTCTTGCCACCCAACAGTGTAAGCCTGAAAACCTGAGTTCCATTTCTAGAGTCCACGTTAAGGTGGAAGGA
GAGAGTACTGTCTCTACAAAGTTGCCCCATGACCTCCATACTCTGTAGCAAGCACACTGATACACATCAGTCACACTCTTGGGTTTGTTTGTTT
GTTTGGATTTTTACCAACAAAGCGTTTGTGGGTGTTTTGTTCTCCCCTGTCCCCCCACTAACACCAACACAGGGTTTCTCTGTGTATGCCTGGC
TATCTTGGAACTTGCTCTGTAGACCAGACTGACTTCAAACTCAGAGATCCACCTGCCTCTGCCACTTGAGTACGTACTGGAATAAAAGCTGTGT
GCCACCACCACCTATACAGTCAATATACTTTCAATTATTAAAAATCAACAAAAGGCTTCTAGCTGGTGTGTTTATACACATACACAGCTTCTCA
AACTCGGGGGCCGAGGCAGAGGATCAGGAGTTCAAGGTCATCCTTAGCCGCATAGTAACTTTAAGACCAGTTTGCTTACACAGTGAATCACACA
AGAAATGGCAGTTAACTGTAAGAAGTGTTCTCTGGCCCTTTGATTTGTTTTTTATGTGAACTTCCCCTGGGGGAAAAAAGGAAAAACAAAAAAA
GAAGCTTGTCATTCTTTTGTTGATCCCAAGGAAACAGGCTCTCAAGTAGATGTTTAATTAAAGCACACACGCCTTAAATACAGAGGAACTGAAC
TTACTACTCTGATAGACCATTGCACACATGGACCAGAATGTAGCGACCCAGAGCTGAGGGTGGGCCCAGACTTTCCAATTTCACTGTGAGACAA
CAGTGCTGCATGATACGGGCCAGCCTCTTCTGTACTCAAACCAAACAGGACAGAATGATTGATTAAATGGATCAGTCTACATGAATCCATCAAG
AAATCATTGTAAAGCCGGGGGTGGGGGTGGAGTTTTTTTTTTTTTTAAAGATTTATTTATTATTTATTATATGTAAGTACACTGTAGCTGTCTT
CAGACACACCAGAAGAGGGCATCAGATCTCATTATGGATGGTTGTGAGCCACCATGTGGTTGCTGGGATTTGAACTCTGGACCTTTGGAAGAGC
AGTCAGTGCTCTTAACCACTGAGCCATCTCTCCAGCCCGGGGGTGGAGGTTTTAATCCCAGCATTCTGGAGGCAGAGGCAAACAGATCTCTGAG
TTTGGGGCCAGCCTGGGCTACACAGAGAAACCCTGTCTTGAACAAGCAAGAAAGGGAGGGAGGGAGGGAAAGGAAAGGAAGAAAGGAAGGAAAA
AAAAAGAAAAGAAAGAAAGAAAAATTATTGTAGCTGGGCACGGTGGCACAGTTCTTTAATCCTGTCACTTGGGGAGGCAGAGACAGGTCAATAT
GTATAAGGTTGAGGCCATCCTAATCAACATTAAGTTTTAGGCCAGCCAGGTATAAGGGACCCTCTCAATCATAAATCAATCAGTCATTCTCAGG
CCAGCAGGGTGAGTCATCAACTAAAAGTATGTCAATATTTATTTTACTTATAAGTGAAAACACTTTAATTAATATGGTAAAAATTAAAGAAAAA
TTACTATAGTATATTGTTTTGTAGCTCTTAGCTACATTGGTATGTTTTATAAATAGAAAAGATTGCTGTTTTGTTACCAGTCTTATTGAAATTT
TATTAACAATTTTAGATTCCTTGGTCTATTCATAGAACTTAGATTTAATCATTGTTTGGCTTAAAAATAAAGTCCTTGCATAATGCATTCTCAA
AGAGAAGCTGTTGGCCTGAATAGCTAGTTGGTTTTCAGCCTGTTCTTTCATGCAACCCCTTGTGCTCCCATATAACCTGGGAAAGACAGAGCAG
GTGTGTGTTCGCTGTGGGCAGTCAGCCTTGGCTTCCAGGCTGCTCACTGCTGTACCAGCTCCCAGTGTAGTTTCTCCCGGGCCTGCCCAGAGTT
CTATGGGGTCTGCATGTCTTAGTTAGGTTTAGGTGTTGTGAGTTGTGTCTGTTTTGGCCTGAACAACTCAAAAGTGGCAGTGGACTTGGGACTA
TTAGAGAAGAATTAAGGAACAAGACAGTTTGTAGAGGCTTCTTGAAACTTTGGTAAGGAATGTCGTAAAGTTAAAAGTATGGAATAAAACTAAT
TTCCATTTGTTATTTCATAGGATGCTCGTAAAGCGTGTCCCGATGCGACTCTTTCTCAGGTAAGGAATAATTCCACCTTTCAGCTGTCCGTAAT
GCGCAGTCTGCCGCGGGCTTGTATCATGTGGGGTGAGCCCTTTTGTGAGGTGAGGTTGTAGGGCCACTGTCAGGGCTTTTCATTTGGAGGTTGC
TTTGCTGATGGGCAGAGAGGACAGGAACCACTGGTTCCTAAAATGGGAGTGATAGCTCTACCGTTTGACCCAACAATTTAATCAAACTGATTTT
AAAACATGTACCAGGCTGATGAGATGACTGCTACCAGGCTTGACAACCCGAGTTCCATCCCAGAGCTCACAGGGTAGAAGGAGATTCAGAGGTG
GTTCTCTGACCTCTGTGAGCATGTGCCGCTGTCCTGCCCAAGTAAATACAGTTAAACCGTGGGCATCCAGCTCCTGCTGTAGTGTATCTACTGC
TGTGAGAAACACTTCAAACTCTAAGGGAGGAAAGCATTTATATCGGTTTATACTTCTAGGTAATAATATATCATTGGAAAATCAGGGCAGGAAC
CATAGAGGAAAATTGCTTACTGGTTGCTTTCTCAAACAGCCAAAGATAATCTAATCTGTTTAGAAGTTGTCTTGTTCAGTGTAGGCTGGACCCT
CCTACATCTATTAGCAATCCAGACAGTGCTCCATACATAGGCCCACAGAGGAATCTGATCTAGGCAGTGTTTAATTGAAGTTCTCTCTTCTCAG
GTAACTGTGTGTCTAGTTAACAATAAAAACTAGCAACACACACACACCTATACTCACACCTACTCTTGGGTAATCAATGGCCTGATCCTCAGAC
CTAATAGACATAGATTTATTTTCCGTGTGTATCCATGGCAGTGGTAAAGTGAGTATGTTAGGTAAAGGTGGAGATAACTAATAATTTAATAAAG
CAGTAATAAAATGGTAGCTATTCTATGAAATGGTAGTTACATGTGATATCAGATGATCTTAAAATATCTTACTGCATGTACTGGTGCGACAGGG
GATGACAGTGCCTATATCCTTGATAAGAAGAAGCGAGGTACTGAGCCATGTAAAAAGCATAGTGGTTGTGGTGTATTGCTGATAAACATGCTGT
ATACTTAAAGCATGGACTCACTGCACAAGGGAGTTAGGACCCAGGCACTACAGAGTGGATAGTTAATAGTGCTACTTAAGGGAGCAATGTGCAG
CCGGGCAGTGGTGGCGCACTCCTTTAATCCCAGCACTTGGGAGGCAGAGGCAGGCGGATTTCTGAGTTCGACGCCAGCCTGGTCTATAGAGTGA
GTTCCAGGACAGCCAGGGCTATACAGAGAAACCCTGTCTTGTGGGGGAAAAAGGGGGGGGGGGAAGCAATGTGCAATTTAAAGTTTATGAATTG
GCTCCTGGAGAGATGGCTCAGCAGTTTAGACCACTTGCTGCTCTTCTAGAGGACTGGGATTCTCTTTCCAGCACTCTGTAGTGGTTCACAACTG
TCTATAAATCTTCTGGTCTCCTAGGGCTTCTGCATGCTAAAAATATTCTCTCACATAAATATAGGATTTTCCATTTAATATATTTTTGGTTCTT
GGTTGATATTATATTACAGAGCCCACAGAACGCAAACCAAGAGTCTATTTGCTAAAATTAATCTTCACTAATTTTATTTTTTAAGATCACAAAC
AATATTGATCCAGTGGGAAGAATCCAAATGCGGACCAGGAGAACACTGAGGGGGCATCTGGCAAAGATTTATGCCATGCACTGGGGCACAGACT
CAAGGTATGAATGGGGCCTTCCTAAAGCAGTACTTGAAATGTTGCCTATCTGCTGGATTTCTAAAAGGTAATGGTTAGAAAGTTGAATTGGTGT
GGGTGTGATAGCACACTTTGAATCTCTGTACTCAGGAGACAGAAGCAGACAAATCTTTGTGAGTTTAAAGGCCAGCCTGATTTACATATTGAGT
TCCAGGCTAGCCAAGGCTACAATGAAATCCATCTCAAAACCAGTAGGATGGGGTGGGGTAGGAAGTTTGTGGTACCAGTTATCTGTATCCAGGT
CTCATGTTCACAGGTCATACTCAGATTTCCGTTTAGCTGGCTGACTGCACTGCTGTCCCTTGCATAGCAGCACCTGCTTTTCTTCACCCTATAC
CTTTTAGCTGTTGGGTCTCTGTTGTCTTGGCTACTCTGTGGGCTGTGTTTTAAGAGTTGGGCAATGGAAGGTAAAAGGTACTGAGTTTACAACA
GCAGACTGTGGTCCCAAAAACTAAATGTAGACTTCAGTGGTCTCTTCACCCTCACTGGGAAGCCTTATGGAAAATGAACGAATGGCTATCCTTA
TCATCCTTCCACATGGCCCTGCCTGCCATCTACTGGTGTATCATTTAAAGAGATACTACCATTTGGGGGTTCCTTTCTTTTATACTTTGATAAC
TACCCTTTATTGGACTGAGTCTCTCCTGACTTTTCCACTCATAACGAAATAAAGTGCGACATGGTTTGTGTTCTCCTTCCAGACCTAAAGGAAT
CTCAGCATCCTTTTCTTCTGAGTCAGTTTTCATTTCTGCTTAGCTTTCTCTTTGTGAAATTATCTGCTGTAGGGTGTAAATAGCTAGAACAAAA
GATTCTATCTTTAGTTCTCTGCAGGGTCCCATACAATTGCTTGTGCAAATGAGCGCTATCTGAGGCTGTTTAATAATGGAAACAGTCCCATCAA
AAAAGAAAAAGGGGGCGGGGCATTGTGTTCTTGCTGCAGCTGCAGCTTCAGTTAGATAGATCATGGATGTATTCTATTGTTGCTGTCAGAATTG
TTAAGTGCAGATTTGTAGATTTATTGATTGATTGTTTTTTCAGTGCCGGACATTGAACCTAGGGTCTCATGACTGCAAGCAATTGGTGTACCAC
TAAGGTGCACCTCTAGTCCAAGAATAGTTACCATATGGTCCTAAAAATGTGAGATAATGACTGTGTTAATTCACTTAGTTTATATTCTGTAATA
TAAACATTAAACAACTTACAGTCCATAGTTACTGTCAATTAAAAATAAAGATCATAAAAAAAAAACCTAAGCAAAGTTAGAAAATGGACAAACA
ATGGTGGCACTTTTTTTTTTTTTTTTTTTTTTTTTTTTTTTAAACTACAGCCCTTGGAATTAAAGCAATATAGCAAGTTCTAGGACAGCTTGGG
CTACACGAAACCCTGTCTTAAAAAGCAAATAAACCAGGGGCTGGTGAGATGGCTCAGTGGGTAAGAGCACCCGACTGCTCTTCCAAAGGTCCGG
AGTTCAAATCCCAGCAACCACATGGTGGCTCACAACCATCCGTAACGAGATCTGACGCCCTCTTCTGGGGTGTCTGAAGACAGCTACAGTGTAC
TTACATATAATAAATAAATAAATCTTTAAAAAAAGAAAAACAAATAAACCTTGCAAAGCATTATTTAGGGATTGCTTTAAATGAGCATACTTTC
TGGCTAGTCAGTGGTTGCATTTTAAAATCTAAAATAGCTGTTTAAGGAGTTGTTGTGGGTATGCATACCCCTCTACCCCCTTACATCATTTTCA
TATTTTTTGCTCTAATAGTAAAGGGTTGTTATTGAGCTTGGTGTGGTTGCAAATGTCTTTAATCACAGTACTTGGGAGACAGAGGCAGGTAGAT
CTCCATGAGATCAAGGGCAACCTGGTCTACATAGTGGGTTTTAGACCAACCACGTAGCACAAACTTGAAGACCTAGGTTTCGATCTCTAGGACA
CATGTAAAACTGATCATGGCCAGATACTTAGAACCCCACTGCTTCAGTCTGGTCGAGGTAAAAGAATTATTGGGATCACTGGCCCTAGCGGAAA
AATGATGAGCTTCCGGTTCAGTGTCAGACTGCTTGAGAGGAATAAGGCAGAGAGTCTAGAACAGGGAAACAGTCTGCTTCCTTTGACTTCTGAA
TAGGAACACACACACACACACACACACACACACACTAAAATTCAGCTTTGTGGGCGTGTGTGGAGGAGTGGCGGGGGTAGGCATGTGGAGGTCA
GGGCATTATGACCAAGGAATCAGTTCTACTTCTAAGTGGGTTCCTGGGACCAATTGGTTGGTTGGTTGGTTTTTTTGGGGGGGGGGGGGGTCTT
TCAGGAAATGTTTCCCTGTGCATCCTTGGCTATTCAGGAATTGTGTAGATAGGCCTGGCCTCAAACTCAGAGATCCTCCTGCCTCTACCTCCTG
AATGCTGCTGGAATTAAATGGTTGCAAGAGCCCGGGATTAGATTTAATGGAAGGGCTTGTTTGATAGGCACCTTTACCTGAGCCTTCTCTTTAG
CCCTAAAATTTAACTTGTAATACTATTCCAGTAGTGCTTTTCCAGGTCTCTGGGGTTTTTAATCCCCTCTCTACAGAGCCTGATGAAGTAGTCT
CTTTGGCTGGTCTTCCTCTGAGTAAACTGAAGAGTATGTGGGGTTGGTCTATGAGTGCCTCCTTTTGTTCTAGGCAGCTAATTTGGCTAGTTCT
CAGTTTCTATCTCTGTTTGAGGATAGAATATGAAAAGCTTTAGACAATGAACCGTGTTGATTCCTCCAAGTTACATGACCTGAGATTAGAAAGG
CGTGTCTTCTTTCACCTTCTGGAGGATCAGCTAACAGGTTAGCATTGTCTTAATTCCTCACTGAGTTAGCAATTATTGAGCTCTCTGAAGGTGA
CTTCTTAAATCAGAGGATGAGCTACTAAAGATGTCTCTTGATACCCTTGCTCAGAGTCAAAAAGACCAAGCAGAAATAGAGCAGCAGAGGGGCC
TCATACTGTCTGTCCTATAGAAATGGTTGAAAGGACCTTGGGTATAATGACTGAACTGCAATAGATGGGGAGCTGGAAAGACTTTGAGTGACTG
TTAGCCTTGGCTACACAGTACCCTATCTCCAAGGAAAGTAAAAGAATCGTCTGAGGAGTTGGAAATACTAGGTTGTAGTTGAGTTCCCTGTATT
CTCAAGGCTCCAGAGTTTAGTCCCTAGAACCTCATAAAGAAAAAATTTTACCAGAGGACTGAGGTGCAATTAATTGGTGAAGTACAATTTACTG
TGAATTCAATCTCTAGAACTGAAAAAGAAATAAAAGTTGTAGCTGAAAAGAAACTGGATGTCTGTGCCTAGTTCTGTGATAAATTTTGTGACTA
AGGATGGAAAAGGATTTTATTTCTTGTCACATATATATGTTGTTCTTTATAAAGGAAATTTACATATCAGAACATAGCTTGGCAGGGTATGATG
TAGTACAGCTTTAATGCAAGCACTTTGGAGGCAGAGACAAGTAGACCTCTGTGAGTTTGAGGTCATCCCGGTCTACATAATAAGTTCCAGGACA
GTCAAAGCTACATAATAGAGGAACCCTGTCTCAAAAAGGCAAGTGAGTCAGTCATACAAGCATGGTCTGATTAAAAGTGTCAGAGGGCTCAAAA
TGGCGTGGTTGAGTTTTACCTCAAGTCTTTGATGAGCTTCAGAAGTTCAAATATGCCCAAATATACTTGTGGCTGAAATACCTAGAATGTATAT
ATTTTGATTACAATTTGAAGTTAAAACCTGTATGTCACTATCACATGGTAGACCTGGGAGAGCCTCTCACCCTTCCTTAAGAGCACATTGTGTC
TGAGTAATGGTGCTTCCCAGAATTGCTCTCACTCAGTTACTTCCCAGATAACTGAGATTCCTTTGCTTGTTGGTCATGCTTGCCTTATGCAGTA
TATCCTGCCTCAGTCTACAATGCAGAGAACTGCAGGTTCCAAACTAGGACAGAGTCATGAGCAATTCATAATTCACTATAATTGGTGGCCTCTT
TTGCCCAACCATGTGCAATTCTGATGTCATTTATCATCTCACTACCACACAGTTTTATAGAGACAGGTATTCTAATTTATCTCTGTCTGGGAAG
TTTGAGAGTTCGTTTTTCTTTTAATTTTGAGGGATAGAGTCTGCGCCTTAAACTTGTTACATAGTGACCTTGAACTAACACTCACACACACACT
CTCTCCCCCTCTCCCTCTCCCTCCCCTTCCCCCTCCCTTCCTCCCTCTCTCTGTCTGATTTATGGTTTCTCCACATCCCACATTTATGAGTTAC
AACGTATGCTACCATTGGAGCTCATGGTTGTGTTCTAGTTTGATTTCTACTGGTGTGATTAAACACTGAGCAAGAGCAACTTGAAGAAGATTTT
GTTTGAGTTTATAGTTGTAGTCTATCATGAAAGGAAATCAGCAAAGACCGCAGAGGAATACCGCTTACTAGCTTTCTCTTTAGGGCTTACTTAG
CCTGCCATCCAGGACTACATGCCCAAAGACGACACTGCCCACAGTAAACTGGCCATGCTCACATCAATTATTAATCAAGGACATACCCATAGGT
TTACCTATGTGCCAATAAGATGGAGATATTTTCTCAGCTGAGGCTCCTTCTTCCTTAGAGGACTCTAGCTTCTGTCCTATCCCACCCCACCCCC
AATATAAATAAAAACAGGGCAGGTGTTTAAAATGGATTAAAATGGTTCCTGAGTGGGTAGTGTTTCAAGCTTTTCCCATAATATTCAAGCTTTC
TTGCTGTCAGTATGAACAAAACTGTGTCCTAAATATTTCACATGTCTCATGTCTCTGTGTATCTAATTTAACTTGGAATAAAAAAGAAACCCGT
CAGAAGCAGGTCAGATCAGTACCATCTCTCGGGTGATAAGAGAAGAGCTGGGGAGTCTGGTCATCCAGGTGTCCCCAGGGCTGAGTTGTTATCT
GACACTCATGGTATTCCATTGCTCAAGCATTGAGATCCTCTTTCTTATTATTAAGTGTATTATATTTTAAGCGAATGTAGCTTTAAAGCTCTAG
TTGGTCACCAAGATTTTTTCTTTCTGTTTTTTCTTTTCCTTTATCTTTTCTCCAGGCTCCTTGTCAGCGCCTCTCAGGATGGAAAACTCATCAT
CTGGGACAGTTATACCACAAACAAGGTGGGCAGTGCAAGACCCTCCCTGGAACAGTGACAGTCTGTTCATGGAGCAATGATGACCTCGGAGGGT
GATAGAAGAGCTTGTGTTCCTGACCCATTGAGCTTGGCACACAGTTGTGCTCTGGTTCCTGTCTTGGCATGTAGATAGGAGCTGAGTGCTTCCT
TGTCCTTGCACAAGAGCTACACTCCACTCCTAGTTTTGACTGGAAACTTTCCTAATTTATTACTAGAATACTGAAATGCAGATTCCATTTAGTT
AGTAGTTTGTTTTGTAGTAACAAGAGATAATCTAAGATGCACTATACTTTAATGTTTAGTGGAGGATTGGGAATGTAGCTCAGTGGTAGAATAC
TTGTCTACTGGGCATAATTCCCTGGATTTGATTCCCATAACCAGAAAAGATAAAAAACCAATGTAACCCAACAGATTGGTAAAAGTCTGTGATT
CTAGTAACTCAGGAGGCTAAGGTAGGATGATCGAATAAACCCAGAGGGCAAACCTGCCATGGCTAGATAGGGGAAAGGAGAAGACAGAGATACT
AGGTAGAATGTTTGCCTCATAGGTACAAATCTCTGAATTAAATTTCCACTTCTCTTATATTGAAATAAATTACACTGGGTATGGTGGTACATGC
TCATAATCTATCATTTGAGAATGTAAGCAGGACCCTCAACCATTAAAGATTATGCTTACCCACATAATAAAGTGAAACCAGCCTGAACTACATG
AGACCTTGTCTCTAAAAAATAGTATTCACAAAAAACCAAACAAACGGGGCTGGCGGGATGGCTCAGTGGTTAAGAGCACCGACTGCTCTTCTGA
AGGTTCTGAGTTCAAATCCCAGCAACCATATGGTGGCTCACAACCATCCGTAATGAAATCTGATGGCCTCTTCTGGAGTATCTGAGGATAGCTA
CAGTGTACTTACATATAAATAAAAAAAAAAAAATTAAAAAAAAATTTAAAAAAACAAACAAAAAAGAATACATTTAAATTCTGAGTGGTTGCAG
TGGCCAGTCTATAATTCTAGCATTTGGAAGACAGAGACAAGGAATCCACAAAGCAATCTGGTTATCTAGACCTACAGACGAGCTCTAGACAGTC
CTGAGGAACACTGTCTCACAGAAGAAGGTGGAGAGCAGTCAGGGCAGGGCCCGTGTCAGCCTCAGCCTCCGTGTGCACAAGCACACATGCGCAT
AAAGTACGGGGAGCCGAGCCAGGCGTGGTGATACACGACTTTAATCTCAGAAGTTGGGAGGCAGAGGCAGGTAGATCTCTGTGAGTTAGGGGGC
CACCCTGTCTATAAAGTGAGTTCCAAGACAGCCAGAGCTCTAGAAACCCTGCCTGCAAAAACGAACGAAAAGGTGCAGGGCTGGAAAGATCGCT
CAGTCACTCCCTGATTTTTCCAGAACGTCTTGAGTTTTATCCCCAGCGTCTGCGTAGTGGTTTGCAGCCTTCTGTGTGTCAGTTAAAGGGGAAC
CCAGAGCCCTCCCTCCTTTAGCTTTCCAGGCTCTGTACTCAGTTAATCAACAGTTAATCAAATGTTCCTACAGATAACATGAAATTAAATCTCA
AGACAAGTTTTAATGCTGTCATCAATTAAGGAAAAAAAATTGGACAGTTGTATTTTCCCTCAAAATTAGTAAATACATGCCAAGATTACAGAAT
GTTAACTGCTCTATCTAAACAGCATGACTAACTGTGTTACCAATGTGCAGTTAGGTTATTGCATGTGTGTGTCAGAGAGAATGAATATGAATGA
GTTCTGCCTCAGCTTCTTTATTGCTGGGATCGGCATGAATCACCATGCCTGGCTGTTTTTTATGTGCTTGTCTTTGTTTTTTTTTAAGCTCATA
GCCATGATAAATTAAAGGGGAAAGTAAATCTTTTCAAATCCTATTAACATCACTCCTTAAATCATTAAAATGCAAATATAATTTGTGTTTTCTT
TGAGATAGTTTTCCATTATGTATAGCTCAAAATATCCTCAAACTTGCCATCGGGGCTGGTGATATACACCCTACTGGACAAGACTTTTGAGTTC
AAGTCTCAGAACCAAAAAAGACAGACACGACAAAAAGCCCTCTTTTTCTTTCTCTTAGCTTTCCAACTCCTAGATTCACTGACGTATGCCATCA
CACCTATCTACTCATTAGGGTTTTTTGGTTTGGTTTGGTTTGGTTTGGTTTGCTTTGGTTTTGTTTTGTTTTGTTTGTTTTTGAGACAGTTTTA
CTATGGAGCCCTGGCTGGCCTCAAATTCAGAGATTCACCTACCTTTGCCTCCTGAGTGCTGGGGCTACAACATAAACTATACACCCAGCTGTAG
TCATATTTTCTTGAACTTAATAGTGTTTCCTGTCTGTATTCTTGTTATTTAGGTTCATGCCATCCCTCTCCGCTCCTCTTGGGTCATGACCTGC
GCATACGCTCCTTCTGGGAATTATGTGGCCTGTGGTGGCCTGGATAACATCTGCTCCATTTACAACCTGAAAACTCGTGAAGGGAATGTGCGTG
TGAGTCGTGAGCTGGCGCGACACACAGGTACACATCTCATGTTCCAGTGGTGTAAGCTGCTAACTGGGATGTATACTGCTCTTGTGATCTGTTG
ATTATTGGTTCAAGTAAAAGTGAAAGTAACGGCCAGAAATTTTCTGAAAGTGAAGCCAAACCAGGGCCAATATGCCTTCATCTTTAAGAAACAT
GGAAACTGGTTTTTTAGCCAGTTTTCGAATTCCCAGCTGCTTCAGCCATTCTTGTTTATCAACGAATTGATGTTTCAGTCCTGTTTTTAAACTG
CCTTCCATGCTTGGACATTAGCACAGGAATTCTCCTAGTCTAAGCAAGTGTCCATATGCACAGCCATATCTGTTTGTGCTCACTGACCAGTGCT
TTTTTAGAGGAGGCCGAAGAGAGTCTGTGGTCCATTCACCTTTTGAATGTAACCAGCATTAAAATGTTGGGTGCATATTTTTGGAATTCATACA
ACACCATTTAGGACACATTGCCTTTCCAAGGAAGAAAGTCTCATAGTATTTTCTATCTATCCTGTCCCGCAGTGATAGGTAAAACACTCTTCGC
ATGTAAGCAAAGGATTGTTCATAATTAACTGTCATGAAGAACATGGCAGTTTTGTGTTTTAACCCTTAGGGTCAGGTAGGATTGCATCCTTTGG
TGCTTCTTAAGTTACATTGCCAGTGTTTATAACTACTTCAGGAATGCTTGCTTCTTAATATTCTGGCTTTAGCTGGAAGCATAAGCCACCAGTT
TTAGATCTCTTCTTTCTCAAATATATGAACTTAAAAGTGGCCAAATCCAGGCTGGGAGTGGTGGCGCACGCCTTTAATCCCAGCACTCGGGAGG
AGGTAGAGGCAGGAGCATTTCTCAGATCGAGGCCAGCCTCGTCTACAAAGTGAGTTCCAGGATAGCCGAGACTATACAGAGAAGCCCTGTCTTG
AAGGGGAAAGAAAAAAAAAAGGCAAAATCCATACAGGCATGGCTTCCTGTAAATTTTGATCAGTAGTATTTAAATTACTCTTCTAGGGGCTGGC
GATGTAGATTCGTTGGTAGAGTATTTTCCTAGCACACACAGTTCTAGGTCTATCCCAGCACCATAAAACTGGACATCATGATAATTTGTAATCC
CACCTCTCATGAAGTGGAGGTAAGAGGATGGAGAATTCAGTGAGTTTAAGGGCAGTCTGGGCTATATGAAACCCTGTCTTAAAAAAGAAGCATG
GTATAGTTCTCAAGTATATGATAGAAAAAGAAAACAATCGCGGAGAAGTCTCGGTGACTAAGAACAGCCACTGCATAAGCACAAGGACCTGGGC
TCCATCCCAGCGCTCACAAGCAGTCCTGGCGTGTGATAATTTCATCATTGTAGGCTGACTCCAGCCTCGTTCAGTGAGAGGCCCAGTCTCAACG
GACTATAGCAAACAGTGATAGAGCAGGATATTCAATGTCTGGTGTCCTCTGTTAGTCTCTGGATAGGCATACACCACATACACAAATACAAGTA
AGACGGATATCTAAAAATCCTTGGGGGGGGGGGGGTCCTGTTGAATTTGTATTAATTTTTTTAAAGATTTATTTATTTTATGTATGTGAGACAC
TATGGCTGTCTTCAGACATAGCAGAAGAGGGCATCAGATCTCGTTACAGATGGTTGTGAGCCACCATGTGGTTGCTGGGAATTGAACTCAGGAC
CTCTGGAAGAGCAGTCATTGCTCTTAACCGCTGAGCCATCTCTCCATTCCCCCTAAAATATATTATTTAGAGATTTGGAGAGATGGTTAAAAAC
ACTGGCTGCTCTTTCAGATGGCCTGGATTCAGTTCCCAGCACCTGCATGTGCCTTACAGACTTCTATATGTAATTCTAGTCCCAGGGAATTTCA
TGCCTTCTTCTGGCTTCTGTGAACACCAGACATGCTTGTGGAATACAGACACACAGGCAGTCCTGGTTTTATTGCTGTGATGTGACATCATGAC
CACAGCAACTCTTAGAAAGGAAAACATTTCATTGAGGCTAGTTATATAGCTCAGAGGTTTAGTTCATTATTGTCATGGGAGGAAGCATGGCAAC
ATGCAGACAGACATGGTGCTGGACAGGTAGCTGAGTTCTATATTTGGATTCCCAGACAGCAGGAGAGAGTGACACTGGCCTGTCTTGAGCATCT
GAAACATCCACCCACCGTAGCCCTCTTCCTCCAACAAAGCCGTTTCAACAAGGAGGTGTTCCTAATAGCACCATTCCCTATGGGCCCGTGGGGG
CCATTTTCATTCAACACACCACACAGGCAGAAAATTCATATACATTAAAAATTTTGGGGCTGGAGAGATGGCTTAGTGGTTAGGAGCACTGACT
GCTCTTCCAAAGGTCCTGAGTTCAAATCCCAGCAACCACATGGTGGCTCACAACCATAGTAACAAGATCTGACATCATCTTCTGGAGTGTCTGA
AGACAGCTACAGTGTACTTACATATAATAAATAAATAAATCTTTAAAAAAATTTTTTTTTGAGAAATATTTAACTTACTAGTTTTTAGCTAATT
TTAAATTTGAACTGGTCGTCTACCAAGACATCATGCTATAAGAAACAGAAACTGTATTATCTGGTTGTTGGGCATAGTGTGTGTCTGTCTTTCC
ATCAGAAGGAAAGAATCTACATCTGTGTATTTCAGGTGTTGCATGTACATTTATTGCTGCTGTCTGTATCTCCTTGAATGATCGGTTGTTTTAT
CATGGCTTAGTATCCCCTCTCATATAATACTTTACTGTGAATCTACTTCATGTGGGGTTTTCAGCCAGCTCAGCCTCAATGCTCACTGTCTGCA
TGACATTTTTTCTTGTTGATTGTTTTTCTAATAAGTTCTCTCATACACAGCATAGAGTTAAGTCTTCACTTCTGTTTAAAGTCTCTGCCTTTAG
GAGCTGGGAACGTAGCTCCTTTAGGAGCTGGGAAAATAGAGTGCTTACCTACCATGAATGAAGCTCTAGGTTTGATCTTCAGCCCAGCATAAAA
CCAGATCTGGTGATGTAGCCCTGTAGTTCAAGCACTTAGATAGATGGAAGCTGGGAGTTGAAGGTAATCCTTTACTGTGTAGTGAGTTTGAAAC
TGCCTGAAGTACACGACAGGTAGCTTTTAAAATAAATGGTTGGGGCAAGTCCTGTACCTTGTAAATACTTTACATATAGTTTCTTCTTGACTTA
TAATGAGGTTATATCCAGAAATATCAATCAATCAATCAATCAGTCTCTCTGTCTCTCTGTCTCTCTGTCTGTCTGTCTATCTGTCTATCTATCT
ATCTATCTATCTATCTATCTATCTATCTATCTATCTATCTATCTATCTATCTATCTAGGGTTTCTCTATATAGCCCTGGCTATCCTAGAACTCA
CTCTGTAAACCAGGCTGGCCTTGAATTCAGAAATCTGCCTCCCAAGTGCTGGGTATCCAGAAATCTCTTTAATGTTTAAAATATTAGCCACTGA
ATTATGTTGACTCTGTCTAGCCTGCCATCCCACATCTTCCTCATCTTATATTGACCAGGCTGGCCTGAAATCTGCCTGCCTCTGCTTCCTGGGT
GCTCAGATTGAAGTGTGTGCTGCTTCGATGGGTGTATAAACTCTTTGTAGCCTAGGACATTTGAGGCTGCTGTGTTACATTCTTACAGTCCTGA
CAGAGAGCTTCAGTTCATTGCTGATAACCAGTACCCTGGGCAGATTATACATACCACTTATTGATAGGTTGAAAGAATTGCATTTAAAATTTGA
AGTTCATTTGCACTAAAAAAATCCTAAGTGTTGCTTTGGATGTGGTTGGAGTTGGTACTTAGGGTGGTTCTCTCTCCCTCTGCTTTCTTTTCTG
CTGTCTGTCTTTCTTTCTTTCTTTCTTTCTTTCTTTCTTTCTTTCTTTCTTTCTTTCTTTCTTTCTTTCTCTCTTTCTTTCTTTCTTTCCTCCT
TTCCCTCCCTCCCTCCCTCCCTCCCTCTCCCTCTCCCTCCCTCCTTCTCTCTCTTTCTCTCTCTCTCTCTCTCTCTCTCTCTTTCTTTCTTTCT
TTCTTTCTTTCTTCTTTTGGGTTACTCTGTTTCTAGCTCTAGCTTGCTCCAGCCTCTGCATTCTTTTCCCTCTGCCTCCCCAGTGCTGTAATTA
CAAGTGTGCACCACCATGCCTGGATTCAACATTGTGTTTGAAGAGTTGTATAGGCTCACATGCACTCAGACAAACAACGTCCTCATTTCCAGTG
CTGTGTACTCCTTCCTGGGGGGGCATCTCTTTTTCTGGTTTCCTGTATGCCAAAAAGCTACTCCCTCATAACACCTACAGTTGTACATTTTGCC
AGTCCCTTTATGTGCTATTTTTTTTAATGTCTGTATGTTTGTTCAATGAAATTTAATTTACAAATTAAAGAAAAGAGATTAACAGTAAGCAGTA
AGAAGGTACTGCAATATAGCAATACACTATAATTAAGTTTTTGTTTTTTTTTTTTTTGACTCATGGCACTGAGAATTTTATTTATTTATTTATT
TATTTATTTATTATTTTTTAAAGATTTATTTATTTATTATATGTAAGTACACTGTAGCTGTCTTCAGACACTCCAGAAGAGGGCATCAGATTTC
GTTACGGATGGTTGTGAGCCACCATGTCGTTGCTGGGATTTGAGCTCATGACCTTCGGAAGAGCAGTTGGTGCTCTTAACCACCGAGCCATCTC
ACCAGACCTATTTTTTATTTTTTAAGGAATTATTTGTTTCTGGAATTTGCTTGGTTTCCATGGGTTAACTGAAACCAGATGAGGCTGCAGTGGT
TAGAGTAAACTGCTTGTGAGAAGTCTTGATTTTTTTTTTTTTTTTTTTTTTTGAAAAGATCTGTTTTATAGTAGTAGTAGTAGTTGTTGTTGTT
GTTGACAGGGTTTCTCTGTGTAGCCCTGACTATCCTGGAACTGGCTCTATAGATCAAGTTGACCTCAAACTCACAGAGATCCATCTGTCTTTGT
CACCACCTTTGAGTTAAATTATTTTTATTGCTTTTATTTATGTGGTGGGGGTCAAACATGAGGAGATCGAGGATGATTCTATAGAGTTAGTTCT
CTCCTCTCATCTCTGCATGGGGTCTGAAGATCAAACTCAGTAGGAAGTTCCTTTACCCACTGATTCATCATGCCAGTCTTTGACTTTCATGTGT
GTGTGTGTGTGTGTGTGTGTGTGTGTAATTAAGAGGACAACTTGTGGGAAGTTGGCTTTTCTCTTCCACCATGTAGGTCCTGCAAATTGAACTC
AAGTAATCAAATGGCAGCAAGCACCTGTACACATGGTCCCATCTTGCTGGCCCTTGACCTTTATTCCTGAAGGATAGTTTTGCTGGACATACAG
GATTGATGTCACCTTACATACAGTTGGTGTCACCTTCATGTGTATGTGTGTTTCCCCTGCATAAATGTTGATGCACCACATGCATGGCTGATGC
CAGCGAAGCCAGAGTGAGGGTACTGGGTTTCTCCTGGAACTGGAGTTAATAGTTACAACCCATCGTGTTGGTGCAATGAATTGAATCTGAGTCT
TCTAGAAAAGTAGCCACTGTTCTTAACCACTGAGCCATCTTCTCAGCTTTCAACATTTAAAAATATAACATATTAAAGGTGTATCTTTGATTTT
TGCAGTTTGATGGTGATATTCCTAGACGTGTAACTTTCTTTATATTCTTGTGTTTCGCATTTGGAACTCACTAAAATATGTCTTTTGCTAAATC
GTAAGGTTTGAGCTGTGTCTTCCAATGCCCTCGTTTCTATGGTTTTGGGGTGAGCTGCTTCAGTTTCCACTTCCTCACGTGTTTTGTTTCTATT
CAAGTCAATTCAGTTGACTTTGGTCACTAGACAACAGCTTTCCTTCTTGTTAGACCAGCAGTGAGCAGCATTTGAAGGAAGCTCAGCTGGAGTA
GACGGCAAGGGCACAGACTGGGCTGGGGAGGCATGGAGAGTGCTCACATAAGTGTCCACATTTGTGTCACATGGTCTCTTCAGATTCAGAATTT
CTGTGTTTTTATTTTAAAAGATCCCCTCTACAAGCACTGAGGCTTTATGTCTTCTTATTTATAAACAAGATTATTTCTCATGTTTCTGAATATA
ATTACAAGACCTAAATGTAAAATGTCAGCTAATTGTAGCATCTGATCTTGAGGTATATCTTTGTGGTCCTTTCCTCTTGAGTGTGGATCACACT
TTGCCATTTCTTAGTGCACTTGCAGCCTTGGCAATATAATTCTCATAGCAACCGTGGGCTCGTTATGTTCCTTTCAGATGTCTGTTCACTTTCA
TCAGGTTAAGAAACACATACATAGCAGCAAAACTCTTACTTGTCCTCCTGTCACTGGAGCTGTCTGTGGGTTTGCTTGCTGCCTGTGTGCTGTT
GCTGTTAACTATTAAAGTGCCTGTCTGTGTAAGTTAGGACTGTTGGACGCTGCTTTAGCACTTCTCAGGGATGTTCCAGCAGACTGGCTGATCA
TCCAACTGTGTAAGACAAAACCATTGAAGTCCGTTGAAGAACAGGCGGTTGTCCATTTACGAGTTTCCTATGCCCTCCAGGGTCAAAACTTAAT
AGAATGTATAGGCTATCTTATAGGATAAGGAAACCCTAGAAATGGATGTAATTGGGTTCACAATAACTGAAAGAGTGTTCATTATTACTATTTA
TATTATTATTTATAATTTATAGGTAGAATGTATATTCTTTTTTTTTTTAATTCAAAATAATTAGCCAGGTGCTGTGGCATACTCCTTTAGTTCA
GCACTCAGAAGGCAGAAGCACAGCACTCTGACTTCAAGGCCAGCCTCATGTATAGACTTGAGTTCCAGAACAGCCAGGGCTACAAAGAGAAACC
CTGTCATAAACAAACAAACAAATAAGACAGGCACATACATATGTACATGTGTGTGTGCGCATGCGTGTACGTGCACTTTTTTTCTTTTTTTTTT
TTTTGAAAATGTGACTGTTGCCTAGATACTATTTTTAAGGCGACTGGAACGTAGGCACAGATTGGTCTCAATGCTAATCCCTAGGGACTGATGA
AGAAAGAGTGGAAAGGTGGCCTCACAGCTGCTGTTTTGAGACCTTTAGTTCTGGTCCCGAGGGCCATGATTTGCCTGCCCTTCTGATGTAACAT
GGCGTTGCCATTTAGTATTGTGACCTCGTAGAGTGAGTAGCTAGAACATTCTGGTGTATAATTTTTTTCATCTAATGAATAATTGGGTGTTTTA
CATATTTATGAATACAGTGGGTTGTCTTTGGGTTTTTTTTTTGTTTTTTGGGGGGCTGTTTGTTGGTTGGTCTGGGTTTTTTTCTCCCCTCCCT
CTGAAGAGTATTGGTGACCTTGGATATAGAAAAAAAGATTCTGTCTGTCTGCAAAGTCAGCTGTGAAACACAGAGCTGGTCAGTTACTTACTTC
TGTTACTGTCGTCTTGGTGTCCCCTCCCTCCATGTCACTCCAGCAAAAAGGAAGTGCTACTTTCAGGGCTAACCACACAGGCAATTGCAGCACG
TACCTGTGCACAGAACCCATACATATCAGGGAAGTTCTCAGTGTCCTGCCTTGTTGAGTGAAATTTTTTTTTAAAGATTTATTTATTTATTATA
TGTAAAGTACACTGTAGCTGTCTTGAGCTAAGACAGGATCACTGCTACAGGATCACTGTAGCTCTCTTCAGACGAACCAGAAGAGGGCGGGTGG
TCGTGAGCCACCATGTGGTTGCTGGGATTTGAACTTCGGACCTTCAGAAGAGCAGTCTGGTGCTCTTACCCACTGAGCCATCTCACCAGCCCCC
ATTGTCTGAAATTTTATCTAACCATTTATAATTTGTCCCTTGGCTTGGCAGATTTTACTCCACTCTGGCAGAACTATGTGACTTTCAGATATCA
GTCTTTTCAGTTACTCATTTTCTTCTCCCTCAAAATTTTTATTGTATTTTGAGGCAGTCTCGCTGACCCCTGTTCCATCCACAGCTTCTAAGAA
ATCTTTCCAGTGGGTGTCAGCAGAAACATAGCTATTCTGTGCATACTCCATATCACAGCTCTTGAGAAAGCAAGCGCAGTCACCCGTATTTTTG
GAGCCTTCCCACTGGATACTTTCAGTGTGCTTGCTGTTCCTCTAGTTGGCCTGTAGCCCTTTCTCCCTTGGTTCCGTCACTATCTCCCTTCTCA
TTGGTTCTGAGCTCCTTTGTGTCCAGCTGCTCTACTCAATAAGTAGATGAGCACACAAATGAGGATAAAAGGAAATGGAAAGACACAGGTGGAA
GGATGAGGTGTTCCCAAGGCATAGCTCACTGCTATGTGCTGTGCAGGTGTGGGTCCGTGTGAATCATGAACCCATTGAGTCTGCCTATAGTTTC
ACCCATCCCGTGACAGACCTTCTGCGCATTTTTATTAACGTGGTTTTCACAGGGAGAGGCTCCTAAGATTGAGACTTTCTAGTCTTGGTTATTT
ATTTGTGTCTGCTCTTTTTCAGGTTATCTGTCCTGTTGCCGGTTCCTGGATGACAATCAGATAGTTACCAGTTCTGGAGACACCACATGGTGAG
TACCTGACAAGGCAGCAATTGAGGCTTGAGGTCTGTCTACTGTTCTTGTTAATACTGGTTAGTAGGGTTACTTCCCATTGCAAGATAAATGCTT
CTTGATCATAACCTGACAATTAGAAAACAAAGTATCAATGAGTAACTCATTGCATCATCTGTGGATATGCAAAGTTTGATTTTGAACAAAGAAC
TAAAATGTAGATATTTAAACTATAGTTGTATATCAAGTACCTGGTTTTTTCTCCATTTATTTTTACTCATGTATGTGGTGTTTTTAGCCCTGTG
GGGTTCTTTTTCACTGTAAAAGTCAACTTAGCATATTGTGAGAATGAGTAAAGCTTTCAAACAGCAGCTCTGTCAGATTTGTTTATTTTAGAAT
GTTTGCTTACTAGTAGATGGAGACACATTCAAGTAATTTTTCCCTTTGTTTATTAATGAAATGACCAGCTGGTTATTTTAAGAGAATCATTTTA
AACTTAAGCTGCCCTTGTGGGTTTTTCTGGTCGTGGGAGACATTCCTGGGAGGTCAGTAGCAATATTTTAAATTTGATTTAGTAGCATGGCTTA
CAGGCTGGTGAAATCCAACAATGGACTATTGATGAAAATGTTAGCCAGGCGTGGTGGCGCACGCCTTTAATCCCAGCACTCGGGAGGCAGAGGC
AGGCAGATTTCTGAGTTTGAGGCCAGCCTGGTCTACAGAGTGAGTTCCAGGACAGCCAGGGCTACACAGAGAAACCCTGTCTCTAAAAACAAAC
AAAAAAACAAAAACAAAAACAAAAATGTAGTCAGGTGGACAGTGAAGATTAGTCATTACAAATTTCAAATTGCATGTGTTGATTATTTTCTTGG
TTGAAATATGTGAAACTTTTGTGCTCTGTGCTTCTTCCTTCCAGTGTCCCTCATGCCTAGCAAAGATAACCAGCATTCATTGTAGTGAACTTGG
TTGATTGGATTGGTGTTGCTGGGTGACACAAGCTGGTGAGGTTGACAAGAATGGACAGTGTATCATGCTGTTGCTTCTGCGGGTTGCAGCAGGA
AGTAGCCTGACTGCCATTTCCATAGCCAGCTCCCGCTTTATGTAATGCTGATGATATCGTGGCTTTTAGCCACTCTGTCAAGCAGAGGCCCTTG
GAAAACCTTGTACATCCATGAAGACCATCTTTGGTTTATGGTCCTCGTTGCAAGAGGAGTTGGAGCATCAGTTTCTCTGAGCCACTTATTTACA
TTCCTAGTGTCTAGGAAGGTGGAAAATGAGGGGATGGAAAGAATAACACAGGTGAAACAGGCTCCTTTCTTTCAGACCTTAGCATTTTCTGCCA
TCCCACAAACTGCCCATGATTATCTTGTGTGAAGGACAGTGGCTCCTTTGCTGTAGTGTGAGGTAACCTGGAAACAGCAGGCCCATATGCTCAT
CCATATGGTTGTTTATTGTTTTCATTTTCTTTTCCTTAGCAAAATCTCATCACAGAAGTAAATGTGTCTTCCCCGTGGCACAGAAGTCATCTGT
GATTCTGGGTAGTATAGAGGATGTTGTTCTAGGTGATTGGTCCCATGTGCGTGCCTGATACCTACTTTTCATTTCTTCCTGCACCAGTGCCCTG
TGGGACATCGAGACTGGCCAGCAGACAACCACATTTACTGGACACACTGGAGATGTCATGAGCCTGTCTCTTGCTCCTGACACCAGACTGTTTG
TCTCTGGTGCTTGTCATGCTTCAGCCAAGCTCTGGGATGTCCGAGAAGGGATGTGCCGGCAGACCTTTACAGGACACGAGTCTGACATCAATGC
CATATGTGTGAGTTTAAATTGTCTCCTTTAGATCTCAACCTTTGTTGTTGTTGTTGAAGATTTGGGTTTTTTTTTAGGGTCTGGAGAGATAGCA
TATTAGTTACTTTTCTGTTGCCGCAACAAAAACACCATGATCAAGGCAACCTAAAGAGAAAAAACATTTCATTGAGGCTTACAGTTTCAGAGGG
CGAATCCATGTCCATCACTGTGAGGAGCCTGGCTGCAAGCAGGCAAGCATGGTGCTAAAGAAGTAACTGAGAGCTTCATCTTGAGATATAAATA
ATCACAAGGCAGAGAGTGAGTGAGCGAAAACTTGGAATGGCATGGCCTTTTGAAACTTCAGGCATCCAACAAGGCCATACTTTTTAATACCTCC
CAAACAGTTCCACGAACTAGGAAATGAAGTGTTCAAACTTGAGAGCATGTGGGATCCATTCTCATTTATATTTGTGTCTGCCTGTCTGTGTATC
TGTATCTGGGTGTGTGCATGCCTATTAGAGCCAAGTACGCTGTTAGCAGACACCTGATATAGATTGGGTGAACCAAACTTGGTTGTAGTAAATG
GCTTTTAAAGTACCTTTAAAGTACCACTACCTTTAAAAACATTTTTTTTCAAAGTTTGTTTTAAAATTTGTGCTCTGGTTTTTTGTTTGTTTGT
TTTGTTTTTTCTTTGTGTTTATTCTGAGAAAAGGTCTAGTAGTATAACCTAGGCTTACCTAGAACTGGAAGTCTCTCTAGCACTAAGATCACAG
GCAGGCCTTTCTACCAAACCAGGTTGTCCTTTTCTTTGCAAATACAACCAGAGTCAGAGTGTTTTAGAAGCAGCTAAAACCCTGTGCTGTGCAT
ATATTTCAGACACTGATGAAGCCATTAGGTGCCAGCTCAACTCTTCCTTTTTTTTAAGTGACCAGTAATTTAGAGGCTGAATATCTTGCCAGCT
AAGGGAATGGCAAATTTAGAACTTACTTTCTTGCTAGCACCTCCTGAAGAGATGAGTCTGGTGACTAGAGCAGTGACTTGCTCCATCCTCCACA
AGTCCCTCCTGACAGCTCGTGTCCAGAGGACAGAAGCCCTTCAGCAGTGCCTCAGTCTCATTGCTTTTCTGTACTGAAGTCTGCCTTGTTGACA
GTGGCAGTCCATGAGTACTATGTCAGTACCCCCCTAGTACATCCCCCATTCACTCTAGGATGACAGCCCTTATTCTTGCTGGAACATCATCCTG
TTTTCCTTTCCATGGCAGCCATGCCTCTGCATTAACATCATGTCTTGTTGAACATTTACTTTTATGTTAGTATATATAATTCAGCTTGACCTTG
AATTCACTATGTGCCTCAAGGCTGTGTACTCTATTCCATGGTTGATTACAGATTACTACACTTTTTAGCCTCCTGTGCTTGTGCCTGAACTATG
GGCCTTACCCACGCCAGGCAAGTGTTGAATCAGCTGGCCTGTGCCCCAGGCCTCATTGTTTACATATGTCTTGATTTGTCTTCTCTTTTTAGTT
CTTTCCCAATGGCAATGCCTTTGCCACTGGCTCAGACGATGCCACATGCAGGCTGTTTGACCTCCGTGCAGACCAGGAGCTCATGACCTACTCC
CATGACAACATTATCTGTGGTATCACATCTGTTTCCTTCTCCAAGAGTGGCCGCCTCCTCCTTGCTGGGTATGATGACTTCAACTGTAATGTCT
GGGATGCACTCAAAGCTGACAGAGCAGGTCAGTGGCCACATGGCCTTTCTGTGTTTTGGGGGCACCAGCTTGCTTCTTTCTATGTGGTAAAATG
AGGTTCAGATGAGCTGAAATGTGTACATTTGTATCATCAGCTTAGTPATGTCATAGCTCAGCAGAGGGGACAGTTAAAGGCCACATAATTTGAG
CTCTGGCACTCCAGGAACTACCAAAAGCTCTCCTGTGAGGACAATGTCGGAGTTGATAGTATGCCAGATACCACTGAGTTCAATGTTCAAGTTT
CCCATTTTGTCCTGTGGGTATCCATGGTTAGCCTAAAACACTCTATTAGACCAGATGTCCTTGAATTTAAAAGTCTTCTGATTCAGCCTTCTAA
ATACTAGAATTACTGGTGAGTACCATCAATTTTCAATCTTTCTGACTCATTCTCTGTAGTCACTTAGCTTCTGACATATTCCACCATGGACAGC
TCCATCTTCAGCTGTCTGAGCCTATCTATACAGCTTTGGCATCTGATGCCATGCCCCTTCGTCTGTACAAGGTTGTTGAACACTGTGCTGGTTG
CTGGTAATGATTCAATTTAAAGCCTCAATTTAATATGTCAGAATCAAGTGGATTAAATACAAGCTGGACAAAAGATTAGAAAGTTTTTGTCTCA
AGAGTCTCCCTTTGAGCTCAAGCTGGCCTTAAGCTTCAAGTTGAAGAGCTTTATTACATTCAACAAATCTGCTTTGGAGGAGGGAGGGAGGGTT
GTGACCATGAATCTCGTGGGTCCCACTGTGGCTGCTTATACCCACCAGACTACTGAATTGAGGACAGTTTTTGGTGGCTCACACATTTAATCCC
AAGTCTCAGAAGCATGCAAATTCTGTGAGTTGTAGGATAACCAGGGCCTGTCTCAAAAATAAAAATCAACATTTCTGCCTTTGCCATTGTAGCC
CAGGAAGTTGACTCTGAGTTTAAGAGAACCTTCCAGCCCTTGTTCTTAGTTGGTACATCAATAGCTACAGGACTAAATGTTTCTGAAGTTTCAA
ACCCTTCTGTGAGAGAAGGGGTGTTTTAGCAGGTGATGTGCCATGTGACAATGGGTCCATGATTTCAACTGTAGGCTCTGTGTACCCTGTGGTT
AGTTGTTCTGAGTTTACTATTCAGGCTTTTGGTTTTTTGGGTCATTATGTTTTGTTTTGTTTTTTTTAGAGATTTATTTATTGTAGCTGGACAC
TGGTGGGTTATACTTTAAATCCCAGCACTTGGGGAGGCACAAGCACGCAGATCTGAGTTTGAGGCCAGCCAGGTTTACAGTGAGTTCCAGGACA
GTCAGAGCTACATAGACAAATCTCTCTGGTGGATGGGGTGGATTTATTTATTTTATCAATATGAGTGTTTTGCCTGTGTACCTGCAGAGGCTGG
AAGAGGGTATTGCATTCCTCTGGAACTAGAGTTACAGATCTTTGTGAGACGCCATATGGGTGCTGGAAACCAAGCTCAGATCCTGAGACACAGA
TGGATGTTTATTCATTATTTACTTGTTTGTTCATTTGTATTTTCTAGACAAGGTTTCTCTGTAGCCTTGGTTAGCCTGGATCACCAGATCTGTC
TGCCTCTGTCTCCTCAGTGCTCGGATTAATCCAGCATGTGCGATTAAAAGGCATGCGCCACCACTACCCATTTTTGTATACTATCAGCTTTTTG
TTGGTGTACAAAAATTATCCCAAGGGGGTCTGTGTTTATGTCCTTGTTCTTCTTAGAGAAGAACATGTTATGATTGGTTGCTCTCTTAACAGAA
TTGCCCATACACCTAAGGATCGTTTCTACTTGGATAAGAACCTTCTCCCTTTGTAGTCGCCTTCCCTTGCCCTCTTAAGTGCTTGTTTTACCAA
AGTCTTGTAGCGTTCTTCATCCAGATGAGCCTCCTGCTTTGTCACAGCCTCATGTGTGTTTGTGGTTGTGCTCTTTTTGTTCTCAGGTGTCTTA
GCTGGACACGACAACCGAGTCAGCTCCTTGGGGGTGACTGATGATGGCATGGCTGTGGCAACAGGGTCCTGGGACAGCTTCCTCAAGATCTGGA
ACTAAAGCCAGGAGGTAATGGGGCAGTCCCATTCCCAGGACATGGCATTTTCCTATATGGGTTATAGATTTACACAGATCTTGTTGATCTGGCA
TTGTAGCAGATCTGCAGTGAAGGCCCTTAGCTGTGATGCAGAGAACAGTGGGAAGAGCTCGGGTTCTTTCTGTGTGCACTGACTCCAGGCTCTG
TTCACAGCAGCAGGTGGATGGATGCCATGGCGACTGGAAGACCATTCCAACCTTGAATCGTTACAGCGATAGCATATCCTATCCAACCATACTA
ACGTGGACACCCACACCTCCCCTCAGAACTTCAAAAGGGCAAGATCTTTTTTCCTTCACTTATTGCTGAAACCAAGAGCACAATTCCCATTAAG
AGAAGGATCTCTGTGCTGTAAACTAAACAAATTGTGCATTTTTTCTGGGGCCATTGTTTTTGGTTTATTTTGTTATTTTGTTTTGTTTTTGTTT
TTTTGGTTTCATTTTGTTTTGGGTTGGTCCAATTTTAAAAGGAAATACTACAATAAAAATGTTAACCAGAAGGTAACCCTGAGTGTGATTGTGA
GAGAGACACGCCTTTTTACTAGTTCATTTGCATTTAAATCAGTGATCCTGTTCTGTGGCATTCATGAAAAACAAGTTGAAGAATTTGTTTATCT
GGAATTGTTTCTAAATATAAGTCATTTGTAGCAAGACTTTGGAAGCATTCTTTCTTAAACATATTCCTTTATGTTCAGTAGTTAAGAGAACCAG
GGCCCACGGCGGTCTCTGACTTGTCACTGATGTTTTTTTTTTTTTTTGTCCCTGGCTTGCTTTTTTTTTTTTTTTTTTTGTCTCATGTCACAGA
TGACTGTTTCGCACAAACACAGCATAGTGGAAGAAAAAATTTCAGAAGCAAAGTAGCCAAGCACATGTTAGGATGGCCACGAATGCTTGGTCAG
AGTCCTTCCTTCCCTTGCTCAGCAGCCCACTTACTCCCAGCGCCTTCCCTCCCTCCTGTCCCTCCTGTCCCCTCACTGTCCACTTTCTGTTCTT
TCCTTGGGTTTCCTGTGAAGTTGGAGGGACGTTTGTAGTCATGTCACACTAGCCGTCCTGCCCCTGCTGTCAGAGATTTTTTTCTCCAGAGAGG
TGCCTGTCCTGTGCTTGGATAGTCAGTTGGTTATTTGTGTATGAAACAATGTACAAATCAATGTTTTGAAAATAATGATCTCAGACTTTCTAAG
TTAAATTTTAAACAATTTGATTGTTTGCCATATTGGGTGGGGTTACTCTTAGAATCGCATGCTGTAGAAATGCTCTAAAGTGCATATAGGACTC
AGTCCTTAGATGTTCTTTTTATTTTAAGAAATAACCTCTTCAAGTTGTAACCGTGGCGGCTTTGTCCATTACTGTTGCTATTCTGCACACATAT
CGGAAGCAGCAAGCGCTTTACACACTTGAGTAGTGGGATAAGTCACTGTTTTCTTTACTTTACAAAACAAAACAGTCCTGTTGGGAATGATTGC
TGTTGGATTCTGGAAGGGAGGGGAAAGCTGCTCTGCTGCCTCTTTGCCACTTCCTGGAAGCCTTCCTCCCTGGAAGAACAGCCTTTTGCATCTG
AGGCGACCATTTTTACACCATGCAGATCTTCGTGGTTATCATCTCAAAGCCATGTTCAGCAGCAGCGTTTGGACAGCAGTGTTCTGTGGGCCCT
CCCCTCCCCCATATCCTCCACCCCCTCATAACAGTAGTGGCTTCGCCATTCTGTTTTCTGCAGTGTCCTGTACAAAACTGTGCTGTGACTGTGC
GGTAGGCCTGGACATGGCAAAGAGAATACAGCGAAGCCCCTTCTCTTCCTACCAAACAACTCTGTAGAGCTCTCTGCACCCTGTACCCTTTTCA
CCTTTTGTATTTAATTTTAAAGTCAGTGTACTGCAAGGAGGCTGGATGCAAGATAGATACTATATTAAACTGTACTGTTATTTAAGATGTAATA
AAGCAGTTTGACATGAGGGACTCTGGTGTGATGGTTATTTGAGGGTCATCTTCAGTGTGTGGGCGTTTGCCCCAACTGCTGACTCAACAGTTAT
ATAACGTCATGAGAGACCCTTATAAAAGTGTCAGCTCGGGCTGAATGTAGTAGTACACACCTTTAATCACAACACTCAGGAGGCAGGGCCAGAT
GGATCTCTGAGGTTAGGGCCAGCCTGGTCTACTTTGCAAATTTTAGGACTGCCAAGCAATATAGACACTGTCTCAAGGGACGTGGGGAGATGGG
CTCCTCGGAGGTTTCTGGTATATATCTCAGGTCTGCAGAGCCACATGTTTATCACGACAAGTGGCCTTTCACCCTCAGCACCTGGGCCCTGTCT
GCCGTCTCCTGCTGGACCAGCCAGCTGCTTCGACTTCCTCTTCCTGCACTAAAATGTCTGAGGACCTGCCCCTCCAGAGATACTTTCCTGTTGA
CTAAGCACCATTTCCTTCTCTGTCGATAAACGTCACTGCATCTTGAAGGAGCGACTATCAACCCCTGAGTTGTTGGACTGCCATTCCAGCTTCT
GACACCCATTCCACTGCAGTGCCTGCTTCTAAGTTTTATGATAAAAATTTTAATCTTAAGGTTTTTTTTGTTTGTTTGTGGTGAGTTTTTTTGG
TTTTTTTCAAGACAGAGTTTCTCTTTGTAGAACTGGCTGTCCTGGAACTCACTCTGTAGATGAGGCTGGCCTCGAACTCAGAAATCCGTCTGCC
TCTGCCTCCCAAGTGCTGGGATTAAAGGCGTGTGCCACCACACCCGGCTTAATCTTAAATTTTAAGATTATAAAACATAACTGATCTTCAGGCT
CACATCCCCTAAACATTGACTGGCCCCAGCCACCTTGTTTGGACAATGGTAAGCAAACAAATCCATCCAGGGTCAGCGGTGGCCCCTGATACCA
CACATTGTGGTGTGATGGGCAGCTCCAGCAGATGGGATGGGATGGCCTAGTCTAATCCTCTCCTAGTCTCCTTGAAATAAATGTATTTTTCAAC
ACACACATTTTGCAAGTCTTTACCTACCTCAACTTCCACTGAGAATGCAAAACATTTGAGGTCCTTCTGATCTAGAAGGTGAAGCTCTGACCCT
AACTTCAAATTCTCTGGGAGTACATGTCTTAAACTGCTTCTAACCTACCTGACAACAAGCAGGCCCCAAATGGACTGGGGTAGATCTGTGTCTC
AGGCCTGTCCTACTTCTCAACCAACATCCAGGCCGCTGCCCACTTGTTTAACAAGCAGTCATGGAAGACATGTCCACTTTGGATATGTGGGCAG
TATTAATGACCAAAGAGCGTGCAGGTTTCACAAATGCTCAGGCTTACACATCTACATCCACCATTAAATACCACTCATGCTCTGGAAGCTGAGG
TGCCCGTGTGCTCTGTGTGTTGCTGCCCATGGTGGAAGTACACCTGTTGAAGTGCACACAGGCAGATAAGGGGCTGCTGCTATATTTTAGACCC
ACCATGTCTCATCATTTTCCTCCAGCGTATGGGCTGATGCCATTCCATGACCCCAGGATTCCAATTCTTCTGGCCTGTAAAGGGAGCCACCTCA
TTTATTTGCCAAATACTACAGGCTGGAATCCTGATGAAAGGCCACCCGGGTCCAGCTTGTGCCGTCCACCGTTTCCTTTGGCGCCTACTCTCTC
CTGCCGCTCTCACTGTGCTCCTCTATTCTCAGTACAACCTGACACCACCAGCATTCTGTTACACCAGTCCAACCCCTCACCATCCAAGAGCAGC
CAGCAGTCTTTCACCTCTGCCTCTTCACACAGGGTGATCTTGGGACAAGGTGTTTGCTCTGGGAACCCATGAATAGTCTGGCAGGAATTCTATG
AGAACAAAGTGCCTGGTGTGACATTACAGCTGGTCACTATGTAACCCACTGTTCCCTTGCCTGAGACATTTCTAAGCACCCTAGGCAAGACTAC
TCTGCTTGCTGTATCCAAAACGTCAGTACCTGGCAGCTGTCCCACTGATTTGGCAGAAGAAGGGATAAGGTTGCCCCTCACCCACCCCAGTGAA
GTGACCCTGATGATGACCTCAGTATTGGTCTTTACCTATGCCAAGTGCACTTTCGGAGAATGGACAAGATAACTAGTATCCCATGACAATCAAC
TCTCCTCTAAAATACACTCTTCTGGCTAGCTGTCACCTTGTTTAGGTACTGGACAGCCTTCACAAAGCAGTTTATCCCACCCTGGTCACATGAA
ACCAACTTTCCTCTTAGTACTAAGGCAGGACCCAAAGAGCTACAAAGCCTCCCTGATGCCTGCGCCTGAGAGCTTACCTGAAGGGACACCCCCC
CCCCATGTGACAACCTAACTTTGGGCACAGGCCCATCCTGTTTCCTCCTTGTTCTTCCTCCTCCCTTATCATTTAGCCTTTGAAGAGTAACCTC
CAGGTACTGGAGGCCTGAAGCAAAAATGTGTGTAATTGCCTTGATTTCGTCCTGCTACCTCACTCATCCCATGTGACCTTTATTCTGCTGCTCC
TTGAAGCCAGCCCAAATTAAACACTCTAGGAGTCTTTTCAGTACCCTCTTGCCATTCCAAGCCTTGACCTTGACCTTGGCGACTGTCTTTAGCA
CAGTGGTGGGAATGAGCACTTGGTATCTGAGTCTTCAGAGTTTGATGGGGCCCAGTAAAACATTTCACAATGTCAGCTTTGTTCCTTCCTCAGA
AATGGAGAAGCCACCTGCATAATCTAGGCCTTGCCCCCACTGTGTAAAACAGATTTCCCTAGCAACCACTGGACATCTGCTCTTTTAATTTAAG
GCTACACAGGTTACTTGGTATGTGACCTTGGACTGCAGACCATAGACTGGGTGCCTTTGCAGAAGAATATGACTGCTCCCACTCTGGATGTCTC
TCCAGGTCTGCTGGCCATGTGCCTGCCATTTACCACTAGATACCAATCAAGTGTTATATAATACAATAGCAGCATAGTTACAGCCTTCGGTGGG
TGTGGCTGGCGTTCACTCTGGGGAAGAAGTTAGGCTTACAAAACTCATGAGGAAGTTACAAAATTTAAGAAATCCCCGCAAATTCCCACCATCC
TCCCTACCCACTATTTTCCGTCCCCACTGCATTGATGTGTTCTTTTTGGAAGGACAGCACACAGGTCTCAGGAGTTCCCACCAGAGAACATCCT
GACTGCAGCAGGTATGGGGGGCTGTGGGGAAGCGTGGAGATTGGGCTATACAGGAAGGGCAATAGTGTGAACATCTTAAAACTACAGTGCTGGG
AGTCGGGACTCCGAAAACACCTACTGGTGCACTGTGCACACTGGTGGATATCAATGCACGAGCATGTCCACCAGTTCAGCATATCCCTGGCTCA
GCTACAAAGTCGGTGGCCTCCCTCTTTCCCTCCTTACAGCTGTGGGTGAGGCACGCTATTTACACAGTCGCTTCTCAACTATCAAGACTTTGTT
TTTCTTTTTGAGATAGGGTCTCTAACTATGGTACCCCTGGCTGGCCTCGAATTCCTAGAAATCCGGAGCTCTCATCTCTGGGATTAAAGTAGTG
AACCATTGTATCAACCAGCTGTCAGGTTTGTTACTTTCAGGCTCAAGTCCTTGACAGTTGCCAAAGGGTGTCAGGTCACTGCTGGTGGGCCTGA
GAGCCATATGAGCGCTGTCACCCGAGTTCTGCTTCTGAAAGATACCAGGTCCATGCGCTGGACATTAAGAACAACGTGGGAACAGGAGCCTGGC
ACGAAGCCCACCTTCCCACAAAGCTGGCCCGCGTTGTCCACATGGTCCTGGAGACCTCGCCAGCAAAAAGCAAACTGAGTGTGACGTAGGACAG
GAATAAAGATCAGACCGCGAGGCAAGGAGGCAAAAAAAGAAAGAAAGAAAGAAAGAAAGAAAGAAAGAAAGAAAGAAAGAAAGAAAGAAAGAAA
GAAAGAAAGAAAGAAAAAGGAGAGAATCTGGTGGTTTTCTCTGTTGCTGCTGGGACTGAGCTTTTTGCCCCTCCTCGGTTACTCTTTTTTTTTT
TCTTTTTTTCTTTTTTTTCTCCCTCACCCCTCTGCCCCGCCTCCCCTTCCGCCCCGACTCCTCCACCCTTTGGCCCCGCCCACTCTCCCGATCT
TCCCCTTCCCTCCGGCTTAGTCTCCTTAGTTCCGTCCCTTTCCAGCTCTGCCCTCTTGCGACCTGTCCCTCCCACTCTGCCTGCCCCTTCTCCT
ACCCCGTCTGCCCCTCCCCTTTCTCCAACCCTTGGCCCCACCCCCCCGGGCTGTCTTCCGCTCCTTGGCCCCATCCCATTCCGCTATGCCNNNN
NNNNNNNNNNNNNNNNNNNNNNNNNNNNNNNNCACCCCCCAGCCTCTGATCCTTGGCCTACAAAGGGTTTTGAAAAACCCGAAGTTTGCGTGCA
CGCCTGTGTAGGTGCGGCTGCGCCGCTCTCCCCACGTGCCCTGCAGCGCATGCGTGCGGGCTGCGCTTGCGCACTGACAGCCGCGGCGCAGCGG
GGCTTGGTGGTGCCGGTCTCTGGACCCACCGGCCATGGGGTGGCGGGCGGCTGGGTCGCTGAGAGCCAGGTAGCAGTAGGGCAGCAGGGACCGC
CTGCTCGGCCCAGCATGTAGACGTCCACGCGGGCGCGCGGCAGCCGACGGTGACTGCGGGGCCTGGGGTCGCCCTCTGCCCGGCGTCACTGGCC
GGGACCCGTGAAGACACGGTCACGGCGCCGGCCCTCCCCACCTGCCCGAGGCCGGGCGCTGGTGGCTCTGACGCGCCTCCCTGCGTCCGAACGT
GGGTTGCAGCCAGGATGACGCGTGGTCTCGGGGAAGGAGCCTAAGGCACAGGTCTGAAGATCTGGTCCGGCCTTGGGTTTAGGGGGACGAGTCA
GAGGTTCGGGTCCCGGGAGAAGCCATGTAGGCCGCCGTTCTGTTCTAAGCCAGTTCAGCGCGCAGCACCGCAGCCGAATCGGCTCCATTGGTCT
TCCAGTGGGGCCTTAGCAAGCGCCAGAGACCTTGGCATGTGGGCAAAGTAGTCAGACGAGCGTTTTGTAAGCAATCGAGGTGTGAAACTCTCCA
AAACCCCATCGTAAACTTGGTATCCAGTACTTGCCAGGAGCTTCCAAAGTCCTGAAGAGTCCATGGAGATGTTCCTAGAGGCTGCTGCCTCTCA
GGATGTCACACTCACAGGCCGCTTGTCTTGGCCTCTGGCAGGTTTCTTCGTTATGGGAACAGGGCGTGCCCAGCGCAGTCCCAGGATCTGCCTT
TGCTTGGCCAAGATCCGGCGTCTCTTTCCAGCTCTCCCAAGCAATGGGCTTTCTCCTGGCATTGATTCTGAATAGCGACTTGTTTTTCCTTTCT
TGTTTGGGAAACTCTCTGTTTTGGTTCAAAACTTATTCGTTTGGCTTGCCTCTTGAGAAGAGTGTTATTCAAACTTATATTCATTGGTTTCATG
TATCACTGTCAGTTTCCACGGGCGGGAAAGCTGGCATCCTCGCCTTGGTAATTAAAAGCACGGCACCTTCCCTCTGAACGTATTTGTCCTCAGC
AGTGACTTCACTGTGACTTACACTGCCCATCTTGGGCTCTGGGACAGCCACGGGTGCCAATATACAGTATGACCAGGTAGCTTCTTCATTTGGA
GGTGGCATCTCAGAATGCTTCTGCATTTTCTTCTTTGTAGATTTATTTATTAAAAACGATGCAGTTTTATTCATTTTTTTTCTTTTTCATCTTG
TTTGAAGTGCTACAGGTCCAGCCCAGATCCTCACACAAGTGCTGTCCCACTGAGCCACAATCCATCCCCCACCCCTCCTTTTGGGTAGAAGTGG
CTAACAGATAAAACAGCAGTACTTAAATGAATAGTTTAGCTCTCTAGGCATCACTTGGAGATGGAGAGAAGCAAGTGGTGGTTTTTTCCTTTTT
TTTTTAATGGGAGTGGACACTTGCTACTCTACTGCTCATGAATGGAAGGAAGAGCTTCCAAGTGTTGGTTTTCTCCTCCTGCTCCATGGGCTCC
ATGGATCAAACCCAACACATCAGGCTTGGCAGTAAGTGCCTTTGTCTACTGAGCCATCTCTCTGATCCTTCCTTTGTTTTTAGACATAACTTTA
TGTATGCCAAGCTGATTTCTAATTCCCTGTGTAGCCAAGGGTGACTCTGAACTTCTTGTCCTGTATGTTCCTCTGCATGTTGGGATTACAGGCA
TGAACCAAACCATATCCAGTTGGGCTTTTTCTTGTTTTAATGTGATGTTGGGATGAAGCCCAGGGCTTTGTGTGTGCAAGCACTGTACCAACTG
AGCTCTTTTTCAAGCCTTGGGTGGTTTCACTCTTTTTTTTTCTTTCTTTCTTTCTTTTTTTTCCAGGGTGGAGGATGGAGTTCAAGACAGTGTT
TCTCTGTCCTGGAACTCACTCTGTAGACCAGGCTGCCCTTGAACTCAGAGATCCCCTGCCTCTGACTCCTGAGTGCTGGGATTAAAGACGTCCG
GGCACCACCACCCAAAGTCCTACTCTTAATGCTTTTTTTTTTTTTTTTAAAGATTTATTTATTTATTTTATATGTATGATGCACCAGAAGAGGG
CATCAGATCTCATTACAGATGGTTGTGAGCCACCATGTGGCTGCTGGGAATTGAACTCAGGACCTCTGGAAGAGCAGTCAGTGCTGTTAACCAC
TGAGCCATCTCTCCAGCCCCCACTCTAAGATTTACTTTATTTTGGATTTATGTGTATGCATGTGTGTTTGCGTGTGGTTATTATGTGCACACGA
GTATGTGTGCCTTGGAGGCAGGAAGAGGGTGTCAGATCCCTTAGAGTTGGAGTTACAGATGGTTGAAAGCTGCCGGATGTGGGTGCTGGGAAGG
AAGCTCAAGTTCTCTGGGAGCAGTAAGAGCCTTGTAACTGCTGAGGCTTCGCCCTCTCAGGTGTTGGGAATGGATTCATCTCCATCTTTACCTT
GAATCTCTCTGTTTTCTCGTGTCGCAGCAAGAGGGAGATCGGTGCAAAATGCTCAGCACGCGGAGGAGGAGCCTTGGGAGGACAAGAGGGGTGG
GCTTTGATCTCAGGCTCTGCTTTCTAGGACTTGTGAGATCTGTTTACAGTTACCACATGGCTCCTGCCCTCCTGAAGGCAGAGGTGTCGCTTTC
AACCCCAGGAAACCATCCTAATTGTTTGTGATAGTTCCTTAGCTTATCATTGTCCTCTATTCTGATCCATGGCACCTGTCCTCCCAGGGCTACT
GCATTGGGAACAAGTTCGTGAAAACAAATGATCGGGTTAAGGCAGAGACGGTACTAGCAATGTACGCCAGTGCTGTCCACGGTGCAGTGGAAAG
GGCAGCAGCGCCTGACCACTTAGCCTTCTAGACCAGAGTGCCTCTCTTGGGTCTGTGAAACTATTCCACCACTAGATGGGTTCTGTGATCCCGT
TCCTTAGAACTTTCCACAAACAGCACACTTCTCTCACCTGTCTGCTAGCTTGGGTATCATTTATTTGTAGAAATGAGGTAGGTATTAGGTAATC
ACTAAACCTGGACTCTGTGGCTCACAGTAGTGATACCATCATGTTTGATACAGCAACACGTTGTCTCATAAAACAAATGAACAAGAACTGGAAA
CTTTTCCAACTTGGTATTAACTAATGAAGTTAAACATTTACCTGTTGCTTTCACTAATTTTCCTTCTTTTTATTTTTTTTCTCTCCATTTCTTC
CTTCATTCCCTCTATTTTCAAAGACTCAGACTTTTGTCACACAGATTCCAGTCTTCCTCCTGCGTGGCTGAGTCCTTGGCTCACGGTACGCACC
AACACACCTGGCTTCGCTTTTCATTTACCGCTTCTACATATATTTGAAGTTCACATGGAATTGAACGTTTGTATTACGTTTCTTGGGCTGACTC
TCTGTGTCTTCATCCCTGCCTTTGGTTCCTGTTGTACATGAGCTTATTGACATTTTGATATCTTTCTTGCTACTCCATGATGGTGACTCAGTTC
CTTTTCCAAGCCAGCCAAGCTACTCAACAATGAAAAAAATCCCAACAGGGATAACTAAGTGCACTCACCCCCCCCAGCTACCTCAGCACCTGAT
AATCATCTTGCCTAGCCTTTGTTTCCGCTTCACTTTCTAGACCTTGCTTGAAGAGTTACCTAGGGAAAGGTTGGCGACGAAAGAATTAAATAAT
GGAATTAAATAGAATTAAAAACACAGGAGGAGCGATGATGGGTCAGTCCTAGCAACCACCCGGGATTCACTCCCAGGGACCCTCAGGGTAAGAG
GAGGGATTTACGGGCTGCCCTTCGATTGCCACGGGCAGATTGTGTCATGCGAGTGAGCATGTGTGCACCAACCCATAAGTAAATACGTGTATCT
GTTTATTTACTTAATTGGGTTTTTTTTTTCTTTTAAAAAAAAAGTGGGGGAGGGGGTGTTGGGATGTTCAAATCAGGGTCTCTCTCTCTGAAGC
CCTGGCTGTCCTAGAACTCAATCTGTAGACCAGGCTGGCCTCACTTTAGAGAGCCACCTGCTTCTGCTGGGATTAAAGGCTTTTATACCACGAT
CTCCTGGTTTAT
MOUSE SEQUENCE—mRNA
GCTTGGATTCTGAAGTGTGGAAAGCACTGAGACGTGAAGATGAGTGAACTTGACCAGCTGCGGCAGGAGGCCGAGCAACTGAAGAACCAAATTA
GAGATGCTCGTAAAGCGTGTGCCGATGCGACTCTTTCTCAGATCACAAACAATATTGATCCAGTGGGAAGAATCCAAATGCGGACCAGGAGAAC
ACTGAGGGGGCATCTGGCAAAGATTTATGCCATGCACTGGGGCACAGACTCAAGGCTCCTTGTCAGCGCCTCTCAGGATGGAAAACTCATCATC
TGGGACAGTTATACCACAAACAAGGTTCATGCCATCCCTCTGCGCTCCTCTTGGGTCATGACCTGCGCATACGCTCCTTCTGGGAATTATGTGG
CCTGTGGTGGCCTGGATAACATCTGCTCCATTTACAACCTGAAAACTCGTGAAGGGAATGTGCGTGTGAGTCGTGAGCTGGCGGGACACACAGG
TTATCTGTCCTGTTGCCGGTTCCTGGATGACAATCAGATAGTTACCAGTTCTGGAGACACCACATGTGCCCTGTGGGACATCGAGACTGGCCAG
CAGACAACCACATTTACTGGACACACTGGAGATGTCATGAGCCTGTCTCTTGCTCCTGACACCAGACTGTTTGTCTCTGGTGCTTGTGATGCTT
CAGCCAAGCTCTGGGATGTCCCAGAACGGATGTGCCGGCAGACCTTTACAGGACACGAGTCTGACATCAATGCCATATGTTTCTTTCCCAATGG
CAATGCCTTTGCCACTGGCTCAGACGATGCCACATGCAGGCTGTTTGACCTCCGTGCAGACCAGGAGCTCATGACCTACTCCCATGACAACATT
ATCTGTGGTATCACATCTGTTTCCTTCTCCAAGAGTGGCCGCCTCCTCCTTGCTGGGTATGATGACTTCAACTGTAATGTCTGGGATGCACTCA
AAGCTGACAGAGCAGGTGTCTTAGCTGGACACGACAACCGAGTCAGCTGCTTGGGGGTGACTGATGATGGCATGGCTGTGGCAACAGGGTCCTG
GGACAGCTTCCTCAAGATCTGGAACTAAAGCCAGGAGCAGGTGGATGGATGCCATGGCGACTGGAAGACCATTCCAACCTTGAATCGTTACAGC
GATAGCATATCCTATCCAACCATACTAACGTGGACACCCACACCTCCCCTCAGAACTTCAAAAGGGCAAGATCTTTTTTCCTTCACTTATTGCT
GAACCAAGAGCACAATTCCCATTAAGAGAAGGATCTCAGTGCTGTAAACTAAACAAATTGTGCATTTTTCTGGGCCATTGTTTTTGGTTTATTT
TGTTATTTTGTTTTGTTTTTGTTTTTTTGGTTTCATTTTGTTTTGGGTTGGTCCAATTTTAAAAGGAAATACTACAATAAAAATGTTAACCAGA
MOUSE SEQUENCE—CODING
ATGAGTGAACTTGACCAGCTGCGGCAGGAGGCCGAGCAACTGAAGAACCAAATTAGAGATGCTCGTAAAGCGTGTGCCGATGCGACTCTTTCTC
AGATCACAAACAATATTGATCCAGTGGGAAGAATCCAAATGCGGACCAGGAGAACACTGAGGGGGCATCTGGCAAAGATTTATGCCATGCACTG
GGGCACAGACTCAAGGCTCCTTGTCAGCGCCTCTCAGGATGGAAAACTCATCATCTGGGACAGTTATACCACAAACAAGGTTCATGCCATCCCT
CTGCGCTCCTCTTGGGTCATGACCTGCGCATACGCTCCTTCTGGGAATTATGTGGCCTGTGGTGGCCTGGATAACATCTGCTCCATTTACAACC
TGAAAACTCGTGAAGGGAATGTGCGTGTGAGTCGTGAGCTGGCGGGACACACAGGTTATCTGTCCTGTTGCCGGTTCCTGGATGACAATCAGAT
AGTTACCAGTTCTGGAGACACCACATGTGCCCTGTGGGACATCGAGACTGGCCAGCAGACAACCACATTTACTGGACACACTGGAGATGTCATG
AGCCTGTCTCTTGCTCCTGACACCAGACTGTTTGTCTCTGGTGCTTGTGATGCTTCAGCCAAGCTCTGGGATGTCCGAGAAGGGATGTGCCGGC
AGACCTTTACAGGACACGAGTCTGACATCAATGCCATATGTTTCTTTCCCAATGGCAATGCCTTTGCCACTGGCTCAGACGATGCCACATGCAG
GCTGTTTGACCTCCGTGCAGACCAGGAGCTCATGACCTACTCCCATGACAACATTATCTGTGGTATCACATCTGTTTCCTTCTCCAAGAGTGGC
CGCCTCCTCCTTGCTGCGTATGATGACTTCAACTGTAATGTCTGGGATGCACTCAAAGCTGACAGAGCAGGTGTCTTAGCTGGACACGACAACC
GAGTCAGCTGCTTGGGGGTGACTGATGATGGCATGCCTGTGGCAACAGGGTCCTGGGACAGCTTCCTCAAGATCTGGAACTAA
HUMAN SEQUENCE—GENOMIC
AAGAGGGCACTAGATCTCATTATAGATGCTTGTAAGCCACCATGTGGTTGCTGGGAATTGAACTCAGGACCTCCGGAAGAACGGACAGTGCTCT
TAACCTCTGAGCCATCTCTCCAAGCCCTTTGTTTTTTGTTTTTGTTTTTGTTTTTTTAATTTCTGATATTAGAAATTTCTTTTATTTTTTAATT
AGATATTTTCTTCATTTACATTTCAAATGCTATCCTGAAAGTCCTCTATACCCTCCCCGCCCCCACCCTGCTCCCCAACCCACCCACTCCTGCT
TCCTGGCTCTCGCATTCCCCTCCTTTGTTTCTTTTTTGAGTCAGGGTTTCTCTCAGTCTCTGTAGACCAGGCTGGCCTGGAAGACACAAAGAGA
TCTCACTGAGATTTTTATACACACTCAGAGAAAGACACAGACACACAGGGGTGAGGGTGGCTCGTATTAAAGGTGCTGGCCACCACTGTCCAAC
TAGGATGTGTTCTTAAAACATTCTAGGTACTGGTTGTTTATAAGGCTTGAGGCAGAATTGCTTGAAGATGGGAGATAGACCAGCAAGAAGGCCA
TGAGGCCTAAAGGGTGTTTTGGGCGTGGGGTGGGGCAGGGGAGAGGGTTGGTTGTTTTATATCAAGGCCCTTCCATTCCTAATTAGCAAGGCTT
CATTTAGGTCCCAGATAGCTTCTAGACTTGGAAAAAAAGTTTTTTTTGTTTTTGTTTGTTCGTTCGTTTTTTTTTTTTTTAAAGCAACAAGGGC
TCTTTTTTTTTTTTTAAAGATTTATTAATTATATGTAAGTACACTGTAGCTGTCCTCAGAGACTCCAGAAGAGGGCGCCAGATCTCATTACGGA
TGGTTGTGAGCCACCATGTGTTTGCCGGGATTTGAACTCAGGACCTTTGGAAGAGCAGTCAGTGCTCTTACCCACTGAGTCATCTCACCAGCCG
TTCGTTTTGTTTTTTTTACCACTTGGACTACTGACCTAGGTGGGATTTGCCGCTGGGGTTAAGGGAGTAGGATGAGGTCTATAAAGAACTGAGA
GTAATAAGTGCTCCTGAGGCAGCAGAGCCACTTTGTTTCTAACGCTTGGGGTCTGAACATTGAAATCACCGTTTATGTGTGGTTTCACAGATTC
AGCTCTTTAAATGGACATGATACTTAGCTTTGAATCCTCTCCATTCTTGGGCTGGTGAGCAGGAAGCCGGCCTTTTCACTATAGCTCACTCTGC
CCCATAGCAGGTACTTCAGTCAGTGTGGGGGAGGGAAGGAAATTGTTTGTAGAGGAGAATTTTAAAAATAAGGCATTGCTGAATTTTTAAAAAG
AAGCATTACCTTTCTCAGGACTCAGCCCTGACAATTAGCTCCATTAACACACAAATACCTGTCTCCACTGCAAAAGGGTAGAAAAACTTCCCAT
GCTATTTGGTGAAAATTGAGTTGTGCCCAGAAACGATATCTTTGTTTCTAAGCACAAGTTGTACTTACAGTTCCTTCCCTTTGGAGAGGGCATG
CTGCCACTTTCATCTGACTTCAGGTGAGTTTCCAGAGGATCATACCTAGAACAGTGTTTAAGAGTTTCGAAGAAGCCAGGTGTGGTGGCGCACG
CCTTTAATCCCAGCACTCGGGAGGCAGAGGCAGGTGGATTTCAGAGTTTGCGGCCAGCCTGATCTACAAAGTGAGTTCCAGGACAGCCAGGGCT
ATCAGAGAAACCCTGTCTCGGAAAAAAAAAGAGTTACGTTGTTGCTGATAGGTACATATGCCATGTACATAAAACTTTCTTTCACCCACTTTTC
GAGTCATGCTGATACCTGGCCATGGCCTTCATGTAGTGTGAGAAAGTGGAGAGAAAGAGTGGGCAGCAAGCCAGGATGTTAAACTGTTTTGGGG
TGTGGGGTGGTGTAGTAAAATAAACGGGAAGTTTGACAAGAGAATTAAAAGACAATTCCTGAATATTAGTTTTTTTCACTTCTGAAACATGGAT
ATATAAGCCCCAAGATCCGCCATTTAGATGTTTAAACAAATTTGGATAAGTACCGAGGTTGCATCATTATGAAACTAACCAGAAGTGGCTGTGC
GCTCCAGTTGTACCGGAACAAAATGATGCTGGCACAGCAAGCTTCATGTCCTTTAGAACTTTATTATAAAGTTGGAGATGTTTTTTAGATACAT
TGGTATATTTGCATTATAGACTTAATGAATGTATGTAATGCCAAACAATGCTAAAATACTGACTTTTTAAAAAAAATATTAGTAAGTTAGGAGT
GTTGGTGGGTAGTTCAAGGTAATCCTAAACTACCTAGTGAGTTTGAAATCAATTGGGCTACATAAGACCTTGTCTTTAAAATATCAAAATAATA
ATTAAAGAAATGATTTAAACATACAGACTATATTACACTATATTACAAAGATCTCTCAGTTTATATTTACAGAATTCCGAGTTATATCTAATTG
CCTTTCTTCTCTTTCCTAATCCTTCTTTACTCTCTTGAAGTGGTTTTAAGGCAAACCCCCAAATCTTGCCCCCCCCCCCCCCGCCCCAATGAAT
AACAAGTTAGGAGTTCAAATCTGGTAGGATATCTAGCAGGAAAACAATAGTTTTCTTCTGTTTTCTGTCTGATTTTTCCCTTCTAAAAATGTAT
ATACAGCTGAATTTTTTTTTTTTTTTTNNNNNNNNNNNNNNNNNNNNNNNNNNNNNNNNNNNNNNNNNNNNNNNNNNNNNNNNNNNNNNNNNNN
NNNNNTTAATATGTAGCCCAGGTTGACCCAGTTCTCACAGTCCTCCTGCTTAGCTTTGTTTGTTTGTTTGTTTGTTTTTTTAAGATTTATTTAT
TTATTTATTATATGTAAGTGCACTGTAGCTGTCCTCAGACACTCCAGAAGAGGGAGTCAGATCTTGTTACGGATGGTTGTGAGCCACCATGTGG
TTGCTGGGATTTGAACTTCTGACCTTTGGAAGAGCAGTCGGGTGCTCTTACCCACTGAGCCATCTCACCAGCCCCTCCTTAGGTTTTTGAGTGC
TTAGATTAGAAGTGTGTCCCACCTCACCGAATTTGAAAATGTTAATTATTTAGGGAACTATTTACAAATAAATTCAACACTAGCTCATAGCTGA
ACTTCTTATATACGTCCCTATCCATTTCTCTACCTTTTGCTCGTTTTGAGGAGGCTTTTTAAAAATTAATTAATTTATTTTATATATGTGGGTA
CACTGTAGCTGTAGATGGTTATGAGCCTTCATGTCGTTGTTGGGAATTGAATTTTAGGACCCCTGCTCCCTCTGGCCCAAAGGTTTATTTATTA
TTATACATAAGTACACTGTAGTTGACTTCAGTCAGGCGCACCAGAAGAGGGCATCAGATCTCATTACAGGTAGTTGTGAGCCACTATGTGGTTG
CTGGGATTTGAACTCAGGACTTTTGGAAGAGCAGTCAGTGCTCTTACCCAGAGTCATCTCACCAGCCCCCAAGGAGACTTTTCTTAAATACTTT
TTTGTTCCTTTAAATATAATCGTAAACGGTACTATTATCACACTTTAAAATGTTAGCAGTTGCTTCTTATATAGCCCCTCAGCACACTTGTTTG
CTTGGGTTTGGCTTTATGGAGTTGGTCTAATCTTACACCTTCCTTCTTCCTCCCTCCCTCCCTTTCACATTGAGACAGTTTTTCATTTTGCAGT
CCTGTCTAGCCTGAAACTCACTATATAGACCAGGCTGGCCTTAGACTCACAGAGATCCAACTATTTTTGCCTCCCGAGTTCTAGGATATAAAGC
ATTGACCTACTATTCCCAGCCACGATCATAACTTTAAATCTTTTAGAAATTCTTGTCTTTGGAAATAGCATCTGAAAGCTTGGTGGTAGTGACT
GGTGGATACATTTAGTCCCAGAACTTAGGAGGCAGAGGTAGGCAGATATCTGTGAATCCTCTAGGCTAGCATGGTCTACAGAAGGAGAGTTCTG
GGATATCTAGAGCTATACAGTGAGACCCTGACTCAAAAAACCAAAGGAAAAAAGAAAGAAAAAAGAAAATAGCATCTCAAACTAGGACAATAGT
GTTCTTTGTCAATGTGACTTCTCAGATGTCAGGCATTAACCTTGGAGTTGTACTGTTGAAGGGGACACTTCAGTAGTATATCACTTCAGTAGTA
TATCACTTCAGTAGTATATCACTTCAGTAGTATATCACTGAGAGGCTTATGGGATGAGGGCGTATCAGACTGATTATCTCACTATGTGATATAG
ATGATGTTTGTTTCTTTCTTTTTCAAGGCAGAGTTTCAGGTTAAAGACATGTACATCTCTACCCAGCTTCATAAATAAATAATATTTTTTTCAG
ACCAGAGTGAAAAGTGATTTAGTGAGGCCCTATTTGTATGTTGGAGAAATTGAAATTATTTTTCAAGACATGCACCATTAAATTTTAAATTCTA
GTTTATTTTTTGTATGTGTGCACACAGAGAAATCAGAGGACAACCTGAAGGAGTTCATTCTCCTGGGCAATCAAGTCAGGCTCTGGGTTTGACA
GCAGATACCTTCTGGCGAAGCCATCTTGATGGCTCGTATTTCTCCTTTTCATCAGTGGCAGGCTTGCAGCCCAAGTATCGTCAGTAACTGTGTG
AGATAATGGGGTCCTGAGGTCACTGCTGTGCCTGTCCTGGCTCCTTCACAGGGTCTTGACCAGAGGAGCGCTGTGCTGCTGATGCCTTTGTCAC
AAAGTTGGGGGCTTTATATCTCATACCATCACGTGAACTGTTCTAATCGTGCTGACATTTTATTTAAAGATATAGCATGTTACTTCCAGGAGAT
CACACCAACTTGTTTGTCACATCTTTAGTCCCATGTTCTTACATCATTTAAATTTCCTGAACAGCAGCTCTAATTTAAAGCTGACGGCAGATGT
GGGTCATGGGCAGTCGTGAGCCTCAGCAGGTGCTGTCTTAGTGGATTAGGCTGGAAAGTGCTACCTCAGCACAGCCAGAGCTTACCTGGGAGGC
TCTGGAGGAGGAGAGCTGCCCAGGCAGGCAGACCGGATGGTGGGGTTTCCAGAAGGGTCAAAGGACTAACGACACTAAAGAGAAAGGCAGAGGA
GACGAAACGTAAGTAAGACGTGTTTCTAATTGCTAAAGTTGTGTAAACAGTATTATGGCAGACTCTTCAGTTGTGTGCTGCACTTCACTCAGAC
TGTGAGAAGCTAATATTGGCACAGCAGGTAAAGGCACTCGCTGTGATGTTGCATGGCAGGAGAGAACCAGCTATTTCAGGTTATCCTCTGTCCT
TGGAATATGTGTTGTGGTACATACCCATACACAATTAAATAGGTAAAATGATAGAAGAAAATTACTTTAAAGATCGTTTTCTGCCCAGCAGTGG
TAGTAGTACACGAGGCCAGCCTGGTCTATAAAGCAAGTTTCAGGATAACCAGGGCTATACAAAGAAACCCTGTCTTGGAAAAAACCAAAAACAA
ACAAACAAAAAGTTGTTAAAAAAAAAAAATCCTGCTGTGTGGGAGGCAGAGGGTGACTCAGGCGCAGTTTTCTCCTCCCTCCTTTACATGGGTG
GGTTCTAGGGGGTGAACTAGGGTCCCCAGGCTTGCATAGCAAGGGACTTAACCCACAGAACCTGGAAATCATTCTTTTGATTGAATGCTTTCTT
CATATACAAGAAAAATATGTCACAGTCATCCAGGTAATATTGCTTAAAAGTAGAAAAATGTATTTACCAGAAACCTAGTGAGGAATAGAACTGA
TGGGCTATTGAGATAACTTTGGGTAAGGTTGGTGGCTGCCATGCCTGAGGAGTTTTTGAAGCAGCTCAGAAAGATCCCCTGTTTATACAACACT
GGTTCAGCATAGTTGTATTCGGTCTCATGATGTAAGAGCTTTAGTGTTTATGTCCTGCTCAACTGCTGCTTGTTGATTAGACTAAATCAGGTAC
CTCAGGACTTTGGTTGCTACTTTTTCTTACGTTAATGCTGGATTGGATGGAAGGTCTTTATAGCCAGAGTTCCTTTCAGTCAAGTAAGGAGTGC
TGAAAGGTGGTGATCTTGACTCTCTTAAACTAGTAAGAGGGTTTCTTCTTTGACCCTTTGTAAGGTAAAAACAAGTCAAACTCATGCGAGACAA
AAATGGCAGAGTATCTTTCTGTGTTTTTATTCATTTGGGATTTTATTCTGCCATATAGGAATGAATATTCCTAAATCTAGTAAGAGGGTTTCTT
CTTGGACCCTTTGTAAGGTAAAAACAAGTCAAACTCATGCGAGACAAAAATGGCAGAGTATCTTTCTGTGTTTTTATTCATTTGGGATTTTATT
CTGCCATATAGGAATGAATATTCCTAAATTTTAGATCTTAGGTTTTGTGTTCTAAAGAGAATGGCTCAGTCTTCTCCTGCAAAAGTCATGCCAG
GTACCAGGGAGGCCCAAGGTGTCTCCCTTGGTGAATCAGGATCCACTCAAGAACCAGAGATGGTGGATATAACCTGTAATACTAGCCCTGGGGA
AGGGGAGGGAGTAAGGTCAGAGTAGGTGCCAAGGGAAGTTTTAGTATATACTGTACTGCTTAGCAAGACACTGTCTTAAGAAAGGCAGGAACGT
GACTGGAGAGATGGCTCAGCACTTTTCCAGAGGCTCTGAGTTCAATTCCCAGCAACCACACAGTGGCTCACAACCATCTATACTGGTGGGATCT
GATGCTCTCTTCTGGCATGCAGCTATACATACAGACAGACACTCAACATACATACCATAAATAAATAAATAAATAAATAAATAAATAAATAAAT
AAATATTTAAAAAAAAAGACAAGCAGGATAAGGAGCATCAACAGAAAATGAGAGTATCATTGTGGTCAGCAATCTTTTAGAAGCCGTCTTGATG
TATACCCTGCTTTTCAAGTGAGCAGCAGCAGCAGCTGGTCTAGGAACATGGAAGCCCTCTTTCAGTGCACAGCTTTACCTTGTAGGCCTTGGTT
GCCCGTGCCCCCCCCCCCCATGTTAAGTACTTAGTAAGTCGACCCTTCTTTTTGTTCTGCCAGCAGCAAAGACACTTAGTTGGAAGGGATTCTG
TCACCATGAGCATATAGTGTGGAACTGTAGAATAGAGAAGTAAGGAACGTGAACAGTTCTGGGGTCATCCAGCTGATTTATTGTAGATGTGTCT
TACTCTAACAGTGATCTCAGGACACAGCAGGCAGAGCTCGGTGTGAAGCCAGCCCAGTCTACAAAGCAAGTTCCAGAACAGCTAGGGCCACACA
GTATAACCCTCTCTTGGGTGGTGGTGGGGGGCAAGGAAAAGAAATTAATATTGGTTAGTTAAGCATTTGGTATTTTTTAACTTTGACTTTTGAC
AAAAAGTTGATCTTGATACACAATCCTAAGAGATCTGGAGCCCACTATATTGCCCGAGAGGTCTTAGACTCAAAAGGAATCTTTCTGCCTCTGC
ATATCCCAAATTCTGACATTATGGGTATGCTATCATACCTAACTTTATTATTATTATTATAAAATTTGTGTGTGCGTGTGTGTTTTATGTTTCT
GTAGGTATGCTCATGTATGTATGTATATGTTTATGTATGTATWTACATGTTTATGCAGCTATATTCATCTATGTATGTATGGAGGCTGATCATT
ATTTTATTAGTTGACCTCACTTGTCAACACAGGGTCTTACTGAACCAGAGCAGTGGTTCTCAACCCGTGGGTCATGACCCTTTTTGGGAGTTGA
ATGACTTTCACAGGGGTGGCCTAAGACCACTGGAAAACAGACATTTATATTATGGATCGCACAGAGGCAAAGTTACAATCATGAGTAGCAACAT
AAATAATTTTATAGTTGGGAGTCACCACCACATGAGGAACTATATTAAAGGGTAGCAGCATTAGGAAGGTTAAAAACCACTAGAGGTTTTCATT
TCAACTAGATTAATTTGTCATTGAACCCAAGAATCCATGTGTATCTGCCCACACCATTTTGAACCTCTTTAATTATTACACAAAATTTTTGAAG
ATTGTGTGGGGAGTGCTGGAAGATGATTCAGTACTTAAATGCACTTGGTGCCCTTCCACAGGACCCTAGTTTCATTCTCAATGCCTACATGACA
GCTAACAAACCATATGACTCAGATTCCAGGGAATCTGTATGTGTGTGTGTCAAAAACACTCATATTCTGTGTAATTTGCATGGGGAACTAAGAT
TCTTGCATAAATTATATTGGTATTAAGTTGTTTCACCTTCAATATTATGGTGTTATAATCACATTTATAATTGATTTAATAACCAACATCAGGT
CAGAATTGTAGCCTGTGTGCCCCAGGTACAGTGGTAGATGAGGCCTGCTGTTCTAACACTTAAAGAGTCTGAGGCAGGAGATTTGCTATTAGTT
CGAGGCCAGCATAGGCCACAGAAATAAGTTCAGGCAGGCACGCAGGCATTTCTATGTACAGCTTCCTCTGGGAAGTGAAGTCTTTTTGTGCTGT
TGTTTATTTTGGATTGGGCTTTTGAGACAGGATCTCTGCGGTCTTGGCTGGACTGGACTGGTGCATAGGTCTGGCTGGCCTTGAGTTCGGATCC
TCCCTTTCCTGCTTCCCAGCTGCTGGCTCGGGTTAAAGGCAGGCTCTACACTCTGAGGTATTTTATTTAAGGCATGCTCTACACTCTGAGGTAT
TTTATTTTCTGAGGCAGTGTCTCATGGAGCACAGACTGGCCTTAGACTACTGTGTAGCTGAAGATGACATTGAACTTTTTGCTTCCACATCCTG
AGTGGAATTATAGGTTAGCAACACCTCATGTGGGAATTCATACATTGTAGGTAATCAGTCTACTAGCTGAACTATATCTCCAACCCAGGAGGTC
AGGTTTGTTTGTTTGTTTAACAATCTAGTTTTGAAACAGTCATATCCTAGGCTGGCCTCAAGTTATGTAGTCAAAGATGGCCTTAAAAGATGAC
TCTTGGTTATTTTCCAAGTGCTGGGATTATAGATATGCACACCACCACACCTCATTTGTCTCGGGGCTGGACTCAAATCCAGAGCTTCATGCAT
GTGAGGCAAGCACTGTACCAACTCGACTTTTGCATACTCCATTGAAAGTCATTTTTATAACAGGATCATCTCAGTTGTCTCTGACAATGGGGAT
GTTTTATATCACTGTGTATGGCTTTGCAGCTTTCACAGCCTTATTCAACCCCATATCTAGAAGGTATTTCTGAGCTTCCTGGGACTCCTCAGCA
TAGAGTCTGGGGAGAAATAGAAGACTTTTGAATGTCCCTTTGTCTTTCGGCTCATGATAACTGCCATAGCTTCAAAGTACTGGTTTTCCAGATT
ACCTCAGTCCTGTTTCTTAAAGAAATTACTCCTCCTTTCTCTGTGTGGTACCTATTCTGCATGTCTCTGTTTGTTGTTGTTCTTCTTCTTCTTG
ATTTCTTTCTTTTATTATTTTTTAAAGATTTATTTATTTATTATTACATGTAAGTACTGTAGCTACCTTCAGACACCCCAGAAGAGGGCATCGG
ATCTCATTACGGATGGCTGTGAGCCACCATGTGGTTGCTGGGATTTGAACTCAGGACCTCTGGAAGAGCAGTCGGCGTTCTTAACCACTGAGCA
ATCTCTCCAGACCCTGTTCTTGATTTCTGAGAGACTCAGAATCTTTCCATGAGAAGGACCTGTGCTGTTTTAATATTGATTGATTGATTGATTG
ATTGATTGATTGGAGATTGGGTCTCTGTGGTACAGATTGGCATTGAAATTAAGATCTTCCTTCTTGGCCACCTAAGTAGTGGAATGCACCACCT
CTATTGGCATTAATTTTCTTTTTCAGTCCACCACAATATTTTCAGCAGTATATTAGTACAGTTAATAAAAGTGAAGATTGTGTTTTTAATCCAG
TTCTACATAGAGTTTCAAAAGTTCTGATGAGTGCTGCAGAAAAGGTCTCTGCATTGTGTGATTGTAGCTGTGACGTTTTCAGTTAATCATACCG
TATCTTATGCATTTCTTGCCATGTTTCTGTTGCAGAGCTTGGATTCTGAAGTGTGGAAAGCACTGAGACGTGAAGATGAGTGAACTTGACCAGC
TGCGGCAGGAGGCCGACCAACTGAAGAACCAAATTAGAGTATGTAGTCATGCGGGTTTGATATGTTTCATATCAGAAACATATCTATTGTGTGT
GGATAACAGAGTGAGATGAAATTGATCTATTATATGCTAGTTATATATCTGAATAACTTATGTTGTTTCAGAAATTTTGTTTTCTTATTAGCTA
CAAGTTGTTGCTTGAATGTACATGGCCCATGTCTGTAATACTTACCAAAGCTTTTGAACGTCTTCCTCCCGGGGAACTAGGTTTTGGACCCTCT
GTGTGGCCACTGTGGCCGCTGTGTCAGTTCTGAAGCAGCTCTGAAGAGCACGGCTACTAAACTGAGAGCAGAAATAGATACTTTAAATGAAGGG
ATCCGTAAAGTGGCATTTTAGATGTCTCTGTCTTATTTTTCATAGTTTCGCAATGGTTTGTGCTCCAGGAAGACCATTGGAATGTATGTAACAG
CTCTTAGGCCACCATAGAGAGCAGACTTGTCTACCTGGGTACAAAACTAAATGGAAGATAATTCCATGTATTCTGAGTTGTTCTTTCTGTGCTG
GGGACTAGTGTTAGAAATGGAGCTAAGAGCCCACACATCCCAGGCAAATGTGAGTTTTTTGGTTTTGGGGTTTGTATTTTAGTTTTGTTACTTG
AGACAGGTTCTTACTATGTAACTTTGTCCTGAAACTCAGTGTAGACCAGACTGGCCTTGAATGCAACATTATACAGAGATAAGTATGTGGGGTT
TTTTGTTTGTTTGTTTGTTTTTTGTTTTTCTTAGACTTGATCTAAGAGCATGGAAAAAATGACTTAAGACTTAACAAGAAAATCCCAGTTTTTC
GTTTGTGTAAGGATTTGTATATTTGAAATAGCTTCCTCTGATTTTCATGTTCTTGTCTGTAAGGATATGGCTGTCTGTCCTTGAGCGTCTCACT
AAGCCTTTAGAATGGTTCACATGTCTTTAACTTGTCAGTTGTGTTCTCAGGCTGCCAGGAGGACTAGGTGGAGAATTGCCAGCATCATTTTAGC
CAACTTTTACTTGAATTTAAGAAAACATACCAGAACTGCATAAGTTTTAGAGCAGAGATAAAACAAAATATCCTCTGCTGTAAGCACCTCACTG
GACATTGGTGTCTACGCTGTTCCTCCGTGTGTCAGTTTCTGTAAAGTTAATAATTTCATGTGTCAGGCAAGTTTATAGCACTGAACTATACCTA
GCCCTTGCCTAAAATCTTTTTAGGGTTAGGATTTTTGGAAGTGGGGCATCAAGTTGGGTTTTACTATGGTACTAAGATGATGTCAAAATTTGAG
TTCAAATGATCCCATGTGTCAGTCTCCCTTGTAGCTGGGATTGTGTAGCATGCCTGACTTTCCCTAAACTTTTGCATGACTTAAAAACTTAAAG
CCAACTTAAAGCCAGGGGCTGAGCATTTTAATCACTGCATTTAGGAGGAAGAAGCAGAGCGATAAGAGTTCAAAGTCATGATCAGCTACATAGT
GAGCTCAAGGCTCACCACCAGACCATCTCTCAAAAGGTAACAACAGACTGGAGAGGTGTCTCAACAATTAACAGCCCTTACTACACTTTCGAAG
GACTCCATTAGGTTCCCAGTGCCCAGATCAAGAGGCTCACAATCTTATGTAACTCTTAACTCCAAGGAATTTGACACCTTCTTCTGGCCTCTGC
AGATACTTTCATATCCCACACATAAACACACACAAAATAAAAGTTTAAAGTCAGGTACAATAGGGCATGTCTGTAATGCTATCAAGTCTGAATA
CTGAAGGAGTATTGAAGGTTTGAGGCCTGCGCATGGGCCATATGCTTTTGAGATTTTTATTTCTTTGTCCCAAAGTTCTGAAAATTAAGAGTAT
AGAAATGACAGAGGAGTTTTCAGACAAGGTCTCACTATGTAGCTGTGGCAGTCCGAGAACTCACTATATAGACCAGTGCTGGAGACTAAAGGTG
ACTAAAGCCACCACGCCTGGCTTTTGTGGTTTGAACTTCCTGGTTTTTCAAGACAGTTTCCCTGTGTGACCCTGTGACTGTCCTGGAACTCACT
TTGTAGACCAGGCTGCCTTCAAACCCATAGAAATACCCTTCCTCTGTCTCCCAATGATGAAATCACACTGCTTGGTGTGATTTCAGTTTTTAAA
ACGGGAGCAGGGTGGAGATGGCTATGCTGTTTTAAATTAAGCCAACATGGAGATCAACTGCACAGCATGGAGGGAAGATTTAGGGAAAGGATAA
GAAAGCCCAAGTGTTGAAGAAAGCATACTTAGAACAGATAGAAAGGAGAAAAAGAAATACTCAGAAAAACTAGCGGATTTACTAAGCCATATGG
TTGTAGCTGTGTAGCTGCTGAGACTCAAATCATTTAGCAGTAGATAAAGAGATTTTTAAAAAAGATTTGTTTGTTTGTTTGTTTATTATATGTG
TGAACACTGTAGCTGTCTTAAGACTCTCAAGAAGAGGGCATCAGATTTTTGTTACAGATGGTTGTGAGTCACCATGTGGTTGCTGGGATTTGAA
CTCAGGACCTTTGGAAGAGCAGTTGGTGCTCTTAACTGCTGAGCCATCTCTCCAGCCCAGATAAAGAGAGATAGTAAATCAAAGATAAATGTCA
TGCAATATTTTGATAAGCAGGTTTACATACTCTCTAGTCCCTAGTACCCACCCGCCTTTCTGCATCCAAATAGTGCCCCTGTAATTATAGCATT
CAAGAGGTAAAAACAGGAGGGTCAGAGTTCAAGGCCAGCTTCAGTGACATATCAAGTTTGAGGCCAACTGGGCAACATAAAGTGTTATGTTTAA
CATATGATGTTATGTTAATATATATTAGTAATATGAAATCTTAAGTTTCATCTAGTCCCATGTAAAGTATTATTTCAGTCAATAGATTCTTACT
GAGATAGTTTACAGTACTTACATTTCAGTTTTGTTTTGGTTTTAAAGTTCAGCTCATGCCTCCCTATAAGGGCATTCTACAGTTCTCTCTCACT
GTGTCTGACATGCACAGATAGTTGGTGACCCCCCCAAGACCTCTGTTGTGGACAGCACCAATTTGACTGTTCCTTATAGGGCCACTTTGTTTCA
ACCTTCATGATGAGCATCATCTTCACAAATGGCTCCATGGGTTTGGCCTTGCCTCTCAGCACTGCACTAATTTTAGAGTCGATTGGTGAGGAGA
TGTGAAGGCCATTGAGTCTCTAAATGGGAAGGGAAGACTTTTGTTTGTTTTTGAGACATGGTCTCACTATGTAGCCTTGGCTGCCCTGCAACTT
GATATGTAGACTACTGGCCTCAAACTGCTTGCCTCTGCCTCCCCAGTTTACTTTGGAGACTAAAGCTGTGTGCTACCTTACCTGGCAAGGAATA
CTCTTTAAAAAAGTAAAATTCTGGAGTTAGATACTTAAGTGGTTAAGTTTAATCCCAGCACTGCTTATAACTGTAGCTCCAGAGAATCCAAGAC
TGCCTGTCTTTTGGTTTCAATAGGTACCTGCATACACATAAATTTAAAAACAAAAACAAAAAACTTTTTTTTCTGATATAAGGGAGGAAAAATG
TAAAATGTTCTTTACTAATTGCCTACTAAATACATGCTTGCTAAAGAACTTAGTACAAGGGCTGGAAGGATGGCATAACTCAGTAGTAGTCTAG
TGCTTTCCTAGCAGTGTGGTCCCCAAAGTTACAGGGAAAATACGAGGATTATCTTCACTTTGAAGGCCAGCCTAAACTACCAATCAAGAACCTG
TCTTAAAATCAGAAGCAGGAATCCGGGCCTGGTGGTGTACGCCTTTAATCCAAGCACTCGGGAGGCAGAGGCAGGAGGATTTTTGAGTTCGAGG
CCAGCCTGGTCTACAAAGTGAGTTCCAGGATTGGGTGAGACGGCGAGCACTTTTAATCTTAGCAGTCAGGAGGCAGAGTTAAGTGGATCTCTGT
GAATTCTAGGCCGGCCTGGTCTACTTAACAAGTTCCAAGATAGAATTATATAAAGACCCTATCTCAAAACAAACACAAAATCAGAAATAGCAGA
TGAGTTAATCAATGAAGTAAAGGTTCTTGCCACCCAACAGTGTAAGCCTGAAAACCTGAGTTCCATTTCTAGAGTCCACGTTAAGGTGGAAGGA
GAGAGTACTGTCTCTACAAAGTTCCCCCATGACCTCCATACTCTGTAGCAAGCACACTGATACACATCAGTCACACTCTTGGGTTTGTTTGTTT
GTTTGGATTTTTACCAACAAAGCGTTTGTGGGTGTTTTGTTCTCCCCTGTCCCCCCACTAACACCAACACAGGGTTTCTCTGTGTATGCCTGGC
TATCTTGGAACTTGCTCTGTAGACCAGACTGACTTCAAACTCAGAGATCCACCTGCCTCTGCCACTTGAGTACGTACTGGAATAAAAGCTGTGT
GCCACCACCACCTATACAGTCAATATACTTTCAATTATTAAAAATCAACAAAAGGCTTCTAGCTGGTGTGTTTATACACATACACAGCTTCTCA
AACTCGGGGGCCGAGGCAGAGGATCAGGAGTTCAAGGTCATCCTTAGCCGCATAGTAACTTTAAGACCAGTTTGCTTACACAGTGAATCACACA
AGAAATGGCAGTTAACTGTAAGAAGTGTTGTCTGGCCCTTTGATTTGTTTTTTATGTGAACTTCCCCTGGGGGAAAAAAGGAAAAACAAAAAAA
GAAGCTTGTCATTCTTTTGTTGATCCCAAGGAAACAGGCTCTCAAGTAGATGTTTAATTAAAGCACACACGCCTTAAATACAGAGGAACTGAAC
TTACTACTCTGATAGACCATTGCACACATGGACCAGAATGTAGCGACCCAGAGCTGAGGGTGGGCCCAGACTTTCCAATTTCACTGTGAGACAA
CAGTGCTGCATGATACGGGCCAGCCTCTTCTGTACTCAAACCAAACAGGACAGAATGATTGATTAAATGGATCAGTCTACATGAATCCATCAAG
AAATCATTGTAAAGCCGGGGGTGGGGGTGGAGTTTTTTTTTTTTTTAAAGATTTATTTATTATTTATTATATGTAAGTACACTGTAGCTGTCTT
CAGACACACCAGAAGAGGGCATCAGATCTCATTATGGATGGTTGTGAGCCACCATGTGGTTGCTGGGATTTGAACTCTGGACCTTTGGAAGAGC
AGTCAGTGCTCTTAACCACTGAGCCATCTCTCCAGCCCGGGGGTGCAGGTTTTAATCCCAGCATTCTGGAGGCAGAGGCAAACAGATCTCTGAG
TTTGGGGCCAGCCTGGGCTACACAGAGAAACCCTGTCTTGAACAAGCAAGAAAGGGAGGGAGGGAGGGAAAGGAAAGGAAGAAAGGAAGGAAAA
AAAAAGAAAAGAAAGAAAGAAAAATTATTGTAGCTGGGCACGGTGGCACAGTTCTTTAATCCTGTCACTTGGGGAGGCAGAGACAGGTCAATAT
GTATAAGGTTCAGGCCATCCTAATCAACATTAAGTTTTAGGCCAGCCAGGTATAAGGGACCCTCTCAATCATAAATCAATCAGTCATTCTCAGG
CCAGCAGGGTGAGTCATCAACTAAAAGTATGTCAATATTTATTTTACTTATAAGTGAAAACACTTTAATTAATATGGTAAAAATTAAAGAAAAA
TTACTATAGTATATTGTTTTGTAGGTCTTAGCTACATTGGTATGTTTTATAAATAGAAAAGATTGCTGTTTTGTTACCAGTCTTATTGAAATTT
TATTAACAATTTTAGATTCCTTGGTCTATTCATAGAACTTAGATTTAATCATTGTTTGGCTTAAAAATAAAGTCCTTGCATAATGCATTCTCAA
AGAGAAGCTGTTGGCCTGAATAGCTAGTTGGTTTTCACCCTGTTCTTTCATGCAACCCCTTGTGCTCCCATATAACCTGGGAAAGACAGAGCAG
GTGTCTGTTGGCTGTCGGGAGTCAGCCTTGGCTTCCAGGCTGCTCACTGCTGTACCAGCTCCCAGTGTAGTTTCTCCCGGGCCTGCCCAGAGTT
CTATGGGGTCTGCATGTCTTAGTTAGGTTTAGGTGTTGTGAGTTGTGTCTGTTTTGGCCTGAACAACTCAAAAGTGGCAGTGGACTTGGGACTA
TTAGAGAAGAATTAAGGAACAAGACAGTTTGTAGAGGCTTCTTGAAACTTTGGTAAGGAATGTCGTAAAGTTAAAAGTATGGAATAAAACTAAT
TTCCATTTGTTATTTCATAGGATGCTCGTAAAGCGTGTGCCGATGCGACTCTTTCTCAGGTAAGGAATAATTCCACCTTTCAGCTGTCCGTAAT
GCGCAGTCTGCCGCGGGCTTGTATCATGTGGGGTGAGCCCTTTTGTGAGGTGAGGTTGTAGGGCCACTGTCAGGGCTTTTCATTTGGAGGTTGC
TTTGCTGATGGGCAGAGAGGACAGGAACCACTGGTTCCTAAAATGGGAGTGATAGCTCTACCGTTTGACCCAACAATTTAATCAAACTGATTTT
AAAACATGTACCAGGCTGATGAGATGACTGCTACCAGGCTTGACAACCCGAGTTCCATCCCAGAGCTCACAGGGTAGAAGGAGATTCAGAGGTG
GTTCTCTGACCTCTGTGAGCATGTGCCGCTGTCCTGCCCAAGTAAATACAGTTAAACCGTGGGCATCCAGCTCCTGCTGTAGTGTATCTACTGC
TGTGAGAAACACTTCAAACTCTAAGGGAGGAAAGCATTTATATCGGTTTATACTTCTAGGTAATAATATATCATTGGAAAATCAGGGCAGGAAC
CATAGAGGAAAATTGCTTACTGGTTGCTTTCTCAAACAGCCAAAGATAATCTAATCTGTTTAGAAGTTGTCTTGTTCAGTGTAGGCTGGACCCT
CCTACATCTATTACCAATCCAGACAGTGCTCCATACATAGGCCCACAGAGGAATCTGATCTAGGCAGTGTTTAATTGAAGTTCTCTCTTCTCAG
GTAACTGTGTGTCTAGTTAACAATAAAAACTAGCAACACACACACACCTATACTCACACCTACTCTTGGGTAATCAATGGCCTGATCCTCAGAC
CTAATAGACATAGATTTATTTTCCCTGTGTATCCATGGCAGTGGTAAAGTGAGTATGTTAGGTAAAGGTGGAGATAACTAATAATTTAATAAAG
CAGTAATAAAATGGTAGCTATTCTATGAAATGGTAGTTACATGTGATATCAGATGATCTTAAAATATCTTACTGCATGTACTGGTGCGACAGGG
GATGACAGTGCCTATATCCTTGATAAGAAGAAGCGAGGTACTGAGCCATGTAAAAAGCATAGTGGTTGTGGTGTATTGCTGATAAACATGCTGT
ATACTTAAAGCATGGACTCACTGGACAAGGGAGTTAGGACCCAGGCACTACAGAGTGGATAGTTAATAGTGCTACTTAAGGGAGCAATGTGCAG
CCGGGCAGTGGTGGCGCACTCCTTTAATCCCAGCACTTGGGAGGCAGAGGCAGGCGGATTTCTGAGTTCGAGGCCAGCCTGGTCTATAGAGTGA
GTTCCAGGACAGCCAGGGCTATACAGAGAAACCCTGTCTTGTGGGGGAAAAAGGGGGGGGGGGAAGCAATGTGCAATTTAAAGTTTATGAATTG
GCTGCTGGACAGATGGCTCAGCAGTTTAGAGCACTTGCTGCTCTTCTAGAGGACTGGGATTCTGTTTCCAGCACTCTGTAGTGGTTCACAACTG
TCTATAAATCTTCTGCTCTCCTAGGGCTTCTGCATGCTAAAAATATTCTCTCACATAAATATAGGATTTTCCATTTAATATATTTTTGGTTCTT
GGTTGATATTATATTACACAGCCCACAGAACGCAAACCAAGAGTCTATTTGCTAAAATTAATCTTCACTAATTTTATTTTTTAAGATCACAAAC
AATATTGATCCAGTGGGAAGAATCCAAATGCGGACCAGGAGAACACTGAGGGGGCATCTGGCAAAGATTTATGCCATGCACTGGGGCACAGACT
CAAGGTATGAATGGGGCCTTCCTAAAGCAGTACTTGAAATGTTGCCTATCTGCTGGATTTCTAAAAGGTAATGGTTAGAAAGTTGAATTGGTGT
GGGTGTGATAGCACACTTTGAATCTCTGTACTCAGGAGACAGAAGCAGACAAATCTTTGTGAGTTTAAAGGCCAGCCTGATTTACATATTGAGT
TCCAGGCTAGCCAAGGCTACAATGAAATCCATCTCAAAACCAGTAGGATGGGGTGGGGTAGGAAGTTTGTGGTACCAGTTATCTGTATCCAGGT
CTCATGTTCACAGGTCATACTCAGATTTCCGTTTAGCTCGCTGACTGCACTGCTGTCCCTTGCATAGCAGCACCTGCTTTTCTTCACCCTATAC
CTTTTAGCTGTTGGGTCTCTGTTGTCTTGGCTACTCTGTGGGCTGTGTTTTAAGAGTTGGGCAATGGAAGGTAAAAGGTACTGAGTTTACAACA
GCAGACTGTGGTCCCAAAAACTAAATGTAGACTTCAGTGGTCTCTTCACCCTCACTGGGAAGCCTTATGGAAAATGAACGAATGGCTATCCTTA
TCATCCTTCCACATGGCCCTGCCTGCCATCTACTGGTGTATCATTTAAAGAGATACTACCATTTGGGGGTTCCTTTCTTTTATACTTTGATAAC
TACCCTTTATTGGACTGAGTCTCTCCTGACTTTTCCACTCATAACGAAATAAAGTGCGACATGGTTTGTGTTCTCCTTCCAGACCTAAAGGAAT
CTCAGCATCCTTTTCTTCTGAGTCAGTTTTCATTTCTGCTTAGCTTTCTCTTTGTGAAATTATCTGCTGTAGGGTGTAAATAGCTAGAACAAAA
GATTCTATCTTTAGTTCTCTGCAGGGTCCCATACAATTGCTTGTGCAAATGAGCGCTATCTGAGGCTGTTTAATAATGGAAACAGTCCCATCAA
AAAAGAAAAAGGGGGCGGGGCATTGTGTTCTTGCTGCAGCTGCAGCTTCAGTTAGATAGATCATGGATGTATTCTATTGTTGCTGTCAGAATTG
TTAAGTGCAGATTTGTAGATTTATTGATTGATTGTTTTTTCAGTGCCGGACATTGAACCTAGGGTCTCATGACTGCAAGCAATTGGTGTACCAC
TAAGGTGCACCTCTAGTCCAAGAATAGTTACCATATGGTCCTAAAAATGTGAGATAATGACTGTGTTAATTCACTTAGTTTATATTCTGTAATA
TAAACATTAAACAACTTACAGTCCATAGTTACTGTCAATTAAAAATAAAGATCATAAAAAAAAAACCTAAGCAAAGTTAGAAAATGGACAAACA
ATGGTGGCACTTTTTTTTTTTTTTTTTTTTTTTTTTTTTTTAAACTACAGCCCTTGGAATTAAAGCAATATAGCAAGTTCTAGGACAGCTTGGG
CTACACGAAACCCTGTGTTAAAAAGCAAATAAACCAGGGGCTGGTGAGATGGCTCAGTGGGTAAGAGCACCCGACTGCTCTTCCAAAGGTCCGG
AGTTCAAATCCCAGCAATCACATGGTGGCTCACAACCATCCGTAACGAGATCTGACGCCCTCTTCTGGGGTGTCTGAAGACAGCTACAGTGTAC
TTACATATAATAAATAAATAAATCTTTAAAAAAAGAAAAACAAATAAACCTTGCAAAGCATTATTTAGGGATTGCTTTAAATGAGCATACTTTC
TGGCTAGTCAGTGGTTGCATTTTAAAATCTAAAATAGCTGTTTAAGGAGTTGTTGTGGGTATGCATACCCCTCTACCCCCTTACATCATTTTCA
TATTTTTTGCTCTAATAGTAAAGGGTTGTTATTGAGCTTGGTGTGGTTGCAAATGTCTTTAATCACAGTACTTGGGAGACAGAGGCAGGTAGAT
CTCCATGAGATCAAGGGCAACCTGGTCTACATAGTGCGTTTTAGACCAACCACGTAGCACAAACTTGAAGACCTAGGTTTCGATCTCTAGGACA
CATGTAAAACTGATCATGGCCACATACTTAGAACCCCACTGCTTCAGTCTGGTCGAGGTGAAAGAATTATTGGGATCACTGGCCCTAGCGGAAA
AATGATGAGCTTCCGGTTCAGTGTGAGACTGCTTGAGAGGAATAAGGCAGAGAGTCTAGAACAGGGAAACAGTCTGCTTCCTTTGACTTCTGAA
TAGGAACACACACACACACACACACACACACACACTAAAATTCAGCTTTGTGGGGGTGTGTGGAGGAGTGGCGGGGGTAGGCATGTGGAGGTCA
GGGCATTATGACCAAGGAATCAGTTCTACTTCTAAGTGGGTTCCTGGGACCAATTGGTTGGTTGGTTGGTTTTTTTGGGGGGGGGGGGGGTCTT
TCAGGAAATGTTTCCCTGTGCATCCTTGGCTATTCAGGAATTGTGTAGATAGGGCTGGCCTCAAACTCAGAGATCCTCCTGCCTCTACCTCCTG
AATGCTGCTGGAATTAAATGGTTGCAAGAGCCCGGGATTAGATTTAATGGAAGGGCTTGTTTGATAGGCACCTTTACCTGAGCCTTCTCTTTAG
CCCTAAAATTTAACTTGTAATACTATTCCAGTAGTGCTTTTCCAGGTCTGTGGGGTTTTTAATCCCCTCTCTACAGAGCCTGATGAAGTAGTCT
CTTTGGCTGGTCTTCCTCTGAGTAAACTGAAGACTATGTGGGGTTGGTCTATGAGTGCCTCCTTTTGTTCTAGGCAGCTAATTTGGCTAGTTCT
CAGTTTCTATCTCTGTTTGAGGACAGAATATGAAAAGCTTTAGACAATGAACCGTGTTGATTCCTCCAAGTTACATGACCTGAGATTAGAAAGG
CGTGTCTTCTTTCACCTTCTGGAGGATCAGCTAACAGCTTAGCATTGTCTTAATTCCTCACTGAGTTAGCAATTATTGAGCTCTCTGAAGGTGA
CTTCTTAAATCAGAGGATGAGCTACTAAAGATGTCTCTTGATACCCTTGCTCAGAGTCAAAAAGACCAAGCAGAAATAGAGCAGCAGAGGGGCC
TCATACTGTCTGTCCTATAGAAATGGTTGAAAGGACCTTGGGTATAATGACTGAACTGCAATAGATGGGGAGCTGGAAAGACTTTGAGTGACTG
TTAGCCTTGGCTACACAGTACCCTATCTCCAAGGAAAGTAAAAGAATCGTCTGAGGAGTTGGAAATACTAGGTTGTAGTTGAGTTCCCTGTATT
CTCAAGGCTCCAGAGTTTAGTCCCTAGAACCTCATAAAGAAAAAATTTTACCAGAGGACTGAGGTGCAATTAATTGGTGAAGTACAATTTACTG
TGAATTCAATCTCTAGAACTGAAAAAGAAATAAAAGTTGTAGCTGAAAAGAAACTGGATGTCTGTGCCTAGTTCTGTGATAAATTTTGTGACTA
AGGATGCAAAAGGATTTTATTTCTTGTCACATATATATGTTGTTCTTTATAAAGGAAATTTACATATCAGAACATAGCTTGGCAGGGTATGATG
TAGTACAGCTTTAATGCAAGCACTTTGGAGGCAGAGACAAGTAGACCTCTGTGAGTTTGAGCTCATCCCGGTCTACATAATAAGTTCCAGGACA
GTCAAAGCTACATAATAGAGGAACCCTGTCTCAAAAAGGCAAGTGAGTCAGTCATACAAGCATGGTCTGATTAAAAGTGTCAGAGGGCTCAAAA
TGGCGTGGTTGAGTTTTACCTCAAGTCTTTGATGAGCTTCAGAAGTTCAAATATGCCCAAATATACTTGTGGCTGAAATACCTAGAATGTATAT
ATTTTGATTACAATTTGAAGTTAAAACCTGTATGTCACTATCACATGGTAGACCTGGGAGAGCCTCTCACCCTTCCTTAAGAGCACATTGTGTC
TATCCTGCCTCAGTCTACAATGCAGAGAACTGCAGGTTCCAAACTAGGACAGAGTCATGAGCAATTCATAATTCACTATAATTGGTGGCCTCTT
TTGCCCAACCATGTGCAATTCTGATGTCATTTATCATCTCACTACCACACAGTTTTATAGAGACAGGTATTCTAATTTATCTCTGTCTGGGAAG
TTTGAGAGTTCGTTTTTCTTTTAATTTTGAGGGATAGAGTCTGGGCCTTAAACTTGTTACATAGTGACCTTGAACTAACACTCACACACACACT
CTCTCCCCCTCTCCCTCTCCCTCCCCTTCCCCCTCCCTTCCTCCCTCTCTCTGTCTGATTTATGGTTTCTCCACATCCCACATTTATGAGTTAC
AACGTATGCTACCATTGGAGCTCATGGTTGTGTTCTAGTTTGATTTCTACTGGTGTGATTAAACACTGAGCAAGAGCAACTTGAAGAAGATTTT
GTTTGAGTTTATAGTTGTAGTCTATCATGAAAGGAAATCAGCAAAGACCGCAGAGGAATACCGCTTACTAGCTTTCTCTTTAGGGCTTACTTAG
CCTGCCATCCAGGACTACATGCCCAAAGACGACACTGCCCACAGTAAACTGGCCATGCTCACATCAATTATTAATCAAGGACATACCCATAGGT
TTACCTATCTGCCAATAAGATGGAGATATTTTCTCAGCTGAGGCTCCTTCTTCCTTAGAGGACTCTAGCTTCTGTCCTATCCCACCCCACCCCC
AATATAAATAAAAACAGGGCAGGTGTTTAAAATGGATTAAAATGGTTCCTGAGTGGGTAGTGTTTCAAGCTTTTCCCATAATATTCAAGCTTTC
TTGCTGTCAGTATGAACAAAACTGTGTCCTAAATATTTGACATGTCTCATGTCTCTGTGTATCTAATTTAACTTGGAATAAAAAAGAAACCCGT
CAGAAGCAGGTCAGATCAGTACCATCTCTCGGGTGATAAGAGAAGAGCTGGGGAGTCTGGTCATCCAGGTGTCCCCAGGGCTGAGTTGTTATCT
GACACTCATGGTATTCCATTGCTCAAGCATTGAGATCCTCTTTCTTATTATTAAGTGTATTATATTTTAAGCGAATGTAGCTTTAAAGCTCTAG
TTGGTCACCAAGATTTTTTGTTTCTGTTTTTTCTTTTCCTTTATCTTTTCTCCAGGCTCCTTGTCAGCGCCTCTCAGGATGGAAAACTCATCAT
CTGGGACAGTTATACCACAAACAAGGTGGGCAGTGCAAGACCCTCCCTGGAACAGTGACAGTCTGTTCATGGAGCAATGATGACCTCGGAGGGT
GATAGAAGAGCTTGTGTTCCTGACCCATTGAGCTTGGCACACAGTTGTGCTGTGGTTCCTGTCTTGGCATGTAGATAGGAGCTGAGTGCTTCCT
TGTCCTTGCACAAGAGCTACACTCCACTCCTAGTTTTGACTGGAAACTTTCCTAATTTATTACTAGAATACTGAAATGCAGATTCCATTTAGTT
AGTAGTTTGTTTTGTAGTAACAAGAGATAATCTAAGATGCACTATACTTTAATGTTTAGTGGAGGATTGGGAATGTAGCTCAGTGGTAGAATAC
TTGTCTACTGGGCATAATTCCCTGGATTTGATTCCCATAACCAGAAAAGATAAAAAACCAATGTAACCCAACAGATTGGTAAAAGTCTGTGATT
CTAGTAACTCAGGAGGCTAAGGTAGGATGATCGAATAAACCCAGAGGGCAAACCTGCCATGGCTAGATAGGGGAAAGGAGAAGACAGAGATACT
AGGTAGAATGTTTGCCTCATAGGTACAAATCTCTGAATTAAATTTCCACTTCTCTTATATTGAAATAAATTACACTGGGTATGGTGGTACATGC
TCATAATCTATCATTTGAGAATGTAAGCAGGAGCCTCAAGCATTAAAGATTATGCTTACCCACATAATAAAGTGAAACCAGCCTGAACTACATG
AGACCTTGTCTCTAAAAAATAGTATTCACAAAAAACCAAACAAACGGGGCTGGCGGGATGGCTCAGTGGTTAAGAGCACCGACTGCTCTTCTGA
AGGTTCTGAGTTCAAATCCCAGCAACCATATGGTGGCTCACAACCATCCGTAATGAAATCTGATGGCCTCTTCTGGAGTATCTGAGGATAGCTA
CAGTTACTTACATATAAATAAAAAAAAAAAAAATTAAAAAAAAATTTAAAAAAACAAACAAAAAAGAATACATTTAAATTCTGAGTGGTTGCAG
TGGCCAGTCTATAATTCTAGCATTTGGAAGACAGAGACAAGGAATCCACAAAGCAATCTGGTTATCTAGACCTACAGACGAGCTCTAGACAGTC
CTGAGGAACACTGTCTCACAGAAGAAGGTGGAGAGCAGTCAGGGGAGGGCCCGTGTCAGCCTCAGCCTCCGTGTGCACAAGCACACATGCGCAT
AAAGTACGGGGAGCCGAGCCAGGCGTGGTGATACACGACTTTAATCTCAGAAGTTGGGAGGCAGAGGCAGGTAGATCTCTGTGAGTTAGGGGGC
CACCCTGTCTATAAAGTGAGTTCCAAGACAGCCAGAGCTCTAGAAACCCTGCCTGCAAAAACGAACGAAAAGGTGCAGGGCTGGAAAGATCGCT
CAGTCACTGCCTCATTTTTCCAGAACGTCTTGAGTTTTATCCCCAGCGTCTGCGTACTGGTTTCCAGCCTTCTCTGTGTCAGTTAAAGGGGAAC
CCAGAGCCCTCCCTCCTTTAGCTTTCCAGGCTCTGTACTCAGTTAATCAACAGTTAATCAAATGTTCCTACAGATAACATGAAATTAAATCTCA
AGACAAGTTTTAATGCTCTCATCAATTAAGGAAAAAAAATTGGACAGTTGTATTTTCCCTCAAAATTAGTAAATACATGCCAAGATTACAGAAT
GTTAACTGCTCTATCTAAACAGCAAGACTAACTGTGTTACCAATGTGCAGTTAGGTTATTGCATGTGTGTGTCAGAGAGAATGAATATGAATGA
GTTCTGCCTCAGCTTCTTTATTGCTGGGATCGGCATGAATCACCATGCCTGGCTGTTTTTTATGTGCTTGTCTTTGTTTTTTTTTAAGCTCATA
GCCATGATAAATTAAAGGGGAAACTAAATCTTTTCAAATCCTATTAACATCACTCCTTAAATCATTAAAATGCAAATATAATTTGTGTTTTCTT
TGAGATAGTTTTCCATTATGTATAGCTCAAAATATCCTCAAACTTGCCATCGGGGCTGGTGATATACACCCTACTGGACAAGACTTTTGAGTTC
AAGTCTCAGAACCAAAAAAGACAGACACGACAAAAAGCCCTCTTTTTCTTTCTCTTAGCTTTCCAACTCCTAGATTCACTGACGTATGCCATCA
CACCTATCTACTCATTAGGGTTTTTTGGTTTGGTTTGGTTTGGTTTGGTTTGGTTTGGTTTTGTTTTGTTTTGTTTGTTTTTGAGACAGTTTTA
CTATGGAGCCCTGGCTGGCCTCAAATTCAGAGATTCACCTACCTTTGCCTCCTGAGTGCTGGGGCTACAACATAAACTATACACCCAGCTGTAG
TCATATTTTCTTGAACTTAATAGTGTTTCCTGTCTGTATTCTTGTTATTTAGCTTCATCCCATCCCTCTGCGCTCCTCTTGGGTCATGACCTGC
GCATACGCTCCTTCTGGGAATTATGTGGCCTGTGGTGGCCTGGATAACATCTGCTCCATTTACAACCTGAAAACTCGTGAAGGGAATGTGCGTG
TGAGTCGTGAGCTGGCGCGACACACAGGTACACATCTCATGTTCCAGTGGTGTAAGCTGCTAACTGGGATGTATACTGCTCTTGTGATCTGTTG
ATTATTGGTTCAAGTAAAAGTGAAAGTAACGGCCAGAAATTTTCTGAAAGTGAAGCCAAACCAGGGCCAATATGCCTTCATCTTTAAGAAACAT
GGAAACTGGTTTTTTACCCAGTTTTCGAATTCCCAGCTGCTTCAGCCATTCTTGTTTATCAACGAATTGATGTTTCAGTCCTGTTTTTAAACTG
CCTTCCATGCTTGGACATTAGCACAGGAATTCTCCTAGTCTAAGCAAGTGTCCATATGCACAGCCATATCTGTTTGTGCTCACTGACCAGTGCT
TTTTTAGAGGAGGCCGAAGAGAGTCTGTGGTCCATTCACCTTTTGAATGTAACCAGCATTAAAATGTTGGGTGCATATTTTTGGAATTCATACA
ACACCATTTAGGACACATTGCCTTTCCAAGGAAGAAAGTCTCATAGTATTTTCTATCTATCCTGTCCCGCAGTGATAGGTAAAACACTCTTCGC
ATGTAAGCAAAGGATTGTTCATAATTAACTGTCATGAAGAACATGGCAGTTTTGTGTTTTAACCCTTAGGGTCAGGTAGGATTGCATCCTTTGG
TGCTTCTTAAGTTACATTGCCAGTGTTTATAACTACTTCAGGAATGCTTGCTTCTTAATATTCTGGCTTTAGCTGGAAGCATAAGCCACCAGTT
TTAGATCTCTTCTTTCTCAAATATATCAACTTAAAAGTGGCCAAATCCAGGCTGGGAGTGGTGGCGCACGCCTTTAATCCCAGCACTCGGGAGG
AGGTAGAGGCAGGACGATTTCTGACATCGAGGCCAGCCTGGTCTACAAAGTGAGTTCCAGGATAGCCGAGACTATACAGAGAAGCCCTGTCTTG
AAGGGGAAAGAAAAAAAAAAGGCAAAATCCATACAGGCATGGCTTCCTGTAAATTTTGATCAGTAGTATTTAAATTACTCTTCTAGGGGCTGGC
GATGTAGATTCGTTGGTAGAGTATTTTCCTAGCACACACAGTTCTAGGTCTATCCCAGCACCATAAAACTGGACATCATGATAATTTGTAATCC
CACCTCTCATGAAGTGGAGGTAAGAGGATGGAGAATTCAGTGAGTTTAAGGGCAGTCTGGGCTATATGAAACCCTGTCTTAAAAAAGAAGCATG
GTATAGTTCTCAAGTATATGATAGAAAAAGAAAACAATCGGGGAGAAGTCTCGGTGACTAAGAACAGCCACTGCATAAGCACAAGGACCTGGGC
TCCATCCCAGCGCTCACAAGCAGGCCTGGCGTGTGATAATTTCATCATTGTAGGCTGACTCCAGCCTCGTTCAGTGAGAGGCCCAGTCTCAACG
GACTATAGCAAACAGTGATAGAGCAGGATATTCAATGTCTGGTGTCCTCTGTTAGTCTCTGGATAGGCATACACCACATACACAAATACAAGTA
AGACGGATATCTAAAAATCCTTGGGGGGGGGGGCGTCCTGTTGAATTTGTATTAATTTTTTTAAAGATTTATTTATTTTATGTATGTGAGACAC
TATGGCTGTCTTCAGACATAGCAGAAGAGGGCATCAGATCTCGTTACAGATGGTTGTGAGCCACCATGTGGTTGCTGGGAATTGAACTCAGGAC
CTCTGGAAGAGCAGTCATTGCTCTTAACCGCTGAGCCATCTCTCCATTCCCCCTAAAATATATTATTTAGAGATTTGGAGAGATGGTTAAAAAC
ACTGGCTGCTCTTTCAGATGGCCTGGATTCAGTTCCCAGCACCTGCATGTGCCTTACAGACTTCTATATGTAATTCTAGTCCCAGGGAATTTCA
TGCCTTCTTCTGGCTTCTGTGAACACCAGACATGCTTGTGGAATACAGACACACAGGCAGTCCTGGTTTTATTGCTGTGATGTGACATCATGAC
CACAGCAACTCTTAGAAAGGAAAACATTTCATTGAGGCTAGTTATATAGCTCAGAGGTTTAGTTCATTATTGTCATGGGAGGAAGCATGGCAAC
ATGCAGACAGACATGGTGCTGGAGAGGTAGCTGAGTTCTATATTTGGATTCCCAGACAGCAGGAGAGAGTGACACTGGCCTGTCTTGAGCATCT
GAAACATCCACCCACCGTAGCCCTCTTCCTCCAACAAAGCCGTTTCAACAAGGAGGTGTTCCTAATAGCACCATTCCCTATGGGCCCGTGGGGG
CCATTTTCATTCAACACACCACACAGGCAGAAAATTCATATACATTAAAAATTTTGGGGCTGGAGAGATGGCTTAGTGGTTAGGAGCACTGACT
GCTCTTCCAAAGGTCCTGAGTTCAAATCCCAGCAACCACATGGTGGCTCACAACCATAGTAACAAGATCTGACATCATCTTCTGGAGTGTCTGA
AGACAGCTACAGTGTACTTACATATAATAAATAAATAAATCTTTAAAAAAATTTTTTTTTGAGAAATATTTAACTTACTAGTTTTTAGCTAATT
TTAAATTTGAACTGGTGGTCTACCAAGACATCATGCTATAAGAAACAGAAACTGTATTATCTGGTTGTTGGGCATAGTGTGTGTCTGTCTTTCC
ATCAGAAGGAAAGAATCTACATCTGTGTATTTCAGGTGTTGCATGTACATTTATTGCTGCTGTCTGTATCTCCTTGAATGATCGGTTGTTTTAT
CATGGCTTAGTATCCCCTCTCATAATATACTTTACTGTGAATCTACTTCATGTGGGGTTTTCAGCCAGCTCAGCCTCAATGCTCACTGTCTGCA
TGACATTTTTTCTTGTTGATTGTTTTTCTAATAAGTTCTCTCATACACAGCATAGAGTTAAGTCTTCACTTCTGTTTAAAGTCTCTGCCTTTAG
GAGCTGGGAACGTAGCTCCTTTAGGAGCTGGGAAAATAGAGTGCTTACCTACCATGAATGAAGCTCTAGGTTTGATCTTCAGCCCAGCATAAAA
CCAGATCTGGTGATGTAGCCCTGTAGTTCAAGCACTTAGATAGATGGAAGCTGGGAGTTGAAGGTAATCCTTTACTGTGTAGTGAGTTTGAAAC
TGCCTGAAGTACACGACAGGTAGCTTTTAAAATAAATGGTTGGGGCAAGTCCTGTACCTTGTAAATACTTTACATATAGTTTCTTCTTGACTTA
TAATGAGGTTATATCCAGAAATATCAATCAATCAATCAATCAGTCTCTCTGTCTCTCTGTCTCTCTGTCTGTCTGTCTATCTGTCTATCTATCT
ATCTATCTATCTATCTATCTATCTATCTATCTATCTATCTATCTATCTATCTATCTAGGGTTTCTCTATATAGCCCTGGCTATCCTAGAACTCA
CTCTGTAAACCAGGCTGGCCTTGAACTCAGAAATCTGCCTCCCAAGTGCTGGGTATCCAGAAATCTCTTTAATGTTTAAAATATTAGCCACTGA
ATTATGTTGACTCTGTCTAGCCTGCCATCCCACATCTTCCTCATCTTATATTGACCAGGCTGGCCTGAAATCTGCCTGCCTCTGCTTCCTGGGT
GCTCAGATTGAAGTGTGTGCTGCTTCGATGGGTGTATAAACTCTTTGTAGCCTAGGACATTTGAGGCTGCTGTGTTACATTCTTACAGTCCTGA
CAGACAGCTTCAGTTCATTGCTGATAACCAGTACCCTGGGCAGATTATACATACCACTTATTGATAGGTTGAAAGAATTGCATTTAAAATTTGA
AGTTCATTTGCACTAAAAAAATCCTAAGTGTTGCTTTGGATGTGGTTGGAGTTGGTACTTAGGGTGGTTCTCTCTCCCTCTGCTTTCTTTTCTG
CTGTCTGTCTTTCTTTCTTTCTTTCTTTCTTTCTTTCTTTCTTTCTTTCTTTCTTTCTTTCTTTCTTTCTCTCTTTCTTTCTTTCTTTCCTCCT
TTCCCTCCCTCCCTCCCTCCCTCCCTCTCCCTCTCCCTCCCTCCTTCTCTCTCTTTCTCTCTCTCTCTCTCTCTCTCTCTCTTTCTTTCTTTCT
TTCTTTCTTTCTTCTTTTGGGTTACTCTGTTTCTAGCTCTAGCTTGCTCCAGCCTCTGCATTCTTTTCCCTCTGCCTCCCCAGTGCTGTAATTA
CAAGTGTGCACCACCATGCCTGGATTCAACATTGTGTTTGAAGAGTTGTATAGGCTCACATGCACTCAGACAAACAACGTCCTCATTTCCAGTG
CTGTGTACTCCTTCCTGGGGGGGCATCTCTTTTTCTGGTTTCCTGTATGCCAAAAAGCTACTCCCTCATAACACCTACAGTTGTACATTTTGCC
AGTCCCTTTATGTGCTATTTTTTTTAATGTCTGTATGTTTGTTCAATGAAATTTAATTTACAAATTAAAGAAAAGAGATTAACAGTAAGCAGTA
AGAAGGTAGTGCAATATAGCAATACACTATAATTAAGTTTTTGTTTTTTTTTTTTTTGACTCATGGCACTGAGAATTTTATTTATTTATTTATT
TATTTATTTATTATTTTTTAAAGATTTATTTATTTATTATATGTAAGTACACTGTAGCTGTCTTCAGACACTCCAGAAGAGGGCATCAGATTTC
GTTACGGATGGTTGTCAGCCACCATGTGGTTGCTGCGATTTCAGCTCATGACCTTCGGAAGAGCAGTTGGTGCTCTTAACCACCGAGCCATCTC
ACCAGACCTATTTTTTATTTTTTAAGGAATTATTTGTTTCTGGAATTTGCTTGGTTTCCATGGGTTAACTGAAACCAGATGAGGCTGCAGTGGT
TAGAGTAAACTGCTTGTGAGAAGTCTTGATTTTTTTTTTTTTTTTTTTTTTTGAAAAGATCTGTTTTATAGTAGTAGTAGTAGTTGTTGTTGTT
GTTGACAGGGTTTCTCTGTGTAGCCCTGACTATCCTGGAACTGGCTCTATAGATCAAGTTGACCTCAAACTCACAGAGATCCATCTGTCTTTGT
CACCACCTTTGAGTTAAATTATTTTTATTGCTTTTATTTATGTGGTGGGGGTCAAACATGAGGAGATCGAGGATGATTCTATAGAGTTAGTTCT
CTCCTCTCATCTCTGCATGGGCTCTGAAGATCAAACTCAGTAGGAAGTTCCTTTACCCACTGATTCATCATGCCAGTCTTTGACTTTCATGTGT
GTGTGTGTGTGTGTGTGTGTGTGTGTAATTAAGAGGACAACTTGTGGGAAGTTGGCTTTTCTCTTCCACCATGTAGGTCCTGCAAATTGAACTC
AAGTAATCAAATGGCAGCAAGCACCTGTACACATGGTCCCATCTTGCTGGCCCTTGACCTTTATTCCTGAAGGATAGTTTTGCTGGACATACAG
GATTGATGTCACCTTACATACAGTTGGTGTCACCTTCATGTCTATGTGTGTTTCCCCTGCATAAATGTTGATGCACCACATGCATGGCTGATGC
CAGCGAAGCCAGAGTGAGGGTACTGGGTTTCTCCTGGAACTGGAGTTAATAGTTACAACCCATCGTGTTGGTGCAATGAATTGAATCTGAGTCT
TCTAGAAAAGTAGCCACTGTTCTTAACCACTGAGCCATCTTCTCAGCTTTCAACATTTAAAAATATAACATATTAAAGGTGTATCTTTGATTTT
TGCAGTTTGATGGTGATATTCCTAGACGTGTAACTTTCTTTATATTCTTGTGTTTGGCATTTGGAACTCACTAAAATATGTCTTTTGCTAAATC
GTAAGGTTTGAGCTGTGTCTTCCAATGCCCTGGTTTCTATGGTTTTGGGGTGAGCTGCTTCAGTTTCCACTTCCTCACGTGTTTTGTTTCTATT
CAAGTCAATTCAGTTGACTTTGGTCACTAGACAACAGCTTTCCTTCTTGTTAGACCAGCAGTGAGCAGCATTTGAAGGAAGCTCAGCTGGAGTA
GACGGCAAGGGCACAGACTGGGCTGGGGAGGCATGGAGAGTGCTCACATAAGTGTCCACATTTGTGTCACATGGTCTCTTCAGATTCAGAATTT
CTGTGTTTTTATTTTAAAAGATCCCCTCTACAAGCACTGAGGCTTTATGTCTTCTTATTTATAAACAAGATTATTTCTCATGTTTCTGAATATA
ATTACAAGAGCTAAATGTAAAATGTCAGCTAATTGTAGCATCTGATCTTGAGGTATATCTTTGTGGTCCTTTCCTCTTGAGTGTGGATCACACT
TTGCCATTTCTTAGTGCACTTGCAGCCTTGGCAATATAATTGTCATAGCAACCGTGGGCTCGTTATGTTCCTTTCAGATGTCTGTTCAGTTTCA
TCAGGTTAAGAAACACATACATAGCAGCAAAACTCTTACTTGTCCTCCTGTCACTGGAGCTGTCTGTGGGTTTGCTTGCTGCCTGTGTGCTGTT
GCTGTTAACTATTAAAGTGCCTGTCTGTGTAAGTTAGGACTGTTGGAGGCTGCTTTAGCACTTCTCAGGGATGTTCCAGCAGACTGGCTGATCA
TCCAACTGTGTAAGACAAAACCATTGAAGTCCGTTGAAGAACAGGCGGTTGTCCATTTACGAGTTTCCTATGCCCTCCAGGGTCAAAACTTAAT
AGAATGTATAGGCTATCTTATAGGATAAGGAAACCCTAGAAATGGATGTAATTGGGTTCACAATAACTGAAAGAGTGTTCATTATTACTATTTA
TATTATTATTTATAATTTATAGGTAGAATGTATATTCTTTTTTTTTTTAATTCAAAATAATTAGCCAGGTGCTGTGGCATACTCCTTTAGTTCA
GCACTCAGAAGGCAGAAGCACAGGACTCTGACTTCAAGGCCAGCCTCATGTATAGACTTGAGTTCCAGAACAGCCAGGGCTACAAAGAGAAACC
CTGTCATAAACAAACAAACAAATAAGACAGGCACATACATATGTACATGTGTGTGTGCGCATGCGTGTACGTGCACTTTTTTTCTTTTTTTTTT
TTTTGAAAATGTGACTGTTGCCTAGATACTATTTTTAAGGCGACTGGAACGTAGGCACAGATTGGTCTCAATGCTAATCCCTAGGGACTGATGA
AGAAAGAGTGGAAAGGTGGCCTCAGAGCTGCTGTTTTGAGACCTTTAGTTCTGGTCCCGAGGGCCATGATTTGCCTGCCCTTCTGATGTAACAT
GGCGTTGCCATTTAGTATTGTGACCTCGTAGAGTGAGTAGCTAGAACATTCTGGTGTATAATTTTTTTCATCTAATGAATAATTGGGTGTTTTA
CATATTTATGAATACAGTGGGTTGTCTTTGGGTTTTTTTTTTGTTTTTTGGGGGGCTGTTTGTTGGTTGGTCTGGGTTTTTTTCTCCCCTCCCT
CTGAAGAGTATTGGTGACCTTGGATATAGAAAAAAAGATTCTGTCTGTCTGCAAAGTCAGCTGTGAAACACAGAGCTGGTCAGTTACTTACTTC
TCTTACTGTCCTCTTGGTGTCCCCTCCCTCCATGTCACTCCAGCAAAAAGGAAGTGCTACTTTCAGGGCTAACCACACAGGCAATTGCAGCACG
TACCTGTCCACAGAACCCATACATATCAGGGAAGTTCTCAGTGTCCTGCCTTGTTGAGTGAAATTTTTTTTTAAAGATTTATTTATTTATTATA
TGTAAAGTACACTGTAGCTGTCTTGAGCTAAGACAGGATCACTGCTACAGGATCACTGTAGCTGTCTTCAGACGAACCAGAAGAGGGCGGGTGG
TCGTGAGCCACCATGTGGTTGCTGGGATTTGAACTTCGGACCTTCAGAAGAGCAGTCTGGTGCTCTTACCCACTGAGCCATCTCACCAGCCCCC
ATTGTGTGAAATTTTATGTAACCATTTATAATTTCTCCCTTGGCTTGGCAGATTTTACTCCACTCTGGCAGAACTATGTGACTTTCAGATATCA
GTCTTTTCAGTTACTCATTTTCTTCTCCCTCAAAATTTTTATTGTATTTTGAGGCAGTCTCGCTGACCCCTGTTCCATCCACAGCTTCTAAGAA
ATCTTTCCAGTGGGTGTCAGCAGAAACATAGCTATTCTGTGCATACTCCATATCACAGCTCTTGAGAAAGCAAGCGCAGTCACCCGTATTTTTG
GAGCCTTCCCACTCGATACTTTCAGTGTGCTTGCTGTTCCTCTAGTTGGCCTGTAGCCCTTTCTCCCTTGGTTCCGTCACTATCTCCCTTCTCA
TTGGTTCTGAGCTCCTTTGTGTCCAGCTGCTCTACTCAATAAGTAGATGAGCACACAAATGAGGATAAAAGGAAATGGAAAGACACAGGTGGAA
GGATGAGGTGTTCCCAAGGCATAGCTCACTGCTATGTGCTGTGCAGGTGTGGGTCCGTGTGAATCATGAACCCATTGAGTCTGCCTATAGTTTC
ACCCATCCCGTGACAGACGTTCTGGGCATTTTTATTAACGTGGTTTTCACAGGGAGAGGCTCCTAAGATTGAGACTTTCTAGTCTTGGTTATTT
ATTTGTGTCTGCTCTTTTTCAGGTTATCTGTCCTGTTGCCGGTTCCTGGATGACAATCAGATAGTTACCAGTTCTGGAGACACCACATGGTGAG
TACCTGACAAGGCAGCAATTGAGGCTTGAGGTCTGTCTACTGTTCTTGTTAATACTGGTTAGTAGGGTTACTTCCCATTGCAAGATAAATGCTT
CTTGATCATAACCTGACAATTAGAAAACAAAGTATCAATGAGTAACTCATTGCATCATCTGTGGATATGCAAAGTTTGATTTTGAACAAAGAAC
TAAAATGTAGATATTTAAACTATAGTTGTATATCAAGTACCTGGTTTTTTCTCCATTTATTTTTACTCATGTATGTGGTGTTTTTAGCCCTGTG
GGGTTCTTTTTCACTGTAAAAGTCAACTTAGCATATTGTGAGAATGAGTAAAGCTTTCAAACAGCAGCTCTGTCAGATTTGTTTATTTTAGAAT
GTTTGCTTACTAGTACATGGAGACACATTCAAGTAATTTTTCCCTTTGTTTATTAATGAAATGACCAGCTGGTTATTTTAAGAGAATCATTTTA
AACTTAAGCTGCCCTTGTGGGTTTTTCTGGTCGTGGGAGACATTCCTGGGAGGTCAGTAGCAATATTTTAAATTTGATTTAGTAGCATGGCTTA
CAGGCTGGTGAAATCCAACAATGGACTATTGATGAAAATGTTAGCCAGGCGTGGTGGCGCACGCCTTTAATCCCAGCACTCGGGAGGCAGAGGC
AGGCAGATTTCTGAGTTTGAGGCCAGCCTGGTCTACAGAGTGAGTTCCAGGACAGCCAGGGCTACACAGAGAAACCCTGTCTCTAAAAACAAAC
AAAAAAACAAAAACAAAAACAAAAATGTAGTCAGGTGGACAGTGAAGATTAGTCATTACAAATTTCAAATTGCATGTGTTGATTATTTTCTTGG
TTGAAATATGTGAAACTTTTGTGCTCTGTGCTTCTTCCTTCCAGTGTCCCTCATGCCTAGCAAAGATAACCAGCATTCATTGTAGTGAACTTGG
TTGATTGCATTGGTCTTGCTGGGTGAGACAAGCTGGTGAGGTTGACAAGAATGGACAGTGTATCATGCTGTTGCTTCTGCGGGTTGCAGCAGGA
AGTAGCCTGACTGCCATTTCCATAGCCAGCTCCCGCTTTATGTAATGCTGATGATATCGTGGCTTTTAGCCACTCTGTCAAGCAGAGGCCCTTG
GAAAACCTTGTACATCCATGAAGACCATCTTTGGTTTATGGTCCTCGTTGCAAGAGGAGTTGGAGCATCAGTTTCTCTGAGCCACTTATTTACA
TTCCTAGTGTCTAGGAAGGTGGAAAATGAGGGGATGGAAAGAATAACACAGGTGAAACAGGCTCCTTTCTTTCAGACCTTAGCATTTTCTGCCA
TCCCACAAACTGCCCATGATTATCTTGTGTGAAGGACAGTGGCTCCTTTGCTGTAGTGTGAGGTAACCTGGAAACAGCAGGCCCATATGCTCAT
CCATATGGTTGTTTATTGTTTTCATTTTCTTTTCCTTAGCAAAATCTCATCACAGAAGTAAATGTGTCTTCCCCGTGGCACAGAAGTCATCTGT
GATTCTGGGTAGTATAGAGGATGTTGTTCTAGGTGATTGGTCCCATGTGCGTGCCTGATACCTACTTTTCATTTCTTCCTGCACCAGTGCCCTC
TGGGACATCGAGACTGGCCAGCAGACAACCACATTTACTGGACACACTCGAGATGTCATGAGCCTGTCTCTTGCTCCTGACACCAGACTGTTTG
TCTCTGGTGCTTGTGATGCTTCAGCCAAGCTCTGGGATGTCCGAGAAGGGATGTGCCGGCAGACCTTTACAGGACACGAGTCTGACATCAATGC
CATATGTGTGAGTTTAAATTGTCTGCTTTAGATCTCAACCTTTGTTGTTGTTGTTGAAGATTTGGGTTTTTTTTTAGGGTCTGGAGAGATAGCA
TATTAGTTACTTTTCTGTTGCCGGAACAAAAACACCATGATCAAGGCAACCTAAAGAGAAAAAACATTTCATTGAGGCTTACAGTTTCAGAGGG
CGAATCCATGTCCATCACTGTGAGGAGCCTGGCTGCAAGCAGGCAAGCATGGTGCTAAAGAAGTAACTGAGAGCTTCATCTTGAGATATAAATA
ATCACAAGGCAGAGAGTGAGTGAGCGAAAACTTGGAATGGCATGGCCTTTTGAAACTTCAGGCATCCAACAAGGCCATACTTTTTAATACCTCC
CAAACAGTTCCACGAACTAGCAAATGAAGTGTTCAAACTTGAGAGCATGTGGGATCCATTCTCATTTATATTTGTGTCTGCCTGTCTGTGTATC
TCTATCTGGGTGTGTGCATGCGTATTAGAGCCAAGTAGGCTGTTAGGAGACACCTGATATAGATTGGGTGAACCAAACTTGGTTGTAGTAAATG
GCTTTTAAAGTACCTTTAAAGTACCACTACCTTTAAAAACATTTTTTTTCAAAGTTTGTTTTAAAATTTGTGCTCTGGTTTTTTGTTTGTTTGT
TTTGTTTTTTCTTTGTGTTTATTCTGAGAAAAGGTCTAGTAGTATAACCTAGGCTTACCTAGAACTGGAAGTCTCTCTAGCACTAAGATCACAG
GCAGGCCTTTCTACCAAACCAGGTTGTCCTTTTCTTTGCAAATACAACCAGAGTCAGAGTGTTTTAGAAGCAGCTAAAACCCTGTGCTGTGCAT
ATATTTCAGACACTGATGAAGCCATTAGGTGCCAGCTCAACTCTTCCTTTTTTTTAAGTGACCAGTAATTTAGAGGCTGAATATCTTGCCAGCT
AAGGGAATGGCAAATTTAGAACTTACTTTCTTGCTAGCACCTCCTGAAGAGATGAGTCTGGTGACTAGAGCAGTGACTTGCTCCATCCTCCACA
AGTCCCTCCTGACAGCTCGTGTCCAGAGGACAGAAGCCCTTCAGCAGTGCCTCAGTCTCATTGCTTTTCTGTACTGAAGTCTGCCTTGTTGACA
GTGGCAGTCCATGAGTACTATGTCAGTACCCCCCTAGTACATCCCCCATTCACTCTAGGATGACAGCCCTTATTCTTGCTGGAACATCATCCTG
TTTTCCTTTCCATGGCAGCCATGCCTCTGCATTAACATCATGTCTTGTTGAACATTTACTTTTATGTTAGTATATATAATTCAGCTTGACCTTG
AATTCACTATGTGCCTGAAGGCTGTGTACTCTATTCCATGGTTGATTACAGATTACTACACTTTTTAGCCTCCTGTGCTTGTGCCTGAACTATG
GGCCTTACCCACGCCAGGCAAGTGTTGAATCAGCTGGCCTGTGCCCCAGGCCTCATTGTTTACATATGTCTTGATTTGTCTTCTCTTTTTAGTT
CTTTCCCAATGGCAATGCCTTTGCCACTGGCTCAGACGATGCCACATGCAGGCTGTTTGACCTCCGTGCAGACCAGGAGCTCATGACCTACTCC
CATGACAACATTATCTGTGGTATCACATCTGTTTCCTTCTCCAAGAGTGGCCGCCTCCTCCTTGCTGGGTATGATGACTTCAACTGTAATGTCT
GGGATGCACTCAAAGCTGACAGAGCAGGTCAGTGGCCACATGGCCTTTCTGTGTTTTGGGGGCACCAGCTTGCTTCTTTCTATGTGGTAAAATG
AGGTTCAGATGAGCTGAAATGTGTACATTTGTATCATCAGCTTAGTTATGTCATAGCTCAGCAGAGGGGACAGTTAAAGGCCACATAATTTGAG
CTCTGGCACTCCAGGAAGTACCAAAAGCTCTCCTGTGAGGAGAATGTGGGAGTTGATACTATGCCAGATACCACTGAGTTCAATGTTCAAGTTT
CCCATTTTGTCCTGTGGGTATCCATGGTTAGCCTAAAACACTCTATTAGACCAGATGTCCTTGAATTTAAAAGTCTTCTGATTCAGCCTTCTAA
ATACTAGAATTACTGGTCAGTACCATCAATTTTCAATCTTTCTCACTCATTCTCTGTAGTCACTTAGCTTCTGACATATTCCACCATGGACAGC
TCCATCTTCAGCTGTCTGAGCCTATCTATACAGCTTTGGCATCTGATGCCATGCCCCTTCGTCTGTACAAGGTTGTTGAACACTGTGCTGGTTG
CTGGTAATGATTCAATTTAAAGCCTGAATTTAATATGTCAGAATCAAGTGGATTAAATACAAGCTGGACAAAAGATTAGAAAGTTTTTGTCTCA
AGAGTCTCCCTTTGAGCTCAAGCTGGCCTTAAGCTTCAAGTTGAAGAGCTTTATTACATTCAACAAATCTGCTTTGGAGGAGGGAGGGAGGGTT
GTGACCATGAATCTCGTGGGTCCCACTGTGGCTGCTTATAACCCACCACACTACTGAATTGAGCACAGTTTTGGTGGCTCACACATTTAATCCC
AAGTCTCAGAAGCATGCAAATTCTGTGAGTTGTAGGATAACCAGGGCCTGTCTCAAAAATAAAAATCAACATTTCTGCCTTTGCCATTGTAGCC
CAGGAAGTTGACTCTGAGTTTAAGAGAACCTTCCAGCCCTTGTTCTTAGTTGGTACATCAATAGCTACAGGACTAAATGTTTCTGAAGTTTCAA
ACCCTTCTGTGAGAGAAGGGGTGTTTTAGCAGGTGATGTGCCATGTGACAATGGGTCCATGATTTCAACTGTAGGCTCTGTGTACCCTGTGGTT
AGTTGTTCTGAGTTTACTATTCAGGCTTTTGCTTTTTTGGGTCATTATGTTTTGTTTTGTTTTTTTTAGAGATTTATTTATTGTAGCTGGACAC
TGGTGGGTTATACTTTAAATCCCAGCACTTGGGGAGGCACAAGCAGGCAGATCTGAGTTTGAGGCCAGCCAGGTTTACAGTGAGTTCCAGGACA
GTCAGAGCTACATAGAGAAATCTGTCTGGTGGATGGGGTGGATTTATTTATTTTATCAATATGAGTGTTTTGCCTGTGTACCTGCAGAGGCTGG
AAGAGGGTATTGCATTCCTCTGGAACTAGAGTTACAGATGTTTGTGAGACGCCATATGGGTGCTGGAAACCAAGCTCAGATCCTGAGACACAGA
TGGATGTTTATTCATTATTTACTTGTTTGTTCATTTGTATTTTCTAGACAAGGTTTCTCTGTAGCCTTGGTTAGCCTGGATCACCAGATCTGTC
TGCCTCTGTCTCCTGAGTGCTGGGATTAATCCAGCATGTGCGATTAAAAGGCATGCGCCACCACTACCCATTTTTGTATACTATCAGCTTTTTG
TTGGTGTACAAAAATTATCCCAAGGGGGTCTGTGTTTATGTCCTTGTTCTTCTTAGAGAAGAACATGTTATGATTGGTTGCTCTCTTAACAGAA
TTGCCCATACACCTAAGGATCGTTTCTACTTGGATAAGAACCTTCTCCCTTTGTAGTGGCCTTCCCTTGCCCTCTTAAGTGCTTGTTTTACCAA
AGTCTTGTAGCGTTGTTCATCCAGATGAGCCTCCTGCTTTGTCACAGCCTCATGTGTGTTTGTGGTTGTGCTCTTTTTGTTCTCAGGTGTCTTA
GCTGGACACGACAACCGAGTCAGCTGCTTGGGGGTGACTGATGATGGCATGGCTGTGGCAACAGGGTCCTGGGACAGCTTCCTCAAGATCTGGA
ACTAAAGCCAGGAGGTAATGGGGCAGTCCCATTCCCAGGACATGGCATTTTCCTATATGGGTTATACATTTACAGAGATCTTGTTGATCTGGCA
TTGTAGCAGATCTGCAGTGAACGCCCTTAGCTGTGATGCAGAGAACAGTGGGAAGAGCTCGGGTTCTTTCTGTGTGCACTGACTCCAGGCTCTG
TTCACAGCAGCAGGTGGATGGATGCCATGGCGACTGGAAGACCATTCCAACCTTGAATCGTTACAGCGATAGCATATCCTATCCAACCATACTA
ACGTGGACACCCACACCTCCCCTCAGAACTTCAAAAGGGCAAGATCTTTTTTCCTTCACTTATTGCTGAAACCAAGAGCACAATTCCCATTAAG
AGAAGGATCTCTGTGCTGTAAACTAAACAAATTGTGCATTTTTTCTGGGGCCATTGTTTTTGGTTTATTTTGTTATTTTGTTTTGTTTTTGTTT
TTTTGGTTTCATTTTGTTTTGGGTTGGTCCAATTTTAAAAGGAAATACTACAATAAAAATGTTAACCAGAAGGTAACCCTGAGTGTGATTGTGA
GAGAGACACGCCTTTTTACTAGTTCATTTGCATTTAAATCAGTGATCCTGTTCTGTGGCATTCATGAAAAACAAGTTGAAGAATTTGTTTATCT
GGAATTGTTTCTAAATATAAGTCATTTGTAGCAAGACTTTGGAAGCATTCTTTCTTAAACATATTCCTTTATGTTCAGTAGTTAAGAGAACCAG
GGCCCACGGCGGTCTCTGACTTGTCACTGATGTTTTTTTTTTTTTTTGTCCCTGGCTTGCTTTTTTTTTTTTTTTTTTTGTCTCATGTCACAGA
TGACTGTTTCGCACAAACACAGCATAGTGGAAGAAAAAATTTCAGAAGCAAAGTAGCCAAGCACATGTTAGGATGGCCACGAATGCTTGGTCAG
ACTCCTTCCTTCCCTTCCTCAGCAGCGGACTTACTCCCAGCGCCTTCCCTCCCTCCTGTCCCTCCTGTCCCCTCACTGTCCACTTTCTGTTCTT
TCCTTGGGTTTCCTGTGAAGTTGGACGGACGTTTGTAGTCATGTGACACTAGCCGTCCTGCCCCTGCTGTCACAGATTTTTTTCTCCAGAGAGG
TGCCTGTCCTGTGCTTGGATAGTCAGTTGGTTATTTGTGTATGAAACAATGTACAAATCAATGTTTTGAAAATAATGATCTCAGACTTTCTAAG
TTAAATTTTAAACAATTTGATTGTTTCCCATATTGGGTCGGGTTACTCTTAGAATCGCATGCTGTAGAAATGCTCTAAAGTGCATATAGGACTC
AGTCCTTAGATGTTCTTTTTATTTTAAGAAATAACCTCTTCAAGTTGTAACCGTGGCGGCTTTGTCCATTACTGTTGCTATTCTGCACACATAT
CGGAAGCAGCAAGCGCTTTACACACTTGAGTAGTCGGATAGTCACTGTTTTCTTTACTTTACCAAAACAAAACAGTCCTGTTGGGAATGATTGC
TGTTGGATTCTGGAAGGGAGGGGAAAGCTGCTCTGCTGCCTCTTTGCCACTTCCTGGAAGCCTTCCTCCCTGGAAGAACAGCCTTTTGCATCTG
AGGCGACCATTTTTACACCATGCAGATCTTCGTGGTTATCATCTCAAAGCCATGTTCAGCAGCAGCGTTTGGACAGCAGTGTTCTGTGGGCCCT
CCCCTCCCCCATATCCTGCACCCCCTCATAGCAGTACTGGCTTCGCCATTCTGTTTTCTGCAGTGTCCTGTACAAAACTGTCCTGTGACTGTGC
GGTAGGCCTGGACATGGCAAAGAGAATACAGCGAAGCCCCTTCTCTTCCTACCAAACAACTCTGTAGAGCTCTCTGCACCCTGTACCCTTTTCA
CCTTTTGTATTTAATTTTAAAGTCAGTGTACTGCAAGGAGGCTGGATGCAAGATAGATACTATATTAAACTGTACTGTTATTTAAGATGTAATA
AAGCAGTTTGACATGAGGGACTCTGGTGTGATGGTTATTTGAGGGTCATCTTCAGTGTGTGGGGGTTTGCCCCAACTGCTGACTCAACAGTTAT
ATAACGTCATGAGAGACCCTTATAAAAGTGTCAGCTCGGGCTGAATGTAGTAGTACACACCTTTAATCACAACACTCAGGAGGCAGGGCCAGAT
GGATCTCTGAGGTTAGGGCCAGCCTGGTCTACTTTGCAAATTTTAGGACTGCCAAGCAATATAGACACTGTCTCAAGGGACGTGGGGAGATGGG
CTCCTGGGAGGTTTCTGGTATATATCTCAGGTCTGCAGAGCCACATGTTTATCACGACAAGTGGCCTTTCACCCTCAGCACCTGGGCCCTGTCT
GCCGTCTCCTGCTGGACCAGCCAGCTGCTTCGACTTCCTCTTCCTGCACTAAAATGTCTGAGGACCTGCCCCTCCAGAGATACTTTCCTGTTGA
CTAAGCACCATTTCCTTCTCTGTCGATAAAGGTCACTGCATCTTGAAGGAGCGAGTATCAACCCCTGAGTTGTTGGACTGCCATTCCAGCTTCT
GACACCCATTCCACTGCAGTGCCTGCTTCTAAGTTTTATGATAAAAATTTTAATCTTAAGGTTTTTTTTGTTTGTTTGTGGTGAGTTTTTTTGG
TTTTTTTCAAGACAGAGTTTCTCTTTGTAGAACTGGCTGTCCTGGAACTCACTCTGTAGATGAGGCTGGCCTCGAACTCAGAAATCCGTCTGCC
TCTGCCTCCCAAGTGCTGGGATTAAAGGCGTGTGCCACCACACCCGGCTTAATCTTAAATTTTAAGATTATAAAACATAACTGATCTTCAGGCT
CACATCCCCTAAACATTGACTGGCCCCAGCCACCTTGTTTGGACAATGGTAAGCAAACAAATCCATCCAGGGTCAGCGGTGGCCCCTGATACCA
CACATTGTGGTGTGATGGGCAGGTCCAGCAGATGGGATGGGATGGCCTAGTCTAATCCTCTCCTAGTCTCCTTGAAATAAATGTATTTTTCAAC
ACACACATTTTGCAAGTCTTTACCTACCTCAACTTCCACTGAGAATGCAAAACATTTGAGGTCCTTCTGATCTAGAAGGTGAAGCTCTGACCCT
AACTTCAAATTCTCTGGGAGTACATGTCTTAAACTGCTTCTAACCTACCTGACAACAAGCAGGCCCCAAATGGACTGGGGTAGATCTGTGTCTC
AGGCCTGTCCTACTTCTCAACCAACATCCAGGCCGCTGCCCACTTGTTTAACAAGCAGTCATGGAAGACATGTCCACTTTGGATATGTGGGCAG
TATTAATGACCAAAGAGCGTGCAGGCTTCACAAATGCTCAGGCTTACACATCTACATCCACCATTAAATACCACTCATGCTCTGGAAGCTGAGG
TGCCCGTGTGCTCTGTGTGTTGCTGCCCATGGTGGAAGTACACCTGTTGAAGTGCACACAGGCAGATAAGGGGCTGCTGCTATATTTTAGACCC
ACCATGTCTCATCATTTTCCTCCAGCGTATGGGCTGATGCCATTCCATGACCCCAGGATTCCAATTCTTCTGGCCTGTAAAGGGAGCCACCTCA
TTTATTTGCCAAATACTAGAGCCTGGAATCCTGATGAAAGGCCAGCCGGGTCCAGCTTGTGCCGTCCACCGTTTCCTTTGGCGCCTACTCTCTC
CTGCCGCTCTCACTGTGCTCCTGTATTCTCAGTACAACCTGACACCACCAGCATTCTGTTAGACCAGTCCAACCCCTCACCATCCAAGAGCAGC
CAGCAGTCTTTCACCTCTGCCTCTTCACACAGGGTGATCTTGGGACAAGGTGTTTGCTCTGGGAACCCATGAATAGTCTGGCAGGAATTCTATG
AGAACAAAGTGCCTGGTGTGAGATTACAGCTGGTGACTATGTAACCCACTGTTCCCTTGCCTGAGACATTTCTAAGCACCCTAGGCAAGACTAC
TCTGCTTGCTGTATCCAAAACGTGAGTACCTGGCAGCTGTCCCACTGATTTGGCAGAAGAAGGGATAAGGTTGCCCCTCACCCACCCCAGTGAA
GTGACCCTGATGATGACCTCAGTATTGGTCTTTACCTATGCCAAGTGCACTTTCGGAGAATGGACAAGATAACTAGTATCCCATGACAATCAAC
TCTCCTCTAAAATACACTCTTCTGGCTAGCTGTCACCTTGTTTAGGTACTGGACAGCCTTCACAAAGCAGTTTATCCCACCCTGGTCACATGAA
ACCAACTTTCCTCTTAGTACTAAGGCAGGACCCAAAGAGCTACAAAGCCTCCCTGATGCCTGCGCCTGAGAGCTTACCTGAAGGGACACCCCCC
CCCCATGTGACAACCTAACTTTGGGCACAGGCCCATCCTGTTTCCTCCTTGTTCTTCCTCCTCCCTTATCATTTAGCCTTTGAAGAGTAACCTC
CAGGTACTGGAGGCCTGAAGCAAAAATGTGTGTAATTGCCTTGATTTCGTCCTGCTACCTCACTCATCCCATGTGACCTTTATTCTGCTGCTCC
TTGAAGCCAGCCCAAATTAAACACTCTAGGAGTCTTTTGAGTACCCTCTTGCCATTCCAAGCCTTGACCTTGACCTTGCCGACTGTCTTTAGCA
CAGTGGTGGGAATGAGCACTTGGTATCTGAGTCTTCAGAGTTTGATGGGGCCCAGTAAAACATTTCACAATGTCAGCTTTGTTCCTTCCTCAGA
AATGGAGAAGCCACCTGCATAATCTAGGCCTTGCCCCCACTGTGTAAAACAGATTTCCCTAGCAACCACTGGACATCTGCTCTTTTAATTTAAG
GCTACACAGGTTACTTGGTATGTGACCTTGGACTGCAGACCATAGACTGGCTGCCTTTGCAGAAGAATATGACTGCTCCCACTCTGGATGTCTC
TCCAGGTCTGCTGGCCATGTGCCTGCCATTTACCACTAGATACCAATCAAGTGTTATATAATACAATAGCAGCATAGTTACAGCCTTCGGTGGG
TGTGGCTGGCGTTCACTCTGGGGAAGAAGTTAGGCTTACAAAACTCATGAGGAAGTTACAAAATTTAAGAAATCCCCGCAAATTCCCACCATCC
TCCCTACCCACTATTTTCCGTCCCCACTGCATTGATGTGTTCTTTTTGGAAGGACAGCACACAGGTCTCAGGAGTTCCCACCAGAGAACATCCT
GACTGCAGCAGGTATGGGGGGCTGTGGGGAAGCGTGGAGATTGGGCTATACAGGAAGGGCAATAGTGTGAACATCTTAAAACTACAGTGCTGGG
AGTCGGGACTGCGAAAACACCTACTGGTGCACTGTGCACACTGGTGGATATCAATGCACGAGCATGTCCACCAGTTCAGCATATCCCTGGCTCA
GCTACAAAGTCGGTGGCCTCCCTCTTTCCCTCCTTACAGCTGTGGGTGAGGCACGCTATTTACACAGTCGCTTCTCAACTATCAAGACTTTGTT
TTTCTTTTTGAGATAGGGTCTCTAACTATGGTACCCCTGGCTGGCCTCGAATTCCTAGAAATCCGGAGCTCTCATCTCTGGGATTAAAGTAGTG
AACCATTGTATCAACCACCTGTCAGGTTTGTTACTTTCAGGCTCAAGTCCTTGACAGTTGCCAAAGGGTGTCAGGTCACTGCTGGTGGGCCTGA
GAGCCATATGAGCGCTGTCACCCGAGTTCTGCTTCTGAAAGATACCAGGTCCATGCGCTGGACATTAAGAACAACGTGGGAACAGGAGCCTGGC
ACGAAGCCCACCTTCCCACAAAGCTGGCCCGCGTTGTCCACATCGTCCTGAAGACCTCGCCAGCAAAAAGCAAACTGAGTGTGACGTAGGACAG
GAATAAAGATCAGACCGCGAGGCAAGGAGGCAAAAAAAGAAAGAAAGAAAGAAAGAAAGAAAGAAAGAAAGAAAGAAAGAAAGAAAGAAAGAAA
GAAAGAAAGAAAGAAAAAGGAGAGAATCTGGTGGTTTTCTCTGTTGCTGCTGGGACTGAGCTTTTTGCCCCTCCTCGGTTACTCTTTTTTTTTT
TCTTTTTTTCTTTTTTTTCTCCCTCACCCCTCTGCCCCGCCTCCCCTTCCGCCCCGACTCCTCCACCCTTTGGCCCCGCCCACTCTCCCGATCT
TCCCCTTCCCTCCGGCTTAGTCTCCTTAGTTCCGTCCCTTTCCAGCTCTGCCCTCTTGCGACCTGTCCCTCCCACTCTCCCTGCCCCTTCTCCT
ACCCCGTCTGCCCCTCCCCTTTCTCCAACCCTTGGCCCCACCCCCCCGGGCTGTCTTCCGCTCCTTGGCCCCATCCCATTCCGCTATGCCNNNN
NNNNNNNNNNNNNNNNNNNNNNNNNNNNNNNNCACCCCCCAGCCTCTGATCCTTGGCCTACAAAGGGTTTTGAAAAACCCGAAGTTTGCGTGCA
CGCCTGTGTAGGTGCGGCTGCGCCGCTCTCCCCACGTGCCCTGCAGCGCATGCGTGCGGGCTGCGCTTGCGCACTGACAGCCGCGGCGCAGCGG
GGCTTGGTGGTGCCGGTCTCTGGACCGAGCGGCCATGGGGTGGCGGGCGGCTGGGTCGCTGAGAGCCAGGTAGCAGTAGGGCAGCAGGGACCGC
CTGCTCGGCCCAGCATGTAGACGTCCACGCGGGCGCGCGGCAGCCGACGGTGAGTGCGGGGCCTGGGGTCGCCCTCTGCCCGGCGTCACTGGCC
GGGACCCGTGAAGACAGGGTCACGGCGCCGGCCCTGCCCACCTGCCCGAGGCCGGGCGCTGGTGGCTCTGACGCGCCTCCCTGCGTCCGAACGT
GGGTTGCAGCCAGGATGACGCGTGGTCTCGGGGAAGGAGCCTAAGGGACAGGTCTGAAGATCTGGTCCGGCCTTGGGTTTAGGGGGACGAGTCA
GAGGTTCGGGTCCCGTTAGAAGCCATGTAGGCCGCCGTTCTGTTCTAAGCCAGTTCAGCGCGCAGCACCGCAGCCGAATCGGCTCCATTGGTCT
TCCAGTGGGGCCTTAGCAAGCGCCAGAGACCTTGGCATGTGGGCAAAGTAGTCAGACGAGCGTTTTGTAAGCAATCGAGGTGTGAAACTCTCCA
AAACCCCATCGTAAACTTGGTATCCAGTACTTGCCAGGAGCTTCCAAAGTCCTGAAGAGTCCATGGAGATGTTCCTAGAGGCTGCTGCCTCTCA
GGATGTCACACTCACAGGCCGCTTGTCTTGCCCTCTGGCAGGTTTCTTCGTTATGGGAACAGGGCGTGCCCAGCGCAGTCCCAGGATCTGCCTT
TGCTTGGCCAAGATCCGCCGTCTCTTTCCAGCTCTCCCAAGCAATGGGCTTTCTCCTGGCATTGATTCTGAATAGCGACTTGTTTTTCCTTTCT
TGTTTGGGAAACTCTCTGTTTTGGTTCAAAACTTATTCGTTTGGCTTGCCTCTTGAGAAGAGTGTTATTCAAACTTATATTCATTGGTTTCATG
TATCACTGTCAGTTTCCAGGGGCCGGAAAGCTGGCATCCTCGCCTTGGTAATTAAAAGCACGGCACCTTCCCTCTGAACGTATTTGTCCTCAGC
AGTGACTTCACTGTGACTTACACTGCCCATCTTGGCCTCTGGGACAGCCACGGGTGCCAATATACAGTATGACCAGGTAGCTTCTTCATTTGGA
GGTGGCATCTCAGAATGCTTCTGCATTTTCTTCTTTGTAGATTTATTTATTAAAAACGATGCAGTTTTATTCATTTTTTTTCTTTTTCATCTTG
TTTGAAGTGCTACAGGTCCAGCCCAGATCCTCACACAAGTGCTGTCCCACTGAGCCACAATCCATCCCCCACCCCTCCTTTTGGGTAGAAGTGG
CTAACAGATAAAACAGCAGTACTTAAATGAATAGTTTAGCTCTCTAGGCATCACTTGGAGATGGAGAGAAGCAAGTGGTGGTTTTTTCCTTTTT
TTTTTAATGGGAGTGGACACTTGCTACTCTACTGCTCATGAATGGAAGGAAGAGCTTCCAAGTGTTGGTTTTCTCCTCCTGCTCCATGGGCTCC
ATGGATCAAACCCAAGACATCAGGCTTGGCAGTAAGTGCCTTTGTCTACTGAGCCATCTCTCTGATCCTTCCTTTGTTTTTAGACATAACTTTA
TGTATGCCAAGCTGATTTCTAATTCCCTGTGTAGCCAAGGGTGACTCTGAACTTCTTGTCCTGTATGTTCCTCTGCATGTTGGGATTACAGGCA
TGAACCAAACCATATCCAGTTGGGCTTTTTCTTGTTTTAATGTGATGTTGGGATGAAGCCCAGGGCTTTGTGTGTGCAAGCACTGTACCAACTG
AGCTCTTTTTCAAGCCTTGGGTGGTTTCACTCTTTTTTTTTCTTTCTTTCTTTCTTTTTTTTCCAGGGTGGAGGATGGAGTTCAAGACAGTGTT
TCTCTGTCCTGGAACTCACTCTGTAGACCAGGCTGCCCTTGAACTCAGAGATCCCCTGCCTCTGACTCCTGAGTGCTGGGATTAAAGACGTCCG
GGCACCACCACCCAAAGTCCTACTCTTAATGCTTTTTTTTTTTTTTTTAAAGATTTATTTATTTATTTTATATGTATGATGCACCAGAACAGGG
CATCAGATCTCATTACAGATGGTTGTGAGCCACCATGTGGCTGCTGGGAATTGAACTCAGGACCTCTGGAAGAGCAGTCAGTGCTGTTAACCAC
TGAGCCATCTCTCCAGCCCCCACTCTAAGATTTACTTTATTTTGGATTTATGTGTATGCATGTGTGTTTGCGTGTGGTTATTATGTGCACACGA
GTATGTGTGCCTTGGAGGCAGGAAGAGGGTGTCAGATCCCTTAGAGTTGGAGTTACAGATGGTTGAAAGCTGCCGGATGTGGGTGCTGGGAAGG
AAGCTCAAGTTCTCTGGGAGCAGCAAGAGCCTTGTAACTGCTGAGGCTTCGCCCTCTCAGGTGTTGGGAATGGATTCATCTCCATCTTTACCTT
GAATCTGTCTGTTTTCTGGTGTCGCAGCAAGAGGGAGATCCGTGCAAAATGCTCAGCACGCGGAGGAGGAGCCTTGGGAGGACAAGAGGGGTGG
GCTTTGATCTCAGGCTCTGCTTTCTACGACTTGTGAGATCTGTTTACAGTTACCACATGGCTCCTGCCCTCCTGAAGGCAGAGGTGTCGCTTTC
AACCCCAGGAAACCATCCTAATTGTTTGTGATAGTTGCTTAGCTTATCATTGTCCTCTATTCTGATCCATGGCACCTGTCCTCCCAGGGCTACT
GCATTGGGAACAAGTTCGTGAAAACAAATGATCGGGTTAAGGCAGAGACGGTACTAGCAATGTACGCCAGTGCTGTCCACGGTGCAGTGGAAAG
GGCAGCAGCGCCTGACCACTTACCCTTCTAGACCACAGTGCCTCTCTTGGGTCTGTGAAACTATTCCACCACTAGATGGGTTCTGTGATCCCGT
TCCTTACAACTTTCCAGAAACAGCACACTTCTCTGACCTGTCTGCTAGCTTGGGTATCATTTATTTGTAGAAATGAGGTAGGTATTAGGTAATC
ACTAAACCTGGACTCTGTGGCTCACAGTAGTGATACCATCATGTTTGATACAGCAACACGTTGTGTCATAAAACAAATGAACAAGAACTGGAAA
CTTTTCCAACTTGGTATTAACTAATGAAGTTAAACATTTACCTGTTGCTTTCACTAATTTTCCTTCTTTTTATTTTTTTTCTCTCCATTTCTTC
CTTCATTCCCTCTATTTTCAAAGACTCAGACTTTTGTCACACAGATTGCAGTCTTCCTCCTGCGTGCTGAGTGCTTGGGTCACGGGTACGCACC
AACACACCTGGCTTCGCTTTTCATTTACCGCTTCTACATATATTTGAACTTCACATGGAATTGAACGTTTGTATTACGTTTCTTGGGCTGACTC
TCTGTGTGTTCATGCCTGCCTTTGGTTCCTGTTCTACATCAGCTTATTGACATTTTGATATCTTTCTTGCTACTCCATGATGGTGACTCAGTTC
CTTTTCCAAGCCAGCCAAGCTACTCAACAATGAAAAAAATCCCAACAGGGATAACTAAGTGCACTCACCCCCCCCAGCTACCTCAGCACCTGAT
AATCATCTTGCCTAGCCTTTGTTTCCGCTTCACTTTCTAGACCTTGCTTGAAGAGTTACCTAGGGAAAGGTTGGCGACGAAAGAATTAAATAAT
GGAATTAAATAGAATTAAAAACAGAAGAGGAGGGATGATGGGTCAGTCCTAGCAACCACCCGGGATTCACTCCCAGGGACCCTCAGGGTAAGAG
GAGGGATTTAGGGGCTGCCCTTCGATTGCCACGGGCAGATTGTGTCATGCGAGTGAGCATGTGTGCACCAACCCATAAGTAAATACGTGTATCT
GTTTATTTACTTAATTGGGTTTTTTTTTTCTTTTAAAAAAAAATTGGGGGAGGGGGTGTTGGGATGTTCAAATCAGGGTCTCTCTCTCTGAAGC
CCTGGCTGTCCTAGAACTCAATCTGTAGACCAGGCTGCCCTCACTTTAGAGAGCCACCTGCTTCTGCTGGGATTAAAGGCTTTTATACCACGAT
CTCCTGGTTTAT
HUMAN SEQUENCE—mRNA
ATGGGCGGCGAGTGGGGAGCGGGGCCCGGAGTGGAGCACCCGCCGCGGCGGACTGGACCGAGCCTCGCCGGCGCGCACCTGCCCGCAGCGCCCG
CGGACGCGCAGCGCGGCCCGAGCGCGACGACCTGCCGAGCGGCGGCCGAGGCGGCGGTGTGGGCGCGTCAGGCCGCGACGAGGGCGCTGAGACA
AATTTACATGTATTGGAGACCAGACCAGAAGCCCTTCTGAATTAAGATCTCACATTCTTGAAGGTGGCATTGAAGAGCACTAAGATCGGAAGAT
GAGTGAGCTTGACCAGTTACGGCAGGAGGCCGAGCAACTTAAGAACCAGATTCGAGACGCCAGGAAAGCATGTGCAGATGCAACTCTCTCTCAG
ATCACAAACAACATCGACCCAGTGGGAAGAATCCAAATGCGCACGAGGAGGACACTGCGGGGGCACCTGGCCAAGATCTACGCCATGCACTGGG
GCACAGACTCCAGGCTTCTCGTCAGTGCCTCGCAGGATGGTAAACTTATCATCTGGGACAGCTACACCACCAACAAGGTCCACGCCATCCCTCT
GCGCTCCTCCTGGGTCATGACCTGTGCATATGCCCCTTCTGGGAACTATGTCGCCTGCGGTGGCCTGGATAACATTTGCTCCATTTACAATCTG
AAAACTCGTGAGGGGAACGTCCGCGTGAGTCGTGAGCTGGCAGGACACACAGGTTACCTGTCCTGCTGCCGATTCCTGGATGACAATCAGATCG
TCACCACCTCTGGAGACACCACGTGTGCCCTGTGGGACATCGAGACCGGCCAGCAGACGACCACGTTTACCGGACACACTGGAGATGTCATGAG
CCTTTCTCTTGCTCCTGACACCAGACTGTTCGTCTCTGCTGCTTCTGATGCTTCAGCCAAACTCTGGGATGTGCGAGAAGGCATGTGCCGGCAG
ACCTTCACTGGCCACGAGTCTGACATCAATGCCATATGCTTCTTTCCAAATGGCAATGCATTTGCCACTGGCTCAGACGACGCCACCTGCAGGC
TGTTTGACCTTCGTGCTGACCAGGAGCTCATGACTTACTCCCATGACAACATCATCTGCGGGATCACCTCTGTCTCCTTCTCCAAGAGCGGGCG
CCTCCTCCTTGCTGGGTACGACGACTTCAACTGCAACGTCTGGGATGCACTCAAAGCCGACCGGGCAGGTGTCTTGGCTGGGCATGACAACCGC
GTCAGCTGCCTGGGCGTGACTGACGATGGCATGGCTGTGGCGACAGGGTCCTGGGATAGCTTCCTCAAGATCTGGAACTAACGCCAGTAGCATG
TGGATGCCATGGAGACTCGAAGATCATTCCAACTTGGACGCGTTACCATGAGAGCCAACCGTACTAACGTGACAACCCTACACCTCCCCTCAGA
ACTTCAAAAGGGCAAGATCTTTTTTCCTTCACTTATTGCTCATATCCTATGAAACCAAGAGCACAATTCCCATTGAGAGAAAGATCTCTGTGCT
GTAAACTAAAACAAATTGTGCATTCCTTCCGGGGCCATCGTCTTTGTTTTCTTTTTTGTCTTGAATGAATTTTAAAAGGAAATATATAATAAAA
ATGTTAACCAGAAGGTAAACTTGAGTGTAATTGTCAGACAGACACACTTTTCCACCAGTGTATTTGAATTTTAGACCAGTGACCCTGTTTTGTG
GCATTCATGCAAAACATGCTGAGGGCTTTGTTCATCTGGTCATCGTGTCCAAATTTCAGTCATGTTTGTAGCAAGATTTTGGAAGCATTCATAT
TTCCTTTTTAAAATGTATTCCTTTGTGTTCAACAGTTAATCAAAACCAGAGAGTCTAGGCCAGCCTCTCTGATGTTGTCAATGATGTAAATTCA
GTCCCTGGTTTTTAATTTTCTCTCTGATGTCACAGATCATTGTTGCACACAAACGTGGCATAGAAAAGAACATGTTCAGAAGCCATGGGGCCAA
GCACAATGCGGGGACGGTCTCAAAATGCGTGATCAGAGAATCCTTCACCTTATGCTGAAAAGTGAGCTCAGATCCACCTCCAATGTTCCTCCTG
ACCCATCCTGTCTATCTTCTCAGTTGAGTTTTTAATCTCACTTTGGGTTTGCTTGTGAAGTTGGAGGGAAGTTTATAATAGCCTAACACTACCC
CACCCCCAACTAGGAGGAACCTCTCTTTTCAAGAGAGATGCCTGTCCTGTGCTTGGATAGTCAGTCAATTATTTGTGTATGAAACAATGTACAA
ATCAATGTTTTGAAAATAATGATCTCAGACTTTCTAAGTTAAAGTTTTAAAAATTTTGATTGTTTGCCATATTGGGTGGGTTTACTCTTAGAAT
CGCATGCTGTAGAAAATGCTCAAAAGTGCATATGGGACTCAGTCCTTAGGTGTTCTTTTTCTTTTAAGAAATAACCTCTTACAGTTGTAACCAT
TGCGGCTCTGTCCACTTCTCGTTGCTGCTCTGTGGCACATATCGGAAGCAGTACAGCGCGCGGCTCTACACGCTTGGGTAGCGGGATAAGTCAC
TGTTTTCTTTATTTCTTTAAAAAAAAAAAAAGTTCTGTTGCAAACGACTGCTGTTGGATTCTGAGGGTGGGGAGGGAGAGAGAGGGAGGGAGAG
GGAGTGAAGAGCCTGCCCTCCTATAGTGGATTCTTCACGGGCCCTCCACATCTGAGCTGGCTCATTCCCATCACACACAGATTGTCCTGGTGTT
CATTTCAAGGCCAGTTGTCAGCAGCAGCGTTTGGAAAGCAGGTTCTGTGGGACCCCCCGCCCCGCCCCCCGCACTCCTTCATAGCAGCAGTAGT
GGCTTCTCCATCCTGTTTTCTGCAACATTCTATACAAAACTGTGCTGTGACCTTGCGGTAGGCCTGGATCTGGCAAAGAGAATACAAATGAAAC
CCCTTCTTTCTCTTTCCGTCCAACAACTCTGTAGAGCTCTCTGCACCCTTACCCCTTTCCACCTTTTGTATTTAATTTTAAAGTCAGTGTACTG
CAAGGAACCTGGATGCAAGATAGATACTATATTAAACTGTACTGTTATTTAAGATGTAATAAAGCAGTTTGACATGAGGG
HUMAN SEQUENCE—CODING
ATGAGTGAGCTTGACCAGTTACGGCAGGAGGCCGAGCAACTTAAGAACCAGATTCGAGACGCCAGGAAAGCATGTGCAGATGCAACTCTCTCTC
AGATCACAAACAACATCGACCCAGTGGGAAGAATCCAAATGCGCACGAGGAGGACACTGCGGGGGCACCTGGCCAAGATCTACGCCATGCACTG
GGGCACAGACTCCAGGCTTCTCGTCAGTGCCTCGCAGGATGGTAAACTTATCATCTGGGACAGCTACACCACCAACAAGGTCCACGCCATCCCT
CTGCGCTCCTCCTGGGTCATGACCTGTGCATATGCCCCTTCTGGGAACTATGTGGCCTGCGGTGGCCTGGATAACATTTGCTCCATTTACAATC
TGAAAACTCGTGAGGGGAACGTGCGCGTGAGTCGTGAGCTGGCAGGACACACAGGTTACCTGTCCTGCTGCCGATTCCTGGATGACAATCAGAT
CGTCACCAGCTCTGGAGACACCACGTGTGCCCTGTGGGACATCGAGACCGGCCAGCAGACGACCACGTTTACCGGACACACTGGAGATGTCATG
AGCCTTTCTCTTGCTCCTGACACCAGACTGTTCGTCTCTGGTGCTTGTGATGCTTCAGCCAAACTCTGGGATGTGCGAGAAGGCATGTGCCGGC
AGACCTTCACTGGCCACGAGTCTGACATCAATGCCATATGCTTCTTTCCAAATGGCAATGCATTTGCCACTGGCTCAGACGACGCCACCTGCAG
GCTGTTTGACCTTCGTGCTGACCAGGAGCTCATGACTTACTCCCATGACAACATCATCTGCGGGATCACCTCTGTCTCCTTCTCCAAGAGCGGG
CGCCTCCTCCTTGCTGGGTACGACGACTTCAACTGCAACGTCTGGGATGCACTCAAAGCCGACCGGGCAGGTGTCTTGGCTGGGCATGACAACC
GCGTCAGCTGCCTGGGCGTGACTGACGATGGCATGGCTGTGGCGACAGGGTCCTGGGATAGCTTCCTCAAGATCTGGAACTAA

The application's sequence listing, which the Patent Office published only in electronic form, follows.

SEQUENCE LISTING (241 sequences)

SEQ ID NO: 1 - DNA, 25032 bp, Mus musculus
  misc_feature (623)..(642): "n" at positions 613 to 642 can be any base.
  misc_feature (1720)..(2727): "n" at positions 1720 to 2727 can be any base.
  misc_feature (9567)..(9586): "n" at positions 9567 to 9586 can be any base.
  misc_feature (13042)..(13295): "n" at positions 13042 to 13295 can be any base.
cttccttctcccttcactgaaactgaactgaccttgggatggggaaacccccacttcatggcacccactctaaaagatggctgttggtcaaacagcctagcaagctctaaaccaggtactctgcacctgccctctgacgccctgggattatatggcagagggtaagaacaggaatgacataattaaaaccagcctcagaagctgctgaaggcattagaactaaagcccagaaaagcaacaaactgttaccatcaaagcgtgaaagaggaaacggttaatcttttcaagggaagtgaagcaactcggaaggccataggaatccacatcacctgaactgcagaccaagccttggaactggggctttcaagctacatctgctactcacacctttgacctctctgggtgaattgttttcttactagtcaccaatgttttcaaacctggattttcacactccctggaatgcctggaagggctgctaccagcggacctatattgcagggccaccaactgccaggttctgagccacagctcttagctaggaccaagcaaatggtccccagtgtgttacagtctcctgtcctccaaagtgagttcctcagatgcactcctttccaatcctnnnnnnnnnnnnnnnnnnnngattttcctgtgggcacatcagcttcctatgctgaaaaaaacagagagtagtagaaagggaaagcctaatcaagcctgcagctgagagattgccctgtgccacaacccccaagtccacccccttataggacagcaccttagtcattcagggaaagccttaatggattgccttgattcgccttgattccataatgtaattgaccatgagtagagcaagctgcaccaactcctatcgtaaatgaagacaggggtgagactggaagggtcagatactggaaaatctgagattctctgccttggtttctcatcttgatcagtttcaaccaaaaaagaaggaagctttaagcaggactccttgtttttgtcaaaagaatatgctaaagtacacattcccattattgctcatgagaccttgttcatatgtcaccaagaatattcagtggtatatgtttgttcataccttcttaaacataatttaagatttctttatttgatgtatgtgttttgcttgcataatgtatatgtaccacgtgtgtgcttgtacctgcacaggtcaggagaaggtttcagtttccctggattgatgactgtgaactatcatgtgtatgctgtgaactgaactaaggtcctctgtggaagcaacaagtgttcttaactgatgatccatctctccagcttccgctcagaaattttcacacttaaagaaataagggctggctggtgagatggctcagcggttaagagcaccgactgctcttccaaaggtcctgcgttcaaatcccagcaaccacaaagaaataagggcaggggctagagagatggctcagcagttaagagcactgactgctcttccagaggtcctgagctcaattcccagcaaccacatggtggttcacaaccatctgtaatgtgatctgatgtccttttctgatatgtctgaagacagctaaattttactcatatacataaaataaagaattctttagaaagagagaaaggaaggagggaagggaggaaggaagggagagagagagagaaagaacggaagggagggagggagggagggagggagggaggnnnnnnnnnnnnnnnnnnnnnnnnnnnnnnnnnnnnnnnnnnnnnnnnnnnnnnnnnnnnnnnnnnnnnnnnnnnnnnnnnnnnnnnnnnnnnnnnnnnnnnnnnnnnnnnnnnnnnnnnnnnnnnnnnnnnnnnnnnnnnnnnnnnnnnnnnnnnnnnnnnnnnnnnnnnnnnnnnnnnnnnnnnnnnnnnnnnnnnnnnnnnnnnnnnnnnnnnnnnnnnnnnnnnnnnnnnnnnnnnnnnnnnnnnnnnnnnnnnnnnnnnnnnnnnnnnnnnnnnnnnnnnnnnnnnnnnnnnnnnnnnnnnnnnnnnnnnnnnnnnnnnnnnnnnnnnnnnnnnnnnnnnnnnnnnnnnnnnnnnnnnnnnnnnnnnnnnnnnnnnnnnnnnnnnnnnnnnnnnnnnnnnnnnnnnnnnnnnnnnnnnnnnnnnnnnnnnnnnnnnnnnnnnnnnnnnnnnnnnnnnnnnnnnnnnnnnnnnnnnnnnnnnnnnnnnnnnnnnnnnnnnnnnnnnnnnnnnnnnnnnnnnnnnnnnnnnnnnnnnnnnnnnnnnnnnnnnnnnnnnnnnnnnnnnnnnnnnnnnnnnnnnnnnnnnnnnnnnnnnnnnnnnnnnnnnnnnnnnnnnnnnnnnnnnnnnnnnnnnnnnnnnnnnnnnnnnnnnnnnnnnnnnnnnnnnnnnnnnnnnnnnnnnnnnnnnnnnnnnnnnnnnnnnnnnnnnnnnnnnnnnnnnnnnnnnnnnnnnnnnnnnnnnnnnnnnnnnnnnnnnnnnnnnnnnnnnnnnnnnnnnnnnnnnnnnnnnnnnnnnnnnnnnnnnnnnnnnnnnnnnnnnnnnnnnnnnnnnnnnnnnnnnnnnnnnnnnnnnnnnnnnnnnnnnnnnnnnnnnnnnnnnnnnnnnnnnnnnnnnnnnnnnnnnnnnnnnnnnnnnnnnnnnnnnnnnnnnnnnnnnnnnnnnnnnnnnnnnnnnnnnnnnnnnnnnnnnnnnnnnnnnnnnnnnnnnnnnnnnnnnnnnnnnccctcctcctagctttctgaagccagtcttctccggtttgccttcagaacaagatgtaaaactctcagctcctttagctccatgcccggactggatgctgccacacttcctgccttgatgataatgaactgaacctctgagcctgtaatccagccccaattaaacattgtcctttataagagttgccttggtcatgatgtctcctcacagcaatggaaaccctaactaagacagcaagtttagcagtaaatggggtggcagagacagggtgatagcaggaaatactttgacatagctagtgagacagcaggtaatgacagtagccaaaccagcctgataaacaaacagctagcccagaatgcatagcacagcagcaaaaacattggagaactggctcaatgacaaagtggaaggaggaaaggcaattcctaaatgttgtcatctgatcaccatatctgcacactgaagcacacacacacacaaataaacaacactttaaagaaataaatattacatgatgattgcaacaaccacaggccatcggaaaagaaagaggaaaaaaaatcaatggagcaaagagaccaggctgcacacacaggaggaacatcaggagacccaaattcacccaaatgttctcaatgtcagcatgtttgcatctaggtcccaacactctaaggggattggcaggatccctgaccccgactcactaaataccaataggaagccccaacccccaccacctataacaacctcaaatatctcctcctgttggtcaatgtcccgtggaagcaacattacctctagttgagaggtactgatctctagaatccaaaagtgtgagcatttccagaagctttcccagcaagcaacaaaaaagagatggtctcacggtcaccggttgtggggaagatagcttgagtgcctttagggaggttcattcaatgataaagtccacatacagtagtcaggagggaaatggagaaggtgaaagtgagagcaagcaaggctgagctgcactcaaaattctacctacagaagtcaagagctgtgacccatagtttggggtctgttctagccaataagaggcacaggctactattgcactggcttctaaatgaaagtcaaagattacggacagaaaaaaaggaagaaaaaaaagtaaaaaagaaagcaagacccgtcatgcacctcctccccagtcacctttaccccgactcagcaagggtccatcatggagacagatgccgcccaaaaggaccatcacaaaggccggccagtgaacaaaagtgcaagattgacttgggtttgccatttacagaacaataaacgaagcctttgaagcactgttaaacaaaagagccatttgtctatgctggtggctacaaaggagaacaggattgcagcagaggactaagaaaagaaagagaaaatgccaaactgagatgtgcctggactttaccgggtcctgcccagagaccttatatgccaggacctaagatctaaaagccactgggtaagaaaacaatcaaatatgcttaatgcaatacaggcaatgtaggttcttgggtattgtgttaaaaatatctactaattttttttccttgtcagctgctttaatttatgcagtatgggaagggatcacatcggaaaagacaagggaagaacagaaaagaaacaccgtacattttcaaatgcacaaagatctcatgcactgccttctgtttctgtgcctatgaattagtgatgctaaattttatcttattttcttgcctggtgggggggggggggagggcggggagggtgactgtgttcctctctgtggtggcatagctgccatttacatgcctgtgaggtcctcttttcctttagcatgccatggctagcttggtttttaatctaacagcgcttctttccaaatgatgtttctgcggcagacaggtatttatcattgtctttgctctcgtcacttcccgacaggactcgtgagaactgaagtaattttgaaatcgtagcccgtccttagggtctcctgcttctctcccgagtaggagctaggtttttgatccagtttgtgtggatttagtgactgtttttatacatggaaggttagctcagtggtgatggttgggggggggggctctttgaagcatgcagaaaagagattcaagaacattgggggatgttatctagtggttttctccttgttgttacaagagtgactttggagaagaggggtatactttggctcagagtttgacggaaaaatctgggatggaagaagtcattgtgggagcagctggaagctttgtcacttggggagccttgtcatactctagccaaagttaggaagcaggttggagggtggggagacagattctggagtttggcgcttctgttttataccttctctacccacattgtgaatagacctgacccctgggttgacacagatcacattagtgtgagtaggtcttccttctacacatatacctctctagaaataccctcataggtaacaccagatctgcatctcctaagtgatcaagtcgacaatcagaactaaccatcataggcagggctgcaacacaccttgaatcccgtgacttaagaggcaaagacaggtggctctctgagttcaaggcctgcctggtctacagagtttcaggacagtcagggaaaccctaccttgaaaaacaaaaaacaaaaaacaaaaaacaaaaaaaaagaaaagaaaagaaacacccaaattaagcgtctcaaggatgaccgttcttggtatgttattcacaccacatatttggacctcccctcttgtgtctttgcaaagtaagatgttgggccgacttgttcattctagctgggaatatacagttcagtgactgaatgaatgctgaccacaaatgaggccctgtttcaatactgagcacaccttcctctccttcccataacagccctttctttctggaggtcttcctttttttcttaaaaatgtaagagcatcatgactgttagtatgagacagtgaggttctgggcactgtgattcttagtttttcatactgtaagagggaatgtactctctgccatcgggacacccagtggaactgctcacctggagtcttgcctccacgaagactaggatcttctggaaagctgtgtgctttggacatctaactcacatccagcaatagctcccagaaaaggacctcagagttacaacgttccagaggaacaaaacagtgggacatcttccaccatcttccaaaaggaaacctcagaacagaacaagcaacctttgtccttagtaagcttgtccacagaggcacgcatggctgtcatccgaacactgggaagtccaaggcaagcgaacagcaagttcaaaactagcttgaactggctgcatagtgaggccctatctcaaaacatcacgggctaactatgtagctcagagacaaagcccttgtccagtgtttgaaagactctggatttgattcccaacaataaaaacaacaacatacactcagatactcacacacacacacacacacacacacacacacacacacccaactccttaaacactaaaatttagtgtaggtagagtggcacaggaaactctaattccagcactacaaaccctgaagcagtttttattttagttagaagccatcctaggctaccttctcaacaagaacattccaatcactacactttattgacaagattataaacttgtggctttcctgtcctttttaaagtattttttaaaatttattttacaatgaagtggtaccctttcatttcctaatatgtaaaatggggatgtcccctaccttcctgttacttaaaagcaacaccccgggtgatgtcatcaggctggggtacagtacgggcaagtccccaaaccacaggctattccgctacctgggttcccacacctacactggaccggcatgatttggacgtaagatcttaaaataatccataattacaccttttcaaaaaggaccttttgagggtcagctctacccactgtcatatctgttggtgctgtcctgtgtttagggagaggcagagagaaagcgggtgtgcgcaacctctaagagagtaatagtaaagagacaagcctaggaaatcttccccaagaggccttttggggaaggctatccccccttccgtggatgttgaataccttgcctgttgctcagatgcagtcaagcatctgatgatgcttgaggcatgatgctgagaccactgtgtaggttggtacaaattccctttctattatacccacccttatgcagttatttgggtttaaattttcaacgttttaaaaaaaaaaaaaaaaagtattgccgggcaatagtgacgcaggcctttaatcccagcactcgaaagacagaggcaggcagatctctgagtttgagaccaacctggatggtctaaggccttgaactcaagagatctatccaccagcttgtatcccatttaattgagtgatttgtttgctctctctctctcccgctccccctctctcccccctctccctcccctttttcagttctttatttatatttgaatattatctctctctcagatgtgtacttggtgacggtcttttctacaaaggattatctgtttcatgacacgccatttattaatctgcttgtccctggagcttctgtacagtagcgtgacctgatcctctagcttctccatcccagatgattgggattcaaggcattcatcaccacgcctacctaaaattccaaccttttaataaaatggctctctaaaatattttggcaaaggaatctcactctttctcttcactaatatagttcaaccacccaattcgtaagcagtcgggctgagggtgagcatccttaagaacataaaagcaaaatttggaggctcaagattcagtttagttgctagagggctcacatagcatgccctccccacccgggattccattctcatttatcgaggcataaggccaggtgtggtgggatatgtgctgggatgcataagatcttttataaagaagaggaagaggaaaaacagttatacaaaactaataaaactgtgtgagtttcaggctagcaaagaatagtcgtgagaatctctctcaaaaaaaaaaccccaaaataataataatgataataatgataataataataataataataaaacaaggcaataataagctaatgctcctgccttgcattctgactccttttgcccagtaaaattcaatgctctgctttgacacgtccagcttacaacacgacaaaggtgtgagacatgggtgctaaaacttgttctattgcctttccgtttctgttagatctccttcacttgtatacctgtgactcattcattttccccatccacaactagggctctgttttgggtgactgtcagaaagtagggatgggttcatctactccccctctttgcaactgaatagccacctctgaaccatttttttctctagtaatttctcttcctttgcctcctttgcagcctaaaagagtcatttaaaggatgaccggaagcttgtcttaggcaaggaagcatcttcccagaacctggaaaccctgcagccctgcccccatccgacctccgccctcgttggcttcgcaacgctgtggtctctgtggccagtagagggcacacttactttactttcacaaatccgagagccacaacccgggtggtggggggtgagggggcggggaaagagtctctgcagcaaaacgcagactagggattggtggctcttggtgtttgaggcaaaatcctagaggctgtagtcattttgcaatccttaaagctgaattgtgcaatgagctcgatgaaggaagatactatcattcaacagctgaatcctaaattgcaaactcagtggctaataacaactttgaacaatgagcaccttatacacgctactgtattttcttttctttcttttttttttttttttttttttttaaaccgggtagcagtgagagaggtttctttaagtgccttggggcgaggagtccggaataagaagacttctttgggttttaaagtgtaggataagcaaatcccgagggaatatgcattatataataaatctagaaccaatgcacagagcaaaagactcatgtttctggttggttaataagctagattatcgtgtatatataaagtgtgtatgtatacgtttggggattgtacagaatgcacagcgtagtattcaggaaaaaggaaactgggaaattaatgtataaattaaaatcagcttttaattagcttaacacacacatacgaaggcaaaaatgtaacgttactttgatctgatcagggccgacttttttttttaagtgcataattacgattccagtaataaaaggggaaagcttgggtttgtcctgggaggaaggggttaacggttttctttattctagggtctctgcaggctccccagatctgggttggcaattcactcctccccctttctgggaagtccgggttttccccaaccccccaattcatggcatattctcgcgtctagcgccttgattttccccaccccagctcctaaaccagagtctgctgcaaactggctccacaggggcaaagaggatttgcctcttgtgaaaaccgactgtggccctggaactgtgtggaggtgtatgggggtgtagaccggcagatactcctcccggaggagccgggtagagcgcacccgccgccactttactggactgcgcagggagacctacaggggaaagagccgcctccacaccacccgccgggtggaagtccgaaccggaggtgctggagtgtnnnnnnnnnnnnnnnnnnnntgacgcggtccagggtacatggcgtattgtgtggagcgaggcagctgttccacctgcggtgactgatatacgcagggcaagaacacagttcagccgagcgctgcgcccgaacaaccgtacagaaagggaaaggactagcgcgcgagcaagagaaaatggtcgggcgcgcagttaattcatgctgcgctattactgtttacaccccggagccggagtactgggctgcggggctgaggctcctcctcctctttccccggctccccactagcccccctcccgagttcccaaagcagagggcggggaagcgagaggaggaaaaaaaaatagagagaggtggggaagggagaaagagagattctctggctaatccccgcccacccgccctttatattccgggggtctgcgcggccgaggacccctgggctgcgctgctctcagctgccgggtccgactcgcctcactcagctcccctcctgcctcctgaagggcagggcttcgccgacgcttggcgggaaaaagaagggaggggagggatcctgagtcgcagtataaaagaagcttttcgggcgtttttttctgactcgctgtagtaattccagcgagagacagagggagtgagcggacggttggaagagccgtgtgtgcagagccgcgctccggggcgacctaagaaggcagctctggagtgagaggggctttgcctccgagcctgccgcccactctccccaaccctgcgactgacccaacatcagcggccgcaaccctcgccgccgctgggaaactttgcccattgcagcgggcagacacttctcactggaacttacaatctgcgagccaggacaggactccccaggctccggggagggaatttttgtctatttggggacagtgttctctgcctctgcccgcgatcagctctcctgaaaagagctcctcgagctgtttgaaggctggatttcctttgggcgttggaaaccccggtaagcacagatctggtggtctttccctgtgttctttctgcgtcttgaatgtagcggccggttaggacagtctttcttccattcctgtgcttttgacacttttctcaagagtagttggggtaggctggggtagatctgagtcggggtagagcgacttgtcaagatgacagaggaaaggggaagggaaaaaccgggatgcattttgaagcggggttcccgaggttactatgggctgacgctgacccggccggttggacattcttgctttgctacattaattgatatgtgtcctttgaggggtcaaaccgggaggtcgcttcgtggtggccaaagaaagcccttggaatcctgaggtctttggagaagggattaccttttgcgtttgggagcgagaaggctccgtagcttctgacttaccagtctctgagagggcatttaaatttcagcttggtgcatttctgacagcctgggaccgacacggaggtgcgtcccgcccgccaatccccggcggcgatcgcaacccgtccctgagccttttaagaagttgctattttggctttaaaaatagtgatcgtagtaaaatttaagcctgacccccgcggcactaggacttgatgttgggctagcgcagtgaggagaagcaaaattgggacagggatgtgaccgattcgttgacttgggggaaaccagagggaatcctcacattcctacttgggatccgcgggtatccctcgcgcccctgaattgctaggaagactgcggtgagtcgtgatctgagcggttccgtaacagctgctaccctcggcggggagagggaagacgccctgcacccagtgctgaatcgctgcagggtctctggtgcagtggcgtcgcggtttagagtgtagaagggaggtgtctcttattatttgacaccccctccccttttatttcgagaggcttgtgatagccggagactgagctctctcctccaagtcagcaatcggaaagaaaagccggcaaaggaaggaagggggcgcgctgggggtggagaaagaggagggcggagaggggcggcggcgccggctgggtaggagcgcggcgacggcgcgaatagggactcggacccggtcggcggcgcagagagccggcacacgggagggggccgagcgacgcggcgcctctcgcctttctccttcaggtggcgcaaaactttgcgcctcggctcttagcagactgtattccctacagtcgcctccctcagcctctgaagccaaggccgatggcgattcctgggcgtctgcagggctaagtccctgctcgaaggaggcggggactcggagcagctgctagtccgacgagcgtcactgatagtagggagtaaaagagtgcatgcctcccccccaaccacacacacacacacacacacacacacacacacacacacacacacacttggaagtacagcacgctgaaaggggagtggttcaggattggggtacgcgctgcgccaggtttccgcaccaaccagagctggataactctagacttgcttcccttgctgtgccccctccagcagacagccacgacgatgcccctcaacgtgaacttcaccaacaggaactatgacctcgactacgactccgtacagccctatttcatctgcgacgaggaagagaatttctatcaccagcaacagcagagcgagctgcagccgcccgcgcccagtgaggatatctggaagaaattcgagctgcttcccaccccgcccctgtccccgagccgccgctccgggctctgctctccatcctatgttgcggtcgctacgtccttctccccaagggaagacgatgacggcggcggtggcaacttctccaccgccgatcagctggagatgatgaccgagttacttggaggagacatggtgaaccagagcttcatctgcgatcctgacgacgagaccttcatcaagaacatcatcatccaggactgtatgtggagcggtttctcagccgctgccaagctggtctcggagaagctggcctcctaccaggctgcgcgcaaagacagcaccagcctgagccccgcccgcgggcacagcgtctgctccacctccagcctgtacctgcaggacctcaccgccgccgcgtccgagtgcattgacccctcagtggtctttccctacccgctcaacgacagcagctcgcccaaatcctgtacctcgtccgattccacggccttctctccttcctcggactcgctgctgtcctccgagtcctccccacgggccagccctgagcccctagtgctgcatgaggagacaccgcccaccaccagcagcgactctggtaagctaccccattcacagcagggtaggaagcgagaggttggatggacctccttctccaccactcattggcattaattcaattggcctccggggctccccctttctttcccttctgtctaagagctcttcatccctggattcccgtgnnnnnnnnnnnnnnnnnnnnnnnnnnnnnnnnnnnnnnnnnnnnnnnnnnnnnnnnnnnnnnnnnnnnnnnnnnnnnnnnnnnnnnnnnnnnnnnnnnnnnnnnnnnnnnnnnnnnnnnnnnnnnnnnnnnnnnnnnnnnnnnnnnnnnnnnnnnnnnnnnnnnnnnnnnnnnnnnnnnnnnnnnnnnnnnnnnnnnnnnnnnnnnnnnnnnnnnnnnnnnnnnnnnnnnnnnnnnnnnnnnnnnnnnnnnnnntcaggaatttcatttgggtttttaaatcttctggcttatctttcagctccatccactccctttacccctcctaagcattttaattaccctgggaagggtgtgaatgaggataaaggaactgatctggaggggggtgaattacctgcttcttttcttgactgccagaagaatatttgaatttaatggatacgtttgtctaagacccaagagaagcaatgacagaagctgggacagcctttatagccttagagccaggcactagtgaaagttcctaaagaattgaagagctgggctcttttgggtgttttgttttgctttgttttttcgtcctcttttgaacacttcaaagcaaattctgttcaatttggacttctccccccgtcccaacactcccccaacaccaggacgtttggcaaagctgcaagactttttttttttttttttttttttaattgtgcttccagtaaaatagggagttgctaaagtcatagcaagagatttgcagctatccctcacgggacctgaaaggttctcggtaaagtcccttaaaaataggaggtgcttgggaaatgtgctttgctttgggtgtgtctgaagcctcattaaatcttaggtaagaattggcaaggataccatatcctggtacatggtaattttctcacctgtgccctaaccctgttctgcctttctgggagaagggaagatggtgtctggatctgattcttactttcttccctttccaacttggtatttggatagcatcggtcaaatcctatgtatagcgtccgggattcaggaggcgtggctaactgtgatcttccacttcctcccttacagaagaagagcaagaagatgaggaagaaattgatgtggtgtctgtggagaagaggcaaacccctgccaagaggtcggagtcgggctcatctccatcccgaggccacagcaaacctccgcacagcccactggtcctcaagaggtgccacgtctccactcaccagcacaactacgccgcacccccctccacaaggaaggactatccagctgccaagagggccaagttggacagtggcagggtcctgaagcagatcagcaacaaccgcaagtgctccagccccaggtcctcagacacggaggaaaacgacaagaggcggacacacaacgtcttggaacgtcagaggaggaacgagctgaagcgcagcttttttgccctgcgtgaccagatccctgaattggaaaacaacgaaaaggcccccaaggtagtgatcctcaaaaaagccaccgcctacatcctgtccattcaagcagacgagcacaagctcacctctgaaaaggacttattgaggaaacgacgagaacagttgaaacacaaactcgaacagcttcgaaactctggtgcataaactgacctaactcgaggaggagctggaatctctcgtgagagtaaggagaacggttccttctgacagaactgatgcgctggaattaaaatgcatgctcaaagcctaacctcacaaccttggctggggctttgggactgtaagcttcagccataattttaactgcctcaaacttaaatagtataaaagaacttttttttatgcttcccatcttttttctttttccttttaacagatttgtatttaattgtttttttaaaaaaatcttaaaatctatccaattttcccatgtaaatagggccttgaaatgtaaataactttaataaaacgtttataacagttacaaaagattttaagacatgtaccataattttttttatttaaagacattttcatttttaaagttgatttttttctattgtttttagaaaaaaataaaataattggaaaaaatacaattgggccaacttgtgttttctttttcctcttcctcaaacttcctttcctcaattacagattaaaagaatttgaccattttcacagggtaggtttacaaatatgggaaggggttatcattgttaaaatggggctgggggtcctcaggatttctaagttgtctacaggatgctttctgtggatagtaataaaaaccagagctgttagttaggaatgggcaaaaggcaagtgagaaggctagatgcagggaagggaaaagcaagaggttaaagataacagctaaatatacaggaggaagagatggcagaatctcctacagttaaccgaagccattccctggttcacctcaacccaaggactctgccctgccaaagaactggtgaggggagggagagagaaccaccgtttgttccttgcctcttgctcccaggtgatagtcccttcacatcagtatctcctatgcttctgaaaaaaacagaggaagagcattaccactgctaagttgatcctggttttccaaacaaggacatacaaaggttcagagggttgcagagcttaatgggtacgaacacaacaaaaataacccagggcccctgtcttgaaaacaagccttgctgccttgcttagttgggtgtccttccgctggttaggggtctgagaatgagcgctacaggctccattaggagctttgacagagtgccacgaaagaggtactatgatctctttatacctagtacaggtagaaacagacatgaaataacccatccatgcacccaggggattcaaaaccactttatccttagtgcatccaggaggaagatcctagctacgaaggagagggcaggagtcattaaagcttcactactcaagaactggtagacttcagttcccctccttgtttgtggattggggggttggggtggagggtgttgtgtgtactcagaggcacatagctcactcctaccttacccacttagtttttaacatcagatccctgcttgctcctgggaagaagccagtttagaagtgctactggtcagatcataaaataaaaccttgttttacatgagtcattattttagaaattgcaagctcgccttcctcccaagcactttcacacactcatgacacacgctcatcaatggcccatgagaaagccttttggaacaggtatcttattaattataagcctctgaaaagccacaatccaaaccagaaactgaaacatgtaggtaaagtccagggagaaaggtaccctaaatgtcctaaatgaccccattgtctcagagaaggtctctagcatcctggagtgtctttgggactttaattcaccatcattcataaaccaataagtaattactatctttgacaccccccccccatgatctattgaagcgtttaacatttagtttttgatcttatttttggctcttttagactcaccctcagcttcaaactgttacaccctctatcctacattcaaaagaaaacacaaaccccagtagtagtttgaaatactttgagtagttcaaaggattagcaaaaggggggagcagggggtgctcttaaatagttccctctttttcccctttgtgagcctaggctggagtgcagccctggggtgactcacttgagacctgggaaggtgttaggttgaatcactcagtccaggcaagcccaaagaatagaggaaagcattcctcattaggaaaacaactcctgttccaaatgatcaggaaacaagtttagagattcagatttggctgtggggatggaatcgaagtatcacagctccctatctgggcacttctcagctttaccaagccagggaatggtctgaaaacaggacatcggccagcttccttccagaaagtcaggctgatcttgaccataacacaggaaggctctcccagccaatctggagtcccaggggtctgcaacattgtgcaatcaaatttatagataacaatcacgatgaggggtgaagtgggaggagctttcagcttggtctgggatatacaagaattagctagtctcttctgttgttcacccatgacactggaactcagtttccccgagaggatccctgggatggtgctcttcaggataaactgagtgaggaggaagtgtgactttatgctatcattcggggacaacactaaaaagcaatcaattacactttaagttgaacaaaagtttcacaataccaggatagtgcttgagtcatccaaagcttgaacacgtatgtagagtcttctgctgttctttaagatggactttggcactaaccttggaaaagagggccaaaaaacccaccccccaaaaacaaacagaacaaaaaacgtgaggggattttctgtggtttgtttacaataagagatgagtcacaataatgatttttttttttttttttagcatgactgctaaggaaccctgaagcatttcttcccaacaaaaactaatctttaggttataacatgctggaagatgagcttcaagcctgtctataaatacatcactgggtatcttcagggaacaaactcttcacttaaggttagagaccatcctggatcgatttcaagaacagaggtttattttaaacaatgaagcctgggctagagatgtcgttcagtgataagacacttgtctagcatgtataaggacccatgcttgacaccacaggaataaataaaaccaaaaatgaggttcctactcattccccaaactttagcaattttggtggtggtggtggtggtggttcgacgtctttccagagaaatccaacaaactgccaatttagggaaaacatctagctctagcgactttgccaaactggtgtgagttgactcaatgactgagtggatttcctttttgggttttacttcactcaatattggtctacactaagctctttaggaagacagggttgagagaggaacaagtgttaatgggatgtagatcctctgaggctgaaaggaatgtcctttgtctctaaacaatgccgaggggctcaggaacactctcttccagtcttcacccgaccatctcattaaaggctaaactctccagttcgggtctatatggctaggaaagaggagctttggggaaagctctgtcagaatatacctgctttctgcagggggcgggaggacccccacaaacaactcagctggagaacaattgttagatgtgacaatactgaagtttgtacacagacatgtgaaattgctggcctgaagtcacataagcactaactaacgataatagcaattaatgtttactgtgtgctaaaagtttgacatacattatctccttttattcccaaagcaaccccctatacacacacacacctcctttttggttttggttttactttttaaattttactattaaattttaaatatgttttttttttaaatttactgcactagagagggaacctagaacctcctgcatgcaaggtaagtgatcaatgggtgagtcacatctctatagagattgtaggttgtttcaccaaaagtattagggcatttcctacagagtggtggaagttcgagtcctgggaacatggaataaggatggaatccagtaagtcttgagaaagaagctaaaggagaaaatgtcagcagcagatggcagggaagcaaagaagaaggagagctaaaaccaacaagctaaaaccaaaaacgcttgctatttgaactgtgcctaaggtagcaggaagtacagcaaggatccactggcttagtgagggaatgcttctctaggcctctcctatccacttccccttccacccagtatcctcctactccttcatctgctagagacaactgcccataggtagttaattagctgtcccagcacccaactctcctgcagtactttggttctgtttatttgttttggcaataggatctcattaggcaggccatactggcctcaaactctggaatttcttgcctcagcctcttaagtgttgtgttgggattaccagtttgggacacttattctccagctttcatgcagggctttattcaggaatttccactgtgtgattctaggatgcaaatactagttctcattccctgagggtttaattgttgttgttgtttcgttagttggttggttttgggttttgttcattgggttggtttgggttggttttggtttttcaaaacagggtttctctgtgtctgagaaccattgtcttttctaccactgcaaacccaaccatcttttcaaaccactggtaagccaagtcctttctggattaagtctgaagccattctccactcctattcgatacacttactacctaccacaaacacggcagcctggcagcctcaatgccagttttgggcttctccttgtatgcttggagaccagttgtcttcatcatcagatcaaccccttgaagaatggaagttcattggtcttgcttaatcatgcctgacaagaaagtgcaattcactaattctgtaaacatctaagtgaagggctctttgatgggctcaatggtgcatcagacctgagtaaggggtggagtagaagcaaagttgtttcaagttgcatagcgagaaaggtcaaggaaagagatgggggttcatcaggtgaagggaaggattttgattagacttgctttgcttgatttggtttttgagctgaaaagacaggaagcctaattcatttccatgatagtaggctagacttgagagggaaagaactgctgacagaaaaggaggggaattgtactgactggttttgtgtgtgtgtgtgtgtgtgtgtgtgtgtgtgtgtgtgtgtgtgtgtgtgtgtgtgtgaacttgacacaagctggagttatcacagagcctcacttggggaaaagcctccgtgagatccagctgtaaggcattttctcaattagtggtgaaggagggcctatgtgggtggtgccatccctgggctggtagtcttgagttctctaagagagcaagctgagcaagccaggggaagcaagccagtaagtaacatccttccaagacctctgcatcagctcctgcttcctgacctgcttgagttccagtcctgacttcctttggtaatgaacagcagtgtgtaagtggacagtgaataatccttttctttcccaacttgctttttggacatgatgttttgtgcaggaatataaaccctgactaagacaagaatcaaagtgtctagtcaggtgagttactggaccggtaggtagctttgttttgcttgcttgatgtctggagccctctcttagctgggtatggctgaacaaatgaaaaaagaatatgttccccctacttaggtaagtattcttccaggtggtgatgtcactggccaagctgttctcccttggcttcccacagctctcttcctttaccagataccatgtccatctttacacaaatgactctaaacctcttctctccacagacaccttcaatccacatgagataaagcctccacattttgtagctctggctgacctggaactcactatgcagaccagccttgcattgaactttcagagatctgcctatatctttcttaggagtgctaggactaaaggcatgcaccacatttagtcctgctaaacttctttttttgtttttttggttttttcgagacagggtttctctgtgtagccctggctgtcctggaactcactctgtagaccaggctggcctcaaacttagaaatccacctgtctctgcctcccaagtgctgagattaaagatgtgtggtactactgcttagactgacacacaaaatattgttgaagccagtgagataaagctcaccttcaatctcagaggtaggccaggcagacttttgtgagttctgggccagccagagcttcatatgaaaagtaataataatgataataataataataattttaataaacaaatgggtgtatgaaagagtaaatgtgcacatatttctggcatctgttttaagattctacttccttaggctgtcagtcattctcaccccattcaaccctttgctctgcactgtgattgacaaatcttctctccctctggtgactacctaattcatcccagacagcatcagccttggcaacaacttctctatgcagggactgtaagttccagacaacagaaactctgttccaattcacaaaatcaactaggaaaggagaagagacagaggacagaggaaaggaaggaagaagggagaaaaggagggagggagggagggagggagggaaaatgtcaatttatgcaactgtttcatgattcatccaaggatcctctctgattcttttttggttgttgttgtttttgttttttcgagacagggtttctctgtatagccctgactgtcctggaactcactttgtagaccaggctggcctcgaactcagaaacccacctgcctctgcctcccaagtgctgggattaaagatgtgtgccaccacgcccagctaaacctcttccttctagccagaagaacacagcagaaagaactatgatcagtcttctggaaccatgtgcttacccttaaaccagacaattcacttggttcccaggaccacactcctcctgcaaaagttggaaccctgtgattctcagcttctgaggcaaagggaagacctatccaagataaaaaaccaacaacaacaaaaaagtcaatataagaaaagaaaaaaatgttctctagatacattctgggtagtgatggttctcactgttcagagatataagaaaagagcagatgcttaaaaccctgactcttgagaacaacttttggtaagagagactcctttttttaaaattttatttatttatttatttacttacttattatatggtaagtacactggtagctgtcttcagacactccagaagagagtatcagatctcattacagatggttgtgagccaccatgtggttgctgggatttgaactcaggatctttggaagaacagtcagtgctcttaaccactgagctatcttacccagccccccacccacccccccaaccccgttaagagagattcgaatggtccatcttagaggtattgaaattgagtctgaagtgggaggcctaggggctgttttgagccaactcagcccaggtgatttgcagtgaggtgggaattccaagggcaaacaaggatcagcaaaagctatacccctctaccacagatttggagagaattcagatgggaggcctgttccagccattgctcagtaagtaagcaagagtctagctacctcttcatctccctccttctaccacaccattaagtccctccaggccatcagcctcaatgattctttctttttttttttttaattaggtattttcctcatttacatttccaatgctatcccaaaagtcccccataccctccccctccactccaactttttggccctgttgttccccgcctcaatgcttcttggctctatccatgtctccttgcccactttgcttctgccaaccgatattctttacctgggactctctagcagatgccaactgcctgtctctcatctggtttcctcaaaggtagaaaaatggtctcccaaataagcccgatcagtttactccctggcgtaggagaacttgatgattcatgtgctctgcttctaaaatacagatctgtgggcctggtagtgcagatgttaatcccaactactctacttgggaggcctagggaatggactccatgttcaaggtctgcctggacagcaagatgagtgctggggaagccagagaaaatgagtaaaactttctgaaaagtaaagcattataaaaacaaacaaacaaaggtccagagaactggggagatgattggctggttaagagtacttgctcttctgcatgggacccaagttcagttcctagaagccgagtagcttgcaccttcaattatggccccctcttctgttttctcaggaccaggtgcacacagtgcatataacatacatgtaagcaaaatactcacacacataaaattaaaaataaataaatctttcaggcaaaactgacctgggatatagctcaaggatagaggatttgcatgggatgctagcagccctgacttccatctacagtccagaaagacaagtaaatcagaaatgcctttgagggactgaagagatgattcagaggttaagagcactggctgctcttccagaagacctgggttcaattcctagtacctgcatgagagctgactccagttccagggaatctgaccctatcactcagacactgttcttgtcatctgcacacgggatgatcacacacatatcatttcacatgtggggatactgagaatgagagtcagcaggtaactgtctcaacttcaactaagcagggcagtttgttagcagggatggaatctggattcttattgccccccagcttcttcacttcctgctgcctctctacaaccacaccatattgaaattaccttcttccctctcttgcttccgcactgaaactggggctgaatctagctggctacctgacctgattctctcctatcagatggatgacttgctgtcctcctgggtcatctcccgtgtttagcaagacagggtatagagttttaaatgagtgtaggcagagtgcatgaatcatcacacttttaggcagagtgcatgaatcatcagactttcctacgccagggagtaaactgagcacgcatattttggagaccacttctctactcctagggtcagaagagcctgcagatgatctactcaaagcaattttatctgccattctgttgagtagtgaggcaaggatcatgttacctgcaacggggccaatctttgcctctgtttttgaagtctctggagaagtagccgtcttcctgcgctggggatatgattaagcagtagaacatgcacataatttcatgaggctaacatacagctcttcagagatcagcctacttatttatgacacaattgttttaagacatcaggtattctaggagataagattccttctcttgctttcctggtacccagaatgatctcctaaaccacaagtaattggcacagagatggatcttccaaactgacccagatctacacagatcttatcttcatacccaagaactccccagtcaatggatatttggggcatttgctatgcacacagacgtcagtgtggaataaccgtactccagcacttagtagaaaggatgtatactgaacgagtatttacaaataattaaccagattattttcagggcacaaattagtggagcaaggattgcagagttacatgaacatctgatagcattgcggttcagggaaagttcccagccagggtacagaggatggtgatgaagaaagcatgctcaatatcttgaggcgctgctatgagagagaatgaaactctctaggggaactgaaagcatacaaggatgtaaagaataggaagagcaaaaggacttcaacccttggatgagacacagggtgatccaatacccggtgacctgcagggactcaggcccagtggttatgatggcaacctacccacagtcgtgagtatgatgcagtgggaagtcacagtactgaaaaccaacacacttaacttgcctgtgctgctgtgaacgtccattcaatgagggtcaggaagctcaaataagataatcgcaaatactgagtggttctgagaggaatgcaaccatgaaaaaaaaagtgctgacacttgcagaatgtttatgtttctaatgctgggctaagtacttcacctggattatttcaccaattcctcctcctcctctccctgttctcccttctcctcctcttcttcctgttcttcctcctcctcttcctcttcttccaaagattcatgtgtatcaaggtattctcaa

SEQ ID NO: 2 - DNA, 1799 bp, Mus musculus
gattggggtacgcgctgcgccaggtttccgcaccaaccagagctggataactctagacttgcttcccttgctgtgccccctccagcagacagccacgacgatgcccctcaacgtgaacttcaccaacaggaactatgacctcgactacgactccgtacagccctatttcatctgcgacgaggaagagaatttctatcaccagcaacagcagagcgagctgcagccgcccgcgcccagtgaggatatctggaagaaattcgagctgcttcccaccccgcccctgtccccgagccgccgctccgggctctgctctccatcctatgttgcggtcgctacgtccttctccccaagggaagacgatgacggcggcggtggcaacttctccaccgccgatcagctggagatgatgaccgagttacttggaggagacatggtgaaccagagcttcatctgcgatcctgacgacgagaccttcatcaagaacatcatcatccaggactgtatgtggagcggtttctcagccgctgccaagctggtctcggagaagctggcctcctaccaggctgcgcgcaaagacagcaccagcctgagccccgcccgcgggcacagcgtctgctccacctccagcctgtacctgcaggacctcaccgccgccgcgtccgagtgcattgacccctcagtggtctttccctacccgctcaacgacagcagctcgcccaaatcctgtacctcgtccgattccacggccttctctccttcctcggactcgctgctgtcctccgagtcctccccacgggccagccctgagcccctagtgctgcatgaggagacaccgcccaccaccagcagcgactctgaagaagagcaagaagatgaggaagaaattgatgtggtgtctgtggagaagaggcaaacccctgccaagaggtcggagtcgggctcatctccatcccgaggccacagcaaacctccgcacagcccactggtcctcaagaggtgccacgtctccactcaccagcacaactacgccgcacccccctccacaaggaaggactatccagctgccaagagggccaagttggacagtggcagggtcctgaagcagatcagcaacaaccgcaagtgctccagccccaggtcctcagacacggaggaaaacgacaagaggcggacacacaacgtcttggaacgtcagaggaggaacgagctgaagcgcagcttttttgccctgcgtgaccagatccctgaattggaaaacaacgaaaaggcccccaaggtagtgatcctcaaaaaagccaccgcctacatcctgtccattcaagcagacgagcacaagctcacctctgaaaaggacttattgaggaaacgacgagaacagttgaaacacaaactcgaacagcttcgaaactctggtgcataaactgacctaactcgaggaggagctggaatctctcgtgagagtaaggagaacggttccttctgacagaactgatgcgctggaattaaaatgcatgctcaaagcctaacctcacaaccttggctggggctttgggactgtaagcttcagccataattttaactgcctcaaacttaaatagtataaaagaacttttttttatgcttcccatcttttttctttttccttttaacagatttgtatttaattgtttttttaaaaaaatcttaaaatctatccaattttcccatgtaaatagggccttgaaatgtaaataactttaataaaacgtttataacagttaaaaaaaaaaaaaaaaaaaaaaaaaaaaaaaaaaaaaaaa

SEQ ID NO: 3 - DNA, 1320 bp, Mus musculus
atgcccctcaacgtgaacttcaccaacaggaactatgacctcgactacgactccgtacagccctatttcatctgcgacgaggaagagaatttctatcaccagcaacagcagagcgagctgcagccgcccgcgcccagtgaggatatctggaagaaattcgagctgcttcccaccccgcccctgtccccgagccgccgctccgggctctgctctccatcctatgttgcggtcgctacgtccttctccccaagggaagacgatgacggcggcggtggcaacttctccaccgccgatcagctggagatgatgaccgagttacttggaggagacatggtgaaccagagcttcatctgcgatcctgacgacgagaccttcatcaagaacatcatcatccaggactgtatgtggagcggtttctcagccgctgccaagctggtctcggagaagctggcctcctaccaggctgcgcgcaaagacagcaccagcctgagccccgcccgcgggcacagcgtctgctccacctccagcctgtacctgcaggacctcaccgccgccgcgtccgagtgcattgacccctcagtggtctttccctacccgctcaacgacagcagctcgcccaaatcctgtacctcgtccgattccacggccttctctccttcctcggactcgctgctgtcctccgagtcctccccacgggccagccctgagcccctagtgctgcatgaggagacaccgcccaccaccagcagcgactctgaagaagagcaagaagatgaggaagaaattgatgtggtgtctgtggagaagaggcaaacccctgccaagaggtcggagtcgggctcatctccatcccgaggccacagcaaacctccgcacagcccactggtcctcaagaggtgccacgtctccactcaccagcacaactacgccgcacccccctccacaaggaaggactatccagctgccaagagggccaagttggacagtggcagggtcctgaagcagatcagcaacaaccgcaagtgctccagccccaggtcctcagacacggaggaaaacgacaagaggcggacacacaacgtcttggaacgtcagaggaggaacgagctgaagcgcagcttttttgccctgcgtgaccagatccctgaattggaaaacaacgaaaaggcccccaaggtagtgatcctcaaaaaagccaccgcctacatcctgtccattcaagcagacgagcacaagctcacctctgaaaaggacttattgaggaaacgacgagaacagttgaaacacaaactcgaacagcttcgaaactctggtgcataa

SEQ ID NO: 4 - DNA, 37487 bp, Homo sapiens
actcccaccacacctattcaacatagtattggattccctggccagaacaattaggcatgagagagaaacaacaggcatccaaacaagaagagagaaggtcaaattatccctgtttgcagacaatatgattctgcatctagaaaactccatagcctctgccccgaaactccttgagttgataatcaacttcagcaaagtttcaggatacaagatcaatgtacaaaaattagtagcactcctatacactaacatcacccaagccaagaggcaaatcaggaacacaatcccattcacaattgccacaaaataataaaaagcttaggaatacagttaactagcgaggtgaaagatctctactatgagaattaaaaaacactcttcaaagaaatcagagatgacccaaacaattggaagaacattccatgttcatggaagggaagaatcaatattggtaaactggccatacacctcaaaacaatttacagattcaattttattcctatcaaactaccaatgacattctacacagaaatggaaataactactcaaaaattcatatggagctaataaaagagtctaaatacacaaggcaatcctaggcaaaaagagcaaagctgaaggaatcacattgaccaacttcaaattgtactacaaggatgtagtaatcaaaacagcatggaactgataccaaaacagacacatagaccaatggaacaaaatagtgagcacagaaataaagccacatacctacaaccattggatctttgacaaatctgacagaaacaagcaagagggaaaagactccctattaaattaatggtgctgtgattactggttagccatatgaagaaaactgaaactagacttatgccatatataaaatccatatgccggaaagctgaggcaggagaatcacttgaacccgggaggtggaggttgcagtgagccgagatcacactactgcactgcagcctagcgacagagtgagactccgttgcaaaaataaataaataaataaataaataaataaataaataaatatcaactcaaggtggattaaagaccaaaatgtaaaactctaaaactataaaaaccctggaagataccctaggaaataccattttggacataggagctgacaacgattttttgaaaaaaacaccaaaagcaaaagttgacaaataagacctaattaaactaaagaacttctgcacagcaaaagaaactatcaacagagtaaataggcaacctgcagaatggaggaaaatattgacaaactatatatgtgacaaaggcctaatatacaaaatctacgaggaacttaaacatacaaggaaaaatcaaacaacccacctcactaaaaagtgggaaaaggacataaaccgacacgtttcaaaagaagacatacaagcatatacatacaagccaacaagcatatgaaaaaatgctcatcatgactaatcattagagaaatgcaaatcaaagcagcaataagataccatctcacactagtcagaatagctattattaaaaagttaaaaaatcacagatgctggtgaggttgtggacaaaagggaacgcttatacactgctggtgggagtgtaaattagttcaaccattgtggaaagcagtgtggtgattcctcaagtaattaaaaacagaactaccatttgacccagcaatcccactactggatataaacccaaataaatataaatctttccaccacgaaaacacatgcaagcatgtgttcattgtagctctattcacaatagcaaaggcatgaaatcagcctaaatgctcaactactgcagactggataaagaaaatgtggtacatacacacgatgcaatactaagcatccattaaaaaaaaaaaagaaatcatgtccttttcaggaacatgaatggaatcagaggccattatccttagcaaactaccacaggaacagaaaaccaaacctatgttttcacttataattgggagctaaataatgataacccatgggcagaaagaggcctcacactgtgaggcctgcgtgaaggaggaggatgggaggagaaagaagtccaggggaaaaaaacttcgggtactgtgcttagtacccagacagcaaaataatctgtacacattgatgggacgtatctcaaaataataagagctatctatgacaaacacacagccaatatcatactgaatgggcaaaaactggaagcattccctttgaaaactggcacaagacaaggatgccttctctcaccactcctattcaacatagtgttggaagttctggccagggcaatcaggcaggagaaagaaataaagggtattcaattaggaaaagaggaagtcaaattgtccttgtttgcagatgacatgattgtatatttagaaaaccccatcgtctcagccccaaatatccttaagctgataagcaacttcagcaaagtctcaggatacaaaatcaatgtgcaaaaatcgcaagcattcttatacaacaataacagacagagagccaaatcctgagtgaactcccattcacaattgcttcaaagagaataaaatacctaggaatccaacttacaagggatgtgaaggacctcttcaaggagaactacaaaacactgttcaatgaaataaaagaggacacaaacaaatggaagaacattccatgctcgtgaataggaagaatcaatatcgtgaaaacggccatattgcccaaggtaatttatagattcaatgccatccccatcaagctaccaatgactttcttcacagaattggaaataactactttaaagttcatatggaaccaaaagagagcccgcattgccaagtcaatcctaagccaaaagaacaaagctggaggcatcacgctacctgacttcaaactatactacaaggctacagtaaccaaaacagcatggtactggtaccaaaacagagatatagaccaaaggaagagaacagagccctcagaaataatgctgcatatctacaaccatcttacctttgacaaacctgacaaaaccaagaaatggggaaaggattccctatttaataaatggtgttggaaaactggctagccatatgtacaaagctgaaactgggtcccttccttacaccttatacaaaaattaattcaagatggattaaagacttaaatgttagacctgaaaccataaaaaccctagaagaaaacctaggcaataccactcaggacataggcatgagcaaggacttcatgtcaaaaacaccaaaagcaatggcgacaaaagccaaaattgacaaatgggatctaattaaactaaagagcttctgcacagcaaaagaaactaccatcagagtgaacaggcaacctaaagaatgggagaaaatttttgcaatctactcatctgacaaagggctaatatccagaatctacaatgaactcaaacaaatttacaagaaaaaaacaaacaaccccatcaaaaagtgggtgaaggatatgaacagacacttctcagaagaagatatttatgcagccaaaagacacatgaaaaaatgctcatcatcactggccatcagagaaatgcaaatcaaaaccacaatgagataccatttcacaccagttagaatggtgatcattaaaatgtcaggaaacaacaggtgctggagaggatgtggagaaacaggaacacttttacgctgttggtgggactgcaaacaagttcaaccattgtggaagtcagtgtggcgattcctcagggatctagaactagaaataccatttgacccagccatcccattactgggtatatacccaaaagattgtaagtcatgctgctataaagacatgtgcgcacgtatgtttattgcggcactattcacaatagcaaagacttggaaccaactgaaatgtccatcaatgatagactggattaagaaaatgtggcacatatacaccatggaatactatgcagccataaaaaatgatgacttcatgtcctttgtagggacatggatgaagctggaaaccatcattctcagcacactatctcaaggacaaaaaaccatacaccacatgttctcactcataggtgagaattaaacaatgagaacagatggacacaggaagggaaacatcacacaccggggcctgttgtggggtagggggaggggggatggataggattaggagatatatctaatattaaatgacgaattaatgagtgcggcacaccaacatggcacatgtatacatatgtaacaaacctgcacattgtgcacatataccctaaaacttaaagtataataaaaaaaatctgtacactaaaactccaagtcatgagtttacccatataaaaaacctgaacctaaaataaaagttaaaatattcaaatataaataagtaaataaataaaatgacaaacccatggctaacatcatgttgaataaggaaaagttgaatgcttttttttctaaaatccaggagaagacaaggatgtccattctctcttctactcaacatggtactgggagtcttaggtagaacaattacacaagagaatgaaataaaggtcattcaaattggacaggaggaagtccttttctgcagtaacatgatcttataggtataaaaccctatagactcaaccaaagaaaaataactggtagtattgataaatgaattcagtaaaacttcaagttacaaatttaatgtacaataattagtagtgtttctacacagcaacagcaaactatctgaaaaagaaatcaagaaatctatctcttttacaatagctacaaaaatttcaaaaaatttcaaaaaatacctagaaataaatttaaccaaggaggtgaaagatctctacagtaaaaaataataaaatatggatgaaagaaattgaagaggatactaataaatgtaaagttaacccatgctcatagatttgtagagttaatgttgttaaaatgtccatactacccaaaccaatgtacagatacaatgcaatctctatcaaaatactaaggactttcctcacagaagtaaaatatatatattttttaatatataaaatgtatatataaatataatatataatatgaatattatatatgattataatattatatgattatatactattaatattattaataatatatattattatatatattatatatattattatatattgtatataaatatatattatatactatattattatatattgtatataaatatatattatatatactatatatttatatactatatatatagtgtatatatatatttatatagtatatataatatatacactatatatttatatagtatgtatatatatatactatatataatacataaaatatatatacatatatagtatatatatgaaatatatatatactaaatttgcacagaaccacatgattccaaacagccaaagcaatctggagcacaaagaacaaagctagatgcattacactacctggcttttaaattttctacaaagcaatagtaaacaaaatagcatagtactaacatgaaaacagatccatagactgatggaggagaatagagaccccaaaaatgaatccatacaattatagccaactagtttttgacatatgtaccaagaaaacacattggggaatggaaagtctctgcaataaatggtgctggataaactgaatatccacaagcagaagaaagaaactaggtgcttctctctcccaacatataaaaatcaactcaaaatggattaaagacttgaatataaaacatgaaactaagaagatccttgaagaaaacacaggggaaacaattcatgatattggtctgggaaagaatttttcaaataagacctcaaaagcacaaacaaccaaagctaaaatagatgaatgggataatatcaagccaaaaagcttttacatcttaaaggaaacaacagaatgaagaaatgacctacagaatgaagaaatattcacatactatgcatctgacaagaggttaatatgaaactatgtaatcaatgcaagcaactcaataggaaacacacaaataatccaatcaaaacttgggcaaaggattcgaatagatatttcttaaaaggagtcacacaaatgggcagcaagtatatgaaaaaaggctcaacatcactaagaaccagggaaatgcaaatcaacaccacagtgagctatccactcatcccagttagaatagttattatttaaaaaaataaaataaaaagacaagaaaatggccagtcatggtggctcatgcctgtaatcccagcattttggaggccaaggagggcagatcacttaatgccaggagttcaagaacagcctggccaacgtgacgaaaccccatctctactaaaaatacaaaaaattagctgggcatggtggcacatgcctgtggtcccagctactcaggaggctgaggcacgagaattgcttgaactggggaggcagaggttgcagtgagctgagttcgcaccactgcactccagcctgggtgccagagcaaggatctgccaaaaaaaaaaaaaaaaaaaaaaaaaaaaagacaagaaataacatatgctggtaaggatgtggagaaaagtgaactgttatacaatgctatacacttggtgtactactatattatccagcaatcccactgctggatccccctcccccccaaaaatgaaatcaacatatcaaagagttcagatccccatgtttattgcaacactatttgcaatagccaaaatatggaatcaacttaagtgctcatcaacagatgaaacaggaatgaaaatatggtatatatacacaatggaatgctattcaatctttaaaaaagaatgaaaccctcaaaaagtgggtgaaggacatgaacagacacttctcaaaagaagacatttatgcagccaaaaaacacatgaaaaaatgctcaccatcactggccatcagagaaatgcaaatcaaaaccacaatgagataccatctcacaccagttagaatggcaatcattaaaaagtcaggaaacaacaggtgctggagaggatgtggagaaataggaacacttttacactgttggagggactgtaaactagttcaaccattgtggaagtcagtgtggcgattcctcagggatctagaactagaaataccatttgacacagccatcccattactgggtatatacccaaaggactataaatcatgctgctataaagacacatgcacacgtatgtttattgcggcactattcacaatagcaaagacttggaaccaacccaaatgtccaacaatgatagaccggattaagaaaatgtgacacatatacaccatggagtactatgcagccataaaaaatgatgagttcatgtctttggagggacatggatgaaattggaagtcatcattctcagtaaactatcgcaagaacaaaaaaccaaacaccacatgttctcactcataggtgggaattgaacaatgagaacacatggacacaggaaggagaacatcacactctggggactgttgtggggtggggggaggggggagggatagctttaggagatatacctaatgctaaatgacaagttaatgggtgcagcacaccagcatggcacatgtatacatatgtaactaacctgcacattgtgcacatgtaccctaaaactaaaagtataataataataataaaaaagtaaaaatgattaaggactataataggataagaactctaggaagatgataaagtatgcccaaaagaaagcaatgctataataaaaacaaaataaaacaaaacaacaacaacaaaaagaatgaaaccctgtcatttgcaacaatgtggacaaacctagaggactttatgttaagtgaaataaaccaagcacagaacgagaactaccacatgatctcaggcatatgtggcatctaaaaaagttgacctcaaagagagtttagtagtggctatcggaaactgaggagagtagttgcgagggggaggggaacaggttgctcaacagctacaaagttacacttatataggacaaataatttctgataatcgactgcacagtaggttgagtgtagtcaacaataatgtattgtgtactttaaaatagttagacgagaggattttggacgttctcaccaccaagaaatgacaaatgtttcaggtgatagacatatgctaattatgctgatttgatcattacacaatatatatgtatcaaaacatcacactgtatcccattaatatgtacaattatacatcaatttaaaacaaaataaaatgtattttataaaaattttaaaacttcaaccagcaagtttgaatctcctattcccagttttggtcagccctacagtgtataccaaccaggctggcctggggctgctgttagaggaaagaaagaaacatctggacttggaatgaacagatctggaaggaatcctaaattttccaataaagtctctgtattcctttcatcctggtccctacccaggaagcagtctagaggagatgatccttttctaagaacagcaacattcagtaaacaaacttccttactaatgtgtgtggatcaagagatggtgaggaaagtagagtcagtgatatttttgaatcaattatgagaaggccaccatgctattgctcagtaatattagatgcccatggacagtaagattcatcgatggtccgtctttattattaggtcattactgagtggcttttgcaataaaatacaccattggcagaataaaaatattctctaatgcaaaaacatagcatggattgtttttaaggggcacaatagtgtgcttgatcagactggaatagcaacattgtaatctgaaaaaagctcaacagtggtgaggcatattcaaaagccccaagaggagagtcaacagtcagatccatcagagttgagaggttgccacaacttatgtaatgacgtctccacgccatgaaacacatgtgtcagcttttgtcaggagtcacagatctggcatgcagcaggagattctgcattagatatataaagtcaggcccaatcatccccttgattagttagtctcatcagagaatgagcccttgccatgggtctgtatatgaggaatccaggcagttcagtaagtagtcaagatttgtttccacatgcggtcccaaagaagtctttaatctgacagactagttttccaagtggcataccaaaaggctggaccattggtagtgtcccaagaattgggttctgaccattgagcagagaaaccaagtcctctttttatttctgcatagctggttcagaggctgaacagacacaggagccagtgaacaccatcagttttcagcttagccaatccttcactgaggcaagcccagatatttggggaaacctctgtaaacagggtccaattgaactagtagtgttgtttcaagcaggagaataaaaggttaagtttcccccagagagacagttgccactcttacatataaagcagagatgcagaagaaattcgagttgatgccatcgcccacccaccaacccacccccgcatttccgccctgagactaggatcccagcgccagggacccagaccctgggattgatcgcacagagccgtgatccggagagtgcgccggggatgagacggaatctcggggccactcgagagcttggggcaggaaccatgcatccattgtccatcgtgactgcatgtggagcagctatttggcctgggaacagctgtagagagcggggagcgactggctcgccactggcgcgccctgggggaacccgcccaaggtgccctcctccccagactgccctcccagcctcgaagacggcaatccagcgcccactgctccctggactctgggcaaggccaagactcaggcctgctccagatttgagaacccaaacaactcagagggtgaggaaattgaccttgtgacagcaaagaaaaggcagattgggtttacagaagtcgatcaccatcatggttcgagtagaccgtctgaacccctgcatgaaacacttccatacctccatccaccagcaacaacacaactgcgctgcccatatttctccagaaagctgctcccaagaagaggctccagagagaggtctccaagaagaggttctggagggagatgctccaggggaaacggaagatgaggaggatgaggggattgtgagcccctcacctatagaaagcaaggctgcccagtgctgccagttctgacactgaggatgtgaccaagaggaagggccacagcttcctgcagcacaagaggtggaatgacctgcgcgttctcagttcttggccctgagggaccaggtacccaccttggccagctgctctaaggtccccacggtagtgatcctaagcaaggccttgggatacttgcaagacctggcgtgaaccgagaaaaagatgtctatggagaaaacgcagctccaacgccagcaacagcaattgcagaaatgaattgcgtacctcagtggctactaactgaccaaaaagcctgactgttctatcttacaaagacacaagtttattttttgacctccccttcccctttagtaattttcacattttggttatgacgggacagtctttgcagtaggtcccagaatgcattgcagccagtacacacagaataagggcttgcattcttggaaaccttgaaacccagctctttctctcccctgactcatgctgtgtcttctctggcgcctttggcttctcagcagatagctgactgaggagatttggggtctgtttacctcactagctccgaagaaaaggctgacagatactatgcaacaggtggtgtatgttgtcggggactccagcctgcatgaaatctcacactccgcgtgagccttagactaggaaagaatgctccctggtatctctggggtgatgctagaatgctccctggtatgtctggggtcatgcaaggacagctgggcctggacagcactctcgctgtggcttttttttccaggagacacacaagctgtcttgggtgatgacaagcttgaagatttgatcaacatgaccattgcttcactgtcagacactttacagtatctgaggagttggaaacctttaacgtatatattgtgatattagctgacacctctccttccagtttcaatgctgagaccctgagaacatttaaagagcttgcactctaggttcgttgtctcagagctctctgggccttctctgatgaagggacctttctgtcctcatgagagacttttgtttcattttgcctttgttgtgcaatgggctttacagcatcctttcccacaggttagaaatgtttccccaagttacagggaagtggggatcctagcctggggcctgaggaaatcttggagtcctggctcctgaacttgttccctgtccgagtggcacttgaggccacccatcttataatctcttctcaaggcagatgtaagtcacctcagaagggagaactgtaccgcttcctcttttccatgaagctctcatctcaatctttgactgatgagtgtgaaattctaccggaaccatgcaaacacgtccaccttgggcatctccaaggaacttgtggggtctgcagcatacttggctccctaccagcctgccatgagtcatatttcttttccagaaggtggacttgcttcctggtatgttttaaaggagcctgcaggagctctgcttagccaatcatgatggatttttgccccagctggactctgcatgtccaaggagaatccaggtacagcctccattccgggaaagacatccagcccagcagttgtcatgtgggtaacctcaggaacccctaaccctgtcctggaaaaaggacaagcccctccagaactctgcccaaaatagcaggtgcttgatggttctgaatttggaaagggatggggggtgataagtactatctgtggctctggaaaaccagctgctacattcaaatctattttccataatggtttctttctgaggttgcttcgtggcctcagagaatcccagaggatgttttgaaatagcctctctacccttcaggagcatggtagtttacaggaaccaactgacttctggaactgtctatggagggagaacaggccaggtgtaggttactaatgtcctacatgaatagcttggttttataagctgctgttgggtattatgttggggcagtctttttaatatattgtatttttgtacgcattttgcaaagtggagttaactgttttgtaaaagaaaaaaaagaaacccttgggtgcttcttctgtttcaagggtctgatttatttggaaaggcaagtttatctgaaattttgtattattgattgcccaattttaaaatgttgccttctgggacatcttgacaaaaaatatttctcaaacatgaagaaaataaatataataaaaaagaaatgtctgtgggatcagatgactgttcttgattttaccgtttccatttcataagccaagcttattgaccccttcctacctgctagtcattgagtctgagttgaccaactcaaagatggaaatatcgagccagatggtaacaaattctccatgaatcgattgttcagttttgacagaatcccaattgcaagccattagctgcttttcaaaagggatgtaccctgtagccatattagggaggcaacaagtccagttccccaagggatctctctgggtgttgactgcttccccttgccaggtgcccccatcggcaaaatcatcagttacacagatttgtcctgtatgtaatattcaaggagttgattgaggttctgagcctctttttcggtggcaggttgtatgaagagacgtcaattttttcctgttagagggatctaatgttgtgaatttgcctgcttagtcccaagagattacttggcaagcaggcccctgtatttgggagcataaatcagccacccttgctgacagatatgtaataacactgcattgaggacccttgagactgagacttctagccggccagctgacacaattattatgtatatagtgaaaatattgaacattagaaggtagagacactaatgctaaatcctgagccaaccactgctgacaaatctcattggagtttgttccactaacacttccctctacctctgtctctctgtgatggggatgactttatatgagacctgtagaatgagaaattacaagcatatgacccatcaaatcctgccatttataagtagaagcaacaagaacagtttattcaactttcccaaaggcgtccctgtacaaagtcatattggcttccaaaccccactgtgaaccatgcccaaaccccaacaattgcttttctggacttttttcccttaaatgaactcagacctagagttcactacaggaatttcaggggttacagcaagagctgttaggggatttccctatgtccaggccagaatgtagggattgcaggggagtcttgggatgaggcgaggggtggggactgtaagccttttttgtaatccctctggctctttgccccagcttgtatgctaaatcctctcctgtgtacctccatttgtgcagaactgtaagggctcagggattcttccattctgtcccttgatttccccagcagctctgctccacagtcttggtgctttcatctacctcatacctattaccccttccctccactccccagaaaatcagataagatagtgtcatgggagattatatgtaacagttctgtgaacatgtgagtccgtccctttcctgaagtaccctaccatgcatatgccttttagtctgtcttgaggacagagagacttctggctcaccactaatcatctttcttcttatagcacctgaagtgagaaaaggaagagaaccaggagttaggaaatgcagagagagagagagaaaagactctgtctatactagtaagcaaggcatgtttgcatttggtttccagtagccagcagtgtggttcaaccaaacaaacttcagatggttttttttccactgaaaactctatatcttcactgctgacgccacttattcaggtttggcaagtcattgactcagcaccatgacatcatcccttcttcctcccatgcagaggagagtgaacaacaaccaaaccatgattcaaacagcttggtttaattctgcatcctgcccctcagcttcattaataggtaggagagtgagtggggaagggcctttaatgcacttagtgccaatccattcgggaaaaagcatttgctctccaatcccgaggagtcttctcatatcccctaaccaggccagtgaagcacccttgttttatcactttccagaatgctatgtttcatcttcattaccaaaattggcaagaaatgtgaagagtttgagactgtaccctacttgcaagctcacaaactagcatacctcagtttcacagatgttggcagaatatatgagattcttgggtcagagtttgttttggttcatgtttgcattaattccccttgccctctgccccaaatcacacaggagaaatgaggagcagccagtcaaatgttgacatacaagtattcttcaaactatagttagagacaaaagctgttacaataaatgtagaaaggccatggacaattatctcaacaatatctgaccattgtttctccactatcttggcttctgacaaagtttgccattaagtatgtgtgttgattttctggatatcagggctgagcaaggaaaaagtcatgaccattagatggcagtagcacacaacatgctttatttggttggccctttgaaaggtttcaggagagtggaacttccctcacagcaggagaccttccagaggcagcagcaagaggccaccacccagaagaggaagagttcaaggcaacttccaaaggagagaagaattggacaggaggctcatgtgtctatgggatgttactcagcagccaggtgtggagtctctgtgtcagagagttcccatgggcatcagaggcttggggcttttgtccagccccagagtatgtcctatctacggctagcagatggtgtgtctggttttacagagggtgcaatgtgggtgggttctaaagggccaaaaatgtgcttactgggggccatatttaaagcaattgggtgtgtaaacatttgattttagttccaatgagctttgagctaatggtcttagctgtctctgaatatagggaacaagatacaaggcaccatctaaagatattaatccacttatttaacagtccatgccttggccccatgttgttttacaatctaagttgtatgctatttcatggagtctcagttgggagccagcgatgaagcatcctcaagacccagaatgctataaggctacaaattaggattttaaaagccagttctcagccaatctgcccacttgggcagccagtagaataaatttgaaaggagacaattttgttttgaccagtccgtttagtcaatagagtggcatttatatcccctttggtacatgaccccagctatctgtaaaacttggtgttatctacgcacatgcaggaagataattttagcaagcacacagcccctgtgccctgtgacccctccagcagcctgacctagggctatgcagttatctcacaccatggccactaaagtacagtgagattcagcaaagagtttcagtccttgggctgtttatctaatttctgtgggtaattcctgcaacatggctatgtgtttctcttaattgtggtgtgctgttccacacatatgctgttcctactgcctccaaaattagtgatcctagggaagttagtaccatgaggaactatttggaaagctcatttgtgacattggggagtcacatctagtgtggtttggtggcggaaagtacttgagggagggggttccactgttgaataaaattctactggaattttgcaccaatcccaagtgcaggaaatattcttcagggttggatgaggagaagattgtgatagggaagccatctgattcctttacaggacctccaggctccctctgctgcctgtattctctgtgttccactgaagggaagttcacatggctttgtgaagttccagaagttccaggttgtgttaataggagcagaaaatggtatagtcaaacaagcttgtgttatccaccttgcattcagcacctgggttaactaaatttgtcgtgggctcagcccaccattgtctatacatttatgtgagataagcctctggataaggttgttgaatgtcaatggttaggggaatcggctcatctaaataagtgaggtatatgatgcagcgttgccaggaaagaagtattacactatgttttctaaaatcaggttggcagaagcaaaccctgcattaggttagatttaccatcttatatgttgctgtggctaaggctataggcacgtttggtgtagtcggcaattgcatgttcctccttgctgtgactgttgtgtgttgtgcttgagtttcctgttgattgccaataataaatagcattgatgtgttcccatgagtgtgggataggttttgcaggtgttattggcagtccaagaagaacgttgttagtctagccacacaccaaattagattctgaattatgaggcactcgcatatgagtgaacaaaacaggtaaaccaagtattttttaaaaaaatagatatcagctgggcacagtggctcatgcctgaaatcccagcactttgggaggccgaagtgggcagatcacgaggtcaggagttccagaccagcctggccaatatggtgaaaccccgtctctactaaaaatacgaaaaaaaaaaaaagattacccgggtgtggtggcatgctcctgtagtcccagctacttgggggctgaggcaggagaatcacttgaacccaggaggcagaggtttcagtgagccgagatcacgttactgcactccagcctgggcgacagatccagactctgtctcaaaaaaaaaaaaaaaaaaagatatcaattgtatcaaggcataggtcccttttatgttcccttgtattgcaacattattgtgtttcagtgggggaccaaaagctttatggactccattttagcggaaactttcatagggaagaggtttgtatacctttaataacctcaggagtggccccttgggaggtggcagtgtgactacaccaataaatttcctcccaagtactcatggacataaagtgtctactgagacactggagactactagagggggacgggggaggggagcaagggttgaaaaacaaactgttgggtactatgctcaatacctgggtgatgggatcatttgtaccccaaacctcagcatcatgcaatatacccaggtaacaaacctgcacatgtgcccaatgaatctaaaataaaagttgaaaaagaaatgacaaggcataaaaatgttttaatgaagatgaaaacattcctcccaagttagtttcattacatgtcttctcattatcgtttatgtcttctgtaggtttggagtgtgtatggatttttaaggagccctcagaaaagtaacattgggcaacaactgccctcaaatagtttctaagtttttaataactgtggttttggacaaatttcacaatagctataagcaaatagttatcaatgtgggtggagaaactcccatgcaaacagtagttagatttctccctgagatcaaatatgtttcttgtaagaactgtctgtgctgtgacaccacgagctatgagttgttcactgtgggtagccagcattgcaattgctgtagagttcacttccattgagtgttatgtaaaacttgcagttagtatattaagattaggttagggaagaattcccaagctggttgttttgtgtgtgtgtgtgtgtgtgtgattttttttttaagaaatgtcttggcccaggtaatgtcatgtagtatgcattgccttagaagccaataattgtaaaggtatacactgtgggtgtcgattgcacttattataattccagggataagaaaaagctatcattttatctatgcaatcccgtaatggcttgtgggtattgtatctggattatagtattaataacaacaccaatcacaagcatcctggttgtaatatttggtgcatactatctctgggcattccttaaacgaggctcaatagatagtggcccattgctccatttgtttaatggcacatgagttaataatagtgggtatcatctgatgtgaaggaaaaggcggcccacagagcttagaaggcatctatgagtcacaagtgaaattgtacaatctgacttagctggaaggatgttactaagtggtagtagagagaggaggagaagtgctaacctcagtgctgatgtctgtggactgacccagtgaaatgggagcatggttccctttgttcccagtctgacctatgttgggtgtccctgtggtgtgtatgaggcatgctgtttccatacatactctgccagcagtagggtgtggattaccagggatagggtgatccaccaatcgaggtataattgacattggtgaaggtaggaactttctcaggtaaggaaagggcagaacaacagcataggcataaatgttggaggtcatttgcagccagcagtagggaatctgattgtcctctgggagtcacccaaatggtgttaccagatacaagggttgttggttcaatctcctgggtgtccggagcaggtcaaggtttgttccatagtgcccttagtggagcaaagtacatgggcagaaaatgaggatgcttccctctccagatagtggtgggtggtttgctagttttatgctgggtaatgagcagactaagactgagaatgcacccagagtgagtggtccatgccagatccttgtcaggattgagaggggaaaaaaatggccaggctctggattttctatgagggagaaggaagaggtgaaagagccaagttcctttgctgtgggcagtcacttcagggcccccatgttcgtgaatactggtaaatcatgttgtgtccagtgggtacatacattaccagaggttgcagcatctctgttggtggtctcctcatttgctgtgaattaaaatatggtgcatttatgccagagaggtatggatttaatgtaagcatgactatgggcagtatttttggctacggggaatgctattgtcctgcatgttctttcaatatcccttgttttaaaaagcccattgtgtcattctgtgacacctgctactgtaggaccagagaataaatgagaaatccaagcagtgttctttggtaatgcctatggttgaatcttctttgcagagaagtgagagtcttgatctgactggataactttgtgtaacttttgtactcccaaaggccatacaaactattttatcagttcctcaataacattagcagagcttggtgcctttcgtgggtaagccaagagtaagcctgtgtaggaattactacattgttgtggcatatgtaatagttcctgctgcttcagagaggggcccaataaaattgactggatttgccagctctgatatagcccttctcctgtgcagtaggtccaagtctctagatttctggtctatggtacggtccctaacagcttcatgtaaatgtctctctgctgggtctatttctcattaacagttgattttcatggtctcatgatgcccaaatgccctgacctctcctttatagggtgaagggtagctcttaccaaagttctgctgtctcccttcttttcaaaaggattaactactttggtactttagctagtttgtcagtttccaggttgtattgtttgctgtgagctgaggtatggtgtacaaagatgtgcagagtggaggccaatgtgctgatattttcccccacatctccttaccccaaatgtgtcagccttgtatgttccagccctgattttgtccaagtcccaacccaatagcctattagccactgaccaggagttgccaaaaatgtgaaacttagtaaaatgtttgtcgaaggccttctctatttctaggggtgttgcacacagcctggcccattgggcactttggcccatccccatatggaagttggagtatttgaataagggtagtaggctgttgctgtcctttatctgactcccttataccctgtgctcactccattggtaaagaaaaacattaattttcttgttatgaaagtgctggccatactccctccattccccaatgagcaagagccaggggcatttccaggggttttggcaagttaacctcactgacagagtatgtggccatttcctcacacagtagtgacactccaggagggccaggtgtagttcaatcctgtagataccattttcattttaataaagaagcttctgttgctgatccaattttatgggcagctctgtccattacccagggcataacaggaatctcggtccatagggtaattttctctgccccaccagggcttcagttttgataagtgccccatatgctgccagtgggtgtctgtctagtgaatactttaggctgaggctgagagctacttacaccaaaagcccatgggtaggcatttacctgtccatttggtccagaggctccaggaagcaaatttgggagcagtggaaacttataattgcaagtcttgtccttgggagcactagagggagagccaaagtattagcctcctttagctcaaccagtgactgtagatgttcaggtccctactgaaaaaaggaagctttacaggtgtctcgatagacaattcagcaagggtcagcaaatattggaggtgaggaaggcattgtgctataattcctaatgaatgttgggggttctttactgatgtgagcggtttaagcatgaggagcttgtcttttatcagattggaaatagtctgaacactatttctgtcctgtcaaagtgtagagatcttattcctagatttagactgcccttaggaatcggctcagataatgggccagcgtttgtggctgacttggtacagaaaacagcaaaggtattgaggatcacatggaaactgcatgctgcctaccgaccgcaaagttctggaaaggtgaccgagtgtggatcaaagactgaaacatagcccctttgcatgcacggtgggaaggaccccagcccatcatcctgaccactctcactgctgtgaaggtagaaggaatcccggcctggatccacctcagcagtgtaaaacctgcagcgcctgaaacttaggaggcaagaccaagaccggataactcaggccgtgctccgcctgtcagatagtaaatcccaggtgatgtacctgctgtcagcagatctaggctttcttcttggacaccttatacccacagtcctccaggtgccaaagtagggcatccgttcccttggcaaacccgactgctgtggggtgtcctagcagaaggtcctcgacgtactggagcaacacgcaccctgggtctctggcaggaaacttctggaagtcccgaaccaatgtttcctcgaagagatggtgggggagttcttgaacctttggggaaggcgggttcaactgtactgagtggtgacacccgaccccagatcttcccactgaaaggcaaacagtttctggctctcaggggctagtctgatgctaaagaaagagtctttcaggtccaagcaggtgaaccagctgtcctcagctgacagcaaccctaacaacatgtacagttaggcactgttggatgtaaactcactgtagcttgattaaccaagcacaagtcctgtactggcctgtagtccttggtccttggcttgggaacaggcaggaggaaagtgtagtattctgaggtctgaacaggcaggagtggaaaaacacccttccgagttcctagtgtagccttcaaattttacagacttataccttacatggtgtaattgccaatccactctcagtgagaggtggtttactgagggttgtgatcaactgtgaaacagagtcttggtcaggttctgcgaggaggatgtcaccgatataatgccaaagcatagtttctggtgaaattgaggggcaggtgtctatgtcctgttggcaatgactgtgcaattggagggctattaagtatcccccaaaaagctagcatcacaatgaagatgaggggaaacaaataccccaaaagcaagtgggtaaaggcgtactattgactctcaaaggtggaagtgaaatgtgtttgactcaactgtgaaatttttactaaacagaacatgttagccaagtctacaactccagattcaaattctggtggctttagatgccctggattaatataaacttaccactgatgttttgaatgacacccattaaggcaacaatgtcctatacaggtgctctaataaaggaaacagccctgctgaactctctatggtctatagtctccactgattagtagtgtctcttagggcaggccatatggggaattgataggtgaggtagtaggagtcagtgttccttgtttatctatgtcacctgtgacaggccataatccttcagtgtcctgcttcagcttctgctgtggtatatgaaccacctgaaccaggaggggcaggttaactggttccctccgggaagtgcccaccagtagcataaaaaccttagtcttatgtcatgagtttatctgcggcctcaggaggtctcttccaataatggggaaatggataatcttggaggggaggcaagcaggacagaagcatatttttagcaaaactgagccaattttaatagttaagaggggaattatccctttaattaatccctttaattaacccccttccaagcaggtagcctacttgccaggagggggttccttttaaagcatgtgtgtgtgttggcattagggagatttgggcacccctgactgacagagttagccagtgttgtttgtcagtgcccaagccacagttaatatggtgaaagggcaactgtctgtcagaaggggccttccgacactgcaggatccctgtgtgagagaagattcttagccatttggcaagcatcagagacaggtgtggaagataaggttacctccaaagggaaagccagctggggtgggagggggtcgtaatctaaccctagtaagtattgcaattgctccaaacattcaccagagatcatccaatttgggaccttcttgtgccttagggtctaacataacctcttttcgtcatctcgtggttgatgcatacatgggatcctggccacaggtggtttgtttggcccaggaggggcagcctgagtggtgatagtaactttgatttaggccaggtagggtattatagtgttagcaggcagcacctgactctgagtttgtctttcatgagtttctattaaatccagtgcagctatggtctcttgaattgttttagcagtagccaccatgcccagtaaagaagattttcccaggagccccgccccccgaggaacaattgagtggactcaggactcaattcagactcctccagtcttgtcaagtcatcctgccccacctcatttgttgcctccactccaacatgtccaactggtggaggagatgtttggccttggctaaccttttccctggacagtcttcccaggccattatgaggtctaatggtgggcagtcttctaatccacaaaaatacacatcagcaataaagatgtgaacagaggtccaatgtggcttcttcccaaattctgctctaattatacaggttcctttagtggggacacaatttttccatcatgtactatcgctcctaattgtttaatttcattccccattaggtggaatcagttccctgccagatgcattctgtagagccaggcagccccttgtttatttggttcttggcctgggtacttaaggagagactggggctcgggtaagagagaggataggactcctcctctgagcaggaacagacccttccttcttggctctccctttttttcttttccatttttattactttctgggtggctacaggcaaagcagagggtaagttttcccagtccctaccgtggtgacactgtgctgccttttcttctggagagcacctattctcctctccagggacctcttgtccaaactgtctctcccaagagtttgggctcttacctcttctccaggtggcatcctggtgataaattgctgccagcaaggtcagcacatgcctcatggttaggaatccttcttcgacctgacagcaacctcctgtagggttccgggaggggtaggaatataaatttctttgccttcagtcactttaagtaccactctagctagctcagtccaaaggttgagatattaatatccctctggagaggggatagcatgatgacaactgcaacatcataattgagtgtaacaacagtagaggcatgctacctgcttgcaaaggcctttccaccagctgcccttaggagaccagccttggcctgatgtctctgccttattggctcatttacttgcctatctgtctccggggaggaggaaatcctcacatctcagactaccccaaatcctcaacccagccacagggagcacttcccaccatagcctgttatgcagtccagggtggttcacccttattccagaggcatgcactccctctccttttctattcaggtacacaggtgcacaatgtccaatgtcaactgagggggggacccaggtaagtgggctgacctccttcccaagtaccttggcatctaagaccccaaaagtcagttctagtggtgtgggttcactcaactactggtgctacctctgggccaggtcaatgaggtatagaaggagactgcaaaaagtatattgttgcggtacagcaatgagcgatgctaagcaaaactgctacagaggcattctaaatgtagagtctgagcacttaaggctgcctaggactgatttttcaattgattgtcctactgactgggtagacgctatgccaatttcttgttcacgaaaatcccatcctcctcaccacttgtggtgagttccaagatttctgggctgatcaatgaagaagacatgaccacgaggtggcagtagcgcccaaaaacatttttttttttttttgagaagggagaaggagtctcactctgttgtccaagctggaatacagtggcgcaacctctgctcactgcaacctccgcctcccgggctcaagtgattctccagcctcagcctccgaagtagctgcgattacaggctcccgccacaatggcgggctaatttttgtattttttagtagagacgaggtttcaccctattggccaggctggtctcaaacagctgacctcaggtgatccacccgcctcggccttccaaagtgctgagattacaggtgtgagccaccgcgcccagccaagaagctttttatttcggcggtgctttgacaggttgccagaaaggggaggtctctcacatcagaccttccagaggcagcagcagagggccactgagcagaaggggaagaaggcaaggtaactcctggggtagaggagaataggagagggccttatgtgtctgggcgatatgactcagcagcaggagagggagtctctgggtcagagggttctggaggcaagcagtggcatggggtcttttatagcccctgtgttttctttaaatgtggctagcagatgtcagtgcagttttgtggggcatgcaaggcaggcaagccctaagtggctacacatatgcttacttgagctatatttaaagcaattgcatatgtgaaaaattcgagtttggcgttggcaggctttctgcctgctgtgaggaagtataatggcaatataaaggctaatatatggaggtcatctttaacccactgatataataacatgccacttagtcagccactctgattaatccgactagcatggtctgagataaaatccattcaatctgtactgtcaacagtactctaagcagcaaggtgagatcaatctgcaacgttaacccgaacttaaaacgttaagcgcacacgtacaatactactgctcctgagtttttatctaagagaaatgaaagcataggtccacataaagacttgtatgtgaatgtttatagcagcttcaattgtgctagtgaaaaactggaaacaatccaaattaccatacaatgaaatactatactatgacaaatagtaatgaactattgatagaaataacagcatgggtgaatctgaaaataactacgctgattttaagaagacaaaaaagagtatacagtgtataattctatttatataaaattctataaagcacaaactaatctatagtgagagaaagtagatcagtggttgcctagggacagggatgggatggggatgggtagggagggaagcaacataaaggggcatgagaaagccttaggaggtgatgaaaatgatcgtcattttgaatgtggtaagggcttatgattattggtaaggagttatgcttataaaatataaataatttgtattttataaattatataaattacatataatttcatttagttttaaatttaaggaatggcaatatgtcttgcatcaaagaaccctcaaaacaacaccttaagtactgcaaagtctttgacgatgtatttgccagttaacttatctttaaacatcaataataaataaaaatggtcaagacttatttgtttctatgtgtttattttagtgtgctattgctttttcacattctgggtcatattttcaaagtattatttcacattgtgtaaatgtatttttttttcactattagtaaagagcatctcaagtaaggtcctactttctactttgatggtataggagcatgtttgactcagatatgaaccacttgtggacagagttatgggtgagaaatctgatatttaaggaacactctggattagtttccactggtgagaaaataaaaaagtgatgagcactttttccaaataccacgtgatgaatcaagtactcaaacatgctaactgcatttagactattctattaccaaaatattccaatcaatgcctgtggacagtttgtaaactgtcattcccaatgcctcctcattcttcaagttcccactgaaaggtctcatagcttatcagacctttgggggaagtgctttttttttttaattaaaagttaagtcatgtgcagggcagagtgaggcaaaatgcagccagtggttaggacctaaagacctctccttcacctgggccttgagagtttgagagaagctcaggaagaaaagccaaccatctgagtccagtgggctttgaagcagtggtcttgcatctgtacatgtgggataaatgatgtgaaaaccattaactctgctgctgatccagctgcagggaaaagcatttcctctgatcaaggtgaacatctggctggtggacctcattttgcaccaggtcctgatcgatgagctgagcctgagtccacagttcacctgatggagaactcagagtcaaagcccaggcccaagtgaggctgtctgactgctgcttgagggcctagggaccacacccctggagtcaggagggcagaggtgaggatgacagtggaatggccagaaggtaaagatacatgtgaatattctatctccattaggtcacatggatgaaaggcaagagaaaagtagcatatacatttttgagaagttaaagctgataggacacaaagatggttgattgttctacagacgtggaaggcaggggcttaggtcctgtaaagtcccccactgagcaaataactgagacagtacttcctagtgatgcattctgctgtcaaacagtgtgaaattttcctggagaaggctcaggccatcagtccctggtccatcttctggccccacagagatgctgatcgaacaccctccacagggagagcattgcacaagtgattccctttttagaaattcttctaagccagtcagaagaagacaagcttgcagatggaagggaatcagaacctgggcaatatcttgtagtggccgagctatccctgtgtgtggtttggagtgttttcactaagacaaaacagtgggagaaagaaaaaccctacacccatacaaactttgagggaatactggagcttattgtaacagacactggtcatgctatgaaattttattaccttttctggaggggtcgcagggctttgtgtttgggctgctttccgtggtgcagtaattgtcaagcttgccaaaagtgtgacagaatcacggaattacccttggcagaaacgcagaattactcctaacctctactctcatcctccacctggaccagacagagaaacaacttcttgagttttcagaaactaccaaatcttggctctagctccgcatccttggccagagcatggaaggttggggtgagggacacggtgaacaaaaactgcatcctcgagctgctcgcacttcctctttccctctttggtcttgtgtgtggggtcagaggttaccaggcaggggtcactaaggttgtcagtgggaggatgtgagccctagtgggttcctcccaggcagctcaacatgggaggctcccaattcccctttctcctgcaaggaaagataccacagctgtgtcattctccttcagagactgcagattggaggtctgtttttccacaaaacctagttctaagacatttctagcaagtgagagtgactgattggaagtctagtggtgacagctacccatggggcaggcttaaatagcgactcctccttgtagtgaacgaatttcagatttcacacaagaagggcaaaaccatgggctattttctcccatgaatttttgcctattttgggccctaaatcaaattgagaaaagtgtgactaaaacactcaaactgccaatatagttagagatatacactttgtgagactaactcgggaatctactgccctgcttctgcaaggataaggctctgtaaggcatgacttgaaatgaaatccaagcaccttttatctgtttaactctggtgcaggagaacagagcagcatttaaggtataaattaaattagtctattcctgaagagaacatttgctactcacatttatggtggaagatgcaatctcacaacacaacaaagctctccttgtgagtggagcaggccaatactgggtagggctagactatagggctcacaggctctatgccctaagctactgatgcccctttgtgccagaggctgggttttgcaacaaactcagttcaggtctgggaacactgggcccaccgagaatcctaaatagtcaactaaaatccctgaaatacccaggcctgtttctttaatcattagtattgtttgcatacctttaggaggtacaagcgcagttttgttacatggttatattacccactggtgaagtgtaggcttaccaaagcaaaaacagggtggtagataatctcccttgtgcaatcaacaactataaccctggcaggtagggtgcctactattcatactgactacagagagcctggactcctctaacctgataaaggatatgaagccagttatctatttattacctcttagctccaaattcaccagtcaatatatattcttcgataatagagggattctttaagcatctctcctttaaagtagcatcaaagagcacgatgttacacttacttaatagagggctctggagggacagacattgaaaaaggaagggtacttctatgatttctggctctcagaggtgtggaggtaaggacattcaggatgctttgtcccaggcctgggcccagaacaactgtccctcagtaaacctgcagtcctggtgtgccctgatgatcagcttcttgtggccctcttgatagggacatcctgtactccaagtcatctgcccactgcttccctctgctcacttgctccgcagccacacacacacacacacacacacacacacacacacacacacgaccaggttcatgtagtcctttcaatactgcagccctctcaacaccgagcccccaccctgatcctgtgcaaggggcattgtttactccaggcctccaactgagacaggactcccaacccctacttcacaccacatactaggcaccagctatggcttgtccacactaccatgctccaaagggtgccttcttgcttcctctgcgaccgtagaccagttctgcctctgtagaccagcttaggtactggcaaaccagtggaacttctctgccatccagtaggttcttctccaattaggtataaaatccatccttggggagaagctttcattctaagcttgtctttccttgggtactctctcccagccccagaaaaccccacatagagttgtcttgtatcctatacaagatcttttatcatcgcttaatgattctttatattaaattttccccttctagatcactgtgtgctttctatctcctgattggatccatattgctgcagaacacaacatctacagcaagcatcattcttaatggagaatcactgaaagctttctcttcaagagctacatcaagtaaggatatccactatcaccacttctatgcaatagtttactgggggtaggggcggggtcccaggcagagcagtagggcaagaaaaaggaataagatatttggaaaggaagaagaaagactggaactattttcagatgatatgacagtgtatataaaattctacaaagtattacagacaaattattagaatcgatagaagagtttatatgcttataggataaaatcttaacgaacaaaagccaattgtatgctatttagagctataaatttagacaataaaaatttcaaacatatgatttgcaaaatattaaatgcctaggataaaaaagttgccttgtgggaaaaatataaaataatatttgggcaaattaaaggtgatcttattaacagaagagatagaccataaccacgaatcgaacattcaatattgagaagtcaaatctaaaatatcagcacaattcaaattagaaccccaaactagctgttggttgaagtttttacgattagtttataatttaaatggaattgaaatggaccaaaagtagccaagacacttttgaagagcaaggtagaattgatttgcctaatccaaatatcagaattgactatggatctgtagtaattaagacagtgtggtatttcaaacagacaagtgcttaatagagagtatagaactagcccacatatgtgtagatacttgatttatggcactgtaaatcaactggcaaaaggcagacttttcaataagtggttcactgagaaaactggatattcacttacttacatacatatatacataaatggaactctacttaacacaatacacaaacatcaattgcaggtggattaagacctgactatgaaggacaatagcagacatattttagaagaaaatatagagaatgctttcatggtccagggttccttaaaacagaaaagatttcttaaaacaaaaaagcactaaccatcaggaaaagaatgatgaaattgactatattataattaatagcttctgttcacaaaccggagcacaaagcaagtgaatatacaaacagagcaagggagtattttggccgcaggtgtggaagagtatttaaaatatttaacagactcattaagtcagtatcagatgaacaataaaatagaaacgtgggttaaaagaggtaaatttgaataggccttcctcaaaatagaaactccaaaaggctcattaacacaaaaatgtgctaaagcttaatagtaatttggatattgcccaccagtagaccggcaaaatttaaattcgggcaatacttggtgtaggtgaacatgtggatcagtaaggactctctatgctgctggtgggattgacaactctcccaatcactacagagaacaatttggcatcatctagtaaagctgaggatatccattccctatggccctgtgattctattcttggatatataccctagagagatttttacacgtgtcccattagaaatgtgcaagaatgttcacaataatcattgaaaagtagaagcaatcctaatctccatctgctgtagaatggagtggaataatcatacaataatcactttgctataagcatatgctggaaagacagtcgatggagacaaaggatctacttacttatagctattatgaacaacatggacgagtctctcaagtataatacagagtgaaaaaagcaagctataaaaggaagcatgccgtatgattccacttatacaacttcatatcaactctattgtttagggatgcgtacaaaagtgataaagctataaaggaaagcagtgaaatgattattacaaagtcggagcaattactatatctatataggagagtgtggtttgtgactggaaggagtacagcagctgtattctgggaggttggcagtggtctattgcttgaccttggtcctggttaagtaggtgtctgcttttgtaaaataatctaaactatacagatacgttatatgcactcttctaatttcagatttgaaaagtgcttcctccagaaaaagtaatagaaagaaaagtatgtggagtagaaattttgatgaggttcgaatagttatggttgaaaaacttgattttcaagagaccaagtgtccactgttattaaaagagggcgagagagctgggagtatttaaacaacaggttacacccccccacccccaccaccaccaatctgttcatcactctaagccttctcatctcagatatttcaccctatatttgtgtcaattccaaactcattcgtgacagacaaattggaggattgtcgtcatcattaataaggacattaggcaccaaaggcccagcaagactgggccaccacacttaaatgtgagcaggtacaccggggcgagtggacaagatcgtctgtgcacattacttggcagagtccattgagtgactgagggtttaaccttaacacatttaactggaactcctgcccagagaatgtgctggagaatgcagaataaactgagcaatgccctcattgtgctatgagagtggacatgaagtttatcatggtacaaccgatcgtcgaagggcaaagagttggtttaggttgtgcactgtatagggagaagccaggggcgggttgggtttttttccagatttcagtataaattgtttcatcctccagactttgcatttgtaggctgaagagtgctaatctgttttggccgcatctctcactcattctaatctctgttatcagcagacaaaaattgaactatgtggcaaattgtaccgagcactttgctcaagacaattgtgagtatggaagttgtcccgcgcagaggtgggaaggggaagggcaatttccgcagaaatgccagcactatggtggtttaatgctgacacagagacagttttttctctcaggaattgtctttcatccatcaatccagccaggtagccagccaataaacaaattttaacacacaaaaagtatgaagcaacatgtctaacactgggaggggctggcgtgtgtttatttgggtatatacaatgagtcacggattaaaattgcttttaccagatagatacctaggtgttccacagcattattgaacaagatgtcgtcatttccccattacttcagaagacctccttaattacttatattaattgtagaatatatttatgcataccaggctctacctctgggctttctattccgttccagagacccagtaccagaatatttaaatcactgtggcgttgaatacattttaatatctgatagggccagtttctgcgcattgcacatttttttttcccctttcaggaacgtgttcaggcccgcggcagggggcgggatcgcgcctcctcctcggctctggttccagccgagcctctcggacgcagagatggaaatcccgaagctgctcccggctcgcgggacactacagggcggcggcggcggcggtatccccgcgggtggcggccgagtccaccgaggccctgactcgccggctggccaggtccccacgcgccgcctcctgctgccccggggcccccaagatggcgggcccgggcggcggcgcgaggaggccagcacggcatcacggggccctggcccaagcctgttcgcgccgaggccccatcaacctagcggcggcggcgacgacttcttcctggtgctgcttgacccggtgggtggcgacgtggagaccgcgggctccggtcaggccgcagggcctgtgttgagggaggaggccaaggcgggcccggggctccagggggacgagagcggcgcgaaccccgcgggctgctctgcgcagggcccccactgcctgtccgcggttcccactccggccccgatctccgcccccggccccgccgcggccttcgcgggcacagtcactatccacaaccaggacctgctgttgcgctttgagaacggcgtcctcaccctggccacgcccccaccacacgcctgggagccaggggccgctcctgcccagcagcccaggtgtctgatcgccccccaagctgggttcccgcaagccgcgcacccgggtgactgcccagagctgcggtccgacctcctgctagccgagcccgcagaacccgcgcctgctccggcgccccaggaggaggcggagggcctggccgccgccctgggcccccgcggactgctgggctctggtccaggcgtggtgctgtacctgtgccccgaggcgctgtgcgggcaaaccttcgccaagaagcaccagctgaagatgcacctgctgacgcacagcagcagccagggccagaggcccttcaaatgccccctgggtggctgcggctggaccttcaccacctcttacaagctcaagaggcacctgcagtcgcacgataaactgcggcccttcggctgccctgcggagggctgtggcaagagcttcaccaccgtgtacaacctcaaggcgcacatgaagggccatgagcaggagaactcgttcaaatgtgaggtgtgcgaggagagcttccccacgcaggccaaactcggcgcccaccagcgcagccacttcgaacccgagaggccttaccagtgcgcgttttctggctgcaagaagacatttatcacagtgagtgctctgttttcccataaccgcgcccatttcagggaacaggaactgttttcctgctctttccctggctgcagcaagcaatatgacaaggcttgtaggctgaaaattcacctgcggagtcacaccggcgagagacctttcctttgtgactttgatggctgtggctggaacttcaccagcatgtccaaactcttaaggcacaaaaggaagcacgacgatgaccggaggttcatgtgccctgtggaaggctgtgggaaatctttcacgagggccgaacatctgaaaggccacagcattacccacctgggcacaaagcctttcgtgtgtcctgtggcaggctgctgtgccaggttctctgctcgcagtagcctctacattcactccaagaaacacctgcaggatgtggacacttggaaaagccgttgcccgatctcctcttgtaataaactcttcacatccaagcacagcatgaagacgcacatggttaaaaggcataaggtgggccaggatctcttagctcagctagaagcagcaaattctctcacacccagcagtgaacttaccagccagagacagaatgatctcagtgatgcagagatagtgtctctcttctctgatgtacctgacagtacttctgctgcattgctggacacagcattggtgaactctggaatcttgactattgatgtggcttctgtgagctcgactctggcagggcacctccctgctaataataataattccgtagggcaggctgtggaccctccgtccttgatggccaccagcgaccctcctcaaagtctggatacctctctcttttttggaacggcggccactggttttcagcagagctccttaaatatggatgaggtctcaagtgtaagtgtggggccattgggatctctggactctttggccatgaaaaactccagtccagagcctcaggctttgacacccagcagtaagctaacagtggacacagatactctgactccttcgagcaccctttgtgaaaacagtgtctcagaactactgacaccaaccaaagcggagtggaacgtacatcctaactctgacttctttggacaggagggagaaacccagtttggattccccaatgcagcaggaaaccatggttctcagaaagaaagaaatcttatcactgtgactggcagctcatttttggtatgaagcaactctattcattccttgccatgtggctaacttttattacagtcaattttgaggatattctggactaaatatttaagtgcagtcatttctttttggtttgcaaaaagagcacagccctggactatgagtttggagatctaaattctgatcttgagtctggaactgacaagttgtgtgaccctcagcaagtcacttaacctatctgagccttaatttccttatttataaattgtggtggtttgaacacattgctcataaggtcttttcagttttgttttgttttgttttgtgattttgtgctttttcttgaaaattttcgggcattttgcaattattattgtttgtacttgtaatcagaagcggtttgagccctgtagcactaaataatgaaagattgaggaactggtgttttacattaaaaatttaatggaaattttacacagtacgaaaatctaatgatagagctcaaaaaaaaagagctaaaaataggagttggttcttcttagctgtttatccttctaaccttttttttaaatgatgaaggtatgtttttgttgtggaaaatacaagggcttttgttatcactcagacccagagtgaaatgtttgctttgtggttttgaataagttggcctttaataagttatttagtctctcttagcctcagttttctatctgtaaaatggtcatagcaatgtgaacatatgtgttacatcctagacttatttttctaccccagtaggttgtattgaaaggaaaatgttatatgtgtttcagcatgttttggtgaatcttcattccctttcctgccccttgttttccctcctcaaaggggagaaattagcacaaattagtatcaggattgtgcaggaaataaacatttgtgaaggttaagaaagaggaaaaggaagttatttcttcaacagattaaggatttttctacacacagttcttttgtggcattggccacatgtccattagaccaatttgatagtatcttcggtctgcattcaaagccagctcatgcaatgagtattcagcctattcttccaagacaatctggacatagaccagagggagatttttctcccctctgtgccctagagagctcattgctggcttactcttagagttgaaatgagagggttttg

SEQ ID NO: 5 - DNA, 2121 bp, Homo sapiens
ctgctcgcggccgccaccgccgggccccggccgtccctggctcccctcctgcctcgagaagggcagggcttctcagaggcttggcgggaaaaaagaacggagggagggatcgcgctgagtataaaagccggttttcggggctttatctaactcgctgtagtaattccagcgagaggcagagggagcgagcgggcggccggctagggtggaagagccgggcgagcagagctgcgctgcgggcgtcctgggaagggagatccggagcgaatagggggcttcgcctctggcccagccctcccgcttgatcccccaggccagcggtccgcaacccttgccgcatccacgaaactttgcccatagcagcgggcgggcactttgcactggaacttacaacacccgagcaaggacgcgactctcccgacgcggggaggctattctgcccatttggggacacttccccgccgctgccaggacccgcttctctgaaaggctctccttgcagctgcttagacgctggatttttttcgggtagtggaaaaccagcagcctcccgcgacgatgcccctcaacgttagcttcaccaacaggaactatgacctcgactacgactcggtgcagccgtatttctactgcgacgaggaggagaacttctaccagcagcagcagcagagcgagctgcagcccccggcgcccagcgaggatatctggaagaaattcgagctgctgcccaccccgcccctgtcccctagccgccgctccgggctctgctcgccctcctacgttgcggtcacacccttctcccttcggggagacaacgacggcggtggcgggagcttctccacggccgaccagctggagatggtgaccgagctgctgggaggagacatggtgaaccagagtttcatctgcgacccggacgacgagaccttcatcaaaaacatcatcatccaggactgtatgtggagcggcttctcggccgccgccaagctcgtctcagagaagctggcctcctaccaggctgcgcgcaaagacagcggcagcccgaaccccgcccgcggccacagcgtctgctccacctccagcttgtacctgcaggatctgagcgccgccgcctcagagtgcatcgacccctcggtggtcttcccctaccctctcaacgacagcagctcgcccaagtcctgcgcctcgcaagactccagcgccttctctccgtcctcggattctctgctctcctcgacggagtcctccccgcagggcagccccgagcccctggtgctccatgaggagacaccgcccaccaccagcagcgactctgaggaggaacaagaagatgaggaagaaatcgatgttgtttctgtggaaaagaggcaggctcctggcaaaaggtcagagtctggatcaccttctgctggaggccacagcaaacctcctcacagcccactggtcctcaagaggtgccacgtctccacacatcagcacaactacgcagcgcctccctccactcggaaggactatcctgctgccaagagggtcaagttggacagtgtcagagtcctgagacagatcagcaacaaccgaaaatgcaccagccccaggtcctcggacaccgaggagaatgtcaagaggcgaacacacaacgtcttggagcgccagaggaggaacgagctaaaacggagcttttttgccctgcgtgaccagatcccggagttggaaaacaatgaaaaggcccccaaggtagttatccttaaaaaagccacagcatacatcctgtccgtccaagcagaggagcaaaagctcatttctgaagaggacttgttgcggaaacgacgagaacagttgaaacacaaacttgaacagctacggaactcttgtgcgtaaggaaaagtaaggaaaacgattccttctaacagaaatgtcctgagcaatcacctatgaacttgtttcaaatgcatgatcaaatgcaacctcacaaccttggctgagtcttgagactgaaagatttagccataatgtaaactgcctcaaattggactttgggcataaaagaacttttttatgcttaccatcttttttttttctttaacagatttgtatttaagaattgtttttaaaaaattttaa

SEQ ID NO: 6 - DNA, 1320 bp, Homo sapiens
atgcccctcaacgttagcttcaccaacaggaactatgacctcgactacgactcggtgcagccgtatttctactgcgacgaggaggagaacttctaccagcagcagcagcagagcgagctgcagcccccggcgcccagcgaggatatctggaagaaattcgagctgctgcccaccccgcccctgtcccctagccgccgctccgggctctgctcgccctcctacgttgcggtcacacccttctcccttcggggagacaacgacggcggtggcgggagcttctccacggccgaccagctggagatggtgaccgagctgctgggaggagacatggtgaaccagagtttcatctgcgacccggacgacgagaccttcatcaaaaacatcatcatccaggactgtatgtggagcggcttctcggccgccgccaagctcgtctcagagaagctggcctcctaccaggctgcgcgcaaagacagcggcagcccgaaccccgcccgcggccacagcgtctgctccacctccagcttgtacctgcaggatctgagcgccgccgcctcagagtgcatcgacccctcggtggtcttcccctaccctctcaacgacagcagctcgcccaagtcctgcgcctcgcaagactccagcgccttctctccgtcctcggattctctgctctcctcgacggagtcctccccgcagggcagccccgagcccctggtgctccatgaggagacaccgcccaccaccagcagcgactctgaggaggaacaagaagatgaggaagaaatcgatgttgtttctgtggaaaagaggcaggctcctggcaaaaggtcagagtctggatcaccttctgctggaggccacagcaaacctcctcacagcccactggtcctcaagaggtgccacgtctccacacatcagcacaactacgcagcgcctccctccactcggaaggactatcctgctgccaagagggtcaagttggacagtgtcagagtcctgagacagatcagcaacaaccgaaaatgcaccagccccaggtcctcggacaccgaggagaatgtcaagaggcgaacacacaacgtcttggagcgccagaggaggaacgagctaaaacggagcttttttgccctgcgtgaccagatcccggagttggaaaacaatgaaaaggcccccaaggtagttatccttaaaaaagccacagcatacatcctgtccgtccaagcagaggagcaaaagctcatttctgaagaggacttgttgcggaaacgacgagaacagttgaaacacaaacttgaacagctacggaactcttgtgcgtaa

SEQ ID NO: 7 - DNA, 96597 bp, Mus musculus
  misc_feature (8196)..(8446): "n" at positions 8196 to 8446 can be any base.
  misc_feature (29221)..(29240): "n" at positions 29221 to 29240 can be any base.
  misc_feature (43067)..(43340): "n" at positions 43067 to 43340 can be any base.
  misc_feature (59328)..(59671): "n" at positions 59328 to 59671 can be any base.
  misc_feature (64349)..(64381): "n" at positions 64349 to 64381 can be any base.
  misc_feature (85457)..(85866): "n" at positions 85457 to 85866 can be any base.
gtgcgctcaagatagagaccagctacacagcaagttccaggtcggtgtgggcatgaaacactgtctccaaagccacaggagacaaagggggggggaacaacaggtaagggtgaccatgtaaaaattaaaaacttctgtgcttttaaagaagaccattaagaaagtaaaaaagacaaaccttattcatgagataaaatatgtgcaacttgcatatctaacaaaggtttagtatctaggctatataagtaatttttgtaattcaacactcttaaagcaaataactcaataacaagcaaagaattaaaacattttccagaaaatatgtacatgaaacgacactcgacatcattaaacattagaaaatatagattacagtcataatgagatgtcaccttacccccagtgagatgaacgtccgaaagactaccacaatgcctgtgggggtgtggagaccctactgatggattgtaaaagagtactatcatgggaagcgttttgagcagttgttcaaaatgttaaagaatcagtgtatatcccagtacactaaccaaggttctccagagaaatagaagggtgtgtgtgtgtgtgtgtgtgtgtgtgtaagaaagactcgagaataaacgagaataaatgtgttttgaggaactggttcacatgtttattgtggagggcaatattatcacttggacaggatctaggatcatttgtgagacaagtctatgggtctacctgtggggattgtatagattaggttagcttctggccaggcatgtgaaggattatcttgataggtttaattgaggtgggaagactcaccccaagtatgggcggacacattccctgggcttggtgtcctggactgcataaagggacagagggggggtggcgggggggcgggggggggagtaatctgcacaccaacagtcaccattctgtttccccacttcaaatgcagtatggccagctcaaacctaccatgacagactggatccttgaactgtgaaccaaaatgaaccctttgagccttaggttgcttaagggctccatgtgtgtgtgtgttaatttttttccaaggaaggagtcatcaggttgtaaaaggacctttgataggagaaatgttaaaacattatttagagtgccaggctaattttctggccgtgtgatacattgcactaagtggtaggaagattttatcacagcaacaggaaaagtgttgagaaaattaagacaatatggaagctaacaagtctaaactctgtttagactctaaaggcagacagtctgctctccctcagaaaggccttcagccgattgaatgaatcccgcttgtattctagacagtaatttgctttacttaaagactacattagtaaatgctaagcccatcttgcttcaagagcagaaaccctagtgtggactgaataaagattgcctcactcagtggtcagagtgagcagatggcatactcccaagaagcaacataggaaagactaaatgattttttttctttttaagagcagaaaatgtaaaacttaaattcagagccgggcgtggtggcgcacgcctttgatcccagcactcgggaggcagagacaagtggatttctgagttcgaggcctggtctacaaagtgagttccaggacagccaggactatacagagaaaccctgtctcgaaaaataaaacaaaaccaaaacaaaagaccaaaaaacccttaaattcaaagggggggagggttgttactattgtttgtttgtttgttgtttgtttttaatttggtttacgtttttcagtgatgtaagtggtggaaagaatcaatgtcagcaaaaaaacaacaacaaaacaacaggaagttaagttggatctaagatgactgtagcgcctacagaacatcagctagaccaacacagcagagactgaccagaggagcgggtgttcccaacactgtcagctaacttggtgcagccatgttaacaataggattgaccagaagccaggtggcgatgtccctaaagccaaaccagtgctgaggcaaacagcaccagaggaaatcaccccgagatgcccggggccttagtgccagtgctggggcctgggaacaacatgaactctagttcttctacagattttaatctggagttcacagatgcatagaggacccctaatagacttgaaaaggtccttgaacctttgattaccacatggagcagttttgtgtgtgttaatttttttccaaggaaggagtcatcaggttgtaaaaggacctttgataggagaaatgttaaaacattatttagagtgccaggctaattttctggccgtgtgatacattgcactaagtggtctggcactcccaagtcttggactaaaaatgaattcttagtgcatgatctcactgcctgcagggcagtttgattctgccctggcatttgatgggacttgttagaggattcggaaaggcaggatgttggtacgtttgaggccattaaaccaagaaggaagaaaaatatattgtggagttgaattaaatgctgaatggctaaggacattttttatggtctttgtcaacactcggaaggaaaccctgcttagaaacaagtgagtgacaaaccagctccgtctagatgcagcatgttgggtaaacaagtcgtctttccaagaaacgccgcttcagtcatgctttgatagtggagaccgggagggctgggatgcttgtgtctgtgattataactagtatatgacctagaaaagcatccaaaggtccttttccatatggagaccagagttcctacagctctggtgtcaaatgtggaaaacaaatgaagggtgtgtcctggaggccctgatctataggagagattctatataaaatgaggcacagccctcaaagtgcctctctctccaggcccttgctttaagtcttatttttggtcttgatcattaattcccattacagtagatggacagtggtgatggttgctcaaccagaaatgtacttaatgaccactaaactgtttatctaaaatgatgaaaatggccaattataaactctggatactttattatgacaaaaacataggataatacagagtggcgacggtccacttatcttatgtgagaagatttctgtgcaggagaactaagcgttcagaatcttgtcagtggccagtctcacccagagagatcctgagggccctgccagccagggaagaagagaaaaaggacaggccaatttctgtgtcagtaggaataatgagccaggtgagaaatcacagatgataaataaagtagagacgaggatgggtagattgatgtgagatgtaaggtgaagatagaactgacagcctgtactgagggcctagccagcagtgaggagcaaagatggttcgtggttttttctgctggagcagttgggtccacggtagcatcttctgttgacatgctgcctcatgcctctcttacctgccgctcgcctcacttgtctttaagggctctcggcatgacttcctgtagcctttccttgctttagctgccatccttgtgtggccccacagggtcagctcagaaacttgtgagtgtgggatccggatgctcaactgtgttgcctggatggcacgaagcaagccagtctgcagatgagactgagaggctgtgtggctctcaagaaagggtcagaactgtgcaggatctctgttggcttctagaagaaagatagcagaggtcttagaagactgcaaatcttaggaggaggcagaaagatctctacaacttgaccaagtactgaagctaggaggaagagttaaggcattgttgatgaccatccaagatccaagaagaaacattcttcatgaagttgacagaagcccctaagaggtatgcctgcttgcagcccacagtgaacttgatgtctggctgtgtgatatagtatccttgaagtcacgtgggcactaataccccgatgccatttgagaaccgactctgcggatgttttctgggtgggcgttgccagggctgatgatcctctctagaggctggatttcaggatgagattgctattatgggttttccctgtgatactcagcaaccatggaccatatgcttacagttactcctcgagggaactctgacaagatgatgatactgctttttcaaaagaaactacaacagaaggggaagtggggggacacacctctaagttgtaatgtgcttcacaacgcatgagcactaacaaactaagcagtcggcttgtgtacaaactgccatggcatctgctgctttgccaccttgctttgctgttttactgagtacacagaaaaagtgaacaccatttttttgaggaggggaacgtactctctgactggtagtgaatatcagtgttgtgtaggaaagaggtggctgcttccttgggtgagcctgggtagtccctttgtccagcggtgtgcccttaggtaaggcactttgagtgtccgagccaaggttcttttatcctccaagtgggctaataacactgaaaatccctagctcagtccctaatagaagttttcagtaaaggaaaatcacggtagtaatacagacgctgtacccacagactggtgtctgttagttacagagtcaatgaaagtctaggaattagttcagattagctagttttcactcatttgtttttggttacttctccttttcttataactcttttttccaaatcgcttggtgacaaatagttcaggttgcaacctcttttaggataggatagataacatctgaattttgctatatctgggaacataaacaccgtccttggttgttagacagagtgaattcaggctcaggaagagaaggaccgatggtctgagcactgtatcccagaaactgcattccagctacagttccacagacagaacaactaggtccctgcacctgaaacatgtaaatggcatctccctagggtatgtgcctgttcgtgtgcacctgtgtgtgtgctggtggttgtctgtgttgtatgtgtctctctctgtctctgtgtgtgtgttcaatcttaattcactttctccatcttattgaagtgcctttatctcttccccctttttgctctgtgatagcacagggcacatttccttgtgttgctttcccagggcagtagaagacacaagagccccaagatttgcaacccaaacatctccaatccacatcataagtggatgtctaaattctgtctgaaagataatttttaaattcatatttatagattccaaaatttaatgccaagtgaacccattacttgttaaagcttttctggccacaaaatcgtgtccacatttagtccttcttggtatgagtaaggactttagaaccactgtcagtaaatctatagctaatattttggcagaacatttgaacttgatcttgcttagtagcaaataatctctaaatgtttttatttttggaattgaactttttgttttccgatcactgtccattctctaggcactcaatccagaagtggggaatgcccctgtgtaaatggggattcgtctcagtattagccctaaaaaccagtaagctggttttggacagaagtggtagcctgaacctagaaaactcaccttgacctctctgtgcagcatctctgctgagaaaactgttgctgatttgtagagagcatccaccacttcaggagataacattgataaaggagagagaaggagaaacttttaatcccacagccaaggggtgccaccgtgcatggttgttagcgtgcattcaggctcagcacagacatggaccgatgctctgaatactttattttctatcctttgtgttaccccacatcctgggaaggtgggaaggagcaattagggaaggaatttaatctcaggaagacaccagagaatcagtgctgggagtgagaggagccctgagctacctctctgtcttgaagaagtgattctgctcgtatgagatctatgtgtgggtgaaaatgcctccacctgccgtctcctgggggaagtagctcatcacatcctcttaagcccactaagaccagctcagctaggagttaagctgtcggggataaagaacgcaatcagccttgcctatacaactttccagaaaacccaatcgtttcgcagctaattggtacaaatgttcccttgcccgctgtttacagctggagaccctcttgaacatttttatgtaattaaacaccatttactcttcctaccttaaaaatgcaggtcctgccgactctttcttttaagtaaatttaagattacgcaagagggaattatagacagataatttcccacatttgcagtacactactttatttggaaatgaatgaatagaaaccactcacacgtctacttctgcagttccccctgcttctcttaacagtaactatgaagaaaggaaaaggcggtgttgtcatgcttggtgtagctgtaccacagcacatcacccactgtttcctgagaactgtccactgagccactctgtgtgtggagtctttggaaatcaatcttgttagaaaatgcagtcgaggcaggaagcgtccagcactcctgtattcaccgttgtttctaagaggccaggagttcagagcgcttactggctgaatgggggtgatatgtgctatcctgtgggccactgggcctggaagacctccaaaagagcagtgtcctatggttgtgttgtccgctatccatgtttagctatttaaatttgacttaacttaaaatcaattgctcattcttagcaggtagactctaggtactgggtcgccacactgaggctgctgtgctgtgctgtgctgtgctgtgaatgctgaggtccccattatcatagaaacctaaattagtggccccaagatttttaagagcatcccttgtgactatagcatatagttaacacaaaaatcctatttaccaacctgcttgagactagtggtcaaatagcaatcagattgctagcaagacaccatgcagcagtatgaatttgtttgactataccagttggtgaaataatgaagcaccagagttaacagaggctcggtgctctaagctcttcactatctgctgaggctatttccctaaggttctcgggcccttcttcagtcatcgtaaagtgaggaagccaatgacctggagggtcacaacactgcaggccagattggtggctggtgctctaggtgtcatggtgccttgactttgagaaggggacactttctaagggtcattctgtaggctcacataccactgtcatggccatgacccaaatgacagaactatcagcttcaacaagacctcagacatcatcatctcatgacccaagagagtcactcagctagtttgtgaccaactgagaaatacaacacttagtctggtatttatttattcactcatctattggctacctctttctgtgtctactgtaaaatggggattattaaccttaatgcctggcaacattgttaataaaaagcaagatgtttctcaaccttaaatgtatgtcttataatttgaaaaatccccccaaaatccccacatattcacatatattcatatacatattttttccacctcatttaatcctaagaagaacctgtgtgaagagttaggctcagaggcagagcacctgtcccacataaggaagccactgtgacacagagggctgtgtctctccggacttaggaacaataatctcttgtaaatgtacggcaatacaagcatgtggcattgctagctttgggcctgtggcattttgcagttcaggagttagcgatgttggaagttatggctttgctcgagtggtgcattttttcttttttacactttgataatctgccagttgcacagactttggttcggcatgggcggctttgaagtatatttttaaaatgagagaatccagatttgtaattagctttgcaaatgctagttgtacagtttcagcatccgaggagctcctgctaatgtccctgttcctagtggcagctctgtgtgattttttttttattccctctccgtcccccaagcaattaggagaaacaaagtctgctctctgaggatcacttcctcacctcttcatttgtataaactatgagcttggtgacctcaccgaattaacgatatacctgattgcaacaaaggacaaacctttataagccactctaccctcttaggctcctaattcaggacannnnnnnnnnnnnnnnnnnnnnnnnnnnnnnnnnnnnnnnnnnnnnnnnnnnnnnnnnnnnnnnnnnnnnnnnnnnnnnnnnnnnnnnnnnnnnnnnnnnnnnnnnnnnnnnnnnnnnnnnnnnnnnnnnnnnnnnnnnnnnnnnnnnnnnnnnnnnnnnnnnnnnnnnnnnnnnnnnnnnnnnnnnnnnnnnnnnnnnnnnnnnnnnnnnnnnnnnnnnnnnnnnnnnnnnnnnnnnnnnnnnnnnnnnnatgtgtatgtatgtgtgtatgtatatacatacaccatgtacacatggaatagcatttagtgaaaaaagagaccatgaatttgaggattttggaggggtatgcggaaggctttggaggaaggaaaaagaaggaagaaatgtagttataatatccaaaaatctttaaataattttttagagaacaaaagaagaaccgtggttctgcatccaaagtacccaggttcagttcccagcacctacttggaggctcccaactgtctataactccagtctcaggggatctgacaccatcttttggcttacgcaggcactatatacaggagggctgcatgcacatggtgcattgttatacattcaaacaaacactcatacacataaagtaaaaatatataaaatctcaaaaaaaaaaccctaaagaaaaacttgtgaggacatgcttgaagctcacatcaccaacgtggtcgcttgttagctttctagagacccaagaaatggtcagaaactcaggcagcctgacactcaggtgaccctccgtgtgtcgcttgcagtgacaatgaaggaaaacaactgataagtcctcatttgagaaaaacaattgaagtgtttctatgaaatattataatactacagggattcaaaagtgtgttttcattaactgtagcaacattgcgacatgttctctcttatgtaactcatatttaatttcatatttaataattaaataaaaaccctctatgtttgtgtaccaaaagaatactggtccacaatccaattttaaatccaacacctttcagggtgtggagtgtgtgtgcgtgtgcgtgcatgtgcacatgtgttcatgtgcatgcatgtacatgtgtgtatccaaccccagaagttacactgaatgggcagtgagcttcaacaacaaaatatccttagtcatttattggtcaaagttaccactgttcattattttttttcctttactctttacctgtttttatgtgctctacaacaaacattaactcattatcagagaagaggaaataaatatgtctaatcttatgaatgaaaattttatctgaggacttaaggttaggttaaagccaacaagaagcttgtctgacttgaaaataaacactttggaggcatagatgtcagccagaattcacaagttaatctagaacctcttttagttaagaccaccacttcggcctccatactggggcgtttgaatttgatgaagaacgccttctgagatgcagccggagagatcggggtgactggatcatagccacatccaagctgtgggggttcaagtgaacacctgataagggaagcttgtctgcagggaacgcctgcagaggaggtcttctgcccgaatagagcctagatattggtacctaggggggattgtcttactctggccttgtagttcgttgaagagaaacactagaaccactgtggagtactgtgttgttctcaaagttgagtagagtttgtgaggcagcaggcaggagattcacggtgtgcaacactcatccactaacgaacgggctttcccttccggtctaggtggacactcactgatctatcacaagattgcctcactgagtttgggggtccatgtctgaatggattgctgtagccttctcatctcttcctctgcccagttcccagcatcctaagactcgaagccaggacaggacctggggaaattatatgtaagtttttactaagatttcttttctttaacccaacaaggctcagtgtgaggcagtcatgccaataatccaagcacacaaaagttaactttcttttaagaaagtgtcatgagaaatgtaaattaagcaagaaacaagggctggaatcccactgttagtacttccttagctcagtggttcttattgtcagcttgcatcagagtcacactggctgttttgagccaaaagatctggtgtcagccagcaatctgctttactaacattttccaagtgatgctgatgtcagtgccccaaggccctcactttgagaatcaccactttaacataactgtgttagaggagtgaatggcaaaggcgggaatctatatgctttaatattgaatacattaagaggtagaacctgtacttacctcattgacacatacctcagaaaacagctctagggtctgcacggcggcttcagctcagaagtccagtggttaccacgcgccagcattcctcctacactgctggccactctttgccttggactttaggaggtcagagtaacggtgcagctgttagcttgagggagtggccacagtcccttgacaagtgtgcacaccatgtttgatgtcaaaaggagaatccgtggctcctttgcaaagtgaatcttcatagtaccatccctccctggtacactgaaatgtaatttcatttacaaaagacacatcaggggaggtacacctccagtaaacagtcgctgagcaaggctcggtttttatggatttccagagcctcagtcctgccttactttgaggtcagctcattaccatgttagcttccaaaagtctaactacttaacctaagacagtttaccctgcactgattcaaacccatgaagagtttggctaagtaaatcctcacttggataaggtgagcggacatacagatgtacatacatgcttgtgagcatgctctgtttccaagccaatgtagacatttaaagtatttttctttcatttcattaaataaatgcgaatataaaatagtaatggtgatactgtcctgtctaggaaacatccaagaaattgctgggcattttaaatttgtggtaaggcactacagtttataacgtttttcttggatgtggtgaatgttgtcatgcaaagtagcacttgggatttgcaattcttttattatcatcatcgtcgttattattttaattgagaatggccgctgtcgatacagtatttgccacccagctatgttatcctagatgaaataggccagacatacttagtgctgttgctcataggaggtacctggggttgtcagactcacacagtccatagggagaatagtggctgccagcaggagggcagaggagtggggtgtatttttcaatgggtacagtgtgtgagctggaaaggttatattttggtagaaggtggtgatgttggttacacagcaatgtatatgttctaaagtctcttatgttacagtctaacataatttttttaaagcataatagcagaactcagtcttcctttcaagaatgctggtccttggcagcaaagtcacagtttgagaggctgcggtgccatcgtacaccgcactctcattgtgctactttttgttttcaatatttttttttacttattttacatcctgatcacagcccccccttctcttctcccagtcccacccatacaaatccgtccccccatttcccccttccccttatcctcagagaaggagagctcccttgggtgccctatcctgggacatctattcccagcaggacaaggcacatcccctcctaccgaggcccaaccaggcagttcaagtagagggaatgtcccatggcaggggacacagaccgagacagccccctctccacttgttagaggacccatatgaagatcaactaggtccagtccctgatgtttggctatgggtctctgcctctgcttctatccgctgctgggtaaagcctctcaggagacagtcatgctaggtggctgtctgtaagcctagcagaggatcatagtctcaggggctggcatgcccacatgagatggctctcagtcattggttggctgttccctcagtctctgccccatctttatccctgcacatcttataggcaagacagattttgagttgaaggctttgtgggtgacttgatgtccccctcccacctctggaagtcctgcctggctataggaggtgaccagtttagtctctacatcccctgctagtaggaatctcagctagggtgaacccatacactccccatatcctttcccactccaagcttccaaagagtcccagagatgccctcccccatgatttccattctcactcccagccctctactgtcctcctcccttcccacacctgatctccatgccatctccattctctctctcaccccatctcccacccagttccctctctccatccacatttgataactatttagtttccccttctgagtgagattggtgcatcctcccttgggacctccctattactgtgagttgtagcatagttatcctgtactttatagctaatatccacttatacgtgagtgtatgccgtaagtgttttgtcataagtgggtcagggctaccttactcaagatgatattctcaagtttcttccatttgcctgcacaactcatgatgtctttgctcttaatagcagaatagtattccattgtgtgatgtgtaagttgtttccagcttctgactactatgaataaagctgctaaggacgtacttgaacaagtgtctttgtggaatggtggagccccttttgggtatatacgtaggagtggtatacctagatcttatatagagctattcccagttttctgagaaactgccaaattgatttccaaagcgcttgtaaaagtttgcactcccaccagcaatggaggtgtgttctccttgttccacatcctcaccagcacatgctgtggcttggggttttgatcttggccattctgacgggtgtaagatggaatctcagggtcatttcgatttgcgttttcctaatgactaaggaagctgagcatttctttaggtgcttctcagacattaaagattcctctgttgaaaattctctgtctagctctgtaccccatttttaattgggttatttggtttgttggtttctaatttcttgagttctttatgtactttggatattaaccctctgtcagaattagagttggtaaagattcttttctaatctggtgactgccgctttgtcctattggtggtgtttgtagccttacagaagcttttcagtctcatgaggtctcagcaattgttgacttagtgcctgagccattgctgctctgttcaggaagtgtactcctctactaatatgttcaaggctattcccactttctgcattagattcagcatatccagttttatattgaggtctttgatccacttggacttgagttttgtgcagggtaaatatgggtctatttgcagacagccttcctctacatgcagacagccagctagaccagcaccattgttgaagatactttctttttcccaatgtatggttttgccttctttgtcaaaaatcaagtgtccataagtgtgtgggtttatttctgagtcttcaattctattccactgatcaccctgtctatttctataccaataccatgcagtgtttattattatccctttgaaatacagctcgagatcagggatggtggcatgtgtgtttcaggaataatctgtaagctgtgatataactgctcccaggagtgatgtctaaactaactaaccctgtgggcctgtagatttagcctctgcggtcattggagaccatcacacattttggagtcagttctgttgatagtttttagaaaaatgtttgatttgatcatttataatagactcagatcccaattatattctattcatggaaccatcaaattaattttttgtatacatgatagtagttcaggggatgtgatgttggcagcacgggaatatacgttgatatattaatcacaacctccagaggttttcccccaatctccaaataagctgagctggagcgcaccgtaaagttcctaccaagtaataagcttagccgcctaaatgcgttaccagtttactctgagtctccaagcggctgagtgctagagaagtggctttgtggctgcacctgtcactagtgaaatgacacttctcactattacaggggaattcagggttcccttttgtgggttcttggtctcattaataaaaagatgctaaaatggactcggggccagcaaggtggctcagcagttaaagtaacctgacaacttcaatttggtccctagaacctgcatggtggaagggaagaactgagtcctgaaagttgccctctgacctccacacctgtaccatggcacgcgttcatgagcatgtgtatacacacacacacacacacacacacacacacacacacacacacacacttgcacgcacacggattttttttaaagaacagattcagaaggaaactcaatgatcattttattagagtttgagagaaaaacaactgggtaggcaagctatagatctcagaagccgctggcaggaggagatggagaagaagagagaaacccaggccattttaagatgcataaaagcctccatgttgagcattggcattgcgtggcaccagggtgtagggaatagcatagatagtgaaactgtctggaaggtcagtgagcattctccagacagtgagtgaactgggaggaaatgccccaaggtgttggactgcaggcacacagccctttagaggccatttcacagcacacacctcccttgtgtgtactttacacacttttttttatttttaatttttttttttgcacatgttctctttgttagatgaaacccaggtggagaaaggcttccaatctttctgtgccaactggcttcattcatatgttaatcttggtaaagcaattttagcatatattcgcttaccagattgcctcaccctcacattaatggtgaagtggcaacttgcccttctaggaacccccattcatcacaagagggcctggtatctgccacactggtggcatacactgcagagaatggctgtgttgagatgtgtcactgctcttctgccccaggacagcatctgtgacgctctacaaaccagtgggtttatcgaagcccctgtgcgttgtagattagaaactgttgtgtctagatttttcccgtattctacccttagttgacaccaaatcagataattacatgagtcttatgtattaactgttgtaatttctagaaaaaagtcagaatccaaaaataattgtctccttgtggcaaagcagaggtcacttcggcgtataccttcttgaaaaagtaaactcatgcatggttcacttaacaacagctttgctctgagaccgccagtttatcctgtggtcctcagtgtgcactcacacagcccacgcacactgaataatgtcatcttctggaactggtctgaattctcattagatccgtgttatcctacataatcgtcaaagccacataaaagaataaacgcaaatgttccctctaatctagccacaaagatacaactcacctacatcaggtgcttttgtgtgtccttccaaactgtttttatccaagaattctaacttcataagccatgctctgcactgatttgtactgaagatcttgggggcacttggaaatagcagcactaaccagacatcatcttacaggacgaagaactcctctttcacgtcttccctccaggttccattactcagcttttacacaagacacatgtggacctcccagtatccttatctagaggatgcttctgatagccgtcattctcaaccctacattcgatttaaaaaccatattggacggacttgcaaagcctttgcagctcctgggatcataaaagaaagattggctctgtacagatgattttagtgttagctccactggctaggtctggttactttgaaagtcatacttaatgcacaataagccaaattgatgggtatggggaaggctgacttagctcagtattatccacaatctagacaacacaccctccagtaaaactctaattccatccaagtgcctgccttctcttgttctgatccaaagctttccctcagcttttccttctagttcccctcccaacctcaaaagcagtgtctgttcagagcgctgggctctggtgtgcggctctcttactgccctgtgaagtggtttccacttaagggttggggtgacgcctcacacttagacagggttaaggaggttctaaaacacggaaagaaagaccaggtgtgactttaggggttgcttaagcctccagagtagtaccatccacagtccttaccttagaataggtatttagtaagcagctgctggatgcagttggggttacaaaatgggtctttggaaatttttacctttccgtgtataagacaataacttccttgaaagggaagagttatttgcatcccttcaaatcctgtgtccttcgtggaacataaactctatataggttgatgtgaatatttctgtggcaatcaggtggtcagggaacgaatgcttacattccactgggtctttttttactatctgcacccagcaattgatggcacttaagtaaatatcctcaattgtgtttgacatccgattgggtacaggtgtagggacagggcagacagtacctcgatcctccctggtgaaggagttgctaatactgacgagacttggctccttcgttttcgatttggttgcttcacttcactgagtcacagcacctgccacttaggatggccacacggctaagccagaaaccttccttcagattgctggtgacattatatatgaatctctggtgacattctcggctgacatttgtcgcctgatctcaagtgcttgctaaaagtgagttagctttgtcattgacacggagactaactttctctaacccagactagtgaaaactgaattgtgcctcaccacacgaaggttttgctttcactgtgcccagaccctcccatctgtcacagcacagtcattttgtgtctgatttgggggcggtgtggttgtttctcagtggtgtgtgacccactttttcataatacttcattccatgtgtttttacaacacaagtcagaagctgacgagagtggactgaagccccaggagcatcttctgaggctttctcgcaagctctagaaccacattctaagaagaaggtcttagccctgcagggtgtgcgtcccctaccagagagtgatgggccagttcctctagtttctggataatgagccagtgcacaggtaacgatgcctttctcacggttgatttcttttgtgtgccaattattttaccaaattagacctttaaaaatactagccacttacctgcatagcttctctgttgggatggggaggggctcaggagagtagacattttcattgatactttgagaccttagtaacttttccttaagaatctgaaggaatcaaaaagttatctctgttttctgtgtgcccctagcagacgtcctctctgatggttggttgtttcggtttggttctactgcttgttgttgtacttgtctgcgagcgtcagatacctcactccgctgtgacatctgggtgatagttaaaccttgattagcttctgcctggggtatgggcaacctgtggcgagagcagacagaaagcttcaaagaagagaagggctaatgagggtccgatgtgtcttgctagacactggctactgcaggctggaagcagacagaagccaagtgctattggcttatgtttggcaaaaaccattcctcaacacctgtttataactttatgtttctgacatcacagctgttaaccagaggattcttttaaatatcgtcgtttcaaaacaaaatgttgaaggtgtcacctgtcctaatgtcacttatcctgattcacaggacagtttttggtgaacatttatttaccagggtctgtctggcttgtggcagtatcatctgcacactggactgcataccaccttaagatgtggagcatgcccagagataagtcaaccttgttttccatgaaagtcctgagacagaaaaagaatgaaagtacaaacagtgactggaaaaagtgtcacacacttgagccactttgcatcccttgttaggacaaaccctgggctgggtttttacattcgtgaagctgtgcggtaggtggatcagtgtgggaggttcagaaagagtagcggttagaataagattttccatttattgccctttgtgcatggctaaaaataagattcatacaaatcagaatgtgtagtgcaagcaaaatcattctgttaattctgatgactggcctgcccacatctttgcatctgtctgttaagtggtccattaggaaataaatgtctctgtttaaatagcaaaggcaacctaggttttttttgttgttgttttaattctatttgtctacacatgatagtctgtcatttttcctcttctaaaggaagaaagtcataattcacacatacacgaattgtgttggtgactgaagtggtgagatccttggctgtgtctaaaaagtactggcctcgtttgaaaggtcaatttacggtgtccatcttcaaggcttattgctagaaagttatctctcatgagcccatacagtggtgaggagagagggtcacttagctgtattggaaagtggatgagaacatgatccagtgcacacccgtcctgcagcgagctccatcagcacagatgttgggaggagcagttgaccaagtgaaaacttcccttcatctggcttcagagtctcctgcaaccacagtaagtgataatgtctccatttgtggctagacgaaacaccaaagagaagtgtcggcagtgttcacagggaaatttgtacctcagtgatcccagcattgatgctgtcccatcgcaccgactgaagagcggtggcatttccagaggtgtgtctgcaagcgcaccgagcctttcagtttgatgcggtccatgaggtagatgagtcaggatgccctcttcacgatgcatcgttcaaaggcagtcattcagaagccttatcaatgggagcggcaaatcgcactcctctgactgtgacggtccccgtgtgccgcagctgaagcaggagcggtgggagacgacagacccctgcacaaagcttagccgggagacccacgcacctgggcccatccacttctcctcctagacctgagcatccttatctggaaatgagaaaaggtgcagtacctgccccgacgggtgtctgtgggatttgatgaggtaatgatgtaagatacagagccaaagctgtgcgcagtgcgctgtgcgcgtgcggctgctcattcatgttccctcctgcatctcgaaggtgtgctggagcacggcagagcatccgaggttctcccgtatgtgtacagtagaaattttaggatttaatacacaaaggctcagcctctgggtcttcattcctcacttagaaggtgagagcatttatagagcagtttctttttcttttctttttcttttctttttttcatagcctgctaatgctgcctgtcaggtgattttactttgtaatgacatggacatggtgtgcagcccttcctttgtagattagcaccgagcatattaggctatttttatccgcacactatgcttttcatttaaacccgagtatttcagttctaacatctgtgcgtgttaggtgtagtacctgctggtgtacattaggcgagcggctgcgctaatgctgtaatcaagcgagcttttaaatatttcaggtaggaactagcaaaatctcaggagcaattagcttccattgtagtttcgctccctagcgaaaacattgcctacgcagtgctgatccatcatcagggtgaccaacgctaacaggcagaagacagtcagcactgcgttcattagtttttgttaattattttctgtttcatgtatatgtgcccttctctgtctttttcctcccaacaaggttttctattacaagttaaatattattttataatgtaagggcatagctataagcagcacatagctcgtggtcaccctttcgaagccttggggttggacagtgagagttcagactagacgttgcttcagcctcctctgtgaccttctgggatgcggttctcattcatcaaattaagagagaaattgtgacagtaccttgactttgcctcacctggggcgcgatgaaagtgatgaatgggagcaataaacacagaagttacagcacagcccagaagcagcgagggttcactgtgagcagggaacggattttaactgcagagtcccttttcatgttgattctgccatcctaggtaccaaggctgattgtagcatacatattaaggtcagcagattttctgggtttcagtgttaggacctggcagtctgtagtgaagacagacattcctcaggttaaggaccaagatggtttgccttttcttacagccatatctcatcccccacattgtatccaggctgtgctttatatgcgttctctctctctctctctctctctctctctctctcaagaaaatccttttcttaagagattcttcttaagaagaatccttttcctcagagaaaatccttccaggtgactttcagagttcctggcattacagtgcatgcatgcacaggcacacacgcacaggtacacatgcgcacactggcacacagtggcacacacatgcacacactggcacgcacaccattacctttgccagcctcactgcactttgccactgaagcgtctatgagaattatagactggagaaggtgataaattaaactctggctgtgatttcctacctcacctttgggggggatgacaaaggatctgaaattcatccggttgatacactctacttcttcgtatgtaacagtggttttaacctgtccttcatgtgcagtttgagggtagtggccaggctgggcccattattcctttggttgaataatataaagaatttgcaatggagattacactaatgatgtattttaagtgcatgtccgcattggtagtttagtgctctcagtcatgaaatgctttggagtttatttctaatgggtaaatgctcagaaaaactgaaattttcaataagattgacatttggagtaagaaatataaatctaatgagagcatttcaaccaaggcttgtaattagggctgaatagagtaaatttatacatgctcgctgcagaagggcacggcggaaggtgaaattgcatgctcttctgtgaaggagcgaggaaggccaatgtatcagtgtcaggccgtgacaccagagtataaatgacactgtcaccaagtgctgcactgggtaccaagggaattccactcgagtaaattacattacttagacagacctgaaggcaccgtgctggaatgagtgcagaaaaggagaagtctgtcagcacaaagctgagaacgttgccatatagccaactgcaggatgcacagcgctggctgtgtgggacctggaagggacaatgttccggtctgttgttagcttatagacgtgacagatatgtacagttgacctagagaatgggtataagctgatttctgtgatctggtcagcattgggtttcccttattatttacagttgggtggcaatagggggtcagtgtacatttgccattctttctttttctctgttgtgagaatctaacccctgccccctcggtagcactgttcacctcatttccagccccactgtcataaaacacatggtcgccatggtcaggtggaatgtgtctgtaatcccacctactggagagacagaggcaggaggattgcataagaactctttttctcacactgtgtctttctgagagttgatctgtcttagcgtttctgggcaggaactgggagaagagatgaaacatcagtgatgacgccatctcctctcctcacttactgaaacatgcgctggtctccttttgtctggctgggatgccagtcagtccctgaagaagccaatcacagggactctagaatcagtcactcactccttggctaggaagtaaattgtcccagagagagtagtctgaaacatcagggtggctttctcagccatgtgtcacaccttatccttcttgagacacccctaaacagcctcttgggggacacgctgcatggagaacatggactctgcaggttatctccacacgggttacatggcaggtgttccgccatcttcctaacacagggcacattggacatcagaggtggcactcaggcttgagttttagtctttccaaaataatgctgtgtcagaggtggaatttcatctgcgttttgtgcctgtatagactttattcatttaatcatgggatttaggaaagccaccttacttggaaaactaggtttgagggcaggagaagagaaaatgacatattttctaatttatttaagtatacccacctttaaattacttcaagacgctctggtgcagctcagaggtagagtgcttacgcaggacatgcaaggccctaggttccatccccactaatgcataggtatgggtgtcagtctgggattctgaagtgacatctgcgtaaaagcttcacacggtgtccatgtgaagcctgagctcactgagcgcttactcatcagccgtgggaagtcagcctcgcctgcactggcatgtccccgtttccatcgcatttcacttgtgtgctccacaacatcagtaggggaattgtatgtgtgtcttggtgtttactacaaagttactacgtgacgtttttcccctggcttctccatgacagcctgctacccgaactacagctctgagctcctgtgagctgaaccctggtgaaagagctttgacagcatctaaaatgtttggagcctccctccattctgaagagcctcctttgttccaactgccctaccagtgttgttgttgttgttgttgttgttgttgttcttcttcttcttcttcttcttcttcttcctcctcctcctcctcctcctcctcctcttcctcctcctccttcttcttcttgcgtccaaattggaaagggagcagggggctctcctaaggaggaacgggtctgtggaggattgcgagcactcattcagaagctattcttagttcccagaactataacgaggctgggctttttgtcctgctgaagctccattaaggaacgatccctctacctgccacctgattctgttttccccaaggacgcctggtgttttcttccctcatattctgaatggactggcttctgagtcaggcgcatcttgcaaggcagtgagtcctgttgccgtgatggctcacctactcctcagctgtcctctgaagtctgcattagcagcgcttgctgcagacctggattcatcgtcagaagtcagcctgtccacggcagcaacttacccacattgtcacgccagtgttggcagctgaccactgctgccttgcactgctgtgttcctgggctcccactgctgcagatgagaaaaagaatgcaaacaacagagtcccccaccagagcccatagccatgttccagaggacagtgaagtcattgttcagaggtgacctaaggacgaaagcatttaaacaataagccctcttgtgagatgtggtgaactatgcactgcagacattgtgaagtcctctgtctcggggaaggcagtttctgcacgggtttcaataccttcttgacagccatttaggagaggaaagtcacttgtctcacaatagcatccaagcagtttctgtcctaaggaacgctaaagtgtgttcctttatataaaatacacactgtaatttatagaaatcacagtgctccattgaattgcagtcccctccccctcccctccttacctgaagtagaaactccatctgtttggtaaaagccttctttctttgaattttctttttatattttgtgtgtgtgtgtgtgtgtgtgtgtgttgtgcacacacatgcacatgtcactgaacacgtatagcgaggtcagaagacaacttgcaggagtcagttgtgtccttctcctgtatgtcatggggattgaactcacattgttagggctgctaccaggccccatattgagcagctcgcccacccctcttcattctttgaataatatttatttcttccaaatgaaaaaagggatcccttcggttgcttagattcctaatgaggctctgaggcttgataataatcctcggaacaccttgtcactgttgaagcatgggaaaagaggagccctgctttgaatttagtttcgtttggattcatttaatttaatattttttggttttgtttttgcattgagcctttaagggaggcttggtatatagacatatacccttgttagctcacaccagtatctctggcagaaccctggaattgtttccgttttgatgttgaatatatgactttccgtgatggtggagggcgcggtgcatatgttgactggccagaggtgttctgtcacgatataaatgtaggattaaactattaaaattgccaatttgatgtgtttgcagatcactgtatacagcaccattgcagaatcctcctaattgaagaaatgtttcatctctatctctgttgacaggaaggatcgcctcctgataattgctttgcttaagtgtctgataatatgccaggagtgagcgcattctgtgttaggtcatctttaattatgcatgtaccacctgtcagctctaaatcaggatcagatcagatccttgcagagtcactttggggagggtcggagagaagccaaggtgatctctttgagaaacaacagaaatagcagtaaacatttctcatcacctgaaagcgcctcgggggcatggctcatgaggcaccagccactggcacatctgagaaaatccgaaatctcacccaagcaagataaattacctcggagacaaattacggagagcttggaagtgccccctccctccctccctccctcccgcccgccatctgtggcacttcctttttattctttctcatccttgtaaaggagccagggagaagctcagacacatttttataagctacgtgaggacaggaaatatgataatgatgttagatttcatacatttgggggatttttttttcagtagttagttggctttttttagaaggacaaatgtgggttggaagaaatgcttgctaccctctgtcagcttttagtagttttagtctcacttttcagggctgtttgggactttctggagggatgtttagggttctttaccgaaagttctgttccctccactaagaggtgtttttctctgttcacctgtcagaggcttaaaggcagagtgaacacacgttcactctttcatataacaggtgggcttgactgactgcagaggggcaggcagagaaggggcaggcggagaaggggcaggcgcagggaaatgactgaacatgctttatcccattgtgcagctctcagaacacaaaggggaggctccaagcctgacgttctccaagctgggggggtggggggaacgctcctgagatggctttgcctttgacccacttttggaaaatcctgaatttctctatgtcagatccagctgaatagagggacaggaccgccataaaagtggacctccagccccacagagcattgggttatgactctgaatccctcttcaccaccatccagtgcctaaggtgacgtttactgcagtgggcatgcatccaggtagcacagagtaggtctgacactcactctccggtccagcgtttgtcacttagtgtgcaattgcacaagtaaaagttacacaggactgtcagctccacacagcgcagacttctctcagaagtgactgcaacgtgcccatgcccgacagaagaagatcccaaagttaagtccaggagaaccgagagaacgaaccaacaagtaaaagcagtgccaccatattttctcatccccgctcgtctttgccaaaccctttccatctgcctgggaagattgtgtgctctctccacctgcctgactcctattttgaatgttatctcctctaagaagcatctttaaatttattcttttataattttatacatgtatatagtgttctttgctcaactgccctccctccccagttaaccctctcttaatgccttctcccatcaccaaatcccttcttctcctcaggcccccctcctgctttcatgcttttgtgtgcgtgtaagacgcactgcatttaattagaggtgaacatgagtgaggtcatttgcttgcacaagagcagtgtgccaggctcattcacagaggaatatgattgccatctctctgtatcctttagcttattacatctcctttgagagtggcgaggccttatgagcctctctcggatccatgatggagaactaactggtgggcccagctctacgagggcagccactgctgctttgagtccataggtgcgatggccatgtcctgtcccctagacaacacctatagtactcttggcatcttccaactcttactttctttctgcttcctctttcttggcattctctgggcttcagagggattgatacacatctcccacttagctgaacattcaacaatcactcgttctcagcacattgaccagtgatgggtccctgcgttaactgtcacccatgtgaatagaagcttctctgaacaaggcttagagcaacgctaatctgtggatgtaaacataaatgttgggagttcagtttgaacagccaggtgtggtgacacacgcctttaatcccagcactcgggaggcagaggcaggcatatttctgagttcgaggctagcctggtctacaaagtgagttccaggactgccagggctatacagagaaatcctgtctcgaaaaacaaaaacaaaaacaaacaaacaaacaaacaaaaccatgcagtttgacactgtgctcagttagcaaagaaagttcccctactgggtctatgactgccataatcatggagtttgatgaggtttgtagaactaagtatgaattcctcctacagggaggcactcaaacccaatcagaaagtagctggctatccctaaaacaattacaccactgttgcaatggtgggcatatcttgcctagcatgttggtaatatagttcagaggttcacagttaggtaagaccagtggtgactttcttcccctggcagcactctactagccagcaggaaggaagcttccagttcagttccagctggatttctctctgtttttgcaatcaaaatgtgtgatgtcctcagcaatagggtcgaaccatctgcttctggtgggcacccaagaggaatgacaagggccccagggatccctctgatcaacaactaaggaagtaccctatacctcccactggggttttgtctaataaccaatgtcttaatcaacatattgttttcttcctcctgcccatcaccaagtccctagcagactgcttgtctggctttatcagagttggtcatagtattctacaaagtatcctttatggagttttctctggggaaaagaagatagcatcttaactgtgaccaggaagctccagagaccaagcagtaatatgtggtccacagtcctcaggttacactaaggatattatgaccatacattagagagggacatacacacatgtgagcgctacatgcagtgcacagtgcagggatgaaggactgcgcctggggaagagggagaggacggaagccacagtggctgtgtttagataaatgacagacttgcttaagagatgggcatgatacagaggagattttgggttagaacatgattggtttgcttgtaaagctagcctactctggaaccgatgactttctttggtaacagtggctctcgtttctagaaagagagtttatgttttagggtttctatggggtttgagaatataaatttctgggctgtgggggagacacaaatcagataacctaacactgctaagatggagtgtccctgttccatgcagcctcccagccgggatggaacacactcctgacttccatgttgtatcagtttgtctaaaacatatccatccacaagctgcaggctagaggttgggatgtgatggaagacttcctttcccgatgagggtactgtgagacagatcagcactcaatccagccacagtgcgcatgcctcctggctccttgctcgatgggactgagagcagctcctcaacacttgaaccctccattctgtccaggaaaatacacacactattgttcacctcctgggagttgccatgagggttaatgaactccgtgaaggggccacctcagaacccatctgtcaccagtacagtggacagaagaactcctgtgtgtagggattgcggtgatgaaacagtgtcatgtagaaaagtccccagcttggagatggataaggccctcctggttcagtcctcagccctacagaggaagaacaagagactcccagctgcatacccgctgcagagtaggttcctgggagtgttggcttctgggaacagaggtgttcccagcattccctgggacctgccagtgacctgcagtgtgcggcctctctgctgctacctgttatctcagcccagcactggccacatctctcctccttcactccttccctctctacttccatctcatcccaatccttctttctttatttctctgacttctctcttggccgcgtcttctttccgtgtaagattgttctgatgaccccagcatgtcaaatgactctcggtaactcttttattctattgtattaattttttaattgaatgtataatcaaacctgggtcctctagaggggcagcaagtgctcttaaccactgagccatggctccaccccctacatatttgtcttattttgcatggttatgtgtgtgtgtgtcctttctctctctctctctctctctctctctctctctctctgtgtgtgtgtgtgtctctgtctctctctccctctctccctccctccctccctccctccctccctccttcnnnnnnnnnnnnnnnnnnnncctccctccctccctccctccctccttcccttcgtcccttcctccctccttctaactcccctcacccctctctccatgggggtggggtgttgtaggtgtgcatgcggaggtcagaggagaactcagcggaacctggagctagaactaaggtcgccaggctcagcagcaggcatctttgtacactgaaccatcttcaagccaacgtttttagtctaagcaagaggttttttgtagctttggaaggagggaagaagatgaatcttttcatgttcctctagactgccttcagttcttttttccccctgtgttgacattttccccttctctcatcccctcagcctgtagtcattaacttgccagacactcagccatggattgtctttatgacgttgctgaagttaggagcgtgtcattcacagagaacctaacccatatattaactcaggcacagcaaattgctaaatacatgcctgtaagtcaagagcttcaggatgacaatccaaccactcctattggaagggggtgactgaaacagactggcagtgggcaagggagggtgagtttctgccacagaactgagctggggcagaacactgccctctggacacatacaggggccccagcagagcatttcccaggacgtgatggcgaggccccagtctaacaggaagtcagtgggctcctgccagcctccacttgttcagtccttgtccacaacttgagcatccacaccacggctcattcctcctcctagtcccactggaatccctcttactcctcccagggcctagttcagtaaatgtcagagtagctacaaaagatgagcgctgcattagatacagtgcccaatggatacgtgagaccagatccacacatgccgtacaagtgttgaagagcatcagtacatgtggaaatgggagcagcatctagtgggaatcatgaagtaccctgatccacgtgtctgtgcatggatcaggaatggtgcaagagaagccacacagagtctggggacacagagtctggggacatgcagctcttcaaagcttttgttactagtctatgctacattttatttaagaatgttactttaaatttacaatcatttttaaactctgaatcagaaggtggtattggttctcagaaaggaagacagcgatctattttcccaactcttggaacatgatgttcctttgggagccagtggcctgatgagaagcccagggctctaggtgctgaggtcattacccacaccttatgactcagtgtcccccacaccccagtctgaacacctctgtgagtggtgaaggaaagagtcctgccttctgtatagccctgggctttgccagcaacctcgtgagaagagatgtctaggaaaacacacagaaagcagggttgctgcatgtatgtagaatctcactacagaatgtaaagcttcgtgcttctcagaacattcacgtgtttgtaaaagcttcatgcaacacttgaggtcagttgctgtgtgcagtctagtcagccaccaaatccatgtagaagaggcttttgtttggcctctttaaaagagaagtaactgctgatttttctcaaaatgttctgacctttgtcttgttcacagatattcattttgttgtttggtgtttttgtttgtttgttcttcctaagctggtgcaaaggcacccaagctttcagttgtcactcttcttccatttgctgctctggcctgaaagagtcaccacaatgcttataaagggctttcagagttcagtccccaccttcaagcagaggactcagacagattcagatagctgtgccgtgcgtgcaggtggtaggttccaatgtacttggggctatgggcatacttggtagcgataacaacattttataaagaacaataagatgccccaggtgttgtcttagtgtgtatatctttgtatctgccttgtgctcctattctatgccaggtcccttgagagcaggggcttcctggttccgcgctgtgttctgtggtgccttagcaaatcgatgcttaaacaaatatgttctgtaccaagcttaacttttatcttaaaaatagcataacagttttttaatgtatttcatttcatagaaaagcagagcctggatactttgcagtatttttttaagtcttggcaggggaaatgctaagtcatgaaaagttctcaatcattgtagaaaaagtgattttgtttatgctttgacacaacaggaatggagaatttttcaaagaaccttggcgatcacttgcttagattctctcgtgtagccgtagtaccgagaactatgcctgacatttaaaggaggcctaatagatatttgttgggtgttggagagatggctcagagggcaaaggcatctctcaccaagcctgacaatctgagctcagccccagtccacagctactagaaggaaagaatcgactccctcaagttgccctctgacctccagacacttaccaagacacgcatgtataaaatgtaatgataatttttttttataaaatacatttgttggatgactgagtaaacagctagtgagctgctcctgtgtgctaagtaccacatgttaaattctggagactgaaataataaataatggatttgcatacataccccagtactttctccctacccaagaatcaatgtaggagactagtgacccctctagccatcctcattcagtgtgagaaggcaatgaagataatgcagaaattttatttttgttgtgtgagtgttgttaaccagatatcatggttatcacttctaatcccataagaaagtagaaggctgaggtagaagggttacacgttcaagaccagccttggctacttagcaagactatgttttaaaggtccagtggctgtggacctcagtataagaggacttttatctcagtataagaggacttgcttcccgaatacaaaaccctgaatttgatcctcagcactgcccaaagaaaggagaaaatgttatatcgtgtccctgaaacaaggagaaacaaagagtcggcttatgtcactctcctcttacgcctgtcttactaacctttgtcccaagttgtttcattttctgggcaaaaggggatcaggattgccccaagatacaaatggtgctaaaggtagcatggaaaagctacacctcagacttccaggcctaggaactcccaggtaagttagtcaggctctctagatgaacagagttaatagatcttacggggcatctatcagatcagcttccacaatgtggactgaacggtccaaagttgacgctaagcattctgggaaggcacttgtacaggaaactaatgagatggggctgaggtgggacaaagacgtggtcaagaggagggaactacagtcagatagtttagccttgggagtaaacgtataattgagccctccctctttctctctcagcctttcccttactaatgttttggggtttctctctgcagcctgtggtttgacagcttcgttccctagctgttctcacacactatgtctttacccttgccgctcaaccaactggcacccttggcaggctgcctctccctcctgaaagatcttccctaacctgcccccttgcagacagactttctaaaatgtgatcatttagcccctaaccctgagcttacgctcattcttagtgggttgcacaggctcccttaatacagatgtgttcttattctctggtgctctcgccaggggcaccgctgcatccatctctcatctctcccagtctgttagaagggtgtgtgtgtgtgtgtgtgtgtgtgtgtgtgtgatctctctcctgaacactggtgtgcatagtgtgtacctgtcacataagtggcatagaacagagtaaataagttcagtgtagttaaacacaggagctggccatggctccaggctgtcccctgcctcccttgcattgtcccgcacagcagccagtgctgtcaccatcctgacaccgtaggcattacctcattcctgtcctcctggcatcaacctcccctgcctccacatactccacatgccaccaccgtgtgatcggtagaaatgtcatcctgatcacatcatagctgtcattagtgactccttgccctagtgtggaggacactcgagtctccctcactgtctctcatcaggcatgtgcagacacattaaactccacagatggctctgccctccatccgtgatgcccatccatgagcaccccctttctggagtggcctgatcttctttccacacttgtcagactcctcctagatgctttgtcacagcctaacactgttctcacccccgccccacccactacatccaccgtgactgtccaccctgggccgggaatgcgtgcacacaaagcagaggtgttttggagagattgacataaacctcttctttggaacctaccttagtctggtttaatttctcaagaaaacacttggcttgtaaagttctgtttattctacctcatgcattctgacatataaccatatattgccttctgttgttatgtgagtgtctcccatgcctgtggcctgctttcactgtcgatccctgggtgtctgataccagcgtcatcagctgctctttgctgcctagcaagatacccccagactccgtggcttaggacagaggctatttattattttttatggtttctgtggtccactggacagttctggtttgcacaaccttcagctgcactgaatcacccgggatagatgtgggtgaacagtgacccacagctgccaccgcttcggtgtttacaaacaaaagaaaacaaacaaaaacgtactggaactcagccacaccatactgccagcactgcctttaccttgtgacagcagaggcaagtcagtgtagtggagatcaccacatggcctacatgtgtgctgtttgctccctcaaggagacatttactaaactagaaaaccttgccgagccctgctctgggatggccaggtggaaagggccttacctggggcagcttgtctttctctgtggtctctcagcgccaggggactggcctggtggtttgtatatagcatagcaggagagggcaaggacctgatatacctccataagcctctgcctcccaagtgctggggttaaaggcatgcgccaccattgtgtgcagaaaatgtccttgacgttggcctccccagatatttctaggcctgaagactgcttccctacaaagacgggtcctacccagattatctaaacctgtttgctagatccagctgtatagtataaaccctgcctccttgcttatccgtgtgtaataatttccacctctctgctgagctgtatgcaataattaggaatctctgtccaacttaaaagaccgacatggtgagcttccagggtgttttcatttctccatcagagggcccagaccacctgagggcggaagaaacaacttttctcagtgtccatgtgtcaggtgcctgtcttttgctcatttcctcaccttcccagtcagggccatccctggaactgtgatagcatggcatggctctttggggagaagaaattcaggaatagtattgtgtaactactatgtgccaggaacagcctgtagatgcggtgatgggcagggtacacctacagcctgactcggctttgtgtcgttgtcatccagttgggaaatgagagttctctaaaatcctttcaaggaatccttcaggaaggagctatagcatagctatataactccatggcgatatgtgatggctggttgtcaacttgattagattagtaagcacatgagagactagtaaagtgaacctctttctgcctagatctttggagatgtttgcagacatggaccatgaggtctctgacctagtcagtggtttagtccattgatacattctaagtctgaagagattaatggaggttcttggcacttcctggctggtgagaggaagcaggccatgtaggaaatgctctatgggactgtcttgccctggtccctttctgaattcctcctctgttttctgaatgctgtgatataagctgtaccgccatggccctctcctccatgatgagttagaacttctgaactcgggagctaaaatgaacctttcctgctttaagtcgtttctgtcaggcattttggtttagctacaagtagctaacccagtctgccatattcaccctccccgacctcacacaattatctgagcttttcagatgctgtgtcttgaggctctttcttgctggtcgcctgacacattttcaaccagatgacggtttcatcaggacaccagtaactcggaagtctgattcactagattgagtccctcaggtttctcctgtggttgtaacgctctactccatgcattcagattaatccatgcctgccttattcgccctgtggatacacaatattccccttctccacatgtctggtgagatgctacccctctgatgaagcaggctcaagtaccactcacccgtgctggttccctggttgttcctccagcgagctctttcttcctctgctgtcacaggcctcggagtttggagtgtgatgcaaatggggtgtagcacacactgctgttgtcttagggtttagactgcaggccaggtcatgattcactttaacgtccttctgaattcctttaacaggggagacgtctagaaaagtcttggcttcgttgctgaggctggagctcaggttgcgggaagcaatcatgatctgctgatctgtaccccagttccactttatgaataatggacaactgattggcatgactgccatttccaaaccttggtcttatttccaagagttcattgggttaaatgtatttcatactcattaataaagaaaaaattgctgcatataagccatcaattatatagtgtatctgaaactatgtttcctagcactagaatatagattattaagtctaattcagatggatataggtgactcaatatattttgaaaacattgaaatatacctgtcattagaatctcaaaacagctgtggtagaaaggttggtacatggtagtatcctcatcttacaaagaaaaaaagtttaacttaaaagaaactataatacttgtacagaattaagtaaatatatttttgtttatattaaattaataaatatatatattatatacgatatatactcaaagtgtaggcgtctagccttatgattgagacaaagcttcctttctaaaatcacctgtggatatcaaaacctcagctctaagattggtatcaaaactgatcttatttataaattgctatgcacatcaactggaccttcagtttgtcttcctggctactcatcccggtattacttgtataacataatgtgatgtggtattacatgcagctcaggagagattagaatgattattgggtacatatgttttccgggggatgtaattaggcagattctcacaccctcatcaagagatttccccaccatcattaatctcaaaataatagaaggctttctacatccaacattacttgaagatttgtagacgcatcctctagagtggacatttagggggaaaaaaaggctttgtgtgaagtttgggtatttgttatactttaaaaacgaacatgcacactttggcatatgtaactattagactgatgttctgaggatagatctgcataccattagttgtatttttgttttacatagtttgctaggtggaaggaaggggctttcaagttgaggaggctctccaaactgcagcatctcgaatgtgttgatatctagaagaagcaatgtaaagaagaaaagatttgagttagcatatggatgtggcaagttttcctacatagtcccagatttcactgatgcaggaaccatggtgatgcagggcatcatggcaatgcagcagcctgtaacagaaacttcctacttcatggtagtcaggaagtgggagtggagatgggatgcaggagtaagagacagcacctaagagcacacctacagtgattcttcttcttgcaggccctatcttctacagtcccccaacctcccaaaatagtgccaccttatggttatagttacttttgtgtctctgtgctgtgataccatgaccagggcaactgacagaagaaacagtttattgagggattttattttcagatagtgagcccatggccattatggaggggagcatggcaacaggcaggcaagcatagtgctggggcaatagctgagagcttatatcctgttctgtgaggcagcatgggggcagagagggagagagagagagaaggaggaaggggaagagggagagagggagggaaggaggggaggaggggaggagggagggagggaaccaactggaaatggtgttctgaaacctcaaagtctgtgcctctggtgacacatctcctctaacaaagccacaacttccagtctttccaaaacaggcccaacagcctgagcccaagcattcaaatgtatgagcctacgagggtccttctcattcaaaccactacactaaccttcttctaaaacaaaacaaaacaaaaatcccagacttttgggccacattcacatatattctatggctttaccactgtttgctgtgatacaggtagtttgaagctaagttatattagacctcatgagatttaactaaccggtccttgtataatatacgtgtcctggcctttctgtcttgtagatcatacggatgacagattctgtgttactgtctttttacaataattttttttcatttattctttgataacttcatacatgtttacagtgtatcttccttataaccaatcaaaatcctccttcccactcacttcagaatccccaaatacttcttctcccttttaccttcatgttctcttttttattttttttttttttattttttttttatttttttttttaggattttatacattgagttgtgattatcttcaccttccctaccccaacttttcctggatccagccccggtctcttcccactgactttgtttctttttttctccaccaaggccaatttgtgctgctcaaatattcatgtatatatggccttccactggagcatgattaacttatcaggggctgcactcttagagaaaactgaccctgttgttttgttgatttttttcaataatgtttttctttcttattactctcctgtttaactattattctagcatggttacttggtcctgtgatctcagggataaatttttttttttctatttagtttgaaggattccttcacatgtctactgtggagctgacaatggttatacatttctttcatctgttttcactatggaaagtttatattttctatcatattttcctcctgatagacagctttgctgggtataataatctaggttatatctttcagggctcaaaaaacaccatcccacgcctttctgaattttagagtcttggttgaatggcaggctgtaattctgatggcctgagttcatgtaagacttagcatttcttgtcactttcaatatacttcctttgttctacatacttactgtcttaattaaaataagactaagaaggttcttttctgattttctctgtttggtcctaaatgcctcccatatcaggttgacatcttttcctaaaaaggggaaattttcaattatgattctgttgaaaacatttttatgtctttagaacaagattattcttctatgcctatgactgtaggctcagtattttcagagtgctgcacataccgtgaaactctttgacgtctgttcttatctaattgtgccatccctccactttgttttccagctcagaaaatctgtgattttccttgacccattttattagtgagactttccacagaactttttattggttatgtttttaatttccatcatttcaagaagttttccatcactgtctttgttttcatagttcctcttccgtatcttgcactgtggtctttattgcacacagttggtcatttgtgtgcttagtcaggagcttatttcctttcatttcttgaacaataattcttaaccctgtctagggtttcatctgaatcactctcactagacgctgttactgaaaagttagttgttctggagaagttatagtgacatgatttttgtgttttttcttattactattttgggagtcacatatctgggattatcttgttgcttggggttttttcttgcattggatatattctttcatttgaagtgtttgcagaactcaatgggtgcttgaattggtaacgtggggtatgttgtttagaaattagttaagtccgggaactaggggctggtacaacttatatgtcatctctgtgtagactattaactgcaagaacaaccacggattctgggtattgcctctagatgtaaatgttgtattatccaaataacaaaagcaattcctttaactttaataacttttggaaaatgaacaaccaaagataatatgaagtatagtttgattttagttgataaggttggaattgagagggaaggagagtgggtgaggctcaagacaagatcaaaggacagtggcagaaatgtcgaggtgatgcagtagctgagaagggacggttgaaacagtaccagggtccacagatattagagattgataaagctaggaaagggccagcctgagctacagaacaagtcctacaacagtcaggactacacagagaaaccctgtctcaaaaaaccaacataaaagaaccatggaagtctttaattaagtggtacaaagaggagaacaaatgacagaaagaaggaaagttgtcaaaataaaaggaataaaatgagatacaagtgaaaggcatggtagtgtctcatgttagcctgagtaaagaaacacatagcaatcttaaagtctaactgagcaatataccacaaatccaaaaccatcataagatgtatatgcaagggtataaagggtaataaataatataaaatgagctgggcagtggtggcacacacctttaatcccagcactcgggaggcagaggcaggtggatttctgagtttgaggccagcctggtctacaaagtgagttccaggacagccagggctacacagagaaaccctgtctcaaaaaaaccaagagagaggggggtggagagagacagagaagcaggggatagggtgctggagcagtggttaagagcactggctgttcttccaaaagacgcggcttcaagtcaagcacccacatggcagctcacaaccatctataacaccagtaccaggagatccagtgagttcttctggcctgtatgggcaccaggcacatgcaaggtgcatagacatgcatggagccaaatcatccatgcacataaactaaaaataaattgtaaggtccaaaggggtcaaggatgctgggagaaaacagctcgcagaatcaactaagcagggcttataggagctcacagagactgaagggccaatcacggtgcctgcatgggtctgtgctaagtcctctgcagatgttatgattgtttgcttggtgttttgtggagtaacactgggagggggtgtctctgagtattttgcctgctctccaaacccttctccttctactgagttgcctcatccagccttactatgagggtttgcgcctagttttattggaacttgttatgctgcattcggttgatatccctgggaggcctggttggttggttggttggttggttggttggttttaaagaaagtggataagaagtggatgttgtggggggagtagagaggagagggagatgagaggagtggagggggaggaaactgcagttgagatgtattatatgagagaatgaataaatgaatgaatgatctttgggggggggggttcgagacagggtttctctgtgtagctctggctgccctggagcttactctgtagaccaggctggcctcgaactcagaaatccgcctgcctctgcctccccaaagtgaaaagtaaaactaaaagtaaaagaatacgtatggggtgagttgcaggtacacctgtgctgagttcagaggtgaagttcttagtcaaagtagctctggcaagttgcaaatggtgcagtgtggggagaggaacctgtgagccattaatctctgtgacttctgtgttctctgtggttctgttattggggaaggggaggctgtaagtccttgcctggtcgcttggcactcctctgtgggctctgttggtcctacaggctgatgtgtgtgaggagcagaattttccctccagtttctcccgctctctctaagcagctgaattcagcagtgttgtgccaatcaagagggctcgaagatgggtctccatggggcacttcttaagggctcgaatgtgtggcactttcaagaatgttggcactgaaaatacccggtgtctcttctacatagtcactttttctctttgttaagtctttcccattttcataaaaaatctctttttttttcttgatattatactatattacaacattcctccattcctttttctccctctgaatcgtcccatatacctcttccaaatctttctttaaattcatgatctcttcttcactaatttattattgcatatatgtatacatatacatatatttctaaatatacacattactaaatgtaacctgtgtggtctatctaatgttacttgtatgtgtattttcaggcctgactttagtctcccactcctaatgttctcagttccccatagtttgttctgtagggctgaggcttgtgggcttttcccggtccatcttagcatgtccattggtactacccttgttcggttcatggttaggcagacgtgttggggagacgagatgagtatagcttctgacattgctaggagacataacttctgccaccttctctcgccaccatgatactctaccttactcagactagaaatggtagttctcaaaattatggactgaaaccatatgccaaaatatctatctctttaaattattcctcccaggagtattccacagtctgattatcacactaatttatttttatttatatcctgaagtgctgccttccccctccttggccctgtgttttcatccttttctcccagattcactctgtgtacagccactaatacgagtttttcctaagtagtgatgaagtgtcactcccatgagtgctcagtgtcctaaactggctgtaccctacggttccaactgatgcaaagaaaatgtcatcttctaggatacttcactggttagaacctttacactcttaaagatcaccaagtatggaaacaaaatgccataaatcaaaaccagcaaaaacaacaaatgatatatatgttgattatcccctacctaccaaggatgctatatgcttgaattaacaaattaagaaataagaatagttctgcatttaaaatttaagtttaagatggaatattaaaaaaataaacaggaagcaatgagctatcagatcaccaggcatctttcaatatcaaagagaaatgttctaatactgaaaacagtaattatcgataactactgtggatgccctcacttgtaatgagtaaattagtaaaatggaagattaaactacaacagatttatacagtgacacacaaacagacaaatgaagctaaagaaaaaagctcctagatatatcaggcatcgtctaaagcctggttgagcccacccatctcccagatacaacgtgaagcagagtgctctcagtggtggtccatactgctgctggagagttccctaaggtgagaaatgtttattgcctttacactcagcctgaagaccctcaaatgctacatttcagaaagactaggggagagtagagaaatggctgaaaannnnnnnnnnnnnnnnnnnnnnnnnnnnnnnnnnnnnnnnnnnnnnnnnnnnnnnnnnnnnnnnnnnnnnnnnnnnnnnnnnnnnnnnnnnnnnnnnnnnnnnnnnnnnnnnnnnnnnnnnnnnnnnnnnnnnnnnnnnnnnnnnnnnnnnnnnnnnnnnnnnnnnnnnnnnnnnnnnnnnnnnnnnnnnnnnnnnnnnnnnnnnnnnnnnnnnnnnnnnnnnnnnnnnnnnnnnnnnnnnnnnnnnnnnnnnnnnnnnnnnnnnnnnnnnnnnagtaagaataataccttaaacttccaaaagcattgttttagatttattttaagtgtaagagtgttttgtctgtcctgtctggtgtatgtatgtgcactacatgcatgcctctgacctggtgctggcagaggccagaagtgggcactggatcctgtgaaactagagttgcagatggtgtgagtccagtcctctgcaaagtcaacactgctgttaaccacagttgtctcgccagctccttgagacatacttttaaagttaacaatggaagaagatgtaaaatcattttttaaaaaatcagaggaaataaaaagcagaagtacatttgtagaaaacaaatgtgattatattaacaatcccaaaatatataaatgacatgcataaatcacaacatacataaattataaaagaaatgaatagatttctaactaagacaaatggattgagattagcgggttttggttttttgtttgctttgtgtttttttttttttcctcagaaaatttcgttgactgtagtgtcaggtggtgatgagctgaacaagaagtagtcagaatttcttagctagcagtagtatcttagctgtgtgtcttggggacaggtttttctaacatggactgagaaaagtcataagtaaaggggtgcaaatcattccagcaaagactaatcaaaaagaatctagaattgtgttattttttaagtcatcaaaataatttataatagttaaatgcctcttaaatacacatgatatcttctgaagctaaaagtaatatgcactcaaccagtttcttaaatctatttggaaacattaaacatgataaaagtaaaaaaaaaaaatctcttatgaagtcctctatgaaaggaaattgtgacaggttcctgattagacagaaaccattccatctccaagggagaatactcagtgtaactgtggcttcctagaatgaattgggtagtgttcattctgtttctattttgtggaatagtttgaagagtattggtagtaggtcttctttgaaggcctgttagaattctacactaaacccatttggtcctgggctttgtgtggttgggaaacttaatgactgcttgtatttctttaaggattatgggacagtttagatggcttatctgatcctgatttaactttgttatttggtatctgtctagaaaattgtccatttcatccagatttttcagttttattgagtataagcttttgtagtaggatctgaggattttttgaatttcctagtttctgttgttacatctcccttttcatttctaaatgtattaatttggatactgtctctgtggcctctggttagtctgagtaagggttcatctagcttgttgatttttctcaaagaaccagctcctggttttgttgattctttatatagttcttttcatttctatttggttgacttcagcccccagtatgattattttctgctgtcttgggtgtatttgcttctttttgttctagagctttcaggtgtgctgtcaggctgctagtgtgtactctctccagttttttttttttttttttttttttttggaggcactcagtgctgagttttcctcttaccactgctttcattgtttcccataagtttgggtatgttgtgccttcattttcattaaattctacgaagtctttaatttctttatttcttccttgtccaagttaacattaagtagagtgttgttcagctttcatgtgtatgtgggttttctgttgtttttcttgttatcgaagactggctttactccgtggtgatctgacaggatgcatgggattatttcagtcttcttgtatctgttgaggcctgttttgtgaccagtaatatggtcagttttggagaaggtaccatgaggtgctgagaagaaggtatatccttttttttttttaggataaaatgttctatagatatctgttaaatccattttgtccataacttatgttagtttcactgtgtctttgtttagtttctgtttccatgatctgttcattgctgagggtgggtgttgaagtctccaattgttattactgtgtgaggtacaatgtgtgctttgagcttcagtaaagttccttttatgaatgtgtgtgcccttgcatttggagcacagatgttcagaattgagagttctccttggtagatttctccattgatgagtatgaagtgtccttccttacctttttgataacttttggttgaaagttgcttttattcgatattagaatagctgctccagcttgtttcttcagaccgtttgcttggaaaattgttgtccaatgttttattctgaggtaatgcctgtttttgtcactgaggtgcatttcctgtatgaagcaaaatgttgggtcctgtttatgtatccagtctgttattctatttctttttattggagaattaaatccactgatattaagaaatattaaagaatagttattgttgcttcctgttatttgtgatgttatttttatatttctgtggttatcttcttttgggtttgttaaaagaagattactttctaagtttttctagggtgtagtttccctccttgtgttcgtgttttccctttattatcctttgtagggttggatttctggaaagatattgtgtgcatttgtttttgtcatggaatatcttagtttctccatctatggtaattgagagttttgctgggtatagtagcctgggctgacatttgtgttctcttagggtttgtatgacatcttcccaggatcttctagctttcatagtctctggtgagaagtctgataggactgcctttatatgttacttgacctttttcccttactgcttttaatattctttctttgttttgtgcatttggtgttttgattattatgtgtcaggaggaatttcttttctggtccactctatttggaattctgtaggcctcttatatgtttatgggtatctctttctttaggttagagaagttttcttctataattttgctgaagatatttactggccctttaagttaggaatcttcactctattctatacctattatccttaggtttagtcttctcattttgtcctggattttctggatgttttgggttaggagctttttgcattttgcattttctttgactgttgtgtcaatgttttctatggtatcttctggacctgagattctctcttctatctcttatattctgttggtgatgtttgcatcaatgactcctgatctctttcctaggttttctaactccagggttgtctccctttgtgatagttttgttcaattccttcacctgtttggttgttttcctgcaattttttaagatatttttgtgtttcctctttaagggcttcaagctgtttatctgtattctcctatacttctttaaaggagttatttatgtctttgttaaagtcctctctcatcatcatgagatatgattttaaatcagagtcctgcttttctgaggtatccagggctcactgtggtgggagaactgggttctgataatgccaagtagccttggtttctgttgcttatgttattgcccttgcctttagacatctggttatctctggtgttagctggtcttgctgtctctgactgtggcttgtccttcctgcaagcctgtctatcagaactcctgggagaccagttctctctgggaggaatttgggtatggacagctgtggtacaaggtcagctctggggtgcagacagaaactggaaggatcctgtccccagctgctccttgcttcctatgtcctgaaggctctgggcaggtcccaggaatttgagcagaagtggtggtcttacctgtgctcacaggcatgtccgaactcctgggagactagctctttcccaagggtatatagatatggagtgccatggcacatgatctagaattgctttattgatacgagtcaaaatacactcaaagacaaaaggcgttgtaaggctagaactcttacatatggcttgaaatatataaaatgttaaaactacacatgacattggaaatgtatactatttctaaaatggcctcaatatatgtaaaacaaaaattaataaaactttagtgaaatttcacatatttctttaaggtatcacttgatggcgcaacaagaagtaataaacatggaatttaaaatggtaggagaagacatttttttttcatagacacaggaaactgcaccaagcacctagaatatgcagatccactctgcatggaggaattattaaaaaaaaaaaaaaaaagttgacctcacactaaatgcaaaactggtctcaacagatttccaggaatcacaattaagataatcatatattttttaaagatttatttatttacatatatgagtacactgtagctgtacagatggttgtgagccttcatgtggttgttgggctccagtcaaccccaattgctctgatcagccccgcttgctccaacccaaagatttatttattattataaataagtacactgtagttgtcttcagatgcaccagaagagggcatcaagtctcattacggatggttgtgagccaccatatagtgctgggatttgaactcaggaccttcagacgagtagtcagtgctcttacctgctgagccatctatattttatgacaattaagttaccattcaataaccatacagtcagccccctcccaagttccccttaaatgtggaaattttcaaacatttctgagtaaatcactaaaacggaaatttttaaatacttagaactgaatggtgatgaaaatagtacatttcagaacttgaaggatgcagcagaagttagatgtgataagctgtggggcagtagagggcaggatgaggcgaaaacagtaggcaggagtgacattggcagtaaagatgctgtctagtgaatctacagatcccagaagatgcttctgtggataggctcatggtacagggatcaaccagacttttttttttttgtaacaagatcatatgtctggctttgtaggtgacactgtcaccactgctcagccttgccaccacagtatgaaagcagccatgtgatgtataaatgactgagtatggttctggtctaatagttccatatataaactagcaatggaccatacttactattcagactatgatttcccagttgttgaactagttatatgtctaaaactgaccgtaaatgatgggaaatttgaataagattgctggatataagatcagtatacaaaaacaattgccttttcatttgtcagtatcatggaaaagtaactttttaagaagtggtcactgagccagtggtacttggctataattttaccactgcagaggcaagatggtcatgtgatttaaaaactagcctagactacataaaaagaatctaccttaaaaaatgcttagggttgatagtcacaacaaaaataagtaataagtgtactaatgttcagagtctaaagaaactaaaacaattaattgatctgcttcaaaccagtagttctcaaaagtttgatttccagatccttctatgctctaaaaacagctgagaagtcataagatctcttacttaattgggctttatcaatccgtagtcataagacatttaagtcagctactaatttttaaaaataatgaatctgctatacactaaatgtttgacacatctttatgaagtaaattgcactttcaatttaattgatgaaaatgtttttatattttttccagctctctttaatgacagcataaataaaggcactggagtcctgatagctctttcaatgttgaatctgctgtgctctgtagttttacttttattatatgaaaaacctatgtgttgacctgcagctagagaaagggaccacactttaatagctccccagtttccaaacaatggaaggtatctcttctttgatactttatcagtctttggcaggtcataactaagaaggtagttgcaatatgggacctaaaactgtatcgctgagcttgtcatgttccatcatattaaaattcattgttctgcctgacacccttggatgcatcttttatccaaggatggttgtgtgaaggcagttgactatttggaaaaggctgggttgccgagttaagtagctcttcaaaatgatgatactgttttatgtcaaatttttcacttattaacatgatcttcagggggaaaaaagctttcaagttccgagaaactgtcaagctaacagtagcaaatgtacacttaccaaaactctgaatttcatttgaaagcttaaattttatcattggcagcaaatactgtcacctgtttttcctgaagtgacaaatctcactcaccttgttcactgtcaagaaagtatctgccaaatccccacgtctggataacctcagtttgtcagccgttcttcctagtaaaaaaaaaaaaaaaaaaaaaatcacattatgtgggagaaaatgtgtcctaagcatgttaaacttacaatttgcctgagcacagtggcatcctcctttaagccctttaattctagcagaggcaatgggaacttgtgagttcaacccagcctggtctacatagtttcaggctacccaagttacatagtgagaccttgtctcaaaattaattaattaataattaattattagtaaaaatattaagataaacttacagttcaaaccaccccacaaatgctcttccatgagctaacagtcatatttcaatgtgcagtgatactgtacattgcacagaacattaagatgttaagtactcgagtgtcttcagagaaataacagtttcatggatgaacacggacattttttattaaactaataaaatttatttaaaaatacacaacttagcattaacatttttaagtcatcaaaataatttataatagttaaatgcctcttaaatgcatgtgacatcttctgaaactaaaagtaatatgcactcaaccagtttttagaatctgtttgtaacattaaacatgatcgaggtagaaaaaaaaatctcttatgaagtcctctaagaaaggaaattgtgacaggttcctgattagacagaaatcattccatctccaagggaaaatatgcagtgtaactgtggcttcatagactatattgggtagtgttcattctgtttctattttgtggaatagtttgaagagtattggtagtaggtcttttttgaaggtctgatagaattctgcaccaaatccatctgatcctgggctctttttgattgggagacttttaatgactgcttctatttctttagtggttatgggactgtttagatagtttctctgatcctgttttaactttggcacatggtatctgtctagaaaattgtcaatttcatccagattttccagttttgttgagtataagctttagtaggatatgaggatttttttaatttcctcagtttctgttgttgtgtctcccttttcatttctaattttgttaattgggataatgtctctgtgtcctctagttcgtctggctaagggtttatctatcttgttgatttttctcaaagaaccagctcctagttttgttaattctttgtatagttctttttgtttctgtttggttgatttcagccctgagtttgattatttccttccatctactccttgagtgtatttacttctttttttttttctagagctttcaggtgtgctgtcaacctgcttgagcatgctctctccgagacactcggagctatgggttttcctcttaggactgctctcattgtgtcccataagttttggtataatgtgttttcgttttcattaaattctaaaagtttttaatttctttatttcttcattgagcaagttatcattgagtagagcgttgttcagcttccatgtgtatgtgtgctttcccttgttttcttggtattgaagaccggctttactccatggtgatctgataggatgcatgggattatttcaatcttcttgtatctgttgaggcctgttttgtaaccaataatatggtcagttttgcagaaggtaccatgaggtgctgcgaagaaggtacattcattttgctttaggatgaaatgttctataaataatctgctaaaccctttaggttcttaacttctattagtttcactgtgtctctgtttagtttctgttttcataatctgtccattgctgagagtggggtgttgaagtctcctactattattgtgtggggtgcaatgtgtgctttgagcttaagtttctcttatgcatgtgtgtttccttgcatttggagcacagatcttcagaattgagagttcattttggtagatttttcctttgactagtatgaagtgtccttccttatcttttttgataacttttggttgaaagttgtttttattagatactagaatggctactccagcttgtttcttgggaccatttgcttggaaaactgttgtccaatgttttactctgaggtagtgtctgcctttgtcactgaggtgcatttcctatatgaagcaaagtgctggatccagtttacatatccagttggttagtctatgtcttttgtgggggaattgagcccattgatattaagagatattagagaaaagtaattgttactgcctgttatttttgttgttagaggtggaattatgtttgtgtggctttcttcttttgggtttgttgaaagattactttcttgctttttctaaagtgtagtttccctccttgtgttggtgttttacaactttgtagggctgggtttatggaaagagattgtgtaaatttggttttgtcatggaatatcttggtttctccatctatggtaattgagagttgtgctgggtatagtagcctgggctggcatttgtgttctcttagggtctgtataatctgcccaggatcttctagcttttatagtctctggtgatgagtgtagtgtaattctgagaggattgcctttatattgaccttttccccttactgtttttaatattctttctttgttttgtgcatttggtgttttgattattatgtgtccggaggaatttcttttcaggtttagtctatttggaattctgtaggcgtcttgtatgttcatgggcatctctttctttaggttagagaggttttcttctataattttgctgaagatatttaccggccctttaagttgggaatgtttgctctcttctataccttttaaccttaggtttcattttctcattgtgtcatggatttcctggatgtttttgggttaggagagttttgctttttgtgttttgactgttgtgtcaatgttttctatggtatcttctgcacctgagattctctcttctatttcttgtattctgttggtgatgcttgcatctatggctcctgatctctttcctaggttctctatctccagggttgtctccctttgtgatttctttattgtttctatttccatttttagatgctgaatggttttgttccattctttcacctgtttggttatgttttcctgcaattctctaagagatttttgtgtttcccctttaagggcttcaagctgttttacctatgctctcctgtatttctttaagggagttatttatgtccttcttaaagacctatatcatcatcataagaaatgatttttagatccagatcttgcttttccagtgtgatgttgttccaggacttcctatggtggaagaattggattctgataatgccaggtaaccttggtttctgttgattgtgtcctcatgcttacctcctgccatctgcttgttgctagtgctaccttccctcattatatctgactggagcctgtccttcctgtgatcctggttgtgtcagaactcctcagagtccagctttctctggcatcctgtgattctgggatcctgggatcctgggatcctgggatcctgagatcctgggtatgtcagagctcccattagtcaaactacctctgggaccctgatatcctggtgtggccaagctcctgggatcatgtgatcctgcgatcttggtcatgttagaggccctgagagtggagcttcctctgggtgttgtaggagtggctatggagtttgcgaccaatgtctgaacaagtacattttaaagtaaaactcatgtctttatgttttgctgatgagtgtgtggtggtaaagaactcacacagtttggtgccataccagcttcctgctgaggcaccagagttttaccaaccattgtgtttgcagccttggtggaaatgccaatgctgtggaatagtcattaagcttctttgtattgcaaggtgagcatcagtactgtgaaaaataaactacaaaattcaaaccctttgagacactgacatgataacacaagaacaaaagtccataccaagtgcaaagtcccagtcacagtgtagaagcacaggggatattgtacggaatgaagccaggtgtcaggagccatggctgggcggttatgagcactagctgctcttccagaggttcctggtttaattcccagcacccaaatgttgatcacaactgcccataactctagttccaggggatatgatgcccatgtctcacctcctcgagcacctgaaacacacatggtgcacatacatacatgcatacagtccaaatactcatacatgtaaaaataatttaccttcaggttatatatgcatgaggtatatatgagacataaattatctttcttcagacttaggtcctgtcccaagacagctcattatgtacttgcaagtattccaaactctgaagcagtctaaaatctcaaattctcttggtccctaggattttgcataagtgatacttgacatgtagtatgaaaatagtattggtttaactggcattctgaacaagcaaacaatcctagagatacacatagatcctttgtcagagagtcctgtgtttcttcctatgtgtcacttggttctacacgaatgtttagacaggcgtcatctgtagtcctccgctgactttcttttgtgtcaccctattctgtctttatggtagaacttgggactattgagtagtttactgttcatttgcttgggtgtttattgtctgtctcaagacctgacatatgagtctgtcctagtcagcacagtaactgtttctgaaacctaaagcactcggtaagtgtccatgggttagttaagtcaggttgaagtgacacataaggatcagctcttcagcatttcactttcggagaggttcatggctagaaatagctagttttactcattctggcttctctagataacaacagagggaacctttgatctcagtgccttccagcattgactctgtcccaccaggatcctcgagttggatattatttaacgggggttacagaaaaagcacctgagggacaagctctgtttccagtatgaagagctagtgagtgttctgttctagaactgaattcacacccttcagcttcctcccaggcgaaatagggaagagatggatgcataccgagccactaccaatgacagctctcggtgccaaagttgcaggagctgcctgccaaatgatcaggcagtagtcattcagaaagtgtttgttagagggatttttttttcagaattaaaattgaaactgaagttgcaacaaatgagcagcagatttttcagaattaattttttgtacattttagaaacgtttgcttcagtcttcaattcccgagaaaccattgtatctattcagtctttcgcacagaagttctcaggatctttcctaagaactggcaatgagattcatagttcattcgccccaaaaaatgtatgtttatgcttgagaacttgtgactgattatcgtgtcggtttaaagacagtggaccaaaccctcgtctcagcttttctccccttaactttatagcatagaaaatctgtagtgggatgcctgggagtcaggtggaagccaacagtagaatgtgggatgtgcatccaaccactcactgcctaggggaagctgtgtttgtttctggtgttcagtatttgaaatctttaacagcaagaatagatgtagacagccactctaggattctgtgttcaccctgagttctctaactcaaactgaaggtcagtgcccagccaagtttgacttctgagggcatttctagggaaactcagagctagcttacctacaagagataacggtgtgatttctgaaagttacactgctgtctatttccacacgtatcatttagcttaacttggctttagttacactgtaaacttgcctgggaatgtcaaaagtggtgagtgttggagccagacccaagttttaaaaaaatgaatggagcactctaaggttctccactctatcaaggaagccatacaagtgggagcagggggaagaagtgatattgaaaactaaagttcaaaggatggggttccagctgcagaatagcactggcgctgagtcctgggtggggagggagcaatgcctttggactggtgtttacagcctcggcttcccaagaatgagctgtacacgggccagagtagttgaagctcgggttagactcttaacagcttggagaaaggaagtgcctatgctgcacagaggagactcacacacaggacacccacacacaagcagctctctctgattaactttctcgacacaacctaagtctgtggaaatgaagcgctcattggttaaggtccaagctaggcctctgccaatacctgctcaggcttccatttcattgttgttatagtgtgaaaacatcacagtctccccttccacatgggaagtgaggtatttgaggtatgtaaaggaaccatctaatgtgctggtctttacaaccctttgtggtccctgttccctagagggcatctttgcactgtggacatcccccatcagtaagacaaggcccatagctggtgatatgcatgtaatagacatgtgggaatgtcctgaggctcactgtctcccattcctcccccaaccctagagaacactcaccatggagagtcatctctgtagcccctcaggctcttactggcagctaatgctcattctaagtcaacattttacctccttgaggtatggatagaacactttggaaggctccagataatcaaacttcatcatcgggtcgtcggtggtcattttgagaactacacagggatgcagtagggtttctgtgatggtggggagcagaaatgagccaagtcaccatgcctttagagaaaagaggcctagaagactacagaaatggagatcggagaaatcaaaagcggctcgagccattaaacataaggcaattctaacgcctgtgattagaacaaaaaatagtggtgtgcgaaactatatgtttttgagagaaatactaattgcaaaatgtgtggggaagaaaacttcacagaggcggttctgtcaatgtcatcttctcattgtgcctttaatgcggttatatgggcctatgggcctgagaagctagtgtttgggtgatacagtatttgaaatgatttaagaaaacatggcaaaaccctgcttttgatttctaagaaatccagcttggacgtctcggcttccacaaaacaggagtgtatagcaagtcctactattttggtggaaggatgtgtgcctgtttcctcaggagaaaggatgacacactacagataaaatgcccaagatgttgaaattgtactctacccccttcttgatttcaaacacgttgtgcacatggttcatctcatttcttcccgagactcactctggtgatctctgcctccccctacacacttacaagatgttcactgggagaagtgcttagctacaaagctgcctaaagtaagctggggtaccccacaggtacagggcagctgctccagacacctcctgtgggcagttctgaggccaaaggggaaaaaaatctaaatggaccatctctgcaggaagaaaataaaattctttgtattctccttcctgaacgtgtttctcttatgtccaatttctgatagactccaattatatcaacttgtcgacctcctccttcctgcctacatacttgcttattcattcacccaggccacgtgagctcgctcccaggatgatctcatccagttgtgtgggttttaaatcatctctagactcaaggctcccactttacctctctagaattaaccctgtcccctggtccttttgatcccttcctagggccatccatgggatgttgagtctgagcacacctcctctcactcccaaacccgagcctctccctggggtttcccgttcaccaaagccaccccgggccatctggtcacttacttggaacttctcagagccatcattaactctattcctttacttcctccacctactcattagcacatcttaccagtcgcactttctaagcacttgtggaacccggccactttgccatcttttttgctgtttcctccctcttctgatccatcagctagaccgtttgctaatactacccaggagcttccaccatgcctccctgccagcccattccacttaaacatcaaagtgatcattttgaagcataaatgaaatcctatacaactcacccactattgttatacatagacttcagactactcgcaaacctccacgtaccctgccagcgcttcacctttgtaaccctctctgtccatgacctccagccactctggaaggttagcatagtgtcaagcctgctcattctataaagttgttgaacaagccacttattttgctctctgaaatctacatggtctgctcactcgagtcacacagaatctgctcaagggacttactgtgaccaagatgccaaatgcaagaccccatcccgagttcatccactctcttgtcatgcctacacttttctctctatcacattctgctgggaaactgtctgtatattgatgtttctcctgagggtaagtgctccctgagacatgttccctcgctttgttcctgctgcatgcccaggtacctagaggaaagtatgacataagacatggaatgttggagacagccagtattcactgaatgcccatctttgttgtaggtgttctgatacagtaaaagaaaccagaaggaaaatgggattctgccctagggaactcaccccttgggtggcagagacagacaagtacgcatctctgtggttctgtggctgggtagtgtagctccagcttgaaacccccaactgtgcccgcaggaatcggaaaggtagccagaaagagctgacatttgagattattcctgacagatgagcaagtgttttcaaggtagaggagagtgggaaggacacttcaggtgtggaagtggcaggtgcagcagcgtggcactgggatagataacattcaatggaccgcgaatgtgaccagcttatgagagagctcaaagatgtgagtgcttgagtcagctaccagaaagcaacaacttagtttattcttggcgctgaacgtgctccttggaattttcccttttagtaagcagtgcccgttcagatgattactcatgccgcagttctcagagtcatccttgtattttcattctcttacactccacgtctagtctgccagctacacaccatcagccctgccttccaaataggtgccacgcccagcctctgctcgccaagcttatatgaatgtctgaccccaagctgcaccgtagctaacacttccaggcaagcctccctgcttctcttatgaccttcatggccccattccagtcaaaagccagcactgtcattgtcaactgctcttaacttaaaactggaggagcaacgggcatggatcaactacgtgggtgcctagaaaagagtctgtgtgtgtgttgggggtgcacttgagagagagacaaaaagagagactctgcatatcaaagtctgtgtcttgtatatctatatgtcttctttccttcccctcccctccttccatttcttctccttctcctccccctcctcttcaaccctctcccacaccaccattctcctcctcaccttcctcctcttcaccttctcacccttaccatannnnnnnnnnnnnnnnnnnnnnnnnnnnnnnnnnnnnnnnnnnnnnnnnnnnnnnnnnnnnnnnnnnnnnnnnnnnnnnnnnnnnnnnnnnnnnnnnnnnnnnnnnnnnnnnnnnnnnnnnnnnnnnnnnnnnnnnnnnnnnnnnnnnnnnnnnnnnnnnnnnnnnnnnnnnnnnnnnnnnnnnnnnnnnnnnnnnnnnnnnnnnnnnnnnnnnnnnnnnnnnnnnnnnnnnnnnnnnnnnnnnnnnnnnnnnnnnnnnnnnnnnnnnnnnnnnnnnnnnnnnnnnnnnnnnnnnnnnnnnnnnnnnnnnnnnnnnnnnnnnnnnnnnnnnnnnnnnnnnnnnntttccttccttcccctcctcccacttttccctactctccccactggccaccatcagataggaatccttgtttcacttccaacacgtgtccactggccgtgatgtcacacctcacacagagacaatggagctaagtgattgtagactgaatctcttgaaaatgtcagccaaaatatatcttccctcctttgggttgttttatcttaagtattttcttcacagtgacagagatacaactaatattataaatgcaaagagcatgtggtttttaaaaaaaaaatcaaaataagcagaaaagtttagcttacttgatcaataaaaatcagggaagtgcattttgatatataatgtggttgcttaaaaggaatcatgaagtccatttcactcagatttctataaataaaattttaaaacataatgaaatacattcttttatgagaatatgtaattcagccctctgaagtttaaagagaaagtctataagattgaccactgtgggaaaacatggtttgttctttttctcacctccgagacaaaaagcctcatagaggcagcttacaggaataagagttgtgtcagcttgtggcttctgaggacactggtccgtcacagtgggagccttggaggatgggaagttgccactgccagtgtgggacacgcacgcttctgtctgtagcaggagttgaagcacagcttatccacatctggaagatgagaaaccagagtgttagaaggttagaaccttcgaagctgaccctaagcatctcgtgtctaccagctagttcacagtccctcccaaatgctgcacagcctccaaaacaaagccttcaatgaggcaccgcgagttcacatgcaaacccagcaacctcccaaaacacagcaccagctgtgggccatgcgttcacatggaagacttaaaatcaccaatggaacttcaagcttgtaccagagttataagaacagtgtcatgggcagatggattttatttcaggagtaaaggatgttacaatagaaaagttttaatataatctatcacactaaaatctaccttataatttactaagtttatcttttataccaaacactatactgcttttatcaattctttaaaggtacagatataatccagtgtccacttttcatcaaaatgtctttaaaattaaaagtgatccttccttaacacaacaatgtggcataggggtaggatctcactatgtacctcaggctggccttgaacttggaatgctccccctttgactactgaggctgggcttaaagacttgtgccatcacagcccgctggtgtaagttcagcattattctgaataattttgtccacacagggcaaaagaaggaaattagaaagaaggaaaaagaatccaaaggcaggggttaagctgacatgttttatttgtatagggtatgagttgcttcaatttcatgctcatttctatgaagcaactaaaatgtagtataacaaaactcaagcaatgagtttatagaatgagtatcctttgtgtgtgtgattaattgttgatttgaagatttaatgaaataaaagcatcctatttacaacagcaggaagttcaaatgtcagttataaatctgaatatgctatgtgtataagaattgaatttaagaatctttaaagctgggtgtggtggcgcatgcctttaatcccagcagttgggaggcagaggcaggcggatttctgagtttgaggccagcctggtctacatagtgagttccaggacagcgagggctatatagataatccctgtctccaaaaaccaaaaaccaaaaaccaaaaaaaaaaaaaaaaaaagaatctttaatacatatgtgtatgtatgtatgaatgtatgtgaataaaaattttaaactctctaagatacagaagtaaaaacaaaaatgtaaataaatggaaaggcaatccctatttttaaatagggaatttcattagtataagtttaaaacaatcctagtaaaaatacaagtaaaaagacttttataaacaaacaaaatggtgcctaatcaatgtgggaagaaatttaatcaagaatactccaggaaaggtgaaaattatgatttagatattaaaatgtattatatttgaataagggcactaatagacaaattagtggtgtagaaatagcctcaattttattttaaattttaatctacattgggaggttctcatgtcagtaatataaacctgagatgatcaataatttgtgctgggacaaccaaatagctgtcaaggggaaatccgcttgacagtttcattttattgcaaaataaaatctaactaaattcaagaatttaggaggaaattgttaatatctacaggtgcaggggaccttccaaagtacaatagaaaatccaaaagctgtaaagaaaagaatcataaaatgaattcagttccataaaaattagacacttgagaggcagataaatacaacttgcaaaggcaagtgacaaagtagagagaacatttctgcaactaatctatataaaattttttaaaaagctaactccccaaccaataaagaacctttataaggaactaagaaaaaaaatggctgtgcaatagaaaaaaatgtaaggttatgccgggcggtggaggcacacttttaatcctagtacttgggaggcagaggcaggcagatcttcaagttcaaagccagtctagtcagcctagtctatggagtgagttctagggcagccagagctacactgagtcaccctgtcagttttaaacaacagaagaacacagccacagagtcaactaatcagggctcccagggcccacagagactgaactgacagtcacggagcctgcatggggactgcgtccgagctggggttgtttagcttgggcttttgtgggagtgaggggagtctttgactctgtggcctgctcttgggacccttttcctcctgggttgcctcagccagccttgaaatgagggtttgagtctagtcttactgcatgttgttattccaagtttggttatcactaggaggcctgctcttcctgaaggaaaaaggaagaacagtggatctgggaaagaggacagggggacctggaaggagtggaaggaggaaggctgcggttgggatgtgtcttaaagagtaagtcttaaaagcagaaggttattttcagtttacaggaaatataaacaacggcttaggagcatacaaaatataatcagctcacttatgaaaaatgaatgcaaatcaaatctataacacacaattttaacaggaagatgttttcatagtttaacaatatgatctattagcaagactatggataaaggagtactgataaataccactactgctgcctcaagtataattgttattctctcaaagaacagtttggcagtatcagaactctaaaagcagtctccaaagtatatcccaagatgtcacatacacctgagacaggaaatagcgacagaccttgcacgccagtgtctttcccccctaagtcaccgtctcactgagtagctcagtctggcctagactcaccagcctcctgtatcgggctcccaagcacacaccggctcacctgtctctgtttccatcttaaacatttatcacacactgtggcctgaacttgtgtcctgaggtgtgatagtaaaggtgatacgcatgtcttcatccttcccaggttcattgacagaatattccttttttaccatggatcttagcaacctcagtatatgagttctttatctcaccaagaattcccactttttcacttaaacacttgaagtttctttatactattctgaaaagctatcagttttaaaaaaaagtcgggtacatagttatatagtggaattacataaaacaggaaggaaccttcattcattcattcattcattcattcatttttgcttactcacttcacatcccgctcactgcctgcctctcagtcaccacctcccacaattctcgccccgccccttccccttctcatctgagcaggtgggcccccgggtgtacccccactctggtacttcaagtctctctgaggcttaggtacatcctctcccactgaaaccagacaaagcaactcagctagaagaacatattccacatacaggcaacagcttttgagataccctcccctgctcccattgttccagaacctcatgaaaaccaagctgcacatctgctatgtatgtgaggggaggcctacgtccagcccatgtatgttctttgattggtggctcagtctctgagagccccaagggtccaggttagttaactctgttggtcttcctgtggagttcctatccctataggagtccgaaatcctggaaggactcttttacccatggaatgatactcaaattttatatatataataaattttataaatttatacatatttatacatatgtgtgtgtgtacgtgtttgaatatgtgtacatatgtatacagacacacatacgtgcatatgagtgtgaaggccagaggataacttggatggcttcctcaatcatcaccatattatttttttttgaggcagggtttttcgctgacctagaacttgctgactttgctactctagccaggcagcagtccccagggactcttgtgtttctgcctcctcagccctgggattgcaggcatacatcactacagctggcttctttacatggnnnnnnnnnnnnnnnnnnnnnnnnnnnnnnnnncaaggtggaaatatatatgaatgaatgaatgtgaatgagaattaaagtgcatatccaggtgcacatctctatgcatatatatggagaccaaacaacagcattggttatcctttctcagcagtatccctggccaccttcctcctgtacccagcagggtccctcactggcctagaacttgccatgtaggtctgtctagcaagccccaagcttctgcctgtctgcctctccagtcctgggattctaaacacacaccaccatacctgaactcaggtcctcacacacttcaccagatgatctgtctctccagctcacaggtagggagattttagagctcctttttttttttttaatgttactgtacatttataattgtacatagtaatgggtttcattgtgatgtttccatgaaagcctttaacacaatttgatcatgtcgagtccttcataatccttcgttggccttccttctcctaatccccttttctcttcctggaaagccacctcctcctttcatgtcttttcctctaaattccataatgaaagaaaacgtgatatttatctttatgagcctggctttatattacttaatatgatattatctagtactgtctgtttcccaaagcacttcattgtggatgggtggttgggtcaatggctgggtagatggatggatggatagatggatggatggatggatggatggatggatggatggatgtcacaattctgtatacctttggagactacatagtctgattctcagttgagggcaaatgtgaatagtgccacaataagagttgctatgcaaagtattctgacttcgacttctttcactgtatatccagcaatggcatagctagattggtaatcttggtgtgttttaaatgaatgtctattctgatttccatggtatctatcctggcttctattccaactagcagtggacacgggcttcttttcctgtgctgttatttgtcgttctctgttatcttggtggcagccattctcactcggggagatgaaatctcagtgaagtttgatttatatattttctgtggttaaagatgctggacatatctattgcttattagtatttcttctttaaaaatgtatctgttcagctgacttgaccacgtattggttgcatcacatgttctttgtattttctggataccaatccgctgttagatgaatacttggaggttttctccatttgttgtaaggtatggcttcactccgctaatggtttcctttgttgtgcagaagcttttcaatatcatacaatcccagttgccagttcttgcccttatttcctgagctacaggcggcctattttaaaaaacaataatcactacctgtgcctgtgagctcgagtgtatttccctgttttcctataaaagttgtaaaatctcaggtctctagctaggactgttttgagctgatttccgttgcttcagtcttctacctgctcacgtccacacgttgaggaagatgctcattcttcaggatgctgtgttgtcaccttgttgggaacgagatggctgtgtccacgtgggtttgtttctgtgttctttctcatggtttccattctgttgctgcagtaaaatatcctgaacaaaagcaattcaggggagggaagctgtctgtcattgaggttttgaagggaaggtgcactgaagggggtttcttacctgggcagtaattcagctggcggaaaacatgagcctaatgtgttaataccatggctgaattcaaaggggggaaaatgagtttctcctctccttggggagcctccatcatgatttatggttctgtaaagtagggggtgcttcacagaaactgtttctcttcattgtagagaagcagtgttgtgaagatgggcttttaaaagcctccttgtttctccggctaatgctgaggaacttacatggccccatctctccctgggcagcagtgtgcatttgtttttgattgacaggtcagcaggtttaaaaacatgtgcagggtgtggtgtgtggcttcccattggttatgcatccatgtcacccatgaggtataattaatctcatagttctcaccaccatcggcgttgtttttctaatttaatgaaataattatcatgttgtccccagcttactctgtgtgtggcatgttgtgggtgctcaaggagtatatctcaacggacagaattgaaaaaggagttagctactgtagccatgttgaaattcaacccttacagtcacattaatctctgttaggctaagagcagtggctgacattggtggtggaataactgggatgggacacagagaatccttgaggagtggtggtcatattctgtgatttggtaaggtgtggatttcacacatatattcatttatcaaaactcaatggctttttccactcaagattcataaaatgtgctatatgtgttgttgtctcaagaaaaaaaatccatcaatcagtcttaatttctagtacatattatgcctcctgaaatatttatggaagagtgtggtcatttctgcaatcagctttgctctgcagtgaaaaaataatggatgaggacatgggatgctagagatgtgtaaagaaatgtgtgttaactgcagattctaaacagagagtatgtatggattggatgttccttatccaaaattctagagaccagagtatttcagactttatttttaattttggagtatttgcatatgcttagtgagctgttagatatgagattccactgtaacaattcatttgtttcctgcatggttcaggatatttgatcatactgtgaaccccaagattgtgttgtttaatgaaaaaaatctgtttctagttgtggtatgtctcagcacttagcacacacctttaattcaaaacaataaggtacagttagtttgtagaaggaactgcccatgtttgaaagtgatgtctaattgagcggcagacaaagtgactaatcagagaaagatttgacagaataagtcagaggtagtatatacccaagtctcaagagaaaagagaggaaggggaagctactttaagtggcagcatggaaagagtaggacagggggcagtttaccagcagagttttacagagatggttgcagggagagaacaagctaggcacaggtgaagacagaaggagtcagaagatgagaacatattgccatagtttgaggccagtcagaacaattcggtgagaagtgaaagaagccagtttgaatcagtcaacttggagacgagttttgagccagaacagctgagttgaaccagccagccaaagttcagaaagaactaggaagtgtgagcttattcagcagtgactctcataggctgaaattattctaagcctagataagattttatggatgctagaagcttccaggactaggcctacgttagcagacagaggcagtaagcctcggagacatttactacaaggaaataaatgttactttcgcacatgcgtagtttacatatatagacaaaagtcacttcatcataattattattttatacatgaaacgaagtgtcatggtatccagttttctttttgtggtgacatatcagcactaaatatgttttagagtttgaggatttcattttttcagattagggaacaacttgtagttgttagctttaatattatgtgagtgtttttataaacttgaaaccttttttttaaggggagcagggggagaggagagggaataggggatttttcagagggaaaactaggaaagggaataacatttgaaatgtaaataaagaaaattactaataaaaaatatttgtttatttatttatttatttattatatgtaaatacattgtagctgtcctcagacaccccagaagaggacatcagatctccttacagatggttgtgagccaccatgtggtcgctgggaattgaactcaggacctttgcaagagcagtcagtgctcttaaccactgagccatctctccagccccgtacacttgaaatcttaaataatttttctaaaaatcaaagggcaaaaccactcatgaccttgcaaatatgacaccaaagtccacttgacattttttacccacattcttcaggttttcacatctgctccttgaaacagaaacatcatcatttgctagagacaccctggtgaacccagcagtagatctttatgatctatagagggccccttttactgggggtgaggatttgaaagacaattttaaaaggacagaggaactttatacttagcgtggcgacatacaggatagtcttctgcatcaccactaaaaacagttctccgtcttataatcatgtgcatgccagagagtaaccatttttattgtcacctaaggaagacctgaagaactaccattctgtgatattgtcagaaaatggctacctctacctacacccggttgtgtacataactcccttatagaaatgacgtggaagttaccaagctcaagtgcagggcagaactgtctccacgtgcttattcgtacctttcctcttggtgtatttttccctcgtgcaatatagtagaaagctaaagccagacacatgtgcacccctcttgtagttaccaaatggctctgtgatcttgtgggcattgcttactacctttgggtataactttccacaatctttaagcaagttgattgagtcagatcatctgcagtcccttctaccattgggctgcacctgctgtagtgaaatcttgaacccatacccttggcataagatgaggagcccctggtcccatccagatgagatacagatctacaagagactcatttacatactgcttaaatactcacttttagtcaaagtgagtcttccttctgcttttccttactatctgaacagccagaaagcaagatgtattctaaacctctactaagagtatcaagaaaaaagaacaaagaagaaagggagttgaagaagtgaaactgtacatttggttctcttacacaaatccatgtgacaattctcttacgctgctgtgaatttacacggcattacgctgctctgtcaatttacagccagagtctttgccttctcagtgtggaatggaactcaaaggcatgagtggtttggtctatcacagtgttcaaaccactcagagccattagctgggtaaactttgacctcttcgtgtaccatttgctcaactgtgctgcaaaaatcagagtttcaacttctagtgaatatgtccttggcttactgtaattacccaaggctggttacatgacacacatatatttggattcatagtcacacagtgtacattatagtccagatgtggttgtatccacgagtctttattgtagtgtacatgcatgtttgcatattcgggtatggactcctatgtattgtgtccatttgattagctgtaaactggatgtcagtagtggagctgcttaactaaagagagaagctaattaccaaggacttgactttactaatgtactcaggctgaagatgtgttaggtgttaggtgagatcatggacaagccatctgatttggtccattattatattttcaattatctttcatattcaaagagagacattaatatagctgaggatgacatagcaaattaccacagctctctaaccctttaaattgctaatactgttgtaatctgtaattatagaaatcagtgtgagaattgtggcagtgcataattatcttcctgatactttattgctgaatgaattattaatcagaatcagtcttgtatagtatttgcagcaacgcagaagaataatgtataattaaatttcattattctgatttttgtgttaatgttttatgatgttgtaattgataattaattggccaaaactcatacagtacttggaagtttcaggtggctgggaaatgttcagtgtgctgagttcattaactaagcagtaatcattctgcaaagaccaagggatcttgtccaagctatgtgagagagtgcttaaaagtggtgtcttaagcttgagcttttcacatttcctttaaaaaaaaaaaaagcaataactgtgagcatgtacaaatgatgaagacatcttgatagctttcagattgggtcaattttaagtaatcaaacataggttgagaatgtcagactaatacagtcggtaatttggtatgcctctctatatgtcaatttccatcctattctaattaaaccatccttctccacattactatagtgtgaggaaaagtgccacggccatagacctaagagctctttcctcctggtcttggtgagtataacacatcacatagcacatccttgtaaggaaagtctggtttcatctttccctattgttcaaaacactatatggccccctcctcacagacacatagatttagactctgaaaggattatgaacttctccttgactggcattctaagcaggaattcctggagtgagtttcttttagaatcctttgcagcctaggtaaccaggaaaagcgcagaatctaagaatgcctttcacccagcctgattcctattgaaaagatgcattgttgggcattttgtggactgtgctctttgattcgatttttaagaggccaaggaatctttttggttttcaaagtatctgctttagaaacatacaatttttctcttaagcaggtgagcctgtttttacattctgaggaattctgaaacattgtattagacaatgttgacagtgcatgcttatttacgtatttatttatttattgtctttttctgagcagattagaaaaccatggcggggaggaacaaaggggttaggggactgtttctgagattcctgaacaaatttgcctcgacattcccaagaagctctcaactggcttatttttgtgagttgcacttggttctgatgccttccactcccatttagtcaagaggaatctgtcatcggaccacaggaaaaacgcacttgctagatggtcttcattgatcttattgatcttgcaataaagatcagcagcaatcctcaaatcatctcctctccactccaggtactccacagccatgttgatcccagggtacccacaattccaaggcatcaccccactaagcttgctcacactaaccgccttctgaactctcagctgaggacctgtgccgctgtcaccttctaaaagccagtgctgttgagtttgaggtgtaagtctgtgtttataaacaggcggggtcagagtcatctttcatatgcagaaataaggaaggtattgacaaaatagaacagctaaaccatattctacaaggatccaccttgtgtgcaaacagcggatagaaaaggctctttggttcatgagtagttgagtccttccctttatgtgactttgtatgactttaaaataggaagaaatctggagtatgcaagccagagactggagacactggggacaactcactgagcaggcagtatatgaacaaagacctgaagttgattagagactaagcaatcactttcatcccgaggcagcctctcaggagacaacacgttctcttcatctcacatatgaggagactcggagaatgtacacaagctgctcagaccacccagccctaggaattcccagtaggtttggaggggaggggaggagggcagccacttcagatcaactgttaatgggggtaaaatgcagatttctaaccacagtagttacactaaatgcacatatgcaacttgagaactattatcattcaaagagataggaaattaactacagagtctgaggtgggcaggaggcactgcctcaattaagaactacaggttacaaaaatataagccactgtcaatctgggaatgaagggtggattttaaaagttgggatgatagaaaaactaactttattgattacttactaggtattgaatgagtcaactcatgaactaatgagcaaatgtgcaatgccttaatcctcagaaccctagctctttattacaccagttttaaagagttggggggaaggaggcagagaaggctaaaagacatgtctgaggttcagcaataagtgagaaacaggactgaaatccaagcagtctggctccagcctgcgcccatcaccattgcgttcctctacggcatgtgcaagctgtacttagtgagcgctgcattcctgctcaggtccatgtccaggcgccgtgcatgcttgtgtgttaagtccttccctctgaatggcatctgaatgcagatgagacacccttacccagagtttccatggttttctgagatgacagcctgatcagcattcagattcaggcaggcaggccccagagaaagcacacacatctctactcatgaaagaagagtcagatgtatataaatgcagtggagggaaagcaggggaagtctgtcccagagaggaatatgcaaggcacgtgcgtgtaacaaataggaaggggtgaatgtcttaggaaacgttattagataaccatctgcgagagttccccaactaccaggcactccctttaacatcagagagaagtagatcaggagttacatgtccataagagaagactttcttggtctaattgtgtagatttagccaatccgtgatgagtgtggttcctgagtggttcattcagagtgctcactcttagatccattgccttctgtgaccttcatggtcccagggggacgctgtggaaggcaggctatagtgatgtcatggccacagctgccaagaagcatgggagcccacactttgtgccatccttgcagccttaagcaaattggcttttacccacgttaaagcgaaaaatgcaagcaaatgaaacaaatgccttttgttcttcatatgatctccatcgacctccatatgagaagtcctccgtgtgtacagaattacaaacgtatgcactgtgcaaataattgtttctcatgatgatagtttgggacggaagatgtagctcagtgatggggcagttgcctagcatcggatcccagtaccacaaagaaaaaattagtgtttatttgagcacttactacaaaagtaagtagcatcctaaatactctattgttagagagaacaagtgttacagaagccaattaatgtgccagcatctgtcatctaagaattagacaagcaggaatcaaatggtaaccgtctgtgtagggaaggaaggagaaccggcaagtgggtgctgtgtggactcaggaaactaagccgcctcttactgccagcccacccaaacagttttgagttactcattcctgaccgttcaggaaaaagagtattttctacccctggaacagagcaaattttgactttttgtaaagggtaagagaatagggctaggaagatggctcactggctaagagcagtcactgctctcgcagaggatcttgggtttgattcccaggacccacctcaggtgctcataactggttgtaactgcagttccaggggcatcaaacgttacccccgtgagcaaggtgcacataaattcatgtaagcaaacacacgtaaacataaatatttctaaagggtcctttctttgatacagtttgcgttacccagaagacactctgtaaggcagaaacgtgtgagttctgcggcacggcagctttattccaatagcatgctctgggtggtgaagcatctgtgtcacatttggtaatccctactcgaagatgctgccacggaacgctccacgcccacggtttccccacccccgctttgctgacctctgcttttcccgtgctctttggagagactttcgcctctgctaatctcctccctcctcggttggcctccagtacggcggcagatggtccaagtccttgtattactgaatgtgagattaacaaactgctggcccatcctcaccttgggagtttaatcacttttaagtagaacagagaaaggaagtaagggaggcagacatctgtagaaatccacaagcctttctcagaatacctgagctttgattcgctgctgcctggtttggtatgctgtgcttttatttccttagttaccaggggagtcaggtgcagtctgagcctcttccatcctgcttgcattcctgcagagaagatgtttcagaacaacacggatccacaggacccaatgggttgggggtggggggtgggggtggggacaagttctcatttgttcagaacctcctcgtgggccaaaggggtggttcagcaggaaatgaacttgccttgcaaacctgaggacccattaaactcgtgatcccacaaaggaaagagggaactgattctcgaaggttgtccattggcttccacatgctcacacgcatgctcacatgaaggttgtccattgactcccacatgcttacacgcatgctcacacgccatacacactaatagtatttatcagttacatcagaacaaagatgtgaagaacctgtatttctgcagcctttgcaactgtgactctgctttgtttcgccctgtaagctatgtgccctcttgggagcctgggagagcatcagcagcaatcataagagtgaagagtcacctagccgcagatgctctttgtgtaaggcagacctttcccctgactgtgtgtctggaggtggacctgcacacaaagcagggcttagcttcagtgatgcagtctcgggcatcctaatcatagccagtcggatctccctttgggaagtttcacgtagtagcacatgtaggcgatactaacctgtgctagccacagtgacattgctaatactgcctctgaaatccgcatgcaaacttcagtctagtattgtcacttgcctgatgcctaaacttttgttaattaccatagcaaatcacttgaaacagactcaataaaaacaaaattatttttaattatagcatatgagtgttctgctctcgacgctgtcctggtccctcccctttattttctctcctcttctccaatatctggctccccgacacatctaaagccctcttagaactgagtttagtttctctcttctatcttagggctgacaatcatgatgaagctaaaattaggcagaattagaattacagtgccccttttccacatttgactctctgttgtcttttcttaatctttgattctgttgtgagttttttttgactcggttctttttttgagacagaataatttctgccagattctgggaactcccctcccacccgatggggtcggtctggggaggagaagtgagccccagttgagcccagcgctcagtacaggtctgcagcgccttctattaaaatgtaaagtgatccgttgagtcagcctccctctggtttgactcagacgctttatggtgcactttgcatgtcatttctctgtaatgatttccccatggagaagggtgtctgatagaatccaggcaagactgaagattgctctgagtcaaatggatcttttattcttttagtattaacccttatctctcagtttcccatcctcgaattttccctgaaggaaccttaatgaagtaaacaggcctcagcaccctcatttagcttcctaaccactgttctcagattcttctcacgttaacagtgggaagctccgggggaatagtctgtggtagaaggggacattgagagagaatattcacacagatgccctgataaagaaaaatgtagaaaagagatgacatttctctgtcctctaagaggcagctgctaatgggaagcagaaaatgagctatgagaaatgaatataaatggagatggaagaagtgacaccagagacaaaccgaatgtgacaatttggaaaagaaaggtgaccaatagcagaaaatggcctgacccagaagaatagacagtgtcacctgtgccctcagattggtggggtgggggggagggaggcagctttgccacaaaagaacaacagaggaggagggagggaaagagagatggagagagagagagagagagagagagagagagaaggcacgccatcagaacagaagaacaaggtagacagccgcttgccctgttgtgtcccttcccagttccacagtcctctccctccattgtcctctgttgccccagccatcactgactgcgaccactcatgttggactgcctggcataaagactctttcacatgacaatttctttctctctctttcttcctttctttgtttctttctttctttttttgtttttgtttttgttttttcgagacaaggtttctctgtgtagccctggctgtcctggaactcactctgtagaccaggctggccttgaactcagaaatccgcctgcctctgcctcccgagtgctgggattaaaagcgtgcgccaccattcccggccacaggccaatttcaatgctgcattcatttgagagtggtagtttacgccccatcttactgttcagttcaagctgtggccttctccctgcctcctaagcagcatcacttcacctggggtaactacagaaggaagagagaagcagcacctcttaggtgaagcactgagtccagcctgcctcccagagcggattgaggtgggaagacgtgttcctccgtcctactgagctttgtgctttgctagatgtgaaattggcttctgagtcaccttttctttggactgacttgtttatagacggggagggtcacagcgttactgagaatctttctctcttcagctcgctccagatacatagtagcattttccatccaaccagttacattgttgttgatacatcaacctttcttttaagaactgtggttagaaatgcttgcttcgagccggggcgtggtgcttttaatcccagcactcaggaggcagaggcaggtggatttctgagtttgaggccagcctggtttacaaagtgagttccagaacagccaggcctatacagagaaaccctgtctagaaaaaaaccaaaaaaaaacgagaaaaaaaaaaataaaaaagcttgttaaaagacttttccaaaagtaatactttcatagaaacacagatattctaactaggaatactttgagttcacctgtttcttcttgctacaaataagaaaatggagatgcagaaactgattggcttttgtgagagaggaaagcatgggatctctgaaaataacttacagtgggacagatgctggggtcctggtgatcctagggcttcaatatgtgaatcagttgggaatacagataactttactcagtaatactgtgtatcataggtgtttatgatttgttcatttttagtacaataatagaattgtggtatcatgttttatgtctattataattatatatatattatattgcaatttttacattgcttctgtggactgacattcagtgttaggtttgtgacgtcaatctgcatgctacatatggctctaattcgctgttattccatgtataaataaataaatactgtatacctcagtgctactgacaggcattgcattgtttctactagagggttattataaataatgctgccgtgaatatccttattcagtgttccactttggaacctgggagaatctctactgtaacctaagaatggaattgcaggggataacccatgcatgccttcaacctcgctagataatgcaagttgtttctagagatactaagacaagtctcatcaacaagcaagaactcctgttgcttcagcaacaatattaaatttaatattgtcagattttctacttctttccaagctggtggttatggactgtctttaatactttattatctttagccagattcattacagtttgccctagcatcatattatattttccagatcagtgtctttgtcagcttctgcttcttcactcagattattttaaatatgaaaagttagaatgagtcgccattttctcattggatactttggagtttagatcttttttttttttttaattttcatctgtgcaaatgaataaatgaaacaaccaccacagatgcagagcttctcgtgactgctctgtgttcaaatctgggtgtacttctcaactgtgaaagtaaaaaaaaccattgtcgcaaaggtgctagtgaatccaagttcctcctgaaaggtcaaggaaaatggacttttatactgaactagggaacctttgagaactctgaaggacttgatgatacaattgcaatagctccagtcttagcagtgcccttaaatttcagttcccttggcgctaagcaggaggcagacagatgggggctttgaggaagtaaatcagagaaaccttttagctgatccacgccaggccctccctctagctctctaaggcactagggacattaagcactcaatgtttgcattaggaaagactgaagctttctactttcagtgagaagtttgatgtgcttagaaagagtttgcagaccacactaacaccgactctgactccgtttgaatagctctctgcactcacgagtctctatagacatgctaacttcctcctctaaaaactaactcttacgaatttatagtaaataactttttaaatgcttgataagagcagaaattcactcggcaattactaaataatttagcatctgattcacagaagtgtttacttaatgcactgtttctgggagcggtgtggggcgcaccgagtgaagtggtttataatttactccttttcttcacccgcaaggcatattaattttttttcatcccaagcattctagacatgacaggttgtctgtaaaatttaacattctactttttttgtgaattgccgcttttctgattccccactgtggattttttaactttgtgaattatacttttaacagaggaactgttagacacttcactatctgaatatgattcagtaatgaatgaagagcgggtaagctcacaagtgagtctgcattcattaatacggcatgcttgactgagaagagtgtggcctccgtagctgcttttgaggggatgagcatgctatgataatatagtagtaattagcttctcctgccgaaccatatgaggaaatgattggggtgtgtgtgttgtgcacatgtgcagctggggtttttggcatgcaagaagaatgagatcagccaaaacccaaaccagagcctttggaaagctccctcacaatctgacttcagctaatgtctacatactttaacacattgtctactgcttagggtaaagcctggctgtcagactcctgcgtgctattctgggatccctgctccgcgcgcgcactgtgaagtgtttcattcttagatcctgtgatccctgctgctttgttgcattaggtggcaagcgttgcttaattaacattaggaacgaacgaaggagaaatagaaagcagggtgctcgctcctgcaagggaggaagagccgaaggcagatgagagttcacagaacacacgtgatgaggccggatgaaagggctgcaggaatagggtgccattgtgcttgaagagacccggggaggggtggatacagtcagacatgtaaagaacaagagaaagccaattggacaactacagcagaaagaactatccaagaatcaggtaacagcatccagaaaagtcactaaataaaggtctagcaatcgtttcctgataatggatttcagggtttgccttgtgtgcgggttagcttttatgtcagcctgacacaggctacagtccttttggaagaaaatacctcaattgagaaaatgtccccatcagactgccctgtgagcgagcctgtgaggcattttcttcattgatgagatgtggataggcccatccttcatgggtagagagacccctgaatgggtgatcccaggtgctataataaagcaggctgagcaagccataaggaccaagccagtaagtaccacccctccatggcctctgcatcagctcctgcttctaggttcctgtcctgaccttttctcagtgataaactgatgtggaaatacaattgagataagccctttcttccttgagctgctttcttctcggtgttttatcgcagcaatgactaagacacctaccatgtggaagaccctgggttcattccccagcaccacccaaaatagatttcagtttctactgtttgctgaacagaattaatattgtttaaatgtcttcaaatcttaattgatggcttagccagaagagcagatatccttgcgaatgtgacttttataacattcttggccaactgagactccatatatggccctatcctctcttttcaaaagccagttctcttaggaaaaggctgggtcctcgagactctcccttattccccagctgtctgggagctctgcagccttgcctgaatcctggaatatggtaatccagtctctgccttgttttgccaactattaacttcctcgtgggacatgattcttgtcctcctctccaaagtggttaggacctcagtcaggtctcagtggaatctcagctgaatttccctggtgacatatctgcagttcatatttgcttgctcaggcgatgttcccagaacggaccctccaggttaaggtgaagccaccaacagcgtgacttctccatgttgctcccagaagcccttcacacttgggtccccatgtcctacaaggaacttagttcaagaaagttactgccctatcaaggaatatcggggtgcatcctgacaggagttcctaatttgggctctgcagagcaggagactggaatcctgctttctcccccaaccctagagaaacctttgtacattgtctacttcatttcttagaaccacctcttcagagacaactttttatttgatgcaacttctgcgacaattaaactgcactcataaattgtcttcaaagggcctaattaagataatttctgtcaactagaaggtaacaacccaccctctaaatcacttgggtcaatttccctcacagcctcctgagggttttagagctgtgagatcccagctggacttgtggtccttgcttcacattttgtgatcctggattcagatacaaagtgaagcagcagtttgtccacatccacagagcgggtcagtgccacagccgaagcagaggccactgctctctccgccgcacctcagtttcattgctctctgggctatcaacccttccatatttcacttcatttatggccttgtgttcttcaaagcaaaactctgtctcagtacagttacaatgataatagattgcccataagaatatttgaaaaatggcacactttattaatcccttcttctgatgacgttagtgtgtcagccatctatttttttagaacattagttgctcaaccaggttttcagtgttgcctggtacatatgaactgttacatttttttaactcaatacattgtgtagactaatagaaaaatcaaatgtgataggaccagaggtaataatttgagagtggagaagtcaggattgagactgtatggtagacacaaaaattctggaaacattccaaggaagtggaggctaattagaagacaatagagaggctcagcagctaagaacacttgctgctcttaagagaggacctgagtttgattcccagcacccatgacagtggtgcataactgcatgttactctaactccaggagttccaatgcccctttcctgttctctgtgggtacctgcatttgtgtgcaaatgtcttagttagggtttcaattgatgcaacaaaaccaccaagaccaaaaagcaagttggggaggaaaaggatcatttagtttacactttcacgctgtagtccatcttcaaaggaagttaggatatgaactcaaacaggacaggtacctggagacaggaccatggaggggtgctgcttactggctggctggctgtggcttgctcggcctgctttcttacagaacccagagtcaccagcacagggatggcaccaccacaataggctggaccctcccccatcaattactaaaggaaatgccctacatctggatcttatggaggcattttctcaattgaccttccctcctttcagataactctagcttgtatcaagttgacataaaagtagccaggataccatatgcaggaatacacacatatacataatttaaaataaaataaatctttttcaaagaaaggcagtttaaaaaaaaaaaagaacttgcgttctttaactcagtaataaagaatttactagcaattttctagagctagacaccaagagaccttgactttattccatgtcttaggactgttttgtatgaattgtgtcagttataatgttattcttcggatttcacagattgtagataaacaactttacaaatacttcgtttttatttgaatgccaaagaactaatgtgttttcctcacaaaaactttttgtaattagattctgaaaaaaacaccacttatagcagagcatagtttacactgtactgttagcagtgtggtacgttttgcttgtaaagtactagagaaatcataactaataaattgagtgccgctgagatgactggagtggggaggtcagggtgcttcccttggccaccctggagaggactggcacctgttagttgtcctctgacctccactgtaagcaatggcacattctctcgcacacatgcacacacacaataaacaaatgtttaaaacctctcttaaaaaataaattcagatattttgcttctagccaaacttgagcaatgagtatttttttttgcatgtaaaatatgttttattgttcttcaaaagggttcagggtttggttgtaaatcaggctgcacaccttccgtcagtctaacctctctcacaagtcaaactggcttcagttagcaatacttcattaaatccaaaagaaaaagagttttaattttgaggggaggaaaaaaaaagtccagttctgagaacaattaacattattagggttgctttattctccttcacacacccttctccccagaaccaagaatgacactatctcaggcaggctgatgctggtggacacctgcatgtgcagaccccatgggagctattgtgctcatgaacaaatacacacacacacaccaaaattctagcatgtcaagtggaaaaggtttaagtggtattgatcaaaacccttgaggagtcaacagttaacctaacttttaggtaagaagtttgatcttgagtctttgtgaaagaagcatctattgccatgctctgaagtaaaaatttctggattatatcatcatcatcatttttcaactttaacattctaggaacagtgtcaaaagcattatttttcattttctgggatgaggcaggaaggtatttgcatttagttaaaaatcaaaacaatagcatcaacagtaagcaggcaactcagaaagccaccaacatctgggtattattaatgagatgtcatccatcctactggcttgacaacacccagcagtgagtattttatttacacttccacctgaataactactaagataaagtatgaagtaaggcttttgaataccttcgaggcctgagcacatagctcagttggcaagtaaatggcatgtgggtgataagacctgagcttgatctgcggaacctgtgttaaacgctctgtgatggctgcagatgcggttcagctgggaaacagctctgctgaccagcacgtacagaacattaggcttggttcctgcgctacgtaaaattaggtgtggcatcgagtgcctgtaatccaagcacttggcaggccagggcagaaggagcaaaagcctgttatatatacataagagaattaaccaaaaaaggcaaccaaggtggtccatgcttgtcttctcagtgctgggtatacagaaacaagcaaaccctggggcccactggccagacaaatcagtgctctctaggacagtgggcagggcggggaagaggagacagacagacacacgcacatgtttgactccttatgaacaacacttgaggttgtcttctggcctctataagcatgaacacacacattaatgacatttcacattagatattaggtggcaacgaataggagtcccccaaagacagtaaaggctctagccccagaacactgctttgcgagtttccagaccatggagcaaaagaaaacaaggcattttgacgctgtcaagtggacagagctcagtatttggatacatggttgtggccagacagaaaataggagggggggggggcagagaacagagagccccagaggttgcagaaaatctcccttcagtgttcttcagagaactgatgagcacaagtgtgcaaagaggcatctcaaacatctcaaagtcttctgtggagatagaacttagtgcttggaaagtctggggtcagtgcctgttcctcatcgccccagatttaagcagacatgaagtacagtgctcacagatgtcattgatacatagtgaggaataaggctcccgagactacatgttcttcttcatacaatctcgaatgcacaatctgaaagggtcaagctgcttcccagaaccttatccctgtcttgcaacaaagcttagaactgtgtgtcataacccaaaatatccatcataaaaattgagtccaaaatgtaactgacagtgtctggcatctggccaagtatgtccaataattaaaagaaaggagggttgtagtggggggatctgagccagaacccatacacataccgaataccatgcagtagtgattgtgattttcatgtcaagtcggaaggttaaaatttttaagcagagacatagaagacactgtaaaacacccatgttggacttctttatcaatccctgaggtcacaatgagataaaaactgcattgcctttgaaaaagatgaatggcagagtagacattgctgaaatggagaccgtccaggctggaaaaagcagagccatgtttgaatgagcagggtggtttagaactgtagacaatttcttatcagcaagtcttgggctgtcctaaggaaaagagtagatgagacagcaaaaatatttggcagaaacagttgagaaaatgatggctggagtgtcatcaggtgtgaaagctcccacagacccagacacaggaaggagaggacatcagtgctcaccataatcacactgcttggaagagggaggggtacacttggaagtaaaggaaggcttaagcaaaggggaaaggaggaacagaactaaaggtgccaggccacgccctctcnnnnnnnnnnnnnnnnnnnnnnnnnnnnnnnnnnnnnnnnnnnnnnnnnnnnnnnnnnnnnnnnnnnnnnnnnnnnnnnnnnnnnnnnnnnnnnnnnnnnnnnnnnnnnnnnnnnnnnnnnnnnnnnnnnnnnnnnnnnnnnnnnnnnnnnnnnnnnnnnnnnnnnnnnnnnnnnnnnnnnnnnnnnnnnnnnnnnnnnnnnnnnnnnnnnnnnnnnnnnnnnnnnnnnnnnnnnnnnnnnnnnnnnnnnnnnnnnnnnnnnnnnnnnnnnnnnnnnnnnnnnnnnnnnnnnnnnnnnnnnnnnnnnnnnnnnnnnnnnnnnnnnnnnnnnnnnnnnnnnnnnnnnnnnnnnnnnnnnnnnnnnnnnnnnnnnnnnnnnnnnnnnnnnnnnnnnnnnnnnnnnnnnnnnnatgaggcaaccgaatgttttaatttacagacagcataatcttcaccgtagaaaacaaaaggctataagaacttataagcaagttaggcagggttgcaggacacggagttgtttcttggtgctaggtaactcagtgatagaacacgtgcctagaattccagcaagaggccctgacttagatctccagcactcaaaaagaaagtatttatatattaacaatgaataaacaacagttgatgctgtaaaatatttgaacacttaggtataaacctgagaaaataaaatatattaatactcatacagcactaaaattttattttagtggagtttatcaagtgaaaactttgaaaataactattaggagaagaagacaagcaatggacactggagaaaatactaacccgtattaaacataaagggctgttgagaatatccatcagtagatgtgaatggcttaaaactcgaactatatccatatggtaaatataattcagcaataatataacaaacttttctttttattattttttaaattagcaaacaaatggtatttattttttaatatttttattatttaagaaattgatacaatgtatttttatcatactcactcccactcttttgttttattggttagtttatttctttacatttcatatactatccccctttcgtttcccctccataaacaccctatcccttcccctctccccctgcctctatgagggtgctcacccacccacccacccacccattcctgtctccctgccctggcattctcctcactggggcatcaagccttcatagggcctcttctctcagtaatgcctgacaaggccatcctctgctacatgtgcagctggagccatgggtccctccatgtatactctttggttggtggtttagtccctgggagctctgggtggctctggttggtcgatattatcgttcttcctatggggttgaaaacccctccgcttcttcagtcctttccctaactcctccactggggactccatgctcagtccagtggttggctgcaagcatccccatctgtattggtcaggctctgacagaacctctcaggggacatctataccaggctcctgtcagcaagcacttcttggcatcagcagtagtgtcttggtttggtgtctgcagatgggatggatcactaggtagggcagactctggatggcctttccttcagtctctgctgcactctttgttcctgaatttcctttcgacaggaggaattctggattaatatttttgaggtggatgggtaaccccatccctcaaccaggggtcatgcctatctactggatatggtctctacaggttctctctcccctttgttgagtgttttggctaatgtcctccctgttggatcctgggaacctcttgggtctctggcatctgggactttctagtggctacccatccccccactgctaacctcctttcaaaattctccccatctctaaactgccccccttttccttccccctgctctctctctcccaggtccctctctccctctacttcccaatattattttcttcccttctgagtaggactgtagcatccacactttgatgtgatcttctttcttcttggatttcatatgatctgtgagttgtagtgtgggtaatcagagcttcttttgggttaatatacacttatcagtgagtgcataccatgtgtgttcttttgtgactgggttaacctcactgtcctggctagttttgtgtcaacttggcacagctggagttatcacagagaaaggagcttcagttgaggaaatgcctccacaagatccagctgcaaggcattttctcaattagtgatcaagggtggaggtccccttgtgggtggtgccatctctgggctggtagtcttggttctataagagagcaggctgagcaagccaggggaagcaagcaagccagtaacattcctccatggcctctgcatcagctcctgcttgagttccagtcctgacttccttagtgatgaacagcagtatggaagtgtaagctgaataaactctttcctccccaacctgcttcttggtcatgatgtttgtgcaggaatagaaaccctgactaagacactcactcaggatgatactttctagttccatccatttgcctatgaatttcatgaagtcattgtttttagtagctgagtagtagtccattgtgtaaatggaccacattttctgtatgtattcttctgtcgagggacatctgggttgtccagcttctggctattataaataaggctgctgtgaacatagtgggacatgtggcccttgttatatgttgggacatcttttgggtatatgcccagctcactctcactcttacccctaactcctctcagatagactcttcctccatccctctcaaactatgtgccctcctctttcttttctttcattcttttttaatgagcccaccaaattcaatttctgctgcccatttacccatgctgtgtggccgtgtggccatctaccggaacttgcagtagacttgccagagaatacacccttaaagaaaactgactttttcccttcctaggaagtgaccaactgtccatagctcctcatttatgggtggagaccccttctctctctctatgctagaattttgactagcttgatcttgtacagacaaccacaactgctgagttcatgaggataccagtcctgccatgtccagaagatactgttttgctctgattctctgcaacttctgtcacttagaatctttctgtcccccttccaccactttctcgggcctttcagggatgtaacatagctgtctcacttgttccgagcaccctaggactcttagtctctgtacttccaccagttgtaagttcttgcatttggccaccatttgctgcacaaagaaacttttctgatgatgtctgagagctgccctattctatgggtagagagatcaagacatagaaagcagtccagccaaatggatgtatctggaggatatcatccttagtgaggtaacccaaccacaaaagaagtcattagatatgcactcactgataaatggatattagcccagaaacatagaacacccaaaatacaatttgcaaaacaagggaagaccaacgggtggatacttcgttcctccttagaatagggaacaaaatacccatgaaaggagttacagagacaaagtttggagctaagacgaaaagatggactatccagagactaccccactggggatccatcccataatcagccaccaaagggaccctgctagagctgtcttgtatgaggctatgccagtgcctggcaaatacagaagtggatgctcacagtcatctataagatggaacacagggcccccaatggagaagctagagaaagcacccaaggagctgaagggatctgcaaccctataggtggaacaacaatataaactaatcagtacccccagagctcgtgtctctagctgcatatgtagcagaagatggcctagtaggccatcactgggaagagaggccccttggtattgcaaactttatatgccccagtacaggggaatgccagggccaagaatcgggaatgggtgggtaggggagcagggcggggggagggtataggaaaccttcaggatagcatttgaaatttgaaatgtatataaagaaaatatctaatagaaagaaagaaagaaagaaagaaagaaagaaagaaagaaagaaagaaggaaggaagcagtccagctagcactgtaatagtagtaggctcactctgaggcctaggagttctttaaccatgggttcttggtcagatttagagtaccagtcatttgtttcctcctggacaaaaggactttaagtccatcagaagtggttggctacccccataacctttgtgccactgttgcacccatgggtgtgccttgccgtgccggttatcattgtaactgatagggttcacagattgtggatggcattttcttccagcacctaccatagcaccttccagtactgcgaaggctgaccagataggagaaaaacccctgctcagtaccaatctgatttcttcatgccctgtgacaaaatctctgtggtatcttcacaataaggctctaccatcaagttctggtgagcagtcaagaccaacaacaatgccatgtgctgttggaagggtatctgggacatctctgttcaacatcatgaggagaagaatcccacgggtgatcctgggcttttcatttggcatcttatggcttctgaggggagcatagtctcctatgtggggtgcttccagttaagcatctttatatgtttatgtgcttcggaagcttataaagcagtcgatttccggatggccttttcaaacatccttagggttagttatccttgcctcttctaccctactctcctgtctctctgctcaccttaacctccctcccttatacagtgtattttcttacatatatgtcataaacattgctcacgtttgatcccactgtactcctgcccttccttcccctaccttcttccctccaaatagctccccttatgttttcatagtatgtatgtatatatgtattatgtatgtattatggtatatgtatatgtgtgtgtatatttaattctaggtcctgcatatgaaaggaaatgagatgctttatatttctcttctattatttttacttgttctcttttaatataaacaccttctaatttcatacttaaatctatattctgcatataagagaacatgtgcaacatttgtctttccaagtctgaccaatttcactttccagtcccacacatttccctgctaataatatgacattcttctttaatcttgaatgacactctactgtgtattgtgcaacaggttttctttattagtctgtattgttgtctgtatattggcatctaggctcttcctgcttcctggccatttcaaaagttctgtggtaagcacagatgtgcatgccaagatagactccttcagggtatgcccaagagttgtacatctggatcataagcgtagcctagtttgagctttttgacacactctgtgctggttcccataatggctgtactagattacatttcatcttaatgtaactctagaagtggaaaagagatgttgtcagaaagcagagcgtagatttggggctactgcgaggtgtaagggctgcagcagactttgggtggtgatgggatgttcatgttgattgcactgatggcttcccatcaaaatggcaattgcatattccaaatattgcactgtcatgtactaacgctgttttcagaagctagaaggaagaaggacttgctactggagtttgtgctggtagtaagcatgactggaacccagcctttggattcagttatggacagtgcattgtaaaattactcccagggctccttttaaagcaaagaagtctttgtaaaaaataatattactttgaatatctcttttctcatggttcctattgcaatattgtttccttaaagatacatcacagtttgatattggagaccagagtgaccactgcactgtattgctcatattccgccatgaggggcagaaggcagattgagtagcagactacacacagtttagtgcattcattaaatcatatctcatggttaaatatttagtctacttaacatctctgccaaatttcagcttaggaacttgcatgtgctttgtcaaaacagcatttcaaatacttcaaaaatgatttgttcctttttaacaccaatctcaggttgtaattagactgtacacacaagctccattttagcctcctaacgaaatcaaaactatgtagtgttaaggtgcttcgtgaaaagatgcagggtcaagagatgcagtgagcggaaaggaagcaataggttgcacctcccagccatccctggccttgttatgccaacacaaaatgactgtggtgttgctgtaaatctccttccaaatatgccccggcaatgaaaacacgacacagttaatgctgtgcacctagattgggcagatctacggctacactaccatcttctacaacttatgagaccccttagaacttgcagtttctccaggccatgtgctaatgctccacttttctttgtcttcttctacctcctcctctgcatcctctccctcttccattttctccttcttatctcccactcaccttctgctccaccttctcttttatctgcccaatcatcaggtctccattattttacaaattaaggtgggaagcaggtttacaggaaatcacctgagtgctgactcattccttgttctcagcccctcacaggagaatggaattaacaccaaatataattagccccagggctatgcacaacatttccccctttctgtccaattaaaagactattttatctcagatataattgaacataagtattattattttgtaatttataaagtacaagagacctaacccagtccatcatccttgttaattaaacagaacctctgtcatctattcttacttaaaagacttataattctacatctggctatgtcttggctttagattgaatgccatctgaacaccatcctctcaaaactgttcctctccaaataaaaagcctgagttggctaggagactatgtagtttttcaacctcatcagaaatctaagaacgactgatattaactggaaatatatagaaagcctaaaacggcttccaaaacgtagccaatccatagagactgctgatcacctggacagtcccttacttcaacacgctggagcatcggtcttcagcctactggccagggtcatctgatggacttagaaaaacaggaatattaaggactagcctactctgtctcggcagaatcaagctgtcctaacctgcaattgcatcctttctttggacagtattatgtctgtagatgaaatgaggcaattcttgcctagtggctgtttcaccacaactggagtaactctaaggtgctcagtttcttctttgaatccaagaccgggaaagctgtcaggagcagaatggtctcaataacaagtgaataaataacattaaatgtcacattctgtggacttctgatgtttcggaaaaccaactatctatttaaagtaatgtagacagttctctgttaactgctctcagccatttctaattaaaataactgagaacaccctaacaataaactcagagccatgaatttcctatttggcccttaactcacaggcttagacatctcagatctgtttataacagcaatagaaggactgggttcaagccttgtacttcaaaatttttagaatcaaggaccacctataataaccacccccagccccaaaacctaggaaactgggatgacgactcttcataacttcctcaagctgattatgggcattgagatattttaaagggagggggaagggtaacgaaaatgcgggagttggttggccttaagaagaccccaccaatgattgtattagtctctgatatctgtgtccttactggattcggatgagaagccaagaaatcaggagttagtcaggtcagttcagcatgtctgacgatgaaattcaccaaggctgaatattctgtcatatataaatctccaaacaaaattttagtatcatcaagataacctttttggggtctcccgctatcaaatctgatccatataactctgggaggtgtaaatacattattcaccttttccccaaatcagcatatccttcagccggtaaccaggaaaacctgtagcttgccctctgtcccagaggaacaataatacagccacattactcaaaatcacacacattttagcctatttaggcctttctaatttgtcatatcaggatattagcccaaaattcccgtggatcccactgtgtacagagtatgagtctcctgcagactttattataccatcttttaaaccattgatttaaaaccacacttctattttccttcctttttccttttccttttcctttccttttctttcctcttcctttcttttctttcctttccttcccacttttaaggtgggaagcaggtttacaggaaatcacctgagtgctgactcattccttgttcgcagcccctcacaggagaatgtaattaacatcaatataattagccccagggctatccacaacactacggatgcttagtagtcctgctccctctgccagggctcatggggacctgggagctttggtggtcttttttcctcctttgtgactgagccagcctctctttattccagggtttgaacggcatgtctgtggatgagaagcctggctcccccatgtatgtatatgagtccacagtccactgtgccaacatcctcctgggcctcaatgaccaacggaagaaggacattctctgtgacgtgacgctgatcgtggagaggaaggagttccgagcccaccgggctgtgctggccgcatgcagtgaatacttctggcaagcactggttggacagacgaaagatgacttggtggtcagcttgcctgaggaggtacagtgatttggtgtggttgtggggttgtggtggaagttagacgtgcactgtgccacgtggatggccacgtcacccatgtccacatcacgtcacccacatgtgggcttgtagcataatcagtttctgtttgatgcacttgaagcctcagaggcatgaatacaaagtgagcgtgcttctttaagggaactgagcctcacctggggccctggccctcatagtttctagttcacttaaacttcgggttttgaatagttcaacctcattctgatgcagtcctctgtgtaggatttgaatcactactatttcttctctttcaaatggatcattagatttcccctgagaataaaacagcgaaagaattcacaggaccttccttgcttaggagaaaaacaaagcgaccagcaattctcaccattaatgcagtgagattctaagaagtgtaaatttgcttttctcatcaggattgaaaatatcccctactcaggtttcttaactgcttcagtgagaacagtcattttggtactttggggacatgaatagcaaggcttgttctgtgcagagatgacagtcaagtggtttgagaggcaaggacccaaaagatgggtgtcacaatggtgaaccattaaactggtcactcttcagactgcttatgattcttcagtcattcgtagcctccttatcttcagaagaccggggttaatgtgtgaatccttgagctttgtgtgcaatgcagagtattctctgcacaacaccaatatatgatacaactgcagagcctctggcagccgtttgcaagctgtgtacagcacagcatgcaggagcacagctcacgttcacgtccttgcgaatgagacccagggtcacctctgcagcttcctcacagcagtcttctatgataagtcaaagaccaaaaatgtaaggagttaaagattacacttaccactccatcccgccatcaccaactcagatgccttcagagacatagcggtgacattaacaactcaatagtgctttgtaaagagtagggcgtgatggagtgagcagctagaccaccaaaaacacgttcaagcctaacacgagagaaacacaaagggggctggagatgcagcttggataaattgcctagagcgtggtccccagcaataaaaacaagacgcatgggatggaagagacaccagatttcagtcccttgctacacagcatttgtgactacccccgcagagagcagaagaatggccagctgatgaaccgctgacgtttgaaacatcttcacataggcaccctgtcatagtcacaaccaactgctccattcccatttcctacacagccgtgagagaaggaaaagaataagtcatttcaagattaggtagccaagatcaagtcttggatctagtaagaagagaaggagagcgagcaatggcagctgggtccttagcaggatgggcggttcccatctgcactggatggaggcatggcggtctgtaaactgctcctgggcttcgcagctgaggtagtgatgtaatgctgcaaacccagcccatcctgcagcaagtgctgctcagacacatgtccttcttctccaatgggaacaaagacgacatcctcctcactcagtccaactctagaattctctggaaatagtttcatgacatctagttatacaaagtagtcttagaggaggtgacacatgttgcctacttatttctgttgtgtcttggagagccatttcatatgtgtatatgtattactaatttccaaaacttagatattaaagcagatacacaaacgaagtcatactttatgtatcgagtcttccctcaatgactgtgttagccctacctcatacttcctagaaaagaagacctaagcccaagcctgttctcaattctaacctggatcctgatctactaatctctccgagcctatgtgtgagtgtgtgcatgtgtgtgtgtttggattttgggtttttttccccacaccagatttctctttgtagccttagctgtgctagaccaggctggtctcaaactctcagaaatctgcctcctaagtgctgagccatgatcttaatttcaagaagccctaaaattctgaagcccttaacctataatcaaaatacagtacccatccagtaaaatgtgaaggaaaccagggtataaataaatgttactaagcctgaagtttcttctcaagtcaa

SEQ ID NO: 8 - DNA, 4991 bp, Mus musculus
cgagctgccatgtgatgcgcatcccctccgcctgctctcagtgaccccaggaccgcccaccacgccggcggccgggagggggctgcgggctgggaaaacacgggcaggaccggcgcagggggacaaaagttcccgggaagctgtctgcttcgagaagtgagggttctgaaacaagaaggaccttcaggagctgctccacactgtgacatgtctgatcccttgtgcccgtccctgcagcatgaacaaggtggacactcactgatctatcacaagattgcctcactgagtttgggggtccatgtctgaatggattgctgtagccttctcatctcttcctctgcccagttcccagcatcctaagactcgaagccaggacaggacctggggaaattatatggtttgaacggcatgtctgtggatgagaagcctggctcccccatgtatgtatatgagtccacagtccactgtgccaacatcctcctgggcctcaatgaccaacggaagaaggacattctctgtgacgtgacgctgatcgtggagaggaaggagttccgagcccaccgggctgtgctggccgcatgcagtgaatacttctggcaagcactggttggacagacgaaagatgacttggtggtcagcttgcctgaggaggtcacggccaggggctttgggccactgctacagtttgcctacactgccaagctgttactcagcagagagaacatccgggaggtcatccgctgtgctgagttcctgcgcatgcacaatctggaggactcctgcttcagcttcctgcagacccagctcctgaacagggaggatggcctgtttgtttgcagaaaggacagtgcgtgccagcgcccccaagaggaccatgggaattctgcaggagaagaggaggaagaagaggaaacaatggactcagagacagctaggatggcttgcgccacagaccagatgctcccagaccccatcagctttgaggccactgccatcccagtagcagagaaagaagaagccctgctccctgagtctgaggtacccacagacaccaaggaaaactcagaaaagggtgcattgacccagtaccctagatataagaagtaccagctcgcgtgtaccaagaatgtctacagtgcaccctcacacggtacctcagggtttgcgagcacattcagtgaagacagtcctggcaatagcctcaagccggggctccccatgggacagattaaaagtgagccacccagtgaggagaccgaggaggagagcatcaccctctgcttgtccggagatgagaccgacatcaaagacagaccaggagatgtcgagatggaccgaaaacaacccagccctgcccgtacccccagtacccgtactggagccgcctgcctggacaggtccaggagtgtgtcctcgccttcctgcctgcggtctctgttcggtataacgaaaggtgtggagtccactggcctgcccagtacatctcagcaacccttagtcaggagctcagcgtgccctttcaacaaggggatctctcagggtgaccttaaaactgattacacccctttggcagggaattacggacagccccacgtgggccagaaggatgtgtccaacttcgcaatggggtcgccactcagggggcccgggccggaaactctctgtgagttctcctcttcgccctgttcccagggagccagattccttgccacggaacatcaggaaccagggctgatgggagatggaatgtacaaccaagtccgaccccagattaaatgtgagcagtcttacggaaccaattccagtgacgagtctggatcattctcggaagcagacagtgagtcgtgtcctgtgcaggacaggggccaggaggttaaacttccttttcctgtcgatcagatcacagaccttcccaggaacgacttccagatgatgatcaaaatgcacaagctaacctcagaacagttggagttcatccacgacatccggaggcggagtaagaaccgcattgcagcccagcgctgtcgaaagaggaagctggactgtattcagaacttggaatgtgaaatacggaaactggtgtgcgagaaggaaaaactgttgtcggagaggaatcacctgaaggcgtgcatgggagagctcctggacaacttttcctgcctctcccaggaggtctgtcgagacatccagagtccagagcagatccaggccctgcaccgctactgccctgtcctcatacccatggatctccctggagccagtgttaaccctcctcctgtgggtgttgagcagagccttgcaccctccccgtgtgcagtaggaggaagtgtaccctgctgcctggagccaggggcggctccccccgggctcccctgggtgcccagcaacacctctgagaattgtacctctgggaggaggttggaaggcagtgaccctggaacattctcagaacgaggacctcccctagaagccaggagccagtctgtgacggtggacttctgccaggaaatgactgagaagtgtacaacggacgaacagcccaggaaagattatgcctagccggtgtgatcagctctgccgtacccaccaccctacccccgggtcttcacacctctctcatctgggtgttcttctgccagccagtggcgctgttcatctgtgtcttgaagaaccaagagcgaatttggtgcacactacagcagtcttagcagcaatactgtttcgaagtattccctcctctctctaagcaggagtgctagttaccttcataatggtgctaccccttgccctggcaaggaagacaacagtgtcgacactgtctgtctgtgggttcattgcaaacttcacagggatagactacacctctaggacccaaccacggattttttttttctcagtggcccatgtcacaaaccctatctcaggaatttcttctgaatgttcaatttttttcattgaagacagcttctatacacatcaaagttttatagctatactgtgtacatagtatatataatatatatgaaatatatatccatatgcaaaaagtcctgcatgcctcaattttctcatccctgaaactggaagcttcacttatcatttacaaacaggttccaacattcctctttttgtgtctggtgccagaactggtttggaagctgttaacatggctgttttgcttgctgcacaattcggtttccatctgtgcttatttacagacaaaattcaatgttgggagatgcttctcaaggttcaatctcagaccttttactttcgttggtttggttttggtgccgccgaacggtgtcaggtgagcaccgtgagtccgctcttctccccttgtgttttcccctcgtctctgcggatactgtacagcaatggtcaactttgccacttgcactgagttttgagtcaaacctattttcttaaatgaagttgtaacttcggtataactcaagtatattttttttttcgtttctttttctttttggagacagggtctcactatgtagccctaggtggcctgaaacttgctaggtagaccgggctagccttgaacttaaagagatccatctgcctctgcctctgcctctggagtgctgggataaagagtatgcaccaccatgcctggcagtccgggaatgcctacccgttggccaccatgacattaggtaggaaagcagccggaatcgctcctctctggcggctgagggtctcactgaggaactgaaccagcagatgttctacaccttctgtgctgtaggaagagaactcagagctgcttccaaggctttgacactgtgtgcagggctagaggccaatggtataggagcggccggtagggttgtgaatagaagaacagacgggggccgtcaccgcccactcgtaccacactttcttggaattgctgcatcgccagaaacgcacacagatgttctggccttcgtgcaccgtgatgggctgcttaatggggaagaagatggggaaccatgagaacattccaggagagtgagtctctgggcggatactcagagtgatgtcccggtaaagcacagtctcaaagtagcctgcgaagccatgaagcaccgtgttcacctccacaggaaactccagggtacagtagcggttgttgtcaatcataggatctcggttgggatggctgaaggtaaagcagggcttaggagcagagagctggtggaagttgtgcaaccgaaccacataaggcatctcaaactgtgcctcaggatcgcggtccttttcccgacaggcacggacctcgttgtacagcttagaggaagaaatgggagccaggaaggaggtgtattctccagggatgctcacgccatcatctttcaggaagtgctgtgctccatccagacactcaggtgacagctcgttgtcggcaaaggaacccagaagctcactgacaataatgtcagctttctccggagccacccattcccgcatgtctgatgagacaactgtcacctggctcccccattcttcaaactgccagttctctagcgtcaccacagcattggggttcttctccacagcatacagcctgatccgccgctcggcctgtttggctgcccgaaaagacgcattcacaagaggaccccggcctgcacccagcaccataagtacctggacattggtctccttttcttcttctggtactcggtctagcaaacatttataaatagcctgctgatattgagagtatttgatggggtccttttcaaacacttcatatgtctgagattccagattgtccatcagaggctggagtggggactgcagatagtcttcatagcctttggcaaaaagctcataggcattgggtggagggcgattttggcttaagtattccaagtactggaggtaggaacagaactccttctctgagtggtggttggttcccgtgatgataaactgcacttccaacttgaggagccggaagatcagcctctgctgcaccttagaaagaa

SEQ ID NO: 9 - DNA, 2151 bp, Mus musculus
atgtctgtggatgagaagcctggctcccccatgtatgtatatgagtccacagtccactgtgccaacatcctcctgggcctcaatgaccaacggaagaaggacattctctgtgacgtgacgctgatcgtggagaggaaggagttccgagcccaccgggctgtgctggccgcatgcagtgaatacttctggcaagcactggttggacagacgaaagatgacttggtggtcagcttgcctgaggaggtcacggccaggggctttgggccactgctacagtttgcctacactgccaagctgttactcagcagagagaacatccgggaggtcatccgctgtgctgagttcctgcgcatgcacaatctggaggactcctgcttcagcttcctgcagacccagctcctgaacagggaggatggcctgtttgtttgcagaaaggacagtgcgtgccagcgcccccaagaggaccatgggaattctgcaggagaagaggaggaagaagaggaaacaatggactcagagacagctaggatggcttgcgccacagaccagatgctcccagaccccatcagctttgaggccactgccatcccagtagcagagaaagaagaagccctgctccctgagtctgaggtacccacagacaccaaggaaaactcagaaaagggtgcattgacccagtaccctagatataagaagtaccagctcgcgtgtaccaagaatgtctacagtgcaccctcacacggtacctcagggtttgcgagcacattcagtgaagacagtcctggcaatagcctcaagccggggctccccatgggacagattaaaagtgagccacccagtgaggagaccgaggaggagagcatcaccctctgcttgtccggagatgagaccgacatcaaagacagaccaggagatgtcgagatggaccgaaaacaacccagccctgcccgtacccccagtacccgtactggagccgcctgcctggacaggtccaggagtgtgtcctcgccttcctgcctgcggtctctgttcggtataacgaaaggtgtggagtccactggcctgcccagtacatctcagcaacccttagtcaggagctcagcgtgccctttcaacaaggggatctctcagggtgaccttaaaactgattacacccctttggcagggaattacggacagccccacgtgggccagaaggatgtgtccaacttcgcaatggggtcgccactcagggggcccgggccggaaactctctgtgagttctcctcttcgccctgttcccagggagccagattccttgccacggaacatcaggaaccagggctgatgggagatggaatgtacaaccaagtccgaccccagattaaatgtgagcagtcttacggaaccaattccagtgacgagtctggatcattctcggaagcagacagtgagtcgtgtcctgtgcaggacaggggccaggaggttaaacttccttttcctgtcgatcagatcacagaccttcccaggaacgacttccagatgatgatcaaaatgcacaagctaacctcagaacagttggagttcatccacgacatccggaggcggagtaagaaccgcattgcagcccagcgctgtcgaaagaggaagctggactgtattcagaacttggaatgtgaaatacggaaactggtgtgcgagaaggaaaaactgttgtcggagaggaatcacctgaaggcgtgcatgggagagctcctggacaacttttcctgcctctcccaggaggtctgtcgagacatccagagtccagagcagatccaggccctgcaccgctactgccctgtcctcatacccatggatctccctggagccagtgttaaccctcctcctgtgggtgttgagcagagccttgcaccctccccgtgtgcagtaggaggaagtgtaccctgctgcctggagccaggggcggctccccccgggctcccctgggtgcccagcaacacctctgagaattgtacctctgggaggaggttggaaggcagtgaccctggaacattctcagaacgaggacctcccctagaagccaggagccagtctgtgacggtggacttctgccaggaaatgactgagaagtgtacaacggacgaacagcccaggaaagattatgcctag

SEQ ID NO: 10 - DNA, 96596 bp, Homo sapiens
atgatgtgtacctgtagttcgagctacttgcgagaaagaggcagaagaatcactcgaggccaagagtttgaggctgtggtaagccataattgtgccactgcattccagcctgggcaacagagtgagaccttgtcattcatagatagatagatagatagatagatagatagatagatagatagatagatagacaggaaaaggaatgtaatggacatttctccaaagaagatatacaactggccagcaagcacacacacaaaattctcaatatcactaatcattagggaaatgcaaatcaaaaccacaatgagataccaccttacacccataaggatgccaactattaaaaaaaaactaacgtgaaaaaaaataaaataaaaagtattggtgatgatgtggagaaactgatacctagagtagtcaaattcatagatataaaaagttaaaaagtggttttcaggggttggggagttgtttcatgttttgcaagatgaaaggcattctggagattggttgcacaatatgaatgtactcaactctcctgaactgtacatttaaaaatgattaagatgatacattttatattatgtggatttcaccataatttaaaaagtaaattttaaaaaagagggggtggatataattataataattgctgcaaaggatttaggtccaaggtacctataaagaggatctgacctgggtagtggtgaagaaagctccacttagctgagagcagaatgagtaggagtttgctggggggaagaaaagaggtagaaagaacaatatatgcaaaatccttgtgaggtgagtgatcttcatgcacatgggatgctttcttaggtatcaactaagtataaacctttattttcacttgactatttctgtttttaaaaatggagacataacttatcaacacagattgcaaaaaccttaagtgaacagctcagtaaatttagtaaaacactttgaatccagtaacagtcaaaaaaggtgcagttgtgcttcctttatcccttcctgccccttcccctaatgcttccctgggctgaggatatgtcagggggagctttccatactgaaggagactaaagagctagcacaactaactgtaccccatgatcctgactcaaactttgccctagaaaggaaaaaagatattgttggtacagttggtgaaatttgaatagggtctctggattgagtggtattgttatactgatgcttactttctgatttggatgttgtattgtggttatgtaccattattccttttgaaaatgtgcactgatgcatttagcagctgatggagcatcattgttgacaacttactttcaaattattcagaaagagaataatggtaatgggtgtttatattagatatttctgcaggcatacggagagagaaagagagaacaaatgtgttaaaatattaacaattgggatatctgcatgaaggagatatggtagttctgtgtattactcttgaaacttttcctaaagtttaacattattccaagatcaattatttttaaaagatactgtctatgatggcaatggactcacaggtgaggcagcaggtaagagaagtgagattagacataaagataaacattttatctgtcactgaatttgaaaaagcaaagtgtcagagaaaagaattagtgttcacttagcgcttgccagaatgaagtaggctatcctgcaaataacccacttatggttatcataaattaataagcattccgattcagcatctgctttcattagcataagttggtcatcaggctgggagcacgggttcctcctctagacaatggcccagccaccaatcttaagacaccttatatcccaacccacttccctagaccatcctttccagctttagaaaattaagcaccaaggaaatgtaccaatagaagcatgcctgttgacaagacctgggaagagctgtaaatccagagggtgctgaagtgcagctggaacaaacacagcacacctccatgttttcagccttctgcaaaatcaccaaaggctcaattcaagttggggcacgaaacactgggtttccacacacacctaacaatcgaaaggcagagaaattagctcctcagtgtgtggtactgtgggagacctacttagagagcacctggggaaaatggagaaaccgatgacacctaaatgtctgtcattcacataagcactatgccggatgcacacacggggcacagaacagctgtgctgaccagcacattgctgcaaccactgttcaggttggatgcccttgcataattatatcacataaacagatttgtgaaaaacagattagaaactgtaggtgccatcttacatattctttggggaaattgctatagggttagtgaactcaactttctgtgtctctcaaaaactcataagctgagttgagaaatataattcaatcgcaagtatatttttatcaaaataaaagcatcaaggctttcttttcacagtaatttaaaaattgtcagattacttctgtctacgaccaaacttttccaagtttctttaagcaaagatgtaataaaagctaaaactcagaccactgatcaaaaacatcttttagaggtgggcagaataaagagatggacatttagttaatggagtagtttagaaaaaactaggcatcacaaaccctgagggtaaaaaaagggaagcattgttagagctttttttaaaaaaaaaaaaaaaaagggaaaaaaagaaagtaatcttgtgattattataaattttattattattttgcttacctgagcctgacctaatcacctccttccctgtttcccaggtaaaaaagaaaaattaagctcttacccgaaatttcatgtctcttggccctacatcttatcctgaagcttcaaaatctttgcatcatccctttcttggatgtccctgtaatccagacagttttcagaggcgagatctgagtgatcctcccccgtcctgcaaattctgtttaatgctcatgttctgcctttcttccacctacccatgtttacccctgccccagagttctgcattcttgccatttttttcctctacatcagtgctccttctgttatctgctccattaccttaccttctacctcttccttcactcagattcctaccttcctgcctttctccatctttccaggcccccacttctctcattcattccccccctcctctgcagtgggtctagaagctccttgctgtcatatcacacagcccccatcccaccagacctttcttaatcatgggatgctattcccaggcccctcattgaaatgcccttttccttaccttcctcaacttcccagtctctgcttgattttctaccttcctgttggctccattcctgtctttttcataaactccttgttctgtgcccacatccatccccaacccagctattcctcaaacttcagcattgaggaagtcaaacttccctccttttgactccaccctttaccagagtgatcttagcctcctcctgcctcccagggccagttccctcctagtcacacaggctagaggtctccattccctctttctcttcttcctccctctccgtctcctcccacaagcaaatgacccctaaaccataagcgcttcccagccctgctcactgccttaacataggctgtaggacttgagctactgtcttatagtctccagcctcttcaggccccttcatatggccaatgctgtgttctttccaaaaccagatctgattatgcctctttggcaactggggatcactcatcggctttctacccatgcagccaggcttttcagtgtttctggggaaattagaagataaactcggagcattttcctcaagtacatccttcagtactttgattttgggtgtgggagaggaacttttagtcctgatcgtcacaaattgttaaacttttttagtaaaatcaacccatgtacttcaaagagaacaaaagaagttcaggtgattttttaacatgtaacaggaaactgcaaagacattttatgctttgaaaaggcaatttggggccatgttctcagatccctaggaagttagcattccattttctctgccattctgagcacttcactggaaaagttcaatgagaattttgatctgtggataaaattacaccttcatgctgatttcccatgtctacctttccagtcccatattccaccactggctgtcgctgctaaccatctcaattcctgcactttcgctactccaattttcctgcctggaatgaccttccaacattttcttttcacaaaatctcatccttcagaatccagctctgttgtcacctcctccaggaagccatcccacattctcctaagcaaagtcacttgccagaagacttttgtcctattcaggcccttagcatggtgtgctgtgaggacttcttcaccggttcaccttccccactagtccaggagccctgacttatgcagtgttttatctccaaaagttagaatagtgctagtacataggttgtgtatgctcgaggtgtgtctggaaaaaaagaaaacaggcaagtaacaggtacaaggtcttggccattgggaggggaaagaaggaaaaatctacattttgaaaaaatgagtcatgatcacaatggcattttgtcaccatggtacttcagtactccttgctagccatgacagcaggcacaatcccccataccttccacttctgacctatccttcttgacatcacaacctctcactctttcccaacactgcaagatatgaatgctatagtcagatgaaagtgtaacctcaaggggtccttctgcattaaaagtccagccaccttccctcctctctgactccttcctggccttgaggttcaactgaaattccaccttctcagtgaaaccttttctggctactttaaccttcataatttgtttttcctcttaacatctacaatacttaagttcttgttagaatttaattatgcatattttgaattttacaacatttattggctacctttattacagaagtaatatatttatattacagaaaatttttttaaaaagcaaaagtaaaaccacttataggctctttatttcaagagaaccacttgaacactgtgcatatagccttccagatttttcctatgcatgcactggcaattttttttcacaaataggatcctattgtaaatagttatacaaattattgttaaactatactaacaaaatattaatatatcaatatacataaattttcatcactaatttttttcattattattattatttttggtagagatggggtttcactatgttgtccaggctggtctcaaactcctgagctcaagaaatttgcctgcttcagcctctcaaagtgctgggattataggcatgagccaccgtgcccagccaccaatattatttttgatggatccatgatattcatattttatatatgaaccaccatttatttagccaatcatttcctgtaaggcatttggatttttccattttctttttgctatcatacaaaaaagatctgtacattcttaattttttcattagtataaattataacacatacaatttctatataattttaaatattaatatataaaagtaataaaatcaaatacaaaattacatttttcaattgtttcatgtatattagttttgactccttatgtagatttaagttccttaaggatacagtccaatgtttcttaatttttcacctcaacatgtaacagatgctcagtagtgtatgttgaaaaattagtttatttcatataccatattttactagtttatttcatataagcttttagataatagtggcatcaattctttactatagaagaagatcactatagatagtaatataagaacatcactttcttttagggactatttccaaagtccttcttaggaactgaggcaatctttgaggagatgaagatgggacagataagagatatacagtttgaaggaaaaaggctgccagccaaatttaacaatagctagaagcaaaatttttgcttttctggtttggattgccctgatcatttttcaaaacttgtgtgagattttgtacaatgagaaatctcttcttggcagtggtgtgtccagaaagcccccaggagtgggcccccaaggtcctctgtgccgtccagcaattctgccacatccctggcactggttcacatcttttctctatcccctaaatctatccttccctcctccactatcagtgaacggtctatcttcttactccactaagaaaacagaattcctcagacaacggcttcccatacttcctaccatgatattccagcctccctgcacttccccacctgtgctgcccttccttctgttggttgggatgaactggcccctttctctctcaaggaagcttctcagcttccttgtggggatctttttttcttcatcttgctgacctctaaatgtcggagtgccccaggtcttaaaccttagacttcttctctttgctcctcttctccacccatgtttccagttgctgtgttgatgacacacagatttctatctctagtctggacttctcccctaaattctagattcccatgtctgattacctgctcaccttttccacttagatgtctgatagacatctgaaatgtactatatccaaaaccaaatgtttcagcatttcccccatacctgctccgcctggataaatgaactctccattaataagctgttcagtccaaaattcagaatttcctttgactcttctctcatatcctacaatggaatcatcaacaaatcttgtccggtttatgctgaaaatatatctggattccatttatggctgtcattctagcattctattaatagtttaaatcaccatcacctctctaatgacttatctcaatagcctcctacttggtctctctgcttccattcctgtacttcccgtgacccagcagagtgatcctttaggagttgaggccaggacatgttccttgtctgcagaaacccctacagcatcccactccattcacttttgtcagatttcattggatgttaaatttgccctgccatgccttattcaaggtaccacatttgaaattctgtctactgttctgcctaagaaaaaatacaatattttctcaacatcatcaaatcctgtacagggtgctggagagcaagaaaatcaaaggctcaagaactgcccatgtctttagtccgtcttcctttcctcatctgtttcctgtatattttaatttttcctgttttattttctacaatcaagaagatttctattatagaaataaagtttatttgtttcaatgccatgatacagatttattgtccctggaaatatcatgcttagaaatgaatcacagacaaagcccatgctctggatcaacacacatgtgtaattatgtaggaaaaaaatgtatatcaggaaaggttgaatgctccaggcatgagaaataaattgacctccactcaacttactgccatgattatacagagggaaggacctggatctgtttcacatcataaacgcctaaattgccagagcagcacaagcccaggagtggccatgcaaactcatgatggaggtgctaaggctgtccacagcccaacctctgcagcagtactgttaaatgagtgtctagtacttgacttaccattttaatttcacataattctgaatgtatttttcggcttgaattcaaataacccacttctaactaccgaaaataaagtagaaaaatgaactcactaccagacttcaaagcttatccaaagcaaagatttcgtcttacagccagaggtgcatgattgcagagctggatgtaacctgagaggctaactactcctaattcagcctccttgaatgactggatgatgcaacctatcacaggtgttttaggttttttcatctctatttaatgtcccacctcatgcttgaaaatctcaaagtgaaaaagctccagtctgagtctttgggcaagcagactaactgaaatgacctgttagcctttgttgtatccatctgacaagatcagcttgtagaatccagaatggaggtgggagatcagctggcagcctcatttccctcctcaaccacccctacgctgatgtgcccaactccactcacagctgggcagccaccgcttgcttgaaaataaatgaatctacaccactctcatacggatgctctcaagcatcccttgttgtgagaaaaacatttattgctgctactaaaatgcgtaaagttatctcacaaacacatacttacaagaatgaggaatgagaaacagaaccatccataaaactataagaaacggcctggccagggcagaccaggaattagtactctgtccttgccaggggtcaggcagggacctcagaagcagggtgttttgtcctagggggcaccagaccagaggtcaggagactgagggctactcctagctctaggacttttccttatctgaaggccgggtcggttagcagagaaaatctcacagtcccgtgccagacctccacgcagggactctgcagtgctgttagaaaaattagctcagcaccttcagcttgctttcagccatcacttagctttccacacagacattccaaatggggcctttcaaaactctgccctcaaatgaaggtagttcagagcaacactttagatgatatcacaagactcccaggacgcttcactgcttcctcagcatacgccagtgcccgttttacaggggggatttatgatccttctctcagtagagcgagccaaacttttataatattcattaaaaatcagcaccacgtgtaataatatggaatactgcctgtacacaagagggccaagttataggtgtttagggaaacgtggcagaattttctggccttggcaagaggtaaagttgcaggcaccagcacaacactaacacaaccttattttattgcaaatgtacattcagcctaaatcctaattaccttctgtaaaatcctaaccaccaccaagctttcttctgacagggcactcacacgacggcctttaagggcagcaacaacatcctaagagccgcagaaaggaaaggcaggggagagtggctggaaggcagtaggagctggggctgaagcccgggaggttggcttttaatgtcctcctgaaattgaccactctctttccaaaaacactggcttgggggcttaaaggttcgctcagtagggcaggcggagggcctcctgaaaaggattgagaagtcaacattcaaaaggctgcttttactcgcccggtccccacccaaaagggagtccggtcagctttgtgggggccagtggagcatcttttcttgcccttccgggaaaacgctagctaaccctgggatccccggtcccgacgtctgctctccttccccaggtgcagcacctagggctctggccccctccccacgtgccacaccagccctcaccactactctcaccctgctatgcccccaaccctcgtctttcgtggccgggaaggccaggccgagcggggcggtcagccgggccgggaggagggggctctccgggccgcgcggccgcacaaagcggggagatctgctgctgcggcggcatggaggcgcgccccctcccgcgagccagcggagcgcgcgcgcccgcccccgtcccccgccccccgccccagcccccggagcgccattcgcggagcggcttacgctagtcgccgggcgtaccgcgccccagcggccggggaggtgcgctgcccggctcccgtaaagttattgtgaatggggagcgggtgacgtcagcgccgaatgtcaacaatgtagcgattgagagtgtgggcgttccggggagagcgcaagccgcgcggcgcggagcaaacagcgccgagccgccgccgcctcagcagcagcagcagcagcagcagcggcagcagcggccgtgcacgcccgggctgcggtcgcacagcgctaacgtgagcggccgccgccctcgccaccccgcctgcccactcccgccgccgccccgctctcgctttccccccggcctcccctcgccccttcccctcccccttcccggcgcactcggggggctgggaacgagctgccatgtgatgcgcgtcccctccgcgagctttcggtgacccacgaactgcccacctcgccggctgccgggagggggctgcgagccgggaagacgcggggaagaggaggcggaaaaggacgcaaagttctccggcgaggtgagtcccgggccccgggccccgggccccgccgctgggcggggtggcggggcaagtttgcggggggagcgggcgcgcggggcgggcggggaggcgtggggaaacggcgcgggaagggagccccggccgccgggcgcgcagccgccctccccgcgccctgcccgcttttatggcattttctaggaacgggaagggggtgggagccgagccggcggccgcgccgcgccgaatgtgtgctctccctcccggctgtttacggcggccgaggcgcattgtattttgctggcgtcgaagggtgttttggaacagcagagggaggaggagcagagagtaataagtcaggcatggggagggcgggctgcaggaggcgcgcgtccgcgcgagccgcagcagctgtcagacccgcggccctgcccccggcccggcgaggcccgggtgtcccggcccccagcctgcgatcccagctccaggccgggcggcctcctccttaaccctcggcgtgcgcatcccgggctgctccgcgaggaccttggccgcggcgcctttgcgctcagctgtcagccgccgccgggtggcccggaccaccgcgaccggcggggaatcaaagcccaagtttagggtcgcaggaagaggcgagctgggggcctcgcggcgcagacctggatcgaatctctcctagcgaaagatcgggttgtcggaaagcgtcccgcgtagctaagacctaagggcgccaggcttctgagagggaaaccttgcacctcctctcccacagatcctccatgaagtcaaggtgcaacacacacacacacacacacacacacacaccctacactccagtctccaagccccagaagcttcacccaggagactggtttatgaaggggacactgccctccccgtccccgcgtcgaggcgctccgtggccccgctgtgcttcgctcacccggcgggtgttcgggagcccggcgccgctggagacggcggcgggcggcgctcacgggctaccctaggtgcccacgaggggagagactggagcgagcatctcggcgacctcggtctggccaagcatttgcaggaactcggaccgtgaggggaagcgtgcagggccgggagtgagtgtgtgaaggggtggcacactcctggcttctggggtcgcgggcgcatggggcatccccagcactctcccgcgcgtaggcgagtttggtaacttgagggaagttccggcgcggccgctgccggggtggtttgtctgtggcccgatgaggcgcgcctcgcagcctgctctcccggtcaccgccgtcgccgtgacctgtggcctccaggaaacgagagggaccggggcgccccacccgcgagacggacccgcagtctcccggcgggcccgcgggcggcgagacgcggcgttcctggttttcaccttcgctgtctagtgctgcagtctctcactctctgtaaatttcatctgttgagtgtatttaactaaaaagggtaattactttagataaaaatcctttcctgcctagtgggaaccttggcggagatgatgcctaatgagatattttgcttttgtctgtttagagtaaaattagagatgttaacgctgataacggttttctcagatcattaaaatgtaacatgtaggaaaggcacgtcttgctgcaaaggctcgggctgacatgaaagaagctgagcgtgaaaggctgcccctcctttggcggagagggctattttggtaaggcagcgggcgtcttgcttaaaatgtgagatcgccccaccctggttctcgggcacctcccgagtaaacggcgtttttcattcttgcaggtaataataaacgtgagtcaaaatgacatcttgttagaattagtctttagtctgtaagagagattgccaaattacagtgttgcgttcaaactgctccactgaaaggtctgtcagcatttccattataaattcagtttttctggagtttataatttcaccacaaaactttgagtggctgaaatgttttcccttctagtattctggtttttgaaagaaatttattgattgcccatttccaacgttttttttactctcgaaacctgaatatcattgaaatagagcgaagtcccagaaatggaacacacaaccatggaataaagtatttttgttagaacataactttattggtgcagagccgtattttcgttttgcattgcaggaggcttcaggtttgccatttggtaatcatgaatgtgttgagtaaattcttctgctgtctgtctattctgcaggtggactgaaatgtcagttggtagtgtgtttgccaggattacatggagacacacacttctcagttaagtgtgtgtctgaactcatagctaaattgtgaacactcctgttagttacttttttggttctttgtatgttgcatgtcaggatctgctatgaagaagaaggggtgaggtgaaagagagggaggggatcaggattcactttctgtattaccagtgcctgggagaaagccatttattattttcctattgaattatgccctttgacttagtatcttcaggcaattcttttccagtagctcacctctggctgctgtgtaaggggcttaattatttgcaaactgccttgaaatccctggatgaaaggcactgaataagtgcacagtattgttattcagatatggaatttaatgatccattatagttcatcaggaaaatgcactttgcagtgatggtaggaaatgtttccacctgatagagggtaataataactgcttaaaagtagattcagattacagatgagacaattaactctagccatgtgctcttcaatttgttgcaattcattttgtgatcaaagtgagtcacagagggccagatggtcaggttcatgttcagatctctcctaggccagcccttcacttctgggcccactgtctgcacagccgacaggacttagttattcattagcgcttgtgagctgtttctcagaattcctaatcgaggctcctgtgatgccaacaaaagggctcaagccaatctgtattgttgagagcagtttaattttacttggattaactttcagtgtctctggtgtggatccagtcttaacaaaaaggaaagagaccctagtggctctctatctctgctgtgcctggcccctctactctagtttttgaacctcagatttcaggggtgtgacatctagcttattgtaaatgcaggcttgattgttaatgaatgagagaatacttagataaataaatatcttcctgtgtgtccagggggtgagagccagtactagcttcatgggcataagacctgtgcagttacataggcccccttcctcttccctgctcagaaggacctcatatttggtataaggttctgctgttttcttcggaaattcttaataatttttgaacaaagggcccctcgttttcatttttcactgagccctgcaaattatgtacttacctggttctggtgaggagcagggcatagtgtggagtggcaggccgcccctactcaactcattgtagactcttgctagggaacagttggtaggactactggctttgtgttgccacatcatttgatttttccaggggaagctgaatattggatatttatgtggaatttcctgatttttaaatattggctcaaatctttaaaaaatttttggatgaaagcatatgtaagagctagtgtcggcctgggggctgcttgtctcccactactgaacagactgaaacatctttttttgtttaatatctttgtgtgtctctgttttctaaaggcctggcatatagtggatgatttgtgagtatgcacccaatgaatggttacaactacctggaaaatagaaagatgccaaaaaaacaaaacttcaaatcaacattgagtcccactcagggattgatcagcttcctttttaacagagaattcgacatgaaaggccgaataatttaataccatgagtacagtgtgattccttgcaggtgaataatccattacttttgaaccacctgccctctatttagttgttactgaccagatggggtaacttggctgggtaatgcctgaggacctccatgggagtttgacatttgagaacactcaccaaaataatagttttgatttactgaatccgcaccatgtgccagacccagtgctgactaccttgcctgaatgtacttcattgattcctcaaagcaaccctttgaagtaggtgtcgtgcctgcccattctgcagagttggaagaactaatctcatgttggaatgaacttaatctgaatatagtgcatgttttcttgaatgtctgaaggttatttccccattccattacacagtccagtcctgaatcaatgactgggcatggtgtaggactgtgacatacagagaacatggtccctgccctcacatagaacagagaacaatataaaatgtaacatatttgtcaaaatctgcaattcagatagcagacgctgtaaatctgcctccctgtttttctcctttccctgtctggatgttgaagaagtttcagcgacatatgaccctgtcagaggtactcacagttcagaagtcaatgctggttgcaaaaattggaatttctttggaaaagaagacaagcttttggcagagctggggccacatatgggaacgcagcaccaaggccttgggaatgacggaaaatcgcttctgtattgttaatagcaatatatgacctctgctgtcctcctatctttaaattttatgtaaatatttacaaactgttcatgtccaaactgaaacctgctatgaactaaacattttgtaaactcagtaagattgcccaaaatacaactcaactttcacctttttttttttgtttgtgatgacatttaatttaaaaaaaaaagacagtagttgcttttttttttctttttttttgtcagttcagggtcttttaattttttccctttacttttttttttgttaatttcaaatgtcagtctatctaaaactgaaacttaattttactatcagcatgctactcagcttccgtaaggctggaaatgtcctgcgaatcttaccactatgtcttttccaagggccatttcatttctaaagaatgtataaattgaacctcatcctgctagtgacactacttcaaaattcaggcaggaattttgccatttgtttttccttgagctattttttttccaaaataataaatcttcccaatccaaaagcatttcacatcatccttcattctagtcattggaactacagccaaaatgcctctcagtcttccccagtgacttcataatcaccgtttcttcagcatattccctggttgacttctcctttgttccttagcctcataatgaattgccctttggttctgagatgtgtcattttcctccctgacctttttgttcttttcctgaaggctgtaggacatgctgctgctgatgtgatgagagccggcgcttggttgctaggtccctcctgtccttgtgtcagctttcattggctcctttcctaagcatttaaatcctccactttccagtcctcccattcatctcattattctcttcatgtgtgcctgagcctgtagctggcatgtagacaaagtcccagttagttagaagaaagcttttcgagtttccaagtcttccatcactctagtcttgggccatcttctattctccctcccctgtcactttctgcagatacttcaggaatttcctcaagactttccaggagtctaacccaaagacagcttagaccttcacttcggattttaaagttgggagatcccaatgtgatgatttccattccacaagtaggaaacaaagtgaatgtacatgctcagcatctttccttagtatttcagtatccatagatttttggcaatttttctttttttcctatcctgtattcttctaagcaacagaagctcgtggatagtgcaaaatgggccaagtgtccagaaatactgttgcttagaggcagatgcctcattcattcattaaacaaatatatactgagtatctcttacatggcaggcatagtgttaagtgaccacagtgctaatggggagcaaacccagtcctggcccctggtctcatgaagcacgtcatctggtaggaagaatggcactgatcagttagtaacagataacccactgctcgtgaaggaaagtatttcatacaccagagtgtctaatgggcagatttaacctggtcgggaggttggggaagccctccctgaggaattgtggagtgaccttccatcagggacagtctgaaacttgagattcactttttctccagcttcctaatcctattaattcactactatctttggccctttggagtattgcctaagccatgctggaacctctggggccattttggcaaataatagttcctgtatacagagtccagaattgatttatttacctgggtctttagaacctgataaaaacagaagttaactgccaagagtactgttcatttccatacttggaaaaaatacaagttaacattcttattttgaacatatttaggttggttttgacaatatttgaatgatcagaagctacaaagatattctctcccagtcagctgatgtgtgtagggcctttggtgaaaaagtgagtctaaatagtctgtctgaagtccctggctactccagagcagagggtctccatcctctgtggcccgaagattattccaagcttgtccaacccatggccagcaggcctcttgcgtgttgaatgcggaccaacacaaaggttttttgtttttgtttttgtttgtttgttttttgttttttgctatttttcttgtttcagctcatcatgtatcattagtgttgagtgtattttatgtgtggcccaagacagttctccttcttccagtgtgtcccagggaagccaaaagattggacacgtcttatttagaccattcttagatgcaaaattaaggaattttgacagcatctatttaaaataaattgattatacttcatgctaacacccctctattttctttttctttgatgatagttaacttgtattgagagcttcctctgtgtgctgctcatattaactcacataatcctcagaacaacccagggctaggtgtgatcactagaagccgcagcataggtgtcgctcagctaatgaatggtagaactggagttggacactagctgtctgatgcttgggcctgttctcttaccatgttatggctctcccttttccttttcttcttcatttgaagttggaactctctttagcagttcccagaagtagaaataaaggtcatctcactctaaaatattggatgttttgttgacatctatcttaaagttaaaaaataatttctcagtaaatctgagtgagtatatctcctgtctttcacatggcctgctttctaataattgcattccttaggttttagtgtccatttagggatcggaaagtaaaagtgatgcatataaaggcaaaagaagtactaggcatataactgaaataccatggctctgtctccagggtttacttgtaactcacactcctaccctcttgttaggtggagggaatttgttttttgcgttttgttttttgttttttgtttttttggtgggtaggaaaaggtaaaaaactatacctgtaagaggtagagtattctaccaaggaggaagatgttcattcagaactaattccatcagaaatcctaattagaaatattagctaccagtaacagataaaaggaggtaacctttgttctcattctggtcaatttcaggaagagattatcttgccagattagcatgttgcaactctcagctggagatttgaatggttttaaaggactcaggcagttggtatggcagtaacccccaattacctcaggtttgcagggtcactgtttagaatgctgactcagctctgcctgggccagacaccgaagttgtcatctttagtcaagaagcatcattctcaggagccacttgaaacattaagcacacatttgaagctcaatttgggaaatgatcaagtgtatgaatgtatagtactgtgcttatttttcagcatttagttcaaattttggagaaagctaaatgggagatgcttagtgtgtcagtgttggaggttttaagtgatttaaaaaatcaagcagatgagtgcataaagatttctatgcaaacaatgttgagcttaaattaaagctgctgatttagtgtgagaattacttgcattgatttgtagaatatctatgtgggttcaagattccatattatgcaaatgaataagccctgaagagtcaaactgaaaaaaaaatgaaattaactgtgaaagatattattacccattcagcaagaggaaaatgtagacagagttaacccttccttttcatacattttcttgggaagataagtgccagggatgatggtccgtgtcccagatgtaaagaagctaggcacggtttgcagccagttcccccatcctccttctgtgctcacttttttgtttcatgctctcttaccttttggccacccagtcccctcaactagtccttgtccttcccttccaaaaccaatctcagagaaagattttatgaacacagttttactaatatataagtaactgagcatacttaatgtgttacttttctgaagcatcagcatgttaataggagacaaagccaaagaagtaaaaccctaaagataaaaacaatagaatttcgcacactggtaacctggtgataggagaccatttctgaatggagagagggctcgtgataaataaacacaaccctaggcagagaatataggcaaatggattacagtatttaaatcaaagtagtattaaaatacaaagagaagattatttttaataatacatttgtcagtgagcatttcccgccttttgccgtacattggagttgatcacataaacctctatagcaagatggtatgttatttaacatttaaacaaagcttccagggaaagccatttggtttgtggttagggatttttgttattcagtagcaatgaacctgaaattctatattatctttgcatgttgaattttagaagaaaaaaaaagcagcggatccaacttcacttacctccccaccccagttgcattgatacaaattgaattgataaatttatttcaaaattggtgtgtcccaatttgacataccacaagcatagtggtgtcagcatggtggtgacatctggacattaggagagttggttgattaattaaactatacttattttagatagagttgttggcaggtaaatacctggctgtagagtcaacgcccttcagtcccacctctcccccaccatacccttctccagcaaccatgctatgttgagttgatggctccatctagtgccagtctgtggaactgtcttgcaggacttcactgtcacctccagagctgggtatgatgaagagtcctctttctctgggaacacactgtctagcggggaactgccctctagttcctacctctcctttgtttttgcagtttagttatacctccgtgtctttctttgttccagacttaatttgtttccctctctctagtaccccctctttgtacttgtttctcctccttttttgttttccaagtctcaattttttttttggagaacaaaacagtacttaaaaccggtaagtataaagattttttttctaacaatactttatgccaaagtaagagaattctatgcattttaaatgaaactatcaattgaaaccatgttagagaaccagaatgaccctaaagttgaagtctgaaagtgtcacttggaagactgtgtcccttcatcctcctgtagttagacatttcctcaaacacagttaatcaagagtattttcttttaaatggttttggaactatcattgtagtatcattttctttttagattataaatttaacctctcatattttaagttcaagacattttcacggactatcaaggaatcctagctcattggcctggccctatttctgtgggaaaatgtattctcagttccagacaaccagtgttcctgcagatttttaggtcccgtataaaacgagagaacatagatgaatgagaggcattgtcagacaaagcctggcacatgagatctcaattagcatacaggttttaaatttcccacattaaacagtacattttaaatttccacttatgttaagcgtgttgatattgtgggtttgaaagtaagtcccctctgaaaaacaggaactgtgcttgtctgttaccagttcttgtggtcgatatggtaactattttgatttttcagaagggaggaaaagcagttaaatctagttaaaattaaaaccagttaaaattaactggctcgtgagatttcagtgcagctgttccacacatagcaacactaagagtgagttgtttattaccatgattaattattattagttgttacttctttttgagcagtggcatagattatttatatttttggtctaaccttggaaaatagaaactgcaagcgtagagaggttcccgtttgctaatttgcatgtaccctgtttttgtttttgccaggtaggtgtgtgcatctcaagtacacgagagtaatttagcatgtcagcactttcctaccagcagtgcttgctgactcatgcagctgttgtagcactcagctggccgcactgtaaactgcccatagtaccagcaccgcccttggagagctccgggctgctgggctggttagctactgggaggctattttcagatctgtggtcactgctgagctgggtcctcttctcctgccagcagccagacacagccttctggttgcaggggagaaaattggacaaatttctacctttgtagggactgcataaagattcatagcatttctggatatgcctcaggaaaactttttttttgcttcactttatttttctgggaatatttaaggggagaggcaaaaggggctgataataaatgaaaagggaatgtgctgttatttcctactaagatcagaaagagttttcataaacctttaacttagttaggctttcttggcgtaactgaaacctgacccacttctccctcagtgcaaagcagtgtgtcctgagtagggaagcaggggcgagggtgcaagtgactagcctgacattgttttatgtggctgaagtccctaagtgatgacagcttttgtttatatccgttccctgttattgaggttaaaaaacaaaacaaaaaacttgacctcaggtcattttaaagctagcatgtattttcagagatggtttcactgtttgttttcagagttcagttttgcttattttcatcggaaagtgtgaaatgttgcttttctgaggcttctaaataaacttccttttgtagatacaagttgatccaatcatcataaactgtcttgaaaaaggatgattaaagtaagatcagctggggaagggaaagctttgcacacccttgaggagtttgccttctttttcttaagtttcaataagcattctgaagcagctttgaccagtaataaagaaaagccacagtgactgtgtgtaacatgatgttgatggaagttcttggtttccgccgatacgaatgactcatcagtatcaatagaattgtgacttctaataataacacagtgcaagaccttcaaaacatgtggttttagcccttgctcttagtgaaaggttggaaaatgttagtttgagctttttttttttaatctcttgattttgcccaagtataaagttgttttttgtaggaatgatgatccccctgttgttttctcatcttactgtttttagtttcattatgattaaggagccaaactcagatcatttcatcgtttagaaatctctgcgctaagcatctcctgtcggggctgtgtttgagggaaatgtggctgaaaagcaaatcctccctgaatgcagaaaggaaaatactggtgcagactacaatccactgagctgcgtccctcctacacagcatctattgcggagggctgtggtattgctaagtagccccataaccctgtgagtcattgtcaaaggattccaagaggaaggttaacagaaaatgcgagtcagaggaaacagcagagtggagcagctagctcaggaagaactgtgctacctgctgaggggctgcccagatgtcaccaggaattcaggtgtacgttcatctttttgcagcccatttccgtatgtctacatatggggacatttttgttttttgtttagttttggttggttttgctgcagtttggccagactatcagagatcactatcttagcttcgtatcacagtggtcttatcccagagcctttgctttttgtattttatagtcaaagcaactgaatttctagactgtaagaccaacatgtatatttaacataattcttttcctttctaagtgctttatttatttatttatttatttatttattttgagatggagtcttgtcctgtcacccaagctggagtgcagtggtgcgatctcggcccactgcaccctccacctcccaggttcaagtgatcctcctggctcagcctcctgagtagctggactacaggcacatgccaccatgcccagctaatttttgtaatcttagtagagatggggtttcaccatgtttgccaggctggtctcgaactcctgacctcaagtgatctgcctgcctcagcctccctaagtgctgggattataggtgtaagccgccgtgcctggccagacctaaaaaattcttataaaatagttcaaaagttaaaaatgcatgaggaggccgggtgtggtggctcacgcctgtaatcccagcactttgggaggtcgaggcgggtggatcacgaggtcaggagatcgggaccatcctggctaaaacgatgaaaccctgtctctagtaaaaatacaaaaaattagccgggcatggtggcaggcacctgtagtcccagctgctcgggaggctgaggcaggagaatggtgtgaacccaggaaacagagcttgcagtgagccaagatcgcaccacagcactccagcctgggcaacagagcgaaactccatctcaaaaaagaaaaaaaaaaaagcatgaggggtctttcacttattgttggaaaaaaaagtgagtaggacttctgttcactgagtggtaactatggagaatgagaaaacaagcccaaagtggtaaagacgtttgtggcacataaataatactggttcagcacacatgtgaatcaataaaaaagccagataaccaaaaagaaaaatgatactgtacattcatattcttaaacatgcatttcacaaaggaagaaacccaattggctagtaaatatataaaaagatgctcagcttcattaataaacaaacacatgcagattaaaatcatagtaacatatgattacacactctctggattggcagaaattttaaaacctgacaataccatgtaaggatgtgaatgaatgggagtttttgtatttagttgacaggagtctaacttggtacaattatatcggaaaacaatttgctgttacctaaccaagttcaacctgcaaataacttacaacacagccatcttacccctaggtatacacctaagaaaaatgattacctatgtgctttaagaaacatgaacaaaacaaaaaataattgatgctggcaaggttatggagaaaaaggaacacttacacactctcggtgggagtgtaaatcagttcagccattgtggaagactgtgatgattgctcaaagtcctaaagatagaaataccattcaacccagcagtttcattactgtgcatatacccaaaggaatataaattattctaagacacatacacgtgtatgttcgttgcggcactattcacaataagcaaagacatgtaatcaacctaaatgcccatcagtgatagactggataaagaaaatgtggtacatacaccatggaatactatgcagccataaaaaagaatgagatcatgtcctttgcagggacatagatggagctgggggccattatccttaagcggactaacacaggaacagaaaaccaaactgcacattctcacttataagtgggagctaaatgatgaaaacgcatggacatatagaggggaacaacggacactgagacctattagagggtgggaagagggagagaatcagggaaaataactaatggataccaggcctaatacctgagtgatgaaataatctgtatagcatacctccatgacacaagtttacctgtgtaacaaaccagtacatgtgcatacccctgaacttaaaagaaaaaacatggacaaacatattcaaagaagcattgttcataagagcaaaaaactggaagcaacccaaataaatgcccatcaacattgaatcgaatcagcacattttgctgtgaggtatttatacactgtgatactatttggcaatgaaaaatcaactagtataaccacatatagaagggtgtggagaggcagcatttcttggtggtcaagaggaaggattgtgcctgggttcagattttggttctgccacttattgtgtgaccttggatgaatttctgaacttcagtgtaccttagttttctcatctgtacatcagggaaaatgatgtctacctgatagtgttgttaggaagtttaaatgagtcaatgtttgtgacatgcttaggagaatgactggcagacaatacattctatatgtgtttgttaaacaaataaaagtgcatcaaaatggatgaatcttacaaacaatatggaaagaaagaagcaagatagaagaatatatacagtgtgattctattcatgtaaagttcaaaagcatgcaaaactaaatatgttatttagggatacatacatagatggtaaaactataaagaaaattaatatgatttaatatgattgtcacaaaaagcagtataacagctacctccagaggtgaaggagtgggtatgatagagaaggggctcactgggggcttctgaggtcctggcagtgttttatctcccaacctggacagtggtcccaaggatattctttcttcttaattgtttttaaaaactgtctatgttttttatatatgtgtgacctattagtaaacattttaaaggatttatgtgagttgttatagtagcaagatgacattaaatagaaataactgtaaattgctacattttagttaaaaataattgttcaagtgcacatgggaacacttgcttggtattatttcctccacaacattgtgagccaccagtgcagtgtgattcttacagaaggcgacacctccttaaggccacattaagagagctgtcccctttagatcagggaatgtaatgttctcactcaactactctcaggtctggatgtcccatgtgtgggatgctatgtcttgtcccaagggatttattttaagaaagattttcaccacagagggagcattttctgtgataaagatgtttaggggtctggaaacctatcagttctaagagtggccaaaggaagtggggattttcaacatggagaagaggagatgttgggagagaaagagtgtcttccatcactagaagtggaagcagcctttccttgttgcttccctctctgtaatatacaagtccctccctgtaatgtctacccttggaggcaggtttcaagtcctggatactggagatgcccaagcagaggctgtgggacctcccttagacttgactggggccacaatacccactgcctggtccctggaccagcagcatcggcatcacctggagcttgttagaaatgaagtctcagggccacccacacctactgagtctgaatctgcactttctcaaggtgcccctggggtctcacataaacatcaaaatttgagaggcactgggctaaatgtctctaagatccctcatggttcttaagatttaatgattttatagaataaactgtatgttcaactgaaaattatcagttcatatggtgacattatcaatttaaaacaccttgggatgttacatgtccacagaaccatgtaagtatttgttgctaaattagttttaaatggatttgtccagtttcccccgatgtcaaagttaggttgcttatgtatttgggcacctataagaattaaaatattacataacgttgtattttcttctttctaacatacaggattagattcttgctttaaaattctccattaatgtcttcaaatttttcttttatattcattgaaaattcaaaagcagattagggttctgaatacctgttaagaatactcaaaagggatatttaaataaatatatctcattaatacattgattttatatttagcatattttttcttcttatacatagtccatattttgaccttatgggaacctttgaagtctgagtattttataatgattctccacaatacctctttatcttttagattctagatctgagatcaggcaagtaaaatagttttacctttttcccctcaaaaggccatgactaacaagctcatttactttttccttaaatattttgctaattatccttttaactgatgaagttcaagtggaatccatgattcatttaatcttttcccctttatgtaattagtcacttgttcttttgatgttcctagcaaaactaatatttaaagggctagtcataaaattccaaaataaaaagttcttaaatgacttaaaataagagataaaatatgctttactgtatagtaaaaatggagaaaacgtctcatgaatagatgttctttaaggctgtgagttatttgatttaagcgtgtgttaccaggtctgtgttcttttggtatataggaccaagaaactactttatggcttaatgtttgctgtacgtatgtcatctagatgagataatgtatgacagagggctttataaaatgataaagtagtgtagactttttttttttttttttgagacggagtctcgctctgtcgcccaggctggagtgcagtggcatgatctcggctcactgcaacctccacctcctgggttcaagcgactctcctgcctcagcctcttgagtggctgcgattacaggcatgtgctgccgtgcccagctaatttttgtatttttagtagagacggggtttccctatgttggccaggctggtctgaaactcctgatctcaggtgatccgcccacctcagcctcccaaagtgctgggattacaggcatgagccaccgtgcctggccgtattcttttttttttaagagcaagatttaggaagattactgcatattcctatagcgtttgttcgattttagattttttcagaatggtttgaaatcacatattctagcttgaactctaaacctggtctgtccagtatggtagccatcagccacatgtggcatttgagcatatgaaatgtggttgagatgtgctgtgcaatatacaccagctttcaaacaaaaaggatatatatctccttgataatttttattatgttgattacatgttgaaatgataatgttttacatatataggattaactagtaaatattaagatacatttggcctgttcctttttactttttaatgtggctactagaaatttaaaattatatgtggttcaccttatactttgatttcaaagtgctgatttagtctctaaagtctagagtgattgagagctctcagagaaaagaagatcagagcttaacagagagttttagagatgaggtgccaccgacagaatccacttacttgaagaaatcccagtctgcacctttgccctacttttacagattactgctttcttgaacccacaaagtagagcactgggtagcaagcatttaatatctacaatgtacagagcattgaagggggattaaaataagtatcacacaggtccctgcctttagggaaaacatatagtctactggggaagcaagatatgagcacatgagttgttaaatcatggcttgagagatacatagctgttcaatgctcaggtccaagactgttgcaaacagacggttgaggcactaaaaaaagtgcttcaaaggaaggaaaggtctccacggcctggaaaggtctccatggcctggaagggtgtcccaccagaggaatgccttggctgggcactgacgagtgggtagaatttcagtgggcagagagaaagggggcatggccaggtaggaggcagggtagagtgggaagaaggaggaaaacatggaaaagcacagaatggttgagaagtcagtgagaagaagagatggattgaactgtgagctgtgagtagaatcattctctagtccacttattattgaagctttaatatttgacatcgtctcctataatattatgtatcttgacactcttccgaaaattatttaccaagtgtctcaaagtagaggttagggcaggacactttaactttgggtagaataaatgttgcatatctttgattgttaggaagttctttaaatggcaaaactgataatattatcttgccagttatgtttatactaacattttgtgtagaaccatgtaactttaaaggcttctcggataagtacattattagtatttcaggcagtagtgctcagcatttgtatattcttcttgcttaaaatgccttcagtgttatgtcatttgatctttgctgttggctccattttatagaactggaagccagagaagctaagattgaataattaatggtagagtctggaatttgaacctagctcttaagcttcttccattttactgtgtgaaacacactagttttcattcctgtaagtctgtttcttaagagaagctgattaattttatttctttttaattgaatgataatataaatagggaaaagtatgcatataacatatattcatcttactgacgaatttccataaagtgaacacgctgttgtaaccagttcccagattaagacacagcattatcagcgccctagaaatccctcaggcttccttccagtaactacttcacccgtggtagccactactctgacttgggaaagcatagatttgctttgcctgtttttgaactttatatcaatggagatacagaatgtactattttgtgtctaacttctttcactcgataatatgcacagttaactcatattgtgcatgacaccatattgactatggtagttgatttttcattctccatgctatatagtattatattgtgtgactataccactatttattaatttgtatagtttccagtttggggccattatgagtagcaatgtgaagattctagaacatatcttcaggtgaacaacataattatttgtgttgggcatatttaggagttaaatcaggaaagcagtgtaatttttaaatgtcttgtagatgaggctgaaatttgactttgtgacactcttcaagaaaagaagtgaaaacctcaaactgttggtgtcttgaatagtatatcaaaataaatactaaggcagccattatgaaaaggtccaaggtagaggaattttaatgcccgaacacattttttcaagggaggatgaaaatagtcaattctcatatagagagaatttgaaagggttaggatgttaaaatactgacgttatatcactcaggtttctcttacagttatattttttttcttcaagagaacttttagcaggtgatagtggaaaactaaggtgtgattggtaccaaaatgaccattgtcccagggtataataagggatgaataactggggagtgtatttactaggaaataagaaaatggggttgggttaaatggcaggaaggtacattccaaaatctataatgcaagctatggttctcaaaattttactgaaatttcctctctctctcactcttttgcttagcgtaatctgtaggcaaaagaatttgcattcttttaaagaaggcaattataaataccataacttgtttttagaaaaaatcttagacgtttatccagaggcaacctgtctgaatgaaaatgtagttctaggatttgccaacacaaaagacttcagtgtctacctttaatgcttattaacattaatggtgatcatttaaaggtgtgtgttttatgtttagacttataggtgttgttgatcttaagcagactaggcagagaaatccttcacattttctgtgctctcattcaggatggccctaggcatgttacatgggaaatgagaatatgtgaataaatactctcatactttcttgggcctcaatgaaaagaacatttgttaccatttttagtcataaattaaaattatttcagagtaggaaatataacattaatttagaacatggctgtcatagatgaaacgttttacacatgtattgctgtggtagacattccttgcatttattgaaagcctctcctttataaagttagtgaagtgtgactactctgacctccaaatactgggtgtatttgaactatgaaagtaggtttaaaagttacacttttctttaatgcccattgatgatttctttctttttttttttttaagacgaaatctagccctgtcacccaggctggagtgcagtggtgtgatctcggctcactgcagcctctgcctcctgggttcaaactgttctcctgcctcagcctcccaagtagctgggactaaaggtgcacaccaccatgcctggctaatttttttgtagagactgggtttcaccatattggccaggctggtctcgaacttctgacctcagatgttcaggccgccttggcctcccaaagtgctgggattacaggcgtgagccgctacgcccatccagaacaacaggcactggggcctactggagagtggagagtgggaggagggggaagagcagaaaaaaaaaaacctatcaggtactaggcttagtacctggatgacaaaataatctgtacgacaaacccccatgacgcaagttacccatatcacaaatctgcacatgtaaccctgaaggtaaaagttaagtaaataataaaatattttacatttatttaaaaattctaaaatggttgtattttaaaagtaaaaacaaattttggttaggatttgagcttattccatttttcttctaattttccaaattaaatgtaaaatgagagcatcccaggtagggggaggtaggggagaaaccaaataattttcaagtcatatttgaagagcaggtatgttctctcacgatttacagtgcaggtgcattttaatttaactgctttaaatgatgataaaaattgttcaagtagaacaaagcaaagttttagaagtgacttgtaaacagccattcttaattttttcctgttttctctccacttatgtgacttgcatgaatttctgaagcagtcctttcaaatgacactgctccaaacatgtgaattgcattcatcaacaaaatccagccttttcctttgtaggacaatgtggggtcacggggcaaggggtcttttctttgtctagcctggtgccaaagcaaagactagtcctccctgcgtttggacccagtgacatgtttccatttgtcattgaacactagggggaggaactgtagcctctgaggtacccccatttggtcctcaccctctaccagaggatttgctgcttcagcctcttcagtgccccaggtatttgatgcaaagattatgcacttatgctgccagttatcagggttgtgtgggtgtctttagaggggtctccccttagcatcaggtctcaatgacagaatctaaataacacaggttactcatcacgagttaaagattttttcccttttcacattgatgcttctgatatacttttatacgttagctgattgtatgtgcgtactttgtggctgcaaagatgcagctggaaagtgtgtgggggttgtctgcttcctctgaggctgctacaggtggtcaggtgggggcggctgtgataaaggtacagcacccacttccgccagcttgtcttgtgcgccctgtaacccactgcatgaacccgagtggcacttcaaccggattttcttgttggcacttttatctttcactgcttctgacttgcctgttgaggtttatgactaaggttgtgattaaaaattccctttttaggtatgaaaagtcttttcaattactttgtgttcctttttttgttttgttttgtttttgttgtgtgtggactttctgggttttgtaaaaatgaatcttaaaaaaatcttaatattatgtaagagttagataaaggttaagtagctaatatattctctcatcagggcatagaatcaacgtatgttcttggaagattaagtgtgtcaaaatgcattttatgatggaagcactgtcagttgtttagaataggcatggaaaagcccttttcagaatattgtcataaaatcagacttggaaaggttttcgtttattcagtctgtattcccctatctgtctgtttaatctctgcatattactgtccttggagcacggagaaacgtgagctacccttggaggtttatagtcccactggaagggaactaatgtttacgcctgattatatgataggagctttacatgttcttattcagtctttgaggaaaccttataaataagataataactttttcagagaaagaagctggggttctgagacattacccacttaggggcacccagaggaaagagcaagacctccagctccatcaccagtaatttccagcctgtgagcttccctccacactcagtaatttaaaaaacaacttgatttagggacatctagtaaatattctagaagttcagaggcagaaaagctagtttgcagctgaagtactcagatttcccactggctgagtgggaaatcagacccgagccttgacagtgggcagaatttgtatagaggagccaagagaagaagagtttccacactgtataagccaaatgatggaaggtgtaataacaaaggaagggtgagcacacaggtttaggagatgctgtgtgggccagtccagctgggagccattaccatttaacacttaatggagtgcttactgtgctaggcactcttctaagttcttcacaccttttaactattcttatcttcacagcaagcctttgcaggagatattatcaagtccctcctgcccccactttttttagaaacagagtcttgctctgttgcccaggctggagtgcagtggtatgatcgtagctcatggtggcctcgaactcctgggctcgagtgatccttttgccttagcctcctgagtagccaggactacaggtgtgtgccaccatgcctggctaattttttttccccatagaaacaggaactcgttatgttatccaggctggttttgaacacctggcctcaagcgatcctccgccttagcctcccaaagtgctggggttacaggtgtgagccactgcacctggccttcattgagggatgaggagactgaggcacatagcagttaagttgtggaactgtgattcaaagcatggccaccaggatccagagcctgagttcttagctactctgctgtcttgttttctctctactgggcaatgcaggttgcttgttagaggggtgatgaggattctcaaattgctggggatagcgagaggaagatgaaaatggcaggggtagtgatagaaagatcaaaatggcagcagcacgctggccaattttacaagaggaaacattaggaaagaagagaagagggagtttttctcagctaagcaggatctggtcagtgtaagtgggtagcaaaagatagaggtgagatgtaacaaatcaagaggccttgatgaatgactggaattgaagaagagggaatgagcaaaaatgaatctaagatttggagcttggttggctgggaggataattctgctattgcagaaatcaatgaggtcaatagacaagctcatttttccacagcagtagtgttgcagcaagaaatgaaggcttttgaagagcatatgcagtagagataccatatgcaggaaaaatggctcactggagagttgagaataaaggagaggagttcaagggagggaatggggatgattggggggctatctgcaaggagagaattgatgtgctgggaacagacgatttctgagggagagagaaaaacccagggccttaaaaagtgtccttggtcaagaagcagaaggagaaagaggagcaggaaaccataaaagaaacaggcgaagcaggagagagaggagaataaaaagaggaaaaaaaaaactactgaacagtgtcagacactacaaagaagtcaaggagaacaagagtgaaagggggacataagatttgacacggaagaaggccatttgtaccctgcacagtaagtcttggtgacatgaggaggtgaaatccagttgcattaaagtctgtggtattgctgagttcttcctcatgggcaagtccctggaccttttctaagcactaaatttgcaggtagttcaatgtcaagcagagaaggaagttggttaacagcacttggttgcatgatactacgttttgttatagtgacctaactgatctaacgtgttttgtctttcagcgcgttcgttcacatagctcccagttttaacatttcgccacctactgaagacatcatttgggaccaagctgatgagcccttgaagcacagcaggtgaggcaaggacctcagcttggtctttgtttcataagtttacacagctagcttacattcccaccagcagtgtgaaagtgttccctttttaccagatccacgccagcatctattattttttgtttttcagttatgtccgttcttacaggagtaagatggtatctcgtgcacttttaatttgcatttccctaatagagatgttgagcattttttcttatgtttgttggctatttggatgtcttcttttgagaattgtctgttcatgtcctttgcccagtttttgataggttctttttaaattagtttattagcttttaatataaacatgagaaaaaccacataaattgtagcattcttttcaaaataaaactgcaatcaatacttgaatgaatctccaagctctgaacttcataaacaatgttttttcttttctttttttttcttttcctttcttttttcttttttcttttttttttttttttaaatggggttgtttttatcttgctgatttgagttccttgtagattctggatattagtcctttgtcaggtgcatagtttgcaaagattttctcccactctgtgggttgtctttttactctgttgattttttagtttaattaggtcccaactatttatttttgtttttgttgcatttgcttttgggttcttaggcatgaactttttgcctaagccaatgtctagaagagtttttccagtgttctagagtttttatggtttcaggtcttagatttaagtctttgattcatcttgagttgatttttgtataaagtgagagatgaggatccagttcattcttctacatgtggcttgccaattattccagcaccatttattgaatagggtattctttcctcactttatgtttttgtttgctttgtcaaagatcagttggctgtaagtatttggctttatttccggattctctgttctgttccattggtctatgtgcctgtttttataccagcaccatgctgttttggcaactatagccttgtagtatagttggaaattgggcaatgtgatgcctccagatttcttctttttgcttttgttctattggctatgtgtacctttttttggttccttgtgaattttaggattgttttttctagttctatgaagaatgatgatagtattttgatgggaattgcattgaatctgtagattgcttttgtcagtatggtcattttcataatattgattctactcatccatgagcatgaaatatgtttccatttgtttgtgccatcgattatttctttcagcagtgttttgtagttttccctgtagagattttcacctccttggttaggtgtattcctaagtattttatttgtttatttagcagctgttgtaaaagggatttaattcttgatttgattctcagcatggtcacggttggtgtatagcagtgctactgatttgtgttcattgattttgcctcctgagaccttactgatctaggagctttttggatgagtctttagagtttcttaggtagtacaaccactctggaaaacagtgtggagattccttaaagaactaaaagtagaactaccattccatctagcaatcccactattatctacccaaaggaaaagaagtcattatatgaaaaagacacttgcacatgcatgtttgtagcagcacaattcgcaatttcaaaaatatggaaccagcttaaatacccatcaaccaatgagtggataaagaaaatgtggtatatatacatcatgaaatactactcagccataaaaaggaacaaaataatggcattcacagcaatctggatggaattggagaccattatcctaagtgaagtaactcaggaatggaaaaccaaatatagtgtatcataagaatgatataatggactctggagactcagagtgaagttccactagggaacttatccatgtaaccagaaaccatatgttcccccaaaactattgaaataaaataaaaattaaattaaaattttaaaagttcacacagctgcccagcgtgtgtcccactcaccggggccatcagcttattctgtgtatttctaagcatcttatgaacacactgattgttataaggaatccaaacaatatagcactgccacacttggggctgctatttgttttagggctcttttattatggaaagtccaaccgatatgaaaataacctaaattttctctgacttctcagaaattctcaaaacatcaaaatgtgccctgtcttttgatgctggttaccccttggtgggaatccaggatttccttatttcagtgtcacagctgtgagttgtaaagcatttcattcaccacaatgctagttacagttgattttatttaagctgccagatttggaaatgcacctcactatagcattagtttaaaaaatttaggaaggggagaagaaatttgtatgtacaaatgatattttttacttttggactgtaagtatgttttttggttctttattcttcccaccagtttttctgggtaactgtaacttggtgtatcaacttttagaaaactcagaagacttaggagtatgtaagctctctcccttcccttcccacccctcacccccagcatagaatattggtaggtgaaactttattaaatagaatctgcacggagtagtcagaccttagccccacctaaccctgccacttgtctctgttactgttttctgttgctattagcatcttcattcagaaggacgagaggggagaaaaaaatgaaaatgaagttaattttgttcagcaaaagttaaagtgtctggctgaactctgggtagctggttttggagttgtatggggtttcatttattctccaggtctcttagtcttcacttgaaaatagaaactagagttcatttttcctgacaagaatgaacttaattatttacctagaatggttagtaatctgttcttattaccagaaagctttcttctgatctatttagtatcttttttcataagagtttgaatatattagcatgtattctcaatagaatctaatctttcattattaaagttcctaaatatcttatattactatgttttatcattatgaacattgactctcattgtttagagttttgcttctctaattatcttgggtgaaggaccagttttgtttttaatttccagtatgtcatggattgataattttataaaatacaataaaaatgatttactagaaaaatgaaatactagaaaaatgaaatttaaagaaactaaaaacataagcctgattaaacatttattattcttatagtcaacagacataaaattactctggcaagctgctgtaaaaaaattctaaaggtctactctcagtttctgtgcttattctgggactagggctggtctgcagagtccagttcgagttgcactgttggacagaatatatacaacttaggagactgaagttcagtagatactaatttcagaacatatcctcaaagtgggtttttggggactgtccccttcacatttcttgcatgtataaaaggcaagtgcagttcgggtacagtggttcatggctgtaatcccagcactttgggaggccaaggcaggcagatcacttgagatcaggggtttgaggcaaatttggccaacatggtgaaacctcgtctctaaaaatacaaaaattagctgggcatggtggtgtgcacctgtaatcccagctactcaggaggctgaggcatgagaattgcctgaacccaggaggcagaggttgcagtaagccaagatcatggcactgcactctagcctgggcgacagagcaagaccctgtcttgaaaaaaaaaaaaaaacaaaaaaggcaagtgcagaaaaaaatgctgtttacttaaactttttctattttaaaaaaaattgtaggacaatgcataaaataatatttaggtgaatatagaaaaagttgattgtctttctcccactcctctggttcttttcctttctctatacatcatatacatacatacaaacatatacctttacatggagaagggacattttttctgctatgaaaatggcatcataaacaatactctgcaactttctttaatattttgttacaacatttatccttatcaaatatgaatctagtggctctttttaacagttgcataatatcctatggtatcgttgtaccatagtttattcaattattccccagctgatataccttcaagagcattctaggtttttaccattcctaacaacactgcagttaaattcttgtacatatattcatgtgtatctactttgatatttgaaggatagattcctaaaaacggagtcagtgactcatgcatgatgtcagatgatactccaaaaaagttgcattgctgtagagtcacacctgcaaaatatgagagtacctgtttgcctcacccctgccaggtgttaggagtctttttaagtgttctctctctgcggtgtaaagtgatcactagctgttttaatttgagttcccctgattgccagcaagagtgtgcttcttttcatatgtttaagggcctgctggatctttctattcaatttgggggcaacaaaacttgacagattttattttattaggtcttttgtgtaccaagttttctgtctgtggtacactcagtggttggggtttatattatttgttcgttttagtagggtagaggacatgggaaaagaacaaagatacagtgttgagggttttttggtgggggggagatgtcttagttctgattttctttgtctaacatgttttttttcttcaagatcagcttacaggaaatccgtccctatttgtgtgtaatgtaaaaagggcacagggtggggcatctttatagcttggcatagtgtatatcgttattcaagattgctcaaagactatgcgttgccatgtgtacttttaaaaaattgaggtaagttcatatagaattaaccctcctcaagtgtacaattcagtggcatatagtacatttacagtgccgtgcgactgggacctctatccagttctgaaacattttcctcaccccaaaggaaactccgtccccattaagcagtcactcctcattccccttatccctcaacccctggaaaccacttctctgcttcctgcgtctatggtttcaccttttctggatatttcatataaattgagtcatgcagtatgtgattttttatgtctggcttttttcatttagcataacatttttgaggttcatttgtattgttgtgtgtatcagtacttcattccttattgtggctggataaaattttattgtatgctacaatatacaataatttgtttatccatttaccagttgatattagggttgtttccaccttttggctgctgtgaacaattgcccatgtgcacctagatgccaagttaagtcatagagaggcatgagggaagaagaaagacagctgaaaagaacctcccagggagcatcttctgtcttctagagccttcctctctctgtagttggtcatctacaggctctttaggaggctgggtcagtcgtggggccagatttgggatctgttttcactggcttcagtatcttcgttaaaccagagatagaccctccatatcacaccctctggatttaaaaaggaatttacatcccaccctcagggcactaggtctgctctagcctccatgggtgcagtggccgcaaggaacattcatggctattcctccatggttgttgcctctacctttagcatctgggttggagcttgtagaatgtggtgatcaggaggaattgtgcccacatagtacctgggcatatgacagtataggctcatttcccatctctgcagccttagtccagttatgtatctctcagttttctccctggtaaaatggcattactaatacttacatcatagggttgtagagatagttacatgggataatgtatagagagcactgttacagtaccatgtggtagtacttgataaatgttcatttcttctgttctcagtgcttctctgtcctcttctatctggtgcccaggacattacatacttcacaaggtagtattaagtttaaaatgagttgataatgcagaggaagtctcttagcaccatgcctgcaacgtaagtcaacactcactatagatagaaaggtaccttaccttgcagttaggatttctcattgggaaaatgccatccaattgattacaagccgtctaaagtgttttaagtggtaaagatttcacctgggtatattgagttgttctgcagcgtggtgtttattaccatagacacatcgggctaattaagacagccatgttcaggatagatgcactatcactaagatcctgatgtgtgagttgggcatttcccatcatgttagcacaaatatattaaagaaagttacttttatatcaaagtgtttgcatcccaaagaaaatacttgtacagcctaaagttctctttcttgtggaagctgacaagagacttctgtcttgccctccaaagtggtttagtatcctattttgagcactctttgggtgctgttatttagaaattctattttagagcaaatgggaaggattttataaaaaagggagaagcaactgtcctccaccatgctctctctcagctgtgtaacaagcctctctgagggtgaagtggatccccataatgtgggccccatgtgtgaaccttttacaaggttttcttgttgtaatggctgatataattaaaggagagagttcatgttttgtctgaaatggagcatgccttgagttacaatgttttgtttttctcaccaaatatatcctgactataatagcaaacagcttgtataagatttttacataaacatttgaaaaagcattcttgtcttcactgaaattttgaaagccttttaagaatatttgtagcacttatgtttttaaatgtacaggtctaacatgcagttgtttatttggtaaattcattccatgagggtgctttgaatctacctccaacctctcacgggtctcccagacttcccaggaaccactgcttgacagctggagagacagcaggtgaaccagggtctcactgggagggaaagacgaggaaaccccaaagggacagctttctggagaaaaatgcctggctgtgaatgcctcttcacctccatcccagatacacacttccaggatgtgcaaattgagtcaacatcatgtctgtagaggacaacaacatgtcttttgttagtcttgacatttctttagccctaggcctctcaagttttggatatgtgatgctcaagaaatgcatttacaatttgaaaacctggtgctcattaagtaattcttttaaaatttttttcttttccttttgaaaaattcaaacctagagaggagatgaaagaatcatatgaagaacatttatataccctttgtttatatttgccaattattaatatttgttattttgtctctgaatttatagttttgtatgtgtgttggcaagaggggttcattttttagaactatttaaaagtaagttgcagacttactttcatgacatttttccctgaagacctcagcatcatttctgaagaataagaacattttcctacgtaaccacaatcctgttataaagtaagtcttaattgaaaacttcagacagaggacaaaagagtaaaaaaggcagagattgaacaaagctgtaattgaacttggaaagtataaggagaagaaatatagggaggtaattagaactcctgtttggttccttaaaggataaattttgtatataccagcaaatcactcaatgaatgcagattttcttcaaatatttactttatctagtccaaggagtttctcctggtgctctgaagtcagtgttttggccagggttataagcttttcagcctgtaaatacatttcttcagcatcatcaatctaaaacctgagtgaccacatcctacttagacttgtggttaggagcaaattttcaagggattttgctggtgccattaccttgagaacatgggaccttcagttattacagtcagaaatgtttactaatgggcagttagtgtaaacatgggagtcctttcctgacatttaatttaggtttgagtaaaagctgatgtgttagcacactattttgagaaataattttacaggcttggcaaaatgttaagcttgatgtcatcacagacttttgcagatttaggcttcaggagtcagcgcaagaaaaaatgctactcttataaaggctgaacagcaggaacaaagttaagtggatggcatgtagatgcatcactaatttgtctattttaaaacaaagatatacattttcttgataccaatagcttatagaacattaaacaaattaaaaggtttatttggactgtttccctgaaagcctccttcttcggtaggatttaatattttgccagaagaattatgtttggggatttatttttcaaattttttaaaaaagctattttcactaagctttgggaggggaaccatattaagctgtctgtctaactaagcacatcaggcatcatcatgtcaagaatgagaaactatgtgtttcctttaacagcagtgtatgtcatagagatgtttgacccatgatttttcatgaaaaggtccattttcagtaaactcttgtgcttacctagtgtcttcaatgtgataactggcttcccactgatcaggggtgagatgcatcacagagagtttgaaactacacattttgtcttttatttcctttttctttttactctttcagccttcagtggccatggagattttttattttaaattccaattttacatatcaaatttacaaactgtgacttttaaaataattgttgtactcttttctgtgagtgaattttaaaaagcatttaatgtaaaatgcatgtgtagtttcttgtgtatcaaagccatgcttttccttagatcagcttaatcgtctcctgtttccaatttgtgttagaaagttctgtgtgaaatgtgaactctagtttatatacttactaacagttaatgcgtgtcccttgggataatagctcttgagctatctttgtggctgtcttacgtagaccatttgaatctttctcctttaatgccaagtatccacttttcacgtgtaaattggagatgtcactacctgcacttggacaccagtgtgtgcatgtaatgttgattggtgtcatcatggtttttggctactctgtgataattttgtttttcagaggcaaattttgtgaggccaaacttcggagattgggtctgtacatcattcattctttcagtcagtaaacatccatttagtgcctactctgtgtcagtgctagtcaaaaaggaacagggcaggattgctgtcctggaatcatgtgcacgcatggtacccatgaatgggtactaacaacacaacagccacttgaatggcctgggaatggggcgtggggatgggaaggggctccacagataggtgaattggtctgtaaaagtcatcgctgtacaaatgaatcccaaaccaaacattgaaagaatgcacagtagattcccccagttagggcagggtcatagagcattttgggcaaagagcccatacaaggccatagaagcatgaaacatatgccacattgtatgaatttcaaataacttcatataatgagagtttgggaacatggagaaggtagtggaggaagatcagactaaaactgattatgaaggaccttacgtaccatgccaaggaggctggccttcatcctgtagtcagtggggaacaacttcaggaatctcaatgcagaggtttcatgatgaaatttgtgctttagaaatattctcttgcagcactgtggaggtacagataagtaggaatggaatccaaggcgagagggtcactctgctcctacagaagttcatggggcagtggcagtggggagataaggagatgatggtgctgagagccagttaagaaatagaatcctcagaacttggtaactgattggttatgagtattgagactacatgggtgactacatgagtgatctcatcagtatataagtatataagtgctcaattagatcgtgagatcaaggggcgatattaatgtaggaaacagagaacagagagaaccaatgatataagccctaggaagtggacttttaaggaggaagcaaataaaaagaagctttagaaggaatgatctgagggtatgaggaaaacctgaggatagggtgctccacgaacccaaagcaggaatctgcagaaggagggagtagtcaagaatgttgaatacttcagaggggtcaagcaagggttccaggatgtgtcaactggtaggttcagtaatcctagcaagagcaattagtgggtggtgaaaaataagaaatgagatggttcatttatactactctttcaaggagcttagatactaagggaaggagagcaagagttgtcaaggaacatttttttaatattctttttcaaggttaaaatctcaagcaagtttacatcctggaggatagatataatccattagacaggaagaagaaggagataactgatggaataatgtctctaagcagatctgatggcacgtaagctagaacacatggcaagattagctttgggctagacaaaggacaactcagtttttaatagatgggaacaaaggaggaaagactgggtgtggatatggataagggattgtaggtcttgaaagttggaagtttgaggggtgtagtgtccatgaaaataagtgcttagatctacagctagaagcgtagttgactgatggcccaactgctgcccctctgcagccacccttgcattgtactaaactacaaattgccactagcgtctcccagtcatgaccaagcacaataggggctcctatttcaggctcattcctgtgggacacaggacttttccagtgggccaaattggctcaagaactcctattggcctgagcagacctttcttggaactgtgttggaatccaagacttcctagccattccttcttcctttcctctccatgtccataggtgtggtttgaaggacctcccacattctgtggcttcctttctcaatatatcttttgtatttctagttctatcttggtacttgcttctgggtagacccaaactaacataaagaatttggtcgaaatgtgtatattattaaggtaatgctagctgctgtaaaaataacttctcagttcaacaacatgtacatcattcagacagaaaattagtaagaaatgcaggacttgaattgcatttttggccaaatggacccaatagacatgtacagaattttccatccaacagcagcagaatgtaaagtttttctagagtatacatagaacattctccaggatagaccatatgttaggccacaaaatttaagattgaaattatgtctagtatcatttcagatataacttcaaaccacagtggtataaactagacatcagtgacaggaggaatcttgaaaaattcacaaatatctggaacataaacaacatgccccagaacaaccaatgggtcaaagaagaaattaaaagataaatttaaaaaatgccttgagacaaatgacaacggaaacacaatataccagaactgatgggatataggagaagcagttctgagaggaaagtttatagcaatatatgcctacattagaaaagaagaaagatctcaaatgaatagtgtgacattacacctcaaggaactagaaaaagaacaaactaaaaccagattagtagaaggaaagaaataaaaatcagaacaaacataaactaaatggataatagaaaagccacaggaagaatcaataaacttaagagttgggtttttttttaagtaaaattggcaaacccatagatagtctaacaaagaaaaaagaaaactcaagtaaaaccaaaaatgaaattgaagaaattacaacagacacctcgggaataaaaaggatgataagtccctattacgaacaattatatgccaacaaattgggtggcctagaggaaacagataaattcctaggaaaatacaacctaccaggattgactcaggaagaaatagaaagcctgtaacagaccaatcacaaatagattggagaagtaatgaaaaacctctcaacaaagacaagcccaggaacagatagcttcacagctgagttctaccagacattcaaagaattgataccagtacttcttaaactcttccaaaaaaatagaactagaaggaatactttcaaacacattttatgaggccaggatcaccctgatacccagccagccaaagacatcacaagaaaagaaaatttaaacccaatttctctgatgaatattggtgcaaaaagccccagtaaaatattaggaaaccaaatccaacaacacatcaaaaagattacatgtcatgactaagtgggatttatccctggcatacaaagctggtttaacatctgcagatcaatcagtagtgatacattgcattaacagaatgaaagataaaaatcacatgataatcttaattgacacagaaaaagcatttgacaaagtccaacatcctttattgagaaaaatgctcaatagtgtatgtatagaaggaaagcttctctatgtaataaaggccatttatgaaaaacccacagctaacattataatacatgggggaaaactgaaagtttttccatgaaggtctagtatcaggcaggcatggatgcccactttcaccacttctattcaacatagtactggaagtaccagcaatagtaattagataaggaaaagaaattaaaggcattgaggtcaggaagaagtaaagttatctctatttgcagatggtgtgatcctatattgtagggggggaaaaaagcccctgcagattccacacaaaaaaactgttagaacaacgaatgaattcagtaaagctgtggggtgcaaaatcaacatgcaaaatcagttgcgttttttttcataccaattacagtctgtttgaaaagaacatgaagaaaatggtcccacttaacaaagcatcaaaaagaacaaaatacctaggaataaattcaaccaatgtgaaagatgtgtacactgaaaactataaaacattaatgaaagaaattaagcacaaaaaaatggaaagatatcacatgctcatggatcagaagaattaatattgttgaaatgtccatagtacccaaagcaatatacagattcggtgcaatctctatcaaaattccagtgaccttcttcacagaaatagaaaaaatgcttcttaaatttgtacagaaccatgaaagaccctgaatagccaaaacaattatgaaaaagcaaaacaaagttggaggtattatacttcctgatttaaaaattatattacaaagttatagtaataaagacagtattatacaggcataaaaacagacacatagaccagtggaacagaatagagagtccagaaataaatccacgtatatatagtcaactaatttttgacaagggcaccaagaagacacaatgggaaaagaatagtctctttgataggatgttaagaaaactggatttccacatgcaaaagaatggaattggactgttatcgtataccacatacaaaaatcaactcaaaattgataaaagacctaaacataaaagcagaaactataaaactcctacacaggaacataggggaatagctcctggacattggcgttggtagtcagcttttggatatcacaacaagagctcaggccacaaaagcaaaattaaataaatgggggctgggcgcagtggctcacgcctgtaatcccggcacttttgggaggctgaggtagggggatcacaaggtcaggagatcgagaccatcctggccaacatggtgaaaccccatctctactaaaaatacaaaaattagctgggtgtggtggcgcacacctgtaattccagctacttgggaggctgaggcaggagaatcgcttgaacccaggaggccgagattgtagtgagccgagatggcgccactgcactctagcctggaggacagagtgagactccatctcaaaaataaaataaataaatgggactacaccaaactagaaagtttctgtacagtaaaggaaacaatcaacaaagtgaagtagcagcctacagattgggaaaaaattccaatcagtatatcccaatattccaatgtacatcagatatattgtaaatcatgtatttggtaaggagttagtagccaaaatttatcaggaactcatacaactcaatagcaaagaacaaacgaattacctgatttataaaatgggcaaaaggcctgagtagacatttttctaaagaagacacaaagatggccacaggcatatgaaagggtacacaacatcatatcagggaaatgcaaatcaaaaccactgtgatttacctcctcacaactgttaggatggctgttatcaaaaagtcaaaagataacaaatgttggtgaggatgtggaggactcttgtccactgttggtgggaatgtagattgggtatagccgttatggaaaacgttatagaggtttctaaagaaattaaaaacagaactaccatatatgacccagccattccttttctgggcatatacccaaaggaaatgaaatcaccacctcataaagatgtctgcactcccatgttcactgcagcatgattcacaataactaagatatggaaacaacctaagtgtctgatgatggacaaatagagaaagaagtggctgtaagtataccacatttggtttatacaaaatgaatattattcagccctagaaaataatgagagcttgtcatttgccacaacatgggaaagcccattgtgctaagcgaaatacgccaaagaaagacatattatatgatcttacttatatgtggaaccaaaaaaatttcaaatatgcagagagaatacaacagtggttaccagggatatgggttgtgggcaggaaatggagagatgtaggtcagaggatacaaagtagtatgaacaagtatagagatctaatgtgcagtatgaagactataggtatgggattcatgctaagtgagattttagctgctcttaacataaaaacaaaaatagggtaactgagatgatggatatgttaatttgcttcactacagtaacctttttactatctatattaagcctataacatcacgttgtataccataaatatacgtaataaaaattatttttcaaaataaaaaaatacaagataacttctcaacatttcactgttctaacacaagtttcttccttattcacatgaggtcttaaatgggtgttgatgaatggtaggtgacattttcctcctggaaatccttcaggaattcagattccttccatcttgtagtttctccatcttcaccatgtgactcccagagttactgtgcttgtttgcatcacatcaagagagggggaaaaacatggcaggttacacatggaaggtttttatggagtaggcctagaaattagcatagaaattaggcctagaaattagcataatcactttcacttatatttcgtggtagaactcaatcacatgtcaccaactagctgcaaaggaggctggaaaacgtggcccagctgtgcaccaggaagaagacactataagtttcatggaatagtccctgtgggaagtgggaggacacagctaatgctatgaggcctggatttatcacactgtacgttttatgtgagattttttttttccccaggagcttcaacattgagttcactggtgaagttgctgagaaagcaggtggttgagtttgaaattcagaatttggaggttcaaaactgaatagttttaaaaggaaaacttgggcaagtctccgttggaaaatgtcttttcagtgtttcggtacattttggggttgatatgagaagggcatagtcacaacatatgtcactctgtgtgttgctggttttgggtcctgcacctggacaaccaaacaggactggccccttcgttcctgcttcacgttggacccttcagtcggagatagtatgacttacagagggagagatgttttcaaaccctgtgaaaccacccattgttcagatgaaccatttatcttgcacttttctctaatacaaatgaatgaaccttgctgcttctagctagtacccttattcacctgctcttctggtggtatgcaatgctcattacattttttgcttttgcaaatttgtctcattgtgtttcctttgcttaaagttggctgttttcttcttccctcttctcttcccttaaatcattgtcaatccaaatcctggacaacctgtcctctcaggcccaactcaaatgccatctcctctgtcattctccccatttaccacagttgagtgcctcctgtcttcctgacactctttgggtctcagtttcaccactcaggtggcccatggctgccttgatacttctgtatgagtctttcacctactagatttaaaacttgatgatagaactgtgacttcctagtacttacttgctcttagcacaatgtcttacacacagtacatttttagtaaacaattgttgagtgaaaatgaataaatattgcttattgtggagcagatagaatgaagttcagtttggagaatcagtcttgtgtggccacagatcacatgaggaatgtaaaaattaaataaataaaacaagcctaagataatgtgttagaaggggagaaaggcctgtaccgattttttgcatctctaatgatcatagagatatgatttgtattatttatgtgggctagaaaaggggatctctattagggctctgaagtttgtgaaggctccagccacccatctgatgttgaaaaagtcaattgattgagaacccactgtatttacaatcttgacttattttggagcgttaatggaggcaaactgagatttgggttggttggttgtagggagtataagttatatcaatgctcaggggagtagttttgagtttgaaacattacaataacttcttcaggcttttaagatgtacataaaatacttgtaagtggatgataatgaattgacaagagacctctttatacagctagaatatatcaagttgttacttttctacaaatctccttatagattgggttttgctggtactgtttttatggttgtagttgtttattgtaggataaaagtccaagaggaaatgtctcttaaatataaaatgtatattctaaatataatatatagatactatgtataagctatttttctgctctaggtcctttttattttcttaaagccaaacatattgtgtgtgattcaaacaggtagagagcaattaatttaaaagtggcctaaaacccaccttcctctactacctttgaggggcattataccattatatgatccaggatttatatagcagattattttatcactactcccttagagcaaccaatcaatcagcttcattttattaggatgctttaatatacccattttaaaaatgtttatttaatatttttaagtaatttttgaaaagatctaggaagattcacatactcattttttcatgaacaaattatgctgtatacttaattgagtctgtctgtagggatcatttatttctattcatcaactctttaccaagcttcatactagatattgagatgatagtctattgattttgtttctctctctcatgtttttctagtatgtcttatcttttggggtttatttctggccctggagatcattcttttatgtcagttctcagctagttgtgatttgttgctaaattacctgcattcaagtttttataaatgaatgtagatattttgaaaactatttcttttaggatactaaacagtaagacaaagatacactgcacaattgtgtacaaaaggtcttttggaatatgacttctttgttaaaagcaatttgtgccatgatagtttaaaaaaaatagttcggcaatgatgttttcatttatgactatgtacatactgcatttgagcagagagaagttttttattatgactaaggcctctgtgtaaccaacttcaggtcaaatatgaaatatatggtgtaacaagtgctgtgttttctctttaaaatacacttggattcttccacgaggtatattaaaaatgctttgacatcattatttcatcttgagttaccctttcattcactagcttggttggagaaaattaactcttcaatacatgatacagaaaatctgttgatgcagcctccctccagttcttagtatttaatttcatgagggacatagcacttttccccatgtaattacagattggtagagttgagcaagaccttaaacatcctgaagtttaacacccatcaaatgcagatacctcttctaaggtatcctaatttctatatcgaaaataattctaattatcagtttacttggcaaatctgccataataaagtctttttcaaagttatctatgcccagttcccctcaatatttctcataatattagttccacagtcattctgatctcactcctttttgctttctccagtttatcagaaagttccttaaaaggtagtggacaaattatagaagtacctcccttttttttttgaggcaagatttcactcctgtcatccaggttggagtacaatggcgcaatcttggctcactgcacccttcacctcccaggctcaagcaattctcctgcctcagcctcccaagtagctgggtctacagttgcataccaccatgcctagctaatttgtgtatgtcttgtagagacgagttttgccatgttacccaagctggtcttgaactccttacctcaagtggtccgcctgctttggcctcccaaagtgctgggattataggcgtgagccactgcacctggccctaaagctactctttctgagcagtttgagagggactgtggcttatctggccttgagaacagtgtctttattaatgcagcctaagagtacatttttgcaaacccatcacactgcctgtattgaatcaagaggctgctggacctccatgtactgaccatacaggacctcacatttgagcctagtaaacttgactatattcattttggtctatttttaaccttgtgagaacttttgtaatcctgtttctggcatccctggtgttgtgtttttgtaccaatacagcttctggatcattgtctcaatcattgataaaaatgggcaaatacagactttctgtccagagtgataatcatatccattacttttgctttagataagagtgttgctgttgatcatctttgcctgggaagttgaatgataaagccagaagaaagcatgctttctgatcattgtaagttttacttttaaggaaagagactaaaaaaatttagcaggaaatttaaattttattaatatcatctcatatactttagaagatctaaaactgttaaaagaaacaaaatggtttacactggagcctggttataacctttctttggtagcccatagctgtggggcccatagctttggggcccaaagctctctttgatttgagtcagagaccttcccatgtgcccaggaattttgattatggcaggtgatattatcaagtcttcatcagatttggctggagggaaaagctgtctgtcaccaagttgtgtgaatctttgtattgctaaaaaggatacccgggcagtcttaaaactggtgccttatgttatttgaactttaaaatattgtgatgttcatgtttgctcaggctggctactccagttttgttacaacatagtgctgctcagaccatggttgaaagtttgatgctaaaaagcacagtgtatttgagcatagtcaattctaaaaaaaattttgttttctttcttccttccttctcctttcctttcttctttctgtcttgaaatctgtggattgaactttcccacccctggaaaaacaactcagaaagtatatcatgtgtcatcactatcatcttccttttatcagtgcaggtttatagaaagtgttctcatatcatcctgaatcatttctacaaactataaaacaaaattaactttccattacaatcctaacaattgtaataaatgctcctattagaagcttttacttccatcctgtgaagtatatcatgctgaggggaaagttgcatcttcattagtcacccatgacttactccaggtgttaccctctaagttagaaagagagagggcaaaataccctggtgacacatacgttttttaagggaaaaaattctgaaagcaaaagggttctctctttttttaatatgactagcaaaagagtgttgattaagatgtgtcaagcaggtgctgggtatgtgctaaactaatggttttcagagtactgagtggctatttttaaatgtttctatatcattctcagttaagctgctggatgaaaagtacaaaaggctaaaaatatttacagtttcagtaatgtctgttttaaaagaaaccatccgcgtctatggccacaccaccctgaacgtgcctgatcttgtctaaaagaaaccatcctgtgtgatttttctttatttccatttgaaggaaaagaatattatggcttacagagaagtggttgaaagcagtttgttcaacactgaggtttttaggaaaaaatggccatcaaaaggacagtaagttgggttacaaatcatcaggattaaaaaaaaaaagttgattattattccttgtactatattattattactatttttgtattattaactgtagttccaactgaaaatagtattatctttgaaactttttgtatggagttaggagacaagttgctggtatcagattacttgggcctatatctcagctctatcccttggatatgtgatcctggataaattgtttaacctctttgtgcctcagtgtacccatctgtaaaacagaataataatagtgccttcctgctaaggttgttgtgattaaatgagatgatgctctgcctaacatggtaagtactcagtaaatgtttgttatgcttatttttttcatttaaaaaaatttttggttaaatgaacacatttattctcttaaccatttttgagtatataactcagtaatattagctatatttacattgtagtgtaacaaatctttagaatttttcatctggcaaaactgaaatgtttattatgttttaaaagctcatttttcttcagagtcagttacacagctgtgtggacgtaacacaggaatgcaagcaccattggggcagggagtttagactcttctgttcactgctgtatcacaagtgccacaatcagcatctggcccataacagggctcaatcaatatctgtcgaatgaatgaatgaatgaatgaatgaacagtgaggcttcatttgacaaactacatgtgtgtttgaaaattatttcttaaatggtaaatccatttttatgagtgattttaagtatacatggaaagttgactcctttcggagggtgaagtgatttctaaaacaactgttttgtaattatttagcagttctggctttggtaggtcaacttttcttaaactggaaaaaaaaatagtattcttagtgtagattgcaaaaggaaagaggatatgttagatgatttgcccaaaatttaaacaggattcgctttttaaattcaagcctttttgctttcattcagatctggtcaccagacttactttttccttaaggcatatatgaatcatcttgttctttcattcagaaatcaaaagttcaggcctagatcagtatttaccaaaactggtggaacactacctttccactgagagtgcattacctttttttgagtctttgaaaagaatgtcagctgaacatggtctggaagtggccaaaactctgtgggtggggagaaaggaagaaataacctatctcccatttaaaaacctaccacctattaaataaacggcagtcttgttctgtggagtattcatttgggttatctattctgatgaacaaatacaaattcttggtagggttttcttgcttctggataaaatgcttagtgttgctttttgttgttcaatcttaggttttgtttcattttgtttttcagggtctcactctgtcaaccaggctagagtgcagtagcgcaatcatggttcgtggcagcctcagcagctccctgggctcaggtgattcccccacgtcagcctctcgagtagttgagactataggcacgcaccaccacaccctgctaatttttgtgtttgtagtagagatgggagtctcaccatgttgctcaggctggtctcgaactcctggactcgagtgatttgcccactttggcctcccaaagtgctggcattacaggcatgagccactgcgcctggcctgtttttatgatatgtattgaaatgctccaatagcattttatttttatttaaacattgctgttaggtagttggcacaaaatgtgtcttatgccaaagtttacttccttctaccaaggaaaggggactctgtctcctggactttgcagttatgggaggaagatgacaggaagctacatcatctgccaggatttttatggggccacatcacatacagtgcctgtctgtaactaagagcaagagcacatctctcctttcagctgatgtttagcaaaccctcactctgctcccatggcaaagacagtcactcatcttccaaattgtggtatcttgagtcatttccattatgacttgtcttctgaaaagtgataaaggaaaatcatcttacctagtcattttttcccattctacaagacaaagtttatctctgaatcaaagagcataaatctctgttgcctctctgagataataaaatatttttatatttaaattttctgttaacaggaaaatgtataaaaccttcccaaatttttaactccttcttttgattctatacctacataggtttttatttggatttgaaaccaaataaaagaccgtttcatggtctgggcccttgggacagggtagtagtgaagcagccagttcatttattcttcatctgccctgccatggcttcctgttgcactaagaatccagcctcctccccggagttggtgggagtctgctgacctggccccagccaggctctctggcctcatgcagccattttcccttcattgaccccataccaccactgtgaccaggtgcaccaggctcttcctgaggctgcttttctccctgaaatgcccaccccacctcccacttttcatttttctaactctcgttcatccttcacttgcattttaacatcacatcctctgagaagccttccctgatctccacccttaatgagcaccacccagttgtccatactttgctttctcctttctttcccagcccttattagaattttaatttcatatttggccatacatttgtttctttaatagttttctctcccattagtctatgagcccattagggatcacggctattttgtctgctgtatgtaatatccacttcctagcaagcaggacacactcaaggaagagttattgaataataatttaaaaatattttttattaaatgaaaaatataaatatccaattctaagaatgtgcaattctgtcaggagtgttaagtactgaaaaaacgacagcagattagttaattggttgatttcacaaacatctgtagattgttgacagtgcactatgatgtgctgttctaggtgctgagtacatgtggacgggttgttgcctggctttgcagaggtctcaccttggggagatagcaaagagacacaatgaggaataaaattagtgcctttctctcaaggagcatatgtattcattcatgtaacaaacatttgttgagcacctatgatatactctaagctagaagacacttgaatgtgatgagtataacatataagagagtaaaattaatctccaagaaagatacagaatgctgtagggatgaagattaagaaatgctgtctgattagggacatcagagagcatcctggataaagcagagaccgaagtgctacttgaagaatgggttcaactttgacagctgaagctatgagggaggaaattctaggcatgggaaccacttgggtaaaggcatggagatgggaagacattccagggatagctattaaccctttttaactgaagcatagggtggatgatggtgaataagaagaaattagactaaaaaagtaggtagaggctatactttaggggagtgaagaattcctctaagtttagaaaaagttgattttaattaccttaaataaggcagtaatggtactaatattgctgtttggtagcccttaggaaaatgatacttgtgacttggtacagtggctcacacctgcaattccagcactttgggagattgaggtgggaggattgcttgaggccaggagttcaagaccagcctgggcaacatagcaagaccccatctcaaaaaaaaaaataactgtacatggtggtgcatgcctgtagtcccagctactaaggaggttgaaacaggaggatcacttgagcccaggagttagagattgcaatgagctatgatgaccactgcactccagcctgggtaagacaccatctctacaaaaaaaaaaaaaagaagaagaagaaagaaattgatacttgtttaaatatattacatgtcaaatgtactacaacagtcctctccaaatgagaatataaagagcttcatccttgtaaactgcagtcatgttctcgttatagtggtagttagtatgcaggtcaataatttatatgtggtctttagctttgtctttttcattaaacagtaaaaacggtaacctgacatttgaaggtttttttttcacatttgtaatatcaaaaacttgattcgtaacaagtatcgtaaatttacaagtatgtttttcatgcatattttaagaaaattttcataggactttaacgtcaggtttcttttgaatacttccacatgctctacctaacaattttagtgtaaagtttcattttccttatcaaattctatgtaagtgagacattggtgttttagccaaggtaccctgctttatggagtatctgtgttcctagaaaatttgttttgaaatatgattttgtaaatcagattgtattgtaatatacttggtgaccttttgcttcaaatcaccttaaaataaattcatttatattatctaattcatattttataaatcctaatttttatatgtactcatttttcttgaattgggggtaattctacaaacaataaacaaggtaaatgatttttttttgccagtttgtactaagagaacatgttattttgtttcgggtgaatgtatgtatcttaatacactgtactacattagacatcaatagggaggaatgtaacgcatttttcttttgtatggaaatctgttgaaacctatcttaaagagttttgagcagaaattgaaggatgagcctgaggttttctgattagttggagaatattgttttcagtagacaacagtaagaataaaagtggaaaaattgtatttaaaattgatgttttataactttcagaagttgatgtctccattttacacattatacttataaaagtacagtaatcaactctgctttataactgttttgtgaagattatttaaaggtcaagggagtgtagtagaggcacagaaaaacagaataaaattggaatcctagagtttatgtgcatttaggttaattttgacttagtggctcctggctctcaccaatctgggttgagtgaaggacccactgttcattgtgttccagcagtagtcactcagacccagcttgccacgttatcagtccaacttaacttctgccacgtcccactcctcctcccttgatagcttctcttgctgacatcctttccacccctttgtgctgcattcctctggcactgccagcctcctgtcatggaatgagggtctgggccaggagacctttggagaaaattcctggagagcaagttttcatagatttttgtccaattttttctgtttccaccctgttacaaatattttaatccaaatatgaaaaatctttaaattcagacttctcttgtttcaaattcagacttctcttgtttcaaattcagattatttctgatcacctcatagctagttcttgaagttcatcttagcaggaacagagctaactaaactactgaatgatgtaaatgaacatataaaggctatgtttacctacttaagaaattgcttttagccagtttagaaatgtctgcttactcttttgtttttaaatttaaaaaattcttcagagatgggatctcgttctgtcaaccaggccggagtgcagtgccaccgtcacagttcactggctacctcagcctctggagtagctgggactacaggcacgcaccacaacacctggataatttttttaaattttcttgttagaaacagagtctctctatgttgccctgactggtcttgaactcctggcctcaagtgatcctcctgccttggcctccaaaagtactgtgattacaagtgtgagccactgagcctggttgaaatgtccacttacttttaaaaatgaattgtattttaaggaagagtttgcaatgcttaaataattttcatcagtttacttaaaaagtactaaagcctttttttttttttaagacagaatctcactctgtcacccaggcaggattgcagtggcatgatctcagctgactgtaacctctgcctcccaggttcaagcgatattctcccacttcagcctcccaagtagctgggattacaggcacctgccaccacacccggctaattttttgtgtgtttttagtagagacagggtttcaccatgttggccaagctggtctcgaactcctgacctcaggtgatctgcccaccttggcctcccaaagtgctgggattacaggcgtgagccaccacacctggctaaagcctatttttaaagcataatttatattaggtattgttaatccttcacggttcttgtttggttaatttcagcagcttaaggaagatcacttggagctagaaaggcccatgagggtgatgatggctcagagggggcaatagaagcagcttttagggaggagtcaagtgcagtaggtaaacatgggatgtgtcagatatgataccagccagtggtccccatagcacaggcagcaagtgtgaggcacagcacagagcacatgtacacgagtatttgtgtgcgtgtgtgcgcatgtgtgcgcgtgtgaaggggggagggggtggttgctgtcaggtgagcaatatacccaaatggagaccccagaagcagctgatactaatccatccaagtaggcagcagtgtctgtccatgagaatgttgggcccagccattatccaaggattctagaccagattctggagagatcacagcagagtttctgcttgacttcactgagcttcagtgtttgaatctgtaaaatggaagcagtaatagtaattacctcaaggggttattttgatggctaattgaaaacatgtatgcgaagcccttgaataccatctggtacatagtaagtatttagtaaatgttagctattactgtattacatgaaattgggaagacagtatttctttttaaatgtcctataaataaccgggtgcagtggctcatgcctgtaatcccagcactttgggaggcccaggcaggcggattgcttgaggtcaggagttcaagatcagcctggccaacatggtgaaaccctgtccctactaaaattgcaaaaattagccgggtgtggtggcacatgcctgttatcccagctactcaggaggctgaggcatgagaatcatttgaacccaggagatggaggttgcagtgagctgagatcatgccactgcactccagcctgggcaacagagcgagactctgtctcccaaaaataaaaaataaaaaatgaatgtcctatgactgaggtttattgctcctcaattgagctattccaatcaatgaaattttactacataaaggtagatgccttctaatggttttcttcccacagggatggtggggtgagatggggaactgttcaggtagtagacctgttcatgaggaaaaaaactatttaaatgctgagaaaaggatgctagcttttttggatccatcatcatttttgccaaattcatagaatttttggccagtggtgtcaaactttaaaattcataggaaaaagagattcagtaattactctgtaatattagggagggtgtggaaataaggaatgaacgttatgtaaagaccataatgctagtcagagaatgttccaatggaaaactgatgtttccttctgccaccaggacaaaacttttgtgatctaaaggcaaaacaataacaaaaacagcaacagcaacaaaaaccagcctaacagtcccaagtggtcttcactgtcatgattattaagcattttctccaaagtctgaactacagtttgttgaggtttcattgaaaatgatactaaaacaaatttgcttaaaagtaaaatggagttattggcatcacaaagatcatagtcaccttcttaagaattgcataacctttaatgactgtaaaggatttttaaagacgatccttgcgactagttattaatacatttttttgaggctgtggaaatcagataatttgggccgggcacattggctcacgcctgtaatcccagcattttgggaggctgaggcgggcggagcacctgaagttgggagttcaagaccagcctgaccaacatggagaaaccttgtctctactaaaaaaaaaaaaaaaaaaaaaaaaaaattagccgggcatggtggtgtatccctgtaatccaagcgactcgggaggctgagacaggagaatcgcttgaactcgggaggcggaggttgcagtgagccaagatcacgccattgcactccagtctgggcaacaagagctaaactccgcctcaaaaaaaaaaagaaatcagataatttgcccaaagtcaacagcccaaagtcaacaactcctgaattttttgatcacattatctttcaagtttagttagaacctgaaagttaactgtccttcacttaggtagatcataaataatgcactggtcacattgtgtagatattaagttacactttggtagatggatttttagatattgaaaatgatagattggtacaactgctttgaaagtttggcagcttcttataaagctcaagataggcttaacgtacaattcagcaactacgcatctagatgtttacccaaatgagttgaaaatttatgtctgcagaacaacctgcatgcgaatcttgatagcagctttatttataactgtcaaaaactggaagcaactaagggatccttcattagatgaattgataaactgtggtacatccagataatggaatattattcagcactaaaaagaaatgagcaatgaagccacagaaagacacaaaggaaccttaaatgcatattgctaagtgaaagaagccagtctggaaaggctacatactgtacgatttaaactatagaaaaggcaaaagtcaaaaccatagagacagtaaaaagatcagtggttgctagttcagggaagaggggacaggatgaacaggtggagcacagtggattttaagggctgtgacactattctgtatgatattgtaatggtggatagataggtgtgtcaaaacccatacaactgtgtaacataaagagtgaactcttatgtaaactatattgactgttatgactagttaatcctatatcatcattggctcattaattataacagatgtaccatacttgtgcaagatggttaataacaggggaaacggggaagagggaacttttggcttagtttttctataaacctaaaactgctctaaaaaatagtctactaataaaaaaaaaaaaagaaaatcaggatagattgtagcttagaaataaaaaaacaatactccaagacaaaacaaaacaaaagccttgtataatgtctttcatataatattccccaccttatttctctagttgttttttaatttttttttcatttatcttatgtgttatctcatcaacctttagtaacgggcagttaaaaaaataagcagtttggcaacttcctgtggcatacatttcagattgtgagcagagatgcccaccatgtgactggcaggtgtccctctccctagccacaccctgtccctcttttccacctaccctagcattagttgtctcctaccttgcttttgacaacagacagggtgaaaatgtgggcttgtggccattgtgctaaatgttttatttctatgtattttttaatccttacagcagttcccattttgtagatgaggaaatgagagcactggaagagaggaaattcctacccttgcagtctgactccattctgatcctctatcaggctaatgtgaacacacgtgactctctgtcccagcctgccccctgttgagtaggtgggagggggagccatttggaggatttggtcccagtccaggtgctatttaagtgagcggttgattttagctgtggtgaataccaccaccctacaggctagtgtctgccattgagaagtatcatctcatcattttcaatctattaagtgatacattatcacattattattatacatatatattattatatattatctggaaaccatataactataattttagtcaactcttttttttttttttttgagttggagtctcgctctgtcacccaggctggagtgcagtggggcgatctcggctcactgcaacctctgcctcccaagttcaagcgattctcctgcctcagcctcccaagtagctggagactacaggcgcacgccaccacgcctggctaattttttctatacttttagtcaactcttaatttctagcctcatattgacaagtgatagggttcaaaagtaatatctgttggctttggaaataatattatatttagtattatatttaatggaagttagcagatttagcttcttaataatgtttggctggaggcagtattaacctttggttgctgtcttgtggcctgcagatgtttgtaatgcaagagataggaatttggtccctaggagggtaaagctaaggttcactctaagaaagccacaaagcagacagtctacatgttgaggattaaatgttgattttacgtgggtcatcatttttaaagtccatttgccttcttattttgtgatgaatatttaagattttgaagtacatctcctcttatttgctttgtagttcttatgaggaagaattcccattatagtggggctgaggagataaccattatttttcgttatgcttgttttcttaatatcgtaaagcagacaatagcaggatatttaatgaaatacatcatgaatttaatcctagaccaaagcaaagtattttcaagtatttttcattttcacataaattatattaaaattcatatttaagttaaaatttttgagacagtttacttgaaacatagtagcattcttcactgatgttagaattactttataagttattttgcatttcttaggaggcaaaataggttttcaaaaggattaacatgtgttaaactttttgatatttcattaaaaaagatagtattggaaaaatgcagtattttttcatttacttccaaatgttttgtattaaactttttttgacctagtagatgactagtacaaatagaacttttaaagattaggatatacctgttacttgtaagatgaatttttttaatgcttaattcaaataataaaatatatctgtttttgtattttctgtaacaatatagaagtagttctcagatttctttttctataagatgaatttttagatctttattttacttggcaagtctaaaatagtggtggttctggggttgattcatgtgttcgtttttcctactgtttggctaattcttgtatgtggttttaatttttttaatagcaaatatatatttctgtatgtgaatagtcagcgtgtgtgtgtgtgtgtgtgtgtgtgtgtgtgtgtgtgtgtgtgtgtattcccccccccttactatggagatcatgcatgtcagtgctgagcttggggaaaacagaaaaacaaacgtgacctttgatcccttcagagataacataatctcttagtcatataaagataaggtccatctcttagtcatatagacgagatttatatcttagtcatgtatggctatatacataaatatgtgcatattgccagagattattaaagcatgtacatgcatacataaataatttttaaagtgaaaagagaatcctcctataacaccttacagggtggctatgttcttttaatgtttcatggggaccttgctgtaattttagagccagcacctggctcaggttcacccatgacattttcagctgatctttcgcttgttttctagttgaccttcaaacagaaagttcatagcctcttctcagctgttaatgtgatttacttcttatgtctgggaagtcaagattgttgctgaattcattgttttaaggggattgaggtccttggtttaatgccaggacattcccagctgacagaaaactaaatccgccaaccctaatttcaaagattaccaggtttgtggctcgtggacatcttagatcctaggtcgagcaactcttaggctgttcctggcacaccacatacatatggggttgtgtattgattttaattcaagtatcattttagcattgattggcaaacaccctagtggctttcagtcagtaaaattcagtgcagcagctaacctgctgctgctcctgccttaaaatcagtatttgagttagtggtcgtttaactttgcaattttgactctgtgttaaaatgtatactttttcttaattttcaaaataggaagtgaggtgtgctcttcaggttcttgggctcacagcagggaggttatgaaatataaatgaaaggagacactagatgagctccacacaaggcagtatcacaactcactcccccaagaaggaagcacatcatcatttcttacaccgtgagaaacagccatcttgtcacaggaaaatgagattgaagaattagtctgattaaaaacaaattaccagagttgctgttcagttaggtggcctgcagaatattagcagctgtggttggaaagccatcaggagtttctctcaagcaagaccaagctggtttccttagatccctgtcttgtgtcccagcctgttttatgccttcaccaccctcactttagctttttcccagtaggaaacaatggcaaggtagaggaagagtttttaaattcattcttattaggagtgagtttttttctttgtagatattagtaatctaaaagtagaagtagtgtaaatattttttacagcatataattcaattgcacatcagcagttgcgctatctgtatatgcaaatactctaagaaatttaatattttatcaaaagccacaactccaaaaatgaaatctaatgacttgtttctatggtaaccactatcgaaatatgtctagccagtgtgtgtcttcccataatttttctctaagagtttcagggagttcattaaatttgctttcccaacatagatagatgatcgatcgatcgataagagagaacagatacatttttccccctaatggggttatgagactattataaaattctctttagcttcgtatagagtatgacttcattcttagacatgaatgtatttggctaagggacaagcctattgttttataaatttagtttaaaccagtaataaagccaggttagtaataatttctaaaacgagattaatcttgcttcataaatattttctggtatttatatatggaactgttggattgcacacacattgatttctagaatgacccatgtccttttaaaattgaaattcatttgctgttcctttgagaccttgttagatttctttattgctcgtccaccgttgtctttgttatctaccagggcgttgagtgtctgtccaccttgatggagttctgacctggatttgatcaacatccccttgtggcctttcttccttgtcagaggttgtgtgctgcaaatacaatgaaagtcacaacttatttatttagagatcttgacatttcccagcaggttcattcagaaaagctgactacagtgtttccagaggtacagaagagattccattgcattttacatttaagagaaagtaaactattggtttggtaaatttttcaccagtctcaaggcctgtcatgtcacaaaacaaacagatgtggtcagatattctagtgatataagtgtgcattcaccgtgagtattaacattatggcagggttcatggaattctctggttacattcaaagggaaacattttgtaaagtaaagtggcaggaaatagatactgaggaaataaaactacactgggtctgacaacctggaactttcatttagcctacaaagttgacagacaggctaggatgtctctgaacctgttagatatggttggtcataataacatttaattgtttgttgaggagggatgactatttaacttaagggcccttcctctgtactttcaagctctcccagatttctaaaacaagagcactgggctgggcgcagtggctcacgcctgtaatcccagcactttgggaggccgaggtggatggatcgtgaggtcaggagatcgagaccatcctggctaacacagtgaaaccccatctctactaaaaatacgaaaaattagccgggcgtggtggcaggcgcctgtagtcccagctacttgggaggctgaggcaggagaatcgcttgaacctgggaggtggaggttgcagtgagctgagattgcgccactgcactccagcctgggcgacagagagagactctctcaaaaaaaaaataagaacattggccttcctgagtcctggagaatgggtttgtacaatttcacagtggaatcatggacatagtataagtgcatgtagttttcaattttaatttgtagtctcagttctttcaagaagtagctgaacagtgacaggcacagttttctatacagtgagctaaagtaagatagcttcatggaatcaggtggtttcatatcctgaaatcccagagactctcttttttgctccctcatctattgccctgtgttcaggctttaccatttctcttctggacaaacacaggaaactctttacctgcctcctgctttgcacatatggccagccccttggttcatcttccatactgccaaccaaatgttctttctaaaggcaaaactaaacatcatggcatgactttgcttaaaatcttccgaagacttctcttcctttgcaaggtgtctaaatcccagaatgtctcagacctatgtatctttccagtctactctttctgtgccctgggtaaactgttcgcttcccaagtgctttgtgctaattgtgtgaactctttctgggtcccaccatgcaggcctgaggtccctcatggctcaggtttgtctctggcctagcatactgtttctaatcgttagttgacgtgccttcctcactaaactctaaaaagcattttgagcactgtttattgcttgcttttgcttaacaaatactgagcccagcacctggcacctaggtggtgctcaataaatgtttcttatatgattgaataaatgaatgaaggaatgagttagtgatatcacacaggaagcagtggtgaaggagacactgcatttagttagtaaaacaggcttgagctgcaattaacagatttcagcaagagtgaggctggttggttgctgggtggcccccataagggcatagccctggtgaatagccacaggaccaaaatcagttttattagttctttttgagagatgtgacttgcaagaattgacttatagttaaatttatgagagattaattcataattgatatgctcatgtattcttgacaatgaaaagaggaaggccaggcagcacaactgacatgggtcatttgctcaggccacatcctgctggtcagtaagttcattcaggaggcccaatattagaacttactaaattctgagtaaatgcatcctttctaattgtctctaagggattgtccatcaagctggattacccagaagaaggattattttcttttcctatttaaaaatgtttttaaatttaaaaaaattttttagagacagggtctcactatatcgcccaggctcaaactccttggctgaaaggatcctctttgcctccacctcccaggtagctgggaactacaggcttgtgccacaatccctggcttttttagttgaagggcatttctctatagatcactgacttttacaacatccttaacagtaatcaaaacagttctacctttgtaataataatggctaattcttgaatgtttactgtgttgggcactgttctaaatgctttatctactttgacataatcttcacaaccctgtgatgtaattactattattagctctgtttttacagactgggaaaccgagagcaaagatgttaagtgatttatctctgttctaaggggtgctggaatttgaacccatgcagatggactcaatacctttgcttttaaccacacactaatcttcctttctatgaatgcaaccagcatttcttgtgtttgctttgtgtgacttcgtttaatgctcctagcaacttctgcaaattaggtgttaaatctcttttgcttgcagccgaaaaaaggtcttggttttttggttacaagcaacggactaaagcaaaaaagattttaccatgtcttatacctgagctatctttaggtcaggttgctgactatgatgatgggtgccccagttggtatggggaggggcaacttttcacaaaggaaggggagccaatgatggagaaacaaaatcacatgaagaaatggaagtttaaatgacttgcccaaggtcacccagctagtgagtgccaaaggtgggatttggccctaggctgcctctagcaccatctgggttcactctgatttgagtggaccctttgcaaactgtacatcctgctgctgctgttctttcatcagcaggttatgctatcataaccataacatgtatcattttctttattccattctggttctaagaatacactgtgaccaccttctttgaacctggctgtttcccaaatgtagtgcacattgttttatttaattctaaactatcttttaggatagttgtataaacagtttagttcatctaaaattttaactaaaatttgtactgctttccacttctgaaagtgacctttttttctgacctggctgcaaattctggagaaggcttgactgaagctctgtgagcagaccagagctttttcaggctaaggtttatacaaaacattgaccttcatggaaattctggttcttgatcacttgggtaagcaagtaagttcatgggaatgcccatctattcactgtcaactcacagccctactgtacaggtccttgctggggagcatgctctctggaaagtggcttatactttgcacttctgaatctgtttgtgaggaaatgacagtatttttccgcacttgcaccaccgactgaagcgctgatccttgatgtgtttagtttttacctgtgctcatctctacatcaaaaacagaggaagccacaggaaattgctgcctgtatttccaggaaacttaactacatcatcggctccccaatccgcacagcccagaagaccctgatgctggcctcagtgttgctgatgtgggtggtgataaggggccgagagtgttctcatcctgtggctctgccagtgaaagcctagaagagatgaagcactcttcagactaacaggaaaaccctgagtctggttctataagcacttagtctctgaacatgccgacagtgagggtgaagtgagggataattctatcccaaggctagtggtcctctttctttctgctcaggtgtgctatcttgtccctggtccatagggccgtggctggcattctctctgatcacagaaaattgaaatgatcctgggaaaattgtcacatgagcctgtggatggggtcaggagagataaagaccataggatttacactggccaccagcagttcctcaaagaattataataacataattgtaataccaatcgctgatatttattgagcattgactttggtgtgccaggcattttgtcgaggaccctatgagcattaatgtaatcctcacataaaccccaaaagggactctttattattcccaattgtcaggcgaggtacctgagactcatagagtttgataccttgtccagggtcatatagccattaaaggatgcaaaacttgaacctaaatctgtgtcattctaagccagcactatacatagtcaagtaggttttactggagggtggagtggggctggcagcctgtgtgcacaggcagacggaagcagacaagatccatccaaggcaggctgaagacttatacccagagaaggctttggtgtacatctgccaaagtgatattctcatgtagaagaaaggattgggtgatagtccaataaatactttaccacagggaacttatgtgtcttctggggtctggccaaagtcatgagtgcaagctcccaaataaaaaaaaggtggcttctcacctcctcatgatcccagcttcctagcatagcactcttctctattttagcttatcaattccaaatgtgattgaaacaagtatgagaaattgatgttgcttcagcttctctgtgaactgaaacaaattcttgttgaaacatgatatctcctgcctcatggatcaaagagggatggtctggaagagaagcccccataaatatttgaggcttaatgaaggctatctgttgaataatacacctgtattattgtaaaaagttttaatttggcctcagagatactccccactaaagcagacaacaaaaaagtgagaaaatgaggctaggaattaataaaagatgtcaagaaagaccatttaaggacttcttagagacaggccataaatgtggttttgaactttttggcagctattatgaagacggaaagagaagtgtcatgggaatcaattttcaaaacttaaaagttctcttaaaattctagcagaaaaatagtttgcagctctacacaggtattggctagcattagtttaaagtggttgacatgcagccctactgcacacctctttatattccctttgtgtttaggattagaaaaactcacatagtatgatctatcatatgtctacttctggattatttcaagattgataatctggtttgtgtattatcttggtcttcatttctctttccttctgggcctgttgttcatctactggacatttcttttcttattaacatttctgctaaattttaaacagagaaaagaaaaataaatacacaattccagctatttgcagaggtgatttcaatgctttgtcagctaaagggaatttcaagagagatctttctacatcagtctactcataatagaactcctggctatcttgggttgagcctgcctgcaggtgtgcttaacctgggccacagattaaggcaggtaagggagaaacacctgcagaggtaggttttgaccccattatacctaagatgaaggtcactccttgtgaattgatatagaatgtgaaaagggtagaaactgctgattaaaacaaagtgttttgattatctggatttcagtaataagtgttttcctctcttccagttataaagagttgaaaaccttgcaaggcactcttgtataattgtgtccttaaaaggtttagataacggttgggcttctctctctctctctctctctctctctctgtctctctctctcagaccaaatatatcatgtctattgaaagtctgaagatcagtacatttcctcctgtttggaaaataataatgcctaggtttcactagaattctttttatctccaaggctctcttaaatattgactaattaaataaaaactaaggaagtctagctaaatagcctcactttgaggaccagcccagtggacttagaatacacagtgatttgctgtatctctgaaacaagcaactagaaatcttttattattggctataatagcaagtggcatctcttattatgtttggcagctgacatttcaaattgcattttggttggttgttatacatgaaatagtaggatatgagtagactaaaaatgagaatttgcagcccagggatgacatgaaatatctaacatctaggggttgccatgacaactcatcagaaagttgctttgtaatcttttggattaggctctggcccagggtcactggattggagttggagaacgctttggtaacaggatgtgaatgttgtacctttactcaatggcatttgaatttgcagtttggtcatgttgctaaggtcaagtagaaatgacattgagggaatttttaaattcccgcagaacctagacaaggtcacatttgtcagcaaaaatactcagatggaatagtctgagacttagcaactgaaagacaggatttcctgtccttgatagataaaaagtatgcacatatccatttatatatgcctatctctaaacagttgtatgtaatgaaaatttgggaaattaaacccttttcataattgtcttctgttataaaattggaactgaacacccctaagaaaacagtttggccacaaacaaaccacagctgctttctagtgctctgtgtcctccctttcagctggaaatggcctgcagggtgtggaatttggaccagggaagggaattcggcagagagaggaaggaagcaattgggaaacagggtaccacattcctcatcccccacattggccttgaccacaaggacagcatcttccacatgataatgcacctctcaggcatgcttctcaccagggatgatcaatggaagcaacctggaaactaaagagctctgttcctaagtctgatcccagttctgccactcacactgtgatcttgagcaaaacacatttcaactctgggttcccctaggaaatgagggggctgagtttcctctggctgtcaagttctgctatttatcatcatgtgggggcagagccaggtctccacatcgcttttctttgccattaagcccacattcccatcataactttgcagtagaagtaccgttcattgttagtgggacctcttaataattaaaagaaagagaaaaaatgatttattcttatccccataccttttaaagttgtggttttctgaagcaaaggctgccatgcagtgaggaaaggatgaaattccagacagaagacagtcagttgcaataagttgtcctactaccagtactgtcagcatcagctcagcttatatttactgagtattttctatatggagacagtgctaagccctttatatgcatcaaactgtttaatccttaggacatattcacatgtacacatgtataggtatgatgcatgtgattaaaattgaacatttgctatgtaccaggtgttatgccaaatccgtacaataatccactgagatcaataaatggattcagtcagtcaagcctcacaacaaaggaggtgttatcagttatctccgtttttacaaataaggaaactgagccatagctagtaactagtggagcagggatttgaacccacgtagtatggcctcagcatcctttctcaaaacctctctgcctgtggttctcctcactcatatgacataaccacacctggggaactttagaaatataaggatcttggggccccattctggatcagtcagaatgtcggggattgcgtcccagacccaggtttgctaatatgcagccagggctgggaaccactgcctcagatggaataccagggttatgttgttggagagttgcctgtagctctacagccagcagatgactgacctaggacttgcatccaggctgtaggctctcaagccaaatatctcgacggcacaatgggcaacaattcagttgttatctgggctcatatctaccaccatgcctagtttctctctcctagtctaaatcgcaaagccgcaagttcatttagggctgtttaaagactgtatgctacaccaattatgagaatcagagcacaaacttcttgttgcagccaaagcagtgatttcctacttaaaagtttcagaggtaacctttgcttttacctgtcaccaacttaaatgtaagttatcgtgctttttcctcattgagcaaaatcttgtactgacagagtctaggacagtggttctaaaactctgatgcacattagaatctcctggggatctttaagagctacagatggcctggcttccaccccagacattttttttttctttttttttttgagacaaagtctcgctgtgtagcccaggttggagtgcagtggcatgatctctgctcgccgcaacctccgcctcccaagttcaagcaattctctggcctcagcctccagagtagctgggattacaggcgctggccactgcacccggctaattttttgtatttttagtatagacggggtttcaccatgttggccaggctggtcttgaactcccgacctcaggtcatccgcctgcctcggcctcccaaagtgctaggattacaggcgtgagccaccgcccagcctctgattttattagtatgggatgtgacctcggcaatgggagtttgtaaagctctccaggtgattctgatgtgtagcagagtttgaacagtggtttaagaacttggtctgtgagttcacagatgtgttgacttgagaagactgtggaatcacctcatggatagaactcactttttaactctctgacagtgtctcttgcgtttcagctggcaggattaatttgagtttaattccacccatttcactacctgacttggaattgtacctcactgtcaaatgatggtttctccccaaaggttgttcttatacttaggctcatgcagtgatattggcgacatgtctgtaagatccctttgtaaagttctcagcctcatttgactctcttatttccactatagaatatttctttttatgttgttttaccttttaaaactgttttttcttgagacagtgtcttgctgtcacccaggctggagtgcagtggtgccatctcggctcactgccccctccacctcctgggttcaagcaattctcctgcctcagcctccagaatagcttggtgtgccaccaagcctggctaatttttgtaattttagtagagacaaagtttcttttcactgtgctgcccaggctggtcttgaactcctggtctcaagcaatccgcctgccttgacctcccaaaaagtgctgggattacaggcgtgagccaccacgcccaacctaaaaacatttttatgattttaatacatgttgctttttttcttccaggagcaaaataaacacctcttccacataatgcattatagtaataatccacctatggttcttttcccaaaatggctgaccatcagcctcactattgggagacagcagctgatgtgcctgtagtgtttaacggctgatagcgtcttacagatagatagtgatatggtggaaagttggagattatgtaaagaagaattgactcagactttatcctcagagattttagtaaagtcagattaatgtaatcaactggaaaatatagatggattataaaagtatattaaagcagaagtgtaaatttgttggcaagtttgcaaatgtactggattaatctagaaatcatttttgcagtaagtcttaaatagatttttaaacagagatgttattttgtggataaaaagagacaggtaatttacaagtggaacaattcttgataaaggctggggatggcaaatggagtgttgcaggccactaggccagctagctaggctggtatgaaaagtataaactgggtgtagcagttaatgaggaaggattgctgaggtggatagagctagctattgcatgagatttaataccaagaatactttggaagagcttttttttttttaaagggatatatcaggagtttctgttttcctttatgtggttgttgaagtctagttgatttctagtctgtaattttgttgatatttcagatcaccaaacaaggctggtaagatgggttagttatgcttctcttgaggataaagcttttgaaattaactctgcttctttaggtttaagaatttctaattctgtctgtctacatcttgctgctgtaatctccaagaaaagaaaaaggggttaggatgcctctcttttgaaatggaggggtcagagcaggcagggggctgtcactgttgtttctctttgttcagaaattagaacatgtgagcaagtggttccacccctcattttgtgagctgttttcctctgatatttcctaatttttcccatgacgttttagcctgtttcttcacaagattgtaaggcctgaaagaccccattgtttgacaggagtgcaggcttgtgcacatttgctgatctggctgcccggggtctgagtgtgggtggtataccgcccgagggatcatgcagacgggagaatgcgtggagcagactcctggtagttgcaaacactttatgtgtattaagagttcatagaatgtctttttgtagacagaagatgctgcactttgaaaatgttattcacaaactgaaatctcattgacagaagtagggatattccattaggctaagaaaagtttcttaatggcaaatcaaatggatgaaggccttattcaaacttcatttcatcttcagatagattcaaacttttattcttgcagttcacgcacattccttgatggcctgtcttggatttatgtgagcctttggagcagcaatctcacatactatgcatggcaaatcctagtcaatgcatactttttgagagtgcaagatgttaattgtagtaagagaagagaaattcaataacaaatgtttttgaataaaggaagctgaaatttaatactaatggtgttttctctaaatgaagttaatatattattgttgtattaacttttcaggagtttgaggctgcaatgagctgtgattgcaccattgccctccagcctggatgacagagtgagaccctgcctcttaaaaaaaaaaaattctaaggacttgggctctgtgtttgattgacagtaatagaccaatagaagacattgcatttatatagacttataaaatagcattcacatttccaatcagatttacagaattctcccttatttttaaatgttctcagtggtaacagtgacgttgggactagagtcagtattgtgagtcgtttatgcacatctcttcacaactccatgttcagtgagtcatactggcagcttgaaatcagccatggtgggagagtttacaccatggaaatcaaacactacaaattggtgctcctcaccctcagagtctgtttttaaacatttagcagcataccactgcccaaaatggagttgagcagtcagggagtctcctcttgaggcaagtcatgcagtgcttccactcaaccaaacagccaacatgaacattttgaaatgtaggctgtgtggctcctgaagaaaagtccttcatagctccacatttttctgagccaaagccttgctgtgatcataaagctattcatgctgtggccaccaccgtccgtcctcctggctctcacctccagatgcctggtttcacccctttttctgtagaacatcctagacccactcctattttagggccttttctgtagggcagtggttctcaaactttacagcacatcagaatcacctggagagtctgcaaaaacagaccactgggtgcctctctagcatttctgagctagtgacaagtttcagggtaatgctggtggccttaggaccccgcttggagaaccactgcttgaactgatggcctcttggtttacctctcccctccagatctctgatcctctttttctttctctcagtaaggcacaccctgactatcctatgtaaaattgcagcctttctcctccaccacagttctaattcctgactccaatttttatttatttaagttccaggatacacgtgcaggatgtgcaggtttgttacataggtaaatgtgtggcatggtggtttgctgcacctatcaacctatcacctaggtattaagtcccaaatgcattagctatttatcctgatgctctccctccccacccccctctaacaggctccagtatgcgttgttcccttccctgtgtccatgcgttctcattgttcagctcccacgtataagtgtgaacatgtggtgtttgcctgactcccaatttttttcagtgcacctgtcacctgttaccttacaacaagtttcttatttgtgattatcgtctgtctctccccactaactctaaatttcacaaagatagggaattttgtctgtatttttttaaaaaacagggtatcactccaattatccagactggagtgcagtggcatgatcacagctcactgcagcctcgaactcccgggcctgggcttgggtgattctcccccatcagcctcccgagtagctgggactacaggcatgcaccaccatgcccagctaattttttgtattttagtagagagttttgccatgttgcccaagctggtcttgaactcctgggctcaagtgacccacccgcctcggcctcagaaagtgctgggattacaggtgtgagccagcatgcccaaccttgtttgttgttgttgttgttgttgttgttgttgttatgatgtatttcaagcctctagaacagtgcctcgtggcaggtgctcagtaaattgttgaatgaattaatggatgaacaacattgagatatgaataatgtatttcaaattttggtcccagccttttaaattctaactcaccagagaatctgaaaacactttctgcagttttgtttctcagcttcactgctcttaggataatgaggaatggtttctgccctgggctgaagtttgggaatgacttgatgagccttaaaatagcaggtgcaccaaattgttgttcttccatttacattttaacctcaaagtccctaagccagtgatcttcaaactctggtctgcagaagttccctggagatacttcagaggctctgcaaacatctaatttgcatttcattttaatatattttaaactatgttttataactataataaaagaaaatgcacacaaatgtgctacctaccaaattttaacacattaggaccaccagcacattgaattggactgccaagtcaaccttgaaatagtgttttccactattttggcttacatatttgaacttcttataaataaatgaatcattgattaggaacttccatcccagtatttttcatattccagcctgatcataaattgaacaggcaaattcctcttgtcacacatattcagcacacttgatgacatgccaggcagcgtttcagagcctctgtgggatggaggcttctgtgtggattaatggctagttgtacaataagtgaacaccacacacatcacttagtgatgtacattctgttagaggatcatgtctacccactctacattttggatactcttttaccttaaatagttgtcaaattatcattagtgattaaaatttgaaataaaatcttgactgctgcattttctccaagcttttagattagttttgaggcatattatgagattatcaaatgaaatgctaaagaactgttataatttccaatacaactgtgccttacaattcaaatctgctcatttccagaattcaggtgccaaaatttcccattgtaaattccagtgcaaaggaatttgaacttgttatgttcatgtcagcttcgtttctcagtttcagatagtaagtagtaagagtagcaaatagcgagagatttgtctgaaaatttgagttttgagagcagagattcagatagtgttatctgtatttaggagtatcaggattctcttaatacagtgagtgcaaccaaatacagacacagaagtaaatcatattctggatcacttttaaaaatcaattgaggctgagcctggtggctcatacctgtaatcccagcattttgggagctcagggcaggtggattgcttgagtccatgttttcaagaccatcctgggcaacatggcaaaaccctatctctacttaaaaaaacaaaaaaaaaattagctgggtgtagtggtgtgcacctgtagtcccagctacttgggaggctgaggtgagagaatcacctgagcccaggaggtcgaggctgcagtgagctgagatcacgccactgcactccagcctgggcaactgcagtgaggccctgtctcaaaaaagtcagctgatagaagccttactatctgaaagccccactccatctcacaagtgccattgaatacattatatgaaacagttctaagttatacattatggaacattttgtaggcctctttgcatatctgtttattaatttacttaatgctctgttgtaatttgttttgtctcctacactgtatttgagctctttgaaagtaagaattatgtcgtagctttgcttccccagtgcccagcgttgcctaacatgtggtgggtactcagcacatgtttattaagtgttggaagtaaatgctcggtgccaccaagtgaaaatagcacccaggcaaaagttttctcagcaaggcaatttgcttctatagaagggtgcgtctcatggatggagcaatggcgagagcacactggacaaggaaggggaagtgggtcttatccttaacgcagctagtccctactgctgtgtctttcccctattggctagggttggaccacacagtctaagctaattccgattggctgttttaaagagagcaggggtgcgcgccagagtggcgggttgagtagtttcggcaggaaggactgtttgagagcaggtgacagaggatgactaaggacagtgcaggtgactaaggatgactaaggacagagcagttgactaaggacagagcaggtgactaaggatgactaagagcagatgatagaggctaagagggggttgtttactgaaactaggggcaaggagacataaagaacgaggaagttttaaactttaaaatggagaacaaagaacaggagagctgaacatgctgaacgtaccatattggttctttgaagaggaatttactatatcctacataagtgacactgcattctactgcagaaggaagcaagctcaaaaggaacaatgaaacttcatattaaatacacaatcagtgagctttcattctaagcacaaatttcagcatgaaaaaaatgtaatggttctgtgagtccttcacttgatccctcacatacagtcttctaaagttttctgaattccttttacaagtatcttctgactctgactcttccatgccatcctacttgctctgagccttgttcttctctgtgtcccttgcatggactgtggaagccacctcagaagccttctcccagacccaatgtttctgcttcttcacattgttgccattgtctcatgaaataaaaccaagcatatcctttggtctgcactgcctgcaaaataagggctaaacctgtgctttccaaatataatagtcactagccacaggtggctgttgagctcttaaaatgtggcttgtccaaattgagatgtgccgtaagtgtagaatccacaccctgtttcaaagactcagtatgaacaaaatttgtaaaatagcacattaatactttttatattgatagcatgttaaaataatacttttttctataatattaagtaaatttctctctttttatttgtttaatgtggttattaaaaagttttaaattacaggtttagttcaccttgtgtttctgttggccagcactggtctaagctatatcatgacatttagagtttcttataacctggactcagttacctctttggcctcatctcccagcccttcctgtcccttgcagaatttctcataacccccagactcaccaaccctgtttatacttacgggttttaatttttttcacattcagtttcttctttctgaaatgtccctccttttttaggtgtcaaaaatcctgctcacacttttaggacctgacttaattgtcccttgctggtgatgtcacgccctatttcctcaagcagaattagccactccttcccatatagtgtctctcagcacctccattattgcatttgtcttgctgttctgccattaggtgtcgtcttaagtagactcctcaagggaaaggctgcaacttatttctctgatgaccacagggcagtacctcgtgtgtagtaagcacttaatggatgtttattacattaacttatgaactaattttcatcctgctatacacactgctatttttatatacatcagaccttgatcatcttaaccattggccatggaaaaaattagatgctgaggtgtataggactggacctttcagccttaacctcaatttcaggttttgtgttcaataaaatggcctcctttttctcactgggtggcttatgattaaaaaattataactttgaacttaaaaaatccatgaatattgtacagactaaaagtataaaaggacagtataaattactgctttttacctatcttgcttatagggatttcatataagattttgtttgattgaagatttcacttcagaacaagtttggaaagctactgttctattcctaaatttcatttacatttctataccaaaggtttcatttttattttgatgagatggtttctactatcatgttagttcacataaggcaacacttctcaactttagttgcacaaaattgggaagcttttcaaaaatacctccccactcagggatccttgtataattgagctggaggaaaggggcccaggcaccagtatttatgaaaagcacaaatacctgtaataaaatgattctgcagtgcttagaaaaccaggtagttaactatgaaaatactgaagttttaaattgctaatttttctttctttttattaactatgctgttattgtttttcttggcagtcaagctaatgcaatttaaagtttgtattatggttttgagacctcaaacagcatttaatagacgccatcatctgtggacaattttcctaaggcttctgaaattaaaaatttccttttctgtcactctctaaaaacctacatgcagcagaattttaatgtcccttattgatagaaatagctaacacaacacctatttcagatcatggaaatgaggactgacaagggctgtgggtttaagaagtttacataggtagtggccttcctggcacccttgttagcctgaataaacagtcctcccctgacaaatcctctgtagctctgccacattgataaaatctgacattctggttagtcactttttaatgatattctttcttttgttcttgatatgttagaaaccagcccttatttttttcagtgtgtgggaaagaattaactttaatttcctaattcggtaaaatgggctgctaatgcagaccttattcttagggggacaggaagaaaagtgacctaatttctatatatcaaatacatcttccttcatacatttaaaaatgtatagagttataaaggaccttaaatcctgtagcggagaaactctggggtaaatactttggaaacattgtgaaaaaattctataaattctgatagtaggttccatttcattgctgtgtactattaaaaagtgcagatgtaaataagcataagttttgcaggttgtcaatttgttacaagcggctgcatgttcttattcttctgaagtgtcatctctttcaatgtgggctgtttaggcggaaaaaaaaaaactcagaaaaatacacacttgggatcaaacccttagtgcagaaaaaagaatcaaaacctgtagttaagttggttatttgcagtggtggtatgtcatcctgtgtgagactgacgtcaggcagattgaatgcagaggcaaacttcgggagcgtgtgtgtgtgtgtgtgtgtgtgtgtgtatgtgttttaaagccccactcccagaatatgaagtgagtatgaagggcaccacagcaacccctggatctctcaagaatgtacctgtttttaacatgctggatcaagtgtcagcactcagtagatgaggaaggggtagagcccgacttgtacagattccgcggatggtaaatggccctctggcgtgtttacaatacagctgtgcattcttaatggctctgccgctgccatgtcaggtaaagttttctttgtacgtgatgaatggcagagaattctttagcagaaggaaccaaaggagctgggaggaggaaaggggaagagaagagcggaaaagagagagaaaaagaaacacacagctccagagggacatagcctgtgctttgcagttgcttgtgtggatagaaaccagatggtaagctggaacacccgcttggctatctgaggagccaaacatatggttaatggtcgggagaaatagctttcagagccagggctttgctgactgcctcatattacagattgttacagtgtgtcattacattgccaacctaagtgcttaatacccactgcaggcgctgggcatacacttacaagaaagacttttagctctttgctggctctaaacagagaagtgacatcatagggaggctgaaaatgtctggtgttggaggtggggagaaggataattttgtagtggaaacaacaattttttttcttttttttacaagccttcactccactgaagtctactgttttctgagaaccttttaatactagactggttctctcactctctcaatctctcttgcgtgcactctcactctctgtgtcacacacacacacacacacacacacacacacacacacggaaaggaaaccgaaattcacagcccaggccatgtcccccaactccagtggatttgacaggcctcgttcacctggaagccacatcactgactcagaggccctgcatttgaagtttctgtttggggagctttgggcaacagcaggcctgtgttatctaaggaactgctgagcccattcatctgcttttcacggcccgtttccttttatttttagccaaatccgtcaggcctgacaggcgggtaattcgagccagagaaagggcagagctccaggtcctttccacaaagcaattcttctcctccctcctgggagggctccagacttggcctgcttcaggcagatggatttgttgagtcatgtgagatcatttacacaaaaacacagtgaggcagtggaaattaaaaaaaaaaaaagaaagaaaagaaaaagaggagggtgggggaagaggaaagaggggaagccaggggaatgtgcgctgccctgctgctgaggagcataggaattttgcagtgaggcagctagactgaggaatgcctagagtcatttgtgtataaggtaatgtctagtttacagagtggggcgggccaggcgaggacggcgcctccagcagcttgcctctgtttaaaagaagaaggtgttgggaaactttaaaaaaatttttagagcaacacccaccaaacaaagaccacactgttgacagcgttgggttccagtagcggtaaactaccaaggggctggtttacagaaaatgagtttgctctgtgatgtcatacaagtttgctttgtcctgacgccaacatgacactgaggcagcagaggagggagaacaggaaaattggaaccgtactcttagttaatggtttccagagattatttagcaggacttgaacagagggaggaaaatattgtgaaggattgctgcgaggtgtaccataattgcggtaggtaaaacaaagtcattactatggttttcttgctcaagaaggattgagcaatgacttcaaaatgccaagtaaggtattatttttccctaccacagtatttattttcctttagcttctggggcattaaaaaaaaagaccaactctcacatcatggcaaacagtattaatgttagtgaatcaattttgtttactgtttataccacaagcctttaaaacattccattaaaaaattgtctcccgctcattcatgaaattctttttttccttcaaatttgcttacatgcattagctttgtttggatagggactttttccctttttggctggagtaaaagaatgcataaaagaatagtgagtagattatctaaatgtacattcttacaacaaatgtaatgaaaatatgccgcgtggatgagagggaatatttgaaaacagaaagaaaaacagaaatggggagcatttcaaaatagtcaccctgattatctttgttatgatgcatttcttcaattctgcatttatttagaaccctattgtgcagctatttcttttagccaccctagatagaatgtaggtcaacatcaacattgttcctcatattttgttggtattttaaaagttgaaacattttgcagttttttccagagctagatattcttaggttatttagacggttttagtgaccatagaacttcacgtataaactccttctgttaatagctaccactgaattttgatagtagacactcagatcacaccttgacctggagtaaacaaggcactgatgatattgatgataacatagtccaacactgaagctgttccacttcttccaggcaactctgatggtcttactctgtgtaagttacagcttttacttcgctcaaggagagaactggtaaatttttatggttgttaattgtttacattttggggaccccaagttgcatggtgccacattattataatgtgattatgagttggcatgattttaagtctacccatatccttgaatgttccctccccgtcaggatttcccaatctcagcactattgacattttggaccagtaatactttattatggggtgtgtcctgtacgtggtaggatcttcagtagcatcattggtctcacccactagatgccagtagcaccctcccccgggtcatgacaaccaaaaatgtctacagcattgccagatgtcccctgggagacaaaaccactctggttcagaacttctgctccacatttcttactctggtttagaagctcacgctttacgtcatgagctggctgctcagttacttctaagattgaattaaaggatatgaaataatgttttaagttggaattccaagttaagtaaagtttttgaaggtgcaggcaagagtacttttgagtatggttatgcagaacaacctctctcttggaattgcgaccttagcaggtggatcccctcaggactcccttacagtgagtttcccagtgctgtttaagaggaaatgaccccaccgtctgagccgagggaagtcgacattagcagaaagggaacttcccctcagtcacctgagcagacagcctaggccccaggctcgctgcctgtatatccagccccagaaagagggcaaggcagcagccacagttctttcttgggagcacagctgacctcctccccattccagcggctgtggtctcagaagctgaaactctcgttaataaggaatgtggagctttccacagctaaggcaagcataaatttcctctgtttgttttgtgaggactagtgtcaactgctgtaatgagatcagagaggaccccagggtcagctgctggaactgctttctgtggctgttctcttggctgcttgctgtcggagaacgcagtgactccctgcagacctccctgatgtgttaaggtggttgtgcccttgttgcatttcttgctgtctttgcttctctcattctactaaaacatcagtgtgcagtcatccagttctaaattatggaaaagttaatggaaggcagattcctttccacagaactgagggcagacttgggtgtggaaaatgcagccttgggaaggaaggtgacctgtttccttggggtaactgcctggacctgctgcttctggctaagggtaggtttctcaaggcctgggctacccgtaagcactttctacccccaatggcactctgtaatgaggatgagttagtgaaagagtcacagcaattagcttaggctacaaagaacataattctagttgtagcctaaatgacagctagaattggctacatatggaacctaaatatggcagaattgcatttagggaacccaattctggcagaatggtatactgagctcatgcagcctggcctacttctgaccacccaccccaaaaagtcctaagcctggcctacttctgaccacccaccccaaaaagtcctaaggtattatattggttaaatattttcaagtacatacgagctttaaagcaggacagggaaattcttaggtgccagaagacattgatgccactggccttagagtgtttcagacccagctgtaggctctaggctctaggggctatggtgtctatactcacacaggaattgcttgtgaaaggggggcaagaagattttccccagtctgtttggggctttaagtctgtgtgttggggcacagaccagggggatggaaacccagggttacactgtttgaatagctctggggttcatagttacactactacctgcatggtataacttcaactgttttggcagaaactggtttgagagcattgaacgccctcaggccatagtggaggcaaacactagatccctgtggagaggcttaacaacctgggacatggtactccctcaaaaagaataagctgcactaaggagatgctgataataagtacagaatatggccagatacagtggctcatgcctgtaatcccagcaatttgggaggccaacacaggaggatcacttgagcccaggagtttgaaaccagcctatgcaacatagcaaaaccctgtctctacaaaaaattatctgggcatgggtggtgcacacctgtagtcccagctacttgggaagctgaggtgggagaatcacttgagcctgggaggttgaggcttcagtgagccaagatggcaccactccactccagcctgggcgacagagtgagaccctgtctcagaaaaaaaaaaaaaaaaaaaaaaaaaaggaacagaatctaagccccagaaaagcagaggttaacagtgaaccttcaggccaactagagttttcttctgcagattaatgaaagtttcttctcaagaggaacaaggcatataacccattctggcttgctaagcagtttcagttgtaagcactagccccaattaaggtaacatcctacttatagcttgtccccaagatcttcttgagaatattttagttccttaattagaaactttttattggagagatagctggcccccttaacgcttctttaacagtgctcccattgcagtggatcactctgaagtaacccatcaggctgtctgttatttcagtttctcaccaaatcataggaaatatgtttgcctgaattgtacagcaaccccctccccccgccccgccaagggagagggaagttgaaattatttggaggggtctgggattctttcagcataaaatcaaagaaacccaggtaaataagacatggttagtaaacatttgttctagatgaatataattcagccttctcaatccaaagtgaacaaatggatcaagagttgcctggaatagccactgtgtactccctttgcagtgacgtgcactattggcaaacatgagttgagaatgctaaacttaatgcatgattccttaatttattaataggacaatgaaatctcttttgtttagttttttttcttctaaagtgcgcaaaaagctgtcaccagtagtacccaaatagtgccttgctgacctaaaagtgtgccatgcttcttaagaaaaaacttcagtatttattcttaatttggacttctataaagtttaatttcaaaatattctgaccaagcgagaagtagatatgaatattgacattaaagcatcagaagaggagagaatgaaaggaaataggttcaactggtgccagacttacaggagatcttcccaaacattataattaaatttggcatatattgagtgcctactgtatgtatgtaaggcagcgggataggtgctgggtatttgggtactagtacaaaatagacaagatctcttcttgtgaaatgctcaaaacaatcctcaaaagaatctccagagatataaagaatttcccccagctttagggataaaggaacagagactgagagagagccagtaacttgccaaaaatcacattccgagaggtggagttgatattcagactgacttggcccctatctctctttgcctactcttctccctggctttctgtgggcagtgaagccctagcagtacaacccagaggggccaagaggcaggtagagagttttctctcccggaggtttacaggaacaaagaatcccctgactgacatggaaggtgtgcagtagaagaggcaaactagccaaccagacccaactcctacaaaatttccaaagtattagcatgagtttccaacattaaaacagcaaattattttacacagtctctcaactccgtttcttgagtatcagaagctcttggcacatggggcttgttcctgctttgctggggctagagctgagtagcagactccccggatgccccattcctcactgtcttcccagacctgacctttcactcatctcattctttcttgacccttgcagtcatctgaatttgtgacccctggtttaaatagtcacttaggcaagggaagtgggccaggccaagtaacctcttgggggctcctctgtgttgtgcctttaaattgagatagtcctaaatcactggagactgcgatttacattttacagtgatagccctgaatctaaagattagatatcctgacttatcatttgaccaagtgcaagaaccccctagcctgtgtgccagaagtgggtgtatgaaagtgatggaccctctaccacttgtcactcttggcccttcctggcctctgtttctccccatctggctctcagactatttgtgtgcgtgtgttaccaacaatgtgtctctcttttataatttataatcctcttgtttcctcctctttattaccatttcctattgaaccataactcatatattagttaaaatttcagaacattcattttcaaattacctaacctatccttggggaggaaggctgttgttgatgcttgatgggaagatgctcttgttgttctggcttagaatgtctgttttccatggtatgctgtgaaggcagcgcacaggggagcaaagcagaatggcaaacgtctggtctcttggggcagaaccatgttatagtgtgtttgctgcctccatgtggggtggcgaggacactgaagtcatggagaaccacagccacacatctgctgtaactttgaggatggagagggacctgcaggaatctccttggcaagctccactctgttcctcttgcctcttctttaggaagcagggaatgagccagccacttggaaagaaggtgtgtatgcattgggggaagggggcaggagtctagtttctttgcctttggatccttcaatcccagcaccatgccccctatggtagaagggagggattagctttctgtaataaaatgaccttatattttttcagttgaaagtctccagttgaagattgtccagacttaacttcaaagccatgtgaattactccaccccttaaaatagagtagaggaaatttgggatattgctctcacctgtccatctgatttcccaagtttctaagtcctagatgcaagagcatttttttctagacttcagagccggttcaccttgtattacttcacttactccttctccaaaagctcttgggcctggcataggccctcatgccccagccctctgcctaagctgctgggcgtggtggtgggaagggtaggaacaagagtccatcccacagactggcctcatggtacgttatgtctaaaagctagtgagacctttaacactgcgaagagtgacctgcttgctcttgttggcctatctatctcccacaggagtgcctgagctacccagctttgacatatattactgaaggcttctagaatggacatcatagaagggggtgggagttggagtggggagaaaagcccaactcaccatattccattcagtatttggcagtattagttgcattttcaagggtcaggagagcacacacacacacacacacacacacacacacacacacacacacagcccttgacacttttaagcttctctttaaagagcataggattaaaggtggcttatgttattctcagcatacctctataccacattaacagtgatccaggtaaaataggcttctctccatggtagatggaggttgatggtaaataaatagtggtgaatcaggtacgcctggtgttttctccaactcccatttgctgacacccaagacatcagagtataaccctcagagaagccataggatgtggaattgtcaccaggagcccaaatctctgggtctcttccatagcgaggacctggctggtgaggggcacttggccatgttaccaaacctatctctgagtgtctttgtttgcttgccgccctttgtttttctccattctttatatctttcatcttttcttgtcatttctctcttcttcttagacttactttgtctctgcctttttttttttttttttttttttgagatggagtctccctctgtcacccaggctacagtgcctctgcctcctggttcaggctattctcctgcctcagcctcctgagtagctgggattacaggcctgccccaccatgcccagctaatttttgtatttttagtagagatgaggtttttccatgttggccaggctggtactcctgacttcaagtggtccacccgtctcagcctcacaaagtgctgggattctgtaattctggaccacctttcttcttacccatgcttctatccacctggaaagacaaattatgtttcattaaccttttagaagtctaagattgaccattgaaccaactgttaggatcagctgagtggaagtcacacgggcttatgggattaactttctcaaggcaccctttaaagacgtctgtagttttccttttgttcagtactagaggaatccaacttcttaaaacaataaaaagaaacattgaataataaactaaaaaagaaaacattcttgattccaccatggtaactcaggtatctttttccctaatgctttatatttaagatgcagtctccttttttaagctgtagattttgctaagcttcttcataaactgaattggctgcaaaacaaccaggttccctcgatttcaaaggagatggaaagtacttgatagaacaaggccagtctttttggttgctgtccagaagtgaactgacccagtttctaaaattgtcatctgttctctgaggcgttttctgttaaatggtggtcttggtgtgtgcatgtgcgtgtgtgtgtgtgtgtgtgtgtgtgtgtgtgtgtgtgttgttttggggtgtgtgttgtgtttattttttatttctggtctttcacatgctttatttccatagcgtcttgaaatgaagtcacttctagtccagggtctattgcttattatagcaagaaccaggaaaaattcttttacctctctgtgtctggtttccaaattaggaaaa

SEQ ID NO: 11 - DNA, 9120 bp, Homo sapiens
gcggccgccgccctcgccaccccgcctgcccactcccgccgccgccccgctctcgctttccccccggcctcccctcgccccttcccctcccccttcccggcgcactcggggggctgggaacgagctgccatgtgatgcgcgtcccctccgcgagctttcggtgacccacgaactgcccacctcgccggctgccgggagggggctgcgagccgggaagacgcggggaagaggaggcggaaaaggacgcaaagttctccggcgagcgcattcattcacatagctcccagttttaacatttcgccacctactgaagacatcatttgggaccaagctgatgagcccttgaagcacagcagataagagtgttgctgttgatcatctttgcctgggaagttgaatgataaagccagaagaaagcatgctttctgatcatttgcagctgtctgcttcagaaagtgagggctccaggaatgaggagaatcttcaagaacttcctcgcactgtgacatgtctgatcccttgctcccatccctgcagcatgaacaaggtggacactcactgacctgtcacaaggttgccccacaaaactttggggtccatgtctgaatggattgccagagccttctcatctctcccttcgcccagttccctgcatcctaagactcgaaggcagcacaggacctggaaaaattacatggtgtgaacggcatgtctgtggatgagaagcctgactcccccatgtatgtgtatgagtccacagtccactgcaccaacatcctcctgggcctcaatgaccagcggaaaaaggatattctctgtgacgtgactttgatcgtggagaggaaggagttccgggcccaccgggctgtgctggccgcatgcagtgaatatttttggcaggcgctggttggacagacaaaaaatgatttggtggtcagcttgcctgaggaggtcacagccaggggctttgggccgctgttacagtttgcctacactgccaagctgttactcagcagagaaaacatccgcgaggtcatccgctgtgctgagttcctgcgcatgcacaacctggaggactcctgcttcagcttcctgcagacccagctcctgaacagtgaggatggcctgtttgtgtgccggaaggatgctgcgtgccagcgcccacacgaggactgcgagaactctgcaggagaggaggaggatgaagaggaggagacgatggattcagagacggccaagatggcttgccccagggaccagatgcttccagagcccatcagctttgaggccgccgccatccccgtagcagagaaggaagaagccctgctgcccgagcctgacgtgcccacagacaccaaggagagctcagaaaaggacgcgttaacgcagtaccccagatacaagaaataccagcttgcatgtaccaagaatgtctataatgcatcatcacacagtacctcaggttttgcaagcacattccgggaagataactctagcaacagcctcaagccggggcttgccagggggcagattaaaagtgagccgcccagtgaagagaatgaggaagagagcatcacgctctgcctgtctggagatgagcctgacgccaaggacagagcgggggatgtcgagatggaccggaaacagcccagccctgcccctacccccacggccccagctggggccgcctgcctggagagatccaggagcgtggcctcgccctcctgcttaaggtctctgttcagcataacgaaaagtgtggagctgtctggcctgcccagtacatctcagcagcactttgccaggagtccagcctgcccttttgacaaggggatcactcagggtgaccttaaaactgactacacccctttcacagggaattatggacagccccacgtgggccagaaggaggtgtccaacttcaccatggggtcgcccctcagggggcctgggttggaggctctctgtaaacaggagggagagctggaccggaggagcgtgatcttctcctccagcgcttgtgaccaagtgagcacctcggtgcattcttattctggggtgagcagtttggacaaagacctctctgagccggtgccaaagggtctgtgggtgggagccggccagtccctccccagctcgcaggcctactcccacggtgggctgatggccgaccacttgccaggaaggatgcggcccaacaccagctgcccggtgccaatcaaagtctgccctcgctcaccccccttggagaccaggaccaggacttccagctcctgctcttcctattcctacgcggaggacgggagcgggggctcaccctgcagcctccctctctgtgagttctcctcctcgccctgttcccagggagccagattccttgccacagaacatcaggaaccaggcctgatgggagatggaatgtacaaccaagtgcggccccaaattaaatgtgagcagtcttatggaaccaactccagtgacgaatccggatcgttctcggaagcagacagtgagtcgtgtcctgtgcaggacaggggccaggaggtaaaacttccttttcctgtagatcaaatcacagatcttccaaggaacgatttccagatgatgattaaaatgcacaagctaacctcagaacagttagagtttattcatgatgtccgacggcgcagcaagaaccgcatcgcggcccagcgctgccgcaaaaggaaactggactgtattcagaatttagaatgtgaaatccgcaaattggtgtgtgagaaagagaaactgttgtcagagaggaatcaactgaaagcatgcatgggggaactgttggacaacttctcctgcctttcccaggaagtttgccgagacatccagagccccgagcagatccaggccctgcatcggtattgccctgtcctcagacccatggacttgcccacggcctccagtattaaccctgcgcccttgggtgctgagcagaacattgcggcctcccaatgcgcagtgggggaaaacgtgccctgctgcttggagccaggcgcggctccccccggacccccctgggcacccagcaacacctccgagaattgtacctctgggaggagactagaaggcactgacccgggaaccttctcagagagaggacctcctcttgaacccaggagccaaacagtgaccgtggacttctgccaggaaatgactgataagtgtacaactgacgaacagcccaggaaagattatacctagtgactcggctctgcctcccagtccgcacacctctcccatccaggcgttcttcagtcagcctgtggcactgttcatctgctgtcccgaagaaaccgagaacacatttggtgcacactacagcggtcttagcagcaatactgttccgaagtatcctctcctcttctcgagcaggagtgatagttaccttcacaatggtgctaccccttgcccaggcaaggaaagacagcagtgatgacactgtctgtctgtggctcaatttcagtcttcacagggatagactacaacacctctaggccccaaccacggattttttttctcagtggcccatgtcacaaaccctatctcaggaatttcttctgaatgttcaatttttttcattgaagacagcttctatacacatcaaagttttatagctagactgtacatattatatataatatatatataaaaaatatatatatatatatatatccatatgcaaaagtcctgcatgcctcaactttctcatcctaaaactggaaacttatttctcatttagaaacaggttccaacattcctcttcttttgtctctgatgctagaactagtttggtaactgttaacgtggtcatttttcttgcttcacagttcaattttcaattcgtacttatttatggacaaaattcagtgttggaagctttttcccaaggttttatttcagatttctttttcgtttggtttggttttggcacctccaagtggtgtcatttgagcattgtaggtttgttttttgtttgtttggggggttttgtttgtttttgtttttgtttttgttttccttgcagatactgtacagtaatggtcaactttgccacttgcactgagttttgggtcaaacctattttcttaaatgaagttgtaacttcggtataactcaagtatactgtatattctttgcttttagttaaaaaagtaaaacattttagctaattaaaaagcactcaggtgataattatgtaggaaaaacaatcttgccaaataatgaattcatcctaggatgtgtagacaataatctgcttgaatatttttatatttcacctcctccccacctttccctaagcaaagtttaaacgcagatagagagttcagagttgatgctggatgttcagattcctaagtggggagagagtttggacatctcactcaaaagtacatcagaaaaacaggaatccgtgattttataccagaactcagcaggcattggctcctagaaatcaagttagaaagttttcacccagggagtaagtcccattcatttcaacacgtcctgaggcctcggcttgctcttggaagtggtgtgcagtaggacctgctcccctgaaggacggggccaaccagccactggctttcctgcccaggcttggcctcccaggacatctggcctgaggggatttgaatcacagccccgaaggtcctgccttcaccccattgggagagagcagggcatcctggcatctgcgatccatccctgacacaggctgacacattctttctcctttccttctccaaaggcttggagttttcttctgaggtttttctgccagtgtcttgtctgaaggcagacttcattctgaggctttggacaagctattcaccgggaaccctccctgtccccttcccgaatcacacacataccctaccctcacctgatgataattttctcttcttgctgcaaaactggttggcttgcaacccagagagagcagcttcccttggctctgggggccgtgttggccccagccacgtttacaggaaggtgtgccccagaggaggaggaatcagctccctcgctccagtggccttgggtccgggtctcactgagcagcccgagggccactccagcccggctggggaagagagtcctgaacggtttgatgtggggatggggtggtgggcagtggggaatagatggttgactttgtttctttatttgtgccattgtttggacaatattaaagctgcatgtaaaaggggaaattagtatatgatgtaggctaaaagtgaaatcatagtaacatatgttttagtattattaacttttttctgtacaaatattagcactaaatgtttaaatatgtatgaatgccagaaatttgtcagttcatgcagtaggataaaaaaaaaaaaaaaaaaaaaagggcttttctttttaaacagttccacttttaaaacctgcctctgggtttttgttttttcttgtttgtgtgtgtgtgtgtgtgtgtgtgtgtgtgtgtgtgtgtgtgtgtgtgtctgaaacagatcttgataaagctctgtgttggagctgctggtttttgttatggttgttggaatttcttggcctactaggacagttctgtgcttcaccatgaggtttgcctttgtggaaaactcgtgggtgacagtgagaatataaactcaatgtgaatcacgtgatacttcggcaggcgtgtgttacagtggagtcagctgacagtattttgctttttaactctattgttgcctttccaagtgacctctcctcttcttttaaaaaaagaacactttctgctcatatcataaccaggtccaacccagcttcttggcatgaggtttaccctggtaacaactcatgtgcaactggtagtcttgaccacattccatccatttcctcaggtttctgtggttcagtagcccagacctgtttggcagccatttctagcaggggcggggcctctttatttctctccaccctaactcagacctcaccttcctcccacccacccctgccttgcttttcttcctcttcccccaacctaacttctgccatgggaactggttaaaaacactgctctaaaaaccatcttccaatttcatagagatttctcacaagttatttcattcataatccaccatgaacagtgactagcttcgtgcagttgttcatgtgatgtgtgtgtgtcttttcctattcagaactatgtgcttgtcaaaattatttctgggttgattcaaagggaggacttgctggggaccagaatccaaacggcctcaagtggaattttaaaacctagcctgtctcttttccctgggatccctctgtcaaccccacgccttttaggaaaaagaaaagtgagtgaacagcaaggaagagtgtttgcacagtacagtaacatttggttgttcttaaggctcttttcttacaaaaataagagaccctccaaccacgggctgtttaggaggatgcctgcttgggtctccaaatggctggggtaggaatggttgttggggcagagccagtggaggtgagtgaccctgagactaatgaacatcccacctaaatccagtcctccccttggatctgcctttgtcctgcttgtgtatccaggcaacctcttttcaagttggtcaggctttggacaggtgagtgatttgctgtatgtgtttgtttctctgcgttacctgggggtgccttgattaaaatcgaactttattacatactgattctggaacaaaacagttagaaaaactttaaactttaaaaaaaaaaaaaccgacaaagttacgaggccatcctgctatttatcttctgagttcccagcaatgactcaggcatcagagatgatgctgcagtggaaaacctgactctgtgtgtctgcaactgaatgttgtgcgagtaatttattaactgtctttctaaaggtttgctgcttttaagatgcactataattcgggatgtaatccttacattgcttttccaaggaagggaacaaaagtctagtgattagtatgccaactgccactactccttcaaaaggagccaggaccagcgacaagactcatgagaggactggctaaagtgaagtgtgcacagtgtgaagtttaatgctgttgtcaagaggcctaaacccacattttctcttttaatattttatgattgccatcaaagaagaagaaaaagaaggaacagacaaaggtttgaaaatgataagcctgttaagacaccaaaaactcctgtcccgtgaagctgcttgacatcctgtggagtagcataatcctctcaaaatgaggaagagctgcctgcaaagctttctcaagtccctatttggctacctacttctctacattatgccccatttaaactaggagctgtcttagaaatgacttcaaactgcttcactattgcttacagtttaggaggagtctcagatccagaaggagcaagaatcaagtttggtcctcaaatgactgtaaatagactaaagaacaaggtgttttttgtttttgtttttgttttctaagaataaagctgttcgttgtatcatgagttagtgtttcttccccaaactgaagactgtgttggaagtgcaatttctggtgagtcagtccacaatacaatgccctgtgtggagttggtattcatacaggaaatctgtgtgcacgaggcattgtgtgttgaaagtgtatgtttatagtactgcctgagccatctcatgaccccagcgtccaaaaccgatgctgtagaacagaacatatctgtcacaaataggtgtgtgcaaatagcatttgtacatagaaaagtctcattgtggcagattgagcataaattattcaactgacggtgcaaaaacattacttgcaaagaaaagtttatagtattttcctacactccaccctgggagatgatatttctatcaaatgaatatcagtgcattttaaatgtaatatgaaaacgatgctgccattttgtgaagaatacccacttggttgcagaggccaactttcatagctttgatttaatgttgtgacacggtgtatgcattttgctgtcaagcaatggataaacagctctgactttcattctcattccagtttattgacctcagataaaacactggcccttcttagaagcagaagtgtgcaccaagaccattcatttcaggtagactcacattcagtgccaagtgctcccatgggaataatcagacgcatatgttgcgaaagagtgaagggacttggacaaagaggggttttcctacagatggatgctcagtcttctaccaaaacatgtttggaggcagaactatgacctccccttaagtcctaacaatgtattttgtgtgtgcaaatcctgggatgcccgtttcacgctctgacataaagacatggcacctctagtgagtgatcaggaagattccatatgcatttgggagcttcaggtgcttgttagacacagtgagccattcaaggcaagcaccacctttgctagtgaggccaagagagcctgtgacaatttgacaatttgttccagaaccagtctgatgcaagtgcacctctaatatatgccttacaaactccagaggccatattcaaaacagggtcttctcagtgtatgcaaggggctgcagcccctcttctcttcctccccaggttgaacaatacggacagttttcacacatatctacctgtataaccctctgtacctctcataactggtcaacgactgtaacaggttacatcaggtgtttttctacatactttttacacagattctatgcgattaatgtaatttaattcaatgcatcattttattgtactagttcttaggcttgtccttatttttttctaagtgattgtggtttttctcgtggtttttattgtaaaaaatgaaaggctgttgatgcttattctctgtaactaagaattttaccttttgggggaaaaaagcattgctatgaactaatggaattggaacttcatttactcattgtaaatacactattgtgcaaaaaaagttttcactcaattgaattgctagtgttaactgaattttgtctagacaccatttctgttgatgaaataaagacatatcattatgcattgtaaactg

SEQ ID NO: 12 - DNA, 2516 bp, Homo sapiens
atgagaagcctgactcccccatgtatgtgtatgagtccacagtccactgcaccaacatcctcctgggcctcaatgaccagcggaaaaaggatattctctgtgacgtgactttgatcgtggagaggaaggagttccgggcccaccgggctgtgctggccgcatgcagtgaatatttttggcaggcgctggttggacagacaaaaaatgatttggtggtcagcttgcctgaggaggtcacagccaggggctttgggccgctgttacagtttgcctacactgccaagctgttactcagcagagaaaacatccgcgaggtcatccgctgtgctgagttcctgcgcatgcacaacctggaggactcctgcttcagcttcctgcagacccagctcctgaacagtgaggatggcctgtttgtgtgccggaaggatgctgcgtgccagcgcccacacgaggactgcgagaactctgcaggagaggaggaggatgaagaggaggagacgatggattcagagacggccaagatggcttgccccagggaccagatgcttccagagcccatcagctttgaggccgccgccatccccgtagcagagaaggaagaagccctgctgcccgagcctgacgtgcccacagacaccaaggagagctcagaaaaggacgcgttaacgcagtaccccagatacaagaaataccagcttgcatgtaccaagaatgtctataatgcatcatcacacagtacctcaggttttgcaagcacattccgggaagataactctagcaacagcctcaagccggggcttgccagggggcagattaaaagtgagccgcccagtgaagagaatgaggaagagagcatcacgctctgcctgtctggagatgagcctgacgccaaggacagagcgggggatgtcgagatggaccggaaacagcccagccctgcccctacccccacggccccagctggggccgcctgcctggagagatccaggagcgtggcctcgccctcctgcttaaggtctctgttcagcataacgaaaagtgtggagctgtctggcctgcccagtacatctcagcagcactttgccaggagtccagcctgcccttttgacaaggggatcactcagggtgaccttaaaactgactacacccctttcacagggaattatggacagccccacgtgggccagaaggaggtgtccaacttcaccatggggtcgcccctcagggggcctgggttggaggctctctgtaaacaggagggagagctggaccggaggagcgtgatcttctcctccagcgcttgtgaccaagtgagcacctcggtgcattcttattctggggtgagcagtttggacaaagacctctctgagccggtgccaaagggtctgtgggtgggagccggccagtccctccccagctcgcaggcctactcccacggtgggctgatggccgaccacttgccaggaaggatgcggcccaacaccagctgcccggtgccaatcaaagtctgccctcgctcaccccccttggagaccaggaccaggacttccagctcctgctcttcctattcctacgcggaggacgggagcgggggctcaccctgcagcctccctctctgtgagttctcctcctcgccctgttcccagggagccagattccttgccacagaacatcaggaaccaggcctgatgggagatggaatgtacaaccaagtgcggccccaaattaaatgtgagcagtcttatggaaccaactccagtgacgaatccggatcgttctcggaagcagacagtgagtcgtgtcctgtgcaggacaggggccaggaggtaaaacttccttttcctgtagatcaaatcacagatcttccaaggaacgatttccagatgatgattaaaatgcacaagctaacctcagaacagttagagtttattcatgatgtccgacggcgcagcaagaaccgcatcgcggcccagcgctgccgcaaaaggaaactggactgtattcagaatttagaatgtgaaatccgcaaattggtgtgtgagaaagagaaactgttgtcagagaggaatcaactgaaagcatgcatgggggaactgttggacaacttctcctgcctttcccaggaagtttgccgagacatccagagccccgagcagatccaggccctgcatcggtattgccctgtcctcagacccatggacttgcccacggcctccagtattaaccctgcgcccttgggtgctgagcagaacattgcggcctcccaatgcgcagtgggggaaaacgtgccctgctgcttggagccaggcgcggctccccccggacccccctgggcacccagcaacacctccgagaattgtacctctgggaggagactagaaggcactgacccgggaaccttctcagagagaggacctcctcttgaacccaggagccaaacagtgaccgtggacttctgccaggaaatgactgataagtgtacaactgacgaacagcccaggaaagattatacctag

SEQ ID NO: 13 - DNA, 23070 bp, Mus musculus
  misc_feature (370)..(389): "n" at positions 370 to 389 can be any base.
  misc_feature (3127)..(3343): "n" at positions 3127 to 3343 can be any base.
  misc_feature (17723)..(17758): "n" at positions 17723 to 17758 can be any base.
tgaatgcttgagataacccaaatgcatgctccacgctcgcgcgtttgctgcacaagagatgagggaggcctgagaggatcccaaagtgagcccaacttcaggatagcgggggggggggggggtcctgctttctccaaggacgttcccacacaaatgtgaatacgcatatgggcataaacaaaaagctacaaagtgaacctttaattttttttaatgtgtgaacaaaacaacaacagcaaacaaaacaaaacaaaacaaaaaaaaaaaaaagaaaggcctccccaaaacaaagaagacccagcagatgaaagaaagtgtttgctgactggggcgtggtggcacacccctttaatcccagcacttgggaggnnnnnnnnnnnnnnnnnnnntgggagccgaggccagagagtggttccaagagcctgacctcggacccttctaatctagcttgcctggtattgccagcacgaggaggcaacacccctcacaggtggtggggaacccccttctaatccctccctctaaccctgtaagggcgggcagatcagttgtggggcccacagagagggagcggttggtgaggagggatagagggtctgagagaaccggtctcaaatgggtatgtgagtgtcccaggaccctgcgtcgtgtgtgagctggctccccccccgcccctgccagaccgcagccccaagcacagcatgactggccctgcgcacccaagtcacatagatccagagccgaccccccaaggaaacagaagcacagggctggtacccacagccacaaccacctcttcattggtggtggctagcagcaaggctgggcaaccagcccctggtctacattcttgcaagtcttgccttgtgttgaagaggcatccctggctaggtgtctagtacaaaggaagttaggtatctggggttactattgagtgcttccttgatgagggtgctggagccctaagctagaccacagcgggaggtgctctttctgagtcccccacctctggagtagggaaaaggcagcccaagagctccttcccatttaggggaagaaggccaaaccatgtataacttctgagatgggccagcactgtctcagtaacttctaccctactccagaacccaggatcctcaccagtgccccatcctctctcctgcctgtcagcctgggactcacccaggccctggaagggtatttagcagatccttcatcagtatctcgaggatattcacgtttctcccgtggctgcagttccattcacacgttggattttgtcttgttcctatttgtccctaatgctatctttacctcctagttctatcattcagtcagatgtcaagaagggactagggcaagctggggcaggtagagctgtgtgtgtgtgtgtgtgtgtgtgtgtgtgtgtgtgtgtgtgtgcgcgcgcgcgccatgcttttactcccaacacttgggaggcagaggcaggtggatctccttgaattcaaggccagcctggtctactatgtagtgagttctgggacagccaggctatataaagagaccctgtctctaaaaccgatgatgatgatgatgacgacgacagcggcaacgacaataataataataacgacgaaggtgatgatgatgatgaaggggctaaggaagattatagcgcccagaggttcaacttcttagtggtctgggggctccccaagttgaactgtcccaaacctaagaactcataccgctgttctctaacctctctgaagtcttgctctttgataagaggccacaggcaggcagtgggtggcctgagctggccgagggtgccctcttgccgaccgtctggcctgagcactgacccacaggcagctagagggcggtgggacaggcggggcctggagaggcctgcgggtgcacacccattgcctaataccccaagcacgcagccagctccaagaaagaggaggggcaggaaccagagagaccttgacaagggttgagacctagatgagagggggaaaaaaggggggctgccatcactgcagggaggaaatgagagcaacctggcccatcttccttttgatgagaaaagtggaaggcccctccggcccttgcggggatggggaggggggacgtgtagcaaaacactgtgggaagaacaacgaggccctgaagggcggggagtgtcaaataaaagagtggggacctctggagatggggaaatcaagcaactgaggcggtggctaaagccgggctacactcgggaatctcctcctcctccccctcccctgatgtttgccttggctggggtcttgggtgactcatctgttgctaagccgctgataggggcggccagcccagggaacccaaattataggccctggagggatggatgcgcctgcggcggtgagctcagctgtacgcctccctccacctcaccggtcttccactgcagcaccgaaggccaccacccagaggcgccagagatgttgcagacgaactactggactccagagaagcccccacattcagtagtagccccaaggagtcttctgactcacccaagacagaatgttacccccttgtctactataggttgatggatgggttacaccctcccagcccgagggggtagcgcctgcctgggcttcaaaggcttgcccaagaactcagagctctgctccaatgttctctctctctctctctctctctctctctctctatacacacacacacacacacacacacacacacgtctaagcaaagctttcaccctcccccaccgcctccctcctagatctattccaaggcctgtgttttgctacagagtttctacttcaattctttagttaactgtagccaaaagtgacagcaagccgccccctgtcccatatacctagaataaggaagttgagggagggagatcaagaattccaggagagcagatctacagatcagcatcgaagagctcttgttgcttttgtagaagacttaggttcaattccccagcgcccacaaggtggctcacaaccattcataaccttggttccttgggaatcaataggtatgagtgtggtgcgcatatatacgagcaggcaaaacattgaactacaaagaaaaacaaatctaataaataatnnnnnnnnnnnnnnnnnnnnnnnnnnnnnnnnnnnnnnnnnnnnnnnnnnnnnnnnnnnnnnnnnnnnnnnnnnnnnnnnnnnnnnnnnnnnnnnnnnnnnnnnnnnnnnnnnnnnnnnnnnnnnnnnnnnnnnnnnnnnnnnnnnnnnnnnnnnnnnnnnnnnnnnnnnnnnnnnnnnnnnnnnnnnnnnnnnnnnnnnnnnnnnnnnnnnnnnnnttgagccacatgtaacccaggctagcttcaaactcaatatgcagttaaatatgacattgaactctgacctctgcttctcaagtgataggactatacatgtcagtgaacatggctttatcttctctttatttttaccatacctatggtaaagcttaggacctcacatatgctaggtaagttgtgtgtgtgtgcgtgtgtgcgtgtgtgtgtgcatgtacacatacgtgtgtgagcacatgcaaaggccagaggtggggatgggtgtcttcctctatttctctttgccctatatattttttagttttcatcttattttcatttttaatttatttattattagtgtgaggggttgttgagtgtgcatcgtggtgacagccattctctcccctctgtccccacttcagcagcggtactcatagataatagggtttccctgtcttagattgcattccaccaccagagatcaagaaaggtacatgtgtgaaaggtctcagtcagggtgttactgctgtgaacagacaccattaccaaggcaaactcttttttttttttttttttttttttttttttttggtttttcgagacagggtttctctgtatagccctagctgtcctggaactcactttgtagaccaggctggcctcgaactcagaaatccacctgcctctgcctccctagtgctgggattaaaggcgtgcgccaccacacccggctccaaggcaaactcttataaggacaacattttttaaaagatttatttatttattttatgtatgtgagtacactgtccctgtcttcagacgcatcagaagagggcatcagatcgcattacagatggttgtgagccaccatgtggttgctgggatttgaactcaggacccctggaagagcagtcagtgctcttaaccacgaagccatctctccagcccaaaggacaacatttaattgggcctggcttacaggttcagaggttcagtccattatcatcaaggcaggaacatgttaggcatggttcaggaggagctgagagttctacatcttgttccgaaggcaaacaggagaaggctggcttccagggagctaggatgagggtcttaaagcccacaggcacaagggcacacttcctccaacaaggccacacccactccaacaaggccacaccccctaatagcggtactccttggaccaagcatattcaaatcatcagagtgacccaggcctcagtgatgaggaatttctcagggacaaagtcaggcgacccatctatagtgctcattcccttgagccttctgtgcagggtactatgtggagaaattcctagcttacggacatgtgtaggaagctaggccattccatattatacctcagaaattcatctttggaggaagcagagttctaggctaagagagagcctgggaaagacatttccattaacaataaaataaaataaaataaaataaaataaaataaaataaaataaaatatctcagcagctagaggcatggctcatcggttaagagcatcggctgctcttccagaggacctgggttcacttcccagcaaccacatggcagctcacagctatctataactccagttccaaaggatccagcactctcacacagatatgcatgtaagcaaaacaccaatgcacataaaatgaaaataaatttatcatttttaagactccaccaagcttcatttgggttgatgtacatcttgttctaaacacattcacacctattgggatgactcagaaagttatgggacctgtgaccaaatctatcgactcgagttccatccatggaacctttgtactaaaaagagagaatcaattcttgtaagttgttctctgattatgcatgctatagcagtctcactcatttgcttattctctctctctctctctctctctctctctctctctctctctctctctctctccacacacacacagacactcaggcacacacacacaaagtgattaaatgtttaaattaagggctggagagatgattcagctgttgagagagcactgactgctcttccagggtcctaagttcaattcccagcaaccacatggtggctcacaaccatctatagtgggatccgatgccctcttctggtgtgtctacagtacacatatacataaaataaacaaataaatctttaaacattttaaattaaacacaagtgccccaggaacagtaactaaatctatcagtcatttcttcctcagagtatagcttggcgggaaaggctgatccattctgagagtcaagctcttttagagtcagactcagggagtttagtcagaaatcatacttaaaaagcagacgagatggaaacaaaaggtgccaaaaaggtggcaggccagacctaaaagtcactttctttctgtgtcaactctgaaaagggaccccagcctgctctgctgcatatcaggcagccactgagccactgacgatgcagaaagagtgtgcataggctttgagttcaaaggggctgtcaggtctgggggagggaacatgcccctaatctccactggaggactggaggaagagaggtcagaagttcaaggctagctaagaccgtatctttaatttgaagccagcctgagctacataagaccttatagcaacaaatacgcaaacaaaaatcaaaaccaaccaggctagaaagatggctcaacacttaagagcgcctgcagaggggtgggggtttaattcccagcacacacatagtggctcagggaatctgaagccctcttctggccactgcgtgaactgcatgcgcatgatacatgtgcatacatgcacacaaaatactcaaaacacattaaaaaaataagtctagcggtggtggcacacgctagcactcaggaggcagaagcaggcggatgtctgagtttgaggccagtctggtctacaatccaagttccaggacagccagggctactctatctcagaaaaccaaataatcaaaccaataagactcctctacccccaaaaaacaaaaaagcaaaaaataacaactgggtttgggtttagctttgagataagattttactatgtatcccaggctggctatactagaactggttactatgtatcccaggctggctatactagaactggttactatgtatcccaggctggctatactagaactggttactgtgtatcccaggctggctatactagaactggttactgtgtatcccaggctggctatactagaactggttactatgtatcccaggctggctatactagaactggttacgtagaccaagatagcctcagactcacagatgtgactcacttgcttcttaactcccaagtgctggatttacgaccggtgccaccaagcctggtgtccccaaggctttttaatcctcctgcctcagccttccaggttctgggactggcaagcatgtgcccccacacagagttggcctggggattgtttattctatttttcattagttattattttgttgttgtttgagatgggatctttctacatatctcagggttgtctcatgtttggagcaatcttcttatattttattgtatgtgtgcctgcatgtgtgtacatgcgtgtgcgctcatgtgcatgtgcgtatgtgtgtgtgtatgtctgtgtgtgcatctgtgtgtgtgtgtctgtgtgtattgtatgtgagcaagtgtgcaagctcatggagatcaaaagacaagtgtttagaatcaggtctctgctttcatcacatgggccccagggatgaggcgcagctcacctggcttgccagcaaacacttgtttgtttgtttggttggttggttggttggttggtttttggttttttcgagacagggtttctctgtattgcctggcagtcctggaactcactctgtagaccaggctggcctcgaactcataaatccgcctgcctctgcctcccaagtgctgggattaaaggcgtgtgccaccacgcccagctcagcaaacactttctttcatctgctgggtcttctttgttttggggaggcctttcttttttttttttgttttgttttgttttgtttgctgttgttgttttgttcacacattaaaaaaaattaaaggttcactttgtagctttttgtttatgcccatatgcgtattcacatttgtgtgggaacgtccttggagaaagcaggagcaggagttacagacagttataagctgcctgacctgggtgctgggaaacacctcaggtcctctggaagagcagtaagtccccttaaccaatgaaccatctatccgtccagcctacatttaatttgttttcttatttactttgtctgcatgtgcatgtgtgtgcatgggacactggatgcctgtggaggtcagaggtcagtcttctctccttccatccagcgacgctcggggactcatatcctcaggcttggcagcaagtgcttccttgtccccttagtcagggattctccatgtagccctggctgccctgcaactctcaatgtagaccaggctagcctcgaactcacagagatccatctgcctctgccttccaagtgttagggttgaaggcttgcaccaccacaggccttgctttgggtttttgagagtgtctacagaatgctgggaggtgaggaatagccttgaacttctgatcttcctgcctcccaagtgctggggttacagtcatgcgccaccaattcctggcttttgcagtgctggtgatccaaactagggcttcatgcaagcgaggcaaacacggtatcccagttcctgggaatgtggctttaacatggattcatttattagcagggacctgggacctgaagacactgccttaccaagcatctcctctgtgaaatagaagagaggagaaatattaagatcctgggaagggggcgcttccctgtgtgacagtggtgcgtgataaccaggctggcagtgccctctgcatcccacattgggaacagcagcctgatactccaaggctgccatgaccctgaagatcactggaatcaggaggaaagtagaatccacaatggaagagttaaggctcttgggtaagagtgggagaaaatgggggtggggggtggggacactgcagaaacctgggagaaaaaaaatccaactaaaatcaggaaacacatggaggcacaaatttgctaatctttctttaaaaaactgtttcaggagatttattttatgtatgtatgtatgtatgtatgtatgtatgtatgtatgtatgtatgtatacgtgcacctgtgtgtgcttggtgtcagtggggctcagacatcacctgattccctggaactggagttacaggtggctataagccaccacttgggtgctgagaacagagtccggggcctctggcagagcagtcagtgcttttagccactgagccatctctcattccccccaattatgttcatcttgagttgggcaggtacggtggcggaataggcctgtaatcccagcagtcactggaccatcatgggttctacatattaaacctttatgttaggtagggtcacacagcaagatccggtcacaaaaccagcaacaacaaaaccaaaaggagccagcttcttcccacaagcattctttccctcaggtcttcagctccatctgacagctactcggctggtggtcctatcctttctgagcctagttgccagagaaacaagcccggttcatcttcatgactagcacatctaatgataagcacaggttgactcaaggtgccatagggtgacactaggtacccagagcgacagaatgacacctatgagtgcacgtcgttaatcacaaacacacacacacacacacacacacacacacacacacactcatgcacccacctgcaaacacaattgcagccttctggacgtctcctgtcacagccccacctccttcctgatacactgcgttaagtggtgactgtaacaaaatgacttcatgctctccctgtcctgagccaaattacacaattatttggaaagggctcaaaatgttcttcgttagaagtttctggatacaccaatacacaggagcgtgcaccctcagaacacatgtacactttgacttaatctcacgggtgacacaccgacgcttacactccccctagcccacagaggcaaactgctgggcgcttctgagtttctcactgccaccagctcggtttgctcagcctacccctacaccccacgcccgggaatccctgaccacagctccacccatgctctgtctccttcttttccttctctgtccagccgtcggggttcctgggtgaggaagtgtctccacggagtcgctggctagaaccacaactttcatcctgccattcagaatagggaagagaagagaccacagcgtaggggggacagaggagacggacttcgagaggacagccccaccggcgcgtgtgggggaggcaatccaggctgcaaacaggttgtccccagcgcattgtctccgcgccccctggcggatgctggtccccgacgggctccggacgcgcagaagagtgaggccggcgcgcgtgggaggccatcccaaggggaggggtcggcggccagtgcagacctggaggcgggggccaccaggcagggggcgggggtgagccccgacggttagcctgtcagctctttgctcagaccggcaagagccacagcttcgctcgccactcattgtctgtggccctgaccagtgcgccctggtgcttttagtgccgcccgggcccggaggggcagcctcttctcactgcagtcagcgccgcaactataagaggcctataagaggcggtgcctcccgcagtggctgcttcagcccagcagccaggacagcgaaccatgctgcctgcggcccgcctccagacttattagagccagcctgggaactcgcatcactgccctcaccgctgtgtccagtcccaccgtcgcggacagcaaccacagtcgtcagaaccgcagcacagaaccagcaaggccaggcaggccatggggctctgggcgctgctgcccagctgggtttctactacgttgctactggcactgaccgctctgcccgcagccctggctgccaacagtagtggccgatggtggtaagtgagctagtacggggtccgccacttgtcctggggcaaagagccaggcacgggccttacccagctcccacgctgtggggatcaccaacctacagacccccctcgtgcattgtgacttcacatccagggtgctcacacctagaactagctctgctgaagtgggggcacatcattggcatgcagaagcccagatacaccaggctcagagaccattcccatttaatacgaccccgtttctgctgagcaacaggtcccaacctcgctgtggtgggtgctcaggtgtcccttaggtcttgaaccaaaaaaaaaaaaaaaaaaaaaaaaaaaaaaaaaaaaaccagatattagctttgaggtgagggagtggaattcctaagtttttcaaggtgggcaaggctgcaggtggggtttctcctcgggggctgacttgaagaaaggaagagctaaggtagccatgccttttctgtccactcactagactctggagctcagggccaggcaaggatagggtggtacagcctgtatggttaggatgcaggtcccctcccctggactgaacccttatgcatcccgccaggggcatcgtgaacatagcctcctccacgaacctgttgacggattccaagagtctgcagctggtgctcgagcccagtctgcagctgctgagccgcaagcagcggcgactgatccgacagaacccggggatcctgcacagcgtgagtggagggctccagagcgctgtgcgagagtgcaaatggcaattccgaaaccgccgctggaactgccccactgctccggggccccacctcttcggcaagatcgtcaaccgaggtgggtgcccaggaaagcgacgcttccgggattaagggaaaagcagggtcatctccagggcataggcgggcgaaggcagggaagacatcccagggttatatgtgatcaaactgagaatcgcctggtgccggcagttaccgtaggtcagcaccagattctttctagccttgcgttgtgagcatgatctttaacgttgctgagccactggcccacagaaagggaattccggatcgtgggcgctgggcgacagctgtttttccctagccttcctcaaaggtacctgggaagctgatctctgagggctagctagggttgtgcttcgcacccagcaaagtttgcactgccaatactagtagcgatcttggctatgcagatttgttctacttgggaatctccccttggagctgctctgctaaggctctggagtctcagtaaagcttagagaggagggcattccatgcttcgcacacatgactccaaggatgttggactgtagggtaccaagtcttccaaacagggtgctgagttggccccacgccttctctcaactgatgcggggtcgcttcacccacaggctgccgagaaacagcgttcatcttcgcaatcacctccgccggggtcacacattccgtggcgcgctcctgctccgaaggctccatcgagtcctgcacctgcgactaccggcggcgcggccctgggggccccgactggcactgggggggctgcagtgacaacatcgattttggtcgcctctttggccgagagttcgtggactccggggagaaggggcgggacctacgcttcctcatgaaccttcacaacaacgaggcagggcgaacggtacgtcggtgtgtccggaaccaatggcaggggagatgtaagacaggtgcacggggacagaggcacagggaaggggcttcccgagagagtgggactctaggagggaagacagagaagaggtggtggttgagggcaaagaggttcctgagctgatgacagaacagaagagattagcaggctatcaacacgtgggatgtattgagatggctccatggcacacttttgaaagataaaagtgacttgctggcgtggagcagagtctggccgaatgtccctatctcagcgggccattttgcacttcctctctcccgagcttagtcacacctggaccttggctgaagtttccacagcatcgacgtgacccgggtggggtgggggtggggaagtatgggtggtggttcgtgggatgttggctttgaccttttcttccctcctcccctcgtcccctcctcccccagaccgtgttctctgagatgcgccaagagtgcaaatgccacgggatgtccggctcctgcacggtgcgcacgtgttggatgcggctgcccacgctgcgcgctgtgggcgacgtgctgcgcgaccgcttcgacggcgcctcccgcgtcctttacggcaaccgaggcagcaaccgcgcctcgcgggcggagctgctgcgcctggagcccgaagaccccgcgcacaagcctccctcccctcacgacctcgtctacttcgagaaatcgcccaacttctgcacgtacagtggccgcctgggcacagctggcacagctggacgagcttgcaacagctcgtctcccgcgctggacggctgtgagctgctgtgctgtggccgaggccaccgcacgcgcacgcagcgcgtcacggagcgctgcaactgcaccttccactggtgctgccacgtcagctgccgcaactgcacgcacacgcgcgttctgcacgagtgtctatgaggtgccgcgcctccgggaacgggaacgctctcttccagttctcagacacactcgctggtcctgatgtttgcccaccctaccgcgtccagccacagtcccagggttcatagcgatccatctctcccacctcctacctggggactcctgaaaccacttgcctgagtcggctcgaacccttttgccatcctgagggccctgacccagcctacctccctccctctttgagggagactccttttgcactgccccccaatttggccagagggtgagagaaagattcttcttctggggtgggggtggggaggtcaactcttgaaggtgttgcggttcctgatgtattttgcgctgtgacctctttgggtattatcacctttccttgtctctcgggtccctataggtcccttgagttctctaaccagcacctctgggcttcaaggcctttcccctcccacctgtagctgaagagtttccgagttgaaagggcacggaaagctaagtgggaaaggaggttgctggacccagcagcaaaaccctacattctccttgtctctgcctcggagccattgaacagctgtgaaccatgcctccctcagcctcctcccaccccttcctgtcctgcctcctcatcactgtgtaaataatttgcaccgaaatgtggccgcagagccacgcgttcggttatgtaaataaaactatttattgtgctgggttccagcctgggttgcagagaccaccctcaccccacctcactgctcctctgttctgctcgccagtccttttgttatccgaccttttttctcttttacccagcttctcataggcgcccttgcccaccggatcagtatttccttccactgtagctattagtggctcctcgcccccaccaatgtagtatcttcctctgaggaataaaatatctatttttatcaacgactctggtccttgaatccagaacacagcatggcttccaacgtcctcttcccttccaatggacttgcttctcttctcatagccaaacaaaagagatagagttgttgaagatctcttttccagggcctgagcaaggaccctgagatcctgacccttggatgaccctaaatgagaccaactagggatccaggtctcctgagagaaaagcctgctcaaaagctcctgcagggctcttcctcctgttctggcagcagctggttaagtgatgaggacaagtgtgtcacctgatggggactcagcacaccaacagtccagctctcctagtgcaagagctggggaggtagcagcaatgaaaggaaaggatagccatgactacatcctgagaggggggggggggaagctcaagcagaaagggtgtcattgcccctgggaggctatcaaccttttctgcagtctgagctttgagcagtggaaggcccacctcttacactcttcctggaaattctttattagcaacccaaccctaacctacaggtaagggacatccaggaacaagccatgggttagagctggaaagatggctcagaggttaagagcactggctgctcttctagaagtcctgagttcaattcccagcaaccacatggtgactcacaaccatctgttaatgggatctggtgcactcttctggtgtgtctgaagacagctatggtgtgctcatataaataataataaagaaatgatattaaagaaaagccatgggttaacagtgggccctaaacttgaactagaaaacttaaagatgctcatagggaagaagaaaagagcagaaagcttagcttctagacaggggtaaggcttagagctcaataaaaaaggaaccccaagagtgattggtccacaaccaaagcagtaagctaaccacacccacaaagagccagaatgaggattccttatgacctgcaggctacctctgtgcttgcagtcaccagtcagcaggaaaggaatccttctcagagtactcaacctgacgccagtcatttcttcctcccttccttgtccaaccagagccttagccctgactcagggaacactaaccctttccaatacctgaccttcatcatagccccttcccaccagagaggacccgaaaggcattgacagaagctacagaggacccccgccttcccaagagccataaccagtctcaatcagctcagagagtttcttcttcttcccaggatcctttgctgcaggctatcacctctggggaaggggggggggaagaggtggggggggaggggtgaactctgacccctgttggttttttgactctgtgagtgggtagagaagtagattcagggcctgctcaagccatttccttgcctttctctccactggcaaagctagcactgggtcagttctgatgagtggatccaacctgggatactggatgtctggatgtctaaaaggttctgggtctccagtgatgatcatccagaagagcctactcagtcctaacccaagctgagctatcagcccctcagcgctcccaaagtatgaagccattgggctgtcccagggcacaaatgtgtgtgtgtctgtgtgtgtgtctgtgtgtgcatgcctgcacatgctgtgttgcacgtgtgtgcctgtgtgtatgtgtgcatgcacgcatgtgcacatgcacgcttgtgtgtgtgtgtatgtgtgtatgtgtgtgtgcatgtgcacgtgtgtgcacgcatgtgcgagagtgtgtacgcgtgggctgctgtaactcaatgtatcagggagaagcagcagaatggaggaaccaaaccatcgccgaccaatctcacccaaatcctaacccaggaacctggaaactagtgtgctgagcagaggtgtctttcaggagttggaaagagagcaccaccacccccttttgcccaggtatttgacacatcttttgtcttcagtcttctcagtcccatttgccttgcttgacccttaattgagaatattcaaatatccatctttgttgtcgcttaaggaggggataggcttcaaatgacatagtgtctgtgacagcttgggttgtgtggacggctactgataccttttctgtactagcctctgtcaaatgctggcagtgcagcaatctacaagccagaggtccagccaggactcaaccaggccaacaaacactaacaggcatagagggaaagaccctcggtgtgcaggaaaggcttcagcacccttctcttccaggggctggaacttggaagaagtgtgccatgggaaaatgcagaacaaagccagggcccaacacaacatgcacaaataaaaggaaacacttcagataaaagtgctggaaatgtgtggcgtgatggtagagcacgtgtaaggacgagatgggttggatccccagccgtgtgtgtgtgtgtgtgtgtgtgtgtgtgtgtgtgtgtgtgtgtgaaggggctgtggggtctacaagtgttgcctaggagctgaggactcttttgtccctattacctgtgttatctgcgctgccctctcaactggatcagtagatcagtaaggaaggggggggggaggtgcgtacctagaaagagtctcagggctcagaacacaaggcgctgtccataagataatgaatgtcatcagaaatatgcctgacgcaccttcctgaggcttccacccactcgtgatctttagatgccatgcaaatacacaccaccccggggacagggaccctggtcacagagctgacctcagtcagagctgttgcggggactgagtcttgaaatatcccaggggtggcggaaaagctgagaggaccaagacagccagcggggctgcacggtccctggggggtcagcaccgaacaccctgacactggcatctcggaaaaaccctgtcagtggtaactgcaaataccagagggtccaacccccccttccttacggccccaggcaggctcagtcccttggctccagggaagaaaataagctgtctggctgtggtgtgagcaggaacatccgtgcagagctgcccaccaactcacccttactcagtctttccacaccatgccagggccgggcatgagacagaccacccccttaccccctcccccgtctgggctaaaagcagacacactgggttggtgagagagcagcaggttataaatatgcccaaggaactgccgccaactcgctcccctgtcatcccctgggagggggtagggtggggtgacacctaaggaggagccagggctgccctattcagtgaggcccagagagaagtggagcctccaaccagctgctgaaatatttattgattttttttcctttacctttcccaggtgaatgtgccacctttgacgtgtgccctggacttttgtctaccccaccctccctggtatatggccttatgtccagcgtgaaagggctcaaagccctgggccatttccttacaccctcaagaaaatagcagactttttaattcactcactgagtggacatagtgaggtgcgcatgcgcacctgcagccccggcgcatgcacaccctactcctgggtgatcgtaccagctccagcctctgttctgcacgctgtgccttcaacctggcaacctcccaggggaagggaagggaagggaagagaagggaagggaagggaagggaagggaagggaagggaagggaagggaagggaagggaagggaagggaagggannnnnnnnnnnnnnnnnnnnnnnnnnnnnnnnnnnnctaaggcaaaaggggcagccctcctcttccagggctgagcccctcccttctccatcctccctattaatcctcggaagtgaaggggccgtccctggcggcccttcagccctattgtggcccctcgccctcctcggctggcgtctaattaactcctcctgcccctggttttgtgtgccccccttactccaccttgtcggccccgcccctccgctcggtccgctccccccgacggacattccagtcaggccgggccagtgtgccagggcaaccagggccagaccgaggcctaatcccccctccacccggccgggctcagggagccccactcacctcccggctctctaggggctgctcggctctgctgtggcggagacacacaatcaggacaaaggcgcagcccccagggggctaactcagccttcacgcccaggttgtgcggcatttggggagtttaatgaattgtccatcacgcctttcagggcccgcccgtcagcctggattaatcttcggagccctggtggggcaggagacactaagcctgtatttattactctcccattgtcactaattgaggtaattatctgtgactctggcctggccaacaatgctgcattcactcctgggacctcgatgggcctggctcccactctcagcaccaaccctccctcccttcctctctaaaacgcgccaagggccaagatgggccctggagcatgttgggaaagtggacaacgttccacaatgttccacgttcacgtagtgtctcccaaagcctcctccactatggagcagtgttgaggagaaacctgggtctcctaaagttggtgagagaagagggcacacaggcttgacccgcagaaaccccaggccacagccagcctggcatgcttcattcctgggtaaatggcactaaagtctcacggggcctttcacatgtccctgtagcctacaggactctggagtgctagagggcacatactattccctgctagatgagaggttctggaagcagaagctaccagagttgccagagcggcaaagttggagaaagttaacaagaacaggatagggcgcaacagggagcagaagggcaggatgcagaagcatcctaggaagaagcaacccaaagtcagagcattccccagggatcacaccaatgtgaccatcaattagtgccatgcagcaagctggagaaaaacccaatttagagtagatgtcatatgaagatggccttctgggtcaagggaatattcctggagaacgtgtgtgtgtgtgtgtgtgtgtgtgtgtgtgtgtgtgtgtgtgtgtgtaatgcatgtgcatgtggtgtgtgtgtgcatgtgttgtatatacatgtatgtgtgtgaattcttgtgtgtgtgcttgtgtgatgtgtgcgtgtgtgtgtgtttaagatacaataaagaagagtagacttggatgagacttgattttgagattcttgatggcaaaaattatgttttgggtcactgttatttttataagatcctaatactttacctagaatgccaggctatatgaagcccgtacttcacaaccgttgcggcctgtcagatcttctcttaaatgtctgtcctccggctcttcatttacctagttcttggtcaaaagagatgtctagagcattcctggacagtcctgtcctggatggacaactgaccagctgaagcactaaggatcctggtagaactcagcgccaaagttcgaacagcgccacctcgtggcaaatcttgggagagcttctggagacactagctaagaggatagagccagcggctgcaggggctcaggctggacagcagccatcctccttcatggctgcgttgttgtcttcccggcttttattttaaattgtccctccattatttgaagtaatgtatcgtgcacttcgggatgtcatcaagtttcccatgtgctgaagataacagagaatacccggtccttttgcctgtaccccctgagtgctaggacttttacggggctaccatggccagtttatagagttttggggatcaactgtgggaccttgtgaatattagatgagtttctatcaactgagttacattctcctgcctcacttccctcttcttacacaaacctttttggaggtgttttccatgccaagatttcgtggctacagagtcaaacatgtaaatcaatgtatgtaaatcatattctagtaacaaatttcaaagggtaaccaagtcaacaaagatgccaggcatggtggcacacacctttcctcagaggatttgggaagcagaggagggtggatctctgggagtttccaggcagcttggtttaaatagagggttctaggtgagtgggggctatgtggtgagaccccatctccgatacagtcccaccatcactaacccacaccaaaccaaccaaccaaaaagagaaagcacagcaaaggtcacgatggagagccagggaagtattcagaactgaagtacaataagatactcccagctcaaaactctctgtcatcactcttttgattcttctcacaaaagatcctgtgtttctttagccagaggcagagcctcattgcttttcccatgttgccttggaattcctgggttcaagggattccccacccacaacccgccatgtagccgggactacaggtgtatgcgtctgccccatgtgaaggtcagatgcttgctttatgcttgccttcagtaacctcttcgtgaccaaggcctctttcttcccagggccttgttccctgtggaactcatgtcttctcacattctggacgcatctgtttcctcatcatctttgtgagaactacctcaaacatcccttcttcagctttcccttggcagagtgaccttgcctgcccgaactcttgaaatgctttgctggccatccgtgtatgcagtagaccaggcttgcacctgcatgaggacacaggttaggtgtctctcattttgccatccttgctagcaccagatagggacattatatgccctcatcaaatgatgaataagtggattcatggatgaagaagcagacgcatggatagatggatatggagaggcacttgaatggatgatagatgagatgtggatagatcagtaagtgcataggtaggatgcatggatagatgcatgcataggaaggatagataggtgagtgggtggatgggtggatggatggaaggatgactggatgggtggatgggtgatgattggatggataattgggtggattgatgggtgggtggatggatggatggatggatgattggatggttaattgggtggattgatgggtgggtggaatggatggactgatggagcatttatccacagatgacttgtatatcctagttaatacaaggagattcaaagaagggagcctacccccatggcatgccatgaagaggcaggaacacccctagtttaaatttttctctctatgtgcacccttgaagacttgtctcccagtaggcatttgtggctatatcccattccctatgagtccaagtcaaggaggtgtcctcctcccacttctttccataaaatatggaagagttcacaaatttgaatgttggccttgcagaggcactgcgctaatctcctctcagctgctccaaatttagtgtaaaagtgatctccccaaaggtagaaggtgtgcccgagtctcctcgatgtccctggaacacatggttagtgggcaagtggacaactgagtaattactgagagaatactaccctgtcctcaacgaacactctgtgcacacatcccaggaccctgcattgagcggctctcctctcttgcaaacacatccacattactgatctctgttttgttttgttgttttttggtttttctgagacaggtttctctgtatagctctggctgtcctggaactcactttgtagaccacgctggcctcgaactcagaaatctgcctgcctctgcctcccaagtgctgggattaaaggctgtgccaccactgtgctcactgatctctttgatgtcccagttatagctcttgggttccccacccatttgtagggggacccaggacacctcagagctctcccaagtctaaaaagggcagggttcctggctcccttaatgccttatcaagcacaacagaactcaggggcagaaaatgttcccaggaagaacttagctgtggggagagtcatggggtcccctgctaacctaagatgtgttgcccccaaaagagtagccctccaggacctgctgtcttttctcctgatcaagggggcagttccagggtgggggtggttgtgccctccttcagaaggctgggtagctggcagacacagctagatttagaagtcattttcacagcagggagtcgctaacctgccacccacagggccccatggggcctaagatactacttaccagggtctggccctgaaacctgcagacactcctctccttctctcccagaactttggcagctggctccgactctatccttggcaagctctggaagaaggcacgtgttgccctgacaccctaaatacccaaatgttcccccacacaaaatgggtggttgttacctaacctaggatatgcctttttcaatgctggggaccaaactcaggactgtgtacattctagccacacatgcatactaccattgagccaccaccacaacccggttccaaagggacttcttttttttttttggagacagaatcttgctgggctgaactgggataggctggaagttgctgtgtaaaccaggctgggctcaaactcatgaccattctcctgactccagttttcaagaaagtgcgccatgcctggcttccttctctctctctctctctctctatctatctatctatctatctatctatatatatatatatatatgttttattttgcctggatggcatgcagctcattatgtagaccaggctggccttgaacacccagagacccaccagcctctgccttctgagtgctgagattaatgatggagagtgccaccaatggagagtgccaccaaccgggcttctttccctaatttttatctacaagtcacctcctctgtgaactctccctggattttctaaaactaggatctcccttgattgactcttcctagaacttaacacaaccgtcctcactgtcagacaggccttgccatttctgcccttgagcccagcccagagtctagttcctaggaagtgttcagtaaatgctaggtttcgcttggcagcagaaaggactgcattggacgtggtaagacctttggtatctttgatctttgcccagggtgacccggc

SEQ ID NO: 14 - DNA, 2230 bp, Mus musculus
agtggctgcttcagcccagcagccaggacagcgaaccatgctgcctgcggcccgcctccagacttattagagccagcctgggaactcgcatcactgccctcaccgctgtgtccagtcccaccgtcgcggacagcaaccacagtcgtcagaaccgcagcacagaaccagcaaggccaggcaggccatggggctctgggcgctgctgcccagctgggtttctactacgttgctactggcactgaccgctctgcccgcagccctggctgccaacagtagtggccgatggtggggcatcgtgaacatagcctcctccacgaacctgttgacggattccaagagtctgcagctggtgctcgagcccagtctgcagctgctgagccgcaagcagcggcgactgatccgacagaacccggggatcctgcacagcgtgagtggagggctccagagcgctgtgcgagagtgcaaatggcaattccgaaaccgccgctggaactgccccactgctccggggccccacctcttcggcaagatcgtcaaccgaggctgccgagaaacagcgttcatcttcgcaatcacctccgccggggtcacacattccgtggcgcgctcctgctccgaaggctccatcgagtcctgcacctgcgactaccggcggcgcggccctgggggccccgactggcactgggggggctgcagtgacaacatcgattttggtcgcctctttggccgagagttcgtggactccggggagaaggggcgggacctacgcttcctcatgaaccttcacaacaacgaggcagggcgaacgaccgtgttctctgagatgcgccaagagtgcaaatgccacgggatgtccggctcctgcacggtgcgcacgtgttggatgcggctgcccacgctgcgcgctgtgggcgacgtgctgcgcgaccgcttcgacggcgcctcccgcgtcctttacggcaaccgaggcagcaaccgcgcctcgcgggcggagctgctgcgcctggagcccgaagaccccgcgcacaagcctccctcccctcacgacctcgtctacttcgagaaatcgcccaacttctgcacgtacagtggccgcctgggcacagctggcacagctggacgagcttgcaacagctcgtctcccgcgctggacggctgtgagctgctgtgctgtggccgaggccaccgcacgcgcacgcagcgcgtcacggagcgctgcaactgcaccttccactggtgctgccacgtcagctgccgcaactgcacgcacacgcgcgttctgcacgagtgtctatgaggtgccgcgcctccgggaacgggaacgctctcttccagttctcagacacactcgctggtcctgatgtttgcccaccctaccgcgtccagccacagtcccagggttcatagcgatccatctctcccacctcctacctggggactcctgaaaccacttgcctgagtcggctcgaacccttttgccatcctgagggccctgacccagcctacctccctccctctttgagggagactccttttgcactgccccccaatttggccagagggtgagagaaagattcttcttctggggtgggggtggggaggtcaactcttgaaggtgttgcggttcctgatgtattttgcgctgtgacctctttgggtattatcacctttccttgtctctcgggtccctataggtcccttgagttctctaaccagcacctctgggcttcaaggcctttcccctcccacctgtagctgaagagtttccgagttgaaagggcacggaaagctaagtgggaaaggaggttgctggacccagcagcaaaaccctacattctccttgtctctgcctcggagccattgaacagctgtgaaccatgcctccctcagcctcctcccaccccttcctgtcctgcctcctcatcactgtgtaaataatttgcaccgaaatgtggccgcagagccacgcgttcggttatgtaaataaaactatttattgtgctgggttccagcctgggttgcagagaccaccctcaccccacctcactgctcctctgttctgctcgccagtccttttgttatccgaccttttttctcttttacccagcttctcataggcgcccttgcccaccggatcagtatttccttccactgtagctattagtggctcctcgcccccaccaatgtagtatcttcctctgaggaataaaatatctatttttatcaacga

SEQ ID NO: 15 - DNA, 1113 bp, Mus musculus
atggggctctgggcgctgctgcccagctgggtttctactacgttgctactggcactgaccgctctgcccgcagccctggctgccaacagtagtggccgatggtggggcatcgtgaacatagcctcctccacgaacctgttgacggattccaagagtctgcagctggtgctcgagcccagtctgcagctgctgagccgcaagcagcggcgactgatccgacagaacccggggatcctgcacagcgtgagtggagggctccagagcgctgtgcgagagtgcaaatggcaattccgaaaccgccgctggaactgccccactgctccggggccccacctcttcggcaagatcgtcaaccgaggctgccgagaaacagcgttcatcttcgcaatcacctccgccggggtcacacattccgtggcgcgctcctgctccgaaggctccatcgagtcctgcacctgcgactaccggcggcgcggccctgggggccccgactggcactgggggggctgcagtgacaacatcgattttggtcgcctctttggccgagagttcgtggactccggggagaaggggcgggacctacgcttcctcatgaaccttcacaacaacgaggcagggcgaacgaccgtgttctctgagatgcgccaagagtgcaaatgccacgggatgtccggctcctgcacggtgcgcacgtgttggatgcggctgcccacgctgcgcgctgtgggcgacgtgctgcgcgaccgcttcgacggcgcctcccgcgtcctttacggcaaccgaggcagcaaccgcgcctcgcgggcggagctgctgcgcctggagcccgaagaccccgcgcacaagcctccctcccctcacgacctcgtctacttcgagaaatcgcccaacttctgcacgtacagtggccgcctgggcacagctggcacagctggacgagcttgcaacagctcgtctcccgcgctggacggctgtgagctgctgtgctgtggccgaggccaccgcacgcgcacgcagcgcgtcacggagcgctgcaactgcaccttccactggtgctgccacgtcagctgccgcaactgcacgcacacgcgcgttctgcacgagtgtctatga

SEQ ID NO: 16 - DNA, 22990 bp, Homo sapiens
ccctggagtcgggagatgactaagagggagtccctgaggtctttgaagatgtgtacaaccgagttctacatctgaaagccttagaaattcccccaaccctgcagggagcttgggtgggtgaggtgggagcagagcctttgtggttctgtttttttgtttttttttttttaaattcacttcagggttaatcagtcttttaaccaacctacctaccaccatcctagcacccccaaagcactggagctatggagctgcccttccgcttcccaagatgtagttttatatttgcccttcaagactgccctttttatgtttatcctaacctgctattaccctataaaacactgagaggaggagagaggttggggagtgattttccctaaggccctcttaaaaggttggcttctttgttatgttttgggggtcacagaagctcaggctgccaagcctttcccagacttaaataaacatgctcaccatttgggtgtccaagccttcccctacaccaggccctgtggggaaggagggggaccctcacttcattttaggcaggggctctccggagccctgagaagacgagagacagcacccgcttagagaccaggcctctgctaccccaggatctagggctcctgggccagccttctgatccccctaactccaaccctccaggggtgaagctgtttgcacaagtcttgggaattcccctgcagatggcagctgcctattaaccccatagtccccagagcactgcccccatctctgggctgagcccccatgggtctttacacctcagggagtgaactccagtgggaaaccaggagaggcagccatgcctcccagaccaggccagcagtgacctgttctctgcctctccagccgttcttcacctgctcaggtgagcaacacctggagcccccacagcacagaggaggggactggctccccagcttcaaagtcatcagggtctttgttcccagctttggctcctgggaaccccagcaattaggggagcagatttaacccttaaacggttgggggcgtcaccccacccccgctgagacactggggacaccagcctgggcttgtccagccaagatggggggagagaaaatggtggagggaataggggggcgtttgaagcttccaggactgggggcatctcttgttcacaggtgcaacccagattaagctgagcggaggcaggaaaggggggccctagggtaggagagcagggacccagctgcctcgctggcagcacgcaggtggaagttaggcgcgcaggggcccagacgagtggccagacctggctcagagcggctccggggggggcggggaattccaggagaggcccctcccggagccgcgaaaccatcccttcccgcctccgcgcgcctcgccctgccgcccaccccctagcctccgcggcagcgccgacccgcccagccaggctcaccgcgcttgaggatggcgctgtggtgcggcaggcggccgccgccctcaagcgcggagcagttccagcgctggtcgcgcagctggtgctgacactcgtggaccgcgatgtgcagaccctgaagcgcggacgccgtcacgtcggggttgcgcaggcacaggcctagctgccgcttgctcaggccggacagcgtcaagcacacggtgttggccgtcagcggcggctcgccaggcaacttcaggcccagaatctcattgcttagagccctgggaaccaagaaggcgtctggggtctgcggtccagacccctccaactctccccaccccgggtcggtgtttctatggcctgggagacaaggggaactgctcaccgactgcacaacgccaggaacaggagacccgcgaggcccgagggcggaggccgcggccggggctcctccagcatgtcgaagcccggaggctccggtgggcagatcgatcaggacctgcgggacgggagacttgatgcgggttcaggaatagggcggctcgcttggggaaccaagtgacgcccttcttcgggctcctaacccaccggtgccaccctactgacccttctcattcctcctcaaacaaaacaagaagaaacaccccttgattcccagagtccctgaggcttggaggtcttaaagaagaagagtcaaggcgttgtcccagctcaggactcaagcgagcacccctggaaccttgcccaatcagacacaacgcccggcacacagacacacactcacttgcaaactcagacacacagactcacaaacacttgctccacaacctcgcctactgctcccttttccagggccccacgactagcttccccgccctcacagggctagggagagggatagggaggaggttccccaccacctaagggggtgtcacctccaggtgtcatcaagggcaagtaggctccatgagaaaggtctaagaatgagttccccactcacactgccccctccctgagcagcaaggaaagaggagaggctccaggtgcaggaaagatggggaggagagcctggctccctcctaaaagggaccgtggcacagactgagtcctcttccctatcccccaccttgcctaactacaagctcccctcctccatagtcgcccgtctggtcctcaccccttggctctcacattcattgcattctaaatctgggggcactcctttattctctgtgtctttatctctagcaatatctctggctctctatgcgtctctgtgcttctgtgggtggatgcgtgtctgtctgtctgtctgactacacacgtgcctgtctcttcctcgtgtgcacgtccctgccctccctgctttcccaggtctaattacctccagtggtttgggtgcggggtccgagacaggcacggttgggttgcctgggcttcactagtgctgcttaaaccgtggggagactgcgctgggttctgtccccttgtcagagccgcattcttccagggccgggccactcctcttcaccgcttccccagcgccgccgcggccgccgggaggaagggcgggaggaagggagggagtgatcgagagagctagcaagccggcgagcaaaggactgggggctctggctttgctctcaccgagctcagggtggctctgccgggctgacggagctgcagcccctccccgagcctggggcttccccaccctaccctccactcccagccttgaccaggcgaatgcagcctccccctcctcccagcgcgcgcgcgcgcgcgcgcacacacacacacacacacacacacacacacactctctctctctcacacaccctctcccccgacgcctgggttcaggcttggccccactgaagaaggaggtggccagagttcctctcacctgatctggggtcgccaaggctgcagggagggtgtagtaaccttcctagggagccagaatggggcccagatggccacatctttcatcactcctctttgcgtcagtttctccaccaagatcagggtggctggaaggtgcctttgacaagatgaggatggagccagacagtctttgggcttctcggtgtgggacagtcacatgtggcacccacagcctgagcgcacccggggtactcagagcgggcaggagaagcacacgtctgggcagcttggttcccaccctcctccaagccctgcgcctgcccctttggaggggacagctttggcctcagagtttggccctagcagaggttcaagtagcaccaaagattgtcagcctgccccgatgcttccttgcctggcagggatgcttgccaacagaggtatcctacccttctcgggattcccccggtctgcactttgggtggcctggattcctgctccaagctgtagacttgcttcttatgggatgaggagggccttgggatccaaaattgagccaagcccaagggcagccgggaaagagcctggtcttggggtgcacaggcaaaggcaaaccgccttagggagacccagtggcagcgaacgggttaggcgccaccgtgctcccgcctgactcaccctcgaagctctaaccactgtgggctatttttgccagagaggggccccaggctttccagccgccccccgcccctgccagaccgcagcccaaggcacggctggccccacgcgccccaggcacattgactcagactgcccccaagcaagcagaggaacagggatgatacccacaaccacagtcacctcttccttggtggtggcgttgcagctctgctgggcagccagcctccagtctgtgctgctggaggtcctgcccgtgctgcaggggtcactgttggatagcgggcacagcagtctgagacaggagatcgagcaaacttacatctgttgggatatttacagatcacctttacgtgccaggctgtgagcagtctggggaggtgaaagtgccatggtccctgacactggacagcctggaccagactgcttttctctgattccctacctctgggatggggaagtgggagcactagagttcctgaccctccttcccatttagaggacaagagccaaaccatgtgtggttttggaggtcaccagaatctgcaagccccatctcatagttttcatccttacacctggattcatgatccccaccagtgtccttatcctttttcttgcagtcaccctgggattcctgccaggtccttggaagaggggaatgaggttgcctaagcctctcttctccatggggacctcatggacatttgtatttctccatgtgtctctgggtcccccttaggtttgggattattttttgccttctgattctacccttgtcaggctccagcatacagccaggtgccaagaaggggcgaggggcagaactactacaataggtttcaacttcctggtgaccctaggtctccccaagcaggactgttccaaatccaaggacccagagtcctgctccttctctctactgaagcccaactctgggacaagaggccacaggccggcagactgggtggcctgagctggcccgcagtgccctcagcccgaccggctggcctgagcactgacccgcaggcggctagagggcggtgggacaggcggggcctggagagggctgtgggtgcacacccattgcctaataccccaagcacgcggccagctccaagaaaggggagggacgggaaccagagagaccttgacgtgggtcagggccaatgacaggagggggaaagtggggggctttcatcactgcagggagggactaggagcaagctggttccccttcccctcaatgagaagagtggagggctgcccttcccatcctagggatggagggtgtaacgagagcaatgtgggaagaacactggggccctggagggcgggggtcaaagaaaagagtgggggcccctggagattgggggatgtcgagcaactgaggcggtggctaaagcctcagaagcctcctcctcctcctccccccatgtttgccttggcccggggtcccgggtgactcatctgttgctgagccgctgataggggaggccagacccggggaacccaaattataggcccaggagggatggatgcgcccgtggcggtgagctcagctgcgctgcccaccctccgcttaatgcgccttctgctgcagcaccgtaggccaccacctggaggcaccaaagggtctgcgggccgactgcatactggactctcaggaaggccccactttcagcagtccactccaacaaatccatgggattaccttagacagaattttgcccccttctgtactcaggcctaatggatgggctgtgccttcccagcccaagggggcagtgctgcctgcgggtgcttcaaaggagggtaggctcctctgcccacaaactctaaaccctggagccctgcttcctccccagatcccaaagtcaaggcaaagcccctctcccctctaacatctcacctctaaccctattccaggggggtggtttgctactgattttcaacttcaagcctttaaagtcatccacggtcaaaactgatacagagaaaaatgaagcagggtaaaggagattagtagtgggattctattttataaagggggagggaaaacaaactgaaggaacaaatacatggagagatctgaggaagagcattttagaagacagaaaagcaggtgcacagacccttagaaaggagcatgcttggttcaaaggattagaaaagaggccagtgaggctagtggggagaaattcgcaaggaagagagtggtaggcaatgaagctggagggctaggaaggaggcccctttactttgagtgacatggggtctcgctggaaaattttgagcagagaaatgaactaatcagacttctgttttaggaaagatggctctgggctgggcgcagtggctcatgcctgtaatcccagtactttgggaggccgacgtgggcagatcacgaggtcaggagttcgagaccagcctggccaacatggtgaaaccccacctctactaaaaatacaaaaattaggtgggagtgttggtgggcgcctgtaatcccagctactcggtacgctgaggcaggagaatcgcttgaaaccggaaggtggaggttacagtgagccgagatcataccactgcactccagtctgcacaacaagagcaaaactccgtctcaaaaaaaaaaaaaaagaaagaaagaaagaaagaaattggctctagtaattaaatcaacccttttgatttttgcagtaaaatggagcactgaaatggagcaatcttgggcagtaatgtggggtctaatgaagtttttgggtttttcagatgggtactattgcagcatgtctgcatgcttatgtgtatgttccaggagagagataagtggatgatgcaggaaagaaagaggggacagttgatatcatgattatttgatctaaatagaaagttgggtgcttgttttggcagcacatatactaaaattggaatgatatagagattagcatggcccctgcacaaggatgacatgcaaatttgtgaagcatttcatattttgaaaaagaaatgtcagccaggtcataaacagtgtgacccagatctaggggccttaccctcttgccccctactcctggtgtgtggaatgttggaacaaagcacagtggctcctttcctctcttcccacctctgcttgacaacagtcgtcaaagacagggcttccatattttccagccagcctcccaccctcacggtgttgtatcaatccaccaggccaaaagatgtgacccaggccccagtgggaagaaactcataagggataaaggacaggctccccgtgatacattgtccatttacttgagctatctatgctgggtgctctctgcagggactactggcttttggatctacggagggtgctggaccactacaccttttccctctggggtggatccttggaagggccagatatactaggctgggcaaaagggaagaaaaaagggaaagaaggacatttctttctaaaataacttccatcaggcttcatttgggttaatatgcatctcatttaaaacacaagtgcccgggaatattaatgaaacttacctggcatttattccttagagtgatttccctgccttagaagggaatcctagtcatttctgggacttgagactttaggttcaggcctggggaaatttctcagtcagaaggcatcctaaaagacaagggagatgaaaaaaatgagagctagaactcaaaagggaggcagaaaggcccaaaaaattatttttacccatcaattttgagaagggttcccagcctgtaattgctgcacactggcaagcagctggtaaggtcgaaagagcatgggctttgagtcaaattggtctgggttttaatctggctctaccattgattcatttattagacgtggaccttggacaagtgcctgatctatttttaattctgcaaaatggggagagagaagagatcttccctccttccaggggccatgtgtgtggtggtggggcatgataaccaggctggcagtgccccctattccccatatagggaaaagcagccactttttttttttttttcagatgaagtcttgctctgtagcccagactggagtgcaatggcgtgatctcggctcactgcaatctccacctcccgggttcaagccattctcctgcctcagcctcctgagtagctgggactacaggtgtgcgccaccacactcagctaatttttgtatttttattagagatgggattccactatgttggccaggatggtctcgatctcctgacctcatgatccacctgcctcggcctcccaaagtgcggggattataggcatgagccaccgcgcccagcctgtcacttcttcaataggaggcctaaatggccttgaagctgagtaggagtccctgggagagaagagaaaagtgtacaatggatgagatggtcacaggcactctgggtatcccagtgtggtgggaactagagctttagggaaagacagaaacttggcagaaacatccaaagagaagcaaacacatggaggcacaagtttcctcatctaggttcaatgtagccagcaacccttgtcttcccagtcctctccatcaccatacatacagtggacatccgcaccatttcccatcctttctgagcctaggcctcagagacttagccactccaggctgggttcacctcaataccatcttggttgtaggctcggctctctcccccaatgacatgcactggttgacacataccacagtgtgacacgccataggatgccacgaggtacaaagggcaacagaatgacgcatacacacatatttaatcttcccatgcacatgctcatccacccactccacacacagtccagacactctgcatccctcaatcatgcttctgagtctcctgtcgacagttgccacctccttcctgacacactgccccaggcggtgactgtgacaaggtgactccatgaccttttctgacttgagctaaattccaaaattctttggaaagtttcctaacatccttcgtcagaacaaggagtttctggcacgtaccaacacacagggaggatgcaccctcagaacacagcacattctcactcccacccatattcacgttgttccacttcacacacacacacacacacacagccacttgtgcgcttcttctggcgcacatgagcaaactgcctgttgctttaggtttctctccaccgctaggctccttttggttagctcacccccacaactcatccccgggatttccctgaccacagccgcactcacgcccccgtctcccctttttccttctctgtccagccatcgggggttcctgggcggttaagcatctccccggagtcgctgcccagaaccacagctttccttccgacactcaggatgggggagagaggggacgtcggaggggcccggggtgacgtcgaggggacaaccccaccgcgggcggcgaggcgggctgggcccctggcgggctctccccgcagcacactctcgccgcgccccctggcggatgctagtcctcgacgggctccggacgctcagctgagtgaggcgggcgcgcgtgggagggtgtcccaaggggaggggtccgcggccagtgcaggcccggaggcgggggccaccgggcagggggcgggggtgagccccgacggccaacccgtcagctctcggctcagacgggcgggaaccacagccccgctcgctgcccattgtctgcgcccctaaccggtgcgccctggtgccacagtgcggcccggaggggcagcctcctcccgtcacttcagccagcgccgcaactataagaggcggtgccgcccgccgtggccgcctcagcccaccagccgggaccgcgagccatgctgtccgccgcccgcccccagggttgttaaagccagactgcgaactctcgccactgccgccaccgccgcgtcccgtcccaccgtcgcgggcaacaaccaaagtcgccgcaactgcagcacagagcgggcaaagccaggcaggccatggggctctgggcgctgttgcctggctgggtttctgctacgctgctgctggcgctggccgctctgcccgcagccctggctgccaacagcagtggccgatggtggtaagtgagctggtgcggggtcgccacttgtcccgcggcacagagccaggggccaaccctacccagctcccacgctctgggatccgtctgccgacaggctccctccccgctctgacttccctccgcgacaccgaagggcgatctggcatgaaactgccccagactccagctctgtacaagtggggcgaatgatccgcccgcggaggcctaagataccccaggcagggagcccactctcatctagcaccgcccttcccctttgagcgccaactccagcctcacggcggtggctcaccacaggtttccccacctcgggaagtgaagggccaggagttcgcctagaaaggaggggagaagagggtgggactcctaagcatttcacgccttgggtgggcaagaactgcaggccatgattatctcgctcaggctgaccggaagaggctcggagatccaaggtagacactcggtctccgggtacctcctctgtccagtctccggacctagggctcaggcgagcagccctgggactactgggcacacacaagtctggacgcccagttctttcaaattagtgagcctgggagagcgggtattattaatctcccgccattctctccagccacatacccccaggaagaggaccgggtggcacagtttttatggttagggtgcggatccccttcctgagcctgagctatcatacgtcccaccaggggtattgtgaacgtagcctcctccacgaacctgcttacagactccaagagtctgcaactggtactcgagcccagtctgcagctgttgagccgcaaacagcggcgtctgatacgccaaaatccggggatcctgcacagcgtgagtggggggctgcagagtgccgtgcgcgagtgcaagtggcagttccggaatcgccgctggaactgtcccactgctccagggccccacctcttcggcaagatcgtcaaccgaggtgggtgcccaggaaggcgacgcttccgggagcaggggaaacgcggggtcacccccagggcatgggcgggcgagttcagagaaggtgtcccaggcgcctggagggtcacacaatcaaccttgccaagtgcctcgtgcccagcgccagctcggggccagacttctaccaggcgttttccagccgtgcaccctggaaacgaagcttaacttttctgagctactgccccagataaagaaagtttcgggtcgcggacgccggctgaccgccgctttcccccagcctctctcaaaagcgcctgggaagctgctctctgcaggcgtgtgtctggcctctcgcccagcaaggcttgcaccgccaaaatgggccgaaagttttgggctgcgaagaagtcttggggatgtatggttcttccgctcccctctcttcggtttgtctctctggggctgctccacttccgctatcgagccaaaatgcgccctagaatctcccagtaaggtgtgattacgcccgtggacgtggctgcgtgcccacgcacctgctttctctactagccctagagaccagctttccagcactgccggccctggctctcaggactcaaagtgcggagtcgggggtgggattccggtcccaagcccttcatgagggtgctggccgcgccccgcgtaccccctcgctgatccccgctcccttctcccacaggctgtcgagaaacggcgtttatcttcgctatcacctccgccggggtcacccattcggtggcgcgctcctgctcagaaggttccatcgaatcctgcacgtgtgactaccggcggcgcggccccgggggccccgactggcactgggggggctgcagcgacaacattgacttcggccgcctcttcggccgggagttcgtggactccggggagaaggggcgggacctgcgcttcctcatgaaccttcacaacaacgaggcaggccgtacggtgagctttgagaggctccgcaccctaagcggagcggcaggggccaacctcgggctggggaagtgacggtcggtgagataaggcaaggggcaccaggagagggcgtcctgggagagccggaggcttggaacgaagacggagaatagaggagacagtggctgagggcaaaggtatgtctggcccgcggacaggtagaagaggttgcaaatcaagcacagtctcttcgctgtacagattcgaaaaataagcctgagaggccgagactgactcgccgcggcggagcagggttgggcagggtttccaaatctcagcggaacatttcgcgcctcccttcccctgggctcagctaggcctgggcctttgctgaggtccggcccccgtggcgtccgggagagggcagtgtctgggagggtgactctggcccggtgccctgggacactctttcttcccctatccccgcagaccgtattctccgagatgcgccaggagtgcaagtgccacgggatgtccggctcatgcacggtgcgcacgtgctggatgcggctgcccacgctgcgcgccgtgggcgatgtgctgcgcgaccgcttcgacggcgcctcgcgcgtcctgtacggcaaccgcggcagcaaccgcgcttcgcgggcggagctgctgcgcctggagccggaagacccggcccacaaaccgccctccccccacgacctcgtctacttcgagaaatcgcccaacttctgcacgtacagcggacgcctgggcacagcaggcacggcagggcgcgcctgtaacagctcgtcgcccgcgctggacggctgcgagctgctctgctgcggcaggggccaccgcacgcgcacgcagcgcgtcaccgagcgctgcaactgcaccttccactggtgctgccacgtcagctgccgcaactgcacgcacacgcgcgtactgcacgagtgtctgtgaggcgctgcgcggactcgcccccaggaacgctctcctcgagccctcccccaaacagactcgctagcactcaagacccggttattcgcccacccgagtacctccagtcacactccccgcggttcatacgcatcccatctctcccacttcctcctacctggggactcctcaaaccacttgcctggggcggcatgaaccctcttgccatcctgatggacctgccccggacctacctccctccctctccgcgggagaccccttgttgcactgccccctgcttggccaggaggtgagagaaggatgggtcccctccgccatggggtcggctcctgatggtgtcattctgcctgctccatcgcgccagcgacctctctgcctctcttcttcccctttgtcctgcgttttctccgggtcctcctaagtcccttcctattctcctgccatgggtgcagaccctgaacccacacctgggcatcagggcctttctcctccccacctgtagctgaagcaggaggttacagggcaaaagggcagctgtgatgatgtggaaatgaggttgggggaaccagcagaaatgcccccattctcccagtctctgtcgtggagccattgaacagctgtgagccatgcctccctgggccacctcctaccccttcctgtcctgcctcctcatcagtgtgtaaataatttgcactgaaacgtggatacagagccacgagtttggatgttgtaaataaaactatttattgtgctgggtcccagcctggtttgcaaagaccacctccaacccaacccaatccctctccactcttctctcctttctccctgcagccttttctggtccctcttctctcctcagtttctcaaagatgcgtttgcctcctggaatcagtatttccttccactgtagctattagcggctcctcgcccccaccagtgtagcatcttcctctgcagaataaaatctctatttttatcgatgacttggtggcttttccttgaatccagaacacaaccttgtttgtggtgtcccctatcctccccttttaccactcccaggcttggaagcttacctctctcaaacaaatagaatatgctgttgggggactggtttcctaaccttgccagaggaccctgagattctgacccttggatgaccctaacgaggccactgggaatccagctctcctgagagaggaacctggtcagtagccaaacaaccctgcagggttcttcttcctcgtggaacagcaactggctgtgtgatatggacaggtgcatatacttggtgaatgggggttaaacaacctcagtgcctgcttttcctgcctggaacagctgttcagaaaatagctactattgaatgataactgtgaccatcttccaaaaagtaggaagagaaactaaagcagagtgctgctgcccctaatgtggagctattggtccctgaagcttggcttcttcagctgtggtcagggcattggacaggggtgaagcccttccaccaacagaaaagtaaatactggcctggggcagtggctcatgcctgtaatcccaacactttgggagaccgaggtgggtaaatcgattcagcccaggagtttgagaccagcctgggccacacaggcagccccacctctacaaaagaaaaaaaaaaaaaaaaataatatatatatatatatatatatatatgtgtgtgtgtgtgtgtgtgtgtgtgtgtgtgtgtgtgtatatacacacactattaggtattatatatgtatatctatctatctatctaataaataccttatcaggagccccactcccaatcttgggctcagggagatccagataataggtgatgagcctggtgctggaccgagaagctcagagatgctggtgggagagaagggagcaggtaggctagaatccaaatgcaggctaggcttaaaccgatgtaaccaaaggaaaccctaatgtggtccataaccaaactactaagctagccattcccataaagaaccagaatgaggattttgttactaacaccaccagtgtgatacctctgtgtgcacattcaccagagtcagtgggagttctaatcctacccacggccctaaacctatctctaactctaaccctcttcctgttcctaggtctaggttgaaccttagccttaaccctaacttcagacaaacactaaccccttctaagctctaatgtctgtccctaatcctaacccctccccacaggggaggatcagaagggcaaggggagctgtgaaacacccaacctatcccctaagagcaacaactgctcccagccagcttgagaatttccccttctcccctattccctcctctcctgttcaggcctcttctgctgttggtgcctcccaccacctttgggatatgtgtaggggtaggggaatggagccaggaactgctcagtcctgcaacgacatccctttcccttcctttccacctgccaagctagcaccatctcagttctgattcctcaccctaggggaagaaataaaaacctattgatcctggggaagaggcacctgaaaagctttgggtttccataaagagcaccctgcagagaatgcccagtctataagccaaagggctattagatccctcaactccccaaataagaagttaataggctgccagaggtgggagggggggcttgggcccctgctggacagtgcccagagttgagatgaagcagcagggtagagtcaaagcattggcagctgtctccaactacttttgcctaaattcaaactctaagaattggagtcagtatcagctttcaggcttggaagctggggcactctgaaccaggttgacaaacaggagctggaggaagagcaagggaaagtggtgaattcttttctgcccctacccagactttcagcaaatctcgtactttctcagactcagttgccttgcctatcaaacagggatggttattgttacttaacctttcagggaggtgatgaggttcagatgagatgatgtacatgaaagcctgggtcatttgaatactcactgacacctcttctataccaggcatctgccaaatgttggcaatacaatgatttataaaccatagtgcctgcttggaggaggttgacagtctggccaggggatcaagcacatcctcagatattgttagcatatggagggagtgcaatgaaggctcaatgaagtgtaaagccttctgcacataaatgaagtttaagggcagactcccatactcaagccctcggcatggaggctcttctcttccaagggctggaatttcaaaggtgatggtgctgggaagtgcagaattaggctgggccctcaatgggcactaataaaacacaaacacacatacacacacacacaaacaagtaaaagggcagagggatctgcaaagcactacataaaagctaatcattttgttattgtgatcatctatgctatcctcacacagggctggagcgggtacatcctgaggagaagaacaattatgcatagaaagaagactcacaaaggtctcaggagccacagtaggctcagggtggtggccataggatggtgtcatcaggactgtgcttgatgcgccacctctcaccacctctgatcttcaggtgccagggcgctggatacacgttggcctgagcaagtgagggaaagactagtcctgaaatatcctggggggagtggaaaagctgagaagaaaggcaggctgtgcacagtccccagggggtcagcaagccagcaccacacacactctgccacacgcaccctggaaaaaccctgtcagtggggctgcaaataccctagggtccagcctcccccaaagcctcccccctcgccccaggctggctcagtcctcctctccagcgcagagggagaaaaataacaaaacgaggagaaaataagctgtttggctgtggtgtgagcaggaatatccatgcagggctgcccaccactcacccttactcactctttccacacccagccggggcgcccagcatgagacagaccacccccctgccccctcccccgtctggtctaaaagcagacgctggtgagcgagcagcaggttataaatatgcccagggaactgccgccaactcgctcccttgtcatcccctgggaggggcagggtggggtggctcccagggaggagccagggctgccctgttccctgaggcccaggaggaagtggggcttcctagaggctaccatattttccccccttttcaaggtgaaggaaccactgccactccattttccctgaacatttgctcatctcttcagatatgtggtccctaccctccctgggccctggctggaggctcggaatgaaagggcccaaagtactctgtgtcatggcacagcccgctgctacttctcttcttcacatgcatttgctctcagcaaaacagaagttcattcattcattcaacaagcattaactgaaagccagctgaatgccagaccctgtgcacaggcccacctgtgtgcacagtgtctgcacacacaggtgcaagcacacacagctgcccctactccatgtgctcacatcacctccagcccccactaaggacttcctggcttcaacctgccagcctcatcaggaaagcaaagcttcaagctcctggttgtgcctcagagtaggttagggggcatggggtagggggtggctgagaacaggaccccaaacacttctgcttccactacttcccctgtaaatgagggggtcctttctctccttcctgcccaatcatcctccctaagtaggtgccatgtgacgaagaaagagccattcttgggatgctgagggtacctgtccaggccaccagagcctcccacctcccagcaacttgccaactaggtgccaagctggggcaagagggggcacttccaccctgtgaagctcccagctctcctcccccagggctgaacccctcccttttccctcctccctattaatcctcggaagttaaggggccgtccctggcggcccctcagccctatcgtggcccctcaccctcctcggctggcgtctaattaactcctcctgcccctggttttgtatgccccccttaccccaccttgtcggccccgcccctctgctcggccagctcccccccacggacattccagccaggccgggccagtgtgccagggcaaccagggccggaccgaggcctaatcctcccgccgcctggcccggctgggggagccccactcacctccccactctctgggggctgcccggctctgctgtggcggagacacacaatcgggacaaaggcacagcccccagggggctaactcagccttcacgcccaggttgtgcggcatttggggagtttaatgaattgtccatcacgcctttcagggcccgcccgtcagcctggattaatcttcggagccctggtggggtaggagacactaagcctgtatttattactctcccattgtcactaattgaggtaattatctgtgactctggcctggccaacaatgaggcattcactcctgggacctcgatgggcctggctcccactctcagcaccagccctccctcccctcctcttccaaacccgccaaggactacgatgggccctggagcatgttgggaaagtggacagcgtcccacaatgcctcacctccccaccggcgtctcccatagccatcactacagagctgtctcctggtccccccagagaaggtgagaaaagaaggcagcctctgccaggggatggatttggctggcagagccctcaggccagagagggacctgtttctgaggactttggttttctggactctccaactcctcatctccagatgcatgacaccagggtctcacaaggtgcttttgcagatccatcctcatgtccctatagcctctagggtgttaagaggctctagcctgtaccaggcctactctggggaggtccctaaacctaccagtgctggcagagtggctgtggatgtgatgggagatgttaagagagacagcaggaaaggttctgtcaggggaagagcaaaaggagccaagtcaagaaggagcagtcaagagtcacagcattcccgggggtcacactaatgtggccatgcagcaacttcagggagaaacttggatttggaggggcaagagttccaaagagcggatttcacgtggagacagctttctgggtcaaggtggttggccctggggagcaggtatgtgtgtacaagaaagacagagagagagagagagagagagagagataagaaaggaagatttaggcagaactagattgtgaactccttgagggcaagaactatgtctttgtgtcttggtcactgttgcttttatgagagcttaacattgtaccttgcacgtaataggcaccgtcaagtgaatggatgaatacagatgaagccggcacttgctttaaaactgggatctgtgagctattctcttccacagctgcactcaggctcctcattctctcaggacttgctggaaggagatgtctagaccatccctggacggtcagcggtgggcacttcaccagctgttgacacgacagaccctggccgaactcagagcggtagtggggatagcgccaccttgtggtgactcttgggagagctcctggagagacgctagccaagaaggcagggtcatctctcaggagcagggtatcaccccgggctgcagccatccttcttcctgtatgtctgaactgcattgttatgccagcggtcctgtggcacagttttatcatttgttccttctttattccagcattttctgagagcctgctccacgccaaacttgtcgggtatacagagctaaatcagctaaatcacctccagcagctcatggtccagcaggggattccacaaggtaacaagaccaacgaggttacgatcaagccgcaggaaaaaaaattatccaggtgttgaggaggcactagaacattcccagctcaaaaactccatcattcacctctccctcaattcctctcaccgaagtgcaaatggtttatcttcattaccaagaaacagtctgggcatggtggctcacagctgtaatctcagcactttgggaggccgaggcgggcggatcacttgagatcaggagttcgagaccagcctggccaacatggtgaaacccgtctctactaaaaatacaaataaaaaattagccaagagttatggcgcccacctgtaatcccagctactctggaggctgaggcaggagaatcgcttgaacccaggaactggagcagagatcacaccactgcactctagtctgggtgacagagtgagactccatatcaaaaaaaaaaaaaaaaaaaaacccaaaaagcaaaaaagacaagaaatacttcaagttctggctcccacacatctttccaggactcactcttctgccccactgcattccctaatgcctctgctccctgtgaaagccacgtgttttcctacctctctgcattttcccacctctctgcattttcccacatcctagaatgtcccccttccctgtatcccactgttggaacccatctcagatgttccttcctccatgaagactcttctgatttcccttggtagagtggtcttgcctgttctagctcctgaagcaccatgtaggtaggtgctttcattagcagcacatactgggtgtcccattggtggttgtctgtgtatattactcatcctcctactaggctagcccttgcagcactgacctgggcatatcatatgcctttgttaaatggtgaatagacggatacatgaataaatggatgcacggacagaggaataaatcgatggaagtataaatggggccaggcgcggtggctcatgcctgtaatcccagcactttgggaggccaaggcaggcggatctcctgaggtcaggagtttgagaccagcctggccaacatggtgaaaccctgtctctactaaaaatacaaaaattagccaggcatgttggtgggcgcctgtaatcccagctactcaagaggctgaggcatgagaatcgctagaaccctggaggcggaggctgcagtgagcagagatctcactaatgcactccagcctgagtgacagagtgagactctgtcttaaagaagaaaaaaagtataaatggccagatagatgacaaataggttggtggatgggtggataagtggatgtggaatgtatagatggatgggtgggtggatggatgaatagatggatgaatggaaaatctatccataaaaggactcacaaaaggctatgtaggctgagtgcagtggcttatacccgtaatcccaacatttggggaggccaggatgggagaatcgtttgagcccaggagtttgagatcagcctgggcaacatagggagaccccgtctccaccaaaaaaaaaaaaaaaaaaaaattagcccggcatggtgacacgtgcctgtggttcctactattcaggaggctgaggtggaaggatcacttttgctggggaggctgaggctgcagtaagttgtaatcgtgccactgcactccagcctgggtgacatagcaagaccctgtctcagaaaaagaaaaaagaaaaaaaatggccagatgtggtggcccatgcctgtaatcccagcactttggaagggtgaggcaggcagatagcttgaggtcaggagttcgagaccaccctggccaacatggtgaaaccctgtctctactaaaaatacaaaaattagctgggcgtggtggtgcgcggctgtaatcccatccacttgggaggctgaggcagaagaattgtttgaacccgggaggtggaggttgcagtgagctgagatcgcaccactgcactccagcctgggtggcaggaaagaaaagaaaattttaaaaaagcccaggtagcaccagaggcttcaagggagggagcacaccccatgctaggatatgcagaggcagaggcagtatccaggccaaactttccttcactaacatctgcaccctcagcaacttgtctcccagaggcctagatacattccactccccataagaagtcatggtctgggagctgctcctcttttcatcctccctggtccctcaggaatgctttcattaacatatattatgccatcttcctgcactgcaatgactgtgggtttcctcttccacatctctttccctatatcatacacaccctagcttgagagctccctgaagggaggaagcatgcctgagtctcttttgtgtccctagcacctggcatatatgtttaatgagtgagtaaacaaatgaacaactgagtgagtgctgcctcttccccatagacacattttatacacttcctgcgtcctcttgttcagttatctctcctggccctctcctccttacacacatcacactcacactcctgaccttgacactctgaaattccagagttatatgctggggctcggtttccttacctatttgtggctgatctagggaagtcccagccctcccctgagagtctgaaagagacggctcttgactcctctaaagccatattaactgggtcccatggagggcagaaaggggcttccctaggaagaagctctctattgggagggtagcaggatcctgcactaacctgaggtctgctgccccaaattgaccacatcctcctgtgtctgctgtccctactcctgaccagtgaggctgtcccaaggtagggggtggttgtggcctctgtctcaaggctggctggcagacacagccagatttagaagtcattttcgcagcagggagcctccagtgtgccacccacagagccctggaaggtcagtctgagatatggctcaccaggggctggcccctagacctggagtcactcctccccttcttgtctctctcctttttttgcccagaattttggcagctggtgctgactctatccttaggcaaagatggagtaagttctgggggaaggggtgtgctgcactgacactctaaccgcccaagcactgccagggcac

SEQ ID NO: 17 - DNA, 1113 bp, Homo sapiens
atggggctctgggcgctgttgcctggctgggtttctgctacgctgctgctggcgctggccgctctgcccgcagccctggctgccaacagcagtggccgatggtggggtattgtgaacgtagcctcctccacgaacctgcttacagactccaagagtctgcaactggtactcgagcccagtctgcagctgttgagccgcaaacagcggcgcctgatacgccaaaatccggggatcctgcacagcgtgagtggggggctgcagagtgccgtgcgcgagtgcaagtggcagttccggaatcgccgctggaactgtcccactgctccagggccccacctcttcggcaagatcgtcaaccgaggctgtcgagaaacggcgtttatcttcgctatcacctccgccggggtcacccattcggtggcgcgctcctgctcagaaggttccatcgaatcctgcacgtgtgactaccggcggcgcggccccgggggccccgactggcactgggggggctgcagcgacaacattgacttcggccgcctcttcggccgggagttcgtggactccggggagaaggggcgggacctgcgcttcctcatgaaccttcacaacaacgaggcaggccgtacgaccgtattctccgagatgcgccaggagtgcaagtgccacgggatgtccggctcatgcacggtgcgcacgtgctggatgcggctgcccacgctgcgcgccgtgggcgatgtgctgcgcgaccgcttcgacggcgcctcgcgcgtcctgtacggcaaccgcggcagcaaccgcgcttcgcgagcggagctgctgcgcctggagccggaagacccggcccacaaaccgccctccccccacgacctcgtctacttcgagaaatcgcccaacttctgcacgtacagcggacgcctgggcacagcaggcacggcagggcgcgcctgtaacagctcgtcgcccgcgctggacggctgcgagctgctctgctgcggcaggggccaccgcacgcgcacgcagcgcgtcaccgagcgctgcaactgcaccttccactggtgctgccacgtcagctgccgcaactgcacgcacacgcgcgtactgcacgagtgtctgtga

SEQ ID NO: 18 - DNA, 1113 bp, Homo sapiens; identical to SEQ ID NO: 17

SEQ ID NO: 19 - DNA, 24652 bp, Mus musculus
  misc_feature (5051)..(5259): "n" at positions 5051 to 5259 can be any base.
  misc_feature (7564)..(7664): "n" at positions 7564 to 7664 can be any base.
cacttttcaaataacatgaaagtgaaaacctgttggcaagaccaaaagaagtctggggtagtggttcttcttaggtcattttagagattcttagatcttgagacagagcaaagaactgcttgtaaatgagccaagaaactaatctccataatgctcagggtagaaacttgtagcttacaagacacttcagaggttagcaccgacaaccatctatttagaatgcgttacgcgtccctttttctcacacagtactttttaatgactgatggctgagaagctcaaatgtttttggatacagaatctaagcttgtcacaaaggcgtagttagcttttgttccagatttgcttctcacaagctgtgttcggacaagtgactcgacccctctaaggcttaagttcctcatctacaaagcgagggaccatgacaactgaaaaccaacacagtgtgttgtgagggtgaatgaggtcacaggcatggcttcctcagaacaacttctggtgtgcacaagtcatttcctcagaaggaggctggagaatcggaaaacaaggaggtacaaataaatattttaaacaaagtactaatgagtgaacattcctttttaaatattctgctccatcccagcacccagatcaatgcaaattagcatgaagccagactttgcggtttatttgtttggttggttttgcctcctactaatcttgcctgatggtgtaactgacttttctcagggatccagagttgctgtgtcctttctgcttggacctctcaggataacagctccaagtgtgacctgggacataggggacatgttatgaaccaggacaagcccttgggagttgctatgccagcagctagttatggggtatgtatggctctttgggcctctttaaatgagagtctagttttatcacatcttgggcctctaattcgcttggattgagatgggagttctttgtttacacgttgaggtcaggactgtactatgtaccccaagctggcatcaacctcactatatccctgcctcagcctttttcaagttagggtttttatattttatttttaagagcagttttaggttagaagcagaattgtgttgagcatcatcctgtcatctctacatgtgcacagtacccctctccagagtgacacatgtgtgacatctgatgaacctagatcattatcacccagaggccatggttgacattggagttctataaatttgaatgaccattcactgtctagtgtccccacacacattacagtgccttacaaagtagattcactgccctgaaaagtctgcgctacagctttactttaaaaaaaccaaataccaggcctattttccaaatttgttatcatagcatttgggagatgatggcagaaaggagacaagtttatgatctatattgaatccgaggccagccttggctcatgagaccctgtcttaagaaaataaaagcataaaaataaaaagaatgtgtatttaagccccctttccacctcatataccactaactgttctcctccttctccttcctgtgagtccaagggaccaggaaatggctcatgtctaaatccacccatgacaactaactcttccaagaaggtgcaagtctaactgccaggtgccgttgccagtgggtcccaggctcgggactcatagcaatcacaatatccacaaagcaggtttcaatttcactacttttataatcagacaaaacacatatttagggttggatagatgacttggtgaataaaccacttgctgtctgagcataaggacctgagttcaagtccccagaacccttaggaagatggtagcgtttatcttcagtcccaactccttctggcaggatgagagacagagacagagacaggtgagtccctggaagatcaggagccatctagctcaatttacacaatagagagcagcaatgagaactggtctccagtaagctggagaggaaggtgtgacagccaaggttttcctctgacctcagatacatgtaggacacctgtactcacacacaaaagcatgcacattacatgcatccacacgtcatgtacacacacacacacacacatgcacatgcacatgcacatagacacataggcatataggcatatttaataatgaataaataataataagaatcctctagattatattcacctttttgccactgcagttacaaaatgtttttttttttaatttttatgaaagagaaacaattctgctgcatttaagagcagggtcttaagacacgcaaatcggtgacgttatcctctactttgcctctactcttccgatttcttcctcttccattaccaggcaaaactcacagcaacactgggttctatgggcttgtctaaaaaaaaaaaaaaaaaaaaaaaaaaaaaaaaaaaaaaactccagcaacaatcacaccgaacttgtttatttcatgtgcctatcataagccttccccagatttttcacaccctcctcccagatacaaactaacaatgtcacagcaactaacagcacagtggggtcacacctgcatgggccaaattaagatccgccatgaggtgactgtcctctgggagcggctctcgcttcagaggctcttgtgaatcacacacagcagcaccatcacacttcccacagcaggtggccatgtttttcactgactaacgagcaggatcaatgactgaacacttcactaacacctggtcgagggctgatctccatccaccctgggaagctgaaatgaagtcttctctagcatttcctatctaattcaatacagaggaggggaaaaaacattagagaaacaagataaacaacaacaaaatgacagtatttctattacattgaattttgtgtgtgggttgatactgagagattatttccaccaaaatgtttgagccagtttgccagttagcaaactaggcagtcatgcaaactaatctagatccatccttgcaacaaactgtagctcccatccggcattgtgtccccctaaacaatgcagttgtgattggcacaatccagctcacattgtctctattctgtctaaaacatgcattgcatgtggaaaatacagtagcctactctctgctaactgcctgccttagtctcacctagagttttctctctacttctcaagccagagggcacagaagacgcagacatagaaaatgatcactcaaaccctatgtggattttcatgggaatattgtctgcccttaagaatgccaccctctgctctcacgacagtgaatcaaactgaattgaatgagaaaaccttaagcctgtaaaggataggtacgcttggtgcaggaatggtagaaatggctattagaatgggaaggtcaaaatcaagtcatttgtggttgtgtctgaagttgattcctttaggtttcattaaataaaaagagtgagggttatggagacatgatccccaccactgaagtaaaagctgggtgaaggcacataggtacctgcgtcccccgtgctttagggtggacattggagagtccaggacgtctctggccagccagccaggccaaaagagaaacatcagggttagtgagagaccctggattgaggaaacaagacagctgtcatcctcttctgatcacaaccgcatgtgagcacatgggaacacacacatgtgtatagtacaaacacagcaaacctacacagagacagacagacagacacagagacagagacagagagagacttcccttttaaaaggaaacgtttccttccgaagcttaaggatacatctgcccagtctttgagaaatctctccccacattgatttgccattattttctctgctactcccatgcaagttggactacagattttcaggagtttttgtttcaatgctgtgtttatcacagcacttttttgaatgcatattgaattgagcagtttaagggtttggttttggtttggtttggttggctttgttttgtttctttgtttttacccaaaaaaaatcacgtctgttttttttttttttttttttggtttgtccagatgtttggatctttctataaactgcaccccaccccagcatttacccatgcacctttgcaggtgataagtgattaagcagaatgagtttactgaggtatacaatacgaactttataaatagtgtttgtgtggccaaactggttttaactttggaattggtgctggtagactgtactgtcggcctctggaaagaggcccagtattgaattttaatctcttcagccctctttttagacctacttgtcccaggcacccactggcaaacctgagggtgtgtgctaattggatcacacccaaaggggagagcaggtagaaggagctggagcagacttcggagaaccagaacctccccgccctgccaagacaattgagaggcaaacagactgatacacaccagtgggtgaggggagggtgtgtcgccccagtattgtggttctgctctaactctcccgaaccctgcatatcccttctcgttagcatccctcctttgttctcctctcccctctggtccagctctctgttcctgtgatcctttgtatccatagcctggcccttatgtcctctgaaaagctggcccttcctccatgggtgtgaacacagctccaggggtgttcacacaggatggagcatccaccctgagcatagaggaggcagtcagagcattaagagtcctgcgtctggggcaaagttcaagcttcaggctctgattctttaaaactcttctgagataggcattgagcccattttttaaaacgtcttggggctgagaatcaaattcagtctaatctaaagtgagactttaagtcactgactgagtccatcctgtcatccaaatgttggtaagaaagagtgatactgtctgttacccttgaacaaagtagacttacccagttagcatcaagacgggcaattctcacacatcctctcacctgtacctgtagaggggtgtgtgtgcctgctaaagcaaaagtcaggtcccagccctcctctgttatctcccttcaggaagctctcnnnnnnnnnnnnnnnnnnnnnnnnnnnnnnnnnnnnnnnnnnnnnnnnnnnnnnnnnnnnnnnnnnnnnnnnnnnnnnnnnnnnnnnnnnnnnnnnnnnnnnnnnnnnnnnnnnnnnnnnnnnnnnnnnnnnnnnnnnnnnnnnnnnnnnnnnnnnnnnnnnnnnnnnnnnnnnnnnnnnnnnnnnnnnnnnnnnnnnnnnnnnnnnnnttctgtctccaagaataaacatcatgagaccttttctatggcttggtatagtatgggatggggtgggatgggatggggtgagatgatatggtatggtgtcatgctgtgtcattctctatcatatcatataaaatcatataatacatagtattctattccttatatttagtacagtttattacattatcactacttgtctatcctgctagcatcttaaaagatgcagaagtcaaatgtgatgccatttagagacactgtttctgcctatgtgctctatagggtaaataaatacaattctgccaggctctggtaaagaaagtcaaagaatcagacagcaatttccaagcagctaacaacaagaatgtgttttcacaattaggatctgtacttggagtggtctaacataacacagtgtaattaccttcataaaaatcccctttgaagacttggggatagatcagttagtaaaatgactgtctagcttgcttgagccctggataaaccagcgctgcataacccaggtatatcagtaggtacctgcaatgccagcagcactctagaagtagaggtaggaggagcagaagttcaaggtcaaggccatcctcagtgacatagaaaatttgaggccagttggagttacacgagatttatttaaatacaaacaaacaaatggacttctgtgaagatacctcagagcagtggagcaatgacaagccctcctccagacagatactccctgagagaacttcaatgtacacaaagacagagtccaattctaaccccaggtctgaaagacagaagcaaaggatcacctctcacagagacatgccctcctagcctgggtctgaggtgagtcacagcaaagaccatatttacaagcctatgggtttgcagatgacaatgtgcagagagaaagacactttggaacattcaggcctaaattcaatgttattgtcattgttgttgttgttgttgttgttagtcaaaagtcctcctttcatgactcagagatgtatgaaagaagaagtggaaagactctaagagccaggaacactgatgactccagagaaacagtgtcttgcagacacacacacacacagctgatgcacgtgtgaacttaagagactaggacagtacacatagacctgtacaagttcaagccagacacaatcccagggcagagacaaggaagtagctacaaggacccatttctaacacagaagctatttgctgttaatacctccttgggagacggaaaattagtttataccactggaatccactgggtatattaaccacgctccagggcaggtctcatgctcaggagcaggtggccaacacaaaatagactccatgatttgtgtgtgggtcactgaattttttggtttgttttgtctttctggtttgttttgctttttttttaagagaggaagaatatgaattcgggtaggtgggtgtagtaagatctagaatcagttaggggaggggaatgaataggatcaaaacagatcatatgaaaaaaactaagaggcccataaataaaaccaaaacccacggttcaggggctggagcaaaggcacaatagtgaaaggcacttactactctttttttttttttttttgtctttttttgatttttttattttaattaggtattttcttcatttacatttccaatgctatcccaaaagtcccccatcccctcccccacttactactcttgcaaaggacctgtgtttggttcccaacacccacatagtggctcagaactactcctaactccagttccaggggatccaacaccctctcctgacctctgggggcatcaagcatgcacaagctacatacacatacatgcaagcaaacaaggaaaactgtggagcaaccagccacagtcacatacataatgaggccacgtacccttgcctcagagacagaaccatggtcagcaactgggccataatctgaccccgtttcaccctctgtctcttcactctcctctagagcccagtgccccatggatgctggctttttcttacagagccagcaacttgacttggatacagaccatgggggggggagctcatcttggacatttcaaggaggatagtggtgtcctagcactgaaggggcaatctctagatgggagagatttttaaagtcacaacatatttatatgttcatttatttgctgccttggttactgtccatgtactagacatgcgagctcatgaacacaaggaccttgcctgtcttgttctctccaagactctcagtaacaagaacagcatatgacactagggagnnnnnnnnnnnnnnnnnnnnnnnnnnnnnnnnnnnnnnnnnnnnnnnnnnnnnnnnnnnnnnnnnnnnnnnnnnnnnnnnnnnnnnnnnnnnnnnnnnnnngcacggcaggagtgatgagagtataatgtgagaagtcaggtacccagcagaccacggctggaggccaaccagacaggagggtccatccatgagagtacacaatgctatgatatctaactctcattttctaggtaattggaggggagggtggttcctaaagtttggaaacagagaaagaacacagtagtgcaaccatgcagtggtgtagggggtggggggcggtccagagaaaggagatgtcaaaattagggaatgcagtctaccccatagatccaggtgggggatgatgggaatacacacgggtttgtggctttggagacagaaaggaagtgacaatacaagggaatgatggagagaaatgtctctactagatgccaagtgtagatactcagcggacccctgtgggtcatgttgaagccatgaaagaaaaacgaaaccacctcacttaagcctggatcatatagaaaagccaatgacaattaaaccattcctccaagaaaaaaaacatatccagaaagtagggctgcggttgcaaaggagtccctcgggtgagcaaaaggtctgtggaccttcgttaagaacccgattgagaagaggaagaaagactgagtggatcctggctgccacagagacatgggctgtaccagtgagaagggaagaagcagcaggaaagggggcaagatggggtgggaagaaggagacagttggtgcccagttggaagtgcttcatatgcacaggagactgtgcacaggacaggaggtgaagagggaaaggaagctgacatgagttttagaaggttaggggaggcaggttgctgagggaggagtaggtgaagctcacgggaggtctcaggtgagtactatctggatctatcacaagtattccatcattttgggaaaagtaaggggggctctcacctcatccaaaactgctcccagtgacgccaccctgcataccgtcttcatctctatgtttgcctgtatctgttctgccctcatcctgcatgaccccgaggtgacatcactaatgctcgggagtatcctcaggagaaacgtcttttcaggctctgtgacaagaacctcggatcttttaaacattttttttctgtttctttttgttttcttccttttttggggggtgggggtgggggtgtctttcatatgtaaggaactgaactatgtagaccttcctcttgggcttggctgacccctttgaagcaagtgtgtagtagattctgttttccaaatgtgtaagcatacattggtatgtaattttagactgctctccacttctggccccattttatcggccttgttttgttgctgttgtttctcatacttatttttgtaggttgtgtattcttgtaagtgatcctgaattcttttctaggacaacattgcacataaacatgaggaaatgcacgcgttatagcagaaggaggtcttaaagtccagaacgttgtggctgggaagatcacgggatgtgatagcaataacgagggtgttattaggccagtccagcagggacttagagacgccaggcagagctcagtctgggccacctctcttttcggtttactggctgtgagagcctggtgttctctaaatcttacgcagtgccctctttgcgtttggaggggtggcttaacgaggtaacatgtaggaaacagcactggatcagcattagctgttggtattaccgtggccatgttccagacaagtagcaggtaggtctcccctcttggccaggtctgctggcacgctgacattgcaagaaagcccctcccctagccttccactcccacttggctctcttggtctaccacacccacaaactcccaagcagcagcctctaacctgacagctcacctccacacccaccgcctcctccgtagtgcagtgcacacagctaagtcttctctttttttaaatatgccaaagagaactaagtgcgtagtagtttaggggggttctgccttccttgcccagacccgactgtgtaccctcactgatacatacaagacagtcctgccatccgggaaagggtctcagcagagcccccacccccacccccctaggggactcgtagccttgggtggaggcaactcttcgcaaggctctagctttgtcaatttcggggcaactcactctgcacccctcggacctaactcttgggctgggagagatgaatggcaggcggggatgaagggagacgctagggcggcgcaactcctcggggcgctaccaagtaatgggggcaggattcgaagaagaactgagggcgccccacgtttcctccagcctgatgataacatcaacgcctgtcaggtggttggtgcgagagagtgtgtgcgcgcgcgggagcgagcgtagggagcgcgctcgcacaaactttgtgcctgcgggtgagcctgggtcggctcgccgggctccaagagtggtcggctccgggctgcgagggccagcggcggccgagggatgcgcggcgcccggccgagccgatcccaccgctctaggtgagacggctccaggggcgcagagagccgcgaccatgggaaccctgggcaaggcgagagaggctccgcggtgagtagctgcgtctcctcggagagcgctgcacctctactggggaaggatagctgagcggtgtgccctgtggtcctctccagtgggtaccaggagggactagacgaccagggcgcctccctcggaggagagttgcctacaggggtagaccatgatcggggacctgggagccaggtcaagataggcgtgatacagacaacctcagagtccagcacaccaggtcgggaagaaagagttggggttgctggggtggcgaggccacaggtcacctgggcagatctggagtggtctgagcccagccaaacctttcacctacccagcgcccacaacagtcgacctccctggatgctctcggtctgggcaccccccgggaactcccactcgcacactttccgtgcccttggcacccgctgcgggcgcgggtctaggacagcgccaccttgcggactctcctggcctttcaggagcgactggcggcaatggctgcaagcggaggtggcagtgcttggctgccctttgaggaaaaagaagtttccaaatcaatggtctatgagtctacacccctccccttatactctacagagatgtttgggagacggaaggtgaaggaagaatggctatgaacagtctatctcttgggcagcaataaggagcctggggtgggggttggagggatgtcaagaaatttagtgtttgtcctcaaaacaccaggaccccgtaactgcctggacaccacttagcctttgttagggccgagaacgttgtgtccttcacaacgccattcacgtggactccgatatgacggcaccatgcctgatctgtaactatgcccattaaaattccctgttgggccatatcatcccctgagtgttctcaaccttaccttgcgctacactataatgggttagtccattgaattaactctgcattattggcggtgtggggcaggactggaagctacactcagcagaaatggccctgtgaaagctgccttttcttataaacaactatgagatgtcccggccctcctctgtttcctcctttgccctgtggataactgtgcctggagactaagtcccccaaatcggttcatacttcgaaacctctccccaggctctgtggggtggggaaggcagacgctaactactgcagggctgagaaaacatcttgaagttactgggtttctttcaagcttttgtttttgctgttattgttgttattttgttttatttaattcataagtttaactggaaacgtgtggctactgccctttaaaatcatgactttgtagaattagaggctgttcactcttcagatggttaaagcactctcaaagttgcctatcataaagcactgtaaaaatccttacctacaaccatctcaccaagaggtggagggaggggagagggcagaggacgtgaagcggggatctagcttggtgaagagtgtttgcctggcatgcaacaatcctgactttggtccctagcatcatgtaagaaagaaattaagatatttcttttaattcctttggttgcatcttggtggagtgataggattgttcgttttcaatcaggtatgatgggggcatatttgcaatcccagcactgaatagaaaagactaatacagagtttcaagccacatagtaagacccctgtctcacaaaaagaaaaacaaaacaaacaaacaaacaaaaccaaaacaagctaaaaaaaattctttttaaaaaaaatgtaaagaaagaaagaaaaagagaatgtgacctgagagtttttccagggcaagcagtcaagagactagacaaagcttacatgtgcacagagtgctgttggcttttaacactttgccttccctagtttctcatgccctctgaattgctcctcactgggctaggtttaggtagttgtcttttttctaggaagggaagggagccaagctaggaagtgtggcttggtgctaaggaagctggctgctaacctgctgtgcatctgtggccaatatatctctattgcatagctgtaggtgtttgggaaaggactgtggagagacgactagccagctcttgggtcctggtgaccatttcaggaacctactaaacaaggaagagctgagacgctgcctctgcatcaccagccatctttctgaagcacacggttgttatacattgaataagcccttttgggctcttgacaatctactcaccaatttcagtgcaggaataaacacacagtttcatgtaaaaaaaaataataataaagcctactagatgaataaaagcaagagggaccccagatactagtccctgagatagcccatatgaacagcctcagtatgtgtaggactcagtttcatatcacaaggtcgtatctttctagactgtagcttcagacacaatgcaaattcctgcacagtatctttggaacatggaaacttcatgcagactgttgctgttttcaggttatcagtttattctcagacactgatctgacagtctcagggtctggataaaagacggtggtggtcaagagtttagtggatttctgcagcaccaacctgattctttgggagtcgttggcttgggttagcatgttccaagtcaccagggtgactgcgctttattggtcctagcttggaactgagctccatgcacaccacagcccgatgctctgaagttggagcagaactggaagggccaaggtgactcctggagtctggctgtgtggtgtgtcctgtgttcagggtactgtctttgtgcaggctgatttctacaaacccaggtgtgcccagggtgggggcggggtggatttctgtttgtttgtttgtttgcttgcttgcttgcttgcttgcttgcttgcttgttttaactaaggatttgtttggcctcttctgagtgaggtttagaccttgtcagaggagctcttccacccagcccctggaagtgctttgccctctgctttgccctcgacaatcttgagacattcacctagaagttacgtggttacactcgctgtcttggtcagattcccctactaaagctttgtgtattagggaactatgagatggctttatacaagagtaactaacacgctatggacatgtataatttacagagaaagttacagaagccatctcaccacggtctcccccctggcccactgtaatatcttactcatgggaataagtatgcggcgaatcgatgcagacttgtgtttctagtatgtgctatgtttctagactgttaactccttctcttctttgacagttaaactatacattagccaagggtgcaatgagaaaagaactaagaacatgcaaaaaaagctaccagcaaaaatgcctatcattattaaaccttcaaagattatagacgtgggtctctgtgtggtttttaataaagaggaaaataaaacatactgcatgagacactttgcatggtgacctgtatcagccagatcacgccaagctaaggatgagcagacgaagcgccaccagactcctaagccatttccagatccaaaatggttactttatattcggttctagagcaggcagctcagctcagagccaacccctccccagtttctcttcgttgaggatcaatgtaaagacccgatggaatactgtttactggtctaagtgattcatagtggttccttgtgttatcaaaaatgaaaccatttattaaaaccaaccaagatgtgtaagaaatgcagagatgactgaaaaatctaaatgtcacccccctgcttcttcaagattctcaaagctagttcaggggacctcctgcccttctgtatctttggcattgcttaaatgaatgaaactatccaaaaaggatgctaactgaaccagtccttcagaccctgggtccgtagcctagcaactagaagctaagggctcccaaggaagcttcttccctctgcatctccccttctggaagagagacggcagcatagagcagtccttacaccaatggggagaaggctattgctgccctggaatctcaccttgccatttgctggggagatgtctctttaacagccaaccagtctgttcagtgcttttgccaagtgggaggggtatgccttctcccagcccagcttcagagactcactgtcctatctcctctttgcttggtcttcggagcctggagctgccattgagacccccagctgctctgtctatcctcacttgagtctctctttcccccaggaaaccttgccatggctccagagctggccccaaagcaagactagaggccaaatcaaccaacagccctctccctgcccagcccagcttggcccagatcacccagttccgaatgatggtgtccctgggacatttggccaaaggagccagcctggatgatcttattgacagctgcattcaatcttttggtgagttgggcaactgcccacctatatagagattgctgtgttactttgttctgtgccttaaaaagtgtcttatacaagagcaacctagattgtattttgcctttaaaaatagctttagagcttttgaaatgttggagacagtctgtagcgcttacggcacatgactatgtgggtggaataggtcgtgatgagaagtacaatttgaagtgagaacttagtgagcgaagttggcattttcctcgcatggtggtttgtctcatggtgaggggaaaaaaatcacaaattgatattgggtattcttctcctctagttcttgtggtcgaaaaatcctaagcctgtctcacaccgccaaatacaatttgaaaacttttaggtcatttggacaaataaggtctcgacagttcccccttacaatctggacttgtgctgtgtttgtgactagaagatgaggagcccatgtgttgcaggtcgaggtgggaggacctgagcacatgggcacataggccggcagcggtgtatggtccaggtgctcccctctgtactgccaacaagcagtgccctgaaaagatttctttttatccaaacattttcttttgatggttgcttatgaaatggtgacttgaaagtagtactaaatattgggtttgcttccaaaagggcaggattaaaaccgacagatttcagtgaaacccattaattcagagatgtttcagtgtccccacgtccccttttctatgctcatgcatctccctctgggaaggagatggattggtgggactcggctctgaagcatcagcccaccccagcctgatcctcctggagagcagaggggagttgtgctcagctctcagaagtggggactgttggtgtttaggcccaaacaaggaccttatttatagacttggggaagacttggcactttggggagattctttttgtgcaactgcctcagttttggtttaaaacagtgcttcttaaacattcttgcacacacagtttgggggttttgatttttttttttttttttttagtaatgcagatggctaggtcccacccccagagtttctgcctgagtaggtctggccagggtggggtccaaaaatttgcatttctaacgaggtcccaggtgaggccttgacagctgctcccagaactccactttgagaatcgctacttttaagttctgttggctgtagacttcttgactttgaaagaaagcagattgggtgtgtgactcaggctcagtgtttacctaacaggcaggggcttgagtgcaggctccatccctgaaaaagaaaaggccattcattctgctccctgttttatctttacccgaaagactaattcaagatgaattttctactgctaagctacatcttcacctccagattgaataactttgtgtctcaaaatcatcatagacgattttttacattcaaggagacagctagaagctggtggagaccagtggccatgtggtagtcattagtgttgttagataagctccttgactgctaattgtattcagtagacctgcagagagcatagtgtaactattgcatgaacaaggacctttactctctctttcactgctgagaacgctggggccatcaccgtgtttatcatgtgaacgctcttctttttctaccaatcatccaactacctgatgagttcagcctgttttcttacccttcaaatacctgtagcttcaacctcaaaaatacatggccagttctggagtcctttccagaaacaaccaatcagaacccactcccccaaccagccctacaaaggcaatggtgcattgtttcctgcaatatgtgaaggtaaaaagtggtgctttaaaaaacaggagctgagtaagtgccactgagactaaagctcctcaggccactaccaagaagcatttattaagtctgtaattatgcctgaccctgcactgggtggcacccaagaaagtcacagtgaccaagtgcctgtttcattagcacttatgacacctgtgaaatacccggttcaagaacacacacacacacagagactcacacatgcacatacctgtgataataagttaaggtgtggtgtttggaaaacacacacactcacacacacagtcacacactcacacacatacactcacacacacatacactcacacacacatgcacacacacttgataataagtgaaggtgtggtgttcaagaacacattcacacacacacacacacacacacacacacacacacacacacactaacaaatgaaggtgtggtgttcaggagcaagttccttgtactaggtagggtttgaatcagggcacttattgataaggaccagtcatcacctcacataccctgggccataggcatgctgtggacaaaaccccgagctttctgtattatatgttacagaatttcccatcacagagtttacatgaaagacacaaaacagccaaagcagggaagaattagaaggctgcctttgtgagtggcctcctcttgttatcagctgacctagctcttgtgggaggagctacactctgagccgtgaaaagccggtttgaagattaaggcaacttgactaattcctttctttactttttcctacctgctcatttcaccttcatgatgatgcctaggaagtatttcaggaggctgtgtacacagcacccacagggcccccccccccccgaacacaggggccattgtcatacacattttaattagttaaaacaaaaccaagtgtaaagtttagttcatgccacagcagccagccttccgagtgcttgatggcctcaggtggtgactcctgtgaaaccgagtaagcagacaatgcctgtggtcacagagtctgacttgggtacttgagagggaagacaactgacctgaggagacaaacggtaggtagatttttctggaaactgaggttttattcatgtctcaggtacacctaagggacaatctagttactgtttaaaacctcatgggcattgagacgtgtatactgaaagctgtctcttgagcataattaagtgttagttgtccatcccttccagcaactgctctcttggaaggctggaatagaaggcctttaaggatacgaatgcaaatgaaggtactgtggacggcccccagcaaacctctctgtatcagaaggttacagatctgtgattagaaacaccgagcctccattccgtggctttacccctgcaccagcccactcccaccttctgttttaatccgagggcatgctacccatcccgactgtggctgctagttaacgctatctgaggtagatcatcacagcaggtgaaacataccgtccgctaacaggttaaaggcctatgagaagcacttaggcttttcgcttcttcctcactttgcaagagggctctgagcattggggccaagtggaaaaatggaataccccaagttacaaggtgctttcatgtctcctctctgggcaagagaattctgatagcatcagggaacagttgcactcgtacctcagaaagcacggtagcaagcagttcctctgtgtccagatctggatgtcagggccgaggacagtgcatccaagtggcttatattatatggagtgttacttttttttcttggtgttctgtatgtattaatttttcttctatattcaaaacaaccctgaagtaggtcaagtattattatctccattgggtgaacaagaagaaaagtgggacatctgagatctgaaacaacacaccctgtacccaccatctaaatagaaaacaggctgcctttttcttctgcctctaccaccagcagctatttgtaccctgagctcgtgcagatgtgcctcacttcccaagacaggcctcatagcctcagaagagatttcagattttgtgttgcacaaggtaggctggcaacctgtgcttgctagtctgcaggcctggtctccctcagttagaaaccacattccgttcagtgcaagaaatagtcagacttcacctttataccatcaactgtctggttgaagttaatcgagtcaaacttatatttgtaagtttctatgtgtatgcattgtactaatgtttcccaaactagaaagaccctaaaaccagtaagagtagtttctgtactatgggctagttgaatactaagctccttatagaccttaaggaattatagtctttgagactggagctgaggaagggcaaacacgtgcttgctggaaccgctgtcccctccacagcaaagtgaaggttggatgttcctcatctcagctttaactctgcacactgaggcaaggtgtacaggagacaggcaccacaccacgctctatgacccagatgggtccttagcactgacacctgcaggcaccaagccacatatataaggtcacatatacaaagccttacctagggctgataacaacccccgagggtaagccacagctgtccctgaagcctcctcatggaattccccagatttacaaggtttctcgtagaaaacagcaaacagccatttgcggggggcaccctaccctaaacacctgggcgtgtcagaagtgcccagtatgtggagagaactggcattcttcgttcggtgtgccacttaagctaaagagccctttaccatgtctctgctggggtgatatcaaccagtgcccctgcaatatcttccctttcatgtgtgtgagttctggtgactcttgggtctgaggaaggagatggtttaaccctcttcacctcaaactttcctgtgtggcattatctccaggagccctccctgtgtactggggcaaaatcaggccttcagacgatgatgcctaagagccacaatttctcaggagttctgggtacttttcttcagtaggtggacccagaggaatgaatcttactgctgactgaaagacagagggtgtggagtagctgagcacttatggctcgtgggtgcagtgggggcgtgggcctttccctgatctgaccctgctgggcttctgaacagcactgtgccttgttagtttcctctcttagctgatagggaactgggactcagaagacggaaaggacacatgcctggcccagctcattactggcccagctgctgagaccaaagctcaggtcggctctctgaggcttgtgttctctctgctggaatagagtctcatcctgtgtgagtttgtcagacatgcagcccctcatgaactgataccgatcaccacttccctgtagcccgcttgctccttggacatcccagaacatgttcttaggctttctaggaaaacaaaaccaactacaaacagctctgagaagcaatggagccagtaggcttttcaatttataaaccgataaagctctcggggaagccagaaagcatgaaagcggtccagcaaggtttaattagagacactctttgcctgggagcatgttggaaatcccagcacaagctagcagcaaaatttacaacctgtcagccttacacttgggacttggggatgggggcagtacttcattgctctccaagacttttcttcaggcttacatttgctgctgtggggagatggtcagatccattcctgatgctacagtaaggtctccattcttgtctccagccagcctcctggactcacaggccttccagaagaggctgagctgggaggagccagagggaagccctgaacaaccagccagatgaacctgtttgccagtagattctttaaggctttcattgggaaataataggaattccacagctgtctgttttgttatcagaacaggggctggccctctgagagcctcggagaagggcatcttaggggcaaacttacctcctggccctctaattgttgcctcatgcctgaagcacttggtgaaactaggtacttcaatgccaaacagtcttgacatccttaataatccttaataatttaattaattattaataatttaatgatccttgctgattcaactataatgttgaaaggggggcatcttttcatacctattggatcttaaaaaccacatggcctgtcatgagcgtgagaatactaagaatggatggcggtgggtgtcttgccaaatgctgacgatgtcgaggagatgggcctgtaacatattatattttttatgaacatggaagtgtgagtatgagagtggagggagatgatagcctgatctgccagctgtggcatactggatgattatccagcacacaagatctaacctgttctattttgtctaattttgcaagccagttgttaaacatagccaccattaaagagtctgttatttacatgtgtgctgagtaagttcatagaagacaagcattggaaattggtcactttctaatgcgtggtcatgtttactgttctgtgtgcttaggagggtgtgtccatcatgcctgtatggtgaaaaacactgcagaggcttttgctgcagtgtagtgcagtgcagtgcagagcagggcagcgcccccactggtccatctgcagcaaggcaggctgggagcttggctttgccagtgtagtcacaccttggaaataagcaacattactgccagcccagcctcctcaaacccaaccccctaagagctcgaggttaaaggcttaccagcataacaccattgtcagtactaaaccccggggcgctgtcagagcagagtctagagggaggggaccctcaaagctgacaatcttgttctgtatcactcagttaggagtaaggctaacatagtttttgggtctttcataccctaagtaaccaacctccttgtctgtggtcaagacaagacaaggcaagatgaagaaattaaacatcaacaaagctgggattttcttaaagacgttattatggaacaaagataaatccaagagatttcatttgtaattgaaccaattacatatatatatatatatatatatatatatatatatatatatatacatacatatatatatatatattttttttcccccttaactcacctccacacattctgcaggattaagcgtctcttactttttcaatttcttatacttctgacctccacatgtatgacccatctctatctgcttagggctccgtctgcagtgttcatttgcttttattccctctgcgtgttgacagcttcagtggaatgaacacacgagctttgctaagcaggtgtttttttttttgtttgtttgttttttttttttttttgtaatgagtttgctgtgttcctgatcatgaacagtctcttcatacctgtttgttatctgctgtttacggttctatattgctagaggtttggacctgttttcttggctagcatttgttgatgcctttctcctattttcatcccttcattatttttactcttacaatacgtagaaattccatggttttatgtagttaaatttgtcttagccttttaaccctttattaattctaaacttaaaatctatacttcacccacttggaaaatatcttcctgtcattttaattaaaatgaaaattattttaattcattcagtgtatataatatgcattatacagtcttgggaatgatcagtaaagtttgcaagttattgctggaggagagaaagcctttggctttatttctgggattagcttaaagccggtctgggtcctactacacactagactactgcacacaggtcattttggcactcagaaccctgctctctctgactctgtcacagatgattaaaatcagttctaaaaccaagcagtgtctggaggaagaaatagcgtgatctcaaatatgatattgaatgtgaacttgaaggaaacccttcagaactgatgtataaagtgcttttaactgtttatagaaccaatagccttagaagactaaaactctcgtcacatttaaatctcatttttctaagttatttctgtagagtgaacctatgttgctcctaagtaggccgttttgtgacgagatacataaaacattaacagtacttatctatttaaatattcactgttattttagaaataaccagcctttggataattattgtgaacagtaccgtgtttatgttaatattatatatatttatttaattcacactcttatgttcctataactacaaatatttaactaatactcaaaattcatatttttaaaaaattttaataacttttaaaaaccatttgcttcactctgggaaacttcagaaatacagtttaaaaatgaaaagcattggggctggagagatggttcagaggtcaaaagcactggcagttcttccagaggatcctggttcaattcccagcacttacatggtgactcacaacgatctataattccagttccagtaaatctgacaccctcacaaacacacatgcaggcaaaacacgaatgcatgtaaaacaaaattaaaaatcattttaaaaactttttaaaaggaaaaaaattacagttctgtatcctacccccacaaacagtgttagctatgaacattcttggatttgtctcagcgttctcctatggatatgcacggatactgtgaacatagtgcatgtcttgtgatagattctccatacctctgtgtgttcaatattcacatcttaaccaattgtgatcctgcgatgaacattactacgtgccaagaagcgtgctagcatacaaggtttctactctatcctaaaattgatcctaagaaaataatgctggcataattccatcaaatatgggacataaaattgagggttgcttggcaaccaaaatgacgctgatgaagaattaaaggcatttccagagaagaagaatactgatttttccaatgtaaagtgctaattataatagcctagggctgattacagatagaatgaatgaaagggagcaatacttaaactaactgaaaatccaagaggcaagcattcttcttcgttatgtgtggcgaaagtgagttaaaggtttactgtcagaaacgaagaataaaatctcttgccttcattataacttctctaagttataatgaaggagcagtgaggtgggatttatagcagagcctagaagaggctgaagtctgctcagtccagctgcttttgcagtgactgtgaggtggcgggcagcatctgaggaggccgtactgtttccttcctttttagtgcagaacaggccagggctcaggcactgagcatcttgctaaatggttgtaccgtttggcagaaccagctgccaagatggagcttgaacaaggggcacaccagtgattgactgaaatgaacaaaagaacataggtactactacaggaggaagaaagagcagagagtactaattttatcctgaaggagaacacggattcataggagcaagatgggtgttgagtataaaatcatctgaaggctcagatggaaagtgagaattcccaagtagaagagcagagagttcttctgtctcctctcagtgatctgccgaactgtagtatggacttgtttatatgatcttttgaacagccccattttaaagaggaactgaagcactcaggaaacgggtgtccccctaattatcatatgtgagtgagtgtacttgttaacatatagtcacaccctacagagcacccttgagtctgttgagcagttggctaactctgcgttgcttgcttcctgcgtgagcatagggacttttccatacttccttcctttctttcacaccttggattccaactttacttcatccaagagcttcgccatttacctccaggcctgggccactccaaccacacaataaagcagttagcatctgatacagttctttccagaggtcagccacaggagccacactgctggctacccagctatcttcagttcctgctaaggatgagtcctcactctgtaataacttgtgagttggctctactctatgaacatactccccttacttattgtgcctatagtctcccgcactgcctgcgtgcccaatggcttagagtcctattaccttgtcaccaatcacaggtagatttagctaactgaggaagtggaccttcatagtgtcacaggggaaaatatgaa

SEQ ID NO: 20 - DNA, 2451 bp, Mus musculus
ggatccgcggccatgggaaccctgggcaaggcgagagaggctccgcggaaaccttgccatggctccagagctggccccaaagcaagactagaggccaaatcaaccaacagccctctccctgcccagcccagcttggcccagatcacccagttccgaatgatggtgtccctgggacatttggccaaaggagccagcctggatgatcttattgacagctgcattcaatcttttgatgcggatggaaacctgtgtcggaataaccaactgttacaagtcatgctaaccatgcaccggatcatcatctcctcagccgagctgctacaaaaagtcatgaatctatataaggatgccctggaaaagaattctccaggagtttgcctgaagatctgctattttgtcaggtattggataacagaattctggatcatgttcaagatggatgccagcttgaccagcaccatggaagagttccaagacctggtgaaagccaatggtgaggagacccactgccacctcatcgacacgacccaaattaattctcgagactggtccaggaaactgactcagaggataaaatcgaatactagcaagaagcgcaaagtgtccctgctgtttgaccatctggaacctgaagaactgtctgaacacctcacctaccttgagttcaagtccttccgacggatatctttctctgattaccaaaattaccttgtaaatagctgcgtaaaagagaaccccaccatggagaggtccattgccctgtgcaatggcatctcccagtgggtacaactgatggttctcagccgtcccaccccgcagctccgggcagaggtcttcatcaagttcatccatgtggctcagaaactccaccagctacagaacttcaacacgctgatggctgtgatcgggggactgtgtcacagctccatctccaggcttaaggaaacaagttcacatgtcccacatgagatcaataaggttctgggcgagatgactgaactgctgtcctcctgcagaaactatgacaactacaggcgagcctatggggagtgcacccacttcaaaatccccatactgggtgtgcacctcaaggacctcatatccctgtatgaggctatgcccgactatctggaagatgggaaggtgaatgtccaaaagctcctggccctttacaatcatatcaatgaattggtccagctgcaggagatggccccaccattggatgccaacaaggacttggtgcatctgctgacgttatccctggatctatactatacagaagatgaaatctatgagctttcctatgcccgggagccgaggaaccacagagctccgccactgacaccttcgaagccaccagttgtagtagactgggcctctggagtgtctcccaaacctgacccaaagaccatcagcaaacacgtccaaaggatggtggattctgtctttaagaactatgatctcgaccaggatggctatatctctcaggaggagtttgagaagatcgctgcaagctttccattttccttctgtgtgatggacaaagatagggaaggcctcatcagcagagacgagatcacggcctacttcatgagggccagctccatctattccaagctgggcctgggctttccacacaactttcaagaaaccacttacctgaagcccaccttctgtgacaactgtgctggctttctctggggcgtgatcaagcaaggctatcgctgtaaagactgcgggatgaactgccacaaacagtgcaaagacctggtggtgttcgagtgcaagaagcgaatcaagagcccagcaatatccacagagaacatcagctctgtggtaccaatgtccaccctttgtccactgggaaccaaagatctgctccatgcacccgaagaaggatctttcattttccaaaacggagagattgtggaccacagtgaggagagcaaggataggaccatcatgctcctcggagtgtcctcccagaaaatttcagttcggctgaagaggactgttgcccacaagagcacccaaacagaatcgttcccgtgggttggtggcgagacgacccctggtcactttgtgctgtcttctccaaggaagtcggcgcagggcgctctttatgtgcacagtccagcatctccatgccccagcccagcactggtccgaaagcgggcattcgtcaagtgggagaacaaagagtcccttataaaaccaaaaccagaacttcacctccggctccggacctaccaagaactggaacaggaaataaataccctgaaagcagataacgatgctctgaagatccaactgaagtacgcacagaagaaaatagaatccctgcagcttgggaaaagcaatcatgtcttagcccagatggaccacggtgatagtgcttaatccagaatttcaaggaccagaatctgcagacgggtttactgggatgtcgac

SEQ ID NO: 21 - DNA, 2451 bp, Mus musculus; identical to SEQ ID NO: 20

(The sequence listing continues in the following parts.)

We claim:

1. A recombinant nucleic acid comprising a nucleotide sequence selected from the group consisting of the sequences outlined in Tables 1-40.

2. A host cell comprising the recombinant nucleic acid of claim 1.

3. An expression vector comprising the recombinant nucleic acid according to claim 2.

4. A host cell comprising the expression vector of claim 3.

5. A recombinant protein comprising an amino acid sequence encoded by a nucleic acid sequence comprising a sequence selected from the group consisting of the sequences outlined in Tables 1-40.

6. A method of screening drug candidates comprising:
a) providing a cell that expresses a carcinoma associated (CA) gene comprising a nucleic acid sequence selected from the group consisting of the sequences outlined in Tables 1-40 or fragment thereof;
b) adding a drug candidate to said cell; and
c) determining the effect of said drug candidate on the expression of said CA gene.

7. A method according to claim 6 wherein said determining comprises comparing the level of expression in the absence of said drug candidate to the level of expression in the presence of said drug candidate.

8. A method of screening for a bioactive agent capable of binding to an CA protein (CAP), wherein said CAP is encoded by a nucleic acid comprising a nucleic acid sequence selected from the group consisting of the sequences outlined in Tables 1-40, said method comprising:
a) combining said CAP and a candidate bioactive agent; and
b) determining the binding of said candidate agent to said CAP.

9. A method for screening for a bioactive agent capable of modulating the activity of an CA protein (CAP), wherein said CAP is encoded by a nucleic acid comprising a nucleic acid sequence selected from the group consisting of the sequences outlined in Tables 1-40, said method comprising:
a) combining said CAP and a candidate bioactive agent; and
b) determining the effect of said candidate agent on the bioactivity of said CAP.

10. A method of evaluating the effect of a candidate carcinoma drug comprising:
a) administering said drug to a patient;
b) removing a cell sample from said patient; and
c) determining alterations in the expression or activation of a gene comprising a nucleic acid sequence selected from the group consisting of the sequences outlined in Tables 1-40.

11. A method of diagnosing carcinoma comprising:
a) determining the expression of one or more genes comprising a nucleic acid sequence selected from the group consisting of the sequences outlined in Tables 1-40, in a first tissue type of a first individual; and
b) comparing said expression of said gene(s) from a second normal tissue type from said first individual or a second unaffected individual;
wherein a difference in said expression indicates that the first individual has carcinoma.

12. A method for inhibiting the activity of a CA protein (CAP), wherein said CAP is encoded by a nucleic acid comprising a nucleic acid sequence selected from the group consisting of the sequences outlined in Tables 1-40, said method comprising binding an inhibitor to said CAP.

13. A method of treating carcinomas comprising administering to a patient an inhibitor of an CA protein (CAP), wherein said CAP is encoded by a nucleic acid comprising a nucleic acid sequence selected from the group consisting of the sequences outlined in Tables 1-40.

14. A method of neutralizing the effect of an CA protein (CAP), wherein said CAP is encoded by a nucleic acid comprising a nucleic acid sequence selected from the group consisting of the sequences outlined in Tables 1-40, comprising contacting an agent specific for said CAP protein with said CAP protein in an amount sufficient to effect neutralization.

15. A polypeptide which specifically binds to a protein encoded by a nucleic acid comprising a nucleic acid selected from the group consisting of the sequences outlined in Tables 1-40.

16. A polypeptide according to claim 15 comprising an antibody which specifically binds to a protein encoded by a nucleic acid comprising a nucleic acid sequence selected from the group consisting of the sequences outlined in Tables 1-40.

17. A biochip comprising one or more nucleic acid segments selected from the group consisting of a nucleic acid of the sequences outlined in Tables 1-40 or fragments thereof.

18. A method of diagnosing carcinoma or a propensity to carcinoma by sequencing at least one CA gene of an individual.

19. A method of determining CA gene copy number comprising adding an CA gene probe to a sample of genomic DNA from an individual under conditions suitable for hybridization.
